(19) United States
(12) Patent Application Publication
(10) Pub. No.: US 2025/0326823 A1
(43) Pub. Date: Oct. 23, 2025

(54) Antigen Binding Polypeptides, Polypeptide Complexes and Methods of Use Thereof

(71) Applicants: ModeX Therapeutics, Inc., Weston, MA (US); The United States of America, as Represented by the Secretary, Dept. of Health and Human Services, Bethesda, MD (US)

(72) Inventors: Juan LI, Waltham, MA (US); Peng HE, Sharon, MA (US); Chih-Jen WEI, Weston, MA (US); Gary J. NABEL, Delray Beach, FL (US); John R. MASCOLA, Rockville, MD (US); Heather Dawn KAMP, Westwood, MA (US); Manjie HUANG, Medford, MA (US); John MISASI, Kensington, MD (US); Amarendra PEGU, Potomac, MD (US); Lingshu WANG, Bethesda, MD (US); Tongqing ZHOU, Bethesda, MD (US); Nicole DORIA-ROSE, Bethesda, MD (US); Eun Sung YANG, Bethesda, MD (US); Wei SHI, Bethesda, MD (US); Qi QIU, Bethesda, MD (US); Qiong ZHOU, Bethesda, MD (US); Peter D. KWONG, Washington, DC (US); Richard A. KOUP, Bethesda, MD (US); Theodore PIERSON, Bethesda, MD (US); Nancy J. SULLIVAN, Boston, MA (US)

(21) Appl. No.: 19/170,000

(22) Filed: Apr. 3, 2025

Related U.S. Application Data
(60) Provisional application No. 63/574,175, filed on Apr. 3, 2024.

(51) Int. Cl. C07K 16/10; C07K 16/30

(52) U.S. Cl. CPC C07K 16/1003; C07K 16/30; C07K 2317/31

(57) ABSTRACT

Disclosed are antigen binding polypeptides and antigen binding polypeptide complexes (e.g., antibodies and antigen binding fragments thereof) having certain structural features. Also disclosed are polynucleotides and vectors encoding such polypeptides and polypeptide complexes; host cells, pharmaceutical compositions and kits containing such polypeptides and polypeptide complexes; and methods of using such polypeptides and polypeptide complexes.

### CROSS-REFERENCE TO RELATED APPLICATION

[0001] This application claims priority benefit to U.S. Provisional Appl. No. 63/574,175, filed Apr. 3, 2024, the contents of which are hereby incorporated by reference in its entirety.

### STATEMENT REGARDING FEDERALLY SPONSORED RESEARCH OR DEVELOPMENT

[0002] This invention was made in the performance of a Cooperative Research and Development Agreement with the National Institutes of Health, an Agency of the Department of Health and Human Services. The Government has certain rights in this invention.

### REFERENCE TO SEQUENCE LISTING SUBMITTED ELECTRONICALLY

[0003] The content of the electronically submitted Sequence Listing XML (Name: 4850_0150001_SequenceListing_ST26.xml; Size: 2,631,424 bytes; and Date of Creation: Apr. 2, 2025), filed with the application, is incorporated herein by reference in its entirety.

### FIELD OF THE INVENTION

[0004] The present disclosure relates to anti-severe acute respiratory syndrome coronavirus 2 (anti-SARS-CoV-2) antigen binding polypeptides and polypeptide complexes (e.g., antibodies and antigen binding fragments thereof) having certain structural features. The present disclosure further relates to antigen binding polypeptides and polypeptide complexes (e.g., antibodies and antigen binding fragments thereof), having certain structural features, which have the ability to bind to one or more antigens, such as infectious disease antigens (including viral antigens (including viral antigens that are not sarbecovirus antigens), bacterial antigens, and parasite antigens); tumor-associated antigens; or antigens associated with pathologies other than infectious diseases and cancer/tumor. The present disclosure also relates to polynucleotides and vectors encoding such polypeptides and polypeptide complexes; host cells; pharmaceutical compositions and kits containing such polypeptides and polypeptide complexes; and methods of using such polypeptides and polypeptide complexes.

### BACKGROUND

[0005] The outbreak of severe acute respiratory syndrome coronavirus (SARS-CoV-2) has caused over 450 million infections and over 6.9 million deaths worldwide. SARS-CoV-2 is the strain of coronavirus that causes COVID-19 (coronavirus disease 2019). Sequencing and publication of the original Wuhan Hu-1 (WA-1) genome enabled rapid vaccine design and production of spike proteins for therapeutic antibody development. However, persistent circulation of viruses during human pandemics leads to genetic variation that resists containment and eradication. While cellular and humoral immune responses are needed for optimal protection against viral infection, neutralizing antibodies play a major role in prevention and eradication of pathogens.

[0006] SARS-CoV-2 spike protein mutants and SARS-CoV-2 variants D614G spike protein mutant (e.g., D614G). Alpha variant (e.g., B.1.1.7). Beta variant (e.g., B.1.351). Gamma variant (e.g., P.1). Delta variant (e.g., B.1.617.2 or AY.1). Kappa variant (e.g., B.1.617.1). Iota variant (e.g., B.1.526). Lambda variant (e.g., C.37). Epsilon variant (e.g., B.1.427), Mu variant (e.g., B.1.621). Theta variant. Zeta variant. R.1 variant. C.1.2 variant, and Omicron variant (e.g., B.1.1.529, BA.1, BA.2, BA.2.12.1, BA.4, BA.4/5, BA.5, BQ.1, BQ.1.1, BA.2.75, BA.2.75.2, BA.4.6, BQ.1.1, BJ.1, XBB, XBB1.5, BF.7, CH.1.1, BA.2.86, EG.5, JN.1, JD.1, EG.5.1, FL.1.5.1, HK.3, HV.1, JD.1.1, JF.1, XBB.1, XBB.1.16, XBB.1.16.6, XBB.2.3.2, JN.1.13.1, KP.2, JN.1.16, JN.1.16.1, JN.1.13, JN.1.18, KP.2.3, LB.1, KP.3, or KP.3.1.1) have emerged to contain mutations that are resistant to current therapies, have increased pathogenicity, and evade current vaccines. This led to their classification as variants of concern (VOCs).

[0007] Therapeutic antibodies have emerged as an important class of agents for treating human diseases and disorders. Therapeutic antibodies have been engineered to have specificity for one or two or more different antigens or epitopes. “Monospecific” antibodies, including engineered monospecific antibodies, are antibodies that have specificity for one antigen or epitope. “Multispecific” antibodies are, for example, bispecific, trispecific, or tetraspecific antibodies, which are antibodies that have been engineered to have specificity for two, three, or four different antigens or epitopes, respectively. Monospecific and multispecific antibodies have been used to form multi-targeting strategies to treat human diseases and disorders, and are an important technological platform for developing neutralizing antibody-based therapeutics for preventing and treating SARS-CoV-2 infection and COVID-19.

[0008] There is a need for improved therapies to prevent and treat SARS-CoV-2 infection and COVID-19. There is a need for therapeutic antibodies with broad VOC reactivity and resistance to SARS-CoV-2 escape. There is also a need for therapeutic antibodies that are easier to manufacture and administer than current therapeutic antibody cocktails. There is also a need to treat or prevent SARS-CoV-2 infection and COVID-19 in immunocompromised individuals who cannot mount an effective immune response through vaccinations.

[0009] Therapeutic antibodies have emerged as an important class of agents for treating human diseases and disorders. Therapeutic antibodies have been engineered to have specificity for one or two or more different antigens or epitopes. “Monospecific” antibodies, including engineered monospecific antibodies, are antibodies that have specificity for one antigen or epitope. “Multispecific” antibodies are, for example, bispecific, trispecific, or tetraspecific antibodies, which are antibodies that have been engineered to have specificity for two, three, or four different antigens or epitopes, respectively. Monospecific and multispecific antibodies have been used to form multi-targeting strategies to treat human pathologies, and are an important technological platform for developing antibody-based therapeutics for preventing and treating pathologies, such as infectious diseases (such as viral infections (including non-sarbecovirus infections), bacterial infections, and parasite infections): cancers/tumors; and pathologies other than infectious diseases and cancers/tumors.

[0010] There is a need for improved therapies to prevent and treat pathologies. There is also a need for therapeutic antibodies that are easier to manufacture and administer than current therapeutic antibody cocktails. There is also a need to treat or prevent pathologies in immunocompromised individuals who cannot mount an effective immune response through vaccinations.

### BRIEF SUMMARY

[0011] Provided herein is an antigen binding polypeptide having a structure, from amino-terminus to carboxy-terminus, represented by: VL1-L1-CL-L2-VL2-L3-VH2-L4-VH1-L5-CH1; VL1-L1-CL-L2-VH2-L3-VL2-L4-VH1-L5-CH1; VL1-L1-CH1-L2-VL2-L3-VH2-L4-VH1-L5-CL; VL1-L1-CH1-L2- VH2-L3-VL2-L4-VH1-L5-CL; VH1-L1-CL-L2-VL2-L3-VH2-L4-VL1-L5-CH1; VH1-L1-CL-L2-VH2-L3-VL2-L4-VL1-L5-CH1; VH1-L1-CH1-L2-VL2-L3-VH2-L4-VL1-L5-CL; VH1-L1-CH1-L2-VH2-L3- VL2-L4-VL1-L5-CL; VL2-L1-CL-L2-VL1-L3-VH1-L4-VH2-L5-CH1; VL2-L1-CL-L2-VH1-L3-VL1-L4-VH2-L5-CH1; VL2-L1-CH1-L2-VL1-L3-VH1-L4-VH2-L5-CL; VL2-L1-CH1-L2-VH1-L3-VL1-L4-VH2-L5-CL; VH2-L1-CL-L2-VL1-L3-VH1-L4-VL2-L5-CH1; VH2-L1-CL-L2-VH1-L3-VL1-L4-VL2-L5-CH1; VH2-L1-CH1-L2-VL1-L3-VH1-L4-VL2-L5-CL; or VH2-L1-CH1-L2-VH1-L3-VL1-L4-VL2-L5-CL; wherein: VL1 is a first immunoglobulin light chain variable region that specifically binds to a severe acute respiratory syndrome coronavirus 2 (SARS-CoV-2) protein; VL2 is a second immunoglobulin light chain variable region that specifically binds to a SARS-CoV-2 protein; VH1 is a first immunoglobulin heavy chain variable region that specifically binds to a SARS-CoV-2 protein; VH2 is a second immunoglobulin heavy chain variable region that specifically binds to a SARS-CoV-2 protein; CL is an immunoglobulin light chain constant region; CH1 is an immunoglobulin heavy chain constant region 1; and L1-L5 are optional amino acid linkers.

[0012] Also provided herein is an antigen binding polypeptide having a structure, from amino-terminus to carboxy-terminus, represented by: VL1-CL-L1-VL2-L2-VH2-L3-VH1-CH1; VL1-CL-L1-VH2-L2-VL2-L3-VH1-CH1; VL1-CH1-L1-VL2-L2-VH2-L3-VH1-CL; VL1-CH1-L1-VH2-L2-VL2-L3-VH1-CL; VH1-CL-L1-VL2-L2-VH2-L3-VL1-CH1; VH1-CL-L1-VH2-L2-VL2-L3-VL1-CH1; VH1-CH1-L1-VL2-L2-VH2-L3-VL1-CL; VH1-CH1-L1-VH2-L2-VL2-L3-VL1-CL; VL2-CL-L1-VL1-L2-VH1-L3-VH2-CH1; VL2-CL-L1-VH1-L2-VL1-L3-VH2-CH1; VL2-CH1-L1-VL1-L2-VH1-L3-VH2-CL; VL2-CH1-L1-VH1-L2-VL1-L3-VH2-CL; VH2-CL-L1-VL1-L2-VH1-L3-VL2-CH1; VH2-CL-L1-VH1-L2-VL1-L3-VL2-CH1; VH2-CH1-L1-VL1-L2-VH1-L3-VL2-CL; or VH2-CH1-L1-VH1-L2-VL1-L3-VL2-CL; wherein: VL1 is a first immunoglobulin light chain variable region that specifically binds to a severe acute respiratory syndrome coronavirus 2 (SARS-CoV-2) protein; VL2 is a second immunoglobulin light chain variable region that specifically binds to a SARS-CoV-2 protein; VH1 is a first immunoglobulin heavy chain variable region that specifically binds to a SARS-CoV-2 protein; VH2 is a second immunoglobulin heavy chain variable region that specifically binds to a SARS-CoV-2 protein; CL is an immunoglobulin light chain constant region; CH1 is an immunoglobulin heavy chain constant region 1; and L1-L3 are amino acid linkers

[0013] Also provided herein is an antigen binding polypeptide having a structure, from amino-terminus to carboxy-terminus, represented by: VL1-L1-VH1-L2-VL2-L3-CL-L4-VH2-L5-CH1; VL1-L1-VH1-L2-VL2-L3-CH1-L4-VH2-L5-CL; VL1-L1-VH1-L2-VH2-L3-CL-L4-VL2-L5-CH1; VL1-L1-VH1-L2-VH2-L3-CH1-L4-VL2-L5-CL; VL1-L1-VL2-L2-VH1-L3-CL-L4-VH2-L5-CH1; VL1-L1-VL2-L2-VH1-L3-CH1-L4-VH2-L5-CL; VL1-L1-VH2-L2-VH1-L3-CL-L4-VL2-L5-CH1; VL1-L1-VH2-L2-VH1-L3-CH1-L4-VL2-L5-CL; VH1-L1-VL1-L2-VL2-L3-CL-L4-VH2-L5-CH1; VH1-L1-VL1-L2-VL2-L3-CH1-L4-VH2-L5-CL; VH1-L1-VL1-L2-VH2-L3-CL-L4-VL2-L5-CH1; VH1-L1-VL1-L2-VH2-L3-CH1-L4-VL2-L5-CL; VH1-L1-VL2-L2-VL1-L3-CL-L4-VH2-L5-CH1; VH1-L1-VL2-L2-VL1-L3-CH1-L4-VH2-L5-CL; VH1-L1-VH2-L2-VL1-L3-CL-L4-VL2-L5-CH1; VH1-L1-VH2-L2-VL1-L3-CH1-L4-VL2-L5- CL; VL2-L1-VL1-L2-VH2-L3-CL-L4-VH1-L5-CH1; VL2-L1-VL1-L2-VH2-L3-CH1-L4-VH1-L5-CL; VL2-L1-VH1-L2-VH2-L3-CL-L4-VL1-L5-CH1; VL2-L1-VH1-L2-VH2-L3-CH1-L4-VL1-L5-CL; VL2-L1-VH2-L2-VL1-L3-CL-L4-VH1-L5-CH1; VL2-L1-VH2-L2-VL1-L3-CH1-L4-VH1-L5-CL; VL2-L1-VH2-L2-VH1-L3-CL-L4-VL1-L5-CH1; VL2-L1-VH2-L2-VH1-L3-CH1-L4-VL1-L5-CL; VH2-L1-VL1-L2-VL2-L3-CL-L4-VH1-L5-CH1; VH2-L1-VL1-L2-VL2-L3-CH1-L4-VH1-L5-CL; VH2-L1-VH1-L2-VL2-L3-CL-L4-VL1-L5-CH1; VH2-L1-VH1-L2-VL2-L3-CH1-L4-VL1-L5-CL; VH2-L1-VL2-L2-VL1-L3-CL-L4-VH1-L5-CH1; VH2-L1-VL2-L2-VL1-L3-CH1-L4-VH1-L5-CL; VH2-L1-VL2-L2-VH1-L3-CL-L4-VL1-L5-CH1; or VH2-L1-VL2-L2-VH1-L3-CH1-L4-VL1-L5-CL; wherein: VL1 is a first immunoglobulin light chain variable region that specifically binds to a severe acute respiratory syndrome coronavirus 2 (SARS-CoV-2) protein; VL2 is a second immunoglobulin light chain variable region that specifically binds to a SARS-CoV-2 protein; VH1 is a first immunoglobulin heavy chain variable region that specifically binds to a SARS-CoV-2 protein; VH2 is a second immunoglobulin heavy chain variable region that specifically binds to a SARS-CoV-2 protein; CL is an immunoglobulin light chain constant region; CH1 is an immunoglobulin heavy chain constant region 1; and L1-L5 are optional amino acid linkers.

[0014] Also provided herein is an antigen binding polypeptide having a structure, from amino-terminus to carboxy-terminus, represented by: VL1-L1-CL-L2-VH1-L3-CH1-L4-VL2-L5-VH2; VL1-L1-CL-L2-VH1-L3-CH1-L4-VH2-L5-VL2; VL1-L1-CL-L2-VL2-L3-CH1-L4-VH1-L5-VH2; VL1-L1-CL-L2-VH2-L3-CH1-L4-VH1-L5-VL2; VL1-L1-CH1-L2-VH1-L3-CL-L4-VL2-L5-VH2; VL1-L1-CH1-L2-VH1-L3-CL-L4-VH2-L5-VL2; VL1-L1-CH1-L2-VL2-L3-CL-L4-VH1-L5-VH2; VL1-L1-CH1-L2-VH2-L3-CL- L4-VH1-L5-VL2; VH1-L1-CL-L2-VL1-L3-CH1-L4-VL2-L5-VH2; VH1-L1-CL-L2-VL1-L3-CH1-L4-VH2-L5-VL2; VH1-L1-CL-L2-VL2-L3-CH1-L4-VL1-L5-VH2; VH1-L1-CL-L2-VH2-L3-CH1-L4-VL1-L5-VL2; VH1-L1-CH1-L2-VL1-L3-CL-L4-VL2-L5-VH2; VH1-L1-CH1-L2-VL1-L3-CL-L4-VH2-L5-VL2; VH1-L1-CH1-L2-VL2-L3-CL-L4-VL1-L5-VH2; VH1-L1-CH1-L2-VH2-L3-CL-L4-VL1-L5-VL2; VL2-L1-CL-L2-VL1-L3-CH1-L4-VH2-L5-VH1; VL2-L1-CL-L2-VH1-L3-CH1-L4-VH2-L5-VL1; VL2-L1-CL-L2-VH2-L3-CH1-L4-VL1-L5-VH1; VL2-L1-CL-L2-VH2-L3-CH1-L4-VH1-L5-VL1; VL2-L1-CH1-L2-VL1-L3-CL-L4-VH2-L5-VH1; VL2-L1-CH1-L2-VH1-L3-CL-L4-VH2-L5-VL1; VL2-L1-CH1-L2-VH2-L3-CL-L4-VL1-L5-VH1; VL2-L1-CH1-L2-VH2-L3-CL-L4-VH1-L5-VL1; VH2-L1-CL-L2-VL1-L3-CH1-L4-VL2-L5-VH1; VH2-L1-CL-L2-VH1-L3-CH1-L4-VL2-L5-VL1; VH2-L1-CL-L2-VL2-L3-CH1-L4-VL1-L5-VH1; VH2-L1-CL-L2-VL2-L3-CH1-L4-VH1-L5-VL1; VH2-L1-CH1-L2-VL1-L3-CL-L4-VL2-L5-VH1; VH2-L1-CH1-L2-VH1-L3-CL-L4-VL2-L5-VL1; VH2-L1-CH1-L2-VL2-L3-CL-L4-VL1-L5-VH1; or VH2-L1-CH1-L2-VL2-L3-CL-L4-VH1-L5-VL1; wherein: VL1 is a first immunoglobulin light chain variable region that specifically binds to a severe acute respiratory syndrome coronavirus 2 (SARS-CoV-2) protein; VL2 is a second immunoglobulin light chain variable region that specifically binds to a SARS-CoV-2 protein; VH1 is a first immunoglobulin heavy chain variable region that specifically binds to a SARS-CoV-2 protein; VH2 is a second immunoglobulin heavy chain variable region that specifically binds to a SARS-CoV-2 protein; CL is an immunoglobulin light chain constant region; CH1 is an immunoglobulin heavy chain constant region 1; and L1-L5 are optional amino acid linkers.

[0015] In some aspects and in any one of the formulas depicted herein (a) VL1 comprises: (i) a complementarity determining region (CDR) 1 having an amino acid sequence that is at least 65%, at least 70%, at least 75%, at least 80%, at least 85%, at least 90%, at least 95%, at least 99%, or 100% identical to any one of SEQ ID NOs: 1, 9, 15, 23, 30, 41, 48, 55, 58, 65, 72, 79, 86, 93, 99, 105, 112, 119, 130, 138, 145, 152, 159, 166, 172, 179, 186, 192, 199, 205, 212, 219, 226, 232, 324, 627, 770, 778, 785, 794, 801, 807, 814, 827, 836, 849, 858, 865, 878, 1045, 1050, 1055, 1060, and 1065; (ii) a CDR2 having an amino acid sequence that is at least 65%, at least 70%, at least 75%, at least 80%, at least 85%, at least 90%, at least 95%, at least 99%, or 100% identical to any one of SEQ ID NOs: 2, 31, 628, 1046, 1051, 1056, and 1061, or at least 65%, at least 70%, at least 75%, at least 80%, at least 85%, at least 90%, at least 95%, at least 99%, or 100% identical to any one of amino acid sequences AAS, GAS, LGS, GTN, GTN, SAS, SDS, DNT, EVT, DAS, DVT, RNS, DVS, EDS, DDS, KDS, NNN, SYN, WAS, and DAT; and (iii) a CDR3 having an amino acid sequence that is at least 65%, at least 70%, at least 75%, at least 80%, at least 85%, at least 90%, at least 95%, at least 99%, or 100% identical to any one of SEQ ID NOs: 3, 10, 16, 24, 32, 38, 42, 49, 59, 66, 73, 80, 87, 94, 100, 106, 113, 120, 126, 131, 139, 146, 153, 160, 167, 173, 180, 187, 193, 200, 206, 213, 220, 227, 233, 239, 242, 246, 249, 256, 283, 285, 287, 288, 290, 292, 294, 296, 301, 304, 306, 309, 311, 313, 316, 325, 326, 329, 764, 766, 768, 771, 779, 786, 792, 795, 808, 815, 821, 830, 837, 843, 850, 856, 859, 866, 872, 879, 885, and 1066; (b) VH1 comprises (i) a CDR1 having an amino acid sequence that is at least 65%, at least 70%, at least 75%, at least 80%, at least 85%, at least 90%, at least 95%, at least 99%, or 100% identical to any one of SEQ ID NOs: 5, 12, 18, 26, 34, 44, 51, 61, 68, 75, 82, 89, 96, 102, 108, 115, 122, 133, 141, 148, 155, 162, 175, 182, 189, 195, 202, 208, 215, 222, 229, 235, 318, 629, 773, 781, 788, 797, 803, 810, 817, 823, 832, 839, 845, 852, 861, 868, 874, 881, 1047, 1052, 1057, 1062, and 1067; (ii) a CDR2 having an amino acid sequence that is at least 65%, at least 70%, at least 75%, at least 80%, at least 85%, at least 90%, at least 95%, at least 99%, or 100% identical to any one of SEQ ID NOs: 6, 19, 27, 35, 45, 52, 56, 62, 69, 76, 83, 90, 109, 116, 123, 134, 142, 149, 156, 163, 169, 176, 183, 196, 209, 216, 223, 236, 273, 319, 328, 630, 776, 782, 789, 798, 804, 811, 818, 824, 833, 840, 846, 853, 862, 869, 875, 882, 1048, 1053, 1058, 1063, and 1068; and (iii) a CDR3 having an amino acid sequence that is at least 65%, at least 70%, at least 75%, at least 80%, at least 85%, at least 90%, at least 95%, at least 99%, or 100% identical to any one of SEQ ID NOs: 7, 13, 20, 28, 36, 40, 46, 53, 63, 70, 77, 84, 91, 97, 103, 110, 117, 124, 128, 135, 143, 150, 157, 164, 170, 177, 184, 190, 197, 203, 210, 217, 224, 230, 237, 241, 244, 248, 253, 257, 259, 261, 263, 265, 267, 269, 271, 274, 276, 278, 281, 297, 320, 322, 327, 330, 332, 631, 765, 767, 769, 774, 783, 790, 793, 799, 805, 812, 819, 825, 834, 841, 847, 854, 857, 863, 870, 876, 883, 886, 1049, 1054, 1059, 1064, and 1069; (c) VL2 comprises (i) a complementarity determining region (CDR) 1 having an amino acid sequence that is at least 65%, at least 70%, at least 75%, at least 80%, at least 85%, at least 90%, at least 95%, at least 99%, or 100% identical to any one of SEQ ID NOs: 1, 9, 15, 23, 30, 41, 48, 55, 58, 65, 72, 79, 86, 93, 99, 105, 112, 119, 130, 138, 145, 152, 159, 166, 172, 179, 186, 192, 199, 205, 212, 219, 226, 232, 324, 627, 770, 778, 785, 794, 801, 807, 814, 827, 836, 849, 858, 865, 878, 1045, 1050, 1055, 1060, and 1065; (ii) a CDR2 having an amino acid sequence that is at least 65%, at least 70%, at least 75%, at least 80%, at least 85%, at least 90%, at least 95%, at least 99%, or 100% identical to any one of SEQ ID NOs: 2, 31, 628, 1046, 1051, 1056, and 1061, or at least 65%, at least 70%, at least 75%, at least 80%, at least 85%, at least 90%, at least 95%, at least 99%, or 100% identical to any one of amino acid sequences AAS, GAS, LGS, GTN, GTN, SAS, SDS, DNT, EVT, DAS, DVT, RNS, DVS, EDS, DDS, KDS, NNN, SYN, WAS, and DAT; and (iii) a CDR3 having an amino acid sequence that is at least 65%, at least 70%, at least 75%, at least 80%, at least 85%, at least 90%, at least 95%, at least 99%, or 100% identical to any one of SEQ ID NOs: 3, 10, 16, 24, 32, 38, 42, 49, 59, 66, 73, 80, 87, 94, 100, 106, 113, 120, 126, 131, 139, 146, 153, 160, 167, 173, 180, 187, 193, 200, 206, 213, 220, 227, 233, 239, 242, 246, 249, 256, 283, 285, 287, 288, 290, 292, 294, 296, 301, 304, 306, 309, 311, 313, 316, 325, 326, 329, 764, 766, 768, 771, 779, 786, 792, 795, 808, 815, 821, 830, 837, 843, 850, 856, 859, 866, 872, 879, 885, and 1066; and (d) VH2 comprises (i) a CDR1 having an amino acid sequence that is at least 65%, at least 70%, at least 75%, at least 80%, at least 85%, at least 90%, at least 95%, at least 99%, or 100% identical to any one of SEQ ID NOs: 5, 12, 18, 26, 34, 44, 51, 61, 68, 75, 82, 89, 96, 102, 108, 115, 122, 133, 141, 148, 155, 162, 175, 182, 189, 195, 202, 208, 215, 222, 229, 235, 318, 629, 773, 781, 788, 797, 803, 810, 817, 823, 832, 839, 845, 852, 861, 868, 874, 881, 1047, 1052, 1057, 1062, and 1067; (ii) a CDR2 having an amino acid sequence that is at least 65%, at least 70%, at least 75%, at least 80%, at least 85%, at least 90%, at least 95%, at least 99%, or 100% identical to any one of SEQ ID NOs: 6, 19, 27, 35, 45, 52, 56, 62, 69, 76, 83, 90, 109, 116, 123, 134, 142, 149, 156, 163, 169, 176, 183, 196, 209, 216, 223, 236, 273, 319, 328, 630, 776, 782, 789, 798, 804, 811, 818, 824, 833, 840, 846, 853, 862, 869, 875, 882, 1048, 1053, 1058, 1063, and 1068; and (iii) a CDR3 having an amino acid sequence that is at least 65%, at least 70%, at least 75%, at least 80%, at least 85%, at least 90%, at least 95%, at least 99%, or 100% identical to any one of SEQ ID NOs: 7, 13, 20, 28, 36, 40, 46, 53, 63, 70, 77, 84, 91, 97, 103, 110, 117, 124, 128, 135, 143, 150, 157, 164, 170, 177, 184, 190, 197, 203, 210, 217, 224, 230, 237, 241, 244, 248, 253, 257, 259, 261, 263, 265, 267, 269, 271, 274, 276, 278, 281, 297, 320, 322, 327, 330, 332, 631, 765, 767, 769, 774, 783, 790, 793, 799, 805, 812, 819, 825, 834, 841, 847, 854, 857, 863, 870, 876, 883, 886, 1049, 1054, 1059, 1064, and 1069.

[0016] In some aspects and in any one of the formulas depicted herein (a) VL1 comprises an amino acid sequence that is at least 65%, at least 70%, at least 75%, at least 80%, at least 85%, at least 90%, at least 95%, at least 99%, or 100% identical to any one of SEQ ID NOs: 4, 11, 17, 25, 33, 39, 43, 50, 60, 67, 74, 81, 88, 95, 101, 107, 114, 121, 127, 132, 140, 147, 154, 161, 168, 174, 181, 188, 194, 201, 207, 214, 221, 228, 234, 240, 243, 247, 250, 251, 252, 255, 284, 286, 289, 291, 293, 295, 299, 300, 302, 303, 305, 307, 308, 310, 312, 314, 315, 317, 323, 772, 780, 787, 796, 802, 809, 816, 822, 831, 838, 844, 851, 860, 867, 873, 880, and 988; (b) VH1 comprises an amino acid sequence that is at least 65%, at least 70%, at least 75%, at least 80%, at least 85%, at least 90%, at least 95%, at least 99%, or 100% identical to any one of SEQ ID NOs: 8, 14, 21, 22, 29, 37, 47, 54, 57, 64, 71, 78, 85, 92, 98, 104, 111, 118, 125, 129, 136, 137, 144, 151, 158, 165, 171, 178, 185, 191, 198, 204, 211, 218, 225, 231, 238, 245, 254, 258, 260, 262, 264, 266, 268, 270, 272, 275, 277, 279, 280, 282, 298, 321, 331, 626, 775, 777, 784, 791, 800, 806, 813, 820, 826, 835, 842, 848, 855, 864, 871, 877, and 884; (c) VL2 comprises an amino acid sequence that is at least 65%, at least 70%, at least 75%, at least 80%, at least 85%, at least 90%, at least 95%, at least 99%, or 100% identical to any one of SEQ ID NOs: 4, 11, 17, 25, 33, 39, 43, 50, 60, 67, 74, 81, 88, 95, 101, 107, 114, 121, 127, 132, 140, 147, 154, 161, 168, 174, 181, 188, 194, 201, 207, 214, 221, 228, 234, 240, 243, 247, 250, 251, 252, 255, 284, 286, 289, 291, 293, 295, 299, 300, 302, 303, 305, 307, 308, 310, 312, 314, 315, 317, 323, 772, 780, 787, 796, 802, 809, 816, 822, 831, 838, 844, 851, 860, 867, 873, 880, and 988; and (d) VH2 comprises an amino acid sequence that is at least 65%, at least 70%, at least 75%, at least 80%, at least 85%, at least 90%, at least 95%, at least 99%, or 100% identical to any one of SEQ ID NOs: 8, 14, 21, 22, 29, 37, 47, 54, 57, 64, 71, 78, 85, 92, 98, 104, 111, 118, 125, 129, 136, 137, 144, 151, 158, 165, 171, 178, 185, 191, 198, 204, 211, 218, 225, 231, 238, 245, 254, 258, 260, 262, 264, 266, 268, 270, 272, 275, 277, 279, 280, 282, 298, 321, 331, 626, 775, 777, 784, 791, 800, 806, 813, 820, 826, 835, 842, 848, 855, 864, 871, 877, and 884.

[0017] In some aspects and in any one of the formulas shown herein, (a) VL1 comprises a CDR1 having an amino acid sequence at least 65%, at least 70%, at least 75%, at least 80%, at least 85%, at least 90%, at least 95%, at least 99%, or 100% identical to SEQ ID NO: 15, a CDR2 having an amino acid sequence at least 65%, at least 70%, at least 75%, at least 80%, at least 85%, at least 90%, at least 95%, at least 99%, or 100% identical to amino acid sequence LGS, and a CDR3 having an amino acid sequence at least 65%, at least 70%, at least 75%, at least 80%, at least 85%, at least 90%, at least 95%, at least 99%, or 100% identical to SEQ ID NO: 16; (b) VL2 comprises a CDR1 having an amino acid sequence at least 65%, at least 70%, at least 75%, at least 80%, at least 85%, at least 90%, at least 95%, at least 99%, or 100% identical to SEQ ID NO: 23, a CDR2 having an amino acid sequence at least 65%, at least 70%, at least 75%, at least 80%, at least 85%, at least 90%, at least 95%, at least 99%, or 100% identical to amino acid sequence GTN, and a CDR3 having an amino acid sequence at least 65%, at least 70%, at least 75%, at least 80%, at least 85%, at least 90%, at least 95%, at least 99%, or 100% identical to SEQ ID NO: 24 or 325; (c) VH1 comprises a CDR1 having an amino acid sequence at least 65%, at least 70%, at least 75%, at least 80%, at least 85%, at least 90%, at least 95%, at least 99%, or 100% identical to SEQ ID NO: 18, a CDR2 having an amino acid sequence at least 65%, at least 70%, at least 75%, at least 80%, at least 85%, at least 90%, at least 95%, at least 99%, or 100% identical to SEQ ID NO: 19, and a CDR3 having an amino acid sequence at least 65%, at least 70%, at least 75%, at least 80%, at least 85%, at least 90%, at least 95%, at least 99%, or 100% identical to SEQ ID NO: 20; and (d) VH2 comprises a CDR1 having an amino acid sequence at least 65%, at least 70%, at least 75%, at least 80%, at least 85%, at least 90%, at least 95%, at least 99%, or 100% identical to SEQ ID NO: 26, a CDR2 having an amino acid sequence at least 65%, at least 70%, at least 75%, at least 80%, at least 85%, at least 90%, at least 95%, at least 99%, or 100% identical to SEQ ID NO: 27, and a CDR3 having an amino acid sequence at least 65%, at least 70%, at least 75%, at least 80%, at least 85%, at least 90%, at least 95%, at least 99%, or 100% identical to SEQ ID NO: 28 or 332.

[0018] In some aspects, (a) VL1 comprises an amino acid sequence that is at least 65%, at least 70%, at least 75%, at least 80%, at least 85%, at least 90%, at least 95%, at least 99%, or 100% identical to SEQ ID NO: 17; (b) VL2 comprises an amino acid sequence that is at least 65%, at least 70%, at least 75%, at least 80%, at least 85%, at least 90%, at least 95%, at least 99%, or 100% identical to SEQ ID NO: 25; (c) VH1 comprises an amino acid sequence that is at least 65%, at least 70%, at least 75%, at least 80%, at least 85%, at least 90%, at least 95%, at least 99%, or 100% identical to SEQ ID NO: 21 or 22; and (d) VH2 comprises an amino acid sequence that is at least 65%, at least 70%, at least 75%, at least 80%, at least 85%, at least 90%, at least 95%, at least 99%, or 100% identical to SEQ ID NO: 29.

[0019] In some aspects, (a) VL1 comprises a CDR1 having an amino acid sequence at least 65%, at least 70%, at least 75%, at least 80%, at least 85%, at least 90%, at least 95%, at least 99%, or 100% identical to SEQ ID NO: 15, a CDR2 having an amino acid sequence at least 65%, at least 70%, at least 75%, at least 80%, at least 85%, at least 90%, at least 95%, at least 99%, or 100% identical to amino acid sequence LGS, and a CDR3 having an amino acid sequence at least 65%, at least 70%, at least 75%, at least 80%, at least 85%, at least 90%, at least 95%, at least 99%, or 100% identical to SEQ ID NO: 16; (b) VL2 comprises a CDR1 having an amino acid sequence at least 65%, at least 70%, at least 75%, at least 80%, at least 85%, at least 90%, at least 95%, at least 99%, or 100% identical to SEQ ID NO: 9 or 1055, a CDR2 having an amino acid sequence at least 65%, at least 70%, at least 75%, at least 80%, at least 85%, at least 90%, at least 95%, at least 99%, or 100% identical to SEQ ID NO: 1056 or an amino acid sequence at least 65%, at least 70%, at least 75%, at least 80%, at least 85%, at least 90%, at least 95%, at least 99%, or 100% identical to amino acid sequence GAS, and a CDR3 having an amino acid sequence at least 65%, at least 70%, at least 75%, at least 80%, at least 85%, at least 90%, at least 95%, at least 99%, or 100% identical to SEQ ID NO: 10; (c) VH1 comprises a CDR1 having an amino acid sequence at least 65%, at least 70%, at least 75%, at least 80%, at least 85%, at least 90%, at least 95%, at least 99%, or 100% identical to SEQ ID NO: 18, a CDR2 having an amino acid sequence at least 65%, at least 70%, at least 75%, at least 80%, at least 85%, at least 90%, at least 95%, at least 99%, or 100% identical to SEQ ID NO: 19, and a CDR3 having an amino acid sequence at least 65%, at least 70%, at least 75%, at least 80%, at least 85%, at least 90%, at least 95%, at least 99%, or 100% identical to SEQ ID NO: 20; and (d) VH2 comprises a CDR1 having an amino acid sequence at least 65%, at least 70%, at least 75%, at least 80%, at least 85%, at least 90%, at least 95%, at least 99%, or 100% identical to SEQ ID NO: 12 or 1057, a CDR2 having an amino acid sequence at least 65%, at least 70%, at least 75%, at least 80%, at least 85%, at least 90%, at least 95%, at least 99%, or 100% identical to SEQ ID NO: 6 or 1058, and a CDR3 having an amino acid sequence at least 65%, at least 70%, at least 75%, at least 80%, at least 85%, at least 90%, at least 95%, at least 99%, or 100% identical to SEQ ID NO: 13 or 1059.

[0020] In some aspects, (a) VL1 comprises an amino acid sequence that is at least 65%, at least 70%, at least 75%, at least 80%, at least 85%, at least 90%, at least 95%, at least 99%, or 100% identical to SEQ ID NO: 17; (b) VL2 comprises an amino acid sequence that is at least 65%, at least 70%, at least 75%, at least 80%, at least 85%, at least 90%, at least 95%, at least 99%, or 100% identical to SEQ ID NO: 11; (c) VH1 comprises an amino acid sequence that is at least 65%, at least 70%, at least 75%, at least 80%, at least 85%, at least 90%, at least 95%, at least 99%, or 100% identical to SEQ ID NO: 21 or 22; and (d) VH2 comprises an amino acid sequence that is at least 65%, at least 70%, at least 75%, at least 80%, at least 85%, at least 90%, at least 95%, at least 99%, or 100% identical to SEQ ID NO: 14.

[0021] In some aspects, (a) VL1 comprises a CDR1 having an amino acid sequence at least 65%, at least 70%, at least 75%, at least 80%, at least 85%, at least 90%, at least 95%, at least 99%, or 100% identical to SEQ ID NO: 23, a CDR2 having an amino acid sequence at least 65%, at least 70%, at least 75%, at least 80%, at least 85%, at least 90%, at least 95%, at least 99%, or 100% identical to amino acid sequence GTN, and a CDR3 having an amino acid sequence at least 65%, at least 70%, at least 75%, at least 80%, at least 85%, at least 90%, at least 95%, at least 99%, or 100% identical to SEQ ID NO: 24 or 325; (b) VL2 comprises a CDR1 having an amino acid sequence at least 65%, at least 70%, at least 75%, at least 80%, at least 85%, at least 90%, at least 95%, at least 99%, or 100% identical to SEQ ID NO: 9 or 1055, a CDR2 having an amino acid sequence at least 65%, at least 70%, at least 75%, at least 80%, at least 85%, at least 90%, at least 95%, at least 99%, or 100% identical to SEQ ID NO: 1056 or an amino acid sequence at least 65%, at least 70%, at least 75%, at least 80%, at least 85%, at least 90%, at least 95%, at least 99%, or 100% identical to amino acid sequence GAS, and a CDR3 having an amino acid sequence at least 65%, at least 70%, at least 75%, at least 80%, at least 85%, at least 90%, at least 95%, at least 99%, or 100% identical to SEQ ID NO: 10; (c) VH1 comprises a CDR1 having an amino acid sequence at least 65%, at least 70%, at least 75%, at least 80%, at least 85%, at least 90%, at least 95%, at least 99%, or 100% identical to SEQ ID NO: 26, a CDR2 having an amino acid sequence at least 65%, at least 70%, at least 75%, at least 80%, at least 85%, at least 90%, at least 95%, at least 99%, or 100% identical to SEQ ID NO: 27, and a CDR3 having an amino acid sequence at least 65%, at least 70%, at least 75%, at least 80%, at least 85%, at least 90%, at least 95%, at least 99%, or 100% identical to SEQ ID NO: 28 or 332; and (d) VH2 comprises a CDR1 having an amino acid sequence at least 65%, at least 70%, at least 75%, at least 80%, at least 85%, at least 90%, at least 95%, at least 99%, or 100% identical to SEQ ID NO: 12 or 1057, a CDR2 having an amino acid sequence at least 65%, at least 70%, at least 75%, at least 80%, at least 85%, at least 90%, at least 95%, at least 99%, or 100% identical to SEQ ID NO: 6 or 1058, and a CDR3 having an amino acid sequence at least 65%, at least 70%, at least 75%, at least 80%, at least 85%, at least 90%, at least 95%, at least 99%, or 100% identical to SEQ ID NO: 13 or 1059.

[0022] In some aspects, (a) VL1 comprises an amino acid sequence that is at least 65%, at least 70%, at least 75%, at least 80%, at least 85%, at least 90%, at least 95%, at least 99%, or 100% identical to SEQ ID NO: 25; (b) VL2 comprises an amino acid sequence that is at least 65%, at least 70%, at least 75%, at least 80%, at least 85%, at least 90%, at least 95%, at least 99%, or 100% identical to SEQ ID NO: 11; (c) VH1 comprises an amino acid sequence that is at least 65%, at least 70%, at least 75%, at least 80%, at least 85%, at least 90%, at least 95%, at least 99%, or 100% identical to SEQ ID NO: 29; and (d) VH2 comprises an amino acid sequence that is at least 65%, at least 70%, at least 75%, at least 80%, at least 85%, at least 90%, at least 95%, at least 99%, or 100% identical to SEQ ID NO: 14.

[0023] In some aspects, (a) VL1 comprises a CDR1 having an amino acid sequence at least 65%, at least 70%, at least 75%, at least 80%, at least 85%, at least 90%, at least 95%, at least 99%, or 100% identical to SEQ ID NO: 23, a CDR2 having an amino acid sequence at least 65%, at least 70%, at least 75%, at least 80%, at least 85%, at least 90%, at least 95%, at least 99%, or 100% identical to amino acid sequence GTN, and a CDR3 having an amino acid sequence at least 65%, at least 70%, at least 75%, at least 80%, at least 85%, at least 90%, at least 95%, at least 99%, or 100% identical to SEQ ID NO: 24 or 325; (b) VL2 comprises a CDR1 having an amino acid sequence at least 65%, at least 70%, at least 75%, at least 80%, at least 85%, at least 90%, at least 95%, at least 99%, or 100% identical to SEQ ID NO: 1 or 324, a CDR2 having an amino acid sequence at least 65%, at least 70%, at least 75%, at least 80%, at least 85%, at least 90%, at least 95%, at least 99%, or 100% identical to SEQ ID NO: 2 or an amino acid sequence at least 65%, at least 70%, at least 75%, at least 80%, at least 85%, at least 90%, at least 95%, at least 99%, or 100% identical to amino acid sequence AAS, and a CDR3 having an amino acid sequence at least 65%, at least 70%, at least 75%, at least 80%, at least 85%, at least 90%, at least 95%, at least 99%, or 100% identical to SEQ ID NO: 3; (c) VH1 comprises a CDR1 having an amino acid sequence at least 65%, at least 70%, at least 75%, at least 80%, at least 85%, at least 90%, at least 95%, at least 99%, or 100% identical to SEQ ID NO: 26, a CDR2 having an amino acid sequence at least 65%, at least 70%, at least 75%, at least 80%, at least 85%, at least 90%, at least 95%, at least 99%, or 100% identical to SEQ ID NO: 27, and a CDR3 having an amino acid sequence at least 65%, at least 70%, at least 75%, at least 80%, at least 85%, at least 90%, at least 95%, at least 99%, or 100% identical to SEQ ID NO: 28 or 332; and (d) VH2 comprises a CDR1 having an amino acid sequence at least 65%, at least 70%, at least 75%, at least 80%, at least 85%, at least 90%, at least 95%, at least 99%, or 100% identical to SEQ ID NO: 5, a CDR2 having an amino acid sequence at least 65%, at least 70%, at least 75%, at least 80%, at least 85%, at least 90%, at least 95%, at least 99%, or 100% identical to SEQ ID NO: 6, and a CDR3 having an amino acid sequence at least 65%, at least 70%, at least 75%, at least 80%, at least 85%, at least 90%, at least 95%, at least 99%, or 100% identical to SEQ ID NO: 7.

[0024] In some aspects, (a) VL1 comprises an amino acid sequence that is at least 65%, at least 70%, at least 75%, at least 80%, at least 85%, at least 90%, at least 95%, at least 99%, or 100% identical to SEQ ID NO: 25; (b) VL2 comprises an amino acid sequence that is at least 65%, at least 70%, at least 75%, at least 80%, at least 85%, at least 90%, at least 95%, at least 99%, or 100% identical to SEQ ID NO: 4; (c) VH1 comprises an amino acid sequence that is at least 65%, at least 70%, at least 75%, at least 80%, at least 85%, at least 90%, at least 95%, at least 99%, or 100% identical to SEQ ID NO: 29; and (d) VH2 comprises an amino acid sequence that is at least 65%, at least 70%, at least 75%, at least 80%, at least 85%, at least 90%, at least 95%, at least 99%, or 100% identical to SEQ ID NO: 8.

[0025] In some aspects, (a) VL1 comprises a CDR1 having an amino acid sequence at least 65%, at least 70%, at least 75%, at least 80%, at least 85%, at least 90%, at least 95%, at least 99%, or 100% identical to SEQ ID NO: 15, a CDR2 having an amino acid sequence at least 65%, at least 70%, at least 75%, at least 80%, at least 85%, at least 90%, at least 95%, at least 99%, or 100% identical to amino acid sequence LGS, and a CDR3 having an amino acid sequence at least 65%, at least 70%, at least 75%, at least 80%, at least 85%, at least 90%, at least 95%, at least 99%, or 100% identical to SEQ ID NO: 16; (b) VL2 comprises a CDR1 having an amino acid sequence at least 65%, at least 70%, at least 75%, at least 80%, at least 85%, at least 90%, at least 95%, at least 99%, or 100% identical to SEQ ID NO: 30, a CDR2 having an amino acid sequence at least 65%, at least 70%, at least 75%, at least 80%, at least 85%, at least 90%, at least 95%, at least 99%, or 100% identical to SEQ ID NO: 31 or an amino acid sequence at least 65%, at least 70%, at least 75%, at least 80%, at least 85%, at least 90%, at least 95%, at least 99%, or 100% identical to amino acid sequence SAS, and a CDR3 having an amino acid sequence at least 65%, at least 70%, at least 75%, at least 80%, at least 85%, at least 90%, at least 95%, at least 99%, or 100% identical to SEQ ID NO: 32, 38, or 326; (c) VH1 comprises a CDR1 having an amino acid sequence at least 65%, at least 70%, at least 75%, at least 80%, at least 85%, at least 90%, at least 95%, at least 99%, or 100% identical to SEQ ID NO: 18, a CDR2 having an amino acid sequence at least 65%, at least 70%, at least 75%, at least 80%, at least 85%, at least 90%, at least 95%, at least 99%, or 100% identical to SEQ ID NO: 19, and a CDR3 having an amino acid sequence at least 65%, at least 70%, at least 75%, at least 80%, at least 85%, at least 90%, at least 95%, at least 99%, or 100% identical to SEQ ID NO: 20; and (d) VH2 comprises a CDR1 having an amino acid sequence at least 65%, at least 70%, at least 75%, at least 80%, at least 85%, at least 90%, at least 95%, at least 99%, or 100% identical to SEQ ID NO: 34, a CDR2 having an amino acid sequence at least 65%, at least 70%, at least 75%, at least 80%, at least 85%, at least 90%, at least 95%, at least 99%, or 100% identical to SEQ ID NO: 35, and a CDR3 having an amino acid sequence at least 65%, at least 70%, at least 75%, at least 80%, at least 85%, at least 90%, at least 95%, at least 99%, or 100% identical to SEQ ID NO: 36, 40, or 327.

[0026] In some aspects, (a) VL1 comprises an amino acid sequence that is at least 65%, at least 70%, at least 75%, at least 80%, at least 85%, at least 90%, at least 95%, at least 99%, or 100% identical to SEQ ID NO: 17; (b) VL2 comprises an amino acid sequence that is at least 65%, at least 70%, at least 75%, at least 80%, at least 85%, at least 90%, at least 95%, at least 99%, or 100% identical to SEQ ID NO: 33 or 39; (c) VH1 comprises an amino acid sequence that is at least 65%, at least 70%, at least 75%, at least 80%, at least 85%, at least 90%, at least 95%, at least 99%, or 100% identical to SEQ ID NO: 21 or 22; and (d) VH2 comprises an amino acid sequence that is at least 65%, at least 70%, at least 75%, at least 80%, at least 85%, at least 90%, at least 95%, at least 99%, or 100% identical to SEQ ID NO: 37.

[0027] In some aspects, (a) VL1 comprises a CDR1 having an amino acid sequence at least 65%, at least 70%, at least 75%, at least 80%, at least 85%, at least 90%, at least 95%, at least 99%, or 100% identical to SEQ ID NO: 9 or 1055, a CDR2 having an amino acid sequence at least 65%, at least 70%, at least 75%, at least 80%, at least 85%, at least 90%, at least 95%, at least 99%, or 100% identical to SEQ ID NO: 1056 or an amino acid sequence at least 65%, at least 70%, at least 75%, at least 80%, at least 85%, at least 90%, at least 95%, at least 99%, or 100% identical to amino acid sequence GAS, and a CDR3 having an amino acid sequence at least 65%, at least 70%, at least 75%, at least 80%, at least 85%, at least 90%, at least 95%, at least 99%, or 100% identical to SEQ ID NO: 10; (b) VL2 comprises a CDR1 having an amino acid sequence at least 65%, at least 70%, at least 75%, at least 80%, at least 85%, at least 90%, at least 95%, at least 99%, or 100% identical to SEQ ID NO: 65 or 627, a CDR2 having an amino acid sequence at least 65%, at least 70%, at least 75%, at least 80%, at least 85%, at least 90%, at least 95%, at least 99%, or 100% identical to SEQ ID NO: 628 or an amino acid sequence at least 65%, at least 70%, at least 75%, at least 80%, at least 85%, at least 90%, at least 95%, at least 99%, or 100% identical to amino acid sequence SDS, and a CDR3 having an amino acid sequence at least 65%, at least 70%, at least 75%, at least 80%, at least 85%, at least 90%, at least 95%, at least 99%, or 100% identical to SEQ ID NO: 66; (c) VH1 comprises a CDR1 having an amino acid sequence at least 65%, at least 70%, at least 75%, at least 80%, at least 85%, at least 90%, at least 95%, at least 99%, or 100% identical to SEQ ID NO: 12 or 1057, a CDR2 having an amino acid sequence at least 65%, at least 70%, at least 75%, at least 80%, at least 85%, at least 90%, at least 95%, at least 99%, or 100% identical to SEQ ID NO: 6 or 1058, and a CDR3 having an amino acid sequence at least 65%, at least 70%, at least 75%, at least 80%, at least 85%, at least 90%, at least 95%, at least 99%, or 100% identical to SEQ ID NO: 13 or 1059; and (d) VH2 comprises a CDR1 having an amino acid sequence at least 65%, at least 70%, at least 75%, at least 80%, at least 85%, at least 90%, at least 95%, at least 99%, or 100% identical to SEQ ID NO: 68 or 629, a CDR2 having an amino acid sequence at least 65%, at least 70%, at least 75%, at least 80%, at least 85%, at least 90%, at least 95%, at least 99%, or 100% identical to SEQ ID NO: 69 or 630, and a CDR3 having an amino acid sequence at least 65%, at least 70%, at least 75%, at least 80%, at least 85%, at least 90%, at least 95%, at least 99%, or 100% identical to SEQ ID NO: 70 or 631.

[0028] In some aspects, (a) VL1 comprises an amino acid sequence that is at least 65%, at least 70%, at least 75%, at least 80%, at least 85%, at least 90%, at least 95%, at least 99%, or 100% identical to SEQ ID NO: 11; (b) VL2 comprises an amino acid sequence that is at least 65%, at least 70%, at least 75%, at least 80%, at least 85%, at least 90%, at least 95%, at least 99%, or 100% identical to SEQ ID NO: 67; (c) VH1 comprises an amino acid sequence that is at least 65%, at least 70%, at least 75%, at least 80%, at least 85%, at least 90%, at least 95%, at least 99%, or 100% identical to SEQ ID NO: 14; and (d) VH2 comprises an amino acid sequence that is at least 65%, at least 70%, at least 75%, at least 80%, at least 85%, at least 90%, at least 95%, at least 99%, or 100% identical to SEQ ID NO: 71 or 626.

[0029] In some aspects, (a) VL1 comprises a CDR1 having an amino acid sequence at least 65%, at least 70%, at least 75%, at least 80%, at least 85%, at least 90%, at least 95%, at least 99%, or 100% identical to SEQ ID NO: 145 or 1050, a CDR2 having an amino acid sequence at least 65%, at least 70%, at least 75%, at least 80%, at least 85%, at least 90%, at least 95%, at least 99%, or 100% identical to SEQ ID NO: 1051 or an amino acid sequence at least 65%, at least 70%, at least 75%, at least 80%, at least 85%, at least 90%, at least 95%, at least 99%, or 100% identical to amino acid sequence AAS, and a CDR3 having an amino acid sequence at least 65%, at least 70%, at least 75%, at least 80%, at least 85%, at least 90%, at least 95%, at least 99%, or 100% identical to SEQ ID NO: 146 or 764; (b) VL2 comprises a CDR1 having an amino acid sequence at least 65%, at least 70%, at least 75%, at least 80%, at least 85%, at least 90%, at least 95%, at least 99%, or 100% identical to SEQ ID NO: 9 or 1055, a CDR2 having an amino acid sequence at least 65%, at least 70%, at least 75%, at least 80%, at least 85%, at least 90%, at least 95%, at least 99%, or 100% identical to SEQ ID NO: 1056 or an amino acid sequence at least 65%, at least 70%, at least 75%, at least 80%, at least 85%, at least 90%, at least 95%, at least 99%, or 100% identical to amino acid sequence GAS, and a CDR3 having an amino acid sequence at least 65%, at least 70%, at least 75%, at least 80%, at least 85%, at least 90%, at least 95%, at least 99%, or 100% identical to SEQ ID NO: 10; (c) VH1 comprises a CDR1 having an amino acid sequence at least 65%, at least 70%, at least 75%, at least 80%, at least 85%, at least 90%, at least 95%, at least 99%, or 100% identical to SEQ ID NO: 148 or 1052, a CDR2 having an amino acid sequence at least 65%, at least 70%, at least 75%, at least 80%, at least 85%, at least 90%, at least 95%, at least 99%, or 100% identical to SEQ ID NO: 149 or 1053, and a CDR3 having an amino acid sequence at least 65%, at least 70%, at least 75%, at least 80%, at least 85%, at least 90%, at least 95%, at least 99%, or 100% identical to SEQ ID NO: 150, 765, or 1054; and (d) VH2 comprises a CDR1 having an amino acid sequence at least 65%, at least 70%, at least 75%, at least 80%, at least 85%, at least 90%, at least 95%, at least 99%, or 100% identical to SEQ ID NO: 12 or 1057, a CDR2 having an amino acid sequence at least 65%, at least 70%, at least 75%, at least 80%, at least 85%, at least 90%, at least 95%, at least 99%, or 100% identical to SEQ ID NO: 6 or 1058, and a CDR3 having an amino acid sequence at least 65%, at least 70%, at least 75%, at least 80%, at least 85%, at least 90%, at least 95%, at least 99%, or 100% identical to SEQ ID NO: 13 or 1059.

[0030] In some aspects, (a) VL1 comprises an amino acid sequence that is at least 65%, at least 70%, at least 75%, at least 80%, at least 85%, at least 90%, at least 95%, at least 99%, or 100% identical to SEQ ID NO: 147; (b) VL2 comprises an amino acid sequence that is at least 65%, at least 70%, at least 75%, at least 80%, at least 85%, at least 90%, at least 95%, at least 99%, or 100% identical to SEQ ID NO: 11; (c) VH1 comprises an amino acid sequence that is at least 65%, at least 70%, at least 75%, at least 80%, at least 85%, at least 90%, at least 95%, at least 99%, or 100% identical to SEQ ID NO: 151; and (d) VH2 comprises an amino acid sequence that is at least 65%, at least 70%, at least 75%, at least 80%, at least 85%, at least 90%, at least 95%, at least 99%, or 100% identical to SEQ ID NO: 14.

[0031] In some aspects, (a) VL1 comprises a CDR1 having an amino acid sequence at least 65%, at least 70%, at least 75%, at least 80%, at least 85%, at least 90%, at least 95%, at least 99%, or 100% identical to SEQ ID NO: 65 or 627, a CDR2 having an amino acid sequence at least 65%, at least 70%, at least 75%, at least 80%, at least 85%, at least 90%, at least 95%, at least 99%, or 100% identical to SEQ ID NO: 628 or an amino acid sequence at least 65%, at least 70%, at least 75%, at least 80%, at least 85%, at least 90%, at least 95%, at least 99%, or 100% identical to amino acid sequence SDS, and a CDR3 having an amino acid sequence at least 65%, at least 70%, at least 75%, at least 80%, at least 85%, at least 90%, at least 95%, at least 99%, or 100% identical to SEQ ID NO: 66; (b) VL2 comprises a CDR1 having an amino acid sequence at least 65%, at least 70%, at least 75%, at least 80%, at least 85%, at least 90%, at least 95%, at least 99%, or 100% identical to SEQ ID NO: 15, a CDR2 having an amino acid sequence at least 65%, at least 70%, at least 75%, at least 80%, at least 85%, at least 90%, at least 95%, at least 99%, or 100% identical to amino acid sequence LGS, and a CDR3 having an amino acid sequence at least 65%, at least 70%, at least 75%, at least 80%, at least 85%, at least 90%, at least 95%, at least 99%, or 100% identical to SEQ ID NO: 16; (c) VH1 comprises a CDR1 having an amino acid sequence at least 65%, at least 70%, at least 75%, at least 80%, at least 85%, at least 90%, at least 95%, at least 99%, or 100% identical to SEQ ID NO: 68 or 629, a CDR2 having an amino acid sequence at least 65%, at least 70%, at least 75%, at least 80%, at least 85%, at least 90%, at least 95%, at least 99%, or 100% identical to SEQ ID NO: 69 or 630, and a CDR3 having an amino acid sequence at least 65%, at least 70%, at least 75%, at least 80%, at least 85%, at least 90%, at least 95%, at least 99%, or 100% identical to SEQ ID NO: 70 or 631; and (d) VH2 comprises a CDR1 having an amino acid sequence at least 65%, at least 70%, at least 75%, at least 80%, at least 85%, at least 90%, at least 95%, at least 99%, or 100% identical to SEQ ID NO: 18, a CDR2 having an amino acid sequence at least 65%, at least 70%, at least 75%, at least 80%, at least 85%, at least 90%, at least 95%, at least 99%, or 100% identical to SEQ ID NO: 19, and a CDR3 having an amino acid sequence at least 65%, at least 70%, at least 75%, at least 80%, at least 85%, at least 90%, at least 95%, at least 99%, or 100% identical to SEQ ID NO: 20.

[0032] In some aspects, (a) VL1 comprises an amino acid sequence that is at least 65%, at least 70%, at least 75%, at least 80%, at least 85%, at least 90%, at least 95%, at least 99%, or 100% identical to SEQ ID NO: 67; (b) VL2 comprises an amino acid sequence that is at least 65%, at least 70%, at least 75%, at least 80%, at least 85%, at least 90%, at least 95%, at least 99%, or 100% identical to SEQ ID NO: 17; (c) VH1 comprises an amino acid sequence that is at least 65%, at least 70%, at least 75%, at least 80%, at least 85%, at least 90%, at least 95%, at least 99%, or 100% identical to SEQ ID NO: 71 or 626; and (d) VH2 comprises an amino acid sequence that is at least 65%, at least 70%, at least 75%, at least 80%, at least 85%, at least 90%, at least 95%, at least 99%, or 100% identical to SEQ ID NO: 21 or 22.

[0033] In some aspects, (a) VL1 comprises a CDR1 having an amino acid sequence at least 65%, at least 70%, at least 75%, at least 80%, at least 85%, at least 90%, at least 95%, at least 99%, or 100% identical to SEQ ID NO: 65 or 627, a CDR2 having an amino acid sequence at least 65%, at least 70%, at least 75%, at least 80%, at least 85%, at least 90%, at least 95%, at least 99%, or 100% identical to SEQ ID NO: 628 or an amino acid sequence at least 65%, at least 70%, at least 75%, at least 80%, at least 85%, at least 90%, at least 95%, at least 99%, or 100% identical to amino acid sequence SDS, and a CDR3 having an amino acid sequence at least 65%, at least 70%, at least 75%, at least 80%, at least 85%, at least 90%, at least 95%, at least 99%, or 100% identical to SEQ ID NO: 66; (b) VL2 comprises a CDR1 having an amino acid sequence at least 65%, at least 70%, at least 75%, at least 80%, at least 85%, at least 90%, at least 95%, at least 99%, or 100% identical to SEQ ID NO: 152 or 1045, a CDR2 having an amino acid sequence at least 65%, at least 70%, at least 75%, at least 80%, at least 85%, at least 90%, at least 95%, at least 99%, or 100% identical to SEQ ID NO: 1046 or an amino acid sequence at least 65%, at least 70%, at least 75%, at least 80%, at least 85%, at least 90%, at least 95%, at least 99%, or 100% identical to amino acid sequence GAS, and a CDR3 having an amino acid sequence at least 65%, at least 70%, at least 75%, at least 80%, at least 85%, at least 90%, at least 95%, at least 99%, or 100% identical to SEQ ID NO: 153 or 766; (c) VH1 comprises a CDR1 having an amino acid sequence at least 65%, at least 70%, at least 75%, at least 80%, at least 85%, at least 90%, at least 95%, at least 99%, or 100% identical to SEQ ID NO: 68 or 629, a CDR2 having an amino acid sequence at least 65%, at least 70%, at least 75%, at least 80%, at least 85%, at least 90%, at least 95%, at least 99%, or 100% identical to SEQ ID NO: 69 or 630, and a CDR3 having an amino acid sequence at least 65%, at least 70%, at least 75%, at least 80%, at least 85%, at least 90%, at least 95%, at least 99%, or 100% identical to SEQ ID NO: 70 or 631; and (d) VH2 comprises a CDR1 having an amino acid sequence at least 65%, at least 70%, at least 75%, at least 80%, at least 85%, at least 90%, at least 95%, at least 99%, or 100% identical to SEQ ID NO: 155 or 1047, a CDR2 having an amino acid sequence at least 65%, at least 70%, at least 75%, at least 80%, at least 85%, at least 90%, at least 95%, at least 99%, or 100% identical to SEQ ID NO: 156 or 1048, and a CDR3 having an amino acid sequence at least 65%, at least 70%, at least 75%, at least 80%, at least 85%, at least 90%, at least 95%, at least 99%, or 100% identical to SEQ ID NO: 157, 767, or 1049.

[0034] In some aspects, (a) VL1 comprises an amino acid sequence that is at least 65%, at least 70%, at least 75%, at least 80%, at least 85%, at least 90%, at least 95%, at least 99%, or 100% identical to SEQ ID NO: 67; (b) VL2 comprises an amino acid sequence that is at least 65%, at least 70%, at least 75%, at least 80%, at least 85%, at least 90%, at least 95%, at least 99%, or 100% identical to SEQ ID NO: 154; (c) VH1 comprises an amino acid sequence that is at least 65%, at least 70%, at least 75%, at least 80%, at least 85%, at least 90%, at least 95%, at least 99%, or 100% identical to SEQ ID NO: 71 or 626; and (d) VH2 comprises an amino acid sequence that is at least 65%, at least 70%, at least 75%, at least 80%, at least 85%, at least 90%, at least 95%, at least 99%, or 100% identical to SEQ ID NO: 158.

[0035] In some aspects, (a) VL1 comprises a CDR1 having an amino acid sequence at least 65%, at least 70%, at least 75%, at least 80%, at least 85%, at least 90%, at least 95%, at least 99%, or 100% identical to SEQ ID NO: 15, a CDR2 having an amino acid sequence at least 65%, at least 70%, at least 75%, at least 80%, at least 85%, at least 90%, at least 95%, at least 99%, or 100% identical to amino acid sequence LGS, and a CDR3 having an amino acid sequence at least 65%, at least 70%, at least 75%, at least 80%, at least 85%, at least 90%, at least 95%, at least 99%, or 100% identical to SEQ ID NO: 16; (b) VL2 comprises a CDR1 having an amino acid sequence at least 65%, at least 70%, at least 75%, at least 80%, at least 85%, at least 90%, at least 95%, at least 99%, or 100% identical to SEQ ID NO: 65 or 627, a CDR2 having an amino acid sequence at least 65%, at least 70%, at least 75%, at least 80%, at least 85%, at least 90%, at least 95%, at least 99%, or 100% identical to SEQ ID NO: 628 or an amino acid sequence at least 65%, at least 70%, at least 75%, at least 80%, at least 85%, at least 90%, at least 95%, at least 99%, or 100% identical to amino acid sequence SDS, and a CDR3 having an amino acid sequence at least 65%, at least 70%, at least 75%, at least 80%, at least 85%, at least 90%, at least 95%, at least 99%, or 100% identical to SEQ ID NO: 66; (c) VH1 comprises a CDR1 having an amino acid sequence at least 65%, at least 70%, at least 75%, at least 80%, at least 85%, at least 90%, at least 95%, at least 99%, or 100% identical to SEQ ID NO: 18, a CDR2 having an amino acid sequence at least 65%, at least 70%, at least 75%, at least 80%, at least 85%, at least 90%, at least 95%, at least 99%, or 100% identical to SEQ ID NO: 19, and a CDR3 having an amino acid sequence at least 65%, at least 70%, at least 75%, at least 80%, at least 85%, at least 90%, at least 95%, at least 99%, or 100% identical to SEQ ID NO: 20; and (d) VH2 comprises a CDR1 having an amino acid sequence at least 65%, at least 70%, at least 75%, at least 80%, at least 85%, at least 90%, at least 95%, at least 99%, or 100% identical to SEQ ID NO: 68 or 629, a CDR2 having an amino acid sequence at least 65%, at least 70%, at least 75%, at least 80%, at least 85%, at least 90%, at least 95%, at least 99%, or 100% identical to SEQ ID NO: 69 or 630, and a CDR3 having an amino acid sequence at least 65%, at least 70%, at least 75%, at least 80%, at least 85%, at least 90%, at least 95%, at least 99%, or 100% identical to SEQ ID NO: 70 or 631.

[0036] In some aspects, (a) VL1 comprises an amino acid sequence that is at least 65%, at least 70%, at least 75%, at least 80%, at least 85%, at least 90%, at least 95%, at least 99%, or 100% identical to SEQ ID NO: 17; (b) VL2 comprises an amino acid sequence that is at least 65%, at least 70%, at least 75%, at least 80%, at least 85%, at least 90%, at least 95%, at least 99%, or 100% identical to SEQ ID NO: 67; (c) VH1 comprises an amino acid sequence that is at least 65%, at least 70%, at least 75%, at least 80%, at least 85%, at least 90%, at least 95%, at least 99%, or 100% identical to SEQ ID NO: 21 or 22; and (d) VH2 comprises an amino acid sequence that is at least 65%, at least 70%, at least 75%, at least 80%, at least 85%, at least 90%, at least 95%, at least 99%, or 100% identical to SEQ ID NO: 71 or 626.

[0037] In some aspects, (a) VL1 comprises a CDR1 having an amino acid sequence at least 65%, at least 70%, at least 75%, at least 80%, at least 85%, at least 90%, at least 95%, at least 99%, or 100% identical to SEQ ID NO: 152 or 1045, a CDR2 having an amino acid sequence at least 65%, at least 70%, at least 75%, at least 80%, at least 85%, at least 90%, at least 95%, at least 99%, or 100% identical to SEQ ID NO: 1046 or an amino acid sequence at least 65%, at least 70%, at least 75%, at least 80%, at least 85%, at least 90%, at least 95%, at least 99%, or 100% identical to amino acid sequence GAS, and a CDR3 having an amino acid sequence at least 65%, at least 70%, at least 75%, at least 80%, at least 85%, at least 90%, at least 95%, at least 99%, or 100% identical to SEQ ID NO: 153 or 766; (b) VL2 comprises a CDR1 having an amino acid sequence at least 65%, at least 70%, at least 75%, at least 80%, at least 85%, at least 90%, at least 95%, at least 99%, or 100% identical to SEQ ID NO: 65 or 627, a CDR2 having an amino acid sequence at least 65%, at least 70%, at least 75%, at least 80%, at least 85%, at least 90%, at least 95%, at least 99%, or 100% identical to SEQ ID NO: 628 or amino acid sequence at least 65%, at least 70%, at least 75%, at least 80%, at least 85%, at least 90%, at least 95%, at least 99%, or 100% identical to amino acid sequence SDS, and a CDR3 having an amino acid sequence at least 65%, at least 70%, at least 75%, at least 80%, at least 85%, at least 90%, at least 95%, at least 99%, or 100% identical to SEQ ID NO: 66; (c) VH1 comprises a CDR1 having an amino acid sequence at least 65%, at least 70%, at least 75%, at least 80%, at least 85%, at least 90%, at least 95%, at least 99%, or 100% identical to SEQ ID NO: 155 or 1047, a CDR2 having an amino acid sequence at least 65%, at least 70%, at least 75%, at least 80%, at least 85%, at least 90%, at least 95%, at least 99%, or 100% identical to SEQ ID NO: 156 or 1048, and a CDR3 having an amino acid sequence at least 65%, at least 70%, at least 75%, at least 80%, at least 85%, at least 90%, at least 95%, at least 99%, or 100% identical to SEQ ID NO: 157, 767, or 1049; and (d) VH2 comprises a CDR1 having an amino acid sequence at least 65%, at least 70%, at least 75%, at least 80%, at least 85%, at least 90%, at least 95%, at least 99%, or 100% identical to SEQ ID NO: 68 or 629, a CDR2 having an amino acid sequence at least 65%, at least 70%, at least 75%, at least 80%, at least 85%, at least 90%, at least 95%, at least 99%, or 100% identical to SEQ ID NO: 69 or 630, and a CDR3 having an amino acid sequence at least 65%, at least 70%, at least 75%, at least 80%, at least 85%, at least 90%, at least 95%, at least 99%, or 100% identical to SEQ ID NO: 70 or 631.

[0038] In some aspects, (a) VL1 comprises an amino acid sequence that is at least 65%, at least 70%, at least 75%, at least 80%, at least 85%, at least 90%, at least 95%, at least 99%, or 100% identical to SEQ ID NO: 154; (b) VL2 comprises an amino acid sequence that is at least 65%, at least 70%, at least 75%, at least 80%, at least 85%, at least 90%, at least 95%, at least 99%, or 100% identical to SEQ ID NO: 67; (c) VH1 comprises an amino acid sequence that is at least 65%, at least 70%, at least 75%, at least 80%, at least 85%, at least 90%, at least 95%, at least 99%, or 100% identical to SEQ ID NO: 158; and (d) VH2 comprises an amino acid sequence that is at least 65%, at least 70%, at least 75%, at least 80%, at least 85%, at least 90%, at least 95%, at least 99%, or 100% identical to SEQ ID NO: 71 or 626.

[0039] In some aspects, (a) VL1 comprises a CDR1 having an amino acid sequence at least 65%, at least 70%, at least 75%, at least 80%, at least 85%, at least 90%, at least 95%, at least 99%, or 100% identical to SEQ ID NO: 9 or 1055, a CDR2 having an amino acid sequence at least 65%, at least 70%, at least 75%, at least 80%, at least 85%, at least 90%, at least 95%, at least 99%, or 100% identical to SEQ ID NO: 1056 or an amino acid sequence at least 65%, at least 70%, at least 75%, at least 80%, at least 85%, at least 90%, at least 95%, at least 99%, or 100% identical to amino acid sequence GAS, and a CDR3 having an amino acid sequence at least 65%, at least 70%, at least 75%, at least 80%, at least 85%, at least 90%, at least 95%, at least 99%, or 100% identical to SEQ ID NO: 10; (b) VL2 comprises a CDR1 having an amino acid sequence at least 65%, at least 70%, at least 75%, at least 80%, at least 85%, at least 90%, at least 95%, at least 99%, or 100% identical to SEQ ID NO: 152 or 1045, a CDR2 having an amino acid sequence at least 65%, at least 70%, at least 75%, at least 80%, at least 85%, at least 90%, at least 95%, at least 99%, or 100% identical to SEQ ID NO: 1046 or an amino acid sequence at least 65%, at least 70%, at least 75%, at least 80%, at least 85%, at least 90%, at least 95%, at least 99%, or 100% identical to the amino acid sequence GAS, and a CDR3 having an amino acid sequence at least 65%, at least 70%, at least 75%, at least 80%, at least 85%, at least 90%, at least 95%, at least 99%, or 100% identical to SEQ ID NO: 153 or 766; (c) VH1 comprises a CDR1 having an amino acid sequence at least 65%, at least 70%, at least 75%, at least 80%, at least 85%, at least 90%, at least 95%, at least 99%, or 100% identical to SEQ ID NO: 12 or 1057, a CDR2 having an amino acid sequence at least 65%, at least 70%, at least 75%, at least 80%, at least 85%, at least 90%, at least 95%, at least 99%, or 100% identical to SEQ ID NO: 6 or 1058, and a CDR3 having an amino acid sequence at least 65%, at least 70%, at least 75%, at least 80%, at least 85%, at least 90%, at least 95%, at least 99%, or 100% identical to SEQ ID NO: 13 or 1059; and (d) VH2 comprises a CDR1 having an amino acid sequence at least 65%, at least 70%, at least 75%, at least 80%, at least 85%, at least 90%, at least 95%, at least 99%, or 100% identical to SEQ ID NO: 155 or 1047, a CDR2 having an amino acid sequence at least 65%, at least 70%, at least 75%, at least 80%, at least 85%, at least 90%, at least 95%, at least 99%, or 100% identical to SEQ ID NO: 156 or 1048, and a CDR3 having an amino acid sequence at least 65%, at least 70%, at least 75%, at least 80%, at least 85%, at least 90%, at least 95%, at least 99%, or 100% identical to SEQ ID NO: 157, 767, or 1049.

[0040] In some aspects, (a) VL1 comprises an amino acid sequence that is at least 65%, at least 70%, at least 75%, at least 80%, at least 85%, at least 90%, at least 95%, at least 99%, or 100% identical to SEQ ID NO: 11; (b) VL2 comprises an amino acid sequence that is at least 65%, at least 70%, at least 75%, at least 80%, at least 85%, at least 90%, at least 95%, at least 99%, or 100% identical to SEQ ID NO: 154; (c) VH1 comprises an amino acid sequence that is at least 65%, at least 70%, at least 75%, at least 80%, at least 85%, at least 90%, at least 95%, at least 99%, or 100% identical to SEQ ID NO: 14; and (d) VH2 comprises an amino acid sequence that is at least 65%, at least 70%, at least 75%, at least 80%, at least 85%, at least 90%, at least 95%, at least 99%, or 100% identical to SEQ ID NO: 158. In some aspects, (a) VL1 comprises a CDR1 having an amino acid sequence at least 65%, at least 70%, at least 75%, at least 80%, at least 85%, at least 90%, at least 95%, at least 99%, or 100% identical to SEQ ID NO: 15, a CDR2 having an amino acid sequence at least 65%, at least 70%, at least 75%, at least 80%, at least 85%, at least 90%, at least 95%, at least 99%, or 100% identical to amino acid sequence LGS, and a CDR3 having an amino acid sequence at least 65%, at least 70%, at least 75%, at least 80%, at least 85%, at least 90%, at least 95%, at least 99%, or 100% identical to SEQ ID NO: 16; (b) VL2 comprises a CDR1 having an amino acid sequence at least 65%, at least 70%, at least 75%, at least 80%, at least 85%, at least 90%, at least 95%, at least 99%, or 100% identical to SEQ ID NO: 145 or 1050, a CDR2 having an amino acid sequence at least 65%, at least 70%, at least 75%, at least 80%, at least 85%, at least 90%, at least 95%, at least 99%, or 100% identical to SEQ ID NO: 1051 or an amino acid sequence at least 65%, at least 70%, at least 75%, at least 80%, at least 85%, at least 90%, at least 95%, at least 99%, or 100% identical to amino acid sequence AAS, and a CDR3 having an amino acid sequence at least 65%, at least 70%, at least 75%, at least 80%, at least 85%, at least 90%, at least 95%, at least 99%, or 100% identical to SEQ ID NO: 146 or 764; (c) VH1 comprises a CDR1 having an amino acid sequence at least 65%, at least 70%, at least 75%, at least 80%, at least 85%, at least 90%, at least 95%, at least 99%, or 100% identical to SEQ ID NO: 18, a CDR2 having an amino acid sequence at least 65%, at least 70%, at least 75%, at least 80%, at least 85%, at least 90%, at least 95%, at least 99%, or 100% identical to SEQ ID NO: 19, and a CDR3 having an amino acid sequence at least 65%, at least 70%, at least 75%, at least 80%, at least 85%, at least 90%, at least 95%, at least 99%, or 100% identical to SEQ ID NO: 20; and (d) VH2 comprises a CDR1 having an amino acid sequence at least 65%, at least 70%, at least 75%, at least 80%, at least 85%, at least 90%, at least 95%, at least 99%, or 100% identical to SEQ ID NO: 148 or 1052, a CDR2 having an amino acid sequence at least 65%, at least 70%, at least 75%, at least 80%, at least 85%, at least 90%, at least 95%, at least 99%, or 100% identical to SEQ ID NO: 149 or 1053, and a CDR3 having an amino acid sequence at least 65%, at least 70%, at least 75%, at least 80%, at least 85%, at least 90%, at least 95%, at least 99%, or 100% identical to SEQ ID NO: 150, 765, or 1054.

[0041] In some aspects, (a) VL1 comprises an amino acid sequence that is at least 65%, at least 70%, at least 75%, at least 80%, at least 85%, at least 90%, at least 95%, at least 99%, or 100% identical to SEQ ID NO: 17; (b) VL2 comprises an amino acid sequence that is at least 65%, at least 70%, at least 75%, at least 80%, at least 85%, at least 90%, at least 95%, at least 99%, or 100% identical to SEQ ID NO: 147; (c) VH1 comprises an amino acid sequence that is at least 65%, at least 70%, at least 75%, at least 80%, at least 85%, at least 90%, at least 95%, at least 99%, or 100% identical to SEQ ID NO: 21 or 22; and (d) VH2 comprises an amino acid sequence that is at least 65%, at least 70%, at least 75%, at least 80%, at least 85%, at least 90%, at least 95%, at least 99%, or 100% identical to SEQ ID NO: 151.

[0042] In some aspects, (a) VL1 comprises a CDR1 having an amino acid sequence at least 65%, at least 70%, at least 75%, at least 80%, at least 85%, at least 90%, at least 95%, at least 99%, or 100% identical to SEQ ID NO: 65 or 627, a CDR2 having an amino acid sequence at least 65%, at least 70%, at least 75%, at least 80%, at least 85%, at least 90%, at least 95%, at least 99%, or 100% identical to SEQ ID NO: 628, or an amino acid sequence at least 65%, at least 70%, at least 75%, at least 80%, at least 85%, at least 90%, at least 95%, at least 99%, or 100% identical to amino acid sequence SDS, and a CDR3 having an amino acid sequence at least 65%, at least 70%, at least 75%, at least 80%, at least 85%, at least 90%, at least 95%, at least 99%, or 100% identical to SEQ ID NO: 66; (b) VL2 comprises a CDR1 having an amino acid sequence at least 65%, at least 70%, at least 75%, at least 80%, at least 85%, at least 90%, at least 95%, at least 99%, or 100% identical to SEQ ID NO: 145 or 1050, a CDR2 having an amino acid sequence at least 65%, at least 70%, at least 75%, at least 80%, at least 85%, at least 90%, at least 95%, at least 99%, or 100% identical to SEQ ID NO: 1051 or an amino acid sequence at least 65%, at least 70%, at least 75%, at least 80%, at least 85%, at least 90%, at least 95%, at least 99%, or 100% identical to amino acid sequence AAS, and a CDR3 having an amino acid sequence at least 65%, at least 70%, at least 75%, at least 80%, at least 85%, at least 90%, at least 95%, at least 99%, or 100% identical to SEQ ID NO: 146 or 764; (c) VH1 comprises a CDR1 having an amino acid sequence at least 65%, at least 70%, at least 75%, at least 80%, at least 85%, at least 90%, at least 95%, at least 99%, or 100% identical to SEQ ID NO: 68 or 629, a CDR2 having an amino acid sequence at least 65%, at least 70%, at least 75%, at least 80%, at least 85%, at least 90%, at least 95%, at least 99%, or 100% identical to SEQ ID NO: 69 or 630, and a CDR3 having an amino acid sequence at least 65%, at least 70%, at least 75%, at least 80%, at least 85%, at least 90%, at least 95%, at least 99%, or 100% identical to SEQ ID NO: 70 or 631; and (d) VH2 comprises a CDR1 having an amino acid sequence at least 65%, at least 70%, at least 75%, at least 80%, at least 85%, at least 90%, at least 95%, at least 99%, or 100% identical to SEQ ID NO: 148 or 1052, a CDR2 having an amino acid sequence at least 65%, at least 70%, at least 75%, at least 80%, at least 85%, at least 90%, at least 95%, at least 99%, or 100% identical to SEQ ID NO: 149 or 1053, and a CDR3 having an amino acid sequence at least 65%, at least 70%, at least 75%, at least 80%, at least 85%, at least 90%, at least 95%, at least 99%, or 100% identical to SEQ ID NO: 150, 765, or 1054.

[0043] In some aspects, (a) VL1 comprises an amino acid sequence that is at least 65%, at least 70%, at least 75%, at least 80%, at least 85%, at least 90%, at least 95%, at least 99%, or 100% identical to SEQ ID NO: 67; (b) VL2 comprises an amino acid sequence that is at least 65%, at least 70%, at least 75%, at least 80%, at least 85%, at least 90%, at least 95%, at least 99%, or 100% identical to SEQ ID NO: 147; (c) VH1 comprises an amino acid sequence that is at least 65%, at least 70%, at least 75%, at least 80%, at least 85%, at least 90%, at least 95%, at least 99%, or 100% identical to SEQ ID NO: 71 or 626; and (d) VH2 comprises an amino acid sequence that is at least 65%, at least 70%, at least 75%, at least 80%, at least 85%, at least 90%, at least 95%, at least 99%, or 100% identical to SEQ ID NO: 151.

[0044] In some aspects, (a) VL1 comprises a CDR1 having an amino acid sequence at least 65%, at least 70%, at least 75%, at least 80%, at least 85%, at least 90%, at least 95%, at least 99%, or 100% identical to SEQ ID NO: 145 or 1050, a CDR2 having an amino acid sequence at least 65%, at least 70%, at least 75%, at least 80%, at least 85%, at least 90%, at least 95%, at least 99%, or 100% identical to SEQ ID NO: 1051 or an amino acid sequence at least 65%, at least 70%, at least 75%, at least 80%, at least 85%, at least 90%, at least 95%, at least 99%, or 100% identical to amino acid sequence AAS, and a CDR3 having an amino acid sequence at least 65%, at least 70%, at least 75%, at least 80%, at least 85%, at least 90%, at least 95%, at least 99%, or 100% identical to SEQ ID NO: 146 or 764; (b) VL2 comprises a CDR1 having an amino acid sequence at least 65%, at least 70%, at least 75%, at least 80%, at least 85%, at least 90%, at least 95%, at least 99%, or 100% identical to SEQ ID NO: 152 or 1045, a CDR2 having an amino acid sequence at least 65%, at least 70%, at least 75%, at least 80%, at least 85%, at least 90%, at least 95%, at least 99%, or 100% identical to SEQ ID NO: 1046 or an amino acid sequence at least 65%, at least 70%, at least 75%, at least 80%, at least 85%, at least 90%, at least 95%, at least 99%, or 100% identical to amino acid sequence GAS, and a CDR3 having an amino acid sequence at least 65%, at least 70%, at least 75%, at least 80%, at least 85%, at least 90%, at least 95%, at least 99%, or 100% identical to SEQ ID NO: 153 or 766; (c) VH1 comprises a CDR1 having an amino acid sequence at least 65%, at least 70%, at least 75%, at least 80%, at least 85%, at least 90%, at least 95%, at least 99%, or 100% identical to SEQ ID NO: 148 or 1052, a CDR2 having an amino acid sequence at least 65%, at least 70%, at least 75%, at least 80%, at least 85%, at least 90%, at least 95%, at least 99%, or 100% identical to SEQ ID NO: 149 or 1053, and a CDR3 having an amino acid sequence at least 65%, at least 70%, at least 75%, at least 80%, at least 85%, at least 90%, at least 95%, at least 99%, or 100% identical to SEQ ID NO: 150, 765, or 1054; and (d) VH2 comprises a CDR1 having an amino acid sequence at least 65%, at least 70%, at least 75%, at least 80%, at least 85%, at least 90%, at least 95%, at least 99%, or 100% identical to SEQ ID NO: 155 or 1047, a CDR2 having an amino acid sequence at least 65%, at least 70%, at least 75%, at least 80%, at least 85%, at least 90%, at least 95%, at least 99%, or 100% identical to SEQ ID NO: 156 or 1048, and a CDR3 having an amino acid sequence at least 65%, at least 70%, at least 75%, at least 80%, at least 85%, at least 90%, at least 95%, at least 99%, or 100% identical to SEQ ID NO: 157, 767, or 1049.

[0045] In some aspects, (a) VL1 comprises an amino acid sequence that is at least 65%, at least 70%, at least 75%, at least 80%, at least 85%, at least 90%, at least 95%, at least 99%, or 100% identical to SEQ ID NO: 147; (b) VL2 comprises an amino acid sequence that is at least 65%, at least 70%, at least 75%, at least 80%, at least 85%, at least 90%, at least 95%, at least 99%, or 100% identical to SEQ ID NO: 154; (c) VH1 comprises an amino acid sequence that is at least 65%, at least 70%, at least 75%, at least 80%, at least 85%, at least 90%, at least 95%, at least 99%, or 100% identical to SEQ ID NO: 151; and (d) VH2 comprises an amino acid sequence that is at least 65%, at least 70%, at least 75%, at least 80%, at least 85%, at least 90%, at least 95%, at least 99%, or 100% identical to SEQ ID NO: 158.

[0046] In some aspects, (a) VL1 comprises a CDR1 having an amino acid sequence at least 65%, at least 70%, at least 75%, at least 80%, at least 85%, at least 90%, at least 95%, at least 99%, or 100% identical to SEQ ID NO: 145 or 1050, a CDR2 having an amino acid sequence at least 65%, at least 70%, at least 75%, at least 80%, at least 85%, at least 90%, at least 95%, at least 99%, or 100% identical to SEQ ID NO: 1051 or an amino acid sequence at least 65%, at least 70%, at least 75%, at least 80%, at least 85%, at least 90%, at least 95%, at least 99%, or 100% identical to amino acid sequence AAS, and a CDR3 having an amino acid sequence at least 65%, at least 70%, at least 75%, at least 80%, at least 85%, at least 90%, at least 95%, at least 99%, or 100% identical to SEQ ID NO: 146 or 764; (b) VL2 comprises a CDR1 having an amino acid sequence at least 65%, at least 70%, at least 75%, at least 80%, at least 85%, at least 90%, at least 95%, at least 99%, or 100% identical to SEQ ID NO: 172 or 1060, a CDR2 having an amino acid sequence at least 65%, at least 70%, at least 75%, at least 80%, at least 85%, at least 90%, at least 95%, at least 99%, or 100% identical to SEQ ID NO: 1061 or an amino acid sequence at least 65%, at least 70%, at least 75%, at least 80%, at least 85%, at least 90%, at least 95%, at least 99%, or 100% identical to amino acid sequence DAS, and a CDR3 having an amino acid sequence at least 65%, at least 70%, at least 75%, at least 80%, at least 85%, at least 90%, at least 95%, at least 99%, or 100% identical to SEQ ID NO: 173 or 792; (c) VH1 comprises a CDR1 having an amino acid sequence at least 65%, at least 70%, at least 75%, at least 80%, at least 85%, at least 90%, at least 95%, at least 99%, or 100% identical to SEQ ID NO: 148 or 1052, a CDR2 having an amino acid sequence at least 65%, at least 70%, at least 75%, at least 80%, at least 85%, at least 90%, at least 95%, at least 99%, or 100% identical to SEQ ID NO: 149 or 1053, and a CDR3 having an amino acid sequence at least 65%, at least 70%, at least 75%, at least 80%, at least 85%, at least 90%, at least 95%, at least 99%, or 100% identical to SEQ ID NO: 150, 765, or 1054; and (d) VH2 comprises a CDR1 having an amino acid sequence at least 65%, at least 70%, at least 75%, at least 80%, at least 85%, at least 90%, at least 95%, at least 99%, or 100% identical to SEQ ID NO: 175 or 1062, a CDR2 having an amino acid sequence at least 65%, at least 70%, at least 75%, at least 80%, at least 85%, at least 90%, at least 95%, at least 99%, or 100% identical to SEQ ID NO: 176 or 1063, and a CDR3 having an amino acid sequence at least 65%, at least 70%, at least 75%, at least 80%, at least 85%, at least 90%, at least 95%, at least 99%, or 100% identical to SEQ ID NO: 177, 793, or 1064.

[0047] In some aspects, (a) VL1 comprises an amino acid sequence that is at least 65%, at least 70%, at least 75%, at least 80%, at least 85%, at least 90%, at least 95%, at least 99%, or 100% identical to SEQ ID NO: 147; (b) VL2 comprises an amino acid sequence that is at least 65%, at least 70%, at least 75%, at least 80%, at least 85%, at least 90%, at least 95%, at least 99%, or 100% identical to SEQ ID NO: 174; (c) VH1 comprises an amino acid sequence that is at least 65%, at least 70%, at least 75%, at least 80%, at least 85%, at least 90%, at least 95%, at least 99%, or 100% identical to SEQ ID NO: 151; and (d) VH2 comprises an amino acid sequence that is at least 65%, at least 70%, at least 75%, at least 80%, at least 85%, at least 90%, at least 95%, at least 99%, or 100% identical to SEQ ID NO: 178.

[0048] In some aspects, (a) VL1 comprises a CDR1 having an amino acid sequence at least 65%, at least 70%, at least 75%, at least 80%, at least 85%, at least 90%, at least 95%, at least 99%, or 100% identical to SEQ ID NO: 138 or 1065, a CDR2 having an amino acid sequence at least 65%, at least 70%, at least 75%, at least 80%, at least 85%, at least 90%, at least 95%, at least 99%, or 100% identical to SEQ ID NO: 1061 or an amino acid sequence at least 65%, at least 70%, at least 75%, at least 80%, at least 85%, at least 90%, at least 95%, at least 99%, or 100% identical to amino acid sequence DAS, and a CDR3 having an amino acid sequence at least 65%, at least 70%, at least 75%, at least 80%, at least 85%, at least 90%, at least 95%, at least 99%, or 100% identical to SEQ ID NO: 139, 856, or 1066; (b) VL2 comprises a CDR1 having an amino acid sequence at least 65%, at least 70%, at least 75%, at least 80%, at least 85%, at least 90%, at least 95%, at least 99%, or 100% identical to SEQ ID NO: 152 or 1045, a CDR2 having an amino acid sequence at least 65%, at least 70%, at least 75%, at least 80%, at least 85%, at least 90%, at least 95%, at least 99%, or 100% identical to SEQ ID NO: 1046 or an amino acid sequence at least 65%, at least 70%, at least 75%, at least 80%, at least 85%, at least 90%, at least 95%, at least 99%, or 100% identical to amino acid sequence GAS, and a CDR3 having an amino acid sequence at least 65%, at least 70%, at least 75%, at least 80%, at least 85%, at least 90%, at least 95%, at least 99%, or 100% identical to SEQ ID NO: 153 or 766; (c) VH1 comprises a CDR1 having an amino acid sequence at least 65%, at least 70%, at least 75%, at least 80%, at least 85%, at least 90%, at least 95%, at least 99%, or 100% identical to SEQ ID NO: 141 or 1067, a CDR2 having an amino acid sequence at least 65%, at least 70%, at least 75%, at least 80%, at least 85%, at least 90%, at least 95%, at least 99%, or 100% identical to SEQ ID NO: 142 or 1068, and a CDR3 having an amino acid sequence at least 65%, at least 70%, at least 75%, at least 80%, at least 85%, at least 90%, at least 95%, at least 99%, or 100% identical to SEQ ID NO: 143, 857, or 1069; and (d) VH2 comprises a CDR1 having an amino acid sequence at least 65%, at least 70%, at least 75%, at least 80%, at least 85%, at least 90%, at least 95%, at least 99%, or 100% identical to SEQ ID NO: 155 or 1047, a CDR2 having an amino acid sequence at least 65%, at least 70%, at least 75%, at least 80%, at least 85%, at least 90%, at least 95%, at least 99%, or 100% identical to SEQ ID NO: 156 or 1048, and a CDR3 having an amino acid sequence at least 65%, at least 70%, at least 75%, at least 80%, at least 85%, at least 90%, at least 95%, at least 99%, or 100% identical to SEQ ID NO: 157, 767, or 1049.

[0049] In some aspects, (a) VL1 comprises an amino acid sequence that is at least 65%, at least 70%, at least 75%, at least 80%, at least 85%, at least 90%, at least 95%, at least 99%, or 100% identical to SEQ ID NO: 140; (b) VL2 comprises an amino acid sequence that is at least 65%, at least 70%, at least 75%, at least 80%, at least 85%, at least 90%, at least 95%, at least 99%, or 100% identical to SEQ ID NO: 154; (c) VH1 comprises an amino acid sequence that is at least 65%, at least 70%, at least 75%, at least 80%, at least 85%, at least 90%, at least 95%, at least 99%, or 100% identical to SEQ ID NO: 144; and (d) VH2 comprises an amino acid sequence that is at least 65%, at least 70%, at least 75%, at least 80%, at least 85%, at least 90%, at least 95%, at least 99%, or 100% identical to SEQ ID NO: 158.

[0050] In some aspects, (a) VL1 comprises a CDR1 having an amino acid sequence at least 65%, at least 70%, at least 75%, at least 80%, at least 85%, at least 90%, at least 95%, at least 99%, or 100% identical to SEQ ID NO: 145 or 1050, a CDR2 having an amino acid sequence at least 65%, at least 70%, at least 75%, at least 80%, at least 85%, at least 90%, at least 95%, at least 99%, or 100% identical to SEQ ID NO: 1051 or an amino acid sequence at least 65%, at least 70%, at least 75%, at least 80%, at least 85%, at least 90%, at least 95%, at least 99%, or 100% identical to amino acid sequence AAS, and a CDR3 having an amino acid sequence at least 65%, at least 70%, at least 75%, at least 80%, at least 85%, at least 90%, at least 95%, at least 99%, or 100% identical to SEQ ID NO: 146 or 764; (b) VL2 comprises a CDR1 having an amino acid sequence at least 65%, at least 70%, at least 75%, at least 80%, at least 85%, at least 90%, at least 95%, at least 99%, or 100% identical to SEQ ID NO: 145 or 1050, a CDR2 having an amino acid sequence at least 65%, at least 70%, at least 75%, at least 80%, at least 85%, at least 90%, at least 95%, at least 99%, or 100% identical to SEQ ID NO: 1051 or an amino acid sequence at least 65%, at least 70%, at least 75%, at least 80%, at least 85%, at least 90%, at least 95%, at least 99%, or 100% identical to amino acid sequence AAS, and a CDR3 having an amino acid sequence at least 65%, at least 70%, at least 75%, at least 80%, at least 85%, at least 90%, at least 95%, at least 99%, or 100% identical to SEQ ID NO: 146 or 764; (c) VH1 comprises a CDR1 having an amino acid sequence at least 65%, at least 70%, at least 75%, at least 80%, at least 85%, at least 90%, at least 95%, at least 99%, or 100% identical to SEQ ID NO: 148 or 1052, a CDR2 having an amino acid sequence at least 65%, at least 70%, at least 75%, at least 80%, at least 85%, at least 90%, at least 95%, at least 99%, or 100% identical to SEQ ID NO: 149 or 1053, and a CDR3 having an amino acid sequence at least 65%, at least 70%, at least 75%, at least 80%, at least 85%, at least 90%, at least 95%, at least 99%, or 100% identical to SEQ ID NO: 150, 765, or 1054; and (d) VH2 comprises a CDR1 having an amino acid sequence at least 65%, at least 70%, at least 75%, at least 80%, at least 85%, at least 90%, at least 95%, at least 99%, or 100% identical to SEQ ID NO: 148 or 1052, a CDR2 having an amino acid sequence at least 65%, at least 70%, at least 75%, at least 80%, at least 85%, at least 90%, at least 95%, at least 99%, or 100% identical to SEQ ID NO: 149 or 1053, and a CDR3 having an amino acid sequence at least 65%, at least 70%, at least 75%, at least 80%, at least 85%, at least 90%, at least 95%, at least 99%, or 100% identical to SEQ ID NO: 150, 765, or 1054.

[0051] In some aspects, (a) VL1 comprises an amino acid sequence that is at least 65%, at least 70%, at least 75%, at least 80%, at least 85%, at least 90%, at least 95%, at least 99%, or 100% identical to SEQ ID NO: 147; (b) VL2 comprises an amino acid sequence that is at least 65%, at least 70%, at least 75%, at least 80%, at least 85%, at least 90%, at least 95%, at least 99%, or 100% identical to SEQ ID NO: 147; (c) VH1 comprises an amino acid sequence that is at least 65%, at least 70%, at least 75%, at least 80%, at least 85%, at least 90%, at least 95%, at least 99%, or 100% identical to SEQ ID NO: 151; and (d) VH2 comprises an amino acid sequence that is at least 65%, at least 70%, at least 75%, at least 80%, at least 85%, at least 90%, at least 95%, at least 99%, or 100% identical to SEQ ID NO: 151.

[0052] In some aspects, (a) VL1 comprises a CDR1 having an amino acid sequence at least 65%, at least 70%, at least 75%, at least 80%, at least 85%, at least 90%, at least 95%, at least 99%, or 100% identical to SEQ ID NO: 152 or 1045, a CDR2 having an amino acid sequence at least 65%, at least 70%, at least 75%, at least 80%, at least 85%, at least 90%, at least 95%, at least 99%, or 100% identical to SEQ ID NO: 1046 or an amino acid sequence at least 65%, at least 70%, at least 75%, at least 80%, at least 85%, at least 90%, at least 95%, at least 99%, or 100% identical to amino acid sequence GAS, and a CDR3 having an amino acid sequence at least 65%, at least 70%, at least 75%, at least 80%, at least 85%, at least 90%, at least 95%, at least 99%, or 100% identical to SEQ ID NO: 153 or 766; (b) VL2 comprises a CDR1 having an amino acid sequence at least 65%, at least 70%, at least 75%, at least 80%, at least 85%, at least 90%, at least 95%, at least 99%, or 100% identical to SEQ ID NO: 152 or 1045, a CDR2 having an amino acid sequence at least 65%, at least 70%, at least 75%, at least 80%, at least 85%, at least 90%, at least 95%, at least 99%, or 100% identical to SEQ ID NO: 1046 or an amino acid sequence at least 65%, at least 70%, at least 75%, at least 80%, at least 85%, at least 90%, at least 95%, at least 99%, or 100% identical to amino acid sequence GAS, and a CDR3 having an amino acid sequence at least 65%, at least 70%, at least 75%, at least 80%, at least 85%, at least 90%, at least 95%, at least 99%, or 100% identical to SEQ ID NO: 153 or 766; (c) VH1 comprises a CDR1 having an amino acid sequence at least 65%, at least 70%, at least 75%, at least 80%, at least 85%, at least 90%, at least 95%, at least 99%, or 100% identical to SEQ ID NO: 155 or 1047, a CDR2 having an amino acid sequence at least 65%, at least 70%, at least 75%, at least 80%, at least 85%, at least 90%, at least 95%, at least 99%, or 100% identical to SEQ ID NO: 156 or 1048, and a CDR3 having an amino acid sequence at least 65%, at least 70%, at least 75%, at least 80%, at least 85%, at least 90%, at least 95%, at least 99%, or 100% identical to SEQ ID NO: 157, 767, or 1049; and (d) VH2 comprises a CDR1 having an amino acid sequence at least 65%, at least 70%, at least 75%, at least 80%, at least 85%, at least 90%, at least 95%, at least 99%, or 100% identical to SEQ ID NO: 155 or 1047, a CDR2 having an amino acid sequence at least 65%, at least 70%, at least 75%, at least 80%, at least 85%, at least 90%, at least 95%, at least 99%, or 100% identical to SEQ ID NO: 156 or 1048, and a CDR3 having an amino acid sequence at least 65%, at least 70%, at least 75%, at least 80%, at least 85%, at least 90%, at least 95%, at least 99%, or 100% identical to SEQ ID NO: 157, 767, or 1049.

[0053] In some aspects, (a) VL1 comprises an amino acid sequence that is at least 65%, at least 70%, at least 75%, at least 80%, at least 85%, at least 90%, at least 95%, at least 99%, or 100% identical to SEQ ID NO: 154; (b) VL2 comprises an amino acid sequence that is at least 65%, at least 70%, at least 75%, at least 80%, at least 85%, at least 90%, at least 95%, at least 99%, or 100% identical to SEQ ID NO: 154; (c) VH1 comprises an amino acid sequence that is at least 65%, at least 70%, at least 75%, at least 80%, at least 85%, at least 90%, at least 95%, at least 99%, or 100% identical to SEQ ID NO: 158; and (d) VH2 comprises an amino acid sequence that is at least 65%, at least 70%, at least 75%, at least 80%, at least 85%, at least 90%, at least 95%, at least 99%, or 100% identical to SEQ ID NO: 158.

[0054] In some aspects, (a) VL1 comprises a CDR1 having an amino acid sequence at least 65%, at least 70%, at least 75%, at least 80%, at least 85%, at least 90%, at least 95%, at least 99%, or 100% identical to SEQ ID NO: 9 or 1055, a CDR2 having an amino acid sequence at least 65%, at least 70%, at least 75%, at least 80%, at least 85%, at least 90%, at least 95%, at least 99%, or 100% identical to SEQ ID NO: 1056 or an amino acid sequence at least 65%, at least 70%, at least 75%, at least 80%, at least 85%, at least 90%, at least 95%, at least 99%, or 100% identical to amino acid sequence GAS, and a CDR3 having an amino acid sequence at least 65%, at least 70%, at least 75%, at least 80%, at least 85%, at least 90%, at least 95%, at least 99%, or 100% identical to SEQ ID NO: 10; (b) VL2 comprises a CDR1 having an amino acid sequence at least 65%, at least 70%, at least 75%, at least 80%, at least 85%, at least 90%, at least 95%, at least 99%, or 100% identical to SEQ ID NO: 9 or 1055, a CDR2 having an amino acid sequence at least 65%, at least 70%, at least 75%, at least 80%, at least 85%, at least 90%, at least 95%, at least 99%, or 100% identical to SEQ ID NO: 1056 or an amino acid sequence at least 65%, at least 70%, at least 75%, at least 80%, at least 85%, at least 90%, at least 95%, at least 99%, or 100% identical to amino acid sequence GAS, and a CDR3 having an amino acid sequence at least 65%, at least 70%, at least 75%, at least 80%, at least 85%, at least 90%, at least 95%, at least 99%, or 100% identical to SEQ ID NO: 10; (c) VH1 comprises a CDR1 having an amino acid sequence at least 65%, at least 70%, at least 75%, at least 80%, at least 85%, at least 90%, at least 95%, at least 99%, or 100% identical to SEQ ID NO: 12 or 1057, a CDR2 having an amino acid sequence at least 65%, at least 70%, at least 75%, at least 80%, at least 85%, at least 90%, at least 95%, at least 99%, or 100% identical to SEQ ID NO: 6 or 1058, and a CDR3 having an amino acid sequence at least 65%, at least 70%, at least 75%, at least 80%, at least 85%, at least 90%, at least 95%, at least 99%, or 100% identical to SEQ ID NO: 13 or 1059; and (d) VH2 comprises a CDR1 having an amino acid sequence at least 65%, at least 70%, at least 75%, at least 80%, at least 85%, at least 90%, at least 95%, at least 99%, or 100% identical to SEQ ID NO: 12 or 1057, a CDR2 having an amino acid sequence at least 65%, at least 70%, at least 75%, at least 80%, at least 85%, at least 90%, at least 95%, at least 99%, or 100% identical to SEQ ID NO: 6 or 1058, and a CDR3 having an amino acid sequence at least 65%, at least 70%, at least 75%, at least 80%, at least 85%, at least 90%, at least 95%, at least 99%, or 100% identical to SEQ ID NO: 13 or 1059.

[0055] In some aspects, (a) VL1 comprises an amino acid sequence that is at least 65%, at least 70%, at least 75%, at least 80%, at least 85%, at least 90%, at least 95%, at least 99%, or 100% identical to SEQ ID NO: 11; (b) VL2 comprises an amino acid sequence that is at least 65%, at least 70%, at least 75%, at least 80%, at least 85%, at least 90%, at least 95%, at least 99%, or 100% identical to SEQ ID NO: 11; (c) VH1 comprises an amino acid sequence that is at least 65%, at least 70%, at least 75%, at least 80%, at least 85%, at least 90%, at least 95%, at least 99%, or 100% identical to SEQ ID NO: 14; and (d) VH2 comprises an amino acid sequence that is at least 65%, at least 70%, at least 75%, at least 80%, at least 85%, at least 90%, at least 95%, at least 99%, or 100% identical to SEQ ID NO: 14.

[0056] In some aspects, (a) VL1 comprises a CDR1 having an amino acid sequence at least 65%, at least 70%, at least 75%, at least 80%, at least 85%, at least 90%, at least 95%, at least 99%, or 100% identical to SEQ ID NO: 23, a CDR2 having an amino acid sequence at least 65%, at least 70%, at least 75%, at least 80%, at least 85%, at least 90%, at least 95%, at least 99%, or 100% identical to amino acid sequence GTN, and a CDR3 having an amino acid sequence at least 65%, at least 70%, at least 75%, at least 80%, at least 85%, at least 90%, at least 95%, at least 99%, or 100% identical to SEQ ID NO: 24 or 325; (b) VL2 comprises a CDR1 having an amino acid sequence at least 65%, at least 70%, at least 75%, at least 80%, at least 85%, at least 90%, at least 95%, at least 99%, or 100% identical to SEQ ID NO: 15, a CDR2 having an amino acid sequence at least 65%, at least 70%, at least 75%, at least 80%, at least 85%, at least 90%, at least 95%, at least 99%, or 100% identical to amino acid sequence LGS, and a CDR3 having an amino acid sequence at least 65%, at least 70%, at least 75%, at least 80%, at least 85%, at least 90%, at least 95%, at least 99%, or 100% identical to SEQ ID NO: 16; (c) VH1 comprises a CDR1 having an amino acid sequence at least 65%, at least 70%, at least 75%, at least 80%, at least 85%, at least 90%, at least 95%, at least 99%, or 100% identical to SEQ ID NO: 26, a CDR2 having an amino acid sequence at least 65%, at least 70%, at least 75%, at least 80%, at least 85%, at least 90%, at least 95%, at least 99%, or 100% identical to SEQ ID NO: 27, and a CDR3 having an amino acid sequence at least 65%, at least 70%, at least 75%, at least 80%, at least 85%, at least 90%, at least 95%, at least 99%, or 100% identical to SEQ ID NO: 28 or 332; and (d) VH2 comprises a CDR1 having an amino acid sequence at least 65%, at least 70%, at least 75%, at least 80%, at least 85%, at least 90%, at least 95%, at least 99%, or 100% identical to SEQ ID NO: 18, a CDR2 having an amino acid sequence at least 65%, at least 70%, at least 75%, at least 80%, at least 85%, at least 90%, at least 95%, at least 99%, or 100% identical to SEQ ID NO: 19, and a CDR3 having an amino acid sequence at least 65%, at least 70%, at least 75%, at least 80%, at least 85%, at least 90%, at least 95%, at least 99%, or 100% identical to SEQ ID NO: 20.

[0057] In some aspects, (a) VL1 comprises an amino acid sequence that is at least 65%, at least 70%, at least 75%, at least 80%, at least 85%, at least 90%, at least 95%, at least 99%, or 100% identical to SEQ ID NO: 25; (b) VL2 comprises an amino acid sequence that is at least 65%, at least 70%, at least 75%, at least 80%, at least 85%, at least 90%, at least 95%, at least 99%, or 100% identical to SEQ ID NO: 17; (c) VH1 comprises an amino acid sequence that is at least 65%, at least 70%, at least 75%, at least 80%, at least 85%, at least 90%, at least 95%, at least 99%, or 100% identical to SEQ ID NO: 29; and (d) VH2 comprises an amino acid sequence that is at least 65%, at least 70%, at least 75%, at least 80%, at least 85%, at least 90%, at least 95%, at least 99%, or 100% identical to SEQ ID NO: 21 or 22.

[0058] In some aspects, (a) VL1 comprises a CDR1 having an amino acid sequence at least 65%, at least 70%, at least 75%, at least 80%, at least 85%, at least 90%, at least 95%, at least 99%, or 100% identical to SEQ ID NO: 9 or 1055, a CDR2 having an amino acid sequence at least 65%, at least 70%, at least 75%, at least 80%, at least 85%, at least 90%, at least 95%, at least 99%, or 100% identical to SEQ ID NO: 1056 or an amino acid sequence at least 65%, at least 70%, at least 75%, at least 80%, at least 85%, at least 90%, at least 95%, at least 99%, or 100% identical to amino acid sequence GAS, and a CDR3 having an amino acid sequence at least 65%, at least 70%, at least 75%, at least 80%, at least 85%, at least 90%, at least 95%, at least 99%, or 100% identical to SEQ ID NO: 10; (b) VL2 comprises a CDR1 having an amino acid sequence at least 65%, at least 70%, at least 75%, at least 80%, at least 85%, at least 90%, at least 95%, at least 99%, or 100% identical to SEQ ID NO: 15, a CDR2 having an amino acid sequence at least 65%, at least 70%, at least 75%, at least 80%, at least 85%, at least 90%, at least 95%, at least 99%, or 100% identical to amino acid sequence LGS, and a CDR3 having an amino acid sequence at least 65%, at least 70%, at least 75%, at least 80%, at least 85%, at least 90%, at least 95%, at least 99%, or 100% identical to SEQ ID NO: 16; (c) VH1 comprises a CDR1 having an amino acid sequence at least 65%, at least 70%, at least 75%, at least 80%, at least 85%, at least 90%, at least 95%, at least 99%, or 100% identical to SEQ ID NO: 12 or 1057, a CDR2 having an amino acid sequence at least 65%, at least 70%, at least 75%, at least 80%, at least 85%, at least 90%, at least 95%, at least 99%, or 100% identical to SEQ ID NO: 6 or 1058, and a CDR3 having an amino acid sequence at least 65%, at least 70%, at least 75%, at least 80%, at least 85%, at least 90%, at least 95%, at least 99%, or 100% identical to SEQ ID NO: 13 or 1059; and (d) VH2 comprises a CDR1 having an amino acid sequence at least 65%, at least 70%, at least 75%, at least 80%, at least 85%, at least 90%, at least 95%, at least 99%, or 100% identical to SEQ ID NO: 18, a CDR2 having an amino acid sequence at least 65%, at least 70%, at least 75%, at least 80%, at least 85%, at least 90%, at least 95%, at least 99%, or 100% identical to SEQ ID NO: 19, and a CDR3 having an amino acid sequence at least 65%, at least 70%, at least 75%, at least 80%, at least 85%, at least 90%, at least 95%, at least 99%, or 100% identical to SEQ ID NO: 20.

[0059] In some aspects, (a) VL1 comprises an amino acid sequence that is at least 65%, at least 70%, at least 75%, at least 80%, at least 85%, at least 90%, at least 95%, at least 99%, or 100% identical to SEQ ID NO: 11; (b) VL2 comprises an amino acid sequence that is at least 65%, at least 70%, at least 75%, at least 80%, at least 85%, at least 90%, at least 95%, at least 99%, or 100% identical to SEQ ID NO: 17; (c) VH1 comprises an amino acid sequence that is at least 65%, at least 70%, at least 75%, at least 80%, at least 85%, at least 90%, at least 95%, at least 99%, or 100% identical to SEQ ID NO: 14; and (d) VH2 comprises an amino acid sequence that is at least 65%, at least 70%, at least 75%, at least 80%, at least 85%, at least 90%, at least 95%, at least 99%, or 100% identical to SEQ ID NO: 21 or 22.

[0060] In some aspects, (a) VL1 comprises a CDR1 having an amino acid sequence at least 65%, at least 70%, at least 75%, at least 80%, at least 85%, at least 90%, at least 95%, at least 99%, or 100% identical to SEQ ID NO: 9 or 1055, a CDR2 having an amino acid sequence at least 65%, at least 70%, at least 75%, at least 80%, at least 85%, at least 90%, at least 95%, at least 99%, or 100% identical to SEQ ID NO: 1056 or an amino acid sequence at least 65%, at least 70%, at least 75%, at least 80%, at least 85%, at least 90%, at least 95%, at least 99%, or 100% identical to amino acid sequence GAS, and a CDR3 having an amino acid sequence at least 65%, at least 70%, at least 75%, at least 80%, at least 85%, at least 90%, at least 95%, at least 99%, or 100% identical to SEQ ID NO: 10; (b) VL2 comprises a CDR1 having an amino acid sequence at least 65%, at least 70%, at least 75%, at least 80%, at least 85%, at least 90%, at least 95%, at least 99%, or 100% identical to SEQ ID NO: 23, a CDR2 having an amino acid sequence at least 65%, at least 70%, at least 75%, at least 80%, at least 85%, at least 90%, at least 95%, at least 99%, or 100% identical to amino acid sequence GTN, and a CDR3 having an amino acid sequence at least 65%, at least 70%, at least 75%, at least 80%, at least 85%, at least 90%, at least 95%, at least 99%, or 100% identical to SEQ ID NO: 24 or 325; (c) VH1 comprises a CDR1 having an amino acid sequence at least 65%, at least 70%, at least 75%, at least 80%, at least 85%, at least 90%, at least 95%, at least 99%, or 100% identical to SEQ ID NO: 12 or 1057, a CDR2 having an amino acid sequence at least 65%, at least 70%, at least 75%, at least 80%, at least 85%, at least 90%, at least 95%, at least 99%, or 100% identical to SEQ ID NO: 6 or 1058, and a CDR3 having an amino acid sequence at least 65%, at least 70%, at least 75%, at least 80%, at least 85%, at least 90%, at least 95%, at least 99%, or 100% identical to SEQ ID NO: 13 or 1059; and (d) VH2 comprises a CDR1 having an amino acid sequence at least 65%, at least 70%, at least 75%, at least 80%, at least 85%, at least 90%, at least 95%, at least 99%, or 100% identical to SEQ ID NO: 26, a CDR2 having an amino acid sequence at least 65%, at least 70%, at least 75%, at least 80%, at least 85%, at least 90%, at least 95%, at least 99%, or 100% identical to SEQ ID NO: 27, and a CDR3 having an amino acid sequence at least 65%, at least 70%, at least 75%, at least 80%, at least 85%, at least 90%, at least 95%, at least 99%, or 100% identical to SEQ ID NO: 28 or 332.

[0061] In some aspects, (a) VL1 comprises an amino acid sequence that is at least 65%, at least 70%, at least 75%, at least 80%, at least 85%, at least 90%, at least 95%, at least 99%, or 100% identical to SEQ ID NO: 11; (b) VL2 comprises an amino acid sequence that is at least 65%, at least 70%, at least 75%, at least 80%, at least 85%, at least 90%, at least 95%, at least 99%, or 100% identical to SEQ ID NO: 25; (c) VH1 comprises an amino acid sequence that is at least 65%, at least 70%, at least 75%, at least 80%, at least 85%, at least 90%, at least 95%, at least 99%, or 100% identical SEQ ID NO: 14; and (d) VH2 comprises an amino acid sequence that is at least 65%, at least 70%, at least 75%, at least 80%, at least 85%, at least 90%, at least 95%, at least 99%, or 100% identical to SEQ ID NO: 29.

[0062] In some aspects, (a) VL1 comprises a CDR1 having an amino acid sequence at least 65%, at least 70%, at least 75%, at least 80%, at least 85%, at least 90%, at least 95%, at least 99%, or 100% identical to SEQ ID NO: 1 or 324, a CDR2 having an amino acid sequence at least 65%, at least 70%, at least 75%, at least 80%, at least 85%, at least 90%, at least 95%, at least 99%, or 100% identical to SEQ ID NO: 2 or an amino acid sequence at least 65%, at least 70%, at least 75%, at least 80%, at least 85%, at least 90%, at least 95%, at least 99%, or 100% identical to amino acid sequence AAS, and a CDR3 having an amino acid sequence at least 65%, at least 70%, at least 75%, at least 80%, at least 85%, at least 90%, at least 95%, at least 99%, or 100% identical to SEQ ID NO: 3; (b) VL2 comprises a CDR1 having an amino acid sequence at least 65%, at least 70%, at least 75%, at least 80%, at least 85%, at least 90%, at least 95%, at least 99%, or 100% identical to SEQ ID NO: 23, a CDR2 having an amino acid sequence at least 65%, at least 70%, at least 75%, at least 80%, at least 85%, at least 90%, at least 95%, at least 99%, or 100% identical to amino acid sequence GTN, and a CDR3 having an amino acid sequence at least 65%, at least 70%, at least 75%, at least 80%, at least 85%, at least 90%, at least 95%, at least 99%, or 100% identical to SEQ ID NO: 24 or 325; (c) VH1 comprises a CDR1 having an amino acid sequence at least 65%, at least 70%, at least 75%, at least 80%, at least 85%, at least 90%, at least 95%, at least 99%, or 100% identical to SEQ ID NO: 5, a CDR2 having an amino acid sequence at least 65%, at least 70%, at least 75%, at least 80%, at least 85%, at least 90%, at least 95%, at least 99%, or 100% identical to SEQ ID NO: 6, and a CDR3 having an amino acid sequence at least 65%, at least 70%, at least 75%, at least 80%, at least 85%, at least 90%, at least 95%, at least 99%, or 100% identical to SEQ ID NO: 7; and (d) VH2 comprises a CDR1 having an amino acid sequence at least 65%, at least 70%, at least 75%, at least 80%, at least 85%, at least 90%, at least 95%, at least 99%, or 100% identical to SEQ ID NO: 26, a CDR2 having an amino acid sequence at least 65%, at least 70%, at least 75%, at least 80%, at least 85%, at least 90%, at least 95%, at least 99%, or 100% identical to SEQ ID NO: 27, and a CDR3 having an amino acid sequence at least 65%, at least 70%, at least 75%, at least 80%, at least 85%, at least 90%, at least 95%, at least 99%, or 100% identical to SEQ ID NO: 28 or 332.

[0063] In some aspects, (a) VL1 comprises an amino acid sequence that is at least 65%, at least 70%, at least 75%, at least 80%, at least 85%, at least 90%, at least 95%, at least 99%, or 100% identical to SEQ ID NO: 4; (b) VL2 comprises an amino acid sequence that is at least 65%, at least 70%, at least 75%, at least 80%, at least 85%, at least 90%, at least 95%, at least 99%, or 100% identical to SEQ ID NO: 25; (c) VH1 comprises an amino acid sequence that is at least 65%, at least 70%, at least 75%, at least 80%, at least 85%, at least 90%, at least 95%, at least 99%, or 100% identical to SEQ ID NO: 8; and (d) VH2 comprises an amino acid sequence that is at least 65%, at least 70%, at least 75%, at least 80%, at least 85%, at least 90%, at least 95%, at least 99%, or 100% identical to SEQ ID NO: 29.

[0064] In some aspects, (a) VL1 comprises a CDR1 having an amino acid sequence at least 65%, at least 70%, at least 75%, at least 80%, at least 85%, at least 90%, at least 95%, at least 99%, or 100% identical to SEQ ID NO: 30, a CDR2 having an amino acid sequence at least 65%, at least 70%, at least 75%, at least 80%, at least 85%, at least 90%, at least 95%, at least 99%, or 100% identical to SEQ ID NO: 31 or an amino acid sequence at least 65%, at least 70%, at least 75%, at least 80%, at least 85%, at least 90%, at least 95%, at least 99%, or 100% identical to amino acid sequence SAS, and a CDR3 having an amino acid sequence at least 65%, at least 70%, at least 75%, at least 80%, at least 85%, at least 90%, at least 95%, at least 99%, or 100% identical to SEQ ID NO: 32, 38, or 326; (b) VL2 comprises a CDR1 having an amino acid sequence at least 65%, at least 70%, at least 75%, at least 80%, at least 85%, at least 90%, at least 95%, at least 99%, or 100% identical to SEQ ID NO: 15, a CDR2 having an amino acid sequence at least 65%, at least 70%, at least 75%, at least 80%, at least 85%, at least 90%, at least 95%, at least 99%, or 100% identical to amino acid sequence LGS, and a CDR3 having an amino acid sequence at least 65%, at least 70%, at least 75%, at least 80%, at least 85%, at least 90%, at least 95%, at least 99%, or 100% identical to SEQ ID NO: 16; (c) VH1 comprises a CDR1 having an amino acid sequence at least 65%, at least 70%, at least 75%, at least 80%, at least 85%, at least 90%, at least 95%, at least 99%, or 100% identical to SEQ ID NO: 34, a CDR2 having an amino acid sequence at least 65%, at least 70%, at least 75%, at least 80%, at least 85%, at least 90%, at least 95%, at least 99%, or 100% identical to SEQ ID NO: 35, and a CDR3 having an amino acid sequence at least 65%, at least 70%, at least 75%, at least 80%, at least 85%, at least 90%, at least 95%, at least 99%, or 100% identical to SEQ ID NO: 36, 40, or 327; and (d) VH2 comprises a CDR1 having an amino acid sequence at least 65%, at least 70%, at least 75%, at least 80%, at least 85%, at least 90%, at least 95%, at least 99%, or 100% identical to SEQ ID NO: 18, a CDR2 having an amino acid sequence at least 65%, at least 70%, at least 75%, at least 80%, at least 85%, at least 90%, at least 95%, at least 99%, or 100% identical to SEQ ID NO: 19, and a CDR3 having an amino acid sequence at least 65%, at least 70%, at least 75%, at least 80%, at least 85%, at least 90%, at least 95%, at least 99%, or 100% identical to SEQ ID NO: 20.

[0065] In some aspects, (a) VL1 comprises an amino acid sequence that is at least 65%, at least 70%, at least 75%, at least 80%, at least 85%, at least 90%, at least 95%, at least 99%, or 100% identical to SEQ ID NO: 33 or 39; (b) VL2 comprises an amino acid sequence that is at least 65%, at least 70%, at least 75%, at least 80%, at least 85%, at least 90%, at least 95%, at least 99%, or 100% identical to SEQ ID NO: 17; (c) VH1 comprises an amino acid sequence that is at least 65%, at least 70%, at least 75%, at least 80%, at least 85%, at least 90%, at least 95%, at least 99%, or 100% identical to SEQ ID NO: 37; and (d) VH2 comprises an amino acid sequence that is at least 65%, at least 70%, at least 75%, at least 80%, at least 85%, at least 90%, at least 95%, at least 99%, or 100% identical to SEQ ID NO: 21 or 22.

[0066] In some aspects, (a) VL1 comprises a CDR1 having an amino acid sequence at least 65%, at least 70%, at least 75%, at least 80%, at least 85%, at least 90%, at least 95%, at least 99%, or 100% identical to SEQ ID NO: 9 or 1055, a CDR2 having an amino acid sequence at least 65%, at least 70%, at least 75%, at least 80%, at least 85%, at least 90%, at least 95%, at least 99%, or 100% identical to SEQ ID NO: 1056 or an amino acid sequence at least 65%, at least 70%, at least 75%, at least 80%, at least 85%, at least 90%, at least 95%, at least 99%, or 100% identical to amino acid sequence GAS, and a CDR3 having an amino acid sequence at least 65%, at least 70%, at least 75%, at least 80%, at least 85%, at least 90%, at least 95%, at least 99%, or 100% identical to SEQ ID NO: 10; (b) VL2 comprises a CDR1 having an amino acid sequence at least 65%, at least 70%, at least 75%, at least 80%, at least 85%, at least 90%, at least 95%, at least 99%, or 100% identical to SEQ ID NO: 15, a CDR2 having an amino acid sequence at least 65%, at least 70%, at least 75%, at least 80%, at least 85%, at least 90%, at least 95%, at least 99%, or 100% identical to amino acid sequence LGS, and a CDR3 having an amino acid sequence at least 65%, at least 70%, at least 75%, at least 80%, at least 85%, at least 90%, at least 95%, at least 99%, or 100% identical to SEQ ID NO: 16; (c) VH1 comprises a CDR1 having an amino acid sequence at least 65%, at least 70%, at least 75%, at least 80%, at least 85%, at least 90%, at least 95%, at least 99%, or 100% identical to SEQ ID NO: 12 or 1057, a CDR2 having an amino acid sequence at least 65%, at least 70%, at least 75%, at least 80%, at least 85%, at least 90%, at least 95%, at least 99%, or 100% identical to SEQ ID NO: 6 or 1058, and a CDR3 having an amino acid sequence at least 65%, at least 70%, at least 75%, at least 80%, at least 85%, at least 90%, at least 95%, at least 99%, or 100% identical to SEQ ID NO: 13 or 1059; and (d) VH2 comprises a CDR1 having an amino acid sequence at least 65%, at least 70%, at least 75%, at least 80%, at least 85%, at least 90%, at least 95%, at least 99%, or 100% identical to SEQ ID NO: 18, a CDR2 having an amino acid sequence at least 65%, at least 70%, at least 75%, at least 80%, at least 85%, at least 90%, at least 95%, at least 99%, or 100% identical to SEQ ID NO: 19, and a CDR3 having an amino acid sequence at least 65%, at least 70%, at least 75%, at least 80%, at least 85%, at least 90%, at least 95%, at least 99%, or 100% identical to SEQ ID NO: 20.

[0067] In some aspects, (a) VL1 comprises an amino acid sequence that is at least 65%, at least 70%, at least 75%, at least 80%, at least 85%, at least 90%, at least 95%, at least 99%, or 100% identical to SEQ ID NO: 11; (b) VL2 comprises an amino acid sequence that is at least 65%, at least 70%, at least 75%, at least 80%, at least 85%, at least 90%, at least 95%, at least 99%, or 100% identical to SEQ ID NO: 17; (c) VH1 comprises an amino acid sequence that is at least 65%, at least 70%, at least 75%, at least 80%, at least 85%, at least 90%, at least 95%, at least 99%, or 100% identical to SEQ ID NO: 14; and (d) VH2 comprises an amino acid sequence that is at least 65%, at least 70%, at least 75%, at least 80%, at least 85%, at least 90%, at least 95%, at least 99%, or 100% identical to SEQ ID NO: 21 or 22.

[0068] In some aspects, (a) VL1 comprises a CDR1 having an amino acid sequence at least 65%, at least 70%, at least 75%, at least 80%, at least 85%, at least 90%, at least 95%, at least 99%, or 100% identical to SEQ ID NO: 9 or 1055, a CDR2 having an amino acid sequence at least 65%, at least 70%, at least 75%, at least 80%, at least 85%, at least 90%, at least 95%, at least 99%, or 100% identical to SEQ ID NO: 1056 or an amino acid sequence at least 65%, at least 70%, at least 75%, at least 80%, at least 85%, at least 90%, at least 95%, at least 99%, or 100% identical to amino acid sequence GAS, and a CDR3 having an amino acid sequence at least 65%, at least 70%, at least 75%, at least 80%, at least 85%, at least 90%, at least 95%, at least 99%, or 100% identical to SEQ ID NO: 10; (b) VL2 comprises a CDR1 having an amino acid sequence at least 65%, at least 70%, at least 75%, at least 80%, at least 85%, at least 90%, at least 95%, at least 99%, or 100% identical to SEQ ID NO: 23, a CDR2 having an amino acid sequence at least 65%, at least 70%, at least 75%, at least 80%, at least 85%, at least 90%, at least 95%, at least 99%, or 100% identical to amino acid sequence GTN, and a CDR3 having an amino acid sequence at least 65%, at least 70%, at least 75%, at least 80%, at least 85%, at least 90%, at least 95%, at least 99%, or 100% identical to SEQ ID NO: 24 or 325; (c) VH1 comprises a CDR1 having an amino acid sequence at least 65%, at least 70%, at least 75%, at least 80%, at least 85%, at least 90%, at least 95%, at least 99%, or 100% identical to SEQ ID NO: 12 or 1057, a CDR2 having an amino acid sequence at least 65%, at least 70%, at least 75%, at least 80%, at least 85%, at least 90%, at least 95%, at least 99%, or 100% identical to SEQ ID NO: 6 or 1058, and a CDR3 having an amino acid sequence at least 65%, at least 70%, at least 75%, at least 80%, at least 85%, at least 90%, at least 95%, at least 99%, or 100% identical to SEQ ID NO: 13 or 1059; and (d) VH2 comprises a CDR1 having an amino acid sequence at least 65%, at least 70%, at least 75%, at least 80%, at least 85%, at least 90%, at least 95%, at least 99%, or 100% identical to SEQ ID NO: 26, a CDR2 having an amino acid sequence at least 65%, at least 70%, at least 75%, at least 80%, at least 85%, at least 90%, at least 95%, at least 99%, or 100% identical to SEQ ID NO: 27, and a CDR3 having an amino acid sequence at least 65%, at least 70%, at least 75%, at least 80%, at least 85%, at least 90%, at least 95%, at least 99%, or 100% identical to SEQ ID NO: 28 or 332.

[0069] In some aspects, (a) VL1 comprises an amino acid sequence that is at least 65%, at least 70%, at least 75%, at least 80%, at least 85%, at least 90%, at least 95%, at least 99%, or 100% identical to SEQ ID NO: 11; (b) VL2 comprises an amino acid sequence that is at least 65%, at least 70%, at least 75%, at least 80%, at least 85%, at least 90%, at least 95%, at least 99%, or 100% identical to SEQ ID NO: 25; (c) VH1 comprises an amino acid sequence that is at least 65%, at least 70%, at least 75%, at least 80%, at least 85%, at least 90%, at least 95%, at least 99%, or 100% identical to SEQ ID NO: 14; and (d) VH2 comprises an amino acid sequence that is at least 65%, at least 70%, at least 75%, at least 80%, at least 85%, at least 90%, at least 95%, at least 99%, or 100% identical to SEQ ID NO: 29.

[0070] In some aspects, (a) VL1 comprises a CDR1 having an amino acid sequence at least 65%, at least 70%, at least 75%, at least 80%, at least 85%, at least 90%, at least 95%, at least 99%, or 100% identical to SEQ ID NO: 1 or 324, a CDR2 having an amino acid sequence at least 65%, at least 70%, at least 75%, at least 80%, at least 85%, at least 90%, at least 95%, at least 99%, or 100% identical to SEQ ID NO: 2 or an amino acid sequence at least 65%, at least 70%, at least 75%, at least 80%, at least 85%, at least 90%, at least 95%, at least 99%, or 100% identical to amino acid sequence AAS, and a CDR3 having an amino acid sequence at least 65%, at least 70%, at least 75%, at least 80%, at least 85%, at least 90%, at least 95%, at least 99%, or 100% identical to SEQ ID NO: 3; (b) VL2 comprises a CDR1 having an amino acid sequence at least 65%, at least 70%, at least 75%, at least 80%, at least 85%, at least 90%, at least 95%, at least 99%, or 100% identical to SEQ ID NO: 23, a CDR2 having an amino acid sequence at least 65%, at least 70%, at least 75%, at least 80%, at least 85%, at least 90%, at least 95%, at least 99%, or 100% identical to amino acid sequence GTN, and a CDR3 having an amino acid sequence at least 65%, at least 70%, at least 75%, at least 80%, at least 85%, at least 90%, at least 95%, at least 99%, or 100% identical to SEQ ID NO: 24 or 325; (c) VH1 comprises a CDR1 having an amino acid sequence at least 65%, at least 70%, at least 75%, at least 80%, at least 85%, at least 90%, at least 95%, at least 99%, or 100% identical to SEQ ID NO: 5, a CDR2 having an amino acid sequence at least 65%, at least 70%, at least 75%, at least 80%, at least 85%, at least 90%, at least 95%, at least 99%, or 100% identical to SEQ ID NO: 6, and a CDR3 having an amino acid sequence at least 65%, at least 70%, at least 75%, at least 80%, at least 85%, at least 90%, at least 95%, at least 99%, or 100% identical to SEQ ID NO: 7; and (d) VH2 comprises a CDR1 having an amino acid sequence at least 65%, at least 70%, at least 75%, at least 80%, at least 85%, at least 90%, at least 95%, at least 99%, or 100% identical to SEQ ID NO: 26, a CDR2 having an amino acid sequence at least 65%, at least 70%, at least 75%, at least 80%, at least 85%, at least 90%, at least 95%, at least 99%, or 100% identical to SEQ ID NO: 27, and a CDR3 having an amino acid sequence at least 65%, at least 70%, at least 75%, at least 80%, at least 85%, at least 90%, at least 95%, at least 99%, or 100% identical to SEQ ID NO: 28 or 332.

[0071] In some aspects, (a) VL1 comprises an amino acid sequence that is at least 65%, at least 70%, at least 75%, at least 80%, at least 85%, at least 90%, at least 95%, at least 99%, or 100% identical to SEQ ID NO: 4; (b) VL2 comprises an amino acid sequence that is at least 65%, at least 70%, at least 75%, at least 80%, at least 85%, at least 90%, at least 95%, at least 99%, or 100% identical to SEQ ID NO: 25; (c) VH1 comprises an amino acid sequence that is at least 65%, at least 70%, at least 75%, at least 80%, at least 85%, at least 90%, at least 95%, at least 99%, or 100% identical to SEQ ID NO: 8; and (d) VH2 comprises an amino acid sequence that is at least 65%, at least 70%, at least 75%, at least 80%, at least 85%, at least 90%, at least 95%, at least 99%, or 100% identical to SEQ ID NO: 29.

[0072] In some aspects, (a) VL1 comprises a CDR1 having an amino acid sequence at least 65%, at least 70%, at least 75%, at least 80%, at least 85%, at least 90%, at least 95%, at least 99%, or 100% identical to SEQ ID NO: 23, a CDR2 having an amino acid sequence at least 65%, at least 70%, at least 75%, at least 80%, at least 85%, at least 90%, at least 95%, at least 99%, or 100% identical to amino acid sequence GTN, and a CDR3 having an amino acid sequence at least 65%, at least 70%, at least 75%, at least 80%, at least 85%, at least 90%, at least 95%, at least 99%, or 100% identical to SEQ ID NO: 24 or 325; (b) VL2 comprises a CDR1 having an amino acid sequence at least 65%, at least 70%, at least 75%, at least 80%, at least 85%, at least 90%, at least 95%, at least 99%, or 100% identical to SEQ ID NO: 15, a CDR2 having an amino acid sequence at least 65%, at least 70%, at least 75%, at least 80%, at least 85%, at least 90%, at least 95%, at least 99%, or 100% identical to amino acid sequence LGS, and a CDR3 having an amino acid sequence at least 65%, at least 70%, at least 75%, at least 80%, at least 85%, at least 90%, at least 95%, at least 99%, or 100% identical to SEQ ID NO: 16; (c) VH1 comprises a CDR1 having an amino acid sequence at least 65%, at least 70%, at least 75%, at least 80%, at least 85%, at least 90%, at least 95%, at least 99%, or 100% identical to SEQ ID NO: 26, a CDR2 having an amino acid sequence at least 65%, at least 70%, at least 75%, at least 80%, at least 85%, at least 90%, at least 95%, at least 99%, or 100% identical to SEQ ID NO: 27, and a CDR3 having an amino acid sequence at least 65%, at least 70%, at least 75%, at least 80%, at least 85%, at least 90%, at least 95%, at least 99%, or 100% identical to SEQ ID NO: 28 or 332; and (d) VH2 comprises a CDR1 having an amino acid sequence at least 65%, at least 70%, at least 75%, at least 80%, at least 85%, at least 90%, at least 95%, at least 99%, or 100% identical to SEQ ID NO: 18, a CDR2 having an amino acid sequence at least 65%, at least 70%, at least 75%, at least 80%, at least 85%, at least 90%, at least 95%, at least 99%, or 100% identical to SEQ ID NO: 19, and a CDR3 having an amino acid sequence at least 65%, at least 70%, at least 75%, at least 80%, at least 85%, at least 90%, at least 95%, at least 99%, or 100% identical to SEQ ID NO: 20.

[0073] In some aspects, (a) VL1 comprises an amino acid sequence that is at least 65%, at least 70%, at least 75%, at least 80%, at least 85%, at least 90%, at least 95%, at least 99%, or 100% identical to SEQ ID NO: 25; (b) VL2 comprises an amino acid sequence that is at least 65%, at least 70%, at least 75%, at least 80%, at least 85%, at least 90%, at least 95%, at least 99%, or 100% identical to SEQ ID NO: 17; (c) VH1 comprises an amino acid sequence that is at least 65%, at least 70%, at least 75%, at least 80%, at least 85%, at least 90%, at least 95%, at least 99%, or 100% identical to SEQ ID NO: 29; and (d) VH2 comprises an amino acid sequence that is at least 65%, at least 70%, at least 75%, at least 80%, at least 85%, at least 90%, at least 95%, at least 99%, or 100% identical to SEQ ID NO: 21 or 22.

[0074] In some aspects, (a) VL1 comprises a CDR1 having an amino acid sequence at least 65%, at least 70%, at least 75%, at least 80%, at least 85%, at least 90%, at least 95%, at least 99%, or 100% identical to SEQ ID NO: 30, a CDR2 having an amino acid sequence at least 65%, at least 70%, at least 75%, at least 80%, at least 85%, at least 90%, at least 95%, at least 99%, or 100% identical to SEQ ID NO: 31 or an amino acid sequence at least 65%, at least 70%, at least 75%, at least 80%, at least 85%, at least 90%, at least 95%, at least 99%, or 100% identical to amino acid sequence SAS, and a CDR3 having an amino acid sequence at least 65%, at least 70%, at least 75%, at least 80%, at least 85%, at least 90%, at least 95%, at least 99%, or 100% identical to SEQ ID NO: 32, 38, or 326; (b) VL2 comprises a CDR1 having an amino acid sequence at least 65%, at least 70%, at least 75%, at least 80%, at least 85%, at least 90%, at least 95%, at least 99%, or 100% identical to SEQ ID NO: 15, a CDR2 having an amino acid sequence at least 65%, at least 70%, at least 75%, at least 80%, at least 85%, at least 90%, at least 95%, at least 99%, or 100% identical to amino acid sequence LGS, and a CDR3 having an amino acid sequence at least 65%, at least 70%, at least 75%, at least 80%, at least 85%, at least 90%, at least 95%, at least 99%, or 100% identical to SEQ ID NO: 16; (c) VH1 comprises a CDR1 having an amino acid sequence at least 65%, at least 70%, at least 75%, at least 80%, at least 85%, at least 90%, at least 95%, at least 99%, or 100% identical to SEQ ID NO: 34, a CDR2 having an amino acid sequence at least 65%, at least 70%, at least 75%, at least 80%, at least 85%, at least 90%, at least 95%, at least 99%, or 100% identical to SEQ ID NO: 35, and a CDR3 having an amino acid sequence at least 65%, at least 70%, at least 75%, at least 80%, at least 85%, at least 90%, at least 95%, at least 99%, or 100% identical to SEQ ID NO: 36, 40 or 327; and (d) VH2 comprises a CDR1 having an amino acid sequence at least 65%, at least 70%, at least 75%, at least 80%, at least 85%, at least 90%, at least 95%, at least 99%, or 100% identical to SEQ ID NO: 18, a CDR2 having an amino acid sequence at least 65%, at least 70%, at least 75%, at least 80%, at least 85%, at least 90%, at least 95%, at least 99%, or 100% identical to SEQ ID NO: 19, and a CDR3 having an amino acid sequence at least 65%, at least 70%, at least 75%, at least 80%, at least 85%, at least 90%, at least 95%, at least 99%, or 100% identical to SEQ ID NO: 20.

[0075] In some aspects, (a) VL1 comprises an amino acid sequence that is at least 65%, at least 70%, at least 75%, at least 80%, at least 85%, at least 90%, at least 95%, at least 99%, or 100% identical to SEQ ID NO: 33 or 39; (b) VL2 comprises an amino acid sequence that is at least 65%, at least 70%, at least 75%, at least 80%, at least 85%, at least 90%, at least 95%, at least 99%, or 100% identical to SEQ ID NO: 17; (c) VH1 comprises an amino acid sequence that is at least 65%, at least 70%, at least 75%, at least 80%, at least 85%, at least 90%, at least 95%, at least 99%, or 100% identical to SEQ ID NO: 37; and (d) VH2 comprises an amino acid sequence that is at least 65%, at least 70%, at least 75%, at least 80%, at least 85%, at least 90%, at least 95%, at least 99%, or 100% identical to SEQ ID NO: 21 or 22.

[0076] Also provided herein is an antigen binding polypeptide having a structure, from amino-terminus to carboxy-terminus, represented by: VL1-L1-CL-L2-VH1-L3-CH1; VL1-L1-CH1-L2-VH1-L3-CL; VH1-L1-CL-L2-VL1-L3-CH1; or VH1-L1-CH1-L2-VL1-L3-CL; wherein: VL1 is an immunoglobulin light chain variable region that specifically binds to a severe acute respiratory syndrome coronavirus 2 (SARS-CoV-2) protein; VH1 is an immunoglobulin heavy chain variable region that specifically binds to a SARS-CoV-2 protein; CL is an immunoglobulin light chain constant region; CH1 is an immunoglobulin heavy chain constant region 1; and L1-L3 are optional amino acid linkers.

[0077] In some aspects, (a) VL1 comprises: (i) a complementarity determining region (CDR) 1 having an amino acid sequence that is at least 65%, at least 70%, at least 75%, at least 80%, at least 85%, at least 90%, at least 95%, at least 99%, or 100% identical to any one of SEQ ID NOs: 1, 9, 15, 23, 30, 41, 48, 55, 58, 65, 72, 79, 86, 93, 99, 105, 112, 119, 130, 138, 145, 152, 159, 166, 172, 179, 186, 192, 199, 205, 212, 219, 226, 232, 324, 627, 770, 778, 785, 794, 801, 807, 814, 827, 836, 849, 858, 865, 878, 1045, 1050, 1055, 1060, and 1065; (ii) a CDR2 having an amino acid sequence that is at least 65%, at least 70%, at least 75%, at least 80%, at least 85%, at least 90%, at least 95%, at least 99%, or 100% identical to any one of SEQ ID NOs: 2, 31, 628, 1046, 1051, 1056, and 1061, or at least 65%, at least 70%, at least 75%, at least 80%, at least 85%, at least 90%, at least 95%, at least 99%, or 100% identical to any one of amino acid sequences AAS, GAS, LGS, GTN, GTN, SAS, SDS, DNT, EVT, DAS, DVT, RNS, DVS, EDS, DDS, KDS, NNN, SYN, WAS, and DAT; and (iii) a CDR3 having an amino acid sequence that is at least 65%, at least 70%, at least 75%, at least 80%, at least 85%, at least 90%, at least 95%, at least 99%, or 100% identical to any one of SEQ ID NOs: 3, 10, 16, 24, 32, 38, 42, 49, 59, 66, 73, 80, 87, 94, 100, 106, 113, 120, 126, 131, 139, 146, 153, 160, 167, 173, 180, 187, 193, 200, 206, 213, 220, 227, 233, 239, 242, 246, 249, 256, 283, 285, 287, 288, 290, 292, 294, 296, 301, 304, 306, 309, 311, 313, 316, 325, 326, 329, 764, 766, 768, 771, 779, 786, 792, 795, 808, 815, 821, 830, 837, 843, 850, 856, 859, 866, 872, 879, 885, and 1066; and (b) VH1 comprises (i) a CDR1 having an amino acid sequence that is at least 65%, at least 70%, at least 75%, at least 80%, at least 85%, at least 90%, at least 95%, at least 99%, or 100% identical to any one of SEQ ID NOs: 5, 12, 18, 26, 34, 44, 51, 61, 68, 75, 82, 89, 96, 102, 108, 115, 122, 133, 141, 148, 155, 162, 175, 182, 189, 195, 202, 208, 215, 222, 229, 235, 318, 629, 773, 781, 788, 797, 803, 810, 817, 823, 832, 839, 845, 852, 861, 868, 874, 881, 1047, 1052, 1057, 1062, and 1067; (ii) a CDR2 having an amino acid sequence that is at least 65%, at least 70%, at least 75%, at least 80%, at least 85%, at least 90%, at least 95%, at least 99%, or 100% identical to any one of SEQ ID NOs: 6, 19, 27, 35, 45, 52, 56, 62, 69, 76, 83, 90, 109, 116, 123, 134, 142, 149, 156, 163, 169, 176, 183, 196, 209, 216, 223, 236, 273, 319, 328, 630, 776, 782, 789, 798, 804, 811, 818, 824, 833, 840, 846, 853, 862, 869, 875, 882, 1048, 1053, 1058, 1063, and 1068; and (iii) a CDR3 having an amino acid sequence that is at least 65%, at least 70%, at least 75%, at least 80%, at least 85%, at least 90%, at least 95%, at least 99%, or 100% identical to any one of SEQ ID NOs: 7, 13, 20, 28, 36, 40, 46, 53, 63, 70, 77, 84, 91, 97, 103, 110, 117, 124, 128, 135, 143, 150, 157, 164, 170, 177, 184, 190, 197, 203, 210, 217, 224, 230, 237, 241, 244, 248, 253, 257, 259, 261, 263, 265, 267, 269, 271, 274, 276, 278, 281, 297, 320, 322, 327, 330, 332, 631, 765, 767, 769, 774, 783, 790, 793, 799, 805, 812, 819, 825, 834, 841, 847, 854, 857, 863, 870, 876, 883, 886, 1049, 1054, 1059, 1064, and 1069.

[0078] In some aspects, (a) VL1 comprises an amino acid sequence that is at least 65%, at least 70%, at least 75%, at least 80%, at least 85%, at least 90%, at least 95%, at least 99%, or 100% identical to any one of SEQ ID NOs: 4, 11, 17, 25, 33, 39, 43, 50, 60, 67, 74, 81, 88, 95, 101, 107, 114, 121, 127, 132, 140, 147, 154, 161, 168, 174, 181, 188, 194, 201, 207, 214, 221, 228, 234, 240, 243, 247, 250, 251, 252, 255, 284, 286, 289, 291, 293, 295, 299, 300, 302, 303, 305, 307, 308, 310, 312, 314, 315, 317, 323, 772, 780, 787, 796, 802, 809, 816, 822, 831, 838, 844, 851, 860, 867, 873, 880, and 988; and (b) VH1 comprises an amino acid sequence that is at least 65%, at least 70%, at least 75%, at least 80%, at least 85%, at least 90%, at least 95%, at least 99%, or 100% identical to any one of SEQ ID NOs: 8, 14, 21, 22, 29, 37, 47, 54, 57, 64, 71, 78, 85, 92, 98, 104, 111, 118, 125, 129, 136, 137, 144, 151, 158, 165, 171, 178, 185, 191, 198, 204, 211, 218, 225, 231, 238, 245, 254, 258, 260, 262, 264, 266, 268, 270, 272, 275, 277, 279, 280, 282, 298, 321, 331, 626, 775, 777, 784, 791, 800, 806, 813, 820, 826, 835, 842, 848, 855, 864, 871, 877, and 884.

[0079] In some aspects, (a) VL1 comprises a CDR1 having an amino acid sequence that is at least 65%, at least 70%, at least 75%, at least 80%, at least 85%, at least 90%, at least 95%, at least 99%, or 100% identical to SEQ ID NO: 9 or 1055, a CDR2 having an amino acid sequence at least 65%, at least 70%, at least 75%, at least 80%, at least 85%, at least 90%, at least 95%, at least 99%, or 100% identical to SEQ ID NO: 1056 or an amino acid sequence that is at least 65%, at least 70%, at least 75%, at least 80%, at least 85%, at least 90%, at least 95%, at least 99%, or 100% identical to amino acid sequence GAS, and a CDR3 having an amino acid sequence that is at least 65%, at least 70%, at least 75%, at least 80%, at least 85%, at least 90%, at least 95%, at least 99%, or 100% identical to SEQ ID NO: 10; and (b) VH1 comprises a CDR1 having an amino acid sequence that is at least 65%, at least 70%, at least 75%, at least 80%, at least 85%, at least 90%, at least 95%, at least 99%, or 100% identical to SEQ ID NO: 12 or 1057, a CDR2 having an amino acid sequence that is at least 65%, at least 70%, at least 75%, at least 80%, at least 85%, at least 90%, at least 95%, at least 99%, or 100% identical to SEQ ID NO: 6 or 1058, and a CDR3 having an amino acid sequence that is at least 65%, at least 70%, at least 75%, at least 80%, at least 85%, at least 90%, at least 95%, at least 99%, or 100% identical to SEQ ID NO: 13 or 1059.

[0080] In some aspects, (a) VL1 comprises an amino acid sequence that is at least 65%, at least 70%, at least 75%, at least 80%, at least 85%, at least 90%, at least 95%, at least 99%, or 100% identical to SEQ ID NO: 11; and (b) VH1 comprises an amino acid sequence that is at least 65%, at least 70%, at least 75%, at least 80%, at least 85%, at least 90%, at least 95%, at least 99%, or 100% identical to SEQ ID NO: 14.

[0081] Also provided herein is an antigen binding polypeptide having a structure, from amino-terminus to carboxy-terminus, represented by: VL1-L1-VH1-L2-CL; or VH1-L1-VL1-L2-CL; wherein: VL1 is an immunoglobulin light chain variable region that specifically binds to a severe acute respiratory syndrome coronavirus 2 (SARS-CoV-2) protein; VH1 is an immunoglobulin heavy chain variable region that specifically binds to a SARS-CoV-2 protein; CL is an immunoglobulin light chain constant region; and L1-L2 are optional amino acid linkers.

[0082] Also provided herein is an antigen binding polypeptide having a structure, from amino-terminus to carboxy-terminus, represented by: VL1-L1-VH1-L2-CH1; or VH1-L1-VL1-L2-CH1; wherein: VL1 is an immunoglobulin light chain variable region that specifically binds to a severe acute respiratory syndrome coronavirus 2 (SARS-CoV-2) protein; VH1 is an immunoglobulin heavy chain variable region that specifically binds to a SARS-CoV-2 protein; CH1 is an immunoglobulin heavy chain constant region 1; and L1-L2 are optional amino acid linkers.

[0083] In some aspects, (a) VL1 comprises: (i) a complementarity determining region (CDR) 1 having an amino acid sequence that is at least 65%, at least 70%, at least 75%, at least 80%, at least 85%, at least 90%, at least 95%, at least 99%, or 100% identical to any one of SEQ ID NOs: 1, 9, 15, 23, 30, 41, 48, 55, 58, 65, 72, 79, 86, 93, 99, 105, 112, 119, 130, 138, 145, 152, 159, 166, 172, 179, 186, 192, 199, 205, 212, 219, 226, 232, 324, 627, 770, 778, 785, 794, 801, 807, 814, 827, 836, 849, 858, 865, 878, 1045, 1050, 1055, 1060, and 1065; (ii) a CDR2 having an amino acid sequence that is at least 65%, at least 70%, at least 75%, at least 80%, at least 85%, at least 90%, at least 95%, at least 99%, or 100% identical to any one of SEQ ID NOs: 2, 31, 628, 1046, 1051, 1056, and 1061, or at least 65%, at least 70%, at least 75%, at least 80%, at least 85%, at least 90%, at least 95%, at least 99%, or 100% identical to any one of amino acid sequences AAS, GAS, LGS, GTN, GTN, SAS, SDS, DNT, EVT, DAS, DVT, RNS, DVS, EDS, DDS, KDS, NNN, SYN, WAS, and DAT; and (iii) a CDR3 having an amino acid sequence that is at least 65%, at least 70%, at least 75%, at least 80%, at least 85%, at least 90%, at least 95%, at least 99%, or 100% identical to any one of SEQ ID NOs: 3, 10, 16, 24, 32, 38, 42, 49, 59, 66, 73, 80, 87, 94, 100, 106, 113, 120, 126, 131, 139, 146, 153, 160, 167, 173, 180, 187, 193, 200, 206, 213, 220, 227, 233, 239, 242, 246, 249, 256, 283, 285, 287, 288, 290, 292, 294, 296, 301, 304, 306, 309, 311, 313, 316, 325, 326, 329, 764, 766, 768, 771, 779, 786, 792, 795, 808, 815, 821, 830, 837, 843, 850, 856, 859, 866, 872, 879, 885, and 1066; and (b) VH1 comprises: (i) a CDR1 having an amino acid sequence that is at least 65%, at least 70%, at least 75%, at least 80%, at least 85%, at least 90%, at least 95%, at least 99%, or 100% identical to any one of SEQ ID NOs: 5, 12, 18, 26, 34, 44, 51, 61, 68, 75, 82, 89, 96, 102, 108, 115, 122, 133, 141, 148, 155, 162, 175, 182, 189, 195, 202, 208, 215, 222, 229, 235, 318, 629, 773, 781, 788, 797, 803, 810, 817, 823, 832, 839, 845, 852, 861, 868, 874, 881, 1047, 1052, 1057, 1062, and 1067; (ii) a CDR2 having an amino acid sequence that is at least 65%, at least 70%, at least 75%, at least 80%, at least 85%, at least 90%, at least 95%, at least 99%, or 100% identical to any one of SEQ ID NOs: 6, 19, 27, 35, 45, 52, 56, 62, 69, 76, 83, 90, 109, 116, 123, 134, 142, 149, 156, 163, 169, 176, 183, 196, 209, 216, 223, 236, 273, 319, 328, 630, 776, 782, 789, 798, 804, 811, 818, 824, 833, 840, 846, 853, 862, 869, 875, 882, 1048, 1053, 1058, 1063, and 1068; and (iii) a CDR3 having an amino acid sequence that is at least 65%, at least 70%, at least 75%, at least 80%, at least 85%, at least 90%, at least 95%, at least 99%, or 100% identical to any one of SEQ ID NOs: 7, 13, 20, 28, 36, 40, 46, 53, 63, 70, 77, 84, 91, 97, 103, 110, 117, 124, 128, 135, 143, 150, 157, 164, 170, 177, 184, 190, 197, 203, 210, 217, 224, 230, 237, 241, 244, 248, 253, 257, 259, 261, 263, 265, 267, 269, 271, 274, 276, 278, 281, 297, 320, 322, 327, 330, 332, 631, 765, 767, 769, 774, 783, 790, 793, 799, 805, 812, 819, 825, 834, 841, 847, 854, 857, 863, 870, 876, 883, 886, 1049, 1054, 1059, 1064, and 1069.

[0084] In some aspects, (a) VL1 comprises an amino acid sequence that is at least 65%, at least 70%, at least 75%, at least 80%, at least 85%, at least 90%, at least 95%, at least 99%, or 100% identical to any one of SEQ ID NOs: 4, 11, 17, 25, 33, 39, 43, 50, 60, 67, 74, 81, 88, 95, 101, 107, 114, 121, 127, 132, 140, 147, 154, 161, 168, 174, 181, 188, 194, 201, 207, 214, 221, 228, 234, 240, 243, 247, 250, 251, 252, 255, 284, 286, 289, 291, 293, 295, 299, 300, 302, 303, 305, 307, 308, 310, 312, 314, 315, 317, 323, 772, 780, 787, 796, 802, 809, 816, 822, 831, 838, 844, 851, 860, 867, 873, 880, and 988; and (b) VH1 comprises an amino acid sequence that is at least 65%, at least 70%, at least 75%, at least 80%, at least 85%, at least 90%, at least 95%, at least 99%, or 100% identical to any one of SEQ ID NOs: 8, 14, 21, 22, 29, 37, 47, 54, 57, 64, 71, 78, 85, 92, 98, 104, 111, 118, 125, 129, 136, 137, 144, 151, 158, 165, 171, 178, 185, 191, 198, 204, 211, 218, 225, 231, 238, 245, 254, 258, 260, 262, 264, 266, 268, 270, 272, 275, 277, 279, 280, 282, 298, 321, 331.626, 775, 777, 784, 791, 800, 806, 813, 820, 826, 835, 842, 848, 855, 864, 871, 877, and 884.

[0085] In some aspects, (a) VL1 comprises a CDR1 having an amino acid sequence at least 65%, at least 70%, at least 75%, at least 80%, at least 85%, at least 90%, at least 95%, at least 99%, or 100% identical to SEQ ID NO: 15, a CDR2 having an amino acid sequence at least 65%, at least 70%, at least 75%, at least 80%, at least 85%, at least 90%, at least 95%, at least 99%, or 100% identical to amino acid sequence LGS, and a CDR3 having an amino acid sequence at least 65%, at least 70%, at least 75%, at least 80%, at least 85%, at least 90%, at least 95%, at least 99%, or 100% identical to SEQ ID NO: 16; and (b) VH1 comprises a CDR1 having an amino acid sequence at least 65%, at least 70%, at least 75%, at least 80%, at least 85%, at least 90%, at least 95%, at least 99%, or 100% identical to SEQ ID NO: 18, a CDR2 having an amino acid sequence at least 65%, at least 70%, at least 75%, at least 80%, at least 85%, at least 90%, at least 95%, at least 99%, or 100% identical to SEQ ID NO: 19, and a CDR3 having an amino acid sequence at least 65%, at least 70%, at least 75%, at least 80%, at least 85%, at least 90%, at least 95%, at least 99%, or 100% identical to SEQ ID NO: 20.

[0086] In some aspects, (a) VL1 comprises an amino acid sequence that is at least 65%, at least 70%, at least 75%, at least 80%, at least 85%, at least 90%, at least 95%, at least 99%, or 100% identical to SEQ ID NO: 17; and (b) VH1 comprises an amino acid sequence that is at least 65%, at least 70%, at least 75%, at least 80%, at least 85%, at least 90%, at least 95%, at least 99%, or 100% identical to SEQ ID NO: 21 or 22.

[0087] In some aspects, (a) VL1 comprises a CDR1 having an amino acid sequence at least 65%, at least 70%, at least 75%, at least 80%, at least 85%, at least 90%, at least 95%, at least 99%, or 100% identical to SEQ ID NO: 9 or 1055, a CDR2 having an amino acid sequence at least 65%, at least 70%, at least 75%, at least 80%, at least 85%, at least 90%, at least 95%, at least 99%, or 100% identical to SEQ ID NO: 1056 or an amino acid sequence at least 65%, at least 70%, at least 75%, at least 80%, at least 85%, at least 90%, at least 95%, at least 99%, or 100% identical to amino acid sequence GAS, and a CDR3 having an amino acid sequence at least 65%, at least 70%, at least 75%, at least 80%, at least 85%, at least 90%, at least 95%, at least 99%, or 100% identical to SEQ ID NO: 10; and (b) VH1 comprises a CDR1 having an amino acid sequence at least 65%, at least 70%, at least 75%, at least 80%, at least 85%, at least 90%, at least 95%, at least 99%, or 100% identical to SEQ ID NO: 12 or 1057, a CDR2 having an amino acid sequence at least 65%, at least 70%, at least 75%, at least 80%, at least 85%, at least 90%, at least 95%, at least 99%, or 100% identical to SEQ ID NO: 6 or 1058, and a CDR3 having an amino acid sequence at least 65%, at least 70%, at least 75%, at least 80%, at least 85%, at least 90%, at least 95%, at least 99%, or 100% identical to SEQ ID NO: 13 or 1059.

[0088] In some aspects, (a) VL1 comprises an amino acid sequence that is at least 65%, at least 70%, at least 75%, at least 80%, at least 85%, at least 90%, at least 95%, at least 99%, or 100% identical to SEQ ID NO: 11; and (b) VH1 comprises an amino acid sequence that is at least 65%, at least 70%, at least 75%, at least 80%, at least 85%, at least 90%, at least 95%, at least 99%, or 100% identical to SEQ ID NO: 14. In some aspects, (a) VL1 comprises a CDR1 having an amino acid sequence at least 65%, at least 70%, at least 75%, at least 80%, at least 85%, at least 90%, at least 95%, at least 99%, or 100% identical to SEQ ID NO: 72, a CDR2 having an amino acid sequence at least 65%, at least 70%, at least 75%, at least 80%, at least 85%, at least 90%, at least 95%, at least 99%, or 100% identical to amino acid sequence DNT, and a CDR3 having an amino acid sequence at least 65%, at least 70%, at least 75%, at least 80%, at least 85%, at least 90%, at least 95%, at least 99%, or 100% identical to SEQ ID NO: 73; and (b) VH1 comprises a CDR1 having an amino acid sequence at least 65%, at least 70%, at least 75%, at least 80%, at least 85%, at least 90%, at least 95%, at least 99%, or 100% identical to SEQ ID NO: 75, a CDR2 having an amino acid sequence at least 65%, at least 70%, at least 75%, at least 80%, at least 85%, at least 90%, at least 95%, at least 99%, or 100% identical to SEQ ID NO: 76, and a CDR3 having an amino acid sequence at least 65%, at least 70%, at least 75%, at least 80%, at least 85%, at least 90%, at least 95%, at least 99%, or 100% identical to SEQ ID NO: 77.

[0089] In some aspects, (a) L1 comprises an amino acid sequence that is at least 65%, at least 70%, at least 75%, at least 80%, at least 85%, at least 90%, at least 95%, at least 99%, or 100% identical to SEQ ID NO: 74; and (b) VH1 comprises an amino acid sequence that is at least 65%, at least 70%, at least 75%, at least 80%, at least 85%, at least 90%, at least 95%, at least 99%, or 100% identical to SEQ ID NO: 78.

[0090] Also provided herein is an antigen binding polypeptide having a structure, from amino-terminus to carboxy-terminus, represented by: VL1-L1-VL2-L2-CH1; or VL2-L1-VL1-L2-CH1; wherein VL1 is a first immunoglobulin light chain variable region that specifically binds to a severe acute respiratory syndrome coronavirus 2 (SARS-CoV-2) protein; VL2 is a second immunoglobulin light chain variable region that specifically binds to a SARS-CoV-2 protein; CH1 is an immunoglobulin heavy chain constant region 1; and L1-L2 are optional amino acid linkers.

[0091] In some aspects, (a) VL1 comprises: (i) a complementarity determining region (CDR) 1 having an amino acid sequence that is at least 65%, at least 70%, at least 75%, at least 80%, at least 85%, at least 90%, at least 95%, at least 99%, or 100% identical to any one of SEQ ID NOs: 1, 9, 15, 23, 30, 41, 48, 55, 58, 65, 72, 79, 86, 93, 99, 105, 112, 119, 130, 138, 145, 152, 159, 166, 172, 179, 186, 192, 199, 205, 212, 219, 226, 232, 324, 627, 770, 778, 785, 794, 801, 807, 814, 827, 836, 849, 858, 865, 878, 1045, 1050, 1055, 1060, and 1065; (ii) a CDR2 having an amino acid sequence that is at least 65%, at least 70%, at least 75%, at least 80%, at least 85%, at least 90%, at least 95%, at least 99%, or 100% identical to any one of SEQ ID NOs: 2, 31, 628, 1046, 1051, 1056, and 1061, or at least 65%, at least 70%, at least 75%, at least 80%, at least 85%, at least 90%, at least 95%, at least 99%, or 100% identical to any one of amino acid sequences AAS, GAS, LGS, GTN, GTN, SAS, SDS, DNT, EVT, DAS, DVT, RNS, DVS, EDS, DDS, KDS, NNN, SYN, WAS, and DAT; and (iii) a CDR3 having an amino acid sequence that is at least 65%, at least 70%, at least 75%, at least 80%, at least 85%, at least 90%, at least 95%, at least 99%, or 100% identical to any one of SEQ ID NOs: 3, 10, 16, 24, 32, 38, 42, 49, 59, 66, 73, 80, 87, 94, 100, 106, 113, 120, 126, 131, 139, 146, 153, 160, 167, 173, 180, 187, 193, 200, 206, 213, 220, 227, 233, 239, 242, 246, 249, 256, 283, 285, 287, 288, 290, 292, 294, 296, 301, 304, 306, 309, 311, 313, 316, 325, 326, 329, 764, 766, 768, 771, 779, 786, 792, 795, 808, 815, 821, 830, 837, 843, 850, 856, 859, 866, 872, 879, 885, and 1066; and (b) VL2 comprises: (i) a complementarity determining region (CDR) 1 having an amino acid sequence that is at least 65%, at least 70%, at least 75%, at least 80%, at least 85%, at least 90%, at least 95%, at least 99%, or 100% identical to any one of SEQ ID NOs: 1, 9, 15, 23, 30, 41, 48, 55, 58, 65, 72, 79, 86, 93, 99, 105, 112, 119, 130, 138, 145, 152, 159, 166, 172, 179, 186, 192, 199, 205, 212, 219, 226, 232, 324, 627, 770, 778, 785, 794, 801, 807, 814, 827, 836, 849, 858, 865, 878, 1045, 1050, 1055, 1060, and 1065; (ii) a CDR2 having an amino acid sequence that is at least 65%, at least 70%, at least 75%, at least 80%, at least 85%, at least 90%, at least 95%, at least 99%, or 100% identical to any one of SEQ ID NOs: 2, 31, 628, 1046, 1051, 1056, and 1061, or at least 65%, at least 70%, at least 75%, at least 80%, at least 85%, at least 90%, at least 95%, at least 99%, or 100% identical to any one of amino acid sequences AAS, GAS, LGS, GTN, GTN, SAS, SDS, DNT, EVT, DAS, DVT, RNS, DVS, EDS, DDS, KDS, NNN, SYN, WAS, and DAT; and (iii) a CDR3 having an amino acid sequence that is at least 65%, at least 70%, at least 75%, at least 80%, at least 85%, at least 90%, at least 95%, at least 99%, or 100% identical to any one of SEQ ID NOs: 3, 10, 16, 24, 32, 38, 42, 49, 59, 66, 73, 80, 87, 94, 100, 106, 113, 120, 126, 131, 139, 146, 153, 160, 167, 173, 180, 187, 193, 200, 206, 213, 220, 227, 233, 239, 242, 246, 249, 256, 283, 285, 287, 288, 290, 292, 294, 296, 301, 304, 306, 309, 311, 313, 316, 325, 326, 329, 764, 766, 768, 771, 779, 786, 792, 795, 808, 815, 821, 830, 837, 843, 850, 856, 859, 866, 872, 879, 885, and 1066.

[0092] In some aspects, (a) VL1 comprises an amino acid sequence that is at least 65%, at least 70%, at least 75%, at least 80%, at least 85%, at least 90%, at least 95%, at least 99%, or 100% identical to any one of SEQ ID NOs: 4, 11, 17, 25, 33, 39, 43, 50, 60, 67, 74, 81, 88, 95, 101, 107, 114, 121, 127, 132, 140, 147, 154, 161, 168, 174, 181, 188, 194, 201, 207, 214, 221, 228, 234, 240, 243, 247, 250, 251, 252, 255, 284, 286, 289, 291, 293, 295, 299, 300, 302, 303, 305, 307, 308, 310, 312, 314, 315, 317, 323, 772, 780, 787, 796, 802, 809, 816, 822, 831, 838, 844, 851, 860, 867, 873, 880, and 988; and (b) VL2 comprises an amino acid sequence that is at least 65%, at least 70%, at least 75%, at least 80%, at least 85%, at least 90%, at least 95%, at least 99%, or 100% identical to any one of SEQ ID NOs: 4, 11, 17, 25, 33, 39, 43, 50, 60, 67, 74, 81, 88, 95, 101, 107, 114, 121, 127, 132, 140, 147, 154, 161, 168, 174, 181, 188, 194, 201, 207, 214, 221, 228, 234, 240, 243, 247, 250, 251, 252, 255, 284, 286, 289, 291, 293, 295, 299, 300, 302, 303, 305, 307, 308, 310, 312, 314, 315, 317, 323, 772, 780, 787, 796, 802, 809, 816, 822, 831, 838, 844, 851, 860, 867, 873, 880, and 988.

[0093] Also provided herein is an antigen binding polypeptide having a structure, from amino-terminus to carboxy-terminus, represented by: VH1-L1-VH2-L2-CL; or VH2-L1-VH1-L2-CL; wherein VH1 is a first immunoglobulin heavy chain variable region that specifically binds to a severe acute respiratory syndrome coronavirus 2 (SARS-CoV-2) protein; VH2 is a second immunoglobulin heavy chain variable region that specifically binds to a SARS-CoV-2 protein; CL is an immunoglobulin light chain constant region; and L1-L2 are optional amino acid linkers.

[0094] In some aspects, (a) VH1 comprises: (i) a CDR1 having an amino acid sequence that is at least 65%, at least 70%, at least 75%, at least 80%, at least 85%, at least 90%, at least 95%, at least 99%, or 100% identical to any one of SEQ ID NOs: 5, 12, 18, 26, 34, 44, 51, 61, 68, 75, 82, 89, 96, 102, 108, 115, 122, 133, 141, 148, 155, 162, 175, 182, 189, 195, 202, 208, 215, 222, 229, 235, 318, 629, 773, 781, 788, 797, 803, 810, 817, 823, 832, 839, 845, 852, 861, 868, 874, 881, 1047, 1052, 1057, 1062, and 1067; (ii) a CDR2 having an amino acid sequence that is at least 65%, at least 70%, at least 75%, at least 80%, at least 85%, at least 90%, at least 95%, at least 99%, or 100% identical to any one of SEQ ID NOs: 6, 19, 27, 35, 45, 52, 56, 62, 69, 76, 83, 90, 109, 116, 123, 134, 142, 149, 156, 163, 169, 176, 183, 196, 209, 216, 223, 236, 273, 319, 328, 630, 776, 782, 789, 798, 804, 811, 818, 824, 833, 840, 846, 853, 862, 869, 875, 882, 1048, 1053, 1058, 1063, and 1068; and (iii) a CDR3 having an amino acid sequence that is at least 65%, at least 70%, at least 75%, at least 80%, at least 85%, at least 90%, at least 95%, at least 99%, or 100% identical to any one of SEQ ID NOs: 7, 13, 20, 28, 36, 40, 46, 53, 63, 70, 77, 84, 91, 97, 103, 110, 117, 124, 128, 135, 143, 150, 157, 164, 170, 177, 184, 190, 197, 203, 210, 217, 224, 230, 237, 241, 244, 248, 253, 257, 259, 261, 263, 265, 267, 269, 271, 274, 276, 278, 281, 297, 320, 322, 327, 330, 332, 631, 765, 767, 769, 774, 783, 790, 793, 799, 805, 812, 819, 825, 834, 841, 847, 854, 857, 863, 870, 876, 883, 886, 1049, 1054, 1059, 1064, and 1069; and (b) VH2 comprises: (i) a CDR1 having an amino acid sequence that is at least 65%, at least 70%, at least 75%, at least 80%, at least 85%, at least 90%, at least 95%, at least 99%, or 100% identical to any one of SEQ ID NOs: 5, 12, 18, 26, 34, 44, 51, 61, 68, 75, 82, 89, 96, 102, 108, 115, 122, 133, 141, 148, 155, 162, 175, 182, 189, 195, 202, 208, 215, 222, 229, 235, 318, 629, 773, 781, 788, 797, 803, 810, 817, 823, 832, 839, 845, 852, 861, 868, 874, 881, 1047, 1052, 1057, 1062, and 1067; (ii) a CDR2 having an amino acid sequence that is at least 65%, at least 70%, at least 75%, at least 80%, at least 85%, at least 90%, at least 95%, at least 99%, or 100% identical to any one of SEQ ID NOs: 6, 19, 27, 35, 45, 52, 56, 62, 69, 76, 83, 90, 109, 116, 123, 134, 142, 149, 156, 163, 169, 176, 183, 196, 209, 216, 223, 236, 273, 319, 328, 630, 776, 782, 789, 798, 804, 811, 818, 824, 833, 840, 846, 853, 862, 869, 875, 882, 1048, 1053, 1058, 1063, and 1068; and (iii) a CDR3 having an amino acid sequence that is at least 65%, at least 70%, at least 75%, at least 80%, at least 85%, at least 90%, at least 95%, at least 99%, or 100% identical to any one of SEQ ID NOs: 7, 13, 20, 28, 36, 40, 46, 53, 63, 70, 77, 84, 91, 97, 103, 110, 117, 124, 128, 135, 143, 150, 157, 164, 170, 177, 184, 190, 197, 203, 210, 217, 224, 230, 237, 241, 244, 248, 253, 257, 259, 261, 263, 265, 267, 269, 271, 274, 276, 278, 281, 297, 320, 322, 327, 330, 332, 631, 765, 767, 769, 774, 783, 790, 793, 799, 805, 812, 819, 825, 834, 841, 847, 854, 857, 863, 870, 876, 883, 886, 1049, 1054, 1059, 1064, and 1069.

[0095] In some aspects, (a) VH1 comprises an amino acid sequence that is at least 65%, at least 70%, at least 75%, at least 80%, at least 85%, at least 90%, at least 95%, at least 99%, or 100% identical to any one of SEQ ID NOs: 8, 14, 21, 22, 29, 37, 47, 54, 57, 64, 71, 78, 85, 92, 98, 104, 111, 118, 125, 129, 136, 137, 144, 151, 158, 165, 171, 178, 185, 191, 198, 204, 211, 218, 225, 231, 238, 245, 254, 258, 260, 262, 264, 266, 268, 270, 272, 275, 277, 279, 280, 282, 298, 321, 331, 626, 775, 777, 784, 791, 800, 806, 813, 820, 826, 835, 842, 848, 855, 864, 871, 877, and 884; and (b) VH2 comprises an amino acid sequence that is at least 65%, at least 70%, at least 75%, at least 80%, at least 85%, at least 90%, at least 95%, at least 99%, or 100% identical to any one of SEQ ID NOs: 8, 14, 21, 22, 29, 37, 47, 54, 57, 64, 71, 78, 85, 92, 98, 104, 111, 118, 125, 129, 136, 137, 144, 151, 158, 165, 171, 178, 185, 191, 198, 204, 211, 218, 225, 231, 238, 245, 254, 258, 260, 262, 264, 266, 268, 270, 272, 275, 277, 279, 280, 282, 298, 321, 331, 626, 775, 777, 784, 791, 800, 806, 813, 820, 826, 835, 842, 848, 855, 864, 871, 877, and 884.

[0096] Also provided herein is an antigen binding polypeptide having a structure, from amino-terminus to carboxy-terminus, represented by: VL1-L1-VL2-L2-VL3-L3-CH1; VL1-L1-VL3-L2-VL2-L3-CH1; VL2-L1-VL1-L2-VL3-L3-CH1; VL2-L1-VL3-L2-VL1-L3-CH1; VL3-L1-VL1-L2-VL2-L3-CH1; or VL3-L1-VL2-L2-VL1-L3-CH1; wherein VL1 is a first immunoglobulin light chain variable region that specifically binds to a severe acute respiratory syndrome coronavirus 2 (SARS-CoV-2) protein; VL2 is a second immunoglobulin light chain variable region that specifically binds to a SARS-CoV-2 protein; VL3 is a third immunoglobulin light chain variable region that specifically binds to a SARS-CoV-2 protein; CH1 is an immunoglobulin heavy chain constant region 1; and L1-L3 are optional amino acid linkers.

[0097] In some aspects, (a) VL1 comprises: (i) a complementarity determining region (CDR) 1 having an amino acid sequence that is at least 65%, at least 70%, at least 75%, at least 80%, at least 85%, at least 90%, at least 95%, at least 99%, or 100% identical to any one of SEQ ID NOs: 1, 9, 15, 23, 30, 41, 48, 55, 58, 65, 72, 79, 86, 93, 99, 105, 112, 119, 130, 138, 145, 152, 159, 166, 172, 179, 186, 192, 199, 205, 212, 219, 226, 232, 324, 627, 770, 778, 785, 794, 801, 807, 814, 827, 836, 849, 858, 865, 878, 1045, 1050, 1055, 1060, and 1065; (ii) a CDR2 having an amino acid sequence that is at least 65%, at least 70%, at least 75%, at least 80%, at least 85%, at least 90%, at least 95%, at least 99%, or 100% identical to any one of SEQ ID NOs: 2, 31, 628, 1046, 1051, 1056, and 1061, or at least 65%, at least 70%, at least 75%, at least 80%, at least 85%, at least 90%, at least 95%, at least 99%, or 100% identical to any one of amino acid sequences AAS, GAS, LGS, GTN, GTN, SAS, SDS, DNT, EVT, DAS, DVT, RNS, DVS, EDS, DDS, KDS, NNN, SYN, WAS, and DAT; and (iii) a CDR3 having an amino acid sequence that is at least 65%, at least 70%, at least 75%, at least 80%, at least 85%, at least 90%, at least 95%, at least 99%, or 100% identical to any one of SEQ ID NOs: 3, 10, 16, 24, 32, 38, 42, 49, 59, 66, 73, 80, 87, 94, 100, 106, 113, 120, 126, 131, 139, 146, 153, 160, 167, 173, 180, 187, 193, 200, 206, 213, 220, 227, 233, 239, 242, 246, 249, 256, 283, 285, 287, 288, 290, 292, 294, 296, 301, 304, 306, 309, 311, 313, 316, 325, 326, 329, 764, 766, 768, 771, 779, 786, 792, 795, 808, 815, 821, 830, 837, 843, 850, 856, 859, 866, 872, 879, 885, and 1066; (b) VL2 comprises: (i) a complementarity determining region (CDR) 1 having an amino acid sequence that is at least 65%, at least 70%, at least 75%, at least 80%, at least 85%, at least 90%, at least 95%, at least 99%, or 100% identical to any one of SEQ ID NOs: 1, 9, 15, 23, 30, 41, 48, 55, 58, 65, 72, 79, 86, 93, 99, 105, 112, 119, 130, 138, 145, 152, 159, 166, 172, 179, 186, 192, 199, 205, 212, 219, 226, 232, 324, 627, 770, 778, 785, 794, 801, 807, 814, 827, 836, 849, 858, 865, 878, 1045, 1050, 1055, 1060, and 1065; (ii) a CDR2 having an amino acid sequence that is at least 65%, at least 70%, at least 75%, at least 80%, at least 85%, at least 90%, at least 95%, at least 99%, or 100% identical to any one of SEQ ID NOs: 2, 31, 628, 1046, 1051, 1056, and 1061, or at least 65%, at least 70%, at least 75%, at least 80%, at least 85%, at least 90%, at least 95%, at least 99%, or 100% identical to any one of amino acid sequences AAS, GAS, LGS, GTN, GTN, SAS, SDS, DNT, EVT, DAS, DVT, RNS, DVS, EDS, DDS, KDS, NNN, SYN, WAS, and DAT; and (iii) a CDR3 having an amino acid sequence that is at least 65%, at least 70%, at least 75%, at least 80%, at least 85%, at least 90%, at least 95%, at least 99%, or 100% identical to any one of SEQ ID NOs: 3, 10, 16, 24, 32, 38, 42, 49, 59, 66, 73, 80, 87, 94, 100, 106, 113, 120, 126, 131, 139, 146, 153, 160, 167, 173, 180, 187, 193, 200, 206, 213, 220, 227, 233, 239, 242, 246, 249, 256, 283, 285, 287, 288, 290, 292, 294, 296, 301, 304, 306, 309, 311, 313, 316, 325, 326, 329, 764, 766, 768, 771, 779, 786, 792, 795, 808, 815, 821, 830, 837, 843, 850, 856, 859, 866, 872, 879, 885, and 1066; and (c) VL3 comprises: (i) a complementarity determining region (CDR) 1 having an amino acid sequence that is at least 65%, at least 70%, at least 75%, at least 80%, at least 85%, at least 90%, at least 95%, at least 99%, or 100% identical to any one of SEQ ID NOs: 1, 9, 15, 23, 30, 41, 48, 55, 58, 65, 72, 79, 86, 93, 99, 105, 112, 119, 130, 138, 145, 152, 159, 166, 172, 179, 186, 192, 199, 205, 212, 219, 226, 232, 324, 627, 770, 778, 785, 794, 801, 807, 814, 827, 836, 849, 858, 865, 878, 1045, 1050, 1055, 1060, and 1065; (ii) a CDR2 having an amino acid sequence that is at least 65%, at least 70%, at least 75%, at least 80%, at least 85%, at least 90%, at least 95%, at least 99%, or 100% identical to any one of SEQ ID NOs: 2, 31, 628, 1046, 1051, 1056, and 1061, or at least 65%, at least 70%, at least 75%, at least 80%, at least 85%, at least 90%, at least 95%, at least 99%, or 100% identical to any one of amino acid sequences AAS, GAS, LGS, GTN, GTN, SAS, SDS, DNT, EVT, DAS, DVT, RNS, DVS, EDS, DDS, KDS, NNN, SYN, WAS, and DAT; and (iii) a CDR3 having an amino acid sequence that is at least 65%, at least 70%, at least 75%, at least 80%, at least 85%, at least 90%, at least 95%, at least 99%, or 100% identical to any one of SEQ ID NOs: 3, 10, 16, 24, 32, 38, 42, 49, 59, 66, 73, 80, 87, 94, 100, 106, 113, 120, 126, 131, 139, 146, 153, 160, 167, 173, 180, 187, 193, 200, 206, 213, 220, 227, 233, 239, 242, 246, 249, 256, 283, 285, 287, 288, 290, 292, 294, 296, 301, 304, 306, 309, 311, 313, 316, 325, 326, 329, 764, 766, 768, 771, 779, 786, 792, 795, 808, 815, 821, 830, 837, 843, 850, 856, 859, 866, 872, 879, 885, and 1066.

[0098] In some aspects, (a) VL1 comprises an amino acid sequence that is at least 65%, at least 70%, at least 75%, at least 80%, at least 85%, at least 90%, at least 95%, at least 99%, or 100% identical to any one of SEQ ID NOs: 4, 11, 17, 25, 33, 39, 43, 50, 60, 67, 74, 81, 88, 95, 101, 107, 114, 121, 127, 132, 140, 147, 154, 161, 168, 174, 181, 188, 194, 201, 207, 214, 221, 228, 234, 240, 243, 247, 250, 251, 252, 255, 284, 286, 289, 291, 293, 295, 299, 300, 302, 303, 305, 307, 308, 310, 312, 314, 315, 317, 323, 772, 780, 787, 796, 802, 809, 816, 822, 831, 838, 844, 851, 860, 867, 873, 880, and 988; (b) VL2 comprises an amino acid sequence that is at least 65%, at least 70%, at least 75%, at least 80%, at least 85%, at least 90%, at least 95%, at least 99%, or 100% identical to any one of SEQ ID NOs: 4, 11, 17, 25, 33, 39, 43, 50, 60, 67, 74, 81, 88, 95, 101, 107, 114, 121, 127, 132, 140, 147, 154, 161, 168, 174, 181, 188, 194, 201, 207, 214, 221, 228, 234, 240, 243, 247, 250, 251, 252, 255, 284, 286, 289, 291, 293, 295, 299, 300, 302, 303, 305, 307, 308, 310, 312, 314, 315, 317, 323, 772, 780, 787, 796, 802, 809, 816, 822, 831, 838, 844, 851, 860, 867, 873, 880, and 988; and (c) VL3 comprises an amino acid sequence that is at least 65%, at least 70%, at least 75%, at least 80%, at least 85%, at least 90%, at least 95%, at least 99%, or 100% identical to any one of SEQ ID NOs: 4, 11, 17, 25, 33, 39, 43, 50, 60, 67, 74, 81, 88, 95, 101, 107, 114, 121, 127, 132, 140, 147, 154, 161, 168, 174, 181, 188, 194, 201, 207, 214, 221, 228, 234, 240, 243, 247, 250, 251, 252, 255, 284, 286, 289, 291, 293, 295, 299, 300, 302, 303, 305, 307, 308, 310, 312, 314, 315, 317, 323, 772, 780, 787, 796, 802, 809, 816, 822, 831, 838, 844, 851, 860, 867, 873, 880, and 988.

[0099] Also provided herein is an antigen binding polypeptide having a structure, from amino-terminus to carboxy-terminus, represented by: VH1-L1-VH2-L2-VH3-L3-CL; VH1-L1-VH3-L2-VH2-L3-CL; VH2-L1-VH1-L2-VH3-L3-CL; VH2-L1-VH3-L2-VH1-L3-CL; VH3-L1-VH1-L2-VH2-L3-CL; or VH3-L1-VH2-L2-VH1-L3-CL; wherein VH1 is a first immunoglobulin heavy chain variable region that specifically binds to a severe acute respiratory syndrome coronavirus 2 (SARS-CoV-2) protein; VH2 is a second immunoglobulin heavy chain variable region that specifically binds to a SARS-CoV-2 protein; VH3 is a third immunoglobulin heavy chain variable region that specifically binds to a SARS-CoV-2 protein; CL is an immunoglobulin light chain constant region; and L1-L3 are optional amino acid linkers.

[0100] In some aspects, (a) VH1 comprises: (i) a CDR1 having an amino acid sequence that is at least 65%, at least 70%, at least 75%, at least 80%, at least 85%, at least 90%, at least 95%, at least 99%, or 100% identical to any one of SEQ ID NOs: 5, 12, 18, 26, 34, 44, 51, 61, 68, 75, 82, 89, 96, 102, 108, 115, 122, 133, 141, 148, 155, 162, 175, 182, 189, 195, 202, 208, 215, 222, 229, 235, 318, 629, 773, 781, 788, 797, 803, 810, 817, 823, 832, 839, 845, 852, 861, 868, 874, 881, 1047, 1052, 1057, 1062, and 1067; (ii) a CDR2 having an amino acid sequence that is at least 65%, at least 70%, at least 75%, at least 80%, at least 85%, at least 90%, at least 95%, at least 99%, or 100% identical to any one of SEQ ID NOs: 6, 19, 27, 35, 45, 52, 56, 62, 69, 76, 83, 90, 109, 116, 123, 134, 142, 149, 156, 163, 169, 176, 183, 196, 209, 216, 223, 236, 273, 319, 328, 630, 776, 782, 789, 798, 804, 811, 818, 824, 833, 840, 846, 853, 862, 869, 875, 882, 1048, 1053, 1058, 1063, and 1068; and (iii) a CDR3 having an amino acid sequence that is at least 65%, at least 70%, at least 75%, at least 80%, at least 85%, at least 90%, at least 95%, at least 99%, or 100% identical to any one of SEQ ID NOs: 7, 13, 20, 28, 36, 40, 46, 53, 63, 70, 77, 84, 91, 97, 103, 110, 117, 124, 128, 135, 143, 150, 157, 164, 170, 177, 184, 190, 197, 203, 210, 217, 224, 230, 237, 241, 244, 248, 253, 257, 259, 261, 263, 265, 267, 269, 271, 274, 276, 278, 281, 297, 320, 322, 327, 330, 332, 631, 765, 767, 769, 774, 783, 790, 793, 799, 805, 812, 819, 825, 834, 841, 847, 854, 857, 863, 870, 876, 883, 886, 1049, 1054, 1059, 1064, and 1069; (b) VH2 comprises: (i) a CDR1 having an amino acid sequence that is at least 65%, at least 70%, at least 75%, at least 80%, at least 85%, at least 90%, at least 95%, at least 99%, or 100% identical to any one of SEQ ID NOs: 5, 12, 18, 26, 34, 44, 51, 61, 68, 75, 82, 89, 96, 102, 108, 115, 122, 133, 141, 148, 155, 162, 175, 182, 189, 195, 202, 208, 215, 222, 229, 235, 318, 629, 773, 781, 788, 797, 803, 810, 817, 823, 832, 839, 845, 852, 861, 868, 874, 881, 1047, 1052, 1057, 1062, and 1067; (ii) a CDR2 having an amino acid sequence that is at least 65%, at least 70%, at least 75%, at least 80%, at least 85%, at least 90%, at least 95%, at least 99%, or 100% identical to any one of SEQ ID NOs: 6, 19, 27, 35, 45, 52, 56, 62, 69, 76, 83, 90, 109, 116, 123, 134, 142, 149, 156, 163, 169, 176, 183, 196, 209, 216, 223, 236, 273, 319, 328, 630, 776, 782, 789, 798, 804, 811, 818, 824, 833, 840, 846, 853, 862, 869, 875, 882, 1048, 1053, 1058, 1063, and 1068; and (iii) a CDR3 having an amino acid sequence that is at least 65%, at least 70%, at least 75%, at least 80%, at least 85%, at least 90%, at least 95%, at least 99%, or 100% identical to any one of SEQ ID NOs: 7, 13, 20, 28, 36, 40, 46, 53, 63, 70, 77, 84, 91, 97, 103, 110, 117, 124, 128, 135, 143, 150, 157, 164, 170, 177, 184, 190, 197, 203, 210, 217, 224, 230, 237, 241, 244, 248, 253, 257, 259, 261, 263, 265, 267, 269, 271, 274, 276, 278, 281, 297, 320, 322, 327, 330, 332, 631, 765, 767, 769, 774, 783, 790, 793, 799, 805, 812, 819, 825, 834, 841, 847, 854, 857, 863, 870, 876, 883, 886, 1049, 1054, 1059, 1064, and 1069; and (c) VH3 comprises: (i) a CDR1 having an amino acid sequence that is at least 65%, at least 70%, at least 75%, at least 80%, at least 85%, at least 90%, at least 95%, at least 99%, or 100% identical to any one of SEQ ID NOs: 5, 12, 18, 26, 34, 44, 51, 61, 68, 75, 82, 89, 96, 102, 108, 115, 122, 133, 141, 148, 155, 162, 175, 182, 189, 195, 202, 208, 215, 222, 229, 235, 318, 629, 773, 781, 788, 797, 803, 810, 817, 823, 832, 839, 845, 852, 861, 868, 874, 881, 1047, 1052, 1057, 1062, and 1067; (ii) a CDR2 having an amino acid sequence that is at least 65%, at least 70%, at least 75%, at least 80%, at least 85%, at least 90%, at least 95%, at least 99%, or 100% identical to any one of SEQ ID NOs: 6, 19, 27, 35, 45, 52, 56, 62, 69, 76, 83, 90, 109, 116, 123, 134, 142, 149, 156, 163, 169, 176, 183, 196, 209, 216, 223, 236, 273, 319, 328, 630, 776, 782, 789, 798, 804, 811, 818, 824, 833, 840, 846, 853, 862, 869, 875, 882, 1048, 1053, 1058, 1063, and 1068; and (iii) a CDR3 having an amino acid sequence that is at least 65%, at least 70%, at least 75%, at least 80%, at least 85%, at least 90%, at least 95%, at least 99%, or 100% identical to any one of SEQ ID NOs: 7, 13, 20, 28, 36, 40, 46, 53, 63, 70, 77, 84, 91, 97, 103, 110, 117, 124, 128, 135, 143, 150, 157, 164, 170, 177, 184, 190, 197, 203, 210, 217, 224, 230, 237, 241, 244, 248, 253, 257, 259, 261, 263, 265, 267, 269, 271, 274, 276, 278, 281, 297, 320, 322, 327, 330, 332, 631, 765, 767, 769, 774, 783, 790, 793, 799, 805, 812, 819, 825, 834, 841, 847, 854, 857, 863, 870, 876, 883, 886, 1049, 1054, 1059, 1064, and 1069.

[0101] In some aspects, (a) VH1 comprises an amino acid sequence that is at least 65%, at least 70%, at least 75%, at least 80%, at least 85%, at least 90%, at least 95%, at least 99%, or 100% identical to any one of SEQ ID NOs: 8, 14, 21, 22, 29, 37, 47, 54, 57, 64, 71, 78, 85, 92, 98, 104, 111, 118, 125, 129, 136, 137, 144, 151, 158, 165, 171, 178, 185, 191, 198, 204, 211, 218, 225, 231, 238, 245, 254, 258, 260, 262, 264, 266, 268, 270, 272, 275, 277, 279, 280, 282, 298, 321, 331, 626, 775, 777, 784, 791, 800, 806, 813, 820, 826, 835, 842, 848, 855, 864, 871, 877, and 884; (b) VH2 comprises an amino acid sequence that is at least 65%, at least 70%, at least 75%, at least 80%, at least 85%, at least 90%, at least 95%, at least 99%, or 100% identical to any one of SEQ ID NOs: 8, 14, 21, 22, 29, 37, 47, 54, 57, 64, 71, 78, 85, 92, 98, 104, 111, 118, 125, 129, 136, 137, 144, 151, 158, 165, 171, 178, 185, 191, 198, 204, 211, 218, 225, 231, 238, 245, 254, 258, 260, 262, 264, 266, 268, 270, 272, 275, 277, 279, 280, 282, 298, 321, 331, 626, 775, 777, 784, 791, 800, 806, 813, 820, 826, 835, 842, 848, 855, 864, 871, 877, and 884; and (c) VH3 comprises an amino acid sequence that is at least 65%, at least 70%, at least 75%, at least 80%, at least 85%, at least 90%, at least 95%, at least 99%, or 100% identical to any one of SEQ ID NOs: 8, 14, 21, 22, 29, 37, 47, 54, 57, 64, 71, 78, 85, 92, 98, 104, 111, 118, 125, 129, 136, 137, 144, 151, 158, 165, 171, 178, 185, 191, 198, 204, 211, 218, 225, 231, 238, 245, 254, 258, 260, 262, 264, 266, 268, 270, 272, 275, 277, 279, 280, 282, 298, 321, 331, 626, 775, 777, 784, 791, 800, 806, 813, 820, 826, 835, 842, 848, 855, 864, 871, 877, and 884.

[0102] In some aspects, the antigen binding polypeptide further comprises an Fc region at the carboxy-terminus. In some aspects, the Fc region comprises an immunoglobulin heavy chain constant region 2 (CH2) and/or an immunoglobulin heavy chain constant region 3 (CH3). In some aspects, the Fc region further comprises an immunoglobulin hinge. In some aspects, the Fc region comprises an amino acid sequence that is at least 65%, at least 70%, at least 75%, at least 80%, at least 85%, at least 90%, at least 95%, at least 99%, or 100% identical to any one of SEQ ID NOs: 376-380. In some aspects, the Fc region comprises one or more half-life extension amino acid substitutions. In some aspects, the one or more half-life extension amino acid substitutions comprise one or more of amino acid substitutions M428L, N434A, N434S, L234F, L235E, P331S, M252Y, S254T, or T256E, or equivalent thereof, based on the EU numbering scheme. In some aspects, the one or more half-life extension amino acid substitutions comprise amino acid substitutions: (i) L234A and L235A (LA); (ii) M428L and N434S (LS); (iii) L234F and L235E; (iv) L234F, L235E, and P331S (TM); and/or (v) M252Y, S254T, and T256E (YTE); or equivalent thereof, based on the EU numbering scheme.

[0103] Also provided herein is an antigen binding polypeptide complex comprising a first polypeptide and a second polypeptide, wherein the first polypeptide has a structure, from amino-terminus to carboxy-terminus, represented by: VL1-L1-CL-L2-VL2-L3-VH2-L4-VH1-L5-CH1; VL1-L1-CL-L2-VH2-L3-VL2-L4-VH1-L5-CH1; VL1-L1-CH1-L2-VL2-L3-VH2-L4-VH1-L5-CL; VL1-L1-CH1-L2-VH2-L3- VL2-L4-VH1-L5-CL; VH1-L1-CL-L2-VL2-L3-VH2-L4-VL1-L5-CH1; VH1-L1-CL-L2-VH2-L3-VL2-L4-VL1-L5-CH1; VH1-L1-CH1-L2-VL2-L3-VH2-L4-VL1-L5-CL; VH1-L1-CH1-L2-VH2-L3-VL2-L4- VL1-L5-CL; VL2-L1-CL-L2-VL1-L3-VH1-L4-VH2-L5-CH1; VL2-L1-CL-L2-VH1-L3-VL1-L4-VH2-L5-CH1; VL2-L1-CH1-L2-VL1-L3-VH1-L4-VH2-L5-CL; VL2-L1-CH1-L2-VH1-L3-VL1-L4-VH2-L5- CL; VH2-L1-CL-L2-VL1-L3-VH1-L4-VL2-L5-CH1; VH2-L1-CL-L2-VH1-L3-VL1-L4-VL2-L5-CH1; VH2-L1-CH1-L2-VL1-L3-VH1-L4-VL2-L5-CL; or VH2-L1-CH1-L2-VH1-L3-VL1-L4-VL2-L5-CL; wherein the second polypeptide has a structure, from amino-terminus to carboxy-terminus, represented by: VL3-L6-CL-L7-VL4-L8-VH4-L9-VH3-L10-CH1; VL3-L6-CL-L7-VH4-L8-VL4-L9-VH3-L10-CH1; VL3-L6- CH1-L7-VL4-L8-VH4-L9-VH3-L10-CL; VL3-L6-CH1-L7-VH4-L8-VL4-L9-VH3-L10-CL; VH3-L6-CL-L7- VL4-L8-VH4-L9-VL3-L10-CH1; VH3-L6-CL-L7-VH4-L8-VL4-L9-VL3-L10-CH1; VH3-L6-CH1-L7-VL4-L8-VH4-L9-VL3-L10-CL; VH3-L6-CH1-L7-VH4-L8-VL4-L9-VL3-L10-CL; VL4-L6-CL-L7-VL3-L8- VH3-L9-VH4-L10-CH1; VL4-L6-CL-L7-VH3-L8-VL3-L9-VH4-L10-CH1; VL4-L6-CH1-L7-VL3-L8-VH3-L9-VH4-L10-CL; VL4-L6-CH1-L7-VH3-L8-VL3-L9-VH4-L10-CL; VH4-L6-CL-L7-VL3-L8-VH3-L9- VL4-L10-CH1; VH4-L6-CL-L7-VH3-L8-VL3-L9-VL4-L10-CH1; VH4-L6-CH1-L7-VL3-L8-VH3-L9-VL4-L10-CL; or VH4-L6-CH1-L7-VH3-L8-VL3-L9-VL4-L10-CL; and wherein: VL1 is a first immunoglobulin light chain variable region that specifically binds to a severe acute respiratory syndrome coronavirus 2 (SARS-CoV-2) protein; VL2 is a second immunoglobulin light chain variable region that specifically binds to a SARS-CoV-2 protein; VL3 is a third immunoglobulin light chain variable region that specifically binds to a SARS-CoV-2 protein; VL4 is a fourth immunoglobulin light chain variable region that specifically binds to a SARS-CoV-2 protein; VH1 is a first immunoglobulin heavy chain variable region that specifically binds to a SARS-CoV-2 protein; VH2 is a second immunoglobulin heavy chain variable region that specifically binds to a SARS-CoV-2 protein; VH3 is a third immunoglobulin heavy chain variable region that specifically binds to a SARS-CoV-2 protein; VH4 is a fourth immunoglobulin heavy chain variable region that specifically binds to a SARS-CoV-2 protein; CL is an immunoglobulin light chain constant region; CH1 is an immunoglobulin heavy chain constant region 1; and L1-L10 are optional amino acid linkers.

[0104] Also provided herein is an antigen binding polypeptide complex comprising a first polypeptide and a second polypeptide, wherein the first polypeptide has a structure, from amino-terminus to carboxy-terminus, represented by: VL1-CL-L1-VL2-L2-VH2-L3-VH1-CH1; VL1-CL-L1-VH2-L2-VL2-L3-VH1-CH1; VL1-CH1-L1-VL2-L2-VH2-L3-VH1-CL; VL1-CH1-L1-VH2-L2-VL2-L3-VH1-CL; VH1-CL-L1-VL2-L2-VH2-L3-VL1-CH1; VH1-CL-L1-VH2-L2-VL2-L3-VL1-CH1; VH1-CH1-L1-VL2-L2-VH2-L3-VL1-CL; VH1-CH1-L1-VH2-L2-VL2-L3-VL1-CL; VL2-CL-L1-VL1-L2-VH1-L3-VH2-CH1; VL2-CL-L1-VH1-L2-VL1-L3-VH2-CH1; VL2-CH1-L1-VL1-L2-VH1-L3-VH2-CL; VL2-CH1-L1-VH1-L2- VL1-L3-VH2-CL; VH2-CL-L1-VL1-L2-VH1-L3-VL2-CH1; VH2-CL-L1-VH1-L2-VL1-L3-VL2-CH1; VH2-CH1-L1-VL1-L2-VH1-L3-VL2-CL; or VH2-CH1-L1-VH1-L2-VL1-L3-VL2-CL; wherein the second polypeptide has a structure, from amino-terminus to carboxy-terminus, represented by: VL3-CL-L4-VL4-L5-VH4-L6-VH3-CH1; VL3-CL-L4-VH4-L5-VL4-L6-VH3-CH1; VL3-CH1-L4-VL4-L5-VH4-L6-VH3-CL; VL3-CH1-L4-VH4-L5-VL4-L6-VH3-CL; VH3-CL-L4-VL4-L5-VH4-L6-VL3-CH1; VH3-CL-L4-VH4-L5-VL4-L6-VL3-CH1; VH3-CH1-L4-VL4-L5-VH4-L6-VL3-CL; VH3-CH1-L4-VH4-L5-VL4-L6-VL3-CL; VL4-CL-L4-VL3-L5-VH3-L6-VH4-CH1; VL4-CL-L4-VH3-L5-VL3-L6-VH4-CH1; VL4-CH1-L4-VL3-L5-VH3-L6-VH4-CL; VL4-CH1-L4-VH3-L5-VL3-L6-VH4-CL; VH4-CL-L4-VL3-L5-VH3- L6-VL4-CH1; VH4-CL-L4-VH3-L5-VL3-L6-VL4-CH1; VH4-CH1-L4-VL3-L5-VH3-L6-VL4-CL; or VH4-CH1-L4-VH3-L5-VL3-L6-VL4-CL; and wherein: VL1 is a first immunoglobulin light chain variable region that specifically binds to a severe acute respiratory syndrome coronavirus 2 (SARS-CoV-2) protein; VL2 is a second immunoglobulin light chain variable region that specifically binds to a SARS-CoV-2 protein; VL3 is a third immunoglobulin light chain variable region that specifically binds to a SARS-CoV-2 protein; VL4 is a fourth immunoglobulin light chain variable region that specifically binds to a SARS-CoV-2 protein; VH1 is a first immunoglobulin heavy chain variable region that specifically binds to a SARS-CoV-2 protein; VH2 is a second immunoglobulin heavy chain variable region that specifically binds to a SARS-CoV-2 protein; VH3 is a third immunoglobulin heavy chain variable region that specifically binds to a SARS-CoV-2 protein; VH4 is a fourth immunoglobulin heavy chain variable region that specifically binds to a SARS-CoV-2 protein; CL is an immunoglobulin light chain constant region; CH1 is an immunoglobulin heavy chain constant region 1; and L1-L6 are amino acid linkers.

[0105] In some aspects, VL1 comprises a CDR1 having an amino acid sequence at least 65%, at least 70%, at least 75%, at least 80%, at least 85%, at least 90%, at least 95%, at least 99%, or 100% identical to SEQ ID NO: 9 or 1055, a CDR2 having an amino acid sequence at least 65%, at least 70%, at least 75%, at least 80%, at least 85%, at least 90%, at least 95%, at least 99%, or 100% identical to SEQ ID NO: 1056 or an amino acid sequence at least 65%, at least 70%, at least 75%, at least 80%, at least 85%, at least 90%, at least 95%, at least 99%, or 100% identical to amino acid sequence GAS, and a CDR3 having an amino acid sequence at least 65%, at least 70%, at least 75%, at least 80%, at least 85%, at least 90%, at least 95%, at least 99%, or 100% identical to SEQ ID NO: 10; VL2 comprises a CDR1 having an amino acid sequence at least 65%, at least 70%, at least 75%, at least 80%, at least 85%, at least 90%, at least 95%, at least 99%, or 100% identical to SEQ ID NO: 15, a CDR2 having an amino acid sequence at least 65%, at least 70%, at least 75%, at least 80%, at least 85%, at least 90%, at least 95%, at least 99%, or 100% identical to amino acid sequence LGS, and a CDR3 having an amino acid sequence at least 65%, at least 70%, at least 75%, at least 80%, at least 85%, at least 90%, at least 95%, at least 99%, or 100% identical to SEQ ID NO: 16; VL3 comprises a CDR1 having an amino acid sequence at least 65%, at least 70%, at least 75%, at least 80%, at least 85%, at least 90%, at least 95%, at least 99%, or 100% identical to SEQ ID NO: 9 or 1055, a CDR2 having an amino acid sequence at least 65%, at least 70%, at least 75%, at least 80%, at least 85%, at least 90%, at least 95%, at least 99%, or 100% identical to SEQ ID NO: 1056 or an amino acid sequence at least 65%, at least 70%, at least 75%, at least 80%, at least 85%, at least 90%, at least 95%, at least 99%, or 100% identical to amino acid sequence GAS, and a CDR3 having an amino acid sequence at least 65%, at least 70%, at least 75%, at least 80%, at least 85%, at least 90%, at least 95%, at least 99%, or 100% identical to SEQ ID NO: 10; VL4 comprises a CDR1 having an amino acid sequence at least 65%, at least 70%, at least 75%, at least 80%, at least 85%, at least 90%, at least 95%, at least 99%, or 100% identical to SEQ ID NO: 15, a CDR2 having an amino acid sequence at least 65%, at least 70%, at least 75%, at least 80%, at least 85%, at least 90%, at least 95%, at least 99%, or 100% identical to amino acid sequence LGS, and a CDR3 having an amino acid sequence at least 65%, at least 70%, at least 75%, at least 80%, at least 85%, at least 90%, at least 95%, at least 99%, or 100% identical to SEQ ID NO: 16; VH1 comprises a CDR1 having an amino acid sequence at least 65%, at least 70%, at least 75%, at least 80%, at least 85%, at least 90%, at least 95%, at least 99%, or 100% identical to SEQ ID NO: 12 or 1057, a CDR2 having an amino acid sequence at least 65%, at least 70%, at least 75%, at least 80%, at least 85%, at least 90%, at least 95%, at least 99%, or 100% identical to SEQ ID NO: 6 or 1058, and a CDR3 having an amino acid sequence at least 65%, at least 70%, at least 75%, at least 80%, at least 85%, at least 90%, at least 95%, at least 99%, or 100% identical to SEQ ID NO: 13 or 1059; VH2 comprises a CDR1 having an amino acid sequence at least 65%, at least 70%, at least 75%, at least 80%, at least 85%, at least 90%, at least 95%, at least 99%, or 100% identical to SEQ ID NO: 18, a CDR2 having an amino acid sequence at least 65%, at least 70%, at least 75%, at least 80%, at least 85%, at least 90%, at least 95%, at least 99%, or 100% identical to SEQ ID NO: 19, and a CDR3 having an amino acid sequence at least 65%, at least 70%, at least 75%, at least 80%, at least 85%, at least 90%, at least 95%, at least 99%, or 100% identical to SEQ ID NO: 20; VH3 comprises a CDR1 having an amino acid sequence at least 65%, at least 70%, at least 75%, at least 80%, at least 85%, at least 90%, at least 95%, at least 99%, or 100% identical to SEQ ID NO: 12 or 1057, a CDR2 having an amino acid sequence at least 65%, at least 70%, at least 75%, at least 80%, at least 85%, at least 90%, at least 95%, at least 99%, or 100% identical to SEQ ID NO: 6 or 1058, and a CDR3 having an amino acid sequence at least 65%, at least 70%, at least 75%, at least 80%, at least 85%, at least 90%, at least 95%, at least 99%, or 100% identical to SEQ ID NO: 13 or 1059; and VH4 comprises a CDR1 having an amino acid sequence at least 65%, at least 70%, at least 75%, at least 80%, at least 85%, at least 90%, at least 95%, at least 99%, or 100% identical to SEQ ID NO: 18, a CDR2 having an amino acid sequence at least 65%, at least 70%, at least 75%, at least 80%, at least 85%, at least 90%, at least 95%, at least 99%, or 100% identical to SEQ ID NO: 19, and a CDR3 having an amino acid sequence at least 65%, at least 70%, at least 75%, at least 80%, at least 85%, at least 90%, at least 95%, at least 99%, or 100% identical to SEQ ID NO: 20.

[0106] In some aspects, VL1 comprises an amino acid sequence that is at least 65%, at least 70%, at least 75%, at least 80%, at least 85%, at least 90%, at least 95%, at least 99%, or 100% identical to SEQ ID NO: 11; VL2 comprises an amino acid sequence that is at least 65%, at least 70%, at least 75%, at least 80%, at least 85%, at least 90%, at least 95%, at least 99%, or 100% identical to SEQ ID NO: 17; VL3 comprises an amino acid sequence that is at least 65%, at least 70%, at least 75%, at least 80%, at least 85%, at least 90%, at least 95%, at least 99%, or 100% identical to SEQ ID NO: 11; VL4 comprises an amino acid sequence that is at least 65%, at least 70%, at least 75%, at least 80%, at least 85%, at least 90%, at least 95%, at least 99%, or 100% identical to SEQ ID NO: 17; VH1 comprises an amino acid sequence that is at least 65%, at least 70%, at least 75%, at least 80%, at least 85%, at least 90%, at least 95%, at least 99%, or 100% identical to SEQ ID NO: 14; VH2 comprises an amino acid sequence that is at least 65%, at least 70%, at least 75%, at least 80%, at least 85%, at least 90%, at least 95%, at least 99%, or 100% identical to SEQ ID NO: 21 or 22; VH3 comprises an amino acid sequence that is at least 65%, at least 70%, at least 75%, at least 80%, at least 85%, at least 90%, at least 95%, at least 99%, or 100% identical to SEQ ID NO: 14; and VH4 comprises an amino acid sequence that is at least 65%, at least 70%, at least 75%, at least 80%, at least 85%, at least 90%, at least 95%, at least 99%, or 100% identical to SEQ ID NO: 21 or 22.

[0107] In some aspects, VL1 comprises a CDR1 having an amino acid sequence at least 65%, at least 70%, at least 75%, at least 80%, at least 85%, at least 90%, at least 95%, at least 99%, or 100% identical to SEQ ID NO: 23, a CDR2 having an amino acid sequence at least 65%, at least 70%, at least 75%, at least 80%, at least 85%, at least 90%, at least 95%, at least 99%, or 100% identical to amino acid sequence GTN, and a CDR3 having an amino acid sequence at least 65%, at least 70%, at least 75%, at least 80%, at least 85%, at least 90%, at least 95%, at least 99%, or 100% identical to SEQ ID NO: 24 or 325; VL2 comprises a CDR1 having an amino acid sequence at least 65%, at least 70%, at least 75%, at least 80%, at least 85%, at least 90%, at least 95%, at least 99%, or 100% identical to SEQ ID NO: 9 or 1055, a CDR2 having an amino acid sequence at least 65%, at least 70%, at least 75%, at least 80%, at least 85%, at least 90%, at least 95%, at least 99%, or 100% identical to SEQ ID NO: 1056 or an amino acid sequence at least 65%, at least 70%, at least 75%, at least 80%, at least 85%, at least 90%, at least 95%, at least 99%, or 100% identical to amino acid sequence GAS, and a CDR3 having an amino acid sequence at least 65%, at least 70%, at least 75%, at least 80%, at least 85%, at least 90%, at least 95%, at least 99%, or 100% identical to SEQ ID NO: 10; VL3 comprises a CDR1 having an amino acid sequence at least 65%, at least 70%, at least 75%, at least 80%, at least 85%, at least 90%, at least 95%, at least 99%, or 100% identical to SEQ ID NO: 9 or 1055, a CDR2 having an amino acid sequence at least 65%, at least 70%, at least 75%, at least 80%, at least 85%, at least 90%, at least 95%, at least 99%, or 100% identical to SEQ ID NO: 1056 or an amino acid sequence at least 65%, at least 70%, at least 75%, at least 80%, at least 85%, at least 90%, at least 95%, at least 99%, or 100% identical to amino acid sequence GAS, and a CDR3 having an amino acid sequence at least 65%, at least 70%, at least 75%, at least 80%, at least 85%, at least 90%, at least 95%, at least 99%, or 100% identical to SEQ ID NO: 10; VL4 comprises a CDR1 having an amino acid sequence at least 65%, at least 70%, at least 75%, at least 80%, at least 85%, at least 90%, at least 95%, at least 99%, or 100% identical to SEQ ID NO: 15, a CDR2 having an amino acid sequence at least 65%, at least 70%, at least 75%, at least 80%, at least 85%, at least 90%, at least 95%, at least 99%, or 100% identical to amino acid sequence LGS, and a CDR3 having an amino acid sequence at least 65%, at least 70%, at least 75%, at least 80%, at least 85%, at least 90%, at least 95%, at least 99%, or 100% identical to SEQ ID NO: 16; VH1 comprises a CDR1 having an amino acid sequence at least 65%, at least 70%, at least 75%, at least 80%, at least 85%, at least 90%, at least 95%, at least 99%, or 100% identical to SEQ ID NO: 26, a CDR2 having an amino acid sequence at least 65%, at least 70%, at least 75%, at least 80%, at least 85%, at least 90%, at least 95%, at least 99%, or 100% identical to SEQ ID NO: 27, and a CDR3 having an amino acid sequence at least 65%, at least 70%, at least 75%, at least 80%, at least 85%, at least 90%, at least 95%, at least 99%, or 100% identical to SEQ ID NO: 28 or 332; VH2 comprises a CDR1 having an amino acid sequence at least 65%, at least 70%, at least 75%, at least 80%, at least 85%, at least 90%, at least 95%, at least 99%, or 100% identical to SEQ ID NO: 12 or 1057, a CDR2 having an amino acid sequence at least 65%, at least 70%, at least 75%, at least 80%, at least 85%, at least 90%, at least 95%, at least 99%, or 100% identical to SEQ ID NO: 6 or 1058, and a CDR3 having an amino acid sequence at least 65%, at least 70%, at least 75%, at least 80%, at least 85%, at least 90%, at least 95%, at least 99%, or 100% identical to SEQ ID NO: 13 or 1059; VH3 comprises a CDR1 having an amino acid sequence at least 65%, at least 70%, at least 75%, at least 80%, at least 85%, at least 90%, at least 95%, at least 99%, or 100% identical to SEQ ID NO: 12 or 1057, a CDR2 having an amino acid sequence at least 65%, at least 70%, at least 75%, at least 80%, at least 85%, at least 90%, at least 95%, at least 99%, or 100% identical to SEQ ID NO: 6 or 1058, and a CDR3 having an amino acid sequence at least 65%, at least 70%, at least 75%, at least 80%, at least 85%, at least 90%, at least 95%, at least 99%, or 100% identical to SEQ ID NO: 13 or 1059; and VH4 comprises a CDR1 having an amino acid sequence at least 65%, at least 70%, at least 75%, at least 80%, at least 85%, at least 90%, at least 95%, at least 99%, or 100% identical to SEQ ID NO: 18, a CDR2 having an amino acid sequence at least 65%, at least 70%, at least 75%, at least 80%, at least 85%, at least 90%, at least 95%, at least 99%, or 100% identical to SEQ ID NO: 19, and a CDR3 having an amino acid sequence at least 65%, at least 70%, at least 75%, at least 80%, at least 85%, at least 90%, at least 95%, at least 99%, or 100% identical to SEQ ID NO: 20.

[0108] In some aspects, VL1 comprises an amino acid sequence that is at least 65%, at least 70%, at least 75%, at least 80%, at least 85%, at least 90%, at least 95%, at least 99%, or 100% identical to SEQ ID NO: 25; VL2 comprises an amino acid sequence that is at least 65%, at least 70%, at least 75%, at least 80%, at least 85%, at least 90%, at least 95%, at least 99%, or 100% identical to SEQ ID NO: 11; VL3 comprises an amino acid sequence that is at least 65%, at least 70%, at least 75%, at least 80%, at least 85%, at least 90%, at least 95%, at least 99%, or 100% identical to SEQ ID NO: 11; VL4 comprises an amino acid sequence that is at least 65%, at least 70%, at least 75%, at least 80%, at least 85%, at least 90%, at least 95%, at least 99%, or 100% identical to SEQ ID NO: 17; VH1 comprises an amino acid sequence that is at least 65%, at least 70%, at least 75%, at least 80%, at least 85%, at least 90%, at least 95%, at least 99%, or 100% identical to SEQ ID NO: 29; VH2 comprises an amino acid sequence that is at least 65%, at least 70%, at least 75%, at least 80%, at least 85%, at least 90%, at least 95%, at least 99%, or 100% identical to SEQ ID NO: 14; VH3 comprises an amino acid sequence that is at least 65%, at least 70%, at least 75%, at least 80%, at least 85%, at least 90%, at least 95%, at least 99%, or 100% identical to SEQ ID NO: 14; and VH4 comprises an amino acid sequence that is at least 65%, at least 70%, at least 75%, at least 80%, at least 85%, at least 90%, at least 95%, at least 99%, or 100% identical to SEQ ID NO: 21 or 22.

[0109] In some aspects, VL1 comprises a CDR1 having an amino acid sequence at least 65%, at least 70%, at least 75%, at least 80%, at least 85%, at least 90%, at least 95%, at least 99%, or 100% identical to SEQ ID NO: 23, a CDR2 having an amino acid sequence at least 65%, at least 70%, at least 75%, at least 80%, at least 85%, at least 90%, at least 95%, at least 99%, or 100% identical to amino acid sequence GTN, and a CDR3 having an amino acid sequence at least 65%, at least 70%, at least 75%, at least 80%, at least 85%, at least 90%, at least 95%, at least 99%, or 100% identical to SEQ ID NO: 24 or 325; VL2 comprises a CDR1 having an amino acid sequence at least 65%, at least 70%, at least 75%, at least 80%, at least 85%, at least 90%, at least 95%, at least 99%, or 100% identical to SEQ ID NO: 1 or 324, a CDR2 having an amino acid sequence at least 65%, at least 70%, at least 75%, at least 80%, at least 85%, at least 90%, at least 95%, at least 99%, or 100% identical to SEQ ID NO: 2 or an amino acid sequence at least 65%, at least 70%, at least 75%, at least 80%, at least 85%, at least 90%, at least 95%, at least 99%, or 100% identical to amino acid sequence AAS, and a CDR3 having an amino acid sequence at least 65%, at least 70%, at least 75%, at least 80%, at least 85%, at least 90%, at least 95%, at least 99%, or 100% identical to SEQ ID NO: 3; VL3 comprises a CDR1 having an amino acid sequence at least 65%, at least 70%, at least 75%, at least 80%, at least 85%, at least 90%, at least 95%, at least 99%, or 100% identical to SEQ ID NO: 15, a CDR2 having an amino acid sequence at least 65%, at least 70%, at least 75%, at least 80%, at least 85%, at least 90%, at least 95%, at least 99%, or 100% identical to amino acid sequence LGS, and a CDR3 having an amino acid sequence at least 65%, at least 70%, at least 75%, at least 80%, at least 85%, at least 90%, at least 95%, at least 99%, or 100% identical to SEQ ID NO: 16; VL4 comprises a CDR1 having an amino acid sequence at least 65%, at least 70%, at least 75%, at least 80%, at least 85%, at least 90%, at least 95%, at least 99%, or 100% identical to SEQ ID NO: 30, a CDR2 having an amino acid sequence at least 65%, at least 70%, at least 75%, at least 80%, at least 85%, at least 90%, at least 95%, at least 99%, or 100% identical to SEQ ID NO: 31 or an amino acid sequence at least 65%, at least 70%, at least 75%, at least 80%, at least 85%, at least 90%, at least 95%, at least 99%, or 100% identical to amino acid sequence SAS, and a CDR3 having an amino acid sequence at least 65%, at least 70%, at least 75%, at least 80%, at least 85%, at least 90%, at least 95%, at least 99%, or 100% identical to SEQ ID NO: 32, 38, or 326; VH1 comprises a CDR1 having an amino acid sequence at least 65%, at least 70%, at least 75%, at least 80%, at least 85%, at least 90%, at least 95%, at least 99%, or 100% identical to SEQ ID NO: 26, a CDR2 having an amino acid sequence at least 65%, at least 70%, at least 75%, at least 80%, at least 85%, at least 90%, at least 95%, at least 99%, or 100% identical to SEQ ID NO: 27, and a CDR3 having an amino acid sequence at least 65%, at least 70%, at least 75%, at least 80%, at least 85%, at least 90%, at least 95%, at least 99%, or 100% identical to SEQ ID NO: 28 or 332; VH2 comprises a CDR1 having an amino acid sequence at least 65%, at least 70%, at least 75%, at least 80%, at least 85%, at least 90%, at least 95%, at least 99%, or 100% identical to SEQ ID NO: 5, a CDR2 having an amino acid sequence at least 65%, at least 70%, at least 75%, at least 80%, at least 85%, at least 90%, at least 95%, at least 99%, or 100% identical to SEQ ID NO: 6, and a CDR3 having an amino acid sequence at least 65%, at least 70%, at least 75%, at least 80%, at least 85%, at least 90%, at least 95%, at least 99%, or 100% identical to SEQ ID NO: 7; VH3 comprises a CDR1 having an amino acid sequence at least 65%, at least 70%, at least 75%, at least 80%, at least 85%, at least 90%, at least 95%, at least 99%, or 100% identical to SEQ ID NO: 18, a CDR2 having an amino acid sequence at least 65%, at least 70%, at least 75%, at least 80%, at least 85%, at least 90%, at least 95%, at least 99%, or 100% identical to SEQ ID NO: 19, and a CDR3 having an amino acid sequence at least 65%, at least 70%, at least 75%, at least 80%, at least 85%, at least 90%, at least 95%, at least 99%, or 100% identical to SEQ ID NO: 20; and VH4 comprises a CDR1 having an amino acid sequence at least 65%, at least 70%, at least 75%, at least 80%, at least 85%, at least 90%, at least 95%, at least 99%, or 100% identical to SEQ ID NO: 34, a CDR2 having an amino acid sequence at least 65%, at least 70%, at least 75%, at least 80%, at least 85%, at least 90%, at least 95%, at least 99%, or 100% identical to SEQ ID NO: 35, and a CDR3 having an amino acid sequence at least 65%, at least 70%, at least 75%, at least 80%, at least 85%, at least 90%, at least 95%, at least 99%, or 100% identical to SEQ ID NO: 36, 40, or 327.

[0110] In some aspects, VL1 comprises an amino acid sequence that is at least 65%, at least 70%, at least 75%, at least 80%, at least 85%, at least 90%, at least 95%, at least 99%, or 100% identical to SEQ ID NO: 25; VL2 comprises an amino acid sequence that is at least 65%, at least 70%, at least 75%, at least 80%, at least 85%, at least 90%, at least 95%, at least 99%, or 100% identical to SEQ ID NO: 4; VL3 comprises an amino acid sequence that is at least 65%, at least 70%, at least 75%, at least 80%, at least 85%, at least 90%, at least 95%, at least 99%, or 100% identical to SEQ ID NO: 17; VL4 comprises an amino acid sequence that is at least 65%, at least 70%, at least 75%, at least 80%, at least 85%, at least 90%, at least 95%, at least 99%, or 100% identical to SEQ ID NO: 33 or 39; VH1 comprises an amino acid sequence that is at least 65%, at least 70%, at least 75%, at least 80%, at least 85%, at least 90%, at least 95%, at least 99%, or 100% identical to SEQ ID NO: 29; VH2 comprises an amino acid sequence that is at least 65%, at least 70%, at least 75%, at least 80%, at least 85%, at least 90%, at least 95%, at least 99%, or 100% identical to SEQ ID NO: 8; VH3 comprises an amino acid sequence that is at least 65%, at least 70%, at least 75%, at least 80%, at least 85%, at least 90%, at least 95%, at least 99%, or 100% identical to SEQ ID NO: 21 or 22; and VH4 comprises an amino acid sequence that is at least 65%, at least 70%, at least 75%, at least 80%, at least 85%, at least 90%, at least 95%, at least 99%, or 100% identical to SEQ ID NO: 37.

[0111] In some aspects, VL1 comprises a CDR1 having an amino acid sequence at least 65%, at least 70%, at least 75%, at least 80%, at least 85%, at least 90%, at least 95%, at least 99%, or 100% identical to SEQ ID NO: 9 or 1055, a CDR2 having an amino acid sequence at least 65%, at least 70%, at least 75%, at least 80%, at least 85%, at least 90%, at least 95%, at least 99%, or 100% identical to SEQ ID NO: 1056 or an amino acid sequence at least 65%, at least 70%, at least 75%, at least 80%, at least 85%, at least 90%, at least 95%, at least 99%, or 100% identical to amino acid sequence GAS, and a CDR3 having an amino acid sequence at least 65%, at least 70%, at least 75%, at least 80%, at least 85%, at least 90%, at least 95%, at least 99%, or 100% identical to SEQ ID NO: 10; VL2 comprises a CDR1 having an amino acid sequence at least 65%, at least 70%, at least 75%, at least 80%, at least 85%, at least 90%, at least 95%, at least 99%, or 100% identical to SEQ ID NO: 65 or 627, a CDR2 having an amino acid sequence at least 65%, at least 70%, at least 75%, at least 80%, at least 85%, at least 90%, at least 95%, at least 99%, or 100% identical to SEQ ID NO: 628 or an amino acid sequence at least 65%, at least 70%, at least 75%, at least 80%, at least 85%, at least 90%, at least 95%, at least 99%, or 100% identical to amino acid sequence SDS, and a CDR3 having an amino acid sequence at least 65%, at least 70%, at least 75%, at least 80%, at least 85%, at least 90%, at least 95%, at least 99%, or 100% identical to SEQ ID NO: 66; VL3 comprises a CDR1 having an amino acid sequence at least 65%, at least 70%, at least 75%, at least 80%, at least 85%, at least 90%, at least 95%, at least 99%, or 100% identical to SEQ ID NO: 9 or 1055, a CDR2 having an amino acid sequence at least 65%, at least 70%, at least 75%, at least 80%, at least 85%, at least 90%, at least 95%, at least 99%, or 100% identical to SEQ ID NO: 1056 or an amino acid sequence at least 65%, at least 70%, at least 75%, at least 80%, at least 85%, at least 90%, at least 95%, at least 99%, or 100% identical to amino acid sequence GAS, and a CDR3 having an amino acid sequence at least 65%, at least 70%, at least 75%, at least 80%, at least 85%, at least 90%, at least 95%, at least 99%, or 100% identical to SEQ ID NO: 10; VL4 comprises a CDR1 having an amino acid sequence at least 65%, at least 70%, at least 75%, at least 80%, at least 85%, at least 90%, at least 95%, at least 99%, or 100% identical to SEQ ID NO: 15, a CDR2 having an amino acid sequence at least 65%, at least 70%, at least 75%, at least 80%, at least 85%, at least 90%, at least 95%, at least 99%, or 100% identical to amino acid sequence LGS, and a CDR3 having an amino acid sequence at least 65%, at least 70%, at least 75%, at least 80%, at least 85%, at least 90%, at least 95%, at least 99%, or 100% identical to SEQ ID NO: 16; VH1 comprises a CDR1 having an amino acid sequence at least 65%, at least 70%, at least 75%, at least 80%, at least 85%, at least 90%, at least 95%, at least 99%, or 100% identical to SEQ ID NO: 12 or 1057, a CDR2 having an amino acid sequence at least 65%, at least 70%, at least 75%, at least 80%, at least 85%, at least 90%, at least 95%, at least 99%, or 100% identical to SEQ ID NO: 6 or 1058, and a CDR3 having an amino acid sequence at least 65%, at least 70%, at least 75%, at least 80%, at least 85%, at least 90%, at least 95%, at least 99%, or 100% identical to SEQ ID NO: 13 or 1059; VH2 comprises a CDR1 having an amino acid sequence at least 65%, at least 70%, at least 75%, at least 80%, at least 85%, at least 90%, at least 95%, at least 99%, or 100% identical to SEQ ID NO: 68 or 629, a CDR2 having an amino acid sequence at least 65%, at least 70%, at least 75%, at least 80%, at least 85%, at least 90%, at least 95%, at least 99%, or 100% identical to SEQ ID NO: 69 or 630, and a CDR3 having an amino acid sequence at least 65%, at least 70%, at least 75%, at least 80%, at least 85%, at least 90%, at least 95%, at least 99%, or 100% identical to SEQ ID NO: 70 or 631; VH3 comprises a CDR1 having an amino acid sequence at least 65%, at least 70%, at least 75%, at least 80%, at least 85%, at least 90%, at least 95%, at least 99%, or 100% identical to SEQ ID NO: 12 or 1057, a CDR2 having an amino acid sequence at least 65%, at least 70%, at least 75%, at least 80%, at least 85%, at least 90%, at least 95%, at least 99%, or 100% identical to SEQ ID NO: 6 or 1058, and a CDR3 having an amino acid sequence at least 65%, at least 70%, at least 75%, at least 80%, at least 85%, at least 90%, at least 95%, at least 99%, or 100% identical to SEQ ID NO: 13 or 1059; and VH4 comprises a CDR1 having an amino acid sequence at least 65%, at least 70%, at least 75%, at least 80%, at least 85%, at least 90%, at least 95%, at least 99%, or 100% identical to SEQ ID NO: 18, a CDR2 having an amino acid sequence at least 65%, at least 70%, at least 75%, at least 80%, at least 85%, at least 90%, at least 95%, at least 99%, or 100% identical to SEQ ID NO: 19, and a CDR3 having an amino acid sequence at least 65%, at least 70%, at least 75%, at least 80%, at least 85%, at least 90%, at least 95%, at least 99%, or 100% identical to SEQ ID NO: 20.

[0112] In some aspects, VL1 comprises an amino acid sequence that is at least 65%, at least 70%, at least 75%, at least 80%, at least 85%, at least 90%, at least 95%, at least 99%, or 100% identical to SEQ ID NO: 11; VL2 comprises an amino acid sequence that is at least 65%, at least 70%, at least 75%, at least 80%, at least 85%, at least 90%, at least 95%, at least 99%, or 100% identical to SEQ ID NO: 67; VL3 comprises an amino acid sequence that is at least 65%, at least 70%, at least 75%, at least 80%, at least 85%, at least 90%, at least 95%, at least 99%, or 100% identical to SEQ ID NO: 11; VL4 comprises an amino acid sequence that is at least 65%, at least 70%, at least 75%, at least 80%, at least 85%, at least 90%, at least 95%, at least 99%, or 100% identical to SEQ ID NO: 17; VH1 comprises an amino acid sequence that is at least 65%, at least 70%, at least 75%, at least 80%, at least 85%, at least 90%, at least 95%, at least 99%, or 100% identical to SEQ ID NO: 14; VH2 comprises an amino acid sequence that is at least 65%, at least 70%, at least 75%, at least 80%, at least 85%, at least 90%, at least 95%, at least 99%, or 100% identical to SEQ ID NO: 71 or 626; VH3 comprises an amino acid sequence that is at least 65%, at least 70%, at least 75%, at least 80%, at least 85%, at least 90%, at least 95%, at least 99%, or 100% identical to SEQ ID NO: 14; and VH4 comprises an amino acid sequence that is at least 65%, at least 70%, at least 75%, at least 80%, at least 85%, at least 90%, at least 95%, at least 99%, or 100% identical to SEQ ID NO: 21 or 22.

[0113] In some aspects, VL1 comprises a CDR1 having an amino acid sequence at least 65%, at least 70%, at least 75%, at least 80%, at least 85%, at least 90%, at least 95%, at least 99%, or 100% identical to SEQ ID NO: 9 or 1055, a CDR2 having an amino acid sequence at least 65%, at least 70%, at least 75%, at least 80%, at least 85%, at least 90%, at least 95%, at least 99%, or 100% identical to SEQ ID NO: 1056 or an amino acid sequence at least 65%, at least 70%, at least 75%, at least 80%, at least 85%, at least 90%, at least 95%, at least 99%, or 100% identical to amino acid sequence GAS, and a CDR3 having an amino acid sequence at least 65%, at least 70%, at least 75%, at least 80%, at least 85%, at least 90%, at least 95%, at least 99%, or 100% identical to SEQ ID NO: 10; VL2 comprises a CDR1 having an amino acid sequence at least 65%, at least 70%, at least 75%, at least 80%, at least 85%, at least 90%, at least 95%, at least 99%, or 100% identical to SEQ ID NO: 65 or 627, a CDR2 having an amino acid sequence at least 65%, at least 70%, at least 75%, at least 80%, at least 85%, at least 90%, at least 95%, at least 99%, or 100% identical to SEQ ID NO: 628 or an amino acid sequence at least 65%, at least 70%, at least 75%, at least 80%, at least 85%, at least 90%, at least 95%, at least 99%, or 100% identical to amino acid sequence SDS, and a CDR3 having an amino acid sequence at least 65%, at least 70%, at least 75%, at least 80%, at least 85%, at least 90%, at least 95%, at least 99%, or 100% identical to SEQ ID NO: 66; VL3 comprises a CDR1 having an amino acid sequence at least 65%, at least 70%, at least 75%, at least 80%, at least 85%, at least 90%, at least 95%, at least 99%, or 100% identical to SEQ ID NO: 9 or 1055, a CDR2 having an amino acid sequence at least 65%, at least 70%, at least 75%, at least 80%, at least 85%, at least 90%, at least 95%, at least 99%, or 100% identical to SEQ ID NO: 1056 or an amino acid sequence at least 65%, at least 70%, at least 75%, at least 80%, at least 85%, at least 90%, at least 95%, at least 99%, or 100% identical to amino acid sequence GAS, and a CDR3 having an amino acid sequence at least 65%, at least 70%, at least 75%, at least 80%, at least 85%, at least 90%, at least 95%, at least 99%, or 100% identical to SEQ ID NO: 10; VL4 comprises a CDR1 having an amino acid sequence at least 65%, at least 70%, at least 75%, at least 80%, at least 85%, at least 90%, at least 95%, at least 99%, or 100% identical to SEQ ID NO: 152 or 1045, a CDR2 having an amino acid sequence at least 65%, at least 70%, at least 75%, at least 80%, at least 85%, at least 90%, at least 95%, at least 99%, or 100% identical to SEQ ID NO: 1046 or an amino acid sequence at least 65%, at least 70%, at least 75%, at least 80%, at least 85%, at least 90%, at least 95%, at least 99%, or 100% identical to amino acid sequence GAS, and a CDR3 having an amino acid sequence at least 65%, at least 70%, at least 75%, at least 80%, at least 85%, at least 90%, at least 95%, at least 99%, or 100% identical to SEQ ID NO: 153 or 766; VH1 comprises a CDR1 having an amino acid sequence at least 65%, at least 70%, at least 75%, at least 80%, at least 85%, at least 90%, at least 95%, at least 99%, or 100% identical to SEQ ID NO: 12 or 1057, a CDR2 having an amino acid sequence at least 65%, at least 70%, at least 75%, at least 80%, at least 85%, at least 90%, at least 95%, at least 99%, or 100% identical to SEQ ID NO: 6 or 1058, and a CDR3 having an amino acid sequence at least 65%, at least 70%, at least 75%, at least 80%, at least 85%, at least 90%, at least 95%, at least 99%, or 100% identical to SEQ ID NO: 13 or 1059; VH2 comprises a CDR1 having an amino acid sequence at least 65%, at least 70%, at least 75%, at least 80%, at least 85%, at least 90%, at least 95%, at least 99%, or 100% identical to SEQ ID NO: 68 or 629, a CDR2 having an amino acid sequence at least 65%, at least 70%, at least 75%, at least 80%, at least 85%, at least 90%, at least 95%, at least 99%, or 100% identical to SEQ ID NO: 69 or 630, and a CDR3 having an amino acid sequence at least 65%, at least 70%, at least 75%, at least 80%, at least 85%, at least 90%, at least 95%, at least 99%, or 100% identical to SEQ ID NO: 70 or 631; VH3 comprises a CDR1 having an amino acid sequence at least 65%, at least 70%, at least 75%, at least 80%, at least 85%, at least 90%, at least 95%, at least 99%, or 100% identical to SEQ ID NO: 12 or 1057, a CDR2 having an amino acid sequence at least 65%, at least 70%, at least 75%, at least 80%, at least 85%, at least 90%, at least 95%, at least 99%, or 100% identical to SEQ ID NO: 6 or 1058, and a CDR3 having an amino acid sequence at least 65%, at least 70%, at least 75%, at least 80%, at least 85%, at least 90%, at least 95%, at least 99%, or 100% identical to SEQ ID NO: 13 or 1059; and VH4 comprises a CDR1 having an amino acid sequence at least 65%, at least 70%, at least 75%, at least 80%, at least 85%, at least 90%, at least 95%, at least 99%, or 100% identical to SEQ ID NO: 155 or 1047, a CDR2 having an amino acid sequence at least 65%, at least 70%, at least 75%, at least 80%, at least 85%, at least 90%, at least 95%, at least 99%, or 100% identical to SEQ ID NO: 156 or 1048, and a CDR3 having an amino acid sequence at least 65%, at least 70%, at least 75%, at least 80%, at least 85%, at least 90%, at least 95%, at least 99%, or 100% identical to SEQ ID NO: 157, 767, or 1049.

[0114] In some aspects, VL1 comprises an amino acid sequence that is at least 65%, at least 70%, at least 75%, at least 80%, at least 85%, at least 90%, at least 95%, at least 99%, or 100% identical to SEQ ID NO: 11; VL2 comprises an amino acid sequence that is at least 65%, at least 70%, at least 75%, at least 80%, at least 85%, at least 90%, at least 95%, at least 99%, or 100% identical to SEQ ID NO: 67; VL3 comprises an amino acid sequence that is at least 65%, at least 70%, at least 75%, at least 80%, at least 85%, at least 90%, at least 95%, at least 99%, or 100% identical to SEQ ID NO: 11; VL4 comprises an amino acid sequence that is at least 65%, at least 70%, at least 75%, at least 80%, at least 85%, at least 90%, at least 95%, at least 99%, or 100% identical to SEQ ID NO: 154; VH1 comprises an amino acid sequence that is at least 65%, at least 70%, at least 75%, at least 80%, at least 85%, at least 90%, at least 95%, at least 99%, or 100% identical to SEQ ID NO: 14; VH2 comprises an amino acid sequence that is at least 65%, at least 70%, at least 75%, at least 80%, at least 85%, at least 90%, at least 95%, at least 99%, or 100% identical to SEQ ID NO: 71 or 626; VH3 comprises an amino acid sequence that is at least 65%, at least 70%, at least 75%, at least 80%, at least 85%, at least 90%, at least 95%, at least 99%, or 100% identical to SEQ ID NO: 14; and VH4 comprises an amino acid sequence that is at least 65%, at least 70%, at least 75%, at least 80%, at least 85%, at least 90%, at least 95%, at least 99%, or 100% identical to SEQ ID NO: 158.

[0115] In some aspects, VL1 comprises a CDR1 having an amino acid sequence at least 65%, at least 70%, at least 75%, at least 80%, at least 85%, at least 90%, at least 95%, at least 99%, or 100% identical to SEQ ID NO: 145 or 1050, a CDR2 having an amino acid sequence at least 65%, at least 70%, at least 75%, at least 80%, at least 85%, at least 90%, at least 95%, at least 99%, or 100% identical to SEQ ID NO: 1051 or an amino acid sequence at least 65%, at least 70%, at least 75%, at least 80%, at least 85%, at least 90%, at least 95%, at least 99%, or 100% identical to amino acid sequence AAS, and a CDR3 having an amino acid sequence at least 65%, at least 70%, at least 75%, at least 80%, at least 85%, at least 90%, at least 95%, at least 99%, or 100% identical to SEQ ID NO: 146 or 764; VL2 comprises a CDR1 having an amino acid sequence at least 65%, at least 70%, at least 75%, at least 80%, at least 85%, at least 90%, at least 95%, at least 99%, or 100% identical to SEQ ID NO: 9 or 1055, a CDR2 having an amino acid sequence at least 65%, at least 70%, at least 75%, at least 80%, at least 85%, at least 90%, at least 95%, at least 99%, or 100% identical to SEQ ID NO: 1056 or an amino acid sequence at least 65%, at least 70%, at least 75%, at least 80%, at least 85%, at least 90%, at least 95%, at least 99%, or 100% identical to amino acid sequence GAS, and a CDR3 having an amino acid sequence at least 65%, at least 70%, at least 75%, at least 80%, at least 85%, at least 90%, at least 95%, at least 99%, or 100% identical to SEQ ID NO: 10; VL3 comprises a CDR1 having an amino acid sequence at least 65%, at least 70%, at least 75%, at least 80%, at least 85%, at least 90%, at least 95%, at least 99%, or 100% identical to SEQ ID NO: 65 or 627, a CDR2 having an amino acid sequence at least 65%, at least 70%, at least 75%, at least 80%, at least 85%, at least 90%, at least 95%, at least 99%, or 100% identical to SEQ ID NO: 628 or an amino acid sequence at least 65%, at least 70%, at least 75%, at least 80%, at least 85%, at least 90%, at least 95%, at least 99%, or 100% identical to amino acid sequence SDS, and a CDR3 having an amino acid sequence at least 65%, at least 70%, at least 75%, at least 80%, at least 85%, at least 90%, at least 95%, at least 99%, or 100% identical to SEQ ID NO: 66; VL4 comprises a CDR1 having an amino acid sequence at least 65%, at least 70%, at least 75%, at least 80%, at least 85%, at least 90%, at least 95%, at least 99%, or 100% identical to SEQ ID NO: 15, a CDR2 having an amino acid sequence at least 65%, at least 70%, at least 75%, at least 80%, at least 85%, at least 90%, at least 95%, at least 99%, or 100% identical to amino acid sequence LGS, and a CDR3 having an amino acid sequence at least 65%, at least 70%, at least 75%, at least 80%, at least 85%, at least 90%, at least 95%, at least 99%, or 100% identical to SEQ ID NO: 16; VH1 comprises a CDR1 having an amino acid sequence at least 65%, at least 70%, at least 75%, at least 80%, at least 85%, at least 90%, at least 95%, at least 99%, or 100% identical to SEQ ID NO: 148 or 1052, a CDR2 having an amino acid sequence at least 65%, at least 70%, at least 75%, at least 80%, at least 85%, at least 90%, at least 95%, at least 99%, or 100% identical to SEQ ID NO: 149 or 1053, and a CDR3 having an amino acid sequence at least 65%, at least 70%, at least 75%, at least 80%, at least 85%, at least 90%, at least 95%, at least 99%, or 100% identical to SEQ ID NO: 150, 765, or 1054; VH2 comprises a CDR1 having an amino acid sequence at least 65%, at least 70%, at least 75%, at least 80%, at least 85%, at least 90%, at least 95%, at least 99%, or 100% identical to SEQ ID NO: 12 or 1057, a CDR2 having an amino acid sequence at least 65%, at least 70%, at least 75%, at least 80%, at least 85%, at least 90%, at least 95%, at least 99%, or 100% identical to SEQ ID NO: 6 or 1058, and a CDR3 having an amino acid sequence at least 65%, at least 70%, at least 75%, at least 80%, at least 85%, at least 90%, at least 95%, at least 99%, or 100% identical to SEQ ID NO: 13 or 1059; VH3 comprises a CDR1 having an amino acid sequence at least 65%, at least 70%, at least 75%, at least 80%, at least 85%, at least 90%, at least 95%, at least 99%, or 100% identical to SEQ ID NO: 68 or 629, a CDR2 having an amino acid sequence at least 65%, at least 70%, at least 75%, at least 80%, at least 85%, at least 90%, at least 95%, at least 99%, or 100% identical to SEQ ID NO: 69 or 630, and a CDR3 having an amino acid sequence at least 65%, at least 70%, at least 75%, at least 80%, at least 85%, at least 90%, at least 95%, at least 99%, or 100% identical to SEQ ID NO: 70 or 631; and VH4 comprises a CDR1 having an amino acid sequence at least 65%, at least 70%, at least 75%, at least 80%, at least 85%, at least 90%, at least 95%, at least 99%, or 100% identical to SEQ ID NO: 18, a CDR2 having an amino acid sequence at least 65%, at least 70%, at least 75%, at least 80%, at least 85%, at least 90%, at least 95%, at least 99%, or 100% identical to SEQ ID NO: 19, and a CDR3 having an amino acid sequence at least 65%, at least 70%, at least 75%, at least 80%, at least 85%, at least 90%, at least 95%, at least 99%, or 100% identical to SEQ ID NO: 20.

[0116] In some aspects, VL1 comprises an amino acid sequence that is at least 65%, at least 70%, at least 75%, at least 80%, at least 85%, at least 90%, at least 95%, at least 99%, or 100% identical to SEQ ID NO: 147; VL2 comprises an amino acid sequence that is at least 65%, at least 70%, at least 75%, at least 80%, at least 85%, at least 90%, at least 95%, at least 99%, or 100% identical to SEQ ID NO: 11; VL3 comprises an amino acid sequence that is at least 65%, at least 70%, at least 75%, at least 80%, at least 85%, at least 90%, at least 95%, at least 99%, or 100% identical to SEQ ID NO: 67; VL4 comprises an amino acid sequence that is at least 65%, at least 70%, at least 75%, at least 80%, at least 85%, at least 90%, at least 95%, at least 99%, or 100% identical to SEQ ID NO: 17; VH1 comprises an amino acid sequence that is at least 65%, at least 70%, at least 75%, at least 80%, at least 85%, at least 90%, at least 95%, at least 99%, or 100% identical to SEQ ID NO: 151; VH2 comprises an amino acid sequence that is at least 65%, at least 70%, at least 75%, at least 80%, at least 85%, at least 90%, at least 95%, at least 99%, or 100% identical to SEQ ID NO: 14; VH3 comprises an amino acid sequence that is at least 65%, at least 70%, at least 75%, at least 80%, at least 85%, at least 90%, at least 95%, at least 99%, or 100% identical to SEQ ID NO: 71 or 626; and VH4 comprises an amino acid sequence that is at least 65%, at least 70%, at least 75%, at least 80%, at least 85%, at least 90%, at least 95%, at least 99%, or 100% identical to SEQ ID NO: 21 or 22.

[0117] In some aspects, VL1 comprises a CDR1 having an amino acid sequence at least 65%, at least 70%, at least 75%, at least 80%, at least 85%, at least 90%, at least 95%, at least 99%, or 100% identical to SEQ ID NO: 145 or 1050, a CDR2 having an amino acid sequence at least 65%, at least 70%, at least 75%, at least 80%, at least 85%, at least 90%, at least 95%, at least 99%, or 100% identical to SEQ ID NO: 1051 or an amino acid sequence at least 65%, at least 70%, at least 75%, at least 80%, at least 85%, at least 90%, at least 95%, at least 99%, or 100% identical to amino acid sequence AAS, and a CDR3 having an amino acid sequence at least 65%, at least 70%, at least 75%, at least 80%, at least 85%, at least 90%, at least 95%, at least 99%, or 100% identical to SEQ ID NO: 146 or 764; VL2 comprises a CDR1 having an amino acid sequence at least 65%, at least 70%, at least 75%, at least 80%, at least 85%, at least 90%, at least 95%, at least 99%, or 100% identical to SEQ ID NO: 9 or 1055, a CDR2 having an amino acid sequence at least 65%, at least 70%, at least 75%, at least 80%, at least 85%, at least 90%, at least 95%, at least 99%, or 100% identical to SEQ ID NO: 1056 or an amino acid sequence at least 65%, at least 70%, at least 75%, at least 80%, at least 85%, at least 90%, at least 95%, at least 99%, or 100% identical to amino acid sequence GAS, and a CDR3 having an amino acid sequence at least 65%, at least 70%, at least 75%, at least 80%, at least 85%, at least 90%, at least 95%, at least 99%, or 100% identical to SEQ ID NO: 10; VL3 comprises a CDR1 having an amino acid sequence at least 65%, at least 70%, at least 75%, at least 80%, at least 85%, at least 90%, at least 95%, at least 99%, or 100% identical to SEQ ID NO: 65 or 627, a CDR2 having an amino acid sequence at least 65%, at least 70%, at least 75%, at least 80%, at least 85%, at least 90%, at least 95%, at least 99%, or 100% identical to SEQ ID NO: 628 or an amino acid sequence at least 65%, at least 70%, at least 75%, at least 80%, at least 85%, at least 90%, at least 95%, at least 99%, or 100% identical to amino acid sequence SDS, and a CDR3 having an amino acid sequence at least 65%, at least 70%, at least 75%, at least 80%, at least 85%, at least 90%, at least 95%, at least 99%, or 100% identical to SEQ ID NO: 66; VL4 comprises a CDR1 having an amino acid sequence at least 65%, at least 70%, at least 75%, at least 80%, at least 85%, at least 90%, at least 95%, at least 99%, or 100% identical to SEQ ID NO: 152 or 1045, a CDR2 having an amino acid sequence at least 65%, at least 70%, at least 75%, at least 80%, at least 85%, at least 90%, at least 95%, at least 99%, or 100% identical to SEQ ID NO: 1046 or an amino acid sequence at least 65%, at least 70%, at least 75%, at least 80%, at least 85%, at least 90%, at least 95%, at least 99%, or 100% identical to amino acid sequence GAS, and a CDR3 having an amino acid sequence at least 65%, at least 70%, at least 75%, at least 80%, at least 85%, at least 90%, at least 95%, at least 99%, or 100% identical to SEQ ID NO: 153 or 766; VH1 comprises a CDR1 having an amino acid sequence at least 65%, at least 70%, at least 75%, at least 80%, at least 85%, at least 90%, at least 95%, at least 99%, or 100% identical to SEQ ID NO: 148 or 1052, a CDR2 having an amino acid sequence at least 65%, at least 70%, at least 75%, at least 80%, at least 85%, at least 90%, at least 95%, at least 99%, or 100% identical to SEQ ID NO: 149 or 1053, and a CDR3 having an amino acid sequence at least 65%, at least 70%, at least 75%, at least 80%, at least 85%, at least 90%, at least 95%, at least 99%, or 100% identical to SEQ ID NO: 150, 765, or 1054; VH2 comprises a CDR1 having an amino acid sequence at least 65%, at least 70%, at least 75%, at least 80%, at least 85%, at least 90%, at least 95%, at least 99%, or 100% identical to SEQ ID NO: 12 or 1057, a CDR2 having an amino acid sequence at least 65%, at least 70%, at least 75%, at least 80%, at least 85%, at least 90%, at least 95%, at least 99%, or 100% identical to SEQ ID NO: 6 or 1058, and a CDR3 having an amino acid sequence at least 65%, at least 70%, at least 75%, at least 80%, at least 85%, at least 90%, at least 95%, at least 99%, or 100% identical to SEQ ID NO: 13 or 1059; VH3 comprises a CDR1 having an amino acid sequence at least 65%, at least 70%, at least 75%, at least 80%, at least 85%, at least 90%, at least 95%, at least 99%, or 100% identical to SEQ ID NO: 68 or 629, a CDR2 having an amino acid sequence at least 65%, at least 70%, at least 75%, at least 80%, at least 85%, at least 90%, at least 95%, at least 99%, or 100% identical to SEQ ID NO: 69 or 630, and a CDR3 having an amino acid sequence at least 65%, at least 70%, at least 75%, at least 80%, at least 85%, at least 90%, at least 95%, at least 99%, or 100% identical to SEQ ID NO: 70 or 631; and VH4 comprises a CDR1 having an amino acid sequence at least 65%, at least 70%, at least 75%, at least 80%, at least 85%, at least 90%, at least 95%, at least 99%, or 100% identical to SEQ ID NO: 155 or 1047, a CDR2 having an amino acid sequence at least 65%, at least 70%, at least 75%, at least 80%, at least 85%, at least 90%, at least 95%, at least 99%, or 100% identical to SEQ ID NO: 156 or 1048, and a CDR3 having an amino acid sequence at least 65%, at least 70%, at least 75%, at least 80%, at least 85%, at least 90%, at least 95%, at least 99%, or 100% identical to SEQ ID NO: 157, 767, or 1049.

[0118] In some aspects, VL1 comprises an amino acid sequence that is at least 65%, at least 70%, at least 75%, at least 80%, at least 85%, at least 90%, at least 95%, at least 99%, or 100% identical to SEQ ID NO: 147; VL2 comprises an amino acid sequence that is at least 65%, at least 70%, at least 75%, at least 80%, at least 85%, at least 90%, at least 95%, at least 99%, or 100% identical to SEQ ID NO: 11; VL3 comprises an amino acid sequence that is at least 65%, at least 70%, at least 75%, at least 80%, at least 85%, at least 90%, at least 95%, at least 99%, or 100% identical to SEQ ID NO: 67; VL4 comprises an amino acid sequence that is at least 65%, at least 70%, at least 75%, at least 80%, at least 85%, at least 90%, at least 95%, at least 99%, or 100% identical to SEQ ID NO: 154; VH1 comprises an amino acid sequence that is at least 65%, at least 70%, at least 75%, at least 80%, at least 85%, at least 90%, at least 95%, at least 99%, or 100% identical to SEQ ID NO: 151; VH2 comprises an amino acid sequence that is at least 65%, at least 70%, at least 75%, at least 80%, at least 85%, at least 90%, at least 95%, at least 99%, or 100% identical to SEQ ID NO: 14; VH3 comprises an amino acid sequence that is at least 65%, at least 70%, at least 75%, at least 80%, at least 85%, at least 90%, at least 95%, at least 99%, or 100% identical to SEQ ID NO: 71 or 626; and VH4 comprises an amino acid sequence that is at least 65%, at least 70%, at least 75%, at least 80%, at least 85%, at least 90%, at least 95%, at least 99%, or 100% identical to SEQ ID NO: 158.

[0119] In some aspects, VL1 comprises a CDR1 having an amino acid sequence at least 65%, at least 70%, at least 75%, at least 80%, at least 85%, at least 90%, at least 95%, at least 99%, or 100% identical to SEQ ID NO: 145 or 1050, a CDR2 having an amino acid sequence at least 65%, at least 70%, at least 75%, at least 80%, at least 85%, at least 90%, at least 95%, at least 99%, or 100% identical to SEQ ID NO: 1051 or an amino acid sequence at least 65%, at least 70%, at least 75%, at least 80%, at least 85%, at least 90%, at least 95%, at least 99%, or 100% identical to amino acid sequence AAS, and a CDR3 having an amino acid sequence at least 65%, at least 70%, at least 75%, at least 80%, at least 85%, at least 90%, at least 95%, at least 99%, or 100% identical to SEQ ID NO: 146 or 764; VL2 comprises a CDR1 having an amino acid sequence at least 65%, at least 70%, at least 75%, at least 80%, at least 85%, at least 90%, at least 95%, at least 99%, or 100% identical to SEQ ID NO: 9 or 1055, a CDR2 having an amino acid sequence at least 65%, at least 70%, at least 75%, at least 80%, at least 85%, at least 90%, at least 95%, at least 99%, or 100% identical to SEQ ID NO: 1056 or an amino acid sequence at least 65%, at least 70%, at least 75%, at least 80%, at least 85%, at least 90%, at least 95%, at least 99%, or 100% identical to amino acid sequence GAS, and a CDR3 having an amino acid sequence at least 65%, at least 70%, at least 75%, at least 80%, at least 85%, at least 90%, at least 95%, at least 99%, or 100% identical to SEQ ID NO: 10; VL3 comprises a CDR1 having an amino acid sequence at least 65%, at least 70%, at least 75%, at least 80%, at least 85%, at least 90%, at least 95%, at least 99%, or 100% identical to SEQ ID NO: 15, a CDR2 having an amino acid sequence at least 65%, at least 70%, at least 75%, at least 80%, at least 85%, at least 90%, at least 95%, at least 99%, or 100% identical to amino acid sequence LGS, and a CDR3 having an amino acid sequence at least 65%, at least 70%, at least 75%, at least 80%, at least 85%, at least 90%, at least 95%, at least 99%, or 100% identical to SEQ ID NO: 16; VL4 comprises a CDR1 having an amino acid sequence at least 65%, at least 70%, at least 75%, at least 80%, at least 85%, at least 90%, at least 95%, at least 99%, or 100% identical to SEQ ID NO: 65 or 627, a CDR2 having an amino acid sequence at least 65%, at least 70%, at least 75%, at least 80%, at least 85%, at least 90%, at least 95%, at least 99%, or 100% identical to SEQ ID NO: 628 or an amino acid sequence at least 65%, at least 70%, at least 75%, at least 80%, at least 85%, at least 90%, at least 95%, at least 99%, or 100% identical to amino acid sequence SDS, and a CDR3 having an amino acid sequence at least 65%, at least 70%, at least 75%, at least 80%, at least 85%, at least 90%, at least 95%, at least 99%, or 100% identical to SEQ ID NO: 66; VH1 comprises a CDR1 having an amino acid sequence at least 65%, at least 70%, at least 75%, at least 80%, at least 85%, at least 90%, at least 95%, at least 99%, or 100% identical to SEQ ID NO: 148 or 1052, a CDR2 having an amino acid sequence at least 65%, at least 70%, at least 75%, at least 80%, at least 85%, at least 90%, at least 95%, at least 99%, or 100% identical to SEQ ID NO: 149 or 1053, and a CDR3 having an amino acid sequence at least 65%, at least 70%, at least 75%, at least 80%, at least 85%, at least 90%, at least 95%, at least 99%, or 100% identical to SEQ ID NO: 150, 765, or 1054; VH2 comprises a CDR1 having an amino acid sequence at least 65%, at least 70%, at least 75%, at least 80%, at least 85%, at least 90%, at least 95%, at least 99%, or 100% identical to SEQ ID NO: 12 or 1057, a CDR2 having an amino acid sequence at least 65%, at least 70%, at least 75%, at least 80%, at least 85%, at least 90%, at least 95%, at least 99%, or 100% identical to SEQ ID NO: 6 or 1058, and a CDR3 having an amino acid sequence at least 65%, at least 70%, at least 75%, at least 80%, at least 85%, at least 90%, at least 95%, at least 99%, or 100% identical to SEQ ID NO: 13 or 1059; VH3 comprises a CDR1 having an amino acid sequence at least 65%, at least 70%, at least 75%, at least 80%, at least 85%, at least 90%, at least 95%, at least 99%, or 100% identical to SEQ ID NO: 18, a CDR2 having an amino acid sequence at least 65%, at least 70%, at least 75%, at least 80%, at least 85%, at least 90%, at least 95%, at least 99%, or 100% identical to SEQ ID NO: 19, and a CDR3 having an amino acid sequence at least 65%, at least 70%, at least 75%, at least 80%, at least 85%, at least 90%, at least 95%, at least 99%, or 100% identical to SEQ ID NO: 20; and VH4 comprises a CDR1 having an amino acid sequence at least 65%, at least 70%, at least 75%, at least 80%, at least 85%, at least 90%, at least 95%, at least 99%, or 100% identical to SEQ ID NO: 68 or 629, a CDR2 having an amino acid sequence at least 65%, at least 70%, at least 75%, at least 80%, at least 85%, at least 90%, at least 95%, at least 99%, or 100% identical to SEQ ID NO: 69 or 630, and a CDR3 having an amino acid sequence at least 65%, at least 70%, at least 75%, at least 80%, at least 85%, at least 90%, at least 95%, at least 99%, or 100% identical to SEQ ID NO: 70 or 631.

[0120] In some aspects, VL1 comprises an amino acid sequence that is at least 65%, at least 70%, at least 75%, at least 80%, at least 85%, at least 90%, at least 95%, at least 99%, or 100% identical to SEQ ID NO: 147; VL2 comprises an amino acid sequence that is at least 65%, at least 70%, at least 75%, at least 80%, at least 85%, at least 90%, at least 95%, at least 99%, or 100% identical to SEQ ID NO: 11; VL3 comprises an amino acid sequence that is at least 65%, at least 70%, at least 75%, at least 80%, at least 85%, at least 90%, at least 95%, at least 99%, or 100% identical to SEQ ID NO: 17; VL4 comprises an amino acid sequence that is at least 65%, at least 70%, at least 75%, at least 80%, at least 85%, at least 90%, at least 95%, at least 99%, or 100% identical to SEQ ID NO: 67; VH1 comprises an amino acid sequence that is at least 65%, at least 70%, at least 75%, at least 80%, at least 85%, at least 90%, at least 95%, at least 99%, or 100% identical to SEQ ID NO: 151; VH2 comprises an amino acid sequence that is at least 65%, at least 70%, at least 75%, at least 80%, at least 85%, at least 90%, at least 95%, at least 99%, or 100% identical to SEQ ID NO: 14; VH3 comprises an amino acid sequence that is at least 65%, at least 70%, at least 75%, at least 80%, at least 85%, at least 90%, at least 95%, at least 99%, or 100% identical to SEQ ID NO: 21 or 22; and VH4 comprises an amino acid sequence that is at least 65%, at least 70%, at least 75%, at least 80%, at least 85%, at least 90%, at least 95%, at least 99%, or 100% identical to SEQ ID NO: 71 or 626.

[0121] In some aspects, VL1 comprises a CDR1 having an amino acid sequence at least 65%, at least 70%, at least 75%, at least 80%, at least 85%, at least 90%, at least 95%, at least 99%, or 100% identical to SEQ ID NO: 145 or 1050, a CDR2 having an amino acid sequence at least 65%, at least 70%, at least 75%, at least 80%, at least 85%, at least 90%, at least 95%, at least 99%, or 100% identical to SEQ ID NO: 1051 or an amino acid sequence at least 65%, at least 70%, at least 75%, at least 80%, at least 85%, at least 90%, at least 95%, at least 99%, or 100% identical to amino acid sequence AAS, and a CDR3 having an amino acid sequence at least 65%, at least 70%, at least 75%, at least 80%, at least 85%, at least 90%, at least 95%, at least 99%, or 100% identical to SEQ ID NO: 146 or 764; VL2 comprises a CDR1 having an amino acid sequence at least 65%, at least 70%, at least 75%, at least 80%, at least 85%, at least 90%, at least 95%, at least 99%, or 100% identical to SEQ ID NO: 9 or 1055, a CDR2 having an amino acid sequence at least 65%, at least 70%, at least 75%, at least 80%, at least 85%, at least 90%, at least 95%, at least 99%, or 100% identical to SEQ ID NO: 1056 or an amino acid sequence at least 65%, at least 70%, at least 75%, at least 80%, at least 85%, at least 90%, at least 95%, at least 99%, or 100% identical to amino acid sequence GAS, and a CDR3 having an amino acid sequence at least 65%, at least 70%, at least 75%, at least 80%, at least 85%, at least 90%, at least 95%, at least 99%, or 100% identical to SEQ ID NO: 10; VL3 comprises a CDR1 having an amino acid sequence at least 65%, at least 70%, at least 75%, at least 80%, at least 85%, at least 90%, at least 95%, at least 99%, or 100% identical to SEQ ID NO: 152 or 1045, a CDR2 having an amino acid sequence at least 65%, at least 70%, at least 75%, at least 80%, at least 85%, at least 90%, at least 95%, at least 99%, or 100% identical to SEQ ID NO: 1046 or an amino acid sequence at least 65%, at least 70%, at least 75%, at least 80%, at least 85%, at least 90%, at least 95%, at least 99%, or 100% identical to amino acid sequence GAS, and a CDR3 having an amino acid sequence at least 65%, at least 70%, at least 75%, at least 80%, at least 85%, at least 90%, at least 95%, at least 99%, or 100% identical to SEQ ID NO: 153 or 766; VL4 comprises a CDR1 having an amino acid sequence at least 65%, at least 70%, at least 75%, at least 80%, at least 85%, at least 90%, at least 95%, at least 99%, or 100% identical to SEQ ID NO: 65 or 627, a CDR2 having an amino acid sequence at least 65%, at least 70%, at least 75%, at least 80%, at least 85%, at least 90%, at least 95%, at least 99%, or 100% identical to SEQ ID NO: 628 or an amino acid sequence at least 65%, at least 70%, at least 75%, at least 80%, at least 85%, at least 90%, at least 95%, at least 99%, or 100% identical to amino acid sequence SDS, and a CDR3 having an amino acid sequence at least 65%, at least 70%, at least 75%, at least 80%, at least 85%, at least 90%, at least 95%, at least 99%, or 100% identical to SEQ ID NO: 66; VH1 comprises a CDR1 having an amino acid sequence at least 65%, at least 70%, at least 75%, at least 80%, at least 85%, at least 90%, at least 95%, at least 99%, or 100% identical to SEQ ID NO: 148 or 1052, a CDR2 having an amino acid sequence at least 65%, at least 70%, at least 75%, at least 80%, at least 85%, at least 90%, at least 95%, at least 99%, or 100% identical to SEQ ID NO: 149 or 1053, and a CDR3 having an amino acid sequence at least 65%, at least 70%, at least 75%, at least 80%, at least 85%, at least 90%, at least 95%, at least 99%, or 100% identical to SEQ ID NO: 150, 765, or 1054; VH2 comprises a CDR1 having an amino acid sequence at least 65%, at least 70%, at least 75%, at least 80%, at least 85%, at least 90%, at least 95%, at least 99%, or 100% identical to SEQ ID NO: 12 or 1057, a CDR2 having an amino acid sequence at least 65%, at least 70%, at least 75%, at least 80%, at least 85%, at least 90%, at least 95%, at least 99%, or 100% identical to SEQ ID NO: 6 or 1058, and a CDR3 having an amino acid sequence at least 65%, at least 70%, at least 75%, at least 80%, at least 85%, at least 90%, at least 95%, at least 99%, or 100% identical to SEQ ID NO: 13 or 1059; VH3 comprises a CDR1 having an amino acid sequence at least 65%, at least 70%, at least 75%, at least 80%, at least 85%, at least 90%, at least 95%, at least 99%, or 100% identical to SEQ ID NO: 155 or 1047, a CDR2 having an amino acid sequence at least 65%, at least 70%, at least 75%, at least 80%, at least 85%, at least 90%, at least 95%, at least 99%, or 100% identical to SEQ ID NO: 156 or 1048, and a CDR3 having an amino acid sequence at least 65%, at least 70%, at least 75%, at least 80%, at least 85%, at least 90%, at least 95%, at least 99%, or 100% identical to SEQ ID NO: 157, 767, or 1049; and VH4 comprises a CDR1 having an amino acid sequence at least 65%, at least 70%, at least 75%, at least 80%, at least 85%, at least 90%, at least 95%, at least 99%, or 100% identical to SEQ ID NO: 68 or 629, a CDR2 having an amino acid sequence at least 65%, at least 70%, at least 75%, at least 80%, at least 85%, at least 90%, at least 95%, at least 99%, or 100% identical to SEQ ID NO: 69 or 630, and a CDR3 having an amino acid sequence at least 65%, at least 70%, at least 75%, at least 80%, at least 85%, at least 90%, at least 95%, at least 99%, or 100% identical to SEQ ID NO: 70 or 631.

[0122] In some aspects, VL1 comprises an amino acid sequence that is at least 65%, at least 70%, at least 75%, at least 80%, at least 85%, at least 90%, at least 95%, at least 99%, or 100% identical to SEQ ID NO: 147; VL2 comprises an amino acid sequence that is at least 65%, at least 70%, at least 75%, at least 80%, at least 85%, at least 90%, at least 95%, at least 99%, or 100% identical to SEQ ID NO: 11; VL3 comprises an amino acid sequence that is at least 65%, at least 70%, at least 75%, at least 80%, at least 85%, at least 90%, at least 95%, at least 99%, or 100% identical to SEQ ID NO: 154; VL4 comprises an amino acid sequence that is at least 65%, at least 70%, at least 75%, at least 80%, at least 85%, at least 90%, at least 95%, at least 99%, or 100% identical to SEQ ID NO: 67; VH1 comprises an amino acid sequence that is at least 65%, at least 70%, at least 75%, at least 80%, at least 85%, at least 90%, at least 95%, at least 99%, or 100% identical to SEQ ID NO: 151; VH2 comprises an amino acid sequence that is at least 65%, at least 70%, at least 75%, at least 80%, at least 85%, at least 90%, at least 95%, at least 99%, or 100% identical to SEQ ID NO: 14; VH3 comprises an amino acid sequence that is at least 65%, at least 70%, at least 75%, at least 80%, at least 85%, at least 90%, at least 95%, at least 99%, or 100% identical to SEQ ID NO: 158; and VH4 comprises an amino acid sequence that is at least 65%, at least 70%, at least 75%, at least 80%, at least 85%, at least 90%, at least 95%, at least 99%, or 100% identical to SEQ ID NO: 71 or 626.

[0123] In some aspects, VL1 comprises a CDR1 having an amino acid sequence at least 65%, at least 70%, at least 75%, at least 80%, at least 85%, at least 90%, at least 95%, at least 99%, or 100% identical to SEQ ID NO: 9 or 1055, a CDR2 having an amino acid sequence at least 65%, at least 70%, at least 75%, at least 80%, at least 85%, at least 90%, at least 95%, at least 99%, or 100% identical to SEQ ID NO: 1056 or an amino acid sequence at least 65%, at least 70%, at least 75%, at least 80%, at least 85%, at least 90%, at least 95%, at least 99%, or 100% identical to amino acid sequence GAS, and a CDR3 having an amino acid sequence at least 65%, at least 70%, at least 75%, at least 80%, at least 85%, at least 90%, at least 95%, at least 99%, or 100% identical to SEQ ID NO: 10; VL2 comprises a CDR1 having an amino acid sequence at least 65%, at least 70%, at least 75%, at least 80%, at least 85%, at least 90%, at least 95%, at least 99%, or 100% identical to SEQ ID NO: 65 or 627, a CDR2 having an amino acid sequence at least 65%, at least 70%, at least 75%, at least 80%, at least 85%, at least 90%, at least 95%, at least 99%, or 100% identical to SEQ ID NO: 628 or an amino acid sequence at least 65%, at least 70%, at least 75%, at least 80%, at least 85%, at least 90%, at least 95%, at least 99%, or 100% identical to amino acid sequence SDS, and a CDR3 having an amino acid sequence at least 65%, at least 70%, at least 75%, at least 80%, at least 85%, at least 90%, at least 95%, at least 99%, or 100% identical to SEQ ID NO: 66; VL3 comprises a CDR1 having an amino acid sequence at least 65%, at least 70%, at least 75%, at least 80%, at least 85%, at least 90%, at least 95%, at least 99%, or 100% identical to SEQ ID NO: 15, a CDR2 having an amino acid sequence at least 65%, at least 70%, at least 75%, at least 80%, at least 85%, at least 90%, at least 95%, at least 99%, or 100% identical to amino acid sequence LGS, and a CDR3 having an amino acid sequence at least 65%, at least 70%, at least 75%, at least 80%, at least 85%, at least 90%, at least 95%, at least 99%, or 100% identical to SEQ ID NO: 16; VL4 comprises a CDR1 having an amino acid sequence at least 65%, at least 70%, at least 75%, at least 80%, at least 85%, at least 90%, at least 95%, at least 99%, or 100% identical to SEQ ID NO: 145 or 1050, a CDR2 having an amino acid sequence at least 65%, at least 70%, at least 75%, at least 80%, at least 85%, at least 90%, at least 95%, at least 99%, or 100% identical to SEQ ID NO: 1051 or an amino acid sequence at least 65%, at least 70%, at least 75%, at least 80%, at least 85%, at least 90%, at least 95%, at least 99%, or 100% identical to amino acid sequence AAS, and a CDR3 having an amino acid sequence at least 65%, at least 70%, at least 75%, at least 80%, at least 85%, at least 90%, at least 95%, at least 99%, or 100% identical to SEQ ID NO: 146 or 764; VH1 comprises a CDR1 having an amino acid sequence at least 65%, at least 70%, at least 75%, at least 80%, at least 85%, at least 90%, at least 95%, at least 99%, or 100% identical to SEQ ID NO: 12 or 1057, a CDR2 having an amino acid sequence at least 65%, at least 70%, at least 75%, at least 80%, at least 85%, at least 90%, at least 95%, at least 99%, or 100% identical to SEQ ID NO: 6 or 1058, and a CDR3 having an amino acid sequence at least 65%, at least 70%, at least 75%, at least 80%, at least 85%, at least 90%, at least 95%, at least 99%, or 100% identical to SEQ ID NO: 13 or 1059; VH2 comprises a CDR1 having an amino acid sequence at least 65%, at least 70%, at least 75%, at least 80%, at least 85%, at least 90%, at least 95%, at least 99%, or 100% identical to SEQ ID NO: 68 or 629, a CDR2 having an amino acid sequence at least 65%, at least 70%, at least 75%, at least 80%, at least 85%, at least 90%, at least 95%, at least 99%, or 100% identical to SEQ ID NO: 69 or 630, and a CDR3 having an amino acid sequence at least 65%, at least 70%, at least 75%, at least 80%, at least 85%, at least 90%, at least 95%, at least 99%, or 100% identical to SEQ ID NO: 70 or 631; VH3 comprises a CDR1 having an amino acid sequence at least 65%, at least 70%, at least 75%, at least 80%, at least 85%, at least 90%, at least 95%, at least 99%, or 100% identical to SEQ ID NO: 18, a CDR2 having an amino acid sequence at least 65%, at least 70%, at least 75%, at least 80%, at least 85%, at least 90%, at least 95%, at least 99%, or 100% identical to SEQ ID NO: 19, and a CDR3 having an amino acid sequence at least 65%, at least 70%, at least 75%, at least 80%, at least 85%, at least 90%, at least 95%, at least 99%, or 100% identical to SEQ ID NO: 20; and VH4 comprises a CDR1 having an amino acid sequence at least 65%, at least 70%, at least 75%, at least 80%, at least 85%, at least 90%, at least 95%, at least 99%, or 100% identical to SEQ ID NO: 148 or 1052, a CDR2 having an amino acid sequence at least 65%, at least 70%, at least 75%, at least 80%, at least 85%, at least 90%, at least 95%, at least 99%, or 100% identical to SEQ ID NO: 149 or 1053, and a CDR3 having an amino acid sequence at least 65%, at least 70%, at least 75%, at least 80%, at least 85%, at least 90%, at least 95%, at least 99%, or 100% identical to SEQ ID NO: 150, 765, or 1054.

[0124] In some aspects, VL1 comprises an amino acid sequence that is at least 65%, at least 70%, at least 75%, at least 80%, at least 85%, at least 90%, at least 95%, at least 99%, or 100% identical to SEQ ID NO: 11; VL2 comprises an amino acid sequence that is at least 65%, at least 70%, at least 75%, at least 80%, at least 85%, at least 90%, at least 95%, at least 99%, or 100% identical to SEQ ID NO: 67; VL3 comprises an amino acid sequence that is at least 65%, at least 70%, at least 75%, at least 80%, at least 85%, at least 90%, at least 95%, at least 99%, or 100% identical to SEQ ID NO: 17; VL4 comprises an amino acid sequence that is at least 65%, at least 70%, at least 75%, at least 80%, at least 85%, at least 90%, at least 95%, at least 99%, or 100% identical to SEQ ID NO: 147; VH1 comprises an amino acid sequence that is at least 65%, at least 70%, at least 75%, at least 80%, at least 85%, at least 90%, at least 95%, at least 99%, or 100% identical to SEQ ID NO: 14; VH2 comprises an amino acid sequence that is at least 65%, at least 70%, at least 75%, at least 80%, at least 85%, at least 90%, at least 95%, at least 99%, or 100% identical to SEQ ID NO: 71 or 626; VH3 comprises an amino acid sequence that is at least 65%, at least 70%, at least 75%, at least 80%, at least 85%, at least 90%, at least 95%, at least 99%, or 100% identical to SEQ ID NO: 21 or 22; and VH4 comprises an amino acid sequence that is at least 65%, at least 70%, at least 75%, at least 80%, at least 85%, at least 90%, at least 95%, at least 99%, or 100% identical to SEQ ID NO: 151.

[0125] In some aspects, VL1 comprises a CDR1 having an amino acid sequence at least 65%, at least 70%, at least 75%, at least 80%, at least 85%, at least 90%, at least 95%, at least 99%, or 100% identical to SEQ ID NO: 9 or 1055, a CDR2 having an amino acid sequence at least 65%, at least 70%, at least 75%, at least 80%, at least 85%, at least 90%, at least 95%, at least 99%, or 100% identical to SEQ ID NO: 1056 or an amino acid sequence at least 65%, at least 70%, at least 75%, at least 80%, at least 85%, at least 90%, at least 95%, at least 99%, or 100% identical to amino acid sequence GAS, and a CDR3 having an amino acid sequence at least 65%, at least 70%, at least 75%, at least 80%, at least 85%, at least 90%, at least 95%, at least 99%, or 100% identical to SEQ ID NO: 10; VL2 comprises a CDR1 having an amino acid sequence at least 65%, at least 70%, at least 75%, at least 80%, at least 85%, at least 90%, at least 95%, at least 99%, or 100% identical to SEQ ID NO: 65 or 627, a CDR2 having an amino acid sequence at least 65%, at least 70%, at least 75%, at least 80%, at least 85%, at least 90%, at least 95%, at least 99%, or 100% identical to SEQ ID NO: 628 or an amino acid sequence at least 65%, at least 70%, at least 75%, at least 80%, at least 85%, at least 90%, at least 95%, at least 99%, or 100% identical to amino acid sequence SDS, and a CDR3 having an amino acid sequence at least 65%, at least 70%, at least 75%, at least 80%, at least 85%, at least 90%, at least 95%, at least 99%, or 100% identical to SEQ ID NO: 66; VL3 comprises a CDR1 having an amino acid sequence at least 65%, at least 70%, at least 75%, at least 80%, at least 85%, at least 90%, at least 95%, at least 99%, or 100% identical to SEQ ID NO: 145 or 1050, a CDR2 having an amino acid sequence at least 65%, at least 70%, at least 75%, at least 80%, at least 85%, at least 90%, at least 95%, at least 99%, or 100% identical to SEQ ID NO: 1051 or an amino acid sequence at least 65%, at least 70%, at least 75%, at least 80%, at least 85%, at least 90%, at least 95%, at least 99%, or 100% identical to amino acid sequence AAS, and a CDR3 having an amino acid sequence at least 65%, at least 70%, at least 75%, at least 80%, at least 85%, at least 90%, at least 95%, at least 99%, or 100% identical to SEQ ID NO: 146 or 764; VL4 comprises a CDR1 having an amino acid sequence at least 65%, at least 70%, at least 75%, at least 80%, at least 85%, at least 90%, at least 95%, at least 99%, or 100% identical to SEQ ID NO: 15, a CDR2 having an amino acid sequence at least 65%, at least 70%, at least 75%, at least 80%, at least 85%, at least 90%, at least 95%, at least 99%, or 100% identical to amino acid sequence LGS, and a CDR3 having an amino acid sequence at least 65%, at least 70%, at least 75%, at least 80%, at least 85%, at least 90%, at least 95%, at least 99%, or 100% identical to SEQ ID NO: 16; VH1 comprises a CDR1 having an amino acid sequence at least 65%, at least 70%, at least 75%, at least 80%, at least 85%, at least 90%, at least 95%, at least 99%, or 100% identical to SEQ ID NO: 12 or 1057, a CDR2 having an amino acid sequence at least 65%, at least 70%, at least 75%, at least 80%, at least 85%, at least 90%, at least 95%, at least 99%, or 100% identical to SEQ ID NO: 6 or 1058, and a CDR3 having an amino acid sequence at least 65%, at least 70%, at least 75%, at least 80%, at least 85%, at least 90%, at least 95%, at least 99%, or 100% identical to SEQ ID NO: 13 or 1059; VH2 comprises a CDR1 having an amino acid sequence at least 65%, at least 70%, at least 75%, at least 80%, at least 85%, at least 90%, at least 95%, at least 99%, or 100% identical to SEQ ID NO: 68 or 629, a CDR2 having an amino acid sequence at least 65%, at least 70%, at least 75%, at least 80%, at least 85%, at least 90%, at least 95%, at least 99%, or 100% identical to SEQ ID NO: 69 or 630, and a CDR3 having an amino acid sequence at least 65%, at least 70%, at least 75%, at least 80%, at least 85%, at least 90%, at least 95%, at least 99%, or 100% identical to SEQ ID NO: 70 or 631; VH3 comprises a CDR1 having an amino acid sequence at least 65%, at least 70%, at least 75%, at least 80%, at least 85%, at least 90%, at least 95%, at least 99%, or 100% identical to SEQ ID NO: 148 or 1052, a CDR2 having an amino acid sequence at least 65%, at least 70%, at least 75%, at least 80%, at least 85%, at least 90%, at least 95%, at least 99%, or 100% identical to SEQ ID NO: 149 or 1053, and a CDR3 having an amino acid sequence at least 65%, at least 70%, at least 75%, at least 80%, at least 85%, at least 90%, at least 95%, at least 99%, or 100% identical to SEQ ID NO: 150, 765, or 1054; and VH4 comprises a CDR1 having an amino acid sequence at least 65%, at least 70%, at least 75%, at least 80%, at least 85%, at least 90%, at least 95%, at least 99%, or 100% identical to SEQ ID NO: 18, a CDR2 having an amino acid sequence at least 65%, at least 70%, at least 75%, at least 80%, at least 85%, at least 90%, at least 95%, at least 99%, or 100% identical to SEQ ID NO: 19, and a CDR3 having an amino acid sequence at least 65%, at least 70%, at least 75%, at least 80%, at least 85%, at least 90%, at least 95%, at least 99%, or 100% identical to SEQ ID NO: 20.

[0126] In some aspects, VL1 comprises an amino acid sequence that is at least 65%, at least 70%, at least 75%, at least 80%, at least 85%, at least 90%, at least 95%, at least 99%, or 100% identical to SEQ ID NO: 11; VL2 comprises an amino acid sequence that is at least 65%, at least 70%, at least 75%, at least 80%, at least 85%, at least 90%, at least 95%, at least 99%, or 100% identical to SEQ ID NO: 67; VL3 comprises an amino acid sequence that is at least 65%, at least 70%, at least 75%, at least 80%, at least 85%, at least 90%, at least 95%, at least 99%, or 100% identical to SEQ ID NO: 147; VL4 comprises an amino acid sequence that is at least 65%, at least 70%, at least 75%, at least 80%, at least 85%, at least 90%, at least 95%, at least 99%, or 100% identical to SEQ ID NO: 17; VH1 comprises an amino acid sequence that is at least 65%, at least 70%, at least 75%, at least 80%, at least 85%, at least 90%, at least 95%, at least 99%, or 100% identical to SEQ ID NO: 14; VH2 comprises an amino acid sequence that is at least 65%, at least 70%, at least 75%, at least 80%, at least 85%, at least 90%, at least 95%, at least 99%, or 100% identical to SEQ ID NO: 71 or 626; VH3 comprises an amino acid sequence that is at least 65%, at least 70%, at least 75%, at least 80%, at least 85%, at least 90%, at least 95%, at least 99%, or 100% identical to SEQ ID NO: 151; and VH4 comprises an amino acid sequence that is at least 65%, at least 70%, at least 75%, at least 80%, at least 85%, at least 90%, at least 95%, at least 99%, or 100% identical to SEQ ID NO: 21 or 22.

[0127] In some aspects, VL1 comprises a CDR1 having an amino acid sequence at least 65%, at least 70%, at least 75%, at least 80%, at least 85%, at least 90%, at least 95%, at least 99%, or 100% identical to SEQ ID NO: 65 or 627, a CDR2 having an amino acid sequence at least 65%, at least 70%, at least 75%, at least 80%, at least 85%, at least 90%, at least 95%, at least 99%, or 100% identical to SEQ ID NO: 628 or an amino acid sequence at least 65%, at least 70%, at least 75%, at least 80%, at least 85%, at least 90%, at least 95%, at least 99%, or 100% identical to amino acid sequence SDS, and a CDR3 having an amino acid sequence at least 65%, at least 70%, at least 75%, at least 80%, at least 85%, at least 90%, at least 95%, at least 99%, or 100% identical to SEQ ID NO: 66; VL2 comprises a CDR1 having an amino acid sequence at least 65%, at least 70%, at least 75%, at least 80%, at least 85%, at least 90%, at least 95%, at least 99%, or 100% identical to SEQ ID NO: 9 or 1055, a CDR2 having an amino acid sequence at least 65%, at least 70%, at least 75%, at least 80%, at least 85%, at least 90%, at least 95%, at least 99%, or 100% identical to SEQ ID NO: 1056 or an amino acid sequence at least 65%, at least 70%, at least 75%, at least 80%, at least 85%, at least 90%, at least 95%, at least 99%, or 100% identical to amino acid sequence GAS, and a CDR3 having an amino acid sequence at least 65%, at least 70%, at least 75%, at least 80%, at least 85%, at least 90%, at least 95%, at least 99%, or 100% identical to SEQ ID NO: 10; VL3 comprises a CDR1 having an amino acid sequence at least 65%, at least 70%, at least 75%, at least 80%, at least 85%, at least 90%, at least 95%, at least 99%, or 100% identical to SEQ ID NO: 15, a CDR2 having an amino acid sequence at least 65%, at least 70%, at least 75%, at least 80%, at least 85%, at least 90%, at least 95%, at least 99%, or 100% identical to amino acid sequence LGS, and a CDR3 having an amino acid sequence at least 65%, at least 70%, at least 75%, at least 80%, at least 85%, at least 90%, at least 95%, at least 99%, or 100% identical to SEQ ID NO: 16; VL4 comprises a CDR1 having an amino acid sequence at least 65%, at least 70%, at least 75%, at least 80%, at least 85%, at least 90%, at least 95%, at least 99%, or 100% identical to SEQ ID NO: 145 or 1050, a CDR2 having an amino acid sequence at least 65%, at least 70%, at least 75%, at least 80%, at least 85%, at least 90%, at least 95%, at least 99%, or 100% identical to SEQ ID NO: 1051 or an amino acid sequence at least 65%, at least 70%, at least 75%, at least 80%, at least 85%, at least 90%, at least 95%, at least 99%, or 100% identical to amino acid sequence AAS, and a CDR3 having an amino acid sequence at least 65%, at least 70%, at least 75%, at least 80%, at least 85%, at least 90%, at least 95%, at least 99%, or 100% identical to SEQ ID NO: 146 or 764; VH1 comprises a CDR1 having an amino acid sequence at least 65%, at least 70%, at least 75%, at least 80%, at least 85%, at least 90%, at least 95%, at least 99%, or 100% identical to SEQ ID NO: 68 or 629, a CDR2 having an amino acid sequence at least 65%, at least 70%, at least 75%, at least 80%, at least 85%, at least 90%, at least 95%, at least 99%, or 100% identical to SEQ ID NO: 69 or 630, and a CDR3 having an amino acid sequence at least 65%, at least 70%, at least 75%, at least 80%, at least 85%, at least 90%, at least 95%, at least 99%, or 100% identical to SEQ ID NO: 70 or 631; VH2 comprises a CDR1 having an amino acid sequence at least 65%, at least 70%, at least 75%, at least 80%, at least 85%, at least 90%, at least 95%, at least 99%, or 100% identical to SEQ ID NO: 12 or 1057, a CDR2 having an amino acid sequence at least 65%, at least 70%, at least 75%, at least 80%, at least 85%, at least 90%, at least 95%, at least 99%, or 100% identical to SEQ ID NO: 6 or 1058, and a CDR3 having an amino acid sequence at least 65%, at least 70%, at least 75%, at least 80%, at least 85%, at least 90%, at least 95%, at least 99%, or 100% identical to SEQ ID NO: 13 or 1059; VH3 comprises a CDR1 having an amino acid sequence at least 65%, at least 70%, at least 75%, at least 80%, at least 85%, at least 90%, at least 95%, at least 99%, or 100% identical to SEQ ID NO: 18, a CDR2 having an amino acid sequence at least 65%, at least 70%, at least 75%, at least 80%, at least 85%, at least 90%, at least 95%, at least 99%, or 100% identical to SEQ ID NO: 19, and a CDR3 having an amino acid sequence at least 65%, at least 70%, at least 75%, at least 80%, at least 85%, at least 90%, at least 95%, at least 99%, or 100% identical to SEQ ID NO: 20; and VH4 comprises a CDR1 having an amino acid sequence at least 65%, at least 70%, at least 75%, at least 80%, at least 85%, at least 90%, at least 95%, at least 99%, or 100% identical to SEQ ID NO: 148 or 1052, a CDR2 having an amino acid sequence at least 65%, at least 70%, at least 75%, at least 80%, at least 85%, at least 90%, at least 95%, at least 99%, or 100% identical to SEQ ID NO: 149 or 1053, and a CDR3 having an amino acid sequence at least 65%, at least 70%, at least 75%, at least 80%, at least 85%, at least 90%, at least 95%, at least 99%, or 100% identical to SEQ ID NO: 150, 765, or 1054.

[0128] In some aspects, VL1 comprises an amino acid sequence that is at least 65%, at least 70%, at least 75%, at least 80%, at least 85%, at least 90%, at least 95%, at least 99%, or 100% identical to SEQ ID NO: 67; VL2 comprises an amino acid sequence that is at least 65%, at least 70%, at least 75%, at least 80%, at least 85%, at least 90%, at least 95%, at least 99%, or 100% identical to SEQ ID NO: 11; VL3 comprises an amino acid sequence that is at least 65%, at least 70%, at least 75%, at least 80%, at least 85%, at least 90%, at least 95%, at least 99%, or 100% identical to SEQ ID NO: 17; VL4 comprises an amino acid sequence that is at least 65%, at least 70%, at least 75%, at least 80%, at least 85%, at least 90%, at least 95%, at least 99%, or 100% identical to SEQ ID NO: 147; VH1 comprises an amino acid sequence that is at least 65%, at least 70%, at least 75%, at least 80%, at least 85%, at least 90%, at least 95%, at least 99%, or 100% identical to SEQ ID NO: 71 or 626; VH2 comprises an amino acid sequence that is at least 65%, at least 70%, at least 75%, at least 80%, at least 85%, at least 90%, at least 95%, at least 99%, or 100% identical to SEQ ID NO: 14; VH3 comprises an amino acid sequence that is at least 65%, at least 70%, at least 75%, at least 80%, at least 85%, at least 90%, at least 95%, at least 99%, or 100% identical to SEQ ID NO: 21 or 22; and VH4 comprises an amino acid sequence that is at least 65%, at least 70%, at least 75%, at least 80%, at least 85%, at least 90%, at least 95%, at least 99%, or 100% identical to SEQ ID NO: 151.

[0129] In some aspects, VL1 comprises a CDR1 having an amino acid sequence at least 65%, at least 70%, at least 75%, at least 80%, at least 85%, at least 90%, at least 95%, at least 99%, or 100% identical to SEQ ID NO: 65 or 627, a CDR2 having an amino acid sequence at least 65%, at least 70%, at least 75%, at least 80%, at least 85%, at least 90%, at least 95%, at least 99%, or 100% identical to SEQ ID NO: 628 or an amino acid sequence at least 65%, at least 70%, at least 75%, at least 80%, at least 85%, at least 90%, at least 95%, at least 99%, or 100% identical to amino acid sequence SDS, and a CDR3 having an amino acid sequence at least 65%, at least 70%, at least 75%, at least 80%, at least 85%, at least 90%, at least 95%, at least 99%, or 100% identical to SEQ ID NO: 66; VL2 comprises a CDR1 having an amino acid sequence at least 65%, at least 70%, at least 75%, at least 80%, at least 85%, at least 90%, at least 95%, at least 99%, or 100% identical to SEQ ID NO: 9 or 1055, a CDR2 having an amino acid sequence at least 65%, at least 70%, at least 75%, at least 80%, at least 85%, at least 90%, at least 95%, at least 99%, or 100% identical to SEQ ID NO: 1056 or an amino acid sequence at least 65%, at least 70%, at least 75%, at least 80%, at least 85%, at least 90%, at least 95%, at least 99%, or 100% identical to amino acid sequence GAS, and a CDR3 having an amino acid sequence at least 65%, at least 70%, at least 75%, at least 80%, at least 85%, at least 90%, at least 95%, at least 99%, or 100% identical to SEQ ID NO: 10; VL3 comprises a CDR1 having an amino acid sequence at least 65%, at least 70%, at least 75%, at least 80%, at least 85%, at least 90%, at least 95%, at least 99%, or 100% identical to SEQ ID NO: 145 or 1050, a CDR2 having an amino acid sequence at least 65%, at least 70%, at least 75%, at least 80%, at least 85%, at least 90%, at least 95%, at least 99%, or 100% identical to SEQ ID NO: 1051 or an amino acid sequence at least 65%, at least 70%, at least 75%, at least 80%, at least 85%, at least 90%, at least 95%, at least 99%, or 100% identical to amino acid sequence AAS, and a CDR3 having an amino acid sequence at least 65%, at least 70%, at least 75%, at least 80%, at least 85%, at least 90%, at least 95%, at least 99%, or 100% identical to SEQ ID NO: 146 or 764; VL4 comprises a CDR1 having an amino acid sequence at least 65%, at least 70%, at least 75%, at least 80%, at least 85%, at least 90%, at least 95%, at least 99%, or 100% identical to SEQ ID NO: 15, a CDR2 having an amino acid sequence at least 65%, at least 70%, at least 75%, at least 80%, at least 85%, at least 90%, at least 95%, at least 99%, or 100% identical to amino acid sequence LGS, and a CDR3 having an amino acid sequence at least 65%, at least 70%, at least 75%, at least 80%, at least 85%, at least 90%, at least 95%, at least 99%, or 100% identical to SEQ ID NO: 16; VH1 comprises a CDR1 having an amino acid sequence at least 65%, at least 70%, at least 75%, at least 80%, at least 85%, at least 90%, at least 95%, at least 99%, or 100% identical to SEQ ID NO: 68 or 629, a CDR2 having an amino acid sequence at least 65%, at least 70%, at least 75%, at least 80%, at least 85%, at least 90%, at least 95%, at least 99%, or 100% identical to SEQ ID NO: 69 or 630, and a CDR3 having an amino acid sequence at least 65%, at least 70%, at least 75%, at least 80%, at least 85%, at least 90%, at least 95%, at least 99%, or 100% identical to SEQ ID NO: 70 or 631; VH2 comprises a CDR1 having an amino acid sequence at least 65%, at least 70%, at least 75%, at least 80%, at least 85%, at least 90%, at least 95%, at least 99%, or 100% identical to SEQ ID NO: 12 or 1057, a CDR2 having an amino acid sequence at least 65%, at least 70%, at least 75%, at least 80%, at least 85%, at least 90%, at least 95%, at least 99%, or 100% identical to SEQ ID NO: 6 or 1058, and a CDR3 having an amino acid sequence at least 65%, at least 70%, at least 75%, at least 80%, at least 85%, at least 90%, at least 95%, at least 99%, or 100% identical to SEQ ID NO: 13 or 1059; VH3 comprises a CDR1 having an amino acid sequence at least 65%, at least 70%, at least 75%, at least 80%, at least 85%, at least 90%, at least 95%, at least 99%, or 100% identical to SEQ ID NO: 148 or 1052, a CDR2 having an amino acid sequence at least 65%, at least 70%, at least 75%, at least 80%, at least 85%, at least 90%, at least 95%, at least 99%, or 100% identical to SEQ ID NO: 149 or 1053, and a CDR3 having an amino acid sequence at least 65%, at least 70%, at least 75%, at least 80%, at least 85%, at least 90%, at least 95%, at least 99%, or 100% identical to SEQ ID NO: 150, 765, or 1054; and VH4 comprises a CDR1 having an amino acid sequence at least 65%, at least 70%, at least 75%, at least 80%, at least 85%, at least 90%, at least 95%, at least 99%, or 100% identical to SEQ ID NO: 18, a CDR2 having an amino acid sequence at least 65%, at least 70%, at least 75%, at least 80%, at least 85%, at least 90%, at least 95%, at least 99%, or 100% identical to SEQ ID NO: 19, and a CDR3 having an amino acid sequence at least 65%, at least 70%, at least 75%, at least 80%, at least 85%, at least 90%, at least 95%, at least 99%, or 100% identical to SEQ ID NO: 20.

[0130] In some aspects, VL1 comprises an amino acid sequence that is at least 65%, at least 70%, at least 75%, at least 80%, at least 85%, at least 90%, at least 95%, at least 99%, or 100% identical to SEQ ID NO: 67; VL2 comprises an amino acid sequence that is at least 65%, at least 70%, at least 75%, at least 80%, at least 85%, at least 90%, at least 95%, at least 99%, or 100% identical to SEQ ID NO: 11; VL3 comprises an amino acid sequence that is at least 65%, at least 70%, at least 75%, at least 80%, at least 85%, at least 90%, at least 95%, at least 99%, or 100% identical to SEQ ID NO: 147; VL4 comprises an amino acid sequence that is at least 65%, at least 70%, at least 75%, at least 80%, at least 85%, at least 90%, at least 95%, at least 99%, or 100% identical to SEQ ID NO: 17; VH1 comprises an amino acid sequence that is at least 65%, at least 70%, at least 75%, at least 80%, at least 85%, at least 90%, at least 95%, at least 99%, or 100% identical to SEQ ID NO: 71 or 626; VH2 comprises an amino acid sequence that is at least 65%, at least 70%, at least 75%, at least 80%, at least 85%, at least 90%, at least 95%, at least 99%, or 100% identical to SEQ ID NO: 14; VH3 comprises an amino acid sequence that is at least 65%, at least 70%, at least 75%, at least 80%, at least 85%, at least 90%, at least 95%, at least 99%, or 100% identical to SEQ ID NO: 151; and VH4 comprises an amino acid sequence that is at least 65%, at least 70%, at least 75%, at least 80%, at least 85%, at least 90%, at least 95%, at least 99%, or 100% identical to SEQ ID NO: 21 or 22.

[0131] In some aspects, VL1 comprises a CDR1 having an amino acid sequence at least 65%, at least 70%, at least 75%, at least 80%, at least 85%, at least 90%, at least 95%, at least 99%, or 100% identical to SEQ ID NO: 9 or 1055, a CDR2 having an amino acid sequence at least 65%, at least 70%, at least 75%, at least 80%, at least 85%, at least 90%, at least 95%, at least 99%, or 100% identical to SEQ ID NO: 1056 or an amino acid sequence at least 65%, at least 70%, at least 75%, at least 80%, at least 85%, at least 90%, at least 95%, at least 99%, or 100% identical to amino acid sequence GAS, and a CDR3 having an amino acid sequence at least 65%, at least 70%, at least 75%, at least 80%, at least 85%, at least 90%, at least 95%, at least 99%, or 100% identical to SEQ ID NO: 10; VL2 comprises a CDR1 having an amino acid sequence at least 65%, at least 70%, at least 75%, at least 80%, at least 85%, at least 90%, at least 95%, at least 99%, or 100% identical to SEQ ID NO: 15, a CDR2 having an amino acid sequence at least 65%, at least 70%, at least 75%, at least 80%, at least 85%, at least 90%, at least 95%, at least 99%, or 100% identical to amino acid sequence LGS, and a CDR3 having an amino acid sequence at least 65%, at least 70%, at least 75%, at least 80%, at least 85%, at least 90%, at least 95%, at least 99%, or 100% identical to SEQ ID NO: 16; VL3 comprises a CDR1 having an amino acid sequence at least 65%, at least 70%, at least 75%, at least 80%, at least 85%, at least 90%, at least 95%, at least 99%, or 100% identical to SEQ ID NO: 65 or 627, a CDR2 having an amino acid sequence at least 65%, at least 70%, at least 75%, at least 80%, at least 85%, at least 90%, at least 95%, at least 99%, or 100% identical to SEQ ID NO: 628 or an amino acid sequence at least 65%, at least 70%, at least 75%, at least 80%, at least 85%, at least 90%, at least 95%, at least 99%, or 100% identical to amino acid sequence SDS, and a CDR3 having an amino acid sequence at least 65%, at least 70%, at least 75%, at least 80%, at least 85%, at least 90%, at least 95%, at least 99%, or 100% identical to SEQ ID NO: 66; VL4 comprises a CDR1 having an amino acid sequence at least 65%, at least 70%, at least 75%, at least 80%, at least 85%, at least 90%, at least 95%, at least 99%, or 100% identical to SEQ ID NO: 145 or 1050, a CDR2 having an amino acid sequence at least 65%, at least 70%, at least 75%, at least 80%, at least 85%, at least 90%, at least 95%, at least 99%, or 100% identical to SEQ ID NO: 1051 or an amino acid sequence at least 65%, at least 70%, at least 75%, at least 80%, at least 85%, at least 90%, at least 95%, at least 99%, or 100% identical to amino acid sequence AAS, and a CDR3 having an amino acid sequence at least 65%, at least 70%, at least 75%, at least 80%, at least 85%, at least 90%, at least 95%, at least 99%, or 100% identical to SEQ ID NO: 146 or 764; VH1 comprises a CDR1 having an amino acid sequence at least 65%, at least 70%, at least 75%, at least 80%, at least 85%, at least 90%, at least 95%, at least 99%, or 100% identical to SEQ ID NO: 12 or 1057, a CDR2 having an amino acid sequence at least 65%, at least 70%, at least 75%, at least 80%, at least 85%, at least 90%, at least 95%, at least 99%, or 100% identical to SEQ ID NO: 6 or 1058, and a CDR3 having an amino acid sequence at least 65%, at least 70%, at least 75%, at least 80%, at least 85%, at least 90%, at least 95%, at least 99%, or 100% identical to SEQ ID NO: 13 or 1059; VH2 comprises a CDR1 having an amino acid sequence at least 65%, at least 70%, at least 75%, at least 80%, at least 85%, at least 90%, at least 95%, at least 99%, or 100% identical to SEQ ID NO: 18, a CDR2 having an amino acid sequence at least 65%, at least 70%, at least 75%, at least 80%, at least 85%, at least 90%, at least 95%, at least 99%, or 100% identical to SEQ ID NO: 19, and a CDR3 having an amino acid sequence at least 65%, at least 70%, at least 75%, at least 80%, at least 85%, at least 90%, at least 95%, at least 99%, or 100% identical to SEQ ID NO: 20; VH3 comprises a CDR1 having an amino acid sequence at least 65%, at least 70%, at least 75%, at least 80%, at least 85%, at least 90%, at least 95%, at least 99%, or 100% identical to SEQ ID NO: 68 or 629, a CDR2 having an amino acid sequence at least 65%, at least 70%, at least 75%, at least 80%, at least 85%, at least 90%, at least 95%, at least 99%, or 100% identical to SEQ ID NO: 69 or 630, and a CDR3 having an amino acid sequence at least 65%, at least 70%, at least 75%, at least 80%, at least 85%, at least 90%, at least 95%, at least 99%, or 100% identical to SEQ ID NO: 70 or 631; and VH4 comprises a CDR1 having an amino acid sequence at least 65%, at least 70%, at least 75%, at least 80%, at least 85%, at least 90%, at least 95%, at least 99%, or 100% identical to SEQ ID NO: 148 or 1052, a CDR2 having an amino acid sequence at least 65%, at least 70%, at least 75%, at least 80%, at least 85%, at least 90%, at least 95%, at least 99%, or 100% identical to SEQ ID NO: 149 or 1053, and a CDR3 having an amino acid sequence at least 65%, at least 70%, at least 75%, at least 80%, at least 85%, at least 90%, at least 95%, at least 99%, or 100% identical to SEQ ID NO: 150, 765, or 1054.

[0132] In some aspects, VL1 comprises an amino acid sequence that is at least 65%, at least 70%, at least 75%, at least 80%, at least 85%, at least 90%, at least 95%, at least 99%, or 100% identical to SEQ ID NO: 11; VL2 comprises an amino acid sequence that is at least 65%, at least 70%, at least 75%, at least 80%, at least 85%, at least 90%, at least 95%, at least 99%, or 100% identical to SEQ ID NO: 17; VL3 comprises an amino acid sequence that is at least 65%, at least 70%, at least 75%, at least 80%, at least 85%, at least 90%, at least 95%, at least 99%, or 100% identical to SEQ ID NO: 67; VL4 comprises an amino acid sequence that is at least 65%, at least 70%, at least 75%, at least 80%, at least 85%, at least 90%, at least 95%, at least 99%, or 100% identical to SEQ ID NO: 147; VH1 comprises an amino acid sequence that is at least 65%, at least 70%, at least 75%, at least 80%, at least 85%, at least 90%, at least 95%, at least 99%, or 100% identical to SEQ ID NO: 14; VH2 comprises an amino acid sequence that is at least 65%, at least 70%, at least 75%, at least 80%, at least 85%, at least 90%, at least 95%, at least 99%, or 100% identical to SEQ ID NO: 21 or 22; VH3 comprises an amino acid sequence that is at least 65%, at least 70%, at least 75%, at least 80%, at least 85%, at least 90%, at least 95%, at least 99%, or 100% identical to SEQ ID NO: 71 or 626; and VH4 comprises an amino acid sequence that is at least 65%, at least 70%, at least 75%, at least 80%, at least 85%, at least 90%, at least 95%, at least 99%, or 100% identical to SEQ ID NO: 151.

[0133] In some aspects, VL1 comprises a CDR1 having an amino acid sequence at least 65%, at least 70%, at least 75%, at least 80%, at least 85%, at least 90%, at least 95%, at least 99%, or 100% identical to SEQ ID NO: 9 or 1055, a CDR2 having an amino acid sequence at least 65%, at least 70%, at least 75%, at least 80%, at least 85%, at least 90%, at least 95%, at least 99%, or 100% identical to SEQ ID NO: 1056 or an amino acid sequence at least 65%, at least 70%, at least 75%, at least 80%, at least 85%, at least 90%, at least 95%, at least 99%, or 100% identical to amino acid sequence GAS, and a CDR3 having an amino acid sequence at least 65%, at least 70%, at least 75%, at least 80%, at least 85%, at least 90%, at least 95%, at least 99%, or 100% identical to SEQ ID NO: 10; VL2 comprises a CDR1 having an amino acid sequence at least 65%, at least 70%, at least 75%, at least 80%, at least 85%, at least 90%, at least 95%, at least 99%, or 100% identical to SEQ ID NO: 15, a CDR2 having an amino acid sequence at least 65%, at least 70%, at least 75%, at least 80%, at least 85%, at least 90%, at least 95%, at least 99%, or 100% identical to amino acid sequence LGS, and a CDR3 having an amino acid sequence at least 65%, at least 70%, at least 75%, at least 80%, at least 85%, at least 90%, at least 95%, at least 99%, or 100% identical to SEQ ID NO: 16; VL3 comprises a CDR1 having an amino acid sequence at least 65%, at least 70%, at least 75%, at least 80%, at least 85%, at least 90%, at least 95%, at least 99%, or 100% identical to SEQ ID NO: 145 or 1050, a CDR2 having an amino acid sequence at least 65%, at least 70%, at least 75%, at least 80%, at least 85%, at least 90%, at least 95%, at least 99%, or 100% identical to SEQ ID NO: 1051 or an amino acid sequence at least 65%, at least 70%, at least 75%, at least 80%, at least 85%, at least 90%, at least 95%, at least 99%, or 100% identical to amino acid sequence AAS, and a CDR3 having an amino acid sequence at least 65%, at least 70%, at least 75%, at least 80%, at least 85%, at least 90%, at least 95%, at least 99%, or 100% identical to SEQ ID NO: 146 or 764; VL4 comprises a CDR1 having an amino acid sequence at least 65%, at least 70%, at least 75%, at least 80%, at least 85%, at least 90%, at least 95%, at least 99%, or 100% identical to SEQ ID NO: 65 or 627, a CDR2 having an amino acid sequence at least 65%, at least 70%, at least 75%, at least 80%, at least 85%, at least 90%, at least 95%, at least 99%, or 100% identical to SEQ ID NO: 628 or an amino acid sequence at least 65%, at least 70%, at least 75%, at least 80%, at least 85%, at least 90%, at least 95%, at least 99%, or 100% identical to amino acid sequence SDS, and a CDR3 having an amino acid sequence at least 65%, at least 70%, at least 75%, at least 80%, at least 85%, at least 90%, at least 95%, at least 99%, or 100% identical to SEQ ID NO: 66; VH1 comprises a CDR1 having an amino acid sequence at least 65%, at least 70%, at least 75%, at least 80%, at least 85%, at least 90%, at least 95%, at least 99%, or 100% identical to SEQ ID NO: 12 or 1057, a CDR2 having an amino acid sequence at least 65%, at least 70%, at least 75%, at least 80%, at least 85%, at least 90%, at least 95%, at least 99%, or 100% identical to SEQ ID NO: 6 or 1058, and a CDR3 having an amino acid sequence at least 65%, at least 70%, at least 75%, at least 80%, at least 85%, at least 90%, at least 95%, at least 99%, or 100% identical to SEQ ID NO: 13 or 1059; VH2 comprises a CDR1 having an amino acid sequence at least 65%, at least 70%, at least 75%, at least 80%, at least 85%, at least 90%, at least 95%, at least 99%, or 100% identical to SEQ ID NO: 18, a CDR2 having an amino acid sequence at least 65%, at least 70%, at least 75%, at least 80%, at least 85%, at least 90%, at least 95%, at least 99%, or 100% identical to SEQ ID NO: 19, and a CDR3 having an amino acid sequence at least 65%, at least 70%, at least 75%, at least 80%, at least 85%, at least 90%, at least 95%, at least 99%, or 100% identical to SEQ ID NO: 20; VH3 comprises a CDR1 having an amino acid sequence at least 65%, at least 70%, at least 75%, at least 80%, at least 85%, at least 90%, at least 95%, at least 99%, or 100% identical to SEQ ID NO: 148 or 1052, a CDR2 having an amino acid sequence at least 65%, at least 70%, at least 75%, at least 80%, at least 85%, at least 90%, at least 95%, at least 99%, or 100% identical to SEQ ID NO: 149 or 1053, and a CDR3 having an amino acid sequence at least 65%, at least 70%, at least 75%, at least 80%, at least 85%, at least 90%, at least 95%, at least 99%, or 100% identical to SEQ ID NO: 150, 765, or 1054; and VH4 comprises a CDR1 having an amino acid sequence at least 65%, at least 70%, at least 75%, at least 80%, at least 85%, at least 90%, at least 95%, at least 99%, or 100% identical to SEQ ID NO: 68 or 629, a CDR2 having an amino acid sequence at least 65%, at least 70%, at least 75%, at least 80%, at least 85%, at least 90%, at least 95%, at least 99%, or 100% identical to SEQ ID NO: 69 or 630, and a CDR3 having an amino acid sequence at least 65%, at least 70%, at least 75%, at least 80%, at least 85%, at least 90%, at least 95%, at least 99%, or 100% identical to SEQ ID NO: 70 or 631.

[0134] In some aspects, VL1 comprises an amino acid sequence that is at least 65%, at least 70%, at least 75%, at least 80%, at least 85%, at least 90%, at least 95%, at least 99%, or 100% identical to SEQ ID NO: 11; VL2 comprises an amino acid sequence that is at least 65%, at least 70%, at least 75%, at least 80%, at least 85%, at least 90%, at least 95%, at least 99%, or 100% identical to SEQ ID NO: 17; VL3 comprises an amino acid sequence that is at least 65%, at least 70%, at least 75%, at least 80%, at least 85%, at least 90%, at least 95%, at least 99%, or 100% identical to SEQ ID NO: 147; VL4 comprises an amino acid sequence that is at least 65%, at least 70%, at least 75%, at least 80%, at least 85%, at least 90%, at least 95%, at least 99%, or 100% identical to SEQ ID NO: 67; VH1 comprises an amino acid sequence that is at least 65%, at least 70%, at least 75%, at least 80%, at least 85%, at least 90%, at least 95%, at least 99%, or 100% identical to SEQ ID NO: 14; VH2 comprises an amino acid sequence that is at least 65%, at least 70%, at least 75%, at least 80%, at least 85%, at least 90%, at least 95%, at least 99%, or 100% identical to SEQ ID NO: 21 or 22; VH3 comprises an amino acid sequence that is at least 65%, at least 70%, at least 75%, at least 80%, at least 85%, at least 90%, at least 95%, at least 99%, or 100% identical to SEQ ID NO: 151; and VH4 comprises an amino acid sequence that is at least 65%, at least 70%, at least 75%, at least 80%, at least 85%, at least 90%, at least 95%, at least 99%, or 100% identical to SEQ ID NO: 71 or 626.

[0135] In some aspects, VL1 comprises a CDR1 having an amino acid sequence at least 65%, at least 70%, at least 75%, at least 80%, at least 85%, at least 90%, at least 95%, at least 99%, or 100% identical to SEQ ID NO: 15, a CDR2 having an amino acid sequence at least 65%, at least 70%, at least 75%, at least 80%, at least 85%, at least 90%, at least 95%, at least 99%, or 100% identical to amino acid sequence LGS, and a CDR3 having an amino acid sequence at least 65%, at least 70%, at least 75%, at least 80%, at least 85%, at least 90%, at least 95%, at least 99%, or 100% identical to SEQ ID NO: 16; VL2 comprises a CDR1 having an amino acid sequence at least 65%, at least 70%, at least 75%, at least 80%, at least 85%, at least 90%, at least 95%, at least 99%, or 100% identical to SEQ ID NO: 9 or 1055, a CDR2 having an amino acid sequence at least 65%, at least 70%, at least 75%, at least 80%, at least 85%, at least 90%, at least 95%, at least 99%, or 100% identical to SEQ ID NO: 1056 or an amino acid sequence at least 65%, at least 70%, at least 75%, at least 80%, at least 85%, at least 90%, at least 95%, at least 99%, or 100% identical to amino acid sequence GAS, and a CDR3 having an amino acid sequence at least 65%, at least 70%, at least 75%, at least 80%, at least 85%, at least 90%, at least 95%, at least 99%, or 100% identical to SEQ ID NO: 10; VL3 comprises a CDR1 having an amino acid sequence at least 65%, at least 70%, at least 75%, at least 80%, at least 85%, at least 90%, at least 95%, at least 99%, or 100% identical to SEQ ID NO: 65 or 627, a CDR2 having an amino acid sequence at least 65%, at least 70%, at least 75%, at least 80%, at least 85%, at least 90%, at least 95%, at least 99%, or 100% identical to SEQ ID NO: 628 or an amino acid sequence at least 65%, at least 70%, at least 75%, at least 80%, at least 85%, at least 90%, at least 95%, at least 99%, or 100% identical to amino acid sequence SDS, and a CDR3 having an amino acid sequence at least 65%, at least 70%, at least 75%, at least 80%, at least 85%, at least 90%, at least 95%, at least 99%, or 100% identical to SEQ ID NO: 66; VL4 comprises a CDR1 having an amino acid sequence at least 65%, at least 70%, at least 75%, at least 80%, at least 85%, at least 90%, at least 95%, at least 99%, or 100% identical to SEQ ID NO: 145 or 1050, a CDR2 having an amino acid sequence at least 65%, at least 70%, at least 75%, at least 80%, at least 85%, at least 90%, at least 95%, at least 99%, or 100% identical to SEQ ID NO: 1051 or an amino acid sequence at least 65%, at least 70%, at least 75%, at least 80%, at least 85%, at least 90%, at least 95%, at least 99%, or 100% identical to amino acid sequence AAS, and a CDR3 having an amino acid sequence at least 65%, at least 70%, at least 75%, at least 80%, at least 85%, at least 90%, at least 95%, at least 99%, or 100% identical to SEQ ID NO: 146 or 764; VH1 comprises a CDR1 having an amino acid sequence at least 65%, at least 70%, at least 75%, at least 80%, at least 85%, at least 90%, at least 95%, at least 99%, or 100% identical to SEQ ID NO: 18, a CDR2 having an amino acid sequence at least 65%, at least 70%, at least 75%, at least 80%, at least 85%, at least 90%, at least 95%, at least 99%, or 100% identical to SEQ ID NO: 19, and a CDR3 having an amino acid sequence at least 65%, at least 70%, at least 75%, at least 80%, at least 85%, at least 90%, at least 95%, at least 99%, or 100% identical to SEQ ID NO: 20; VH2 comprises a CDR1 having an amino acid sequence at least 65%, at least 70%, at least 75%, at least 80%, at least 85%, at least 90%, at least 95%, at least 99%, or 100% identical to SEQ ID NO: 12 or 1057, a CDR2 having an amino acid sequence at least 65%, at least 70%, at least 75%, at least 80%, at least 85%, at least 90%, at least 95%, at least 99%, or 100% identical to SEQ ID NO: 6 or 1058, and a CDR3 having an amino acid sequence at least 65%, at least 70%, at least 75%, at least 80%, at least 85%, at least 90%, at least 95%, at least 99%, or 100% identical to SEQ ID NO: 13 or 1059; VH3 comprises a CDR1 having an amino acid sequence at least 65%, at least 70%, at least 75%, at least 80%, at least 85%, at least 90%, at least 95%, at least 99%, or 100% identical to SEQ ID NO: 68 or 629, a CDR2 having an amino acid sequence at least 65%, at least 70%, at least 75%, at least 80%, at least 85%, at least 90%, at least 95%, at least 99%, or 100% identical to SEQ ID NO: 69 or 630, and a CDR3 having an amino acid sequence at least 65%, at least 70%, at least 75%, at least 80%, at least 85%, at least 90%, at least 95%, at least 99%, or 100% identical to SEQ ID NO: 70 or 631; and VH4 comprises a CDR1 having an amino acid sequence at least 65%, at least 70%, at least 75%, at least 80%, at least 85%, at least 90%, at least 95%, at least 99%, or 100% identical to SEQ ID NO: 148 or 1052, a CDR2 having an amino acid sequence at least 65%, at least 70%, at least 75%, at least 80%, at least 85%, at least 90%, at least 95%, at least 99%, or 100% identical to SEQ ID NO: 149 or 1053, and a CDR3 having an amino acid sequence at least 65%, at least 70%, at least 75%, at least 80%, at least 85%, at least 90%, at least 95%, at least 99%, or 100% identical to SEQ ID NO: 150, 765, or 1054.

[0136] In some aspects, VL1 comprises an amino acid sequence that is at least 65%, at least 70%, at least 75%, at least 80%, at least 85%, at least 90%, at least 95%, at least 99%, or 100% identical to SEQ ID NO: 17; VL2 comprises an amino acid sequence that is at least 65%, at least 70%, at least 75%, at least 80%, at least 85%, at least 90%, at least 95%, at least 99%, or 100% identical to SEQ ID NO: 11; VL3 comprises an amino acid sequence that is at least 65%, at least 70%, at least 75%, at least 80%, at least 85%, at least 90%, at least 95%, at least 99%, or 100% identical to SEQ ID NO: 67; VL4 comprises an amino acid sequence that is at least 65%, at least 70%, at least 75%, at least 80%, at least 85%, at least 90%, at least 95%, at least 99%, or 100% identical to SEQ ID NO: 147; VH1 comprises an amino acid sequence that is at least 65%, at least 70%, at least 75%, at least 80%, at least 85%, at least 90%, at least 95%, at least 99%, or 100% identical to SEQ ID NO: 21 or 22; VH2 comprises an amino acid sequence that is at least 65%, at least 70%, at least 75%, at least 80%, at least 85%, at least 90%, at least 95%, at least 99%, or 100% identical to SEQ ID NO: 14; VH3 comprises an amino acid sequence that is at least 65%, at least 70%, at least 75%, at least 80%, at least 85%, at least 90%, at least 95%, at least 99%, or 100% identical to SEQ ID NO: 71 or 626; and VH4 comprises an amino acid sequence that is at least 65%, at least 70%, at least 75%, at least 80%, at least 85%, at least 90%, at least 95%, at least 99%, or 100% identical to SEQ ID NO: 151.

[0137] In some aspects, VL1 comprises a CDR1 having an amino acid sequence at least 65%, at least 70%, at least 75%, at least 80%, at least 85%, at least 90%, at least 95%, at least 99%, or 100% identical to SEQ ID NO: 15, a CDR2 having an amino acid sequence at least 65%, at least 70%, at least 75%, at least 80%, at least 85%, at least 90%, at least 95%, at least 99%, or 100% identical to amino acid sequence LGS, and a CDR3 having an amino acid sequence at least 65%, at least 70%, at least 75%, at least 80%, at least 85%, at least 90%, at least 95%, at least 99%, or 100% identical to SEQ ID NO: 16; VL2 comprises a CDR1 having an amino acid sequence at least 65%, at least 70%, at least 75%, at least 80%, at least 85%, at least 90%, at least 95%, at least 99%, or 100% identical to SEQ ID NO: 9 or 1055, a CDR2 having an amino acid sequence at least 65%, at least 70%, at least 75%, at least 80%, at least 85%, at least 90%, at least 95%, at least 99%, or 100% identical to SEQ ID NO: 1056 or an amino acid sequence at least 65%, at least 70%, at least 75%, at least 80%, at least 85%, at least 90%, at least 95%, at least 99%, or 100% identical to amino acid sequence GAS, and a CDR3 having an amino acid sequence at least 65%, at least 70%, at least 75%, at least 80%, at least 85%, at least 90%, at least 95%, at least 99%, or 100% identical to SEQ ID NO: 10; VL3 comprises a CDR1 having an amino acid sequence at least 65%, at least 70%, at least 75%, at least 80%, at least 85%, at least 90%, at least 95%, at least 99%, or 100% identical to SEQ ID NO: 145 or 1050, a CDR2 having an amino acid sequence at least 65%, at least 70%, at least 75%, at least 80%, at least 85%, at least 90%, at least 95%, at least 99%, or 100% identical to SEQ ID NO: 1051 or an amino acid sequence at least 65%, at least 70%, at least 75%, at least 80%, at least 85%, at least 90%, at least 95%, at least 99%, or 100% identical to amino acid sequence AAS, and a CDR3 having an amino acid sequence at least 65%, at least 70%, at least 75%, at least 80%, at least 85%, at least 90%, at least 95%, at least 99%, or 100% identical to SEQ ID NO: 146 or 764; VL4 comprises a CDR1 having an amino acid sequence at least 65%, at least 70%, at least 75%, at least 80%, at least 85%, at least 90%, at least 95%, at least 99%, or 100% identical to SEQ ID NO: 65 or 627, a CDR2 having an amino acid sequence at least 65%, at least 70%, at least 75%, at least 80%, at least 85%, at least 90%, at least 95%, at least 99%, or 100% identical to SEQ ID NO: 628 or an amino acid sequence at least 65%, at least 70%, at least 75%, at least 80%, at least 85%, at least 90%, at least 95%, at least 99%, or 100% identical to amino acid sequence SDS, and a CDR3 having an amino acid sequence at least 65%, at least 70%, at least 75%, at least 80%, at least 85%, at least 90%, at least 95%, at least 99%, or 100% identical to SEQ ID NO: 66; VH1 comprises a CDR1 having an amino acid sequence at least 65%, at least 70%, at least 75%, at least 80%, at least 85%, at least 90%, at least 95%, at least 99%, or 100% identical to SEQ ID NO: 18, a CDR2 having an amino acid sequence at least 65%, at least 70%, at least 75%, at least 80%, at least 85%, at least 90%, at least 95%, at least 99%, or 100% identical to SEQ ID NO: 19, and a CDR3 having an amino acid sequence at least 65%, at least 70%, at least 75%, at least 80%, at least 85%, at least 90%, at least 95%, at least 99%, or 100% identical to SEQ ID NO: 20; VH2 comprises a CDR1 having an amino acid sequence at least 65%, at least 70%, at least 75%, at least 80%, at least 85%, at least 90%, at least 95%, at least 99%, or 100% identical to SEQ ID NO: 12 or 1057, a CDR2 having an amino acid sequence at least 65%, at least 70%, at least 75%, at least 80%, at least 85%, at least 90%, at least 95%, at least 99%, or 100% identical to SEQ ID NO: 6 or 1058, and a CDR3 having an amino acid sequence at least 65%, at least 70%, at least 75%, at least 80%, at least 85%, at least 90%, at least 95%, at least 99%, or 100% identical to SEQ ID NO: 13 or 1059; VH3 comprises a CDR1 having an amino acid sequence at least 65%, at least 70%, at least 75%, at least 80%, at least 85%, at least 90%, at least 95%, at least 99%, or 100% identical to SEQ ID NO: 148 or 1052, a CDR2 having an amino acid sequence at least 65%, at least 70%, at least 75%, at least 80%, at least 85%, at least 90%, at least 95%, at least 99%, or 100% identical to SEQ ID NO: 149 or 1053, and a CDR3 having an amino acid sequence at least 65%, at least 70%, at least 75%, at least 80%, at least 85%, at least 90%, at least 95%, at least 99%, or 100% identical to SEQ ID NO: 150, 765, or 1054; and VH4 comprises a CDR1 having an amino acid sequence at least 65%, at least 70%, at least 75%, at least 80%, at least 85%, at least 90%, at least 95%, at least 99%, or 100% identical to SEQ ID NO: 68 or 629, a CDR2 having an amino acid sequence at least 65%, at least 70%, at least 75%, at least 80%, at least 85%, at least 90%, at least 95%, at least 99%, or 100% identical to SEQ ID NO: 69 or 630, and a CDR3 having an amino acid sequence at least 65%, at least 70%, at least 75%, at least 80%, at least 85%, at least 90%, at least 95%, at least 99%, or 100% identical to SEQ ID NO: 70 or 631.

[0138] In some aspects, VL1 comprises an amino acid sequence that is at least 65%, at least 70%, at least 75%, at least 80%, at least 85%, at least 90%, at least 95%, at least 99%, or 100% identical to SEQ ID NO: 17; VL2 comprises an amino acid sequence that is at least 65%, at least 70%, at least 75%, at least 80%, at least 85%, at least 90%, at least 95%, at least 99%, or 100% identical to SEQ ID NO: 11; VL3 comprises an amino acid sequence that is at least 65%, at least 70%, at least 75%, at least 80%, at least 85%, at least 90%, at least 95%, at least 99%, or 100% identical to SEQ ID NO: 147; VL4 comprises an amino acid sequence that is at least 65%, at least 70%, at least 75%, at least 80%, at least 85%, at least 90%, at least 95%, at least 99%, or 100% identical to SEQ ID NO: 67; VH1 comprises an amino acid sequence that is at least 65%, at least 70%, at least 75%, at least 80%, at least 85%, at least 90%, at least 95%, at least 99%, or 100% identical to SEQ ID NO: 21 or 22; VH2 comprises an amino acid sequence that is at least 65%, at least 70%, at least 75%, at least 80%, at least 85%, at least 90%, at least 95%, at least 99%, or 100% identical to SEQ ID NO: 14; VH3 comprises an amino acid sequence that is at least 65%, at least 70%, at least 75%, at least 80%, at least 85%, at least 90%, at least 95%, at least 99%, or 100% identical to SEQ ID NO: 151; and VH4 comprises an amino acid sequence that is at least 65%, at least 70%, at least 75%, at least 80%, at least 85%, at least 90%, at least 95%, at least 99%, or 100% identical to SEQ ID NO: 71 or 626.

[0139] In some aspects, VL1 comprises a CDR1 having an amino acid sequence at least 65%, at least 70%, at least 75%, at least 80%, at least 85%, at least 90%, at least 95%, at least 99%, or 100% identical to SEQ ID NO: 9 or 1055, a CDR2 having an amino acid sequence at least 65%, at least 70%, at least 75%, at least 80%, at least 85%, at least 90%, at least 95%, at least 99%, or 100% identical to SEQ ID NO: 1056 or an amino acid sequence at least 65%, at least 70%, at least 75%, at least 80%, at least 85%, at least 90%, at least 95%, at least 99%, or 100% identical to amino acid sequence GAS, and a CDR3 having an amino acid sequence at least 65%, at least 70%, at least 75%, at least 80%, at least 85%, at least 90%, at least 95%, at least 99%, or 100% identical to SEQ ID NO: 10; VL2 comprises a CDR1 having an amino acid sequence at least 65%, at least 70%, at least 75%, at least 80%, at least 85%, at least 90%, at least 95%, at least 99%, or 100% identical to SEQ ID NO: 145 or 1050, a CDR2 having an amino acid sequence at least 65%, at least 70%, at least 75%, at least 80%, at least 85%, at least 90%, at least 95%, at least 99%, or 100% identical to SEQ ID NO: 1051 or an amino acid sequence at least 65%, at least 70%, at least 75%, at least 80%, at least 85%, at least 90%, at least 95%, at least 99%, or 100% identical to amino acid sequence AAS, and a CDR3 having an amino acid sequence at least 65%, at least 70%, at least 75%, at least 80%, at least 85%, at least 90%, at least 95%, at least 99%, or 100% identical to SEQ ID NO: 146 or 764; VL3 comprises a CDR1 having an amino acid sequence at least 65%, at least 70%, at least 75%, at least 80%, at least 85%, at least 90%, at least 95%, at least 99%, or 100% identical to SEQ ID NO: 65 or 627, a CDR2 having an amino acid sequence at least 65%, at least 70%, at least 75%, at least 80%, at least 85%, at least 90%, at least 95%, at least 99%, or 100% identical to SEQ ID NO: 628 or an amino acid sequence at least 65%, at least 70%, at least 75%, at least 80%, at least 85%, at least 90%, at least 95%, at least 99%, or 100% identical to amino acid sequence SDS, and a CDR3 having an amino acid sequence at least 65%, at least 70%, at least 75%, at least 80%, at least 85%, at least 90%, at least 95%, at least 99%, or 100% identical to SEQ ID NO: 66; VL4 comprises a CDR1 having an amino acid sequence at least 65%, at least 70%, at least 75%, at least 80%, at least 85%, at least 90%, at least 95%, at least 99%, or 100% identical to SEQ ID NO: 15, a CDR2 having an amino acid sequence at least 65%, at least 70%, at least 75%, at least 80%, at least 85%, at least 90%, at least 95%, at least 99%, or 100% identical to amino acid sequence LGS, and a CDR3 having an amino acid sequence at least 65%, at least 70%, at least 75%, at least 80%, at least 85%, at least 90%, at least 95%, at least 99%, or 100% identical to SEQ ID NO: 16; VH1 comprises a CDR1 having an amino acid sequence at least 65%, at least 70%, at least 75%, at least 80%, at least 85%, at least 90%, at least 95%, at least 99%, or 100% identical to SEQ ID NO: 12 or 1057, a CDR2 having an amino acid sequence at least 65%, at least 70%, at least 75%, at least 80%, at least 85%, at least 90%, at least 95%, at least 99%, or 100% identical to SEQ ID NO: 6 or 1058, and a CDR3 having an amino acid sequence at least 65%, at least 70%, at least 75%, at least 80%, at least 85%, at least 90%, at least 95%, at least 99%, or 100% identical to SEQ ID NO: 13 or 1059; VH2 comprises a CDR1 having an amino acid sequence at least 65%, at least 70%, at least 75%, at least 80%, at least 85%, at least 90%, at least 95%, at least 99%, or 100% identical to SEQ ID NO: 148 or 1052, a CDR2 having an amino acid sequence at least 65%, at least 70%, at least 75%, at least 80%, at least 85%, at least 90%, at least 95%, at least 99%, or 100% identical to SEQ ID NO: 149 or 1053, and a CDR3 having an amino acid sequence at least 65%, at least 70%, at least 75%, at least 80%, at least 85%, at least 90%, at least 95%, at least 99%, or 100% identical to SEQ ID NO: 150, 765, or 1054; VH3 comprises a CDR1 having an amino acid sequence at least 65%, at least 70%, at least 75%, at least 80%, at least 85%, at least 90%, at least 95%, at least 99%, or 100% identical to SEQ ID NO: 68 or 629, a CDR2 having an amino acid sequence at least 65%, at least 70%, at least 75%, at least 80%, at least 85%, at least 90%, at least 95%, at least 99%, or 100% identical to SEQ ID NO: 69 or 630, and a CDR3 having an amino acid sequence at least 65%, at least 70%, at least 75%, at least 80%, at least 85%, at least 90%, at least 95%, at least 99%, or 100% identical to SEQ ID NO: 70 or 631; and VH4 comprises a CDR1 having an amino acid sequence at least 65%, at least 70%, at least 75%, at least 80%, at least 85%, at least 90%, at least 95%, at least 99%, or 100% identical to SEQ ID NO: 18, a CDR2 having an amino acid sequence at least 65%, at least 70%, at least 75%, at least 80%, at least 85%, at least 90%, at least 95%, at least 99%, or 100% identical to SEQ ID NO: 19, and a CDR3 having an amino acid sequence at least 65%, at least 70%, at least 75%, at least 80%, at least 85%, at least 90%, at least 95%, at least 99%, or 100% identical to SEQ ID NO: 20.

[0140] In some aspects, VL1 comprises an amino acid sequence that is at least 65%, at least 70%, at least 75%, at least 80%, at least 85%, at least 90%, at least 95%, at least 99%, or 100% identical to SEQ ID NO: 11; VL2 comprises an amino acid sequence that is at least 65%, at least 70%, at least 75%, at least 80%, at least 85%, at least 90%, at least 95%, at least 99%, or 100% identical to SEQ ID NO: 147; VL3 comprises an amino acid sequence that is at least 65%, at least 70%, at least 75%, at least 80%, at least 85%, at least 90%, at least 95%, at least 99%, or 100% identical to SEQ ID NO: 67; VL4 comprises an amino acid sequence that is at least 65%, at least 70%, at least 75%, at least 80%, at least 85%, at least 90%, at least 95%, at least 99%, or 100% identical to SEQ ID NO: 17; VH1 comprises an amino acid sequence that is at least 65%, at least 70%, at least 75%, at least 80%, at least 85%, at least 90%, at least 95%, at least 99%, or 100% identical to SEQ ID NO: 14; VH2 comprises an amino acid sequence that is at least 65%, at least 70%, at least 75%, at least 80%, at least 85%, at least 90%, at least 95%, at least 99%, or 100% identical to SEQ ID NO: 151; VH3 comprises an amino acid sequence that is at least 65%, at least 70%, at least 75%, at least 80%, at least 85%, at least 90%, at least 95%, at least 99%, or 100% identical to SEQ ID NO: 71 or 626; and VH4 comprises an amino acid sequence that is at least 65%, at least 70%, at least 75%, at least 80%, at least 85%, at least 90%, at least 95%, at least 99%, or 100% identical to SEQ ID NO: 21 or 22.

[0141] In some aspects, VL1 comprises a CDR1 having an amino acid sequence at least 65%, at least 70%, at least 75%, at least 80%, at least 85%, at least 90%, at least 95%, at least 99%, or 100% identical to SEQ ID NO: 9 or 1055, a CDR2 having an amino acid sequence at least 65%, at least 70%, at least 75%, at least 80%, at least 85%, at least 90%, at least 95%, at least 99%, or 100% identical to SEQ ID NO: 1056 or an amino acid sequence at least 65%, at least 70%, at least 75%, at least 80%, at least 85%, at least 90%, at least 95%, at least 99%, or 100% identical to amino acid sequence GAS, and a CDR3 having an amino acid sequence at least 65%, at least 70%, at least 75%, at least 80%, at least 85%, at least 90%, at least 95%, at least 99%, or 100% identical to SEQ ID NO: 10; VL2 comprises a CDR1 having an amino acid sequence at least 65%, at least 70%, at least 75%, at least 80%, at least 85%, at least 90%, at least 95%, at least 99%, or 100% identical to SEQ ID NO: 145 or 1050, a CDR2 having an amino acid sequence at least 65%, at least 70%, at least 75%, at least 80%, at least 85%, at least 90%, at least 95%, at least 99%, or 100% identical to SEQ ID NO: 1051 or an amino acid sequence at least 65%, at least 70%, at least 75%, at least 80%, at least 85%, at least 90%, at least 95%, at least 99%, or 100% identical to amino acid sequence AAS, and a CDR3 having an amino acid sequence at least 65%, at least 70%, at least 75%, at least 80%, at least 85%, at least 90%, at least 95%, at least 99%, or 100% identical to SEQ ID NO: 146 or 764; VL3 comprises a CDR1 having an amino acid sequence at least 65%, at least 70%, at least 75%, at least 80%, at least 85%, at least 90%, at least 95%, at least 99%, or 100% identical to SEQ ID NO: 15, a CDR2 having an amino acid sequence at least 65%, at least 70%, at least 75%, at least 80%, at least 85%, at least 90%, at least 95%, at least 99%, or 100% identical to amino acid sequence LGS, and a CDR3 having an amino acid sequence at least 65%, at least 70%, at least 75%, at least 80%, at least 85%, at least 90%, at least 95%, at least 99%, or 100% identical to SEQ ID NO: 16; VL4 comprises a CDR1 having an amino acid sequence at least 65%, at least 70%, at least 75%, at least 80%, at least 85%, at least 90%, at least 95%, at least 99%, or 100% identical to SEQ ID NO: 65 or 627, a CDR2 having an amino acid sequence at least 65%, at least 70%, at least 75%, at least 80%, at least 85%, at least 90%, at least 95%, at least 99%, or 100% identical to SEQ ID NO: 628 or an amino acid sequence at least 65%, at least 70%, at least 75%, at least 80%, at least 85%, at least 90%, at least 95%, at least 99%, or 100% identical to amino acid sequence SDS, and a CDR3 having an amino acid sequence at least 65%, at least 70%, at least 75%, at least 80%, at least 85%, at least 90%, at least 95%, at least 99%, or 100% identical to SEQ ID NO: 66; VH1 comprises a CDR1 having an amino acid sequence at least 65%, at least 70%, at least 75%, at least 80%, at least 85%, at least 90%, at least 95%, at least 99%, or 100% identical to SEQ ID NO: 12 or 1057, a CDR2 having an amino acid sequence at least 65%, at least 70%, at least 75%, at least 80%, at least 85%, at least 90%, at least 95%, at least 99%, or 100% identical to SEQ ID NO: 6 or 1058, and a CDR3 having an amino acid sequence at least 65%, at least 70%, at least 75%, at least 80%, at least 85%, at least 90%, at least 95%, at least 99%, or 100% identical to SEQ ID NO: 13 or 1059; VH2 comprises a CDR1 having an amino acid sequence at least 65%, at least 70%, at least 75%, at least 80%, at least 85%, at least 90%, at least 95%, at least 99%, or 100% identical to SEQ ID NO: 148 or 1052, a CDR2 having an amino acid sequence at least 65%, at least 70%, at least 75%, at least 80%, at least 85%, at least 90%, at least 95%, at least 99%, or 100% identical to SEQ ID NO: 149 or 1053, and a CDR3 having an amino acid sequence at least 65%, at least 70%, at least 75%, at least 80%, at least 85%, at least 90%, at least 95%, at least 99%, or 100% identical to SEQ ID NO: 150, 765, or 1054; VH3 comprises a CDR1 having an amino acid sequence at least 65%, at least 70%, at least 75%, at least 80%, at least 85%, at least 90%, at least 95%, at least 99%, or 100% identical to SEQ ID NO: 18, a CDR2 having an amino acid sequence at least 65%, at least 70%, at least 75%, at least 80%, at least 85%, at least 90%, at least 95%, at least 99%, or 100% identical to SEQ ID NO: 19, and a CDR3 having an amino acid sequence at least 65%, at least 70%, at least 75%, at least 80%, at least 85%, at least 90%, at least 95%, at least 99%, or 100% identical to SEQ ID NO: 20; and VH4 comprises a CDR1 having an amino acid sequence at least 65%, at least 70%, at least 75%, at least 80%, at least 85%, at least 90%, at least 95%, at least 99%, or 100% identical to SEQ ID NO: 68 or 629, a CDR2 having an amino acid sequence at least 65%, at least 70%, at least 75%, at least 80%, at least 85%, at least 90%, at least 95%, at least 99%, or 100% identical to SEQ ID NO: 69 or 630, and a CDR3 having an amino acid sequence at least 65%, at least 70%, at least 75%, at least 80%, at least 85%, at least 90%, at least 95%, at least 99%, or 100% identical to SEQ ID NO: 70 or 631.

[0142] In some aspects, VL1 comprises an amino acid sequence that is at least 65%, at least 70%, at least 75%, at least 80%, at least 85%, at least 90%, at least 95%, at least 99%, or 100% identical to SEQ ID NO: 11; VL2 comprises an amino acid sequence that is at least 65%, at least 70%, at least 75%, at least 80%, at least 85%, at least 90%, at least 95%, at least 99%, or 100% identical to SEQ ID NO: 147; VL3 comprises an amino acid sequence that is at least 65%, at least 70%, at least 75%, at least 80%, at least 85%, at least 90%, at least 95%, at least 99%, or 100% identical to SEQ ID NO: 17; VL4 comprises an amino acid sequence that is at least 65%, at least 70%, at least 75%, at least 80%, at least 85%, at least 90%, at least 95%, at least 99%, or 100% identical to SEQ ID NO: 67; VH1 comprises an amino acid sequence that is at least 65%, at least 70%, at least 75%, at least 80%, at least 85%, at least 90%, at least 95%, at least 99%, or 100% identical to SEQ ID NO: 14; VH2 comprises an amino acid sequence that is at least 65%, at least 70%, at least 75%, at least 80%, at least 85%, at least 90%, at least 95%, at least 99%, or 100% identical to SEQ ID NO: 151; VH3 comprises an amino acid sequence that is at least 65%, at least 70%, at least 75%, at least 80%, at least 85%, at least 90%, at least 95%, at least 99%, or 100% identical to SEQ ID NO: 21 or 22; and VH4 comprises an amino acid sequence that is at least 65%, at least 70%, at least 75%, at least 80%, at least 85%, at least 90%, at least 95%, at least 99%, or 100% identical to SEQ ID NO: 71 or 626.

[0143] In some aspects, VL1 comprises a CDR1 having an amino acid sequence at least 65%, at least 70%, at least 75%, at least 80%, at least 85%, at least 90%, at least 95%, at least 99%, or 100% identical to SEQ ID NO: 9 or 1055, a CDR2 having an amino acid sequence at least 65%, at least 70%, at least 75%, at least 80%, at least 85%, at least 90%, at least 95%, at least 99%, or 100% identical to SEQ ID NO: 1056 or an amino acid sequence at least 65%, at least 70%, at least 75%, at least 80%, at least 85%, at least 90%, at least 95%, at least 99%, or 100% identical to amino acid sequence GAS, and a CDR3 having an amino acid sequence at least 65%, at least 70%, at least 75%, at least 80%, at least 85%, at least 90%, at least 95%, at least 99%, or 100% identical to SEQ ID NO: 10; VL2 comprises a CDR1 having an amino acid sequence at least 65%, at least 70%, at least 75%, at least 80%, at least 85%, at least 90%, at least 95%, at least 99%, or 100% identical to SEQ ID NO: 65 or 627, a CDR2 having an amino acid sequence at least 65%, at least 70%, at least 75%, at least 80%, at least 85%, at least 90%, at least 95%, at least 99%, or 100% identical to SEQ ID NO: 628 or an amino acid sequence at least 65%, at least 70%, at least 75%, at least 80%, at least 85%, at least 90%, at least 95%, at least 99%, or 100% identical to amino acid sequence SDS, and a CDR3 having an amino acid sequence at least 65%, at least 70%, at least 75%, at least 80%, at least 85%, at least 90%, at least 95%, at least 99%, or 100% identical to SEQ ID NO: 66; VL3 comprises a CDR1 having an amino acid sequence at least 65%, at least 70%, at least 75%, at least 80%, at least 85%, at least 90%, at least 95%, at least 99%, or 100% identical to SEQ ID NO: 145 or 1050, a CDR2 having an amino acid sequence at least 65%, at least 70%, at least 75%, at least 80%, at least 85%, at least 90%, at least 95%, at least 99%, or 100% identical to SEQ ID NO: 1051 or an amino acid sequence at least 65%, at least 70%, at least 75%, at least 80%, at least 85%, at least 90%, at least 95%, at least 99%, or 100% identical to amino acid sequence AAS, and a CDR3 having an amino acid sequence at least 65%, at least 70%, at least 75%, at least 80%, at least 85%, at least 90%, at least 95%, at least 99%, or 100% identical to SEQ ID NO: 146 or 764; VL4 comprises a CDR1 having an amino acid sequence at least 65%, at least 70%, at least 75%, at least 80%, at least 85%, at least 90%, at least 95%, at least 99%, or 100% identical to SEQ ID NO: 15, a CDR2 having an amino acid sequence at least 65%, at least 70%, at least 75%, at least 80%, at least 85%, at least 90%, at least 95%, at least 99%, or 100% identical to amino acid sequence LGS, and a CDR3 having an amino acid sequence at least 65%, at least 70%, at least 75%, at least 80%, at least 85%, at least 90%, at least 95%, at least 99%, or 100% identical to SEQ ID NO: 16; VH1 comprises a CDR1 having an amino acid sequence at least 65%, at least 70%, at least 75%, at least 80%, at least 85%, at least 90%, at least 95%, at least 99%, or 100% identical to SEQ ID NO: 12 or 1057, a CDR2 having an amino acid sequence at least 65%, at least 70%, at least 75%, at least 80%, at least 85%, at least 90%, at least 95%, at least 99%, or 100% identical to SEQ ID NO: 6 or 1058, and a CDR3 having an amino acid sequence at least 65%, at least 70%, at least 75%, at least 80%, at least 85%, at least 90%, at least 95%, at least 99%, or 100% identical to SEQ ID NO: 13 or 1059; VH2 comprises a CDR1 having an amino acid sequence at least 65%, at least 70%, at least 75%, at least 80%, at least 85%, at least 90%, at least 95%, at least 99%, or 100% identical to SEQ ID NO: 68 or 629, a CDR2 having an amino acid sequence at least 65%, at least 70%, at least 75%, at least 80%, at least 85%, at least 90%, at least 95%, at least 99%, or 100% identical to SEQ ID NO: 69 or 630, and a CDR3 having an amino acid sequence at least 65%, at least 70%, at least 75%, at least 80%, at least 85%, at least 90%, at least 95%, at least 99%, or 100% identical to SEQ ID NO: 70 or 631; VH3 comprises a CDR1 having an amino acid sequence at least 65%, at least 70%, at least 75%, at least 80%, at least 85%, at least 90%, at least 95%, at least 99%, or 100% identical to SEQ ID NO: 148 or 1052, a CDR2 having an amino acid sequence at least 65%, at least 70%, at least 75%, at least 80%, at least 85%, at least 90%, at least 95%, at least 99%, or 100% identical to SEQ ID NO: 149 or 1053, and a CDR3 having an amino acid sequence at least 65%, at least 70%, at least 75%, at least 80%, at least 85%, at least 90%, at least 95%, at least 99%, or 100% identical to SEQ ID NO: 150, 765, or 1054; and VH4 comprises a CDR1 having an amino acid sequence at least 65%, at least 70%, at least 75%, at least 80%, at least 85%, at least 90%, at least 95%, at least 99%, or 100% identical to SEQ ID NO: 18, a CDR2 having an amino acid sequence at least 65%, at least 70%, at least 75%, at least 80%, at least 85%, at least 90%, at least 95%, at least 99%, or 100% identical to SEQ ID NO: 19, and a CDR3 having an amino acid sequence at least 65%, at least 70%, at least 75%, at least 80%, at least 85%, at least 90%, at least 95%, at least 99%, or 100% identical to SEQ ID NO: 20.

[0144] In some aspects, VL1 comprises an amino acid sequence that is at least 65%, at least 70%, at least 75%, at least 80%, at least 85%, at least 90%, at least 95%, at least 99%, or 100% identical to SEQ ID NO: 11; VL2 comprises an amino acid sequence that is at least 65%, at least 70%, at least 75%, at least 80%, at least 85%, at least 90%, at least 95%, at least 99%, or 100% identical to SEQ ID NO: 67; VL3 comprises an amino acid sequence that is at least 65%, at least 70%, at least 75%, at least 80%, at least 85%, at least 90%, at least 95%, at least 99%, or 100% identical to SEQ ID NO: 147; VL4 comprises an amino acid sequence that is at least 65%, at least 70%, at least 75%, at least 80%, at least 85%, at least 90%, at least 95%, at least 99%, or 100% identical to SEQ ID NO: 17; VH1 comprises an amino acid sequence that is at least 65%, at least 70%, at least 75%, at least 80%, at least 85%, at least 90%, at least 95%, at least 99%, or 100% identical to SEQ ID NO: 14; VH2 comprises an amino acid sequence that is at least 65%, at least 70%, at least 75%, at least 80%, at least 85%, at least 90%, at least 95%, at least 99%, or 100% identical to SEQ ID NO: 71 or 626; VH3 comprises an amino acid sequence that is at least 65%, at least 70%, at least 75%, at least 80%, at least 85%, at least 90%, at least 95%, at least 99%, or 100% identical to SEQ ID NO: 151; and VH4 comprises an amino acid sequence that is at least 65%, at least 70%, at least 75%, at least 80%, at least 85%, at least 90%, at least 95%, at least 99%, or 100% identical to SEQ ID NO: 21 or 22.

[0145] In some aspects, VL1 comprises a CDR1 having an amino acid sequence at least 65%, at least 70%, at least 75%, at least 80%, at least 85%, at least 90%, at least 95%, at least 99%, or 100% identical to SEQ ID NO: 9 or 1055, a CDR2 having an amino acid sequence at least 65%, at least 70%, at least 75%, at least 80%, at least 85%, at least 90%, at least 95%, at least 99%, or 100% identical to SEQ ID NO: 1056 or an amino acid sequence at least 65%, at least 70%, at least 75%, at least 80%, at least 85%, at least 90%, at least 95%, at least 99%, or 100% identical to amino acid sequence GAS, and a CDR3 having an amino acid sequence at least 65%, at least 70%, at least 75%, at least 80%, at least 85%, at least 90%, at least 95%, at least 99%, or 100% identical to SEQ ID NO: 10; VL2 comprises a CDR1 having an amino acid sequence at least 65%, at least 70%, at least 75%, at least 80%, at least 85%, at least 90%, at least 95%, at least 99%, or 100% identical to SEQ ID NO: 15, a CDR2 having an amino acid sequence at least 65%, at least 70%, at least 75%, at least 80%, at least 85%, at least 90%, at least 95%, at least 99%, or 100% identical to amino acid sequence LGS, and a CDR3 having an amino acid sequence at least 65%, at least 70%, at least 75%, at least 80%, at least 85%, at least 90%, at least 95%, at least 99%, or 100% identical to SEQ ID NO: 16; VL3 comprises a CDR1 having an amino acid sequence at least 65%, at least 70%, at least 75%, at least 80%, at least 85%, at least 90%, at least 95%, at least 99%, or 100% identical to SEQ ID NO: 65 or 627, a CDR2 having an amino acid sequence at least 65%, at least 70%, at least 75%, at least 80%, at least 85%, at least 90%, at least 95%, at least 99%, or 100% identical to SEQ ID NO: 628 or an amino acid sequence at least 65%, at least 70%, at least 75%, at least 80%, at least 85%, at least 90%, at least 95%, at least 99%, or 100% identical to amino acid sequence SDS, and a CDR3 having an amino acid sequence at least 65%, at least 70%, at least 75%, at least 80%, at least 85%, at least 90%, at least 95%, at least 99%, or 100% identical to SEQ ID NO: 66; VL4 comprises a CDR1 having an amino acid sequence at least 65%, at least 70%, at least 75%, at least 80%, at least 85%, at least 90%, at least 95%, at least 99%, or 100% identical to SEQ ID NO: 145 or 1050, a CDR2 having an amino acid sequence at least 65%, at least 70%, at least 75%, at least 80%, at least 85%, at least 90%, at least 95%, at least 99%, or 100% identical to SEQ ID NO: 1051 or an amino acid sequence at least 65%, at least 70%, at least 75%, at least 80%, at least 85%, at least 90%, at least 95%, at least 99%, or 100% identical to amino acid sequence AAS, and a CDR3 having an amino acid sequence at least 65%, at least 70%, at least 75%, at least 80%, at least 85%, at least 90%, at least 95%, at least 99%, or 100% identical to SEQ ID NO: 146 or 764; VH1 comprises a CDR1 having an amino acid sequence at least 65%, at least 70%, at least 75%, at least 80%, at least 85%, at least 90%, at least 95%, at least 99%, or 100% identical to SEQ ID NO: 12 or 1057, a CDR2 having an amino acid sequence at least 65%, at least 70%, at least 75%, at least 80%, at least 85%, at least 90%, at least 95%, at least 99%, or 100% identical to SEQ ID NO: 6 or 1058, and a CDR3 having an amino acid sequence at least 65%, at least 70%, at least 75%, at least 80%, at least 85%, at least 90%, at least 95%, at least 99%, or 100% identical to SEQ ID NO: 13 or 1059; VH2 comprises a CDR1 having an amino acid sequence at least 65%, at least 70%, at least 75%, at least 80%, at least 85%, at least 90%, at least 95%, at least 99%, or 100% identical to SEQ ID NO: 18, a CDR2 having an amino acid sequence at least 65%, at least 70%, at least 75%, at least 80%, at least 85%, at least 90%, at least 95%, at least 99%, or 100% identical to SEQ ID NO: 19, and a CDR3 having an amino acid sequence at least 65%, at least 70%, at least 75%, at least 80%, at least 85%, at least 90%, at least 95%, at least 99%, or 100% identical to SEQ ID NO: 20; VH3 comprises a CDR1 having an amino acid sequence at least 65%, at least 70%, at least 75%, at least 80%, at least 85%, at least 90%, at least 95%, at least 99%, or 100% identical to SEQ ID NO: 68 or 629, a CDR2 having an amino acid sequence at least 65%, at least 70%, at least 75%, at least 80%, at least 85%, at least 90%, at least 95%, at least 99%, or 100% identical to SEQ ID NO: 69 or 630, and a CDR3 having an amino acid sequence at least 65%, at least 70%, at least 75%, at least 80%, at least 85%, at least 90%, at least 95%, at least 99%, or 100% identical to SEQ ID NO: 70 or 631; and VH4 comprises a CDR1 having an amino acid sequence at least 65%, at least 70%, at least 75%, at least 80%, at least 85%, at least 90%, at least 95%, at least 99%, or 100% identical to SEQ ID NO: 148 or 1052, a CDR2 having an amino acid sequence at least 65%, at least 70%, at least 75%, at least 80%, at least 85%, at least 90%, at least 95%, at least 99%, or 100% identical to SEQ ID NO: 149 or 1053, and a CDR3 having an amino acid sequence at least 65%, at least 70%, at least 75%, at least 80%, at least 85%, at least 90%, at least 95%, at least 99%, or 100% identical to SEQ ID NO: 150, 765, or 1054.

[0146] In some aspects, VL1 comprises an amino acid sequence that is at least 65%, at least 70%, at least 75%, at least 80%, at least 85%, at least 90%, at least 95%, at least 99%, or 100% identical to SEQ ID NO: 11; VL2 comprises an amino acid sequence that is at least 65%, at least 70%, at least 75%, at least 80%, at least 85%, at least 90%, at least 95%, at least 99%, or 100% identical to SEQ ID NO: 17; VL3 comprises an amino acid sequence that is at least 65%, at least 70%, at least 75%, at least 80%, at least 85%, at least 90%, at least 95%, at least 99%, or 100% identical to SEQ ID NO: 67; VL4 comprises an amino acid sequence that is at least 65%, at least 70%, at least 75%, at least 80%, at least 85%, at least 90%, at least 95%, at least 99%, or 100% identical to SEQ ID NO: 147; VH1 comprises an amino acid sequence that is at least 65%, at least 70%, at least 75%, at least 80%, at least 85%, at least 90%, at least 95%, at least 99%, or 100% identical to SEQ ID NO: 14; VH2 comprises an amino acid sequence that is at least 65%, at least 70%, at least 75%, at least 80%, at least 85%, at least 90%, at least 95%, at least 99%, or 100% identical to SEQ ID NO: 21 or 22; VH3 comprises an amino acid sequence that is at least 65%, at least 70%, at least 75%, at least 80%, at least 85%, at least 90%, at least 95%, at least 99%, or 100% identical to SEQ ID NO: 71 or 626; and VH4 comprises an amino acid sequence that is at least 65%, at least 70%, at least 75%, at least 80%, at least 85%, at least 90%, at least 95%, at least 99%, or 100% identical to SEQ ID NO: 151.

[0147] In some aspects, VL1 comprises a CDR1 having an amino acid sequence at least 65%, at least 70%, at least 75%, at least 80%, at least 85%, at least 90%, at least 95%, at least 99%, or 100% identical to SEQ ID NO: 9 or 1055, a CDR2 having an amino acid sequence at least 65%, at least 70%, at least 75%, at least 80%, at least 85%, at least 90%, at least 95%, at least 99%, or 100% identical to SEQ ID NO: 1056 or an amino acid sequence at least 65%, at least 70%, at least 75%, at least 80%, at least 85%, at least 90%, at least 95%, at least 99%, or 100% identical to amino acid sequence GAS, and a CDR3 having an amino acid sequence at least 65%, at least 70%, at least 75%, at least 80%, at least 85%, at least 90%, at least 95%, at least 99%, or 100% identical to SEQ ID NO: 10; VL2 comprises a CDR1 having an amino acid sequence at least 65%, at least 70%, at least 75%, at least 80%, at least 85%, at least 90%, at least 95%, at least 99%, or 100% identical to SEQ ID NO: 65 or 627, a CDR2 having an amino acid sequence at least 65%, at least 70%, at least 75%, at least 80%, at least 85%, at least 90%, at least 95%, at least 99%, or 100% identical to SEQ ID NO: 628 or an amino acid sequence at least 65%, at least 70%, at least 75%, at least 80%, at least 85%, at least 90%, at least 95%, at least 99%, or 100% identical to amino acid sequence SDS, and a CDR3 having an amino acid sequence at least 65%, at least 70%, at least 75%, at least 80%, at least 85%, at least 90%, at least 95%, at least 99%, or 100% identical to SEQ ID NO: 66; VL3 comprises a CDR1 having an amino acid sequence at least 65%, at least 70%, at least 75%, at least 80%, at least 85%, at least 90%, at least 95%, at least 99%, or 100% identical to SEQ ID NO: 145 or 1050, a CDR2 having an amino acid sequence at least 65%, at least 70%, at least 75%, at least 80%, at least 85%, at least 90%, at least 95%, at least 99%, or 100% identical to SEQ ID NO: 1051 or an amino acid sequence at least 65%, at least 70%, at least 75%, at least 80%, at least 85%, at least 90%, at least 95%, at least 99%, or 100% identical to amino acid sequence AAS, and a CDR3 having an amino acid sequence at least 65%, at least 70%, at least 75%, at least 80%, at least 85%, at least 90%, at least 95%, at least 99%, or 100% identical to SEQ ID NO: 146 or 764; VL4 comprises a CDR1 having an amino acid sequence at least 65%, at least 70%, at least 75%, at least 80%, at least 85%, at least 90%, at least 95%, at least 99%, or 100% identical to SEQ ID NO: 152 or 1045, a CDR2 having an amino acid sequence at least 65%, at least 70%, at least 75%, at least 80%, at least 85%, at least 90%, at least 95%, at least 99%, or 100% identical to SEQ ID NO: 1046 or an amino acid sequence at least 65%, at least 70%, at least 75%, at least 80%, at least 85%, at least 90%, at least 95%, at least 99%, or 100% identical to amino acid sequence GAS, and a CDR3 having an amino acid sequence at least 65%, at least 70%, at least 75%, at least 80%, at least 85%, at least 90%, at least 95%, at least 99%, or 100% identical to SEQ ID NO: 153 or 766; VH1 comprises a CDR1 having an amino acid sequence at least 65%, at least 70%, at least 75%, at least 80%, at least 85%, at least 90%, at least 95%, at least 99%, or 100% identical to SEQ ID NO: 12 or 1057, a CDR2 having an amino acid sequence at least 65%, at least 70%, at least 75%, at least 80%, at least 85%, at least 90%, at least 95%, at least 99%, or 100% identical to SEQ ID NO: 6 or 1058, and a CDR3 having an amino acid sequence at least 65%, at least 70%, at least 75%, at least 80%, at least 85%, at least 90%, at least 95%, at least 99%, or 100% identical to SEQ ID NO: 13 or 1059; VH2 comprises a CDR1 having an amino acid sequence at least 65%, at least 70%, at least 75%, at least 80%, at least 85%, at least 90%, at least 95%, at least 99%, or 100% identical to SEQ ID NO: 68 or 629, a CDR2 having an amino acid sequence at least 65%, at least 70%, at least 75%, at least 80%, at least 85%, at least 90%, at least 95%, at least 99%, or 100% identical to SEQ ID NO: 69 or 630, and a CDR3 having an amino acid sequence at least 65%, at least 70%, at least 75%, at least 80%, at least 85%, at least 90%, at least 95%, at least 99%, or 100% identical to SEQ ID NO: 70 or 631; VH3 comprises a CDR1 having an amino acid sequence at least 65%, at least 70%, at least 75%, at least 80%, at least 85%, at least 90%, at least 95%, at least 99%, or 100% identical to SEQ ID NO: 148 or 1052, a CDR2 having an amino acid sequence at least 65%, at least 70%, at least 75%, at least 80%, at least 85%, at least 90%, at least 95%, at least 99%, or 100% identical to SEQ ID NO: 149 or 1053, and a CDR3 having an amino acid sequence at least 65%, at least 70%, at least 75%, at least 80%, at least 85%, at least 90%, at least 95%, at least 99%, or 100% identical to SEQ ID NO: 150, 765, or 1054; and VH4 comprises a CDR1 having an amino acid sequence at least 65%, at least 70%, at least 75%, at least 80%, at least 85%, at least 90%, at least 95%, at least 99%, or 100% identical to SEQ ID NO: 155 or 1047, a CDR2 having an amino acid sequence at least 65%, at least 70%, at least 75%, at least 80%, at least 85%, at least 90%, at least 95%, at least 99%, or 100% identical to SEQ ID NO: 156 or 1048, and a CDR3 having an amino acid sequence at least 65%, at least 70%, at least 75%, at least 80%, at least 85%, at least 90%, at least 95%, at least 99%, or 100% identical to SEQ ID NO: 157, 767, or 1049.

[0148] In some aspects, VL1 comprises an amino acid sequence that is at least 65%, at least 70%, at least 75%, at least 80%, at least 85%, at least 90%, at least 95%, at least 99%, or 100% identical to SEQ ID NO: 11; VL2 comprises an amino acid sequence that is at least 65%, at least 70%, at least 75%, at least 80%, at least 85%, at least 90%, at least 95%, at least 99%, or 100% identical to SEQ ID NO: 67; VL3 comprises an amino acid sequence that is at least 65%, at least 70%, at least 75%, at least 80%, at least 85%, at least 90%, at least 95%, at least 99%, or 100% identical to SEQ ID NO: 147; VL4 comprises an amino acid sequence that is at least 65%, at least 70%, at least 75%, at least 80%, at least 85%, at least 90%, at least 95%, at least 99%, or 100% identical to SEQ ID NO: 154; VH1 comprises an amino acid sequence that is at least 65%, at least 70%, at least 75%, at least 80%, at least 85%, at least 90%, at least 95%, at least 99%, or 100% identical to SEQ ID NO: 14; VH2 comprises an amino acid sequence that is at least 65%, at least 70%, at least 75%, at least 80%, at least 85%, at least 90%, at least 95%, at least 99%, or 100% identical to SEQ ID NO: 71 or 626; VH3 comprises an amino acid sequence that is at least 65%, at least 70%, at least 75%, at least 80%, at least 85%, at least 90%, at least 95%, at least 99%, or 100% identical to SEQ ID NO: 151; and VH4 comprises an amino acid sequence that is at least 65%, at least 70%, at least 75%, at least 80%, at least 85%, at least 90%, at least 95%, at least 99%, or 100% identical to SEQ ID NO: 158.

[0149] In some aspects, VL1 comprises a CDR1 having an amino acid sequence at least 65%, at least 70%, at least 75%, at least 80%, at least 85%, at least 90%, at least 95%, at least 99%, or 100% identical to SEQ ID NO: 9 or 1055, a CDR2 having an amino acid sequence at least 65%, at least 70%, at least 75%, at least 80%, at least 85%, at least 90%, at least 95%, at least 99%, or 100% identical to SEQ ID NO: 1056 or an amino acid sequence at least 65%, at least 70%, at least 75%, at least 80%, at least 85%, at least 90%, at least 95%, at least 99%, or 100% identical to amino acid sequence GAS, and a CDR3 having an amino acid sequence at least 65%, at least 70%, at least 75%, at least 80%, at least 85%, at least 90%, at least 95%, at least 99%, or 100% identical to SEQ ID NO: 10; VL2 comprises a CDR1 having an amino acid sequence at least 65%, at least 70%, at least 75%, at least 80%, at least 85%, at least 90%, at least 95%, at least 99%, or 100% identical to SEQ ID NO: 152 or 1045, a CDR2 having an amino acid sequence at least 65%, at least 70%, at least 75%, at least 80%, at least 85%, at least 90%, at least 95%, at least 99%, or 100% identical to SEQ ID NO: 1046 or an amino acid sequence at least 65%, at least 70%, at least 75%, at least 80%, at least 85%, at least 90%, at least 95%, at least 99%, or 100% identical to amino acid sequence GAS, and a CDR3 having an amino acid sequence at least 65%, at least 70%, at least 75%, at least 80%, at least 85%, at least 90%, at least 95%, at least 99%, or 100% identical to SEQ ID NO: 153 or 766; VL3 comprises a CDR1 having an amino acid sequence at least 65%, at least 70%, at least 75%, at least 80%, at least 85%, at least 90%, at least 95%, at least 99%, or 100% identical to SEQ ID NO: 65 or 627, a CDR2 having an amino acid sequence at least 65%, at least 70%, at least 75%, at least 80%, at least 85%, at least 90%, at least 95%, at least 99%, or 100% identical to SEQ ID NO: 628 or an amino acid sequence at least 65%, at least 70%, at least 75%, at least 80%, at least 85%, at least 90%, at least 95%, at least 99%, or 100% identical to amino acid sequence SDS, and a CDR3 having an amino acid sequence at least 65%, at least 70%, at least 75%, at least 80%, at least 85%, at least 90%, at least 95%, at least 99%, or 100% identical to SEQ ID NO: 66; VL4 comprises a CDR1 having an amino acid sequence at least 65%, at least 70%, at least 75%, at least 80%, at least 85%, at least 90%, at least 95%, at least 99%, or 100% identical to SEQ ID NO: 145 or 1050, a CDR2 having an amino acid sequence at least 65%, at least 70%, at least 75%, at least 80%, at least 85%, at least 90%, at least 95%, at least 99%, or 100% identical to SEQ ID NO: 1051 or an amino acid sequence at least 65%, at least 70%, at least 75%, at least 80%, at least 85%, at least 90%, at least 95%, at least 99%, or 100% identical to amino acid sequence AAS, and a CDR3 having an amino acid sequence at least 65%, at least 70%, at least 75%, at least 80%, at least 85%, at least 90%, at least 95%, at least 99%, or 100% identical to SEQ ID NO: 146 or 764; VH1 comprises a CDR1 having an amino acid sequence at least 65%, at least 70%, at least 75%, at least 80%, at least 85%, at least 90%, at least 95%, at least 99%, or 100% identical to SEQ ID NO: 12 or 1057, a CDR2 having an amino acid sequence at least 65%, at least 70%, at least 75%, at least 80%, at least 85%, at least 90%, at least 95%, at least 99%, or 100% identical to SEQ ID NO: 6 or 1058, and a CDR3 having an amino acid sequence at least 65%, at least 70%, at least 75%, at least 80%, at least 85%, at least 90%, at least 95%, at least 99%, or 100% identical to SEQ ID NO: 13 or 1059; VH2 comprises a CDR1 having an amino acid sequence at least 65%, at least 70%, at least 75%, at least 80%, at least 85%, at least 90%, at least 95%, at least 99%, or 100% identical to SEQ ID NO: 155 or 1047, a CDR2 having an amino acid sequence at least 65%, at least 70%, at least 75%, at least 80%, at least 85%, at least 90%, at least 95%, at least 99%, or 100% identical to SEQ ID NO: 156 or 1048, and a CDR3 having an amino acid sequence at least 65%, at least 70%, at least 75%, at least 80%, at least 85%, at least 90%, at least 95%, at least 99%, or 100% identical to SEQ ID NO: 157, 767, or 1049; VH3 comprises a CDR1 having an amino acid sequence at least 65%, at least 70%, at least 75%, at least 80%, at least 85%, at least 90%, at least 95%, at least 99%, or 100% identical to SEQ ID NO: 68 or 629, a CDR2 having an amino acid sequence at least 65%, at least 70%, at least 75%, at least 80%, at least 85%, at least 90%, at least 95%, at least 99%, or 100% identical to SEQ ID NO: 69 or 630, and a CDR3 having an amino acid sequence at least 65%, at least 70%, at least 75%, at least 80%, at least 85%, at least 90%, at least 95%, at least 99%, or 100% identical to SEQ ID NO: 70 or 631; and VH4 comprises a CDR1 having an amino acid sequence at least 65%, at least 70%, at least 75%, at least 80%, at least 85%, at least 90%, at least 95%, at least 99%, or 100% identical to SEQ ID NO: 148 or 1052, a CDR2 having an amino acid sequence at least 65%, at least 70%, at least 75%, at least 80%, at least 85%, at least 90%, at least 95%, at least 99%, or 100% identical to SEQ ID NO: 149 or 1053, and a CDR3 having an amino acid sequence at least 65%, at least 70%, at least 75%, at least 80%, at least 85%, at least 90%, at least 95%, at least 99%, or 100% identical to SEQ ID NO: 150, 765, or 1054.

[0150] In some aspects, VL1 comprises an amino acid sequence that is at least 65%, at least 70%, at least 75%, at least 80%, at least 85%, at least 90%, at least 95%, at least 99%, or 100% identical to SEQ ID NO: 11; VL2 comprises an amino acid sequence that is at least 65%, at least 70%, at least 75%, at least 80%, at least 85%, at least 90%, at least 95%, at least 99%, or 100% identical to SEQ ID NO: 154; VL3 comprises an amino acid sequence that is at least 65%, at least 70%, at least 75%, at least 80%, at least 85%, at least 90%, at least 95%, at least 99%, or 100% identical to SEQ ID NO: 67; VL4 comprises an amino acid sequence that is at least 65%, at least 70%, at least 75%, at least 80%, at least 85%, at least 90%, at least 95%, at least 99%, or 100% identical to SEQ ID NO: 147; VH1 comprises an amino acid sequence that is at least 65%, at least 70%, at least 75%, at least 80%, at least 85%, at least 90%, at least 95%, at least 99%, or 100% identical to SEQ ID NO: 14; VH2 comprises an amino acid sequence that is at least 65%, at least 70%, at least 75%, at least 80%, at least 85%, at least 90%, at least 95%, at least 99%, or 100% identical to SEQ ID NO: 158; VH3 comprises an amino acid sequence that is at least 65%, at least 70%, at least 75%, at least 80%, at least 85%, at least 90%, at least 95%, at least 99%, or 100% identical to SEQ ID NO: 71 or 626; and VH4 comprises an amino acid sequence that is at least 65%, at least 70%, at least 75%, at least 80%, at least 85%, at least 90%, at least 95%, at least 99%, or 100% identical to SEQ ID NO: 151.

[0151] In some aspects, VL1 comprises a CDR1 having an amino acid sequence at least 65%, at least 70%, at least 75%, at least 80%, at least 85%, at least 90%, at least 95%, at least 99%, or 100% identical to SEQ ID NO: 152 or 1045, a CDR2 having an amino acid sequence at least 65%, at least 70%, at least 75%, at least 80%, at least 85%, at least 90%, at least 95%, at least 99%, or 100% identical to SEQ ID NO: 1046 or an amino acid sequence at least 65%, at least 70%, at least 75%, at least 80%, at least 85%, at least 90%, at least 95%, at least 99%, or 100% identical to amino acid sequence GAS, and a CDR3 having an amino acid sequence at least 65%, at least 70%, at least 75%, at least 80%, at least 85%, at least 90%, at least 95%, at least 99%, or 100% identical to SEQ ID NO: 153 or 766; VL2 comprises a CDR1 having an amino acid sequence at least 65%, at least 70%, at least 75%, at least 80%, at least 85%, at least 90%, at least 95%, at least 99%, or 100% identical to SEQ ID NO: 145 or 1050, a CDR2 having an amino acid sequence at least 65%, at least 70%, at least 75%, at least 80%, at least 85%, at least 90%, at least 95%, at least 99%, or 100% identical to SEQ ID NO: 1051 or an amino acid sequence at least 65%, at least 70%, at least 75%, at least 80%, at least 85%, at least 90%, at least 95%, at least 99%, or 100% identical to amino acid sequence AAS, and a CDR3 having an amino acid sequence at least 65%, at least 70%, at least 75%, at least 80%, at least 85%, at least 90%, at least 95%, at least 99%, or 100% identical to SEQ ID NO: 146 or 764; VL3 comprises a CDR1 having an amino acid sequence at least 65%, at least 70%, at least 75%, at least 80%, at least 85%, at least 90%, at least 95%, at least 99%, or 100% identical to SEQ ID NO: 152 or 1045, a CDR2 having an amino acid sequence at least 65%, at least 70%, at least 75%, at least 80%, at least 85%, at least 90%, at least 95%, at least 99%, or 100% identical to SEQ ID NO: 1046 or an amino acid sequence at least 65%, at least 70%, at least 75%, at least 80%, at least 85%, at least 90%, at least 95%, at least 99%, or 100% identical to amino acid sequence GAS, and a CDR3 having an amino acid sequence at least 65%, at least 70%, at least 75%, at least 80%, at least 85%, at least 90%, at least 95%, at least 99%, or 100% identical to SEQ ID NO: 153 or 766; VL4 comprises a CDR1 having an amino acid sequence at least 65%, at least 70%, at least 75%, at least 80%, at least 85%, at least 90%, at least 95%, at least 99%, or 100% identical to SEQ ID NO: 145 or 1050, a CDR2 having an amino acid sequence at least 65%, at least 70%, at least 75%, at least 80%, at least 85%, at least 90%, at least 95%, at least 99%, or 100% identical to SEQ ID NO: 1051 or an amino acid sequence at least 65%, at least 70%, at least 75%, at least 80%, at least 85%, at least 90%, at least 95%, at least 99%, or 100% identical to amino acid sequence AAS, and a CDR3 having an amino acid sequence at least 65%, at least 70%, at least 75%, at least 80%, at least 85%, at least 90%, at least 95%, at least 99%, or 100% identical to SEQ ID NO: 146 or 764; VH1 comprises a CDR1 having an amino acid sequence at least 65%, at least 70%, at least 75%, at least 80%, at least 85%, at least 90%, at least 95%, at least 99%, or 100% identical to SEQ ID NO: 155 or 1047, a CDR2 having an amino acid sequence at least 65%, at least 70%, at least 75%, at least 80%, at least 85%, at least 90%, at least 95%, at least 99%, or 100% identical to SEQ ID NO: 156 or 1048, and a CDR3 having an amino acid sequence at least 65%, at least 70%, at least 75%, at least 80%, at least 85%, at least 90%, at least 95%, at least 99%, or 100% identical to SEQ ID NO: 157, 767, or 1049; VH2 comprises a CDR1 having an amino acid sequence at least 65%, at least 70%, at least 75%, at least 80%, at least 85%, at least 90%, at least 95%, at least 99%, or 100% identical to SEQ ID NO: 148 or 1052, a CDR2 having an amino acid sequence at least 65%, at least 70%, at least 75%, at least 80%, at least 85%, at least 90%, at least 95%, at least 99%, or 100% identical to SEQ ID NO: 149 or 1053, and a CDR3 having an amino acid sequence at least 65%, at least 70%, at least 75%, at least 80%, at least 85%, at least 90%, at least 95%, at least 99%, or 100% identical to SEQ ID NO: 150, 765, or 1054; VH3 comprises a CDR1 having an amino acid sequence at least 65%, at least 70%, at least 75%, at least 80%, at least 85%, at least 90%, at least 95%, at least 99%, or 100% identical to SEQ ID NO: 155 or 1047, a CDR2 having an amino acid sequence at least 65%, at least 70%, at least 75%, at least 80%, at least 85%, at least 90%, at least 95%, at least 99%, or 100% identical to SEQ ID NO: 156 or 1048, and a CDR3 having an amino acid sequence at least 65%, at least 70%, at least 75%, at least 80%, at least 85%, at least 90%, at least 95%, at least 99%, or 100% identical to SEQ ID NO: 157, 767, or 1049; and VH4 comprises a CDR1 having an amino acid sequence at least 65%, at least 70%, at least 75%, at least 80%, at least 85%, at least 90%, at least 95%, at least 99%, or 100% identical to SEQ ID NO: 148 or 1052, a CDR2 having an amino acid sequence at least 65%, at least 70%, at least 75%, at least 80%, at least 85%, at least 90%, at least 95%, at least 99%, or 100% identical to SEQ ID NO: 149 or 1053, and a CDR3 having an amino acid sequence at least 65%, at least 70%, at least 75%, at least 80%, at least 85%, at least 90%, at least 95%, at least 99%, or 100% identical to SEQ ID NO: 150, 765, or 1054.

[0152] In some aspects, VL1 comprises an amino acid sequence that is at least 65%, at least 70%, at least 75%, at least 80%, at least 85%, at least 90%, at least 95%, at least 99%, or 100% identical to SEQ ID NO: 154; VL2 comprises an amino acid sequence that is at least 65%, at least 70%, at least 75%, at least 80%, at least 85%, at least 90%, at least 95%, at least 99%, or 100% identical to SEQ ID NO: 147; VL3 comprises an amino acid sequence that is at least 65%, at least 70%, at least 75%, at least 80%, at least 85%, at least 90%, at least 95%, at least 99%, or 100% identical to SEQ ID NO: 154; VL4 comprises an amino acid sequence that is at least 65%, at least 70%, at least 75%, at least 80%, at least 85%, at least 90%, at least 95%, at least 99%, or 100% identical to SEQ ID NO: 147; VH1 comprises an amino acid sequence that is at least 65%, at least 70%, at least 75%, at least 80%, at least 85%, at least 90%, at least 95%, at least 99%, or 100% identical to SEQ ID NO: 158; VH2 comprises an amino acid sequence that is at least 65%, at least 70%, at least 75%, at least 80%, at least 85%, at least 90%, at least 95%, at least 99%, or 100% identical to SEQ ID NO: 151; VH3 comprises an amino acid sequence that is at least 65%, at least 70%, at least 75%, at least 80%, at least 85%, at least 90%, at least 95%, at least 99%, or 100% identical to SEQ ID NO: 158; and VH4 comprises an amino acid sequence that is at least 65%, at least 70%, at least 75%, at least 80%, at least 85%, at least 90%, at least 95%, at least 99%, or 100% identical to SEQ ID NO: 151.

[0153] In some aspects, VL1 comprises a CDR1 having an amino acid sequence at least 65%, at least 70%, at least 75%, at least 80%, at least 85%, at least 90%, at least 95%, at least 99%, or 100% identical to SEQ ID NO: 9 or 1055, a CDR2 having an amino acid sequence at least 65%, at least 70%, at least 75%, at least 80%, at least 85%, at least 90%, at least 95%, at least 99%, or 100% identical to SEQ ID NO: 1056 or an amino acid sequence at least 65%, at least 70%, at least 75%, at least 80%, at least 85%, at least 90%, at least 95%, at least 99%, or 100% identical to amino acid sequence GAS, and a CDR3 having an amino acid sequence at least 65%, at least 70%, at least 75%, at least 80%, at least 85%, at least 90%, at least 95%, at least 99%, or 100% identical to SEQ ID NO: 10; VL2 comprises a CDR1 having an amino acid sequence at least 65%, at least 70%, at least 75%, at least 80%, at least 85%, at least 90%, at least 95%, at least 99%, or 100% identical to SEQ ID NO: 145 or 1050, a CDR2 having an amino acid sequence at least 65%, at least 70%, at least 75%, at least 80%, at least 85%, at least 90%, at least 95%, at least 99%, or 100% identical to SEQ ID NO: 1051 or an amino acid sequence at least 65%, at least 70%, at least 75%, at least 80%, at least 85%, at least 90%, at least 95%, at least 99%, or 100% identical to amino acid sequence AAS, and a CDR3 having an amino acid sequence at least 65%, at least 70%, at least 75%, at least 80%, at least 85%, at least 90%, at least 95%, at least 99%, or 100% identical to SEQ ID NO: 146 or 764; VL3 comprises a CDR1 having an amino acid sequence at least 65%, at least 70%, at least 75%, at least 80%, at least 85%, at least 90%, at least 95%, at least 99%, or 100% identical to SEQ ID NO: 9 or 1055, a CDR2 having an amino acid sequence at least 65%, at least 70%, at least 75%, at least 80%, at least 85%, at least 90%, at least 95%, at least 99%, or 100% identical to SEQ ID NO: 1056 or an amino acid sequence at least 65%, at least 70%, at least 75%, at least 80%, at least 85%, at least 90%, at least 95%, at least 99%, or 100% identical to amino acid sequence GAS, and a CDR3 having an amino acid sequence at least 65%, at least 70%, at least 75%, at least 80%, at least 85%, at least 90%, at least 95%, at least 99%, or 100% identical to SEQ ID NO: 10; VL4 comprises a CDR1 having an amino acid sequence at least 65%, at least 70%, at least 75%, at least 80%, at least 85%, at least 90%, at least 95%, at least 99%, or 100% identical to SEQ ID NO: 145 or 1050, a CDR2 having an amino acid sequence at least 65%, at least 70%, at least 75%, at least 80%, at least 85%, at least 90%, at least 95%, at least 99%, or 100% identical to SEQ ID NO: 1051 or an amino acid sequence at least 65%, at least 70%, at least 75%, at least 80%, at least 85%, at least 90%, at least 95%, at least 99%, or 100% identical to amino acid sequence AAS, and a CDR3 having an amino acid sequence at least 65%, at least 70%, at least 75%, at least 80%, at least 85%, at least 90%, at least 95%, at least 99%, or 100% identical to SEQ ID NO: 146 or 764; VH1 comprises a CDR1 having an amino acid sequence at least 65%, at least 70%, at least 75%, at least 80%, at least 85%, at least 90%, at least 95%, at least 99%, or 100% identical to SEQ ID NO: 12 or 1057, a CDR2 having an amino acid sequence at least 65%, at least 70%, at least 75%, at least 80%, at least 85%, at least 90%, at least 95%, at least 99%, or 100% identical to SEQ ID NO: 6 or 1058, and a CDR3 having an amino acid sequence at least 65%, at least 70%, at least 75%, at least 80%, at least 85%, at least 90%, at least 95%, at least 99%, or 100% identical to SEQ ID NO: 13 or 1059; VH2 comprises a CDR1 having an amino acid sequence at least 65%, at least 70%, at least 75%, at least 80%, at least 85%, at least 90%, at least 95%, at least 99%, or 100% identical to SEQ ID NO: 148 or 1052, a CDR2 having an amino acid sequence at least 65%, at least 70%, at least 75%, at least 80%, at least 85%, at least 90%, at least 95%, at least 99%, or 100% identical to SEQ ID NO: 149 or 1053, and a CDR3 having an amino acid sequence at least 65%, at least 70%, at least 75%, at least 80%, at least 85%, at least 90%, at least 95%, at least 99%, or 100% identical to SEQ ID NO: 150, 765, or 1054; VH3 comprises a CDR1 having an amino acid sequence at least 65%, at least 70%, at least 75%, at least 80%, at least 85%, at least 90%, at least 95%, at least 99%, or 100% identical to SEQ ID NO: 12 or 1057, a CDR2 having an amino acid sequence at least 65%, at least 70%, at least 75%, at least 80%, at least 85%, at least 90%, at least 95%, at least 99%, or 100% identical to SEQ ID NO: 6 or 1058, and a CDR3 having an amino acid sequence at least 65%, at least 70%, at least 75%, at least 80%, at least 85%, at least 90%, at least 95%, at least 99%, or 100% identical to SEQ ID NO: 13 or 1059; and VH4 comprises a CDR1 having an amino acid sequence at least 65%, at least 70%, at least 75%, at least 80%, at least 85%, at least 90%, at least 95%, at least 99%, or 100% identical to SEQ ID NO: 148 or 1052, a CDR2 having an amino acid sequence at least 65%, at least 70%, at least 75%, at least 80%, at least 85%, at least 90%, at least 95%, at least 99%, or 100% identical to SEQ ID NO: 149 or 1053, and a CDR3 having an amino acid sequence at least 65%, at least 70%, at least 75%, at least 80%, at least 85%, at least 90%, at least 95%, at least 99%, or 100% identical to SEQ ID NO: 150, 765, or 1054.

[0154] In some aspects, VL1 comprises an amino acid sequence that is at least 65%, at least 70%, at least 75%, at least 80%, at least 85%, at least 90%, at least 95%, at least 99%, or 100% identical to SEQ ID NO: 11; VL2 comprises an amino acid sequence that is at least 65%, at least 70%, at least 75%, at least 80%, at least 85%, at least 90%, at least 95%, at least 99%, or 100% identical to SEQ ID NO: 147; VL3 comprises an amino acid sequence that is at least 65%, at least 70%, at least 75%, at least 80%, at least 85%, at least 90%, at least 95%, at least 99%, or 100% identical to SEQ ID NO: 11; VL4 comprises an amino acid sequence that is at least 65%, at least 70%, at least 75%, at least 80%, at least 85%, at least 90%, at least 95%, at least 99%, or 100% identical to SEQ ID NO: 147; VH1 comprises an amino acid sequence that is at least 65%, at least 70%, at least 75%, at least 80%, at least 85%, at least 90%, at least 95%, at least 99%, or 100% identical to SEQ ID NO: 14; VH2 comprises an amino acid sequence that is at least 65%, at least 70%, at least 75%, at least 80%, at least 85%, at least 90%, at least 95%, at least 99%, or 100% identical to SEQ ID NO: 151; VH3 comprises an amino acid sequence that is at least 65%, at least 70%, at least 75%, at least 80%, at least 85%, at least 90%, at least 95%, at least 99%, or 100% identical to SEQ ID NO: 14; and VH4 comprises an amino acid sequence that is at least 65%, at least 70%, at least 75%, at least 80%, at least 85%, at least 90%, at least 95%, at least 99%, or 100% identical to SEQ ID NO: 151.

[0155] In some aspects, VL1 comprises a CDR1 having an amino acid sequence at least 65%, at least 70%, at least 75%, at least 80%, at least 85%, at least 90%, at least 95%, at least 99%, or 100% identical to SEQ ID NO: 9 or 1055, a CDR2 having an amino acid sequence at least 65%, at least 70%, at least 75%, at least 80%, at least 85%, at least 90%, at least 95%, at least 99%, or 100% identical to SEQ ID NO: 1056 or an amino acid sequence at least 65%, at least 70%, at least 75%, at least 80%, at least 85%, at least 90%, at least 95%, at least 99%, or 100% identical to amino acid sequence GAS, and a CDR3 having an amino acid sequence at least 65%, at least 70%, at least 75%, at least 80%, at least 85%, at least 90%, at least 95%, at least 99%, or 100% identical to SEQ ID NO: 10; VL2 comprises a CDR1 having an amino acid sequence at least 65%, at least 70%, at least 75%, at least 80%, at least 85%, at least 90%, at least 95%, at least 99%, or 100% identical to SEQ ID NO: 145 or 1050, a CDR2 having an amino acid sequence at least 65%, at least 70%, at least 75%, at least 80%, at least 85%, at least 90%, at least 95%, at least 99%, or 100% identical to SEQ ID NO: 1051 or an amino acid sequence at least 65%, at least 70%, at least 75%, at least 80%, at least 85%, at least 90%, at least 95%, at least 99%, or 100% identical to amino acid sequence AAS, and a CDR3 having an amino acid sequence at least 65%, at least 70%, at least 75%, at least 80%, at least 85%, at least 90%, at least 95%, at least 99%, or 100% identical to SEQ ID NO: 146 or 764; VL3 comprises a CDR1 having an amino acid sequence at least 65%, at least 70%, at least 75%, at least 80%, at least 85%, at least 90%, at least 95%, at least 99%, or 100% identical to SEQ ID NO: 145 or 1050, a CDR2 having an amino acid sequence at least 65%, at least 70%, at least 75%, at least 80%, at least 85%, at least 90%, at least 95%, at least 99%, or 100% identical to SEQ ID NO: 1051 or an amino acid sequence at least 65%, at least 70%, at least 75%, at least 80%, at least 85%, at least 90%, at least 95%, at least 99%, or 100% identical to amino acid sequence AAS, and a CDR3 having an amino acid sequence at least 65%, at least 70%, at least 75%, at least 80%, at least 85%, at least 90%, at least 95%, at least 99%, or 100% identical to SEQ ID NO: 146 or 764; VL4 comprises a CDR1 having an amino acid sequence at least 65%, at least 70%, at least 75%, at least 80%, at least 85%, at least 90%, at least 95%, at least 99%, or 100% identical to SEQ ID NO: 152 or 1045, a CDR2 having an amino acid sequence at least 65%, at least 70%, at least 75%, at least 80%, at least 85%, at least 90%, at least 95%, at least 99%, or 100% identical to SEQ ID NO: 1046 or an amino acid sequence at least 65%, at least 70%, at least 75%, at least 80%, at least 85%, at least 90%, at least 95%, at least 99%, or 100% identical to amino acid sequence GAS, and a CDR3 having an amino acid sequence at least 65%, at least 70%, at least 75%, at least 80%, at least 85%, at least 90%, at least 95%, at least 99%, or 100% identical to SEQ ID NO: 153 or 766; VH1 comprises a CDR1 having an amino acid sequence at least 65%, at least 70%, at least 75%, at least 80%, at least 85%, at least 90%, at least 95%, at least 99%, or 100% identical to SEQ ID NO: 12 or 1057, a CDR2 having an amino acid sequence at least 65%, at least 70%, at least 75%, at least 80%, at least 85%, at least 90%, at least 95%, at least 99%, or 100% identical to SEQ ID NO: 6 or 1058, and a CDR3 having an amino acid sequence at least 65%, at least 70%, at least 75%, at least 80%, at least 85%, at least 90%, at least 95%, at least 99%, or 100% identical to SEQ ID NO: 13 or 1059; VH2 comprises a CDR1 having an amino acid sequence at least 65%, at least 70%, at least 75%, at least 80%, at least 85%, at least 90%, at least 95%, at least 99%, or 100% identical to SEQ ID NO: 148 or 1052, a CDR2 having an amino acid sequence at least 65%, at least 70%, at least 75%, at least 80%, at least 85%, at least 90%, at least 95%, at least 99%, or 100% identical to SEQ ID NO: 149 or 1053, and a CDR3 having an amino acid sequence at least 65%, at least 70%, at least 75%, at least 80%, at least 85%, at least 90%, at least 95%, at least 99%, or 100% identical to SEQ ID NO: 150, 765, or 1054; VH3 comprises a CDR1 having an amino acid sequence at least 65%, at least 70%, at least 75%, at least 80%, at least 85%, at least 90%, at least 95%, at least 99%, or 100% identical to SEQ ID NO: 148 or 1052, a CDR2 having an amino acid sequence at least 65%, at least 70%, at least 75%, at least 80%, at least 85%, at least 90%, at least 95%, at least 99%, or 100% identical to SEQ ID NO: 149 or 1053, and a CDR3 having an amino acid sequence at least 65%, at least 70%, at least 75%, at least 80%, at least 85%, at least 90%, at least 95%, at least 99%, or 100% identical to SEQ ID NO: 150, 765, or 1054; and VH4 comprises a CDR1 having an amino acid sequence at least 65%, at least 70%, at least 75%, at least 80%, at least 85%, at least 90%, at least 95%, at least 99%, or 100% identical to SEQ ID NO: 155 or 1047, a CDR2 having an amino acid sequence at least 65%, at least 70%, at least 75%, at least 80%, at least 85%, at least 90%, at least 95%, at least 99%, or 100% identical to SEQ ID NO: 156 or 1048, and a CDR3 having an amino acid sequence at least 65%, at least 70%, at least 75%, at least 80%, at least 85%, at least 90%, at least 95%, at least 99%, or 100% identical to SEQ ID NO: 157, 767, or 1049.

[0156] In some aspects, VL1 comprises an amino acid sequence that is at least 65%, at least 70%, at least 75%, at least 80%, at least 85%, at least 90%, at least 95%, at least 99%, or 100% identical to SEQ ID NO: 11; VL2 comprises an amino acid sequence that is at least 65%, at least 70%, at least 75%, at least 80%, at least 85%, at least 90%, at least 95%, at least 99%, or 100% identical to SEQ ID NO: 147; VL3 comprises an amino acid sequence that is at least 65%, at least 70%, at least 75%, at least 80%, at least 85%, at least 90%, at least 95%, at least 99%, or 100% identical to SEQ ID NO: 147; VL4 comprises an amino acid sequence that is at least 65%, at least 70%, at least 75%, at least 80%, at least 85%, at least 90%, at least 95%, at least 99%, or 100% identical to SEQ ID NO: 154; VH1 comprises an amino acid sequence that is at least 65%, at least 70%, at least 75%, at least 80%, at least 85%, at least 90%, at least 95%, at least 99%, or 100% identical to SEQ ID NO: 14; VH2 comprises an amino acid sequence that is at least 65%, at least 70%, at least 75%, at least 80%, at least 85%, at least 90%, at least 95%, at least 99%, or 100% identical to SEQ ID NO: 151; VH3 comprises an amino acid sequence that is at least 65%, at least 70%, at least 75%, at least 80%, at least 85%, at least 90%, at least 95%, at least 99%, or 100% identical to SEQ ID NO: 151; and VH4 comprises an amino acid sequence that is at least 65%, at least 70%, at least 75%, at least 80%, at least 85%, at least 90%, at least 95%, at least 99%, or 100% identical to SEQ ID NO: 158.

[0157] In some aspects, VL1 comprises a CDR1 having an amino acid sequence at least 65%, at least 70%, at least 75%, at least 80%, at least 85%, at least 90%, at least 95%, at least 99%, or 100% identical to SEQ ID NO: 9 or 1055, a CDR2 having an amino acid sequence at least 65%, at least 70%, at least 75%, at least 80%, at least 85%, at least 90%, at least 95%, at least 99%, or 100% identical to SEQ ID NO: 1056 or an amino acid sequence at least 65%, at least 70%, at least 75%, at least 80%, at least 85%, at least 90%, at least 95%, at least 99%, or 100% identical to amino acid sequence GAS, and a CDR3 having an amino acid sequence at least 65%, at least 70%, at least 75%, at least 80%, at least 85%, at least 90%, at least 95%, at least 99%, or 100% identical to SEQ ID NO: 10; VL2 comprises a CDR1 having an amino acid sequence at least 65%, at least 70%, at least 75%, at least 80%, at least 85%, at least 90%, at least 95%, at least 99%, or 100% identical to SEQ ID NO: 145 or 1050, a CDR2 having an amino acid sequence at least 65%, at least 70%, at least 75%, at least 80%, at least 85%, at least 90%, at least 95%, at least 99%, or 100% identical to SEQ ID NO: 1051 or an amino acid sequence at least 65%, at least 70%, at least 75%, at least 80%, at least 85%, at least 90%, at least 95%, at least 99%, or 100% identical to amino acid sequence AAS, and a CDR3 having an amino acid sequence at least 65%, at least 70%, at least 75%, at least 80%, at least 85%, at least 90%, at least 95%, at least 99%, or 100% identical to SEQ ID NO: 146 or 764; VL3 comprises a CDR1 having an amino acid sequence at least 65%, at least 70%, at least 75%, at least 80%, at least 85%, at least 90%, at least 95%, at least 99%, or 100% identical to SEQ ID NO: 152 or 1045, a CDR2 having an amino acid sequence at least 65%, at least 70%, at least 75%, at least 80%, at least 85%, at least 90%, at least 95%, at least 99%, or 100% identical to SEQ ID NO: 1046 or an amino acid sequence at least 65%, at least 70%, at least 75%, at least 80%, at least 85%, at least 90%, at least 95%, at least 99%, or 100% identical to amino acid sequence GAS, and a CDR3 having an amino acid sequence at least 65%, at least 70%, at least 75%, at least 80%, at least 85%, at least 90%, at least 95%, at least 99%, or 100% identical to SEQ ID NO: 153 or 766; VL4 comprises a CDR1 having an amino acid sequence at least 65%, at least 70%, at least 75%, at least 80%, at least 85%, at least 90%, at least 95%, at least 99%, or 100% identical to SEQ ID NO: 145 or 1050, a CDR2 having an amino acid sequence at least 65%, at least 70%, at least 75%, at least 80%, at least 85%, at least 90%, at least 95%, at least 99%, or 100% identical to SEQ ID NO: 1051 or an amino acid sequence at least 65%, at least 70%, at least 75%, at least 80%, at least 85%, at least 90%, at least 95%, at least 99%, or 100% identical to amino acid sequence AAS, and a CDR3 having an amino acid sequence at least 65%, at least 70%, at least 75%, at least 80%, at least 85%, at least 90%, at least 95%, at least 99%, or 100% identical to SEQ ID NO: 146 or 764; VH1 comprises a CDR1 having an amino acid sequence at least 65%, at least 70%, at least 75%, at least 80%, at least 85%, at least 90%, at least 95%, at least 99%, or 100% identical to SEQ ID NO: 12 or 1057, a CDR2 having an amino acid sequence at least 65%, at least 70%, at least 75%, at least 80%, at least 85%, at least 90%, at least 95%, at least 99%, or 100% identical to SEQ ID NO: 6 or 1058, and a CDR3 having an amino acid sequence at least 65%, at least 70%, at least 75%, at least 80%, at least 85%, at least 90%, at least 95%, at least 99%, or 100% identical to SEQ ID NO: 13 or 1059; VH2 comprises a CDR1 having an amino acid sequence at least 65%, at least 70%, at least 75%, at least 80%, at least 85%, at least 90%, at least 95%, at least 99%, or 100% identical to SEQ ID NO: 148 or 1052, a CDR2 having an amino acid sequence at least 65%, at least 70%, at least 75%, at least 80%, at least 85%, at least 90%, at least 95%, at least 99%, or 100% identical to SEQ ID NO: 149 or 1053, and a CDR3 having an amino acid sequence at least 65%, at least 70%, at least 75%, at least 80%, at least 85%, at least 90%, at least 95%, at least 99%, or 100% identical to SEQ ID NO: 150, 765, or 1054; VH3 comprises a CDR1 having an amino acid sequence at least 65%, at least 70%, at least 75%, at least 80%, at least 85%, at least 90%, at least 95%, at least 99%, or 100% identical to SEQ ID NO: 155 or 1047, a CDR2 having an amino acid sequence at least 65%, at least 70%, at least 75%, at least 80%, at least 85%, at least 90%, at least 95%, at least 99%, or 100% identical to SEQ ID NO: 156 or 1048, and a CDR3 having an amino acid sequence at least 65%, at least 70%, at least 75%, at least 80%, at least 85%, at least 90%, at least 95%, at least 99%, or 100% identical to SEQ ID NO: 157, 767, or 1049; and VH4 comprises a CDR1 having an amino acid sequence at least 65%, at least 70%, at least 75%, at least 80%, at least 85%, at least 90%, at least 95%, at least 99%, or 100% identical to SEQ ID NO: 148 or 1052, a CDR2 having an amino acid sequence at least 65%, at least 70%, at least 75%, at least 80%, at least 85%, at least 90%, at least 95%, at least 99%, or 100% identical to SEQ ID NO: 149 or 1053, and a CDR3 having an amino acid sequence at least 65%, at least 70%, at least 75%, at least 80%, at least 85%, at least 90%, at least 95%, at least 99%, or 100% identical to SEQ ID NO: 150, 765, or 1054.

[0158] In some aspects, VL1 comprises an amino acid sequence that is at least 65%, at least 70%, at least 75%, at least 80%, at least 85%, at least 90%, at least 95%, at least 99%, or 100% identical to SEQ ID NO: 11; VL2 comprises an amino acid sequence that is at least 65%, at least 70%, at least 75%, at least 80%, at least 85%, at least 90%, at least 95%, at least 99%, or 100% identical to SEQ ID NO: 147; VL3 comprises an amino acid sequence that is at least 65%, at least 70%, at least 75%, at least 80%, at least 85%, at least 90%, at least 95%, at least 99%, or 100% identical to SEQ ID NO: 154; VL4 comprises an amino acid sequence that is at least 65%, at least 70%, at least 75%, at least 80%, at least 85%, at least 90%, at least 95%, at least 99%, or 100% identical to SEQ ID NO: 147; VH1 comprises an amino acid sequence that is at least 65%, at least 70%, at least 75%, at least 80%, at least 85%, at least 90%, at least 95%, at least 99%, or 100% identical to SEQ ID NO: 14; VH2 comprises an amino acid sequence that is at least 65%, at least 70%, at least 75%, at least 80%, at least 85%, at least 90%, at least 95%, at least 99%, or 100% identical to SEQ ID NO: 151; VH3 comprises an amino acid sequence that is at least 65%, at least 70%, at least 75%, at least 80%, at least 85%, at least 90%, at least 95%, at least 99%, or 100% identical to SEQ ID NO: 158; and VH4 comprises an amino acid sequence that is at least 65%, at least 70%, at least 75%, at least 80%, at least 85%, at least 90%, at least 95%, at least 99%, or 100% identical to SEQ ID NO: 151.

[0159] In some aspects, VL1 comprises a CDR1 having an amino acid sequence at least 65%, at least 70%, at least 75%, at least 80%, at least 85%, at least 90%, at least 95%, at least 99%, or 100% identical to SEQ ID NO: 145 or 1050, a CDR2 having an amino acid sequence at least 65%, at least 70%, at least 75%, at least 80%, at least 85%, at least 90%, at least 95%, at least 99%, or 100% identical to SEQ ID NO: 1051 or an amino acid sequence at least 65%, at least 70%, at least 75%, at least 80%, at least 85%, at least 90%, at least 95%, at least 99%, or 100% identical to amino acid sequence AAS, and a CDR3 having an amino acid sequence at least 65%, at least 70%, at least 75%, at least 80%, at least 85%, at least 90%, at least 95%, at least 99%, or 100% identical to SEQ ID NO: 146 or 764; VL2 comprises a CDR1 having an amino acid sequence at least 65%, at least 70%, at least 75%, at least 80%, at least 85%, at least 90%, at least 95%, at least 99%, or 100% identical to SEQ ID NO: 9 or 1055, a CDR2 having an amino acid sequence at least 65%, at least 70%, at least 75%, at least 80%, at least 85%, at least 90%, at least 95%, at least 99%, or 100% identical to SEQ ID NO: 1056 or an amino acid sequence at least 65%, at least 70%, at least 75%, at least 80%, at least 85%, at least 90%, at least 95%, at least 99%, or 100% identical to amino acid sequence GAS, and a CDR3 having an amino acid sequence at least 65%, at least 70%, at least 75%, at least 80%, at least 85%, at least 90%, at least 95%, at least 99%, or 100% identical to SEQ ID NO: 10; VL3 comprises a CDR1 having an amino acid sequence at least 65%, at least 70%, at least 75%, at least 80%, at least 85%, at least 90%, at least 95%, at least 99%, or 100% identical to SEQ ID NO: 145 or 1050, a CDR2 having an amino acid sequence at least 65%, at least 70%, at least 75%, at least 80%, at least 85%, at least 90%, at least 95%, at least 99%, or 100% identical to SEQ ID NO: 1051 or an amino acid sequence at least 65%, at least 70%, at least 75%, at least 80%, at least 85%, at least 90%, at least 95%, at least 99%, or 100% identical to amino acid sequence AAS, and a CDR3 having an amino acid sequence at least 65%, at least 70%, at least 75%, at least 80%, at least 85%, at least 90%, at least 95%, at least 99%, or 100% identical to SEQ ID NO: 146 or 764; VL4 comprises a CDR1 having an amino acid sequence at least 65%, at least 70%, at least 75%, at least 80%, at least 85%, at least 90%, at least 95%, at least 99%, or 100% identical to SEQ ID NO: 152 or 1045, a CDR2 having an amino acid sequence at least 65%, at least 70%, at least 75%, at least 80%, at least 85%, at least 90%, at least 95%, at least 99%, or 100% identical to SEQ ID NO: 1046 or an amino acid sequence at least 65%, at least 70%, at least 75%, at least 80%, at least 85%, at least 90%, at least 95%, at least 99%, or 100% identical to amino acid sequence GAS, and a CDR3 having an amino acid sequence at least 65%, at least 70%, at least 75%, at least 80%, at least 85%, at least 90%, at least 95%, at least 99%, or 100% identical to SEQ ID NO: 153 or 766; VH1 comprises a CDR1 having an amino acid sequence at least 65%, at least 70%, at least 75%, at least 80%, at least 85%, at least 90%, at least 95%, at least 99%, or 100% identical to SEQ ID NO: 148 or 1052, a CDR2 having an amino acid sequence at least 65%, at least 70%, at least 75%, at least 80%, at least 85%, at least 90%, at least 95%, at least 99%, or 100% identical to SEQ ID NO: 149 or 1053, and a CDR3 having an amino acid sequence at least 65%, at least 70%, at least 75%, at least 80%, at least 85%, at least 90%, at least 95%, at least 99%, or 100% identical to SEQ ID NO: 150, 765, or 1054; VH2 comprises a CDR1 having an amino acid sequence at least 65%, at least 70%, at least 75%, at least 80%, at least 85%, at least 90%, at least 95%, at least 99%, or 100% identical to SEQ ID NO: 12 or 1057, a CDR2 having an amino acid sequence at least 65%, at least 70%, at least 75%, at least 80%, at least 85%, at least 90%, at least 95%, at least 99%, or 100% identical to SEQ ID NO: 6 or 1058, and a CDR3 having an amino acid sequence at least 65%, at least 70%, at least 75%, at least 80%, at least 85%, at least 90%, at least 95%, at least 99%, or 100% identical to SEQ ID NO: 13 or 1059; VH3 comprises a CDR1 having an amino acid sequence at least 65%, at least 70%, at least 75%, at least 80%, at least 85%, at least 90%, at least 95%, at least 99%, or 100% identical to SEQ ID NO: 148 or 1052, a CDR2 having an amino acid sequence at least 65%, at least 70%, at least 75%, at least 80%, at least 85%, at least 90%, at least 95%, at least 99%, or 100% identical to SEQ ID NO: 149 or 1053, and a CDR3 having an amino acid sequence at least 65%, at least 70%, at least 75%, at least 80%, at least 85%, at least 90%, at least 95%, at least 99%, or 100% identical to SEQ ID NO: 150, 765, or 1054; and VH4 comprises a CDR1 having an amino acid sequence at least 65%, at least 70%, at least 75%, at least 80%, at least 85%, at least 90%, at least 95%, at least 99%, or 100% identical to SEQ ID NO: 155 or 1047, a CDR2 having an amino acid sequence at least 65%, at least 70%, at least 75%, at least 80%, at least 85%, at least 90%, at least 95%, at least 99%, or 100% identical to SEQ ID NO: 156 or 1048, and a CDR3 having an amino acid sequence at least 65%, at least 70%, at least 75%, at least 80%, at least 85%, at least 90%, at least 95%, at least 99%, or 100% identical to SEQ ID NO: 157, 767, or 1049.

[0160] In some aspects, VL1 comprises an amino acid sequence that is at least 65%, at least 70%, at least 75%, at least 80%, at least 85%, at least 90%, at least 95%, at least 99%, or 100% identical to SEQ ID NO: 147; VL2 comprises an amino acid sequence that is at least 65%, at least 70%, at least 75%, at least 80%, at least 85%, at least 90%, at least 95%, at least 99%, or 100% identical to SEQ ID NO: 11; VL3 comprises an amino acid sequence that is at least 65%, at least 70%, at least 75%, at least 80%, at least 85%, at least 90%, at least 95%, at least 99%, or 100% identical to SEQ ID NO: 147; VL4 comprises an amino acid sequence that is at least 65%, at least 70%, at least 75%, at least 80%, at least 85%, at least 90%, at least 95%, at least 99%, or 100% identical to SEQ ID NO: 154; VH1 comprises an amino acid sequence that is at least 65%, at least 70%, at least 75%, at least 80%, at least 85%, at least 90%, at least 95%, at least 99%, or 100% identical to SEQ ID NO: 151; VH2 comprises an amino acid sequence that is at least 65%, at least 70%, at least 75%, at least 80%, at least 85%, at least 90%, at least 95%, at least 99%, or 100% identical to SEQ ID NO: 14; VH3 comprises an amino acid sequence that is at least 65%, at least 70%, at least 75%, at least 80%, at least 85%, at least 90%, at least 95%, at least 99%, or 100% identical to SEQ ID NO: 151; and VH4 comprises an amino acid sequence that is at least 65%, at least 70%, at least 75%, at least 80%, at least 85%, at least 90%, at least 95%, at least 99%, or 100% identical to SEQ ID NO: 158.

[0161] In some aspects, VL1 comprises a CDR1 having an amino acid sequence at least 65%, at least 70%, at least 75%, at least 80%, at least 85%, at least 90%, at least 95%, at least 99%, or 100% identical to SEQ ID NO: 145 or 1050, a CDR2 having an amino acid sequence at least 65%, at least 70%, at least 75%, at least 80%, at least 85%, at least 90%, at least 95%, at least 99%, or 100% identical to SEQ ID NO: 1051 or an amino acid sequence at least 65%, at least 70%, at least 75%, at least 80%, at least 85%, at least 90%, at least 95%, at least 99%, or 100% identical to amino acid sequence AAS, and a CDR3 having an amino acid sequence at least 65%, at least 70%, at least 75%, at least 80%, at least 85%, at least 90%, at least 95%, at least 99%, or 100% identical to SEQ ID NO: 146 or 764; VL2 comprises a CDR1 having an amino acid sequence at least 65%, at least 70%, at least 75%, at least 80%, at least 85%, at least 90%, at least 95%, at least 99%, or 100% identical to SEQ ID NO: 9 or 1055, a CDR2 having an amino acid sequence at least 65%, at least 70%, at least 75%, at least 80%, at least 85%, at least 90%, at least 95%, at least 99%, or 100% identical to SEQ ID NO: 1056 or an amino acid sequence at least 65%, at least 70%, at least 75%, at least 80%, at least 85%, at least 90%, at least 95%, at least 99%, or 100% identical to amino acid sequence GAS, and a CDR3 having an amino acid sequence at least 65%, at least 70%, at least 75%, at least 80%, at least 85%, at least 90%, at least 95%, at least 99%, or 100% identical to SEQ ID NO: 10; VL3 comprises a CDR1 having an amino acid sequence at least 65%, at least 70%, at least 75%, at least 80%, at least 85%, at least 90%, at least 95%, at least 99%, or 100% identical to SEQ ID NO: 152 or 1045, a CDR2 having an amino acid sequence at least 65%, at least 70%, at least 75%, at least 80%, at least 85%, at least 90%, at least 95%, at least 99%, or 100% identical to SEQ ID NO: 1046 or an amino acid sequence at least 65%, at least 70%, at least 75%, at least 80%, at least 85%, at least 90%, at least 95%, at least 99%, or 100% identical to amino acid sequence GAS, and a CDR3 having an amino acid sequence at least 65%, at least 70%, at least 75%, at least 80%, at least 85%, at least 90%, at least 95%, at least 99%, or 100% identical to SEQ ID NO: 153 or 766; VL4 comprises a CDR1 having an amino acid sequence at least 65%, at least 70%, at least 75%, at least 80%, at least 85%, at least 90%, at least 95%, at least 99%, or 100% identical to SEQ ID NO: 145 or 1050, a CDR2 having an amino acid sequence at least 65%, at least 70%, at least 75%, at least 80%, at least 85%, at least 90%, at least 95%, at least 99%, or 100% identical to SEQ ID NO: 1051 or an amino acid sequence at least 65%, at least 70%, at least 75%, at least 80%, at least 85%, at least 90%, at least 95%, at least 99%, or 100% identical to amino acid sequence AAS, and a CDR3 having an amino acid sequence at least 65%, at least 70%, at least 75%, at least 80%, at least 85%, at least 90%, at least 95%, at least 99%, or 100% identical to SEQ ID NO: 146 or 764; VH1 comprises a CDR1 having an amino acid sequence at least 65%, at least 70%, at least 75%, at least 80%, at least 85%, at least 90%, at least 95%, at least 99%, or 100% identical to SEQ ID NO: 148 or 1052, a CDR2 having an amino acid sequence at least 65%, at least 70%, at least 75%, at least 80%, at least 85%, at least 90%, at least 95%, at least 99%, or 100% identical to SEQ ID NO: 149 or 1053, and a CDR3 having an amino acid sequence at least 65%, at least 70%, at least 75%, at least 80%, at least 85%, at least 90%, at least 95%, at least 99%, or 100% identical to SEQ ID NO: 150, 765, or 1054; VH2 comprises a CDR1 having an amino acid sequence at least 65%, at least 70%, at least 75%, at least 80%, at least 85%, at least 90%, at least 95%, at least 99%, or 100% identical to SEQ ID NO: 12 or 1057, a CDR2 having an amino acid sequence at least 65%, at least 70%, at least 75%, at least 80%, at least 85%, at least 90%, at least 95%, at least 99%, or 100% identical to SEQ ID NO: 6 or 1058, and a CDR3 having an amino acid sequence at least 65%, at least 70%, at least 75%, at least 80%, at least 85%, at least 90%, at least 95%, at least 99%, or 100% identical to SEQ ID NO: 13 or 1059; VH3 comprises a CDR1 having an amino acid sequence at least 65%, at least 70%, at least 75%, at least 80%, at least 85%, at least 90%, at least 95%, at least 99%, or 100% identical to SEQ ID NO: 155 or 1047, a CDR2 having an amino acid sequence at least 65%, at least 70%, at least 75%, at least 80%, at least 85%, at least 90%, at least 95%, at least 99%, or 100% identical to SEQ ID NO: 156 or 1048, and a CDR3 having an amino acid sequence at least 65%, at least 70%, at least 75%, at least 80%, at least 85%, at least 90%, at least 95%, at least 99%, or 100% identical to SEQ ID NO: 157, 767, or 1049; and VH4 comprises a CDR1 having an amino acid sequence at least 65%, at least 70%, at least 75%, at least 80%, at least 85%, at least 90%, at least 95%, at least 99%, or 100% identical to SEQ ID NO: 148 or 1052, a CDR2 having an amino acid sequence at least 65%, at least 70%, at least 75%, at least 80%, at least 85%, at least 90%, at least 95%, at least 99%, or 100% identical to SEQ ID NO: 149 or 1053, and a CDR3 having an amino acid sequence at least 65%, at least 70%, at least 75%, at least 80%, at least 85%, at least 90%, at least 95%, at least 99%, or 100% identical to SEQ ID NO: 150, 765, or 1054.

[0162] In some aspects, VL1 comprises an amino acid sequence that is at least 65%, at least 70%, at least 75%, at least 80%, at least 85%, at least 90%, at least 95%, at least 99%, or 100% identical to SEQ ID NO: 147; VL2 comprises an amino acid sequence that is at least 65%, at least 70%, at least 75%, at least 80%, at least 85%, at least 90%, at least 95%, at least 99%, or 100% identical to SEQ ID NO: 11; VL3 comprises an amino acid sequence that is at least 65%, at least 70%, at least 75%, at least 80%, at least 85%, at least 90%, at least 95%, at least 99%, or 100% identical to SEQ ID NO: 154; VL4 comprises an amino acid sequence that is at least 65%, at least 70%, at least 75%, at least 80%, at least 85%, at least 90%, at least 95%, at least 99%, or 100% identical to SEQ ID NO: 147; VH1 comprises an amino acid sequence that is at least 65%, at least 70%, at least 75%, at least 80%, at least 85%, at least 90%, at least 95%, at least 99%, or 100% identical to SEQ ID NO: 151; VH2 comprises an amino acid sequence that is at least 65%, at least 70%, at least 75%, at least 80%, at least 85%, at least 90%, at least 95%, at least 99%, or 100% identical to SEQ ID NO: 14; VH3 comprises an amino acid sequence that is at least 65%, at least 70%, at least 75%, at least 80%, at least 85%, at least 90%, at least 95%, at least 99%, or 100% identical to SEQ ID NO: 158; and VH4 comprises an amino acid sequence that is at least 65%, at least 70%, at least 75%, at least 80%, at least 85%, at least 90%, at least 95%, at least 99%, or 100% identical to SEQ ID NO: 151.

[0163] In some aspects, VL1 comprises a CDR1 having an amino acid sequence at least 65%, at least 70%, at least 75%, at least 80%, at least 85%, at least 90%, at least 95%, at least 99%, or 100% identical to SEQ ID NO: 172 or 1060, a CDR2 having an amino acid sequence at least 65%, at least 70%, at least 75%, at least 80%, at least 85%, at least 90%, at least 95%, at least 99%, or 100% identical to SEQ ID NO: 1061 or an amino acid sequence at least 65%, at least 70%, at least 75%, at least 80%, at least 85%, at least 90%, at least 95%, at least 99%, or 100% identical to amino acid sequence DAS, and a CDR3 having an amino acid sequence at least 65%, at least 70%, at least 75%, at least 80%, at least 85%, at least 90%, at least 95%, at least 99%, or 100% identical to SEQ ID NO: 173 or 792; VL2 comprises a CDR1 having an amino acid sequence at least 65%, at least 70%, at least 75%, at least 80%, at least 85%, at least 90%, at least 95%, at least 99%, or 100% identical to SEQ ID NO: 145 or 1050, a CDR2 having an amino acid sequence at least 65%, at least 70%, at least 75%, at least 80%, at least 85%, at least 90%, at least 95%, at least 99%, or 100% identical to SEQ ID NO: 1051 or an amino acid sequence at least 65%, at least 70%, at least 75%, at least 80%, at least 85%, at least 90%, at least 95%, at least 99%, or 100% identical to amino acid sequence AAS, and a CDR3 having an amino acid sequence at least 65%, at least 70%, at least 75%, at least 80%, at least 85%, at least 90%, at least 95%, at least 99%, or 100% identical to SEQ ID NO: 146 or 764; VL3 comprises a CDR1 having an amino acid sequence at least 65%, at least 70%, at least 75%, at least 80%, at least 85%, at least 90%, at least 95%, at least 99%, or 100% identical to SEQ ID NO: 172 or 1060, a CDR2 having an amino acid sequence at least 65%, at least 70%, at least 75%, at least 80%, at least 85%, at least 90%, at least 95%, at least 99%, or 100% identical to SEQ ID NO: 1061 or an amino acid sequence at least 65%, at least 70%, at least 75%, at least 80%, at least 85%, at least 90%, at least 95%, at least 99%, or 100% identical to amino acid sequence DAS, and a CDR3 having an amino acid sequence at least 65%, at least 70%, at least 75%, at least 80%, at least 85%, at least 90%, at least 95%, at least 99%, or 100% identical to SEQ ID NO: 173 or 792; VL4 comprises a CDR1 having an amino acid sequence at least 65%, at least 70%, at least 75%, at least 80%, at least 85%, at least 90%, at least 95%, at least 99%, or 100% identical to SEQ ID NO: 145 or 1050, a CDR2 having an amino acid sequence at least 65%, at least 70%, at least 75%, at least 80%, at least 85%, at least 90%, at least 95%, at least 99%, or 100% identical to SEQ ID NO: 1051 or an amino acid sequence at least 65%, at least 70%, at least 75%, at least 80%, at least 85%, at least 90%, at least 95%, at least 99%, or 100% identical to amino acid sequence AAS, and a CDR3 having an amino acid sequence at least 65%, at least 70%, at least 75%, at least 80%, at least 85%, at least 90%, at least 95%, at least 99%, or 100% identical to SEQ ID NO: 146 or 764; VH1 comprises a CDR1 having an amino acid sequence at least 65%, at least 70%, at least 75%, at least 80%, at least 85%, at least 90%, at least 95%, at least 99%, or 100% identical to SEQ ID NO: 175 or 1062, a CDR2 having an amino acid sequence at least 65%, at least 70%, at least 75%, at least 80%, at least 85%, at least 90%, at least 95%, at least 99%, or 100% identical to SEQ ID NO: 176 or 1063, and a CDR3 having an amino acid sequence at least 65%, at least 70%, at least 75%, at least 80%, at least 85%, at least 90%, at least 95%, at least 99%, or 100% identical to SEQ ID NO: 177, 793, or 1064; VH2 comprises a CDR1 having an amino acid sequence at least 65%, at least 70%, at least 75%, at least 80%, at least 85%, at least 90%, at least 95%, at least 99%, or 100% identical to SEQ ID NO: 148 or 1052, a CDR2 having an amino acid sequence at least 65%, at least 70%, at least 75%, at least 80%, at least 85%, at least 90%, at least 95%, at least 99%, or 100% identical to SEQ ID NO: 149 or 1053, and a CDR3 having an amino acid sequence at least 65%, at least 70%, at least 75%, at least 80%, at least 85%, at least 90%, at least 95%, at least 99%, or 100% identical to SEQ ID NO: 150, 765, or 1054; VH3 comprises a CDR1 having an amino acid sequence at least 65%, at least 70%, at least 75%, at least 80%, at least 85%, at least 90%, at least 95%, at least 99%, or 100% identical to SEQ ID NO: 175 or 1062, a CDR2 having an amino acid sequence at least 65%, at least 70%, at least 75%, at least 80%, at least 85%, at least 90%, at least 95%, at least 99%, or 100% identical to SEQ ID NO: 176 or 1063, and a CDR3 having an amino acid sequence at least 65%, at least 70%, at least 75%, at least 80%, at least 85%, at least 90%, at least 95%, at least 99%, or 100% identical to SEQ ID NO: 177, 793, or 1064; and VH4 comprises a CDR1 having an amino acid sequence at least 65%, at least 70%, at least 75%, at least 80%, at least 85%, at least 90%, at least 95%, at least 99%, or 100% identical to SEQ ID NO: 148 or 1052, a CDR2 having an amino acid sequence at least 65%, at least 70%, at least 75%, at least 80%, at least 85%, at least 90%, at least 95%, at least 99%, or 100% identical to SEQ ID NO: 149 or 1053, and a CDR3 having an amino acid sequence at least 65%, at least 70%, at least 75%, at least 80%, at least 85%, at least 90%, at least 95%, at least 99%, or 100% identical to SEQ ID NO: 150, 765, or 1054.

[0164] In some aspects, VL1 comprises an amino acid sequence that is at least 65%, at least 70%, at least 75%, at least 80%, at least 85%, at least 90%, at least 95%, at least 99%, or 100% identical to SEQ ID NO: 174; VL2 comprises an amino acid sequence that is at least 65%, at least 70%, at least 75%, at least 80%, at least 85%, at least 90%, at least 95%, at least 99%, or 100% identical to SEQ ID NO: 147; VL3 comprises an amino acid sequence that is at least 65%, at least 70%, at least 75%, at least 80%, at least 85%, at least 90%, at least 95%, at least 99%, or 100% identical to SEQ ID NO: 174; VL4 comprises an amino acid sequence that is at least 65%, at least 70%, at least 75%, at least 80%, at least 85%, at least 90%, at least 95%, at least 99%, or 100% identical to SEQ ID NO: 147; VH1 comprises an amino acid sequence that is at least 65%, at least 70%, at least 75%, at least 80%, at least 85%, at least 90%, at least 95%, at least 99%, or 100% identical to SEQ ID NO: 178; VH2 comprises an amino acid sequence that is at least 65%, at least 70%, at least 75%, at least 80%, at least 85%, at least 90%, at least 95%, at least 99%, or 100% identical to SEQ ID NO: 151; VH3 comprises an amino acid sequence that is at least 65%, at least 70%, at least 75%, at least 80%, at least 85%, at least 90%, at least 95%, at least 99%, or 100% identical to SEQ ID NO: 178; and VH4 comprises an amino acid sequence that is at least 65%, at least 70%, at least 75%, at least 80%, at least 85%, at least 90%, at least 95%, at least 99%, or 100% identical to SEQ ID NO: 151.

[0165] In some aspects, VL1 comprises a CDR1 having an amino acid sequence at least 65%, at least 70%, at least 75%, at least 80%, at least 85%, at least 90%, at least 95%, at least 99%, or 100% identical to SEQ ID NO: 172 or 1060, a CDR2 having an amino acid sequence at least 65%, at least 70%, at least 75%, at least 80%, at least 85%, at least 90%, at least 95%, at least 99%, or 100% identical to SEQ ID NO: 1061 or an amino acid sequence at least 65%, at least 70%, at least 75%, at least 80%, at least 85%, at least 90%, at least 95%, at least 99%, or 100% identical to amino acid sequence DAS, and a CDR3 having an amino acid sequence at least 65%, at least 70%, at least 75%, at least 80%, at least 85%, at least 90%, at least 95%, at least 99%, or 100% identical to SEQ ID NO: 173 or 792; VL2 comprises a CDR1 having an amino acid sequence at least 65%, at least 70%, at least 75%, at least 80%, at least 85%, at least 90%, at least 95%, at least 99%, or 100% identical to SEQ ID NO: 145 or 1050, a CDR2 having an amino acid sequence at least 65%, at least 70%, at least 75%, at least 80%, at least 85%, at least 90%, at least 95%, at least 99%, or 100% identical to SEQ ID NO: 1051 or an amino acid sequence at least 65%, at least 70%, at least 75%, at least 80%, at least 85%, at least 90%, at least 95%, at least 99%, or 100% identical to amino acid sequence AAS, and a CDR3 having an amino acid sequence at least 65%, at least 70%, at least 75%, at least 80%, at least 85%, at least 90%, at least 95%, at least 99%, or 100% identical to SEQ ID NO: 146 or 764; VL3 comprises a CDR1 having an amino acid sequence at least 65%, at least 70%, at least 75%, at least 80%, at least 85%, at least 90%, at least 95%, at least 99%, or 100% identical to SEQ ID NO: 145 or 1050, a CDR2 having an amino acid sequence at least 65%, at least 70%, at least 75%, at least 80%, at least 85%, at least 90%, at least 95%, at least 99%, or 100% identical to SEQ ID NO: 1051 or an amino acid sequence at least 65%, at least 70%, at least 75%, at least 80%, at least 85%, at least 90%, at least 95%, at least 99%, or 100% identical to amino acid sequence AAS, and a CDR3 having an amino acid sequence at least 65%, at least 70%, at least 75%, at least 80%, at least 85%, at least 90%, at least 95%, at least 99%, or 100% identical to SEQ ID NO: 146 or 764; VL4 comprises a CDR1 having an amino acid sequence at least 65%, at least 70%, at least 75%, at least 80%, at least 85%, at least 90%, at least 95%, at least 99%, or 100% identical to SEQ ID NO: 152 or 1045, a CDR2 having an amino acid sequence at least 65%, at least 70%, at least 75%, at least 80%, at least 85%, at least 90%, at least 95%, at least 99%, or 100% identical to SEQ ID NO: 1046 or an amino acid sequence at least 65%, at least 70%, at least 75%, at least 80%, at least 85%, at least 90%, at least 95%, at least 99%, or 100% identical to amino acid sequence GAS, and a CDR3 having an amino acid sequence at least 65%, at least 70%, at least 75%, at least 80%, at least 85%, at least 90%, at least 95%, at least 99%, or 100% identical to SEQ ID NO: 153 or 766; VH1 comprises a CDR1 having an amino acid sequence at least 65%, at least 70%, at least 75%, at least 80%, at least 85%, at least 90%, at least 95%, at least 99%, or 100% identical to SEQ ID NO: 175 or 1062, a CDR2 having an amino acid sequence at least 65%, at least 70%, at least 75%, at least 80%, at least 85%, at least 90%, at least 95%, at least 99%, or 100% identical to SEQ ID NO: 176 or 1063, and a CDR3 having an amino acid sequence at least 65%, at least 70%, at least 75%, at least 80%, at least 85%, at least 90%, at least 95%, at least 99%, or 100% identical to SEQ ID NO: 177, 793, or 1064; VH2 comprises a CDR1 having an amino acid sequence at least 65%, at least 70%, at least 75%, at least 80%, at least 85%, at least 90%, at least 95%, at least 99%, or 100% identical to SEQ ID NO: 148 or 1052, a CDR2 having an amino acid sequence at least 65%, at least 70%, at least 75%, at least 80%, at least 85%, at least 90%, at least 95%, at least 99%, or 100% identical to SEQ ID NO: 149 or 1053, and a CDR3 having an amino acid sequence at least 65%, at least 70%, at least 75%, at least 80%, at least 85%, at least 90%, at least 95%, at least 99%, or 100% identical to SEQ ID NO: 150, 765, or 1054; VH3 comprises a CDR1 having an amino acid sequence at least 65%, at least 70%, at least 75%, at least 80%, at least 85%, at least 90%, at least 95%, at least 99%, or 100% identical to SEQ ID NO: 148 or 1052, a CDR2 having an amino acid sequence at least 65%, at least 70%, at least 75%, at least 80%, at least 85%, at least 90%, at least 95%, at least 99%, or 100% identical to SEQ ID NO: 149 or 1053, and a CDR3 having an amino acid sequence at least 65%, at least 70%, at least 75%, at least 80%, at least 85%, at least 90%, at least 95%, at least 99%, or 100% identical to SEQ ID NO: 150, 765, or 1054; and VH4 comprises a CDR1 having an amino acid sequence at least 65%, at least 70%, at least 75%, at least 80%, at least 85%, at least 90%, at least 95%, at least 99%, or 100% identical to SEQ ID NO: 155 or 1047, a CDR2 having an amino acid sequence at least 65%, at least 70%, at least 75%, at least 80%, at least 85%, at least 90%, at least 95%, at least 99%, or 100% identical to SEQ ID NO: 156 or 1048, and a CDR3 having an amino acid sequence at least 65%, at least 70%, at least 75%, at least 80%, at least 85%, at least 90%, at least 95%, at least 99%, or 100% identical to SEQ ID NO: 157, 767, or 1049.

[0166] In some aspects, VL1 comprises an amino acid sequence that is at least 65%, at least 70%, at least 75%, at least 80%, at least 85%, at least 90%, at least 95%, at least 99%, or 100% identical to SEQ ID NO: 174; VL2 comprises an amino acid sequence that is at least 65%, at least 70%, at least 75%, at least 80%, at least 85%, at least 90%, at least 95%, at least 99%, or 100% identical to SEQ ID NO: 147; VL3 comprises an amino acid sequence that is at least 65%, at least 70%, at least 75%, at least 80%, at least 85%, at least 90%, at least 95%, at least 99%, or 100% identical to SEQ ID NO: 147; VL4 comprises an amino acid sequence that is at least 65%, at least 70%, at least 75%, at least 80%, at least 85%, at least 90%, at least 95%, at least 99%, or 100% identical to SEQ ID NO: 154; VH1 comprises an amino acid sequence that is at least 65%, at least 70%, at least 75%, at least 80%, at least 85%, at least 90%, at least 95%, at least 99%, or 100% identical to SEQ ID NO: 178; VH2 comprises an amino acid sequence that is at least 65%, at least 70%, at least 75%, at least 80%, at least 85%, at least 90%, at least 95%, at least 99%, or 100% identical to SEQ ID NO: 151; VH3 comprises an amino acid sequence that is at least 65%, at least 70%, at least 75%, at least 80%, at least 85%, at least 90%, at least 95%, at least 99%, or 100% identical to SEQ ID NO: 151; and VH4 comprises an amino acid sequence that is at least 65%, at least 70%, at least 75%, at least 80%, at least 85%, at least 90%, at least 95%, at least 99%, or 100% identical to SEQ ID NO: 158.

[0167] In some aspects, VL1 comprises a CDR1 having an amino acid sequence at least 65%, at least 70%, at least 75%, at least 80%, at least 85%, at least 90%, at least 95%, at least 99%, or 100% identical to SEQ ID NO: 145 or 1050, a CDR2 having an amino acid sequence at least 65%, at least 70%, at least 75%, at least 80%, at least 85%, at least 90%, at least 95%, at least 99%, or 100% identical to SEQ ID NO: 1051 or an amino acid sequence at least 65%, at least 70%, at least 75%, at least 80%, at least 85%, at least 90%, at least 95%, at least 99%, or 100% identical to amino acid sequence AAS, and a CDR3 having an amino acid sequence at least 65%, at least 70%, at least 75%, at least 80%, at least 85%, at least 90%, at least 95%, at least 99%, or 100% identical to SEQ ID NO: 146 or 764; VL2 comprises a CDR1 having an amino acid sequence at least 65%, at least 70%, at least 75%, at least 80%, at least 85%, at least 90%, at least 95%, at least 99%, or 100% identical to SEQ ID NO: 172 or 1060, a CDR2 having an amino acid sequence at least 65%, at least 70%, at least 75%, at least 80%, at least 85%, at least 90%, at least 95%, at least 99%, or 100% identical to SEQ ID NO: 1061 or an amino acid sequence at least 65%, at least 70%, at least 75%, at least 80%, at least 85%, at least 90%, at least 95%, at least 99%, or 100% identical to amino acid sequence DAS, and a CDR3 having an amino acid sequence at least 65%, at least 70%, at least 75%, at least 80%, at least 85%, at least 90%, at least 95%, at least 99%, or 100% identical to SEQ ID NO: 173 or 792; VL3 comprises a CDR1 having an amino acid sequence at least 65%, at least 70%, at least 75%, at least 80%, at least 85%, at least 90%, at least 95%, at least 99%, or 100% identical to SEQ ID NO: 65 or 627, a CDR2 having an amino acid sequence at least 65%, at least 70%, at least 75%, at least 80%, at least 85%, at least 90%, at least 95%, at least 99%, or 100% identical to SEQ ID NO: 628 or an amino acid sequence at least 65%, at least 70%, at least 75%, at least 80%, at least 85%, at least 90%, at least 95%, at least 99%, or 100% identical to amino acid sequence SDS, and a CDR3 having an amino acid sequence at least 65%, at least 70%, at least 75%, at least 80%, at least 85%, at least 90%, at least 95%, at least 99%, or 100% identical to SEQ ID NO: 66; VL4 comprises a CDR1 having an amino acid sequence at least 65%, at least 70%, at least 75%, at least 80%, at least 85%, at least 90%, at least 95%, at least 99%, or 100% identical to SEQ ID NO: 152 or 1045, a CDR2 having an amino acid sequence at least 65%, at least 70%, at least 75%, at least 80%, at least 85%, at least 90%, at least 95%, at least 99%, or 100% identical to SEQ ID NO: 1046 or an amino acid sequence at least 65%, at least 70%, at least 75%, at least 80%, at least 85%, at least 90%, at least 95%, at least 99%, or 100% identical to amino acid sequence GAS, and a CDR3 having an amino acid sequence at least 65%, at least 70%, at least 75%, at least 80%, at least 85%, at least 90%, at least 95%, at least 99%, or 100% identical to SEQ ID NO: 153 or 766; VH1 comprises a CDR1 having an amino acid sequence at least 65%, at least 70%, at least 75%, at least 80%, at least 85%, at least 90%, at least 95%, at least 99%, or 100% identical to SEQ ID NO: 148 or 1052, a CDR2 having an amino acid sequence at least 65%, at least 70%, at least 75%, at least 80%, at least 85%, at least 90%, at least 95%, at least 99%, or 100% identical to SEQ ID NO: 149 or 1053, and a CDR3 having an amino acid sequence at least 65%, at least 70%, at least 75%, at least 80%, at least 85%, at least 90%, at least 95%, at least 99%, or 100% identical to SEQ ID NO: 150, 765, or 1054; VH2 comprises a CDR1 having an amino acid sequence at least 65%, at least 70%, at least 75%, at least 80%, at least 85%, at least 90%, at least 95%, at least 99%, or 100% identical to SEQ ID NO: 175 or 1062, a CDR2 having an amino acid sequence at least 65%, at least 70%, at least 75%, at least 80%, at least 85%, at least 90%, at least 95%, at least 99%, or 100% identical to SEQ ID NO: 176 or 1063, and a CDR3 having an amino acid sequence at least 65%, at least 70%, at least 75%, at least 80%, at least 85%, at least 90%, at least 95%, at least 99%, or 100% identical to SEQ ID NO: 177, 793, or 1064; VH3 comprises a CDR1 having an amino acid sequence at least 65%, at least 70%, at least 75%, at least 80%, at least 85%, at least 90%, at least 95%, at least 99%, or 100% identical to SEQ ID NO: 68 or 629, a CDR2 having an amino acid sequence at least 65%, at least 70%, at least 75%, at least 80%, at least 85%, at least 90%, at least 95%, at least 99%, or 100% identical to SEQ ID NO: 69 or 630, and a CDR3 having an amino acid sequence at least 65%, at least 70%, at least 75%, at least 80%, at least 85%, at least 90%, at least 95%, at least 99%, or 100% identical to SEQ ID NO: 70 or 631; and VH4 comprises a CDR1 having an amino acid sequence at least 65%, at least 70%, at least 75%, at least 80%, at least 85%, at least 90%, at least 95%, at least 99%, or 100% identical to SEQ ID NO: 155 or 1047, a CDR2 having an amino acid sequence at least 65%, at least 70%, at least 75%, at least 80%, at least 85%, at least 90%, at least 95%, at least 99%, or 100% identical to SEQ ID NO: 156 or 1048, and a CDR3 having an amino acid sequence at least 65%, at least 70%, at least 75%, at least 80%, at least 85%, at least 90%, at least 95%, at least 99%, or 100% identical to SEQ ID NO: 157, 767, or 1049.

[0168] In some aspects, VL1 comprises an amino acid sequence that is at least 65%, at least 70%, at least 75%, at least 80%, at least 85%, at least 90%, at least 95%, at least 99%, or 100% identical to SEQ ID NO: 147; VL2 comprises an amino acid sequence that is at least 65%, at least 70%, at least 75%, at least 80%, at least 85%, at least 90%, at least 95%, at least 99%, or 100% identical to SEQ ID NO: 174; VL3 comprises an amino acid sequence that is at least 65%, at least 70%, at least 75%, at least 80%, at least 85%, at least 90%, at least 95%, at least 99%, or 100% identical to SEQ ID NO: 67; VL4 comprises an amino acid sequence that is at least 65%, at least 70%, at least 75%, at least 80%, at least 85%, at least 90%, at least 95%, at least 99%, or 100% identical to SEQ ID NO: 154; VH1 comprises an amino acid sequence that is at least 65%, at least 70%, at least 75%, at least 80%, at least 85%, at least 90%, at least 95%, at least 99%, or 100% identical to SEQ ID NO: 151; VH2 comprises an amino acid sequence that is at least 65%, at least 70%, at least 75%, at least 80%, at least 85%, at least 90%, at least 95%, at least 99%, or 100% identical to SEQ ID NO: 178; VH3 comprises an amino acid sequence that is at least 65%, at least 70%, at least 75%, at least 80%, at least 85%, at least 90%, at least 95%, at least 99%, or 100% identical to SEQ ID NO: 71 or 626; and VH4 comprises an amino acid sequence that is at least 65%, at least 70%, at least 75%, at least 80%, at least 85%, at least 90%, at least 95%, at least 99%, or 100% identical to SEQ ID NO: 158.

[0169] In some aspects, VL1 comprises a CDR1 having an amino acid sequence at least 65%, at least 70%, at least 75%, at least 80%, at least 85%, at least 90%, at least 95%, at least 99%, or 100% identical to SEQ ID NO: 145 or 1050, a CDR2 having an amino acid sequence at least 65%, at least 70%, at least 75%, at least 80%, at least 85%, at least 90%, at least 95%, at least 99%, or 100% identical to SEQ ID NO: 1051 or an amino acid sequence at least 65%, at least 70%, at least 75%, at least 80%, at least 85%, at least 90%, at least 95%, at least 99%, or 100% identical to amino acid sequence AAS, and a CDR3 having an amino acid sequence at least 65%, at least 70%, at least 75%, at least 80%, at least 85%, at least 90%, at least 95%, at least 99%, or 100% identical to SEQ ID NO: 146 or 764; VL2 comprises a CDR1 having an amino acid sequence at least 65%, at least 70%, at least 75%, at least 80%, at least 85%, at least 90%, at least 95%, at least 99%, or 100% identical to SEQ ID NO: 172 or 1060, a CDR2 having an amino acid sequence at least 65%, at least 70%, at least 75%, at least 80%, at least 85%, at least 90%, at least 95%, at least 99%, or 100% identical to SEQ ID NO: 1061 or an amino acid sequence at least 65%, at least 70%, at least 75%, at least 80%, at least 85%, at least 90%, at least 95%, at least 99%, or 100% identical to amino acid sequence DAS, and a CDR3 having an amino acid sequence at least 65%, at least 70%, at least 75%, at least 80%, at least 85%, at least 90%, at least 95%, at least 99%, or 100% identical to SEQ ID NO: 173 or 792; VL3 comprises a CDR1 having an amino acid sequence at least 65%, at least 70%, at least 75%, at least 80%, at least 85%, at least 90%, at least 95%, at least 99%, or 100% identical to SEQ ID NO: 138 or 1065, a CDR2 having an amino acid sequence at least 65%, at least 70%, at least 75%, at least 80%, at least 85%, at least 90%, at least 95%, at least 99%, or 100% identical to SEQ ID NO: 1061 or an amino acid sequence at least 65%, at least 70%, at least 75%, at least 80%, at least 85%, at least 90%, at least 95%, at least 99%, or 100% identical to amino acid sequence DAS, and a CDR3 having an amino acid sequence at least 65%, at least 70%, at least 75%, at least 80%, at least 85%, at least 90%, at least 95%, at least 99%, or 100% identical to SEQ ID NO: 139, 856, or 1066; VL4 comprises a CDR1 having an amino acid sequence at least 65%, at least 70%, at least 75%, at least 80%, at least 85%, at least 90%, at least 95%, at least 99%, or 100% identical to SEQ ID NO: 152 or 1045, a CDR2 having an amino acid sequence at least 65%, at least 70%, at least 75%, at least 80%, at least 85%, at least 90%, at least 95%, at least 99%, or 100% identical to SEQ ID NO: 1046 or an amino acid sequence at least 65%, at least 70%, at least 75%, at least 80%, at least 85%, at least 90%, at least 95%, at least 99%, or 100% identical to amino acid sequence GAS, and a CDR3 having an amino acid sequence at least 65%, at least 70%, at least 75%, at least 80%, at least 85%, at least 90%, at least 95%, at least 99%, or 100% identical to SEQ ID NO: 153 or 766; VH1 comprises a CDR1 having an amino acid sequence at least 65%, at least 70%, at least 75%, at least 80%, at least 85%, at least 90%, at least 95%, at least 99%, or 100% identical to SEQ ID NO: 148 or 1052, a CDR2 having an amino acid sequence at least 65%, at least 70%, at least 75%, at least 80%, at least 85%, at least 90%, at least 95%, at least 99%, or 100% identical to SEQ ID NO: 149 or 1053, and a CDR3 having an amino acid sequence at least 65%, at least 70%, at least 75%, at least 80%, at least 85%, at least 90%, at least 95%, at least 99%, or 100% identical to SEQ ID NO: 150, 765, or 1054; VH2 comprises a CDR1 having an amino acid sequence at least 65%, at least 70%, at least 75%, at least 80%, at least 85%, at least 90%, at least 95%, at least 99%, or 100% identical to SEQ ID NO: 175 or 1062, a CDR2 having an amino acid sequence at least 65%, at least 70%, at least 75%, at least 80%, at least 85%, at least 90%, at least 95%, at least 99%, or 100% identical to SEQ ID NO: 176 or 1063, and a CDR3 having an amino acid sequence at least 65%, at least 70%, at least 75%, at least 80%, at least 85%, at least 90%, at least 95%, at least 99%, or 100% identical to SEQ ID NO: 177, 793, or 1064; VH3 comprises a CDR1 having an amino acid sequence at least 65%, at least 70%, at least 75%, at least 80%, at least 85%, at least 90%, at least 95%, at least 99%, or 100% identical to SEQ ID NO: 141 or 1067, a CDR2 having an amino acid sequence at least 65%, at least 70%, at least 75%, at least 80%, at least 85%, at least 90%, at least 95%, at least 99%, or 100% identical to SEQ ID NO: 142 or 1068, and a CDR3 having an amino acid sequence at least 65%, at least 70%, at least 75%, at least 80%, at least 85%, at least 90%, at least 95%, at least 99%, or 100% identical to SEQ ID NO: 143, 857, or 1069; and VH4 comprises a CDR1 having an amino acid sequence at least 65%, at least 70%, at least 75%, at least 80%, at least 85%, at least 90%, at least 95%, at least 99%, or 100% identical to SEQ ID NO: 155 or 1047, a CDR2 having an amino acid sequence at least 65%, at least 70%, at least 75%, at least 80%, at least 85%, at least 90%, at least 95%, at least 99%, or 100% identical to SEQ ID NO: 156 or 1048, and a CDR3 having an amino acid sequence at least 65%, at least 70%, at least 75%, at least 80%, at least 85%, at least 90%, at least 95%, at least 99%, or 100% identical to SEQ ID NO: 157, 767, or 1049.

[0170] In some aspects, VL1 comprises an amino acid sequence that is at least 65%, at least 70%, at least 75%, at least 80%, at least 85%, at least 90%, at least 95%, at least 99%, or 100% identical to SEQ ID NO: 147; VL2 comprises an amino acid sequence that is at least 65%, at least 70%, at least 75%, at least 80%, at least 85%, at least 90%, at least 95%, at least 99%, or 100% identical to SEQ ID NO: 174; VL3 comprises an amino acid sequence that is at least 65%, at least 70%, at least 75%, at least 80%, at least 85%, at least 90%, at least 95%, at least 99%, or 100% identical to SEQ ID NO: 140; VL4 comprises an amino acid sequence that is at least 65%, at least 70%, at least 75%, at least 80%, at least 85%, at least 90%, at least 95%, at least 99%, or 100% identical to SEQ ID NO: 154; VH1 comprises an amino acid sequence that is at least 65%, at least 70%, at least 75%, at least 80%, at least 85%, at least 90%, at least 95%, at least 99%, or 100% identical to SEQ ID NO: 151; VH2 comprises an amino acid sequence that is at least 65%, at least 70%, at least 75%, at least 80%, at least 85%, at least 90%, at least 95%, at least 99%, or 100% identical to SEQ ID NO: 178; VH3 comprises an amino acid sequence that is at least 65%, at least 70%, at least 75%, at least 80%, at least 85%, at least 90%, at least 95%, at least 99%, or 100% identical to SEQ ID NO: 144; and VH4 comprises an amino acid sequence that is at least 65%, at least 70%, at least 75%, at least 80%, at least 85%, at least 90%, at least 95%, at least 99%, or 100% identical to SEQ ID NO: 158.

[0171] In some aspects, VL1 comprises a CDR1 having an amino acid sequence at least 65%, at least 70%, at least 75%, at least 80%, at least 85%, at least 90%, at least 95%, at least 99%, or 100% identical to SEQ ID NO: 145 or 1050, a CDR2 having an amino acid sequence at least 65%, at least 70%, at least 75%, at least 80%, at least 85%, at least 90%, at least 95%, at least 99%, or 100% identical to SEQ ID NO: 1051 or an amino acid sequence at least 65%, at least 70%, at least 75%, at least 80%, at least 85%, at least 90%, at least 95%, at least 99%, or 100% identical to amino acid sequence AAS, and a CDR3 having an amino acid sequence at least 65%, at least 70%, at least 75%, at least 80%, at least 85%, at least 90%, at least 95%, at least 99%, or 100% identical to SEQ ID NO: 146 or 764; VL2 comprises a CDR1 having an amino acid sequence at least 65%, at least 70%, at least 75%, at least 80%, at least 85%, at least 90%, at least 95%, at least 99%, or 100% identical to SEQ ID NO: 9 or 1055, a CDR2 having an amino acid sequence at least 65%, at least 70%, at least 75%, at least 80%, at least 85%, at least 90%, at least 95%, at least 99%, or 100% identical to SEQ ID NO: 1056 or an amino acid sequence at least 65%, at least 70%, at least 75%, at least 80%, at least 85%, at least 90%, at least 95%, at least 99%, or 100% identical to amino acid sequence GAS, and a CDR3 having an amino acid sequence at least 65%, at least 70%, at least 75%, at least 80%, at least 85%, at least 90%, at least 95%, at least 99%, or 100% identical to SEQ ID NO: 10; VL3 comprises a CDR1 having an amino acid sequence at least 65%, at least 70%, at least 75%, at least 80%, at least 85%, at least 90%, at least 95%, at least 99%, or 100% identical to SEQ ID NO: 138 or 1065, a CDR2 having an amino acid sequence at least 65%, at least 70%, at least 75%, at least 80%, at least 85%, at least 90%, at least 95%, at least 99%, or 100% identical to SEQ ID NO: 1061 or an amino acid sequence at least 65%, at least 70%, at least 75%, at least 80%, at least 85%, at least 90%, at least 95%, at least 99%, or 100% identical to amino acid sequence DAS, and a CDR3 having an amino acid sequence at least 65%, at least 70%, at least 75%, at least 80%, at least 85%, at least 90%, at least 95%, at least 99%, or 100% identical to SEQ ID NO: 139, 856, or 1066; VL4 comprises a CDR1 having an amino acid sequence at least 65%, at least 70%, at least 75%, at least 80%, at least 85%, at least 90%, at least 95%, at least 99%, or 100% identical to SEQ ID NO: 152 or 1045, a CDR2 having an amino acid sequence at least 65%, at least 70%, at least 75%, at least 80%, at least 85%, at least 90%, at least 95%, at least 99%, or 100% identical to SEQ ID NO: 1046 or an amino acid sequence at least 65%, at least 70%, at least 75%, at least 80%, at least 85%, at least 90%, at least 95%, at least 99%, or 100% identical to amino acid sequence GAS, and a CDR3 having an amino acid sequence at least 65%, at least 70%, at least 75%, at least 80%, at least 85%, at least 90%, at least 95%, at least 99%, or 100% identical to SEQ ID NO: 153 or 766; VH1 comprises a CDR1 having an amino acid sequence at least 65%, at least 70%, at least 75%, at least 80%, at least 85%, at least 90%, at least 95%, at least 99%, or 100% identical to SEQ ID NO: 148 or 1052, a CDR2 having an amino acid sequence at least 65%, at least 70%, at least 75%, at least 80%, at least 85%, at least 90%, at least 95%, at least 99%, or 100% identical to SEQ ID NO: 149 or 1053, and a CDR3 having an amino acid sequence at least 65%, at least 70%, at least 75%, at least 80%, at least 85%, at least 90%, at least 95%, at least 99%, or 100% identical to SEQ ID NO: 150, 765, or 1054; VH2 comprises a CDR1 having an amino acid sequence at least 65%, at least 70%, at least 75%, at least 80%, at least 85%, at least 90%, at least 95%, at least 99%, or 100% identical to SEQ ID NO: 12 or 1057, a CDR2 having an amino acid sequence at least 65%, at least 70%, at least 75%, at least 80%, at least 85%, at least 90%, at least 95%, at least 99%, or 100% identical to SEQ ID NO: 6 or 1058, and a CDR3 having an amino acid sequence at least 65%, at least 70%, at least 75%, at least 80%, at least 85%, at least 90%, at least 95%, at least 99%, or 100% identical to SEQ ID NO: 13 or 1059; VH3 comprises a CDR1 having an amino acid sequence at least 65%, at least 70%, at least 75%, at least 80%, at least 85%, at least 90%, at least 95%, at least 99%, or 100% identical to SEQ ID NO: 141 or 1067, a CDR2 having an amino acid sequence at least 65%, at least 70%, at least 75%, at least 80%, at least 85%, at least 90%, at least 95%, at least 99%, or 100% identical to SEQ ID NO: 142 or 1068, and a CDR3 having an amino acid sequence at least 65%, at least 70%, at least 75%, at least 80%, at least 85%, at least 90%, at least 95%, at least 99%, or 100% identical to SEQ ID NO: 143, 857, or 1069; and VH4 comprises a CDR1 having an amino acid sequence at least 65%, at least 70%, at least 75%, at least 80%, at least 85%, at least 90%, at least 95%, at least 99%, or 100% identical to SEQ ID NO: 155 or 1047, a CDR2 having an amino acid sequence at least 65%, at least 70%, at least 75%, at least 80%, at least 85%, at least 90%, at least 95%, at least 99%, or 100% identical to SEQ ID NO: 156 or 1048, and a CDR3 having an amino acid sequence at least 65%, at least 70%, at least 75%, at least 80%, at least 85%, at least 90%, at least 95%, at least 99%, or 100% identical to SEQ ID NO: 157, 767, or 1049.

[0172] In some aspects, VL1 comprises an amino acid sequence that is at least 65%, at least 70%, at least 75%, at least 80%, at least 85%, at least 90%, at least 95%, at least 99%, or 100% identical to SEQ ID NO: 147; VL2 comprises an amino acid sequence that is at least 65%, at least 70%, at least 75%, at least 80%, at least 85%, at least 90%, at least 95%, at least 99%, or 100% identical to SEQ ID NO: 11; VL3 comprises an amino acid sequence that is at least 65%, at least 70%, at least 75%, at least 80%, at least 85%, at least 90%, at least 95%, at least 99%, or 100% identical to SEQ ID NO: 140; VL4 comprises an amino acid sequence that is at least 65%, at least 70%, at least 75%, at least 80%, at least 85%, at least 90%, at least 95%, at least 99%, or 100% identical to SEQ ID NO: 154; VH1 comprises an amino acid sequence that is at least 65%, at least 70%, at least 75%, at least 80%, at least 85%, at least 90%, at least 95%, at least 99%, or 100% identical to SEQ ID NO: 151; VH2 comprises an amino acid sequence that is at least 65%, at least 70%, at least 75%, at least 80%, at least 85%, at least 90%, at least 95%, at least 99%, or 100% identical to SEQ ID NO: 14; VH3 comprises an amino acid sequence that is at least 65%, at least 70%, at least 75%, at least 80%, at least 85%, at least 90%, at least 95%, at least 99%, or 100% identical to SEQ ID NO: 144; and VH4 comprises an amino acid sequence that is at least 65%, at least 70%, at least 75%, at least 80%, at least 85%, at least 90%, at least 95%, at least 99%, or 100% identical to SEQ ID NO: 158.

[0173] In some aspects, VL1 comprises a CDR1 having an amino acid sequence at least 65%, at least 70%, at least 75%, at least 80%, at least 85%, at least 90%, at least 95%, at least 99%, or 100% identical to SEQ ID NO: 145 or 1050, a CDR2 having an amino acid sequence at least 65%, at least 70%, at least 75%, at least 80%, at least 85%, at least 90%, at least 95%, at least 99%, or 100% identical to SEQ ID NO: 1051 or an amino acid sequence at least 65%, at least 70%, at least 75%, at least 80%, at least 85%, at least 90%, at least 95%, at least 99%, or 100% identical to amino acid sequence AAS, and a CDR3 having an amino acid sequence at least 65%, at least 70%, at least 75%, at least 80%, at least 85%, at least 90%, at least 95%, at least 99%, or 100% identical to SEQ ID NO: 146 or 764; VL2 comprises a CDR1 having an amino acid sequence at least 65%, at least 70%, at least 75%, at least 80%, at least 85%, at least 90%, at least 95%, at least 99%, or 100% identical to SEQ ID NO: 145 or 1050, a CDR2 having an amino acid sequence at least 65%, at least 70%, at least 75%, at least 80%, at least 85%, at least 90%, at least 95%, at least 99%, or 100% identical to SEQ ID NO: 1051 or an amino acid sequence at least 65%, at least 70%, at least 75%, at least 80%, at least 85%, at least 90%, at least 95%, at least 99%, or 100% identical to amino acid sequence AAS, and a CDR3 having an amino acid sequence at least 65%, at least 70%, at least 75%, at least 80%, at least 85%, at least 90%, at least 95%, at least 99%, or 100% identical to SEQ ID NO: 146 or 764; VL3 comprises a CDR1 having an amino acid sequence at least 65%, at least 70%, at least 75%, at least 80%, at least 85%, at least 90%, at least 95%, at least 99%, or 100% identical to SEQ ID NO: 145 or 1050, a CDR2 having an amino acid sequence at least 65%, at least 70%, at least 75%, at least 80%, at least 85%, at least 90%, at least 95%, at least 99%, or 100% identical to SEQ ID NO: 1051 or an amino acid sequence at least 65%, at least 70%, at least 75%, at least 80%, at least 85%, at least 90%, at least 95%, at least 99%, or 100% identical to amino acid sequence AAS, and a CDR3 having an amino acid sequence at least 65%, at least 70%, at least 75%, at least 80%, at least 85%, at least 90%, at least 95%, at least 99%, or 100% identical to SEQ ID NO: 146 or 764; VL4 comprises a CDR1 having an amino acid sequence at least 65%, at least 70%, at least 75%, at least 80%, at least 85%, at least 90%, at least 95%, at least 99%, or 100% identical to SEQ ID NO: 145 or 1050, a CDR2 having an amino acid sequence at least 65%, at least 70%, at least 75%, at least 80%, at least 85%, at least 90%, at least 95%, at least 99%, or 100% identical to SEQ ID NO: 1051 or an amino acid sequence at least 65%, at least 70%, at least 75%, at least 80%, at least 85%, at least 90%, at least 95%, at least 99%, or 100% identical to amino acid sequence AAS, and a CDR3 having an amino acid sequence at least 65%, at least 70%, at least 75%, at least 80%, at least 85%, at least 90%, at least 95%, at least 99%, or 100% identical to SEQ ID NO: 146 or 764; VH1 comprises a CDR1 having an amino acid sequence at least 65%, at least 70%, at least 75%, at least 80%, at least 85%, at least 90%, at least 95%, at least 99%, or 100% identical to SEQ ID NO: 148 or 1052, a CDR2 having an amino acid sequence at least 65%, at least 70%, at least 75%, at least 80%, at least 85%, at least 90%, at least 95%, at least 99%, or 100% identical to SEQ ID NO: 149 or 1053, and a CDR3 having an amino acid sequence at least 65%, at least 70%, at least 75%, at least 80%, at least 85%, at least 90%, at least 95%, at least 99%, or 100% identical to SEQ ID NO: 150, 765, or 1054; VH2 comprises a CDR1 having an amino acid sequence at least 65%, at least 70%, at least 75%, at least 80%, at least 85%, at least 90%, at least 95%, at least 99%, or 100% identical to SEQ ID NO: 148 or 1052, a CDR2 having an amino acid sequence at least 65%, at least 70%, at least 75%, at least 80%, at least 85%, at least 90%, at least 95%, at least 99%, or 100% identical to SEQ ID NO: 149 or 1053, and a CDR3 having an amino acid sequence at least 65%, at least 70%, at least 75%, at least 80%, at least 85%, at least 90%, at least 95%, at least 99%, or 100% identical to SEQ ID NO: 150, 765, or 1054; VH3 comprises a CDR1 having an amino acid sequence at least 65%, at least 70%, at least 75%, at least 80%, at least 85%, at least 90%, at least 95%, at least 99%, or 100% identical to SEQ ID NO: 148 or 1052, a CDR2 having an amino acid sequence at least 65%, at least 70%, at least 75%, at least 80%, at least 85%, at least 90%, at least 95%, at least 99%, or 100% identical to SEQ ID NO: 149 or 1053, and a CDR3 having an amino acid sequence at least 65%, at least 70%, at least 75%, at least 80%, at least 85%, at least 90%, at least 95%, at least 99%, or 100% identical to SEQ ID NO: 150, 765, or 1054; and VH4 comprises a CDR1 having an amino acid sequence at least 65%, at least 70%, at least 75%, at least 80%, at least 85%, at least 90%, at least 95%, at least 99%, or 100% identical to SEQ ID NO: 148 or 1052, a CDR2 having an amino acid sequence at least 65%, at least 70%, at least 75%, at least 80%, at least 85%, at least 90%, at least 95%, at least 99%, or 100% identical to SEQ ID NO: 149 or 1053, and a CDR3 having an amino acid sequence at least 65%, at least 70%, at least 75%, at least 80%, at least 85%, at least 90%, at least 95%, at least 99%, or 100% identical to SEQ ID NO: 150, 765, or 1054.

[0174] In some aspects, VL1 comprises an amino acid sequence that is at least 65%, at least 70%, at least 75%, at least 80%, at least 85%, at least 90%, at least 95%, at least 99%, or 100% identical to SEQ ID NO: 147; VL2 comprises an amino acid sequence that is at least 65%, at least 70%, at least 75%, at least 80%, at least 85%, at least 90%, at least 95%, at least 99%, or 100% identical to SEQ ID NO: 147; VL3 comprises an amino acid sequence that is at least 65%, at least 70%, at least 75%, at least 80%, at least 85%, at least 90%, at least 95%, at least 99%, or 100% identical to SEQ ID NO: 147; VL4 comprises an amino acid sequence that is at least 65%, at least 70%, at least 75%, at least 80%, at least 85%, at least 90%, at least 95%, at least 99%, or 100% identical to SEQ ID NO: 147; VH1 comprises an amino acid sequence that is at least 65%, at least 70%, at least 75%, at least 80%, at least 85%, at least 90%, at least 95%, at least 99%, or 100% identical to SEQ ID NO: 151; VH2 comprises an amino acid sequence that is at least 65%, at least 70%, at least 75%, at least 80%, at least 85%, at least 90%, at least 95%, at least 99%, or 100% identical to SEQ ID NO: 151; VH3 comprises an amino acid sequence that is at least 65%, at least 70%, at least 75%, at least 80%, at least 85%, at least 90%, at least 95%, at least 99%, or 100% identical to SEQ ID NO: 151; and VH4 comprises an amino acid sequence that is at least 65%, at least 70%, at least 75%, at least 80%, at least 85%, at least 90%, at least 95%, at least 99%, or 100% identical to SEQ ID NO: 151.

[0175] In some aspects, VL1 comprises a CDR1 having an amino acid sequence at least 65%, at least 70%, at least 75%, at least 80%, at least 85%, at least 90%, at least 95%, at least 99%, or 100% identical to SEQ ID NO: 152 or 1045, a CDR2 having an amino acid sequence at least 65%, at least 70%, at least 75%, at least 80%, at least 85%, at least 90%, at least 95%, at least 99%, or 100% identical to SEQ ID NO: 1046 or an amino acid sequence at least 65%, at least 70%, at least 75%, at least 80%, at least 85%, at least 90%, at least 95%, at least 99%, or 100% identical to amino acid sequence GAS, and a CDR3 having an amino acid sequence at least 65%, at least 70%, at least 75%, at least 80%, at least 85%, at least 90%, at least 95%, at least 99%, or 100% identical to SEQ ID NO: 153 or 766; VL2 comprises a CDR1 having an amino acid sequence at least 65%, at least 70%, at least 75%, at least 80%, at least 85%, at least 90%, at least 95%, at least 99%, or 100% identical to SEQ ID NO: 152 or 1045, a CDR2 having an amino acid sequence at least 65%, at least 70%, at least 75%, at least 80%, at least 85%, at least 90%, at least 95%, at least 99%, or 100% identical to SEQ ID NO: 1046 or an amino acid sequence at least 65%, at least 70%, at least 75%, at least 80%, at least 85%, at least 90%, at least 95%, at least 99%, or 100% identical to amino acid sequence GAS, and a CDR3 having an amino acid sequence at least 65%, at least 70%, at least 75%, at least 80%, at least 85%, at least 90%, at least 95%, at least 99%, or 100% identical to SEQ ID NO: 153 or 766; VL3 comprises a CDR1 having an amino acid sequence at least 65%, at least 70%, at least 75%, at least 80%, at least 85%, at least 90%, at least 95%, at least 99%, or 100% identical to SEQ ID NO: 152 or 1045, a CDR2 having an amino acid sequence at least 65%, at least 70%, at least 75%, at least 80%, at least 85%, at least 90%, at least 95%, at least 99%, or 100% identical to SEQ ID NO: 1046 or an amino acid sequence at least 65%, at least 70%, at least 75%, at least 80%, at least 85%, at least 90%, at least 95%, at least 99%, or 100% identical to amino acid sequence GAS, and a CDR3 having an amino acid sequence at least 65%, at least 70%, at least 75%, at least 80%, at least 85%, at least 90%, at least 95%, at least 99%, or 100% identical to SEQ ID NO: 153 or 766; VL4 comprises a CDR1 having an amino acid sequence at least 65%, at least 70%, at least 75%, at least 80%, at least 85%, at least 90%, at least 95%, at least 99%, or 100% identical to SEQ ID NO: 152 or 1045, a CDR2 having an amino acid sequence at least 65%, at least 70%, at least 75%, at least 80%, at least 85%, at least 90%, at least 95%, at least 99%, or 100% identical to SEQ ID NO: 1046 or an amino acid sequence at least 65%, at least 70%, at least 75%, at least 80%, at least 85%, at least 90%, at least 95%, at least 99%, or 100% identical to amino acid sequence GAS, and a CDR3 having an amino acid sequence at least 65%, at least 70%, at least 75%, at least 80%, at least 85%, at least 90%, at least 95%, at least 99%, or 100% identical to SEQ ID NO: 153 or 766; VH1 comprises a CDR1 having an amino acid sequence at least 65%, at least 70%, at least 75%, at least 80%, at least 85%, at least 90%, at least 95%, at least 99%, or 100% identical to SEQ ID NO: 155 or 1047, a CDR2 having an amino acid sequence at least 65%, at least 70%, at least 75%, at least 80%, at least 85%, at least 90%, at least 95%, at least 99%, or 100% identical to SEQ ID NO: 156 or 1048, and a CDR3 having an amino acid sequence at least 65%, at least 70%, at least 75%, at least 80%, at least 85%, at least 90%, at least 95%, at least 99%, or 100% identical to SEQ ID NO: 157, 767, or 1049; VH2 comprises a CDR1 having an amino acid sequence at least 65%, at least 70%, at least 75%, at least 80%, at least 85%, at least 90%, at least 95%, at least 99%, or 100% identical to SEQ ID NO: 155 or 1047, a CDR2 having an amino acid sequence at least 65%, at least 70%, at least 75%, at least 80%, at least 85%, at least 90%, at least 95%, at least 99%, or 100% identical to SEQ ID NO: 156 or 1048, and a CDR3 having an amino acid sequence at least 65%, at least 70%, at least 75%, at least 80%, at least 85%, at least 90%, at least 95%, at least 99%, or 100% identical to SEQ ID NO: 157, 767, or 1049; VH3 comprises a CDR1 having an amino acid sequence at least 65%, at least 70%, at least 75%, at least 80%, at least 85%, at least 90%, at least 95%, at least 99%, or 100% identical to SEQ ID NO: 155 or 1047, a CDR2 having an amino acid sequence at least 65%, at least 70%, at least 75%, at least 80%, at least 85%, at least 90%, at least 95%, at least 99%, or 100% identical to SEQ ID NO: 156 or 1048, and a CDR3 having an amino acid sequence at least 65%, at least 70%, at least 75%, at least 80%, at least 85%, at least 90%, at least 95%, at least 99%, or 100% identical to SEQ ID NO: 157, 767, or 1049; and VH4 comprises a CDR1 having an amino acid sequence at least 65%, at least 70%, at least 75%, at least 80%, at least 85%, at least 90%, at least 95%, at least 99%, or 100% identical to SEQ ID NO: 155 or 1047, a CDR2 having an amino acid sequence at least 65%, at least 70%, at least 75%, at least 80%, at least 85%, at least 90%, at least 95%, at least 99%, or 100% identical to SEQ ID NO: 156 or 1048, and a CDR3 having an amino acid sequence at least 65%, at least 70%, at least 75%, at least 80%, at least 85%, at least 90%, at least 95%, at least 99%, or 100% identical to SEQ ID NO: 157, 767, or 1049.

[0176] In some aspects, VL1 comprises an amino acid sequence that is at least 65%, at least 70%, at least 75%, at least 80%, at least 85%, at least 90%, at least 95%, at least 99%, or 100% identical to SEQ ID NO: 154; VL2 comprises an amino acid sequence that is at least 65%, at least 70%, at least 75%, at least 80%, at least 85%, at least 90%, at least 95%, at least 99%, or 100% identical to SEQ ID NO: 154; VL3 comprises an amino acid sequence that is at least 65%, at least 70%, at least 75%, at least 80%, at least 85%, at least 90%, at least 95%, at least 99%, or 100% identical to SEQ ID NO: 154; VL4 comprises an amino acid sequence that is at least 65%, at least 70%, at least 75%, at least 80%, at least 85%, at least 90%, at least 95%, at least 99%, or 100% identical to SEQ ID NO: 154; VH1 comprises an amino acid sequence that is at least 65%, at least 70%, at least 75%, at least 80%, at least 85%, at least 90%, at least 95%, at least 99%, or 100% identical to SEQ ID NO: 158; VH2 comprises an amino acid sequence that is at least 65%, at least 70%, at least 75%, at least 80%, at least 85%, at least 90%, at least 95%, at least 99%, or 100% identical to SEQ ID NO: 158; VH3 comprises an amino acid sequence that is at least 65%, at least 70%, at least 75%, at least 80%, at least 85%, at least 90%, at least 95%, at least 99%, or 100% identical to SEQ ID NO: 158; and VH4 comprises an amino acid sequence that is at least 65%, at least 70%, at least 75%, at least 80%, at least 85%, at least 90%, at least 95%, at least 99%, or 100% identical to SEQ ID NO: 158.

[0177] In some aspects, VL1 comprises a CDR1 having an amino acid sequence at least 65%, at least 70%, at least 75%, at least 80%, at least 85%, at least 90%, at least 95%, at least 99%, or 100% identical to SEQ ID NO: 9 or 1055, a CDR2 having an amino acid sequence at least 65%, at least 70%, at least 75%, at least 80%, at least 85%, at least 90%, at least 95%, at least 99%, or 100% identical to SEQ ID NO: 1056 or an amino acid sequence at least 65%, at least 70%, at least 75%, at least 80%, at least 85%, at least 90%, at least 95%, at least 99%, or 100% identical to amino acid sequence GAS, and a CDR3 having an amino acid sequence at least 65%, at least 70%, at least 75%, at least 80%, at least 85%, at least 90%, at least 95%, at least 99%, or 100% identical to SEQ ID NO: 10; VL2 comprises a CDR1 having an amino acid sequence at least 65%, at least 70%, at least 75%, at least 80%, at least 85%, at least 90%, at least 95%, at least 99%, or 100% identical to SEQ ID NO: 9 or 1055, a CDR2 having an amino acid sequence at least 65%, at least 70%, at least 75%, at least 80%, at least 85%, at least 90%, at least 95%, at least 99%, or 100% identical to SEQ ID NO: 1056 or an amino acid sequence at least 65%, at least 70%, at least 75%, at least 80%, at least 85%, at least 90%, at least 95%, at least 99%, or 100% identical to amino acid sequence GAS, and a CDR3 having an amino acid sequence at least 65%, at least 70%, at least 75%, at least 80%, at least 85%, at least 90%, at least 95%, at least 99%, or 100% identical to SEQ ID NO: 10; VL3 comprises a CDR1 having an amino acid sequence at least 65%, at least 70%, at least 75%, at least 80%, at least 85%, at least 90%, at least 95%, at least 99%, or 100% identical to SEQ ID NO: 9 or 1055, a CDR2 having an amino acid sequence at least 65%, at least 70%, at least 75%, at least 80%, at least 85%, at least 90%, at least 95%, at least 99%, or 100% identical to SEQ ID NO: 1056 or an amino acid sequence at least 65%, at least 70%, at least 75%, at least 80%, at least 85%, at least 90%, at least 95%, at least 99%, or 100% identical to amino acid sequence GAS, and a CDR3 having an amino acid sequence at least 65%, at least 70%, at least 75%, at least 80%, at least 85%, at least 90%, at least 95%, at least 99%, or 100% identical to SEQ ID NO: 10; VL4 comprises a CDR1 having an amino acid sequence at least 65%, at least 70%, at least 75%, at least 80%, at least 85%, at least 90%, at least 95%, at least 99%, or 100% identical to SEQ ID NO: 9 or 1055, a CDR2 having an amino acid sequence at least 65%, at least 70%, at least 75%, at least 80%, at least 85%, at least 90%, at least 95%, at least 99%, or 100% identical to SEQ ID NO: 1056 or an amino acid sequence at least 65%, at least 70%, at least 75%, at least 80%, at least 85%, at least 90%, at least 95%, at least 99%, or 100% identical to amino acid sequence GAS, and a CDR3 having an amino acid sequence at least 65%, at least 70%, at least 75%, at least 80%, at least 85%, at least 90%, at least 95%, at least 99%, or 100% identical to SEQ ID NO: 10; VH1 comprises a CDR1 having an amino acid sequence at least 65%, at least 70%, at least 75%, at least 80%, at least 85%, at least 90%, at least 95%, at least 99%, or 100% identical to SEQ ID NO: 12 or 1057, a CDR2 having an amino acid sequence at least 65%, at least 70%, at least 75%, at least 80%, at least 85%, at least 90%, at least 95%, at least 99%, or 100% identical to SEQ ID NO: 6 or 1058, and a CDR3 having an amino acid sequence at least 65%, at least 70%, at least 75%, at least 80%, at least 85%, at least 90%, at least 95%, at least 99%, or 100% identical to SEQ ID NO: 13 or 1059; VH2 comprises a CDR1 having an amino acid sequence at least 65%, at least 70%, at least 75%, at least 80%, at least 85%, at least 90%, at least 95%, at least 99%, or 100% identical to SEQ ID NO: 12 or 1057, a CDR2 having an amino acid sequence at least 65%, at least 70%, at least 75%, at least 80%, at least 85%, at least 90%, at least 95%, at least 99%, or 100% identical to SEQ ID NO: 6 or 1058, and a CDR3 having an amino acid sequence at least 65%, at least 70%, at least 75%, at least 80%, at least 85%, at least 90%, at least 95%, at least 99%, or 100% identical to SEQ ID NO: 13 or 1059; VH3 comprises a CDR1 having an amino acid sequence at least 65%, at least 70%, at least 75%, at least 80%, at least 85%, at least 90%, at least 95%, at least 99%, or 100% identical to SEQ ID NO: 12 or 1057, a CDR2 having an amino acid sequence at least 65%, at least 70%, at least 75%, at least 80%, at least 85%, at least 90%, at least 95%, at least 99%, or 100% identical to SEQ ID NO: 6 or 1058, and a CDR3 having an amino acid sequence at least 65%, at least 70%, at least 75%, at least 80%, at least 85%, at least 90%, at least 95%, at least 99%, or 100% identical to SEQ ID NO: 13 or 1059; and VH4 comprises a CDR1 having an amino acid sequence at least 65%, at least 70%, at least 75%, at least 80%, at least 85%, at least 90%, at least 95%, at least 99%, or 100% identical to SEQ ID NO: 12 or 1057, a CDR2 having an amino acid sequence at least 65%, at least 70%, at least 75%, at least 80%, at least 85%, at least 90%, at least 95%, at least 99%, or 100% identical to SEQ ID NO: 6 or 1058, and a CDR3 having an amino acid sequence at least 65%, at least 70%, at least 75%, at least 80%, at least 85%, at least 90%, at least 95%, at least 99%, or 100% identical to SEQ ID NO: 13 or 1059.

[0178] In some aspects, VL1 comprises an amino acid sequence that is at least 65%, at least 70%, at least 75%, at least 80%, at least 85%, at least 90%, at least 95%, at least 99%, or 100% identical to SEQ ID NO: 11; VL2 comprises an amino acid sequence that is at least 65%, at least 70%, at least 75%, at least 80%, at least 85%, at least 90%, at least 95%, at least 99%, or 100% identical to SEQ ID NO: 11; VL3 comprises an amino acid sequence that is at least 65%, at least 70%, at least 75%, at least 80%, at least 85%, at least 90%, at least 95%, at least 99%, or 100% identical to SEQ ID NO: 11; VL4 comprises an amino acid sequence that is at least 65%, at least 70%, at least 75%, at least 80%, at least 85%, at least 90%, at least 95%, at least 99%, or 100% identical to SEQ ID NO: 11; VH1 comprises an amino acid sequence that is at least 65%, at least 70%, at least 75%, at least 80%, at least 85%, at least 90%, at least 95%, at least 99%, or 100% identical to SEQ ID NO: 14; VH2 comprises an amino acid sequence that is at least 65%, at least 70%, at least 75%, at least 80%, at least 85%, at least 90%, at least 95%, at least 99%, or 100% identical to SEQ ID NO: 14; VH3 comprises an amino acid sequence that is at least 65%, at least 70%, at least 75%, at least 80%, at least 85%, at least 90%, at least 95%, at least 99%, or 100% identical to SEQ ID NO: 14; and VH4 comprises an amino acid sequence that is at least 65%, at least 70%, at least 75%, at least 80%, at least 85%, at least 90%, at least 95%, at least 99%, or 100% identical to SEQ ID NO: 14.

[0179] Also provided herein is an antigen binding polypeptide complex comprising a first polypeptide and a second polypeptide, wherein the first polypeptide has a structure, from amino-terminus to carboxy-terminus, represented by: VL1-L1-VH1-L2-VL2-L3-CL-L4-VH2-L5-CH1; VL1-L1-VH1-L2-VL2-L3-CH1-L4-VH2-L5-CL; VL1-L1-VH1-L2-VH2-L3-CL-L4-VL2-L5-CH1; VL1-L1-VH1-L2-VH2-L3-CH1-L4-VL2-L5-CL; VL1-L1-VL2-L2-VH1-L3-CL-L4-VH2-L5-CH1; VL1-L1-VL2-L2-VH1-L3-CH1-L4-VH2-L5-CL; VL1-L1-VH2-L2-VH1-L3-CL-L4-VL2-L5-CH1; VL1-L1-VH2-L2-VH1-L3-CH1-L4-VL2-L5-CL; VH1-L1-VL1-L2-VL2-L3-CL-L4-VH2-L5-CH1; VH1-L1-VL1-L2-VL2-L3-CH1-L4-VH2-L5-CL; VH1-L1-VL1-L2-VH2-L3-CL-L4-VL2-L5-CH1; VH1-L1-VL1-L2-VH2-L3-CH1-L4-VL2-L5- CL; VH1-L1-VL2-L2-VL1-L3-CL-L4-VH2-L5-CH1; VH1-L1-VL2-L2-VL1-L3-CH1-L4-VH2-L5-CL; VH1-L1-VH2-L2-VL1-L3-CL-L4-VL2-L5-CH1; VH1-L1-VH2-L2-VL1-L3-CH1-L4-VL2-L5-CL; VL2-L1-VL1-L2-VH2-L3-CL-L4-VH1-L5-CH1; VL2-L1-VL1-L2-VH2-L3-CH1-L4-VH1-L5-CL; VL2-L1-VH1-L2-VH2-L3-CL-L4-VL1-L5-CH1; VL2-L1-VH1-L2-VH2-L3-CH1-L4-VL1-L5-CL; VL2-L1-VH2-L2-VL1-L3-CL-L4-VH1-L5-CH1; VL2-L1-VH2-L2-VL1-L3-CH1-L4-VH1-L5-CL; VL2-L1-VH2-L2-VH1-L3-CL-L4-VL1-L5-CH1; VL2-L1-VH2-L2-VH1-L3-CH1-L4-VL1-L5-CL; VH2-L1-VL1-L2-VL2-L3-CL-L4-VH1-L5-CH1; VH2-L1-VL1-L2-VL2-L3-CH1-L4-VH1-L5-CL; VH2-L1-VH1-L2-VL2-L3-CL-L4-VL1-L5-CH1; VH2-L1-VH1-L2-VL2-L3-CH1-L4-VL1-L5-CL; VH2-L1-VL2-L2-VL1-L3-CL-L4-VH1-L5-CH1; VH2-L1-VL2-L2-VL1-L3-CH1-L4-VH1-L5-CL; VH2-L1-VL2-L2-VH1-L3-CL-L4-VL1-L5-CH1; or VH2-L1-VL2-L2-VH1-L3-CH1-L4-VL1-L5-CL; wherein the second polypeptide has a structure, from amino-terminus to carboxy-terminus, represented by: VL3-L6-VH3-L7-VL4-L8-CL-L9-VH4-L10-CH1; VL3-L6-VH3-L7-VL4-L8-CH1-L9-VH4-L10-CL; VL3-L6-VH3-L7-VH4-L8-CL-L9-VL4-L10-CH1; VL3-L6-VH3-L7-VH4-L8-CH1-L9-VL4-L10-CL; VL3-L6-VL4-L7-VH3-L8-CL-L9-VH4-L10-CH1; VL3-L6-VL4-L7-VH3-L8-CH1-L9-VH4-L10-CL; VL3-L6-VH4-L7-VH3-L8-CL-L9-VL4-L10-CH1; VL3-L6-VH4-L7-VH3-L8-CH1-L9-VL4-L10-CL; VH3-L6-VL3-L7-VL4-L8-CL-L9-VH4-L10-CH1; VH3-L6-VL3-L7-VL4-L8-CH1-L9-VH4-L10-CL; VH3-L6-VL3-L7-VH4-L8-CL-L9-VL4-L10-CH1; VH3-L6-VL3-L7-VH4-L8-CH1-L9-VL4-L10-CL; VH3-L6-VL4-L7-VL3-L8-CL-L9-VH4-L10-CH1; VH3-L6-VL4-L7-VL3-L8-CH1-L9-VH4-L10-CL; VH3-L6-VH4-L7-VL3-L8-CL-L9-VL4-L10-CH1; VH3-L6-VH4-L7-VL3-L8-CH1-L9-VL4-L10-CL; VL4-L6-VL3-L7-VH4-L8-CL-L9-VH3-L10-CH1; VL4-L6-VL3-L7-VH4-L8-CH1-L9-VH3-L10-CL; VL4-L6-VH3-L7-VH4-L8-CL-L9-VL3-L10-CH1; VL4-L6-VH3-L7-VH4-L8-CH1-L9-VL3-L10-CL; VL4-L6-VH4-L7-VL3-L8-CL-L9-VH3-L10-CH1; VL4-L6-VH4-L7-VL3-L8-CH1-L9-VH3-L10-CL; VL4-L6-VH4-L7-VH3-L8-CL-L9-VL3-L10-CH1; VL4-L6-VH4-L7-VH3-L8-CH1-L9-VL3-L10-CL; VH4-L6-VL3-L7-VL4-L8-CL-L9-VH3-L10-CH1; VH4-L6-VL3-L7-VL4-L8-CH1-L9-VH3-L10-CL; VH4-L6-VH3-L7-VL4-L8-CL-L9-VL3-L10-CH1; VH4-L6-VH3-L7-VL4-L8-CH1-L9-VL3-L10-CL; VH4-L6-VL4-L7-VL3-L8-CL-L9-VH3-L10-CH1; VH4-L6-VL4-L7-VL3-L8-CH1-L9-VH3-L10-CL; VH4-L6-VL4-L7-VH3-L8-CL-L9-VL3-L10-CH1; or VH4-L6-VL4-L7-VH3-L8-CH1-L9-VL3-L10-CL; and wherein: VL1 is a first immunoglobulin light chain variable region that specifically binds to a severe acute respiratory syndrome coronavirus 2 (SARS-CoV-2) protein; VL2 is a second immunoglobulin light chain variable region that specifically binds to a SARS-CoV-2 protein; VL3 is a third immunoglobulin light chain variable region that specifically binds to a SARS-CoV-2 protein; VL4 is a fourth immunoglobulin light chain variable region that specifically binds to a SARS-CoV-2 protein; VH1 is a first immunoglobulin heavy chain variable region that specifically binds to a SARS-CoV-2 protein; VH2 is a second immunoglobulin heavy chain variable region that specifically binds to a SARS-CoV-2 protein; VH3 is a third immunoglobulin heavy chain variable region that specifically binds to a SARS-CoV-2 protein; VH4 is a fourth immunoglobulin heavy chain variable region that specifically binds to a SARS-CoV-2 protein; CL is an immunoglobulin light chain constant region; CH1 is an immunoglobulin heavy chain constant region 1; and L1-L10 are optional amino acid linkers.

[0180] In some aspects, VL1 comprises a CDR1 having an amino acid sequence at least 65%, at least 70%, at least 75%, at least 80%, at least 85%, at least 90%, at least 95%, at least 99%, or 100% identical to SEQ ID NO: 9 or 1055, a CDR2 having an amino acid sequence at least 65%, at least 70%, at least 75%, at least 80%, at least 85%, at least 90%, at least 95%, at least 99%, or 100% identical to SEQ ID NO: 1056 or an amino acid sequence at least 65%, at least 70%, at least 75%, at least 80%, at least 85%, at least 90%, at least 95%, at least 99%, or 100% identical to amino acid sequence GAS, and a CDR3 having an amino acid sequence at least 65%, at least 70%, at least 75%, at least 80%, at least 85%, at least 90%, at least 95%, at least 99%, or 100% identical to SEQ ID NO: 10; VL2 comprises a CDR1 having an amino acid sequence at least 65%, at least 70%, at least 75%, at least 80%, at least 85%, at least 90%, at least 95%, at least 99%, or 100% identical to SEQ ID NO: 15, a CDR2 having an amino acid sequence at least 65%, at least 70%, at least 75%, at least 80%, at least 85%, at least 90%, at least 95%, at least 99%, or 100% identical to amino acid sequence LGS, and a CDR3 having an amino acid sequence at least 65%, at least 70%, at least 75%, at least 80%, at least 85%, at least 90%, at least 95%, at least 99%, or 100% identical to SEQ ID NO: 16; VL3 comprises a CDR1 having an amino acid sequence at least 65%, at least 70%, at least 75%, at least 80%, at least 85%, at least 90%, at least 95%, at least 99%, or 100% identical to SEQ ID NO: 9 or 1055, a CDR2 having an amino acid sequence at least 65%, at least 70%, at least 75%, at least 80%, at least 85%, at least 90%, at least 95%, at least 99%, or 100% identical to SEQ ID NO: 1056 or an amino acid sequence at least 65%, at least 70%, at least 75%, at least 80%, at least 85%, at least 90%, at least 95%, at least 99%, or 100% identical to amino acid sequence GAS, and a CDR3 having an amino acid sequence at least 65%, at least 70%, at least 75%, at least 80%, at least 85%, at least 90%, at least 95%, at least 99%, or 100% identical to SEQ ID NO: 10; VL4 comprises a CDR1 having an amino acid sequence at least 65%, at least 70%, at least 75%, at least 80%, at least 85%, at least 90%, at least 95%, at least 99%, or 100% identical to SEQ ID NO: 15, a CDR2 having an amino acid sequence at least 65%, at least 70%, at least 75%, at least 80%, at least 85%, at least 90%, at least 95%, at least 99%, or 100% identical to amino acid sequence LGS, and a CDR3 having an amino acid sequence at least 65%, at least 70%, at least 75%, at least 80%, at least 85%, at least 90%, at least 95%, at least 99%, or 100% identical to SEQ ID NO: 16; VH1 comprises a CDR1 having an amino acid sequence at least 65%, at least 70%, at least 75%, at least 80%, at least 85%, at least 90%, at least 95%, at least 99%, or 100% identical to SEQ ID NO: 12 or 1057, a CDR2 having an amino acid sequence at least 65%, at least 70%, at least 75%, at least 80%, at least 85%, at least 90%, at least 95%, at least 99%, or 100% identical to SEQ ID NO: 6 or 1058, and a CDR3 having an amino acid sequence at least 65%, at least 70%, at least 75%, at least 80%, at least 85%, at least 90%, at least 95%, at least 99%, or 100% identical to SEQ ID NO: 13 or 1059; VH2 comprises a CDR1 having an amino acid sequence at least 65%, at least 70%, at least 75%, at least 80%, at least 85%, at least 90%, at least 95%, at least 99%, or 100% identical to SEQ ID NO: 18, a CDR2 having an amino acid sequence at least 65%, at least 70%, at least 75%, at least 80%, at least 85%, at least 90%, at least 95%, at least 99%, or 100% identical to SEQ ID NO: 19, and a CDR3 having an amino acid sequence at least 65%, at least 70%, at least 75%, at least 80%, at least 85%, at least 90%, at least 95%, at least 99%, or 100% identical to SEQ ID NO: 20; VH3 comprises a CDR1 having an amino acid sequence at least 65%, at least 70%, at least 75%, at least 80%, at least 85%, at least 90%, at least 95%, at least 99%, or 100% identical to SEQ ID NO: 12 or 1057, a CDR2 having an amino acid sequence at least 65%, at least 70%, at least 75%, at least 80%, at least 85%, at least 90%, at least 95%, at least 99%, or 100% identical to SEQ ID NO: 6 or 1058, and a CDR3 having an amino acid sequence at least 65%, at least 70%, at least 75%, at least 80%, at least 85%, at least 90%, at least 95%, at least 99%, or 100% identical to SEQ ID NO: 13 or 1059; and VH4 comprises a CDR1 having an amino acid sequence at least 65%, at least 70%, at least 75%, at least 80%, at least 85%, at least 90%, at least 95%, at least 99%, or 100% identical to SEQ ID NO: 18, a CDR2 having an amino acid sequence at least 65%, at least 70%, at least 75%, at least 80%, at least 85%, at least 90%, at least 95%, at least 99%, or 100% identical to SEQ ID NO: 19, and a CDR3 having an amino acid sequence at least 65%, at least 70%, at least 75%, at least 80%, at least 85%, at least 90%, at least 95%, at least 99%, or 100% identical to SEQ ID NO: 20.

[0181] In some aspects, VL1 comprises an amino acid sequence that is at least 65%, at least 70%, at least 75%, at least 80%, at least 85%, at least 90%, at least 95%, at least 99%, or 100% identical to SEQ ID NO: 11; VL2 comprises an amino acid sequence that is at least 65%, at least 70%, at least 75%, at least 80%, at least 85%, at least 90%, at least 95%, at least 99%, or 100% identical to SEQ ID NO: 17; VL3 comprises an amino acid sequence that is at least 65%, at least 70%, at least 75%, at least 80%, at least 85%, at least 90%, at least 95%, at least 99%, or 100% identical to SEQ ID NO: 11; VL4 comprises an amino acid sequence that is at least 65%, at least 70%, at least 75%, at least 80%, at least 85%, at least 90%, at least 95%, at least 99%, or 100% identical to SEQ ID NO: 17; VH1 comprises an amino acid sequence that is at least 65%, at least 70%, at least 75%, at least 80%, at least 85%, at least 90%, at least 95%, at least 99%, or 100% identical to SEQ ID NO: 14; VH2 comprises an amino acid sequence that is at least 65%, at least 70%, at least 75%, at least 80%, at least 85%, at least 90%, at least 95%, at least 99%, or 100% identical to SEQ ID NO: 21 or 22; VH3 comprises an amino acid sequence that is at least 65%, at least 70%, at least 75%, at least 80%, at least 85%, at least 90%, at least 95%, at least 99%, or 100% identical to SEQ ID NO: 14; and VH4 comprises an amino acid sequence that is at least 65%, at least 70%, at least 75%, at least 80%, at least 85%, at least 90%, at least 95%, at least 99%, or 100% identical to SEQ ID NO: 21 or 22.

[0182] In some aspects, VL1 comprises a CDR1 having an amino acid sequence at least 65%, at least 70%, at least 75%, at least 80%, at least 85%, at least 90%, at least 95%, at least 99%, or 100% identical to SEQ ID NO: 9 or 1055, a CDR2 having an amino acid sequence at least 65%, at least 70%, at least 75%, at least 80%, at least 85%, at least 90%, at least 95%, at least 99%, or 100% identical to SEQ ID NO: 1056 or an amino acid sequence at least 65%, at least 70%, at least 75%, at least 80%, at least 85%, at least 90%, at least 95%, at least 99%, or 100% identical to amino acid sequence GAS, and a CDR3 having an amino acid sequence at least 65%, at least 70%, at least 75%, at least 80%, at least 85%, at least 90%, at least 95%, at least 99%, or 100% identical to SEQ ID NO: 10; VL2 comprises a CDR1 having an amino acid sequence at least 65%, at least 70%, at least 75%, at least 80%, at least 85%, at least 90%, at least 95%, at least 99%, or 100% identical to SEQ ID NO: 23, a CDR2 having an amino acid sequence at least 65%, at least 70%, at least 75%, at least 80%, at least 85%, at least 90%, at least 95%, at least 99%, or 100% identical to amino acid sequence GTN, and a CDR3 having an amino acid sequence at least 65%, at least 70%, at least 75%, at least 80%, at least 85%, at least 90%, at least 95%, at least 99%, or 100% identical to SEQ ID NO: 24 or 325; VL3 comprises a CDR1 having an amino acid sequence at least 65%, at least 70%, at least 75%, at least 80%, at least 85%, at least 90%, at least 95%, at least 99%, or 100% identical to SEQ ID NO: 15, a CDR2 having an amino acid sequence at least 65%, at least 70%, at least 75%, at least 80%, at least 85%, at least 90%, at least 95%, at least 99%, or 100% identical to amino acid sequence LGS, and a CDR3 having an amino acid sequence at least 65%, at least 70%, at least 75%, at least 80%, at least 85%, at least 90%, at least 95%, at least 99%, or 100% identical to SEQ ID NO: 16; VL4 comprises a CDR1 having an amino acid sequence at least 65%, at least 70%, at least 75%, at least 80%, at least 85%, at least 90%, at least 95%, at least 99%, or 100% identical to SEQ ID NO: 9 or 1055, a CDR2 having an amino acid sequence at least 65%, at least 70%, at least 75%, at least 80%, at least 85%, at least 90%, at least 95%, at least 99%, or 100% identical to SEQ ID NO: 1056 or an amino acid sequence at least 65%, at least 70%, at least 75%, at least 80%, at least 85%, at least 90%, at least 95%, at least 99%, or 100% identical to amino acid sequence GAS, and a CDR3 having an amino acid sequence at least 65%, at least 70%, at least 75%, at least 80%, at least 85%, at least 90%, at least 95%, at least 99%, or 100% identical to SEQ ID NO: 10; VH1 comprises a CDR1 having an amino acid sequence at least 65%, at least 70%, at least 75%, at least 80%, at least 85%, at least 90%, at least 95%, at least 99%, or 100% identical to SEQ ID NO: 12 or 1057, a CDR2 having an amino acid sequence at least 65%, at least 70%, at least 75%, at least 80%, at least 85%, at least 90%, at least 95%, at least 99%, or 100% identical to SEQ ID NO: 6 or 1058, and a CDR3 having an amino acid sequence at least 65%, at least 70%, at least 75%, at least 80%, at least 85%, at least 90%, at least 95%, at least 99%, or 100% identical to SEQ ID NO: 13 or 1059; VH2 comprises a CDR1 having an amino acid sequence at least 65%, at least 70%, at least 75%, at least 80%, at least 85%, at least 90%, at least 95%, at least 99%, or 100% identical to SEQ ID NO: 26, a CDR2 having an amino acid sequence at least 65%, at least 70%, at least 75%, at least 80%, at least 85%, at least 90%, at least 95%, at least 99%, or 100% identical to SEQ ID NO: 27, and a CDR3 having an amino acid sequence at least 65%, at least 70%, at least 75%, at least 80%, at least 85%, at least 90%, at least 95%, at least 99%, or 100% identical to SEQ ID NO: 28 or 332; VH3 comprises a CDR1 having an amino acid sequence at least 65%, at least 70%, at least 75%, at least 80%, at least 85%, at least 90%, at least 95%, at least 99%, or 100% identical to SEQ ID NO: 18, a CDR2 having an amino acid sequence at least 65%, at least 70%, at least 75%, at least 80%, at least 85%, at least 90%, at least 95%, at least 99%, or 100% identical to SEQ ID NO: 19, and a CDR3 having an amino acid sequence at least 65%, at least 70%, at least 75%, at least 80%, at least 85%, at least 90%, at least 95%, at least 99%, or 100% identical to SEQ ID NO: 20; and VH4 comprises a CDR1 having an amino acid sequence at least 65%, at least 70%, at least 75%, at least 80%, at least 85%, at least 90%, at least 95%, at least 99%, or 100% identical to SEQ ID NO: 12 or 1057, a CDR2 having an amino acid sequence at least 65%, at least 70%, at least 75%, at least 80%, at least 85%, at least 90%, at least 95%, at least 99%, or 100% identical to SEQ ID NO: 6 or 1058, and a CDR3 having an amino acid sequence at least 65%, at least 70%, at least 75%, at least 80%, at least 85%, at least 90%, at least 95%, at least 99%, or 100% identical to SEQ ID NO: 13 or 1059.

[0183] In some aspects, VL1 comprises an amino acid sequence that is at least 65%, at least 70%, at least 75%, at least 80%, at least 85%, at least 90%, at least 95%, at least 99%, or 100% identical to SEQ ID NO: 11; VL2 comprises an amino acid sequence that is at least 65%, at least 70%, at least 75%, at least 80%, at least 85%, at least 90%, at least 95%, at least 99%, or 100% identical to SEQ ID NO: 25; VL3 comprises an amino acid sequence that is at least 65%, at least 70%, at least 75%, at least 80%, at least 85%, at least 90%, at least 95%, at least 99%, or 100% identical to SEQ ID NO: 17; VL4 comprises an amino acid sequence that is at least 65%, at least 70%, at least 75%, at least 80%, at least 85%, at least 90%, at least 95%, at least 99%, or 100% identical to SEQ ID NO: 11; VH1 comprises an amino acid sequence that is at least 65%, at least 70%, at least 75%, at least 80%, at least 85%, at least 90%, at least 95%, at least 99%, or 100% identical to SEQ ID NO: 14; VH2 comprises an amino acid sequence that is at least 65%, at least 70%, at least 75%, at least 80%, at least 85%, at least 90%, at least 95%, at least 99%, or 100% identical to SEQ ID NO: 29; VH3 comprises an amino acid sequence that is at least 65%, at least 70%, at least 75%, at least 80%, at least 85%, at least 90%, at least 95%, at least 99%, or 100% identical to SEQ ID NO: 21 or 22; and VH4 comprises an amino acid sequence that is at least 65%, at least 70%, at least 75%, at least 80%, at least 85%, at least 90%, at least 95%, at least 99%, or 100% identical to SEQ ID NO: 14.

[0184] In some aspects, VL1 comprises a CDR1 having an amino acid sequence at least 65%, at least 70%, at least 75%, at least 80%, at least 85%, at least 90%, at least 95%, at least 99%, or 100% identical to SEQ ID NO: 1 or 324, a CDR2 having an amino acid sequence at least 65%, at least 70%, at least 75%, at least 80%, at least 85%, at least 90%, at least 95%, at least 99%, or 100% identical to SEQ ID NO: 2 or an amino acid sequence at least 65%, at least 70%, at least 75%, at least 80%, at least 85%, at least 90%, at least 95%, at least 99%, or 100% identical to amino acid sequence AAS, and a CDR3 having an amino acid sequence at least 65%, at least 70%, at least 75%, at least 80%, at least 85%, at least 90%, at least 95%, at least 99%, or 100% identical to SEQ ID NO: 3; VL2 comprises a CDR1 having an amino acid sequence at least 65%, at least 70%, at least 75%, at least 80%, at least 85%, at least 90%, at least 95%, at least 99%, or 100% identical to SEQ ID NO: 23, a CDR2 having an amino acid sequence at least 65%, at least 70%, at least 75%, at least 80%, at least 85%, at least 90%, at least 95%, at least 99%, or 100% identical to amino acid sequence GTN, and a CDR3 having an amino acid sequence at least 65%, at least 70%, at least 75%, at least 80%, at least 85%, at least 90%, at least 95%, at least 99%, or 100% identical to SEQ ID NO: 24 or 325; VL3 comprises a CDR1 having an amino acid sequence at least 65%, at least 70%, at least 75%, at least 80%, at least 85%, at least 90%, at least 95%, at least 99%, or 100% identical to SEQ ID NO: 30, a CDR2 having an amino acid sequence at least 65%, at least 70%, at least 75%, at least 80%, at least 85%, at least 90%, at least 95%, at least 99%, or 100% identical to SEQ ID NO: 31 or an amino acid sequence at least 65%, at least 70%, at least 75%, at least 80%, at least 85%, at least 90%, at least 95%, at least 99%, or 100% identical to amino acid sequence SAS, and a CDR3 having an amino acid sequence at least 65%, at least 70%, at least 75%, at least 80%, at least 85%, at least 90%, at least 95%, at least 99%, or 100% identical to SEQ ID NO: 32, 38, or 326; VL4 comprises a CDR1 having an amino acid sequence at least 65%, at least 70%, at least 75%, at least 80%, at least 85%, at least 90%, at least 95%, at least 99%, or 100% identical to SEQ ID NO: 15, a CDR2 having an amino acid sequence at least 65%, at least 70%, at least 75%, at least 80%, at least 85%, at least 90%, at least 95%, at least 99%, or 100% identical to amino acid sequence LGS, and a CDR3 having an amino acid sequence at least 65%, at least 70%, at least 75%, at least 80%, at least 85%, at least 90%, at least 95%, at least 99%, or 100% identical to SEQ ID NO: 16; VH1 comprises a CDR1 having an amino acid sequence at least 65%, at least 70%, at least 75%, at least 80%, at least 85%, at least 90%, at least 95%, at least 99%, or 100% identical to SEQ ID NO: 5, a CDR2 having an amino acid sequence at least 65%, at least 70%, at least 75%, at least 80%, at least 85%, at least 90%, at least 95%, at least 99%, or 100% identical to SEQ ID NO: 6, and a CDR3 having an amino acid sequence at least 65%, at least 70%, at least 75%, at least 80%, at least 85%, at least 90%, at least 95%, at least 99%, or 100% identical to SEQ ID NO: 7; VH2 comprises a CDR1 having an amino acid sequence at least 65%, at least 70%, at least 75%, at least 80%, at least 85%, at least 90%, at least 95%, at least 99%, or 100% identical to SEQ ID NO: 26, a CDR2 having an amino acid sequence at least 65%, at least 70%, at least 75%, at least 80%, at least 85%, at least 90%, at least 95%, at least 99%, or 100% identical to SEQ ID NO: 27, and a CDR3 having an amino acid sequence at least 65%, at least 70%, at least 75%, at least 80%, at least 85%, at least 90%, at least 95%, at least 99%, or 100% identical to SEQ ID NO: 28 or 332; VH3 comprises a CDR1 having an amino acid sequence at least 65%, at least 70%, at least 75%, at least 80%, at least 85%, at least 90%, at least 95%, at least 99%, or 100% identical to SEQ ID NO: 34, a CDR2 having an amino acid sequence at least 65%, at least 70%, at least 75%, at least 80%, at least 85%, at least 90%, at least 95%, at least 99%, or 100% identical to SEQ ID NO: 35, and a CDR3 having an amino acid sequence at least 65%, at least 70%, at least 75%, at least 80%, at least 85%, at least 90%, at least 95%, at least 99%, or 100% identical to SEQ ID NO: 36, 40, or 327; and VH4 comprises a CDR1 having an amino acid sequence at least 65%, at least 70%, at least 75%, at least 80%, at least 85%, at least 90%, at least 95%, at least 99%, or 100% identical to SEQ ID NO: 18, a CDR2 having an amino acid sequence at least 65%, at least 70%, at least 75%, at least 80%, at least 85%, at least 90%, at least 95%, at least 99%, or 100% identical to SEQ ID NO: 19, and a CDR3 having an amino acid sequence at least 65%, at least 70%, at least 75%, at least 80%, at least 85%, at least 90%, at least 95%, at least 99%, or 100% identical to SEQ ID NO: 20.

[0185] In some aspects, VL1 comprises an amino acid sequence that is at least 65%, at least 70%, at least 75%, at least 80%, at least 85%, at least 90%, at least 95%, at least 99%, or 100% identical to SEQ ID NO: 4; VL2 comprises an amino acid sequence that is at least 65%, at least 70%, at least 75%, at least 80%, at least 85%, at least 90%, at least 95%, at least 99%, or 100% identical to SEQ ID NO: 25; VL3 comprises an amino acid sequence that is at least 65%, at least 70%, at least 75%, at least 80%, at least 85%, at least 90%, at least 95%, at least 99%, or 100% identical to SEQ ID NO: 33 or 39; VL4 comprises an amino acid sequence that is at least 65%, at least 70%, at least 75%, at least 80%, at least 85%, at least 90%, at least 95%, at least 99%, or 100% identical to SEQ ID NO: 17; VH1 comprises an amino acid sequence that is at least 65%, at least 70%, at least 75%, at least 80%, at least 85%, at least 90%, at least 95%, at least 99%, or 100% identical to SEQ ID NO: 8; VH2 comprises an amino acid sequence that is at least 65%, at least 70%, at least 75%, at least 80%, at least 85%, at least 90%, at least 95%, at least 99%, or 100% identical to SEQ ID NO: 29; VH3 comprises an amino acid sequence that is at least 65%, at least 70%, at least 75%, at least 80%, at least 85%, at least 90%, at least 95%, at least 99%, or 100% identical to SEQ ID NO: 37; and VH4 comprises an amino acid sequence that is at least 65%, at least 70%, at least 75%, at least 80%, at least 85%, at least 90%, at least 95%, at least 99%, or 100% identical to SEQ ID NO: 21 or 22.

[0186] Also provided herein is an antigen binding polypeptide complex comprising a first polypeptide and a second polypeptide, wherein the first polypeptide has a structure, from amino-terminus to carboxy-terminus, represented by: VL1-L1-CL-L2-VH1-L3-CH1-L4-VL2-L5-VH2; VL1-L1-CL-L2-VH1-L3-CH1-L4-VH2-L5-VL2; VL1-L1-CL-L2-VL2-L3-CH1-L4-VH1-L5-VH2; VL1-L1-CL-L2-VH2-L3-CH1-L4-VH1-L5-VL2; VL1-L1-CH1-L2-VH1-L3-CL-L4-VL2-L5-VH2; VL1-L1-CH1-L2-VH1-L3-CL-L4-VH2-L5-VL2; VL1-L1-CH1-L2-VL2-L3-CL-L4-VH1-L5-VH2; VL1-L1-CH1-L2-VH2-L3-CL-L4-VH1-L5-VL2; VH1-L1-CL-L2-VL1-L3-CH1-L4-VL2-L5-VH2; VH1-L1-CL-L2-VL1-L3-CH1-L4-VH2-L5-VL2; VH1-L1-CL-L2-VL2-L3-CH1-L4-VL1-L5-VH2; VH1-L1-CL-L2-VH2-L3-CH1-L4-VL1-L5-VL2; VH1-L1-CH1-L2-VL1-L3-CL-L4-VL2-L5-VH2; VH1-L1-CH1-L2-VL1-L3-CL-L4-VH2-L5-VL2; VH1-L1-CH1-L2-VL2-L3-CL-L4-VL1-L5-VH2; VH1-L1-CH1-L2-VH2-L3-CL-L4-VL1-L5-VL2; VL2-L1-CL-L2-VL1-L3-CH1-L4-VH2-L5-VH1; VL2-L1-CL-L2-VH1-L3-CH1-L4-VH2-L5-VL1; VL2-L1-CL-L2-VH2-L3-CH1-L4-VL1-L5-VH1; VL2-L1-CL-L2-VH2-L3-CH1-L4-VH1-L5-VL1; VL2-L1-CH1-L2- VL1-L3-CL-L4-VH2-L5-VH1; VL2-L1-CH1-L2-VH1-L3-CL-L4-VH2-L5-VL1; VL2-L1-CH1-L2-VH2-L3-CL-L4-VL1-L5-VH1; VL2-L1-CH1-L2-VH2-L3-CL-L4-VH1-L5-VL1; VH2-L1-CL-L2-VL1-L3-CH1- L4-VL2-L5-VH1; VH2-L1-CL-L2-VH1-L3-CH1-L4-VL2-L5-VL1; VH2-L1-CL-L2-VL2-L3-CH1-L4-VL1-L5-VH1; VH2-L1-CL-L2-VL2-L3-CH1-L4-VH1-L5-VL1; VH2-L1-CH1-L2-VL1-L3-CL-L4-VL2-L5-VH1; VH2-L1-CH1-L2-VH1-L3-CL-L4-VL2-L5-VL1; VH2-L1-CH1-L2-VL2-L3-CL-L4-VL1-L5-VH1; or VH2-L1-CH1-L2-VL2-L3-CL-L4-VH1-L5-VL1; wherein the second polypeptide has a structure, from amino-terminus to carboxy-terminus, represented by: VL3-L6-CL-L7-VH3-L8-CH1-L9-VL4-L10-VH4; VL3-L6-CL-L7-VH3-L8-CH1-L9-VH4-L10-VL4; VL3-L6-CL-L7-VL4-L8-CH1-L9-VH3-L10-VH4; VL3-L6-CL-L7-VH4-L8-CH1-L9-VH3-L10-VL4; VL3-L6-CH1-L7-VH3-L8-CL-L9-VL4-L10-VH4; VL3-L6-CH1-L7-VH3-L8-CL-L9-VH4-L10-VL4; VL3-L6-CH1-L7-VL4-L8-CL-L9-VH3-L10-VH4; VL3-L6-CH1-L7-VH4-L8-CL-L9-VH3-L10-VL4; VH3-L6-CL-L7-VL3-L8-CH1-L9-VL4-L10-VH4; VH3-L6-CL-L7-VL3-L8-CH1-L9-VH4-L10-VL4; VH3-L6-CL-L7-VL4-L8-CH1-L9-VL3-L10-VH4; VH3-L6-CL-L7-VH4-L8-CH1-L9-VL3-L10-VL4; VH3-L6-CH1-L7-VL3-L8-CL-L9-VL4-L10-VH4; VH3-L6-CH1-L7-VL3-L8-CL-L9-VH4-L10-VL4; VH3-L6-CH1-L7-VL4-L8-CL-L9-VL3-L10-VH4; VH3-L6-CH1-L7-VH4-L8-CL-L9-VL3-L10-VL4; VL4-L6-CL-L7-VL3-L8-CH1-L9-VH4-L10-VH3; VL4-L6-CL-L7-VH3-L8-CH1-L9-VH4-L10-VL3; VL4-L6-CL-L7-VH4-L8-CH1-L9-VL3-L10-VH3; VL4-L6-CL-L7-VH4-L8-CH1-L9-VH3-L10-VL3; VL4-L6-CH1-L7-VL3-L8-CL-L9-VH4-L10-VH3; VL4-L6-CH1-L7-VH3-L8-CL-L9-VH4-L10-VL3; VL4-L6-CH1-L7-VH4-L8-CL-L9-VL3-L10-VH3; VL4-L6-CH1-L7-VH4-L8-CL-L9-VH3-L10-VL3; VH4-L6-CL-L7-VL3-L8-CH1-L9-VL4-L10-VH3; VH4-L6-CL-L7-VH3-L8-CH1-L9-VL4-L10-VL3; VH4-L6-CL-L7-VL4-L8-CH1-L9-VL3-L10-VH3; VH4-L6-CL-L7-VL4-L8-CH1-L9-VH3-L10-VL3; VH4-L6-CH1-L7-VL3-L8-CL-L9-VL4-L10-VH3; VH4-L6-CH1-L7-VH3-L8-CL-L9-VL4-L10-VL3; VH4-L6-CH1-L7-VL4-L8-CL-L9-VL3-L10-VH3; or VH4-L6-CH1-L7-VL4-L8-CL-L9-VH3-L10-VL3; and wherein: VL1 is a first immunoglobulin light chain variable region that specifically binds to a severe acute respiratory syndrome coronavirus 2 (SARS-CoV-2) protein; VL2 is a second immunoglobulin light chain variable region that specifically binds to a SARS-CoV-2 protein; VL3 is a third immunoglobulin light chain variable region that specifically binds to a SARS-CoV-2 protein; VL4 is a fourth immunoglobulin light chain variable region that specifically binds to a SARS-CoV-2 protein; VH1 is a first immunoglobulin heavy chain variable region that specifically binds to a SARS-CoV-2 protein; VH2 is a second immunoglobulin heavy chain variable region that specifically binds to a SARS-CoV-2 protein; VH3 is a third immunoglobulin heavy chain variable region that specifically binds to a SARS-CoV-2 protein; VH4 is a fourth immunoglobulin heavy chain variable region that specifically binds to a SARS-CoV-2 protein; CL is an immunoglobulin light chain constant region; CH1 is an immunoglobulin heavy chain constant region 1; and L1-L10 are optional amino acid linkers.

[0187] In some aspects, VL1 comprises a CDR1 having an amino acid sequence at least 65%, at least 70%, at least 75%, at least 80%, at least 85%, at least 90%, at least 95%, at least 99%, or 100% identical to SEQ ID NO: 9 or 1055, a CDR2 having an amino acid sequence at least 65%, at least 70%, at least 75%, at least 80%, at least 85%, at least 90%, at least 95%, at least 99%, or 100% identical to SEQ ID NO: 1056 or an amino acid sequence at least 65%, at least 70%, at least 75%, at least 80%, at least 85%, at least 90%, at least 95%, at least 99%, or 100% identical to amino acid sequence GAS, and a CDR3 having an amino acid sequence at least 65%, at least 70%, at least 75%, at least 80%, at least 85%, at least 90%, at least 95%, at least 99%, or 100% identical to SEQ ID NO: 10; VL2 comprises a CDR1 having an amino acid sequence at least 65%, at least 70%, at least 75%, at least 80%, at least 85%, at least 90%, at least 95%, at least 99%, or 100% identical to SEQ ID NO: 15, a CDR2 having an amino acid sequence at least 65%, at least 70%, at least 75%, at least 80%, at least 85%, at least 90%, at least 95%, at least 99%, or 100% identical to amino acid sequence LGS, and a CDR3 having an amino acid sequence at least 65%, at least 70%, at least 75%, at least 80%, at least 85%, at least 90%, at least 95%, at least 99%, or 100% identical to SEQ ID NO: 16; VL3 comprises a CDR1 having an amino acid sequence at least 65%, at least 70%, at least 75%, at least 80%, at least 85%, at least 90%, at least 95%, at least 99%, or 100% identical to SEQ ID NO: 9 or 1055, a CDR2 having an amino acid sequence at least 65%, at least 70%, at least 75%, at least 80%, at least 85%, at least 90%, at least 95%, at least 99%, or 100% identical to SEQ ID NO: 1056 or an amino acid sequence at least 65%, at least 70%, at least 75%, at least 80%, at least 85%, at least 90%, at least 95%, at least 99%, or 100% identical to amino acid sequence GAS, and a CDR3 having an amino acid sequence at least 65%, at least 70%, at least 75%, at least 80%, at least 85%, at least 90%, at least 95%, at least 99%, or 100% identical to SEQ ID NO: 10; VL4 comprises a CDR1 having an amino acid sequence at least 65%, at least 70%, at least 75%, at least 80%, at least 85%, at least 90%, at least 95%, at least 99%, or 100% identical to SEQ ID NO: 15, a CDR2 having an amino acid sequence at least 65%, at least 70%, at least 75%, at least 80%, at least 85%, at least 90%, at least 95%, at least 99%, or 100% identical to amino acid sequence LGS, and a CDR3 having an amino acid sequence at least 65%, at least 70%, at least 75%, at least 80%, at least 85%, at least 90%, at least 95%, at least 99%, or 100% identical to SEQ ID NO: 16; VH1 comprises a CDR1 having an amino acid sequence at least 65%, at least 70%, at least 75%, at least 80%, at least 85%, at least 90%, at least 95%, at least 99%, or 100% identical to SEQ ID NO: 12 or 1057, a CDR2 having an amino acid sequence at least 65%, at least 70%, at least 75%, at least 80%, at least 85%, at least 90%, at least 95%, at least 99%, or 100% identical to SEQ ID NO: 6 or 1058, and a CDR3 having an amino acid sequence at least 65%, at least 70%, at least 75%, at least 80%, at least 85%, at least 90%, at least 95%, at least 99%, or 100% identical to SEQ ID NO: 13 or 1059; VH2 comprises a CDR1 having an amino acid sequence at least 65%, at least 70%, at least 75%, at least 80%, at least 85%, at least 90%, at least 95%, at least 99%, or 100% identical to SEQ ID NO: 18, a CDR2 having an amino acid sequence at least 65%, at least 70%, at least 75%, at least 80%, at least 85%, at least 90%, at least 95%, at least 99%, or 100% identical to SEQ ID NO: 19, and a CDR3 having an amino acid sequence at least 65%, at least 70%, at least 75%, at least 80%, at least 85%, at least 90%, at least 95%, at least 99%, or 100% identical to SEQ ID NO: 20; VH3 comprises a CDR1 having an amino acid sequence at least 65%, at least 70%, at least 75%, at least 80%, at least 85%, at least 90%, at least 95%, at least 99%, or 100% identical to SEQ ID NO: 12 or 1057, a CDR2 having an amino acid sequence at least 65%, at least 70%, at least 75%, at least 80%, at least 85%, at least 90%, at least 95%, at least 99%, or 100% identical to SEQ ID NO: 6 or 1058, and a CDR3 having an amino acid sequence at least 65%, at least 70%, at least 75%, at least 80%, at least 85%, at least 90%, at least 95%, at least 99%, or 100% identical to SEQ ID NO: 13 or 1059; and VH4 comprises a CDR1 having an amino acid sequence at least 65%, at least 70%, at least 75%, at least 80%, at least 85%, at least 90%, at least 95%, at least 99%, or 100% identical to SEQ ID NO: 18, a CDR2 having an amino acid sequence at least 65%, at least 70%, at least 75%, at least 80%, at least 85%, at least 90%, at least 95%, at least 99%, or 100% identical to SEQ ID NO: 19, and a CDR3 having an amino acid sequence at least 65%, at least 70%, at least 75%, at least 80%, at least 85%, at least 90%, at least 95%, at least 99%, or 100% identical to SEQ ID NO: 20.

[0188] In some aspects, VL1 comprises an amino acid sequence that is at least 65%, at least 70%, at least 75%, at least 80%, at least 85%, at least 90%, at least 95%, at least 99%, or 100% identical to SEQ ID NO: 11; VL2 comprises an amino acid sequence that is at least 65%, at least 70%, at least 75%, at least 80%, at least 85%, at least 90%, at least 95%, at least 99%, or 100% identical to SEQ ID NO: 17; VL3 comprises an amino acid sequence that is at least 65%, at least 70%, at least 75%, at least 80%, at least 85%, at least 90%, at least 95%, at least 99%, or 100% identical to SEQ ID NO: 11; VL4 comprises an amino acid sequence that is at least 65%, at least 70%, at least 75%, at least 80%, at least 85%, at least 90%, at least 95%, at least 99%, or 100% identical to SEQ ID NO: 17; VH1 comprises an amino acid sequence that is at least 65%, at least 70%, at least 75%, at least 80%, at least 85%, at least 90%, at least 95%, at least 99%, or 100% identical to SEQ ID NO: 14; VH2 comprises an amino acid sequence that is at least 65%, at least 70%, at least 75%, at least 80%, at least 85%, at least 90%, at least 95%, at least 99%, or 100% identical to SEQ ID NO: 21 or 22; VH3 comprises an amino acid sequence that is at least 65%, at least 70%, at least 75%, at least 80%, at least 85%, at least 90%, at least 95%, at least 99%, or 100% identical to SEQ ID NO: 14; and VH4 comprises an amino acid sequence that is at least 65%, at least 70%, at least 75%, at least 80%, at least 85%, at least 90%, at least 95%, at least 99%, or 100% identical to SEQ ID NO: 21 or 22.

[0189] In some aspects, VL1 comprises a CDR1 having an amino acid sequence at least 65%, at least 70%, at least 75%, at least 80%, at least 85%, at least 90%, at least 95%, at least 99%, or 100% identical to SEQ ID NO: 9 or 1055, a CDR2 having an amino acid sequence at least 65%, at least 70%, at least 75%, at least 80%, at least 85%, at least 90%, at least 95%, at least 99%, or 100% identical to SEQ ID NO: 1056 or an amino acid sequence at least 65%, at least 70%, at least 75%, at least 80%, at least 85%, at least 90%, at least 95%, at least 99%, or 100% identical to amino acid sequence GAS, and a CDR3 having an amino acid sequence at least 65%, at least 70%, at least 75%, at least 80%, at least 85%, at least 90%, at least 95%, at least 99%, or 100% identical to SEQ ID NO: 10; VL2 comprises a CDR1 having an amino acid sequence at least 65%, at least 70%, at least 75%, at least 80%, at least 85%, at least 90%, at least 95%, at least 99%, or 100% identical to SEQ ID NO: 23, a CDR2 having an amino acid sequence at least 65%, at least 70%, at least 75%, at least 80%, at least 85%, at least 90%, at least 95%, at least 99%, or 100% identical to amino acid sequence GTN, and a CDR3 having an amino acid sequence at least 65%, at least 70%, at least 75%, at least 80%, at least 85%, at least 90%, at least 95%, at least 99%, or 100% identical to SEQ ID NO: 24 or 325; VL3 comprises a CDR1 having an amino acid sequence at least 65%, at least 70%, at least 75%, at least 80%, at least 85%, at least 90%, at least 95%, at least 99%, or 100% identical to SEQ ID NO: 15, a CDR2 having an amino acid sequence at least 65%, at least 70%, at least 75%, at least 80%, at least 85%, at least 90%, at least 95%, at least 99%, or 100% identical to amino acid sequence LGS, and a CDR3 having an amino acid sequence at least 65%, at least 70%, at least 75%, at least 80%, at least 85%, at least 90%, at least 95%, at least 99%, or 100% identical to SEQ ID NO: 16; VL4 comprises a CDR1 having an amino acid sequence at least 65%, at least 70%, at least 75%, at least 80%, at least 85%, at least 90%, at least 95%, at least 99%, or 100% identical to SEQ ID NO: 9 or 1055, a CDR2 having an amino acid sequence at least 65%, at least 70%, at least 75%, at least 80%, at least 85%, at least 90%, at least 95%, at least 99%, or 100% identical to SEQ ID NO: 1056 or an amino acid sequence at least 65%, at least 70%, at least 75%, at least 80%, at least 85%, at least 90%, at least 95%, at least 99%, or 100% identical to amino acid sequence GAS, and a CDR3 having an amino acid sequence at least 65%, at least 70%, at least 75%, at least 80%, at least 85%, at least 90%, at least 95%, at least 99%, or 100% identical to SEQ ID NO: 10; VH1 comprises a CDR1 having an amino acid sequence at least 65%, at least 70%, at least 75%, at least 80%, at least 85%, at least 90%, at least 95%, at least 99%, or 100% identical to SEQ ID NO: 12 or 1057, a CDR2 having an amino acid sequence at least 65%, at least 70%, at least 75%, at least 80%, at least 85%, at least 90%, at least 95%, at least 99%, or 100% identical to SEQ ID NO: 6 or 1058, and a CDR3 having an amino acid sequence at least 65%, at least 70%, at least 75%, at least 80%, at least 85%, at least 90%, at least 95%, at least 99%, or 100% identical to SEQ ID NO: 13 or 1059; VH2 comprises a CDR1 having an amino acid sequence at least 65%, at least 70%, at least 75%, at least 80%, at least 85%, at least 90%, at least 95%, at least 99%, or 100% identical to SEQ ID NO: 26, a CDR2 having an amino acid sequence at least 65%, at least 70%, at least 75%, at least 80%, at least 85%, at least 90%, at least 95%, at least 99%, or 100% identical to SEQ ID NO: 27, and a CDR3 having an amino acid sequence at least 65%, at least 70%, at least 75%, at least 80%, at least 85%, at least 90%, at least 95%, at least 99%, or 100% identical to SEQ ID NO: 28 or 332; VH3 comprises a CDR1 having an amino acid sequence at least 65%, at least 70%, at least 75%, at least 80%, at least 85%, at least 90%, at least 95%, at least 99%, or 100% identical to SEQ ID NO: 18, a CDR2 having an amino acid sequence at least 65%, at least 70%, at least 75%, at least 80%, at least 85%, at least 90%, at least 95%, at least 99%, or 100% identical to SEQ ID NO: 19, and a CDR3 having an amino acid sequence at least 65%, at least 70%, at least 75%, at least 80%, at least 85%, at least 90%, at least 95%, at least 99%, or 100% identical to SEQ ID NO: 20; and VH4 comprises a CDR1 having an amino acid sequence at least 65%, at least 70%, at least 75%, at least 80%, at least 85%, at least 90%, at least 95%, at least 99%, or 100% identical to SEQ ID NO: 12 or 1057, a CDR2 having an amino acid sequence at least 65%, at least 70%, at least 75%, at least 80%, at least 85%, at least 90%, at least 95%, at least 99%, or 100% identical to SEQ ID NO: 6 or 1058, and a CDR3 having an amino acid sequence at least 65%, at least 70%, at least 75%, at least 80%, at least 85%, at least 90%, at least 95%, at least 99%, or 100% identical to SEQ ID NO: 13 or 1059.

[0190] In some aspects, VL1 comprises an amino acid sequence that is at least 65%, at least 70%, at least 75%, at least 80%, at least 85%, at least 90%, at least 95%, at least 99%, or 100% identical to SEQ ID NO: 11; VL2 comprises an amino acid sequence that is at least 65%, at least 70%, at least 75%, at least 80%, at least 85%, at least 90%, at least 95%, at least 99%, or 100% identical to SEQ ID NO: 25; VL3 comprises an amino acid sequence that is at least 65%, at least 70%, at least 75%, at least 80%, at least 85%, at least 90%, at least 95%, at least 99%, or 100% identical to SEQ ID NO: 17; VL4 comprises an amino acid sequence that is at least 65%, at least 70%, at least 75%, at least 80%, at least 85%, at least 90%, at least 95%, at least 99%, or 100% identical to SEQ ID NO: 11; VH1 comprises an amino acid sequence that is at least 65%, at least 70%, at least 75%, at least 80%, at least 85%, at least 90%, at least 95%, at least 99%, or 100% identical to SEQ ID NO: 14; VH2 comprises an amino acid sequence that is at least 65%, at least 70%, at least 75%, at least 80%, at least 85%, at least 90%, at least 95%, at least 99%, or 100% identical to SEQ ID NO: 29; VH3 comprises an amino acid sequence that is at least 65%, at least 70%, at least 75%, at least 80%, at least 85%, at least 90%, at least 95%, at least 99%, or 100% identical to SEQ ID NO: 21 or 22; and VH4 comprises an amino acid sequence that is at least 65%, at least 70%, at least 75%, at least 80%, at least 85%, at least 90%, at least 95%, at least 99%, or 100% identical to SEQ ID NO: 14.

[0191] In some aspects, VL1 comprises a CDR1 having an amino acid sequence at least 65%, at least 70%, at least 75%, at least 80%, at least 85%, at least 90%, at least 95%, at least 99%, or 100% identical to SEQ ID NO: 1 or 324, a CDR2 having an amino acid sequence at least 65%, at least 70%, at least 75%, at least 80%, at least 85%, at least 90%, at least 95%, at least 99%, or 100% identical to SEQ ID NO: 2 or an amino acid sequence at least 65%, at least 70%, at least 75%, at least 80%, at least 85%, at least 90%, at least 95%, at least 99%, or 100% identical to amino acid sequence AAS, and a CDR3 having an amino acid sequence at least 65%, at least 70%, at least 75%, at least 80%, at least 85%, at least 90%, at least 95%, at least 99%, or 100% identical to SEQ ID NO: 3; VL2 comprises a CDR1 having an amino acid sequence at least 65%, at least 70%, at least 75%, at least 80%, at least 85%, at least 90%, at least 95%, at least 99%, or 100% identical to SEQ ID NO: 23, a CDR2 having an amino acid sequence at least 65%, at least 70%, at least 75%, at least 80%, at least 85%, at least 90%, at least 95%, at least 99%, or 100% identical to amino acid sequence GTN, and a CDR3 having an amino acid sequence at least 65%, at least 70%, at least 75%, at least 80%, at least 85%, at least 90%, at least 95%, at least 99%, or 100% identical to SEQ ID NO: 24 or 325; VL3 comprises a CDR1 having an amino acid sequence at least 65%, at least 70%, at least 75%, at least 80%, at least 85%, at least 90%, at least 95%, at least 99%, or 100% identical to SEQ ID NO: 30, a CDR2 having an amino acid sequence at least 65%, at least 70%, at least 75%, at least 80%, at least 85%, at least 90%, at least 95%, at least 99%, or 100% identical to SEQ ID NO: 31 or an amino acid sequence at least 65%, at least 70%, at least 75%, at least 80%, at least 85%, at least 90%, at least 95%, at least 99%, or 100% identical to amino acid sequence SAS, and a CDR3 having an amino acid sequence at least 65%, at least 70%, at least 75%, at least 80%, at least 85%, at least 90%, at least 95%, at least 99%, or 100% identical to SEQ ID NO: 32, 38, or 326; VL4 comprises a CDR1 having an amino acid sequence at least 65%, at least 70%, at least 75%, at least 80%, at least 85%, at least 90%, at least 95%, at least 99%, or 100% identical to SEQ ID NO: 15, a CDR2 having an amino acid sequence at least 65%, at least 70%, at least 75%, at least 80%, at least 85%, at least 90%, at least 95%, at least 99%, or 100% identical to amino acid sequence LGS, and a CDR3 having an amino acid sequence at least 65%, at least 70%, at least 75%, at least 80%, at least 85%, at least 90%, at least 95%, at least 99%, or 100% identical to SEQ ID NO: 16; VH1 comprises a CDR1 having an amino acid sequence at least 65%, at least 70%, at least 75%, at least 80%, at least 85%, at least 90%, at least 95%, at least 99%, or 100% identical to SEQ ID NO: 5, a CDR2 having an amino acid sequence at least 65%, at least 70%, at least 75%, at least 80%, at least 85%, at least 90%, at least 95%, at least 99%, or 100% identical to SEQ ID NO: 6, and a CDR3 having an amino acid sequence at least 65%, at least 70%, at least 75%, at least 80%, at least 85%, at least 90%, at least 95%, at least 99%, or 100% identical to SEQ ID NO: 7; VH2 comprises a CDR1 having an amino acid sequence at least 65%, at least 70%, at least 75%, at least 80%, at least 85%, at least 90%, at least 95%, at least 99%, or 100% identical to SEQ ID NO: 26, a CDR2 having an amino acid sequence at least 65%, at least 70%, at least 75%, at least 80%, at least 85%, at least 90%, at least 95%, at least 99%, or 100% identical to SEQ ID NO: 27, and a CDR3 having an amino acid sequence at least 65%, at least 70%, at least 75%, at least 80%, at least 85%, at least 90%, at least 95%, at least 99%, or 100% identical to SEQ ID NO: 28 or 332; VH3 comprises a CDR1 having an amino acid sequence at least 65%, at least 70%, at least 75%, at least 80%, at least 85%, at least 90%, at least 95%, at least 99%, or 100% identical to SEQ ID NO: 34, a CDR2 having an amino acid sequence at least 65%, at least 70%, at least 75%, at least 80%, at least 85%, at least 90%, at least 95%, at least 99%, or 100% identical to SEQ ID NO: 35, and a CDR3 having an amino acid sequence at least 65%, at least 70%, at least 75%, at least 80%, at least 85%, at least 90%, at least 95%, at least 99%, or 100% identical to SEQ ID NO: 36, 40, or 327; and VH4 comprises a CDR1 having an amino acid sequence at least 65%, at least 70%, at least 75%, at least 80%, at least 85%, at least 90%, at least 95%, at least 99%, or 100% identical to SEQ ID NO: 18, a CDR2 having an amino acid sequence at least 65%, at least 70%, at least 75%, at least 80%, at least 85%, at least 90%, at least 95%, at least 99%, or 100% identical to SEQ ID NO: 19, and a CDR3 having an amino acid sequence at least 65%, at least 70%, at least 75%, at least 80%, at least 85%, at least 90%, at least 95%, at least 99%, or 100% identical to SEQ ID NO: 20.

[0192] In some aspects, VL1 comprises an amino acid sequence that is at least 65%, at least 70%, at least 75%, at least 80%, at least 85%, at least 90%, at least 95%, at least 99%, or 100% identical to SEQ ID NO: 4; VL2 comprises an amino acid sequence that is at least 65%, at least 70%, at least 75%, at least 80%, at least 85%, at least 90%, at least 95%, at least 99%, or 100% identical to SEQ ID NO: 25; VL3 comprises an amino acid sequence that is at least 65%, at least 70%, at least 75%, at least 80%, at least 85%, at least 90%, at least 95%, at least 99%, or 100% identical to SEQ ID NO: 33, or 39; VL4 comprises an amino acid sequence that is at least 65%, at least 70%, at least 75%, at least 80%, at least 85%, at least 90%, at least 95%, at least 99%, or 100% identical to SEQ ID NO: 17; VH1 comprises an amino acid sequence that is at least 65%, at least 70%, at least 75%, at least 80%, at least 85%, at least 90%, at least 95%, at least 99%, or 100% identical to SEQ ID NO: 8; VH2 comprises an amino acid sequence that is at least 65%, at least 70%, at least 75%, at least 80%, at least 85%, at least 90%, at least 95%, at least 99%, or 100% identical to SEQ ID NO: 29; VH3 comprises an amino acid sequence that is at least 65%, at least 70%, at least 75%, at least 80%, at least 85%, at least 90%, at least 95%, at least 99%, or 100% identical to SEQ ID NO: 37; and VH4 comprises an amino acid sequence that is at least 65%, at least 70%, at least 75%, at least 80%, at least 85%, at least 90%, at least 95%, at least 99%, or 100% identical to SEQ ID NO: 21 or 22.

[0193] Also provided herein is an antigen binding polypeptide complex comprising a first polypeptide and a second polypeptide, wherein the first polypeptide has a structure, from amino-terminus to carboxy-terminus, represented by: VL1-L1-VH1-L2-VL2-L3-CL-L4-VH2-L5-CH1; VL1-L1-VH1-L2-VL2-L3-CH1-L4-VH2-L5-CL; VL1-L1-VH1-L2-VH2-L3-CL-L4-VL2-L5-CH1; VL1-L1-VH1-L2-VH2-L3-CH1-L4-VL2-L5-CL; VL1-L1-VL2-L2-VH1-L3-CL-L4-VH2-L5-CH1; VL1-L1-VL2-L2-VH1-L3-CH1-L4-VH2-L5-CL; VL1-L1-VH2-L2-VH1-L3-CL-L4-VL2-L5-CH1; VL1-L1-VH2-L2-VH1-L3-CH1-L4-VL2-L5-CL; VH1-L1-VL1-L2-VL2-L3-CL-L4-VH2-L5-CH1; VH1-L1-VL1-L2-VL2-L3-CH1-L4-VH2-L5-CL; VH1-L1-VL1-L2-VH2-L3-CL-L4-VL2-L5-CH1; VH1-L1-VL1-L2-VH2-L3-CH1-L4-VL2-L5- CL; VH1-L1-VL2-L2-VL1-L3-CL-L4-VH2-L5-CH1; VH1-L1-VL2-L2-VL1-L3-CH1-L4-VH2-L5-CL; VH1-L1-VH2-L2-VL1-L3-CL-L4-VL2-L5-CH1; VH1-L1-VH2-L2-VL1-L3-CH1-L4-VL2-L5-CL; VL2-L1-VL1-L2-VH2-L3-CL-L4-VH1-L5-CH1; VL2-L1-VL1-L2-VH2-L3-CH1-L4-VH1-L5-CL; VL2-L1-VH1-L2-VH2-L3-CL-L4-VL1-L5-CH1; VL2-L1-VH1-L2-VH2-L3-CH1-L4-VL1-L5-CL; VL2-L1-VH2-L2-VL1-L3-CL-L4-VH1-L5-CH1; VL2-L1-VH2-L2-VL1-L3-CH1-L4-VH1-L5-CL; VL2-L1-VH2-L2-VH1-L3-CL-L4-VL1-L5-CH1; VL2-L1-VH2-L2-VH1-L3-CH1-L4-VL1-L5-CL; VH2-L1-VL1-L2-VL2-L3-CL-L4-VH1-L5-CH1; VH2-L1-VL1-L2-VL2-L3-CH1-L4-VH1-L5-CL; VH2-L1-VH1-L2-VL2-L3-CL-L4-VL1-L5-CH1; VH2-L1-VH1-L2-VL2-L3-CH1-L4-VL1-L5-CL; VH2-L1-VL2-L2-VL1-L3-CL-L4-VH1-L5-CH1; VH2-L1-VL2-L2-VL1-L3-CH1-L4-VH1-L5-CL; VH2-L1-VL2-L2-VH1-L3-CL-L4-VL1-L5-CH1; or VH2-L1-VL2-L2-VH1-L3-CH1-L4-VL1-L5-CL; wherein the second polypeptide has a structure, from amino-terminus to carboxy-terminus, represented by: VL3-L6-CL-L7-VH3-L8-CH1-L9-VL4-L10-VH4; VL3-L6-CL-L7-VH3-L8-CH1-L9-VH4-L10-VL4; VL3-L6-CL-L7-VL4-L8-CH1-L9-VH3-L10-VH4; VL3-L6-CL-L7-VH4-L8-CH1-L9-VH3-L10-VL4; VL3-L6-CH1-L7-VH3-L8-CL-L9-VL4-L10-VH4; VL3-L6-CH1-L7-VH3-L8-CL-L9-VH4-L10-VL4; VL3-L6-CH1-L7-VL4-L8-CL-L9-VH3-L10-VH4; VL3-L6-CH1-L7-VH4-L8-CL-L9-VH3-L10-VL4; VH3-L6-CL-L7-VL3-L8-CH1-L9-VL4-L10-VH4; VH3-L6-CL-L7-VL3-L8-CH1-L9-VH4-L10-VL4; VH3-L6-CL-L7-VL4-L8-CH1-L9-VL3-L10-VH4; VH3-L6-CL-L7-VH4-L8-CH1-L9-VL3-L10-VL4; VH3-L6-CH1-L7-VL3-L8-CL-L9-VL4-L10-VH4; VH3-L6-CH1-L7-VL3-L8-CL-L9-VH4-L10-VL4; VH3-L6-CH1-L7-VL4-L8-CL-L9-VL3-L10-VH4; VH3-L6-CH1-L7-VH4-L8-CL-L9-VL3-L10-VL4; VL4-L6-CL-L7-VL3-L8-CH1-L9-VH4-L10-VH3; VL4-L6-CL-L7-VH3-L8-CH1-L9-VH4-L10-VL3; VL4-L6-CL-L7-VH4-L8-CH1-L9-VL3-L10-VH3; VL4-L6-CL-L7-VH4-L8-CH1-L9-VH3-L10-VL3; VL4-L6-CH1-L7-VL3-L8-CL-L9-VH4-L10-VH3; VL4-L6-CH1-L7-VH3-L8-CL-L9-VH4-L10-VL3; VL4-L6-CH1-L7-VH4-L8-CL-L9-VL3-L10-VH3; VL4-L6-CH1-L7-VH4-L8-CL-L9-VH3-L10-VL3; VH4-L6-CL-L7-VL3-L8-CH1-L9-VL4-L10-VH3; VH4-L6-CL-L7-VH3-L8-CH1-L9-VL4-L10-VL3; VH4-L6-CL-L7-VL4-L8-CH1-L9-VL3-L10-VH3; VH4-L6-CL-L7-VL4-L8-CH1-L9-VH3-L10-VL3; VH4-L6-CH1-L7-VL3-L8-CL-L9-VL4-L10-VH3; VH4-L6-CH1-L7-VH3-L8-CL-L9-VL4-L10-VL3; VH4-L6-CH1-L7-VL4-L8-CL-L9-VL3-L10-VH3; or VH4-L6-CH1-L7-VL4-L8-CL-L9-VH3-L10-VL3; and wherein: VL1 is a first immunoglobulin light chain variable region that specifically binds to a severe acute respiratory syndrome coronavirus 2 (SARS-CoV-2) protein; VL2 is a second immunoglobulin light chain variable region that specifically binds to a SARS-CoV-2 protein; VL3 is a third immunoglobulin light chain variable region that specifically binds to a SARS-CoV-2 protein; VL4 is a fourth immunoglobulin light chain variable region that specifically binds to a SARS-CoV-2 protein; VH1 is a first immunoglobulin heavy chain variable region that specifically binds to a SARS-CoV-2 protein; VH2 is a second immunoglobulin heavy chain variable region that specifically binds to a SARS-CoV-2 protein; VH3 is a third immunoglobulin heavy chain variable region that specifically binds to a SARS-CoV-2 protein; VH4 is a fourth immunoglobulin heavy chain variable region that specifically binds to a SARS-CoV-2 protein; CL is an immunoglobulin light chain constant region; CH1 is an immunoglobulin heavy chain constant region 1; and L1-L10 are optional amino acid linkers.

[0194] In some aspects, VL1 comprises a CDR1 having an amino acid sequence at least 65%, at least 70%, at least 75%, at least 80%, at least 85%, at least 90%, at least 95%, at least 99%, or 100% identical to SEQ ID NO: 9 or 1055, a CDR2 having an amino acid sequence at least 65%, at least 70%, at least 75%, at least 80%, at least 85%, at least 90%, at least 95%, at least 99%, or 100% identical to SEQ ID NO: 1056 or an amino acid sequence at least 65%, at least 70%, at least 75%, at least 80%, at least 85%, at least 90%, at least 95%, at least 99%, or 100% identical to amino acid sequence GAS, and a CDR3 having an amino acid sequence at least 65%, at least 70%, at least 75%, at least 80%, at least 85%, at least 90%, at least 95%, at least 99%, or 100% identical to SEQ ID NO: 10; VL2 comprises a CDR1 having an amino acid sequence at least 65%, at least 70%, at least 75%, at least 80%, at least 85%, at least 90%, at least 95%, at least 99%, or 100% identical to SEQ ID NO: 15, a CDR2 having an amino acid sequence at least 65%, at least 70%, at least 75%, at least 80%, at least 85%, at least 90%, at least 95%, at least 99%, or 100% identical to amino acid sequence LGS, and a CDR3 having an amino acid sequence at least 65%, at least 70%, at least 75%, at least 80%, at least 85%, at least 90%, at least 95%, at least 99%, or 100% identical to SEQ ID NO: 16; VL3 comprises a CDR1 having an amino acid sequence at least 65%, at least 70%, at least 75%, at least 80%, at least 85%, at least 90%, at least 95%, at least 99%, or 100% identical to SEQ ID NO: 9 or 1055, a CDR2 having an amino acid sequence at least 65%, at least 70%, at least 75%, at least 80%, at least 85%, at least 90%, at least 95%, at least 99%, or 100% identical to SEQ ID NO: 1056 or an amino acid sequence at least 65%, at least 70%, at least 75%, at least 80%, at least 85%, at least 90%, at least 95%, at least 99%, or 100% identical to amino acid sequence GAS, and a CDR3 having an amino acid sequence at least 65%, at least 70%, at least 75%, at least 80%, at least 85%, at least 90%, at least 95%, at least 99%, or 100% identical to SEQ ID NO: 10; VL4 comprises a CDR1 having an amino acid sequence at least 65%, at least 70%, at least 75%, at least 80%, at least 85%, at least 90%, at least 95%, at least 99%, or 100% identical to SEQ ID NO: 15, a CDR2 having an amino acid sequence at least 65%, at least 70%, at least 75%, at least 80%, at least 85%, at least 90%, at least 95%, at least 99%, or 100% identical to amino acid sequence LGS, and a CDR3 having an amino acid sequence at least 65%, at least 70%, at least 75%, at least 80%, at least 85%, at least 90%, at least 95%, at least 99%, or 100% identical to SEQ ID NO: 16; VH1 comprises a CDR1 having an amino acid sequence at least 65%, at least 70%, at least 75%, at least 80%, at least 85%, at least 90%, at least 95%, at least 99%, or 100% identical to SEQ ID NO: 12 or 1057, a CDR2 having an amino acid sequence at least 65%, at least 70%, at least 75%, at least 80%, at least 85%, at least 90%, at least 95%, at least 99%, or 100% identical to SEQ ID NO: 6 or 1058, and a CDR3 having an amino acid sequence at least 65%, at least 70%, at least 75%, at least 80%, at least 85%, at least 90%, at least 95%, at least 99%, or 100% identical to SEQ ID NO: 13 or 1059; VH2 comprises a CDR1 having an amino acid sequence at least 65%, at least 70%, at least 75%, at least 80%, at least 85%, at least 90%, at least 95%, at least 99%, or 100% identical to SEQ ID NO: 18, a CDR2 having an amino acid sequence at least 65%, at least 70%, at least 75%, at least 80%, at least 85%, at least 90%, at least 95%, at least 99%, or 100% identical to SEQ ID NO: 19, and a CDR3 having an amino acid sequence at least 65%, at least 70%, at least 75%, at least 80%, at least 85%, at least 90%, at least 95%, at least 99%, or 100% identical to SEQ ID NO: 20; VH3 comprises a CDR1 having an amino acid sequence at least 65%, at least 70%, at least 75%, at least 80%, at least 85%, at least 90%, at least 95%, at least 99%, or 100% identical to SEQ ID NO: 12 or 1057, a CDR2 having an amino acid sequence at least 65%, at least 70%, at least 75%, at least 80%, at least 85%, at least 90%, at least 95%, at least 99%, or 100% identical to SEQ ID NO: 6 or 1058, and a CDR3 having an amino acid sequence at least 65%, at least 70%, at least 75%, at least 80%, at least 85%, at least 90%, at least 95%, at least 99%, or 100% identical to SEQ ID NO: 13 or 1059; and VH4 comprises a CDR1 having an amino acid sequence at least 65%, at least 70%, at least 75%, at least 80%, at least 85%, at least 90%, at least 95%, at least 99%, or 100% identical to SEQ ID NO: 18, a CDR2 having an amino acid sequence at least 65%, at least 70%, at least 75%, at least 80%, at least 85%, at least 90%, at least 95%, at least 99%, or 100% identical to SEQ ID NO: 19, and a CDR3 having an amino acid sequence at least 65%, at least 70%, at least 75%, at least 80%, at least 85%, at least 90%, at least 95%, at least 99%, or 100% identical to SEQ ID NO: 20.

[0195] In some aspects, VL1 comprises an amino acid sequence that is at least 65%, at least 70%, at least 75%, at least 80%, at least 85%, at least 90%, at least 95%, at least 99%, or 100% identical to SEQ ID NO: 11; VL2 comprises an amino acid sequence that is at least 65%, at least 70%, at least 75%, at least 80%, at least 85%, at least 90%, at least 95%, at least 99%, or 100% identical to SEQ ID NO: 17; VL3 comprises an amino acid sequence that is at least 65%, at least 70%, at least 75%, at least 80%, at least 85%, at least 90%, at least 95%, at least 99%, or 100% identical to SEQ ID NO: 11; VL4 comprises an amino acid sequence that is at least 65%, at least 70%, at least 75%, at least 80%, at least 85%, at least 90%, at least 95%, at least 99%, or 100% identical to SEQ ID NO: 17; VH1 comprises an amino acid sequence that is at least 65%, at least 70%, at least 75%, at least 80%, at least 85%, at least 90%, at least 95%, at least 99%, or 100% identical to SEQ ID NO: 14; VH2 comprises an amino acid sequence that is at least 65%, at least 70%, at least 75%, at least 80%, at least 85%, at least 90%, at least 95%, at least 99%, or 100% identical to SEQ ID NO: 21 or 22; VH3 comprises an amino acid sequence that is at least 65%, at least 70%, at least 75%, at least 80%, at least 85%, at least 90%, at least 95%, at least 99%, or 100% identical to SEQ ID NO: 14; and VH4 comprises an amino acid sequence that is at least 65%, at least 70%, at least 75%, at least 80%, at least 85%, at least 90%, at least 95%, at least 99%, or 100% identical to SEQ ID NO: 21 or 22.

[0196] In some aspects, VL1 comprises a CDR1 having an amino acid sequence at least 65%, at least 70%, at least 75%, at least 80%, at least 85%, at least 90%, at least 95%, at least 99%, or 100% identical to SEQ ID NO: 9 or 1055, a CDR2 having an amino acid sequence at least 65%, at least 70%, at least 75%, at least 80%, at least 85%, at least 90%, at least 95%, at least 99%, or 100% identical to SEQ ID NO: 1056 or an amino acid sequence at least 65%, at least 70%, at least 75%, at least 80%, at least 85%, at least 90%, at least 95%, at least 99%, or 100% identical to amino acid sequence GAS, and a CDR3 having an amino acid sequence at least 65%, at least 70%, at least 75%, at least 80%, at least 85%, at least 90%, at least 95%, at least 99%, or 100% identical to SEQ ID NO: 10; VL2 comprises a CDR1 having an amino acid sequence at least 65%, at least 70%, at least 75%, at least 80%, at least 85%, at least 90%, at least 95%, at least 99%, or 100% identical to SEQ ID NO: 23, a CDR2 having an amino acid sequence at least 65%, at least 70%, at least 75%, at least 80%, at least 85%, at least 90%, at least 95%, at least 99%, or 100% identical to amino acid sequence GTN, and a CDR3 having an amino acid sequence at least 65%, at least 70%, at least 75%, at least 80%, at least 85%, at least 90%, at least 95%, at least 99%, or 100% identical to SEQ ID NO: 24 or 325; VL3 comprises a CDR1 having an amino acid sequence at least 65%, at least 70%, at least 75%, at least 80%, at least 85%, at least 90%, at least 95%, at least 99%, or 100% identical to SEQ ID NO: 15, a CDR2 having an amino acid sequence at least 65%, at least 70%, at least 75%, at least 80%, at least 85%, at least 90%, at least 95%, at least 99%, or 100% identical to amino acid sequence LGS, and a CDR3 having an amino acid sequence at least 65%, at least 70%, at least 75%, at least 80%, at least 85%, at least 90%, at least 95%, at least 99%, or 100% identical to SEQ ID NO: 16; VL4 comprises a CDR1 having an amino acid sequence at least 65%, at least 70%, at least 75%, at least 80%, at least 85%, at least 90%, at least 95%, at least 99%, or 100% identical to SEQ ID NO: 9 or 1055, a CDR2 having an amino acid sequence at least 65%, at least 70%, at least 75%, at least 80%, at least 85%, at least 90%, at least 95%, at least 99%, or 100% identical to SEQ ID NO: 1056 or an amino acid sequence at least 65%, at least 70%, at least 75%, at least 80%, at least 85%, at least 90%, at least 95%, at least 99%, or 100% identical to amino acid sequence GAS, and a CDR3 having an amino acid sequence at least 65%, at least 70%, at least 75%, at least 80%, at least 85%, at least 90%, at least 95%, at least 99%, or 100% identical to SEQ ID NO: 10; VH1 comprises a CDR1 having an amino acid sequence at least 65%, at least 70%, at least 75%, at least 80%, at least 85%, at least 90%, at least 95%, at least 99%, or 100% identical to SEQ ID NO: 12 or 1057, a CDR2 having an amino acid sequence at least 65%, at least 70%, at least 75%, at least 80%, at least 85%, at least 90%, at least 95%, at least 99%, or 100% identical to SEQ ID NO: 6 or 1058, and a CDR3 having an amino acid sequence at least 65%, at least 70%, at least 75%, at least 80%, at least 85%, at least 90%, at least 95%, at least 99%, or 100% identical to SEQ ID NO: 13 or 1059; VH2 comprises a CDR1 having an amino acid sequence at least 65%, at least 70%, at least 75%, at least 80%, at least 85%, at least 90%, at least 95%, at least 99%, or 100% identical to SEQ ID NO: 26, a CDR2 having an amino acid sequence at least 65%, at least 70%, at least 75%, at least 80%, at least 85%, at least 90%, at least 95%, at least 99%, or 100% identical to SEQ ID NO: 27, and a CDR3 having an amino acid sequence at least 65%, at least 70%, at least 75%, at least 80%, at least 85%, at least 90%, at least 95%, at least 99%, or 100% identical to SEQ ID NO: 28 or 332; VH3 comprises a CDR1 having an amino acid sequence at least 65%, at least 70%, at least 75%, at least 80%, at least 85%, at least 90%, at least 95%, at least 99%, or 100% identical to SEQ ID NO: 18, a CDR2 having an amino acid sequence at least 65%, at least 70%, at least 75%, at least 80%, at least 85%, at least 90%, at least 95%, at least 99%, or 100% identical to SEQ ID NO: 19, and a CDR3 having an amino acid sequence at least 65%, at least 70%, at least 75%, at least 80%, at least 85%, at least 90%, at least 95%, at least 99%, or 100% identical to SEQ ID NO: 20; and VH4 comprises a CDR1 having an amino acid sequence at least 65%, at least 70%, at least 75%, at least 80%, at least 85%, at least 90%, at least 95%, at least 99%, or 100% identical to SEQ ID NO: 12 or 1057, a CDR2 having an amino acid sequence at least 65%, at least 70%, at least 75%, at least 80%, at least 85%, at least 90%, at least 95%, at least 99%, or 100% identical to SEQ ID NO: 6 or 1058, and a CDR3 having an amino acid sequence at least 65%, at least 70%, at least 75%, at least 80%, at least 85%, at least 90%, at least 95%, at least 99%, or 100% identical to SEQ ID NO: 13 or 1059.

[0197] In some aspects, VL1 comprises an amino acid sequence that is at least 65%, at least 70%, at least 75%, at least 80%, at least 85%, at least 90%, at least 95%, at least 99%, or 100% identical to SEQ ID NO: 11; VL2 comprises an amino acid sequence that is at least 65%, at least 70%, at least 75%, at least 80%, at least 85%, at least 90%, at least 95%, at least 99%, or 100% identical to SEQ ID NO: 25; VL3 comprises an amino acid sequence that is at least 65%, at least 70%, at least 75%, at least 80%, at least 85%, at least 90%, at least 95%, at least 99%, or 100% identical to SEQ ID NO: 17; VL4 comprises an amino acid sequence that is at least 65%, at least 70%, at least 75%, at least 80%, at least 85%, at least 90%, at least 95%, at least 99%, or 100% identical to SEQ ID NO: 11; VH1 comprises an amino acid sequence that is at least 65%, at least 70%, at least 75%, at least 80%, at least 85%, at least 90%, at least 95%, at least 99%, or 100% identical to SEQ ID NO: 14; VH2 comprises an amino acid sequence that is at least 65%, at least 70%, at least 75%, at least 80%, at least 85%, at least 90%, at least 95%, at least 99%, or 100% identical to SEQ ID NO: 29; VH3 comprises an amino acid sequence that is at least 65%, at least 70%, at least 75%, at least 80%, at least 85%, at least 90%, at least 95%, at least 99%, or 100% identical to SEQ ID NO: 21 or 22; and VH4 comprises an amino acid sequence that is at least 65%, at least 70%, at least 75%, at least 80%, at least 85%, at least 90%, at least 95%, at least 99%, or 100% identical to SEQ ID NO: 14.

[0198] In some aspects, VL1 comprises a CDR1 having an amino acid sequence at least 65%, at least 70%, at least 75%, at least 80%, at least 85%, at least 90%, at least 95%, at least 99%, or 100% identical to SEQ ID NO: 1 or 324, a CDR2 having an amino acid sequence at least 65%, at least 70%, at least 75%, at least 80%, at least 85%, at least 90%, at least 95%, at least 99%, or 100% identical to SEQ ID NO: 2 or an amino acid sequence at least 65%, at least 70%, at least 75%, at least 80%, at least 85%, at least 90%, at least 95%, at least 99%, or 100% identical to amino acid sequence AAS, and a CDR3 having an amino acid sequence at least 65%, at least 70%, at least 75%, at least 80%, at least 85%, at least 90%, at least 95%, at least 99%, or 100% identical to SEQ ID NO: 3; VL2 comprises a CDR1 having an amino acid sequence at least 65%, at least 70%, at least 75%, at least 80%, at least 85%, at least 90%, at least 95%, at least 99%, or 100% identical to SEQ ID NO: 23, a CDR2 having an amino acid sequence at least 65%, at least 70%, at least 75%, at least 80%, at least 85%, at least 90%, at least 95%, at least 99%, or 100% identical to amino acid sequence GTN, and a CDR3 having an amino acid sequence at least 65%, at least 70%, at least 75%, at least 80%, at least 85%, at least 90%, at least 95%, at least 99%, or 100% identical to SEQ ID NO: 24 or 325; VL3 comprises a CDR1 having an amino acid sequence at least 65%, at least 70%, at least 75%, at least 80%, at least 85%, at least 90%, at least 95%, at least 99%, or 100% identical to SEQ ID NO: 30, a CDR2 having an amino acid sequence at least 65%, at least 70%, at least 75%, at least 80%, at least 85%, at least 90%, at least 95%, at least 99%, or 100% identical to SEQ ID NO: 31 or an amino acid sequence at least 65%, at least 70%, at least 75%, at least 80%, at least 85%, at least 90%, at least 95%, at least 99%, or 100% identical to amino acid sequence SAS, and a CDR3 having an amino acid sequence at least 65%, at least 70%, at least 75%, at least 80%, at least 85%, at least 90%, at least 95%, at least 99%, or 100% identical to SEQ ID NO: 32, 38, or 326; VL4 comprises a CDR1 having an amino acid sequence at least 65%, at least 70%, at least 75%, at least 80%, at least 85%, at least 90%, at least 95%, at least 99%, or 100% identical to SEQ ID NO: 15, a CDR2 having an amino acid sequence at least 65%, at least 70%, at least 75%, at least 80%, at least 85%, at least 90%, at least 95%, at least 99%, or 100% identical to amino acid sequence LGS, and a CDR3 having an amino acid sequence at least 65%, at least 70%, at least 75%, at least 80%, at least 85%, at least 90%, at least 95%, at least 99%, or 100% identical to SEQ ID NO: 16; VH1 comprises a CDR1 having an amino acid sequence at least 65%, at least 70%, at least 75%, at least 80%, at least 85%, at least 90%, at least 95%, at least 99%, or 100% identical to SEQ ID NO: 5, a CDR2 having an amino acid sequence at least 65%, at least 70%, at least 75%, at least 80%, at least 85%, at least 90%, at least 95%, at least 99%, or 100% identical to SEQ ID NO: 6, and a CDR3 having an amino acid sequence at least 65%, at least 70%, at least 75%, at least 80%, at least 85%, at least 90%, at least 95%, at least 99%, or 100% identical to SEQ ID NO: 7; VH2 comprises a CDR1 having an amino acid sequence at least 65%, at least 70%, at least 75%, at least 80%, at least 85%, at least 90%, at least 95%, at least 99%, or 100% identical to SEQ ID NO: 26, a CDR2 having an amino acid sequence at least 65%, at least 70%, at least 75%, at least 80%, at least 85%, at least 90%, at least 95%, at least 99%, or 100% identical to SEQ ID NO: 27, and a CDR3 having an amino acid sequence at least 65%, at least 70%, at least 75%, at least 80%, at least 85%, at least 90%, at least 95%, at least 99%, or 100% identical to SEQ ID NO: 28 or 332; VH3 comprises a CDR1 having an amino acid sequence at least 65%, at least 70%, at least 75%, at least 80%, at least 85%, at least 90%, at least 95%, at least 99%, or 100% identical to SEQ ID NO: 34, a CDR2 having an amino acid sequence at least 65%, at least 70%, at least 75%, at least 80%, at least 85%, at least 90%, at least 95%, at least 99%, or 100% identical to SEQ ID NO: 35, and a CDR3 having an amino acid sequence at least 65%, at least 70%, at least 75%, at least 80%, at least 85%, at least 90%, at least 95%, at least 99%, or 100% identical to SEQ ID NO: 36, 40, or 327; and VH4 comprises a CDR1 having an amino acid sequence at least 65%, at least 70%, at least 75%, at least 80%, at least 85%, at least 90%, at least 95%, at least 99%, or 100% identical to SEQ ID NO: 18, a CDR2 having an amino acid sequence at least 65%, at least 70%, at least 75%, at least 80%, at least 85%, at least 90%, at least 95%, at least 99%, or 100% identical to SEQ ID NO: 19, and a CDR3 having an amino acid sequence at least 65%, at least 70%, at least 75%, at least 80%, at least 85%, at least 90%, at least 95%, at least 99%, or 100% identical to SEQ ID NO: 20.

[0199] In some aspects, VL1 comprises an amino acid sequence that is at least 65%, at least 70%, at least 75%, at least 80%, at least 85%, at least 90%, at least 95%, at least 99%, or 100% identical to SEQ ID NO: 4; VL2 comprises an amino acid sequence that is at least 65%, at least 70%, at least 75%, at least 80%, at least 85%, at least 90%, at least 95%, at least 99%, or 100% identical to SEQ ID NO: 25; VL3 comprises an amino acid sequence that is at least 65%, at least 70%, at least 75%, at least 80%, at least 85%, at least 90%, at least 95%, at least 99%, or 100% identical to SEQ ID NO: 33 or 39; VL4 comprises an amino acid sequence that is at least 65%, at least 70%, at least 75%, at least 80%, at least 85%, at least 90%, at least 95%, at least 99%, or 100% identical to SEQ ID NO: 17; VH1 comprises an amino acid sequence that is at least 65%, at least 70%, at least 75%, at least 80%, at least 85%, at least 90%, at least 95%, at least 99%, or 100% identical to SEQ ID NO: 8; VH2 comprises an amino acid sequence that is at least 65%, at least 70%, at least 75%, at least 80%, at least 85%, at least 90%, at least 95%, at least 99%, or 100% identical to SEQ ID NO: 29; VH3 comprises an amino acid sequence that is at least 65%, at least 70%, at least 75%, at least 80%, at least 85%, at least 90%, at least 95%, at least 99%, or 100% identical to SEQ ID NO: 37; and VH4 comprises an amino acid sequence that is at least 65%, at least 70%, at least 75%, at least 80%, at least 85%, at least 90%, at least 95%, at least 99%, or 100% identical to SEQ ID NO: 21 or 22.

[0200] Also provided herein is an antigen binding polypeptide complex comprising a first polypeptide and a second polypeptide, wherein the first polypeptide has a structure, from amino-terminus to carboxy-terminus, represented by: VL1-L1-CL-L2-VH1-L3-CH1-L4-VL2-L5-VH2; VL1-L1-CL-L2-VH1-L3-CH1-L4-VH2-L5-VL2; VL1-L1-CL-L2-VL2-L3-CH1-L4-VH1-L5-VH2; VL1-L1-CL-L2-VH2-L3-CH1-L4-VH1-L5-VL2; VL1-L1-CH1-L2-VH1-L3-CL-L4-VL2-L5-VH2; VL1-L1-CH1-L2-VH1-L3-CL-L4-VH2-L5-VL2; VL1-L1-CH1-L2-VL2-L3-CL-L4-VH1-L5-VH2; VL1-L1-CH1-L2-VH2-L3-CL-L4-VH1-L5-VL2; VH1-L1-CL-L2-VL1-L3-CH1-L4-VL2-L5-VH2; VH1-L1-CL-L2-VL1-L3-CH1-L4-VH2-L5-VL2; VH1-L1-CL-L2-VL2-L3-CH1-L4-VL1-L5-VH2; VH1-L1-CL-L2-VH2-L3-CH1-L4-VL1-L5-VL2; VH1-L1-CH1-L2-VL1-L3-CL-L4-VL2-L5-VH2; VH1-L1-CH1-L2-VL1-L3-CL-L4-VH2-L5-VL2; VH1-L1-CH1-L2-VL2-L3-CL-L4-VL1-L5-VH2; VH1-L1-CH1-L2-VH2-L3-CL-L4-VL1-L5-VL2; VL2-L1-CL-L2-VL1-L3-CH1-L4-VH2-L5-VH1; VL2-L1-CL-L2-VH1-L3-CH1-L4-VH2-L5-VL1; VL2-L1-CL-L2-VH2-L3-CH1-L4-VL1-L5-VH1; VL2-L1-CL-L2-VH2-L3-CH1-L4-VH1-L5-VL1; VL2-L1-CH1-L2- VL1-L3-CL-L4-VH2-L5-VH1; VL2-L1-CH1-L2-VH1-L3-CL-L4-VH2-L5-VL1; VL2-L1-CH1-L2-VH2-L3-CL-L4-VL1-L5-VH1; VL2-L1-CH1-L2-VH2-L3-CL-L4-VH1-L5-VL1; VH2-L1-CL-L2-VL1-L3-CH1- L4-VL2-L5-VH1; VH2-L1-CL-L2-VH1-L3-CH1-L4-VL2-L5-VL1; VH2-L1-CL-L2-VL2-L3-CH1-L4-VL1-L5-VH1; VH2-L1-CL-L2-VL2-L3-CH1-L4-VH1-L5-VL1; VH2-L1-CH1-L2-VL1-L3-CL-L4-VL2-L5-VH1; VH2-L1-CH1-L2-VH1-L3-CL-L4-VL2-L5-VL1; VH2-L1-CH1-L2-VL2-L3-CL-L4-VL1-L5-VH1; or VH2-L1-CH1-L2-VL2-L3-CL-L4-VH1-L5-VL1; wherein the second polypeptide has a structure, from amino-terminus to carboxy-terminus, represented by: VL3-L6-VH3-L7-VL4-L8-CL-L9-VH4-L10-CH1; VL3-L6-VH3-L7-VL4-L8-CH1-L9-VH4-L10-CL; VL3-L6-VH3-L7-VH4-L8-CL-L9-VL4-L10-CH1; VL3-L6-VH3-L7-VH4-L8-CH1-L9-VL4-L10-CL; VL3-L6-VL4-L7-VH3-L8-CL-L9-VH4-L10-CH1; VL3-L6-VL4-L7-VH3-L8-CH1-L9-VH4-L10-CL; VL3-L6-VH4-L7-VH3-L8-CL-L9-VL4-L10-CH1; VL3-L6-VH4-L7-VH3-L8-CH1-L9-VL4-L10-CL; VH3-L6-VL3-L7-VL4-L8-CL-L9-VH4-L10-CH1; VH3-L6-VL3-L7-VL4-L8-CH1-L9-VH4-L10-CL; VH3-L6-VL3-L7-VH4-L8-CL-L9-VL4-L10-CH1; VH3-L6-VL3-L7-VH4-L8-CH1-L9-VL4-L10-CL; VH3-L6-VL4-L7-VL3-L8-CL-L9-VH4-L10-CH1; VH3-L6-VL4-L7-VL3-L8-CH1-L9-VH4-L10-CL; VH3-L6-VH4-L7-VL3-L8-CL-L9-VL4-L10-CH1; VH3-L6-VH4-L7-VL3-L8-CH1-L9-VL4-L10-CL; VL4-L6-VL3-L7-VH4-L8-CL-L9-VH3-L10-CH1; VL4-L6-VL3-L7-VH4-L8-CH1-L9-VH3-L10-CL; VL4-L6-VH3-L7-VH4-L8-CL-L9-VL3-L10-CH1; VL4-L6-VH3-L7-VH4-L8-CH1-L9-VL3-L10-CL; VL4-L6-VH4-L7-VL3-L8-CL-L9-VH3-L10-CH1; VL4-L6-VH4-L7-VL3-L8-CH1-L9-VH3-L10-CL; VL4-L6-VH4-L7-VH3-L8-CL-L9-VL3-L10-CH1; VL4-L6-VH4-L7-VH3-L8-CH1-L9-VL3-L10-CL; VH4-L6-VL3-L7-VL4-L8-CL-L9-VH3-L10-CH1; VH4-L6-VL3-L7-VL4-L8-CH1-L9-VH3-L10-CL; VH4-L6-VH3-L7-VL4-L8-CL-L9-VL3-L10-CH1; VH4-L6-VH3-L7-VL4-L8-CH1-L9-VL3-L10-CL; VH4-L6-VL4-L7-VL3-L8-CL-L9-VH3-L10-CH1; VH4-L6-VL4-L7-VL3-L8-CH1-L9-VH3-L10-CL; VH4-L6-VL4-L7-VH3-L8-CL-L9-VL3-L10-CH1; or VH4-L6-VL4-L7-VH3-L8-CH1-L9-VL3-L10-CL; and wherein: VL1 is a first immunoglobulin light chain variable region that specifically binds to a severe acute respiratory syndrome coronavirus 2 (SARS-CoV-2) protein; VL2 is a second immunoglobulin light chain variable region that specifically binds to a SARS-CoV-2 protein; VL3 is a third immunoglobulin light chain variable region that specifically binds to a SARS-CoV-2 protein; VL4 is a fourth immunoglobulin light chain variable region that specifically binds to a SARS-CoV-2 protein; VH1 is a first immunoglobulin heavy chain variable region that specifically binds to a SARS-CoV-2 protein; VH2 is a second immunoglobulin heavy chain variable region that specifically binds to a SARS-CoV-2 protein; VH3 is a third immunoglobulin heavy chain variable region that specifically binds to a SARS-CoV-2 protein; VH4 is a fourth immunoglobulin heavy chain variable region that specifically binds to a SARS-CoV-2 protein; CL is an immunoglobulin light chain constant region; CH1 is an immunoglobulin heavy chain constant region 1; and L1-L10 are optional amino acid linkers.

[0201] In some aspects, VL1 comprises a CDR1 having an amino acid sequence at least 65%, at least 70%, at least 75%, at least 80%, at least 85%, at least 90%, at least 95%, at least 99%, or 100% identical to SEQ ID NO: 9 or 1055, a CDR2 having an amino acid sequence at least 65%, at least 70%, at least 75%, at least 80%, at least 85%, at least 90%, at least 95%, at least 99%, or 100% identical to SEQ ID NO: 1056 or an amino acid sequence at least 65%, at least 70%, at least 75%, at least 80%, at least 85%, at least 90%, at least 95%, at least 99%, or 100% identical to amino acid sequence GAS, and a CDR3 having an amino acid sequence at least 65%, at least 70%, at least 75%, at least 80%, at least 85%, at least 90%, at least 95%, at least 99%, or 100% identical to SEQ ID NO: 10; VL2 comprises a CDR1 having an amino acid sequence at least 65%, at least 70%, at least 75%, at least 80%, at least 85%, at least 90%, at least 95%, at least 99%, or 100% identical to SEQ ID NO: 15, a CDR2 having an amino acid sequence at least 65%, at least 70%, at least 75%, at least 80%, at least 85%, at least 90%, at least 95%, at least 99%, or 100% identical to amino acid sequence LGS, and a CDR3 having an amino acid sequence at least 65%, at least 70%, at least 75%, at least 80%, at least 85%, at least 90%, at least 95%, at least 99%, or 100% identical to SEQ ID NO: 16; VL3 comprises a CDR1 having an amino acid sequence at least 65%, at least 70%, at least 75%, at least 80%, at least 85%, at least 90%, at least 95%, at least 99%, or 100% identical to SEQ ID NO: 9 or 1055, a CDR2 having an amino acid sequence at least 65%, at least 70%, at least 75%, at least 80%, at least 85%, at least 90%, at least 95%, at least 99%, or 100% identical to SEQ ID NO: 1056 or an amino acid sequence at least 65%, at least 70%, at least 75%, at least 80%, at least 85%, at least 90%, at least 95%, at least 99%, or 100% identical to amino acid sequence GAS, and a CDR3 having an amino acid sequence at least 65%, at least 70%, at least 75%, at least 80%, at least 85%, at least 90%, at least 95%, at least 99%, or 100% identical to SEQ ID NO: 10; VL4 comprises a CDR1 having an amino acid sequence at least 65%, at least 70%, at least 75%, at least 80%, at least 85%, at least 90%, at least 95%, at least 99%, or 100% identical to SEQ ID NO: 15, a CDR2 having an amino acid sequence at least 65%, at least 70%, at least 75%, at least 80%, at least 85%, at least 90%, at least 95%, at least 99%, or 100% identical to amino acid sequence LGS, and a CDR3 having an amino acid sequence at least 65%, at least 70%, at least 75%, at least 80%, at least 85%, at least 90%, at least 95%, at least 99%, or 100% identical to SEQ ID NO: 16; VH1 comprises a CDR1 having an amino acid sequence at least 65%, at least 70%, at least 75%, at least 80%, at least 85%, at least 90%, at least 95%, at least 99%, or 100% identical to SEQ ID NO: 12 or 1057, a CDR2 having an amino acid sequence at least 65%, at least 70%, at least 75%, at least 80%, at least 85%, at least 90%, at least 95%, at least 99%, or 100% identical to SEQ ID NO: 6 or 1058, and a CDR3 having an amino acid sequence at least 65%, at least 70%, at least 75%, at least 80%, at least 85%, at least 90%, at least 95%, at least 99%, or 100% identical to SEQ ID NO: 13 or 1059; VH2 comprises a CDR1 having an amino acid sequence at least 65%, at least 70%, at least 75%, at least 80%, at least 85%, at least 90%, at least 95%, at least 99%, or 100% identical to SEQ ID NO: 18, a CDR2 having an amino acid sequence at least 65%, at least 70%, at least 75%, at least 80%, at least 85%, at least 90%, at least 95%, at least 99%, or 100% identical to SEQ ID NO: 19, and a CDR3 having an amino acid sequence at least 65%, at least 70%, at least 75%, at least 80%, at least 85%, at least 90%, at least 95%, at least 99%, or 100% identical to SEQ ID NO: 20; VH3 comprises a CDR1 having an amino acid sequence at least 65%, at least 70%, at least 75%, at least 80%, at least 85%, at least 90%, at least 95%, at least 99%, or 100% identical to SEQ ID NO: 12 or 1057, a CDR2 having an amino acid sequence at least 65%, at least 70%, at least 75%, at least 80%, at least 85%, at least 90%, at least 95%, at least 99%, or 100% identical to SEQ ID NO: 6 or 1058, and a CDR3 having an amino acid sequence at least 65%, at least 70%, at least 75%, at least 80%, at least 85%, at least 90%, at least 95%, at least 99%, or 100% identical to SEQ ID NO: 13 or 1059; and VH4 comprises a CDR1 having an amino acid sequence at least 65%, at least 70%, at least 75%, at least 80%, at least 85%, at least 90%, at least 95%, at least 99%, or 100% identical to SEQ ID NO: 18, a CDR2 having an amino acid sequence at least 65%, at least 70%, at least 75%, at least 80%, at least 85%, at least 90%, at least 95%, at least 99%, or 100% identical to SEQ ID NO: 19, and a CDR3 having an amino acid sequence at least 65%, at least 70%, at least 75%, at least 80%, at least 85%, at least 90%, at least 95%, at least 99%, or 100% identical to SEQ ID NO: 20.

[0202] In some aspects, VL1 comprises an amino acid sequence that is at least 65%, at least 70%, at least 75%, at least 80%, at least 85%, at least 90%, at least 95%, at least 99%, or 100% identical to SEQ ID NO: 11; VL2 comprises an amino acid sequence that is at least 65%, at least 70%, at least 75%, at least 80%, at least 85%, at least 90%, at least 95%, at least 99%, or 100% identical to SEQ ID NO: 17; VL3 comprises an amino acid sequence that is at least 65%, at least 70%, at least 75%, at least 80%, at least 85%, at least 90%, at least 95%, at least 99%, or 100% identical to SEQ ID NO: 11; VL4 comprises an amino acid sequence that is at least 65%, at least 70%, at least 75%, at least 80%, at least 85%, at least 90%, at least 95%, at least 99%, or 100% identical to SEQ ID NO: 17; VH1 comprises an amino acid sequence that is at least 65%, at least 70%, at least 75%, at least 80%, at least 85%, at least 90%, at least 95%, at least 99%, or 100% identical to SEQ ID NO: 14; VH2 comprises an amino acid sequence that is at least 65%, at least 70%, at least 75%, at least 80%, at least 85%, at least 90%, at least 95%, at least 99%, or 100% identical to SEQ ID NO: 21 or 22; VH3 comprises an amino acid sequence that is at least 65%, at least 70%, at least 75%, at least 80%, at least 85%, at least 90%, at least 95%, at least 99%, or 100% identical to SEQ ID NO: 14; and VH4 comprises an amino acid sequence that is at least 65%, at least 70%, at least 75%, at least 80%, at least 85%, at least 90%, at least 95%, at least 99%, or 100% identical to SEQ ID NO: 21 or 22. In some aspects, VL1 comprises a CDR1 having an amino acid sequence at least 65%, at least 70%, at least 75%, at least 80%, at least 85%, at least 90%, at least 95%, at least 99%, or 100% identical to SEQ ID NO: 1 or 324, a CDR2 having an amino acid sequence at least 65%, at least 70%, at least 75%, at least 80%, at least 85%, at least 90%, at least 95%, at least 99%, or 100% identical to SEQ ID NO: 2 or an amino acid sequence at least 65%, at least 70%, at least 75%, at least 80%, at least 85%, at least 90%, at least 95%, at least 99%, or 100% identical to amino acid sequence AAS, and a CDR3 having an amino acid sequence at least 65%, at least 70%, at least 75%, at least 80%, at least 85%, at least 90%, at least 95%, at least 99%, or 100% identical to SEQ ID NO: 3; VL2 comprises a CDR1 having an amino acid sequence at least 65%, at least 70%, at least 75%, at least 80%, at least 85%, at least 90%, at least 95%, at least 99%, or 100% identical to SEQ ID NO: 23, a CDR2 having an amino acid sequence at least 65%, at least 70%, at least 75%, at least 80%, at least 85%, at least 90%, at least 95%, at least 99%, or 100% identical to amino acid sequence GTN, and a CDR3 having an amino acid sequence at least 65%, at least 70%, at least 75%, at least 80%, at least 85%, at least 90%, at least 95%, at least 99%, or 100% identical to SEQ ID NO: 24 or 325; VL3 comprises a CDR1 having an amino acid sequence at least 65%, at least 70%, at least 75%, at least 80%, at least 85%, at least 90%, at least 95%, at least 99%, or 100% identical to SEQ ID NO: 30, a CDR2 having an amino acid sequence at least 65%, at least 70%, at least 75%, at least 80%, at least 85%, at least 90%, at least 95%, at least 99%, or 100% identical to SEQ ID NO: 31 or an amino acid sequence at least 65%, at least 70%, at least 75%, at least 80%, at least 85%, at least 90%, at least 95%, at least 99%, or 100% identical to amino acid sequence SAS, and a CDR3 having an amino acid sequence at least 65%, at least 70%, at least 75%, at least 80%, at least 85%, at least 90%, at least 95%, at least 99%, or 100% identical to SEQ ID NO: 32, 38, or 326; VL4 comprises a CDR1 having an amino acid sequence at least 65%, at least 70%, at least 75%, at least 80%, at least 85%, at least 90%, at least 95%, at least 99%, or 100% identical to SEQ ID NO: 15, a CDR2 having an amino acid sequence at least 65%, at least 70%, at least 75%, at least 80%, at least 85%, at least 90%, at least 95%, at least 99%, or 100% identical to amino acid sequence LGS, and a CDR3 having an amino acid sequence at least 65%, at least 70%, at least 75%, at least 80%, at least 85%, at least 90%, at least 95%, at least 99%, or 100% identical to SEQ ID NO: 16; VH1 comprises a CDR1 having an amino acid sequence at least 65%, at least 70%, at least 75%, at least 80%, at least 85%, at least 90%, at least 95%, at least 99%, or 100% identical to SEQ ID NO: 5, a CDR2 having an amino acid sequence at least 65%, at least 70%, at least 75%, at least 80%, at least 85%, at least 90%, at least 95%, at least 99%, or 100% identical to SEQ ID NO: 6, and a CDR3 having an amino acid sequence at least 65%, at least 70%, at least 75%, at least 80%, at least 85%, at least 90%, at least 95%, at least 99%, or 100% identical to SEQ ID NO: 7; VH2 comprises a CDR1 having an amino acid sequence at least 65%, at least 70%, at least 75%, at least 80%, at least 85%, at least 90%, at least 95%, at least 99%, or 100% identical to SEQ ID NO: 26, a CDR2 having an amino acid sequence at least 65%, at least 70%, at least 75%, at least 80%, at least 85%, at least 90%, at least 95%, at least 99%, or 100% identical to SEQ ID NO: 27, and a CDR3 having an amino acid sequence at least 65%, at least 70%, at least 75%, at least 80%, at least 85%, at least 90%, at least 95%, at least 99%, or 100% identical to SEQ ID NO: 28 or 332; VH3 comprises a CDR1 having an amino acid sequence at least 65%, at least 70%, at least 75%, at least 80%, at least 85%, at least 90%, at least 95%, at least 99%, or 100% identical to SEQ ID NO: 34, a CDR2 having an amino acid sequence at least 65%, at least 70%, at least 75%, at least 80%, at least 85%, at least 90%, at least 95%, at least 99%, or 100% identical to SEQ ID NO: 35, and a CDR3 having an amino acid sequence at least 65%, at least 70%, at least 75%, at least 80%, at least 85%, at least 90%, at least 95%, at least 99%, or 100% identical to SEQ ID NO: 36, 40, or 327; and VH4 comprises a CDR1 having an amino acid sequence at least 65%, at least 70%, at least 75%, at least 80%, at least 85%, at least 90%, at least 95%, at least 99%, or 100% identical to SEQ ID NO: 18, a CDR2 having an amino acid sequence at least 65%, at least 70%, at least 75%, at least 80%, at least 85%, at least 90%, at least 95%, at least 99%, or 100% identical to SEQ ID NO: 19, and a CDR3 having an amino acid sequence at least 65%, at least 70%, at least 75%, at least 80%, at least 85%, at least 90%, at least 95%, at least 99%, or 100% identical to SEQ ID NO: 20.

[0203] In some aspects, VL1 comprises an amino acid sequence that is at least 65%, at least 70%, at least 75%, at least 80%, at least 85%, at least 90%, at least 95%, at least 99%, or 100% identical to SEQ ID NO: 4; VL2 comprises an amino acid sequence that is at least 65%, at least 70%, at least 75%, at least 80%, at least 85%, at least 90%, at least 95%, at least 99%, or 100% identical to SEQ ID NO: 25; VL3 comprises an amino acid sequence that is at least 65%, at least 70%, at least 75%, at least 80%, at least 85%, at least 90%, at least 95%, at least 99%, or 100% identical to SEQ ID NO: 33 or 39; VL4 comprises an amino acid sequence that is at least 65%, at least 70%, at least 75%, at least 80%, at least 85%, at least 90%, at least 95%, at least 99%, or 100% identical to SEQ ID NO: 17; VH1 comprises an amino acid sequence that is at least 65%, at least 70%, at least 75%, at least 80%, at least 85%, at least 90%, at least 95%, at least 99%, or 100% identical to SEQ ID NO: 8; VH2 comprises an amino acid sequence that is at least 65%, at least 70%, at least 75%, at least 80%, at least 85%, at least 90%, at least 95%, at least 99%, or 100% identical to SEQ ID NO: 29; VH3 comprises an amino acid sequence that is at least 65%, at least 70%, at least 75%, at least 80%, at least 85%, at least 90%, at least 95%, at least 99%, or 100% identical to SEQ ID NO: 37; and VH4 comprises an amino acid sequence that is at least 65%, at least 70%, at least 75%, at least 80%, at least 85%, at least 90%, at least 95%, at least 99%, or 100% identical to SEQ ID NO: 21 or 22.

[0204] In some aspects, the first polypeptide and the second polypeptide each further comprise an Fc region at the carboxy-terminus. In some aspects, the Fc region of the first polypeptide and the second polypeptide each comprise a CH2 and/or CH3. In some aspects, the Fc region of the first polypeptide and the second polypeptide each further comprise an immunoglobulin hinge. In some aspects, the Fc region of the first polypeptide and/or the Fc region of the second polypeptide comprise an amino acid sequence that is at least 65%, at least 70%, at least 75%, at least 80%, at least 85%, at least 90%, at least 95%, at least 99%, or 100% identical to any one of SEQ ID NOs: 376-380. In some aspects, the Fc region of the first polypeptide and/or the Fc region of the second polypeptide comprise one or more half-life extension amino acid substitutions. In some aspects, the one or more half-life extension amino acid substitutions comprise one or more of amino acid substitutions M428L, N434A, N434S, L234F, L235E, P331S, M252Y, S254T, or T256E, or equivalent thereof, based on the EU numbering scheme. In some aspects, the one or more half-life extension amino acid substitutions comprise amino acid substitutions: (i) L234A and L235A (LA); (ii) M428L and N434S (LS); (iii) L234F and L235E; (iv) L234F, L235E, and P331S (TM); and/or (v) M252Y, S254T, and T256E (YTE); or equivalent thereof, based on the EU numbering scheme.

[0205] Also provided herein is an antigen binding polypeptide having a structure, from amino-terminus to carboxy-terminus, represented by: VL1-L1-VL2-L2-VH2-L3-VH1-L4-CL-L5-CH1; VL1-L1-VL2-L2-VH2-L3-VH1-L4-CH1-L5-CL; VL1-L1-VH2-L2-VL2-L3-VH1-L4-CL-L5-CH1; VL1-L1-VH2-L2-VL2-L3-VH1-L4-CH1-L5-CL; VH1-L1-VL2-L2-VH2-L3-VL1-L4-CL-L5-CH1; VH1-L1-VL2-L2-VH2-L3-VL1-L4-CH1-L5-CL; VH1-L1-VH2-L2-VL2-L3-VL1-L4-CL-L5-CH1; VH1-L1-VH2-L2-VL2-L3-VL1-L4-CH1-L5-CL; VL2-L1-VL1-L2-VH1-L3-VH2-L4-CL-L5-CH1; VL2-L1-VL1-L2-VH1-L3-VH2-L4-CH1-L5-CL; VL2-L1-VH1-L2-VL1-L3-VH2-L4-CL-L5-CH1; VL2-L1-VH1-L2-VL1-L3-VH2-L4-CH1-L5-CL; VH2-L1-VL1-L2-VH1-L3-VL2-L4-CL-L5-CH1; VH2-L1-VL1-L2-VH1-L3-VL2-L4-CH1-L5-CL; VH2-L1-VH1-L2-VL1-L3-VL2-L4-CL-L5-CH1; or VH2-L1-VH1-L2-VL1-L3-VL2-L4-CH1-L5-CL; wherein: (a) VL1 is a first immunoglobulin light chain variable region that specifically binds to a severe acute respiratory syndrome coronavirus 2 (SARS-CoV-2) protein, comprising a CDR1 having an amino acid sequence at least 65%, at least 70%, at least 75%, at least 80%, at least 85%, at least 90%, at least 95%, at least 99%, or 100% identical to SEQ ID NO: 15, a CDR2 having an amino acid sequence at least 65%, at least 70%, at least 75%, at least 80%, at least 85%, at least 90%, at least 95%, at least 99%, or 100% identical to amino acid sequence LGS, and a CDR3 having an amino acid sequence at least 65%, at least 70%, at least 75%, at least 80%, at least 85%, at least 90%, at least 95%, at least 99%, or 100% identical to SEQ ID NO: 16; VL2 is a second immunoglobulin light chain variable region that specifically binds to a SARS-CoV-2 protein, comprising a CDR1 having an amino acid sequence at least 65%, at least 70%, at least 75%, at least 80%, at least 85%, at least 90%, at least 95%, at least 99%, or 100% identical to SEQ ID NO: 9 or 1055, a CDR2 having an amino acid sequence at least 65%, at least 70%, at least 75%, at least 80%, at least 85%, at least 90%, at least 95%, at least 99%, or 100% identical to SEQ ID NO: 1056 or an amino acid sequence at least 65%, at least 70%, at least 75%, at least 80%, at least 85%, at least 90%, at least 95%, at least 99%, or 100% identical to amino acid sequence GAS, and a CDR3 having an amino acid sequence at least 65%, at least 70%, at least 75%, at least 80%, at least 85%, at least 90%, at least 95%, at least 99%, or 100% identical to SEQ ID NO: 10; VH1 is a first immunoglobulin heavy chain variable region that specifically binds to a SARS-CoV-2 protein, comprising a CDR1 having an amino acid sequence at least 65%, at least 70%, at least 75%, at least 80%, at least 85%, at least 90%, at least 95%, at least 99%, or 100% identical to SEQ ID NO: 18, a CDR2 having an amino acid sequence at least 65%, at least 70%, at least 75%, at least 80%, at least 85%, at least 90%, at least 95%, at least 99%, or 100% identical to SEQ ID NO: 19, and a CDR3 having an amino acid sequence at least 65%, at least 70%, at least 75%, at least 80%, at least 85%, at least 90%, at least 95%, at least 99%, or 100% identical to SEQ ID NO: 20; and VH2 is a second immunoglobulin heavy chain variable region that specifically binds to a SARS-CoV-2 protein, comprising a CDR1 having an amino acid sequence at least 65%, at least 70%, at least 75%, at least 80%, at least 85%, at least 90%, at least 95%, at least 99%, or 100% identical to SEQ ID NO: 12 or 1057, a CDR2 having an amino acid sequence at least 65%, at least 70%, at least 75%, at least 80%, at least 85%, at least 90%, at least 95%, at least 99%, or 100% identical to SEQ ID NO: 6 or 1058, and a CDR3 having an amino acid sequence at least 65%, at least 70%, at least 75%, at least 80%, at least 85%, at least 90%, at least 95%, at least 99%, or 100% identical to SEQ ID NO: 13 or 1059; or wherein; (b) VL1 is a first immunoglobulin light chain variable region that specifically binds to a SARS-CoV-2 protein, comprising a CDR1 having an amino acid sequence at least 65%, at least 70%, at least 75%, at least 80%, at least 85%, at least 90%, at least 95%, at least 99%, or 100% identical to SEQ ID NO: 23, a CDR2 having an amino acid sequence at least 65%, at least 70%, at least 75%, at least 80%, at least 85%, at least 90%, at least 95%, at least 99%, or 100% identical to amino acid sequence GTN, and a CDR3 having an amino acid sequence at least 65%, at least 70%, at least 75%, at least 80%, at least 85%, at least 90%, at least 95%, at least 99%, or 100% identical to SEQ ID NO: 24 or 325; VL2 is a second immunoglobulin light chain variable region that specifically binds to a SARS-CoV-2 protein, comprising a CDR1 having an amino acid sequence at least 65%, at least 70%, at least 75%, at least 80%, at least 85%, at least 90%, at least 95%, at least 99%, or 100% identical to SEQ ID NO: 9 or 1055, a CDR2 having an amino acid sequence at least 65%, at least 70%, at least 75%, at least 80%, at least 85%, at least 90%, at least 95%, at least 99%, or 100% identical to SEQ ID NO: 1056 or an amino acid sequence at least 65%, at least 70%, at least 75%, at least 80%, at least 85%, at least 90%, at least 95%, at least 99%, or 100% identical to amino acid sequence GAS, and a CDR3 having an amino acid sequence at least 65%, at least 70%, at least 75%, at least 80%, at least 85%, at least 90%, at least 95%, at least 99%, or 100% identical to SEQ ID NO: 10; VH1 is a first immunoglobulin heavy chain variable region that specifically binds to a SARS-CoV-2 protein, comprising a CDR1 having an amino acid sequence at least 65%, at least 70%, at least 75%, at least 80%, at least 85%, at least 90%, at least 95%, at least 99%, or 100% identical to SEQ ID NO: 26, a CDR2 having an amino acid sequence at least 65%, at least 70%, at least 75%, at least 80%, at least 85%, at least 90%, at least 95%, at least 99%, or 100% identical to SEQ ID NO: 27, and a CDR3 having an amino acid sequence at least 65%, at least 70%, at least 75%, at least 80%, at least 85%, at least 90%, at least 95%, at least 99%, or 100% identical to SEQ ID NO: 28 or 332; and VH2 is a second immunoglobulin heavy chain variable region that specifically binds to a SARS-CoV-2 protein, comprising a CDR1 having an amino acid sequence at least 65%, at least 70%, at least 75%, at least 80%, at least 85%, at least 90%, at least 95%, at least 99%, or 100% identical to SEQ ID NO: 12 or 1057, a CDR2 having an amino acid sequence at least 65%, at least 70%, at least 75%, at least 80%, at least 85%, at least 90%, at least 95%, at least 99%, or 100% identical to SEQ ID NO: 6 or 1058, and a CDR3 having an amino acid sequence at least 65%, at least 70%, at least 75%, at least 80%, at least 85%, at least 90%, at least 95%, at least 99%, or 100% identical to SEQ ID NO: 13 or 1059; or wherein: (c) VL1 is a first immunoglobulin light chain variable region that specifically binds to a SARS-CoV-2 protein, comprising a CDR1 having an amino acid sequence at least 65%, at least 70%, at least 75%, at least 80%, at least 85%, at least 90%, at least 95%, at least 99%, or 100% identical to SEQ ID NO: 9 or 1055, a CDR2 having an amino acid sequence at least 65%, at least 70%, at least 75%, at least 80%, at least 85%, at least 90%, at least 95%, at least 99%, or 100% identical to SEQ ID NO: 1056 or an amino acid sequence at least 65%, at least 70%, at least 75%, at least 80%, at least 85%, at least 90%, at least 95%, at least 99%, or 100% identical to amino acid sequence GAS, and a CDR3 having an amino acid sequence at least 65%, at least 70%, at least 75%, at least 80%, at least 85%, at least 90%, at least 95%, at least 99%, or 100% identical to SEQ ID NO: 10; VL2 is a second immunoglobulin light chain variable region that specifically binds to a SARS-CoV-2 protein, comprising a CDR1 having an amino acid sequence at least 65%, at least 70%, at least 75%, at least 80%, at least 85%, at least 90%, at least 95%, at least 99%, or 100% identical to SEQ ID NO: 65 or 627, a CDR2 having an amino acid sequence at least 65%, at least 70%, at least 75%, at least 80%, at least 85%, at least 90%, at least 95%, at least 99%, or 100% identical to SEQ ID NO: 628 or an amino acid sequence at least 65%, at least 70%, at least 75%, at least 80%, at least 85%, at least 90%, at least 95%, at least 99%, or 100% identical to amino acid sequence SDS, and a CDR3 having an amino acid sequence at least 65%, at least 70%, at least 75%, at least 80%, at least 85%, at least 90%, at least 95%, at least 99%, or 100% identical to SEQ ID NO: 66; VH1 is a first immunoglobulin heavy chain variable region that specifically binds to a SARS-CoV-2 protein, comprising a CDR1 having an amino acid sequence at least 65%, at least 70%, at least 75%, at least 80%, at least 85%, at least 90%, at least 95%, at least 99%, or 100% identical to SEQ ID NO: 12 or 1057, a CDR2 having an amino acid sequence at least 65%, at least 70%, at least 75%, at least 80%, at least 85%, at least 90%, at least 95%, at least 99%, or 100% identical to SEQ ID NO: 6 or 1058, and a CDR3 having an amino acid sequence at least 65%, at least 70%, at least 75%, at least 80%, at least 85%, at least 90%, at least 95%, at least 99%, or 100% identical to SEQ ID NO: 13 or 1059; and VH2 is a second immunoglobulin heavy chain variable region that specifically binds to a SARS-CoV-2 protein, comprising; and a CDR1 having an amino acid sequence at least 65%, at least 70%, at least 75%, at least 80%, at least 85%, at least 90%, at least 95%, at least 99%, or 100% identical to SEQ ID NO: 68 or 629, a CDR2 having an amino acid sequence at least 65%, at least 70%, at least 75%, at least 80%, at least 85%, at least 90%, at least 95%, at least 99%, or 100% identical to SEQ ID NO: 69 or 630, and a CDR3 having an amino acid sequence at least 65%, at least 70%, at least 75%, at least 80%, at least 85%, at least 90%, at least 95%, at least 99%, or 100% identical to SEQ ID NO: 70 or 631; and wherein: CL is an immunoglobulin light chain constant region; CH1 is an immunoglobulin heavy chain constant region 1; and L1-L5 are optional amino acid linkers.

[0206] In some aspects, (a) VL1 comprises an amino acid sequence that is at least 65%, at least 70%, at least 75%, at least 80%, at least 85%, at least 90%, at least 95%, at least 99%, or 100% identical to SEQ ID NO: 17; VL2 comprises an amino acid sequence that is at least 65%, at least 70%, at least 75%, at least 80%, at least 85%, at least 90%, at least 95%, at least 99%, or 100% identical to SEQ ID NO: 11; VH1 comprises an amino acid sequence that is at least 65%, at least 70%, at least 75%, at least 80%, at least 85%, at least 90%, at least 95%, at least 99%, or 100% identical to SEQ ID NO: 21 or 22; and VH2 comprises an amino acid sequence that is at least 65%, at least 70%, at least 75%, at least 80%, at least 85%, at least 90%, at least 95%, at least 99%, or 100% identical to SEQ ID NO: 14; (b) VL1 comprises an amino acid sequence that is at least 65%, at least 70%, at least 75%, at least 80%, at least 85%, at least 90%, at least 95%, at least 99%, or 100% identical to SEQ ID NO: 25; VL2 comprises an amino acid sequence that is at least 65%, at least 70%, at least 75%, at least 80%, at least 85%, at least 90%, at least 95%, at least 99%, or 100% identical to SEQ ID NO: 11; VH1 comprises an amino acid sequence that is at least 65%, at least 70%, at least 75%, at least 80%, at least 85%, at least 90%, at least 95%, at least 99%, or 100% identical to SEQ ID NO: 29; and VH2 comprises an amino acid sequence that is at least 65%, at least 70%, at least 75%, at least 80%, at least 85%, at least 90%, at least 95%, at least 99%, or 100% identical to SEQ ID NO: 14; or (c) VL1 comprises an amino acid sequence that is at least 65%, at least 70%, at least 75%, at least 80%, at least 85%, at least 90%, at least 95%, at least 99%, or 100% identical to SEQ ID NO: 11; VL2 comprises an amino acid sequence that is at least 65%, at least 70%, at least 75%, at least 80%, at least 85%, at least 90%, at least 95%, at least 99%, or 100% identical to SEQ ID NO: 67; VH1 comprises an amino acid sequence that is at least 65%, at least 70%, at least 75%, at least 80%, at least 85%, at least 90%, at least 95%, at least 99%, or 100% identical to SEQ ID NO: 14; and VH2 comprises an amino acid sequence that is at least 65%, at least 70%, at least 75%, at least 80%, at least 85%, at least 90%, at least 95%, at least 99%, or 100% identical to SEQ ID NO: 71 or 626.

[0207] In some aspects, VL1 is a first immunoglobulin light chain variable region that specifically binds to a SARS-CoV-2 protein, comprising a CDR1 having an amino acid sequence at least 65%, at least 70%, at least 75%, at least 80%, at least 85%, at least 90%, at least 95%, at least 99%, or 100% identical to SEQ ID NO: 15, a CDR2 having an amino acid sequence at least 65%, at least 70%, at least 75%, at least 80%, at least 85%, at least 90%, at least 95%, at least 99%, or 100% identical to amino acid sequence LGS, and a CDR3 having an amino acid sequence at least 65%, at least 70%, at least 75%, at least 80%, at least 85%, at least 90%, at least 95%, at least 99%, or 100% identical to SEQ ID NO: 16; VL2 is a second immunoglobulin light chain variable region that specifically binds to a SARS-CoV-2 protein, comprising a CDR1 having an amino acid sequence at least 65%, at least 70%, at least 75%, at least 80%, at least 85%, at least 90%, at least 95%, at least 99%, or 100% identical to SEQ ID NO: 9 or 1055, a CDR2 having an amino acid sequence at least 65%, at least 70%, at least 75%, at least 80%, at least 85%, at least 90%, at least 95%, at least 99%, or 100% identical to SEQ ID NO: 1056 or an amino acid sequence at least 65%, at least 70%, at least 75%, at least 80%, at least 85%, at least 90%, at least 95%, at least 99%, or 100% identical to amino acid sequence GAS, and a CDR3 having an amino acid sequence at least 65%, at least 70%, at least 75%, at least 80%, at least 85%, at least 90%, at least 95%, at least 99%, or 100% identical to SEQ ID NO: 10; VH1 is a first immunoglobulin heavy chain variable region that specifically binds to a SARS-CoV-2 protein, comprising a CDR1 having an amino acid sequence at least 65%, at least 70%, at least 75%, at least 80%, at least 85%, at least 90%, at least 95%, at least 99%, or 100% identical to SEQ ID NO: 18, a CDR2 having an amino acid sequence at least 65%, at least 70%, at least 75%, at least 80%, at least 85%, at least 90%, at least 95%, at least 99%, or 100% identical to SEQ ID NO: 19, and a CDR3 having an amino acid sequence at least 65%, at least 70%, at least 75%, at least 80%, at least 85%, at least 90%, at least 95%, at least 99%, or 100% identical to SEQ ID NO: 20; and VH2 is a second immunoglobulin heavy chain variable region that specifically binds to a SARS-CoV-2 protein, comprising a CDR1 having an amino acid sequence at least 65%, at least 70%, at least 75%, at least 80%, at least 85%, at least 90%, at least 95%, at least 99%, or 100% identical to SEQ ID NO: 12 or 1057, a CDR2 having an amino acid sequence at least 65%, at least 70%, at least 75%, at least 80%, at least 85%, at least 90%, at least 95%, at least 99%, or 100% identical to SEQ ID NO: 6 or 1058, and a CDR3 having an amino acid sequence at least 65%, at least 70%, at least 75%, at least 80%, at least 85%, at least 90%, at least 95%, at least 99%, or 100% identical to SEQ ID NO: 13 or 1059.

[0208] In some aspects, VL1 comprises an amino acid sequence that is at least 65%, at least 70%, at least 75%, at least 80%, at least 85%, at least 90%, at least 95%, at least 99%, or 100% identical to SEQ ID NO: 17; VL2 comprises an amino acid sequence that is at least 65%, at least 70%, at least 75%, at least 80%, at least 85%, at least 90%, at least 95%, at least 99%, or 100% identical to SEQ ID NO: 11; VH1 comprises an amino acid sequence that is at least 65%, at least 70%, at least 75%, at least 80%, at least 85%, at least 90%, at least 95%, at least 99%, or 100% identical to SEQ ID NO: 21 or 22; and VH2 comprises an amino acid sequence that is at least 65%, at least 70%, at least 75%, at least 80%, at least 85%, at least 90%, at least 95%, at least 99%, or 100% identical to SEQ ID NO: 14.

[0209] In some aspects, VL1 is a first immunoglobulin light chain variable region that specifically binds to a SARS-CoV-2 protein, comprising a CDR1 having an amino acid sequence at least 65%, at least 70%, at least 75%, at least 80%, at least 85%, at least 90%, at least 95%, at least 99%, or 100% identical to SEQ ID NO: 23, a CDR2 having an amino acid sequence at least 65%, at least 70%, at least 75%, at least 80%, at least 85%, at least 90%, at least 95%, at least 99%, or 100% identical to amino acid sequence GTN, and a CDR3 having an amino acid sequence at least 65%, at least 70%, at least 75%, at least 80%, at least 85%, at least 90%, at least 95%, at least 99%, or 100% identical to SEQ ID NO: 24 or 325; VL2 is a second immunoglobulin light chain variable region that specifically binds to a SARS-CoV-2 protein, comprising a CDR1 having an amino acid sequence at least 65%, at least 70%, at least 75%, at least 80%, at least 85%, at least 90%, at least 95%, at least 99%, or 100% identical to SEQ ID NO: 9 or 1055, a CDR2 having an amino acid sequence at least 65%, at least 70%, at least 75%, at least 80%, at least 85%, at least 90%, at least 95%, at least 99%, or 100% identical to SEQ ID NO: 1056 or an amino acid sequence at least 65%, at least 70%, at least 75%, at least 80%, at least 85%, at least 90%, at least 95%, at least 99%, or 100% identical to amino acid sequence GAS, and a CDR3 having an amino acid sequence at least 65%, at least 70%, at least 75%, at least 80%, at least 85%, at least 90%, at least 95%, at least 99%, or 100% identical to SEQ ID NO: 10; VH1 is a first immunoglobulin heavy chain variable region that specifically binds to a SARS-CoV-2 protein, comprising a CDR1 having an amino acid sequence at least 65%, at least 70%, at least 75%, at least 80%, at least 85%, at least 90%, at least 95%, at least 99%, or 100% identical to SEQ ID NO: 26, a CDR2 having an amino acid sequence at least 65%, at least 70%, at least 75%, at least 80%, at least 85%, at least 90%, at least 95%, at least 99%, or 100% identical to SEQ ID NO: 27, and a CDR3 having an amino acid sequence at least 65%, at least 70%, at least 75%, at least 80%, at least 85%, at least 90%, at least 95%, at least 99%, or 100% identical to SEQ ID NO: 28 or 332; and VH2 is a second immunoglobulin heavy chain variable region that specifically binds to a SARS-CoV-2 protein, comprising a CDR1 having an amino acid sequence at least 65%, at least 70%, at least 75%, at least 80%, at least 85%, at least 90%, at least 95%, at least 99%, or 100% identical to SEQ ID NO: 12 or 1057, a CDR2 having an amino acid sequence at least 65%, at least 70%, at least 75%, at least 80%, at least 85%, at least 90%, at least 95%, at least 99%, or 100% identical to SEQ ID NO: 6 or 1058, and a CDR3 having an amino acid sequence at least 65%, at least 70%, at least 75%, at least 80%, at least 85%, at least 90%, at least 95%, at least 99%, or 100% identical to SEQ ID NO: 13 or 1059.

[0210] In some aspects, VL1 comprises an amino acid sequence that is at least 65%, at least 70%, at least 75%, at least 80%, at least 85%, at least 90%, at least 95%, at least 99%, or 100% identical to SEQ ID NO: 25; VL2 comprises an amino acid sequence that is at least 65%, at least 70%, at least 75%, at least 80%, at least 85%, at least 90%, at least 95%, at least 99%, or 100% identical to SEQ ID NO: 11; VH1 comprises an amino acid sequence that is at least 65%, at least 70%, at least 75%, at least 80%, at least 85%, at least 90%, at least 95%, at least 99%, or 100% identical to SEQ ID NO: 29; and VH2 comprises an amino acid sequence that is at least 65%, at least 70%, at least 75%, at least 80%, at least 85%, at least 90%, at least 95%, at least 99%, or 100% identical to SEQ ID NO: 14.

[0211] In some aspects, VL1 is a first immunoglobulin light chain variable region that specifically binds to a SARS-CoV-2 protein, comprising a CDR1 having an amino acid sequence at least 65%, at least 70%, at least 75%, at least 80%, at least 85%, at least 90%, at least 95%, at least 99%, or 100% identical to SEQ ID NO: 9 or 1055, a CDR2 having an amino acid sequence at least 65%, at least 70%, at least 75%, at least 80%, at least 85%, at least 90%, at least 95%, at least 99%, or 100% identical to SEQ ID NO: 1056 or an amino acid sequence at least 65%, at least 70%, at least 75%, at least 80%, at least 85%, at least 90%, at least 95%, at least 99%, or 100% identical to amino acid sequence GAS, and a CDR3 having an amino acid sequence at least 65%, at least 70%, at least 75%, at least 80%, at least 85%, at least 90%, at least 95%, at least 99%, or 100% identical to SEQ ID NO: 10; VL2 is a second immunoglobulin light chain variable region that specifically binds to a SARS-CoV-2 protein, comprising a CDR1 having an amino acid sequence at least 65%, at least 70%, at least 75%, at least 80%, at least 85%, at least 90%, at least 95%, at least 99%, or 100% identical to SEQ ID NO: 65 or 627, a CDR2 having an amino acid sequence at least 65%, at least 70%, at least 75%, at least 80%, at least 85%, at least 90%, at least 95%, at least 99%, or 100% identical to SEQ ID NO: 628 or an amino acid sequence at least 65%, at least 70%, at least 75%, at least 80%, at least 85%, at least 90%, at least 95%, at least 99%, or 100% identical to amino acid sequence SDS, and a CDR3 having an amino acid sequence at least 65%, at least 70%, at least 75%, at least 80%, at least 85%, at least 90%, at least 95%, at least 99%, or 100% identical to SEQ ID NO: 66; VH1 is a first immunoglobulin heavy chain variable region that specifically binds to a SARS-CoV-2 protein, comprising a CDR1 having an amino acid sequence at least 65%, at least 70%, at least 75%, at least 80%, at least 85%, at least 90%, at least 95%, at least 99%, or 100% identical to SEQ ID NO: 12 or 1057, a CDR2 having an amino acid sequence at least 65%, at least 70%, at least 75%, at least 80%, at least 85%, at least 90%, at least 95%, at least 99%, or 100% identical to SEQ ID NO: 6 or 1058, and a CDR3 having an amino acid sequence at least 65%, at least 70%, at least 75%, at least 80%, at least 85%, at least 90%, at least 95%, at least 99%, or 100% identical to SEQ ID NO: 13 or 1059; and VH2 is a second immunoglobulin heavy chain variable region that specifically binds to a SARS-CoV-2 protein, comprising a CDR1 having an amino acid sequence at least 65%, at least 70%, at least 75%, at least 80%, at least 85%, at least 90%, at least 95%, at least 99%, or 100% identical to SEQ ID NO: 68 or 629, a CDR2 having an amino acid sequence at least 65%, at least 70%, at least 75%, at least 80%, at least 85%, at least 90%, at least 95%, at least 99%, or 100% identical to SEQ ID NO: 69 or 630, and a CDR3 having an amino acid sequence at least 65%, at least 70%, at least 75%, at least 80%, at least 85%, at least 90%, at least 95%, at least 99%, or 100% identical to SEQ ID NO: 70 or 631.

[0212] In some aspects, VL1 comprises an amino acid sequence that is at least 65%, at least 70%, at least 75%, at least 80%, at least 85%, at least 90%, at least 95%, at least 99%, or 100% identical to SEQ ID NO: 11; VL2 comprises an amino acid sequence that is at least 65%, at least 70%, at least 75%, at least 80%, at least 85%, at least 90%, at least 95%, at least 99%, or 100% identical to SEQ ID NO: 67; VH1 comprises an amino acid sequence that is at least 65%, at least 70%, at least 75%, at least 80%, at least 85%, at least 90%, at least 95%, at least 99%, or 100% identical to SEQ ID NO: 14; and VH2 comprises an amino acid sequence that is at least 65%, at least 70%, at least 75%, at least 80%, at least 85%, at least 90%, at least 95%, at least 99%, or 100% identical to SEQ ID NO: 71 or 626.

[0213] In some aspects, the antigen binding polypeptide further comprises an Fc region at the carboxy-terminus. In some aspects, the Fc region comprises an immunoglobulin heavy chain constant region 2 (CH2) and/or an immunoglobulin heavy chain constant region 3 (CH3). In some aspects, the Fc region further comprises an immunoglobulin hinge. In some aspects, the Fc region comprises an amino acid sequence that is at least 65%, at least 70%, at least 75%, at least 80%, at least 85%, at least 90%, at least 95%, at least 99%, or 100% identical to any one of SEQ ID NOs: 376-380. In some aspects, Fc region comprises one or more half-life extension amino acid substitutions. In some aspects, the one or more half-life extension amino acid substitutions comprise one or more of amino acid substitutions M428L, N434A, N434S, L234F, L235E, P331S, M252Y, S254T, or T256E, or equivalent thereof, based on the EU numbering scheme. In some aspects, the one or more half-life extension amino acid substitutions comprise amino acid substitutions: (i) L234A and L235A (LA); (ii) M428L and N434S (LS); (iii) L234F and L235E; (iv) L234F, L235E, and P331S (TM); and/or (v) M252Y, S254T, and T256E (YTE); or equivalent thereof, based on the EU numbering scheme.

[0214] Also provided herein is an antigen binding polypeptide complex comprising a first polypeptide and a second polypeptide, wherein the first polypeptide has a structure, from amino-terminus to carboxy-terminus, represented by: VL1-L1-VL2-L2-VH2-L3-VH1-L4-CL-L5-CH1; VL1-L1-VL2-L2-VH2-L3-VH1-L4-CH1-L5-CL; VL1-L1-VH2-L2-VL2-L3-VH1-L4-CL-L5-CH1; VL1-L1-VH2-L2-VL2-L3-VH1-L4-CH1-L5-CL; VH1-L1-VL2-L2-VH2-L3-VL1-L4-CL-L5-CH1; VH1-L1-VL2-L2-VH2-L3-VL1-L4-CH1-L5-CL; VH1-L1-VH2-L2-VL2-L3-VL1-L4-CL-L5-CH1; VH1-L1-VH2-L2-VL2-L3-VL1-L4-CH1-L5-CL; VL2-L1-VL1-L2-VH1-L3-VH2-L4-CL-L5-CH1; VL2-L1-VL1-L2-VH1-L3-VH2-L4-CH1-L5-CL; VL2-L1-VH1-L2-VL1-L3-VH2-L4-CL-L5-CH1; VL2-L1-VH1-L2-VL1-L3-VH2-L4-CH1-L5- CL; VH2-L1-VL1-L2-VH1-L3-VL2-L4-CL-L5-CH1; VH2-L1-VL1-L2-VH1-L3-VL2-L4-CH1-L5-CL; VH2-L1-VH1-L2-VL1-L3-VL2-L4-CL-L5-CH1; or VH2-L1-VH1-L2-VL1-L3-VL2-L4-CH1-L5-CL; wherein the second polypeptide has a structure, from amino-terminus to carboxy-terminus, represented by: VL3-L6-VL4-L7-VH4-L8-VH3-L9-CL-L10-CH1; VL3-L6-VL4-L7-VH4-L8-VH3-L9-CH1-L10-CL; VL3-L6-VH4-L7-VL4-L8-VH3-L9-CL-L10-CH1; VL3-L6-VH4-L7-VL4-L8-VH3-L9-CH1-L10-CL; VH3-L6-VL4-L7-VH4-L8-VL3-L9-CL-L10-CH1; VH3-L6-VL4-L7-VH4-L8-VL3-L9-CH1-L10-CL; VH3-L6-VH4-L7-VL4-L8-VL3-L9-CL-L10-CH1; VH3-L6-VH4-L7-VL4-L8-VL3-L9-CH1-L10-CL; VL4-L6-VL3-L7-VH3-L8-VH4-L9-CL-L10-CH1; VL4-L6-VL3-L7-VH3-L8-VH4-L9-CH1-L10-CL; VL4-L6-VH3-L7-VL3-L8-VH4-L9-CL-L10-CH1; VL4-L6-VH3-L7-VL3-L8-VH4-L9-CH1-L10-CL; VH4-L6-VL3-L7-VH3-L8-VL4-L9-CL-L10-CH1; VH4-L6-VL3-L7-VH3-L8-VL4-L9-CH1-L10-CL; VH4-L6-VH3-L7-VL3-L8-VL4-L9-CL-L10-CH1; or VH4-L6-VH3-L7-VL3-L8-VL4-L9-CH1-L10-CL; and wherein: (a) VL1 is a first immunoglobulin light chain variable region that specifically binds to a severe acute respiratory syndrome coronavirus 2 (SARS-CoV-2) protein, comprising a CDR1 having an amino acid sequence at least 65%, at least 70%, at least 75%, at least 80%, at least 85%, at least 90%, at least 95%, at least 99%, or 100% identical to SEQ ID NO: 15, a CDR2 having an amino acid sequence at least 65%, at least 70%, at least 75%, at least 80%, at least 85%, at least 90%, at least 95%, at least 99%, or 100% identical to amino acid sequence LGS, and a CDR3 having an amino acid sequence at least 65%, at least 70%, at least 75%, at least 80%, at least 85%, at least 90%, at least 95%, at least 99%, or 100% identical to SEQ ID NO: 16; VL2 is a second immunoglobulin light chain variable region that specifically binds to a SARS-CoV-2 protein, comprising a CDR1 having an amino acid sequence at least 65%, at least 70%, at least 75%, at least 80%, at least 85%, at least 90%, at least 95%, at least 99%, or 100% identical to SEQ ID NO: 9 or 1055, a CDR2 having an amino acid sequence at least 65%, at least 70%, at least 75%, at least 80%, at least 85%, at least 90%, at least 95%, at least 99%, or 100% identical to SEQ ID NO: 1056 or an amino acid sequence at least 65%, at least 70%, at least 75%, at least 80%, at least 85%, at least 90%, at least 95%, at least 99%, or 100% identical to amino acid sequence GAS, and a CDR3 having an amino acid sequence at least 65%, at least 70%, at least 75%, at least 80%, at least 85%, at least 90%, at least 95%, at least 99%, or 100% identical to SEQ ID NO: 10; VL3 is a third immunoglobulin light chain variable region that specifically binds to a SARS-CoV-2 protein, comprising a CDR1 having an amino acid sequence at least 65%, at least 70%, at least 75%, at least 80%, at least 85%, at least 90%, at least 95%, at least 99%, or 100% identical to SEQ ID NO: 9 or 1055, a CDR2 having an amino acid sequence at least 65%, at least 70%, at least 75%, at least 80%, at least 85%, at least 90%, at least 95%, at least 99%, or 100% identical to SEQ ID NO: 1056 or an amino acid sequence at least 65%, at least 70%, at least 75%, at least 80%, at least 85%, at least 90%, at least 95%, at least 99%, or 100% identical to amino acid sequence GAS, and a CDR3 having an amino acid sequence at least 65%, at least 70%, at least 75%, at least 80%, at least 85%, at least 90%, at least 95%, at least 99%, or 100% identical to SEQ ID NO: 10; VL4 is a fourth immunoglobulin light chain variable region that specifically binds to a SARS-CoV-2 protein, comprising a CDR1 having an amino acid sequence at least 65%, at least 70%, at least 75%, at least 80%, at least 85%, at least 90%, at least 95%, at least 99%, or 100% identical to SEQ ID NO: 15, a CDR2 having an amino acid sequence at least 65%, at least 70%, at least 75%, at least 80%, at least 85%, at least 90%, at least 95%, at least 99%, or 100% identical to amino acid sequence LGS, and a CDR3 having an amino acid sequence at least 65%, at least 70%, at least 75%, at least 80%, at least 85%, at least 90%, at least 95%, at least 99%, or 100% identical to SEQ ID NO: 16; VH1 is a first immunoglobulin heavy chain variable region that specifically binds to a SARS-CoV-2 protein, comprising a CDR1 having an amino acid sequence at least 65%, at least 70%, at least 75%, at least 80%, at least 85%, at least 90%, at least 95%, at least 99%, or 100% identical to SEQ ID NO: 18, a CDR2 having an amino acid sequence at least 65%, at least 70%, at least 75%, at least 80%, at least 85%, at least 90%, at least 95%, at least 99%, or 100% identical to SEQ ID NO: 19, and a CDR3 having an amino acid sequence at least 65%, at least 70%, at least 75%, at least 80%, at least 85%, at least 90%, at least 95%, at least 99%, or 100% identical to SEQ ID NO: 20; VH2 is a second immunoglobulin heavy chain variable region that specifically binds to a SARS-CoV-2 protein, comprising a CDR1 having an amino acid sequence at least 65%, at least 70%, at least 75%, at least 80%, at least 85%, at least 90%, at least 95%, at least 99%, or 100% identical to SEQ ID NO: 12 or 1057, a CDR2 having an amino acid sequence at least 65%, at least 70%, at least 75%, at least 80%, at least 85%, at least 90%, at least 95%, at least 99%, or 100% identical to SEQ ID NO: 6 or 1058, and a CDR3 having an amino acid sequence at least 65%, at least 70%, at least 75%, at least 80%, at least 85%, at least 90%, at least 95%, at least 99%, or 100% identical to SEQ ID NO: 13 or 1059; VH3 is a third immunoglobulin heavy chain variable region that specifically binds to a SARS-CoV-2 protein, comprising a CDR1 having an amino acid sequence at least 65%, at least 70%, at least 75%, at least 80%, at least 85%, at least 90%, at least 95%, at least 99%, or 100% identical to SEQ ID NO: 12 or 1057, a CDR2 having an amino acid sequence at least 65%, at least 70%, at least 75%, at least 80%, at least 85%, at least 90%, at least 95%, at least 99%, or 100% identical to SEQ ID NO: 6 or 1058, and a CDR3 having an amino acid sequence at least 65%, at least 70%, at least 75%, at least 80%, at least 85%, at least 90%, at least 95%, at least 99%, or 100% identical to SEQ ID NO: 13 or 1059; VH4 is a fourth immunoglobulin heavy chain variable region that specifically binds to a SARS-CoV-2 protein, comprising a CDR1 having an amino acid sequence at least 65%, at least 70%, at least 75%, at least 80%, at least 85%, at least 90%, at least 95%, at least 99%, or 100% identical to SEQ ID NO: 18, a CDR2 having an amino acid sequence at least 65%, at least 70%, at least 75%, at least 80%, at least 85%, at least 90%, at least 95%, at least 99%, or 100% identical to SEQ ID NO: 19, and a CDR3 having an amino acid sequence at least 65%, at least 70%, at least 75%, at least 80%, at least 85%, at least 90%, at least 95%, at least 99%, or 100% identical to SEQ ID NO: 20; or wherein; (b) VL1 is a first immunoglobulin light chain variable region that specifically binds to a SARS-CoV-2 protein, comprising a CDR1 having an amino acid sequence at least 65%, at least 70%, at least 75%, at least 80%, at least 85%, at least 90%, at least 95%, at least 99%, or 100% identical to SEQ ID NO: 23, a CDR2 having an amino acid sequence at least 65%, at least 70%, at least 75%, at least 80%, at least 85%, at least 90%, at least 95%, at least 99%, or 100% identical to amino acid sequence GTN, and a CDR3 having an amino acid sequence at least 65%, at least 70%, at least 75%, at least 80%, at least 85%, at least 90%, at least 95%, at least 99%, or 100% identical to SEQ ID NO: 24 or 325; VL2 is a second immunoglobulin light chain variable region that specifically binds to a SARS-CoV-2 protein, comprising a CDR1 having an amino acid sequence at least 65%, at least 70%, at least 75%, at least 80%, at least 85%, at least 90%, at least 95%, at least 99%, or 100% identical to SEQ ID NO: 9 or 1055, a CDR2 having an amino acid sequence at least 65%, at least 70%, at least 75%, at least 80%, at least 85%, at least 90%, at least 95%, at least 99%, or 100% identical to SEQ ID NO: 1056 or an amino acid sequence at least 65%, at least 70%, at least 75%, at least 80%, at least 85%, at least 90%, at least 95%, at least 99%, or 100% identical to amino acid sequence GAS, and a CDR3 having an amino acid sequence at least 65%, at least 70%, at least 75%, at least 80%, at least 85%, at least 90%, at least 95%, at least 99%, or 100% identical to SEQ ID NO: 10; VL3 is a third immunoglobulin light chain variable region that specifically binds to a SARS-CoV-2 protein, comprising a CDR1 having an amino acid sequence at least 65%, at least 70%, at least 75%, at least 80%, at least 85%, at least 90%, at least 95%, at least 99%, or 100% identical to SEQ ID NO: 9 or 1055, a CDR2 having an amino acid sequence at least 65%, at least 70%, at least 75%, at least 80%, at least 85%, at least 90%, at least 95%, at least 99%, or 100% identical to SEQ ID NO: 1056 or an amino acid sequence at least 65%, at least 70%, at least 75%, at least 80%, at least 85%, at least 90%, at least 95%, at least 99%, or 100% identical to amino acid sequence GAS, and a CDR3 having an amino acid sequence at least 65%, at least 70%, at least 75%, at least 80%, at least 85%, at least 90%, at least 95%, at least 99%, or 100% identical to SEQ ID NO: 10; VL4 is a fourth immunoglobulin light chain variable region that specifically binds to a SARS-CoV-2 protein, comprising a CDR1 having an amino acid sequence at least 65%, at least 70%, at least 75%, at least 80%, at least 85%, at least 90%, at least 95%, at least 99%, or 100% identical to SEQ ID NO: 15, a CDR2 having an amino acid sequence at least 65%, at least 70%, at least 75%, at least 80%, at least 85%, at least 90%, at least 95%, at least 99%, or 100% identical to amino acid sequence LGS, and a CDR3 having an amino acid sequence at least 65%, at least 70%, at least 75%, at least 80%, at least 85%, at least 90%, at least 95%, at least 99%, or 100% identical to SEQ ID NO: 16; VH1 is a first immunoglobulin heavy chain variable region that specifically binds to a SARS-CoV-2 protein, comprising a CDR1 having an amino acid sequence at least 65%, at least 70%, at least 75%, at least 80%, at least 85%, at least 90%, at least 95%, at least 99%, or 100% identical to SEQ ID NO: 26, a CDR2 having an amino acid sequence at least 65%, at least 70%, at least 75%, at least 80%, at least 85%, at least 90%, at least 95%, at least 99%, or 100% identical to SEQ ID NO: 27, and a CDR3 having an amino acid sequence at least 65%, at least 70%, at least 75%, at least 80%, at least 85%, at least 90%, at least 95%, at least 99%, or 100% identical to SEQ ID NO: 28 or 332; VH2 is a second immunoglobulin heavy chain variable region that specifically binds to a SARS-CoV-2 protein, comprising a CDR1 having an amino acid sequence at least 65%, at least 70%, at least 75%, at least 80%, at least 85%, at least 90%, at least 95%, at least 99%, or 100% identical to SEQ ID NO: 12 or 1057, a CDR2 having an amino acid sequence at least 65%, at least 70%, at least 75%, at least 80%, at least 85%, at least 90%, at least 95%, at least 99%, or 100% identical to SEQ ID NO: 6 or 1058, and a CDR3 having an amino acid sequence at least 65%, at least 70%, at least 75%, at least 80%, at least 85%, at least 90%, at least 95%, at least 99%, or 100% identical to SEQ ID NO: 13 or 1059; VH3 is a third immunoglobulin heavy chain variable region that specifically binds to a SARS-CoV-2 protein, comprising a CDR1 having an amino acid sequence at least 65%, at least 70%, at least 75%, at least 80%, at least 85%, at least 90%, at least 95%, at least 99%, or 100% identical to SEQ ID NO: 12 or 1057, a CDR2 having an amino acid sequence at least 65%, at least 70%, at least 75%, at least 80%, at least 85%, at least 90%, at least 95%, at least 99%, or 100% identical to SEQ ID NO: 6 or 1058, and a CDR3 having an amino acid sequence at least 65%, at least 70%, at least 75%, at least 80%, at least 85%, at least 90%, at least 95%, at least 99%, or 100% identical to SEQ ID NO: 13 or 1059; and VH4 is a fourth immunoglobulin heavy chain variable region that specifically binds to a SARS-CoV-2 protein, comprising a CDR1 having an amino acid sequence at least 65%, at least 70%, at least 75%, at least 80%, at least 85%, at least 90%, at least 95%, at least 99%, or 100% identical to SEQ ID NO: 18, a CDR2 having an amino acid sequence at least 65%, at least 70%, at least 75%, at least 80%, at least 85%, at least 90%, at least 95%, at least 99%, or 100% identical to SEQ ID NO: 19, and a CDR3 having an amino acid sequence at least 65%, at least 70%, at least 75%, at least 80%, at least 85%, at least 90%, at least 95%, at least 99%, or 100% identical to SEQ ID NO: 20; or wherein: (c) VL1 is a first immunoglobulin light chain variable region that specifically binds to a SARS-CoV-2 protein, comprising a CDR1 having an amino acid sequence at least 65%, at least 70%, at least 75%, at least 80%, at least 85%, at least 90%, at least 95%, at least 99%, or 100% identical to SEQ ID NO: 9 or 1055, a CDR2 having an amino acid sequence at least 65%, at least 70%, at least 75%, at least 80%, at least 85%, at least 90%, at least 95%, at least 99%, or 100% identical to SEQ ID NO: 1056 or an amino acid sequence at least 65%, at least 70%, at least 75%, at least 80%, at least 85%, at least 90%, at least 95%, at least 99%, or 100% identical to amino acid sequence GAS, and a CDR3 having an amino acid sequence at least 65%, at least 70%, at least 75%, at least 80%, at least 85%, at least 90%, at least 95%, at least 99%, or 100% identical to SEQ ID NO: 10; VL2 is a second immunoglobulin light chain variable region that specifically binds to a SARS-CoV-2 protein, comprising a CDR1 having an amino acid sequence at least 65%, at least 70%, at least 75%, at least 80%, at least 85%, at least 90%, at least 95%, at least 99%, or 100% identical to SEQ ID NO: 65 or 627, a CDR2 having an amino acid sequence at least 65%, at least 70%, at least 75%, at least 80%, at least 85%, at least 90%, at least 95%, at least 99%, or 100% identical to SEQ ID NO: 628 or an amino acid sequence at least 65%, at least 70%, at least 75%, at least 80%, at least 85%, at least 90%, at least 95%, at least 99%, or 100% identical to amino acid sequence SDS, and a CDR3 having an amino acid sequence at least 65%, at least 70%, at least 75%, at least 80%, at least 85%, at least 90%, at least 95%, at least 99%, or 100% identical to SEQ ID NO: 66; VL3 is a third immunoglobulin light chain variable region that specifically binds to a SARS-CoV-2 protein, comprising a CDR1 having an amino acid sequence at least 65%, at least 70%, at least 75%, at least 80%, at least 85%, at least 90%, at least 95%, at least 99%, or 100% identical to SEQ ID NO: 9 or 1055, a CDR2 having an amino acid sequence at least 65%, at least 70%, at least 75%, at least 80%, at least 85%, at least 90%, at least 95%, at least 99%, or 100% identical to SEQ ID NO: 1056 or an amino acid sequence at least 65%, at least 70%, at least 75%, at least 80%, at least 85%, at least 90%, at least 95%, at least 99%, or 100% identical to amino acid sequence GAS, and a CDR3 having an amino acid sequence at least 65%, at least 70%, at least 75%, at least 80%, at least 85%, at least 90%, at least 95%, at least 99%, or 100% identical to SEQ ID NO: 10; VL4 is a fourth immunoglobulin light chain variable region that specifically binds to a SARS-CoV-2 protein, comprising a CDR1 having an amino acid sequence at least 65%, at least 70%, at least 75%, at least 80%, at least 85%, at least 90%, at least 95%, at least 99%, or 100% identical to SEQ ID NO: 15, a CDR2 having an amino acid sequence at least 65%, at least 70%, at least 75%, at least 80%, at least 85%, at least 90%, at least 95%, at least 99%, or 100% identical to amino acid sequence LGS, and a CDR3 having an amino acid sequence at least 65%, at least 70%, at least 75%, at least 80%, at least 85%, at least 90%, at least 95%, at least 99%, or 100% identical to SEQ ID NO: 16; VH1 is a first immunoglobulin heavy chain variable region that specifically binds to a SARS-CoV-2 protein, comprising a CDR1 having an amino acid sequence at least 65%, at least 70%, at least 75%, at least 80%, at least 85%, at least 90%, at least 95%, at least 99%, or 100% identical to SEQ ID NO: 12 or 1057, a CDR2 having an amino acid sequence at least 65%, at least 70%, at least 75%, at least 80%, at least 85%, at least 90%, at least 95%, at least 99%, or 100% identical to SEQ ID NO: 6 or 1058, and a CDR3 having an amino acid sequence at least 65%, at least 70%, at least 75%, at least 80%, at least 85%, at least 90%, at least 95%, at least 99%, or 100% identical to SEQ ID NO: 13 or 1059; VH2 is a second immunoglobulin heavy chain variable region that specifically binds to a SARS-CoV-2 protein, comprising a CDR1 having an amino acid sequence at least 65%, at least 70%, at least 75%, at least 80%, at least 85%, at least 90%, at least 95%, at least 99%, or 100% identical to SEQ ID NO: 68 or 629, a CDR2 having an amino acid sequence at least 65%, at least 70%, at least 75%, at least 80%, at least 85%, at least 90%, at least 95%, at least 99%, or 100% identical to SEQ ID NO: 69 or 630, and a CDR3 having an amino acid sequence at least 65%, at least 70%, at least 75%, at least 80%, at least 85%, at least 90%, at least 95%, at least 99%, or 100% identical to SEQ ID NO: 70 or 631; VH3 is a third immunoglobulin heavy chain variable region that specifically binds to a SARS-CoV-2 protein, comprising a CDR1 having an amino acid sequence at least 65%, at least 70%, at least 75%, at least 80%, at least 85%, at least 90%, at least 95%, at least 99%, or 100% identical to SEQ ID NO: 12 or 1057, a CDR2 having an amino acid sequence at least 65%, at least 70%, at least 75%, at least 80%, at least 85%, at least 90%, at least 95%, at least 99%, or 100% identical to SEQ ID NO: 6 or 1058, and a CDR3 having an amino acid sequence at least 65%, at least 70%, at least 75%, at least 80%, at least 85%, at least 90%, at least 95%, at least 99%, or 100% identical to SEQ ID NO: 13 or 1059; and VH4 is a fourth immunoglobulin heavy chain variable region that specifically binds to a SARS-CoV-2 protein, comprising a CDR1 having an amino acid sequence at least 65%, at least 70%, at least 75%, at least 80%, at least 85%, at least 90%, at least 95%, at least 99%, or 100% identical to SEQ ID NO: 18, a CDR2 having an amino acid sequence at least 65%, at least 70%, at least 75%, at least 80%, at least 85%, at least 90%, at least 95%, at least 99%, or 100% identical to SEQ ID NO: 19, and a CDR3 having an amino acid sequence at least 65%, at least 70%, at least 75%, at least 80%, at least 85%, at least 90%, at least 95%, at least 99%, or 100% identical to SEQ ID NO: 20; and wherein: CL is an immunoglobulin light chain constant region; CH1 is an immunoglobulin heavy chain constant region 1; and L1-L10 are optional amino acid linkers.

[0215] In some aspects, (a) VL1 comprises an amino acid sequence that is at least 65%, at least 70%, at least 75%, at least 80%, at least 85%, at least 90%, at least 95%, at least 99%, or 100% identical to SEQ ID NO: 17; VL2 comprises an amino acid sequence that is at least 65%, at least 70%, at least 75%, at least 80%, at least 85%, at least 90%, at least 95%, at least 99%, or 100% identical to SEQ ID NO: 11; VL3 comprises an amino acid sequence that is at least 65%, at least 70%, at least 75%, at least 80%, at least 85%, at least 90%, at least 95%, at least 99%, or 100% identical to SEQ ID NO: 11; VL4 comprises an amino acid sequence that is at least 65%, at least 70%, at least 75%, at least 80%, at least 85%, at least 90%, at least 95%, at least 99%, or 100% identical to SEQ ID NO: 17; VH1 comprises an amino acid sequence that is at least 65%, at least 70%, at least 75%, at least 80%, at least 85%, at least 90%, at least 95%, at least 99%, or 100% identical to SEQ ID NO: 21 or 22; VH2 comprises an amino acid sequence that is at least 65%, at least 70%, at least 75%, at least 80%, at least 85%, at least 90%, at least 95%, at least 99%, or 100% identical to SEQ ID NO: 14; VH3 comprises an amino acid sequence that is at least 65%, at least 70%, at least 75%, at least 80%, at least 85%, at least 90%, at least 95%, at least 99%, or 100% identical to SEQ ID NO: 14; and VH4 comprises an amino acid sequence that is at least 65%, at least 70%, at least 75%, at least 80%, at least 85%, at least 90%, at least 95%, at least 99%, or 100% identical to SEQ ID NO: 21 or 22; or (b) VL1 comprises an amino acid sequence that is at least 65%, at least 70%, at least 75%, at least 80%, at least 85%, at least 90%, at least 95%, at least 99%, or 100% identical to SEQ ID NO: 25; VL2 comprises an amino acid sequence that is at least 65%, at least 70%, at least 75%, at least 80%, at least 85%, at least 90%, at least 95%, at least 99%, or 100% identical to SEQ ID NO: 11; VL3 comprises an amino acid sequence that is at least 65%, at least 70%, at least 75%, at least 80%, at least 85%, at least 90%, at least 95%, at least 99%, or 100% identical to SEQ ID NO: 11; VL4 comprises an amino acid sequence that is at least 65%, at least 70%, at least 75%, at least 80%, at least 85%, at least 90%, at least 95%, at least 99%, or 100% identical to SEQ ID NO: 17; VH1 comprises an amino acid sequence that is at least 65%, at least 70%, at least 75%, at least 80%, at least 85%, at least 90%, at least 95%, at least 99%, or 100% identical to SEQ ID NO: 29; VH2 comprises an amino acid sequence that is at least 65%, at least 70%, at least 75%, at least 80%, at least 85%, at least 90%, at least 95%, at least 99%, or 100% identical to SEQ ID NO: 14; VH3 comprises an amino acid sequence that is at least 65%, at least 70%, at least 75%, at least 80%, at least 85%, at least 90%, at least 95%, at least 99%, or 100% identical to SEQ ID NO: 14; and VH4 comprises an amino acid sequence that is at least 65%, at least 70%, at least 75%, at least 80%, at least 85%, at least 90%, at least 95%, at least 99%, or 100% identical to SEQ ID NO: 21 or 22; or (c) VL1 comprises an amino acid sequence that is at least 65%, at least 70%, at least 75%, at least 80%, at least 85%, at least 90%, at least 95%, at least 99%, or 100% identical to SEQ ID NO: 11; VL2 comprises an amino acid sequence that is at least 65%, at least 70%, at least 75%, at least 80%, at least 85%, at least 90%, at least 95%, at least 99%, or 100% identical to SEQ ID NO: 67; VL3 comprises an amino acid sequence that is at least 65%, at least 70%, at least 75%, at least 80%, at least 85%, at least 90%, at least 95%, at least 99%, or 100% identical to SEQ ID NO: 11; VL4 comprises an amino acid sequence that is at least 65%, at least 70%, at least 75%, at least 80%, at least 85%, at least 90%, at least 95%, at least 99%, or 100% identical to SEQ ID NO: 17; VH1 comprises an amino acid sequence that is at least 65%, at least 70%, at least 75%, at least 80%, at least 85%, at least 90%, at least 95%, at least 99%, or 100% identical to SEQ ID NO: 14; VH2 comprises an amino acid sequence that is at least 65%, at least 70%, at least 75%, at least 80%, at least 85%, at least 90%, at least 95%, at least 99%, or 100% identical to SEQ ID NO: 71 or 626; VH3 comprises an amino acid sequence that is at least 65%, at least 70%, at least 75%, at least 80%, at least 85%, at least 90%, at least 95%, at least 99%, or 100% identical to SEQ ID NO: 14; and VH4 comprises an amino acid sequence that is at least 65%, at least 70%, at least 75%, at least 80%, at least 85%, at least 90%, at least 95%, at least 99%, or 100% identical to SEQ ID NO: 21 or 22.

[0216] In some aspects, VL1 is a first immunoglobulin light chain variable region that specifically binds to a SARS-CoV-2 protein, comprising a CDR1 having an amino acid sequence at least 65%, at least 70%, at least 75%, at least 80%, at least 85%, at least 90%, at least 95%, at least 99%, or 100% identical to SEQ ID NO: 15, a CDR2 having an amino acid sequence at least 65%, at least 70%, at least 75%, at least 80%, at least 85%, at least 90%, at least 95%, at least 99%, or 100% identical to amino acid sequence LGS, and a CDR3 having an amino acid sequence at least 65%, at least 70%, at least 75%, at least 80%, at least 85%, at least 90%, at least 95%, at least 99%, or 100% identical to SEQ ID NO: 16; VL2 is a second immunoglobulin light chain variable region that specifically binds to a SARS-CoV-2 protein, comprising a CDR1 having an amino acid sequence at least 65%, at least 70%, at least 75%, at least 80%, at least 85%, at least 90%, at least 95%, at least 99%, or 100% identical to SEQ ID NO: 9 or 1055, a CDR2 having an amino acid sequence at least 65%, at least 70%, at least 75%, at least 80%, at least 85%, at least 90%, at least 95%, at least 99%, or 100% identical to SEQ ID NO: 1056 or an amino acid sequence at least 65%, at least 70%, at least 75%, at least 80%, at least 85%, at least 90%, at least 95%, at least 99%, or 100% identical to amino acid sequence GAS, and a CDR3 having an amino acid sequence at least 65%, at least 70%, at least 75%, at least 80%, at least 85%, at least 90%, at least 95%, at least 99%, or 100% identical to SEQ ID NO: 10; VL3 is a third immunoglobulin light chain variable region that specifically binds to a SARS-CoV-2 protein, comprising a CDR1 having an amino acid sequence at least 65%, at least 70%, at least 75%, at least 80%, at least 85%, at least 90%, at least 95%, at least 99%, or 100% identical to SEQ ID NO: 9 or 1055, a CDR2 having an amino acid sequence at least 65%, at least 70%, at least 75%, at least 80%, at least 85%, at least 90%, at least 95%, at least 99%, or 100% identical to SEQ ID NO: 1056 or an amino acid sequence at least 65%, at least 70%, at least 75%, at least 80%, at least 85%, at least 90%, at least 95%, at least 99%, or 100% identical to amino acid sequence GAS, and a CDR3 having an amino acid sequence at least 65%, at least 70%, at least 75%, at least 80%, at least 85%, at least 90%, at least 95%, at least 99%, or 100% identical to SEQ ID NO: 10; VL4 is a fourth immunoglobulin light chain variable region that specifically binds to a SARS-CoV-2 protein, comprising a CDR1 having an amino acid sequence at least 65%, at least 70%, at least 75%, at least 80%, at least 85%, at least 90%, at least 95%, at least 99%, or 100% identical to SEQ ID NO: 15, a CDR2 having an amino acid sequence at least 65%, at least 70%, at least 75%, at least 80%, at least 85%, at least 90%, at least 95%, at least 99%, or 100% identical to amino acid sequence LGS, and a CDR3 having an amino acid sequence at least 65%, at least 70%, at least 75%, at least 80%, at least 85%, at least 90%, at least 95%, at least 99%, or 100% identical to SEQ ID NO: 16; VH1 is a first immunoglobulin heavy chain variable region that specifically binds to a SARS-CoV-2 protein, comprising a CDR1 having an amino acid sequence at least 65%, at least 70%, at least 75%, at least 80%, at least 85%, at least 90%, at least 95%, at least 99%, or 100% identical to SEQ ID NO: 18, a CDR2 having an amino acid sequence at least 65%, at least 70%, at least 75%, at least 80%, at least 85%, at least 90%, at least 95%, at least 99%, or 100% identical to SEQ ID NO: 19, and a CDR3 having an amino acid sequence at least 65%, at least 70%, at least 75%, at least 80%, at least 85%, at least 90%, at least 95%, at least 99%, or 100% identical to SEQ ID NO: 20; VH2 is a second immunoglobulin heavy chain variable region that specifically binds to a SARS-CoV-2 protein, comprising a CDR1 having an amino acid sequence at least 65%, at least 70%, at least 75%, at least 80%, at least 85%, at least 90%, at least 95%, at least 99%, or 100% identical to SEQ ID NO: 12 or 1057, a CDR2 having an amino acid sequence at least 65%, at least 70%, at least 75%, at least 80%, at least 85%, at least 90%, at least 95%, at least 99%, or 100% identical to SEQ ID NO: 6 or 1058, and a CDR3 having an amino acid sequence at least 65%, at least 70%, at least 75%, at least 80%, at least 85%, at least 90%, at least 95%, at least 99%, or 100% identical to SEQ ID NO: 13 or 1059; VH3 is a third immunoglobulin heavy chain variable region that specifically binds to a SARS-CoV-2 protein, comprising a CDR1 having an amino acid sequence at least 65%, at least 70%, at least 75%, at least 80%, at least 85%, at least 90%, at least 95%, at least 99%, or 100% identical to SEQ ID NO: 12 or 1057, a CDR2 having an amino acid sequence at least 65%, at least 70%, at least 75%, at least 80%, at least 85%, at least 90%, at least 95%, at least 99%, or 100% identical to SEQ ID NO: 6 or 1058, and a CDR3 having an amino acid sequence at least 65%, at least 70%, at least 75%, at least 80%, at least 85%, at least 90%, at least 95%, at least 99%, or 100% identical to SEQ ID NO: 13 or 1059; VH4 is a fourth immunoglobulin heavy chain variable region that specifically binds to a SARS-CoV-2 protein, comprising a CDR1 having an amino acid sequence at least 65%, at least 70%, at least 75%, at least 80%, at least 85%, at least 90%, at least 95%, at least 99%, or 100% identical to SEQ ID NO: 18, a CDR2 having an amino acid sequence at least 65%, at least 70%, at least 75%, at least 80%, at least 85%, at least 90%, at least 95%, at least 99%, or 100% identical to SEQ ID NO: 19, and a CDR3 having an amino acid sequence at least 65%, at least 70%, at least 75%, at least 80%, at least 85%, at least 90%, at least 95%, at least 99%, or 100% identical to SEQ ID NO: 20.

[0217] In some aspects, VL1 comprises an amino acid sequence that is at least 65%, at least 70%, at least 75%, at least 80%, at least 85%, at least 90%, at least 95%, at least 99%, or 100% identical to SEQ ID NO: 17; VL2 comprises an amino acid sequence that is at least 65%, at least 70%, at least 75%, at least 80%, at least 85%, at least 90%, at least 95%, at least 99%, or 100% identical to SEQ ID NO: 11; VL3 comprises an amino acid sequence that is at least 65%, at least 70%, at least 75%, at least 80%, at least 85%, at least 90%, at least 95%, at least 99%, or 100% identical to SEQ ID NO: 11; VL4 comprises an amino acid sequence that is at least 65%, at least 70%, at least 75%, at least 80%, at least 85%, at least 90%, at least 95%, at least 99%, or 100% identical to SEQ ID NO: 17; VH1 comprises an amino acid sequence that is at least 65%, at least 70%, at least 75%, at least 80%, at least 85%, at least 90%, at least 95%, at least 99%, or 100% identical to SEQ ID NO: 21 or 22; VH2 comprises an amino acid sequence that is at least 65%, at least 70%, at least 75%, at least 80%, at least 85%, at least 90%, at least 95%, at least 99%, or 100% identical to SEQ ID NO: 14; VH3 comprises an amino acid sequence that is at least 65%, at least 70%, at least 75%, at least 80%, at least 85%, at least 90%, at least 95%, at least 99%, or 100% identical to SEQ ID NO: 14; and VH4 comprises an amino acid sequence that is at least 65%, at least 70%, at least 75%, at least 80%, at least 85%, at least 90%, at least 95%, at least 99%, or 100% identical to SEQ ID NO: 21 or 22.

[0218] In some aspects, VL1 is a first immunoglobulin light chain variable region that specifically binds to a SARS-CoV-2 protein, comprising a CDR1 having an amino acid sequence at least 65%, at least 70%, at least 75%, at least 80%, at least 85%, at least 90%, at least 95%, at least 99%, or 100% identical to SEQ ID NO: 23, a CDR2 having an amino acid sequence at least 65%, at least 70%, at least 75%, at least 80%, at least 85%, at least 90%, at least 95%, at least 99%, or 100% identical to amino acid sequence GTN, and a CDR3 having an amino acid sequence at least 65%, at least 70%, at least 75%, at least 80%, at least 85%, at least 90%, at least 95%, at least 99%, or 100% identical to SEQ ID NO: 24 or 325; VL2 is a second immunoglobulin light chain variable region that specifically binds to a SARS-CoV-2 protein, comprising a CDR1 having an amino acid sequence at least 65%, at least 70%, at least 75%, at least 80%, at least 85%, at least 90%, at least 95%, at least 99%, or 100% identical to SEQ ID NO: 9 or 1055, a CDR2 having an amino acid sequence at least 65%, at least 70%, at least 75%, at least 80%, at least 85%, at least 90%, at least 95%, at least 99%, or 100% identical to SEQ ID NO: 1056 or an amino acid sequence at least 65%, at least 70%, at least 75%, at least 80%, at least 85%, at least 90%, at least 95%, at least 99%, or 100% identical to amino acid sequence GAS, and a CDR3 having an amino acid sequence at least 65%, at least 70%, at least 75%, at least 80%, at least 85%, at least 90%, at least 95%, at least 99%, or 100% identical to SEQ ID NO: 10; VL3 is a third immunoglobulin light chain variable region that specifically binds to a SARS-CoV-2 protein, comprising a CDR1 having an amino acid sequence at least 65%, at least 70%, at least 75%, at least 80%, at least 85%, at least 90%, at least 95%, at least 99%, or 100% identical to SEQ ID NO: 9 or 1055, a CDR2 having an amino acid sequence at least 65%, at least 70%, at least 75%, at least 80%, at least 85%, at least 90%, at least 95%, at least 99%, or 100% identical to SEQ ID NO: 1056 or an amino acid sequence at least 65%, at least 70%, at least 75%, at least 80%, at least 85%, at least 90%, at least 95%, at least 99%, or 100% identical to amino acid sequence GAS, and a CDR3 having an amino acid sequence at least 65%, at least 70%, at least 75%, at least 80%, at least 85%, at least 90%, at least 95%, at least 99%, or 100% identical to SEQ ID NO: 10; VL4 is a fourth immunoglobulin light chain variable region that specifically binds to a SARS-CoV-2 protein, comprising a CDR1 having an amino acid sequence at least 65%, at least 70%, at least 75%, at least 80%, at least 85%, at least 90%, at least 95%, at least 99%, or 100% identical to SEQ ID NO: 15, a CDR2 having an amino acid sequence at least 65%, at least 70%, at least 75%, at least 80%, at least 85%, at least 90%, at least 95%, at least 99%, or 100% identical to amino acid sequence LGS, and a CDR3 having an amino acid sequence at least 65%, at least 70%, at least 75%, at least 80%, at least 85%, at least 90%, at least 95%, at least 99%, or 100% identical to SEQ ID NO: 16; VH1 is a first immunoglobulin heavy chain variable region that specifically binds to a SARS-CoV-2 protein, comprising a CDR1 having an amino acid sequence at least 65%, at least 70%, at least 75%, at least 80%, at least 85%, at least 90%, at least 95%, at least 99%, or 100% identical to SEQ ID NO: 26, a CDR2 having an amino acid sequence at least 65%, at least 70%, at least 75%, at least 80%, at least 85%, at least 90%, at least 95%, at least 99%, or 100% identical to SEQ ID NO: 27, and a CDR3 having an amino acid sequence at least 65%, at least 70%, at least 75%, at least 80%, at least 85%, at least 90%, at least 95%, at least 99%, or 100% identical to SEQ ID NO: 28 or 332; VH2 is a second immunoglobulin heavy chain variable region that specifically binds to a SARS-CoV-2 protein, comprising a CDR1 having an amino acid sequence at least 65%, at least 70%, at least 75%, at least 80%, at least 85%, at least 90%, at least 95%, at least 99%, or 100% identical to SEQ ID NO: 12 or 1057, a CDR2 having an amino acid sequence at least 65%, at least 70%, at least 75%, at least 80%, at least 85%, at least 90%, at least 95%, at least 99%, or 100% identical to SEQ ID NO: 6 or 1058, and a CDR3 having an amino acid sequence at least 65%, at least 70%, at least 75%, at least 80%, at least 85%, at least 90%, at least 95%, at least 99%, or 100% identical to SEQ ID NO: 13 or 1059; VH3 is a third immunoglobulin heavy chain variable region that specifically binds to a SARS-CoV-2 protein, comprising a CDR1 having an amino acid sequence at least 65%, at least 70%, at least 75%, at least 80%, at least 85%, at least 90%, at least 95%, at least 99%, or 100% identical to SEQ ID NO: 12 or 1057, a CDR2 having an amino acid sequence at least 65%, at least 70%, at least 75%, at least 80%, at least 85%, at least 90%, at least 95%, at least 99%, or 100% identical to SEQ ID NO: 6 or 1058, and a CDR3 having an amino acid sequence at least 65%, at least 70%, at least 75%, at least 80%, at least 85%, at least 90%, at least 95%, at least 99%, or 100% identical to SEQ ID NO: 13 or 1059; and VH4 is a fourth immunoglobulin heavy chain variable region that specifically binds to a SARS-CoV-2 protein, comprising a CDR1 having an amino acid sequence at least 65%, at least 70%, at least 75%, at least 80%, at least 85%, at least 90%, at least 95%, at least 99%, or 100% identical to SEQ ID NO: 18, a CDR2 having an amino acid sequence at least 65%, at least 70%, at least 75%, at least 80%, at least 85%, at least 90%, at least 95%, at least 99%, or 100% identical to SEQ ID NO: 19, and a CDR3 having an amino acid sequence at least 65%, at least 70%, at least 75%, at least 80%, at least 85%, at least 90%, at least 95%, at least 99%, or 100% identical to SEQ ID NO: 20.

[0219] In some aspects, VL1 comprises an amino acid sequence that is at least 65%, at least 70%, at least 75%, at least 80%, at least 85%, at least 90%, at least 95%, at least 99%, or 100% identical to SEQ ID NO: 25; VL2 comprises an amino acid sequence that is at least 65%, at least 70%, at least 75%, at least 80%, at least 85%, at least 90%, at least 95%, at least 99%, or 100% identical to SEQ ID NO: 11; VL3 comprises an amino acid sequence that is at least 65%, at least 70%, at least 75%, at least 80%, at least 85%, at least 90%, at least 95%, at least 99%, or 100% identical to SEQ ID NO: 11; VL4 comprises an amino acid sequence that is at least 65%, at least 70%, at least 75%, at least 80%, at least 85%, at least 90%, at least 95%, at least 99%, or 100% identical to SEQ ID NO: 17; VH1 comprises an amino acid sequence that is at least 65%, at least 70%, at least 75%, at least 80%, at least 85%, at least 90%, at least 95%, at least 99%, or 100% identical to SEQ ID NO: 29; VH2 comprises an amino acid sequence that is at least 65%, at least 70%, at least 75%, at least 80%, at least 85%, at least 90%, at least 95%, at least 99%, or 100% identical to SEQ ID NO: 14; VH3 comprises an amino acid sequence that is at least 65%, at least 70%, at least 75%, at least 80%, at least 85%, at least 90%, at least 95%, at least 99%, or 100% identical to SEQ ID NO: 14; and VH4 comprises an amino acid sequence that is at least 65%, at least 70%, at least 75%, at least 80%, at least 85%, at least 90%, at least 95%, at least 99%, or 100% identical to SEQ ID NO: 21 or 22.

[0220] In some aspects, VL1 is a first immunoglobulin light chain variable region that specifically binds to a SARS-CoV-2 protein, comprising a CDR1 having an amino acid sequence at least 65%, at least 70%, at least 75%, at least 80%, at least 85%, at least 90%, at least 95%, at least 99%, or 100% identical to SEQ ID NO: 9 or 1055, a CDR2 having an amino acid sequence at least 65%, at least 70%, at least 75%, at least 80%, at least 85%, at least 90%, at least 95%, at least 99%, or 100% identical to SEQ ID NO: 1056 or an amino acid sequence at least 65%, at least 70%, at least 75%, at least 80%, at least 85%, at least 90%, at least 95%, at least 99%, or 100% identical to amino acid sequence GAS, and a CDR3 having an amino acid sequence at least 65%, at least 70%, at least 75%, at least 80%, at least 85%, at least 90%, at least 95%, at least 99%, or 100% identical to SEQ ID NO: 10; VL2 is a second immunoglobulin light chain variable region that specifically binds to a SARS-CoV-2 protein, comprising a CDR1 having an amino acid sequence at least 65%, at least 70%, at least 75%, at least 80%, at least 85%, at least 90%, at least 95%, at least 99%, or 100% identical to SEQ ID NO: 65 or 627, a CDR2 having an amino acid sequence at least 65%, at least 70%, at least 75%, at least 80%, at least 85%, at least 90%, at least 95%, at least 99%, or 100% identical to SEQ ID NO: 628 or an amino acid sequence at least 65%, at least 70%, at least 75%, at least 80%, at least 85%, at least 90%, at least 95%, at least 99%, or 100% identical to amino acid sequence SDS, and a CDR3 having an amino acid sequence at least 65%, at least 70%, at least 75%, at least 80%, at least 85%, at least 90%, at least 95%, at least 99%, or 100% identical to SEQ ID NO: 66; VL3 is a third immunoglobulin light chain variable region that specifically binds to a SARS-CoV-2 protein, comprising a CDR1 having an amino acid sequence at least 65%, at least 70%, at least 75%, at least 80%, at least 85%, at least 90%, at least 95%, at least 99%, or 100% identical to SEQ ID NO: 9 or 1055, a CDR2 having an amino acid sequence at least 65%, at least 70%, at least 75%, at least 80%, at least 85%, at least 90%, at least 95%, at least 99%, or 100% identical to SEQ ID NO: 1056 or an amino acid sequence at least 65%, at least 70%, at least 75%, at least 80%, at least 85%, at least 90%, at least 95%, at least 99%, or 100% identical to amino acid sequence GAS, and a CDR3 having an amino acid sequence at least 65%, at least 70%, at least 75%, at least 80%, at least 85%, at least 90%, at least 95%, at least 99%, or 100% identical to SEQ ID NO: 10; VL4 is a fourth immunoglobulin light chain variable region that specifically binds to a SARS-CoV-2 protein, comprising a CDR1 having an amino acid sequence at least 65%, at least 70%, at least 75%, at least 80%, at least 85%, at least 90%, at least 95%, at least 99%, or 100% identical to SEQ ID NO: 15, a CDR2 having an amino acid sequence at least 65%, at least 70%, at least 75%, at least 80%, at least 85%, at least 90%, at least 95%, at least 99%, or 100% identical to amino acid sequence LGS, and a CDR3 having an amino acid sequence at least 65%, at least 70%, at least 75%, at least 80%, at least 85%, at least 90%, at least 95%, at least 99%, or 100% identical to SEQ ID NO: 16; VH1 is a first immunoglobulin heavy chain variable region that specifically binds to a SARS-CoV-2 protein, comprising a CDR1 having an amino acid sequence at least 65%, at least 70%, at least 75%, at least 80%, at least 85%, at least 90%, at least 95%, at least 99%, or 100% identical to SEQ ID NO: 12 or 1057, a CDR2 having an amino acid sequence at least 65%, at least 70%, at least 75%, at least 80%, at least 85%, at least 90%, at least 95%, at least 99%, or 100% identical to SEQ ID NO: 6 or 1058, and a CDR3 having an amino acid sequence at least 65%, at least 70%, at least 75%, at least 80%, at least 85%, at least 90%, at least 95%, at least 99%, or 100% identical to SEQ ID NO: 13 or 1059; VH2 is a second immunoglobulin heavy chain variable region that specifically binds to a SARS-CoV-2 protein, comprising a CDR1 having an amino acid sequence at least 65%, at least 70%, at least 75%, at least 80%, at least 85%, at least 90%, at least 95%, at least 99%, or 100% identical to SEQ ID NO: 68 or 629, a CDR2 having an amino acid sequence at least 65%, at least 70%, at least 75%, at least 80%, at least 85%, at least 90%, at least 95%, at least 99%, or 100% identical to SEQ ID NO: 69 or 630, and a CDR3 having an amino acid sequence at least 65%, at least 70%, at least 75%, at least 80%, at least 85%, at least 90%, at least 95%, at least 99%, or 100% identical to SEQ ID NO: 70 or 631; VH3 is a third immunoglobulin heavy chain variable region that specifically binds to a SARS-CoV-2 protein, comprising a CDR1 having an amino acid sequence at least 65%, at least 70%, at least 75%, at least 80%, at least 85%, at least 90%, at least 95%, at least 99%, or 100% identical to SEQ ID NO: 12 or 1057, a CDR2 having an amino acid sequence at least 65%, at least 70%, at least 75%, at least 80%, at least 85%, at least 90%, at least 95%, at least 99%, or 100% identical to SEQ ID NO: 6 or 1058, and a CDR3 having an amino acid sequence at least 65%, at least 70%, at least 75%, at least 80%, at least 85%, at least 90%, at least 95%, at least 99%, or 100% identical to SEQ ID NO: 13 or 1059; and VH4 is a fourth immunoglobulin heavy chain variable region that specifically binds to a SARS-CoV-2 protein, comprising a CDR1 having an amino acid sequence at least 65%, at least 70%, at least 75%, at least 80%, at least 85%, at least 90%, at least 95%, at least 99%, or 100% identical to SEQ ID NO: 18, a CDR2 having an amino acid sequence at least 65%, at least 70%, at least 75%, at least 80%, at least 85%, at least 90%, at least 95%, at least 99%, or 100% identical to SEQ ID NO: 19, and a CDR3 having an amino acid sequence at least 65%, at least 70%, at least 75%, at least 80%, at least 85%, at least 90%, at least 95%, at least 99%, or 100% identical to SEQ ID NO: 20.

[0221] In some aspects, VL1 comprises an amino acid sequence that is at least 65%, at least 70%, at least 75%, at least 80%, at least 85%, at least 90%, at least 95%, at least 99%, or 100% identical to SEQ ID NO: 11; VL2 comprises an amino acid sequence that is at least 65%, at least 70%, at least 75%, at least 80%, at least 85%, at least 90%, at least 95%, at least 99%, or 100% identical to SEQ ID NO: 67; VL3 comprises an amino acid sequence that is at least 65%, at least 70%, at least 75%, at least 80%, at least 85%, at least 90%, at least 95%, at least 99%, or 100% identical to SEQ ID NO: 11; VL4 comprises an amino acid sequence that is at least 65%, at least 70%, at least 75%, at least 80%, at least 85%, at least 90%, at least 95%, at least 99%, or 100% identical to SEQ ID NO: 17; VH1 comprises an amino acid sequence that is at least 65%, at least 70%, at least 75%, at least 80%, at least 85%, at least 90%, at least 95%, at least 99%, or 100% identical to SEQ ID NO: 14; VH2 comprises an amino acid sequence that is at least 65%, at least 70%, at least 75%, at least 80%, at least 85%, at least 90%, at least 95%, at least 99%, or 100% identical to SEQ ID NO: 71 or 626; VH3 comprises an amino acid sequence that is at least 65%, at least 70%, at least 75%, at least 80%, at least 85%, at least 90%, at least 95%, at least 99%, or 100% identical to SEQ ID NO: 14; and VH4 comprises an amino acid sequence that is at least 65%, at least 70%, at least 75%, at least 80%, at least 85%, at least 90%, at least 95%, at least 99%, or 100% identical to SEQ ID NO: 21 or 22.

[0222] Also provided herein is an antigen binding polypeptide complex comprising a first polypeptide and a second polypeptide, wherein the first polypeptide has a structure, from amino-terminus to carboxy-terminus, represented by: VL1-L1-CL-L2-VH1-L3-CH1; VL1-L1-CH1-L2-VH1-L3-CL; VH1-L1-CL-L2-VL1-L3-CH1; or VH1-L1-CH1-L2-VL1-L3-CL; wherein the second polypeptide has a structure, from amino-terminus to carboxy-terminus, represented by: VL2-L4-CL-L5-VL3-L6-VH3-L7-VH2-L8-CH1; VL2-L4-CL-L5-VH3-L6-VL3-L7-VH2-L8-CH1; VL2-L4-CH1-L5-VL3-L6-VH3-L7-VH2-L8- CL; VL2-L4-CH1-L5-VH3-L6-VL3-L7-VH2-L8-CL; VH2-L4-CL-L5-VL3-L6-VH3-L7-VL2-L8-CH1; VH2-L4-CL-L5-VH3-L6-VL3-L7-VL2-L8-CH1; VH2-L4-CH1-L5-VL3-L6-VH3-L7-VL2-L8-CL; VH2-L4-CH1-L5-VH3-L6-VL3-L7-VL2-L8-CL; VL3-L4-CL-L5-VL2-L6-VH2-L7-VH3-L8-CH1; VL3-L4-CL-L5-VH2-L6-VL2-L7-VH3-L8-CH1; VL3-L4-CH1-L5-VL2-L6-VH2-L7-VH3-L8-CL; VL3-L4-CH1-L5- VH2-L6-VL2-L7-VH3-L8-CL; VH3-L4-CL-L5-VL2-L6-VH2-L7-VL3-L8-CH1; VH3-L4-CL-L5-VH2-L6-VL2-L7-VL3-L8-CH1; VH3-L4-CH1-L5-VL2-L6-VH2-L7-VL3-L8-CL; or VH3-L4-CH1-L5-VH2-L6-VL2-L7-VL3-L8-CL; and wherein: VL1 is a first immunoglobulin light chain variable region that specifically binds a severe acute respiratory syndrome coronavirus 2 (SARS-CoV-2) protein; VL2 is a second immunoglobulin light chain variable region that specifically binds to a SARS-CoV-2 protein; VL3 is a third immunoglobulin light chain variable region that specifically binds to a SARS-CoV-2 protein; VH1 is a first immunoglobulin heavy chain variable region that specifically binds to a SARS-CoV-2 protein; VH2 is a second immunoglobulin heavy chain variable region that specifically binds to a SARS-CoV-2 protein; VH3 is a third immunoglobulin heavy chain variable region that specifically binds to a SARS-CoV-2 protein; CL is an immunoglobulin light chain constant region; CH1 is an immunoglobulin heavy chain constant region 1; and L1-L8 are optional amino acid linkers.

[0223] In some aspects, VL1 comprises a CDR1 having an amino acid sequence at least 65%, at least 70%, at least 75%, at least 80%, at least 85%, at least 90%, at least 95%, at least 99%, or 100% identical to SEQ ID NO: 9 or 1055, a CDR2 having an amino acid sequence at least 65%, at least 70%, at least 75%, at least 80%, at least 85%, at least 90%, at least 95%, at least 99%, or 100% identical to SEQ ID NO: 1056 or an amino acid sequence at least 65%, at least 70%, at least 75%, at least 80%, at least 85%, at least 90%, at least 95%, at least 99%, or 100% identical to amino acid sequence GAS, and a CDR3 having an amino acid sequence at least 65%, at least 70%, at least 75%, at least 80%, at least 85%, at least 90%, at least 95%, at least 99%, or 100% identical to SEQ ID NO: 10; VL2 comprises a CDR1 having an amino acid sequence at least 65%, at least 70%, at least 75%, at least 80%, at least 85%, at least 90%, at least 95%, at least 99%, or 100% identical to SEQ ID NO: 15, a CDR2 having an amino acid sequence at least 65%, at least 70%, at least 75%, at least 80%, at least 85%, at least 90%, at least 95%, at least 99%, or 100% identical to amino acid sequence LGS, and a CDR3 having an amino acid sequence at least 65%, at least 70%, at least 75%, at least 80%, at least 85%, at least 90%, at least 95%, at least 99%, or 100% identical to SEQ ID NO: 16; VL3 comprises a CDR1 having an amino acid sequence at least 65%, at least 70%, at least 75%, at least 80%, at least 85%, at least 90%, at least 95%, at least 99%, or 100% identical to SEQ ID NO: 23, a CDR2 having an amino acid sequence at least 65%, at least 70%, at least 75%, at least 80%, at least 85%, at least 90%, at least 95%, at least 99%, or 100% identical to amino acid sequence GTN, and a CDR3 having an amino acid sequence at least 65%, at least 70%, at least 75%, at least 80%, at least 85%, at least 90%, at least 95%, at least 99%, or 100% identical to SEQ ID NO: 24 or 325; VH1 comprises a CDR1 having an amino acid sequence at least 65%, at least 70%, at least 75%, at least 80%, at least 85%, at least 90%, at least 95%, at least 99%, or 100% identical to SEQ ID NO: 12 or 1057, a CDR2 having an amino acid sequence at least 65%, at least 70%, at least 75%, at least 80%, at least 85%, at least 90%, at least 95%, at least 99%, or 100% identical to SEQ ID NO: 6 or 1058, and a CDR3 having an amino acid sequence at least 65%, at least 70%, at least 75%, at least 80%, at least 85%, at least 90%, at least 95%, at least 99%, or 100% identical to SEQ ID NO: 13 or 1059; VH2 comprises a CDR1 having an amino acid sequence at least 65%, at least 70%, at least 75%, at least 80%, at least 85%, at least 90%, at least 95%, at least 99%, or 100% identical to SEQ ID NO: 18, a CDR2 having an amino acid sequence at least 65%, at least 70%, at least 75%, at least 80%, at least 85%, at least 90%, at least 95%, at least 99%, or 100% identical to SEQ ID NO: 19, and a CDR3 having an amino acid sequence at least 65%, at least 70%, at least 75%, at least 80%, at least 85%, at least 90%, at least 95%, at least 99%, or 100% identical to SEQ ID NO: 20; and VH3 comprises a CDR1 having an amino acid sequence at least 65%, at least 70%, at least 75%, at least 80%, at least 85%, at least 90%, at least 95%, at least 99%, or 100% identical to SEQ ID NO: 26, a CDR2 having an amino acid sequence at least 65%, at least 70%, at least 75%, at least 80%, at least 85%, at least 90%, at least 95%, at least 99%, or 100% identical to SEQ ID NO: 27, and a CDR3 having an amino acid sequence at least 65%, at least 70%, at least 75%, at least 80%, at least 85%, at least 90%, at least 95%, at least 99%, or 100% identical to SEQ ID NO: 28 or 332.

[0224] In some aspects, VL1 comprises an amino acid sequence that is at least 65%, at least 70%, at least 75%, at least 80%, at least 85%, at least 90%, at least 95%, at least 99%, or 100% identical to SEQ ID NO: 11; VL2 comprises an amino acid sequence that is at least 65%, at least 70%, at least 75%, at least 80%, at least 85%, at least 90%, at least 95%, at least 99%, or 100% identical to SEQ ID NO: 17; VL3 comprises an amino acid sequence that is at least 65%, at least 70%, at least 75%, at least 80%, at least 85%, at least 90%, at least 95%, at least 99%, or 100% identical to SEQ ID NO: 25; VH1 comprises an amino acid sequence that is at least 65%, at least 70%, at least 75%, at least 80%, at least 85%, at least 90%, at least 95%, at least 99%, or 100% identical to SEQ ID NO: 14; VH2 comprises an amino acid sequence that is at least 65%, at least 70%, at least 75%, at least 80%, at least 85%, at least 90%, at least 95%, at least 99%, or 100% identical to SEQ ID NO: 21 or 22; and VH3 comprises an amino acid sequence that is at least 65%, at least 70%, at least 75%, at least 80%, at least 85%, at least 90%, at least 95%, at least 99%, or 100% identical to SEQ ID NO: 29.

[0225] Also provided herein is an antigen binding polypeptide complex comprising a first polypeptide and a second polypeptide, herein the first polypeptide has a structure, from amino-terminus to carboxy-terminus, represented by: VL1-L1-CL-L2-VH1-L3-CH1; VL1-L1-CH1-L2-VH1-L3-CL; VH1-L1-CL-L2-VL1-L3-CH1; or VH1-L1-CH1-L2-VL1-L3-CL; wherein the second polypeptide has a structure, from amino-terminus to carboxy-terminus, represented by: VL2-L4-VH2-L5-VL3-L6-CL-L7-VH3-L8-CH1; VL2-L4-VH2-L5-VL3-L6-CH1-L7-VH3-L8-CL; VL2-L4-VH2-L5-VH3-L6-CL-L7-VL3-L8-CH1; VL2-L4-VH2-L5-VH3-L6-CH1-L7-VL3-L8-CL; VL2-L4-VL3-L5-VH2-L6-CL-L7-VH3-L8-CH1; VL2-L4-VL3-L5-VH2-L6-CH1-L7-VH3-L8-CL; VL2-L4-VH3-L5-VH2-L6-CL-L7-VL3-L8-CH1; VL2-L4-VH3-L5-VH2-L6-CH1-L7-VL3-L8-CL; VH2-L4-VL2-L5-VL3-L6-CL-L7-VH3-L8-CH1; VH2-L4-VL2-L5-VL3-L6-CH1-L7-VH3-L8-CL; VH2-L4-VL2-L5-VH3-L6-CL-L7-VL3-L8-CH1; VH2-L4-VL2-L5-VH3-L6-CH1-L7-VL3-L8-CL; VH2-L4-VL3-L5-VL2-L6-CL-L7-VH3-L8-CH1; VH2-L4-VL3-L5-VL2-L6-CH1-L7-VH3-L8-CL; VH2-L4-VH3-L5-VL2-L6-CL-L7-VL3-L8-CH1; VH2-L4-VH3-L5-VL2-L6-CH1-L7-VL3-L8-CL; VL3-L4-VL2-L5-VH3-L6-CL-L7-VH2-L8-CH1; VL3-L4-VL2-L5-VH3-L6-CH1-L7-VH2-L8-CL; VL3-L4-VH2-L5-VH3-L6-CL-L7-VL2-L8-CH1; VL3-L4-VH2-L5-VH3-L6-CH1-L7-VL2-L8-CL; VL3-L4-VH3-L5-VL2-L6-CL-L7-VH2-L8-CH1; VL3-L4-VH3-L5-VL2-L6-CH1-L7-VH2-L8-CL; VL3-L4-VH3-L5-VH2-L6-CL-L7-VL2-L8-CH1; VL3-L4-VH3-L5-VH2-L6-CH1-L7-VL2-L8- CL; VH3-L4-VL2-L5-VL3-L6-CL-L7-VH2-L8-CH1; VH3-L4-VL2-L5-VL3-L6-CH1-L7-VH2-L8-CL; VH3-L4-VH2-L5-VL3-L6-CL-L7-VL2-L8-CH1; VH3-L4-VH2-L5-VL3-L6-CH1-L7-VL2-L8-CL; VH3-L4-VL3-L5-VL2-L6-CL-L7-VH2-L8-CH1; VH3-L4-VL3-L5-VL2-L6-CH1-L7-VH2-L8-CL; VH3-L4-VL3-L5-VH2-L6-CL-L7-VL2-L8-CH1; or VH3-L4-VL3-L5-VH2-L6-CH1-L7-VL2-L8-CL; and wherein: VL1 is a first immunoglobulin light chain variable region that specifically binds to a severe acute respiratory syndrome coronavirus 2 (SARS-CoV-2) protein; VL2 is a second immunoglobulin light chain variable region that specifically binds to a SARS-CoV-2 protein; VL3 is a third immunoglobulin light chain variable region that specifically binds to a SARS-CoV-2 protein; VH1 is a first immunoglobulin heavy chain variable region that specifically binds to a SARS-CoV-2 protein; VH2 is a second immunoglobulin heavy chain variable region that specifically binds to a SARS-CoV-2 protein; VH3 is a third immunoglobulin heavy chain variable region that specifically binds to a SARS-CoV-2 protein; CL is an immunoglobulin light chain constant region; CH1 is an immunoglobulin heavy chain constant region 1; and L1-L8 are optional amino acid linkers.

[0226] In some aspects, VL1 comprises a CDR1 having an amino acid sequence at least 65%, at least 70%, at least 75%, at least 80%, at least 85%, at least 90%, at least 95%, at least 99%, or 100% identical to SEQ ID NO: 9 or 1055, a CDR2 having an amino acid sequence at least 65%, at least 70%, at least 75%, at least 80%, at least 85%, at least 90%, at least 95%, at least 99%, or 100% identical to SEQ ID NO: 1056 or an amino acid sequence at least 65%, at least 70%, at least 75%, at least 80%, at least 85%, at least 90%, at least 95%, at least 99%, or 100% identical to amino acid sequence GAS, and a CDR3 having an amino acid sequence at least 65%, at least 70%, at least 75%, at least 80%, at least 85%, at least 90%, at least 95%, at least 99%, or 100% identical to SEQ ID NO: 10; VL2 comprises a CDR1 having an amino acid sequence at least 65%, at least 70%, at least 75%, at least 80%, at least 85%, at least 90%, at least 95%, at least 99%, or 100% identical to SEQ ID NO: 23, a CDR2 having an amino acid sequence at least 65%, at least 70%, at least 75%, at least 80%, at least 85%, at least 90%, at least 95%, at least 99%, or 100% identical to amino acid sequence GTN, and a CDR3 having an amino acid sequence at least 65%, at least 70%, at least 75%, at least 80%, at least 85%, at least 90%, at least 95%, at least 99%, or 100% identical to SEQ ID NO: 24 or 325; VL3 comprises a CDR1 having an amino acid sequence at least 65%, at least 70%, at least 75%, at least 80%, at least 85%, at least 90%, at least 95%, at least 99%, or 100% identical to SEQ ID NO: 15, a CDR2 having an amino acid sequence at least 65%, at least 70%, at least 75%, at least 80%, at least 85%, at least 90%, at least 95%, at least 99%, or 100% identical to amino acid sequence LGS, and a CDR3 having an amino acid sequence at least 65%, at least 70%, at least 75%, at least 80%, at least 85%, at least 90%, at least 95%, at least 99%, or 100% identical to SEQ ID NO: 16; VH1 comprises a CDR1 having an amino acid sequence at least 65%, at least 70%, at least 75%, at least 80%, at least 85%, at least 90%, at least 95%, at least 99%, or 100% identical to SEQ ID NO: 12 or 1057, a CDR2 having an amino acid sequence at least 65%, at least 70%, at least 75%, at least 80%, at least 85%, at least 90%, at least 95%, at least 99%, or 100% identical to SEQ ID NO: 6 or 1058, and a CDR3 having an amino acid sequence at least 65%, at least 70%, at least 75%, at least 80%, at least 85%, at least 90%, at least 95%, at least 99%, or 100% identical to SEQ ID NO: 13 or 1059; VH2 comprises a CDR1 having an amino acid sequence at least 65%, at least 70%, at least 75%, at least 80%, at least 85%, at least 90%, at least 95%, at least 99%, or 100% identical to SEQ ID NO: 26, a CDR2 having an amino acid sequence at least 65%, at least 70%, at least 75%, at least 80%, at least 85%, at least 90%, at least 95%, at least 99%, or 100% identical to SEQ ID NO: 27, and a CDR3 having an amino acid sequence at least 65%, at least 70%, at least 75%, at least 80%, at least 85%, at least 90%, at least 95%, at least 99%, or 100% identical to SEQ ID NO: 28 or 332; and VH3 comprises a CDR1 having an amino acid sequence at least 65%, at least 70%, at least 75%, at least 80%, at least 85%, at least 90%, at least 95%, at least 99%, or 100% identical to SEQ ID NO: 18, a CDR2 having an amino acid sequence at least 65%, at least 70%, at least 75%, at least 80%, at least 85%, at least 90%, at least 95%, at least 99%, or 100% identical to SEQ ID NO: 19, and a CDR3 having an amino acid sequence at least 65%, at least 70%, at least 75%, at least 80%, at least 85%, at least 90%, at least 95%, at least 99%, or 100% identical to SEQ ID NO: 20.

[0227] In some aspects, VL1 comprises an amino acid sequence that is at least 65%, at least 70%, at least 75%, at least 80%, at least 85%, at least 90%, at least 95%, at least 99%, or 100% identical to SEQ ID NO: 11; VL2 comprises an amino acid sequence that is at least 65%, at least 70%, at least 75%, at least 80%, at least 85%, at least 90%, at least 95%, at least 99%, or 100% identical to SEQ ID NO: 25; VL3 comprises an amino acid sequence that is at least 65%, at least 70%, at least 75%, at least 80%, at least 85%, at least 90%, at least 95%, at least 99%, or 100% identical to SEQ ID NO: 17; VH1 comprises an amino acid sequence that is at least 65%, at least 70%, at least 75%, at least 80%, at least 85%, at least 90%, at least 95%, at least 99%, or 100% identical to SEQ ID NO: 14; VH2 comprises an amino acid sequence that is at least 65%, at least 70%, at least 75%, at least 80%, at least 85%, at least 90%, at least 95%, at least 99%, or 100% identical to SEQ ID NO: 29; and VH3 comprises an amino acid sequence that is at least 65%, at least 70%, at least 75%, at least 80%, at least 85%, at least 90%, at least 95%, at least 99%, or 100% identical to SEQ ID NO: 21 or 22.

[0228] Also provided herein is an antigen binding polypeptide complex comprising a first polypeptide and a second polypeptide, wherein the first polypeptide has a structure, from amino-terminus to carboxy-terminus, represented by: VL1-L1-CL-L2-VH1-L3-CH1; VL1-L1-CH1-L2-VH1-L3-CL; VH1-L1-CL-L2-VL1-L3-CH1; or VH1-L1-CH1-L2-VL1-L3-CL; wherein the second polypeptide has a structure, from amino-terminus to carboxy-terminus, represented by: VL2-L4-CL-L5-VH2-L6-CH1-L7-VL3-L8-VH3; VL2-L4-CL-L5-VH2-L6-CH1-L7-VH3-L8-VL3; VL2-L4-CL-L5-VL3-L6-CH1-L7-VH2-L8-VH3; VL2-L4-CL-L5-VH3-L6-CH1-L7-VH2-L8-VL3; VL2-L4-CH1-L5-VH2-L6-CL-L7-VL3-L8-VH3; VL2-L4-CH1-L5-VH2-L6-CL-L7-VH3-L8-VL3; VL2-L4-CH1-L5-VL3-L6-CL-L7-VH2-L8-VH3; VL2-L4-CH1-L5-VH3-L6-CL-L7-VH2-L8-VL3; VH2-L4-CL-L5-VL2-L6-CH1-L7-VL3-L8-VH3; VH2-L4-CL-L5-VL2-L6-CH1-L7-VH3-L8-VL3; VH2-L4-CL-L5-VL3-L6-CH1-L7-VL2-L8-VH3; VH2-L4-CL-L5-VH3-L6-CH1-L7-VL2-L8-VL3; VH2-L4-CH1-L5-VL2-L6-CL-L7-VL3-L8-VH3; VH2-L4-CH1-L5- VL2-L6-CL-L7-VH3-L8-VL3; VH2-L4-CH1-L5-VL3-L6-CL-L7-VL2-L8-VH3; VH2-L4-CH1-L5-VH3-L6-CL-L7-VL2-L8-VL3; VL3-L4-CL-L5-VL2-L6-CH1-L7-VH3-L8-VH2; VL3-L4-CL-L5-VH2-L6-CH1- L7-VH3-L8-VL2; VL3-L4-CL-L5-VH3-L6-CH1-L7-VL2-L8-VH2; VL3-L4-CL-L5-VH3-L6-CH1-L7-VH2-L8-VL2; VL3-L4-CH1-L5-VL2-L6-CL-L7-VH3-L8-VH2; VL3-L4-CH1-L5-VH2-L6-CL-L7-VH3-L8-VL2; VL3-L4-CH1-L5-VH3-L6-CL-L7-VL2-L8-VH2; VL3-L4-CH1-L5-VH3-L6-CL-L7-VH2-L8-VL2; VH3-L4-CL-L5-VL2-L6-CH1-L7-VL3-L8-VH2; VH3-L4-CL-L5-VH2-L6-CH1-L7-VL3-L8-VL2; VH3-L4-CL-L5-VL3-L6-CH1-L7-VL2-L8-VH2; VH3-L4-CL-L5-VL3-L6-CH1-L7-VH2-L8-VL2; VH3-L4-CH1-L5-VL2-L6-CL-L7-VL3-L8-VH2; VH3-L4-CH1-L5-VH2-L6-CL-L7-VL3-L8-VL2; VH3-L4-CH1-L5-VL3-L6-CL-L7-VL2-L8-VH2; or VH3-L4-CH1-L5-VL3-L6-CL-L7-VH2-L8-VL2; and wherein: VL1 is a first immunoglobulin light chain variable region that specifically binds to a severe acute respiratory syndrome coronavirus 2 (SARS-CoV-2) protein; VL2 is a second immunoglobulin light chain variable region that specifically binds to a SARS-CoV-2 protein; VL3 is a third immunoglobulin light chain variable region that specifically binds to a SARS-CoV-2 protein; VH1 is a first immunoglobulin heavy chain variable region that specifically binds to a SARS-CoV-2 protein; VH2 is a second immunoglobulin heavy chain variable region that specifically binds to a SARS-CoV-2 protein; VH3 is a third immunoglobulin heavy chain variable region that specifically binds to a SARS-CoV-2 protein; CL is an immunoglobulin light chain constant region; CH1 is an immunoglobulin heavy chain constant region 1; and L1-L8 are optional amino acid linkers.

[0229] In some aspects, VL1 comprises a CDR1 having an amino acid sequence at least 65%, at least 70%, at least 75%, at least 80%, at least 85%, at least 90%, at least 95%, at least 99%, or 100% identical to SEQ ID NO: 9 or 1055, a CDR2 having an amino acid sequence at least 65%, at least 70%, at least 75%, at least 80%, at least 85%, at least 90%, at least 95%, at least 99%, or 100% identical to SEQ ID NO: 1056 or an amino acid sequence at least 65%, at least 70%, at least 75%, at least 80%, at least 85%, at least 90%, at least 95%, at least 99%, or 100% identical to amino acid sequence GAS, and a CDR3 having an amino acid sequence at least 65%, at least 70%, at least 75%, at least 80%, at least 85%, at least 90%, at least 95%, at least 99%, or 100% identical to SEQ ID NO: 10; VL2 comprises a CDR1 having an amino acid sequence at least 65%, at least 70%, at least 75%, at least 80%, at least 85%, at least 90%, at least 95%, at least 99%, or 100% identical to SEQ ID NO: 23, a CDR2 having an amino acid sequence at least 65%, at least 70%, at least 75%, at least 80%, at least 85%, at least 90%, at least 95%, at least 99%, or 100% identical to amino acid sequence GTN, and a CDR3 having an amino acid sequence at least 65%, at least 70%, at least 75%, at least 80%, at least 85%, at least 90%, at least 95%, at least 99%, or 100% identical to SEQ ID NO: 24 or 325; VL3 comprises a CDR1 having an amino acid sequence at least 65%, at least 70%, at least 75%, at least 80%, at least 85%, at least 90%, at least 95%, at least 99%, or 100% identical to SEQ ID NO: 15, a CDR2 having an amino acid sequence at least 65%, at least 70%, at least 75%, at least 80%, at least 85%, at least 90%, at least 95%, at least 99%, or 100% identical to amino acid sequence LGS, and a CDR3 having an amino acid sequence at least 65%, at least 70%, at least 75%, at least 80%, at least 85%, at least 90%, at least 95%, at least 99%, or 100% identical to SEQ ID NO: 16; VH1 comprises a CDR1 having an amino acid sequence at least 65%, at least 70%, at least 75%, at least 80%, at least 85%, at least 90%, at least 95%, at least 99%, or 100% identical to SEQ ID NO: 12 or 1057, a CDR2 having an amino acid sequence at least 65%, at least 70%, at least 75%, at least 80%, at least 85%, at least 90%, at least 95%, at least 99%, or 100% identical to SEQ ID NO: 6 or 1058, and a CDR3 having an amino acid sequence at least 65%, at least 70%, at least 75%, at least 80%, at least 85%, at least 90%, at least 95%, at least 99%, or 100% identical to SEQ ID NO: 13 or 1059; VH2 comprises a CDR1 having an amino acid sequence at least 65%, at least 70%, at least 75%, at least 80%, at least 85%, at least 90%, at least 95%, at least 99%, or 100% identical to SEQ ID NO: 26, a CDR2 having an amino acid sequence at least 65%, at least 70%, at least 75%, at least 80%, at least 85%, at least 90%, at least 95%, at least 99%, or 100% identical to SEQ ID NO: 27, and a CDR3 having an amino acid sequence at least 65%, at least 70%, at least 75%, at least 80%, at least 85%, at least 90%, at least 95%, at least 99%, or 100% identical to SEQ ID NO: 28 or 332; and VH3 comprises a CDR1 having an amino acid sequence at least 65%, at least 70%, at least 75%, at least 80%, at least 85%, at least 90%, at least 95%, at least 99%, or 100% identical to SEQ ID NO: 18, a CDR2 having an amino acid sequence at least 65%, at least 70%, at least 75%, at least 80%, at least 85%, at least 90%, at least 95%, at least 99%, or 100% identical to SEQ ID NO: 19, and a CDR3 having an amino acid sequence at least 65%, at least 70%, at least 75%, at least 80%, at least 85%, at least 90%, at least 95%, at least 99%, or 100% identical to SEQ ID NO: 20.

[0230] In some aspects, VL1 comprises an amino acid sequence that is at least 65%, at least 70%, at least 75%, at least 80%, at least 85%, at least 90%, at least 95%, at least 99%, or 100% identical to SEQ ID NO: 11; VL2 comprises an amino acid sequence that is at least 65%, at least 70%, at least 75%, at least 80%, at least 85%, at least 90%, at least 95%, at least 99%, or 100% identical to SEQ ID NO: 25; VL3 comprises an amino acid sequence that is at least 65%, at least 70%, at least 75%, at least 80%, at least 85%, at least 90%, at least 95%, at least 99%, or 100% identical to SEQ ID NO: 17; VH1 comprises an amino acid sequence that is at least 65%, at least 70%, at least 75%, at least 80%, at least 85%, at least 90%, at least 95%, at least 99%, or 100% identical to SEQ ID NO: 14; VH2 comprises an amino acid sequence that is at least 65%, at least 70%, at least 75%, at least 80%, at least 85%, at least 90%, at least 95%, at least 99%, or 100% identical to SEQ ID NO: 29; and VH3 comprises an amino acid sequence that is at least 65%, at least 70%, at least 75%, at least 80%, at least 85%, at least 90%, at least 95%, at least 99%, or 100% identical to SEQ ID NO: 21 or 22.

[0231] Also provided herein is an antigen binding polypeptide complex comprising a first polypeptide and a second polypeptide, wherein the first polypeptide has a structure, from amino-terminus to carboxy-terminus, represented by: VL1-L1-VH1-L2-CL; or VH1-L3-VL1-L4-CL; wherein the second polypeptide has a structure, from amino-terminus to carboxy-terminus, represented by: VL2-L1-VH2-L2-CH1; or VH2-L3-VL2-L4-CH1; wherein: VL1 is a first immunoglobulin light chain variable region that specifically binds to a severe acute respiratory syndrome coronavirus 2 (SARS-CoV-2) protein; VL2 is a second immunoglobulin light chain variable region that specifically binds to a SARS-CoV-2 protein; VH1 is a first immunoglobulin heavy chain variable region that specifically binds to a SARS-CoV-2 protein; VH2 is a second immunoglobulin heavy chain variable region that specifically binds to a SARS-CoV-2 protein; CL is an immunoglobulin light chain constant region; CH1 is an immunoglobulin heavy chain constant region 1; and L1-L4 are optional amino acid linkers.

[0232] In some aspects, (a) VL1 comprises: (i) a complementarity determining region (CDR) 1 having an amino acid sequence that is at least 65%, at least 70%, at least 75%, at least 80%, at least 85%, at least 90%, at least 95%, at least 99%, or 100% identical to any one of SEQ ID NOs: 1, 9, 15, 23, 30, 41, 48, 55, 58, 65, 72, 79, 86, 93, 99, 105, 112, 119, 130, 138, 145, 152, 159, 166, 172, 179, 186, 192, 199, 205, 212, 219, 226, 232, 324, 627, 770, 778, 785, 794, 801, 807, 814, 827, 836, 849, 858, 865, 878, 1045, 1050, 1055, 1060, and 1065; (ii) a CDR2 having an amino acid sequence that is at least 65%, at least 70%, at least 75%, at least 80%, at least 85%, at least 90%, at least 95%, at least 99%, or 100% identical to any one of SEQ ID NOs: 2, 31, 628, 1046, 1051, 1056, and 1061, or at least 65%, at least 70%, at least 75%, at least 80%, at least 85%, at least 90%, at least 95%, at least 99%, or 100% identical to any one of amino acid sequences AAS, GAS, LGS, GTN, GTN, SAS, SDS, DNT, EVT, DAS, DVT, RNS, DVS, EDS, DDS, KDS, NNN, SYN, WAS, and DAT; and (iii) a CDR3 having an amino acid sequence that is at least 65%, at least 70%, at least 75%, at least 80%, at least 85%, at least 90%, at least 95%, at least 99%, or 100% identical to any one of SEQ ID NOs: 3, 10, 16, 24, 32, 38, 42, 49, 59, 66, 73, 80, 87, 94, 100, 106, 113, 120, 126, 131, 139, 146, 153, 160, 167, 173, 180, 187, 193, 200, 206, 213, 220, 227, 233, 239, 242, 246, 249, 256, 283, 285, 287, 288, 290, 292, 294, 296, 301, 304, 306, 309, 311, 313, 316, 325, 326, 329, 764, 766, 768, 771, 779, 786, 792, 795, 808, 815, 821, 830, 837, 843, 850, 856, 859, 866, 872, 879, 885, and 1066; (b) VH1 comprises: (i) a CDR1 having an amino acid sequence that is at least 65%, at least 70%, at least 75%, at least 80%, at least 85%, at least 90%, at least 95%, at least 99%, or 100% identical to any one of SEQ ID NOs: 5, 12, 18, 26, 34, 44, 51, 61, 68, 75, 82, 89, 96, 102, 108, 115, 122, 133, 141, 148, 155, 162, 175, 182, 189, 195, 202, 208, 215, 222, 229, 235, 318, 629, 773, 781, 788, 797, 803, 810, 817, 823, 832, 839, 845, 852, 861, 868, 874, 881, 1047, 1052, 1057, 1062, and 1067; (ii) a CDR2 having an amino acid sequence that is at least 65%, at least 70%, at least 75%, at least 80%, at least 85%, at least 90%, at least 95%, at least 99%, or 100% identical to any one of SEQ ID NOs: 6, 19, 27, 35, 45, 52, 56, 62, 69, 76, 83, 90, 109, 116, 123, 134, 142, 149, 156, 163, 169, 176, 183, 196, 209, 216, 223, 236, 273, 319, 328, 630, 776, 782, 789, 798, 804, 811, 818, 824, 833, 840, 846, 853, 862, 869, 875, 882, 1048, 1053, 1058, 1063, and 1068; and (iii) a CDR3 having an amino acid sequence that is at least 65%, at least 70%, at least 75%, at least 80%, at least 85%, at least 90%, at least 95%, at least 99%, or 100% identical to any one of SEQ ID NOs: 7, 13, 20, 28, 36, 40, 46, 53, 63, 70, 77, 84, 91, 97, 103, 110, 117, 124, 128, 135, 143, 150, 157, 164, 170, 177, 184, 190, 197, 203, 210, 217, 224, 230, 237, 241, 244, 248, 253, 257, 259, 261, 263, 265, 267, 269, 271, 274, 276, 278, 281, 297, 320, 322, 327, 330, 332, 631, 765, 767, 769, 774, 783, 790, 793, 799, 805, 812, 819, 825, 834, 841, 847, 854, 857, 863, 870, 876, 883, 886, 1049, 1054, 1059, 1064, and 1069; (c) VL2 comprises: (i) a complementarity determining region (CDR) 1 having an amino acid sequence that is at least 65%, at least 70%, at least 75%, at least 80%, at least 85%, at least 90%, at least 95%, at least 99%, or 100% identical to any one of SEQ ID NOs: 1, 9, 15, 23, 30, 41, 48, 55, 58, 65, 72, 79, 86, 93, 99, 105, 112, 119, 130, 138, 145, 152, 159, 166, 172, 179, 186, 192, 199, 205, 212, 219, 226, 232, 324, 627, 770, 778, 785, 794, 801, 807, 814, 827, 836, 849, 858, 865, 878, 1045, 1050, 1055, 1060, and 1065; (ii) a CDR2 having an amino acid sequence that is at least 65%, at least 70%, at least 75%, at least 80%, at least 85%, at least 90%, at least 95%, at least 99%, or 100% identical to any one of SEQ ID NOs: 2, 31, 628, 1046, 1051, 1056, and 1061, or at least 65%, at least 70%, at least 75%, at least 80%, at least 85%, at least 90%, at least 95%, at least 99%, or 100% identical to any one of amino acid sequences AAS, GAS, LGS, GTN, GTN, SAS, SDS, DNT, EVT, DAS, DVT, RNS, DVS, EDS, DDS, KDS, NNN, SYN, WAS, and DAT; and (iii) a CDR3 having an amino acid sequence that is at least 65%, at least 70%, at least 75%, at least 80%, at least 85%, at least 90%, at least 95%, at least 99%, or 100% identical to any one of SEQ ID NOs: 3, 10, 16, 24, 32, 38, 42, 49, 59, 66, 73, 80, 87, 94, 100, 106, 113, 120, 126, 131, 139, 146, 153, 160, 167, 173, 180, 187, 193, 200, 206, 213, 220, 227, 233, 239, 242, 246, 249, 256, 283, 285, 287, 288, 290, 292, 294, 296, 301, 304, 306, 309, 311, 313, 316, 325, 326, 329, 764, 766, 768, 771, 779, 786, 792, 795, 808, 815, 821, 830, 837, 843, 850, 856, 859, 866, 872, 879, 885, and 1066; and (d) VH2 comprises: (i) a CDR1 having an amino acid sequence that is at least 65%, at least 70%, at least 75%, at least 80%, at least 85%, at least 90%, at least 95%, at least 99%, or 100% identical to any one of SEQ ID NOs: 5, 12, 18, 26, 34, 44, 51, 61, 68, 75, 82, 89, 96, 102, 108, 115, 122, 133, 141, 148, 155, 162, 175, 182, 189, 195, 202, 208, 215, 222, 229, 235, 318, 629, 773, 781, 788, 797, 803, 810, 817, 823, 832, 839, 845, 852, 861, 868, 874, 881, 1047, 1052, 1057, 1062, and 1067; (ii) a CDR2 having an amino acid sequence that is at least 65%, at least 70%, at least 75%, at least 80%, at least 85%, at least 90%, at least 95%, at least 99%, or 100% identical to any one of SEQ ID NOs: 6, 19, 27, 35, 45, 52, 56, 62, 69, 76, 83, 90, 109, 116, 123, 134, 142, 149, 156, 163, 169, 176, 183, 196, 209, 216, 223, 236, 273, 319, 328, 630, 776, 782, 789, 798, 804, 811, 818, 824, 833, 840, 846, 853, 862, 869, 875, 882, 1048, 1053, 1058, 1063, and 1068; and (iii) a CDR3 having an amino acid sequence that is at least 65%, at least 70%, at least 75%, at least 80%, at least 85%, at least 90%, at least 95%, at least 99%, or 100% identical to any one of SEQ ID NOs: 7, 13, 20, 28, 36, 40, 46, 53, 63, 70, 77, 84, 91, 97, 103, 110, 117, 124, 128, 135, 143, 150, 157, 164, 170, 177, 184, 190, 197, 203, 210, 217, 224, 230, 237, 241, 244, 248, 253, 257, 259, 261, 263, 265, 267, 269, 271, 274, 276, 278, 281, 297, 320, 322, 327, 330, 332, 631, 765, 767, 769, 774, 783, 790, 793, 799, 805, 812, 819, 825, 834, 841, 847, 854, 857, 863, 870, 876, 883, 886, 1049, 1054, 1059, 1064, and 1069.

[0233] In some aspects, (a) VL1 comprises an amino acid sequence that is at least 65%, at least 70%, at least 75%, at least 80%, at least 85%, at least 90%, at least 95%, at least 99%, or 100% identical to any one of SEQ ID NOs: 4, 11, 17, 25, 33, 39, 43, 50, 60, 67, 74, 81, 88, 95, 101, 107, 114, 121, 127, 132, 140, 147, 154, 161, 168, 174, 181, 188, 194, 201, 207, 214, 221, 228, 234, 240, 243, 247, 250, 251, 252, 255, 284, 286, 289, 291, 293, 295, 299, 300, 302, 303, 305, 307, 308, 310, 312, 314, 315, 317, 323, 772, 780, 787, 796, 802, 809, 816, 822, 831, 838, 844, 851, 860, 867, 873, 880, and 988; (b) VH1 comprises an amino acid sequence that is at least 65%, at least 70%, at least 75%, at least 80%, at least 85%, at least 90%, at least 95%, at least 99%, or 100% identical to any one of SEQ ID NOs: 8, 14, 21, 22, 29, 37, 47, 54, 57, 64, 71, 78, 85, 92, 98, 104, 111, 118, 125, 129, 136, 137, 144, 151, 158, 165, 171, 178, 185, 191, 198, 204, 211, 218, 225, 231, 238, 245, 254, 258, 260, 262, 264, 266, 268, 270, 272, 275, 277, 279, 280, 282, 298, 321, 331, 626, 775, 777, 784, 791, 800, 806, 813, 820, 826, 835, 842, 848, 855, 864, 871, 877, and 884; (c) VL2 comprises an amino acid sequence that is at least 65%, at least 70%, at least 75%, at least 80%, at least 85%, at least 90%, at least 95%, at least 99%, or 100% identical to any one of SEQ ID NOs: 4, 11, 17, 25, 33, 39, 43, 50, 60, 67, 74, 81, 88, 95, 101, 107, 114, 121, 127, 132, 140, 147, 154, 161, 168, 174, 181, 188, 194, 201, 207, 214, 221, 228, 234, 240, 243, 247, 250, 251, 252, 255, 284, 286, 289, 291, 293, 295, 299, 300, 302, 303, 305, 307, 308, 310, 312, 314, 315, 317, 323, 772, 780, 787, 796, 802, 809, 816, 822, 831, 838, 844, 851, 860, 867, 873, 880, and 988; and (d) VH2 comprises an amino acid sequence that is at least 65%, at least 70%, at least 75%, at least 80%, at least 85%, at least 90%, at least 95%, at least 99%, or 100% identical to any one of SEQ ID NOs: 8, 14, 21, 22, 29, 37, 47, 54, 57, 64, 71, 78, 85, 92, 98, 104, 111, 118, 125, 129, 136, 137, 144, 151, 158, 165, 171, 178, 185, 191, 198, 204, 211, 218, 225, 231, 238, 245, 254, 258, 260, 262, 264, 266, 268, 270, 272, 275, 277, 279, 280, 282, 298, 321, 331, 626, 775, 777, 784, 791, 800, 806, 813, 820, 826, 835, 842, 848, 855, 864, 871, 877, and 884.

[0234] In some aspects, VL1 comprises a CDR1 having an amino acid sequence at least 65%, at least 70%, at least 75%, at least 80%, at least 85%, at least 90%, at least 95%, at least 99%, or 100% identical to SEQ ID NO: 15, a CDR2 having an amino acid sequence at least 65%, at least 70%, at least 75%, at least 80%, at least 85%, at least 90%, at least 95%, at least 99%, or 100% identical to amino acid sequence LGS, and a CDR3 having an amino acid sequence at least 65%, at least 70%, at least 75%, at least 80%, at least 85%, at least 90%, at least 95%, at least 99%, or 100% identical to SEQ ID NO: 16; VL2 comprises a CDR1 having an amino acid sequence at least 65%, at least 70%, at least 75%, at least 80%, at least 85%, at least 90%, at least 95%, at least 99%, or 100% identical to SEQ ID NO: 15, a CDR2 having an amino acid sequence at least 65%, at least 70%, at least 75%, at least 80%, at least 85%, at least 90%, at least 95%, at least 99%, or 100% identical to amino acid sequence LGS, and a CDR3 having an amino acid sequence at least 65%, at least 70%, at least 75%, at least 80%, at least 85%, at least 90%, at least 95%, at least 99%, or 100% identical to SEQ ID NO: 16; VH1 comprises a CDR1 having an amino acid sequence at least 65%, at least 70%, at least 75%, at least 80%, at least 85%, at least 90%, at least 95%, at least 99%, or 100% identical to SEQ ID NO: 18, a CDR2 having an amino acid sequence at least 65%, at least 70%, at least 75%, at least 80%, at least 85%, at least 90%, at least 95%, at least 99%, or 100% identical to SEQ ID NO: 19, and a CDR3 having an amino acid sequence at least 65%, at least 70%, at least 75%, at least 80%, at least 85%, at least 90%, at least 95%, at least 99%, or 100% identical to SEQ ID NO: 20; and VH2 comprises a CDR1 having an amino acid sequence at least 65%, at least 70%, at least 75%, at least 80%, at least 85%, at least 90%, at least 95%, at least 99%, or 100% identical to SEQ ID NO: 18, a CDR2 having an amino acid sequence at least 65%, at least 70%, at least 75%, at least 80%, at least 85%, at least 90%, at least 95%, at least 99%, or 100% identical to SEQ ID NO: 19, and a CDR3 having an amino acid sequence at least 65%, at least 70%, at least 75%, at least 80%, at least 85%, at least 90%, at least 95%, at least 99%, or 100% identical to SEQ ID NO: 20.

[0235] In some aspects, VL1 comprises an amino acid sequence that is at least 65%, at least 70%, at least 75%, at least 80%, at least 85%, at least 90%, at least 95%, at least 99%, or 100% identical to SEQ ID NO: 17; VL2 comprises an amino acid sequence that is at least 65%, at least 70%, at least 75%, at least 80%, at least 85%, at least 90%, at least 95%, at least 99%, or 100% identical to SEQ ID NO: 17; VH1 comprises an amino acid sequence that is at least 65%, at least 70%, at least 75%, at least 80%, at least 85%, at least 90%, at least 95%, at least 99%, or 100% identical to SEQ ID NO: 21 or 22; and VH2 comprises an amino acid sequence that is at least 65%, at least 70%, at least 75%, at least 80%, at least 85%, at least 90%, at least 95%, at least 99%, or 100% identical to SEQ ID NO: 21 or 22.

[0236] In some aspects, VL1 comprises a CDR1 having an amino acid sequence at least 65%, at least 70%, at least 75%, at least 80%, at least 85%, at least 90%, at least 95%, at least 99%, or 100% identical to SEQ ID NO: 9 or 1055, a CDR2 having an amino acid sequence at least 65%, at least 70%, at least 75%, at least 80%, at least 85%, at least 90%, at least 95%, at least 99%, or 100% identical to SEQ ID NO: 1056 or an amino acid sequence at least 65%, at least 70%, at least 75%, at least 80%, at least 85%, at least 90%, at least 95%, at least 99%, or 100% identical to amino acid sequence GAS, and a CDR3 having an amino acid sequence at least 65%, at least 70%, at least 75%, at least 80%, at least 85%, at least 90%, at least 95%, at least 99%, or 100% identical to SEQ ID NO: 10; VL2 comprises a CDR1 having an amino acid sequence at least 65%, at least 70%, at least 75%, at least 80%, at least 85%, at least 90%, at least 95%, at least 99%, or 100% identical to SEQ ID NO: 9 or 1055, a CDR2 having an amino acid sequence at least 65%, at least 70%, at least 75%, at least 80%, at least 85%, at least 90%, at least 95%, at least 99%, or 100% identical to SEQ ID NO: 1056 or an amino acid sequence at least 65%, at least 70%, at least 75%, at least 80%, at least 85%, at least 90%, at least 95%, at least 99%, or 100% identical to amino acid sequence GAS, and a CDR3 having an amino acid sequence at least 65%, at least 70%, at least 75%, at least 80%, at least 85%, at least 90%, at least 95%, at least 99%, or 100% identical to SEQ ID NO: 10; VH1 comprises a CDR1 having an amino acid sequence at least 65%, at least 70%, at least 75%, at least 80%, at least 85%, at least 90%, at least 95%, at least 99%, or 100% identical to SEQ ID NO: 12 or 1057, a CDR2 having an amino acid sequence at least 65%, at least 70%, at least 75%, at least 80%, at least 85%, at least 90%, at least 95%, at least 99%, or 100% identical to SEQ ID NO: 6 or 1058, and a CDR3 having an amino acid sequence at least 65%, at least 70%, at least 75%, at least 80%, at least 85%, at least 90%, at least 95%, at least 99%, or 100% identical to SEQ ID NO: 13 or 1059; VH2 comprises a CDR1 having an amino acid sequence at least 65%, at least 70%, at least 75%, at least 80%, at least 85%, at least 90%, at least 95%, at least 99%, or 100% identical to SEQ ID NO: 12 or 1057, a CDR2 having an amino acid sequence at least 65%, at least 70%, at least 75%, at least 80%, at least 85%, at least 90%, at least 95%, at least 99%, or 100% identical to SEQ ID NO: 6 or 1058, and a CDR3 having an amino acid sequence at least 65%, at least 70%, at least 75%, at least 80%, at least 85%, at least 90%, at least 95%, at least 99%, or 100% identical to SEQ ID NO: 13 or 1059.

[0237] In some aspects, VL1 comprises an amino acid sequence that is at least 65%, at least 70%, at least 75%, at least 80%, at least 85%, at least 90%, at least 95%, at least 99%, or 100% identical to SEQ ID NO: 11; VL2 comprises an amino acid sequence that is at least 65%, at least 70%, at least 75%, at least 80%, at least 85%, at least 90%, at least 95%, at least 99%, or 100% identical to SEQ ID NO: 11; VH1 comprises an amino acid sequence that is at least 65%, at least 70%, at least 75%, at least 80%, at least 85%, at least 90%, at least 95%, at least 99%, or 100% identical to SEQ ID NO: 14; and VH2 comprises an amino acid sequence that is at least 65%, at least 70%, at least 75%, at least 80%, at least 85%, at least 90%, at least 95%, at least 99%, or 100% identical to SEQ ID NO: 14.

[0238] In some aspects, VL1 comprises a CDR1 having an amino acid sequence at least 65%, at least 70%, at least 75%, at least 80%, at least 85%, at least 90%, at least 95%, at least 99%, or 100% identical to SEQ ID NO: 72, a CDR2 having an amino acid sequence at least 65%, at least 70%, at least 75%, at least 80%, at least 85%, at least 90%, at least 95%, at least 99%, or 100% identical to amino acid sequence DNT, and a CDR3 having an amino acid sequence at least 65%, at least 70%, at least 75%, at least 80%, at least 85%, at least 90%, at least 95%, at least 99%, or 100% identical to SEQ ID NO: 73; VL2 comprises a CDR1 having an amino acid sequence at least 65%, at least 70%, at least 75%, at least 80%, at least 85%, at least 90%, at least 95%, at least 99%, or 100% identical to SEQ ID NO: 72, a CDR2 having an amino acid sequence at least 65%, at least 70%, at least 75%, at least 80%, at least 85%, at least 90%, at least 95%, at least 99%, or 100% identical to amino acid sequence DNT, and a CDR3 having an amino acid sequence at least 65%, at least 70%, at least 75%, at least 80%, at least 85%, at least 90%, at least 95%, at least 99%, or 100% identical to SEQ ID NO: 73; VH1 comprises a CDR1 having an amino acid sequence at least 65%, at least 70%, at least 75%, at least 80%, at least 85%, at least 90%, at least 95%, at least 99%, or 100% identical to SEQ ID NO: 75, a CDR2 having an amino acid sequence at least 65%, at least 70%, at least 75%, at least 80%, at least 85%, at least 90%, at least 95%, at least 99%, or 100% identical to SEQ ID NO: 76, and a CDR3 having an amino acid sequence at least 65%, at least 70%, at least 75%, at least 80%, at least 85%, at least 90%, at least 95%, at least 99%, or 100% identical to SEQ ID NO: 77; and VH2 comprises a CDR1 having an amino acid sequence at least 65%, at least 70%, at least 75%, at least 80%, at least 85%, at least 90%, at least 95%, at least 99%, or 100% identical to SEQ ID NO: 75, a CDR2 having an amino acid sequence at least 65%, at least 70%, at least 75%, at least 80%, at least 85%, at least 90%, at least 95%, at least 99%, or 100% identical to SEQ ID NO: 76, and a CDR3 having an amino acid sequence at least 65%, at least 70%, at least 75%, at least 80%, at least 85%, at least 90%, at least 95%, at least 99%, or 100% identical to SEQ ID NO: 77.

[0239] In some aspects, VL1 comprises an amino acid sequence that is at least 65%, at least 70%, at least 75%, at least 80%, at least 85%, at least 90%, at least 95%, at least 99%, or 100% identical to SEQ ID NO: 74; VL2 comprises an amino acid sequence that is at least 65%, at least 70%, at least 75%, at least 80%, at least 85%, at least 90%, at least 95%, at least 99%, or 100% identical to SEQ ID NO: 74; VH1 comprises an amino acid sequence that is at least 65%, at least 70%, at least 75%, at least 80%, at least 85%, at least 90%, at least 95%, at least 99%, or 100% identical to SEQ ID NO: 78; and VH2 comprises an amino acid sequence that is at least 65%, at least 70%, at least 75%, at least 80%, at least 85%, at least 90%, at least 95%, at least 99%, or 100% identical to SEQ ID NO: 78.

[0240] Also provided herein is an antigen binding polypeptide complex comprising a first polypeptide and a second polypeptide, wherein the first polypeptide has a structure, from amino-terminus to carboxy-terminus, represented by: VL1-L1-VL2-L2-CH1; or VL2-L1-VL1-L2-CH1; wherein the second polypeptide has a structure, from amino-terminus to carboxy-terminus, represented by: VH1-L3-VH2-L4-CL; or VH2-L3-VH1-L4-CL; wherein: VL1 is a first immunoglobulin light chain variable region that specifically binds to a severe acute respiratory syndrome coronavirus 2 (SARS-CoV-2) protein; VL2 is a second immunoglobulin light chain variable region that specifically binds to a SARS-CoV-2 protein; VH1 is a first immunoglobulin heavy chain variable region that specifically binds to a SARS-CoV-2 protein; VH2 is a second immunoglobulin heavy chain variable region that specifically binds to a SARS-CoV-2 protein; CL is an immunoglobulin light chain constant region; CH1 is an immunoglobulin heavy chain constant region 1; and L1-L4 are optional amino acid linkers.

[0241] In some aspects, (a) VL1 comprises: (i) a complementarity determining region (CDR) 1 having an amino acid sequence that is at least 65%, at least 70%, at least 75%, at least 80%, at least 85%, at least 90%, at least 95%, at least 99%, or 100% identical to any one of SEQ ID NOs: 1, 9, 15, 23, 30, 41, 48, 55, 58, 65, 72, 79, 86, 93, 99, 105, 112, 119, 130, 138, 145, 152, 159, 166, 172, 179, 186, 192, 199, 205, 212, 219, 226, 232, 324, 627, 770, 778, 785, 794, 801, 807, 814, 827, 836, 849, 858, 865, 878, 1045, 1050, 1055, 1060, and 1065; (ii) a CDR2 having an amino acid sequence that is at least 65%, at least 70%, at least 75%, at least 80%, at least 85%, at least 90%, at least 95%, at least 99%, or 100% identical to any one of SEQ ID NOs: 2, 31, 628, 1046, 1051, 1056, and 1061, or at least 65%, at least 70%, at least 75%, at least 80%, at least 85%, at least 90%, at least 95%, at least 99%, or 100% identical to any one of amino acid sequences AAS, GAS, LGS, GTN, GTN, SAS, SDS, DNT, EVT, DAS, DVT, RNS, DVS, EDS, DDS, KDS, NNN, SYN, WAS, and DAT; and (iii) a CDR3 having an amino acid sequence that is at least 65%, at least 70%, at least 75%, at least 80%, at least 85%, at least 90%, at least 95%, at least 99%, or 100% identical to any one of SEQ ID NOs: 3, 10, 16, 24, 32, 38, 42, 49, 59, 66, 73, 80, 87, 94, 100, 106, 113, 120, 126, 131, 139, 146, 153, 160, 167, 173, 180, 187, 193, 200, 206, 213, 220, 227, 233, 239, 242, 246, 249, 256, 283, 285, 287, 288, 290, 292, 294, 296, 301, 304, 306, 309, 311, 313, 316, 325, 326, 329, 764, 766, 768, 771, 779, 786, 792, 795, 808, 815, 821, 830, 837, 843, 850, 856, 859, 866, 872, 879, 885, and 1066; (b) VH1 comprises: (i) a CDR1 having an amino acid sequence that is at least 65%, at least 70%, at least 75%, at least 80%, at least 85%, at least 90%, at least 95%, at least 99%, or 100% identical to any one of SEQ ID NOs: 5, 12, 18, 26, 34, 44, 51, 61, 68, 75, 82, 89, 96, 102, 108, 115, 122, 133, 141, 148, 155, 162, 175, 182, 189, 195, 202, 208, 215, 222, 229, 235, 318, 629, 773, 781, 788, 797, 803, 810, 817, 823, 832, 839, 845, 852, 861, 868, 874, 881, 1047, 1052, 1057, 1062, and 1067; (ii) a CDR2 having an amino acid sequence that is at least 65%, at least 70%, at least 75%, at least 80%, at least 85%, at least 90%, at least 95%, at least 99%, or 100% identical to any one of SEQ ID NOs: 6, 19, 27, 35, 45, 52, 56, 62, 69, 76, 83, 90, 109, 116, 123, 134, 142, 149, 156, 163, 169, 176, 183, 196, 209, 216, 223, 236, 273, 319, 328, 630, 776, 782, 789, 798, 804, 811, 818, 824, 833, 840, 846, 853, 862, 869, 875, 882, 1048, 1053, 1058, 1063, and 1068; and (iii) a CDR3 having an amino acid sequence that is at least 65%, at least 70%, at least 75%, at least 80%, at least 85%, at least 90%, at least 95%, at least 99%, or 100% identical to any one of SEQ ID NOs: 7, 13, 20, 28, 36, 40, 46, 53, 63, 70, 77, 84, 91, 97, 103, 110, 117, 124, 128, 135, 143, 150, 157, 164, 170, 177, 184, 190, 197, 203, 210, 217, 224, 230, 237, 241, 244, 248, 253, 257, 259, 261, 263, 265, 267, 269, 271, 274, 276, 278, 281, 297, 320, 322, 327, 330, 332, 631, 765, 767, 769, 774, 783, 790, 793, 799, 805, 812, 819, 825, 834, 841, 847, 854, 857, 863, 870, 876, 883, 886, 1049, 1054, 1059, 1064, and 1069; (c) VL2 comprises: (i) a complementarity determining region (CDR) 1 having an amino acid sequence that is at least 65%, at least 70%, at least 75%, at least 80%, at least 85%, at least 90%, at least 95%, at least 99%, or 100% identical to any one of SEQ ID NOs: 1, 9, 15, 23, 30, 41, 48, 55, 58, 65, 72, 79, 86, 93, 99, 105, 112, 119, 130, 138, 145, 152, 159, 166, 172, 179, 186, 192, 199, 205, 212, 219, 226, 232, 324, 627, 770, 778, 785, 794, 801, 807, 814, 827, 836, 849, 858, 865, 878, 1045, 1050, 1055, 1060, and 1065; (ii) a CDR2 having an amino acid sequence that is at least 65%, at least 70%, at least 75%, at least 80%, at least 85%, at least 90%, at least 95%, at least 99%, or 100% identical to any one of SEQ ID NOs: 2, 31, 628, 1046, 1051, 1056, and 1061, or at least 65%, at least 70%, at least 75%, at least 80%, at least 85%, at least 90%, at least 95%, at least 99%, or 100% identical to any one of amino acid sequences AAS, GAS, LGS, GTN, GTN, SAS, SDS, DNT, EVT, DAS, DVT, RNS, DVS, EDS, DDS, KDS, NNN, SYN, WAS, and DAT; and (iii) a CDR3 having an amino acid sequence that is at least 65%, at least 70%, at least 75%, at least 80%, at least 85%, at least 90%, at least 95%, at least 99%, or 100% identical to any one of SEQ ID NOs: 3, 10, 16, 24, 32, 38, 42, 49, 59, 66, 73, 80, 87, 94, 100, 106, 113, 120, 126, 131, 139, 146, 153, 160, 167, 173, 180, 187, 193, 200, 206, 213, 220, 227, 233, 239, 242, 246, 249, 256, 283, 285, 287, 288, 290, 292, 294, 296, 301, 304, 306, 309, 311, 313, 316, 325, 326, 329, 764, 766, 768, 771, 779, 786, 792, 795, 808, 815, 821, 830, 837, 843, 850, 856, 859, 866, 872, 879, 885, and 1066; and (d) VH2 comprises: (i) a CDR1 having an amino acid sequence that is at least 65%, at least 70%, at least 75%, at least 80%, at least 85%, at least 90%, at least 95%, at least 99%, or 100% identical to any one of SEQ ID NOs: 5, 12, 18, 26, 34, 44, 51, 61, 68, 75, 82, 89, 96, 102, 108, 115, 122, 133, 141, 148, 155, 162, 175, 182, 189, 195, 202, 208, 215, 222, 229, 235, 318, 629, 773, 781, 788, 797, 803, 810, 817, 823, 832, 839, 845, 852, 861, 868, 874, 881, 1047, 1052, 1057, 1062, and 1067; (ii) a CDR2 having an amino acid sequence that is at least 65%, at least 70%, at least 75%, at least 80%, at least 85%, at least 90%, at least 95%, at least 99%, or 100% identical to any one of SEQ ID NOs: 6, 19, 27, 35, 45, 52, 56, 62, 69, 76, 83, 90, 109, 116, 123, 134, 142, 149, 156, 163, 169, 176, 183, 196, 209, 216, 223, 236, 273, 319, 328, 630, 776, 782, 789, 798, 804, 811, 818, 824, 833, 840, 846, 853, 862, 869, 875, 882, 1048, 1053, 1058, 1063, and 1068; and (iii) a CDR3 having an amino acid sequence that is at least 65%, at least 70%, at least 75%, at least 80%, at least 85%, at least 90%, at least 95%, at least 99%, or 100% identical to any one of SEQ ID NOs: 7, 13, 20, 28, 36, 40, 46, 53, 63, 70, 77, 84, 91, 97, 103, 110, 117, 124, 128, 135, 143, 150, 157, 164, 170, 177, 184, 190, 197, 203, 210, 217, 224, 230, 237, 241, 244, 248, 253, 257, 259, 261, 263, 265, 267, 269, 271, 274, 276, 278, 281, 297, 320, 322, 327, 330, 332, 631, 765, 767, 769, 774, 783, 790, 793, 799, 805, 812, 819, 825, 834, 841, 847, 854, 857, 863, 870, 876, 883, 886, 1049, 1054, 1059, 1064, and 1069.

[0242] In some aspects, (a) VL1 comprises an amino acid sequence that is at least 65%, at least 70%, at least 75%, at least 80%, at least 85%, at least 90%, at least 95%, at least 99%, or 100% identical to any one of SEQ ID NOs: 4, 11, 17, 25, 33, 39, 43, 50, 60, 67, 74, 81, 88, 95, 101, 107, 114, 121, 127, 132, 140, 147, 154, 161, 168, 174, 181, 188, 194, 201, 207, 214, 221, 228, 234, 240, 243, 247, 250, 251, 252, 255, 284, 286, 289, 291, 293, 295, 299, 300, 302, 303, 305, 307, 308, 310, 312, 314, 315, 317, 323, 772, 780, 787, 796, 802, 809, 816, 822, 831, 838, 844, 851, 860, 867, 873, 880, and 988; (b) VH1 comprises an amino acid sequence that is at least 65%, at least 70%, at least 75%, at least 80%, at least 85%, at least 90%, at least 95%, at least 99%, or 100% identical to any one of SEQ ID NOs: 8, 14, 21, 22, 29, 37, 47, 54, 57, 64, 71, 78, 85, 92, 98, 104, 111, 118, 125, 129, 136, 137, 144, 151, 158, 165, 171, 178, 185, 191, 198, 204, 211, 218, 225, 231, 238, 245, 254, 258, 260, 262, 264, 266, 268, 270, 272, 275, 277, 279, 280, 282, 298, 321, 331, 626, 775, 777, 784, 791, 800, 806, 813, 820, 826, 835, 842, 848, 855, 864, 871, 877, and 884; (c) VL2 comprises an amino acid sequence that is at least 65%, at least 70%, at least 75%, at least 80%, at least 85%, at least 90%, at least 95%, at least 99%, or 100% identical to any one of SEQ ID NOs: 4, 11, 17, 25, 33, 39, 43, 50, 60, 67, 74, 81, 88, 95, 101, 107, 114, 121, 127, 132, 140, 147, 154, 161, 168, 174, 181, 188, 194, 201, 207, 214, 221, 228, 234, 240, 243, 247, 250, 251, 252, 255, 284, 286, 289, 291, 293, 295, 299, 300, 302, 303, 305, 307, 308, 310, 312, 314, 315, 317, 323, 772, 780, 787, 796, 802, 809, 816, 822, 831, 838, 844, 851, 860, 867, 873, 880, and 988; and (d) VH2 comprises an amino acid sequence that is at least 65%, at least 70%, at least 75%, at least 80%, at least 85%, at least 90%, at least 95%, at least 99%, or 100% identical to any one of SEQ ID NOs: 8, 14, 21, 22, 29, 37, 47, 54, 57, 64, 71, 78, 85, 92, 98, 104, 111, 118, 125, 129, 136, 137, 144, 151, 158, 165, 171, 178, 185, 191, 198, 204, 211, 218, 225, 231, 238, 245, 254, 258, 260, 262, 264, 266, 268, 270, 272, 275, 277, 279, 280, 282, 298, 321, 331, 626, 775, 777, 784, 791, 800, 806, 813, 820, 826, 835, 842, 848, 855, 864, 871, 877, and 884.

[0243] Also provided herein is an antigen binding polypeptide complex comprising a first polypeptide and a second polypeptide, wherein the first polypeptide has a structure, from amino-terminus to carboxy-terminus, represented by: VL1-L1-VL2-L2-VL3-L3-CH1; VL1-L1-VL3-L2-VL2-L3-CH1; VL2-L1-VL1-L2-VL3-L3-CH1; VL2-L1-VL3-L2-VL1-L3-CH1; VL3-L1-VL1-L2-VL2-L3-CH1; or VL3-L1-VL2-L2-VL1-L3-CH1; wherein the second polypeptide has a structure, from amino-terminus to carboxy-terminus, represented by: VH1-L4-VH2-L5-VH3-L6-CL; VH1-L4-VH3-L5-VH2-L6-CL; VH2-L4-VH1-L5-VH3-L6-CL; VH2-L4-VH3-L5-VH1-L6-CL; VH3-L4-VH1-L5-VH2-L6-CL; or VH3-L4-VH2-L5-VH1-L6- CL; wherein: VL1 is a first immunoglobulin light chain variable region that specifically binds to a severe acute respiratory syndrome coronavirus 2 (SARS-CoV-2) protein; VL2 is a second immunoglobulin light chain variable region that specifically binds to a SARS-CoV-2 protein; VL3 is a third immunoglobulin light chain variable region that specifically binds to a SARS-CoV-2 protein; VH1 is a first immunoglobulin heavy chain variable region that specifically binds to a SARS-CoV-2 protein; VH2 is a second immunoglobulin heavy chain variable region that specifically binds to a SARS-CoV-2 protein; VH3 is a third immunoglobulin heavy chain variable region that specifically binds to a SARS-CoV-2 protein; CL is an immunoglobulin light chain constant region; CH1 is an immunoglobulin heavy chain constant region 1; and L1-L6 are optional amino acid linkers.

[0244] In some aspects, (a) VL1 comprises: (i) a complementarity determining region (CDR) 1 having an amino acid sequence that is at least 65%, at least 70%, at least 75%, at least 80%, at least 85%, at least 90%, at least 95%, at least 99%, or 100% identical to any one of SEQ ID NOs: 1, 9, 15, 23, 30, 41, 48, 55, 58, 65, 72, 79, 86, 93, 99, 105, 112, 119, 130, 138, 145, 152, 159, 166, 172, 179, 186, 192, 199, 205, 212, 219, 226, 232, 324, 627, 770, 778, 785, 794, 801, 807, 814, 827, 836, 849, 858, 865, 878, 1045, 1050, 1055, 1060, and 1065; (ii) a CDR2 having an amino acid sequence that is at least 65%, at least 70%, at least 75%, at least 80%, at least 85%, at least 90%, at least 95%, at least 99%, or 100% identical to any one of SEQ ID NOs: 2, 31, 628, 1046, 1051, 1056, and 1061, or at least 65%, at least 70%, at least 75%, at least 80%, at least 85%, at least 90%, at least 95%, at least 99%, or 100% identical to any one of amino acid sequences AAS, GAS, LGS, GTN, GTN, SAS, SDS, DNT, EVT, DAS, DVT, RNS, DVS, EDS, DDS, KDS, NNN, SYN, WAS, and DAT; and (iii) a CDR3 having an amino acid sequence that is at least 65%, at least 70%, at least 75%, at least 80%, at least 85%, at least 90%, at least 95%, at least 99%, or 100% identical to any one of SEQ ID NOs: 3, 10, 16, 24, 32, 38, 42, 49, 59, 66, 73, 80, 87, 94, 100, 106, 113, 120, 126, 131, 139, 146, 153, 160, 167, 173, 180, 187, 193, 200, 206, 213, 220, 227, 233, 239, 242, 246, 249, 256, 283, 285, 287, 288, 290, 292, 294, 296, 301, 304, 306, 309, 311, 313, 316, 325, 326, 329, 764, 766, 768, 771, 779, 786, 792, 795, 808, 815, 821, 830, 837, 843, 850, 856, 859, 866, 872, 879, 885, and 1066; (b) VH1 comprises: (i) a CDR1 having an amino acid sequence that is at least 65%, at least 70%, at least 75%, at least 80%, at least 85%, at least 90%, at least 95%, at least 99%, or 100% identical to any one of SEQ ID NOs: 5, 12, 18, 26, 34, 44, 51, 61, 68, 75, 82, 89, 96, 102, 108, 115, 122, 133, 141, 148, 155, 162, 175, 182, 189, 195, 202, 208, 215, 222, 229, 235, 318, 629, 773, 781, 788, 797, 803, 810, 817, 823, 832, 839, 845, 852, 861, 868, 874, 881, 1047, 1052, 1057, 1062, and 1067; (ii) a CDR2 having an amino acid sequence that is at least 65%, at least 70%, at least 75%, at least 80%, at least 85%, at least 90%, at least 95%, at least 99%, or 100% identical to any one of SEQ ID NOs: 6, 19, 27, 35, 45, 52, 56, 62, 69, 76, 83, 90, 109, 116, 123, 134, 142, 149, 156, 163, 169, 176, 183, 196, 209, 216, 223, 236, 273, 319, 328, 630, 776, 782, 789, 798, 804, 811, 818, 824, 833, 840, 846, 853, 862, 869, 875, 882, 1048, 1053, 1058, 1063, and 1068; and (iii) a CDR3 having an amino acid sequence that is at least 65%, at least 70%, at least 75%, at least 80%, at least 85%, at least 90%, at least 95%, at least 99%, or 100% identical to any one of SEQ ID NOs: 7, 13, 20, 28, 36, 40, 46, 53, 63, 70, 77, 84, 91, 97, 103, 110, 117, 124, 128, 135, 143, 150, 157, 164, 170, 177, 184, 190, 197, 203, 210, 217, 224, 230, 237, 241, 244, 248, 253, 257, 259, 261, 263, 265, 267, 269, 271, 274, 276, 278, 281, 297, 320, 322, 327, 330, 332, 631, 765, 767, 769, 774, 783, 790, 793, 799, 805, 812, 819, 825, 834, 841, 847, 854, 857, 863, 870, 876, 883, 886, 1049, 1054, 1059, 1064, and 1069; (c) VL2 comprises: (i) a complementarity determining region (CDR) 1 having an amino acid sequence that is at least 65%, at least 70%, at least 75%, at least 80%, at least 85%, at least 90%, at least 95%, at least 99%, or 100% identical to any one of SEQ ID NOs: 1, 9, 15, 23, 30, 41, 48, 55, 58, 65, 72, 79, 86, 93, 99, 105, 112, 119, 130, 138, 145, 152, 159, 166, 172, 179, 186, 192, 199, 205, 212, 219, 226, 232, 324, 627, 770, 778, 785, 794, 801, 807, 814, 827, 836, 849, 858, 865, 878, 1045, 1050, 1055, 1060, and 1065; (ii) a CDR2 having an amino acid sequence that is at least 65%, at least 70%, at least 75%, at least 80%, at least 85%, at least 90%, at least 95%, at least 99%, or 100% identical to any one of SEQ ID NOs: 2, 31, 628, 1046, 1051, 1056, and 1061, or at least 65%, at least 70%, at least 75%, at least 80%, at least 85%, at least 90%, at least 95%, at least 99%, or 100% identical to any one of amino acid sequences AAS, GAS, LGS, GTN, GTN, SAS, SDS, DNT, EVT, DAS, DVT, RNS, DVS, EDS, DDS, KDS, NNN, SYN, WAS, and DAT; and (iii) a CDR3 having an amino acid sequence that is at least 65%, at least 70%, at least 75%, at least 80%, at least 85%, at least 90%, at least 95%, at least 99%, or 100% identical to any one of SEQ ID NOs: 3, 10, 16, 24, 32, 38, 42, 49, 59, 66, 73, 80, 87, 94, 100, 106, 113, 120, 126, 131, 139, 146, 153, 160, 167, 173, 180, 187, 193, 200, 206, 213, 220, 227, 233, 239, 242, 246, 249, 256, 283, 285, 287, 288, 290, 292, 294, 296, 301, 304, 306, 309, 311, 313, 316, 325, 326, 329, 764, 766, 768, 771, 779, 786, 792, 795, 808, 815, 821, 830, 837, 843, 850, 856, 859, 866, 872, 879, 885, and 1066; (d) VH2 comprises: (i) a CDR1 having an amino acid sequence that is at least 65%, at least 70%, at least 75%, at least 80%, at least 85%, at least 90%, at least 95%, at least 99%, or 100% identical to any one of SEQ ID NOs: 5, 12, 18, 26, 34, 44, 51, 61, 68, 75, 82, 89, 96, 102, 108, 115, 122, 133, 141, 148, 155, 162, 175, 182, 189, 195, 202, 208, 215, 222, 229, 235, 318, 629, 773, 781, 788, 797, 803, 810, 817, 823, 832, 839, 845, 852, 861, 868, 874, 881, 1047, 1052, 1057, 1062, and 1067; (ii) a CDR2 having an amino acid sequence that is at least 65%, at least 70%, at least 75%, at least 80%, at least 85%, at least 90%, at least 95%, at least 99%, or 100% identical to any one of SEQ ID NOs: 6, 19, 27, 35, 45, 52, 56, 62, 69, 76, 83, 90, 109, 116, 123, 134, 142, 149, 156, 163, 169, 176, 183, 196, 209, 216, 223, 236, 273, 319, 328, 630, 776, 782, 789, 798, 804, 811, 818, 824, 833, 840, 846, 853, 862, 869, 875, 882, 1048, 1053, 1058, 1063, and 1068; and; (iii) a CDR3 having an amino acid sequence that is at least 65%, at least 70%, at least 75%, at least 80%, at least 85%, at least 90%, at least 95%, at least 99%, or 100% identical to any one of SEQ ID NOs: 7, 13, 20, 28, 36, 40, 46, 53, 63, 70, 77, 84, 91, 97, 103, 110, 117, 124, 128, 135, 143, 150, 157, 164, 170, 177, 184, 190, 197, 203, 210, 217, 224, 230, 237, 241, 244, 248, 253, 257, 259, 261, 263, 265, 267, 269, 271, 274, 276, 278, 281, 297, 320, 322, 327, 330, 332, 631, 765, 767, 769, 774, 783, 790, 793, 799, 805, 812, 819, 825, 834, 841, 847, 854, 857, 863, 870, 876, 883, 886, 1049, 1054, 1059, 1064, and 1069; (e) VL3 comprises: (i) a complementarity determining region (CDR) 1 having an amino acid sequence that is at least 65%, at least 70%, at least 75%, at least 80%, at least 85%, at least 90%, at least 95%, at least 99%, or 100% identical to any one of SEQ ID NOs: 1, 9, 15, 23, 30, 41, 48, 55, 58, 65, 72, 79, 86, 93, 99, 105, 112, 119, 130, 138, 145, 152, 159, 166, 172, 179, 186, 192, 199, 205, 212, 219, 226, 232, 324, 627, 770, 778, 785, 794, 801, 807, 814, 827, 836, 849, 858, 865, 878, 1045, 1050, 1055, 1060, and 1065; (ii) a CDR2 having an amino acid sequence that is at least 65%, at least 70%, at least 75%, at least 80%, at least 85%, at least 90%, at least 95%, at least 99%, or 100% identical to any one of SEQ ID NOs: 2, 31, 628, 1046, 1051, 1056, and 1061, or at least 65%, at least 70%, at least 75%, at least 80%, at least 85%, at least 90%, at least 95%, at least 99%, or 100% identical to any one of amino acid sequences AAS, GAS, LGS, GTN, GTN, SAS, SDS, DNT, EVT, DAS, DVT, RNS, DVS, EDS, DDS, KDS, NNN, SYN, WAS, and DAT; and (iii) a CDR3 having an amino acid sequence that is at least 65%, at least 70%, at least 75%, at least 80%, at least 85%, at least 90%, at least 95%, at least 99%, or 100% identical to any one of SEQ ID NOs: 3, 10, 16, 24, 32, 38, 42, 49, 59, 66, 73, 80, 87, 94, 100, 106, 113, 120, 126, 131, 139, 146, 153, 160, 167, 173, 180, 187, 193, 200, 206, 213, 220, 227, 233, 239, 242, 246, 249, 256, 283, 285, 287, 288, 290, 292, 294, 296, 301, 304, 306, 309, 311, 313, 316, 325, 326, 329, 764, 766, 768, 771, 779, 786, 792, 795, 808, 815, 821, 830, 837, 843, 850, 856, 859, 866, 872, 879, 885, and 1066; and (f) VH3 comprises: (i) a CDR1 having an amino acid sequence that is at least 65%, at least 70%, at least 75%, at least 80%, at least 85%, at least 90%, at least 95%, at least 99%, or 100% identical to any one of SEQ ID NOs: 5, 12, 18, 26, 34, 44, 51, 61, 68, 75, 82, 89, 96, 102, 108, 115, 122, 133, 141, 148, 155, 162, 175, 182, 189, 195, 202, 208, 215, 222, 229, 235, 318, 629, 773, 781, 788, 797, 803, 810, 817, 823, 832, 839, 845, 852, 861, 868, 874, 881, 1047, 1052, 1057, 1062, and 1067; (ii) a CDR2 having an amino acid sequence that is at least 65%, at least 70%, at least 75%, at least 80%, at least 85%, at least 90%, at least 95%, at least 99%, or 100% identical to any one of SEQ ID NOs: 6, 19, 27, 35, 45, 52, 56, 62, 69, 76, 83, 90, 109, 116, 123, 134, 142, 149, 156, 163, 169, 176, 183, 196, 209, 216, 223, 236, 273, 319, 328, 630, 776, 782, 789, 798, 804, 811, 818, 824, 833, 840, 846, 853, 862, 869, 875, 882, 1048, 1053, 1058, 1063, and 1068; and (iii) a CDR3 having an amino acid sequence that is at least 65%, at least 70%, at least 75%, at least 80%, at least 85%, at least 90%, at least 95%, at least 99%, or 100% identical to any one of SEQ ID NOs: 7, 13, 20, 28, 36, 40, 46, 53, 63, 70, 77, 84, 91, 97, 103, 110, 117, 124, 128, 135, 143, 150, 157, 164, 170, 177, 184, 190, 197, 203, 210, 217, 224, 230, 237, 241, 244, 248, 253, 257, 259, 261, 263, 265, 267, 269, 271, 274, 276, 278, 281, 297, 320, 322, 327, 330, 332, 631, 765, 767, 769, 774, 783, 790, 793, 799, 805, 812, 819, 825, 834, 841, 847, 854, 857, 863, 870, 876, 883, 886, 1049, 1054, 1059, 1064, and 1069.

[0245] In some aspects, (a) VL1 comprises an amino acid sequence that is at least 65%, at least 70%, at least 75%, at least 80%, at least 85%, at least 90%, at least 95%, at least 99%, or 100% identical to any one of SEQ ID NOs: 4, 11, 17, 25, 33, 39, 43, 50, 60, 67, 74, 81, 88, 95, 101, 107, 114, 121, 127, 132, 140, 147, 154, 161, 168, 174, 181, 188, 194, 201, 207, 214, 221, 228, 234, 240, 243, 247, 250, 251, 252, 255, 284, 286, 289, 291, 293, 295, 299, 300, 302, 303, 305, 307, 308, 310, 312, 314, 315, 317, 323, 772, 780, 787, 796, 802, 809, 816, 822, 831, 838, 844, 851, 860, 867, 873, 880, and 988; (b) VH1 comprises an amino acid sequence that is at least 65%, at least 70%, at least 75%, at least 80%, at least 85%, at least 90%, at least 95%, at least 99%, or 100% identical to any one of SEQ ID NOs: 8, 14, 21, 22, 29, 37, 47, 54, 57, 64, 71, 78, 85, 92, 98, 104, 111, 118, 125, 129, 136, 137, 144, 151, 158, 165, 171, 178, 185, 191, 198, 204, 211, 218, 225, 231, 238, 245, 254, 258, 260, 262, 264, 266, 268, 270, 272, 275, 277, 279, 280, 282, 298, 321, 331, 626, 775, 777, 784, 791, 800, 806, 813, 820, 826, 835, 842, 848, 855, 864, 871, 877, and 884; (c) VL2 comprises an amino acid sequence that is at least 65%, at least 70%, at least 75%, at least 80%, at least 85%, at least 90%, at least 95%, at least 99%, or 100% identical to any one of SEQ ID NOs: 4, 11, 17, 25, 33, 39, 43, 50, 60, 67, 74, 81, 88, 95, 101, 107, 114, 121, 127, 132, 140, 147, 154, 161, 168, 174, 181, 188, 194, 201, 207, 214, 221, 228, 234, 240, 243, 247, 250, 251, 252, 255, 284, 286, 289, 291, 293, 295, 299, 300, 302, 303, 305, 307, 308, 310, 312, 314, 315, 317, 323, 772, 780, 787, 796, 802, 809, 816, 822, 831, 838, 844, 851, 860, 867, 873, 880, and 988; (d) VH2 comprises an amino acid sequence that is at least 65%, at least 70%, at least 75%, at least 80%, at least 85%, at least 90%, at least 95%, at least 99%, or 100% identical to any one of SEQ ID NOs: 8, 14, 21, 22, 29, 37, 47, 54, 57, 64, 71, 78, 85, 92, 98, 104, 111, 118, 125, 129, 136, 137, 144, 151, 158, 165, 171, 178, 185, 191, 198, 204, 211, 218, 225, 231, 238, 245, 254, 258, 260, 262, 264, 266, 268, 270, 272, 275, 277, 279, 280, 282, 298, 321, 331, 626, 775, 777, 784, 791, 800, 806, 813, 820, 826, 835, 842, 848, 855, 864, 871, 877, and 884; (e) VL3 comprises an amino acid sequence that is at least 65%, at least 70%, at least 75%, at least 80%, at least 85%, at least 90%, at least 95%, at least 99%, or 100% identical to any one of SEQ ID NOs: 4, 11, 17, 25, 33, 39, 43, 50, 60, 67, 74, 81, 88, 95, 101, 107, 114, 121, 127, 132, 140, 147, 154, 161, 168, 174, 181, 188, 194, 201, 207, 214, 221, 228, 234, 240, 243, 247, 250, 251, 252, 255, 284, 286, 289, 291, 293, 295, 299, 300, 302, 303, 305, 307, 308, 310, 312, 314, 315, 317, 323, 772, 780, 787, 796, 802, 809, 816, 822, 831, 838, 844, 851, 860, 867, 873, 880, and 988; and (f) VH3 comprises an amino acid sequence that is at least 65%, at least 70%, at least 75%, at least 80%, at least 85%, at least 90%, at least 95%, at least 99%, or 100% identical to any one of SEQ ID NOs: 8, 14, 21, 22, 29, 37, 47, 54, 57, 64, 71, 78, 85, 92, 98, 104, 111, 118, 125, 129, 136, 137, 144, 151, 158, 165, 171, 178, 185, 191, 198, 204, 211, 218, 225, 231, 238, 245, 254, 258, 260, 262, 264, 266, 268, 270, 272, 275, 277, 279, 280, 282, 298, 321, 331, 626, 775, 777, 784, 791, 800, 806, 813, 820, 826, 835, 842, 848, 855, 864, 871, 877, and 884.

[0246] In some aspects, the first polypeptide and the second polypeptide each further comprise an Fc region at the carboxy-terminus. In some aspects, the Fc region of the first polypeptide and the second polypeptide each comprise a CH2 and/or CH3. In some aspects, the Fc region of the first polypeptide and the second polypeptide each further comprise an immunoglobulin hinge. In some aspects, the Fc region of the first polypeptide and/or the Fc region of the second polypeptide comprise an amino acid sequence that is at least 65%, at least 70%, at least 75%, at least 80%, at least 85%, at least 90%, at least 95%, at least 99%, or 100% identical to any one of SEQ ID NOs: 376-380. In some aspects, the Fc region of the first polypeptide and/or the Fc region of the second polypeptide comprise one or more half-life extension amino acid substitutions. In some aspects, the one or more half-life extension amino acid substitutions comprise one or more of amino acid substitutions M428L, N434A, N434S, L234F, L235E, P331S, M252Y, S254T, or T256E, or equivalent thereof, based on the EU numbering scheme. In some aspects, the one or more half-life extension amino acid substitutions comprise amino acid substitutions: (i) L234A and L235A (LA); (ii) M428L and N434S (LS); (iii) L234F and L235E; (iv) L234F, L235E, and P331S (TM); and/or (v) M252Y, S254T, and T256E (YTE); or equivalent thereof, based on the EU numbering scheme.

[0247] Also provided herein is an antigen binding polypeptide complex comprising a first polypeptide and a second polypeptide, wherein the first polypeptide comprises an amino acid sequence having at least 65%, at least 70%, at least 75%, at least 80%, at least 85%, at least 90%, at least 95%, at least 99%, or 100% identity to any one of SEQ ID NOs: 381-502, 632-633, 720-721, 724-725, 728-729, 732-733, 736-737, 740-741, 744-745, 748-749, 752-753, 760-761, 887-926, 972-977, 984-985, 989-990, 993-994, 997-998, 1001-1002, 1005-1006, 1009-1010, 1013-1014, 1017-1018, 1021-1022, 1025-1026, 1029-1030, 1033-1034, 1037-1038, and 1041-1042; and the second polypeptide comprises an amino acid sequence having at least 65%, at least 70%, at least 75%, at least 80%, at least 85%, at least 90%, at least 95%, at least 99%, or 100% identity to any one of SEQ ID NOs: 381-502, 632-633, 720-721, 724-725, 728-729, 732-733, 736-737, 740-741, 744-745, 748-749, 752-753, 760-761, 887-926, 972-977, 984-985, 989-990, 993-994, 997-998, 1001-1002, 1005-1006, 1009-1010, 1013-1014, 1017-1018, 1021-1022, 1025-1026, 1029-1030, 1033-1034, 1037-1038, and 1041-1042.

[0248] In some aspects, the SARS-CoV-2 protein is a SARS-CoV-2 spike protein. In some aspects, any one of the optional linkers each independently have a length of from 0 amino acids to about 50 amino acids. In some aspects, any one of the optional linkers each independently have a length of from about 5 amino acids to about 40 amino acids. In some aspects, one or more of the optional linkers each independently are non-immunogenic. In some aspects, one or more of the optional linkers each independently do not contain a consensus T cell epitope. In some aspects, one or more of the optional linkers each independently comprises an amino acid sequence of G or A; or an amino acid sequence at least 65%, at least 70%, at least 75%, at least 80%, at least 85%, at least 90%, at least 95%, at least 99%, or 100% identical to an amino acid sequence of GSS or ASG; or an amino acid sequence at least 65%, at least 70%, at least 75%, at least 80%, at least 85%, at least 90%, at least 95%, at least 99%, or 100% identical to any one of SEQ ID NOs: 333-373 or 967-971. In some aspects, one or more of the optional linkers each independently comprises an amino acid sequence at least 65%, at least 70%, at least 75%, at least 80%, at least 85%, at least 90%, at least 95%, at least 99%, or 100% identical to any one of SEQ ID NOs: 333-345 or 967-971. In some aspects, the Fc region comprises at least one knob-into-hole modification or Fc effector function knockout mutation. In some aspects, the Fc region of the first polypeptide and/or the Fc region of the second polypeptide comprise at least one knob-into-hole modification or Fc effector function knockout mutation. In some aspects, the antigen binding polypeptide or the antigen binding polypeptide complex is an IgG1 or IgG4 antibody, or antigen binding fragment thereof, and the knob-into-hole modification comprises: (i) knob substitutions of S354C and T366W; (ii) hole substitutions of Y349C, T366S, L368A and Y407V; or (iii) a combination thereof; or equivalent thereof, based on the EU numbering scheme. In some aspects, the antigen binding polypeptide complex is an IgG1 or IgG4 antibody, or antigen binding fragment thereof, and the Fc effector function knockout mutation is L234A, L235A, P239A, or equivalent thereof, or a combination thereof, based on the EU numbering scheme.

[0249] In some aspects, the antigen binding polypeptide or antigen binding polypeptide complex disclosed herein comprises a detectable label. In some aspects, the detectable label is a radioactive label, chemiluminescent label, fluorescent label, enzyme, peptide tag, or a combination thereof. In some aspects, the peptide tag is a poly histidine tag consisting of from about four to about 10 histidine residues. In some aspects, the poly histidine tag consists of about eight histidine residues.

[0250] In some aspects, the antigen binding polypeptide or antigen binding polypeptide complex disclosed herein is conjugated to an agent as an antibody-drug conjugate (ADC). In some aspects, the agent is a cytotoxic agent, immunomodulating agent, imaging agent, or therapeutic protein, or a combination thereof.

[0251] In some aspects, the antigen binding polypeptide or antigen binding polypeptide complex disclosed herein specifically binds to the SARS-CoV-2 protein with an equilibrium dissociation constant (K_{D}) of from about 10 μM to about 1 pM.

[0252] In some aspects, the antigen binding polypeptide complex disclosed herein is a class I antibody or antigen binding fragment thereof; class II antibody or antigen binding fragment thereof; class III antibody or antigen binding fragment thereof; class IV antibody or antigen binding fragment thereof; class I and II antibody or antigen binding fragment thereof; class I and III antibody or antigen binding fragment thereof; class I and IV antibody or antigen binding fragment thereof; class II and III antibody or antigen binding fragment thereof; class II and IV antibody or antigen binding fragment thereof; class III and IV antibody or antigen binding fragment thereof; class I, II and III antibody or antigen binding fragment thereof; class I, II and IV antibody or antigen binding fragment thereof; class I, III and IV antibody or antigen binding fragment thereof; class II, III and IV antibody or antigen binding fragment thereof; or class I, II, III and IV antibody or antigen binding fragment thereof.

[0253] In some aspects, the antigen binding polypeptide complex disclosed herein is bispecific, trispecific or tetraspecific and has greater neutralization potency against SARS-CoV-2 virus than a monospecific antigen binding polypeptide complex that specifically binds to one of the same antigens as the bispecific, trispecific or tetraspecific antigen binding polypeptide complex.

[0254] In some aspects, the antigen binding polypeptide complex disclosed herein is bispecific, trispecific or tetraspecific and has greater neutralization potency against SARS-CoV-2 virus than a mixture of monospecific antigen binding polypeptide complexes that specifically bind to the same antigens as the bispecific, trispecific or tetraspecific antigen binding polypeptide complex.

[0255] In some aspects, the SARS-CoV-2 virus is the original Wuhan strain (WA1), a D614G spike protein mutant (e.g., D614G), an Alpha variant (e.g., B.1.1.7), a Beta variant (e.g., B.1.351), a Gamma variant (e.g., P.1), a Delta variant (e.g., B.1.617.2 or AY.1), a Kappa variant (e.g., B.1.617.1), an Iota variant (e.g., B.1.526), a Lambda variant (e.g., C.37), an Epsilon variant (e.g., B.1.429. B.1.427 or CAL.20C), a Mu variant (e.g., B.1.621), a Theta variant (e.g., P.3), a Zeta variant (e.g., P.2), an Eta variant (e.g., B.1.525), a R.1 variant, a C.1.2 variant, or an Omicron variant (e.g., B.1.1.529, BA.1, BA.2, BA.2.12.1, BA.4, BA.4/5, BA.5, BQ.1, BQ.1.1. BA.2.75, BA.2.75.2, BA.4.6, BJ.1, XBB, XBB1.5, BF.7, CH.1.1. BA.2.86, EG.5, JN.1, JD.1, EG.5.1, FL.1.5.1, HK.3, HV.1, JD.1.1, JF.1, XBB.1, XBB.1.16, XBB.1.16.6, or XBB.2.3.2), or a combination or variant thereof. In some aspects, the SARS-CoV-2 virus is JN.1.13.1, KP.2, JN.1.16, JN.1.16.1, JN.1.13, JN.1.18, KP.2.3, LB.1, KP.3, KP.3.1.1, or a combination or variant thereof.

[0256] In some aspects, the Omicron variant is B.1.1.529, BA.1, BA.2, BA.2.12.1, BA.4, BA.4/5, BA.5, BQ.1, BQ.1.1, BA.2.75, BA.2.75.2, BA.4.6, BQ.1.1, BJ.1, XBB, XBB1.5, BF.7, CH.1.1, BA.2.86, EG.5, JN.1, JD.1, EG.5.1, FL.1.5.1. HK.3, HV.1, JD.1.1, JF.1, XBB.1, XBB.1.16, XBB.1.16.6, XBB.2.3.2, JN.1.13.1, KP.2, JN.1.16, JN.1.16.1, JN.1.13, JN.1.18, KP.2.3, LB.1, KP.3, KP.3.1.1, or a combination thereof.

[0257] In some aspects, one or more of the VH has a mutation at an N-glycosylation site. In some aspects, the mutation is at amino acid N62 of the VH region or equivalent thereof. In some aspects, the N62 mutation is N62Q or N62S, or equivalent thereof.

[0258] In some aspects, the antigen binding polypeptide complex disclosed herein has an isoelectric point (pI) of from about 7 to about 9.

[0259] Also provided herein is an antibody or antigen binding fragment thereof comprising the antigen binding polypeptide or antigen binding polypeptide complex disclosed herein. In some aspects, the antibody or antigen binding fragment thereof is IgG, IgM, IgE, IgA or IgD. In some aspects, the IgG is IgG1, IgG2, IgG3 or IgG4. In some aspects, the antigen binding fragment is a Fab, scFab, Fab′, F(ab′)₂, Fv or scFv. In some aspects, the antibody or antigen binding fragment thereof is human or humanized.

[0260] Also provided herein is a polypeptide having at least 65%, at least 70%, at least 75%, at least 80%, at least 85%, at least 90%, at least 95%, at least 99%, or 100% identity to any one of SEQ ID NOs: 381-502, 632-633, 720-721, 724-725, 728-729, 732-733, 736-737, 740-741, 744-745, 748-749, 752-753, 760-761, 887-926, 972-977, 984-985, 989-990, 993-994, 997-998, 1001-1002, 1005-1006, 1009-1010, 1013-1014, 1017-1018, 1021-1022, 1025-1026, 1029-1030, 1033-1034, 1037-1038, and 1041-1042.

[0261] Also provided herein is a polynucleotide encoding the antigen binding polypeptide or antigen binding polypeptide complex, the antibody or antigen binding fragment thereof, or the polypeptide disclosed herein. In some aspects, the polynucleotide comprises a nucleotide sequence having at least 65%, at least 70%, at least 75%, at least 80%, at least 85%, at least 90%, at least 95%, at least 99%, or 100% identity to a nucleotide sequence of any one of SEQ ID NOs: 503-625, 718-719, 722-723, 726-727, 730-731, 734-735, 738-739, 742-743, 746-747, 750-751, 754-755, 762-763, 927-966, 978-983, 986-987, 991-992, 995-996, 999-1000, 1003-1004, 1007-1008, 1011-1012, 1015-1016, 1019-1020, 1023-1024, 1027-1028, 1031-1032, 1035-1036, 1039-1040, and 1043-1044.

[0262] Also provided herein is a polynucleotide having at least 65%, at least 70%, at least 75%, at least 80%, at least 85%, at least 90%, at least 95%, at least 99%, or 100% identity to any one of SEQ ID NOs: 503-625, 718-719, 722-723, 726-727, 730-731, 734-735, 738-739, 742-743, 746-747, 750-751, 754-755, 762-763, 927-966, 978-983, 986-987, 991-992, 995-996, 999-1000, 1003-1004, 1007-1008, 1011-1012, 1015-1016, 1019-1020, 1023-1024, 1027-1028, 1031-1032, 1035-1036, 1039-1040, and 1043-1044.

[0263] Also provided herein is a vector comprising the polynucleotide disclosed herein.

[0264] Also provided herein is a host cell comprising the vector disclosed herein.

[0265] Also provided herein is an mRNA encoding the antigen binding polypeptide or antigen binding polypeptide complex, the antibody or antigen binding fragment thereof, or the polypeptide disclosed herein. In some aspects, the mRNA comprises a 5′-cap and/or a poly (A) tail.

[0266] Also provided herein is a lipid nanoparticle (LNP) comprising the mRNA disclosed herein.

[0267] Also provided herein is a chimeric antigen receptor (CAR) comprising the antigen binding polypeptide or antigen binding polypeptide complex disclosed herein.

[0268] Also provided herein is an immune cell comprising the CAR disclosed herein.

[0269] Also provided herein is a pharmaceutical composition comprising the antigen binding polypeptide or antigen binding polypeptide complex, the antibody or antigen binding fragment thereof, the polypeptide, the polynucleotide, the vector, the host cell, the mRNA, the LNP, the CAR, or the immune cell disclosed herein.

[0270] Also provided herein is a pharmaceutical composition comprising (i) the antigen binding polypeptide or antigen binding polypeptide complex, the antibody or antigen binding fragment thereof, the polypeptide, the polynucleotide, the vector, the host cell, the mRNA, the LNP, the CAR, or the immune cell disclosed herein, and (ii) a pharmaceutically acceptable carrier.

[0271] Also provided herein is a pharmaceutical composition comprising (i) the antigen binding polypeptide or antigen binding polypeptide complex, the antibody or antigen binding fragment thereof, the polypeptide, the polynucleotide, the vector, the host cell, the mRNA, the LNP, the CAR, or the immune cell disclosed herein, and (ii) an additional pharmaceutical agent.

[0272] Also provided herein is a kit comprising (i) the antigen binding polypeptide or antigen binding polypeptide complex of any one, the antibody or antigen binding fragment thereof, the polypeptide, the polynucleotide, the vector, the host cell, the mRNA, the LNP, the CAR, the immune cell, or the pharmaceutical composition disclosed herein, and (ii) instructions for use.

[0273] Also provided herein is a method of preventing or treating a SARS-CoV-2 viral infection in a subject in need thereof, comprising administering to the subject a therapeutically effective amount of the antigen binding polypeptide or antigen binding polypeptide complex, the antibody or antigen binding fragment thereof, the polypeptide, the polynucleotide, the vector, the host cell, the mRNA, the LNP, the CAR, the immune cell, or the pharmaceutical composition disclosed herein.

[0274] Also provided herein is a method of preventing or treating coronavirus disease 2019 (COVID-19) in a subject in need thereof, comprising administering to the subject a therapeutically effective amount of the antigen binding polypeptide or antigen binding polypeptide complex, the antibody or antigen binding fragment thereof, the polypeptide, the polynucleotide, the vector, the host cell, the mRNA, the, the CAR, the immune cell, or the pharmaceutical composition disclosed herein.

[0275] Also provided herein is a method of diagnosing a subject as being infected with a SARS-CoV-2 virus or suspected of being infected with a SARS-CoV-2 virus, comprising (i) contacting a sample obtained from the subject with the antigen binding polypeptide or antigen binding polypeptide complex or the antibody or antigen binding fragment thereof disclosed herein; (ii) detecting the presence or absence of a virus complex which contains the polypeptide or a fragment thereof, polypeptide complex or a fragment thereof, antibody or a fragment thereof, and a SARS-CoV-2 virus, virion or fragment thereof; and (iii) diagnosing the subject as being infected with a SARS-CoV-2 virus or suspected of being infected with a SARS-CoV-2 virus when the presence of the virus complex is detected.

[0276] Also provided herein is a method of diagnosing a subject as not being infected with a SARS-CoV-2 virus or not suspected of being infected with a SARS-CoV-2 virus, comprising (i) contacting a sample obtained from the subject with the antigen binding polypeptide or antigen binding polypeptide complex or the antibody or antigen binding fragment thereof disclosed herein; (ii) detecting the presence or absence of a virus complex which contains the polypeptide or a fragment thereof, polypeptide complex or a fragment thereof, antibody or a fragment thereof, and a SARS-CoV-2 virus, virion or fragment thereof; and (iii) diagnosing the subject as not being infected with a SARS-CoV-2 virus or not suspected of being infected with a SARS-CoV-2 virus when the presence of the virus complex is not detected.

[0277] Also provided herein is a method of diagnosing a subject as having COVID-19 or suspected of having COVID-19, comprising (i) contacting a sample obtained from the subject with the antigen binding polypeptide or antigen binding polypeptide complex or the antibody or antigen binding fragment thereof disclosed herein; (ii) detecting the presence or absence of a virus complex which contains the polypeptide or a fragment thereof, polypeptide complex or a fragment thereof, antibody or a fragment thereof, and a SARS-CoV-2 virus, virion or fragment thereof; and (iii) diagnosing the subject as having COVID-19 or suspected of having COVID-19 when the presence of the virus complex is detected.

[0278] Also provided herein is a method of diagnosing a subject as not having COVID-19 or not suspected of having COVID-19, comprising (i) contacting a sample obtained from the subject with the antigen binding polypeptide or antigen binding polypeptide complex or the antibody or antigen binding fragment thereof disclosed herein; (ii) detecting the presence or absence of a virus complex which contains the polypeptide or a fragment thereof, polypeptide complex or a fragment thereof, antibody or a fragment thereof, and a SARS-CoV-2 virus, virion or fragment thereof; and (iii) diagnosing the subject as not having COVID-19 or not suspected of having COVID-19 when the presence of the virus complex is not detected.

[0279] In some aspects, the sample is a nasal swab, tissue sample, saliva, plasma or blood.

[0280] In some aspects, detecting the presence or absence of the virus complex comprises an enzyme linked immunosorbent assay (ELISA), immunospot assay, lateral flow assay, flow cytometry, immunohistochemistry or western blot.

[0281] Also provided herein is an anti-SARS-CoV-2 virus antibody or an antigen binding fragment thereof, wherein the anti-SARS-CoV-2 virus antibody or an antigen binding fragment thereof comprises: (a) one or more immunoglobulin light chain constant domain (CL) and (b) one or more immunoglobulin heavy chain 1 constant domain (CH1); and wherein the anti-SARS-CoV-2 virus antibody or an antigen binding fragment thereof (i) has an isoelectric point (pI), and after administered to a subject has (ii) a higher peak serum levels, and (iii) a reduced clearance levels, as compared to a same antibody or an antigen binding fragment thereof not comprising one or more immunoglobulin light chain constant domain (CL) and (b) one or more immunoglobulin heavy chain 1 constant domain (CH1).

[0282] In some aspects, the anti-SARS-CoV-2 virus antibody or an antigen binding fragment thereof is IgG, IgM, IgE, IgA or IgD. In some aspects, the anti-SARS-CoV-2 virus antibody or an antigen binding fragment thereof is IgG1, IgG2, IgG3 or IgG4. In some aspects, the anti-SARS-CoV-2 virus antibody or an antigen binding fragment thereof is a Fab, scFab, Fab′, F(ab′)₂, Fv or scFv. In some aspects, the anti-SARS-CoV-2 virus antibody or an antigen binding fragment thereof is human or humanized. In some aspects, the anti-SARS-CoV-2 virus antibody or an antigen binding fragment thereof has an isoelectric point (pI) of from about 7 to about 9). In some aspects, the anti-SARS-CoV-2 virus antibody or an antigen binding fragment thereof binds to the SARS-CoV-2 protein with an equilibrium dissociation constant (K_{D})) of from about 10 μM to about 1 pM. In some aspects, the anti-SARS-CoV-2 virus antibody or an antigen binding fragment thereof is a class I antibody or antigen binding fragment thereof; class II antibody or antigen binding fragment thereof; class III antibody or antigen binding fragment thereof; class IV antibody or antigen binding fragment thereof; class I and II antibody or antigen binding fragment thereof; class I and III antibody or antigen binding fragment thereof; class I and IV antibody or antigen binding fragment thereof; class II and III antibody (or antigen binding fragment thereof; class II and IV antibody or antigen binding fragment thereof; class III and IV antibody or antigen binding fragment thereof; class I, II and III antibody or antigen binding fragment thereof; class I, II and IV antibody or antigen binding fragment thereof; class I, III and IV antibody or antigen binding fragment thereof; class II, III and IV antibody or antigen binding fragment thereof; or class I, II, III and IV antibody or antigen binding fragment thereof. In some aspects, the anti-SARS-CoV-2 virus antibody or an antigen binding fragment thereof is bispecific, trispecific or tetraspecific and has greater neutralization potency against SARS-CoV-2 virus than a monospecific anti-SARS-CoV-2 virus antibody or an antigen binding fragment thereof that specifically binds to one of the same antigens as the bispecific, trispecific or tetraspecific anti-SARS-CoV-2 virus antibody or an antigen binding fragment thereof. In some aspects, the anti-SARS-CoV-2 virus antibody or an antigen binding fragment thereof is bispecific, trispecific or tetraspecific and has greater neutralization potency against SARS-CoV-2 virus than a mixture of monospecific anti-SARS-CoV-2 virus antibodies or an antigen binding fragments thereof that specifically binds to one of the same antigens as the bispecific, trispecific or tetraspecific anti-SARS-CoV-2 virus antibody or an antigen binding fragment thereof.

[0283] In some aspects, the SARS-CoV-2 virus is the original Wuhan strain (WA1), a D614G spike protein mutant (e.g., D614G), an Alpha variant (e.g., B.1.1.7), a Beta variant (e.g., B.1.351), a Gamma variant (e.g., P.1), a Delta variant (e.g., B.1.617.2 or AY.1), a Kappa variant (e.g., B.1.617.1), an Iota variant (e.g., B.1.526), a Lambda variant (e.g., C.37), an Epsilon variant (e.g., B.1.429. B.1.427 or CAL.20C), a Mu variant (e.g., B.1.621), a Theta variant (e.g., P.3), a Zeta variant (e.g., P.2), an Eta variant (e.g., B.1.525), a R.1 variant, a C.1.2 variant, or an Omicron variant (e.g., B.1.1.529, BA.1, BA.2, BA.2.12.1, BA.4, BA.4/5, BA.5, BQ.1, BQ.1.1, BA.2.75, BA.2.75.2, BA.4.6, BQ.1.1, BJ.1, XBB, XBB1.5, BF.7, CH.1.1. BA.2.86, EG.5, JN.1, JD.1, EG.5.1, FL.1.5.1, HK.3, HV.1, JD.1.1, JF.1, XBB.1, XBB.1.16. XBB.1.16.6, XBB.2.3.2, JN.1.13.1, KP.2, JN.1.16, JN.1.16.1, JN.1.13, JN.1.18, KP.2.3, LB.1, KP.3, or KP.3.1.1), or a combination or variant thereof. In some aspects, the SARS-CoV-2 virus is JN.1.13.1, KP.2, JN.1.16, JN.1.16.1, JN.1.13, JN.1.18, KP.2.3, LB.1, KP.3, KP.3.1.1, or a combination or variant thereof. In some aspects, the Omicron variant is B.1.1.529, BA.1, BA.2, BA.2.12.1, BA.4, BA.4/5, BA.5, BQ.1, BQ.1.1, BA.2.75, BA.2.75.2, BA.4.6, BQ.1.1, BJ.1, XBB, XBB1.5, BF.7, CH.1.1. BA.2.86, EG.5, JN.1, JD.1, EG.5.1, FL.1.5.1, HK.3, HV.1, JD.1.1, JF.1, XBB.1, XBB.1.16, XBB.1.16.6, XBB.2.3.2, JN.1.13.1, KP.2, JN.1.16, JN.1.16.1, JN.1.13, JN.1.18, KP.2.3, LB.1, KP.3, KP.3.1.1, or a combination or variant thereof.

[0284] In some aspects, the anti-SARS-CoV-2 virus antibody or an antigen binding fragment thereof comprises one or more variable heavy chain regions (VH) and wherein at least one of the one or more VH has a mutation at an N-glycosylation site. In some aspects, the mutation is at amino acid N62 of the VH region or equivalent thereof. In some aspects, the N62 mutation is N62Q or N62S, or equivalent thereof.

[0285] In some aspects, the anti-SARS-CoV-2 virus antibody or an antigen binding fragment thereof comprises at least one variable heavy chain region (VH) and/or at least one variable light chain region (VL). In some aspects, the (a) the at least one VL comprises: (i) a complementarity determining region (CDR) 1 having an amino acid sequence that is at least 65%, at least 70%, at least 75%, at least 80%, at least 85%, at least 90%, at least 95%, at least 99%, or 100% identical to any one of SEQ ID NOs: 1, 9, 15, 23, 30, 41, 48, 55, 58, 65, 72, 79, 86, 93, 99, 105, 112, 119, 130, 138, 145, 152, 159, 166, 172, 179, 186, 192, 199, 205, 212, 219, 226, 232, 324, 627, 770, 778, 785, 794, 801, 807, 814, 827, 836, 849, 858, 865, 878, 1045, 1050, 1055, 1060, and 1065; (ii) a CDR2 having an amino acid sequence that is at least 65%, at least 70%, at least 75%, at least 80%, at least 85%, at least 90%, at least 95%, at least 99%, or 100% identical to any one of SEQ ID NOs: 2, 31, 628, 1046, 1051, 1056, and 1061, or at least 65%, at least 70%, at least 75%, at least 80%, at least 85%, at least 90%, at least 95%, at least 99%, or 100% identical to any one of amino acid sequences AAS, GAS, LGS, GTN, GTN, SAS, SDS, DNT, EVT, DAS, DVT, RNS, DVS, EDS, DDS, KDS, NNN, SYN, WAS, and DAT; and (iii) a CDR3 having an amino acid sequence that is at least 65%, at least 70%, at least 75%, at least 80%, at least 85%, at least 90%, at least 95%, at least 99%, or 100% identical to any one of SEQ ID NOs: 3, 10, 16, 24, 32, 38, 42, 49, 59, 66, 73, 80, 87, 94, 100, 106, 113, 120, 126, 131, 139, 146, 153, 160, 167, 173, 180, 187, 193, 200, 206, 213, 220, 227, 233, 239, 242, 246, 249, 256, 283, 285, 287, 288, 290, 292, 294, 296, 301, 304, 306, 309, 311, 313, 316, 325, 326, 329, 764, 766, 768, 771, 779, 786, 792, 795, 808, 815, 821, 830, 837, 843, 850, 856, 859, 866, 872, 879, 885, and 1066; and/or (b) the at least one VH comprises: (i) a CDR1 having an amino acid sequence that is at least 65%, at least 70%, at least 75%, at least 80%, at least 85%, at least 90%, at least 95%, at least 99%, or 100% identical to any one of SEQ ID NOs: 5, 12, 18, 26, 34, 44, 51, 61, 68, 75, 82, 89, 96, 102, 108, 115, 122, 133, 141, 148, 155, 162, 175, 182, 189, 195, 202, 208, 215, 222, 229, 235, 318, 629, 773, 781, 788, 797, 803, 810, 817, 823, 832, 839, 845, 852, 861, 868, 874, 881, 1047, 1052, 1057, 1062, and 1067; (ii) a CDR2 having an amino acid sequence that is at least 65%, at least 70%, at least 75%, at least 80%, at least 85%, at least 90%, at least 95%, at least 99%, or 100% identical to any one of SEQ ID NOs: 6, 19, 27, 35, 45, 52, 56, 62, 69, 76, 83, 90, 109, 116, 123, 134, 142, 149, 156, 163, 169, 176, 183, 196, 209, 216, 223, 236, 273, 319, 328, 630, 776, 782, 789, 798, 804, 811, 818, 824, 833, 840, 846, 853, 862, 869, 875, 882, 1048, 1053, 1058, 1063, and 1068; and (iii) a CDR3 having an amino acid sequence that is at least 65%, at least 70%, at least 75%, at least 80%, at least 85%, at least 90%, at least 95%, at least 99%, or 100% identical to any one of SEQ ID NOs: 7, 13, 20, 28, 36, 40, 46, 53, 63, 70, 77, 84, 91, 97, 103, 110, 117, 124, 128, 135, 143, 150, 157, 164, 170, 177, 184, 190, 197, 203, 210, 217, 224, 230, 237, 241, 244, 248, 253, 257, 259, 261, 263, 265, 267, 269, 271, 274, 276, 278, 281, 297, 320, 322, 327, 330, 332, 631, 765, 767, 769, 774, 783, 790, 793, 799, 805, 812, 819, 825, 834, 841, 847, 854, 857, 863, 870, 876, 883, 886, 1049, 1054, 1059, 1064, and 1069.

[0286] In some aspects, (a) the at least one VL comprises an amino acid sequence that is at least 65%, at least 70%, at least 75%, at least 80%, at least 85%, at least 90%, at least 95%, at least 99%, or 100% identical to any one of SEQ ID NOs: 4, 11, 17, 25, 33, 39, 43, 50, 60, 67, 74, 81, 88, 95, 101, 107, 114, 121, 127, 132, 140, 147, 154, 161, 168, 174, 181, 188, 194, 201, 207, 214, 221, 228, 234, 240, 243, 247, 250, 251, 252, 255, 284, 286, 289, 291, 293, 295, 299, 300, 302, 303, 305, 307, 308, 310, 312, 314, 315, 317, 323, 772, 780, 787, 796, 802, 809, 816, 822, 831, 838, 844, 851, 860, 867, 873, 880, and 988; and/or (b) the at least one VH comprises an amino acid sequence that is at least 65%, at least 70%, at least 75%, at least 80%, at least 85%, at least 90%, at least 95%, at least 99%, or 100% identical to any one of SEQ ID NOs: 8, 14, 21, 22, 29, 37, 47, 54, 57, 64, 71, 78, 85, 92, 98, 104, 111, 118, 125, 129, 136, 137, 144, 151, 158, 165, 171, 178, 185, 191, 198, 204, 211, 218, 225, 231, 238, 245, 254, 258, 260, 262, 264, 266, 268, 270, 272, 275, 277, 279, 280, 282, 298, 321, 331, 626, 775, 777, 784, 791, 800, 806, 813, 820, 826, 835, 842, 848, 855, 864, 871, 877, and 884.

[0287] In some aspects, the anti-SARS-CoV-2 virus antibody or an antigen binding fragment thereof is encoded by a nucleotide sequence at least 65%, at least 70%, at least 75%, at least 80%, at least 85%, at least 90%, at least 95%, at least 99%, or 100% identical to any one of SEQ ID NOs: 503-625, 718-719, 722-723, 726-727, 730-731, 734-735, 738-739, 742-743, 746-747, 750-751, 754-755, 762-763, 927-966, 978-983, 986-987, 991-992, 995-996, 999-1000, 1003-1004, 1007-1008, 1011-1012, 1015-1016, 1019-1020, 1023-1024, 1027-1028, 1031-1032, 1035-1036, 1039-1040, and 1043-1044.

[0288] In some aspects, the anti-SARS-CoV-2 virus antibody or an antigen binding fragment thereof comprises an amino acid sequence at least 65%, at least 70%, at least 75%, at least 80%, at least 85%, at least 90%, at least 95%, at least 99%, or 100% identical to any one of SEQ ID NOs: 381-502, 632-633, 720-721, 724-725, 728-729, 732-733, 736-737, 740-741, 744-745, 748-749, 752-753, 760-761, 887-926, 972-977, 984-985, 989-990, 993-994, 997-998, 1001-1002, 1005-1006, 1009-1010, 1013-1014, 1017-1018, 1021-1022, 1025-1026, 1029-1030, 1033-1034, 1037-1038, and 1041-1042.

[0289] In some aspects, provided herein are antigen binding polypeptide complexes comprising a first polypeptide and a second polypeptide, wherein the first polypeptide has a structure represented by: VL1-L1-VL2-L2-VH2-L3-VH1-L4-Fc; VL1-L1-VH2-L2-VL2-L3-VH1-L4-Fc; VH1-L1-VH2-L2-VL2-L3-VL1-L4-Fc; or VH1-L1-VL2-L2-VH2-L3-VL1-L4-Fc; wherein the second polypeptide has a structure represented by: VL3-L5-VL4-L6-VH4-L7-VH3-L8-Fc; VL3-L5-VH4-L6-VL4-L7-VH3-L8-Fc; VH3-L5-VH4-L6-VL4-L7-VL3-L8-Fc; or VH3-L5-VL4-L6-VH4-L7-VL3-L8-Fc; wherein: VL1 is a first immunoglobulin light chain variable region that specifically binds to a severe acute respiratory syndrome coronavirus 2 (SARS-CoV-2) protein and which comprises a light chain complementary determining region (LCDR) 1 comprising an amino acid sequence at least 65%, at least 70%, at least 75%, at least 80%, at least 85%, at least 90%, at least 95%, at least 99%, or 100% identical to any one of SEQ ID NOs: 41, 48, 138, 145, 152, 159, 166, 172, 192, 770, 778, 785, 794, 801, 807, 814, 827, 836, 849, 858, 865, 878, 1045, 1050, 1060, and 1065; a LCDR2 comprising an amino acid sequence at least 65%, at least 70%, at least 75%, at least 80%, at least 85%, at least 90%, at least 95%, at least 99%, or 100% identical to any one of amino acid sequences AAS, GAS, DAS, NNN, SDS, SYN, WAS, and DAT, or at least 65%, at least 70%, at least 75%, at least 80%, at least 85%, at least 90%, at least 95%, at least 99%, or 100% identical to any one of SEQ ID NOs: 1046, 1051, and 1061; and a LCDR3 comprising an amino acid sequence at least 65%, at least 70%, at least 75%, at least 80%, at least 85%, at least 90%, at least 95%, at least 99%, or 100% identical to any one of SEQ ID NOs: 42, 139, 146, 153, 160, 167, 173, 764, 766, 768, 771, 779, 786, 792, 795, 808, 815, 821, 830, 837, 843, 850, 856, 859, 866, 872, 879, 885, and 1066; VL2 is a second immunoglobulin light chain variable region that specifically binds to a SARS-CoV-2 protein and which comprises a LCDR1 comprising an amino acid sequence at least 65%, at least 70%, at least 75%, at least 80%, at least 85%, at least 90%, at least 95%, at least 99%, or 100% identical to any one of SEQ ID NOs: 41, 48, 138, 145, 152, 159, 166, 172, 192, 770, 778, 785, 794, 801, 807, 814, 827, 836, 849, 858, 865, 878, 1045, 1050, 1060, and 1065; a LCDR2 comprising an amino acid sequence at least 65%, at least 70%, at least 75%, at least 80%, at least 85%, at least 90%, at least 95%, at least 99%, or 100% identical to any one of amino acid sequences AAS, GAS, DAS, NNN, SDS, SYN, WAS, and DAT, or at least 65%, at least 70%, at least 75%, at least 80%, at least 85%, at least 90%, at least 95%, at least 99%, or 100% identical to any one of SEQ ID NOs: 1046, 1051, and 1061; and a LCDR3 comprising an amino acid sequence at least 65%, at least 70%, at least 75%, at least 80%, at least 85%, at least 90%, at least 95%, at least 99%, or 100% identical to any one of SEQ ID NOs: 42, 139, 146, 153, 160, 167, 173, 764, 766, 768, 771, 779, 786, 792, 795, 808, 815, 821, 830, 837, 843, 850, 856, 859, 866, 872, 879, 885, and 1066; VL3 is a third immunoglobulin light chain variable region that specifically binds to a SARS-CoV-2 protein and which comprises a LCDR1 comprising an amino acid sequence at least 65%, at least 70%, at least 75%, at least 80%, at least 85%, at least 90%, at least 95%, at least 99%, or 100% identical to any one of SEQ ID NOs: 41, 48, 138, 145, 152, 159, 166, 172, 192, 770, 778, 785, 794, 801, 807, 814, 827, 836, 849, 858, 865, 878, 1045, 1050, 1060, and 1065; a LCDR2 comprising an amino acid sequence at least 65%, at least 70%, at least 75%, at least 80%, at least 85%, at least 90%, at least 95%, at least 99%, or 100% identical to any one of amino acid sequences AAS, GAS, DAS, NNN, SDS, SYN, WAS, and DAT, or at least 65%, at least 70%, at least 75%, at least 80%, at least 85%, at least 90%, at least 95%, at least 99%, or 100% identical to any one of SEQ ID NOs: 1046, 1051, and 1061; and a LCDR3 comprising an amino acid sequence at least 65%, at least 70%, at least 75%, at least 80%, at least 85%, at least 90%, at least 95%, at least 99%, or 100% identical to any one of SEQ ID NOs: 42, 139, 146, 153, 160, 167, 173, 764, 766, 768, 771, 779, 786, 792, 795, 808, 815, 821, 830, 837, 843, 850, 856, 859, 866, 872, 879, 885, and 1066; VL4 is a fourth immunoglobulin light chain variable region that specifically binds to a SARS-CoV-2 protein and which comprises a LCDR1 comprising an amino acid sequence at least 65%, at least 70%, at least 75%, at least 80%, at least 85%, at least 90%, at least 95%, at least 99%, or 100% identical to any one of SEQ ID NOS: 41, 48, 138, 145, 152, 159, 166, 172, 192, 770, 778, 785, 794, 801, 807, 814, 827, 836, 849, 858, 865, 878, 1045, 1050, 1060, and 1065; a LCDR2 comprising an amino acid sequence at least 65%, at least 70%, at least 75%, at least 80%, at least 85%, at least 90%, at least 95%, at least 99%, or 100% identical to any one of amino acid sequences AAS, GAS, DAS, NNN, SDS, SYN, WAS, and DAT, or at least 65%, at least 70%, at least 75%, at least 80%, at least 85%, at least 90%, at least 95%, at least 99%, or 100% identical to any one of SEQ ID NOs: 1046, 1051, and 1061; and a LCDR3 comprising an amino acid sequence at least 65%, at least 70%, at least 75%, at least 80%, at least 85%, at least 90%, at least 95%, at least 99%, or 100% identical to any one of SEQ ID NOs: 42, 139, 146, 153, 160, 167, 173, 764, 766, 768, 771, 779, 786, 792, 795, 808, 815, 821, 830, 837, 843, 850, 856, 859, 866, 872, 879, 885, and 1066; VH1 is a first immunoglobulin heavy chain variable region that specifically binds to a SARS-CoV-2 protein and which comprises a heavy chain complementary determining region (HCDR) 1 comprising an amino acid sequence at least 65%, at least 70%, at least 75%, at least 80%, at least 85%, at least 90%, at least 95%, at least 99%, or 100% identical to any one of SEQ ID NOs: 44, 133, 141, 148, 155, 162, 175, 773, 781, 788, 797, 803, 810, 817, 823, 832, 839, 845, 852, 861, 868, 874, 881, 1047, 1052, 1062, and 1067; a HCDR2 comprising an amino acid sequence at least 65%, at least 70%, at least 75%, at least 80%, at least 85%, at least 90%, at least 95%, at least 99%, or 100% identical to any one of SEQ ID NOs: 6, 142, 149, 156, 163, 169, 176, 776, 782, 789, 798, 804, 811, 818, 824, 833, 840, 846, 853, 862, 869, 875, 882, 1048, 1053, 1063, and 1068; and a HCDR3 comprising an amino acid sequence at least 65%, at least 70%, at least 75%, at least 80%, at least 85%, at least 90%, at least 95%, at least 99%, or 100% identical to any one of SEQ ID NOs: 46, 143, 150, 157, 164, 170, 177, 765, 767, 769, 774, 783, 790, 793, 799, 805, 812, 819, 825, 834, 841, 847, 854, 857, 863, 870, 876, 883, 886, 1049, 1054, 1064, and 1069; VH2 is a second immunoglobulin heavy chain variable region that specifically binds to a SARS-CoV-2 protein and which comprises a HCDR1 comprising an amino acid sequence at least 65%, at least 70%, at least 75%, at least 80%, at least 85%, at least 90%, at least 95%, at least 99%, or 100% identical to any one of SEQ ID NOs: 44, 133, 141, 148, 155, 162, 175, 773, 781, 788, 797, 803, 810, 817, 823, 832, 839, 845, 852, 861, 868, 874, 881, 1047, 1052, 1062, and 1067; a HCDR2 comprising an amino acid sequence at least 65%, at least 70%, at least 75%, at least 80%, at least 85%, at least 90%, at least 95%, at least 99%, or 100% identical to any one of SEQ ID NOs: 6, 142, 149, 156, 163, 169, 176, 776, 782, 789, 798, 804, 811, 818, 824, 833, 840, 846, 853, 862, 869, 875, 882, 1048, 1053, 1063, and 1068; and a HCDR3 comprising an amino acid sequence at least 65%, at least 70%, at least 75%, at least 80%, at least 85%, at least 90%, at least 95%, at least 99%, or 100% identical to any one of SEQ ID NOs: 46, 143, 150, 157, 164, 170, 177, 765, 767, 769, 774, 783, 790, 793, 799, 805, 812, 819, 825, 834, 841, 847, 854, 857, 863, 870, 876, 883, 886, 1049, 1054, 1064, and 1069; VH3 is a third immunoglobulin heavy chain variable region that specifically binds to a SARS-CoV-2 protein and which comprises a HCDR1 comprising an amino acid sequence at least 65%, at least 70%, at least 75%, at least 80%, at least 85%, at least 90%, at least 95%, at least 99%, or 100% identical to any one of SEQ ID NOs: 44, 133, 141, 148, 155, 162, 175, 773, 781, 788, 797, 803, 810, 817, 823, 832, 839, 845, 852, 861, 868, 874, 881, 1047, 1052, 1062, and 1067; a HCDR2 comprising an amino acid sequence at least 65%, at least 70%, at least 75%, at least 80%, at least 85%, at least 90%, at least 95%, at least 99%, or 100% identical to any one of SEQ ID NOs: 6, 142, 149, 156, 163, 169, 176, 776, 782, 789, 798, 804, 811, 818, 824, 833, 840, 846, 853, 862, 869, 875, 882, 1048, 1053, 1063, and 1068; and a HCDR3 comprising an amino acid sequence at least 65%, at least 70%, at least 75%, at least 80%, at least 85%, at least 90%, at least 95%, at least 99%, or 100% identical to any one of SEQ ID NOs: 46, 143, 150, 157, 164, 170, 177, 765, 767, 769, 774, 783, 790, 793, 799, 805, 812, 819, 825, 834, 841, 847, 854, 857, 863, 870, 876, 883, 886, 1049, 1054, 1064, and 1069; VH4 is a fourth immunoglobulin heavy chain variable region that specifically binds to a SARS-CoV-2 protein and which comprises a HCDR1 comprising an amino acid sequence at least 65%, at least 70%, at least 75%, at least 80%, at least 85%, at least 90%, at least 95%, at least 99%, or 100% identical to any one of SEQ ID NOs: 44, 133, 141, 148, 155, 162, 175, 773, 781, 788, 797, 803, 810, 817, 823, 832, 839, 845, 852, 861, 868, 874, 881, 1047, 1052, 1062, and 1067; a HCDR2 comprising an amino acid sequence at least 65%, at least 70%, at least 75%, at least 80%, at least 85%, at least 90%, at least 95%, at least 99%, or 100% identical to any one of SEQ ID NOs: 6, 142, 149, 156, 163, 169, 176, 776, 782, 789, 798, 804, 811, 818, 824, 833, 840, 846, 853, 862, 869, 875, 882, 1048, 1053, 1063, and 1068; and a HCDR3 comprising an amino acid sequence at least 65%, at least 70%, at least 75%, at least 80%, at least 85%, at least 90%, at least 95%, at least 99%, or 100% identical to any one of SEQ ID NOs: 46, 143, 150, 157, 164, 170, 177, 765, 767, 769, 774, 783, 790, 793, 799, 805, 812, 819, 825, 834, 841, 847, 854, 857, 863, 870, 876, 883, 886, 1049, 1054, 1064, and 1069; Fc is a region comprising an immunoglobulin heavy chain constant region 2 (CH2), an immunoglobulin heavy chain constant region 3 (CH3), and optionally, an immunoglobulin hinge; and L1-L8 are optional amino acid linkers.

[0290] In some aspects, provided herein are antigen binding polypeptide complexes comprising a first polypeptide and a second polypeptide; wherein the first polypeptide has a structure represented by: VL1-L1-VL2-L2-VH2-L3-VH1-L4-Fc; VL1-L1-VH2-L2-VL2-L3-VH1-L4-Fc; VH1-L1-VH2-L2-VL2-37-VL1-L4-Fc; or VH1-L1-VL2-L2-VH2-L3-VL1-L4-Fc; wherein the second polypeptide has a structure represented by: VL3-L5-VL4-L6-VH4-L7-VH3-L8-Fc; VL3-L5-VH4-L6-VL4-L7-VH3-L8-Fc; VH3-L5-VH4-L6-VL4-L7-VL3-L8-Fc; or VH3-L5-VL4-L6-VH4-L7-VL3-L8-Fc; wherein: VL1 is a first immunoglobulin light chain variable region that specifically binds to a severe acute respiratory syndrome coronavirus 2 (SARS-CoV-2) protein comprising an amino acid sequence at least 65%, at least 70%, at least 75%, at least 80%, at least 85%, at least 90%, at least 95%, at least 99%, or 100% identical to any one of SEQ ID NOs: 43, 140, 147, 154, 161, 168, 174, 772, 780, 787, 796, 802, 809, 816, 822, 831, 838, 844, 851, 860, 867, 873, and 880; VL2 is a second immunoglobulin light chain variable region that specifically binds to a SARS-CoV-2 protein comprising an amino acid sequence at least 65%, at least 70%, at least 75%, at least 80%, at least 85%, at least 90%, at least 95%, at least 99%, or 100% identical to any one of SEQ ID NOs: 43, 140, 147, 154, 161, 168, 174, 772, 780, 787, 796, 802, 809, 816, 822, 831, 838, 844, 851, 860, 867, 873, and 880; VL3 is a third immunoglobulin light chain variable region that specifically binds to a SARS-CoV-2 protein comprising an amino acid sequence at least 65%, at least 70%, at least 75%, at least 80%, at least 85%, at least 90%, at least 95%, at least 99%, or 100% identical to any one of SEQ ID NOs: 43, 140, 147, 154, 161, 168, 174, 772, 780, 787, 796, 802, 809, 816, 822, 831, 838, 844, 851, 860, 867, 873, and 880; VL4 is a fourth immunoglobulin light chain variable region that specifically binds to a SARS-CoV-2 protein comprising an amino acid sequence at least 65%, at least 70%, at least 75%, at least 80%, at least 85%, at least 90%, at least 95%, at least 99%, or 100% identical to any one of SEQ ID NOs: 43, 140, 147, 154, 161, 168, 174, 772, 780, 787, 796, 802, 809, 816, 822, 831, 838, 844, 851, 860, 867, 873, and 880; VH1 is a first immunoglobulin heavy chain variable region that specifically binds to a SARS-CoV-2 protein comprising an amino acid sequence at least 65%, at least 70%, at least 75%, at least 80%, at least 85%, at least 90%, at least 95%, at least 99%, or 100% identical to any one of SEQ ID NOs: 144, 151, 158, 165, 171, 178, 775, 777, 784, 791, 800, 806, 813, 820, 826, 835, 842, 848, 855, 864, 871, 877, and 884; VH2 is a second immunoglobulin heavy chain variable region that specifically binds to a SARS-CoV-2 protein comprising an amino acid sequence at least 65%, at least 70%, at least 75%, at least 80%, at least 85%, at least 90%, at least 95%, at least 99%, or 100% identical to any one of SEQ ID NOs: 144, 151, 158, 165, 171, 178, 775, 777, 784, 791, 800, 806, 813, 820, 826, 835, 842, 848, 855, 864, 871, 877, and 884; VH3 is a third immunoglobulin heavy chain variable region that specifically binds to a SARS-CoV-2 protein comprising an amino acid sequence at least 65%, at least 70%, at least 75%, at least 80%, at least 85%, at least 90%, at least 95%, at least 99%, or 100% identical to any one of SEQ ID NOs: 144, 151, 158, 165, 171, 178, 775, 777, 784, 791, 800, 806, 813, 820, 826, 835, 842, 848, 855, 864, 871, 877, and 884; VH4 is a fourth immunoglobulin heavy chain variable region that specifically binds to a SARS-CoV-2 protein comprising an amino acid sequence at least 65%, at least 70%, at least 75%, at least 80%, at least 85%, at least 90%, at least 95%, at least 99%, or 100% identical to any one of SEQ ID NOs: 144, 151, 158, 165, 171, 178, 775, 777, 784, 791, 800, 806, 813, 820, 826, 835, 842, 848, 855, 864, 871, 877, and 884; Fc is a region comprising an immunoglobulin heavy chain constant region 2 (CH2), an immunoglobulin heavy chain constant region 3 (CH3), and optionally, an immunoglobulin hinge; and L1-L8 are optional amino acid linkers.

[0291] In some aspects, the antigen binding polypeptide complexes comprise a first polypeptide and a second polypeptide; wherein the first polypeptide has a structure represented by: VL1-L1-VL2-L2-VH2-L3-VH1-L4-Fc; or VH1-L1-VH2-L2-VL2-L3-VL1-L4-Fc; wherein the second polypeptide has a structure represented by: VL3-L5-VL4-L6-VH4-L7-VH3-L8-Fc; or VH3-L5-VH4-L6-VL4-L7-VL3-L8-Fc; wherein: VL1 is a first immunoglobulin light chain variable region that specifically binds to a severe acute respiratory syndrome coronavirus 2 (SARS-CoV-2) protein and which comprises a light chain complementary determining region (LCDR) 1 comprising an amino acid sequence at least 65%, at least 70%, at least 75%, at least 80%, at least 85%, at least 90%, at least 95%, at least 99%, or 100% identical to any one of SEQ ID NOs: 41, 48, 138, 145, 152, 159, 166, 172, 192, 770, 778, 785, 794, 801, 807, 814, 827, 836, 849, 858, 865, 878, 1045, 1050, 1060, and 1065; a LCDR2 comprising an amino acid sequence at least 65%, at least 70%, at least 75%, at least 80%, at least 85%, at least 90%, at least 95%, at least 99%, or 100% identical to any one of amino acid sequences AAS, GAS, DAS, NNN, SDS, SYN, WAS, and DAT, or at least 65%, at least 70%, at least 75%, at least 80%, at least 85%, at least 90%, at least 95%, at least 99%, or 100% identical to any one of SEQ ID NOs: 1046, 1051, and 1061; and a LCDR3 comprising an amino acid sequence at least 65%, at least 70%, at least 75%, at least 80%, at least 85%, at least 90%, at least 95%, at least 99%, or 100% identical to any one of SEQ ID NOs: 42, 139, 146, 153, 160, 167, 173, 764, 766, 768, 771, 779, 786, 792, 795, 808, 815, 821, 830, 837, 843, 850, 856, 859, 866, 872, 879, 885, and 1066, or VL1 is a first immunoglobulin light chain variable region that specifically binds to a SARS-CoV-2 protein comprising an amino acid sequence at least 65%, at least 70%, at least 75%, at least 80%, at least 85%, at least 90%, at least 95%, at least 99%, or 100% identical to any one of SEQ ID NOs: 43, 140, 147, 154, 161, 168, 174, 772, 780, 787, 796, 802, 809, 816, 822, 831, 838, 844, 851, 860, 867, 873, and 880; VL2 is a second immunoglobulin light chain variable region that specifically binds to a SARS-CoV-2 protein and which comprises a LCDR1 comprising an amino acid sequence at least 65%, at least 70%, at least 75%, at least 80%, at least 85%, at least 90%, at least 95%, at least 99%, or 100% identical to any one of SEQ ID NOs: 41, 48, 138, 145, 152, 159, 166, 172, 192, 770, 778, 785, 794, 801, 807, 814, 827, 836, 849, 858, 865, 878, 1045, 1050, 1060, and 1065; a LCDR2 comprising an amino acid sequence at least 65%, at least 70%, at least 75%, at least 80%, at least 85%, at least 90%, at least 95%, at least 99%, or 100% identical to any one of amino acid sequences AAS, GAS, DAS, NNN, SDS, SYN, WAS, and DAT, or at least 65%, at least 70%, at least 75%, at least 80%, at least 85%, at least 90%, at least 95%, at least 99%, or 100% identical to any one of SEQ ID NOs: 1046, 1051, and 1061; and a LCDR3 comprising an amino acid sequence at least 65%, at least 70%, at least 75%, at least 80%, at least 85%, at least 90%, at least 95%, at least 99%, or 100% identical to any one of SEQ ID NOs: 42, 139, 146, 153, 160, 167, 173, 764, 766, 768, 771, 779, 786, 792, 795, 808, 815, 821, 830, 837, 843, 850, 856, 859, 866, 872, 879, 885, and 1066, or VL2 is a second light chain variable region that specifically binds to a SARS-CoV-2 protein comprising an amino acid sequence at least 65%, at least 70%, at least 75%, at least 80%, at least 85%, at least 90%, at least 95%, at least 99%, or 100% identical to any one of SEQ ID NOs: 43, 140, 147, 154, 161, 168, 174, 772, 780, 787, 796, 802, 809, 816, 822, 831, 838, 844, 851, 860, 867, 873, and 880; VL3 is a third immunoglobulin light chain variable region that specifically binds to a SARS-CoV-2 protein and which comprises a LCDR1 comprising an amino acid sequence at least 65%, at least 70%, at least 75%, at least 80%, at least 85%, at least 90%, at least 95%, at least 99%, or 100% identical to any one of SEQ ID NOS: 41, 48, 138, 145, 152, 159, 166, 172, 192, 770, 778, 785, 794, 801, 807, 814, 827, 836, 849, 858, 865, 878, 1045, 1050, 1060, and 1065; a LCDR2 comprising an amino acid sequence at least 65%, at least 70%, at least 75%, at least 80%, at least 85%, at least 90%, at least 95%, at least 99%, or 100% identical to any one of amino acid sequences AAS, GAS, DAS, NNN, SDS, SYN, WAS, and DAT, or at least 65%, at least 70%, at least 75%, at least 80%, at least 85%, at least 90%, at least 95%, at least 99%, or 100% identical to any one of SEQ ID NOs: 1046, 1051, and 1061; and a LCDR3 comprising an amino acid sequence at least 65%, at least 70%, at least 75%, at least 80%, at least 85%, at least 90%, at least 95%, at least 99%, or 100% identical to any one of SEQ ID NOs: 42, 139, 146, 153, 160, 167, 173, 764, 766, 768, 771, 779, 786, 792, 795, 808, 815, 821, 830, 837, 843, 850, 856, 859, 866, 872, 879, 885, and 1066, or VL3 is a third immunoglobulin light chain variable region that specifically binds to a SARS-CoV-2 protein comprising an amino acid sequence at least 65%, at least 70%, at least 75%, at least 80%, at least 85%, at least 90%, at least 95%, at least 99%, or 100% identical to any one of SEQ ID NOs: 43, 140, 147, 154, 161, 168, 174, 772, 780, 787, 796, 802, 809, 816, 822, 831, 838, 844, 851, 860, 867, 873, and 880; VL4 is a fourth immunoglobulin light chain variable region that specifically binds to a SARS-CoV-2 protein and which comprises a LCDR1 comprising an amino acid sequence at least 65%, at least 70%, at least 75%, at least 80%, at least 85%, at least 90%, at least 95%, at least 99%, or 100% identical to any one of SEQ ID NOs: 41, 48, 138, 145, 152, 159, 166, 172, 192, 770, 778, 785, 794, 801, 807, 814, 827, 836, 849, 858, 865, 878, 1045, 1050, 1060, and 1065; a LCDR2 comprising an amino acid sequence at least 65%, at least 70%, at least 75%, at least 80%, at least 85%, at least 90%, at least 95%, at least 99%, or 100% identical to any one of amino acid sequences AAS, GAS, DAS, NNN, SDS, SYN, WAS, and DAT, or at least 65%, at least 70%, at least 75%, at least 80%, at least 85%, at least 90%, at least 95%, at least 99%, or 100% identical to any one of SEQ ID NOs: 1046, 1051, and 1061; and a LCDR3 comprising an amino acid sequence at least 65%, at least 70%, at least 75%, at least 80%, at least 85%, at least 90%, at least 95%, at least 99%, or 100% identical to any one of SEQ ID NOs: 42, 139, 146, 153, 160, 167, 173, 764, 766, 768, 771, 779, 786, 792, 795, 808, 815, 821, 830, 837, 843, 850, 856, 859, 866, 872, 879, 885, and 1066, or VL4 is a fourth immunoglobulin light chain variable region that specifically binds to a SARS-CoV-2 protein comprising an amino acid sequence at least 65%, at least 70%, at least 75%, at least 80%, at least 85%, at least 90%, at least 95%, at least 99%, or 100% identical to any one of SEQ ID NOs: 43, 140, 147, 154, 161, 168, 174, 772, 780, 787, 796, 802, 809, 816, 822, 831, 838, 844, 851, 860, 867, 873, and 880; VH1 is a first immunoglobulin heavy chain variable region that specifically binds to a SARS-CoV-2 protein and which comprises a heavy chain complementary determining region (HCDR) 1 comprising an amino acid sequence at least 65%, at least 70%, at least 75%, at least 80%, at least 85%, at least 90%, at least 95%, at least 99%, or 100% identical to any one of SEQ ID NOs: 44, 133, 141, 148, 155, 162, 175, 773, 781, 788, 797, 803, 810, 817, 823, 832, 839, 845, 852, 861, 868, 874, 881, 1047, 1052, 1062, and 1067; a HCDR2 comprising an amino acid sequence at least 65%, at least 70%, at least 75%, at least 80%, at least 85%, at least 90%, at least 95%, at least 99%, or 100% identical to any one of SEQ ID NOs: 6, 142, 149, 156, 163, 169, 176, 776, 782, 789, 798, 804, 811, 818, 824, 833, 840, 846, 853, 862, 869, 875, 882, 1048, 1053, 1063, and 1068; and a HCDR3 comprising an amino acid sequence at least 65%, at least 70%, at least 75%, at least 80%, at least 85%, at least 90%, at least 95%, at least 99%, or 100% identical to any one of SEQ ID NOs: 46, 143, 150, 157, 164, 170, 177, 765, 767, 769, 774, 783, 790, 793, 799, 805, 812, 819, 825, 834, 841, 847, 854, 857, 863, 870, 876, 883, 886, 1049, 1054, 1064, and 1069, or VH1 is a first immunoglobulin heavy chain variable region that specifically binds to a SARS-CoV-2 protein comprising an amino acid sequence at least 65%, at least 70%, at least 75%, at least 80%, at least 85%, at least 90%, at least 95%, at least 99%, or 100% identical to any one of SEQ ID NOs: 144, 151, 158, 165, 171, 178, 775, 777, 784, 791, 800, 806, 813, 820, 826, 835, 842, 848, 855, 864, 871, 877, and 884; VH2 is a second immunoglobulin heavy chain variable region that specifically binds to a SARS-CoV-2 protein and which comprises a HCDR1 comprising an amino acid sequence at least 65%, at least 70%, at least 75%, at least 80%, at least 85%, at least 90%, at least 95%, at least 99%, or 100% identical to any one of SEQ ID NOs: 44, 133, 141, 148, 155, 162, 175, 773, 781, 788, 797, 803, 810, 817, 823, 832, 839, 845, 852, 861, 868, 874, 881, 1047, 1052, 1062, and 1067; a HCDR2 comprising an amino acid sequence at least 65%, at least 70%, at least 75%, at least 80%, at least 85%, at least 90%, at least 95%, at least 99%, or 100% identical to any one of SEQ ID NOs: 6, 142, 149, 156, 163, 169, 176, 776, 782, 789, 798, 804, 811, 818, 824, 833, 840, 846, 853, 862, 869, 875, 882, 1048, 1053, 1063, and 1068; and a HCDR3 comprising an amino acid sequence at least 65%, at least 70%, at least 75%, at least 80%, at least 85%, at least 90%, at least 95%, at least 99%, or 100% identical to any one of SEQ ID NOs: 46, 143, 150, 157, 164, 170, 177, 765, 767, 769, 774, 783, 790, 793, 799, 805, 812, 819, 825, 834, 841, 847, 854, 857, 863, 870, 876, 883, 886, 1049, 1054, 1064, and 1069, or VH2 is a second immunoglobulin heavy chain variable region that specifically binds to a SARS-CoV-2 protein comprising an amino acid sequence at least 65%, at least 70%, at least 75%, at least 80%, at least 85%, at least 90%, at least 95%, at least 99%, or 100% identical to any one of SEQ ID NOs: 144, 151, 158, 165, 171, 178, 775, 777, 784, 791, 800, 806, 813, 820, 826, 835, 842, 848, 855, 864, 871, 877, and 884; VH3 is a third immunoglobulin heavy chain variable region that specifically binds to a SARS-CoV-2 protein and which comprises a HCDR1 comprising an amino acid sequence at least 65%, at least 70%, at least 75%, at least 80%, at least 85%, at least 90%, at least 95%, at least 99%, or 100% identical to any one of SEQ ID NOs: 44, 133, 141, 148, 155, 162, 175, 773, 781, 788, 797, 803, 810, 817, 823, 832, 839, 845, 852, 861, 868, 874, 881, 1047, 1052, 1062, and 1067; a HCDR2 comprising an amino acid sequence at least 65%, at least 70%, at least 75%, at least 80%, at least 85%, at least 90%, at least 95%, at least 99%, or 100% identical to any one of SEQ ID NOs: 6, 142, 149, 156, 163, 169, 176, 776, 782, 789, 798, 804, 811, 818, 824, 833, 840, 846, 853, 862, 869, 875, 882, 1048, 1053, 1063, and 1068; and a HCDR3 comprising an amino acid sequence at least 65%, at least 70%, at least 75%, at least 80%, at least 85%, at least 90%, at least 95%, at least 99%, or 100% identical to any one of SEQ ID NOs: 46, 143, 150, 157, 164, 170, 177, 765, 767, 769, 774, 783, 790, 793, 799, 805, 812, 819, 825, 834, 841, 847, 854, 857, 863, 870, 876, 883, 886, 1049, 1054, 1064, and 1069, or VH3 is a third immunoglobulin heavy chain variable region that specifically binds to a SARS-CoV-2 protein comprising an amino acid sequence at least 65%, at least 70%, at least 75%, at least 80%, at least 85%, at least 90%, at least 95%, at least 99%, or 100% identical to any one of SEQ ID NOs: 144, 151, 158, 165, 171, 178, 775, 777, 784, 791, 800, 806, 813, 820, 826, 835, 842, 848, 855, 864, 871, 877, and 884; VH4 is a fourth immunoglobulin heavy chain variable region that specifically binds to a SARS-CoV-2 protein and which comprises a HCDR1 comprising an amino acid sequence at least 65%, at least 70%, at least 75%, at least 80%, at least 85%, at least 90%, at least 95%, at least 99%, or 100% identical to any one of SEQ ID NOs: 44, 133, 141, 148, 155, 162, 175, 773, 781, 788, 797, 803, 810, 817, 823, 832, 839, 845, 852, 861, 868, 874, 881, 1047, 1052, 1062, and 1067; a HCDR2 comprising an amino acid sequence at least 65%, at least 70%, at least 75%, at least 80%, at least 85%, at least 90%, at least 95%, at least 99%, or 100% identical to any one of SEQ ID NOs: 6, 142, 149, 156, 163, 169, 176, 776, 782, 789, 798, 804, 811, 818, 824, 833, 840, 846, 853, 862, 869, 875, 882, 1048, 1053, 1063, and 1068; and a HCDR3 comprising an amino acid sequence at least 65%, at least 70%, at least 75%, at least 80%, at least 85%, at least 90%, at least 95%, at least 99%, or 100% identical to any one of SEQ ID NOs: 46, 143, 150, 157, 164, 170, 177, 765, 767, 769, 774, 783, 790, 793, 799, 805, 812, 819, 825, 834, 841, 847, 854, 857, 863, 870, 876, 883, 886, 1049, 1054, 1064, and 1069, or VH4 is a fourth immunoglobulin heavy chain variable region that specifically binds to a SARS-CoV-2 protein comprising an amino acid sequence at least 65%, at least 70%, at least 75%, at least 80%, at least 85%, at least 90%, at least 95%, at least 99%, or 100% identical to any one of SEQ ID NOs: 144, 151, 158, 165, 171, 178, 775, 777, 784, 791, 800, 806, 813, 820, 826, 835, 842, 848, 855, 864, 871, 877, and 884; Fc is a region comprising an immunoglobulin heavy chain constant region 2 (CH2), an immunoglobulin heavy chain constant region 3 (CH3), and optionally, an immunoglobulin hinge; and L1-L8 are optional amino acid linkers.

[0292] In some aspects, provided herein are antigen binding polypeptide complexes comprising a first polypeptide and a second polypeptide; wherein the first polypeptide has a structure represented by: VL1-L1-VL2-L2-VH2-L3-VH1-L4-CH1-L5-CL-L6-Fc; VL1-L1-VH2-L2-VL2-L3-VH1-L4-CH1-L5-CL-L6-Fc; VH1-L1-VH2-L2-VL2-L3-VL1-L4-CH1-L5-CL-L6-Fc; VH1-L1-VL2-L2-VH2-L3-VL1-L4-CH1-L5-CL-L6-Fc; VL1-L1-VL2-L2-VH2-L3-VH1-L4-CL-L5-CH1-L6-Fc; VL1-L1-VH2-L2-VL2-L3-VH1- L4-CL-L5-CH1-L6-Fc; VH1-L1-VH2-L2-VL2-L3-VL1-L4-CL-L5-CH1-L6-Fc; or VH1-L1-VL2-L2-VH2-L3-VL1-L4-CL-L5-CH1-L6-Fc; wherein the second polypeptide has a structure represented by: VL3-L7-VL4-L8-VH4-L9-VH3-L10-CH1-L11-CL-L12-Fc; VL3-L7-VH4-L8-VL4-L9-VH3-L10-CH1-L11-CL-L12- Fc; VH3-L7-VH4-L8-VL4-L9-VL3-L10-CH1-L11-CL-L12-Fc; VH3-L7-VL4-L8-VH4-L9-VL3-L10-CH1-L11-CL-L12-Fc; VL3-L7-VL4-L8-VH4-L9-VH3-L10-CL-L11-CH1-L12-Fc; VL3-L7-VH4-L8-VL4-L9-VH3-L10-CL-L11-CH1-L12-Fc; VH3-L7-VH4-L8-VL4-L9-VL3-L10-CL-L11-CH1-L12-Fc; or VH3-L7-VL4-L8-VH4-L9-VL3-L10-CL-L11-CH1-L12-Fc; wherein: VL1 is a first immunoglobulin light chain variable region that specifically binds to a severe acute respiratory syndrome coronavirus 2 (SARS-CoV-2) protein and which comprises a light chain complementary determining region (LCDR) 1 comprising an amino acid sequence at least 65%, at least 70%, at least 75%, at least 80%, at least 85%, at least 90%, at least 95%, at least 99%, or 100% identical to any one of SEQ ID NOs: 41, 48, 138, 145, 152, 159, 166, 172, 192, 770, 778, 785, 794, 801, 807, 814, 827, 836, 849, 858, 865, 878, 1045, 1050, 1060, and 1065; a LCDR2 comprising an amino acid sequence at least 65%, at least 70%, at least 75%, at least 80%, at least 85%, at least 90%, at least 95%, at least 99%, or 100% identical to any one of amino acid sequences AAS, GAS, DAS, NNN, SDS, SYN, WAS, and DAT, or at least 65%, at least 70%, at least 75%, at least 80%, at least 85%, at least 90%, at least 95%, at least 99%, or 100% identical to any one of SEQ ID NOs: 1046, 1051, and 1061; and a LCDR3 comprising an amino acid sequence at least 65%, at least 70%, at least 75%, at least 80%, at least 85%, at least 90%, at least 95%, at least 99%, or 100% identical to any one of SEQ ID NOs: 42, 139, 146, 153, 160, 167, 173, 764, 766, 768, 771, 779, 786, 792, 795, 808, 815, 821, 830, 837, 843, 850, 856, 859, 866, 872, 879, 885, and 1066, or VL1 is a first immunoglobulin light chain variable region that specifically binds to a SARS-CoV-2 protein comprising an amino acid sequence at least 65%, at least 70%, at least 75%, at least 80%, at least 85%, at least 90%, at least 95%, at least 99%, or 100% identical to any one of SEQ ID NOs: 43, 140, 147, 154, 161, 168, 174, 772, 780, 787, 796, 802, 809, 816, 822, 831, 838, 844, 851, 860, 867, 873, and 880); VL2 is a second immunoglobulin light chain variable region that specifically binds to a SARS-CoV-2 protein and which comprises a LCDR1 comprising an amino acid sequence at least 65%, at least 70%, at least 75%, at least 80%, at least 85%, at least 90%, at least 95%, at least 99%, or 100% identical to any one of SEQ ID NOs: 41, 48, 138, 145, 152, 159, 166, 172, 192, 770, 778, 785, 794, 801, 807, 814, 827, 836, 849, 858, 865, 878, 1045, 1050, 1060, and 1065; a LCDR2 comprising an amino acid sequence at least 65%, at least 70%, at least 75%, at least 80%, at least 85%, at least 90%, at least 95%, at least 99%, or 100% identical to any one of amino acid sequences AAS, GAS, DAS, NNN, SDS, SYN, WAS, and DAT, or at least 65%, at least 70%, at least 75%, at least 80%, at least 85%, at least 90%, at least 95%, at least 99%, or 100% identical to any one of SEQ ID NOs: 1046, 1051, and 1061; and a LCDR3 comprising an amino acid sequence at least 65%, at least 70%, at least 75%, at least 80%, at least 85%, at least 90%, at least 95%, at least 99%, or 100% identical to any one of SEQ ID NOs: 42, 139, 146, 153, 160, 167, 173, 764, 766, 768, 771, 779, 786, 792, 795, 808, 815, 821, 830, 837, 843, 850, 856, 859, 866, 872, 879, 885, and 1066, or VL2 is a second light chain variable region that specifically binds to a SARS-CoV-2 protein comprising an amino acid sequence at least 65%, at least 70%, at least 75%, at least 80%, at least 85%, at least 90%, at least 95%, at least 99%, or 100% identical to any one of SEQ ID NOs: 43, 140, 147, 154, 161, 168, 174, 772, 780, 787, 796, 802, 809, 816, 822, 831, 838, 844, 851, 860, 867, 873, and 880; VL3 is a third immunoglobulin light chain variable region that specifically binds to a SARS-CoV-2 protein and which comprises a LCDR1 comprising an amino acid sequence at least 65%, at least 70%, at least 75%, at least 80%, at least 85%, at least 90%, at least 95%, at least 99%, or 100% identical to any one of SEQ ID NOs: 41, 48, 138, 145, 152, 159, 166, 172, 192, 770, 778, 785, 794, 801, 807, 814, 827, 836, 849, 858, 865, 878, 1045, 1050, 1060, and 1065; a LCDR2 comprising an amino acid sequence at least 65%, at least 70%, at least 75%, at least 80%, at least 85%, at least 90%, at least 95%, at least 99%, or 100% identical to any one of amino acid sequences AAS, GAS, DAS, NNN, SDS, SYN, WAS, and DAT, or at least 65%, at least 70%, at least 75%, at least 80%, at least 85%, at least 90%, at least 95%, at least 99%, or 100% identical to any one of SEQ ID NOs: 1046, 1051, and 1061; and a LCDR3 comprising an amino acid sequence at least 65%, at least 70%, at least 75%, at least 80%, at least 85%, at least 90%, at least 95%, at least 99%, or 100% identical to any one of SEQ ID NOs: 42, 139, 146, 153, 160, 167, 173, 764, 766, 768, 771, 779, 786, 792, 795, 808, 815, 821, 830, 837, 843, 850, 856, 859, 866, 872, 879, 885, and 1066, or VL3 is a third immunoglobulin light chain variable region that specifically binds to a SARS-CoV-2 protein comprising an amino acid sequence at least 65%, at least 70%, at least 75%, at least 80%, at least 85%, at least 90%, at least 95%, at least 99%, or 100% identical to any one of SEQ ID NOs: 43, 140, 147, 154, 161, 168, 174, 772, 780, 787, 796, 802, 809, 816, 822, 831, 838, 844, 851, 860, 867, 873, and 880; VL4 is a fourth immunoglobulin light chain variable region that specifically binds to a SARS-CoV-2 protein and which comprises a LCDR1 comprising an amino acid sequence at least 65%, at least 70%, at least 75%, at least 80%, at least 85%, at least 90%, at least 95%, at least 99%, or 100% identical to any one of SEQ ID NOs: 41, 48, 138, 145, 152, 159, 166, 172, 192, 770, 778, 785, 794, 801, 807, 814, 827, 836, 849, 858, 865, 878, 1045, 1050, 1060, and 1065; a LCDR2 comprising an amino acid sequence at least 65%, at least 70%, at least 75%, at least 80%, at least 85%, at least 90%, at least 95%, at least 99%, or 100% identical to any one of amino acid sequences AAS, GAS, DAS, NNN, SDS, SYN, WAS, and DAT, or at least 65%, at least 70%, at least 75%, at least 80%, at least 85%, at least 90%, at least 95%, at least 99%, or 100% identical to any one of SEQ ID NOs: 1046, 1051, and 1061; and a LCDR3 comprising an amino acid sequence at least 65%, at least 70%, at least 75%, at least 80%, at least 85%, at least 90%, at least 95%, at least 99%, or 100% identical to any one of SEQ ID NOs: 42, 139, 146, 153, 160, 167, 173, 764, 766, 768, 771, 779, 786, 792, 795, 808, 815, 821, 830, 837, 843, 850, 856, 859, 866, 872, 879, 885, and 1066, or VL4 is a fourth immunoglobulin light chain variable region that specifically binds to a SARS-CoV-2 protein comprising an amino acid sequence at least 65%, at least 70%, at least 75%, at least 80%, at least 85%, at least 90%, at least 95%, at least 99%, or 100% identical to any one of SEQ ID NOs: 43, 140, 147, 154, 161, 168, 174, 772, 780, 787, 796, 802, 809, 816, 822, 831, 838, 844, 851, 860, 867, 873, and 880; VH1 is a first immunoglobulin heavy chain variable region that specifically binds to a SARS-CoV-2 protein and which comprises a heavy chain complementary determining region (HCDR) 1 comprising an amino acid sequence at least 65%, at least 70%, at least 75%, at least 80%, at least 85%, at least 90%, at least 95%, at least 99%, or 100% identical to any one of SEQ ID NOs: 44, 133, 141, 148, 155, 162, 175, 773, 781, 788, 797, 803, 810, 817, 823, 832, 839, 845, 852, 861, 868, 874, 881, 1047, 1052, 1062, and 1067; a HCDR2 comprising an amino acid sequence at least 65%, at least 70%, at least 75%, at least 80%, at least 85%, at least 90%, at least 95%, at least 99%, or 100% identical to any one of SEQ ID NOs: 6, 142, 149, 156, 163, 169, 176, 776, 782, 789, 798, 804, 811, 818, 824, 833, 840, 846, 853, 862, 869, 875, 882, 1048, 1053, 1063, and 1068; and a HCDR3 comprising an amino acid sequence at least 65%, at least 70%, at least 75%, at least 80%, at least 85%, at least 90%, at least 95%, at least 99%, or 100% identical to any one of SEQ ID NOs: 46, 143, 150, 157, 164, 170, 177, 765, 767, 769, 774, 783, 790, 793, 799, 805, 812, 819, 825, 834, 841, 847, 854, 857, 863, 870, 876, 883, 886, 1049, 1054, 1064, and 1069, or VH1 is a first immunoglobulin heavy chain variable region that specifically binds to a SARS-CoV-2 protein comprising an amino acid sequence at least 65%, at least 70%, at least 75%, at least 80%, at least 85%, at least 90%, at least 95%, at least 99%, or 100% identical to any one of SEQ ID NOs: 144, 151, 158, 165, 171, 178, 775, 777, 784, 791, 800, 806, 813, 820, 826, 835, 842, 848, 855, 864, 871, 877, and 884; VH2 is a second immunoglobulin heavy chain variable region that specifically binds to a SARS-CoV-2 protein and which comprises a HCDR1 comprising an amino acid sequence at least 65%, at least 70%, at least 75%, at least 80%, at least 85%, at least 90%, at least 95%, at least 99%, or 100% identical to any one of SEQ ID NOs: 44, 133, 141, 148, 155, 162, 175, 773, 781, 788, 797, 803, 810, 817, 823, 832, 839, 845, 852, 861, 868, 874, 881, 1047, 1052, 1062, and 1067; a HCDR2 comprising an amino acid sequence at least 65%, at least 70%, at least 75%, at least 80%, at least 85%, at least 90%, at least 95%, at least 99%, or 100% identical to any one of SEQ ID NOs: 6, 142, 149, 156, 163, 169, 176, 776, 782, 789, 798, 804, 811, 818, 824, 833, 840, 846, 853, 862, 869, 875, 882, 1048, 1053, 1063, and 1068; and a HCDR3 comprising an amino acid sequence at least 65%, at least 70%, at least 75%, at least 80%, at least 85%, at least 90%, at least 95%, at least 99%, or 100% identical to any one of SEQ ID NOs: 46, 143, 150, 157, 164, 170, 177, 765, 767, 769, 774, 783, 790, 793, 799, 805, 812, 819, 825, 834, 841, 847, 854, 857, 863, 870, 876, 883, 886, 1049, 1054, 1064, and 1069, or VH2 is a second immunoglobulin heavy chain variable region that specifically binds to a SARS-CoV-2 protein comprising an amino acid sequence at least 65%, at least 70%, at least 75%, at least 80%, at least 85%, at least 90%, at least 95%, at least 99%, or 100% identical to any one of SEQ ID NOs: 144, 151, 158, 165, 171, 178, 775, 777, 784, 791, 800, 806, 813, 820, 826, 835, 842, 848, 855, 864, 871, 877, and 884; VH3 is a third immunoglobulin heavy chain variable region that specifically binds to a SARS-CoV-2 protein and which comprises a HCDR1 comprising an amino acid sequence at least 65%, at least 70%, at least 75%, at least 80%, at least 85%, at least 90%, at least 95%, at least 99%, or 100% identical to any one of SEQ ID NOS: 44, 133, 141, 148, 155, 162, 175, 773, 781, 788, 797, 803, 810, 817, 823, 832, 839, 845, 852, 861, 868, 874, 881, 1047, 1052, 1062, and 1067; a HCDR2 comprising an amino acid sequence at least 65%, at least 70%, at least 75%, at least 80%, at least 85%, at least 90%, at least 95%, at least 99%, or 100% identical to any one of SEQ ID NOs: 6, 142, 149, 156, 163, 169, 176, 776, 782, 789, 798, 804, 811, 818, 824, 833, 840, 846, 853, 862, 869, 875, 882, 1048, 1053, 1063, and 1068; and a HCDR3 comprising an amino acid sequence at least 65%, at least 70%, at least 75%, at least 80%, at least 85%, at least 90%, at least 95%, at least 99%, or 100% identical to any one of SEQ ID NOs: 46, 143, 150, 157, 164, 170, 177, 765, 767, 769, 774, 783, 790, 793, 799, 805, 812, 819, 825, 834, 841, 847, 854, 857, 863, 870, 876, 883, 886, 1049, 1054, 1064, and 1069, or VH3 is a third immunoglobulin heavy chain variable region that specifically binds to a SARS-CoV-2 protein comprising an amino acid sequence at least 65%, at least 70%, at least 75%, at least 80%, at least 85%, at least 90%, at least 95%, at least 99%, or 100% identical to any one of SEQ ID NOs: 144, 151, 158, 165, 171, 178, 775, 777, 784, 791, 800, 806, 813, 820, 826, 835, 842, 848, 855, 864, 871, 877, and 884; VH4 is a fourth immunoglobulin heavy chain variable region that specifically binds to a SARS-CoV-2 protein and which comprises a HCDR1 comprising an amino acid sequence at least 65%, at least 70%, at least 75%, at least 80%, at least 85%, at least 90%, at least 95%, at least 99%, or 100% identical to any one of SEQ ID NOs: 44, 133, 141, 148, 155, 162, 175, 773, 781, 788, 797, 803, 810, 817, 823, 832, 839, 845, 852, 861, 868, 874, 881, 1047, 1052, 1062, and 1067; a HCDR2 comprising an amino acid sequence at least 65%, at least 70%, at least 75%, at least 80%, at least 85%, at least 90%, at least 95%, at least 99%, or 100% identical to any one of SEQ ID NOs: 6, 142, 149, 156, 163, 169, 176, 776, 782, 789, 798, 804, 811, 818, 824, 833, 840, 846, 853, 862, 869, 875, 882, 1048, 1053, 1063, and 1068; and a HCDR3 comprising an amino acid sequence at least 65%, at least 70%, at least 75%, at least 80%, at least 85%, at least 90%, at least 95%, at least 99%, or 100% identical to any one of SEQ ID NOs: 46, 143, 150, 157, 164, 170, 177, 765, 767, 769, 774, 783, 790, 793, 799, 805, 812, 819, 825, 834, 841, 847, 854, 857, 863, 870, 876, 883, 886, 1049, 1054, 1064, and 1069, or VH4 is a fourth immunoglobulin heavy chain variable region that specifically binds to a SARS-CoV-2 protein comprising an amino acid sequence at least 65%, at least 70%, at least 75%, at least 80%, at least 85%, at least 90%, at least 95%, at least 99%, or 100% identical to any one of SEQ ID NOs: 144, 151, 158, 165, 171, 178, 775, 777, 784, 791, 800, 806, 813, 820, 826, 835, 842, 848, 855, 864, 871, 877, and 884; CH1 is an immunoglobulin heavy chain constant region 1; CL is an immunoglobulin light chain constant region; Fc is a region comprising an immunoglobulin heavy chain constant region 2 (CH2), an immunoglobulin heavy chain constant region 3 (CH3), and optionally, an immunoglobulin hinge; and L1-L12 are optional amino acid linkers.

[0293] In some aspects, provided herein are antigen binding polypeptide complexes comprising two antigen binding polypeptides wherein at least one antigen binding polypeptide has a structure represented by: VL1-L1-VL2-L2-VH2-L3-VH1-L4-Fc-L5-Fc; VL1-L1-VH2-L2-VL2-L3-VH1-L4-Fc-L5-Fc; VH1-L1-VH2-L2-VL2-L3-VL1-L4-Fc-L5-Fc; or VH1-L1-VL2-L2-VH2-L3-VL1-L4-Fc-L5-Fc; wherein: VL1 is a first immunoglobulin light chain variable region that specifically binds to a severe acute respiratory syndrome coronavirus 2 (SARS-CoV-2) protein and which comprises a light chain complementary determining region (LCDR) 1 comprising an amino acid sequence at least 65%, at least 70%, at least 75%, at least 80%, at least 85%, at least 90%, at least 95%, at least 99%, or 100% identical to any one of SEQ ID NOs: 41, 48, 138, 145, 152, 159, 166, 172, 192, 770, 778, 785, 794, 801, 807, 814, 827, 836, 849, 858, 865, 878, 1045, 1050, 1060, and 1065; a LCDR2 comprising an amino acid sequence at least 65%, at least 70%, at least 75%, at least 80%, at least 85%, at least 90%, at least 95%, at least 99%, or 100% identical to any one of amino acid sequences AAS, GAS, DAS, NNN, SDS, SYN, WAS, and DAT, or at least 65%, at least 70%, at least 75%, at least 80%, at least 85%, at least 90%, at least 95%, at least 99%, or 100% identical to any one of SEQ ID NOs: 1046, 1051, and 1061; and a LCDR3 comprising an amino acid sequence at least 65%, at least 70%, at least 75%, at least 80%, at least 85%, at least 90%, at least 95%, at least 99%, or 100% identical to any one of SEQ ID NOs: 42, 139, 146, 153, 160, 167, 173, 764, 766, 768, 771, 779, 786, 792, 795, 808, 815, 821, 830, 837, 843, 850, 856, 859, 866, 872, 879, 885, and 1066, or VL1 is a first immunoglobulin light chain variable region that specifically binds to a SARS-CoV-2 protein comprising an amino acid sequence at least 65%, at least 70%, at least 75%, at least 80%, at least 85%, at least 90%, at least 95%, at least 99%, or 100% identical to any one of SEQ ID NOs: 43, 140, 147, 154, 161, 168, 174, 772, 780, 787, 796, 802, 809, 816, 822, 831, 838, 844, 851, 860, 867, 873, and 880; VL2 is a second immunoglobulin light chain variable region that specifically binds to a SARS-CoV-2 protein and which comprises a LCDR1 comprising an amino acid sequence at least 65%, at least 70%, at least 75%, at least 80%, at least 85%, at least 90%, at least 95%, at least 99%, or 100% identical to any one of SEQ ID NOS: 41, 48, 138, 145, 152, 159, 166, 172, 192, 770, 778, 785, 794, 801, 807, 814, 827, 836, 849, 858, 865, 878, 1045, 1050, 1060, and 1065; a LCDR2 comprising an amino acid sequence at least 65%, at least 70%, at least 75%, at least 80%, at least 85%, at least 90%, at least 95%, at least 99%, or 100% identical to any one of amino acid sequences AAS, GAS, DAS, NNN, SDS, SYN, WAS, and DAT, or at least 65%, at least 70%, at least 75%, at least 80%, at least 85%, at least 90%, at least 95%, at least 99%, or 100% identical to any one of SEQ ID NOs: 1046, 1051, and 1061; and a LCDR3 comprising an amino acid sequence at least 65%, at least 70%, at least 75%, at least 80%, at least 85%, at least 90%, at least 95%, at least 99%, or 100% identical to any one of SEQ ID NOs: 42, 139, 146, 153, 160, 167, 173, 764, 766, 768, 771, 779, 786, 792, 795, 808, 815, 821, 830, 837, 843, 850, 856, 859, 866, 872, 879, 885, and 1066, or VL2 is a second immunoglobulin light chain variable region that specifically binds a SARS-CoV-2 protein comprising an amino acid sequence at least 65%, at least 70%, at least 75%, at least 80%, at least 85%, at least 90%, at least 95%, at least 99%, or 100% identical to any one of SEQ ID NOs: 43, 140, 147, 154, 161, 168, 174, 772, 780, 787, 796, 802, 809, 816, 822, 831, 838, 844, 851, 860, 867, 873, and 880; VH1 is a first immunoglobulin heavy chain variable region that specifically binds to a SARS-CoV-2 protein and which comprises a heavy chain complementary determining region (HCDR) 1 comprising an amino acid sequence at least 65%, at least 70%, at least 75%, at least 80%, at least 85%, at least 90%, at least 95%, at least 99%, or 100% identical to any one of SEQ ID NOs: 44, 133, 141, 148, 155, 162, 175, 773, 781, 788, 797, 803, 810, 817, 823, 832, 839, 845, 852, 861, 868, 874, 881, 1047, 1052, 1062, and 1067; a HCDR2 comprising an amino acid sequence at least 65%, at least 70%, at least 75%, at least 80%, at least 85%, at least 90%, at least 95%, at least 99%, or 100% identical to any one of SEQ ID NOs: 6, 142, 149, 156, 163, 169, 176, 776, 782, 789, 798, 804, 811, 818, 824, 833, 840, 846, 853, 862, 869, 875, 882, 1048, 1053, 1063, and 1068; and a HCDR3 comprising an amino acid sequence at least 65%, at least 70%, at least 75%, at least 80%, at least 85%, at least 90%, at least 95%, at least 99%, or 100% identical to any one of SEQ ID NOs: 46, 143, 150, 157, 164, 170, 177, 765, 767, 769, 774, 783, 790, 793, 799, 805, 812, 819, 825, 834, 841, 847, 854, 857, 863, 870, 876, 883, 886, 1049, 1054, 1064, and 1069, or VH1 is a first immunoglobulin heavy chain variable region that specifically binds to a SARS-CoV-2 protein comprising an amino acid sequence at least 65%, at least 70%, at least 75%, at least 80%, at least 85%, at least 90%, at least 95%, at least 99%, or 100% identical to any one of SEQ ID NOs: 144, 151, 158, 165, 171, 178, 775, 777, 784, 791, 800, 806, 813, 820, 826, 835, 842, 848, 855, 864, 871, 877, and 884; VH2 is a second immunoglobulin heavy chain variable region that specifically binds to a SARS-CoV-2 protein and which comprises a HCDR1 comprising an amino acid sequence at least 65%, at least 70%, at least 75%, at least 80%, at least 85%, at least 90%, at least 95%, at least 99%, or 100% identical to any one of SEQ ID NOs: 44, 133, 141, 148, 155, 162, 175, 773, 781, 788, 797, 803, 810, 817, 823, 832, 839, 845, 852, 861, 868, 874, 881, 1047, 1052, 1062, and 1067; a HCDR2 comprising an amino acid sequence at least 65%, at least 70%, at least 75%, at least 80%, at least 85%, at least 90%, at least 95%, at least 99%, or 100% identical to any one of SEQ ID NOs: 6, 142, 149, 156, 163, 169, 176, 776, 782, 789, 798, 804, 811, 818, 824, 833, 840, 846, 853, 862, 869, 875, 882, 1048, 1053, 1063, and 1068; and a HCDR3 comprising an amino acid sequence at least 65%, at least 70%, at least 75%, at least 80%, at least 85%, at least 90%, at least 95%, at least 99%, or 100% identical to any one of SEQ ID NOs: 46, 143, 150, 157, 164, 170, 177, 765, 767, 769, 774, 783, 790, 793, 799, 805, 812, 819, 825, 834, 841, 847, 854, 857, 863, 870, 876, 883, 886, 1049, 1054, 1064, and 1069, or VH2 is a second immunoglobulin heavy chain variable region that specifically binds to a SARS-CoV-2 protein comprising an amino acid sequence at least 65%, at least 70%, at least 75%, at least 80%, at least 85%, at least 90%, at least 95%, at least 99%, or 100% identical to any one of SEQ ID NOs: 144, 151, 158, 165, 171, 178, 775, 777, 784, 791, 800, 806, 813, 820, 826, 835, 842, 848, 855, 864, 871, 877, and 884; Fc is a region comprising an immunoglobulin heavy chain constant region 2 (CH2), an immunoglobulin heavy chain constant region 3 (CH3), and optionally, an immunoglobulin hinge; and L1-L5 are optional amino acid linkers.

[0294] In some aspects, the antigen binding polypeptides or antigen binding polypeptide complexes comprise a polypeptide having a structure represented by: VL1-L1-VL2-L2-VH2-L3-VH1-L4-Fc-L5-Fc; or VH1-L1-VH2-L2-VL2-L3-VL1-L4-Fc-L5-Fc; wherein: VL1 is a first immunoglobulin light chain variable region that specifically binds to a severe acute respiratory syndrome coronavirus 2 (SARS-CoV-2) protein and which comprises a light chain complementary determining region (LCDR) 1 comprising an amino acid sequence at least 65%, at least 70%, at least 75%, at least 80%, at least 85%, at least 90%, at least 95%, at least 99%, or 100% identical to any one of SEQ ID NOs: 41, 48, 138, 145, 152, 159, 166, 172, 192, 770, 778, 785, 794, 801, 807, 814, 827, 836, 849, 858, 865, 878, 1045, 1050, 1060, and 1065; a LCDR2 comprising an amino acid sequence at least 65%, at least 70%, at least 75%, at least 80%, at least 85%, at least 90%, at least 95%, at least 99%, or 100% identical to any one of amino acid sequences AAS, GAS, DAS, NNN, SDS, SYN, WAS, and DAT, or at least 65%, at least 70%, at least 75%, at least 80%, at least 85%, at least 90%, at least 95%, at least 99%, or 100% identical to any one of SEQ ID NOs: 1046, 1051, and 1061; and a LCDR3 comprising an amino acid sequence at least 65%, at least 70%, at least 75%, at least 80%, at least 85%, at least 90%, at least 95%, at least 99%, or 100% identical to any one of SEQ ID NOs: 42, 139, 146, 153, 160, 167, 173, 764, 766, 768, 771, 779, 786, 792, 795, 808, 815, 821, 830, 837, 843, 850, 856, 859, 866, 872, 879, 885, and 1066, or VL1 is a first immunoglobulin light chain variable region that specifically binds to a SARS-CoV-2 protein comprising an amino acid sequence at least 65%, at least 70%, at least 75%, at least 80%, at least 85%, at least 90%, at least 95%, at least 99%, or 100% identical to any one of SEQ ID NOs: 43, 140, 147, 154, 161, 168, 174, 772, 780, 787, 796, 802, 809, 816, 822, 831, 838, 844, 851, 860, 867, 873, and 880; VL2 is a second immunoglobulin light chain variable region that specifically binds to a SARS-CoV-2 protein and which comprises a LCDR1 comprising an amino acid sequence at least 65%, at least 70%, at least 75%, at least 80%, at least 85%, at least 90%, at least 95%, at least 99%, or 100% identical to any one of SEQ ID NOs: 41, 48, 138, 145, 152, 159, 166, 172, 192, 770, 778, 785, 794, 801, 807, 814, 827, 836, 849, 858, 865, 878, 1045, 1050, 1060, and 1065; a LCDR2 comprising an amino acid sequence at least 65%, at least 70%, at least 75%, at least 80%, at least 85%, at least 90%, at least 95%, at least 99%, or 100% identical to any one of amino acid sequences AAS, GAS, DAS, NNN, SDS, SYN, WAS, and DAT, or at least 65%, at least 70%, at least 75%, at least 80%, at least 85%, at least 90%, at least 95%, at least 99%, or 100% identical to any one of SEQ ID NOs: 1046, 1051, and 1061; and a LCDR3 comprising an amino acid sequence at least 65%, at least 70%, at least 75%, at least 80%, at least 85%, at least 90%, at least 95%, at least 99%, or 100% identical to any one of SEQ ID NOs: 42, 139, 146, 153, 160, 167, 173, 764, 766, 768, 771, 779, 786, 792, 795, 808, 815, 821, 830, 837, 843, 850, 856, 859, 866, 872, 879, 885, and 1066, or VL2 is a second immunoglobulin light chain variable region that specifically binds a SARS-CoV-2 protein comprising an amino acid sequence at least 65%, at least 70%, at least 75%, at least 80%, at least 85%, at least 90%, at least 95%, at least 99%, or 100% identical to any one of SEQ ID NOs: 43, 140, 147, 154, 161, 168, 174, 772, 780, 787, 796, 802, 809, 816, 822, 831, 838, 844, 851, 860, 867, 873, and 880; VH1 is a first immunoglobulin heavy chain variable region that specifically binds to a SARS-CoV-2 protein and which comprises a heavy chain complementary determining region (HCDR) 1 comprising an amino acid sequence at least 65%, at least 70%, at least 75%, at least 80%, at least 85%, at least 90%, at least 95%, at least 99%, or 100% identical to any one of SEQ ID NOs: 44, 133, 141, 148, 155, 162, 175, 773, 781, 788, 797, 803, 810, 817, 823, 832, 839, 845, 852, 861, 868, 874, 881, 1047, 1052, 1062, and 1067; a HCDR2 comprising an amino acid sequence at least 65%, at least 70%, at least 75%, at least 80%, at least 85%, at least 90%, at least 95%, at least 99%, or 100% identical to any one of SEQ ID NOs: 6, 142, 149, 156, 163, 169, 176, 776, 782, 789, 798, 804, 811, 818, 824, 833, 840, 846, 853, 862, 869, 875, 882, 1048, 1053, 1063, and 1068; and a HCDR3 comprising an amino acid sequence at least 65%, at least 70%, at least 75%, at least 80%, at least 85%, at least 90%, at least 95%, at least 99%, or 100% identical to any one of SEQ ID NOs: 46, 143, 150, 157, 164, 170, 177, 765, 767, 769, 774, 783, 790, 793, 799, 805, 812, 819, 825, 834, 841, 847, 854, 857, 863, 870, 876, 883, 886, 1049, 1054, 1064, and 1069, or VH1 is a first immunoglobulin heavy chain variable region that specifically binds to a SARS-CoV-2 protein comprising an amino acid sequence at least 65%, at least 70%, at least 75%, at least 80%, at least 85%, at least 90%, at least 95%, at least 99%, or 100% identical to any one of SEQ ID NOs: 144, 151, 158, 165, 171, 178, 775, 777, 784, 791, 800, 806, 813, 820, 826, 835, 842, 848, 855, 864, 871, 877, and 884; VH2 is a second immunoglobulin heavy chain variable region that specifically binds to a SARS-CoV-2 protein and which comprises a HCDR1 comprising an amino acid sequence at least 65%, at least 70%, at least 75%, at least 80%, at least 85%, at least 90%, at least 95%, at least 99%, or 100% identical to any one of SEQ ID NOs: 44, 133, 141, 148, 155, 162, 175, 773, 781, 788, 797, 803, 810, 817, 823, 832, 839, 845, 852, 861, 868, 874, 881, 1047, 1052, 1062, and 1067; a HCDR2 comprising an amino acid sequence at least 65%, at least 70%, at least 75%, at least 80%, at least 85%, at least 90%, at least 95%, at least 99%, or 100% identical to any one of SEQ ID NOs: 6, 142, 149, 156, 163, 169, 176, 776, 782, 789, 798, 804, 811, 818, 824, 833, 840, 846, 853, 862, 869, 875, 882, 1048, 1053, 1063, and 1068; and a HCDR3 comprising an amino acid sequence at least 65%, at least 70%, at least 75%, at least 80%, at least 85%, at least 90%, at least 95%, at least 99%, or 100% identical to any one of SEQ ID NOs: 46, 143, 150, 157, 164, 170, 177, 765, 767, 769, 774, 783, 790, 793, 799, 805, 812, 819, 825, 834, 841, 847, 854, 857, 863, 870, 876, 883, 886, 1049, 1054, 1064, and 1069, or VH2 is a second immunoglobulin heavy chain variable region that specifically binds to a SARS-CoV-2 protein comprising an amino acid sequence at least 65%, at least 70%, at least 75%, at least 80%, at least 85%, at least 90%, at least 95%, at least 99%, or 100% identical to any one of SEQ ID NOs: 144, 151, 158, 165, 171, 178, 775, 777, 784, 791, 800, 806, 813, 820, 826, 835, 842, 848, 855, 864, 871, 877, and 884; Fc is a region comprising an immunoglobulin heavy chain constant region 2 (CH2), an immunoglobulin heavy chain constant region 3 (CH3), and optionally, an immunoglobulin hinge; and L1-L5 are optional amino acid linkers.

[0295] In some aspects, any one of the optional linkers comprised in the antigen binding polypeptide complexes disclosed herein each independently have a length of from 0 amino acids to about 50 amino acids. In some aspects, any one of the optional linkers not having a length of 0 amino acids each independently comprise an amino acid sequence of G or A, or an amino acid sequence at least 65%, at least 70%, at least 75%, at least 80%, at least 85%, at least 90%, at least 95%, at least 99%, or 100% identical to amino acid sequence GSS or ASG, or an amino acid sequence at least 65%, at least 70%, at least 75%, at least 80%, at least 85%, at least 90%, at least 95%, at least 99%, or 100% identical to any one of SEQ ID NOs: 333-373 or 967-971. In some aspects, Ln comprises an amino acid sequence at least 65%, at least 70%, at least 75%, at least 80%, at least 85%, at least 90%, at least 95%, at least 99%, or 100% identical to any one of SEQ ID NOs: 333-345 or 967-971.

[0296] In some aspects, the antigen binding polypeptide complexes disclosed herein further comprise an Fc region, wherein the Fc region comprises at least one knob-into-hole modification or Fc effector function knockout mutation. In some aspects, the antigen binding polypeptide complexes disclosed herein are IgG1 or IgG4 antibodies, or antigen binding fragments thereof, and the knob-into-hole modification comprises: (i) knob substitutions of S354C and T366W; (ii) hole substitutions of Y349C, T366S, L368A and Y407V; or (iii) a combination thereof; or equivalent thereof, based on the EU numbering scheme. In some aspects, the antigen binding polypeptide complexes disclosed herein are IgG1 or IgG4 antibodies, or an antigen binding fragments thereof, and the Fc effector function knockout mutation is L234A, L235A, P239A, or equivalent thereof, or a combination thereof, based on the EU numbering scheme.

[0297] In some aspects, the antigen binding polypeptide complexes disclosed herein specifically bind to a SARS-CoV-2 protein with an equilibrium dissociation constant (K_{D})) of from about 10 μM to about 1 pM. In some aspects, the antigen binding polypeptide complexes disclosed herein are bispecific, trispecific or tetraspecific and have greater neutralization potency against SARS-CoV-2 virus than a monospecific antigen binding polypeptide complex that specifically binds to one of the same antigens as the bispecific, trispecific or tetraspecific antigen binding polypeptide complex.

[0298] In some aspects, the antigen binding polypeptide complexes disclosed herein are bispecific, trispecific or tetraspecific and have greater neutralization potency against SARS-CoV-2 virus than a mixture of monospecific antigen binding polypeptide complexes that specifically bind to the same antigens as the bispecific, trispecific or tetraspecific antigen binding polypeptide complex.

[0299] In some aspects, the SARS-CoV-2 virus is the original Wuhan strain (WA1), a D614G spike protein mutant (e.g., D614G), an Alpha variant (e.g., B.1.1.7), a Beta variant (e.g., B.1.351), a Gamma variant (e.g., P.1), a Delta variant (e.g., B.1.617.2 or AY.1), a Kappa variant (e.g., B.1.617.1), an Iota variant (e.g., B.1.526), a Lambda variant (e.g., C.37), an Epsilon variant (e.g., B.1.429. B.1.427, or CAL.20C), a Mu variant (e.g., B.1.621), a Theta variant (e.g., P.3), a Zeta variant (e.g., P.2), an Eta variant (e.g., B.1.525), a R.1 variant, a C.1.2 variant, or an Omicron variant (e.g., B.1.1.529, BA.1, BA.2, BA.2.12.1, BA.4, BA.4/5, BA.5, BQ.1, BQ.1.1, BA.2.75, BA.2.75.2, BA.4.6, BQ.1.1, BJ.1, XBB, XBB1.5, BF.7, CH.1.1. BA.2.86, EG.5, JN.1, JD.1, EG.5.1, FL.1.5.1. HK.3, HV.1, JD.1.1, JF.1, XBB.1, XBB.1.16. XBB.1.16.6, or XBB.2.3.2), or a combination or variant thereof. In some aspects, the SARS-CoV-2 virus is JN.1.13.1, KP.2, JN.1.16, JN.1.16.1, JN.1.13, JN.1.18, KP.2.3, LB.1, KP.3, KP.3.1.1, or a combination or variant thereof.

[0300] In some aspects, provided herein are anti-SARS-CoV-2 antibodies, or antigen binding fragments thereof, comprising one or more antigen binding polypeptides or antigen binding polypeptide complexes disclosed herein, wherein the anti-SARS-CoV-2 antibody or antigen binding fragment thereof exhibits improved prevention of immune escape compared to (i) a monovalent anti-SARS-CoV-2 antibody or an antigen binding fragment thereof that binds to one of the same antigens as the anti-SARS-CoV-2 antibody or antigen binding fragment thereof, and/or (ii) a combination of monovalent anti-SARS-CoV-2 antibodies or antigen binding fragments thereof that binds to the same antigens as the anti-SARS-CoV-2 antibody or antigen binding fragment thereof.

[0301] In some aspects, provided herein are pharmaceutical compositions comprising an antigen binding polypeptide complex or an anti-SARS-CoV-2 antibody or antigen binding fragment thereof disclosed herein and a pharmaceutically acceptable carrier.

[0302] In some aspects, provided herein are kits comprising an antigen binding polypeptide complex, an anti-SARS-CoV-2 antibody or antigen binding fragment thereof, or a pharmaceutical composition disclosed herein.

[0303] In some aspects, provided herein are methods of preventing or treating a SARS-CoV-2 viral infection in a subject in need thereof, comprising administering to the subject a therapeutically effective amount of an antigen binding polypeptide complex, an anti-SARS-CoV-2 antibody or antigen binding fragment thereof, or a pharmaceutical composition disclosed herein.

[0304] In some aspects, provided herein are methods of preventing or treating coronavirus disease 2019 (COVID-19) in a subject in need thereof, comprising administering to the subject a therapeutically effective amount of an antigen binding polypeptide complex, an anti-SARS-CoV-2 antibody or antigen binding fragment thereof, or a pharmaceutical composition disclosed herein.

[0305] In some aspects, provided herein are methods of diagnosing a subject as being infected with a SARS-CoV-2 virus or suspected of being infected with a SARS-CoV-2 virus, comprising (i) contacting a sample obtained from the subject with an antigen binding polypeptide complex or with an anti-SARS-CoV-2 antibody or antigen binding fragment thereof disclosed herein; (ii) detecting the presence or absence of a virus complex which contains the polypeptide complex or a fragment thereof, or the antibody or a fragment thereof, and a SARS-CoV-2 virus, virion or fragment thereof; and (iii) diagnosing the subject as being infected with a SARS-CoV-2 virus or suspected of being infected with a SARS-CoV-2 virus when the presence of the virus complex is detected.

[0306] In some aspects, provided herein are methods of diagnosing a subject as not being infected with a SARS-CoV-2 virus or not suspected of being infected with a SARS-CoV-2 virus, comprising (i) contacting a sample obtained from the subject with an antigen binding polypeptide complex or with an anti-SARS-CoV-2 antibody or antigen binding fragment thereof disclosed herein; (ii) detecting the presence or absence of a virus complex which contains the polypeptide complex or a fragment thereof, or the antibody or a fragment thereof and a SARS-CoV-2 virus, virion or fragment thereof; and (iii) diagnosing the subject as not being infected with a SARS-CoV-2 virus or not suspected of being infected with a SARS-CoV-2 virus when the presence of the virus complex is not detected.

[0307] In some aspects, provided herein are methods of preventing immune escape of a SARS-CoV-2 virus in a subject infected with the SARS-CoV-2 virus, comprising administering to the subject an effective amount of an antigen binding polypeptide complex or anti-SARS-CoV-2 antibody or antigen binding fragment thereof disclosed herein that exhibits improved prevention of immune escape compared to (i) a monovalent anti-SARS-CoV-2 antibody or antigen binding fragment thereof that binds to one of the same antigens as the polypeptide complex or anti-SARS-CoV-2 antibody or antigen binding fragment thereof, and/or (ii) a combination of monovalent anti-SARS-CoV-2 antibodies or antigen binding fragments thereof that binds to the same antigens as the polypeptide complex or anti-SARS-CoV-2 antibody or antigen binding fragment thereof.

[0308] In some aspects, provided herein are methods of increasing neutralization potency against a SARS-CoV-2 virus in a subject infected with the SARS-CoV-2 virus, comprising administering to the subject an effective amount of an antigen binding polypeptide complex or anti-SARS-CoV-2 antibody or antigen binding fragment thereof disclosed herein that exhibits increased neutralization potency compared to (i) a monovalent anti-SARS-CoV-2 antibody or antigen binding fragment thereof that binds to one of the same antigens as the polypeptide complex or anti-SARS-CoV-2 antibody or antigen binding fragment thereof and/or (ii) a combination of monovalent anti-SARS-CoV-2 antibodies or antigen binding fragments thereof that binds to the same antigens as the polypeptide complex or anti-SARS-CoV-2 antibody or antigen binding fragment thereof.

[0309] In some aspects, provided herein are an antigen binding polypeptide complex or antibody or antigen binding fragment thereof comprising: (a) an antigen binding polypeptide having a structure represented by: VL1-L1-VH1 or VH1-L1-VL1; wherein: VL1 is a first immunoglobulin light chain variable region that specifically binds to a severe acute respiratory syndrome coronavirus 2 (SARS-CoV-2) protein; VH1 is a first immunoglobulin heavy chain variable region that specifically binds to a SARS-CoV-2 protein; and L1 and L2 are optional amino acid linkers; or an antigen binding polypeptide having a structure represented by: VL1-L1-VL2-L2-VH2-L3-VH1; VL1-L1-VH2-L2-VL2-L3-VH1; VH1-L1-VH2-L2-VL2-L3-VL1; or VH1-L1-VL2-L2-VH2-L3-VL1; wherein: VL1 is a first immunoglobulin light chain variable region that specifically binds to a SARS-CoV-2 protein and which comprises a light chain complementary determining region (LCDR) 1 comprising an amino acid sequence at least 65%, at least 70%, at least 75%, at least 80%, at least 85%, at least 90%, at least 95%, at least 99%, or 100% identical to any one of SEQ ID NOs: 41, 48, 138, 145, 152, 159, 166, 172, 192, 770, 778, 785, 794, 801, 807, 814, 827, 836, 849, 858, 865, 878, 1045, 1050, 1060, and 1065; a LCDR2 comprising an amino acid sequence at least 65%, at least 70%, at least 75%, at least 80%, at least 85%, at least 90%, at least 95%, at least 99%, or 100% identical to any one of amino acid sequences AAS, GAS, DAS, NNN, SDS, SYN, WAS, and DAT, or at least 65%, at least 70%, at least 75%, at least 80%, at least 85%, at least 90%, at least 95%, at least 99%, or 100% identical to any one of SEQ ID NOs: 1046, 1051, and 1061; and a LCDR3 comprising an amino acid sequence at least 65%, at least 70%, at least 75%, at least 80%, at least 85%, at least 90%, at least 95%, at least 99%, or 100% identical to any one of SEQ ID NOs: 42, 139, 146, 153, 160, 167, 173, 764, 766, 768, 771, 779, 786, 792, 795, 808, 815, 821, 830, 837, 843, 850, 856, 859, 866, 872, 879, 885, and 1066, or VL1 is a first immunoglobulin light chain variable region that specifically binds to a SARS-CoV-2 protein comprising an amino acid sequence at least 65%, at least 70%, at least 75%, at least 80%, at least 85%, at least 90%, at least 95%, at least 99%, or 100% identical to any one of SEQ ID NOs: 43, 140, 147, 154, 161, 168, 174, 772, 780, 787, 796, 802, 809, 816, 822, 831, 838, 844, 851, 860, 867, 873, and 880; VL2 is a second immunoglobulin light chain variable region that specifically binds to a SARS-CoV-2 protein and which comprises a LCDR1 comprising an amino acid sequence at least 65%, at least 70%, at least 75%, at least 80%, at least 85%, at least 90%, at least 95%, at least 99%, or 100% identical to any one of SEQ ID NOs: 41, 48, 138, 145, 152, 159, 166, 172, 192, 770, 778, 785, 794, 801, 807, 814, 827, 836, 849, 858, 865, 878, 1045, 1050, 1060, and 1065; a LCDR2 comprising an amino acid sequence at least 65%, at least 70%, at least 75%, at least 80%, at least 85%, at least 90%, at least 95%, at least 99%, or 100% identical to any one of amino acid sequences AAS, GAS, DAS, NNN, SDS, SYN, WAS, and DAT, or at least 65%, at least 70%, at least 75%, at least 80%, at least 85%, at least 90%, at least 95%, at least 99%, or 100% identical to any one of SEQ ID NOs: 1046, 1051, and 1061; and a LCDR3 comprising an amino acid sequence at least 65%, at least 70%, at least 75%, at least 80%, at least 85%, at least 90%, at least 95%, at least 99%, or 100% identical to any one of SEQ ID NOs: 42, 139, 146, 153, 160, 167, 173, 764, 766, 768, 771, 779, 786, 792, 795, 808, 815, 821, 830, 837, 843, 850, 856, 859, 866, 872, 879, 885, and 1066, or VL2 is a second immunoglobulin light chain variable region that specifically binds a SARS-CoV-2 protein comprising an amino acid sequence at least 65%, at least 70%, at least 75%, at least 80%, at least 85%, at least 90%, at least 95%, at least 99%, or 100% identical to any one of SEQ ID NOs: 43, 140, 147, 154, 161, 168, 174, 772, 780, 787, 796, 802, 809, 816, 822, 831, 838, 844, 851, 860, 867, 873, and 880; VH1 is a first immunoglobulin heavy chain variable region that specifically binds to a SARS-CoV-2 protein and which comprises a heavy chain complementary determining region (HCDR) 1 comprising an amino acid sequence at least 65%, at least 70%, at least 75%, at least 80%, at least 85%, at least 90%, at least 95%, at least 99%, or 100% identical to any one of SEQ ID NOs: 44, 133, 141, 148, 155, 162, 175, 773, 781, 788, 797, 803, 810, 817, 823, 832, 839, 845, 852, 861, 868, 874, 881, 1047, 1052, 1062, and 1067; a HCDR2 comprising an amino acid sequence at least 65%, at least 70%, at least 75%, at least 80%, at least 85%, at least 90%, at least 95%, at least 99%, or 100% identical to any one of SEQ ID NOs: 6, 142, 149, 156, 163, 169, 176, 776, 782, 789, 798, 804, 811, 818, 824, 833, 840, 846, 853, 862, 869, 875, 882, 1048, 1053, 1063, and 1068; and a HCDR3 comprising an amino acid sequence at least 65%, at least 70%, at least 75%, at least 80%, at least 85%, at least 90%, at least 95%, at least 99%, or 100% identical to any one of SEQ ID NOs: 46, 143, 150, 157, 164, 170, 177, 765, 767, 769, 774, 783, 790, 793, 799, 805, 812, 819, 825, 834, 841, 847, 854, 857, 863, 870, 876, 883, 886, 1049, 1054, 1064, and 1069, or VH1 is a first immunoglobulin heavy chain variable region that specifically binds to a SARS-CoV-2 protein comprising an amino acid sequence at least 65%, at least 70%, at least 75%, at least 80%, at least 85%, at least 90%, at least 95%, at least 99%, or 100% identical to any one of SEQ ID NOs: 144, 151, 158, 165, 171, 178, 775, 777, 784, 791, 800, 806, 813, 820, 826, 835, 842, 848, 855, 864, 871, 877, and 884; VH2 is a second immunoglobulin heavy chain variable region that specifically binds to a SARS-CoV-2 protein and which comprises a HCDR1 comprising an amino acid sequence at least 65%, at least 70%, at least 75%, at least 80%, at least 85%, at least 90%, at least 95%, at least 99%, or 100% identical to any one of SEQ ID NOs: 44, 133, 141, 148, 155, 162, 175, 773, 781, 788, 797, 803, 810, 817, 823, 832, 839, 845, 852, 861, 868, 874, 881, 1047, 1052, 1062, and 1067; a HCDR2 comprising an amino acid sequence at least 65%, at least 70%, at least 75%, at least 80%, at least 85%, at least 90%, at least 95%, at least 99%, or 100% identical to any one of SEQ ID NOs: 6, 142, 149, 156, 163, 169, 176, 776, 782, 789, 798, 804, 811, 818, 824, 833, 840, 846, 853, 862, 869, 875, 882, 1048, 1053, 1063, and 1068; and a HCDR3 comprising an amino acid sequence at least 65%, at least 70%, at least 75%, at least 80%, at least 85%, at least 90%, at least 95%, at least 99%, or 100% identical to any one of SEQ ID NOs: 46, 143, 150, 157, 164, 170, 177, 765, 767, 769, 774, 783, 790, 793, 799, 805, 812, 819, 825, 834, 841, 847, 854, 857, 863, 870, 876, 883, 886, 1049, 1054, 1064, and 1069, or VH2 is a second immunoglobulin heavy chain variable region that specifically binds to a SARS-CoV-2 protein comprising an amino acid sequence at least 65%, at least 70%, at least 75%, at least 80%, at least 85%, at least 90%, at least 95%, at least 99%, or 100% identical to any one of SEQ ID NOs: 144, 151, 158, 165, 171, 178, 775, 777, 784, 791, 800, 806, 813, 820, 826, 835, 842, 848, 855, 864, 871, 877, and 884; and L1-L3 are optional amino acid linkers; and wherein (a) is selected from any one of the more specific aspects provided herein for an antigen binding polypeptide in an antigen binding polypeptide complex having no more than three polypeptide chains; (b) an antigen binding polypeptide having a structure represented by: VL1-L1-VH1 or VH1-L1-VL1; wherein: VL1 is a first immunoglobulin light chain variable region that specifically binds to a SARS-CoV-2 protein and which comprises a light chain complementary determining region (LCDR) 1 comprising an amino acid sequence at least 65%, at least 70%, at least 75%, at least 80%, at least 85%, at least 90%, at least 95%, at least 99%, or 100% identical to any one of SEQ ID NOs: 41, 48, 138, 145, 152, 159, 166, 172, 192, 770, 778, 785, 794, 801, 807, 814, 827, 836, 849, 858, 865, 878, 1045, 1050, 1060, and 1065; a LCDR2 comprising an amino acid sequence at least 65%, at least 70%, at least 75%, at least 80%, at least 85%, at least 90%, at least 95%, at least 99%, or 100% identical to any one of amino acid sequences AAS, GAS, DAS, NNN, SDS, SYN, WAS, and DAT, or at least 65%, at least 70%, at least 75%, at least 80%, at least 85%, at least 90%, at least 95%, at least 99%, or 100% identical to any one of SEQ ID NOs: 1046, 1051, and 1061; and a LCDR3 comprising an amino acid sequence at least 65%, at least 70%, at least 75%, at least 80%, at least 85%, at least 90%, at least 95%, at least 99%, or 100% identical to any one of SEQ ID NOs: 42, 139, 146, 153, 160, 167, 173, 764, 766, 768, 771, 779, 786, 792, 795, 808, 815, 821, 830, 837, 843, 850, 856, 859, 866, 872, 879, 885, and 1066, or VL1 is a first immunoglobulin light chain variable region that specifically binds to a SARS-CoV-2 protein comprising an amino acid sequence at least 65%, at least 70%, at least 75%, at least 80%, at least 85%, at least 90%, at least 95%, at least 99%, or 100% identical to any one of SEQ ID NOs: 43, 140, 147, 154, 161, 168, 174, 772, 780, 787, 796, 802, 809, 816, 822, 831, 838, 844, 851, 860, 867, 873, and 880; VH1 is a first immunoglobulin heavy chain variable region that specifically binds to a SARS-CoV-2 protein and which comprises a heavy chain complementary determining region (HCDR) 1 comprising an amino acid sequence at least 65%, at least 70%, at least 75%, at least 80%, at least 85%, at least 90%, at least 95%, at least 99%, or 100% identical to any one of SEQ ID NOs: 44, 133, 141, 148, 155, 162, 175, 773, 781, 788, 797, 803, 810, 817, 823, 832, 839, 845, 852, 861, 868, 874, 881, 1047, 1052, 1062, and 1067; a HCDR2 comprising an amino acid sequence at least 65%, at least 70%, at least 75%, at least 80%, at least 85%, at least 90%, at least 95%, at least 99%, or 100% identical to any one of SEQ ID NOs: 6, 142, 149, 156, 163, 169, 176, 776, 782, 789, 798, 804, 811, 818, 824, 833, 840, 846, 853, 862, 869, 875, 882, 1048, 1053, 1063, and 1068; and a HCDR3 comprising an amino acid sequence at least 65%, at least 70%, at least 75%, at least 80%, at least 85%, at least 90%, at least 95%, at least 99%, or 100% identical to any one of SEQ ID NOs: 46, 143, 150, 157, 164, 170, 177, 765, 767, 769, 774, 783, 790, 793, 799, 805, 812, 819, 825, 834, 841, 847, 854, 857, 863, 870, 876, 883, 886, 1049, 1054, 1064, and 1069, or VH1 is a first immunoglobulin heavy chain variable region that specifically binds to a SARS-CoV-2 protein comprising an amino acid sequence at least 65%, at least 70%, at least 75%, at least 80%, at least 85%, at least 90%, at least 95%, at least 99%, or 100% identical to any one of SEQ ID NOs: 144, 151, 158, 165, 171, 178, 775, 777, 784, 791, 800, 806, 813, 820, 826, 835, 842, 848, 855, 864, 871, 877, and 884; and L1 and L2 are optional amino acid linkers; or an antigen binding polypeptide having a structure represented by: VL1-L1-VL2-L2-VH2-L3-VH1; VL1-L1-VH2-L2-VL2-L3-VH1; VH1-L1-VH2-L2-VL2-L3-VL1; or VH1-L1-VL2-L2-VH2-L3-VL1; wherein: VL1 is a first immunoglobulin light chain variable region that specifically binds to a SARS-CoV-2 protein and which comprises a light chain complementary determining region (LCDR) 1 comprising an amino acid sequence at least 65%, at least 70%, at least 75%, at least 80%, at least 85%, at least 90%, at least 95%, at least 99%, or 100% identical to any one of SEQ ID NOs: 41, 48, 138, 145, 152, 159, 166, 172, 192, 770, 778, 785, 794, 801, 807, 814, 827, 836, 849, 858, 865, 878, 1045, 1050, 1060, and 1065; a LCDR2 comprising an amino acid sequence at least 65%, at least 70%, at least 75%, at least 80%, at least 85%, at least 90%, at least 95%, at least 99%, or 100% identical to any one of amino acid sequences AAS, GAS, DAS, NNN, SDS, SYN, WAS, and DAT, or at least 65%, at least 70%, at least 75%, at least 80%, at least 85%, at least 90%, at least 95%, at least 99%, or 100% identical to any one of SEQ ID NOs: 1046, 1051, and 1061; and a LCDR3 comprising an amino acid sequence at least 65%, at least 70%, at least 75%, at least 80%, at least 85%, at least 90%, at least 95%, at least 99%, or 100% identical to any one of SEQ ID NOs: 42, 139, 146, 153, 160, 167, 173, 764, 766, 768, 771, 779, 786, 792, 795, 808, 815, 821, 830, 837, 843, 850, 856, 859, 866, 872, 879, 885, and 1066, or VL1 is a first immunoglobulin light chain variable region that specifically binds to a SARS-CoV-2 protein comprising an amino acid sequence at least 65%, at least 70%, at least 75%, at least 80%, at least 85%, at least 90%, at least 95%, at least 99%, or 100% identical to any one of SEQ ID NOs: 43, 140, 147, 154, 161, 168, 174, 772, 780, 787, 796, 802, 809, 816, 822, 831, 838, 844, 851, 860, 867, 873, and 880; VL2 is a second immunoglobulin light chain variable region that specifically binds to a SARS-CoV-2 protein and which comprises a LCDR1 comprising an amino acid sequence at least 65%, at least 70%, at least 75%, at least 80%, at least 85%, at least 90%, at least 95%, at least 99%, or 100% identical to any one of SEQ ID NOs: 41, 48, 138, 145, 152, 159, 166, 172, 192, 770, 778, 785, 794, 801, 807, 814, 827, 836, 849, 858, 865, 878, 1045, 1050, 1060, and 1065; a LCDR2 comprising an amino acid sequence at least 65%, at least 70%, at least 75%, at least 80%, at least 85%, at least 90%, at least 95%, at least 99%, or 100% identical to any one of amino acid sequences AAS, GAS, DAS, NNN, SDS, SYN, WAS, and DAT, or at least 65%, at least 70%, at least 75%, at least 80%, at least 85%, at least 90%, at least 95%, at least 99%, or 100% identical to any one of SEQ ID NOs: 1046, 1051, and 1061; and a LCDR3 comprising an amino acid sequence at least 65%, at least 70%, at least 75%, at least 80%, at least 85%, at least 90%, at least 95%, at least 99%, or 100% identical to any one of SEQ ID NOs: 42, 139, 146, 153, 160, 167, 173, 764, 766, 768, 771, 779, 786, 792, 795, 808, 815, 821, 830, 837, 843, 850, 856, 859, 866, 872, 879, 885, and 1066, or VL2 is a second immunoglobulin light chain variable region that specifically binds a SARS-CoV-2 protein comprising an amino acid sequence at least 65%, at least 70%, at least 75%, at least 80%, at least 85%, at least 90%, at least 95%, at least 99%, or 100% identical to any one of SEQ ID NOs: 43, 140, 147, 154, 161, 168, 174, 772, 780, 787, 796, 802, 809, 816, 822, 831, 838, 844, 851, 860, 867, 873, and 880; VH1 is a first immunoglobulin heavy chain variable region that specifically binds to a SARS-CoV-2 protein and which comprises a heavy chain complementary determining region (HCDR) 1 comprising an amino acid sequence at least 65%, at least 70%, at least 75%, at least 80%, at least 85%, at least 90%, at least 95%, at least 99%, or 100% identical to any one of SEQ ID NOs: 44, 133, 141, 148, 155, 162, 175, 773, 781, 788, 797, 803, 810, 817, 823, 832, 839, 845, 852, 861, 868, 874, 881, 1047, 1052, 1062, and 1067; a HCDR2 comprising an amino acid sequence at least 65%, at least 70%, at least 75%, at least 80%, at least 85%, at least 90%, at least 95%, at least 99%, or 100% identical to any one of SEQ ID NOs: 6, 142, 149, 156, 163, 169, 176, 776, 782, 789, 798, 804, 811, 818, 824, 833, 840, 846, 853, 862, 869, 875, 882, 1048, 1053, 1063, and 1068; and a HCDR3 comprising an amino acid sequence at least 65%, at least 70%, at least 75%, at least 80%, at least 85%, at least 90%, at least 95%, at least 99%, or 100% identical to any one of SEQ ID NOs: 46, 143, 150, 157, 164, 170, 177, 765, 767, 769, 774, 783, 790, 793, 799, 805, 812, 819, 825, 834, 841, 847, 854, 857, 863, 870, 876, 883, 886, 1049, 1054, 1064, and 1069, or VH1 is a first immunoglobulin heavy chain variable region that specifically binds to a SARS-CoV-2 protein comprising an amino acid sequence at least 65%, at least 70%, at least 75%, at least 80%, at least 85%, at least 90%, at least 95%, at least 99%, or 100% identical to any one of SEQ ID NOs: 144, 151, 158, 165, 171, 178, 775, 777, 784, 791, 800, 806, 813, 820, 826, 835, 842, 848, 855, 864, 871, 877, and 884; VH2 is a second immunoglobulin heavy chain variable region that specifically binds to a SARS-CoV-2 protein and which comprises a HCDR1 comprising an amino acid sequence at least 65%, at least 70%, at least 75%, at least 80%, at least 85%, at least 90%, at least 95%, at least 99%, or 100% identical to any one of SEQ ID NOs: 44, 133, 141, 148, 155, 162, 175, 773, 781, 788, 797, 803, 810, 817, 823, 832, 839, 845, 852, 861, 868, 874, 881, 1047, 1052, 1062, and 1067; a HCDR2 comprising an amino acid sequence at least 65%, at least 70%, at least 75%, at least 80%, at least 85%, at least 90%, at least 95%, at least 99%, or 100% identical to any one of SEQ ID NOs: 6, 142, 149, 156, 163, 169, 176, 776, 782, 789, 798, 804, 811, 818, 824, 833, 840, 846, 853, 862, 869, 875, 882, 1048, 1053, 1063, and 1068; and a HCDR3 comprising an amino acid sequence at least 65%, at least 70%, at least 75%, at least 80%, at least 85%, at least 90%, at least 95%, at least 99%, or 100% identical to any one of SEQ ID NOs: 46, 143, 150, 157, 164, 170, 177, 765, 767, 769, 774, 783, 790, 793, 799, 805, 812, 819, 825, 834, 841, 847, 854, 857, 863, 870, 876, 883, 886, 1049, 1054, 1064, and 1069, or VH2 is a second immunoglobulin heavy chain variable region that specifically binds to a SARS-CoV-2 protein comprising an amino acid sequence at least 65%, at least 70%, at least 75%, at least 80%, at least 85%, at least 90%, at least 95%, at least 99%, or 100% identical to any one of SEQ ID NOs: 144, 151, 158, 165, 171, 178, 775, 777, 784, 791, 800, 806, 813, 820, 826, 835, 842, 848, 855, 864, 871, 877, and 884; and L1-L3 are optional amino acid linkers; wherein (b) is selected from any one of the more specific aspects provided herein for an antigen binding polypeptide in an antigen binding polypeptide complex having no more than three polypeptide chains; and wherein the antigen binding polypeptide further comprises one or more immunoglobulin heavy chain constant region 1 (CH1) and/or one or more immunoglobulin light chain constant region (CL) between any one of the variable regions and/or optional amino acid linkers (e.g., between VL1 and L1, between L1 and VH1, between VH1 and L2, between L2 and VL1, between L1 and VL2, between VL2 and L2, between L2 and VH2, between VH2 and L3, between L3 and VH1, between VL1 and L1, between L1 and VH2, between VH2 and L2, between. L2 and VL2, between VL2 and L3, between L3 and VH1, between VH1 and L4, between L4 and VH2, between VH2 and L5, between L5 and VL2, between VL2 and L6, between L6 and VL1, between VH1 and L4, between L4 and VL2, between L4 and VL2, between VL2 and L5, between L5 and VH2, between VH2 and L6, or between L6 and VL1).

[0310] In some aspects, the antigen binding polypeptide, antigen binding polypeptide complex, antibody or antigen binding fragment thereof, polypeptide, polynucleotide, vector, host cell, mRNA, LNP, CAR, immune cell, pharmaceutical composition, kit, or method disclosed herein comprises or encodes:
[0311] a VL at least 65%, at least 70%, at least 75%, at least 80%, at least 85%, at least 90%, at least 95%, at least 99%, or 100% identical to SEQ ID NO: 4 and a VH at least 65%, at least 70%, at least 75%, at least 80%, at least 85%, at least 90%, at least 95%, at least 99%, or 100% identical to SEQ ID NO: 8;
[0312] a VL at least 65%, at least 70%, at least 75%, at least 80%, at least 85%, at least 90%, at least 95%, at least 99%, or 100% identical to SEQ ID NO: 11 and a VH at least 65%, at least 70%, at least 75%, at least 80%, at least 85%, at least 90%, at least 95%, at least 99%, or 100% identical to SEQ ID NO: 14;
[0313] a VL at least 65%, at least 70%, at least 75%, at least 80%, at least 85%, at least 90%, at least 95%, at least 99%, or 100% identical to SEQ ID NO: 17 and a VH at least 65%, at least 70%, at least 75%, at least 80%, at least 85%, at least 90%, at least 95%, at least 99%, or 100% identical to SEQ ID NO: 21;
[0314] a VL at least 65%, at least 70%, at least 75%, at least 80%, at least 85%, at least 90%, at least 95%, at least 99%, or 100% identical to SEQ ID NO: 17 and a VH at least 65%, at least 70%, at least 75%, at least 80%, at least 85%, at least 90%, at least 95%, at least 99%, or 100% identical to SEQ ID NO: 22;
[0315] a VL at least 65%, at least 70%, at least 75%, at least 80%, at least 85%, at least 90%, at least 95%, at least 99%, or 100% identical to SEQ ID NO: 25 and a VH at least 65%, at least 70%, at least 75%, at least 80%, at least 85%, at least 90%, at least 95%, at least 99%, or 100% identical to SEQ ID NO: 29;
[0316] a VL at least 65%, at least 70%, at least 75%, at least 80%, at least 85%, at least 90%, at least 95%, at least 99%, or 100% identical to SEQ ID NO: 33 and a VH at least 65%, at least 70%, at least 75%, at least 80%, at least 85%, at least 90%, at least 95%, at least 99%, or 100% identical to SEQ ID NO: 37;
[0317] a VL at least 65%, at least 70%, at least 75%, at least 80%, at least 85%, at least 90%, at least 95%, at least 99%, or 100% identical to SEQ ID NO: 39 and a VH at least 65%, at least 70%, at least 75%, at least 80%, at least 85%, at least 90%, at least 95%, at least 99%, or 100% identical to SEQ ID NO: 37;
[0318] a VL at least 65%, at least 70%, at least 75%, at least 80%, at least 85%, at least 90%, at least 95%, at least 99%, or 100% identical to SEQ ID NO: 43 and a VH at least 65%, at least 70%, at least 75%, at least 80%, at least 85%, at least 90%, at least 95%, at least 99%, or 100% identical to SEQ ID NO: 47;
[0319] a VL at least 65%, at least 70%, at least 75%, at least 80%, at least 85%, at least 90%, at least 95%, at least 99%, or 100% identical to SEQ ID NO: 988 and a VH at least 65%, at least 70%, at least 75%, at least 80%, at least 85%, at least 90%, at least 95%, at least 99%, or 100% identical to SEQ ID NO: 57;
[0320] a VL at least 65%, at least 70%, at least 75%, at least 80%, at least 85%, at least 90%, at least 95%, at least 99%, or 100% identical to SEQ ID NO: 50 and a VH at least 65%, at least 70%, at least 75%, at least 80%, at least 85%, at least 90%, at least 95%, at least 99%, or 100% identical to SEQ ID NO: 54;
[0321] a VL at least 65%, at least 70%, at least 75%, at least 80%, at least 85%, at least 90%, at least 95%, at least 99%, or 100% identical to SEQ ID NO: 60 and a VH at least 65%, at least 70%, at least 75%, at least 80%, at least 85%, at least 90%, at least 95%, at least 99%, or 100% identical to SEQ ID NO: 64;
[0322] a VL at least 65%, at least 70%, at least 75%, at least 80%, at least 85%, at least 90%, at least 95%, at least 99%, or 100% identical to SEQ ID NO: 67 and a VH at least 65%, at least 70%, at least 75%, at least 80%, at least 85%, at least 90%, at least 95%, at least 99%, or 100% identical to SEQ ID NO: 71;
[0323] a VL at least 65%, at least 70%, at least 75%, at least 80%, at least 85%, at least 90%, at least 95%, at least 99%, or 100% identical to SEQ ID NO: 67 and a VH at least 65%, at least 70%, at least 75%, at least 80%, at least 85%, at least 90%, at least 95%, at least 99%, or 100% identical to SEQ ID NO: 626;
[0324] a VL at least 65%, at least 70%, at least 75%, at least 80%, at least 85%, at least 90%, at least 95%, at least 99%, or 100% identical to SEQ ID NO: 74 and a VH at least 65%, at least 70%, at least 75%, at least 80%, at least 85%, at least 90%, at least 95%, at least 99%, or 100% identical to SEQ ID NO: 78;
[0325] a VL at least 65%, at least 70%, at least 75%, at least 80%, at least 85%, at least 90%, at least 95%, at least 99%, or 100% identical to SEQ ID NO: 81 and a VH at least 65%, at least 70%, at least 75%, at least 80%, at least 85%, at least 90%, at least 95%, at least 99%, or 100% identical to SEQ ID NO: 85;
[0326] a VL at least 65%, at least 70%, at least 75%, at least 80%, at least 85%, at least 90%, at least 95%, at least 99%, or 100% identical to SEQ ID NO: 88 and a VH at least 65%, at least 70%, at least 75%, at least 80%, at least 85%, at least 90%, at least 95%, at least 99%, or 100% identical to SEQ ID NO: 92;
[0327] a VL at least 65%, at least 70%, at least 75%, at least 80%, at least 85%, at least 90%, at least 95%, at least 99%, or 100% identical to SEQ ID NO: 95 and a VH at least 65%, at least 70%, at least 75%, at least 80%, at least 85%, at least 90%, at least 95%, at least 99%, or 100% identical to SEQ ID NO: 98;
[0328] a VL at least 65%, at least 70%, at least 75%, at least 80%, at least 85%, at least 90%, at least 95%, at least 99%, or 100% identical to SEQ ID NO: 101 and a VH at least 65%, at least 70%, at least 75%, at least 80%, at least 85%, at least 90%, at least 95%, at least 99%, or 100% identical to SEQ ID NO: 104;
[0329] a VL at least 65%, at least 70%, at least 75%, at least 80%, at least 85%, at least 90%, at least 95%, at least 99%, or 100% identical to SEQ ID NO: 107 and a VH at least 65%, at least 70%, at least 75%, at least 80%, at least 85%, at least 90%, at least 95%, at least 99%, or 100% identical to SEQ ID NO: 111;
[0330] a VL at least 65%, at least 70%, at least 75%, at least 80%, at least 85%, at least 90%, at least 95%, at least 99%, or 100% identical to SEQ ID NO: 114 and a VH at least 65%, at least 70%, at least 75%, at least 80%, at least 85%, at least 90%, at least 95%, at least 99%, or 100% identical to SEQ ID NO: 118;
[0331] a VL at least 65%, at least 70%, at least 75%, at least 80%, at least 85%, at least 90%, at least 95%, at least 99%, or 100% identical to SEQ ID NO: 121 and a VH at least 65%, at least 70%, at least 75%, at least 80%, at least 85%, at least 90%, at least 95%, at least 99%, or 100% identical to SEQ ID NO: 125;
[0332] a VL at least 65%, at least 70%, at least 75%, at least 80%, at least 85%, at least 90%, at least 95%, at least 99%, or 100% identical to SEQ ID NO: 127 and a VH at least 65%, at least 70%, at least 75%, at least 80%, at least 85%, at least 90%, at least 95%, at least 99%, or 100% identical to SEQ ID NO: 137;
[0333] a VL at least 65%, at least 70%, at least 75%, at least 80%, at least 85%, at least 90%, at least 95%, at least 99%, or 100% identical to SEQ ID NO: 127 and a VH at least 65%, at least 70%, at least 75%, at least 80%, at least 85%, at least 90%, at least 95%, at least 99%, or 100% identical to SEQ ID NO: 129;
[0334] a VL at least 65%, at least 70%, at least 75%, at least 80%, at least 85%, at least 90%, at least 95%, at least 99%, or 100% identical to SEQ ID NO: 132 and a VH at least 65%, at least 70%, at least 75%, at least 80%, at least 85%, at least 90%, at least 95%, at least 99%, or 100% identical to SEQ ID NO: 136;
[0335] a VL at least 65%, at least 70%, at least 75%, at least 80%, at least 85%, at least 90%, at least 95%, at least 99%, or 100% identical to SEQ ID NO: 140 and a VH at least 65%, at least 70%, at least 75%, at least 80%, at least 85%, at least 90%, at least 95%, at least 99%, or 100% identical to SEQ ID NO: 144;
[0336] a VL at least 65%, at least 70%, at least 75%, at least 80%, at least 85%, at least 90%, at least 95%, at least 99%, or 100% identical to SEQ ID NO: 147 and a VH at least 65%, at least 70%, at least 75%, at least 80%, at least 85%, at least 90%, at least 95%, at least 99%, or 100% identical to SEQ ID NO: 151;
[0337] a VL at least 65%, at least 70%, at least 75%, at least 80%, at least 85%, at least 90%, at least 95%, at least 99%, or 100% identical to SEQ ID NO: 154 and a VH at least 65%, at least 70%, at least 75%, at least 80%, at least 85%, at least 90%, at least 95%, at least 99%, or 100% identical to SEQ ID NO: 158;
[0338] a VL at least 65%, at least 70%, at least 75%, at least 80%, at least 85%, at least 90%, at least 95%, at least 99%, or 100% identical to SEQ ID NO: 161 and a VH at least 65%, at least 70%, at least 75%, at least 80%, at least 85%, at least 90%, at least 95%, at least 99%, or 100% identical to SEQ ID NO: 165;
[0339] a VL at least 65%, at least 70%, at least 75%, at least 80%, at least 85%, at least 90%, at least 95%, at least 99%, or 100% identical to SEQ ID NO: 168 and a VH at least 65%, at least 70%, at least 75%, at least 80%, at least 85%, at least 90%, at least 95%, at least 99%, or 100% identical to SEQ ID NO: 171;
[0340] a VL at least 65%, at least 70%, at least 75%, at least 80%, at least 85%, at least 90%, at least 95%, at least 99%, or 100% identical to SEQ ID NO: 174 and a VH at least 65%, at least 70%, at least 75%, at least 80%, at least 85%, at least 90%, at least 95%, at least 99%, or 100% identical to SEQ ID NO: 178;
[0341] a VL at least 65%, at least 70%, at least 75%, at least 80%, at least 85%, at least 90%, at least 95%, at least 99%, or 100% identical to SEQ ID NO: 181 and a VH at least 65%, at least 70%, at least 75%, at least 80%, at least 85%, at least 90%, at least 95%, at least 99%, or 100% identical to SEQ ID NO: 185;
[0342] a VL at least 65%, at least 70%, at least 75%, at least 80%, at least 85%, at least 90%, at least 95%, at least 99%, or 100% identical to SEQ ID NO: 188 and a VH at least 65%, at least 70%, at least 75%, at least 80%, at least 85%, at least 90%, at least 95%, at least 99%, or 100% identical to SEQ ID NO: 191;
[0343] a VL at least 65%, at least 70%, at least 75%, at least 80%, at least 85%, at least 90%, at least 95%, at least 99%, or 100% identical to SEQ ID NO: 194 and a VH at least 65%, at least 70%, at least 75%, at least 80%, at least 85%, at least 90%, at least 95%, at least 99%, or 100% identical to SEQ ID NO: 198;
[0344] a VL at least 65%, at least 70%, at least 75%, at least 80%, at least 85%, at least 90%, at least 95%, at least 99%, or 100% identical to SEQ ID NO: 201 and a VH at least 65%, at least 70%, at least 75%, at least 80%, at least 85%, at least 90%, at least 95%, at least 99%, or 100% identical to SEQ ID NO: 204;
[0345] a VL at least 65%, at least 70%, at least 75%, at least 80%, at least 85%, at least 90%, at least 95%, at least 99%, or 100% identical to SEQ ID NO: 207 and a VH at least 65%, at least 70%, at least 75%, at least 80%, at least 85%, at least 90%, at least 95%, at least 99%, or 100% identical to SEQ ID NO: 211;
[0346] a VL at least 65%, at least 70%, at least 75%, at least 80%, at least 85%, at least 90%, at least 95%, at least 99%, or 100% identical to SEQ ID NO: 214 and a VH at least 65%, at least 70%, at least 75%, at least 80%, at least 85%, at least 90%, at least 95%, at least 99%, or 100% identical to SEQ ID NO: 218;
[0347] a VL at least 65%, at least 70%, at least 75%, at least 80%, at least 85%, at least 90%, at least 95%, at least 99%, or 100% identical to SEQ ID NO: 221 and a VH at least 65%, at least 70%, at least 75%, at least 80%, at least 85%, at least 90%, at least 95%, at least 99%, or 100% identical to SEQ ID NO: 225;
[0348] a VL at least 65%, at least 70%, at least 75%, at least 80%, at least 85%, at least 90%, at least 95%, at least 99%, or 100% identical to SEQ ID NO: 228 and a VH at least 65%, at least 70%, at least 75%, at least 80%, at least 85%, at least 90%, at least 95%, at least 99%, or 100% identical to SEQ ID NO: 231;
[0349] a VL at least 65%, at least 70%, at least 75%, at least 80%, at least 85%, at least 90%, at least 95%, at least 99%, or 100% identical to SEQ ID NO: 234 and a VH at least 65%, at least 70%, at least 75%, at least 80%, at least 85%, at least 90%, at least 95%, at least 99%, or 100% identical to SEQ ID NO: 238;
[0350] a VL at least 65%, at least 70%, at least 75%, at least 80%, at least 85%, at least 90%, at least 95%, at least 99%, or 100% identical to SEQ ID NO: 240 and a VH at least 65%, at least 70%, at least 75%, at least 80%, at least 85%, at least 90%, at least 95%, at least 99%, or 100% identical to SEQ ID NO: 37;
[0351] a VL at least 65%, at least 70%, at least 75%, at least 80%, at least 85%, at least 90%, at least 95%, at least 99%, or 100% identical to SEQ ID NO: 243 and a VH at least 65%, at least 70%, at least 75%, at least 80%, at least 85%, at least 90%, at least 95%, at least 99%, or 100% identical to SEQ ID NO: 245;
[0352] a VL at least 65%, at least 70%, at least 75%, at least 80%, at least 85%, at least 90%, at least 95%, at least 99%, or 100% identical to SEQ ID NO: 247 and a VH at least 65%, at least 70%, at least 75%, at least 80%, at least 85%, at least 90%, at least 95%, at least 99%, or 100% identical to SEQ ID NO: 129;
[0353] a VL at least 65%, at least 70%, at least 75%, at least 80%, at least 85%, at least 90%, at least 95%, at least 99%, or 100% identical to SEQ ID NO: 250 and a VH at least 65%, at least 70%, at least 75%, at least 80%, at least 85%, at least 90%, at least 95%, at least 99%, or 100% identical to SEQ ID NO: 129;
[0354] a VL at least 65%, at least 70%, at least 75%, at least 80%, at least 85%, at least 90%, at least 95%, at least 99%, or 100% identical to SEQ ID NO: 251 and a VH at least 65%, at least 70%, at least 75%, at least 80%, at least 85%, at least 90%, at least 95%, at least 99%, or 100% identical to SEQ ID NO: 37;
[0355] a VL at least 65%, at least 70%, at least 75%, at least 80%, at least 85%, at least 90%, at least 95%, at least 99%, or 100% identical to SEQ ID NO: 252 and a VH at least 65%, at least 70%, at least 75%, at least 80%, at least 85%, at least 90%, at least 95%, at least 99%, or 100% identical to SEQ ID NO: 37;
[0356] a VL at least 65%, at least 70%, at least 75%, at least 80%, at least 85%, at least 90%, at least 95%, at least 99%, or 100% identical to SEQ ID NO: 33 and a VH at least 65%, at least 70%, at least 75%, at least 80%, at least 85%, at least 90%, at least 95%, at least 99%, or 100% identical to SEQ ID NO: 254;
[0357] a VL at least 65%, at least 70%, at least 75%, at least 80%, at least 85%, at least 90%, at least 95%, at least 99%, or 100% identical to SEQ ID NO: 255 and a VH at least 65%, at least 70%, at least 75%, at least 80%, at least 85%, at least 90%, at least 95%, at least 99%, or 100% identical to SEQ ID NO: 37;
[0358] a VL at least 65%, at least 70%, at least 75%, at least 80%, at least 85%, at least 90%, at least 95%, at least 99%, or 100% identical to SEQ ID NO: 255 and a VH at least 65%, at least 70%, at least 75%, at least 80%, at least 85%, at least 90%, at least 95%, at least 99%, or 100% identical to SEQ ID NO: 254;
[0359] a VL at least 65%, at least 70%, at least 75%, at least 80%, at least 85%, at least 90%, at least 95%, at least 99%, or 100% identical to SEQ ID NO: 255 and a VH at least 65%, at least 70%, at least 75%, at least 80%, at least 85%, at least 90%, at least 95%, at least 99%, or 100% identical to SEQ ID NO: 129;
[0360] a VL at least 65%, at least 70%, at least 75%, at least 80%, at least 85%, at least 90%, at least 95%, at least 99%, or 100% identical to SEQ ID NO: 127 and a VH at least 65%, at least 70%, at least 75%, at least 80%, at least 85%, at least 90%, at least 95%, at least 99%, or 100% identical to SEQ ID NO: 258;
[0361] a VL at least 65%, at least 70%, at least 75%, at least 80%, at least 85%, at least 90%, at least 95%, at least 99%, or 100% identical to SEQ ID NO: 127 and a VH at least 65%, at least 70%, at least 75%, at least 80%, at least 85%, at least 90%, at least 95%, at least 99%, or 100% identical to SEQ ID NO: 260;
[0362] a VL at least 65%, at least 70%, at least 75%, at least 80%, at least 85%, at least 90%, at least 95%, at least 99%, or 100% identical to SEQ ID NO: 127 and a VH at least 65%, at least 70%, at least 75%, at least 80%, at least 85%, at least 90%, at least 95%, at least 99%, or 100% identical to SEQ ID NO: 262;
[0363] a VL at least 65%, at least 70%, at least 75%, at least 80%, at least 85%, at least 90%, at least 95%, at least 99%, or 100% identical to SEQ ID NO: 127 and a VH at least 65%, at least 70%, at least 75%, at least 80%, at least 85%, at least 90%, at least 95%, at least 99%, or 100% identical to SEQ ID NO: 262;
[0364] a VL at least 65%, at least 70%, at least 75%, at least 80%, at least 85%, at least 90%, at least 95%, at least 99%, or 100% identical to SEQ ID NO: 127 and a VH at least 65%, at least 70%, at least 75%, at least 80%, at least 85%, at least 90%, at least 95%, at least 99%, or 100% identical to SEQ ID NO: 266;
[0365] a VL at least 65%, at least 70%, at least 75%, at least 80%, at least 85%, at least 90%, at least 95%, at least 99%, or 100% identical to SEQ ID NO: 127 and a VH at least 65%, at least 70%, at least 75%, at least 80%, at least 85%, at least 90%, at least 95%, at least 99%, or 100% identical to SEQ ID NO: 268;
[0366] a VL at least 65%, at least 70%, at least 75%, at least 80%, at least 85%, at least 90%, at least 95%, at least 99%, or 100% identical to SEQ ID NO: 127 and a VH at least 65%, at least 70%, at least 75%, at least 80%, at least 85%, at least 90%, at least 95%, at least 99%, or 100% identical to SEQ ID NO: 270;
[0367] a VL at least 65%, at least 70%, at least 75%, at least 80%, at least 85%, at least 90%, at least 95%, at least 99%, or 100% identical to SEQ ID NO: 127 and a VH at least 65%, at least 70%, at least 75%, at least 80%, at least 85%, at least 90%, at least 95%, at least 99%, or 100% identical to SEQ ID NO: 331;
[0368] a VL at least 65%, at least 70%, at least 75%, at least 80%, at least 85%, at least 90%, at least 95%, at least 99%, or 100% identical to SEQ ID NO: 127 and a VH at least 65%, at least 70%, at least 75%, at least 80%, at least 85%, at least 90%, at least 95%, at least 99%, or 100% identical to SEQ ID NO: 272;
[0369] a VL at least 65%, at least 70%, at least 75%, at least 80%, at least 85%, at least 90%, at least 95%, at least 99%, or 100% identical to SEQ ID NO: 127 and a VH at least 65%, at least 70%, at least 75%, at least 80%, at least 85%, at least 90%, at least 95%, at least 99%, or 100% identical to SEQ ID NO: 275;
[0370] a VL at least 65%, at least 70%, at least 75%, at least 80%, at least 85%, at least 90%, at least 95%, at least 99%, or 100% identical to SEQ ID NO: 127 and a VH at least 65%, at least 70%, at least 75%, at least 80%, at least 85%, at least 90%, at least 95%, at least 99%, or 100% identical to SEQ ID NO: 277;
[0371] a VL at least 65%, at least 70%, at least 75%, at least 80%, at least 85%, at least 90%, at least 95%, at least 99%, or 100% identical to SEQ ID NO: 127 and a VH at least 65%, at least 70%, at least 75%, at least 80%, at least 85%, at least 90%, at least 95%, at least 99%, or 100% identical to SEQ ID NO: 279;
[0372] a VL at least 65%, at least 70%, at least 75%, at least 80%, at least 85%, at least 90%, at least 95%, at least 99%, or 100% identical to SEQ ID NO: 127 and a VH at least 65%, at least 70%, at least 75%, at least 80%, at least 85%, at least 90%, at least 95%, at least 99%, or 100% identical to SEQ ID NO: 280;
[0373] a VL at least 65%, at least 70%, at least 75%, at least 80%, at least 85%, at least 90%, at least 95%, at least 99%, or 100% identical to SEQ ID NO: 127 and a VH at least 65%, at least 70%, at least 75%, at least 80%, at least 85%, at least 90%, at least 95%, at least 99%, or 100% identical to SEQ ID NO: 282;
[0374] a VL at least 65%, at least 70%, at least 75%, at least 80%, at least 85%, at least 90%, at least 95%, at least 99%, or 100% identical to SEQ ID NO: 284 and a VH at least 65%, at least 70%, at least 75%, at least 80%, at least 85%, at least 90%, at least 95%, at least 99%, or 100% identical to SEQ ID NO: 129;
[0375] a VL at least 65%, at least 70%, at least 75%, at least 80%, at least 85%, at least 90%, at least 95%, at least 99%, or 100% identical to SEQ ID NO: 323 and a VH at least 65%, at least 70%, at least 75%, at least 80%, at least 85%, at least 90%, at least 95%, at least 99%, or 100% identical to SEQ ID NO: 129;
[0376] a VL at least 65%, at least 70%, at least 75%, at least 80%, at least 85%, at least 90%, at least 95%, at least 99%, or 100% identical to SEQ ID NO: 286 and a VH at least 65%, at least 70%, at least 75%, at least 80%, at least 85%, at least 90%, at least 95%, at least 99%, or 100% identical to SEQ ID NO: 129;
[0377] a VL at least 65%, at least 70%, at least 75%, at least 80%, at least 85%, at least 90%, at least 95%, at least 99%, or 100% identical to SEQ ID NO: 289 and a VH at least 65%, at least 70%, at least 75%, at least 80%, at least 85%, at least 90%, at least 95%, at least 99%, or 100% identical to SEQ ID NO: 129;
[0378] a VL at least 65%, at least 70%, at least 75%, at least 80%, at least 85%, at least 90%, at least 95%, at least 99%, or 100% identical to SEQ ID NO: 291 and a VH at least 65%, at least 70%, at least 75%, at least 80%, at least 85%, at least 90%, at least 95%, at least 99%, or 100% identical to SEQ ID NO: 129;
[0379] a VL at least 65%, at least 70%, at least 75%, at least 80%, at least 85%, at least 90%, at least 95%, at least 99%, or 100% identical to SEQ ID NO: 293 and a VH at least 65%, at least 70%, at least 75%, at least 80%, at least 85%, at least 90%, at least 95%, at least 99%, or 100% identical to SEQ ID NO: 129;
[0380] a VL at least 65%, at least 70%, at least 75%, at least 80%, at least 85%, at least 90%, at least 95%, at least 99%, or 100% identical to SEQ ID NO: 295 and a VH at least 65%, at least 70%, at least 75%, at least 80%, at least 85%, at least 90%, at least 95%, at least 99%, or 100% identical to SEQ ID NO: 129;
[0381] a VL at least 65%, at least 70%, at least 75%, at least 80%, at least 85%, at least 90%, at least 95%, at least 99%, or 100% identical to SEQ ID NO: 247 and a VH at least 65%, at least 70%, at least 75%, at least 80%, at least 85%, at least 90%, at least 95%, at least 99%, or 100% identical to SEQ ID NO: 282;
[0382] a VL at least 65%, at least 70%, at least 75%, at least 80%, at least 85%, at least 90%, at least 95%, at least 99%, or 100% identical to SEQ ID NO: 250 and a VH at least 65%, at least 70%, at least 75%, at least 80%, at least 85%, at least 90%, at least 95%, at least 99%, or 100% identical to SEQ ID NO: 282;
[0383] a VL at least 65%, at least 70%, at least 75%, at least 80%, at least 85%, at least 90%, at least 95%, at least 99%, or 100% identical to SEQ ID NO: 39 and a VH at least 65%, at least 70%, at least 75%, at least 80%, at least 85%, at least 90%, at least 95%, at least 99%, or 100% identical to SEQ ID NO: 298;
[0384] a VL at least 65%, at least 70%, at least 75%, at least 80%, at least 85%, at least 90%, at least 95%, at least 99%, or 100% identical to SEQ ID NO: 39 and a VH at least 65%, at least 70%, at least 75%, at least 80%, at least 85%, at least 90%, at least 95%, at least 99%, or 100% identical to SEQ ID NO: 254;
[0385] a VL at least 65%, at least 70%, at least 75%, at least 80%, at least 85%, at least 90%, at least 95%, at least 99%, or 100% identical to SEQ ID NO: 299 and a VH at least 65%, at least 70%, at least 75%, at least 80%, at least 85%, at least 90%, at least 95%, at least 99%, or 100% identical to SEQ ID NO: 37;
[0386] a VL at least 65%, at least 70%, at least 75%, at least 80%, at least 85%, at least 90%, at least 95%, at least 99%, or 100% identical to SEQ ID NO: 300 and a VH at least 65%, at least 70%, at least 75%, at least 80%, at least 85%, at least 90%, at least 95%, at least 99%, or 100% identical to SEQ ID NO: 37;
[0387] a VL at least 65%, at least 70%, at least 75%, at least 80%, at least 85%, at least 90%, at least 95%, at least 99%, or 100% identical to SEQ ID NO: 302 and a VH at least 65%, at least 70%, at least 75%, at least 80%, at least 85%, at least 90%, at least 95%, at least 99%, or 100% identical to SEQ ID NO: 37;
[0388] a VL at least 65%, at least 70%, at least 75%, at least 80%, at least 85%, at least 90%, at least 95%, at least 99%, or 100% identical to SEQ ID NO: 303 and a VH at least 65%, at least 70%, at least 75%, at least 80%, at least 85%, at least 90%, at least 95%, at least 99%, or 100% identical to SEQ ID NO: 37;
[0389] a VL at least 65%, at least 70%, at least 75%, at least 80%, at least 85%, at least 90%, at least 95%, at least 99%, or 100% identical to SEQ ID NO: 305 and a VH at least 65%, at least 70%, at least 75%, at least 80%, at least 85%, at least 90%, at least 95%, at least 99%, or 100% identical to SEQ ID NO: 37;
[0390] a VL at least 65%, at least 70%, at least 75%, at least 80%, at least 85%, at least 90%, at least 95%, at least 99%, or 100% identical to SEQ ID NO: 307 and a VH at least 65%, at least 70%, at least 75%, at least 80%, at least 85%, at least 90%, at least 95%, at least 99%, or 100% identical to SEQ ID NO: 37;
[0391] a VL at least 65%, at least 70%, at least 75%, at least 80%, at least 85%, at least 90%, at least 95%, at least 99%, or 100% identical to SEQ ID NO: 308 and a VH at least 65%, at least 70%, at least 75%, at least 80%, at least 85%, at least 90%, at least 95%, at least 99%, or 100% identical to SEQ ID NO: 37;
[0392] a VL at least 65%, at least 70%, at least 75%, at least 80%, at least 85%, at least 90%, at least 95%, at least 99%, or 100% identical to SEQ ID NO: 310 and a VH at least 65%, at least 70%, at least 75%, at least 80%, at least 85%, at least 90%, at least 95%, at least 99%, or 100% identical to SEQ ID NO: 37;
[0393] a VL at least 65%, at least 70%, at least 75%, at least 80%, at least 85%, at least 90%, at least 95%, at least 99%, or 100% identical to SEQ ID NO: 312 and a VH at least 65%, at least 70%, at least 75%, at least 80%, at least 85%, at least 90%, at least 95%, at least 99%, or 100% identical to SEQ ID NO: 37;
[0394] a VL at least 65%, at least 70%, at least 75%, at least 80%, at least 85%, at least 90%, at least 95%, at least 99%, or 100% identical to SEQ ID NO: 314 and a VH at least 65%, at least 70%, at least 75%, at least 80%, at least 85%, at least 90%, at least 95%, at least 99%, or 100% identical to SEQ ID NO: 37;
[0395] a VL at least 65%, at least 70%, at least 75%, at least 80%, at least 85%, at least 90%, at least 95%, at least 99%, or 100% identical to SEQ ID NO: 315 and a VH at least 65%, at least 70%, at least 75%, at least 80%, at least 85%, at least 90%, at least 95%, at least 99%, or 100% identical to SEQ ID NO: 37;
[0396] a VL at least 65%, at least 70%, at least 75%, at least 80%, at least 85%, at least 90%, at least 95%, at least 99%, or 100% identical to SEQ ID NO: 305 and a VH at least 65%, at least 70%, at least 75%, at least 80%, at least 85%, at least 90%, at least 95%, at least 99%, or 100% identical to SEQ ID NO: 254;
[0397] a VL at least 65%, at least 70%, at least 75%, at least 80%, at least 85%, at least 90%, at least 95%, at least 99%, or 100% identical to SEQ ID NO: 251 and a VH at least 65%, at least 70%, at least 75%, at least 80%, at least 85%, at least 90%, at least 95%, at least 99%, or 100% identical to SEQ ID NO: 254;
[0398] a VL at least 65%, at least 70%, at least 75%, at least 80%, at least 85%, at least 90%, at least 95%, at least 99%, or 100% identical to SEQ ID NO: 255 and a VH at least 65%, at least 70%, at least 75%, at least 80%, at least 85%, at least 90%, at least 95%, at least 99%, or 100% identical to SEQ ID NO: 282;
[0399] a VL at least 65%, at least 70%, at least 75%, at least 80%, at least 85%, at least 90%, at least 95%, at least 99%, or 100% identical to SEQ ID NO: 317 and a VH at least 65%, at least 70%, at least 75%, at least 80%, at least 85%, at least 90%, at least 95%, at least 99%, or 100% identical to SEQ ID NO: 321;
[0400] a VL at least 65%, at least 70%, at least 75%, at least 80%, at least 85%, at least 90%, at least 95%, at least 99%, or 100% identical to SEQ ID NO: 772 and a VH at least 65%, at least 70%, at least 75%, at least 80%, at least 85%, at least 90%, at least 95%, at least 99%, or 100% identical to SEQ ID NO: 775;
[0401] a VL at least 65%, at least 70%, at least 75%, at least 80%, at least 85%, at least 90%, at least 95%, at least 99%, or 100% identical to SEQ ID NO: 43 and a VH at least 65%, at least 70%, at least 75%, at least 80%, at least 85%, at least 90%, at least 95%, at least 99%, or 100% identical to SEQ ID NO: 777;
[0402] a VL at least 65%, at least 70%, at least 75%, at least 80%, at least 85%, at least 90%, at least 95%, at least 99%, or 100% identical to SEQ ID NO: 780 and a VH at least 65%, at least 70%, at least 75%, at least 80%, at least 85%, at least 90%, at least 95%, at least 99%, or 100% identical to SEQ ID NO: 784;
[0403] a VL at least 65%, at least 70%, at least 75%, at least 80%, at least 85%, at least 90%, at least 95%, at least 99%, or 100% identical to SEQ ID NO: 787 and a VH at least 65%, at least 70%, at least 75%, at least 80%, at least 85%, at least 90%, at least 95%, at least 99%, or 100% identical to SEQ ID NO: 791;
[0404] a VL at least 65%, at least 70%, at least 75%, at least 80%, at least 85%, at least 90%, at least 95%, at least 99%, or 100% identical to SEQ ID NO: 796 and a VH at least 65%, at least 70%, at least 75%, at least 80%, at least 85%, at least 90%, at least 95%, at least 99%, or 100% identical to SEQ ID NO: 800;
[0405] a VL at least 65%, at least 70%, at least 75%, at least 80%, at least 85%, at least 90%, at least 95%, at least 99%, or 100% identical to SEQ ID NO: 802 and a VH at least 65%, at least 70%, at least 75%, at least 80%, at least 85%, at least 90%, at least 95%, at least 99%, or 100% identical to SEQ ID NO: 806;
[0406] a VL at least 65%, at least 70%, at least 75%, at least 80%, at least 85%, at least 90%, at least 95%, at least 99%, or 100% identical to SEQ ID NO: 809 and a VH at least 65%, at least 70%, at least 75%, at least 80%, at least 85%, at least 90%, at least 95%, at least 99%, or 100% identical to SEQ ID NO: 813;
[0407] a VL at least 65%, at least 70%, at least 75%, at least 80%, at least 85%, at least 90%, at least 95%, at least 99%, or 100% identical to SEQ ID NO: 816 and a VH at least 65%, at least 70%, at least 75%, at least 80%, at least 85%, at least 90%, at least 95%, at least 99%, or 100% identical to SEQ ID NO: 820;
[0408] a VL at least 65%, at least 70%, at least 75%, at least 80%, at least 85%, at least 90%, at least 95%, at least 99%, or 100% identical to SEQ ID NO: 822 and a VH at least 65%, at least 70%, at least 75%, at least 80%, at least 85%, at least 90%, at least 95%, at least 99%, or 100% identical to SEQ ID NO: 826;
[0409] a VL at least 65%, at least 70%, at least 75%, at least 80%, at least 85%, at least 90%, at least 95%, at least 99%, or 100% identical to SEQ ID NO: 831 and a VH at least 65%, at least 70%, at least 75%, at least 80%, at least 85%, at least 90%, at least 95%, at least 99%, or 100% identical to SEQ ID NO: 835;
[0410] a VL at least 65%, at least 70%, at least 75%, at least 80%, at least 85%, at least 90%, at least 95%, at least 99%, or 100% identical to SEQ ID NO: 838 and a VH at least 65%, at least 70%, at least 75%, at least 80%, at least 85%, at least 90%, at least 95%, at least 99%, or 100% identical to SEQ ID NO: 842;
[0411] a VL at least 65%, at least 70%, at least 75%, at least 80%, at least 85%, at least 90%, at least 95%, at least 99%, or 100% identical to SEQ ID NO: 844 and a VH at least 65%, at least 70%, at least 75%, at least 80%, at least 85%, at least 90%, at least 95%, at least 99%, or 100% identical to SEQ ID NO: 848;
[0412] a VL at least 65%, at least 70%, at least 75%, at least 80%, at least 85%, at least 90%, at least 95%, at least 99%, or 100% identical to SEQ ID NO: 851 and a VH at least 65%, at least 70%, at least 75%, at least 80%, at least 85%, at least 90%, at least 95%, at least 99%, or 100% identical to SEQ ID NO: 855;
[0413] a VL at least 65%, at least 70%, at least 75%, at least 80%, at least 85%, at least 90%, at least 95%, at least 99%, or 100% identical to SEQ ID NO: 860 and a VH at least 65%, at least 70%, at least 75%, at least 80%, at least 85%, at least 90%, at least 95%, at least 99%, or 100% identical to SEQ ID NO: 864;
[0414] a VL at least 65%, at least 70%, at least 75%, at least 80%, at least 85%, at least 90%, at least 95%, at least 99%, or 100% identical to SEQ ID NO: 867 and a VH at least 65%, at least 70%, at least 75%, at least 80%, at least 85%, at least 90%, at least 95%, at least 99%, or 100% identical to SEQ ID NO: 871;
[0415] a VL at least 65%, at least 70%, at least 75%, at least 80%, at least 85%, at least 90%, at least 95%, at least 99%, or 100% identical to SEQ ID NO: 873 and a VH at least 65%, at least 70%, at least 75%, at least 80%, at least 85%, at least 90%, at least 95%, at least 99%, or 100% identical to SEQ ID NO: 877; or
[0416] a VL at least 65%, at least 70%, at least 75%, at least 80%, at least 85%, at least 90%, at least 95%, at least 99%, or 100% identical to SEQ ID NO: 880 and a VH at least 65%, at least 70%, at least 75%, at least 80%, at least 85%, at least 90%, at least 95%, at least 99%, or 100% identical to SEQ ID NO: 884.

[0417] In some aspects, in any one of the antigen binding polypeptides or antigen binding polypeptide complexes disclosed herein:
[0418] (i) any one of the VL comprises a CDR1 having an amino acid sequence at least 65%, at least 70%, at least 75%, at least 80%, at least 85%, at least 90%, at least 95%, at least 99%, or 100% identical to SEQ ID NO: 152 or 1045, a CDR2 having an amino acid sequence at least 65%, at least 70%, at least 75%, at least 80%, at least 85%, at least 90%, at least 95%, at least 99%, or 100% identical to SEQ ID NO: 1046 or an amino acid sequence at least 65%, at least 70%, at least 75%, at least 80%, at least 85%, at least 90%, at least 95%, at least 99%, or 100% identical to amino acid sequence GAS, and a CDR3 having an amino acid sequence at least 65%, at least 70%, at least 75%, at least 80%, at least 85%, at least 90%, at least 95%, at least 99%, or 100% identical to SEQ ID NO: 153 or 766; and any one of the VH comprises a CDR1 having an amino acid sequence at least 65%, at least 70%, at least 75%, at least 80%, at least 85%, at least 90%, at least 95%, at least 99%, or 100% identical to SEQ ID NO: 155 or 1047, a CDR2 having an amino acid sequence at least 65%, at least 70%, at least 75%, at least 80%, at least 85%, at least 90%, at least 95%, at least 99%, or 100% identical to SEQ ID NO: 156 or 1048, and a CDR3 having an amino acid sequence at least 65%, at least 70%, at least 75%, at least 80%, at least 85%, at least 90%, at least 95%, at least 99%, or 100% identical to SEQ ID NO: 157, 767, or 1049;
[0419] and/or
[0420] (ii) any one of the VL comprises a CDR1 having an amino acid sequence at least 65%, at least 70%, at least 75%, at least 80%, at least 85%, at least 90%, at least 95%, at least 99%, or 100% identical to SEQ ID NO: 145 or 1050, a CDR2 having an amino acid sequence at least 65%, at least 70%, at least 75%, at least 80%, at least 85%, at least 90%, at least 95%, at least 99%, or 100% identical to SEQ ID NO: 1051 or an amino acid sequence at least 65%, at least 70%, at least 75%, at least 80%, at least 85%, at least 90%, at least 95%, at least 99%, or 100% identical to amino acid sequence AAS, and a CDR3 having an amino acid sequence at least 65%, at least 70%, at least 75%, at least 80%, at least 85%, at least 90%, at least 95%, at least 99%, or 100% identical to SEQ ID NO: 146 or 764; and any one of the VH comprises a CDR1 having an amino acid sequence at least 65%, at least 70%, at least 75%, at least 80%, at least 85%, at least 90%, at least 95%, at least 99%, or 100% identical to SEQ ID NO: 148 or 1052, a CDR2 having an amino acid sequence at least 65%, at least 70%, at least 75%, at least 80%, at least 85%, at least 90%, at least 95%, at least 99%, or 100% identical to SEQ ID NO: 149 or 1053, and a CDR3 having an amino acid sequence at least 65%, at least 70%, at least 75%, at least 80%, at least 85%, at least 90%, at least 95%, at least 99%, or 100% identical to SEQ ID NO: 150, 765, or 1054; and/or
[0421] (iii) any one of the VL comprises a CDR1 having an amino acid sequence at least 65%, at least 70%, at least 75%, at least 80%, at least 85%, at least 90%, at least 95%, at least 99%, or 100% identical to SEQ ID NO: 172 or 1060, a CDR2 having an amino acid sequence at least 65%, at least 70%, at least 75%, at least 80%, at least 85%, at least 90%, at least 95%, at least 99%, or 100% identical to SEQ ID NO: 1061 or an amino acid sequence at least 65%, at least 70%, at least 75%, at least 80%, at least 85%, at least 90%, at least 95%, at least 99%, or 100% identical to amino acid sequence DAS, and a CDR3 having an amino acid sequence at least 65%, at least 70%, at least 75%, at least 80%, at least 85%, at least 90%, at least 95%, at least 99%, or 100% identical to SEQ ID NO: 173 or 792; and any one of the VH comprises a CDR1 having an amino acid sequence at least 65%, at least 70%, at least 75%, at least 80%, at least 85%, at least 90%, at least 95%, at least 99%, or 100% identical to SEQ ID NO: 175 or 1062, a CDR2 having an amino acid sequence at least 65%, at least 70%, at least 75%, at least 80%, at least 85%, at least 90%, at least 95%, at least 99%, or 100% identical to SEQ ID NO: 176 or 1063, and a CDR3 having an amino acid sequence at least 65%, at least 70%, at least 75%, at least 80%, at least 85%, at least 90%, at least 95%, at least 99%, or 100% identical to SEQ ID NO: 177, 793, or 1064.

[0422] In some of those aspects, in any one of the antigen binding polypeptides or antigen binding polypeptide complexes disclosed herein:
[0423] (i) any one of the VL comprises an amino acid sequence that is at least 65%, at least 70%, at least 75%, at least 80%, at least 85%, at least 90%, at least 95%, at least 99%, or 100% identical to SEQ ID NO: 154; and any one of the VH comprises an amino acid sequence that is at least 65%, at least 70%, at least 75%, at least 80%, at least 85%, at least 90%, at least 95%, at least 99%, or 100% identical to SEQ ID NO: 158; and/or
[0424] (ii) any one of the VL comprises an amino acid sequence that is at least 65%, at least 70%, at least 75%, at least 80%, at least 85%, at least 90%, at least 95%, at least 99%, or 100% identical to SEQ ID NO: 147; and any one of the VH comprises an amino acid sequence that is at least 65%, at least 70%, at least 75%, at least 80%, at least 85%, at least 90%, at least 95%, at least 99%, or 100% identical to SEQ ID NO: 151; and/or
[0425] (iii) any one of the VL comprises an amino acid sequence that is at least 65%, at least 70%, at least 75%, at least 80%, at least 85%, at least 90%, at least 95%, at least 99%, or 100% identical to SEQ ID NO: 174; and any one of the VH comprises an amino acid sequence that is at least 65%, at least 70%, at least 75%, at least 80%, at least 85%, at least 90%, at least 95%, at least 99%, or 100% identical to SEQ ID NO: 178.

[0426] In some aspects, also provided herein are antigen binding polypeptides having a structure, from amino-terminus to carboxy-terminus, represented by:
[0427] VL1-L1-VL2-L2-VH2-L3-VH1-L4-CL-L5-CH1;
[0428] VL1-L1-VL2-L2-VH2-L3-VH1-L4-CH1-L5-CL;
[0429] VL1-L1-VH2-L2-VL2-L3-VH1-L4-CL-L5-CH1;
[0430] VL1-L1-VH2-L2-VL2-L3-VH1-L4-CH1-L5-CL;
[0431] VH1-L1-VL2-L2-VH2-L3-VL1-L4-CL-L5-CH1;
[0432] VH1-L1-VL2-L2-VH2-L3-VL1-L4-CH1-L5-CL;
[0433] VH1-L1-VH2-L2-VL2-L3-VL1-L4-CL-L5-CH1;
[0434] VH1-L1-VH2-L2-VL2-L3-VL1-L4-CH1-L5-CL;
[0435] VL2-L1-VL1-L2-VH1-L3-VH2-L4-CL-L5-CH1;
[0436] VL2-L1-VL1-L2-VH1-L3-VH2-L4-CH1-L5-CL;
[0437] VL2-L1-VH1-L2-VL1-L3-VH2-L4-CL-L5-CH1;
[0438] VL2-L1-VH1-L2-VL1-L3-VH2-L4-CH1-L5-CL;
[0439] VH2-L1-VL1-L2-VH1-L3-VL2-L4-CL-L5-CH1;
[0440] VH2-L1-VL1-L2-VH1-L3-VL2-L4-CH1-L5-CL;
[0441] VH2-L1-VH1-L2-VL1-L3-VL2-L4-CL-L5-CH1; or
[0442] VH2-L1-VH1-L2-VL1-L3-VL2-L4-CH1-L5-CL;
[0443] wherein:
[0444] (i) any one of the VL comprises a CDR1 having an amino acid sequence at least 65%, at least 70%, at least 75%, at least 80%, at least 85%, at least 90%, at least 95%, at least 99%, or 100% identical to SEQ ID NO: 152 or 1045, a CDR2 having an amino acid sequence at least 65%, at least 70%, at least 75%, at least 80%, at least 85%, at least 90%, at least 95%, at least 99%, or 100% identical to SEQ ID NO: 1046 or an amino acid sequence at least 65%, at least 70%, at least 75%, at least 80%, at least 85%, at least 90%, at least 95%, at least 99%, or 100% identical to amino acid sequence GAS, and a CDR3 having an amino acid sequence at least 65%, at least 70%, at least 75%, at least 80%, at least 85%, at least 90%, at least 95%, at least 99%, or 100% identical to SEQ ID NO: 153 or 766; and any one of the VH comprises a CDR1 having an amino acid sequence at least 65%, at least 70%, at least 75%, at least 80%, at least 85%, at least 90%, at least 95%, at least 99%, or 100% identical to SEQ ID NO: 155 or 1047, a CDR2 having an amino acid sequence at least 65%, at least 70%, at least 75%, at least 80%, at least 85%, at least 90%, at least 95%, at least 99%, or 100% identical to SEQ ID NO: 156 or 1048, and a CDR3 having an amino acid sequence at least 65%, at least 70%, at least 75%, at least 80%, at least 85%, at least 90%, at least 95%, at least 99%, or 100% identical to SEQ ID NO: 157, 767, or 1049;
[0445] and/or
[0446] (ii) any one of the VL comprises a CDR1 having an amino acid sequence at least 65%, at least 70%, at least 75%, at least 80%, at least 85%, at least 90%, at least 95%, at least 99%, or 100% identical to SEQ ID NO: 145 or 1050, a CDR2 having an amino acid sequence at least 65%, at least 70%, at least 75%, at least 80%, at least 85%, at least 90%, at least 95%, at least 99%, or 100% identical to SEQ ID NO: 1051 or an amino acid sequence at least 65%, at least 70%, at least 75%, at least 80%, at least 85%, at least 90%, at least 95%, at least 99%, or 100% identical to amino acid sequence AAS, and a CDR3 having an amino acid sequence at least 65%, at least 70%, at least 75%, at least 80%, at least 85%, at least 90%, at least 95%, at least 99%, or 100% identical to SEQ ID NO: 146 or 764; and any one of the VH comprises a CDR1 having an amino acid sequence at least 65%, at least 70%, at least 75%, at least 80%, at least 85%, at least 90%, at least 95%, at least 99%, or 100% identical to SEQ ID NO: 148 or 1052, a CDR2 having an amino acid sequence at least 65%, at least 70%, at least 75%, at least 80%, at least 85%, at least 90%, at least 95%, at least 99%, or 100% identical to SEQ ID NO: 149 or 1053, and a CDR3 having an amino acid sequence at least 65%, at least 70%, at least 75%, at least 80%, at least 85%, at least 90%, at least 95%, at least 99%, or 100% identical to SEQ ID NO: 150, 765, or 1054; and/or
[0447] (iii) any one of the VL comprises a CDR1 having an amino acid sequence at least 65%, at least 70%, at least 75%, at least 80%, at least 85%, at least 90%, at least 95%, at least 99%, or 100% identical to SEQ ID NO: 172 or 1060, a CDR2 having an amino acid sequence at least 65%, at least 70%, at least 75%, at least 80%, at least 85%, at least 90%, at least 95%, at least 99%, or 100% identical to SEQ ID NO: 1061 or an amino acid sequence at least 65%, at least 70%, at least 75%, at least 80%, at least 85%, at least 90%, at least 95%, at least 99%, or 100% identical to amino acid sequence DAS, and a CDR3 having an amino acid sequence at least 65%, at least 70%, at least 75%, at least 80%, at least 85%, at least 90%, at least 95%, at least 99%, or 100% identical to SEQ ID NO: 173 or 792; and any one of the VH comprises a CDR1 having an amino acid sequence at least 65%, at least 70%, at least 75%, at least 80%, at least 85%, at least 90%, at least 95%, at least 99%, or 100% identical to SEQ ID NO: 175 or 1062, a CDR2 having an amino acid sequence at least 65%, at least 70%, at least 75%, at least 80%, at least 85%, at least 90%, at least 95%, at least 99%, or 100% identical to SEQ ID NO: 176 or 1063, and a CDR3 having an amino acid sequence at least 65%, at least 70%, at least 75%, at least 80%, at least 85%, at least 90%, at least 95%, at least 99%, or 100% identical to SEQ ID NO: 177, 793, or 1064; and
[0448] wherein:
[0449] CL is an immunoglobulin light chain constant region;
[0450] CH1 is an immunoglobulin heavy chain constant region 1; and
[0451] L1-L5 are optional amino acid linkers.

[0452] In some of those aspects, in those antigen binding polypeptides:
[0453] (i) any one of the VL comprises an amino acid sequence that is at least 65%, at least 70%, at least 75%, at least 80%, at least 85%, at least 90%, at least 95%, at least 99%, or 100% identical to SEQ ID NO: 154; and any one of the VH comprises an amino acid sequence that is at least 65%, at least 70%, at least 75%, at least 80%, at least 85%, at least 90%, at least 95%, at least 99%, or 100% identical to SEQ ID NO: 158; and/or
[0454] (ii) any one of the VL comprises an amino acid sequence that is at least 65%, at least 70%, at least 75%, at least 80%, at least 85%, at least 90%, at least 95%, at least 99%, or 100% identical to SEQ ID NO: 147; and any one of the VH comprises an amino acid sequence that is at least 65%, at least 70%, at least 75%, at least 80%, at least 85%, at least 90%, at least 95%, at least 99%, or 100% identical to SEQ ID NO: 151; and/or
[0455] (iii) any one of the VL comprises an amino acid sequence that is at least 65%, at least 70%, at least 75%, at least 80%, at least 85%, at least 90%, at least 95%, at least 99%, or 100% identical to SEQ ID NO: 174; and any one of the VH comprises an amino acid sequence that is at least 65%, at least 70%, at least 75%, at least 80%, at least 85%, at least 90%, at least 95%, at least 99%, or 100% identical to SEQ ID NO: 178.

[0456] In some aspects, also provided herein are antigen binding polypeptides complexes comprising a first polypeptide and a second polypeptide, wherein the first polypeptide has a structure, from amino-terminus to carboxy-terminus, represented by:
[0457] VL1-L1-VL2-L2-VH2-L3-VH1-L4-CL-L5-CH1;
[0458] VL1-L1-VL2-L2-VH2-L3-VH1-L4-CH1-L5-CL;
[0459] VL1-L1-VH2-L2-VL2-L3-VH1-L4-CL-L5-CH1;
[0460] VL1-L1-VH2-L2-VL2-L3-VH1-L4-CH1-L5-CL;
[0461] VH1-L1-VL2-L2-VH2-L3-VL1-L4-CL-L5-CH1;
[0462] VH1-L1-VL2-L2-VH2-L3-VL1-L4-CH1-L5-CL;
[0463] VH1-L1-VH2-L2-VL2-L3-VL1-L4-CL-L5-CH1;
[0464] VH1-L1-VH2-L2-VL2-L3-VL1-L4-CH1-L5-CL;
[0465] VL2-L1-VL1-L2-VH1-L3-VH2-L4-CL-L5-CH1;
[0466] VL2-L1-VL1-L2-VH1-L3-VH2-L4-CH1-L5-CL;
[0467] VL2-L1-VH1-L2-VL1-L3-VH2-L4-CL-L5-CH1;
[0468] VL2-L1-VH1-L2-VL1-L3-VH2-L4-CH1-L5-CL;
[0469] VH2-L1-VL1-L2-VH1-L3-VL2-L4-CL-L5-CH1;
[0470] VH2-L1-VL1-L2-VH1-L3-VL2-L4-CH1-L5-CL;
[0471] VH2-L1-VH1-L2-VL1-L3-VL2-L4-CL-L5-CH1; or
[0472] VH2-L1-VH1-L2-VL1-L3-VL2-L4-CH1-L5-CL;
   wherein the second polypeptide has a structure, from amino-terminus to carboxy-terminus, represented by:
[0473] VL3-L6-VL4-L7-VH4-L8-VH3-L9-CL-L10-CH1;
[0474] VL3-L6-VL4-L7-VH4-L8-VH3-L9-CH1-L10-CL;
[0475] VL3-L6-VH4-L7-VL4-L8-VH3-L9-CL-L10-CH1;
[0476] VL3-L6-VH4-L7-VL4-L8-VH3-L9-CH1-L10-CL;
[0477] VH3-L6-VL4-L7-VH4-L8-VL3-L9-CL-L10-CH1;
[0478] VH3-L6-VL4-L7-VH4-L8-VL3-L9-CH1-L10-CL;
[0479] VH3-L6-VH4-L7-VL4-L8-VL3-L9-CL-L10-CH1;
[0480] VH3-L6-VH4-L7-VL4-L8-VL3-L9-CH1-L10-CL;
[0481] VL4-L6-VL3-L7-VH3-L8-VH4-L9-CL-L10-CH1;
[0482] VL4-L6-VL3-L7-VH3-L8-VH4-L9-CH1-L10-CL;
[0483] VL4-L6-VH3-L7-VL3-L8-VH4-L9-CL-L10-CH1;
[0484] VL4-L6-VH3-L7-VL3-L8-VH4-L9-CH1-L10-CL;
[0485] VH4-L6-VL3-L7-VH3-L8-VL4-L9-CL-L10-CH1;
[0486] VH4-L6-VL3-L7-VH3-L8-VL4-L9-CH1-L10-CL;
[0487] VH4-L6-VH3-L7-VL3-L8-VL4-L9-CL-L10-CH1; or
[0488] VH4-L6-VH3-L7-VL3-L8-VL4-L9-CH1-L10-CL; and
[0489] wherein:
[0490] (i) any one of the VL comprises a CDR1 having an amino acid sequence at least 65%, at least 70%, at least 75%, at least 80%, at least 85%, at least 90%, at least 95%, at least 99%, or 100% identical to SEQ ID NO: 152 or 1045, a CDR2 having an amino acid sequence at least 65%, at least 70%, at least 75%, at least 80%, at least 85%, at least 90%, at least 95%, at least 99%, or 100% identical to SEQ ID NO: 1046 or an amino acid sequence at least 65%, at least 70%, at least 75%, at least 80%, at least 85%, at least 90%, at least 95%, at least 99%, or 100% identical to amino acid sequence GAS, and a CDR3 having an amino acid sequence at least 65%, at least 70%, at least 75%, at least 80%, at least 85%, at least 90%, at least 95%, at least 99%, or 100% identical to SEQ ID NO: 153 or 766; and any one of the VH comprises a CDR1 having an amino acid sequence at least 65%, at least 70%, at least 75%, at least 80%, at least 85%, at least 90%, at least 95%, at least 99%, or 100% identical to SEQ ID NO: 155 or 1047, a CDR2 having an amino acid sequence at least 65%, at least 70%, at least 75%, at least 80%, at least 85%, at least 90%, at least 95%, at least 99%, or 100% identical to SEQ ID NO: 156 or 1048, and a CDR3 having an amino acid sequence at least 65%, at least 70%, at least 75%, at least 80%, at least 85%, at least 90%, at least 95%, at least 99%, or 100% identical to SEQ ID NO: 157, 767, or 1049;
[0491] and/or
[0492] (ii) any one of the VL comprises a CDR1 having an amino acid sequence at least 65%, at least 70%, at least 75%, at least 80%, at least 85%, at least 90%, at least 95%, at least 99%, or 100% identical to SEQ ID NO: 145 or 1050, a CDR2 having an amino acid sequence at least 65%, at least 70%, at least 75%, at least 80%, at least 85%, at least 90%, at least 95%, at least 99%, or 100% identical to SEQ ID NO: 1051 or an amino acid sequence at least 65%, at least 70%, at least 75%, at least 80%, at least 85%, at least 90%, at least 95%, at least 99%, or 100% identical to amino acid sequence AAS, and a CDR3 having an amino acid sequence at least 65%, at least 70%, at least 75%, at least 80%, at least 85%, at least 90%, at least 95%, at least 99%, or 100% identical to SEQ ID NO: 146 or 764; and any one of the VH comprises a CDR1 having an amino acid sequence at least 65%, at least 70%, at least 75%, at least 80%, at least 85%, at least 90%, at least 95%, at least 99%, or 100% identical to SEQ ID NO: 148 or 1052, a CDR2 having an amino acid sequence at least 65%, at least 70%, at least 75%, at least 80%, at least 85%, at least 90%, at least 95%, at least 99%, or 100% identical to SEQ ID NO: 149 or 1053, and a CDR3 having an amino acid sequence at least 65%, at least 70%, at least 75%, at least 80%, at least 85%, at least 90%, at least 95%, at least 99%, or 100% identical to SEQ ID NO: 150, 765, or 1054; and/or
[0493] (iii) any one of the VL comprises a CDR1 having an amino acid sequence at least 65%, at least 70%, at least 75%, at least 80%, at least 85%, at least 90%, at least 95%, at least 99%, or 100% identical to SEQ ID NO: 172 or 1060, a CDR2 having an amino acid sequence at least 65%, at least 70%, at least 75%, at least 80%, at least 85%, at least 90%, at least 95%, at least 99%, or 100% identical to SEQ ID NO: 1061 or an amino acid sequence at least 65%, at least 70%, at least 75%, at least 80%, at least 85%, at least 90%, at least 95%, at least 99%, or 100% identical to amino acid sequence DAS, and a CDR3 having an amino acid sequence at least 65%, at least 70%, at least 75%, at least 80%, at least 85%, at least 90%, at least 95%, at least 99%, or 100% identical to SEQ ID NO: 173 or 792; and any one of the VH comprises a CDR1 having an amino acid sequence at least 65%, at least 70%, at least 75%, at least 80%, at least 85%, at least 90%, at least 95%, at least 99%, or 100% identical to SEQ ID NO: 175 or 1062, a CDR2 having an amino acid sequence at least 65%, at least 70%, at least 75%, at least 80%, at least 85%, at least 90%, at least 95%, at least 99%, or 100% identical to SEQ ID NO: 176 or 1063, and a CDR3 having an amino acid sequence at least 65%, at least 70%, at least 75%, at least 80%, at least 85%, at least 90%, at least 95%, at least 99%, or 100% identical to SEQ ID NO: 177, 793, or 1064; and
[0494] wherein:
[0495] CL is an immunoglobulin light chain constant region;
[0496] CH1 is an immunoglobulin heavy chain constant region 1; and
[0497] L1-L10 are optional amino acid linkers.

[0498] In some of those aspects, in those antigen binding polypeptides complexes:
[0499] (i) any one of the VL comprises an amino acid sequence that is at least 65%, at least 70%, at least 75%, at least 80%, at least 85%, at least 90%, at least 95%, at least 99%, or 100% identical to SEQ ID NO: 154; and any one of the VH comprises an amino acid sequence that is at least 65%, at least 70%, at least 75%, at least 80%, at least 85%, at least 90%, at least 95%, at least 99%, or 100% identical to SEQ ID NO: 158; and/or
[0500] (ii) any one of the VL comprises an amino acid sequence that is at least 65%, at least 70%, at least 75%, at least 80%, at least 85%, at least 90%, at least 95%, at least 99%, or 100% identical to SEQ ID NO: 147; and any one of the VH comprises an amino acid sequence that is at least 65%, at least 70%, at least 75%, at least 80%, at least 85%, at least 90%, at least 95%, at least 99%, or 100% identical to SEQ ID NO: 151; and/or
[0501] (iii) any one of the VL comprises an amino acid sequence that is at least 65%, at least 70%, at least 75%, at least 80%, at least 85%, at least 90%, at least 95%, at least 99%, or 100% identical to SEQ ID NO: 174; and any one of the VH comprises an amino acid sequence that is at least 65%, at least 70%, at least 75%, at least 80%, at least 85%, at least 90%, at least 95%, at least 99%, or 100% identical to SEQ ID NO: 178.

[0502] In some of the aspects above, the antigen binding polypeptides or one or both of the antigen binding polypeptides comprised in the antigen binding polypeptide complexes disclosed herein further comprises an Fc region at the carboxy-terminus. In some aspects, the Fc region comprises an immunoglobulin heavy chain constant region 2 (CH2) and/or an immunoglobulin heavy chain constant region 3 (CH3). In some aspects, the Fc region further comprises an immunoglobulin hinge. In some aspects, the Fc region comprises an amino acid sequence that is at least 65%, at least 70%, at least 75%, at least 80%, at least 85%, at least 90%, at least 95%, at least 99%, or 100% identical to any one of SEQ ID NOs: 376-380. In some aspects, the Fc region comprises one or more half-life extension amino acid substitutions. In some aspects, the one or more half-life extension amino acid substitutions comprise one or more of amino acid substitutions M428L, N434A, N434S, L234F, L235E, P331S, M252Y, S254T, or T256E, or equivalent thereof, based on the EU numbering scheme. In some aspects, the one or more half-life extension amino acid substitutions comprise amino acid substitutions:
[0503] (i) L234A and L235A (LA);
[0504] (ii) M428L and N434S (LS);
[0505] (iii) L234F and L235E;
[0506] (iv) L234F, L235E, and P331S (TM); and/or
[0507] (v) M252Y, S254T, and T256E (YTE);
[0508] or equivalent thereof, based on the EU numbering scheme.

[0509] In some aspects, the Fc region comprises at least one knob-into-hole modification or Fc effector function knockout mutation. In some aspects, the antigen binding polypeptide or the antigen binding polypeptide complex is an IgG1 or IgG4 antibody or antigen binding fragment thereof and the knob-into-hole modification comprises:
[0510] (i) knob substitutions of S354C and T366W;
[0511] (ii) hole substitutions of Y349C, T366S, L368A and Y407V;
[0512] (iii) a combination thereof;
[0513] or equivalent thereof, based on the EU numbering scheme.

[0514] In some aspects, the antigen binding polypeptide or the antigen binding polypeptide complex is an IgG1 or IgG4 antibody or antigen binding fragment thereof and the Fc effector function knockout mutation is L234A, L235A, P239A, or equivalent thereof, or a combination thereof, based on the EU numbering scheme.

[0515] In some aspects, any one of the optional linkers each independently have a length of from 0 amino acids to about 50 amino acids. In some aspects, any one of the optional linkers each independently have a length of from about 5 amino acids to about 40 amino acids. In some aspects, one or more of the optional linkers each independently are non-immunogenic. In some aspects, one or more of the optional linkers each independently do not contain a consensus T cell epitope. In some aspects, one or more of the optional linkers each independently comprises an amino acid sequence of G or A; or an amino acid sequence at least 65%, at least 70%, at least 75%, at least 80%, at least 85%, at least 90%, at least 95%, at least 99%, or 100% identical to an amino acid sequence of GSS or ASG; or an amino acid sequence at least 65%, at least 70%, at least 75%, at least 80%, at least 85%, at least 90%, at least 95%, at least 99%, or 100% identical to any one of SEQ ID NOs: 333-373 or 967-971. In some aspects, one or more of the optional linkers each independently comprises an amino acid sequence at least 65%, at least 70%, at least 75%, at least 80%, at least 85%, at least 90%, at least 95%, at least 99%, or 100% identical to any one of SEQ ID NOs: 333-345 or 967-971.

[0516] In some aspects, any one of the antigen binding polypeptides, antigen binding polypeptide complexes, antibodies or antigen binding fragments thereof, polypeptides, or anti-SARS-CoV-2 virus antibodies or an antigen binding fragments thereof comprise one or more CL comprising an amino acid sequence that is at least 65%, at least 70%, at least 75%, at least 80%, at least 85%, at least 90%, at least 95%, at least 99%, or 100% identical to any one of SEQ ID NOs: 374, 637, or 1092-1095.

[0517] In some aspects, any one of the antigen binding polypeptides, antigen binding polypeptide complexes, antibodies or antigen binding fragments thereof, polypeptides, or anti-SARS-CoV-2 virus antibodies or an antigen binding fragments thereof comprise one or more CH1 comprising an amino acid sequence that is at least 65%, at least 70%, at least 75%, at least 80%, at least 85%, at least 90%, at least 95%, at least 99%, or 100% identical to any one of SEQ ID NOs: 375, 634, 1070, 1071, or 1086-1091. In some aspects, any one of the antigen binding polypeptides, antigen binding polypeptide complexes, antibodies or antigen binding fragments thereof, polypeptides, or anti-SARS-CoV-2 virus antibodies or an antigen binding fragments thereof comprise one or more CH2 comprising an amino acid sequence that is at least 65%, at least 70%, at least 75%, at least 80%, at least 85%, at least 90%, at least 95%, at least 99%, or 100% identical to any one of SEQ ID NOs: 1075-1078.

[0518] In some aspects, any one of the antigen binding polypeptides, antigen binding polypeptide complexes, antibodies or antigen binding fragments thereof, polypeptides, or anti-SARS-CoV-2 virus antibodies or an antigen binding fragments thereof comprise one or more CH3 comprising an amino acid sequence that is at least 65%, at least 70%, at least 75%, at least 80%, at least 85%, at least 90%, at least 95%, at least 99%, or 100% identical to any one of SEQ ID NOs: 1079-1085.

[0519] In some aspects, the antigen binding polypeptide or antigen binding polypeptide complex, the antibody or antigen binding fragment thereof, the polypeptide, the anti-SARS-CoV-2 virus antibody or antigen binding fragment thereof, comprises one or more immunoglobulin hinge, and the one or more immunoglobulin hinge comprises an amino acid sequence that is at least 65%, at least 70%, at least 75%, at least 80%, at least 85%, at least 90%, at least 95%, at least 99%, or 100% identical to any one of SEQ ID NOs: 635, 636, 1072, 1073, or 1074.

[0520] Also provided herein is an antigen binding polypeptide having a structure, from amino-terminus to carboxy-terminus, represented by: VL1-L1-CL-L2-VL2-L3-VH2-L4-VH1-L5-CH1; VL1-L1-CL-L2-VH2-L3-VL2-L4-VH1-L5-CH1; VL1-L1-CH1-L2-VL2-L3-VH2-L4-VH1-L5-CL; VL1-L1-CH1-L2- VH2-L3-VL2-L4-VH1-L5-CL; VH1-L1-CL-L2-VL2-L3-VH2-L4-VL1-L5-CH1; VH1-L1-CL-L2-VH2-L3-VL2-L4-VL1-L5-CH1; VH1-L1-CH1-L2-VL2-L3-VH2-L4-VL1-L5-CL; VH1-L1-CH1-L2-VH2-L3- VL2-L4-VL1-L5-CL; VL2-L1-CL-L2-VL1-L3-VH1-L4-VH2-L5-CH1; VL2-L1-CL-L2-VH1-L3-VL1-L4-VH2-L5-CH1; VL2-L1-CH1-L2-VL1-L3-VH1-L4-VH2-L5-CL; VL2-L1-CH1-L2-VH1-L3-VL1-L4-VH2-L5-CL; VH2-L1-CL-L2-VL1-L3-VH1-L4-VL2-L5-CH1; VH2-L1-CL-L2-VH1-L3-VL1-L4-VL2-L5-CH1; VH2-L1-CH1-L2-VL1-L3-VH1-L4-VL2-L5-CL; or VH2-L1-CH1-L2-VH1-L3-VL1-L4-VL2-L5-CL; wherein: VL1 is a first immunoglobulin light chain variable region that specifically binds to (i) a tumor-associated antigen (TAA), (ii) an infectious disease antigen that is not a sarbecovirus antigen, or (iii) an other-pathology antigen; VL2 is a second immunoglobulin light chain variable region that specifically binds to (i) a tumor-associated antigen (TAA), (ii) an infectious disease antigen that is not a sarbecovirus antigen, or (iii) an other-pathology antigen; VH1 is a first immunoglobulin heavy chain variable region that specifically binds to (i) a tumor-associated antigen (TAA), (ii) an infectious disease antigen that is not a sarbecovirus antigen, or (iii) an other-pathology antigen; VH2 is a second immunoglobulin heavy chain variable region that specifically binds to (i) a tumor-associated antigen (TAA), (ii) an infectious disease antigen that is not a sarbecovirus antigen, or (iii) an other-pathology antigen; CL is an immunoglobulin light chain constant region; CH1 is an immunoglobulin heavy chain constant region 1; and L1-L5 are optional amino acid linkers.

[0521] Also provided herein is an antigen binding polypeptide having a structure, from amino-terminus to carboxy-terminus, represented by: VL1-CL-L1-VL2-L2-VH2-L3-VH1-CH1; VL1-CL-L1-VH2-L2-VL2-L3-VH1-CH1; VL1-CH1-L1-VL2-L2-VH2-L3-VH1-CL; VL1-CH1-L1-VH2-L2-VL2-L3-VH1-CL; VH1-CL-L1-VL2-L2-VH2-L3-VL1-CH1; VH1-CL-L1-VH2-L2-VL2-L3-VL1-CH1; VH1-CH1-L1-VL2-L2-VH2-L3-VL1-CL; VH1-CH1-L1-VH2-L2-VL2-L3-VL1-CL; VL2-CL-L1-VL1-L2-VH1-L3-VH2-CH1; VL2-CL-L1-VH1-L2-VL1-L3-VH2-CH1; VL2-CH1-L1-VL1-L2-VH1-L3-VH2-CL; VL2-CH1-L1-VH1-L2-VL1-L3-VH2-CL; VH2-CL-L1-VL1-L2-VH1-L3-VL2-CH1; VH2-CL-L1-VH1-L2-VL1-L3-VL2-CH1; VH2-CH1-L1-VL1-L2-VH1-L3-VL2-CL; or VH2-CH1-L1-VH1-L2-VL1-L3-VL2-CL; wherein: VL1 is a first immunoglobulin light chain variable region that specifically binds to (i) a tumor-associated antigen (TAA), (ii) an infectious disease antigen that is not a sarbecovirus antigen, or (iii) an other-pathology antigen; VL2 is a second immunoglobulin light chain variable region that specifically binds to (i) a tumor-associated antigen (TAA), (ii) an infectious disease antigen that is not a sarbecovirus antigen, or (iii) an other-pathology antigen; VH1 is a first immunoglobulin heavy chain variable region that specifically binds to (i) a tumor-associated antigen (TAA), (ii) an infectious disease antigen that is not a sarbecovirus antigen, or (iii) an other-pathology antigen; VH2 is a second immunoglobulin heavy chain variable region that specifically binds to (i) a tumor-associated antigen (TAA), (ii) an infectious disease antigen that is not a sarbecovirus antigen, or (iii) an other-pathology antigen; CL is an immunoglobulin light chain constant region; CH1 is an immunoglobulin heavy chain constant region 1; and L1-L3 are amino acid linkers.

[0522] Also provided herein is an antigen binding polypeptide having a structure, from amino-terminus to carboxy-terminus, represented by: VL1-L1-VH1-L2-VL2-L3-CL-L4-VH2-L5-CH1; VL1-L1-VH1-L2-VL2-L3-CH1-L4-VH2-L5-CL; VL1-L1-VH1-L2-VH2-L3-CL-L4-VL2-L5-CH1; VL1-L1-VH1-L2-VH2-L3-CH1-L4-VL2-L5-CL; VL1-L1-VL2-L2-VH1-L3-CL-L4-VH2-L5-CH1; VL1-L1-VL2-L2-VH1-L3-CH1-L4-VH2-L5-CL; VL1-L1-VH2-L2-VH1-L3-CL-L4-VL2-L5-CH1; VL1-L1-VH2-L2-VH1-L3-CH1-L4-VL2-L5-CL; VH1-L1-VL1-L2-VL2-L3-CL-L4-VH2-L5-CH1; VH1-L1-VL1-L2-VL2-L3-CH1-L4-VH2-L5-CL; VH1-L1-VL1-L2-VH2-L3-CL-L4-VL2-L5-CH1; VH1-L1-VL1-L2-VH2-L3-CH1-L4-VL2-L5-CL; VH1-L1-VL2-L2-VL1-L3-CL-L4-VH2-L5-CH1; VH1-L1-VL2-L2-VL1-L3-CH1-L4-VH2-L5-CL; VH1-L1-VH2-L2-VL1-L3-CL-L4-VL2-L5-CH1; VH1-L1-VH2-L2-VL1-L3-CH1-L4-VL2-L5- CL; VL2-L1-VL1-L2-VH2-L3-CL-L4-VH1-L5-CH1; VL2-L1-VL1-L2-VH2-L3-CH1-L4-VH1-L5-CL; VL2-L1-VH1-L2-VH2-L3-CL-L4-VL1-L5-CH1; VL2-L1-VH1-L2-VH2-L3-CH1-L4-VL1-L5-CL; VL2-L1-VH2-L2-VL1-L3-CL-L4-VH1-L5-CH1; VL2-L1-VH2-L2-VL1-L3-CH1-L4-VH1-L5-CL; VL2-L1-VH2-L2-VH1-L3-CL-L4-VL1-L5-CH1; VL2-L1-VH2-L2-VH1-L3-CH1-L4-VL1-L5-CL; VH2-L1-VL1-L2-VL2-L3-CL-L4-VH1-L5-CH1; VH2-L1-VL1-L2-VL2-L3-CH1-L4-VH1-L5-CL; VH2-L1-VH1-L2-VL2-L3-CL-L4-VL1-L5-CH1; VH2-L1-VH1-L2-VL2-L3-CH1-L4-VL1-L5-CL; VH2-L1-VL2-L2-VL1-L3-CL-LA-VH1-L5-CH1; VH2-L1-VL2-L2-VL1-L3-CH1-L4-VH1-L5-CL; VH2-L1-VL2-L2-VH1-L3-CL-L4- VL1-L5-CH1; or VH2-L1-VL2-L2-VH1-L3-CH1-L4-VL1-L5-CL; wherein: VL1 is a first immunoglobulin light chain variable region that specifically binds to (i) a tumor-associated antigen (TAA), (ii) an infectious disease antigen that is not a sarbecovirus antigen, or (iii) an other-pathology antigen; VL2 is a second immunoglobulin light chain variable region that specifically binds to a (i) a tumor-associated antigen (TAA), (ii) an infectious disease antigen that is not a sarbecovirus antigen, or (iii) an other-pathology antigen; VH1 is a first immunoglobulin heavy chain variable region that specifically binds to (i) a tumor-associated antigen (TAA), (ii) an infectious disease antigen that is not a sarbecovirus antigen, or (iii) an other-pathology antigen; VH2 is a second immunoglobulin heavy chain variable region that specifically binds to (i) a tumor-associated antigen (TAA), (ii) an infectious disease antigen that is not a sarbecovirus antigen, or (iii) an other-pathology antigen; CL is an immunoglobulin light chain constant region; CH1 is an immunoglobulin heavy chain constant region 1; and L1-L5 are optional amino acid linkers.

[0523] Also provided herein is an antigen binding polypeptide having a structure, from amino-terminus to carboxy-terminus, represented by: VL1-L1-CL-L2-VH1-L3-CH1-L4-VL2-L5-VH2; VL1-L1-CL-L2-VH1-L3-CH1-L4-VH2-L5-VL2; VL1-L1-CL-L2-VL2-L3-CH1-L4-VH1-L5-VH2; VL1-L1-CL-L2-VH2-L3-CH1-L4-VH1-L5-VL2; VL1-L1-CH1-L2-VH1-L3-CL-L4-VL2-L5-VH2; VL1-L1-CH1-L2-VH1-L3-CL-L4-VH2-L5-VL2; VL1-L1-CH1-L2-VL2-L3-CL-L4-VH1-L5-VH2; VL1-L1-CH1-L2-VH2-L3-CL- L4-VH1-L5-VL2; VH1-L1-CL-L2-VL1-L3-CH1-L4-VL2-L5-VH2; VH1-L1-CL-L2-VL1-L3-CH1-L4-VH2-L5-VL2; VH1-L1-CL-L2-VL2-L3-CH1-L4-VL1-L5-VH2; VH1-L1-CL-L2-VH2-L3-CH1-L4-VL1-L5-VL2; VH1-L1-CH1-L2-VL1-L3-CL-L4-VL2-L5-VH2; VH1-L1-CH1-L2-VL1-L3-CL-L4-VH2-L5-VL2; VH1-L1-CH1-L2-VL2-L3-CL-L4-VL1-L5-VH2; VH1-L1-CH1-L2-VH2-L3-CL-L4-VL1-L5-VL2; VL2-L1-CL-L2-VL1-L3-CH1-L4-VH2-L5-VH1; VL2-L1-CL-L2-VH1-L3-CH1-L4-VH2-L5-VL1; VL2-L1-CL-L2-VH2-L3-CH1-L4-VL1-L5-VH1; VL2-L1-CL-L2-VH2-L3-CH1-L4-VH1-L5-VL1; VL2-L1-CH1-L2-VL1-L3-CL-L4-VH2-L5-VH1; VL2-L1-CH1-L2-VH1-L3-CL-L4-VH2-L5-VL1; VL2-L1-CH1-L2-VH2-L3-CL-L4-VL1-L5-VH1; VL2-L1-CH1-L2-VH2-L3-CL-L4-VH1-L5-VL1; VH2-L1-CL-L2-VL1-L3-CH1-L4-VL2-L5-VH1; VH2-L1-CL-L2-VH1-L3-CH1-L4-VL2-L5-VL1; VH2-L1-CL-L2-VL2-L3-CH1-L4-VL1-L5-VH1; VH2-L1-CL-L2-VL2-L3-CH1-L4-VH1-L5-VL1; VH2-L1-CH1-L2-VL1-L3-CL-L4-VL2-L5-VH1; VH2-L1-CH1-L2-VH1-L3-CL-L4-VL2-L5-VL1; VH2-L1-CH1-L2-VL2-L3-CL-L4-VL1-L5-VH1; or VH2-L1-CH1-L2-VL2-L3-CL-L4-VH1-L5-VL1; wherein: VL1 is a first immunoglobulin light chain variable region that specifically binds to (i) a tumor-associated antigen (TAA), (ii) an infectious disease antigen that is not a sarbecovirus antigen, or (iii) an other-pathology antigen; VL2 is a second immunoglobulin light chain variable region that specifically binds to (i) a tumor-associated antigen (TAA), (ii) an infectious disease antigen that is not a sarbecovirus antigen, or (iii) an other-pathology antigen; VH1 is a first immunoglobulin heavy chain variable region that specifically binds to (i) a tumor-associated antigen (TAA), (ii) an infectious disease antigen that is not a sarbecovirus antigen, or (iii) an other-pathology antigen; VH2 is a second immunoglobulin heavy chain variable region that specifically binds to (i) a tumor-associated antigen (TAA), (ii) an infectious disease antigen that is not a sarbecovirus antigen, or (iii) an other-pathology antigen; CL is an immunoglobulin light chain constant region; CH1 is an immunoglobulin heavy chain constant region 1; and L1-L5 are optional amino acid linkers.

[0524] Also provided herein is an antigen binding polypeptide having a structure, from amino-terminus to carboxy-terminus, represented by: VL1-L1-CL-L2-VH1-L3-CH1; VL1-L1-CH1-L2-VH1-L3-CL; VH1-L1-CL-L2-VL1-L3-CH1; or VH1-L1-CH1-L2-VL1-L3-CL; wherein: VL1 is an immunoglobulin light chain variable region that specifically binds to (i) a tumor-associated antigen (TAA), (ii) an infectious disease antigen that is not a sarbecovirus antigen, or (iii) an other-pathology antigen; VH1 is an immunoglobulin heavy chain variable region that specifically binds to a (i) a tumor-associated antigen (TAA), (ii) an infectious disease antigen that is not a sarbecovirus antigen, or (iii) an other-pathology antigen; CL is an immunoglobulin light chain constant region; CH1 is an immunoglobulin heavy chain constant region 1; and L1-L3 are optional amino acid linkers.

[0525] Also provided herein is an antigen binding polypeptide having a structure, from amino-terminus to carboxy-terminus, represented by: VL1-L1-VH1-L2-CL; or VH1-L1-VL1-L2-CL; wherein: VL1 is an immunoglobulin light chain variable region that specifically binds to (i) a tumor-associated antigen (TAA), (ii) an infectious disease antigen that is not a sarbecovirus antigen, or (iii) an other-pathology antigen; VH1 is an immunoglobulin heavy chain variable region that specifically binds to (i) a tumor-associated antigen (TAA), (ii) an infectious disease antigen that is not a sarbecovirus antigen, or (iii) an other-pathology antigen; CL is an immunoglobulin light chain constant region; and L1-L2 are optional amino acid linkers.

[0526] Also provided herein is an antigen binding polypeptide having a structure, from amino-terminus to carboxy-terminus, represented by: VL1-L1-VH1-L2-CH1; or VH1-L1-VL1-L2-CH1; wherein: VL1 is an immunoglobulin light chain variable region that specifically binds to (i) a tumor-associated antigen (TAA), (ii) an infectious disease antigen that is not a sarbecovirus antigen, or (iii) an other-pathology antigen; VH1 is an immunoglobulin heavy chain variable region that specifically binds to (i) a tumor-associated antigen (TAA), (ii) an infectious disease antigen that is not a sarbecovirus antigen, or (iii) an other-pathology antigen; CH1 is an immunoglobulin heavy chain constant region 1; and L1-L2 are optional amino acid linkers.

[0527] Also provided herein is an antigen binding polypeptide having a structure, from amino-terminus to carboxy-terminus, represented by: VL1-L1-VL2-L2-CH1; or VL2-L1-VL1-L2-CH1; wherein: VL1 is a first immunoglobulin light chain variable region that specifically binds to (i) a tumor-associated antigen (TAA), (ii) an infectious disease antigen that is not a sarbecovirus antigen, or (iii) an other-pathology antigen; VL2 is a second immunoglobulin light chain variable region that specifically binds to (i) a tumor-associated antigen (TAA), (ii) an infectious disease antigen that is not a sarbecovirus antigen, or (iii) an other-pathology antigen; CH1 is an immunoglobulin heavy chain constant region 1; and L1-L2 are optional amino acid linkers.

[0528] Also provided herein is an antigen binding polypeptide having a structure, from amino-terminus to carboxy-terminus, represented by: VH1-L1-VH2-L2-CL; or VH2-L1-VH1-L2-CL; wherein: VH1 is a first immunoglobulin heavy chain variable region that specifically binds to (i) a tumor-associated antigen (TAA), (ii) an infectious disease antigen that is not a sarbecovirus antigen, or (iii) an other-pathology antigen; VH2 is a second immunoglobulin heavy chain variable region that specifically binds to (i) a tumor-associated antigen (TAA), (ii) an infectious disease antigen that is not a sarbecovirus antigen, or (iii) an other-pathology antigen; CL is an immunoglobulin light chain constant region; and L1-L2 are optional amino acid linkers.

[0529] Also provided herein is an antigen binding polypeptide having a structure, from amino-terminus to carboxy-terminus, represented by: VL1-L1-VL2-L2-VL3-L3-CH1; VL1-L1-VL3-L2-VL2-L3-CH1; VL2-L1-VL1-L2-VL3-L3-CH1; VL2-L1-VL3-L2-VL1-L3-CH1; VL3-L1-VL1-L2-VL2-L3-CH1; or VL3-L1-VL2-L2-VL1-L3-CH1; wherein: VL1 is a first immunoglobulin light chain variable region that specifically binds to (i) a tumor-associated antigen (TAA), (ii) an infectious disease antigen that is not a sarbecovirus antigen, or (iii) an other-pathology antigen; VL2 is a second immunoglobulin light chain variable region that specifically binds to (i) a tumor-associated antigen (TAA), (ii) an infectious disease antigen that is not a sarbecovirus antigen, or (iii) an other-pathology antigen; VL3 is a third immunoglobulin light chain variable region that specifically binds to (i) a tumor-associated antigen (TAA), (ii) an infectious disease antigen that is not a sarbecovirus antigen, or (iii) an other-pathology antigen; CH1 is an immunoglobulin heavy chain constant region 1; and L1-L3 are optional amino acid linkers.

[0530] Also provided herein is an antigen binding polypeptide having a structure, from amino-terminus to carboxy-terminus, represented by: VH1-L1-VH2-L2-VH3-L3-CL; VH1-L1-VH3-L2-VH2-L3-CL; VH2-L1-VH1-L2-VH3-L3-CL; VH2-L1-VH3-L2-VH1-L3-CL; VH3-L1-VH1-L2-VH2-L3-CL; or VH3-L1-VH2-L2-VH1-L3-CL; wherein: VH1 is a first immunoglobulin heavy chain variable region that specifically binds to (i) a tumor-associated antigen (TAA), (ii) an infectious disease antigen that is not a sarbecovirus antigen, or (iii) an other-pathology antigen; VH2 is a second immunoglobulin heavy chain variable region that specifically binds to (i) a tumor-associated antigen (TAA), (ii) an infectious disease antigen that is not a sarbecovirus antigen, or (iii) an other-pathology antigen; VH3 is a third immunoglobulin heavy chain variable region that specifically binds to (i) a tumor-associated antigen (TAA), (ii) an infectious disease antigen that is not a sarbecovirus antigen, or (iii) an other-pathology antigen; CL is an immunoglobulin light chain constant region; and L1-L3 are optional amino acid linkers.

[0531] In some aspects, the TAA is selected from the group consisting of 5′-nucleotidase, 5T4, A2AR, activin receptor-like kinase 1, adenocarcinoma antigen, ADRB3, AFP, AKAP-4, ALK, alpha-fetoprotein, androgen receptor, angiopoietin 2, AOC3, APRIL, ATPDase, AXL, B7-4, B7DC, B7H1, B7H2, B7H3, B7H4, B7H5, B7H6, B7H7, B7RP1, BAFF, BAFFR, BCMA, bcr-abl, BlyS, BORIS, BST2, BTK, BTLA, C3, C5, C5a, C5a receptor, CA-125, CAIX, CanAg (a glycoform of MUC1), CCL11, CCL15, CCL17, CCL19, CCL2, CCL20, CCL21, CCL25, CCL3, CCL4, CCL5, CCL7, CCL8, CCR2, CCR3, CCR4, CCR5, CD11, CD11a, CD123, CD125, CD133, CD134, CD137, CD137L, CD147, CD15, CD154, CD160, CD16A, CD171, CD179a, CD18, CD184, CD19, CD2, CD20, CD200, CD22, CD221, CD23, CD24, CD242, CD25, CD27, CD272, CD276, CD278, CD279, CD28, CD3, CD30, CD300LF, CD319, CD33, CD37, CD38, CD39, CD38, CD4, CD40, CD40L, CD41, CD44v6, CD45, CD47, CD49B, CD5, CD51, CD52, CD54, CD56, CD6, CD62L, CD7, CD70, CD72, CD74, CD79a, CD79b, CD80, CD86, CD97, CEA, CEACAM5, claudin 18 isoform 2, CLDN6, CLEC12A, CLEC9, CLEC91, CLL-1, cMet, coagulation factor III, CRTH2, CS1, CSF-1, CSF1R, CSF-2, CSF-3, CTGF, CTLA4, CXCL1, CXCL12, CXCL13, CXCL2, CXCL4, CXCR3, CXORF61, CyclinB1, CYP1B1, dendritic cell-associated lectin 2, DLL3, DLL4, DNGR-1, DR5, E7, E-cadherin, EGFL7, EGFR, EGFRVIII, ELF2M, EMR2, endoglin, ENTPD1, EpCAM, EphA2, EPHA3, ephrin receptor A3, EphrinB2, episialin, ERBB2 (Her2/neu), ERBB3, ERG (TMPRSS2-ETS fusion gene), ETV6-AML, FAP, FCAR, FCER1, FCER1A, FCER2, FCRL5, FGF 23, FGFR, FGFR2, fibronectin extra domain-B, FLAP, FLT3, folate hydrolase, folate receptor 1, folate receptor alpha, folate receptor beta, FOLH1, Fos-related antigen1, Frizzled receptor, Fucosyl GM1, GD2, GD3, gelatinase B, Gi24, GITR, GITRL, GloboH, Glutamate carboxypeptidase II, glypican 3, GM3, GP100, GPC1, GPC2, GPC3, gplOO, GPNMB, GPR20, GPR5, GPRC5D, growth differentiation factor 8, GUCY2C, HAVCR1, HER1, HER2, HER3, HGF, HGFR, HHLA2, histone complex, HLA-DR, HMGB1, HMWMAA, HPVE6, hTERT, human telomerase reverse transcriptase, HVEM, ICAM-1, ICOS, ICOSL, IDO, IFNa, IgE, IGF-1, IGF1R, IGF-2, IGF-I receptor, IGLL1, IL1, IL10), IL12, IL13, IL13Ra2, IL-13Ra2, IL13Ra1, IL15, IL17, IL-17A, IL-17AF, IL-17F, IL17Rb, IL18, IL1B, IL1F10, IL-1α, IL-1β, IL2, IL-20, IL22, IL23, IL-23A, IL25, IL2Rbeta, IL-3 receptor, IL-31 receptor A, IL33, IL35, IL4, IL4Ra, IL5, IL5R, IL6, IL7, IL7Ra, IL8, IL9, IL9R, IL1A, IL-11Ra, integrin α4, integrin α4 β7, integrin α5β1, integrin αIIbβ3, integrin αvβ3, integrin β7, interleukin 36 receptor IL1RAP, interleukin 36 receptor IL1RL2, intestinal carboxy lesterase, ITGB4, ITK, KIR, KIR2D, KIT, LAG3, LAGE-1a, LAIR1, LAMP1, LCK, legumain, leptin, LewisY, LILRA2, LIV-1, LMP2, LOXL2, LPFS2, LRRC15, LY6K, LY75, LYPD3, MAD-CT-1, MAD-CT-2, MAGEA1, MAGE-A1, MCAM, MCP-1, MelanA/MART1, mesothelin, MHC classII, MIF, ML-IAP, MS4A1, MST1R (RON), MUC1, MUC-1, MUC16, MUC-16, MUC5AC, muthsp70)-2, MYCN, NA17, NCA-90) granulocyte antigen, NCAM, NCR3LG1, nectin-4, NGNA ganglioside, NKG2A, NKG2D, NKp46, Notch 1, Notch receptor, NRP1, NTPDase-1, NY-BR-1, NY-ESO-1, o-acetyl-GD2, OR51E2, OX40), OX40L, OY-TES1, p53, p53mutant, PANX3, PAP, PAX3, PAX5, PCDC1, PCDP1, PCTA-1/Galectin8, PD-1, PDGFRA, PDGFR-beta, PD-L1, PD-L2, phosphate-sodium co-transporter, phosphatidylserine, PLAC1, polysialic acid, PROM1, prostase, prostein, PRSS21, PSCA, PSMA, PTK7, RAGE-1, RANKL, Ras mutant, rhIL1O, RhoC, root plate-specific spondin 3, ROR1, ROR2, RTN4, RU1, RU2, S152, sarcoma translocation breakpoints, SART3, scatter factor receptor kinase, SDC1, SIRPalpha, SISP1, SLAMF7, SLC, sLe, SLITRK6, spermprotein17, SPG64, sphingosine-1-phosphate, SSEA-4, SSX2, ST2, STEAP1, STEAP2, surviving and telomerase, Syk kinase, T14, TACI, TAG72, TARP, T-cell receptor, TCRβ, TDO, TEM1/CD248, TEM7R, tenascin C, TGFBETA, TGF-β1, TGF-β2, TGS5, the extracellular portion of the APRIL protein, Tie2, TIGIT, TIM3, TLR, TLR2, TLR4, TLR5, TLR9, TMEF1, TnAg, TNF, TNFa, TNFR superfamily member 4, TNFRSF7, Tp55, TRAC, TRAIL-R1, TRAIL-R2, TRAP, TREM1, TROP2, TRP-2, TSHR, TSLP, TSLPR, tumor antigen CTAA16.88, TWEAK, tyrosinase, TYRP1 glycoprotein 75, UPK2, VAP-1, VEGF, VEGFA, VEGFR-1, VEGFR2, vimentin, VISTA, Vstm3, WTI, WUCAM, and XAGE1.

[0532] In some aspects, and in any one of the formulas depicted herein, any one or more of (i) VL1 and VH1, (ii) VL2 and VH2, and (iii) VL3 and VH3, comprise a light chain complementarity determining region 1 (LCDR1), LCDR2, and/or LCDR3, and a heavy chain complementarity determining region 1 (HCDR1). HCDR2, and/or HCDR3 of an antibody selected from the group consisting of losatuxizumab vedotin, utomilumab, urelumab, oleclumab, naptumomab estafenatox, ascrinvacumab, pintumomab, tacatuzumab tetraxetan, nesvacumab, vanucizumab, timolumab, vapaliximab, vepalimomab, cnapotamab vedotin, ianalumab, belimumab, tabalumab, tibulizumab, belantamab mafodotin, teclistamab, teclistamab, detumomab, nacolomab tafenatox, eculizumab, lendalizumab, pexelizumab, pozelimab, ravulizumab, tesidolumab, vilobclimab, abagovomab, igovomab, oregovomab, sofituzumab vedotin, cantuzumab mertansine, cantuzuma bravtansine, girentuximab, altumomab pentetate, arcitumomab, besilesomab, bertilimumab, plozalizumab, mogamulizumab, leronlimab, PRO140), rovelizumab, rovelizumab, talacotuzumab, benralizumab, tavolimab, vonlerolizumab, gavilimomab, ziralimumab, fanolesomab, ipilimumab, ruplizumab, toralizumab, dapirolizumab pegol, toralizumab, dapirolizumab pegol, ruplizumab, blinatumomab, inebilizumab, loncastuximab tesirine, SGN-CD19A, tafasitamab, taplitumomab paptox, XMAB-5574, Budoprutug, Obexelimab, duvortuxizumab, englumafusp alfa, Emfizatamab, zeripatamig, siplizumab, blontuvetmab, FBTA05, ibritumomab tiuxetan, obinutuzumab, ocaratuzumab, ocrelizumab, ofatumumab, rituximab, tositumomab, ublituximab, veltuzumab, divozilimab, cramkafusp alfa, ripertamab, zuberitamab, glofitamab, nofetumomab merpentan, samalizumab, imvotamab, odronextamab, plamotamab, bectumomab, inotuzumab ozogamicin, moxctumomab pasudotox, pinatuzumab vedotin, gomiliximab, lumiliximab, inolimomab, inolimomab, daclizumab, camidanluma btesirine, basiliximab, varlilumab, omburtamab, enoblituzumab, vopratelimab, lulizumabpegol, TGN1412, muromonab-CD3, otelixizumab, teplizumab, visilizumab, epcoritamab, epcoritamab, brentuximab vedotin, iratumumab, azintuxizumab vedotin, gemtuzumab ozogamicin, lintuzumab, vadastuximab talirine, naratuximab emtansine, otlertuzumab, lilotomab satetraxetan, tetulomab, daratumumab, isatuximab, foralumab, mosunetuzumab, mosunetuzumab, cedelizumab, ibalizumab, keliximab, priliximab, tregalizumab, zanolimumab, blesclumab, iscalimab, lucatumumab, ravagalimab, selicrelumab, tencliximab, vanalimab, abciximab, bivatuzumab, iomab-B, telimomab aritox, zolimomab aritox, abituzumab, intetumumab, alemtuzumab, tamtuvetmab, lorvotuzumab mertansine, itolizumab, cusatuzumab, vorsetuzumab mafodotin, milatuzumab, iladatuzumab vedotin, polatuzumab vedotin, galiximab, cibisatamab, zolbctuximab, naxitamab, tisotumab vedotin, olendalizumab, pamrevlumab, lacnotuzumab, cabiralizumab, emactuzumab, axatilimab, gimsilumab, lenzilumab, namilumab, tremelimumab, ulocuplumab, tepoditamab, rovalpituzumab tesirine, tarlatamab, demcizumab, navicixizumab, drozitumab, parsatuzumab, depatuxizumab mafodotin, modotuximab, carotuximab, adecatumumab, adecatumumab, oportuzumab monatox, solitomab, tucotuzumab celmolcukin, edrecolomab, catumaxomab, ifabotuzumab, fibatuzumab, zalutumumab, panitumumab, cetuximab, futuximab, imgatuzumab, laprituximab emtansine, matuzumab, necitumumab, nimotuzumab, tomuzotuximab, amivantamab, amivantamab, epitumomab cituxctan, sontuzumab, duligotuzumab, elgemtumab, lumretuzumab, patritumab, seribantumab, zenocutuzumab, sibrotuzumab, burosumab, aprutumab ixadotin, radretumab, pasotuxizumab, farletuzumab, mirvetuximab soravtansine, vantictumab, TRBS07, 3F8, dinutuximab, dinutuximab beta, ecromeximab, mitumomab, andecaliximab, capromab, codrituzumab, glembatumumab vedotin, talquetamab, talquetamab, trevogrumab, indusatumab vedotin, ficlatuzumab, rilotumumab, zatuximab, pentuzimab, pentuzimab, margetuximab, timigutuzumab, trastuzumab, trastuzumab duocarmazine, trastuzumab emtansine, gancotamab, pertuzumab, ertumaxomab, emibetuzumab, telisotuzumab, telisotuzumab vedotin, derlotuximab biotin, apolizumab, onartuzumab, bersanlimab, enlimomabpegol, rontalizumab, sifalimumab, talizumab, ganitumab, istiratumab, robatumumab, teprotumumab, figitumumab, ganitumab, istiratumab, robatumumab, teprotumumab, cixutumumab, dalotuzumab, xentuzumab, dusigitumab, canakinumab, ustekinumab, ustekinumab, ustekinumab, briakinumab, briakinumab, abrezekimab, lebrikizumab, romilkimab, TNX-650), tralokinumab, anrukinzumab, brodalumab, ixekizumab, netakimab, perakizumab, secukinumab, vunakizumab, afasevikumab, afasevikumab, bimekizumab, bimekizumab, remtolumab, bermekimab, lutikizumab, lutikizumab, gevokizumab, cergutuzumab amunaleukin, fletikumab, fezakinumab, brazikumab, guselkumab, mirikizumab, tildrakizumab, risankizumab, flotetuzumab, nemolizumab, pascolizumab, dupilumab, mepolizumab, reslizumab, clazakizumab, elsilimomab, olokizumab, sarilumab, siltuximab, sirukumab, vobarilizumab, tocilizumab, SA237, satralizumab, enokizumab, prezalizumab, natalizumab, abrilumab, abrilumab, vedolizumab, volociximab, tadocizumab, etaracizumab, etrolizumab, spesolimab, vatelizumab, erlizumab, lirilumab, relatlimab, cBR96-doxorubicinimmunoconjugate, odulimomab, efalizumab, ladiratuzumab vedotin, simtuzumab, samrotamab vedotin, aselizumab, lupartumab amadotin, imalumab, carlumab, imaprelimab, amatuximab, amatuximab, anetumab ravtansine, narnatumab, clivatuzumab tetraxetan, pemtumomab, gatipotuzumab, ensituximab, lemalesomab, sulesomab, enfortumab vedotin, racotumomab, monalizumab, brontictuzumab, tarextumab, vesencumab, oxelumab, gilvetmab, tislelizumab, dostarlimab, BCD-100, nivolumab, PDR001, pembrolizumab, pidilizumab, retifanlimab, spartalizumab, sintilimab, cemiplimab, olaratumab, tovetumab, rinucumab, atezolizumab, avelumab, durvalumab, lifastuzumab vedotin, bavituximab, acapatamab, capromab, rosopatamab, nezastomig, pasotuxizumab, pelgifatamab, voxalatamab, cofetuzumab pelidotin, denosumab, rosmantuzumab, cirmtuzumab, atinumab, indatuximab ravtansine, clotuzumab, sirtratumab vedotin, sonepcizumab, vandortuzumab vedotin, minretumomab, satumomab pendetide, maslimomab, ontuxizumab, tenatumomab, fresolimumab, metelimumab, lerdelimumab, tezepelumab, etigilimab, tiragotumab, placulumab, prezalumab, infliximab, nerelimomab, ozoralizumab, adalimumab, afelimomab, certolizumab pegol, golimumab, mapatumumab, conatumumab, lexatumumab, tigatuzumab, sacituzumab govitecan, votumumab, pogalizumab, letolizumab, pankomab, anatumomab mafenatox, enavatuzumab, flanvotumab, brolucizumab, ranibizumab, varisacumab, bevacizumab, faricimab, icrucumab, alacizumab pegol, ramucirumab, pritumumab, and onvatilimab.

[0533] In some aspects, and in any one of the formulas depicted herein, any one or more of (i) VL1 and VH1, (ii) VL2 and VH2, and (iii) VL3 and VH3, comprise a VL and a VH of an antibody selected from the group consisting of losatuxizumab vedotin, utomilumab, urelumab, oleclumab, naptumomab estafenatox, ascrinvacumab, pintumomab, tacatuzumab tetraxetan, nesvacumab, vanucizumab, timolumab, vapaliximab, vepalimomab, enapotamab vedotin, ianalumab, belimumab, tabalumab, tibulizumab, belantamab mafodotin, teclistamab, teclistamab, detumomab, nacolomab tafenatox, cculizumab, lendalizumab, pexelizumab, pozelimab, ravulizumab, tesidolumab, vilobelimab, abagovomab, igovomab, oregovomab, sofituzumab vedotin, cantuzumab mertansine, cantuzuma bravtansine, girentuximab, altumomab pentetate, arcitumomab, besilesomab, bertilimumab, plozalizumab, mogamulizumab, leronlimab, PRO140), rovelizumab, rovelizumab, talacotuzumab, benralizumab, tavolimab, vonlerolizumab, gavilimomab, ziralimumab, fanolesomab, ipilimumab, ruplizumab, toralizumab, dapirolizumab pegol, toralizumab, dapirolizumab pegol, ruplizumab, blinatumomab, inebilizumab, loncastuximab tesirine, SGN-CD19A, tafasitamab, taplitumomab paptox, XMAB-5574, Budoprutug, Obexelimab, duvortuxizumab, englumafusp alfa, Emfizatamab, zeripatamig, siplizumab, blontuvetmab, FBTA05, ibritumomab tiuxetan, obinutuzumab, ocaratuzumab, ocrelizumab, ofatumumab, rituximab, tositumomab, ublituximab, veltuzumab, divozilimab, cramkafusp alfa, ripertamab, zuberitamab, glofitamab, nofetumomab merpentan, samalizumab, imvotamab, odronextamab, plamotamab, bectumomab, inotuzumab ozogamicin, moxetumomab pasudotox, pinatuzumab vedotin, gomiliximab, lumiliximab, inolimomab, inolimomab, daclizumab, camidanluma btesirine, basiliximab, varlilumab, omburtamab, enoblituzumab, vopratelimab, lulizumabpegol, TGN1412, muromonab-CD3, otelixizumab, teplizumab, visilizumab, epcoritamab, epcoritamab, brentuximab vedotin, iratumumab, azintuxizumab vedotin, gemtuzumab ozogamicin, lintuzumab, vadastuximab talirinc, naratuximab emtansine, otlertuzumab, lilotomab satetraxetan, tetulomab, daratumumab, isatuximab, foralumab, mosunetuzumab, mosunetuzumab, cedelizumab, ibalizumab, keliximab, priliximab, tregalizumab, zanolimumab, bleselumab, iscalimab, lucatumumab, ravagalimab, selicrelumab, tencliximab, vanalimab, abciximab, bivatuzumab, iomab-B, telimomab aritox, zolimomab aritox, abituzumab, intetumumab, alemtuzumab, tamtuvetmab, lorvotuzumab mertansine, itolizumab, cusatuzumab, vorsetuzumab mafodotin, milatuzumab, iladatuzumab vedotin, polatuzumab vedotin, galiximab, cibisatamab, zolbetuximab, naxitamab, tisotumab vedotin, olendalizumab, pamrevlumab, lacnotuzumab, cabiralizumab, emactuzumab, axatilimab, gimsilumab, lenzilumab, namilumab, tremelimumab, ulocuplumab, tepoditamab, rovalpituzumab tesirine, tarlatamab, demcizumab, navicixizumab, drozitumab, parsatuzumab, depatuxizumab mafodotin, modotuximab, carotuximab, adecatumumab, adecatumumab, oportuzumab monatox, solitomab, tucotuzumab celmoleukin, edrecolomab, catumaxomab, ifabotuzumab, fibatuzumab, zalutumumab, panitumumab, cetuximab, futuximab, imgatuzumab, laprituximab emtansine, matuzumab, necitumumab, nimotuzumab, tomuzotuximab, amivantamab, amivantamab, cpitumomab cituxetan, sontuzumab, duligotuzumab, elgemtumab, lumretuzumab, patritumab, seribantumab, zenocutuzumab, sibrotuzumab, burosumab, aprutumab ixadotin, radretumab, pasotuxizumab, farletuzumab, mirvetuximab soravtansine, vantictumab, TRBS07, 3F8, dinutuximab, dinutuximab beta, ecromeximab, mitumomab, andecaliximab, capromab, codrituzumab, glembatumumab vedotin, talquetamab, talquetamab, trevogrumab, indusatumab vedotin, ficlatuzumab, rilotumumab, zatuximab, pentuzimab, pentuzimab, margetuximab, timigutuzumab, trastuzumab, trastuzumab duocarmazine, trastuzumab emtansine, gancotamab, pertuzumab, ertumaxomab, emibetuzumab, telisotuzumab, telisotuzumab vedotin, derlotuximab biotin, apolizumab, onartuzumab, bersanlimab, enlimomabpegol, rontalizumab, sifalimumab, talizumab, ganitumab, istiratumab, robatumumab, teprotumumab, figitumumab, ganitumab, istiratumab, robatumumab, teprotumumab, cixutumumab, dalotuzumab, xentuzumab, dusigitumab, canakinumab, ustekinumab, ustekinumab, ustekinumab, briakinumab, briakinumab, abrezekimab, lebrikizumab, romilkimab, TNX-650), tralokinumab, anrukinzumab, brodalumab, ixckizumab, netakimab, perakizumab, secukinumab, vunakizumab, afasevikumab, afasevikumab, bimckizumab, bimekizumab, remtolumab, bermekimab, lutikizumab, lutikizumab, gevokizumab, cergutuzumab amunaleukin, fletikumab, fezakinumab, brazikumab, guselkumab, mirikizumab, tildrakizumab, risankizumab, flotetuzumab, nemolizumab, pascolizumab, dupilumab, mepolizumab, reslizumab, clazakizumab, elsilimomab, olokizumab, sarilumab, siltuximab, sirukumab, vobarilizumab, tocilizumab, SA237, satralizumab, enokizumab, prezalizumab, natalizumab, abrilumab, abrilumab, vedolizumab, volociximab, tadocizumab, etaracizumab, etrolizumab, spesolimab, vatelizumab, erlizumab, lirilumab, relatlimab, cBR96-doxorubicinimmunoconjugate, odulimomab, efalizumab, ladiratuzumab vedotin, simtuzumab, samrotamab vedotin, aselizumab, lupartumab amadotin, imalumab, carlumab, imaprelimab, amatuximab, amatuximab, anetumab ravtansine, narnatumab, clivatuzumab tetraxetan, pemtumomab, gatipotuzumab, ensituximab, lemalesomab, sulesomab, enfortumab vedotin, racotumomab, monalizumab, brontictuzumab, tarextumab, vesencumab, oxelumab, gilvetmab, tislelizumab, dostarlimab, BCD-100, nivolumab, PDR001, pembrolizumab, pidilizumab, retifanlimab, spartalizumab, sintilimab, cemiplimab, olaratumab, tovetumab, rinucumab, atezolizumab, avelumab, durvalumab, lifastuzumab vedotin, bavituximab, acapatamab, capromab, rosopatamab, nezastomig, pasotuxizumab, pelgifatamab, voxalatamab, cofetuzumab pelidotin, denosumab, rosmantuzumab, cirmtuzumab, atinumab, indatuximab ravtansine, elotuzumab, sirtratumab vedotin, sonepcizumab, vandortuzumab vedotin, minretumomab, satumomab pendetide, maslimomab, ontuxizumab, tenatumomab, fresolimumab, metelimumab, lerdelimumab, tezepelumab, etigilimab, tiragotumab, placulumab, prezalumab, infliximab, nerelimomab, ozoralizumab, adalimumab, afelimomab, certolizumab pegol, golimumab, mapatumumab, conatumumab, lexatumumab, tigatuzumab, sacituzumab govitecan, votumumab, pogalizumab, letolizumab, pankomab, anatumomab mafenatox, enavatuzumab, flanvotumab, brolucizumab, ranibizumab, varisacumab, bevacizumab, faricimab, icrucumab, alacizumab pegol, ramucirumab, pritumumab, and onvatilimab.

[0534] In some aspects, and in any one of the formulas depicted herein, (a) any one or more of VL1, VL2, and VL3 comprises: (i) a LCDR1 having an amino acid sequence that is at least 65%, at least 70%, at least 75%, at least 80%, at least 85%, at least 90%, at least 95%, at least 99%, or 100% identical to any one of SEQ ID NOs: 1096, 1103, 1110, 1120, 1127, 1134, 1141, 1148, 1155, 1162, 1169, 1174, 1181, 1188, 1199, 1211, 1221, 1228, 1235, 1247, 1254, 1261, 1266, 1271, 1278, 1285, 1292, 1299, 1306, 1313, 1319, 1326, 1339, 1352, 1359, 1366, 1373, 1382, 1394, 1401, 1408, 1414, 1421, 1428, 1441, 1448, 1455, 1461, 1468, 1475, 1488, 1495, 1508, 1519, 1526, 1531, 1538, 1544, 1556, 1568, 1574, 1581, 1594, 1601, 1608, 1615, 1622, 1629, 1636, 1643, 1650, 1657, 1672, 1679, 1689, 1697, 1708, 1715, 1718, 1723, 1727, 1738, 1743, 1752, 1761, 1763, 1769, 1776, and 1786; (ii) a LCDR2 having an amino acid sequence that is at least 65%, at least 70%, at least 75%, at least 80%, at least 85%, at least 90%, at least 95%, at least 99%, or 100% identical to any one of SEQ ID NOs: 1200, 1212, 1680, 1690, 1698, 1709, 1728, 1739, 1744, 1753, 1770, and 1777, or at least 65%, at least 70%, at least 75%, at least 80%, at least 85%, at least 90%, at least 95%, at least 99%, or 100% identical to any one of amino acid sequences AAS, APS, AT, ATS, DAS, DDG, DDS, DT, DTS, DVS, EAS, FTS, GAF, GAN, GAS, GAT, GIS, GKN, GNS, HTS, KVS, LAS, LGS, LVS, NAK, NTN, QMS, RMS, RTS, SAS, TTS, WAS, YAS, YAT, YGS, YRS, and YTS; and (iii) a LCDR3 having an amino acid sequence that is at least 65%, at least 70%, at least 75%, at least 80%, at least 85%, at least 90%, at least 95%, at least 99%, or 100% identical to any one of SEQ ID NOs: 1097, 1104, 1111, 1121, 1128, 1135, 1142, 1149, 1156, 1163, 1170, 1175, 1182, 1189, 1195, 1201, 1207, 1213, 1222, 1229, 1236, 2009, 1248, 1255, 1262, 1267, 1272, 1279, 1286, 1293, 1300, 1307, 1320, 1327, 1333, 1340, 1346, 1353, 1360, 1367, 1374, 1383, 1389, 1395, 1402, 1409, 1415, 1422, 1429, 1435, 1442, 1449, 1456, 1462, 1469, 1476, 1482, 1489, 1496, 1502, 1509, 1513, 1520, 1532, 1539, 1545, 1557, 1562, 1569, 1575, 1582, 1588, 1595, 1602, 1609, 1616, 1623, 1630, 1637, 1644, 1651, 1658, 1663, 1673, 1681, 1691, 1699, 1710, 1729, 1735, 1745, 1751, 1754, 1778, 1787, and 1976; and (b) any one or more of VH1, VH2, and VH3 comprises: (i) a HCDR1 having an amino acid sequence that is at least 65%, at least 70%, at least 75%, at least 80%, at least 85%, at least 90%, at least 95%, at least 99%, or 100% identical to any one of SEQ ID NOs: 1099, 1106, 1113, 1117, 1123, 1130, 1137, 1144, 1151, 1158, 1165, 1177, 1184, 1191, 1203, 1215, 1224, 1231, 1238, 1243, 1250, 1257, 1264, 1274, 1281, 1288, 1295, 1302, 1309, 1315, 1322, 1329, 1335, 1342, 1348, 1355, 1362, 1369, 1376, 1385, 1397, 1404, 1417, 1424, 1431, 1437, 1444, 1451, 1458, 1464, 1471, 1478, 1484, 1491, 1498, 1504, 1511, 1515, 1522, 1534, 1547, 1552, 1564, 1577, 1584, 1590, 1597, 1604, 1611, 1618, 1625, 1632, 1639, 1646, 1653, 1660, 1665, 1675, 1683, 1693, 1701, 1705, 1716, 1719, 1731, 1736, 1747, 1756, 1772, 1780, and 1789; (ii) a HCDR2 having an amino acid sequence that is at least 65%, at least 70%, at least 75%, at least 80%, at least 85%, at least 90%, at least 95%, at least 99%, or 100% identical to any one of SEQ ID NOs: 1100, 1107, 1114, 1118, 1124, 1131, 1138, 1145, 1152, 1159, 1166, 1178, 1185, 1192, 1204, 1216, 1225, 1232, 1239, 1244, 1251, 1258, 1275, 1282, 1289, 1296, 1303, 1310, 1316, 1323, 1330, 1336, 1343, 1349, 1356, 1363, 1370, 1377, 1386, 1391, 1398, 1405, 1411, 1418, 1425, 1432, 1438, 1445, 1452, 1465, 1472, 1479, 1485, 1492, 1499, 1505, 1516, 1523, 1528, 1535, 1541, 1548, 1553, 1559, 1565, 1571, 1578, 1585, 1591, 1598, 1605, 1612, 1619, 1626, 1633, 1640, 1647, 1654, 1666, 1676, 1684, 1687, 1694, 1702, 1706, 1712, 1717, 1720, 1725, 1732, 1737, 1741, 1748, 1757, 1767, 1773, 1781, and 1790; and (iii) a HCDR3 having an amino acid sequence that is at least 65%, at least 70%, at least 75%, at least 80%, at least 85%, at least 90%, at least 95%, at least 99%, or 100% identical to any one of SEQ ID NOs: 1101, 1108, 1115, 1125, 1132, 1139, 1146, 1153, 1160, 1167, 1172, 1179, 1186, 1193, 1197, 1205, 1209, 1217, 1226, 1233, 1240, 1245, 1252, 1259, 1269, 1276, 1283, 1290, 1297, 1304, 1311, 1317, 1324, 1331, 1337, 1344, 1350, 1357, 1364, 1371, 1378, 1387, 1392, 1399, 1406, 1412, 1419, 1426, 1433, 1439, 1446, 1453, 1459, 1466, 1473, 1480, 1486, 1493, 1500, 1506, 1517, 1524, 1529, 1536, 1542, 1549, 1554, 1560, 1566, 1572, 1579, 1586, 1592, 1599, 1606, 1613, 1620, 1627, 1634, 1641, 1648, 1655, 1661, 1667, 1670, 1677, 1685, 1688, 1695, 1703, 1707, 1713, 1733, 1749, 1758, 1762, 1774, 1782, 1791, and 1975.

[0535] In some aspects, and in any one of the formulas depicted herein, (a) any one or more of VL1, VL2, and VL3 comprises an amino acid sequence that is at least 65%, at least 70%, at least 75%, at least 80%, at least 85%, at least 90%, at least 95%, at least 99%, or 100% identical to any one of SEQ ID NOs: 1098, 1105, 1112, 1122, 1129, 1136, 1143, 1150, 1157, 1164, 1171, 1176, 1183, 1190, 1196, 1202, 1208, 1214, 1219, 1223, 1230, 1237, 1242, 1249, 1256, 1263, 1268, 1273, 1280, 1287, 1294, 1301, 1308, 1314, 1321, 1328, 1334, 1341, 1347, 1354, 1361, 1368, 1375, 1380, 1384, 1390, 1396, 1403, 1410, 1416, 1423, 1430, 1436, 1443, 1450, 1457, 1463, 1470, 1477, 1483, 1490, 1497, 1503, 1510, 1514, 1521, 1527, 1533, 1540, 1546, 1551, 1558, 1563, 1570, 1576, 1583, 1589, 1596, 1603, 1610, 1617, 1624, 1631, 1638, 1645, 1652, 1659, 1664, 1669, 1674, 1682, 1692, 1700, 1711, 1721, 1724, 1730, 1740, 1746, 1755, 1764, 1766, 1771, 1779, 1784, and 1788; and (b) any one or more of VH1, VH2, and VH3 comprises an amino acid sequence that is at least 65%, at least 70%, at least 75%, at least 80%, at least 85%, at least 90%, at least 95%, at least 99%, or 100% identical to any one of SEQ ID NOs: 1102, 1109, 1116, 1119, 1126, 1133, 1140, 1147, 1154, 1161, 1168, 1173, 1180, 1187, 1194, 1198, 1206, 1210, 1218, 1220, 1227, 1234, 1241, 1246, 1253, 1260, 1265, 1270, 1277, 1284, 1291, 1298, 1305, 1312, 1318, 1325, 1332, 1338, 1345, 1351, 1358, 1365, 1372, 1379, 1381, 1388, 1393, 1400, 1407, 1413, 1420, 1427, 1434, 1440, 1447, 1454, 1460, 1467, 1474, 1481, 1487, 1494, 1501, 1507, 1512, 1518, 1525, 1530, 1537, 1543, 1550, 1555, 1561, 1567, 1573, 1580, 1587, 1593, 1600, 1607, 1614, 1621, 1628, 1635, 1642, 1649, 1656, 1662, 1668, 1671, 1678, 1686, 1696, 1704, 1714, 1722, 1726, 1734, 1742, 1750, 1759, 1760, 1765, 1768, 1775, 1783, 1785, and 1792.

[0536] In some aspects, the infectious disease antigen that is not a sarbecovirus antigen is: (i) a viral antigen elected from the group consisting of an influenza virus (A, B, C) antigen (e.g., influenza virus envelope proteins, for example, influenza virus neuraminidase (NA, N1, N2, N3, N4, N5, N6, N7, N8, N9, N10, N11), influenza virus hemagglutinin (H1, H2, H3, H4, H5, H6, H7, H8, H9, H10, H11, H12, H13, H14, H15, H16, H17, H18) (e.g., H1N1, H3N2, H5N1, H7N9, H9N2). Yamagata virus antigen. Victoria virus antigen, influenza virus structural proteins (e.g., M1, M2, capsid protein), influenza virus functional proteins (e.g., ribonucleoprotein (NP), primary interferon antagonist (NS1), nuclear export protein (NEP)) influenza virus accessory proteins (e.g., PB2, PB1, or PA), for example, anti-HA, anti-NA, anti-H1, anti-H3, anti-H5, anti-H7, anti-H9, anti-N1, anti-N2, anti-N9, anti-H1N1, anti-H3N2, anti-H5N1, anti-H7N9, anti-H9N2, anti-A protein, anti-B protein, anti-stem, anti-M1, anti-M2, anti-capsid, anti-NP, anti-NS1, anti-NEP, anti-PB1, anti-PB2, and anti-PA); a swine influenza virus antigen (e.g., swine flu hemagglutinin, swine flu neuraminidase); a classical swine fever (CSF) (hog colera) virus antigen; an equine influenza virus antigen (e.g., equine influenza virus typeA/Miami 63 neuraminidase, equine influenza virus type A/Kentucky 81 neuraminidase, equine influenza virus type A/Alaska 91 neuraminidase); parainfluenza viruses (e.g., bovine parainfluenza virus, bovine parainfluenza virus type 3 fusion protein, bovine parainfluenza virus type 3 hemagglutinin neuraminidase); a (human) respiratory syncytial virus (RSV)-viral antigen (e.g., RSV F glycoprotein, RSV G glycoprotein, F protein of respiratory syncytial virus, RSV fusion glycoprotein); a herpes simplex virus (HSV) antigen (e.g., herpes simplex virus glycoproteins gB, gC, gD, and gE, herpes simplex virus type 2 glycoprotein gB); a Dengue virus antigen (e.g., core protein, matrix protein, glycoprotein E of Dengue virus, or other protein of Dengue virus); a measles virus antigen (e.g., hemagglutinin); a poliovirus 1 antigen (e.g., poliovirus 1 proteins (VP1)), a HIV-1 antigen and HIV-2 antigen (e.g., HIV envelope proteins (e.g., envelope glycoproteins of HIV 1. HIV envelope glycoprotein (Env). HIV envelope glycoprotein gp160. HIV envelope surface glycoprotein gp120. HIV transmembrane envelope protein gp41), HIV structural proteins (e.g., p17, p24, p7, p55), HIV functional proteins (e.g., p66, HIV-1 protease (PR), p31), HIV accessory proteins (e.g., Nef, Tat, Rev, Vif, Vpr, Vpu)); a hepatitis virus (HAV, HBV, HCV, HDV, HEV) antigen (e.g., hepatitis B virus antigen (e.g., surface antigen, core protein), hepatitis C virus antigen (e.g., glycoprotein E1E2)); a rabies virus (Rabies lyssavirus) antigen (e.g., rabies virus glycoprotein, e.g., G glycoprotein); a pseudorabies virus antigen (e.g., pseudorabies virus g50 (gpD), pseudorabies virus II (gpB), pseudorabies virus III (gpC), pseudorabies virus glycoprotein H, pseudorabies virus glycoprotein E); a papillomavirus (HPV) antigen; an Epstein-Barr virus (EBV) (Gamma herpes virus 4) antigen; a Herpes simplex virus (HSV, HSV-1, HSV-2) antigen (e.g., human herpes virus 8, equine herpes virus antigen (e.g., type 1 glycoprotein B, type 1 glycoprotein D)); a Herpes zoster antigen; a Cytomegalovirus antigen (e.g., cytomegalovirus glycoprotein B); a Zika virus antigen; a Transmissible gastroenteritis virus (TGEV) antigen (e.g., glycoprotein 195, matrix protein); a rotavirus antigen (e.g., swine rotavirus glycoprotein 38); a parvovirus antigen (e.g., swine parvovirus capsid protein); a filoviruses (e.g., Marburg and Ebola) antigen; a bovine viral diarrhea virus antigen (e.g., glycoprotein 55); a Newcastle disease virus antigen (hemagglutinin, neuraminidase); an orthopoxvirus antigen; a coxsackievirus antigen and aphthovirus (foot and mouth disease virus) antigen; a yellow fever virus antigen; a Chikunga virus antigen; a Nipah virus antigen; an African swine fever virus antigen; a rhinotracheitis virus antigen (e.g., infectious bovine rhinotracheitis virus glycoprotein E, glycoprotein G); a laryngotracheitis virus antigen (e.g., infectious laryngotracheitis virus glycoprotein G or glycoprotein I); a La Crosse virus antigen (e.g., La Crosse virus glycoprotein); a neonatal calf diarrhoea virus antigen; a Venezuelan equine encephalomyelitis virus antigen; a punta toro virus antigen; a murine leukemia virus antigen; a mouse mammary tumor virus antigen; a bovine respiratory syncytial virus antigen (e.g., bovine respiratory syncytial virus attachment protein (BRSV G), bovine respiratory syncytial virus fusion protein (BRSV F), bovine respiratory syncytial virus nucleocapsid protein (BRSVN)); a bovine E viral diarrhoea virus antigen (e.g., glycoprotein 48 and glycoprotein 53); a metapneumovirus (HMPV) antigen; and an Ebola virus antigen (e.g., ebolavirus glycoprotein, e.g., Zaire ebolavirus glycoprotein); or (ii) a bacterial or parasite antigen selected from the group consisting of a Plasmodium (e.g., Plasmodium falciparum, Plasmodium vivax, Plasmodium malariae, Plasmodium ovale, Plasmodium knowlesi) antigen, a Streptococcus (e.g., Streptococcus pneumoniae, Streptococcus pyogenes, Streptococcus agalactiae, Streptococcus mutans, Streptococcus viridans, Streptococcus anginosus, Streptococcus intermedius, Streptococcus constellatus) antigen (e.g., 24M epitope), a Neisseria gonorrhoeae antigen (e.g., gonococcal pilin), a Corynebacterium antigen (e.g., Corynebacterium diphtheria (diptheria toxin), Corynebacterium ulcerans, Corynebacterium pseudotuberculosis), Mycobacterium tuberculosis antigens. Brachyspira hyodysenteriae (Serpulina hydodysenteriae) antigen (e.g., Serpulina hydodysenteriae protective antigen), a Chlamydia antigen (e.g., Chlamydia trachomatis) (e.g., MOMP and PorB), a Mycoplasma sp. (e.g., Mycoplasma genitalium. Mycoplasma hyopneumoniae, Mycoplasma pneumonia) antigen, a Staphylococcus (e.g., Staphylococcus aureus, coagulase-negative staphylococci (CoNS), Staphylococcus aureus alpha toxin, Staphylococcus aureus bi-component leucocidin) antigen, a Klebsiella sp. antigen, an Escherichia coli antigen (e.g., E. coli shiga toxin type-2, E. coli shiga toxin type-1), a Bacillus sp. (e.g., Bacillus anthracis, e.g., Bacillus anthracis anthrax) antigen, a Pseudomonas aeruginosa antigen (e.g., Pseudomonas aeruginosa type III secretion system), an Enterococcus sp. antigen, an Enterobacter sp. antigen, a Proteus sp. antigen, an Actinobacter sp. antigen, a Mycobacterium avium (Mycobacterium avium complex (MAC)) antigen, a Salmonella bacteria antigen, a Clostridium difficile antigen, a Toxoplasma (e.g., Toxoplasma gondii) antigen, a Histoplasma antigen, a Candida antigen, a Coccidioides antigen, a Cryptococcus antigen, a Cryptosporidium antigen, and a Cystoisospora (e.g., Cystoisospora belli) antigen, and another antigen (e.g., endotoxins, lymphotoxins (e.g., lymphotoxin alpha LTA), phosphatidylserine, Hsp90, CCR5, lipoteichoic acid, clumping factor A).

[0537] In some aspects, and in any one of the formulas depicted herein, any one or more of (i) VL1 and VH1, (ii) VL2 and VH2, and (iii) VL3 and VH3, comprise a light complementarity determining region 1 (LCDR1). LCDR2, and/or LCDR3, and a heavy complementarity determining region 1 (HCDR1), HCDR2, and/or HCDR3 of an antibody selected from the group consisting of libivirumab, rmab, rivabazumab pegol, setoxaximab, suvizumab, suvratoxumab, sevirumab, pritoxaximab, porgaviximab. REGN-EB3, obiltoxaximab, gedivumab, foravirumab, larcaviximab, motavizumab, palivizumab, rafivirumab, regavirumab, tuvirumab, cosfroviximab, felvizumab, atidortoxumab, edobacomab, nebacumab, pateclizumab, raxibacumab, urtoxazumab, tosatoxumab, berlimatoxumab. CR6261, diridavumab, firivumab, lesofavumab, navivumab, exbivirumab, lenvervimab, bavituximab, bezlotoxumab, efungumab, leronlimab, nirsevimab, pagibaximab, panobacumab, tefibazumab, ansuvimab, atoltivimab, maftivimab, and odesivimab.

[0538] In some aspects, and in any one of the formulas depicted herein, any one or more of (i) VL1 and VH1, (ii) VL2 and VH2, and (iii) VL3 and VH3, comprise a VL and a VH of an antibody selected from the group consisting of libivirumab, rmab, rivabazumab pegol, setoxaximab, suvizumab, suvratoxumab, sevirumab, pritoxaximab, porgaviximab, REGN-EB3, obiltoxaximab, gedivumab, foravirumab, larcaviximab, motavizumab, palivizumab, rafivirumab, regavirumab, tuvirumab, cosfroviximab, felvizumab, atidortoxumab, edobacomab, nebacumab, pateclizumab, raxibacumab, urtoxazumab, tosatoxumab, berlimatoxumab, CR6261, diridavumab, firivumab, lesofavumab, navivumab, exbivirumab, lenvervimab, bavituximab, bezlotoxumab, efungumab, leronlimab, nirsevimab, pagibaximab, panobacumab, tefibazumab, ansuvimab, atoltivimab, maftivimab, and odesivimab.

[0539] In some aspects, and in any one of the formulas depicted herein, (a) any one or more of VL1, VL2, and VL3 comprises: (i) a LCDR1 having an amino acid sequence that is at least 65%, at least 70%, at least 75%, at least 80%, at least 85%, at least 90%, at least 95%, at least 99%, or 100% identical to any one of SEQ ID NOs: 1428, 1793, 1798, 1810, 1817, 1824, 1977, 1985, 1993 and 2001; (ii) a LCDR2 having an amino acid sequence that is at least 65%, at least 70%, at least 75%, at least 80%, at least 85%, at least 90%, at least 95%, at least 99%, or 100% identical to any one of SEQ ID NOs: 1978, 1986, 1994, and 2002, or at least 65%, at least 70%, at least 75%, at least 80%, at least 85%, at least 90%, at least 95%, at least 99%, or 100% identical to any one of amino acid sequences YTS, DTS, GAS, and AAS; and (iii) a LCDR3 having an amino acid sequence that is at least 65%, at least 70%, at least 75%, at least 80%, at least 85%, at least 90%, at least 95%, at least 99%, or 100% identical to any one of SEQ ID NOs: 1229, 1799, 1805, 1811, 1818, 1825, 1979, 1987, 1995, and 2003; and (b) any one or more of VH1, VH2, and VH3 comprises: (i) a HCDR1 having an amino acid sequence that is at least 65%, at least 70%, at least 75%, at least 80%, at least 85%, at least 90%, at least 95%, at least 99%, or 100% identical to any one of SEQ ID NOs: 1577, 1795, 1801, 1813, 1820, 1827, 1981, 1989, 1997, and 2005; (ii) a HCDR2 having an amino acid sequence that is at least 65%, at least 70%, at least 75%, at least 80%, at least 85%, at least 90%, at least 95%, at least 99%, or 100% identical to any one of SEQ ID NOs: 1159, 1802, 1807, 1814, 1821, 1828, 1982, 1990, 1998, and 2006; and (iii) a HCDR3 having an amino acid sequence that is at least 65%, at least 70%, at least 75%, at least 80%, at least 85%, at least 90%, at least 95%, at least 99%, or 100% identical to any one of SEQ ID NOs: 1796, 1803, 1808, 1815, 1822, 1829, 1983, 1991, 1999, and 2007.

[0540] In some aspects, and in any one of the formulas depicted herein, (a) any one or more of VL1, VL2, and VL3 comprises an amino acid sequence that is at least 65%, at least 70%, at least 75%, at least 80%, at least 85%, at least 90%, at least 95%, at least 99%, or 100% identical to any one of SEQ ID NOs: 1794, 1800, 1806, 1812, 1819, 1826, 1980, 1988, 1996, and 2004; and (b) any one or more of VH1, VH2, and VH3 comprises an amino acid sequence that is at least 65%, at least 70%, at least 75%, at least 80%, at least 85%, at least 90%, at least 95%, at least 99%, or 100% identical to any one of SEQ ID NOs: 1797, 1804, 1809, 1816, 1823, 1830, 1984, 1992, 2000, and 2008.

[0541] In some aspects, the other-pathology antigen is selected from the group consisting of Amyloid beta, β-amyloid, PCSK9), IFN-α/β receptor, Rhesus factor, nerve growth factor (NGF), DPP4, fibrin II beta chain, ACVR2B, serum amyloid A protein SOST, FGF 23, VWF, tissue factor pathway inhibitor (TFPI), 1-40) and 1-42, selectin P, glucagon receptor (GCGR), amyloid P component, GDF-8, CXCL10 IP-10, repulsive guidance molecule A RGMA, IFN-γ, activated F9/F10, calcitonin gene-related peptide (CGRP), angiopoietin 3, IFN receptor, IFN-γ, calcitonin, β-amyloid 1-40) and 1-42, tau protein, dabigatran, cardiac myosin, selectin P, Complement factor D (CFD), kallikrein, GDF-8, IGHE, tissue factor pathway inhibitor (TFPI), GMCSF receptor α-chain, amyloid, IgE Fc region, MASP-2, oxLDL, GMCSF, NOGO-A, Alpha-synuclein, NGF, myelin-associated glycoprotein, RHD (gene) (RHD), sclerostin, FCGRT, sclerostin SOST, mucosal addressin cell adhesion molecule, myostatin, RSVFR, complement component 1s C1s, C5, and IL31.

[0542] In some aspects, and in any one of the formulas depicted herein, any one or more of (i) VL1 and VH1, (ii) VL2 and VH2, and (iii) VL3 and VH3, comprise a light complementarity determining region 1 (LCDR1). LCDR2, and/or LCDR3, and a heavy complementarity determining region 1 (HCDR1). HCDR2, and/or HCDR3 of an antibody selected from the group consisting of aducanumab, alirocumab, frovocimab, lodelcizumab, bococizumab, evolocumab, ralpancizumab, anifrolumab, atorolimumab, bapineuzumab, bedinvetmab, begelomab, biciromab, bimagrumab, birtamimab, blosozumab, burosumab, caplacizumab, concizumab, crenezumab, crizanlizumab, crotedumab, dezamizumab, domagrozumab, donanemab, eldelumab, elezanumab, emapalumab, emicizumab, eptinezumab, erenumab, evinacumab, faralimomab, fasinumab, fontolizumab, fremanezumab, frunevetmab, fulranumab, galcanezumab, gantenerumab, gosuranemab, idarucizumab, imciromab, inclacumab, lampalizumab, lanadelumab, landogrozumab, lecanemab, ligelizumab, marstacimab, mavrilimumab, morolimumab, NEOD001, omalizumab, oMS721, orticumab, otilimab, ozanezumab, ponezumab, prasinezumab, quilizumab, ranevetmab, refanezumab, roledumab, romosozumab, rozanolixizumab, setrusumab, SHP647, solanezumab, stamulumab, suptavumab, sutimlimab, tanezumab, crovalimab, and lokivetmab.

[0543] In some aspects, and in any one of the formulas depicted herein, any one or more of (i) VL1 and VH1, (ii) VL2 and VH2, and (iii) VL3 and VH3, comprise the VL and the VH of an antibody selected from the group consisting of aducanumab, alirocumab, frovocimab, lodelcizumab, bococizumab, evolocumab, ralpancizumab, anifrolumab, atorolimumab, bapineuzumab, bedinvetmab, begelomab, biciromab, bimagrumab, birtamimab, blosozumab, burosumab, caplacizumab, concizumab, crenezumab, crizanlizumab, crotedumab, dezamizumab, domagrozumab, donanemab, eldelumab, elezanumab, emapalumab, emicizumab, eptinezumab, erenumab, evinacumab, faralimomab, fasinumab, fontolizumab, fremanezumab, frunevetmab, fulranumab, galcanezumab, gantenerumab, gosuranemab, idarucizumab, imciromab, inclacumab, lampalizumab, lanadelumab, landogrozumab, lecanemab, ligelizumab, marstacimab, mavrilimumab, morolimumab, NEOD001, omalizumab, oMS721, orticumab, otilimab, ozanezumab, ponezumab, prasinezumab, quilizumab, ranevetmab, refanezumab, roledumab, romosozumab, rozanolixizumab, setrusumab, SHP647, solanezumab, stamulumab, suptavumab, sutimlimab, tanezumab, crovalimab, and lokivetmab.

[0544] In some aspects, and in any one of the formulas depicted herein, (a) any one or more of VL1, VL2, and VL3 comprises: (i) a LCDR1 having an amino acid sequence that is at least 65%, at least 70%, at least 75%, at least 80%, at least 85%, at least 90%, at least 95%, at least 99%, or 100% identical to any one of SEQ ID NOs: 1120, 1228, 1359, 1519, 1831, 1838, 1845, 1852, 1859, 1866, 1872, 1878, 1885, 1891, 1898, 1905, 1911, 1917, 1924, 1931, 1938, 1945, and 1963; (ii) a LCDR2 having an amino acid sequence that is at least 65%, at least 70%, at least 75%, at least 80%, at least 85%, at least 90%, at least 95%, at least 99%, or 100% identical to any one of amino acid sequences AAS, AVS, DAS, DNN, EDN, EVS, GAS, GNG, KAS, KVS, LVS, NTD, STS, WAS, and YTS; and (iii) a LCDR3 having an amino acid sequence that is at least 65%, at least 70%, at least 75%, at least 80%, at least 85%, at least 90%, at least 95%, at least 99%, or 100% identical to any one of SEQ ID NOs: 1360, 1832, 1839, 1846, 1853, 1860, 1867, 1873, 1879, 1886, 1892, 1899, 1906, 1912, 1918, 1925, 1932, 1939, 1946, 1951, 1957, 1964, and 1970; and (b) any one or more of VH1, VH2, and VH3 comprises: (i) a HCDR1 having an amino acid sequence that is at least 65%, at least 70%, at least 75%, at least 80%, at least 85%, at least 90%, at least 95%, at least 99%, or 100% identical to any one of SEQ ID NOs: 1309, 1362, 1437, 1552, 1618, 1639, 1834, 1841, 1848, 1855, 1862, 1881, 1894, 1901, 1920, 1927, 1934, 1941, 1953, 1959, and 1966; (ii) a HCDR2 having an amino acid sequence that is at least 65%, at least 70%, at least 75%, at least 80%, at least 85%, at least 90%, at least 95%, at least 99%, or 100% identical to any one of SEQ ID NOs: 1363, 1835, 1842, 1849, 1856, 1863, 1869, 1875, 1882, 1888, 1895, 1902, 1908, 1914, 1921, 1928, 1935, 1942, 1948, 1954, 1960, 1967, and 1972; and (iii) a HCDR3 having an amino acid sequence that is at least 65%, at least 70%, at least 75%, at least 80%, at least 85%, at least 90%, at least 95%, at least 99%, or 100% identical to any one of SEQ ID NOs: 1364, 1836, 1843, 1850, 1857, 1864, 1870, 1876, 1883, 1889, 1896, 1903, 1909, 1915, 1922, 1929, 1936, 1943, 1949, 1955, 1961, 1968, and 1973.

[0545] In some aspects, and in any one of the formulas depicted herein, (a) any one or more of VL1, VL2, and VL3 comprises an amino acid sequence that is at least 65%, at least 70%, at least 75%, at least 80%, at least 85%, at least 90%, at least 95%, at least 99%, or 100% identical to any one of SEQ ID NOs: 1361, 1833, 1840, 1847, 1854, 1861, 1868, 1874, 1880, 1887, 1893, 1900, 1907, 1913, 1919, 1926, 1933, 1940, 1947, 1952, 1958, 1965, and 1971; and (b) any one or more of VH1, VH2, and VH3 comprises an amino acid sequence that is at least 65%, at least 70%, at least 75%, at least 80%, at least 85%, at least 90%, at least 95%, at least 99%, or 100% identical to any one of SEQ ID NOs: 1365, 1837, 1844, 1851, 1858, 1865, 1871, 1877, 1884, 1890, 1897, 1904, 1910, 1916, 1923, 1930, 1937, 1944, 1950, 1956, 1962, 1969, and 1974.

[0546] Also provided herein is an antigen binding polypeptide having a structure, from amino-terminus to carboxy-terminus, represented by: VL1-L1-VL2-L2-VH2-L3-VH1-L4-CL-L5-CH1; VL1-L1-VL2-L2-VH2-L3-VH1-L4-CH1-L5-CL; VL1-L1-VH2-L2-VL2-L3-VH1-L4-CL-L5-CH1; VL1-L1-VH2-L2-VL2-L3-VH1-L4-CH1-L5-CL; VH1-L1-VL2-L2-VH2-L3-VL1-L4-CL-L5-CH1; VH1-L1-VL2-L2-VH2-L3-VL1-L4-CH1-L5-CL; VH1-L1-VH2-L2-VL2-L3-VL1-L4-CL-L5-CH1; VH1-L1-VH2-L2-VL2-L3-VL1-L4-CH1-L5-CL; VL2-L1-VL1-L2-VH1-L3-VH2-L4-CL-L5-CH1; VL2-L1-VL1-L2-VH1-L3-VH2-L4-CH1-L5-CL; VL2-L1-VH1-L2-VL1-L3-VH2-L4-CL-L5-CH1; VL2-L1-VH1-L2-VL1-L3-VH2-L4-CH1-L5-CL; VH2-L1-VL1-L2-VH1-L3-VL2-L4-CL-L5-CH1; VH2-L1-VL1-L2-VH1-L3-VL2-L4-CH1-L5-CL; VH2-L1-VH1-L2-VL1-L3-VL2-L4-CL-L5-CH1; or VH2-L1-VH1-L2-VL1-L3-VL2-L4-CH1-L5-CL; wherein: (a) VL1 is a first immunoglobulin light chain variable region that specifically binds to a tumor-associated antigen (TAA), comprising a CDR1 having an amino acid sequence at least 65%, at least 70%, at least 75%, at least 80%, at least 85%, at least 90%, at least 95%, at least 99%, or 100% identical to any one of SEQ ID NOs: 1096, 1103, 1110, 1120, 1127, 1134, 1141, 1148, 1155, 1162, 1169, 1174, 1181, 1188, 1199, 1211, 1221, 1228, 1235, 1247, 1254, 1261, 1266, 1271, 1278, 1285, 1292, 1299, 1306, 1313, 1319, 1326, 1339, 1352, 1359, 1366, 1373, 1382, 1394, 1401, 1408, 1414, 1421, 1428, 1441, 1448, 1455, 1461, 1468, 1475, 1488, 1495, 1508, 1519, 1526, 1531, 1538, 1544, 1556, 1568, 1574, 1581, 1594, 1601, 1608, 1615, 1622, 1629, 1636, 1643, 1650, 1657, 1672, 1679, 1689, 1697, 1708, 1715, 1718, 1723, 1727, 1738, 1743, 1752, 1761, 1763, 1769, 1776, and 1786, a CDR2 having an amino acid sequence at least 65%, at least 70%, at least 75%, at least 80%, at least 85%, at least 90%, at least 95%, at least 99%, or 100% identical to any one of amino acid sequences AAS, APS, AT, ATS, DAS, DDG, DDS, DT, DTS, DVS, EAS, FTS, GAF, GAN, GAS, GAT, GIS, GKN, GNS, HTS, KVS, LAS, LGS, LVS, NAK, NTN, QMS, RMS, RTS, SAS, TTS, WAS, YAS, YAT, YGS, YRS, and YTS or an amino acid sequence at least 65%, at least 70%, at least 75%, at least 80%, at least 85%, at least 90%, at least 95%, at least 99%, or 100% identical to any one of SEQ ID NOs: 1200, 1212, 1680, 1690, 1698, 1709, 1728, 1739, 1744, 1753, 1770, and 1777, and a CDR3 having an amino acid sequence at least 65%, at least 70%, at least 75%, at least 80%, at least 85%, at least 90%, at least 95%, at least 99%, or 100% identical to any one of SEQ ID NOs: 1097, 1104, 1111, 1121, 1128, 1135, 1142, 1149, 1156, 1163, 1170, 1175, 1182, 1189, 1195, 1201, 1207, 1213, 1222, 1229, 1236, 2009, 1248, 1255, 1262, 1267, 1272, 1279, 1286, 1293, 1300, 1307, 1320, 1327, 1333, 1340, 1346, 1353, 1360, 1367, 1374, 1383, 1389, 1395, 1402, 1409, 1415, 1422, 1429, 1435, 1442, 1449, 1456, 1462, 1469, 1476, 1482, 1489, 1496, 1502, 1509, 1513, 1520, 1532, 1539, 1545, 1557, 1562, 1569, 1575, 1582, 1588, 1595, 1602, 1609, 1616, 1623, 1630, 1637, 1644, 1651, 1658, 1663, 1673, 1681, 1691, 1699, 1710, 1729, 1735, 1745, 1751, 1754, 1778, 1787, and 1976; VL2 is a second immunoglobulin light chain variable region that specifically binds to a tumor-associated antigen (TAA), comprising a CDR1 having an amino acid sequence at least 65%, at least 70%, at least 75%, at least 80%, at least 85%, at least 90%, at least 95%, at least 99%, or 100% identical to any one of SEQ ID NOs: 1096, 1103, 1110, 1120, 1127, 1134, 1141, 1148, 1155, 1162, 1169, 1174, 1181, 1188, 1199, 1211, 1221, 1228, 1235, 1247, 1254, 1261, 1266, 1271, 1278, 1285, 1292, 1299, 1306, 1313, 1319, 1326, 1339, 1352, 1359, 1366, 1373, 1382, 1394, 1401, 1408, 1414, 1421, 1428, 1441, 1448, 1455, 1461, 1468, 1475, 1488, 1495, 1508, 1519, 1526, 1531, 1538, 1544, 1556, 1568, 1574, 1581, 1594, 1601, 1608, 1615, 1622, 1629, 1636, 1643, 1650, 1657, 1672, 1679, 1689, 1697, 1708, 1715, 1718, 1723, 1727, 1738, 1743, 1752, 1761, 1763, 1769, 1776, and 1786, a CDR2 having an amino acid sequence at least 65%, at least 70%, at least 75%, at least 80%, at least 85%, at least 90%, at least 95%, at least 99%, or 100% identical to any one of amino acid sequences AAS, APS, AT, ATS, DAS, DDG, DDS, DT, DTS, DVS, EAS, FTS, GAF, GAN, GAS, GAT, GIS, GKN, GNS, HTS, KVS, LAS, LGS, LVS, NAK, NTN, QMS, RMS, RTS, SAS, TTS, WAS, YAS, YAT, YGS, YRS, and YTS or an amino acid sequence at least 65%, at least 70%, at least 75%, at least 80%, at least 85%, at least 90%, at least 95%, at least 99%, or 100% identical to any one of SEQ ID NOs: 1200, 1212, 1680, 1690, 1698, 1709, 1728, 1739, 1744, 1753, 1770, and 1777, and a CDR3 having an amino acid sequence at least 65%, at least 70%, at least 75%, at least 80%, at least 85%, at least 90%, at least 95%, at least 99%, or 100% identical to any one of SEQ ID NOs: 1097, 1104, 1111, 1121, 1128, 1135, 1142, 1149, 1156, 1163, 1170, 1175, 1182, 1189, 1195, 1201, 1207, 1213, 1222, 1229, 1236, 2009, 1248, 1255, 1262, 1267, 1272, 1279, 1286, 1293, 1300, 1307, 1320, 1327, 1333, 1340, 1346, 1353, 1360, 1367, 1374, 1383, 1389, 1395, 1402, 1409, 1415, 1422, 1429, 1435, 1442, 1449, 1456, 1462, 1469, 1476, 1482, 1489, 1496, 1502, 1509, 1513, 1520, 1532, 1539, 1545, 1557, 1562, 1569, 1575, 1582, 1588, 1595, 1602, 1609, 1616, 1623, 1630, 1637, 1644, 1651, 1658, 1663, 1673, 1681, 1691, 1699, 1710, 1729, 1735, 1745, 1751, 1754, 1778, 1787, and 1976; VH1 is a first immunoglobulin heavy chain variable region that specifically binds to a tumor-associated antigen (TAA), comprising a CDR1 having an amino acid sequence at least 65%, at least 70%, at least 75%, at least 80%, at least 85%, at least 90%, at least 95%, at least 99%, or 100% identical to any one of SEQ ID NOs: 1099, 1106, 1113, 1117, 1123, 1130, 1137, 1144, 1151, 1158, 1165, 1177, 1184, 1191, 1203, 1215, 1224, 1231, 1238, 1243, 1250, 1257, 1264, 1274, 1281, 1288, 1295, 1302, 1309, 1315, 1322, 1329, 1335, 1342, 1348, 1355, 1362, 1369, 1376, 1385, 1397, 1404, 1417, 1424, 1431, 1437, 1444, 1451, 1458, 1464, 1471, 1478, 1484, 1491, 1498, 1504, 1511, 1515, 1522, 1534, 1547, 1552, 1564, 1577, 1584, 1590, 1597, 1604, 1611, 1618, 1625, 1632, 1639, 1646, 1653, 1660, 1665, 1675, 1683, 1693, 1701, 1705, 1716, 1719, 1731, 1736, 1747, 1756, 1772, 1780, and 1789, a CDR2 having an amino acid sequence at least 65%, at least 70%, at least 75%, at least 80%, at least 85%, at least 90%, at least 95%, at least 99%, or 100% identical to any one of SEQ ID NOs: 1100, 1107, 1114, 1118, 1124, 1131, 1138, 1145, 1152, 1159, 1166, 1178, 1185, 1192, 1204, 1216, 1225, 1232, 1239, 1244, 1251, 1258, 1275, 1282, 1289, 1296, 1303, 1310, 1316, 1323, 1330, 1336, 1343, 1349, 1356, 1363, 1370, 1377, 1386, 1391, 1398, 1405, 1411, 1418, 1425, 1432, 1438, 1445, 1452, 1465, 1472, 1479, 1485, 1492, 1499, 1505, 1516, 1523, 1528, 1535, 1541, 1548, 1553, 1559, 1565, 1571, 1578, 1585, 1591, 1598, 1605, 1612, 1619, 1626, 1633, 1640, 1647, 1654, 1666, 1676, 1684, 1687, 1694, 1702, 1706, 1712, 1717, 1720, 1725, 1732, 1737, 1741, 1748, 1757, 1767, 1773, 1781, and 1790, and a CDR3 having an amino acid sequence at least 65%, at least 70%, at least 75%, at least 80%, at least 85%, at least 90%, at least 95%, at least 99%, or 100% identical to any one of SEQ ID NOs: 1101, 1108, 1115, 1125, 1132, 1139, 1146, 1153, 1160, 1167, 1172, 1179, 1186, 1193, 1197, 1205, 1209, 1217, 1226, 1233, 1240, 1245, 1252, 1259, 1269, 1276, 1283, 1290, 1297, 1304, 1311, 1317, 1324, 1331, 1337, 1344, 1350, 1357, 1364, 1371, 1378, 1387, 1392, 1399, 1406, 1412, 1419, 1426, 1433, 1439, 1446, 1453, 1459, 1466, 1473, 1480, 1486, 1493, 1500, 1506, 1517, 1524, 1529, 1536, 1542, 1549, 1554, 1560, 1566, 1572, 1579, 1586, 1592, 1599, 1606, 1613, 1620, 1627, 1634, 1641, 1648, 1655, 1661, 1667, 1670, 1677, 1685, 1688, 1695, 1703, 1707, 1713, 1733, 1749, 1758, 1762, 1774, 1782, 1791, and 1975; and VH2 is a second immunoglobulin heavy chain variable region that specifically binds to a tumor-associated antigen (TAA), comprising a CDR1 having an amino acid sequence at least 65%, at least 70%, at least 75%, at least 80%, at least 85%, at least 90%, at least 95%, at least 99%, or 100% identical to any one of SEQ ID NOs: 1099, 1106, 1113, 1117, 1123, 1130, 1137, 1144, 1151, 1158, 1165, 1177, 1184, 1191, 1203, 1215, 1224, 1231, 1238, 1243, 1250, 1257, 1264, 1274, 1281, 1288, 1295, 1302, 1309, 1315, 1322, 1329, 1335, 1342, 1348, 1355, 1362, 1369, 1376, 1385, 1397, 1404, 1417, 1424, 1431, 1437, 1444, 1451, 1458, 1464, 1471, 1478, 1484, 1491, 1498, 1504, 1511, 1515, 1522, 1534, 1547, 1552, 1564, 1577, 1584, 1590, 1597, 1604, 1611, 1618, 1625, 1632, 1639, 1646, 1653, 1660, 1665, 1675, 1683, 1693, 1701, 1705, 1716, 1719, 1731, 1736, 1747, 1756, 1772, 1780, and 1789, a CDR2 having an amino acid sequence at least 65%, at least 70%, at least 75%, at least 80%, at least 85%, at least 90%, at least 95%, at least 99%, or 100% identical to any one of SEQ ID NOs: 1100, 1107, 1114, 1118, 1124, 1131, 1138, 1145, 1152, 1159, 1166, 1178, 1185, 1192, 1204, 1216, 1225, 1232, 1239, 1244, 1251, 1258, 1275, 1282, 1289, 1296, 1303, 1310, 1316, 1323, 1330, 1336, 1343, 1349, 1356, 1363, 1370, 1377, 1386, 1391, 1398, 1405, 1411, 1418, 1425, 1432, 1438, 1445, 1452, 1465, 1472, 1479, 1485, 1492, 1499, 1505, 1516, 1523, 1528, 1535, 1541, 1548, 1553, 1559, 1565, 1571, 1578, 1585, 1591, 1598, 1605, 1612, 1619, 1626, 1633, 1640, 1647, 1654, 1666, 1676, 1684, 1687, 1694, 1702, 1706, 1712, 1717, 1720, 1725, 1732, 1737, 1741, 1748, 1757, 1767, 1773, 1781, and 1790, and a CDR3 having an amino acid sequence at least 65%, at least 70%, at least 75%, at least 80%, at least 85%, at least 90%, at least 95%, at least 99%, or 100% identical to any one of SEQ ID NOs: 1101, 1108, 1115, 1125, 1132, 1139, 1146, 1153, 1160, 1167, 1172, 1179, 1186, 1193, 1197, 1205, 1209, 1217, 1226, 1233, 1240, 1245, 1252, 1259, 1269, 1276, 1283, 1290, 1297, 1304, 1311, 1317, 1324, 1331, 1337, 1344, 1350, 1357, 1364, 1371, 1378, 1387, 1392, 1399, 1406, 1412, 1419, 1426, 1433, 1439, 1446, 1453, 1459, 1466, 1473, 1480, 1486, 1493, 1500, 1506, 1517, 1524, 1529, 1536, 1542, 1549, 1554, 1560, 1566, 1572, 1579, 1586, 1592, 1599, 1606, 1613, 1620, 1627, 1634, 1641, 1648, 1655, 1661, 1667, 1670, 1677, 1685, 1688, 1695, 1703, 1707, 1713, 1733, 1749, 1758, 1762, 1774, 1782, 1791, and 1975; (b) VL1 is a first immunoglobulin light chain variable region that specifically binds to an infectious disease antigen that is not a sarbecovirus antigen, comprising a CDR1 having an amino acid sequence at least 65%, at least 70%, at least 75%, at least 80%, at least 85%, at least 90%, at least 95%, at least 99%, or 100% identical to any one of SEQ ID NOs: 1428, 1793, 1798, 1810, 1817, 1824, 1977, 1985, 1993 and 2001, a CDR2 having an amino acid sequence at least 65%, at least 70%, at least 75%, at least 80%, at least 85%, at least 90%, at least 95%, at least 99%, or 100% identical to any one of amino acid sequences YTS, DTS, GAS, and AAS or an amino acid sequence at least 65%, at least 70%, at least 75%, at least 80%, at least 85%, at least 90%, at least 95%, at least 99%, or 100% identical to any one of SEQ ID NOs: 1978, 1986, 1994, and 2002, and a CDR3 having an amino acid sequence at least 65%, at least 70%, at least 75%, at least 80%, at least 85%, at least 90%, at least 95%, at least 99%, or 100% identical to any one of SEQ ID NOs: 1229, 1799, 1805, 1811, 1818, 1825, 1979, 1987, 1995, and 2003; VL2 is a second immunoglobulin light chain variable region that specifically binds to an infectious disease antigen that is not a sarbecovirus antigen, comprising a CDR1 having an amino acid sequence at least 65%, at least 70%, at least 75%, at least 80%, at least 85%, at least 90%, at least 95%, at least 99%, or 100% identical to any one of SEQ ID NOs: 1428, 1793, 1798, 1810, 1817, 1824, 1977, 1985, 1993 and 2001, a CDR2 having an amino acid sequence at least 65%, at least 70%, at least 75%, at least 80%, at least 85%, at least 90%, at least 95%, at least 99%, or 100% identical to any one of amino acid sequences YTS, DTS, GAS, and AAS or an amino acid sequence at least 65%, at least 70%, at least 75%, at least 80%, at least 85%, at least 90%, at least 95%, at least 99%, or 100% identical to any one of SEQ ID NOs: 1978, 1986, 1994, and 2002, and a CDR3 having an amino acid sequence at least 65%, at least 70%, at least 75%, at least 80%, at least 85%, at least 90%, at least 95%, at least 99%, or 100% identical to any one of SEQ ID NOs: 1229, 1799, 1805, 1811, 1818, 1825, 1979, 1987, 1995, and 2003; VH1 is a first immunoglobulin heavy chain variable region that specifically binds to an infectious disease antigen that is not a sarbecovirus antigen, comprising a CDR1 having an amino acid sequence at least 65%, at least 70%, at least 75%, at least 80%, at least 85%, at least 90%, at least 95%, at least 99%, or 100% identical to any one of SEQ ID NOs: 1577, 1795, 1801, 1813, 1820, 1827, 1981, 1989, 1997, and 2005, a CDR2 having an amino acid sequence at least 65%, at least 70%, at least 75%, at least 80%, at least 85%, at least 90%, at least 95%, at least 99%, or 100% identical to any one of SEQ ID NOs: 1159, 1802, 1807, 1814, 1821, 1828, 1982, 1990, 1998, and 2006, and a CDR3 having an amino acid sequence at least 65%, at least 70%, at least 75%, at least 80%, at least 85%, at least 90%, at least 95%, at least 99%, or 100% identical to any one of SEQ ID NOs: 1796, 1803, 1808, 1815, 1822, 1829, 1983, 1991, 1999, and 2007; and VH2 is a second immunoglobulin heavy chain variable region that specifically binds to an infectious disease antigen that is not a sarbecovirus antigen, comprising a CDR1 having an amino acid sequence at least 65%, at least 70%, at least 75%, at least 80%, at least 85%, at least 90%, at least 95%, at least 99%, or 100% identical to any one of SEQ ID NOs: 1577, 1795, 1801, 1813, 1820, 1827, 1981, 1989, 1997, and 2005, a CDR2 having an amino acid sequence at least 65%, at least 70%, at least 75%, at least 80%, at least 85%, at least 90%, at least 95%, at least 99%, or 100% identical to any one of SEQ ID NOs: 1159, 1802, 1807, 1814, 1821, 1828, 1982, 1990, 1998, and 2006, and a CDR3 having an amino acid sequence at least 65%, at least 70%, at least 75%, at least 80%, at least 85%, at least 90%, at least 95%, at least 99%, or 100% identical to any one of SEQ ID NOs: 1796, 1803, 1808, 1815, 1822, 1829, 1983, 1991, 1999, and 2007; or (c) VL1 is a first immunoglobulin light chain variable region that specifically binds to an other-pathology antigen, comprising a CDR1 having an amino acid sequence at least 65%, at least 70%, at least 75%, at least 80%, at least 85%, at least 90%, at least 95%, at least 99%, or 100% identical to any one of SEQ ID NOs: 1120, 1228, 1359, 1519, 1831, 1838, 1845, 1852, 1859, 1866, 1872, 1878, 1885, 1891, 1898, 1905, 1911, 1917, 1924, 1931, 1938, 1945, and 1963, a CDR2 having an amino acid sequence at least 65%, at least 70%, at least 75%, at least 80%, at least 85%, at least 90%, at least 95%, at least 99%, or 100% identical to any one of amino acid sequences AAS, AVS, DAS, DNN, EDN, EVS, GAS, GNG, KAS, KVS, LVS, NTD, STS, WAS, and YTS, and a CDR3 having an amino acid sequence at least 65%, at least 70%, at least 75%, at least 80%, at least 85%, at least 90%, at least 95%, at least 99%, or 100% identical to any one of SEQ ID NOs: 1360, 1832, 1839, 1846, 1853, 1860, 1867, 1873, 1879, 1886, 1892, 1899, 1906, 1912, 1918, 1925, 1932, 1939, 1946, 1951, 1957, 1964, and 1970; VL2 is a second immunoglobulin light chain variable region that specifically binds to an other-pathology antigen, comprising a CDR1 having an amino acid sequence at least 65%, at least 70%, at least 75%, at least 80%, at least 85%, at least 90%, at least 95%, at least 99%, or 100% identical to any one of SEQ ID NOs: 1120, 1228, 1359, 1519, 1831, 1838, 1845, 1852, 1859, 1866, 1872, 1878, 1885, 1891, 1898, 1905, 1911, 1917, 1924, 1931, 1938, 1945, and 1963, a CDR2 having an amino acid sequence at least 65%, at least 70%, at least 75%, at least 80%, at least 85%, at least 90%, at least 95%, at least 99%, or 100% identical to any one of amino acid sequences AAS, AVS, DAS, DNN, EDN, EVS, GAS, GNG, KAS, KVS, LVS, NTD, STS, WAS, and YTS, and a CDR3 having an amino acid sequence at least 65%, at least 70%, at least 75%, at least 80%, at least 85%, at least 90%, at least 95%, at least 99%, or 100% identical to any one of SEQ ID NOs: 1360, 1832, 1839, 1846, 1853, 1860, 1867, 1873, 1879, 1886, 1892, 1899, 1906, 1912, 1918, 1925, 1932, 1939, 1946, 1951, 1957, 1964, and 1970; VH1 is a first immunoglobulin heavy chain variable region that specifically binds to an other-pathology antigen, comprising a CDR1 having an amino acid sequence at least 65%, at least 70%, at least 75%, at least 80%, at least 85%, at least 90%, at least 95%, at least 99%, or 100% identical to any one of SEQ ID NOs: 1309, 1362, 1437, 1552, 1618, 1639, 1834, 1841, 1848, 1855, 1862, 1881, 1894, 1901, 1920, 1927, 1934, 1941, 1953, 1959, and 1966, a CDR2 having an amino acid sequence at least 65%, at least 70%, at least 75%, at least 80%, at least 85%, at least 90%, at least 95%, at least 99%, or 100% identical to any one of SEQ ID NOs: 1363, 1835, 1842, 1849, 1856, 1863, 1869, 1875, 1882, 1888, 1895, 1902, 1908, 1914, 1921, 1928, 1935, 1942, 1948, 1954, 1960, 1967, and 1972, and a CDR3 having an amino acid sequence at least 65%, at least 70%, at least 75%, at least 80%, at least 85%, at least 90%, at least 95%, at least 99%, or 100% identical to any one of SEQ ID NOs: 1364, 1836, 1843, 1850, 1857, 1864, 1870, 1876, 1883, 1889, 1896, 1903, 1909, 1915, 1922, 1929, 1936, 1943, 1949, 1955, 1961, 1968, and 1973; and VH2 is a second immunoglobulin heavy chain variable region that specifically binds to an other-pathology antigen, comprising a CDR1 having an amino acid sequence at least 65%, at least 70%, at least 75%, at least 80%, at least 85%, at least 90%, at least 95%, at least 99%, or 100% identical to any one of SEQ ID NOs: 1309, 1362, 1437, 1552, 1618, 1639, 1834, 1841, 1848, 1855, 1862, 1881, 1894, 1901, 1920, 1927, 1934, 1941, 1953, 1959, and 1966, a CDR2 having an amino acid sequence at least 65%, at least 70%, at least 75%, at least 80%, at least 85%, at least 90%, at least 95%, at least 99%, or 100% identical to any one of SEQ ID NOs: 1363, 1835, 1842, 1849, 1856, 1863, 1869, 1875, 1882, 1888, 1895, 1902, 1908, 1914, 1921, 1928, 1935, 1942, 1948, 1954, 1960, 1967, and 1972, and a CDR3 having an amino acid sequence at least 65%, at least 70%, at least 75%, at least 80%, at least 85%, at least 90%, at least 95%, at least 99%, or 100% identical to any one of SEQ ID NOs: 1364, 1836, 1843, 1850, 1857, 1864, 1870, 1876, 1883, 1889, 1896, 1903, 1909, 1915, 1922, 1929, 1936, 1943, 1949, 1955, 1961, 1968, and 1973; and wherein: CL is an immunoglobulin light chain constant region; CH1 is an immunoglobulin heavy chain constant region 1; and L1-L15 are optional amino acid linkers.

[0547] In some aspects, and in any one of the formulas depicted herein, (a) VL1 comprises an amino acid sequence that is at least 65%, at least 70%, at least 75%, at least 80%, at least 85%, at least 90%, at least 95%, at least 99%, or 100% identical to SEQ ID NO: 1098, 1105, 1112, 1122, 1129, 1136, 1143, 1150, 1157, 1164, 1171, 1176, 1183, 1190, 1196, 1202, 1208, 1214, 1219, 1223, 1230, 1237, 1242, 1249, 1256, 1263, 1268, 1273, 1280, 1287, 1294, 1301, 1308, 1314, 1321, 1328, 1334, 1341, 1347, 1354, 1361, 1368, 1375, 1380, 1384, 1390, 1396, 1403, 1410, 1416, 1423, 1430, 1436, 1443, 1450, 1457, 1463, 1470, 1477, 1483, 1490, 1497, 1503, 1510, 1514, 1521, 1527, 1533, 1540, 1546, 1551, 1558, 1563, 1570, 1576, 1583, 1589, 1596, 1603, 1610, 1617, 1624, 1631, 1638, 1645, 1652, 1659, 1664, 1669, 1674, 1682, 1692, 1700, 1711, 1721, 1724, 1730, 1740, 1746, 1755, 1764, 1766, 1771, 1779, 1784, and 1788; VL2 comprises an amino acid sequence that is at least 65%, at least 70%, at least 75%, at least 80%, at least 85%, at least 90%, at least 95%, at least 99%, or 100% identical to SEQ ID NO: 1098, 1105, 1112, 1122, 1129, 1136, 1143, 1150, 1157, 1164, 1171, 1176, 1183, 1190, 1196, 1202, 1208, 1214, 1219, 1223, 1230, 1237, 1242, 1249, 1256, 1263, 1268, 1273, 1280, 1287, 1294, 1301, 1308, 1314, 1321, 1328, 1334, 1341, 1347, 1354, 1361, 1368, 1375, 1380, 1384, 1390, 1396, 1403, 1410, 1416, 1423, 1430, 1436, 1443, 1450, 1457, 1463, 1470, 1477, 1483, 1490, 1497, 1503, 1510, 1514, 1521, 1527, 1533, 1540, 1546, 1551, 1558, 1563, 1570, 1576, 1583, 1589, 1596, 1603, 1610, 1617, 1624, 1631, 1638, 1645, 1652, 1659, 1664, 1669, 1674, 1682, 1692, 1700, 1711, 1721, 1724, 1730, 1740, 1746, 1755, 1764, 1766, 1771, 1779, 1784, and 1788; VH1 comprises an amino acid sequence that is at least 65%, at least 70%, at least 75%, at least 80%, at least 85%, at least 90%, at least 95%, at least 99%, or 100% identical to SEQ ID NO: 1102, 1109, 1116, 1119, 1126, 1133, 1140, 1147, 1154, 1161, 1168, 1173, 1180, 1187, 1194, 1198, 1206, 1210, 1218, 1220, 1227, 1234, 1241, 1246, 1253, 1260, 1265, 1270, 1277, 1284, 1291, 1298, 1305, 1312, 1318, 1325, 1332, 1338, 1345, 1351, 1358, 1365, 1372, 1379, 1381, 1388, 1393, 1400, 1407, 1413, 1420, 1427, 1434, 1440, 1447, 1454, 1460, 1467, 1474, 1481, 1487, 1494, 1501, 1507, 1512, 1518, 1525, 1530, 1537, 1543, 1550, 1555, 1561, 1567, 1573, 1580, 1587, 1593, 1600, 1607, 1614, 1621, 1628, 1635, 1642, 1649, 1656, 1662, 1668, 1671, 1678, 1686, 1696, 1704, 1714, 1722, 1726, 1734, 1742, 1750, 1759, 1760, 1765, 1768, 1775, 1783, 1785, and 1792; and VH2 comprises an amino acid sequence that is at least 65%, at least 70%, at least 75%, at least 80%, at least 85%, at least 90%, at least 95%, at least 99%, or 100% identical to SEQ ID NO: 1102, 1109, 1116, 1119, 1126, 1133, 1140, 1147, 1154, 1161, 1168, 1173, 1180, 1187, 1194, 1198, 1206, 1210, 1218, 1220, 1227, 1234, 1241, 1246, 1253, 1260, 1265, 1270, 1277, 1284, 1291, 1298, 1305, 1312, 1318, 1325, 1332, 1338, 1345, 1351, 1358, 1365, 1372, 1379, 1381, 1388, 1393, 1400, 1407, 1413, 1420, 1427, 1434, 1440, 1447, 1454, 1460, 1467, 1474, 1481, 1487, 1494, 1501, 1507, 1512, 1518, 1525, 1530, 1537, 1543, 1550, 1555, 1561, 1567, 1573, 1580, 1587, 1593, 1600, 1607, 1614, 1621, 1628, 1635, 1642, 1649, 1656, 1662, 1668, 1671, 1678, 1686, 1696, 1704, 1714, 1722, 1726, 1734, 1742, 1750, 1759, 1760, 1765, 1768, 1775, 1783, 1785, and 1792; (b) VL1 comprises an amino acid sequence that is at least 65%, at least 70%, at least 75%, at least 80%, at least 85%, at least 90%, at least 95%, at least 99%, or 100% identical to SEQ ID NO: 1794, 1800, 1806, 1812, 1819, 1826, 1980, 1988, 1996, and 2004; VL2 comprises an amino acid sequence that is at least 65%, at least 70%, at least 75%, at least 80%, at least 85%, at least 90%, at least 95%, at least 99%, or 100% identical to SEQ ID NO: 1794, 1800, 1806, 1812, 1819, 1826, 1980, 1988, 1996, and 2004; VH1 comprises an amino acid sequence that is at least 65%, at least 70%, at least 75%, at least 80%, at least 85%, at least 90%, at least 95%, at least 99%, or 100% identical to SEQ ID NO: 1797, 1804, 1809, 1816, 1823, 1830, 1984, 1992, 2000, and 2008; and VH2 comprises an amino acid sequence that is at least 65%, at least 70%, at least 75%, at least 80%, at least 85%, at least 90%, at least 95%, at least 99%, or 100% identical to SEQ ID NO: 1797, 1804, 1809, 1816, 1823, 1830, 1984, 1992, 2000, and 2008; or (c) VL1 comprises an amino acid sequence that is at least 65%, at least 70%, at least 75%, at least 80%, at least 85%, at least 90%, at least 95%, at least 99%, or 100% identical to SEQ ID NO: 1361, 1833, 1840, 1847, 1854, 1861, 1868, 1874, 1880, 1887, 1893, 1900, 1907, 1913, 1919, 1926, 1933, 1940, 1947, 1952, 1958, 1965, and 1971; VL2 comprises an amino acid sequence that is at least 65%, at least 70%, at least 75%, at least 80%, at least 85%, at least 90%, at least 95%, at least 99%, or 100% identical to SEQ ID NO: 1361, 1833, 1840, 1847, 1854, 1861, 1868, 1874, 1880, 1887, 1893, 1900, 1907, 1913, 1919, 1926, 1933, 1940, 1947, 1952, 1958, 1965, and 1971; VH1 comprises an amino acid sequence that is at least 65%, at least 70%, at least 75%, at least 80%, at least 85%, at least 90%, at least 95%, at least 99%, or 100% identical to SEQ ID NO: 1365, 1837, 1844, 1851, 1858, 1865, 1871, 1877, 1884, 1890, 1897, 1904, 1910, 1916, 1923, 1930, 1937, 1944, 1950, 1956, 1962, 1969, and 1974; and VH2 comprises an amino acid sequence that is at least 65%, at least 70%, at least 75%, at least 80%, at least 85%, at least 90%, at least 95%, at least 99%, or 100% identical to SEQ ID NO: 1365, 1837, 1844, 1851, 1858, 1865, 1871, 1877, 1884, 1890, 1897, 1904, 1910, 1916, 1923, 1930, 1937, 1944, 1950, 1956, 1962, 1969, and 1974.

[0548] In some aspects, and in any one of the formulas depicted herein, the CL comprises an amino acid sequence that is at least 65%, at least 70%, at least 75%, at least 80%, at least 85%, at least 90%, at least 95%, at least 99%, or 100% identical to any one of SEQ ID NOs: 374, 637, or 1092-1095. In some aspects, and in any one of the formulas depicted herein, the CH1 comprises an amino acid sequence that is at least 65%, at least 70%, at least 75%, at least 80%, at least 85%, at least 90%, at least 95%, at least 99%, or 100% identical to any one of SEQ ID NOs: 375, 634, 1070, 1071, or 1086-1091.

[0549] In some aspects, the antigen binding polypeptide further comprises an immunoglobulin heavy chain constant region 2 (CH2), and wherein the CH2 comprises an amino acid sequence that is at least 65%, at least 70%, at least 75%, at least 80%, at least 85%, at least 90%, at least 95%, at least 99%, or 100% identical to any one of SEQ ID NOs: 1075-1078. In some aspects, the antigen binding polypeptide further comprises an immunoglobulin heavy chain constant region 3 (CH3), and wherein the CH3 comprises an amino acid sequence that is at least 65%, at least 70%, at least 75%, at least 80%, at least 85%, at least 90%, at least 95%, at least 99%, or 100% identical to any one of SEQ ID NOs: 1079-1085.

[0550] In some aspects, the antigen binding polypeptide further comprises an Fc region at the carboxy-terminus. In some aspects, the Fc region comprises an immunoglobulin heavy chain constant region 2 (CH2) and/or an immunoglobulin heavy chain constant region 3 (CH3). In some aspects, the CH2 comprises an amino acid sequence that is at least 65%, at least 70%, at least 75%, at least 80%, at least 85%, at least 90%, at least 95%, at least 99%, or 100% identical to any one of SEQ ID NOs: 1075-1078. In some aspects, the CH3 comprises an amino acid sequence that is at least 65%, at least 70%, at least 75%, at least 80%, at least 85%, at least 90%, at least 95%, at least 99%, or 100% identical to any one of SEQ ID NOs: 1079-1085.

[0551] In some aspects, the Fc region further comprises an immunoglobulin hinge. In some aspects, the immunoglobulin hinge comprises an amino acid sequence at least 65%, at least 70%, at least 75%, at least 80%, at least 85%, at least 90%, at least 95%, at least 99%, or 100% identical to any one of SEQ ID NOS: 635.636, 1072, 1073, or 1074.

[0552] In some aspects, the Fc region comprises one or more half-life extension amino acid substitutions, one or more knob-into-hole modification, one or more Fc effector function knockout mutation, or any combination thereof. In some aspects, the Fc region is an IgG Fc region. In some aspects, the Fc region is an IgG1 or an IgG4 Fc region. In some aspects, the one or more half-life extension amino acid substitutions comprise one or more of amino acid substitutions M428L, N434A, N434S, L234F, L235E, P331S, M252Y, S254T, or T256E, or equivalent thereof, based on the EU numbering scheme.

[0553] In some aspects, the one or more half-life extension amino acid substitutions comprise amino acid substitutions: (i) L234A and L235A (LA); (ii) M428L and N434S (LS); (iii) L234F and L235E; (iv) L234F, L235E, and P331S (TM); and/or (v) M252Y, S254T, and T256E (YTE); or equivalent thereof, based on the EU numbering scheme.

[0554] In some aspects, the one or more the knob-into-hole modification comprises: (i) knob substitutions of S354C and T366W; (ii) hole substitutions of Y349C, T366S, L368A and Y407V; or (iii) a combination thereof; or equivalent thereof, based on the EU numbering scheme. In some aspects, the one or more Fc effector function knockout mutation is L234A, L235A, P239A, or a combination thereof, or equivalent thereof, based on the EU numbering scheme.

[0555] In some aspects, the Fc region comprises an amino acid sequence that is at least 65%, at least 70%, at least 75%, at least 80%, at least 85%, at least 90%, at least 95%, at least 99%, or 100% identical to any one of SEQ ID NOs: 376-380.

[0556] Also provided herein is an antigen binding polypeptide complex comprising a first polypeptide and a second polypeptide, wherein the first polypeptide has a structure, from amino-terminus to carboxy-terminus, represented by: VL1-L1-CL-L2-VL2-L3-VH2-L4-VH1-L5-CH1; VL1-L1-CL-L2-VH2-L3-VL2-L4-VH1-L5-CH1; VL1-L1-CH1-L2-VL2-L3-VH2-L4-VH1-L5-CL; VL1-L1-CH1-L2-VH2-L3- VL2-L4-VH1-L5-CL; VH1-L1-CL-L2-VL2-L3-VH2-L4-VL1-L5-CH1; VH1-L1-CL-L2-VH2-L3-VL2-L4-VL1-L5-CH1; VH1-L1-CH1-L2-VL2-L3-VH2-L4-VL1-L5-CL; VH1-L1-CH1-L2-VH2-L3-VL2-L4- VL1-L5-CL; VL2-L1-CL-L2-VL1-L3-VH1-L4-VH2-L5-CH1; VL2-L1-CL-L2-VH1-L3-VL1-L4-VH2-L5-CH1; VL2-L1-CH1-L2-VL1-L3-VH1-L4-VH2-L5-CL; VL2-L1-CH1-L2-VH1-L3-VL1-L4-VH2-L5- CL; VH2-L1-CL-L2-VL1-L3-VH1-L4-VL2-L5-CH1; VH2-L1-CL-L2-VH1-L3-VL1-L4-VL2-L5-CH1; VH2-L1-CH1-L2-VL1-L3-VH1-L4-VL2-L5-CL; or VH2-L1-CH1-L2-VH1-L3-VL1-L4-VL2-L5-CL; wherein the second polypeptide has a structure, from amino-terminus to carboxy-terminus, represented by: VL3-L6-CL-L7-VL4-L8-VH4-L9-VH3-L10-CH1; VL3-L6-CL-L7-VH4-L8-VL4-L9-VH3-L10-CH1; VL3-L6- CH1-L7-VL4-L8-VH4-L9-VH3-L10-CL; VL3-L6-CH1-L7-VH4-L8-VL4-L9-VH3-L10-CL; VH3-L6-CL-L7- VL4-L8-VH4-L9-VL3-L10-CH1; VH3-L6-CL-L7-VH4-L8-VL4-L9-VL3-L10-CH1; VH3-L6-CH1-L7-VL4-L8-VH4-L9-VL3-L10-CL; VH3-L6-CH1-L7-VH4-L8-VL4-L9-VL3-L10-CL; VL4-L6-CL-L7-VL3-L8- VH3-L9-VH4-L10-CH1; VL4-L6-CL-L7-VH3-L8-VL3-L9-VH4-L10-CH1; VL4-L6-CH1-L7-VL3-L8-VH3-L9-VH4-L10-CL; VL4-L6-CH1-L7-VH3-L8-VL3-L9-VH4-L10-CL; VH4-L6-CL-L7-VL3-L8-VH3-L9- VL4-L10-CH1; VH4-L6-CL-L7-VH3-L8-VL3-L9-VL4-L10-CH1; VH4-L6-CH1-L7-VL3-L8-VH3-L9-VL4-L10-CL; or VH4-L6-CH1-L7-VH3-L8-VL3-L9-VL4-L10-CL; and wherein: VL1 is a first immunoglobulin light chain variable region that specifically binds to (i) a tumor-associated antigen (TAA), (ii) an infectious disease antigen that is not a sarbecovirus antigen, or (iii) an other-pathology antigen; VL2 is a second immunoglobulin light chain variable region that specifically binds to (i) a tumor-associated antigen (TAA), (ii) an infectious disease antigen that is not a sarbecovirus antigen, or (iii) an other-pathology antigen; VL3 is a third immunoglobulin light chain variable region that specifically binds to (i) a tumor-associated antigen (TAA), (ii) an infectious disease antigen that is not a sarbecovirus antigen, or (iii) an other-pathology antigen; VL4 is a fourth immunoglobulin light chain variable region that specifically binds to (i) a tumor-associated antigen (TAA), (ii) an infectious disease antigen that is not a sarbecovirus antigen, or (iii) an other-pathology antigen; VH1 is a first immunoglobulin heavy chain variable region that specifically binds to (i) a tumor-associated antigen (TAA), (ii) an infectious disease antigen that is not a sarbecovirus antigen, or (iii) an other-pathology antigen; VH2 is a second immunoglobulin heavy chain variable region that specifically binds to (i) a tumor-associated antigen (TAA), (ii) an infectious disease antigen that is not a sarbecovirus antigen, or (iii) an other-pathology antigen; VH3 is a third immunoglobulin heavy chain variable region that specifically binds to (i) a tumor-associated antigen (TAA), (ii) an infectious disease antigen that is not a sarbecovirus antigen, or (iii) an other-pathology antigen; VH4 is a fourth immunoglobulin heavy chain variable region that specifically binds to (i) a tumor-associated antigen (TAA), (ii) an infectious disease antigen that is not a sarbecovirus antigen, or (iii) an other-pathology antigen; CL is an immunoglobulin light chain constant region; CH1 is an immunoglobulin heavy chain constant region 1; and L1-L10 are optional amino acid linkers.

[0557] Also provided herein is an antigen binding polypeptide complex comprising a first polypeptide and a second polypeptide, wherein the first polypeptide has a structure, from amino-terminus to carboxy-terminus, represented by: VL1-CL-L1-VL2-L2-VH2-L3-VH1-CH1; VL1-CL-L1-VH2-L2-VL2-L3-VH1-CH1; VL1-CH1-L1-VL2-L2-VH2-L3-VH1-CL; VL1-CH1-L1-VH2-L2-VL2-L3-VH1-CL; VH1-CL-L1-VL2-L2-VH2-L3-VL1-CH1; VH1-CL-L1-VH2-L2-VL2-L3-VL1-CH1; VH1-CH1-L1-VL2-L2-VH2-L3-VL1-CL; VH1-CH1-L1-VH2-L2-VL2-L3-VL1-CL; VL2-CL-L1-VL1-L2-VH1-L3-VH2-CH1; VL2-CL-L1-VH1-L2-VL1-L3-VH2-CH1; VL2-CH1-L1-VL1-L2-VH1-L3-VH2-CL; VL2-CH1-L1-VH1-L2- VL1-L3-VH2-CL; VH2-CL-L1-VL1-L2-VH1-L3-VL2-CH1; VH2-CL-L1-VH1-L2-VL1-L3-VL2-CH1; VH2-CH1-L1-VL1-L2-VH1-L3-VL2-CL; or VH2-CH1-L1-VH1-L2-VL1-L3-VL2-CL; wherein the second polypeptide has a structure, from amino-terminus to carboxy-terminus, represented by: VL3-CL-L4-VL4-L5-VH4-L6-VH3-CH1; VL3-CL-L4-VH4-L5-VL4-L6-VH3-CH1; VL3-CH1-L4-VL4-L5-VH4-L6-VH3-CL; VL3-CH1-L4-VH4-L5-VL4-L6-VH3-CL; VH3-CL-L4-VL4-L5-VH4-L6-VL3-CH1; VH3-CL-L4-VH4-L5-VL4-L6-VL3-CH1; VH3-CH1-L4-VL4-L5-VH4-L6-VL3-CL; VH3-CH1-L4-VH4-L5-VL4-L6-VL3-CL; VL4-CL-L4-VL3-L5-VH3-L6-VH4-CH1; VL4-CL-L4-VH3-L5-VL3-L6-VH4-CH1; VL4-CH1-L4-VL3-L5-VH3-L6-VH4-CL; VL4-CH1-L4-VH3-L5-VL3-L6-VH4-CL; VH4-CL-L4-VL3-L5-VH3- L6-VL4-CH1; VH4-CL-L4-VH3-L5-VL3-L6-VL4-CH1; VH4-CH1-L4-VL3-L5-VH3-L6-VL4-CL; or VH4-CH1-L4-VH3-L5-VL3-L6-VL4-CL; and wherein: VL1 is a first immunoglobulin light chain variable region that specifically binds to (i) a tumor-associated antigen (TAA), (ii) an infectious disease antigen that is not a sarbecovirus antigen, or (iii) an other-pathology antigen; VL2 is a second immunoglobulin light chain variable region that specifically binds to (i) a tumor-associated antigen (TAA), (ii) an infectious disease antigen that is not a sarbecovirus antigen, or (iii) an other-pathology antigen; VL3 is a third immunoglobulin light chain variable region that specifically binds to (i) a tumor-associated antigen (TAA), (ii) an infectious disease antigen that is not a sarbecovirus antigen, or (iii) an other-pathology antigen; VL4 is a fourth immunoglobulin light chain variable region that specifically binds to (i) a tumor-associated antigen (TAA), (ii) an infectious disease antigen that is not a sarbecovirus antigen, or (iii) an other-pathology antigen; VH1 is a first immunoglobulin heavy chain variable region that specifically binds to (i) a tumor-associated antigen (TAA), (ii) an infectious disease antigen that is not a sarbecovirus antigen, or (iii) an other-pathology antigen; VH2 is a second immunoglobulin heavy chain variable region that specifically binds (i) a tumor-associated antigen (TAA), (ii) an infectious disease antigen that is not a sarbecovirus antigen, or (iii) an other-pathology antigen; VH3 is a third immunoglobulin heavy chain variable region that specifically binds to (i) a tumor-associated antigen (TAA), (ii) an infectious disease antigen that is not a sarbecovirus antigen, or (iii) an other-pathology antigen; VH4 is a fourth immunoglobulin heavy chain variable region that specifically binds to (i) a tumor-associated antigen (TAA), (ii) an infectious disease antigen that is not a sarbecovirus antigen, or (iii) an other-pathology antigen; CL is an immunoglobulin light chain constant region; CH1 is an immunoglobulin heavy chain constant region 1; and L1-L6 are amino acid linkers.

[0558] Also provided herein is an antigen binding polypeptide complex comprising a first polypeptide and a second polypeptide, wherein the first polypeptide has a structure, from amino-terminus to carboxy-terminus, represented by: VL1-L1-VH1-L2-VL2-L3-CL-L4-VH2-L5-CH1; VL1-L1-VH1-L2-VL2-L3-CH1-L4-VH2-L5-CL; VL1-L1-VH1-L2-VH2-L3-CL-L4-VL2-L5-CH1; VL1-L1-VH1-L2-VH2-L3-CH1-L4-VL2-L5-CL; VL1-L1-VL2-L2-VH1-L3-CL-L4-VH2-L5-CH1; VL1-L1-VL2-L2-VH1-L3-CH1-L4-VH2-L5-CL; VL1-L1-VH2-L2-VH1-L3-CL-L4-VL2-L5-CH1; VL1-L1-VH2-L2-VH1-L3-CH1-L4-VL2-L5-CL; VH1-L1-VL1-L2-VL2-L3-CL-L4-VH2-L5-CH1; VH1-L1-VL1-L2-VL2-L3-CH1-L4-VH2-L5-CL; VH1-L1-VL1-L2-VH2-L3-CL-L4-VL2-L5-CH1; VH1-L1-VL1-L2-VH2-L3-CH1-L4-VL2-L5- CL; VH1-L1-VL2-L2-VL1-L3-CL-L4-VH2-L5-CH1; VH1-L1-VL2-L2-VL1-L3-CH1-L4-VH2-L5-CL; VH1-L1-VH2-L2-VL1-L3-CL-L4-VL2-L5-CH1; VH1-L1-VH2-L2-VL1-L3-CH1-L4-VL2-L5-CL; VL2-L1-VL1-L2-VH2-L3-CL-L4-VH1-L5-CH1; VL2-L1-VL1-L2-VH2-L3-CH1-L4-VH1-L5-CL; VL2-L1-VH1-L2-VH2-L3-CL-L4-VL1-L5-CH1; VL2-L1-VH1-L2-VH2-L3-CH1-L4-VL1-L5-CL; VL2-L1-VH2-L2-VL1-L3-CL-L4-VH1-L5-CH1; VL2-L1-VH2-L2-VL1-L3-CH1-L4-VH1-L5-CL; VL2-L1-VH2-L2-VH1-L3-CL-L4-VL1-L5-CH1; VL2-L1-VH2-L2-VH1-L3-CH1-L4-VL1-L5-CL; VH2-L1-VL1-L2-VL2-L3-CL-L4-VH1-L5-CH1; VH2-L1-VL1-L2-VL2-L3-CH1-L4-VH1-L5-CL; VH2-L1-VH1-L2-VL2-L3-CL-L4-VL1-L5-CH1; VH2-L1-VH1-L2-VL2-L3-CH1-L4-VL1-L5-CL; VH2-L1-VL2-L2-VL1-L3-CL-L4-VH1-L5-CH1; VH2-L1-VL2-L2-VL1-L3-CH1-L4-VH1-L5-CL; VH2-L1-VL2-L2-VH1-L3-CL-L4-VL1-L5-CH1; or VH2-L1-VL2-L2-VH1-L3-CH1-L4-VL1-L5-CL; wherein the second polypeptide has a structure, from amino-terminus to carboxy-terminus, represented by: VL3-L6-VH3-L7-VL4-L8-CL-L9-VH4-L10-CH1; VL3-L6-VH3-L7-VL4-L8-CH1-L9-VH4-L10-CL; VL3-L6-VH3-L7-VH4-L8-CL-L9-VL4-L10-CH1; VL3-L6-VH3-L7-VH4-L8-CH1-L9-VL4-L10-CL; VL3-L6-VL4-L7-VH3-L8-CL-L9-VH4-L10-CH1; VL3-L6-VL4-L7-VH3-L8-CH1-L9-VH4-L10-CL; VL3-L6-VH4-L7-VH3-L8-CL-L9-VL4-L10-CH1; VL3-L6-VH4-L7-VH3-L8-CH1-L9-VL4-L10-CL; VH3-L6-VL3-L7-VL4-L8-CL-L9-VH4-L10-CH1; VH3-L6-VL3-L7-VL4-L8-CH1-L9-VH4-L10-CL; VH3-L6-VL3-L7-VH4-L8-CL-L9-VL4-L10-CH1; VH3-L6-VL3-L7-VH4-L8-CH1-L9-VL4-L10-CL; VH3-L6-VL4-L7-VL3-L8-CL-L9-VH4-L10-CH1; VH3-L6-VL4-L7-VL3-L8-CH1-L9-VH4-L10-CL; VH3-L6-VH4-L7-VL3-L8-CL-L9-VL4-L10-CH1; VH3-L6-VH4-L7-VL3-L8-CH1-L9-VL4-L10-CL; VL4-L6-VL3-L7-VH4-L8-CL-L9-VH3-L10-CH1; VL4-L6-VL3-L7-VH4-L8-CH1-L9-VH3-L10-CL; VL4-L6-VH3-L7-VH4-L8-CL-L9-VL3-L10-CH1; VL4-L6-VH3-L7-VH4-L8-CH1-L9-VL3-L10-CL; VL4-L6-VH4-L7-VL3-L8-CL-L9-VH3-L10-CH1; VL4-L6-VH4-L7-VL3-L8-CH1-L9-VH3-L10-CL; VL4-L6-VH4-L7-VH3-L8-CL-L9-VL3-L10-CH1; VL4-L6-VH4-L7-VH3-L8-CH1-L9-VL3-L10-CL; VH4-L6-VL3-L7-VL4-L8-CL-L9-VH3-L10-CH1; VH4-L6-VL3-L7-VL4-L8-CH1-L9-VH3-L10-CL; VH4-L6-VH3-L7-VL4-L8-CL-L9-VL3-L10-CH1; VH4-L6-VH3-L7-VL4-L8-CH1-L9-VL3-L10-CL; VH4-L6-VL4-L7-VL3-L8-CL-L9-VH3-L10-CH1; VH4-L6-VL4-L7-VL3-L8-CH1-L9-VH3-L10-CL; VH4-L6-VL4-L7-VH3-L8-CL-L9-VL3-L10-CH1; or VH4-L6-VL4-L7-VH3-L8-CH1-L9-VL3-L10-CL; and wherein: VL1 is a first immunoglobulin light chain variable region that specifically binds to (i) a tumor-associated antigen (TAA), (ii) an infectious disease antigen that is not a sarbecovirus antigen, or (iii) an other-pathology antigen; VL2 is a second immunoglobulin light chain variable region that specifically binds to (i) a tumor-associated antigen (TAA), (ii) an infectious disease antigen that is not a sarbecovirus antigen, or (iii) an other-pathology antigen; VL3 is a third immunoglobulin light chain variable region that specifically binds to (i) a tumor-associated antigen (TAA), (ii) an infectious disease antigen that is not a sarbecovirus antigen, or (iii) an other-pathology antigen; VL4 is a fourth immunoglobulin light chain variable region that specifically binds to (i) a tumor-associated antigen (TAA), (ii) an infectious disease antigen that is not a sarbecovirus antigen, or (iii) an other-pathology antigen; VH1 is a first immunoglobulin heavy chain variable region that specifically binds to (i) a tumor-associated antigen (TAA), (ii) an infectious disease antigen that is not a sarbecovirus antigen, or (iii) an other-pathology antigen; VH2 is a second immunoglobulin heavy chain variable region that specifically binds to (i) a tumor-associated antigen (TAA), (ii) an infectious disease antigen that is not a sarbecovirus antigen, or (iii) an other-pathology antigen; VH3 is a third immunoglobulin heavy chain variable region that specifically binds to (i) a tumor-associated antigen (TAA), (ii) an infectious disease antigen that is not a sarbecovirus antigen, or (iii) an other-pathology antigen; VH4 is a fourth immunoglobulin heavy chain variable region that specifically binds to (i) a tumor-associated antigen (TAA), (ii) an infectious disease antigen that is not a sarbecovirus antigen, or (iii) an other-pathology antigen; CL is an immunoglobulin light chain constant region; CH1 is an immunoglobulin heavy chain constant region 1; and L1-L10 are optional amino acid linkers.

[0559] Also provided herein is an antigen binding polypeptide complex comprising a first polypeptide and a second polypeptide, wherein the first polypeptide has a structure, from amino-terminus to carboxy-terminus, represented by: VL1-L1-CL-L2-VH1-L3-CH1-L4-VL2-L5-VH2; VL1-L1-CL-L2-VH1-L3-CH1-L4-VH2-L5-VL2; VL1-L1-CL-L2-VL2-L3-CH1-L4-VH1-L5-VH2; VL1-L1-CL-L2-VH2-L3-CH1-L4-VH1-L5-VL2; VL1-L1-CH1-L2-VH1-L3-CL-L4-VL2-L5-VH2; VL1-L1-CH1-L2-VH1-L3-CL-L4-VH2-L5-VL2; VL1-L1-CH1-L2-VL2-L3-CL-L4-VH1-L5-VH2; VL1-L1-CH1-L2-VH2-L3-CL-L4-VH1-L5-VL2; VH1-L1-CL-L2-VL1-L3-CH1-L4-VL2-L5-VH2; VH1-L1-CL-L2-VL1-L3-CH1-L4-VH2-L5-VL2; VH1-L1-CL-L2-VL2-L3-CH1-L4-VL1-L5-VH2; VH1-L1-CL-L2-VH2-L3-CH1-L4-VL1-L5-VL2; VH1-L1-CH1-L2-VL1-L3-CL-L4-VL2-L5-VH2; VH1-L1-CH1-L2-VL1-L3-CL-L4-VH2-L5-VL2; VH1-L1-CH1-L2-VL2-L3-CL-L4-VL1-L5-VH2; VH1-L1-CH1-L2-VH2-L3-CL-L4-VL1-L5-VL2; VL2-L1-CL-L2-VL1-L3-CH1-L4-VH2-L5-VH1; VL2-L1-CL-L2-VH1-L3-CH1-L4-VH2-L5-VL1; VL2-L1-CL-L2-VH2-L3-CH1-L4-VL1-L5-VH1; VL2-L1-CL-L2-VH2-L3-CH1-L4-VH1-L5-VL1; VL2-L1-CH1-L2- VL1-L3-CL-L4-VH2-L5-VH1; VL2-L1-CH1-L2-VH1-L3-CL-L4-VH2-L5-VL1; VL2-L1-CH1-L2-VH2-L3-CL-L4-VL1-L5-VH1; VL2-L1-CH1-L2-VH2-L3-CL-L4-VH1-L5-VL1; VH2-L1-CL-L2-VL1-L3-CH1- L4-VL2-L5-VH1; VH2-L1-CL-L2-VH1-L3-CH1-L4-VL2-L5-VL1; VH2-L1-CL-L2-VL2-L3-CH1-L4-VL1-L5-VH1; VH2-L1-CL-L2-VL2-L3-CH1-L4-VH1-L5-VL1; VH2-L1-CH1-L2-VL1-L3-CL-L4-VL2-L5-VH1; VH2-L1-CH1-L2-VH1-L3-CL-L4-VL2-L5-VL1; VH2-L1-CH1-L2-VL2-L3-CL-L4-VL1-L5-VH1; or VH2-L1-CH1-L2-VL2-L3-CL-L4-VH1-L5-VL1; wherein the second polypeptide has a structure, from amino-terminus to carboxy-terminus, represented by: VL3-L6-CL-L7-VH3-L8-CH1-L9-VL4-L10-VH4; VL3-L6-CL-L7-VH3-L8-CH1-L9-VH4-L10-VL4; VL3-L6-CL-L7-VL4-L8-CH1-L9-VH3-L10-VH4; VL3-L6-CL-L7-VH4-L8-CH1-L9-VH3-L10-VL4; VL3-L6-CH1-L7-VH3-L8-CL-L9-VL4-L10-VH4; VL3-L6-CH1-L7-VH3-L8-CL-L9-VH4-L10-VL4; VL3-L6-CH1-L7-VL4-L8-CL-L9-VH3-L10-VH4; VL3-L6-CH1-L7-VH4-L8-CL-L9-VH3-L10-VL4; VH3-L6-CL-L7-VL3-L8-CH1-L9-VL4-L10-VH4; VH3-L6-CL-L7-VL3-L8-CH1-L9-VH4-L10-VL4; VH3-L6-CL-L7-VL4-L8-CH1-L9-VL3-L10-VH4; VH3-L6-CL-L7-VH4-L8-CH1-L9-VL3-L10-VL4; VH3-L6-CH1-L7-VL3-L8-CL-L9-VL4-L10-VH4; VH3-L6-CH1-L7-VL3-L8-CL-L9-VH4-L10-VL4; VH3-L6-CH1-L7-VL4-L8-CL-L9-VL3-L10-VH4; VH3-L6-CH1-L7-VH4-L8-CL-L9-VL3-L10-VL4; VL4-L6-CL-L7-VL3-L8-CH1-L9-VH4-L10-VH3; VL4-L6-CL-L7-VH3-L8-CH1-L9-VH4-L10-VL3; VL4-L6-CL-L7-VH4-L8-CH1-L9-VL3-L10-VH3; VL4-L6-CL-L7-VH4-L8-CH1-L9-VH3-L10-VL3; VL4-L6-CH1-L7-VL3-L8-CL-L9-VH4-L10-VH3; VL4-L6-CH1-L7-VH3-L8-CL-L9-VH4-L10-VL3; VL4-L6-CH1-L7-VH4-L8-CL-L9-VL3-L10-VH3; VL4-L6-CH1-L7-VH4-L8-CL-L9-VH3-L10-VL3; VH4-L6-CL-L7-VL3-L8-CH1-L9-VL4-L10-VH3; VH4-L6-CL-L7-VH3-L8-CH1-L9-VL4-L10-VL3; VH4-L6-CL-L7-VL4-L8-CH1-L9-VL3-L10-VH3; VH4-L6-CL-L7-VL4-L8-CH1-L9-VH3-L10-VL3; VH4-L6-CH1-L7-VL3-L8-CL-L9-VL4-L10-VH3; VH4-L6- CH1-L7-VH3-L8-CL-L9-VL4-L10-VL3; VH4-L6-CH1-L7-VL4-L8-CL-L9-VL3-L10-VH3; or VH4-L6-CH1- L7-VL4-L8-CL-L9-VH3-L10-VL3; and wherein: VL1 is a first immunoglobulin light chain variable region that specifically binds to (i) a tumor-associated antigen (TAA), (ii) an infectious disease antigen that is not a sarbecovirus antigen, or (iii) an other-pathology antigen; VL2 is a second immunoglobulin light chain variable region that specifically binds to (i) a tumor-associated antigen (TAA), (ii) an infectious disease antigen that is not a sarbecovirus antigen, or (iii) an other-pathology antigen; VL3 is a third immunoglobulin light chain variable region that specifically binds to (i) a tumor-associated antigen (TAA), (ii) an infectious disease antigen that is not a sarbecovirus antigen, or (iii) an other-pathology antigen; VL4 is a fourth immunoglobulin light chain variable region that specifically binds to (i) a tumor-associated antigen (TAA), (ii) an infectious disease antigen that is not a sarbecovirus antigen, or (iii) an other-pathology antigen; VH1 is a first immunoglobulin heavy chain variable region that specifically binds to (i) a tumor-associated antigen (TAA), (ii) an infectious disease antigen that is not a sarbecovirus antigen, or (iii) an other-pathology antigen; VH2 is a second immunoglobulin heavy chain variable region that specifically binds to (i) a tumor-associated antigen (TAA), (ii) an infectious disease antigen that is not a sarbecovirus antigen, or (iii) an other-pathology antigen; VH3 is a third immunoglobulin heavy chain variable region that specifically binds to (i) a tumor-associated antigen (TAA), (ii) an infectious disease antigen that is not a sarbecovirus antigen, or (iii) an other-pathology antigen; VH4 is a fourth immunoglobulin heavy chain variable region that specifically binds to (i) a tumor-associated antigen (TAA), (ii) an infectious disease antigen that is not a sarbecovirus antigen, or (iii) an other-pathology antigen; CL is an immunoglobulin light chain constant region; CH1 is an immunoglobulin heavy chain constant region 1; and L1-L10 are optional amino acid linkers.

[0560] Also provided herein is an antigen binding polypeptide complex comprising a first polypeptide and a second polypeptide, wherein the first polypeptide has a structure, from amino-terminus to carboxy-terminus, represented by: VL1-L1-VH1-L2-VL2-L3-CL-L4-VH2-L5-CH1; VL1-L1-VH1-L2-VL2-L3-CH1-L4-VH2-L5-CL; VL1-L1-VH1-L2-VH2-L3-CL-L4-VL2-L5-CH1; VL1-L1-VH1-L2-VH2-L3-CH1-L4-VL2-L5-CL; VL1-L1-VL2-L2-VH1-L3-CL-L4-VH2-L5-CH1; VL1-L1-VL2-L2-VH1-L3-CH1-L4-VH2-L5-CL; VL1-L1-VH2-L2-VH1-L3-CL-L4-VL2-L5-CH1; VL1-L1-VH2-L2-VH1-L3-CH1-L4-VL2-L5-CL; VH1-L1-VL1-L2-VL2-L3-CL-L4-VH2-L5-CH1; VH1-L1-VL1-L2-VL2-L3-CH1-L4-VH2-L5-CL; VH1-L1-VL1-L2-VH2-L3-CL-L4-VL2-L5-CH1; VH1-L1-VL1-L2-VH2-L3-CH1-L4-VL2-L5- CL; VH1-L1-VL2-L2-VL1-L3-CL-L4-VH2-L5-CH1; VH1-L1-VL2-L2-VL1-L3-CH1-L4-VH2-L5-CL; VH1-L1-VH2-L2-VL1-L3-CL-L4-VL2-L5-CH1; VH1-L1-VH2-L2-VL1-L3-CH1-L4-VL2-L5-CL; VL2-L1-VL1-L2-VH2-L3-CL-L4-VH1-L5-CH1; VL2-L1-VL1-L2-VH2-L3-CH1-L4-VH1-L5-CL; VL2-L1-VH1-L2-VH2-L3-CL-L4-VL1-L5-CH1; VL2-L1-VH1-L2-VH2-L3-CH1-L4-VL1-L5-CL; VL2-L1-VH2-L2-VL1-L3-CL-L4-VH1-L5-CH1; VL2-L1-VH2-L2-VL1-L3-CH1-L4-VH1-L5-CL; VL2-L1-VH2-L2-VH1-L3-CL-L4-VL1-L5-CH1; VL2-L1-VH2-L2-VH1-L3-CH1-L4-VL1-L5-CL; VH2-L1-VL1-L2-VL2-L3-CL-L4-VH1-L5-CH1; VH2-L1-VL1-L2-VL2-L3-CH1-L4-VH1-L5-CL; VH2-L1-VH1-L2-VL2-L3-CL-L4-VL1-L5-CH1; VH2-L1-VH1-L2-VL2-L3-CH1-L4-VL1-L5-CL; VH2-L1-VL2-L2-VL1-L3-CL-L4-VH1-L5-CH1; VH2-L1-VL2-L2-VL1-L3-CH1-L4-VH1-L5-CL; VH2-L1-VL2-L2-VH1-L3-CL-L4-VL1-L5-CH1; or VH2-L1-VL2-L2-VH1-L3-CH1-L4-VL1-L5-CL; wherein the second polypeptide has a structure, from amino-terminus to carboxy-terminus, represented by: VL3-L6-CL-L7-VH3-L8-CH1-L9-VL4-L10-VH4; VL3-L6-CL-L7-VH3-L8-CH1-L9-VH4-L10-VL4; VL3-L6-CL-L7-VL4-L8-CH1-L9-VH3-L10-VH4; VL3-L6-CL-L7-VH4-L8-CH1-L9-VH3-L10-VL4; VL3-L6-CH1-L7-VH3-L8-CL-L9-VL4-L10-VH4; VL3-L6-CH1-L7-VH3-L8-CL-L9-VH4-L10-VL4; VL3-L6-CH1-L7-VL4-L8-CL-L9-VH3-L10-VH4; VL3-L6-CH1-L7-VH4-L8-CL-L9-VH3-L10-VL4; VH3-L6-CL-L7-VL3-L8-CH1-L9-VL4-L10-VH4; VH3-L6-CL-L7-VL3-L8-CH1-L9-VH4-L10-VL4; VH3-L6-CL-L7-VL4-L8-CH1-L9-VL3-L10-VH4; VH3-L6-CL-L7-VH4-L8-CH1-L9-VL3-L10-VL4; VH3-L6-CH1-L7-VL3-L8-CL-L9-VL4-L10-VH4; VH3-L6-CH1-L7-VL3-L8-CL-L9-VH4-L10-VL4; VH3-L6-CH1-L7-VL4-L8-CL-L9-VL3-L10-VH4; VH3-L6-CH1-L7-VH4-L8-CL-L9-VL3-L10-VL4; VL4-L6-CL-L7-VL3-L8-CH1-L9-VH4-L10-VH3; VL4-L6-CL-L7-VH3-L8-CH1-L9-VH4-L10-VL3; VL4-L6-CL-L7-VH4-L8-CH1-L9-VL3-L10-VH3; VL4-L6-CL-L7-VH4-L8-CH1-L9-VH3-L10-VL3; VL4-L6-CH1-L7-VL3-L8-CL-L9-VH4-L10-VH3; VL4-L6-CH1-L7-VH3-L8-CL-L9-VH4-L10-VL3; VL4-L6-CH1-L7-VH4-L8-CL-L9-VL3-L10-VH3; VL4-L6-CH1-L7-VH4-L8-CL-L9-VH3-L10-VL3; VH4-L6-CL-L7-VL3-L8-CH1-L9-VL4-L10-VH3; VH4-L6-CL-L7-VH3-L8-CH1-L9-VL4-L10-VL3; VH4-L6-CL-L7-VL4-L8-CH1-L9-VL3-L10-VH3; VH4-L6-CL-L7-VL4-L8-CH1-L9-VH3-L10-VL3; VH4-L6-CH1-L7-VL3-L8-CL-L9-VL4-L10-VH3; VH4-L6-CH1-L7-VH3-L8-CL-L9-VL4-L10-VL3; VH4-L6-CH1-L7-VL4-L8-CL-L9-VL3-L10-VH3; or VH4-L6-CH1-L7-VL4-L8-CL-L9-VH3-L10-VL3; and wherein: VL1 is a first immunoglobulin light chain variable region that specifically binds to (i) a tumor-associated antigen (TAA), (ii) an infectious disease antigen that is not a sarbecovirus antigen, or (iii) an other-pathology antigen; VL2 is a second immunoglobulin light chain variable region that specifically binds to (i) a tumor-associated antigen (TAA), (ii) an infectious disease antigen that is not a sarbecovirus antigen, or (iii) an other-pathology antigen; VL3 is a third immunoglobulin light chain variable region that specifically binds to (i) a tumor-associated antigen (TAA), (ii) an infectious disease antigen that is not a sarbecovirus antigen, or (iii) an other-pathology antigen; VL4 is a fourth immunoglobulin light chain variable region that specifically binds to (i) a tumor-associated antigen (TAA), (ii) an infectious disease antigen that is not a sarbecovirus antigen, or (iii) an other-pathology antigen; VH1 is a first immunoglobulin heavy chain variable region that specifically binds to (i) a tumor-associated antigen (TAA), (ii) an infectious disease antigen that is not a sarbecovirus antigen, or (iii) an other-pathology antigen; VH2 is a second immunoglobulin heavy chain variable region that specifically binds to (i) a tumor-associated antigen (TAA), (ii) an infectious disease antigen that is not a sarbecovirus antigen, or (iii) an other-pathology antigen; VH3 is a third immunoglobulin heavy chain variable region that specifically binds to (i) a tumor-associated antigen (TAA), (ii) an infectious disease antigen that is not a sarbecovirus antigen, or (iii) an other-pathology antigen; VH4 is a fourth immunoglobulin heavy chain variable region that specifically binds to (i) a tumor-associated antigen (TAA), (ii) an infectious disease antigen that is not a sarbecovirus antigen, or (iii) an other-pathology antigen; CL is an immunoglobulin light chain constant region; CH1 is an immunoglobulin heavy chain constant region 1; and L1-L10 are optional amino acid linkers.

[0561] Also provided herein is an antigen binding polypeptide complex comprising a first polypeptide and a second polypeptide, wherein the first polypeptide has a structure, from amino-terminus to carboxy-terminus, represented by: VL1-L1-CL-L2-VH1-L3-CH1-L4-VL2-L5-VH2; VL1-L1-CL-L2-VH1-L3-CH1-L4-VH2-L5-VL2; VL1-L1-CL-L2-VL2-L3-CH1-L4-VH1-L5-VH2; VL1-L1-CL-L2-VH2-L3-CH1-L4-VH1-L5-VL2; VL1-L1-CH1-L2-VH1-L3-CL-L4-VL2-L5-VH2; VL1-L1-CH1-L2-VH1-L3-CL-L4-VH2-L5-VL2; VL1-L1-CH1-L2-VL2-L3-CL-L4-VH1-L5-VH2; VL1-L1-CH1-L2-VH2-L3-CL-L4-VH1-L5-VL2; VH1-L1-CL-L2-VL1-L3-CH1-L4-VL2-L5-VH2; VH1-L1-CL-L2-VL1-L3-CH1-L4-VH2-L5-VL2; VH1-L1-CL-L2-VL2-L3-CH1-L4-VL1-L5-VH2; VH1-L1-CL-L2-VH2-L3-CH1-L4-VL1-L5-VL2; VH1-L1-CH1-L2-VL1-L3-CL-L4-VL2-L5-VH2; VH1-L1-CH1-L2-VL1-L3-CL-L4-VH2-L5-VL2; VH1-L1-CH1-L2-VL2-L3-CL-L4-VL1-L5-VH2; VH1-L1-CH1-L2-VH2-L3-CL-L4-VL1-L5-VL2; VL2-L1-CL-L2-VL1-L3-CH1-L4-VH2-L5-VH1; VL2-L1-CL-L2-VH1-L3-CH1-L4-VH2-L5-VL1; VL2-L1-CL-L2-VH2-L3-CH1-L4-VL1-L5-VH1; VL2-L1-CL-L2-VH2-L3-CH1-L4-VH1-L5-VL1; VL2-L1-CH1-L2- VL1-L3-CL-L4-VH2-L5-VH1; VL2-L1-CH1-L2-VH1-L3-CL-L4-VH2-L5-VL1; VL2-L1-CH1-L2-VH2-L3-CL-L4-VL1-L5-VH1; VL2-L1-CH1-L2-VH2-L3-CL-L4-VH1-L5-VL1; VH2-L1-CL-L2-VL1-L3-CH1- L4-VL2-L5-VH1; VH2-L1-CL-L2-VH1-L3-CH1-L4-VL2-L5-VL1; VH2-L1-CL-L2-VL2-L3-CH1-L4-VL1-L5-VH1; VH2-L1-CL-L2-VL2-L3-CH1-L4-VH1-L5-VL1; VH2-L1-CH1-L2-VL1-L3-CL-L4-VL2-L5-VH1; VH2-L1-CH1-L2-VH1-L3-CL-L4-VL2-L5-VL1; VH2-L1-CH1-L2-VL2-L3-CL-L4-VL1-L5-VH1; or VH2-L1-CH1-L2-VL2-L3-CL-L4-VH1-L5-VL1; wherein the second polypeptide has a structure, from amino-terminus to carboxy-terminus, represented by: VL3-L6-VH3-L7-VL4-L8-CL-L9-VH4-L10-CH1; VL3-L6-VH3-L7-VL4-L8-CH1-L9-VH4-L10-CL; VL3-L6-VH3-L7-VH4-L8-CL-L9-VL4-L10-CH1; VL3-L6-VH3-L7-VH4-L8-CH1-L9-VL4-L10-CL; VL3-L6-VL4-L7-VH3-L8-CL-L9-VH4-L10-CH1; VL3-L6-VL4-L7-VH3-L8-CH1-L9-VH4-L10-CL; VL3-L6-VH4-L7-VH3-L8-CL-L9-VL4-L10-CH1; VL3-L6-VH4-L7-VH3-L8-CH1-L9-VL4-L10-CL; VH3-L6-VL3-L7-VL4-L8-CL-L9-VH4-L10-CH1; VH3-L6-VL3-L7-VL4-L8-CH1-L9-VH4-L10-CL; VH3-L6-VL3-L7-VH4-L8-CL-L9-VL4-L10-CH1; VH3-L6-VL3-L7-VH4-L8-CH1-L9-VL4-L10-CL; VH3-L6-VL4-L7-VL3-L8-CL-L9-VH4-L10-CH1; VH3-L6-VL4-L7-VL3-L8-CH1-L9-VH4-L10-CL; VH3-L6-VH4-L7-VL3-L8-CL-L9-VL4-L10-CH1; VH3-L6-VH4-L7-VL3-L8-CH1-L9-VL4-L10-CL; VL4-L6-VL3-L7-VH4-L8-CL-L9-VH3-L10-CH1; VL4-L6-VL3-L7-VH4-L8-CH1-L9-VH3-L10-CL; VL4-L6-VH3-L7-VH4-L8-CL-L9-VL3-L10-CH1; VL4-L6-VH3-L7-VH4-L8-CH1-L9-VL3-L10-CL; VL4-L6-VH4-L7-VL3-L8-CL-L9-VH3-L10-CH1; VL4-L6-VH4-L7-VL3-L8-CH1-L9-VH3-L10-CL; VL4-L6-VH4-L7-VH3-L8-CL-L9-VL3-L10-CH1; VL4-L6-VH4-L7-VH3-L8-CH1-L9-VL3-L10-CL; VH4-L6-VL3-L7-VL4-L8-CL-L9-VH3-L10-CH1; VH4-L6-VL3-L7-VL4-L8-CH1-L9-VH3-L10-CL; VH4-L6-VH3-L7-VL4-L8-CL-L9-VL3-L10-CH1; VH4-L6-VH3-L7-VL4-L8-CH1-L9-VL3-L10-CL; VH4-L6-VL4-L7-VL3-L8-CL-L9-VH3-L10-CH1; VH4-L6-VL4-L7-VL3-L8-CH1-L9-VH3-L10-CL; VH4-L6-VL4-L7-VH3-L8-CL-L9-VL3-L10-CH1; or VH4-L6-VL4-L7-VH3-L8-CH1-L9-VL3-L10-CL; and wherein: VL1 is a first immunoglobulin light chain variable region that specifically binds to (i) a tumor-associated antigen (TAA), (ii) an infectious disease antigen that is not a sarbecovirus antigen, or (iii) an other-pathology antigen; VL2 is a second immunoglobulin light chain variable region that specifically binds to (i) a tumor-associated antigen (TAA), (ii) an infectious disease antigen that is not a sarbecovirus antigen, or (iii) an other-pathology antigen; VL3 is a third immunoglobulin light chain variable region that specifically binds to (i) a tumor-associated antigen (TAA), (ii) an infectious disease antigen that is not a sarbecovirus antigen, or (iii) an other-pathology antigen; VL4 is a fourth immunoglobulin light chain variable region that specifically binds to (i) a tumor-associated antigen (TAA), (ii) an infectious disease antigen that is not a sarbecovirus antigen, or (iii) an other-pathology antigen; VH1 is a first immunoglobulin heavy chain variable region that specifically binds to (i) a tumor-associated antigen (TAA), (ii) an infectious disease antigen that is not a sarbecovirus antigen, or (iii) an other-pathology antigen; VH2 is a second immunoglobulin heavy chain variable region that specifically binds to (i) a tumor-associated antigen (TAA), (ii) an infectious disease antigen that is not a sarbecovirus antigen, or (iii) an other-pathology antigen; VH3 is a third immunoglobulin heavy chain variable region that specifically binds to (i) a tumor-associated antigen (TAA), (ii) an infectious disease antigen that is not a sarbecovirus antigen, or (iii) an other-pathology antigen; VH4 is a fourth immunoglobulin heavy chain variable region that specifically binds to (i) a tumor-associated antigen (TAA), (ii) an infectious disease antigen that is not a sarbecovirus antigen, or (iii) an other-pathology antigen; CL is an immunoglobulin light chain constant region; CH1 is an immunoglobulin heavy chain constant region 1; and L1-L10 are optional amino acid linkers.

[0562] Also provided herein is an antigen binding polypeptide complex comprising a first polypeptide and a second polypeptide, wherein the first polypeptide has a structure, from amino-terminus to carboxy-terminus, represented by: VL1-L1-CL-L2-VH1-L3-CH1; VL1-L1-CH1-L2-VH1-L3-CL; VH1-L1-CL-L2-VL1-L3-CH1; or VH1-L1-CH1-L2-VL1-L3-CL; wherein the second polypeptide has a structure, from amino-terminus to carboxy-terminus, represented by: VL2-L4-CL-L5-VL3-L6-VH3-L7-VH2-L8-CH1; VL2-L4-CL-L5-VH3-L6-VL3-L7-VH2-L8-CH1; VL2-L4-CH1-L5-VL3-L6-VH3-L7-VH2-L8- CL; VL2-L4-CH1-L5-VH3-L6-VL3-L7-VH2-L8-CL; VH2-L4-CL-L5-VL3-L6-VH3-L7-VL2-L8-CH1; VH2-L4-CL-L5-VH3-L6-VL3-L7-VL2-L8-CH1; VH2-L4-CH1-L5-VL3-L6-VH3-L7-VL2-L8-CL; VH2-L4-CH1-L5-VH3-L6-VL3-L7-VL2-L8-CL; VL3-L4-CL-L5-VL2-L6-VH2-L7-VH3-L8-CH1; VL3-L4-CL-L5-VH2-L6-VL2-L7-VH3-L8-CH1; VL3-L4-CH1-L5-VL2-L6-VH2-L7-VH3-L8-CL; VL3-L4-CH1-L5- VH2-L6-VL2-L7-VH3-L8-CL; VH3-L4-CL-L5-VL2-L6-VH2-L7-VL3-L8-CH1; VH3-L4-CL-L5-VH2-L6-VL2-L7-VL3-L8-CH1; VH3-L4-CH1-L5-VL2-L6-VH2-L7-VL3-L8-CL; or VH3-L4-CH1-L5-VH2-L6-VL2-L7-VL3-L8-CL; and wherein: VL1 is a first immunoglobulin light chain variable region that specifically binds to (i) a tumor-associated antigen (TAA), (ii) an infectious disease antigen that is not a sarbecovirus antigen, or (iii) an other-pathology antigen; VL2 is a second immunoglobulin light chain variable region that specifically binds to (i) a tumor-associated antigen (TAA), (ii) an infectious disease antigen that is not a sarbecovirus antigen, or (iii) an other-pathology antigen; VL3 is a third immunoglobulin light chain variable region that specifically binds to (i) a tumor-associated antigen (TAA), (ii) an infectious disease antigen that is not a sarbecovirus antigen, or (iii) an other-pathology antigen; VH1 is a first immunoglobulin heavy chain variable region that specifically binds to (i) a tumor-associated antigen (TAA), (ii) an infectious disease antigen that is not a sarbecovirus antigen, or (iii) an other-pathology antigen; VH2 is a second immunoglobulin heavy chain variable region that specifically binds to (i) a tumor-associated antigen (TAA), (ii) an infectious disease antigen that is not a sarbecovirus antigen, or (iii) an other-pathology antigen; VH3 is a third immunoglobulin heavy chain variable region that specifically binds to (i) a tumor-associated antigen (TAA), (ii) an infectious disease antigen that is not a sarbecovirus antigen, or (iii) an other-pathology antigen; CL is an immunoglobulin light chain constant region; CH1 is an immunoglobulin heavy chain constant region 1; and L1-L8 are optional amino acid linkers.

[0563] Also provided herein is an antigen binding polypeptide complex comprising a first polypeptide and a second polypeptide, wherein the first polypeptide has a structure, from amino-terminus to carboxy-terminus, represented by: VL1-L1-CL-L2-VH1-L3-CH1; VL1-L1-CH1-L2-VH1-L3-CL; VH1-L1-CL-L2-VL1-L3-CH1; or VH1-L1-CH1-L2-VL1-L3-CL; wherein the second polypeptide has a structure, from amino-terminus to carboxy-terminus, represented by: VL2-L4-VH2-L5-VL3-L6-CL-L7-VH3-L8-CH1; VL2-L4-VH2-L5-VL3-L6-CH1-L7-VH3-L8-CL; VL2-L4-VH2-L5-VH3-L6-CL-L7-VL3-L8-CH1; VL2-L4-VH2-L5-VH3-L6-CH1-L7-VL3-L8-CL; VL2-L4-VL3-L5-VH2-L6-CL-L7-VH3-L8-CH1; VL2-L4-VL3-L5-VH2-L6-CH1-L7-VH3-L8-CL; VL2-L4-VH3-L5-VH2-L6-CL-L7-VL3-L8-CH1; VL2-L4-VH3-L5-VH2-L6-CH1-L7-VL3-L8-CL; VH2-L4-VL2-L5-VL3-L6-CL-L7-VH3-L8-CH1; VH2-L4-VL2-L5-VL3-L6-CH1-L7-VH3-L8-CL; VH2-L4-VL2-L5-VH3-L6-CL-L7-VL3-L8-CH1; VH2-L4-VL2-L5-VH3-L6-CH1-L7-VL3-L8-CL; VH2-L4-VL3-L5-VL2-L6-CL-L7-VH3-L8-CH1; VH2-L4-VL3-L5-VL2-L6-CH1-L7-VH3-L8-CL; VH2-L4-VH3-L5-VL2-L6-CL-L7-VL3-L8-CH1; VH2-L4-VH3-L5-VL2-L6-CH1-L7-VL3-L8-CL; VL3-L4-VL2-L5-VH3-L6-CL-L7-VH2-L8-CH1; VL3-L4-VL2-L5-VH3-L6-CH1-L7-VH2-L8-CL; VL3-L4-VH2-L5-VH3-L6-CL-L7-VL2-L8-CH1; VL3-L4-VH2-L5-VH3-L6-CH1-L7-VL2-L8-CL; VL3-L4-VH3-L5-VL2-L6-CL-L7-VH2-L8-CH1; VL3-L4-VH3-L5-VL2-L6-CH1-L7-VH2-L8-CL; VL3-L4-VH3-L5-VH2-L6-CL-L7-VL2-L8-CH1; VL3-L4-VH3-L5-VH2-L6-CH1-L7-VL2-L8- CL; VH3-L4-VL2-L5-VL3-L6-CL-L7-VH2-L8-CH1; VH3-L4-VL2-L5-VL3-L6-CH1-L7-VH2-L8-CL; VH3-L4-VH2-L5-VL3-L6-CL-L7-VL2-L8-CH1; VH3-L4-VH2-L5-VL3-L6-CH1-L7-VL2-L8-CL; VH3-L4-VL3-L5-VL2-L6-CL-L7-VH2-L8-CH1; VH3-L4-VL3-L5-VL2-L6-CH1-L7-VH2-L8-CL; VH3-L4-VL3-L5-VH2-L6-CL-L7-VL2-L8-CH1; or VH3-L4-VL3-L5-VH2-L6-CH1-L7-VL2-L8-CL; and wherein: VL1 is a first immunoglobulin light chain variable region that specifically binds to (i) a tumor-associated antigen (TAA), (ii) an infectious disease antigen that is not a sarbecovirus antigen, or (iii) an other-pathology antigen; VL2 is a second immunoglobulin light chain variable region that specifically binds to (i) a tumor-associated antigen (TAA), (ii) an infectious disease antigen that is not a sarbecovirus antigen, or (iii) an other-pathology antigen; VL3 is a third immunoglobulin light chain variable region that specifically binds to (i) a tumor-associated antigen (TAA), (ii) an infectious disease antigen that is not a sarbecovirus antigen, or (iii) an other-pathology antigen; VH1 is a first immunoglobulin heavy chain variable region that specifically binds to (i) a tumor-associated antigen (TAA), (ii) an infectious disease antigen that is not a sarbecovirus antigen, or (iii) an other-pathology antigen; VH2 is a second immunoglobulin heavy chain variable region that specifically binds (i) a tumor-associated antigen (TAA), (ii) an infectious disease antigen that is not a sarbecovirus antigen, or (iii) an other-pathology antigen; VH3 is a third immunoglobulin heavy chain variable region that specifically binds to (i) a tumor-associated antigen (TAA), (ii) an infectious disease antigen that is not a sarbecovirus antigen, or (iii) an other-pathology antigen; CL is an immunoglobulin light chain constant region; CH1 is an immunoglobulin heavy chain constant region 1; and L1-L8 are optional amino acid linkers.

[0564] Also provided herein is an antigen binding polypeptide complex comprising a first polypeptide and a second polypeptide, wherein the first polypeptide has a structure, from amino-terminus to carboxy-terminus, represented by: VL1-L1-CL-L2-VH1-L3-CH1; VL1-L1-CH1-L2-VH1-L3-CL; VH1-L1-CL-L2-VL1-L3-CH1; or VH1-L1-CH1-L2-VL1-L3-CL; wherein the second polypeptide has a structure, from amino-terminus to carboxy-terminus, represented by: VL2-L4-CL-L5-VH2-L6-CH1-L7-VL3-L8-VH3; VL2-L4-CL-L5-VH2-L6-CH1-L7-VH3-L8-VL3; VL2-L4-CL-L5-VL3-L6-CH1-L7-VH2-L8-VH3; VL2-L4-CL-L5-VH3-L6-CH1-L7-VH2-L8-VL3; VL2-L4-CH1-L5-VH2-L6-CL-L7-VL3-L8-VH3; VL2-L4-CH1-L5-VH2-L6-CL-L7-VH3-L8-VL3; VL2-L4-CH1-L5-VL3-L6-CL-L7-VH2-L8-VH3; VL2-L4-CH1-L5-VH3-L6-CL-L7-VH2-L8-VL3; VH2-L4-CL-L5-VL2-L6-CH1-L7-VL3-L8-VH3; VH2-L4-CL-L5-VL2-L6-CH1-L7-VH3-L8-VL3; VH2-L4-CL-L5-VL3-L6-CH1-L7-VL2-L8-VH3; VH2-L4-CL-L5-VH3-L6-CH1-L7-VL2-L8-VL3; VH2-L4-CH1-L5-VL2-L6-CL-L7-VL3-L8-VH3; VH2-L4-CH1-L5- VL2-L6-CL-L7-VH3-L8-VL3; VH2-L4-CH1-L5-VL3-L6-CL-L7-VL2-L8-VH3; VH2-L4-CH1-L5-VH3-L6-CL-L7-VL2-L8-VL3; VL3-L4-CL-L5-VL2-L6-CH1-L7-VH3-L8-VH2; VL3-L4-CL-L5-VH2-L6-CH1- L7-VH3-L8-VL2; VL3-L4-CL-L5-VH3-L6-CH1-L7-VL2-L8-VH2; VL3-L4-CL-L5-VH3-L6-CH1-L7-VH2-L8-VL2; VL3-L4-CH1-L5-VL2-L6-CL-L7-VH3-L8-VH2; VL3-L4-CH1-L5-VH2-L6-CL-L7-VH3-L8-VL2; VL3-L4-CH1-L5-VH3-L6-CL-L7-VL2-L8-VH2; VL3-L4-CH1-L5-VH3-L6-CL-L7-VH2-L8-VL2; VH3-L4-CL-L5-VL2-L6-CH1-L7-VL3-L8-VH2; VH3-L4-CL-L5-VH2-L6-CH1-L7-VL3-L8-VL2; VH3-L4-CL-L5-VL3-L6-CH1-L7-VL2-L8-VH2; VH3-L4-CL-L5-VL3-L6-CH1-L7-VH2-L8-VL2; VH3-L4-CH1-L5-VL2-L6-CL-L7-VL3-L8-VH2; VH3-L4-CH1-L5-VH2-L6-CL-L7-VL3-L8-VL2; VH3-L4-CH1-L5-VL3-L6-CL-L7-VL2-L8-VH2; or VH3-L4-CH1-L5-VL3-L6-CL-L7-VH2-L8-VL2; and wherein: VL1 is a first immunoglobulin light chain variable region that specifically binds to (i) a tumor-associated antigen (TAA), (ii) an infectious disease antigen that is not a sarbecovirus antigen, or (iii) an other-pathology antigen; VL2 is a second immunoglobulin light chain variable region that specifically binds to (i) a tumor-associated antigen (TAA), (ii) an infectious disease antigen that is not a sarbecovirus antigen, or (iii) an other-pathology antigen; VL3 is a third immunoglobulin light chain variable region that specifically binds to (i) a tumor-associated antigen (TAA), (ii) an infectious disease antigen that is not a sarbecovirus antigen, or (iii) an other-pathology antigen; VH1 is a first immunoglobulin heavy chain variable region that specifically binds to (i) a tumor-associated antigen (TAA), (ii) an infectious disease antigen that is not a sarbecovirus antigen, or (iii) an other-pathology antigen; VH2 is a second immunoglobulin heavy chain variable region that specifically binds to (i) a tumor-associated antigen (TAA), (ii) an infectious disease antigen that is not a sarbecovirus antigen, or (iii) an other-pathology antigen; VH3 is a third immunoglobulin heavy chain variable region that specifically binds to (i) a tumor-associated antigen (TAA), (ii) an infectious disease antigen that is not a sarbecovirus antigen, or (iii) an other-pathology antigen; CL is an immunoglobulin light chain constant region; CH1 is an immunoglobulin heavy chain constant region 1; and L1-L8 are optional amino acid linkers.

[0565] Also provided herein is an antigen binding polypeptide complex comprising a first polypeptide and a second polypeptide, wherein the first polypeptide has a structure, from amino-terminus to carboxy-terminus, represented by: VL1-L1-VH1-L2-CL; or VH1-L3-VL1-L4-CL; wherein the second polypeptide has a structure, from amino-terminus to carboxy-terminus, represented by: VL2-L1-VH2-L2-CH1; or VH2-L3-VL2-L4-CH1; wherein: VL1 is a first immunoglobulin light chain variable region that specifically binds to (i) a tumor-associated antigen (TAA), (ii) an infectious disease antigen that is not a sarbecovirus antigen, or (iii) an other-pathology antigen; VL2 is a second immunoglobulin light chain variable region that specifically binds to (i) a tumor-associated antigen (TAA), (ii) an infectious disease antigen that is not a sarbecovirus antigen, or (iii) an other-pathology antigen; VH1 is a first immunoglobulin heavy chain variable region that specifically binds to (i) a tumor-associated antigen (TAA), (ii) an infectious disease antigen that is not a sarbecovirus antigen, or (iii) an other-pathology antigen; VH2 is a second immunoglobulin heavy chain variable region that specifically binds to (i) a tumor-associated antigen (TAA), (ii) an infectious disease antigen that is not a sarbecovirus antigen, or (iii) an other-pathology antigen; CL is an immunoglobulin light chain constant region; CH1 is an immunoglobulin heavy chain constant region 1; and L1-L4 are optional amino acid linkers.

[0566] Also provided herein is an antigen binding polypeptide complex comprising a first polypeptide and a second polypeptide, wherein the first polypeptide has a structure, from amino-terminus to carboxy-terminus, represented by: VL1-L1-VL2-L2-CH1; or VL2-L1-VL1-L2-CH1; wherein the second polypeptide has a structure, from amino-terminus to carboxy-terminus, represented by: VH1-L3-VH2-L4-CL; or VH2-L3-VH1-L4-CL; wherein: VL1 is a first immunoglobulin light chain variable region that specifically binds to (i) a tumor-associated antigen (TAA), (ii) an infectious disease antigen that is not a sarbecovirus antigen, or (iii) an other-pathology antigen; VL2 is a second immunoglobulin light chain variable region that specifically binds to (i) a tumor-associated antigen (TAA), (ii) an infectious disease antigen that is not a sarbecovirus antigen, or (iii) an other-pathology antigen; VH1 is a first immunoglobulin heavy chain variable region that specifically binds to (i) a tumor-associated antigen (TAA), (ii) an infectious disease antigen that is not a sarbecovirus antigen, or (iii) an other-pathology antigen; VH2 is a second immunoglobulin heavy chain variable region that specifically binds to (i) a tumor-associated antigen (TAA), (ii) an infectious disease antigen that is not a sarbecovirus antigen, or (iii) an other-pathology antigen; CL is an immunoglobulin light chain constant region; CH1 is an immunoglobulin heavy chain constant region 1; and L1-L4 are optional amino acid linkers.

[0567] Also provided herein is an antigen binding polypeptide complex comprising a first polypeptide and a second polypeptide, wherein the first polypeptide has a structure, from amino-terminus to carboxy-terminus, represented by: VL1-L1-VL2-L2-VL3-L3-CH1; VL1-L1-VL3-L2-VL2-L3-CH1; VL2-L1-VL1-L2-VL3-L3-CH1; VL2-L1-VL3-L2-VL1-L3-CH1; VL3-L1-VL1-L2-VL2-L3-CH1; or VL3-L1-VL2-L2-VL1-L3-CH1; wherein the second polypeptide has a structure, from amino-terminus to carboxy-terminus, represented by: VH1-L4-VH2-L5-VH3-L6-CL; VH1-L4-VH3-L5-VH2-L6-CL; VH2-L4-VH1-L5-VH3-L6-CL; VH2-L4-VH3-L5-VH1-L6-CL; VH3-L4-VH1-L5-VH2-L6-CL; or VH3-L4-VH2-L5-VH1-L6- CL; wherein: VL1 is a first immunoglobulin light chain variable region that specifically binds to (i) a tumor-associated antigen (TAA), (ii) an infectious disease antigen that is not a sarbecovirus antigen, or (iii) an other-pathology antigen; VL2 is a second immunoglobulin light chain variable region that specifically binds to (i) a tumor-associated antigen (TAA), (ii) an infectious disease antigen that is not a sarbecovirus antigen, or (iii) an other-pathology antigen; VL3 is a third immunoglobulin light chain variable region that specifically binds to (i) a tumor-associated antigen (TAA), (ii) an infectious disease antigen that is not a sarbecovirus antigen, or (iii) an other-pathology antigen; VH1 is a first immunoglobulin heavy chain variable region that specifically binds to (i) a tumor-associated antigen (TAA), (ii) an infectious disease antigen that is not a sarbecovirus antigen, or (iii) an other-pathology antigen; VH2 is a second immunoglobulin heavy chain variable region that specifically binds to (i) a tumor-associated antigen (TAA), (ii) an infectious disease antigen that is not a sarbecovirus antigen, or (iii) an other-pathology antigen; VH3 is a third immunoglobulin heavy chain variable region that specifically binds to a (i) a tumor-associated antigen (TAA), (ii) an infectious disease antigen that is not a sarbecovirus antigen, or (iii) an other-pathology antigen; CL is an immunoglobulin light chain constant region; CH1 is an immunoglobulin heavy chain constant region 1; and L1-L6 are optional amino acid linkers.

[0568] In some aspects, the TAA is selected from the group consisting of 5′-nucleotidase, 5T4, A2AR, activin receptor-like kinase 1, adenocarcinoma antigen, ADRB3, AFP, AKAP-4, ALK, alpha-fetoprotein, androgen receptor, angiopoietin 2, AOC3, APRIL, ATPDase, AXL, B7-4, B7DC, B7H1, B7H2, B7H3, B7H4, B7H5, B7H6, B7H7, B7RP1, BAFF, BAFFR, BCMA, bcr-abl, BlyS, BORIS, BST2, BTK, BTLA, C3, C5, C5a, C5a receptor, CA-125, CAIX, CanAg (a glycoform of MUC1), CCL11, CCL15, CCL17, CCL19, CCL2, CCL20, CCL21, CCL25, CCL3, CCL4, CCL5, CCL7, CCL8, CCR2, CCR3, CCR4, CCR5, CD11, CD11a, CD123, CD125, CD133, CD134, CD137, CD137L, CD147, CD15, CD154, CD160, CD16A, CD171, CD179a, CD18, CD184, CD19, CD2, CD20, CD200, CD22, CD221, CD23, CD24, CD242, CD25, CD27, CD272, CD276, CD278, CD279, CD28, CD3, CD30, CD300LF, CD319, CD33, CD37, CD38, CD39, CD38, CD4, CD40, CD40L, CD41, CD44v6, CD45, CD47, CD49B, CD5, CD51, CD52, CD54, CD56, CD6, CD62L, CD7, CD70, CD72, CD74, CD79a, CD79b, CD80, CD86, CD97, CEA, CEACAM5, claudin 18 isoform 2, CLDN6, CLEC12A, CLEC9, CLEC91, CLL-1, cMet, coagulation factor III, CRTH2, CS1, CSF-1, CSF1R, CSF-2, CSF-3, CTGF, CTLA4, CXCL1, CXCL12, CXCL13, CXCL2, CXCL4, CXCR3, CXORF61, CyclinB1, CYP1B1, dendritic cell-associated lectin 2, DLL3, DLL4, DNGR-1, DR5, E7, E-cadherin, EGFL7, EGFR, EGFRVIII, ELF2M, EMR2, endoglin, ENTPD1, EpCAM, EphA2, EPHA3, ephrin receptor A3, EphrinB2, episialin, ERBB2 (Her2/neu), ERBB3, ERG (TMPRSS2-ETS fusion gene), ETV6-AML, FAP, FCAR, FCER1, FCER1A, FCER2, FCRL5, FGF 23, FGFR, FGFR2, fibronectin extra domain-B, FLAP, FLT3, folate hydrolase, folate receptor 1, folate receptor alpha, folate receptor beta, FOLH1, Fos-related antigen1, Frizzled receptor, Fucosyl GM1, GD2, GD3, gelatinase B, Gi24, GITR, GITRL, GloboH, Glutamate carboxypeptidase II, glypican 3, GM3, GP100, GPC1, GPC2, GPC3, gplOO, GPNMB, GPR20, GPR5, GPRC5D, growth differentiation factor 8, GUCY2C, HAVCR1, HER1, HER2, HER3, HGF, HGFR, HHLA2, histone complex, HLA-DR, HMGB1, HMWMAA, HPVE6, hTERT, human telomerase reverse transcriptase, HVEM, ICAM-1, ICOS, ICOSL, IDO, IFNa, IgE, IGF-1, IGF1R, IGF-2, IGF-I receptor, IGLL1, IL1, IL10, IL12, IL13, IL13Ra2, IL-13Ra2, IL13Ra1, IL15, IL17, IL-17A, IL-17AF, IL-17F, IL17Rb, IL18, IL1B, IL1F10, IL-1α, IL-1β, IL2, IL-20, IL22, IL23, IL-23A, IL25, IL2Rbeta, IL-3 receptor, IL-31 receptor A, IL33, IL35, IL4, IL4Ra, IL5, ILSR, IL6, IL7, IL7Ra, IL8, IL9, IL9R, IL1A, IL-llRa, integrin α4, integrin α4 β7, integrin α5β1, integrin αIIbβ3, integrin αvβ3, integrin β7, interleukin 36 receptor IL1RAP, interleukin 36 receptor IL1RL2, intestinal carboxylesterase, ITGB+, ITK, KIR, KIR2D, KIT, LAG3, LAGE-1a, LAIR1, LAMP1, LCK, legumain, leptin, LewisY, LILRA2, LIV-1, LMP2, LOXL2, LPFS2, LRRC15, LY6K, LY75, LYPD3, MAD-CT-1, MAD-CT-2, MAGEA1, MAGE-A1, MCAM, MCP-1, MelanA/MART1, mesothelin, MHC classII, MIF, ML-IAP, MS4A1, MST1R (RON), MUC1, MUC-1, MUC16, MUC-16, MUC5AC, muthsp70-2, MYCN, NA17, NCA-90) granulocyte antigen, NCAM, NCR3LG1, nectin-4, NGNA ganglioside, NKG2A, NKG2D, NKp46, Notch 1, Notch receptor, NRP1, NTPDase-1, NY-BR-1, NY-ESO-1, o-acetyl-GD2, OR51E2, OX40), OX40L, OY-TES1, p53, p53mutant, PANX3, PAP, PAX3, PAX5, PCDC1, PCDP1, PCTA-1/Galectin8, PD-1, PDGFRA, PDGFR-beta, PD-L1, PD-L2, phosphate-sodium co-transporter, phosphatidylserine, PLAC1, polysialic acid, PROM1, prostase, prostein, PRSS21, PSCA, PSMA, PTK7, RAGE-1, RANKL, Ras mutant, rhIL1O, RhoC, root plate-specific spondin 3, ROR1, ROR2, RTN4, RU1, RU2, S152, sarcoma translocation breakpoints, SART3, scatter factor receptor kinase, SDC1, SIRPalpha, SISP1, SLAMF7, SLC, sLe, SLITRK6, spermprotein17, SPG64, sphingosine-1-phosphate, SSEA-4, SSX2, ST2, STEAP1, STEAP2, surviving and telomerase, Syk kinase, T14, TACI, TAG72, TARP, T-cell receptor, TCRβ, TDO, TEM1/CD248, TEM7R, tenascin C, TGFBETA, TGF-β1, TGF-β2, TGS5, the extracellular portion of the APRIL protein, Tie2, TIGIT, TIM3, TLR, TLR2, TLR4, TLR5, TLR9, TMEF1, TnAg, TNF, TNFa, TNFR superfamily member 4, TNFRSF7, Tp55, TRAC, TRAIL-R1, TRAIL-R2, TRAP, TREM1, TROP2, TRP-2, TSHR, TSLP, TSLPR, tumor antigen CTAA16.88, TWEAK, tyrosinase, TYRP1 glycoprotein 75, UPK2, VAP-1, VEGF, VEGFA, VEGFR-1, VEGFR2, vimentin, VISTA, Vstm3, WTI, WUCAM, and XAGE1.

[0569] In some aspects, and in any one of the formulas depicted herein, any one or more of (i) VL1 and VH1, (ii) VL2 and VH2, (iii) VL3 and VH3, and (iv) VL4 and VH4, comprise a light chain complementarity determining region 1 (LCDR1), LCDR2, and/or LCDR3, and a heavy chain complementarity determining region 1 (HCDR1), HCDR2, and/or HCDR3 of an antibody selected from the group consisting of losatuxizumab vedotin, utomilumab, urelumab, oleclumab, naptumomab estafenatox, ascrinvacumab, pintumomab, tacatuzumab tetraxetan, nesvacumab, vanucizumab, timolumab, vapaliximab, vepalimomab, enapotamab vedotin, ianalumab, belimumab, tabalumab, tibulizumab, belantamab mafodotin, teclistamab, teclistamab, detumomab, nacolomab tafenatox, eculizumab, lendalizumab, pexelizumab, pozelimab, ravulizumab, tesidolumab, vilobelimab, abagovomab, igovomab, oregovomab, sofituzumab vedotin, cantuzumab mertansine, cantuzuma bravtansine, girentuximab, altumomab pentetate, arcitumomab, besilesomab, bertilimumab, plozalizumab, mogamulizumab, leronlimab, PRO140), rovelizumab, rovelizumab, talacotuzumab, benralizumab, tavolimab, vonlerolizumab, gavilimomab, ziralimumab, fanolesomab, ipilimumab, ruplizumab, toralizumab, dapirolizumab pegol, toralizumab, dapirolizumab pegol, ruplizumab, blinatumomab, inebilizumab, loncastuximab tesirine, SGN-CD19A, tafasitamab, taplitumomab paptox, XMAB-5574, Budoprutug, Obexelimab, duvortuxizumab, englumafusp alfa, Emfizatamab, zeripatamig, siplizumab, blontuvetmab, FBTA05, ibritumomab tiuxetan, obinutuzumab, ocaratuzumab, ocrelizumab, ofatumumab, rituximab, tositumomab, ublituximab, veltuzumab, divozilimab, cramkafusp alfa, ripertamab, zuberitamab, glofitamab, nofetumomab merpentan, samalizumab, imvotamab, odronextamab, plamotamab, bectumomab, inotuzumab ozogamicin, moxctumomab pasudotox, pinatuzumab vedotin, gomiliximab, lumiliximab, inolimomab, inolimomab, daclizumab, camidanluma btesirine, basiliximab, varlilumab, omburtamab, enoblituzumab, vopratelimab, lulizumabpegol, TGN1412, muromonab-CD3, otelixizumab, teplizumab, visilizumab, epcoritamab, epcoritamab, brentuximab vedotin, iratumumab, azintuxizumab vedotin, gemtuzumab ozogamicin, lintuzumab, vadastuximab talirinc, naratuximab emtansine, otlertuzumab, lilotomab satetraxetan, tetulomab, daratumumab, isatuximab, foralumab, mosunetuzumab, mosunetuzumab, cedelizumab, ibalizumab, keliximab, priliximab, tregalizumab, zanolimumab, blesclumab, iscalimab, lucatumumab, ravagalimab, sclicrelumab, tencliximab, vanalimab, abciximab, bivatuzumab, iomab-B, telimomab aritox, zolimomab aritox, abituzumab, intetumumab, alemtuzumab, tamtuvetmab, lorvotuzumab mertansine, itolizumab, cusatuzumab, vorsetuzumab mafodotin, milatuzumab, iladatuzumab vedotin, polatuzumab vedotin, galiximab, cibisatamab, zolbctuximab, naxitamab, tisotumab vedotin, olendalizumab, pamrevlumab, lacnotuzumab, cabiralizumab, emactuzumab, axatilimab, gimsilumab, lenzilumab, namilumab, tremelimumab, ulocuplumab, tepoditamab, rovalpituzumab tesirine, tarlatamab, demcizumab, navicixizumab, drozitumab, parsatuzumab, depatuxizumab mafodotin, modotuximab, carotuximab, adecatumumab, adecatumumab, oportuzumab monatox, solitomab, tucotuzumab celmolcukin, edrecolomab, catumaxomab, ifabotuzumab, fibatuzumab, zalutumumab, panitumumab, cetuximab, futuximab, imgatuzumab, laprituximab emtansine, matuzumab, necitumumab, nimotuzumab, tomuzotuximab, amivantamab, amivantamab, cpitumomab cituxetan, sontuzumab, duligotuzumab, elgemtumab, lumretuzumab, patritumab, seribantumab, zenocutuzumab, sibrotuzumab, burosumab, aprutumab ixadotin, radretumab, pasotuxizumab, farletuzumab, mirvetuximab soravtansine, vantictumab, TRBS07, 3F8, dinutuximab, dinutuximab beta, ecromeximab, mitumomab, andecaliximab, capromab, codrituzumab, glembatumumab vedotin, talquetamab, talquetamab, trevogrumab, indusatumab vedotin, ficlatuzumab, rilotumumab, zatuximab, pentuzimab, pentuzimab, margetuximab, timigutuzumab, trastuzumab, trastuzumab duocarmazine, trastuzumab emtansine, gancotamab, pertuzumab, ertumaxomab, emibetuzumab, telisotuzumab, telisotuzumab vedotin, derlotuximab biotin, apolizumab, onartuzumab, bersanlimab, enlimomabpegol, rontalizumab, sifalimumab, talizumab, ganitumab, istiratumab, robatumumab, teprotumumab, figitumumab, ganitumab, istiratumab, robatumumab, teprotumumab, cixutumumab, dalotuzumab, xentuzumab, dusigitumab, canakinumab, ustekinumab, ustekinumab, ustekinumab, briakinumab, briakinumab, abrezekimab, lebrikizumab, romilkimab, TNX-650), tralokinumab, anrukinzumab, brodalumab, ixckizumab, netakimab, perakizumab, secukinumab, vunakizumab, afasevikumab, afasevikumab, bimckizumab, bimckizumab, remtolumab, bermekimab, lutikizumab, lutikizumab, gevokizumab, cergutuzumab amunalcukin, fletikumab, fezakinumab, brazikumab, guselkumab, mirikizumab, tildrakizumab, risankizumab, flotetuzumab, nemolizumab, pascolizumab, dupilumab, mepolizumab, reslizumab, clazakizumab, clsilimomab, olokizumab, sarilumab, siltuximab, sirukumab, vobarilizumab, tocilizumab, SA237, satralizumab, enokizumab, prezalizumab, natalizumab, abrilumab, abrilumab, vedolizumab, volociximab, tadocizumab, etaracizumab, etrolizumab, spesolimab, vatelizumab, erlizumab, lirilumab, relatlimab, cBR96-doxorubicinimmunoconjugate, odulimomab, cfalizumab, ladiratuzumab vedotin, simtuzumab, samrotamab vedotin, aselizumab, lupartumab amadotin, imalumab, carlumab, imaprelimab, amatuximab, amatuximab, anctumab ravtansine, narnatumab, clivatuzumab tetraxetan, pemtumomab, gatipotuzumab, ensituximab, lemalesomab, sulesomab, enfortumab vedotin, racotumomab, monalizumab, brontictuzumab, tarextumab, vesencumab, oxelumab, gilvetmab, tislelizumab, dostarlimab, BCD-100, nivolumab, PDR001, pembrolizumab, pidilizumab, retifanlimab, spartalizumab, sintilimab, cemiplimab, olaratumab, tovetumab, rinucumab, atezolizumab, avelumab, durvalumab, lifastuzumab vedotin, bavituximab, acapatamab, capromab, rosopatamab, nezastomig, pasotuxizumab, pelgifatamab, voxalatamab, cofetuzumab pelidotin, denosumab, rosmantuzumab, cirmtuzumab, atinumab, indatuximab ravtansine, clotuzumab, sirtratumab vedotin, sonepcizumab, vandortuzumab vedotin, minretumomab, satumomab pendetide, maslimomab, ontuxizumab, tenatumomab, fresolimumab, metelimumab, lerdelimumab, tezepelumab, ctigilimab, tiragotumab, placulumab, prezalumab, infliximab, nerelimomab, ozoralizumab, adalimumab, afclimomab, certolizumab pegol, golimumab, mapatumumab, conatumumab, lexatumumab, tigatuzumab, sacituzumab govitecan, votumumab, pogalizumab, letolizumab, pankomab, anatumomab mafenatox, enavatuzumab, flanvotumab, brolucizumab, ranibizumab, varisacumab, bevacizumab, faricimab, icrucumab, alacizumab pegol, ramucirumab, pritumumab, and onvatilimab.

[0570] In some aspects, and in any one of the formulas depicted herein, any one or more of (i) VL1 and VH1, (ii) VL2 and VH2, (iii) VL3 and VH3, and (iv) VL4 and VH4, comprise a VL and a VH of an antibody selected from the group consisting of losatuxizumab vedotin, utomilumab, urelumab, oleclumab, naptumomab estafenatox, ascrinvacumab, pintumomab, tacatuzumab tetraxetan, nesvacumab, vanucizumab, timolumab, vapaliximab, vepalimomab, enapotamab vedotin, ianalumab, belimumab, tabalumab, tibulizumab, belantamab mafodotin, teclistamab, teclistamab, detumomab, nacolomab tafenatox, eculizumab, lendalizumab, pexelizumab, pozelimab, ravulizumab, tesidolumab, vilobelimab, abagovomab, igovomab, oregovomab, sofituzumab vedotin, cantuzumab mertansine, cantuzuma bravtansine, girentuximab, altumomab pentetate, arcitumomab, besilesomab, bertilimumab, plozalizumab, mogamulizumab, leronlimab, PRO140), rovelizumab, rovelizumab, talacotuzumab, benralizumab, tavolimab, vonlerolizumab, gavilimomab, ziralimumab, fanolesomab, ipilimumab, ruplizumab, toralizumab, dapirolizumab pegol, toralizumab, dapirolizumab pegol, ruplizumab, blinatumomab, inebilizumab, loncastuximab tesirine, SGN-CD19A, tafasitamab, taplitumomab paptox, XMAB-5574, Budoprutug, Obexelimab, duvortuxizumab, englumafusp alfa, Emfizatamab, zeripatamig, siplizumab, blontuvetmab, FBTA05, ibritumomab tiuxetan, obinutuzumab, ocaratuzumab, ocrelizumab, ofatumumab, rituximab, tositumomab, ublituximab, veltuzumab, divozilimab, cramkafusp alfa, ripertamab, zuberitamab, glofitamab, nofetumomab merpentan, samalizumab, imvotamab, odronextamab, plamotamab, bectumomab, inotuzumab ozogamicin, moxctumomab pasudotox, pinatuzumab vedotin, gomiliximab, lumiliximab, inolimomab, inolimomab, daclizumab, camidanluma btesirine, basiliximab, varlilumab, omburtamab, enoblituzumab, vopratelimab, lulizumabpegol, TGN1412, muromonab-CD3, otelixizumab, teplizumab, visilizumab, epcoritamab, cpcoritamab, brentuximab vedotin, iratumumab, azintuxizumab vedotin, gemtuzumab ozogamicin, lintuzumab, vadastuximab talirine, naratuximab emtansine, otlertuzumab, lilotomab satetraxetan, tetulomab, daratumumab, isatuximab, foralumab, mosunetuzumab, mosunetuzumab, cedelizumab, ibalizumab, keliximab, priliximab, tregalizumab, zanolimumab, blesclumab, iscalimab, lucatumumab, ravagalimab, selicrelumab, teneliximab, vanalimab, abciximab, bivatuzumab, iomab-B, telimomab aritox, zolimomab aritox, abituzumab, intetumumab, alemtuzumab, tamtuvetmab, lorvotuzumab mertansine, itolizumab, cusatuzumab, vorsetuzumab mafodotin, milatuzumab, iladatuzumab vedotin, polatuzumab vedotin, galiximab, cibisatamab, zolbetuximab, naxitamab, tisotumab vedotin, olendalizumab, pamrevlumab, lacnotuzumab, cabiralizumab, emactuzumab, axatilimab, gimsilumab, lenzilumab, namilumab, tremelimumab, ulocuplumab, tepoditamab, rovalpituzumab tesirine, tarlatamab, demcizumab, navicixizumab, drozitumab, parsatuzumab, depatuxizumab mafodotin, modotuximab, carotuximab, adccatumumab, adecatumumab, oportuzumab monatox, solitomab, tucotuzumab celmolcukin, edrecolomab, catumaxomab, ifabotuzumab, fibatuzumab, zalutumumab, panitumumab, cetuximab, futuximab, imgatuzumab, laprituximab emtansine, matuzumab, necitumumab, nimotuzumab, tomuzotuximab, amivantamab, amivantamab, epitumomab cituxetan, sontuzumab, duligotuzumab, elgemtumab, lumretuzumab, patritumab, seribantumab, zenocutuzumab, sibrotuzumab, burosumab, aprutumab ixadotin, radretumab, pasotuxizumab, farletuzumab, mirvetuximab soravtansine, vantictumab, TRBS07, 3F8, dinutuximab, dinutuximab beta, ecromeximab, mitumomab, andecaliximab, capromab, codrituzumab, glembatumumab vedotin, talquetamab, talquetamab, trevogrumab, indusatumab vedotin, ficlatuzumab, rilotumumab, zatuximab, pentuzimab, pentuzimab, margetuximab, timigutuzumab, trastuzumab, trastuzumab duocarmazine, trastuzumab emtansine, gancotamab, pertuzumab, ertumaxomab, emibetuzumab, telisotuzumab, telisotuzumab vedotin, derlotuximab biotin, apolizumab, onartuzumab, bersanlimab, enlimomabpegol, rontalizumab, sifalimumab, talizumab, ganitumab, istiratumab, robatumumab, teprotumumab, figitumumab, ganitumab, istiratumab, robatumumab, teprotumumab, cixutumumab, dalotuzumab, xentuzumab, dusigitumab, canakinumab, ustekinumab, ustekinumab, ustekinumab, briakinumab, briakinumab, abrezekimab, lebrikizumab, romilkimab, TNX-650), tralokinumab, anrukinzumab, brodalumab, ixckizumab, netakimab, perakizumab, sccukinumab, vunakizumab, afasevikumab, afasevikumab, bimekizumab, bimckizumab, remtolumab, bermekimab, lutikizumab, lutikizumab, gevokizumab, cergutuzumab amunaleukin, fletikumab, fezakinumab, brazikumab, gusclkumab, mirikizumab, tildrakizumab, risankizumab, flotetuzumab, nemolizumab, pascolizumab, dupilumab, mepolizumab, reslizumab, clazakizumab, elsilimomab, olokizumab, sarilumab, siltuximab, sirukumab, vobarilizumab, tocilizumab, SA237, satralizumab, enokizumab, prezalizumab, natalizumab, abrilumab, abrilumab, vedolizumab, volociximab, tadocizumab, etaracizumab, etrolizumab, spesolimab, vatelizumab, erlizumab, lirilumab, relatlimab, cBR96-doxorubicinimmunoconjugate, odulimomab, efalizumab, ladiratuzumab vedotin, simtuzumab, samrotamab vedotin, asclizumab, lupartumab amadotin, imalumab, carlumab, imaprelimab, amatuximab, amatuximab, anetumab ravtansine, narnatumab, clivatuzumab tetraxetan, pemtumomab, gatipotuzumab, ensituximab, lemalesomab, sulesomab, enfortumab vedotin, racotumomab, monalizumab, brontictuzumab, tarextumab, vesencumab, oxelumab, gilvetmab, tislelizumab, dostarlimab, BCD-100, nivolumab, PDR001, pembrolizumab, pidilizumab, retifanlimab, spartalizumab, sintilimab, cemiplimab, olaratumab, tovetumab, rinucumab, atezolizumab, avelumab, durvalumab, lifastuzumab vedotin, bavituximab, acapatamab, capromab, rosopatamab, nezastomig, pasotuxizumab, pelgifatamab, voxalatamab, cofetuzumab pelidotin, denosumab, rosmantuzumab, cirmtuzumab, atinumab, indatuximab ravtansine, elotuzumab, sirtratumab vedotin, sonepcizumab, vandortuzumab vedotin, minretumomab, satumomab pendetide, maslimomab, ontuxizumab, tenatumomab, fresolimumab, metelimumab, lerdelimumab, tezepelumab, etigilimab, tiragotumab, placulumab, prezalumab, infliximab, nerelimomab, ozoralizumab, adalimumab, afelimomab, certolizumab pegol, golimumab, mapatumumab, conatumumab, lexatumumab, tigatuzumab, sacituzumab govitecan, votumumab, pogalizumab, letolizumab, pankomab, anatumomab mafenatox, enavatuzumab, flanvotumab, brolucizumab, ranibizumab, varisacumab, bevacizumab, faricimab, icrucumab, alacizumab pegol, ramucirumab, pritumumab, and onvatilimab.

[0571] In some aspects, and in any one of the formulas depicted herein, (a) any one or more of VL1, VL2, VL3, and VL4 comprises: (i) a LCDR1 having an amino acid sequence that is at least 65%, at least 70%, at least 75%, at least 80%, at least 85%, at least 90%, at least 95%, at least 99%, or 100% identical to any one of SEQ ID NOs: 1096, 1103, 1110, 1120, 1127, 1134, 1141, 1148, 1155, 1162, 1169, 1174, 1181, 1188, 1199, 1211, 1221, 1228, 1235, 1247, 1254, 1261, 1266, 1271, 1278, 1285, 1292, 1299, 1306, 1313, 1319, 1326, 1339, 1352, 1359, 1366, 1373, 1382, 1394, 1401, 1408, 1414, 1421, 1428, 1441, 1448, 1455, 1461, 1468, 1475, 1488, 1495, 1508, 1519, 1526, 1531, 1538, 1544, 1556, 1568, 1574, 1581, 1594, 1601, 1608, 1615, 1622, 1629, 1636, 1643, 1650, 1657, 1672, 1679, 1689, 1697, 1708, 1715, 1718, 1723, 1727, 1738, 1743, 1752, 1761, 1763, 1769, 1776, and 1786; (ii) a LCDR2 having an amino acid sequence that is at least 65%, at least 70%, at least 75%, at least 80%, at least 85%, at least 90%, at least 95%, at least 99%, or 100% identical to any one of SEQ ID NOs: 1200, 1212, 1680, 1690, 1698, 1709, 1728, 1739, 1744, 1753, 1770, and 1777, or at least 65%, at least 70%, at least 75%, at least 80%, at least 85%, at least 90%, at least 95%, at least 99%, or 100% identical to any one of amino acid sequences AAS, APS, AT, ATS, DAS, DDG, DDS, DT, DTS, DVS, EAS, FTS, GAF, GAN, GAS, GAT, GIS, GKN, GNS, HTS, KVS, LAS, LGS, LVS, NAK, NTN, QMS, RMS, RTS, SAS, TTS, WAS, YAS, YAT, YGS, YRS, and YTS; and (iii) a LCDR3 having an amino acid sequence that is at least 65%, at least 70%, at least 75%, at least 80%, at least 85%, at least 90%, at least 95%, at least 99%, or 100% identical to any one of SEQ ID NOs: 1097, 1104, 1111, 1121, 1128, 1135, 1142, 1149, 1156, 1163, 1170, 1175, 1182, 1189, 1195, 1201, 1207, 1213, 1222, 1229, 1236, 2009, 1248, 1255, 1262, 1267, 1272, 1279, 1286, 1293, 1300, 1307, 1320, 1327, 1333, 1340, 1346, 1353, 1360, 1367, 1374, 1383, 1389, 1395, 1402, 1409, 1415, 1422, 1429, 1435, 1442, 1449, 1456, 1462, 1469, 1476, 1482, 1489, 1496, 1502, 1509, 1513, 1520, 1532, 1539, 1545, 1557, 1562, 1569, 1575, 1582, 1588, 1595, 1602, 1609, 1616, 1623, 1630, 1637, 1644, 1651, 1658, 1663, 1673, 1681, 1691, 1699, 1710, 1729, 1735, 1745, 1751, 1754, 1778, 1787, and 1976; and (b) any one or more of VH1, VH2, VH3, VH4 comprises: (i) a HCDR1 having an amino acid sequence that is at least 65%, at least 70%, at least 75%, at least 80%, at least 85%, at least 90%, at least 95%, at least 99%, or 100% identical to any one of SEQ ID NOs: 1099, 1106, 1113, 1117, 1123, 1130, 1137, 1144, 1151, 1158, 1165, 1177, 1184, 1191, 1203, 1215, 1224, 1231, 1238, 1243, 1250, 1257, 1264, 1274, 1281, 1288, 1295, 1302, 1309, 1315, 1322, 1329, 1335, 1342, 1348, 1355, 1362, 1369, 1376, 1385, 1397, 1404, 1417, 1424, 1431, 1437, 1444, 1451, 1458, 1464, 1471, 1478, 1484, 1491, 1498, 1504, 1511, 1515, 1522, 1534, 1547, 1552, 1564, 1577, 1584, 1590, 1597, 1604, 1611, 1618, 1625, 1632, 1639, 1646, 1653, 1660, 1665, 1675, 1683, 1693, 1701, 1705, 1716, 1719, 1731, 1736, 1747, 1756, 1772, 1780, and 1789; (ii) a HCDR2 having an amino acid sequence that is at least 65%, at least 70%, at least 75%, at least 80%, at least 85%, at least 90%, at least 95%, at least 99%, or 100% identical to any one of SEQ ID NOs: 1100, 1107, 1114, 1118, 1124, 1131, 1138, 1145, 1152, 1159, 1166, 1178, 1185, 1192, 1204, 1216, 1225, 1232, 1239, 1244, 1251, 1258, 1275, 1282, 1289, 1296, 1303, 1310, 1316, 1323, 1330, 1336, 1343, 1349, 1356, 1363, 1370, 1377, 1386, 1391, 1398, 1405, 1411, 1418, 1425, 1432, 1438, 1445, 1452, 1465, 1472, 1479, 1485, 1492, 1499, 1505, 1516, 1523, 1528, 1535, 1541, 1548, 1553, 1559, 1565, 1571, 1578, 1585, 1591, 1598, 1605, 1612, 1619, 1626, 1633, 1640, 1647, 1654, 1666, 1676, 1684, 1687, 1694, 1702, 1706, 1712, 1717, 1720, 1725, 1732, 1737, 1741, 1748, 1757, 1767, 1773, 1781, and 1790; and (iii) a HCDR3 having an amino acid sequence that is at least 65%, at least 70%, at least 75%, at least 80%, at least 85%, at least 90%, at least 95%, at least 99%, or 100% identical to any one of SEQ ID NOs: 1101, 1108, 1115, 1125, 1132, 1139, 1146, 1153, 1160, 1167, 1172, 1179, 1186, 1193, 1197, 1205, 1209, 1217, 1226, 1233, 1240, 1245, 1252, 1259, 1269, 1276, 1283, 1290, 1297, 1304, 1311, 1317, 1324, 1331, 1337, 1344, 1350, 1357, 1364, 1371, 1378, 1387, 1392, 1399, 1406, 1412, 1419, 1426, 1433, 1439, 1446, 1453, 1459, 1466, 1473, 1480, 1486, 1493, 1500, 1506, 1517, 1524, 1529, 1536, 1542, 1549, 1554, 1560, 1566, 1572, 1579, 1586, 1592, 1599, 1606, 1613, 1620, 1627, 1634, 1641, 1648, 1655, 1661, 1667, 1670, 1677, 1685, 1688, 1695, 1703, 1707, 1713, 1733, 1749, 1758, 1762, 1774, 1782, 1791, and 1975.

[0572] In some aspects, and in any one of the formulas depicted herein, (a) any one or more of VL1, VL2, VL3, VL4 comprises an amino acid sequence that is at least 65%, at least 70%, at least 75%, at least 80%, at least 85%, at least 90%, at least 95%, at least 99%, or 100% identical to any one of SEQ ID NOs: 1098, 1105, 1112, 1122, 1129, 1136, 1143, 1150, 1157, 1164, 1171, 1176, 1183, 1190, 1196, 1202, 1208, 1214, 1219, 1223, 1230, 1237, 1242, 1249, 1256, 1263, 1268, 1273, 1280, 1287, 1294, 1301, 1308, 1314, 1321, 1328, 1334, 1341, 1347, 1354, 1361, 1368, 1375, 1380, 1384, 1390, 1396, 1403, 1410, 1416, 1423, 1430, 1436, 1443, 1450, 1457, 1463, 1470, 1477, 1483, 1490, 1497, 1503, 1510, 1514, 1521, 1527, 1533, 1540, 1546, 1551, 1558, 1563, 1570, 1576, 1583, 1589, 1596, 1603, 1610, 1617, 1624, 1631, 1638, 1645, 1652, 1659, 1664, 1669, 1674, 1682, 1692, 1700, 1711, 1721, 1724, 1730, 1740, 1746, 1755, 1764, 1766, 1771, 1779, 1784, and 1788; and (b) any one or more of VH1, VH2, VH3, VH4 comprises an amino acid sequence that is at least 65%, at least 70%, at least 75%, at least 80%, at least 85%, at least 90%, at least 95%, at least 99%, or 100% identical to any one of SEQ ID NOs: 1102, 1109, 1116, 1119, 1126, 1133, 1140, 1147, 1154, 1161, 1168, 1173, 1180, 1187, 1194, 1198, 1206, 1210, 1218, 1220, 1227, 1234, 1241, 1246, 1253, 1260, 1265, 1270, 1277, 1284, 1291, 1298, 1305, 1312, 1318, 1325, 1332, 1338, 1345, 1351, 1358, 1365, 1372, 1379, 1381, 1388, 1393, 1400, 1407, 1413, 1420, 1427, 1434, 1440, 1447, 1454, 1460, 1467, 1474, 1481, 1487, 1494, 1501, 1507, 1512, 1518, 1525, 1530, 1537, 1543, 1550, 1555, 1561, 1567, 1573, 1580, 1587, 1593, 1600, 1607, 1614, 1621, 1628, 1635, 1642, 1649, 1656, 1662, 1668, 1671, 1678, 1686, 1696, 1704, 1714, 1722, 1726, 1734, 1742, 1750, 1759, 1760, 1765, 1768, 1775, 1783, 1785, and 1792.

[0573] In some aspects, the infectious disease antigen that is not a sarbecovirus antigen is: (i) a viral antigen elected from the group consisting of an influenza virus (A, B, C) antigen (e.g., influenza virus envelope proteins, for example, influenza virus neuraminidase (NA, N1, N2, N3, N4, N5, N6, N7, N8, N9, N10, N11), influenza virus hemagglutinin (H1, H2, H3, H4, H5, H6, H7, H8, H9, H10, H11, H12, H13, H14, H15, H16, H17, H18) (e.g., H1N1, H3N2, H5N1, H7N9, HON2). Yamagata virus antigen. Victoria virus antigen, influenza virus structural proteins (e.g., M1, M2, capsid protein), influenza virus functional proteins (e.g., ribonucleoprotein (NP), primary interferon antagonist (NS1), nuclear export protein (NEP)) influenza virus accessory proteins (e.g., PB2, PB1, or PA), for example, anti-HA, anti-NA, anti-H1, anti-H3, anti-H5, anti-H7, anti-H9, anti-N1, anti-N2, anti-N9, anti-H1N1, anti-H3N2, anti-H5N1, anti-H7N9, anti-HON2, anti-A protein, anti-B protein, anti-stem, anti-M1, anti-M2, anti-capsid, anti-NP, anti-NS1, anti-NEP, anti-PB1, anti-PB2, and anti-PA); a swine influenza virus antigen (e.g., swine flu hemagglutinin, swine flu neuraminidase); a classical swine fever (CSF) (hog colera) virus antigen; an equine influenza virus antigen (e.g., equine influenza virus typeA/Miami 63 neuraminidase, equine influenza virus type A/Kentucky 81 neuraminidase, equine influenza virus type A/Alaska 91 neuraminidase): parainfluenza viruses (e.g., bovine parainfluenza virus, bovine parainfluenza virus type 3 fusion protein, bovine parainfluenza virus type 3 hemagglutinin neuraminidase); a (human) respiratory syncytial virus (RSV)-viral antigen (e.g., RSV F glycoprotein. RSV G glycoprotein. F protein of respiratory syncytial virus. RSV fusion glycoprotein); a herpes simplex virus (HSV) antigen (e.g., herpes simplex virus glycoproteins gB, gC, gD, and gE, herpes simplex virus type 2 glycoprotein gB); a Dengue virus antigen (e.g., core protein, matrix protein, glycoprotein E of Dengue virus, or other protein of Dengue virus); a measles virus antigen (e.g., hemagglutinin); a poliovirus 1 antigen (e.g., poliovirus 1 proteins (VP1)), a HIV-1 antigen and HIV-2 antigen (e.g., HIV envelope proteins (e.g., envelope glycoproteins of HIV 1, HIV envelope glycoprotein (Env), HIV envelope glycoprotein gp160, HIV envelope surface glycoprotein gp120, HIV transmembrane envelope protein gp41), HIV structural proteins (e.g., p17, p24, p7, p55). HIV functional proteins (e.g., p66, HIV-1 protease (PR), p31), HIV accessory proteins (e.g., Nef, Tat, Rev, Vif, Vpr, Vpu)); a hepatitis virus (HAV, HBV, HCV, HDV, HEV) antigen (e.g., hepatitis B virus antigen (e.g., surface antigen, core protein), hepatitis C virus antigen (e.g., glycoprotein E1E2)); a rabies virus (Rabies lyssavirus) antigen (e.g., rabies virus glycoprotein, e.g., G glycoprotein); a pseudorabies virus antigen (e.g., pseudorabies virus g50) (gpD), pseudorabies virus II (gpB), pseudorabies virus III (gpC), pseudorabies virus glycoprotein H, pseudorabies virus glycoprotein E); a papillomavirus (HPV) antigen; an Epstein-Barr virus (EBV) (Gamma herpes virus 4) antigen; a Herpes simplex virus (HSV, HSV-1. HSV-2) antigen (e.g., human herpes virus 8, equine herpes virus antigen (e.g., type 1 glycoprotein B, type 1 glycoprotein D)); a Herpes zoster antigen; a Cytomegalovirus antigen (e.g., cytomegalovirus glycoprotein B); a Zika virus antigen; a Transmissible gastroenteritis virus (TGEV) antigen (e.g., glycoprotein 195, matrix protein); a rotavirus antigen (e.g., swine rotavirus glycoprotein 38); a parvovirus antigen (e.g., swine parvovirus capsid protein); a filoviruses (e.g., Marburg and Ebola) antigen; a bovine viral diarrhea virus antigen (e.g., glycoprotein 55); a Newcastle disease virus antigen (hemagglutinin, neuraminidase); an orthopoxvirus antigen; a coxsackievirus antigen and aphthovirus (foot and mouth disease virus) antigen; a yellow fever virus antigen; a Chikunga virus antigen; a Nipah virus antigen; an African swine fever virus antigen; a rhinotracheitis virus antigen (e.g., infectious bovine rhinotracheitis virus glycoprotein E, glycoprotein G); a laryngotracheitis virus antigen (e.g., infectious laryngotracheitis virus glycoprotein G or glycoprotein I); a La Crosse virus antigen (e.g., La Crosse virus glycoprotein); a neonatal calf diarrhoea virus antigen; a Venezuelan equine encephalomyelitis virus antigen; a punta toro virus antigen; a murine leukemia virus antigen; a mouse mammary tumor virus antigen; a bovine respiratory syncytial virus antigen (e.g., bovine respiratory syncytial virus attachment protein (BRSV G), bovine respiratory syncytial virus fusion protein (BRSV F), bovine respiratory syncytial virus nucleocapsid protein (BRSVN)); a bovine E viral diarrhoea virus antigen (e.g., glycoprotein 48 and glycoprotein 53); a metapneumovirus (HMPV) antigen; and an Ebola virus antigen (e.g., ebolavirus glycoprotein, e.g., Zaire ebolavirus glycoprotein); or (ii) a bacterial or parasite antigen selected from the group consisting of a Plasmodium (e.g., Plasmodium falciparum, Plasmodium vivax, Plasmodium malariae, Plasmodium ovale, Plasmodium knowlesi) antigen, a Streptococcus (e.g., Streptococcus pneumoniae, Streptococcus pyogenes, Streptococcus agalactiae, Streptococcus mutans, Streptococcus viridans, Streptococcus anginosus, Streptococcus intermedius, Streptococcus constellatus) antigen (e.g., 24M epitope), a Neisseria gonorrhoeae antigen (e.g., gonococcal pilin), a Corynebacterium antigen (e.g., Corynebacterium diphtheria (diptheria toxin). Corynebacterium ulcerans. Corynebacterium pseudotuberculosis). Mycobacterium tuberculosis antigens. Brachyspira hyodysenteriae (Serpulina hydodysenteriae) antigen (e.g., Serpulina hydodysenteriae protective antigen), a Chlamydia antigen (e.g., Chlamydia trachomatis) (e.g., MOMP and PorB), a Mycoplasma sp. (e.g., Mycoplasma genitalium. Mycoplasma hyopneumoniae. Mycoplasma pneumonia) antigen, a Staphylococcus (e.g., Staphylococcus aureus, coagulase-negative staphylococci (CoNS), Staphylococcus aureus alpha toxin. Staphylococcus aureus bi-component leucocidin) antigen, a Klebsiella sp. antigen, an Escherichia coli antigen (e.g., E. coli shiga toxin type-2. E. coli shiga toxin type-1), a Bacillus sp. (e.g., Bacillus anthracis, e.g., Bacillus anthracis anthrax) antigen, a Pseudomonas aeruginosa antigen (e.g., Pseudomonas aeruginosa type III secretion system), an Enterococcus sp. antigen, an Enterobacter sp. antigen, a Proteus sp. antigen, an Actinobacter sp. antigen, a Mycobacterium avium (Mycobacterium avium complex (MAC)) antigen, a Salmonella bacteria antigen, a Clostridium difficile antigen, a Toxoplasma (e.g., Toxoplasma gondii) antigen, a Histoplasma antigen, a Candida antigen, a Coccidioides antigen, a Cryptococcus antigen, a Cryptosporidium antigen, and a Cystoisospora (e.g., Cystoisospora belli) antigen, and another antigen (e.g., endotoxins, lymphotoxins (e.g., lymphotoxin alpha LTA), phosphatidylserine. Hsp90. CCR5, lipoteichoic acid, clumping factor A).

[0574] In some aspects, and in any one of the formulas depicted herein, any one or more of (i) VL1 and VH1, (ii) VL2 and VH2, (iii) VL3 and VH3, and (iv) VL4 and VH4, comprise a light complementarity determining region 1 (LCDR1), LCDR2, and/or LCDR3, and a heavy complementarity determining region 1 (HCDR1), HCDR2, and/or HCDR3 of an antibody selected from the group consisting of libivirumab, rmab, rivabazumab pegol, setoxaximab, suvizumab, suvratoxumab, sevirumab, pritoxaximab, porgaviximab. REGN-EB3, obiltoxaximab, gedivumab, foravirumab, larcaviximab, motavizumab, palivizumab, rafivirumab, regavirumab, tuvirumab, cosfroviximab, felvizumab, atidortoxumab, edobacomab, nebacumab, pateclizumab, raxibacumab, urtoxazumab, tosatoxumab, berlimatoxumab, CR6261, diridavumab, firivumab, lesofavumab, navivumab, exbivirumab, lenvervimab, bavituximab, bezlotoxumab, efungumab, leronlimab, nirsevimab, pagibaximab, panobacumab, tefibazumab, ansuvimab, atoltivimab, maftivimab, and odesivimab.

[0575] In some aspects, and in any one of the formulas depicted herein, any one or more of (i) VL1 and VH1, (ii) VL2 and VH2, (iii) VL3 and VH3, and (iv) VL4 and VH4, comprise a VL and a VH of an antibody selected from the group consisting of libivirumab, rmab, rivabazumab pegol, setoxaximab, suvizumab, suvratoxumab, sevirumab, pritoxaximab, porgaviximab, REGN-EB3, obiltoxaximab, gedivumab, foravirumab, larcaviximab, motavizumab, palivizumab, rafivirumab, regavirumab, tuvirumab, cosfroviximab, felvizumab, atidortoxumab, edobacomab, nebacumab, pateclizumab, raxibacumab, urtoxazumab, tosatoxumab, berlimatoxumab, CR6261, diridavumab, firivumab, lesofavumab, navivumab, exbivirumab, lenvervimab, bavituximab, bezlotoxumab, efungumab, leronlimab, nirsevimab, pagibaximab, panobacumab, tefibazumab, ansuvimab, atoltivimab, maftivimab, and odesivimab.

[0576] In some aspects, and in any one of the formulas depicted herein, (a) any one or more of VL1, VL2, VL3, and VL4 comprises: (i) a LCDR1 having an amino acid sequence that is at least 65%, at least 70%, at least 75%, at least 80%, at least 85%, at least 90%, at least 95%, at least 99%, or 100% identical to any one of SEQ ID NOs: 1428, 1793, 1798, 1810, 1817, 1824, 1977, 1985, 1993 and 2001; (ii) a LCDR2 having an amino acid sequence that is at least 65%, at least 70%, at least 75%, at least 80%, at least 85%, at least 90%, at least 95%, at least 99%, or 100% identical to any one of SEQ ID NOs: 1978, 1986, 1994, and 2002, or at least 65%, at least 70%, at least 75%, at least 80%, at least 85%, at least 90%, at least 95%, at least 99%, or 100% identical to any one of amino acid sequences YTS, DTS, GAS, and AAS; and (iii) a LCDR3 having an amino acid sequence that is at least 65%, at least 70%, at least 75%, at least 80%, at least 85%, at least 90%, at least 95%, at least 99%, or 100% identical to any one of SEQ ID NOs: 1229, 1799, 1805, 1811, 1818, 1825, 1979, 1987, 1995, and 2003; and (b) any one or more of VH1, VH2, VH3, and VH4 comprises: (i) a HCDR1 having an amino acid sequence that is at least 65%, at least 70%, at least 75%, at least 80%, at least 85%, at least 90%, at least 95%, at least 99%, or 100% identical to any one of SEQ ID NOs: 1577, 1795, 1801, 1813, 1820, 1827, 1981, 1989, 1997, and 2005; (ii) a HCDR2 having an amino acid sequence that is at least 65%, at least 70%, at least 75%, at least 80%, at least 85%, at least 90%, at least 95%, at least 99%, or 100% identical to any one of SEQ ID NOs: 1159, 1802, 1807, 1814, 1821, 1828, 1982, 1990, 1998, and 2006; and (iii) a HCDR3 having an amino acid sequence that is at least 65%, at least 70%, at least 75%, at least 80%, at least 85%, at least 90%, at least 95%, at least 99%, or 100% identical to any one of SEQ ID NOs: 1796, 1803, 1808, 1815, 1822, 1829, 1983, 1991, 1999, and 2007.

[0577] In some aspects, and in any one of the formulas depicted herein, (a) any one or more of VL1, VL2, VL3, and VL4 comprises an amino acid sequence that is at least 65%, at least 70%, at least 75%, at least 80%, at least 85%, at least 90%, at least 95%, at least 99%, or 100% identical to any one of SEQ ID NOs: 1794, 1800, 1806, 1812, 1819, 1826, 1980, 1988, 1996, and 2004; and (b) any one or more of VH1, VH2, VH3, and VH4 comprises an amino acid sequence that is at least 65%, at least 70%, at least 75%, at least 80%, at least 85%, at least 90%, at least 95%, at least 99%, or 100% identical to any one of SEQ ID NOS: 1797, 1804, 1809, 1816, 1823, 1830, 1984, 1992, 2000, and 2008.

[0578] In some aspects, the other-pathology antigen is selected from the group consisting of Amyloid beta, β-amyloid, PCSK9, IFN-α/B receptor. Rhesus factor, nerve growth factor (NGF), DPP4, fibrin II beta chain. ACVR2B, scrum amyloid A protein SOST, FGF 23, VWF, tissue factor pathway inhibitor (TFPI), 1-40) and 1-42, selectin P, glucagon receptor (GCGR), amyloid P component, GDF-8, CXCL10) IP-10, repulsive guidance molecule A RGMA, IFN-γ, activated F9/F10, calcitonin gene-related peptide (CGRP), angiopoietin 3, IFN receptor, IFN-γ, calcitonin, β-amyloid 1-40 and 1-42, tau protein, dabigatran, cardiac myosin, selectin P, Complement factor D (CFD), kallikrein, GDF-8, IGHE, tissue factor pathway inhibitor (TFPI), GMCSF receptor α-chain, amyloid, IgE Fc region. MASP-2, oxLDL, GMCSF, NOGO-A, Alpha-synuclein, NGF, myelin-associated glycoprotein, RHD (gene) (RHD), sclerostin, FCGRT, sclerostin SOST, mucosal addressin cell adhesion molecule, myostatin, RSVFR, complement component 1s C1s, C5, and IL31.

[0579] In some aspects, and in any one of the formulas depicted herein, any one or more of (i) VL1 and VH1, (ii) VL2 and VH2, (iii) VL3 and VH3, and (iv) VL4 and VH4, comprise a light complementarity determining region 1 (LCDR1), LCDR2, and/or LCDR3, and a heavy complementarity determining region 1 (HCDR1), HCDR2, and/or HCDR3 of an antibody selected from the group consisting of aducanumab, alirocumab, frovocimab, lodelcizumab, bococizumab, evolocumab, ralpancizumab, anifrolumab, atorolimumab, bapineuzumab, bedinvetmab, begelomab, biciromab, bimagrumab, birtamimab, blosozumab, burosumab, caplacizumab, concizumab, crenezumab, crizanlizumab, crotedumab, dezamizumab, domagrozumab, donanemab, eldelumab, elezanumab, emapalumab, emicizumab, eptinezumab, erenumab, evinacumab, faralimomab, fasinumab, fontolizumab, fremanezumab, frunevetmab, fulranumab, galcanezumab, gantenerumab, gosuranemab, idarucizumab, imciromab, inclacumab, lampalizumab, lanadelumab, landogrozumab, lecanemab, ligelizumab, marstacimab, mavrilimumab, morolimumab, NEOD001, omalizumab, oMS721, orticumab, otilimab, ozanezumab, ponezumab, prasinezumab, quilizumab, ranevetmab, refanezumab, roledumab, romosozumab, rozanolixizumab, setrusumab, SHP647, solanezumab, stamulumab, suptavumab, sutimlimab, tanezumab, crovalimab, and lokivetmab.

[0580] In some aspects, and in any one of the formulas depicted herein, any one or more of (i) VL1 and VH1, (ii) VL2 and VH2, (iii) VL3 and VH3, and (iv) VL4 and VH4, comprise the VL and the VH of an antibody selected from the group consisting of aducanumab, alirocumab, frovocimab, lodelcizumab, bococizumab, evolocumab, ralpancizumab, anifrolumab, atorolimumab, bapineuzumab, bedinvetmab, begelomab, biciromab, bimagrumab, birtamimab, blosozumab, burosumab, caplacizumab, concizumab, crenezumab, crizanlizumab, crotedumab, dezamizumab, domagrozumab, donanemab, eldelumab, elezanumab, emapalumab, emicizumab, eptinezumab, erenumab, evinacumab, faralimomab, fasinumab, fontolizumab, fremanezumab, frunevetmab, fulranumab, galcanezumab, gantenerumab, gosuranemab, idarucizumab, imciromab, inclacumab, lampalizumab, lanadelumab, landogrozumab, lecanemab, ligelizumab, marstacimab, mavrilimumab, morolimumab, NEOD001, omalizumab, oMS721, orticumab, otilimab, ozanezumab, ponezumab, prasinezumab, quilizumab, ranevetmab, refanezumab, roledumab, romosozumab, rozanolixizumab, setrusumab, SHP647, solanezumab, stamulumab, suptavumab, sutimlimab, tanezumab, crovalimab, and lokivetmab.

[0581] In some aspects, and in any one of the formulas depicted herein, (a) any one or more of VL1, VL2, VL3, and VL4 comprises: (i) a LCDR1 having an amino acid sequence that is at least 65%, at least 70%, at least 75%, at least 80%, at least 85%, at least 90%, at least 95%, at least 99%, or 100% identical to any one of SEQ ID NOs: 1120, 1228, 1359, 1519, 1831, 1838, 1845, 1852, 1859, 1866, 1872, 1878, 1885, 1891, 1898, 1905, 1911, 1917, 1924, 1931, 1938, 1945, and 1963; (ii) a LCDR2 having an amino acid sequence that is at least 65%, at least 70%, at least 75%, at least 80%, at least 85%, at least 90%, at least 95%, at least 99%, or 100% identical to any one of amino acid sequences AAS, AVS, DAS, DNN, EDN, EVS, GAS, GNG, KAS, KVS, LVS, NTD, STS, WAS, and YTS; and (iii) a LCDR3 having an amino acid sequence that is at least 65%, at least 70%, at least 75%, at least 80%, at least 85%, at least 90%, at least 95%, at least 99%, or 100% identical to any one of SEQ ID NOs: 1360, 1832, 1839, 1846, 1853, 1860, 1867, 1873, 1879, 1886, 1892, 1899, 1906, 1912, 1918, 1925, 1932, 1939, 1946, 1951, 1957, 1964, and 1970; and (b) any one or more of VH1, VH2, VH3, and VH4 comprises: (i) a HCDR1 having an amino acid sequence that is at least 65%, at least 70%, at least 75%, at least 80%, at least 85%, at least 90%, at least 95%, at least 99%, or 100% identical to any one of SEQ ID NOs: 1309, 1362, 1437, 1552, 1618, 1639, 1834, 1841, 1848, 1855, 1862, 1881, 1894, 1901, 1920, 1927, 1934, 1941, 1953, 1959, and 1966; (ii) a HCDR2 having an amino acid sequence that is at least 65%, at least 70%, at least 75%, at least 80%, at least 85%, at least 90%, at least 95%, at least 99%, or 100% identical to any one of SEQ ID NOs: 1363, 1835, 1842, 1849, 1856, 1863, 1869, 1875, 1882, 1888, 1895, 1902, 1908, 1914, 1921, 1928, 1935, 1942, 1948, 1954, 1960, 1967, and 1972; and (iii) a HCDR3 having an amino acid sequence that is at least 65%, at least 70%, at least 75%, at least 80%, at least 85%, at least 90%, at least 95%, at least 99%, or 100% identical to any one of SEQ ID NOs: 1364, 1836, 1843, 1850, 1857, 1864, 1870, 1876, 1883, 1889, 1896, 1903, 1909, 1915, 1922, 1929, 1936, 1943, 1949, 1955, 1961, 1968, and 1973.

[0582] In some aspects, and in any one of the formulas depicted herein, (a) any one or more of VL1, VL2, and VL3 comprises an amino acid sequence that is at least 65%, at least 70%, at least 75%, at least 80%, at least 85%, at least 90%, at least 95%, at least 99%, or 100% identical to any one of SEQ ID NOs: 1361, 1833, 1840, 1847, 1854, 1861, 1868, 1874, 1880, 1887, 1893, 1900, 1907, 1913, 1919, 1926, 1933, 1940, 1947, 1952, 1958, 1965, and 1971; and (b) any one or more of VH1, VH2, and VH3 comprises an amino acid sequence that is at least 65%, at least 70%, at least 75%, at least 80%, at least 85%, at least 90%, at least 95%, at least 99%, or 100% identical to any one of SEQ ID NOs: 1365, 1837, 1844, 1851, 1858, 1865, 1871, 1877, 1884, 1890, 1897, 1904, 1910, 1916, 1923, 1930, 1937, 1944, 1950, 1956, 1962, 1969, and 1974.

[0583] Also provided herein is an antigen binding polypeptide complex comprising a first polypeptide and a second polypeptide, wherein the first polypeptide has a structure, from amino-terminus to carboxy-terminus, represented by: VL1-L1-VL2-L2-VH2-L3-VH1-L4-CL-L5-CH1; VL1-L1-VL2-L2-VH2-L3-VH1-L4-CH1-L5-CL; VL1-L1-VH2-L2-VL2-L3-VH1-L4-CL-L5-CH1; VL1-L1-VH2-L2-VL2-L3-VH1-L4-CH1-L5-CL; VH1-L1-VL2-L2-VH2-L3-VL1-L4-CL-L5-CH1; VH1-L1-VL2-L2-VH2-L3-VL1-L4-CH1-L5-CL; VH1-L1-VH2-L2-VL2-L3-VL1-L4-CL-L5-CH1; VH1-L1-VH2-L2-VL2-L3-VL1-L4-CH1-L5-CL; VL2-L1-VL1-L2-VH1-L3-VH2-L4-CL-L5-CH1; VL2-L1-VL1-L2-VH1-L3-VH2-L4-CH1-L5-CL; VL2-L1-VH1-L2-VL1-L3-VH2-L4-CL-L5-CH1; VL2-L1-VH1-L2-VL1-L3-VH2-L4-CH1-L5- CL; VH2-L1-VL1-L2-VH1-L3-VL2-L4-CL-L5-CH1; VH2-L1-VL1-L2-VH1-L3-VL2-L4-CH1-L5-CL; VH2-L1-VH1-L2-VL1-L3-VL2-L4-CL-L5-CH1; or VH2-L1-VH1-L2-VL1-L3-VL2-L4-CH1-L5-CL; wherein the second polypeptide has a structure, from amino-terminus to carboxy-terminus, represented by: VL3-L6-VL4-L7-VH4-L8-VH3-L9-CL-L10-CH1; VL3-L6-VL4-L7-VH4-L8-VH3-L9-CH1-L10-CL; VL3-L6-VH4-L7-VL4-L8-VH3-L9-CL-L10-CH1; VL3-L6-VH4-L7-VL4-L8-VH3-L9-CH1-L10-CL; VH3-L6-VL4-L7-VH4-L8-VL3-L9-CL-L10-CH1; VH3-L6-VL4-L7-VH4-L8-VL3-L9-CH1-L10-CL; VH3-L6-VH4-L7-VL4-L8-VL3-L9-CL-L10-CH1; VH3-L6-VH4-L7-VL4-L8-VL3-L9-CH1-L10-CL; VL4-L6-VL3-L7-VH3-L8-VH4-L9-CL-L10-CH1; VL4-L6-VL3-L7-VH3-L8-VH4-L9-CH1-L10-CL; VL4-L6-VH3-L7-VL3-L8-VH4-L9-CL-L10-CH1; VL4-L6-VH3-L7-VL3-L8-VH4-L9-CH1-L10-CL; VH4-L6-VL3-L7-VH3-L8-VL4-L9-CL-L10-CH1; VH4-L6-VL3-L7-VH3-L8-VL4-L9-CH1-L10-CL; VH4-L6-VH3-L7-VL3-L8-VL4-L9-CL-L10-CH1; or VH4-L6-VH3-L7-VL3-L8-VL4-L9-CH1-L10-CL; and wherein: (a) VL1 is a first immunoglobulin light chain variable region that specifically binds to a tumor-associated antigen (TAA), comprising a CDR1 having an amino acid sequence at least 65%, at least 70%, at least 75%, at least 80%, at least 85%, at least 90%, at least 95%, at least 99%, or 100% identical to any one of SEQ ID NOs: 1096, 1103, 1110, 1120, 1127, 1134, 1141, 1148, 1155, 1162, 1169, 1174, 1181, 1188, 1199, 1211, 1221, 1228, 1235, 1247, 1254, 1261, 1266, 1271, 1278, 1285, 1292, 1299, 1306, 1313, 1319, 1326, 1339, 1352, 1359, 1366, 1373, 1382, 1394, 1401, 1408, 1414, 1421, 1428, 1441, 1448, 1455, 1461, 1468, 1475, 1488, 1495, 1508, 1519, 1526, 1531, 1538, 1544, 1556, 1568, 1574, 1581, 1594, 1601, 1608, 1615, 1622, 1629, 1636, 1643, 1650, 1657, 1672, 1679, 1689, 1697, 1708, 1715, 1718, 1723, 1727, 1738, 1743, 1752, 1761, 1763, 1769, 1776, and 1786, a CDR2 having an amino acid sequence at least 65%, at least 70%, at least 75%, at least 80%, at least 85%, at least 90%, at least 95%, at least 99%, or 100% identical to any one of amino acid sequences AAS, APS, AT, ATS, DAS, DDG, DDS, DT, DTS, DVS, EAS, FTS, GAF, GAN, GAS, GAT, GIS, GKN, GNS, HTS, KVS, LAS, LGS, LVS, NAK, NTN, QMS, RMS, RTS, SAS, TTS, WAS, YAS, YAT, YGS, YRS, and YTS or an amino acid sequence at least 65%, at least 70%, at least 75%, at least 80%, at least 85%, at least 90%, at least 95%, at least 99%, or 100% identical to any one of SEQ ID NOs: 1200, 1212, 1680, 1690, 1698, 1709, 1728, 1739, 1744, 1753, 1770, and 1777, and a CDR3 having an amino acid sequence at least 65%, at least 70%, at least 75%, at least 80%, at least 85%, at least 90%, at least 95%, at least 99%, or 100% identical to any one of SEQ ID NOs: 1097, 1104, 1111, 1121, 1128, 1135, 1142, 1149, 1156, 1163, 1170, 1175, 1182, 1189, 1195, 1201, 1207, 1213, 1222, 1229, 1236, 2009, 1248, 1255, 1262, 1267, 1272, 1279, 1286, 1293, 1300, 1307, 1320, 1327, 1333, 1340, 1346, 1353, 1360, 1367, 1374, 1383, 1389, 1395, 1402, 1409, 1415, 1422, 1429, 1435, 1442, 1449, 1456, 1462, 1469, 1476, 1482, 1489, 1496, 1502, 1509, 1513, 1520, 1532, 1539, 1545, 1557, 1562, 1569, 1575, 1582, 1588, 1595, 1602, 1609, 1616, 1623, 1630, 1637, 1644, 1651, 1658, 1663, 1673, 1681, 1691, 1699, 1710, 1729, 1735, 1745, 1751, 1754, 1778, 1787, and 1976; VL2 is a second immunoglobulin light chain variable region that specifically binds to a tumor-associated antigen (TAA), comprising a CDR1 having an amino acid sequence at least 65%, at least 70%, at least 75%, at least 80%, at least 85%, at least 90%, at least 95%, at least 99%, or 100% identical to any one of SEQ ID NOs: 1096, 1103, 1110, 1120, 1127, 1134, 1141, 1148, 1155, 1162, 1169, 1174, 1181, 1188, 1199, 1211, 1221, 1228, 1235, 1247, 1254, 1261, 1266, 1271, 1278, 1285, 1292, 1299, 1306, 1313, 1319, 1326, 1339, 1352, 1359, 1366, 1373, 1382, 1394, 1401, 1408, 1414, 1421, 1428, 1441, 1448, 1455, 1461, 1468, 1475, 1488, 1495, 1508, 1519, 1526, 1531, 1538, 1544, 1556, 1568, 1574, 1581, 1594, 1601, 1608, 1615, 1622, 1629, 1636, 1643, 1650, 1657, 1672, 1679, 1689, 1697, 1708, 1715, 1718, 1723, 1727, 1738, 1743, 1752, 1761, 1763, 1769, 1776, and 1786, a CDR2 having an amino acid sequence at least 65%, at least 70%, at least 75%, at least 80%, at least 85%, at least 90%, at least 95%, at least 99%, or 100% identical to any one of amino acid sequences AAS, APS, AT, ATS, DAS, DDG, DDS, DT, DTS, DVS, EAS, FTS, GAF, GAN, GAS, GAT, GIS, GKN, GNS, HTS, KVS, LAS, LGS, LVS, NAK, NTN, QMS, RMS, RTS, SAS, TTS, WAS, YAS, YAT, YGS, YRS, and YTS or an amino acid sequence at least 65%, at least 70%, at least 75%, at least 80%, at least 85%, at least 90%, at least 95%, at least 99%, or 100% identical to any one of SEQ ID NOs: 1200, 1212, 1680, 1690, 1698, 1709, 1728, 1739, 1744, 1753, 1770, and 1777, and a CDR3 having an amino acid sequence at least 65%, at least 70%, at least 75%, at least 80%, at least 85%, at least 90%, at least 95%, at least 99%, or 100% identical to any one of SEQ ID NOs: 1097, 1104, 1111, 1121, 1128, 1135, 1142, 1149, 1156, 1163, 1170, 1175, 1182, 1189, 1195, 1201, 1207, 1213, 1222, 1229, 1236, 2009, 1248, 1255, 1262, 1267, 1272, 1279, 1286, 1293, 1300, 1307, 1320, 1327, 1333, 1340, 1346, 1353, 1360, 1367, 1374, 1383, 1389, 1395, 1402, 1409, 1415, 1422, 1429, 1435, 1442, 1449, 1456, 1462, 1469, 1476, 1482, 1489, 1496, 1502, 1509, 1513, 1520, 1532, 1539, 1545, 1557, 1562, 1569, 1575, 1582, 1588, 1595, 1602, 1609, 1616, 1623, 1630, 1637, 1644, 1651, 1658, 1663, 1673, 1681, 1691, 1699, 1710, 1729, 1735, 1745, 1751, 1754, 1778, 1787, and 1976; VL3 is a third immunoglobulin light chain variable region that specifically binds to a tumor-associated antigen (TAA), comprising a CDR1 having an amino acid sequence at least 65%, at least 70%, at least 75%, at least 80%, at least 85%, at least 90%, at least 95%, at least 99%, or 100% identical to any one of SEQ ID NOs: 1096, 1103, 1110, 1120, 1127, 1134, 1141, 1148, 1155, 1162, 1169, 1174, 1181, 1188, 1199, 1211, 1221, 1228, 1235, 1247, 1254, 1261, 1266, 1271, 1278, 1285, 1292, 1299, 1306, 1313, 1319, 1326, 1339, 1352, 1359, 1366, 1373, 1382, 1394, 1401, 1408, 1414, 1421, 1428, 1441, 1448, 1455, 1461, 1468, 1475, 1488, 1495, 1508, 1519, 1526, 1531, 1538, 1544, 1556, 1568, 1574, 1581, 1594, 1601, 1608, 1615, 1622, 1629, 1636, 1643, 1650, 1657, 1672, 1679, 1689, 1697, 1708, 1715, 1718, 1723, 1727, 1738, 1743, 1752, 1761, 1763, 1769, 1776, and 1786, a CDR2 having an amino acid sequence at least 65%, at least 70%, at least 75%, at least 80%, at least 85%, at least 90%, at least 95%, at least 99%, or 100% identical to any one of amino acid sequences AAS, APS, AT, ATS, DAS, DDG, DDS, DT, DTS, DVS, EAS, FTS, GAF, GAN, GAS, GAT, GIS, GKN, GNS, HTS, KVS, LAS, LGS, LVS, NAK, NTN, QMS, RMS, RTS, SAS, TTS, WAS, YAS, YAT, YGS, YRS, and YTS or an amino acid sequence at least 65%, at least 70%, at least 75%, at least 80%, at least 85%, at least 90%, at least 95%, at least 99%, or 100% identical to any one of SEQ ID NOs: 1200, 1212, 1680, 1690, 1698, 1709, 1728, 1739, 1744, 1753, 1770, and 1777, and a CDR3 having an amino acid sequence at least 65%, at least 70%, at least 75%, at least 80%, at least 85%, at least 90%, at least 95%, at least 99%, or 100% identical to any one of SEQ ID NOs: 1097, 1104, 1111, 1121, 1128, 1135, 1142, 1149, 1156, 1163, 1170, 1175, 1182, 1189, 1195, 1201, 1207, 1213, 1222, 1229, 1236, 2009, 1248, 1255, 1262, 1267, 1272, 1279, 1286, 1293, 1300, 1307, 1320, 1327, 1333, 1340, 1346, 1353, 1360, 1367, 1374, 1383, 1389, 1395, 1402, 1409, 1415, 1422, 1429, 1435, 1442, 1449, 1456, 1462, 1469, 1476, 1482, 1489, 1496, 1502, 1509, 1513, 1520, 1532, 1539, 1545, 1557, 1562, 1569, 1575, 1582, 1588, 1595, 1602, 1609, 1616, 1623, 1630, 1637, 1644, 1651, 1658, 1663, 1673, 1681, 1691, 1699, 1710, 1729, 1735, 1745, 1751, 1754, 1778, 1787, and 1976; VL4 is a fourth immunoglobulin light chain variable region that specifically binds to a tumor-associated antigen (TAA), comprising a CDR1 having an amino acid sequence at least 65%, at least 70%, at least 75%, at least 80%, at least 85%, at least 90%, at least 95%, at least 99%, or 100% identical to any one of SEQ ID NOs: 1096, 1103, 1110, 1120, 1127, 1134, 1141, 1148, 1155, 1162, 1169, 1174, 1181, 1188, 1199, 1211, 1221, 1228, 1235, 1247, 1254, 1261, 1266, 1271, 1278, 1285, 1292, 1299, 1306, 1313, 1319, 1326, 1339, 1352, 1359, 1366, 1373, 1382, 1394, 1401, 1408, 1414, 1421, 1428, 1441, 1448, 1455, 1461, 1468, 1475, 1488, 1495, 1508, 1519, 1526, 1531, 1538, 1544, 1556, 1568, 1574, 1581, 1594, 1601, 1608, 1615, 1622, 1629, 1636, 1643, 1650, 1657, 1672, 1679, 1689, 1697, 1708, 1715, 1718, 1723, 1727, 1738, 1743, 1752, 1761, 1763, 1769, 1776, and 1786, a CDR2 having an amino acid sequence at least 65%, at least 70%, at least 75%, at least 80%, at least 85%, at least 90%, at least 95%, at least 99%, or 100% identical to any one of amino acid sequences AAS, APS, AT, ATS, DAS, DDG, DDS, DT, DTS, DVS, EAS, FTS, GAF, GAN, GAS, GAT, GIS, GKN, GNS, HTS, KVS, LAS, LGS, LVS, NAK, NTN, QMS, RMS, RTS, SAS, TTS, WAS, YAS, YAT, YGS, YRS, and YTS or an amino acid sequence at least 65%, at least 70%, at least 75%, at least 80%, at least 85%, at least 90%, at least 95%, at least 99%, or 100% identical to any one of SEQ ID NOs: 1200, 1212, 1680, 1690, 1698, 1709, 1728, 1739, 1744, 1753, 1770, and 1777, and a CDR3 having an amino acid sequence at least 65%, at least 70%, at least 75%, at least 80%, at least 85%, at least 90%, at least 95%, at least 99%, or 100% identical to any one of SEQ ID NOs: 1097, 1104, 1111, 1121, 1128, 1135, 1142, 1149, 1156, 1163, 1170, 1175, 1182, 1189, 1195, 1201, 1207, 1213, 1222, 1229, 1236, 2009, 1248, 1255, 1262, 1267, 1272, 1279, 1286, 1293, 1300, 1307, 1320, 1327, 1333, 1340, 1346, 1353, 1360, 1367, 1374, 1383, 1389, 1395, 1402, 1409, 1415, 1422, 1429, 1435, 1442, 1449, 1456, 1462, 1469, 1476, 1482, 1489, 1496, 1502, 1509, 1513, 1520, 1532, 1539, 1545, 1557, 1562, 1569, 1575, 1582, 1588, 1595, 1602, 1609, 1616, 1623, 1630, 1637, 1644, 1651, 1658, 1663, 1673, 1681, 1691, 1699, 1710, 1729, 1735, 1745, 1751, 1754, 1778, 1787, and 1976; VH1 is a first immunoglobulin heavy chain variable region that specifically binds to a tumor-associated antigen (TAA), comprising a CDR1 having an amino acid sequence at least 65%, at least 70%, at least 75%, at least 80%, at least 85%, at least 90%, at least 95%, at least 99%, or 100% identical to any one of SEQ ID NOs: 1099, 1106, 1113, 1117, 1123, 1130, 1137, 1144, 1151, 1158, 1165, 1177, 1184, 1191, 1203, 1215, 1224, 1231, 1238, 1243, 1250, 1257, 1264, 1274, 1281, 1288, 1295, 1302, 1309, 1315, 1322, 1329, 1335, 1342, 1348, 1355, 1362, 1369, 1376, 1385, 1397, 1404, 1417, 1424, 1431, 1437, 1444, 1451, 1458, 1464, 1471, 1478, 1484, 1491, 1498, 1504, 1511, 1515, 1522, 1534, 1547, 1552, 1564, 1577, 1584, 1590, 1597, 1604, 1611, 1618, 1625, 1632, 1639, 1646, 1653, 1660, 1665, 1675, 1683, 1693, 1701, 1705, 1716, 1719, 1731, 1736, 1747, 1756, 1772, 1780, and 1789, a CDR2 having an amino acid sequence at least 65%, at least 70%, at least 75%, at least 80%, at least 85%, at least 90%, at least 95%, at least 99%, or 100% identical to any one of SEQ ID NOs: 1100, 1107, 1114, 1118, 1124, 1131, 1138, 1145, 1152, 1159, 1166, 1178, 1185, 1192, 1204, 1216, 1225, 1232, 1239, 1244, 1251, 1258, 1275, 1282, 1289, 1296, 1303, 1310, 1316, 1323, 1330, 1336, 1343, 1349, 1356, 1363, 1370, 1377, 1386, 1391, 1398, 1405, 1411, 1418, 1425, 1432, 1438, 1445, 1452, 1465, 1472, 1479, 1485, 1492, 1499, 1505, 1516, 1523, 1528, 1535, 1541, 1548, 1553, 1559, 1565, 1571, 1578, 1585, 1591, 1598, 1605, 1612, 1619, 1626, 1633, 1640, 1647, 1654, 1666, 1676, 1684, 1687, 1694, 1702, 1706, 1712, 1717, 1720, 1725, 1732, 1737, 1741, 1748, 1757, 1767, 1773, 1781, and 1790, and a CDR3 having an amino acid sequence at least 65%, at least 70%, at least 75%, at least 80%, at least 85%, at least 90%, at least 95%, at least 99%, or 100% identical to any one of SEQ ID NOs: 1101, 1108, 1115, 1125, 1132, 1139, 1146, 1153, 1160, 1167, 1172, 1179, 1186, 1193, 1197, 1205, 1209, 1217, 1226, 1233, 1240, 1245, 1252, 1259, 1269, 1276, 1283, 1290, 1297, 1304, 1311, 1317, 1324, 1331, 1337, 1344, 1350, 1357, 1364, 1371, 1378, 1387, 1392, 1399, 1406, 1412, 1419, 1426, 1433, 1439, 1446, 1453, 1459, 1466, 1473, 1480, 1486, 1493, 1500, 1506, 1517, 1524, 1529, 1536, 1542, 1549, 1554, 1560, 1566, 1572, 1579, 1586, 1592, 1599, 1606, 1613, 1620, 1627, 1634, 1641, 1648, 1655, 1661, 1667, 1670, 1677, 1685, 1688, 1695, 1703, 1707, 1713, 1733, 1749, 1758, 1762, 1774, 1782, 1791, and 1975; VH2 is a second immunoglobulin heavy chain variable region that specifically binds to a tumor-associated antigen (TAA), comprising a CDR1 having an amino acid sequence at least 65%, at least 70%, at least 75%, at least 80%, at least 85%, at least 90%, at least 95%, at least 99%, or 100% identical to any one of SEQ ID NOs: 1099, 1106, 1113, 1117, 1123, 1130, 1137, 1144, 1151, 1158, 1165, 1177, 1184, 1191, 1203, 1215, 1224, 1231, 1238, 1243, 1250, 1257, 1264, 1274, 1281, 1288, 1295, 1302, 1309, 1315, 1322, 1329, 1335, 1342, 1348, 1355, 1362, 1369, 1376, 1385, 1397, 1404, 1417, 1424, 1431, 1437, 1444, 1451, 1458, 1464, 1471, 1478, 1484, 1491, 1498, 1504, 1511, 1515, 1522, 1534, 1547, 1552, 1564, 1577, 1584, 1590, 1597, 1604, 1611, 1618, 1625, 1632, 1639, 1646, 1653, 1660, 1665, 1675, 1683, 1693, 1701, 1705, 1716, 1719, 1731, 1736, 1747, 1756, 1772, 1780, and 1789, a CDR2 having an amino acid sequence at least 65%, at least 70%, at least 75%, at least 80%, at least 85%, at least 90%, at least 95%, at least 99%, or 100% identical to any one of SEQ ID NOs: 1100, 1107, 1114, 1118, 1124, 1131, 1138, 1145, 1152, 1159, 1166, 1178, 1185, 1192, 1204, 1216, 1225, 1232, 1239, 1244, 1251, 1258, 1275, 1282, 1289, 1296, 1303, 1310, 1316, 1323, 1330, 1336, 1343, 1349, 1356, 1363, 1370, 1377, 1386, 1391, 1398, 1405, 1411, 1418, 1425, 1432, 1438, 1445, 1452, 1465, 1472, 1479, 1485, 1492, 1499, 1505, 1516, 1523, 1528, 1535, 1541, 1548, 1553, 1559, 1565, 1571, 1578, 1585, 1591, 1598, 1605, 1612, 1619, 1626, 1633, 1640, 1647, 1654, 1666, 1676, 1684, 1687, 1694, 1702, 1706, 1712, 1717, 1720, 1725, 1732, 1737, 1741, 1748, 1757, 1767, 1773, 1781, and 1790, and a CDR3 having an amino acid sequence at least 65%, at least 70%, at least 75%, at least 80%, at least 85%, at least 90%, at least 95%, at least 99%, or 100% identical to any one of SEQ ID NOs: 1101, 1108, 1115, 1125, 1132, 1139, 1146, 1153, 1160, 1167, 1172, 1179, 1186, 1193, 1197, 1205, 1209, 1217, 1226, 1233, 1240, 1245, 1252, 1259, 1269, 1276, 1283, 1290, 1297, 1304, 1311, 1317, 1324, 1331, 1337, 1344, 1350, 1357, 1364, 1371, 1378, 1387, 1392, 1399, 1406, 1412, 1419, 1426, 1433, 1439, 1446, 1453, 1459, 1466, 1473, 1480, 1486, 1493, 1500, 1506, 1517, 1524, 1529, 1536, 1542, 1549, 1554, 1560, 1566, 1572, 1579, 1586, 1592, 1599, 1606, 1613, 1620, 1627, 1634, 1641, 1648, 1655, 1661, 1667, 1670, 1677, 1685, 1688, 1695, 1703, 1707, 1713, 1733, 1749, 1758, 1762, 1774, 1782, 1791, and 1975; VH3 is a third immunoglobulin heavy chain variable region that specifically binds to a tumor-associated antigen (TAA), comprising a CDR1 having an amino acid sequence at least 65%, at least 70%, at least 75%, at least 80%, at least 85%, at least 90%, at least 95%, at least 99%, or 100% identical to any one of SEQ ID NOs: 1099, 1106, 1113, 1117, 1123, 1130, 1137, 1144, 1151, 1158, 1165, 1177, 1184, 1191, 1203, 1215, 1224, 1231, 1238, 1243, 1250, 1257, 1264, 1274, 1281, 1288, 1295, 1302, 1309, 1315, 1322, 1329, 1335, 1342, 1348, 1355, 1362, 1369, 1376, 1385, 1397, 1404, 1417, 1424, 1431, 1437, 1444, 1451, 1458, 1464, 1471, 1478, 1484, 1491, 1498, 1504, 1511, 1515, 1522, 1534, 1547, 1552, 1564, 1577, 1584, 1590, 1597, 1604, 1611, 1618, 1625, 1632, 1639, 1646, 1653, 1660, 1665, 1675, 1683, 1693, 1701, 1705, 1716, 1719, 1731, 1736, 1747, 1756, 1772, 1780, and 1789, a CDR2 having an amino acid sequence at least 65%, at least 70%, at least 75%, at least 80%, at least 85%, at least 90%, at least 95%, at least 99%, or 100% identical to any one of SEQ ID NOs: 1100, 1107, 1114, 1118, 1124, 1131, 1138, 1145, 1152, 1159, 1166, 1178, 1185, 1192, 1204, 1216, 1225, 1232, 1239, 1244, 1251, 1258, 1275, 1282, 1289, 1296, 1303, 1310, 1316, 1323, 1330, 1336, 1343, 1349, 1356, 1363, 1370, 1377, 1386, 1391, 1398, 1405, 1411, 1418, 1425, 1432, 1438, 1445, 1452, 1465, 1472, 1479, 1485, 1492, 1499, 1505, 1516, 1523, 1528, 1535, 1541, 1548, 1553, 1559, 1565, 1571, 1578, 1585, 1591, 1598, 1605, 1612, 1619, 1626, 1633, 1640, 1647, 1654, 1666, 1676, 1684, 1687, 1694, 1702, 1706, 1712, 1717, 1720, 1725, 1732, 1737, 1741, 1748, 1757, 1767, 1773, 1781, and 1790, and a CDR3 having an amino acid sequence at least 65%, at least 70%, at least 75%, at least 80%, at least 85%, at least 90%, at least 95%, at least 99%, or 100% identical to any one of SEQ ID NOs: 1101, 1108, 1115, 1125, 1132, 1139, 1146, 1153, 1160, 1167, 1172, 1179, 1186, 1193, 1197, 1205, 1209, 1217, 1226, 1233, 1240, 1245, 1252, 1259, 1269, 1276, 1283, 1290, 1297, 1304, 1311, 1317, 1324, 1331, 1337, 1344, 1350, 1357, 1364, 1371, 1378, 1387, 1392, 1399, 1406, 1412, 1419, 1426, 1433, 1439, 1446, 1453, 1459, 1466, 1473, 1480, 1486, 1493, 1500, 1506, 1517, 1524, 1529, 1536, 1542, 1549, 1554, 1560, 1566, 1572, 1579, 1586, 1592, 1599, 1606, 1613, 1620, 1627, 1634, 1641, 1648, 1655, 1661, 1667, 1670, 1677, 1685, 1688, 1695, 1703, 1707, 1713, 1733, 1749, 1758, 1762, 1774, 1782, 1791, and 1975; and VH4 is a fourth immunoglobulin heavy chain variable region that specifically binds to a tumor-associated antigen (TAA), comprising a CDR1 having an amino acid sequence at least 65%, at least 70%, at least 75%, at least 80%, at least 85%, at least 90%, at least 95%, at least 99%, or 100% identical to any one of SEQ ID NOs: 1099, 1106, 1113, 1117, 1123, 1130, 1137, 1144, 1151, 1158, 1165, 1177, 1184, 1191, 1203, 1215, 1224, 1231, 1238, 1243, 1250, 1257, 1264, 1274, 1281, 1288, 1295, 1302, 1309, 1315, 1322, 1329, 1335, 1342, 1348, 1355, 1362, 1369, 1376, 1385, 1397, 1404, 1417, 1424, 1431, 1437, 1444, 1451, 1458, 1464, 1471, 1478, 1484, 1491, 1498, 1504, 1511, 1515, 1522, 1534, 1547, 1552, 1564, 1577, 1584, 1590, 1597, 1604, 1611, 1618, 1625, 1632, 1639, 1646, 1653, 1660, 1665, 1675, 1683, 1693, 1701, 1705, 1716, 1719, 1731, 1736, 1747, 1756, 1772, 1780, and 1789, a CDR2 having an amino acid sequence at least 65%, at least 70%, at least 75%, at least 80%, at least 85%, at least 90%, at least 95%, at least 99%, or 100% identical to any one of SEQ ID NOs: 1100, 1107, 1114, 1118, 1124, 1131, 1138, 1145, 1152, 1159, 1166, 1178, 1185, 1192, 1204, 1216, 1225, 1232, 1239, 1244, 1251, 1258, 1275, 1282, 1289, 1296, 1303, 1310, 1316, 1323, 1330, 1336, 1343, 1349, 1356, 1363, 1370, 1377, 1386, 1391, 1398, 1405, 1411, 1418, 1425, 1432, 1438, 1445, 1452, 1465, 1472, 1479, 1485, 1492, 1499, 1505, 1516, 1523, 1528, 1535, 1541, 1548, 1553, 1559, 1565, 1571, 1578, 1585, 1591, 1598, 1605, 1612, 1619, 1626, 1633, 1640, 1647, 1654, 1666, 1676, 1684, 1687, 1694, 1702, 1706, 1712, 1717, 1720, 1725, 1732, 1737, 1741, 1748, 1757, 1767, 1773, 1781, and 1790, and a CDR3 having an amino acid sequence at least 65%, at least 70%, at least 75%, at least 80%, at least 85%, at least 90%, at least 95%, at least 99%, or 100% identical to any one of SEQ ID NOs: 1101, 1108, 1115, 1125, 1132, 1139, 1146, 1153, 1160, 1167, 1172, 1179, 1186, 1193, 1197, 1205, 1209, 1217, 1226, 1233, 1240, 1245, 1252, 1259, 1269, 1276, 1283, 1290, 1297, 1304, 1311, 1317, 1324, 1331, 1337, 1344, 1350, 1357, 1364, 1371, 1378, 1387, 1392, 1399, 1406, 1412, 1419, 1426, 1433, 1439, 1446, 1453, 1459, 1466, 1473, 1480, 1486, 1493, 1500, 1506, 1517, 1524, 1529, 1536, 1542, 1549, 1554, 1560, 1566, 1572, 1579, 1586, 1592, 1599, 1606, 1613, 1620, 1627, 1634, 1641, 1648, 1655, 1661, 1667, 1670, 1677, 1685, 1688, 1695, 1703, 1707, 1713, 1733, 1749, 1758, 1762, 1774, 1782, 1791, and 1975; (b) VL1 is a first immunoglobulin light chain variable region that specifically binds to an infectious disease antigen that is not a sarbecovirus antigen, comprising a CDR1 having an amino acid sequence at least 65%, at least 70%, at least 75%, at least 80%, at least 85%, at least 90%, at least 95%, at least 99%, or 100% identical to any one of SEQ ID NOs: 1428, 1793, 1798, 1810, 1817, 1824, 1977, 1985, 1993 and 2001, a CDR2 having an amino acid sequence at least 65%, at least 70%, at least 75%, at least 80%, at least 85%, at least 90%, at least 95%, at least 99%, or 100% identical to any one of amino acid sequences YTS, DTS, GAS, and AAS or an amino acid sequence at least 65%, at least 70%, at least 75%, at least 80%, at least 85%, at least 90%, at least 95%, at least 99%, or 100% identical to any one of SEQ ID NOs: 1978, 1986, 1994, and 2002, and a CDR3 having an amino acid sequence at least 65%, at least 70%, at least 75%, at least 80%, at least 85%, at least 90%, at least 95%, at least 99%, or 100% identical to any one of SEQ ID NOs: 1229, 1799, 1805, 1811, 1818, 1825, 1979, 1987, 1995, and 2003; VL2 is a second immunoglobulin light chain variable region that specifically binds to an infectious disease antigen that is not a sarbecovirus antigen, comprising a CDR1 having an amino acid sequence at least 65%, at least 70%, at least 75%, at least 80%, at least 85%, at least 90%, at least 95%, at least 99%, or 100% identical to any one of SEQ ID NOs: 1428, 1793, 1798, 1810, 1817, 1824, 1977, 1985, 1993 and 2001, a CDR2 having an amino acid sequence at least 65%, at least 70%, at least 75%, at least 80%, at least 85%, at least 90%, at least 95%, at least 99%, or 100% identical to any one of amino acid sequences YTS, DTS, GAS, and AAS or an amino acid sequence at least 65%, at least 70%, at least 75%, at least 80%, at least 85%, at least 90%, at least 95%, at least 99%, or 100% identical to any one of SEQ ID NOs: 1978, 1986, 1994, and 2002, and a CDR3 having an amino acid sequence at least 65%, at least 70%, at least 75%, at least 80%, at least 85%, at least 90%, at least 95%, at least 99%, or 100% identical to any one of SEQ ID NOs: 1229, 1799, 1805, 1811, 1818, 1825, 1979, 1987, 1995, and 2003; VL3 is a third immunoglobulin light chain variable region that specifically binds to an infectious disease antigen that is not a sarbecovirus antigen, comprising a CDR1 having an amino acid sequence at least 65%, at least 70%, at least 75%, at least 80%, at least 85%, at least 90%, at least 95%, at least 99%, or 100% identical to any one of SEQ ID NOs: 1428, 1793, 1798, 1810, 1817, 1824, 1977, 1985, 1993 and 2001, a CDR2 having an amino acid sequence at least 65%, at least 70%, at least 75%, at least 80%, at least 85%, at least 90%, at least 95%, at least 99%, or 100% identical to any one of amino acid sequences YTS, DTS, GAS, and AAS or an amino acid sequence at least 65%, at least 70%, at least 75%, at least 80%, at least 85%, at least 90%, at least 95%, at least 99%, or 100% identical to any one of SEQ ID NOs: 1978, 1986, 1994, and 2002, and a CDR3 having an amino acid sequence at least 65%, at least 70%, at least 75%, at least 80%, at least 85%, at least 90%, at least 95%, at least 99%, or 100% identical to any one of SEQ ID NOs: 1229, 1799, 1805, 1811, 1818, 1825, 1979, 1987, 1995, and 2003; VL4 is a fourth immunoglobulin light chain variable region that specifically binds to an infectious disease antigen that is not a sarbecovirus antigen, comprising a CDR1 having an amino acid sequence at least 65%, at least 70%, at least 75%, at least 80%, at least 85%, at least 90%, at least 95%, at least 99%, or 100% identical to any one of SEQ ID NOs: 1428, 1793, 1798, 1810, 1817, 1824, 1977, 1985, 1993 and 2001, a CDR2 having an amino acid sequence at least 65%, at least 70%, at least 75%, at least 80%, at least 85%, at least 90%, at least 95%, at least 99%, or 100% identical to any one of amino acid sequences YTS, DTS, GAS, and AAS or an amino acid sequence at least 65%, at least 70%, at least 75%, at least 80%, at least 85%, at least 90%, at least 95%, at least 99%, or 100% identical to any one of SEQ ID NOs: 1978, 1986, 1994, and 2002, and a CDR3 having an amino acid sequence at least 65%, at least 70%, at least 75%, at least 80%, at least 85%, at least 90%, at least 95%, at least 99%, or 100% identical to any one of SEQ ID NOs: 1229, 1799, 1805, 1811, 1818, 1825, 1979, 1987, 1995, and 2003; VH1 is a first immunoglobulin heavy chain variable region that specifically binds to an infectious disease antigen that is not a sarbecovirus antigen, comprising a CDR1 having an amino acid sequence at least 65%, at least 70%, at least 75%, at least 80%, at least 85%, at least 90%, at least 95%, at least 99%, or 100% identical to any one of SEQ ID NOs: 1577, 1795, 1801, 1813, 1820, 1827, 1981, 1989, 1997, and 2005, a CDR2 having an amino acid sequence at least 65%, at least 70%, at least 75%, at least 80%, at least 85%, at least 90%, at least 95%, at least 99%, or 100% identical to any one of SEQ ID NOs: 1159, 1802, 1807, 1814, 1821, 1828, 1982, 1990, 1998, and 2006, and a CDR3 having an amino acid sequence at least 65%, at least 70%, at least 75%, at least 80%, at least 85%, at least 90%, at least 95%, at least 99%, or 100% identical to any one of SEQ ID NOs: 1796, 1803, 1808, 1815, 1822, 1829, 1983, 1991, 1999, and 2007; VH2 is a second immunoglobulin heavy chain variable region that specifically binds to an infectious disease antigen that is not a sarbecovirus antigen, comprising a CDR1 having an amino acid sequence at least 65%, at least 70%, at least 75%, at least 80%, at least 85%, at least 90%, at least 95%, at least 99%, or 100% identical to any one of SEQ ID NOs: 1577, 1795, 1801, 1813, 1820, 1827, 1981, 1989, 1997, and 2005, a CDR2 having an amino acid sequence at least 65%, at least 70%, at least 75%, at least 80%, at least 85%, at least 90%, at least 95%, at least 99%, or 100% identical to any one of SEQ ID NOs: 1159, 1802, 1807, 1814, 1821, 1828, 1982, 1990, 1998, and 2006, and a CDR3 having an amino acid sequence at least 65%, at least 70%, at least 75%, at least 80%, at least 85%, at least 90%, at least 95%, at least 99%, or 100% identical to any one of SEQ ID NOs: 1796, 1803, 1808, 1815, 1822, 1829, 1983, 1991, 1999, and 2007; VH3 is a third immunoglobulin heavy chain variable region that specifically binds to an infectious disease antigen that is not a sarbecovirus antigen, comprising a CDR1 having an amino acid sequence at least 65%, at least 70%, at least 75%, at least 80%, at least 85%, at least 90%, at least 95%, at least 99%, or 100% identical to any one of SEQ ID NOs: 1577, 1795, 1801, 1813, 1820, 1827, 1981, 1989, 1997, and 2005, a CDR2 having an amino acid sequence at least 65%, at least 70%, at least 75%, at least 80%, at least 85%, at least 90%, at least 95%, at least 99%, or 100% identical to any one of SEQ ID NOs: 1159, 1802, 1807, 1814, 1821, 1828, 1982, 1990, 1998, and 2006, and a CDR3 having an amino acid sequence at least 65%, at least 70%, at least 75%, at least 80%, at least 85%, at least 90%, at least 95%, at least 99%, or 100% identical to any one of SEQ ID NOs: 1796, 1803, 1808, 1815, 1822, 1829, 1983, 1991, 1999, and 2007; and VH4 is a fourth immunoglobulin heavy chain variable region that specifically binds to an infectious disease antigen that is not a sarbecovirus antigen, comprising a CDR1 having an amino acid sequence at least 65%, at least 70%, at least 75%, at least 80%, at least 85%, at least 90%, at least 95%, at least 99%, or 100% identical to any one of SEQ ID NOs: 1577, 1795, 1801, 1813, 1820, 1827, 1981, 1989, 1997, and 2005, a CDR2 having an amino acid sequence at least 65%, at least 70%, at least 75%, at least 80%, at least 85%, at least 90%, at least 95%, at least 99%, or 100% identical to any one of SEQ ID NOs: 1159, 1802, 1807, 1814, 1821, 1828, 1982, 1990, 1998, and 2006, and a CDR3 having an amino acid sequence at least 65%, at least 70%, at least 75%, at least 80%, at least 85%, at least 90%, at least 95%, at least 99%, or 100% identical to any one of SEQ ID NOs: 1796, 1803, 1808, 1815, 1822, 1829, 1983, 1991, 1999, and 2007; or (c) VL1 is a first immunoglobulin light chain variable region that specifically binds to an other-pathology antigen, comprising a CDR1 having an amino acid sequence at least 65%, at least 70%, at least 75%, at least 80%, at least 85%, at least 90%, at least 95%, at least 99%, or 100% identical to any one of SEQ ID NOs: 1120, 1228, 1359, 1519, 1831, 1838, 1845, 1852, 1859, 1866, 1872, 1878, 1885, 1891, 1898, 1905, 1911, 1917, 1924, 1931, 1938, 1945, and 1963, a CDR2 having an amino acid sequence at least 65%, at least 70%, at least 75%, at least 80%, at least 85%, at least 90%, at least 95%, at least 99%, or 100% identical to any one of amino acid sequences AAS, AVS, DAS, DNN, EDN, EVS, GAS, GNG, KAS, KVS, LVS, NTD, STS, WAS, and YTS, and a CDR3 having an amino acid sequence at least 65%, at least 70%, at least 75%, at least 80%, at least 85%, at least 90%, at least 95%, at least 99%, or 100% identical to any one of SEQ ID NOs: 1360, 1832, 1839, 1846, 1853, 1860, 1867, 1873, 1879, 1886, 1892, 1899, 1906, 1912, 1918, 1925, 1932, 1939, 1946, 1951, 1957, 1964, and 1970; VL2 is a second immunoglobulin light chain variable region that specifically binds to an other-pathology antigen, comprising a CDR1 having an amino acid sequence at least 65%, at least 70%, at least 75%, at least 80%, at least 85%, at least 90%, at least 95%, at least 99%, or 100% identical to any one of SEQ ID NOs: 1120, 1228, 1359, 1519, 1831, 1838, 1845, 1852, 1859, 1866, 1872, 1878, 1885, 1891, 1898, 1905, 1911, 1917, 1924, 1931, 1938, 1945, and 1963, a CDR2 having an amino acid sequence at least 65%, at least 70%, at least 75%, at least 80%, at least 85%, at least 90%, at least 95%, at least 99%, or 100% identical to any one of amino acid sequences AAS, AVS, DAS, DNN, EDN, EVS, GAS, GNG, KAS, KVS, LVS, NTD, STS, WAS, and YTS, and a CDR3 having an amino acid sequence at least 65%, at least 70%, at least 75%, at least 80%, at least 85%, at least 90%, at least 95%, at least 99%, or 100% identical to any one of SEQ ID NOs: 1360, 1832, 1839, 1846, 1853, 1860, 1867, 1873, 1879, 1886, 1892, 1899, 1906, 1912, 1918, 1925, 1932, 1939, 1946, 1951, 1957, 1964, and 1970; VL3 is a third immunoglobulin light chain variable region that specifically binds to an other-pathology antigen, comprising a CDR1 having an amino acid sequence at least 65%, at least 70%, at least 75%, at least 80%, at least 85%, at least 90%, at least 95%, at least 99%, or 100% identical to any one of SEQ ID NOs: 1120, 1228, 1359, 1519, 1831, 1838, 1845, 1852, 1859, 1866, 1872, 1878, 1885, 1891, 1898, 1905, 1911, 1917, 1924, 1931, 1938, 1945, and 1963, a CDR2 having an amino acid sequence at least 65%, at least 70%, at least 75%, at least 80%, at least 85%, at least 90%, at least 95%, at least 99%, or 100% identical to any one of amino acid sequences AAS, AVS, DAS, DNN, EDN, EVS, GAS, GNG, KAS, KVS, LVS, NTD, STS, WAS, and YTS, and a CDR3 having an amino acid sequence at least 65%, at least 70%, at least 75%, at least 80%, at least 85%, at least 90%, at least 95%, at least 99%, or 100% identical to any one of SEQ ID NOs: 1360, 1832, 1839, 1846, 1853, 1860, 1867, 1873, 1879, 1886, 1892, 1899, 1906, 1912, 1918, 1925, 1932, 1939, 1946, 1951, 1957, 1964, and 1970; VL4 is a fourth immunoglobulin light chain variable region that specifically binds to an other-pathology antigen, comprising a CDR1 having an amino acid sequence at least 65%, at least 70%, at least 75%, at least 80%, at least 85%, at least 90%, at least 95%, at least 99%, or 100% identical to any one of SEQ ID NOs: 1120, 1228, 1359, 1519, 1831, 1838, 1845, 1852, 1859, 1866, 1872, 1878, 1885, 1891, 1898, 1905, 1911, 1917, 1924, 1931, 1938, 1945, and 1963, a CDR2 having an amino acid sequence at least 65%, at least 70%, at least 75%, at least 80%, at least 85%, at least 90%, at least 95%, at least 99%, or 100% identical to any one of amino acid sequences AAS, AVS, DAS, DNN, EDN, EVS, GAS, GNG, KAS, KVS, LVS, NTD, STS, WAS, and YTS, and a CDR3 having an amino acid sequence at least 65%, at least 70%, at least 75%, at least 80%, at least 85%, at least 90%, at least 95%, at least 99%, or 100% identical to any one of SEQ ID NOs: 1360, 1832, 1839, 1846, 1853, 1860, 1867, 1873, 1879, 1886, 1892, 1899, 1906, 1912, 1918, 1925, 1932, 1939, 1946, 1951, 1957, 1964, and 1970; VH1 is a first immunoglobulin heavy chain variable region that specifically binds to an other-pathology antigen, comprising a CDR1 having an amino acid sequence at least 65%, at least 70%, at least 75%, at least 80%, at least 85%, at least 90%, at least 95%, at least 99%, or 100% identical to any one of SEQ ID NOs: 1309, 1362, 1437, 1552, 1618, 1639, 1834, 1841, 1848, 1855, 1862, 1881, 1894, 1901, 1920, 1927, 1934, 1941, 1953, 1959, and 1966, a CDR2 having an amino acid sequence at least 65%, at least 70%, at least 75%, at least 80%, at least 85%, at least 90%, at least 95%, at least 99%, or 100% identical to any one of SEQ ID NOs: 1363, 1835, 1842, 1849, 1856, 1863, 1869, 1875, 1882, 1888, 1895, 1902, 1908, 1914, 1921, 1928, 1935, 1942, 1948, 1954, 1960, 1967, and 1972, and a CDR3 having an amino acid sequence at least 65%, at least 70%, at least 75%, at least 80%, at least 85%, at least 90%, at least 95%, at least 99%, or 100% identical to any one of SEQ ID NOs: 1364, 1836, 1843, 1850, 1857, 1864, 1870, 1876, 1883, 1889, 1896, 1903, 1909, 1915, 1922, 1929, 1936, 1943, 1949, 1955, 1961, 1968, and 1973; VH2 is a second immunoglobulin heavy chain variable region that specifically binds to an other-pathology antigen, comprising a CDR1 having an amino acid sequence at least 65%, at least 70%, at least 75%, at least 80%, at least 85%, at least 90%, at least 95%, at least 99%, or 100% identical to any one of SEQ ID NOs: 1309, 1362, 1437, 1552, 1618, 1639, 1834, 1841, 1848, 1855, 1862, 1881, 1894, 1901, 1920, 1927, 1934, 1941, 1953, 1959, and 1966, a CDR2 having an amino acid sequence at least 65%, at least 70%, at least 75%, at least 80%, at least 85%, at least 90%, at least 95%, at least 99%, or 100% identical to any one of SEQ ID NOs: 1363, 1835, 1842, 1849, 1856, 1863, 1869, 1875, 1882, 1888, 1895, 1902, 1908, 1914, 1921, 1928, 1935, 1942, 1948, 1954, 1960, 1967, and 1972, and a CDR3 having an amino acid sequence at least 65%, at least 70%, at least 75%, at least 80%, at least 85%, at least 90%, at least 95%, at least 99%, or 100% identical to any one of SEQ ID NOs: 1364, 1836, 1843, 1850, 1857, 1864, 1870, 1876, 1883, 1889, 1896, 1903, 1909, 1915, 1922, 1929, 1936, 1943, 1949, 1955, 1961, 1968, and 1973; VH3 is a third immunoglobulin heavy chain variable region that specifically binds to an other-pathology antigen, comprising a CDR1 having an amino acid sequence at least 65%, at least 70%, at least 75%, at least 80%, at least 85%, at least 90%, at least 95%, at least 99%, or 100% identical to any one of SEQ ID NOs: 1309, 1362, 1437, 1552, 1618, 1639, 1834, 1841, 1848, 1855, 1862, 1881, 1894, 1901, 1920, 1927, 1934, 1941, 1953, 1959, and 1966, a CDR2 having an amino acid sequence at least 65%, at least 70%, at least 75%, at least 80%, at least 85%, at least 90%, at least 95%, at least 99%, or 100% identical to any one of SEQ ID NOs: 1363, 1835, 1842, 1849, 1856, 1863, 1869, 1875, 1882, 1888, 1895, 1902, 1908, 1914, 1921, 1928, 1935, 1942, 1948, 1954, 1960, 1967, and 1972, and a CDR3 having an amino acid sequence at least 65%, at least 70%, at least 75%, at least 80%, at least 85%, at least 90%, at least 95%, at least 99%, or 100% identical to any one of SEQ ID NOs: 1364, 1836, 1843, 1850, 1857, 1864, 1870, 1876, 1883, 1889, 1896, 1903, 1909, 1915, 1922, 1929, 1936, 1943, 1949, 1955, 1961, 1968, and 1973; and VH4 is a fourth immunoglobulin heavy chain variable region that specifically binds to an other-pathology antigen, comprising a CDR1 having an amino acid sequence at least 65%, at least 70%, at least 75%, at least 80%, at least 85%, at least 90%, at least 95%, at least 99%, or 100% identical to any one of SEQ ID NOs: 1309, 1362, 1437, 1552, 1618, 1639, 1834, 1841, 1848, 1855, 1862, 1881, 1894, 1901, 1920, 1927, 1934, 1941, 1953, 1959, and 1966, a CDR2 having an amino acid sequence at least 65%, at least 70%, at least 75%, at least 80%, at least 85%, at least 90%, at least 95%, at least 99%, or 100% identical to any one of SEQ ID NOs: 1363, 1835, 1842, 1849, 1856, 1863, 1869, 1875, 1882, 1888, 1895, 1902, 1908, 1914, 1921, 1928, 1935, 1942, 1948, 1954, 1960, 1967, and 1972, and a CDR3 having an amino acid sequence at least 65%, at least 70%, at least 75%, at least 80%, at least 85%, at least 90%, at least 95%, at least 99%, or 100% identical to any one of SEQ ID NOs: 1364, 1836, 1843, 1850, 1857, 1864, 1870, 1876, 1883, 1889, 1896, 1903, 1909, 1915, 1922, 1929, 1936, 1943, 1949, 1955, 1961, 1968, and 1973; and wherein: CL is an immunoglobulin light chain constant region; CH1 is an immunoglobulin heavy chain constant region 1; and L1-L10 are optional amino acid linkers.

[0584] In some aspects, and in any one of the formulas depicted herein, (a) VL1 comprises an amino acid sequence that is at least 65%, at least 70%, at least 75%, at least 80%, at least 85%, at least 90%, at least 95%, at least 99%, or 100% identical to SEQ ID NO: 1098, 1105, 1112, 1122, 1129, 1136, 1143, 1150, 1157, 1164, 1171, 1176, 1183, 1190, 1196, 1202, 1208, 1214, 1219, 1223, 1230, 1237, 1242, 1249, 1256, 1263, 1268, 1273, 1280, 1287, 1294, 1301, 1308, 1314, 1321, 1328, 1334, 1341, 1347, 1354, 1361, 1368, 1375, 1380, 1384, 1390, 1396, 1403, 1410, 1416, 1423, 1430, 1436, 1443, 1450, 1457, 1463, 1470, 1477, 1483, 1490, 1497, 1503, 1510, 1514, 1521, 1527, 1533, 1540, 1546, 1551, 1558, 1563, 1570, 1576, 1583, 1589, 1596, 1603, 1610, 1617, 1624, 1631, 1638, 1645, 1652, 1659, 1664, 1669, 1674, 1682, 1692, 1700, 1711, 1721, 1724, 1730, 1740, 1746, 1755, 1764, 1766, 1771, 1779, 1784, and 1788; VL2 comprises an amino acid sequence that is at least 65%, at least 70%, at least 75%, at least 80%, at least 85%, at least 90%, at least 95%, at least 99%, or 100% identical to SEQ ID NO: 1098, 1105, 1112, 1122, 1129, 1136, 1143, 1150, 1157, 1164, 1171, 1176, 1183, 1190, 1196, 1202, 1208, 1214, 1219, 1223, 1230, 1237, 1242, 1249, 1256, 1263, 1268, 1273, 1280, 1287, 1294, 1301, 1308, 1314, 1321, 1328, 1334, 1341, 1347, 1354, 1361, 1368, 1375, 1380, 1384, 1390, 1396, 1403, 1410, 1416, 1423, 1430, 1436, 1443, 1450, 1457, 1463, 1470, 1477, 1483, 1490, 1497, 1503, 1510, 1514, 1521, 1527, 1533, 1540, 1546, 1551, 1558, 1563, 1570, 1576, 1583, 1589, 1596, 1603, 1610, 1617, 1624, 1631, 1638, 1645, 1652, 1659, 1664, 1669, 1674, 1682, 1692, 1700, 1711, 1721, 1724, 1730, 1740, 1746, 1755, 1764, 1766, 1771, 1779, 1784, and 1788; VL3 comprises an amino acid sequence that is at least 65%, at least 70%, at least 75%, at least 80%, at least 85%, at least 90%, at least 95%, at least 99%, or 100% identical to SEQ ID NO: 1098, 1105, 1112, 1122, 1129, 1136, 1143, 1150, 1157, 1164, 1171, 1176, 1183, 1190, 1196, 1202, 1208, 1214, 1219, 1223, 1230, 1237, 1242, 1249, 1256, 1263, 1268, 1273, 1280, 1287, 1294, 1301, 1308, 1314, 1321, 1328, 1334, 1341, 1347, 1354, 1361, 1368, 1375, 1380, 1384, 1390, 1396, 1403, 1410, 1416, 1423, 1430, 1436, 1443, 1450, 1457, 1463, 1470, 1477, 1483, 1490, 1497, 1503, 1510, 1514, 1521, 1527, 1533, 1540, 1546, 1551, 1558, 1563, 1570, 1576, 1583, 1589, 1596, 1603, 1610, 1617, 1624, 1631, 1638, 1645, 1652, 1659, 1664, 1669, 1674, 1682, 1692, 1700, 1711, 1721, 1724, 1730, 1740, 1746, 1755, 1764, 1766, 1771, 1779, 1784, and 1788; VL4 comprises an amino acid sequence that is at least 65%, at least 70%, at least 75%, at least 80%, at least 85%, at least 90%, at least 95%, at least 99%, or 100% identical to SEQ ID NO: 1098, 1105, 1112, 1122, 1129, 1136, 1143, 1150, 1157, 1164, 1171, 1176, 1183, 1190, 1196, 1202, 1208, 1214, 1219, 1223, 1230, 1237, 1242, 1249, 1256, 1263, 1268, 1273, 1280, 1287, 1294, 1301, 1308, 1314, 1321, 1328, 1334, 1341, 1347, 1354, 1361, 1368, 1375, 1380, 1384, 1390, 1396, 1403, 1410, 1416, 1423, 1430, 1436, 1443, 1450, 1457, 1463, 1470, 1477, 1483, 1490, 1497, 1503, 1510, 1514, 1521, 1527, 1533, 1540, 1546, 1551, 1558, 1563, 1570, 1576, 1583, 1589, 1596, 1603, 1610, 1617, 1624, 1631, 1638, 1645, 1652, 1659, 1664, 1669, 1674, 1682, 1692, 1700, 1711, 1721, 1724, 1730, 1740, 1746, 1755, 1764, 1766, 1771, 1779, 1784, and 1788; VH1 comprises an amino acid sequence that is at least 65%, at least 70%, at least 75%, at least 80%, at least 85%, at least 90%, at least 95%, at least 99%, or 100% identical to SEQ ID NO: 1102, 1109, 1116, 1119, 1126, 1133, 1140, 1147, 1154, 1161, 1168, 1173, 1180, 1187, 1194, 1198, 1206, 1210, 1218, 1220, 1227, 1234, 1241, 1246, 1253, 1260, 1265, 1270, 1277, 1284, 1291, 1298, 1305, 1312, 1318, 1325, 1332, 1338, 1345, 1351, 1358, 1365, 1372, 1379, 1381, 1388, 1393, 1400, 1407, 1413, 1420, 1427, 1434, 1440, 1447, 1454, 1460, 1467, 1474, 1481, 1487, 1494, 1501, 1507, 1512, 1518, 1525, 1530, 1537, 1543, 1550, 1555, 1561, 1567, 1573, 1580, 1587, 1593, 1600, 1607, 1614, 1621, 1628, 1635, 1642, 1649, 1656, 1662, 1668, 1671, 1678, 1686, 1696, 1704, 1714, 1722, 1726, 1734, 1742, 1750, 1759, 1760, 1765, 1768, 1775, 1783, 1785, and 1792; VH2 comprises an amino acid sequence that is at least 65%, at least 70%, at least 75%, at least 80%, at least 85%, at least 90%, at least 95%, at least 99%, or 100% identical to SEQ ID NO: 1102, 1109, 1116, 1119, 1126, 1133, 1140, 1147, 1154, 1161, 1168, 1173, 1180, 1187, 1194, 1198, 1206, 1210, 1218, 1220, 1227, 1234, 1241, 1246, 1253, 1260, 1265, 1270, 1277, 1284, 1291, 1298, 1305, 1312, 1318, 1325, 1332, 1338, 1345, 1351, 1358, 1365, 1372, 1379, 1381, 1388, 1393, 1400, 1407, 1413, 1420, 1427, 1434, 1440, 1447, 1454, 1460, 1467, 1474, 1481, 1487, 1494, 1501, 1507, 1512, 1518, 1525, 1530, 1537, 1543, 1550, 1555, 1561, 1567, 1573, 1580, 1587, 1593, 1600, 1607, 1614, 1621, 1628, 1635, 1642, 1649, 1656, 1662, 1668, 1671, 1678, 1686, 1696, 1704, 1714, 1722, 1726, 1734, 1742, 1750, 1759, 1760, 1765, 1768, 1775, 1783, 1785, and 1792; VH3 comprises an amino acid sequence that is at least 65%, at least 70%, at least 75%, at least 80%, at least 85%, at least 90%, at least 95%, at least 99%, or 100% identical to SEQ ID NO: 1102, 1109, 1116, 1119, 1126, 1133, 1140, 1147, 1154, 1161, 1168, 1173, 1180, 1187, 1194, 1198, 1206, 1210, 1218, 1220, 1227, 1234, 1241, 1246, 1253, 1260, 1265, 1270, 1277, 1284, 1291, 1298, 1305, 1312, 1318, 1325, 1332, 1338, 1345, 1351, 1358, 1365, 1372, 1379, 1381, 1388, 1393, 1400, 1407, 1413, 1420, 1427, 1434, 1440, 1447, 1454, 1460, 1467, 1474, 1481, 1487, 1494, 1501, 1507, 1512, 1518, 1525, 1530, 1537, 1543, 1550, 1555, 1561, 1567, 1573, 1580, 1587, 1593, 1600, 1607, 1614, 1621, 1628, 1635, 1642, 1649, 1656, 1662, 1668, 1671, 1678, 1686, 1696, 1704, 1714, 1722, 1726, 1734, 1742, 1750, 1759, 1760, 1765, 1768, 1775, 1783, 1785, and 1792; and VH4 comprises an amino acid sequence that is at least 65%, at least 70%, at least 75%, at least 80%, at least 85%, at least 90%, at least 95%, at least 99%, or 100% identical to SEQ ID NO: 1102, 1109, 1116, 1119, 1126, 1133, 1140, 1147, 1154, 1161, 1168, 1173, 1180, 1187, 1194, 1198, 1206, 1210, 1218, 1220, 1227, 1234, 1241, 1246, 1253, 1260, 1265, 1270, 1277, 1284, 1291, 1298, 1305, 1312, 1318, 1325, 1332, 1338, 1345, 1351, 1358, 1365, 1372, 1379, 1381, 1388, 1393, 1400, 1407, 1413, 1420, 1427, 1434, 1440, 1447, 1454, 1460, 1467, 1474, 1481, 1487, 1494, 1501, 1507, 1512, 1518, 1525, 1530, 1537, 1543, 1550, 1555, 1561, 1567, 1573, 1580, 1587, 1593, 1600, 1607, 1614, 1621, 1628, 1635, 1642, 1649, 1656, 1662, 1668, 1671, 1678, 1686, 1696, 1704, 1714, 1722, 1726, 1734, 1742, 1750, 1759, 1760, 1765, 1768, 1775, 1783, 1785, and 1792; (b) VL1 comprises an amino acid sequence that is at least 65%, at least 70%, at least 75%, at least 80%, at least 85%, at least 90%, at least 95%, at least 99%, or 100% identical to SEQ ID NO: 1794, 1800, 1806, 1812, 1819, 1826, 1980, 1988, 1996, and 2004; VL2 comprises an amino acid sequence that is at least 65%, at least 70%, at least 75%, at least 80%, at least 85%, at least 90%, at least 95%, at least 99%, or 100% identical to SEQ ID NO: 1794, 1800, 1806, 1812, 1819, 1826, 1980, 1988, 1996, and 2004; VL3 comprises an amino acid sequence that is at least 65%, at least 70%, at least 75%, at least 80%, at least 85%, at least 90%, at least 95%, at least 99%, or 100% identical to SEQ ID NO: 1794, 1800, 1806, 1812, 1819, 1826, 1980, 1988, 1996, and 2004; VL4 comprises an amino acid sequence that is at least 65%, at least 70%, at least 75%, at least 80%, at least 85%, at least 90%, at least 95%, at least 99%, or 100% identical to SEQ ID NO: 1794, 1800, 1806, 1812, 1819, 1826, 1980, 1988, 1996, and 2004; VH1 comprises an amino acid sequence that is at least 65%, at least 70%, at least 75%, at least 80%, at least 85%, at least 90%, at least 95%, at least 99%, or 100% identical to SEQ ID NO: 1797, 1804, 1809, 1816, 1823, 1830, 1984, 1992, 2000, and 2008; VH2 comprises an amino acid sequence that is at least 65%, at least 70%, at least 75%, at least 80%, at least 85%, at least 90%, at least 95%, at least 99%, or 100% identical to SEQ ID NO: 1797, 1804, 1809, 1816, 1823, 1830, 1984, 1992, 2000, and 2008; VH3 comprises an amino acid sequence that is at least 65%, at least 70%, at least 75%, at least 80%, at least 85%, at least 90%, at least 95%, at least 99%, or 100% identical to SEQ ID NO: 1797, 1804, 1809, 1816, 1823, 1830, 1984, 1992, 2000, and 2008; and VH4 comprises an amino acid sequence that is at least 65%, at least 70%, at least 75%, at least 80%, at least 85%, at least 90%, at least 95%, at least 99%, or 100% identical to SEQ ID NO: 1797, 1804, 1809, 1816, 1823, 1830, 1984, 1992, 2000, and 2008; or (c) VL1 comprises an amino acid sequence that is at least 65%, at least 70%, at least 75%, at least 80%, at least 85%, at least 90%, at least 95%, at least 99%, or 100% identical to SEQ ID NO: 1361, 1833, 1840, 1847, 1854, 1861, 1868, 1874, 1880, 1887, 1893, 1900, 1907, 1913, 1919, 1926, 1933, 1940, 1947, 1952, 1958, 1965, and 1971; VL2 comprises an amino acid sequence that is at least 65%, at least 70%, at least 75%, at least 80%, at least 85%, at least 90%, at least 95%, at least 99%, or 100% identical to SEQ ID NO: 1361, 1833, 1840, 1847, 1854, 1861, 1868, 1874, 1880, 1887, 1893, 1900, 1907, 1913, 1919, 1926, 1933, 1940, 1947, 1952, 1958, 1965, and 1971; VL3 comprises an amino acid sequence that is at least 65%, at least 70%, at least 75%, at least 80%, at least 85%, at least 90%, at least 95%, at least 99%, or 100% identical to SEQ ID NO: 1361, 1833, 1840, 1847, 1854, 1861, 1868, 1874, 1880, 1887, 1893, 1900, 1907, 1913, 1919, 1926, 1933, 1940, 1947, 1952, 1958, 1965, and 1971; VL4 comprises an amino acid sequence that is at least 65%, at least 70%, at least 75%, at least 80%, at least 85%, at least 90%, at least 95%, at least 99%, or 100% identical to SEQ ID NO: 1361, 1833, 1840, 1847, 1854, 1861, 1868, 1874, 1880, 1887, 1893, 1900, 1907, 1913, 1919, 1926, 1933, 1940, 1947, 1952, 1958, 1965, and 1971; VH1 comprises an amino acid sequence that is at least 65%, at least 70%, at least 75%, at least 80%, at least 85%, at least 90%, at least 95%, at least 99%, or 100% identical to SEQ ID NO: 1365, 1837, 1844, 1851, 1858, 1865, 1871, 1877, 1884, 1890, 1897, 1904, 1910, 1916, 1923, 1930, 1937, 1944, 1950, 1956, 1962, 1969, and 1974; VH2 comprises an amino acid sequence that is at least 65%, at least 70%, at least 75%, at least 80%, at least 85%, at least 90%, at least 95%, at least 99%, or 100% identical to SEQ ID NO: 1365, 1837, 1844, 1851, 1858, 1865, 1871, 1877, 1884, 1890, 1897, 1904, 1910, 1916, 1923, 1930, 1937, 1944, 1950, 1956, 1962, 1969, and 1974; VH3 comprises an amino acid sequence that is at least 65%, at least 70%, at least 75%, at least 80%, at least 85%, at least 90%, at least 95%, at least 99%, or 100% identical to SEQ ID NO: 1365, 1837, 1844, 1851, 1858, 1865, 1871, 1877, 1884, 1890, 1897, 1904, 1910, 1916, 1923, 1930, 1937, 1944, 1950, 1956, 1962, 1969, and 1974; and VH4 comprises an amino acid sequence that is at least 65%, at least 70%, at least 75%, at least 80%, at least 85%, at least 90%, at least 95%, at least 99%, or 100% identical to SEQ ID NO: 1365, 1837, 1844, 1851, 1858, 1865, 1871, 1877, 1884, 1890, 1897, 1904, 1910, 1916, 1923, 1930, 1937, 1944, 1950, 1956, 1962, 1969, and 1974.

[0585] In some aspects, and in any one of the formulas depicted herein, the one or more CL comprise an amino acid sequence that is at least 65%, at least 70%, at least 75%, at least 80%, at least 85%, at least 90%, at least 95%, at least 99%, or 100% identical to any one of SEQ ID NOs: 374, 637, or 1092-1095. In some aspects, and in any one of the formulas depicted herein, the one or more CH1 comprise an amino acid sequence that is at least 65%, at least 70%, at least 75%, at least 80%, at least 85%, at least 90%, at least 95%, at least 99%, or 100% identical to any one of SEQ ID NOs: 375, 634, 1070, 1071, or 1086-1091.

[0586] In some aspects, the antigen binding polypeptide complex further comprises one or more immunoglobulin heavy chain constant region 2 (CH2), and wherein the CH2 comprises an amino acid sequence that is at least 65%, at least 70%, at least 75%, at least 80%, at least 85%, at least 90%, at least 95%, at least 99%, or 100% identical to any one of SEQ ID NOs: 1075-1078.

[0587] In some aspects, the antigen binding polypeptide complex further comprises one or more immunoglobulin heavy chain constant region 3 (CH3), and wherein the CH3 comprises an amino acid sequence that is at least 65%, at least 70%, at least 75%, at least 80%, at least 85%, at least 90%, at least 95%, at least 99%, or 100% identical to any one of SEQ ID NOs: 1079-1085.

[0588] In some aspects, the first polypeptide and the second polypeptide each further comprise an Fc region at the carboxy-terminus. In some aspects, the Fc region of the first polypeptide and the second polypeptide each comprise an immunoglobulin heavy chain constant region 2 (CH2) and/or an immunoglobulin heavy chain constant region 3 (CH3). In some aspects, the CH2 comprises an amino acid sequence that is at least 65%, at least 70%, at least 75%, at least 80%, at least 85%, at least 90%, at least 95%, at least 99%, or 100% identical to any one of SEQ ID NOs: 1075-1078. In some aspects, the CH3 comprises an amino acid sequence that is at least 65%, at least 70%, at least 75%, at least 80%, at least 85%, at least 90%, at least 95%, at least 99%, or 100% identical to any one of SEQ ID NOs: 1079-1085.

[0589] In some aspects, the Fc region of the first polypeptide and the second polypeptide each further comprise an immunoglobulin hinge. In some aspects, the immunoglobulin hinge comprises an amino acid sequence at least 65%, at least 70%, at least 75%, at least 80%, at least 85%, at least 90%, at least 95%, at least 99%, or 100% identical to any one of SEQ ID NOs: 635, 636, 1072, 1073, or 1074.

[0590] In some aspects, the Fc region of the first polypeptide and the second polypeptide comprise one or more half-life extension amino acid substitutions, one or more knob-into-hole modification, one or more Fc effector function knockout mutation, or any combination thereof. In some aspects, the Fc region is an IgG Fc region. In some aspects, the Fc region is an IgG1 or an IgG4 Fc region. In some aspects, the one or more half-life extension amino acid substitutions comprise one or more of amino acid substitutions M428L, N434A, N434S, L234F, L235E, P331S, M252Y, S254T, or T256E, or equivalent thereof, based on the EU numbering scheme. In some aspects, the one or more half-life extension amino acid substitutions comprise amino acid substitutions: (i) L234A and L235A (LA); (ii) M428L and N434S (LS); (iii) L234F and L235E; (iv) L234F, L235E, and P331S (TM); and/or (v) M252Y, S254T, and T256E (YTE); or equivalent thereof, based on the EU numbering scheme. In some aspects, the one or more the knob-into-hole modification comprises: (i) knob substitutions of S354C and T366W; (ii) hole substitutions of Y349C, T366S, L368A and Y407V; or (iii) a combination thereof; or equivalent thereof, based on the EU numbering scheme. In some aspects, the one or more Fc effector function knockout mutation is L234A, L235A, P239A, or equivalent thereof, or a combination thereof, based on the EU numbering scheme. In some aspects, the Fc region comprises an amino acid sequence that is at least 65%, at least 70%, at least 75%, at least 80%, at least 85%, at least 90%, at least 95%, at least 99%, or 100% identical to any one of SEQ ID NOs: 376-380.

[0591] In some aspects, and in any one of the formulas shown herein, any one of the optional amino acid linkers each independently have a length of from 0 amino acids to about 50 amino acids. In some aspects, and in any one of the formulas shown herein, any one of the optional linkers each independently have a length of from about 5 amino acids to about 40 amino acids. In some aspects, and in any one of the formulas shown herein, one or more of the optional linkers each independently are non-immunogenic. In some aspects, and in any one of the formulas shown herein, one or more of the optional linkers each independently do not contain a consensus T cell epitope. In some aspects, and in any one of the formulas shown herein, one or more of the optional linkers each independently comprises an amino acid sequence of G or A; or an amino acid sequence at least 65%, at least 70%, at least 75%, at least 80%, at least 85%, at least 90%, at least 95%, at least 99%, or 100% identical to an amino acid sequence of GSS or ASG; or an amino acid sequence at least 65%, at least 70%, at least 75%, at least 80%, at least 85%, at least 90%, at least 95%, at least 99%, or 100% identical to any one of SEQ ID NOs: 333-373 or 967-971. In some aspects, and in any one of the formulas shown herein, one or more of the optional linkers each independently comprises an amino acid sequence at least 65%, at least 70%, at least 75%, at least 80%, at least 85%, at least 90%, at least 95%, at least 99%, or 100% identical to any one of SEQ ID NOs: 333-345 or 967-971.

[0592] In some aspects, and in any one of the formulas shown herein, one or more of the VH has a mutation at an N-glycosylation site. In some aspects, and in any one of the formulas shown herein, the mutation is at amino acid N62 of the VH region or equivalent thereof. In some aspects, and in any one of the formulas shown herein, the N62 mutation is N62Q or N62S, or equivalent thereof.

[0593] In some aspects, the antigen binding polypeptide complex disclosed herein has an isoelectric point (pI) of from about 7 to about 9.

[0594] In some aspects, the antigen binding polypeptide or antigen binding polypeptide complex disclosed herein comprises a detectable label. In some aspects, the detectable label is a radioactive label, chemiluminescent label, fluorescent label, enzyme, peptide tag, or a combination thereof. In some aspects, the peptide tag is a poly histidine tag consisting of from about four to about 10 histidine residues. In some aspects, the poly histidine tag consists of about eight histidine residues.

[0595] In some aspects, the antigen binding polypeptide or antigen binding polypeptide complex disclosed herein is conjugated to an agent as an antibody-drug conjugate (ADC). In some aspects, the agent is a cytotoxic agent, immunomodulating agent, imaging agent, or therapeutic protein, or a combination thereof.

[0596] In some aspects, the antigen binding polypeptide or antigen binding polypeptide complex disclosed herein specifically binds to the (i) tumor-associated antigen (TAA), (ii) infectious disease antigen that is not a sarbecovirus antigen, or (iii) other-pathology antigen with an equilibrium dissociation constant (K_{D}) of from about 10 μM to about 1 pM.

[0597] In some aspects, the antigen binding polypeptide complex disclosed herein is bispecific, trispecific or tetraspecific and has greater binding affinity to the (i) tumor-associated antigen (TAA), (ii) infectious disease antigen that is not a sarbecovirus antigen, or (iii) other-pathology antigen than a monospecific antigen binding polypeptide complex that specifically binds to one of the same antigens as the bispecific, trispecific or tetraspecific antigen binding polypeptide complex.

[0598] In some aspects, the antigen binding polypeptide complex disclosed herein is bispecific, trispecific or tetraspecific and has greater binding affinity to the (i) tumor-associated antigen (TAA), (ii) infectious disease antigen that is not a sarbecovirus antigen, or (iii) other-pathology antigen than a mixture of monospecific antigen binding polypeptide complexes that specifically bind to the same antigens as the bispecific, trispecific or tetraspecific antigen binding polypeptide complex.

[0599] Also provided herein is an antibody or antigen binding fragment thereof comprising an antigen binding polypeptide or antigen binding polypeptide complex disclosed herein.

[0600] In some aspects, the antibody or antigen binding fragment thereof is IgG, IgM, IgE, IgA or IgD. In some aspects, the IgG is IgG1, IgG2, IgG3, or IgG4.

[0601] In some aspects, the antigen binding fragment is a Fab, scFab, Fab′, F(ab′)₂. Fv or scFv.

[0602] In some aspects, the antibody or antigen binding fragment thereof is human or humanized.

[0603] Also provided herein is a polynucleotide encoding the antigen binding polypeptide or antigen binding polypeptide complex, or the antibody or antigen binding fragment thereof disclosed herein.

[0604] Also provided herein is a vector comprising the polynucleotide disclosed herein.

[0605] Also provided herein is a host cell comprising the vector disclosed herein.

[0606] Also provided herein is an mRNA encoding the antigen binding polypeptide or antigen binding polypeptide complex, or the antibody or antigen binding fragment thereof disclosed herein. In some aspects, the mRNA comprises a 5′-cap and/or a poly (A) tail.

[0607] Also provided herein is a lipid nanoparticle (LNP) comprising the mRNA disclosed herein.

[0608] Also provided herein is a chimeric antigen receptor (CAR) comprising the antigen binding polypeptide or antigen binding polypeptide complex disclosed herein.

[0609] Also provided herein is an immune cell comprising the CAR disclosed herein.

[0610] Also provided herein is a pharmaceutical composition comprising the antigen binding polypeptide or antigen binding polypeptide complex, the antibody or antigen binding fragment thereof, the polynucleotide, the vector, the host cell, the mRNA, the LNP, the CAR, or the immune cell disclosed herein.

[0611] Also provided herein is a pharmaceutical composition comprising (i) the antigen binding polypeptide or antigen binding polypeptide complex, the antibody or antigen binding fragment thereof, the polynucleotide, the vector, the host cell, the mRNA, the LNP, the CAR, or the immune cell disclosed herein, and (ii) a pharmaceutically acceptable carrier.

[0612] Also provided herein is a pharmaceutical composition comprising (i) the antigen binding polypeptide or antigen binding polypeptide complex, the antibody or antigen binding fragment thereof, the polynucleotide, the vector, the host cell, the mRNA, the LNP, the CAR, or the immune cell disclosed herein, and (ii) an additional pharmaceutical agent.

[0613] Also provided herein is a kit comprising (i) the antigen binding polypeptide or antigen binding polypeptide complex, the antibody or antigen binding fragment thereof, the polynucleotide, the vector, the host cell, the mRNA, the LNP, the CAR, the immune cell, or the pharmaceutical composition disclosed herein, and (ii) instructions for use.

[0614] Also provided herein is a method of preventing or treating (i) a cancer or a tumor, (ii) an infectious disease that is not a sarbecovirus infectious disease, or (iii) a pathology other than a cancer or a tumor or an infectious disease that is not a sarbecovirus infectious disease, comprising administering to the subject a therapeutically effective amount of the antigen binding polypeptide or antigen binding polypeptide complex, the antibody or antigen binding fragment thereof, the polynucleotide, the vector, the host cell, the mRNA, the LNP, the CAR, the immune cell, or the pharmaceutical composition disclosed herein.

[0615] Also provided herein is a method of diagnosing a subject as having or as being suspected of having (i) a cancer or a tumor, (ii) an infectious disease that is not a sarbecovirus infectious disease, or (iii) a pathology other than a cancer or a tumor or an infectious disease that is not a sarbecovirus infectious disease, comprising (a) contacting a sample obtained from the subject with the antigen binding polypeptide or antigen binding polypeptide complex or the antibody or antigen binding fragment thereof disclosed herein; (b) detecting the presence or absence of a complex which contains the polypeptide or a fragment thereof, polypeptide complex or a fragment thereof, or antibody or a fragment thereof and (i) a tumor-associated antigen (TAA) or fragment thereof, (ii) an infectious disease antigen that is not a sarbecovirus antigen or fragment thereof, or (iii) an other-pathology antigen or fragment thereof; and (c) diagnosing the subject as having or as being suspected of having (i) a cancer or a tumor, (ii) an infectious disease that is not a sarbecovirus infectious disease, or (iii) a pathology other than a cancer or a tumor or an infectious disease that is not a sarbecovirus infectious disease when the presence of the complex is detected.

[0616] Also provided herein is a method of diagnosing a subject as not having or as not being suspected of having (i) a cancer or a tumor, (ii) an infectious disease that is not a sarbecovirus infectious disease, or (iii) a pathology other than a cancer or a tumor or an infectious disease that is not a sarbecovirus infectious disease, comprising (a) contacting a sample obtained from the subject with the antigen binding polypeptide or antigen binding polypeptide complex or the antibody or antigen binding fragment thereof disclosed herein; (b) detecting the presence or absence of a complex which contains the polypeptide or a fragment thereof, polypeptide complex or a fragment thereof, or antibody or a fragment thereof and (i) a tumor-associated antigen (TAA) or fragment thereof, (ii) an infectious disease antigen that is not a sarbecovirus antigen or fragment thereof, or (iii) an other-pathology antigen or fragment thereof; and (c) diagnosing the subject as not having or as not being suspected of having (i) a cancer or a tumor, (ii) an infectious disease that is not a sarbecovirus infectious disease, or (iii) a pathology other than a cancer or a tumor or an infectious disease that is not a sarbecovirus infectious disease when the presence of the complex is not detected. In some aspects, the sample is a nasal swab, tissue sample, saliva, plasma or blood. In some aspects, detecting the presence or absence of the complex comprises an enzyme linked immunosorbent assay (ELISA), immunospot assay, lateral flow assay, flow cytometry, immunohistochemistry or western blot.

[0617] Also provided herein is an antibody or an antigen binding fragment thereof, wherein the antibody or antigen binding fragment thereof binds to (i) a tumor-associated antigen (TAA), (ii) an infectious disease antigen that is not a sarbecovirus antigen, or (iii) an other-pathology antigen, and wherein the antibody or antigen binding fragment thereof comprises: (a) one or more immunoglobulin light chain constant domain (CL) and (b) one or more immunoglobulin heavy chain 1 constant domain (CH1); and wherein the antibody or antigen binding fragment thereof (i) has an isoelectric point (pI), and after administered to a subject has (ii) a higher peak serum levels, and (iii) a reduced clearance levels, as compared to a same antibody or an antigen binding fragment thereof not comprising one or more immunoglobulin light chain constant domain (CL) and (b) one or more immunoglobulin heavy chain 1 constant domain (CH1).

[0618] In some aspects, the antibody or antigen binding fragment thereof is IgG, IgM, IgE, IgA or IgD. In some aspects, the antibody or antigen binding fragment thereof is IgG1, IgG2, IgG3, or IgG4. In some aspects, the antibody or antigen binding fragment thereof is a Fab, scFab, Fab′, F(ab′)₂. Fv or scFv. In some aspects, the antibody or antigen binding fragment thereof is human or humanized.

[0619] In some aspects, the antibody or antigen binding fragment thereof has an isoelectric point (pI) of from about 7 to about 9.

[0620] In some aspects, the antibody or antigen binding fragment thereof binds to the (i) tumor-associated antigen (TAA), (ii) infectious disease antigen that is not a sarbecovirus antigen, or (iii) other-pathology antigen with an equilibrium dissociation constant (K_{D}) of from about 10 μM to about 1 pM.

[0621] In some aspects, the antibody or antigen binding fragment thereof is bispecific, trispecific or tetraspecific and has greater binding affinity to the (i) tumor-associated antigen (TAA), (ii) infectious disease antigen that is not a sarbecovirus antigen, or (iii) other-pathology antigen than a monospecific antibody or an antigen binding fragment thereof that specifically binds to one of the same antigens as the bispecific, trispecific or tetraspecific antibody or antigen binding fragment thereof.

[0622] In some aspects, the antibody or an antigen binding fragment thereof is bispecific, trispecific or tetraspecific and has greater binding affinity to the (i) tumor-associated antigen (TAA), (ii) infectious disease antigen that is not a sarbecovirus antigen, or (iii) other-pathology antigen than a mixture of monospecific antibodies or antigen binding fragments thereof that specifically binds to one of the same antigens as the bispecific, trispecific or tetraspecific antibody or antigen binding fragment thereof.

[0623] In some aspects, the antibody or antigen binding fragment thereof comprises one or more variable heavy chain regions (VH) and wherein at least one of the one or more VH has a mutation at an N-glycosylation site. In some aspects, the mutation is at amino acid N62 of the VH region or equivalent thereof. In some aspects, the N62 mutation is N62Q or N62S, or equivalent thereof.

[0624] In some aspects, the antibody or antigen binding fragment thereof comprises at least one variable heavy chain region (VH) and/or at least one variable light chain region (VL).

[0625] In some aspects, (a) the at least one VL comprises: (i) a complementarity determining region (CDR) 1 having an amino acid sequence that is at least 65%, at least 70%, at least 75%, at least 80%, at least 85%, at least 90%, at least 95%, at least 99%, or 100% identical to any one of SEQ ID NOs: 1096, 1103, 1110, 1120, 1127, 1134, 1141, 1148, 1155, 1162, 1169, 1174, 1181, 1188, 1199, 1211, 1221, 1228, 1235, 1247, 1254, 1261, 1266, 1271, 1278, 1285, 1292, 1299, 1306, 1313, 1319, 1326, 1339, 1352, 1359, 1366, 1373, 1382, 1394, 1401, 1408, 1414, 1421, 1428, 1441, 1448, 1455, 1461, 1468, 1475, 1488, 1495, 1508, 1519, 1526, 1531, 1538, 1544, 1556, 1568, 1574, 1581, 1594, 1601, 1608, 1615, 1622, 1629, 1636, 1643, 1650, 1657, 1672, 1679, 1689, 1697, 1708, 1715, 1718, 1723, 1727, 1738, 1743, 1752, 1761, 1763, 1769, 1776, 1786, 1793, 1798, 1810, 1817, 1824, 1831, 1838, 1845, 1852, 1859, 1866, 1872, 1878, 1885, 1891, 1898, 1905, 1911, 1917, 1924, 1931, 1938, 1945, 1963, 1977, 1985, 1993, and 2001; (ii) a CDR2 having an amino acid sequence that is at least 65%, at least 70%, at least 75%, at least 80%, at least 85%, at least 90%, at least 95%, at least 99%, or 100% identical to any one of SEQ ID NOs: 1200, 1212, 1680, 1690, 1698, 1709, 1728, 1739, 1744, 1753, 1770, 1777, 1978, 1986, 1994, and 2002, or at least 65%, at least 70%, at least 75%, at least 80%, at least 85%, at least 90%, at least 95%, at least 99%, or 100% identical to any one of amino acid sequences AAS, APS, AT, ATS, AVS, DAS, DDG, DDS, DNN, DT, DTS, DVS, EAS, EDN, EVS, FTS, GAF, GAN, GAS, GAT, GIS, GKN, GNG, GNS, HTS, KAS, KVS, LAS, LGS, LVS, NAK, NTD, NTN, QMS, RMS, RTS, SAS, STS, TTS, WAS, YAS, YAT, YGS, YRS, and YTS; and (iii) a CDR3 having an amino acid sequence that is at least 65%, at least 70%, at least 75%, at least 80%, at least 85%, at least 90%, at least 95%, at least 99%, or 100% identical to any one of SEQ ID NOs: 1097, 1104, 1111, 1121, 1128, 1135, 1142, 1149, 1156, 1163, 1170, 1175, 1182, 1189, 1195, 1201, 1207, 1213, 1222, 1229, 1236, 2009, 1248, 1255, 1262, 1267, 1272, 1279, 1286, 1293, 1300, 1307, 1320, 1327, 1333, 1340, 1346, 1353, 1360, 1367, 1374, 1383, 1389, 1395, 1402, 1409, 1415, 1422, 1429, 1435, 1442, 1449, 1456, 1462, 1469, 1476, 1482, 1489, 1496, 1502, 1509, 1513, 1520, 1532, 1539, 1545, 1557, 1562, 1569, 1575, 1582, 1588, 1595, 1602, 1609, 1616, 1623, 1630, 1637, 1644, 1651, 1658, 1663, 1673, 1681, 1691, 1699, 1710, 1729, 1735, 1745, 1751, 1754, 1778, 1787, 1799, 1805, 1811, 1818, 1825, 1832, 1839, 1846, 1853, 1860, 1867, 1873, 1879, 1886, 1892, 1899, 1906, 1912, 1918, 1925, 1932, 1939, 1946, 1951, 1957, 1964, 1970, 1976, 1979, 1987, 1995, and 2003; and/or (b) the at least one VH comprises: (i) a CDR1 having an amino acid sequence that is at least 65%, at least 70%, at least 75%, at least 80%, at least 85%, at least 90%, at least 95%, at least 99%, or 100% identical to any one of SEQ ID NOs: 1099, 1106, 1113, 1117, 1123, 1130, 1137, 1144, 1151, 1158, 1165, 1177, 1184, 1191, 1203, 1215, 1224, 1231, 1238, 1243, 1250, 1257, 1264, 1274, 1281, 1288, 1295, 1302, 1309, 1315, 1322, 1329, 1335, 1342, 1348, 1355, 1362, 1369, 1376, 1385, 1397, 1404, 1417, 1424, 1431, 1437, 1444, 1451, 1458, 1464, 1471, 1478, 1484, 1491, 1498, 1504, 1511, 1515, 1522, 1534, 1547, 1552, 1564, 1577, 1584, 1590, 1597, 1604, 1611, 1618, 1625, 1632, 1639, 1646, 1653, 1660, 1665, 1675, 1683, 1693, 1701, 1705, 1716, 1719, 1731, 1736, 1747, 1756, 1772, 1780, 1789, 1795, 1801, 1813, 1820, 1827, 1834, 1841, 1848, 1855, 1862, 1881, 1894, 1901, 1920, 1927, 1934, 1941, 1953, 1959, 1966, 1981, 1989, 1997, and 2005; (ii) a CDR2 having an amino acid sequence that is at least 65%, at least 70%, at least 75%, at least 80%, at least 85%, at least 90%, at least 95%, at least 99%, or 100% identical to any one of SEQ ID NOs: 1100, 1107, 1114, 1118, 1124, 1131, 1138, 1145, 1152, 1159, 1166, 1178, 1185, 1192, 1204, 1216, 1225, 1232, 1239, 1244, 1251, 1258, 1275, 1282, 1289, 1296, 1303, 1310, 1316, 1323, 1330, 1336, 1343, 1349, 1356, 1363, 1370, 1377, 1386, 1391, 1398, 1405, 1411, 1418, 1425, 1432, 1438, 1445, 1452, 1465, 1472, 1479, 1485, 1492, 1499, 1505, 1516, 1523, 1528, 1535, 1541, 1548, 1553, 1559, 1565, 1571, 1578, 1585, 1591, 1598, 1605, 1612, 1619, 1626, 1633, 1640, 1647, 1654, 1666, 1676, 1684, 1687, 1694, 1702, 1706, 1712, 1717, 1720, 1725, 1732, 1737, 1741, 1748, 1757, 1767, 1773, 1781, 1790, 1802, 1807, 1814, 1821, 1828, 1835, 1842, 1849, 1856, 1863, 1869, 1875, 1882, 1888, 1895, 1902, 1908, 1914, 1921, 1928, 1935, 1942, 1948, 1954, 1960, 1967, 1972, 1982, 1990, 1998, and 2006; and (iii) a CDR3 having an amino acid sequence that is at least 65%, at least 70%, at least 75%, at least 80%, at least 85%, at least 90%, at least 95%, at least 99%, or 100% identical to any one of SEQ ID NOs: 1101, 1108, 1115, 1125, 1132, 1139, 1146, 1153, 1160, 1167, 1172, 1179, 1186, 1193, 1197, 1205, 1209, 1217, 1226, 1233, 1240, 1245, 1252, 1259, 1269, 1276, 1283, 1290, 1297, 1304, 1311, 1317, 1324, 1331, 1337, 1344, 1350, 1357, 1364, 1371, 1378, 1387, 1392, 1399, 1406, 1412, 1419, 1426, 1433, 1439, 1446, 1453, 1459, 1466, 1473, 1480, 1486, 1493, 1500, 1506, 1517, 1524, 1529, 1536, 1542, 1549, 1554, 1560, 1566, 1572, 1579, 1586, 1592, 1599, 1606, 1613, 1620, 1627, 1634, 1641, 1648, 1655, 1661, 1667, 1670, 1677, 1685, 1688, 1695, 1703, 1707, 1713, 1733, 1749, 1758, 1762, 1774, 1782, 1791, 1796, 1803, 1808, 1815, 1822, 1829, 1836, 1843, 1850, 1857, 1864, 1870, 1876, 1883, 1889, 1896, 1903, 1909, 1915, 1922, 1929, 1936, 1943, 1949, 1955, 1961, 1968, 1973, 1975, 1983, 1991, 1999, and 2007.

[0626] In some aspects, (a) the at least one VL comprises an amino acid sequence that is at least 65%, at least 70%, at least 75%, at least 80%, at least 85%, at least 90%, at least 95%, at least 99%, or 100% identical to any one of SEQ ID NOs: 1098, 1105, 1112, 1122, 1129, 1136, 1143, 1150, 1157, 1164, 1171, 1176, 1183, 1190, 1196, 1202, 1208, 1214, 1219, 1223, 1230, 1237, 1242, 1249, 1256, 1263, 1268, 1273, 1280, 1287, 1294, 1301, 1308, 1314, 1321, 1328, 1334, 1341, 1347, 1354, 1361, 1368, 1375, 1380, 1384, 1390, 1396, 1403, 1410, 1416, 1423, 1430, 1436, 1443, 1450, 1457, 1463, 1470, 1477, 1483, 1490, 1497, 1503, 1510, 1514, 1521, 1527, 1533, 1540, 1546, 1551, 1558, 1563, 1570, 1576, 1583, 1589, 1596, 1603, 1610, 1617, 1624, 1631, 1638, 1645, 1652, 1659, 1664, 1669, 1674, 1682, 1692, 1700, 1711, 1721, 1724, 1730, 1740, 1746, 1755, 1764, 1766, 1771, 1779, 1784, 1788, 1794, 1800, 1806, 1812, 1819, 1826, 1833, 1840, 1847, 1854, 1861, 1868, 1874, 1880, 1887, 1893, 1900, 1907, 1913, 1919, 1926, 1933, 1940, 1947, 1952, 1958, 1965, 1971, 1980, 1988, 1996, and 2004; and/or (b) the at least one VH comprises an amino acid sequence that is at least 65%, at least 70%, at least 75%, at least 80%, at least 85%, at least 90%, at least 95%, at least 99%, or 100% identical to any one of SEQ ID NOs: 1102, 1109, 1116, 1119, 1126, 1133, 1140, 1147, 1154, 1161, 1168, 1173, 1180, 1187, 1194, 1198, 1206, 1210, 1218, 1220, 1227, 1234, 1241, 1246, 1253, 1260, 1265, 1270, 1277, 1284, 1291, 1298, 1305, 1312, 1318, 1325, 1332, 1338, 1345, 1351, 1358, 1365, 1372, 1379, 1381, 1388, 1393, 1400, 1407, 1413, 1420, 1427, 1434, 1440, 1447, 1454, 1460, 1467, 1474, 1481, 1487, 1494, 1501, 1507, 1512, 1518, 1525, 1530, 1537, 1543, 1550, 1555, 1561, 1567, 1573, 1580, 1587, 1593, 1600, 1607, 1614, 1621, 1628, 1635, 1642, 1649, 1656, 1662, 1668, 1671, 1678, 1686, 1696, 1704, 1714, 1722, 1726, 1734, 1742, 1750, 1759, 1760, 1765, 1768, 1775, 1783, 1785, 1792, 1797, 1804, 1809, 1816, 1823, 1830, 1837, 1844, 1851, 1858, 1865, 1871, 1877, 1884, 1890, 1897, 1904, 1910, 1916, 1923, 1930, 1937, 1944, 1950, 1956, 1962, 1969, 1974, 1984, 1992, 2000, and 2008.

[0627] Also provided herein is an antigen binding polypeptide complex comprising a first polypeptide and a second polypeptide; wherein the first polypeptide has a structure represented by: VL1-L1-VL2-L2-VH2-L3-VH1-L4-Fc; VL1-L1-VH2-L2-VL2-L3-VH1-L4-Fc; VH1-L1-VH2-L2-VL2-L3-VL1-L4-Fc; or VH1-L1-VL2-L2-VH2-L3-VL1-L4-Fc; wherein the second polypeptide has a structure represented by: VL3-L5-VL4-L6-VH4-L7-VH3-L8-Fc; VL3-L5-VH4-L6-VL4-L7-VH3-L8-Fc; VH3-L5-VH4-L6-VL4-L7-VL3-L8-Fc; or VH3-L5-VL4-L6-VH4-L7-VL3-L8-Fc; wherein: VL1 is a first immunoglobulin light chain variable region that specifically binds to (i) a tumor-associated antigen (TAA), (ii) an infectious disease antigen that is not a sarbecovirus antigen, or (iii) an other-pathology antigen, and which comprises a light chain complementary determining region (LCDR) 1 comprising an amino acid sequence at least 65%, at least 70%, at least 75%, at least 80%, at least 85%, at least 90%, at least 95%, at least 99%, or 100% identical to any one of SEQ ID NOs: 1096, 1103, 1110, 1120, 1127, 1134, 1141, 1148, 1155, 1162, 1169, 1174, 1181, 1188, 1199, 1211, 1221, 1228, 1235, 1247, 1254, 1261, 1266, 1271, 1278, 1285, 1292, 1299, 1306, 1313, 1319, 1326, 1339, 1352, 1359, 1366, 1373, 1382, 1394, 1401, 1408, 1414, 1421, 1428, 1441, 1448, 1455, 1461, 1468, 1475, 1488, 1495, 1508, 1519, 1526, 1531, 1538, 1544, 1556, 1568, 1574, 1581, 1594, 1601, 1608, 1615, 1622, 1629, 1636, 1643, 1650, 1657, 1672, 1679, 1689, 1697, 1708, 1715, 1718, 1723, 1727, 1738, 1743, 1752, 1761, 1763, 1769, 1776, 1786, 1793, 1798, 1810, 1817, 1824, 1831, 1838, 1845, 1852, 1859, 1866, 1872, 1878, 1885, 1891, 1898, 1905, 1911, 1917, 1924, 1931, 1938, 1945, 1963, 1977, 1985, 1993, and 2001; a LCDR2 comprising an amino acid sequence at least 65%, at least 70%, at least 75%, at least 80%, at least 85%, at least 90%, at least 95%, at least 99%, or 100% identical to any one of amino acid sequences AAS, APS, AT, ATS, AVS, DAS, DDG, DDS, DNN, DT, DTS, DVS, EAS, EDN, EVS, FTS, GAF, GAN, GAS, GAT, GIS, GKN, GNG, GNS, HTS, KAS, KVS, LAS, LGS, LVS, NAK, NTD, NTN, QMS, RMS, RTS, SAS, STS, TTS, WAS, YAS, YAT, YGS, YRS, and YTS, or at least 65%, at least 70%, at least 75%, at least 80%, at least 85%, at least 90%, at least 95%, at least 99%, or 100% identical to any one of SEQ ID NOs: 1200, 1212, 1680, 1690, 1698, 1709, 1728, 1739, 1744, 1753, 1770, 1777, 1978, 1986, 1994, and 2002; and a LCDR3 comprising an amino acid sequence at least 65%, at least 70%, at least 75%, at least 80%, at least 85%, at least 90%, at least 95%, at least 99%, or 100% identical to any one of SEQ ID NOs: 1097, 1104, 1111, 1121, 1128, 1135, 1142, 1149, 1156, 1163, 1170, 1175, 1182, 1189, 1195, 1201, 1207, 1213, 1222, 1229, 1236, 2009, 1248, 1255, 1262, 1267, 1272, 1279, 1286, 1293, 1300, 1307, 1320, 1327, 1333, 1340, 1346, 1353, 1360, 1367, 1374, 1383, 1389, 1395, 1402, 1409, 1415, 1422, 1429, 1435, 1442, 1449, 1456, 1462, 1469, 1476, 1482, 1489, 1496, 1502, 1509, 1513, 1520, 1532, 1539, 1545, 1557, 1562, 1569, 1575, 1582, 1588, 1595, 1602, 1609, 1616, 1623, 1630, 1637, 1644, 1651, 1658, 1663, 1673, 1681, 1691, 1699, 1710, 1729, 1735, 1745, 1751, 1754, 1778, 1787, 1799, 1805, 1811, 1818, 1825, 1832, 1839, 1846, 1853, 1860, 1867, 1873, 1879, 1886, 1892, 1899, 1906, 1912, 1918, 1925, 1932, 1939, 1946, 1951, 1957, 1964, 1970, 1976, 1979, 1987, 1995, and 2003; VL2 is a second immunoglobulin light chain variable region that specifically binds to (i) a tumor-associated antigen (TAA), (ii) an infectious disease antigen that is not a sarbecovirus antigen, or (iii) an other-pathology antigen, and which comprises a LCDR1 comprising an amino acid sequence at least 65%, at least 70%, at least 75%, at least 80%, at least 85%, at least 90%, at least 95%, at least 99%, or 100% identical to any one of SEQ ID NOs: 1096, 1103, 1110, 1120, 1127, 1134, 1141, 1148, 1155, 1162, 1169, 1174, 1181, 1188, 1199, 1211, 1221, 1228, 1235, 1247, 1254, 1261, 1266, 1271, 1278, 1285, 1292, 1299, 1306, 1313, 1319, 1326, 1339, 1352, 1359, 1366, 1373, 1382, 1394, 1401, 1408, 1414, 1421, 1428, 1441, 1448, 1455, 1461, 1468, 1475, 1488, 1495, 1508, 1519, 1526, 1531, 1538, 1544, 1556, 1568, 1574, 1581, 1594, 1601, 1608, 1615, 1622, 1629, 1636, 1643, 1650, 1657, 1672, 1679, 1689, 1697, 1708, 1715, 1718, 1723, 1727, 1738, 1743, 1752, 1761, 1763, 1769, 1776, 1786, 1793, 1798, 1810, 1817, 1824, 1831, 1838, 1845, 1852, 1859, 1866, 1872, 1878, 1885, 1891, 1898, 1905, 1911, 1917, 1924, 1931, 1938, 1945, 1963, 1977, 1985, 1993, and 2001; a LCDR2 comprising an amino acid sequence at least 65%, at least 70%, at least 75%, at least 80%, at least 85%, at least 90%, at least 95%, at least 99%, or 100% identical to any one of amino acid sequences AAS, APS, AT, ATS, AVS, DAS, DDG, DDS, DNN, DT, DTS, DVS, EAS, EDN, EVS, FTS, GAF, GAN, GAS, GAT, GIS, GKN, GNG, GNS, HTS, KAS, KVS, LAS, LGS, LVS, NAK, NTD, NTN, QMS, RMS, RTS, SAS, STS, TTS, WAS, YAS, YAT, YGS, YRS, and YTS, or at least 65%, at least 70%, at least 75%, at least 80%, at least 85%, at least 90%, at least 95%, at least 99%, or 100% identical to any one of SEQ ID NOs: 1200, 1212, 1680, 1690, 1698, 1709, 1728, 1739, 1744, 1753, 1770, 1777, 1978, 1986, 1994, and 2002; and a LCDR3 comprising an amino acid sequence at least 65%, at least 70%, at least 75%, at least 80%, at least 85%, at least 90%, at least 95%, at least 99%, or 100% identical to any one of SEQ ID NOs: 1097, 1104, 1111, 1121, 1128, 1135, 1142, 1149, 1156, 1163, 1170, 1175, 1182, 1189, 1195, 1201, 1207, 1213, 1222, 1229, 1236, 2009, 1248, 1255, 1262, 1267, 1272, 1279, 1286, 1293, 1300, 1307, 1320, 1327, 1333, 1340, 1346, 1353, 1360, 1367, 1374, 1383, 1389, 1395, 1402, 1409, 1415, 1422, 1429, 1435, 1442, 1449, 1456, 1462, 1469, 1476, 1482, 1489, 1496, 1502, 1509, 1513, 1520, 1532, 1539, 1545, 1557, 1562, 1569, 1575, 1582, 1588, 1595, 1602, 1609, 1616, 1623, 1630, 1637, 1644, 1651, 1658, 1663, 1673, 1681, 1691, 1699, 1710, 1729, 1735, 1745, 1751, 1754, 1778, 1787, 1799, 1805, 1811, 1818, 1825, 1832, 1839, 1846, 1853, 1860, 1867, 1873, 1879, 1886, 1892, 1899, 1906, 1912, 1918, 1925, 1932, 1939, 1946, 1951, 1957, 1964, 1970, 1976, 1979, 1987, 1995, and 2003; VL3 is a third immunoglobulin light chain variable region that specifically binds to (i) a tumor-associated antigen (TAA), (ii) an infectious disease antigen that is not a sarbecovirus antigen, or (iii) an other-pathology antigen, and which comprises a LCDR1 comprising an amino acid sequence at least 65%, at least 70%, at least 75%, at least 80%, at least 85%, at least 90%, at least 95%, at least 99%, or 100% identical to any one of SEQ ID NOs: 1096, 1103, 1110, 1120, 1127, 1134, 1141, 1148, 1155, 1162, 1169, 1174, 1181, 1188, 1199, 1211, 1221, 1228, 1235, 1247, 1254, 1261, 1266, 1271, 1278, 1285, 1292, 1299, 1306, 1313, 1319, 1326, 1339, 1352, 1359, 1366, 1373, 1382, 1394, 1401, 1408, 1414, 1421, 1428, 1441, 1448, 1455, 1461, 1468, 1475, 1488, 1495, 1508, 1519, 1526, 1531, 1538, 1544, 1556, 1568, 1574, 1581, 1594, 1601, 1608, 1615, 1622, 1629, 1636, 1643, 1650, 1657, 1672, 1679, 1689, 1697, 1708, 1715, 1718, 1723, 1727, 1738, 1743, 1752, 1761, 1763, 1769, 1776, 1786, 1793, 1798, 1810, 1817, 1824, 1831, 1838, 1845, 1852, 1859, 1866, 1872, 1878, 1885, 1891, 1898, 1905, 1911, 1917, 1924, 1931, 1938, 1945, 1963, 1977, 1985, 1993, and 2001; a LCDR2 comprising an amino acid sequence at least 65%, at least 70%, at least 75%, at least 80%, at least 85%, at least 90%, at least 95%, at least 99%, or 100% identical to any one of amino acid sequences AAS, APS, AT, ATS, AVS, DAS, DDG, DDS, DNN, DT, DTS, DVS, EAS, EDN, EVS, FTS, GAF, GAN, GAS, GAT, GIS, GKN, GNG, GNS, HTS, KAS, KVS, LAS, LGS, LVS, NAK, NTD, NTN, QMS, RMS, RTS, SAS, STS, TTS, WAS, YAS, YAT, YGS, YRS, and YTS, or at least 65%, at least 70%, at least 75%, at least 80%, at least 85%, at least 90%, at least 95%, at least 99%, or 100% identical to any one of SEQ ID NOs: 1200, 1212, 1680, 1690, 1698, 1709, 1728, 1739, 1744, 1753, 1770, 1777, 1978, 1986, 1994, and 2002; and a LCDR3 comprising an amino acid sequence at least 65%, at least 70%, at least 75%, at least 80%, at least 85%, at least 90%, at least 95%, at least 99%, or 100% identical to any one of SEQ ID NOs: 1097, 1104, 1111, 1121, 1128, 1135, 1142, 1149, 1156, 1163, 1170, 1175, 1182, 1189, 1195, 1201, 1207, 1213, 1222, 1229, 1236, 2009, 1248, 1255, 1262, 1267, 1272, 1279, 1286, 1293, 1300, 1307, 1320, 1327, 1333, 1340, 1346, 1353, 1360, 1367, 1374, 1383, 1389, 1395, 1402, 1409, 1415, 1422, 1429, 1435, 1442, 1449, 1456, 1462, 1469, 1476, 1482, 1489, 1496, 1502, 1509, 1513, 1520, 1532, 1539, 1545, 1557, 1562, 1569, 1575, 1582, 1588, 1595, 1602, 1609, 1616, 1623, 1630, 1637, 1644, 1651, 1658, 1663, 1673, 1681, 1691, 1699, 1710, 1729, 1735, 1745, 1751, 1754, 1778, 1787, 1799, 1805, 1811, 1818, 1825, 1832, 1839, 1846, 1853, 1860, 1867, 1873, 1879, 1886, 1892, 1899, 1906, 1912, 1918, 1925, 1932, 1939, 1946, 1951, 1957, 1964, 1970, 1976, 1979, 1987, 1995, and 2003; VL4 is a fourth immunoglobulin light chain variable region that specifically binds to (i) a tumor-associated antigen (TAA), (ii) an infectious disease antigen that is not a sarbecovirus antigen, or (iii) an other-pathology antigen, and which comprises a LCDR1 comprising an amino acid sequence at least 65%, at least 70%, at least 75%, at least 80%, at least 85%, at least 90%, at least 95%, at least 99%, or 100% identical to any one of SEQ ID NOs: 1096, 1103, 1110, 1120, 1127, 1134, 1141, 1148, 1155, 1162, 1169, 1174, 1181, 1188, 1199, 1211, 1221, 1228, 1235, 1247, 1254, 1261, 1266, 1271, 1278, 1285, 1292, 1299, 1306, 1313, 1319, 1326, 1339, 1352, 1359, 1366, 1373, 1382, 1394, 1401, 1408, 1414, 1421, 1428, 1441, 1448, 1455, 1461, 1468, 1475, 1488, 1495, 1508, 1519, 1526, 1531, 1538, 1544, 1556, 1568, 1574, 1581, 1594, 1601, 1608, 1615, 1622, 1629, 1636, 1643, 1650, 1657, 1672, 1679, 1689, 1697, 1708, 1715, 1718, 1723, 1727, 1738, 1743, 1752, 1761, 1763, 1769, 1776, 1786, 1793, 1798, 1810, 1817, 1824, 1831, 1838, 1845, 1852, 1859, 1866, 1872, 1878, 1885, 1891, 1898, 1905, 1911, 1917, 1924, 1931, 1938, 1945, 1963, 1977, 1985, 1993, and 2001; a LCDR2 comprising an amino acid sequence at least 65%, at least 70%, at least 75%, at least 80%, at least 85%, at least 90%, at least 95%, at least 99%, or 100% identical to any one of amino acid sequences AAS, APS, AT, ATS, AVS, DAS, DDG, DDS, DNN, DT, DTS, DVS, EAS, EDN, EVS, FTS, GAF, GAN, GAS, GAT, GIS, GKN, GNG, GNS, HTS, KAS, KVS, LAS, LGS, LVS, NAK, NTD, NTN, QMS, RMS, RTS, SAS, STS, TTS, WAS, YAS, YAT, YGS, YRS, and YTS, or at least 65%, at least 70%, at least 75%, at least 80%, at least 85%, at least 90%, at least 95%, at least 99%, or 100% identical to any one of SEQ ID NOs: 1200, 1212, 1680, 1690, 1698, 1709, 1728, 1739, 1744, 1753, 1770, 1777, 1978, 1986, 1994, and 2002; and a LCDR3 comprising an amino acid sequence at least 65%, at least 70%, at least 75%, at least 80%, at least 85%, at least 90%, at least 95%, at least 99%, or 100% identical to any one of SEQ ID NOs: 1097, 1104, 1111, 1121, 1128, 1135, 1142, 1149, 1156, 1163, 1170, 1175, 1182, 1189, 1195, 1201, 1207, 1213, 1222, 1229, 1236, 2009, 1248, 1255, 1262, 1267, 1272, 1279, 1286, 1293, 1300, 1307, 1320, 1327, 1333, 1340, 1346, 1353, 1360, 1367, 1374, 1383, 1389, 1395, 1402, 1409, 1415, 1422, 1429, 1435, 1442, 1449, 1456, 1462, 1469, 1476, 1482, 1489, 1496, 1502, 1509, 1513, 1520, 1532, 1539, 1545, 1557, 1562, 1569, 1575, 1582, 1588, 1595, 1602, 1609, 1616, 1623, 1630, 1637, 1644, 1651, 1658, 1663, 1673, 1681, 1691, 1699, 1710, 1729, 1735, 1745, 1751, 1754, 1778, 1787, 1799, 1805, 1811, 1818, 1825, 1832, 1839, 1846, 1853, 1860, 1867, 1873, 1879, 1886, 1892, 1899, 1906, 1912, 1918, 1925, 1932, 1939, 1946, 1951, 1957, 1964, 1970, 1976, 1979, 1987, 1995, and 2003; VH1 is a first immunoglobulin heavy chain variable region that specifically binds to (i) a tumor-associated antigen (TAA), (ii) an infectious disease antigen that is not a sarbecovirus antigen, or (iii) an other-pathology antigen, and which comprises a heavy chain complementary determining region (HCDR) 1 comprising an amino acid sequence at least 65%, at least 70%, at least 75%, at least 80%, at least 85%, at least 90%, at least 95%, at least 99%, or 100% identical to any one of SEQ ID NOs: 1099, 1106, 1113, 1117, 1123, 1130, 1137, 1144, 1151, 1158, 1165, 1177, 1184, 1191, 1203, 1215, 1224, 1231, 1238, 1243, 1250, 1257, 1264, 1274, 1281, 1288, 1295, 1302, 1309, 1315, 1322, 1329, 1335, 1342, 1348, 1355, 1362, 1369, 1376, 1385, 1397, 1404, 1417, 1424, 1431, 1437, 1444, 1451, 1458, 1464, 1471, 1478, 1484, 1491, 1498, 1504, 1511, 1515, 1522, 1534, 1547, 1552, 1564, 1577, 1584, 1590, 1597, 1604, 1611, 1618, 1625, 1632, 1639, 1646, 1653, 1660, 1665, 1675, 1683, 1693, 1701, 1705, 1716, 1719, 1731, 1736, 1747, 1756, 1772, 1780, 1789, 1795, 1801, 1813, 1820, 1827, 1834, 1841, 1848, 1855, 1862, 1881, 1894, 1901, 1920, 1927, 1934, 1941, 1953, 1959, 1966, 1981, 1989, 1997, and 2005; a HCDR2 comprising an amino acid sequence at least 65%, at least 70%, at least 75%, at least 80%, at least 85%, at least 90%, at least 95%, at least 99%, or 100% identical to any one of SEQ ID NOs: 1100, 1107, 1114, 1118, 1124, 1131, 1138, 1145, 1152, 1159, 1166, 1178, 1185, 1192, 1204, 1216, 1225, 1232, 1239, 1244, 1251, 1258, 1275, 1282, 1289, 1296, 1303, 1310, 1316, 1323, 1330, 1336, 1343, 1349, 1356, 1363, 1370, 1377, 1386, 1391, 1398, 1405, 1411, 1418, 1425, 1432, 1438, 1445, 1452, 1465, 1472, 1479, 1485, 1492, 1499, 1505, 1516, 1523, 1528, 1535, 1541, 1548, 1553, 1559, 1565, 1571, 1578, 1585, 1591, 1598, 1605, 1612, 1619, 1626, 1633, 1640, 1647, 1654, 1666, 1676, 1684, 1687, 1694, 1702, 1706, 1712, 1717, 1720, 1725, 1732, 1737, 1741, 1748, 1757, 1767, 1773, 1781, 1790, 1802, 1807, 1814, 1821, 1828, 1835, 1842, 1849, 1856, 1863, 1869, 1875, 1882, 1888, 1895, 1902, 1908, 1914, 1921, 1928, 1935, 1942, 1948, 1954, 1960, 1967, 1972, 1982, 1990, 1998, and 2006; and a HCDR3 comprising an amino acid sequence at least 65%, at least 70%, at least 75%, at least 80%, at least 85%, at least 90%, at least 95%, at least 99%, or 100% identical to any one of SEQ ID NOs: 1101, 1108, 1115, 1125, 1132, 1139, 1146, 1153, 1160, 1167, 1172, 1179, 1186, 1193, 1197, 1205, 1209, 1217, 1226, 1233, 1240, 1245, 1252, 1259, 1269, 1276, 1283, 1290, 1297, 1304, 1311, 1317, 1324, 1331, 1337, 1344, 1350, 1357, 1364, 1371, 1378, 1387, 1392, 1399, 1406, 1412, 1419, 1426, 1433, 1439, 1446, 1453, 1459, 1466, 1473, 1480, 1486, 1493, 1500, 1506, 1517, 1524, 1529, 1536, 1542, 1549, 1554, 1560, 1566, 1572, 1579, 1586, 1592, 1599, 1606, 1613, 1620, 1627, 1634, 1641, 1648, 1655, 1661, 1667, 1670, 1677, 1685, 1688, 1695, 1703, 1707, 1713, 1733, 1749, 1758, 1762, 1774, 1782, 1791, 1796, 1803, 1808, 1815, 1822, 1829, 1836, 1843, 1850, 1857, 1864, 1870, 1876, 1883, 1889, 1896, 1903, 1909, 1915, 1922, 1929, 1936, 1943, 1949, 1955, 1961, 1968, 1973, 1975, 1983, 1991, 1999, and 2007; VH2 is a second immunoglobulin heavy chain variable region that specifically binds to (i) a tumor-associated antigen (TAA), (ii) an infectious disease antigen that is not a sarbecovirus antigen, or (iii) an other-pathology antigen, and which comprises a HCDR1 comprising an amino acid sequence at least 65%, at least 70%, at least 75%, at least 80%, at least 85%, at least 90%, at least 95%, at least 99%, or 100% identical to any one of SEQ ID NOs: 1099, 1106, 1113, 1117, 1123, 1130, 1137, 1144, 1151, 1158, 1165, 1177, 1184, 1191, 1203, 1215, 1224, 1231, 1238, 1243, 1250, 1257, 1264, 1274, 1281, 1288, 1295, 1302, 1309, 1315, 1322, 1329, 1335, 1342, 1348, 1355, 1362, 1369, 1376, 1385, 1397, 1404, 1417, 1424, 1431, 1437, 1444, 1451, 1458, 1464, 1471, 1478, 1484, 1491, 1498, 1504, 1511, 1515, 1522, 1534, 1547, 1552, 1564, 1577, 1584, 1590, 1597, 1604, 1611, 1618, 1625, 1632, 1639, 1646, 1653, 1660, 1665, 1675, 1683, 1693, 1701, 1705, 1716, 1719, 1731, 1736, 1747, 1756, 1772, 1780, 1789, 1795, 1801, 1813, 1820, 1827, 1834, 1841, 1848, 1855, 1862, 1881, 1894, 1901, 1920, 1927, 1934, 1941, 1953, 1959, 1966, 1981, 1989, 1997, and 2005; a HCDR2 comprising an amino acid sequence at least 65%, at least 70%, at least 75%, at least 80%, at least 85%, at least 90%, at least 95%, at least 99%, or 100% identical to any one of SEQ ID NOs: 1100, 1107, 1114, 1118, 1124, 1131, 1138, 1145, 1152, 1159, 1166, 1178, 1185, 1192, 1204, 1216, 1225, 1232, 1239, 1244, 1251, 1258, 1275, 1282, 1289, 1296, 1303, 1310, 1316, 1323, 1330, 1336, 1343, 1349, 1356, 1363, 1370, 1377, 1386, 1391, 1398, 1405, 1411, 1418, 1425, 1432, 1438, 1445, 1452, 1465, 1472, 1479, 1485, 1492, 1499, 1505, 1516, 1523, 1528, 1535, 1541, 1548, 1553, 1559, 1565, 1571, 1578, 1585, 1591, 1598, 1605, 1612, 1619, 1626, 1633, 1640, 1647, 1654, 1666, 1676, 1684, 1687, 1694, 1702, 1706, 1712, 1717, 1720, 1725, 1732, 1737, 1741, 1748, 1757, 1767, 1773, 1781, 1790, 1802, 1807, 1814, 1821, 1828, 1835, 1842, 1849, 1856, 1863, 1869, 1875, 1882, 1888, 1895, 1902, 1908, 1914, 1921, 1928, 1935, 1942, 1948, 1954, 1960, 1967, 1972, 1982, 1990, 1998, and 2006; and a HCDR3 comprising an amino acid sequence at least 65%, at least 70%, at least 75%, at least 80%, at least 85%, at least 90%, at least 95%, at least 99%, or 100% identical to any one of SEQ ID NOs: 1101, 1108, 1115, 1125, 1132, 1139, 1146, 1153, 1160, 1167, 1172, 1179, 1186, 1193, 1197, 1205, 1209, 1217, 1226, 1233, 1240, 1245, 1252, 1259, 1269, 1276, 1283, 1290, 1297, 1304, 1311, 1317, 1324, 1331, 1337, 1344, 1350, 1357, 1364, 1371, 1378, 1387, 1392, 1399, 1406, 1412, 1419, 1426, 1433, 1439, 1446, 1453, 1459, 1466, 1473, 1480, 1486, 1493, 1500, 1506, 1517, 1524, 1529, 1536, 1542, 1549, 1554, 1560, 1566, 1572, 1579, 1586, 1592, 1599, 1606, 1613, 1620, 1627, 1634, 1641, 1648, 1655, 1661, 1667, 1670, 1677, 1685, 1688, 1695, 1703, 1707, 1713, 1733, 1749, 1758, 1762, 1774, 1782, 1791, 1796, 1803, 1808, 1815, 1822, 1829, 1836, 1843, 1850, 1857, 1864, 1870, 1876, 1883, 1889, 1896, 1903, 1909, 1915, 1922, 1929, 1936, 1943, 1949, 1955, 1961, 1968, 1973, 1975, 1983, 1991, 1999, and 2007; VH3 is a third immunoglobulin heavy chain variable region that specifically binds to (i) a tumor-associated antigen (TAA), (ii) an infectious disease antigen that is not a sarbecovirus antigen, or (iii) an other-pathology antigen and which comprises a HCDR1 comprising an amino acid sequence at least 65%, at least 70%, at least 75%, at least 80%, at least 85%, at least 90%, at least 95%, at least 99%, or 100% identical to any one of SEQ ID NOs: 1099, 1106, 1113, 1117, 1123, 1130, 1137, 1144, 1151, 1158, 1165, 1177, 1184, 1191, 1203, 1215, 1224, 1231, 1238, 1243, 1250, 1257, 1264, 1274, 1281, 1288, 1295, 1302, 1309, 1315, 1322, 1329, 1335, 1342, 1348, 1355, 1362, 1369, 1376, 1385, 1397, 1404, 1417, 1424, 1431, 1437, 1444, 1451, 1458, 1464, 1471, 1478, 1484, 1491, 1498, 1504, 1511, 1515, 1522, 1534, 1547, 1552, 1564, 1577, 1584, 1590, 1597, 1604, 1611, 1618, 1625, 1632, 1639, 1646, 1653, 1660, 1665, 1675, 1683, 1693, 1701, 1705, 1716, 1719, 1731, 1736, 1747, 1756, 1772, 1780, 1789, 1795, 1801, 1813, 1820, 1827, 1834, 1841, 1848, 1855, 1862, 1881, 1894, 1901, 1920, 1927, 1934, 1941, 1953, 1959, 1966, 1981, 1989, 1997, and 2005; a HCDR2 comprising an amino acid sequence at least 65%, at least 70%, at least 75%, at least 80%, at least 85%, at least 90%, at least 95%, at least 99%, or 100% identical to any one of SEQ ID NOs: 1100, 1107, 1114, 1118, 1124, 1131, 1138, 1145, 1152, 1159, 1166, 1178, 1185, 1192, 1204, 1216, 1225, 1232, 1239, 1244, 1251, 1258, 1275, 1282, 1289, 1296, 1303, 1310, 1316, 1323, 1330, 1336, 1343, 1349, 1356, 1363, 1370, 1377, 1386, 1391, 1398, 1405, 1411, 1418, 1425, 1432, 1438, 1445, 1452, 1465, 1472, 1479, 1485, 1492, 1499, 1505, 1516, 1523, 1528, 1535, 1541, 1548, 1553, 1559, 1565, 1571, 1578, 1585, 1591, 1598, 1605, 1612, 1619, 1626, 1633, 1640, 1647, 1654, 1666, 1676, 1684, 1687, 1694, 1702, 1706, 1712, 1717, 1720, 1725, 1732, 1737, 1741, 1748, 1757, 1767, 1773, 1781, 1790, 1802, 1807, 1814, 1821, 1828, 1835, 1842, 1849, 1856, 1863, 1869, 1875, 1882, 1888, 1895, 1902, 1908, 1914, 1921, 1928, 1935, 1942, 1948, 1954, 1960, 1967, 1972, 1982, 1990, 1998, and 2006; and a HCDR3 comprising an amino acid sequence at least 65%, at least 70%, at least 75%, at least 80%, at least 85%, at least 90%, at least 95%, at least 99%, or 100% identical to any one of SEQ ID NOs: 1101, 1108, 1115, 1125, 1132, 1139, 1146, 1153, 1160, 1167, 1172, 1179, 1186, 1193, 1197, 1205, 1209, 1217, 1226, 1233, 1240, 1245, 1252, 1259, 1269, 1276, 1283, 1290, 1297, 1304, 1311, 1317, 1324, 1331, 1337, 1344, 1350, 1357, 1364, 1371, 1378, 1387, 1392, 1399, 1406, 1412, 1419, 1426, 1433, 1439, 1446, 1453, 1459, 1466, 1473, 1480, 1486, 1493, 1500, 1506, 1517, 1524, 1529, 1536, 1542, 1549, 1554, 1560, 1566, 1572, 1579, 1586, 1592, 1599, 1606, 1613, 1620, 1627, 1634, 1641, 1648, 1655, 1661, 1667, 1670, 1677, 1685, 1688, 1695, 1703, 1707, 1713, 1733, 1749, 1758, 1762, 1774, 1782, 1791, 1796, 1803, 1808, 1815, 1822, 1829, 1836, 1843, 1850, 1857, 1864, 1870, 1876, 1883, 1889, 1896, 1903, 1909, 1915, 1922, 1929, 1936, 1943, 1949, 1955, 1961, 1968, 1973, 1975, 1983, 1991, 1999, and 2007; and VH4 is a fourth immunoglobulin heavy chain variable region that specifically binds to (i) a tumor-associated antigen (TAA), (ii) an infectious disease antigen that is not a sarbecovirus antigen, or (iii) an other-pathology antigen, and which comprises a HCDR1 comprising an amino acid sequence at least 65%, at least 70%, at least 75%, at least 80%, at least 85%, at least 90%, at least 95%, at least 99%, or 100% identical to any one of SEQ ID NOs: 1099, 1106, 1113, 1117, 1123, 1130, 1137, 1144, 1151, 1158, 1165, 1177, 1184, 1191, 1203, 1215, 1224, 1231, 1238, 1243, 1250, 1257, 1264, 1274, 1281, 1288, 1295, 1302, 1309, 1315, 1322, 1329, 1335, 1342, 1348, 1355, 1362, 1369, 1376, 1385, 1397, 1404, 1417, 1424, 1431, 1437, 1444, 1451, 1458, 1464, 1471, 1478, 1484, 1491, 1498, 1504, 1511, 1515, 1522, 1534, 1547, 1552, 1564, 1577, 1584, 1590, 1597, 1604, 1611, 1618, 1625, 1632, 1639, 1646, 1653, 1660, 1665, 1675, 1683, 1693, 1701, 1705, 1716, 1719, 1731, 1736, 1747, 1756, 1772, 1780, 1789, 1795, 1801, 1813, 1820, 1827, 1834, 1841, 1848, 1855, 1862, 1881, 1894, 1901, 1920, 1927, 1934, 1941, 1953, 1959, 1966, 1981, 1989, 1997, and 2005; a HCDR2 comprising an amino acid sequence at least 65%, at least 70%, at least 75%, at least 80%, at least 85%, at least 90%, at least 95%, at least 99%, or 100% identical to any one of SEQ ID NOs: 1100, 1107, 1114, 1118, 1124, 1131, 1138, 1145, 1152, 1159, 1166, 1178, 1185, 1192, 1204, 1216, 1225, 1232, 1239, 1244, 1251, 1258, 1275, 1282, 1289, 1296, 1303, 1310, 1316, 1323, 1330, 1336, 1343, 1349, 1356, 1363, 1370, 1377, 1386, 1391, 1398, 1405, 1411, 1418, 1425, 1432, 1438, 1445, 1452, 1465, 1472, 1479, 1485, 1492, 1499, 1505, 1516, 1523, 1528, 1535, 1541, 1548, 1553, 1559, 1565, 1571, 1578, 1585, 1591, 1598, 1605, 1612, 1619, 1626, 1633, 1640, 1647, 1654, 1666, 1676, 1684, 1687, 1694, 1702, 1706, 1712, 1717, 1720, 1725, 1732, 1737, 1741, 1748, 1757, 1767, 1773, 1781, 1790, 1802, 1807, 1814, 1821, 1828, 1835, 1842, 1849, 1856, 1863, 1869, 1875, 1882, 1888, 1895, 1902, 1908, 1914, 1921, 1928, 1935, 1942, 1948, 1954, 1960, 1967, 1972, 1982, 1990, 1998, and 2006; and a HCDR3 comprising an amino acid sequence at least 65%, at least 70%, at least 75%, at least 80%, at least 85%, at least 90%, at least 95%, at least 99%, or 100% identical to any one of SEQ ID NOs: 1101, 1108, 1115, 1125, 1132, 1139, 1146, 1153, 1160, 1167, 1172, 1179, 1186, 1193, 1197, 1205, 1209, 1217, 1226, 1233, 1240, 1245, 1252, 1259, 1269, 1276, 1283, 1290, 1297, 1304, 1311, 1317, 1324, 1331, 1337, 1344, 1350, 1357, 1364, 1371, 1378, 1387, 1392, 1399, 1406, 1412, 1419, 1426, 1433, 1439, 1446, 1453, 1459, 1466, 1473, 1480, 1486, 1493, 1500, 1506, 1517, 1524, 1529, 1536, 1542, 1549, 1554, 1560, 1566, 1572, 1579, 1586, 1592, 1599, 1606, 1613, 1620, 1627, 1634, 1641, 1648, 1655, 1661, 1667, 1670, 1677, 1685, 1688, 1695, 1703, 1707, 1713, 1733, 1749, 1758, 1762, 1774, 1782, 1791, 1796, 1803, 1808, 1815, 1822, 1829, 1836, 1843, 1850, 1857, 1864, 1870, 1876, 1883, 1889, 1896, 1903, 1909, 1915, 1922, 1929, 1936, 1943, 1949, 1955, 1961, 1968, 1973, 1975, 1983, 1991, 1999, and 2007; Fc is a region comprising an immunoglobulin heavy chain constant region 2 (CH2), an immunoglobulin heavy chain constant region 3 (CH3), and optionally, an immunoglobulin hinge; and L1-L8 are optional amino acid linkers.

[0628] Also provided herein is an antigen binding polypeptide complex comprising a first polypeptide and a second polypeptide; wherein the first polypeptide has a structure represented by: VL1-L1-VL2-L2-VH2-L3-VH1-L4-Fc; VL1-L1-VH2-L2-VL2-L3-VH1-L4-Fc; VH1-L1-VH2-L2-VL2-37-VL1-L4-Fc; or VH1-L1-VL2-L2-VH2-L3-VL1-L4-Fc; wherein the second polypeptide has a structure represented by: VL3-L5-VL4-L6-VH4-L7-VH3-L8-Fc; VL3-L5-VH4-L6-VL4-L7-VH3-L8-Fc; VH3-L5-VH4-L6-VL4-L7-VL3-L8-Fc; or VH3-L5-VL4-L6-VH4-L7-VL3-L8-Fc; wherein: VL1 is a first immunoglobulin light chain variable region that specifically binds to (i) a tumor-associated antigen (TAA), (ii) an infectious disease antigen that is not a sarbecovirus antigen, or (iii) an other-pathology antigen, comprising an amino acid sequence at least 65%, at least 70%, at least 75%, at least 80%, at least 85%, at least 90%, at least 95%, at least 99%, or 100% identical to any one of SEQ ID NOs: 1098, 1105, 1112, 1122, 1129, 1136, 1143, 1150, 1157, 1164, 1171, 1176, 1183, 1190, 1196, 1202, 1208, 1214, 1219, 1223, 1230, 1237, 1242, 1249, 1256, 1263, 1268, 1273, 1280, 1287, 1294, 1301, 1308, 1314, 1321, 1328, 1334, 1341, 1347, 1354, 1361, 1368, 1375, 1380, 1384, 1390, 1396, 1403, 1410, 1416, 1423, 1430, 1436, 1443, 1450, 1457, 1463, 1470, 1477, 1483, 1490, 1497, 1503, 1510, 1514, 1521, 1527, 1533, 1540, 1546, 1551, 1558, 1563, 1570, 1576, 1583, 1589, 1596, 1603, 1610, 1617, 1624, 1631, 1638, 1645, 1652, 1659, 1664, 1669, 1674, 1682, 1692, 1700, 1711, 1721, 1724, 1730, 1740, 1746, 1755, 1764, 1766, 1771, 1779, 1784, 1788, 1794, 1800, 1806, 1812, 1819, 1826, 1833, 1840, 1847, 1854, 1861, 1868, 1874, 1880, 1887, 1893, 1900, 1907, 1913, 1919, 1926, 1933, 1940, 1947, 1952, 1958, 1965, 1971, 1980, 1988, 1996, and 2004; VL2 is a second immunoglobulin light chain variable region that specifically binds to (i) a tumor-associated antigen (TAA), (ii) an infectious disease antigen that is not a sarbecovirus antigen, or (iii) an other-pathology antigen, comprising an amino acid sequence at least 65%, at least 70%, at least 75%, at least 80%, at least 85%, at least 90%, at least 95%, at least 99%, or 100% identical to any one of SEQ ID NOs: 1098, 1105, 1112, 1122, 1129, 1136, 1143, 1150, 1157, 1164, 1171, 1176, 1183, 1190, 1196, 1202, 1208, 1214, 1219, 1223, 1230, 1237, 1242, 1249, 1256, 1263, 1268, 1273, 1280, 1287, 1294, 1301, 1308, 1314, 1321, 1328, 1334, 1341, 1347, 1354, 1361, 1368, 1375, 1380, 1384, 1390, 1396, 1403, 1410, 1416, 1423, 1430, 1436, 1443, 1450, 1457, 1463, 1470, 1477, 1483, 1490, 1497, 1503, 1510, 1514, 1521, 1527, 1533, 1540, 1546, 1551, 1558, 1563, 1570, 1576, 1583, 1589, 1596, 1603, 1610, 1617, 1624, 1631, 1638, 1645, 1652, 1659, 1664, 1669, 1674, 1682, 1692, 1700, 1711, 1721, 1724, 1730, 1740, 1746, 1755, 1764, 1766, 1771, 1779, 1784, 1788, 1794, 1800, 1806, 1812, 1819, 1826, 1833, 1840, 1847, 1854, 1861, 1868, 1874, 1880, 1887, 1893, 1900, 1907, 1913, 1919, 1926, 1933, 1940, 1947, 1952, 1958, 1965, 1971, 1980, 1988, 1996, and 2004; VL3 is a third immunoglobulin light chain variable region that specifically binds to (i) a tumor-associated antigen (TAA), (ii) an infectious disease antigen that is not a sarbecovirus antigen, or (iii) an other-pathology antigen, comprising an amino acid sequence at least 65%, at least 70%, at least 75%, at least 80%, at least 85%, at least 90%, at least 95%, at least 99%, or 100% identical to any one of SEQ ID NOs: 1098, 1105, 1112, 1122, 1129, 1136, 1143, 1150, 1157, 1164, 1171, 1176, 1183, 1190, 1196, 1202, 1208, 1214, 1219, 1223, 1230, 1237, 1242, 1249, 1256, 1263, 1268, 1273, 1280, 1287, 1294, 1301, 1308, 1314, 1321, 1328, 1334, 1341, 1347, 1354, 1361, 1368, 1375, 1380, 1384, 1390, 1396, 1403, 1410, 1416, 1423, 1430, 1436, 1443, 1450, 1457, 1463, 1470, 1477, 1483, 1490, 1497, 1503, 1510, 1514, 1521, 1527, 1533, 1540, 1546, 1551, 1558, 1563, 1570, 1576, 1583, 1589, 1596, 1603, 1610, 1617, 1624, 1631, 1638, 1645, 1652, 1659, 1664, 1669, 1674, 1682, 1692, 1700, 1711, 1721, 1724, 1730, 1740, 1746, 1755, 1764, 1766, 1771, 1779, 1784, 1788, 1794, 1800, 1806, 1812, 1819, 1826, 1833, 1840, 1847, 1854, 1861, 1868, 1874, 1880, 1887, 1893, 1900, 1907, 1913, 1919, 1926, 1933, 1940, 1947, 1952, 1958, 1965, 1971, 1980, 1988, 1996, and 2004; VL4 is a fourth immunoglobulin light chain variable region that specifically binds to (i) a tumor-associated antigen (TAA), (ii) an infectious disease antigen that is not a sarbecovirus antigen, or (iii) an other-pathology antigen, comprising an amino acid sequence at least 65%, at least 70%, at least 75%, at least 80%, at least 85%, at least 90%, at least 95%, at least 99%, or 100% identical to any one of SEQ ID NOs: 1098, 1105, 1112, 1122, 1129, 1136, 1143, 1150, 1157, 1164, 1171, 1176, 1183, 1190, 1196, 1202, 1208, 1214, 1219, 1223, 1230, 1237, 1242, 1249, 1256, 1263, 1268, 1273, 1280, 1287, 1294, 1301, 1308, 1314, 1321, 1328, 1334, 1341, 1347, 1354, 1361, 1368, 1375, 1380, 1384, 1390, 1396, 1403, 1410, 1416, 1423, 1430, 1436, 1443, 1450, 1457, 1463, 1470, 1477, 1483, 1490, 1497, 1503, 1510, 1514, 1521, 1527, 1533, 1540, 1546, 1551, 1558, 1563, 1570, 1576, 1583, 1589, 1596, 1603, 1610, 1617, 1624, 1631, 1638, 1645, 1652, 1659, 1664, 1669, 1674, 1682, 1692, 1700, 1711, 1721, 1724, 1730, 1740, 1746, 1755, 1764, 1766, 1771, 1779, 1784, 1788, 1794, 1800, 1806, 1812, 1819, 1826, 1833, 1840, 1847, 1854, 1861, 1868, 1874, 1880, 1887, 1893, 1900, 1907, 1913, 1919, 1926, 1933, 1940, 1947, 1952, 1958, 1965, 1971, 1980, 1988, 1996, and 2004; VH1 is a first immunoglobulin heavy chain variable region that specifically binds to (i) a tumor-associated antigen (TAA), (ii) an infectious disease antigen that is not a sarbecovirus antigen, or (iii) an other-pathology antigen, comprising an amino acid sequence at least 65%, at least 70%, at least 75%, at least 80%, at least 85%, at least 90%, at least 95%, at least 99%, or 100% identical to any one of SEQ ID NOs: 1102, 1109, 1116, 1119, 1126, 1133, 1140, 1147, 1154, 1161, 1168, 1173, 1180, 1187, 1194, 1198, 1206, 1210, 1218, 1220, 1227, 1234, 1241, 1246, 1253, 1260, 1265, 1270, 1277, 1284, 1291, 1298, 1305, 1312, 1318, 1325, 1332, 1338, 1345, 1351, 1358, 1365, 1372, 1379, 1381, 1388, 1393, 1400, 1407, 1413, 1420, 1427, 1434, 1440, 1447, 1454, 1460, 1467, 1474, 1481, 1487, 1494, 1501, 1507, 1512, 1518, 1525, 1530, 1537, 1543, 1550, 1555, 1561, 1567, 1573, 1580, 1587, 1593, 1600, 1607, 1614, 1621, 1628, 1635, 1642, 1649, 1656, 1662, 1668, 1671, 1678, 1686, 1696, 1704, 1714, 1722, 1726, 1734, 1742, 1750, 1759, 1760, 1765, 1768, 1775, 1783, 1785, 1792, 1797, 1804, 1809, 1816, 1823, 1830, 1837, 1844, 1851, 1858, 1865, 1871, 1877, 1884, 1890, 1897, 1904, 1910, 1916, 1923, 1930, 1937, 1944, 1950, 1956, 1962, 1969, 1974, 1984, 1992, 2000, and 2008; VH2 is a second immunoglobulin heavy chain variable region that specifically binds to (i) a tumor-associated antigen (TAA), (ii) an infectious disease antigen that is not a sarbecovirus antigen, or (iii) an other-pathology antigen, comprising an amino acid sequence at least 65%, at least 70%, at least 75%, at least 80%, at least 85%, at least 90%, at least 95%, at least 99%, or 100% identical to any one of SEQ ID NOs: 1102, 1109, 1116, 1119, 1126, 1133, 1140, 1147, 1154, 1161, 1168, 1173, 1180, 1187, 1194, 1198, 1206, 1210, 1218, 1220, 1227, 1234, 1241, 1246, 1253, 1260, 1265, 1270, 1277, 1284, 1291, 1298, 1305, 1312, 1318, 1325, 1332, 1338, 1345, 1351, 1358, 1365, 1372, 1379, 1381, 1388, 1393, 1400, 1407, 1413, 1420, 1427, 1434, 1440, 1447, 1454, 1460, 1467, 1474, 1481, 1487, 1494, 1501, 1507, 1512, 1518, 1525, 1530, 1537, 1543, 1550, 1555, 1561, 1567, 1573, 1580, 1587, 1593, 1600, 1607, 1614, 1621, 1628, 1635, 1642, 1649, 1656, 1662, 1668, 1671, 1678, 1686, 1696, 1704, 1714, 1722, 1726, 1734, 1742, 1750, 1759, 1760, 1765, 1768, 1775, 1783, 1785, 1792, 1797, 1804, 1809, 1816, 1823, 1830, 1837, 1844, 1851, 1858, 1865, 1871, 1877, 1884, 1890, 1897, 1904, 1910, 1916, 1923, 1930, 1937, 1944, 1950, 1956, 1962, 1969, 1974, 1984, 1992, 2000, and 2008; VH3 is a third immunoglobulin heavy chain variable region that specifically binds to (i) a tumor-associated antigen (TAA), (ii) an infectious disease antigen that is not a sarbecovirus antigen, or (iii) an other-pathology antigen, comprising an amino acid sequence at least 65%, at least 70%, at least 75%, at least 80%, at least 85%, at least 90%, at least 95%, at least 99%, or 100% identical to any one of SEQ ID NOs: 1102, 1109, 1116, 1119, 1126, 1133, 1140, 1147, 1154, 1161, 1168, 1173, 1180, 1187, 1194, 1198, 1206, 1210, 1218, 1220, 1227, 1234, 1241, 1246, 1253, 1260, 1265, 1270, 1277, 1284, 1291, 1298, 1305, 1312, 1318, 1325, 1332, 1338, 1345, 1351, 1358, 1365, 1372, 1379, 1381, 1388, 1393, 1400, 1407, 1413, 1420, 1427, 1434, 1440, 1447, 1454, 1460, 1467, 1474, 1481, 1487, 1494, 1501, 1507, 1512, 1518, 1525, 1530, 1537, 1543, 1550, 1555, 1561, 1567, 1573, 1580, 1587, 1593, 1600, 1607, 1614, 1621, 1628, 1635, 1642, 1649, 1656, 1662, 1668, 1671, 1678, 1686, 1696, 1704, 1714, 1722, 1726, 1734, 1742, 1750, 1759, 1760, 1765, 1768, 1775, 1783, 1785, 1792, 1797, 1804, 1809, 1816, 1823, 1830, 1837, 1844, 1851, 1858, 1865, 1871, 1877, 1884, 1890, 1897, 1904, 1910, 1916, 1923, 1930, 1937, 1944, 1950, 1956, 1962, 1969, 1974, 1984, 1992, 2000, and 2008; and VH4 is a fourth immunoglobulin heavy chain variable region that specifically binds to (i) a tumor-associated antigen (TAA), (ii) an infectious disease antigen that is not a sarbecovirus antigen, or (iii) an other-pathology antigen, comprising an amino acid sequence at least 65%, at least 70%, at least 75%, at least 80%, at least 85%, at least 90%, at least 95%, at least 99%, or 100% identical to any one of SEQ ID NOs: 1102, 1109, 1116, 1119, 1126, 1133, 1140, 1147, 1154, 1161, 1168, 1173, 1180, 1187, 1194, 1198, 1206, 1210, 1218, 1220, 1227, 1234, 1241, 1246, 1253, 1260, 1265, 1270, 1277, 1284, 1291, 1298, 1305, 1312, 1318, 1325, 1332, 1338, 1345, 1351, 1358, 1365, 1372, 1379, 1381, 1388, 1393, 1400, 1407, 1413, 1420, 1427, 1434, 1440, 1447, 1454, 1460, 1467, 1474, 1481, 1487, 1494, 1501, 1507, 1512, 1518, 1525, 1530, 1537, 1543, 1550, 1555, 1561, 1567, 1573, 1580, 1587, 1593, 1600, 1607, 1614, 1621, 1628, 1635, 1642, 1649, 1656, 1662, 1668, 1671, 1678, 1686, 1696, 1704, 1714, 1722, 1726, 1734, 1742, 1750, 1759, 1760, 1765, 1768, 1775, 1783, 1785, 1792, 1797, 1804, 1809, 1816, 1823, 1830, 1837, 1844, 1851, 1858, 1865, 1871, 1877, 1884, 1890, 1897, 1904, 1910, 1916, 1923, 1930, 1937, 1944, 1950, 1956, 1962, 1969, 1974, 1984, 1992, 2000, and 2008; Fc is a region comprising an immunoglobulin heavy chain constant region 2 (CH2), an immunoglobulin heavy chain constant region 3 (CH3), and optionally, an immunoglobulin hinge; and L1-L8 are optional amino acid linkers.

[0629] In some aspects, the antigen binding polypeptide complex comprises a first polypeptide and a second polypeptide; wherein the first polypeptide has a structure represented by: VL1-L1-VL2-L2-VH2-L3-VH1-L4-Fc; or VH1-L1-VH2-L2-VL2-L3-VL1-L4-Fc; wherein the second polypeptide has a structure represented by: VL3-L5-VL4-L6-VH4-L7-VH3-L8-Fc; or VH3-L5-VH4-L6-VL4-L7-VL3-L8-Fc; wherein: VL1 is a first immunoglobulin light chain variable region that specifically binds to (i) a tumor-associated antigen (TAA), (ii) an infectious disease antigen that is not a sarbecovirus antigen, or (iii) an other-pathology antigen, and which comprises a light chain complementary determining region (LCDR) 1 comprising an amino acid sequence at least 65%, at least 70%, at least 75%, at least 80%, at least 85%, at least 90%, at least 95%, at least 99%, or 100% identical to any one of SEQ ID NOs: 1096, 1103, 1110, 1120, 1127, 1134, 1141, 1148, 1155, 1162, 1169, 1174, 1181, 1188, 1199, 1211, 1221, 1228, 1235, 1247, 1254, 1261, 1266, 1271, 1278, 1285, 1292, 1299, 1306, 1313, 1319, 1326, 1339, 1352, 1359, 1366, 1373, 1382, 1394, 1401, 1408, 1414, 1421, 1428, 1441, 1448, 1455, 1461, 1468, 1475, 1488, 1495, 1508, 1519, 1526, 1531, 1538, 1544, 1556, 1568, 1574, 1581, 1594, 1601, 1608, 1615, 1622, 1629, 1636, 1643, 1650, 1657, 1672, 1679, 1689, 1697, 1708, 1715, 1718, 1723, 1727, 1738, 1743, 1752, 1761, 1763, 1769, 1776, 1786, 1793, 1798, 1810, 1817, 1824, 1831, 1838, 1845, 1852, 1859, 1866, 1872, 1878, 1885, 1891, 1898, 1905, 1911, 1917, 1924, 1931, 1938, 1945, 1963, 1977, 1985, 1993, and 2001; a LCDR2 comprising an amino acid sequence at least 65%, at least 70%, at least 75%, at least 80%, at least 85%, at least 90%, at least 95%, at least 99%, or 100% identical to any one of amino acid sequences AAS, APS, AT, ATS, AVS, DAS, DDG, DDS, DNN, DT, DTS, DVS, EAS, EDN, EVS, FTS, GAF, GAN, GAS, GAT, GIS, GKN, GNG, GNS, HTS, KAS, KVS, LAS, LGS, LVS, NAK, NTD, NTN, QMS, RMS, RTS, SAS, STS, TTS, WAS, YAS, YAT, YGS, YRS, and YTS, or at least 65%, at least 70%, at least 75%, at least 80%, at least 85%, at least 90%, at least 95%, at least 99%, or 100% identical to any one of SEQ ID NOs: 1200, 1212, 1680, 1690, 1698, 1709, 1728, 1739, 1744, 1753, 1770, 1777, 1978, 1986, 1994, and 2002; and a LCDR3 comprising an amino acid sequence at least 65%, at least 70%, at least 75%, at least 80%, at least 85%, at least 90%, at least 95%, at least 99%, or 100% identical to any one of SEQ ID NOs: 1097, 1104, 1111, 1121, 1128, 1135, 1142, 1149, 1156, 1163, 1170, 1175, 1182, 1189, 1195, 1201, 1207, 1213, 1222, 1229, 1236, 2009, 1248, 1255, 1262, 1267, 1272, 1279, 1286, 1293, 1300, 1307, 1320, 1327, 1333, 1340, 1346, 1353, 1360, 1367, 1374, 1383, 1389, 1395, 1402, 1409, 1415, 1422, 1429, 1435, 1442, 1449, 1456, 1462, 1469, 1476, 1482, 1489, 1496, 1502, 1509, 1513, 1520, 1532, 1539, 1545, 1557, 1562, 1569, 1575, 1582, 1588, 1595, 1602, 1609, 1616, 1623, 1630, 1637, 1644, 1651, 1658, 1663, 1673, 1681, 1691, 1699, 1710, 1729, 1735, 1745, 1751, 1754, 1778, 1787, 1799, 1805, 1811, 1818, 1825, 1832, 1839, 1846, 1853, 1860, 1867, 1873, 1879, 1886, 1892, 1899, 1906, 1912, 1918, 1925, 1932, 1939, 1946, 1951, 1957, 1964, 1970, 1976, 1979, 1987, 1995, and 2003, or VL1 is a first immunoglobulin light chain variable region that specifically binds to (i) a tumor-associated antigen (TAA), (ii) an infectious disease antigen that is not a sarbecovirus antigen, or (iii) an other-pathology antigen, comprising an amino acid sequence at least 65%, at least 70%, at least 75%, at least 80%, at least 85%, at least 90%, at least 95%, at least 99%, or 100% identical to any one of SEQ ID NOs: 1098, 1105, 1112, 1122, 1129, 1136, 1143, 1150, 1157, 1164, 1171, 1176, 1183, 1190, 1196, 1202, 1208, 1214, 1219, 1223, 1230, 1237, 1242, 1249, 1256, 1263, 1268, 1273, 1280, 1287, 1294, 1301, 1308, 1314, 1321, 1328, 1334, 1341, 1347, 1354, 1361, 1368, 1375, 1380, 1384, 1390, 1396, 1403, 1410, 1416, 1423, 1430, 1436, 1443, 1450, 1457, 1463, 1470, 1477, 1483, 1490, 1497, 1503, 1510, 1514, 1521, 1527, 1533, 1540, 1546, 1551, 1558, 1563, 1570, 1576, 1583, 1589, 1596, 1603, 1610, 1617, 1624, 1631, 1638, 1645, 1652, 1659, 1664, 1669, 1674, 1682, 1692, 1700, 1711, 1721, 1724, 1730, 1740, 1746, 1755, 1764, 1766, 1771, 1779, 1784, 1788, 1794, 1800, 1806, 1812, 1819, 1826, 1833, 1840, 1847, 1854, 1861, 1868, 1874, 1880, 1887, 1893, 1900, 1907, 1913, 1919, 1926, 1933, 1940, 1947, 1952, 1958, 1965, 1971, 1980, 1988, 1996, and 2004; VL2 is a second immunoglobulin light chain variable region that specifically binds to (i) a tumor-associated antigen (TAA), (ii) an infectious disease antigen that is not a sarbecovirus antigen, or (iii) an other-pathology antigen, and which comprises a LCDR1 comprising an amino acid sequence at least 65%, at least 70%, at least 75%, at least 80%, at least 85%, at least 90%, at least 95%, at least 99%, or 100% identical to any one of SEQ ID NOs: 1096, 1103, 1110, 1120, 1127, 1134, 1141, 1148, 1155, 1162, 1169, 1174, 1181, 1188, 1199, 1211, 1221, 1228, 1235, 1247, 1254, 1261, 1266, 1271, 1278, 1285, 1292, 1299, 1306, 1313, 1319, 1326, 1339, 1352, 1359, 1366, 1373, 1382, 1394, 1401, 1408, 1414, 1421, 1428, 1441, 1448, 1455, 1461, 1468, 1475, 1488, 1495, 1508, 1519, 1526, 1531, 1538, 1544, 1556, 1568, 1574, 1581, 1594, 1601, 1608, 1615, 1622, 1629, 1636, 1643, 1650, 1657, 1672, 1679, 1689, 1697, 1708, 1715, 1718, 1723, 1727, 1738, 1743, 1752, 1761, 1763, 1769, 1776, 1786, 1793, 1798, 1810, 1817, 1824, 1831, 1838, 1845, 1852, 1859, 1866, 1872, 1878, 1885, 1891, 1898, 1905, 1911, 1917, 1924, 1931, 1938, 1945, 1963, 1977, 1985, 1993, and 2001; a LCDR2 comprising an amino acid sequence at least 65%, at least 70%, at least 75%, at least 80%, at least 85%, at least 90%, at least 95%, at least 99%, or 100% identical to any one of amino acid sequences AAS, APS, AT, ATS, AVS, DAS, DDG, DDS, DNN, DT, DTS, DVS, EAS, EDN, EVS, FTS, GAF, GAN, GAS, GAT, GIS, GKN, GNG, GNS, HTS, KAS, KVS, LAS, LGS, LVS, NAK, NTD, NTN, QMS, RMS, RTS, SAS, STS, TTS, WAS, YAS, YAT, YGS, YRS, and YTS, or at least 65%, at least 70%, at least 75%, at least 80%, at least 85%, at least 90%, at least 95%, at least 99%, or 100% identical to any one of SEQ ID NOs: 1200, 1212, 1680, 1690, 1698, 1709, 1728, 1739, 1744, 1753, 1770, 1777, 1978, 1986, 1994, and 2002; and a LCDR3 comprising an amino acid sequence at least 65%, at least 70%, at least 75%, at least 80%, at least 85%, at least 90%, at least 95%, at least 99%, or 100% identical to any one of SEQ ID NOs: 1097, 1104, 1111, 1121, 1128, 1135, 1142, 1149, 1156, 1163, 1170, 1175, 1182, 1189, 1195, 1201, 1207, 1213, 1222, 1229, 1236, 2009, 1248, 1255, 1262, 1267, 1272, 1279, 1286, 1293, 1300, 1307, 1320, 1327, 1333, 1340, 1346, 1353, 1360, 1367, 1374, 1383, 1389, 1395, 1402, 1409, 1415, 1422, 1429, 1435, 1442, 1449, 1456, 1462, 1469, 1476, 1482, 1489, 1496, 1502, 1509, 1513, 1520, 1532, 1539, 1545, 1557, 1562, 1569, 1575, 1582, 1588, 1595, 1602, 1609, 1616, 1623, 1630, 1637, 1644, 1651, 1658, 1663, 1673, 1681, 1691, 1699, 1710, 1729, 1735, 1745, 1751, 1754, 1778, 1787, 1799, 1805, 1811, 1818, 1825, 1832, 1839, 1846, 1853, 1860, 1867, 1873, 1879, 1886, 1892, 1899, 1906, 1912, 1918, 1925, 1932, 1939, 1946, 1951, 1957, 1964, 1970, 1976, 1979, 1987, 1995, and 2003, or VL2 is a second light chain variable region that specifically binds to (i) a tumor-associated antigen (TAA), (ii) an infectious disease antigen that is not a sarbecovirus antigen, or (iii) an other-pathology antigen, comprising an amino acid sequence at least 65%, at least 70%, at least 75%, at least 80%, at least 85%, at least 90%, at least 95%, at least 99%, or 100% identical to any one of SEQ ID NOs: 1098, 1105, 1112, 1122, 1129, 1136, 1143, 1150, 1157, 1164, 1171, 1176, 1183, 1190, 1196, 1202, 1208, 1214, 1219, 1223, 1230, 1237, 1242, 1249, 1256, 1263, 1268, 1273, 1280, 1287, 1294, 1301, 1308, 1314, 1321, 1328, 1334, 1341, 1347, 1354, 1361, 1368, 1375, 1380, 1384, 1390, 1396, 1403, 1410, 1416, 1423, 1430, 1436, 1443, 1450, 1457, 1463, 1470, 1477, 1483, 1490, 1497, 1503, 1510, 1514, 1521, 1527, 1533, 1540, 1546, 1551, 1558, 1563, 1570, 1576, 1583, 1589, 1596, 1603, 1610, 1617, 1624, 1631, 1638, 1645, 1652, 1659, 1664, 1669, 1674, 1682, 1692, 1700, 1711, 1721, 1724, 1730, 1740, 1746, 1755, 1764, 1766, 1771, 1779, 1784, 1788, 1794, 1800, 1806, 1812, 1819, 1826, 1833, 1840, 1847, 1854, 1861, 1868, 1874, 1880, 1887, 1893, 1900, 1907, 1913, 1919, 1926, 1933, 1940, 1947, 1952, 1958, 1965, 1971, 1980, 1988, 1996, and 2004; VL3 is a third immunoglobulin light chain variable region that specifically binds to (i) a tumor-associated antigen (TAA), (ii) an infectious disease antigen that is not a sarbecovirus antigen, or (iii) an other-pathology antigen, and which comprises a LCDR1 comprising an amino acid sequence at least 65%, at least 70%, at least 75%, at least 80%, at least 85%, at least 90%, at least 95%, at least 99%, or 100% identical to any one of SEQ ID NOs: 1096, 1103, 1110, 1120, 1127, 1134, 1141, 1148, 1155, 1162, 1169, 1174, 1181, 1188, 1199, 1211, 1221, 1228, 1235, 1247, 1254, 1261, 1266, 1271, 1278, 1285, 1292, 1299, 1306, 1313, 1319, 1326, 1339, 1352, 1359, 1366, 1373, 1382, 1394, 1401, 1408, 1414, 1421, 1428, 1441, 1448, 1455, 1461, 1468, 1475, 1488, 1495, 1508, 1519, 1526, 1531, 1538, 1544, 1556, 1568, 1574, 1581, 1594, 1601, 1608, 1615, 1622, 1629, 1636, 1643, 1650, 1657, 1672, 1679, 1689, 1697, 1708, 1715, 1718, 1723, 1727, 1738, 1743, 1752, 1761, 1763, 1769, 1776, 1786, 1793, 1798, 1810, 1817, 1824, 1831, 1838, 1845, 1852, 1859, 1866, 1872, 1878, 1885, 1891, 1898, 1905, 1911, 1917, 1924, 1931, 1938, 1945, 1963, 1977, 1985, 1993, and 2001; a LCDR2 comprising an amino acid sequence at least 65%, at least 70%, at least 75%, at least 80%, at least 85%, at least 90%, at least 95%, at least 99%, or 100% identical to any one of amino acid sequences AAS, APS, AT, ATS, AVS, DAS, DDG, DDS, DNN, DT, DTS, DVS, EAS, EDN, EVS, FTS, GAF, GAN, GAS, GAT, GIS, GKN, GNG, GNS, HTS, KAS, KVS, LAS, LGS, LVS, NAK, NTD, NTN, QMS, RMS, RTS, SAS, STS, TTS, WAS, YAS, YAT, YGS, YRS, and YTS, or at least 65%, at least 70%, at least 75%, at least 80%, at least 85%, at least 90%, at least 95%, at least 99%, or 100% identical to any one of SEQ ID NOs: 1200, 1212, 1680, 1690, 1698, 1709, 1728, 1739, 1744, 1753, 1770, 1777, 1978, 1986, 1994, and 2002; and a LCDR3 comprising an amino acid sequence at least 65%, at least 70%, at least 75%, at least 80%, at least 85%, at least 90%, at least 95%, at least 99%, or 100% identical to any one of SEQ ID NOs: 1097, 1104, 1111, 1121, 1128, 1135, 1142, 1149, 1156, 1163, 1170, 1175, 1182, 1189, 1195, 1201, 1207, 1213, 1222, 1229, 1236, 2009, 1248, 1255, 1262, 1267, 1272, 1279, 1286, 1293, 1300, 1307, 1320, 1327, 1333, 1340, 1346, 1353, 1360, 1367, 1374, 1383, 1389, 1395, 1402, 1409, 1415, 1422, 1429, 1435, 1442, 1449, 1456, 1462, 1469, 1476, 1482, 1489, 1496, 1502, 1509, 1513, 1520, 1532, 1539, 1545, 1557, 1562, 1569, 1575, 1582, 1588, 1595, 1602, 1609, 1616, 1623, 1630, 1637, 1644, 1651, 1658, 1663, 1673, 1681, 1691, 1699, 1710, 1729, 1735, 1745, 1751, 1754, 1778, 1787, 1799, 1805, 1811, 1818, 1825, 1832, 1839, 1846, 1853, 1860, 1867, 1873, 1879, 1886, 1892, 1899, 1906, 1912, 1918, 1925, 1932, 1939, 1946, 1951, 1957, 1964, 1970, 1976, 1979, 1987, 1995, and 2003, or VL3 is a third immunoglobulin light chain variable region that specifically binds to (i) a tumor-associated antigen (TAA), (ii) an infectious disease antigen that is not a sarbecovirus antigen, or (iii) an other-pathology antigen, comprising an amino acid sequence at least 65%, at least 70%, at least 75%, at least 80%, at least 85%, at least 90%, at least 95%, at least 99%, or 100% identical to any one of SEQ ID NOs: 1098, 1105, 1112, 1122, 1129, 1136, 1143, 1150, 1157, 1164, 1171, 1176, 1183, 1190, 1196, 1202, 1208, 1214, 1219, 1223, 1230, 1237, 1242, 1249, 1256, 1263, 1268, 1273, 1280, 1287, 1294, 1301, 1308, 1314, 1321, 1328, 1334, 1341, 1347, 1354, 1361, 1368, 1375, 1380, 1384, 1390, 1396, 1403, 1410, 1416, 1423, 1430, 1436, 1443, 1450, 1457, 1463, 1470, 1477, 1483, 1490, 1497, 1503, 1510, 1514, 1521, 1527, 1533, 1540, 1546, 1551, 1558, 1563, 1570, 1576, 1583, 1589, 1596, 1603, 1610, 1617, 1624, 1631, 1638, 1645, 1652, 1659, 1664, 1669, 1674, 1682, 1692, 1700, 1711, 1721, 1724, 1730, 1740, 1746, 1755, 1764, 1766, 1771, 1779, 1784, 1788, 1794, 1800, 1806, 1812, 1819, 1826, 1833, 1840, 1847, 1854, 1861, 1868, 1874, 1880, 1887, 1893, 1900, 1907, 1913, 1919, 1926, 1933, 1940, 1947, 1952, 1958, 1965, 1971, 1980, 1988, 1996, and 2004; VL4 is a fourth immunoglobulin light chain variable region that specifically binds to (i) a tumor-associated antigen (TAA), (ii) an infectious disease antigen that is not a sarbecovirus antigen, or (iii) an other-pathology antigen and which comprises a LCDR1 comprising an amino acid sequence at least 65%, at least 70%, at least 75%, at least 80%, at least 85%, at least 90%, at least 95%, at least 99%, or 100% identical to any one of SEQ ID NOs: 1096, 1103, 1110, 1120, 1127, 1134, 1141, 1148, 1155, 1162, 1169, 1174, 1181, 1188, 1199, 1211, 1221, 1228, 1235, 1247, 1254, 1261, 1266, 1271, 1278, 1285, 1292, 1299, 1306, 1313, 1319, 1326, 1339, 1352, 1359, 1366, 1373, 1382, 1394, 1401, 1408, 1414, 1421, 1428, 1441, 1448, 1455, 1461, 1468, 1475, 1488, 1495, 1508, 1519, 1526, 1531, 1538, 1544, 1556, 1568, 1574, 1581, 1594, 1601, 1608, 1615, 1622, 1629, 1636, 1643, 1650, 1657, 1672, 1679, 1689, 1697, 1708, 1715, 1718, 1723, 1727, 1738, 1743, 1752, 1761, 1763, 1769, 1776, 1786, 1793, 1798, 1810, 1817, 1824, 1831, 1838, 1845, 1852, 1859, 1866, 1872, 1878, 1885, 1891, 1898, 1905, 1911, 1917, 1924, 1931, 1938, 1945, 1963, 1977, 1985, 1993, and 2001; a LCDR2 comprising an amino acid sequence at least 65%, at least 70%, at least 75%, at least 80%, at least 85%, at least 90%, at least 95%, at least 99%, or 100% identical to any one of amino acid sequences AAS, APS, AT, ATS, AVS, DAS, DDG, DDS, DNN, DT, DTS, DVS, EAS, EDN, EVS, FTS, GAF, GAN, GAS, GAT, GIS, GKN, GNG, GNS, HTS, KAS, KVS, LAS, LGS, LVS, NAK, NTD, NTN, QMS, RMS, RTS, SAS, STS, TTS, WAS, YAS, YAT, YGS, YRS, and YTS, or at least 65%, at least 70%, at least 75%, at least 80%, at least 85%, at least 90%, at least 95%, at least 99%, or 100% identical to any one of SEQ ID NOs: 1200, 1212, 1680, 1690, 1698, 1709, 1728, 1739, 1744, 1753, 1770, 1777, 1978, 1986, 1994, and 2002; and a LCDR3 comprising an amino acid sequence at least 65%, at least 70%, at least 75%, at least 80%, at least 85%, at least 90%, at least 95%, at least 99%, or 100% identical to any one of SEQ ID NOs: 1097, 1104, 1111, 1121, 1128, 1135, 1142, 1149, 1156, 1163, 1170, 1175, 1182, 1189, 1195, 1201, 1207, 1213, 1222, 1229, 1236, 2009, 1248, 1255, 1262, 1267, 1272, 1279, 1286, 1293, 1300, 1307, 1320, 1327, 1333, 1340, 1346, 1353, 1360, 1367, 1374, 1383, 1389, 1395, 1402, 1409, 1415, 1422, 1429, 1435, 1442, 1449, 1456, 1462, 1469, 1476, 1482, 1489, 1496, 1502, 1509, 1513, 1520, 1532, 1539, 1545, 1557, 1562, 1569, 1575, 1582, 1588, 1595, 1602, 1609, 1616, 1623, 1630, 1637, 1644, 1651, 1658, 1663, 1673, 1681, 1691, 1699, 1710, 1729, 1735, 1745, 1751, 1754, 1778, 1787, 1799, 1805, 1811, 1818, 1825, 1832, 1839, 1846, 1853, 1860, 1867, 1873, 1879, 1886, 1892, 1899, 1906, 1912, 1918, 1925, 1932, 1939, 1946, 1951, 1957, 1964, 1970, 1976, 1979, 1987, 1995, and 2003, or VL4 is a fourth immunoglobulin light chain variable region that specifically binds to (i) a tumor-associated antigen (TAA), (ii) an infectious disease antigen that is not a sarbecovirus antigen, or (iii) an other-pathology antigen, comprising an amino acid sequence at least 65%, at least 70%, at least 75%, at least 80%, at least 85%, at least 90%, at least 95%, at least 99%, or 100% identical to any one of SEQ ID NOs: 1098, 1105, 1112, 1122, 1129, 1136, 1143, 1150, 1157, 1164, 1171, 1176, 1183, 1190, 1196, 1202, 1208, 1214, 1219, 1223, 1230, 1237, 1242, 1249, 1256, 1263, 1268, 1273, 1280, 1287, 1294, 1301, 1308, 1314, 1321, 1328, 1334, 1341, 1347, 1354, 1361, 1368, 1375, 1380, 1384, 1390, 1396, 1403, 1410, 1416, 1423, 1430, 1436, 1443, 1450, 1457, 1463, 1470, 1477, 1483, 1490, 1497, 1503, 1510, 1514, 1521, 1527, 1533, 1540, 1546, 1551, 1558, 1563, 1570, 1576, 1583, 1589, 1596, 1603, 1610, 1617, 1624, 1631, 1638, 1645, 1652, 1659, 1664, 1669, 1674, 1682, 1692, 1700, 1711, 1721, 1724, 1730, 1740, 1746, 1755, 1764, 1766, 1771, 1779, 1784, 1788, 1794, 1800, 1806, 1812, 1819, 1826, 1833, 1840, 1847, 1854, 1861, 1868, 1874, 1880, 1887, 1893, 1900, 1907, 1913, 1919, 1926, 1933, 1940, 1947, 1952, 1958, 1965, 1971, 1980, 1988, 1996, and 2004; VH1 is a first immunoglobulin heavy chain variable region that specifically binds to (i) a tumor-associated antigen (TAA), (ii) an infectious disease antigen that is not a sarbecovirus antigen, or (iii) an other-pathology antigen, and which comprises a heavy chain complementary determining region (HCDR) 1 comprising an amino acid sequence at least 65%, at least 70%, at least 75%, at least 80%, at least 85%, at least 90%, at least 95%, at least 99%, or 100% identical to any one of SEQ ID NOs: 1099, 1106, 1113, 1117, 1123, 1130, 1137, 1144, 1151, 1158, 1165, 1177, 1184, 1191, 1203, 1215, 1224, 1231, 1238, 1243, 1250, 1257, 1264, 1274, 1281, 1288, 1295, 1302, 1309, 1315, 1322, 1329, 1335, 1342, 1348, 1355, 1362, 1369, 1376, 1385, 1397, 1404, 1417, 1424, 1431, 1437, 1444, 1451, 1458, 1464, 1471, 1478, 1484, 1491, 1498, 1504, 1511, 1515, 1522, 1534, 1547, 1552, 1564, 1577, 1584, 1590, 1597, 1604, 1611, 1618, 1625, 1632, 1639, 1646, 1653, 1660, 1665, 1675, 1683, 1693, 1701, 1705, 1716, 1719, 1731, 1736, 1747, 1756, 1772, 1780, 1789, 1795, 1801, 1813, 1820, 1827, 1834, 1841, 1848, 1855, 1862, 1881, 1894, 1901, 1920, 1927, 1934, 1941, 1953, 1959, 1966, 1981, 1989, 1997, and 2005; a HCDR2 comprising an amino acid sequence at least 65%, at least 70%, at least 75%, at least 80%, at least 85%, at least 90%, at least 95%, at least 99%, or 100% identical to any one of SEQ ID NOs: 1100, 1107, 1114, 1118, 1124, 1131, 1138, 1145, 1152, 1159, 1166, 1178, 1185, 1192, 1204, 1216, 1225, 1232, 1239, 1244, 1251, 1258, 1275, 1282, 1289, 1296, 1303, 1310, 1316, 1323, 1330, 1336, 1343, 1349, 1356, 1363, 1370, 1377, 1386, 1391, 1398, 1405, 1411, 1418, 1425, 1432, 1438, 1445, 1452, 1465, 1472, 1479, 1485, 1492, 1499, 1505, 1516, 1523, 1528, 1535, 1541, 1548, 1553, 1559, 1565, 1571, 1578, 1585, 1591, 1598, 1605, 1612, 1619, 1626, 1633, 1640, 1647, 1654, 1666, 1676, 1684, 1687, 1694, 1702, 1706, 1712, 1717, 1720, 1725, 1732, 1737, 1741, 1748, 1757, 1767, 1773, 1781, 1790, 1802, 1807, 1814, 1821, 1828, 1835, 1842, 1849, 1856, 1863, 1869, 1875, 1882, 1888, 1895, 1902, 1908, 1914, 1921, 1928, 1935, 1942, 1948, 1954, 1960, 1967, 1972, 1982, 1990, 1998, and 2006; and a HCDR3 comprising an amino acid sequence at least 65%, at least 70%, at least 75%, at least 80%, at least 85%, at least 90%, at least 95%, at least 99%, or 100% identical to any one of SEQ ID NOs: 1101, 1108, 1115, 1125, 1132, 1139, 1146, 1153, 1160, 1167, 1172, 1179, 1186, 1193, 1197, 1205, 1209, 1217, 1226, 1233, 1240, 1245, 1252, 1259, 1269, 1276, 1283, 1290, 1297, 1304, 1311, 1317, 1324, 1331, 1337, 1344, 1350, 1357, 1364, 1371, 1378, 1387, 1392, 1399, 1406, 1412, 1419, 1426, 1433, 1439, 1446, 1453, 1459, 1466, 1473, 1480, 1486, 1493, 1500, 1506, 1517, 1524, 1529, 1536, 1542, 1549, 1554, 1560, 1566, 1572, 1579, 1586, 1592, 1599, 1606, 1613, 1620, 1627, 1634, 1641, 1648, 1655, 1661, 1667, 1670, 1677, 1685, 1688, 1695, 1703, 1707, 1713, 1733, 1749, 1758, 1762, 1774, 1782, 1791, 1796, 1803, 1808, 1815, 1822, 1829, 1836, 1843, 1850, 1857, 1864, 1870, 1876, 1883, 1889, 1896, 1903, 1909, 1915, 1922, 1929, 1936, 1943, 1949, 1955, 1961, 1968, 1973, 1975, 1983, 1991, 1999, and 2007, or VH1 is a first immunoglobulin heavy chain variable region that specifically binds to (i) a tumor-associated antigen (TAA), (ii) an infectious disease antigen that is not a sarbecovirus antigen, or (iii) an other-pathology antigen, comprising an amino acid sequence at least 65%, at least 70%, at least 75%, at least 80%, at least 85%, at least 90%, at least 95%, at least 99%, or 100% identical to any one of SEQ ID NOs: 1102, 1109, 1116, 1119, 1126, 1133, 1140, 1147, 1154, 1161, 1168, 1173, 1180, 1187, 1194, 1198, 1206, 1210, 1218, 1220, 1227, 1234, 1241, 1246, 1253, 1260, 1265, 1270, 1277, 1284, 1291, 1298, 1305, 1312, 1318, 1325, 1332, 1338, 1345, 1351, 1358, 1365, 1372, 1379, 1381, 1388, 1393, 1400, 1407, 1413, 1420, 1427, 1434, 1440, 1447, 1454, 1460, 1467, 1474, 1481, 1487, 1494, 1501, 1507, 1512, 1518, 1525, 1530, 1537, 1543, 1550, 1555, 1561, 1567, 1573, 1580, 1587, 1593, 1600, 1607, 1614, 1621, 1628, 1635, 1642, 1649, 1656, 1662, 1668, 1671, 1678, 1686, 1696, 1704, 1714, 1722, 1726, 1734, 1742, 1750, 1759, 1760, 1765, 1768, 1775, 1783, 1785, 1792, 1797, 1804, 1809, 1816, 1823, 1830, 1837, 1844, 1851, 1858, 1865, 1871, 1877, 1884, 1890, 1897, 1904, 1910, 1916, 1923, 1930, 1937, 1944, 1950, 1956, 1962, 1969, 1974, 1984, 1992, 2000, and 2008; VH2 is a second immunoglobulin heavy chain variable region that specifically binds to (i) a tumor-associated antigen (TAA), (ii) an infectious disease antigen that is not a sarbecovirus antigen, or (iii) an other-pathology antigen, and which comprises a HCDR1 comprising an amino acid sequence at least 65%, at least 70%, at least 75%, at least 80%, at least 85%, at least 90%, at least 95%, at least 99%, or 100% identical to any one of SEQ ID NOs: 1099, 1106, 1113, 1117, 1123, 1130, 1137, 1144, 1151, 1158, 1165, 1177, 1184, 1191, 1203, 1215, 1224, 1231, 1238, 1243, 1250, 1257, 1264, 1274, 1281, 1288, 1295, 1302, 1309, 1315, 1322, 1329, 1335, 1342, 1348, 1355, 1362, 1369, 1376, 1385, 1397, 1404, 1417, 1424, 1431, 1437, 1444, 1451, 1458, 1464, 1471, 1478, 1484, 1491, 1498, 1504, 1511, 1515, 1522, 1534, 1547, 1552, 1564, 1577, 1584, 1590, 1597, 1604, 1611, 1618, 1625, 1632, 1639, 1646, 1653, 1660, 1665, 1675, 1683, 1693, 1701, 1705, 1716, 1719, 1731, 1736, 1747, 1756, 1772, 1780, 1789, 1795, 1801, 1813, 1820, 1827, 1834, 1841, 1848, 1855, 1862, 1881, 1894, 1901, 1920, 1927, 1934, 1941, 1953, 1959, 1966, 1981, 1989, 1997, and 2005; a HCDR2 comprising an amino acid sequence at least 65%, at least 70%, at least 75%, at least 80%, at least 85%, at least 90%, at least 95%, at least 99%, or 100% identical to any one of SEQ ID NOs: 1100, 1107, 1114, 1118, 1124, 1131, 1138, 1145, 1152, 1159, 1166, 1178, 1185, 1192, 1204, 1216, 1225, 1232, 1239, 1244, 1251, 1258, 1275, 1282, 1289, 1296, 1303, 1310, 1316, 1323, 1330, 1336, 1343, 1349, 1356, 1363, 1370, 1377, 1386, 1391, 1398, 1405, 1411, 1418, 1425, 1432, 1438, 1445, 1452, 1465, 1472, 1479, 1485, 1492, 1499, 1505, 1516, 1523, 1528, 1535, 1541, 1548, 1553, 1559, 1565, 1571, 1578, 1585, 1591, 1598, 1605, 1612, 1619, 1626, 1633, 1640, 1647, 1654, 1666, 1676, 1684, 1687, 1694, 1702, 1706, 1712, 1717, 1720, 1725, 1732, 1737, 1741, 1748, 1757, 1767, 1773, 1781, 1790, 1802, 1807, 1814, 1821, 1828, 1835, 1842, 1849, 1856, 1863, 1869, 1875, 1882, 1888, 1895, 1902, 1908, 1914, 1921, 1928, 1935, 1942, 1948, 1954, 1960, 1967, 1972, 1982, 1990, 1998, and 2006; and a HCDR3 comprising an amino acid sequence at least 65%, at least 70%, at least 75%, at least 80%, at least 85%, at least 90%, at least 95%, at least 99%, or 100% identical to any one of SEQ ID NOs: 1101, 1108, 1115, 1125, 1132, 1139, 1146, 1153, 1160, 1167, 1172, 1179, 1186, 1193, 1197, 1205, 1209, 1217, 1226, 1233, 1240, 1245, 1252, 1259, 1269, 1276, 1283, 1290, 1297, 1304, 1311, 1317, 1324, 1331, 1337, 1344, 1350, 1357, 1364, 1371, 1378, 1387, 1392, 1399, 1406, 1412, 1419, 1426, 1433, 1439, 1446, 1453, 1459, 1466, 1473, 1480, 1486, 1493, 1500, 1506, 1517, 1524, 1529, 1536, 1542, 1549, 1554, 1560, 1566, 1572, 1579, 1586, 1592, 1599, 1606, 1613, 1620, 1627, 1634, 1641, 1648, 1655, 1661, 1667, 1670, 1677, 1685, 1688, 1695, 1703, 1707, 1713, 1733, 1749, 1758, 1762, 1774, 1782, 1791, 1796, 1803, 1808, 1815, 1822, 1829, 1836, 1843, 1850, 1857, 1864, 1870, 1876, 1883, 1889, 1896, 1903, 1909, 1915, 1922, 1929, 1936, 1943, 1949, 1955, 1961, 1968, 1973, 1975, 1983, 1991, 1999, and 2007, or VH2 is a second immunoglobulin heavy chain variable region that specifically binds to (i) a tumor-associated antigen (TAA), (ii) an infectious disease antigen that is not a sarbecovirus antigen, or (iii) an other-pathology antigen, comprising an amino acid sequence at least 65%, at least 70%, at least 75%, at least 80%, at least 85%, at least 90%, at least 95%, at least 99%, or 100% identical to any one of SEQ ID NOs: 1102, 1109, 1116, 1119, 1126, 1133, 1140, 1147, 1154, 1161, 1168, 1173, 1180, 1187, 1194, 1198, 1206, 1210, 1218, 1220, 1227, 1234, 1241, 1246, 1253, 1260, 1265, 1270, 1277, 1284, 1291, 1298, 1305, 1312, 1318, 1325, 1332, 1338, 1345, 1351, 1358, 1365, 1372, 1379, 1381, 1388, 1393, 1400, 1407, 1413, 1420, 1427, 1434, 1440, 1447, 1454, 1460, 1467, 1474, 1481, 1487, 1494, 1501, 1507, 1512, 1518, 1525, 1530, 1537, 1543, 1550, 1555, 1561, 1567, 1573, 1580, 1587, 1593, 1600, 1607, 1614, 1621, 1628, 1635, 1642, 1649, 1656, 1662, 1668, 1671, 1678, 1686, 1696, 1704, 1714, 1722, 1726, 1734, 1742, 1750, 1759, 1760, 1765, 1768, 1775, 1783, 1785, 1792, 1797, 1804, 1809, 1816, 1823, 1830, 1837, 1844, 1851, 1858, 1865, 1871, 1877, 1884, 1890, 1897, 1904, 1910, 1916, 1923, 1930, 1937, 1944, 1950, 1956, 1962, 1969, 1974, 1984, 1992, 2000, and 2008; VH3 is a third immunoglobulin heavy chain variable region that specifically binds to (i) a tumor-associated antigen (TAA), (ii) an infectious disease antigen that is not a sarbecovirus antigen, or (iii) an other-pathology antigen, and which comprises a HCDR1 comprising an amino acid sequence at least 65%, at least 70%, at least 75%, at least 80%, at least 85%, at least 90%, at least 95%, at least 99%, or 100% identical to any one of SEQ ID NOs: 1099, 1106, 1113, 1117, 1123, 1130, 1137, 1144, 1151, 1158, 1165, 1177, 1184, 1191, 1203, 1215, 1224, 1231, 1238, 1243, 1250, 1257, 1264, 1274, 1281, 1288, 1295, 1302, 1309, 1315, 1322, 1329, 1335, 1342, 1348, 1355, 1362, 1369, 1376, 1385, 1397, 1404, 1417, 1424, 1431, 1437, 1444, 1451, 1458, 1464, 1471, 1478, 1484, 1491, 1498, 1504, 1511, 1515, 1522, 1534, 1547, 1552, 1564, 1577, 1584, 1590, 1597, 1604, 1611, 1618, 1625, 1632, 1639, 1646, 1653, 1660, 1665, 1675, 1683, 1693, 1701, 1705, 1716, 1719, 1731, 1736, 1747, 1756, 1772, 1780, 1789, 1795, 1801, 1813, 1820, 1827, 1834, 1841, 1848, 1855, 1862, 1881, 1894, 1901, 1920, 1927, 1934, 1941, 1953, 1959, 1966, 1981, 1989, 1997, and 2005; a HCDR2 comprising an amino acid sequence at least 65%, at least 70%, at least 75%, at least 80%, at least 85%, at least 90%, at least 95%, at least 99%, or 100% identical to any one of SEQ ID NOs: 1100, 1107, 1114, 1118, 1124, 1131, 1138, 1145, 1152, 1159, 1166, 1178, 1185, 1192, 1204, 1216, 1225, 1232, 1239, 1244, 1251, 1258, 1275, 1282, 1289, 1296, 1303, 1310, 1316, 1323, 1330, 1336, 1343, 1349, 1356, 1363, 1370, 1377, 1386, 1391, 1398, 1405, 1411, 1418, 1425, 1432, 1438, 1445, 1452, 1465, 1472, 1479, 1485, 1492, 1499, 1505, 1516, 1523, 1528, 1535, 1541, 1548, 1553, 1559, 1565, 1571, 1578, 1585, 1591, 1598, 1605, 1612, 1619, 1626, 1633, 1640, 1647, 1654, 1666, 1676, 1684, 1687, 1694, 1702, 1706, 1712, 1717, 1720, 1725, 1732, 1737, 1741, 1748, 1757, 1767, 1773, 1781, 1790, 1802, 1807, 1814, 1821, 1828, 1835, 1842, 1849, 1856, 1863, 1869, 1875, 1882, 1888, 1895, 1902, 1908, 1914, 1921, 1928, 1935, 1942, 1948, 1954, 1960, 1967, 1972, 1982, 1990, 1998, and 2006; and a HCDR3 comprising an amino acid sequence at least 65%, at least 70%, at least 75%, at least 80%, at least 85%, at least 90%, at least 95%, at least 99%, or 100% identical to any one of SEQ ID NOs: 1101, 1108, 1115, 1125, 1132, 1139, 1146, 1153, 1160, 1167, 1172, 1179, 1186, 1193, 1197, 1205, 1209, 1217, 1226, 1233, 1240, 1245, 1252, 1259, 1269, 1276, 1283, 1290, 1297, 1304, 1311, 1317, 1324, 1331, 1337, 1344, 1350, 1357, 1364, 1371, 1378, 1387, 1392, 1399, 1406, 1412, 1419, 1426, 1433, 1439, 1446, 1453, 1459, 1466, 1473, 1480, 1486, 1493, 1500, 1506, 1517, 1524, 1529, 1536, 1542, 1549, 1554, 1560, 1566, 1572, 1579, 1586, 1592, 1599, 1606, 1613, 1620, 1627, 1634, 1641, 1648, 1655, 1661, 1667, 1670, 1677, 1685, 1688, 1695, 1703, 1707, 1713, 1733, 1749, 1758, 1762, 1774, 1782, 1791, 1796, 1803, 1808, 1815, 1822, 1829, 1836, 1843, 1850, 1857, 1864, 1870, 1876, 1883, 1889, 1896, 1903, 1909, 1915, 1922, 1929, 1936, 1943, 1949, 1955, 1961, 1968, 1973, 1975, 1983, 1991, 1999, and 2007, or VH3 is a third immunoglobulin heavy chain variable region that specifically binds to (i) a tumor-associated antigen (TAA), (ii) an infectious disease antigen that is not a sarbecovirus antigen, or (iii) an other-pathology antigen, comprising an amino acid sequence at least 65%, at least 70%, at least 75%, at least 80%, at least 85%, at least 90%, at least 95%, at least 99%, or 100% identical to any one of SEQ ID NOs: 1102, 1109, 1116, 1119, 1126, 1133, 1140, 1147, 1154, 1161, 1168, 1173, 1180, 1187, 1194, 1198, 1206, 1210, 1218, 1220, 1227, 1234, 1241, 1246, 1253, 1260, 1265, 1270, 1277, 1284, 1291, 1298, 1305, 1312, 1318, 1325, 1332, 1338, 1345, 1351, 1358, 1365, 1372, 1379, 1381, 1388, 1393, 1400, 1407, 1413, 1420, 1427, 1434, 1440, 1447, 1454, 1460, 1467, 1474, 1481, 1487, 1494, 1501, 1507, 1512, 1518, 1525, 1530, 1537, 1543, 1550, 1555, 1561, 1567, 1573, 1580, 1587, 1593, 1600, 1607, 1614, 1621, 1628, 1635, 1642, 1649, 1656, 1662, 1668, 1671, 1678, 1686, 1696, 1704, 1714, 1722, 1726, 1734, 1742, 1750, 1759, 1760, 1765, 1768, 1775, 1783, 1785, 1792, 1797, 1804, 1809, 1816, 1823, 1830, 1837, 1844, 1851, 1858, 1865, 1871, 1877, 1884, 1890, 1897, 1904, 1910, 1916, 1923, 1930, 1937, 1944, 1950, 1956, 1962, 1969, 1974, 1984, 1992, 2000, and 2008; and VH4 is a fourth immunoglobulin heavy chain variable region that specifically binds to (i) a tumor-associated antigen (TAA), (ii) an infectious disease antigen that is not a sarbecovirus antigen, or (iii) an other-pathology antigen, and which comprises a HCDR1 comprising an amino acid sequence at least 65%, at least 70%, at least 75%, at least 80%, at least 85%, at least 90%, at least 95%, at least 99%, or 100% identical to any one of SEQ ID NOs: 1099, 1106, 1113, 1117, 1123, 1130, 1137, 1144, 1151, 1158, 1165, 1177, 1184, 1191, 1203, 1215, 1224, 1231, 1238, 1243, 1250, 1257, 1264, 1274, 1281, 1288, 1295, 1302, 1309, 1315, 1322, 1329, 1335, 1342, 1348, 1355, 1362, 1369, 1376, 1385, 1397, 1404, 1417, 1424, 1431, 1437, 1444, 1451, 1458, 1464, 1471, 1478, 1484, 1491, 1498, 1504, 1511, 1515, 1522, 1534, 1547, 1552, 1564, 1577, 1584, 1590, 1597, 1604, 1611, 1618, 1625, 1632, 1639, 1646, 1653, 1660, 1665, 1675, 1683, 1693, 1701, 1705, 1716, 1719, 1731, 1736, 1747, 1756, 1772, 1780, 1789, 1795, 1801, 1813, 1820, 1827, 1834, 1841, 1848, 1855, 1862, 1881, 1894, 1901, 1920, 1927, 1934, 1941, 1953, 1959, 1966, 1981, 1989, 1997, and 2005; a HCDR2 comprising an amino acid sequence at least 65%, at least 70%, at least 75%, at least 80%, at least 85%, at least 90%, at least 95%, at least 99%, or 100% identical to any one of SEQ ID NOs: 1100, 1107, 1114, 1118, 1124, 1131, 1138, 1145, 1152, 1159, 1166, 1178, 1185, 1192, 1204, 1216, 1225, 1232, 1239, 1244, 1251, 1258, 1275, 1282, 1289, 1296, 1303, 1310, 1316, 1323, 1330, 1336, 1343, 1349, 1356, 1363, 1370, 1377, 1386, 1391, 1398, 1405, 1411, 1418, 1425, 1432, 1438, 1445, 1452, 1465, 1472, 1479, 1485, 1492, 1499, 1505, 1516, 1523, 1528, 1535, 1541, 1548, 1553, 1559, 1565, 1571, 1578, 1585, 1591, 1598, 1605, 1612, 1619, 1626, 1633, 1640, 1647, 1654, 1666, 1676, 1684, 1687, 1694, 1702, 1706, 1712, 1717, 1720, 1725, 1732, 1737, 1741, 1748, 1757, 1767, 1773, 1781, 1790, 1802, 1807, 1814, 1821, 1828, 1835, 1842, 1849, 1856, 1863, 1869, 1875, 1882, 1888, 1895, 1902, 1908, 1914, 1921, 1928, 1935, 1942, 1948, 1954, 1960, 1967, 1972, 1982, 1990, 1998, and 2006; and a HCDR3 comprising an amino acid sequence at least 65%, at least 70%, at least 75%, at least 80%, at least 85%, at least 90%, at least 95%, at least 99%, or 100% identical to any one of SEQ ID NOs: 1101, 1108, 1115, 1125, 1132, 1139, 1146, 1153, 1160, 1167, 1172, 1179, 1186, 1193, 1197, 1205, 1209, 1217, 1226, 1233, 1240, 1245, 1252, 1259, 1269, 1276, 1283, 1290, 1297, 1304, 1311, 1317, 1324, 1331, 1337, 1344, 1350, 1357, 1364, 1371, 1378, 1387, 1392, 1399, 1406, 1412, 1419, 1426, 1433, 1439, 1446, 1453, 1459, 1466, 1473, 1480, 1486, 1493, 1500, 1506, 1517, 1524, 1529, 1536, 1542, 1549, 1554, 1560, 1566, 1572, 1579, 1586, 1592, 1599, 1606, 1613, 1620, 1627, 1634, 1641, 1648, 1655, 1661, 1667, 1670, 1677, 1685, 1688, 1695, 1703, 1707, 1713, 1733, 1749, 1758, 1762, 1774, 1782, 1791, 1796, 1803, 1808, 1815, 1822, 1829, 1836, 1843, 1850, 1857, 1864, 1870, 1876, 1883, 1889, 1896, 1903, 1909, 1915, 1922, 1929, 1936, 1943, 1949, 1955, 1961, 1968, 1973, 1975, 1983, 1991, 1999, and 2007, or VH4 is a fourth immunoglobulin heavy chain variable region that specifically binds to (i) a tumor-associated antigen (TAA), (ii) an infectious disease antigen that is not a sarbecovirus antigen, or (iii) an other-pathology antigen, comprising an amino acid sequence at least 65%, at least 70%, at least 75%, at least 80%, at least 85%, at least 90%, at least 95%, at least 99%, or 100% identical to any one of SEQ ID NOs: 1102, 1109, 1116, 1119, 1126, 1133, 1140, 1147, 1154, 1161, 1168, 1173, 1180, 1187, 1194, 1198, 1206, 1210, 1218, 1220, 1227, 1234, 1241, 1246, 1253, 1260, 1265, 1270, 1277, 1284, 1291, 1298, 1305, 1312, 1318, 1325, 1332, 1338, 1345, 1351, 1358, 1365, 1372, 1379, 1381, 1388, 1393, 1400, 1407, 1413, 1420, 1427, 1434, 1440, 1447, 1454, 1460, 1467, 1474, 1481, 1487, 1494, 1501, 1507, 1512, 1518, 1525, 1530, 1537, 1543, 1550, 1555, 1561, 1567, 1573, 1580, 1587, 1593, 1600, 1607, 1614, 1621, 1628, 1635, 1642, 1649, 1656, 1662, 1668, 1671, 1678, 1686, 1696, 1704, 1714, 1722, 1726, 1734, 1742, 1750, 1759, 1760, 1765, 1768, 1775, 1783, 1785, 1792, 1797, 1804, 1809, 1816, 1823, 1830, 1837, 1844, 1851, 1858, 1865, 1871, 1877, 1884, 1890, 1897, 1904, 1910, 1916, 1923, 1930, 1937, 1944, 1950, 1956, 1962, 1969, 1974, 1984, 1992, 2000, and 2008. Fc is a region comprising an immunoglobulin heavy chain constant region 2 (CH2), an immunoglobulin heavy chain constant region 3 (CH3), and optionally, an immunoglobulin hinge; and L1-L8 are optional amino acid linkers.

[0630] Also provided herein is an antigen binding polypeptide complex comprising a first polypeptide and a second polypeptide; wherein the first polypeptide has a structure represented by: VL1-L1-VL2-L2-VH2-L3-VH1-L4-CH1-L5-CL-L6-Fc; VL1-L1-VH2-L2-VL2-L3-VH1-L4-CH1-L5-CL-L6-Fc; VH1-L1- VH2-L2-VL2-L3-VL1-L4-CH1-L5-CL-L6-Fc; VH1-L1-VL2-L2-VH2-L3-VL1-L4-CH1-L5-CL-L6-Fc; VL1-L1-VL2-L2-VH2-L3-VH1-L4-CL-L5-CH1-L6-Fc; VL1-L1-VH2-L2-VL2-L3-VH1-L4-CL-L5-CH1-L6-Fc; VH1-L1-VH2-L2-VL2-L3-VL1-L4-CL-L5-CH1-L6-Fc; or VH1-L1-VL2-L2-VH2-L3-VL1-L4- CL-L5-CH1-L6-Fc; wherein the second polypeptide has a structure represented by: VL3-L7-VL4-L8-VH4-L9-VH3-L10-CH1-L11-CL-L12-Fc; VL3-L7-VH4-L8-VL4-L9-VH3-L10-CH1-L11-CL-L12-Fc; VH3-L7-VH4-L8-VL4-L9-VL3-L10-CH1-L11-CL-L12-Fc; VH3-L7-VL4-L8-VH4-L9-VL3-L10-CH1-L11-CL- L12-Fc; VL3-L7-VL4-L8-VH4-L9-VH3-L10-CL-L11-CH1-L12-Fc; VL3-L7-VH4-L8-VL4-L9-VH3-L10-CL-L11-CH1-L12-Fc; VH3-L7-VH4-L8-VL4-L9-VL3-L10-CL-L11-CH1-L12-Fc; or VH3-L7-VL4-L8-VH4-L9-VL3-L10-CL-L11-CH1-L12-Fc; wherein: VL1 is a first immunoglobulin light chain variable region that specifically binds to (i) a tumor-associated antigen (TAA), (ii) an infectious disease antigen that is not a sarbecovirus antigen, or (iii) an other-pathology antigen, and which comprises a light chain complementary determining region (LCDR) 1 comprising an amino acid sequence at least 65%, at least 70%, at least 75%, at least 80%, at least 85%, at least 90%, at least 95%, at least 99%, or 100% identical to any one of SEQ ID NOs: 1096, 1103, 1110, 1120, 1127, 1134, 1141, 1148, 1155, 1162, 1169, 1174, 1181, 1188, 1199, 1211, 1221, 1228, 1235, 1247, 1254, 1261, 1266, 1271, 1278, 1285, 1292, 1299, 1306, 1313, 1319, 1326, 1339, 1352, 1359, 1366, 1373, 1382, 1394, 1401, 1408, 1414, 1421, 1428, 1441, 1448, 1455, 1461, 1468, 1475, 1488, 1495, 1508, 1519, 1526, 1531, 1538, 1544, 1556, 1568, 1574, 1581, 1594, 1601, 1608, 1615, 1622, 1629, 1636, 1643, 1650, 1657, 1672, 1679, 1689, 1697, 1708, 1715, 1718, 1723, 1727, 1738, 1743, 1752, 1761, 1763, 1769, 1776, 1786, 1793, 1798, 1810, 1817, 1824, 1831, 1838, 1845, 1852, 1859, 1866, 1872, 1878, 1885, 1891, 1898, 1905, 1911, 1917, 1924, 1931, 1938, 1945, 1963, 1977, 1985, 1993, and 2001; a LCDR2 comprising an amino acid sequence at least 65%, at least 70%, at least 75%, at least 80%, at least 85%, at least 90%, at least 95%, at least 99%, or 100% identical to any one of amino acid sequences AAS, APS, AT, ATS, AVS, DAS, DDG, DDS, DNN, DT, DTS, DVS, EAS, EDN, EVS, FTS, GAF, GAN, GAS, GAT, GIS, GKN, GNG, GNS, HTS, KAS, KVS, LAS, LGS, LVS, NAK, NTD, NTN, QMS, RMS, RTS, SAS, STS, TTS, WAS, YAS, YAT, YGS, YRS, and YTS, or at least 65%, at least 70%, at least 75%, at least 80%, at least 85%, at least 90%, at least 95%, at least 99%, or 100% identical to any one of SEQ ID NOs: 1200, 1212, 1680, 1690, 1698, 1709, 1728, 1739, 1744, 1753, 1770, 1777, 1978, 1986, 1994, and 2002; and a LCDR3 comprising an amino acid sequence at least 65%, at least 70%, at least 75%, at least 80%, at least 85%, at least 90%, at least 95%, at least 99%, or 100% identical to any one of SEQ ID NOs: 1097, 1104, 1111, 1121, 1128, 1135, 1142, 1149, 1156, 1163, 1170, 1175, 1182, 1189, 1195, 1201, 1207, 1213, 1222, 1229, 1236, 2009, 1248, 1255, 1262, 1267, 1272, 1279, 1286, 1293, 1300, 1307, 1320, 1327, 1333, 1340, 1346, 1353, 1360, 1367, 1374, 1383, 1389, 1395, 1402, 1409, 1415, 1422, 1429, 1435, 1442, 1449, 1456, 1462, 1469, 1476, 1482, 1489, 1496, 1502, 1509, 1513, 1520, 1532, 1539, 1545, 1557, 1562, 1569, 1575, 1582, 1588, 1595, 1602, 1609, 1616, 1623, 1630, 1637, 1644, 1651, 1658, 1663, 1673, 1681, 1691, 1699, 1710, 1729, 1735, 1745, 1751, 1754, 1778, 1787, 1799, 1805, 1811, 1818, 1825, 1832, 1839, 1846, 1853, 1860, 1867, 1873, 1879, 1886, 1892, 1899, 1906, 1912, 1918, 1925, 1932, 1939, 1946, 1951, 1957, 1964, 1970, 1976, 1979, 1987, 1995, and 2003, or VL1 is a first immunoglobulin light chain variable region that specifically binds to (i) a tumor-associated antigen (TAA), (ii) an infectious disease antigen that is not a sarbecovirus antigen, or (iii) an other-pathology antigen, comprising an amino acid sequence at least 65%, at least 70%, at least 75%, at least 80%, at least 85%, at least 90%, at least 95%, at least 99%, or 100% identical to any one of SEQ ID NOs: 1098, 1105, 1112, 1122, 1129, 1136, 1143, 1150, 1157, 1164, 1171, 1176, 1183, 1190, 1196, 1202, 1208, 1214, 1219, 1223, 1230, 1237, 1242, 1249, 1256, 1263, 1268, 1273, 1280, 1287, 1294, 1301, 1308, 1314, 1321, 1328, 1334, 1341, 1347, 1354, 1361, 1368, 1375, 1380, 1384, 1390, 1396, 1403, 1410, 1416, 1423, 1430, 1436, 1443, 1450, 1457, 1463, 1470, 1477, 1483, 1490, 1497, 1503, 1510, 1514, 1521, 1527, 1533, 1540, 1546, 1551, 1558, 1563, 1570, 1576, 1583, 1589, 1596, 1603, 1610, 1617, 1624, 1631, 1638, 1645, 1652, 1659, 1664, 1669, 1674, 1682, 1692, 1700, 1711, 1721, 1724, 1730, 1740, 1746, 1755, 1764, 1766, 1771, 1779, 1784, 1788, 1794, 1800, 1806, 1812, 1819, 1826, 1833, 1840, 1847, 1854, 1861, 1868, 1874, 1880, 1887, 1893, 1900, 1907, 1913, 1919, 1926, 1933, 1940, 1947, 1952, 1958, 1965, 1971, 1980, 1988, 1996, and 2004; VL2 is a second immunoglobulin light chain variable region that specifically binds to (i) a tumor-associated antigen (TAA), (ii) an infectious disease antigen that is not a sarbecovirus antigen, or (iii) an other-pathology antigen, and which comprises a LCDR1 comprising an amino acid sequence at least 65%, at least 70%, at least 75%, at least 80%, at least 85%, at least 90%, at least 95%, at least 99%, or 100% identical to any one of SEQ ID NOs: 1096, 1103, 1110, 1120, 1127, 1134, 1141, 1148, 1155, 1162, 1169, 1174, 1181, 1188, 1199, 1211, 1221, 1228, 1235, 1247, 1254, 1261, 1266, 1271, 1278, 1285, 1292, 1299, 1306, 1313, 1319, 1326, 1339, 1352, 1359, 1366, 1373, 1382, 1394, 1401, 1408, 1414, 1421, 1428, 1441, 1448, 1455, 1461, 1468, 1475, 1488, 1495, 1508, 1519, 1526, 1531, 1538, 1544, 1556, 1568, 1574, 1581, 1594, 1601, 1608, 1615, 1622, 1629, 1636, 1643, 1650, 1657, 1672, 1679, 1689, 1697, 1708, 1715, 1718, 1723, 1727, 1738, 1743, 1752, 1761, 1763, 1769, 1776, 1786, 1793, 1798, 1810, 1817, 1824, 1831, 1838, 1845, 1852, 1859, 1866, 1872, 1878, 1885, 1891, 1898, 1905, 1911, 1917, 1924, 1931, 1938, 1945, 1963, 1977, 1985, 1993, and 2001; a LCDR2 comprising an amino acid sequence at least 65%, at least 70%, at least 75%, at least 80%, at least 85%, at least 90%, at least 95%, at least 99%, or 100% identical to any one of amino acid sequences AAS, APS, AT, ATS, AVS, DAS, DDG, DDS, DNN, DT, DTS, DVS, EAS, EDN, EVS, FTS, GAF, GAN, GAS, GAT, GIS, GKN, GNG, GNS, HTS, KAS, KVS, LAS, LGS, LVS, NAK, NTD, NTN, QMS, RMS, RTS, SAS, STS, TTS, WAS, YAS, YAT, YGS, YRS, and YTS, or at least 65%, at least 70%, at least 75%, at least 80%, at least 85%, at least 90%, at least 95%, at least 99%, or 100% identical to any one of SEQ ID NOs: 1200, 1212, 1680, 1690, 1698, 1709, 1728, 1739, 1744, 1753, 1770, 1777, 1978, 1986, 1994, and 2002; and a LCDR3 comprising an amino acid sequence at least 65%, at least 70%, at least 75%, at least 80%, at least 85%, at least 90%, at least 95%, at least 99%, or 100% identical to any one of SEQ ID NOs: 1097, 1104, 1111, 1121, 1128, 1135, 1142, 1149, 1156, 1163, 1170, 1175, 1182, 1189, 1195, 1201, 1207, 1213, 1222, 1229, 1236, 2009, 1248, 1255, 1262, 1267, 1272, 1279, 1286, 1293, 1300, 1307, 1320, 1327, 1333, 1340, 1346, 1353, 1360, 1367, 1374, 1383, 1389, 1395, 1402, 1409, 1415, 1422, 1429, 1435, 1442, 1449, 1456, 1462, 1469, 1476, 1482, 1489, 1496, 1502, 1509, 1513, 1520, 1532, 1539, 1545, 1557, 1562, 1569, 1575, 1582, 1588, 1595, 1602, 1609, 1616, 1623, 1630, 1637, 1644, 1651, 1658, 1663, 1673, 1681, 1691, 1699, 1710, 1729, 1735, 1745, 1751, 1754, 1778, 1787, 1799, 1805, 1811, 1818, 1825, 1832, 1839, 1846, 1853, 1860, 1867, 1873, 1879, 1886, 1892, 1899, 1906, 1912, 1918, 1925, 1932, 1939, 1946, 1951, 1957, 1964, 1970, 1976, 1979, 1987, 1995, and 2003, or VL2 is a second light chain variable region that specifically binds to (i) a tumor-associated antigen (TAA), (ii) an infectious disease antigen that is not a sarbecovirus antigen, or (iii) an other-pathology antigen, comprising an amino acid sequence at least 65%, at least 70%, at least 75%, at least 80%, at least 85%, at least 90%, at least 95%, at least 99%, or 100% identical to any one of SEQ ID NOs: 1098, 1105, 1112, 1122, 1129, 1136, 1143, 1150, 1157, 1164, 1171, 1176, 1183, 1190, 1196, 1202, 1208, 1214, 1219, 1223, 1230, 1237, 1242, 1249, 1256, 1263, 1268, 1273, 1280, 1287, 1294, 1301, 1308, 1314, 1321, 1328, 1334, 1341, 1347, 1354, 1361, 1368, 1375, 1380, 1384, 1390, 1396, 1403, 1410, 1416, 1423, 1430, 1436, 1443, 1450, 1457, 1463, 1470, 1477, 1483, 1490, 1497, 1503, 1510, 1514, 1521, 1527, 1533, 1540, 1546, 1551, 1558, 1563, 1570, 1576, 1583, 1589, 1596, 1603, 1610, 1617, 1624, 1631, 1638, 1645, 1652, 1659, 1664, 1669, 1674, 1682, 1692, 1700, 1711, 1721, 1724, 1730, 1740, 1746, 1755, 1764, 1766, 1771, 1779, 1784, 1788, 1794, 1800, 1806, 1812, 1819, 1826, 1833, 1840, 1847, 1854, 1861, 1868, 1874, 1880, 1887, 1893, 1900, 1907, 1913, 1919, 1926, 1933, 1940, 1947, 1952, 1958, 1965, 1971, 1980, 1988, 1996, and 2004; VL3 is a third immunoglobulin light chain variable region that specifically binds to (i) a tumor-associated antigen (TAA), (ii) an infectious disease antigen that is not a sarbecovirus antigen, or (iii) an other-pathology antigen, and which comprises a LCDR1 comprising an amino acid sequence at least 65%, at least 70%, at least 75%, at least 80%, at least 85%, at least 90%, at least 95%, at least 99%, or 100% identical to any one of SEQ ID NOs: 1096, 1103, 1110, 1120, 1127, 1134, 1141, 1148, 1155, 1162, 1169, 1174, 1181, 1188, 1199, 1211, 1221, 1228, 1235, 1247, 1254, 1261, 1266, 1271, 1278, 1285, 1292, 1299, 1306, 1313, 1319, 1326, 1339, 1352, 1359, 1366, 1373, 1382, 1394, 1401, 1408, 1414, 1421, 1428, 1441, 1448, 1455, 1461, 1468, 1475, 1488, 1495, 1508, 1519, 1526, 1531, 1538, 1544, 1556, 1568, 1574, 1581, 1594, 1601, 1608, 1615, 1622, 1629, 1636, 1643, 1650, 1657, 1672, 1679, 1689, 1697, 1708, 1715, 1718, 1723, 1727, 1738, 1743, 1752, 1761, 1763, 1769, 1776, 1786, 1793, 1798, 1810, 1817, 1824, 1831, 1838, 1845, 1852, 1859, 1866, 1872, 1878, 1885, 1891, 1898, 1905, 1911, 1917, 1924, 1931, 1938, 1945, 1963, 1977, 1985, 1993, and 2001; a LCDR2 comprising an amino acid sequence at least 65%, at least 70%, at least 75%, at least 80%, at least 85%, at least 90%, at least 95%, at least 99%, or 100% identical to any one of amino acid sequences AAS, APS, AT, ATS, AVS, DAS, DDG, DDS, DNN, DT, DTS, DVS, EAS, EDN, EVS, FTS, GAF, GAN, GAS, GAT, GIS, GKN, GNG, GNS, HTS, KAS, KVS, LAS, LGS, LVS, NAK, NTD, NTN, QMS, RMS, RTS, SAS, STS, TTS, WAS, YAS, YAT, YGS, YRS, and YTS, or at least 65%, at least 70%, at least 75%, at least 80%, at least 85%, at least 90%, at least 95%, at least 99%, or 100% identical to any one of SEQ ID NOs: 1200, 1212, 1680, 1690, 1698, 1709, 1728, 1739, 1744, 1753, 1770, 1777, 1978, 1986, 1994, and 2002; and a LCDR3 comprising an amino acid sequence at least 65%, at least 70%, at least 75%, at least 80%, at least 85%, at least 90%, at least 95%, at least 99%, or 100% identical to any one of SEQ ID NOs: 1097, 1104, 1111, 1121, 1128, 1135, 1142, 1149, 1156, 1163, 1170, 1175, 1182, 1189, 1195, 1201, 1207, 1213, 1222, 1229, 1236, 2009, 1248, 1255, 1262, 1267, 1272, 1279, 1286, 1293, 1300, 1307, 1320, 1327, 1333, 1340, 1346, 1353, 1360, 1367, 1374, 1383, 1389, 1395, 1402, 1409, 1415, 1422, 1429, 1435, 1442, 1449, 1456, 1462, 1469, 1476, 1482, 1489, 1496, 1502, 1509, 1513, 1520, 1532, 1539, 1545, 1557, 1562, 1569, 1575, 1582, 1588, 1595, 1602, 1609, 1616, 1623, 1630, 1637, 1644, 1651, 1658, 1663, 1673, 1681, 1691, 1699, 1710, 1729, 1735, 1745, 1751, 1754, 1778, 1787, 1799, 1805, 1811, 1818, 1825, 1832, 1839, 1846, 1853, 1860, 1867, 1873, 1879, 1886, 1892, 1899, 1906, 1912, 1918, 1925, 1932, 1939, 1946, 1951, 1957, 1964, 1970, 1976, 1979, 1987, 1995, and 2003, or VL3 is a third immunoglobulin light chain variable region that specifically binds to (i) a tumor-associated antigen (TAA), (ii) an infectious disease antigen that is not a sarbecovirus antigen, or (iii) an other-pathology antigen, comprising an amino acid sequence at least 65%, at least 70%, at least 75%, at least 80%, at least 85%, at least 90%, at least 95%, at least 99%, or 100% identical to any one of SEQ ID NOs: 1098, 1105, 1112, 1122, 1129, 1136, 1143, 1150, 1157, 1164, 1171, 1176, 1183, 1190, 1196, 1202, 1208, 1214, 1219, 1223, 1230, 1237, 1242, 1249, 1256, 1263, 1268, 1273, 1280, 1287, 1294, 1301, 1308, 1314, 1321, 1328, 1334, 1341, 1347, 1354, 1361, 1368, 1375, 1380, 1384, 1390, 1396, 1403, 1410, 1416, 1423, 1430, 1436, 1443, 1450, 1457, 1463, 1470, 1477, 1483, 1490, 1497, 1503, 1510, 1514, 1521, 1527, 1533, 1540, 1546, 1551, 1558, 1563, 1570, 1576, 1583, 1589, 1596, 1603, 1610, 1617, 1624, 1631, 1638, 1645, 1652, 1659, 1664, 1669, 1674, 1682, 1692, 1700, 1711, 1721, 1724, 1730, 1740, 1746, 1755, 1764, 1766, 1771, 1779, 1784, 1788, 1794, 1800, 1806, 1812, 1819, 1826, 1833, 1840, 1847, 1854, 1861, 1868, 1874, 1880, 1887, 1893, 1900, 1907, 1913, 1919, 1926, 1933, 1940, 1947, 1952, 1958, 1965, 1971, 1980, 1988, 1996, and 2004; VL4 is a fourth immunoglobulin light chain variable region that specifically binds to (i) a tumor-associated antigen (TAA), (ii) an infectious disease antigen that is not a sarbecovirus antigen, or (iii) an other-pathology antigen, and which comprises a LCDR1 comprising an amino acid sequence at least 65%, at least 70%, at least 75%, at least 80%, at least 85%, at least 90%, at least 95%, at least 99%, or 100% identical to any one of SEQ ID NOs: 1096, 1103, 1110, 1120, 1127, 1134, 1141, 1148, 1155, 1162, 1169, 1174, 1181, 1188, 1199, 1211, 1221, 1228, 1235, 1247, 1254, 1261, 1266, 1271, 1278, 1285, 1292, 1299, 1306, 1313, 1319, 1326, 1339, 1352, 1359, 1366, 1373, 1382, 1394, 1401, 1408, 1414, 1421, 1428, 1441, 1448, 1455, 1461, 1468, 1475, 1488, 1495, 1508, 1519, 1526, 1531, 1538, 1544, 1556, 1568, 1574, 1581, 1594, 1601, 1608, 1615, 1622, 1629, 1636, 1643, 1650, 1657, 1672, 1679, 1689, 1697, 1708, 1715, 1718, 1723, 1727, 1738, 1743, 1752, 1761, 1763, 1769, 1776, 1786, 1793, 1798, 1810, 1817, 1824, 1831, 1838, 1845, 1852, 1859, 1866, 1872, 1878, 1885, 1891, 1898, 1905, 1911, 1917, 1924, 1931, 1938, 1945, 1963, 1977, 1985, 1993, and 2001; a LCDR2 comprising an amino acid sequence at least 65%, at least 70%, at least 75%, at least 80%, at least 85%, at least 90%, at least 95%, at least 99%, or 100% identical to any one of amino acid sequences AAS, APS, AT, ATS, AVS, DAS, DDG, DDS, DNN, DT, DTS, DVS, EAS, EDN, EVS, FTS, GAF, GAN, GAS, GAT, GIS, GKN, GNG, GNS, HTS, KAS, KVS, LAS, LGS, LVS, NAK, NTD, NTN, QMS, RMS, RTS, SAS, STS, TTS, WAS, YAS, YAT, YGS, YRS, and YTS, or at least 65%, at least 70%, at least 75%, at least 80%, at least 85%, at least 90%, at least 95%, at least 99%, or 100% identical to any one of SEQ ID NOs: 1200, 1212, 1680, 1690, 1698, 1709, 1728, 1739, 1744, 1753, 1770, 1777, 1978, 1986, 1994, and 2002; and a LCDR3 comprising an amino acid sequence at least 65%, at least 70%, at least 75%, at least 80%, at least 85%, at least 90%, at least 95%, at least 99%, or 100% identical to any one of SEQ ID NOs: 1097, 1104, 1111, 1121, 1128, 1135, 1142, 1149, 1156, 1163, 1170, 1175, 1182, 1189, 1195, 1201, 1207, 1213, 1222, 1229, 1236, 2009, 1248, 1255, 1262, 1267, 1272, 1279, 1286, 1293, 1300, 1307, 1320, 1327, 1333, 1340, 1346, 1353, 1360, 1367, 1374, 1383, 1389, 1395, 1402, 1409, 1415, 1422, 1429, 1435, 1442, 1449, 1456, 1462, 1469, 1476, 1482, 1489, 1496, 1502, 1509, 1513, 1520, 1532, 1539, 1545, 1557, 1562, 1569, 1575, 1582, 1588, 1595, 1602, 1609, 1616, 1623, 1630, 1637, 1644, 1651, 1658, 1663, 1673, 1681, 1691, 1699, 1710, 1729, 1735, 1745, 1751, 1754, 1778, 1787, 1799, 1805, 1811, 1818, 1825, 1832, 1839, 1846, 1853, 1860, 1867, 1873, 1879, 1886, 1892, 1899, 1906, 1912, 1918, 1925, 1932, 1939, 1946, 1951, 1957, 1964, 1970, 1976, 1979, 1987, 1995, and 2003, or VL4 is a fourth immunoglobulin light chain variable region that specifically binds to (i) a tumor-associated antigen (TAA), (ii) an infectious disease antigen that is not a sarbecovirus antigen, or (iii) an other-pathology antigen, comprising an amino acid sequence at least 65%, at least 70%, at least 75%, at least 80%, at least 85%, at least 90%, at least 95%, at least 99%, or 100% identical to any one of SEQ ID NOs: 1098, 1105, 1112, 1122, 1129, 1136, 1143, 1150, 1157, 1164, 1171, 1176, 1183, 1190, 1196, 1202, 1208, 1214, 1219, 1223, 1230, 1237, 1242, 1249, 1256, 1263, 1268, 1273, 1280, 1287, 1294, 1301, 1308, 1314, 1321, 1328, 1334, 1341, 1347, 1354, 1361, 1368, 1375, 1380, 1384, 1390, 1396, 1403, 1410, 1416, 1423, 1430, 1436, 1443, 1450, 1457, 1463, 1470, 1477, 1483, 1490, 1497, 1503, 1510, 1514, 1521, 1527, 1533, 1540, 1546, 1551, 1558, 1563, 1570, 1576, 1583, 1589, 1596, 1603, 1610, 1617, 1624, 1631, 1638, 1645, 1652, 1659, 1664, 1669, 1674, 1682, 1692, 1700, 1711, 1721, 1724, 1730, 1740, 1746, 1755, 1764, 1766, 1771, 1779, 1784, 1788, 1794, 1800, 1806, 1812, 1819, 1826, 1833, 1840, 1847, 1854, 1861, 1868, 1874, 1880, 1887, 1893, 1900, 1907, 1913, 1919, 1926, 1933, 1940, 1947, 1952, 1958, 1965, 1971, 1980, 1988, 1996, and 2004; VH1 is a first immunoglobulin heavy chain variable region that specifically binds to (i) a tumor-associated antigen (TAA), (ii) an infectious disease antigen that is not a sarbecovirus antigen, or (iii) an other-pathology antigen, and which comprises a heavy chain complementary determining region (HCDR) 1 comprising an amino acid sequence at least 65%, at least 70%, at least 75%, at least 80%, at least 85%, at least 90%, at least 95%, at least 99%, or 100% identical to any one of SEQ ID NOs: 1099, 1106, 1113, 1117, 1123, 1130, 1137, 1144, 1151, 1158, 1165, 1177, 1184, 1191, 1203, 1215, 1224, 1231, 1238, 1243, 1250, 1257, 1264, 1274, 1281, 1288, 1295, 1302, 1309, 1315, 1322, 1329, 1335, 1342, 1348, 1355, 1362, 1369, 1376, 1385, 1397, 1404, 1417, 1424, 1431, 1437, 1444, 1451, 1458, 1464, 1471, 1478, 1484, 1491, 1498, 1504, 1511, 1515, 1522, 1534, 1547, 1552, 1564, 1577, 1584, 1590, 1597, 1604, 1611, 1618, 1625, 1632, 1639, 1646, 1653, 1660, 1665, 1675, 1683, 1693, 1701, 1705, 1716, 1719, 1731, 1736, 1747, 1756, 1772, 1780, 1789, 1795, 1801, 1813, 1820, 1827, 1834, 1841, 1848, 1855, 1862, 1881, 1894, 1901, 1920, 1927, 1934, 1941, 1953, 1959, 1966, 1981, 1989, 1997, and 2005; a HCDR2 comprising an amino acid sequence at least 65%, at least 70%, at least 75%, at least 80%, at least 85%, at least 90%, at least 95%, at least 99%, or 100% identical to any one of SEQ ID NOs: 1100, 1107, 1114, 1118, 1124, 1131, 1138, 1145, 1152, 1159, 1166, 1178, 1185, 1192, 1204, 1216, 1225, 1232, 1239, 1244, 1251, 1258, 1275, 1282, 1289, 1296, 1303, 1310, 1316, 1323, 1330, 1336, 1343, 1349, 1356, 1363, 1370, 1377, 1386, 1391, 1398, 1405, 1411, 1418, 1425, 1432, 1438, 1445, 1452, 1465, 1472, 1479, 1485, 1492, 1499, 1505, 1516, 1523, 1528, 1535, 1541, 1548, 1553, 1559, 1565, 1571, 1578, 1585, 1591, 1598, 1605, 1612, 1619, 1626, 1633, 1640, 1647, 1654, 1666, 1676, 1684, 1687, 1694, 1702, 1706, 1712, 1717, 1720, 1725, 1732, 1737, 1741, 1748, 1757, 1767, 1773, 1781, 1790, 1802, 1807, 1814, 1821, 1828, 1835, 1842, 1849, 1856, 1863, 1869, 1875, 1882, 1888, 1895, 1902, 1908, 1914, 1921, 1928, 1935, 1942, 1948, 1954, 1960, 1967, 1972, 1982, 1990, 1998, and 2006; and a HCDR3 comprising an amino acid sequence at least 65%, at least 70%, at least 75%, at least 80%, at least 85%, at least 90%, at least 95%, at least 99%, or 100% identical to any one of SEQ ID NOs: 1101, 1108, 1115, 1125, 1132, 1139, 1146, 1153, 1160, 1167, 1172, 1179, 1186, 1193, 1197, 1205, 1209, 1217, 1226, 1233, 1240, 1245, 1252, 1259, 1269, 1276, 1283, 1290, 1297, 1304, 1311, 1317, 1324, 1331, 1337, 1344, 1350, 1357, 1364, 1371, 1378, 1387, 1392, 1399, 1406, 1412, 1419, 1426, 1433, 1439, 1446, 1453, 1459, 1466, 1473, 1480, 1486, 1493, 1500, 1506, 1517, 1524, 1529, 1536, 1542, 1549, 1554, 1560, 1566, 1572, 1579, 1586, 1592, 1599, 1606, 1613, 1620, 1627, 1634, 1641, 1648, 1655, 1661, 1667, 1670, 1677, 1685, 1688, 1695, 1703, 1707, 1713, 1733, 1749, 1758, 1762, 1774, 1782, 1791, 1796, 1803, 1808, 1815, 1822, 1829, 1836, 1843, 1850, 1857, 1864, 1870, 1876, 1883, 1889, 1896, 1903, 1909, 1915, 1922, 1929, 1936, 1943, 1949, 1955, 1961, 1968, 1973, 1975, 1983, 1991, 1999, and 2007, or VH1 is a first immunoglobulin heavy chain variable region that specifically binds to (i) a tumor-associated antigen (TAA), (ii) an infectious disease antigen that is not a sarbecovirus antigen, or (iii) an other-pathology antigen, comprising an amino acid sequence at least 65%, at least 70%, at least 75%, at least 80%, at least 85%, at least 90%, at least 95%, at least 99%, or 100% identical to any one of SEQ ID NOs: 1102, 1109, 1116, 1119, 1126, 1133, 1140, 1147, 1154, 1161, 1168, 1173, 1180, 1187, 1194, 1198, 1206, 1210, 1218, 1220, 1227, 1234, 1241, 1246, 1253, 1260, 1265, 1270, 1277, 1284, 1291, 1298, 1305, 1312, 1318, 1325, 1332, 1338, 1345, 1351, 1358, 1365, 1372, 1379, 1381, 1388, 1393, 1400, 1407, 1413, 1420, 1427, 1434, 1440, 1447, 1454, 1460, 1467, 1474, 1481, 1487, 1494, 1501, 1507, 1512, 1518, 1525, 1530, 1537, 1543, 1550, 1555, 1561, 1567, 1573, 1580, 1587, 1593, 1600, 1607, 1614, 1621, 1628, 1635, 1642, 1649, 1656, 1662, 1668, 1671, 1678, 1686, 1696, 1704, 1714, 1722, 1726, 1734, 1742, 1750, 1759, 1760, 1765, 1768, 1775, 1783, 1785, 1792, 1797, 1804, 1809, 1816, 1823, 1830, 1837, 1844, 1851, 1858, 1865, 1871, 1877, 1884, 1890, 1897, 1904, 1910, 1916, 1923, 1930, 1937, 1944, 1950, 1956, 1962, 1969, 1974, 1984, 1992, 2000, and 2008; VH2 is a second immunoglobulin heavy chain variable region that specifically binds to (i) a tumor-associated antigen (TAA), (ii) an infectious disease antigen that is not a sarbecovirus antigen, or (iii) an other-pathology antigen, and which comprises a HCDR1 comprising an amino acid sequence at least 65%, at least 70%, at least 75%, at least 80%, at least 85%, at least 90%, at least 95%, at least 99%, or 100% identical to any one of SEQ ID NOs: 1099, 1106, 1113, 1117, 1123, 1130, 1137, 1144, 1151, 1158, 1165, 1177, 1184, 1191, 1203, 1215, 1224, 1231, 1238, 1243, 1250, 1257, 1264, 1274, 1281, 1288, 1295, 1302, 1309, 1315, 1322, 1329, 1335, 1342, 1348, 1355, 1362, 1369, 1376, 1385, 1397, 1404, 1417, 1424, 1431, 1437, 1444, 1451, 1458, 1464, 1471, 1478, 1484, 1491, 1498, 1504, 1511, 1515, 1522, 1534, 1547, 1552, 1564, 1577, 1584, 1590, 1597, 1604, 1611, 1618, 1625, 1632, 1639, 1646, 1653, 1660, 1665, 1675, 1683, 1693, 1701, 1705, 1716, 1719, 1731, 1736, 1747, 1756, 1772, 1780, 1789, 1795, 1801, 1813, 1820, 1827, 1834, 1841, 1848, 1855, 1862, 1881, 1894, 1901, 1920, 1927, 1934, 1941, 1953, 1959, 1966, 1981, 1989, 1997, and 2005; a HCDR2 comprising an amino acid sequence at least 65%, at least 70%, at least 75%, at least 80%, at least 85%, at least 90%, at least 95%, at least 99%, or 100% identical to any one of SEQ ID NOs: 1100, 1107, 1114, 1118, 1124, 1131, 1138, 1145, 1152, 1159, 1166, 1178, 1185, 1192, 1204, 1216, 1225, 1232, 1239, 1244, 1251, 1258, 1275, 1282, 1289, 1296, 1303, 1310, 1316, 1323, 1330, 1336, 1343, 1349, 1356, 1363, 1370, 1377, 1386, 1391, 1398, 1405, 1411, 1418, 1425, 1432, 1438, 1445, 1452, 1465, 1472, 1479, 1485, 1492, 1499, 1505, 1516, 1523, 1528, 1535, 1541, 1548, 1553, 1559, 1565, 1571, 1578, 1585, 1591, 1598, 1605, 1612, 1619, 1626, 1633, 1640, 1647, 1654, 1666, 1676, 1684, 1687, 1694, 1702, 1706, 1712, 1717, 1720, 1725, 1732, 1737, 1741, 1748, 1757, 1767, 1773, 1781, 1790, 1802, 1807, 1814, 1821, 1828, 1835, 1842, 1849, 1856, 1863, 1869, 1875, 1882, 1888, 1895, 1902, 1908, 1914, 1921, 1928, 1935, 1942, 1948, 1954, 1960, 1967, 1972, 1982, 1990, 1998, and 2006; and a HCDR3 comprising an amino acid sequence at least 65%, at least 70%, at least 75%, at least 80%, at least 85%, at least 90%, at least 95%, at least 99%, or 100% identical to any one of SEQ ID NOs: 1101, 1108, 1115, 1125, 1132, 1139, 1146, 1153, 1160, 1167, 1172, 1179, 1186, 1193, 1197, 1205, 1209, 1217, 1226, 1233, 1240, 1245, 1252, 1259, 1269, 1276, 1283, 1290, 1297, 1304, 1311, 1317, 1324, 1331, 1337, 1344, 1350, 1357, 1364, 1371, 1378, 1387, 1392, 1399, 1406, 1412, 1419, 1426, 1433, 1439, 1446, 1453, 1459, 1466, 1473, 1480, 1486, 1493, 1500, 1506, 1517, 1524, 1529, 1536, 1542, 1549, 1554, 1560, 1566, 1572, 1579, 1586, 1592, 1599, 1606, 1613, 1620, 1627, 1634, 1641, 1648, 1655, 1661, 1667, 1670, 1677, 1685, 1688, 1695, 1703, 1707, 1713, 1733, 1749, 1758, 1762, 1774, 1782, 1791, 1796, 1803, 1808, 1815, 1822, 1829, 1836, 1843, 1850, 1857, 1864, 1870, 1876, 1883, 1889, 1896, 1903, 1909, 1915, 1922, 1929, 1936, 1943, 1949, 1955, 1961, 1968, 1973, 1975, 1983, 1991, 1999, and 2007, or VH2 is a second immunoglobulin heavy chain variable region that specifically binds to (i) a tumor-associated antigen (TAA), (ii) an infectious disease antigen that is not a sarbecovirus antigen, or (iii) an other-pathology antigen, comprising an amino acid sequence at least 65%, at least 70%, at least 75%, at least 80%, at least 85%, at least 90%, at least 95%, at least 99%, or 100% identical to any one of SEQ ID NOs: 1102, 1109, 1116, 1119, 1126, 1133, 1140, 1147, 1154, 1161, 1168, 1173, 1180, 1187, 1194, 1198, 1206, 1210, 1218, 1220, 1227, 1234, 1241, 1246, 1253, 1260, 1265, 1270, 1277, 1284, 1291, 1298, 1305, 1312, 1318, 1325, 1332, 1338, 1345, 1351, 1358, 1365, 1372, 1379, 1381, 1388, 1393, 1400, 1407, 1413, 1420, 1427, 1434, 1440, 1447, 1454, 1460, 1467, 1474, 1481, 1487, 1494, 1501, 1507, 1512, 1518, 1525, 1530, 1537, 1543, 1550, 1555, 1561, 1567, 1573, 1580, 1587, 1593, 1600, 1607, 1614, 1621, 1628, 1635, 1642, 1649, 1656, 1662, 1668, 1671, 1678, 1686, 1696, 1704, 1714, 1722, 1726, 1734, 1742, 1750, 1759, 1760, 1765, 1768, 1775, 1783, 1785, 1792, 1797, 1804, 1809, 1816, 1823, 1830, 1837, 1844, 1851, 1858, 1865, 1871, 1877, 1884, 1890, 1897, 1904, 1910, 1916, 1923, 1930, 1937, 1944, 1950, 1956, 1962, 1969, 1974, 1984, 1992, 2000, and 2008; VH3 is a third immunoglobulin heavy chain variable region that specifically binds to (i) a tumor-associated antigen (TAA), (ii) an infectious disease antigen that is not a sarbecovirus antigen, or (iii) an other-pathology antigen, and which comprises a HCDR1 comprising an amino acid sequence at least 65%, at least 70%, at least 75%, at least 80%, at least 85%, at least 90%, at least 95%, at least 99%, or 100% identical to any one of SEQ ID NOs: 1099, 1106, 1113, 1117, 1123, 1130, 1137, 1144, 1151, 1158, 1165, 1177, 1184, 1191, 1203, 1215, 1224, 1231, 1238, 1243, 1250, 1257, 1264, 1274, 1281, 1288, 1295, 1302, 1309, 1315, 1322, 1329, 1335, 1342, 1348, 1355, 1362, 1369, 1376, 1385, 1397, 1404, 1417, 1424, 1431, 1437, 1444, 1451, 1458, 1464, 1471, 1478, 1484, 1491, 1498, 1504, 1511, 1515, 1522, 1534, 1547, 1552, 1564, 1577, 1584, 1590, 1597, 1604, 1611, 1618, 1625, 1632, 1639, 1646, 1653, 1660, 1665, 1675, 1683, 1693, 1701, 1705, 1716, 1719, 1731, 1736, 1747, 1756, 1772, 1780, 1789, 1795, 1801, 1813, 1820, 1827, 1834, 1841, 1848, 1855, 1862, 1881, 1894, 1901, 1920, 1927, 1934, 1941, 1953, 1959, 1966, 1981, 1989, 1997, and 2005; a HCDR2 comprising an amino acid sequence at least 65%, at least 70%, at least 75%, at least 80%, at least 85%, at least 90%, at least 95%, at least 99%, or 100% identical to any one of SEQ ID NOs: 1100, 1107, 1114, 1118, 1124, 1131, 1138, 1145, 1152, 1159, 1166, 1178, 1185, 1192, 1204, 1216, 1225, 1232, 1239, 1244, 1251, 1258, 1275, 1282, 1289, 1296, 1303, 1310, 1316, 1323, 1330, 1336, 1343, 1349, 1356, 1363, 1370, 1377, 1386, 1391, 1398, 1405, 1411, 1418, 1425, 1432, 1438, 1445, 1452, 1465, 1472, 1479, 1485, 1492, 1499, 1505, 1516, 1523, 1528, 1535, 1541, 1548, 1553, 1559, 1565, 1571, 1578, 1585, 1591, 1598, 1605, 1612, 1619, 1626, 1633, 1640, 1647, 1654, 1666, 1676, 1684, 1687, 1694, 1702, 1706, 1712, 1717, 1720, 1725, 1732, 1737, 1741, 1748, 1757, 1767, 1773, 1781, 1790, 1802, 1807, 1814, 1821, 1828, 1835, 1842, 1849, 1856, 1863, 1869, 1875, 1882, 1888, 1895, 1902, 1908, 1914, 1921, 1928, 1935, 1942, 1948, 1954, 1960, 1967, 1972, 1982, 1990, 1998, and 2006; and a HCDR3 comprising an amino acid sequence at least 65%, at least 70%, at least 75%, at least 80%, at least 85%, at least 90%, at least 95%, at least 99%, or 100% identical to any one of SEQ ID NOs: 1101, 1108, 1115, 1125, 1132, 1139, 1146, 1153, 1160, 1167, 1172, 1179, 1186, 1193, 1197, 1205, 1209, 1217, 1226, 1233, 1240, 1245, 1252, 1259, 1269, 1276, 1283, 1290, 1297, 1304, 1311, 1317, 1324, 1331, 1337, 1344, 1350, 1357, 1364, 1371, 1378, 1387, 1392, 1399, 1406, 1412, 1419, 1426, 1433, 1439, 1446, 1453, 1459, 1466, 1473, 1480, 1486, 1493, 1500, 1506, 1517, 1524, 1529, 1536, 1542, 1549, 1554, 1560, 1566, 1572, 1579, 1586, 1592, 1599, 1606, 1613, 1620, 1627, 1634, 1641, 1648, 1655, 1661, 1667, 1670, 1677, 1685, 1688, 1695, 1703, 1707, 1713, 1733, 1749, 1758, 1762, 1774, 1782, 1791, 1796, 1803, 1808, 1815, 1822, 1829, 1836, 1843, 1850, 1857, 1864, 1870, 1876, 1883, 1889, 1896, 1903, 1909, 1915, 1922, 1929, 1936, 1943, 1949, 1955, 1961, 1968, 1973, 1975, 1983, 1991, 1999, and 2007, or VH3 is a third immunoglobulin heavy chain variable region that specifically binds to (i) a tumor-associated antigen (TAA), (ii) an infectious disease antigen that is not a sarbecovirus antigen, or (iii) an other-pathology antigen, comprising an amino acid sequence at least 65%, at least 70%, at least 75%, at least 80%, at least 85%, at least 90%, at least 95%, at least 99%, or 100% identical to any one of SEQ ID NOs: 1102, 1109, 1116, 1119, 1126, 1133, 1140, 1147, 1154, 1161, 1168, 1173, 1180, 1187, 1194, 1198, 1206, 1210, 1218, 1220, 1227, 1234, 1241, 1246, 1253, 1260, 1265, 1270, 1277, 1284, 1291, 1298, 1305, 1312, 1318, 1325, 1332, 1338, 1345, 1351, 1358, 1365, 1372, 1379, 1381, 1388, 1393, 1400, 1407, 1413, 1420, 1427, 1434, 1440, 1447, 1454, 1460, 1467, 1474, 1481, 1487, 1494, 1501, 1507, 1512, 1518, 1525, 1530, 1537, 1543, 1550, 1555, 1561, 1567, 1573, 1580, 1587, 1593, 1600, 1607, 1614, 1621, 1628, 1635, 1642, 1649, 1656, 1662, 1668, 1671, 1678, 1686, 1696, 1704, 1714, 1722, 1726, 1734, 1742, 1750, 1759, 1760, 1765, 1768, 1775, 1783, 1785, 1792, 1797, 1804, 1809, 1816, 1823, 1830, 1837, 1844, 1851, 1858, 1865, 1871, 1877, 1884, 1890, 1897, 1904, 1910, 1916, 1923, 1930, 1937, 1944, 1950, 1956, 1962, 1969, 1974, 1984, 1992, 2000, and 2008; and VH4 is a fourth immunoglobulin heavy chain variable region that specifically binds to (i) a tumor-associated antigen (TAA), (ii) an infectious disease antigen that is not a sarbecovirus antigen, or (iii) an other-pathology antigen, and which comprises a HCDR1 comprising an amino acid sequence at least 65%, at least 70%, at least 75%, at least 80%, at least 85%, at least 90%, at least 95%, at least 99%, or 100% identical to any one of SEQ ID NOs: 1099, 1106, 1113, 1117, 1123, 1130, 1137, 1144, 1151, 1158, 1165, 1177, 1184, 1191, 1203, 1215, 1224, 1231, 1238, 1243, 1250, 1257, 1264, 1274, 1281, 1288, 1295, 1302, 1309, 1315, 1322, 1329, 1335, 1342, 1348, 1355, 1362, 1369, 1376, 1385, 1397, 1404, 1417, 1424, 1431, 1437, 1444, 1451, 1458, 1464, 1471, 1478, 1484, 1491, 1498, 1504, 1511, 1515, 1522, 1534, 1547, 1552, 1564, 1577, 1584, 1590, 1597, 1604, 1611, 1618, 1625, 1632, 1639, 1646, 1653, 1660, 1665, 1675, 1683, 1693, 1701, 1705, 1716, 1719, 1731, 1736, 1747, 1756, 1772, 1780, 1789, 1795, 1801, 1813, 1820, 1827, 1834, 1841, 1848, 1855, 1862, 1881, 1894, 1901, 1920, 1927, 1934, 1941, 1953, 1959, 1966, 1981, 1989, 1997, and 2005; a HCDR2 comprising an amino acid sequence at least 65%, at least 70%, at least 75%, at least 80%, at least 85%, at least 90%, at least 95%, at least 99%, or 100% identical to any one of SEQ ID NOs: 1100, 1107, 1114, 1118, 1124, 1131, 1138, 1145, 1152, 1159, 1166, 1178, 1185, 1192, 1204, 1216, 1225, 1232, 1239, 1244, 1251, 1258, 1275, 1282, 1289, 1296, 1303, 1310, 1316, 1323, 1330, 1336, 1343, 1349, 1356, 1363, 1370, 1377, 1386, 1391, 1398, 1405, 1411, 1418, 1425, 1432, 1438, 1445, 1452, 1465, 1472, 1479, 1485, 1492, 1499, 1505, 1516, 1523, 1528, 1535, 1541, 1548, 1553, 1559, 1565, 1571, 1578, 1585, 1591, 1598, 1605, 1612, 1619, 1626, 1633, 1640, 1647, 1654, 1666, 1676, 1684, 1687, 1694, 1702, 1706, 1712, 1717, 1720, 1725, 1732, 1737, 1741, 1748, 1757, 1767, 1773, 1781, 1790, 1802, 1807, 1814, 1821, 1828, 1835, 1842, 1849, 1856, 1863, 1869, 1875, 1882, 1888, 1895, 1902, 1908, 1914, 1921, 1928, 1935, 1942, 1948, 1954, 1960, 1967, 1972, 1982, 1990, 1998, and 2006; and a HCDR3 comprising an amino acid sequence at least 65%, at least 70%, at least 75%, at least 80%, at least 85%, at least 90%, at least 95%, at least 99%, or 100% identical to any one of SEQ ID NOs: 1101, 1108, 1115, 1125, 1132, 1139, 1146, 1153, 1160, 1167, 1172, 1179, 1186, 1193, 1197, 1205, 1209, 1217, 1226, 1233, 1240, 1245, 1252, 1259, 1269, 1276, 1283, 1290, 1297, 1304, 1311, 1317, 1324, 1331, 1337, 1344, 1350, 1357, 1364, 1371, 1378, 1387, 1392, 1399, 1406, 1412, 1419, 1426, 1433, 1439, 1446, 1453, 1459, 1466, 1473, 1480, 1486, 1493, 1500, 1506, 1517, 1524, 1529, 1536, 1542, 1549, 1554, 1560, 1566, 1572, 1579, 1586, 1592, 1599, 1606, 1613, 1620, 1627, 1634, 1641, 1648, 1655, 1661, 1667, 1670, 1677, 1685, 1688, 1695, 1703, 1707, 1713, 1733, 1749, 1758, 1762, 1774, 1782, 1791, 1796, 1803, 1808, 1815, 1822, 1829, 1836, 1843, 1850, 1857, 1864, 1870, 1876, 1883, 1889, 1896, 1903, 1909, 1915, 1922, 1929, 1936, 1943, 1949, 1955, 1961, 1968, 1973, 1975, 1983, 1991, 1999, and 2007, or VH4 is a fourth immunoglobulin heavy chain variable region that specifically binds to (i) a tumor-associated antigen (TAA), (ii) an infectious disease antigen that is not a sarbecovirus antigen, or (iii) an other-pathology antigen, comprising an amino acid sequence at least 65%, at least 70%, at least 75%, at least 80%, at least 85%, at least 90%, at least 95%, at least 99%, or 100% identical to any one of SEQ ID NOs: 1102, 1109, 1116, 1119, 1126, 1133, 1140, 1147, 1154, 1161, 1168, 1173, 1180, 1187, 1194, 1198, 1206, 1210, 1218, 1220, 1227, 1234, 1241, 1246, 1253, 1260, 1265, 1270, 1277, 1284, 1291, 1298, 1305, 1312, 1318, 1325, 1332, 1338, 1345, 1351, 1358, 1365, 1372, 1379, 1381, 1388, 1393, 1400, 1407, 1413, 1420, 1427, 1434, 1440, 1447, 1454, 1460, 1467, 1474, 1481, 1487, 1494, 1501, 1507, 1512, 1518, 1525, 1530, 1537, 1543, 1550, 1555, 1561, 1567, 1573, 1580, 1587, 1593, 1600, 1607, 1614, 1621, 1628, 1635, 1642, 1649, 1656, 1662, 1668, 1671, 1678, 1686, 1696, 1704, 1714, 1722, 1726, 1734, 1742, 1750, 1759, 1760, 1765, 1768, 1775, 1783, 1785, 1792, 1797, 1804, 1809, 1816, 1823, 1830, 1837, 1844, 1851, 1858, 1865, 1871, 1877, 1884, 1890, 1897, 1904, 1910, 1916, 1923, 1930, 1937, 1944, 1950, 1956, 1962, 1969, 1974, 1984, 1992, 2000, and 2008; CH1 is an immunoglobulin heavy chain constant region 1; CL is an immunoglobulin light chain constant region; Fc is a region comprising an immunoglobulin heavy chain constant region 2 (CH2), an immunoglobulin heavy chain constant region 3 (CH3), and optionally, an immunoglobulin hinge; and L1-L12 are optional amino acid linkers.

[0631] Also provided herein is an antigen binding polypeptide complex comprising two antigen binding polypeptides wherein at least one antigen binding polypeptide has a structure represented by: VL1-L1-VL2-L2-VH2-L3-VH1-L4-Fc-L5-Fc; VL1-L1-VH2-L2-VL2-L3-VH1-L4-Fc-L5-Fc; VH1-L1-VH2-L2- VL2-L3-VL1-L4-Fc-L5-Fc; or VH1-L1-VL2-L2-VH2-L3-VL1-L4-Fc-L5-Fc; wherein: VL1 is a first immunoglobulin light chain variable region that specifically binds to (i) a tumor-associated antigen (TAA), (ii) an infectious disease antigen that is not a sarbecovirus antigen, or (iii) an other-pathology antigen, and which comprises a light chain complementary determining region (LCDR) 1 comprising an amino acid sequence at least 65%, at least 70%, at least 75%, at least 80%, at least 85%, at least 90%, at least 95%, at least 99%, or 100% identical to any one of SEQ ID NOs: 1096, 1103, 1110, 1120, 1127, 1134, 1141, 1148, 1155, 1162, 1169, 1174, 1181, 1188, 1199, 1211, 1221, 1228, 1235, 1247, 1254, 1261, 1266, 1271, 1278, 1285, 1292, 1299, 1306, 1313, 1319, 1326, 1339, 1352, 1359, 1366, 1373, 1382, 1394, 1401, 1408, 1414, 1421, 1428, 1441, 1448, 1455, 1461, 1468, 1475, 1488, 1495, 1508, 1519, 1526, 1531, 1538, 1544, 1556, 1568, 1574, 1581, 1594, 1601, 1608, 1615, 1622, 1629, 1636, 1643, 1650, 1657, 1672, 1679, 1689, 1697, 1708, 1715, 1718, 1723, 1727, 1738, 1743, 1752, 1761, 1763, 1769, 1776, 1786, 1793, 1798, 1810, 1817, 1824, 1831, 1838, 1845, 1852, 1859, 1866, 1872, 1878, 1885, 1891, 1898, 1905, 1911, 1917, 1924, 1931, 1938, 1945, 1963, 1977, 1985, 1993, and 2001; a LCDR2 comprising an amino acid sequence at least 65%, at least 70%, at least 75%, at least 80%, at least 85%, at least 90%, at least 95%, at least 99%, or 100% identical to any one of amino acid sequences AAS, APS, AT, ATS, AVS, DAS, DDG, DDS, DNN, DT, DTS, DVS, EAS, EDN, EVS, FTS, GAF, GAN, GAS, GAT, GIS, GKN, GNG, GNS, HTS, KAS, KVS, LAS, LGS, LVS, NAK, NTD, NTN, QMS, RMS, RTS, SAS, STS, TTS, WAS, YAS, YAT, YGS, YRS, and YTS, or at least 65%, at least 70%, at least 75%, at least 80%, at least 85%, at least 90%, at least 95%, at least 99%, or 100% identical to any one of SEQ ID NOs: 1200, 1212, 1680, 1690, 1698, 1709, 1728, 1739, 1744, 1753, 1770, 1777, 1978, 1986, 1994, and 2002; and a LCDR3 comprising an amino acid sequence at least 65%, at least 70%, at least 75%, at least 80%, at least 85%, at least 90%, at least 95%, at least 99%, or 100% identical to any one of SEQ ID NOs: 1097, 1104, 1111, 1121, 1128, 1135, 1142, 1149, 1156, 1163, 1170, 1175, 1182, 1189, 1195, 1201, 1207, 1213, 1222, 1229, 1236, 2009, 1248, 1255, 1262, 1267, 1272, 1279, 1286, 1293, 1300, 1307, 1320, 1327, 1333, 1340, 1346, 1353, 1360, 1367, 1374, 1383, 1389, 1395, 1402, 1409, 1415, 1422, 1429, 1435, 1442, 1449, 1456, 1462, 1469, 1476, 1482, 1489, 1496, 1502, 1509, 1513, 1520, 1532, 1539, 1545, 1557, 1562, 1569, 1575, 1582, 1588, 1595, 1602, 1609, 1616, 1623, 1630, 1637, 1644, 1651, 1658, 1663, 1673, 1681, 1691, 1699, 1710, 1729, 1735, 1745, 1751, 1754, 1778, 1787, 1799, 1805, 1811, 1818, 1825, 1832, 1839, 1846, 1853, 1860, 1867, 1873, 1879, 1886, 1892, 1899, 1906, 1912, 1918, 1925, 1932, 1939, 1946, 1951, 1957, 1964, 1970, 1976, 1979, 1987, 1995, and 2003, or VL1 is a first immunoglobulin light chain variable region that specifically binds to (i) a tumor-associated antigen (TAA), (ii) an infectious disease antigen that is not a sarbecovirus antigen, or (iii) an other-pathology antigen, comprising an amino acid sequence at least 65%, at least 70%, at least 75%, at least 80%, at least 85%, at least 90%, at least 95%, at least 99%, or 100% identical to any one of SEQ ID NOs: 1098, 1105, 1112, 1122, 1129, 1136, 1143, 1150, 1157, 1164, 1171, 1176, 1183, 1190, 1196, 1202, 1208, 1214, 1219, 1223, 1230, 1237, 1242, 1249, 1256, 1263, 1268, 1273, 1280, 1287, 1294, 1301, 1308, 1314, 1321, 1328, 1334, 1341, 1347, 1354, 1361, 1368, 1375, 1380, 1384, 1390, 1396, 1403, 1410, 1416, 1423, 1430, 1436, 1443, 1450, 1457, 1463, 1470, 1477, 1483, 1490, 1497, 1503, 1510, 1514, 1521, 1527, 1533, 1540, 1546, 1551, 1558, 1563, 1570, 1576, 1583, 1589, 1596, 1603, 1610, 1617, 1624, 1631, 1638, 1645, 1652, 1659, 1664, 1669, 1674, 1682, 1692, 1700, 1711, 1721, 1724, 1730, 1740, 1746, 1755, 1764, 1766, 1771, 1779, 1784, 1788, 1794, 1800, 1806, 1812, 1819, 1826, 1833, 1840, 1847, 1854, 1861, 1868, 1874, 1880, 1887, 1893, 1900, 1907, 1913, 1919, 1926, 1933, 1940, 1947, 1952, 1958, 1965, 1971, 1980, 1988, 1996, and 2004; VL2 is a second immunoglobulin light chain variable region that specifically binds to (i) a tumor-associated antigen (TAA), (ii) an infectious disease antigen that is not a sarbecovirus antigen, or (iii) an other-pathology antigen, and which comprises a LCDR1 comprising an amino acid sequence at least 65%, at least 70%, at least 75%, at least 80%, at least 85%, at least 90%, at least 95%, at least 99%, or 100% identical to any one of SEQ ID NOs: 1096, 1103, 1110, 1120, 1127, 1134, 1141, 1148, 1155, 1162, 1169, 1174, 1181, 1188, 1199, 1211, 1221, 1228, 1235, 1247, 1254, 1261, 1266, 1271, 1278, 1285, 1292, 1299, 1306, 1313, 1319, 1326, 1339, 1352, 1359, 1366, 1373, 1382, 1394, 1401, 1408, 1414, 1421, 1428, 1441, 1448, 1455, 1461, 1468, 1475, 1488, 1495, 1508, 1519, 1526, 1531, 1538, 1544, 1556, 1568, 1574, 1581, 1594, 1601, 1608, 1615, 1622, 1629, 1636, 1643, 1650, 1657, 1672, 1679, 1689, 1697, 1708, 1715, 1718, 1723, 1727, 1738, 1743, 1752, 1761, 1763, 1769, 1776, 1786, 1793, 1798, 1810, 1817, 1824, 1831, 1838, 1845, 1852, 1859, 1866, 1872, 1878, 1885, 1891, 1898, 1905, 1911, 1917, 1924, 1931, 1938, 1945, 1963, 1977, 1985, 1993, and 2001, and 1065; a LCDR2 comprising an amino acid sequence at least 65%, at least 70%, at least 75%, at least 80%, at least 85%, at least 90%, at least 95%, at least 99%, or 100% identical to any one of amino acid sequences AAS, APS, AT, ATS, AVS, DAS, DDG, DDS, DNN, DT, DTS, DVS, EAS, EDN, EVS, FTS, GAF, GAN, GAS, GAT, GIS, GKN, GNG, GNS, HTS, KAS, KVS, LAS, LGS, LVS, NAK, NTD, NTN, QMS, RMS, RTS, SAS, STS, TTS, WAS, YAS, YAT, YGS, YRS, and YTS, or at least 65%, at least 70%, at least 75%, at least 80%, at least 85%, at least 90%, at least 95%, at least 99%, or 100% identical to any one of SEQ ID NOs: 1200, 1212, 1680, 1690, 1698, 1709, 1728, 1739, 1744, 1753, 1770, 1777, 1978, 1986, 1994, and 2002; and a LCDR3 comprising an amino acid sequence at least 65%, at least 70%, at least 75%, at least 80%, at least 85%, at least 90%, at least 95%, at least 99%, or 100% identical to any one of SEQ ID NOs: 1097, 1104, 1111, 1121, 1128, 1135, 1142, 1149, 1156, 1163, 1170, 1175, 1182, 1189, 1195, 1201, 1207, 1213, 1222, 1229, 1236, 2009, 1248, 1255, 1262, 1267, 1272, 1279, 1286, 1293, 1300, 1307, 1320, 1327, 1333, 1340, 1346, 1353, 1360, 1367, 1374, 1383, 1389, 1395, 1402, 1409, 1415, 1422, 1429, 1435, 1442, 1449, 1456, 1462, 1469, 1476, 1482, 1489, 1496, 1502, 1509, 1513, 1520, 1532, 1539, 1545, 1557, 1562, 1569, 1575, 1582, 1588, 1595, 1602, 1609, 1616, 1623, 1630, 1637, 1644, 1651, 1658, 1663, 1673, 1681, 1691, 1699, 1710, 1729, 1735, 1745, 1751, 1754, 1778, 1787, 1799, 1805, 1811, 1818, 1825, 1832, 1839, 1846, 1853, 1860, 1867, 1873, 1879, 1886, 1892, 1899, 1906, 1912, 1918, 1925, 1932, 1939, 1946, 1951, 1957, 1964, 1970, 1976, 1979, 1987, 1995, and 2003, or VL2 is a second immunoglobulin light chain variable region that specifically binds (i) a tumor-associated antigen (TAA), (ii) an infectious disease antigen that is not a sarbecovirus antigen, or (iii) an other-pathology antigen, comprising an amino acid sequence at least 65%, at least 70%, at least 75%, at least 80%, at least 85%, at least 90%, at least 95%, at least 99%, or 100% identical to any one of SEQ ID NOs: 1098, 1105, 1112, 1122, 1129, 1136, 1143, 1150, 1157, 1164, 1171, 1176, 1183, 1190, 1196, 1202, 1208, 1214, 1219, 1223, 1230, 1237, 1242, 1249, 1256, 1263, 1268, 1273, 1280, 1287, 1294, 1301, 1308, 1314, 1321, 1328, 1334, 1341, 1347, 1354, 1361, 1368, 1375, 1380, 1384, 1390, 1396, 1403, 1410, 1416, 1423, 1430, 1436, 1443, 1450, 1457, 1463, 1470, 1477, 1483, 1490, 1497, 1503, 1510, 1514, 1521, 1527, 1533, 1540, 1546, 1551, 1558, 1563, 1570, 1576, 1583, 1589, 1596, 1603, 1610, 1617, 1624, 1631, 1638, 1645, 1652, 1659, 1664, 1669, 1674, 1682, 1692, 1700, 1711, 1721, 1724, 1730, 1740, 1746, 1755, 1764, 1766, 1771, 1779, 1784, 1788, 1794, 1800, 1806, 1812, 1819, 1826, 1833, 1840, 1847, 1854, 1861, 1868, 1874, 1880, 1887, 1893, 1900, 1907, 1913, 1919, 1926, 1933, 1940, 1947, 1952, 1958, 1965, 1971, 1980, 1988, 1996, and 2004; VH1 is a first immunoglobulin heavy chain variable region that specifically binds to (i) a tumor-associated antigen (TAA), (ii) an infectious disease antigen that is not a sarbecovirus antigen, or (iii) an other-pathology antigen, and which comprises a heavy chain complementary determining region (HCDR) 1 comprising an amino acid sequence at least 65%, at least 70%, at least 75%, at least 80%, at least 85%, at least 90%, at least 95%, at least 99%, or 100% identical to any one of SEQ ID NOs: 1099, 1106, 1113, 1117, 1123, 1130, 1137, 1144, 1151, 1158, 1165, 1177, 1184, 1191, 1203, 1215, 1224, 1231, 1238, 1243, 1250, 1257, 1264, 1274, 1281, 1288, 1295, 1302, 1309, 1315, 1322, 1329, 1335, 1342, 1348, 1355, 1362, 1369, 1376, 1385, 1397, 1404, 1417, 1424, 1431, 1437, 1444, 1451, 1458, 1464, 1471, 1478, 1484, 1491, 1498, 1504, 1511, 1515, 1522, 1534, 1547, 1552, 1564, 1577, 1584, 1590, 1597, 1604, 1611, 1618, 1625, 1632, 1639, 1646, 1653, 1660, 1665, 1675, 1683, 1693, 1701, 1705, 1716, 1719, 1731, 1736, 1747, 1756, 1772, 1780, 1789, 1795, 1801, 1813, 1820, 1827, 1834, 1841, 1848, 1855, 1862, 1881, 1894, 1901, 1920, 1927, 1934, 1941, 1953, 1959, 1966, 1981, 1989, 1997, and 2005; a HCDR2 comprising an amino acid sequence at least 65%, at least 70%, at least 75%, at least 80%, at least 85%, at least 90%, at least 95%, at least 99%, or 100% identical to any one of SEQ ID NOs: 1100, 1107, 1114, 1118, 1124, 1131, 1138, 1145, 1152, 1159, 1166, 1178, 1185, 1192, 1204, 1216, 1225, 1232, 1239, 1244, 1251, 1258, 1275, 1282, 1289, 1296, 1303, 1310, 1316, 1323, 1330, 1336, 1343, 1349, 1356, 1363, 1370, 1377, 1386, 1391, 1398, 1405, 1411, 1418, 1425, 1432, 1438, 1445, 1452, 1465, 1472, 1479, 1485, 1492, 1499, 1505, 1516, 1523, 1528, 1535, 1541, 1548, 1553, 1559, 1565, 1571, 1578, 1585, 1591, 1598, 1605, 1612, 1619, 1626, 1633, 1640, 1647, 1654, 1666, 1676, 1684, 1687, 1694, 1702, 1706, 1712, 1717, 1720, 1725, 1732, 1737, 1741, 1748, 1757, 1767, 1773, 1781, 1790, 1802, 1807, 1814, 1821, 1828, 1835, 1842, 1849, 1856, 1863, 1869, 1875, 1882, 1888, 1895, 1902, 1908, 1914, 1921, 1928, 1935, 1942, 1948, 1954, 1960, 1967, 1972, 1982, 1990, 1998, and 2006; and a HCDR3 comprising an amino acid sequence at least 65%, at least 70%, at least 75%, at least 80%, at least 85%, at least 90%, at least 95%, at least 99%, or 100% identical to any one of SEQ ID NOs: 1101, 1108, 1115, 1125, 1132, 1139, 1146, 1153, 1160, 1167, 1172, 1179, 1186, 1193, 1197, 1205, 1209, 1217, 1226, 1233, 1240, 1245, 1252, 1259, 1269, 1276, 1283, 1290, 1297, 1304, 1311, 1317, 1324, 1331, 1337, 1344, 1350, 1357, 1364, 1371, 1378, 1387, 1392, 1399, 1406, 1412, 1419, 1426, 1433, 1439, 1446, 1453, 1459, 1466, 1473, 1480, 1486, 1493, 1500, 1506, 1517, 1524, 1529, 1536, 1542, 1549, 1554, 1560, 1566, 1572, 1579, 1586, 1592, 1599, 1606, 1613, 1620, 1627, 1634, 1641, 1648, 1655, 1661, 1667, 1670, 1677, 1685, 1688, 1695, 1703, 1707, 1713, 1733, 1749, 1758, 1762, 1774, 1782, 1791, 1796, 1803, 1808, 1815, 1822, 1829, 1836, 1843, 1850, 1857, 1864, 1870, 1876, 1883, 1889, 1896, 1903, 1909, 1915, 1922, 1929, 1936, 1943, 1949, 1955, 1961, 1968, 1973, 1975, 1983, 1991, 1999, and 2007, or VH1 is a first immunoglobulin heavy chain variable region that specifically binds to (i) a tumor-associated antigen (TAA), (ii) an infectious disease antigen that is not a sarbecovirus antigen, or (iii) an other-pathology antigen, comprising an amino acid sequence at least 65%, at least 70%, at least 75%, at least 80%, at least 85%, at least 90%, at least 95%, at least 99%, or 100% identical to any one of SEQ ID NOs: 1102, 1109, 1116, 1119, 1126, 1133, 1140, 1147, 1154, 1161, 1168, 1173, 1180, 1187, 1194, 1198, 1206, 1210, 1218, 1220, 1227, 1234, 1241, 1246, 1253, 1260, 1265, 1270, 1277, 1284, 1291, 1298, 1305, 1312, 1318, 1325, 1332, 1338, 1345, 1351, 1358, 1365, 1372, 1379, 1381, 1388, 1393, 1400, 1407, 1413, 1420, 1427, 1434, 1440, 1447, 1454, 1460, 1467, 1474, 1481, 1487, 1494, 1501, 1507, 1512, 1518, 1525, 1530, 1537, 1543, 1550, 1555, 1561, 1567, 1573, 1580, 1587, 1593, 1600, 1607, 1614, 1621, 1628, 1635, 1642, 1649, 1656, 1662, 1668, 1671, 1678, 1686, 1696, 1704, 1714, 1722, 1726, 1734, 1742, 1750, 1759, 1760, 1765, 1768, 1775, 1783, 1785, 1792, 1797, 1804, 1809, 1816, 1823, 1830, 1837, 1844, 1851, 1858, 1865, 1871, 1877, 1884, 1890, 1897, 1904, 1910, 1916, 1923, 1930, 1937, 1944, 1950, 1956, 1962, 1969, 1974, 1984, 1992, 2000, and 2008; and VH2 is a second immunoglobulin heavy chain variable region that specifically binds to (i) a tumor-associated antigen (TAA), (ii) an infectious disease antigen that is not a sarbecovirus antigen, or (iii) an other-pathology antigen, and which comprises a HCDR1 comprising an amino acid sequence at least 65%, at least 70%, at least 75%, at least 80%, at least 85%, at least 90%, at least 95%, at least 99%, or 100% identical to any one of SEQ ID NOs: 1099, 1106, 1113, 1117, 1123, 1130, 1137, 1144, 1151, 1158, 1165, 1177, 1184, 1191, 1203, 1215, 1224, 1231, 1238, 1243, 1250, 1257, 1264, 1274, 1281, 1288, 1295, 1302, 1309, 1315, 1322, 1329, 1335, 1342, 1348, 1355, 1362, 1369, 1376, 1385, 1397, 1404, 1417, 1424, 1431, 1437, 1444, 1451, 1458, 1464, 1471, 1478, 1484, 1491, 1498, 1504, 1511, 1515, 1522, 1534, 1547, 1552, 1564, 1577, 1584, 1590, 1597, 1604, 1611, 1618, 1625, 1632, 1639, 1646, 1653, 1660, 1665, 1675, 1683, 1693, 1701, 1705, 1716, 1719, 1731, 1736, 1747, 1756, 1772, 1780, 1789, 1795, 1801, 1813, 1820, 1827, 1834, 1841, 1848, 1855, 1862, 1881, 1894, 1901, 1920, 1927, 1934, 1941, 1953, 1959, 1966, 1981, 1989, 1997, and 2005; a HCDR2 comprising an amino acid sequence at least 65%, at least 70%, at least 75%, at least 80%, at least 85%, at least 90%, at least 95%, at least 99%, or 100% identical to any one of SEQ ID NOs: 1100, 1107, 1114, 1118, 1124, 1131, 1138, 1145, 1152, 1159, 1166, 1178, 1185, 1192, 1204, 1216, 1225, 1232, 1239, 1244, 1251, 1258, 1275, 1282, 1289, 1296, 1303, 1310, 1316, 1323, 1330, 1336, 1343, 1349, 1356, 1363, 1370, 1377, 1386, 1391, 1398, 1405, 1411, 1418, 1425, 1432, 1438, 1445, 1452, 1465, 1472, 1479, 1485, 1492, 1499, 1505, 1516, 1523, 1528, 1535, 1541, 1548, 1553, 1559, 1565, 1571, 1578, 1585, 1591, 1598, 1605, 1612, 1619, 1626, 1633, 1640, 1647, 1654, 1666, 1676, 1684, 1687, 1694, 1702, 1706, 1712, 1717, 1720, 1725, 1732, 1737, 1741, 1748, 1757, 1767, 1773, 1781, 1790, 1802, 1807, 1814, 1821, 1828, 1835, 1842, 1849, 1856, 1863, 1869, 1875, 1882, 1888, 1895, 1902, 1908, 1914, 1921, 1928, 1935, 1942, 1948, 1954, 1960, 1967, 1972, 1982, 1990, 1998, and 2006; and a HCDR3 comprising an amino acid sequence at least 65%, at least 70%, at least 75%, at least 80%, at least 85%, at least 90%, at least 95%, at least 99%, or 100% identical to any one of SEQ ID NOs: 1101, 1108, 1115, 1125, 1132, 1139, 1146, 1153, 1160, 1167, 1172, 1179, 1186, 1193, 1197, 1205, 1209, 1217, 1226, 1233, 1240, 1245, 1252, 1259, 1269, 1276, 1283, 1290, 1297, 1304, 1311, 1317, 1324, 1331, 1337, 1344, 1350, 1357, 1364, 1371, 1378, 1387, 1392, 1399, 1406, 1412, 1419, 1426, 1433, 1439, 1446, 1453, 1459, 1466, 1473, 1480, 1486, 1493, 1500, 1506, 1517, 1524, 1529, 1536, 1542, 1549, 1554, 1560, 1566, 1572, 1579, 1586, 1592, 1599, 1606, 1613, 1620, 1627, 1634, 1641, 1648, 1655, 1661, 1667, 1670, 1677, 1685, 1688, 1695, 1703, 1707, 1713, 1733, 1749, 1758, 1762, 1774, 1782, 1791, 1796, 1803, 1808, 1815, 1822, 1829, 1836, 1843, 1850, 1857, 1864, 1870, 1876, 1883, 1889, 1896, 1903, 1909, 1915, 1922, 1929, 1936, 1943, 1949, 1955, 1961, 1968, 1973, 1975, 1983, 1991, 1999, and 2007, or VH2 is a second immunoglobulin heavy chain variable region that specifically binds to (i) a tumor-associated antigen (TAA), (ii) an infectious disease antigen that is not a sarbecovirus antigen, or (iii) an other-pathology antigen, comprising an amino acid sequence at least 65%, at least 70%, at least 75%, at least 80%, at least 85%, at least 90%, at least 95%, at least 99%, or 100% identical to any one of SEQ ID NOs: 1102, 1109, 1116, 1119, 1126, 1133, 1140, 1147, 1154, 1161, 1168, 1173, 1180, 1187, 1194, 1198, 1206, 1210, 1218, 1220, 1227, 1234, 1241, 1246, 1253, 1260, 1265, 1270, 1277, 1284, 1291, 1298, 1305, 1312, 1318, 1325, 1332, 1338, 1345, 1351, 1358, 1365, 1372, 1379, 1381, 1388, 1393, 1400, 1407, 1413, 1420, 1427, 1434, 1440, 1447, 1454, 1460, 1467, 1474, 1481, 1487, 1494, 1501, 1507, 1512, 1518, 1525, 1530, 1537, 1543, 1550, 1555, 1561, 1567, 1573, 1580, 1587, 1593, 1600, 1607, 1614, 1621, 1628, 1635, 1642, 1649, 1656, 1662, 1668, 1671, 1678, 1686, 1696, 1704, 1714, 1722, 1726, 1734, 1742, 1750, 1759, 1760, 1765, 1768, 1775, 1783, 1785, 1792, 1797, 1804, 1809, 1816, 1823, 1830, 1837, 1844, 1851, 1858, 1865, 1871, 1877, 1884, 1890, 1897, 1904, 1910, 1916, 1923, 1930, 1937, 1944, 1950, 1956, 1962, 1969, 1974, 1984, 1992, 2000, and 2008; Fc is a region comprising an immunoglobulin heavy chain constant region 2 (CH2), an immunoglobulin heavy chain constant region 3 (CH3), and optionally, an immunoglobulin hinge; and L1-L5 are optional amino acid linkers.

[0632] In some aspects, the antigen binding polypeptide complex comprises a polypeptide having a structure represented by: VL1-L1-VL2-L2-VH2-L3-VH1-L4-Fc-L5-Fc; or VH1-L1-VH2-L2-VL2-L3-VL1-L4-Fc-L5-Fc; wherein: VL1 is a first immunoglobulin light chain variable region that specifically binds to (i) a tumor-associated antigen (TAA), (ii) an infectious disease antigen that is not a sarbecovirus antigen, or (iii) an other-pathology antigen, and which comprises a light chain complementary determining region (LCDR) 1 comprising an amino acid sequence at least 65%, at least 70%, at least 75%, at least 80%, at least 85%, at least 90%, at least 95%, at least 99%, or 100% identical to any one of SEQ ID NOs: 1096, 1103, 1110, 1120, 1127, 1134, 1141, 1148, 1155, 1162, 1169, 1174, 1181, 1188, 1199, 1211, 1221, 1228, 1235, 1247, 1254, 1261, 1266, 1271, 1278, 1285, 1292, 1299, 1306, 1313, 1319, 1326, 1339, 1352, 1359, 1366, 1373, 1382, 1394, 1401, 1408, 1414, 1421, 1428, 1441, 1448, 1455, 1461, 1468, 1475, 1488, 1495, 1508, 1519, 1526, 1531, 1538, 1544, 1556, 1568, 1574, 1581, 1594, 1601, 1608, 1615, 1622, 1629, 1636, 1643, 1650, 1657, 1672, 1679, 1689, 1697, 1708, 1715, 1718, 1723, 1727, 1738, 1743, 1752, 1761, 1763, 1769, 1776, 1786, 1793, 1798, 1810, 1817, 1824, 1831, 1838, 1845, 1852, 1859, 1866, 1872, 1878, 1885, 1891, 1898, 1905, 1911, 1917, 1924, 1931, 1938, 1945, 1963, 1977, 1985, 1993, and 2001; a LCDR2 comprising an amino acid sequence at least 65%, at least 70%, at least 75%, at least 80%, at least 85%, at least 90%, at least 95%, at least 99%, or 100% identical to any one of amino acid sequences AAS, APS, AT, ATS, AVS, DAS, DDG, DDS, DNN, DT, DTS, DVS, EAS, EDN, EVS, FTS, GAF, GAN, GAS, GAT, GIS, GKN, GNG, GNS, HTS, KAS, KVS, LAS, LGS, LVS, NAK, NTD, NTN, QMS, RMS, RTS, SAS, STS, TTS, WAS, YAS, YAT, YGS, YRS, and YTS, or at least 65%, at least 70%, at least 75%, at least 80%, at least 85%, at least 90%, at least 95%, at least 99%, or 100% identical to any one of SEQ ID NOs: 1200, 1212, 1680, 1690, 1698, 1709, 1728, 1739, 1744, 1753, 1770, 1777, 1978, 1986, 1994, and 2002; and a LCDR3 comprising an amino acid sequence at least 65%, at least 70%, at least 75%, at least 80%, at least 85%, at least 90%, at least 95%, at least 99%, or 100% identical to any one of SEQ ID NOs: 1097, 1104, 1111, 1121, 1128, 1135, 1142, 1149, 1156, 1163, 1170, 1175, 1182, 1189, 1195, 1201, 1207, 1213, 1222, 1229, 1236, 2009, 1248, 1255, 1262, 1267, 1272, 1279, 1286, 1293, 1300, 1307, 1320, 1327, 1333, 1340, 1346, 1353, 1360, 1367, 1374, 1383, 1389, 1395, 1402, 1409, 1415, 1422, 1429, 1435, 1442, 1449, 1456, 1462, 1469, 1476, 1482, 1489, 1496, 1502, 1509, 1513, 1520, 1532, 1539, 1545, 1557, 1562, 1569, 1575, 1582, 1588, 1595, 1602, 1609, 1616, 1623, 1630, 1637, 1644, 1651, 1658, 1663, 1673, 1681, 1691, 1699, 1710, 1729, 1735, 1745, 1751, 1754, 1778, 1787, 1799, 1805, 1811, 1818, 1825, 1832, 1839, 1846, 1853, 1860, 1867, 1873, 1879, 1886, 1892, 1899, 1906, 1912, 1918, 1925, 1932, 1939, 1946, 1951, 1957, 1964, 1970, 1976, 1979, 1987, 1995, and 2003, or VL1 is a first immunoglobulin light chain variable region that specifically binds to (i) a tumor-associated antigen (TAA), (ii) an infectious disease antigen that is not a sarbecovirus antigen, or (iii) an other-pathology antigen, comprising an amino acid sequence at least 65%, at least 70%, at least 75%, at least 80%, at least 85%, at least 90%, at least 95%, at least 99%, or 100% identical to any one of SEQ ID NOs: 1098, 1105, 1112, 1122, 1129, 1136, 1143, 1150, 1157, 1164, 1171, 1176, 1183, 1190, 1196, 1202, 1208, 1214, 1219, 1223, 1230, 1237, 1242, 1249, 1256, 1263, 1268, 1273, 1280, 1287, 1294, 1301, 1308, 1314, 1321, 1328, 1334, 1341, 1347, 1354, 1361, 1368, 1375, 1380, 1384, 1390, 1396, 1403, 1410, 1416, 1423, 1430, 1436, 1443, 1450, 1457, 1463, 1470, 1477, 1483, 1490, 1497, 1503, 1510, 1514, 1521, 1527, 1533, 1540, 1546, 1551, 1558, 1563, 1570, 1576, 1583, 1589, 1596, 1603, 1610, 1617, 1624, 1631, 1638, 1645, 1652, 1659, 1664, 1669, 1674, 1682, 1692, 1700, 1711, 1721, 1724, 1730, 1740, 1746, 1755, 1764, 1766, 1771, 1779, 1784, 1788, 1794, 1800, 1806, 1812, 1819, 1826, 1833, 1840, 1847, 1854, 1861, 1868, 1874, 1880, 1887, 1893, 1900, 1907, 1913, 1919, 1926, 1933, 1940, 1947, 1952, 1958, 1965, 1971, 1980, 1988, 1996, and 2004; VL2 is a second immunoglobulin light chain variable region that specifically binds to (i) a tumor-associated antigen (TAA), (ii) an infectious disease antigen that is not a sarbecovirus antigen, or (iii) an other-pathology antigen, and which comprises a LCDR1 comprising an amino acid sequence at least 65%, at least 70%, at least 75%, at least 80%, at least 85%, at least 90%, at least 95%, at least 99%, or 100% identical to any one of SEQ ID NOs: 1096, 1103, 1110, 1120, 1127, 1134, 1141, 1148, 1155, 1162, 1169, 1174, 1181, 1188, 1199, 1211, 1221, 1228, 1235, 1247, 1254, 1261, 1266, 1271, 1278, 1285, 1292, 1299, 1306, 1313, 1319, 1326, 1339, 1352, 1359, 1366, 1373, 1382, 1394, 1401, 1408, 1414, 1421, 1428, 1441, 1448, 1455, 1461, 1468, 1475, 1488, 1495, 1508, 1519, 1526, 1531, 1538, 1544, 1556, 1568, 1574, 1581, 1594, 1601, 1608, 1615, 1622, 1629, 1636, 1643, 1650, 1657, 1672, 1679, 1689, 1697, 1708, 1715, 1718, 1723, 1727, 1738, 1743, 1752, 1761, 1763, 1769, 1776, 1786, 1793, 1798, 1810, 1817, 1824, 1831, 1838, 1845, 1852, 1859, 1866, 1872, 1878, 1885, 1891, 1898, 1905, 1911, 1917, 1924, 1931, 1938, 1945, 1963, 1977, 1985, 1993, and 2001, and 1065; a LCDR2 comprising an amino acid sequence at least 65%, at least 70%, at least 75%, at least 80%, at least 85%, at least 90%, at least 95%, at least 99%, or 100% identical to any one of amino acid sequences AAS, APS, AT, ATS, AVS, DAS, DDG, DDS, DNN, DT, DTS, DVS, EAS, EDN, EVS, FTS, GAF, GAN, GAS, GAT, GIS, GKN, GNG, GNS, HTS, KAS, KVS, LAS, LGS, LVS, NAK, NTD, NTN, QMS, RMS, RTS, SAS, STS, TTS, WAS, YAS, YAT, YGS, YRS, and YTS, or at least 65%, at least 70%, at least 75%, at least 80%, at least 85%, at least 90%, at least 95%, at least 99%, or 100% identical to any one of SEQ ID NOs: 1200, 1212, 1680, 1690, 1698, 1709, 1728, 1739, 1744, 1753, 1770, 1777, 1978, 1986, 1994, and 2002; and a LCDR3 comprising an amino acid sequence at least 65%, at least 70%, at least 75%, at least 80%, at least 85%, at least 90%, at least 95%, at least 99%, or 100% identical to any one of SEQ ID NOs: 1097, 1104, 1111, 1121, 1128, 1135, 1142, 1149, 1156, 1163, 1170, 1175, 1182, 1189, 1195, 1201, 1207, 1213, 1222, 1229, 1236, 2009, 1248, 1255, 1262, 1267, 1272, 1279, 1286, 1293, 1300, 1307, 1320, 1327, 1333, 1340, 1346, 1353, 1360, 1367, 1374, 1383, 1389, 1395, 1402, 1409, 1415, 1422, 1429, 1435, 1442, 1449, 1456, 1462, 1469, 1476, 1482, 1489, 1496, 1502, 1509, 1513, 1520, 1532, 1539, 1545, 1557, 1562, 1569, 1575, 1582, 1588, 1595, 1602, 1609, 1616, 1623, 1630, 1637, 1644, 1651, 1658, 1663, 1673, 1681, 1691, 1699, 1710, 1729, 1735, 1745, 1751, 1754, 1778, 1787, 1799, 1805, 1811, 1818, 1825, 1832, 1839, 1846, 1853, 1860, 1867, 1873, 1879, 1886, 1892, 1899, 1906, 1912, 1918, 1925, 1932, 1939, 1946, 1951, 1957, 1964, 1970, 1976, 1979, 1987, 1995, and 2003, or VL2 is a second immunoglobulin light chain variable region that specifically binds (i) a tumor-associated antigen (TAA), (ii) an infectious disease antigen that is not a sarbecovirus antigen, or (iii) an other-pathology antigen, comprising an amino acid sequence at least 65%, at least 70%, at least 75%, at least 80%, at least 85%, at least 90%, at least 95%, at least 99%, or 100% identical to any one of SEQ ID NOs: 1098, 1105, 1112, 1122, 1129, 1136, 1143, 1150, 1157, 1164, 1171, 1176, 1183, 1190, 1196, 1202, 1208, 1214, 1219, 1223, 1230, 1237, 1242, 1249, 1256, 1263, 1268, 1273, 1280, 1287, 1294, 1301, 1308, 1314, 1321, 1328, 1334, 1341, 1347, 1354, 1361, 1368, 1375, 1380, 1384, 1390, 1396, 1403, 1410, 1416, 1423, 1430, 1436, 1443, 1450, 1457, 1463, 1470, 1477, 1483, 1490, 1497, 1503, 1510, 1514, 1521, 1527, 1533, 1540, 1546, 1551, 1558, 1563, 1570, 1576, 1583, 1589, 1596, 1603, 1610, 1617, 1624, 1631, 1638, 1645, 1652, 1659, 1664, 1669, 1674, 1682, 1692, 1700, 1711, 1721, 1724, 1730, 1740, 1746, 1755, 1764, 1766, 1771, 1779, 1784, 1788, 1794, 1800, 1806, 1812, 1819, 1826, 1833, 1840, 1847, 1854, 1861, 1868, 1874, 1880, 1887, 1893, 1900, 1907, 1913, 1919, 1926, 1933, 1940, 1947, 1952, 1958, 1965, 1971, 1980, 1988, 1996, and 2004; VH1 is a first immunoglobulin heavy chain variable region that specifically binds to (i) a tumor-associated antigen (TAA), (ii) an infectious disease antigen that is not a sarbecovirus antigen, or (iii) an other-pathology antigen, and which comprises a heavy chain complementary determining region (HCDR) 1 comprising an amino acid sequence at least 65%, at least 70%, at least 75%, at least 80%, at least 85%, at least 90%, at least 95%, at least 99%, or 100% identical to any one of SEQ ID NOs: 1099, 1106, 1113, 1117, 1123, 1130, 1137, 1144, 1151, 1158, 1165, 1177, 1184, 1191, 1203, 1215, 1224, 1231, 1238, 1243, 1250, 1257, 1264, 1274, 1281, 1288, 1295, 1302, 1309, 1315, 1322, 1329, 1335, 1342, 1348, 1355, 1362, 1369, 1376, 1385, 1397, 1404, 1417, 1424, 1431, 1437, 1444, 1451, 1458, 1464, 1471, 1478, 1484, 1491, 1498, 1504, 1511, 1515, 1522, 1534, 1547, 1552, 1564, 1577, 1584, 1590, 1597, 1604, 1611, 1618, 1625, 1632, 1639, 1646, 1653, 1660, 1665, 1675, 1683, 1693, 1701, 1705, 1716, 1719, 1731, 1736, 1747, 1756, 1772, 1780, 1789, 1795, 1801, 1813, 1820, 1827, 1834, 1841, 1848, 1855, 1862, 1881, 1894, 1901, 1920, 1927, 1934, 1941, 1953, 1959, 1966, 1981, 1989, 1997, and 2005; a HCDR2 comprising an amino acid sequence at least 65%, at least 70%, at least 75%, at least 80%, at least 85%, at least 90%, at least 95%, at least 99%, or 100% identical to any one of SEQ ID NOs: 1100, 1107, 1114, 1118, 1124, 1131, 1138, 1145, 1152, 1159, 1166, 1178, 1185, 1192, 1204, 1216, 1225, 1232, 1239, 1244, 1251, 1258, 1275, 1282, 1289, 1296, 1303, 1310, 1316, 1323, 1330, 1336, 1343, 1349, 1356, 1363, 1370, 1377, 1386, 1391, 1398, 1405, 1411, 1418, 1425, 1432, 1438, 1445, 1452, 1465, 1472, 1479, 1485, 1492, 1499, 1505, 1516, 1523, 1528, 1535, 1541, 1548, 1553, 1559, 1565, 1571, 1578, 1585, 1591, 1598, 1605, 1612, 1619, 1626, 1633, 1640, 1647, 1654, 1666, 1676, 1684, 1687, 1694, 1702, 1706, 1712, 1717, 1720, 1725, 1732, 1737, 1741, 1748, 1757, 1767, 1773, 1781, 1790, 1802, 1807, 1814, 1821, 1828, 1835, 1842, 1849, 1856, 1863, 1869, 1875, 1882, 1888, 1895, 1902, 1908, 1914, 1921, 1928, 1935, 1942, 1948, 1954, 1960, 1967, 1972, 1982, 1990, 1998, and 2006; and a HCDR3 comprising an amino acid sequence at least 65%, at least 70%, at least 75%, at least 80%, at least 85%, at least 90%, at least 95%, at least 99%, or 100% identical to any one of SEQ ID NOs: 1101, 1108, 1115, 1125, 1132, 1139, 1146, 1153, 1160, 1167, 1172, 1179, 1186, 1193, 1197, 1205, 1209, 1217, 1226, 1233, 1240, 1245, 1252, 1259, 1269, 1276, 1283, 1290, 1297, 1304, 1311, 1317, 1324, 1331, 1337, 1344, 1350, 1357, 1364, 1371, 1378, 1387, 1392, 1399, 1406, 1412, 1419, 1426, 1433, 1439, 1446, 1453, 1459, 1466, 1473, 1480, 1486, 1493, 1500, 1506, 1517, 1524, 1529, 1536, 1542, 1549, 1554, 1560, 1566, 1572, 1579, 1586, 1592, 1599, 1606, 1613, 1620, 1627, 1634, 1641, 1648, 1655, 1661, 1667, 1670, 1677, 1685, 1688, 1695, 1703, 1707, 1713, 1733, 1749, 1758, 1762, 1774, 1782, 1791, 1796, 1803, 1808, 1815, 1822, 1829, 1836, 1843, 1850, 1857, 1864, 1870, 1876, 1883, 1889, 1896, 1903, 1909, 1915, 1922, 1929, 1936, 1943, 1949, 1955, 1961, 1968, 1973, 1975, 1983, 1991, 1999, and 2007, or VH1 is a first immunoglobulin heavy chain variable region that specifically binds to (i) a tumor-associated antigen (TAA), (ii) an infectious disease antigen that is not a sarbecovirus antigen, or (iii) an other-pathology antigen, comprising an amino acid sequence at least 65%, at least 70%, at least 75%, at least 80%, at least 85%, at least 90%, at least 95%, at least 99%, or 100% identical to any one of SEQ ID NOs: 1102, 1109, 1116, 1119, 1126, 1133, 1140, 1147, 1154, 1161, 1168, 1173, 1180, 1187, 1194, 1198, 1206, 1210, 1218, 1220, 1227, 1234, 1241, 1246, 1253, 1260, 1265, 1270, 1277, 1284, 1291, 1298, 1305, 1312, 1318, 1325, 1332, 1338, 1345, 1351, 1358, 1365, 1372, 1379, 1381, 1388, 1393, 1400, 1407, 1413, 1420, 1427, 1434, 1440, 1447, 1454, 1460, 1467, 1474, 1481, 1487, 1494, 1501, 1507, 1512, 1518, 1525, 1530, 1537, 1543, 1550, 1555, 1561, 1567, 1573, 1580, 1587, 1593, 1600, 1607, 1614, 1621, 1628, 1635, 1642, 1649, 1656, 1662, 1668, 1671, 1678, 1686, 1696, 1704, 1714, 1722, 1726, 1734, 1742, 1750, 1759, 1760, 1765, 1768, 1775, 1783, 1785, 1792, 1797, 1804, 1809, 1816, 1823, 1830, 1837, 1844, 1851, 1858, 1865, 1871, 1877, 1884, 1890, 1897, 1904, 1910, 1916, 1923, 1930, 1937, 1944, 1950, 1956, 1962, 1969, 1974, 1984, 1992, 2000, and 2008; and VH2 is a second immunoglobulin heavy chain variable region that specifically binds to (i) a tumor-associated antigen (TAA), (ii) an infectious disease antigen that is not a sarbecovirus antigen, or (iii) an other-pathology antigen, and which comprises a HCDR1 comprising an amino acid sequence at least 65%, at least 70%, at least 75%, at least 80%, at least 85%, at least 90%, at least 95%, at least 99%, or 100% identical to any one of SEQ ID NOs: 1099, 1106, 1113, 1117, 1123, 1130, 1137, 1144, 1151, 1158, 1165, 1177, 1184, 1191, 1203, 1215, 1224, 1231, 1238, 1243, 1250, 1257, 1264, 1274, 1281, 1288, 1295, 1302, 1309, 1315, 1322, 1329, 1335, 1342, 1348, 1355, 1362, 1369, 1376, 1385, 1397, 1404, 1417, 1424, 1431, 1437, 1444, 1451, 1458, 1464, 1471, 1478, 1484, 1491, 1498, 1504, 1511, 1515, 1522, 1534, 1547, 1552, 1564, 1577, 1584, 1590, 1597, 1604, 1611, 1618, 1625, 1632, 1639, 1646, 1653, 1660, 1665, 1675, 1683, 1693, 1701, 1705, 1716, 1719, 1731, 1736, 1747, 1756, 1772, 1780, 1789, 1795, 1801, 1813, 1820, 1827, 1834, 1841, 1848, 1855, 1862, 1881, 1894, 1901, 1920, 1927, 1934, 1941, 1953, 1959, 1966, 1981, 1989, 1997, and 2005; a HCDR2 comprising an amino acid sequence at least 65%, at least 70%, at least 75%, at least 80%, at least 85%, at least 90%, at least 95%, at least 99%, or 100% identical to any one of SEQ ID NOs: 1100, 1107, 1114, 1118, 1124, 1131, 1138, 1145, 1152, 1159, 1166, 1178, 1185, 1192, 1204, 1216, 1225, 1232, 1239, 1244, 1251, 1258, 1275, 1282, 1289, 1296, 1303, 1310, 1316, 1323, 1330, 1336, 1343, 1349, 1356, 1363, 1370, 1377, 1386, 1391, 1398, 1405, 1411, 1418, 1425, 1432, 1438, 1445, 1452, 1465, 1472, 1479, 1485, 1492, 1499, 1505, 1516, 1523, 1528, 1535, 1541, 1548, 1553, 1559, 1565, 1571, 1578, 1585, 1591, 1598, 1605, 1612, 1619, 1626, 1633, 1640, 1647, 1654, 1666, 1676, 1684, 1687, 1694, 1702, 1706, 1712, 1717, 1720, 1725, 1732, 1737, 1741, 1748, 1757, 1767, 1773, 1781, 1790, 1802, 1807, 1814, 1821, 1828, 1835, 1842, 1849, 1856, 1863, 1869, 1875, 1882, 1888, 1895, 1902, 1908, 1914, 1921, 1928, 1935, 1942, 1948, 1954, 1960, 1967, 1972, 1982, 1990, 1998, and 2006; and a HCDR3 comprising an amino acid sequence at least 65%, at least 70%, at least 75%, at least 80%, at least 85%, at least 90%, at least 95%, at least 99%, or 100% identical to any one of SEQ ID NOs: 1101, 1108, 1115, 1125, 1132, 1139, 1146, 1153, 1160, 1167, 1172, 1179, 1186, 1193, 1197, 1205, 1209, 1217, 1226, 1233, 1240, 1245, 1252, 1259, 1269, 1276, 1283, 1290, 1297, 1304, 1311, 1317, 1324, 1331, 1337, 1344, 1350, 1357, 1364, 1371, 1378, 1387, 1392, 1399, 1406, 1412, 1419, 1426, 1433, 1439, 1446, 1453, 1459, 1466, 1473, 1480, 1486, 1493, 1500, 1506, 1517, 1524, 1529, 1536, 1542, 1549, 1554, 1560, 1566, 1572, 1579, 1586, 1592, 1599, 1606, 1613, 1620, 1627, 1634, 1641, 1648, 1655, 1661, 1667, 1670, 1677, 1685, 1688, 1695, 1703, 1707, 1713, 1733, 1749, 1758, 1762, 1774, 1782, 1791, 1796, 1803, 1808, 1815, 1822, 1829, 1836, 1843, 1850, 1857, 1864, 1870, 1876, 1883, 1889, 1896, 1903, 1909, 1915, 1922, 1929, 1936, 1943, 1949, 1955, 1961, 1968, 1973, 1975, 1983, 1991, 1999, and 2007, or VH2 is a second immunoglobulin heavy chain variable region that specifically binds to (i) a tumor-associated antigen (TAA), (ii) an infectious disease antigen that is not a sarbecovirus antigen, or (iii) an other-pathology antigen, comprising an amino acid sequence at least 65%, at least 70%, at least 75%, at least 80%, at least 85%, at least 90%, at least 95%, at least 99%, or 100% identical to any one of SEQ ID NOs: 1102, 1109, 1116, 1119, 1126, 1133, 1140, 1147, 1154, 1161, 1168, 1173, 1180, 1187, 1194, 1198, 1206, 1210, 1218, 1220, 1227, 1234, 1241, 1246, 1253, 1260, 1265, 1270, 1277, 1284, 1291, 1298, 1305, 1312, 1318, 1325, 1332, 1338, 1345, 1351, 1358, 1365, 1372, 1379, 1381, 1388, 1393, 1400, 1407, 1413, 1420, 1427, 1434, 1440, 1447, 1454, 1460, 1467, 1474, 1481, 1487, 1494, 1501, 1507, 1512, 1518, 1525, 1530, 1537, 1543, 1550, 1555, 1561, 1567, 1573, 1580, 1587, 1593, 1600, 1607, 1614, 1621, 1628, 1635, 1642, 1649, 1656, 1662, 1668, 1671, 1678, 1686, 1696, 1704, 1714, 1722, 1726, 1734, 1742, 1750, 1759, 1760, 1765, 1768, 1775, 1783, 1785, 1792, 1797, 1804, 1809, 1816, 1823, 1830, 1837, 1844, 1851, 1858, 1865, 1871, 1877, 1884, 1890, 1897, 1904, 1910, 1916, 1923, 1930, 1937, 1944, 1950, 1956, 1962, 1969, 1974, 1984, 1992, 2000, and 2008; Fc is a region comprising an immunoglobulin heavy chain constant region 2 (CH2), an immunoglobulin heavy chain constant region 3 (CH3), and optionally, an immunoglobulin hinge; and L1-L5 are optional amino acid linkers.

[0633] In some aspects, and in any one of the formulas shown herein, any one of the optional linkers each independently have a length of from 0 amino acids to about 50 amino acids.

[0634] In some aspects, and in any one of the formulas shown herein, any one of the optional linkers not having a length of 0 amino acids each independently comprise an amino acid sequence of G or A, or an amino acid sequence at least 65%, at least 70%, at least 75%, at least 80%, at least 85%, at least 90%, at least 95%, at least 99%, or 100% identical to amino acid sequence GSS or ASG, or an amino acid sequence at least 65%, at least 70%, at least 75%, at least 80%, at least 85%, at least 90%, at least 95%, at least 99%, or 100% identical to any one of SEQ ID NOs: 333-373 or 967-971. In some aspects, Ln comprises an amino acid sequence at least 65%, at least 70%, at least 75%, at least 80%, at least 85%, at least 90%, at least 95%, at least 99%, or 100% identical to any one of SEQ ID NOs: 333-345 or 967-971.

[0635] In some aspects, the Fc region comprises at least one knob-into-hole modification or Fc effector function knockout mutation. In some aspects, the antigen binding polypeptide complex disclosed herein is an IgG1 or IgG4 antibody or antigen binding fragment thereof and the knob-into-hole modification comprises: (i) knob substitutions of S354C and T366W; (ii) hole substitutions of Y349C, T366S, L368A and Y407V; (iii) a combination thereof; or equivalent thereof, based on the EU numbering scheme. In some aspects, the antigen binding polypeptide complex is an IgG1 or IgG4 antibody or antigen binding fragment thereof and the Fc effector function knockout mutation is L234A, L235A, P239A, or equivalent thereof, or a combination thereof, based on the EU numbering scheme.

[0636] In some aspects, the antigen binding polypeptide complex disclosed herein specifically binds to the (i) tumor-associated antigen (TAA), (ii) infectious disease antigen that is not a sarbecovirus antigen, or (iii) other-pathology antigen, with an equilibrium dissociation constant (K_{D})) of from about 10 μM to about 1 pM.

[0637] In some aspects, the antigen binding polypeptide complex disclosed herein is bispecific, trispecific or tetraspecific and has greater binding affinity to the (i) tumor-associated antigen (TAA), (ii) infectious disease antigen that is not a sarbecovirus antigen, or (iii) other-pathology antigen than a monospecific antigen binding polypeptide complex that specifically binds to one of the same antigens as the bispecific, trispecific or tetraspecific antigen binding polypeptide complex.

[0638] In some aspects, the antigen binding polypeptide complex disclosed herein is bispecific, trispecific or tetraspecific and has greater binding affinity to the (i) tumor-associated antigen (TAA), (ii) infectious disease antigen that is not a sarbecovirus antigen, or (iii) other-pathology antigen than a mixture of monospecific antigen binding polypeptide complexes that specifically bind to the same antigens as the bispecific, trispecific or tetraspecific antigen binding polypeptide complex.

[0639] Also provided herein is an antibody or an antigen binding fragment thereof comprising the antigen binding polypeptide or the antigen binding polypeptide complex disclosed herein, wherein the antibody or antigen binding fragment thereof exhibits improved prevention of immune escape compared to (i) a monovalent antibody or antigen binding fragment thereof that binds to one of the same antigens as the antibody or antigen binding fragment thereof, and/or (ii) a combination of monovalent antibodies or antigen binding fragments thereof that binds to the same antigens as the antibody or antigen binding fragment thereof.

[0640] Also provided herein is a pharmaceutical composition comprising the antigen binding polypeptide complex or the antibody or antigen binding fragment thereof disclosed herein and a pharmaceutically acceptable carrier.

[0641] Also provided herein is a kit comprising the antigen binding polypeptide complex, the antibody or antigen binding fragment thereof, or the pharmaceutical composition disclosed herein.

[0642] Also provided herein is a method of preventing or treating (i) a cancer or a tumor, (ii) an infectious disease that is not a sarbecovirus infectious disease, or (iii) a pathology other than a cancer or a tumor or an infectious disease that is not a sarbecovirus infectious disease in a subject in need thereof, comprising administering to the subject a therapeutically effective amount of the antigen binding polypeptide complex, the antibody or antigen binding fragment thereof, or the pharmaceutical composition disclosed herein.

[0643] Also provided herein is a method of diagnosing a subject as having or as being suspected of having (i) a cancer or a tumor, (ii) an infectious disease that is not a sarbecovirus infectious disease, or (iii) a pathology other than a cancer or a tumor or an infectious disease that is not a sarbecovirus infectious disease, comprising (a) contacting a sample obtained from the subject with the antigen binding polypeptide complex or with the antibody or antigen binding fragment thereof disclosed herein; (b) detecting the presence or absence of a complex which contains the polypeptide complex or a fragment thereof, or the antibody or a fragment thereof and (i) a tumor-associated antigen (TAA) or fragment thereof, (ii) an infectious disease antigen that is not a sarbecovirus antigen or fragment thereof, or (iii) an other-pathology antigen or fragment thereof; and (c) diagnosing the subject as having or as being suspected of having (i) a cancer or a tumor, (ii) an infectious disease that is not a sarbecovirus infectious disease, or (iii) a pathology other than a cancer or a tumor or an infectious disease that is not a sarbecovirus infectious disease when the presence of the complex is detected.

[0644] Also provided herein is a method of diagnosing a subject as not having or as not being suspected of having (i) a cancer or a tumor, (ii) an infectious disease that is not a sarbecovirus infectious disease, or (iii) a pathology other than a cancer or a tumor or an infectious disease that is not a sarbecovirus infectious disease, comprising (a) contacting a sample obtained from the subject with the antigen binding polypeptide complex or with the antibody or antigen binding fragment thereof disclosed herein; (b) detecting the presence or absence of a complex which contains the polypeptide complex or a fragment thereof, or the antibody or a fragment thereof and (i) a tumor-associated antigen (TAA) or fragment thereof, (ii) an infectious disease antigen that is not a sarbecovirus antigen or fragment thereof, or (iii) an other-pathology antigen or fragment thereof; and (c) diagnosing the subject as having or as being suspected of having (i) a cancer or a tumor, (ii) an infectious disease that is not a sarbecovirus infectious disease, or (iii) a pathology other than a cancer or a tumor or an infectious disease that is not a sarbecovirus infectious disease when the presence of the complex is not detected.

[0645] Also provided herein is an antibody or antigen binding fragment thereof selected from the group consisting of: (a) an antigen binding polypeptide having a structure represented by: VL1-L1-VH1 or VH1-L1-VL1; wherein: VL1 is a first immunoglobulin light chain variable region that specifically binds to (i) a tumor-associated antigen (TAA), (ii) an infectious disease antigen that is not a sarbecovirus antigen, or (iii) an other-pathology antigen; VH1 is a first immunoglobulin heavy chain variable region that specifically binds to (i) a tumor-associated antigen (TAA), (ii) an infectious disease antigen that is not a sarbecovirus antigen, or (iii) an other-pathology antigen; and L1 and L2 are optional amino acid linkers; or an antigen binding polypeptide having a structure represented by: VL1-L1-VL2-L2-VH2-L3-VH1; VL1-L1-VH2-L2-VL2-L3-VH1; VH1-L1-VH2-L2-VL2-L3-VL1; or VH1-L1-VL2-L2-VH2-L3-VL1; wherein: VL1 is a first immunoglobulin light chain variable region that specifically binds to (i) a tumor-associated antigen (TAA), (ii) an infectious disease antigen that is not a sarbecovirus antigen, or (iii) an other-pathology antigen, and which comprises a light chain complementary determining region (LCDR) 1 comprising an amino acid sequence at least 65%, at least 70%, at least 75%, at least 80%, at least 85%, at least 90%, at least 95%, at least 99%, or 100% identical to any one of SEQ ID NOs: 1096, 1103, 1110, 1120, 1127, 1134, 1141, 1148, 1155, 1162, 1169, 1174, 1181, 1188, 1199, 1211, 1221, 1228, 1235, 1247, 1254, 1261, 1266, 1271, 1278, 1285, 1292, 1299, 1306, 1313, 1319, 1326, 1339, 1352, 1359, 1366, 1373, 1382, 1394, 1401, 1408, 1414, 1421, 1428, 1441, 1448, 1455, 1461, 1468, 1475, 1488, 1495, 1508, 1519, 1526, 1531, 1538, 1544, 1556, 1568, 1574, 1581, 1594, 1601, 1608, 1615, 1622, 1629, 1636, 1643, 1650, 1657, 1672, 1679, 1689, 1697, 1708, 1715, 1718, 1723, 1727, 1738, 1743, 1752, 1761, 1763, 1769, 1776, 1786, 1793, 1798, 1810, 1817, 1824, 1831, 1838, 1845, 1852, 1859, 1866, 1872, 1878, 1885, 1891, 1898, 1905, 1911, 1917, 1924, 1931, 1938, 1945, 1963, 1977, 1985, 1993, and 2001; a LCDR2 comprising an amino acid sequence at least 65%, at least 70%, at least 75%, at least 80%, at least 85%, at least 90%, at least 95%, at least 99%, or 100% identical to any one of amino acid sequences AAS, APS, AT, ATS, AVS, DAS, DDG, DDS, DNN, DT, DTS, DVS, EAS, EDN, EVS, FTS, GAF, GAN, GAS, GAT, GIS, GKN, GNG, GNS, HTS, KAS, KVS, LAS, LGS, LVS, NAK, NTD, NTN, QMS, RMS, RTS, SAS, STS, TTS, WAS, YAS, YAT, YGS, YRS, and YTS, or at least 65%, at least 70%, at least 75%, at least 80%, at least 85%, at least 90%, at least 95%, at least 99%, or 100% identical to any one of SEQ ID NOs: 1200, 1212, 1680, 1690, 1698, 1709, 1728, 1739, 1744, 1753, 1770, 1777, 1978, 1986, 1994, and 2002; and a LCDR3 comprising an amino acid sequence at least 65%, at least 70%, at least 75%, at least 80%, at least 85%, at least 90%, at least 95%, at least 99%, or 100% identical to any one of SEQ ID NOs: 1097, 1104, 1111, 1121, 1128, 1135, 1142, 1149, 1156, 1163, 1170, 1175, 1182, 1189, 1195, 1201, 1207, 1213, 1222, 1229, 1236, 2009, 1248, 1255, 1262, 1267, 1272, 1279, 1286, 1293, 1300, 1307, 1320, 1327, 1333, 1340, 1346, 1353, 1360, 1367, 1374, 1383, 1389, 1395, 1402, 1409, 1415, 1422, 1429, 1435, 1442, 1449, 1456, 1462, 1469, 1476, 1482, 1489, 1496, 1502, 1509, 1513, 1520, 1532, 1539, 1545, 1557, 1562, 1569, 1575, 1582, 1588, 1595, 1602, 1609, 1616, 1623, 1630, 1637, 1644, 1651, 1658, 1663, 1673, 1681, 1691, 1699, 1710, 1729, 1735, 1745, 1751, 1754, 1778, 1787, 1799, 1805, 1811, 1818, 1825, 1832, 1839, 1846, 1853, 1860, 1867, 1873, 1879, 1886, 1892, 1899, 1906, 1912, 1918, 1925, 1932, 1939, 1946, 1951, 1957, 1964, 1970, 1976, 1979, 1987, 1995, and 2003, or VL1 is a first immunoglobulin light chain variable region that specifically binds to (i) a tumor-associated antigen (TAA), (ii) an infectious disease antigen that is not a sarbecovirus antigen, or (iii) an other-pathology antigen, comprising an amino acid sequence at least 65%, at least 70%, at least 75%, at least 80%, at least 85%, at least 90%, at least 95%, at least 99%, or 100% identical to any one of SEQ ID NOs: 1098, 1105, 1112, 1122, 1129, 1136, 1143, 1150, 1157, 1164, 1171, 1176, 1183, 1190, 1196, 1202, 1208, 1214, 1219, 1223, 1230, 1237, 1242, 1249, 1256, 1263, 1268, 1273, 1280, 1287, 1294, 1301, 1308, 1314, 1321, 1328, 1334, 1341, 1347, 1354, 1361, 1368, 1375, 1380, 1384, 1390, 1396, 1403, 1410, 1416, 1423, 1430, 1436, 1443, 1450, 1457, 1463, 1470, 1477, 1483, 1490, 1497, 1503, 1510, 1514, 1521, 1527, 1533, 1540, 1546, 1551, 1558, 1563, 1570, 1576, 1583, 1589, 1596, 1603, 1610, 1617, 1624, 1631, 1638, 1645, 1652, 1659, 1664, 1669, 1674, 1682, 1692, 1700, 1711, 1721, 1724, 1730, 1740, 1746, 1755, 1764, 1766, 1771, 1779, 1784, 1788, 1794, 1800, 1806, 1812, 1819, 1826, 1833, 1840, 1847, 1854, 1861, 1868, 1874, 1880, 1887, 1893, 1900, 1907, 1913, 1919, 1926, 1933, 1940, 1947, 1952, 1958, 1965, 1971, 1980, 1988, 1996, and 2004; VL2 is a second immunoglobulin light chain variable region that specifically binds to (i) a tumor-associated antigen (TAA), (ii) an infectious disease antigen that is not a sarbecovirus antigen, or (iii) an other-pathology antigen, and which comprises a LCDR1 comprising an amino acid sequence at least 65%, at least 70%, at least 75%, at least 80%, at least 85%, at least 90%, at least 95%, at least 99%, or 100% identical to any one of SEQ ID NOs: 1096, 1103, 1110, 1120, 1127, 1134, 1141, 1148, 1155, 1162, 1169, 1174, 1181, 1188, 1199, 1211, 1221, 1228, 1235, 1247, 1254, 1261, 1266, 1271, 1278, 1285, 1292, 1299, 1306, 1313, 1319, 1326, 1339, 1352, 1359, 1366, 1373, 1382, 1394, 1401, 1408, 1414, 1421, 1428, 1441, 1448, 1455, 1461, 1468, 1475, 1488, 1495, 1508, 1519, 1526, 1531, 1538, 1544, 1556, 1568, 1574, 1581, 1594, 1601, 1608, 1615, 1622, 1629, 1636, 1643, 1650, 1657, 1672, 1679, 1689, 1697, 1708, 1715, 1718, 1723, 1727, 1738, 1743, 1752, 1761, 1763, 1769, 1776, 1786, 1793, 1798, 1810, 1817, 1824, 1831, 1838, 1845, 1852, 1859, 1866, 1872, 1878, 1885, 1891, 1898, 1905, 1911, 1917, 1924, 1931, 1938, 1945, 1963, 1977, 1985, 1993, and 2001; a LCDR2 comprising an amino acid sequence at least 65%, at least 70%, at least 75%, at least 80%, at least 85%, at least 90%, at least 95%, at least 99%, or 100% identical to any one of amino acid sequences AAS, APS, AT, ATS, AVS, DAS, DDG, DDS, DNN, DT, DTS, DVS, EAS, EDN, EVS, FTS, GAF, GAN, GAS, GAT, GIS, GKN, GNG, GNS, HTS, KAS, KVS, LAS, LGS, LVS, NAK, NTD, NTN, QMS, RMS, RTS, SAS, STS, TTS, WAS, YAS, YAT, YGS, YRS, and YTS, or at least 65%, at least 70%, at least 75%, at least 80%, at least 85%, at least 90%, at least 95%, at least 99%, or 100% identical to any one of SEQ ID NOs: 1200, 1212, 1680, 1690, 1698, 1709, 1728, 1739, 1744, 1753, 1770, 1777, 1978, 1986, 1994, and 2002; and a LCDR3 comprising an amino acid sequence at least 65%, at least 70%, at least 75%, at least 80%, at least 85%, at least 90%, at least 95%, at least 99%, or 100% identical to any one of SEQ ID NOs: 1097, 1104, 1111, 1121, 1128, 1135, 1142, 1149, 1156, 1163, 1170, 1175, 1182, 1189, 1195, 1201, 1207, 1213, 1222, 1229, 1236, 2009, 1248, 1255, 1262, 1267, 1272, 1279, 1286, 1293, 1300, 1307, 1320, 1327, 1333, 1340, 1346, 1353, 1360, 1367, 1374, 1383, 1389, 1395, 1402, 1409, 1415, 1422, 1429, 1435, 1442, 1449, 1456, 1462, 1469, 1476, 1482, 1489, 1496, 1502, 1509, 1513, 1520, 1532, 1539, 1545, 1557, 1562, 1569, 1575, 1582, 1588, 1595, 1602, 1609, 1616, 1623, 1630, 1637, 1644, 1651, 1658, 1663, 1673, 1681, 1691, 1699, 1710, 1729, 1735, 1745, 1751, 1754, 1778, 1787, 1799, 1805, 1811, 1818, 1825, 1832, 1839, 1846, 1853, 1860, 1867, 1873, 1879, 1886, 1892, 1899, 1906, 1912, 1918, 1925, 1932, 1939, 1946, 1951, 1957, 1964, 1970, 1976, 1979, 1987, 1995, and 2003, or VL2 is a second immunoglobulin light chain variable region that specifically binds a (i) a tumor-associated antigen (TAA), (ii) an infectious disease antigen that is not a sarbecovirus antigen, or (iii) an other-pathology antigen, comprising an amino acid sequence at least 65%, at least 70%, at least 75%, at least 80%, at least 85%, at least 90%, at least 95%, at least 99%, or 100% identical to any one of SEQ ID NOs: 1098, 1105, 1112, 1122, 1129, 1136, 1143, 1150, 1157, 1164, 1171, 1176, 1183, 1190, 1196, 1202, 1208, 1214, 1219, 1223, 1230, 1237, 1242, 1249, 1256, 1263, 1268, 1273, 1280, 1287, 1294, 1301, 1308, 1314, 1321, 1328, 1334, 1341, 1347, 1354, 1361, 1368, 1375, 1380, 1384, 1390, 1396, 1403, 1410, 1416, 1423, 1430, 1436, 1443, 1450, 1457, 1463, 1470, 1477, 1483, 1490, 1497, 1503, 1510, 1514, 1521, 1527, 1533, 1540, 1546, 1551, 1558, 1563, 1570, 1576, 1583, 1589, 1596, 1603, 1610, 1617, 1624, 1631, 1638, 1645, 1652, 1659, 1664, 1669, 1674, 1682, 1692, 1700, 1711, 1721, 1724, 1730, 1740, 1746, 1755, 1764, 1766, 1771, 1779, 1784, 1788, 1794, 1800, 1806, 1812, 1819, 1826, 1833, 1840, 1847, 1854, 1861, 1868, 1874, 1880, 1887, 1893, 1900, 1907, 1913, 1919, 1926, 1933, 1940, 1947, 1952, 1958, 1965, 1971, 1980, 1988, 1996, and 2004; VH1 is a first immunoglobulin heavy chain variable region that specifically binds to a (i) a tumor-associated antigen (TAA), (ii) an infectious disease antigen that is not a sarbecovirus antigen, or (iii) an other-pathology antigen, and which comprises a heavy chain complementary determining region (HCDR) 1 comprising an amino acid sequence at least 65%, at least 70%, at least 75%, at least 80%, at least 85%, at least 90%, at least 95%, at least 99%, or 100% identical to any one of SEQ ID NOs: 1099, 1106, 1113, 1117, 1123, 1130, 1137, 1144, 1151, 1158, 1165, 1177, 1184, 1191, 1203, 1215, 1224, 1231, 1238, 1243, 1250, 1257, 1264, 1274, 1281, 1288, 1295, 1302, 1309, 1315, 1322, 1329, 1335, 1342, 1348, 1355, 1362, 1369, 1376, 1385, 1397, 1404, 1417, 1424, 1431, 1437, 1444, 1451, 1458, 1464, 1471, 1478, 1484, 1491, 1498, 1504, 1511, 1515, 1522, 1534, 1547, 1552, 1564, 1577, 1584, 1590, 1597, 1604, 1611, 1618, 1625, 1632, 1639, 1646, 1653, 1660, 1665, 1675, 1683, 1693, 1701, 1705, 1716, 1719, 1731, 1736, 1747, 1756, 1772, 1780, 1789, 1795, 1801, 1813, 1820, 1827, 1834, 1841, 1848, 1855, 1862, 1881, 1894, 1901, 1920, 1927, 1934, 1941, 1953, 1959, 1966, 1981, 1989, 1997, and 2005; a HCDR2 comprising an amino acid sequence at least 65%, at least 70%, at least 75%, at least 80%, at least 85%, at least 90%, at least 95%, at least 99%, or 100% identical to any one of SEQ ID NOs: 1100, 1107, 1114, 1118, 1124, 1131, 1138, 1145, 1152, 1159, 1166, 1178, 1185, 1192, 1204, 1216, 1225, 1232, 1239, 1244, 1251, 1258, 1275, 1282, 1289, 1296, 1303, 1310, 1316, 1323, 1330, 1336, 1343, 1349, 1356, 1363, 1370, 1377, 1386, 1391, 1398, 1405, 1411, 1418, 1425, 1432, 1438, 1445, 1452, 1465, 1472, 1479, 1485, 1492, 1499, 1505, 1516, 1523, 1528, 1535, 1541, 1548, 1553, 1559, 1565, 1571, 1578, 1585, 1591, 1598, 1605, 1612, 1619, 1626, 1633, 1640, 1647, 1654, 1666, 1676, 1684, 1687, 1694, 1702, 1706, 1712, 1717, 1720, 1725, 1732, 1737, 1741, 1748, 1757, 1767, 1773, 1781, 1790, 1802, 1807, 1814, 1821, 1828, 1835, 1842, 1849, 1856, 1863, 1869, 1875, 1882, 1888, 1895, 1902, 1908, 1914, 1921, 1928, 1935, 1942, 1948, 1954, 1960, 1967, 1972, 1982, 1990, 1998, and 2006; and a HCDR3 comprising an amino acid sequence at least 65%, at least 70%, at least 75%, at least 80%, at least 85%, at least 90%, at least 95%, at least 99%, or 100% identical to any one of SEQ ID NOs: 1101, 1108, 1115, 1125, 1132, 1139, 1146, 1153, 1160, 1167, 1172, 1179, 1186, 1193, 1197, 1205, 1209, 1217, 1226, 1233, 1240, 1245, 1252, 1259, 1269, 1276, 1283, 1290, 1297, 1304, 1311, 1317, 1324, 1331, 1337, 1344, 1350, 1357, 1364, 1371, 1378, 1387, 1392, 1399, 1406, 1412, 1419, 1426, 1433, 1439, 1446, 1453, 1459, 1466, 1473, 1480, 1486, 1493, 1500, 1506, 1517, 1524, 1529, 1536, 1542, 1549, 1554, 1560, 1566, 1572, 1579, 1586, 1592, 1599, 1606, 1613, 1620, 1627, 1634, 1641, 1648, 1655, 1661, 1667, 1670, 1677, 1685, 1688, 1695, 1703, 1707, 1713, 1733, 1749, 1758, 1762, 1774, 1782, 1791, 1796, 1803, 1808, 1815, 1822, 1829, 1836, 1843, 1850, 1857, 1864, 1870, 1876, 1883, 1889, 1896, 1903, 1909, 1915, 1922, 1929, 1936, 1943, 1949, 1955, 1961, 1968, 1973, 1975, 1983, 1991, 1999, and 2007, or VH1 is a first immunoglobulin heavy chain variable region that specifically binds to (i) a tumor-associated antigen (TAA), (ii) an infectious disease antigen that is not a sarbecovirus antigen, or (iii) an other-pathology antigen, comprising an amino acid sequence at least 65%, at least 70%, at least 75%, at least 80%, at least 85%, at least 90%, at least 95%, at least 99%, or 100% identical to any one of SEQ ID NOs: 1102, 1109, 1116, 1119, 1126, 1133, 1140, 1147, 1154, 1161, 1168, 1173, 1180, 1187, 1194, 1198, 1206, 1210, 1218, 1220, 1227, 1234, 1241, 1246, 1253, 1260, 1265, 1270, 1277, 1284, 1291, 1298, 1305, 1312, 1318, 1325, 1332, 1338, 1345, 1351, 1358, 1365, 1372, 1379, 1381, 1388, 1393, 1400, 1407, 1413, 1420, 1427, 1434, 1440, 1447, 1454, 1460, 1467, 1474, 1481, 1487, 1494, 1501, 1507, 1512, 1518, 1525, 1530, 1537, 1543, 1550, 1555, 1561, 1567, 1573, 1580, 1587, 1593, 1600, 1607, 1614, 1621, 1628, 1635, 1642, 1649, 1656, 1662, 1668, 1671, 1678, 1686, 1696, 1704, 1714, 1722, 1726, 1734, 1742, 1750, 1759, 1760, 1765, 1768, 1775, 1783, 1785, 1792, 1797, 1804, 1809, 1816, 1823, 1830, 1837, 1844, 1851, 1858, 1865, 1871, 1877, 1884, 1890, 1897, 1904, 1910, 1916, 1923, 1930, 1937, 1944, 1950, 1956, 1962, 1969, 1974, 1984, 1992, 2000, and 2008; and VH2 is a second immunoglobulin heavy chain variable region that specifically binds to (i) a tumor-associated antigen (TAA), (ii) an infectious disease antigen that is not a sarbecovirus antigen, or (iii) an other-pathology antigen, and which comprises a HCDR1 comprising an amino acid sequence at least 65%, at least 70%, at least 75%, at least 80%, at least 85%, at least 90%, at least 95%, at least 99%, or 100% identical to any one of SEQ ID NOs: 1099, 1106, 1113, 1117, 1123, 1130, 1137, 1144, 1151, 1158, 1165, 1177, 1184, 1191, 1203, 1215, 1224, 1231, 1238, 1243, 1250, 1257, 1264, 1274, 1281, 1288, 1295, 1302, 1309, 1315, 1322, 1329, 1335, 1342, 1348, 1355, 1362, 1369, 1376, 1385, 1397, 1404, 1417, 1424, 1431, 1437, 1444, 1451, 1458, 1464, 1471, 1478, 1484, 1491, 1498, 1504, 1511, 1515, 1522, 1534, 1547, 1552, 1564, 1577, 1584, 1590, 1597, 1604, 1611, 1618, 1625, 1632, 1639, 1646, 1653, 1660, 1665, 1675, 1683, 1693, 1701, 1705, 1716, 1719, 1731, 1736, 1747, 1756, 1772, 1780, 1789, 1795, 1801, 1813, 1820, 1827, 1834, 1841, 1848, 1855, 1862, 1881, 1894, 1901, 1920, 1927, 1934, 1941, 1953, 1959, 1966, 1981, 1989, 1997, and 2005; a HCDR2 comprising an amino acid sequence at least 65%, at least 70%, at least 75%, at least 80%, at least 85%, at least 90%, at least 95%, at least 99%, or 100% identical to any one of SEQ ID NOs: 1100, 1107, 1114, 1118, 1124, 1131, 1138, 1145, 1152, 1159, 1166, 1178, 1185, 1192, 1204, 1216, 1225, 1232, 1239, 1244, 1251, 1258, 1275, 1282, 1289, 1296, 1303, 1310, 1316, 1323, 1330, 1336, 1343, 1349, 1356, 1363, 1370, 1377, 1386, 1391, 1398, 1405, 1411, 1418, 1425, 1432, 1438, 1445, 1452, 1465, 1472, 1479, 1485, 1492, 1499, 1505, 1516, 1523, 1528, 1535, 1541, 1548, 1553, 1559, 1565, 1571, 1578, 1585, 1591, 1598, 1605, 1612, 1619, 1626, 1633, 1640, 1647, 1654, 1666, 1676, 1684, 1687, 1694, 1702, 1706, 1712, 1717, 1720, 1725, 1732, 1737, 1741, 1748, 1757, 1767, 1773, 1781, 1790, 1802, 1807, 1814, 1821, 1828, 1835, 1842, 1849, 1856, 1863, 1869, 1875, 1882, 1888, 1895, 1902, 1908, 1914, 1921, 1928, 1935, 1942, 1948, 1954, 1960, 1967, 1972, 1982, 1990, 1998, and 2006; and a HCDR3 comprising an amino acid sequence at least 65%, at least 70%, at least 75%, at least 80%, at least 85%, at least 90%, at least 95%, at least 99%, or 100% identical to any one of SEQ ID NOs: 1101, 1108, 1115, 1125, 1132, 1139, 1146, 1153, 1160, 1167, 1172, 1179, 1186, 1193, 1197, 1205, 1209, 1217, 1226, 1233, 1240, 1245, 1252, 1259, 1269, 1276, 1283, 1290, 1297, 1304, 1311, 1317, 1324, 1331, 1337, 1344, 1350, 1357, 1364, 1371, 1378, 1387, 1392, 1399, 1406, 1412, 1419, 1426, 1433, 1439, 1446, 1453, 1459, 1466, 1473, 1480, 1486, 1493, 1500, 1506, 1517, 1524, 1529, 1536, 1542, 1549, 1554, 1560, 1566, 1572, 1579, 1586, 1592, 1599, 1606, 1613, 1620, 1627, 1634, 1641, 1648, 1655, 1661, 1667, 1670, 1677, 1685, 1688, 1695, 1703, 1707, 1713, 1733, 1749, 1758, 1762, 1774, 1782, 1791, 1796, 1803, 1808, 1815, 1822, 1829, 1836, 1843, 1850, 1857, 1864, 1870, 1876, 1883, 1889, 1896, 1903, 1909, 1915, 1922, 1929, 1936, 1943, 1949, 1955, 1961, 1968, 1973, 1975, 1983, 1991, 1999, and 2007, or VH2 is a second immunoglobulin heavy chain variable region that specifically binds to (i) a tumor-associated antigen (TAA), (ii) an infectious disease antigen that is not a sarbecovirus antigen, or (iii) an other-pathology antigen, comprising an amino acid sequence at least 65%, at least 70%, at least 75%, at least 80%, at least 85%, at least 90%, at least 95%, at least 99%, or 100% identical to any one of SEQ ID NOs: 1102, 1109, 1116, 1119, 1126, 1133, 1140, 1147, 1154, 1161, 1168, 1173, 1180, 1187, 1194, 1198, 1206, 1210, 1218, 1220, 1227, 1234, 1241, 1246, 1253, 1260, 1265, 1270, 1277, 1284, 1291, 1298, 1305, 1312, 1318, 1325, 1332, 1338, 1345, 1351, 1358, 1365, 1372, 1379, 1381, 1388, 1393, 1400, 1407, 1413, 1420, 1427, 1434, 1440, 1447, 1454, 1460, 1467, 1474, 1481, 1487, 1494, 1501, 1507, 1512, 1518, 1525, 1530, 1537, 1543, 1550, 1555, 1561, 1567, 1573, 1580, 1587, 1593, 1600, 1607, 1614, 1621, 1628, 1635, 1642, 1649, 1656, 1662, 1668, 1671, 1678, 1686, 1696, 1704, 1714, 1722, 1726, 1734, 1742, 1750, 1759, 1760, 1765, 1768, 1775, 1783, 1785, 1792, 1797, 1804, 1809, 1816, 1823, 1830, 1837, 1844, 1851, 1858, 1865, 1871, 1877, 1884, 1890, 1897, 1904, 1910, 1916, 1923, 1930, 1937, 1944, 1950, 1956, 1962, 1969, 1974, 1984, 1992, 2000, and 2008; L1-L3 are optional amino acid linkers; and wherein (a) is selected from any one of the more specific embodiments provided herein for an antigen binding polypeptide in an antigen binding polypeptide complex having no more than three polypeptide chains; (b) an antigen binding polypeptide having a structure represented by: VL1-L1-VH1 or VH1-L1-VL1; wherein: VL1 is a first immunoglobulin light chain variable region that specifically binds to (i) a tumor-associated antigen (TAA), (ii) an infectious disease antigen that is not a sarbecovirus antigen, or (iii) an other-pathology antigen, and which comprises a light chain complementary determining region (LCDR) 1 comprising an amino acid sequence at least 65%, at least 70%, at least 75%, at least 80%, at least 85%, at least 90%, at least 95%, at least 99%, or 100% identical to any one of SEQ ID NOs: 1096, 1103, 1110, 1120, 1127, 1134, 1141, 1148, 1155, 1162, 1169, 1174, 1181, 1188, 1199, 1211, 1221, 1228, 1235, 1247, 1254, 1261, 1266, 1271, 1278, 1285, 1292, 1299, 1306, 1313, 1319, 1326, 1339, 1352, 1359, 1366, 1373, 1382, 1394, 1401, 1408, 1414, 1421, 1428, 1441, 1448, 1455, 1461, 1468, 1475, 1488, 1495, 1508, 1519, 1526, 1531, 1538, 1544, 1556, 1568, 1574, 1581, 1594, 1601, 1608, 1615, 1622, 1629, 1636, 1643, 1650, 1657, 1672, 1679, 1689, 1697, 1708, 1715, 1718, 1723, 1727, 1738, 1743, 1752, 1761, 1763, 1769, 1776, 1786, 1793, 1798, 1810, 1817, 1824, 1831, 1838, 1845, 1852, 1859, 1866, 1872, 1878, 1885, 1891, 1898, 1905, 1911, 1917, 1924, 1931, 1938, 1945, 1963, 1977, 1985, 1993, and 2001; a LCDR2 comprising an amino acid sequence at least 65%, at least 70%, at least 75%, at least 80%, at least 85%, at least 90%, at least 95%, at least 99%, or 100% identical to any one of amino acid sequences AAS, APS, AT, ATS, AVS, DAS, DDG, DDS, DNN, DT, DTS, DVS, EAS, EDN, EVS, FTS, GAF, GAN, GAS, GAT, GIS, GKN, GNG, GNS, HTS, KAS, KVS, LAS, LGS, LVS, NAK, NTD, NTN, QMS, RMS, RTS, SAS, STS, TTS, WAS, YAS, YAT, YGS, YRS, and YTS, or at least 65%, at least 70%, at least 75%, at least 80%, at least 85%, at least 90%, at least 95%, at least 99%, or 100% identical to any one of SEQ ID NOs: 1200, 1212, 1680, 1690, 1698, 1709, 1728, 1739, 1744, 1753, 1770, 1777, 1978, 1986, 1994, and 2002; and a LCDR3 comprising an amino acid sequence at least 65%, at least 70%, at least 75%, at least 80%, at least 85%, at least 90%, at least 95%, at least 99%, or 100% identical to any one of SEQ ID NOs: 1097, 1104, 1111, 1121, 1128, 1135, 1142, 1149, 1156, 1163, 1170, 1175, 1182, 1189, 1195, 1201, 1207, 1213, 1222, 1229, 1236, 2009, 1248, 1255, 1262, 1267, 1272, 1279, 1286, 1293, 1300, 1307, 1320, 1327, 1333, 1340, 1346, 1353, 1360, 1367, 1374, 1383, 1389, 1395, 1402, 1409, 1415, 1422, 1429, 1435, 1442, 1449, 1456, 1462, 1469, 1476, 1482, 1489, 1496, 1502, 1509, 1513, 1520, 1532, 1539, 1545, 1557, 1562, 1569, 1575, 1582, 1588, 1595, 1602, 1609, 1616, 1623, 1630, 1637, 1644, 1651, 1658, 1663, 1673, 1681, 1691, 1699, 1710, 1729, 1735, 1745, 1751, 1754, 1778, 1787, 1799, 1805, 1811, 1818, 1825, 1832, 1839, 1846, 1853, 1860, 1867, 1873, 1879, 1886, 1892, 1899, 1906, 1912, 1918, 1925, 1932, 1939, 1946, 1951, 1957, 1964, 1970, 1976, 1979, 1987, 1995, and 2003, or VL1 is a first immunoglobulin light chain variable region that specifically binds to (i) a tumor-associated antigen (TAA), (ii) an infectious disease antigen that is not a sarbecovirus antigen, or (iii) an other-pathology antigen, comprising an amino acid sequence at least 65%, at least 70%, at least 75%, at least 80%, at least 85%, at least 90%, at least 95%, at least 99%, or 100% identical to any one of SEQ ID NOs: 1098, 1105, 1112, 1122, 1129, 1136, 1143, 1150, 1157, 1164, 1171, 1176, 1183, 1190, 1196, 1202, 1208, 1214, 1219, 1223, 1230, 1237, 1242, 1249, 1256, 1263, 1268, 1273, 1280, 1287, 1294, 1301, 1308, 1314, 1321, 1328, 1334, 1341, 1347, 1354, 1361, 1368, 1375, 1380, 1384, 1390, 1396, 1403, 1410, 1416, 1423, 1430, 1436, 1443, 1450, 1457, 1463, 1470, 1477, 1483, 1490, 1497, 1503, 1510, 1514, 1521, 1527, 1533, 1540, 1546, 1551, 1558, 1563, 1570, 1576, 1583, 1589, 1596, 1603, 1610, 1617, 1624, 1631, 1638, 1645, 1652, 1659, 1664, 1669, 1674, 1682, 1692, 1700, 1711, 1721, 1724, 1730, 1740, 1746, 1755, 1764, 1766, 1771, 1779, 1784, 1788, 1794, 1800, 1806, 1812, 1819, 1826, 1833, 1840, 1847, 1854, 1861, 1868, 1874, 1880, 1887, 1893, 1900, 1907, 1913, 1919, 1926, 1933, 1940, 1947, 1952, 1958, 1965, 1971, 1980, 1988, 1996, and 2004; VH1 is a first immunoglobulin heavy chain variable region that specifically binds to (i) a tumor-associated antigen (TAA), (ii) an infectious disease antigen that is not a sarbecovirus antigen, or (iii) an other-pathology antigen, and which comprises a heavy chain complementary determining region (HCDR) 1 comprising an amino acid sequence at least 65%, at least 70%, at least 75%, at least 80%, at least 85%, at least 90%, at least 95%, at least 99%, or 100% identical to any one of SEQ ID NOs: 1099, 1106, 1113, 1117, 1123, 1130, 1137, 1144, 1151, 1158, 1165, 1177, 1184, 1191, 1203, 1215, 1224, 1231, 1238, 1243, 1250, 1257, 1264, 1274, 1281, 1288, 1295, 1302, 1309, 1315, 1322, 1329, 1335, 1342, 1348, 1355, 1362, 1369, 1376, 1385, 1397, 1404, 1417, 1424, 1431, 1437, 1444, 1451, 1458, 1464, 1471, 1478, 1484, 1491, 1498, 1504, 1511, 1515, 1522, 1534, 1547, 1552, 1564, 1577, 1584, 1590, 1597, 1604, 1611, 1618, 1625, 1632, 1639, 1646, 1653, 1660, 1665, 1675, 1683, 1693, 1701, 1705, 1716, 1719, 1731, 1736, 1747, 1756, 1772, 1780, 1789, 1795, 1801, 1813, 1820, 1827, 1834, 1841, 1848, 1855, 1862, 1881, 1894, 1901, 1920, 1927, 1934, 1941, 1953, 1959, 1966, 1981, 1989, 1997, and 2005; a HCDR2 comprising an amino acid sequence at least 65%, at least 70%, at least 75%, at least 80%, at least 85%, at least 90%, at least 95%, at least 99%, or 100% identical to any one of SEQ ID NOs: 1100, 1107, 1114, 1118, 1124, 1131, 1138, 1145, 1152, 1159, 1166, 1178, 1185, 1192, 1204, 1216, 1225, 1232, 1239, 1244, 1251, 1258, 1275, 1282, 1289, 1296, 1303, 1310, 1316, 1323, 1330, 1336, 1343, 1349, 1356, 1363, 1370, 1377, 1386, 1391, 1398, 1405, 1411, 1418, 1425, 1432, 1438, 1445, 1452, 1465, 1472, 1479, 1485, 1492, 1499, 1505, 1516, 1523, 1528, 1535, 1541, 1548, 1553, 1559, 1565, 1571, 1578, 1585, 1591, 1598, 1605, 1612, 1619, 1626, 1633, 1640, 1647, 1654, 1666, 1676, 1684, 1687, 1694, 1702, 1706, 1712, 1717, 1720, 1725, 1732, 1737, 1741, 1748, 1757, 1767, 1773, 1781, 1790, 1802, 1807, 1814, 1821, 1828, 1835, 1842, 1849, 1856, 1863, 1869, 1875, 1882, 1888, 1895, 1902, 1908, 1914, 1921, 1928, 1935, 1942, 1948, 1954, 1960, 1967, 1972, 1982, 1990, 1998, and 2006; and a HCDR3 comprising an amino acid sequence at least 65%, at least 70%, at least 75%, at least 80%, at least 85%, at least 90%, at least 95%, at least 99%, or 100% identical to any one of SEQ ID NOs: 1101, 1108, 1115, 1125, 1132, 1139, 1146, 1153, 1160, 1167, 1172, 1179, 1186, 1193, 1197, 1205, 1209, 1217, 1226, 1233, 1240, 1245, 1252, 1259, 1269, 1276, 1283, 1290, 1297, 1304, 1311, 1317, 1324, 1331, 1337, 1344, 1350, 1357, 1364, 1371, 1378, 1387, 1392, 1399, 1406, 1412, 1419, 1426, 1433, 1439, 1446, 1453, 1459, 1466, 1473, 1480, 1486, 1493, 1500, 1506, 1517, 1524, 1529, 1536, 1542, 1549, 1554, 1560, 1566, 1572, 1579, 1586, 1592, 1599, 1606, 1613, 1620, 1627, 1634, 1641, 1648, 1655, 1661, 1667, 1670, 1677, 1685, 1688, 1695, 1703, 1707, 1713, 1733, 1749, 1758, 1762, 1774, 1782, 1791, 1796, 1803, 1808, 1815, 1822, 1829, 1836, 1843, 1850, 1857, 1864, 1870, 1876, 1883, 1889, 1896, 1903, 1909, 1915, 1922, 1929, 1936, 1943, 1949, 1955, 1961, 1968, 1973, 1975, 1983, 1991, 1999, and 2007, or VH1 is a first immunoglobulin heavy chain variable region that specifically binds to (i) a tumor-associated antigen (TAA), (ii) an infectious disease antigen that is not a sarbecovirus antigen, or (iii) an other-pathology antigen, comprising an amino acid sequence at least 65%, at least 70%, at least 75%, at least 80%, at least 85%, at least 90%, at least 95%, at least 99%, or 100% identical to any one of SEQ ID NOs: 1102, 1109, 1116, 1119, 1126, 1133, 1140, 1147, 1154, 1161, 1168, 1173, 1180, 1187, 1194, 1198, 1206, 1210, 1218, 1220, 1227, 1234, 1241, 1246, 1253, 1260, 1265, 1270, 1277, 1284, 1291, 1298, 1305, 1312, 1318, 1325, 1332, 1338, 1345, 1351, 1358, 1365, 1372, 1379, 1381, 1388, 1393, 1400, 1407, 1413, 1420, 1427, 1434, 1440, 1447, 1454, 1460, 1467, 1474, 1481, 1487, 1494, 1501, 1507, 1512, 1518, 1525, 1530, 1537, 1543, 1550, 1555, 1561, 1567, 1573, 1580, 1587, 1593, 1600, 1607, 1614, 1621, 1628, 1635, 1642, 1649, 1656, 1662, 1668, 1671, 1678, 1686, 1696, 1704, 1714, 1722, 1726, 1734, 1742, 1750, 1759, 1760, 1765, 1768, 1775, 1783, 1785, 1792, 1797, 1804, 1809, 1816, 1823, 1830, 1837, 1844, 1851, 1858, 1865, 1871, 1877, 1884, 1890, 1897, 1904, 1910, 1916, 1923, 1930, 1937, 1944, 1950, 1956, 1962, 1969, 1974, 1984, 1992, 2000, and 2008; and L1 and L2 are optional amino acid linkers; or an antigen binding polypeptide having a structure represented by: VL1-L1-VL2-L2-VH2-L3-VH1; VL1-L1-VH2-L2-VL2-L3-VH1; VH1-L1-VH2-L2-VL2-L3-VL1; or VH1-L1-VL2-L2-VH2-L3-VL1; wherein: VL1 is a first immunoglobulin light chain variable region that specifically binds to (i) a tumor-associated antigen (TAA), (ii) an infectious disease antigen that is not a sarbecovirus antigen, or (iii) an other-pathology antigen, and which comprises a light chain complementary determining region (LCDR) 1 comprising an amino acid sequence at least 65%, at least 70%, at least 75%, at least 80%, at least 85%, at least 90%, at least 95%, at least 99%, or 100% identical to any one of SEQ ID NOs: 1096, 1103, 1110, 1120, 1127, 1134, 1141, 1148, 1155, 1162, 1169, 1174, 1181, 1188, 1199, 1211, 1221, 1228, 1235, 1247, 1254, 1261, 1266, 1271, 1278, 1285, 1292, 1299, 1306, 1313, 1319, 1326, 1339, 1352, 1359, 1366, 1373, 1382, 1394, 1401, 1408, 1414, 1421, 1428, 1441, 1448, 1455, 1461, 1468, 1475, 1488, 1495, 1508, 1519, 1526, 1531, 1538, 1544, 1556, 1568, 1574, 1581, 1594, 1601, 1608, 1615, 1622, 1629, 1636, 1643, 1650, 1657, 1672, 1679, 1689, 1697, 1708, 1715, 1718, 1723, 1727, 1738, 1743, 1752, 1761, 1763, 1769, 1776, 1786, 1793, 1798, 1810, 1817, 1824, 1831, 1838, 1845, 1852, 1859, 1866, 1872, 1878, 1885, 1891, 1898, 1905, 1911, 1917, 1924, 1931, 1938, 1945, 1963, 1977, 1985, 1993, and 2001; a LCDR2 comprising an amino acid sequence at least 65%, at least 70%, at least 75%, at least 80%, at least 85%, at least 90%, at least 95%, at least 99%, or 100% identical to any one of amino acid sequences AAS, APS, AT, ATS, AVS, DAS, DDG, DDS, DNN, DT, DTS, DVS, EAS, EDN, EVS, FTS, GAF, GAN, GAS, GAT, GIS, GKN, GNG, GNS, HTS, KAS, KVS, LAS, LGS, LVS, NAK, NTD, NTN, QMS, RMS, RTS, SAS, STS, TTS, WAS, YAS, YAT, YGS, YRS, and YTS, or at least 65%, at least 70%, at least 75%, at least 80%, at least 85%, at least 90%, at least 95%, at least 99%, or 100% identical to any one of SEQ ID NOs: 1200, 1212, 1680, 1690, 1698, 1709, 1728, 1739, 1744, 1753, 1770, 1777, 1978, 1986, 1994, and 2002; and a LCDR3 comprising an amino acid sequence at least 65%, at least 70%, at least 75%, at least 80%, at least 85%, at least 90%, at least 95%, at least 99%, or 100% identical to any one of SEQ ID NOs: 1097, 1104, 1111, 1121, 1128, 1135, 1142, 1149, 1156, 1163, 1170, 1175, 1182, 1189, 1195, 1201, 1207, 1213, 1222, 1229, 1236, 2009, 1248, 1255, 1262, 1267, 1272, 1279, 1286, 1293, 1300, 1307, 1320, 1327, 1333, 1340, 1346, 1353, 1360, 1367, 1374, 1383, 1389, 1395, 1402, 1409, 1415, 1422, 1429, 1435, 1442, 1449, 1456, 1462, 1469, 1476, 1482, 1489, 1496, 1502, 1509, 1513, 1520, 1532, 1539, 1545, 1557, 1562, 1569, 1575, 1582, 1588, 1595, 1602, 1609, 1616, 1623, 1630, 1637, 1644, 1651, 1658, 1663, 1673, 1681, 1691, 1699, 1710, 1729, 1735, 1745, 1751, 1754, 1778, 1787, 1799, 1805, 1811, 1818, 1825, 1832, 1839, 1846, 1853, 1860, 1867, 1873, 1879, 1886, 1892, 1899, 1906, 1912, 1918, 1925, 1932, 1939, 1946, 1951, 1957, 1964, 1970, 1976, 1979, 1987, 1995, and 2003, or VL1 is a first immunoglobulin light chain variable region that specifically binds to (i) a tumor-associated antigen (TAA), (ii) an infectious disease antigen that is not a sarbecovirus antigen, or (iii) an other-pathology antigen, comprising an amino acid sequence at least 65%, at least 70%, at least 75%, at least 80%, at least 85%, at least 90%, at least 95%, at least 99%, or 100% identical to any one of SEQ ID NOs: 1098, 1105, 1112, 1122, 1129, 1136, 1143, 1150, 1157, 1164, 1171, 1176, 1183, 1190, 1196, 1202, 1208, 1214, 1219, 1223, 1230, 1237, 1242, 1249, 1256, 1263, 1268, 1273, 1280, 1287, 1294, 1301, 1308, 1314, 1321, 1328, 1334, 1341, 1347, 1354, 1361, 1368, 1375, 1380, 1384, 1390, 1396, 1403, 1410, 1416, 1423, 1430, 1436, 1443, 1450, 1457, 1463, 1470, 1477, 1483, 1490, 1497, 1503, 1510, 1514, 1521, 1527, 1533, 1540, 1546, 1551, 1558, 1563, 1570, 1576, 1583, 1589, 1596, 1603, 1610, 1617, 1624, 1631, 1638, 1645, 1652, 1659, 1664, 1669, 1674, 1682, 1692, 1700, 1711, 1721, 1724, 1730, 1740, 1746, 1755, 1764, 1766, 1771, 1779, 1784, 1788, 1794, 1800, 1806, 1812, 1819, 1826, 1833, 1840, 1847, 1854, 1861, 1868, 1874, 1880, 1887, 1893, 1900, 1907, 1913, 1919, 1926, 1933, 1940, 1947, 1952, 1958, 1965, 1971, 1980, 1988, 1996, and 2004; VL2 is a second immunoglobulin light chain variable region that specifically binds to (i) a tumor-associated antigen (TAA), (ii) an infectious disease antigen that is not a sarbecovirus antigen, or (iii) an other-pathology antigen, and which comprises a LCDR1 comprising an amino acid sequence at least 65%, at least 70%, at least 75%, at least 80%, at least 85%, at least 90%, at least 95%, at least 99%, or 100% identical to any one of SEQ ID NOs: 1096, 1103, 1110, 1120, 1127, 1134, 1141, 1148, 1155, 1162, 1169, 1174, 1181, 1188, 1199, 1211, 1221, 1228, 1235, 1247, 1254, 1261, 1266, 1271, 1278, 1285, 1292, 1299, 1306, 1313, 1319, 1326, 1339, 1352, 1359, 1366, 1373, 1382, 1394, 1401, 1408, 1414, 1421, 1428, 1441, 1448, 1455, 1461, 1468, 1475, 1488, 1495, 1508, 1519, 1526, 1531, 1538, 1544, 1556, 1568, 1574, 1581, 1594, 1601, 1608, 1615, 1622, 1629, 1636, 1643, 1650, 1657, 1672, 1679, 1689, 1697, 1708, 1715, 1718, 1723, 1727, 1738, 1743, 1752, 1761, 1763, 1769, 1776, 1786, 1793, 1798, 1810, 1817, 1824, 1831, 1838, 1845, 1852, 1859, 1866, 1872, 1878, 1885, 1891, 1898, 1905, 1911, 1917, 1924, 1931, 1938, 1945, 1963, 1977, 1985, 1993, and 2001; a LCDR2 comprising an amino acid sequence at least 65%, at least 70%, at least 75%, at least 80%, at least 85%, at least 90%, at least 95%, at least 99%, or 100% identical to any one of amino acid sequences AAS, APS, AT, ATS, AVS, DAS, DDG, DDS, DNN, DT, DTS, DVS, EAS, EDN, EVS, FTS, GAF, GAN, GAS, GAT, GIS, GKN, GNG, GNS, HTS, KAS, KVS, LAS, LGS, LVS, NAK, NTD, NTN, QMS, RMS, RTS, SAS, STS, TTS, WAS, YAS, YAT, YGS, YRS, and YTS, or at least 65%, at least 70%, at least 75%, at least 80%, at least 85%, at least 90%, at least 95%, at least 99%, or 100% identical to any one of SEQ ID NOs: 1200, 1212, 1680, 1690, 1698, 1709, 1728, 1739, 1744, 1753, 1770, 1777, 1978, 1986, 1994, and 2002; and a LCDR3 comprising an amino acid sequence at least 65%, at least 70%, at least 75%, at least 80%, at least 85%, at least 90%, at least 95%, at least 99%, or 100% identical to any one of SEQ ID NOs: 1097, 1104, 1111, 1121, 1128, 1135, 1142, 1149, 1156, 1163, 1170, 1175, 1182, 1189, 1195, 1201, 1207, 1213, 1222, 1229, 1236, 2009, 1248, 1255, 1262, 1267, 1272, 1279, 1286, 1293, 1300, 1307, 1320, 1327, 1333, 1340, 1346, 1353, 1360, 1367, 1374, 1383, 1389, 1395, 1402, 1409, 1415, 1422, 1429, 1435, 1442, 1449, 1456, 1462, 1469, 1476, 1482, 1489, 1496, 1502, 1509, 1513, 1520, 1532, 1539, 1545, 1557, 1562, 1569, 1575, 1582, 1588, 1595, 1602, 1609, 1616, 1623, 1630, 1637, 1644, 1651, 1658, 1663, 1673, 1681, 1691, 1699, 1710, 1729, 1735, 1745, 1751, 1754, 1778, 1787, 1799, 1805, 1811, 1818, 1825, 1832, 1839, 1846, 1853, 1860, 1867, 1873, 1879, 1886, 1892, 1899, 1906, 1912, 1918, 1925, 1932, 1939, 1946, 1951, 1957, 1964, 1970, 1976, 1979, 1987, 1995, and 2003, or VL2 is a second immunoglobulin light chain variable region that specifically binds (i) a tumor-associated antigen (TAA), (ii) an infectious disease antigen that is not a sarbecovirus antigen, or (iii) an other-pathology antigen, comprising an amino acid sequence at least 65%, at least 70%, at least 75%, at least 80%, at least 85%, at least 90%, at least 95%, at least 99%, or 100% identical to any one of SEQ ID NOs: 1098, 1105, 1112, 1122, 1129, 1136, 1143, 1150, 1157, 1164, 1171, 1176, 1183, 1190, 1196, 1202, 1208, 1214, 1219, 1223, 1230, 1237, 1242, 1249, 1256, 1263, 1268, 1273, 1280, 1287, 1294, 1301, 1308, 1314, 1321, 1328, 1334, 1341, 1347, 1354, 1361, 1368, 1375, 1380, 1384, 1390, 1396, 1403, 1410, 1416, 1423, 1430, 1436, 1443, 1450, 1457, 1463, 1470, 1477, 1483, 1490, 1497, 1503, 1510, 1514, 1521, 1527, 1533, 1540, 1546, 1551, 1558, 1563, 1570, 1576, 1583, 1589, 1596, 1603, 1610, 1617, 1624, 1631, 1638, 1645, 1652, 1659, 1664, 1669, 1674, 1682, 1692, 1700, 1711, 1721, 1724, 1730, 1740, 1746, 1755, 1764, 1766, 1771, 1779, 1784, 1788, 1794, 1800, 1806, 1812, 1819, 1826, 1833, 1840, 1847, 1854, 1861, 1868, 1874, 1880, 1887, 1893, 1900, 1907, 1913, 1919, 1926, 1933, 1940, 1947, 1952, 1958, 1965, 1971, 1980, 1988, 1996, and 2004; VH1 is a first immunoglobulin heavy chain variable region that specifically binds to (i) a tumor-associated antigen (TAA), (ii) an infectious disease antigen that is not a sarbecovirus antigen, or (iii) an other-pathology antigen, and which comprises a heavy chain complementary determining region (HCDR) 1 comprising an amino acid sequence at least 65%, at least 70%, at least 75%, at least 80%, at least 85%, at least 90%, at least 95%, at least 99%, or 100% identical to any one of SEQ ID NOs: 1099, 1106, 1113, 1117, 1123, 1130, 1137, 1144, 1151, 1158, 1165, 1177, 1184, 1191, 1203, 1215, 1224, 1231, 1238, 1243, 1250, 1257, 1264, 1274, 1281, 1288, 1295, 1302, 1309, 1315, 1322, 1329, 1335, 1342, 1348, 1355, 1362, 1369, 1376, 1385, 1397, 1404, 1417, 1424, 1431, 1437, 1444, 1451, 1458, 1464, 1471, 1478, 1484, 1491, 1498, 1504, 1511, 1515, 1522, 1534, 1547, 1552, 1564, 1577, 1584, 1590, 1597, 1604, 1611, 1618, 1625, 1632, 1639, 1646, 1653, 1660, 1665, 1675, 1683, 1693, 1701, 1705, 1716, 1719, 1731, 1736, 1747, 1756, 1772, 1780, 1789, 1795, 1801, 1813, 1820, 1827, 1834, 1841, 1848, 1855, 1862, 1881, 1894, 1901, 1920, 1927, 1934, 1941, 1953, 1959, 1966, 1981, 1989, 1997, and 2005; a HCDR2 comprising an amino acid sequence at least 65%, at least 70%, at least 75%, at least 80%, at least 85%, at least 90%, at least 95%, at least 99%, or 100% identical to any one of SEQ ID NOs: 1100, 1107, 1114, 1118, 1124, 1131, 1138, 1145, 1152, 1159, 1166, 1178, 1185, 1192, 1204, 1216, 1225, 1232, 1239, 1244, 1251, 1258, 1275, 1282, 1289, 1296, 1303, 1310, 1316, 1323, 1330, 1336, 1343, 1349, 1356, 1363, 1370, 1377, 1386, 1391, 1398, 1405, 1411, 1418, 1425, 1432, 1438, 1445, 1452, 1465, 1472, 1479, 1485, 1492, 1499, 1505, 1516, 1523, 1528, 1535, 1541, 1548, 1553, 1559, 1565, 1571, 1578, 1585, 1591, 1598, 1605, 1612, 1619, 1626, 1633, 1640, 1647, 1654, 1666, 1676, 1684, 1687, 1694, 1702, 1706, 1712, 1717, 1720, 1725, 1732, 1737, 1741, 1748, 1757, 1767, 1773, 1781, 1790, 1802, 1807, 1814, 1821, 1828, 1835, 1842, 1849, 1856, 1863, 1869, 1875, 1882, 1888, 1895, 1902, 1908, 1914, 1921, 1928, 1935, 1942, 1948, 1954, 1960, 1967, 1972, 1982, 1990, 1998, and 2006; and a HCDR3 comprising an amino acid sequence at least 65%, at least 70%, at least 75%, at least 80%, at least 85%, at least 90%, at least 95%, at least 99%, or 100% identical to any one of SEQ ID NOs: 1101, 1108, 1115, 1125, 1132, 1139, 1146, 1153, 1160, 1167, 1172, 1179, 1186, 1193, 1197, 1205, 1209, 1217, 1226, 1233, 1240, 1245, 1252, 1259, 1269, 1276, 1283, 1290, 1297, 1304, 1311, 1317, 1324, 1331, 1337, 1344, 1350, 1357, 1364, 1371, 1378, 1387, 1392, 1399, 1406, 1412, 1419, 1426, 1433, 1439, 1446, 1453, 1459, 1466, 1473, 1480, 1486, 1493, 1500, 1506, 1517, 1524, 1529, 1536, 1542, 1549, 1554, 1560, 1566, 1572, 1579, 1586, 1592, 1599, 1606, 1613, 1620, 1627, 1634, 1641, 1648, 1655, 1661, 1667, 1670, 1677, 1685, 1688, 1695, 1703, 1707, 1713, 1733, 1749, 1758, 1762, 1774, 1782, 1791, 1796, 1803, 1808, 1815, 1822, 1829, 1836, 1843, 1850, 1857, 1864, 1870, 1876, 1883, 1889, 1896, 1903, 1909, 1915, 1922, 1929, 1936, 1943, 1949, 1955, 1961, 1968, 1973, 1975, 1983, 1991, 1999, and 2007, or VH1 is a first immunoglobulin heavy chain variable region that specifically binds to (i) a tumor-associated antigen (TAA), (ii) an infectious disease antigen that is not a sarbecovirus antigen, or (iii) an other-pathology antigen, comprising an amino acid sequence at least 65%, at least 70%, at least 75%, at least 80%, at least 85%, at least 90%, at least 95%, at least 99%, or 100% identical to any one of SEQ ID NOs: 1102, 1109, 1116, 1119, 1126, 1133, 1140, 1147, 1154, 1161, 1168, 1173, 1180, 1187, 1194, 1198, 1206, 1210, 1218, 1220, 1227, 1234, 1241, 1246, 1253, 1260, 1265, 1270, 1277, 1284, 1291, 1298, 1305, 1312, 1318, 1325, 1332, 1338, 1345, 1351, 1358, 1365, 1372, 1379, 1381, 1388, 1393, 1400, 1407, 1413, 1420, 1427, 1434, 1440, 1447, 1454, 1460, 1467, 1474, 1481, 1487, 1494, 1501, 1507, 1512, 1518, 1525, 1530, 1537, 1543, 1550, 1555, 1561, 1567, 1573, 1580, 1587, 1593, 1600, 1607, 1614, 1621, 1628, 1635, 1642, 1649, 1656, 1662, 1668, 1671, 1678, 1686, 1696, 1704, 1714, 1722, 1726, 1734, 1742, 1750, 1759, 1760, 1765, 1768, 1775, 1783, 1785, 1792, 1797, 1804, 1809, 1816, 1823, 1830, 1837, 1844, 1851, 1858, 1865, 1871, 1877, 1884, 1890, 1897, 1904, 1910, 1916, 1923, 1930, 1937, 1944, 1950, 1956, 1962, 1969, 1974, 1984, 1992, 2000, and 2008; and VH2 is a second immunoglobulin heavy chain variable region that specifically binds to (i) a tumor-associated antigen (TAA), (ii) an infectious disease antigen that is not a sarbecovirus antigen, or (iii) an other-pathology antigen, and which comprises a HCDR1 comprising an amino acid sequence at least 65%, at least 70%, at least 75%, at least 80%, at least 85%, at least 90%, at least 95%, at least 99%, or 100% identical to any one of SEQ ID NOs: 1099, 1106, 1113, 1117, 1123, 1130, 1137, 1144, 1151, 1158, 1165, 1177, 1184, 1191, 1203, 1215, 1224, 1231, 1238, 1243, 1250, 1257, 1264, 1274, 1281, 1288, 1295, 1302, 1309, 1315, 1322, 1329, 1335, 1342, 1348, 1355, 1362, 1369, 1376, 1385, 1397, 1404, 1417, 1424, 1431, 1437, 1444, 1451, 1458, 1464, 1471, 1478, 1484, 1491, 1498, 1504, 1511, 1515, 1522, 1534, 1547, 1552, 1564, 1577, 1584, 1590, 1597, 1604, 1611, 1618, 1625, 1632, 1639, 1646, 1653, 1660, 1665, 1675, 1683, 1693, 1701, 1705, 1716, 1719, 1731, 1736, 1747, 1756, 1772, 1780, 1789, 1795, 1801, 1813, 1820, 1827, 1834, 1841, 1848, 1855, 1862, 1881, 1894, 1901, 1920, 1927, 1934, 1941, 1953, 1959, 1966, 1981, 1989, 1997, and 2005; a HCDR2 comprising an amino acid sequence at least 65%, at least 70%, at least 75%, at least 80%, at least 85%, at least 90%, at least 95%, at least 99%, or 100% identical to any one of SEQ ID NOs: 1100, 1107, 1114, 1118, 1124, 1131, 1138, 1145, 1152, 1159, 1166, 1178, 1185, 1192, 1204, 1216, 1225, 1232, 1239, 1244, 1251, 1258, 1275, 1282, 1289, 1296, 1303, 1310, 1316, 1323, 1330, 1336, 1343, 1349, 1356, 1363, 1370, 1377, 1386, 1391, 1398, 1405, 1411, 1418, 1425, 1432, 1438, 1445, 1452, 1465, 1472, 1479, 1485, 1492, 1499, 1505, 1516, 1523, 1528, 1535, 1541, 1548, 1553, 1559, 1565, 1571, 1578, 1585, 1591, 1598, 1605, 1612, 1619, 1626, 1633, 1640, 1647, 1654, 1666, 1676, 1684, 1687, 1694, 1702, 1706, 1712, 1717, 1720, 1725, 1732, 1737, 1741, 1748, 1757, 1767, 1773, 1781, 1790, 1802, 1807, 1814, 1821, 1828, 1835, 1842, 1849, 1856, 1863, 1869, 1875, 1882, 1888, 1895, 1902, 1908, 1914, 1921, 1928, 1935, 1942, 1948, 1954, 1960, 1967, 1972, 1982, 1990, 1998, and 2006; and a HCDR3 comprising an amino acid sequence at least 65%, at least 70%, at least 75%, at least 80%, at least 85%, at least 90%, at least 95%, at least 99%, or 100% identical to any one of SEQ ID NOs: 1101, 1108, 1115, 1125, 1132, 1139, 1146, 1153, 1160, 1167, 1172, 1179, 1186, 1193, 1197, 1205, 1209, 1217, 1226, 1233, 1240, 1245, 1252, 1259, 1269, 1276, 1283, 1290, 1297, 1304, 1311, 1317, 1324, 1331, 1337, 1344, 1350, 1357, 1364, 1371, 1378, 1387, 1392, 1399, 1406, 1412, 1419, 1426, 1433, 1439, 1446, 1453, 1459, 1466, 1473, 1480, 1486, 1493, 1500, 1506, 1517, 1524, 1529, 1536, 1542, 1549, 1554, 1560, 1566, 1572, 1579, 1586, 1592, 1599, 1606, 1613, 1620, 1627, 1634, 1641, 1648, 1655, 1661, 1667, 1670, 1677, 1685, 1688, 1695, 1703, 1707, 1713, 1733, 1749, 1758, 1762, 1774, 1782, 1791, 1796, 1803, 1808, 1815, 1822, 1829, 1836, 1843, 1850, 1857, 1864, 1870, 1876, 1883, 1889, 1896, 1903, 1909, 1915, 1922, 1929, 1936, 1943, 1949, 1955, 1961, 1968, 1973, 1975, 1983, 1991, 1999, and 2007, or VH2 is a second immunoglobulin heavy chain variable region that specifically binds to (i) a tumor-associated antigen (TAA), (ii) an infectious disease antigen that is not a sarbecovirus antigen, or (iii) an other-pathology antigen, comprising an amino acid sequence at least 65%, at least 70%, at least 75%, at least 80%, at least 85%, at least 90%, at least 95%, at least 99%, or 100% identical to any one of SEQ ID NOs: 1102, 1109, 1116, 1119, 1126, 1133, 1140, 1147, 1154, 1161, 1168, 1173, 1180, 1187, 1194, 1198, 1206, 1210, 1218, 1220, 1227, 1234, 1241, 1246, 1253, 1260, 1265, 1270, 1277, 1284, 1291, 1298, 1305, 1312, 1318, 1325, 1332, 1338, 1345, 1351, 1358, 1365, 1372, 1379, 1381, 1388, 1393, 1400, 1407, 1413, 1420, 1427, 1434, 1440, 1447, 1454, 1460, 1467, 1474, 1481, 1487, 1494, 1501, 1507, 1512, 1518, 1525, 1530, 1537, 1543, 1550, 1555, 1561, 1567, 1573, 1580, 1587, 1593, 1600, 1607, 1614, 1621, 1628, 1635, 1642, 1649, 1656, 1662, 1668, 1671, 1678, 1686, 1696, 1704, 1714, 1722, 1726, 1734, 1742, 1750, 1759, 1760, 1765, 1768, 1775, 1783, 1785, 1792, 1797, 1804, 1809, 1816, 1823, 1830, 1837, 1844, 1851, 1858, 1865, 1871, 1877, 1884, 1890, 1897, 1904, 1910, 1916, 1923, 1930, 1937, 1944, 1950, 1956, 1962, 1969, 1974, 1984, 1992, 2000, and 2008; and L1-L3 are optional amino acid linkers; wherein (b) is selected from any one of the more specific embodiments provided herein for an antigen binding polypeptide in an antigen binding polypeptide complex having no more than three polypeptide chains; and wherein the antigen binding polypeptide further comprises one or more immunoglobulin heavy chain constant region 1 (CH1) and/or one or more immunoglobulin light chain constant region (CL) between any one of the variable regions and/or optional amino acid linkers (e.g., between VL1 and L1, between L1 and VH1, between VH1 and L2, between L2 and VL1, between L1 and VL2, between VL2 and L2, between L2 and VH2, between VH2 and L3, between L3 and VH1, between VL1 and L1, between L1 and VH2, between VH2 and L2, between. L2 and VL2, between VL2 and L3, between L3 and VH1, between VH1 and L4, between L4 and VH2, between VH2 and L5, between L5 and VL2, between VL2 and L6, between L6 and VL1, between VH1 and L4, between L4 and VL2, between L4 and VL2, between VL2 and L5, between L5 and VH2, between VH2 and L6, or between L6 and VL1).

[0646] In some aspects, the antigen binding polypeptide, antigen binding polypeptide complex, antibody or antigen binding fragment thereof, polynucleotide, vector, host cell, mRNA, LNP, CAR, immune cell, pharmaceutical composition, kit, or method disclosed herein comprises or encodes:
[0647] a VL at least 65%, at least 70%, at least 75%, at least 80%, at least 85%, at least 90%, at least 95%, at least 99%, or 100% identical to SEQ ID NO: 1098 and a VH at least 65%, at least 70%, at least 75%, at least 80%, at least 85%, at least 90%, at least 95%, at least 99%, or 100% identical to SEQ ID NO: 1102;
[0648] a VL at least 65%, at least 70%, at least 75%, at least 80%, at least 85%, at least 90%, at least 95%, at least 99%, or 100% identical to SEQ ID NO: 1105 and a VH at least 65%, at least 70%, at least 75%, at least 80%, at least 85%, at least 90%, at least 95%, at least 99%, or 100% identical to SEQ ID NO: 1109;
[0649] a VL at least 65%, at least 70%, at least 75%, at least 80%, at least 85%, at least 90%, at least 95%, at least 99%, or 100% identical to SEQ ID NO: 1112 and a VH at least 65%, at least 70%, at least 75%, at least 80%, at least 85%, at least 90%, at least 95%, at least 99%, or 100% identical to SEQ ID NO: 1116;
[0650] a VL at least 65%, at least 70%, at least 75%, at least 80%, at least 85%, at least 90%, at least 95%, at least 99%, or 100% identical to SEQ ID NO: 1105 and a VH at least 65%, at least 70%, at least 75%, at least 80%, at least 85%, at least 90%, at least 95%, at least 99%, or 100% identical to SEQ ID NO: 1119;
[0651] a VL at least 65%, at least 70%, at least 75%, at least 80%, at least 85%, at least 90%, at least 95%, at least 99%, or 100% identical to SEQ ID NO: 1122 and a VH at least 65%, at least 70%, at least 75%, at least 80%, at least 85%, at least 90%, at least 95%, at least 99%, or 100% identical to SEQ ID NO: 1126;
[0652] a VL at least 65%, at least 70%, at least 75%, at least 80%, at least 85%, at least 90%, at least 95%, at least 99%, or 100% identical to SEQ ID NO: 1129 and a VH at least 65%, at least 70%, at least 75%, at least 80%, at least 85%, at least 90%, at least 95%, at least 99%, or 100% identical to SEQ ID NO: 1133;
[0653] a VL at least 65%, at least 70%, at least 75%, at least 80%, at least 85%, at least 90%, at least 95%, at least 99%, or 100% identical to SEQ ID NO: 1136 and a VH at least 65%, at least 70%, at least 75%, at least 80%, at least 85%, at least 90%, at least 95%, at least 99%, or 100% identical to SEQ ID NO: 1140;
[0654] a VL at least 65%, at least 70%, at least 75%, at least 80%, at least 85%, at least 90%, at least 95%, at least 99%, or 100% identical to SEQ ID NO: 1143 and a VH at least 65%, at least 70%, at least 75%, at least 80%, at least 85%, at least 90%, at least 95%, at least 99%, or 100% identical to SEQ ID NO: 1147;
[0655] a VL at least 65%, at least 70%, at least 75%, at least 80%, at least 85%, at least 90%, at least 95%, at least 99%, or 100% identical to SEQ ID NO: 1150 and a VH at least 65%, at least 70%, at least 75%, at least 80%, at least 85%, at least 90%, at least 95%, at least 99%, or 100% identical to SEQ ID NO: 1154;
[0656] a VL at least 65%, at least 70%, at least 75%, at least 80%, at least 85%, at least 90%, at least 95%, at least 99%, or 100% identical to SEQ ID NO: 1157 and a VH at least 65%, at least 70%, at least 75%, at least 80%, at least 85%, at least 90%, at least 95%, at least 99%, or 100% identical to SEQ ID NO: 1161;
[0657] a VL at least 65%, at least 70%, at least 75%, at least 80%, at least 85%, at least 90%, at least 95%, at least 99%, or 100% identical to SEQ ID NO: 1164 and a VH at least 65%, at least 70%, at least 75%, at least 80%, at least 85%, at least 90%, at least 95%, at least 99%, or 100% identical to SEQ ID NO: 1168;
[0658] a VL at least 65%, at least 70%, at least 75%, at least 80%, at least 85%, at least 90%, at least 95%, at least 99%, or 100% identical to SEQ ID NO: 1171 and a VH at least 65%, at least 70%, at least 75%, at least 80%, at least 85%, at least 90%, at least 95%, at least 99%, or 100% identical to SEQ ID NO: 1173;
[0659] a VL at least 65%, at least 70%, at least 75%, at least 80%, at least 85%, at least 90%, at least 95%, at least 99%, or 100% identical to SEQ ID NO: 1176 and a VH at least 65%, at least 70%, at least 75%, at least 80%, at least 85%, at least 90%, at least 95%, at least 99%, or 100% identical to SEQ ID NO: 1180;
[0660] a VL at least 65%, at least 70%, at least 75%, at least 80%, at least 85%, at least 90%, at least 95%, at least 99%, or 100% identical to SEQ ID NO: 1183 and a VH at least 65%, at least 70%, at least 75%, at least 80%, at least 85%, at least 90%, at least 95%, at least 99%, or 100% identical to SEQ ID NO: 1187;
[0661] a VL at least 65%, at least 70%, at least 75%, at least 80%, at least 85%, at least 90%, at least 95%, at least 99%, or 100% identical to SEQ ID NO: 1190 and a VH at least 65%, at least 70%, at least 75%, at least 80%, at least 85%, at least 90%, at least 95%, at least 99%, or 100% identical to SEQ ID NO: 1194;
[0662] a VL at least 65%, at least 70%, at least 75%, at least 80%, at least 85%, at least 90%, at least 95%, at least 99%, or 100% identical to SEQ ID NO: 1196 and a VH at least 65%, at least 70%, at least 75%, at least 80%, at least 85%, at least 90%, at least 95%, at least 99%, or 100% identical to SEQ ID NO: 1198;
[0663] a VL at least 65%, at least 70%, at least 75%, at least 80%, at least 85%, at least 90%, at least 95%, at least 99%, or 100% identical to SEQ ID NO: 1202 and a VH at least 65%, at least 70%, at least 75%, at least 80%, at least 85%, at least 90%, at least 95%, at least 99%, or 100% identical to SEQ ID NO: 1206;
[0664] a VL at least 65%, at least 70%, at least 75%, at least 80%, at least 85%, at least 90%, at least 95%, at least 99%, or 100% identical to SEQ ID NO: 1208 and a VH at least 65%, at least 70%, at least 75%, at least 80%, at least 85%, at least 90%, at least 95%, at least 99%, or 100% identical to SEQ ID NO: 1210;
[0665] a VL at least 65%, at least 70%, at least 75%, at least 80%, at least 85%, at least 90%, at least 95%, at least 99%, or 100% identical to SEQ ID NO: 1214 and a VH at least 65%, at least 70%, at least 75%, at least 80%, at least 85%, at least 90%, at least 95%, at least 99%, or 100% identical to SEQ ID NO: 1218;
[0666] a VL at least 65%, at least 70%, at least 75%, at least 80%, at least 85%, at least 90%, at least 95%, at least 99%, or 100% identical to SEQ ID NO: 1219 and a VH at least 65%, at least 70%, at least 75%, at least 80%, at least 85%, at least 90%, at least 95%, at least 99%, or 100% identical to SEQ ID NO: 1220;
[0667] a VL at least 65%, at least 70%, at least 75%, at least 80%, at least 85%, at least 90%, at least 95%, at least 99%, or 100% identical to SEQ ID NO: 1223 and a VH at least 65%, at least 70%, at least 75%, at least 80%, at least 85%, at least 90%, at least 95%, at least 99%, or 100% identical to SEQ ID NO: 1227;
[0668] a VL at least 65%, at least 70%, at least 75%, at least 80%, at least 85%, at least 90%, at least 95%, at least 99%, or 100% identical to SEQ ID NO: 1230 and a VH at least 65%, at least 70%, at least 75%, at least 80%, at least 85%, at least 90%, at least 95%, at least 99%, or 100% identical to SEQ ID NO: 1234;
[0669] a VL at least 65%, at least 70%, at least 75%, at least 80%, at least 85%, at least 90%, at least 95%, at least 99%, or 100% identical to SEQ ID NO: 1237 and a VH at least 65%, at least 70%, at least 75%, at least 80%, at least 85%, at least 90%, at least 95%, at least 99%, or 100% identical to SEQ ID NO: 1241;
[0670] a VL at least 65%, at least 70%, at least 75%, at least 80%, at least 85%, at least 90%, at least 95%, at least 99%, or 100% identical to SEQ ID NO: 1242 and a VH at least 65%, at least 70%, at least 75%, at least 80%, at least 85%, at least 90%, at least 95%, at least 99%, or 100% identical to SEQ ID NO: 1246;
[0671] a VL at least 65%, at least 70%, at least 75%, at least 80%, at least 85%, at least 90%, at least 95%, at least 99%, or 100% identical to SEQ ID NO: 1249 and a VH at least 65%, at least 70%, at least 75%, at least 80%, at least 85%, at least 90%, at least 95%, at least 99%, or 100% identical to SEQ ID NO: 1253;
[0672] a VL at least 65%, at least 70%, at least 75%, at least 80%, at least 85%, at least 90%, at least 95%, at least 99%, or 100% identical to SEQ ID NO: 1256 and a VH at least 65%, at least 70%, at least 75%, at least 80%, at least 85%, at least 90%, at least 95%, at least 99%, or 100% identical to SEQ ID NO: 1260;
[0673] a VL at least 65%, at least 70%, at least 75%, at least 80%, at least 85%, at least 90%, at least 95%, at least 99%, or 100% identical to SEQ ID NO: 1263 and a VH at least 65%, at least 70%, at least 75%, at least 80%, at least 85%, at least 90%, at least 95%, at least 99%, or 100% identical to SEQ ID NO: 1265;
[0674] a VL at least 65%, at least 70%, at least 75%, at least 80%, at least 85%, at least 90%, at least 95%, at least 99%, or 100% identical to SEQ ID NO: 1268 and a VH at least 65%, at least 70%, at least 75%, at least 80%, at least 85%, at least 90%, at least 95%, at least 99%, or 100% identical to SEQ ID NO: 1270;
[0675] a VL at least 65%, at least 70%, at least 75%, at least 80%, at least 85%, at least 90%, at least 95%, at least 99%, or 100% identical to SEQ ID NO: 1273 and a VH at least 65%, at least 70%, at least 75%, at least 80%, at least 85%, at least 90%, at least 95%, at least 99%, or 100% identical to SEQ ID NO: 1277;
[0676] a VL at least 65%, at least 70%, at least 75%, at least 80%, at least 85%, at least 90%, at least 95%, at least 99%, or 100% identical to SEQ ID NO: 1280 and a VH at least 65%, at least 70%, at least 75%, at least 80%, at least 85%, at least 90%, at least 95%, at least 99%, or 100% identical to SEQ ID NO: 1284;
[0677] a VL at least 65%, at least 70%, at least 75%, at least 80%, at least 85%, at least 90%, at least 95%, at least 99%, or 100% identical to SEQ ID NO: 1287 and a VH at least 65%, at least 70%, at least 75%, at least 80%, at least 85%, at least 90%, at least 95%, at least 99%, or 100% identical to SEQ ID NO: 1291;
[0678] a VL at least 65%, at least 70%, at least 75%, at least 80%, at least 85%, at least 90%, at least 95%, at least 99%, or 100% identical to SEQ ID NO: 1294 and a VH at least 65%, at least 70%, at least 75%, at least 80%, at least 85%, at least 90%, at least 95%, at least 99%, or 100% identical to SEQ ID NO: 1298;
[0679] a VL at least 65%, at least 70%, at least 75%, at least 80%, at least 85%, at least 90%, at least 95%, at least 99%, or 100% identical to SEQ ID NO: 1301 and a VH at least 65%, at least 70%, at least 75%, at least 80%, at least 85%, at least 90%, at least 95%, at least 99%, or 100% identical to SEQ ID NO: 1305;
[0680] a VL at least 65%, at least 70%, at least 75%, at least 80%, at least 85%, at least 90%, at least 95%, at least 99%, or 100% identical to SEQ ID NO: 1308 and a VH at least 65%, at least 70%, at least 75%, at least 80%, at least 85%, at least 90%, at least 95%, at least 99%, or 100% identical to SEQ ID NO: 1312;
[0681] a VL at least 65%, at least 70%, at least 75%, at least 80%, at least 85%, at least 90%, at least 95%, at least 99%, or 100% identical to SEQ ID NO: 1314 and a VH at least 65%, at least 70%, at least 75%, at least 80%, at least 85%, at least 90%, at least 95%, at least 99%, or 100% identical to SEQ ID NO: 1318;
[0682] a VL at least 65%, at least 70%, at least 75%, at least 80%, at least 85%, at least 90%, at least 95%, at least 99%, or 100% identical to SEQ ID NO: 1321 and a VH at least 65%, at least 70%, at least 75%, at least 80%, at least 85%, at least 90%, at least 95%, at least 99%, or 100% identical to SEQ ID NO: 1325;
[0683] a VL at least 65%, at least 70%, at least 75%, at least 80%, at least 85%, at least 90%, at least 95%, at least 99%, or 100% identical to SEQ ID NO: 1328 and a VH at least 65%, at least 70%, at least 75%, at least 80%, at least 85%, at least 90%, at least 95%, at least 99%, or 100% identical to SEQ ID NO: 1332;
[0684] a VL at least 65%, at least 70%, at least 75%, at least 80%, at least 85%, at least 90%, at least 95%, at least 99%, or 100% identical to SEQ ID NO: 1334 and a VH at least 65%, at least 70%, at least 75%, at least 80%, at least 85%, at least 90%, at least 95%, at least 99%, or 100% identical to SEQ ID NO: 1338;
[0685] a VL at least 65%, at least 70%, at least 75%, at least 80%, at least 85%, at least 90%, at least 95%, at least 99%, or 100% identical to SEQ ID NO: 1341 and a VH at least 65%, at least 70%, at least 75%, at least 80%, at least 85%, at least 90%, at least 95%, at least 99%, or 100% identical to SEQ ID NO: 1345;
[0686] a VL at least 65%, at least 70%, at least 75%, at least 80%, at least 85%, at least 90%, at least 95%, at least 99%, or 100% identical to SEQ ID NO: 1347 and a VH at least 65%, at least 70%, at least 75%, at least 80%, at least 85%, at least 90%, at least 95%, at least 99%, or 100% identical to SEQ ID NO: 1351;
[0687] a VL at least 65%, at least 70%, at least 75%, at least 80%, at least 85%, at least 90%, at least 95%, at least 99%, or 100% identical to SEQ ID NO: 1354 and a VH at least 65%, at least 70%, at least 75%, at least 80%, at least 85%, at least 90%, at least 95%, at least 99%, or 100% identical to SEQ ID NO: 1358;
[0688] a VL at least 65%, at least 70%, at least 75%, at least 80%, at least 85%, at least 90%, at least 95%, at least 99%, or 100% identical to SEQ ID NO: 1361 and a VH at least 65%, at least 70%, at least 75%, at least 80%, at least 85%, at least 90%, at least 95%, at least 99%, or 100% identical to SEQ ID NO: 1365;
[0689] a VL at least 65%, at least 70%, at least 75%, at least 80%, at least 85%, at least 90%, at least 95%, at least 99%, or 100% identical to SEQ ID NO: 1368 and a VH at least 65%, at least 70%, at least 75%, at least 80%, at least 85%, at least 90%, at least 95%, at least 99%, or 100% identical to SEQ ID NO: 1372;
[0690] a VL at least 65%, at least 70%, at least 75%, at least 80%, at least 85%, at least 90%, at least 95%, at least 99%, or 100% identical to SEQ ID NO: 1375 and a VH at least 65%, at least 70%, at least 75%, at least 80%, at least 85%, at least 90%, at least 95%, at least 99%, or 100% identical to SEQ ID NO: 1379;
[0691] a VL at least 65%, at least 70%, at least 75%, at least 80%, at least 85%, at least 90%, at least 95%, at least 99%, or 100% identical to SEQ ID NO: 1380 and a VH at least 65%, at least 70%, at least 75%, at least 80%, at least 85%, at least 90%, at least 95%, at least 99%, or 100% identical to SEQ ID NO: 1381;
[0692] a VL at least 65%, at least 70%, at least 75%, at least 80%, at least 85%, at least 90%, at least 95%, at least 99%, or 100% identical to SEQ ID NO: 1384 and a VH at least 65%, at least 70%, at least 75%, at least 80%, at least 85%, at least 90%, at least 95%, at least 99%, or 100% identical to SEQ ID NO: 1388;
[0693] a VL at least 65%, at least 70%, at least 75%, at least 80%, at least 85%, at least 90%, at least 95%, at least 99%, or 100% identical to SEQ ID NO: 1390 and a VH at least 65%, at least 70%, at least 75%, at least 80%, at least 85%, at least 90%, at least 95%, at least 99%, or 100% identical to SEQ ID NO: 1393;
[0694] a VL at least 65%, at least 70%, at least 75%, at least 80%, at least 85%, at least 90%, at least 95%, at least 99%, or 100% identical to SEQ ID NO: 1396 and a VH at least 65%, at least 70%, at least 75%, at least 80%, at least 85%, at least 90%, at least 95%, at least 99%, or 100% identical to SEQ ID NO: 1400;
[0695] a VL at least 65%, at least 70%, at least 75%, at least 80%, at least 85%, at least 90%, at least 95%, at least 99%, or 100% identical to SEQ ID NO: 1403 and a VH at least 65%, at least 70%, at least 75%, at least 80%, at least 85%, at least 90%, at least 95%, at least 99%, or 100% identical to SEQ ID NO: 1407;
[0696] a VL at least 65%, at least 70%, at least 75%, at least 80%, at least 85%, at least 90%, at least 95%, at least 99%, or 100% identical to SEQ ID NO: 1410 and a VH at least 65%, at least 70%, at least 75%, at least 80%, at least 85%, at least 90%, at least 95%, at least 99%, or 100% identical to SEQ ID NO: 1413;
[0697] a VL at least 65%, at least 70%, at least 75%, at least 80%, at least 85%, at least 90%, at least 95%, at least 99%, or 100% identical to SEQ ID NO: 1416 and a VH at least 65%, at least 70%, at least 75%, at least 80%, at least 85%, at least 90%, at least 95%, at least 99%, or 100% identical to SEQ ID NO: 1420;
[0698] a VL at least 65%, at least 70%, at least 75%, at least 80%, at least 85%, at least 90%, at least 95%, at least 99%, or 100% identical to SEQ ID NO: 1423 and a VH at least 65%, at least 70%, at least 75%, at least 80%, at least 85%, at least 90%, at least 95%, at least 99%, or 100% identical to SEQ ID NO: 1427;
[0699] a VL at least 65%, at least 70%, at least 75%, at least 80%, at least 85%, at least 90%, at least 95%, at least 99%, or 100% identical to SEQ ID NO: 1430 and a VH at least 65%, at least 70%, at least 75%, at least 80%, at least 85%, at least 90%, at least 95%, at least 99%, or 100% identical to SEQ ID NO: 1434;
[0700] a VL at least 65%, at least 70%, at least 75%, at least 80%, at least 85%, at least 90%, at least 95%, at least 99%, or 100% identical to SEQ ID NO: 1436 and a VH at least 65%, at least 70%, at least 75%, at least 80%, at least 85%, at least 90%, at least 95%, at least 99%, or 100% identical to SEQ ID NO: 1440;
[0701] a VL at least 65%, at least 70%, at least 75%, at least 80%, at least 85%, at least 90%, at least 95%, at least 99%, or 100% identical to SEQ ID NO: 1443 and a VH at least 65%, at least 70%, at least 75%, at least 80%, at least 85%, at least 90%, at least 95%, at least 99%, or 100% identical to SEQ ID NO: 1447;
[0702] a VL at least 65%, at least 70%, at least 75%, at least 80%, at least 85%, at least 90%, at least 95%, at least 99%, or 100% identical to SEQ ID NO: 1450 and a VH at least 65%, at least 70%, at least 75%, at least 80%, at least 85%, at least 90%, at least 95%, at least 99%, or 100% identical to SEQ ID NO: 1454;
[0703] a VL at least 65%, at least 70%, at least 75%, at least 80%, at least 85%, at least 90%, at least 95%, at least 99%, or 100% identical to SEQ ID NO: 1457 and a VH at least 65%, at least 70%, at least 75%, at least 80%, at least 85%, at least 90%, at least 95%, at least 99%, or 100% identical to SEQ ID NO: 1460;
[0704] a VL at least 65%, at least 70%, at least 75%, at least 80%, at least 85%, at least 90%, at least 95%, at least 99%, or 100% identical to SEQ ID NO: 1463 and a VH at least 65%, at least 70%, at least 75%, at least 80%, at least 85%, at least 90%, at least 95%, at least 99%, or 100% identical to SEQ ID NO: 1467;
[0705] a VL at least 65%, at least 70%, at least 75%, at least 80%, at least 85%, at least 90%, at least 95%, at least 99%, or 100% identical to SEQ ID NO: 1470 and a VH at least 65%, at least 70%, at least 75%, at least 80%, at least 85%, at least 90%, at least 95%, at least 99%, or 100% identical to SEQ ID NO: 1474;
[0706] a VL at least 65%, at least 70%, at least 75%, at least 80%, at least 85%, at least 90%, at least 95%, at least 99%, or 100% identical to SEQ ID NO: 1477 and a VH at least 65%, at least 70%, at least 75%, at least 80%, at least 85%, at least 90%, at least 95%, at least 99%, or 100% identical to SEQ ID NO: 1481;
[0707] a VL at least 65%, at least 70%, at least 75%, at least 80%, at least 85%, at least 90%, at least 95%, at least 99%, or 100% identical to SEQ ID NO: 1483 and a VH at least 65%, at least 70%, at least 75%, at least 80%, at least 85%, at least 90%, at least 95%, at least 99%, or 100% identical to SEQ ID NO: 1487;
[0708] a VL at least 65%, at least 70%, at least 75%, at least 80%, at least 85%, at least 90%, at least 95%, at least 99%, or 100% identical to SEQ ID NO: 1490 and a VH at least 65%, at least 70%, at least 75%, at least 80%, at least 85%, at least 90%, at least 95%, at least 99%, or 100% identical to SEQ ID NO: 1494;
[0709] a VL at least 65%, at least 70%, at least 75%, at least 80%, at least 85%, at least 90%, at least 95%, at least 99%, or 100% identical to SEQ ID NO: 1497 and a VH at least 65%, at least 70%, at least 75%, at least 80%, at least 85%, at least 90%, at least 95%, at least 99%, or 100% identical to SEQ ID NO: 1501;
[0710] a VL at least 65%, at least 70%, at least 75%, at least 80%, at least 85%, at least 90%, at least 95%, at least 99%, or 100% identical to SEQ ID NO: 1503 and a VH at least 65%, at least 70%, at least 75%, at least 80%, at least 85%, at least 90%, at least 95%, at least 99%, or 100% identical to SEQ ID NO: 1507;
[0711] a VL at least 65%, at least 70%, at least 75%, at least 80%, at least 85%, at least 90%, at least 95%, at least 99%, or 100% identical to SEQ ID NO: 1510 and a VH at least 65%, at least 70%, at least 75%, at least 80%, at least 85%, at least 90%, at least 95%, at least 99%, or 100% identical to SEQ ID NO: 1512;
[0712] a VL at least 65%, at least 70%, at least 75%, at least 80%, at least 85%, at least 90%, at least 95%, at least 99%, or 100% identical to SEQ ID NO: 1514 and a VH at least 65%, at least 70%, at least 75%, at least 80%, at least 85%, at least 90%, at least 95%, at least 99%, or 100% identical to SEQ ID NO: 1518;
[0713] a VL at least 65%, at least 70%, at least 75%, at least 80%, at least 85%, at least 90%, at least 95%, at least 99%, or 100% identical to SEQ ID NO: 1521 and a VH at least 65%, at least 70%, at least 75%, at least 80%, at least 85%, at least 90%, at least 95%, at least 99%, or 100% identical to SEQ ID NO: 1525;
[0714] a VL at least 65%, at least 70%, at least 75%, at least 80%, at least 85%, at least 90%, at least 95%, at least 99%, or 100% identical to SEQ ID NO: 1527 and a VH at least 65%, at least 70%, at least 75%, at least 80%, at least 85%, at least 90%, at least 95%, at least 99%, or 100% identical to SEQ ID NO: 1530;
[0715] a VL at least 65%, at least 70%, at least 75%, at least 80%, at least 85%, at least 90%, at least 95%, at least 99%, or 100% identical to SEQ ID NO: 1533 and a VH at least 65%, at least 70%, at least 75%, at least 80%, at least 85%, at least 90%, at least 95%, at least 99%, or 100% identical to SEQ ID NO: 1537;
[0716] a VL at least 65%, at least 70%, at least 75%, at least 80%, at least 85%, at least 90%, at least 95%, at least 99%, or 100% identical to SEQ ID NO: 1540 and a VH at least 65%, at least 70%, at least 75%, at least 80%, at least 85%, at least 90%, at least 95%, at least 99%, or 100% identical to SEQ ID NO: 1543;
[0717] a VL at least 65%, at least 70%, at least 75%, at least 80%, at least 85%, at least 90%, at least 95%, at least 99%, or 100% identical to SEQ ID NO: 1546 and a VH at least 65%, at least 70%, at least 75%, at least 80%, at least 85%, at least 90%, at least 95%, at least 99%, or 100% identical to SEQ ID NO: 1550;
[0718] a VL at least 65%, at least 70%, at least 75%, at least 80%, at least 85%, at least 90%, at least 95%, at least 99%, or 100% identical to SEQ ID NO: 1551 and a VH at least 65%, at least 70%, at least 75%, at least 80%, at least 85%, at least 90%, at least 95%, at least 99%, or 100% identical to SEQ ID NO: 1555;
[0719] a VL at least 65%, at least 70%, at least 75%, at least 80%, at least 85%, at least 90%, at least 95%, at least 99%, or 100% identical to SEQ ID NO: 1558 and a VH at least 65%, at least 70%, at least 75%, at least 80%, at least 85%, at least 90%, at least 95%, at least 99%, or 100% identical to SEQ ID NO: 1561;
[0720] a VL at least 65%, at least 70%, at least 75%, at least 80%, at least 85%, at least 90%, at least 95%, at least 99%, or 100% identical to SEQ ID NO: 1563 and a VH at least 65%, at least 70%, at least 75%, at least 80%, at least 85%, at least 90%, at least 95%, at least 99%, or 100% identical to SEQ ID NO: 1567;
[0721] a VL at least 65%, at least 70%, at least 75%, at least 80%, at least 85%, at least 90%, at least 95%, at least 99%, or 100% identical to SEQ ID NO: 1570 and a VH at least 65%, at least 70%, at least 75%, at least 80%, at least 85%, at least 90%, at least 95%, at least 99%, or 100% identical to SEQ ID NO: 1573;
[0722] a VL at least 65%, at least 70%, at least 75%, at least 80%, at least 85%, at least 90%, at least 95%, at least 99%, or 100% identical to SEQ ID NO: 1576 and a VH at least 65%, at least 70%, at least 75%, at least 80%, at least 85%, at least 90%, at least 95%, at least 99%, or 100% identical to SEQ ID NO: 1580;
[0723] a VL at least 65%, at least 70%, at least 75%, at least 80%, at least 85%, at least 90%, at least 95%, at least 99%, or 100% identical to SEQ ID NO: 1583 and a VH at least 65%, at least 70%, at least 75%, at least 80%, at least 85%, at least 90%, at least 95%, at least 99%, or 100% identical to SEQ ID NO: 1587;
[0724] a VL at least 65%, at least 70%, at least 75%, at least 80%, at least 85%, at least 90%, at least 95%, at least 99%, or 100% identical to SEQ ID NO: 1589 and a VH at least 65%, at least 70%, at least 75%, at least 80%, at least 85%, at least 90%, at least 95%, at least 99%, or 100% identical to SEQ ID NO: 1593;
[0725] a VL at least 65%, at least 70%, at least 75%, at least 80%, at least 85%, at least 90%, at least 95%, at least 99%, or 100% identical to SEQ ID NO: 1596 and a VH at least 65%, at least 70%, at least 75%, at least 80%, at least 85%, at least 90%, at least 95%, at least 99%, or 100% identical to SEQ ID NO: 1600;
[0726] a VL at least 65%, at least 70%, at least 75%, at least 80%, at least 85%, at least 90%, at least 95%, at least 99%, or 100% identical to SEQ ID NO: 1603 and a VH at least 65%, at least 70%, at least 75%, at least 80%, at least 85%, at least 90%, at least 95%, at least 99%, or 100% identical to SEQ ID NO: 1607;
[0727] a VL at least 65%, at least 70%, at least 75%, at least 80%, at least 85%, at least 90%, at least 95%, at least 99%, or 100% identical to SEQ ID NO: 1610 and a VH at least 65%, at least 70%, at least 75%, at least 80%, at least 85%, at least 90%, at least 95%, at least 99%, or 100% identical to SEQ ID NO: 1614;
[0728] a VL at least 65%, at least 70%, at least 75%, at least 80%, at least 85%, at least 90%, at least 95%, at least 99%, or 100% identical to SEQ ID NO: 1617 and a VH at least 65%, at least 70%, at least 75%, at least 80%, at least 85%, at least 90%, at least 95%, at least 99%, or 100% identical to SEQ ID NO: 1621;
[0729] a VL at least 65%, at least 70%, at least 75%, at least 80%, at least 85%, at least 90%, at least 95%, at least 99%, or 100% identical to SEQ ID NO: 1624 and a VH at least 65%, at least 70%, at least 75%, at least 80%, at least 85%, at least 90%, at least 95%, at least 99%, or 100% identical to SEQ ID NO: 1628;
[0730] a VL at least 65%, at least 70%, at least 75%, at least 80%, at least 85%, at least 90%, at least 95%, at least 99%, or 100% identical to SEQ ID NO: 1631 and a VH at least 65%, at least 70%, at least 75%, at least 80%, at least 85%, at least 90%, at least 95%, at least 99%, or 100% identical to SEQ ID NO: 1635;
[0731] a VL at least 65%, at least 70%, at least 75%, at least 80%, at least 85%, at least 90%, at least 95%, at least 99%, or 100% identical to SEQ ID NO: 1638 and a VH at least 65%, at least 70%, at least 75%, at least 80%, at least 85%, at least 90%, at least 95%, at least 99%, or 100% identical to SEQ ID NO: 1642;
[0732] a VL at least 65%, at least 70%, at least 75%, at least 80%, at least 85%, at least 90%, at least 95%, at least 99%, or 100% identical to SEQ ID NO: 1645 and a VH at least 65%, at least 70%, at least 75%, at least 80%, at least 85%, at least 90%, at least 95%, at least 99%, or 100% identical to SEQ ID NO: 1649;
[0733] a VL at least 65%, at least 70%, at least 75%, at least 80%, at least 85%, at least 90%, at least 95%, at least 99%, or 100% identical to SEQ ID NO: 1652 and a VH at least 65%, at least 70%, at least 75%, at least 80%, at least 85%, at least 90%, at least 95%, at least 99%, or 100% identical to SEQ ID NO: 1656;
[0734] a VL at least 65%, at least 70%, at least 75%, at least 80%, at least 85%, at least 90%, at least 95%, at least 99%, or 100% identical to SEQ ID NO: 1659 and a VH at least 65%, at least 70%, at least 75%, at least 80%, at least 85%, at least 90%, at least 95%, at least 99%, or 100% identical to SEQ ID NO: 1662;
[0735] a VL at least 65%, at least 70%, at least 75%, at least 80%, at least 85%, at least 90%, at least 95%, at least 99%, or 100% identical to SEQ ID NO: 1664 and a VH at least 65%, at least 70%, at least 75%, at least 80%, at least 85%, at least 90%, at least 95%, at least 99%, or 100% identical to SEQ ID NO: 1668;
[0736] a VL at least 65%, at least 70%, at least 75%, at least 80%, at least 85%, at least 90%, at least 95%, at least 99%, or 100% identical to SEQ ID NO: 1669 and a VH at least 65%, at least 70%, at least 75%, at least 80%, at least 85%, at least 90%, at least 95%, at least 99%, or 100% identical to SEQ ID NO: 1671;
[0737] a VL at least 65%, at least 70%, at least 75%, at least 80%, at least 85%, at least 90%, at least 95%, at least 99%, or 100% identical to SEQ ID NO: 1674 and a VH at least 65%, at least 70%, at least 75%, at least 80%, at least 85%, at least 90%, at least 95%, at least 99%, or 100% identical to SEQ ID NO: 1678;
[0738] a VL at least 65%, at least 70%, at least 75%, at least 80%, at least 85%, at least 90%, at least 95%, at least 99%, or 100% identical to SEQ ID NO: 1682 and a VH at least 65%, at least 70%, at least 75%, at least 80%, at least 85%, at least 90%, at least 95%, at least 99%, or 100% identical to SEQ ID NO: 1686;
[0739] a VL at least 65%, at least 70%, at least 75%, at least 80%, at least 85%, at least 90%, at least 95%, at least 99%, or 100% identical to SEQ ID NO: 1692 and a VH at least 65%, at least 70%, at least 75%, at least 80%, at least 85%, at least 90%, at least 95%, at least 99%, or 100% identical to SEQ ID NO: 1696;
[0740] a VL at least 65%, at least 70%, at least 75%, at least 80%, at least 85%, at least 90%, at least 95%, at least 99%, or 100% identical to SEQ ID NO: 1700 and a VH at least 65%, at least 70%, at least 75%, at least 80%, at least 85%, at least 90%, at least 95%, at least 99%, or 100% identical to SEQ ID NO: 1704;
[0741] a VL at least 65%, at least 70%, at least 75%, at least 80%, at least 85%, at least 90%, at least 95%, at least 99%, or 100% identical to SEQ ID NO: 1711 and a VH at least 65%, at least 70%, at least 75%, at least 80%, at least 85%, at least 90%, at least 95%, at least 99%, or 100% identical to SEQ ID NO: 1714;
[0742] a VL at least 65%, at least 70%, at least 75%, at least 80%, at least 85%, at least 90%, at least 95%, at least 99%, or 100% identical to SEQ ID NO: 1721 and a VH at least 65%, at least 70%, at least 75%, at least 80%, at least 85%, at least 90%, at least 95%, at least 99%, or 100% identical to SEQ ID NO: 1722;
[0743] a VL at least 65%, at least 70%, at least 75%, at least 80%, at least 85%, at least 90%, at least 95%, at least 99%, or 100% identical to SEQ ID NO: 1724 and a VH at least 65%, at least 70%, at least 75%, at least 80%, at least 85%, at least 90%, at least 95%, at least 99%, or 100% identical to SEQ ID NO: 1726;
[0744] a VL at least 65%, at least 70%, at least 75%, at least 80%, at least 85%, at least 90%, at least 95%, at least 99%, or 100% identical to SEQ ID NO: 1730 and a VH at least 65%, at least 70%, at least 75%, at least 80%, at least 85%, at least 90%, at least 95%, at least 99%, or 100% identical to SEQ ID NO: 1734;
[0745] a VL at least 65%, at least 70%, at least 75%, at least 80%, at least 85%, at least 90%, at least 95%, at least 99%, or 100% identical to SEQ ID NO: 1740 and a VH at least 65%, at least 70%, at least 75%, at least 80%, at least 85%, at least 90%, at least 95%, at least 99%, or 100% identical to SEQ ID NO: 1742;
[0746] a VL at least 65%, at least 70%, at least 75%, at least 80%, at least 85%, at least 90%, at least 95%, at least 99%, or 100% identical to SEQ ID NO: 1746 and a VH at least 65%, at least 70%, at least 75%, at least 80%, at least 85%, at least 90%, at least 95%, at least 99%, or 100% identical to SEQ ID NO: 1750;
[0747] a VL at least 65%, at least 70%, at least 75%, at least 80%, at least 85%, at least 90%, at least 95%, at least 99%, or 100% identical to SEQ ID NO: 1755 and a VH at least 65%, at least 70%, at least 75%, at least 80%, at least 85%, at least 90%, at least 95%, at least 99%, or 100% identical to SEQ ID NO: 1759;
[0748] a VL at least 65%, at least 70%, at least 75%, at least 80%, at least 85%, at least 90%, at least 95%, at least 99%, or 100% identical to SEQ ID NO: 1755 and a VH at least 65%, at least 70%, at least 75%, at least 80%, at least 85%, at least 90%, at least 95%, at least 99%, or 100% identical to SEQ ID NO: 1760;
[0749] a VL at least 65%, at least 70%, at least 75%, at least 80%, at least 85%, at least 90%, at least 95%, at least 99%, or 100% identical to SEQ ID NO: 1730 and a VH at least 65%, at least 70%, at least 75%, at least 80%, at least 85%, at least 90%, at least 95%, at least 99%, or 100% identical to SEQ ID NO: 1734;
[0750] a VL at least 65%, at least 70%, at least 75%, at least 80%, at least 85%, at least 90%, at least 95%, at least 99%, or 100% identical to SEQ ID NO: 1764 and a VH at least 65%, at least 70%, at least 75%, at least 80%, at least 85%, at least 90%, at least 95%, at least 99%, or 100% identical to SEQ ID NO: 1765;
[0751] a VL at least 65%, at least 70%, at least 75%, at least 80%, at least 85%, at least 90%, at least 95%, at least 99%, or 100% identical to SEQ ID NO: 1766 and a VH at least 65%, at least 70%, at least 75%, at least 80%, at least 85%, at least 90%, at least 95%, at least 99%, or 100% identical to SEQ ID NO: 1768;
[0752] a VL at least 65%, at least 70%, at least 75%, at least 80%, at least 85%, at least 90%, at least 95%, at least 99%, or 100% identical to SEQ ID NO: 1771 and a VH at least 65%, at least 70%, at least 75%, at least 80%, at least 85%, at least 90%, at least 95%, at least 99%, or 100% identical to SEQ ID NO: 1775;
[0753] a VL at least 65%, at least 70%, at least 75%, at least 80%, at least 85%, at least 90%, at least 95%, at least 99%, or 100% identical to SEQ ID NO: 1779 and a VH at least 65%, at least 70%, at least 75%, at least 80%, at least 85%, at least 90%, at least 95%, at least 99%, or 100% identical to SEQ ID NO: 1783;
[0754] a VL at least 65%, at least 70%, at least 75%, at least 80%, at least 85%, at least 90%, at least 95%, at least 99%, or 100% identical to SEQ ID NO: 1784 and a VH at least 65%, at least 70%, at least 75%, at least 80%, at least 85%, at least 90%, at least 95%, at least 99%, or 100% identical to SEQ ID NO: 1785;
[0755] a VL at least 65%, at least 70%, at least 75%, at least 80%, at least 85%, at least 90%, at least 95%, at least 99%, or 100% identical to SEQ ID NO: 1788 and a VH at least 65%, at least 70%, at least 75%, at least 80%, at least 85%, at least 90%, at least 95%, at least 99%, or 100% identical to SEQ ID NO: 1792;
[0756] a VL at least 65%, at least 70%, at least 75%, at least 80%, at least 85%, at least 90%, at least 95%, at least 99%, or 100% identical to SEQ ID NO: 1794 and a VH at least 65%, at least 70%, at least 75%, at least 80%, at least 85%, at least 90%, at least 95%, at least 99%, or 100% identical to SEQ ID NO: 1797;
[0757] a VL at least 65%, at least 70%, at least 75%, at least 80%, at least 85%, at least 90%, at least 95%, at least 99%, or 100% identical to SEQ ID NO: 1800 and a VH at least 65%, at least 70%, at least 75%, at least 80%, at least 85%, at least 90%, at least 95%, at least 99%, or 100% identical to SEQ ID NO: 1804;
[0758] a VL at least 65%, at least 70%, at least 75%, at least 80%, at least 85%, at least 90%, at least 95%, at least 99%, or 100% identical to SEQ ID NO: 1806 and a VH at least 65%, at least 70%, at least 75%, at least 80%, at least 85%, at least 90%, at least 95%, at least 99%, or 100% identical to SEQ ID NO: 1809;
[0759] a VL at least 65%, at least 70%, at least 75%, at least 80%, at least 85%, at least 90%, at least 95%, at least 99%, or 100% identical to SEQ ID NO: 1812 and a VH at least 65%, at least 70%, at least 75%, at least 80%, at least 85%, at least 90%, at least 95%, at least 99%, or 100% identical to SEQ ID NO: 1816;
[0760] a VL at least 65%, at least 70%, at least 75%, at least 80%, at least 85%, at least 90%, at least 95%, at least 99%, or 100% identical to SEQ ID NO: 1819 and a VH at least 65%, at least 70%, at least 75%, at least 80%, at least 85%, at least 90%, at least 95%, at least 99%, or 100% identical to SEQ ID NO: 1823;
[0761] a VL at least 65%, at least 70%, at least 75%, at least 80%, at least 85%, at least 90%, at least 95%, at least 99%, or 100% identical to SEQ ID NO: 1826 and a VH at least 65%, at least 70%, at least 75%, at least 80%, at least 85%, at least 90%, at least 95%, at least 99%, or 100% identical to SEQ ID NO: 1830;
[0762] a VL at least 65%, at least 70%, at least 75%, at least 80%, at least 85%, at least 90%, at least 95%, at least 99%, or 100% identical to SEQ ID NO: 1980 and a VH at least 65%, at least 70%, at least 75%, at least 80%, at least 85%, at least 90%, at least 95%, at least 99%, or 100% identical to SEQ ID NO: 1984;
[0763] a VL at least 65%, at least 70%, at least 75%, at least 80%, at least 85%, at least 90%, at least 95%, at least 99%, or 100% identical to SEQ ID NO: 1988 and a VH at least 65%, at least 70%, at least 75%, at least 80%, at least 85%, at least 90%, at least 95%, at least 99%, or 100% identical to SEQ ID NO: 1992;
[0764] a VL at least 65%, at least 70%, at least 75%, at least 80%, at least 85%, at least 90%, at least 95%, at least 99%, or 100% identical to SEQ ID NO: 1996 and a VH at least 65%, at least 70%, at least 75%, at least 80%, at least 85%, at least 90%, at least 95%, at least 99%, or 100% identical to SEQ ID NO: 2000;
[0765] a VL at least 65%, at least 70%, at least 75%, at least 80%, at least 85%, at least 90%, at least 95%, at least 99%, or 100% identical to SEQ ID NO: 2004 and a VH at least 65%, at least 70%, at least 75%, at least 80%, at least 85%, at least 90%, at least 95%, at least 99%, or 100% identical to SEQ ID NO: 2008;
[0766] a VL at least 65%, at least 70%, at least 75%, at least 80%, at least 85%, at least 90%, at least 95%, at least 99%, or 100% identical to SEQ ID NO: 1833 and a VH at least 65%, at least 70%, at least 75%, at least 80%, at least 85%, at least 90%, at least 95%, at least 99%, or 100% identical to SEQ ID NO: 1837;
[0767] a VL at least 65%, at least 70%, at least 75%, at least 80%, at least 85%, at least 90%, at least 95%, at least 99%, or 100% identical to SEQ ID NO: 1840 and a VH at least 65%, at least 70%, at least 75%, at least 80%, at least 85%, at least 90%, at least 95%, at least 99%, or 100% identical to SEQ ID NO: 1844;
[0768] a VL at least 65%, at least 70%, at least 75%, at least 80%, at least 85%, at least 90%, at least 95%, at least 99%, or 100% identical to SEQ ID NO: 1847 and a VH at least 65%, at least 70%, at least 75%, at least 80%, at least 85%, at least 90%, at least 95%, at least 99%, or 100% identical to SEQ ID NO: 1851;
[0769] a VL at least 65%, at least 70%, at least 75%, at least 80%, at least 85%, at least 90%, at least 95%, at least 99%, or 100% identical to SEQ ID NO: 1854 and a VH at least 65%, at least 70%, at least 75%, at least 80%, at least 85%, at least 90%, at least 95%, at least 99%, or 100% identical to SEQ ID NO: 1858;
[0770] a VL at least 65%, at least 70%, at least 75%, at least 80%, at least 85%, at least 90%, at least 95%, at least 99%, or 100% identical to SEQ ID NO: 1861 and a VH at least 65%, at least 70%, at least 75%, at least 80%, at least 85%, at least 90%, at least 95%, at least 99%, or 100% identical to SEQ ID NO: 1865;
[0771] a VL at least 65%, at least 70%, at least 75%, at least 80%, at least 85%, at least 90%, at least 95%, at least 99%, or 100% identical to SEQ ID NO: 1361 and a VH at least 65%, at least 70%, at least 75%, at least 80%, at least 85%, at least 90%, at least 95%, at least 99%, or 100% identical to SEQ ID NO: 1365;
[0772] a VL at least 65%, at least 70%, at least 75%, at least 80%, at least 85%, at least 90%, at least 95%, at least 99%, or 100% identical to SEQ ID NO: 1868 and a VH at least 65%, at least 70%, at least 75%, at least 80%, at least 85%, at least 90%, at least 95%, at least 99%, or 100% identical to SEQ ID NO: 1871;
[0773] a VL at least 65%, at least 70%, at least 75%, at least 80%, at least 85%, at least 90%, at least 95%, at least 99%, or 100% identical to SEQ ID NO: 1874 and a VH at least 65%, at least 70%, at least 75%, at least 80%, at least 85%, at least 90%, at least 95%, at least 99%, or 100% identical to SEQ ID NO: 1877;
[0774] a VL at least 65%, at least 70%, at least 75%, at least 80%, at least 85%, at least 90%, at least 95%, at least 99%, or 100% identical to SEQ ID NO: 1880 and a VH at least 65%, at least 70%, at least 75%, at least 80%, at least 85%, at least 90%, at least 95%, at least 99%, or 100% identical to SEQ ID NO: 1884;
[0775] a VL at least 65%, at least 70%, at least 75%, at least 80%, at least 85%, at least 90%, at least 95%, at least 99%, or 100% identical to SEQ ID NO: 1887 and a VH at least 65%, at least 70%, at least 75%, at least 80%, at least 85%, at least 90%, at least 95%, at least 99%, or 100% identical to SEQ ID NO: 1890;
[0776] a VL at least 65%, at least 70%, at least 75%, at least 80%, at least 85%, at least 90%, at least 95%, at least 99%, or 100% identical to SEQ ID NO: 1893 and a VH at least 65%, at least 70%, at least 75%, at least 80%, at least 85%, at least 90%, at least 95%, at least 99%, or 100% identical to SEQ ID NO: 1897;
[0777] a VL at least 65%, at least 70%, at least 75%, at least 80%, at least 85%, at least 90%, at least 95%, at least 99%, or 100% identical to SEQ ID NO: 1900 and a VH at least 65%, at least 70%, at least 75%, at least 80%, at least 85%, at least 90%, at least 95%, at least 99%, or 100% identical to SEQ ID NO: 1904;
[0778] a VL at least 65%, at least 70%, at least 75%, at least 80%, at least 85%, at least 90%, at least 95%, at least 99%, or 100% identical to SEQ ID NO: 1907 and a VH at least 65%, at least 70%, at least 75%, at least 80%, at least 85%, at least 90%, at least 95%, at least 99%, or 100% identical to SEQ ID NO: 1910;
[0779] a VL at least 65%, at least 70%, at least 75%, at least 80%, at least 85%, at least 90%, at least 95%, at least 99%, or 100% identical to SEQ ID NO: 1913 and a VH at least 65%, at least 70%, at least 75%, at least 80%, at least 85%, at least 90%, at least 95%, at least 99%, or 100% identical to SEQ ID NO: 1916;
[0780] a VL at least 65%, at least 70%, at least 75%, at least 80%, at least 85%, at least 90%, at least 95%, at least 99%, or 100% identical to SEQ ID NO: 1919 and a VH at least 65%, at least 70%, at least 75%, at least 80%, at least 85%, at least 90%, at least 95%, at least 99%, or 100% identical to SEQ ID NO: 1923;
[0781] a VL at least 65%, at least 70%, at least 75%, at least 80%, at least 85%, at least 90%, at least 95%, at least 99%, or 100% identical to SEQ ID NO: 1926 and a VH at least 65%, at least 70%, at least 75%, at least 80%, at least 85%, at least 90%, at least 95%, at least 99%, or 100% identical to SEQ ID NO: 1930;
[0782] a VL at least 65%, at least 70%, at least 75%, at least 80%, at least 85%, at least 90%, at least 95%, at least 99%, or 100% identical to SEQ ID NO: 1933 and a VH at least 65%, at least 70%, at least 75%, at least 80%, at least 85%, at least 90%, at least 95%, at least 99%, or 100% identical to SEQ ID NO: 1937;
[0783] a VL at least 65%, at least 70%, at least 75%, at least 80%, at least 85%, at least 90%, at least 95%, at least 99%, or 100% identical to SEQ ID NO: 1940 and a VH at least 65%, at least 70%, at least 75%, at least 80%, at least 85%, at least 90%, at least 95%, at least 99%, or 100% identical to SEQ ID NO: 1944;
[0784] a VL at least 65%, at least 70%, at least 75%, at least 80%, at least 85%, at least 90%, at least 95%, at least 99%, or 100% identical to SEQ ID NO: 1947 and a VH at least 65%, at least 70%, at least 75%, at least 80%, at least 85%, at least 90%, at least 95%, at least 99%, or 100% identical to SEQ ID NO: 1950;
[0785] a VL at least 65%, at least 70%, at least 75%, at least 80%, at least 85%, at least 90%, at least 95%, at least 99%, or 100% identical to SEQ ID NO: 1952 and a VH at least 65%, at least 70%, at least 75%, at least 80%, at least 85%, at least 90%, at least 95%, at least 99%, or 100% identical to SEQ ID NO: 1956;
[0786] a VL at least 65%, at least 70%, at least 75%, at least 80%, at least 85%, at least 90%, at least 95%, at least 99%, or 100% identical to SEQ ID NO: 1958 and a VH at least 65%, at least 70%, at least 75%, at least 80%, at least 85%, at least 90%, at least 95%, at least 99%, or 100% identical to SEQ ID NO: 1962;
[0787] a VL at least 65%, at least 70%, at least 75%, at least 80%, at least 85%, at least 90%, at least 95%, at least 99%, or 100% identical to SEQ ID NO: 1965 and a VH at least 65%, at least 70%, at least 75%, at least 80%, at least 85%, at least 90%, at least 95%, at least 99%, or 100% identical to SEQ ID NO: 1969; or
[0788] a VL at least 65%, at least 70%, at least 75%, at least 80%, at least 85%, at least 90%, at least 95%, at least 99%, or 100% identical to SEQ ID NO: 1971 and a VH at least 65%, at least 70%, at least 75%, at least 80%, at least 85%, at least 90%, at least 95%, at least 99%, or 100% identical to SEQ ID NO: 1974.

[0789] In some aspects, the antigen binding polypeptide complex or the antibody or antigen binding fragment thereof disclosed herein comprise one or more CL and wherein the one or more CL comprise an amino acid sequence that is at least 65%, at least 70%, at least 75%, at least 80%, at least 85%, at least 90%, at least 95%, at least 99%, or 100% identical to any one of SEQ ID NOs: 374, 637, or 1092-1095. In some aspects, the antigen binding polypeptide complex or the antibody or antigen binding fragment thereof disclosed herein comprise one or more CH1 and wherein the one or more CH1 comprise an amino acid sequence that is at least 65%, at least 70%, at least 75%, at least 80%, at least 85%, at least 90%, at least 95%, at least 99%, or 100% identical to any one of SEQ ID NOs: 375, 634, 1070, 1071, or 1086-1091.

[0790] In some aspects, the antigen binding polypeptide complex or the antibody or antigen binding fragment thereof disclosed herein comprise one or more CH2 and wherein the one or more CH2 comprise an amino acid sequence that is at least 65%, at least 70%, at least 75%, at least 80%, at least 85%, at least 90%, at least 95%, at least 99%, or 100% identical to any one of SEQ ID NO: 1075-1078. In some aspects, the antigen binding polypeptide complex or the antibody or antigen binding fragment thereof disclosed herein comprise one or more CH3 and wherein the one or more CH3 comprise an amino acid sequence that is at least 65%, at least 70%, at least 75%, at least 80%, at least 85%, at least 90%, at least 95%, at least 99%, or 100% identical to any one of SEQ ID NO: 1079-1085.

[0791] In some aspects, the antigen binding polypeptide, antigen binding polypeptide complex, polypeptide, antibody or antigen binding fragment thereof disclosed herein have a poly-reactivity score of from 0 to 100. In some aspects, the antigen binding polypeptide, antigen binding polypeptide complex, polypeptide, antibody or antigen binding fragment thereof disclosed herein have a poly-reactivity score of from 0 to 50. In some aspects, the antigen binding polypeptide, antigen binding polypeptide complex, polypeptide, antibody or antigen binding fragment thereof disclosed herein have a poly-reactivity score of from 0 to 20. In some aspects, the antigen binding polypeptide, antigen binding polypeptide complex, polypeptide, antibody or antigen binding fragment thereof disclosed herein have a poly-reactivity score of from 0 to 10. In some aspects, the antigen binding polypeptide, antigen binding polypeptide complex, polypeptide, antibody or antigen binding fragment thereof disclosed herein have a poly-reactivity score of from 0 to 5.

### BRIEF DESCRIPTION OF THE DRAWINGS

[0792] Some aspects of the invention are herein described, by way of example only, with reference to the accompanying drawings. With specific reference now to the drawings in detail, it is stressed that the particulars shown are by way of example and for purposes of illustrative discussion of aspects of the invention.

[0793] FIGS. 1A-1UU show exemplary linear structures of antigen binding polypeptides derived from anti-SARS-CoV-2 antibodies (i.e., B8, E12, E8, A23-58, A19-46, and B1) as indicated. VL: variable light chain; VH variable heavy chain; CL: light chain constant region; CH: heavy chain constant region; and L: optional linker.

[0794] FIGS. 2A-2N show exemplary configurations of antigen binding polypeptides derived from anti-SARS-CoV-2 antibodies (i.e., B8, E12, E8, A23-58, A19-46, and B1) as indicated.

[0795] FIG. 3 shows a schematic of the targeting of multiple spike protein receptor binding domain (RBD) sites by anti-SARS-CoV-2 neutralizing antibodies from which the VHs and the VLs comprised in the antigen binding polypeptides described herein were derived.

[0796] FIG. 4 shows a schematic of the structure of exemplary anti-SARS-CoV-2 antigen-binding polypeptide complexes tested in Example 4 (MX1042, MX1043, MX1069, MX1055, MX1089, and MX1206).

[0797] FIG. 5 shows a chart of the pharmacokinetics (PK) determined for each antigen binding polypeptide complex tested in Example 5 (MX1069, MX1043, MX1206, MX1089, and MX1042).

[0798] FIG. 6 shows a schematic of the design of the experiments described in Example 6.

[0799] FIG. 7 shows a schematic of the structures of MX1069 and MX1089.

[0800] FIG. 8 shows a chart of body weight change in animals treated with MX1069 and MX1089.

[0801] FIGS. 9A-9B show a chart of Median Tissue Culture Infectious Dose (TCID50) in lungs and nares in animals treated with MX1069 and MX1089.

[0802] FIG. 10 shows a schematic of the structures of MX1042 and MX1043.

[0803] FIG. 11 shows a schematic of the design of the experiments described in Example 6.

[0804] FIG. 12 shows a chart of body weight change in animals treated with MX1042 and MX1043.

[0805] FIGS. 13A-13B show a chart of Median Tissue Culture Infectious Dose (TCID50) in lungs and nares in animals treated with MX1042 and MX1043.

[0806] FIGS. 14A-14B show a schematic of the structures of additional candidates tested in Example 7 (MX1255, MX1275, MX1413, MX1368, MX1366, and MX1418).

[0807] FIG. 15 shows a schematic of the position of the N62 residue in the VH of the E8 monoclonal antibody.

[0808] FIG. 16 shows a chart of the pharmacokinetics (PK) of the indicated monoclonal antibodies.

[0809] FIG. 17 shows a schematic of the structures of additional candidates and of the control (MX1042) tested in Example 8 (MX1042, MX1275, MX1448, MX1545, MX1069, MX1366, MX1450, and MX1548).

[0810] FIGS. 18A-18B show a chart of the pharmacokinetics (PK) values of the tested antigen binding polypeptide complexes as indicated (MX1042, MX1275, MX1448, MX1545, MX1069, MX1366, MX1450, and MX1548).

[0811] FIG. 19 shows a gel electrophoresis of restriction enzyme digestion of MD1186.

[0812] FIG. 20 shows a gel electrophoresis of MD1186 plasmid linearized with NotI.

[0813] FIGS. 21A-21B show a gel electrophoresis of the mRNA in vitro transcribed from MD1186 plasmid linearized with NotI.

[0814] FIG. 22 shows a Western Blot of in vitro produced MX828 after protein A purification.

[0815] FIG. 23 shows a schematic of the structure of MX828.

[0816] FIG. 24 shows a schematic of the structures of additional candidates tested for in vitro production (MX1545, MX1450/MX1453, MX1548, MX1468, and MX1549).

[0817] FIG. 25 shows a gel electrophoresis of in vitro transcribed mRNA encoding MX1448/MX1451 and MX1450/MX1453.

[0818] FIG. 26 shows a capillary gel electrophoresis by Fragment Analyzer of in vitro transcribed mRNA encoding MX1448/MX1451 and MX1450/MX1453.

[0819] FIG. 27 shows a Western Blot analysis of the produced MX1448/MX1451 and MX1450/MX1453.

[0820] FIG. 28 shows a schematic of the structures of MX1451 and MX1453.

[0821] FIG. 29 shows a schematic of the structures of MX1548, MX1846, and MX1847.

[0822] FIGS. 30A-30B show size exclusion chromatography profiles of MX1846 and MX1847.

[0823] FIG. 31 shows a schematic of the structures of MX1450, MX1866, and MX1867.

[0824] FIGS. 32A-32B show size exclusion chromatography profiles of MX1866 and MX1867.

[0825] FIG. 33 shows a schematic of the structures of MX1549, MX1849, and MX1850.

[0826] FIG. 34 shows a schematic of the structures of MX1468, MX1868, and MX1869.

[0827] FIGS. 35A-35B show size exclusion chromatography profiles of MX1868 and MX1869.

[0828] FIGS. 36A-36E show HPLC-analytical SEC profiles of MX1846, MX1847, MX1866, MX1867, and MX1548.

[0829] FIGS. 37A-37E show HIC profiles of MX1846, MX1847, MX1866, MX1867, and MX1548.

[0830] FIG. 38 shows a schematic of the structures of MX1870, MX1871, MX1872, MX1873, MX1874, MX1875, MX1876, MX1877, MX1878, MX1879, MX1880, and MX1881.

[0831] FIGS. 39A-39L show SEC profiles of MX1870, MX1871, MX1872, MX1873, MX1874, MX1875, MX1876, MX1877, MX1878, MX1879, MX1880, and MX1881.

[0832] FIG. 40 shows a schematic of the structures of MX1870, MX1871, MX1872, MX1873, MX1874, MX1875, MX1876, MX1877, MX1878, MX1879, MX1880, MX1881, MX1548, MX1846, MX1847, and MX2005. The TM/YTE mutations occur in the hinge region between CH1 and CH2, and in CH2 and CH3, but not in CL or CH1, CL/CH1 are labeled as TM/YTE in the figure for ease of description.

[0833] FIG. 41 shows a schematic of the structures of MX1846, MX1846 with B2. MX 1880, and MX1880 with B2.

[0834] FIG. 42 shows a schematic of the structures of MX1846 and MX2005. The TM/YTE mutations occur in the hinge region between CH1 and CH2, and in CH2 and CH3, but not in CL or CH1, CL/CH1 are labeled as TM/YTE in the figure for case of description.

[0835] FIG. 43 shows a schematic of the structures of MX2005, MX2167, MX2169, MX2241, MX2148, MX2168, MX2170, MX2242, MX2183, MX2179, MX2180, and MX2269. The TM/YTE mutations occur in the hinge region between CH1 and CH2, and in CH2 and CH3, but not in CL or CH1, CL/CH1 are labeled as TM/YTE in the figure for ease of description.

[0836] FIGS. 44A-44J show SEC profiles of MX2167, MX2169, MX2168, MX2170, MX2171, MX2172, MX2148, MX2183, MX2179, and MX2180.

[0837] FIG. 45 shows a schematic of the structures of MX1846, MX2005, MX2167, MX2169, MX2148, MX2168, MX2170, MX2171, MX2172, MX2179, MX2180, and MX2183. The TM/YTE mutations occur in the hinge region between CH1 and CH2, and in CH2 and CH3, but not in CL or CH1, CL/CH1 are labeled as TM/YTE in the figure for ease of description.

[0838] FIGS. 46A-46B show results of a hamster challenge experiment conducted with MX2005, MX1880 and MX2148.

[0839] FIG. 47 shows a schematic of the structures of MX1548, MX1846, MX2005, and MX2059.

[0840] FIG. 48 shows representative sequence alignments between Fc domain of TM/YTE, LALAPA-LA and LA.

[0841] FIGS. 49A-49B show SEC profiles of MX1846 and MX2005.

[0842] FIG. 50 show results of an experiment in FcRn-Fc mice conducted with MX1846 and MX2005.

[0843] FIGS. 51A-51B show SEC profiles of MX1846 and MX2059.

[0844] FIG. 52 shows schematics of the linear structure of the antigen binding polypeptides comprised in MX1545, MX1733, MX1734, and MX1735.

[0845] FIG. 53 shows schematics of the structures of MX1545, MX1733, MX1734, and MX1735.

[0846] FIG. 54 shows a schematic of the AlphaFold2 prediction model of the linkers comprised in MX1545, MX1733, MX1734, and MX1735.

[0847] FIG. 55 shows SEC profiles of MX1545, MX1733, MX1734, and MX1735.

[0848] FIG. 56 shows schematics of the linear structure of the antigen binding polypeptides comprised in MX1545, MX1781, MX1782, and MX1783.

[0849] FIG. 57 shows schematics of the structures of MX1545, MX1781, MX1782, and MX1783.

[0850] FIG. 58 shows SEC profiles of MX1545, MX1781, MX1782, and MX1783.

[0851] FIG. 59 shows schematics of the linear structure of the antigen binding polypeptides comprised in MX1546, MX1570, MX1571, and MX1572.

[0852] FIG. 60 shows schematics of the structures of MX1546, MX1570, MX1571, and MX1572.

[0853] FIG. 61 shows a schematic of the AlphaFold2 prediction model of the linkers comprised in MX1546, MX1570, MX1571, and MX1572.

[0854] FIG. 62 shows SEC profiles of MX1546, MX1570, MX1571, and MX1572.

[0855] FIG. 63 shows schematics of the linear structure of the antigen binding polypeptides comprised in MX1544, MX1567, MX1568, and MX1569.

[0856] FIG. 64 shows schematics of the structures of MX1544, MX1567, MX1568, and MX1569.

[0857] FIG. 65 shows a schematic of the AlphaFold2 prediction model of the linkers comprised in MX1567 and MX1569.

[0858] FIG. 66 shows SEC profiles of MX1544, MX1567, MX1568, and MX1569.

[0859] FIGS. 67A-67B show schematics of the binding epitope of A18-448 on the spike protein receptor binding domain (RBD).

[0860] FIG. 68 shows a schematic of the structure of MX2301. The TM/YTE mutations occur in the hinge region between CH1 and CH2, and in CH2 and CH3, but not in CL or CH1, CL/CH1 are labeled as TM/YTE in the figure for ease of description.

[0861] FIG. 69 shows schematics of the structures of MX2299 and MX2265, B2 dGly: B2 comprising the HC-N89Q modification. The TM/YTE mutations occur in the hinge region between CH1 and CH2, and in CH2 and CH3, but not in CL or CH1, CL/CH1 are labeled as TM/YTE in the figure for ease of description.

[0862] FIG. 70 shows results of an experiment conducted to investigate the mechanism of action of MX2148, MX2148 blocks ACE2 binding on the SARS-CoV-2 spike protein to prevent viral entry.

[0863] FIGS. 71A-71H show results of an experiment conducted to measure the Fc-γ function of MX1880 and MX2148. The Fc mutations of MX2148 eliminated its Fc-γ function.

[0864] FIG. 72 shows schematics of the structures of monovalent and bivalent antigen binding complexes comprising A18-448 or B2.

[0865] FIGS. 73A-73B show the SEC profiles of MX2301 and MX2299, respectively.

[0866] FIG. 74 shows the SEC profile of MX2265.

[0867] FIG. 75 shows schematics of the structures of MX2242 and MX2241, B2 dGly: B2 comprising the HC-N89Q modification: G11 dGly: G11 comprising the HC-N116Q modification. The TM/YTE mutations occur in the hinge region between CH1 and CH2, and in CH2 and CH3, but not in CL or CH1. CL/CH1 are labeled as TM/YTE in the figure for ease of description.

[0868] FIG. 76 shows the SEC profile of MX2242.

[0869] FIGS. 77A-77B show the SEC profiles of MX2241 and MX2242, respectively.

[0870] FIG. 78 shows a Western Blot analysis of produced MX2241 and MX2242.

[0871] FIG. 79 shows a schematic of the structures of MX2263, MX2264, MX2265, and MX2266, B2 dGly: B2 comprising the HC-N89Q modification. The TM/YTE mutations occur in the hinge region between CH1 and CH2, and in CH2 and CH3, but not in CL or CH1, CL/CH1 are labeled as TM/YTE in the figure for ease of description.

[0872] FIGS. 80A-80E show SEC profiles of MX2263, MX2264, MX2265, MX2266, and MX2269, respectively.

[0873] FIG. 81 shows a Western Blot analysis of produced MX2263, MX2264, MX2265, MX2266, and MX2269.

[0874] FIG. 82 shows the spike amino acid differences in KP.2, KP.2.3, LB.1, KP.3, and KP.3.1.1, with respect to WA1.

[0875] FIGS. 83A-83D show results of a pK experiment in FcRn-Fc mice conducted with MX2567, MX2301, MX2242, and MX2265.

[0876] FIGS. 84A-84C show schematics of the structures of MX2674, MX2673, MX2672, MX2671, and MX2670, B2 dGly: B2 comprising the HC-N89Q modification. The TM/YTE mutations occur in the hinge region between CH1 and CH2, and in CH2 and CH3, but not in CL or CH1, CL/CH1 are labeled as TM/YTE in the figure for ease of description.

[0877] FIGS. 85A-85B show a Western Blot analysis of produced MX2676, MX2675, MX2674, MX2673, MX2672, MX2671, and MX2670.

[0878] FIGS. 86A-86G show the SEC profiles of MX2676, MX2675, MX2674, MX2673, MX2672, MX2671, and MX2670.

[0879] FIGS. 87A-87B show schematics of the structures of MX2464, MX2463, MX2462, MX2477, MX2476, MX2478, MX2479, and MX2475. The TM/YTE mutations occur in the hinge region between CH1 and CH2, and in CH2 and CH3, but not in CL or CH1, CL/CH1 are labeled as TM/YTE in the figure for ease of description.

[0880] FIGS. 88A-88F show the SEC profiles of MX2462, MX2463, MX2464, MX2475, MX2477, and MX2478, respectively.

[0881] FIG. 89 shows a Western Blot analysis of produced MX2462, MX2463, MX2464, MX2475, MX2477, and MX2478.

[0882] FIG. 90 shows schematics of the structures of MX2384, MX2270, and MX1091.

[0883] FIG. 91 shows generic schematics of monovalent, bivalent, and tetravalent antigen binding complexes.

[0884] FIG. 92 shows the results of a luciferase assay conducted in Raji B cells to measure the Antibody-Dependent Enhancement (ADE) of MX2148. No ADE was observed with MX2148, MW05: positive control (a monoclonal antibody that binds to SARS-CoV-2 spike protein, has neutralizing activity, and also exhibits ADE effector function).

[0885] FIG. 93 shows the results of an assay conducted to evaluate the rate of in vitro resistance acquisition of SARS-Cov-2 virus in presence of MX2148, of E12, G11, E8, A18-448, and of a mixture of E12, G11, E8, and A18-448.

[0886] FIG. 94 shows results of a pK experiment in FcRn-Fc mice conducted with MX2148.

[0887] FIG. 95 shows the experimental design of the Syrian Hamster Challenge described in Example 18.

[0888] FIGS. 96A-96B show the results obtained in lung (FIG. 96A) and nare (FIG. 96B) in the Syrian Hamster Challenge shown in FIG. 95.

[0889] FIGS. 97A-97D show cryo-EM structure of Fab binding sites of E12 (FIG. 97A), G11 (FIG. 97B), E8 (FIG. 97C), and A18.448 (FIG. 97 D) on the RBD, FIG. 97A: cryo-EM structures of XBB spike protein in complex with Fab E12 (map at 3.4 Å resolution). FIG. 97B: cryo-EM structure of XB.1.5 spike in complex with Fab G11 (map at 3.43 Å resolution). FIG. 97C: cryo-EM structures of XBB spike protein in complex with Fab E8 (map at 3.4 Å resolution). FIG. 97D: cryo-EM structure of EG.5 spike in complex with Fab A18.448 (Map at 3.59 Å resolution).

[0890] FIG. 98 shows a schematic of the rcVSV neutralization assay described in Example 18.

[0891] FIG. 100 shows a schematic of the rcVSV selection described in Example 18.

[0892] FIG. 101 shows the results of the rcVSV selection described in Example 18.

[0893] FIG. 102 shows a schematic of the A18-448 Fab binding epitope on the surface of the receptor binding domain of SARS-CoV-2 spike protein. The epitope mapping is based on the structural data from cryo-EM structure of AG.5 spike protein in complex with A18-448 Fab (Map at 3.59 Å resolution). G5 Fab binding epitope on the surface of the receptor binding domain of SARS-CoV-2 spike protein is also shown. The epitope mapping is based on the structural data from cryo-EM structure of SARS-CoV-1 spike protein in complex with G5 Fab. Receptor binding domain (RBD) conservation is calculated based on analysis of SARS-CoV-2 GISAID.

[0894] FIG. 103 shows a schematic of the structures of MX2242, MX2265, and MX2301.

[0895] FIGS. 104A-104C show the results of a purity assessment by HPLC aSEC for MX2242, MX2265, and MX2301, as indicated.

[0896] FIGS. 105A-105C show the results of a purity assessment by DLS for MX2242, MX2265, and MX2301, as indicated.

[0897] FIGS. 106A-106C show the results of a surface hydrophobicity analysis by aHIC for MX2242, MX2265, and MX2301, as indicated.

[0898] FIGS. 107A-107C show the results of a binding characterization by BLI for MX2242, MX2265, and MX2301, as indicated.

[0899] FIGS. 108A-108C show the results of a thermostability analysis by DSC for MX2242, MX2265, and MX2301, as indicated.

[0900] FIGS. 109A-109C show the results of a cIEF analysis of MX2242, MX2265, and MX2301, as indicated.

[0901] FIGS. 110A-110C show the results of a solubility at high concentration analysis by aSEC for MX2242, MX2265, and MX2301, as indicated.

[0902] FIGS. 111A-111C show the results of a solubility at high concentration analysis by DLS for MX2242, MX2265, and MX2301, as indicated.

[0903] FIGS. 112A-112C show the results of a HPLC-aSEC analysis under 5 cycles of Freeze and Thaw for MX2242, MX2265, and MX2301, as indicated.

[0904] FIGS. 113A-113C show the results of a DLS analysis after 5 cycles of Freeze and Thaw for MX2242, MX2265, and MX2301, as indicated.

[0905] FIGS. 114A-114C show the results of aSEC analysis under pH stress (pH 3.5 and pH 9.0) for MX2242, MX2265, and MX2301, as indicated.

[0906] FIGS. 115A-115C show the results of a potency analysis after pH 3.5 and pH 9.0 stress for MX2242, MX2265, and MX2301, as indicated.

[0907] FIGS. 116A-116C show the results of aSEC analysis after incubation at 40° C., for up to 2 weeks for MX2242, MX2265, and MX2301, as indicated.

[0908] FIGS. 117A-117C show the results of a binding response to COVID WT (wild type) RBD by BLI for MX2242, MX2265, and MX2301, as indicated.

[0909] FIGS. 118A-118C show the results of aSEC analysis under PBS incubation at 37° C., for up to 7 days for MX2242, MX2265, and MX2301, as indicated.

[0910] FIGS. 119A-119C show the results of a potency assay (binding to COVID RBD WT) by BLI after serum (0.8×) or PBS incubation at 37° C., for 0-7 days, for MX2242, MX2265, and MX2301, as indicated.

[0911] FIGS. 120A-120B show the results of a CE-SDS analysis of MX2242, MX2265, and MX2301 under different stress conditions: 40° C., for 1 week. 40° C., for 2 weeks, pH 3.5, pH 9.0, freeze and thaw, and high concentration.

[0912] FIG. 121 shows the results of a poly-reactivity by ELISA panel assay for MX2242, MX2265, and MX2301, and control molecules.

[0913] FIG. 122 shows the results of a self-interaction by AC-SINS (Affinity-Capture Self-Interacting Nanoparticle Spectroscopy) assay for MX2242, MX2265, and MX2301, and control molecules.

[0914] FIGS. 123A-123F show the results of a LC/MS analysis of MX2242 (samples treated by PNGase F).

[0915] FIGS. 124A-124D show the results of a LC/MS analysis of MX2265 (samples treated by PNGase F and TCEP).

[0916] FIGS. 125A-125F show the results of a LC/MS analysis of MX2265 (samples treated by Fabdello enzyme and TCEP).

[0917] FIGS. 126A-126D show the results of a LC/MS analysis of MX2265 (untreated samples).

[0918] FIGS. 127A-127D show the results of a LC/MS analysis of MX2301 (untreated samples).

[0919] FIGS. 128A-128D show the results of a LC/MS analysis of MX2301 (samples treated by Fabdello enzyme).

[0920] FIGS. 129A-129E show the results of a LC/MS analysis of MX2301.

[0921] FIGS. 130A-130C show the results of a DLS (intensity) analysis for MX2242, MX2265, and MX2301, as indicated.

### DETAILED DESCRIPTION OF THE INVENTION

[0922] Provided herein are antigen binding polypeptides and polypeptide complexes having improved features. In some aspects, the antigen binding polypeptides and polypeptide complexes have broad reactivity against SARS-CoV-2 variants of concern (VOCs), high neutralization potency, and/or resistance to SARS-CoV-2 escape. In some aspects, the antigen binding polypeptides and polypeptide complexes provided herein are easier to manufacture and administer than current therapeutic antibodies, and antibody cocktails. In some aspects, the antigen binding polypeptides and polypeptide complexes treat and/or prevent SARS-CoV-2 infection and/or COVID-19. In some aspects, the antigen binding polypeptides and polypeptide complexes treat and/or prevent SARS-CoV-2 infection and/or COVID-19 in immunocompromised individuals who cannot mount an effective immune response through vaccinations.

[0923] Various terms relating to aspects of the disclosure are used throughout the specification and claims. Such terms are to be given their ordinary meaning in the art, unless otherwise indicated. Other specifically defined terms are to be construed in a manner consistent with the definitions provided herein.

[0924] Provided herein are antigen binding polypeptides and polypeptide complexes having improved features. In some aspects, the antigen binding polypeptides and polypeptide complexes have reactivity against one or more antigens and/or high binding affinity to one or more antigens. In some aspects, the antigens are viral antigens that are not sarbecovirus antigens, bacterial antigens, parasite antigens, tumor-associated antigens, or antigens associated with pathologies other than infectious diseases and cancers/tumors. In some aspects, the antigen binding polypeptides and polypeptide complexes provided herein are easier to manufacture and administer than current therapeutic antibodies, and antibody cocktails. In some aspects, the antigen binding polypeptides and polypeptide complexes treat and/or prevent a pathology. In some aspects, the pathology is an infectious disease, such as a viral infection which is not a sarbecovirus infection, a bacterial infection, or a parasite infection: a cancer/tumor; or a pathology other than an infectious disease and a cancer/tumor. In some aspects, the antigen binding polypeptides and polypeptide complexes treat and/or prevent a pathology in immunocompromised individuals who cannot mount an effective immune response through vaccinations.

[0925] Various terms relating to aspects of the disclosure are used throughout the specification and claims. Such terms are to be given their ordinary meaning in the art, unless otherwise indicated. Other specifically defined terms are to be construed in a manner consistent with the definitions provided herein.

### Definitions

[0926] As used herein the term “SARS-CoV-2” refers to “severe acute respiratory syndrome coronavirus 2.” SARS-CoV-2 is the strain of coronavirus that causes coronavirus disease 2019 (COVID-19).

[0927] As used herein, the term “SARS-CoV-2 virus” includes the SARS-CoV-2 virus, virion or fragment thereof.

[0928] As used herein the term “COVID-19” refers to “coronavirus disease 2019.” COVID-19 is caused by the SARS-CoV-2 virus. Symptoms of COVID-19 are variable, but often include fever, cough, headache, fatigue, breathing difficulties, loss of smell, and loss of taste. Symptoms may begin one to fourteen days after exposure to the virus; however, at least a third of people who are infected do not develop noticeable symptoms. Of those people who develop symptoms noticeable enough to be classed as patients, most develop mild to moderate symptoms (up to mild pneumonia), with approximately 15% developing severe symptoms (dyspnea, hypoxia, or more than 50% lung involvement on imaging), and approximately 5% suffering critical symptoms (respiratory failure, shock, or multiorgan dysfunction). Some people continue to experience a range of effects for months after recovery (“long COVID”).

[0929] As used herein, the term “SARS-CoV-2 protein” refers to any structural or non-structural protein found in the SARS-CoV-2 virus. Structural proteins of the SARS-CoV-2 virus include, but are not limited to, the spike(S), nucleocapsid (N), membrane (M), and envelope (E) proteins. Non-structural proteins (NSPs) of the SARS-CoV-2 virus include, but are not limited to, accessory and replicase proteins such as NSP1-NSP16. The structural and functional properties of these proteins have been characterized. See, e.g., Satarker et al., Arch. Med. Res. 51 (6): 482-491, 2020; and Kakavandi et al., Cell Commun. Signal. 21:110, 2023.

[0930] As used herein, the terms “SARS-CoV-2 spike protein” and “spike protein” refer to the largest of the four major structural proteins found in the SARS-CoV-2 virus. The spike protein assembles into trimers that form large structures, called spikes or peplomers, that project from the surface of the SARS-CoV-2 virion and mediate entry of the virion into host cells. The SARS-CoV-2 spike protein is also called “S protein.” “spike (S) glycoprotein” and “E2.” The structural and functional properties of this protein have been characterized. See, e.g., Huang et al., Acta Pharmacol. Sin. 41: 1141-1149, 2020; Wu et al., Nature 579 (7798): 265-269, 2020; and Gene ID: 43740568.

[0931] As used herein, the term “antigen binding polypeptide” refers to a polypeptide having the ability to specifically bind to one or more antigens. An “antigen” is any substance (e.g., a molecule, such as a protein) that is recognized by, interacts with, and/or is capable of binding with a component of the immune system (e.g., antibody or antigen binding fragments thereof) and/or that is recognized by, interacts with, and/or is capable of binding with a non-naturally occurring antigen binding polypeptide. An antigen can be a substance (e.g., a molecule, such as a protein) that is (or is recognized by an organism as being) foreign to an organism. “Infectious disease antigens” can be, for example, viral antigens (e.g., sarbecovirus antigens, such as SARS-CoV-2 spike proteins, or epitopes thereof), bacterial antigens, or parasite antigens, which are antigens associated with or derived from viruses, bacteria, or parasites, respectively. Viral antigens can be sarbecovirus antigens or non-sarbecovirus antigens (i.e., antigens associated with or derived from viruses that are not sarbecoviruses. Antigens can also be “tumor-associated antigens” or “TAA.” TAA are molecules that are found only on cancer/tumor cells and not on non-cancer/tumor cells, or molecules that are found in different amounts on cancer/tumor cells with respect to non-cancer/tumor cells, or molecules that can be targeted by (i.e., recognized by, interact with, and/or bound by) antigen binding polypeptides for treating or preventing a cancer/tumor. In addition to infectious disease and cancer/tumor, antigens can also be associated with other pathologies. Such antigens can be found on cells of an organism affected with the pathology, or can be found in different amounts on cells affected with the pathology with respect to cells non affected with the pathology, or can be targeted by (i.e., recognized by, interact with, and/or bound by) antigen binding polypeptides for treating or preventing the pathology. Antigens that can be associated with pathologies other than infectious disease and cancer/tumor are herein referred to also as “other-pathology antigens.” A “pathology” refers to any deviations from the healthy state, and encompasses a “disease.” a “disorder.” a “syndrome.” a “condition.” or any combination thereof. It is to be understood that the descriptions provided above are not mutually exclusive. For example, a single antigen can be a TAA and also a viral antigen; a single antigen can be a TAA and also a bacterial antigen; a single antigen can be associated with more than one pathology; etc. The antigen binding polypeptides disclosed herein have the ability to specifically bind to one or more antigens, including viral antigens (e.g., sarbecovirus antigens, such as SARS-CoV-2 spike proteins, or epitopes thereof; or viral antigens that are not sarbecovirus antigens), bacterial antigens, parasite antigens, tumor-associated antigens, or antigens associated with pathologies other than infectious disease and cancer/tumor.

[0932] As used herein, the term “antigen binding polypeptide complex” refers to an aggregate of antigen binding polypeptides. Such aggregates can comprise two or more (e.g., three, four, five, or six) antigen binding polypeptides. Antigen binding polypeptides can be covalently or non-covalently bound to one another to form an antigen binding polypeptide complex. An antigen binding polypeptide complex, includes, but is not limited to, an antibody or antigen binding fragment thereof.

[0933] A number of sequences of polypeptides capable of binding SARS-CoV-2 spike proteins antigens (i.e., SARS-CoV-2 spike proteins, or epitopes thereof) are described in the published literature, for example, in U.S. Appl. No. 63/147,419. These sequences include, for example, a complementarity determining region (CDR), heavy chain variable region (VH), light chain variable region (VL), heavy chain (HC) and light chain (LC) sequences of anti-SARS-CoV-2 antibodies or antigen binding fragments thereof. A number of sequences of polypeptides capable of binding one or more antigens, including viral antigens that are not sarbecovirus antigens, bacterial antigens, parasite antigens, tumor-associated antigens, or antigens associated with pathologies other than infectious disease and cancer/tumor are described in the published literature. These sequences include, for example, a complementarity determining region (CDR), heavy chain variable region (VH), light chain variable region (VL), heavy chain (HC) and light chain (LC) sequences of antibodies or antigen binding fragments thereof.

[0934] The term “antibody” includes, without limitation, immunoglobulins which bind specifically to an antigen. An antibody comprises two heavy chains (HC) and two light chains (LC) interconnected by covalent bonds (e.g., disulfide bonds). Each HC comprises a heavy chain variable region (VH) and a heavy chain constant region; the heavy chain constant region comprises three constant domains (CH1, CH2 and CH3); each light chain comprises a light chain variable region (VL) and a light chain constant region or domain (CL). The VH and VL comprise regions of hypervariability, termed complementarity determining regions (CDRs), interspersed with regions that are more conserved, termed framework regions (FR). Each VH and VL comprises three CDRs and four FRs, arranged from amino-terminus to carboxy-terminus in the following order: FR1, CDR1, FR2, CDR2, FR3, CDR3, and FR4. The VH and the VL comprise binding domains that interact with the antigen. The constant regions of the antibodies may mediate the binding of the immunoglobulin to host tissues or factors, including various cells of the immune system (e.g., effector cells) and the first component (C1q) of the classical complement system. The region of the antibody comprising the VH and the VL is also referred to as Fv. The region of the antibody comprising the VH, the VL, the CH1, and the CL, is also referred to as Fab. The region of the antibody comprising the CH2 and the CH3 is also referred to as Fc. A heavy chain may have the C-terminal lysine. Unless specified otherwise herein, the amino acids in the variable regions are numbered using the Kabat numbering system and those in the constant regions are numbered using the EU system.

[0935] An “antigen binding fragment” of an antibody refers to one or more portions of an antibody that retain the ability to specifically bind to the antigen bound by the whole antibody. It has been shown that the antigen binding function of an antibody can be performed by portions of a full-length antibody. An antigen binding fragment can contain the antigen binding regions of an intact antibody (e.g., the complementarity determining regions (CDRs)). Examples of antigen binding fragments of antibodies include, but are not limited to. Fab, Fab′, F(ab′)₂, and Fv fragments, linear antibodies, and single chain antibodies. An antigen binding fragment of an antibody can be derived from any animal species, such as rodents (e.g., mouse, rat, or hamster) and humans or can be artificially produced.

[0936] Furthermore, although the two domains of the Fv fragment. VL and VH, are coded for by separate genes, they can be joined, using recombinant methods (e.g., by a synthetic linker) such that the VL and the VH are comprised in a single amino acid chain (known as single chain Fv (scFv): sec, e.g., Bird et al. (1988) Science 242:423-426; and Huston et al. (1988) Proc. Natl. Acad. Sci. USA 85:5879-5883), scFvs are also intended to be encompassed within the term “antigen-binding fragment”.

[0937] Antigen binding fragments are obtained using conventional techniques known to those with skill in the art, and the fragments screened for utility in the same manner as are intact antibodies. Antigen binding fragments can be produced by recombinant DNA techniques, or by enzymatic or chemical cleavage of intact immunoglobulins.

[0938] An antibody or an antigen binding fragment can be modified compared to a naturally occurring antibody or antigen binding fragment (e.g., by amino acid deletion, insertion, or substitution, or by conjugation to a non-antibody moiety). For example, an antibody or antigen binding fragment thereof can include one or more variant amino acids (compared to a naturally occurring antibody or antigen binding fragment thereof) which change a property (e.g., a functional property) of the antibody or antigen binding fragment thereof. For example, several such alterations are known in the art which affect, e.g., half-life, effector function, and/or immune responses to the antibody or antigen binding fragment thereof in an organism (e.g., a human patient). The term antibody or antigen binding fragment thereof also includes artificial polypeptide constructs which comprise at least one antibody-derived antigen binding site.

[0939] As used herein, the term “variable region” typically refers to a portion of an antibody, generally, a portion of a light or heavy chain, typically about the amino-terminal 110 to 120 amino acids, or 110 to 125 amino acids in the mature heavy chain and about 90 to 115 amino acids in the mature light chain, which differ extensively in sequence among antibodies and determine the binding specificity of a particular antibody (or antigen binding fragment thereof) for a particular antigen. The sequence variability is concentrated the CDRs, while the more conserved regions form the FRs. Without wishing to be bound by any particular mechanism or theory, it is believed that the CDRs of the light and heavy chains are primarily responsible for the interaction and specificity of an antibody (or antigen binding fragment thereof) with antigen. In some aspects, the variable region is a mammalian variable region, e.g., a human, mouse or rabbit variable region. In some aspects, the variable region comprises rodent or murine CDRs and human FRs. In some aspects, the variable region is a primate (e.g., non-human primate) variable region. In some aspects, the variable region comprises rodent or murine CDRs and primate (e.g., non-human primate) FRs.

[0940] The terms “complementarity determining region” or “CDR”, as used herein, refer to each of the regions of an antibody variable domain which are hypervariable in sequence and/or form structurally defined loops (hypervariable loops) and/or contain the antigen-contacting residues. Antibodies (or antigen binding fragments thereof) can comprise six CDRs, e.g., three in the VH and three in the VL.

[0941] The terms “VL”. “VL region.” and “VL domain” are used herein interchangeably to refer to the light chain variable region of an antigen binding polypeptide, antigen binding polypeptide complex, antibody or antigen binding fragment thereof. In some aspects, a VL region is referred to herein as VL1 to denote a first light chain variable region. VL2 to denote a second light chain variable region. VL3 to denote a third light chain variable region, and VL4 to denote a fourth light chain variable region. An enumerated VL region (e.g., VL1) can have the same or different antigen binding properties and/or the same or different sequence as another enumerated VL region (e.g., VL2).

[0942] The terms “VH”. “VH region.” and “VH domain” are used herein interchangeably to refer to the heavy chain variable region of an antigen binding polypeptide, antigen binding polypeptide complex, antibody or antigen binding fragment thereof. In some aspects, a VH region is referred to herein as VH1 to denote a first heavy chain variable region. VH2 to denote a second heavy chain variable region, and VH3 to denote a third heavy chain variable region. An enumerated VH region (e.g., VH1) can have the same or different antigen binding properties and/or the same or different sequence as another enumerated VH region (e.g., VH2).

[0943] As used herein. “Kabat numbering” and like terms are recognized in the art and refer to a system of numbering amino acid residues in the heavy and light chain variable regions of an antibody or antigen binding fragment thereof. In some aspects, CDRs can be determined according to the Kabat numbering system (sec, e.g., Kabat E A & Wu T T (1971) Ann NY Acad Sci 190:382-391 and Kabat E A et al., (1991) Sequences of Proteins of Immunological Interest. Fifth Edition. U.S. Department of Health and Human Services. NIH Publication No. 91-3242). Using the Kabat numbering system. CDRs within an antibody heavy chain molecule are typically present at amino acid positions 31 to 35, which optionally can include one or two additional amino acids, following 35 (referred to in the Kabat numbering scheme as 35A and 35B) (CDR1), amino acid positions 50 to 65 (CDR2), and amino acid positions 95 to 102 (CDR3). Using the Kabat numbering system. CDRs within an antibody light chain molecule are typically present at amino acid positions 24 to 34 (CDR1), amino acid positions 50 to 56 (CDR2), and amino acid positions 89 to 97 (CDR3).

[0944] As used herein, the terms “constant region” or “constant domain” are used interchangeably to refer to a portion of an antigen binding polypeptide, antigen binding polypeptide complex, antibody or antigen binding fragment thereof, e.g., a carboxyl terminal portion of a light and/or heavy chain which is not directly involved in binding of an antibody (or antigen binding fragment thereof) to an antigen but which can exhibit various effector functions. The constant region generally has a more conserved amino acid sequence relative to a variable region. In some aspects, an antigen binding polypeptide, antigen binding polypeptide complex, antibody or antigen binding fragment thereof comprises a constant region or portion thereof that is sufficient for antibody-dependent cell-mediated cytotoxicity (ADCC), antibody-dependent cellular phagocytosis (ADCP), and complement-dependent cytotoxicity (CDC). A constant region includes, but is not limited to, a light chain constant region or domain (CL) or heavy chain constant region or domain (CH1, CH2, CH3).

[0945] As used herein, the terms “fragment crystallizable region.” “Fc region.” or “Fc domain” are used interchangeably to refer to the tail region of an antibody that can interacts with cell surface receptors called Fc receptors and some proteins of the complement system. Fc regions typically comprise CH2 and CH3 regions, and, optionally, an immunoglobulin hinge. The immunoglobulin hinge typically connects the CH2 and CH3 regions to the CH1 region.

[0946] As used herein, the terms “immunoglobulin hinge.” “hinge.” “hinge domain” or “hinge region” are used interchangeably to refer to a stretch of heavy chains between the Fab and Fc portions of an antigen binding polypeptide, antigen binding polypeptide complex, antibody or antigen binding fragment thereof. A hinge provides structure, position and flexibility, which assist with normal functioning of antibodies (e.g., for crosslinking two antigens or binding two antigenic determinants on the same antigen molecule). An immunoglobulin hinge is divided into upper, middle and lower hinge regions that can be separated based on structural and/or genetic components. An immunoglobulin hinge of the invention can contain one, two or all three of these regions. Structurally, the upper hinge region stretches from the C terminal end of CH1 to the first hinge disulfide bond. The middle hinge region stretches from the first cysteine to the last cysteine in the hinge. The lower hinge region extends from the last cysteine to a glycine of CH2. The cysteines present in the hinge form interchain disulfide bonds that link the immunoglobulin monomers.

[0947] As used herein, the term “heavy chain” refers to a portion of an antigen binding polypeptide, antigen binding polypeptide complex, antibody or antigen binding fragment thereof typically composed of a heavy chain variable region (VH), a heavy chain constant region 1 (CH1), a heavy chain constant region 2 (CH2), and a heavy chain constant region 3 (CH3). A typical antibody is composed of two heavy chains and two light chains. When used in reference to an antibody, a heavy chain can refer to any distinct type, e.g., alpha (α), delta (δ), epsilon (ε), gamma (γ), and mu (μ), based on the amino acid sequence of the constant region, which gives rise to IgA, IgD, IgE, IgG, and IgM classes of antibodies, respectively, including subclasses of IgG, e.g., IgG1, IgG2, IgG3, and IgG4. Heavy chain amino acid sequences are known in the art. In some aspects, the heavy chain is a human heavy chain.

[0948] As used herein, the term “light chain” refers to a portion of an antigen binding polypeptide, antigen binding polypeptide complex, antibody or antigen binding fragment thereof typically composed of a light chain variable region (VL) and a light chain constant region (CL). A typical antibody is composed of two light chains and two heavy chains. When used in reference to an antibody, a light chain can refer to any distinct type, e.g., kappa (κ) or lambda (λ), based on the amino acid sequence of the constant region. Light chain amino acid sequences are known in the art. In some aspects, the light chain is a human light chain.

[0949] The term “antibody” includes, by way of example, monoclonal and polyclonal antibodies: chimeric and humanized antibodies: human or non-human antibodies: wholly synthetic antibodies; and single chain antibodies. A non-human antibody can be humanized by recombinant methods to reduce its immunogenicity in humans. Antigen binding fragments of an antibody can also be monoclonal and polyclonal, chimeric and humanized, human or non-human, wholly synthetic, and single chain. A non-human antigen binding fragments of an antibody can be humanized by recombinant methods to reduce its immunogenicity in humans.

[0950] The term “monoclonal antibody.” or antigen binding fragment thereof, as used herein, refers to an antibody or a population of antibodies, or antigen binding fragments thereof, that are produced by a single clone of B-cells and bind to the same epitope. In contrast, the term “polyclonal antibody.” or antigen binding fragment thereof, refers to a population of antibodies, or antigen binding fragment thereof, that are produced by different B-cells and can bind to the same or different epitopes of the same antigen.

[0951] The term “chimeric antibody.” or antigen binding fragment thereof, refers to an antibody or antigen binding fragments thereof wherein the amino acid sequence is derived from two or more species. Typically, the variable region of both light and heavy chains corresponds to the variable region of antibodies or antigen binding fragments thereof derived from one species of mammals (e.g., mouse, rat, rabbit, etc.) with the desired specificity, affinity and capability, while the constant regions are homologous to the sequences in antibodies or antigen binding fragments thereof derived from another species of mammals (usually a human) to avoid eliciting an immune response in that species.

[0952] The term “humanized antibody.” or antigen binding fragment thereof, refers to antibodies or antigen binding fragments that contain minimal non-human (e.g., murine) sequences. Typically, humanized antibodies or antigen binding fragments thereof are human immunoglobulins in which residues from one or more CDRs are replaced with residues from one or more CDRs of a non-human species (e.g., mouse, rat, rabbit, hamster) that have the desired specificity, affinity, and capability (Jones et al., Nature 321:522-525 (1986): Riechmann et al., Nature 332: 323-327 (1988): Verhoeyen et al., Science 239: 1534-1536 (1988)). In general, a humanized antibody or antigen binding fragment thereof will comprise substantially all of at least one, and typically two or three, variable domains containing all or substantially all of the CDR regions that correspond to the non-human immunoglobulin whereas all or substantially all of the FR regions are those of a human immunoglobulin consensus sequence. In some aspects, the FR residues of a human immunoglobulin can be also replaced with the corresponding residues in an antibody or fragment from a non-human species that has the desired specificity, affinity, and capability. The humanized antibody or antigen binding fragment thereof can be further modified by the substitution of additional residues either in the FR and/or within the CDRs to refine and optimize the antibody or antigen-binding fragment thereof specificity, affinity, and/or capability. A humanized antibody or antigen binding fragment thereof can also comprise at least a portion of a constant region, typically that of a human immunoglobulin. Examples of methods used to generate humanized antibodies are known and described, for example, in U.S. Pat. No. 5,225,539; Roguska et al., Proc. Natl. Acad. Sci., USA. 91 (3): 969-973 (1994), and Roguska et al., Protein Eng. 9 (10): 895-904 (1996).

[0953] The term “human antibody” or antigen binding fragment thereof, as used herein, means an antibody or antigen binding fragment thereof having an amino acid sequence derived from a human immunoglobulin gene locus, where such antibody or antigen binding fragment is made using recombinant techniques known in the art. This definition of a human antibody or antigen binding fragment thereof includes intact or full-length antibodies and fragments thereof.

[0954] A polypeptide, polypeptide complex, antibody, antigen binding fragment thereof, polynucleotide, vector or host cell which is “isolated” is a polypeptide, polypeptide complex, antibody, antigen binding fragment thereof, polynucleotide, vector or host cell which is in a form not found in nature. Isolated polypeptides, polypeptide complexes, antibodies, antigen binding fragments thereof, polynucleotides, vectors or host cells include those which have been purified to a degree that they are no longer in a form in which they are found in nature. In some aspects, a polypeptide, polypeptide complex, antibody, antigen binding fragment thereof, polynucleotide, vector or host cell which is isolated is substantially pure. As used herein. “substantially pure” refers to material which is at least 50% pure (i.e., free from contaminants), at least 90% pure, at least 95% pure, at least 98% pure, or at least 99% pure.

[0955] The terms “polypeptide.” “peptide.” and “protein” are used interchangeably herein to refer to polymers of amino acids of any length. The polymer can be linear or branched, it can comprise modified amino acids, and it can be interrupted by non-amino acids. The terms also encompass an amino acid polymer that has been modified naturally or by intervention; for example, disulfide bond formation, glycosylation, lipidation, acetylation, phosphorylation, or any other manipulation or modification, such as conjugation with a labeling component. Also included within the definition are, for example, polypeptides containing one or more analogs of an amino acid (including, for example, unnatural amino acids, etc.), as well as other modifications known in the art. It is understood that, because the polypeptides of this invention are based upon antibodies, or antigen binding fragments thereof, in some aspects, the polypeptides can occur as single chains or associated chains.

[0956] The use of the alternative (e.g., “or”) should be understood to mean either one, both, or a combination thereof of the alternatives. As used herein, the indefinite articles “a” or “an” should be understood to refer to “one or more” of any recited or enumerated component.

[0957] As used herein the term “and/or” is to be taken as specific disclosure of each of the two specified features or components with or without the other. Thus, the term “and/or” as used in a phrase such as “A and/or B” herein is intended to include “A and B.” “A or B.” “A” (alone), and “B” (alone). Likewise, the term “and/or” as used in a phrase such as “A, B, and/or C” is intended to encompass each of the following aspects: A, B, and C; A, B, or C; A or C; A or B; B or C; A and C; A and B; B and C; A (alone); B (alone); and C (alone).

[0958] It is understood that wherever aspects are described herein with the language “comprising.” “having.” or the like, otherwise analogous aspects described in terms of “consisting of” and/or “consisting essentially of” are also provided.

[0959] As used herein, the term “about” refers to a value or composition that is within an acceptable error range for the particular value or composition as determined by one of ordinary skill in the art, which will depend in part on how the value or composition is measured or determined, i.e., the limitations of the measurement system. For example. “about” can mean within 1 or more than 1 standard deviation per the practice in the art. Alternatively. “about” can mean a range of up to 10% or 20% (i.e., ±10% or ±20%). For example, about 3 mg can include any number between 2.7 mg and 3.3 mg (for 10%) or between 2.4 mg and 3.6 mg (for 20%). Furthermore, particularly with respect to biological systems or processes, the terms can mean up to an order of magnitude or up to 5-fold of a value. When particular values or compositions are provided in the application and claims, unless otherwise stated, the meaning of “about” should be assumed to be within an acceptable error range for that particular value or composition.

[0960] As used herein, the terms “polyreactivity” and “poly-reactivity” are used interchangeably and mean the ability of an antigen binding polypeptide, antigen binding polypeptide complex, polypeptide, antibody or antigen binding fragment thereof (e.g., an anti-SARS-CoV-2 virus antibody or antigen binding fragment thereof) disclosed herein to bind to multiple molecularly distinct antigens. Polyreactivity can be measured, for example, using enzyme-linked immunosorbent assay (ELISA) or surface plasmon resonance (SPR), as described herein.

[0961] As described herein, any numerical range, concentration range, percentage range, ratio range or integer range is to be understood to include the value of any integer within the recited range and, when appropriate, fractions thereof (such as one-tenth and one-hundredth of an integer), unless otherwise indicated.

[0962] Unless defined otherwise, all technical and scientific terms used herein have the same meaning as commonly understood by one of ordinary skill in the art to which this disclosure is related. For example, the Concise Dictionary of Biomedicine and Molecular Biology. Juo, Pei-Show. 2nd ed., 2002. CRC Press; The Dictionary of Cell and Molecular Biology. 5th ed., 2013. Academic Press; and the Oxford Dictionary Of Biochemistry And Molecular Biology. 2006. Oxford University Press, provide one of skill with a general dictionary of many of the terms used in this disclosure.

[0963] Units, prefixes, and symbols are denoted in their Système International de Unites (SI) accepted form. Numeric ranges are inclusive of the numbers defining the range. The headings provided herein are not limitations of the various aspects of the disclosure, which can be had by reference to the specification as a whole. Accordingly, the terms defined herein are more fully defined by reference to the specification in its entirety.

[0964] Various aspects are described in further detail in the following sections.

### Antigen Binding Polypeptides and Polypeptide Complexes-1

[0965] Provided herein are antigen binding polypeptides and antigen binding polypeptide complexes having certain structural features.

[0966] In some aspects, the antigen binding polypeptides provided herein comprise one or more immunoglobulin light chain variable regions (VL) and/or one or more immunoglobulin heavy chain variable regions (VH). In some aspects, the one or more VL (herein also referred to as, e.g., VL1, VL2, VL3, or VL4) specifically binds to a SARS-CoV-2 antigen. In some aspects, the one or more VL specifically binds to a SARS-CoV-2 protein (e.g., a SARS-CoV-2 spike protein). In some aspects, the one or more VH (herein also referred to as, e.g., VH1, VH2, VH3, or VH4) specifically binds to a SARS-CoV-2 antigen. In some aspects, the one or more VH specifically binds to a SARS-CoV-2 protein (e.g., a SARS-CoV-2 spike protein).

[0967] In some aspects, the antigen binding polypeptides provided herein comprise two VLs, each of the two VLs comprises a CDR1, a CDR2, and a CDR3 that are the same. In some aspects, each of the two VLs comprises a CDR1, a CDR2, and a CDR3 that are different between the two VLs.

[0968] In some aspects, the antigen binding polypeptides provided herein comprise more than two VLs. In some aspects, each of the more than two VLs comprises a CDR1, a CDR2, and a CDR3 that are the same. In some aspects, each of the more than two VLs comprises a CDR1, a CDR2, and a CDR3 that are different. In some aspects, some of the more than two VLs comprise a CDR1, a CDR2, and a CDR3 that are the same, and some of the more than two VLs comprise a CDR1, a CDR2, and a CDR3 that are different.

[0969] In some aspects, the antigen binding polypeptides provided herein comprise two VHs, each of the two VHs comprises a CDR1, a CDR2, and a CDR3 that are the same. In some aspects, each of the two VHs comprises a CDR1, a CDR2, and a CDR3 that are different between the two VHs.

[0970] In some aspects, the antigen binding polypeptides provided herein comprise more than two VHs. In some aspects, each of the more than two VHs comprises a CDR1, a CDR2, and a CDR3 that are the same. In some aspects, each of the more than two VHs comprises a CDR1, a CDR2, and a CDR3 that are different. In some aspects, some of the more than two VHs comprises a CDR1, a CDR2, and a CDR3 that are the same, and some of the more than two VHs comprises a CDR1, a CDR2, and a CDR3 that are different.

[0971] In some aspects, the antigen binding polypeptides provided herein comprise two VLs. In some aspects, the two VLs are the same. In some aspects, the two VLs are different.

[0972] In some aspects, the antigen binding polypeptides provided herein comprise more than two VLs. In some aspects, each of the more than two VLs is the same. In some aspects, each of the more than two VLs is different. In some aspects, some of the more than two VLs are the same, and some of the more than two VLs are different.

[0973] In some aspects, the antigen binding polypeptides provided herein comprise two VHs. In some aspects, the two VHs are the same. In some aspects, the two VHs are different.

[0974] In some aspects, the antigen binding polypeptides provided herein comprise more than two VHs. In some aspects, each of the more than two VHs is the same. In some aspects, each of the more than two VHs is different. In some aspects, some of the more than two VHs are the same, and some of the more than two VHs are different.

[0975] In some aspects, the antigen binding polypeptides provided herein comprise an immunoglobulin heavy chain constant region 1 (CH1). In some aspects, the antigen binding polypeptides provided herein comprise an immunoglobulin light chain constant region or domain (CL).

[0976] In some aspects, the antigen binding polypeptides provided herein comprise one or more optional amino acid linkers.

[0977] In some aspects, the antigen binding polypeptides provided herein have a structure, from amino-terminus to carboxy-terminus, represented by:
[0978] VL1-L1-CL-L2-VH1-L3-CH1;
[0979] VL1-L1-CH1-L2-VH1-L3-CL;
[0980] VH1-L1-CL-L2-VL1-L3-CH1; or
[0981] VH1-L1-CH1-L2-VL1-L3-CL;
[0982] wherein:
[0983] VL1 is an immunoglobulin light chain variable region that specifically binds to a severe acute respiratory syndrome coronavirus 2 (SARS-CoV-2) protein;
[0984] VH1 is an immunoglobulin heavy chain variable region that specifically binds to a SARS-CoV-2 protein;
[0985] CL is an immunoglobulin light chain constant region;
[0986] CH1 is an immunoglobulin heavy chain constant region 1; and
[0987] L1-L3 are optional amino acid linkers.

[0988] In any aspect shown herein as a structure from amino terminus to carboxy terminus, and with binding pairs selected from VL and/or VH or other structural regions such as CH1, CL, CH2, CH3, when shown without a specific linker such as L1, L2, etc., such linkers are optionally present in such structures between each designated subsequence VL, VH, etc.

[0989] In some aspects, the antigen binding polypeptides provided herein comprise a VL1 comprising (i) a complementarity determining region (CDR) 1 having an amino acid sequence that is at least 65%, at least 70%, at least 75%, at least 80%, at least 85%, at least 90%, at least 95%, at least 99%, or 100% identical to any one of SEQ ID NOs: 1, 9, 15, 23, 30, 41, 48, 55, 58, 65, 72, 79, 86, 93, 99, 105, 112, 119, 130, 138, 145, 152, 159, 166, 172, 179, 186, 192, 199, 205, 212, 219, 226, 232, 324, 627, 640, 650, 659, 676, 687, 695, 703, 712, 770, 778, 785, 794, 801, 807, 814, 827, 836, 849, 858, 865, and 878, 1045, 1050, 1055, 1060, and 1065; (ii) a CDR2 having an amino acid sequence that is at least 65%, at least 70%, at least 75%, at least 80%, at least 85%, at least 90%, at least 95%, at least 99%, or 100% identical to any one of SEQ ID NOs: 2, 31, 628, 641, 677, 1046, 1051, 1056, and 1061; or at least 65%, at least 70%, at least 75%, at least 80%, at least 85%, at least 90%, at least 95%, at least 99%, or 100% identical to any one of amino acid sequences AAS, GAS, LGS, GTN, GTN, SAS, SDS, DNT, EVT, DAS, DVT, RNS, DVS, EDS, DDS, KDS, VAS, WAS, YTS, EVS, NNN, SYN, and DAT; and (iii) a CDR3 having an amino acid sequence that is at least 65%, at least 70%, at least 75%, at least 80%, at least 85%, at least 90%, at least 95%, at least 99%, or 100% identical to any one of SEQ ID NOs: 3, 10, 16, 24, 32, 38, 42, 49, 59, 66, 73, 80, 87, 94, 100, 106, 113, 120, 126, 131, 139, 146, 153, 160, 167, 173, 180, 187, 193, 200, 206, 213, 220, 227, 233, 239, 242, 246, 249, 256, 283, 285, 287, 288, 290, 292, 294, 296, 301, 304, 306, 309, 311, 313, 316, 325, 326, 329, 642, 651, 660, 668, 678, 651, 696, 704, 713, 764, 766, 768, 771, 779, 786, 792, 795, 808, 815, 821, 830, 837, 843, 850, 856, 859, 866, 872, 879, 885, and 1066.

[0990] In some aspects, the antigen binding polypeptides provided herein comprise a VH1 comprising (i) a complementarity determining region (CDR) 1 having an amino acid sequence that is at least 65%, at least 70%, at least 75%, at least 80%, at least 85%, at least 90%, at least 95%, at least 99%, or 100% identical to any one of SEQ ID NOs: 5, 12, 18, 26, 34, 44, 51, 61, 68, 75, 82, 89, 96, 102, 108, 115, 122, 133, 141, 148, 155, 162, 175, 182, 189, 195, 202, 208, 215, 222, 229, 235, 318, 629, 645, 654, 663, 671, 682, 690, 699, 707, 716, 773, 781, 788, 797, 803, 810, 817, 823, 832, 839, 845, 852, 861, 868, 874, 881, 1047, 1052, 1057, 1062, and 1067; (ii) a CDR2 having an amino acid sequence that is at least 65%, at least 70%, at least 75%, at least 80%, at least 85%, at least 90%, at least 95%, at least 99%, or 100% identical to any one of SEQ ID NOs: 6, 19, 27, 35, 45, 52, 56, 62, 69, 76, 83, 90, 109, 116, 123, 134, 142, 149, 156, 163, 169, 176, 183, 196, 209, 216, 223, 236, 273, 319, 328, 630, 646, 655, 664, 672, 683, 691, 708, 776, 782, 789, 798, 804, 811, 818, 824, 833, 840, 846, 853, 862, 869, 875, 882, 1048, 1053, 1058, 1063, and 1068; and (iii) a CDR3 having an amino acid sequence that is at least 65%, at least 70%, at least 75%, at least 80%, at least 85%, at least 90%, at least 95%, at least 99%, or 100% identical to any one of SEQ ID NOs: 7, 13, 20, 28, 36, 40, 46, 53, 63, 70, 77, 84, 91, 97, 103, 110, 117, 124, 128, 135, 143, 150, 157, 164, 170, 177, 184, 190, 197, 203, 210, 217, 224, 230, 237, 241, 244, 248, 253, 257, 259, 261, 263, 265, 267, 269, 271, 274, 276, 278, 281, 297, 320, 322, 327, 330, 332, 631, 647, 656, 665, 673, 684, 692, 700, 709, 717, 765, 767, 769, 774, 783, 790, 793, 799, 805, 812, 819, 825, 834, 841, 847, 854, 857, 863, 870, 876, 883, 886, 1049, 1054, 1059, 1064, and 1069.

[0991] In some aspects, the antigen binding polypeptides provided herein comprise a VL1 comprising (i) a complementarity determining region (CDR) 1 having an amino acid sequence that is at least 65%, at least 70%, at least 75%, at least 80%, at least 85%, at least 90%, at least 95%, at least 99%, or 100% identical to any one of SEQ ID NOs: 1, 9, 15, 23, 30, 41, 48, 55, 58, 65, 72, 79, 86, 93, 99, 105, 112, 119, 130, 138, 145, 152, 159, 166, 172, 179, 186, 192, 199, 205, 212, 219, 226, 232, 324, 627, 640, 650, 659, 676, 687, 695, 703, 712, 770, 778, 785, 794, 801, 807, 814, 827, 836, 849, 858, 865, 878, 1045, 1050, 1055, 1060, and 1065; (ii) a CDR2 having an amino acid sequence that is at least 65%, at least 70%, at least 75%, at least 80%, at least 85%, at least 90%, at least 95%, at least 99%, or 100% identical to any one of SEQ ID NOs: 2, 31, 628, 641, 677, 1046, 1051, 1056, and 1061; or at least 65%, at least 70%, at least 75%, at least 80%, at least 85%, at least 90%, at least 95%, at least 99%, or 100% identical to any one of amino acid sequences AAS, GAS, LGS, GTN, GTN, SAS, SDS, DNT, EVT, DAS, DVT, RNS, DVS, EDS, DDS, KDS, VAS, WAS, YTS, EVS, NNN, SYN, and DAT; and (iii) a CDR3 having an amino acid sequence that is at least 65%, at least 70%, at least 75%, at least 80%, at least 85%, at least 90%, at least 95%, at least 99%, or 100% identical to any one of SEQ ID NOs: 3, 10, 16, 24, 32, 38, 42, 49, 59, 66, 73, 80, 87, 94, 100, 106, 113, 120, 126, 131, 139, 146, 153, 160, 167, 173, 180, 187, 193, 200, 206, 213, 220, 227, 233, 239, 242, 246, 249, 256, 283, 285, 287, 288, 290, 292, 294, 296, 301, 304, 306, 309, 311, 313, 316, 325, 326, 329, 642, 651, 660, 668, 678, 651, 696, 704, 713, 764, 766, 768, 771, 779, 786, 792, 795, 808, 815, 821, 830, 837, 843, 850, 856, 859, 866, 872, 879, 885, and 1066; and a VH1 comprising (iv) a complementarity determining region (CDR) 1 having an amino acid sequence that is at least 65%, at least 70%, at least 75%, at least 80%, at least 85%, at least 90%, at least 95%, at least 99%, or 100% identical to any one of SEQ ID NOs: 5, 12, 18, 26, 34, 44, 51, 61, 68, 75, 82, 89, 96, 102, 108, 115, 122, 133, 141, 148, 155, 162, 175, 182, 189, 195, 202, 208, 215, 222, 229, 235, 318, 629, 645, 654, 663, 671, 682, 690, 699, 707, 716, 773, 781, 788, 797, 803, 810, 817, 823, 832, 839, 845, 852, 861, 868, 874, 881, 1047, 1052, 1057, 1062, and 1067; (v) a CDR2 having an amino acid sequence that is at least 65%, at least 70%, at least 75%, at least 80%, at least 85%, at least 90%, at least 95%, at least 99%, or 100% identical to any one of SEQ ID NOs: 6, 19, 27, 35, 45, 52, 56, 62, 69, 76, 83, 90, 109, 116, 123, 134, 142, 149, 156, 163, 169, 176, 183, 196, 209, 216, 223, 236, 273, 319, 328, 630, 646, 655, 664, 672, 683, 691, 708, 776, 782, 789, 798, 804, 811, 818, 824, 833, 840, 846, 853, 862, 869, 875, 882, 1048, 1053, 1058, 1063, and 1068; and (vi) a CDR3 having an amino acid sequence that is at least 65%, at least 70%, at least 75%, at least 80%, at least 85%, at least 90%, at least 95%, at least 99%, or 100% identical to any one of SEQ ID NOs: 7, 13, 20, 28, 36, 40, 46, 53, 63, 70, 77, 84, 91, 97, 103, 110, 117, 124, 128, 135, 143, 150, 157, 164, 170, 177, 184, 190, 197, 203, 210, 217, 224, 230, 237, 241, 244, 248, 253, 257, 259, 261, 263, 265, 267, 269, 271, 274, 276, 278, 281, 297, 320, 322, 327, 330, 332, 631, 647, 656, 665, 673, 684, 692, 700, 709, 717, 765, 767, 769, 774, 783, 790, 793, 799, 805, 812, 819, 825, 834, 841, 847, 854, 857, 863, 870, 876, 883, 886, 1049, 1054, 1059, 1064, and 1069.

[0992] In some aspects, the antigen binding polypeptides provided herein comprise a VL1 comprising an amino acid sequence that is at least 65%, at least 70%, at least 75%, at least 80%, at least 85%, at least 90%, at least 95%, at least 99%, or 100% identical to any one of SEQ ID NOs: 4, 11, 17, 25, 33, 39, 43, 50, 60, 67, 74, 81, 88, 95, 101, 107, 114, 121, 127, 132, 140, 147, 154, 161, 168, 174, 181, 188, 194, 201, 207, 214, 221, 228, 234, 240, 243, 247, 250, 251, 252, 255, 284, 286, 289, 291, 293, 295, 299, 300, 302, 303, 305, 307, 308, 310, 312, 314, 315, 317, 323, 639, 649, 658, 667, 675, 686, 694, 702, 711, 772, 780, 787, 796, 802, 809, 816, 822, 831, 838, 844, 851, 860, 867, 873, 880, and 988.

[0993] In some aspects, the antigen binding polypeptides provided herein comprise a VH1 comprising an amino acid sequence that is at least 65%, at least 70%, at least 75%, at least 80%, at least 85%, at least 90%, at least 95%, at least 99%, or 100% identical to any one of SEQ ID NOs: 8, 14, 21, 22, 29, 37, 47, 54, 57, 64, 71, 78, 85, 92, 98, 104, 111, 118, 125, 129, 136, 137, 144, 151, 158, 165, 171, 178, 185, 191, 198, 204, 211, 218, 225, 231, 238, 245, 254, 258, 260, 262, 264, 266, 268, 270, 272, 275, 277, 279, 280, 282, 298, 321, 331, 626, 644, 653, 662, 670, 681, 689, 698, 706, 715, 775, 777, 784, 791, 800, 806, 813, 820, 826, 835, 842, 848, 855, 864, 871, 877, and 884.

[0994] In some aspects, the antigen binding polypeptides provided herein comprise (i) a VL1 comprising an amino acid sequence that is at least 65%, at least 70%, at least 75%, at least 80%, at least 85%, at least 90%, at least 95%, at least 99%, or 100% identical to any one of SEQ ID NOs: 4, 11, 17, 25, 33, 39, 43, 50, 60, 67, 74, 81, 88, 95, 101, 107, 114, 121, 127, 132, 140, 147, 154, 161, 168, 174, 181, 188, 194, 201, 207, 214, 221, 228, 234, 240, 243, 247, 250, 251, 252, 255, 284, 286, 289, 291, 293, 295, 299, 300, 302, 303, 305, 307, 308, 310, 312, 314, 315, 317, 323, 639, 649, 658, 667, 675, 686, 694, 702, 711, 772, 780, 787, 796, 802, 809, 816, 822, 831, 838, 844, 851, 860, 867, 873, 880, and 988; and (ii) a VH1 comprising an amino acid sequence that is at least 65%, at least 70%, at least 75%, at least 80%, at least 85%, at least 90%, at least 95%, at least 99%, or 100% identical to any one of SEQ ID NOs: 8, 14, 21, 22, 29, 37, 47, 54, 57, 64, 71, 78, 85, 92, 98, 104, 111, 118, 125, 129, 136, 137, 144, 151, 158, 165, 171, 178, 185, 191, 198, 204, 211, 218, 225, 231, 238, 245, 254, 258, 260, 262, 264, 266, 268, 270, 272, 275, 277, 279, 280, 282, 298, 321, 331, 626, 644, 653, 662, 670, 681, 689, 698, 706, 715, 775, 777, 784, 791, 800, 806, 813, 820, 826, 835, 842, 848, 855, 864, 871, 877, and 884.

[0995] In some aspects, the antigen binding polypeptides provided herein comprise a VL1 comprising a CDR1 having an amino acid sequence that is at least 65%, at least 70%, at least 75%, at least 80%, at least 85%, at least 90%, at least 95%, at least 99%, or 100% identical to SEQ ID NO: 9 or 1055, a CDR2 having an amino acid sequence at least 65%, at least 70%, at least 75%, at least 80%, at least 85%, at least 90%, at least 95%, at least 99%, or 100% identical to SEQ ID NO: 1056 or an amino acid sequence that is at least 65%, at least 70%, at least 75%, at least 80%, at least 85%, at least 90%, at least 95%, at least 99%, or 100% identical to amino acid sequence GAS, and a CDR3 having an amino acid sequence that is at least 65%, at least 70%, at least 75%, at least 80%, at least 85%, at least 90%, at least 95%, at least 99%, or 100% identical to SEQ ID NO: 10.

[0996] In some aspects, the antigen binding polypeptides provided herein comprise a VH1 comprising a CDR1 having an amino acid sequence that is at least 65%, at least 70%, at least 75%, at least 80%, at least 85%, at least 90%, at least 95%, at least 99%, or 100% identical to SEQ ID NO: 12 or 1057, a CDR2 having an amino acid sequence that is at least 65%, at least 70%, at least 75%, at least 80%, at least 85%, at least 90%, at least 95%, at least 99%, or 100% identical to SEQ ID NO: 6 or 1058, and a CDR3 having an amino acid sequence that is at least 65%, at least 70%, at least 75%, at least 80%, at least 85%, at least 90%, at least 95%, at least 99%, or 100% identical to SEQ ID NO: 13 or 1059.

[0997] In some aspects, the antigen binding polypeptides provided herein comprise (i) a VL1 comprising a CDR1 having an amino acid sequence that is at least 65%, at least 70%, at least 75%, at least 80%, at least 85%, at least 90%, at least 95%, at least 99%, or 100% identical to SEQ ID NO: 9 or 1055, a CDR2 having an amino acid sequence at least 65%, at least 70%, at least 75%, at least 80%, at least 85%, at least 90%, at least 95%, at least 99%, or 100% identical to SEQ ID NO: 1056 or an amino acid sequence that is at least 65%, at least 70%, at least 75%, at least 80%, at least 85%, at least 90%, at least 95%, at least 99%, or 100% identical to amino acid sequence GAS, and a CDR3 having an amino acid sequence that is at least 65%, at least 70%, at least 75%, at least 80%, at least 85%, at least 90%, at least 95%, at least 99%, or 100% identical to SEQ ID NO: 10; and (ii) a VH1 comprising a CDR1 having an amino acid sequence that is at least 65%, at least 70%, at least 75%, at least 80%, at least 85%, at least 90%, at least 95%, at least 99%, or 100% identical to SEQ ID NO: 12 or 1057, a CDR2 having an amino acid sequence that is at least 65%, at least 70%, at least 75%, at least 80%, at least 85%, at least 90%, at least 95%, at least 99%, or 100% identical to SEQ ID NO: 6 or 1058, and a CDR3 having an amino acid sequence that is at least 65%, at least 70%, at least 75%, at least 80%, at least 85%, at least 90%, at least 95%, at least 99%, or 100% identical to SEQ ID NO: 13 or 1059.

[0998] In some aspects, the antigen binding polypeptides provided herein comprise a VL1 comprising an amino acid sequence that is at least 65%, at least 70%, at least 75%, at least 80%, at least 85%, at least 90%, at least 95%, at least 99%, or 100% identical to SEQ ID NO: 11.

[0999] In some aspects, the antigen binding polypeptides provided herein comprise a VH1 comprising an amino acid sequence that is at least 65%, at least 70%, at least 75%, at least 80%, at least 85%, at least 90%, at least 95%, at least 99%, or 100% identical to SEQ ID NO: 14.

[1000] In some aspects, the antigen binding polypeptides provided herein comprise (i) a VL1 comprising an amino acid sequence that is at least 65%, at least 70%, at least 75%, at least 80%, at least 85%, at least 90%, at least 95%, at least 99%, or 100% identical to SEQ ID NO: 11, and (ii) a VH1 comprising an amino acid sequence that is at least 65%, at least 70%, at least 75%, at least 80%, at least 85%, at least 90%, at least 95%, at least 99%, or 100% identical to SEQ ID NO: 14.

[1001] In some aspects, the antigen binding polypeptides provided herein comprise a VL1 comprising (i) a complementarity determining region (CDR) 1 having an amino acid sequence that is at least 65%, at least 70%, at least 75%, at least 80%, at least 85%, at least 90%, at least 95%, at least 99%, or 100% identical to SEQ ID NO: 145 or 1050; (ii) a CDR2 having an amino acid sequence at least 65%, at least 70%, at least 75%, at least 80%, at least 85%, at least 90%, at least 95%, at least 99%, or 100% identical to SEQ ID NO: 1051 or an amino acid sequence that is at least 65%, at least 70%, at least 75%, at least 80%, at least 85%, at least 90%, at least 95%, at least 99%, or 100% identical to amino acid sequence AAS; and (iii) a CDR3 having an amino acid sequence that is at least 65%, at least 70%, at least 75%, at least 80%, at least 85%, at least 90%, at least 95%, at least 99%, or 100% identical to SEQ ID NO: 146 or 764.

[1002] In some aspects, the antigen binding polypeptides provided herein comprise a VH1 comprising (i) a complementarity determining region (CDR) 1 having an amino acid sequence that is at least 65%, at least 70%, at least 75%, at least 80%, at least 85%, at least 90%, at least 95%, at least 99%, or 100% identical to SEQ ID NO: 148 or 1052; (ii) a CDR2 having an amino acid sequence that is at least 65%, at least 70%, at least 75%, at least 80%, at least 85%, at least 90%, at least 95%, at least 99%, or 100% identical to SEQ ID NO: 149 or 1053; and (iii) a CDR3 having an amino acid sequence that is at least 65%, at least 70%, at least 75%, at least 80%, at least 85%, at least 90%, at least 95%, at least 99%, or 100% identical to SEQ ID NO: 150, 765, or 1054.

[1003] In some aspects, the antigen binding polypeptides provided herein comprise a VL1 comprising (i) a complementarity determining region (CDR) 1 having an amino acid sequence that is at least 65%, at least 70%, at least 75%, at least 80%, at least 85%, at least 90%, at least 95%, at least 99%, or 100% identical to SEQ ID NO: 145 or 1050; (ii) a CDR2 having an amino acid sequence at least 65%, at least 70%, at least 75%, at least 80%, at least 85%, at least 90%, at least 95%, at least 99%, or 100% identical to SEQ ID NO: 1051 or an amino acid sequence that is at least 65%, at least 70%, at least 75%, at least 80%, at least 85%, at least 90%, at least 95%, at least 99%, or 100% identical to amino acid sequence AAS; and (iii) a CDR3 having an amino acid sequence that is at least 65%, at least 70%, at least 75%, at least 80%, at least 85%, at least 90%, at least 95%, at least 99%, or 100% identical to SEQ ID NO: 146 or 764; and a VH1 comprising (iv) a complementarity determining region (CDR) 1 having an amino acid sequence that is at least 65%, at least 70%, at least 75%, at least 80%, at least 85%, at least 90%, at least 95%, at least 99%, or 100% identical to SEQ ID NO: 148 or 1052; (v) a CDR2 having an amino acid sequence that is at least 65%, at least 70%, at least 75%, at least 80%, at least 85%, at least 90%, at least 95%, at least 99%, or 100% identical to SEQ ID NO: 149 or 1053; and (vi) a CDR3 having an amino acid sequence that is at least 65%, at least 70%, at least 75%, at least 80%, at least 85%, at least 90%, at least 95%, at least 99%, or 100% identical to SEQ ID NO: 150, 765, or 1054.

[1004] In some aspects, the antigen binding polypeptides provided herein comprise a VL1 comprising an amino acid sequence that is at least 65%, at least 70%, at least 75%, at least 80%, at least 85%, at least 90%, at least 95%, at least 99%, or 100% identical to SEQ ID NO: 147.

[1005] In some aspects, the antigen binding polypeptides provided herein comprise a VH1 comprising an amino acid sequence that is at least 65%, at least 70%, at least 75%, at least 80%, at least 85%, at least 90%, at least 95%, at least 99%, or 100% identical to SEQ ID NO: 151.

[1006] In some aspects, the antigen binding polypeptides provided herein comprise (i) a VL1 comprising an amino acid sequence that is at least 65%, at least 70%, at least 75%, at least 80%, at least 85%, at least 90%, at least 95%, at least 99%, or 100% identical to SEQ ID NO: 147, and (ii) a VH1 comprising an amino acid sequence that is at least 65%, at least 70%, at least 75%, at least 80%, at least 85%, at least 90%, at least 95%, at least 99%, or 100% identical to SEQ ID NO: 151.

[1007] In some aspects, the antigen binding polypeptides disclosed herein, comprise one or more CL region, as indicated in the formulas representing the antigen binding polypeptides disclosed herein. In some aspects, the CL comprises an amino acid sequence at least 65%, at least 70%, at least 75%, at least 80%, at least 85%, at least 90%, at least 95%, at least 99%, or 100% identical to any one of SEQ ID NOs: 374, 637, or 1092-1095.

[1008] In some aspects, the antigen binding polypeptides disclosed herein, comprise one or more CH1 region, as indicated in the formulas representing the antigen binding polypeptides disclosed herein. In some aspects, the CH1 comprises an amino acid sequence at least 65%, at least 70%, at least 75%, at least 80%, at least 85%, at least 90%, at least 95%, at least 99%, or 100% identical to any one of SEQ ID NOs: 375, 634, 1070, 1071, or 1086-1091.

[1009] In some aspects, the antigen binding polypeptides provided herein further comprise an Fc region. In some aspects, the antigen binding polypeptides provided herein further comprise an Fc region at the carboxy-terminus. In some aspects, the Fc region comprises an immunoglobulin heavy chain constant region 2 (CH2) and/or an immunoglobulin heavy chain constant region 3 (CH3). In some aspects, the Fc region further comprises an immunoglobulin hinge (i.e., a hinge region). In some aspects, the hinge region comprises an amino acid sequence at least 65%, at least 70%, at least 75%, at least 80%, at least 85%, at least 90%, at least 95%, at least 99%, or 100% identical to any one of SEQ ID NOs: 635, 636, 1072, 1073, or 1074. In some aspects, the Fc region comprises a CH2 and a CH3. In some aspects, the CH2 comprises an amino acid sequence that is at least 65%, at least 70%, at least 75%, at least 80%, at least 85%, at least 90%, at least 95%, at least 99%, or 100% identical to any one of SEQ ID NOs: 1075-1078. In some aspects, the CH3 comprises an amino acid sequence that is at least 65%, at least 70%, at least 75%, at least 80%, at least 85%, at least 90%, at least 95%, at least 99%, or 100% identical to any one of SEQ ID NOs: 1079-1085. In some aspects, the Fc region comprises an amino acid sequence that is at least 65%, at least 70%, at least 75%, at least 80%, at least 85%, at least 90%, at least 95%, at least 99%, or 100% identical to any one of SEQ ID NOs: 376-380.

[1010] In some aspects, the Fc region comprises one or more amino acid substitutions. In some aspects, the one or more amino acid substitutions comprise one or more half-life extension amino acid substitutions. In some aspects, the one or more half-life extension amino acid substitutions comprise one or more of amino acid substitutions M428L, N434A, N434S, L234F, L235E, P331S, M252Y, S254T, and T256E, or equivalent thereof, based on the EU numbering scheme. In some aspects, the one or more half-life extension amino acid substitutions comprise a LA (M428L and N434A, or equivalent thereof, based on the EU numbering scheme) amino acid substitution. In some aspects, the one or more half-life extension amino acid substitutions comprise a LS (M428L and N434S, or equivalent thereof, based on the EU numbering scheme) amino acid substitution. In some aspects, the one or more half-life extension amino acid substitutions comprise L234F and L235E, or equivalent thereof (based on the EU numbering scheme) amino acid substitutions. In some aspects, the one or more half-life extension amino acid substitutions comprise a TM (L234F, L235E, and P331S, or equivalent thereof, based on the EU numbering scheme) amino acid substitution. In some aspects, the one or more half-life extension amino acid substitutions comprise a YTE (M252Y, S254T, and T256E, or equivalent thereof, based on the EU numbering scheme) amino acid substitution.

[1011] In some aspects, the Fc region comprises at least one knob-into-hole modification. In some aspects, the antigen binding polypeptides disclosed herein are comprised in IgG1 or IgG4 antibodies or antigen binding fragments thereof. In some aspects, the knob-into-hole modification comprises one or more of knob substitutions of S354C and T366W, or equivalent thereof, and/or one or more of hole substitutions of Y349C, T366S, L368A, Y407V, or equivalent thereof, or a combination thereof, based on the EU numbering scheme. In some aspects, the Fc region comprises a knob-into-hole modification comprising knob substitutions of S354C and T366W, or equivalent thereof, and/or hole substitutions of Y349C, T366S, L368A and Y407V, or equivalent thereof, and/or a half-life extension amino acid substitution comprising: a LA (M428L and N434A, or equivalent thereof, based on the EU numbering scheme) amino acid substitution, a LS (M428L and N434S, or equivalent thereof, based on the EU numbering scheme) amino acid substitution. L234F and L235E, or equivalent thereof (based on the EU numbering scheme) amino acid substitutions, a TM (L234F, L235E, and P331S, or equivalent thereof, based on the EU numbering scheme) amino acid substitution, a YTE (M252Y, S254T, and T256E, or equivalent thereof, based on the EU numbering scheme) amino acid substitution, or any combination thereof.

[1012] In some aspects, the Fc region comprises knob substitutions of S354C and T366W, or equivalent thereof, and a half-life extension amino acid substitution comprising: a LA (M428L and N434A, or equivalent thereof, based on the EU numbering scheme) amino acid substitution, a LS (M428L and N434S, or equivalent thereof, based on the EU numbering scheme) amino acid substitution. L234F and L235E, or equivalent thereof (based on the EU numbering scheme) amino acid substitutions, a TM (L234F, L235E, and P331S, or equivalent thereof, based on the EU numbering scheme) amino acid substitution, a YTE (M252Y, S254T, and T256E, or equivalent thereof, based on the EU numbering scheme) amino acid substitution, or any combination thereof.

[1013] In some aspects, the Fc region comprises hole substitutions of Y349C, T366S, L368A and Y407V, or equivalent thereof, and a half-life extension amino acid substitution comprising: a LA (M428L and N434A, or equivalent thereof, based on the EU numbering scheme) amino acid substitution, a LS (M428L and N434S, or equivalent thereof, based on the EU numbering scheme) amino acid substitution. L234F and L235E, or equivalent thereof (based on the EU numbering scheme) amino acid substitutions, a TM (L234F, L235E, and P331S, or equivalent thereof, based on the EU numbering scheme) amino acid substitution, a YTE (M252Y, S254T, and T256E, or equivalent thereof, based on the EU numbering scheme) amino acid substitution, or any combination thereof.

[1014] In some aspects, the antigen binding polypeptides disclosed herein comprise one or more Fc effector function knockout mutation. In some aspects, the antigen binding polypeptides disclosed herein are comprised in IgG1 or IgG4 antibodies or antigen binding fragments thereof. In some aspects, the Fc effector function knockout mutation is L234A, L235A, P239A, or equivalent thereof, or a combination thereof, based on the EU numbering scheme.

[1015] In some aspects, the antigen binding polypeptides disclosed herein comprise a mutation at a glycosylation site. In some aspects, the mutation at a glycosylation site is a mutation at an N-glycosylation site. In some aspects, the antigen binding polypeptides comprise a VH comprising a mutation at a glycosylation site. In some aspects, the mutation at a glycosylation site is a mutation at an N-glycosylation site. In some aspects, the mutation at an N-glycosylation site is at amino acid N62 of the VH region or equivalent thereof. In some aspects, the mutation at an N-glycosylation site at amino acid N62 is N62Q or N62S, or equivalent thereof.

[1016] In some aspects, the antigen binding polypeptides disclosed herein, comprise one or more optional amino acid linkers. The one or more optional amino acid linkers are indicated herein as Ln, wherein n is an integer, and the integer next to each L indicates each L comprised in the antigen binding polypeptides disclosed herein. For example, if an antigen binding polypeptide disclosed herein comprises two linkers, the first linker from N-terminus to C-terminus is herein indicated as L1, and the second linker from N-terminus to C-terminus is herein indicated as L2. In some aspects, any one of the optional linkers each independently have a length of from 0 amino acids to about 50 amino acids. In some aspects, any one of the optional linkers each independently have a length of from 5 amino acids to about 40 amino acids.

[1017] In some aspects, any one of the optional linkers are non-immunogenic. In some aspects, any one of the optional linkers do not contain a consensus T cell epitope.

[1018] In some aspects, any of Ln comprises an amino acid sequence of G or A, or an amino acid sequence at least 65%, at least 70%, at least 75%, at least 80%, at least 85%, at least 90%, at least 95%, at least 99%, or 100% identical to amino acid sequence GSS or ASG, or an amino acid sequence at least 65%, at least 70%, at least 75%, at least 80%, at least 85%, at least 90%, at least 95%, at least 99%, or 100% identical to any one of SEQ ID NOs: 333-373 or 967-971. In some aspects, Ln comprises an amino acid sequence at least 65%, at least 70%, at least 75%, at least 80%, at least 85%, at least 90%, at least 95%, at least 99%, or 100% identical to any one of SEQ ID NOs: 333-345 or 967-971.

[1019] In some aspects, the antigen binding polypeptides provided herein have a structure, from amino-terminus to carboxy-terminus, represented by:
[1020] VL1-L1-CL-L2-VL2-L3-VH2-L4-VH1-L5-CH1;
[1021] VL1-L1-CL-L2-VH2-L3-VL2-L4-VH1-L5-CH1;
[1022] VL1-L1-CH1-L2-VL2-L3-VH2-L4-VH1-L5-CL;
[1023] VL1-L1-CH1-L2-VH2-L3-VL2-L4-VH1-L5-CL;
[1024] VH1-L1-CL-L2-VL2-L3-VH2-L4-VL1-L5-CH1;
[1025] VH1-L1-CL-L2-VH2-L3-VL2-L4-VL1-L5-CH1;
[1026] VH1-L1-CH1-L2-VL2-L3-VH2-L4-VL1-L5-CL;
[1027] VH1-L1-CH1-L2-VH2-L3-VL2-L4-VL1-L5-CL;
[1028] VL2-L1-CL-L2-VL1-L3-VH1-L4-VH2-L5-CH1;
[1029] VL2-L1-CL-L2-VH1-L3-VL1-L4-VH2-L5-CH1;
[1030] VL2-L1-CH1-L2-VL1-L3-VH1-L4-VH2-L5-CL;
[1031] VL2-L1-CH1-L2-VH1-L3-VL1-L4-VH2-L5-CL;
[1032] VH2-L1-CL-L2-VL1-L3-VH1-L4-VL2-L5-CH1;
[1033] VH2-L1-CL-L2-VH1-L3-VL1-L4-VL2-L5-CH1;
[1034] VH2-L1-CH1-L2-VL1-L3-VH1-L4-VL2-L5-CL; or
[1035] VH2-L1-CH1-L2-VH1-L3-VL1-L4-VL2-L5-CL;
[1036] wherein:
[1037] VL1 is a first immunoglobulin light chain variable region that specifically binds to a severe acute respiratory syndrome coronavirus 2 (SARS-CoV-2) protein;
[1038] VL2 is a second immunoglobulin light chain variable region that specifically binds to a SARS-CoV-2 protein;
[1039] VH1 is a first immunoglobulin heavy chain variable region that specifically binds to a SARS-CoV-2 protein;
[1040] VH2 is a second immunoglobulin heavy chain variable region that specifically binds to a SARS-CoV-2 protein;
[1041] CL is an immunoglobulin light chain constant region;
[1042] CH1 is an immunoglobulin heavy chain constant region 1; and
[1043] L1-L5 are optional amino acid linkers.

[1044] In some aspects, the antigen binding polypeptides provided herein have a structure, from amino-terminus to carboxy-terminus, represented by:
[1045] VL1-CL-L1-VL2-L2-VH2-L3-VH1-CH1;
[1046] VL1-CL-L1-VH2-L2-VL2-L3-VH1-CH1;
[1047] VL1-CH1-L1-VL2-L2-VH2-L3-VH1-CL;
[1048] VL1-CH1-L1-VH2-L2-VL2-L3-VH1-CL;
[1049] VH1-CL-L1-VL2-L2-VH2-L3-VL1-CH1;
[1050] VH1-CL-L1-VH2-L2-VL2-L3-VL1-CH1;
[1051] VH1-CH1-L1-VL2-L2-VH2-L3-VL1-CL;
[1052] VH1-CH1-L1-VH2-L2-VL2-L3-VL1-CL;
[1053] VL2-CL-L1-VL1-L2-VH1-L3-VH2-CH1;
[1054] VL2-CL-L1-VH1-L2-VL1-L3-VH2-CH1;
[1055] VL2-CH1-L1-VL1-L2-VH1-L3-VH2-CL;
[1056] VL2-CH1-L1-VH1-L2-VL1-L3-VH2-CL;
[1057] VH2-CL-L1-VL1-L2-VH1-L3-VL2-CH1;
[1058] VH2-CL-L1-VH1-L2-VL1-L3-VL2-CH1;
[1059] VH2-CH1-L1-VL1-L2-VH1-L3-VL2-CL; or
[1060] VH2-CH1-L1-VH1-L2-VL1-L3-VL2-CL;
[1061] wherein:
[1062] VL1 is a first immunoglobulin light chain variable region that specifically binds to a severe acute respiratory syndrome coronavirus 2 (SARS-CoV-2) protein;
[1063] VL2 is a second immunoglobulin light chain variable region that specifically binds to a SARS-CoV-2 protein;
[1064] VH1 is a first immunoglobulin heavy chain variable region that specifically binds to a SARS-CoV-2 protein;
[1065] VH2 is a second immunoglobulin heavy chain variable region that specifically binds to a SARS-CoV-2 protein;
[1066] CL is an immunoglobulin light chain constant region;
[1067] CH1 is an immunoglobulin heavy chain constant region 1; and
[1068] L1-L3 are amino acid linkers.

[1069] In any aspect shown herein as a structure from amino terminus to carboxy terminus, and with binding pairs selected from VL and/or VH or other structural regions such as CH1, CL, CH2, CH3, when shown without a specific linker such as L1, L2, etc., such linkers are optionally present in such structures between each designated subsequence VL, VH, etc.

[1070] In some aspects, the antigen binding polypeptides provided herein comprise a VL1 comprising (i) a complementarity determining region (CDR) 1 having an amino acid sequence that is at least 65%, at least 70%, at least 75%, at least 80%, at least 85%, at least 90%, at least 95%, at least 99%, or 100% identical to any one of SEQ ID NOs: 1, 9, 15, 23, 30, 41, 48, 55, 58, 65, 72, 79, 86, 93, 99, 105, 112, 119, 130, 138, 145, 152, 159, 166, 172, 179, 186, 192, 199, 205, 212, 219, 226, 232, 324, 627, 640, 650, 659, 676, 687, 695, 703, 712, 770, 778, 785, 794, 801, 807, 814, 827, 836, 849, 858, 865, 878, 1045, 1050, 1055, 1060, and 1065; (ii) a CDR2 having an amino acid sequence that is at least 65%, at least 70%, at least 75%, at least 80%, at least 85%, at least 90%, at least 95%, at least 99%, or 100% identical to any one of SEQ ID NOs: 2, 31, 628, 641, 677, 1046, 1051, 1056, and 1061; or at least 65%, at least 70%, at least 75%, at least 80%, at least 85%, at least 90%, at least 95%, at least 99%, or 100% identical to any one of amino acid sequences AAS, GAS, LGS, GTN, GTN, SAS, SDS, DNT, EVT, DAS, DVT, RNS, DVS, EDS, DDS, KDS, VAS, WAS, YTS, EVS, NNN, SYN, and DAT; and (iii) a CDR3 having an amino acid sequence that is at least 65%, at least 70%, at least 75%, at least 80%, at least 85%, at least 90%, at least 95%, at least 99%, or 100% identical to any one of SEQ ID NOs: 3, 10, 16, 24, 32, 38, 42, 49, 59, 66, 73, 80, 87, 94, 100, 106, 113, 120, 126, 131, 139, 146, 153, 160, 167, 173, 180, 187, 193, 200, 206, 213, 220, 227, 233, 239, 242, 246, 249, 256, 283, 285, 287, 288, 290, 292, 294, 296, 301, 304, 306, 309, 311, 313, 316, 325, 326, 329, 642, 651, 660, 668, 678, 651, 696, 704, 713, 764, 766, 768, 771, 779, 786, 792, 795, 808, 815, 821, 830, 837, 843, 850, 856, 859, 866, 872, 879, 885, and 1066.

[1071] In some aspects, the antigen binding polypeptides provided herein comprise a VL2 comprising (i) a complementarity determining region (CDR) 1 having an amino acid sequence that is at least 65%, at least 70%, at least 75%, at least 80%, at least 85%, at least 90%, at least 95%, at least 99%, or 100% identical to any one of SEQ ID NOs: 1, 9, 15, 23, 30, 41, 48, 55, 58, 65, 72, 79, 86, 93, 99, 105, 112, 119, 130, 138, 145, 152, 159, 166, 172, 179, 186, 192, 199, 205, 212, 219, 226, 232, 324, 627, 640, 650, 659, 676, 687, 695, 703, 712, 770, 778, 785, 794, 801, 807, 814, 827, 836, 849, 858, 865, 878, 1045, 1050, 1055, 1060, and 1065; (ii) a CDR2 having an amino acid sequence that is at least 65%, at least 70%, at least 75%, at least 80%, at least 85%, at least 90%, at least 95%, at least 99%, or 100% identical to any one of SEQ ID NOs: 2, 31, 628, 641, 677, 1046, 1051, 1056, and 1061; or at least 65%, at least 70%, at least 75%, at least 80%, at least 85%, at least 90%, at least 95%, at least 99%, or 100% identical to any one of amino acid sequences AAS, GAS, LGS, GTN, GTN, SAS, SDS, DNT, EVT, DAS, DVT, RNS, DVS, EDS, DDS, KDS, VAS, WAS, YTS, EVS, NNN, SYN, and DAT; and (iii) a CDR3 having an amino acid sequence that is at least 65%, at least 70%, at least 75%, at least 80%, at least 85%, at least 90%, at least 95%, at least 99%, or 100% identical to any one of SEQ ID NOs: 3, 10, 16, 24, 32, 38, 42, 49, 59, 66, 73, 80, 87, 94, 100, 106, 113, 120, 126, 131, 139, 146, 153, 160, 167, 173, 180, 187, 193, 200, 206, 213, 220, 227, 233, 239, 242, 246, 249, 256, 283, 285, 287, 288, 290, 292, 294, 296, 301, 304, 306, 309, 311, 313, 316, 325, 326, 329, 642, 651, 660, 668, 678, 651, 696, 704, 713, 764, 766, 768, 771, 779, 786, 792, 795, 808, 815, 821, 830, 837, 843, 850, 856, 859, 866, 872, 879, 885, and 1066.

[1072] In some aspects, the antigen binding polypeptides provided herein comprise a VH1 comprising (i) a CDR1 having an amino acid sequence that is at least 65%, at least 70%, at least 75%, at least 80%, at least 85%, at least 90%, at least 95%, at least 99%, or 100% identical to any one of SEQ ID NOs: 5, 12, 18, 26, 34, 44, 51, 61, 68, 75, 82, 89, 96, 102, 108, 115, 122, 133, 141, 148, 155, 162, 175, 182, 189, 195, 202, 208, 215, 222, 229, 235, 318, 629, 645, 654, 663, 671, 682, 690, 699, 707, 716, 773, 781, 788, 797, 803, 810, 817, 823, 832, 839, 845, 852, 861, 868, 874, 881, 1047, 1052, 1057, 1062, and 1067; (ii) a CDR2 having an amino acid sequence that is at least 65%, at least 70%, at least 75%, at least 80%, at least 85%, at least 90%, at least 95%, at least 99%, or 100% identical to any one of SEQ ID NOs: 6, 19, 27, 35, 45, 52, 56, 62, 69, 76, 83, 90, 109, 116, 123, 134, 142, 149, 156, 163, 169, 176, 183, 196, 209, 216, 223, 236, 273, 319, 328, 630, 646, 655, 664, 672, 683, 691, 708, 776, 782, 789, 798, 804, 811, 818, 824, 833, 840, 846, 853, 862, 869, 875.882, 1048, 1053, 1058, 1063, and 1068; and (iii) a CDR3 having an amino acid sequence that is at least 65%, at least 70%, at least 75%, at least 80%, at least 85%, at least 90%, at least 95%, at least 99%, or 100% identical to any one of SEQ ID NOs: 7, 13, 20, 28, 36, 40, 46, 53, 63, 70, 77, 84, 91, 97, 103, 110, 117, 124, 128, 135, 143, 150, 157, 164, 170, 177, 184, 190, 197, 203, 210, 217, 224, 230, 237, 241, 244, 248, 253, 257, 259, 261, 263, 265, 267, 269, 271, 274, 276, 278, 281, 297, 320, 322, 327, 330, 332, 631, 647, 656, 665, 673, 684, 692, 700, 709, 717, 765, 767, 769, 774, 783, 790, 793, 799, 805, 812, 819, 825, 834, 841, 847, 854, 857, 863, 870, 876, 883, 886, 1049, 1054, 1059, 1064, and 1069.

[1073] In some aspects, the antigen binding polypeptides provided herein comprise a VH2 comprising (i) a CDR1 having an amino acid sequence that is at least 65%, at least 70%, at least 75%, at least 80%, at least 85%, at least 90%, at least 95%, at least 99%, or 100% identical to any one of SEQ ID NOs: 5, 12, 18, 26, 34, 44, 51, 61, 68, 75, 82, 89, 96, 102, 108, 115, 122, 133, 141, 148, 155, 162, 175, 182, 189, 195, 202, 208, 215, 222, 229, 235, 318, 629, 645, 654, 663, 671, 682, 690, 699, 707, 716, 773, 781, 788, 797, 803, 810, 817, 823, 832, 839, 845, 852, 861, 868, 874, 881, 1047, 1052, 1057, 1062, and 1067; (ii) a CDR2 having an amino acid sequence that is at least 65%, at least 70%, at least 75%, at least 80%, at least 85%, at least 90%, at least 95%, at least 99%, or 100% identical to any one of SEQ ID NOs: 6, 19, 27, 35, 45, 52, 56, 62, 69, 76, 83, 90, 109, 116, 123, 134, 142, 149, 156, 163, 169, 176, 183, 196, 209, 216, 223, 236, 273, 319, 328, 630, 646, 655, 664, 672, 683, 691, 708, 776, 782, 789, 798, 804, 811, 818, 824, 833, 840, 846, 853, 862, 869, 875, 882, 1048, 1053, 1058, 1063, and 1068; and (iii) a CDR3 having an amino acid sequence that is at least 65%, at least 70%, at least 75%, at least 80%, at least 85%, at least 90%, at least 95%, at least 99%, or 100% identical to any one of SEQ ID NOs: 7, 13, 20, 28, 36, 40, 46, 53, 63, 70, 77, 84, 91, 97, 103, 110, 117, 124, 128, 135, 143, 150, 157, 164, 170, 177, 184, 190, 197, 203, 210, 217, 224, 230, 237, 241, 244, 248, 253, 257, 259, 261, 263, 265, 267, 269, 271, 274, 276, 278, 281, 297, 320, 322, 327, 330, 332, 631, 647, 656, 665, 673, 684, 692, 700, 709, 717, 765, 767, 769, 774, 783, 790, 793, 799, 805, 812, 819, 825, 834, 841, 847, 854, 857, 863, 870, 876, 883, 886, 1049, 1054, 1059, 1064, and 1069.

[1074] In some aspects, the antigen binding polypeptides provided herein comprise a VL1 comprising (i) a complementarity determining region (CDR) 1 having an amino acid sequence that is at least 65%, at least 70%, at least 75%, at least 80%, at least 85%, at least 90%, at least 95%, at least 99%, or 100% identical to any one of SEQ ID NOs: 1, 9, 15, 23, 30, 41, 48, 55, 58, 65, 72, 79, 86, 93, 99, 105, 112, 119, 130, 138, 145, 152, 159, 166, 172, 179, 186, 192, 199, 205, 212, 219, 226, 232, 324, 627, 640, 650, 659, 676, 687, 695, 703, 712, 770, 778, 785, 794, 801, 807, 814, 827, 836, 849, 858, 865, 878, 1045, 1050, 1055, 1060, and 1065; (ii) a CDR2 having an amino acid sequence that is at least 65%, at least 70%, at least 75%, at least 80%, at least 85%, at least 90%, at least 95%, at least 99%, or 100% identical to any one of SEQ ID NOs: 2, 31, 628, 641, 677, 1046, 1051, 1056, and 1061; or at least 65%, at least 70%, at least 75%, at least 80%, at least 85%, at least 90%, at least 95%, at least 99%, or 100% identical to any one of amino acid sequences AAS, GAS, LGS, GTN, GTN, SAS, SDS, DNT, EVT, DAS, DVT, RNS, DVS, EDS, DDS, KDS, VAS, WAS, YTS, EVS, NNN, SYN, and DAT; (iii) a CDR3 having an amino acid sequence that is at least 65%, at least 70%, at least 75%, at least 80%, at least 85%, at least 90%, at least 95%, at least 99%, or 100% identical to any one of SEQ ID NOs: 3, 10, 16, 24, 32, 38, 42, 49, 59, 66, 73, 80, 87, 94, 100, 106, 113, 120, 126, 131, 139, 146, 153, 160, 167, 173, 180, 187, 193, 200, 206, 213, 220, 227, 233, 239, 242, 246, 249, 256, 283, 285, 287, 288, 290, 292, 294, 296, 301, 304, 306, 309, 311, 313, 316, 325, 326, 329, 642, 651, 660, 668, 678, 651, 696, 704, 713, 764, 766, 768, 771, 779, 786, 792, 795, 808, 815, 821, 830, 837, 843, 850, 856, 859, 866, 872, 879, 885, and 1066; a VH1 comprising (i) a CDR1 having an amino acid sequence that is at least 65%, at least 70%, at least 75%, at least 80%, at least 85%, at least 90%, at least 95%, at least 99%, or 100% identical to any one of SEQ ID NOs: 5, 12, 18, 26, 34, 44, 51, 61, 68, 75, 82, 89, 96, 102, 108, 115, 122, 133, 141, 148, 155, 162, 175, 182, 189, 195, 202, 208, 215, 222, 229, 235, 318, 629, 645, 654, 663, 671, 682, 690, 699, 707, 716, 773, 781, 788, 797, 803, 810, 817, 823, 832, 839, 845, 852, 861, 868, 874, 881, 1047, 1052, 1057, 1062, and 1067; (ii) a CDR2 having an amino acid sequence that is at least 65%, at least 70%, at least 75%, at least 80%, at least 85%, at least 90%, at least 95%, at least 99%, or 100% identical to any one of SEQ ID NOs: 6, 19, 27, 35, 45, 52, 56, 62, 69, 76, 83, 90, 109, 116, 123, 134, 142, 149, 156, 163, 169, 176, 183, 196, 209, 216, 223, 236, 273, 319, 328, 630, 646, 655, 664, 672, 683, 691, 708, 776, 782, 789, 798, 804, 811, 818, 824, 833, 840, 846, 853, 862, 869, 875, 882, 1048, 1053, 1058, 1063, and 1068; and (iii) a CDR3 having an amino acid sequence that is at least 65%, at least 70%, at least 75%, at least 80%, at least 85%, at least 90%, at least 95%, at least 99%, or 100% identical to any one of SEQ ID NOs: 7, 13, 20, 28, 36, 40, 46, 53, 63, 70, 77, 84, 91, 97, 103, 110, 117, 124, 128, 135, 143, 150, 157, 164, 170, 177, 184, 190, 197, 203, 210, 217, 224, 230, 237, 241, 244, 248, 253, 257, 259, 261, 263, 265, 267, 269, 271, 274, 276, 278, 281, 297, 320, 322, 327, 330, 332, 631, 647, 656, 665, 673, 684, 692, 700, 709, 717, 765, 767, 769, 774, 783, 790, 793, 799, 805, 812, 819, 825, 834, 841, 847, 854, 857, 863, 870, 876, 883, 886, 1049, 1054, 1059, 1064, and 1069; a VL2 comprising (i) a complementarity determining region (CDR) 1 having an amino acid sequence that is at least 65%, at least 70%, at least 75%, at least 80%, at least 85%, at least 90%, at least 95%, at least 99%, or 100% identical to any one of SEQ ID NOs: 1, 9, 15, 23, 30, 41, 48, 55, 58, 65, 72, 79, 86, 93, 99, 105, 112, 119, 130, 138, 145, 152, 159, 166, 172, 179, 186, 192, 199, 205, 212, 219, 226, 232, 324, 627, 640, 650, 659, 676, 687, 695, 703, 712, 770, 778, 785, 794, 801, 807, 814, 827, 836, 849, 858, 865, 878, 1045, 1050, 1055, 1060, and 1065; (ii) a CDR2 having an amino acid sequence that is at least 65%, at least 70%, at least 75%, at least 80%, at least 85%, at least 90%, at least 95%, at least 99%, or 100% identical to any one of SEQ ID NOs: 2, 31, 628, 641, 677, 1046, 1051, 1056, and 1061; or at least 65%, at least 70%, at least 75%, at least 80%, at least 85%, at least 90%, at least 95%, at least 99%, or 100% identical to any one of amino acid sequences AAS, GAS, LGS, GTN, GTN, SAS, SDS, DNT, EVT, DAS, DVT, RNS, DVS, EDS, DDS, KDS, VAS, WAS, YTS, EVS, NNN, SYN, and DAT; and (iii) a CDR3 having an amino acid sequence that is at least 65%, at least 70%, at least 75%, at least 80%, at least 85%, at least 90%, at least 95%, at least 99%, or 100% identical to any one of SEQ ID NOs: 3, 10, 16, 24, 32, 38, 42, 49, 59, 66, 73, 80, 87, 94, 100, 106, 113, 120, 126, 131, 139, 146, 153, 160, 167, 173, 180, 187, 193, 200, 206, 213, 220, 227, 233, 239, 242, 246, 249, 256, 283, 285, 287, 288, 290, 292, 294, 296, 301, 304, 306, 309, 311, 313, 316, 325, 326, 329, 642, 651, 660, 668, 678, 651, 696, 704, 713, 764, 766, 768, 771, 779, 786, 792, 795, 808, 815, 821, 830, 837, 843, 850, 856, 859, 866, 872, 879, 885, and 1066; and a VH2 comprising (i) a CDR1 having an amino acid sequence that is at least 65%, at least 70%, at least 75%, at least 80%, at least 85%, at least 90%, at least 95%, at least 99%, or 100% identical to any one of SEQ ID NOs: 5, 12, 18, 26, 34, 44, 51, 61, 68, 75, 82, 89, 96, 102, 108, 115, 122, 133, 141, 148, 155, 162, 175, 182, 189, 195, 202, 208, 215, 222, 229, 235, 318, 629, 645, 654, 663, 671, 682, 690, 699, 707, 716, 773, 781, 788, 797, 803, 810, 817, 823, 832, 839, 845, 852, 861, 868, 874, 881, 1047, 1052, 1057, 1062, and 1067; (ii) a CDR2 having an amino acid sequence that is at least 65%, at least 70%, at least 75%, at least 80%, at least 85%, at least 90%, at least 95%, at least 99%, or 100% identical to any one of SEQ ID NOs: 6, 19, 27, 35, 45, 52, 56, 62, 69, 76, 83, 90, 109, 116, 123, 134, 142, 149, 156, 163, 169, 176, 183, 196, 209, 216, 223, 236, 273, 319, 328, 630, 646, 655, 664, 672, 683, 691, 708, 776, 782, 789, 798, 804, 811, 818, 824, 833, 840, 846, 853, 862, 869, 875, 882, 1048, 1053, 1058, 1063, and 1068; and (iii) a CDR3 having an amino acid sequence that is at least 65%, at least 70%, at least 75%, at least 80%, at least 85%, at least 90%, at least 95%, at least 99%, or 100% identical to any one of SEQ ID NOs: 7, 13, 20, 28, 36, 40, 46, 53, 63, 70, 77, 84, 91, 97, 103, 110, 117, 124, 128, 135, 143, 150, 157, 164, 170, 177, 184, 190, 197, 203, 210, 217, 224, 230, 237, 241, 244, 248, 253, 257, 259, 261, 263, 265, 267, 269, 271, 274, 276, 278, 281, 297, 320, 322, 327, 330, 332, 631, 647, 656, 665, 673, 684, 692, 700, 709, 717, 765, 767, 769, 774, 783, 790, 793, 799, 805, 812, 819, 825, 834, 841, 847, 854, 857, 863, 870, 876, 883, 886, 1049, 1054, 1059, 1064, and 1069.

[1075] In some aspects, the antigen binding polypeptides provided herein comprise a VL1 comprising an amino acid sequence that is at least 65%, at least 70%, at least 75%, at least 80%, at least 85%, at least 90%, at least 95%, at least 99%, or 100% identical to any one of SEQ ID NOs: 4, 11, 17, 25, 33, 39, 43, 50, 60, 67, 74, 81, 88, 95, 101, 107, 114, 121, 127, 132, 140, 147, 154, 161, 168, 174, 181, 188, 194, 201, 207, 214, 221, 228, 234, 240, 243, 247, 250, 251, 252, 255, 284, 286, 289, 291, 293, 295, 299, 300, 302, 303, 305, 307, 308, 310, 312, 314, 315, 317, 323, 639, 649, 658, 667, 675, 686, 694, 702, 711, 772, 780, 787, 796, 802, 809, 816, 822, 831, 838, 844, 851, 860, 867, 873, 880, and 988.

[1076] In some aspects, the antigen binding polypeptides provided herein comprise a VH1 comprising an amino acid sequence that is at least 65%, at least 70%, at least 75%, at least 80%, at least 85%, at least 90%, at least 95%, at least 99%, or 100% identical to any one of SEQ ID NOs: 8, 14, 21, 22, 29, 37, 47, 54, 57, 64, 71, 78, 85, 92, 98, 104, 111, 118, 125, 129, 136, 137, 144, 151, 158, 165, 171, 178, 185, 191, 198, 204, 211, 218, 225, 231, 238, 245, 254, 258, 260, 262, 264, 266, 268, 270, 272, 275, 277, 279, 280, 282, 298, 321, 331, 626, 644, 653, 662, 670, 681, 689, 698, 706, 715, 775, 777, 784, 791, 800, 806, 813, 820, 826, 835, 842, 848, 855, 864, 871, 877, and 884.

[1077] In some aspects, the antigen binding polypeptides provided herein comprise a VL2 comprising an amino acid sequence that is at least 65%, at least 70%, at least 75%, at least 80%, at least 85%, at least 90%, at least 95%, at least 99%, or 100% identical to any one of SEQ ID NOs: 4, 11, 17, 25, 33, 39, 43, 50, 60, 67, 74, 81, 88, 95, 101, 107, 114, 121, 127, 132, 140, 147, 154, 161, 168, 174, 181, 188, 194, 201, 207, 214, 221, 228, 234, 240, 243, 247, 250, 251, 252, 255, 284, 286, 289, 291, 293, 295, 299, 300, 302, 303, 305, 307, 308, 310, 312, 314, 315, 317, 323, 639, 649, 658, 667, 675, 686, 694, 702, 711, 772, 780, 787, 796, 802, 809, 816, 822, 831, 838, 844, 851, 860, 867, 873, 880, and 988.

[1078] In some aspects, the antigen binding polypeptides provided herein comprise a VH2 comprising an amino acid sequence that is at least 65%, at least 70%, at least 75%, at least 80%, at least 85%, at least 90%, at least 95%, at least 99%, or 100% identical to any one of SEQ ID NOs: 8, 14, 21, 22, 29, 37, 47, 54, 57, 64, 71, 78, 85, 92, 98, 104, 111, 118, 125, 129, 136, 137, 144, 151, 158, 165, 171, 178, 185, 191, 198, 204, 211, 218, 225, 231, 238, 245, 254, 258, 260, 262, 264, 266, 268, 270, 272, 275, 277, 279, 280, 282, 298, 321, 331, 626, 644, 653, 662, 670, 681, 689, 698, 706, 715, 775, 777, 784, 791, 800, 806, 813, 820, 826, 835, 842, 848, 855, 864, 871, 877, and 884.

[1079] In some aspects, the antigen binding polypeptides provided herein comprise (i) a VL1 comprising an amino acid sequence that is at least 65%, at least 70%, at least 75%, at least 80%, at least 85%, at least 90%, at least 95%, at least 99%, or 100% identical to any one of SEQ ID NOs: 4, 11, 17, 25, 33, 39, 43, 50, 60, 67, 74, 81, 88, 95, 101, 107, 114, 121, 127, 132, 140, 147, 154, 161, 168, 174, 181, 188, 194, 201, 207, 214, 221, 228, 234, 240, 243, 247, 250, 251, 252, 255, 284, 286, 289, 291, 293, 295, 299, 300, 302, 303, 305, 307, 308, 310, 312, 314, 315, 317, 323, 639, 649, 658, 667, 675, 686, 694, 702, 711, 772, 780, 787, 796, 802, 809, 816, 822, 831, 838, 844, 851, 860, 867, 873, 880, and 988; (ii) a VH1 comprising an amino acid sequence that is at least 65%, at least 70%, at least 75%, at least 80%, at least 85%, at least 90%, at least 95%, at least 99%, or 100% identical to any one of SEQ ID NOs: 8, 14, 21, 22, 29, 37, 47, 54, 57, 64, 71, 78, 85, 92, 98, 104, 111, 118, 125, 129, 136, 137, 144, 151, 158, 165, 171, 178, 185, 191, 198, 204, 211, 218, 225, 231, 238, 245, 254, 258, 260, 262, 264, 266, 268, 270, 272, 275, 277, 279, 280, 282, 298, 321, 331, 626, 644, 653, 662, 670, 681, 689, 698, 706, 715, 775, 777, 784, 791, 800, 806, 813, 820, 826, 835, 842, 848, 855, 864, 871, 877, and 884; (iii) a VL2 comprising an amino acid sequence that is at least 65%, at least 70%, at least 75%, at least 80%, at least 85%, at least 90%, at least 95%, at least 99%, or 100% identical to any one of SEQ ID NOs: 4, 11, 17, 25, 33, 39, 43, 50, 60, 67, 74, 81, 88, 95, 101, 107, 114, 121, 127, 132, 140, 147, 154, 161, 168, 174, 181, 188, 194, 201, 207, 214, 221, 228, 234, 240, 243, 247, 250, 251, 252, 255, 284, 286, 289, 291, 293, 295, 299, 300, 302, 303, 305, 307, 308, 310, 312, 314, 315, 317, 323, 639, 649, 658, 667, 675, 686, 694, 702, 711, 772, 780, 787, 796, 802, 809, 816, 822, 831, 838, 844, 851, 860, 867, 873, 880, and 988; and (iv) a VH2 comprising an amino acid sequence that is at least 65%, at least 70%, at least 75%, at least 80%, at least 85%, at least 90%, at least 95%, at least 99%, or 100% identical to any one of SEQ ID NOs: 8, 14, 21, 22, 29, 37, 47, 54, 57, 64, 71, 78, 85, 92, 98, 104, 111, 118, 125, 129, 136, 137, 144, 151, 158, 165, 171, 178, 185, 191, 198, 204, 211, 218, 225, 231, 238, 245, 254, 258, 260, 262, 264, 266, 268, 270, 272, 275, 277, 279, 280, 282, 298, 321, 331, 626, 644, 653, 662, 670, 681, 689, 698, 706, 715, 775, 777, 784, 791, 800, 806, 813, 820, 826, 835, 842, 848, 855, 864, 871, 877, and 884.

[1080] In some aspects, the antigen binding polypeptides provided herein comprise a VL1 comprising a CDR1 having an amino acid sequence at least 65%, at least 70%, at least 75%, at least 80%, at least 85%, at least 90%, at least 95%, at least 99%, or 100% identical to SEQ ID NO: 15, a CDR2 having an amino acid sequence at least 65%, at least 70%, at least 75%, at least 80%, at least 85%, at least 90%, at least 95%, at least 99%, or 100% identical to amino acid sequence LGS, and a CDR3 having an amino acid sequence at least 65%, at least 70%, at least 75%, at least 80%, at least 85%, at least 90%, at least 95%, at least 99%, or 100% identical to SEQ ID NO: 16.

[1081] In some aspects, the antigen binding polypeptides provided herein comprise a VL2 comprising a CDR1 having an amino acid sequence at least 65%, at least 70%, at least 75%, at least 80%, at least 85%, at least 90%, at least 95%, at least 99%, or 100% identical to SEQ ID NO: 23, a CDR2 having an amino acid sequence at least 65%, at least 70%, at least 75%, at least 80%, at least 85%, at least 90%, at least 95%, at least 99%, or 100% identical to amino acid sequence GTN, and a CDR3 having an amino acid sequence at least 65%, at least 70%, at least 75%, at least 80%, at least 85%, at least 90%, at least 95%, at least 99%, or 100% identical to SEQ ID NO: 24 or 325.

[1082] In some aspects, the antigen binding polypeptides provided herein comprise a VH1 comprising a CDR1 having an amino acid sequence at least 65%, at least 70%, at least 75%, at least 80%, at least 85%, at least 90%, at least 95%, at least 99%, or 100% identical to SEQ ID NO: 18, a CDR2 having an amino acid sequence at least 65%, at least 70%, at least 75%, at least 80%, at least 85%, at least 90%, at least 95%, at least 99%, or 100% identical to SEQ ID NO: 19, and a CDR3 having an amino acid sequence at least 65%, at least 70%, at least 75%, at least 80%, at least 85%, at least 90%, at least 95%, at least 99%, or 100% identical to SEQ ID NO: 20.

[1083] In some aspects, the antigen binding polypeptides provided herein comprise a VH2 comprising a CDR1 having an amino acid sequence at least 65%, at least 70%, at least 75%, at least 80%, at least 85%, at least 90%, at least 95%, at least 99%, or 100% identical to SEQ ID NO: 26, a CDR2 having an amino acid sequence at least 65%, at least 70%, at least 75%, at least 80%, at least 85%, at least 90%, at least 95%, at least 99%, or 100% identical to SEQ ID NO: 27, and a CDR3 having an amino acid sequence at least 65%, at least 70%, at least 75%, at least 80%, at least 85%, at least 90%, at least 95%, at least 99%, or 100% identical to SEQ ID NO: 28 or 332.

[1084] In some aspects, the antigen binding polypeptides provided herein comprise (i) a VL1 comprising a CDR1 having an amino acid sequence at least 65%, at least 70%, at least 75%, at least 80%, at least 85%, at least 90%, at least 95%, at least 99%, or 100% identical to SEQ ID NO: 15, a CDR2 having an amino acid sequence at least 65%, at least 70%, at least 75%, at least 80%, at least 85%, at least 90%, at least 95%, at least 99%, or 100% identical to amino acid sequence LGS, and a CDR3 having an amino acid sequence at least 65%, at least 70%, at least 75%, at least 80%, at least 85%, at least 90%, at least 95%, at least 99%, or 100% identical to SEQ ID NO: 16; (ii) a VL2 comprising a CDR1 having an amino acid sequence at least 65%, at least 70%, at least 75%, at least 80%, at least 85%, at least 90%, at least 95%, at least 99%, or 100% identical to SEQ ID NO: 23, a CDR2 having an amino acid sequence at least 65%, at least 70%, at least 75%, at least 80%, at least 85%, at least 90%, at least 95%, at least 99%, or 100% identical to amino acid sequence GTN, and a CDR3 having an amino acid sequence at least 65%, at least 70%, at least 75%, at least 80%, at least 85%, at least 90%, at least 95%, at least 99%, or 100% identical to SEQ ID NO: 24 or 325; (iii) a VH1 comprising a CDR1 having an amino acid sequence at least 65%, at least 70%, at least 75%, at least 80%, at least 85%, at least 90%, at least 95%, at least 99%, or 100% identical to SEQ ID NO: 18, a CDR2 having an amino acid sequence at least 65%, at least 70%, at least 75%, at least 80%, at least 85%, at least 90%, at least 95%, at least 99%, or 100% identical to SEQ ID NO: 19, and a CDR3 having an amino acid sequence at least 65%, at least 70%, at least 75%, at least 80%, at least 85%, at least 90%, at least 95%, at least 99%, or 100% identical to SEQ ID NO: 20; and (iv) a VH2 comprising a CDR1 having an amino acid sequence at least 65%, at least 70%, at least 75%, at least 80%, at least 85%, at least 90%, at least 95%, at least 99%, or 100% identical to SEQ ID NO: 26, a CDR2 having an amino acid sequence at least 65%, at least 70%, at least 75%, at least 80%, at least 85%, at least 90%, at least 95%, at least 99%, or 100% identical to SEQ ID NO: 27, and a CDR3 having an amino acid sequence at least 65%, at least 70%, at least 75%, at least 80%, at least 85%, at least 90%, at least 95%, at least 99%, or 100% identical to SEQ ID NO: 28 or 332.

[1085] In some aspects, the antigen binding polypeptides provided herein comprise a VL1 comprising an amino acid sequence that is at least 65%, at least 70%, at least 75%, at least 80%, at least 85%, at least 90%, at least 95%, at least 99%, or 100% identical to SEQ ID NO: 17.

[1086] In some aspects, the antigen binding polypeptides provided herein comprise a VL2 comprising an amino acid sequence that is at least 65%, at least 70%, at least 75%, at least 80%, at least 85%, at least 90%, at least 95%, at least 99%, or 100% identical to SEQ ID NO: 25.

[1087] In some aspects, the antigen binding polypeptides provided herein comprise a VH1 comprising an amino acid sequence that is at least 65%, at least 70%, at least 75%, at least 80%, at least 85%, at least 90%, at least 95%, at least 99%, or 100% identical to SEQ ID NO: 21 or 22.

[1088] In some aspects, the antigen binding polypeptides provided herein comprise a VH2 comprising an amino acid sequence that is at least 65%, at least 70%, at least 75%, at least 80%, at least 85%, at least 90%, at least 95%, at least 99%, or 100% identical to SEQ ID NO: 29.

[1089] In some aspects, the antigen binding polypeptides provided herein comprise (i) a VL1 comprising an amino acid sequence that is at least 65%, at least 70%, at least 75%, at least 80%, at least 85%, at least 90%, at least 95%, at least 99%, or 100% identical to SEQ ID NO: 17; (ii) a VL2 comprising an amino acid sequence that is at least 65%, at least 70%, at least 75%, at least 80%, at least 85%, at least 90%, at least 95%, at least 99%, or 100% identical to SEQ ID NO: 25; (iii) a VH1 comprising an amino acid sequence that is at least 65%, at least 70%, at least 75%, at least 80%, at least 85%, at least 90%, at least 95%, at least 99%, or 100% identical to SEQ ID NO: 21 or 22; and (iv) a VH2 comprising an amino acid sequence that is at least 65%, at least 70%, at least 75%, at least 80%, at least 85%, at least 90%, at least 95%, at least 99%, or 100% identical to SEQ ID NO: 29.

[1090] In some aspects, the antigen binding polypeptides provided herein comprise a VL1 comprising a CDR1 having an amino acid sequence at least 65%, at least 70%, at least 75%, at least 80%, at least 85%, at least 90%, at least 95%, at least 99%, or 100% identical to SEQ ID NO: 15, a CDR2 having an amino acid sequence at least 65%, at least 70%, at least 75%, at least 80%, at least 85%, at least 90%, at least 95%, at least 99%, or 100% identical to amino acid sequence LGS, and a CDR3 having an amino acid sequence at least 65%, at least 70%, at least 75%, at least 80%, at least 85%, at least 90%, at least 95%, at least 99%, or 100% identical to SEQ ID NO: 16.

[1091] In some aspects, the antigen binding polypeptides provided herein comprise a VL2 comprising a CDR1 having an amino acid sequence at least 65%, at least 70%, at least 75%, at least 80%, at least 85%, at least 90%, at least 95%, at least 99%, or 100% identical to SEQ ID NO: 9 or 1055, a CDR2 having an amino acid sequence at least 65%, at least 70%, at least 75%, at least 80%, at least 85%, at least 90%, at least 95%, at least 99%, or 100% identical to SEQ ID NO: 1056 or an amino acid sequence at least 65%, at least 70%, at least 75%, at least 80%, at least 85%, at least 90%, at least 95%, at least 99%, or 100% identical to amino acid sequence GAS, and a CDR3 having an amino acid sequence at least 65%, at least 70%, at least 75%, at least 80%, at least 85%, at least 90%, at least 95%, at least 99%, or 100% identical to SEQ ID NO: 10.

[1092] In some aspects, the antigen binding polypeptides provided herein comprise a VH1 comprising a CDR1 having an amino acid sequence at least 65%, at least 70%, at least 75%, at least 80%, at least 85%, at least 90%, at least 95%, at least 99%, or 100% identical to SEQ ID NO: 18, a CDR2 having an amino acid sequence at least 65%, at least 70%, at least 75%, at least 80%, at least 85%, at least 90%, at least 95%, at least 99%, or 100% identical to SEQ ID NO: 19, and a CDR3 having an amino acid sequence at least 65%, at least 70%, at least 75%, at least 80%, at least 85%, at least 90%, at least 95%, at least 99%, or 100% identical to SEQ ID NO: 20.

[1093] In some aspects, the antigen binding polypeptides provided herein comprise a VH2 comprising a CDR1 having an amino acid sequence at least 65%, at least 70%, at least 75%, at least 80%, at least 85%, at least 90%, at least 95%, at least 99%, or 100% identical to SEQ ID NO: 12 or 1057, a CDR2 having an amino acid sequence at least 65%, at least 70%, at least 75%, at least 80%, at least 85%, at least 90%, at least 95%, at least 99%, or 100% identical to SEQ ID NO: 6 or 1058, and a CDR3 having an amino acid sequence at least 65%, at least 70%, at least 75%, at least 80%, at least 85%, at least 90%, at least 95%, at least 99%, or 100% identical to SEQ ID NO: 13 or 1059.

[1094] In some aspects, the antigen binding polypeptides provided herein comprise (i) a VL1 comprising a CDR1 having an amino acid sequence at least 65%, at least 70%, at least 75%, at least 80%, at least 85%, at least 90%, at least 95%, at least 99%, or 100% identical to SEQ ID NO: 15, a CDR2 having an amino acid sequence at least 65%, at least 70%, at least 75%, at least 80%, at least 85%, at least 90%, at least 95%, at least 99%, or 100% identical to amino acid sequence LGS, and a CDR3 having an amino acid sequence at least 65%, at least 70%, at least 75%, at least 80%, at least 85%, at least 90%, at least 95%, at least 99%, or 100% identical to SEQ ID NO: 16; (ii) a VL2 comprising a CDR1 having an amino acid sequence at least 65%, at least 70%, at least 75%, at least 80%, at least 85%, at least 90%, at least 95%, at least 99%, or 100% identical to SEQ ID NO: 9 or 1055, a CDR2 having an amino acid sequence at least 65%, at least 70%, at least 75%, at least 80%, at least 85%, at least 90%, at least 95%, at least 99%, or 100% identical to SEQ ID NO: 1056 or an amino acid sequence at least 65%, at least 70%, at least 75%, at least 80%, at least 85%, at least 90%, at least 95%, at least 99%, or 100% identical to amino acid sequence GAS, and a CDR3 having an amino acid sequence at least 65%, at least 70%, at least 75%, at least 80%, at least 85%, at least 90%, at least 95%, at least 99%, or 100% identical to SEQ ID NO: 10; (iii) a VH1 comprising a CDR1 having an amino acid sequence at least 65%, at least 70%, at least 75%, at least 80%, at least 85%, at least 90%, at least 95%, at least 99%, or 100% identical to SEQ ID NO: 18, a CDR2 having an amino acid sequence at least 65%, at least 70%, at least 75%, at least 80%, at least 85%, at least 90%, at least 95%, at least 99%, or 100% identical to SEQ ID NO: 19, and a CDR3 having an amino acid sequence at least 65%, at least 70%, at least 75%, at least 80%, at least 85%, at least 90%, at least 95%, at least 99%, or 100% identical to SEQ ID NO: 20; and (iv) a VH2 comprising a CDR1 having an amino acid sequence at least 65%, at least 70%, at least 75%, at least 80%, at least 85%, at least 90%, at least 95%, at least 99%, or 100% identical to SEQ ID NO: 12 or 1057, a CDR2 having an amino acid sequence at least 65%, at least 70%, at least 75%, at least 80%, at least 85%, at least 90%, at least 95%, at least 99%, or 100% identical to SEQ ID NO: 6 or 1058, and a CDR3 having an amino acid sequence at least 65%, at least 70%, at least 75%, at least 80%, at least 85%, at least 90%, at least 95%, at least 99%, or 100% identical to SEQ ID NO: 13 or 1059.

[1095] In some aspects, the antigen binding polypeptides provided herein comprise a VL1 comprising an amino acid sequence that is at least 65%, at least 70%, at least 75%, at least 80%, at least 85%, at least 90%, at least 95%, at least 99%, or 100% identical to SEQ ID NO: 17.

[1096] In some aspects, the antigen binding polypeptides provided herein comprise a VL2 comprising an amino acid sequence that is at least 65%, at least 70%, at least 75%, at least 80%, at least 85%, at least 90%, at least 95%, at least 99%, or 100% identical to SEQ ID NO: 11.

[1097] In some aspects, the antigen binding polypeptides provided herein comprise a VH1 comprising an amino acid sequence that is at least 65%, at least 70%, at least 75%, at least 80%, at least 85%, at least 90%, at least 95%, at least 99%, or 100% identical to SEQ ID NO: 21 or 22.

[1098] In some aspects, the antigen binding polypeptides provided herein comprise a VH2 comprising an amino acid sequence that is at least 65%, at least 70%, at least 75%, at least 80%, at least 85%, at least 90%, at least 95%, at least 99%, or 100% identical to SEQ ID NO: 14.

[1099] In some aspects, the antigen binding polypeptides provided herein comprise (i) a VL1 comprising an amino acid sequence that is at least 65%, at least 70%, at least 75%, at least 80%, at least 85%, at least 90%, at least 95%, at least 99%, or 100% identical to SEQ ID NO: 17; (ii) a VL2 comprising an amino acid sequence that is at least 65%, at least 70%, at least 75%, at least 80%, at least 85%, at least 90%, at least 95%, at least 99%, or 100% identical to SEQ ID NO: 11; (iii) a VH1 comprising an amino acid sequence that is at least 65%, at least 70%, at least 75%, at least 80%, at least 85%, at least 90%, at least 95%, at least 99%, or 100% identical to SEQ ID NO: 21 or 22; and (iv) a VH2 comprising an amino acid sequence that is at least 65%, at least 70%, at least 75%, at least 80%, at least 85%, at least 90%, at least 95%, at least 99%, or 100% identical to SEQ ID NO: 14.

[1100] In some aspects, the antigen binding polypeptides provided herein comprise a VL1 comprising a CDR1 having an amino acid sequence at least 65%, at least 70%, at least 75%, at least 80%, at least 85%, at least 90%, at least 95%, at least 99%, or 100% identical to SEQ ID NO: 23, a CDR2 having an amino acid sequence at least 65%, at least 70%, at least 75%, at least 80%, at least 85%, at least 90%, at least 95%, at least 99%, or 100% identical to amino acid sequence GTN, and a CDR3 having an amino acid sequence at least 65%, at least 70%, at least 75%, at least 80%, at least 85%, at least 90%, at least 95%, at least 99%, or 100% identical to SEQ ID NO: 24 or 325.

[1101] In some aspects, the antigen binding polypeptides provided herein comprise a VL2 comprising a CDR1 having an amino acid sequence at least 65%, at least 70%, at least 75%, at least 80%, at least 85%, at least 90%, at least 95%, at least 99%, or 100% identical to SEQ ID NO: 9 or 1055, a CDR2 having an amino acid sequence at least 65%, at least 70%, at least 75%, at least 80%, at least 85%, at least 90%, at least 95%, at least 99%, or 100% identical to SEQ ID NO: 1056 or an amino acid sequence at least 65%, at least 70%, at least 75%, at least 80%, at least 85%, at least 90%, at least 95%, at least 99%, or 100% identical to amino acid sequence GAS, and a CDR3 having an amino acid sequence at least 65%, at least 70%, at least 75%, at least 80%, at least 85%, at least 90%, at least 95%, at least 99%, or 100% identical to SEQ ID NO: 10.

[1102] In some aspects, the antigen binding polypeptides provided herein comprise a VH1 comprising a CDR1 having an amino acid sequence at least 65%, at least 70%, at least 75%, at least 80%, at least 85%, at least 90%, at least 95%, at least 99%, or 100% identical to SEQ ID NO: 26, a CDR2 having an amino acid sequence at least 65%, at least 70%, at least 75%, at least 80%, at least 85%, at least 90%, at least 95%, at least 99%, or 100% identical to SEQ ID NO: 27, and a CDR3 having an amino acid sequence at least 65%, at least 70%, at least 75%, at least 80%, at least 85%, at least 90%, at least 95%, at least 99%, or 100% identical to SEQ ID NO: 28 or 332.

[1103] In some aspects, the antigen binding polypeptides provided herein comprise a VH2 comprising a CDR1 having an amino acid sequence at least 65%, at least 70%, at least 75%, at least 80%, at least 85%, at least 90%, at least 95%, at least 99%, or 100% identical to SEQ ID NO: 12 or 1057, a CDR2 having an amino acid sequence at least 65%, at least 70%, at least 75%, at least 80%, at least 85%, at least 90%, at least 95%, at least 99%, or 100% identical to SEQ ID NO: 6 or 1058, and a CDR3 having an amino acid sequence at least 65%, at least 70%, at least 75%, at least 80%, at least 85%, at least 90%, at least 95%, at least 99%, or 100% identical to SEQ ID NO: 13 or 1059.

[1104] In some aspects, the antigen binding polypeptides provided herein comprise (i) a VL1 comprising a CDR1 having an amino acid sequence at least 65%, at least 70%, at least 75%, at least 80%, at least 85%, at least 90%, at least 95%, at least 99%, or 100% identical to SEQ ID NO: 23, a CDR2 having an amino acid sequence at least 65%, at least 70%, at least 75%, at least 80%, at least 85%, at least 90%, at least 95%, at least 99%, or 100% identical to amino acid sequence GTN, and a CDR3 having an amino acid sequence at least 65%, at least 70%, at least 75%, at least 80%, at least 85%, at least 90%, at least 95%, at least 99%, or 100% identical to SEQ ID NO: 24 or 325; (ii) a VL2 comprising a CDR1 having an amino acid sequence at least 65%, at least 70%, at least 75%, at least 80%, at least 85%, at least 90%, at least 95%, at least 99%, or 100% identical to SEQ ID NO: 9 or 1055, a CDR2 having an amino acid sequence at least 65%, at least 70%, at least 75%, at least 80%, at least 85%, at least 90%, at least 95%, at least 99%, or 100% identical to SEQ ID NO: 1056 or an amino acid sequence at least 65%, at least 70%, at least 75%, at least 80%, at least 85%, at least 90%, at least 95%, at least 99%, or 100% identical to amino acid sequence GAS, and a CDR3 having an amino acid sequence at least 65%, at least 70%, at least 75%, at least 80%, at least 85%, at least 90%, at least 95%, at least 99%, or 100% identical to SEQ ID NO: 10; (iii) a VH1 comprising a CDR1 having an amino acid sequence at least 65%, at least 70%, at least 75%, at least 80%, at least 85%, at least 90%, at least 95%, at least 99%, or 100% identical to SEQ ID NO: 26, a CDR2 having an amino acid sequence at least 65%, at least 70%, at least 75%, at least 80%, at least 85%, at least 90%, at least 95%, at least 99%, or 100% identical to SEQ ID NO: 27, and a CDR3 having an amino acid sequence at least 65%, at least 70%, at least 75%, at least 80%, at least 85%, at least 90%, at least 95%, at least 99%, or 100% identical to SEQ ID NO: 28 or 332; and (iv) a VH2 comprising a CDR1 having an amino acid sequence at least 65%, at least 70%, at least 75%, at least 80%, at least 85%, at least 90%, at least 95%, at least 99%, or 100% identical to SEQ ID NO: 12 or 1057, a CDR2 having an amino acid sequence at least 65%, at least 70%, at least 75%, at least 80%, at least 85%, at least 90%, at least 95%, at least 99%, or 100% identical to SEQ ID NO: 6 or 1058, and a CDR3 having an amino acid sequence at least 65%, at least 70%, at least 75%, at least 80%, at least 85%, at least 90%, at least 95%, at least 99%, or 100% identical to SEQ ID NO: 13 or 1059.

[1105] In some aspects, the antigen binding polypeptides provided herein comprise a VL1 comprising an amino acid sequence that is at least 65%, at least 70%, at least 75%, at least 80%, at least 85%, at least 90%, at least 95%, at least 99%, or 100% identical to SEQ ID NO: 25.

[1106] In some aspects, the antigen binding polypeptides provided herein comprise a VL2 comprising an amino acid sequence that is at least 65%, at least 70%, at least 75%, at least 80%, at least 85%, at least 90%, at least 95%, at least 99%, or 100% identical to SEQ ID NO: 11.

[1107] In some aspects, the antigen binding polypeptides provided herein comprise a VH1 comprising an amino acid sequence that is at least 65%, at least 70%, at least 75%, at least 80%, at least 85%, at least 90%, at least 95%, at least 99%, or 100% identical to SEQ ID NO: 29.

[1108] In some aspects, the antigen binding polypeptides provided herein comprise a VH2 comprising an amino acid sequence that is at least 65%, at least 70%, at least 75%, at least 80%, at least 85%, at least 90%, at least 95%, at least 99%, or 100% identical to SEQ ID NO: 14.

[1109] In some aspects, the antigen binding polypeptides provided herein comprise (i) a VL1 comprising an amino acid sequence that is at least 65%, at least 70%, at least 75%, at least 80%, at least 85%, at least 90%, at least 95%, at least 99%, or 100% identical to SEQ ID NO: 25; (ii) a VL2 comprising an amino acid sequence that is at least 65%, at least 70%, at least 75%, at least 80%, at least 85%, at least 90%, at least 95%, at least 99%, or 100% identical to SEQ ID NO: 11; (iii) a VH1 comprising an amino acid sequence that is at least 65%, at least 70%, at least 75%, at least 80%, at least 85%, at least 90%, at least 95%, at least 99%, or 100% identical to SEQ ID NO: 29; and (iv) a VH2 comprising an amino acid sequence that is at least 65%, at least 70%, at least 75%, at least 80%, at least 85%, at least 90%, at least 95%, at least 99%, or 100% identical to SEQ ID NO: 14.

[1110] In some aspects, the antigen binding polypeptides provided herein comprise a VL1 comprising a CDR1 having an amino acid sequence at least 65%, at least 70%, at least 75%, at least 80%, at least 85%, at least 90%, at least 95%, at least 99%, or 100% identical to SEQ ID NO: 23, a CDR2 having an amino acid sequence at least 65%, at least 70%, at least 75%, at least 80%, at least 85%, at least 90%, at least 95%, at least 99%, or 100% identical to amino acid sequence GTN, and a CDR3 having an amino acid sequence at least 65%, at least 70%, at least 75%, at least 80%, at least 85%, at least 90%, at least 95%, at least 99%, or 100% identical to SEQ ID NO: 24 or 325.

[1111] In some aspects, the antigen binding polypeptides provided herein comprise a VL2 comprising a CDR1 having an amino acid sequence at least 65%, at least 70%, at least 75%, at least 80%, at least 85%, at least 90%, at least 95%, at least 99%, or 100% identical to SEQ ID NO: 1 or 324, a CDR2 having an amino acid sequence at least 65%, at least 70%, at least 75%, at least 80%, at least 85%, at least 90%, at least 95%, at least 99%, or 100% identical to SEQ ID NO: 2 or an amino acid sequence at least 65%, at least 70%, at least 75%, at least 80%, at least 85%, at least 90%, at least 95%, at least 99%, or 100% identical to amino acid sequence AAS, and a CDR3 having an amino acid sequence at least 65%, at least 70%, at least 75%, at least 80%, at least 85%, at least 90%, at least 95%, at least 99%, or 100% identical to SEQ ID NO: 3.

[1112] In some aspects, the antigen binding polypeptides provided herein comprise a VH1 comprising a CDR1 having an amino acid sequence at least 65%, at least 70%, at least 75%, at least 80%, at least 85%, at least 90%, at least 95%, at least 99%, or 100% identical to SEQ ID NO: 26, a CDR2 having an amino acid sequence at least 65%, at least 70%, at least 75%, at least 80%, at least 85%, at least 90%, at least 95%, at least 99%, or 100% identical to SEQ ID NO: 27, and a CDR3 having an amino acid sequence at least 65%, at least 70%, at least 75%, at least 80%, at least 85%, at least 90%, at least 95%, at least 99%, or 100% identical to SEQ ID NO: 28 or 332.

[1113] In some aspects, the antigen binding polypeptides provided herein comprise a VH2 comprising a CDR1 having an amino acid sequence at least 65%, at least 70%, at least 75%, at least 80%, at least 85%, at least 90%, at least 95%, at least 99%, or 100% identical to SEQ ID NO: 5, a CDR2 having an amino acid sequence at least 65%, at least 70%, at least 75%, at least 80%, at least 85%, at least 90%, at least 95%, at least 99%, or 100% identical to SEQ ID NO: 6, and a CDR3 having an amino acid sequence at least 65%, at least 70%, at least 75%, at least 80%, at least 85%, at least 90%, at least 95%, at least 99%, or 100% identical to SEQ ID NO: 7.

[1114] In some aspects, the antigen binding polypeptides provided herein comprise (i) a VL1 comprising a CDR1 having an amino acid sequence at least 65%, at least 70%, at least 75%, at least 80%, at least 85%, at least 90%, at least 95%, at least 99%, or 100% identical to SEQ ID NO: 23, a CDR2 having an amino acid sequence at least 65%, at least 70%, at least 75%, at least 80%, at least 85%, at least 90%, at least 95%, at least 99%, or 100% identical to amino acid sequence GTN, and a CDR3 having an amino acid sequence at least 65%, at least 70%, at least 75%, at least 80%, at least 85%, at least 90%, at least 95%, at least 99%, or 100% identical to SEQ ID NO: 24 or 325; (ii) a VL2 comprising a CDR1 having an amino acid sequence at least 65%, at least 70%, at least 75%, at least 80%, at least 85%, at least 90%, at least 95%, at least 99%, or 100% identical to SEQ ID NO: 1 or 324, a CDR2 having an amino acid sequence at least 65%, at least 70%, at least 75%, at least 80%, at least 85%, at least 90%, at least 95%, at least 99%, or 100% identical to SEQ ID NO: 2 or an amino acid sequence at least 65%, at least 70%, at least 75%, at least 80%, at least 85%, at least 90%, at least 95%, at least 99%, or 100% identical to amino acid sequence AAS, and a CDR3 having an amino acid sequence at least 65%, at least 70%, at least 75%, at least 80%, at least 85%, at least 90%, at least 95%, at least 99%, or 100% identical to SEQ ID NO: 3; (iii) a VH1 comprising a CDR1 having an amino acid sequence at least 65%, at least 70%, at least 75%, at least 80%, at least 85%, at least 90%, at least 95%, at least 99%, or 100% identical to SEQ ID NO: 26, a CDR2 having an amino acid sequence at least 65%, at least 70%, at least 75%, at least 80%, at least 85%, at least 90%, at least 95%, at least 99%, or 100% identical to SEQ ID NO: 27, and a CDR3 having an amino acid sequence at least 65%, at least 70%, at least 75%, at least 80%, at least 85%, at least 90%, at least 95%, at least 99%, or 100% identical to SEQ ID NO: 28 or 332; and (iv) a VH2 comprising a CDR1 having an amino acid sequence at least 65%, at least 70%, at least 75%, at least 80%, at least 85%, at least 90%, at least 95%, at least 99%, or 100% identical to SEQ ID NO: 5, a CDR2 having an amino acid sequence at least 65%, at least 70%, at least 75%, at least 80%, at least 85%, at least 90%, at least 95%, at least 99%, or 100% identical to SEQ ID NO: 6, and a CDR3 having an amino acid sequence at least 65%, at least 70%, at least 75%, at least 80%, at least 85%, at least 90%, at least 95%, at least 99%, or 100% identical to SEQ ID NO: 7.

[1115] In some aspects, the antigen binding polypeptides provided herein comprise a VL1 comprising an amino acid sequence that is at least 65%, at least 70%, at least 75%, at least 80%, at least 85%, at least 90%, at least 95%, at least 99%, or 100% identical to SEQ ID NO: 25.

[1116] In some aspects, the antigen binding polypeptides provided herein comprise a VL2 comprising an amino acid sequence that is at least 65%, at least 70%, at least 75%, at least 80%, at least 85%, at least 90%, at least 95%, at least 99%, or 100% identical to SEQ ID NO: 4.

[1117] In some aspects, the antigen binding polypeptides provided herein comprise a VH1 comprising an amino acid sequence that is at least 65%, at least 70%, at least 75%, at least 80%, at least 85%, at least 90%, at least 95%, at least 99%, or 100% identical to SEQ ID NO: 29.

[1118] In some aspects, the antigen binding polypeptides provided herein comprise a VH2 comprising an amino acid sequence that is at least 65%, at least 70%, at least 75%, at least 80%, at least 85%, at least 90%, at least 95%, at least 99%, or 100% identical to SEQ ID NO: 8.

[1119] In some aspects, the antigen binding polypeptides provided herein comprise (i) a VL1 comprising an amino acid sequence that is at least 65%, at least 70%, at least 75%, at least 80%, at least 85%, at least 90%, at least 95%, at least 99%, or 100% identical to SEQ ID NO: 25; (ii) a VL2 comprising an amino acid sequence that is at least 65%, at least 70%, at least 75%, at least 80%, at least 85%, at least 90%, at least 95%, at least 99%, or 100% identical to SEQ ID NO: 4; (iii) a VH1 comprising an amino acid sequence that is at least 65%, at least 70%, at least 75%, at least 80%, at least 85%, at least 90%, at least 95%, at least 99%, or 100% identical to SEQ ID NO: 29; and (iv) a VH2 comprising an amino acid sequence that is at least 65%, at least 70%, at least 75%, at least 80%, at least 85%, at least 90%, at least 95%, at least 99%, or 100% identical to SEQ ID NO: 8.

[1120] In some aspects, the antigen binding polypeptides provided herein comprise a VL1 comprising a CDR1 having an amino acid sequence at least 65%, at least 70%, at least 75%, at least 80%, at least 85%, at least 90%, at least 95%, at least 99%, or 100% identical to SEQ ID NO: 15, a CDR2 having an amino acid sequence at least 65%, at least 70%, at least 75%, at least 80%, at least 85%, at least 90%, at least 95%, at least 99%, or 100% identical to amino acid sequence LGS, and a CDR3 having an amino acid sequence at least 65%, at least 70%, at least 75%, at least 80%, at least 85%, at least 90%, at least 95%, at least 99%, or 100% identical to SEQ ID NO: 16.

[1121] In some aspects, the antigen binding polypeptides provided herein comprise a VL2 comprising a CDR1 having an amino acid sequence at least 65%, at least 70%, at least 75%, at least 80%, at least 85%, at least 90%, at least 95%, at least 99%, or 100% identical to SEQ ID NO: 30, a CDR2 having an amino acid sequence at least 65%, at least 70%, at least 75%, at least 80%, at least 85%, at least 90%, at least 95%, at least 99%, or 100% identical to SEQ ID NO: 31 or an amino acid sequence at least 65%, at least 70%, at least 75%, at least 80%, at least 85%, at least 90%, at least 95%, at least 99%, or 100% identical to amino acid sequence SAS, and a CDR3 having an amino acid sequence at least 65%, at least 70%, at least 75%, at least 80%, at least 85%, at least 90%, at least 95%, at least 99%, or 100% identical to SEQ ID NO: 32, 38, or 326.

[1122] In some aspects, the antigen binding polypeptides provided herein comprise a VH1 comprising a CDR1 having an amino acid sequence at least 65%, at least 70%, at least 75%, at least 80%, at least 85%, at least 90%, at least 95%, at least 99%, or 100% identical to SEQ ID NO: 18, a CDR2 having an amino acid sequence at least 65%, at least 70%, at least 75%, at least 80%, at least 85%, at least 90%, at least 95%, at least 99%, or 100% identical to SEQ ID NO: 19, and a CDR3 having an amino acid sequence at least 65%, at least 70%, at least 75%, at least 80%, at least 85%, at least 90%, at least 95%, at least 99%, or 100% identical to SEQ ID NO: 20.

[1123] In some aspects, the antigen binding polypeptides provided herein comprise a VH2 comprising a CDR1 having an amino acid sequence at least 65%, at least 70%, at least 75%, at least 80%, at least 85%, at least 90%, at least 95%, at least 99%, or 100% identical to SEQ ID NO: 34, a CDR2 having an amino acid sequence at least 65%, at least 70%, at least 75%, at least 80%, at least 85%, at least 90%, at least 95%, at least 99%, or 100% identical to SEQ ID NO: 35, and a CDR3 having an amino acid sequence at least 65%, at least 70%, at least 75%, at least 80%, at least 85%, at least 90%, at least 95%, at least 99%, or 100% identical to SEQ ID NO: 36, 40, or 327.

[1124] In some aspects, the antigen binding polypeptides provided herein comprise (i) a VL1 comprising a CDR1 having an amino acid sequence at least 65%, at least 70%, at least 75%, at least 80%, at least 85%, at least 90%, at least 95%, at least 99%, or 100% identical to SEQ ID NO: 15, a CDR2 having an amino acid sequence at least 65%, at least 70%, at least 75%, at least 80%, at least 85%, at least 90%, at least 95%, at least 99%, or 100% identical to amino acid sequence LGS, and a CDR3 having an amino acid sequence at least 65%, at least 70%, at least 75%, at least 80%, at least 85%, at least 90%, at least 95%, at least 99%, or 100% identical to SEQ ID NO: 16; (ii) a VL2 comprising a CDR1 having an amino acid sequence at least 65%, at least 70%, at least 75%, at least 80%, at least 85%, at least 90%, at least 95%, at least 99%, or 100% identical to SEQ ID NO: 30, a CDR2 having an amino acid sequence at least 65%, at least 70%, at least 75%, at least 80%, at least 85%, at least 90%, at least 95%, at least 99%, or 100% identical to SEQ ID NO: 31 or an amino acid sequence at least 65%, at least 70%, at least 75%, at least 80%, at least 85%, at least 90%, at least 95%, at least 99%, or 100% identical to amino acid sequence SAS, and a CDR3 having an amino acid sequence at least 65%, at least 70%, at least 75%, at least 80%, at least 85%, at least 90%, at least 95%, at least 99%, or 100% identical to SEQ ID NO: 32, 38, or 326; (iii) a VH1 comprising a CDR1 having an amino acid sequence at least 65%, at least 70%, at least 75%, at least 80%, at least 85%, at least 90%, at least 95%, at least 99%, or 100% identical to SEQ ID NO: 18, a CDR2 having an amino acid sequence at least 65%, at least 70%, at least 75%, at least 80%, at least 85%, at least 90%, at least 95%, at least 99%, or 100% identical to SEQ ID NO: 19, and a CDR3 having an amino acid sequence at least 65%, at least 70%, at least 75%, at least 80%, at least 85%, at least 90%, at least 95%, at least 99%, or 100% identical to SEQ ID NO: 20; and (iv) a VH2 comprising a CDR1 having an amino acid sequence at least 65%, at least 70%, at least 75%, at least 80%, at least 85%, at least 90%, at least 95%, at least 99%, or 100% identical to SEQ ID NO: 34, a CDR2 having an amino acid sequence at least 65%, at least 70%, at least 75%, at least 80%, at least 85%, at least 90%, at least 95%, at least 99%, or 100% identical to SEQ ID NO: 35, and a CDR3 having an amino acid sequence at least 65%, at least 70%, at least 75%, at least 80%, at least 85%, at least 90%, at least 95%, at least 99%, or 100% identical to SEQ ID NO: 36, 40, or 327.

[1125] In some aspects, the antigen binding polypeptides provided herein comprise a VL1 comprising an amino acid sequence that is at least 65%, at least 70%, at least 75%, at least 80%, at least 85%, at least 90%, at least 95%, at least 99%, or 100% identical to SEQ ID NO: 17.

[1126] In some aspects, the antigen binding polypeptides provided herein comprise a VL2 comprising an amino acid sequence that is at least 65%, at least 70%, at least 75%, at least 80%, at least 85%, at least 90%, at least 95%, at least 99%, or 100% identical to SEQ ID NO: 33 or 39.

[1127] In some aspects, the antigen binding polypeptides provided herein comprise a VH1 comprising an amino acid sequence that is at least 65%, at least 70%, at least 75%, at least 80%, at least 85%, at least 90%, at least 95%, at least 99%, or 100% identical to SEQ ID NO: 21 or 22.

[1128] In some aspects, the antigen binding polypeptides provided herein comprise a VH2 comprising an amino acid sequence that is at least 65%, at least 70%, at least 75%, at least 80%, at least 85%, at least 90%, at least 95%, at least 99%, or 100% identical to SEQ ID NO: 37.

[1129] In some aspects, the antigen binding polypeptides provided herein comprise (i) a VL1 comprising an amino acid sequence that is at least 65%, at least 70%, at least 75%, at least 80%, at least 85%, at least 90%, at least 95%, at least 99%, or 100% identical to SEQ ID NO: 17; (ii) a VL2 comprising an amino acid sequence that is at least 65%, at least 70%, at least 75%, at least 80%, at least 85%, at least 90%, at least 95%, at least 99%, or 100% identical to SEQ ID NO: 33 or 39; (iii) a VH1 comprising an amino acid sequence that is at least 65%, at least 70%, at least 75%, at least 80%, at least 85%, at least 90%, at least 95%, at least 99%, or 100% identical to SEQ ID NO: 21 or 22; and (iv) a VH2 comprising an amino acid sequence that is at least 65%, at least 70%, at least 75%, at least 80%, at least 85%, at least 90%, at least 95%, at least 99%, or 100% identical to SEQ ID NO: 37.

[1130] In some aspects, the antigen binding polypeptides provided herein comprise a VL1 comprising a CDR1 having an amino acid sequence at least 65%, at least 70%, at least 75%, at least 80%, at least 85%, at least 90%, at least 95%, at least 99%, or 100% identical to SEQ ID NO: 9 or 1055, a CDR2 having an amino acid sequence at least 65%, at least 70%, at least 75%, at least 80%, at least 85%, at least 90%, at least 95%, at least 99%, or 100% identical to SEQ ID NO: 1056 or an amino acid sequence at least 65%, at least 70%, at least 75%, at least 80%, at least 85%, at least 90%, at least 95%, at least 99%, or 100% identical to amino acid sequence GAS, and a CDR3 having an amino acid sequence at least 65%, at least 70%, at least 75%, at least 80%, at least 85%, at least 90%, at least 95%, at least 99%, or 100% identical to SEQ ID NO: 10.

[1131] In some aspects, the antigen binding polypeptides provided herein comprise a VL2 comprising a CDR1 having an amino acid sequence at least 65%, at least 70%, at least 75%, at least 80%, at least 85%, at least 90%, at least 95%, at least 99%, or 100% identical to SEQ ID NO: 65 or 627, a CDR2 having an amino acid sequence at least 65%, at least 70%, at least 75%, at least 80%, at least 85%, at least 90%, at least 95%, at least 99%, or 100% identical to SEQ ID NO: 628 or an amino acid sequence at least 65%, at least 70%, at least 75%, at least 80%, at least 85%, at least 90%, at least 95%, at least 99%, or 100% identical to amino acid sequence SDS, and a CDR3 having an amino acid sequence at least 65%, at least 70%, at least 75%, at least 80%, at least 85%, at least 90%, at least 95%, at least 99%, or 100% identical to SEQ ID NO: 66.

[1132] In some aspects, the antigen binding polypeptides provided herein comprise a VH1 comprising a CDR1 having an amino acid sequence at least 65%, at least 70%, at least 75%, at least 80%, at least 85%, at least 90%, at least 95%, at least 99%, or 100% identical to SEQ ID NO: 12 or 1057, a CDR2 having an amino acid sequence at least 65%, at least 70%, at least 75%, at least 80%, at least 85%, at least 90%, at least 95%, at least 99%, or 100% identical to SEQ ID NO: 6 or 1058, and a CDR3 having an amino acid sequence at least 65%, at least 70%, at least 75%, at least 80%, at least 85%, at least 90%, at least 95%, at least 99%, or 100% identical to SEQ ID NO: 13 or 1059.

[1133] In some aspects, the antigen binding polypeptides provided herein comprise a VH2 comprising a CDR1 having an amino acid sequence at least 65%, at least 70%, at least 75%, at least 80%, at least 85%, at least 90%, at least 95%, at least 99%, or 100% identical to SEQ ID NO: 68 or 629, a CDR2 having an amino acid sequence at least 65%, at least 70%, at least 75%, at least 80%, at least 85%, at least 90%, at least 95%, at least 99%, or 100% identical to SEQ ID NO: 69 or 630, and a CDR3 having an amino acid sequence at least 65%, at least 70%, at least 75%, at least 80%, at least 85%, at least 90%, at least 95%, at least 99%, or 100% identical to SEQ ID NO: 70 or 631.

[1134] In some aspects, the antigen binding polypeptides provided herein comprise (i) a VL1 comprising a CDR1 having an amino acid sequence at least 65%, at least 70%, at least 75%, at least 80%, at least 85%, at least 90%, at least 95%, at least 99%, or 100% identical to SEQ ID NO: 9 or 1055, a CDR2 having an amino acid sequence at least 65%, at least 70%, at least 75%, at least 80%, at least 85%, at least 90%, at least 95%, at least 99%, or 100% identical to SEQ ID NO: 1056 or an amino acid sequence at least 65%, at least 70%, at least 75%, at least 80%, at least 85%, at least 90%, at least 95%, at least 99%, or 100% identical to amino acid sequence GAS, and a CDR3 having an amino acid sequence at least 65%, at least 70%, at least 75%, at least 80%, at least 85%, at least 90%, at least 95%, at least 99%, or 100% identical to SEQ ID NO: 10; (ii) a VL2 comprising a CDR1 having an amino acid sequence at least 65%, at least 70%, at least 75%, at least 80%, at least 85%, at least 90%, at least 95%, at least 99%, or 100% identical to SEQ ID NO: 65 or 627, a CDR2 having an amino acid sequence at least 65%, at least 70%, at least 75%, at least 80%, at least 85%, at least 90%, at least 95%, at least 99%, or 100% identical to SEQ ID NO: 628 or an amino acid sequence at least 65%, at least 70%, at least 75%, at least 80%, at least 85%, at least 90%, at least 95%, at least 99%, or 100% identical to amino acid sequence SDS, and a CDR3 having an amino acid sequence at least 65%, at least 70%, at least 75%, at least 80%, at least 85%, at least 90%, at least 95%, at least 99%, or 100% identical to SEQ ID NO: 66; (iii) a VH1 comprising a CDR1 having an amino acid sequence at least 65%, at least 70%, at least 75%, at least 80%, at least 85%, at least 90%, at least 95%, at least 99%, or 100% identical to SEQ ID NO: 12 or 1057, a CDR2 having an amino acid sequence at least 65%, at least 70%, at least 75%, at least 80%, at least 85%, at least 90%, at least 95%, at least 99%, or 100% identical to SEQ ID NO: 6 or 1058, and a CDR3 having an amino acid sequence at least 65%, at least 70%, at least 75%, at least 80%, at least 85%, at least 90%, at least 95%, at least 99%, or 100% identical to SEQ ID NO: 13 or 1059; and (iv) a VH2 comprising a CDR1 having an amino acid sequence at least 65%, at least 70%, at least 75%, at least 80%, at least 85%, at least 90%, at least 95%, at least 99%, or 100% identical to SEQ ID NO: 68 or 629, a CDR2 having an amino acid sequence at least 65%, at least 70%, at least 75%, at least 80%, at least 85%, at least 90%, at least 95%, at least 99%, or 100% identical to SEQ ID NO: 69 or 630, and a CDR3 having an amino acid sequence at least 65%, at least 70%, at least 75%, at least 80%, at least 85%, at least 90%, at least 95%, at least 99%, or 100% identical to SEQ ID NO: 70 or 631.

[1135] In some aspects, the antigen binding polypeptides provided herein comprise a VL1 comprising an amino acid sequence that is at least 65%, at least 70%, at least 75%, at least 80%, at least 85%, at least 90%, at least 95%, at least 99%, or 100% identical to SEQ ID NO: 11.

[1136] In some aspects, the antigen binding polypeptides provided herein comprise a VL2 comprising an amino acid sequence that is at least 65%, at least 70%, at least 75%, at least 80%, at least 85%, at least 90%, at least 95%, at least 99%, or 100% identical to SEQ ID NO: 67.

[1137] In some aspects, the antigen binding polypeptides provided herein comprise a VH1 comprising an amino acid sequence that is at least 65%, at least 70%, at least 75%, at least 80%, at least 85%, at least 90%, at least 95%, at least 99%, or 100% identical to SEQ ID NO: 14.

[1138] In some aspects, the antigen binding polypeptides provided herein comprise a VH2 comprising an amino acid sequence that is at least 65%, at least 70%, at least 75%, at least 80%, at least 85%, at least 90%, at least 95%, at least 99%, or 100% identical to SEQ ID NO: 71 or 626.

[1139] In some aspects, the antigen binding polypeptides provided herein comprise (i) a VL1 comprising an amino acid sequence that is at least 65%, at least 70%, at least 75%, at least 80%, at least 85%, at least 90%, at least 95%, at least 99%, or 100% identical to SEQ ID NO: 11; (ii) a VL2 comprising an amino acid sequence that is at least 65%, at least 70%, at least 75%, at least 80%, at least 85%, at least 90%, at least 95%, at least 99%, or 100% identical to SEQ ID NO: 67; (iii) a VH1 comprising an amino acid sequence that is at least 65%, at least 70%, at least 75%, at least 80%, at least 85%, at least 90%, at least 95%, at least 99%, or 100% identical to SEQ ID NO: 14; and (iv) a VH2 comprising an amino acid sequence that is at least 65%, at least 70%, at least 75%, at least 80%, at least 85%, at least 90%, at least 95%, at least 99%, or 100% identical to SEQ ID NO: 71 or 626.

[1140] In some aspects, the antigen binding polypeptides provided herein comprise a VL1 comprising a CDR1 having an amino acid sequence at least 65%, at least 70%, at least 75%, at least 80%, at least 85%, at least 90%, at least 95%, at least 99%, or 100% identical to SEQ ID NO: 9 or 1055, a CDR2 having an amino acid sequence at least 65%, at least 70%, at least 75%, at least 80%, at least 85%, at least 90%, at least 95%, at least 99%, or 100% identical to SEQ ID NO: 1056 or an amino acid sequence at least 65%, at least 70%, at least 75%, at least 80%, at least 85%, at least 90%, at least 95%, at least 99%, or 100% identical to amino acid sequence GAS, and a CDR3 having an amino acid sequence at least 65%, at least 70%, at least 75%, at least 80%, at least 85%, at least 90%, at least 95%, at least 99%, or 100% identical to SEQ ID NO: 10.

[1141] In some aspects, the antigen binding polypeptides provided herein comprise a VL2 comprising a CDR1 having an amino acid sequence at least 65%, at least 70%, at least 75%, at least 80%, at least 85%, at least 90%, at least 95%, at least 99%, or 100% identical to SEQ ID NO: 152 or 1045, a CDR2 having an amino acid sequence at least 65%, at least 70%, at least 75%, at least 80%, at least 85%, at least 90%, at least 95%, at least 99%, or 100% identical to SEQ ID NO: 1046 or an amino acid sequence at least 65%, at least 70%, at least 75%, at least 80%, at least 85%, at least 90%, at least 95%, at least 99%, or 100% identical to amino acid sequence GAS, and a CDR3 having an amino acid sequence at least 65%, at least 70%, at least 75%, at least 80%, at least 85%, at least 90%, at least 95%, at least 99%, or 100% identical to SEQ ID NO: 153 or 766.

[1142] In some aspects, the antigen binding polypeptides provided herein comprise a VH1 comprising a CDR1 having an amino acid sequence at least 65%, at least 70%, at least 75%, at least 80%, at least 85%, at least 90%, at least 95%, at least 99%, or 100% identical to SEQ ID NO: 12 or 1057, a CDR2 having an amino acid sequence at least 65%, at least 70%, at least 75%, at least 80%, at least 85%, at least 90%, at least 95%, at least 99%, or 100% identical to SEQ ID NO: 6 or 1058, and a CDR3 having an amino acid sequence at least 65%, at least 70%, at least 75%, at least 80%, at least 85%, at least 90%, at least 95%, at least 99%, or 100% identical to SEQ ID NO: 13 or 1059.

[1143] In some aspects, the antigen binding polypeptides provided herein comprise a VH2 comprising a CDR1 having an amino acid sequence at least 65%, at least 70%, at least 75%, at least 80%, at least 85%, at least 90%, at least 95%, at least 99%, or 100% identical to SEQ ID NO: 155 or 1047, a CDR2 having an amino acid sequence at least 65%, at least 70%, at least 75%, at least 80%, at least 85%, at least 90%, at least 95%, at least 99%, or 100% identical to SEQ ID NO: 156 or 1048, and a CDR3 having an amino acid sequence at least 65%, at least 70%, at least 75%, at least 80%, at least 85%, at least 90%, at least 95%, at least 99%, or 100% identical to SEQ ID NO: 157, 767, or 1049.

[1144] In some aspects, the antigen binding polypeptides provided herein comprise (i) a VL1 comprising a CDR1 having an amino acid sequence at least 65%, at least 70%, at least 75%, at least 80%, at least 85%, at least 90%, at least 95%, at least 99%, or 100% identical to SEQ ID NO: 9 or 1055, a CDR2 having an amino acid sequence at least 65%, at least 70%, at least 75%, at least 80%, at least 85%, at least 90%, at least 95%, at least 99%, or 100% identical to SEQ ID NO: 1056 or an amino acid sequence at least 65%, at least 70%, at least 75%, at least 80%, at least 85%, at least 90%, at least 95%, at least 99%, or 100% identical to amino acid sequence GAS, and a CDR3 having an amino acid sequence at least 65%, at least 70%, at least 75%, at least 80%, at least 85%, at least 90%, at least 95%, at least 99%, or 100% identical to SEQ ID NO: 10; (ii) a VL2 comprising a CDR1 having an amino acid sequence at least 65%, at least 70%, at least 75%, at least 80%, at least 85%, at least 90%, at least 95%, at least 99%, or 100% identical to SEQ ID NO: 152 or 1045, a CDR2 having an amino acid sequence at least 65%, at least 70%, at least 75%, at least 80%, at least 85%, at least 90%, at least 95%, at least 99%, or 100% identical to SEQ ID NO: 1046 or an amino acid sequence at least 65%, at least 70%, at least 75%, at least 80%, at least 85%, at least 90%, at least 95%, at least 99%, or 100% identical to amino acid sequence GAS, and a CDR3 having an amino acid sequence at least 65%, at least 70%, at least 75%, at least 80%, at least 85%, at least 90%, at least 95%, at least 99%, or 100% identical to SEQ ID NO: 153 or 766; (iii) a VH1 comprising a CDR1 having an amino acid sequence at least 65%, at least 70%, at least 75%, at least 80%, at least 85%, at least 90%, at least 95%, at least 99%, or 100% identical to SEQ ID NO: 12 or 1057, a CDR2 having an amino acid sequence at least 65%, at least 70%, at least 75%, at least 80%, at least 85%, at least 90%, at least 95%, at least 99%, or 100% identical to SEQ ID NO: 6 or 1058, and a CDR3 having an amino acid sequence at least 65%, at least 70%, at least 75%, at least 80%, at least 85%, at least 90%, at least 95%, at least 99%, or 100% identical to SEQ ID NO: 13 or 1059; and (iv) a VH2 comprising a CDR1 having an amino acid sequence at least 65%, at least 70%, at least 75%, at least 80%, at least 85%, at least 90%, at least 95%, at least 99%, or 100% identical to SEQ ID NO: 155 or 1047, a CDR2 having an amino acid sequence at least 65%, at least 70%, at least 75%, at least 80%, at least 85%, at least 90%, at least 95%, at least 99%, or 100% identical to SEQ ID NO: 156 or 1048, and a CDR3 having an amino acid sequence at least 65%, at least 70%, at least 75%, at least 80%, at least 85%, at least 90%, at least 95%, at least 99%, or 100% identical to SEQ ID NO: 157, 767, or 1049.

[1145] In some aspects, the antigen binding polypeptides provided herein comprise a VL1 comprising an amino acid sequence that is at least 65%, at least 70%, at least 75%, at least 80%, at least 85%, at least 90%, at least 95%, at least 99%, or 100% identical to SEQ ID NO: 11.

[1146] In some aspects, the antigen binding polypeptides provided herein comprise a VL2 comprising an amino acid sequence that is at least 65%, at least 70%, at least 75%, at least 80%, at least 85%, at least 90%, at least 95%, at least 99%, or 100% identical to SEQ ID NO: 154.

[1147] In some aspects, the antigen binding polypeptides provided herein comprise a VH1 comprising an amino acid sequence that is at least 65%, at least 70%, at least 75%, at least 80%, at least 85%, at least 90%, at least 95%, at least 99%, or 100% identical to SEQ ID NO: 14.

[1148] In some aspects, the antigen binding polypeptides provided herein comprise a VH2 comprising an amino acid sequence that is at least 65%, at least 70%, at least 75%, at least 80%, at least 85%, at least 90%, at least 95%, at least 99%, or 100% identical to SEQ ID NO: 158.

[1149] In some aspects, the antigen binding polypeptides provided herein comprise (i) a VL1 comprising an amino acid sequence that is at least 65%, at least 70%, at least 75%, at least 80%, at least 85%, at least 90%, at least 95%, at least 99%, or 100% identical to SEQ ID NO: 11; (ii) a VL2 comprising an amino acid sequence that is at least 65%, at least 70%, at least 75%, at least 80%, at least 85%, at least 90%, at least 95%, at least 99%, or 100% identical to SEQ ID NO: 154; (iii) a VH1 comprising an amino acid sequence that is at least 65%, at least 70%, at least 75%, at least 80%, at least 85%, at least 90%, at least 95%, at least 99%, or 100% identical to SEQ ID NO: 14; and (iv) a VH2 comprising an amino acid sequence that is at least 65%, at least 70%, at least 75%, at least 80%, at least 85%, at least 90%, at least 95%, at least 99%, or 100% identical to SEQ ID NO: 158.

[1150] In some aspects, the antigen binding polypeptides provided herein comprise a VL1 comprising a CDR1 having an amino acid sequence at least 65%, at least 70%, at least 75%, at least 80%, at least 85%, at least 90%, at least 95%, at least 99%, or 100% identical to SEQ ID NO: 145 or 1050, a CDR2 having an amino acid sequence at least 65%, at least 70%, at least 75%, at least 80%, at least 85%, at least 90%, at least 95%, at least 99%, or 100% identical to SEQ ID NO: 1051 or an amino acid sequence at least 65%, at least 70%, at least 75%, at least 80%, at least 85%, at least 90%, at least 95%, at least 99%, or 100% identical to amino acid sequence AAS, and a CDR3 having an amino acid sequence at least 65%, at least 70%, at least 75%, at least 80%, at least 85%, at least 90%, at least 95%, at least 99%, or 100% identical to SEQ ID NO: 146 or 764.

[1151] In some aspects, the antigen binding polypeptides provided herein comprise a VL2 comprising a CDR1 having an amino acid sequence at least 65%, at least 70%, at least 75%, at least 80%, at least 85%, at least 90%, at least 95%, at least 99%, or 100% identical to SEQ ID NO: 9 or 1055, a CDR2 having an amino acid sequence at least 65%, at least 70%, at least 75%, at least 80%, at least 85%, at least 90%, at least 95%, at least 99%, or 100% identical to SEQ ID NO: 1056 or an amino acid sequence at least 65%, at least 70%, at least 75%, at least 80%, at least 85%, at least 90%, at least 95%, at least 99%, or 100% identical to amino acid sequence GAS, and a CDR3 having an amino acid sequence at least 65%, at least 70%, at least 75%, at least 80%, at least 85%, at least 90%, at least 95%, at least 99%, or 100% identical to SEQ ID NO: 10.

[1152] In some aspects, the antigen binding polypeptides provided herein comprise a VH1 comprising a CDR1 having an amino acid sequence at least 65%, at least 70%, at least 75%, at least 80%, at least 85%, at least 90%, at least 95%, at least 99%, or 100% identical to SEQ ID NO: 148 or 1052, a CDR2 having an amino acid sequence at least 65%, at least 70%, at least 75%, at least 80%, at least 85%, at least 90%, at least 95%, at least 99%, or 100% identical to SEQ ID NO: 149 or 1053, and a CDR3 having an amino acid sequence at least 65%, at least 70%, at least 75%, at least 80%, at least 85%, at least 90%, at least 95%, at least 99%, or 100% identical to SEQ ID NO: 150, 765, or 1054.

[1153] In some aspects, the antigen binding polypeptides provided herein comprise a VH2 comprising a CDR1 having an amino acid sequence at least 65%, at least 70%, at least 75%, at least 80%, at least 85%, at least 90%, at least 95%, at least 99%, or 100% identical to SEQ ID NO: 12 or 1057, a CDR2 having an amino acid sequence at least 65%, at least 70%, at least 75%, at least 80%, at least 85%, at least 90%, at least 95%, at least 99%, or 100% identical to SEQ ID NO: 6 or 1058, and a CDR3 having an amino acid sequence at least 65%, at least 70%, at least 75%, at least 80%, at least 85%, at least 90%, at least 95%, at least 99%, or 100% identical to SEQ ID NO: 13 or 1059.

[1154] In some aspects, the antigen binding polypeptides provided herein comprise (i) a VL1 comprising a CDR1 having an amino acid sequence at least 65%, at least 70%, at least 75%, at least 80%, at least 85%, at least 90%, at least 95%, at least 99%, or 100% identical to SEQ ID NO: 145 or 1050, a CDR2 having an amino acid sequence at least 65%, at least 70%, at least 75%, at least 80%, at least 85%, at least 90%, at least 95%, at least 99%, or 100% identical to SEQ ID NO: 1051 or an amino acid sequence at least 65%, at least 70%, at least 75%, at least 80%, at least 85%, at least 90%, at least 95%, at least 99%, or 100% identical to amino acid sequence AAS, and a CDR3 having an amino acid sequence at least 65%, at least 70%, at least 75%, at least 80%, at least 85%, at least 90%, at least 95%, at least 99%, or 100% identical to SEQ ID NO: 146 or 764; (ii) a VL2 comprising a CDR1 having an amino acid sequence at least 65%, at least 70%, at least 75%, at least 80%, at least 85%, at least 90%, at least 95%, at least 99%, or 100% identical to SEQ ID NO: 9 or 1055, a CDR2 having an amino acid sequence at least 65%, at least 70%, at least 75%, at least 80%, at least 85%, at least 90%, at least 95%, at least 99%, or 100% identical to SEQ ID NO: 1056 or an amino acid sequence at least 65%, at least 70%, at least 75%, at least 80%, at least 85%, at least 90%, at least 95%, at least 99%, or 100% identical to amino acid sequence GAS, and a CDR3 having an amino acid sequence at least 65%, at least 70%, at least 75%, at least 80%, at least 85%, at least 90%, at least 95%, at least 99%, or 100% identical to SEQ ID NO: 10; (iii) a VH1 comprising a CDR1 having an amino acid sequence at least 65%, at least 70%, at least 75%, at least 80%, at least 85%, at least 90%, at least 95%, at least 99%, or 100% identical to SEQ ID NO: 148 or 1052, a CDR2 having an amino acid sequence at least 65%, at least 70%, at least 75%, at least 80%, at least 85%, at least 90%, at least 95%, at least 99%, or 100% identical to SEQ ID NO: 149 or 1053, and a CDR3 having an amino acid sequence at least 65%, at least 70%, at least 75%, at least 80%, at least 85%, at least 90%, at least 95%, at least 99%, or 100% identical to SEQ ID NO: 150, 765, or 1054; and (iv) a VH2 comprising a CDR1 having an amino acid sequence at least 65%, at least 70%, at least 75%, at least 80%, at least 85%, at least 90%, at least 95%, at least 99%, or 100% identical to SEQ ID NO: 12 or 1057, a CDR2 having an amino acid sequence at least 65%, at least 70%, at least 75%, at least 80%, at least 85%, at least 90%, at least 95%, at least 99%, or 100% identical to SEQ ID NO: 6 or 1058, and a CDR3 having an amino acid sequence at least 65%, at least 70%, at least 75%, at least 80%, at least 85%, at least 90%, at least 95%, at least 99%, or 100% identical to SEQ ID NO: 13 or 1059.

[1155] In some aspects, the antigen binding polypeptides provided herein comprise a VL1 comprising an amino acid sequence that is at least 65%, at least 70%, at least 75%, at least 80%, at least 85%, at least 90%, at least 95%, at least 99%, or 100% identical to SEQ ID NO: 147.

[1156] In some aspects, the antigen binding polypeptides provided herein comprise a VL2 comprising an amino acid sequence that is at least 65%, at least 70%, at least 75%, at least 80%, at least 85%, at least 90%, at least 95%, at least 99%, or 100% identical to SEQ ID NO: 11.

[1157] In some aspects, the antigen binding polypeptides provided herein comprise a VH1 comprising an amino acid sequence that is at least 65%, at least 70%, at least 75%, at least 80%, at least 85%, at least 90%, at least 95%, at least 99%, or 100% identical to SEQ ID NO: 151.

[1158] In some aspects, the antigen binding polypeptides provided herein comprise a VH2 comprising an amino acid sequence that is at least 65%, at least 70%, at least 75%, at least 80%, at least 85%, at least 90%, at least 95%, at least 99%, or 100% identical to SEQ ID NO: 14.

[1159] In some aspects, the antigen binding polypeptides provided herein comprise (i) a VL1 comprising an amino acid sequence that is at least 65%, at least 70%, at least 75%, at least 80%, at least 85%, at least 90%, at least 95%, at least 99%, or 100% identical to SEQ ID NO: 147; (ii) a VL2 comprising an amino acid sequence that is at least 65%, at least 70%, at least 75%, at least 80%, at least 85%, at least 90%, at least 95%, at least 99%, or 100% identical to SEQ ID NO: 11; (iii) a VH1 comprising an amino acid sequence that is at least 65%, at least 70%, at least 75%, at least 80%, at least 85%, at least 90%, at least 95%, at least 99%, or 100% identical to SEQ ID NO: 151; and (iv) a VH2 comprising an amino acid sequence that is at least 65%, at least 70%, at least 75%, at least 80%, at least 85%, at least 90%, at least 95%, at least 99%, or 100% identical to SEQ ID NO: 14.

[1160] In some aspects, the antigen binding polypeptides provided herein comprise a VL1 comprising a CDR1 having an amino acid sequence at least 65%, at least 70%, at least 75%, at least 80%, at least 85%, at least 90%, at least 95%, at least 99%, or 100% identical to SEQ ID NO: 65 or 627, a CDR2 having an amino acid sequence at least 65%, at least 70%, at least 75%, at least 80%, at least 85%, at least 90%, at least 95%, at least 99%, or 100% identical to SEQ ID NO: 628 or an amino acid sequence at least 65%, at least 70%, at least 75%, at least 80%, at least 85%, at least 90%, at least 95%, at least 99%, or 100% identical to amino acid sequence SDS, and a CDR3 having an amino acid sequence at least 65%, at least 70%, at least 75%, at least 80%, at least 85%, at least 90%, at least 95%, at least 99%, or 100% identical to SEQ ID NO: 66.

[1161] In some aspects, the antigen binding polypeptides provided herein comprise a VL2 comprising a CDR1 having an amino acid sequence at least 65%, at least 70%, at least 75%, at least 80%, at least 85%, at least 90%, at least 95%, at least 99%, or 100% identical to SEQ ID NO: 15, a CDR2 having an amino acid sequence at least 65%, at least 70%, at least 75%, at least 80%, at least 85%, at least 90%, at least 95%, at least 99%, or 100% identical to amino acid sequence LGS, and a CDR3 having an amino acid sequence at least 65%, at least 70%, at least 75%, at least 80%, at least 85%, at least 90%, at least 95%, at least 99%, or 100% identical to SEQ ID NO: 16.

[1162] In some aspects, the antigen binding polypeptides provided herein comprise a VH1 comprising a CDR1 having an amino acid sequence at least 65%, at least 70%, at least 75%, at least 80%, at least 85%, at least 90%, at least 95%, at least 99%, or 100% identical to SEQ ID NO: 68 or 629, a CDR2 having an amino acid sequence at least 65%, at least 70%, at least 75%, at least 80%, at least 85%, at least 90%, at least 95%, at least 99%, or 100% identical to SEQ ID NO: 69 or 630, and a CDR3 having an amino acid sequence at least 65%, at least 70%, at least 75%, at least 80%, at least 85%, at least 90%, at least 95%, at least 99%, or 100% identical to SEQ ID NO: 70 or 631.

[1163] In some aspects, the antigen binding polypeptides provided herein comprise a VH2 comprising a CDR1 having an amino acid sequence at least 65%, at least 70%, at least 75%, at least 80%, at least 85%, at least 90%, at least 95%, at least 99%, or 100% identical to SEQ ID NO: 18, a CDR2 having an amino acid sequence at least 65%, at least 70%, at least 75%, at least 80%, at least 85%, at least 90%, at least 95%, at least 99%, or 100% identical to SEQ ID NO: 19, and a CDR3 having an amino acid sequence at least 65%, at least 70%, at least 75%, at least 80%, at least 85%, at least 90%, at least 95%, at least 99%, or 100% identical to SEQ ID NO: 20.

[1164] In some aspects, the antigen binding polypeptides provided herein comprise (i) a VL1 comprising a CDR1 having an amino acid sequence at least 65%, at least 70%, at least 75%, at least 80%, at least 85%, at least 90%, at least 95%, at least 99%, or 100% identical to SEQ ID NO: 65 or 627, a CDR2 having an amino acid sequence at least 65%, at least 70%, at least 75%, at least 80%, at least 85%, at least 90%, at least 95%, at least 99%, or 100% identical to SEQ ID NO: 628 or an amino acid sequence at least 65%, at least 70%, at least 75%, at least 80%, at least 85%, at least 90%, at least 95%, at least 99%, or 100% identical to amino acid sequence SDS, and a CDR3 having an amino acid sequence at least 65%, at least 70%, at least 75%, at least 80%, at least 85%, at least 90%, at least 95%, at least 99%, or 100% identical to SEQ ID NO: 66; (ii) a VL2 comprising a CDR1 having an amino acid sequence at least 65%, at least 70%, at least 75%, at least 80%, at least 85%, at least 90%, at least 95%, at least 99%, or 100% identical to SEQ ID NO: 15, a CDR2 having an amino acid sequence at least 65%, at least 70%, at least 75%, at least 80%, at least 85%, at least 90%, at least 95%, at least 99%, or 100% identical to amino acid sequence LGS, and a CDR3 having an amino acid sequence at least 65%, at least 70%, at least 75%, at least 80%, at least 85%, at least 90%, at least 95%, at least 99%, or 100% identical to SEQ ID NO: 16; (iii) a VH1 comprising a CDR1 having an amino acid sequence at least 65%, at least 70%, at least 75%, at least 80%, at least 85%, at least 90%, at least 95%, at least 99%, or 100% identical to SEQ ID NO: 68 or 629, a CDR2 having an amino acid sequence at least 65%, at least 70%, at least 75%, at least 80%, at least 85%, at least 90%, at least 95%, at least 99%, or 100% identical to SEQ ID NO: 69 or 630, and a CDR3 having an amino acid sequence at least 65%, at least 70%, at least 75%, at least 80%, at least 85%, at least 90%, at least 95%, at least 99%, or 100% identical to SEQ ID NO: 70 or 631; and (iv) a VH2 comprising a CDR1 having an amino acid sequence at least 65%, at least 70%, at least 75%, at least 80%, at least 85%, at least 90%, at least 95%, at least 99%, or 100% identical to SEQ ID NO: 18, a CDR2 having an amino acid sequence at least 65%, at least 70%, at least 75%, at least 80%, at least 85%, at least 90%, at least 95%, at least 99%, or 100% identical to SEQ ID NO: 19, and a CDR3 having an amino acid sequence at least 65%, at least 70%, at least 75%, at least 80%, at least 85%, at least 90%, at least 95%, at least 99%, or 100% identical to SEQ ID NO: 20.

[1165] In some aspects, the antigen binding polypeptides provided herein comprise a VL1 comprising an amino acid sequence that is at least 65%, at least 70%, at least 75%, at least 80%, at least 85%, at least 90%, at least 95%, at least 99%, or 100% identical to SEQ ID NO: 67.

[1166] In some aspects, the antigen binding polypeptides provided herein comprise a VL2 comprising an amino acid sequence that is at least 65%, at least 70%, at least 75%, at least 80%, at least 85%, at least 90%, at least 95%, at least 99%, or 100% identical to SEQ ID NO: 17.

[1167] In some aspects, the antigen binding polypeptides provided herein comprise a VH1 comprising an amino acid sequence that is at least 65%, at least 70%, at least 75%, at least 80%, at least 85%, at least 90%, at least 95%, at least 99%, or 100% identical to SEQ ID NO: 71 or 626.

[1168] In some aspects, the antigen binding polypeptides provided herein comprise a VH2 comprising an amino acid sequence that is at least 65%, at least 70%, at least 75%, at least 80%, at least 85%, at least 90%, at least 95%, at least 99%, or 100% identical to SEQ ID NO: 21 or 22.

[1169] In some aspects, the antigen binding polypeptides provided herein comprise (i) a VL1 comprising an amino acid sequence that is at least 65%, at least 70%, at least 75%, at least 80%, at least 85%, at least 90%, at least 95%, at least 99%, or 100% identical to SEQ ID NO: 67; (ii) a VL2 comprising an amino acid sequence that is at least 65%, at least 70%, at least 75%, at least 80%, at least 85%, at least 90%, at least 95%, at least 99%, or 100% identical to SEQ ID NO: 17; (iii) a VH1 comprising an amino acid sequence that is at least 65%, at least 70%, at least 75%, at least 80%, at least 85%, at least 90%, at least 95%, at least 99%, or 100% identical to SEQ ID NO: 71 or 626; and (iv) a VH2 comprising an amino acid sequence that is at least 65%, at least 70%, at least 75%, at least 80%, at least 85%, at least 90%, at least 95%, at least 99%, or 100% identical to SEQ ID NO: 21 or 22.

[1170] In some aspects, the antigen binding polypeptides provided herein comprise a VL1 comprising a CDR1 having an amino acid sequence at least 65%, at least 70%, at least 75%, at least 80%, at least 85%, at least 90%, at least 95%, at least 99%, or 100% identical to SEQ ID NO: 65 or 627, a CDR2 having an amino acid sequence at least 65%, at least 70%, at least 75%, at least 80%, at least 85%, at least 90%, at least 95%, at least 99%, or 100% identical to SEQ ID NO: 628 or an amino acid sequence at least 65%, at least 70%, at least 75%, at least 80%, at least 85%, at least 90%, at least 95%, at least 99%, or 100% identical to amino acid sequence SDS, and a CDR3 having an amino acid sequence at least 65%, at least 70%, at least 75%, at least 80%, at least 85%, at least 90%, at least 95%, at least 99%, or 100% identical to SEQ ID NO: 66.

[1171] In some aspects, the antigen binding polypeptides provided herein comprise a VL2 comprising a CDR1 having an amino acid sequence at least 65%, at least 70%, at least 75%, at least 80%, at least 85%, at least 90%, at least 95%, at least 99%, or 100% identical to SEQ ID NO: 152 or 1045, a CDR2 having an amino acid sequence at least 65%, at least 70%, at least 75%, at least 80%, at least 85%, at least 90%, at least 95%, at least 99%, or 100% identical to SEQ ID NO: 1046 or an amino acid sequence at least 65%, at least 70%, at least 75%, at least 80%, at least 85%, at least 90%, at least 95%, at least 99%, or 100% identical to amino acid sequence GAS, and a CDR3 having an amino acid sequence at least 65%, at least 70%, at least 75%, at least 80%, at least 85%, at least 90%, at least 95%, at least 99%, or 100% identical to SEQ ID NO: 153 or 766.

[1172] In some aspects, the antigen binding polypeptides provided herein comprise a VH1 comprising a CDR1 having an amino acid sequence at least 65%, at least 70%, at least 75%, at least 80%, at least 85%, at least 90%, at least 95%, at least 99%, or 100% identical to SEQ ID NO: 68 or 629, a CDR2 having an amino acid sequence at least 65%, at least 70%, at least 75%, at least 80%, at least 85%, at least 90%, at least 95%, at least 99%, or 100% identical to SEQ ID NO: 69 or 630, and a CDR3 having an amino acid sequence at least 65%, at least 70%, at least 75%, at least 80%, at least 85%, at least 90%, at least 95%, at least 99%, or 100% identical to SEQ ID NO: 70 or 631.

[1173] In some aspects, the antigen binding polypeptides provided herein comprise a VH2 comprising a CDR1 having an amino acid sequence at least 65%, at least 70%, at least 75%, at least 80%, at least 85%, at least 90%, at least 95%, at least 99%, or 100% identical to SEQ ID NO: 155 or 1047, a CDR2 having an amino acid sequence at least 65%, at least 70%, at least 75%, at least 80%, at least 85%, at least 90%, at least 95%, at least 99%, or 100% identical to SEQ ID NO: 156 or 1048, and a CDR3 having an amino acid sequence at least 65%, at least 70%, at least 75%, at least 80%, at least 85%, at least 90%, at least 95%, at least 99%, or 100% identical to SEQ ID NO: 157, 767, or 1049.

[1174] In some aspects, the antigen binding polypeptides provided herein comprise (i) a VL1 comprising a CDR1 having an amino acid sequence at least 65%, at least 70%, at least 75%, at least 80%, at least 85%, at least 90%, at least 95%, at least 99%, or 100% identical to SEQ ID NO: 65 or 627, a CDR2 having an amino acid sequence at least 65%, at least 70%, at least 75%, at least 80%, at least 85%, at least 90%, at least 95%, at least 99%, or 100% identical to SEQ ID NO: 628 or an amino acid sequence at least 65%, at least 70%, at least 75%, at least 80%, at least 85%, at least 90%, at least 95%, at least 99%, or 100% identical to amino acid sequence SDS, and a CDR3 having an amino acid sequence at least 65%, at least 70%, at least 75%, at least 80%, at least 85%, at least 90%, at least 95%, at least 99%, or 100% identical to SEQ ID NO: 66; (ii) a VL2 comprising a CDR1 having an amino acid sequence at least 65%, at least 70%, at least 75%, at least 80%, at least 85%, at least 90%, at least 95%, at least 99%, or 100% identical to SEQ ID NO: 152 or 1045, a CDR2 having an amino acid sequence at least 65%, at least 70%, at least 75%, at least 80%, at least 85%, at least 90%, at least 95%, at least 99%, or 100% identical to SEQ ID NO: 1046 or an amino acid sequence at least 65%, at least 70%, at least 75%, at least 80%, at least 85%, at least 90%, at least 95%, at least 99%, or 100% identical to amino acid sequence GAS, and a CDR3 having an amino acid sequence at least 65%, at least 70%, at least 75%, at least 80%, at least 85%, at least 90%, at least 95%, at least 99%, or 100% identical to SEQ ID NO: 153 or 766; (iii) a VH1 comprising a CDR1 having an amino acid sequence at least 65%, at least 70%, at least 75%, at least 80%, at least 85%, at least 90%, at least 95%, at least 99%, or 100% identical to SEQ ID NO: 68 or 629, a CDR2 having an amino acid sequence at least 65%, at least 70%, at least 75%, at least 80%, at least 85%, at least 90%, at least 95%, at least 99%, or 100% identical to SEQ ID NO: 69 or 630, and a CDR3 having an amino acid sequence at least 65%, at least 70%, at least 75%, at least 80%, at least 85%, at least 90%, at least 95%, at least 99%, or 100% identical to SEQ ID NO: 70 or 631; and (iv) a VH2 comprising a CDR1 having an amino acid sequence at least 65%, at least 70%, at least 75%, at least 80%, at least 85%, at least 90%, at least 95%, at least 99%, or 100% identical to SEQ ID NO: 155 or 1047, a CDR2 having an amino acid sequence at least 65%, at least 70%, at least 75%, at least 80%, at least 85%, at least 90%, at least 95%, at least 99%, or 100% identical to SEQ ID NO: 156 or 1048, and a CDR3 having an amino acid sequence at least 65%, at least 70%, at least 75%, at least 80%, at least 85%, at least 90%, at least 95%, at least 99%, or 100% identical to SEQ ID NO: 157, 767, or 1049.

[1175] In some aspects, the antigen binding polypeptides provided herein comprise a VL1 comprising an amino acid sequence that is at least 65%, at least 70%, at least 75%, at least 80%, at least 85%, at least 90%, at least 95%, at least 99%, or 100% identical to SEQ ID NO: 67.

[1176] In some aspects, the antigen binding polypeptides provided herein comprise a VL2 comprising an amino acid sequence that is at least 65%, at least 70%, at least 75%, at least 80%, at least 85%, at least 90%, at least 95%, at least 99%, or 100% identical to SEQ ID NO: 154.

[1177] In some aspects, the antigen binding polypeptides provided herein comprise a VH1 comprising an amino acid sequence that is at least 65%, at least 70%, at least 75%, at least 80%, at least 85%, at least 90%, at least 95%, at least 99%, or 100% identical to SEQ ID NO: 71 or 626.

[1178] In some aspects, the antigen binding polypeptides provided herein comprise a VH2 comprising an amino acid sequence that is at least 65%, at least 70%, at least 75%, at least 80%, at least 85%, at least 90%, at least 95%, at least 99%, or 100% identical to SEQ ID NO: 158.

[1179] In some aspects, the antigen binding polypeptides provided herein comprise (i) a VL1 comprising an amino acid sequence that is at least 65%, at least 70%, at least 75%, at least 80%, at least 85%, at least 90%, at least 95%, at least 99%, or 100% identical to SEQ ID NO: 67; (ii) a VL2 comprising an amino acid sequence that is at least 65%, at least 70%, at least 75%, at least 80%, at least 85%, at least 90%, at least 95%, at least 99%, or 100% identical to SEQ ID NO: 154; (iii) a VH1 comprising an amino acid sequence that is at least 65%, at least 70%, at least 75%, at least 80%, at least 85%, at least 90%, at least 95%, at least 99%, or 100% identical to SEQ ID NO: 71 or 626; and (iv) a VH2 comprising an amino acid sequence that is at least 65%, at least 70%, at least 75%, at least 80%, at least 85%, at least 90%, at least 95%, at least 99%, or 100% identical to SEQ ID NO: 158.

[1180] In some aspects, the antigen binding polypeptides provided herein comprise a VL1 comprising a CDR1 having an amino acid sequence at least 65%, at least 70%, at least 75%, at least 80%, at least 85%, at least 90%, at least 95%, at least 99%, or 100% identical to SEQ ID NO: 15, a CDR2 having an amino acid sequence at least 65%, at least 70%, at least 75%, at least 80%, at least 85%, at least 90%, at least 95%, at least 99%, or 100% identical to amino acid sequence LGS, and a CDR3 having an amino acid sequence at least 65%, at least 70%, at least 75%, at least 80%, at least 85%, at least 90%, at least 95%, at least 99%, or 100% identical to SEQ ID NO: 16.

[1181] In some aspects, the antigen binding polypeptides provided herein comprise a VL2 comprising a CDR1 having an amino acid sequence at least 65%, at least 70%, at least 75%, at least 80%, at least 85%, at least 90%, at least 95%, at least 99%, or 100% identical to SEQ ID NO: 65 or 627, a CDR2 having an amino acid sequence at least 65%, at least 70%, at least 75%, at least 80%, at least 85%, at least 90%, at least 95%, at least 99%, or 100% identical to SEQ ID NO: 628 or an amino acid sequence at least 65%, at least 70%, at least 75%, at least 80%, at least 85%, at least 90%, at least 95%, at least 99%, or 100% identical to amino acid sequence SDS, and a CDR3 having an amino acid sequence at least 65%, at least 70%, at least 75%, at least 80%, at least 85%, at least 90%, at least 95%, at least 99%, or 100% identical to SEQ ID NO: 66.

[1182] In some aspects, the antigen binding polypeptides provided herein comprise a VH1 comprising a CDR1 having an amino acid sequence at least 65%, at least 70%, at least 75%, at least 80%, at least 85%, at least 90%, at least 95%, at least 99%, or 100% identical to SEQ ID NO: 18, a CDR2 having an amino acid sequence at least 65%, at least 70%, at least 75%, at least 80%, at least 85%, at least 90%, at least 95%, at least 99%, or 100% identical to SEQ ID NO: 19, and a CDR3 having an amino acid sequence at least 65%, at least 70%, at least 75%, at least 80%, at least 85%, at least 90%, at least 95%, at least 99%, or 100% identical to SEQ ID NO: 20.

[1183] In some aspects, the antigen binding polypeptides provided herein comprise a VH2 comprising a CDR1 having an amino acid sequence at least 65%, at least 70%, at least 75%, at least 80%, at least 85%, at least 90%, at least 95%, at least 99%, or 100% identical to SEQ ID NO: 68 or 629, a CDR2 having an amino acid sequence at least 65%, at least 70%, at least 75%, at least 80%, at least 85%, at least 90%, at least 95%, at least 99%, or 100% identical to SEQ ID NO: 69 or 630, and a CDR3 having an amino acid sequence at least 65%, at least 70%, at least 75%, at least 80%, at least 85%, at least 90%, at least 95%, at least 99%, or 100% identical to SEQ ID NO: 70 or 631.

[1184] In some aspects, the antigen binding polypeptides provided herein comprise (i) a VL1 comprising a CDR1 having an amino acid sequence at least 65%, at least 70%, at least 75%, at least 80%, at least 85%, at least 90%, at least 95%, at least 99%, or 100% identical to SEQ ID NO: 15, a CDR2 having an amino acid sequence at least 65%, at least 70%, at least 75%, at least 80%, at least 85%, at least 90%, at least 95%, at least 99%, or 100% identical to amino acid sequence LGS, and a CDR3 having an amino acid sequence at least 65%, at least 70%, at least 75%, at least 80%, at least 85%, at least 90%, at least 95%, at least 99%, or 100% identical to SEQ ID NO: 16; (ii) a VL2 comprising a CDR1 having an amino acid sequence at least 65%, at least 70%, at least 75%, at least 80%, at least 85%, at least 90%, at least 95%, at least 99%, or 100% identical to SEQ ID NO: 65 or 627, a CDR2 having an amino acid sequence at least 65%, at least 70%, at least 75%, at least 80%, at least 85%, at least 90%, at least 95%, at least 99%, or 100% identical to SEQ ID NO: 628 or an amino acid sequence at least 65%, at least 70%, at least 75%, at least 80%, at least 85%, at least 90%, at least 95%, at least 99%, or 100% identical to amino acid sequence SDS, and a CDR3 having an amino acid sequence at least 65%, at least 70%, at least 75%, at least 80%, at least 85%, at least 90%, at least 95%, at least 99%, or 100% identical to SEQ ID NO: 66; (iii) a VH1 comprising a CDR1 having an amino acid sequence at least 65%, at least 70%, at least 75%, at least 80%, at least 85%, at least 90%, at least 95%, at least 99%, or 100% identical to SEQ ID NO: 18, a CDR2 having an amino acid sequence at least 65%, at least 70%, at least 75%, at least 80%, at least 85%, at least 90%, at least 95%, at least 99%, or 100% identical to SEQ ID NO: 19, and a CDR3 having an amino acid sequence at least 65%, at least 70%, at least 75%, at least 80%, at least 85%, at least 90%, at least 95%, at least 99%, or 100% identical to SEQ ID NO: 20; and (iv) a VH2 comprising a CDR1 having an amino acid sequence at least 65%, at least 70%, at least 75%, at least 80%, at least 85%, at least 90%, at least 95%, at least 99%, or 100% identical to SEQ ID NO: 68 or 629, a CDR2 having an amino acid sequence at least 65%, at least 70%, at least 75%, at least 80%, at least 85%, at least 90%, at least 95%, at least 99%, or 100% identical to SEQ ID NO: 69 or 630, and a CDR3 having an amino acid sequence at least 65%, at least 70%, at least 75%, at least 80%, at least 85%, at least 90%, at least 95%, at least 99%, or 100% identical to SEQ ID NO: 70 or 631.

[1185] In some aspects, the antigen binding polypeptides provided herein comprise a VL1 comprising an amino acid sequence that is at least 65%, at least 70%, at least 75%, at least 80%, at least 85%, at least 90%, at least 95%, at least 99%, or 100% identical to SEQ ID NO: 17.

[1186] In some aspects, the antigen binding polypeptides provided herein comprise a VL2 comprising an amino acid sequence that is at least 65%, at least 70%, at least 75%, at least 80%, at least 85%, at least 90%, at least 95%, at least 99%, or 100% identical to SEQ ID NO: 67.

[1187] In some aspects, the antigen binding polypeptides provided herein comprise a VH1 comprising an amino acid sequence that is at least 65%, at least 70%, at least 75%, at least 80%, at least 85%, at least 90%, at least 95%, at least 99%, or 100% identical to SEQ ID NO: 21 or 22.

[1188] In some aspects, the antigen binding polypeptides provided herein comprise a VH2 comprising an amino acid sequence that is at least 65%, at least 70%, at least 75%, at least 80%, at least 85%, at least 90%, at least 95%, at least 99%, or 100% identical to SEQ ID NO: 71 or 626.

[1189] In some aspects, the antigen binding polypeptides provided herein comprise (i) a VL1 comprising an amino acid sequence that is at least 65%, at least 70%, at least 75%, at least 80%, at least 85%, at least 90%, at least 95%, at least 99%, or 100% identical to SEQ ID NO: 17; (ii) a VL2 comprising an amino acid sequence that is at least 65%, at least 70%, at least 75%, at least 80%, at least 85%, at least 90%, at least 95%, at least 99%, or 100% identical to SEQ ID NO: 67; (iii) a VH1 comprising an amino acid sequence that is at least 65%, at least 70%, at least 75%, at least 80%, at least 85%, at least 90%, at least 95%, at least 99%, or 100% identical to SEQ ID NO: 21 or 22; and (iv) a VH2 comprising an amino acid sequence that is at least 65%, at least 70%, at least 75%, at least 80%, at least 85%, at least 90%, at least 95%, at least 99%, or 100% identical to SEQ ID NO: 71 or 626.

[1190] In some aspects, the antigen binding polypeptides provided herein comprise a VL1 comprising a CDR1 having an amino acid sequence at least 65%, at least 70%, at least 75%, at least 80%, at least 85%, at least 90%, at least 95%, at least 99%, or 100% identical to SEQ ID NO: 152 or 1045, a CDR2 having an amino acid sequence at least 65%, at least 70%, at least 75%, at least 80%, at least 85%, at least 90%, at least 95%, at least 99%, or 100% identical to SEQ ID NO: 1046 or an amino acid sequence at least 65%, at least 70%, at least 75%, at least 80%, at least 85%, at least 90%, at least 95%, at least 99%, or 100% identical to amino acid sequence GAS, and a CDR3 having an amino acid sequence at least 65%, at least 70%, at least 75%, at least 80%, at least 85%, at least 90%, at least 95%, at least 99%, or 100% identical to SEQ ID NO: 153 or 766.

[1191] In some aspects, the antigen binding polypeptides provided herein comprise a VL2 comprising a CDR1 having an amino acid sequence at least 65%, at least 70%, at least 75%, at least 80%, at least 85%, at least 90%, at least 95%, at least 99%, or 100% identical to SEQ ID NO: 65 or 627, a CDR2 having an amino acid sequence at least 65%, at least 70%, at least 75%, at least 80%, at least 85%, at least 90%, at least 95%, at least 99%, or 100% identical to SEQ ID NO: 628 or an amino acid sequence at least 65%, at least 70%, at least 75%, at least 80%, at least 85%, at least 90%, at least 95%, at least 99%, or 100% identical to amino acid sequence SDS, and a CDR3 having an amino acid sequence at least 65%, at least 70%, at least 75%, at least 80%, at least 85%, at least 90%, at least 95%, at least 99%, or 100% identical to SEQ ID NO: 66.

[1192] In some aspects, the antigen binding polypeptides provided herein comprise a VH1 comprising a CDR1 having an amino acid sequence at least 65%, at least 70%, at least 75%, at least 80%, at least 85%, at least 90%, at least 95%, at least 99%, or 100% identical to SEQ ID NO: 155 or 1047, a CDR2 having an amino acid sequence at least 65%, at least 70%, at least 75%, at least 80%, at least 85%, at least 90%, at least 95%, at least 99%, or 100% identical to SEQ ID NO: 156 or 1048, and a CDR3 having an amino acid sequence at least 65%, at least 70%, at least 75%, at least 80%, at least 85%, at least 90%, at least 95%, at least 99%, or 100% identical to SEQ ID NO: 157, 767, or 1049.

[1193] In some aspects, the antigen binding polypeptides provided herein comprise a VH2 comprising a CDR1 having an amino acid sequence at least 65%, at least 70%, at least 75%, at least 80%, at least 85%, at least 90%, at least 95%, at least 99%, or 100% identical to SEQ ID NO: 68 or 629, a CDR2 having an amino acid sequence at least 65%, at least 70%, at least 75%, at least 80%, at least 85%, at least 90%, at least 95%, at least 99%, or 100% identical to SEQ ID NO: 69 or 630, and a CDR3 having an amino acid sequence at least 65%, at least 70%, at least 75%, at least 80%, at least 85%, at least 90%, at least 95%, at least 99%, or 100% identical to SEQ ID NO: 70 or 631.

[1194] In some aspects, the antigen binding polypeptides provided herein comprise (i) a VL1 comprising a CDR1 having an amino acid sequence at least 65%, at least 70%, at least 75%, at least 80%, at least 85%, at least 90%, at least 95%, at least 99%, or 100% identical to SEQ ID NO: 152 or 1045, a CDR2 having an amino acid sequence at least 65%, at least 70%, at least 75%, at least 80%, at least 85%, at least 90%, at least 95%, at least 99%, or 100% identical to SEQ ID NO: 1046 or an amino acid sequence at least 65%, at least 70%, at least 75%, at least 80%, at least 85%, at least 90%, at least 95%, at least 99%, or 100% identical to amino acid sequence GAS, and a CDR3 having an amino acid sequence at least 65%, at least 70%, at least 75%, at least 80%, at least 85%, at least 90%, at least 95%, at least 99%, or 100% identical to SEQ ID NO: 153 or 766; (ii) a VL2 comprising a CDR1 having an amino acid sequence at least 65%, at least 70%, at least 75%, at least 80%, at least 85%, at least 90%, at least 95%, at least 99%, or 100% identical to SEQ ID NO: 65 or 627, a CDR2 having an amino acid sequence at least 65%, at least 70%, at least 75%, at least 80%, at least 85%, at least 90%, at least 95%, at least 99%, or 100% identical to SEQ ID NO: 628 or an amino acid sequence at least 65%, at least 70%, at least 75%, at least 80%, at least 85%, at least 90%, at least 95%, at least 99%, or 100% identical to amino acid sequence SDS, and a CDR3 having an amino acid sequence at least 65%, at least 70%, at least 75%, at least 80%, at least 85%, at least 90%, at least 95%, at least 99%, or 100% identical to SEQ ID NO: 66; (iii) a VH1 comprising a CDR1 having an amino acid sequence at least 65%, at least 70%, at least 75%, at least 80%, at least 85%, at least 90%, at least 95%, at least 99%, or 100% identical to SEQ ID NO: 155 or 1047, a CDR2 having an amino acid sequence at least 65%, at least 70%, at least 75%, at least 80%, at least 85%, at least 90%, at least 95%, at least 99%, or 100% identical to SEQ ID NO: 156 or 1048, and a CDR3 having an amino acid sequence at least 65%, at least 70%, at least 75%, at least 80%, at least 85%, at least 90%, at least 95%, at least 99%, or 100% identical to SEQ ID NO: 157, 767, or 1049; and (iv) a VH2 comprising a CDR1 having an amino acid sequence at least 65%, at least 70%, at least 75%, at least 80%, at least 85%, at least 90%, at least 95%, at least 99%, or 100% identical to SEQ ID NO: 68 or 629, a CDR2 having an amino acid sequence at least 65%, at least 70%, at least 75%, at least 80%, at least 85%, at least 90%, at least 95%, at least 99%, or 100% identical to SEQ ID NO: 69 or 630, and a CDR3 having an amino acid sequence at least 65%, at least 70%, at least 75%, at least 80%, at least 85%, at least 90%, at least 95%, at least 99%, or 100% identical to SEQ ID NO: 70 or 631.

[1195] In some aspects, the antigen binding polypeptides provided herein comprise a VL1 comprising an amino acid sequence that is at least 65%, at least 70%, at least 75%, at least 80%, at least 85%, at least 90%, at least 95%, at least 99%, or 100% identical to SEQ ID NO: 154.

[1196] In some aspects, the antigen binding polypeptides provided herein comprise a VL2 comprising an amino acid sequence that is at least 65%, at least 70%, at least 75%, at least 80%, at least 85%, at least 90%, at least 95%, at least 99%, or 100% identical to SEQ ID NO: 67.

[1197] In some aspects, the antigen binding polypeptides provided herein comprise a VH1 comprising an amino acid sequence that is at least 65%, at least 70%, at least 75%, at least 80%, at least 85%, at least 90%, at least 95%, at least 99%, or 100% identical to SEQ ID NO: 158.

[1198] In some aspects, the antigen binding polypeptides provided herein comprise a VH2 comprising an amino acid sequence that is at least 65%, at least 70%, at least 75%, at least 80%, at least 85%, at least 90%, at least 95%, at least 99%, or 100% identical to SEQ ID NO: 71 or 626.

[1199] In some aspects, the antigen binding polypeptides provided herein comprise (i) a VL1 comprising an amino acid sequence that is at least 65%, at least 70%, at least 75%, at least 80%, at least 85%, at least 90%, at least 95%, at least 99%, or 100% identical to SEQ ID NO: 154; (ii) a VL2 comprising an amino acid sequence that is at least 65%, at least 70%, at least 75%, at least 80%, at least 85%, at least 90%, at least 95%, at least 99%, or 100% identical to SEQ ID NO: 67; (iii) a VH1 comprising an amino acid sequence that is at least 65%, at least 70%, at least 75%, at least 80%, at least 85%, at least 90%, at least 95%, at least 99%, or 100% identical to SEQ ID NO: 158; and (iv) a VH2 comprising an amino acid sequence that is at least 65%, at least 70%, at least 75%, at least 80%, at least 85%, at least 90%, at least 95%, at least 99%, or 100% identical to SEQ ID NO: 71 or 626.

[1200] In some aspects, the antigen binding polypeptides provided herein comprise a VL1 comprising a CDR1 having an amino acid sequence at least 65%, at least 70%, at least 75%, at least 80%, at least 85%, at least 90%, at least 95%, at least 99%, or 100% identical to SEQ ID NO: 15, a CDR2 having an amino acid sequence at least 65%, at least 70%, at least 75%, at least 80%, at least 85%, at least 90%, at least 95%, at least 99%, or 100% identical to amino acid sequence LGS, and a CDR3 having an amino acid sequence at least 65%, at least 70%, at least 75%, at least 80%, at least 85%, at least 90%, at least 95%, at least 99%, or 100% identical to SEQ ID NO: 16.

[1201] In some aspects, the antigen binding polypeptides provided herein comprise a VL2 comprising a CDR1 having an amino acid sequence at least 65%, at least 70%, at least 75%, at least 80%, at least 85%, at least 90%, at least 95%, at least 99%, or 100% identical to SEQ ID NO: 145 or 1050, a CDR2 having an amino acid sequence at least 65%, at least 70%, at least 75%, at least 80%, at least 85%, at least 90%, at least 95%, at least 99%, or 100% identical to SEQ ID NO: 1051 or an amino acid sequence at least 65%, at least 70%, at least 75%, at least 80%, at least 85%, at least 90%, at least 95%, at least 99%, or 100% identical to amino acid sequence AAS, and a CDR3 having an amino acid sequence at least 65%, at least 70%, at least 75%, at least 80%, at least 85%, at least 90%, at least 95%, at least 99%, or 100% identical to SEQ ID NO: 146 or 764.

[1202] In some aspects, the antigen binding polypeptides provided herein comprise a VH1 comprising a CDR1 having an amino acid sequence at least 65%, at least 70%, at least 75%, at least 80%, at least 85%, at least 90%, at least 95%, at least 99%, or 100% identical to SEQ ID NO: 18, a CDR2 having an amino acid sequence at least 65%, at least 70%, at least 75%, at least 80%, at least 85%, at least 90%, at least 95%, at least 99%, or 100% identical to SEQ ID NO: 19, and a CDR3 having an amino acid sequence at least 65%, at least 70%, at least 75%, at least 80%, at least 85%, at least 90%, at least 95%, at least 99%, or 100% identical to SEQ ID NO: 20.

[1203] In some aspects, the antigen binding polypeptides provided herein comprise a VH2 comprising a CDR1 having an amino acid sequence at least 65%, at least 70%, at least 75%, at least 80%, at least 85%, at least 90%, at least 95%, at least 99%, or 100% identical to SEQ ID NO: 148 or 1052, a CDR2 having an amino acid sequence at least 65%, at least 70%, at least 75%, at least 80%, at least 85%, at least 90%, at least 95%, at least 99%, or 100% identical to SEQ ID NO: 149 or 1053, and a CDR3 having an amino acid sequence at least 65%, at least 70%, at least 75%, at least 80%, at least 85%, at least 90%, at least 95%, at least 99%, or 100% identical to SEQ ID NO: 150, 765, or 1054.

[1204] In some aspects, the antigen binding polypeptides provided herein comprise (i) a VL1 comprising a CDR1 having an amino acid sequence at least 65%, at least 70%, at least 75%, at least 80%, at least 85%, at least 90%, at least 95%, at least 99%, or 100% identical to SEQ ID NO: 15, a CDR2 having an amino acid sequence at least 65%, at least 70%, at least 75%, at least 80%, at least 85%, at least 90%, at least 95%, at least 99%, or 100% identical to amino acid sequence LGS, and a CDR3 having an amino acid sequence at least 65%, at least 70%, at least 75%, at least 80%, at least 85%, at least 90%, at least 95%, at least 99%, or 100% identical to SEQ ID NO: 16; (ii) a VL2 comprising a CDR1 having an amino acid sequence at least 65%, at least 70%, at least 75%, at least 80%, at least 85%, at least 90%, at least 95%, at least 99%, or 100% identical to SEQ ID NO: 145 or 1050, a CDR2 having an amino acid sequence at least 65%, at least 70%, at least 75%, at least 80%, at least 85%, at least 90%, at least 95%, at least 99%, or 100% identical to SEQ ID NO: 1051 or an amino acid sequence at least 65%, at least 70%, at least 75%, at least 80%, at least 85%, at least 90%, at least 95%, at least 99%, or 100% identical to amino acid sequence AAS, and a CDR3 having an amino acid sequence at least 65%, at least 70%, at least 75%, at least 80%, at least 85%, at least 90%, at least 95%, at least 99%, or 100% identical to SEQ ID NO: 146 or 764; (iii) a VH1 comprising a CDR1 having an amino acid sequence at least 65%, at least 70%, at least 75%, at least 80%, at least 85%, at least 90%, at least 95%, at least 99%, or 100% identical to SEQ ID NO: 18, a CDR2 having an amino acid sequence at least 65%, at least 70%, at least 75%, at least 80%, at least 85%, at least 90%, at least 95%, at least 99%, or 100% identical to SEQ ID NO: 19, and a CDR3 having an amino acid sequence at least 65%, at least 70%, at least 75%, at least 80%, at least 85%, at least 90%, at least 95%, at least 99%, or 100% identical to SEQ ID NO: 20; and (iv) a VH2 comprising a CDR1 having an amino acid sequence at least 65%, at least 70%, at least 75%, at least 80%, at least 85%, at least 90%, at least 95%, at least 99%, or 100% identical to SEQ ID NO: 148 or 1052, a CDR2 having an amino acid sequence at least 65%, at least 70%, at least 75%, at least 80%, at least 85%, at least 90%, at least 95%, at least 99%, or 100% identical to SEQ ID NO: 149 or 1053, and a CDR3 having an amino acid sequence at least 65%, at least 70%, at least 75%, at least 80%, at least 85%, at least 90%, at least 95%, at least 99%, or 100% identical to SEQ ID NO: 150, 765, or 1054.

[1205] In some aspects, the antigen binding polypeptides provided herein comprise a VL1 comprising an amino acid sequence that is at least 65%, at least 70%, at least 75%, at least 80%, at least 85%, at least 90%, at least 95%, at least 99%, or 100% identical to SEQ ID NO: 17.

[1206] In some aspects, the antigen binding polypeptides provided herein comprise a VL2 comprising an amino acid sequence that is at least 65%, at least 70%, at least 75%, at least 80%, at least 85%, at least 90%, at least 95%, at least 99%, or 100% identical to SEQ ID NO: 147.

[1207] In some aspects, the antigen binding polypeptides provided herein comprise a VH1 comprising an amino acid sequence that is at least 65%, at least 70%, at least 75%, at least 80%, at least 85%, at least 90%, at least 95%, at least 99%, or 100% identical to SEQ ID NO: 21 or 22.

[1208] In some aspects, the antigen binding polypeptides provided herein comprise a VH2 comprising an amino acid sequence that is at least 65%, at least 70%, at least 75%, at least 80%, at least 85%, at least 90%, at least 95%, at least 99%, or 100% identical to SEQ ID NO: 151.

[1209] In some aspects, the antigen binding polypeptides provided herein comprise (i) a VL1 comprising an amino acid sequence that is at least 65%, at least 70%, at least 75%, at least 80%, at least 85%, at least 90%, at least 95%, at least 99%, or 100% identical to SEQ ID NO: 17; (ii) a VL2 comprising an amino acid sequence that is at least 65%, at least 70%, at least 75%, at least 80%, at least 85%, at least 90%, at least 95%, at least 99%, or 100% identical to SEQ ID NO: 147; (iii) a VH1 comprising an amino acid sequence that is at least 65%, at least 70%, at least 75%, at least 80%, at least 85%, at least 90%, at least 95%, at least 99%, or 100% identical to SEQ ID NO: 21 or 22; and (iv) a VH2 comprising an amino acid sequence that is at least 65%, at least 70%, at least 75%, at least 80%, at least 85%, at least 90%, at least 95%, at least 99%, or 100% identical to SEQ ID NO: 151.

[1210] In some aspects, the antigen binding polypeptides provided herein comprise a VL1 comprising a CDR1 having an amino acid sequence at least 65%, at least 70%, at least 75%, at least 80%, at least 85%, at least 90%, at least 95%, at least 99%, or 100% identical to SEQ ID NO: 65 or 627, a CDR2 having an amino acid sequence at least 65%, at least 70%, at least 75%, at least 80%, at least 85%, at least 90%, at least 95%, at least 99%, or 100% identical to SEQ ID NO: 628 or an amino acid sequence at least 65%, at least 70%, at least 75%, at least 80%, at least 85%, at least 90%, at least 95%, at least 99%, or 100% identical to amino acid sequence SDS, and a CDR3 having an amino acid sequence at least 65%, at least 70%, at least 75%, at least 80%, at least 85%, at least 90%, at least 95%, at least 99%, or 100% identical to SEQ ID NO: 66.

[1211] In some aspects, the antigen binding polypeptides provided herein comprise a VL2 comprising a CDR1 having an amino acid sequence at least 65%, at least 70%, at least 75%, at least 80%, at least 85%, at least 90%, at least 95%, at least 99%, or 100% identical to SEQ ID NO: 145 or 1050, a CDR2 having an amino acid sequence at least 65%, at least 70%, at least 75%, at least 80%, at least 85%, at least 90%, at least 95%, at least 99%, or 100% identical to SEQ ID NO: 1051 or an amino acid sequence at least 65%, at least 70%, at least 75%, at least 80%, at least 85%, at least 90%, at least 95%, at least 99%, or 100% identical to amino acid sequence AAS, and a CDR3 having an amino acid sequence at least 65%, at least 70%, at least 75%, at least 80%, at least 85%, at least 90%, at least 95%, at least 99%, or 100% identical to SEQ ID NO: 146 or 764.

[1212] In some aspects, the antigen binding polypeptides provided herein comprise a VH1 comprising a CDR1 having an amino acid sequence at least 65%, at least 70%, at least 75%, at least 80%, at least 85%, at least 90%, at least 95%, at least 99%, or 100% identical to SEQ ID NO: 68 or 629, a CDR2 having an amino acid sequence at least 65%, at least 70%, at least 75%, at least 80%, at least 85%, at least 90%, at least 95%, at least 99%, or 100% identical to SEQ ID NO: 69 or 630, and a CDR3 having an amino acid sequence at least 65%, at least 70%, at least 75%, at least 80%, at least 85%, at least 90%, at least 95%, at least 99%, or 100% identical to SEQ ID NO: 70 or 631.

[1213] In some aspects, the antigen binding polypeptides provided herein comprise a VH2 comprising a CDR1 having an amino acid sequence at least 65%, at least 70%, at least 75%, at least 80%, at least 85%, at least 90%, at least 95%, at least 99%, or 100% identical to SEQ ID NO: 148 or 1052, a CDR2 having an amino acid sequence at least 65%, at least 70%, at least 75%, at least 80%, at least 85%, at least 90%, at least 95%, at least 99%, or 100% identical to SEQ ID NO: 149 or 1053, and a CDR3 having an amino acid sequence at least 65%, at least 70%, at least 75%, at least 80%, at least 85%, at least 90%, at least 95%, at least 99%, or 100% identical to SEQ ID NO: 150, 765, or 1054.

[1214] In some aspects, the antigen binding polypeptides provided herein comprise (i) a VL1 comprising a CDR1 having an amino acid sequence at least 65%, at least 70%, at least 75%, at least 80%, at least 85%, at least 90%, at least 95%, at least 99%, or 100% identical to SEQ ID NO: 65 or 627, a CDR2 having an amino acid sequence at least 65%, at least 70%, at least 75%, at least 80%, at least 85%, at least 90%, at least 95%, at least 99%, or 100% identical to SEQ ID NO: 628 or an amino acid sequence at least 65%, at least 70%, at least 75%, at least 80%, at least 85%, at least 90%, at least 95%, at least 99%, or 100% identical to amino acid sequence SDS, and a CDR3 having an amino acid sequence at least 65%, at least 70%, at least 75%, at least 80%, at least 85%, at least 90%, at least 95%, at least 99%, or 100% identical to SEQ ID NO: 66; (ii) a VL2 comprising a CDR1 having an amino acid sequence at least 65%, at least 70%, at least 75%, at least 80%, at least 85%, at least 90%, at least 95%, at least 99%, or 100% identical to SEQ ID NO: 145 or 1050, a CDR2 having an amino acid sequence at least 65%, at least 70%, at least 75%, at least 80%, at least 85%, at least 90%, at least 95%, at least 99%, or 100% identical to SEQ ID NO: 1051 or an amino acid sequence at least 65%, at least 70%, at least 75%, at least 80%, at least 85%, at least 90%, at least 95%, at least 99%, or 100% identical to amino acid sequence AAS, and a CDR3 having an amino acid sequence at least 65%, at least 70%, at least 75%, at least 80%, at least 85%, at least 90%, at least 95%, at least 99%, or 100% identical to SEQ ID NO: 146 or 764; (iii) a VH1 comprising a CDR1 having an amino acid sequence at least 65%, at least 70%, at least 75%, at least 80%, at least 85%, at least 90%, at least 95%, at least 99%, or 100% identical to SEQ ID NO: 68 or 629, a CDR2 having an amino acid sequence at least 65%, at least 70%, at least 75%, at least 80%, at least 85%, at least 90%, at least 95%, at least 99%, or 100% identical to SEQ ID NO: 69 or 630, and a CDR3 having an amino acid sequence at least 65%, at least 70%, at least 75%, at least 80%, at least 85%, at least 90%, at least 95%, at least 99%, or 100% identical to SEQ ID NO: 70 or 631; and (iv) a VH2 comprising a CDR1 having an amino acid sequence at least 65%, at least 70%, at least 75%, at least 80%, at least 85%, at least 90%, at least 95%, at least 99%, or 100% identical to SEQ ID NO: 148 or 1052, a CDR2 having an amino acid sequence at least 65%, at least 70%, at least 75%, at least 80%, at least 85%, at least 90%, at least 95%, at least 99%, or 100% identical to SEQ ID NO: 149 or 1053, and a CDR3 having an amino acid sequence at least 65%, at least 70%, at least 75%, at least 80%, at least 85%, at least 90%, at least 95%, at least 99%, or 100% identical to SEQ ID NO: 150, 765, or 1054.

[1215] In some aspects, the antigen binding polypeptides provided herein comprise a VL1 comprising an amino acid sequence that is at least 65%, at least 70%, at least 75%, at least 80%, at least 85%, at least 90%, at least 95%, at least 99%, or 100% identical to SEQ ID NO: 67.

[1216] In some aspects, the antigen binding polypeptides provided herein comprise a VL2 comprising an amino acid sequence that is at least 65%, at least 70%, at least 75%, at least 80%, at least 85%, at least 90%, at least 95%, at least 99%, or 100% identical to SEQ ID NO: 147.

[1217] In some aspects, the antigen binding polypeptides provided herein comprise a VH1 comprising an amino acid sequence that is at least 65%, at least 70%, at least 75%, at least 80%, at least 85%, at least 90%, at least 95%, at least 99%, or 100% identical to SEQ ID NO: 71 or 626.

[1218] In some aspects, the antigen binding polypeptides provided herein comprise a VH2 comprising an amino acid sequence that is at least 65%, at least 70%, at least 75%, at least 80%, at least 85%, at least 90%, at least 95%, at least 99%, or 100% identical to SEQ ID NO: 151.

[1219] In some aspects, the antigen binding polypeptides provided herein comprise (i) a VL1 comprising an amino acid sequence that is at least 65%, at least 70%, at least 75%, at least 80%, at least 85%, at least 90%, at least 95%, at least 99%, or 100% identical to SEQ ID NO: 67; (ii) a VL2 comprising an amino acid sequence that is at least 65%, at least 70%, at least 75%, at least 80%, at least 85%, at least 90%, at least 95%, at least 99%, or 100% identical to SEQ ID NO: 147; (iii) a VH1 comprising an amino acid sequence that is at least 65%, at least 70%, at least 75%, at least 80%, at least 85%, at least 90%, at least 95%, at least 99%, or 100% identical to SEQ ID NO: 71 or 626; and (iv) a VH2 comprising an amino acid sequence that is at least 65%, at least 70%, at least 75%, at least 80%, at least 85%, at least 90%, at least 95%, at least 99%, or 100% identical to SEQ ID NO: 151.

[1220] In some aspects, the antigen binding polypeptides provided herein comprise a VL1 comprising a CDR1 having an amino acid sequence at least 65%, at least 70%, at least 75%, at least 80%, at least 85%, at least 90%, at least 95%, at least 99%, or 100% identical to SEQ ID NO: 145 or 1050, a CDR2 having an amino acid sequence at least 65%, at least 70%, at least 75%, at least 80%, at least 85%, at least 90%, at least 95%, at least 99%, or 100% identical to SEQ ID NO: 1051 or an amino acid sequence at least 65%, at least 70%, at least 75%, at least 80%, at least 85%, at least 90%, at least 95%, at least 99%, or 100% identical to amino acid sequence AAS, and a CDR3 having an amino acid sequence at least 65%, at least 70%, at least 75%, at least 80%, at least 85%, at least 90%, at least 95%, at least 99%, or 100% identical to SEQ ID NO: 146 or 764.

[1221] In some aspects, the antigen binding polypeptides provided herein comprise a VL2 comprising a CDR1 having an amino acid sequence at least 65%, at least 70%, at least 75%, at least 80%, at least 85%, at least 90%, at least 95%, at least 99%, or 100% identical to SEQ ID NO: 152 or 1045, a CDR2 having an amino acid sequence at least 65%, at least 70%, at least 75%, at least 80%, at least 85%, at least 90%, at least 95%, at least 99%, or 100% identical to SEQ ID NO: 1046 or an amino acid sequence at least 65%, at least 70%, at least 75%, at least 80%, at least 85%, at least 90%, at least 95%, at least 99%, or 100% identical to amino acid sequence GAS, and a CDR3 having an amino acid sequence at least 65%, at least 70%, at least 75%, at least 80%, at least 85%, at least 90%, at least 95%, at least 99%, or 100% identical to SEQ ID NO: 153 or 766.

[1222] In some aspects, the antigen binding polypeptides provided herein comprise a VH1 comprising a CDR1 having an amino acid sequence at least 65%, at least 70%, at least 75%, at least 80%, at least 85%, at least 90%, at least 95%, at least 99%, or 100% identical to SEQ ID NO: 148 or 1052, a CDR2 having an amino acid sequence at least 65%, at least 70%, at least 75%, at least 80%, at least 85%, at least 90%, at least 95%, at least 99%, or 100% identical to SEQ ID NO: 149 or 1053, and a CDR3 having an amino acid sequence at least 65%, at least 70%, at least 75%, at least 80%, at least 85%, at least 90%, at least 95%, at least 99%, or 100% identical to SEQ ID NO: 150, 765, or 1054.

[1223] In some aspects, the antigen binding polypeptides provided herein comprise a VH2 comprising a CDR1 having an amino acid sequence at least 65%, at least 70%, at least 75%, at least 80%, at least 85%, at least 90%, at least 95%, at least 99%, or 100% identical to SEQ ID NO: 155 or 1047, a CDR2 having an amino acid sequence at least 65%, at least 70%, at least 75%, at least 80%, at least 85%, at least 90%, at least 95%, at least 99%, or 100% identical to SEQ ID NO: 156 or 1048, and a CDR3 having an amino acid sequence at least 65%, at least 70%, at least 75%, at least 80%, at least 85%, at least 90%, at least 95%, at least 99%, or 100% identical to SEQ ID NO: 157, 767, or 1049.

[1224] In some aspects, the antigen binding polypeptides provided herein comprise (i) a VL1 comprising a CDR1 having an amino acid sequence at least 65%, at least 70%, at least 75%, at least 80%, at least 85%, at least 90%, at least 95%, at least 99%, or 100% identical to SEQ ID NO: 145 or 1050, a CDR2 having an amino acid sequence at least 65%, at least 70%, at least 75%, at least 80%, at least 85%, at least 90%, at least 95%, at least 99%, or 100% identical to SEQ ID NO: 1051 or an amino acid sequence at least 65%, at least 70%, at least 75%, at least 80%, at least 85%, at least 90%, at least 95%, at least 99%, or 100% identical to amino acid sequence AAS, and a CDR3 having an amino acid sequence at least 65%, at least 70%, at least 75%, at least 80%, at least 85%, at least 90%, at least 95%, at least 99%, or 100% identical to SEQ ID NO: 146 or 764; (ii) a VL2 comprising a CDR1 having an amino acid sequence at least 65%, at least 70%, at least 75%, at least 80%, at least 85%, at least 90%, at least 95%, at least 99%, or 100% identical to SEQ ID NO: 152 or 1045, a CDR2 having an amino acid sequence at least 65%, at least 70%, at least 75%, at least 80%, at least 85%, at least 90%, at least 95%, at least 99%, or 100% identical to SEQ ID NO: 1046 or an amino acid sequence at least 65%, at least 70%, at least 75%, at least 80%, at least 85%, at least 90%, at least 95%, at least 99%, or 100% identical to amino acid sequence GAS, and a CDR3 having an amino acid sequence at least 65%, at least 70%, at least 75%, at least 80%, at least 85%, at least 90%, at least 95%, at least 99%, or 100% identical to SEQ ID NO: 153 or 766; (iii) a VH1 comprising a CDR1 having an amino acid sequence at least 65%, at least 70%, at least 75%, at least 80%, at least 85%, at least 90%, at least 95%, at least 99%, or 100% identical to SEQ ID NO: 148 or 1052, a CDR2 having an amino acid sequence at least 65%, at least 70%, at least 75%, at least 80%, at least 85%, at least 90%, at least 95%, at least 99%, or 100% identical to SEQ ID NO: 149 or 1053, and a CDR3 having an amino acid sequence at least 65%, at least 70%, at least 75%, at least 80%, at least 85%, at least 90%, at least 95%, at least 99%, or 100% identical to SEQ ID NO: 150, 765, or 1054; and (iv) a VH2 comprising a CDR1 having an amino acid sequence at least 65%, at least 70%, at least 75%, at least 80%, at least 85%, at least 90%, at least 95%, at least 99%, or 100% identical to SEQ ID NO: 155 or 1047, a CDR2 having an amino acid sequence at least 65%, at least 70%, at least 75%, at least 80%, at least 85%, at least 90%, at least 95%, at least 99%, or 100% identical to SEQ ID NO: 156 or 1048, and a CDR3 having an amino acid sequence at least 65%, at least 70%, at least 75%, at least 80%, at least 85%, at least 90%, at least 95%, at least 99%, or 100% identical to SEQ ID NO: 157, 767, or 1049.

[1225] In some aspects, the antigen binding polypeptides provided herein comprise a VL1 comprising an amino acid sequence that is at least 65%, at least 70%, at least 75%, at least 80%, at least 85%, at least 90%, at least 95%, at least 99%, or 100% identical to SEQ ID NO: 147.

[1226] In some aspects, the antigen binding polypeptides provided herein comprise a VL2 comprising an amino acid sequence that is at least 65%, at least 70%, at least 75%, at least 80%, at least 85%, at least 90%, at least 95%, at least 99%, or 100% identical to SEQ ID NO: 154.

[1227] In some aspects, the antigen binding polypeptides provided herein comprise a VH1 comprising an amino acid sequence that is at least 65%, at least 70%, at least 75%, at least 80%, at least 85%, at least 90%, at least 95%, at least 99%, or 100% identical to SEQ ID NO: 151.

[1228] In some aspects, the antigen binding polypeptides provided herein comprise a VH2 comprising an amino acid sequence that is at least 65%, at least 70%, at least 75%, at least 80%, at least 85%, at least 90%, at least 95%, at least 99%, or 100% identical to SEQ ID NO: 158.

[1229] In some aspects, the antigen binding polypeptides provided herein comprise (i) a VL1 comprising an amino acid sequence that is at least 65%, at least 70%, at least 75%, at least 80%, at least 85%, at least 90%, at least 95%, at least 99%, or 100% identical to SEQ ID NO: 147; (ii) a VL2 comprising an amino acid sequence that is at least 65%, at least 70%, at least 75%, at least 80%, at least 85%, at least 90%, at least 95%, at least 99%, or 100% identical to SEQ ID NO: 154; (iii) a VH1 comprising an amino acid sequence that is at least 65%, at least 70%, at least 75%, at least 80%, at least 85%, at least 90%, at least 95%, at least 99%, or 100% identical to SEQ ID NO: 151; and (iv) a VH2 comprising an amino acid sequence that is at least 65%, at least 70%, at least 75%, at least 80%, at least 85%, at least 90%, at least 95%, at least 99%, or 100% identical to SEQ ID NO: 158.

[1230] In some aspects, the antigen binding polypeptides provided herein comprise a VL1 comprising a CDR1 having an amino acid sequence at least 65%, at least 70%, at least 75%, at least 80%, at least 85%, at least 90%, at least 95%, at least 99%, or 100% identical to SEQ ID NO: 172 or 1060, a CDR2 having an amino acid sequence at least 65%, at least 70%, at least 75%, at least 80%, at least 85%, at least 90%, at least 95%, at least 99%, or 100% identical to SEQ ID NO: 1061 or an amino acid sequence at least 65%, at least 70%, at least 75%, at least 80%, at least 85%, at least 90%, at least 95%, at least 99%, or 100% identical to amino acid sequence DAS, and a CDR3 having an amino acid sequence at least 65%, at least 70%, at least 75%, at least 80%, at least 85%, at least 90%, at least 95%, at least 99%, or 100% identical to SEQ ID NO: 173 or 792.

[1231] In some aspects, the antigen binding polypeptides provided herein comprise a VL2 comprising a CDR1 having an amino acid sequence at least 65%, at least 70%, at least 75%, at least 80%, at least 85%, at least 90%, at least 95%, at least 99%, or 100% identical to SEQ ID NO: 145 or 1050, a CDR2 having an amino acid sequence at least 65%, at least 70%, at least 75%, at least 80%, at least 85%, at least 90%, at least 95%, at least 99%, or 100% identical to SEQ ID NO: 1051 or an amino acid sequence at least 65%, at least 70%, at least 75%, at least 80%, at least 85%, at least 90%, at least 95%, at least 99%, or 100% identical to amino acid sequence AAS, and a CDR3 having an amino acid sequence at least 65%, at least 70%, at least 75%, at least 80%, at least 85%, at least 90%, at least 95%, at least 99%, or 100% identical to SEQ ID NO: 146 or 764.

[1232] In some aspects, the antigen binding polypeptides provided herein comprise a VH1 comprising a CDR1 having an amino acid sequence at least 65%, at least 70%, at least 75%, at least 80%, at least 85%, at least 90%, at least 95%, at least 99%, or 100% identical to SEQ ID NO: 175 or 1062, a CDR2 having an amino acid sequence at least 65%, at least 70%, at least 75%, at least 80%, at least 85%, at least 90%, at least 95%, at least 99%, or 100% identical to SEQ ID NO: 176 or 1063, and a CDR3 having an amino acid sequence at least 65%, at least 70%, at least 75%, at least 80%, at least 85%, at least 90%, at least 95%, at least 99%, or 100% identical to SEQ ID NO: 177, 793, or 1064.

[1233] In some aspects, the antigen binding polypeptides provided herein comprise a VH2 comprising a CDR1 having an amino acid sequence at least 65%, at least 70%, at least 75%, at least 80%, at least 85%, at least 90%, at least 95%, at least 99%, or 100% identical to SEQ ID NO: 148 or 1052, a CDR2 having an amino acid sequence at least 65%, at least 70%, at least 75%, at least 80%, at least 85%, at least 90%, at least 95%, at least 99%, or 100% identical to SEQ ID NO: 149 or 1053, and a CDR3 having an amino acid sequence at least 65%, at least 70%, at least 75%, at least 80%, at least 85%, at least 90%, at least 95%, at least 99%, or 100% identical to SEQ ID NO: 150, 765, or 1054.

[1234] In some aspects, the antigen binding polypeptides provided herein comprise (i) a VL1 comprising a CDR1 having an amino acid sequence at least 65%, at least 70%, at least 75%, at least 80%, at least 85%, at least 90%, at least 95%, at least 99%, or 100% identical to SEQ ID NO: 172 or 1060, a CDR2 having an amino acid sequence at least 65%, at least 70%, at least 75%, at least 80%, at least 85%, at least 90%, at least 95%, at least 99%, or 100% identical to SEQ ID NO: 1061 or an amino acid sequence at least 65%, at least 70%, at least 75%, at least 80%, at least 85%, at least 90%, at least 95%, at least 99%, or 100% identical to amino acid sequence DAS, and a CDR3 having an amino acid sequence at least 65%, at least 70%, at least 75%, at least 80%, at least 85%, at least 90%, at least 95%, at least 99%, or 100% identical to SEQ ID NO: 173 or 792; (ii) a VL2 comprising a CDR1 having an amino acid sequence at least 65%, at least 70%, at least 75%, at least 80%, at least 85%, at least 90%, at least 95%, at least 99%, or 100% identical to SEQ ID NO: 145 or 1050, a CDR2 having an amino acid sequence at least 65%, at least 70%, at least 75%, at least 80%, at least 85%, at least 90%, at least 95%, at least 99%, or 100% identical to SEQ ID NO: 1051 or an amino acid sequence at least 65%, at least 70%, at least 75%, at least 80%, at least 85%, at least 90%, at least 95%, at least 99%, or 100% identical to amino acid sequence AAS, and a CDR3 having an amino acid sequence at least 65%, at least 70%, at least 75%, at least 80%, at least 85%, at least 90%, at least 95%, at least 99%, or 100% identical to SEQ ID NO: 146 or 764; (iii) a VH1 comprising a CDR1 having an amino acid sequence at least 65%, at least 70%, at least 75%, at least 80%, at least 85%, at least 90%, at least 95%, at least 99%, or 100% identical to SEQ ID NO: 175 or 1062, a CDR2 having an amino acid sequence at least 65%, at least 70%, at least 75%, at least 80%, at least 85%, at least 90%, at least 95%, at least 99%, or 100% identical to SEQ ID NO: 176 or 1063, and a CDR3 having an amino acid sequence at least 65%, at least 70%, at least 75%, at least 80%, at least 85%, at least 90%, at least 95%, at least 99%, or 100% identical to SEQ ID NO: 177, 793, or 1064; and (iv) a VH2 comprising a CDR1 having an amino acid sequence at least 65%, at least 70%, at least 75%, at least 80%, at least 85%, at least 90%, at least 95%, at least 99%, or 100% identical to SEQ ID NO: 148 or 1052, a CDR2 having an amino acid sequence at least 65%, at least 70%, at least 75%, at least 80%, at least 85%, at least 90%, at least 95%, at least 99%, or 100% identical to SEQ ID NO: 149 or 1053, and a CDR3 having an amino acid sequence at least 65%, at least 70%, at least 75%, at least 80%, at least 85%, at least 90%, at least 95%, at least 99%, or 100% identical to SEQ ID NO: 150, 765, or 1054.

[1235] In some aspects, the antigen binding polypeptides provided herein comprise a VL1 comprising an amino acid sequence that is at least 65%, at least 70%, at least 75%, at least 80%, at least 85%, at least 90%, at least 95%, at least 99%, or 100% identical to SEQ ID NO: 174.

[1236] In some aspects, the antigen binding polypeptides provided herein comprise a VL2 comprising an amino acid sequence that is at least 65%, at least 70%, at least 75%, at least 80%, at least 85%, at least 90%, at least 95%, at least 99%, or 100% identical to SEQ ID NO: 147.

[1237] In some aspects, the antigen binding polypeptides provided herein comprise a VH1 comprising an amino acid sequence that is at least 65%, at least 70%, at least 75%, at least 80%, at least 85%, at least 90%, at least 95%, at least 99%, or 100% identical to SEQ ID NO: 178.

[1238] In some aspects, the antigen binding polypeptides provided herein comprise a VH2 comprising an amino acid sequence that is at least 65%, at least 70%, at least 75%, at least 80%, at least 85%, at least 90%, at least 95%, at least 99%, or 100% identical to SEQ ID NO: 151.

[1239] In some aspects, the antigen binding polypeptides provided herein comprise (i) a VL1 comprising an amino acid sequence that is at least 65%, at least 70%, at least 75%, at least 80%, at least 85%, at least 90%, at least 95%, at least 99%, or 100% identical to SEQ ID NO: 174; (ii) a VL2 comprising an amino acid sequence that is at least 65%, at least 70%, at least 75%, at least 80%, at least 85%, at least 90%, at least 95%, at least 99%, or 100% identical to SEQ ID NO: 147; (iii) a VH1 comprising an amino acid sequence that is at least 65%, at least 70%, at least 75%, at least 80%, at least 85%, at least 90%, at least 95%, at least 99%, or 100% identical to SEQ ID NO: 178; and (iv) a VH2 comprising an amino acid sequence that is at least 65%, at least 70%, at least 75%, at least 80%, at least 85%, at least 90%, at least 95%, at least 99%, or 100% identical to SEQ ID NO: 151.

[1240] In some aspects, the antigen binding polypeptides provided herein comprise a VL1 comprising a CDR1 having an amino acid sequence at least 65%, at least 70%, at least 75%, at least 80%, at least 85%, at least 90%, at least 95%, at least 99%, or 100% identical to SEQ ID NO: 138 or 1065, a CDR2 having an amino acid sequence at least 65%, at least 70%, at least 75%, at least 80%, at least 85%, at least 90%, at least 95%, at least 99%, or 100% identical to SEQ ID NO: 1061 or an amino acid sequence at least 65%, at least 70%, at least 75%, at least 80%, at least 85%, at least 90%, at least 95%, at least 99%, or 100% identical to amino acid sequence DAS, and a CDR3 having an amino acid sequence at least 65%, at least 70%, at least 75%, at least 80%, at least 85%, at least 90%, at least 95%, at least 99%, or 100% identical to SEQ ID NO: 139, 856, or 1066.

[1241] In some aspects, the antigen binding polypeptides provided herein comprise a VL2 comprising a CDR1 having an amino acid sequence at least 65%, at least 70%, at least 75%, at least 80%, at least 85%, at least 90%, at least 95%, at least 99%, or 100% identical to SEQ ID NO: 152 or 1045, a CDR2 having an amino acid sequence at least 65%, at least 70%, at least 75%, at least 80%, at least 85%, at least 90%, at least 95%, at least 99%, or 100% identical to SEQ ID NO: 1046 or an amino acid sequence at least 65%, at least 70%, at least 75%, at least 80%, at least 85%, at least 90%, at least 95%, at least 99%, or 100% identical to amino acid sequence GAS, and a CDR3 having an amino acid sequence at least 65%, at least 70%, at least 75%, at least 80%, at least 85%, at least 90%, at least 95%, at least 99%, or 100% identical to SEQ ID NO: 153 or 766.

[1242] In some aspects, the antigen binding polypeptides provided herein comprise a VH1 comprising a CDR1 having an amino acid sequence at least 65%, at least 70%, at least 75%, at least 80%, at least 85%, at least 90%, at least 95%, at least 99%, or 100% identical to SEQ ID NO: 141 or 1067, a CDR2 having an amino acid sequence at least 65%, at least 70%, at least 75%, at least 80%, at least 85%, at least 90%, at least 95%, at least 99%, or 100% identical to SEQ ID NO: 142 or 1068, and a CDR3 having an amino acid sequence at least 65%, at least 70%, at least 75%, at least 80%, at least 85%, at least 90%, at least 95%, at least 99%, or 100% identical to SEQ ID NO: 143, 857, or 1069.

[1243] In some aspects, the antigen binding polypeptides provided herein comprise a VH2 comprising a CDR1 having an amino acid sequence at least 65%, at least 70%, at least 75%, at least 80%, at least 85%, at least 90%, at least 95%, at least 99%, or 100% identical to SEQ ID NO: 155 or 1047, a CDR2 having an amino acid sequence at least 65%, at least 70%, at least 75%, at least 80%, at least 85%, at least 90%, at least 95%, at least 99%, or 100% identical to SEQ ID NO: 156 or 1048, and a CDR3 having an amino acid sequence at least 65%, at least 70%, at least 75%, at least 80%, at least 85%, at least 90%, at least 95%, at least 99%, or 100% identical to SEQ ID NO: 157, 767, or 1049.

[1244] In some aspects, the antigen binding polypeptides provided herein comprise (i) a VL1 comprising a CDR1 having an amino acid sequence at least 65%, at least 70%, at least 75%, at least 80%, at least 85%, at least 90%, at least 95%, at least 99%, or 100% identical to SEQ ID NO: 138 or 1065, a CDR2 having an amino acid sequence at least 65%, at least 70%, at least 75%, at least 80%, at least 85%, at least 90%, at least 95%, at least 99%, or 100% identical to SEQ ID NO: 1061 or an amino acid sequence at least 65%, at least 70%, at least 75%, at least 80%, at least 85%, at least 90%, at least 95%, at least 99%, or 100% identical to amino acid sequence DAS, and a CDR3 having an amino acid sequence at least 65%, at least 70%, at least 75%, at least 80%, at least 85%, at least 90%, at least 95%, at least 99%, or 100% identical to SEQ ID NO: 139, 856, or 1066; (ii) a VL2 comprising a CDR1 having an amino acid sequence at least 65%, at least 70%, at least 75%, at least 80%, at least 85%, at least 90%, at least 95%, at least 99%, or 100% identical to SEQ ID NO: 152 or 1045, a CDR2 having an amino acid sequence at least 65%, at least 70%, at least 75%, at least 80%, at least 85%, at least 90%, at least 95%, at least 99%, or 100% identical to SEQ ID NO: 1046 or an amino acid sequence at least 65%, at least 70%, at least 75%, at least 80%, at least 85%, at least 90%, at least 95%, at least 99%, or 100% identical to amino acid sequence GAS, and a CDR3 having an amino acid sequence at least 65%, at least 70%, at least 75%, at least 80%, at least 85%, at least 90%, at least 95%, at least 99%, or 100% identical to SEQ ID NO: 153 or 766; (iii) a VH1 comprising a CDR1 having an amino acid sequence at least 65%, at least 70%, at least 75%, at least 80%, at least 85%, at least 90%, at least 95%, at least 99%, or 100% identical to SEQ ID NO: 141 or 1067, a CDR2 having an amino acid sequence at least 65%, at least 70%, at least 75%, at least 80%, at least 85%, at least 90%, at least 95%, at least 99%, or 100% identical to SEQ ID NO: 142 or 1068, and a CDR3 having an amino acid sequence at least 65%, at least 70%, at least 75%, at least 80%, at least 85%, at least 90%, at least 95%, at least 99%, or 100% identical to SEQ ID NO: 143, 857, or 1069; and (iv) a VH2 comprising a CDR1 having an amino acid sequence at least 65%, at least 70%, at least 75%, at least 80%, at least 85%, at least 90%, at least 95%, at least 99%, or 100% identical to SEQ ID NO: 155 or 1047, a CDR2 having an amino acid sequence at least 65%, at least 70%, at least 75%, at least 80%, at least 85%, at least 90%, at least 95%, at least 99%, or 100% identical to SEQ ID NO: 156 or 1048, and a CDR3 having an amino acid sequence at least 65%, at least 70%, at least 75%, at least 80%, at least 85%, at least 90%, at least 95%, at least 99%, or 100% identical to SEQ ID NO: 157, 767, or 1049.

[1245] In some aspects, the antigen binding polypeptides provided herein comprise a VL1 comprising an amino acid sequence that is at least 65%, at least 70%, at least 75%, at least 80%, at least 85%, at least 90%, at least 95%, at least 99%, or 100% identical to SEQ ID NO: 140.

[1246] In some aspects, the antigen binding polypeptides provided herein comprise a VL2 comprising an amino acid sequence that is at least 65%, at least 70%, at least 75%, at least 80%, at least 85%, at least 90%, at least 95%, at least 99%, or 100% identical to SEQ ID NO: 154.

[1247] In some aspects, the antigen binding polypeptides provided herein comprise a VH1 comprising an amino acid sequence that is at least 65%, at least 70%, at least 75%, at least 80%, at least 85%, at least 90%, at least 95%, at least 99%, or 100% identical to SEQ ID NO: 144.

[1248] In some aspects, the antigen binding polypeptides provided herein comprise a VH2 comprising an amino acid sequence that is at least 65%, at least 70%, at least 75%, at least 80%, at least 85%, at least 90%, at least 95%, at least 99%, or 100% identical to SEQ ID NO: 158.

[1249] In some aspects, the antigen binding polypeptides provided herein comprise (i) a VL1 comprising an amino acid sequence that is at least 65%, at least 70%, at least 75%, at least 80%, at least 85%, at least 90%, at least 95%, at least 99%, or 100% identical to SEQ ID NO: 140; (ii) a VL2 comprising an amino acid sequence that is at least 65%, at least 70%, at least 75%, at least 80%, at least 85%, at least 90%, at least 95%, at least 99%, or 100% identical to SEQ ID NO: 154; (iii) a VH1 comprising an amino acid sequence that is at least 65%, at least 70%, at least 75%, at least 80%, at least 85%, at least 90%, at least 95%, at least 99%, or 100% identical to SEQ ID NO: 144; and (iv) a VH2 comprising an amino acid sequence that is at least 65%, at least 70%, at least 75%, at least 80%, at least 85%, at least 90%, at least 95%, at least 99%, or 100% identical to SEQ ID NO: 158.

[1250] In some aspects, the antigen binding polypeptides provided herein comprise a VL1 comprising a CDR1 having an amino acid sequence at least 65%, at least 70%, at least 75%, at least 80%, at least 85%, at least 90%, at least 95%, at least 99%, or 100% identical to SEQ ID NO: 145 or 1050, a CDR2 having an amino acid sequence at least 65%, at least 70%, at least 75%, at least 80%, at least 85%, at least 90%, at least 95%, at least 99%, or 100% identical to SEQ ID NO: 1051 or an amino acid sequence at least 65%, at least 70%, at least 75%, at least 80%, at least 85%, at least 90%, at least 95%, at least 99%, or 100% identical to amino acid sequence AAS, and a CDR3 having an amino acid sequence at least 65%, at least 70%, at least 75%, at least 80%, at least 85%, at least 90%, at least 95%, at least 99%, or 100% identical to SEQ ID NO: 146 or 764.

[1251] In some aspects, the antigen binding polypeptides provided herein comprise a VL2 comprising a CDR1 having an amino acid sequence at least 65%, at least 70%, at least 75%, at least 80%, at least 85%, at least 90%, at least 95%, at least 99%, or 100% identical to SEQ ID NO: 145 or 1050, a CDR2 having an amino acid sequence at least 65%, at least 70%, at least 75%, at least 80%, at least 85%, at least 90%, at least 95%, at least 99%, or 100% identical to SEQ ID NO: 1051 or an amino acid sequence at least 65%, at least 70%, at least 75%, at least 80%, at least 85%, at least 90%, at least 95%, at least 99%, or 100% identical to amino acid sequence AAS, and a CDR3 having an amino acid sequence at least 65%, at least 70%, at least 75%, at least 80%, at least 85%, at least 90%, at least 95%, at least 99%, or 100% identical to SEQ ID NO: 146 or 764.

[1252] In some aspects, the antigen binding polypeptides provided herein comprise a VH1 comprising a CDR1 having an amino acid sequence at least 65%, at least 70%, at least 75%, at least 80%, at least 85%, at least 90%, at least 95%, at least 99%, or 100% identical to SEQ ID NO: 148 or 1052, a CDR2 having an amino acid sequence at least 65%, at least 70%, at least 75%, at least 80%, at least 85%, at least 90%, at least 95%, at least 99%, or 100% identical to SEQ ID NO: 149 or 1053, and a CDR3 having an amino acid sequence at least 65%, at least 70%, at least 75%, at least 80%, at least 85%, at least 90%, at least 95%, at least 99%, or 100% identical to SEQ ID NO: 150, 765, or 1054.

[1253] In some aspects, the antigen binding polypeptides provided herein comprise a VH2 comprising a CDR1 having an amino acid sequence at least 65%, at least 70%, at least 75%, at least 80%, at least 85%, at least 90%, at least 95%, at least 99%, or 100% identical to SEQ ID NO: 148 or 1052, a CDR2 having an amino acid sequence at least 65%, at least 70%, at least 75%, at least 80%, at least 85%, at least 90%, at least 95%, at least 99%, or 100% identical to SEQ ID NO: 149 or 1053, and a CDR3 having an amino acid sequence at least 65%, at least 70%, at least 75%, at least 80%, at least 85%, at least 90%, at least 95%, at least 99%, or 100% identical to SEQ ID NO: 150, 765, or 1054.

[1254] In some aspects, the antigen binding polypeptides provided herein comprise (i) a VL1 comprising a CDR1 having an amino acid sequence at least 65%, at least 70%, at least 75%, at least 80%, at least 85%, at least 90%, at least 95%, at least 99%, or 100% identical to SEQ ID NO: 145 or 1050, a CDR2 having an amino acid sequence at least 65%, at least 70%, at least 75%, at least 80%, at least 85%, at least 90%, at least 95%, at least 99%, or 100% identical to SEQ ID NO: 1051 or an amino acid sequence at least 65%, at least 70%, at least 75%, at least 80%, at least 85%, at least 90%, at least 95%, at least 99%, or 100% identical to amino acid sequence AAS, and a CDR3 having an amino acid sequence at least 65%, at least 70%, at least 75%, at least 80%, at least 85%, at least 90%, at least 95%, at least 99%, or 100% identical to SEQ ID NO: 146 or 764; (ii) a VL2 comprising a CDR1 having an amino acid sequence at least 65%, at least 70%, at least 75%, at least 80%, at least 85%, at least 90%, at least 95%, at least 99%, or 100% identical to SEQ ID NO: 145 or 1050, a CDR2 having an amino acid sequence at least 65%, at least 70%, at least 75%, at least 80%, at least 85%, at least 90%, at least 95%, at least 99%, or 100% identical to SEQ ID NO: 1051 or an amino acid sequence at least 65%, at least 70%, at least 75%, at least 80%, at least 85%, at least 90%, at least 95%, at least 99%, or 100% identical to amino acid sequence AAS, and a CDR3 having an amino acid sequence at least 65%, at least 70%, at least 75%, at least 80%, at least 85%, at least 90%, at least 95%, at least 99%, or 100% identical to SEQ ID NO: 146 or 764; (iii) a VH1 comprising a CDR1 having an amino acid sequence at least 65%, at least 70%, at least 75%, at least 80%, at least 85%, at least 90%, at least 95%, at least 99%, or 100% identical to SEQ ID NO: 148 or 1052, a CDR2 having an amino acid sequence at least 65%, at least 70%, at least 75%, at least 80%, at least 85%, at least 90%, at least 95%, at least 99%, or 100% identical to SEQ ID NO: 149 or 1053, and a CDR3 having an amino acid sequence at least 65%, at least 70%, at least 75%, at least 80%, at least 85%, at least 90%, at least 95%, at least 99%, or 100% identical to SEQ ID NO: 150, 765, or 1054; and (iv) a VH2 comprising a CDR1 having an amino acid sequence at least 65%, at least 70%, at least 75%, at least 80%, at least 85%, at least 90%, at least 95%, at least 99%, or 100% identical to SEQ ID NO: 148 or 1052, a CDR2 having an amino acid sequence at least 65%, at least 70%, at least 75%, at least 80%, at least 85%, at least 90%, at least 95%, at least 99%, or 100% identical to SEQ ID NO: 149 or 1053, and a CDR3 having an amino acid sequence at least 65%, at least 70%, at least 75%, at least 80%, at least 85%, at least 90%, at least 95%, at least 99%, or 100% identical to SEQ ID NO: 150, 765, or 1054.

[1255] In some aspects, the antigen binding polypeptides provided herein comprise a VL1 comprising an amino acid sequence that is at least 65%, at least 70%, at least 75%, at least 80%, at least 85%, at least 90%, at least 95%, at least 99%, or 100% identical to SEQ ID NO: 147.

[1256] In some aspects, the antigen binding polypeptides provided herein comprise a VL2 comprising an amino acid sequence that is at least 65%, at least 70%, at least 75%, at least 80%, at least 85%, at least 90%, at least 95%, at least 99%, or 100% identical to SEQ ID NO: 147.

[1257] In some aspects, the antigen binding polypeptides provided herein comprise a VH1 comprising an amino acid sequence that is at least 65%, at least 70%, at least 75%, at least 80%, at least 85%, at least 90%, at least 95%, at least 99%, or 100% identical to SEQ ID NO: 151.

[1258] In some aspects, the antigen binding polypeptides provided herein comprise a VH2 comprising an amino acid sequence that is at least 65%, at least 70%, at least 75%, at least 80%, at least 85%, at least 90%, at least 95%, at least 99%, or 100% identical to SEQ ID NO: 151.

[1259] In some aspects, the antigen binding polypeptides provided herein comprise (i) a VL1 comprising an amino acid sequence that is at least 65%, at least 70%, at least 75%, at least 80%, at least 85%, at least 90%, at least 95%, at least 99%, or 100% identical to SEQ ID NO: 147; (ii) a VL2 comprising an amino acid sequence that is at least 65%, at least 70%, at least 75%, at least 80%, at least 85%, at least 90%, at least 95%, at least 99%, or 100% identical to SEQ ID NO: 147; (iii) a VH1 comprising an amino acid sequence that is at least 65%, at least 70%, at least 75%, at least 80%, at least 85%, at least 90%, at least 95%, at least 99%, or 100% identical to SEQ ID NO: 151; and (iv) a VH2 comprising an amino acid sequence that is at least 65%, at least 70%, at least 75%, at least 80%, at least 85%, at least 90%, at least 95%, at least 99%, or 100% identical to SEQ ID NO: 151.

[1260] In some aspects, the antigen binding polypeptides provided herein comprise a VL1 comprising a CDR1 having an amino acid sequence at least 65%, at least 70%, at least 75%, at least 80%, at least 85%, at least 90%, at least 95%, at least 99%, or 100% identical to SEQ ID NO: 152 or 1045, a CDR2 having an amino acid sequence at least 65%, at least 70%, at least 75%, at least 80%, at least 85%, at least 90%, at least 95%, at least 99%, or 100% identical to SEQ ID NO: 1046 or an amino acid sequence at least 65%, at least 70%, at least 75%, at least 80%, at least 85%, at least 90%, at least 95%, at least 99%, or 100% identical to amino acid sequence GAS, and a CDR3 having an amino acid sequence at least 65%, at least 70%, at least 75%, at least 80%, at least 85%, at least 90%, at least 95%, at least 99%, or 100% identical to SEQ ID NO: 153 or 766.

[1261] In some aspects, the antigen binding polypeptides provided herein comprise a VL2 comprising a CDR1 having an amino acid sequence at least 65%, at least 70%, at least 75%, at least 80%, at least 85%, at least 90%, at least 95%, at least 99%, or 100% identical to SEQ ID NO: 152 or 1045, a CDR2 having an amino acid sequence at least 65%, at least 70%, at least 75%, at least 80%, at least 85%, at least 90%, at least 95%, at least 99%, or 100% identical to SEQ ID NO: 1046 or an amino acid sequence at least 65%, at least 70%, at least 75%, at least 80%, at least 85%, at least 90%, at least 95%, at least 99%, or 100% identical to amino acid sequence GAS, and a CDR3 having an amino acid sequence at least 65%, at least 70%, at least 75%, at least 80%, at least 85%, at least 90%, at least 95%, at least 99%, or 100% identical to SEQ ID NO: 153 or 766.

[1262] In some aspects, the antigen binding polypeptides provided herein comprise a VH1 comprising a CDR1 having an amino acid sequence at least 65%, at least 70%, at least 75%, at least 80%, at least 85%, at least 90%, at least 95%, at least 99%, or 100% identical to SEQ ID NO: 155 or 1047, a CDR2 having an amino acid sequence at least 65%, at least 70%, at least 75%, at least 80%, at least 85%, at least 90%, at least 95%, at least 99%, or 100% identical to SEQ ID NO: 156 or 1048, and a CDR3 having an amino acid sequence at least 65%, at least 70%, at least 75%, at least 80%, at least 85%, at least 90%, at least 95%, at least 99%, or 100% identical to SEQ ID NO: 157, 767, or 1049.

[1263] In some aspects, the antigen binding polypeptides provided herein comprise a VH2 comprising a CDR1 having an amino acid sequence at least 65%, at least 70%, at least 75%, at least 80%, at least 85%, at least 90%, at least 95%, at least 99%, or 100% identical to SEQ ID NO: 155 or 1047, a CDR2 having an amino acid sequence at least 65%, at least 70%, at least 75%, at least 80%, at least 85%, at least 90%, at least 95%, at least 99%, or 100% identical to SEQ ID NO: 156 or 1048, and a CDR3 having an amino acid sequence at least 65%, at least 70%, at least 75%, at least 80%, at least 85%, at least 90%, at least 95%, at least 99%, or 100% identical to SEQ ID NO: 157, 767, or 1049.

[1264] In some aspects, the antigen binding polypeptides provided herein comprise (i) a VL1 comprising a CDR1 having an amino acid sequence at least 65%, at least 70%, at least 75%, at least 80%, at least 85%, at least 90%, at least 95%, at least 99%, or 100% identical to SEQ ID NO: 152 or 1045, a CDR2 having an amino acid sequence at least 65%, at least 70%, at least 75%, at least 80%, at least 85%, at least 90%, at least 95%, at least 99%, or 100% identical to SEQ ID NO: 1046 or an amino acid sequence at least 65%, at least 70%, at least 75%, at least 80%, at least 85%, at least 90%, at least 95%, at least 99%, or 100% identical to amino acid sequence GAS, and a CDR3 having an amino acid sequence at least 65%, at least 70%, at least 75%, at least 80%, at least 85%, at least 90%, at least 95%, at least 99%, or 100% identical to SEQ ID NO: 153 or 766; (ii) a VL2 comprising a CDR1 having an amino acid sequence at least 65%, at least 70%, at least 75%, at least 80%, at least 85%, at least 90%, at least 95%, at least 99%, or 100% identical to SEQ ID NO: 152 or 1045, a CDR2 having an amino acid sequence at least 65%, at least 70%, at least 75%, at least 80%, at least 85%, at least 90%, at least 95%, at least 99%, or 100% identical to SEQ ID NO: 1046 or an amino acid sequence at least 65%, at least 70%, at least 75%, at least 80%, at least 85%, at least 90%, at least 95%, at least 99%, or 100% identical to amino acid sequence GAS, and a CDR3 having an amino acid sequence at least 65%, at least 70%, at least 75%, at least 80%, at least 85%, at least 90%, at least 95%, at least 99%, or 100% identical to SEQ ID NO: 153 or 766; (iii) a VH1 comprising a CDR1 having an amino acid sequence at least 65%, at least 70%, at least 75%, at least 80%, at least 85%, at least 90%, at least 95%, at least 99%, or 100% identical to SEQ ID NO: 155 or 1047, a CDR2 having an amino acid sequence at least 65%, at least 70%, at least 75%, at least 80%, at least 85%, at least 90%, at least 95%, at least 99%, or 100% identical to SEQ ID NO: 156 or 1048, and a CDR3 having an amino acid sequence at least 65%, at least 70%, at least 75%, at least 80%, at least 85%, at least 90%, at least 95%, at least 99%, or 100% identical to SEQ ID NO: 157, 767, or 1049; and (iv) a VH2 comprising a CDR1 having an amino acid sequence at least 65%, at least 70%, at least 75%, at least 80%, at least 85%, at least 90%, at least 95%, at least 99%, or 100% identical to SEQ ID NO: 155 or 1047, a CDR2 having an amino acid sequence at least 65%, at least 70%, at least 75%, at least 80%, at least 85%, at least 90%, at least 95%, at least 99%, or 100% identical to SEQ ID NO: 156 or 1048, and a CDR3 having an amino acid sequence at least 65%, at least 70%, at least 75%, at least 80%, at least 85%, at least 90%, at least 95%, at least 99%, or 100% identical to SEQ ID NO: 157, 767, or 1049.

[1265] In some aspects, the antigen binding polypeptides provided herein comprise a VL1 comprising an amino acid sequence that is at least 65%, at least 70%, at least 75%, at least 80%, at least 85%, at least 90%, at least 95%, at least 99%, or 100% identical to SEQ ID NO: 154.

[1266] In some aspects, the antigen binding polypeptides provided herein comprise a VL2 comprising an amino acid sequence that is at least 65%, at least 70%, at least 75%, at least 80%, at least 85%, at least 90%, at least 95%, at least 99%, or 100% identical to SEQ ID NO: 154.

[1267] In some aspects, the antigen binding polypeptides provided herein comprise a VH1 comprising an amino acid sequence that is at least 65%, at least 70%, at least 75%, at least 80%, at least 85%, at least 90%, at least 95%, at least 99%, or 100% identical to SEQ ID NO: 158.

[1268] In some aspects, the antigen binding polypeptides provided herein comprise a VH2 comprising an amino acid sequence that is at least 65%, at least 70%, at least 75%, at least 80%, at least 85%, at least 90%, at least 95%, at least 99%, or 100% identical to SEQ ID NO: 158.

[1269] In some aspects, the antigen binding polypeptides provided herein comprise (i) a VL1 comprising an amino acid sequence that is at least 65%, at least 70%, at least 75%, at least 80%, at least 85%, at least 90%, at least 95%, at least 99%, or 100% identical to SEQ ID NO: 154; (ii) a VL2 comprising an amino acid sequence that is at least 65%, at least 70%, at least 75%, at least 80%, at least 85%, at least 90%, at least 95%, at least 99%, or 100% identical to SEQ ID NO: 154; (iii) a VH1 comprising an amino acid sequence that is at least 65%, at least 70%, at least 75%, at least 80%, at least 85%, at least 90%, at least 95%, at least 99%, or 100% identical to SEQ ID NO: 158; and (iv) a VH2 comprising an amino acid sequence that is at least 65%, at least 70%, at least 75%, at least 80%, at least 85%, at least 90%, at least 95%, at least 99%, or 100% identical to SEQ ID NO: 158.

[1270] In some aspects, the antigen binding polypeptides provided herein comprise a VL1 comprising a CDR1 having an amino acid sequence at least 65%, at least 70%, at least 75%, at least 80%, at least 85%, at least 90%, at least 95%, at least 99%, or 100% identical to SEQ ID NO: 9 or 1055, a CDR2 having an amino acid sequence at least 65%, at least 70%, at least 75%, at least 80%, at least 85%, at least 90%, at least 95%, at least 99%, or 100% identical to SEQ ID NO: 1056 or an amino acid sequence at least 65%, at least 70%, at least 75%, at least 80%, at least 85%, at least 90%, at least 95%, at least 99%, or 100% identical to amino acid sequence GAS, and a CDR3 having an amino acid sequence at least 65%, at least 70%, at least 75%, at least 80%, at least 85%, at least 90%, at least 95%, at least 99%, or 100% identical to SEQ ID NO: 10.

[1271] In some aspects, the antigen binding polypeptides provided herein comprise a VL2 comprising a CDR1 having an amino acid sequence at least 65%, at least 70%, at least 75%, at least 80%, at least 85%, at least 90%, at least 95%, at least 99%, or 100% identical to SEQ ID NO: 9 or 1055, a CDR2 having an amino acid sequence at least 65%, at least 70%, at least 75%, at least 80%, at least 85%, at least 90%, at least 95%, at least 99%, or 100% identical to SEQ ID NO: 1056 or an amino acid sequence at least 65%, at least 70%, at least 75%, at least 80%, at least 85%, at least 90%, at least 95%, at least 99%, or 100% identical to amino acid sequence GAS, and a CDR3 having an amino acid sequence at least 65%, at least 70%, at least 75%, at least 80%, at least 85%, at least 90%, at least 95%, at least 99%, or 100% identical to SEQ ID NO: 10.

[1272] In some aspects, the antigen binding polypeptides provided herein comprise a VH1 comprising a CDR1 having an amino acid sequence at least 65%, at least 70%, at least 75%, at least 80%, at least 85%, at least 90%, at least 95%, at least 99%, or 100% identical to SEQ ID NO: 12 or 1057, a CDR2 having an amino acid sequence at least 65%, at least 70%, at least 75%, at least 80%, at least 85%, at least 90%, at least 95%, at least 99%, or 100% identical to SEQ ID NO: 6 or 1058, and a CDR3 having an amino acid sequence at least 65%, at least 70%, at least 75%, at least 80%, at least 85%, at least 90%, at least 95%, at least 99%, or 100% identical to SEQ ID NO: 13 or 1059.

[1273] In some aspects, the antigen binding polypeptides provided herein comprise a VH2 comprising a CDR1 having an amino acid sequence at least 65%, at least 70%, at least 75%, at least 80%, at least 85%, at least 90%, at least 95%, at least 99%, or 100% identical to SEQ ID NO: 12 or 1057, a CDR2 having an amino acid sequence at least 65%, at least 70%, at least 75%, at least 80%, at least 85%, at least 90%, at least 95%, at least 99%, or 100% identical to SEQ ID NO: 6 or 1058, and a CDR3 having an amino acid sequence at least 65%, at least 70%, at least 75%, at least 80%, at least 85%, at least 90%, at least 95%, at least 99%, or 100% identical to SEQ ID NO: 13 or 1059.

[1274] In some aspects, the antigen binding polypeptides provided herein comprise (i) a VL1 comprising a CDR1 having an amino acid sequence at least 65%, at least 70%, at least 75%, at least 80%, at least 85%, at least 90%, at least 95%, at least 99%, or 100% identical to SEQ ID NO: 9 or 1055, a CDR2 having an amino acid sequence at least 65%, at least 70%, at least 75%, at least 80%, at least 85%, at least 90%, at least 95%, at least 99%, or 100% identical to SEQ ID NO: 1056 or an amino acid sequence at least 65%, at least 70%, at least 75%, at least 80%, at least 85%, at least 90%, at least 95%, at least 99%, or 100% identical to amino acid sequence GAS, and a CDR3 having an amino acid sequence at least 65%, at least 70%, at least 75%, at least 80%, at least 85%, at least 90%, at least 95%, at least 99%, or 100% identical to SEQ ID NO: 10; (ii) a VL2 comprising a CDR1 having an amino acid sequence at least 65%, at least 70%, at least 75%, at least 80%, at least 85%, at least 90%, at least 95%, at least 99%, or 100% identical to SEQ ID NO: 9 or 1055, a CDR2 having an amino acid sequence at least 65%, at least 70%, at least 75%, at least 80%, at least 85%, at least 90%, at least 95%, at least 99%, or 100% identical to SEQ ID NO: 1056 or an amino acid sequence at least 65%, at least 70%, at least 75%, at least 80%, at least 85%, at least 90%, at least 95%, at least 99%, or 100% identical to amino acid sequence GAS, and a CDR3 having an amino acid sequence at least 65%, at least 70%, at least 75%, at least 80%, at least 85%, at least 90%, at least 95%, at least 99%, or 100% identical to SEQ ID NO: 10; (iii) a VH1 comprising a CDR1 having an amino acid sequence at least 65%, at least 70%, at least 75%, at least 80%, at least 85%, at least 90%, at least 95%, at least 99%, or 100% identical to SEQ ID NO: 12 or 1057, a CDR2 having an amino acid sequence at least 65%, at least 70%, at least 75%, at least 80%, at least 85%, at least 90%, at least 95%, at least 99%, or 100% identical to SEQ ID NO: 6 or 1058, and a CDR3 having an amino acid sequence at least 65%, at least 70%, at least 75%, at least 80%, at least 85%, at least 90%, at least 95%, at least 99%, or 100% identical to SEQ ID NO: 13 or 1059; and (iv) a VH2 comprising a CDR1 having an amino acid sequence at least 65%, at least 70%, at least 75%, at least 80%, at least 85%, at least 90%, at least 95%, at least 99%, or 100% identical to SEQ ID NO: 12 or 1057, a CDR2 having an amino acid sequence at least 65%, at least 70%, at least 75%, at least 80%, at least 85%, at least 90%, at least 95%, at least 99%, or 100% identical to SEQ ID NO: 6 or 1058, and a CDR3 having an amino acid sequence at least 65%, at least 70%, at least 75%, at least 80%, at least 85%, at least 90%, at least 95%, at least 99%, or 100% identical to SEQ ID NO: 13 or 1059.

[1275] In some aspects, the antigen binding polypeptides provided herein comprise a VL1 comprising an amino acid sequence that is at least 65%, at least 70%, at least 75%, at least 80%, at least 85%, at least 90%, at least 95%, at least 99%, or 100% identical to SEQ ID NO: 11.

[1276] In some aspects, the antigen binding polypeptides provided herein comprise a VL2 comprising an amino acid sequence that is at least 65%, at least 70%, at least 75%, at least 80%, at least 85%, at least 90%, at least 95%, at least 99%, or 100% identical to SEQ ID NO: 11.

[1277] In some aspects, the antigen binding polypeptides provided herein comprise a VH1 comprising an amino acid sequence that is at least 65%, at least 70%, at least 75%, at least 80%, at least 85%, at least 90%, at least 95%, at least 99%, or 100% identical to SEQ ID NO: 14.

[1278] In some aspects, the antigen binding polypeptides provided herein comprise a VH2 comprising an amino acid sequence that is at least 65%, at least 70%, at least 75%, at least 80%, at least 85%, at least 90%, at least 95%, at least 99%, or 100% identical to SEQ ID NO: 14.

[1279] In some aspects, the antigen binding polypeptides provided herein comprise (i) a VL1 comprising an amino acid sequence that is at least 65%, at least 70%, at least 75%, at least 80%, at least 85%, at least 90%, at least 95%, at least 99%, or 100% identical to SEQ ID NO: 11; (ii) a VL2 comprising an amino acid sequence that is at least 65%, at least 70%, at least 75%, at least 80%, at least 85%, at least 90%, at least 95%, at least 99%, or 100% identical to SEQ ID NO: 11; (iii) a VH1 comprising an amino acid sequence that is at least 65%, at least 70%, at least 75%, at least 80%, at least 85%, at least 90%, at least 95%, at least 99%, or 100% identical to SEQ ID NO: 14; and (iv) a VH2 comprising an amino acid sequence that is at least 65%, at least 70%, at least 75%, at least 80%, at least 85%, at least 90%, at least 95%, at least 99%, or 100% identical to SEQ ID NO: 14.

[1280] In some aspects, at least one of VL1 or VL2 comprised in the antigen binding polypeptides provided herein comprises (i) a complementarity determining region (CDR) 1 having an amino acid sequence that is at least 65%, at least 70%, at least 75%, at least 80%, at least 85%, at least 90%, at least 95%, at least 99%, or 100% identical to SEQ ID NO: 145 or 1050; (ii) a CDR2 having an amino acid sequence that is at least 65%, at least 70%, at least 75%, at least 80%, at least 85%, at least 90%, at least 95%, at least 99%, or 100% identical to SEQ ID NO: 1051 or an amino acid sequence that is at least 65%, at least 70%, at least 75%, at least 80%, at least 85%, at least 90%, at least 95%, at least 99%, or 100% identical to amino acid sequence AAS; and (iii) a CDR3 having an amino acid sequence that is at least 65%, at least 70%, at least 75%, at least 80%, at least 85%, at least 90%, at least 95%, at least 99%, or 100% identical to SEQ ID NO: 146 or 764.

[1281] In some aspects, at least one of VH1 or VH2 comprised in the antigen binding polypeptides provided herein comprises (i) a complementarity determining region (CDR) 1 having an amino acid sequence that is at least 65%, at least 70%, at least 75%, at least 80%, at least 85%, at least 90%, at least 95%, at least 99%, or 100% identical to SEQ ID NO: 148 or 1052; (ii) a CDR2 having an amino acid sequence that is at least 65%, at least 70%, at least 75%, at least 80%, at least 85%, at least 90%, at least 95%, at least 99%, or 100% identical to SEQ ID NO: 149 or 1053; and (iii) a CDR3 having an amino acid sequence that is at least 65%, at least 70%, at least 75%, at least 80%, at least 85%, at least 90%, at least 95%, at least 99%, or 100% identical to SEQ ID NO: 150, 765, or 1054.

[1282] In some aspects, at least one of VL1 or VL2 comprised in the antigen binding polypeptides provided herein comprises (i) a complementarity determining region (CDR) 1 having an amino acid sequence that is at least 65%, at least 70%, at least 75%, at least 80%, at least 85%, at least 90%, at least 95%, at least 99%, or 100% identical to SEQ ID NO: 145 or 1050; (ii) a CDR2 having an amino acid sequence that is at least 65%, at least 70%, at least 75%, at least 80%, at least 85%, at least 90%, at least 95%, at least 99%, or 100% identical to SEQ ID NO: 1051 or an amino acid sequence that is at least 65%, at least 70%, at least 75%, at least 80%, at least 85%, at least 90%, at least 95%, at least 99%, or 100% identical to amino acid sequence AAS; and (iii) a CDR3 having an amino acid sequence that is at least 65%, at least 70%, at least 75%, at least 80%, at least 85%, at least 90%, at least 95%, at least 99%, or 100% identical to SEQ ID NO: 146 or 764; and at least one of VH1 or VH2 comprised in the antigen binding polypeptides provided herein comprises (iv) a complementarity determining region (CDR) 1 having an amino acid sequence that is at least 65%, at least 70%, at least 75%, at least 80%, at least 85%, at least 90%, at least 95%, at least 99%, or 100% identical to SEQ ID NO: 148 or 1052; (v) a CDR2 having an amino acid sequence that is at least 65%, at least 70%, at least 75%, at least 80%, at least 85%, at least 90%, at least 95%, at least 99%, or 100% identical to SEQ ID NO: 149 or 1053; and (vi) a CDR3 having an amino acid sequence that is at least 65%, at least 70%, at least 75%, at least 80%, at least 85%, at least 90%, at least 95%, at least 99%, or 100% identical to SEQ ID NO: 150, 765, or 1054.

[1283] In some aspects, at least one of VL1 or VL2 comprised in the antigen binding polypeptides provided herein comprises an amino acid sequence that is at least 65%, at least 70%, at least 75%, at least 80%, at least 85%, at least 90%, at least 95%, at least 99%, or 100% identical to SEQ ID NO: 147. In some aspects, at least one of VH1 or VH2 comprised in the antigen binding polypeptides provided herein comprises an amino acid sequence that is at least 65%, at least 70%, at least 75%, at least 80%, at least 85%, at least 90%, at least 95%, at least 99%, or 100% identical to SEQ ID NO: 151.

[1284] In some aspects, (i) at least one of VL1 or VL2 comprised in the antigen binding polypeptides provided herein comprises an amino acid sequence that is at least 65%, at least 70%, at least 75%, at least 80%, at least 85%, at least 90%, at least 95%, at least 99%, or 100% identical to SEQ ID NO: 147, and (ii) at least one of VH1 or VH2 comprised in the antigen binding polypeptides provided herein comprises an amino acid sequence that is at least 65%, at least 70%, at least 75%, at least 80%, at least 85%, at least 90%, at least 95%, at least 99%, or 100% identical to SEQ ID NO: 151.

[1285] In some aspects, the antigen binding polypeptides provided herein comprise a VL1 comprising (i) a complementarity determining region (CDR) 1 having an amino acid sequence that is at least 65%, at least 70%, at least 75%, at least 80%, at least 85%, at least 90%, at least 95%, at least 99%, or 100% identical to SEQ ID NO: 145 or 1050; (ii) a CDR2 having an amino acid sequence that is at least 65%, at least 70%, at least 75%, at least 80%, at least 85%, at least 90%, at least 95%, at least 99%, or 100% identical to SEQ ID NO: 1051 or an amino acid sequence that is at least 65%, at least 70%, at least 75%, at least 80%, at least 85%, at least 90%, at least 95%, at least 99%, or 100% identical to amino acid sequence AAS; and (iii) a CDR3 having an amino acid sequence that is at least 65%, at least 70%, at least 75%, at least 80%, at least 85%, at least 90%, at least 95%, at least 99%, or 100% identical to SEQ ID NO: 146 or 764; a VH1 comprising (iv) a complementarity determining region (CDR) 1 having an amino acid sequence that is at least 65%, at least 70%, at least 75%, at least 80%, at least 85%, at least 90%, at least 95%, at least 99%, or 100% identical to SEQ ID NO: 148 or 1052; (v) a CDR2 having an amino acid sequence that is at least 65%, at least 70%, at least 75%, at least 80%, at least 85%, at least 90%, at least 95%, at least 99%, or 100% identical to SEQ ID NO: 149 or 1053; and (vi) a CDR3 having an amino acid sequence that is at least 65%, at least 70%, at least 75%, at least 80%, at least 85%, at least 90%, at least 95%, at least 99%, or 100% identical to SEQ ID NO: 150, 765, or 1054; a VL2 comprising (vii) a complementarity determining region (CDR) 1 having an amino acid sequence that is at least 65%, at least 70%, at least 75%, at least 80%, at least 85%, at least 90%, at least 95%, at least 99%, or 100% identical to any one of SEQ ID NOs: 1, 9, 15, 23, 30, 41, 48, 55, 58, 65, 72, 79, 86, 93, 99, 105, 112, 119, 130, 138, 145, 152, 159, 166, 172, 179, 186, 192, 199, 205, 212, 219, 226, 232, 324, 627, 640, 650, 659, 676, 687, 695, 703, 712, 770, 778, 785, 794, 801, 807, 814, 827, 836, 849, 858, 865, 878, 1045, 1050, 1055, 1060, and 1065; (viii) a CDR2 having an amino acid sequence that is at least 65%, at least 70%, at least 75%, at least 80%, at least 85%, at least 90%, at least 95%, at least 99%, or 100% identical to any one of SEQ ID NOs: 2, 31, 628, 641, 677, 1046, 1051, 1056, and 1061; or at least 65%, at least 70%, at least 75%, at least 80%, at least 85%, at least 90%, at least 95%, at least 99%, or 100% identical to any one of amino acid sequences AAS, GAS, LGS, GTN, GTN, SAS, SDS, DNT, EVT, DAS, DVT, RNS, DVS, EDS, DDS, KDS, VAS, WAS, YTS, EVS, NNN, SYN, and DAT; and (ix) a CDR3 having an amino acid sequence that is at least 65%, at least 70%, at least 75%, at least 80%, at least 85%, at least 90%, at least 95%, at least 99%, or 100% identical to any one of SEQ ID NOs: 3, 10, 16, 24, 32, 38, 42, 49, 59, 66, 73, 80, 87, 94, 100, 106, 113, 120, 126, 131, 139, 146, 153, 160, 167, 173, 180, 187, 193, 200, 206, 213, 220, 227, 233, 239, 242, 246, 249, 256, 283, 285, 287, 288, 290, 292, 294, 296, 301, 304, 306, 309, 311, 313, 316, 325, 326, 329, 642, 651, 660, 668, 678, 651, 696, 704, 713, 764, 766, 768, 771, 779, 786, 792, 795, 808, 815, 821, 830, 837, 843, 850, 856, 859, 866, 872, 879, 885, and 1066; and a VH2 comprising (x) a CDR1 having an amino acid sequence that is at least 65%, at least 70%, at least 75%, at least 80%, at least 85%, at least 90%, at least 95%, at least 99%, or 100% identical to any one of SEQ ID NOs: 5, 12, 18, 26, 34, 44, 51, 61, 68, 75, 82, 89, 96, 102, 108, 115, 122, 133, 141, 148, 155, 162, 175, 182, 189, 195, 202, 208, 215, 222, 229, 235, 318, 629, 645, 654, 663, 671, 682, 690, 699, 707, 716, 773, 781, 788, 797, 803, 810, 817, 823, 832, 839, 845, 852, 861, 868, 874, 881, 1047, 1052, 1057, 1062, and 1067; (xi) a CDR2 having an amino acid sequence that is at least 65%, at least 70%, at least 75%, at least 80%, at least 85%, at least 90%, at least 95%, at least 99%, or 100% identical to any one of SEQ ID NOs: 6, 19, 27, 35, 45, 52, 56, 62, 69, 76, 83, 90, 109, 116, 123, 134, 142, 149, 156, 163, 169, 176, 183, 196, 209, 216, 223, 236, 273, 319, 328, 630, 646, 655, 664, 672, 683, 691, 708, 776, 782, 789, 798, 804, 811, 818, 824, 833, 840, 846, 853, 862, 869, 875, 882, 1048, 1053, 1058, 1063, and 1068; and (xii) a CDR3 having an amino acid sequence that is at least 65%, at least 70%, at least 75%, at least 80%, at least 85%, at least 90%, at least 95%, at least 99%, or 100% identical to any one of SEQ ID NOs: 7, 13, 20, 28, 36, 40, 46, 53, 63, 70, 77, 84, 91, 97, 103, 110, 117, 124, 128, 135, 143, 150, 157, 164, 170, 177, 184, 190, 197, 203, 210, 217, 224, 230, 237, 241, 244, 248, 253, 257, 259, 261, 263, 265, 267, 269, 271, 274, 276, 278, 281, 297, 320, 322, 327, 330, 332, 631, 647, 656, 665, 673, 684, 692, 700, 709, 717, 765, 767, 769, 774, 783, 790, 793, 799, 805, 812, 819, 825, 834, 841, 847, 854, 857, 863, 870, 876, 883, 886, 1049, 1054, 1059, 1064, and 1069.

[1286] In some aspects, the antigen binding polypeptides provided herein comprise (i) a VL1 comprising an amino acid sequence that is at least 65%, at least 70%, at least 75%, at least 80%, at least 85%, at least 90%, at least 95%, at least 99%, or 100% identical to SEQ ID NO: 147; (ii) a VH1 comprising an amino acid sequence that is at least 65%, at least 70%, at least 75%, at least 80%, at least 85%, at least 90%, at least 95%, at least 99%, or 100% identical to SEQ ID NO: 151; (iii) a VL2 comprising an amino acid sequence that is at least 65%, at least 70%, at least 75%, at least 80%, at least 85%, at least 90%, at least 95%, at least 99%, or 100% identical to any one of SEQ ID NOs: 4, 11, 17, 25, 33, 39, 43, 50, 60, 67, 74, 81, 88, 95, 101, 107, 114, 121, 127, 132, 140, 147, 154, 161, 168, 174, 181, 188, 194, 201, 207, 214, 221, 228, 234, 240, 243, 247, 250, 251, 252, 255, 284, 286, 289, 291, 293, 295, 299, 300, 302, 303, 305, 307, 308, 310, 312, 314, 315, 317, 323, 639, 649, 658, 667, 675, 686, 694, 702, 711, 772, 780, 787, 796, 802, 809, 816, 822, 831, 838, 844, 851, 860, 867, 873, 880, and 988; and (iv) a VH2 comprising an amino acid sequence that is at least 65%, at least 70%, at least 75%, at least 80%, at least 85%, at least 90%, at least 95%, at least 99%, or 100% identical to any one of SEQ ID NOs: 8, 14, 21, 22, 29, 37, 47, 54, 57, 64, 71, 78, 85, 92, 98, 104, 111, 118, 125, 129, 136, 137, 144, 151, 158, 165, 171, 178, 185, 191, 198, 204, 211, 218, 225, 231, 238, 245, 254, 258, 260, 262, 264, 266, 268, 270, 272, 275, 277, 279, 280, 282, 298, 321, 331, 626, 644, 653, 662, 670, 681, 689, 698, 706, 715, 775, 777, 784, 791, 800, 806, 813, 820, 826, 835, 842, 848, 855, 864, 871, 877, and 884.

[1287] In some aspects, the antigen binding polypeptides provided herein comprise a VL1 comprising (i) a complementarity determining region (CDR) 1 having an amino acid sequence that is at least 65%, at least 70%, at least 75%, at least 80%, at least 85%, at least 90%, at least 95%, at least 99%, or 100% identical to SEQ ID NO: 145 or 1050; (ii) a CDR2 having an amino acid sequence that is at least 65%, at least 70%, at least 75%, at least 80%, at least 85%, at least 90%, at least 95%, at least 99%, or 100% identical to SEQ ID NO: 1051 or an amino acid sequence that is at least 65%, at least 70%, at least 75%, at least 80%, at least 85%, at least 90%, at least 95%, at least 99%, or 100% identical to amino acid sequence AAS; and (iii) a CDR3 having an amino acid sequence that is at least 65%, at least 70%, at least 75%, at least 80%, at least 85%, at least 90%, at least 95%, at least 99%, or 100% identical to SEQ ID NO: 146 or 764; a VH1 comprising (iv) a complementarity determining region (CDR) 1 having an amino acid sequence that is at least 65%, at least 70%, at least 75%, at least 80%, at least 85%, at least 90%, at least 95%, at least 99%, or 100% identical to SEQ ID NO: 148 or 1052; (v) a CDR2 having an amino acid sequence that is at least 65%, at least 70%, at least 75%, at least 80%, at least 85%, at least 90%, at least 95%, at least 99%, or 100% identical to SEQ ID NO: 149 or 1053; and (vi) a CDR3 having an amino acid sequence that is at least 65%, at least 70%, at least 75%, at least 80%, at least 85%, at least 90%, at least 95%, at least 99%, or 100% identical to SEQ ID NO: 150, 765, or 1054; a VL2 comprising (vii) a complementarity determining region (CDR) 1 having an amino acid sequence that is at least 65%, at least 70%, at least 75%, at least 80%, at least 85%, at least 90%, at least 95%, at least 99%, or 100% identical to any one of SEQ ID NOs: 1, 9, 15, 23, 30, 65, 72, 145, 152, 324, 627, 138, 172, 1045, 1050, 1055, 1060, and 1065; (viii) a CDR2 having an amino acid sequence that is at least 65%, at least 70%, at least 75%, at least 80%, at least 85%, at least 90%, at least 95%, at least 99%, or 100% identical to any one of SEQ ID NOs: 2, 31, 628, 1046, 1051, 1056, and 1061, or at least 65%, at least 70%, at least 75%, at least 80%, at least 85%, at least 90%, at least 95%, at least 99%, or 100% identical to any one of amino acid sequences GAS, LGS, GTN, SAS, SDS, AAS, DAS, and DNT; and (ix) a CDR3 having an amino acid sequence that is at least 65%, at least 70%, at least 75%, at least 80%, at least 85%, at least 90%, at least 95%, at least 99%, or 100% identical to any one of SEQ ID NOs: 3, 10, 16, 24, 32, 38, 66, 73, 146, 153, 325, 326, 764, 766, 139, 856, 173, 792, and 1066; and a VH2 comprising (x) a CDR1 having an amino acid sequence that is at least 65%, at least 70%, at least 75%, at least 80%, at least 85%, at least 90%, at least 95%, at least 99%, or 100% identical to any one of SEQ ID NOs: 5, 12, 18, 26, 34, 68, 75, 148, 155, 629, 141, 175, 1047, 1052, 1057, 1062, and 1067; (xi) a CDR2 having an amino acid sequence that is at least 65%, at least 70%, at least 75%, at least 80%, at least 85%, at least 90%, at least 95%, at least 99%, or 100% identical to any one of SEQ ID NOs: 6, 19, 27, 35, 69, 76, 149, 156, 630, 142, 176, 1048, 1053, 1058, 1063, and 1068; and (xii) a CDR3 having an amino acid sequence that is at least 65%, at least 70%, at least 75%, at least 80%, at least 85%, at least 90%, at least 95%, at least 99%, or 100% identical to any one of SEQ ID NOs: 7, 13, 20, 28, 36, 40, 70, 77, 327, 150, 157, 332, 631, 765, 767, 143, 857, 177, 793, 1049, 1054, 1059, 1064, and 1069.

[1288] In some aspects, the antigen binding polypeptides provided herein comprise (i) a VL1 comprising an amino acid sequence that is at least 65%, at least 70%, at least 75%, at least 80%, at least 85%, at least 90%, at least 95%, at least 99%, or 100% identical to SEQ ID NO: 147; (ii) a VH1 comprising an amino acid sequence that is at least 65%, at least 70%, at least 75%, at least 80%, at least 85%, at least 90%, at least 95%, at least 99%, or 100% identical to SEQ ID NO: 151; (iii) a VL2 comprising an amino acid sequence that is at least 65%, at least 70%, at least 75%, at least 80%, at least 85%, at least 90%, at least 95%, at least 99%, or 100% identical to any one of SEQ ID NOs: 4, 11, 17, 25, 33, 39, 67, 74, 147, 154, 140, and 174; and (iv) a VH2 comprising an amino acid sequence that is at least 65%, at least 70%, at least 75%, at least 80%, at least 85%, at least 90%, at least 95%, at least 99%, or 100% identical to any one of SEQ ID NOs: 8, 14, 21, 22, 29, 37, 71, 78, 151, 158, 626, 144, and 178.

[1289] In some aspects, the antigen binding polypeptides provided herein comprise a VL1 comprising (i) a complementarity determining region (CDR) 1 having an amino acid sequence that is at least 65%, at least 70%, at least 75%, at least 80%, at least 85%, at least 90%, at least 95%, at least 99%, or 100% identical to SEQ ID NO: 145 or 1050; (ii) a CDR2 having an amino acid sequence that is at least 65%, at least 70%, at least 75%, at least 80%, at least 85%, at least 90%, at least 95%, at least 99%, or 100% identical to SEQ ID NO: 1051 or an amino acid sequence that is at least 65%, at least 70%, at least 75%, at least 80%, at least 85%, at least 90%, at least 95%, at least 99%, or 100% identical to amino acid sequence AAS; and (iii) a CDR3 having an amino acid sequence that is at least 65%, at least 70%, at least 75%, at least 80%, at least 85%, at least 90%, at least 95%, at least 99%, or 100% identical to SEQ ID NO: 146 or 764; a VH1 comprising (iv) a complementarity determining region (CDR) 1 having an amino acid sequence that is at least 65%, at least 70%, at least 75%, at least 80%, at least 85%, at least 90%, at least 95%, at least 99%, or 100% identical to SEQ ID NO: 148 or 1052; (v) a CDR2 having an amino acid sequence that is at least 65%, at least 70%, at least 75%, at least 80%, at least 85%, at least 90%, at least 95%, at least 99%, or 100% identical to SEQ ID NO: 149 or 1053; and (vi) a CDR3 having an amino acid sequence that is at least 65%, at least 70%, at least 75%, at least 80%, at least 85%, at least 90%, at least 95%, at least 99%, or 100% identical to SEQ ID NO: 150, 765, or 1054; a VL2 comprising (vii) a complementarity determining region (CDR) 1 having an amino acid sequence that is at least 65%, at least 70%, at least 75%, at least 80%, at least 85%, at least 90%, at least 95%, at least 99%, or 100% identical to SEQ ID NO: 9 or 1055; (viii) a CDR2 having an amino acid sequence that is at least 65%, at least 70%, at least 75%, at least 80%, at least 85%, at least 90%, at least 95%, at least 99%, or 100% identical to SEQ ID NO: 1056 or an amino acid sequence that is at least 65%, at least 70%, at least 75%, at least 80%, at least 85%, at least 90%, at least 95%, at least 99%, or 100% identical to amino acid sequence GAS; and (ix) a CDR3 having an amino acid sequence that is at least 65%, at least 70%, at least 75%, at least 80%, at least 85%, at least 90%, at least 95%, at least 99%, or 100% identical to SEQ ID NO: 10; and a VH2 comprising (x) a CDR1 having an amino acid sequence that is at least 65%, at least 70%, at least 75%, at least 80%, at least 85%, at least 90%, at least 95%, at least 99%, or 100% identical to SEQ ID NO: 12 or 1057; (xi) a CDR2 having an amino acid sequence that is at least 65%, at least 70%, at least 75%, at least 80%, at least 85%, at least 90%, at least 95%, at least 99%, or 100% identical to SEQ ID NO: 6 or 1058; and (xii) a CDR3 having an amino acid sequence that is at least 65%, at least 70%, at least 75%, at least 80%, at least 85%, at least 90%, at least 95%, at least 99%, or 100% identical to SEQ ID NO: 13 or 1059.

[1290] In some aspects, the antigen binding polypeptides provided herein comprise (i) a VL1 comprising an amino acid sequence that is at least 65%, at least 70%, at least 75%, at least 80%, at least 85%, at least 90%, at least 95%, at least 99%, or 100% identical to SEQ ID NO: 147; (ii) a VH1 comprising an amino acid sequence that is at least 65%, at least 70%, at least 75%, at least 80%, at least 85%, at least 90%, at least 95%, at least 99%, or 100% identical to SEQ ID NO: 151; (iii) a VL2 comprising an amino acid sequence that is at least 65%, at least 70%, at least 75%, at least 80%, at least 85%, at least 90%, at least 95%, at least 99%, or 100% identical to SEQ ID NO: 11; and (iv) a VH2 comprising an amino acid sequence that is at least 65%, at least 70%, at least 75%, at least 80%, at least 85%, at least 90%, at least 95%, at least 99%, or 100% identical to SEQ ID NO: 14.

[1291] In some aspects, the antigen binding polypeptides provided herein comprise a VL1 comprising (i) a complementarity determining region (CDR) 1 having an amino acid sequence that is at least 65%, at least 70%, at least 75%, at least 80%, at least 85%, at least 90%, at least 95%, at least 99%, or 100% identical to SEQ ID NO: 145 or 1050; (ii) a CDR2 having an amino acid sequence that is at least 65%, at least 70%, at least 75%, at least 80%, at least 85%, at least 90%, at least 95%, at least 99%, or 100% identical to SEQ ID NO: 1051 or an amino acid sequence that is at least 65%, at least 70%, at least 75%, at least 80%, at least 85%, at least 90%, at least 95%, at least 99%, or 100% identical to amino acid sequence AAS; and (iii) a CDR3 having an amino acid sequence that is at least 65%, at least 70%, at least 75%, at least 80%, at least 85%, at least 90%, at least 95%, at least 99%, or 100% identical to SEQ ID NO: 146 or 764; a VH1 comprising (iv) a complementarity determining region (CDR) 1 having an amino acid sequence that is at least 65%, at least 70%, at least 75%, at least 80%, at least 85%, at least 90%, at least 95%, at least 99%, or 100% identical to SEQ ID NO: 148 or 1052; (v) a CDR2 having an amino acid sequence that is at least 65%, at least 70%, at least 75%, at least 80%, at least 85%, at least 90%, at least 95%, at least 99%, or 100% identical to SEQ ID NO: 149 or 1053; and (vi) a CDR3 having an amino acid sequence that is at least 65%, at least 70%, at least 75%, at least 80%, at least 85%, at least 90%, at least 95%, at least 99%, or 100% identical to SEQ ID NO: 150, 765, or 1054; a VL2 comprising (vii) a complementarity determining region (CDR) 1 having an amino acid sequence that is at least 65%, at least 70%, at least 75%, at least 80%, at least 85%, at least 90%, at least 95%, at least 99%, or 100% identical to SEQ ID NO: 152 or 1045; (viii) a CDR2 having an amino acid sequence that is at least 65%, at least 70%, at least 75%, at least 80%, at least 85%, at least 90%, at least 95%, at least 99%, or 100% identical to SEQ ID NO: 1046 or an amino acid sequence that is at least 65%, at least 70%, at least 75%, at least 80%, at least 85%, at least 90%, at least 95%, at least 99%, or 100% identical to amino acid sequence GAS; and (ix) a CDR3 having an amino acid sequence that is at least 65%, at least 70%, at least 75%, at least 80%, at least 85%, at least 90%, at least 95%, at least 99%, or 100% identical to SEQ ID NO: 153 or 766; and a VH2 comprising (x) a CDR1 having an amino acid sequence that is at least 65%, at least 70%, at least 75%, at least 80%, at least 85%, at least 90%, at least 95%, at least 99%, or 100% identical to SEQ ID NO: 155 or 1047; (xi) a CDR2 having an amino acid sequence that is at least 65%, at least 70%, at least 75%, at least 80%, at least 85%, at least 90%, at least 95%, at least 99%, or 100% identical to SEQ ID NO: 156 or 1048; and (xii) a CDR3 having an amino acid sequence that is at least 65%, at least 70%, at least 75%, at least 80%, at least 85%, at least 90%, at least 95%, at least 99%, or 100% identical to SEQ ID NO: 157, 767, or 1049.

[1292] In some aspects, the antigen binding polypeptides provided herein comprise (i) a VL1 comprising an amino acid sequence that is at least 65%, at least 70%, at least 75%, at least 80%, at least 85%, at least 90%, at least 95%, at least 99%, or 100% identical to SEQ ID NO: 147; (ii) a VH1 comprising an amino acid sequence that is at least 65%, at least 70%, at least 75%, at least 80%, at least 85%, at least 90%, at least 95%, at least 99%, or 100% identical to SEQ ID NO: 151; (iii) a VL2 comprising an amino acid sequence that is at least 65%, at least 70%, at least 75%, at least 80%, at least 85%, at least 90%, at least 95%, at least 99%, or 100% identical to SEQ ID NO: 154; and (iv) a VH2 comprising an amino acid sequence that is at least 65%, at least 70%, at least 75%, at least 80%, at least 85%, at least 90%, at least 95%, at least 99%, or 100% identical to SEQ ID NO: 158.

[1293] In some aspects, the antigen binding polypeptides provided herein comprise a VL1 comprising (i) a complementarity determining region (CDR) 1 having an amino acid sequence that is at least 65%, at least 70%, at least 75%, at least 80%, at least 85%, at least 90%, at least 95%, at least 99%, or 100% identical to SEQ ID NO: 145 or 1050; (ii) a CDR2 having an amino acid sequence that is at least 65%, at least 70%, at least 75%, at least 80%, at least 85%, at least 90%, at least 95%, at least 99%, or 100% identical to SEQ ID NO: 1051 or an amino acid sequence that is at least 65%, at least 70%, at least 75%, at least 80%, at least 85%, at least 90%, at least 95%, at least 99%, or 100% identical to amino acid sequence AAS; and (iii) a CDR3 having an amino acid sequence that is at least 65%, at least 70%, at least 75%, at least 80%, at least 85%, at least 90%, at least 95%, at least 99%, or 100% identical to SEQ ID NO: 146 or 764; a VH1 comprising (iv) a complementarity determining region (CDR) 1 having an amino acid sequence that is at least 65%, at least 70%, at least 75%, at least 80%, at least 85%, at least 90%, at least 95%, at least 99%, or 100% identical to SEQ ID NO: 148 or 1052; (v) a CDR2 having an amino acid sequence that is at least 65%, at least 70%, at least 75%, at least 80%, at least 85%, at least 90%, at least 95%, at least 99%, or 100% identical to SEQ ID NO: 149 or 1053; and (vi) a CDR3 having an amino acid sequence that is at least 65%, at least 70%, at least 75%, at least 80%, at least 85%, at least 90%, at least 95%, at least 99%, or 100% identical to SEQ ID NO: 150, 765, or 1054; a VL2 comprising (vii) a complementarity determining region (CDR) 1 having an amino acid sequence that is at least 65%, at least 70%, at least 75%, at least 80%, at least 85%, at least 90%, at least 95%, at least 99%, or 100% identical to SEQ ID NO: 65 or 627; (viii) a CDR2 having an amino acid sequence that is at least 65%, at least 70%, at least 75%, at least 80%, at least 85%, at least 90%, at least 95%, at least 99%, or 100% identical to SEQ ID NO: 628 or an amino acid sequence that is at least 65%, at least 70%, at least 75%, at least 80%, at least 85%, at least 90%, at least 95%, at least 99%, or 100% identical to amino acid sequence SDS; and (ix) a CDR3 having an amino acid sequence that is at least 65%, at least 70%, at least 75%, at least 80%, at least 85%, at least 90%, at least 95%, at least 99%, or 100% identical to SEQ ID NO: 66; and a VH2 comprising (x) a CDR1 having an amino acid sequence that is at least 65%, at least 70%, at least 75%, at least 80%, at least 85%, at least 90%, at least 95%, at least 99%, or 100% identical to SEQ ID NO: 68 or 629; (xi) a CDR2 having an amino acid sequence that is at least 65%, at least 70%, at least 75%, at least 80%, at least 85%, at least 90%, at least 95%, at least 99%, or 100% identical to SEQ ID NO: 69 or 630; and (xii) a CDR3 having an amino acid sequence that is at least 65%, at least 70%, at least 75%, at least 80%, at least 85%, at least 90%, at least 95%, at least 99%, or 100% identical to SEQ ID NO: 70 or 631.

[1294] In some aspects, the antigen binding polypeptides provided herein comprise (i) a VL1 comprising an amino acid sequence that is at least 65%, at least 70%, at least 75%, at least 80%, at least 85%, at least 90%, at least 95%, at least 99%, or 100% identical to SEQ ID NO: 147; (ii) a VH1 comprising an amino acid sequence that is at least 65%, at least 70%, at least 75%, at least 80%, at least 85%, at least 90%, at least 95%, at least 99%, or 100% identical to SEQ ID NO: 151; (iii) a VL2 comprising an amino acid sequence that is at least 65%, at least 70%, at least 75%, at least 80%, at least 85%, at least 90%, at least 95%, at least 99%, or 100% identical to SEQ ID NO: 67; and (iv) a VH2 comprising an amino acid sequence that is at least 65%, at least 70%, at least 75%, at least 80%, at least 85%, at least 90%, at least 95%, at least 99%, or 100% identical to SEQ ID NO: 71 or 626.

[1295] In some aspects, the antigen binding polypeptides provided herein comprise a VL1 comprising (i) a complementarity determining region (CDR) 1 having an amino acid sequence that is at least 65%, at least 70%, at least 75%, at least 80%, at least 85%, at least 90%, at least 95%, at least 99%, or 100% identical to SEQ ID NO: 145 or 1050; (ii) a CDR2 having an amino acid sequence that is at least 65%, at least 70%, at least 75%, at least 80%, at least 85%, at least 90%, at least 95%, at least 99%, or 100% identical to SEQ ID NO: 1051 or an amino acid sequence that is at least 65%, at least 70%, at least 75%, at least 80%, at least 85%, at least 90%, at least 95%, at least 99%, or 100% identical to amino acid sequence AAS; and (iii) a CDR3 having an amino acid sequence that is at least 65%, at least 70%, at least 75%, at least 80%, at least 85%, at least 90%, at least 95%, at least 99%, or 100% identical to SEQ ID NO: 146 or 764; a VH1 comprising (iv) a complementarity determining region (CDR) 1 having an amino acid sequence that is at least 65%, at least 70%, at least 75%, at least 80%, at least 85%, at least 90%, at least 95%, at least 99%, or 100% identical to SEQ ID NO: 148 or 1052; (v) a CDR2 having an amino acid sequence that is at least 65%, at least 70%, at least 75%, at least 80%, at least 85%, at least 90%, at least 95%, at least 99%, or 100% identical to SEQ ID NO: 149 or 1053; and (vi) a CDR3 having an amino acid sequence that is at least 65%, at least 70%, at least 75%, at least 80%, at least 85%, at least 90%, at least 95%, at least 99%, or 100% identical to SEQ ID NO: 150, 765, or 1054; a VL2 comprising (vii) a complementarity determining region (CDR) 1 having an amino acid sequence that is at least 65%, at least 70%, at least 75%, at least 80%, at least 85%, at least 90%, at least 95%, at least 99%, or 100% identical to SEQ ID NO: 138 or 1065; (viii) a CDR2 having an amino acid sequence that is at least 65%, at least 70%, at least 75%, at least 80%, at least 85%, at least 90%, at least 95%, at least 99%, or 100% identical to SEQ ID NO: 1061 or an amino acid sequence that is at least 65%, at least 70%, at least 75%, at least 80%, at least 85%, at least 90%, at least 95%, at least 99%, or 100% identical to amino acid sequence DAS; and (ix) a CDR3 having an amino acid sequence that is at least 65%, at least 70%, at least 75%, at least 80%, at least 85%, at least 90%, at least 95%, at least 99%, or 100% identical to SEQ ID NO: 139, 856, or 1066; and a VH2 comprising (x) a CDR1 having an amino acid sequence that is at least 65%, at least 70%, at least 75%, at least 80%, at least 85%, at least 90%, at least 95%, at least 99%, or 100% identical to SEQ ID NO: 141 or 1067; (xi) a CDR2 having an amino acid sequence that is at least 65%, at least 70%, at least 75%, at least 80%, at least 85%, at least 90%, at least 95%, at least 99%, or 100% identical to SEQ ID NO: 142 or 1068; and (xii) a CDR3 having an amino acid sequence that is at least 65%, at least 70%, at least 75%, at least 80%, at least 85%, at least 90%, at least 95%, at least 99%, or 100% identical to SEQ ID NO: 143, 857, or 1069.

[1296] In some aspects, the antigen binding polypeptides provided herein comprise (i) a VL1 comprising an amino acid sequence that is at least 65%, at least 70%, at least 75%, at least 80%, at least 85%, at least 90%, at least 95%, at least 99%, or 100% identical to SEQ ID NO: 147; (ii) a VH1 comprising an amino acid sequence that is at least 65%, at least 70%, at least 75%, at least 80%, at least 85%, at least 90%, at least 95%, at least 99%, or 100% identical to SEQ ID NO: 151; (iii) a VL2 comprising an amino acid sequence that is at least 65%, at least 70%, at least 75%, at least 80%, at least 85%, at least 90%, at least 95%, at least 99%, or 100% identical to SEQ ID NO: 140; and (iv) a VH2 comprising an amino acid sequence that is at least 65%, at least 70%, at least 75%, at least 80%, at least 85%, at least 90%, at least 95%, at least 99%, or 100% identical to SEQ ID NO: 144.

[1297] In some aspects, the antigen binding polypeptides provided herein comprise a VL1 comprising (i) a complementarity determining region (CDR) 1 having an amino acid sequence that is at least 65%, at least 70%, at least 75%, at least 80%, at least 85%, at least 90%, at least 95%, at least 99%, or 100% identical to SEQ ID NO: 145 or 1050; (ii) a CDR2 having an amino acid sequence that is at least 65%, at least 70%, at least 75%, at least 80%, at least 85%, at least 90%, at least 95%, at least 99%, or 100% identical to SEQ ID NO: 1051 or an amino acid sequence that is at least 65%, at least 70%, at least 75%, at least 80%, at least 85%, at least 90%, at least 95%, at least 99%, or 100% identical to amino acid sequence AAS; and (iii) a CDR3 having an amino acid sequence that is at least 65%, at least 70%, at least 75%, at least 80%, at least 85%, at least 90%, at least 95%, at least 99%, or 100% identical to SEQ ID NO: 146 or 764; a VH1 comprising (iv) a complementarity determining region (CDR) 1 having an amino acid sequence that is at least 65%, at least 70%, at least 75%, at least 80%, at least 85%, at least 90%, at least 95%, at least 99%, or 100% identical to SEQ ID NO: 148 or 1052; (v) a CDR2 having an amino acid sequence that is at least 65%, at least 70%, at least 75%, at least 80%, at least 85%, at least 90%, at least 95%, at least 99%, or 100% identical to SEQ ID NO: 149 or 1053; and (vi) a CDR3 having an amino acid sequence that is at least 65%, at least 70%, at least 75%, at least 80%, at least 85%, at least 90%, at least 95%, at least 99%, or 100% identical to SEQ ID NO: 150, 765, or 1054; a VL2 comprising (vii) a complementarity determining region (CDR) 1 having an amino acid sequence that is at least 65%, at least 70%, at least 75%, at least 80%, at least 85%, at least 90%, at least 95%, at least 99%, or 100% identical to SEQ ID NO: 172 or 1060; (viii) a CDR2 having an amino acid sequence that is at least 65%, at least 70%, at least 75%, at least 80%, at least 85%, at least 90%, at least 95%, at least 99%, or 100% identical to SEQ ID NO: 1061 or an amino acid sequence that is at least 65%, at least 70%, at least 75%, at least 80%, at least 85%, at least 90%, at least 95%, at least 99%, or 100% identical to amino acid sequence DAS; and (ix) a CDR3 having an amino acid sequence that is at least 65%, at least 70%, at least 75%, at least 80%, at least 85%, at least 90%, at least 95%, at least 99%, or 100% identical to SEQ ID NO: 173 or 792; and a VH2 comprising (x) a CDR1 having an amino acid sequence that is at least 65%, at least 70%, at least 75%, at least 80%, at least 85%, at least 90%, at least 95%, at least 99%, or 100% identical to SEQ ID NO: 175 or 1062; (xi) a CDR2 having an amino acid sequence that is at least 65%, at least 70%, at least 75%, at least 80%, at least 85%, at least 90%, at least 95%, at least 99%, or 100% identical to SEQ ID NO: 176 or 1063; and (xii) a CDR3 having an amino acid sequence that is at least 65%, at least 70%, at least 75%, at least 80%, at least 85%, at least 90%, at least 95%, at least 99%, or 100% identical to SEQ ID NO: 177, 793, or 1064.

[1298] In some aspects, the antigen binding polypeptides provided herein comprise (i) a VL1 comprising an amino acid sequence that is at least 65%, at least 70%, at least 75%, at least 80%, at least 85%, at least 90%, at least 95%, at least 99%, or 100% identical to SEQ ID NO: 147; (ii) a VH1 comprising an amino acid sequence that is at least 65%, at least 70%, at least 75%, at least 80%, at least 85%, at least 90%, at least 95%, at least 99%, or 100% identical to SEQ ID NO: 151; (iii) a VL2 comprising an amino acid sequence that is at least 65%, at least 70%, at least 75%, at least 80%, at least 85%, at least 90%, at least 95%, at least 99%, or 100% identical to SEQ ID NO: 174; and (iv) a VH2 comprising an amino acid sequence that is at least 65%, at least 70%, at least 75%, at least 80%, at least 85%, at least 90%, at least 95%, at least 99%, or 100% identical to SEQ ID NO: 178.

[1299] In some aspects, the antigen binding polypeptides provided herein comprise a VL1 comprising (i) a complementarity determining region (CDR) 1 having an amino acid sequence that is at least 65%, at least 70%, at least 75%, at least 80%, at least 85%, at least 90%, at least 95%, at least 99%, or 100% identical to SEQ ID NO: 145 or 1050; (ii) a CDR2 having an amino acid sequence that is at least 65%, at least 70%, at least 75%, at least 80%, at least 85%, at least 90%, at least 95%, at least 99%, or 100% identical to SEQ ID NO: 1051 or an amino acid sequence that is at least 65%, at least 70%, at least 75%, at least 80%, at least 85%, at least 90%, at least 95%, at least 99%, or 100% identical to amino acid sequence AAS; and (iii) a CDR3 having an amino acid sequence that is at least 65%, at least 70%, at least 75%, at least 80%, at least 85%, at least 90%, at least 95%, at least 99%, or 100% identical to SEQ ID NO: 146 or 764; a VH1 comprising (iv) a complementarity determining region (CDR) 1 having an amino acid sequence that is at least 65%, at least 70%, at least 75%, at least 80%, at least 85%, at least 90%, at least 95%, at least 99%, or 100% identical to SEQ ID NO: 148 or 1052; (v) a CDR2 having an amino acid sequence that is at least 65%, at least 70%, at least 75%, at least 80%, at least 85%, at least 90%, at least 95%, at least 99%, or 100% identical to SEQ ID NO: 149 or 1053; and (vi) a CDR3 having an amino acid sequence that is at least 65%, at least 70%, at least 75%, at least 80%, at least 85%, at least 90%, at least 95%, at least 99%, or 100% identical to SEQ ID NO: 150, 765, or 1054; a VL2 comprising (vii) a complementarity determining region (CDR) 1 having an amino acid sequence that is at least 65%, at least 70%, at least 75%, at least 80%, at least 85%, at least 90%, at least 95%, at least 99%, or 100% identical to SEQ ID NO: 145 or 1050; (viii) a CDR2 having an amino acid sequence that is at least 65%, at least 70%, at least 75%, at least 80%, at least 85%, at least 90%, at least 95%, at least 99%, or 100% identical to SEQ ID NO: 1051 or an amino acid sequence that is at least 65%, at least 70%, at least 75%, at least 80%, at least 85%, at least 90%, at least 95%, at least 99%, or 100% identical to amino acid sequence AAS; and (ix) a CDR3 having an amino acid sequence that is at least 65%, at least 70%, at least 75%, at least 80%, at least 85%, at least 90%, at least 95%, at least 99%, or 100% identical to SEQ ID NO: 146 or 764; and a VH2 comprising (x) a CDR1 having an amino acid sequence that is at least 65%, at least 70%, at least 75%, at least 80%, at least 85%, at least 90%, at least 95%, at least 99%, or 100% identical to SEQ ID NO: 148 or 1052; (xi) a CDR2 having an amino acid sequence that is at least 65%, at least 70%, at least 75%, at least 80%, at least 85%, at least 90%, at least 95%, at least 99%, or 100% identical to SEQ ID NO: 149 or 1053; and (xii) a CDR3 having an amino acid sequence that is at least 65%, at least 70%, at least 75%, at least 80%, at least 85%, at least 90%, at least 95%, at least 99%, or 100% identical to SEQ ID NO: 150, 765, or 1054.

[1300] In some aspects, the antigen binding polypeptides provided herein comprise (i) a VL1 comprising an amino acid sequence that is at least 65%, at least 70%, at least 75%, at least 80%, at least 85%, at least 90%, at least 95%, at least 99%, or 100% identical to SEQ ID NO: 147; (ii) a VH1 comprising an amino acid sequence that is at least 65%, at least 70%, at least 75%, at least 80%, at least 85%, at least 90%, at least 95%, at least 99%, or 100% identical to SEQ ID NO: 151; (iii) a VL2 comprising an amino acid sequence that is at least 65%, at least 70%, at least 75%, at least 80%, at least 85%, at least 90%, at least 95%, at least 99%, or 100% identical to SEQ ID NO: 147; and (iv) a VH2 comprising an amino acid sequence that is at least 65%, at least 70%, at least 75%, at least 80%, at least 85%, at least 90%, at least 95%, at least 99%, or 100% identical to SEQ ID NO: 151.

[1301] In some aspects, the antigen binding polypeptides disclosed herein, comprise one or more CL, as indicated in the formulas representing the antigen binding polypeptides disclosed herein. In some aspects, the CL comprises an amino acid sequence at least 65%, at least 70%, at least 75%, at least 80%, at least 85%, at least 90%, at least 95%, at least 99%, or 100% identical to any one of SEQ ID NOs: 374, 637, or 1092-1095.

[1302] In some aspects, the antigen binding polypeptides disclosed herein, comprise one or more CH1, as indicated in the formulas representing the antigen binding polypeptides disclosed herein. In some aspects, the CH1 comprises an amino acid sequence at least 65%, at least 70%, at least 75%, at least 80%, at least 85%, at least 90%, at least 95%, at least 99%, or 100% identical to any one of SEQ ID NOs: 375, 634, 1070, 1071, or 1086-1091.

[1303] In some aspects, the antigen binding polypeptides provided herein further comprise an Fc region. In some aspects, the antigen binding polypeptides provided herein further comprise an Fc region at the carboxy-terminus. In some aspects, the Fc region comprises an immunoglobulin heavy chain constant region 2 (CH2) and/or an immunoglobulin heavy chain constant region 3 (CH3). In some aspects, the Fc region further comprises an immunoglobulin hinge (i.e., a hinge region). In some aspects, the hinge region comprises an amino acid sequence at least 65%, at least 70%, at least 75%, at least 80%, at least 85%, at least 90%, at least 95%, at least 99%, or 100% identical to any one of SEQ ID NOs: 635, 636, 1072, 1073, or 1074. In some aspects, the Fc region comprises a CH2 and a CH3. In some aspects, the CH2 comprises an amino acid sequence that is at least 65%, at least 70%, at least 75%, at least 80%, at least 85%, at least 90%, at least 95%, at least 99%, or 100% identical to any one of SEQ ID NOs: 1075-1078. In some aspects, the CH3 comprises an amino acid sequence that is at least 65%, at least 70%, at least 75%, at least 80%, at least 85%, at least 90%, at least 95%, at least 99%, or 100% identical to any one of SEQ ID NOs: 1079-1085. In some aspects, the Fc region comprises an amino acid sequence that is at least 65%, at least 70%, at least 75%, at least 80%, at least 85%, at least 90%, at least 95%, at least 99%, or 100% identical to any one of SEQ ID NOs: 376-380.

[1304] In some aspects, the Fc region comprises one or more amino acid substitutions. In some aspects, the one or more amino acid substitutions comprise one or more half-life extension amino acid substitutions. In some aspects, the one or more half-life extension amino acid substitutions comprise one or more of amino acid substitutions M428L, N434A, N434S, L234F, L235E, P331S, M252Y, S254T, and T256E, or equivalent thereof, based on the EU numbering scheme. In some aspects, the one or more half-life extension amino acid substitutions comprise a LA (M428L and N434A, or equivalent thereof, based on the EU numbering scheme) amino acid substitution. In some aspects, the one or more half-life extension amino acid substitutions comprise a LS (M428L and N434S, or equivalent thereof, based on the EU numbering scheme) amino acid substitution. In some aspects, the one or more half-life extension amino acid substitutions comprise L234F and L235E, or equivalent thereof (based on the EU numbering scheme) amino acid substitutions. In some aspects, the one or more half-life extension amino acid substitutions comprise a TM (L234F, L235E, and P331S, or equivalent thereof, based on the EU numbering scheme) amino acid substitution. In some aspects, the one or more half-life extension amino acid substitutions comprise a YTE (M252Y, S254T, and T256E, or equivalent thereof, based on the EU numbering scheme) amino acid substitution.

[1305] In some aspects, the Fc region comprises at least one knob-into-hole modification. In some aspects, the antigen binding polypeptides disclosed herein are comprised in IgG1 or IgG4 antibodies or antigen binding fragments thereof. In some aspects, the knob-into-hole modification comprises one or more of knob substitutions of S354C and T366W, or equivalent thereof, and/or one or more of hole substitutions of Y349C, T366S, L368A, Y407V, or equivalent thereof, or a combination thereof, based on the EU numbering scheme. In some aspects, the Fc region comprises a knob-into-hole modification comprising knob substitutions of S354C and T366W, or equivalent thereof, and/or hole substitutions of Y349C, T366S, L368A and Y407V, or equivalent thereof, and/or a half-life extension amino acid substitution comprising: a LA (M428L and N434A, or equivalent thereof, based on the EU numbering scheme) amino acid substitution, a LS (M428L and N434S, or equivalent thereof, based on the EU numbering scheme) amino acid substitution. L234F and L235E, or equivalent thereof (based on the EU numbering scheme) amino acid substitutions, a TM (L234F, L235E, and P331S, or equivalent thereof, based on the EU numbering scheme) amino acid substitution, a YTE (M252Y, S254T, and T256E, or equivalent thereof, based on the EU numbering scheme) amino acid substitution, or any combination thereof.

[1306] In some aspects, the Fc region comprises knob substitutions of S354C and T366W, or equivalent thereof, and a half-life extension amino acid substitution comprising: a LA (M428L and N434A, or equivalent thereof, based on the EU numbering scheme) amino acid substitution, a LS (M428L and N434S, or equivalent thereof, based on the EU numbering scheme) amino acid substitution. L234F and L235E, or equivalent thereof (based on the EU numbering scheme) amino acid substitutions, a TM (L234F, L235E, and P331S, or equivalent thereof, based on the EU numbering scheme) amino acid substitution, a YTE (M252Y, S254T, and T256E, or equivalent thereof, based on the EU numbering scheme) amino acid substitution, or any combination thereof.

[1307] In some aspects, the Fc region comprises hole substitutions of Y349C, T366S, L368A and Y407V, or equivalent thereof, and a half-life extension amino acid substitution comprising: a LA (M428L and N434A, or equivalent thereof, based on the EU numbering scheme) amino acid substitution, a LS (M428L and N434S, or equivalent thereof, based on the EU numbering scheme) amino acid substitution. L234F and L235E, or equivalent thereof (based on the EU numbering scheme) amino acid substitutions, a TM (L234F, L235E, and P331S, or equivalent thereof, based on the EU numbering scheme) amino acid substitution, a YTE (M252Y, S254T, and T256E, or equivalent thereof, based on the EU numbering scheme) amino acid substitution, or any combination thereof.

[1308] In some aspects, the antigen binding polypeptides disclosed herein comprise one or more Fc effector function knockout mutation. In some aspects, the antigen binding polypeptides disclosed herein are comprised in IgG1 or IgG4 antibodies or antigen binding fragments thereof. In some aspects, the Fc effector function knockout mutation is L234A, L235A, P239A, or equivalent thereof, or a combination thereof, based on the EU numbering scheme.

[1309] In some aspects, the antigen binding polypeptides disclosed herein comprise a mutation at a glycosylation site. In some aspects, the mutation at a glycosylation site is a mutation at an N-glycosylation site. In some aspects, the antigen binding polypeptides comprise a VH comprising a mutation at a glycosylation site. In some aspects, the mutation at a glycosylation site is a mutation at an N-glycosylation site. In some aspects, the mutation at an N-glycosylation site is at amino acid N62 of the VH region or equivalent thereof. In some aspects, the mutation at an N-glycosylation site at amino acid N62 is N62Q or N62S, or equivalent thereof.

[1310] In some aspects, the antigen binding polypeptides disclosed herein, comprise one or more optional linkers. The one or more optional linkers are indicated herein as Ln, wherein n is an integer, and the integer next to each L indicates each L comprised in the antigen binding polypeptides disclosed herein. For example, if an antigen binding polypeptide disclosed herein comprises two linkers, the first linker from N-terminus to C-terminus is herein indicated as L1, and the second linker from N-terminus to C-terminus is herein indicated as L2. In some aspects, any one of the optional linkers each independently have a length of from 0 amino acids to about 50 amino acids. In some aspects, any one of the optional linkers each independently have a length of from 5 amino acids to about 40 amino acids.

[1311] In some aspects, any one of the optional linkers are non-immunogenic. In some aspects, any one of the optional linkers do not contain a consensus T cell epitope.

[1312] In some aspects, any of Ln comprises an amino acid sequence of G or A, or an amino acid sequence at least 65%, at least 70%, at least 75%, at least 80%, at least 85%, at least 90%, at least 95%, at least 99%, or 100% identical to amino acid sequence GSS or ASG, or an amino acid sequence at least 65%, at least 70%, at least 75%, at least 80%, at least 85%, at least 90%, at least 95%, at least 99%, or 100% identical to any one of SEQ ID NOs: 333-373 or 967-971. In some aspects, Ln comprises an amino acid sequence at least 65%, at least 70%, at least 75%, at least 80%, at least 85%, at least 90%, at least 95%, at least 99%, or 100% identical to any one of SEQ ID NOs: 333-345 or 967-971.

[1313] In some aspects, the antigen binding polypeptides provided herein have a structure, from amino-terminus to carboxy-terminus, represented by:
[1314] VL1-L1-VH1-L2-VL2-L3-CL-L4-VH2-L5-CH1;
[1315] VL1-L1-VH1-L2-VL2-L3-CH1-L4-VH2-L5-CL;
[1316] VL1-L1-VH1-L2-VH2-L3-CL-L4-VL2-L5-CH1;
[1317] VL1-L1-VH1-L2-VH2-L3-CH1-L4-VL2-L5-CL;
[1318] VL1-L1-VL2-L2-VH1-L3-CL-L4-VH2-L5-CH1;
[1319] VL1-L1-VL2-L2-VH1-L3-CH1-L4-VH2-L5-CL;
[1320] VL1-L1-VH2-L2-VH1-L3-CL-L4-VL2-L5-CH1;
[1321] VL1-L1-VH2-L2-VH1-L3-CH1-L4-VL2-L5-CL;
[1322] VH1-L1-VL1-L2-VL2-L3-CL-L4-VH2-L5-CH1;
[1323] VH1-L1-VL1-L2-VL2-L3-CH1-L4-VH2-L5-CL;
[1324] VH1-L1-VL1-L2-VH2-L3-CL-L4-VL2-L5-CH1;
[1325] VH1-L1-VL1-L2-VH2-L3-CH1-L4-VL2-L5-CL;
[1326] VH1-L1-VL2-L2-VL1-L3-CL-L4-VH2-L5-CH1;
[1327] VH1-L1-VL2-L2-VL1-L3-CH1-L4-VH2-L5-CL;
[1328] VH1-L1-VH2-L2-VL1-L3-CL-L4-VL2-L5-CH1;
[1329] VH1-L1-VH2-L2-VL1-L3-CH1-L4-VL2-L5-CL;
[1330] VL2-L1-VL1-L2-VH2-L3-CL-L4-VH1-L5-CH1;
[1331] VL2-L1-VL1-L2-VH2-L3-CH1-L4-VH1-L5-CL;
[1332] VL2-L1-VH1-L2-VH2-L3-CL-L4-VL1-L5-CH1;
[1333] VL2-L1-VH1-L2-VH2-L3-CH1-L4-VL1-L5-CL;
[1334] VL2-L1-VH2-L2-VL1-L3-CL-L4-VH1-L5-CH1;
[1335] VL2-L1-VH2-L2-VL1-L3-CH1-L4-VH1-L5-CL;
[1336] VL2-L1-VH2-L2-VH1-L3-CL-L4-VL1-L5-CH1;
[1337] VL2-L1-VH2-L2-VH1-L3-CH1-L4-VL1-L5-CL;
[1338] VH2-L1-VL1-L2-VL2-L3-CL-L4-VH1-L5-CH1;
[1339] VH2-L1-VL1-L2-VL2-L3-CH1-L4-VH1-L5-CL;
[1340] VH2-L1-VH1-L2-VL2-L3-CL-L4-VL1-L5-CH1;
[1341] VH2-L1-VH1-L2-VL2-L3-CH1-L4-VL1-L5-CL;
[1342] VH2-L1-VL2-L2-VL1-L3-CL-L4-VH1-L5-CH1;
[1343] VH2-L1-VL2-L2-VL1-L3-CH1-L4-VH1-L5-CL;
[1344] VH2-L1-VL2-L2-VH1-L3-CL-L4-VL1-L5-CH1; or
[1345] VH2-L1-VL2-L2-VH1-L3-CH1-L4-VL1-L5-CL;
[1346] wherein:
[1347] VL1 is a first immunoglobulin light chain variable region that specifically binds to a severe acute respiratory syndrome coronavirus 2 (SARS-CoV-2) protein;
[1348] VL2 is a second immunoglobulin light chain variable region that specifically binds to a SARS-CoV-2 protein;
[1349] VH1 is a first immunoglobulin heavy chain variable region that specifically binds to a SARS-CoV-2 protein;
[1350] VH2 is a second immunoglobulin heavy chain variable region that specifically binds to a SARS-CoV-2 protein;
[1351] CL is an immunoglobulin light chain constant region;
[1352] CH1 is an immunoglobulin heavy chain constant region 1; and
[1353] L1-L5 are optional amino acid linkers.

[1354] In any aspect shown herein as a structure from amino terminus to carboxy terminus, and with binding pairs selected from VL and/or VH or other structural regions such as CH1, CL, CH2, CH3, when shown without a specific linker such as L1, L2, etc., such linkers are optionally present in such structures between each designated subsequence VL, VH, etc.

[1355] In some aspects, the antigen binding polypeptides provided herein comprise a VL1 comprising (i) a complementarity determining region (CDR) 1 having an amino acid sequence that is at least 65%, at least 70%, at least 75%, at least 80%, at least 85%, at least 90%, at least 95%, at least 99%, or 100% identical to any one of SEQ ID NOs: 1, 9, 15, 23, 30, 41, 48, 55, 58, 65, 72, 79, 86, 93, 99, 105, 112, 119, 130, 138, 145, 152, 159, 166, 172, 179, 186, 192, 199, 205, 212, 219, 226, 232, 324, 627, 640, 650, 659, 676, 687, 695, 703, 712, 770, 778, 785, 794, 801, 807, 814, 827, 836, 849, 858, 865, 878, 1045, 1050, 1055, 1060, and 1065; (ii) a CDR2 having an amino acid sequence that is at least 65%, at least 70%, at least 75%, at least 80%, at least 85%, at least 90%, at least 95%, at least 99%, or 100% identical to any one of SEQ ID NOs: 2, 31, 628, 641, 677, 1046, 1051, 1056, and 1061; or at least 65%, at least 70%, at least 75%, at least 80%, at least 85%, at least 90%, at least 95%, at least 99%, or 100% identical to any one of amino acid sequences AAS, GAS, LGS, GTN, GTN, SAS, SDS, DNT, EVT, DAS, DVT, RNS, DVS, EDS, DDS, KDS, VAS, WAS, YTS, EVS, NNN, SYN, and DAT; and (iii) a CDR3 having an amino acid sequence that is at least 65%, at least 70%, at least 75%, at least 80%, at least 85%, at least 90%, at least 95%, at least 99%, or 100% identical to any one of SEQ ID NOs: 3, 10, 16, 24, 32, 38, 42, 49, 59, 66, 73, 80, 87, 94, 100, 106, 113, 120, 126, 131, 139, 146, 153, 160, 167, 173, 180, 187, 193, 200, 206, 213, 220, 227, 233, 239, 242, 246, 249, 256, 283, 285, 287, 288, 290, 292, 294, 296, 301, 304, 306, 309, 311, 313, 316, 325, 326, 329, 642, 651, 660, 668, 678, 651, 696, 704, 713, 764, 766, 768, 771, 779, 786, 792, 795, 808, 815, 821, 830, 837, 843, 850, 856, 859, 866, 872, 879, 885, and 1066.

[1356] In some aspects, the antigen binding polypeptides provided herein comprise a VL2 comprising (i) a complementarity determining region (CDR) 1 having an amino acid sequence that is at least 65%, at least 70%, at least 75%, at least 80%, at least 85%, at least 90%, at least 95%, at least 99%, or 100% identical to any one of SEQ ID NOs: 1, 9, 15, 23, 30, 41, 48, 55, 58, 65, 72, 79, 86, 93, 99, 105, 112, 119, 130, 138, 145, 152, 159, 166, 172, 179, 186, 192, 199, 205, 212, 219, 226, 232, 324, 627, 640, 650, 659, 676, 687, 695, 703, 712, 770, 778, 785, 794, 801, 807, 814, 827, 836, 849, 858, 865, 878, 1045, 1050, 1055, 1060, and 1065; (ii) a CDR2 having an amino acid sequence that is at least 65%, at least 70%, at least 75%, at least 80%, at least 85%, at least 90%, at least 95%, at least 99%, or 100% identical to any one of SEQ ID NOs: 2, 31, 628, 641, 677, 1046, 1051, 1056, and 1061; or at least 65%, at least 70%, at least 75%, at least 80%, at least 85%, at least 90%, at least 95%, at least 99%, or 100% identical to any one of amino acid sequences AAS, GAS, LGS, GTN, GTN, SAS, SDS, DNT, EVT, DAS, DVT, RNS, DVS, EDS, DDS, KDS, VAS, WAS, YTS, EVS, NNN, SYN, and DAT; and (iii) a CDR3 having an amino acid sequence that is at least 65%, at least 70%, at least 75%, at least 80%, at least 85%, at least 90%, at least 95%, at least 99%, or 100% identical to any one of SEQ ID NOs: 3, 10, 16, 24, 32, 38, 42, 49, 59, 66, 73, 80, 87, 94, 100, 106, 113, 120, 126, 131, 139, 146, 153, 160, 167, 173, 180, 187, 193, 200, 206, 213, 220, 227, 233, 239, 242, 246, 249, 256, 283, 285, 287, 288, 290, 292, 294, 296, 301, 304, 306, 309, 311, 313, 316, 325, 326, 329, 642, 651, 660, 668, 678, 651, 696, 704, 713, 764, 766, 768, 771, 779, 786, 792, 795, 808, 815, 821, 830, 837, 843, 850, 856, 859, 866, 872, 879, 885, and 1066.

[1357] In some aspects, the antigen binding polypeptides provided herein comprise a VH1 comprising (i) a CDR1 having an amino acid sequence that is at least 65%, at least 70%, at least 75%, at least 80%, at least 85%, at least 90%, at least 95%, at least 99%, or 100% identical to any one of SEQ ID NOs: 5, 12, 18, 26, 34, 44, 51, 61, 68, 75, 82, 89, 96, 102, 108, 115, 122, 133, 141, 148, 155, 162, 175, 182, 189, 195, 202, 208, 215, 222, 229, 235, 318, 629, 645, 654, 663, 671, 682, 690, 699, 707, 716, 773, 781, 788, 797, 803, 810, 817, 823, 832, 839, 845, 852, 861, 868, 874, 881, 1047, 1052, 1057, 1062, and 1067; (ii) a CDR2 having an amino acid sequence that is at least 65%, at least 70%, at least 75%, at least 80%, at least 85%, at least 90%, at least 95%, at least 99%, or 100% identical to any one of SEQ ID NOs: 6, 19, 27, 35, 45, 52, 56, 62, 69, 76, 83, 90, 109, 116, 123, 134, 142, 149, 156, 163, 169, 176, 183, 196, 209, 216, 223, 236, 273, 319, 328, 630, 646, 655, 664, 672, 683, 691, 708, 776, 782, 789, 798, 804, 811, 818, 824, 833, 840, 846, 853, 862, 869, 875, 882, 1048, 1053, 1058, 1063, and 1068; and (iii) a CDR3 having an amino acid sequence that is at least 65%, at least 70%, at least 75%, at least 80%, at least 85%, at least 90%, at least 95%, at least 99%, or 100% identical to any one of SEQ ID NOs: 7, 13, 20, 28, 36, 40, 46, 53, 63, 70, 77, 84, 91, 97, 103, 110, 117, 124, 128, 135, 143, 150, 157, 164, 170, 177, 184, 190, 197, 203, 210, 217, 224, 230, 237, 241, 244, 248, 253, 257, 259, 261, 263, 265, 267, 269, 271, 274, 276, 278, 281, 297, 320, 322, 327, 330, 332, 631, 647, 656, 665, 673, 684, 692, 700, 709, 717, 765, 767, 769, 774, 783, 790, 793, 799, 805, 812, 819, 825, 834, 841, 847, 854, 857, 863, 870, 876, 883, 886, 1049, 1054, 1059, 1064, and 1069.

[1358] In some aspects, the antigen binding polypeptides provided herein comprise a VH2 comprising (i) a CDR1 having an amino acid sequence that is at least 65%, at least 70%, at least 75%, at least 80%, at least 85%, at least 90%, at least 95%, at least 99%, or 100% identical to any one of SEQ ID NOs: 5, 12, 18, 26, 34, 44, 51, 61, 68, 75, 82, 89, 96, 102, 108, 115, 122, 133, 141, 148, 155, 162, 175, 182, 189, 195, 202, 208, 215, 222, 229, 235, 318, 629, 645, 654, 663, 671, 682, 690, 699, 707, 716, 773, 781, 788, 797, 803, 810, 817, 823, 832, 839, 845, 852, 861, 868, 874, 881, 1047, 1052, 1057, 1062, and 1067; (ii) a CDR2 having an amino acid sequence that is at least 65%, at least 70%, at least 75%, at least 80%, at least 85%, at least 90%, at least 95%, at least 99%, or 100% identical to any one of SEQ ID NOs: 6, 19, 27, 35, 45, 52, 56, 62, 69, 76, 83, 90, 109, 116, 123, 134, 142, 149, 156, 163, 169, 176, 183, 196, 209, 216, 223, 236, 273, 319, 328, 630, 646, 655, 664, 672, 683, 691, 708, 776, 782, 789, 798, 804, 811, 818, 824, 833, 840, 846, 853, 862, 869, 875, 882, 1048, 1053, 1058, 1063, and 1068; and (iii) a CDR3 having an amino acid sequence that is at least 65%, at least 70%, at least 75%, at least 80%, at least 85%, at least 90%, at least 95%, at least 99%, or 100% identical to any one of SEQ ID NOs: 7, 13, 20, 28, 36, 40, 46, 53, 63, 70, 77, 84, 91, 97, 103, 110, 117, 124, 128, 135, 143, 150, 157, 164, 170, 177, 184, 190, 197, 203, 210, 217, 224, 230, 237, 241, 244, 248, 253, 257, 259, 261, 263, 265, 267, 269, 271, 274, 276, 278, 281, 297, 320, 322, 327, 330, 332, 631, 647, 656, 665, 673, 684, 692, 700, 709, 717, 765, 767, 769, 774, 783, 790, 793, 799, 805, 812, 819, 825, 834, 841, 847, 854, 857, 863, 870, 876, 883, 886, 1049, 1054, 1059, 1064, and 1069.

[1359] In some aspects, the antigen binding polypeptides provided herein comprise a VL1 comprising (i) a complementarity determining region (CDR) 1 having an amino acid sequence that is at least 65%, at least 70%, at least 75%, at least 80%, at least 85%, at least 90%, at least 95%, at least 99%, or 100% identical to any one of SEQ ID NOs: 1, 9, 15, 23, 30, 41, 48, 55, 58, 65, 72, 79, 86, 93, 99, 105, 112, 119, 130, 138, 145, 152, 159, 166, 172, 179, 186, 192, 199, 205, 212, 219, 226, 232, 324, 627, 640, 650, 659, 676, 687, 695, 703, 712, 770, 778, 785, 794, 801, 807, 814, 827, 836, 849, 858, 865, 878, 1045, 1050, 1055, 1060, and 1065; (ii) a CDR2 having an amino acid sequence that is at least 65%, at least 70%, at least 75%, at least 80%, at least 85%, at least 90%, at least 95%, at least 99%, or 100% identical to any one of SEQ ID NOs: 2, 31, 628, 641, 677, 1046, 1051, 1056, and 1061; or at least 65%, at least 70%, at least 75%, at least 80%, at least 85%, at least 90%, at least 95%, at least 99%, or 100% identical to any one of amino acid sequences AAS, GAS, LGS, GTN, GTN, SAS, SDS, DNT, EVT, DAS, DVT, RNS, DVS, EDS, DDS, KDS, VAS, WAS, YTS, EVS, NNN, SYN, and DAT; (iii) a CDR3 having an amino acid sequence that is at least 65%, at least 70%, at least 75%, at least 80%, at least 85%, at least 90%, at least 95%, at least 99%, or 100% identical to any one of SEQ ID NOs: 3, 10, 16, 24, 32, 38, 42, 49, 59, 66, 73, 80, 87, 94, 100, 106, 113, 120, 126, 131, 139, 146, 153, 160, 167, 173, 180, 187, 193, 200, 206, 213, 220, 227, 233, 239, 242, 246, 249, 256, 283, 285, 287, 288, 290, 292, 294, 296, 301, 304, 306, 309, 311, 313, 316, 325, 326, 329, 642, 651, 660, 668, 678, 651, 696, 704, 713, 764, 766, 768, 771, 779, 786, 792, 795, 808, 815, 821, 830, 837, 843, 850, 856, 859, 866, 872, 879, 885, and 1066; a VH1 comprising (i) a CDR1 having an amino acid sequence that is at least 65%, at least 70%, at least 75%, at least 80%, at least 85%, at least 90%, at least 95%, at least 99%, or 100% identical to any one of SEQ ID NOs: 5, 12, 18, 26, 34, 44, 51, 61, 68, 75, 82, 89, 96, 102, 108, 115, 122, 133, 141, 148, 155, 162, 175, 182, 189, 195, 202, 208, 215, 222, 229, 235, 318, 629, 645, 654, 663, 671, 682, 690, 699, 707, 716, 773, 781, 788, 797, 803, 810, 817, 823, 832, 839, 845, 852, 861, 868, 874, 881, 1047, 1052, 1057, 1062, and 1067; (ii) a CDR2 having an amino acid sequence that is at least 65%, at least 70%, at least 75%, at least 80%, at least 85%, at least 90%, at least 95%, at least 99%, or 100% identical to any one of SEQ ID NOs: 6, 19, 27, 35, 45, 52, 56, 62, 69, 76, 83, 90, 109, 116, 123, 134, 142, 149, 156, 163, 169, 176, 183, 196, 209, 216, 223, 236, 273, 319, 328, 630, 646, 655, 664, 672, 683, 691, 708, 776, 782, 789, 798, 804, 811, 818, 824, 833, 840, 846, 853, 862, 869, 875, 882, 1048, 1053, 1058, 1063, and 1068; and (iii) a CDR3 having an amino acid sequence that is at least 65%, at least 70%, at least 75%, at least 80%, at least 85%, at least 90%, at least 95%, at least 99%, or 100% identical to any one of SEQ ID NOs: 7, 13, 20, 28, 36, 40, 46, 53, 63, 70, 77, 84, 91, 97, 103, 110, 117, 124, 128, 135, 143, 150, 157, 164, 170, 177, 184, 190, 197, 203, 210, 217, 224, 230, 237, 241, 244, 248, 253, 257, 259, 261, 263, 265, 267, 269, 271, 274, 276, 278, 281, 297, 320, 322, 327, 330, 332, 631, 647, 656, 665, 673, 684, 692, 700, 709, 717, 765, 767, 769, 774, 783, 790, 793, 799, 805, 812, 819, 825, 834, 841, 847, 854, 857, 863, 870, 876, 883, 886, 1049, 1054, 1059, 1064, and 1069; a VL2 comprising (i) a complementarity determining region (CDR) 1 having an amino acid sequence that is at least 65%, at least 70%, at least 75%, at least 80%, at least 85%, at least 90%, at least 95%, at least 99%, or 100% identical to any one of SEQ ID NOs: 1, 9, 15, 23, 30, 41, 48, 55, 58, 65, 72, 79, 86, 93, 99, 105, 112, 119, 130, 138, 145, 152, 159, 166, 172, 179, 186, 192, 199, 205, 212, 219, 226, 232, 324, 627, 640, 650, 659, 676, 687, 695, 703, 712, 770, 778, 785, 794, 801, 807, 814, 827, 836, 849, 858, 865, 878, 1045, 1050, 1055, 1060, and 1065; (ii) a CDR2 having an amino acid sequence that is at least 65%, at least 70%, at least 75%, at least 80%, at least 85%, at least 90%, at least 95%, at least 99%, or 100% identical to any one of SEQ ID NOs: 2, 31, 628, 641, 677, 1046, 1051, 1056, and 1061; or at least 65%, at least 70%, at least 75%, at least 80%, at least 85%, at least 90%, at least 95%, at least 99%, or 100% identical to any one of amino acid sequences AAS, GAS, LGS, GTN, GTN, SAS, SDS, DNT, EVT, DAS, DVT, RNS, DVS, EDS, DDS, KDS, VAS, WAS, YTS, EVS, NNN, SYN, and DAT; and (iii) a CDR3 having an amino acid sequence that is at least 65%, at least 70%, at least 75%, at least 80%, at least 85%, at least 90%, at least 95%, at least 99%, or 100% identical to any one of SEQ ID NOs: 3, 10, 16, 24, 32, 38, 42, 49, 59, 66, 73, 80, 87, 94, 100, 106, 113, 120, 126, 131, 139, 146, 153, 160, 167, 173, 180, 187, 193, 200, 206, 213, 220, 227, 233, 239, 242, 246, 249, 256, 283, 285, 287, 288, 290, 292, 294, 296, 301, 304, 306, 309, 311, 313, 316, 325, 326, 329, 642, 651, 660, 668, 678, 651, 696, 704, 713, 764, 766, 768, 771, 779, 786, 792, 795, 808, 815, 821, 830, 837, 843, 850, 856, 859, 866, 872, 879, 885, and 1066; and a VH2 comprising (i) a CDR1 having an amino acid sequence that is at least 65%, at least 70%, at least 75%, at least 80%, at least 85%, at least 90%, at least 95%, at least 99%, or 100% identical to any one of SEQ ID NOs: 5, 12, 18, 26, 34, 44, 51, 61, 68, 75, 82, 89, 96, 102, 108, 115, 122, 133, 141, 148, 155, 162, 175, 182, 189, 195, 202, 208, 215, 222, 229, 235, 318, 629, 645, 654, 663, 671, 682, 690, 699, 707, 716, 773, 781, 788, 797, 803, 810, 817, 823, 832, 839, 845, 852, 861, 868, 874, 881, 1047, 1052, 1057, 1062, and 1067; (ii) a CDR2 having an amino acid sequence that is at least 65%, at least 70%, at least 75%, at least 80%, at least 85%, at least 90%, at least 95%, at least 99%, or 100% identical to any one of SEQ ID NOs: 6, 19, 27, 35, 45, 52, 56, 62, 69, 76, 83, 90, 109, 116, 123, 134, 142, 149, 156, 163, 169, 176, 183, 196, 209, 216, 223, 236, 273, 319, 328, 630, 646, 655, 664, 672, 683, 691, 708, 776, 782, 789, 798, 804, 811, 818, 824, 833, 840, 846, 853, 862, 869, 875, 882, 1048, 1053, 1058, 1063, and 1068; and (iii) a CDR3 having an amino acid sequence that is at least 65%, at least 70%, at least 75%, at least 80%, at least 85%, at least 90%, at least 95%, at least 99%, or 100% identical to any one of SEQ ID NOs: 7, 13, 20, 28, 36, 40, 46, 53, 63, 70, 77, 84, 91, 97, 103, 110, 117, 124, 128, 135, 143, 150, 157, 164, 170, 177, 184, 190, 197, 203, 210, 217, 224, 230, 237, 241, 244, 248, 253, 257, 259, 261, 263, 265, 267, 269, 271, 274, 276, 278, 281, 297, 320, 322, 327, 330, 332, 631, 647, 656, 665, 673, 684, 692, 700, 709, 717, 765, 767, 769, 774, 783, 790, 793, 799, 805, 812, 819, 825, 834, 841, 847, 854, 857, 863, 870, 876, 883, 886, 1049, 1054, 1059, 1064, and 1069.

[1360] In some aspects, the antigen binding polypeptides provided herein comprise a VL1 comprising an amino acid sequence that is at least 65%, at least 70%, at least 75%, at least 80%, at least 85%, at least 90%, at least 95%, at least 99%, or 100% identical to any one of SEQ ID NOs: 4, 11, 17, 25, 33, 39, 43, 50, 60, 67, 74, 81, 88, 95, 101, 107, 114, 121, 127, 132, 140, 147, 154, 161, 168, 174, 181, 188, 194, 201, 207, 214, 221, 228, 234, 240, 243, 247, 250, 251, 252, 255, 284, 286, 289, 291, 293, 295, 299, 300, 302, 303, 305, 307, 308, 310, 312, 314, 315, 317, 323, 639, 649, 658, 667, 675, 686, 694, 702, 711, 772, 780, 787, 796, 802, 809, 816, 822, 831, 838, 844, 851, 860, 867, 873, 880, and 988.

[1361] In some aspects, the antigen binding polypeptides provided herein comprise a VH1 comprising an amino acid sequence that is at least 65%, at least 70%, at least 75%, at least 80%, at least 85%, at least 90%, at least 95%, at least 99%, or 100% identical to any one of SEQ ID NOs: 8, 14, 21, 22, 29, 37, 47, 54, 57, 64, 71, 78, 85, 92, 98, 104, 111, 118, 125, 129, 136, 137, 144, 151, 158, 165, 171, 178, 185, 191, 198, 204, 211, 218, 225, 231, 238, 245, 254, 258, 260, 262, 264, 266, 268, 270, 272, 275, 277, 279, 280, 282, 298, 321, 331, 626, 644, 653, 662, 670, 681, 689, 698, 706, 715, 775, 777, 784, 791, 800, 806, 813, 820, 826, 835, 842, 848, 855, 864, 871, 877, and 884.

[1362] In some aspects, the antigen binding polypeptides provided herein comprise a VL2 comprising an amino acid sequence that is at least 65%, at least 70%, at least 75%, at least 80%, at least 85%, at least 90%, at least 95%, at least 99%, or 100% identical to any one of SEQ ID NOs: 4, 11, 17, 25, 33, 39, 43, 50, 60, 67, 74, 81, 88, 95, 101, 107, 114, 121, 127, 132, 140, 147, 154, 161, 168, 174, 181, 188, 194, 201, 207, 214, 221, 228, 234, 240, 243, 247, 250, 251, 252, 255, 284, 286, 289, 291, 293, 295, 299, 300, 302, 303, 305, 307, 308, 310, 312, 314, 315, 317, 323, 639, 649, 658, 667, 675, 686, 694, 702, 711, 772, 780, 787, 796, 802, 809, 816, 822, 831, 838, 844, 851, 860, 867, 873, 880, and 988.

[1363] In some aspects, the antigen binding polypeptides provided herein comprise a VH2 comprising an amino acid sequence that is at least 65%, at least 70%, at least 75%, at least 80%, at least 85%, at least 90%, at least 95%, at least 99%, or 100% identical to any one of SEQ ID NOs: 8, 14, 21, 22, 29, 37, 47, 54, 57, 64, 71, 78, 85, 92, 98, 104, 111, 118, 125, 129, 136, 137, 144, 151, 158, 165, 171, 178, 185, 191, 198, 204, 211, 218, 225, 231, 238, 245, 254, 258, 260, 262, 264, 266, 268, 270, 272, 275, 277, 279, 280, 282, 298, 321, 331, 626, 644, 653, 662, 670, 681, 689, 698, 706, 715, 775, 777, 784, 791, 800, 806, 813, 820, 826, 835, 842, 848, 855, 864, 871, 877, and 884.

[1364] In some aspects, the antigen binding polypeptides provided herein comprise (i) a VL1 comprising an amino acid sequence that is at least 65%, at least 70%, at least 75%, at least 80%, at least 85%, at least 90%, at least 95%, at least 99%, or 100% identical to any one of SEQ ID NOs: 4, 11, 17, 25, 33, 39, 43, 50, 60, 67, 74, 81, 88, 95, 101, 107, 114, 121, 127, 132, 140, 147, 154, 161, 168, 174, 181, 188, 194, 201, 207, 214, 221, 228, 234, 240, 243, 247, 250, 251, 252, 255, 284, 286, 289, 291, 293, 295, 299, 300, 302, 303, 305, 307, 308, 310, 312, 314, 315, 317, 323, 639, 649, 658, 667, 675, 686, 694, 702, 711, 772, 780, 787, 796, 802, 809, 816, 822, 831, 838, 844, 851, 860, 867, 873, 880, and 988; (ii) a VH1 comprising an amino acid sequence that is at least 65%, at least 70%, at least 75%, at least 80%, at least 85%, at least 90%, at least 95%, at least 99%, or 100% identical to any one of SEQ ID NOs: 8, 14, 21, 22, 29, 37, 47, 54, 57, 64, 71, 78, 85, 92, 98, 104, 111, 118, 125, 129, 136, 137, 144, 151, 158, 165, 171, 178, 185, 191, 198, 204, 211, 218, 225, 231, 238, 245, 254, 258, 260, 262, 264, 266, 268, 270, 272, 275, 277, 279, 280, 282, 298, 321, 331, 626, 644, 653, 662, 670, 681, 689, 698, 706, 715, 775, 777, 784, 791, 800, 806, 813, 820, 826, 835, 842, 848, 855, 864, 871, 877, and 884; (iii) a VL2 comprising an amino acid sequence that is at least 65%, at least 70%, at least 75%, at least 80%, at least 85%, at least 90%, at least 95%, at least 99%, or 100% identical to any one of SEQ ID NOs: 4, 11, 17, 25, 33, 39, 43, 50, 60, 67, 74, 81, 88, 95, 101, 107, 114, 121, 127, 132, 140, 147, 154, 161, 168, 174, 181, 188, 194, 201, 207, 214, 221, 228, 234, 240, 243, 247, 250, 251, 252, 255, 284, 286, 289, 291, 293, 295, 299, 300, 302, 303, 305, 307, 308, 310, 312, 314, 315, 317, 323, 639, 649, 658, 667, 675, 686, 694, 702, 711, 772, 780, 787, 796, 802, 809, 816, 822, 831, 838, 844, 851, 860, 867, 873, 880, and 988; and (iv) a VH2 comprising an amino acid sequence that is at least 65%, at least 70%, at least 75%, at least 80%, at least 85%, at least 90%, at least 95%, at least 99%, or 100% identical to any one of SEQ ID NOs: 8, 14, 21, 22, 29, 37, 47, 54, 57, 64, 71, 78, 85, 92, 98, 104, 111, 118, 125, 129, 136, 137, 144, 151, 158, 165, 171, 178, 185, 191, 198, 204, 211, 218, 225, 231, 238, 245, 254, 258, 260, 262, 264, 266, 268, 270, 272, 275, 277, 279, 280, 282, 298, 321, 331, 626, 644, 653, 662, 670, 681, 689, 698, 706, 715, 775, 777, 784, 791, 800, 806, 813, 820, 826, 835, 842, 848, 855, 864, 871, 877, and 884.

[1365] In some aspects, the antigen binding polypeptides provided herein comprise a VL1 comprising a CDR1 having an amino acid sequence at least 65%, at least 70%, at least 75%, at least 80%, at least 85%, at least 90%, at least 95%, at least 99%, or 100% identical to SEQ ID NO: 23, a CDR2 having an amino acid sequence at least 65%, at least 70%, at least 75%, at least 80%, at least 85%, at least 90%, at least 95%, at least 99%, or 100% identical to amino acid sequence GTN, and a CDR3 having an amino acid sequence at least 65%, at least 70%, at least 75%, at least 80%, at least 85%, at least 90%, at least 95%, at least 99%, or 100% identical to SEQ ID NO: 24 or 325.

[1366] In some aspects, the antigen binding polypeptides provided herein comprise a VL2 comprising a CDR1 having an amino acid sequence at least 65%, at least 70%, at least 75%, at least 80%, at least 85%, at least 90%, at least 95%, at least 99%, or 100% identical to SEQ ID NO: 15, a CDR2 having an amino acid sequence at least 65%, at least 70%, at least 75%, at least 80%, at least 85%, at least 90%, at least 95%, at least 99%, or 100% identical to amino acid sequence LGS, and a CDR3 having an amino acid sequence at least 65%, at least 70%, at least 75%, at least 80%, at least 85%, at least 90%, at least 95%, at least 99%, or 100% identical to SEQ ID NO: 16.

[1367] In some aspects, the antigen binding polypeptides provided herein comprise a VH1 comprising a CDR1 having an amino acid sequence at least 65%, at least 70%, at least 75%, at least 80%, at least 85%, at least 90%, at least 95%, at least 99%, or 100% identical to SEQ ID NO: 26, a CDR2 having an amino acid sequence at least 65%, at least 70%, at least 75%, at least 80%, at least 85%, at least 90%, at least 95%, at least 99%, or 100% identical to SEQ ID NO: 27, and a CDR3 having an amino acid sequence at least 65%, at least 70%, at least 75%, at least 80%, at least 85%, at least 90%, at least 95%, at least 99%, or 100% identical to SEQ ID NO: 28 or 332.

[1368] In some aspects, the antigen binding polypeptides provided herein comprise a VH2 comprising a CDR1 having an amino acid sequence at least 65%, at least 70%, at least 75%, at least 80%, at least 85%, at least 90%, at least 95%, at least 99%, or 100% identical to SEQ ID NO: 18, a CDR2 having an amino acid sequence at least 65%, at least 70%, at least 75%, at least 80%, at least 85%, at least 90%, at least 95%, at least 99%, or 100% identical to SEQ ID NO: 19, and a CDR3 having an amino acid sequence at least 65%, at least 70%, at least 75%, at least 80%, at least 85%, at least 90%, at least 95%, at least 99%, or 100% identical to SEQ ID NO: 20.

[1369] In some aspects, the antigen binding polypeptides provided herein comprise (i) a VL1 comprising a CDR1 having an amino acid sequence at least 65%, at least 70%, at least 75%, at least 80%, at least 85%, at least 90%, at least 95%, at least 99%, or 100% identical to SEQ ID NO: 23, a CDR2 having an amino acid sequence at least 65%, at least 70%, at least 75%, at least 80%, at least 85%, at least 90%, at least 95%, at least 99%, or 100% identical to amino acid sequence GTN, and a CDR3 having an amino acid sequence at least 65%, at least 70%, at least 75%, at least 80%, at least 85%, at least 90%, at least 95%, at least 99%, or 100% identical to SEQ ID NO: 24 or 325; (ii) a VL2 comprising a CDR1 having an amino acid sequence at least 65%, at least 70%, at least 75%, at least 80%, at least 85%, at least 90%, at least 95%, at least 99%, or 100% identical to SEQ ID NO: 15, a CDR2 having an amino acid sequence at least 65%, at least 70%, at least 75%, at least 80%, at least 85%, at least 90%, at least 95%, at least 99%, or 100% identical to amino acid sequence LGS, and a CDR3 having an amino acid sequence at least 65%, at least 70%, at least 75%, at least 80%, at least 85%, at least 90%, at least 95%, at least 99%, or 100% identical to SEQ ID NO: 16; (iii) a VH1 comprising a CDR1 having an amino acid sequence at least 65%, at least 70%, at least 75%, at least 80%, at least 85%, at least 90%, at least 95%, at least 99%, or 100% identical to SEQ ID NO: 26, a CDR2 having an amino acid sequence at least 65%, at least 70%, at least 75%, at least 80%, at least 85%, at least 90%, at least 95%, at least 99%, or 100% identical to SEQ ID NO: 27, and a CDR3 having an amino acid sequence at least 65%, at least 70%, at least 75%, at least 80%, at least 85%, at least 90%, at least 95%, at least 99%, or 100% identical to SEQ ID NO: 28 or 332; and (iv) a VH2 comprising a CDR1 having an amino acid sequence at least 65%, at least 70%, at least 75%, at least 80%, at least 85%, at least 90%, at least 95%, at least 99%, or 100% identical to SEQ ID NO: 18, a CDR2 having an amino acid sequence at least 65%, at least 70%, at least 75%, at least 80%, at least 85%, at least 90%, at least 95%, at least 99%, or 100% identical to SEQ ID NO: 19, and a CDR3 having an amino acid sequence at least 65%, at least 70%, at least 75%, at least 80%, at least 85%, at least 90%, at least 95%, at least 99%, or 100% identical to SEQ ID NO: 20.

[1370] In some aspects, the antigen binding polypeptides provided herein comprise a VL1 comprising an amino acid sequence that is at least 65%, at least 70%, at least 75%, at least 80%, at least 85%, at least 90%, at least 95%, at least 99%, or 100% identical to SEQ ID NO: 25.

[1371] In some aspects, the antigen binding polypeptides provided herein comprise a VL2 comprising an amino acid sequence that is at least 65%, at least 70%, at least 75%, at least 80%, at least 85%, at least 90%, at least 95%, at least 99%, or 100% identical to SEQ ID NO: 17.

[1372] In some aspects, the antigen binding polypeptides provided herein comprise a VH1 comprising an amino acid sequence that is at least 65%, at least 70%, at least 75%, at least 80%, at least 85%, at least 90%, at least 95%, at least 99%, or 100% identical to SEQ ID NO: 29.

[1373] In some aspects, the antigen binding polypeptides provided herein comprise a VH2 comprising an amino acid sequence that is at least 65%, at least 70%, at least 75%, at least 80%, at least 85%, at least 90%, at least 95%, at least 99%, or 100% identical to SEQ ID NO: 21 or 22.

[1374] In some aspects, the antigen binding polypeptides provided herein comprise (i) a VL1 comprising an amino acid sequence that is at least 65%, at least 70%, at least 75%, at least 80%, at least 85%, at least 90%, at least 95%, at least 99%, or 100% identical to SEQ ID NO: 25; (ii) a VL2 comprising an amino acid sequence that is at least 65%, at least 70%, at least 75%, at least 80%, at least 85%, at least 90%, at least 95%, at least 99%, or 100% identical to SEQ ID NO: 17; (iii) a VH1 comprising an amino acid sequence that is at least 65%, at least 70%, at least 75%, at least 80%, at least 85%, at least 90%, at least 95%, at least 99%, or 100% identical to SEQ ID NO: 29; and (iv) a VH2 comprising an amino acid sequence that is at least 65%, at least 70%, at least 75%, at least 80%, at least 85%, at least 90%, at least 95%, at least 99%, or 100% identical to SEQ ID NO: 21 or 22.

[1375] In some aspects, the antigen binding polypeptides provided herein comprise a VL1 comprising a CDR1 having an amino acid sequence at least 65%, at least 70%, at least 75%, at least 80%, at least 85%, at least 90%, at least 95%, at least 99%, or 100% identical to SEQ ID NO: 9 or 1055, a CDR2 having an amino acid sequence at least 65%, at least 70%, at least 75%, at least 80%, at least 85%, at least 90%, at least 95%, at least 99%, or 100% identical to SEQ ID NO: 1056 or an amino acid sequence at least 65%, at least 70%, at least 75%, at least 80%, at least 85%, at least 90%, at least 95%, at least 99%, or 100% identical to amino acid sequence GAS, and a CDR3 having an amino acid sequence at least 65%, at least 70%, at least 75%, at least 80%, at least 85%, at least 90%, at least 95%, at least 99%, or 100% identical to SEQ ID NO: 10.

[1376] In some aspects, the antigen binding polypeptides provided herein comprise a VL2 comprising a CDR1 having an amino acid sequence at least 65%, at least 70%, at least 75%, at least 80%, at least 85%, at least 90%, at least 95%, at least 99%, or 100% identical to SEQ ID NO: 15, a CDR2 having an amino acid sequence at least 65%, at least 70%, at least 75%, at least 80%, at least 85%, at least 90%, at least 95%, at least 99%, or 100% identical to amino acid sequence LGS, and a CDR3 having an amino acid sequence at least 65%, at least 70%, at least 75%, at least 80%, at least 85%, at least 90%, at least 95%, at least 99%, or 100% identical to SEQ ID NO: 16.

[1377] In some aspects, the antigen binding polypeptides provided herein comprise a VH1 comprising a CDR1 having an amino acid sequence at least 65%, at least 70%, at least 75%, at least 80%, at least 85%, at least 90%, at least 95%, at least 99%, or 100% identical to SEQ ID NO: 12 or 1057, a CDR2 having an amino acid sequence at least 65%, at least 70%, at least 75%, at least 80%, at least 85%, at least 90%, at least 95%, at least 99%, or 100% identical to SEQ ID NO: 6 or 1058, and a CDR3 having an amino acid sequence at least 65%, at least 70%, at least 75%, at least 80%, at least 85%, at least 90%, at least 95%, at least 99%, or 100% identical to SEQ ID NO: 13 or 1059.

[1378] In some aspects, the antigen binding polypeptides provided herein comprise a VH2 comprising a CDR1 having an amino acid sequence at least 65%, at least 70%, at least 75%, at least 80%, at least 85%, at least 90%, at least 95%, at least 99%, or 100% identical to SEQ ID NO: 18, a CDR2 having an amino acid sequence at least 65%, at least 70%, at least 75%, at least 80%, at least 85%, at least 90%, at least 95%, at least 99%, or 100% identical to SEQ ID NO: 19, and a CDR3 having an amino acid sequence at least 65%, at least 70%, at least 75%, at least 80%, at least 85%, at least 90%, at least 95%, at least 99%, or 100% identical to SEQ ID NO: 20.

[1379] In some aspects, the antigen binding polypeptides provided herein comprise (i) a VL1 comprising a CDR1 having an amino acid sequence at least 65%, at least 70%, at least 75%, at least 80%, at least 85%, at least 90%, at least 95%, at least 99%, or 100% identical to SEQ ID NO: 9 or 1055, a CDR2 having an amino acid sequence at least 65%, at least 70%, at least 75%, at least 80%, at least 85%, at least 90%, at least 95%, at least 99%, or 100% identical to SEQ ID NO: 1056 or an amino acid sequence at least 65%, at least 70%, at least 75%, at least 80%, at least 85%, at least 90%, at least 95%, at least 99%, or 100% identical to amino acid sequence GAS, and a CDR3 having an amino acid sequence at least 65%, at least 70%, at least 75%, at least 80%, at least 85%, at least 90%, at least 95%, at least 99%, or 100% identical to SEQ ID NO: 10; (ii) a VL2 comprising a CDR1 having an amino acid sequence at least 65%, at least 70%, at least 75%, at least 80%, at least 85%, at least 90%, at least 95%, at least 99%, or 100% identical to SEQ ID NO: 15, a CDR2 having an amino acid sequence at least 65%, at least 70%, at least 75%, at least 80%, at least 85%, at least 90%, at least 95%, at least 99%, or 100% identical to amino acid sequence LGS, and a CDR3 having an amino acid sequence at least 65%, at least 70%, at least 75%, at least 80%, at least 85%, at least 90%, at least 95%, at least 99%, or 100% identical to SEQ ID NO: 16; (iii) a VH1 comprising a CDR1 having an amino acid sequence at least 65%, at least 70%, at least 75%, at least 80%, at least 85%, at least 90%, at least 95%, at least 99%, or 100% identical to SEQ ID NO: 12 or 1057, a CDR2 having an amino acid sequence at least 65%, at least 70%, at least 75%, at least 80%, at least 85%, at least 90%, at least 95%, at least 99%, or 100% identical to SEQ ID NO: 6 or 1058, and a CDR3 having an amino acid sequence at least 65%, at least 70%, at least 75%, at least 80%, at least 85%, at least 90%, at least 95%, at least 99%, or 100% identical to SEQ ID NO: 13 or 1059; and (iv) a VH2 comprising a CDR1 having an amino acid sequence at least 65%, at least 70%, at least 75%, at least 80%, at least 85%, at least 90%, at least 95%, at least 99%, or 100% identical to SEQ ID NO: 18, a CDR2 having an amino acid sequence at least 65%, at least 70%, at least 75%, at least 80%, at least 85%, at least 90%, at least 95%, at least 99%, or 100% identical to SEQ ID NO: 19, and a CDR3 having an amino acid sequence at least 65%, at least 70%, at least 75%, at least 80%, at least 85%, at least 90%, at least 95%, at least 99%, or 100% identical to SEQ ID NO: 20.

[1380] In some aspects, the antigen binding polypeptides provided herein comprise a VL1 comprising an amino acid sequence that is at least 65%, at least 70%, at least 75%, at least 80%, at least 85%, at least 90%, at least 95%, at least 99%, or 100% identical to SEQ ID NO: 11.

[1381] In some aspects, the antigen binding polypeptides provided herein comprise a VL2 comprising an amino acid sequence that is at least 65%, at least 70%, at least 75%, at least 80%, at least 85%, at least 90%, at least 95%, at least 99%, or 100% identical to SEQ ID NO: 17.

[1382] In some aspects, the antigen binding polypeptides provided herein comprise a VH1 comprising an amino acid sequence that is at least 65%, at least 70%, at least 75%, at least 80%, at least 85%, at least 90%, at least 95%, at least 99%, or 100% identical to SEQ ID NO: 14.

[1383] In some aspects, the antigen binding polypeptides provided herein comprise a VH2 comprising an amino acid sequence that is at least 65%, at least 70%, at least 75%, at least 80%, at least 85%, at least 90%, at least 95%, at least 99%, or 100% identical to SEQ ID NO: 21 or 22.

[1384] In some aspects, the antigen binding polypeptides provided herein comprise (i) a VL1 comprising an amino acid sequence that is at least 65%, at least 70%, at least 75%, at least 80%, at least 85%, at least 90%, at least 95%, at least 99%, or 100% identical to SEQ ID NO: 11; (ii) a VL2 comprising an amino acid sequence that is at least 65%, at least 70%, at least 75%, at least 80%, at least 85%, at least 90%, at least 95%, at least 99%, or 100% identical to SEQ ID NO: 17; (iii) a VH1 comprising an amino acid sequence that is at least 65%, at least 70%, at least 75%, at least 80%, at least 85%, at least 90%, at least 95%, at least 99%, or 100% identical to SEQ ID NO: 14; and (iv) a VH2 comprising an amino acid sequence that is at least 65%, at least 70%, at least 75%, at least 80%, at least 85%, at least 90%, at least 95%, at least 99%, or 100% identical to SEQ ID NO: 21 or 22.

[1385] In some aspects, the antigen binding polypeptides provided herein comprise a VL1 comprising a CDR1 having an amino acid sequence at least 65%, at least 70%, at least 75%, at least 80%, at least 85%, at least 90%, at least 95%, at least 99%, or 100% identical to SEQ ID NO: 9 or 1055, a CDR2 having an amino acid sequence at least 65%, at least 70%, at least 75%, at least 80%, at least 85%, at least 90%, at least 95%, at least 99%, or 100% identical to SEQ ID NO: 1056 or an amino acid sequence at least 65%, at least 70%, at least 75%, at least 80%, at least 85%, at least 90%, at least 95%, at least 99%, or 100% identical to amino acid sequence GAS, and a CDR3 having an amino acid sequence at least 65%, at least 70%, at least 75%, at least 80%, at least 85%, at least 90%, at least 95%, at least 99%, or 100% identical to SEQ ID NO: 10.

[1386] In some aspects, the antigen binding polypeptides provided herein comprise a VL2 comprising a CDR1 having an amino acid sequence at least 65%, at least 70%, at least 75%, at least 80%, at least 85%, at least 90%, at least 95%, at least 99%, or 100% identical to SEQ ID NO: 23, a CDR2 having an amino acid sequence at least 65%, at least 70%, at least 75%, at least 80%, at least 85%, at least 90%, at least 95%, at least 99%, or 100% identical to amino acid sequence GTN, and a CDR3 having an amino acid sequence at least 65%, at least 70%, at least 75%, at least 80%, at least 85%, at least 90%, at least 95%, at least 99%, or 100% identical to SEQ ID NO: 24 or 325.

[1387] In some aspects, the antigen binding polypeptides provided herein comprise a VH1 comprising a CDR1 having an amino acid sequence at least 65%, at least 70%, at least 75%, at least 80%, at least 85%, at least 90%, at least 95%, at least 99%, or 100% identical to SEQ ID NO: 12 or 1057, a CDR2 having an amino acid sequence at least 65%, at least 70%, at least 75%, at least 80%, at least 85%, at least 90%, at least 95%, at least 99%, or 100% identical to SEQ ID NO: 6 or 1058, and a CDR3 having an amino acid sequence at least 65%, at least 70%, at least 75%, at least 80%, at least 85%, at least 90%, at least 95%, at least 99%, or 100% identical to SEQ ID NO: 13 or 1059.

[1388] In some aspects, the antigen binding polypeptides provided herein comprise a VH2 comprising a CDR1 having an amino acid sequence at least 65%, at least 70%, at least 75%, at least 80%, at least 85%, at least 90%, at least 95%, at least 99%, or 100% identical to SEQ ID NO: 26, a CDR2 having an amino acid sequence at least 65%, at least 70%, at least 75%, at least 80%, at least 85%, at least 90%, at least 95%, at least 99%, or 100% identical to SEQ ID NO: 27, and a CDR3 having an amino acid sequence at least 65%, at least 70%, at least 75%, at least 80%, at least 85%, at least 90%, at least 95%, at least 99%, or 100% identical to SEQ ID NO: 28 or 332.

[1389] In some aspects, the antigen binding polypeptides provided herein comprise (i) a VL1 comprising a CDR1 having an amino acid sequence at least 65%, at least 70%, at least 75%, at least 80%, at least 85%, at least 90%, at least 95%, at least 99%, or 100% identical to SEQ ID NO: 9 or 1055, a CDR2 having an amino acid sequence at least 65%, at least 70%, at least 75%, at least 80%, at least 85%, at least 90%, at least 95%, at least 99%, or 100% identical to SEQ ID NO: 1056 or an amino acid sequence at least 65%, at least 70%, at least 75%, at least 80%, at least 85%, at least 90%, at least 95%, at least 99%, or 100% identical to amino acid sequence GAS, and a CDR3 having an amino acid sequence at least 65%, at least 70%, at least 75%, at least 80%, at least 85%, at least 90%, at least 95%, at least 99%, or 100% identical to SEQ ID NO: 10; (ii) a VL2 comprising a CDR1 having an amino acid sequence at least 65%, at least 70%, at least 75%, at least 80%, at least 85%, at least 90%, at least 95%, at least 99%, or 100% identical to SEQ ID NO: 23, a CDR2 having an amino acid sequence at least 65%, at least 70%, at least 75%, at least 80%, at least 85%, at least 90%, at least 95%, at least 99%, or 100% identical to amino acid sequence GTN, and a CDR3 having an amino acid sequence at least 65%, at least 70%, at least 75%, at least 80%, at least 85%, at least 90%, at least 95%, at least 99%, or 100% identical to SEQ ID NO: 24 or 325; (iii) a VH1 comprising a CDR1 having an amino acid sequence at least 65%, at least 70%, at least 75%, at least 80%, at least 85%, at least 90%, at least 95%, at least 99%, or 100% identical to SEQ ID NO: 12 or 1057, a CDR2 having an amino acid sequence at least 65%, at least 70%, at least 75%, at least 80%, at least 85%, at least 90%, at least 95%, at least 99%, or 100% identical to SEQ ID NO: 6 or 1058, and a CDR3 having an amino acid sequence at least 65%, at least 70%, at least 75%, at least 80%, at least 85%, at least 90%, at least 95%, at least 99%, or 100% identical to SEQ ID NO: 13 or 1059; and (iv) a VH2 comprising a CDR1 having an amino acid sequence at least 65%, at least 70%, at least 75%, at least 80%, at least 85%, at least 90%, at least 95%, at least 99%, or 100% identical to SEQ ID NO: 26, a CDR2 having an amino acid sequence at least 65%, at least 70%, at least 75%, at least 80%, at least 85%, at least 90%, at least 95%, at least 99%, or 100% identical to SEQ ID NO: 27, and a CDR3 having an amino acid sequence at least 65%, at least 70%, at least 75%, at least 80%, at least 85%, at least 90%, at least 95%, at least 99%, or 100% identical to SEQ ID NO: 28 or 332.

[1390] In some aspects, the antigen binding polypeptides provided herein comprise a VL1 comprising an amino acid sequence that is at least 65%, at least 70%, at least 75%, at least 80%, at least 85%, at least 90%, at least 95%, at least 99%, or 100% identical to SEQ ID NO: 11.

[1391] In some aspects, the antigen binding polypeptides provided herein comprise a VL2 comprising an amino acid sequence that is at least 65%, at least 70%, at least 75%, at least 80%, at least 85%, at least 90%, at least 95%, at least 99%, or 100% identical to SEQ ID NO: 25.

[1392] In some aspects, the antigen binding polypeptides provided herein comprise a VH1 comprising an amino acid sequence that is at least 65%, at least 70%, at least 75%, at least 80%, at least 85%, at least 90%, at least 95%, at least 99%, or 100% identical SEQ ID NO: 14.

[1393] In some aspects, the antigen binding polypeptides provided herein comprise a VH2 comprising an amino acid sequence that is at least 65%, at least 70%, at least 75%, at least 80%, at least 85%, at least 90%, at least 95%, at least 99%, or 100% identical to SEQ ID NO: 29.

[1394] In some aspects, the antigen binding polypeptides provided herein comprise (i) a VL1 comprising an amino acid sequence that is at least 65%, at least 70%, at least 75%, at least 80%, at least 85%, at least 90%, at least 95%, at least 99%, or 100% identical to SEQ ID NO: 11; (ii) a VL2 comprising an amino acid sequence that is at least 65%, at least 70%, at least 75%, at least 80%, at least 85%, at least 90%, at least 95%, at least 99%, or 100% identical to SEQ ID NO: 25; (iii) a VH1 comprising an amino acid sequence that is at least 65%, at least 70%, at least 75%, at least 80%, at least 85%, at least 90%, at least 95%, at least 99%, or 100% identical SEQ ID NO: 14; and (iv) a VH2 comprising an amino acid sequence that is at least 65%, at least 70%, at least 75%, at least 80%, at least 85%, at least 90%, at least 95%, at least 99%, or 100% identical to SEQ ID NO: 29.

[1395] In some aspects, the antigen binding polypeptides provided herein comprise a VL1 comprising a CDR1 having an amino acid sequence at least 65%, at least 70%, at least 75%, at least 80%, at least 85%, at least 90%, at least 95%, at least 99%, or 100% identical to SEQ ID NO: 1 or 324, a CDR2 having an amino acid sequence at least 65%, at least 70%, at least 75%, at least 80%, at least 85%, at least 90%, at least 95%, at least 99%, or 100% identical to SEQ ID NO: 2 or an amino acid sequence at least 65%, at least 70%, at least 75%, at least 80%, at least 85%, at least 90%, at least 95%, at least 99%, or 100% identical to amino acid sequence AAS, and a CDR3 having an amino acid sequence at least 65%, at least 70%, at least 75%, at least 80%, at least 85%, at least 90%, at least 95%, at least 99%, or 100% identical to SEQ ID NO: 3.

[1396] In some aspects, the antigen binding polypeptides provided herein comprise a VL2 comprising a CDR1 having an amino acid sequence at least 65%, at least 70%, at least 75%, at least 80%, at least 85%, at least 90%, at least 95%, at least 99%, or 100% identical to SEQ ID NO: 23, a CDR2 having an amino acid sequence at least 65%, at least 70%, at least 75%, at least 80%, at least 85%, at least 90%, at least 95%, at least 99%, or 100% identical to amino acid sequence GTN, and a CDR3 having an amino acid sequence at least 65%, at least 70%, at least 75%, at least 80%, at least 85%, at least 90%, at least 95%, at least 99%, or 100% identical to SEQ ID NO: 24 or 325.

[1397] In some aspects, the antigen binding polypeptides provided herein comprise a VH1 comprising a CDR1 having an amino acid sequence at least 65%, at least 70%, at least 75%, at least 80%, at least 85%, at least 90%, at least 95%, at least 99%, or 100% identical to SEQ ID NO: 5, a CDR2 having an amino acid sequence at least 65%, at least 70%, at least 75%, at least 80%, at least 85%, at least 90%, at least 95%, at least 99%, or 100% identical to SEQ ID NO: 6, and a CDR3 having an amino acid sequence at least 65%, at least 70%, at least 75%, at least 80%, at least 85%, at least 90%, at least 95%, at least 99%, or 100% identical to SEQ ID NO: 7.

[1398] In some aspects, the antigen binding polypeptides provided herein comprise a VH2 comprising a CDR1 having an amino acid sequence at least 65%, at least 70%, at least 75%, at least 80%, at least 85%, at least 90%, at least 95%, at least 99%, or 100% identical to SEQ ID NO: 26, a CDR2 having an amino acid sequence at least 65%, at least 70%, at least 75%, at least 80%, at least 85%, at least 90%, at least 95%, at least 99%, or 100% identical to SEQ ID NO: 27, and a CDR3 having an amino acid sequence at least 65%, at least 70%, at least 75%, at least 80%, at least 85%, at least 90%, at least 95%, at least 99%, or 100% identical to SEQ ID NO: 28 or 332.

[1399] In some aspects, the antigen binding polypeptides provided herein comprise (i) a VL1 comprising a CDR1 having an amino acid sequence at least 65%, at least 70%, at least 75%, at least 80%, at least 85%, at least 90%, at least 95%, at least 99%, or 100% identical to SEQ ID NO: 1 or 324, a CDR2 having an amino acid sequence at least 65%, at least 70%, at least 75%, at least 80%, at least 85%, at least 90%, at least 95%, at least 99%, or 100% identical to SEQ ID NO: 2 or an amino acid sequence at least 65%, at least 70%, at least 75%, at least 80%, at least 85%, at least 90%, at least 95%, at least 99%, or 100% identical to amino acid sequence AAS, and a CDR3 having an amino acid sequence at least 65%, at least 70%, at least 75%, at least 80%, at least 85%, at least 90%, at least 95%, at least 99%, or 100% identical to SEQ ID NO: 3; (ii) a VL2 comprising a CDR1 having an amino acid sequence at least 65%, at least 70%, at least 75%, at least 80%, at least 85%, at least 90%, at least 95%, at least 99%, or 100% identical to SEQ ID NO: 23, a CDR2 having an amino acid sequence at least 65%, at least 70%, at least 75%, at least 80%, at least 85%, at least 90%, at least 95%, at least 99%, or 100% identical to amino acid sequence GTN, and a CDR3 having an amino acid sequence at least 65%, at least 70%, at least 75%, at least 80%, at least 85%, at least 90%, at least 95%, at least 99%, or 100% identical to SEQ ID NO: 24 or 325; (iii) a VH1 comprising a CDR1 having an amino acid sequence at least 65%, at least 70%, at least 75%, at least 80%, at least 85%, at least 90%, at least 95%, at least 99%, or 100% identical to SEQ ID NO: 5, a CDR2 having an amino acid sequence at least 65%, at least 70%, at least 75%, at least 80%, at least 85%, at least 90%, at least 95%, at least 99%, or 100% identical to SEQ ID NO: 6, and a CDR3 having an amino acid sequence at least 65%, at least 70%, at least 75%, at least 80%, at least 85%, at least 90%, at least 95%, at least 99%, or 100% identical to SEQ ID NO: 7; and (iv) a VH2 comprising a CDR1 having an amino acid sequence at least 65%, at least 70%, at least 75%, at least 80%, at least 85%, at least 90%, at least 95%, at least 99%, or 100% identical to SEQ ID NO: 26, a CDR2 having an amino acid sequence at least 65%, at least 70%, at least 75%, at least 80%, at least 85%, at least 90%, at least 95%, at least 99%, or 100% identical to SEQ ID NO: 27, and a CDR3 having an amino acid sequence at least 65%, at least 70%, at least 75%, at least 80%, at least 85%, at least 90%, at least 95%, at least 99%, or 100% identical to SEQ ID NO: 28 or 332.

[1400] In some aspects, the antigen binding polypeptides provided herein comprise a VL1 comprising an amino acid sequence that is at least 65%, at least 70%, at least 75%, at least 80%, at least 85%, at least 90%, at least 95%, at least 99%, or 100% identical to SEQ ID NO: 4.

[1401] In some aspects, the antigen binding polypeptides provided herein comprise a VL2 comprising an amino acid sequence that is at least 65%, at least 70%, at least 75%, at least 80%, at least 85%, at least 90%, at least 95%, at least 99%, or 100% identical to SEQ ID NO: 25.

[1402] In some aspects, the antigen binding polypeptides provided herein comprise a VH1 comprising an amino acid sequence that is at least 65%, at least 70%, at least 75%, at least 80%, at least 85%, at least 90%, at least 95%, at least 99%, or 100% identical to SEQ ID NO: 8.

[1403] In some aspects, the antigen binding polypeptides provided herein comprise a VH2 comprising an amino acid sequence that is at least 65%, at least 70%, at least 75%, at least 80%, at least 85%, at least 90%, at least 95%, at least 99%, or 100% identical to SEQ ID NO: 29.

[1404] In some aspects, the antigen binding polypeptides provided herein comprise (i) a VL1 comprising an amino acid sequence that is at least 65%, at least 70%, at least 75%, at least 80%, at least 85%, at least 90%, at least 95%, at least 99%, or 100% identical to SEQ ID NO: 4; (ii) a VL2 comprising an amino acid sequence that is at least 65%, at least 70%, at least 75%, at least 80%, at least 85%, at least 90%, at least 95%, at least 99%, or 100% identical to SEQ ID NO: 25; (iii) a VH1 comprising an amino acid sequence that is at least 65%, at least 70%, at least 75%, at least 80%, at least 85%, at least 90%, at least 95%, at least 99%, or 100% identical to SEQ ID NO: 8; and (iv) a VH2 comprising an amino acid sequence that is at least 65%, at least 70%, at least 75%, at least 80%, at least 85%, at least 90%, at least 95%, at least 99%, or 100% identical to SEQ ID NO: 29.

[1405] In some aspects, the antigen binding polypeptides provided herein comprise a VL1 comprising a CDR1 having an amino acid sequence at least 65%, at least 70%, at least 75%, at least 80%, at least 85%, at least 90%, at least 95%, at least 99%, or 100% identical to SEQ ID NO: 30, a CDR2 having an amino acid sequence at least 65%, at least 70%, at least 75%, at least 80%, at least 85%, at least 90%, at least 95%, at least 99%, or 100% identical to SEQ ID NO: 31 or an amino acid sequence at least 65%, at least 70%, at least 75%, at least 80%, at least 85%, at least 90%, at least 95%, at least 99%, or 100% identical to amino acid sequence SAS, and a CDR3 having an amino acid sequence at least 65%, at least 70%, at least 75%, at least 80%, at least 85%, at least 90%, at least 95%, at least 99%, or 100% identical to SEQ ID NO: 32, 38, or 326.

[1406] In some aspects, the antigen binding polypeptides provided herein comprise a VL2 comprising a CDR1 having an amino acid sequence at least 65%, at least 70%, at least 75%, at least 80%, at least 85%, at least 90%, at least 95%, at least 99%, or 100% identical to SEQ ID NO: 15, a CDR2 having an amino acid sequence at least 65%, at least 70%, at least 75%, at least 80%, at least 85%, at least 90%, at least 95%, at least 99%, or 100% identical to amino acid sequence LGS, and a CDR3 having an amino acid sequence at least 65%, at least 70%, at least 75%, at least 80%, at least 85%, at least 90%, at least 95%, at least 99%, or 100% identical to SEQ ID NO: 16.

[1407] In some aspects, the antigen binding polypeptides provided herein comprise a VH1 comprising an amino acid sequence at least 65%, at least 70%, at least 75%, at least 80%, at least 85%, at least 90%, at least 95%, at least 99%, or 100% identical to SEQ ID NO: 34, a CDR2 having an amino acid sequence at least 65%, at least 70%, at least 75%, at least 80%, at least 85%, at least 90%, at least 95%, at least 99%, or 100% identical to SEQ ID NO: 35, and a CDR3 having an amino acid sequence at least 65%, at least 70%, at least 75%, at least 80%, at least 85%, at least 90%, at least 95%, at least 99%, or 100% identical to SEQ ID NO: 36, 40, or 327.

[1408] In some aspects, the antigen binding polypeptides provided herein comprise a VH2 comprising a CDR1 having an amino acid sequence at least 65%, at least 70%, at least 75%, at least 80%, at least 85%, at least 90%, at least 95%, at least 99%, or 100% identical to SEQ ID NO: 18, a CDR2 having an amino acid sequence at least 65%, at least 70%, at least 75%, at least 80%, at least 85%, at least 90%, at least 95%, at least 99%, or 100% identical to SEQ ID NO: 19, and a CDR3 having an amino acid sequence at least 65%, at least 70%, at least 75%, at least 80%, at least 85%, at least 90%, at least 95%, at least 99%, or 100% identical to SEQ ID NO: 20.

[1409] In some aspects, the antigen binding polypeptides provided herein comprise (i) a VL1 comprising a CDR1 having an amino acid sequence at least 65%, at least 70%, at least 75%, at least 80%, at least 85%, at least 90%, at least 95%, at least 99%, or 100% identical to SEQ ID NO: 30, a CDR2 having an amino acid sequence at least 65%, at least 70%, at least 75%, at least 80%, at least 85%, at least 90%, at least 95%, at least 99%, or 100% identical to SEQ ID NO: 31 or an amino acid sequence at least 65%, at least 70%, at least 75%, at least 80%, at least 85%, at least 90%, at least 95%, at least 99%, or 100% identical to amino acid sequence SAS, and a CDR3 having an amino acid sequence at least 65%, at least 70%, at least 75%, at least 80%, at least 85%, at least 90%, at least 95%, at least 99%, or 100% identical to SEQ ID NO: 32, 38, or 326; (ii) a VL2 comprising a CDR1 having an amino acid sequence at least 65%, at least 70%, at least 75%, at least 80%, at least 85%, at least 90%, at least 95%, at least 99%, or 100% identical to SEQ ID NO: 15, a CDR2 having an amino acid sequence at least 65%, at least 70%, at least 75%, at least 80%, at least 85%, at least 90%, at least 95%, at least 99%, or 100% identical to amino acid sequence LGS, and a CDR3 having an amino acid sequence at least 65%, at least 70%, at least 75%, at least 80%, at least 85%, at least 90%, at least 95%, at least 99%, or 100% identical to SEQ ID NO: 16; (iii) a VH1 comprising an amino acid sequence at least 65%, at least 70%, at least 75%, at least 80%, at least 85%, at least 90%, at least 95%, at least 99%, or 100% identical to SEQ ID NO: 34, a CDR2 having an amino acid sequence at least 65%, at least 70%, at least 75%, at least 80%, at least 85%, at least 90%, at least 95%, at least 99%, or 100% identical to SEQ ID NO: 35, and a CDR3 having an amino acid sequence at least 65%, at least 70%, at least 75%, at least 80%, at least 85%, at least 90%, at least 95%, at least 99%, or 100% identical to SEQ ID NO: 36, 40, or 327; and (iv) a VH2 comprising a CDR1 having an amino acid sequence at least 65%, at least 70%, at least 75%, at least 80%, at least 85%, at least 90%, at least 95%, at least 99%, or 100% identical to SEQ ID NO: 18, a CDR2 having an amino acid sequence at least 65%, at least 70%, at least 75%, at least 80%, at least 85%, at least 90%, at least 95%, at least 99%, or 100% identical to SEQ ID NO: 19, and a CDR3 having an amino acid sequence at least 65%, at least 70%, at least 75%, at least 80%, at least 85%, at least 90%, at least 95%, at least 99%, or 100% identical to SEQ ID NO: 20.

[1410] In some aspects, the antigen binding polypeptides provided herein comprise a VL1 comprising an amino acid sequence that is at least 65%, at least 70%, at least 75%, at least 80%, at least 85%, at least 90%, at least 95%, at least 99%, or 100% identical to SEQ ID NO: 33 or 39.

[1411] In some aspects, the antigen binding polypeptides provided herein comprise a VL2 comprising an amino acid sequence that is at least 65%, at least 70%, at least 75%, at least 80%, at least 85%, at least 90%, at least 95%, at least 99%, or 100% identical to SEQ ID NO: 17.

[1412] In some aspects, the antigen binding polypeptides provided herein comprise a VH1 comprising an amino acid sequence that is at least 65%, at least 70%, at least 75%, at least 80%, at least 85%, at least 90%, at least 95%, at least 99%, or 100% identical to SEQ ID NO: 37.

[1413] In some aspects, the antigen binding polypeptides provided herein comprise a VH2 comprising an amino acid sequence that is at least 65%, at least 70%, at least 75%, at least 80%, at least 85%, at least 90%, at least 95%, at least 99%, or 100% identical to SEQ ID NO: 21 or 22.

[1414] In some aspects, at least one of VL1 or VL2 comprised in the antigen binding polypeptides provided herein comprises (i) a complementarity determining region (CDR) 1 having an amino acid sequence that is at least 65%, at least 70%, at least 75%, at least 80%, at least 85%, at least 90%, at least 95%, at least 99%, or 100% identical to SEQ ID NO: 145 or 1050; (ii) a CDR2 having an amino acid sequence at least 65%, at least 70%, at least 75%, at least 80%, at least 85%, at least 90%, at least 95%, at least 99%, or 100% identical to SEQ ID NO: 1051 or an amino acid sequence that is at least 65%, at least 70%, at least 75%, at least 80%, at least 85%, at least 90%, at least 95%, at least 99%, or 100% identical to amino acid sequence AAS; and (iii) a CDR3 having an amino acid sequence that is at least 65%, at least 70%, at least 75%, at least 80%, at least 85%, at least 90%, at least 95%, at least 99%, or 100% identical to SEQ ID NO: 146 or 764.

[1415] In some aspects, at least one of VH1 or VH2 comprised in the antigen binding polypeptides provided herein comprises (i) a complementarity determining region (CDR) 1 having an amino acid sequence that is at least 65%, at least 70%, at least 75%, at least 80%, at least 85%, at least 90%, at least 95%, at least 99%, or 100% identical to SEQ ID NO: 148 or 1052; (ii) a CDR2 having an amino acid sequence that is at least 65%, at least 70%, at least 75%, at least 80%, at least 85%, at least 90%, at least 95%, at least 99%, or 100% identical to SEQ ID NO: 149 or 1053; and (iii) a CDR3 having an amino acid sequence that is at least 65%, at least 70%, at least 75%, at least 80%, at least 85%, at least 90%, at least 95%, at least 99%, or 100% identical to SEQ ID NO: 150, 765, or 1054.

[1416] In some aspects, at least one of VL1 or VL2 comprised in the antigen binding polypeptides provided herein comprises (i) a complementarity determining region (CDR) 1 having an amino acid sequence that is at least 65%, at least 70%, at least 75%, at least 80%, at least 85%, at least 90%, at least 95%, at least 99%, or 100% identical to SEQ ID NO: 145 or 1050; (ii) a CDR2 having an amino acid sequence at least 65%, at least 70%, at least 75%, at least 80%, at least 85%, at least 90%, at least 95%, at least 99%, or 100% identical to SEQ ID NO: 1051 or an amino acid sequence that is at least 65%, at least 70%, at least 75%, at least 80%, at least 85%, at least 90%, at least 95%, at least 99%, or 100% identical to amino acid sequence AAS; and (iii) a CDR3 having an amino acid sequence that is at least 65%, at least 70%, at least 75%, at least 80%, at least 85%, at least 90%, at least 95%, at least 99%, or 100% identical to SEQ ID NO: 146 or 764; and at least one of VH1 or VH2 comprised in the antigen binding polypeptides provided herein comprises (iv) a complementarity determining region (CDR) 1 having an amino acid sequence that is at least 65%, at least 70%, at least 75%, at least 80%, at least 85%, at least 90%, at least 95%, at least 99%, or 100% identical to SEQ ID NO: 148 or 1052; (v) a CDR2 having an amino acid sequence that is at least 65%, at least 70%, at least 75%, at least 80%, at least 85%, at least 90%, at least 95%, at least 99%, or 100% identical to SEQ ID NO: 149 or 1053; and (vi) a CDR3 having an amino acid sequence that is at least 65%, at least 70%, at least 75%, at least 80%, at least 85%, at least 90%, at least 95%, at least 99%, or 100% identical to SEQ ID NO: 150, 765, or 1054.

[1417] In some aspects, at least one of VL1 or VL2 comprised in the antigen binding polypeptides provided herein comprises an amino acid sequence that is at least 65%, at least 70%, at least 75%, at least 80%, at least 85%, at least 90%, at least 95%, at least 99%, or 100% identical to SEQ ID NO: 147. In some aspects, at least one of VH1 or VH2 comprised in the antigen binding polypeptides provided herein comprises an amino acid sequence that is at least 65%, at least 70%, at least 75%, at least 80%, at least 85%, at least 90%, at least 95%, at least 99%, or 100% identical to SEQ ID NO: 151.

[1418] In some aspects, (i) at least one of VL1 or VL2 comprised in the antigen binding polypeptides provided herein comprises an amino acid sequence that is at least 65%, at least 70%, at least 75%, at least 80%, at least 85%, at least 90%, at least 95%, at least 99%, or 100% identical to SEQ ID NO: 147, and (ii) at least one of VH1 or VH2 comprised in the antigen binding polypeptides provided herein comprises an amino acid sequence that is at least 65%, at least 70%, at least 75%, at least 80%, at least 85%, at least 90%, at least 95%, at least 99%, or 100% identical to SEQ ID NO: 151.

[1419] In some aspects, the antigen binding polypeptides provided herein comprise a VL1 comprising (i) a complementarity determining region (CDR) 1 having an amino acid sequence that is at least 65%, at least 70%, at least 75%, at least 80%, at least 85%, at least 90%, at least 95%, at least 99%, or 100% identical to SEQ ID NO: 145 or 1050; (ii) a CDR2 having an amino acid sequence at least 65%, at least 70%, at least 75%, at least 80%, at least 85%, at least 90%, at least 95%, at least 99%, or 100% identical to SEQ ID NO: 1051 or an amino acid sequence that is at least 65%, at least 70%, at least 75%, at least 80%, at least 85%, at least 90%, at least 95%, at least 99%, or 100% identical to amino acid sequence AAS; and (iii) a CDR3 having an amino acid sequence that is at least 65%, at least 70%, at least 75%, at least 80%, at least 85%, at least 90%, at least 95%, at least 99%, or 100% identical to SEQ ID NO: 146 or 764; a VH1 comprising (iv) a complementarity determining region (CDR) 1 having an amino acid sequence that is at least 65%, at least 70%, at least 75%, at least 80%, at least 85%, at least 90%, at least 95%, at least 99%, or 100% identical to SEQ ID NO: 148 or 1052; (v) a CDR2 having an amino acid sequence that is at least 65%, at least 70%, at least 75%, at least 80%, at least 85%, at least 90%, at least 95%, at least 99%, or 100% identical to SEQ ID NO: 149 or 1053; and (vi) a CDR3 having an amino acid sequence that is at least 65%, at least 70%, at least 75%, at least 80%, at least 85%, at least 90%, at least 95%, at least 99%, or 100% identical to SEQ ID NO: 150, 765, or 1054; a VL2 comprising (vii) a complementarity determining region (CDR) 1 having an amino acid sequence that is at least 65%, at least 70%, at least 75%, at least 80%, at least 85%, at least 90%, at least 95%, at least 99%, or 100% identical to any one of SEQ ID NOs: 1, 9, 15, 23, 30, 41, 48, 55, 58, 65, 72, 79, 86, 93, 99, 105, 112, 119, 130, 138, 145, 152, 159, 166, 172, 179, 186, 192, 199, 205, 212, 219, 226, 232, 324, 627, 640, 650, 659, 676, 687, 695, 703, 712, 770, 778, 785, 794, 801, 807, 814, 827, 836, 849, 858, 865, 878, 1045, 1050, 1055, 1060, and 1065; (viii) a CDR2 having an amino acid sequence at least 65%, at least 70%, at least 75%, at least 80%, at least 85%, at least 90%, at least 95%, at least 99%, or 100% identical to any one of SEQ ID NOs: 2, 31, 628, 641, 677, 1046, 1051, 1056, and 1061; or at least 65%, at least 70%, at least 75%, at least 80%, at least 85%, at least 90%, at least 95%, at least 99%, or 100% identical to any one of amino acid sequences AAS, GAS, LGS, GTN, GTN, SAS, SDS, DNT, EVT, DAS, DVT, RNS, DVS, EDS, DDS, KDS, VAS, WAS, YTS, EVS, NNN, SYN, and DAT; and (ix) a CDR3 having an amino acid sequence at least 65%, at least 70%, at least 75%, at least 80%, at least 85%, at least 90%, at least 95%, at least 99%, or 100% identical to any one of SEQ ID NOs: 3, 10, 16, 24, 32, 38, 42, 49, 59, 66, 73, 80, 87, 94, 100, 106, 113, 120, 126, 131, 139, 146, 153, 160, 167, 173, 180, 187, 193, 200, 206, 213, 220, 227, 233, 239, 242, 246, 249, 256, 283, 285, 287, 288, 290, 292, 294, 296, 301, 304, 306, 309, 311, 313, 316, 325, 326, 329, 642, 651, 660, 668, 678, 651, 696, 704, 713, 764, 766, 768, 771, 779, 786, 792, 795, 808, 815, 821, 830, 837, 843, 850, 856, 859, 866, 872, 879, 885, and 1066; and a VH2 comprising (x) a CDR1 having an amino acid sequence at least 65%, at least 70%, at least 75%, at least 80%, at least 85%, at least 90%, at least 95%, at least 99%, or 100% identical to any one of SEQ ID NOs: 5, 12, 18, 26, 34, 44, 51, 61, 68, 75, 82, 89, 96, 102, 108, 115, 122, 133, 141, 148, 155, 162, 175, 182, 189, 195, 202, 208, 215, 222, 229, 235, 318, 629, 645, 654, 663, 671, 682, 690, 699, 707, 716, 773, 781, 788, 797, 803, 810, 817, 823, 832, 839, 845, 852, 861, 868, 874, 881, 1047, 1052, 1057, 1062, and 1067; (xi) a CDR2 having an amino acid sequence at least 65%, at least 70%, at least 75%, at least 80%, at least 85%, at least 90%, at least 95%, at least 99%, or 100% identical to any one of SEQ ID NOs: 6, 19, 27, 35, 45, 52, 56, 62, 69, 76, 83, 90, 109, 116, 123, 134, 142, 149, 156, 163, 169, 176, 183, 196, 209, 216, 223, 236, 273, 319, 328, 630, 646, 655, 664, 672, 683, 691, 708, 776, 782, 789, 798, 804, 811, 818, 824, 833, 840, 846, 853, 862, 869, 875, 882, 1048, 1053, 1058, 1063, and 1068; and (xii) a CDR3 having an amino acid sequence at least 65%, at least 70%, at least 75%, at least 80%, at least 85%, at least 90%, at least 95%, at least 99%, or 100% identical to any one of SEQ ID NOs: 7, 13, 20, 28, 36, 40, 46, 53, 63, 70, 77, 84, 91, 97, 103, 110, 117, 124, 128, 135, 143, 150, 157, 164, 170, 177, 184, 190, 197, 203, 210, 217, 224, 230, 237, 241, 244, 248, 253, 257, 259, 261, 263, 265, 267, 269, 271, 274, 276, 278, 281, 297, 320, 322, 327, 330, 332, 631, 647, 656, 665, 673, 684, 692, 700, 709, 717, 765, 767, 769, 774, 783, 790, 793, 799, 805, 812, 819, 825, 834, 841, 847, 854, 857, 863, 870, 876, 883, 886, 1049, 1054, 1059, 1064, and 1069.

[1420] In some aspects, the antigen binding polypeptides provided herein comprise (i) a VL1 comprising an amino acid sequence that is at least 65%, at least 70%, at least 75%, at least 80%, at least 85%, at least 90%, at least 95%, at least 99%, or 100% identical to SEQ ID NO: 147; (ii) a VH1 comprising an amino acid sequence that is at least 65%, at least 70%, at least 75%, at least 80%, at least 85%, at least 90%, at least 95%, at least 99%, or 100% identical to SEQ ID NO: 151; (iii) a VL2 comprising an amino acid sequence that is at least 65%, at least 70%, at least 75%, at least 80%, at least 85%, at least 90%, at least 95%, at least 99%, or 100% identical to any one of SEQ ID NOs: 4, 11, 17, 25, 33, 39, 43, 50, 60, 67, 74, 81, 88, 95, 101, 107, 114, 121, 127, 132, 140, 147, 154, 161, 168, 174, 181, 188, 194, 201, 207, 214, 221, 228, 234, 240, 243, 247, 250, 251, 252, 255, 284, 286, 289, 291, 293, 295, 299, 300, 302, 303, 305, 307, 308, 310, 312, 314, 315, 317, 323, 639, 649, 658, 667, 675, 686, 694, 702, 711, 772, 780, 787, 796, 802, 809, 816, 822, 831, 838, 844, 851, 860, 867, 873, 880, and 988; and (iv) a VH2 comprising an amino acid sequence that is at least 65%, at least 70%, at least 75%, at least 80%, at least 85%, at least 90%, at least 95%, at least 99%, or 100% identical to any one of SEQ ID NOs: 8, 14, 21, 22, 29, 37, 47, 54, 57, 64, 71, 78, 85, 92, 98, 104, 111, 118, 125, 129, 136, 137, 144, 151, 158, 165, 171, 178, 185, 191, 198, 204, 211, 218, 225, 231, 238, 245, 254, 258, 260, 262, 264, 266, 268, 270, 272, 275, 277, 279, 280, 282, 298, 321, 331, 626, 644, 653, 662, 670, 681, 689, 698, 706, 715, 775, 777, 784, 791, 800, 806, 813, 820, 826, 835, 842, 848, 855, 864, 871, 877, and 884.

[1421] In some aspects, the antigen binding polypeptides provided herein comprise a VL1 comprising (i) a complementarity determining region (CDR) 1 having an amino acid sequence that is at least 65%, at least 70%, at least 75%, at least 80%, at least 85%, at least 90%, at least 95%, at least 99%, or 100% identical to SEQ ID NO: 145 or 1050; (ii) a CDR2 having an amino acid sequence at least 65%, at least 70%, at least 75%, at least 80%, at least 85%, at least 90%, at least 95%, at least 99%, or 100% identical to SEQ ID NO: 1051 or an amino acid sequence that is at least 65%, at least 70%, at least 75%, at least 80%, at least 85%, at least 90%, at least 95%, at least 99%, or 100% identical to amino acid sequence AAS; and (iii) a CDR3 having an amino acid sequence that is at least 65%, at least 70%, at least 75%, at least 80%, at least 85%, at least 90%, at least 95%, at least 99%, or 100% identical to SEQ ID NO: 146 or 764; a VH1 comprising (iv) a complementarity determining region (CDR) 1 having an amino acid sequence that is at least 65%, at least 70%, at least 75%, at least 80%, at least 85%, at least 90%, at least 95%, at least 99%, or 100% identical to SEQ ID NO: 148 or 1052; (v) a CDR2 having an amino acid sequence that is at least 65%, at least 70%, at least 75%, at least 80%, at least 85%, at least 90%, at least 95%, at least 99%, or 100% identical to SEQ ID NO: 149 or 1053; and (vi) a CDR3 having an amino acid sequence that is at least 65%, at least 70%, at least 75%, at least 80%, at least 85%, at least 90%, at least 95%, at least 99%, or 100% identical to SEQ ID NO: 150, 765, or 1054; a VL2 comprising (vii) a complementarity determining region (CDR) 1 having an amino acid sequence that is at least 65%, at least 70%, at least 75%, at least 80%, at least 85%, at least 90%, at least 95%, at least 99%, or 100% identical to any one of SEQ ID NOs: 1, 9, 15, 23, 30, 65, 72, 145, 152, 324, 627, 138, 172, 1045, 1050, 1055, 1060, and 1065; (viii) a CDR2 having an amino acid sequence at least 65%, at least 70%, at least 75%, at least 80%, at least 85%, at least 90%, at least 95%, at least 99%, or 100% identical to any one of SEQ ID NOs: 2, 31, 628, 1046, 1051, 1056, and 1061, or at least 65%, at least 70%, at least 75%, at least 80%, at least 85%, at least 90%, at least 95%, at least 99%, or 100% identical to any one of amino acid sequences GAS, LGS, GTN, SAS, SDS, AAS, DAS, and DNT; and (ix) a CDR3 having an amino acid sequence at least 65%, at least 70%, at least 75%, at least 80%, at least 85%, at least 90%, at least 95%, at least 99%, or 100% identical to any one of SEQ ID NOs: 3, 10, 16, 24, 32, 38, 66, 73, 146, 153, 325, 326, 764, 766, 139, 856, 173, 792, and 1066; and a VH2 comprising (x) a CDR1 having an amino acid sequence at least 65%, at least 70%, at least 75%, at least 80%, at least 85%, at least 90%, at least 95%, at least 99%, or 100% identical to any one of SEQ ID NOs: 5, 12, 18, 26, 34, 68, 75, 148, 155, 629, 141, 175, 1047, 1052, 1057, 1062, and 1067; (xi) a CDR2 having an amino acid sequence at least 65%, at least 70%, at least 75%, at least 80%, at least 85%, at least 90%, at least 95%, at least 99%, or 100% identical to any one of SEQ ID NOs: 6, 19, 27, 35, 69, 76, 149, 156, 630, 142, 176, 1048, 1053, 1058, 1063, and 1068; and (xii) a CDR3 having an amino acid sequence at least 65%, at least 70%, at least 75%, at least 80%, at least 85%, at least 90%, at least 95%, at least 99%, or 100% identical to any one of SEQ ID NOs: 7, 13, 20, 28, 36, 40, 70, 77, 327, 150, 157, 332, 631, 765, 767, 143, 857, 177, 793, 1049, 1054, 1059, 1064, and 1069.

[1422] In some aspects, the antigen binding polypeptides provided herein comprise (i) a VL1 comprising an amino acid sequence that is at least 65%, at least 70%, at least 75%, at least 80%, at least 85%, at least 90%, at least 95%, at least 99%, or 100% identical to SEQ ID NO: 147; (ii) a VH1 comprising an amino acid sequence that is at least 65%, at least 70%, at least 75%, at least 80%, at least 85%, at least 90%, at least 95%, at least 99%, or 100% identical to SEQ ID NO: 151; (iii) a VL2 comprising an amino acid sequence that is at least 65%, at least 70%, at least 75%, at least 80%, at least 85%, at least 90%, at least 95%, at least 99%, or 100% identical to any one of SEQ ID NOs: 4, 11, 17, 25, 33, 39, 67, 74, 147, 154, 140, and 174; and (iv) a VH2 comprising an amino acid sequence that is at least 65%, at least 70%, at least 75%, at least 80%, at least 85%, at least 90%, at least 95%, at least 99%, or 100% identical to any one of SEQ ID NOs: 8, 14, 21, 22, 29, 37, 71, 78, 151, 158, 626, 144, and 178.

[1423] In some aspects, the antigen binding polypeptides disclosed herein, comprise one or more CL, as indicated in the formulas representing the antigen binding polypeptides disclosed herein. In some aspects, the CL comprises an amino acid sequence at least 65%, at least 70%, at least 75%, at least 80%, at least 85%, at least 90%, at least 95%, at least 99%, or 100% identical to any one of SEQ ID NOs: 374, 637, or 1092-1095.

[1424] In some aspects, the antigen binding polypeptides disclosed herein, comprise one or more CH1, as indicated in the formulas representing the antigen binding polypeptides disclosed herein. In some aspects, the CH1 comprises an amino acid sequence at least 65%, at least 70%, at least 75%, at least 80%, at least 85%, at least 90%, at least 95%, at least 99%, or 100% identical to any one of SEQ ID NOs: 375, 634, 1070, 1071, or 1086-1091.

[1425] In some aspects, the antigen binding polypeptides provided herein further comprise an Fc region. In some aspects, the antigen binding polypeptides provided herein further comprise an Fc region at the carboxy-terminus. In some aspects, the Fc region comprises an immunoglobulin heavy chain constant region 2 (CH2) and/or an immunoglobulin heavy chain constant region 3 (CH3). In some aspects, the Fc region further comprises an immunoglobulin hinge (i.e., a hinge region). In some aspects, the hinge region comprises an amino acid sequence at least 65%, at least 70%, at least 75%, at least 80%, at least 85%, at least 90%, at least 95%, at least 99%, or 100% identical to any one of SEQ ID NOs: 635, 636, 1072, 1073, or 1074. In some aspects, the Fc region comprises a CH2 and a CH3. In some aspects, the CH2 comprises an amino acid sequence that is at least 65%, at least 70%, at least 75%, at least 80%, at least 85%, at least 90%, at least 95%, at least 99%, or 100% identical to any one of SEQ ID NOs: 1075-1078. In some aspects, the CH3 comprises an amino acid sequence that is at least 65%, at least 70%, at least 75%, at least 80%, at least 85%, at least 90%, at least 95%, at least 99%, or 100% identical to any one of SEQ ID NOs: 1079-1085. In some aspects, the Fc region comprises an amino acid sequence that is at least 65%, at least 70%, at least 75%, at least 80%, at least 85%, at least 90%, at least 95%, at least 99%, or 100% identical to any one of SEQ ID NOs: 376-380.

[1426] In some aspects, the Fc region comprises one or more amino acid substitutions. In some aspects, the one or more amino acid substitutions comprise one or more half-life extension amino acid substitutions. In some aspects, the one or more half-life extension amino acid substitutions comprise one or more of amino acid substitutions M428L, N434A, N434S, L234F, L235E, P331S, M252Y, S254T, and T256E, or equivalent thereof, based on the EU numbering scheme. In some aspects, the one or more half-life extension amino acid substitutions comprise a LA (M428L and N434A, or equivalent thereof, based on the EU numbering scheme) amino acid substitution. In some aspects, the one or more half-life extension amino acid substitutions comprise a LS (M428L and N434S, or equivalent thereof, based on the EU numbering scheme) amino acid substitution. In some aspects, the one or more half-life extension amino acid substitutions comprise L234F and L235E, or equivalent thereof (based on the EU numbering scheme) amino acid substitutions. In some aspects, the one or more half-life extension amino acid substitutions comprise a TM (L234F, L235E, and P331S, or equivalent thereof, based on the EU numbering scheme) amino acid substitution. In some aspects, the one or more half-life extension amino acid substitutions comprise a YTE (M252Y, S254T, and T256E, or equivalent thereof, based on the EU numbering scheme) amino acid substitution.

[1427] In some aspects, the Fc region comprises at least one knob-into-hole modification. In some aspects, the antigen binding polypeptides disclosed herein are comprised in IgG1 or IgG4 antibodies or antigen binding fragments thereof. In some aspects, the knob-into-hole modification comprises one or more of knob substitutions of S354C and T366W, or equivalent thereof, and/or one or more of hole substitutions of Y349C, T366S, L368A, Y407V, or equivalent thereof, or a combination thereof, based on the EU numbering scheme. In some aspects, the Fc region comprises a knob-into-hole modification comprising knob substitutions of S354C and T366W, or equivalent thereof, and/or hole substitutions of Y349C, T366S. L368A and Y407V, or equivalent thereof, and/or a half-life extension amino acid substitution comprising: a LA (M428L and N434A, or equivalent thereof, based on the EU numbering scheme) amino acid substitution, a LS (M428L and N434S, or equivalent thereof, based on the EU numbering scheme) amino acid substitution. L234F and L235E, or equivalent thereof (based on the EU numbering scheme) amino acid substitutions, a TM (L234F, L235E, and P331S, or equivalent thereof, based on the EU numbering scheme) amino acid substitution, a YTE (M252Y, S254T, and T256E, or equivalent thereof, based on the EU numbering scheme) amino acid substitution, or any combination thereof.

[1428] In some aspects, the Fc region comprises knob substitutions of S354C and T366W, or equivalent thereof, and a half-life extension amino acid substitution comprising: a LA (M428L and N434A, or equivalent thereof, based on the EU numbering scheme) amino acid substitution, a LS (M428L and N434S, or equivalent thereof, based on the EU numbering scheme) amino acid substitution, L234F and L235E, or equivalent thereof (based on the EU numbering scheme) amino acid substitutions, a TM (L234F, L235E, and P331S, or equivalent thereof, based on the EU numbering scheme) amino acid substitution, a YTE (M252Y, S254T, and T256E, or equivalent thereof, based on the EU numbering scheme) amino acid substitution, or any combination thereof.

[1429] In some aspects, the Fc region comprises hole substitutions of Y349C, T366S, L368A, and Y407V, or equivalent thereof, and a half-life extension amino acid substitution comprising: a LA (M428L and N434A, or equivalent thereof, based on the EU numbering scheme) amino acid substitution, a LS (M428L and N434S, or equivalent thereof, based on the EU numbering scheme) amino acid substitution. L234F and L235E, or equivalent thereof (based on the EU numbering scheme) amino acid substitutions, a TM (L234F, L235E, and P331S, or equivalent thereof, based on the EU numbering scheme) amino acid substitution, a YTE (M252Y, S254T, and T256E, or equivalent thereof, based on the EU numbering scheme) amino acid substitution, or any combination thereof.

[1430] In some aspects, the antigen binding polypeptides disclosed herein comprise one or more Fc effector function knockout mutation. In some aspects, the antigen binding polypeptides disclosed herein are comprised in IgG1 or IgG4 antibodies or antigen binding fragments thereof. In some aspects, the Fc effector function knockout mutation is L234A, L235A, P239A, or equivalent thereof, or a combination thereof, based on the EU numbering scheme.

[1431] In some aspects, the antigen binding polypeptides disclosed herein comprise a mutation at a glycosylation site. In some aspects, the mutation at a glycosylation site is a mutation at an N-glycosylation site. In some aspects, the antigen binding polypeptides comprise a VH comprising a mutation at a glycosylation site. In some aspects, the mutation at a glycosylation site is a mutation at an N-glycosylation site. In some aspects, the mutation at an N-glycosylation site is at amino acid N62 of the VH region or equivalent thereof. In some aspects, the mutation at an N-glycosylation site at amino acid N62 is N62Q or N62S, or equivalent thereof.

[1432] In some aspects, the antigen binding polypeptides disclosed herein, comprise one or more optional linkers. The one or more optional linkers are indicated herein as Ln, wherein n is an integer, and the integer next to each L indicates each L comprised in the antigen binding polypeptides disclosed herein. For example, if an antigen binding polypeptide disclosed herein comprises two linkers, the first linker from N-terminus to C-terminus is herein indicated as L1, and the second linker from N-terminus to C-terminus is herein indicated as L2. In some aspects, any one of the optional linkers each independently have a length of from 0 amino acids to about 50 amino acids. In some aspects, any one of the optional linkers each independently have a length of from 5 amino acids to about 40 amino acids.

[1433] In some aspects, any one of the optional linkers are non-immunogenic. In some aspects, any one of the optional linkers do not contain a consensus T cell epitope.

[1434] In some aspects, any of Ln comprises an amino acid sequence of G or A, or an amino acid sequence at least 65%, at least 70%, at least 75%, at least 80%, at least 85%, at least 90%, at least 95%, at least 99%, or 100% identical to amino acid sequence GSS or ASG, or an amino acid sequence at least 65%, at least 70%, at least 75%, at least 80%, at least 85%, at least 90%, at least 95%, at least 99%, or 100% identical to any one of SEQ ID NOs: 333-373 and 967-971. In some aspects, Ln comprises an amino acid sequence at least 65%, at least 70%, at least 75%, at least 80%, at least 85%, at least 90%, at least 95%, at least 99%, or 100% identical to any one of SEQ ID NOs: 333-345 and 967-971.

[1435] In some aspects, the antigen binding polypeptides provided herein have a structure, from amino-terminus to carboxy-terminus, represented by:
[1436] VL1-L1-CL-L2-VH1-L3-CH1-L4-VL2-L5-VH2;
[1437] VL1-L1-CL-L2-VH1-L3-CH1-L4-VH2-L5-VL2;
[1438] VL1-L1-CL-L2-VL2-L3-CH1-L4-VH1-L5-VH2;
[1439] VL1-L1-CL-L2-VH2-L3-CH1-L4-VH1-L5-VL2;
[1440] VL1-L1-CH1-L2-VH1-L3-CL-L4-VL2-L5-VH2;
[1441] VL1-L1-CH1-L2-VH1-L3-CL-L4-VH2-L5-VL2;
[1442] VL1-L1-CH1-L2-VL2-L3-CL-L4-VH1-L5-VH2;
[1443] VL1-L1-CH1-L2-VH2-L3-CL-L4-VH1-L5-VL2;
[1444] VH1-L1-CL-L2-VL1-L3-CH1-L4-VL2-L5-VH2;
[1445] VH1-L1-CL-L2-VL1-L3-CH1-L4-VH2-L5-VL2;
[1446] VH1-L1-CL-L2-VL2-L3-CH1-L4-VL1-L5-VH2;
[1447] VH1-L1-CL-L2-VH2-L3-CH1-L4-VL1-L5-VL2;
[1448] VH1-L1-CH1-L2-VL1-L3-CL-L4-VL2-L5-VH2;
[1449] VH1-L1-CH1-L2-VL1-L3-CL-L4-VH2-L5-VL2;
[1450] VH1-L1-CH1-L2-VL2-L3-CL-L4-VL1-L5-VH2;
[1451] VH1-L1-CH1-L2-VH2-L3-CL-L4-VL1-L5-VL2;
[1452] VL2-L1-CL-L2-VL1-L3-CH1-L4-VH2-L5-VH1;
[1453] VL2-L1-CL-L2-VH1-L3-CH1-L4-VH2-L5-VL1;
[1454] VL2-L1-CL-L2-VH2-L3-CH1-L4-VL1-L5-VH1;
[1455] VL2-L1-CL-L2-VH2-L3-CH1-L4-VH1-L5-VL1;
[1456] VL2-L1-CH1-L2-VL1-L3-CL-L4-VH2-L5-VH1;
[1457] VL2-L1-CH1-L2-VH1-L3-CL-L4-VH2-L5-VL1;
[1458] VL2-L1-CH1-L2-VH2-L3-CL-L4-VL1-L5-VH1;
[1459] VL2-L1-CH1-L2-VH2-L3-CL-L4-VH1-L5-VL1;
[1460] VH2-L1-CL-L2-VL1-L3-CH1-L4-VL2-L5-VH1;
[1461] VH2-L1-CL-L2-VH1-L3-CH1-L4-VL2-L5-VL1;
[1462] VH2-L1-CL-L2-VL2-L3-CH1-L4-VL1-L5-VH1;
[1463] VH2-L1-CL-L2-VL2-L3-CH1-L4-VH1-L5-VL1;
[1464] VH2-L1-CH1-L2-VL1-L3-CL-L4-VL2-L5-VH1;
[1465] VH2-L1-CH1-L2-VH1-L3-CL-L4-VL2-L5-VL1;
[1466] VH2-L1-CH1-L2-VL2-L3-CL-L4-VL1-L5-VH1; or
[1467] VH2-L1-CH1-L2-VL2-L3-CL-L4-VH1-L5-VL1;
[1468] wherein:
[1469] VL1 is a first immunoglobulin light chain variable region that specifically binds to a severe acute respiratory syndrome coronavirus 2 (SARS-CoV-2) protein;
[1470] VL2 is a second immunoglobulin light chain variable region that specifically binds to a SARS-CoV-2 protein;
[1471] VH1 is a first immunoglobulin heavy chain variable region that specifically binds to a SARS-CoV-2 protein;
[1472] VH2 is a second immunoglobulin heavy chain variable region that specifically binds to a SARS-CoV-2 protein;
[1473] CL is an immunoglobulin light chain constant region;
[1474] CH1 is an immunoglobulin heavy chain constant region 1; and
[1475] L1-L5 are optional amino acid linkers.

[1476] In any aspect shown herein as a structure from amino terminus to carboxy terminus, and with binding pairs selected from VL and/or VH or other structural regions such as CH1, CL, CH2, CH3, when shown without a specific linker such as L1, L2, etc., such linkers are optionally present in such structures between each designated subsequence VL, VH, etc.

[1477] In some aspects, the antigen binding polypeptides provided herein comprise a VL1 comprising (i) a complementarity determining region (CDR) 1 having an amino acid sequence that is at least 65%, at least 70%, at least 75%, at least 80%, at least 85%, at least 90%, at least 95%, at least 99%, or 100% identical to any one of SEQ ID NOs: 1, 9, 15, 23, 30, 41, 48, 55, 58, 65, 72, 79, 86, 93, 99, 105, 112, 119, 130, 138, 145, 152, 159, 166, 172, 179, 186, 192, 199, 205, 212, 219, 226, 232, 324, 627, 640, 650, 659, 676, 687, 695, 703, 712, 770, 778, 785, 794, 801, 807, 814, 827, 836, 849, 858, 865, 878, 1045, 1050, 1055, 1060, and 1065; (ii) a CDR2 having an amino acid sequence that is at least 65%, at least 70%, at least 75%, at least 80%, at least 85%, at least 90%, at least 95%, at least 99%, or 100% identical to any one of SEQ ID NOs: 2, 31, 628, 641, 677, 1046, 1051, 1056, and 1061; or at least 65%, at least 70%, at least 75%, at least 80%, at least 85%, at least 90%, at least 95%, at least 99%, or 100% identical to any one of amino acid sequences AAS, GAS, LGS, GTN, GTN, SAS, SDS, DNT, EVT, DAS, DVT, RNS, DVS, EDS, DDS, KDS, VAS, WAS, YTS, EVS, NNN, SYN, and DAT; and (iii) a CDR3 having an amino acid sequence that is at least 65%, at least 70%, at least 75%, at least 80%, at least 85%, at least 90%, at least 95%, at least 99%, or 100% identical to any one of SEQ ID NOs: 3, 10, 16, 24, 32, 38, 42, 49, 59, 66, 73, 80, 87, 94, 100, 106, 113, 120, 126, 131, 139, 146, 153, 160, 167, 173, 180, 187, 193, 200, 206, 213, 220, 227, 233, 239, 242, 246, 249, 256, 283, 285, 287, 288, 290, 292, 294, 296, 301, 304, 306, 309, 311, 313, 316, 325, 326, 329, 642, 651, 660, 668, 678, 651, 696, 704, 713, 764, 766, 768, 771, 779, 786, 792, 795, 808, 815, 821, 830, 837, 843, 850, 856, 859, 866, 872, 879, 885, and 1066.

[1478] In some aspects, the antigen binding polypeptides provided herein comprise a VL2 comprising (i) a complementarity determining region (CDR) 1 having an amino acid sequence that is at least 65%, at least 70%, at least 75%, at least 80%, at least 85%, at least 90%, at least 95%, at least 99%, or 100% identical to any one of SEQ ID NOs: 1, 9, 15, 23, 30, 41, 48, 55, 58, 65, 72, 79, 86, 93, 99, 105, 112, 119, 130, 138, 145, 152, 159, 166, 172, 179, 186, 192, 199, 205, 212, 219, 226, 232, 324, 627, 640, 650, 659, 676, 687, 695, 703, 712, 770, 778, 785, 794, 801, 807, 814, 827, 836, 849, 858, 865, 878, 1045, 1050, 1055, 1060, and 1065; (ii) a CDR2 having an amino acid sequence that is at least 65%, at least 70%, at least 75%, at least 80%, at least 85%, at least 90%, at least 95%, at least 99%, or 100% identical to any one of SEQ ID NOs: 2, 31, 628, 641, 677, 1046, 1051, 1056, and 1061; or at least 65%, at least 70%, at least 75%, at least 80%, at least 85%, at least 90%, at least 95%, at least 99%, or 100% identical to any one of amino acid sequences AAS, GAS, LGS, GTN, GTN, SAS, SDS, DNT, EVT, DAS, DVT, RNS, DVS, EDS, DDS, KDS, VAS, WAS, YTS, EVS, NNN, SYN, and DAT; and (iii) a CDR3 having an amino acid sequence that is at least 65%, at least 70%, at least 75%, at least 80%, at least 85%, at least 90%, at least 95%, at least 99%, or 100% identical to any one of SEQ ID NOs: 3, 10, 16, 24, 32, 38, 42, 49, 59, 66, 73, 80, 87, 94, 100, 106, 113, 120, 126, 131, 139, 146, 153, 160, 167, 173, 180, 187, 193, 200, 206, 213, 220, 227, 233, 239, 242, 246, 249, 256, 283, 285, 287, 288, 290, 292, 294, 296, 301, 304, 306, 309, 311, 313, 316, 325, 326, 329, 642, 651, 660, 668, 678, 651, 696, 704, 713, 764, 766, 768, 771, 779, 786, 792, 795, 808, 815, 821, 830, 837, 843, 850, 856, 859, 866, 872, 879, 885, and 1066.

[1479] In some aspects, the antigen binding polypeptides provided herein comprise a VH1 comprising (i) a CDR1 having an amino acid sequence that is at least 65%, at least 70%, at least 75%, at least 80%, at least 85%, at least 90%, at least 95%, at least 99%, or 100% identical to any one of SEQ ID NOs: 5, 12, 18, 26, 34, 44, 51, 61, 68, 75, 82, 89, 96, 102, 108, 115, 122, 133, 141, 148, 155, 162, 175, 182, 189, 195, 202, 208, 215, 222, 229, 235, 318, 629, 645, 654, 663, 671, 682, 690, 699, 707, 716, 773, 781, 788, 797, 803, 810, 817, 823, 832, 839, 845, 852, 861, 868, 874, 881, 1047, 1052, 1057, 1062, and 1067; (ii) a CDR2 having an amino acid sequence that is at least 65%, at least 70%, at least 75%, at least 80%, at least 85%, at least 90%, at least 95%, at least 99%, or 100% identical to any one of SEQ ID NOs: 6, 19, 27, 35, 45, 52, 56, 62, 69, 76, 83, 90, 109, 116, 123, 134, 142, 149, 156, 163, 169, 176, 183, 196, 209, 216, 223, 236, 273, 319, 328, 630, 646, 655, 664, 672, 683, 691, 708, 776, 782, 789, 798, 804, 811, 818, 824, 833, 840, 846, 853, 862, 869, 875, 882, 1048, 1053, 1058, 1063, and 1068; and (iii) a CDR3 having an amino acid sequence that is at least 65%, at least 70%, at least 75%, at least 80%, at least 85%, at least 90%, at least 95%, at least 99%, or 100% identical to any one of SEQ ID NOs: 7, 13, 20, 28, 36, 40, 46, 53, 63, 70, 77, 84, 91, 97, 103, 110, 117, 124, 128, 135, 143, 150, 157, 164, 170, 177, 184, 190, 197, 203, 210, 217, 224, 230, 237, 241, 244, 248, 253, 257, 259, 261, 263, 265, 267, 269, 271, 274, 276, 278, 281, 297, 320, 322, 327, 330, 332, 631, 647, 656, 665, 673, 684, 692, 700, 709, 717, 765, 767, 769, 774, 783, 790, 793, 799, 805, 812, 819, 825, 834, 841, 847, 854, 857, 863, 870, 876, 883, 886, 1049, 1054, 1059, 1064, and 1069.

[1480] In some aspects, the antigen binding polypeptides provided herein comprise a VH2 comprising (i) a CDR1 having an amino acid sequence that is at least 65%, at least 70%, at least 75%, at least 80%, at least 85%, at least 90%, at least 95%, at least 99%, or 100% identical to any one of SEQ ID NOs: 5, 12, 18, 26, 34, 44, 51, 61, 68, 75, 82, 89, 96, 102, 108, 115, 122, 133, 141, 148, 155, 162, 175, 182, 189, 195, 202, 208, 215, 222, 229, 235, 318, 629, 645, 654, 663, 671, 682, 690, 699, 707, 716, 773, 781, 788, 797, 803, 810, 817, 823, 832, 839, 845, 852, 861, 868, 874, 881, 1047, 1052, 1057, 1062, and 1067; (ii) a CDR2 having an amino acid sequence that is at least 65%, at least 70%, at least 75%, at least 80%, at least 85%, at least 90%, at least 95%, at least 99%, or 100% identical to any one of SEQ ID NOs: 6, 19, 27, 35, 45, 52, 56, 62, 69, 76, 83, 90, 109, 116, 123, 134, 142, 149, 156, 163, 169, 176, 183, 196, 209, 216, 223, 236, 273, 319, 328, 630, 646, 655, 664, 672, 683, 691, 708, 776, 782, 789, 798, 804, 811, 818, 824, 833, 840, 846, 853, 862, 869, 875, 882, 1048, 1053, 1058, 1063, and 1068; and (iii) a CDR3 having an amino acid sequence that is at least 65%, at least 70%, at least 75%, at least 80%, at least 85%, at least 90%, at least 95%, at least 99%, or 100% identical to any one of SEQ ID NOs: 7, 13, 20, 28, 36, 40, 46, 53, 63, 70, 77, 84, 91, 97, 103, 110, 117, 124, 128, 135, 143, 150, 157, 164, 170, 177, 184, 190, 197, 203, 210, 217, 224, 230, 237, 241, 244, 248, 253, 257, 259, 261, 263, 265, 267, 269, 271, 274, 276, 278, 281, 297, 320, 322, 327, 330, 332, 631, 647, 656, 665, 673, 684, 692, 700, 709, 717, 765, 767, 769, 774, 783, 790, 793, 799, 805, 812, 819, 825, 834, 841, 847, 854, 857, 863, 870, 876, 883, 886, 1049, 1054, 1059, 1064, and 1069.

[1481] In some aspects, the antigen binding polypeptides provided herein comprise a VL1 comprising (i) a complementarity determining region (CDR) 1 having an amino acid sequence that is at least 65%, at least 70%, at least 75%, at least 80%, at least 85%, at least 90%, at least 95%, at least 99%, or 100% identical to any one of SEQ ID NOs: 1, 9, 15, 23, 30, 41, 48, 55, 58, 65, 72, 79, 86, 93, 99, 105, 112, 119, 130, 138, 145, 152, 159, 166, 172, 179, 186, 192, 199, 205, 212, 219, 226, 232, 324, 627, 640, 650, 659, 676, 687, 695, 703, 712, 770, 778, 785, 794, 801, 807, 814, 827, 836, 849, 858, 865, 878, 1045, 1050, 1055, 1060, and 1065; (ii) a CDR2 having an amino acid sequence that is at least 65%, at least 70%, at least 75%, at least 80%, at least 85%, at least 90%, at least 95%, at least 99%, or 100% identical to any one of SEQ ID NOs: 2, 31, 628, 641, 677, 1046, 1051, 1056, and 1061; or at least 65%, at least 70%, at least 75%, at least 80%, at least 85%, at least 90%, at least 95%, at least 99%, or 100% identical to any one of amino acid sequences AAS, GAS, LGS, GTN, GTN, SAS, SDS, DNT, EVT, DAS, DVT, RNS, DVS, EDS, DDS, KDS, VAS, WAS, YTS, EVS, NNN, SYN, and DAT; (iii) a CDR3 having an amino acid sequence that is at least 65%, at least 70%, at least 75%, at least 80%, at least 85%, at least 90%, at least 95%, at least 99%, or 100% identical to any one of SEQ ID NOs: 3, 10, 16, 24, 32, 38, 42, 49, 59, 66, 73, 80, 87, 94, 100, 106, 113, 120, 126, 131, 139, 146, 153, 160, 167, 173, 180, 187, 193, 200, 206, 213, 220, 227, 233, 239, 242, 246, 249, 256, 283, 285, 287, 288, 290, 292, 294, 296, 301, 304, 306, 309, 311, 313, 316, 325, 326, 329, 642, 651, 660, 668, 678, 651, 696, 704, 713, 764, 766, 768, 771, 779, 786, 792, 795, 808, 815, 821, 830, 837, 843, 850, 856, 859, 866, 872, 879, 885, and 1066; a VH1 comprising (i) a CDR1 having an amino acid sequence that is at least 65%, at least 70%, at least 75%, at least 80%, at least 85%, at least 90%, at least 95%, at least 99%, or 100% identical to any one of SEQ ID NOs: 5, 12, 18, 26, 34, 44, 51, 61, 68, 75, 82, 89, 96, 102, 108, 115, 122, 133, 141, 148, 155, 162, 175, 182, 189, 195, 202, 208, 215, 222, 229, 235, 318, 629, 645, 654, 663, 671, 682, 690, 699, 707, 716, 773, 781, 788, 797, 803, 810, 817, 823, 832, 839, 845, 852, 861, 868, 874, 881, 1047, 1052, 1057, 1062, and 1067; (ii) a CDR2 having an amino acid sequence that is at least 65%, at least 70%, at least 75%, at least 80%, at least 85%, at least 90%, at least 95%, at least 99%, or 100% identical to any one of SEQ ID NOs: 6, 19, 27, 35, 45, 52, 56, 62, 69, 76, 83, 90, 109, 116, 123, 134, 142, 149, 156, 163, 169, 176, 183, 196, 209, 216, 223, 236, 273, 319, 328, 630, 646, 655, 664, 672, 683, 691, 708, 776, 782, 789, 798, 804, 811, 818, 824, 833, 840, 846, 853, 862, 869, 875, 882, 1048, 1053, 1058, 1063, and 1068; and (iii) a CDR3 having an amino acid sequence that is at least 65%, at least 70%, at least 75%, at least 80%, at least 85%, at least 90%, at least 95%, at least 99%, or 100% identical to any one of SEQ ID NOs: 7, 13, 20, 28, 36, 40, 46, 53, 63, 70, 77, 84, 91, 97, 103, 110, 117, 124, 128, 135, 143, 150, 157, 164, 170, 177, 184, 190, 197, 203, 210, 217, 224, 230, 237, 241, 244, 248, 253, 257, 259, 261, 263, 265, 267, 269, 271, 274, 276, 278, 281, 297, 320, 322, 327, 330, 332, 631, 647, 656, 665, 673, 684, 692, 700, 709, 717, 765, 767, 769, 774, 783, 790, 793, 799, 805, 812, 819, 825, 834, 841, 847, 854, 857, 863, 870, 876, 883, 886, 1049, 1054, 1059, 1064, and 1069; a VL2 comprising (i) a complementarity determining region (CDR) 1 having an amino acid sequence that is at least 65%, at least 70%, at least 75%, at least 80%, at least 85%, at least 90%, at least 95%, at least 99%, or 100% identical to any one of SEQ ID NOs: 1, 9, 15, 23, 30, 41, 48, 55, 58, 65, 72, 79, 86, 93, 99, 105, 112, 119, 130, 138, 145, 152, 159, 166, 172, 179, 186, 192, 199, 205, 212, 219, 226, 232, 324, 627, 640, 650, 659, 676, 687, 695, 703, 712, 770, 778, 785, 794, 801, 807, 814, 827, 836, 849, 858, 865, 878, 1045, 1050, 1055, 1060, and 1065; (ii) a CDR2 having an amino acid sequence that is at least 65%, at least 70%, at least 75%, at least 80%, at least 85%, at least 90%, at least 95%, at least 99%, or 100% identical to any one of SEQ ID NOs: 2, 31, 628, 641, 677, 1046, 1051, 1056, and 1061; or at least 65%, at least 70%, at least 75%, at least 80%, at least 85%, at least 90%, at least 95%, at least 99%, or 100% identical to any one of amino acid sequences AAS, GAS, LGS, GTN, GTN, SAS, SDS, DNT, EVT, DAS, DVT, RNS, DVS, EDS, DDS, KDS, VAS, WAS, YTS, EVS, NNN, SYN, and DAT; and (iii) a CDR3 having an amino acid sequence that is at least 65%, at least 70%, at least 75%, at least 80%, at least 85%, at least 90%, at least 95%, at least 99%, or 100% identical to any one of SEQ ID NOs: 3, 10, 16, 24, 32, 38, 42, 49, 59, 66, 73, 80, 87, 94, 100, 106, 113, 120, 126, 131, 139, 146, 153, 160, 167, 173, 180, 187, 193, 200, 206, 213, 220, 227, 233, 239, 242, 246, 249, 256, 283, 285, 287, 288, 290, 292, 294, 296, 301, 304, 306, 309, 311, 313, 316, 325, 326, 329, 642, 651, 660, 668, 678, 651, 696, 704, 713, 764, 766, 768, 771, 779, 786, 792, 795, 808, 815, 821, 830, 837, 843, 850, 856, 859, 866, 872, 879, 885, and 1066; and a VH2 comprising (i) a CDR1 having an amino acid sequence that is at least 65%, at least 70%, at least 75%, at least 80%, at least 85%, at least 90%, at least 95%, at least 99%, or 100% identical to any one of SEQ ID NOs: 5, 12, 18, 26, 34, 44, 51, 61, 68, 75, 82, 89, 96, 102, 108, 115, 122, 133, 141, 148, 155, 162, 175, 182, 189, 195, 202, 208, 215, 222, 229, 235, 318, 629, 645, 654, 663, 671, 682, 690, 699, 707, 716, 773, 781, 788, 797, 803, 810, 817, 823, 832, 839, 845, 852, 861, 868, 874, 881, 1047, 1052, 1057, 1062, and 1067; (ii) a CDR2 having an amino acid sequence that is at least 65%, at least 70%, at least 75%, at least 80%, at least 85%, at least 90%, at least 95%, at least 99%, or 100% identical to any one of SEQ ID NOs: 6, 19, 27, 35, 45, 52, 56, 62, 69, 76, 83, 90, 109, 116, 123, 134, 142, 149, 156, 163, 169, 176, 183, 196, 209, 216, 223, 236, 273, 319, 328, 630, 646, 655, 664, 672, 683, 691, 708, 776, 782, 789, 798, 804, 811, 818, 824, 833, 840, 846, 853, 862, 869, 875, 882, 1048, 1053, 1058, 1063, and 1068; and (iii) a CDR3 having an amino acid sequence that is at least 65%, at least 70%, at least 75%, at least 80%, at least 85%, at least 90%, at least 95%, at least 99%, or 100% identical to any one of SEQ ID NOs: 7, 13, 20, 28, 36, 40, 46, 53, 63, 70, 77, 84, 91, 97, 103, 110, 117, 124, 128, 135, 143, 150, 157, 164, 170, 177, 184, 190, 197, 203, 210, 217, 224, 230, 237, 241, 244, 248, 253, 257, 259, 261, 263, 265, 267, 269, 271, 274, 276, 278, 281, 297, 320, 322, 327, 330, 332, 631, 647, 656, 665, 673, 684, 692, 700, 709, 717, 765, 767, 769, 774, 783, 790, 793, 799, 805, 812, 819, 825, 834, 841, 847, 854, 857, 863, 870, 876, 883, 886, 1049, 1054, 1059, 1064, and 1069.

[1482] In some aspects, the antigen binding polypeptides provided herein comprise a VL1 comprising an amino acid sequence that is at least 65%, at least 70%, at least 75%, at least 80%, at least 85%, at least 90%, at least 95%, at least 99%, or 100% identical to any one of SEQ ID NOs: 4, 11, 17, 25, 33, 39, 43, 50, 60, 67, 74, 81, 88, 95, 101, 107, 114, 121, 127, 132, 140, 147, 154, 161, 168, 174, 181, 188, 194, 201, 207, 214, 221, 228, 234, 240, 243, 247, 250, 251, 252, 255, 284, 286, 289, 291, 293, 295, 299, 300, 302, 303, 305, 307, 308, 310, 312, 314, 315, 317, 323, 639, 649, 658, 667, 675, 686, 694, 702, 711, 772, 780, 787, 796, 802, 809, 816, 822, 831, 838, 844, 851, 860, 867, 873, 880, and 988.

[1483] In some aspects, the antigen binding polypeptides provided herein comprise a VH1 comprising an amino acid sequence that is at least 65%, at least 70%, at least 75%, at least 80%, at least 85%, at least 90%, at least 95%, at least 99%, or 100% identical to any one of SEQ ID NOs: 8, 14, 21, 22, 29, 37, 47, 54, 57, 64, 71, 78, 85, 92, 98, 104, 111, 118, 125, 129, 136, 137, 144, 151, 158, 165, 171, 178, 185, 191, 198, 204, 211, 218, 225, 231, 238, 245, 254, 258, 260, 262, 264, 266, 268, 270, 272, 275, 277, 279, 280, 282, 298, 321, 331, 626, 644, 653, 662, 670, 681, 689, 698, 706, 715, 775, 777, 784, 791, 800, 806, 813, 820, 826, 835, 842, 848, 855, 864, 871, 877, and 884.

[1484] In some aspects, the antigen binding polypeptides provided herein comprise a VL2 comprising an amino acid sequence that is at least 65%, at least 70%, at least 75%, at least 80%, at least 85%, at least 90%, at least 95%, at least 99%, or 100% identical to any one of SEQ ID NOs: 4, 11, 17, 25, 33, 39, 43, 50, 60, 67, 74, 81, 88, 95, 101, 107, 114, 121, 127, 132, 140, 147, 154, 161, 168, 174, 181, 188, 194, 201, 207, 214, 221, 228, 234, 240, 243, 247, 250, 251, 252, 255, 284, 286, 289, 291, 293, 295, 299, 300, 302, 303, 305, 307, 308, 310, 312, 314, 315, 317, 323, 639, 649, 658, 667, 675, 686, 694, 702, 711, 772, 780, 787, 796, 802, 809, 816, 822, 831, 838, 844, 851, 860, 867, 873, 880, and 988.

[1485] In some aspects, the antigen binding polypeptides provided herein comprise a VH2 comprising an amino acid sequence that is at least 65%, at least 70%, at least 75%, at least 80%, at least 85%, at least 90%, at least 95%, at least 99%, or 100% identical to any one of SEQ ID NOs: 8, 14, 21, 22, 29, 37, 47, 54, 57, 64, 71, 78, 85, 92, 98, 104, 111, 118, 125, 129, 136, 137, 144, 151, 158, 165, 171, 178, 185, 191, 198, 204, 211, 218, 225, 231, 238, 245, 254, 258, 260, 262, 264, 266, 268, 270, 272, 275, 277, 279, 280, 282, 298, 321, 331, 626, 644, 653, 662, 670, 681, 689, 698, 706, 715, 775, 777, 784, 791, 800, 806, 813, 820, 826, 835, 842, 848, 855, 864, 871, 877, and 884.

[1486] In some aspects, the antigen binding polypeptides provided herein comprise a (i) VL1 comprising an amino acid sequence that is at least 65%, at least 70%, at least 75%, at least 80%, at least 85%, at least 90%, at least 95%, at least 99%, or 100% identical to any one of SEQ ID NOs: 4, 11, 17, 25, 33, 39, 43, 50, 60, 67, 74, 81, 88, 95, 101, 107, 114, 121, 127, 132, 140, 147, 154, 161, 168, 174, 181, 188, 194, 201, 207, 214, 221, 228, 234, 240, 243, 247, 250, 251, 252, 255, 284, 286, 289, 291, 293, 295, 299, 300, 302, 303, 305, 307, 308, 310, 312, 314, 315, 317, 323, 639, 649, 658, 667, 675, 686, 694, 702, 711, 772, 780, 787, 796, 802, 809, 816, 822, 831, 838, 844, 851, 860, 867, 873, 880, and 988; (ii) a VH1 comprising an amino acid sequence that is at least 65%, at least 70%, at least 75%, at least 80%, at least 85%, at least 90%, at least 95%, at least 99%, or 100% identical to any one of SEQ ID NOs: 8, 14, 21, 22, 29, 37, 47, 54, 57, 64, 71, 78, 85, 92, 98, 104, 111, 118, 125, 129, 136, 137, 144, 151, 158, 165, 171, 178, 185, 191, 198, 204, 211, 218, 225, 231, 238, 245, 254, 258, 260, 262, 264, 266, 268, 270, 272, 275, 277, 279, 280, 282, 298, 321, 331, 626, 644, 653, 662, 670, 681, 689, 698, 706, 715, 775, 777, 784, 791, 800, 806, 813, 820, 826, 835, 842, 848, 855, 864, 871, 877, and 884; (iii) a VL2 comprising an amino acid sequence that is at least 65%, at least 70%, at least 75%, at least 80%, at least 85%, at least 90%, at least 95%, at least 99%, or 100% identical to any one of SEQ ID NOs: 4, 11, 17, 25, 33, 39, 43, 50, 60, 67, 74, 81, 88, 95, 101, 107, 114, 121, 127, 132, 140, 147, 154, 161, 168, 174, 181, 188, 194, 201, 207, 214, 221, 228, 234, 240, 243, 247, 250, 251, 252, 255, 284, 286, 289, 291, 293, 295, 299, 300, 302, 303, 305, 307, 308, 310, 312, 314, 315, 317, 323, 639, 649, 658, 667, 675, 686, 694, 702, 711, 772, 780, 787, 796, 802, 809, 816, 822, 831, 838, 844, 851, 860, 867, 873, 880, and 988; and (iv) a VH2 comprising an amino acid sequence that is at least 65%, at least 70%, at least 75%, at least 80%, at least 85%, at least 90%, at least 95%, at least 99%, or 100% identical to any one of SEQ ID NOs: 8, 14, 21, 22, 29, 37, 47, 54, 57, 64, 71, 78, 85, 92, 98, 104, 111, 118, 125, 129, 136, 137, 144, 151, 158, 165, 171, 178, 185, 191, 198, 204, 211, 218, 225, 231, 238, 245, 254, 258, 260, 262, 264, 266, 268, 270, 272, 275, 277, 279, 280, 282, 298, 321, 331, 626, 644, 653, 662, 670, 681, 689, 698, 706, 715, 775, 777, 784, 791, 800, 806, 813, 820, 826, 835, 842, 848, 855, 864, 871, 877, and 884.

[1487] In some aspects, the antigen binding polypeptides provided herein comprise a VL1 comprising a CDR1 having an amino acid sequence at least 65%, at least 70%, at least 75%, at least 80%, at least 85%, at least 90%, at least 95%, at least 99%, or 100% identical to SEQ ID NO: 9 or 1055, a CDR2 having an amino acid sequence at least 65%, at least 70%, at least 75%, at least 80%, at least 85%, at least 90%, at least 95%, at least 99%, or 100% identical to SEQ ID NO: 1056 or an amino acid sequence at least 65%, at least 70%, at least 75%, at least 80%, at least 85%, at least 90%, at least 95%, at least 99%, or 100% identical to amino acid sequence GAS, and a CDR3 having an amino acid sequence at least 65%, at least 70%, at least 75%, at least 80%, at least 85%, at least 90%, at least 95%, at least 99%, or 100% identical to SEQ ID NO: 10.

[1488] In some aspects, the antigen binding polypeptides provided herein comprise a VL2 comprising a CDR1 having an amino acid sequence at least 65%, at least 70%, at least 75%, at least 80%, at least 85%, at least 90%, at least 95%, at least 99%, or 100% identical to SEQ ID NO: 15, a CDR2 having an amino acid sequence at least 65%, at least 70%, at least 75%, at least 80%, at least 85%, at least 90%, at least 95%, at least 99%, or 100% identical to amino acid sequence LGS, and a CDR3 having an amino acid sequence at least 65%, at least 70%, at least 75%, at least 80%, at least 85%, at least 90%, at least 95%, at least 99%, or 100% identical to SEQ ID NO: 16.

[1489] In some aspects, the antigen binding polypeptides provided herein comprise a VH1 comprising a CDR1 having an amino acid sequence at least 65%, at least 70%, at least 75%, at least 80%, at least 85%, at least 90%, at least 95%, at least 99%, or 100% identical to SEQ ID NO: 12 or 1057, a CDR2 having an amino acid sequence at least 65%, at least 70%, at least 75%, at least 80%, at least 85%, at least 90%, at least 95%, at least 99%, or 100% identical to SEQ ID NO: 6 or 1058, and a CDR3 having an amino acid sequence at least 65%, at least 70%, at least 75%, at least 80%, at least 85%, at least 90%, at least 95%, at least 99%, or 100% identical to SEQ ID NO: 13 or 1059.

[1490] In some aspects, the antigen binding polypeptides provided herein comprise a VH2 comprising a CDR1 having an amino acid sequence at least 65%, at least 70%, at least 75%, at least 80%, at least 85%, at least 90%, at least 95%, at least 99%, or 100% identical to SEQ ID NO: 18, a CDR2 having an amino acid sequence at least 65%, at least 70%, at least 75%, at least 80%, at least 85%, at least 90%, at least 95%, at least 99%, or 100% identical to SEQ ID NO: 19, and a CDR3 having an amino acid sequence at least 65%, at least 70%, at least 75%, at least 80%, at least 85%, at least 90%, at least 95%, at least 99%, or 100% identical to SEQ ID NO: 20.

[1491] In some aspects, the antigen binding polypeptides provided herein comprise (i) a VL1 comprising a CDR1 having an amino acid sequence at least 65%, at least 70%, at least 75%, at least 80%, at least 85%, at least 90%, at least 95%, at least 99%, or 100% identical to SEQ ID NO: 9 or 1055, a CDR2 having an amino acid sequence at least 65%, at least 70%, at least 75%, at least 80%, at least 85%, at least 90%, at least 95%, at least 99%, or 100% identical to SEQ ID NO: 1056 or an amino acid sequence at least 65%, at least 70%, at least 75%, at least 80%, at least 85%, at least 90%, at least 95%, at least 99%, or 100% identical to amino acid sequence GAS, and a CDR3 having an amino acid sequence at least 65%, at least 70%, at least 75%, at least 80%, at least 85%, at least 90%, at least 95%, at least 99%, or 100% identical to SEQ ID NO: 10; (ii) a VL2 comprising a CDR1 having an amino acid sequence at least 65%, at least 70%, at least 75%, at least 80%, at least 85%, at least 90%, at least 95%, at least 99%, or 100% identical to SEQ ID NO: 15, a CDR2 having an amino acid sequence at least 65%, at least 70%, at least 75%, at least 80%, at least 85%, at least 90%, at least 95%, at least 99%, or 100% identical to amino acid sequence LGS, and a CDR3 having an amino acid sequence at least 65%, at least 70%, at least 75%, at least 80%, at least 85%, at least 90%, at least 95%, at least 99%, or 100% identical to SEQ ID NO: 16; (iii) a VH1 comprising a CDR1 having an amino acid sequence at least 65%, at least 70%, at least 75%, at least 80%, at least 85%, at least 90%, at least 95%, at least 99%, or 100% identical to SEQ ID NO: 12 or 1057, a CDR2 having an amino acid sequence at least 65%, at least 70%, at least 75%, at least 80%, at least 85%, at least 90%, at least 95%, at least 99%, or 100% identical to SEQ ID NO: 6 or 1058, and a CDR3 having an amino acid sequence at least 65%, at least 70%, at least 75%, at least 80%, at least 85%, at least 90%, at least 95%, at least 99%, or 100% identical to SEQ ID NO: 13 or 1059; and (iv) a VH2 comprising a CDR1 having an amino acid sequence at least 65%, at least 70%, at least 75%, at least 80%, at least 85%, at least 90%, at least 95%, at least 99%, or 100% identical to SEQ ID NO: 18, a CDR2 having an amino acid sequence at least 65%, at least 70%, at least 75%, at least 80%, at least 85%, at least 90%, at least 95%, at least 99%, or 100% identical to SEQ ID NO: 19, and a CDR3 having an amino acid sequence at least 65%, at least 70%, at least 75%, at least 80%, at least 85%, at least 90%, at least 95%, at least 99%, or 100% identical to SEQ ID NO: 20.

[1492] In some aspects, the antigen binding polypeptides provided herein comprise a VL1 comprising an amino acid sequence that is at least 65%, at least 70%, at least 75%, at least 80%, at least 85%, at least 90%, at least 95%, at least 99%, or 100% identical to SEQ ID NO: 11.

[1493] In some aspects, the antigen binding polypeptides provided herein comprise a VL2 comprising an amino acid sequence that is at least 65%, at least 70%, at least 75%, at least 80%, at least 85%, at least 90%, at least 95%, at least 99%, or 100% identical to SEQ ID NO: 17.

[1494] In some aspects, the antigen binding polypeptides provided herein comprise a VH1 comprising an amino acid sequence that is at least 65%, at least 70%, at least 75%, at least 80%, at least 85%, at least 90%, at least 95%, at least 99%, or 100% identical to SEQ ID NO: 14.

[1495] In some aspects, the antigen binding polypeptides provided herein comprise a VH2 comprising an amino acid sequence that is at least 65%, at least 70%, at least 75%, at least 80%, at least 85%, at least 90%, at least 95%, at least 99%, or 100% identical to SEQ ID NO: 21 or 22.

[1496] In some aspects, the antigen binding polypeptides provided herein comprise (i) a VL1 comprising an amino acid sequence that is at least 65%, at least 70%, at least 75%, at least 80%, at least 85%, at least 90%, at least 95%, at least 99%, or 100% identical to SEQ ID NO: 11; (ii) a VL2 comprising an amino acid sequence that is at least 65%, at least 70%, at least 75%, at least 80%, at least 85%, at least 90%, at least 95%, at least 99%, or 100% identical to SEQ ID NO: 17; (iii) a VH1 comprising an amino acid sequence that is at least 65%, at least 70%, at least 75%, at least 80%, at least 85%, at least 90%, at least 95%, at least 99%, or 100% identical to SEQ ID NO: 14; and (iv) a VH2 comprising an amino acid sequence that is at least 65%, at least 70%, at least 75%, at least 80%, at least 85%, at least 90%, at least 95%, at least 99%, or 100% identical to SEQ ID NO: 21 or 22.

[1497] In some aspects, the antigen binding polypeptides provided herein comprise a VL1 comprising a CDR1 having an amino acid sequence at least 65%, at least 70%, at least 75%, at least 80%, at least 85%, at least 90%, at least 95%, at least 99%, or 100% identical to SEQ ID NO: 9 or 1055, a CDR2 having an amino acid sequence at least 65%, at least 70%, at least 75%, at least 80%, at least 85%, at least 90%, at least 95%, at least 99%, or 100% identical to SEQ ID NO: 1056 or an amino acid sequence at least 65%, at least 70%, at least 75%, at least 80%, at least 85%, at least 90%, at least 95%, at least 99%, or 100% identical to amino acid sequence GAS, and a CDR3 having an amino acid sequence at least 65%, at least 70%, at least 75%, at least 80%, at least 85%, at least 90%, at least 95%, at least 99%, or 100% identical to SEQ ID NO: 10.

[1498] In some aspects, the antigen binding polypeptides provided herein comprise a VL2 comprising a CDR1 having an amino acid sequence at least 65%, at least 70%, at least 75%, at least 80%, at least 85%, at least 90%, at least 95%, at least 99%, or 100% identical to SEQ ID NO: 23, a CDR2 having an amino acid sequence at least 65%, at least 70%, at least 75%, at least 80%, at least 85%, at least 90%, at least 95%, at least 99%, or 100% identical to amino acid sequence GTN, and a CDR3 having an amino acid sequence at least 65%, at least 70%, at least 75%, at least 80%, at least 85%, at least 90%, at least 95%, at least 99%, or 100% identical to SEQ ID NO: 24 or 325.

[1499] In some aspects, the antigen binding polypeptides provided herein comprise a VH1 comprising a CDR1 having an amino acid sequence at least 65%, at least 70%, at least 75%, at least 80%, at least 85%, at least 90%, at least 95%, at least 99%, or 100% identical to SEQ ID NO: 12 or 1057, a CDR2 having an amino acid sequence at least 65%, at least 70%, at least 75%, at least 80%, at least 85%, at least 90%, at least 95%, at least 99%, or 100% identical to SEQ ID NO: 6 or 1058, and a CDR3 having an amino acid sequence at least 65%, at least 70%, at least 75%, at least 80%, at least 85%, at least 90%, at least 95%, at least 99%, or 100% identical to SEQ ID NO: 13 or 1059.

[1500] In some aspects, the antigen binding polypeptides provided herein comprise a VH2 comprising a CDR1 having an amino acid sequence at least 65%, at least 70%, at least 75%, at least 80%, at least 85%, at least 90%, at least 95%, at least 99%, or 100% identical to SEQ ID NO: 26, a CDR2 having an amino acid sequence at least 65%, at least 70%, at least 75%, at least 80%, at least 85%, at least 90%, at least 95%, at least 99%, or 100% identical to SEQ ID NO: 27, and a CDR3 having an amino acid sequence at least 65%, at least 70%, at least 75%, at least 80%, at least 85%, at least 90%, at least 95%, at least 99%, or 100% identical to SEQ ID NO: 28 or 332.

[1501] In some aspects, the antigen binding polypeptides provided herein comprise (i) a VL1 comprising a CDR1 having an amino acid sequence at least 65%, at least 70%, at least 75%, at least 80%, at least 85%, at least 90%, at least 95%, at least 99%, or 100% identical to SEQ ID NO: 9 or 1055, a CDR2 having an amino acid sequence at least 65%, at least 70%, at least 75%, at least 80%, at least 85%, at least 90%, at least 95%, at least 99%, or 100% identical to SEQ ID NO: 1056 or an amino acid sequence at least 65%, at least 70%, at least 75%, at least 80%, at least 85%, at least 90%, at least 95%, at least 99%, or 100% identical to amino acid sequence GAS, and a CDR3 having an amino acid sequence at least 65%, at least 70%, at least 75%, at least 80%, at least 85%, at least 90%, at least 95%, at least 99%, or 100% identical to SEQ ID NO: 10; (ii) a VL2 comprising a CDR1 having an amino acid sequence at least 65%, at least 70%, at least 75%, at least 80%, at least 85%, at least 90%, at least 95%, at least 99%, or 100% identical to SEQ ID NO: 23, a CDR2 having an amino acid sequence at least 65%, at least 70%, at least 75%, at least 80%, at least 85%, at least 90%, at least 95%, at least 99%, or 100% identical to amino acid sequence GTN, and a CDR3 having an amino acid sequence at least 65%, at least 70%, at least 75%, at least 80%, at least 85%, at least 90%, at least 95%, at least 99%, or 100% identical to SEQ ID NO: 24 or 325; (iii) a VH1 comprising a CDR1 having an amino acid sequence at least 65%, at least 70%, at least 75%, at least 80%, at least 85%, at least 90%, at least 95%, at least 99%, or 100% identical to SEQ ID NO: 12 or 1057, a CDR2 having an amino acid sequence at least 65%, at least 70%, at least 75%, at least 80%, at least 85%, at least 90%, at least 95%, at least 99%, or 100% identical to SEQ ID NO: 6 or 1058, and a CDR3 having an amino acid sequence at least 65%, at least 70%, at least 75%, at least 80%, at least 85%, at least 90%, at least 95%, at least 99%, or 100% identical to SEQ ID NO: 13 or 1059; and (iv) a VH2 comprising a CDR1 having an amino acid sequence at least 65%, at least 70%, at least 75%, at least 80%, at least 85%, at least 90%, at least 95%, at least 99%, or 100% identical to SEQ ID NO: 26, a CDR2 having an amino acid sequence at least 65%, at least 70%, at least 75%, at least 80%, at least 85%, at least 90%, at least 95%, at least 99%, or 100% identical to SEQ ID NO: 27, and a CDR3 having an amino acid sequence at least 65%, at least 70%, at least 75%, at least 80%, at least 85%, at least 90%, at least 95%, at least 99%, or 100% identical to SEQ ID NO: 28 or 332.

[1502] In some aspects, the antigen binding polypeptides provided herein comprise a VL1 comprising an amino acid sequence that is at least 65%, at least 70%, at least 75%, at least 80%, at least 85%, at least 90%, at least 95%, at least 99%, or 100% identical to SEQ ID NO: 11.

[1503] In some aspects, the antigen binding polypeptides provided herein comprise a VL2 comprising an amino acid sequence that is at least 65%, at least 70%, at least 75%, at least 80%, at least 85%, at least 90%, at least 95%, at least 99%, or 100% identical to SEQ ID NO: 25.

[1504] In some aspects, the antigen binding polypeptides provided herein comprise a VH1 comprising an amino acid sequence that is at least 65%, at least 70%, at least 75%, at least 80%, at least 85%, at least 90%, at least 95%, at least 99%, or 100% identical to SEQ ID NO: 14.

[1505] In some aspects, the antigen binding polypeptides provided herein comprise a VH2 comprising an amino acid sequence that is at least 65%, at least 70%, at least 75%, at least 80%, at least 85%, at least 90%, at least 95%, at least 99%, or 100% identical to SEQ ID NO: 29.

[1506] In some aspects, the antigen binding polypeptides provided herein comprise (i) a VL1 comprising an amino acid sequence that is at least 65%, at least 70%, at least 75%, at least 80%, at least 85%, at least 90%, at least 95%, at least 99%, or 100% identical to SEQ ID NO: 11; (ii) a VL2 comprising an amino acid sequence that is at least 65%, at least 70%, at least 75%, at least 80%, at least 85%, at least 90%, at least 95%, at least 99%, or 100% identical to SEQ ID NO: 25; (iii) a VH1 comprising an amino acid sequence that is at least 65%, at least 70%, at least 75%, at least 80%, at least 85%, at least 90%, at least 95%, at least 99%, or 100% identical to SEQ ID NO: 14; and (iv) a VH2 comprising an amino acid sequence that is at least 65%, at least 70%, at least 75%, at least 80%, at least 85%, at least 90%, at least 95%, at least 99%, or 100% identical to SEQ ID NO: 29.

[1507] In some aspects, the antigen binding polypeptides provided herein comprise a VL1 comprising a CDR1 having an amino acid sequence at least 65%, at least 70%, at least 75%, at least 80%, at least 85%, at least 90%, at least 95%, at least 99%, or 100% identical to SEQ ID NO: 1 or 324, a CDR2 having an amino acid sequence at least 65%, at least 70%, at least 75%, at least 80%, at least 85%, at least 90%, at least 95%, at least 99%, or 100% identical to SEQ ID NO: 2 or an amino acid sequence at least 65%, at least 70%, at least 75%, at least 80%, at least 85%, at least 90%, at least 95%, at least 99%, or 100% identical to amino acid sequence AAS, and a CDR3 having an amino acid sequence at least 65%, at least 70%, at least 75%, at least 80%, at least 85%, at least 90%, at least 95%, at least 99%, or 100% identical to SEQ ID NO: 3.

[1508] In some aspects, the antigen binding polypeptides provided herein comprise a VL2 comprising a CDR1 having an amino acid sequence at least 65%, at least 70%, at least 75%, at least 80%, at least 85%, at least 90%, at least 95%, at least 99%, or 100% identical to SEQ ID NO: 23, a CDR2 having an amino acid sequence at least 65%, at least 70%, at least 75%, at least 80%, at least 85%, at least 90%, at least 95%, at least 99%, or 100% identical to amino acid sequence GTN, and a CDR3 having an amino acid sequence at least 65%, at least 70%, at least 75%, at least 80%, at least 85%, at least 90%, at least 95%, at least 99%, or 100% identical to SEQ ID NO: 24 or 325.

[1509] In some aspects, the antigen binding polypeptides provided herein comprise a VH1 comprising a CDR1 having an amino acid sequence at least 65%, at least 70%, at least 75%, at least 80%, at least 85%, at least 90%, at least 95%, at least 99%, or 100% identical to SEQ ID NO: 5, a CDR2 having an amino acid sequence at least 65%, at least 70%, at least 75%, at least 80%, at least 85%, at least 90%, at least 95%, at least 99%, or 100% identical to SEQ ID NO: 6, and a CDR3 having an amino acid sequence at least 65%, at least 70%, at least 75%, at least 80%, at least 85%, at least 90%, at least 95%, at least 99%, or 100% identical to SEQ ID NO: 7.

[1510] In some aspects, the antigen binding polypeptides provided herein comprise a VH2 comprising a CDR1 having an amino acid sequence at least 65%, at least 70%, at least 75%, at least 80%, at least 85%, at least 90%, at least 95%, at least 99%, or 100% identical to SEQ ID NO: 26, a CDR2 having an amino acid sequence at least 65%, at least 70%, at least 75%, at least 80%, at least 85%, at least 90%, at least 95%, at least 99%, or 100% identical to SEQ ID NO: 27, and a CDR3 having an amino acid sequence at least 65%, at least 70%, at least 75%, at least 80%, at least 85%, at least 90%, at least 95%, at least 99%, or 100% identical to SEQ ID NO: 28 or 332.

[1511] In some aspects, the antigen binding polypeptides provided herein comprise (i) a VL1 comprising a CDR1 having an amino acid sequence at least 65%, at least 70%, at least 75%, at least 80%, at least 85%, at least 90%, at least 95%, at least 99%, or 100% identical to SEQ ID NO: 1 or 324, a CDR2 having an amino acid sequence at least 65%, at least 70%, at least 75%, at least 80%, at least 85%, at least 90%, at least 95%, at least 99%, or 100% identical to SEQ ID NO: 2 or an amino acid sequence at least 65%, at least 70%, at least 75%, at least 80%, at least 85%, at least 90%, at least 95%, at least 99%, or 100% identical to amino acid sequence AAS, and a CDR3 having an amino acid sequence at least 65%, at least 70%, at least 75%, at least 80%, at least 85%, at least 90%, at least 95%, at least 99%, or 100% identical to SEQ ID NO: 3; (ii) a VL2 comprising a CDR1 having an amino acid sequence at least 65%, at least 70%, at least 75%, at least 80%, at least 85%, at least 90%, at least 95%, at least 99%, or 100% identical to SEQ ID NO: 23, a CDR2 having an amino acid sequence at least 65%, at least 70%, at least 75%, at least 80%, at least 85%, at least 90%, at least 95%, at least 99%, or 100% identical to amino acid sequence GTN, and a CDR3 having an amino acid sequence at least 65%, at least 70%, at least 75%, at least 80%, at least 85%, at least 90%, at least 95%, at least 99%, or 100% identical to SEQ ID NO: 24 or 325; (iii) a VH1 comprising a CDR1 having an amino acid sequence at least 65%, at least 70%, at least 75%, at least 80%, at least 85%, at least 90%, at least 95%, at least 99%, or 100% identical to SEQ ID NO: 5, a CDR2 having an amino acid sequence at least 65%, at least 70%, at least 75%, at least 80%, at least 85%, at least 90%, at least 95%, at least 99%, or 100% identical to SEQ ID NO: 6, and a CDR3 having an amino acid sequence at least 65%, at least 70%, at least 75%, at least 80%, at least 85%, at least 90%, at least 95%, at least 99%, or 100% identical to SEQ ID NO: 7; and (iv) a VH2 comprising a CDR1 having an amino acid sequence at least 65%, at least 70%, at least 75%, at least 80%, at least 85%, at least 90%, at least 95%, at least 99%, or 100% identical to SEQ ID NO: 26, a CDR2 having an amino acid sequence at least 65%, at least 70%, at least 75%, at least 80%, at least 85%, at least 90%, at least 95%, at least 99%, or 100% identical to SEQ ID NO: 27, and a CDR3 having an amino acid sequence at least 65%, at least 70%, at least 75%, at least 80%, at least 85%, at least 90%, at least 95%, at least 99%, or 100% identical to SEQ ID NO: 28 or 332.

[1512] In some aspects, the antigen binding polypeptides provided herein comprise a VL1 comprising an amino acid sequence that is at least 65%, at least 70%, at least 75%, at least 80%, at least 85%, at least 90%, at least 95%, at least 99%, or 100% identical to SEQ ID NO: 4.

[1513] In some aspects, the antigen binding polypeptides provided herein comprise a VL2 comprising an amino acid sequence that is at least 65%, at least 70%, at least 75%, at least 80%, at least 85%, at least 90%, at least 95%, at least 99%, or 100% identical to SEQ ID NO: 25.

[1514] In some aspects, the antigen binding polypeptides provided herein comprise a VH1 comprising an amino acid sequence that is at least 65%, at least 70%, at least 75%, at least 80%, at least 85%, at least 90%, at least 95%, at least 99%, or 100% identical to SEQ ID NO: 8.

[1515] In some aspects, the antigen binding polypeptides provided herein comprise a VH2 comprising an amino acid sequence that is at least 65%, at least 70%, at least 75%, at least 80%, at least 85%, at least 90%, at least 95%, at least 99%, or 100% identical to SEQ ID NO: 29.

[1516] In some aspects, the antigen binding polypeptides provided herein comprise (i) a VL1 comprising an amino acid sequence that is at least 65%, at least 70%, at least 75%, at least 80%, at least 85%, at least 90%, at least 95%, at least 99%, or 100% identical to SEQ ID NO: 4; (ii) a VL2 comprising an amino acid sequence that is at least 65%, at least 70%, at least 75%, at least 80%, at least 85%, at least 90%, at least 95%, at least 99%, or 100% identical to SEQ ID NO: 25; (iii) a VH1 comprising an amino acid sequence that is at least 65%, at least 70%, at least 75%, at least 80%, at least 85%, at least 90%, at least 95%, at least 99%, or 100% identical to SEQ ID NO: 8; and (iv) a VH2 comprising an amino acid sequence that is at least 65%, at least 70%, at least 75%, at least 80%, at least 85%, at least 90%, at least 95%, at least 99%, or 100% identical to SEQ ID NO: 29.

[1517] In some aspects, the antigen binding polypeptides provided herein comprise a VL1 comprising a CDR1 having an amino acid sequence at least 65%, at least 70%, at least 75%, at least 80%, at least 85%, at least 90%, at least 95%, at least 99%, or 100% identical to SEQ ID NO: 23, a CDR2 having an amino acid sequence at least 65%, at least 70%, at least 75%, at least 80%, at least 85%, at least 90%, at least 95%, at least 99%, or 100% identical to amino acid sequence GTN, and a CDR3 having an amino acid sequence at least 65%, at least 70%, at least 75%, at least 80%, at least 85%, at least 90%, at least 95%, at least 99%, or 100% identical to SEQ ID NO: 24 or 325.

[1518] In some aspects, the antigen binding polypeptides provided herein comprise a VL2 comprising a CDR1 having an amino acid sequence at least 65%, at least 70%, at least 75%, at least 80%, at least 85%, at least 90%, at least 95%, at least 99%, or 100% identical to SEQ ID NO: 15, a CDR2 having an amino acid sequence at least 65%, at least 70%, at least 75%, at least 80%, at least 85%, at least 90%, at least 95%, at least 99%, or 100% identical to amino acid sequence LGS, and a CDR3 having an amino acid sequence at least 65%, at least 70%, at least 75%, at least 80%, at least 85%, at least 90%, at least 95%, at least 99%, or 100% identical to SEQ ID NO: 16.

[1519] In some aspects, the antigen binding polypeptides provided herein comprise a VH1 comprising a CDR1 having an amino acid sequence at least 65%, at least 70%, at least 75%, at least 80%, at least 85%, at least 90%, at least 95%, at least 99%, or 100% identical to SEQ ID NO: 26, a CDR2 having an amino acid sequence at least 65%, at least 70%, at least 75%, at least 80%, at least 85%, at least 90%, at least 95%, at least 99%, or 100% identical to SEQ ID NO: 27, and a CDR3 having an amino acid sequence at least 65%, at least 70%, at least 75%, at least 80%, at least 85%, at least 90%, at least 95%, at least 99%, or 100% identical to SEQ ID NO: 28 or 332.

[1520] In some aspects, the antigen binding polypeptides provided herein comprise a VH2 comprising a CDR1 having an amino acid sequence at least 65%, at least 70%, at least 75%, at least 80%, at least 85%, at least 90%, at least 95%, at least 99%, or 100% identical to SEQ ID NO: 18, a CDR2 having an amino acid sequence at least 65%, at least 70%, at least 75%, at least 80%, at least 85%, at least 90%, at least 95%, at least 99%, or 100% identical to SEQ ID NO: 19, and a CDR3 having an amino acid sequence at least 65%, at least 70%, at least 75%, at least 80%, at least 85%, at least 90%, at least 95%, at least 99%, or 100% identical to SEQ ID NO: 20.

[1521] In some aspects, the antigen binding polypeptides provided herein comprise (i) a VL1 comprising a CDR1 having an amino acid sequence at least 65%, at least 70%, at least 75%, at least 80%, at least 85%, at least 90%, at least 95%, at least 99%, or 100% identical to SEQ ID NO: 23, a CDR2 having an amino acid sequence at least 65%, at least 70%, at least 75%, at least 80%, at least 85%, at least 90%, at least 95%, at least 99%, or 100% identical to amino acid sequence GTN, and a CDR3 having an amino acid sequence at least 65%, at least 70%, at least 75%, at least 80%, at least 85%, at least 90%, at least 95%, at least 99%, or 100% identical to SEQ ID NO: 24 or 325; (ii) a VL2 comprising a CDR1 having an amino acid sequence at least 65%, at least 70%, at least 75%, at least 80%, at least 85%, at least 90%, at least 95%, at least 99%, or 100% identical to SEQ ID NO: 15, a CDR2 having an amino acid sequence at least 65%, at least 70%, at least 75%, at least 80%, at least 85%, at least 90%, at least 95%, at least 99%, or 100% identical to amino acid sequence LGS, and a CDR3 having an amino acid sequence at least 65%, at least 70%, at least 75%, at least 80%, at least 85%, at least 90%, at least 95%, at least 99%, or 100% identical to SEQ ID NO: 16; (iii) a VH1 comprising a CDR1 having an amino acid sequence at least 65%, at least 70%, at least 75%, at least 80%, at least 85%, at least 90%, at least 95%, at least 99%, or 100% identical to SEQ ID NO: 26, a CDR2 having an amino acid sequence at least 65%, at least 70%, at least 75%, at least 80%, at least 85%, at least 90%, at least 95%, at least 99%, or 100% identical to SEQ ID NO: 27, and a CDR3 having an amino acid sequence at least 65%, at least 70%, at least 75%, at least 80%, at least 85%, at least 90%, at least 95%, at least 99%, or 100% identical to SEQ ID NO: 28 or 332; and (iv) a VH2 comprising a CDR1 having an amino acid sequence at least 65%, at least 70%, at least 75%, at least 80%, at least 85%, at least 90%, at least 95%, at least 99%, or 100% identical to SEQ ID NO: 18, a CDR2 having an amino acid sequence at least 65%, at least 70%, at least 75%, at least 80%, at least 85%, at least 90%, at least 95%, at least 99%, or 100% identical to SEQ ID NO: 19, and a CDR3 having an amino acid sequence at least 65%, at least 70%, at least 75%, at least 80%, at least 85%, at least 90%, at least 95%, at least 99%, or 100% identical to SEQ ID NO: 20.

[1522] In some aspects, the antigen binding polypeptides provided herein comprise a VL1 comprising an amino acid sequence that is at least 65%, at least 70%, at least 75%, at least 80%, at least 85%, at least 90%, at least 95%, at least 99%, or 100% identical to SEQ ID NO: 25.

[1523] In some aspects, the antigen binding polypeptides provided herein comprise a VL2 comprising an amino acid sequence that is at least 65%, at least 70%, at least 75%, at least 80%, at least 85%, at least 90%, at least 95%, at least 99%, or 100% identical to SEQ ID NO: 17.

[1524] In some aspects, the antigen binding polypeptides provided herein comprise a VH1 comprising an amino acid sequence that is at least 65%, at least 70%, at least 75%, at least 80%, at least 85%, at least 90%, at least 95%, at least 99%, or 100% identical to SEQ ID NO: 29.

[1525] In some aspects, the antigen binding polypeptides provided herein comprise a VH2 comprising an amino acid sequence that is at least 65%, at least 70%, at least 75%, at least 80%, at least 85%, at least 90%, at least 95%, at least 99%, or 100% identical to SEQ ID NO: 21 or 22.

[1526] In some aspects, the antigen binding polypeptides provided herein comprise (i) a VL1 comprising an amino acid sequence that is at least 65%, at least 70%, at least 75%, at least 80%, at least 85%, at least 90%, at least 95%, at least 99%, or 100% identical to SEQ ID NO: 25; (ii) a VL2 comprising an amino acid sequence that is at least 65%, at least 70%, at least 75%, at least 80%, at least 85%, at least 90%, at least 95%, at least 99%, or 100% identical to SEQ ID NO: 17; (iii) a VH1 comprising an amino acid sequence that is at least 65%, at least 70%, at least 75%, at least 80%, at least 85%, at least 90%, at least 95%, at least 99%, or 100% identical to SEQ ID NO: 29; and (iv) a VH2 comprising an amino acid sequence that is at least 65%, at least 70%, at least 75%, at least 80%, at least 85%, at least 90%, at least 95%, at least 99%, or 100% identical to SEQ ID NO: 21 or 22.

[1527] In some aspects, the antigen binding polypeptides provided herein comprise a VL1 comprising a CDR1 having an amino acid sequence at least 65%, at least 70%, at least 75%, at least 80%, at least 85%, at least 90%, at least 95%, at least 99%, or 100% identical to SEQ ID NO: 30, a CDR2 having an amino acid sequence at least 65%, at least 70%, at least 75%, at least 80%, at least 85%, at least 90%, at least 95%, at least 99%, or 100% identical to SEQ ID NO: 31 or an amino acid sequence at least 65%, at least 70%, at least 75%, at least 80%, at least 85%, at least 90%, at least 95%, at least 99%, or 100% identical to amino acid sequence SAS, and a CDR3 having an amino acid sequence at least 65%, at least 70%, at least 75%, at least 80%, at least 85%, at least 90%, at least 95%, at least 99%, or 100% identical to SEQ ID NO: 32, 38, or 326.

[1528] In some aspects, the antigen binding polypeptides provided herein comprise a VL2 comprising a CDR1 having an amino acid sequence at least 65%, at least 70%, at least 75%, at least 80%, at least 85%, at least 90%, at least 95%, at least 99%, or 100% identical to SEQ ID NO: 15, a CDR2 having an amino acid sequence at least 65%, at least 70%, at least 75%, at least 80%, at least 85%, at least 90%, at least 95%, at least 99%, or 100% identical to amino acid sequence LGS, and a CDR3 having an amino acid sequence at least 65%, at least 70%, at least 75%, at least 80%, at least 85%, at least 90%, at least 95%, at least 99%, or 100% identical to SEQ ID NO: 16.

[1529] In some aspects, the antigen binding polypeptides provided herein comprise a VH1 comprising a CDR1 having an amino acid sequence at least 65%, at least 70%, at least 75%, at least 80%, at least 85%, at least 90%, at least 95%, at least 99%, or 100% identical to SEQ ID NO: 34, a CDR2 having an amino acid sequence at least 65%, at least 70%, at least 75%, at least 80%, at least 85%, at least 90%, at least 95%, at least 99%, or 100% identical to SEQ ID NO: 35, and a CDR3 having an amino acid sequence at least 65%, at least 70%, at least 75%, at least 80%, at least 85%, at least 90%, at least 95%, at least 99%, or 100% identical to SEQ ID NO: 36, 40, or 327.

[1530] In some aspects, the antigen binding polypeptides provided herein comprise a VH2 comprising a CDR1 having an amino acid sequence at least 65%, at least 70%, at least 75%, at least 80%, at least 85%, at least 90%, at least 95%, at least 99%, or 100% identical to SEQ ID NO: 18, a CDR2 having an amino acid sequence at least 65%, at least 70%, at least 75%, at least 80%, at least 85%, at least 90%, at least 95%, at least 99%, or 100% identical to SEQ ID NO: 19, and a CDR3 having an amino acid sequence at least 65%, at least 70%, at least 75%, at least 80%, at least 85%, at least 90%, at least 95%, at least 99%, or 100% identical to SEQ ID NO: 20.

[1531] In some aspects, the antigen binding polypeptides provided herein comprise (i) a VL1 comprising a CDR1 having an amino acid sequence at least 65%, at least 70%, at least 75%, at least 80%, at least 85%, at least 90%, at least 95%, at least 99%, or 100% identical to SEQ ID NO: 30, a CDR2 having an amino acid sequence at least 65%, at least 70%, at least 75%, at least 80%, at least 85%, at least 90%, at least 95%, at least 99%, or 100% identical to SEQ ID NO: 31 or an amino acid sequence at least 65%, at least 70%, at least 75%, at least 80%, at least 85%, at least 90%, at least 95%, at least 99%, or 100% identical to amino acid sequence SAS, and a CDR3 having an amino acid sequence at least 65%, at least 70%, at least 75%, at least 80%, at least 85%, at least 90%, at least 95%, at least 99%, or 100% identical to SEQ ID NO: 32, 38, or 326; (ii) a VL2 comprising a CDR1 having an amino acid sequence at least 65%, at least 70%, at least 75%, at least 80%, at least 85%, at least 90%, at least 95%, at least 99%, or 100% identical to SEQ ID NO: 15, a CDR2 having an amino acid sequence at least 65%, at least 70%, at least 75%, at least 80%, at least 85%, at least 90%, at least 95%, at least 99%, or 100% identical to amino acid sequence LGS, and a CDR3 having an amino acid sequence at least 65%, at least 70%, at least 75%, at least 80%, at least 85%, at least 90%, at least 95%, at least 99%, or 100% identical to SEQ ID NO: 16; (iii) a VH1 comprising a CDR1 having an amino acid sequence at least 65%, at least 70%, at least 75%, at least 80%, at least 85%, at least 90%, at least 95%, at least 99%, or 100% identical to SEQ ID NO: 34, a CDR2 having an amino acid sequence at least 65%, at least 70%, at least 75%, at least 80%, at least 85%, at least 90%, at least 95%, at least 99%, or 100% identical to SEQ ID NO: 35, and a CDR3 having an amino acid sequence at least 65%, at least 70%, at least 75%, at least 80%, at least 85%, at least 90%, at least 95%, at least 99%, or 100% identical to SEQ ID NO: 36, 40, or 327; and (iv) a VH2 comprising a CDR1 having an amino acid sequence at least 65%, at least 70%, at least 75%, at least 80%, at least 85%, at least 90%, at least 95%, at least 99%, or 100% identical to SEQ ID NO: 18, a CDR2 having an amino acid sequence at least 65%, at least 70%, at least 75%, at least 80%, at least 85%, at least 90%, at least 95%, at least 99%, or 100% identical to SEQ ID NO: 19, and a CDR3 having an amino acid sequence at least 65%, at least 70%, at least 75%, at least 80%, at least 85%, at least 90%, at least 95%, at least 99%, or 100% identical to SEQ ID NO: 20.

[1532] In some aspects, the antigen binding polypeptides provided herein comprise a VL1 comprising an amino acid sequence that is at least 65%, at least 70%, at least 75%, at least 80%, at least 85%, at least 90%, at least 95%, at least 99%, or 100% identical to SEQ ID NO: 33 or 39.

[1533] In some aspects, the antigen binding polypeptides provided herein comprise a VL2 comprising an amino acid sequence that is at least 65%, at least 70%, at least 75%, at least 80%, at least 85%, at least 90%, at least 95%, at least 99%, or 100% identical to SEQ ID NO: 17.

[1534] In some aspects, the antigen binding polypeptides provided herein comprise a VH1 comprising an amino acid sequence that is at least 65%, at least 70%, at least 75%, at least 80%, at least 85%, at least 90%, at least 95%, at least 99%, or 100% identical to SEQ ID NO: 37.

[1535] In some aspects, the antigen binding polypeptides provided herein comprise a VH2 comprising an amino acid sequence that is at least 65%, at least 70%, at least 75%, at least 80%, at least 85%, at least 90%, at least 95%, at least 99%, or 100% identical to SEQ ID NO: 21 or 22.

[1536] In some aspects, the antigen binding polypeptides provided herein comprise (i) a VL1 comprising an amino acid sequence that is at least 65%, at least 70%, at least 75%, at least 80%, at least 85%, at least 90%, at least 95%, at least 99%, or 100% identical to SEQ ID NO: 33 or 39; (ii) a VL2 comprising an amino acid sequence that is at least 65%, at least 70%, at least 75%, at least 80%, at least 85%, at least 90%, at least 95%, at least 99%, or 100% identical to SEQ ID NO: 17; (iii) a VH1 comprising an amino acid sequence that is at least 65%, at least 70%, at least 75%, at least 80%, at least 85%, at least 90%, at least 95%, at least 99%, or 100% identical to SEQ ID NO: 37; and (iv) a VH2 comprising an amino acid sequence that is at least 65%, at least 70%, at least 75%, at least 80%, at least 85%, at least 90%, at least 95%, at least 99%, or 100% identical to SEQ ID NO: 21 or 22.

[1537] In some aspects, at least one of VL1 or VL2 comprised in the antigen binding polypeptides provided herein comprises (i) a complementarity determining region (CDR) 1 having an amino acid sequence that is at least 65%, at least 70%, at least 75%, at least 80%, at least 85%, at least 90%, at least 95%, at least 99%, or 100% identical to SEQ ID NO: 145 or 1050; (ii) a CDR2 having an amino acid sequence at least 65%, at least 70%, at least 75%, at least 80%, at least 85%, at least 90%, at least 95%, at least 99%, or 100% identical to SEQ ID NO: 1051 or an amino acid sequence that is at least 65%, at least 70%, at least 75%, at least 80%, at least 85%, at least 90%, at least 95%, at least 99%, or 100% identical to amino acid sequence AAS; and (iii) a CDR3 having an amino acid sequence that is at least 65%, at least 70%, at least 75%, at least 80%, at least 85%, at least 90%, at least 95%, at least 99%, or 100% identical to SEQ ID NO: 146 or 764.

[1538] In some aspects, at least one of VH1 or VH2 comprised in the antigen binding polypeptides provided herein comprises (i) a complementarity determining region (CDR) 1 having an amino acid sequence that is at least 65%, at least 70%, at least 75%, at least 80%, at least 85%, at least 90%, at least 95%, at least 99%, or 100% identical to SEQ ID NO: 148 or 1052; (ii) a CDR2 having an amino acid sequence that is at least 65%, at least 70%, at least 75%, at least 80%, at least 85%, at least 90%, at least 95%, at least 99%, or 100% identical to SEQ ID NO: 149 or 1053; and (iii) a CDR3 having an amino acid sequence that is at least 65%, at least 70%, at least 75%, at least 80%, at least 85%, at least 90%, at least 95%, at least 99%, or 100% identical to SEQ ID NO: 150, 765, or 1054.

[1539] In some aspects, at least one of VL1 or VL2 comprised in the antigen binding polypeptides provided herein comprises (i) a complementarity determining region (CDR) 1 having an amino acid sequence that is at least 65%, at least 70%, at least 75%, at least 80%, at least 85%, at least 90%, at least 95%, at least 99%, or 100% identical to SEQ ID NO: 145 or 1050; (ii) a CDR2 having an amino acid sequence at least 65%, at least 70%, at least 75%, at least 80%, at least 85%, at least 90%, at least 95%, at least 99%, or 100% identical to SEQ ID NO: 1051 or an amino acid sequence that is at least 65%, at least 70%, at least 75%, at least 80%, at least 85%, at least 90%, at least 95%, at least 99%, or 100% identical to amino acid sequence AAS; and (iii) a CDR3 having an amino acid sequence that is at least 65%, at least 70%, at least 75%, at least 80%, at least 85%, at least 90%, at least 95%, at least 99%, or 100% identical to SEQ ID NO: 146 or 764; and at least one of VH1 or VH2 comprised in the antigen binding polypeptides provided herein comprises (iv) a complementarity determining region (CDR) 1 having an amino acid sequence that is at least 65%, at least 70%, at least 75%, at least 80%, at least 85%, at least 90%, at least 95%, at least 99%, or 100% identical to SEQ ID NO: 148 or 1052; (v) a CDR2 having an amino acid sequence that is at least 65%, at least 70%, at least 75%, at least 80%, at least 85%, at least 90%, at least 95%, at least 99%, or 100% identical to SEQ ID NO: 149 or 1053; and (vi) a CDR3 having an amino acid sequence that is at least 65%, at least 70%, at least 75%, at least 80%, at least 85%, at least 90%, at least 95%, at least 99%, or 100% identical to SEQ ID NO: 150, 765, or 1054.

[1540] In some aspects, at least one of VL1 or VL2 comprised in the antigen binding polypeptides provided herein comprises an amino acid sequence that is at least 65%, at least 70%, at least 75%, at least 80%, at least 85%, at least 90%, at least 95%, at least 99%, or 100% identical to SEQ ID NO: 147. In some aspects, at least one of VH1 or VH2 comprised in the antigen binding polypeptides provided herein comprises an amino acid sequence that is at least 65%, at least 70%, at least 75%, at least 80%, at least 85%, at least 90%, at least 95%, at least 99%, or 100% identical to SEQ ID NO: 151.

[1541] In some aspects, (i) at least one of VL1 or VL2 comprised in the antigen binding polypeptides provided herein comprises an amino acid sequence that is at least 65%, at least 70%, at least 75%, at least 80%, at least 85%, at least 90%, at least 95%, at least 99%, or 100% identical to SEQ ID NO: 147, and (ii) at least one of VH1 or VH2 comprised in the antigen binding polypeptides provided herein comprises an amino acid sequence that is at least 65%, at least 70%, at least 75%, at least 80%, at least 85%, at least 90%, at least 95%, at least 99%, or 100% identical to SEQ ID NO: 151.

[1542] In some aspects, the antigen binding polypeptides provided herein comprise a VL1 comprising (i) a complementarity determining region (CDR) 1 having an amino acid sequence that is at least 65%, at least 70%, at least 75%, at least 80%, at least 85%, at least 90%, at least 95%, at least 99%, or 100% identical to SEQ ID NO: 145 or 1050; (ii) a CDR2 having an amino acid sequence at least 65%, at least 70%, at least 75%, at least 80%, at least 85%, at least 90%, at least 95%, at least 99%, or 100% identical to SEQ ID NO: 1051 or an amino acid sequence that is at least 65%, at least 70%, at least 75%, at least 80%, at least 85%, at least 90%, at least 95%, at least 99%, or 100% identical to amino acid sequence AAS; and (iii) a CDR3 having an amino acid sequence that is at least 65%, at least 70%, at least 75%, at least 80%, at least 85%, at least 90%, at least 95%, at least 99%, or 100% identical to SEQ ID NO: 146 or 764; a VH1 comprising (iv) a complementarity determining region (CDR) 1 having an amino acid sequence that is at least 65%, at least 70%, at least 75%, at least 80%, at least 85%, at least 90%, at least 95%, at least 99%, or 100% identical to SEQ ID NO: 148 or 1052; (v) a CDR2 having an amino acid sequence that is at least 65%, at least 70%, at least 75%, at least 80%, at least 85%, at least 90%, at least 95%, at least 99%, or 100% identical to SEQ ID NO: 149 or 1053; and (vi) a CDR3 having an amino acid sequence that is at least 65%, at least 70%, at least 75%, at least 80%, at least 85%, at least 90%, at least 95%, at least 99%, or 100% identical to SEQ ID NO: 150, 765, or 1054; a VL2 comprising (vii) a complementarity determining region (CDR) 1 having an amino acid sequence that is at least 65%, at least 70%, at least 75%, at least 80%, at least 85%, at least 90%, at least 95%, at least 99%, or 100% identical to any one of SEQ ID NOs: 1, 9, 15, 23, 30, 41, 48, 55, 58, 65, 72, 79, 86, 93, 99, 105, 112, 119, 130, 138, 145, 152, 159, 166, 172, 179, 186, 192, 199, 205, 212, 219, 226, 232, 324, 627, 640, 650, 659, 676, 687, 695, 703, 712, 770, 778, 785, 794, 801, 807, 814, 827, 836, 849, 858, 865, 878, 1045, 1050, 1055, 1060, and 1065; (viii) a CDR2 having an amino acid sequence at least 65%, at least 70%, at least 75%, at least 80%, at least 85%, at least 90%, at least 95%, at least 99%, or 100% identical to any one of SEQ ID NOs: 2, 31, 628, 641, 677, 1046, 1051, 1056, and 1061; or at least 65%, at least 70%, at least 75%, at least 80%, at least 85%, at least 90%, at least 95%, at least 99%, or 100% identical to any one of amino acid sequences AAS, GAS, LGS, GTN, GTN, SAS, SDS, DNT, EVT, DAS, DVT, RNS, DVS, EDS, DDS, KDS, VAS, WAS, YTS, EVS, NNN, SYN, and DAT; and (ix) a CDR3 having an amino acid sequence at least 65%, at least 70%, at least 75%, at least 80%, at least 85%, at least 90%, at least 95%, at least 99%, or 100% identical to any one of SEQ ID NOs: 3, 10, 16, 24, 32, 38, 42, 49, 59, 66, 73, 80, 87, 94, 100, 106, 113, 120, 126, 131, 139, 146, 153, 160, 167, 173, 180, 187, 193, 200, 206, 213, 220, 227, 233, 239, 242, 246, 249, 256, 283, 285, 287, 288, 290, 292, 294, 296, 301, 304, 306, 309, 311, 313, 316, 325, 326, 329, 642, 651, 660, 668, 678, 651, 696, 704, 713, 764, 766, 768, 771, 779, 786, 792, 795, 808, 815, 821, 830, 837, 843, 850, 856, 859, 866, 872, 879, 885, and 1066; and a VH2 comprising (x) a CDR1 having an amino acid sequence at least 65%, at least 70%, at least 75%, at least 80%, at least 85%, at least 90%, at least 95%, at least 99%, or 100% identical to any one of SEQ ID NOs: 5, 12, 18, 26, 34, 44, 51, 61, 68, 75, 82, 89, 96, 102, 108, 115, 122, 133, 141, 148, 155, 162, 175, 182, 189, 195, 202, 208, 215, 222, 229, 235, 318, 629, 645, 654, 663, 671, 682, 690, 699, 707, 716, 773, 781, 788, 797, 803, 810, 817, 823, 832, 839, 845, 852, 861, 868, 874, 881, 1047, 1052, 1057, 1062, and 1067; (xi) a CDR2 having an amino acid sequence at least 65%, at least 70%, at least 75%, at least 80%, at least 85%, at least 90%, at least 95%, at least 99%, or 100% identical to any one of SEQ ID NOs: 6, 19, 27, 35, 45, 52, 56, 62, 69, 76, 83, 90, 109, 116, 123, 134, 142, 149, 156, 163, 169, 176, 183, 196, 209, 216, 223, 236, 273, 319, 328, 630, 646, 655, 664, 672, 683, 691, 708, 776, 782, 789, 798, 804, 811, 818, 824, 833, 840, 846, 853, 862, 869, 875, 882, 1048, 1053, 1058, 1063, and 1068; and (xii) a CDR3 having an amino acid sequence at least 65%, at least 70%, at least 75%, at least 80%, at least 85%, at least 90%, at least 95%, at least 99%, or 100% identical to any one of SEQ ID NOs: 7, 13, 20, 28, 36, 40, 46, 53, 63, 70, 77, 84, 91, 97, 103, 110, 117, 124, 128, 135, 143, 150, 157, 164, 170, 177, 184, 190, 197, 203, 210, 217, 224, 230, 237, 241, 244, 248, 253, 257, 259, 261, 263, 265, 267, 269, 271, 274, 276, 278, 281, 297, 320, 322, 327, 330, 332, 631, 647, 656, 665, 673, 684, 692, 700, 709, 717, 765, 767, 769, 774, 783, 790, 793, 799, 805, 812, 819, 825, 834, 841, 847, 854, 857, 863, 870, 876, 883, 886, 1049, 1054, 1059, 1064, and 1069.

[1543] In some aspects, the antigen binding polypeptides provided herein comprise (i) a VL1 comprising an amino acid sequence that is at least 65%, at least 70%, at least 75%, at least 80%, at least 85%, at least 90%, at least 95%, at least 99%, or 100% identical to SEQ ID NO: 147; (ii) a VH1 comprising an amino acid sequence that is at least 65%, at least 70%, at least 75%, at least 80%, at least 85%, at least 90%, at least 95%, at least 99%, or 100% identical to SEQ ID NO: 151; (iii) a VL2 comprising an amino acid sequence that is at least 65%, at least 70%, at least 75%, at least 80%, at least 85%, at least 90%, at least 95%, at least 99%, or 100% identical to any one of SEQ ID NOs: 4, 11, 17, 25, 33, 39, 43, 50, 60, 67, 74, 81, 88, 95, 101, 107, 114, 121, 127, 132, 140, 147, 154, 161, 168, 174, 181, 188, 194, 201, 207, 214, 221, 228, 234, 240, 243, 247, 250, 251, 252, 255, 284, 286, 289, 291, 293, 295, 299, 300, 302, 303, 305, 307, 308, 310, 312, 314, 315, 317, 323, 639, 649, 658, 667, 675, 686, 694, 702, 711, 772, 780, 787, 796, 802, 809, 816, 822, 831, 838, 844, 851, 860, 867, 873, 880, and 988; and (iv) a VH2 comprising an amino acid sequence that is at least 65%, at least 70%, at least 75%, at least 80%, at least 85%, at least 90%, at least 95%, at least 99%, or 100% identical to any one of SEQ ID NOs: 8, 14, 21, 22, 29, 37, 47, 54, 57, 64, 71, 78, 85, 92, 98, 104, 111, 118, 125, 129, 136, 137, 144, 151, 158, 165, 171, 178, 185, 191, 198, 204, 211, 218, 225, 231, 238, 245, 254, 258, 260, 262, 264, 266, 268, 270, 272, 275, 277, 279, 280, 282, 298, 321, 331, 626, 644, 653, 662, 670, 681, 689, 698, 706, 715, 775, 777, 784, 791, 800, 806, 813, 820, 826, 835, 842, 848, 855, 864, 871, 877, and 884.

[1544] In some aspects, the antigen binding polypeptides provided herein comprise a VL1 comprising (i) a complementarity determining region (CDR) 1 having an amino acid sequence that is at least 65%, at least 70%, at least 75%, at least 80%, at least 85%, at least 90%, at least 95%, at least 99%, or 100% identical to SEQ ID NO: 145 or 1050; (ii) a CDR2 having an amino acid sequence at least 65%, at least 70%, at least 75%, at least 80%, at least 85%, at least 90%, at least 95%, at least 99%, or 100% identical to SEQ ID NO: 1051 or an amino acid sequence that is at least 65%, at least 70%, at least 75%, at least 80%, at least 85%, at least 90%, at least 95%, at least 99%, or 100% identical to amino acid sequence AAS; and (iii) a CDR3 having an amino acid sequence that is at least 65%, at least 70%, at least 75%, at least 80%, at least 85%, at least 90%, at least 95%, at least 99%, or 100% identical to SEQ ID NO: 146 or 764; a VH1 comprising (iv) a complementarity determining region (CDR) 1 having an amino acid sequence that is at least 65%, at least 70%, at least 75%, at least 80%, at least 85%, at least 90%, at least 95%, at least 99%, or 100% identical to SEQ ID NO: 148 or 1052; (v) a CDR2 having an amino acid sequence that is at least 65%, at least 70%, at least 75%, at least 80%, at least 85%, at least 90%, at least 95%, at least 99%, or 100% identical to SEQ ID NO: 149 or 1053; and (vi) a CDR3 having an amino acid sequence that is at least 65%, at least 70%, at least 75%, at least 80%, at least 85%, at least 90%, at least 95%, at least 99%, or 100% identical to SEQ ID NO: 150, 765, or 1054; a VL2 comprising (vii) a complementarity determining region (CDR) 1 having an amino acid sequence that is at least 65%, at least 70%, at least 75%, at least 80%, at least 85%, at least 90%, at least 95%, at least 99%, or 100% identical to any one of SEQ ID NOs: 1, 9, 15, 23, 30, 65, 72, 145, 152, 324, 627, 138, 172, 1045, 1050, 1055, 1060, and 1065; (viii) a CDR2 having an amino acid sequence at least 65%, at least 70%, at least 75%, at least 80%, at least 85%, at least 90%, at least 95%, at least 99%, or 100% identical to any one of SEQ ID NOs: 2, 31, 628, 1046, 1051, 1056, and 1061, or at least 65%, at least 70%, at least 75%, at least 80%, at least 85%, at least 90%, at least 95%, at least 99%, or 100% identical to any one of amino acid sequences GAS, LGS, GTN, SAS, SDS, AAS, DAS, and DNT; and (ix) a CDR3 having an amino acid sequence at least 65%, at least 70%, at least 75%, at least 80%, at least 85%, at least 90%, at least 95%, at least 99%, or 100% identical to any one of SEQ ID NOs: 3, 10, 16, 24, 32, 38, 66, 73, 146, 153, 325, 326, 764, 766, 139, 856, 173, 792, and 1066; and a VH2 comprising (x) a CDR1 having an amino acid sequence at least 65%, at least 70%, at least 75%, at least 80%, at least 85%, at least 90%, at least 95%, at least 99%, or 100% identical to any one of SEQ ID NOs: 5, 12, 18, 26, 34, 68, 75, 148, 155, 629, 141, 175, 1047, 1052, 1057, 1062, and 1067; (xi) a CDR2 having an amino acid sequence at least 65%, at least 70%, at least 75%, at least 80%, at least 85%, at least 90%, at least 95%, at least 99%, or 100% identical to any one of SEQ ID NOs: 6, 19, 27, 35, 69, 76, 149, 156, 630, 142, 176, 1048, 1053, 1058, 1063, and 1068; and (xii) a CDR3 having an amino acid sequence at least 65%, at least 70%, at least 75%, at least 80%, at least 85%, at least 90%, at least 95%, at least 99%, or 100% identical to any one of SEQ ID NOs: 7, 13, 20, 28, 36, 40, 70, 77, 327, 150, 157, 332, 631, 765, 767, 143, 857, 177, 793, 1049, 1054, 1059, 1064, and 1069.

[1545] In some aspects, the antigen binding polypeptides provided herein comprise (i) a VL1 comprising an amino acid sequence that is at least 65%, at least 70%, at least 75%, at least 80%, at least 85%, at least 90%, at least 95%, at least 99%, or 100% identical to SEQ ID NO: 147; (ii) a VH1 comprising an amino acid sequence that is at least 65%, at least 70%, at least 75%, at least 80%, at least 85%, at least 90%, at least 95%, at least 99%, or 100% identical to SEQ ID NO: 151; (iii) a VL2 comprising an amino acid sequence that is at least 65%, at least 70%, at least 75%, at least 80%, at least 85%, at least 90%, at least 95%, at least 99%, or 100% identical to any one of SEQ ID NOs: 4, 11, 17, 25, 33, 39, 67, 74, 147, 154, 140, and 174; and (iv) a VH2 comprising an amino acid sequence that is at least 65%, at least 70%, at least 75%, at least 80%, at least 85%, at least 90%, at least 95%, at least 99%, or 100% identical to any one of SEQ ID NOs: 8, 14, 21, 22, 29, 37, 71, 78, 151, 158, 626, 144, and 178.

[1546] In some aspects, the antigen binding polypeptides disclosed herein, comprise one or more CL, as indicated in the formulas representing the antigen binding polypeptides disclosed herein. In some aspects, the CL comprises an amino acid sequence at least 65%, at least 70%, at least 75%, at least 80%, at least 85%, at least 90%, at least 95%, at least 99%, or 100% identical to any one of SEQ ID NOs: 374, 637, or 1092-1095.

[1547] In some aspects, the antigen binding polypeptides disclosed herein, comprise one or more CH1, as indicated in the formulas representing the antigen binding polypeptides disclosed herein. In some aspects, the CH1 comprises an amino acid sequence at least 65%, at least 70%, at least 75%, at least 80%, at least 85%, at least 90%, at least 95%, at least 99%, or 100% identical to any one of SEQ ID NOs: 375, 634, 1070, 1071, or 1086-1091.

[1548] In some aspects, the antigen binding polypeptides provided herein further comprise an Fc region. In some aspects, the antigen binding polypeptides provided herein further comprise an Fc region at the carboxy-terminus. In some aspects, the Fc region comprises an immunoglobulin heavy chain constant region 2 (CH2) and/or an immunoglobulin heavy chain constant region 3 (CH3). In some aspects, the Fc region further comprises an immunoglobulin hinge (i.e., a hinge region). In some aspects, the hinge region comprises an amino acid sequence at least 65%, at least 70%, at least 75%, at least 80%, at least 85%, at least 90%, at least 95%, at least 99%, or 100% identical to any one of SEQ ID NOs: 635, 636, 1072, 1073, or 1074. In some aspects, the Fc region comprises a CH2 and a CH3. In some aspects, the CH2 comprises an amino acid sequence that is at least 65%, at least 70%, at least 75%, at least 80%, at least 85%, at least 90%, at least 95%, at least 99%, or 100% identical to any one of SEQ ID NOs: 1075-1078. In some aspects, the CH3 comprises an amino acid sequence that is at least 65%, at least 70%, at least 75%, at least 80%, at least 85%, at least 90%, at least 95%, at least 99%, or 100% identical to any one of SEQ ID NOs: 1079-1085. In some aspects, the Fc region comprises an amino acid sequence that is at least 65%, at least 70%, at least 75%, at least 80%, at least 85%, at least 90%, at least 95%, at least 99%, or 100% identical to any one of SEQ ID NOs: 376-380.

[1549] In some aspects, the Fc region comprises one or more amino acid substitutions. In some aspects, the one or more amino acid substitutions comprise one or more half-life extension amino acid substitutions. In some aspects, the one or more half-life extension amino acid substitutions comprise one or more of amino acid substitutions M428L, N434A, N434S, L234F, L235E, P331S, M252Y, S254T, and T256E, or equivalent thereof, based on the EU numbering scheme. In some aspects, the one or more half-life extension amino acid substitutions comprise a LA (M428L and N434A, or equivalent thereof, based on the EU numbering scheme) amino acid substitution. In some aspects, the one or more half-life extension amino acid substitutions comprise a LS (M428L and N434S, or equivalent thereof, based on the EU numbering scheme) amino acid substitution. In some aspects, the one or more half-life extension amino acid substitutions comprise L234F and L235E, or equivalent thereof (based on the EU numbering scheme) amino acid substitutions. In some aspects, the one or more half-life extension amino acid substitutions comprise a TM (L234F, L235E, and P331S, or equivalent thereof, based on the EU numbering scheme) amino acid substitution. In some aspects, the one or more half-life extension amino acid substitutions comprise a YTE (M252Y, S254T, and T256E, or equivalent thereof, based on the EU numbering scheme) amino acid substitution.

[1550] In some aspects, the Fc region comprises at least one knob-into-hole modification. In some aspects, the antigen binding polypeptides disclosed herein are comprised in IgG1 or IgG4 antibodies or antigen binding fragments thereof.

[1551] In some aspects, the Fc region comprises at least one knob-into-hole modification. In some aspects, the antigen binding polypeptides disclosed herein are comprised in IgG1 or IgG4 antibodies or antigen binding fragments thereof. In some aspects, the knob-into-hole modification comprises one or more of knob substitutions of S354C and T366W, or equivalent thereof, and/or one or more of hole substitutions of Y349C, T366S, L368A, Y407V, or equivalent thereof, or a combination thereof, based on the EU numbering scheme. In some aspects, the Fc region comprises a knob-into-hole modification comprising knob substitutions of S354C and T366W, or equivalent thereof, and/or hole substitutions of Y349C, T366S, L368A, and Y407V, or equivalent thereof, and/or a half-life extension amino acid substitution comprising: a LA (M428L and N434A, or equivalent thereof, based on the EU numbering scheme) amino acid substitution, a LS (M428L and N434S, or equivalent thereof, based on the EU numbering scheme) amino acid substitution. L234F and L235E, or equivalent thereof (based on the EU numbering scheme) amino acid substitutions, a TM (L234F, L235E, and P331S, or equivalent thereof, based on the EU numbering scheme) amino acid substitution, a YTE (M252Y, S254T, and T256E, or equivalent thereof, based on the EU numbering scheme) amino acid substitution, or any combination thereof.

[1552] In some aspects, the Fc region comprises knob substitutions of S354C and T366W, or equivalent thereof, and a half-life extension amino acid substitution comprising: a LA (M428L and N434A, or equivalent thereof, based on the EU numbering scheme) amino acid substitution, a LS (M428L and N434S, or equivalent thereof, based on the EU numbering scheme) amino acid substitution, L234F and L235E, or equivalent thereof (based on the EU numbering scheme) amino acid substitutions, a TM (L234F, L235E, and P331S, or equivalent thereof, based on the EU numbering scheme) amino acid substitution, a YTE (M252Y, S254T, and T256E, or equivalent thereof, based on the EU numbering scheme) amino acid substitution, or any combination thereof.

[1553] In some aspects, the Fc region comprises hole substitutions of Y349C, T366S, L368A and Y407V, or equivalent thereof, and a half-life extension amino acid substitution comprising: a LA (M428L and N434A, or equivalent thereof, based on the EU numbering scheme) amino acid substitution, a LS (M428L and N434S, or equivalent thereof, based on the EU numbering scheme) amino acid substitution. L234F and L235E, or equivalent thereof (based on the EU numbering scheme) amino acid substitutions, a TM (L234F, L235E, and P331S, or equivalent thereof, based on the EU numbering scheme) amino acid substitution, a YTE (M252Y, S254T, and T256E, or equivalent thereof, based on the EU numbering scheme) amino acid substitution, or any combination thereof.

[1554] In some aspects, the antigen binding polypeptides disclosed herein comprise one or more Fc effector function knockout mutation. In some aspects, the antigen binding polypeptides disclosed herein are comprised in IgG1 or IgG4 antibodies or antigen binding fragments thereof. In some aspects, the Fc effector function knockout mutation is L234A, L235A, P239A, or equivalent thereof, or a combination thereof, based on the EU numbering scheme.

[1555] In some aspects, the antigen binding polypeptides disclosed herein comprise a mutation at a glycosylation site. In some aspects, the mutation at a glycosylation site is a mutation at an N-glycosylation site. In some aspects, the antigen binding polypeptides comprise a VH comprising a mutation at a glycosylation site. In some aspects, the mutation at a glycosylation site is a mutation at an N-glycosylation site. In some aspects, the mutation at an N-glycosylation site is at amino acid N62 of the VH region or equivalent thereof. In some aspects, the mutation at an N-glycosylation site at amino acid N62 is N62Q or N62S, or equivalent thereof.

[1556] In some aspects, the antigen binding polypeptides disclosed herein, comprise one or more optional linkers. The one or more optional linkers are indicated herein as Ln, wherein n is an integer, and the integer next to each L indicates each L comprised in the antigen binding polypeptides disclosed herein. For example, if an antigen binding polypeptide disclosed herein comprises two linkers, the first linker from N-terminus to C-terminus is herein indicated as L1, and the second linker from N-terminus to C-terminus is herein indicated as L2. In some aspects, any one of the optional linkers each independently have a length of from 0 amino acids to about 50 amino acids. In some aspects, any one of the optional linkers each independently have a length of from 5 amino acids to about 40 amino acids.

[1557] In some aspects, any one of the optional linkers are non-immunogenic. In some aspects, any one of the optional linkers do not contain a consensus T cell epitope.

[1558] In some aspects, any of Ln comprises an amino acid sequence of G or A, or an amino acid sequence at least 65%, at least 70%, at least 75%, at least 80%, at least 85%, at least 90%, at least 95%, at least 99%, or 100% identical to amino acid sequences GSS or ASG, or an amino acid sequence at least 65%, at least 70%, at least 75%, at least 80%, at least 85%, at least 90%, at least 95%, at least 99%, or 100% identical to any one of SEQ ID NOs: 333-373 and 967-971. In some aspects, Ln comprises an amino acid sequence at least 65%, at least 70%, at least 75%, at least 80%, at least 85%, at least 90%, at least 95%, at least 99%, or 100% identical to any one of SEQ ID NOs: 333-345 and 967-971.

[1559] In some aspects, the antigen binding polypeptides provided herein have a structure, from amino-terminus to carboxy-terminus, represented by
[1560] VL1-L1-VH1-L2-CL; or
[1561] VH1-L1-VL1-L2-CL;
[1562] wherein:
[1563] VL1 is an immunoglobulin light chain variable region that specifically binds to a severe acute respiratory syndrome coronavirus 2 (SARS-CoV-2) protein;
[1564] VH1 is an immunoglobulin heavy chain variable region that specifically binds to a SARS-CoV-2 protein;
[1565] CL is an immunoglobulin light chain constant region; and
[1566] L1-L2 are optional amino acid linkers.

[1567] In any aspect shown herein as a structure from amino terminus to carboxy terminus, and with binding pairs selected from VL and/or VH or other structural regions such as CH1, CL, CH2, CH3, when shown without a specific linker such as L1, L2, etc., such linkers are optionally present in such structures between each designated subsequence VL, VH, etc.

[1568] In some aspects, the antigen binding polypeptides provided herein comprise a VL1 comprising (i) a complementarity determining region (CDR) 1 having an amino acid sequence that is at least 65%, at least 70%, at least 75%, at least 80%, at least 85%, at least 90%, at least 95%, at least 99%, or 100% identical to any one of SEQ ID NOs: 1, 9, 15, 23, 30, 41, 48, 55, 58, 65, 72, 79, 86, 93, 99, 105, 112, 119, 130, 138, 145, 152, 159, 166, 172, 179, 186, 192, 199, 205, 212, 219, 226, 232, 324, 627, 640, 650, 659, 676, 687, 695, 703, 712, 770, 778, 785, 794, 801, 807, 814, 827, 836, 849, 858, 865, 878, 1045, 1050, 1055, 1060, and 1065; (ii) a CDR2 having an amino acid sequence that is at least 65%, at least 70%, at least 75%, at least 80%, at least 85%, at least 90%, at least 95%, at least 99%, or 100% identical to any one of SEQ ID NOs: 2, 31, 628, 641, 677, 1046, 1051, 1056, and 1061; or at least 65%, at least 70%, at least 75%, at least 80%, at least 85%, at least 90%, at least 95%, at least 99%, or 100% identical to any one of amino acid sequences AAS, GAS, LGS, GTN, GTN, SAS, SDS, DNT, EVT, DAS, DVT, RNS, DVS, EDS, DDS, KDS, VAS, WAS, YTS, EVS, NNN, SYN, and DAT; and (iii) a CDR3 having an amino acid sequence that is at least 65%, at least 70%, at least 75%, at least 80%, at least 85%, at least 90%, at least 95%, at least 99%, or 100% identical to any one of SEQ ID NOs: 3, 10, 16, 24, 32, 38, 42, 49, 59, 66, 73, 80, 87, 94, 100, 106, 113, 120, 126, 131, 139, 146, 153, 160, 167, 173, 180, 187, 193, 200, 206, 213, 220, 227, 233, 239, 242, 246, 249, 256, 283, 285, 287, 288, 290, 292, 294, 296, 301, 304, 306, 309, 311, 313, 316, 325, 326, 329, 642, 651, 660, 668, 678, 651, 696, 704, 713, 764, 766, 768, 771, 779, 786, 792, 795, 808, 815, 821, 830, 837, 843, 850, 856, 859, 866, 872, 879, 885, and 1066.

[1569] In some aspects, the antigen binding polypeptides provided herein comprise a VH1 comprising (i) a CDR1 having an amino acid sequence that is at least 65%, at least 70%, at least 75%, at least 80%, at least 85%, at least 90%, at least 95%, at least 99%, or 100% identical to any one of SEQ ID NOs: 5, 12, 18, 26, 34, 44, 51, 61, 68, 75, 82, 89, 96, 102, 108, 115, 122, 133, 141, 148, 155, 162, 175, 182, 189, 195, 202, 208, 215, 222, 229, 235, 318, 629, 645, 654, 663, 671, 682, 690, 699, 707, 716, 773, 781, 788, 797, 803, 810, 817, 823, 832, 839, 845, 852, 861, 868, 874, 881, 1047, 1052, 1057, 1062, and 1067; (ii) a CDR2 having an amino acid sequence that is at least 65%, at least 70%, at least 75%, at least 80%, at least 85%, at least 90%, at least 95%, at least 99%, or 100% identical to any one of SEQ ID NOs: 6, 19, 27, 35, 45, 52, 56, 62, 69, 76, 83, 90, 109, 116, 123, 134, 142, 149, 156, 163, 169, 176, 183, 196, 209, 216, 223, 236, 273, 319, 328, 630, 646, 655, 664, 672, 683, 691, 708, 776, 782, 789, 798, 804, 811, 818, 824, 833, 840, 846, 853, 862, 869, 875, 882, 1048, 1053, 1058, 1063, and 1068; and (iii) a CDR3 having an amino acid sequence that is at least 65%, at least 70%, at least 75%, at least 80%, at least 85%, at least 90%, at least 95%, at least 99%, or 100% identical to any one of SEQ ID NOs: 7, 13, 20, 28, 36, 40, 46, 53, 63, 70, 77, 84, 91, 97, 103, 110, 117, 124, 128, 135, 143, 150, 157, 164, 170, 177, 184, 190, 197, 203, 210, 217, 224, 230, 237, 241, 244, 248, 253, 257, 259, 261, 263, 265, 267, 269, 271, 274, 276, 278, 281, 297, 320, 322, 327, 330, 332, 631, 647, 656, 665, 673, 684, 692, 700, 709, 717, 765, 767, 769, 774, 783, 790, 793, 799, 805, 812, 819, 825, 834, 841, 847, 854, 857, 863, 870, 876, 883, 886, 1049, 1054, 1059, 1064, and 1069.

[1570] In some aspects, the antigen binding polypeptides provided herein comprise a VL1 comprising (i) a complementarity determining region (CDR) 1 having an amino acid sequence that is at least 65%, at least 70%, at least 75%, at least 80%, at least 85%, at least 90%, at least 95%, at least 99%, or 100% identical to any one of SEQ ID NOs: 1, 9, 15, 23, 30, 41, 48, 55, 58, 65, 72, 79, 86, 93, 99, 105, 112, 119, 130, 138, 145, 152, 159, 166, 172, 179, 186, 192, 199, 205, 212, 219, 226, 232, 324, 627, 640, 650, 659, 676, 687, 695, 703, 712, 770, 778, 785, 794, 801, 807, 814, 827, 836, 849, 858, 865, 878, 1045, 1050, 1055, 1060, and 1065; (ii) a CDR2 having an amino acid sequence that is at least 65%, at least 70%, at least 75%, at least 80%, at least 85%, at least 90%, at least 95%, at least 99%, or 100% identical to any one of SEQ ID NOs: 2, 31, 628, 641, 677, 1046, 1051, 1056, and 1061; or at least 65%, at least 70%, at least 75%, at least 80%, at least 85%, at least 90%, at least 95%, at least 99%, or 100% identical to any one of amino acid sequences AAS, GAS, LGS, GTN, GTN, SAS, SDS, DNT, EVT, DAS, DVT, RNS, DVS, EDS, DDS, KDS, VAS, WAS, YTS, EVS, NNN, SYN, and DAT; (iii) a CDR3 having an amino acid sequence that is at least 65%, at least 70%, at least 75%, at least 80%, at least 85%, at least 90%, at least 95%, at least 99%, or 100% identical to any one of SEQ ID NOs: 3, 10, 16, 24, 32, 38, 42, 49, 59, 66, 73, 80, 87, 94, 100, 106, 113, 120, 126, 131, 139, 146, 153, 160, 167, 173, 180, 187, 193, 200, 206, 213, 220, 227, 233, 239, 242, 246, 249, 256, 283, 285, 287, 288, 290, 292, 294, 296, 301, 304, 306, 309, 311, 313, 316, 325, 326, 329, 642, 651, 660, 668, 678, 651, 696, 704, 713, 764, 766, 768, 771, 779, 786, 792, 795, 808, 815, 821, 830, 837, 843, 850, 856, 859, 866, 872, 879, 885, and 1066; and a VH1 comprising (i) a CDR1 having an amino acid sequence that is at least 65%, at least 70%, at least 75%, at least 80%, at least 85%, at least 90%, at least 95%, at least 99%, or 100% identical to any one of SEQ ID NOs: 5, 12, 18, 26, 34, 44, 51, 61, 68, 75, 82, 89, 96, 102, 108, 115, 122, 133, 141, 148, 155, 162, 175, 182, 189, 195, 202, 208, 215, 222, 229, 235, 318, 629, 645, 654, 663, 671, 682, 690, 699, 707, 716, 773, 781, 788, 797, 803, 810, 817, 823, 832, 839, 845, 852, 861, 868, 874, 881, 1047, 1052, 1057, 1062, and 1067; (ii) a CDR2 having an amino acid sequence that is at least 65%, at least 70%, at least 75%, at least 80%, at least 85%, at least 90%, at least 95%, at least 99%, or 100% identical to any one of SEQ ID NOs: 6, 19, 27, 35, 45, 52, 56, 62, 69, 76, 83, 90, 109, 116, 123, 134, 142, 149, 156, 163, 169, 176, 183, 196, 209, 216, 223, 236, 273, 319, 328, 630, 646, 655, 664, 672, 683, 691, 708, 776, 782, 789, 798, 804, 811, 818, 824, 833, 840, 846, 853, 862, 869, 875, 882, 1048, 1053, 1058, 1063, and 1068; and (iii) a CDR3 having an amino acid sequence that is at least 65%, at least 70%, at least 75%, at least 80%, at least 85%, at least 90%, at least 95%, at least 99%, or 100% identical to any one of SEQ ID NOs: 7, 13, 20, 28, 36, 40, 46, 53, 63, 70, 77, 84, 91, 97, 103, 110, 117, 124, 128, 135, 143, 150, 157, 164, 170, 177, 184, 190, 197, 203, 210, 217, 224, 230, 237, 241, 244, 248, 253, 257, 259, 261, 263, 265, 267, 269, 271, 274, 276, 278, 281, 297, 320, 322, 327, 330, 332, 631, 647, 656, 665, 673, 684, 692, 700, 709, 717, 765, 767, 769, 774, 783, 790, 793, 799, 805, 812, 819, 825, 834, 841, 847, 854, 857, 863, 870, 876, 883, 886, 1049, 1054, 1059, 1064, and 1069.

[1571] In some aspects, the antigen binding polypeptides provided herein comprise a VL1 comprising an amino acid sequence that is at least 65%, at least 70%, at least 75%, at least 80%, at least 85%, at least 90%, at least 95%, at least 99%, or 100% identical to any one of SEQ ID NOs: 4, 11, 17, 25, 33, 39, 43, 50, 60, 67, 74, 81, 88, 95, 101, 107, 114, 121, 127, 132, 140, 147, 154, 161, 168, 174, 181, 188, 194, 201, 207, 214, 221, 228, 234, 240, 243, 247, 250, 251, 252, 255, 284, 286, 289, 291, 293, 295, 299, 300, 302, 303, 305, 307, 308, 310, 312, 314, 315, 317, 323, 639, 649, 658, 667, 675, 686, 694, 702, 711, 772, 780, 787, 796, 802, 809, 816, 822, 831, 838, 844, 851, 860, 867, 873, 880, and 988.

[1572] In some aspects, the antigen binding polypeptides provided herein comprise a VH1 comprising an amino acid sequence that is at least 65%, at least 70%, at least 75%, at least 80%, at least 85%, at least 90%, at least 95%, at least 99%, or 100% identical to any one of SEQ ID NOs: 8, 14, 21, 22, 29, 37, 47, 54, 57, 64, 71, 78, 85, 92, 98, 104, 111, 118, 125, 129, 136, 137, 144, 151, 158, 165, 171, 178, 185, 191, 198, 204, 211, 218, 225, 231, 238, 245, 254, 258, 260, 262, 264, 266, 268, 270, 272, 275, 277, 279, 280, 282, 298, 321, 331, 626, 644, 653, 662, 670, 681, 689, 698, 706, 715, 775, 777, 784, 791, 800, 806, 813, 820, 826, 835, 842, 848, 855, 864, 871, 877, and 884.

[1573] In some aspects, the antigen binding polypeptides provided herein comprise a (i) VL1 comprising an amino acid sequence that is at least 65%, at least 70%, at least 75%, at least 80%, at least 85%, at least 90%, at least 95%, at least 99%, or 100% identical to any one of SEQ ID NOs: 4, 11, 17, 25, 33, 39, 43, 50, 60, 67, 74, 81, 88, 95, 101, 107, 114, 121, 127, 132, 140, 147, 154, 161, 168, 174, 181, 188, 194, 201, 207, 214, 221, 228, 234, 240, 243, 247, 250, 251, 252, 255, 284, 286, 289, 291, 293, 295, 299, 300, 302, 303, 305, 307, 308, 310, 312, 314, 315, 317, 323, 639, 649, 658, 667, 675, 686, 694, 702, 711, 772, 780, 787, 796, 802, 809, 816, 822, 831, 838, 844, 851, 860, 867, 873, 880, and 988; and (ii) a VH1 comprising an amino acid sequence that is at least 65%, at least 70%, at least 75%, at least 80%, at least 85%, at least 90%, at least 95%, at least 99%, or 100% identical to any one of SEQ ID NOs: 8, 14, 21, 22, 29, 37, 47, 54, 57, 64, 71, 78, 85, 92, 98, 104, 111, 118, 125, 129, 136, 137, 144, 151, 158, 165, 171, 178, 185, 191, 198, 204, 211, 218, 225, 231, 238, 245, 254, 258, 260, 262, 264, 266, 268, 270, 272, 275, 277, 279, 280, 282, 298, 321, 331, 626, 644, 653, 662, 670, 681, 689, 698, 706, 715, 775, 777, 784, 791, 800, 806, 813, 820, 826, 835, 842, 848, 855, 864, 871, 877, and 884.

[1574] In some aspects, the antigen binding polypeptides provided herein comprise a VL1 comprising (i) a complementarity determining region (CDR) 1 having an amino acid sequence that is at least 65%, at least 70%, at least 75%, at least 80%, at least 85%, at least 90%, at least 95%, at least 99%, or 100% identical to SEQ ID NO: 145 or 1050; (ii) a CDR2 having an amino acid sequence at least 65%, at least 70%, at least 75%, at least 80%, at least 85%, at least 90%, at least 95%, at least 99%, or 100% identical to SEQ ID NO: 1051 or an amino acid sequence that is at least 65%, at least 70%, at least 75%, at least 80%, at least 85%, at least 90%, at least 95%, at least 99%, or 100% identical to amino acid sequence AAS; and (iii) a CDR3 having an amino acid sequence that is at least 65%, at least 70%, at least 75%, at least 80%, at least 85%, at least 90%, at least 95%, at least 99%, or 100% identical to SEQ ID NO: 146 or 764.

[1575] In some aspects, the antigen binding polypeptides provided herein comprise a VH1 comprising (i) a complementarity determining region (CDR) 1 having an amino acid sequence that is at least 65%, at least 70%, at least 75%, at least 80%, at least 85%, at least 90%, at least 95%, at least 99%, or 100% identical to SEQ ID NO: 148 or 1052; (ii) a CDR2 having an amino acid sequence that is at least 65%, at least 70%, at least 75%, at least 80%, at least 85%, at least 90%, at least 95%, at least 99%, or 100% identical to SEQ ID NO: 149 or 1053; and (iii) a CDR3 having an amino acid sequence that is at least 65%, at least 70%, at least 75%, at least 80%, at least 85%, at least 90%, at least 95%, at least 99%, or 100% identical to SEQ ID NO: 150, 765, or 1054.

[1576] In some aspects, the antigen binding polypeptides provided herein comprise a VL1 comprising (i) a complementarity determining region (CDR) 1 having an amino acid sequence that is at least 65%, at least 70%, at least 75%, at least 80%, at least 85%, at least 90%, at least 95%, at least 99%, or 100% identical to SEQ ID NO: 145 or 1050; (ii) a CDR2 having an amino acid sequence at least 65%, at least 70%, at least 75%, at least 80%, at least 85%, at least 90%, at least 95%, at least 99%, or 100% identical to SEQ ID NO: 1051 or an amino acid sequence that is at least 65%, at least 70%, at least 75%, at least 80%, at least 85%, at least 90%, at least 95%, at least 99%, or 100% identical to amino acid sequence AAS; and (iii) a CDR3 having an amino acid sequence that is at least 65%, at least 70%, at least 75%, at least 80%, at least 85%, at least 90%, at least 95%, at least 99%, or 100% identical to SEQ ID NO: 146 or 764; and a VH1 comprising (iv) a complementarity determining region (CDR) 1 having an amino acid sequence that is at least 65%, at least 70%, at least 75%, at least 80%, at least 85%, at least 90%, at least 95%, at least 99%, or 100% identical to SEQ ID NO: 148 or 1052; (v) a CDR2 having an amino acid sequence that is at least 65%, at least 70%, at least 75%, at least 80%, at least 85%, at least 90%, at least 95%, at least 99%, or 100% identical to SEQ ID NO: 149 or 1053; and (vi) a CDR3 having an amino acid sequence that is at least 65%, at least 70%, at least 75%, at least 80%, at least 85%, at least 90%, at least 95%, at least 99%, or 100% identical to SEQ ID NO: 150, 765, or 1054.

[1577] In some aspects, the antigen binding polypeptides provided herein comprise a VL1 comprising an amino acid sequence that is at least 65%, at least 70%, at least 75%, at least 80%, at least 85%, at least 90%, at least 95%, at least 99%, or 100% identical to SEQ ID NO: 147.

[1578] In some aspects, the antigen binding polypeptides provided herein comprise a VH1 comprising an amino acid sequence that is at least 65%, at least 70%, at least 75%, at least 80%, at least 85%, at least 90%, at least 95%, at least 99%, or 100% identical to SEQ ID NO: 151.

[1579] In some aspects, the antigen binding polypeptides provided herein comprise (i) a VL1 comprising an amino acid sequence that is at least 65%, at least 70%, at least 75%, at least 80%, at least 85%, at least 90%, at least 95%, at least 99%, or 100% identical to SEQ ID NO: 147, and (ii) a VH1 comprising an amino acid sequence that is at least 65%, at least 70%, at least 75%, at least 80%, at least 85%, at least 90%, at least 95%, at least 99%, or 100% identical to SEQ ID NO: 151.

[1580] In some aspects, the antigen binding polypeptides disclosed herein, comprise one or more CL, as indicated in the formulas representing the antigen binding polypeptides disclosed herein. In some aspects, the CL comprises an amino acid sequence at least 65%, at least 70%, at least 75%, at least 80%, at least 85%, at least 90%, at least 95%, at least 99%, or 100% identical to any one of SEQ ID NOs: 374, 637, or 1092-1095.

[1581] In some aspects, the antigen binding polypeptides provided herein further comprise an Fc region. In some aspects, the antigen binding polypeptides provided herein further comprise an Fc region at the carboxy-terminus. In some aspects, the Fc region comprises an immunoglobulin heavy chain constant region 2 (CH2) and/or an immunoglobulin heavy chain constant region 3 (CH3). In some aspects, the Fc region further comprises an immunoglobulin hinge (i.e., a hinge region). In some aspects, the hinge region comprises an amino acid sequence at least 65%, at least 70%, at least 75%, at least 80%, at least 85%, at least 90%, at least 95%, at least 99%, or 100% identical to any one of SEQ ID NOs: 635, 636, 1072, 1073, or 1074. In some aspects, the Fc region comprises a CH2 and a CH3. In some aspects, the CH2 comprises an amino acid sequence that is at least 65%, at least 70%, at least 75%, at least 80%, at least 85%, at least 90%, at least 95%, at least 99%, or 100% identical to any one of SEQ ID NOs: 1075-1078. In some aspects, the CH3 comprises an amino acid sequence that is at least 65%, at least 70%, at least 75%, at least 80%, at least 85%, at least 90%, at least 95%, at least 99%, or 100% identical to any one of SEQ ID NOs: 1079-1085. In some aspects, the Fc region comprises an amino acid sequence that is at least 65%, at least 70%, at least 75%, at least 80%, at least 85%, at least 90%, at least 95%, at least 99%, or 100% identical to any one of SEQ ID NOs: 376-380.

[1582] In some aspects, the Fc region comprises one or more amino acid substitutions. In some aspects, the one or more amino acid substitutions comprise one or more half-life extension amino acid substitutions. In some aspects, the one or more half-life extension amino acid substitutions comprise one or more of amino acid substitutions M428L, N434A, N434S, L234F, L235E, P331S, M252Y, S254T, and T256E, or equivalent thereof, based on the EU numbering scheme. In some aspects, the one or more half-life extension amino acid substitutions comprise a LA (M428L and N434A, or equivalent thereof, based on the EU numbering scheme) amino acid substitution. In some aspects, the one or more half-life extension amino acid substitutions comprise a LS (M428L and N434S, or equivalent thereof, based on the EU numbering scheme) amino acid substitution. In some aspects, the one or more half-life extension amino acid substitutions comprise L234F and L235E, or equivalent thereof (based on the EU numbering scheme) amino acid substitutions. In some aspects, the one or more half-life extension amino acid substitutions comprise a TM (L234F, L235E, and P331S, or equivalent thereof, based on the EU numbering scheme) amino acid substitution. In some aspects, the one or more half-life extension amino acid substitutions comprise a YTE (M252Y, S254T, and T256E, or equivalent thereof, based on the EU numbering scheme) amino acid substitution.

[1583] In some aspects, the Fc region comprises at least one knob-into-hole modification. In some aspects, the antigen binding polypeptides disclosed herein are comprised in IgG1 or IgG4 antibodies or antigen binding fragments thereof. In some aspects, the knob-into-hole modification comprises one or more of knob substitutions of S354C and T366W, or equivalent thereof, and/or one or more of hole substitutions of Y349C, T366S, L368A, Y407V, or equivalent thereof, or a combination thereof, based on the EU numbering scheme. In some aspects, the Fc region comprises a knob-into-hole modification comprising knob substitutions of S354C and T366W, or equivalent thereof, and/or hole substitutions of Y349C, T366S, L368A, and Y407V, or equivalent thereof, and/or a half-life extension amino acid substitution comprising: a LA (M428L and N434A, or equivalent thereof, based on the EU numbering scheme) amino acid substitution, a LS (M428L and N434S, or equivalent thereof, based on the EU numbering scheme) amino acid substitution, L234F and L235E, or equivalent thereof (based on the EU numbering scheme) amino acid substitutions, a TM (L234F, L235E, and P331S, or equivalent thereof, based on the EU numbering scheme) amino acid substitution, a YTE (M252Y, S254T, and T256E, or equivalent thereof, based on the EU numbering scheme) amino acid substitution, or any combination thereof.

[1584] In some aspects, the Fc region comprises knob substitutions of S354C and T366W, or equivalent thereof, and a half-life extension amino acid substitution comprising: a LA (M428L and N434A, or equivalent thereof, based on the EU numbering scheme) amino acid substitution, a LS (M428L and N434S, or equivalent thereof, based on the EU numbering scheme) amino acid substitution. L234F and L235E, or equivalent thereof (based on the EU numbering scheme) amino acid substitutions, a TM (L234F, L235E, and P331S, or equivalent thereof, based on the EU numbering scheme) amino acid substitution, a YTE (M252Y, S254T, and T256E, or equivalent thereof, based on the EU numbering scheme) amino acid substitution, or any combination thereof.

[1585] In some aspects, the Fc region comprises hole substitutions of Y349C, T366S, L368A, and Y407V, or equivalent thereof, and a half-life extension amino acid substitution comprising: a LA (M428L and N434A, or equivalent thereof, based on the EU numbering scheme) amino acid substitution, a LS (M428L and N434S, or equivalent thereof, based on the EU numbering scheme) amino acid substitution. L234F and L235E, or equivalent thereof (based on the EU numbering scheme) amino acid substitutions, a TM (L234F, L235E, and P331S, or equivalent thereof, based on the EU numbering scheme) amino acid substitution, a YTE (M252Y, S254T, and T256E, or equivalent thereof, based on the EU numbering scheme) amino acid substitution, or any combination thereof.

[1586] In some aspects, the antigen binding polypeptides disclosed herein comprise one or more Fc effector function knockout mutation. In some aspects, the antigen binding polypeptides disclosed herein are comprised in IgG1 or IgG4 antibodies or antigen binding fragments thereof. In some aspects, the Fc effector function knockout mutation is L234A, L235A, P239A, or equivalent thereof, or a combination thereof, based on the EU numbering scheme.

[1587] In some aspects, the antigen binding polypeptides disclosed herein comprise a mutation at a glycosylation site. In some aspects, the mutation at a glycosylation site is a mutation at an N-glycosylation site. In some aspects, the antigen binding polypeptides comprise a VH comprising a mutation at a glycosylation site. In some aspects, the mutation at a glycosylation site is a mutation at an N-glycosylation site. In some aspects, the mutation at an N-glycosylation site is at amino acid N62 of the VH region or equivalent thereof. In some aspects, the mutation at an N-glycosylation site at amino acid N62 is N62Q or N62S, or equivalent thereof.

[1588] In some aspects, the antigen binding polypeptides disclosed herein, comprise one or more optional linkers. The one or more optional linkers are indicated herein as Ln, wherein n is an integer, and the integer next to each L indicates each L comprised in the antigen binding polypeptides disclosed herein. For example, if an antigen binding polypeptide disclosed herein comprises two linkers, the first linker from N-terminus to C-terminus is herein indicated as L1, and the second linker from N-terminus to C-terminus is herein indicated as L2. In some aspects, any one of the optional linkers each independently have a length of from 0 amino acids to about 50 amino acids. In some aspects, any one of the optional linkers each independently have a length of from 5 amino acids to about 40 amino acids.

[1589] In some aspects, any one of the optional linkers are non-immunogenic. In some aspects, any one of the optional linkers do not contain a consensus T cell epitope.

[1590] In some aspects, any of Ln comprises an amino acid sequence of G or A, or an amino acid sequence at least 65%, at least 70%, at least 75%, at least 80%, at least 85%, at least 90%, at least 95%, at least 99%, or 100% identical to amino acid sequences GSS or ASG, or an amino acid sequence at least 65%, at least 70%, at least 75%, at least 80%, at least 85%, at least 90%, at least 95%, at least 99%, or 100% identical to any one of SEQ ID NOs: 333-373 and 967-971. In some aspects, Ln comprises an amino acid sequence at least 65%, at least 70%, at least 75%, at least 80%, at least 85%, at least 90%, at least 95%, at least 99%, or 100% identical to any one of SEQ ID NOs: 333-345 and 967-971.

[1591] In some aspects, the antigen binding polypeptides provided herein have a structure, from amino-terminus to carboxy-terminus, represented by
[1592] VL1-L1-VH1-L2-CH1; or
[1593] VH1-L1-VL1-L2-CH1;
[1594] wherein:
[1595] VL1 is an immunoglobulin light chain variable region that specifically binds to a severe acute respiratory syndrome coronavirus 2 (SARS-CoV-2) protein;
[1596] VH1 is an immunoglobulin heavy chain variable region that specifically binds to a SARS-CoV-2 protein;
[1597] CH1 is an immunoglobulin heavy chain constant region 1; and
[1598] L1-L2 are optional amino acid linkers.

[1599] In any aspect shown herein as a structure from amino terminus to carboxy terminus, and with binding pairs selected from VL and/or VH or other structural regions such as CH1, CL, CH2, CH3, when shown without a specific linker such as L1, L2, etc., such linkers are optionally present in such structures between each designated subsequence VL, VH, etc.

[1600] In some aspects, the antigen binding polypeptides provided herein comprise a VL1 comprising a complementarity determining region (CDR) 1 having an amino acid sequence that is at least 65%, at least 70%, at least 75%, at least 80%, at least 85%, at least 90%, at least 95%, at least 99%, or 100% identical to any one of SEQ ID NOs: 1, 9, 15, 23, 30, 41, 48, 55, 58, 65, 72, 79, 86, 93, 99, 105, 112, 119, 130, 138, 145, 152, 159, 166, 172, 179, 186, 192, 199, 205, 212, 219, 226, 232, 324, 627, 640, 650, 659, 676, 687, 695, 703, 712, 770, 778, 785, 794, 801, 807, 814, 827, 836, 849, 858, 865, 878, 1045, 1050, 1055, 1060, and 1065; a CDR2 having an amino acid sequence that is at least 65%, at least 70%, at least 75%, at least 80%, at least 85%, at least 90%, at least 95%, at least 99%, or 100% identical to any one of SEQ ID NOs: 2, 31, 628, 641, 677, 1046, 1051, 1056, and 1061; or at least 65%, at least 70%, at least 75%, at least 80%, at least 85%, at least 90%, at least 95%, at least 99%, or 100% identical to any one of amino acid sequences AAS, GAS, LGS, GTN, GTN, SAS, SDS, DNT, EVT, DAS, DVT, RNS, DVS, EDS, DDS, KDS, VAS, WAS, YTS, EVS, NNN, SYN, and DAT; and a CDR3 having an amino acid sequence that is at least 65%, at least 70%, at least 75%, at least 80%, at least 85%, at least 90%, at least 95%, at least 99%, or 100% identical to any one of SEQ ID NOs: 3, 10, 16, 24, 32, 38, 42, 49, 59, 66, 73, 80, 87, 94, 100, 106, 113, 120, 126, 131, 139, 146, 153, 160, 167, 173, 180, 187, 193, 200, 206, 213, 220, 227, 233, 239, 242, 246, 249, 256, 283, 285, 287, 288, 290, 292, 294, 296, 301, 304, 306, 309, 311, 313, 316, 325, 326, 329, 642, 651, 660, 668, 678, 651, 696, 704, 713, 764, 766, 768, 771, 779, 786, 792, 795, 808, 815, 821, 830, 837, 843, 850, 856, 859, 866, 872, 879, 885, and 1066.

[1601] In some aspects, the antigen binding polypeptides provided herein comprise a VH1 comprising a CDR1 having an amino acid sequence that is at least 65%, at least 70%, at least 75%, at least 80%, at least 85%, at least 90%, at least 95%, at least 99%, or 100% identical to any one of SEQ ID NOs: 5, 12, 18, 26, 34, 44, 51, 61, 68, 75, 82, 89, 96, 102, 108, 115, 122, 133, 141, 148, 155, 162, 175, 182, 189, 195, 202, 208, 215, 222, 229, 235, 318, 629, 645, 654, 663, 671, 682, 690, 699, 707, 716, 773, 781, 788, 797, 803, 810, 817, 823, 832, 839, 845, 852, 861, 868, 874, 881, 1047, 1052, 1057, 1062, and 1067; a CDR2 having an amino acid sequence that is at least 65%, at least 70%, at least 75%, at least 80%, at least 85%, at least 90%, at least 95%, at least 99%, or 100% identical to any one of SEQ ID NOs: 6, 19, 27, 35, 45, 52, 56, 62, 69, 76, 83, 90, 109, 116, 123, 134, 142, 149, 156, 163, 169, 176, 183, 196, 209, 216, 223, 236, 273, 319, 328, 630, 646, 655, 664, 672, 683, 691, 708, 776, 782, 789, 798, 804, 811, 818, 824, 833, 840, 846, 853, 862, 869, 875, 882, 1048, 1053, 1058, 1063, and 1068; and a CDR3 having an amino acid sequence that is at least 65%, at least 70%, at least 75%, at least 80%, at least 85%, at least 90%, at least 95%, at least 99%, or 100% identical to any one of SEQ ID NOs: 7, 13, 20, 28, 36, 40, 46, 53, 63, 70, 77, 84, 91, 97, 103, 110, 117, 124, 128, 135, 143, 150, 157, 164, 170, 177, 184, 190, 197, 203, 210, 217, 224, 230, 237, 241, 244, 248, 253, 257, 259, 261, 263, 265, 267, 269, 271, 274, 276, 278, 281, 297, 320, 322, 327, 330, 332, 631, 647, 656, 665, 673, 684, 692, 700, 709, 717, 765, 767, 769, 774, 783, 790, 793, 799, 805, 812, 819, 825, 834, 841, 847, 854, 857, 863, 870, 876, 883, 886, 1049, 1054, 1059, 1064, and 1069.

[1602] In some aspects, the antigen binding polypeptides provided herein comprise a VL1 comprising a complementarity determining region (CDR) 1 having an amino acid sequence that is at least 65%, at least 70%, at least 75%, at least 80%, at least 85%, at least 90%, at least 95%, at least 99%, or 100% identical to any one of SEQ ID NOs: 1, 9, 15, 23, 30, 41, 48, 55, 58, 65, 72, 79, 86, 93, 99, 105, 112, 119, 130, 138, 145, 152, 159, 166, 172, 179, 186, 192, 199, 205, 212, 219, 226, 232, 324, 627, 640, 650, 659, 676, 687, 695, 703, 712, 770, 778, 785, 794, 801, 807, 814, 827, 836, 849, 858, 865, 878, 1045, 1050, 1055, 1060, and 1065; a CDR2 having an amino acid sequence that is at least 65%, at least 70%, at least 75%, at least 80%, at least 85%, at least 90%, at least 95%, at least 99%, or 100% identical to any one of SEQ ID NOs: 2, 31, 628, 641, 677, 1046, 1051, 1056, and 1061; or at least 65%, at least 70%, at least 75%, at least 80%, at least 85%, at least 90%, at least 95%, at least 99%, or 100% identical to any one of amino acid sequences AAS, GAS, LGS, GTN, GTN, SAS, SDS, DNT, EVT, DAS, DVT, RNS, DVS, EDS, DDS, KDS, VAS, WAS, YTS, EVS, NNN, SYN, and DAT; and a CDR3 having an amino acid sequence that is at least 65%, at least 70%, at least 75%, at least 80%, at least 85%, at least 90%, at least 95%, at least 99%, or 100% identical to any one of SEQ ID NOs: 3, 10, 16, 24, 32, 38, 42, 49, 59, 66, 73, 80, 87, 94, 100, 106, 113, 120, 126, 131, 139, 146, 153, 160, 167, 173, 180, 187, 193, 200, 206, 213, 220, 227, 233, 239, 242, 246, 249, 256, 283, 285, 287, 288, 290, 292, 294, 296, 301, 304, 306, 309, 311, 313, 316, 325, 326, 329, 642, 651, 660, 668, 678, 651, 696, 704, 713, 764, 766, 768, 771, 779, 786, 792, 795, 808, 815, 821, 830, 837, 843, 850, 856, 859, 866, 872, 879, 885, and 1066; and a VH1 comprising a CDR1 having an amino acid sequence that is at least 65%, at least 70%, at least 75%, at least 80%, at least 85%, at least 90%, at least 95%, at least 99%, or 100% identical to any one of SEQ ID NOs: 5, 12, 18, 26, 34, 44, 51, 61, 68, 75, 82, 89, 96, 102, 108, 115, 122, 133, 141, 148, 155, 162, 175, 182, 189, 195, 202, 208, 215, 222, 229, 235, 318, 629, 645, 654, 663, 671, 682, 690, 699, 707, 716, 773, 781, 788, 797, 803, 810, 817, 823, 832, 839, 845, 852, 861, 868, 874, 881, 1047, 1052, 1057, 1062, and 1067; a CDR2 having an amino acid sequence that is at least 65%, at least 70%, at least 75%, at least 80%, at least 85%, at least 90%, at least 95%, at least 99%, or 100% identical to any one of SEQ ID NOs: 6, 19, 27, 35, 45, 52, 56, 62, 69, 76, 83, 90, 109, 116, 123, 134, 142, 149, 156, 163, 169, 176, 183, 196, 209, 216, 223, 236, 273, 319, 328, 630, 646, 655, 664, 672, 683, 691, 708, 776, 782, 789, 798, 804, 811, 818, 824, 833, 840, 846, 853, 862, 869, 875, 882, 1048, 1053, 1058, 1063, and 1068; and a CDR3 having an amino acid sequence that is at least 65%, at least 70%, at least 75%, at least 80%, at least 85%, at least 90%, at least 95%, at least 99%, or 100% identical to any one of SEQ ID NOs: 7, 13, 20, 28, 36, 40, 46, 53, 63, 70, 77, 84, 91, 97, 103, 110, 117, 124, 128, 135, 143, 150, 157, 164, 170, 177, 184, 190, 197, 203, 210, 217, 224, 230, 237, 241, 244, 248, 253, 257, 259, 261, 263, 265, 267, 269, 271, 274, 276, 278, 281, 297, 320, 322, 327, 330, 332, 631, 647, 656, 665, 673, 684, 692, 700, 709, 717, 765, 767, 769, 774, 783, 790, 793, 799, 805, 812, 819, 825, 834, 841, 847, 854, 857, 863, 870, 876, 883, 886, 1049, 1054, 1059, 1064, and 1069.

[1603] In some aspects, the antigen binding polypeptides provided herein comprise a VL1 comprising an amino acid sequence that is at least 65%, at least 70%, at least 75%, at least 80%, at least 85%, at least 90%, at least 95%, at least 99%, or 100% identical to any one of SEQ ID NOs: 4, 11, 17, 25, 33, 39, 43, 50, 60, 67, 74, 81, 88, 95, 101, 107, 114, 121, 127, 132, 140, 147, 154, 161, 168, 174, 181, 188, 194, 201, 207, 214, 221, 228, 234, 240, 243, 247, 250, 251, 252, 255, 284, 286, 289, 291, 293, 295, 299, 300, 302, 303, 305, 307, 308, 310, 312, 314, 315, 317, 323, 639, 649, 658, 667, 675, 686, 694, 702, 711, 772, 780, 787, 796, 802, 809, 816, 822, 831, 838, 844, 851, 860, 867, 873, 880, and 988.

[1604] In some aspects, the antigen binding polypeptides provided herein comprise a VH1 comprising an amino acid sequence that is at least 65%, at least 70%, at least 75%, at least 80%, at least 85%, at least 90%, at least 95%, at least 99%, or 100% identical to any one of SEQ ID NOs: 8, 14, 21, 22, 29, 37, 47, 54, 57, 64, 71, 78, 85, 92, 98, 104, 111, 118, 125, 129, 136, 137, 144, 151, 158, 165, 171, 178, 185, 191, 198, 204, 211, 218, 225, 231, 238, 245, 254, 258, 260, 262, 264, 266, 268, 270, 272, 275, 277, 279, 280, 282, 298, 321, 331, 626, 644, 653, 662, 670, 681, 689, 698, 706, 715, 775, 777, 784, 791, 800, 806, 813, 820, 826, 835, 842, 848, 855, 864, 871, 877, and 884.

[1605] In some aspects, the antigen binding polypeptides provided herein comprise a VL1 comprising an amino acid sequence that is at least 65%, at least 70%, at least 75%, at least 80%, at least 85%, at least 90%, at least 95%, at least 99%, or 100% identical to any one of SEQ ID NOs: 4, 11, 17, 25, 33, 39, 43, 50, 60, 67, 74, 81, 88, 95, 101, 107, 114, 121, 127, 132, 140, 147, 154, 161, 168, 174, 181, 188, 194, 201, 207, 214, 221, 228, 234, 240, 243, 247, 250, 251, 252, 255, 284, 286, 289, 291, 293, 295, 299, 300, 302, 303, 305, 307, 308, 310, 312, 314, 315, 317, 323, 639, 649, 658, 667, 675, 686, 694, 702, 711, 772, 780, 787, 796, 802, 809, 816, 822, 831, 838, 844, 851, 860, 867, 873, 880, and 988; and a VH1 comprising an amino acid sequence that is at least 65%, at least 70%, at least 75%, at least 80%, at least 85%, at least 90%, at least 95%, at least 99%, or 100% identical to any one of SEQ ID NOs: 8, 14, 21, 22, 29, 37, 47, 54, 57, 64, 71, 78, 85, 92, 98, 104, 111, 118, 125, 129, 136, 137, 144, 151, 158, 165, 171, 178, 185, 191, 198, 204, 211, 218, 225, 231, 238, 245, 254, 258, 260, 262, 264, 266, 268, 270, 272, 275, 277, 279, 280, 282, 298, 321, 331, 626, 644, 653, 662, 670, 681, 689, 698, 706, 715, 775, 777, 784, 791, 800, 806, 813, 820, 826, 835, 842, 848, 855, 864, 871, 877, and 884.

[1606] In some aspects, the antigen binding polypeptides provided herein comprise a VL1 comprising a CDR1 having an amino acid sequence at least 65%, at least 70%, at least 75%, at least 80%, at least 85%, at least 90%, at least 95%, at least 99%, or 100% identical to SEQ ID NO: 15, a CDR2 having an amino acid sequence at least 65%, at least 70%, at least 75%, at least 80%, at least 85%, at least 90%, at least 95%, at least 99%, or 100% identical to amino acid sequence LGS, and a CDR3 having an amino acid sequence at least 65%, at least 70%, at least 75%, at least 80%, at least 85%, at least 90%, at least 95%, at least 99%, or 100% identical to SEQ ID NO: 16.

[1607] In some aspects, the antigen binding polypeptides provided herein comprise a VH1 comprising a CDR1 having an amino acid sequence at least 65%, at least 70%, at least 75%, at least 80%, at least 85%, at least 90%, at least 95%, at least 99%, or 100% identical to SEQ ID NO: 18, a CDR2 having an amino acid sequence at least 65%, at least 70%, at least 75%, at least 80%, at least 85%, at least 90%, at least 95%, at least 99%, or 100% identical to SEQ ID NO: 19, and a CDR3 having an amino acid sequence at least 65%, at least 70%, at least 75%, at least 80%, at least 85%, at least 90%, at least 95%, at least 99%, or 100% identical to SEQ ID NO: 20.

[1608] In some aspects, the antigen binding polypeptides provided herein comprise a VL1 comprising a CDR1 having an amino acid sequence at least 65%, at least 70%, at least 75%, at least 80%, at least 85%, at least 90%, at least 95%, at least 99%, or 100% identical to SEQ ID NO: 15, a CDR2 having an amino acid sequence at least 65%, at least 70%, at least 75%, at least 80%, at least 85%, at least 90%, at least 95%, at least 99%, or 100% identical to amino acid sequence LGS, and a CDR3 having an amino acid sequence at least 65%, at least 70%, at least 75%, at least 80%, at least 85%, at least 90%, at least 95%, at least 99%, or 100% identical to SEQ ID NO: 16; and a VH1 comprising a CDR1 having an amino acid sequence at least 65%, at least 70%, at least 75%, at least 80%, at least 85%, at least 90%, at least 95%, at least 99%, or 100% identical to SEQ ID NO: 18, a CDR2 having an amino acid sequence at least 65%, at least 70%, at least 75%, at least 80%, at least 85%, at least 90%, at least 95%, at least 99%, or 100% identical to SEQ ID NO: 19, and a CDR3 having an amino acid sequence at least 65%, at least 70%, at least 75%, at least 80%, at least 85%, at least 90%, at least 95%, at least 99%, or 100% identical to SEQ ID NO: 20.

[1609] In some aspects, the antigen binding polypeptides provided herein comprise a VL1 comprising an amino acid sequence that is at least 65%, at least 70%, at least 75%, at least 80%, at least 85%, at least 90%, at least 95%, at least 99%, or 100% identical to SEQ ID NO: 17.

[1610] In some aspects, the antigen binding polypeptides provided herein comprise a VH1 comprising an amino acid sequence that is at least 65%, at least 70%, at least 75%, at least 80%, at least 85%, at least 90%, at least 95%, at least 99%, or 100% identical to SEQ ID NO: 21 or 22.

[1611] In some aspects, the antigen binding polypeptides provided herein comprise a VL1 comprising an amino acid sequence that is at least 65%, at least 70%, at least 75%, at least 80%, at least 85%, at least 90%, at least 95%, at least 99%, or 100% identical to SEQ ID NO: 17; and a VH1 comprising an amino acid sequence that is at least 65%, at least 70%, at least 75%, at least 80%, at least 85%, at least 90%, at least 95%, at least 99%, or 100% identical to SEQ ID NO: 21 or 22.

[1612] In some aspects, the antigen binding polypeptides provided herein comprise a VL1 comprising a CDR1 having an amino acid sequence at least 65%, at least 70%, at least 75%, at least 80%, at least 85%, at least 90%, at least 95%, at least 99%, or 100% identical to SEQ ID NO: 9 or 1055, a CDR2 having an amino acid sequence at least 65%, at least 70%, at least 75%, at least 80%, at least 85%, at least 90%, at least 95%, at least 99%, or 100% identical to SEQ ID NO: 1056 or an amino acid sequence at least 65%, at least 70%, at least 75%, at least 80%, at least 85%, at least 90%, at least 95%, at least 99%, or 100% identical to amino acid sequence GAS, and a CDR3 having an amino acid sequence at least 65%, at least 70%, at least 75%, at least 80%, at least 85%, at least 90%, at least 95%, at least 99%, or 100% identical to SEQ ID NO: 10.

[1613] In some aspects, the antigen binding polypeptides provided herein comprise a VH1 comprising a CDR1 having an amino acid sequence at least 65%, at least 70%, at least 75%, at least 80%, at least 85%, at least 90%, at least 95%, at least 99%, or 100% identical to SEQ ID NO: 12 or 1057, a CDR2 having an amino acid sequence at least 65%, at least 70%, at least 75%, at least 80%, at least 85%, at least 90%, at least 95%, at least 99%, or 100% identical to SEQ ID NO: 6 or 1058, and a CDR3 having an amino acid sequence at least 65%, at least 70%, at least 75%, at least 80%, at least 85%, at least 90%, at least 95%, at least 99%, or 100% identical to SEQ ID NO: 13 or 1059.

[1614] In some aspects, the antigen binding polypeptides provided herein comprise a VL1 comprising a CDR1 having an amino acid sequence at least 65%, at least 70%, at least 75%, at least 80%, at least 85%, at least 90%, at least 95%, at least 99%, or 100% identical to SEQ ID NO: 9 or 1055, a CDR2 having an amino acid sequence at least 65%, at least 70%, at least 75%, at least 80%, at least 85%, at least 90%, at least 95%, at least 99%, or 100% identical to SEQ ID NO: 1056 or an amino acid sequence at least 65%, at least 70%, at least 75%, at least 80%, at least 85%, at least 90%, at least 95%, at least 99%, or 100% identical to amino acid sequence GAS, and a CDR3 having an amino acid sequence at least 65%, at least 70%, at least 75%, at least 80%, at least 85%, at least 90%, at least 95%, at least 99%, or 100% identical to SEQ ID NO: 10; and a VH1 comprising a CDR1 having an amino acid sequence at least 65%, at least 70%, at least 75%, at least 80%, at least 85%, at least 90%, at least 95%, at least 99%, or 100% identical to SEQ ID NO: 12 or 1057, a CDR2 having an amino acid sequence at least 65%, at least 70%, at least 75%, at least 80%, at least 85%, at least 90%, at least 95%, at least 99%, or 100% identical to SEQ ID NO: 6 or 1058, and a CDR3 having an amino acid sequence at least 65%, at least 70%, at least 75%, at least 80%, at least 85%, at least 90%, at least 95%, at least 99%, or 100% identical to SEQ ID NO: 13 or 1059.

[1615] In some aspects, the antigen binding polypeptides provided herein comprise a VL1 comprising an amino acid sequence that is at least 65%, at least 70%, at least 75%, at least 80%, at least 85%, at least 90%, at least 95%, at least 99%, or 100% identical to SEQ ID NO: 11.

[1616] In some aspects, the antigen binding polypeptides provided herein comprise a VH1 comprising an amino acid sequence that is at least 65%, at least 70%, at least 75%, at least 80%, at least 85%, at least 90%, at least 95%, at least 99%, or 100% identical to SEQ ID NO: 14.

[1617] In some aspects, the antigen binding polypeptides provided herein comprise a VL1 comprising an amino acid sequence that is at least 65%, at least 70%, at least 75%, at least 80%, at least 85%, at least 90%, at least 95%, at least 99%, or 100% identical to SEQ ID NO: 11; and a VH1 comprising an amino acid sequence that is at least 65%, at least 70%, at least 75%, at least 80%, at least 85%, at least 90%, at least 95%, at least 99%, or 100% identical to SEQ ID NO: 14.

[1618] In some aspects, the antigen binding polypeptides provided herein comprise a VL1 comprising a CDR1 having an amino acid sequence at least 65%, at least 70%, at least 75%, at least 80%, at least 85%, at least 90%, at least 95%, at least 99%, or 100% identical to SEQ ID NO: 72, a CDR2 having an amino acid sequence at least 65%, at least 70%, at least 75%, at least 80%, at least 85%, at least 90%, at least 95%, at least 99%, or 100% identical to amino acid sequence DNT, and a CDR3 having an amino acid sequence at least 65%, at least 70%, at least 75%, at least 80%, at least 85%, at least 90%, at least 95%, at least 99%, or 100% identical to SEQ ID NO: 73.

[1619] In some aspects, the antigen binding polypeptides provided herein comprise a VH1 comprising a CDR1 having an amino acid sequence at least 65%, at least 70%, at least 75%, at least 80%, at least 85%, at least 90%, at least 95%, at least 99%, or 100% identical to SEQ ID NO: 75, a CDR2 having an amino acid sequence at least 65%, at least 70%, at least 75%, at least 80%, at least 85%, at least 90%, at least 95%, at least 99%, or 100% identical to SEQ ID NO: 76, and a CDR3 having an amino acid sequence at least 65%, at least 70%, at least 75%, at least 80%, at least 85%, at least 90%, at least 95%, at least 99%, or 100% identical to SEQ ID NO: 77.

[1620] In some aspects, the antigen binding polypeptides provided herein comprise a VL1 comprising a CDR1 having an amino acid sequence at least 65%, at least 70%, at least 75%, at least 80%, at least 85%, at least 90%, at least 95%, at least 99%, or 100% identical to SEQ ID NO: 72, a CDR2 having an amino acid sequence at least 65%, at least 70%, at least 75%, at least 80%, at least 85%, at least 90%, at least 95%, at least 99%, or 100% identical to amino acid sequence DNT, and a CDR3 having an amino acid sequence at least 65%, at least 70%, at least 75%, at least 80%, at least 85%, at least 90%, at least 95%, at least 99%, or 100% identical to SEQ ID NO: 73; and a VH1 comprising a CDR1 having an amino acid sequence at least 65%, at least 70%, at least 75%, at least 80%, at least 85%, at least 90%, at least 95%, at least 99%, or 100% identical to SEQ ID NO: 75, a CDR2 having an amino acid sequence at least 65%, at least 70%, at least 75%, at least 80%, at least 85%, at least 90%, at least 95%, at least 99%, or 100% identical to SEQ ID NO: 76, and a CDR3 having an amino acid sequence at least 65%, at least 70%, at least 75%, at least 80%, at least 85%, at least 90%, at least 95%, at least 99%, or 100% identical to SEQ ID NO: 77.

[1621] In some aspects, the antigen binding polypeptides provided herein comprise a VL1 comprising an amino acid sequence that is at least 65%, at least 70%, at least 75%, at least 80%, at least 85%, at least 90%, at least 95%, at least 99%, or 100% identical to SEQ ID NO: 74.

[1622] In some aspects, the antigen binding polypeptides provided herein comprise a VH1 comprising an amino acid sequence that is at least 65%, at least 70%, at least 75%, at least 80%, at least 85%, at least 90%, at least 95%, at least 99%, or 100% identical to SEQ ID NO: 78.

[1623] In some aspects, the antigen binding polypeptides provided herein comprise a VL1 comprising an amino acid sequence that is at least 65%, at least 70%, at least 75%, at least 80%, at least 85%, at least 90%, at least 95%, at least 99%, or 100% identical to SEQ ID NO: 74; and a VH1 comprising an amino acid sequence that is at least 65%, at least 70%, at least 75%, at least 80%, at least 85%, at least 90%, at least 95%, at least 99%, or 100% identical to SEQ ID NO: 78.

[1624] In some aspects, the antigen binding polypeptides provided herein comprise a VL1 comprising (i) a complementarity determining region (CDR) 1 having an amino acid sequence that is at least 65%, at least 70%, at least 75%, at least 80%, at least 85%, at least 90%, at least 95%, at least 99%, or 100% identical to SEQ ID NO: 145 or 1050; (ii) a CDR2 having an amino acid sequence at least 65%, at least 70%, at least 75%, at least 80%, at least 85%, at least 90%, at least 95%, at least 99%, or 100% identical to SEQ ID NO: 1051 or an amino acid sequence that is at least 65%, at least 70%, at least 75%, at least 80%, at least 85%, at least 90%, at least 95%, at least 99%, or 100% identical to amino acid sequence AAS; and (iii) a CDR3 having an amino acid sequence that is at least 65%, at least 70%, at least 75%, at least 80%, at least 85%, at least 90%, at least 95%, at least 99%, or 100% identical to SEQ ID NO: 146 or 764.

[1625] In some aspects, the antigen binding polypeptides provided herein comprise a VH1 comprising (i) a complementarity determining region (CDR) 1 having an amino acid sequence that is at least 65%, at least 70%, at least 75%, at least 80%, at least 85%, at least 90%, at least 95%, at least 99%, or 100% identical to SEQ ID NO: 148 or 1052; (ii) a CDR2 having an amino acid sequence that is at least 65%, at least 70%, at least 75%, at least 80%, at least 85%, at least 90%, at least 95%, at least 99%, or 100% identical to SEQ ID NO: 149 or 1053; and (iii) a CDR3 having an amino acid sequence that is at least 65%, at least 70%, at least 75%, at least 80%, at least 85%, at least 90%, at least 95%, at least 99%, or 100% identical to SEQ ID NO: 150, 765, or 1054.

[1626] In some aspects, the antigen binding polypeptides provided herein comprise a VL1 comprising (i) a complementarity determining region (CDR) 1 having an amino acid sequence that is at least 65%, at least 70%, at least 75%, at least 80%, at least 85%, at least 90%, at least 95%, at least 99%, or 100% identical to SEQ ID NO: 145 or 1050; (ii) a CDR2 having an amino acid sequence at least 65%, at least 70%, at least 75%, at least 80%, at least 85%, at least 90%, at least 95%, at least 99%, or 100% identical to SEQ ID NO: 1051 or an amino acid sequence that is at least 65%, at least 70%, at least 75%, at least 80%, at least 85%, at least 90%, at least 95%, at least 99%, or 100% identical to amino acid sequence AAS; and (iii) a CDR3 having an amino acid sequence that is at least 65%, at least 70%, at least 75%, at least 80%, at least 85%, at least 90%, at least 95%, at least 99%, or 100% identical to SEQ ID NO: 146 or 764; and a VH1 comprising (iv) a complementarity determining region (CDR) 1 having an amino acid sequence that is at least 65%, at least 70%, at least 75%, at least 80%, at least 85%, at least 90%, at least 95%, at least 99%, or 100% identical to SEQ ID NO: 148 or 1052; (v) a CDR2 having an amino acid sequence that is at least 65%, at least 70%, at least 75%, at least 80%, at least 85%, at least 90%, at least 95%, at least 99%, or 100% identical to SEQ ID NO: 149 or 1053; and (vi) a CDR3 having an amino acid sequence that is at least 65%, at least 70%, at least 75%, at least 80%, at least 85%, at least 90%, at least 95%, at least 99%, or 100% identical to SEQ ID NO: 150, 765, or 1054.

[1627] In some aspects, the antigen binding polypeptides provided herein comprise a VL1 comprising an amino acid sequence that is at least 65%, at least 70%, at least 75%, at least 80%, at least 85%, at least 90%, at least 95%, at least 99%, or 100% identical to SEQ ID NO: 147.

[1628] In some aspects, the antigen binding polypeptides provided herein comprise a VH1 comprising an amino acid sequence that is at least 65%, at least 70%, at least 75%, at least 80%, at least 85%, at least 90%, at least 95%, at least 99%, or 100% identical to SEQ ID NO: 151.

[1629] In some aspects, the antigen binding polypeptides provided herein comprise (i) a VL1 comprising an amino acid sequence that is at least 65%, at least 70%, at least 75%, at least 80%, at least 85%, at least 90%, at least 95%, at least 99%, or 100% identical to SEQ ID NO: 147, and (ii) a VH1 comprising an amino acid sequence that is at least 65%, at least 70%, at least 75%, at least 80%, at least 85%, at least 90%, at least 95%, at least 99%, or 100% identical to SEQ ID NO: 151.

[1630] In some aspects, the antigen binding polypeptides disclosed herein, comprise one or more CH1, as indicated in the formulas representing the antigen binding polypeptides disclosed herein. In some aspects, the CH1 comprises an amino acid sequence at least 65%, at least 70%, at least 75%, at least 80%, at least 85%, at least 90%, at least 95%, at least 99%, or 100% identical to any one of SEQ ID NOs: 375, 634, 1070, 1071, or 1086-1091.

[1631] In some aspects, the antigen binding polypeptides provided herein further comprise an Fc region. In some aspects, the antigen binding polypeptides provided herein further comprise an Fc region at the carboxy-terminus. In some aspects, the Fc region comprises an immunoglobulin heavy chain constant region 2 (CH2) and/or an immunoglobulin heavy chain constant region 3 (CH3). In some aspects, the Fc region further comprises an immunoglobulin hinge (i.e., a hinge region). In some aspects, the hinge region is interposed between a CH1 and a CH2 (i.e., a hinge region is localized between the carboxy terminal residue of a CH1 and the N-terminal residue of a CH2). In some aspects, the hinge region comprises an amino acid sequence at least 65%, at least 70%, at least 75%, at least 80%, at least 85%, at least 90%, at least 95%, at least 99%, or 100% identical to any one of SEQ ID NOs: 635, 636, 1072, 1073, or 1074. In some aspects, the Fc region comprises a CH2 and a CH3. In some aspects, the CH2 comprises an amino acid sequence that is at least 65%, at least 70%, at least 75%, at least 80%, at least 85%, at least 90%, at least 95%, at least 99%, or 100% identical to any one of SEQ ID NOs: 1075-1078. In some aspects, the CH3 comprises an amino acid sequence that is at least 65%, at least 70%, at least 75%, at least 80%, at least 85%, at least 90%, at least 95%, at least 99%, or 100% identical to any one of SEQ ID NOs: 1079-1085. In some aspects, the Fc region comprises an amino acid sequence that is at least 65%, at least 70%, at least 75%, at least 80%, at least 85%, at least 90%, at least 95%, at least 99%, or 100% identical to any one of SEQ ID NOs: 376-380.

[1632] In some aspects, the Fc region comprises one or more amino acid substitutions. In some aspects, the one or more amino acid substitutions comprise one or more half-life extension amino acid substitutions. In some aspects, the one or more half-life extension amino acid substitutions comprise one or more of amino acid substitutions M428L, N434A, N434S, L234F, L235E, P331S, M252Y, S254T, or T256E, or equivalent thereof, based on the EU numbering scheme. In some aspects, the one or more half-life extension amino acid substitutions comprise a LA (M428L and N434A, or equivalent thereof, based on the EU numbering scheme) amino acid substitution. In some aspects, the one or more half-life extension amino acid substitutions comprise a LS (M428L and N434S, or equivalent thereof, based on the EU numbering scheme) amino acid substitution. In some aspects, the one or more half-life extension amino acid substitutions comprise L234F and L235E, or equivalent thereof (based on the EU numbering scheme) amino acid substitutions. In some aspects, the one or more half-life extension amino acid substitutions comprise a TM (L234F, L235E, and P331S, or equivalent thereof, based on the EU numbering scheme) amino acid substitution. In some aspects, the one or more half-life extension amino acid substitutions comprise a YTE (M252Y, S254T, and T256E, or equivalent thereof, based on the EU numbering scheme) amino acid substitution.

[1633] In some aspects, the Fc region comprises at least one knob-into-hole modification. In some aspects, the antigen binding polypeptides disclosed herein are comprised in IgG1 or IgG4 antibodies or antigen binding fragments thereof. In some aspects, the knob-into-hole modification comprises one or more of knob substitutions of S354C and T366W, or equivalent thereof, and/or one or more of hole substitutions of Y349C, T366S, L368A, Y407V, or equivalent thereof, or a combination thereof, based on the EU numbering scheme. In some aspects, the Fc region comprises a knob-into-hole modification comprising knob substitutions of S354C and T366W, or equivalent thereof, and/or hole substitutions of Y349C, T366S, L368A, and Y407V, or equivalent thereof, and/or a half-life extension amino acid substitution comprising: a LA (M428L and N434A, or equivalent thereof, based on the EU numbering scheme) amino acid substitution, a LS (M428L and N434S, or equivalent thereof, based on the EU numbering scheme) amino acid substitution. L234F and L235E, or equivalent thereof (based on the EU numbering scheme) amino acid substitutions, a TM (L234F, L235E, and P331S, or equivalent thereof, based on the EU numbering scheme) amino acid substitution, a YTE (M252Y, S254T, and T256E, or equivalent thereof, based on the EU numbering scheme) amino acid substitution, or any combination thereof.

[1634] In some aspects, the Fc region comprises knob substitutions of S354C and T366W, or equivalent thereof, and a half-life extension amino acid substitution comprising: a LA (M428L and N434A, or equivalent thereof, based on the EU numbering scheme) amino acid substitution, a LS (M428L and N434S, or equivalent thereof, based on the EU numbering scheme) amino acid substitution. L234F and L235E, or equivalent thereof (based on the EU numbering scheme) amino acid substitutions, a TM (L234F, L235E, and P331S, or equivalent thereof, based on the EU numbering scheme) amino acid substitution, a YTE (M252Y, S254T, and T256E, or equivalent thereof, based on the EU numbering scheme) amino acid substitution, or any combination thereof.

[1635] In some aspects, the Fc region comprises hole substitutions of Y349C, T366S, L368A and Y407V, or equivalent thereof, and a half-life extension amino acid substitution comprising: a LA (M428L and N434A, or equivalent thereof, based on the EU numbering scheme) amino acid substitution, a LS (M428L and N434S, or equivalent thereof, based on the EU numbering scheme) amino acid substitution. L234F and L235E, or equivalent thereof (based on the EU numbering scheme) amino acid substitutions, a TM (L234F, L235E, and P331S, or equivalent thereof, based on the EU numbering scheme) amino acid substitution, a YTE (M252Y, S254T, and T256E, or equivalent thereof, based on the EU numbering scheme) amino acid substitution, or any combination thereof.

[1636] In some aspects, the antigen binding polypeptides disclosed herein comprise one or more Fc effector function knockout mutation. In some aspects, the antigen binding polypeptides disclosed herein are comprised in IgG1 or IgG4 antibodies or antigen binding fragments thereof. In some aspects, the Fc effector function knockout mutation is L234A, L235A, P239A, or equivalent thereof, or a combination thereof, based on the EU numbering scheme.

[1637] In some aspects, the antigen binding polypeptides disclosed herein comprise a mutation at a glycosylation site. In some aspects, the mutation at a glycosylation site is a mutation at an N-glycosylation site. In some aspects, the antigen binding polypeptides comprise a VH comprising a mutation at a glycosylation site. In some aspects, the mutation at a glycosylation site is a mutation at an N-glycosylation site. In some aspects, the mutation at an N-glycosylation site is at amino acid N62 of the VH region or equivalent thereof. In some aspects, the mutation at an N-glycosylation site at amino acid N62 is N62Q or N62S, or equivalent thereof.

[1638] In some aspects, the antigen binding polypeptides disclosed herein, comprise one or more optional linkers. The one or more optional linkers are indicated herein as Ln, wherein n is an integer, and the integer next to each L indicates each L comprised in the antigen binding polypeptides disclosed herein. For example, if an antigen binding polypeptide disclosed herein comprises two linkers, the first linker from N-terminus to C-terminus is herein indicated as L1, and the second linker from N-terminus to C-terminus is herein indicated as L2. In some aspects, any one of the optional linkers each independently have a length of from 0 amino acids to about 50 amino acids. In some aspects, any one of the optional linkers each independently have a length of from 5 amino acids to about 40 amino acids.

[1639] In some aspects, any one of the optional linkers are non-immunogenic. In some aspects, any one of the optional linkers do not contain a consensus T cell epitope.

[1640] In some aspects, any of Ln comprises an amino acid sequence of G or A, or an amino acid sequence at least 65%, at least 70%, at least 75%, at least 80%, at least 85%, at least 90%, at least 95%, at least 99%, or 100% identical to amino acid sequence GSS or ASG, or an amino acid sequence at least 65%, at least 70%, at least 75%, at least 80%, at least 85%, at least 90%, at least 95%, at least 99%, or 100% identical to any one of SEQ ID NOs: 333-373 and 967-971. In some aspects, Ln comprises an amino acid sequence at least 65%, at least 70%, at least 75%, at least 80%, at least 85%, at least 90%, at least 95%, at least 99%, or 100% identical to any one of SEQ ID NOs: 333-345 and 967-971.

[1641] In some aspects, the antigen binding polypeptides provided herein have a structure, from amino-terminus to carboxy-terminus, represented by:
[1642] VL1-L1-VL2-L2-CH1; or
[1643] VL2-L1-VL1-L2-CH1;
[1644] wherein:
[1645] VL1 is a first immunoglobulin light chain variable region that specifically binds to a severe acute respiratory syndrome coronavirus 2 (SARS-CoV-2) protein;
[1646] VL2 is a second immunoglobulin light chain variable region that specifically binds to a SARS-CoV-2 protein;
[1647] CH1 is an immunoglobulin heavy chain constant region 1; and
[1648] L1-L2 are optional amino acid linkers.

[1649] In any aspect shown herein as a structure from amino terminus to carboxy terminus, and with binding pairs selected from VL and/or VH or other structural regions such as CH1, CL, CH2, CH3, when shown without a specific linker such as L1, L2, etc., such linkers are optionally present in such structures between each designated subsequence VL, VH, etc.

[1650] In some aspects, the antigen binding polypeptides provided herein comprise a VL1 comprising a complementarity determining region (CDR) 1 having an amino acid sequence that is at least 65%, at least 70%, at least 75%, at least 80%, at least 85%, at least 90%, at least 95%, at least 99%, or 100% identical to any one of SEQ ID NOs: 1, 9, 15, 23, 30, 41, 48, 55, 58, 65, 72, 79, 86, 93, 99, 105, 112, 119, 130, 138, 145, 152, 159, 166, 172, 179, 186, 192, 199, 205, 212, 219, 226, 232, 324, 627, 640, 650, 659, 676, 687, 695, 703, 712, 770, 778, 785, 794, 801, 807, 814, 827, 836, 849, 858, 865, 878, 1045, 1050, 1055, 1060, and 1065; a CDR2 having an amino acid sequence that is at least 65%, at least 70%, at least 75%, at least 80%, at least 85%, at least 90%, at least 95%, at least 99%, or 100% identical to any one of SEQ ID NOs: 2, 31, 628, 641, 677, 1046, 1051, 1056, and 1061; or at least 65%, at least 70%, at least 75%, at least 80%, at least 85%, at least 90%, at least 95%, at least 99%, or 100% identical to any one of amino acid sequences AAS, GAS, LGS, GTN, GTN, SAS, SDS, DNT, EVT, DAS, DVT, RNS, DVS, EDS, DDS, KDS, VAS, WAS, YTS, EVS, NNN, SYN, and DAT; and a CDR3 having an amino acid sequence that is at least 65%, at least 70%, at least 75%, at least 80%, at least 85%, at least 90%, at least 95%, at least 99%, or 100% identical to any one of SEQ ID NOs: 3, 10, 16, 24, 32, 38, 42, 49, 59, 66, 73, 80, 87, 94, 100, 106, 113, 120, 126, 131, 139, 146, 153, 160, 167, 173, 180, 187, 193, 200, 206, 213, 220, 227, 233, 239, 242, 246, 249, 256, 283, 285, 287, 288, 290, 292, 294, 296, 301, 304, 306, 309, 311, 313, 316, 325, 326, 329, 642, 651, 660, 668, 678, 651, 696, 704, 713, 764, 766, 768, 771, 779, 786, 792, 795, 808, 815, 821, 830, 837, 843, 850, 856, 859, 866, 872, 879, 885, and 1066.

[1651] In some aspects, the antigen binding polypeptides provided herein comprise a VL2 comprising a complementarity determining region (CDR) 1 having an amino acid sequence that is at least 65%, at least 70%, at least 75%, at least 80%, at least 85%, at least 90%, at least 95%, at least 99%, or 100% identical to any one of SEQ ID NOs: 1, 9, 15, 23, 30, 41, 48, 55, 58, 65, 72, 79, 86, 93, 99, 105, 112, 119, 130, 138, 145, 152, 159, 166, 172, 179, 186, 192, 199, 205, 212, 219, 226, 232, 324, 627, 640, 650, 659, 676, 687, 695, 703, 712, 770, 778, 785, 794, 801, 807, 814, 827, 836, 849, 858, 865, 878, 1045, 1050, 1055, 1060, and 1065; a CDR2 having an amino acid sequence that is at least 65%, at least 70%, at least 75%, at least 80%, at least 85%, at least 90%, at least 95%, at least 99%, or 100% identical to any one of SEQ ID NOs: 2, 31, 628, 641, 677, 1046, 1051, 1056, and 1061; or at least 65%, at least 70%, at least 75%, at least 80%, at least 85%, at least 90%, at least 95%, at least 99%, or 100% identical to any one of amino acid sequences AAS, GAS, LGS, GTN, GTN, SAS, SDS, DNT, EVT, DAS, DVT, RNS, DVS, EDS, DDS, KDS, VAS, WAS, YTS, EVS, NNN, SYN, and DAT; and a CDR3 having an amino acid sequence that is at least 65%, at least 70%, at least 75%, at least 80%, at least 85%, at least 90%, at least 95%, at least 99%, or 100% identical to any one of SEQ ID NOs: 3, 10, 16, 24, 32, 38, 42, 49, 59, 66, 73, 80, 87, 94, 100, 106, 113, 120, 126, 131, 139, 146, 153, 160, 167, 173, 180, 187, 193, 200, 206, 213, 220, 227, 233, 239, 242, 246, 249, 256, 283, 285, 287, 288, 290, 292, 294, 296, 301, 304, 306, 309, 311, 313, 316, 325, 326, 329, 642, 651, 660, 668, 678, 651, 696, 704, 713, 764, 766, 768, 771, 779, 786, 792, 795, 808, 815, 821, 830, 837, 843, 850, 856, 859, 866, 872, 879, 885, and 1066.

[1652] In some aspects, the antigen binding polypeptides provided herein comprise a VL1 comprising a complementarity determining region (CDR) 1 having an amino acid sequence that is at least 65%, at least 70%, at least 75%, at least 80%, at least 85%, at least 90%, at least 95%, at least 99%, or 100% identical to any one of SEQ ID NOs: 1, 9, 15, 23, 30, 41, 48, 55, 58, 65, 72, 79, 86, 93, 99, 105, 112, 119, 130, 138, 145, 152, 159, 166, 172, 179, 186, 192, 199, 205, 212, 219, 226, 232, 324, 627, 640, 650, 659, 676, 687, 695, 703, 712, 770, 778, 785, 794, 801, 807, 814, 827, 836, 849, 858, 865, 878, 1045, 1050, 1055, 1060, and 1065; a CDR2 having an amino acid sequence that is at least 65%, at least 70%, at least 75%, at least 80%, at least 85%, at least 90%, at least 95%, at least 99%, or 100% identical to any one of SEQ ID NOs: 2, 31.628, 641, 677, 1046, 1051, 1056, and 1061; or at least 65%, at least 70%, at least 75%, at least 80%, at least 85%, at least 90%, at least 95%, at least 99%, or 100% identical to any one of amino acid sequences AAS, GAS, LGS, GTN, GTN, SAS, SDS, DNT, EVT, DAS, DVT, RNS, DVS, EDS, DDS, KDS, VAS, WAS, YTS, EVS, NNN, SYN, and DAT; and a CDR3 having an amino acid sequence that is at least 65%, at least 70%, at least 75%, at least 80%, at least 85%, at least 90%, at least 95%, at least 99%, or 100% identical to any one of SEQ ID NOs: 3, 10, 16, 24, 32, 38, 42, 49, 59, 66, 73, 80, 87, 94, 100, 106, 113, 120, 126, 131, 139, 146, 153, 160, 167, 173, 180, 187, 193, 200, 206, 213, 220, 227, 233, 239, 242, 246, 249, 256, 283, 285, 287, 288, 290, 292, 294, 296, 301, 304, 306, 309, 311, 313, 316, 325, 326, 329, 642, 651, 660, 668, 678, 651, 696, 704, 713, 764, 766, 768, 771, 779, 786, 792, 795, 808, 815, 821, 830, 837, 843, 850, 856, 859, 866, 872, 879, 885, and 1066; and a VL2 comprising a complementarity determining region (CDR) 1 having an amino acid sequence that is at least 65%, at least 70%, at least 75%, at least 80%, at least 85%, at least 90%, at least 95%, at least 99%, or 100% identical to any one of SEQ ID NOs: 1, 9, 15, 23, 30, 41, 48, 55, 58, 65, 72, 79, 86, 93, 99, 105, 112, 119, 130, 138, 145, 152, 159, 166, 172, 179, 186, 192, 199, 205, 212, 219, 226, 232, 324, 627, 640, 650, 659, 676, 687, 695, 703, 712, 770, 778, 785, 794, 801, 807, 814, 827, 836, 849, 858, 865, 878, 1045, 1050, 1055, 1060, and 1065; a CDR2 having an amino acid sequence that is at least 65%, at least 70%, at least 75%, at least 80%, at least 85%, at least 90%, at least 95%, at least 99%, or 100% identical to any one of SEQ ID NOs: 2, 31, 628, 641, 677, 1046, 1051, 1056, and 1061; or at least 65%, at least 70%, at least 75%, at least 80%, at least 85%, at least 90%, at least 95%, at least 99%, or 100% identical to any one of amino acid sequences AAS, GAS, LGS, GTN, GTN, SAS, SDS, DNT, EVT, DAS, DVT, RNS, DVS, EDS, DDS, KDS, VAS, WAS, YTS, EVS, NNN, SYN, and DAT; and a CDR3 having an amino acid sequence that is at least 65%, at least 70%, at least 75%, at least 80%, at least 85%, at least 90%, at least 95%, at least 99%, or 100% identical to any one of SEQ ID NOs: 3, 10, 16, 24, 32, 38, 42, 49, 59, 66, 73, 80, 87, 94, 100, 106, 113, 120, 126, 131, 139, 146, 153, 160, 167, 173, 180, 187, 193, 200, 206, 213, 220, 227, 233, 239, 242, 246, 249, 256, 283, 285, 287, 288, 290, 292, 294, 296, 301, 304, 306, 309, 311, 313, 316, 325, 326, 329, 642, 651, 660, 668, 678, 651, 696, 704, 713, 764, 766, 768, 771, 779, 786, 792, 795, 808, 815, 821, 830, 837, 843, 850, 856, 859, 866, 872, 879, 885, and 1066.

[1653] In some aspects, the antigen binding polypeptides provided herein comprise a VL1 comprising an amino acid sequence that is at least 65%, at least 70%, at least 75%, at least 80%, at least 85%, at least 90%, at least 95%, at least 99%, or 100% identical to any one of SEQ ID NOs: 4, 11, 17, 25, 33, 39, 43, 50, 60, 67, 74, 81, 88, 95, 101, 107, 114, 121, 127, 132, 140, 147, 154, 161, 168, 174, 181, 188, 194, 201, 207, 214, 221, 228, 234, 240, 243, 247, 250, 251, 252, 255, 284, 286, 289, 291, 293, 295, 299, 300, 302, 303, 305, 307, 308, 310, 312, 314, 315, 317, 323, 639, 649, 658, 667, 675, 686, 694, 702, 711, 772, 780, 787, 796, 802, 809, 816, 822, 831, 838, 844, 851, 860, 867, 873, 880, and 988.

[1654] In some aspects, the antigen binding polypeptides provided herein comprise a VL2 comprising an amino acid sequence that is at least 65%, at least 70%, at least 75%, at least 80%, at least 85%, at least 90%, at least 95%, at least 99%, or 100% identical to any one of SEQ ID NOs: 4, 11, 17, 25, 33, 39, 43, 50, 60, 67, 74, 81, 88, 95, 101, 107, 114, 121, 127, 132, 140, 147, 154, 161, 168, 174, 181, 188, 194, 201, 207, 214, 221, 228, 234, 240, 243, 247, 250, 251, 252, 255, 284, 286, 289, 291, 293, 295, 299, 300, 302, 303, 305, 307, 308, 310, 312, 314, 315, 317, 323, 639, 649, 658, 667, 675, 686, 694, 702, 711, 772, 780, 787, 796, 802, 809, 816, 822, 831, 838, 844, 851, 860, 867, 873, 880, and 988.

[1655] In some aspects, the antigen binding polypeptides provided herein comprise a VL1 comprising an amino acid sequence that is at least 65%, at least 70%, at least 75%, at least 80%, at least 85%, at least 90%, at least 95%, at least 99%, or 100% identical to any one of SEQ ID NOs: 4, 11, 17, 25, 33, 39, 43, 50, 60, 67, 74, 81, 88, 95, 101, 107, 114, 121, 127, 132, 140, 147, 154, 161, 168, 174, 181, 188, 194, 201, 207, 214, 221, 228, 234, 240, 243, 247, 250, 251, 252, 255, 284, 286, 289, 291, 293, 295, 299, 300, 302, 303, 305, 307, 308, 310, 312, 314, 315, 317, 323, 639, 649, 658, 667, 675, 686, 694, 702, 711, 772, 780, 787, 796, 802, 809, 816, 822, 831, 838, 844, 851, 860, 867, 873, 880, and 988; and a VL2 comprising an amino acid sequence that is at least 65%, at least 70%, at least 75%, at least 80%, at least 85%, at least 90%, at least 95%, at least 99%, or 100% identical to any one of SEQ ID NOs: 4, 11, 17, 25, 33, 39, 43, 50, 60, 67, 74, 81, 88, 95, 101, 107, 114, 121, 127, 132, 140, 147, 154, 161, 168, 174, 181, 188, 194, 201, 207, 214, 221, 228, 234, 240, 243, 247, 250, 251, 252, 255, 284, 286, 289, 291, 293, 295, 299, 300, 302, 303, 305, 307, 308, 310, 312, 314, 315, 317, 323, 639, 649, 658, 667, 675, 686, 694, 702, 711, 772, 780, 787, 796, 802, 809, 816, 822, 831, 838, 844, 851, 860, 867, 873, 880, and 988.

[1656] In some aspects, at least one of VL1 or VL2 comprised in the antigen binding polypeptides provided herein comprises (i) a complementarity determining region (CDR) 1 having an amino acid sequence that is at least 65%, at least 70%, at least 75%, at least 80%, at least 85%, at least 90%, at least 95%, at least 99%, or 100% identical to SEQ ID NO: 145 or 1050; (ii) a CDR2 having an amino acid sequence at least 65%, at least 70%, at least 75%, at least 80%, at least 85%, at least 90%, at least 95%, at least 99%, or 100% identical to SEQ ID NO: 1051 or an amino acid sequence that is at least 65%, at least 70%, at least 75%, at least 80%, at least 85%, at least 90%, at least 95%, at least 99%, or 100% identical to amino acid sequence AAS; and (iii) a CDR3 having an amino acid sequence that is at least 65%, at least 70%, at least 75%, at least 80%, at least 85%, at least 90%, at least 95%, at least 99%, or 100% identical to SEQ ID NO: 146 or 764.

[1657] In some aspects, at least one of VL1 or VL2 comprised in the antigen binding polypeptides provided herein comprises an amino acid sequence that is at least 65%, at least 70%, at least 75%, at least 80%, at least 85%, at least 90%, at least 95%, at least 99%, or 100% identical to SEQ ID NO: 147.

[1658] In some aspects, the antigen binding polypeptides provided herein comprise a VL1 comprising (i) a complementarity determining region (CDR) 1 having an amino acid sequence that is at least 65%, at least 70%, at least 75%, at least 80%, at least 85%, at least 90%, at least 95%, at least 99%, or 100% identical to SEQ ID NO: 145 or 1050; (ii) a CDR2 having an amino acid sequence at least 65%, at least 70%, at least 75%, at least 80%, at least 85%, at least 90%, at least 95%, at least 99%, or 100% identical to SEQ ID NO: 1051 or an amino acid sequence that is at least 65%, at least 70%, at least 75%, at least 80%, at least 85%, at least 90%, at least 95%, at least 99%, or 100% identical to amino acid sequence AAS; and (iii) a CDR3 having an amino acid sequence that is at least 65%, at least 70%, at least 75%, at least 80%, at least 85%, at least 90%, at least 95%, at least 99%, or 100% identical to SEQ ID NO: 146 or 764; and a VL2 comprising (iv) a complementarity determining region (CDR) 1 having an amino acid sequence that is at least 65%, at least 70%, at least 75%, at least 80%, at least 85%, at least 90%, at least 95%, at least 99%, or 100% identical to any one of SEQ ID NOs: 1, 9, 15, 23, 30, 41, 48, 55, 58, 65, 72, 79, 86, 93, 99, 105, 112, 119, 130, 138, 145, 152, 159, 166, 172, 179, 186, 192, 199, 205, 212, 219, 226, 232, 324, 627, 640, 650, 659, 676, 687, 695, 703, 712, 770, 778, 785, 794, 801, 807, 814, 827, 836, 849, 858, 865, 878, 1045, 1050, 1055, 1060, and 1065; (v) a CDR2 having an amino acid sequence at least 65%, at least 70%, at least 75%, at least 80%, at least 85%, at least 90%, at least 95%, at least 99%, or 100% identical to any one of SEQ ID NOs: 2, 31, 628, 641, 677, 1046, 1051, 1056, and 1061; or at least 65%, at least 70%, at least 75%, at least 80%, at least 85%, at least 90%, at least 95%, at least 99%, or 100% identical to any one of amino acid sequences AAS, GAS, LGS, GTN, GTN, SAS, SDS, DNT, EVT, DAS, DVT, RNS, DVS, EDS, DDS, KDS, VAS, WAS, YTS, EVS, NNN, SYN, and DAT; and (vi) a CDR3 having an amino acid sequence at least 65%, at least 70%, at least 75%, at least 80%, at least 85%, at least 90%, at least 95%, at least 99%, or 100% identical to any one of SEQ ID NOs: 3, 10, 16, 24, 32, 38, 42, 49, 59, 66, 73, 80, 87, 94, 100, 106, 113, 120, 126, 131, 139, 146, 153, 160, 167, 173, 180, 187, 193, 200, 206, 213, 220, 227, 233, 239, 242, 246, 249, 256, 283, 285, 287, 288, 290, 292, 294, 296, 301, 304, 306, 309, 311, 313, 316, 325, 326, 329, 642, 651, 660, 668, 678, 651, 696, 704, 713, 764, 766, 768, 771, 779, 786, 792, 795, 808, 815, 821, 830, 837, 843, 850, 856, 859, 866, 872, 879, 885, and 1066.

[1659] In some aspects, the antigen binding polypeptides provided herein comprise (i) a VL1 comprising an amino acid sequence that is at least 65%, at least 70%, at least 75%, at least 80%, at least 85%, at least 90%, at least 95%, at least 99%, or 100% identical to SEQ ID NO: 147; and (ii) a VL2 comprising an amino acid sequence that is at least 65%, at least 70%, at least 75%, at least 80%, at least 85%, at least 90%, at least 95%, at least 99%, or 100% identical to any one of SEQ ID NOs: 4, 11, 17, 25, 33, 39, 43, 50, 60, 67, 74, 81, 88, 95, 101, 107, 114, 121, 127, 132, 140, 147, 154, 161, 168, 174, 181, 188, 194, 201, 207, 214, 221, 228, 234, 240, 243, 247, 250, 251, 252, 255, 284, 286, 289, 291, 293, 295, 299, 300, 302, 303, 305, 307, 308, 310, 312, 314, 315, 317, 323, 639, 649, 658, 667, 675, 686, 694, 702, 711, 772, 780, 787, 796, 802, 809, 816, 822, 831, 838, 844, 851, 860, 867, 873, 880, and 988.

[1660] In some aspects, the antigen binding polypeptides provided herein comprise a VL1 comprising (i) a complementarity determining region (CDR) 1 having an amino acid sequence that is at least 65%, at least 70%, at least 75%, at least 80%, at least 85%, at least 90%, at least 95%, at least 99%, or 100% identical to SEQ ID NO: 145 or 1050; (ii) a CDR2 having an amino acid sequence at least 65%, at least 70%, at least 75%, at least 80%, at least 85%, at least 90%, at least 95%, at least 99%, or 100% identical to SEQ ID NO: 1051 or an amino acid sequence that is at least 65%, at least 70%, at least 75%, at least 80%, at least 85%, at least 90%, at least 95%, at least 99%, or 100% identical to amino acid sequence AAS; and (iii) a CDR3 having an amino acid sequence that is at least 65%, at least 70%, at least 75%, at least 80%, at least 85%, at least 90%, at least 95%, at least 99%, or 100% identical to SEQ ID NO: 146 or 764; and a VL2 comprising (iv) a complementarity determining region (CDR) 1 having an amino acid sequence that is at least 65%, at least 70%, at least 75%, at least 80%, at least 85%, at least 90%, at least 95%, at least 99%, or 100% identical to any one of SEQ ID NOs: 1, 9, 15, 23, 30, 65, 72, 145, 152, 324, 627, 138, 172, 1045, 1050, 1055, 1060, and 1065; (v) a CDR2 having an amino acid sequence at least 65%, at least 70%, at least 75%, at least 80%, at least 85%, at least 90%, at least 95%, at least 99%, or 100% identical to any one of SEQ ID NOs: 2, 31, 628, 1046, 1051, 1056, and 1061, or at least 65%, at least 70%, at least 75%, at least 80%, at least 85%, at least 90%, at least 95%, at least 99%, or 100% identical to any one of amino acid sequences GAS, LGS, GTN, SAS, SDS, AAS, DAS, and DNT; and (vi) a CDR3 having an amino acid sequence at least 65%, at least 70%, at least 75%, at least 80%, at least 85%, at least 90%, at least 95%, at least 99%, or 100% identical to any one of SEQ ID NOs: 3, 10, 16, 24, 32, 38, 66, 73, 146, 153, 325, 326, 764, 766, 139, 856, 173, 792, and 1066.

[1661] In some aspects, the antigen binding polypeptides provided herein comprise (i) a VL1 comprising an amino acid sequence that is at least 65%, at least 70%, at least 75%, at least 80%, at least 85%, at least 90%, at least 95%, at least 99%, or 100% identical to SEQ ID NO: 147; and (ii) a VL2 comprising an amino acid sequence that is at least 65%, at least 70%, at least 75%, at least 80%, at least 85%, at least 90%, at least 95%, at least 99%, or 100% identical to any one of SEQ ID NOs: 4, 11, 17, 25, 33, 39, 67, 74, 147, 154, 140, and 174.

[1662] In some aspects, the antigen binding polypeptides disclosed herein, comprise one or more CH1, as indicated in the formulas representing the antigen binding polypeptides disclosed herein. In some aspects, the CH1 comprises an amino acid sequence at least 65%, at least 70%, at least 75%, at least 80%, at least 85%, at least 90%, at least 95%, at least 99%, or 100% identical to any one of SEQ ID NOs: 375, 634, 1070, 1071, or 1086-1091.

[1663] In some aspects, the antigen binding polypeptides provided herein further comprise an Fc region. In some aspects, the antigen binding polypeptides provided herein further comprise an Fc region at the carboxy-terminus. In some aspects, the Fc region comprises an immunoglobulin heavy chain constant region 2 (CH2) and/or an immunoglobulin heavy chain constant region 3 (CH3). In some aspects, the Fc region further comprises an immunoglobulin hinge (i.e., a hinge region). In some aspects, the hinge region is interposed between a CH1 and a CH2 (i.e., a hinge region is localized between the carboxy terminal residue of a CH1 and the N-terminal residue of a CH2). In some aspects, the hinge region comprises an amino acid sequence at least 65%, at least 70%, at least 75%, at least 80%, at least 85%, at least 90%, at least 95%, at least 99%, or 100% identical to any one of SEQ ID NOs: 635, 636, 1072, 1073, or 1074. In some aspects, the Fc region comprises a CH2 and a CH3. In some aspects, the CH2 comprises an amino acid sequence that is at least 65%, at least 70%, at least 75%, at least 80%, at least 85%, at least 90%, at least 95%, at least 99%, or 100% identical to any one of SEQ ID NOs: 1075-1078. In some aspects, the CH3 comprises an amino acid sequence that is at least 65%, at least 70%, at least 75%, at least 80%, at least 85%, at least 90%, at least 95%, at least 99%, or 100% identical to any one of SEQ ID NOs: 1079-1085. In some aspects, the Fc region comprises an amino acid sequence that is at least 65%, at least 70%, at least 75%, at least 80%, at least 85%, at least 90%, at least 95%, at least 99%, or 100% identical to any one of SEQ ID NOs: 376-380.

[1664] In some aspects, the Fc region comprises one or more amino acid substitutions. In some aspects, the one or more amino acid substitutions comprise one or more half-life extension amino acid substitutions. In some aspects, the one or more half-life extension amino acid substitutions comprise one or more of amino acid substitutions M428L, N434A, N434S, L234F, L235E, P331S, M252Y, S254T, or T256E, or equivalent thereof, based on the EU numbering scheme. In some aspects, the one or more half-life extension amino acid substitutions comprise a LA (M428L and N434A, or equivalent thereof, based on the EU numbering scheme) amino acid substitution. In some aspects, the one or more half-life extension amino acid substitutions comprise a LS (M428L and N434S, or equivalent thereof, based on the EU numbering scheme) amino acid substitution. In some aspects, the one or more half-life extension amino acid substitutions comprise L234F and L235E, or equivalent thereof (based on the EU numbering scheme) amino acid substitutions. In some aspects, the one or more half-life extension amino acid substitutions comprise a TM (L234F, L235E, and P331S, or equivalent thereof, based on the EU numbering scheme) amino acid substitution. In some aspects, the one or more half-life extension amino acid substitutions comprise a YTE (M252Y, S254T, and T256E, or equivalent thereof, based on the EU numbering scheme) amino acid substitution.

[1665] In some aspects, the Fc region comprises at least one knob-into-hole modification. In some aspects, the antigen binding polypeptides disclosed herein are comprised in IgG1 or IgG4 antibodies or antigen binding fragments thereof. In some aspects, the knob-into-hole modification comprises one or more of knob substitutions of S354C and T366W, or equivalent thereof, and/or one or more of hole substitutions of Y349C, T366S, L368A, Y407V, or equivalent thereof, or a combination thereof, based on the EU numbering scheme. In some aspects, the Fc region comprises a knob-into-hole modification comprising knob substitutions of S354C and T366W, or equivalent thereof, and/or hole substitutions of Y349C, T366S, L368A, and Y407V, or equivalent thereof, and/or a half-life extension amino acid substitution comprising: a LA (M428L and N434A, or equivalent thereof, based on the EU numbering scheme) amino acid substitution, a LS (M428L and N434S, or equivalent thereof, based on the EU numbering scheme) amino acid substitution, L234F and L235E, or equivalent thereof (based on the EU numbering scheme) amino acid substitutions, a TM (L234F, L235E, and P331S, or equivalent thereof, based on the EU numbering scheme) amino acid substitution, a YTE (M252Y, S254T, and T256E, or equivalent thereof, based on the EU numbering scheme) amino acid substitution, or any combination thereof.

[1666] In some aspects, the Fc region comprises knob substitutions of S354C and T366W, or equivalent thereof, and a half-life extension amino acid substitution comprising: a LA (M428L and N434A, or equivalent thereof, based on the EU numbering scheme) amino acid substitution, a LS (M428L and N434S, or equivalent thereof, based on the EU numbering scheme) amino acid substitution. L234F and L235E, or equivalent thereof (based on the EU numbering scheme) amino acid substitutions, a TM (L234F, L235E, and P331S, or equivalent thereof, based on the EU numbering scheme) amino acid substitution, a YTE (M252Y, S254T, and T256E, or equivalent thereof, based on the EU numbering scheme) amino acid substitution, or any combination thereof.

[1667] In some aspects, the Fc region comprises hole substitutions of Y349C, T366S, L368A, and Y407V, or equivalent thereof, and a half-life extension amino acid substitution comprising: a LA (M428L and N434A, or equivalent thereof, based on the EU numbering scheme) amino acid substitution, a LS (M428L and N434S, or equivalent thereof, based on the EU numbering scheme) amino acid substitution. L234F and L235E, or equivalent thereof (based on the EU numbering scheme) amino acid substitutions, a TM (L234F, L235E, and P331S, or equivalent thereof, based on the EU numbering scheme) amino acid substitution, a YTE (M252Y, S254T, and T256E, or equivalent thereof, based on the EU numbering scheme) amino acid substitution, or any combination thereof.

[1668] In some aspects, the antigen binding polypeptides disclosed herein comprise one or more Fc effector function knockout mutation. In some aspects, the antigen binding polypeptides disclosed herein are comprised in IgG1 or IgG4 antibodies or antigen binding fragments thereof. In some aspects, the Fc effector function knockout mutation is L234A, L235A, P239A, or equivalent thereof, or a combination thereof, based on the EU numbering scheme.

[1669] In some aspects, the antigen binding polypeptides disclosed herein comprise a mutation at a glycosylation site. In some aspects, the mutation at a glycosylation site is a mutation at an N-glycosylation site. In some aspects, the antigen binding polypeptide comprise a VH comprising a mutation at a glycosylation site. In some aspects, the mutation at a glycosylation site is a mutation at an N-glycosylation site. In some aspects, the mutation at an N-glycosylation site is at amino acid N62 of the VH region or equivalent thereof. In some aspects, the mutation at an N-glycosylation site at amino acid N62 is N62Q or N62S, or equivalent thereof.

[1670] In some aspects, the antigen binding polypeptides disclosed herein, comprise one or more optional linkers. The one or more optional linkers are indicated herein as Ln, wherein n is an integer, and the integer next to each L indicates each L comprised in the antigen binding polypeptides disclosed herein. For example, if an antigen binding polypeptide disclosed herein comprises two linkers, the first linker from N-terminus to C-terminus is herein indicated as L1, and the second linker from N-terminus to C-terminus is herein indicated as L2. In some aspects, any one of the optional linkers each independently have a length of from 0 amino acids to about 50 amino acids. In some aspects, any one of the optional linkers each independently have a length of from 5 amino acids to about 40 amino acids.

[1671] In some aspects, any one of the optional linkers are non-immunogenic. In some aspects, any one of the optional linkers do not contain a consensus T cell epitope.

[1672] In some aspects, any of Ln comprises an amino acid sequence of G or A, or an amino acid sequence at least 65%, at least 70%, at least 75%, at least 80%, at least 85%, at least 90%, at least 95%, at least 99%, or 100% identical to amino acid sequence GSS or ASG, or an amino acid sequence at least 65%, at least 70%, at least 75%, at least 80%, at least 85%, at least 90%, at least 95%, at least 99%, or 100% identical to any one of SEQ ID NOs: 333-373 and 967-971. In some aspects, Ln comprises an amino acid sequence at least 65%, at least 70%, at least 75%, at least 80%, at least 85%, at least 90%, at least 95%, at least 99%, or 100% identical to any one of SEQ ID NOs: 333-345 and 967-971.

[1673] In some aspects, the antigen binding polypeptides provided herein have a structure, from amino-terminus to carboxy-terminus, represented by:
[1674] VH1-L1-VH2-L2-CL; or
[1675] VH2-L1-VH1-L2-CL;
[1676] wherein:
[1677] VH1 is a first immunoglobulin heavy chain variable region that specifically binds to a severe acute respiratory syndrome coronavirus 2 (SARS-CoV-2) protein;
[1678] VH2 is a second immunoglobulin heavy chain variable region that specifically binds to a SARS-CoV-2 protein
[1679] CL is an immunoglobulin light chain constant region; and
[1680] L1-L2 are optional amino acid linkers.

[1681] In any aspect shown herein as a structure from amino terminus to carboxy terminus, and with binding pairs selected from VL and/or VH or other structural regions such as CH1, CL, CH2, CH3, when shown without a specific linker such as L1, L2, etc., such linkers are optionally present in such structures between each designated subsequence VL, VH, etc.

[1682] In some aspects, the antigen binding polypeptides provided herein comprise a VH1 comprising a CDR1 having an amino acid sequence that is at least 65%, at least 70%, at least 75%, at least 80%, at least 85%, at least 90%, at least 95%, at least 99%, or 100% identical to any one of SEQ ID NOs: 5, 12, 18, 26, 34, 44, 51, 61, 68, 75, 82, 89, 96, 102, 108, 115, 122, 133, 141, 148, 155, 162, 175, 182, 189, 195, 202, 208, 215, 222, 229, 235, 318, 629, 645, 654, 663, 671, 682, 690, 699, 707, 716, 773, 781, 788, 797, 803, 810, 817, 823, 832, 839, 845, 852, 861, 868, 874, 881, 1047, 1052, 1057, 1062, and 1067; a CDR2 having an amino acid sequence that is at least 65%, at least 70%, at least 75%, at least 80%, at least 85%, at least 90%, at least 95%, at least 99%, or 100% identical to any one of SEQ ID NOs: 6, 19, 27, 35, 45, 52, 56, 62, 69, 76, 83, 90, 109, 116, 123, 134, 142, 149, 156, 163, 169, 176, 183, 196, 209, 216, 223, 236, 273, 319, 328, 630, 646, 655, 664, 672, 683, 691, 708, 776, 782, 789, 798, 804, 811, 818, 824, 833, 840, 846, 853, 862, 869, 875, 882, 1048, 1053, 1058, 1063, and 1068; a CDR3 having an amino acid sequence that is at least 65%, at least 70%, at least 75%, at least 80%, at least 85%, at least 90%, at least 95%, at least 99%, or 100% identical to any one of SEQ ID NOs: 7, 13, 20, 28, 36, 40, 46, 53, 63, 70, 77, 84, 91, 97, 103, 110, 117, 124, 128, 135, 143, 150, 157, 164, 170, 177, 184, 190, 197, 203, 210, 217, 224, 230, 237, 241, 244, 248, 253, 257, 259, 261, 263, 265, 267, 269, 271, 274, 276, 278, 281, 297, 320, 322, 327, 330, 332, 631, 647, 656, 665, 673, 684, 692, 700, 709, 717, 765, 767, 769, 774, 783, 790, 793, 799, 805, 812, 819, 825, 834, 841, 847, 854, 857, 863, 870, 876, 883, 886, 1049, 1054, 1059, 1064, and 1069.

[1683] In some aspects, the antigen binding polypeptides provided herein comprise a VH2 comprising a CDR1 having an amino acid sequence that is at least 65%, at least 70%, at least 75%, at least 80%, at least 85%, at least 90%, at least 95%, at least 99%, or 100% identical to any one of SEQ ID NOs: 5, 12, 18, 26, 34, 44, 51, 61, 68, 75, 82, 89, 96, 102, 108, 115, 122, 133, 141, 148, 155, 162, 175, 182, 189, 195, 202, 208, 215, 222, 229, 235, 318, 629, 645, 654, 663, 671, 682, 690, 699, 707, 716, 773, 781, 788, 797, 803, 810, 817, 823, 832, 839, 845, 852, 861, 868, 874, 881, 1047, 1052, 1057, 1062, and 1067; a CDR2 having an amino acid sequence that is at least 65%, at least 70%, at least 75%, at least 80%, at least 85%, at least 90%, at least 95%, at least 99%, or 100% identical to any one of SEQ ID NOs: 6, 19, 27, 35, 45, 52, 56, 62, 69, 76, 83, 90, 109, 116, 123, 134, 142, 149, 156, 163, 169, 176, 183, 196, 209, 216, 223, 236, 273, 319, 328, 630, 646, 655, 664, 672, 683, 691, 708, 776, 782, 789, 798, 804, 811, 818, 824, 833, 840, 846, 853, 862, 869, 875, 882, 1048, 1053, 1058, 1063, and 1068; a CDR3 having an amino acid sequence that is at least 65%, at least 70%, at least 75%, at least 80%, at least 85%, at least 90%, at least 95%, at least 99%, or 100% identical to any one of SEQ ID NOs: 7, 13, 20, 28, 36, 40, 46, 53, 63, 70, 77, 84, 91, 97, 103, 110, 117, 124, 128, 135, 143, 150, 157, 164, 170, 177, 184, 190, 197, 203, 210, 217, 224, 230, 237, 241, 244, 248, 253, 257, 259, 261, 263, 265, 267, 269, 271, 274, 276, 278, 281, 297, 320, 322, 327, 330, 332, 631, 647, 656, 665, 673, 684, 692, 700, 709, 717, 765, 767, 769, 774, 783, 790, 793, 799, 805, 812, 819, 825, 834, 841, 847, 854, 857, 863, 870, 876, 883, 886, 1049, 1054, 1059, 1064, and 1069.

[1684] In some aspects, the antigen binding polypeptides provided herein comprise a VH1 comprising a CDR1 having an amino acid sequence that is at least 65%, at least 70%, at least 75%, at least 80%, at least 85%, at least 90%, at least 95%, at least 99%, or 100% identical to any one of SEQ ID NOs: 5, 12, 18, 26, 34, 44, 51, 61, 68, 75, 82, 89, 96, 102, 108, 115, 122, 133, 141, 148, 155, 162, 175, 182, 189, 195, 202, 208, 215, 222, 229, 235, 318, 629, 645, 654, 663, 671, 682, 690, 699, 707, 716, 773, 781, 788, 797, 803, 810, 817, 823, 832, 839, 845, 852, 861, 868, 874, 881, 1047, 1052, 1057, 1062, and 1067; a CDR2 having an amino acid sequence that is at least 65%, at least 70%, at least 75%, at least 80%, at least 85%, at least 90%, at least 95%, at least 99%, or 100% identical to any one of SEQ ID NOs: 6, 19, 27, 35, 45, 52, 56, 62, 69, 76, 83, 90, 109, 116, 123, 134, 142, 149, 156, 163, 169, 176, 183, 196, 209, 216, 223, 236, 273, 319, 328, 630, 646, 655, 664, 672, 683, 691, 708, 776, 782, 789, 798, 804, 811, 818, 824, 833, 840, 846, 853, 862, 869, 875, 882, 1048, 1053, 1058, 1063, and 1068; a CDR3 having an amino acid sequence that is at least 65%, at least 70%, at least 75%, at least 80%, at least 85%, at least 90%, at least 95%, at least 99%, or 100% identical to any one of SEQ ID NOs: 7, 13, 20, 28, 36, 40, 46, 53, 63, 70, 77, 84, 91, 97, 103, 110, 117, 124, 128, 135, 143, 150, 157, 164, 170, 177, 184, 190, 197, 203, 210, 217, 224, 230, 237, 241, 244, 248, 253, 257, 259, 261, 263, 265, 267, 269, 271, 274, 276, 278, 281, 297, 320, 322, 327, 330, 332, 631, 647, 656, 665, 673, 684, 692, 700, 709, 717, 765, 767, 769, 774, 783, 790, 793, 799, 805, 812, 819, 825, 834, 841, 847, 854, 857, 863, 870, 876, 883, 886, 1049, 1054, 1059, 1064, and 1069; and a VH2 comprising a CDR1 having an amino acid sequence that is at least 65%, at least 70%, at least 75%, at least 80%, at least 85%, at least 90%, at least 95%, at least 99%, or 100% identical to any one of SEQ ID NOs: 5, 12, 18, 26, 34, 44, 51, 61, 68, 75, 82, 89, 96, 102, 108, 115, 122, 133, 141, 148, 155, 162, 175, 182, 189, 195, 202, 208, 215, 222, 229, 235, 318, 629, 645, 654, 663, 671, 682, 690, 699, 707, 716, 773, 781, 788, 797, 803, 810, 817, 823, 832, 839, 845, 852, 861, 868, 874, 881, 1047, 1052, 1057, 1062, and 1067; a CDR2 having an amino acid sequence that is at least 65%, at least 70%, at least 75%, at least 80%, at least 85%, at least 90%, at least 95%, at least 99%, or 100% identical to any one of SEQ ID NOs: 6, 19, 27, 35, 45, 52, 56, 62, 69, 76, 83, 90, 109, 116, 123, 134, 142, 149, 156, 163, 169, 176, 183, 196, 209, 216, 223, 236, 273, 319, 328, 630, 646, 655, 664, 672, 683, 691, 708, 776, 782, 789, 798, 804, 811, 818, 824, 833, 840, 846, 853, 862, 869, 875, 882, 1048, 1053, 1058, 1063, and 1068; a CDR3 having an amino acid sequence that is at least 65%, at least 70%, at least 75%, at least 80%, at least 85%, at least 90%, at least 95%, at least 99%, or 100% identical to any one of SEQ ID NOs: 7, 13, 20, 28, 36, 40, 46, 53, 63, 70, 77, 84, 91, 97, 103, 110, 117, 124, 128, 135, 143, 150, 157, 164, 170, 177, 184, 190, 197, 203, 210, 217, 224, 230, 237, 241, 244, 248, 253, 257, 259, 261, 263, 265, 267, 269, 271, 274, 276, 278, 281, 297, 320, 322, 327, 330, 332, 631, 647, 656, 665, 673, 684, 692, 700, 709, 717, 765, 767, 769, 774, 783, 790, 793, 799, 805, 812, 819, 825, 834, 841, 847, 854, 857, 863, 870, 876, 883, 886, 1049, 1054, 1059, 1064, and 1069.

[1685] In some aspects, the antigen binding polypeptides provided herein comprise a VH1 comprising an amino acid sequence that is at least 65%, at least 70%, at least 75%, at least 80%, at least 85%, at least 90%, at least 95%, at least 99%, or 100% identical to any one of SEQ ID NOs: 8, 14, 21, 22, 29, 37, 47, 54, 57, 64, 71, 78, 85, 92, 98, 104, 111, 118, 125, 129, 136, 137, 144, 151, 158, 165, 171, 178, 185, 191, 198, 204, 211, 218, 225, 231, 238, 245, 254, 258, 260, 262, 264, 266, 268, 270, 272, 275, 277, 279, 280, 282, 298, 321, 331, 626, 644, 653, 662, 670, 681, 689, 698, 706, 715, 775, 777, 784, 791, 800, 806, 813, 820, 826, 835, 842, 848, 855, 864, 871, 877, and 884.

[1686] In some aspects, the antigen binding polypeptides provided herein comprise a VH2 comprising an amino acid sequence that is at least 65%, at least 70%, at least 75%, at least 80%, at least 85%, at least 90%, at least 95%, at least 99%, or 100% identical to any one of SEQ ID NOs: 8, 14, 21, 22, 29, 37, 47, 54, 57, 64, 71, 78, 85, 92, 98, 104, 111, 118, 125, 129, 136, 137, 144, 151, 158, 165, 171, 178, 185, 191, 198, 204, 211, 218, 225, 231, 238, 245, 254, 258, 260, 262, 264, 266, 268, 270, 272, 275, 277, 279, 280, 282, 298, 321, 331, 626, 644, 653, 662, 670, 681, 689, 698, 706, 715, 775, 777, 784, 791, 800, 806, 813, 820, 826, 835, 842, 848, 855, 864, 871, 877, and 884.

[1687] In some aspects, the antigen binding polypeptides provided herein comprise a VH1 comprising an amino acid sequence that is at least 65%, at least 70%, at least 75%, at least 80%, at least 85%, at least 90%, at least 95%, at least 99%, or 100% identical to any one of SEQ ID NOs: 8, 14, 21, 22, 29, 37, 47, 54, 57, 64, 71, 78, 85, 92, 98, 104, 111, 118, 125, 129, 136, 137, 144, 151, 158, 165, 171, 178, 185, 191, 198, 204, 211, 218, 225, 231, 238, 245, 254, 258, 260, 262, 264, 266, 268, 270, 272, 275, 277, 279, 280, 282, 298, 321, 331, 626, 644, 653, 662, 670, 681, 689, 698, 706, 715, 775, 777, 784, 791, 800, 806, 813, 820, 826, 835, 842, 848, 855, 864, 871, 877, and 884; and a VH2 comprising an amino acid sequence that is at least 65%, at least 70%, at least 75%, at least 80%, at least 85%, at least 90%, at least 95%, at least 99%, or 100% identical to any one of SEQ ID NOs: 8, 14, 21, 22, 29, 37, 47, 54, 57, 64, 71, 78, 85, 92, 98, 104, 111, 118, 125, 129, 136, 137, 144, 151, 158, 165, 171, 178, 185, 191, 198, 204, 211, 218, 225, 231, 238, 245, 254, 258, 260, 262, 264, 266, 268, 270, 272, 275, 277, 279, 280, 282, 298, 321, 331, 626, 644, 653, 662, 670, 681, 689, 698, 706, 715, 775, 777, 784, 791, 800, 806, 813, 820, 826, 835, 842, 848, 855, 864, 871, 877, and 884.

[1688] In some aspects, at least one of VH1 or VH2 comprised in the antigen binding polypeptides provided herein comprises (i) a complementarity determining region (CDR) 1 having an amino acid sequence that is at least 65%, at least 70%, at least 75%, at least 80%, at least 85%, at least 90%, at least 95%, at least 99%, or 100% identical to SEQ ID NO: 148 or 1052; (ii) a CDR2 having an amino acid sequence that is at least 65%, at least 70%, at least 75%, at least 80%, at least 85%, at least 90%, at least 95%, at least 99%, or 100% identical to SEQ ID NO: 149 or 1053; and (iii) a CDR3 having an amino acid sequence that is at least 65%, at least 70%, at least 75%, at least 80%, at least 85%, at least 90%, at least 95%, at least 99%, or 100% identical to SEQ ID NO: 150, 765, or 1054.

[1689] In some aspects, at least one of VH1 or VH2 comprised in the antigen binding polypeptides provided herein comprises an amino acid sequence that is at least 65%, at least 70%, at least 75%, at least 80%, at least 85%, at least 90%, at least 95%, at least 99%, or 100% identical to SEQ ID NO: 151.

[1690] In some aspects, the antigen binding polypeptides provided herein comprise a VH1 comprising (i) a complementarity determining region (CDR) 1 having an amino acid sequence that is at least 65%, at least 70%, at least 75%, at least 80%, at least 85%, at least 90%, at least 95%, at least 99%, or 100% identical to SEQ ID NO: 148 or 1052; (ii) a CDR2 having an amino acid sequence that is at least 65%, at least 70%, at least 75%, at least 80%, at least 85%, at least 90%, at least 95%, at least 99%, or 100% identical to SEQ ID NO: 149 or 1053; and (iii) a CDR3 having an amino acid sequence that is at least 65%, at least 70%, at least 75%, at least 80%, at least 85%, at least 90%, at least 95%, at least 99%, or 100% identical to SEQ ID NO: 150, 765, or 1054; and a VH2 comprising (iv) a CDR1 having an amino acid sequence at least 65%, at least 70%, at least 75%, at least 80%, at least 85%, at least 90%, at least 95%, at least 99%, or 100% identical to any one of SEQ ID NOs: 5, 12, 18, 26, 34, 44, 51, 61, 68, 75, 82, 89, 96, 102, 108, 115, 122, 133, 141, 148, 155, 162, 175, 182, 189, 195, 202, 208, 215, 222, 229, 235, 318, 629, 645, 654, 663, 671, 682, 690, 699, 707, 716, 773, 781, 788, 797, 803, 810, 817, 823, 832, 839, 845, 852, 861, 868, 874, 881, 1047, 1052, 1057, 1062, and 1067; (v) a CDR2 having an amino acid sequence at least 65%, at least 70%, at least 75%, at least 80%, at least 85%, at least 90%, at least 95%, at least 99%, or 100% identical to any one of SEQ ID NOs: 6, 19, 27, 35, 45, 52, 56, 62, 69, 76, 83, 90, 109, 116, 123, 134, 142, 149, 156, 163, 169, 176, 183, 196, 209, 216, 223, 236, 273, 319, 328, 630, 646, 655, 664, 672, 683, 691, 708, 776, 782, 789, 798, 804, 811, 818, 824, 833, 840, 846, 853, 862, 869, 875, 882, 1048, 1053, 1058, 1063, and 1068; and (vi) a CDR3 having an amino acid sequence at least 65%, at least 70%, at least 75%, at least 80%, at least 85%, at least 90%, at least 95%, at least 99%, or 100% identical to any one of SEQ ID NOs: 7, 13, 20, 28, 36, 40, 46, 53, 63, 70, 77, 84, 91, 97, 103, 110, 117, 124, 128, 135, 143, 150, 157, 164, 170, 177, 184, 190, 197, 203, 210, 217, 224, 230, 237, 241, 244, 248, 253, 257, 259, 261, 263, 265, 267, 269, 271, 274, 276, 278, 281, 297, 320, 322, 327, 330, 332, 631, 647, 656, 665, 673, 684, 692, 700, 709, 717, 765, 767, 769, 774, 783, 790, 793, 799, 805, 812, 819, 825, 834, 841, 847, 854, 857, 863, 870, 876, 883, 886, 1049, 1054, 1059, 1064, and 1069.

[1691] In some aspects, the antigen binding polypeptides provided herein comprise (i) a VH1 comprising an amino acid sequence that is at least 65%, at least 70%, at least 75%, at least 80%, at least 85%, at least 90%, at least 95%, at least 99%, or 100% identical to SEQ ID NO: 151; and (ii) a VH2 comprising an amino acid sequence that is at least 65%, at least 70%, at least 75%, at least 80%, at least 85%, at least 90%, at least 95%, at least 99%, or 100% identical to any one of SEQ ID NOs: 8, 14, 21, 22, 29, 37, 47, 54, 57, 64, 71, 78, 85, 92, 98, 104, 111, 118, 125, 129, 136, 137, 144, 151, 158, 165, 171, 178, 185, 191, 198, 204, 211, 218, 225, 231, 238, 245, 254, 258, 260, 262, 264, 266, 268, 270, 272, 275, 277, 279, 280, 282, 298, 321, 331, 626, 644, 653, 662, 670, 681, 689, 698, 706, 715, 775, 777, 784, 791, 800, 806, 813, 820, 826, 835, 842, 848, 855, 864, 871, 877, and 884.

[1692] In some aspects, the antigen binding polypeptides provided herein comprise a VH1 comprising (i) a complementarity determining region (CDR) 1 having an amino acid sequence that is at least 65%, at least 70%, at least 75%, at least 80%, at least 85%, at least 90%, at least 95%, at least 99%, or 100% identical to SEQ ID NO: 148 or 1052; (ii) a CDR2 having an amino acid sequence that is at least 65%, at least 70%, at least 75%, at least 80%, at least 85%, at least 90%, at least 95%, at least 99%, or 100% identical to SEQ ID NO: 149 or 1053; and (iii) a CDR3 having an amino acid sequence that is at least 65%, at least 70%, at least 75%, at least 80%, at least 85%, at least 90%, at least 95%, at least 99%, or 100% identical to SEQ ID NO: 150, 765, or 1054; and a VH2 comprising (iv) a CDR1 having an amino acid sequence at least 65%, at least 70%, at least 75%, at least 80%, at least 85%, at least 90%, at least 95%, at least 99%, or 100% identical to any one of SEQ ID NOs: 5, 12, 18, 26, 34, 68, 75, 148, 155, 629, 141, 175, 1047, 1052, 1057, 1062, and 1067; (v) a CDR2 having an amino acid sequence at least 65%, at least 70%, at least 75%, at least 80%, at least 85%, at least 90%, at least 95%, at least 99%, or 100% identical to any one of SEQ ID NOs: 6, 19, 27, 35, 69, 76, 149, 156, 630, 142, 176, 1048, 1053, 1058, 1063, and 1068; and (vi) a CDR3 having an amino acid sequence at least 65%, at least 70%, at least 75%, at least 80%, at least 85%, at least 90%, at least 95%, at least 99%, or 100% identical to any one of SEQ ID NOs: 7, 13, 20, 28, 36, 40, 70, 77, 327, 150, 157, 332, 631, 765, 767, 143, 857, 177, 793, 1049, 1054, 1059, 1064, and 1069.

[1693] In some aspects, the antigen binding polypeptides provided herein comprise (i) a VH1 comprising an amino acid sequence that is at least 65%, at least 70%, at least 75%, at least 80%, at least 85%, at least 90%, at least 95%, at least 99%, or 100% identical to SEQ ID NO: 151; and (ii) a VH2 comprising an amino acid sequence that is at least 65%, at least 70%, at least 75%, at least 80%, at least 85%, at least 90%, at least 95%, at least 99%, or 100% identical to any one of SEQ ID NOs: 8, 14, 21, 22, 29, 37, 71, 78, 151, 158, 626, 144, and 178.

[1694] In some aspects, the antigen binding polypeptides disclosed herein, comprise one or more CL, as indicated in the formulas representing the antigen binding polypeptides disclosed herein. In some aspects, the CL comprises an amino acid sequence at least 65%, at least 70%, at least 75%, at least 80%, at least 85%, at least 90%, at least 95%, at least 99%, or 100% identical to any one of SEQ ID NOs: 374, 637, or 1092-1095.

[1695] In some aspects, the antigen binding polypeptides provided herein further comprise an Fc region. In some aspects, the antigen binding polypeptides provided herein further comprise an Fc region at the carboxy-terminus. In some aspects, the Fc region comprises an immunoglobulin heavy chain constant region 2 (CH2) and/or an immunoglobulin heavy chain constant region 3 (CH3). In some aspects, the Fc region further comprises an immunoglobulin hinge (i.e., a hinge region). In some aspects, the hinge region is interposed between a CH1 and a CH2 (i.e., a hinge region is localized between the carboxy terminal residue of a CH1 and the N-terminal residue of a CH2). In some aspects, the hinge region comprises an amino acid sequence at least 65%, at least 70%, at least 75%, at least 80%, at least 85%, at least 90%, at least 95%, at least 99%, or 100% identical to any one of SEQ ID NOs: 635, 636, 1072, 1073, or 1074. In some aspects, the Fc region comprises a CH2 and a CH3. In some aspects, the CH2 comprises an amino acid sequence that is at least 65%, at least 70%, at least 75%, at least 80%, at least 85%, at least 90%, at least 95%, at least 99%, or 100% identical to any one of SEQ ID NOs: 1075-1078. In some aspects, the CH3 comprises an amino acid sequence that is at least 65%, at least 70%, at least 75%, at least 80%, at least 85%, at least 90%, at least 95%, at least 99%, or 100% identical to any one of SEQ ID NOs: 1079-1085. In some aspects, the Fc region comprises an amino acid sequence that is at least 65%, at least 70%, at least 75%, at least 80%, at least 85%, at least 90%, at least 95%, at least 99%, or 100% identical to any one of SEQ ID NOs: 376-380.

[1696] In some aspects, the Fc region comprises one or more amino acid substitutions. In some aspects, the one or more amino acid substitutions comprise one or more half-life extension amino acid substitutions. In some aspects, the one or more half-life extension amino acid substitutions comprise one or more of amino acid substitutions M428L, N434A, N434S, L234F, L235E, P331S, M252Y, S254T, and T256E, or equivalent thereof, based on the EU numbering scheme. In some aspects, the one or more half-life extension amino acid substitutions comprise a LA (M428L and N434A, or equivalent thereof, based on the EU numbering scheme) amino acid substitution. In some aspects, the one or more half-life extension amino acid substitutions comprise a LS (M428L and N434S, or equivalent thereof, based on the EU numbering scheme) amino acid substitution. In some aspects, the one or more half-life extension amino acid substitutions comprise L234F and L235E, or equivalent thereof (based on the EU numbering scheme) amino acid substitutions. In some aspects, the one or more half-life extension amino acid substitutions comprise a TM (L234F, L235E, and P331S, or equivalent thereof, based on the EU numbering scheme) amino acid substitution. In some aspects, the one or more half-life extension amino acid substitutions comprise a YTE (M252Y, S254T, and T256E, or equivalent thereof, based on the EU numbering scheme) amino acid substitution.

[1697] In some aspects, the Fc region comprises at least one knob-into-hole modification. In some aspects, the antigen binding polypeptides disclosed herein are comprised in IgG1 or IgG4 antibodies or antigen binding fragments thereof. In some aspects, the knob-into-hole modification comprises one or more of knob substitutions of S354C and T366W, or equivalent thereof, and/or one or more of hole substitutions of Y349C, T366S, L368A, Y407V, or equivalent thereof, or a combination thereof, based on the EU numbering scheme. In some aspects, the Fc region comprises a knob-into-hole modification comprising knob substitutions of S354C and T366W, or equivalent thereof, and/or hole substitutions of Y349C, T366S, L368A and Y407V, or equivalent thereof, and/or a half-life extension amino acid substitution comprising: a LA (M428L and N434A, or equivalent thereof, based on the EU numbering scheme) amino acid substitution, a LS (M428L and N434S, or equivalent thereof, based on the EU numbering scheme) amino acid substitution, L234F and L235E, or equivalent thereof (based on the EU numbering scheme) amino acid substitutions, a TM (L234F, L235E, and P331S, or equivalent thereof, based on the EU numbering scheme) amino acid substitution, a YTE (M252Y, S254T, and T256E, or equivalent thereof, based on the EU numbering scheme) amino acid substitution, or any combination thereof.

[1698] In some aspects, the Fc region comprises knob substitutions of S354C and T366W, or equivalent thereof, and a half-life extension amino acid substitution comprising: a LA (M428L and N434A, or equivalent thereof, based on the EU numbering scheme) amino acid substitution, a LS (M428L and N434S, or equivalent thereof, based on the EU numbering scheme) amino acid substitution. L234F and L235E, or equivalent thereof (based on the EU numbering scheme) amino acid substitutions, a TM (L234F, L235E, and P331S, or equivalent thereof, based on the EU numbering scheme) amino acid substitution, a YTE (M252Y, S254T, and T256E, or equivalent thereof, based on the EU numbering scheme) amino acid substitution, or any combination thereof.

[1699] In some aspects, the Fc region comprises hole substitutions of Y349C, T366S, L368A, and Y407V, or equivalent thereof, and a half-life extension amino acid substitution comprising: a LA (M428L and N434A, or equivalent thereof, based on the EU numbering scheme) amino acid substitution, a LS (M428L and N434S, or equivalent thereof, based on the EU numbering scheme) amino acid substitution. L234F and L235E, or equivalent thereof (based on the EU numbering scheme) amino acid substitutions, a TM (L234F, L235E, and P331S, or equivalent thereof, based on the EU numbering scheme) amino acid substitution, a YTE (M252Y, S254T, and T256E, or equivalent thereof, based on the EU numbering scheme) amino acid substitution, or any combination thereof.

[1700] In some aspects, the antigen binding polypeptides disclosed herein comprise one or more Fc effector function knockout mutation. In some aspects, the antigen binding polypeptides disclosed herein are comprised in IgG1 or IgG4 antibodies or antigen binding fragments thereof. In some aspects, the Fc effector function knockout mutation is L234A, L235A, P239A, or equivalent thereof, or a combination thereof, based on the EU numbering scheme.

[1701] In some aspects, the antigen binding polypeptides disclosed herein comprise a mutation at a glycosylation site. In some aspects, the mutation at a glycosylation site is a mutation at an N-glycosylation site. In some aspects, the antigen binding polypeptides comprise a VH comprising a mutation at a glycosylation site. In some aspects, the mutation at a glycosylation site is a mutation at an N-glycosylation site. In some aspects, the mutation at an N-glycosylation site is at amino acid N62 of the VH region or equivalent thereof. In some aspects, the mutation at an N-glycosylation site at amino acid N62 is N62Q or N62S, or equivalent thereof.

[1702] In some aspects, the antigen binding polypeptides disclosed herein, comprise one or more optional linkers. The one or more optional linkers are indicated herein as Ln, wherein n is an integer, and the integer next to each L indicates each L comprised in the antigen binding polypeptides disclosed herein. For example, if an antigen binding polypeptide disclosed herein comprises two linkers, the first linker from N-terminus to C-terminus is herein indicated as L1, and the second linker from N-terminus to C-terminus is herein indicated as L2. In some aspects, any one of the optional linkers each independently have a length of from 0 amino acids to about 50 amino acids. In some aspects, any one of the optional linkers each independently have a length of from 5 amino acids to about 40 amino acids.

[1703] In some aspects, any one of the optional linkers are non-immunogenic. In some aspects, any one of the optional linkers do not contain a consensus T cell epitope.

[1704] In some aspects, any of Ln comprises an amino acid sequence of G or A, or an amino acid sequence at least 65%, at least 70%, at least 75%, at least 80%, at least 85%, at least 90%, at least 95%, at least 99%, or 100% identical to amino acid sequence GSS or ASG, or an amino acid sequence at least 65%, at least 70%, at least 75%, at least 80%, at least 85%, at least 90%, at least 95%, at least 99%, or 100% identical to any one of SEQ ID NOs: 333-373 and 967-971. In some aspects, Ln comprises an amino acid sequence at least 65%, at least 70%, at least 75%, at least 80%, at least 85%, at least 90%, at least 95%, at least 99%, or 100% identical to any one of SEQ ID NOs: 333-345 and 967-971.

[1705] In some aspects, the antigen binding polypeptides provided herein have a structure, from amino-terminus to carboxy-terminus, represented by:
[1706] VL1-L1-VL2-L2-VL3-L3-CH1;
[1707] VL1-L1-VL3-L2-VL2-L3-CH1;
[1708] VL2-L1-VL1-L2-VL3-L3-CH1;
[1709] VL2-L1-VL3-L2-VL1-L3-CH1;
[1710] VL3-L1-VL1-L2-VL2-L3-CH1; or
[1711] VL3-L1-VL2-L2-VL1-L3-CH1;
[1712] wherein:
[1713] VL1 is a first immunoglobulin light chain variable region that specifically binds to a severe acute respiratory syndrome coronavirus 2 (SARS-CoV-2) protein;
[1714] VL2 is a second immunoglobulin light chain variable region that specifically binds to a SARS-CoV-2 protein;
[1715] VL3 is a third immunoglobulin light chain variable region that specifically binds to a SARS-CoV-2 protein;
[1716] CH1 is an immunoglobulin heavy chain constant region 1; and
[1717] L1-L3 are optional amino acid linkers.

[1718] In any aspect shown herein as a structure from amino terminus to carboxy terminus, and with binding pairs selected from VL and/or VH or other structural regions such as CH1, CL, CH2, CH3, when shown without a specific linker such as L1, L2, etc., such linkers are optionally present in such structures between each designated subsequence VL, VH, etc.

[1719] In some aspects, the antigen binding polypeptides provided herein comprise a VL1 comprising a complementarity determining region (CDR) 1 having an amino acid sequence that is at least 65%, at least 70%, at least 75%, at least 80%, at least 85%, at least 90%, at least 95%, at least 99%, or 100% identical to any one of SEQ ID NOs: 1, 9, 15, 23, 30, 41, 48, 55, 58, 65, 72, 79, 86, 93, 99, 105, 112, 119, 130, 138, 145, 152, 159, 166, 172, 179, 186, 192, 199, 205, 212, 219, 226, 232, 324, 627, 640, 650, 659, 676, 687, 695, 703, 712, 770, 778, 785, 794, 801, 807, 814, 827, 836, 849, 858, 865, 878, 1045, 1050, 1055, 1060, and 1065; a CDR2 having an amino acid sequence that is at least 65%, at least 70%, at least 75%, at least 80%, at least 85%, at least 90%, at least 95%, at least 99%, or 100% identical to any one of SEQ ID NOs: 2, 31, 628, 641, 677, 1046, 1051, 1056, and 1061; or at least 65%, at least 70%, at least 75%, at least 80%, at least 85%, at least 90%, at least 95%, at least 99%, or 100% identical to any one of amino acid sequences AAS, GAS, LGS, GTN, GTN, SAS, SDS, DNT, EVT, DAS, DVT, RNS, DVS, EDS, DDS, KDS, VAS, WAS, YTS, EVS, NNN, SYN, and DAT: a CDR3 having an amino acid sequence that is at least 65%, at least 70%, at least 75%, at least 80%, at least 85%, at least 90%, at least 95%, at least 99%, or 100% identical to any one of SEQ ID NOs: 3, 10, 16, 24, 32, 38, 42, 49, 59, 66, 73, 80, 87, 94, 100, 106, 113, 120, 126, 131, 139, 146, 153, 160, 167, 173, 180, 187, 193, 200, 206, 213, 220, 227, 233, 239, 242, 246, 249, 256, 283, 285, 287, 288, 290, 292, 294, 296, 301, 304, 306, 309, 311, 313, 316, 325, 326, 329, 642, 651, 660, 668, 678, 651, 696, 704, 713, 764, 766, 768, 771, 779, 786, 792, 795, 808, 815, 821, 830, 837, 843, 850, 856, 859, 866, 872, 879, 885, and 1066.

[1720] In some aspects, the antigen binding polypeptides provided herein comprise a VL2 comprising a complementarity determining region (CDR) 1 having an amino acid sequence that is at least 65%, at least 70%, at least 75%, at least 80%, at least 85%, at least 90%, at least 95%, at least 99%, or 100% identical to any one of SEQ ID NOs: 1, 9, 15, 23, 30, 41, 48, 55, 58, 65, 72, 79, 86, 93, 99, 105, 112, 119, 130, 138, 145, 152, 159, 166, 172, 179, 186, 192, 199, 205, 212, 219, 226, 232, 324, 627, 640, 650, 659, 676, 687, 695, 703, 712, 770, 778, 785, 794, 801, 807, 814, 827, 836, 849, 858, 865, 878, 1045, 1050, 1055, 1060, and 1065; a CDR2 having an amino acid sequence that is at least 65%, at least 70%, at least 75%, at least 80%, at least 85%, at least 90%, at least 95%, at least 99%, or 100% identical to any one of SEQ ID NOs: 2, 31, 628, 641, 677, 1046, 1051, 1056, and 1061; or at least 65%, at least 70%, at least 75%, at least 80%, at least 85%, at least 90%, at least 95%, at least 99%, or 100% identical to any one of amino acid sequences AAS, GAS, LGS, GTN, GTN, SAS, SDS, DNT, EVT, DAS, DVT, RNS, DVS, EDS, DDS, KDS, VAS, WAS, YTS, EVS, NNN, SYN, and DAT: a CDR3 having an amino acid sequence that is at least 65%, at least 70%, at least 75%, at least 80%, at least 85%, at least 90%, at least 95%, at least 99%, or 100% identical to any one of SEQ ID NOs: 3, 10, 16, 24, 32, 38, 42, 49, 59, 66, 73, 80, 87, 94, 100, 106, 113, 120, 126, 131, 139, 146, 153, 160, 167, 173, 180, 187, 193, 200, 206, 213, 220, 227, 233, 239, 242, 246, 249, 256, 283, 285, 287, 288, 290, 292, 294, 296, 301, 304, 306, 309, 311, 313, 316, 325, 326, 329, 642, 651, 660, 668, 678, 651, 696, 704, 713, 764, 766, 768, 771, 779, 786, 792, 795, 808, 815, 821, 830, 837, 843, 850, 856, 859, 866, 872, 879, 885, and 1066.

[1721] In some aspects, the antigen binding polypeptides provided herein comprise a VL3 comprising a complementarity determining region (CDR) 1 having an amino acid sequence that is at least 65%, at least 70%, at least 75%, at least 80%, at least 85%, at least 90%, at least 95%, at least 99%, or 100% identical to any one of SEQ ID NOs: 1, 9, 15, 23, 30, 41, 48, 55, 58, 65, 72, 79, 86, 93, 99, 105, 112, 119, 130, 138, 145, 152, 159, 166, 172, 179, 186, 192, 199, 205, 212, 219, 226, 232, 324, 627, 640, 650, 659, 676, 687, 695, 703, 712, 770, 778, 785, 794, 801, 807, 814, 827, 836, 849, 858, 865, 878, 1045, 1050, 1055, 1060, and 1065; a CDR2 having an amino acid sequence that is at least 65%, at least 70%, at least 75%, at least 80%, at least 85%, at least 90%, at least 95%, at least 99%, or 100% identical to any one of SEQ ID NOs: 2, 31.628, 641, 677, 1046, 1051, 1056, and 1061; or at least 65%, at least 70%, at least 75%, at least 80%, at least 85%, at least 90%, at least 95%, at least 99%, or 100% identical to any one of amino acid sequences AAS, GAS, LGS, GTN, GTN, SAS, SDS, DNT, EVT, DAS, DVT, RNS, DVS, EDS, DDS, KDS, VAS, WAS, YTS, EVS, NNN, SYN, and DAT: a CDR3 having an amino acid sequence that is at least 65%, at least 70%, at least 75%, at least 80%, at least 85%, at least 90%, at least 95%, at least 99%, or 100% identical to any one of SEQ ID NOs: 3, 10, 16, 24, 32, 38, 42, 49, 59, 66, 73, 80, 87, 94, 100, 106, 113, 120, 126, 131, 139, 146, 153, 160, 167, 173, 180, 187, 193, 200, 206, 213, 220, 227, 233, 239, 242, 246, 249, 256, 283, 285, 287, 288, 290, 292, 294, 296, 301, 304, 306, 309, 311, 313, 316, 325, 326, 329, 642, 651, 660, 668, 678, 651, 696, 704, 713, 764, 766, 768, 771, 779, 786, 792, 795, 808, 815, 821, 830, 837, 843, 850, 856, 859, 866, 872, 879, 885, and 1066.

[1722] In some aspects, the antigen binding polypeptides provided herein comprise a VL1 comprising a complementarity determining region (CDR) 1 having an amino acid sequence that is at least 65%, at least 70%, at least 75%, at least 80%, at least 85%, at least 90%, at least 95%, at least 99%, or 100% identical to any one of SEQ ID NOs: 1, 9, 15, 23, 30, 41, 48, 55, 58, 65, 72, 79, 86, 93, 99, 105, 112, 119, 130, 138, 145, 152, 159, 166, 172, 179, 186, 192, 199, 205, 212, 219, 226, 232, 324, 627, 640, 650, 659, 676, 687, 695, 703, 712, 770, 778, 785, 794, 801, 807, 814, 827, 836, 849, 858, 865, 878, 1045, 1050, 1055, 1060, and 1065; a CDR2 having an amino acid sequence that is at least 65%, at least 70%, at least 75%, at least 80%, at least 85%, at least 90%, at least 95%, at least 99%, or 100% identical to any one of SEQ ID NOs: 2, 31, 628.641, 677, 1046, 1051, 1056, and 1061; or at least 65%, at least 70%, at least 75%, at least 80%, at least 85%, at least 90%, at least 95%, at least 99%, or 100% identical to any one of amino acid sequences AAS, GAS, LGS, GTN, GTN, SAS, SDS, DNT, EVT, DAS, DVT, RNS, DVS, EDS, DDS, KDS, VAS, WAS, YTS, EVS, NNN, SYN, and DAT: a CDR3 having an amino acid sequence that is at least 65%, at least 70%, at least 75%, at least 80%, at least 85%, at least 90%, at least 95%, at least 99%, or 100% identical to any one of SEQ ID NOs: 3, 10, 16, 24, 32, 38, 42, 49, 59, 66, 73, 80, 87, 94, 100, 106, 113, 120, 126, 131, 139, 146, 153, 160, 167, 173, 180, 187, 193, 200, 206, 213, 220, 227, 233, 239, 242, 246, 249, 256, 283, 285, 287, 288, 290, 292, 294, 296, 301, 304, 306, 309, 311, 313, 316, 325, 326, 329, 642, 651, 660, 668, 678, 651, 696, 704, 713, 764, 766, 768, 771, 779, 786, 792, 795, 808, 815, 821, 830, 837, 843, 850, 856, 859, 866, 872, 879, 885, and 1066; a VL2 comprising a complementarity determining region (CDR) 1 having an amino acid sequence that is at least 65%, at least 70%, at least 75%, at least 80%, at least 85%, at least 90%, at least 95%, at least 99%, or 100% identical to any one of SEQ ID NOs: 1, 9, 15, 23, 30, 41, 48, 55, 58, 65, 72, 79, 86, 93, 99, 105, 112, 119, 130, 138, 145, 152, 159, 166, 172, 179, 186, 192, 199, 205, 212, 219, 226, 232, 324, 627, 640, 650, 659, 676, 687, 695, 703, 712, 770, 778, 785, 794, 801, 807, 814, 827, 836, 849, 858, 865, 878, 1045, 1050, 1055, 1060, and 1065; a CDR2 having an amino acid sequence that is at least 65%, at least 70%, at least 75%, at least 80%, at least 85%, at least 90%, at least 95%, at least 99%, or 100% identical to any one of SEQ ID NOs: 2, 31, 628, 641, 677, 1046, 1051, 1056, and 1061; or at least 65%, at least 70%, at least 75%, at least 80%, at least 85%, at least 90%, at least 95%, at least 99%, or 100% identical to any one of amino acid sequences AAS, GAS, LGS, GTN, GTN, SAS, SDS, DNT, EVT, DAS, DVT, RNS, DVS, EDS, DDS, KDS, VAS, WAS, YTS, EVS, NNN, SYN, and DAT: a CDR3 having an amino acid sequence that is at least 65%, at least 70%, at least 75%, at least 80%, at least 85%, at least 90%, at least 95%, at least 99%, or 100% identical to any one of SEQ ID NOs: 3, 10, 16, 24, 32, 38, 42, 49, 59, 66, 73, 80, 87, 94, 100, 106, 113, 120, 126, 131, 139, 146, 153, 160, 167, 173, 180, 187, 193, 200, 206, 213, 220, 227, 233, 239, 242, 246, 249, 256, 283, 285, 287, 288, 290, 292, 294, 296, 301, 304, 306, 309, 311, 313, 316, 325, 326, 329, 642, 651, 660, 668, 678, 651, 696, 704, 713, 764, 766, 768, 771, 779, 786, 792, 795, 808, 815, 821, 830, 837, 843, 850, 856, 859, 866, 872, 879, 885, and 1066; and a VL3 comprising a complementarity determining region (CDR) 1 having an amino acid sequence that is at least 65%, at least 70%, at least 75%, at least 80%, at least 85%, at least 90%, at least 95%, at least 99%, or 100% identical to any one of SEQ ID NOs: 1, 9, 15, 23, 30, 41, 48, 55, 58, 65, 72, 79, 86, 93, 99, 105, 112, 119, 130, 138, 145, 152, 159, 166, 172, 179, 186, 192, 199, 205, 212, 219, 226, 232, 324, 627, 640, 650, 659, 676, 687, 695, 703, 712, 770, 778, 785, 794, 801, 807, 814, 827, 836, 849, 858, 865, 878, 1045, 1050, 1055, 1060, and 1065; a CDR2 having an amino acid sequence that is at least 65%, at least 70%, at least 75%, at least 80%, at least 85%, at least 90%, at least 95%, at least 99%, or 100% identical to any one of SEQ ID NOs: 2, 31, 628, 641, 677, 1046, 1051, 1056, and 1061; or at least 65%, at least 70%, at least 75%, at least 80%, at least 85%, at least 90%, at least 95%, at least 99%, or 100% identical to any one of amino acid sequences AAS, GAS, LGS, GTN, GTN, SAS, SDS, DNT, EVT, DAS, DVT, RNS, DVS, EDS, DDS, KDS, VAS, WAS, YTS, EVS, NNN, SYN, and DAT: a CDR3 having an amino acid sequence that is at least 65%, at least 70%, at least 75%, at least 80%, at least 85%, at least 90%, at least 95%, at least 99%, or 100% identical to any one of SEQ ID NOs: 3, 10, 16, 24, 32, 38, 42, 49, 59, 66, 73, 80, 87, 94, 100, 106, 113, 120, 126, 131, 139, 146, 153, 160, 167, 173, 180, 187, 193, 200, 206, 213, 220, 227, 233, 239, 242, 246, 249, 256, 283, 285, 287, 288, 290, 292, 294, 296, 301, 304, 306, 309, 311, 313, 316, 325, 326, 329, 642, 651, 660, 668, 678, 651, 696, 704, 713, 764, 766, 768, 771, 779, 786, 792, 795, 808, 815, 821, 830, 837, 843, 850, 856, 859, 866, 872, 879, 885, and 1066.

[1723] In some aspects, the antigen binding polypeptides provided herein comprise a VL1 comprising an amino acid sequence that is at least 65%, at least 70%, at least 75%, at least 80%, at least 85%, at least 90%, at least 95%, at least 99%, or 100% identical to any one of SEQ ID NOs: 4, 11, 17, 25, 33, 39, 43, 50, 60, 67, 74, 81, 88, 95, 101, 107, 114, 121, 127, 132, 140, 147, 154, 161, 168, 174, 181, 188, 194, 201, 207, 214, 221, 228, 234, 240, 243, 247, 250, 251, 252, 255, 284, 286, 289, 291, 293, 295, 299, 300, 302, 303, 305, 307, 308, 310, 312, 314, 315, 317, 323, 639, 649, 658, 667, 675, 686, 694, 702, 711, 772, 780, 787, 796, 802, 809, 816, 822, 831, 838, 844, 851, 860, 867, 873, 880, and 988.

[1724] In some aspects, the antigen binding polypeptides provided herein comprise a VL2 comprising an amino acid sequence that is at least 65%, at least 70%, at least 75%, at least 80%, at least 85%, at least 90%, at least 95%, at least 99%, or 100% identical to any one of SEQ ID NOs: 4, 11, 17, 25, 33, 39, 43, 50, 60, 67, 74, 81, 88, 95, 101, 107, 114, 121, 127, 132, 140, 147, 154, 161, 168, 174, 181, 188, 194, 201, 207, 214, 221, 228, 234, 240, 243, 247, 250, 251, 252, 255, 284, 286, 289, 291, 293, 295, 299, 300, 302, 303, 305, 307, 308, 310, 312, 314, 315, 317, 323, 639, 649, 658, 667, 675, 686, 694, 702, 711, 772, 780, 787, 796, 802, 809, 816, 822, 831, 838, 844, 851, 860, 867, 873, 880, and 988.

[1725] In some aspects, the antigen binding polypeptides provided herein comprise a VL3 comprising an amino acid sequence that is at least 65%, at least 70%, at least 75%, at least 80%, at least 85%, at least 90%, at least 95%, at least 99%, or 100% identical to any one of SEQ ID NOs: 4, 11, 17, 25, 33, 39, 43, 50, 60, 67, 74, 81, 88, 95, 101, 107, 114, 121, 127, 132, 140, 147, 154, 161, 168, 174, 181, 188, 194, 201, 207, 214, 221, 228, 234, 240, 243, 247, 250, 251, 252, 255, 284, 286, 289, 291, 293, 295, 299, 300, 302, 303, 305, 307, 308, 310, 312, 314, 315, 317, 323, 639, 649, 658, 667, 675, 686, 694, 702, 711, 772, 780, 787, 796, 802, 809, 816, 822, 831, 838, 844, 851, 860, 867, 873, 880, and 988.

[1726] In some aspects, the antigen binding polypeptides provided herein comprise a VL1 comprising an amino acid sequence that is at least 65%, at least 70%, at least 75%, at least 80%, at least 85%, at least 90%, at least 95%, at least 99%, or 100% identical to any one of SEQ ID NOs: 4, 11, 17, 25, 33, 39, 43, 50, 60, 67, 74, 81, 88, 95, 101, 107, 114, 121, 127, 132, 140, 147, 154, 161, 168, 174, 181, 188, 194, 201, 207, 214, 221, 228, 234, 240, 243, 247, 250, 251, 252, 255, 284, 286, 289, 291, 293, 295, 299, 300, 302, 303, 305, 307, 308, 310, 312, 314, 315, 317, 323, 639, 649, 658, 667, 675, 686, 694, 702, 711, 772, 780, 787, 796, 802, 809, 816, 822, 831, 838, 844, 851, 860, 867, 873, 880, and 988; a VL2 comprising an amino acid sequence that is at least 65%, at least 70%, at least 75%, at least 80%, at least 85%, at least 90%, at least 95%, at least 99%, or 100% identical to any one of SEQ ID NOs: 4, 11, 17, 25, 33, 39, 43, 50, 60, 67, 74, 81, 88, 95, 101, 107, 114, 121, 127, 132, 140, 147, 154, 161, 168, 174, 181, 188, 194, 201, 207, 214, 221, 228, 234, 240, 243, 247, 250, 251, 252, 255, 284, 286, 289, 291, 293, 295, 299, 300, 302, 303, 305, 307, 308, 310, 312, 314, 315, 317, 323, 639, 649, 658, 667, 675, 686, 694, 702, 711, 772, 780, 787, 796, 802, 809, 816, 822, 831, 838, 844, 851, 860, 867, 873, 880, and 988; and a VL3 comprising an amino acid sequence that is at least 65%, at least 70%, at least 75%, at least 80%, at least 85%, at least 90%, at least 95%, at least 99%, or 100% identical to any one of SEQ ID NOs: 4, 11, 17, 25, 33, 39, 43, 50, 60, 67, 74, 81, 88, 95, 101, 107, 114, 121, 127, 132, 140, 147, 154, 161, 168, 174, 181, 188, 194, 201, 207, 214, 221, 228, 234, 240, 243, 247, 250, 251, 252, 255, 284, 286, 289, 291, 293, 295, 299, 300, 302, 303, 305, 307, 308, 310, 312, 314, 315, 317, 323, 639, 649, 658, 667, 675, 686, 694, 702, 711, 772, 780, 787, 796, 802, 809, 816, 822, 831, 838, 844, 851, 860, 867, 873, 880, and 988.

[1727] In some aspects, at least one of VL1, VL2, or VL3 comprised in the antigen binding polypeptides provided herein comprises (i) a complementarity determining region (CDR) 1 having an amino acid sequence that is at least 65%, at least 70%, at least 75%, at least 80%, at least 85%, at least 90%, at least 95%, at least 99%, or 100% identical to SEQ ID NO: 145 or 1050; (ii) a CDR2 having an amino acid sequence at least 65%, at least 70%, at least 75%, at least 80%, at least 85%, at least 90%, at least 95%, at least 99%, or 100% identical to SEQ ID NO: 1051 or an amino acid sequence that is at least 65%, at least 70%, at least 75%, at least 80%, at least 85%, at least 90%, at least 95%, at least 99%, or 100% identical to amino acid sequence AAS; and (iii) a CDR3 having an amino acid sequence that is at least 65%, at least 70%, at least 75%, at least 80%, at least 85%, at least 90%, at least 95%, at least 99%, or 100% identical to SEQ ID NO: 146 or 764.

[1728] In some aspects, at least one of VL1, VL2, or VL3 comprised in the antigen binding polypeptides provided herein comprises an amino acid sequence that is at least 65%, at least 70%, at least 75%, at least 80%, at least 85%, at least 90%, at least 95%, at least 99%, or 100% identical to SEQ ID NO: 147.

[1729] In some aspects, the antigen binding polypeptides provided herein comprise a VL1 comprising (i) a complementarity determining region (CDR) 1 having an amino acid sequence that is at least 65%, at least 70%, at least 75%, at least 80%, at least 85%, at least 90%, at least 95%, at least 99%, or 100% identical to SEQ ID NO: 145 or 1050; (ii) a CDR2 having an amino acid sequence at least 65%, at least 70%, at least 75%, at least 80%, at least 85%, at least 90%, at least 95%, at least 99%, or 100% identical to SEQ ID NO: 1051 or an amino acid sequence that is at least 65%, at least 70%, at least 75%, at least 80%, at least 85%, at least 90%, at least 95%, at least 99%, or 100% identical to amino acid sequence AAS; and (iii) a CDR3 having an amino acid sequence that is at least 65%, at least 70%, at least 75%, at least 80%, at least 85%, at least 90%, at least 95%, at least 99%, or 100% identical to SEQ ID NO: 146 or 764; a VL2 comprising (iv) a complementarity determining region (CDR) 1 having an amino acid sequence that is at least 65%, at least 70%, at least 75%, at least 80%, at least 85%, at least 90%, at least 95%, at least 99%, or 100% identical to any one of SEQ ID NOs: 1, 9, 15, 23, 30, 41, 48, 55, 58, 65, 72, 79, 86, 93, 99, 105, 112, 119, 130, 138, 145, 152, 159, 166, 172, 179, 186, 192, 199, 205, 212, 219, 226, 232, 324, 627, 640, 650, 659, 676, 687, 695, 703, 712, 770, 778, 785, 794, 801, 807, 814, 827, 836, 849, 858, 865, 878, 1045, 1050, 1055, 1060, and 1065; (v) a CDR2 having an amino acid sequence at least 65%, at least 70%, at least 75%, at least 80%, at least 85%, at least 90%, at least 95%, at least 99%, or 100% identical to any one of SEQ ID NOs: 2, 31, 628, 641, 677, 1046, 1051, 1056, and 1061; or at least 65%, at least 70%, at least 75%, at least 80%, at least 85%, at least 90%, at least 95%, at least 99%, or 100% identical to any one of amino acid sequences AAS, GAS, LGS, GTN, GTN, SAS, SDS, DNT, EVT, DAS, DVT, RNS, DVS, EDS, DDS, KDS, VAS, WAS, YTS, EVS, NNN, SYN, and DAT; and (vi) a CDR3 having an amino acid sequence at least 65%, at least 70%, at least 75%, at least 80%, at least 85%, at least 90%, at least 95%, at least 99%, or 100% identical to any one of SEQ ID NOs: 3, 10, 16, 24, 32, 38, 42, 49, 59, 66, 73, 80, 87, 94, 100, 106, 113, 120, 126, 131, 139, 146, 153, 160, 167, 173, 180, 187, 193, 200, 206, 213, 220, 227, 233, 239, 242, 246, 249, 256, 283, 285, 287, 288, 290, 292, 294, 296, 301, 304, 306, 309, 311, 313, 316, 325, 326, 329, 642, 651, 660, 668, 678, 651, 696, 704, 713, 764, 766, 768, 771, 779, 786, 792, 795, 808, 815, 821, 830, 837, 843, 850, 856, 859, 866, 872, 879, 885, and 1066; and a VL3 comprising (vii) a complementarity determining region (CDR) 1 having an amino acid sequence that is at least 65%, at least 70%, at least 75%, at least 80%, at least 85%, at least 90%, at least 95%, at least 99%, or 100% identical to any one of SEQ ID NOs: 1, 9, 15, 23, 30, 41, 48, 55, 58, 65, 72, 79, 86, 93, 99, 105, 112, 119, 130, 138, 145, 152, 159, 166, 172, 179, 186, 192, 199, 205, 212, 219, 226, 232, 324, 627, 640, 650, 659, 676, 687, 695, 703, 712, 770, 778, 785, 794, 801, 807, 814, 827, 836, 849, 858, 865, 878, 1045, 1050, 1055, 1060, and 1065; (viii) a CDR2 having an amino acid sequence at least 65%, at least 70%, at least 75%, at least 80%, at least 85%, at least 90%, at least 95%, at least 99%, or 100% identical to any one of SEQ ID NOs: 2, 31, 628, 641, 677, 1046, 1051, 1056, and 1061; or at least 65%, at least 70%, at least 75%, at least 80%, at least 85%, at least 90%, at least 95%, at least 99%, or 100% identical to any one of amino acid sequences AAS, GAS, LGS, GTN, GTN, SAS, SDS, DNT, EVT, DAS, DVT, RNS, DVS, EDS, DDS, KDS, VAS, WAS, YTS, EVS, NNN, SYN, and DAT; and (ix) a CDR3 having an amino acid sequence at least 65%, at least 70%, at least 75%, at least 80%, at least 85%, at least 90%, at least 95%, at least 99%, or 100% identical to any one of SEQ ID NOs: 3, 10, 16, 24, 32, 38, 42, 49, 59, 66, 73, 80, 87, 94, 100, 106, 113, 120, 126, 131, 139, 146, 153, 160, 167, 173, 180, 187, 193, 200, 206, 213, 220, 227, 233, 239, 242, 246, 249, 256, 283, 285, 287, 288, 290, 292, 294, 296, 301, 304, 306, 309, 311, 313, 316, 325, 326, 329, 642, 651, 660, 668, 678, 651, 696, 704, 713, 764, 766, 768, 771, 779, 786, 792, 795, 808, 815, 821, 830, 837, 843, 850, 856, 859, 866, 872, 879, 885, and 1066.

[1730] In some aspects, the antigen binding polypeptides provided herein comprise (i) a VL1 comprising an amino acid sequence that is at least 65%, at least 70%, at least 75%, at least 80%, at least 85%, at least 90%, at least 95%, at least 99%, or 100% identical to SEQ ID NO: 147; (ii) a VL2 comprising an amino acid sequence that is at least 65%, at least 70%, at least 75%, at least 80%, at least 85%, at least 90%, at least 95%, at least 99%, or 100% identical to any one of SEQ ID NOs: 4, 11, 17, 25, 33, 39, 43, 50, 60, 67, 74, 81, 88, 95, 101, 107, 114, 121, 127, 132, 140, 147, 154, 161, 168, 174, 181, 188, 194, 201, 207, 214, 221, 228, 234, 240, 243, 247, 250, 251, 252, 255, 284, 286, 289, 291, 293, 295, 299, 300, 302, 303, 305, 307, 308, 310, 312, 314, 315, 317, 323, 639, 649, 658, 667, 675, 686, 694, 702, 711, 772, 780, 787, 796, 802, 809, 816, 822, 831, 838, 844, 851, 860, 867, 873, 880, and 988; and (iii) a VL3 comprising an amino acid sequence that is at least 65%, at least 70%, at least 75%, at least 80%, at least 85%, at least 90%, at least 95%, at least 99%, or 100% identical to any one of SEQ ID NOs: 4, 11, 17, 25, 33, 39, 43, 50, 60, 67, 74, 81, 88, 95, 101, 107, 114, 121, 127, 132, 140, 147, 154, 161, 168, 174, 181, 188, 194, 201, 207, 214, 221, 228, 234, 240, 243, 247, 250, 251, 252, 255, 284, 286, 289, 291, 293, 295, 299, 300, 302, 303, 305, 307, 308, 310, 312, 314, 315, 317, 323, 639, 649, 658, 667, 675, 686, 694, 702, 711, 772, 780, 787, 796, 802, 809, 816, 822, 831, 838, 844, 851, 860, 867, 873, 880, and 988.

[1731] In some aspects, the antigen binding polypeptides provided herein comprise a VL1 comprising (i) a complementarity determining region (CDR) 1 having an amino acid sequence that is at least 65%, at least 70%, at least 75%, at least 80%, at least 85%, at least 90%, at least 95%, at least 99%, or 100% identical to SEQ ID NO: 145 or 1050; (ii) a CDR2 having an amino acid sequence at least 65%, at least 70%, at least 75%, at least 80%, at least 85%, at least 90%, at least 95%, at least 99%, or 100% identical to SEQ ID NO: 1051 or an amino acid sequence that is at least 65%, at least 70%, at least 75%, at least 80%, at least 85%, at least 90%, at least 95%, at least 99%, or 100% identical to amino acid sequence AAS; and (iii) a CDR3 having an amino acid sequence that is at least 65%, at least 70%, at least 75%, at least 80%, at least 85%, at least 90%, at least 95%, at least 99%, or 100% identical to SEQ ID NO: 146 or 764; a VL2 comprising (iv) a complementarity determining region (CDR) 1 having an amino acid sequence that is at least 65%, at least 70%, at least 75%, at least 80%, at least 85%, at least 90%, at least 95%, at least 99%, or 100% identical to any one of SEQ ID NOs: 1, 9, 15, 23, 30, 65, 72, 145, 152, 324, 627, 138, 172, 1045, 1050, 1055, 1060, and 1065; (v) a CDR2 having an amino acid sequence at least 65%, at least 70%, at least 75%, at least 80%, at least 85%, at least 90%, at least 95%, at least 99%, or 100% identical to any one of SEQ ID NOs: 2, 31, 628, 1046, 1051, 1056, and 1061, or at least 65%, at least 70%, at least 75%, at least 80%, at least 85%, at least 90%, at least 95%, at least 99%, or 100% identical to any one of amino acid sequences GAS, LGS, GTN, SAS, SDS, AAS, DAS, and DNT; and (vi) a CDR3 having an amino acid sequence at least 65%, at least 70%, at least 75%, at least 80%, at least 85%, at least 90%, at least 95%, at least 99%, or 100% identical to any one of SEQ ID NOs: 3, 10, 16, 24, 32, 38, 66, 73, 146, 153, 325, 326, 764, 766, 139, 856, 173, 792, and 1066; and a VL3 comprising (vii) a complementarity determining region (CDR) 1 having an amino acid sequence that is at least 65%, at least 70%, at least 75%, at least 80%, at least 85%, at least 90%, at least 95%, at least 99%, or 100% identical to any one of SEQ ID NOs: 1, 9, 15, 23, 30, 65, 72, 145, 152, 324, 627, 138, 172, 1045, 1050, 1055, 1060, and 1065; (viii) a CDR2 having an amino acid sequence at least 65%, at least 70%, at least 75%, at least 80%, at least 85%, at least 90%, at least 95%, at least 99%, or 100% identical to any one of SEQ ID NOs: 2, 31, 628, 1046, 1051, 1056, and 1061, or at least 65%, at least 70%, at least 75%, at least 80%, at least 85%, at least 90%, at least 95%, at least 99%, or 100% identical to any one of amino acid sequences GAS, LGS, GTN, SAS, SDS, AAS, DAS, and DNT; and (ix) a CDR3 having an amino acid sequence at least 65%, at least 70%, at least 75%, at least 80%, at least 85%, at least 90%, at least 95%, at least 99%, or 100% identical to any one of SEQ ID NOs: 3, 10, 16, 24, 32, 38, 66, 73, 146, 153, 325, 326, 764, 766, 139, 856, 173, 792, and 1066.

[1732] In some aspects, the antigen binding polypeptides provided herein comprise (i) a VL1 comprising an amino acid sequence that is at least 65%, at least 70%, at least 75%, at least 80%, at least 85%, at least 90%, at least 95%, at least 99%, or 100% identical to SEQ ID NO: 147; (ii) a VL2 comprising an amino acid sequence that is at least 65%, at least 70%, at least 75%, at least 80%, at least 85%, at least 90%, at least 95%, at least 99%, or 100% identical to any one of SEQ ID NOs: 4, 11, 17, 25, 33, 39, 67, 74, 147, 154, 140, and 174; and (iii) a VL3 comprising an amino acid sequence that is at least 65%, at least 70%, at least 75%, at least 80%, at least 85%, at least 90%, at least 95%, at least 99%, or 100% identical to any one of SEQ ID NOs: 4, 11, 17, 25, 33, 39, 67, 74, 147, 154, 140, and 174.

[1733] In some aspects, the antigen binding polypeptides disclosed herein, comprise one or more CH1, as indicated in the formulas representing the antigen binding polypeptides disclosed herein. In some aspects, the CH1 comprises an amino acid sequence at least 65%, at least 70%, at least 75%, at least 80%, at least 85%, at least 90%, at least 95%, at least 99%, or 100% identical to any one of SEQ ID NOs: 375, 634, 1070, 1071, or 1086-1091.

[1734] In some aspects, the antigen binding polypeptides provided herein further comprise an Fc region. In some aspects, the antigen binding polypeptides provided herein further comprise an Fc region at the carboxy-terminus. In some aspects, the Fc region comprises an immunoglobulin heavy chain constant region 2 (CH2) and/or an immunoglobulin heavy chain constant region 3 (CH3). In some aspects, the Fc region further comprises an immunoglobulin hinge (i.e., a hinge region). In some aspects, the hinge region is interposed between a CH1 and a CH2 (i.e., a hinge region is localized between the carboxy terminal residue of a CH1 and the N-terminal residue of a CH2). In some aspects, the hinge region comprises an amino acid sequence at least 65%, at least 70%, at least 75%, at least 80%, at least 85%, at least 90%, at least 95%, at least 99%, or 100% identical to any one of SEQ ID NOs: 635, 636, 1072, 1073, or 1074. In some aspects, the Fc region comprises a CH2 and a CH3. In some aspects, the CH2 comprises an amino acid sequence that is at least 65%, at least 70%, at least 75%, at least 80%, at least 85%, at least 90%, at least 95%, at least 99%, or 100% identical to any one of SEQ ID NOs: 1075-1078. In some aspects, the CH3 comprises an amino acid sequence that is at least 65%, at least 70%, at least 75%, at least 80%, at least 85%, at least 90%, at least 95%, at least 99%, or 100% identical to any one of SEQ ID NOs: 1079-1085. In some aspects, the Fc region comprises an amino acid sequence that is at least 65%, at least 70%, at least 75%, at least 80%, at least 85%, at least 90%, at least 95%, at least 99%, or 100% identical to any one of SEQ ID NOs: 376-380.

[1735] In some aspects, the Fc region comprises one or more amino acid substitutions. In some aspects, the one or more amino acid substitutions comprise one or more half-life extension amino acid substitutions. In some aspects, the one or more half-life extension amino acid substitutions comprise one or more of amino acid substitutions M428L, N434A, N434S, L234F, L235E, P331S, M252Y, S254T, or T256E, or equivalent thereof, based on the EU numbering scheme. In some aspects, the one or more half-life extension amino acid substitutions comprise a LA (M428L and N434A, or equivalent thereof, based on the EU numbering scheme) amino acid substitution. In some aspects, the one or more half-life extension amino acid substitutions comprise a LS (M428L and N434S, or equivalent thereof, based on the EU numbering scheme) amino acid substitution. In some aspects, the one or more half-life extension amino acid substitutions comprise L234F and L235E, or equivalent thereof (based on the EU numbering scheme) amino acid substitutions. In some aspects, the one or more half-life extension amino acid substitutions comprise a TM (L234F, L235E, and P331S, or equivalent thereof, based on the EU numbering scheme) amino acid substitution. In some aspects, the one or more half-life extension amino acid substitutions comprise a YTE (M252Y, S254T, and T256E, or equivalent thereof, based on the EU numbering scheme) amino acid substitution.

[1736] In some aspects, the Fc region comprises at least one knob-into-hole modification. In some aspects, the antigen binding polypeptides disclosed herein are comprised in IgG1 or IgG4 antibodies or antigen binding fragments thereof. In some aspects, the knob-into-hole modification comprises one or more of knob substitutions of S354C and T366W, or equivalent thereof, and/or one or more of hole substitutions of Y349C, T366S, L368A, Y407V, or equivalent thereof, or a combination thereof, based on the EU numbering scheme. In some aspects, the Fc region comprises a knob-into-hole modification comprising knob substitutions of S354C and T366W, or equivalent thereof, and/or hole substitutions of Y349C, T366S, L368A, and Y407V, or equivalent thereof, and/or a half-life extension amino acid substitution comprising: a LA (M428L and N434A, or equivalent thereof, based on the EU numbering scheme) amino acid substitution, a LS (M428L and N434S, or equivalent thereof, based on the EU numbering scheme) amino acid substitution. L234F and L235E, or equivalent thereof (based on the EU numbering scheme) amino acid substitutions, a TM (L234F, L235E, and P331S, or equivalent thereof, based on the EU numbering scheme) amino acid substitution, a YTE (M252Y, S254T, and T256E, or equivalent thereof, based on the EU numbering scheme) amino acid substitution, or any combination thereof.

[1737] In some aspects, the Fc region comprises knob substitutions of S354C and T366W, or equivalent thereof, and a half-life extension amino acid substitution comprising: a LA (M428L and N434A, or equivalent thereof, based on the EU numbering scheme) amino acid substitution, a LS (M428L and N434S, or equivalent thereof, based on the EU numbering scheme) amino acid substitution. L234F and L235E, or equivalent thereof (based on the EU numbering scheme) amino acid substitutions, a TM (L234F, L235E, and P331S, or equivalent thereof, based on the EU numbering scheme) amino acid substitution, a YTE (M252Y, S254T, and T256E, or equivalent thereof, based on the EU numbering scheme) amino acid substitution, or any combination thereof.

[1738] In some aspects, the Fc region comprises hole substitutions of Y349C, T366S, L368A, and Y407V, or equivalent thereof, and a half-life extension amino acid substitution comprising: a LA (M428L and N434A, or equivalent thereof, based on the EU numbering scheme) amino acid substitution, a LS (M428L and N434S, or equivalent thereof, based on the EU numbering scheme) amino acid substitution. L234F and L235E, or equivalent thereof (based on the EU numbering scheme) amino acid substitutions, a TM (L234F, L235E, and P331S, or equivalent thereof, based on the EU numbering scheme) amino acid substitution, a YTE (M252Y, S254T, and T256E, or equivalent thereof, based on the EU numbering scheme) amino acid substitution, or any combination thereof.

[1739] In some aspects, the antigen binding polypeptides disclosed herein comprise one or more Fc effector function knockout mutation. In some aspects, the antigen binding polypeptides disclosed herein are comprised in IgG1 or IgG4 antibodies or antigen binding fragments thereof. In some aspects, the Fc effector function knockout mutation is L234A, L235A, P239A, or equivalent thereof, or a combination thereof, based on the EU numbering scheme.

[1740] In some aspects, the antigen binding polypeptides disclosed herein comprise a mutation at a glycosylation site. In some aspects, the mutation at a glycosylation site is a mutation at an N-glycosylation site. In some aspects, the antigen binding polypeptide comprise a VH comprising a mutation at a glycosylation site. In some aspects, the mutation at a glycosylation site is a mutation at an N-glycosylation site. In some aspects, the mutation at an N-glycosylation site is at amino acid N62 of the VH region or equivalent thereof. In some aspects, the mutation at an N-glycosylation site at amino acid N62 is N62Q or N62S, or equivalent thereof.

[1741] In some aspects, the antigen binding polypeptides disclosed herein, comprise one or more optional linkers. The one or more optional linkers are indicated herein as Ln, wherein n is an integer, and the integer next to each L indicates each L comprised in the antigen binding polypeptides disclosed herein. For example, if an antigen binding polypeptide disclosed herein comprises two linkers, the first linker from N-terminus to C-terminus is herein indicated as L1, and the second linker from N-terminus to C-terminus is herein indicated as L2. In some aspects, any one of the optional linkers each independently have a length of from 0 amino acids to about 50 amino acids. In some aspects, any one of the optional linkers each independently have a length of from 5 amino acids to about 40 amino acids.

[1742] In some aspects, any one of the optional linkers are non-immunogenic. In some aspects, any one of the optional linkers do not contain a consensus T cell epitope.

[1743] In some aspects, any of Ln comprises an amino acid sequence of G or A, or an amino acid sequence at least 65%, at least 70%, at least 75%, at least 80%, at least 85%, at least 90%, at least 95%, at least 99%, or 100% identical to amino acid sequence GSS or ASG, or an amino acid sequence at least 65%, at least 70%, at least 75%, at least 80%, at least 85%, at least 90%, at least 95%, at least 99%, or 100% identical to any one of SEQ ID NOs: 333-373 and 967-971. In some aspects, Ln comprises an amino acid sequence at least 65%, at least 70%, at least 75%, at least 80%, at least 85%, at least 90%, at least 95%, at least 99%, or 100% identical to any one of SEQ ID NOs: 333-345 and 967-971.

[1744] In some aspects, the antigen binding polypeptides provided herein have a structure, from amino-terminus to carboxy-terminus, represented by:
[1745] VH1-L1-VH2-L2-VH3-L3-CL;
[1746] VH1-L1-VH3-L2-VH2-L3-CL;
[1747] VH2-L1-VH1-L2-VH3-L3-CL;
[1748] VH2-L1-VH3-L2-VH1-L3-CL;
[1749] VH3-L1-VH1-L2-VH2-L3-CL; or
[1750] VH3-L1-VH2-L2-VH1-L3-CL;
[1751] wherein:
[1752] VH1 is a first immunoglobulin heavy chain variable region that specifically binds to a severe acute respiratory syndrome coronavirus 2 (SARS-CoV-2) protein;
[1753] VH2 is a second immunoglobulin heavy chain variable region that specifically binds to a SARS-CoV-2 protein;
[1754] VH3 is a third immunoglobulin heavy chain variable region that specifically binds to a SARS-CoV-2 protein;
[1755] CL is an immunoglobulin light chain constant region; and
[1756] L1-L3 are optional amino acid linkers.

[1757] In any aspect shown herein as a structure from amino terminus to carboxy terminus, and with binding pairs selected from VL and/or VH or other structural regions such as CH1, CL, CH2, CH3, when shown without a specific linker such as L1, L2, etc., such linkers are optionally present in such structures between each designated subsequence VL, VH, etc.

[1758] In some aspects, the antigen binding polypeptides provided herein comprise a VH1 comprising a CDR1 having an amino acid sequence that is at least 65%, at least 70%, at least 75%, at least 80%, at least 85%, at least 90%, at least 95%, at least 99%, or 100% identical to any one of SEQ ID NOs: 5, 12, 18, 26, 34, 44, 51, 61, 68, 75, 82, 89, 96, 102, 108, 115, 122, 133, 141, 148, 155, 162, 175, 182, 189, 195, 202, 208, 215, 222, 229, 235, 318, 629, 645, 654, 663, 671, 682, 690, 699, 707, 716, 773, 781, 788, 797, 803, 810, 817, 823, 832, 839, 845, 852, 861, 868, 874, 881, 1047, 1052, 1057, 1062, and 1067; a CDR2 having an amino acid sequence that is at least 65%, at least 70%, at least 75%, at least 80%, at least 85%, at least 90%, at least 95%, at least 99%, or 100% identical to any one of SEQ ID NOs: 6, 19, 27, 35, 45, 52, 56, 62, 69, 76, 83, 90, 109, 116, 123, 134, 142, 149, 156, 163, 169, 176, 183, 196, 209, 216, 223, 236, 273, 319, 328, 630, 646, 655, 664, 672, 683, 691, 708, 776, 782, 789, 798, 804, 811, 818, 824, 833, 840, 846, 853, 862, 869, 875, 882, 1048, 1053, 1058, 1063, and 1068; and a CDR3 having an amino acid sequence that is at least 65%, at least 70%, at least 75%, at least 80%, at least 85%, at least 90%, at least 95%, at least 99%, or 100% identical to any one of SEQ ID NOs: 7, 13, 20, 28, 36, 40, 46, 53, 63, 70, 77, 84, 91, 97, 103, 110, 117, 124, 128, 135, 143, 150, 157, 164, 170, 177, 184, 190, 197, 203, 210, 217, 224, 230, 237, 241, 244, 248, 253, 257, 259, 261, 263, 265, 267, 269, 271, 274, 276, 278, 281, 297, 320, 322, 327, 330, 332, 631, 647, 656, 665, 673, 684, 692, 700, 709, 717, 765, 767, 769, 774, 783, 790, 793, 799, 805, 812, 819, 825, 834, 841, 847, 854, 857, 863, 870, 876, 883, 886, 1049, 1054, 1059, 1064, and 1069.

[1759] In some aspects, the antigen binding polypeptides provided herein comprise a VH2 comprising a CDR1 having an amino acid sequence that is at least 65%, at least 70%, at least 75%, at least 80%, at least 85%, at least 90%, at least 95%, at least 99%, or 100% identical to any one of SEQ ID NOs: 5, 12, 18, 26, 34, 44, 51, 61, 68, 75, 82, 89, 96, 102, 108, 115, 122, 133, 141, 148, 155, 162, 175, 182, 189, 195, 202, 208, 215, 222, 229, 235, 318, 629, 645, 654, 663, 671, 682, 690, 699, 707, 716, 773, 781, 788, 797, 803, 810, 817, 823, 832, 839, 845, 852, 861, 868, 874, 881, 1047, 1052, 1057, 1062, and 1067; a CDR2 having an amino acid sequence that is at least 65%, at least 70%, at least 75%, at least 80%, at least 85%, at least 90%, at least 95%, at least 99%, or 100% identical to any one of SEQ ID NOs: 6, 19, 27, 35, 45, 52, 56, 62, 69, 76, 83, 90, 109, 116, 123, 134, 142, 149, 156, 163, 169, 176, 183, 196, 209, 216, 223, 236, 273, 319, 328, 630, 646, 655, 664, 672, 683, 691, 708, 776, 782, 789, 798, 804, 811, 818, 824, 833, 840, 846, 853, 862, 869, 875, 882, 1048, 1053, 1058, 1063, and 1068; and a CDR3 having an amino acid sequence that is at least 65%, at least 70%, at least 75%, at least 80%, at least 85%, at least 90%, at least 95%, at least 99%, or 100% identical to any one of SEQ ID NOs: 7, 13, 20, 28, 36, 40, 46, 53, 63, 70, 77, 84, 91, 97, 103, 110, 117, 124, 128, 135, 143, 150, 157, 164, 170, 177, 184, 190, 197, 203, 210, 217, 224, 230, 237, 241, 244, 248, 253, 257, 259, 261, 263, 265, 267, 269, 271, 274, 276, 278, 281, 297, 320, 322, 327, 330, 332, 631, 647, 656, 665, 673, 684, 692, 700, 709, 717, 765, 767, 769, 774, 783, 790, 793, 799, 805, 812, 819, 825, 834, 841, 847, 854, 857, 863, 870, 876, 883, 886, 1049, 1054, 1059, 1064, and 1069.

[1760] In some aspects, the antigen binding polypeptides provided herein comprise a VH3 comprising a CDR1 having an amino acid sequence that is at least 65%, at least 70%, at least 75%, at least 80%, at least 85%, at least 90%, at least 95%, at least 99%, or 100% identical to any one of SEQ ID NOs: 5, 12, 18, 26, 34, 44, 51, 61, 68, 75, 82, 89, 96, 102, 108, 115, 122, 133, 141, 148, 155, 162, 175, 182, 189, 195, 202, 208, 215, 222, 229, 235, 318, 629, 645, 654, 663, 671, 682, 690, 699, 707, 716, 773, 781, 788, 797, 803, 810, 817, 823, 832, 839, 845, 852, 861, 868, 874, 881, 1047, 1052, 1057, 1062, and 1067; a CDR2 having an amino acid sequence that is at least 65%, at least 70%, at least 75%, at least 80%, at least 85%, at least 90%, at least 95%, at least 99%, or 100% identical to any one of SEQ ID NOs: 6, 19, 27, 35, 45, 52, 56, 62, 69, 76, 83, 90, 109, 116, 123, 134, 142, 149, 156, 163, 169, 176, 183, 196, 209, 216, 223, 236, 273, 319, 328, 630, 646, 655, 664, 672, 683, 691, 708, 776, 782, 789, 798, 804, 811, 818, 824, 833, 840, 846, 853, 862, 869, 875, 882, 1048, 1053, 1058, 1063, and 1068; and a CDR3 having an amino acid sequence that is at least 65%, at least 70%, at least 75%, at least 80%, at least 85%, at least 90%, at least 95%, at least 99%, or 100% identical to any one of SEQ ID NOs: 7, 13, 20, 28, 36, 40, 46, 53, 63, 70, 77, 84, 91, 97, 103, 110, 117, 124, 128, 135, 143, 150, 157, 164, 170, 177, 184, 190, 197, 203, 210, 217, 224, 230, 237, 241, 244, 248, 253, 257, 259, 261, 263, 265, 267, 269, 271, 274, 276, 278, 281, 297, 320, 322, 327, 330, 332, 631, 647, 656, 665, 673, 684, 692, 700, 709, 717, 765, 767, 769, 774, 783, 790, 793, 799, 805, 812, 819, 825, 834, 841, 847, 854, 857, 863, 870, 876, 883, 886, 1049, 1054, 1059, 1064, and 1069.

[1761] In some aspects, the antigen binding polypeptides provided herein comprise a VH1 comprising a CDR1 having an amino acid sequence that is at least 65%, at least 70%, at least 75%, at least 80%, at least 85%, at least 90%, at least 95%, at least 99%, or 100% identical to any one of SEQ ID NOs: 5, 12, 18, 26, 34, 44, 51, 61, 68, 75, 82, 89, 96, 102, 108, 115, 122, 133, 141, 148, 155, 162, 175, 182, 189, 195, 202, 208, 215, 222, 229, 235, 318, 629, 645, 654, 663, 671, 682, 690, 699, 707, 716, 773, 781, 788, 797, 803, 810, 817, 823, 832, 839, 845, 852, 861, 868, 874, 881, 1047, 1052, 1057, 1062, and 1067; a CDR2 having an amino acid sequence that is at least 65%, at least 70%, at least 75%, at least 80%, at least 85%, at least 90%, at least 95%, at least 99%, or 100% identical to any one of SEQ ID NOs: 6, 19, 27, 35, 45, 52, 56, 62, 69, 76, 83, 90, 109, 116, 123, 134, 142, 149, 156, 163, 169, 176, 183, 196, 209, 216, 223, 236, 273, 319, 328, 630, 646, 655, 664, 672, 683, 691, 708, 776, 782, 789, 798, 804, 811, 818, 824, 833, 840, 846, 853, 862, 869, 875, 882, 1048, 1053, 1058, 1063, and 1068; and a CDR3 having an amino acid sequence that is at least 65%, at least 70%, at least 75%, at least 80%, at least 85%, at least 90%, at least 95%, at least 99%, or 100% identical to any one of SEQ ID NOs: 7, 13, 20, 28, 36, 40, 46, 53, 63, 70, 77, 84, 91, 97, 103, 110, 117, 124, 128, 135, 143, 150, 157, 164, 170, 177, 184, 190, 197, 203, 210, 217, 224, 230, 237, 241, 244, 248, 253, 257, 259, 261, 263, 265, 267, 269, 271, 274, 276, 278, 281, 297, 320, 322, 327, 330, 332, 631, 647, 656, 665, 673, 684, 692, 700, 709, 717, 765, 767, 769, 774, 783, 790, 793, 799, 805, 812, 819, 825, 834, 841, 847, 854, 857, 863, 870, 876, 883, 886, 1049, 1054, 1059, 1064, and 1069; a VH2 comprising a CDR1 having an amino acid sequence that is at least 65%, at least 70%, at least 75%, at least 80%, at least 85%, at least 90%, at least 95%, at least 99%, or 100% identical to any one of SEQ ID NOs: 5, 12, 18, 26, 34, 44, 51, 61, 68, 75, 82, 89, 96, 102, 108, 115, 122, 133, 141, 148, 155, 162, 175, 182, 189, 195, 202, 208, 215, 222, 229, 235, 318, 629, 645, 654, 663, 671, 682, 690, 699, 707, 716, 773, 781, 788, 797, 803, 810, 817, 823, 832, 839, 845, 852, 861, 868, 874, 881, 1047, 1052, 1057, 1062, and 1067; a CDR2 having an amino acid sequence that is at least 65%, at least 70%, at least 75%, at least 80%, at least 85%, at least 90%, at least 95%, at least 99%, or 100% identical to any one of SEQ ID NOs: 6, 19, 27, 35, 45, 52, 56, 62, 69, 76, 83, 90, 109, 116, 123, 134, 142, 149, 156, 163, 169, 176, 183, 196, 209, 216, 223, 236, 273, 319, 328, 630, 646, 655, 664, 672, 683, 691, 708, 776, 782, 789, 798, 804, 811, 818, 824, 833, 840, 846, 853, 862, 869, 875, 882, 1048, 1053, 1058, 1063, and 1068; and a CDR3 having an amino acid sequence that is at least 65%, at least 70%, at least 75%, at least 80%, at least 85%, at least 90%, at least 95%, at least 99%, or 100% identical to any one of SEQ ID NOs: 7, 13, 20, 28, 36, 40, 46, 53, 63, 70, 77, 84, 91, 97, 103, 110, 117, 124, 128, 135, 143, 150, 157, 164, 170, 177, 184, 190, 197, 203, 210, 217, 224, 230, 237, 241, 244, 248, 253, 257, 259, 261, 263, 265, 267, 269, 271, 274, 276, 278, 281, 297, 320, 322, 327, 330, 332, 631, 647, 656, 665, 673, 684, 692, 700, 709, 717, 765, 767, 769, 774, 783, 790, 793, 799, 805, 812, 819, 825, 834, 841, 847, 854, 857, 863, 870, 876, 883, 886, 1049, 1054, 1059, 1064, and 1069; and a VH3 comprising a CDR1 having an amino acid sequence that is at least 65%, at least 70%, at least 75%, at least 80%, at least 85%, at least 90%, at least 95%, at least 99%, or 100% identical to any one of SEQ ID NOs: 5, 12, 18, 26, 34, 44, 51, 61, 68, 75, 82, 89, 96, 102, 108, 115, 122, 133, 141, 148, 155, 162, 175, 182, 189, 195, 202, 208, 215, 222, 229, 235, 318, 629, 645, 654, 663, 671, 682, 690, 699, 707, 716, 773, 781, 788, 797, 803, 810, 817, 823, 832, 839, 845, 852, 861, 868, 874, 881, 1047, 1052, 1057, 1062, and 1067; a CDR2 having an amino acid sequence that is at least 65%, at least 70%, at least 75%, at least 80%, at least 85%, at least 90%, at least 95%, at least 99%, or 100% identical to any one of SEQ ID NOs: 6, 19, 27, 35, 45, 52, 56, 62, 69, 76, 83, 90, 109, 116, 123, 134, 142, 149, 156, 163, 169, 176, 183, 196, 209, 216, 223, 236, 273, 319, 328, 630, 646, 655, 664, 672, 683, 691, 708, 776, 782, 789, 798, 804, 811, 818, 824, 833, 840, 846, 853, 862, 869, 875, 882, 1048, 1053, 1058, 1063, and 1068; and a CDR3 having an amino acid sequence that is at least 65%, at least 70%, at least 75%, at least 80%, at least 85%, at least 90%, at least 95%, at least 99%, or 100% identical to any one of SEQ ID NOs: 7, 13, 20, 28, 36, 40, 46, 53, 63, 70, 77, 84, 91, 97, 103, 110, 117, 124, 128, 135, 143, 150, 157, 164, 170, 177, 184, 190, 197, 203, 210, 217, 224, 230, 237, 241, 244, 248, 253, 257, 259, 261, 263, 265, 267, 269, 271, 274, 276, 278, 281, 297, 320, 322, 327, 330, 332, 631, 647, 656, 665, 673, 684, 692, 700, 709, 717, 765, 767, 769, 774, 783, 790, 793, 799, 805, 812, 819, 825, 834, 841, 847, 854, 857, 863, 870, 876, 883, 886, 1049, 1054, 1059, 1064, and 1069.

[1762] In some aspects, the antigen binding polypeptides provided herein comprise a VH1 comprising an amino acid sequence that is at least 65%, at least 70%, at least 75%, at least 80%, at least 85%, at least 90%, at least 95%, at least 99%, or 100% identical to any one of SEQ ID NOs: 8, 14, 21, 22, 29, 37, 47, 54, 57, 64, 71, 78, 85, 92, 98, 104, 111, 118, 125, 129, 136, 137, 144, 151, 158, 165, 171, 178, 185, 191, 198, 204, 211, 218, 225, 231, 238, 245, 254, 258, 260, 262, 264, 266, 268, 270, 272, 275, 277, 279, 280, 282, 298, 321, 331, 626, 644, 653, 662, 670, 681, 689, 698, 706, 715, 775, 777, 784, 791, 800, 806, 813, 820, 826, 835, 842, 848, 855, 864, 871, 877, and 884.

[1763] In some aspects, the antigen binding polypeptides provided herein comprise a VH2 comprising an amino acid sequence that is at least 65%, at least 70%, at least 75%, at least 80%, at least 85%, at least 90%, at least 95%, at least 99%, or 100% identical to any one of SEQ ID NOs: 8, 14, 21, 22, 29, 37, 47, 54, 57, 64, 71, 78, 85, 92, 98, 104, 111, 118, 125, 129, 136, 137, 144, 151, 158, 165, 171, 178, 185, 191, 198, 204, 211, 218, 225, 231, 238, 245, 254, 258, 260, 262, 264, 266, 268, 270, 272, 275, 277, 279, 280, 282, 298, 321, 331, 626, 644, 653, 662, 670, 681, 689, 698, 706, 715, 775, 777, 784, 791, 800, 806, 813, 820, 826, 835, 842, 848, 855, 864, 871, 877, and 884.

[1764] In some aspects, the antigen binding polypeptides provided herein comprise a VH3 comprising an amino acid sequence that is at least 65%, at least 70%, at least 75%, at least 80%, at least 85%, at least 90%, at least 95%, at least 99%, or 100% identical to any one of SEQ ID NOs: 8, 14, 21, 22, 29, 37, 47, 54, 57, 64, 71, 78, 85, 92, 98, 104, 111, 118, 125, 129, 136, 137, 144, 151, 158, 165, 171, 178, 185, 191, 198, 204, 211, 218, 225, 231, 238, 245, 254, 258, 260, 262, 264, 266, 268, 270, 272, 275, 277, 279, 280, 282, 298, 321, 331, 626, 644, 653, 662, 670, 681, 689, 698, 706, 715, 775, 777, 784, 791, 800, 806, 813, 820, 826, 835, 842, 848, 855, 864, 871, 877, and 884.

[1765] In some aspects, the antigen binding polypeptides provided herein comprise a VH1 comprising an amino acid sequence that is at least 65%, at least 70%, at least 75%, at least 80%, at least 85%, at least 90%, at least 95%, at least 99%, or 100% identical to any one of SEQ ID NOs: 8, 14, 21, 22, 29, 37, 47, 54, 57, 64, 71, 78, 85, 92, 98, 104, 111, 118, 125, 129, 136, 137, 144, 151, 158, 165, 171, 178, 185, 191, 198, 204, 211, 218, 225, 231, 238, 245, 254, 258, 260, 262, 264, 266, 268, 270, 272, 275, 277, 279, 280, 282, 298, 321, 331, 626, 644, 653, 662, 670, 681, 689, 698, 706, 715, 775, 777, 784, 791, 800, 806, 813, 820, 826, 835, 842, 848, 855, 864, 871, 877, and 884; a VH2 comprising an amino acid sequence that is at least 65%, at least 70%, at least 75%, at least 80%, at least 85%, at least 90%, at least 95%, at least 99%, or 100% identical to any one of SEQ ID NOs: 8, 14, 21, 22, 29, 37, 47, 54, 57, 64, 71, 78, 85, 92, 98, 104, 111, 118, 125, 129, 136, 137, 144, 151, 158, 165, 171, 178, 185, 191, 198, 204, 211, 218, 225, 231, 238, 245, 254, 258, 260, 262, 264, 266, 268, 270, 272, 275, 277, 279, 280, 282, 298, 321, 331, 626, 644, 653, 662, 670, 681, 689, 698, 706, 715, 775, 777, 784, 791, 800, 806, 813, 820, 826, 835, 842, 848, 855, 864, 871, 877, and 884; and a VH3 comprising an amino acid sequence that is at least 65%, at least 70%, at least 75%, at least 80%, at least 85%, at least 90%, at least 95%, at least 99%, or 100% identical to any one of SEQ ID NOs: 8, 14, 21, 22, 29, 37, 47, 54, 57, 64, 71, 78, 85, 92, 98, 104, 111, 118, 125, 129, 136, 137, 144, 151, 158, 165, 171, 178, 185, 191, 198, 204, 211, 218, 225, 231, 238, 245, 254, 258, 260, 262, 264, 266, 268, 270, 272, 275, 277, 279, 280, 282, 298, 321, 331, 626, 644, 653, 662, 670, 681, 689, 698, 706, 715, 775, 777, 784, 791, 800, 806, 813, 820, 826, 835, 842, 848, 855, 864, 871, 877, and 884.

[1766] In some aspects, at least one of VH1, VH2, or VH3 comprised in the antigen binding polypeptides provided herein comprises (i) a complementarity determining region (CDR) 1 having an amino acid sequence that is at least 65%, at least 70%, at least 75%, at least 80%, at least 85%, at least 90%, at least 95%, at least 99%, or 100% identical to SEQ ID NO: 148 or 1052; (ii) a CDR2 having an amino acid sequence that is at least 65%, at least 70%, at least 75%, at least 80%, at least 85%, at least 90%, at least 95%, at least 99%, or 100% identical to SEQ ID NO: 149 or 1053; and (iii) a CDR3 having an amino acid sequence that is at least 65%, at least 70%, at least 75%, at least 80%, at least 85%, at least 90%, at least 95%, at least 99%, or 100% identical to SEQ ID NO: 150, 765, or 1054.

[1767] In some aspects, at least one of VH1, VH2, or VH3 comprised in the antigen binding polypeptides provided herein comprises an amino acid sequence that is at least 65%, at least 70%, at least 75%, at least 80%, at least 85%, at least 90%, at least 95%, at least 99%, or 100% identical to SEQ ID NO: 151.

[1768] In some aspects, the antigen binding polypeptides provided herein comprise a VH1 comprising (i) a complementarity determining region (CDR) 1 having an amino acid sequence that is at least 65%, at least 70%, at least 75%, at least 80%, at least 85%, at least 90%, at least 95%, at least 99%, or 100% identical to SEQ ID NO: 148 or 1052; (ii) a CDR2 having an amino acid sequence that is at least 65%, at least 70%, at least 75%, at least 80%, at least 85%, at least 90%, at least 95%, at least 99%, or 100% identical to SEQ ID NO: 149 or 1053; and (iii) a CDR3 having an amino acid sequence that is at least 65%, at least 70%, at least 75%, at least 80%, at least 85%, at least 90%, at least 95%, at least 99%, or 100% identical to SEQ ID NO: 150, 765, or 1054; and a VH2 comprising (iv) a CDR1 having an amino acid sequence at least 65%, at least 70%, at least 75%, at least 80%, at least 85%, at least 90%, at least 95%, at least 99%, or 100% identical to any one of SEQ ID NOs: 5, 12, 18, 26, 34, 44, 51, 61, 68, 75, 82, 89, 96, 102, 108, 115, 122, 133, 141, 148, 155, 162, 175, 182, 189, 195, 202, 208, 215, 222, 229, 235, 318, 629, 645, 654, 663, 671, 682, 690, 699, 707, 716, 773, 781, 788, 797, 803, 810, 817, 823, 832, 839, 845, 852, 861, 868, 874, 881, 1047, 1052, 1057, 1062, and 1067; (v) a CDR2 having an amino acid sequence at least 65%, at least 70%, at least 75%, at least 80%, at least 85%, at least 90%, at least 95%, at least 99%, or 100% identical to any one of SEQ ID NOs: 6, 19, 27, 35, 45, 52, 56, 62, 69, 76, 83, 90, 109, 116, 123, 134, 142, 149, 156, 163, 169, 176, 183, 196, 209, 216, 223, 236, 273, 319, 328, 630, 646, 655, 664, 672, 683, 691, 708, 776, 782, 789, 798, 804, 811, 818, 824, 833, 840, 846, 853, 862, 869, 875, 882, 1048, 1053, 1058, 1063, and 1068; and (vi) a CDR3 having an amino acid sequence at least 65%, at least 70%, at least 75%, at least 80%, at least 85%, at least 90%, at least 95%, at least 99%, or 100% identical to any one of SEQ ID NOs: 7, 13, 20, 28, 36, 40, 46, 53, 63, 70, 77, 84, 91, 97, 103, 110, 117, 124, 128, 135, 143, 150, 157, 164, 170, 177, 184, 190, 197, 203, 210, 217, 224, 230, 237, 241, 244, 248, 253, 257, 259, 261, 263, 265, 267, 269, 271, 274, 276, 278, 281, 297, 320, 322, 327, 330, 332, 631, 647, 656, 665, 673, 684, 692, 700, 709, 717, 765, 767, 769, 774, 783, 790, 793, 799, 805, 812, 819, 825, 834, 841, 847, 854, 857, 863, 870, 876, 883, 886, 1049, 1054, 1059, 1064, and 1069; and a VH3 comprising (vii) a CDR1 having an amino acid sequence at least 65%, at least 70%, at least 75%, at least 80%, at least 85%, at least 90%, at least 95%, at least 99%, or 100% identical to any one of SEQ ID NOs: 5, 12, 18, 26, 34, 44, 51, 61, 68, 75, 82, 89, 96, 102, 108, 115, 122, 133, 141, 148, 155, 162, 175, 182, 189, 195, 202, 208, 215, 222, 229, 235, 318, 629, 645, 654, 663, 671, 682, 690, 699, 707, 716, 773, 781, 788, 797, 803, 810, 817, 823, 832, 839, 845, 852, 861, 868, 874, 881, 1047, 1052, 1057, 1062, and 1067; (viii) a CDR2 having an amino acid sequence at least 65%, at least 70%, at least 75%, at least 80%, at least 85%, at least 90%, at least 95%, at least 99%, or 100% identical to any one of SEQ ID NOs: 6, 19, 27, 35, 45, 52, 56, 62, 69, 76, 83, 90, 109, 116, 123, 134, 142, 149, 156, 163, 169, 176, 183, 196, 209, 216, 223, 236, 273, 319, 328, 630, 646, 655, 664, 672, 683, 691, 708, 776, 782, 789, 798, 804, 811, 818, 824, 833, 840, 846, 853, 862, 869, 875, 882, 1048, 1053, 1058, 1063, and 1068; and (ix) a CDR3 having an amino acid sequence at least 65%, at least 70%, at least 75%, at least 80%, at least 85%, at least 90%, at least 95%, at least 99%, or 100% identical to any one of SEQ ID NOs: 7, 13, 20, 28, 36, 40, 46, 53, 63, 70, 77, 84, 91, 97, 103, 110, 117, 124, 128, 135, 143, 150, 157, 164, 170, 177, 184, 190, 197, 203, 210, 217, 224, 230, 237, 241, 244, 248, 253, 257, 259, 261, 263, 265, 267, 269, 271, 274, 276, 278, 281, 297, 320, 322, 327, 330, 332, 631, 647, 656, 665, 673, 684, 692, 700, 709, 717, 765, 767, 769, 774, 783, 790, 793, 799, 805, 812, 819, 825, 834, 841, 847, 854, 857, 863, 870, 876, 883, 886, 1049, 1054, 1059, 1064, and 1069.

[1769] In some aspects, the antigen binding polypeptides provided herein comprise (i) a VH1 comprising an amino acid sequence that is at least 65%, at least 70%, at least 75%, at least 80%, at least 85%, at least 90%, at least 95%, at least 99%, or 100% identical to SEQ ID NO: 151; (ii) a VH2 comprising an amino acid sequence that is at least 65%, at least 70%, at least 75%, at least 80%, at least 85%, at least 90%, at least 95%, at least 99%, or 100% identical to any one of SEQ ID NOs: 8, 14, 21, 22, 29, 37, 47, 54, 57, 64, 71, 78, 85, 92, 98, 104, 111, 118, 125, 129, 136, 137, 144, 151, 158, 165, 171, 178, 185, 191, 198, 204, 211, 218, 225, 231, 238, 245, 254, 258, 260, 262, 264, 266, 268, 270, 272, 275, 277, 279, 280, 282, 298, 321, 331, 626, 644, 653, 662, 670, 681, 689, 698, 706, 715, 775, 777, 784, 791, 800, 806, 813, 820, 826, 835, 842, 848, 855, 864, 871, 877, and 884, and (iii) a VH3 comprising an amino acid sequence that is at least 65%, at least 70%, at least 75%, at least 80%, at least 85%, at least 90%, at least 95%, at least 99%, or 100% identical to any one of SEQ ID NOs: 8, 14, 21, 22, 29, 37, 47, 54, 57, 64, 71, 78, 85, 92, 98, 104, 111, 118, 125, 129, 136, 137, 144, 151, 158, 165, 171, 178, 185, 191, 198, 204, 211, 218, 225, 231, 238, 245, 254, 258, 260, 262, 264, 266, 268, 270, 272, 275, 277, 279, 280, 282, 298, 321, 331, 626, 644, 653, 662, 670, 681, 689, 698, 706, 715, 775, 777, 784, 791, 800, 806, 813, 820, 826, 835, 842, 848, 855, 864, 871, 877, and 884.

[1770] In some aspects, the antigen binding polypeptides provided herein comprise a VH1 comprising (i) a complementarity determining region (CDR) 1 having an amino acid sequence that is at least 65%, at least 70%, at least 75%, at least 80%, at least 85%, at least 90%, at least 95%, at least 99%, or 100% identical to SEQ ID NO: 148 or 1052; (ii) a CDR2 having an amino acid sequence that is at least 65%, at least 70%, at least 75%, at least 80%, at least 85%, at least 90%, at least 95%, at least 99%, or 100% identical to SEQ ID NO: 149 or 1053; and (iii) a CDR3 having an amino acid sequence that is at least 65%, at least 70%, at least 75%, at least 80%, at least 85%, at least 90%, at least 95%, at least 99%, or 100% identical to SEQ ID NO: 150, 765, or 1054; and a VH2 comprising (iv) a CDR1 having an amino acid sequence at least 65%, at least 70%, at least 75%, at least 80%, at least 85%, at least 90%, at least 95%, at least 99%, or 100% identical to any one of SEQ ID NOs: 5, 12, 18, 26, 34, 68, 75, 148, 155, 629, 141, 175, 1047, 1052, 1057, 1062, and 1067; (v) a CDR2 having an amino acid sequence at least 65%, at least 70%, at least 75%, at least 80%, at least 85%, at least 90%, at least 95%, at least 99%, or 100% identical to any one of SEQ ID NOs: 6, 19, 27, 35.69, 76, 149, 156, 630, 142, 176, 1048, 1053, 1058, 1063, and 1068; and (vi) a CDR3 having an amino acid sequence at least 65%, at least 70%, at least 75%, at least 80%, at least 85%, at least 90%, at least 95%, at least 99%, or 100% identical to any one of SEQ ID NOs: 7, 13, 20, 28, 36, 40, 70, 77, 327, 150, 157, 332, 631, 765, 767, 143, 857, 177, 793, 1049, 1054, 1059, 1064, and 1069; and a VH3 comprising (vii) a CDR1 having an amino acid sequence at least 65%, at least 70%, at least 75%, at least 80%, at least 85%, at least 90%, at least 95%, at least 99%, or 100% identical to any one of SEQ ID NOs: 5, 12, 18, 26, 34, 68, 75, 148, 155, 629, 141, 175, 1047, 1052, 1057, 1062, and 1067; (viii) a CDR2 having an amino acid sequence at least 65%, at least 70%, at least 75%, at least 80%, at least 85%, at least 90%, at least 95%, at least 99%, or 100% identical to any one of SEQ ID NOs: 6, 19, 27, 35, 69, 76, 149, 156, 630, 142, 176, 1048, 1053, 1058, 1063, and 1068; and (ix) a CDR3 having an amino acid sequence at least 65%, at least 70%, at least 75%, at least 80%, at least 85%, at least 90%, at least 95%, at least 99%, or 100% identical to any one SEQ ID NOs: 7, 13, 20, 28, 36, 40, 70, 77, 327, 150, 157, 332, 631, 765, 767, 143, 857, 177, 793, 1049, 1054, 1059, 1064, and 1069.

[1771] In some aspects, the antigen binding polypeptides provided herein comprise (i) a VH1 comprising an amino acid sequence that is at least 65%, at least 70%, at least 75%, at least 80%, at least 85%, at least 90%, at least 95%, at least 99%, or 100% identical to SEQ ID NO: 151; (ii) a VH2 comprising an amino acid sequence that is at least 65%, at least 70%, at least 75%, at least 80%, at least 85%, at least 90%, at least 95%, at least 99%, or 100% identical to any one of SEQ ID NOs: 8, 14, 21, 22, 29, 37, 71, 78, 151, 158, 626, 144, and 178, and (iii) a VH3 comprising an amino acid sequence that is at least 65%, at least 70%, at least 75%, at least 80%, at least 85%, at least 90%, at least 95%, at least 99%, or 100% identical to any one of SEQ ID NOs: 8, 14, 21, 22, 29, 37, 71, 78, 151, 158, 626, 144, and 178.

[1772] In some aspects, the antigen binding polypeptides disclosed herein, comprise one or more CL, as indicated in the formulas representing the antigen binding polypeptides disclosed herein. In some aspects, the CL comprises an amino acid sequence at least 65%, at least 70%, at least 75%, at least 80%, at least 85%, at least 90%, at least 95%, at least 99%, or 100% identical to any one of SEQ ID NOs: 374, 637, or 1092-1095.

[1773] In some aspects, the antigen binding polypeptides provided herein further comprise an Fc region. In some aspects, the antigen binding polypeptides provided herein further comprise an Fc region at the carboxy-terminus. In some aspects, the Fc region comprises an immunoglobulin heavy chain constant region 2 (CH2) and/or an immunoglobulin heavy chain constant region 3 (CH3). In some aspects, the Fc region further comprises an immunoglobulin hinge (i.e., a hinge region). In some aspects, the hinge region is interposed between a CH1 and a CH2 (i.e., a hinge region is localized between the carboxy terminal residue of a CH1 and the N-terminal residue of a CH2). In some aspects, the hinge region comprises an amino acid sequence at least 65%, at least 70%, at least 75%, at least 80%, at least 85%, at least 90%, at least 95%, at least 99%, or 100% identical to any one of SEQ ID NOs: 635, 636, 1072, 1073, or 1074. In some aspects, the Fc region comprises a CH2 and a CH3. In some aspects, the CH2 comprises an amino acid sequence that is at least 65%, at least 70%, at least 75%, at least 80%, at least 85%, at least 90%, at least 95%, at least 99%, or 100% identical to any one of SEQ ID NOs: 1075-1078. In some aspects, the CH3 comprises an amino acid sequence that is at least 65%, at least 70%, at least 75%, at least 80%, at least 85%, at least 90%, at least 95%, at least 99%, or 100% identical to any one of SEQ ID NOs: 1079-1085. In some aspects, the Fc region comprises an amino acid sequence that is at least 65%, at least 70%, at least 75%, at least 80%, at least 85%, at least 90%, at least 95%, at least 99%, or 100% identical to any one of SEQ ID NOs: 376-380.

[1774] In some aspects, the Fc region comprises one or more amino acid substitutions. In some aspects, the one or more amino acid substitutions comprise one or more half-life extension amino acid substitutions. In some aspects, the one or more half-life extension amino acid substitutions comprise one or more of amino acid substitutions M428L, N434A, N434S, L234F, L235E, P331S, M252Y, S254T, or T256E, or equivalent thereof, based on the EU numbering scheme. In some aspects, the one or more half-life extension amino acid substitutions comprise a LA (M428L and N434A, or equivalent thereof, based on the EU numbering scheme) amino acid substitution. In some aspects, the one or more half-life extension amino acid substitutions comprise a LS (M428L and N434S, or equivalent thereof, based on the EU numbering scheme) amino acid substitution. In some aspects, the one or more half-life extension amino acid substitutions comprise L234F and L235E, or equivalent thereof (based on the EU numbering scheme) amino acid substitutions. In some aspects, the one or more half-life extension amino acid substitutions comprise a TM (L234F, L235E, and P331S, or equivalent thereof, based on the EU numbering scheme) amino acid substitution. In some aspects, the one or more half-life extension amino acid substitutions comprise a YTE (M252Y, S254T, and T256E, or equivalent thereof, based on the EU numbering scheme) amino acid substitution.

[1775] In some aspects, the Fc region comprises at least one knob-into-hole modification. In some aspects, the antigen binding polypeptides disclosed herein are comprised in IgG1 or IgG4 antibodies or antigen binding fragments thereof. In some aspects, the knob-into-hole modification comprises one or more of knob substitutions of S354C and T366W, or equivalent thereof, and/or one or more of hole substitutions of Y349C, T366S, L368A, Y407V, or equivalent thereof, or a combination thereof, based on the EU numbering scheme. In some aspects, the Fc region comprises a knob-into-hole modification comprising knob substitutions of S354C and T366W, or equivalent thereof, and/or hole substitutions of Y349C, T366S, L368A, and Y407V, or equivalent thereof, and/or a half-life extension amino acid substitution comprising: a LA (M428L and N434A, or equivalent thereof, based on the EU numbering scheme) amino acid substitution, a LS (M428L and N434S, or equivalent thereof, based on the EU numbering scheme) amino acid substitution. L234F and L235E, or equivalent thereof (based on the EU numbering scheme) amino acid substitutions, a TM (L234F, L235E, and P331S, or equivalent thereof, based on the EU numbering scheme) amino acid substitution, a YTE (M252Y, S254T, and T256E, or equivalent thereof, based on the EU numbering scheme) amino acid substitution, or any combination thereof.

[1776] In some aspects, the Fc region comprises knob substitutions of S354C and T366W, or equivalent thereof, and a half-life extension amino acid substitution comprising: a LA (M428L and N434A, or equivalent thereof, based on the EU numbering scheme) amino acid substitution, a LS (M428L and N434S, or equivalent thereof, based on the EU numbering scheme) amino acid substitution, L234F and L235E, or equivalent thereof (based on the EU numbering scheme) amino acid substitutions, a TM (L234F, L235E, and P331S, or equivalent thereof, based on the EU numbering scheme) amino acid substitution, a YTE (M252Y, S254T, and T256E, or equivalent thereof, based on the EU numbering scheme) amino acid substitution, or any combination thereof.

[1777] In some aspects, the Fc region comprises hole substitutions of Y349C, T366S, L368A, and Y407V, or equivalent thereof, and a half-life extension amino acid substitution comprising: a LA (M428L and N434A, or equivalent thereof, based on the EU numbering scheme) amino acid substitution, a LS (M428L and N434S, or equivalent thereof, based on the EU numbering scheme) amino acid substitution. L234F and L235E, or equivalent thereof (based on the EU numbering scheme) amino acid substitutions, a TM (L234F, L235E, and P331S, or equivalent thereof, based on the EU numbering scheme) amino acid substitution, a YTE (M252Y, S254T, and T256E, or equivalent thereof, based on the EU numbering scheme) amino acid substitution, or any combination thereof.

[1778] In some aspects, the antigen binding polypeptides disclosed herein comprise one or more Fc effector function knockout mutation. In some aspects, the antigen binding polypeptides disclosed herein are comprised in IgG1 or IgG4 antibodies or antigen binding fragments thereof. In some aspects, the Fc effector function knockout mutation is L234A, L235A, P239A, or equivalent thereof, or a combination thereof, based on the EU numbering scheme.

[1779] In some aspects, the antigen binding polypeptides disclosed herein comprise a mutation at a glycosylation site. In some aspects, the mutation at a glycosylation site is a mutation at an N-glycosylation site. In some aspects, the antigen binding polypeptides comprise a VH comprising a mutation at a glycosylation site. In some aspects, the mutation at a glycosylation site is a mutation at an N-glycosylation site. In some aspects, the mutation at an N-glycosylation site is at amino acid N62 of the VH region or equivalent thereof. In some aspects, the mutation at an N-glycosylation site at amino acid N62 is N62Q or N62S, or equivalent thereof.

[1780] In some aspects, the antigen binding polypeptides disclosed herein, comprise one or more optional linkers. The one or more optional linkers are indicated herein as Ln, wherein n is an integer, and the integer next to each L indicates each L comprised in the antigen binding polypeptides disclosed herein. For example, if an antigen binding polypeptide disclosed herein comprises two linkers, the first linker from N-terminus to C-terminus is herein indicated as L1, and the second linker from N-terminus to C-terminus is herein indicated as L2. In some aspects, any one of the optional linkers each independently have a length of from 0 amino acids to about 50 amino acids. In some aspects, any one of the optional linkers each independently have a length of from 5 amino acids to about 40 amino acids.

[1781] In some aspects, any one of the optional linkers are non-immunogenic. In some aspects, any one of the optional linkers do not contain a consensus T cell epitope.

[1782] In some aspects, any of Ln comprises an amino acid sequence of G or A, or an amino acid sequence at least 65%, at least 70%, at least 75%, at least 80%, at least 85%, at least 90%, at least 95%, at least 99%, or 100% identical to amino acid sequence GSS or ASG, or an amino acid sequence at least 65%, at least 70%, at least 75%, at least 80%, at least 85%, at least 90%, at least 95%, at least 99%, or 100% identical to any one of SEQ ID NOs: 333-373 and 967-971. In some aspects, Ln comprises an amino acid sequence at least 65%, at least 70%, at least 75%, at least 80%, at least 85%, at least 90%, at least 95%, at least 99%, or 100% identical to any one of SEQ ID NOs: 333-345 and 967-971.

[1783] In some aspects, the antigen binding polypeptides provided herein have a structure, from amino-terminus to carboxy-terminus, represented by:
[1784] VL1-L1-VL2-L2-VH2-L3-VH1-L4-Fc;
[1785] VL1-L1-VH2-L2-VL2-L3-VH1-L4-Fc;
[1786] VH1-L1-VH2-L2-VL2-L3-VL1-L4-Fc; or
[1787] VH1-L1-VL2-L2-VH2-L3-VL1-L4-Fc;
[1788] wherein:
[1789] VL1 is a first immunoglobulin light chain variable region that specifically binds to a severe acute respiratory syndrome coronavirus 2 (SARS-CoV-2) protein;
[1790] VL2 is a second immunoglobulin light chain variable region that specifically binds to a SARS-CoV-2 protein;
[1791] VH1 is a first immunoglobulin heavy chain variable region that specifically binds to a SARS-CoV-2 protein;
[1792] VH2 is a second immunoglobulin heavy chain variable region that specifically binds to a SARS-CoV-2 protein;
[1793] L1-L4 are optional amino acid linkers; and
[1794] Fc is an immunoglobulin fragment crystallizable region comprising an immunoglobulin heavy chain constant region 2 (CH2), an immunoglobulin heavy chain constant region 3 (CH3), and optionally, an immunoglobulin hinge.

[1795] In any aspect shown herein as a structure from amino terminus to carboxy terminus, and with binding pairs selected from VL and/or VH or other structural regions such as CH2, CH3, when shown without a specific linker such as L1, L2, etc., such linkers are optionally present in such structures between each designated subsequence VL, VH, etc.

[1796] In some aspects, the antigen binding polypeptides provided herein comprise a VL1 comprising (i) a complementarity determining region (CDR) 1 having an amino acid sequence that is at least 65%, at least 70%, at least 75%, at least 80%, at least 85%, at least 90%, at least 95%, at least 99%, or 100% identical to any one of SEQ ID NOs: 1, 9, 15, 23, 30, 41, 48, 55, 58, 65, 72, 79, 86, 93, 99, 105, 112, 119, 130, 138, 145, 152, 159, 166, 172, 179, 186, 192, 199, 205, 212, 219, 226, 232, 324, 627, 640, 650, 659, 676, 687, 695, 703, 712, 770, 778, 785, 794, 801, 807, 814, 827, 836, 849, 858, 865, 878, 1045, 1050, 1055, 1060, and 1065; (ii) a CDR2 having an amino acid sequence that is at least 65%, at least 70%, at least 75%, at least 80%, at least 85%, at least 90%, at least 95%, at least 99%, or 100% identical to any one of SEQ ID NOs: 2, 31, 628, 641, 677, 1046, 1051, 1056, and 1061; or at least 65%, at least 70%, at least 75%, at least 80%, at least 85%, at least 90%, at least 95%, at least 99%, or 100% identical to any one of amino acid sequences AAS, GAS, LGS, GTN, GTN, SAS, SDS, DNT, EVT, DAS, DVT, RNS, DVS, EDS, DDS, KDS, VAS, WAS, YTS, EVS, NNN, SYN, and DAT; and (iii) a CDR3 having an amino acid sequence that is at least 65%, at least 70%, at least 75%, at least 80%, at least 85%, at least 90%, at least 95%, at least 99%, or 100% identical to any one of SEQ ID NOs: 3, 10, 16, 24, 32, 38, 42, 49, 59, 66, 73, 80, 87, 94, 100, 106, 113, 120, 126, 131, 139, 146, 153, 160, 167, 173, 180, 187, 193, 200, 206, 213, 220, 227, 233, 239, 242, 246, 249, 256, 283, 285, 287, 288, 290, 292, 294, 296, 301, 304, 306, 309, 311, 313, 316, 325, 326, 329, 642, 651, 660, 668, 678, 651, 696, 704, 713, 764, 766, 768, 771, 779, 786, 792, 795, 808, 815, 821, 830, 837, 843, 850, 856, 859, 866, 872, 879, 885, and 1066.

[1797] In some aspects, the antigen binding polypeptides provided herein comprise a VL2 comprising (i) a complementarity determining region (CDR) 1 having an amino acid sequence that is at least 65%, at least 70%, at least 75%, at least 80%, at least 85%, at least 90%, at least 95%, at least 99%, or 100% identical to any one of SEQ ID NOs: 1, 9, 15, 23, 30, 41, 48, 55, 58, 65, 72, 79, 86, 93, 99, 105, 112, 119, 130, 138, 145, 152, 159, 166, 172, 179, 186, 192, 199, 205, 212, 219, 226, 232, 324, 627, 640, 650, 659, 676, 687, 695, 703, 712, 770, 778, 785, 794, 801, 807, 814, 827, 836, 849, 858, 865, 878, 1045, 1050, 1055, 1060, and 1065; (ii) a CDR2 having an amino acid sequence that is at least 65%, at least 70%, at least 75%, at least 80%, at least 85%, at least 90%, at least 95%, at least 99%, or 100% identical to any one of SEQ ID NOs: 2, 31, 628, 641, 677, 1046, 1051, 1056, and 1061; or at least 65%, at least 70%, at least 75%, at least 80%, at least 85%, at least 90%, at least 95%, at least 99%, or 100% identical to any one of amino acid sequences AAS, GAS, LGS, GTN, GTN, SAS, SDS, DNT, EVT, DAS, DVT, RNS, DVS, EDS, DDS, KDS, VAS, WAS, YTS, EVS, NNN, SYN, and DAT; and (iii) a CDR3 having an amino acid sequence that is at least 65%, at least 70%, at least 75%, at least 80%, at least 85%, at least 90%, at least 95%, at least 99%, or 100% identical to any one of SEQ ID NOs: 3, 10, 16, 24, 32, 38, 42, 49, 59, 66, 73, 80, 87, 94, 100, 106, 113, 120, 126, 131, 139, 146, 153, 160, 167, 173, 180, 187, 193, 200, 206, 213, 220, 227, 233, 239, 242, 246, 249, 256, 283, 285, 287, 288, 290, 292, 294, 296, 301, 304, 306, 309, 311, 313, 316, 325, 326, 329, 642, 651, 660, 668, 678, 651, 696, 704, 713, 764, 766, 768, 771, 779, 786, 792, 795, 808, 815, 821, 830, 837, 843, 850, 856, 859, 866, 872, 879, 885, and 1066.

[1798] In some aspects, the antigen binding polypeptides provided herein comprise a VH1 comprising (i) a CDR1 having an amino acid sequence that is at least 65%, at least 70%, at least 75%, at least 80%, at least 85%, at least 90%, at least 95%, at least 99%, or 100% identical to any one of SEQ ID NOs: 5, 12, 18, 26, 34, 44, 51, 61, 68, 75, 82, 89, 96, 102, 108, 115, 122, 133, 141, 148, 155, 162, 175, 182, 189, 195, 202, 208, 215, 222, 229, 235, 318, 629, 645, 654, 663, 671, 682, 690, 699, 707, 716, 773, 781, 788, 797, 803, 810, 817, 823, 832, 839, 845, 852, 861, 868, 874, 881, 1047, 1052, 1057, 1062, and 1067; (ii) a CDR2 having an amino acid sequence that is at least 65%, at least 70%, at least 75%, at least 80%, at least 85%, at least 90%, at least 95%, at least 99%, or 100% identical to any one of SEQ ID NOs: 6, 19, 27, 35, 45, 52, 56, 62, 69, 76, 83, 90, 109, 116, 123, 134, 142, 149, 156, 163, 169, 176, 183, 196, 209, 216, 223, 236, 273, 319, 328, 630, 646, 655, 664, 672, 683, 691, 708, 776, 782, 789, 798, 804, 811, 818, 824, 833, 840, 846, 853, 862, 869, 875, 882, 1048, 1053, 1058, 1063, and 1068; and (iii) a CDR3 having an amino acid sequence that is at least 65%, at least 70%, at least 75%, at least 80%, at least 85%, at least 90%, at least 95%, at least 99%, or 100% identical to any one of SEQ ID NOs: 7, 13, 20, 28, 36, 40, 46, 53, 63, 70, 77, 84, 91, 97, 103, 110, 117, 124, 128, 135, 143, 150, 157, 164, 170, 177, 184, 190, 197, 203, 210, 217, 224, 230, 237, 241, 244, 248, 253, 257, 259, 261, 263, 265, 267, 269, 271, 274, 276, 278, 281, 297, 320, 322, 327, 330, 332, 631, 647, 656, 665, 673, 684, 692, 700, 709, 717, 765, 767, 769, 774, 783, 790, 793, 799, 805, 812, 819, 825, 834, 841, 847, 854, 857, 863, 870, 876, 883, 886, 1049, 1054, 1059, 1064, and 1069.

[1799] In some aspects, the antigen binding polypeptides provided herein comprise a VH2 comprising (i) a CDR1 having an amino acid sequence that is at least 65%, at least 70%, at least 75%, at least 80%, at least 85%, at least 90%, at least 95%, at least 99%, or 100% identical to any one of SEQ ID NOs: 5, 12, 18, 26, 34, 44, 51, 61, 68, 75, 82, 89, 96, 102, 108, 115, 122, 133, 141, 148, 155, 162, 175, 182, 189, 195, 202, 208, 215, 222, 229, 235, 318, 629, 645, 654, 663, 671, 682, 690, 699, 707, 716, 773, 781, 788, 797, 803, 810, 817, 823, 832, 839, 845, 852, 861, 868, 874, 881, 1047, 1052, 1057, 1062, and 1067; (ii) a CDR2 having an amino acid sequence that is at least 65%, at least 70%, at least 75%, at least 80%, at least 85%, at least 90%, at least 95%, at least 99%, or 100% identical to any one of SEQ ID NOs: 6, 19, 27, 35, 45, 52, 56, 62, 69, 76, 83, 90, 109, 116, 123, 134, 142, 149, 156, 163, 169, 176, 183, 196, 209, 216, 223, 236, 273, 319, 328, 630, 646, 655, 664, 672, 683, 691, 708, 776, 782, 789, 798, 804, 811, 818, 824, 833, 840, 846, 853, 862, 869, 875, 882, 1048, 1053, 1058, 1063, and 1068; and (iii) a CDR3 having an amino acid sequence that is at least 65%, at least 70%, at least 75%, at least 80%, at least 85%, at least 90%, at least 95%, at least 99%, or 100% identical to any one of SEQ ID NOs: 7, 13, 20, 28, 36, 40, 46, 53, 63, 70, 77, 84, 91, 97, 103, 110, 117, 124, 128, 135, 143, 150, 157, 164, 170, 177, 184, 190, 197, 203, 210, 217, 224, 230, 237, 241, 244, 248, 253, 257, 259, 261, 263, 265, 267, 269, 271, 274, 276, 278, 281, 297, 320, 322, 327, 330, 332, 631, 647, 656, 665, 673, 684, 692, 700, 709, 717, 765, 767, 769, 774, 783, 790, 793, 799, 805, 812, 819, 825, 834, 841, 847, 854, 857, 863, 870, 876, 883, 886, 1049, 1054, 1059, 1064, and 1069.

[1800] In some aspects, the antigen binding polypeptides provided herein comprise a VL1 comprising (i) a complementarity determining region (CDR) 1 having an amino acid sequence that is at least 65%, at least 70%, at least 75%, at least 80%, at least 85%, at least 90%, at least 95%, at least 99%, or 100% identical to any one of SEQ ID NOs: 1, 9, 15, 23, 30, 41, 48, 55, 58, 65, 72, 79, 86, 93, 99, 105, 112, 119, 130, 138, 145, 152, 159, 166, 172, 179, 186, 192, 199, 205, 212, 219, 226, 232, 324, 627, 640, 650, 659, 676, 687, 695, 703, 712, 770, 778, 785, 794, 801, 807, 814, 827, 836, 849, 858, 865, 878, 1045, 1050, 1055, 1060, and 1065; (ii) a CDR2 having an amino acid sequence that is at least 65%, at least 70%, at least 75%, at least 80%, at least 85%, at least 90%, at least 95%, at least 99%, or 100% identical to any one of SEQ ID NOs: 2, 31, 628, 641, 677, 1046, 1051, 1056, and 1061; or at least 65%, at least 70%, at least 75%, at least 80%, at least 85%, at least 90%, at least 95%, at least 99%, or 100% identical to any one of amino acid sequences AAS, GAS, LGS, GTN, GTN, SAS, SDS, DNT, EVT, DAS, DVT, RNS, DVS, EDS, DDS, KDS, VAS, WAS, YTS, EVS, NNN, SYN, and DAT; and (iii) a CDR3 having an amino acid sequence that is at least 65%, at least 70%, at least 75%, at least 80%, at least 85%, at least 90%, at least 95%, at least 99%, or 100% identical to any one of SEQ ID NOs: 3, 10, 16, 24, 32, 38, 42, 49, 59, 66, 73, 80, 87, 94, 100, 106, 113, 120, 126, 131, 139, 146, 153, 160, 167, 173, 180, 187, 193, 200, 206, 213, 220, 227, 233, 239, 242, 246, 249, 256, 283, 285, 287, 288, 290, 292, 294, 296, 301, 304, 306, 309, 311, 313, 316, 325, 326, 329, 642, 651, 660, 668, 678, 651, 696, 704, 713, 764, 766, 768, 771, 779, 786, 792, 795, 808, 815, 821, 830, 837, 843, 850, 856, 859, 866, 872, 879, 885, and 1066; a VH1 comprising (i) a CDR1 having an amino acid sequence that is at least 65%, at least 70%, at least 75%, at least 80%, at least 85%, at least 90%, at least 95%, at least 99%, or 100% identical to any one of SEQ ID NOs: 5, 12, 18, 26, 34, 44, 51, 61, 68, 75, 82, 89, 96, 102, 108, 115, 122, 133, 141, 148, 155, 162, 175, 182, 189, 195, 202, 208, 215, 222, 229, 235, 318, 629, 645, 654, 663, 671, 682, 690, 699, 707, 716, 773, 781, 788, 797, 803, 810, 817, 823, 832, 839, 845, 852, 861, 868, 874, 881, 1047, 1052, 1057, 1062, and 1067; (ii) a CDR2 having an amino acid sequence that is at least 65%, at least 70%, at least 75%, at least 80%, at least 85%, at least 90%, at least 95%, at least 99%, or 100% identical to any one of SEQ ID NOs: 6, 19, 27, 35, 45, 52, 56, 62, 69, 76, 83, 90, 109, 116, 123, 134, 142, 149, 156, 163, 169, 176, 183, 196, 209, 216, 223, 236, 273, 319, 328, 630, 646, 655, 664, 672, 683, 691, 708, 776, 782, 789, 798, 804, 811, 818, 824, 833, 840, 846, 853, 862, 869, 875, 882, 1048, 1053, 1058, 1063, and 1068; and (iii) a CDR3 having an amino acid sequence that is at least 65%, at least 70%, at least 75%, at least 80%, at least 85%, at least 90%, at least 95%, at least 99%, or 100% identical to any one of SEQ ID NOs: 7, 13, 20, 28, 36, 40, 46, 53, 63, 70, 77, 84, 91, 97, 103, 110, 117, 124, 128, 135, 143, 150, 157, 164, 170, 177, 184, 190, 197, 203, 210, 217, 224, 230, 237, 241, 244, 248, 253, 257, 259, 261, 263, 265, 267, 269, 271, 274, 276, 278, 281, 297, 320, 322, 327, 330, 332, 631, 647, 656, 665, 673, 684, 692, 700, 709, 717, 765, 767, 769, 774, 783, 790, 793, 799, 805, 812, 819, 825, 834, 841, 847, 854, 857, 863, 870, 876, 883, 886, 1049, 1054, 1059, 1064, and 1069; a VL2 comprising (i) a complementarity determining region (CDR) 1 having an amino acid sequence that is at least 65%, at least 70%, at least 75%, at least 80%, at least 85%, at least 90%, at least 95%, at least 99%, or 100% identical to any one of SEQ ID NOs: 1, 9, 15, 23, 30, 41, 48, 55, 58, 65, 72, 79, 86, 93, 99, 105, 112, 119, 130, 138, 145, 152, 159, 166, 172, 179, 186, 192, 199, 205, 212, 219, 226, 232, 324, 627, 640, 650, 659, 676, 687, 695, 703, 712, 770, 778, 785, 794, 801, 807, 814, 827, 836, 849, 858, 865, 878, 1045, 1050, 1055, 1060, and 1065; (ii) a CDR2 having an amino acid sequence that is at least 65%, at least 70%, at least 75%, at least 80%, at least 85%, at least 90%, at least 95%, at least 99%, or 100% identical to any one of SEQ ID NOs: 2, 31, 628, 641, 677, 1046, 1051, 1056, and 1061; or at least 65%, at least 70%, at least 75%, at least 80%, at least 85%, at least 90%, at least 95%, at least 99%, or 100% identical to any one of amino acid sequences AAS, GAS, LGS, GTN, GTN, SAS, SDS, DNT, EVT, DAS, DVT, RNS, DVS, EDS, DDS, KDS, VAS, WAS, YTS, EVS, NNN, SYN, and DAT; and (iii) a CDR3 having an amino acid sequence that is at least 65%, at least 70%, at least 75%, at least 80%, at least 85%, at least 90%, at least 95%, at least 99%, or 100% identical to any one of SEQ ID NOs: 3, 10, 16, 24, 32, 38, 42, 49, 59, 66, 73, 80, 87, 94, 100, 106, 113, 120, 126, 131, 139, 146, 153, 160, 167, 173, 180, 187, 193, 200, 206, 213, 220, 227, 233, 239, 242, 246, 249, 256, 283, 285, 287, 288, 290, 292, 294, 296, 301, 304, 306, 309, 311, 313, 316, 325, 326, 329, 642, 651, 660, 668, 678, 651, 696, 704, 713, 764, 766, 768, 771, 779, 786, 792, 795, 808, 815, 821, 830, 837, 843, 850, 856, 859, 866, 872, 879, 885, and 1066; and a VH2 comprising (i) a CDR1 having an amino acid sequence that is at least 65%, at least 70%, at least 75%, at least 80%, at least 85%, at least 90%, at least 95%, at least 99%, or 100% identical to any one of SEQ ID NOs: 5, 12, 18, 26, 34, 44, 51, 61, 68, 75, 82, 89, 96, 102, 108, 115, 122, 133, 141, 148, 155, 162, 175, 182, 189, 195, 202, 208, 215, 222, 229, 235, 318, 629, 645, 654, 663, 671, 682, 690, 699, 707, 716, 773, 781, 788, 797, 803, 810, 817, 823, 832, 839, 845, 852, 861, 868, 874, 881, 1047, 1052, 1057, 1062, and 1067; (ii) a CDR2 having an amino acid sequence that is at least 65%, at least 70%, at least 75%, at least 80%, at least 85%, at least 90%, at least 95%, at least 99%, or 100% identical to any one of SEQ ID NOs: 6, 19, 27, 35, 45, 52, 56, 62, 69, 76, 83, 90, 109, 116, 123, 134, 142, 149, 156, 163, 169, 176, 183, 196, 209, 216, 223, 236, 273, 319, 328, 630, 646, 655, 664, 672, 683, 691, 708, 776, 782, 789, 798, 804, 811, 818, 824, 833, 840, 846, 853, 862, 869, 875, 882, 1048, 1053, 1058, 1063, and 1068; and (iii) a CDR3 having an amino acid sequence that is at least 65%, at least 70%, at least 75%, at least 80%, at least 85%, at least 90%, at least 95%, at least 99%, or 100% identical to any one of SEQ ID NOs: 7, 13, 20, 28, 36, 40, 46, 53, 63, 70, 77, 84, 91, 97, 103, 110, 117, 124, 128, 135, 143, 150, 157, 164, 170, 177, 184, 190, 197, 203, 210, 217, 224, 230, 237, 241, 244, 248, 253, 257, 259, 261, 263, 265, 267, 269, 271, 274, 276, 278, 281, 297, 320, 322, 327, 330, 332, 631, 647, 656, 665, 673, 684, 692, 700, 709, 717, 765, 767, 769, 774, 783, 790, 793, 799, 805, 812, 819, 825, 834, 841, 847, 854, 857, 863, 870, 876, 883, 886, 1049, 1054, 1059, 1064, and 1069.

[1801] In some aspects, the antigen binding polypeptides provided herein comprise a VL1 comprising an amino acid sequence that is at least 65%, at least 70%, at least 75%, at least 80%, at least 85%, at least 90%, at least 95%, at least 99%, or 100% identical to any one of SEQ ID NOs: 4, 11, 17, 25, 33, 39, 43, 50, 60, 67, 74, 81, 88, 95, 101, 107, 114, 121, 127, 132, 140, 147, 154, 161, 168, 174, 181, 188, 194, 201, 207, 214, 221, 228, 234, 240, 243, 247, 250, 251, 252, 255, 284, 286, 289, 291, 293, 295, 299, 300, 302, 303, 305, 307, 308, 310, 312, 314, 315, 317, 323, 639, 649, 658, 667, 675, 686, 694, 702, 711, 772, 780, 787, 796, 802, 809, 816, 822, 831, 838, 844, 851, 860, 867, 873, 880, and 988.

[1802] In some aspects, the antigen binding polypeptides provided herein comprise a VH1 comprising an amino acid sequence that is at least 65%, at least 70%, at least 75%, at least 80%, at least 85%, at least 90%, at least 95%, at least 99%, or 100% identical to any one of SEQ ID NOs: 8, 14, 21, 22, 29, 37, 47, 54, 57, 64, 71, 78, 85, 92, 98, 104, 111, 118, 125, 129, 136, 137, 144, 151, 158, 165, 171, 178, 185, 191, 198, 204, 211, 218, 225, 231, 238, 245, 254, 258, 260, 262, 264, 266, 268, 270, 272, 275, 277, 279, 280, 282, 298, 321, 331, 626, 644, 653, 662, 670, 681, 689, 698, 706, 715, 775, 777, 784, 791, 800, 806, 813, 820, 826, 835, 842, 848, 855, 864, 871, 877, and 884.

[1803] In some aspects, the antigen binding polypeptides provided herein comprise a VL2 comprising an amino acid sequence that is at least 65%, at least 70%, at least 75%, at least 80%, at least 85%, at least 90%, at least 95%, at least 99%, or 100% identical to any one of SEQ ID NOs: 4, 11, 17, 25, 33, 39, 43, 50, 60, 67, 74, 81, 88, 95, 101, 107, 114, 121, 127, 132, 140, 147, 154, 161, 168, 174, 181, 188, 194, 201, 207, 214, 221, 228, 234, 240, 243, 247, 250, 251, 252, 255, 284, 286, 289, 291, 293, 295, 299, 300, 302, 303, 305, 307, 308, 310, 312, 314, 315, 317, 323, 639, 649, 658, 667, 675, 686, 694, 702, 711, 772, 780, 787, 796, 802, 809, 816, 822, 831, 838, 844, 851, 860, 867, 873, 880, and 988.

[1804] In some aspects, the antigen binding polypeptides provided herein comprise a VH2 comprising an amino acid sequence that is at least 65%, at least 70%, at least 75%, at least 80%, at least 85%, at least 90%, at least 95%, at least 99%, or 100% identical to any one of SEQ ID NOs: 8, 14, 21, 22, 29, 37, 47, 54, 57, 64, 71, 78, 85, 92, 98, 104, 111, 118, 125, 129, 136, 137, 144, 151, 158, 165, 171, 178, 185, 191, 198, 204, 211, 218, 225, 231, 238, 245, 254, 258, 260, 262, 264, 266, 268, 270, 272, 275, 277, 279, 280, 282, 298, 321, 331, 626, 644, 653, 662, 670, 681, 689, 698, 706, 715, 775, 777, 784, 791, 800, 806, 813, 820, 826, 835, 842, 848, 855, 864, 871, 877, and 884.

[1805] In some aspects, the antigen binding polypeptides provided herein comprise (i) a VL1 comprising an amino acid sequence that is at least 65%, at least 70%, at least 75%, at least 80%, at least 85%, at least 90%, at least 95%, at least 99%, or 100% identical to any one of SEQ ID NOs: 4, 11, 17, 25, 33, 39, 43, 50, 60, 67, 74, 81, 88, 95, 101, 107, 114, 121, 127, 132, 140, 147, 154, 161, 168, 174, 181, 188, 194, 201, 207, 214, 221, 228, 234, 240, 243, 247, 250, 251, 252, 255, 284, 286, 289, 291, 293, 295, 299, 300, 302, 303, 305, 307, 308, 310, 312, 314, 315, 317, 323, 639, 649, 658, 667, 675, 686, 694, 702, 711, 772, 780, 787, 796, 802, 809, 816, 822, 831, 838, 844, 851, 860, 867, 873, 880, and 988; (ii) a VH1 comprising an amino acid sequence that is at least 65%, at least 70%, at least 75%, at least 80%, at least 85%, at least 90%, at least 95%, at least 99%, or 100% identical to any one of SEQ ID NOs: 8, 14, 21, 22, 29, 37, 47, 54, 57, 64, 71, 78, 85, 92, 98, 104, 111, 118, 125, 129, 136, 137, 144, 151, 158, 165, 171, 178, 185, 191, 198, 204, 211, 218, 225, 231, 238, 245, 254, 258, 260, 262, 264, 266, 268, 270, 272, 275, 277, 279, 280, 282, 298, 321, 331, 626, 644, 653, 662, 670, 681, 689, 698, 706, 715, 775, 777, 784, 791, 800, 806, 813, 820, 826, 835, 842, 848, 855, 864, 871, 877, and 884; (iii) a VL2 comprising an amino acid sequence that is at least 65%, at least 70%, at least 75%, at least 80%, at least 85%, at least 90%, at least 95%, at least 99%, or 100% identical to any one of SEQ ID NOs: 4, 11, 17, 25, 33, 39, 43, 50, 60, 67, 74, 81, 88, 95, 101, 107, 114, 121, 127, 132, 140, 147, 154, 161, 168, 174, 181, 188, 194, 201, 207, 214, 221, 228, 234, 240, 243, 247, 250, 251, 252, 255, 284, 286, 289, 291, 293, 295, 299, 300, 302, 303, 305, 307, 308, 310, 312, 314, 315, 317, 323, 639, 649, 658, 667, 675, 686, 694, 702, 711, 772, 780, 787, 796, 802, 809, 816, 822, 831, 838, 844, 851, 860, 867, 873, 880, and 988; and (iv) a VH2 comprising an amino acid sequence that is at least 65%, at least 70%, at least 75%, at least 80%, at least 85%, at least 90%, at least 95%, at least 99%, or 100% identical to any one of SEQ ID NOs: 8, 14, 21, 22, 29, 37, 47, 54, 57, 64, 71, 78, 85, 92, 98, 104, 111, 118, 125, 129, 136, 137, 144, 151, 158, 165, 171, 178, 185, 191, 198, 204, 211, 218, 225, 231, 238, 245, 254, 258, 260, 262, 264, 266, 268, 270, 272, 275, 277, 279, 280, 282, 298, 321, 331, 626, 644, 653, 662, 670, 681, 689, 698, 706, 715, 775, 777, 784, 791, 800, 806, 813, 820, 826, 835, 842, 848, 855, 864, 871, 877, and 884.

[1806] In some aspects, the antigen binding polypeptides provided herein comprise a VL1 comprising (i) a complementarity determining region (CDR) 1 having an amino acid sequence that is at least 65%, at least 70%, at least 75%, at least 80%, at least 85%, at least 90%, at least 95%, at least 99%, or 100% identical to any one of SEQ ID NOs: 1, 9, 15, 23, 30, 65, 72, 145, 152, 324, 627, 138, 172, 1045, 1050, 1055, 1060, and 1065; (ii) a CDR2 having an amino acid sequence that is at least 65%, at least 70%, at least 75%, at least 80%, at least 85%, at least 90%, at least 95%, at least 99%, or 100% identical to any one of SEQ ID NOs: 2, 31, 628, 1046, 1051, 1056, and 1061, or at least 65%, at least 70%, at least 75%, at least 80%, at least 85%, at least 90%, at least 95%, at least 99%, or 100% identical to any one of amino acid sequences GAS, LGS, GTN, SAS, SDS, AAS, DAS, and DNT; and (iii) a CDR3 having an amino acid sequence that is at least 65%, at least 70%, at least 75%, at least 80%, at least 85%, at least 90%, at least 95%, at least 99%, or 100% identical to any one of SEQ ID NOs: 3, 10, 16, 24, 32, 38, 66, 73, 146, 153, 325, 326, 764, 766, 139, 856, 173, 792, and 1066.

[1807] In some aspects, the antigen binding polypeptides provided herein comprise a VL2 comprising (i) a complementarity determining region (CDR) 1 having an amino acid sequence that is at least 65%, at least 70%, at least 75%, at least 80%, at least 85%, at least 90%, at least 95%, at least 99%, or 100% identical to any one of SEQ ID NOs: 1, 9, 15, 23, 30, 65, 72, 145, 152, 324, 627, 138, 172, 1045, 1050, 1055, 1060, and 1065; (ii) a CDR2 having an amino acid sequence that is at least 65%, at least 70%, at least 75%, at least 80%, at least 85%, at least 90%, at least 95%, at least 99%, or 100% identical to any one of SEQ ID NOs: 2, 31.628, 1046, 1051, 1056, and 1061, or at least 65%, at least 70%, at least 75%, at least 80%, at least 85%, at least 90%, at least 95%, at least 99%, or 100% identical to any one of amino acid sequences GAS, LGS, GTN, SAS, SDS, AAS, DAS, and DNT; and (iii) a CDR3 having an amino acid sequence that is at least 65%, at least 70%, at least 75%, at least 80%, at least 85%, at least 90%, at least 95%, at least 99%, or 100% identical to any one of SEQ ID NOs: 3, 10, 16, 24, 32, 38, 66, 73, 146, 153, 325, 326, 764, 766, 139, 856, 173, 792, and 1066.

[1808] In some aspects, the antigen binding polypeptides provided herein comprise a VH1 comprising (i) a CDR1 having an amino acid sequence that is at least 65%, at least 70%, at least 75%, at least 80%, at least 85%, at least 90%, at least 95%, at least 99%, or 100% identical to any one of SEQ ID NOs: 5, 12, 18, 26, 34, 68, 75, 148, 155, 629, 141, 175, 1047, 1052, 1057, 1062, and 1067; (ii) a CDR2 having an amino acid sequence that is at least 65%, at least 70%, at least 75%, at least 80%, at least 85%, at least 90%, at least 95%, at least 99%, or 100% identical to any one of SEQ ID NOs: 6, 19, 27, 35, 69, 76, 149, 156, 630, 142, 176, 1048, 1053, 1058, 1063, and 1068; and (iii) a CDR3 having an amino acid sequence that is at least 65%, at least 70%, at least 75%, at least 80%, at least 85%, at least 90%, at least 95%, at least 99%, or 100% identical to any one of SEQ ID NOs: 7, 13, 20, 28, 36, 40, 70, 77, 327, 150, 157, 332, 631, 765, 767, 143, 857, 177, 793, 1049, 1054, 1059, 1064, and 1069.

[1809] In some aspects, the antigen binding polypeptides provided herein comprise a VH2 comprising (i) a CDR1 having an amino acid sequence that is at least 65%, at least 70%, at least 75%, at least 80%, at least 85%, at least 90%, at least 95%, at least 99%, or 100% identical to any one of SEQ ID NOs: 5, 12, 18, 26, 34.68, 75, 148, 155, 629, 141, 175, 1047, 1052, 1057, 1062, and 1067; (ii) a CDR2 having an amino acid sequence that is at least 65%, at least 70%, at least 75%, at least 80%, at least 85%, at least 90%, at least 95%, at least 99%, or 100% identical to any one of SEQ ID NOs: 6, 19, 27, 35, 69, 76, 149, 156, 630, 142, 176, 1048, 1053, 1058, 1063, and 1068; and (iii) a CDR3 having an amino acid sequence that is at least 65%, at least 70%, at least 75%, at least 80%, at least 85%, at least 90%, at least 95%, at least 99%, or 100% identical to any one of SEQ ID NOs: 7, 13, 20, 28, 36, 40, 70, 77, 327, 150, 157, 332, 631, 765, 767, 143, 857, 177, 793, 1049, 1054, 1059, 1064, and 1069.

[1810] In some aspects, the antigen binding polypeptides provided herein comprise a VL1 comprising (i) a complementarity determining region (CDR) 1 having an amino acid sequence that is at least 65%, at least 70%, at least 75%, at least 80%, at least 85%, at least 90%, at least 95%, at least 99%, or 100% identical to any one of SEQ ID NOs: 1, 9, 15, 23, 30, 65, 72, 145, 152, 324, 627, 138, 172, 1045, 1050, 1055, 1060, and 1065; (ii) a CDR2 having an amino acid sequence that is at least 65%, at least 70%, at least 75%, at least 80%, at least 85%, at least 90%, at least 95%, at least 99%, or 100% identical to any one of SEQ ID NOs: 2, 31, 628, 1046, 1051, 1056, and 1061, or at least 65%, at least 70%, at least 75%, at least 80%, at least 85%, at least 90%, at least 95%, at least 99%, or 100% identical to any one of amino acid sequences GAS, LGS, GTN, SAS, SDS, AAS, DAS, and DNT; (iii) a CDR3 having an amino acid sequence that is at least 65%, at least 70%, at least 75%, at least 80%, at least 85%, at least 90%, at least 95%, at least 99%, or 100% identical to any one of SEQ ID NOs: 3, 10, 16, 24, 32, 38, 66, 73, 146, 153, 325, 326, 764, 766, 139, 856, 173, 792, and 1066; a VH1 comprising (i) a CDR1 having an amino acid sequence that is at least 65%, at least 70%, at least 75%, at least 80%, at least 85%, at least 90%, at least 95%, at least 99%, or 100% identical to any one of SEQ ID NOs: 5, 12, 18, 26, 34, 68, 75, 148, 155, 629, 141, 175, 1047, 1052, 1057, 1062, and 1067; (ii) a CDR2 having an amino acid sequence that is at least 65%, at least 70%, at least 75%, at least 80%, at least 85%, at least 90%, at least 95%, at least 99%, or 100% identical to any one of SEQ ID NOs: 6, 19, 27, 35, 69, 76, 149, 156, 630, 142, 176, 1048, 1053, 1058, 1063, and 1068; and (iii) a CDR3 having an amino acid sequence that is at least 65%, at least 70%, at least 75%, at least 80%, at least 85%, at least 90%, at least 95%, at least 99%, or 100% identical to any one of SEQ ID NOs: 7, 13, 20, 28, 36, 40, 70, 77, 327, 150, 157, 332, 631, 765, 767, 143, 857, 177, 793, 1049, 1054, 1059, 1064, and 1069; a VL2 comprising (i) a complementarity determining region (CDR) 1 having an amino acid sequence that is at least 65%, at least 70%, at least 75%, at least 80%, at least 85%, at least 90%, at least 95%, at least 99%, or 100% identical to any one of SEQ ID NOs: 1, 9, 15, 23, 30, 65, 72, 145, 152, 324, 627, 138, 172, 1045, 1050, 1055, 1060, and 1065; (ii) a CDR2 having an amino acid sequence that is at least 65%, at least 70%, at least 75%, at least 80%, at least 85%, at least 90%, at least 95%, at least 99%, or 100% identical to any one of SEQ ID NOs: 2, 31, 628, 1046, 1051, 1056, and 1061, or at least 65%, at least 70%, at least 75%, at least 80%, at least 85%, at least 90%, at least 95%, at least 99%, or 100% identical to any one of amino acid sequences GAS, LGS, GTN, SAS, SDS, AAS, DAS, and DNT; and (iii) a CDR3 having an amino acid sequence that is at least 65%, at least 70%, at least 75%, at least 80%, at least 85%, at least 90%, at least 95%, at least 99%, or 100% identical to any one of SEQ ID NOs: 3, 10, 16, 24, 32, 38, 66, 73, 146, 153, 325, 326, 764, 766, 139, 856, 173, 792, and 1066; and a VH2 comprising (i) a CDR1 having an amino acid sequence that is at least 65%, at least 70%, at least 75%, at least 80%, at least 85%, at least 90%, at least 95%, at least 99%, or 100% identical to any one of SEQ ID NOs: 5, 12, 18, 26, 34, 68, 75, 148, 155, 629, 141, 175, 1047, 1052, 1057, 1062, and 1067; (ii) a CDR2 having an amino acid sequence that is at least 65%, at least 70%, at least 75%, at least 80%, at least 85%, at least 90%, at least 95%, at least 99%, or 100% identical to any one of SEQ ID NOs: 6, 19, 27, 35, 69, 76, 149, 156, 630, 142, 176, 1048, 1053, 1058, 1063, and 1068; and (iii) a CDR3 having an amino acid sequence that is at least 65%, at least 70%, at least 75%, at least 80%, at least 85%, at least 90%, at least 95%, at least 99%, or 100% identical to any one of SEQ ID NOs: 7, 13, 20, 28, 36, 40, 70, 77, 327, 150, 157, 332, 631, 765, 767, 143, 857, 177, 793, 1049, 1054, 1059, 1064, and 1069.

[1811] In some aspects, the antigen binding polypeptides provided herein comprise a VL1 comprising an amino acid sequence that is at least 65%, at least 70%, at least 75%, at least 80%, at least 85%, at least 90%, at least 95%, at least 99%, or 100% identical to any one of SEQ ID NOs: 4, 11, 17, 25, 33, 39, 67, 74, 147, 154, 140, and 174.

[1812] In some aspects, the antigen binding polypeptides provided herein comprise a VH1 comprising an amino acid sequence that is at least 65%, at least 70%, at least 75%, at least 80%, at least 85%, at least 90%, at least 95%, at least 99%, or 100% identical to any one of SEQ ID NOs: 8, 14, 21, 22, 29, 37, 71, 78, 151, 158, 626, 144, and 178.

[1813] In some aspects, the antigen binding polypeptides provided herein comprise a VL2 comprising an amino acid sequence that is at least 65%, at least 70%, at least 75%, at least 80%, at least 85%, at least 90%, at least 95%, at least 99%, or 100% identical to any one of SEQ ID NOs: 4, 11, 17, 25, 33, 39, 67, 74, 147, 154, 140, and 174.

[1814] In some aspects, the antigen binding polypeptides provided herein comprise a VH2 comprising an amino acid sequence that is at least 65%, at least 70%, at least 75%, at least 80%, at least 85%, at least 90%, at least 95%, at least 99%, or 100% identical to any one of SEQ ID NOs: 8, 14, 21, 22, 29, 37, 71, 78, 151, 158, 626, 144, and 178.

[1815] In some aspects, the antigen binding polypeptides provided herein comprise (i) a VL1 comprising an amino acid sequence that is at least 65%, at least 70%, at least 75%, at least 80%, at least 85%, at least 90%, at least 95%, at least 99%, or 100% identical to any one of SEQ ID NOs: 4, 11, 17, 25, 33, 39, 67, 74, 147, 154, 140, and 174; (ii) a VH1 comprising an amino acid sequence that is at least 65%, at least 70%, at least 75%, at least 80%, at least 85%, at least 90%, at least 95%, at least 99%, or 100% identical to any one of SEQ ID NOs: 8, 14, 21, 22, 29, 37, 71, 78, 151, 158, 626, 144, and 178; (iii) a VL2 comprising an amino acid sequence that is at least 65%, at least 70%, at least 75%, at least 80%, at least 85%, at least 90%, at least 95%, at least 99%, or 100% identical to any one of SEQ ID NOs: 4, 11, 17, 25, 33, 39, 67, 74, 147, 154, 140, and 174; and (iv) a VH2 comprising an amino acid sequence that is at least 65%, at least 70%, at least 75%, at least 80%, at least 85%, at least 90%, at least 95%, at least 99%, or 100% identical to any one of SEQ ID NOs: 8, 14, 21, 22, 29, 37, 71, 78, 151, 158, 626, 144, and 178.

[1816] In some aspects, the antigen binding polypeptides provided herein comprise a VL1 comprising (i) a complementarity determining region (CDR) 1 having an amino acid sequence that is at least 65%, at least 70%, at least 75%, at least 80%, at least 85%, at least 90%, at least 95%, at least 99%, or 100% identical to any one of SEQ ID NOs: 41, 48, 138, 145, 152, 159, 166, 172, 192, 770, 778, 785, 794, 801, 807, 814, 827, 836, 849, 858, 865, 878, 1045, 1050, 1060, and 1065; (ii) a CDR2 having an amino acid sequence at least 65%, at least 70%, at least 75%, at least 80%, at least 85%, at least 90%, at least 95%, at least 99%, or 100% identical to any one of amino acid sequences AAS, GAS, DAS, NNN, SDS, SYN, WAS, and DAT, or at least 65%, at least 70%, at least 75%, at least 80%, at least 85%, at least 90%, at least 95%, at least 99%, or 100% identical to any one of SEQ ID NOs: 1046, 1051, and 1061; and (iii) a CDR3 having an amino acid sequence that is at least 65%, at least 70%, at least 75%, at least 80%, at least 85%, at least 90%, at least 95%, at least 99%, or 100% identical to any one of SEQ ID NOs: 42, 139, 146, 153, 160, 167, 173, 764, 766, 768, 771, 779, 786, 792, 795, 808, 815, 821, 830, 837, 843, 850, 856, 859, 866, 872, 879, 885, and 1066.

[1817] In some aspects, the antigen binding polypeptides provided herein comprise a VL2 comprising (i) a complementarity determining region (CDR) 1 having an amino acid sequence that is at least 65%, at least 70%, at least 75%, at least 80%, at least 85%, at least 90%, at least 95%, at least 99%, or 100% identical to any one of SEQ ID NOs: 41, 48, 138, 145, 152, 159, 166, 172, 192, 770, 778, 785, 794, 801, 807, 814, 827, 836, 849, 858, 865, 878, 1045, 1050, 1060, and 1065; (ii) a CDR2 having an amino acid sequence that is at least 65%, at least 70%, at least 75%, at least 80%, at least 85%, at least 90%, at least 95%, at least 99%, or 100% identical to any one of amino acid sequences AAS, GAS, DAS, NNN, SDS, SYN, WAS, and DAT, or at least 65%, at least 70%, at least 75%, at least 80%, at least 85%, at least 90%, at least 95%, at least 99%, or 100% identical to any one of SEQ ID NOs: 1046, 1051, and 1061; and (iii) a CDR3 having an amino acid sequence that is at least 65%, at least 70%, at least 75%, at least 80%, at least 85%, at least 90%, at least 95%, at least 99%, or 100% identical to any one of SEQ ID NOs: 42, 139, 146, 153, 160, 167, 173, 764, 766, 768, 771, 779, 786, 792, 795, 808, 815, 821, 830, 837, 843, 850, 856, 859, 866, 872, 879, 885, and 1066.

[1818] In some aspects, the antigen binding polypeptides provided herein comprise a VH1 comprising (i) a CDR1 having an amino acid sequence that is at least 65%, at least 70%, at least 75%, at least 80%, at least 85%, at least 90%, at least 95%, at least 99%, or 100% identical to any one of SEQ ID NOs: 44, 133, 141, 148, 155, 162, 175, 773, 781, 788, 797, 803, 810, 817, 823, 832, 839, 845, 852, 861, 868, 874, 881, 1047, 1052, 1062, and 1067; (ii) a CDR2 having an amino acid sequence that is at least 65%, at least 70%, at least 75%, at least 80%, at least 85%, at least 90%, at least 95%, at least 99%, or 100% identical to any one of SEQ ID NOs: 6, 142, 149, 156, 163, 169, 176, 776, 782, 789, 798, 804, 811, 818, 824, 833, 840, 846, 853, 862, 869, 875, 882, 1048, 1053, 1063, and 1068; and (iii) a CDR3 having an amino acid sequence that is at least 65%, at least 70%, at least 75%, at least 80%, at least 85%, at least 90%, at least 95%, at least 99%, or 100% identical to any one of SEQ ID NOs: 46, 143, 150, 157, 164, 170, 177, 765, 767, 769, 774, 783, 790, 793, 799, 805, 812, 819, 825, 834, 841, 847, 854, 857, 863, 870, 876, 883, 886, 1049, 1054, 1064, and 1069.

[1819] In some aspects, the antigen binding polypeptides provided herein comprise a VH2 comprising (i) a CDR1 having an amino acid sequence that is at least 65%, at least 70%, at least 75%, at least 80%, at least 85%, at least 90%, at least 95%, at least 99%, or 100% identical to any one of SEQ ID NOs: 44, 133, 141, 148, 155, 162, 175, 773, 781, 788, 797, 803, 810, 817, 823, 832, 839, 845, 852, 861, 868, 874, 881, 1047, 1052, 1062, and 1067; (ii) a CDR2 having an amino acid sequence that is at least 65%, at least 70%, at least 75%, at least 80%, at least 85%, at least 90%, at least 95%, at least 99%, or 100% identical to any one of SEQ ID NOs: 6, 142, 149, 156, 163, 169, 176, 776, 782, 789, 798, 804, 811, 818, 824, 833, 840, 846, 853, 862, 869, 875, 882, 1048, 1053, 1063, and 1068; and (iii) a CDR3 having an amino acid sequence that is at least 65%, at least 70%, at least 75%, at least 80%, at least 85%, at least 90%, at least 95%, at least 99%, or 100% identical to any one of SEQ ID NOs: 46, 143, 150, 157, 164, 170, 177, 765, 767, 769, 774, 783, 790, 793, 799, 805, 812, 819, 825, 834, 841, 847, 854, 857, 863, 870, 876, 883, 886, 1049, 1054, 1064, and 1069.

[1820] In some aspects, the antigen binding polypeptides provided herein comprise a VL1 comprising (i) a complementarity determining region (CDR) 1 having an amino acid sequence that is at least 65%, at least 70%, at least 75%, at least 80%, at least 85%, at least 90%, at least 95%, at least 99%, or 100% identical to any one of SEQ ID NOs: 41, 48, 138, 145, 152, 159, 166, 172, 192, 770, 778, 785, 794, 801, 807, 814, 827, 836, 849, 858, 865, 878, 1045, 1050, 1060, and 1065; (ii) a CDR2 having an amino acid sequence that is at least 65%, at least 70%, at least 75%, at least 80%, at least 85%, at least 90%, at least 95%, at least 99%, or 100% identical to any one of amino acid sequences AAS, GAS, DAS, NNN, SDS, SYN, WAS, and DAT, or at least 65%, at least 70%, at least 75%, at least 80%, at least 85%, at least 90%, at least 95%, at least 99%, or 100% identical to any one of SEQ ID NOs: 1046, 1051, and 1061; and (iii) a CDR3 having an amino acid sequence that is at least 65%, at least 70%, at least 75%, at least 80%, at least 85%, at least 90%, at least 95%, at least 99%, or 100% identical to any one of SEQ ID NOs: 42, 139, 146, 153, 160, 167, 173, 764, 766, 768, 771, 779, 786, 792, 795, 808, 815, 821, 830, 837, 843, 850, 856, 859, 866, 872, 879, 885, and 1066; a VH1 comprising (i) a CDR1 having an amino acid sequence that is at least 65%, at least 70%, at least 75%, at least 80%, at least 85%, at least 90%, at least 95%, at least 99%, or 100% identical to any one of SEQ ID NOs: 44, 133, 141, 148, 155, 162, 175, 773, 781, 788, 797, 803, 810, 817, 823, 832, 839, 845, 852, 861, 868, 874, 881, 1047, 1052, 1062, and 1067; (ii) a CDR2 having an amino acid sequence that is at least 65%, at least 70%, at least 75%, at least 80%, at least 85%, at least 90%, at least 95%, at least 99%, or 100% identical to any one of SEQ ID NOs: 6, 142, 149, 156, 163, 169, 176, 776, 782, 789, 798, 804, 811, 818, 824, 833, 840, 846, 853, 862, 869, 875, 882, 1048, 1053, 1063, and 1068; and (iii) a CDR3 having an amino acid sequence that is at least 65%, at least 70%, at least 75%, at least 80%, at least 85%, at least 90%, at least 95%, at least 99%, or 100% identical to any one of SEQ ID NOs: 46, 143, 150, 157, 164, 170, 177, 765, 767, 769, 774, 783, 790, 793, 799, 805, 812, 819, 825, 834, 841, 847, 854, 857, 863, 870, 876, 883, 886, 1049, 1054, 1064, and 1069; a VL2 comprising (i) a complementarity determining region (CDR) 1 having an amino acid sequence that is at least 65%, at least 70%, at least 75%, at least 80%, at least 85%, at least 90%, at least 95%, at least 99%, or 100% identical to any one of SEQ ID NOs: 41, 48, 138, 145, 152, 159, 166, 172, 192, 770, 778, 785, 794, 801, 807, 814, 827, 836, 849, 858, 865, 878, 1045, 1050, 1060, and 1065; (ii) a CDR2 having an amino acid sequence that is at least 65%, at least 70%, at least 75%, at least 80%, at least 85%, at least 90%, at least 95%, at least 99%, or 100% identical to any one of amino acid sequences AAS, GAS, DAS, NNN, SDS, SYN, WAS, and DAT, or at least 65%, at least 70%, at least 75%, at least 80%, at least 85%, at least 90%, at least 95%, at least 99%, or 100% identical to any one of SEQ ID NOs: 1046, 1051, and 1061; and (iii) a CDR3 having an amino acid sequence that is at least 65%, at least 70%, at least 75%, at least 80%, at least 85%, at least 90%, at least 95%, at least 99%, or 100% identical to any one of SEQ ID NOs: 42, 139, 146, 153, 160, 167, 173, 764, 766, 768, 771, 779, 786, 792, 795, 808, 815, 821, 830, 837, 843, 850, 856, 859, 866, 872, 879, 885, and 1066; and a VH2 comprising (i) a CDR1 having an amino acid sequence that is at least 65%, at least 70%, at least 75%, at least 80%, at least 85%, at least 90%, at least 95%, at least 99%, or 100% identical to any one of SEQ ID NOs: 44, 133, 141, 148, 155, 162, 175, 773, 781, 788, 797, 803, 810, 817, 823, 832, 839, 845, 852, 861, 868, 874, 881, 1047, 1052, 1062, and 1067; (ii) a CDR2 having an amino acid sequence that is at least 65%, at least 70%, at least 75%, at least 80%, at least 85%, at least 90%, at least 95%, at least 99%, or 100% identical to any one of SEQ ID NOs: 6, 142, 149, 156, 163, 169, 176, 776, 782, 789, 798, 804, 811, 818, 824, 833, 840, 846, 853, 862, 869, 875, 882, 1048, 1053, 1063, and 1068; and (iii) a CDR3 having an amino acid sequence that is at least 65%, at least 70%, at least 75%, at least 80%, at least 85%, at least 90%, at least 95%, at least 99%, or 100% identical to any one of SEQ ID NOs: 46, 143, 150, 157, 164, 170, 177, 765, 767, 769, 774, 783, 790, 793, 799, 805, 812, 819, 825, 834, 841, 847, 854, 857, 863, 870, 876, 883, 886, 1049, 1054, 1064, and 1069.

[1821] In some aspects, the antigen binding polypeptides provided herein comprise a VL1 comprising an amino acid sequence that is at least 65%, at least 70%, at least 75%, at least 80%, at least 85%, at least 90%, at least 95%, at least 99%, or 100% identical to any one of SEQ ID NOs: 43, 140, 147, 154, 161, 168, 174, 772, 780, 787, 796, 802, 809, 816, 822, 831, 838, 844, 851, 860, 867, 873, and 880.

[1822] In some aspects, the antigen binding polypeptides provided herein comprise a VH1 comprising an amino acid sequence that is at least 65%, at least 70%, at least 75%, at least 80%, at least 85%, at least 90%, at least 95%, at least 99%, or 100% identical to any one of SEQ ID NOs: 144, 151, 158, 165, 171, 178, 775, 777, 784, 791, 800, 806, 813, 820, 826, 835, 842, 848, 855, 864, 871, 877, and 884.

[1823] In some aspects, the antigen binding polypeptides provided herein comprise a VL2 comprising an amino acid sequence that is at least 65%, at least 70%, at least 75%, at least 80%, at least 85%, at least 90%, at least 95%, at least 99%, or 100% identical to any one of SEQ ID NOs: 43, 140, 147, 154, 161, 168, 174, 772, 780, 787, 796, 802, 809, 816, 822, 831, 838, 844, 851, 860, 867, 873, and 880.

[1824] In some aspects, the antigen binding polypeptides provided herein comprise a VH2 comprising an amino acid sequence that is at least 65%, at least 70%, at least 75%, at least 80%, at least 85%, at least 90%, at least 95%, at least 99%, or 100% identical to any one of SEQ ID NOs: 144, 151, 158, 165, 171, 178, 775, 777, 784, 791, 800, 806, 813, 820, 826, 835, 842, 848, 855, 864, 871, 877, and 884.

[1825] In some aspects, the antigen binding polypeptides provided herein comprise (i) a VL1 comprising an amino acid sequence that is at least 65%, at least 70%, at least 75%, at least 80%, at least 85%, at least 90%, at least 95%, at least 99%, or 100% identical to any one of SEQ ID NOs: 43, 140, 147, 154, 161, 168, 174, 772, 780, 787, 796, 802, 809, 816, 822, 831, 838, 844, 851, 860, 867, 873, and 880; (ii) a VH1 comprising an amino acid sequence that is at least 65%, at least 70%, at least 75%, at least 80%, at least 85%, at least 90%, at least 95%, at least 99%, or 100% identical to any one of SEQ ID NOs: 144, 151, 158, 165, 171, 178, 775, 777, 784, 791, 800, 806, 813, 820, 826, 835, 842, 848, 855, 864, 871, 877, and 884; (iii) a VL2 comprising an amino acid sequence that is at least 65%, at least 70%, at least 75%, at least 80%, at least 85%, at least 90%, at least 95%, at least 99%, or 100% identical to any one of SEQ ID NOs: 43, 140, 147, 154, 161, 168, 174, 772, 780, 787, 796, 802, 809, 816, 822, 831, 838, 844, 851, 860, 867, 873, and 880; and (iv) a VH2 comprising an amino acid sequence that is at least 65%, at least 70%, at least 75%, at least 80%, at least 85%, at least 90%, at least 95%, at least 99%, or 100% identical to any one of SEQ ID NOs: 144, 151, 158, 165, 171, 178, 775, 777, 784, 791, 800, 806, 813, 820, 826, 835, 842, 848, 855, 864, 871, 877, and 884.

[1826] In some aspects, at least one of VL1 or VL2 comprised in the antigen binding polypeptides provided herein comprises (i) a complementarity determining region (CDR) 1 having an amino acid sequence that is at least 65%, at least 70%, at least 75%, at least 80%, at least 85%, at least 90%, at least 95%, at least 99%, or 100% identical to SEQ ID NO: 145 or 1050; (ii) a CDR2 having an amino acid sequence at least 65%, at least 70%, at least 75%, at least 80%, at least 85%, at least 90%, at least 95%, at least 99%, or 100% identical to SEQ ID NO: 1051 or an amino acid sequence that is at least 65%, at least 70%, at least 75%, at least 80%, at least 85%, at least 90%, at least 95%, at least 99%, or 100% identical to amino acid sequence AAS; and (iii) a CDR3 having an amino acid sequence that is at least 65%, at least 70%, at least 75%, at least 80%, at least 85%, at least 90%, at least 95%, at least 99%, or 100% identical to SEQ ID NO: 146 or 764.

[1827] In some aspects, at least one of VH1 or VH2 comprised in the antigen binding polypeptides provided herein comprises (i) a complementarity determining region (CDR) 1 having an amino acid sequence that is at least 65%, at least 70%, at least 75%, at least 80%, at least 85%, at least 90%, at least 95%, at least 99%, or 100% identical to SEQ ID NO: 148 or 1052; (ii) a CDR2 having an amino acid sequence that is at least 65%, at least 70%, at least 75%, at least 80%, at least 85%, at least 90%, at least 95%, at least 99%, or 100% identical to SEQ ID NO: 149 or 1053; and (iii) a CDR3 having an amino acid sequence that is at least 65%, at least 70%, at least 75%, at least 80%, at least 85%, at least 90%, at least 95%, at least 99%, or 100% identical to SEQ ID NO: 150, 765, or 1054.

[1828] In some aspects, at least one of VL1 or VL2 comprised in the antigen binding polypeptides provided herein comprises (i) a complementarity determining region (CDR) 1 having an amino acid sequence that is at least 65%, at least 70%, at least 75%, at least 80%, at least 85%, at least 90%, at least 95%, at least 99%, or 100% identical to SEQ ID NO: 145 or 1050; (ii) a CDR2 having an amino acid sequence at least 65%, at least 70%, at least 75%, at least 80%, at least 85%, at least 90%, at least 95%, at least 99%, or 100% identical to SEQ ID NO: 1051 or an amino acid sequence that is at least 65%, at least 70%, at least 75%, at least 80%, at least 85%, at least 90%, at least 95%, at least 99%, or 100% identical to amino acid sequence AAS; and (iii) a CDR3 having an amino acid sequence that is at least 65%, at least 70%, at least 75%, at least 80%, at least 85%, at least 90%, at least 95%, at least 99%, or 100% identical to SEQ ID NO: 146 or 764; and at least one of VH1 or VH2 comprised in the antigen binding polypeptides provided herein comprises (iv) a complementarity determining region (CDR) 1 having an amino acid sequence that is at least 65%, at least 70%, at least 75%, at least 80%, at least 85%, at least 90%, at least 95%, at least 99%, or 100% identical to SEQ ID NO: 148 or 1052; (v) a CDR2 having an amino acid sequence that is at least 65%, at least 70%, at least 75%, at least 80%, at least 85%, at least 90%, at least 95%, at least 99%, or 100% identical to SEQ ID NO: 149 or 1053; and (vi) a CDR3 having an amino acid sequence that is at least 65%, at least 70%, at least 75%, at least 80%, at least 85%, at least 90%, at least 95%, at least 99%, or 100% identical to SEQ ID NO: 150, 765, or 1054.

[1829] In some aspects, at least one of VL1 or VL2 comprised in the antigen binding polypeptides provided herein comprises an amino acid sequence that is at least 65%, at least 70%, at least 75%, at least 80%, at least 85%, at least 90%, at least 95%, at least 99%, or 100% identical to SEQ ID NO: 147.

[1830] In some aspects, at least one of VH1 or VH2 comprised in the antigen binding polypeptides provided herein comprises an amino acid sequence that is at least 65%, at least 70%, at least 75%, at least 80%, at least 85%, at least 90%, at least 95%, at least 99%, or 100% identical to SEQ ID NO: 151.

[1831] In some aspects, (i) at least one of VL1 or VL2 comprised in the antigen binding polypeptides provided herein comprises an amino acid sequence that is at least 65%, at least 70%, at least 75%, at least 80%, at least 85%, at least 90%, at least 95%, at least 99%, or 100% identical to SEQ ID NO: 147, and (ii) at least one of VH1 or VH2 comprised in the antigen binding polypeptides provided herein comprises an amino acid sequence that is at least 65%, at least 70%, at least 75%, at least 80%, at least 85%, at least 90%, at least 95%, at least 99%, or 100% identical to SEQ ID NO: 151.

[1832] In some aspects, the antigen binding polypeptides provided herein comprise a VL1 comprising (i) a complementarity determining region (CDR) 1 having an amino acid sequence that is at least 65%, at least 70%, at least 75%, at least 80%, at least 85%, at least 90%, at least 95%, at least 99%, or 100% identical to SEQ ID NO: 145 or 1050; (ii) a CDR2 having an amino acid sequence at least 65%, at least 70%, at least 75%, at least 80%, at least 85%, at least 90%, at least 95%, at least 99%, or 100% identical to SEQ ID NO: 1051 or an amino acid sequence that is at least 65%, at least 70%, at least 75%, at least 80%, at least 85%, at least 90%, at least 95%, at least 99%, or 100% identical to amino acid sequence AAS; and (iii) a CDR3 having an amino acid sequence that is at least 65%, at least 70%, at least 75%, at least 80%, at least 85%, at least 90%, at least 95%, at least 99%, or 100% identical to SEQ ID NO: 146 or 764; a VH1 comprising (iv) a complementarity determining region (CDR) 1 having an amino acid sequence that is at least 65%, at least 70%, at least 75%, at least 80%, at least 85%, at least 90%, at least 95%, at least 99%, or 100% identical to SEQ ID NO: 148 or 1052; (v) a CDR2 having an amino acid sequence that is at least 65%, at least 70%, at least 75%, at least 80%, at least 85%, at least 90%, at least 95%, at least 99%, or 100% identical to SEQ ID NO: 149 or 1053; and (vi) a CDR3 having an amino acid sequence that is at least 65%, at least 70%, at least 75%, at least 80%, at least 85%, at least 90%, at least 95%, at least 99%, or 100% identical to SEQ ID NO: 150, 765, or 1054; a VL2 comprising (vii) a complementarity determining region (CDR) 1 having an amino acid sequence that is at least 65%, at least 70%, at least 75%, at least 80%, at least 85%, at least 90%, at least 95%, at least 99%, or 100% identical to any one of SEQ ID NOs: 1, 9, 15, 23, 30, 41, 48, 55, 58, 65, 72, 79, 86, 93, 99, 105, 112, 119, 130, 138, 145, 152, 159, 166, 172, 179, 186, 192, 199, 205, 212, 219, 226, 232, 324, 627, 640, 650, 659, 676, 687, 695, 703, 712, 770, 778, 785, 794, 801, 807, 814, 827, 836, 849, 858, 865, 878, 1045, 1050, 1055, 1060, and 1065; (viii) a CDR2 having an amino acid sequence at least 65%, at least 70%, at least 75%, at least 80%, at least 85%, at least 90%, at least 95%, at least 99%, or 100% identical to any one of SEQ ID NOs: 2, 31, 628, 641, 677, 1046, 1051, 1056, and 1061; or at least 65%, at least 70%, at least 75%, at least 80%, at least 85%, at least 90%, at least 95%, at least 99%, or 100% identical to any one of amino acid sequences AAS, GAS, LGS, GTN, GTN, SAS, SDS, DNT, EVT, DAS, DVT, RNS, DVS, EDS, DDS, KDS, VAS, WAS, YTS, EVS, NNN, SYN, and DAT; and (ix) a CDR3 having an amino acid sequence at least 65%, at least 70%, at least 75%, at least 80%, at least 85%, at least 90%, at least 95%, at least 99%, or 100% identical to any one of SEQ ID NOs: 3, 10, 16, 24, 32, 38, 42, 49, 59, 66, 73, 80, 87, 94, 100, 106, 113, 120, 126, 131, 139, 146, 153, 160, 167, 173, 180, 187, 193, 200, 206, 213, 220, 227, 233, 239, 242, 246, 249, 256, 283, 285, 287, 288, 290, 292, 294, 296, 301, 304, 306, 309, 311, 313, 316, 325, 326, 329, 642, 651, 660, 668, 678, 651, 696, 704, 713, 764, 766, 768, 771, 779, 786, 792, 795, 808, 815, 821, 830, 837, 843, 850, 856, 859, 866, 872, 879, 885, and 1066; and a VH2 comprising (x) a CDR1 having an amino acid sequence at least 65%, at least 70%, at least 75%, at least 80%, at least 85%, at least 90%, at least 95%, at least 99%, or 100% identical to any one of SEQ ID NOs: 5, 12, 18, 26, 34, 44, 51, 61, 68, 75, 82, 89, 96, 102, 108, 115, 122, 133, 141, 148, 155, 162, 175, 182, 189, 195, 202, 208, 215, 222, 229, 235, 318, 629, 645, 654, 663, 671, 682, 690, 699, 707, 716, 773, 781, 788, 797, 803, 810, 817, 823, 832, 839, 845, 852, 861, 868, 874, 881, 1047, 1052, 1057, 1062, and 1067; (xi) a CDR2 having an amino acid sequence at least 65%, at least 70%, at least 75%, at least 80%, at least 85%, at least 90%, at least 95%, at least 99%, or 100% identical to any one of SEQ ID NOs: 6, 19, 27, 35, 45, 52, 56, 62, 69, 76, 83, 90, 109, 116, 123, 134, 142, 149, 156, 163, 169, 176, 183, 196, 209, 216, 223, 236, 273, 319, 328, 630, 646, 655, 664, 672, 683, 691, 708, 776, 782, 789, 798, 804, 811, 818, 824, 833, 840, 846, 853, 862, 869, 875, 882, 1048, 1053, 1058, 1063, and 1068; and (xii) a CDR3 having an amino acid sequence at least 65%, at least 70%, at least 75%, at least 80%, at least 85%, at least 90%, at least 95%, at least 99%, or 100% identical to any one of SEQ ID NOs: 7, 13, 20, 28, 36, 40, 46, 53, 63, 70, 77, 84, 91, 97, 103, 110, 117, 124, 128, 135, 143, 150, 157, 164, 170, 177, 184, 190, 197, 203, 210, 217, 224, 230, 237, 241, 244, 248, 253, 257, 259, 261, 263, 265, 267, 269, 271, 274, 276, 278, 281, 297, 320, 322, 327, 330, 332, 631, 647, 656, 665, 673, 684, 692, 700, 709, 717, 765, 767, 769, 774, 783, 790, 793, 799, 805, 812, 819, 825, 834, 841, 847, 854, 857, 863, 870, 876, 883, 886, 1049, 1054, 1059, 1064, and 1069.

[1833] In some aspects, the antigen binding polypeptides provided herein comprise (i) a VL1 comprising an amino acid sequence that is at least 65%, at least 70%, at least 75%, at least 80%, at least 85%, at least 90%, at least 95%, at least 99%, or 100% identical to SEQ ID NO: 147; (ii) a VH1 comprising an amino acid sequence that is at least 65%, at least 70%, at least 75%, at least 80%, at least 85%, at least 90%, at least 95%, at least 99%, or 100% identical to SEQ ID NO: 151; (iii) a VL2 comprising an amino acid sequence that is at least 65%, at least 70%, at least 75%, at least 80%, at least 85%, at least 90%, at least 95%, at least 99%, or 100% identical to any one of SEQ ID NOs: 4, 11, 17, 25, 33, 39, 43, 50, 60, 67, 74, 81, 88, 95, 101, 107, 114, 121, 127, 132, 140, 147, 154, 161, 168, 174, 181, 188, 194, 201, 207, 214, 221, 228, 234, 240, 243, 247, 250, 251, 252, 255, 284, 286, 289, 291, 293, 295, 299, 300, 302, 303, 305, 307, 308, 310, 312, 314, 315, 317, 323, 639, 649, 658, 667, 675, 686, 694, 702, 711, 772, 780, 787, 796, 802, 809, 816, 822, 831, 838, 844, 851, 860, 867, 873, 880, and 988; and (iv) a VH2 comprising an amino acid sequence that is at least 65%, at least 70%, at least 75%, at least 80%, at least 85%, at least 90%, at least 95%, at least 99%, or 100% identical to any one of SEQ ID NOs: 8, 14, 21, 22, 29, 37, 47, 54, 57, 64, 71, 78, 85, 92, 98, 104, 111, 118, 125, 129, 136, 137, 144, 151, 158, 165, 171, 178, 185, 191, 198, 204, 211, 218, 225, 231, 238, 245, 254, 258, 260, 262, 264, 266, 268, 270, 272, 275, 277, 279, 280, 282, 298, 321, 331, 626, 644, 653, 662, 670, 681, 689, 698, 706, 715, 775, 777, 784, 791, 800, 806, 813, 820, 826, 835, 842, 848, 855, 864, 871, 877, and 884.

[1834] In some aspects, the antigen binding polypeptides provided herein comprise a VL1 comprising (i) a complementarity determining region (CDR) 1 having an amino acid sequence that is at least 65%, at least 70%, at least 75%, at least 80%, at least 85%, at least 90%, at least 95%, at least 99%, or 100% identical to SEQ ID NO: 145 or 1050; (ii) a CDR2 having an amino acid sequence at least 65%, at least 70%, at least 75%, at least 80%, at least 85%, at least 90%, at least 95%, at least 99%, or 100% identical to SEQ ID NO: 1051 or an amino acid sequence that is at least 65%, at least 70%, at least 75%, at least 80%, at least 85%, at least 90%, at least 95%, at least 99%, or 100% identical to amino acid sequence AAS; and (iii) a CDR3 having an amino acid sequence that is at least 65%, at least 70%, at least 75%, at least 80%, at least 85%, at least 90%, at least 95%, at least 99%, or 100% identical to SEQ ID NO: 146 or 764; a VH1 comprising (iv) a complementarity determining region (CDR) 1 having an amino acid sequence that is at least 65%, at least 70%, at least 75%, at least 80%, at least 85%, at least 90%, at least 95%, at least 99%, or 100% identical to SEQ ID NO: 148 or 1052; (v) a CDR2 having an amino acid sequence that is at least 65%, at least 70%, at least 75%, at least 80%, at least 85%, at least 90%, at least 95%, at least 99%, or 100% identical to SEQ ID NO: 149 or 1053; and (vi) a CDR3 having an amino acid sequence that is at least 65%, at least 70%, at least 75%, at least 80%, at least 85%, at least 90%, at least 95%, at least 99%, or 100% identical to SEQ ID NO: 150, 765, or 1054; a VL2 comprising (vii) a complementarity determining region (CDR) 1 having an amino acid sequence that is at least 65%, at least 70%, at least 75%, at least 80%, at least 85%, at least 90%, at least 95%, at least 99%, or 100% identical to any one of SEQ ID NOs: 1, 9, 15, 23, 30, 65, 72, 145, 152, 324, 627, 138, 172, 1045, 1050, 1055, 1060, and 1065; (viii) a CDR2 having an amino acid sequence at least 65%, at least 70%, at least 75%, at least 80%, at least 85%, at least 90%, at least 95%, at least 99%, or 100% identical to any one of SEQ ID NOs: 2, 31, 628, 1046, 1051, 1056, and 1061, or at least 65%, at least 70%, at least 75%, at least 80%, at least 85%, at least 90%, at least 95%, at least 99%, or 100% identical to any one of amino acid sequences GAS, LGS, GTN, SAS, SDS, AAS, DAS, and DNT; and (ix) a CDR3 having an amino acid sequence at least 65%, at least 70%, at least 75%, at least 80%, at least 85%, at least 90%, at least 95%, at least 99%, or 100% identical to any one of SEQ ID NOs: 3, 10, 16, 24, 32, 38, 66, 73, 146, 153, 325, 326, 764, 766, 139, 856, 173, 792, and 1066; and a VH2 comprising (x) a CDR1 having an amino acid sequence at least 65%, at least 70%, at least 75%, at least 80%, at least 85%, at least 90%, at least 95%, at least 99%, or 100% identical to any one of SEQ ID NOs: 5, 12, 18, 26, 34, 68, 75, 148, 155, 629, 141, 175, 1047, 1052, 1057, 1062, and 1067; (xi) a CDR2 having an amino acid sequence at least 65%, at least 70%, at least 75%, at least 80%, at least 85%, at least 90%, at least 95%, at least 99%, or 100% identical to any one of SEQ ID NOs: 6, 19, 27, 35, 69, 76, 149, 156, 630, 142, 176, 1048, 1053, 1058, 1063, and 1068; and (xii) a CDR3 having an amino acid sequence at least 65%, at least 70%, at least 75%, at least 80%, at least 85%, at least 90%, at least 95%, at least 99%, or 100% identical to any one of SEQ ID NOs: 7, 13, 20, 28, 36, 40, 70, 77, 327, 150, 157, 332, 631, 765, 767, 143, 857, 177, 793, 1049, 1054, 1059, 1064, and 1069.

[1835] In some aspects, the antigen binding polypeptides provided herein comprise (i) a VL1 comprising an amino acid sequence that is at least 65%, at least 70%, at least 75%, at least 80%, at least 85%, at least 90%, at least 95%, at least 99%, or 100% identical to SEQ ID NO: 147; (ii) a VH1 comprising an amino acid sequence that is at least 65%, at least 70%, at least 75%, at least 80%, at least 85%, at least 90%, at least 95%, at least 99%, or 100% identical to SEQ ID NO: 151; (iii) a VL2 comprising an amino acid sequence that is at least 65%, at least 70%, at least 75%, at least 80%, at least 85%, at least 90%, at least 95%, at least 99%, or 100% identical to any one of SEQ ID NOs: 4, 11, 17, 25, 33, 39, 67, 74, 147, 154, 140, and 174; and (iv) a VH2 comprising an amino acid sequence that is at least 65%, at least 70%, at least 75%, at least 80%, at least 85%, at least 90%, at least 95%, at least 99%, or 100% identical to any one of SEQ ID NOs: 8, 14, 21, 22, 29, 37, 71, 78, 151, 158, 626, 144, and 178.

[1836] In some aspects, the antigen binding polypeptides provided herein further comprise an Fc region. In some aspects, the antigen binding polypeptides provided herein further comprise an Fc region at the carboxy-terminus. In some aspects, the Fc region comprises an immunoglobulin heavy chain constant region 2 (CH2) and/or an immunoglobulin heavy chain constant region 3 (CH3). In some aspects, the Fc region further comprises an immunoglobulin hinge (i.e., a hinge region). In some aspects, the hinge region comprises an amino acid sequence at least 65%, at least 70%, at least 75%, at least 80%, at least 85%, at least 90%, at least 95%, at least 99%, or 100% identical to any one of SEQ ID NOs: 635, 636, 1072, 1073, or 1074. In some aspects, the Fc region comprises a CH2 and a CH3. In some aspects, the CH2 comprises an amino acid sequence that is at least 65%, at least 70%, at least 75%, at least 80%, at least 85%, at least 90%, at least 95%, at least 99%, or 100% identical to any one of SEQ ID NOs: 1075-1078. In some aspects, the CH3 comprises an amino acid sequence that is at least 65%, at least 70%, at least 75%, at least 80%, at least 85%, at least 90%, at least 95%, at least 99%, or 100% identical to any one of SEQ ID NOs: 1079-1085. In some aspects, the Fc region comprises an amino acid sequence that is at least 65%, at least 70%, at least 75%, at least 80%, at least 85%, at least 90%, at least 95%, at least 99%, or 100% identical to any one of SEQ ID NOs: 376-380.

[1837] In some aspects, the Fc region comprises one or more amino acid substitutions. In some aspects, the one or more amino acid substitutions comprise one or more half-life extension amino acid substitutions. In some aspects, the one or more half-life extension amino acid substitutions comprise one or more of amino acid substitutions M428L, N434A, N434S, L234F, L235E, P331S, M252Y, S254T, and T256E, or equivalent thereof, based on the EU numbering scheme. In some aspects, the one or more half-life extension amino acid substitutions comprise a LA (M428L and N434A, or equivalent thereof, based on the EU numbering scheme) amino acid substitution. In some aspects, the one or more half-life extension amino acid substitutions comprise a LS (M428L and N434S, or equivalent thereof, based on the EU numbering scheme) amino acid substitution. In some aspects, the one or more half-life extension amino acid substitutions comprise L234F and L235E, or equivalent thereof (based on the EU numbering scheme) amino acid substitutions. In some aspects, the one or more half-life extension amino acid substitutions comprise a TM (L234F, L235E, and P331S, or equivalent thereof, based on the EU numbering scheme) amino acid substitution. In some aspects, the one or more half-life extension amino acid substitutions comprise a YTE (M252Y, S254T, and T256E, or equivalent thereof, based on the EU numbering scheme) amino acid substitution.

[1838] In some aspects, the Fc region comprises at least one knob-into-hole modification. In some aspects, the antigen binding polypeptides disclosed herein are comprised in IgG1 or IgG4 antibodies or antigen binding fragments thereof. In some aspects, the knob-into-hole modification comprises one or more of knob substitutions of S354C and T366W, or equivalent thereof, and/or one or more of hole substitutions of Y349C, T366S, L368A, Y407V, or equivalent thereof, or a combination thereof, based on the EU numbering scheme. In some aspects, the Fc region comprises a knob-into-hole modification comprising knob substitutions of S354C and T366W, or equivalent thereof, and/or hole substitutions of Y349C, T366S, L368A, and Y407V, or equivalent thereof, and/or a half-life extension amino acid substitution comprising: a LA (M428L and N434A, or equivalent thereof, based on the EU numbering scheme) amino acid substitution, a LS (M428L and N434S, or equivalent thereof, based on the EU numbering scheme) amino acid substitution, L234F and L235E, or equivalent thereof (based on the EU numbering scheme) amino acid substitutions, a TM (L234F, L235E, and P331S, or equivalent thereof, based on the EU numbering scheme) amino acid substitution, a YTE (M252Y, S254T, and T256E, or equivalent thereof, based on the EU numbering scheme) amino acid substitution, or any combination thereof.

[1839] In some aspects, the Fc region comprises knob substitutions of S354C and T366W, or equivalent thereof, and a half-life extension amino acid substitution comprising: a LA (M428L and N434A, or equivalent thereof, based on the EU numbering scheme) amino acid substitution, a LS (M428L and N434S, or equivalent thereof, based on the EU numbering scheme) amino acid substitution. L234F and L235E, or equivalent thereof (based on the EU numbering scheme) amino acid substitutions, a TM (L234F, L235E, and P331S, or equivalent thereof, based on the EU numbering scheme) amino acid substitution, a YTE (M252Y, S254T, and T256E, or equivalent thereof, based on the EU numbering scheme) amino acid substitution, or any combination thereof.

[1840] In some aspects, the Fc region comprises hole substitutions of Y349C, T366S, L368A, and Y407V, or equivalent thereof, and a half-life extension amino acid substitution comprising: a LA (M428L and N434A, or equivalent thereof, based on the EU numbering scheme) amino acid substitution, a LS (M428L and N434S, or equivalent thereof, based on the EU numbering scheme) amino acid substitution. L234F and L235E, or equivalent thereof (based on the EU numbering scheme) amino acid substitutions, a TM (L234F, L235E, and P331S, or equivalent thereof, based on the EU numbering scheme) amino acid substitution, a YTE (M252Y, S254T, and T256E, or equivalent thereof, based on the EU numbering scheme) amino acid substitution, or any combination thereof.

[1841] In some aspects, the antigen binding polypeptides disclosed herein comprise one or more Fc effector function knockout mutations. In some aspects, the antigen binding polypeptides disclosed herein are comprised in IgG1 or IgG4 antibodies or antigen binding fragments thereof. In some aspects, the Fc effector function knockout mutation is L234A, L235A, P239A, or equivalent thereof, or a combination thereof, based on the EU numbering scheme.

[1842] In some aspects, the antigen binding polypeptides disclosed herein comprise a mutation at a glycosylation site. In some aspects, the mutation at a glycosylation site is a mutation at an N-glycosylation site. In some aspects, the antigen binding polypeptides comprise a VH comprising a mutation at a glycosylation site. In some aspects, the mutation at a glycosylation site is a mutation at an N-glycosylation site. In some aspects, the mutation at an N-glycosylation site is at amino acid N62 of the VH region or equivalent thereof. In some aspects, the mutation at an N-glycosylation site at amino acid N62 is N62Q or N62S, or equivalent thereof.

[1843] In some aspects, the antigen binding polypeptides disclosed herein, comprise one or more optional linkers. The one or more optional linkers are indicated herein as Ln, wherein n is an integer, and the integer next to each L indicates each L comprised in the antigen binding polypeptides disclosed herein. For example, if an antigen binding polypeptide disclosed herein comprises two linkers, the first linker from N-terminus to C-terminus is herein indicated as L1, and the second linker from N-terminus to C-terminus is herein indicated as L2. In some aspects, any one of the optional linkers each independently have a length of from 0 amino acids to about 50 amino acids. In some aspects, any one of the optional linkers each independently have a length of from 5 amino acids to about 40 amino acids.

[1844] In some aspects, any one of the optional linkers are non-immunogenic. In some aspects, any one of the optional linkers do not contain a consensus T cell epitope.

[1845] In some aspects, any of Ln comprise an amino acid sequence of G or A, or an amino acid sequence at least 65%, at least 70%, at least 75%, at least 80%, at least 85%, at least 90%, at least 95%, at least 99%, or 100% identical to amino acid sequence GSS or ASG, or an amino acid sequence at least 65%, at least 70%, at least 75%, at least 80%, at least 85%, at least 90%, at least 95%, at least 99%, or 100% identical to any one of SEQ ID NOs: 333-373 and 967-971. In some aspects, Ln comprises an amino acid sequence at least 65%, at least 70%, at least 75%, at least 80%, at least 85%, at least 90%, at least 95%, at least 99%, or 100% identical to any one of SEQ ID NOs: 333-345 and 967-971.

[1846] In some aspects, the antigen binding polypeptides provided herein have a structure, from amino-terminus to carboxy-terminus, represented by:
[1847] (a)
[1848] VL1-L1-VL2-L2-VH2-L3-VH1-L4-CH1-L5-CL;
[1849] VL1-L1-VH2-L2-VL2-L3-VH1-L4-CH1-L5-CL;
[1850] VH1-L1-VH2-L2-VL2-L3-VL1-L4-CH1-L5-CL;
[1851] VH1-L1-VL2-L2-VH2-L3-VL1-L4-CH1-L5-CL;
[1852] VL1-L1-VL2-L2-VH2-L3-VH1-L4-CL-L5-CH1;
[1853] VL1-L1-VH2-L2-VL2-L3-VH1-L4-CL-L5-CH1;
[1854] VH1-L1-VH2-L2-VL2-L3-VL1-L4-CL-L5-CH1; or
[1855] VH1-L1-VL2-L2-VH2-L3-VL1-L4-CL-L5-CH1;
[1856] wherein:
[1857] VL1 is a first immunoglobulin light chain variable region that specifically binds to a severe acute respiratory syndrome coronavirus 2 (SARS-CoV-2) protein;
[1858] VL2 is a second immunoglobulin light chain variable region that specifically binds to a SARS-CoV-2 protein;
[1859] VH1 is a first immunoglobulin heavy chain variable region that specifically binds to a SARS-CoV-2 protein;
[1860] VH2 is a second immunoglobulin heavy chain variable region that specifically binds to a SARS-CoV-2 protein;
[1861] L1-L5 are optional amino acid linkers;
[1862] CL is an immunoglobulin light chain constant region; and
[1863] CH1 is an immunoglobulin heavy chain constant region 1;
[1864] or
[1865] (b)
[1866] VL1-L1-VL2-L2-VH2-L3-VH1-L4-CH1-L5-CL-L6-Fc;
[1867] VL1-L1-VH2-L2-VL2-L3-VH1-L4-CH1-L5-CL-L6-Fc;
[1868] VH1-L1-VH2-L2-VL2-L3-VL1-L4-CH1-L5-CL-L6-Fc;
[1869] VH1-L1-VL2-L2-VH2-L3-VL1-L4-CH1-L5-CL-L6-Fc;
[1870] VL1-L1-VL2-L2-VH2-L3-VH1-L4-CL-L5-CH1-L6-Fc;
[1871] VL1-L1-VH2-L2-VL2-L3-VH1-L4-CL-L5-CH1-L6-Fc;
[1872] VH1-L1-VH2-L2-VL2-L3-VL1-L4-CL-L5-CH1-L6-Fc; or
[1873] VH1-L1-VL2-L2-VH2-L3-VL1-L4-CL-L5-CH1-L6-Fc;
[1874] wherein:
[1875] VL1 is a first immunoglobulin light chain variable region that specifically binds to a severe acute respiratory syndrome coronavirus 2 (SARS-CoV-2) protein;
[1876] VL2 is a second immunoglobulin light chain variable region that specifically binds to a SARS-CoV-2 protein;
[1877] VH1 is a first immunoglobulin heavy chain variable region that specifically binds to a SARS-CoV-2 protein;
[1878] VH2 is a second immunoglobulin heavy chain variable region that specifically binds to a SARS-CoV-2 protein;
[1879] L1-L6 are optional amino acid linkers;
[1880] CL is an immunoglobulin light chain constant region;
[1881] CH1 is an immunoglobulin heavy chain constant region 1; and
[1882] Fc is an immunoglobulin fragment crystallizable region comprising an immunoglobulin heavy chain constant region 2 (CH2), an immunoglobulin heavy chain constant region 3 (CH3), and optionally, an immunoglobulin hinge.

[1883] In any aspect shown herein as a structure from amino terminus to carboxy terminus, and with binding pairs selected from VL and/or VH or other structural regions such as CH2, CH3, when shown without a specific linker such as L1, L2, etc., such linkers are optionally present in such structures between each designated subsequence VL, VH, etc.

[1884] In some aspects, the antigen binding polypeptides provided herein comprise a VL1 comprising (i) a complementarity determining region (CDR) 1 having an amino acid sequence that is at least 65%, at least 70%, at least 75%, at least 80%, at least 85%, at least 90%, at least 95%, at least 99%, or 100% identical to any one of SEQ ID NOs: 1, 9, 15, 23, 30, 41, 48, 55, 58, 65, 72, 79, 86, 93, 99, 105, 112, 119, 130, 138, 145, 152, 159, 166, 172, 179, 186, 192, 199, 205, 212, 219, 226, 232, 324, 627, 640, 650, 659, 676, 687, 695, 703, 712, 770, 778, 785, 794, 801, 807, 814, 827, 836, 849, 858, 865, 878, 1045, 1050, 1055, 1060, and 1065; (ii) a CDR2 having an amino acid sequence that is at least 65%, at least 70%, at least 75%, at least 80%, at least 85%, at least 90%, at least 95%, at least 99%, or 100% identical to any one of SEQ ID NOs: 2, 31, 628, 641, 677, 1046, 1051, 1056, and 1061; or at least 65%, at least 70%, at least 75%, at least 80%, at least 85%, at least 90%, at least 95%, at least 99%, or 100% identical to any one of amino acid sequences AAS, GAS, LGS, GTN, GTN, SAS, SDS, DNT, EVT, DAS, DVT, RNS, DVS, EDS, DDS, KDS, VAS, WAS, YTS, EVS, NNN, SYN, and DAT; and (iii) a CDR3 having an amino acid sequence that is at least 65%, at least 70%, at least 75%, at least 80%, at least 85%, at least 90%, at least 95%, at least 99%, or 100% identical to any one of SEQ ID NOs: 3, 10, 16, 24, 32, 38, 42, 49, 59, 66, 73, 80, 87, 94, 100, 106, 113, 120, 126, 131, 139, 146, 153, 160, 167, 173, 180, 187, 193, 200, 206, 213, 220, 227, 233, 239, 242, 246, 249, 256, 283, 285, 287, 288, 290, 292, 294, 296, 301, 304, 306, 309, 311, 313, 316, 325, 326, 329, 642, 651, 660, 668, 678, 651, 696, 704, 713, 764, 766, 768, 771, 779, 786, 792, 795, 808, 815, 821, 830, 837, 843, 850, 856, 859, 866, 872, 879, 885, and 1066.

[1885] In some aspects, the antigen binding polypeptides provided herein comprise a VL2 comprising (i) a complementarity determining region (CDR) 1 having an amino acid sequence that is at least 65%, at least 70%, at least 75%, at least 80%, at least 85%, at least 90%, at least 95%, at least 99%, or 100% identical to any one of SEQ ID NOs: 1, 9, 15, 23, 30, 41, 48, 55, 58, 65, 72, 79, 86, 93, 99, 105, 112, 119, 130, 138, 145, 152, 159, 166, 172, 179, 186, 192, 199, 205, 212, 219, 226, 232, 324, 627, 640, 650, 659, 676, 687, 695, 703, 712, 770, 778, 785, 794, 801, 807, 814, 827, 836, 849, 858, 865, 878, 1045, 1050, 1055, 1060, and 1065; (ii) a CDR2 having an amino acid sequence that is at least 65%, at least 70%, at least 75%, at least 80%, at least 85%, at least 90%, at least 95%, at least 99%, or 100% identical to any one of SEQ ID NOs: 2, 31, 628, 641, 677, 1046, 1051, 1056, and 1061; or at least 65%, at least 70%, at least 75%, at least 80%, at least 85%, at least 90%, at least 95%, at least 99%, or 100% identical to any one of amino acid sequences AAS, GAS, LGS, GTN, GTN, SAS, SDS, DNT, EVT, DAS, DVT, RNS, DVS, EDS, DDS, KDS, VAS, WAS, YTS, EVS, NNN, SYN, and DAT; and (iii) a CDR3 having an amino acid sequence that is at least 65%, at least 70%, at least 75%, at least 80%, at least 85%, at least 90%, at least 95%, at least 99%, or 100% identical to any one of SEQ ID NOs: 3, 10, 16, 24, 32, 38, 42, 49, 59, 66, 73, 80, 87, 94, 100, 106, 113, 120, 126, 131, 139, 146, 153, 160, 167, 173, 180, 187, 193, 200, 206, 213, 220, 227, 233, 239, 242, 246, 249, 256, 283, 285, 287, 288, 290, 292, 294, 296, 301, 304, 306, 309, 311, 313, 316, 325, 326, 329, 642, 651, 660, 668, 678, 651, 696, 704, 713, 764, 766, 768, 771, 779, 786, 792, 795, 808, 815, 821, 830, 837, 843, 850, 856, 859, 866, 872, 879, 885, and 1066.

[1886] In some aspects, the antigen binding polypeptides provided herein comprise a VH1 comprising (i) a CDR1 having an amino acid sequence that is at least 65%, at least 70%, at least 75%, at least 80%, at least 85%, at least 90%, at least 95%, at least 99%, or 100% identical to any one of SEQ ID NOs: 5, 12, 18, 26, 34, 44, 51, 61, 68, 75, 82, 89, 96, 102, 108, 115, 122, 133, 141, 148, 155, 162, 175, 182, 189, 195, 202, 208, 215, 222, 229, 235, 318, 629, 645, 654, 663, 671, 682, 690, 699, 707, 716, 773, 781, 788, 797, 803, 810, 817, 823, 832, 839, 845, 852, 861, 868, 874, 881, 1047, 1052, 1057, 1062, and 1067; (ii) a CDR2 having an amino acid sequence that is at least 65%, at least 70%, at least 75%, at least 80%, at least 85%, at least 90%, at least 95%, at least 99%, or 100% identical to any one of SEQ ID NOs: 6, 19, 27, 35, 45, 52, 56, 62, 69, 76, 83, 90, 109, 116, 123, 134, 142, 149, 156, 163, 169, 176, 183, 196, 209, 216, 223, 236, 273, 319, 328, 630, 646, 655, 664, 672, 683, 691, 708, 776, 782, 789, 798, 804, 811, 818, 824, 833, 840, 846, 853, 862, 869, 875, 882, 1048, 1053, 1058, 1063, and 1068; and (iii) a CDR3 having an amino acid sequence that is at least 65%, at least 70%, at least 75%, at least 80%, at least 85%, at least 90%, at least 95%, at least 99%, or 100% identical to any one of SEQ ID NOs: 7, 13, 20, 28, 36, 40, 46, 53, 63, 70, 77, 84, 91, 97, 103, 110, 117, 124, 128, 135, 143, 150, 157, 164, 170, 177, 184, 190, 197, 203, 210, 217, 224, 230, 237, 241, 244, 248, 253, 257, 259, 261, 263, 265, 267, 269, 271, 274, 276, 278, 281, 297, 320, 322, 327, 330, 332, 631, 647, 656, 665, 673, 684, 692, 700, 709, 717, 765, 767, 769, 774, 783, 790, 793, 799, 805, 812, 819, 825, 834, 841, 847, 854, 857, 863, 870, 876, 883, 886, 1049, 1054, 1059, 1064, and 1069.

[1887] In some aspects, the antigen binding polypeptides provided herein comprise a VH2 comprising (i) a CDR1 having an amino acid sequence that is at least 65%, at least 70%, at least 75%, at least 80%, at least 85%, at least 90%, at least 95%, at least 99%, or 100% identical to any one of SEQ ID NOs: 5, 12, 18, 26, 34, 44, 51, 61, 68, 75, 82, 89, 96, 102, 108, 115, 122, 133, 141, 148, 155, 162, 175, 182, 189, 195, 202, 208, 215, 222, 229, 235, 318, 629, 645, 654, 663, 671, 682, 690, 699, 707, 716, 773, 781, 788, 797, 803, 810, 817, 823, 832, 839, 845, 852, 861, 868, 874, 881, 1047, 1052, 1057, 1062, and 1067; (ii) a CDR2 having an amino acid sequence that is at least 65%, at least 70%, at least 75%, at least 80%, at least 85%, at least 90%, at least 95%, at least 99%, or 100% identical to any one of SEQ ID NOs: 6, 19, 27, 35, 45, 52, 56, 62, 69, 76, 83, 90, 109, 116, 123, 134, 142, 149, 156, 163, 169, 176, 183, 196, 209, 216, 223, 236, 273, 319, 328, 630, 646, 655, 664, 672, 683, 691, 708, 776, 782, 789, 798, 804, 811, 818, 824, 833, 840, 846, 853, 862, 869, 875, 882, 1048, 1053, 1058, 1063, and 1068; and (iii) a CDR3 having an amino acid sequence that is at least 65%, at least 70%, at least 75%, at least 80%, at least 85%, at least 90%, at least 95%, at least 99%, or 100% identical to any one of SEQ ID NOs: 7, 13, 20, 28, 36, 40, 46, 53, 63, 70, 77, 84, 91, 97, 103, 110, 117, 124, 128, 135, 143, 150, 157, 164, 170, 177, 184, 190, 197, 203, 210, 217, 224, 230, 237, 241, 244, 248, 253, 257, 259, 261, 263, 265, 267, 269, 271, 274, 276, 278, 281, 297, 320, 322, 327, 330, 332, 631, 647, 656, 665, 673, 684, 692, 700, 709, 717, 765, 767, 769, 774, 783, 790, 793, 799, 805, 812, 819, 825, 834, 841, 847, 854, 857, 863, 870, 876, 883, 886, 1049, 1054, 1059, 1064, and 1069.

[1888] In some aspects, the antigen binding polypeptides provided herein comprise a VL1 comprising (i) a complementarity determining region (CDR) 1 having an amino acid sequence that is at least 65%, at least 70%, at least 75%, at least 80%, at least 85%, at least 90%, at least 95%, at least 99%, or 100% identical to any one of SEQ ID NOs: 1, 9, 15, 23, 30, 41, 48, 55, 58, 65, 72, 79, 86, 93, 99, 105, 112, 119, 130, 138, 145, 152, 159, 166, 172, 179, 186, 192, 199, 205, 212, 219, 226, 232, 324, 627, 640, 650, 659, 676, 687, 695, 703, 712, 770, 778, 785, 794, 801, 807, 814, 827, 836, 849, 858, 865, 878, 1045, 1050, 1055, 1060, and 1065; (ii) a CDR2 having an amino acid sequence that is at least 65%, at least 70%, at least 75%, at least 80%, at least 85%, at least 90%, at least 95%, at least 99%, or 100% identical to any one of SEQ ID NOs: 2, 31, 628, 641, 677, 1046, 1051, 1056, and 1061; or at least 65%, at least 70%, at least 75%, at least 80%, at least 85%, at least 90%, at least 95%, at least 99%, or 100% identical to any one of amino acid sequences AAS, GAS, LGS, GTN, GTN, SAS, SDS, DNT, EVT, DAS, DVT, RNS, DVS, EDS, DDS, KDS, VAS, WAS, YTS, EVS, NNN, SYN, and DAT; and (iii) a CDR3 having an amino acid sequence that is at least 65%, at least 70%, at least 75%, at least 80%, at least 85%, at least 90%, at least 95%, at least 99%, or 100% identical to any one of SEQ ID NOs: 3, 10, 16, 24, 32, 38, 42, 49, 59, 66, 73, 80, 87, 94, 100, 106, 113, 120, 126, 131, 139, 146, 153, 160, 167, 173, 180, 187, 193, 200, 206, 213, 220, 227, 233, 239, 242, 246, 249, 256, 283, 285, 287, 288, 290, 292, 294, 296, 301, 304, 306, 309, 311, 313, 316, 325, 326, 329, 642, 651, 660, 668, 678, 651, 696, 704, 713, 764, 766, 768, 771, 779, 786, 792, 795, 808, 815, 821, 830, 837, 843, 850, 856, 859, 866, 872, 879, 885, and 1066; a VH1 comprising (i) a CDR1 having an amino acid sequence that is at least 65%, at least 70%, at least 75%, at least 80%, at least 85%, at least 90%, at least 95%, at least 99%, or 100% identical to any one of SEQ ID NOs: 5, 12, 18, 26, 34, 44, 51, 61, 68, 75, 82, 89, 96, 102, 108, 115, 122, 133, 141, 148, 155, 162, 175, 182, 189, 195, 202, 208, 215, 222, 229, 235, 318, 629, 645, 654, 663, 671, 682, 690, 699, 707, 716, 773, 781, 788, 797, 803, 810, 817, 823, 832, 839, 845, 852, 861, 868, 874, 881, 1047, 1052, 1057, 1062, and 1067; (ii) a CDR2 having an amino acid sequence that is at least 65%, at least 70%, at least 75%, at least 80%, at least 85%, at least 90%, at least 95%, at least 99%, or 100% identical to any one of SEQ ID NOs: 6, 19, 27, 35, 45, 52, 56, 62, 69, 76, 83, 90, 109, 116, 123, 134, 142, 149, 156, 163, 169, 176, 183, 196, 209, 216, 223, 236, 273, 319, 328, 630, 646, 655, 664, 672, 683, 691, 708, 776, 782, 789, 798, 804, 811, 818, 824, 833, 840, 846, 853, 862, 869, 875, 882, 1048, 1053, 1058, 1063, and 1068; and (iii) a CDR3 having an amino acid sequence that is at least 65%, at least 70%, at least 75%, at least 80%, at least 85%, at least 90%, at least 95%, at least 99%, or 100% identical to any one of SEQ ID NOs: 7, 13, 20, 28, 36, 40, 46, 53, 63, 70, 77, 84, 91, 97, 103, 110, 117, 124, 128, 135, 143, 150, 157, 164, 170, 177, 184, 190, 197, 203, 210, 217, 224, 230, 237, 241, 244, 248, 253, 257, 259, 261, 263, 265, 267, 269, 271, 274, 276, 278, 281, 297, 320, 322, 327, 330, 332, 631, 647, 656, 665, 673, 684, 692, 700, 709, 717, 765, 767, 769, 774, 783, 790, 793, 799, 805, 812, 819, 825, 834, 841, 847, 854, 857, 863, 870, 876, 883, 886, 1049, 1054, 1059, 1064, and 1069; a VL2 comprising (i) a complementarity determining region (CDR) 1 having an amino acid sequence that is at least 65%, at least 70%, at least 75%, at least 80%, at least 85%, at least 90%, at least 95%, at least 99%, or 100% identical to any one of SEQ ID NOs: 1, 9, 15, 23, 30, 41, 48, 55, 58, 65, 72, 79, 86, 93, 99, 105, 112, 119, 130, 138, 145, 152, 159, 166, 172, 179, 186, 192, 199, 205, 212, 219, 226, 232, 324, 627, 640, 650, 659, 676, 687, 695, 703, 712, 770, 778, 785, 794, 801, 807, 814, 827, 836, 849, 858, 865, 878, 1045, 1050, 1055, 1060, and 1065; (ii) a CDR2 having an amino acid sequence that is at least 65%, at least 70%, at least 75%, at least 80%, at least 85%, at least 90%, at least 95%, at least 99%, or 100% identical to any one of SEQ ID NOs: 2, 31, 628, 641, 677, 1046, 1051, 1056, and 1061; or at least 65%, at least 70%, at least 75%, at least 80%, at least 85%, at least 90%, at least 95%, at least 99%, or 100% identical to any one of amino acid sequences AAS, GAS, LGS, GTN, GTN, SAS, SDS, DNT, EVT, DAS, DVT, RNS, DVS, EDS, DDS, KDS, VAS, WAS, YTS, EVS, NNN, SYN, and DAT; and (iii) a CDR3 having an amino acid sequence that is at least 65%, at least 70%, at least 75%, at least 80%, at least 85%, at least 90%, at least 95%, at least 99%, or 100% identical to any one of SEQ ID NOs: 3, 10, 16, 24, 32, 38, 42, 49, 59, 66, 73, 80, 87, 94, 100, 106, 113, 120, 126, 131, 139, 146, 153, 160, 167, 173, 180, 187, 193, 200, 206, 213, 220, 227, 233, 239, 242, 246, 249, 256, 283, 285, 287, 288, 290, 292, 294, 296, 301, 304, 306, 309, 311, 313, 316, 325, 326, 329, 642, 651, 660, 668, 678, 651, 696, 704, 713, 764, 766, 768, 771, 779, 786, 792, 795, 808, 815, 821, 830, 837, 843, 850, 856, 859, 866, 872, 879, 885, and 1066; and a VH2 comprising (i) a CDR1 having an amino acid sequence that is at least 65%, at least 70%, at least 75%, at least 80%, at least 85%, at least 90%, at least 95%, at least 99%, or 100% identical to any one of SEQ ID NOs: 5, 12, 18, 26, 34, 44, 51, 61, 68, 75, 82, 89, 96, 102, 108, 115, 122, 133, 141, 148, 155, 162, 175, 182, 189, 195, 202, 208, 215, 222, 229, 235, 318, 629, 645, 654, 663, 671, 682, 690, 699, 707, 716, 773, 781, 788, 797, 803, 810, 817, 823, 832, 839, 845, 852, 861, 868, 874, 881, 1047, 1052, 1057, 1062, and 1067; (ii) a CDR2 having an amino acid sequence that is at least 65%, at least 70%, at least 75%, at least 80%, at least 85%, at least 90%, at least 95%, at least 99%, or 100% identical to any one of SEQ ID NOs: 6, 19, 27, 35, 45, 52, 56, 62, 69, 76, 83, 90, 109, 116, 123, 134, 142, 149, 156, 163, 169, 176, 183, 196, 209, 216, 223, 236, 273, 319, 328, 630, 646, 655, 664, 672, 683, 691, 708, 776, 782, 789, 798, 804, 811, 818, 824, 833, 840, 846, 853, 862, 869, 875, 882, 1048, 1053, 1058, 1063, and 1068; and (iii) a CDR3 having an amino acid sequence that is at least 65%, at least 70%, at least 75%, at least 80%, at least 85%, at least 90%, at least 95%, at least 99%, or 100% identical to any one of SEQ ID NOs: 7, 13, 20, 28, 36, 40, 46, 53, 63, 70, 77, 84, 91, 97, 103, 110, 117, 124, 128, 135, 143, 150, 157, 164, 170, 177, 184, 190, 197, 203, 210, 217, 224, 230, 237, 241, 244, 248, 253, 257, 259, 261, 263, 265, 267, 269, 271, 274, 276, 278, 281, 297, 320, 322, 327, 330, 332, 631, 647, 656, 665, 673, 684, 692, 700, 709, 717, 765, 767, 769, 774, 783, 790, 793, 799, 805, 812, 819, 825, 834, 841, 847, 854, 857, 863, 870, 876, 883, 886, 1049, 1054, 1059, 1064, and 1069.

[1889] In some aspects, the antigen binding polypeptides provided herein comprise a VL1 comprising an amino acid sequence that is at least 65%, at least 70%, at least 75%, at least 80%, at least 85%, at least 90%, at least 95%, at least 99%, or 100% identical to any one of SEQ ID NOs: 4, 11, 17, 25, 33, 39, 43, 50, 60, 67, 74, 81, 88, 95, 101, 107, 114, 121, 127, 132, 140, 147, 154, 161, 168, 174, 181, 188, 194, 201, 207, 214, 221, 228, 234, 240, 243, 247, 250, 251, 252, 255, 284, 286, 289, 291, 293, 295, 299, 300, 302, 303, 305, 307, 308, 310, 312, 314, 315, 317, 323, 639, 649, 658, 667, 675, 686, 694, 702, 711, 772, 780, 787, 796, 802, 809, 816, 822, 831, 838, 844, 851, 860, 867, 873, 880, and 988.

[1890] In some aspects, the antigen binding polypeptides provided herein comprise a VH1 comprising an amino acid sequence that is at least 65%, at least 70%, at least 75%, at least 80%, at least 85%, at least 90%, at least 95%, at least 99%, or 100% identical to any one of SEQ ID NOs: 8, 14, 21, 22, 29, 37, 47, 54, 57, 64, 71, 78, 85, 92, 98, 104, 111, 118, 125, 129, 136, 137, 144, 151, 158, 165, 171, 178, 185, 191, 198, 204, 211, 218, 225, 231, 238, 245, 254, 258, 260, 262, 264, 266, 268, 270, 272, 275, 277, 279, 280, 282, 298, 321, 331, 626, 644, 653, 662, 670, 681, 689, 698, 706, 715, 775, 777, 784, 791, 800, 806, 813, 820, 826, 835, 842, 848, 855, 864, 871, 877, and 884.

[1891] In some aspects, the antigen binding polypeptides provided herein comprise a VL2 comprising an amino acid sequence that is at least 65%, at least 70%, at least 75%, at least 80%, at least 85%, at least 90%, at least 95%, at least 99%, or 100% identical to any one of SEQ ID NOs: 4, 11, 17, 25, 33, 39, 43, 50, 60, 67, 74, 81, 88, 95, 101, 107, 114, 121, 127, 132, 140, 147, 154, 161, 168, 174, 181, 188, 194, 201, 207, 214, 221, 228, 234, 240, 243, 247, 250, 251, 252, 255, 284, 286, 289, 291, 293, 295, 299, 300, 302, 303, 305, 307, 308, 310, 312, 314, 315, 317, 323, 639, 649, 658, 667, 675, 686, 694, 702, 711, 772, 780, 787, 796, 802, 809, 816, 822, 831, 838, 844, 851, 860, 867, 873, 880, and 988.

[1892] In some aspects, the antigen binding polypeptides provided herein comprise a VH2 comprising an amino acid sequence that is at least 65%, at least 70%, at least 75%, at least 80%, at least 85%, at least 90%, at least 95%, at least 99%, or 100% identical to any one of SEQ ID NOs: 8, 14, 21, 22, 29, 37, 47, 54, 57, 64, 71, 78, 85, 92, 98, 104, 111, 118, 125, 129, 136, 137, 144, 151, 158, 165, 171, 178, 185, 191, 198, 204, 211, 218, 225, 231, 238, 245, 254, 258, 260, 262, 264, 266, 268, 270, 272, 275, 277, 279, 280, 282, 298, 321, 331, 626, 644, 653, 662, 670, 681, 689, 698, 706, 715, 775, 777, 784, 791, 800, 806, 813, 820, 826, 835, 842, 848, 855, 864, 871, 877, and 884.

[1893] In some aspects, the antigen binding polypeptides provided herein comprise (i) a VL1 comprising an amino acid sequence that is at least 65%, at least 70%, at least 75%, at least 80%, at least 85%, at least 90%, at least 95%, at least 99%, or 100% identical to any one of SEQ ID NOs: 4, 11, 17, 25, 33, 39, 43, 50, 60, 67, 74, 81, 88, 95, 101, 107, 114, 121, 127, 132, 140, 147, 154, 161, 168, 174, 181, 188, 194, 201, 207, 214, 221, 228, 234, 240, 243, 247, 250, 251, 252, 255, 284, 286, 289, 291, 293, 295, 299, 300, 302, 303, 305, 307, 308, 310, 312, 314, 315, 317, 323, 639, 649, 658, 667, 675, 686, 694, 702, 711, 772, 780, 787, 796, 802, 809, 816, 822, 831, 838, 844, 851, 860, 867, 873, 880, and 988; (ii) a VH1 comprising an amino acid sequence that is at least 65%, at least 70%, at least 75%, at least 80%, at least 85%, at least 90%, at least 95%, at least 99%, or 100% identical to any one of SEQ ID NOs: 8, 14, 21, 22, 29, 37, 47, 54, 57, 64, 71, 78, 85, 92, 98, 104, 111, 118, 125, 129, 136, 137, 144, 151, 158, 165, 171, 178, 185, 191, 198, 204, 211, 218, 225, 231, 238, 245, 254, 258, 260, 262, 264, 266, 268, 270, 272, 275, 277, 279, 280, 282, 298, 321, 331, 626, 644, 653, 662, 670, 681, 689, 698, 706, 715, 775, 777, 784, 791, 800, 806, 813, 820, 826, 835, 842, 848, 855, 864, 871, 877, and 884; (iii) a VL2 comprising an amino acid sequence that is at least 65%, at least 70%, at least 75%, at least 80%, at least 85%, at least 90%, at least 95%, at least 99%, or 100% identical to any one of SEQ ID NOs: 4, 11, 17, 25, 33, 39, 43, 50, 60, 67, 74, 81, 88, 95, 101, 107, 114, 121, 127, 132, 140, 147, 154, 161, 168, 174, 181, 188, 194, 201, 207, 214, 221, 228, 234, 240, 243, 247, 250, 251, 252, 255, 284, 286, 289, 291, 293, 295, 299, 300, 302, 303, 305, 307, 308, 310, 312, 314, 315, 317, 323, 639, 649, 658, 667, 675, 686, 694, 702, 711, 772, 780, 787, 796, 802, 809, 816, 822, 831, 838, 844, 851, 860, 867, 873, 880, and 988; and (iv) a VH2 comprising an amino acid sequence that is at least 65%, at least 70%, at least 75%, at least 80%, at least 85%, at least 90%, at least 95%, at least 99%, or 100% identical to any one of SEQ ID NOs: 8, 14, 21, 22, 29, 37, 47, 54, 57, 64, 71, 78, 85, 92, 98, 104, 111, 118, 125, 129, 136, 137, 144, 151, 158, 165, 171, 178, 185, 191, 198, 204, 211, 218, 225, 231, 238, 245, 254, 258, 260, 262, 264, 266, 268, 270, 272, 275, 277, 279, 280, 282, 298, 321, 331, 626, 644, 653, 662, 670, 681, 689, 698, 706, 715, 775, 777, 784, 791, 800, 806, 813, 820, 826, 835, 842, 848, 855, 864, 871, 877, and 884.

[1894] In some aspects, the antigen binding polypeptides provided herein comprise a VL1 comprising (i) a complementarity determining region (CDR) 1 having an amino acid sequence that is at least 65%, at least 70%, at least 75%, at least 80%, at least 85%, at least 90%, at least 95%, at least 99%, or 100% identical to any one of SEQ ID NOs: 1, 9, 15, 23, 30, 65, 72, 145, 152, 324, 627, 138, 172, 1045, 1050, 1055, 1060, and 1065; (ii) a CDR2 having an amino acid sequence that is at least 65%, at least 70%, at least 75%, at least 80%, at least 85%, at least 90%, at least 95%, at least 99%, or 100% identical to any one of SEQ ID NOs: 2, 31.628, 1046, 1051, 1056, and 1061, or at least 65%, at least 70%, at least 75%, at least 80%, at least 85%, at least 90%, at least 95%, at least 99%, or 100% identical to any one of amino acid sequences GAS, LGS, GTN, SAS, SDS, AAS, DAS, and DNT; and (iii) a CDR3 having an amino acid sequence that is at least 65%, at least 70%, at least 75%, at least 80%, at least 85%, at least 90%, at least 95%, at least 99%, or 100% identical to any one of SEQ ID NOs: 3, 10, 16, 24, 32, 38, 66, 73, 146, 153, 325, 326, 764, 766, 139, 856, 173, 792, and 1066.

[1895] In some aspects, the antigen binding polypeptides provided herein comprise a VL2 comprising (i) a complementarity determining region (CDR) 1 having an amino acid sequence that is at least 65%, at least 70%, at least 75%, at least 80%, at least 85%, at least 90%, at least 95%, at least 99%, or 100% identical to any one of SEQ ID NOs: 1, 9, 15, 23, 30, 65, 72, 145, 152, 324, 627, 138, 172, 1045, 1050, 1055, 1060, and 1065; (ii) a CDR2 having an amino acid sequence that is at least 65%, at least 70%, at least 75%, at least 80%, at least 85%, at least 90%, at least 95%, at least 99%, or 100% identical to any one of SEQ ID NOs: 2, 31.628, 1046, 1051, 1056, and 1061, or at least 65%, at least 70%, at least 75%, at least 80%, at least 85%, at least 90%, at least 95%, at least 99%, or 100% identical to any one of amino acid sequences GAS, LGS, GTN, SAS, SDS, AAS, DAS, and DNT; and (iii) a CDR3 having an amino acid sequence that is at least 65%, at least 70%, at least 75%, at least 80%, at least 85%, at least 90%, at least 95%, at least 99%, or 100% identical to any one of SEQ ID NOs: 3, 10, 16, 24, 32, 38, 66, 73, 146, 153, 325, 326, 764, 766, 139, 856, 173, 792, and 1066.

[1896] In some aspects, the antigen binding polypeptides provided herein comprise a VH1 comprising (i) a CDR1 having an amino acid sequence that is at least 65%, at least 70%, at least 75%, at least 80%, at least 85%, at least 90%, at least 95%, at least 99%, or 100% identical to any one of SEQ ID NOs: 5, 12, 18, 26, 34, 68, 75, 148, 155, 629, 141, 175, 1047, 1052, 1057, 1062, and 1067; (ii) a CDR2 having an amino acid sequence that is at least 65%, at least 70%, at least 75%, at least 80%, at least 85%, at least 90%, at least 95%, at least 99%, or 100% identical to any one of SEQ ID NOs: 6, 19, 27, 35, 69, 76, 149, 156, 630, 142, 176, 1048, 1053, 1058, 1063, and 1068; and (iii) a CDR3 having an amino acid sequence that is at least 65%, at least 70%, at least 75%, at least 80%, at least 85%, at least 90%, at least 95%, at least 99%, or 100% identical to any one of SEQ ID NOs: 7, 13, 20, 28, 36, 40, 70, 77, 327, 150, 157, 332, 631, 765, 767, 143, 857, 177, 793, 1049, 1054, 1059, 1064, and 1069.

[1897] In some aspects, the antigen binding polypeptides provided herein comprise a VH2 comprising (i) a CDR1 having an amino acid sequence that is at least 65%, at least 70%, at least 75%, at least 80%, at least 85%, at least 90%, at least 95%, at least 99%, or 100% identical to any one of SEQ ID NOs: 5, 12, 18, 26, 34, 68, 75, 148, 155, 629, 141, 175, 1047, 1052, 1057, 1062, and 1067; (ii) a CDR2 having an amino acid sequence that is at least 65%, at least 70%, at least 75%, at least 80%, at least 85%, at least 90%, at least 95%, at least 99%, or 100% identical to any one of SEQ ID NOs: 6, 19, 27, 35, 69, 76, 149, 156, 630, 142, 176, 1048, 1053, 1058, 1063, and 1068; and (iii) a CDR3 having an amino acid sequence that is at least 65%, at least 70%, at least 75%, at least 80%, at least 85%, at least 90%, at least 95%, at least 99%, or 100% identical to any one of SEQ ID NOs: 7, 13, 20, 28, 36, 40, 70, 77, 327, 150, 157, 332, 631, 765, 767, 143, 857, 177, 793, 1049, 1054, 1059, 1064, and 1069.

[1898] In some aspects, the antigen binding polypeptides provided herein comprise a VL1 comprising (i) a complementarity determining region (CDR) 1 having an amino acid sequence that is at least 65%, at least 70%, at least 75%, at least 80%, at least 85%, at least 90%, at least 95%, at least 99%, or 100% identical to any one of SEQ ID NOs: 1, 9, 15, 23, 30, 65, 72, 145, 152, 324, 627, 138, 172, 1045, 1050, 1055, 1060, and 1065; (ii) a CDR2 having an amino acid sequence that is at least 65%, at least 70%, at least 75%, at least 80%, at least 85%, at least 90%, at least 95%, at least 99%, or 100% identical to any one of SEQ ID NOs: 2, 31.628, 1046, 1051, 1056, and 1061, or at least 65%, at least 70%, at least 75%, at least 80%, at least 85%, at least 90%, at least 95%, at least 99%, or 100% identical to any one of amino acid sequences GAS, LGS, GTN, SAS, SDS, AAS, DAS, and DNT; (iii) a CDR3 having an amino acid sequence that is at least 65%, at least 70%, at least 75%, at least 80%, at least 85%, at least 90%, at least 95%, at least 99%, or 100% identical to any one of SEQ ID NOs: 3, 10, 16, 24, 32, 38, 66, 73, 146, 153, 325, 326, 764, 766, 139, 856, 173, 792, and 1066; a VH1 comprising (i) a CDR1 having an amino acid sequence that is at least 65%, at least 70%, at least 75%, at least 80%, at least 85%, at least 90%, at least 95%, at least 99%, or 100% identical to any one of SEQ ID NOs: 5, 12, 18, 26, 34, 68, 75, 148, 155, 629, 141, 175, 1047, 1052, 1057, 1062, and 1067; (ii) a CDR2 having an amino acid sequence that is at least 65%, at least 70%, at least 75%, at least 80%, at least 85%, at least 90%, at least 95%, at least 99%, or 100% identical to any one of SEQ ID NOs: 6, 19, 27, 35, 69, 76, 149, 156, 630, 142, 176, 1048, 1053, 1058, 1063, and 1068; and (iii) a CDR3 having an amino acid sequence that is at least 65%, at least 70%, at least 75%, at least 80%, at least 85%, at least 90%, at least 95%, at least 99%, or 100% identical to any one of SEQ ID NOs: 7, 13, 20, 28, 36, 40, 70, 77, 327, 150, 157, 332, 631, 765, 767, 143, 857, 177, 793, 1049, 1054, 1059, 1064, and 1069; a VL2 comprising (i) a complementarity determining region (CDR) 1 having an amino acid sequence that is at least 65%, at least 70%, at least 75%, at least 80%, at least 85%, at least 90%, at least 95%, at least 99%, or 100% identical to any one of SEQ ID NOs: 1, 9, 15, 23, 30, 65, 72, 145, 152, 324, 627, 138, 172, 1045, 1050, 1055, 1060, and 1065; (ii) a CDR2 having an amino acid sequence that is at least 65%, at least 70%, at least 75%, at least 80%, at least 85%, at least 90%, at least 95%, at least 99%, or 100% identical to any one of SEQ ID NOs: 2, 31, 628, 1046, 1051, 1056, and 1061, or at least 65%, at least 70%, at least 75%, at least 80%, at least 85%, at least 90%, at least 95%, at least 99%, or 100% identical to any one of amino acid sequences GAS, LGS, GTN, SAS, SDS, AAS, DAS, and DNT; and (iii) a CDR3 having an amino acid sequence that is at least 65%, at least 70%, at least 75%, at least 80%, at least 85%, at least 90%, at least 95%, at least 99%, or 100% identical to any one of SEQ ID NOs: 3, 10, 16, 24, 32, 38, 66, 73, 146, 153, 325, 326, 764, 766, 139, 856, 173, 792, and 1066; and a VH2 comprising (i) a CDR1 having an amino acid sequence that is at least 65%, at least 70%, at least 75%, at least 80%, at least 85%, at least 90%, at least 95%, at least 99%, or 100% identical to any one of SEQ ID NOs: 5, 12, 18, 26, 34, 68, 75, 148, 155, 629, 141, 175, 1047, 1052, 1057, 1062, and 1067; (ii) a CDR2 having an amino acid sequence that is at least 65%, at least 70%, at least 75%, at least 80%, at least 85%, at least 90%, at least 95%, at least 99%, or 100% identical to any one of SEQ ID NOs: 6, 19, 27, 35, 69, 76, 149, 156, 630, 142, 176, 1048, 1053, 1058, 1063, and 1068; and (iii) a CDR3 having an amino acid sequence that is at least 65%, at least 70%, at least 75%, at least 80%, at least 85%, at least 90%, at least 95%, at least 99%, or 100% identical to any one of SEQ ID NOs: 7, 13, 20, 28, 36, 40, 70, 77, 327, 150, 157, 332, 631, 765, 767, 143, 857, 177, 793, 1049, 1054, 1059, 1064, and 1069.

[1899] In some aspects, the antigen binding polypeptides provided herein comprise a VL1 comprising an amino acid sequence that is at least 65%, at least 70%, at least 75%, at least 80%, at least 85%, at least 90%, at least 95%, at least 99%, or 100% identical to any one of SEQ ID NOs: 4, 11, 17, 25, 33, 39, 67, 74, 147, 154, 140, and 174.

[1900] In some aspects, the antigen binding polypeptides provided herein comprise a VH1 comprising an amino acid sequence that is at least 65%, at least 70%, at least 75%, at least 80%, at least 85%, at least 90%, at least 95%, at least 99%, or 100% identical to any one of SEQ ID NOs: 8, 14, 21, 22, 29, 37, 71, 78, 151, 158, 626, 144, and 178.

[1901] In some aspects, the antigen binding polypeptides provided herein comprise a VL2 comprising an amino acid sequence that is at least 65%, at least 70%, at least 75%, at least 80%, at least 85%, at least 90%, at least 95%, at least 99%, or 100% identical to any one of SEQ ID NOs: 4, 11, 17, 25, 33, 39, 67, 74, 147, 154, 140, and 174.

[1902] In some aspects, the antigen binding polypeptides provided herein comprise a VH2 comprising an amino acid sequence that is at least 65%, at least 70%, at least 75%, at least 80%, at least 85%, at least 90%, at least 95%, at least 99%, or 100% identical to any one of SEQ ID NOs: 8, 14, 21, 22, 29, 37, 71, 78, 151, 158, 626, 144, and 178.

[1903] In some aspects, the antigen binding polypeptides provided herein comprise (i) a VL1 comprising an amino acid sequence that is at least 65%, at least 70%, at least 75%, at least 80%, at least 85%, at least 90%, at least 95%, at least 99%, or 100% identical to any one of SEQ ID NOs: 4, 11, 17, 25, 33, 39, 67, 74, 147, 154, 140, and 174; (ii) a VH1 comprising an amino acid sequence that is at least 65%, at least 70%, at least 75%, at least 80%, at least 85%, at least 90%, at least 95%, at least 99%, or 100% identical to any one of SEQ ID NOs: 8, 14, 21, 22, 29, 37, 71, 78, 151, 158, 626, 144, and 178; (iii) a VL2 comprising an amino acid sequence that is at least 65%, at least 70%, at least 75%, at least 80%, at least 85%, at least 90%, at least 95%, at least 99%, or 100% identical to any one of SEQ ID NOs: 4, 11, 17, 25, 33, 39, 67, 74, 147, 154, 140, and 174; and (iv) a VH2 comprising an amino acid sequence that is at least 65%, at least 70%, at least 75%, at least 80%, at least 85%, at least 90%, at least 95%, at least 99%, or 100% identical to any one of SEQ ID NOs: 8, 14, 21, 22, 29, 37, 71, 78, 151, 158, 626, 144, and 178.

[1904] In some aspects, the antigen binding polypeptides provided herein comprise a VL1 comprising (i) a complementarity determining region (CDR) 1 having an amino acid sequence that is at least 65%, at least 70%, at least 75%, at least 80%, at least 85%, at least 90%, at least 95%, at least 99%, or 100% identical to any one of SEQ ID NOs: 41, 48, 138, 145, 152, 159, 166, 172, 192, 770, 778, 785, 794, 801, 807, 814, 827, 836, 849, 858, 865, 878, 1045, 1050, 1060, and 1065; (ii) a CDR2 having an amino acid sequence at least 65%, at least 70%, at least 75%, at least 80%, at least 85%, at least 90%, at least 95%, at least 99%, or 100% identical to any one of amino acid sequences AAS, GAS, DAS, NNN, SDS, SYN, WAS, and DAT, or at least 65%, at least 70%, at least 75%, at least 80%, at least 85%, at least 90%, at least 95%, at least 99%, or 100% identical to any one of SEQ ID NOs: 1046, 1051, and 1061; and (iii) a CDR3 having an amino acid sequence that is at least 65%, at least 70%, at least 75%, at least 80%, at least 85%, at least 90%, at least 95%, at least 99%, or 100% identical to any one of SEQ ID NOs: 42, 139, 146, 153, 160, 167, 173, 764, 766, 768, 771, 779, 786, 792, 795, 808, 815, 821, 830, 837, 843, 850, 856, 859, 866, 872, 879, 885, and 1066.

[1905] In some aspects, the antigen binding polypeptides provided herein comprise a VL2 comprising (i) a complementarity determining region (CDR) 1 having an amino acid sequence that is at least 65%, at least 70%, at least 75%, at least 80%, at least 85%, at least 90%, at least 95%, at least 99%, or 100% identical to any one of SEQ ID NOs: 41, 48, 138, 145, 152, 159, 166, 172, 192, 770, 778, 785, 794, 801, 807, 814, 827, 836, 849, 858, 865, 878, 1045, 1050, 1060, and 1065; (ii) a CDR2 having an amino acid sequence that is at least 65%, at least 70%, at least 75%, at least 80%, at least 85%, at least 90%, at least 95%, at least 99%, or 100% identical to any one of amino acid sequences AAS, GAS, DAS, NNN, SDS, SYN, WAS, and DAT, or at least 65%, at least 70%, at least 75%, at least 80%, at least 85%, at least 90%, at least 95%, at least 99%, or 100% identical to any one of SEQ ID NOs: 1046, 1051, and 1061; and (iii) a CDR3 having an amino acid sequence that is at least 65%, at least 70%, at least 75%, at least 80%, at least 85%, at least 90%, at least 95%, at least 99%, or 100% identical to any one of SEQ ID NOs: 42, 139, 146, 153, 160, 167, 173, 764, 766, 768, 771, 779, 786, 792, 795, 808, 815, 821, 830, 837, 843, 850, 856, 859, 866, 872, 879, 885, and 1066.

[1906] In some aspects, the antigen binding polypeptides provided herein comprise a VH1 comprising (i) a CDR1 having an amino acid sequence that is at least 65%, at least 70%, at least 75%, at least 80%, at least 85%, at least 90%, at least 95%, at least 99%, or 100% identical to any one of SEQ ID NOs: 44, 133, 141, 148, 155, 162, 175, 773, 781, 788, 797, 803, 810, 817, 823, 832, 839, 845, 852, 861, 868, 874, 881, 1047, 1052, 1062, and 1067; (ii) a CDR2 having an amino acid sequence that is at least 65%, at least 70%, at least 75%, at least 80%, at least 85%, at least 90%, at least 95%, at least 99%, or 100% identical to any one of SEQ ID NOs: 6, 142, 149, 156, 163, 169, 176, 776, 782, 789, 798, 804, 811, 818, 824, 833, 840, 846, 853, 862, 869, 875, 882, 1048, 1053, 1063, and 1068; and (iii) a CDR3 having an amino acid sequence that is at least 65%, at least 70%, at least 75%, at least 80%, at least 85%, at least 90%, at least 95%, at least 99%, or 100% identical to any one of SEQ ID NOs: 46, 143, 150, 157, 164, 170, 177, 765, 767, 769, 774, 783, 790, 793, 799, 805, 812, 819, 825, 834, 841, 847, 854, 857, 863, 870, 876, 883, 886, 1049, 1054, 1064, and 1069.

[1907] In some aspects, the antigen binding polypeptides provided herein comprise a VH2 comprising (i) a CDR1 having an amino acid sequence that is at least 65%, at least 70%, at least 75%, at least 80%, at least 85%, at least 90%, at least 95%, at least 99%, or 100% identical to any one of SEQ ID NOs: 44, 133, 141, 148, 155, 162, 175, 773, 781, 788, 797, 803, 810, 817, 823, 832, 839, 845, 852, 861, 868, 874, 881, 1047, 1052, 1062, and 1067; (ii) a CDR2 having an amino acid sequence that is at least 65%, at least 70%, at least 75%, at least 80%, at least 85%, at least 90%, at least 95%, at least 99%, or 100% identical to any one of SEQ ID NOs: 6, 142, 149, 156, 163, 169, 176, 776, 782, 789, 798, 804, 811, 818, 824, 833, 840, 846, 853, 862, 869, 875, 882, 1048, 1053, 1063, and 1068; and (iii) a CDR3 having an amino acid sequence that is at least 65%, at least 70%, at least 75%, at least 80%, at least 85%, at least 90%, at least 95%, at least 99%, or 100% identical to any one of SEQ ID NOs: 46, 143, 150, 157, 164, 170, 177, 765, 767, 769, 774, 783, 790, 793, 799, 805, 812, 819, 825, 834, 841, 847, 854, 857, 863, 870, 876, 883, 886, 1049, 1054, 1064, and 1069.

[1908] In some aspects, the antigen binding polypeptides provided herein comprise a VL1 comprising (i) a complementarity determining region (CDR) 1 having an amino acid sequence that is at least 65%, at least 70%, at least 75%, at least 80%, at least 85%, at least 90%, at least 95%, at least 99%, or 100% identical to any one of SEQ ID NOs: 41, 48, 138, 145, 152, 159, 166, 172, 192, 770, 778, 785, 794, 801, 807, 814, 827, 836, 849, 858, 865, 878, 1045, 1050, 1060, and 1065; (ii) a CDR2 having an amino acid sequence that is at least 65%, at least 70%, at least 75%, at least 80%, at least 85%, at least 90%, at least 95%, at least 99%, or 100% identical to any one of amino acid sequences AAS, GAS, DAS, NNN, SDS, SYN, WAS, and DAT, or at least 65%, at least 70%, at least 75%, at least 80%, at least 85%, at least 90%, at least 95%, at least 99%, or 100% identical to any one of SEQ ID NOs: 1046, 1051, and 1061; and (iii) a CDR3 having an amino acid sequence that is at least 65%, at least 70%, at least 75%, at least 80%, at least 85%, at least 90%, at least 95%, at least 99%, or 100% identical to any one of SEQ ID NOs: 42, 139, 146, 153, 160, 167, 173, 764, 766, 768, 771, 779, 786, 792, 795, 808, 815, 821, 830, 837, 843, 850, 856, 859, 866, 872, 879, 885, and 1066; a VH1 comprising (i) a CDR1 having an amino acid sequence that is at least 65%, at least 70%, at least 75%, at least 80%, at least 85%, at least 90%, at least 95%, at least 99%, or 100% identical to any one of SEQ ID NOs: 44, 133, 141, 148, 155, 162, 175, 773, 781, 788, 797, 803, 810, 817, 823, 832, 839, 845, 852, 861, 868, 874, 881, 1047, 1052, 1062, and 1067; (ii) a CDR2 having an amino acid sequence that is at least 65%, at least 70%, at least 75%, at least 80%, at least 85%, at least 90%, at least 95%, at least 99%, or 100% identical to any one of SEQ ID NOs: 6, 142, 149, 156, 163, 169, 176, 776, 782, 789, 798, 804, 811, 818, 824, 833, 840, 846, 853, 862, 869, 875, 882, 1048, 1053, 1063, and 1068; and (iii) a CDR3 having an amino acid sequence that is at least 65%, at least 70%, at least 75%, at least 80%, at least 85%, at least 90%, at least 95%, at least 99%, or 100% identical to any one of SEQ ID NOs: 46, 143, 150, 157, 164, 170, 177, 765, 767, 769, 774, 783, 790, 793, 799, 805, 812, 819, 825, 834, 841, 847, 854, 857, 863, 870, 876, 883, 886, 1049, 1054, 1064, and 1069; a VL2 comprising (i) a complementarity determining region (CDR) 1 having an amino acid sequence that is at least 65%, at least 70%, at least 75%, at least 80%, at least 85%, at least 90%, at least 95%, at least 99%, or 100% identical to any one of SEQ ID NOs: 41, 48, 138, 145, 152, 159, 166, 172, 192, 770, 778, 785, 794, 801, 807, 814, 827, 836, 849, 858, 865, 878, 1045, 1050, 1060, and 1065; (ii) a CDR2 having an amino acid sequence that is at least 65%, at least 70%, at least 75%, at least 80%, at least 85%, at least 90%, at least 95%, at least 99%, or 100% identical to any one of amino acid sequences AAS, GAS, DAS, NNN, SDS, SYN, WAS, and DAT, or at least 65%, at least 70%, at least 75%, at least 80%, at least 85%, at least 90%, at least 95%, at least 99%, or 100% identical to any one of SEQ ID NOs: 1046, 1051, and 1061; and (iii) a CDR3 having an amino acid sequence that is at least 65%, at least 70%, at least 75%, at least 80%, at least 85%, at least 90%, at least 95%, at least 99%, or 100% identical to any one of SEQ ID NOs: 42, 139, 146, 153, 160, 167, 173, 764, 766, 768, 771, 779, 786, 792, 795, 808, 815, 821, 830, 837, 843, 850, 856, 859, 866, 872, 879, 885, and 1066; and a VH2 comprising (i) a CDR1 having an amino acid sequence that is at least 65%, at least 70%, at least 75%, at least 80%, at least 85%, at least 90%, at least 95%, at least 99%, or 100% identical to any one of SEQ ID NOs: 44, 133, 141, 148, 155, 162, 175, 773, 781, 788, 797, 803, 810, 817, 823, 832, 839, 845, 852, 861, 868, 874, 881, 1047, 1052, 1062, and 1067; (ii) a CDR2 having an amino acid sequence that is at least 65%, at least 70%, at least 75%, at least 80%, at least 85%, at least 90%, at least 95%, at least 99%, or 100% identical to any one of SEQ ID NOs: 6, 142, 149, 156, 163, 169, 176, 776, 782, 789, 798, 804, 811, 818, 824, 833, 840, 846, 853, 862, 869, 875, 882, 1048, 1053, 1063, and 1068; and (iii) a CDR3 having an amino acid sequence that is at least 65%, at least 70%, at least 75%, at least 80%, at least 85%, at least 90%, at least 95%, at least 99%, or 100% identical to any one of SEQ ID NOs: 46, 143, 150, 157, 164, 170, 177, 765, 767, 769, 774, 783, 790, 793, 799, 805, 812, 819, 825, 834, 841, 847, 854, 857, 863, 870, 876, 883, 886, 1049, 1054, 1064, and 1069.

[1909] In some aspects, the antigen binding polypeptides provided herein comprise a VL1 comprising an amino acid sequence that is at least 65%, at least 70%, at least 75%, at least 80%, at least 85%, at least 90%, at least 95%, at least 99%, or 100% identical to any one of SEQ ID NOs: 43, 140, 147, 154, 161, 168, 174, 772, 780, 787, 796, 802, 809, 816, 822, 831, 838, 844, 851, 860, 867, 873, and 880.

[1910] In some aspects, the antigen binding polypeptides provided herein comprise a VH1 comprising an amino acid sequence that is at least 65%, at least 70%, at least 75%, at least 80%, at least 85%, at least 90%, at least 95%, at least 99%, or 100% identical to any one of SEQ ID NOs: 144, 151, 158, 165, 171, 178, 775, 777, 784, 791, 800, 806, 813, 820, 826, 835, 842, 848, 855, 864, 871, 877, and 884.

[1911] In some aspects, the antigen binding polypeptides provided herein comprise a VL2 comprising an amino acid sequence that is at least 65%, at least 70%, at least 75%, at least 80%, at least 85%, at least 90%, at least 95%, at least 99%, or 100% identical to any one of SEQ ID NOs: 43, 140, 147, 154, 161, 168, 174, 772, 780, 787, 796, 802, 809, 816, 822, 831, 838, 844, 851, 860, 867, 873, and 880.

[1912] In some aspects, the antigen binding polypeptides provided herein comprise a VH2 comprising an amino acid sequence that is at least 65%, at least 70%, at least 75%, at least 80%, at least 85%, at least 90%, at least 95%, at least 99%, or 100% identical to any one of SEQ ID NOs: 144, 151, 158, 165, 171, 178, 775, 777, 784, 791, 800, 806, 813, 820, 826, 835, 842, 848, 855, 864, 871, 877, and 884.

[1913] In some aspects, the antigen binding polypeptides provided herein comprise (i) a VL1 comprising an amino acid sequence that is at least 65%, at least 70%, at least 75%, at least 80%, at least 85%, at least 90%, at least 95%, at least 99%, or 100% identical to any one of SEQ ID NOs: 43, 140, 147, 154, 161, 168, 174, 772, 780, 787, 796, 802, 809, 816, 822, 831, 838, 844, 851, 860, 867, 873, and 880; (ii) a VH1 comprising an amino acid sequence that is at least 65%, at least 70%, at least 75%, at least 80%, at least 85%, at least 90%, at least 95%, at least 99%, or 100% identical to any one of SEQ ID NOs: 144, 151, 158, 165, 171, 178, 775, 777, 784, 791, 800, 806, 813, 820, 826, 835, 842, 848, 855, 864, 871, 877, and 884; (iii) a VL2 comprising an amino acid sequence that is at least 65%, at least 70%, at least 75%, at least 80%, at least 85%, at least 90%, at least 95%, at least 99%, or 100% identical to any one of SEQ ID NOs: 43, 140, 147, 154, 161, 168, 174, 772, 780, 787, 796, 802, 809, 816, 822, 831, 838, 844, 851, 860, 867, 873, and 880; and (iv) a VH2 comprising an amino acid sequence that is at least 65%, at least 70%, at least 75%, at least 80%, at least 85%, at least 90%, at least 95%, at least 99%, or 100% identical to any one of SEQ ID NOs: 144, 151, 158, 165, 171, 178, 775, 777, 784, 791, 800, 806, 813, 820, 826, 835, 842, 848, 855, 864, 871, 877, and 884.

[1914] In some aspects, at least one of VL1 or VL2 comprised in the antigen binding polypeptides provided herein comprises (i) a complementarity determining region (CDR) 1 having an amino acid sequence that is at least 65%, at least 70%, at least 75%, at least 80%, at least 85%, at least 90%, at least 95%, at least 99%, or 100% identical to SEQ ID NO: 145 or 1050; (ii) a CDR2 having an amino acid sequence at least 65%, at least 70%, at least 75%, at least 80%, at least 85%, at least 90%, at least 95%, at least 99%, or 100% identical to SEQ ID NO: 1051 or an amino acid sequence that is at least 65%, at least 70%, at least 75%, at least 80%, at least 85%, at least 90%, at least 95%, at least 99%, or 100% identical to amino acid sequence AAS; and (iii) a CDR3 having an amino acid sequence that is at least 65%, at least 70%, at least 75%, at least 80%, at least 85%, at least 90%, at least 95%, at least 99%, or 100% identical to SEQ ID NO: 146 or 764.

[1915] In some aspects, at least one of VH1 or VH2 comprised in the antigen binding polypeptides provided herein comprises (i) a complementarity determining region (CDR) 1 having an amino acid sequence that is at least 65%, at least 70%, at least 75%, at least 80%, at least 85%, at least 90%, at least 95%, at least 99%, or 100% identical to SEQ ID NO: 148 or 1052; (ii) a CDR2 having an amino acid sequence that is at least 65%, at least 70%, at least 75%, at least 80%, at least 85%, at least 90%, at least 95%, at least 99%, or 100% identical to SEQ ID NO: 149 or 1053; and (iii) a CDR3 having an amino acid sequence that is at least 65%, at least 70%, at least 75%, at least 80%, at least 85%, at least 90%, at least 95%, at least 99%, or 100% identical to SEQ ID NO: 150, 765, or 1054.

[1916] In some aspects, at least one of VL1 or VL2 comprised in the antigen binding polypeptides provided herein comprises (i) a complementarity determining region (CDR) 1 having an amino acid sequence that is at least 65%, at least 70%, at least 75%, at least 80%, at least 85%, at least 90%, at least 95%, at least 99%, or 100% identical to SEQ ID NO: 145 or 1050; (ii) a CDR2 having an amino acid sequence at least 65%, at least 70%, at least 75%, at least 80%, at least 85%, at least 90%, at least 95%, at least 99%, or 100% identical to SEQ ID NO: 1051 or an amino acid sequence that is at least 65%, at least 70%, at least 75%, at least 80%, at least 85%, at least 90%, at least 95%, at least 99%, or 100% identical to amino acid sequence AAS; and (iii) a CDR3 having an amino acid sequence that is at least 65%, at least 70%, at least 75%, at least 80%, at least 85%, at least 90%, at least 95%, at least 99%, or 100% identical to SEQ ID NO: 146 or 764; and at least one of VH1 or VH2 comprised in the antigen binding polypeptides provided herein comprises (iv) a complementarity determining region (CDR) 1 having an amino acid sequence that is at least 65%, at least 70%, at least 75%, at least 80%, at least 85%, at least 90%, at least 95%, at least 99%, or 100% identical to SEQ ID NO: 148 or 1052; (v) a CDR2 having an amino acid sequence that is at least 65%, at least 70%, at least 75%, at least 80%, at least 85%, at least 90%, at least 95%, at least 99%, or 100% identical to SEQ ID NO: 149 or 1053; and (vi) a CDR3 having an amino acid sequence that is at least 65%, at least 70%, at least 75%, at least 80%, at least 85%, at least 90%, at least 95%, at least 99%, or 100% identical to SEQ ID NO: 150, 765, or 1054.

[1917] In some aspects, at least one of VL1 or VL2 comprised in the antigen binding polypeptides provided herein comprises an amino acid sequence that is at least 65%, at least 70%, at least 75%, at least 80%, at least 85%, at least 90%, at least 95%, at least 99%, or 100% identical to SEQ ID NO: 147.

[1918] In some aspects, at least one of VH1 or VH2 comprised in the antigen binding polypeptides provided herein comprises an amino acid sequence that is at least 65%, at least 70%, at least 75%, at least 80%, at least 85%, at least 90%, at least 95%, at least 99%, or 100% identical to SEQ ID NO: 151.

[1919] In some aspects, (i) at least one of VL1 or VL2 comprised in the antigen binding polypeptides provided herein comprises an amino acid sequence that is at least 65%, at least 70%, at least 75%, at least 80%, at least 85%, at least 90%, at least 95%, at least 99%, or 100% identical to SEQ ID NO: 147, and (ii) at least one of VH1 or VH2 comprised in the antigen binding polypeptides provided herein comprises an amino acid sequence that is at least 65%, at least 70%, at least 75%, at least 80%, at least 85%, at least 90%, at least 95%, at least 99%, or 100% identical to SEQ ID NO: 151.

[1920] In some aspects, the antigen binding polypeptides provided herein comprise a VL1 comprising (i) a complementarity determining region (CDR) 1 having an amino acid sequence that is at least 65%, at least 70%, at least 75%, at least 80%, at least 85%, at least 90%, at least 95%, at least 99%, or 100% identical to SEQ ID NO: 145 or 1050; (ii) a CDR2 having an amino acid sequence at least 65%, at least 70%, at least 75%, at least 80%, at least 85%, at least 90%, at least 95%, at least 99%, or 100% identical to SEQ ID NO: 1051 or an amino acid sequence that is at least 65%, at least 70%, at least 75%, at least 80%, at least 85%, at least 90%, at least 95%, at least 99%, or 100% identical to amino acid sequence AAS; and (iii) a CDR3 having an amino acid sequence that is at least 65%, at least 70%, at least 75%, at least 80%, at least 85%, at least 90%, at least 95%, at least 99%, or 100% identical to SEQ ID NO: 146 or 764; a VH1 comprising (iv) a complementarity determining region (CDR) 1 having an amino acid sequence that is at least 65%, at least 70%, at least 75%, at least 80%, at least 85%, at least 90%, at least 95%, at least 99%, or 100% identical to SEQ ID NO: 148 or 1052; (v) a CDR2 having an amino acid sequence that is at least 65%, at least 70%, at least 75%, at least 80%, at least 85%, at least 90%, at least 95%, at least 99%, or 100% identical to SEQ ID NO: 149 or 1053; and (vi) a CDR3 having an amino acid sequence that is at least 65%, at least 70%, at least 75%, at least 80%, at least 85%, at least 90%, at least 95%, at least 99%, or 100% identical to SEQ ID NO: 150, 765, or 1054; a VL2 comprising (vii) a complementarity determining region (CDR) 1 having an amino acid sequence that is at least 65%, at least 70%, at least 75%, at least 80%, at least 85%, at least 90%, at least 95%, at least 99%, or 100% identical to any one of SEQ ID NOs: 1, 9, 15, 23, 30, 41, 48, 55, 58, 65, 72, 79, 86, 93, 99, 105, 112, 119, 130, 138, 145, 152, 159, 166, 172, 179, 186, 192, 199, 205, 212, 219, 226, 232, 324, 627, 640, 650, 659, 676, 687, 695, 703, 712, 770, 778, 785, 794, 801, 807, 814, 827, 836, 849, 858, 865, 878, 1045, 1050, 1055, 1060, and 1065; (viii) a CDR2 having an amino acid sequence at least 65%, at least 70%, at least 75%, at least 80%, at least 85%, at least 90%, at least 95%, at least 99%, or 100% identical to any one of SEQ ID NOs: 2, 31, 628, 641, 677, 1046, 1051, 1056, and 1061; or at least 65%, at least 70%, at least 75%, at least 80%, at least 85%, at least 90%, at least 95%, at least 99%, or 100% identical to any one of amino acid sequences AAS, GAS, LGS, GTN, GTN, SAS, SDS, DNT, EVT.

[1921] DAS, DVT, RNS, DVS, EDS, DDS, KDS, VAS, WAS, YTS, EVS, NNN, SYN, and DAT; and (ix) a CDR3 having an amino acid sequence at least 65%, at least 70%, at least 75%, at least 80%, at least 85%, at least 90%, at least 95%, at least 99%, or 100% identical to any one of SEQ ID NOs: 3, 10, 16, 24, 32, 38, 42, 49, 59, 66, 73, 80, 87, 94, 100, 106, 113, 120, 126, 131, 139, 146, 153, 160, 167, 173, 180, 187, 193, 200, 206, 213, 220, 227, 233, 239, 242, 246, 249, 256, 283, 285, 287, 288, 290, 292, 294, 296, 301, 304, 306, 309, 311, 313, 316, 325, 326, 329, 642, 651, 660, 668, 678, 651, 696, 704, 713, 764, 766, 768, 771, 779, 786, 792, 795, 808, 815, 821, 830, 837, 843, 850, 856, 859, 866, 872, 879, 885, and 1066; and a VH2 comprising (x) a CDR1 having an amino acid sequence at least 65%, at least 70%, at least 75%, at least 80%, at least 85%, at least 90%, at least 95%, at least 99%, or 100% identical to any one of SEQ ID NOs: 5, 12, 18, 26, 34, 44, 51, 61, 68, 75, 82, 89, 96, 102, 108, 115, 122, 133, 141, 148, 155, 162, 175, 182, 189, 195, 202, 208, 215, 222, 229, 235, 318, 629, 645, 654, 663, 671, 682, 690, 699, 707, 716, 773, 781, 788, 797, 803, 810, 817, 823, 832, 839, 845, 852, 861, 868, 874, 881, 1047, 1052, 1057, 1062, and 1067; (xi) a CDR2 having an amino acid sequence at least 65%, at least 70%, at least 75%, at least 80%, at least 85%, at least 90%, at least 95%, at least 99%, or 100% identical to any one of SEQ ID NOs: 6, 19, 27, 35, 45, 52, 56, 62, 69, 76, 83, 90, 109, 116, 123, 134, 142, 149, 156, 163, 169, 176, 183, 196, 209, 216, 223, 236, 273, 319, 328, 630, 646, 655, 664, 672, 683, 691, 708, 776, 782, 789, 798, 804, 811, 818, 824, 833, 840, 846, 853, 862, 869, 875, 882, 1048, 1053, 1058, 1063, and 1068; and (xii) a CDR3 having an amino acid sequence at least 65%, at least 70%, at least 75%, at least 80%, at least 85%, at least 90%, at least 95%, at least 99%, or 100% identical to any one of SEQ ID NOs: 7, 13, 20, 28, 36, 40, 46, 53, 63, 70, 77, 84, 91, 97, 103, 110, 117, 124, 128, 135, 143, 150, 157, 164, 170, 177, 184, 190, 197, 203, 210, 217, 224, 230, 237, 241, 244, 248, 253, 257, 259, 261, 263, 265, 267, 269, 271, 274, 276, 278, 281, 297, 320, 322, 327, 330, 332, 631, 647, 656, 665, 673, 684, 692, 700, 709, 717, 765, 767, 769, 774, 783, 790, 793, 799, 805, 812, 819, 825, 834, 841, 847, 854, 857, 863, 870, 876, 883, 886, 1049, 1054, 1059, 1064, and 1069.

[1922] In some aspects, the antigen binding polypeptides provided herein comprise (i) a VL1 comprising an amino acid sequence that is at least 65%, at least 70%, at least 75%, at least 80%, at least 85%, at least 90%, at least 95%, at least 99%, or 100% identical to SEQ ID NO: 147; (ii) a VH1 comprising an amino acid sequence that is at least 65%, at least 70%, at least 75%, at least 80%, at least 85%, at least 90%, at least 95%, at least 99%, or 100% identical to SEQ ID NO: 151; (iii) a VL2 comprising an amino acid sequence that is at least 65%, at least 70%, at least 75%, at least 80%, at least 85%, at least 90%, at least 95%, at least 99%, or 100% identical to any one of SEQ ID NOs: 4, 11, 17, 25, 33, 39, 43, 50, 60, 67, 74, 81, 88, 95, 101, 107, 114, 121, 127, 132, 140, 147, 154, 161, 168, 174, 181, 188, 194, 201, 207, 214, 221, 228, 234, 240, 243, 247, 250, 251, 252, 255, 284, 286, 289, 291, 293, 295, 299, 300, 302, 303, 305, 307, 308, 310, 312, 314, 315, 317, 323, 639, 649, 658, 667, 675, 686, 694, 702, 711, 772, 780, 787, 796, 802, 809, 816, 822, 831, 838, 844, 851, 860, 867, 873, 880, and 988; and (iv) a VH2 comprising an amino acid sequence that is at least 65%, at least 70%, at least 75%, at least 80%, at least 85%, at least 90%, at least 95%, at least 99%, or 100% identical to any one of SEQ ID NOs: 8, 14, 21, 22, 29, 37, 47, 54, 57, 64, 71, 78, 85, 92, 98, 104, 111, 118, 125, 129, 136, 137, 144, 151, 158, 165, 171, 178, 185, 191, 198, 204, 211, 218, 225, 231, 238, 245, 254, 258, 260, 262, 264, 266, 268, 270, 272, 275, 277, 279, 280, 282, 298, 321, 331, 626, 644, 653, 662, 670, 681, 689, 698, 706, 715, 775, 777, 784, 791, 800, 806, 813, 820, 826, 835, 842, 848, 855, 864, 871, 877, and 884.

[1923] In some aspects, the antigen binding polypeptides provided herein comprise a VL1 comprising (i) a complementarity determining region (CDR) 1 having an amino acid sequence that is at least 65%, at least 70%, at least 75%, at least 80%, at least 85%, at least 90%, at least 95%, at least 99%, or 100% identical to SEQ ID NO: 145 or 1050; (ii) a CDR2 having an amino acid sequence at least 65%, at least 70%, at least 75%, at least 80%, at least 85%, at least 90%, at least 95%, at least 99%, or 100% identical to SEQ ID NO: 1051 or an amino acid sequence that is at least 65%, at least 70%, at least 75%, at least 80%, at least 85%, at least 90%, at least 95%, at least 99%, or 100% identical to amino acid sequence AAS; and (iii) a CDR3 having an amino acid sequence that is at least 65%, at least 70%, at least 75%, at least 80%, at least 85%, at least 90%, at least 95%, at least 99%, or 100% identical to SEQ ID NO: 146 or 764; a VH1 comprising (iv) a complementarity determining region (CDR) 1 having an amino acid sequence that is at least 65%, at least 70%, at least 75%, at least 80%, at least 85%, at least 90%, at least 95%, at least 99%, or 100% identical to SEQ ID NO: 148 or 1052; (v) a CDR2 having an amino acid sequence that is at least 65%, at least 70%, at least 75%, at least 80%, at least 85%, at least 90%, at least 95%, at least 99%, or 100% identical to SEQ ID NO: 149 or 1053; and (vi) a CDR3 having an amino acid sequence that is at least 65%, at least 70%, at least 75%, at least 80%, at least 85%, at least 90%, at least 95%, at least 99%, or 100% identical to SEQ ID NO: 150, 765, or 1054; a VL2 comprising (vii) a complementarity determining region (CDR) 1 having an amino acid sequence that is at least 65%, at least 70%, at least 75%, at least 80%, at least 85%, at least 90%, at least 95%, at least 99%, or 100% identical to any one of SEQ ID NOs: 1, 9, 15, 23, 30, 65, 72, 145, 152, 324, 627, 138, 172, 1045, 1050, 1055, 1060, and 1065; (viii) a CDR2 having an amino acid sequence at least 65%, at least 70%, at least 75%, at least 80%, at least 85%, at least 90%, at least 95%, at least 99%, or 100% identical to any one of SEQ ID NOs: 2, 31, 628, 1046, 1051, 1056, and 1061, or at least 65%, at least 70%, at least 75%, at least 80%, at least 85%, at least 90%, at least 95%, at least 99%, or 100% identical to any one of amino acid sequences GAS, LGS, GTN, SAS, SDS, AAS, DAS, and DNT; and (ix) a CDR3 having an amino acid sequence at least 65%, at least 70%, at least 75%, at least 80%, at least 85%, at least 90%, at least 95%, at least 99%, or 100% identical to any one of SEQ ID NOs: 3, 10, 16, 24, 32, 38, 66, 73, 146, 153, 325, 326, 764, 766, 139, 856, 173, 792, and 1066; and a VH2 comprising (x) a CDR1 having an amino acid sequence at least 65%, at least 70%, at least 75%, at least 80%, at least 85%, at least 90%, at least 95%, at least 99%, or 100% identical to any one of SEQ ID NOs: 5, 12, 18, 26, 34, 68, 75, 148, 155, 629, 141, 175, 1047, 1052, 1057, 1062, and 1067; (xi) a CDR2 having an amino acid sequence at least 65%, at least 70%, at least 75%, at least 80%, at least 85%, at least 90%, at least 95%, at least 99%, or 100% identical to any one of SEQ ID NOs: 6, 19, 27, 35, 69, 76, 149, 156, 630, 142, 176, 1048, 1053, 1058, 1063, and 1068; and (xii) a CDR3 having an amino acid sequence at least 65%, at least 70%, at least 75%, at least 80%, at least 85%, at least 90%, at least 95%, at least 99%, or 100% identical to any one of SEQ ID NOs: 7, 13, 20, 28, 36, 40, 70, 77, 327, 150, 157, 332, 631, 765, 767, 143, 857, 177, 793, 1049, 1054, 1059, 1064, and 1069.

[1924] In some aspects, the antigen binding polypeptides provided herein comprise (i) a VL1 comprising an amino acid sequence that is at least 65%, at least 70%, at least 75%, at least 80%, at least 85%, at least 90%, at least 95%, at least 99%, or 100% identical to SEQ ID NO: 147; (ii) a VH1 comprising an amino acid sequence that is at least 65%, at least 70%, at least 75%, at least 80%, at least 85%, at least 90%, at least 95%, at least 99%, or 100% identical to SEQ ID NO: 151; (iii) a VL2 comprising an amino acid sequence that is at least 65%, at least 70%, at least 75%, at least 80%, at least 85%, at least 90%, at least 95%, at least 99%, or 100% identical to any one of SEQ ID NOs: 4, 11, 17, 25, 33, 39, 67, 74, 147, 154, 140, and 174; and (iv) a VH2 comprising an amino acid sequence that is at least 65%, at least 70%, at least 75%, at least 80%, at least 85%, at least 90%, at least 95%, at least 99%, or 100% identical to any one of SEQ ID NOs: 8, 14, 21, 22, 29, 37, 71, 78, 151, 158, 626, 144, and 178.

[1925] In some aspects, the antigen binding polypeptides disclosed herein, comprise one or more CL, as indicated in the formulas representing the antigen binding polypeptides disclosed herein. In some aspects, the CL comprises an amino acid sequence at least 65%, at least 70%, at least 75%, at least 80%, at least 85%, at least 90%, at least 95%, at least 99%, or 100% identical to any one of SEQ ID NOs: 374, 637, or 1092-1095.

[1926] In some aspects, the antigen binding polypeptides disclosed herein, comprise one or more CH1, as indicated in the formulas representing the antigen binding polypeptides disclosed herein. In some aspects, the CH1 comprises an amino acid sequence at least 65%, at least 70%, at least 75%, at least 80%, at least 85%, at least 90%, at least 95%, at least 99%, or 100% identical to any one of SEQ ID NOs: 375, 634, 1070, 1071, or 1086-1091.

[1927] In some aspects, the antigen binding polypeptides provided herein further comprise an Fc region. In some aspects, the antigen binding polypeptides provided herein further comprise an Fc region at the carboxy-terminus. In some aspects, the Fc region comprises an immunoglobulin heavy chain constant region 2 (CH2) and/or an immunoglobulin heavy chain constant region 3 (CH3). In some aspects, the Fc region further comprises an immunoglobulin hinge (i.e., a hinge region). In some aspects, the hinge region comprises an amino acid sequence at least 65%, at least 70%, at least 75%, at least 80%, at least 85%, at least 90%, at least 95%, at least 99%, or 100% identical to any one of SEQ ID NOs: 635, 636, 1072, 1073, or 1074. In some aspects, the Fc region comprises a CH2 and a CH3. In some aspects, the CH2 comprises an amino acid sequence that is at least 65%, at least 70%, at least 75%, at least 80%, at least 85%, at least 90%, at least 95%, at least 99%, or 100% identical to any one of SEQ ID NOs: 1075-1078. In some aspects, the CH3 comprises an amino acid sequence that is at least 65%, at least 70%, at least 75%, at least 80%, at least 85%, at least 90%, at least 95%, at least 99%, or 100% identical to any one of SEQ ID NOs: 1079-1085. In some aspects, the Fc region comprises an amino acid sequence that is at least 65%, at least 70%, at least 75%, at least 80%, at least 85%, at least 90%, at least 95%, at least 99%, or 100% identical to any one of SEQ ID NOs: 376-380.

[1928] In some aspects, the Fc region comprises one or more amino acid substitutions. In some aspects, the one or more amino acid substitutions comprise one or more half-life extension amino acid substitutions. In some aspects, the one or more half-life extension amino acid substitutions comprise one or more of amino acid substitutions M428L, N434A, N434S, L234F, L235E, P331S, M252Y, S254T, and T256E, or equivalent thereof, based on the EU numbering scheme. In some aspects, the one or more half-life extension amino acid substitutions comprise a LA (M428L and N434A, or equivalent thereof, based on the EU numbering scheme) amino acid substitution. In some aspects, the one or more half-life extension amino acid substitutions comprise a LS (M428L and N434S, or equivalent thereof, based on the EU numbering scheme) amino acid substitution. In some aspects, the one or more half-life extension amino acid substitutions comprise L234F and L235E, or equivalent thereof (based on the EU numbering scheme) amino acid substitutions. In some aspects, the one or more half-life extension amino acid substitutions comprise a TM (L234F, L235E, and P331S, or equivalent thereof, based on the EU numbering scheme) amino acid substitution. In some aspects, the one or more half-life extension amino acid substitutions comprise a YTE (M252Y, S254T, and T256E, or equivalent thereof, based on the EU numbering scheme) amino acid substitution.

[1929] In some aspects, the Fc region comprises at least one knob-into-hole modification. In some aspects, the antigen binding polypeptides disclosed herein are comprised in IgG1 or IgG4 antibodies or antigen binding fragments thereof. In some aspects, the knob-into-hole modification comprises one or more of knob substitutions of S354C and T366W, or equivalent thereof, and/or one or more of hole substitutions of Y349C, T366S, L368A, Y407V, or equivalent thereof, or a combination thereof, based on the EU numbering scheme. In some aspects, the Fc region comprises a knob-into-hole modification comprising knob substitutions of S354C and T366W, or equivalent thereof, and/or hole substitutions of Y349C, T366S, L368A, and Y407V, or equivalent thereof, and/or a half-life extension amino acid substitution comprising: a LA (M428L and N434A, or equivalent thereof, based on the EU numbering scheme) amino acid substitution, a LS (M428L and N434S, or equivalent thereof, based on the EU numbering scheme) amino acid substitution. L234F and L235E, or equivalent thereof (based on the EU numbering scheme) amino acid substitutions, a TM (L234F, L235E, and P331S, or equivalent thereof, based on the EU numbering scheme) amino acid substitution, a YTE (M252Y, S254T, and T256E, or equivalent thereof, based on the EU numbering scheme) amino acid substitution, or any combination thereof.

[1930] In some aspects, the Fc region comprises knob substitutions of S354C and T366W, or equivalent thereof, and a half-life extension amino acid substitution comprising: a LA (M428L and N434A, or equivalent thereof, based on the EU numbering scheme) amino acid substitution, a LS (M428L and N434S, or equivalent thereof, based on the EU numbering scheme) amino acid substitution. L234F and L235E, or equivalent thereof (based on the EU numbering scheme) amino acid substitutions, a TM (L234F, L235E, and P331S, or equivalent thereof, based on the EU numbering scheme) amino acid substitution, a YTE (M252Y, S254T, and T256E, or equivalent thereof, based on the EU numbering scheme) amino acid substitution, or any combination thereof.

[1931] In some aspects, the Fc region comprises hole substitutions of Y349C, T366S, L368A, and Y407V, or equivalent thereof, and a half-life extension amino acid substitution comprising: a LA (M428L and N434A, or equivalent thereof, based on the EU numbering scheme) amino acid substitution, a LS (M428L and N434S, or equivalent thereof, based on the EU numbering scheme) amino acid substitution. L234F and L235E, or equivalent thereof (based on the EU numbering scheme) amino acid substitutions, a TM (L234F, L235E, and P331S, or equivalent thereof, based on the EU numbering scheme) amino acid substitution, a YTE (M252Y, S254T, and T256E, or equivalent thereof, based on the EU numbering scheme) amino acid substitution, or any combination thereof.

[1932] In some aspects, the antigen binding polypeptides disclosed herein comprise one or more Fc effector function knockout mutation. In some aspects, the antigen binding polypeptides disclosed herein are comprised in IgG1 or IgG4 antibodies or antigen binding fragments thereof. In some aspects, the Fc effector function knockout mutation is L234A, L235A, P239A, or equivalent thereof, or a combination thereof, based on the EU numbering scheme.

[1933] In some aspects, the antigen binding polypeptides disclosed herein comprise a mutation at a glycosylation site. In some aspects, the mutation at a glycosylation site is a mutation at an N-glycosylation site. In some aspects, the antigen binding polypeptides comprise a VH comprising a mutation at a glycosylation site. In some aspects, the mutation at a glycosylation site is a mutation at an N-glycosylation site. In some aspects, the mutation at an N-glycosylation site is at amino acid N62 of the VH region or equivalent thereof. In some aspects, the mutation at an N-glycosylation site at amino acid N62 is N62Q or N62S, or equivalent thereof.

[1934] In some aspects, the antigen binding polypeptides disclosed herein, comprise one or more optional linkers. The one or more optional linkers are indicated herein as Ln, wherein n is an integer, and the integer next to each L indicates each L comprised in the antigen binding polypeptides disclosed herein. For example, if an antigen binding polypeptide disclosed herein comprises two linkers, the first linker from N-terminus to C-terminus is herein indicated as L1, and the second linker from N-terminus to C-terminus is herein indicated as L2. In some aspects, any one of the optional linkers each independently have a length of from 0 amino acids to about 50 amino acids. In some aspects, any one of the optional linkers each independently have a length of from 5 amino acids to about 40 amino acids.

[1935] In some aspects, any one of the optional linkers are non-immunogenic. In some aspects, any one of the optional linkers do not contain a consensus T cell epitope.

[1936] In some aspects, any of Ln comprises an amino acid sequence of G or A, or an amino acid sequence at least 65%, at least 70%, at least 75%, at least 80%, at least 85%, at least 90%, at least 95%, at least 99%, or 100% identical to amino acid sequence GSS or ASG, or an amino acid sequence at least 65%, at least 70%, at least 75%, at least 80%, at least 85%, at least 90%, at least 95%, at least 99%, or 100% identical to any one of SEQ ID NOs: 333-373 and 967-971. In some aspects, Ln comprises an amino acid sequence at least 65%, at least 70%, at least 75%, at least 80%, at least 85%, at least 90%, at least 95%, at least 99%, or 100% identical to any one of SEQ ID NOs: 333-345 and 967-971.

[1937] In some aspects, the antigen binding polypeptides provided herein have a structure, from amino-terminus to carboxy-terminus, represented by:
[1938] VL1-L1-VL2-L2-VH2-L3-VH1-L4-Fc-L5-Fc;
[1939] VL1-L1-VH2-L2-VL2-L3-VH1-L4-Fc-L5-Fc;
[1940] VH1-L1-VH2-L2-VL2-L3-VL1-L4-Fc-L5-Fc; or
[1941] VH1-L1-VL2-L2-VH2-L3-VL1-L4-Fc-L5-Fc;
[1942] wherein:
[1943] VL1 is a first immunoglobulin light chain variable region that specifically binds to a severe acute respiratory syndrome coronavirus 2 (SARS-CoV-2) protein;
[1944] VL2 is a second immunoglobulin light chain variable region that specifically binds to a SARS-CoV-2 protein;
[1945] VH1 is a first immunoglobulin heavy chain variable region that specifically binds to a SARS-CoV-2 protein;
[1946] VH2 is a second immunoglobulin heavy chain variable region that specifically binds to a SARS-CoV-2 protein;
[1947] L1-L5 are optional amino acid linkers; and
[1948] Fc is an immunoglobulin fragment crystallizable region comprising an immunoglobulin heavy chain constant region 2 (CH2), an immunoglobulin heavy chain constant region 3 (CH3), and optionally, an immunoglobulin hinge.

[1949] In any aspect shown herein as a structure from amino terminus to carboxy terminus, and with binding pairs selected from VL and/or VH or other structural regions such as CH2, CH3, when shown without a specific linker such as L1, L2, etc., such linkers are optionally present in such structures between each designated subsequence VL, VH, etc.

[1950] In some aspects, the antigen binding polypeptides provided herein comprise a VL1 comprising (i) a complementarity determining region (CDR) 1 having an amino acid sequence that is at least 65%, at least 70%, at least 75%, at least 80%, at least 85%, at least 90%, at least 95%, at least 99%, or 100% identical to any one of SEQ ID NOs: 1, 9, 15, 23, 30, 41, 48, 55, 58, 65, 72, 79, 86, 93, 99, 105, 112, 119, 130, 138, 145, 152, 159, 166, 172, 179, 186, 192, 199, 205, 212, 219, 226, 232, 324, 627, 640, 650, 659, 676, 687, 695, 703, 712, 770, 778, 785, 794, 801, 807, 814, 827, 836, 849, 858, 865, 878, 1045, 1050, 1055, 1060, and 1065; (ii) a CDR2 having an amino acid sequence that is at least 65%, at least 70%, at least 75%, at least 80%, at least 85%, at least 90%, at least 95%, at least 99%, or 100% identical to any one of SEQ ID NOs: 2, 31, 628, 641, 677, 1046, 1051, 1056, and 1061; or at least 65%, at least 70%, at least 75%, at least 80%, at least 85%, at least 90%, at least 95%, at least 99%, or 100% identical to any one of amino acid sequences AAS, GAS, LGS, GTN, GTN, SAS, SDS, DNT, EVT, DAS, DVT, RNS, DVS, EDS, DDS, KDS, VAS, WAS, YTS, EVS, NNN, SYN, and DAT; and (iii) a CDR3 having an amino acid sequence that is at least 65%, at least 70%, at least 75%, at least 80%, at least 85%, at least 90%, at least 95%, at least 99%, or 100% identical to any one of SEQ ID NOs: 3, 10, 16, 24, 32, 38, 42, 49, 59, 66, 73, 80, 87, 94, 100, 106, 113, 120, 126, 131, 139, 146, 153, 160, 167, 173, 180, 187, 193, 200, 206, 213, 220, 227, 233, 239, 242, 246, 249, 256, 283, 285, 287, 288, 290, 292, 294, 296, 301, 304, 306, 309, 311, 313, 316, 325, 326, 329, 642, 651, 660, 668, 678, 651, 696, 704, 713, 764, 766, 768, 771, 779, 786, 792, 795, 808, 815, 821, 830, 837, 843, 850, 856, 859, 866, 872, 879, 885, and 1066.

[1951] In some aspects, the antigen binding polypeptides provided herein comprise a VL2 comprising (i) a complementarity determining region (CDR) 1 having an amino acid sequence that is at least 65%, at least 70%, at least 75%, at least 80%, at least 85%, at least 90%, at least 95%, at least 99%, or 100% identical to any one of SEQ ID NOs: 1, 9, 15, 23, 30, 41, 48, 55, 58, 65, 72, 79, 86, 93, 99, 105, 112, 119, 130, 138, 145, 152, 159, 166, 172, 179, 186, 192, 199, 205, 212, 219, 226, 232, 324, 627, 640, 650, 659, 676, 687, 695, 703, 712, 770, 778, 785, 794, 801, 807, 814, 827, 836, 849, 858, 865, 878, 1045, 1050, 1055, 1060, and 1065; (ii) a CDR2 having an amino acid sequence that is at least 65%, at least 70%, at least 75%, at least 80%, at least 85%, at least 90%, at least 95%, at least 99%, or 100% identical to any one of SEQ ID NOs: 2, 31, 628, 641, 677, 1046, 1051, 1056, and 1061; or at least 65%, at least 70%, at least 75%, at least 80%, at least 85%, at least 90%, at least 95%, at least 99%, or 100% identical to any one of amino acid sequences AAS, GAS, LGS, GTN, GTN, SAS, SDS, DNT, EVT, DAS, DVT, RNS, DVS, EDS, DDS, KDS, VAS, WAS, YTS, EVS, NNN, SYN, and DAT; and (iii) a CDR3 having an amino acid sequence that is at least 65%, at least 70%, at least 75%, at least 80%, at least 85%, at least 90%, at least 95%, at least 99%, or 100% identical to any one of SEQ ID NOs: 3, 10, 16, 24, 32, 38, 42, 49, 59, 66, 73, 80, 87, 94, 100, 106, 113, 120, 126, 131, 139, 146, 153, 160, 167, 173, 180, 187, 193, 200, 206, 213, 220, 227, 233, 239, 242, 246, 249, 256, 283, 285, 287, 288, 290, 292, 294, 296, 301, 304, 306, 309, 311, 313, 316, 325, 326, 329, 642, 651, 660, 668, 678, 651, 696, 704, 713, 764, 766, 768, 771, 779, 786, 792, 795, 808, 815, 821, 830, 837, 843, 850, 856, 859, 866, 872, 879, 885, and 1066.

[1952] In some aspects, the antigen binding polypeptides provided herein comprise a VH1 comprising (i) a CDR1 having an amino acid sequence that is at least 65%, at least 70%, at least 75%, at least 80%, at least 85%, at least 90%, at least 95%, at least 99%, or 100% identical to any one of SEQ ID NOs: 5, 12, 18, 26, 34, 44, 51, 61, 68, 75, 82, 89, 96, 102, 108, 115, 122, 133, 141, 148, 155, 162, 175, 182, 189, 195, 202, 208, 215, 222, 229, 235, 318, 629, 645, 654, 663, 671, 682, 690, 699, 707, 716, 773, 781, 788, 797, 803, 810, 817, 823, 832, 839, 845, 852, 861, 868, 874, 881, 1047, 1052, 1057, 1062, and 1067; (ii) a CDR2 having an amino acid sequence that is at least 65%, at least 70%, at least 75%, at least 80%, at least 85%, at least 90%, at least 95%, at least 99%, or 100% identical to any one of SEQ ID NOs: 6, 19, 27, 35, 45, 52, 56, 62, 69, 76, 83, 90, 109, 116, 123, 134, 142, 149, 156, 163, 169, 176, 183, 196, 209, 216, 223, 236, 273, 319, 328, 630, 646, 655, 664, 672, 683, 691, 708, 776, 782, 789, 798, 804, 811, 818, 824, 833, 840, 846, 853, 862, 869, 875, 882, 1048, 1053, 1058, 1063, and 1068; and (iii) a CDR3 having an amino acid sequence that is at least 65%, at least 70%, at least 75%, at least 80%, at least 85%, at least 90%, at least 95%, at least 99%, or 100% identical to any one of SEQ ID NOs: 7, 13, 20, 28, 36, 40, 46, 53, 63, 70, 77, 84, 91, 97, 103, 110, 117, 124, 128, 135, 143, 150, 157, 164, 170, 177, 184, 190, 197, 203, 210, 217, 224, 230, 237, 241, 244, 248, 253, 257, 259, 261, 263, 265, 267, 269, 271, 274, 276, 278, 281, 297, 320, 322, 327, 330, 332, 631, 647, 656, 665, 673, 684, 692, 700, 709, 717, 765, 767, 769, 774, 783, 790, 793, 799, 805, 812, 819, 825, 834, 841, 847, 854, 857, 863, 870, 876, 883, 886, 1049, 1054, 1059, 1064, and 1069.

[1953] In some aspects, the antigen binding polypeptides provided herein comprise a VH2 comprising (i) a CDR1 having an amino acid sequence that is at least 65%, at least 70%, at least 75%, at least 80%, at least 85%, at least 90%, at least 95%, at least 99%, or 100% identical to any one of SEQ ID NOs: 5, 12, 18, 26, 34, 44, 51, 61, 68, 75, 82, 89, 96, 102, 108, 115, 122, 133, 141, 148, 155, 162, 175, 182, 189, 195, 202, 208, 215, 222, 229, 235, 318, 629, 645, 654, 663, 671, 682, 690, 699, 707, 716, 773, 781, 788, 797, 803, 810, 817, 823, 832, 839, 845, 852, 861, 868, 874, 881, 1047, 1052, 1057, 1062, and 1067; (ii) a CDR2 having an amino acid sequence that is at least 65%, at least 70%, at least 75%, at least 80%, at least 85%, at least 90%, at least 95%, at least 99%, or 100% identical to any one of SEQ ID NOs: 6, 19, 27, 35, 45, 52, 56, 62, 69, 76, 83, 90, 109, 116, 123, 134, 142, 149, 156, 163, 169, 176, 183, 196, 209, 216, 223, 236, 273, 319, 328, 630, 646, 655, 664, 672, 683, 691, 708, 776, 782, 789, 798, 804, 811, 818, 824, 833, 840, 846, 853, 862, 869, 875, 882, 1048, 1053, 1058, 1063, and 1068; and (iii) a CDR3 having an amino acid sequence that is at least 65%, at least 70%, at least 75%, at least 80%, at least 85%, at least 90%, at least 95%, at least 99%, or 100% identical to any one of SEQ ID NOs: 7, 13, 20, 28, 36, 40, 46, 53, 63, 70, 77, 84, 91, 97, 103, 110, 117, 124, 128, 135, 143, 150, 157, 164, 170, 177, 184, 190, 197, 203, 210, 217, 224, 230, 237, 241, 244, 248, 253, 257, 259, 261, 263, 265, 267, 269, 271, 274, 276, 278, 281, 297, 320, 322, 327, 330, 332, 631, 647, 656, 665, 673, 684, 692, 700, 709, 717, 765, 767, 769, 774, 783, 790, 793, 799, 805, 812, 819, 825, 834, 841, 847, 854, 857, 863, 870, 876, 883, 886, 1049, 1054, 1059, 1064, and 1069.

[1954] In some aspects, the antigen binding polypeptides provided herein comprise a VL1 comprising (i) a complementarity determining region (CDR) 1 having an amino acid sequence that is at least 65%, at least 70%, at least 75%, at least 80%, at least 85%, at least 90%, at least 95%, at least 99%, or 100% identical to any one of SEQ ID NOs: 1, 9, 15, 23, 30, 41, 48, 55, 58, 65, 72, 79, 86, 93, 99, 105, 112, 119, 130, 138, 145, 152, 159, 166, 172, 179, 186, 192, 199, 205, 212, 219, 226, 232, 324, 627, 640, 650, 659, 676, 687, 695, 703, 712, 770, 778, 785, 794, 801, 807, 814, 827, 836, 849, 858, 865, 878, 1045, 1050, 1055, 1060, and 1065; (ii) a CDR2 having an amino acid sequence that is at least 65%, at least 70%, at least 75%, at least 80%, at least 85%, at least 90%, at least 95%, at least 99%, or 100% identical to any one of SEQ ID NOs: 2, 31, 628, 641, 677, 1046, 1051, 1056, and 1061; or at least 65%, at least 70%, at least 75%, at least 80%, at least 85%, at least 90%, at least 95%, at least 99%, or 100% identical to any one of amino acid sequences AAS, GAS, LGS, GTN, GTN, SAS, SDS, DNT, EVT, DAS, DVT, RNS, DVS, EDS, DDS, KDS, VAS, WAS, YTS, EVS, NNN, SYN, and DAT; and (iii) a CDR3 having an amino acid sequence that is at least 65%, at least 70%, at least 75%, at least 80%, at least 85%, at least 90%, at least 95%, at least 99%, or 100% identical to any one of SEQ ID NOs: 3, 10, 16, 24, 32, 38, 42, 49, 59, 66, 73, 80, 87, 94, 100, 106, 113, 120, 126, 131, 139, 146, 153, 160, 167, 173, 180, 187, 193, 200, 206, 213, 220, 227, 233, 239, 242, 246, 249, 256, 283, 285, 287, 288, 290, 292, 294, 296, 301, 304, 306, 309, 311, 313, 316, 325, 326, 329, 642, 651, 660, 668, 678, 651, 696, 704, 713, 764, 766, 768, 771, 779, 786, 792, 795, 808, 815, 821, 830, 837, 843, 850, 856, 859, 866, 872, 879, 885, and 1066; a VH1 comprising (i) a CDR1 having an amino acid sequence that is at least 65%, at least 70%, at least 75%, at least 80%, at least 85%, at least 90%, at least 95%, at least 99%, or 100% identical to any one of SEQ ID NOs: 5, 12, 18, 26, 34, 44, 51, 61, 68, 75, 82, 89, 96, 102, 108, 115, 122, 133, 141, 148, 155, 162, 175, 182, 189, 195, 202, 208, 215, 222, 229, 235, 318, 629, 645, 654, 663, 671, 682, 690, 699, 707, 716, 773, 781, 788, 797, 803, 810, 817, 823, 832, 839, 845, 852, 861, 868, 874, 881, 1047, 1052, 1057, 1062, and 1067; (ii) a CDR2 having an amino acid sequence that is at least 65%, at least 70%, at least 75%, at least 80%, at least 85%, at least 90%, at least 95%, at least 99%, or 100% identical to any one of SEQ ID NOs: 6, 19, 27, 35, 45, 52, 56, 62, 69, 76, 83, 90, 109, 116, 123, 134, 142, 149, 156, 163, 169, 176, 183, 196, 209, 216, 223, 236, 273, 319, 328, 630, 646, 655, 664, 672, 683, 691, 708, 776, 782, 789, 798, 804, 811, 818, 824, 833, 840, 846, 853, 862, 869, 875, 882, 1048, 1053, 1058, 1063, and 1068; and (iii) a CDR3 having an amino acid sequence that is at least 65%, at least 70%, at least 75%, at least 80%, at least 85%, at least 90%, at least 95%, at least 99%, or 100% identical to any one of SEQ ID NOs: 7, 13, 20, 28, 36, 40, 46, 53, 63, 70, 77, 84, 91, 97, 103, 110, 117, 124, 128, 135, 143, 150, 157, 164, 170, 177, 184, 190, 197, 203, 210, 217, 224, 230, 237, 241, 244, 248, 253, 257, 259, 261, 263, 265, 267, 269, 271, 274, 276, 278, 281, 297, 320, 322, 327, 330, 332, 631, 647, 656, 665, 673, 684, 692, 700, 709, 717, 765, 767, 769, 774, 783, 790, 793, 799, 805, 812, 819, 825, 834, 841, 847, 854, 857, 863, 870, 876, 883, 886, 1049, 1054, 1059, 1064, and 1069; a VL2 comprising (i) a complementarity determining region (CDR) 1 having an amino acid sequence that is at least 65%, at least 70%, at least 75%, at least 80%, at least 85%, at least 90%, at least 95%, at least 99%, or 100% identical to any one of SEQ ID NOs: 1, 9, 15, 23, 30, 41, 48, 55, 58, 65, 72, 79, 86, 93, 99, 105, 112, 119, 130, 138, 145, 152, 159, 166, 172, 179, 186, 192, 199, 205, 212, 219, 226, 232, 324, 627, 640, 650, 659, 676, 687, 695, 703, 712, 770, 778, 785, 794, 801, 807, 814, 827, 836, 849, 858, 865, 878, 1045, 1050, 1055, 1060, and 1065; (ii) a CDR2 having an amino acid sequence that is at least 65%, at least 70%, at least 75%, at least 80%, at least 85%, at least 90%, at least 95%, at least 99%, or 100% identical to any one of SEQ ID NOs: 2, 31, 628, 641, 677, 1046, 1051, 1056, and 1061; or at least 65%, at least 70%, at least 75%, at least 80%, at least 85%, at least 90%, at least 95%, at least 99%, or 100% identical to any one of amino acid sequences AAS, GAS, LGS, GTN, GTN, SAS, SDS, DNT, EVT, DAS, DVT, RNS, DVS, EDS, DDS, KDS, VAS, WAS, YTS, EVS, NNN, SYN, and DAT; and (iii) a CDR3 having an amino acid sequence that is at least 65%, at least 70%, at least 75%, at least 80%, at least 85%, at least 90%, at least 95%, at least 99%, or 100% identical to any one of SEQ ID NOs: 3, 10, 16, 24, 32, 38, 42, 49, 59, 66, 73, 80, 87, 94, 100, 106, 113, 120, 126, 131, 139, 146, 153, 160, 167, 173, 180, 187, 193, 200, 206, 213, 220, 227, 233, 239, 242, 246, 249, 256, 283, 285, 287, 288, 290, 292, 294, 296, 301, 304, 306, 309, 311, 313, 316, 325, 326, 329, 642, 651, 660, 668, 678, 651, 696, 704, 713, 764, 766, 768, 771, 779, 786, 792, 795, 808, 815, 821, 830, 837, 843, 850, 856, 859, 866, 872, 879, 885, and 1066; and a VH2 comprising (i) a CDR1 having an amino acid sequence that is at least 65%, at least 70%, at least 75%, at least 80%, at least 85%, at least 90%, at least 95%, at least 99%, or 100% identical to any one of SEQ ID NOs: 5, 12, 18, 26, 34, 44, 51, 61, 68, 75, 82, 89, 96, 102, 108, 115, 122, 133, 141, 148, 155, 162, 175, 182, 189, 195, 202, 208, 215, 222, 229, 235, 318, 629, 645, 654, 663, 671, 682, 690, 699, 707, 716, 773, 781, 788, 797, 803, 810, 817, 823, 832, 839, 845, 852, 861, 868, 874, 881, 1047, 1052, 1057, 1062, and 1067; (ii) a CDR2 having an amino acid sequence that is at least 65%, at least 70%, at least 75%, at least 80%, at least 85%, at least 90%, at least 95%, at least 99%, or 100% identical to any one of SEQ ID NOs: 6, 19, 27, 35, 45, 52, 56, 62, 69, 76, 83, 90, 109, 116, 123, 134, 142, 149, 156, 163, 169, 176, 183, 196, 209, 216, 223, 236, 273, 319, 328, 630, 646, 655, 664, 672, 683, 691, 708, 776, 782, 789, 798, 804, 811, 818, 824, 833, 840, 846, 853, 862, 869, 875, 882, 1048, 1053, 1058, 1063, and 1068; and (iii) a CDR3 having an amino acid sequence that is at least 65%, at least 70%, at least 75%, at least 80%, at least 85%, at least 90%, at least 95%, at least 99%, or 100% identical to any one of SEQ ID NOs: 7, 13, 20, 28, 36, 40, 46, 53, 63, 70, 77, 84, 91, 97, 103, 110, 117, 124, 128, 135, 143, 150, 157, 164, 170, 177, 184, 190, 197, 203, 210, 217, 224, 230, 237, 241, 244, 248, 253, 257, 259, 261, 263, 265, 267, 269, 271, 274, 276, 278, 281, 297, 320, 322, 327, 330, 332, 631, 647, 656, 665, 673, 684, 692, 700, 709, 717, 765, 767, 769, 774, 783, 790, 793, 799, 805, 812, 819, 825, 834, 841, 847, 854, 857, 863, 870, 876, 883, 886, 1049, 1054, 1059, 1064, and 1069.

[1955] In some aspects, the antigen binding polypeptides provided herein comprise a VL1 comprising an amino acid sequence that is at least 65%, at least 70%, at least 75%, at least 80%, at least 85%, at least 90%, at least 95%, at least 99%, or 100% identical to any one of SEQ ID NOs: 4, 11, 17, 25, 33, 39, 43, 50, 60, 67, 74, 81, 88, 95, 101, 107, 114, 121, 127, 132, 140, 147, 154, 161, 168, 174, 181, 188, 194, 201, 207, 214, 221, 228, 234, 240, 243, 247, 250, 251, 252, 255, 284, 286, 289, 291, 293, 295, 299, 300, 302, 303, 305, 307, 308, 310, 312, 314, 315, 317, 323, 639, 649, 658, 667, 675, 686, 694, 702, 711, 772, 780, 787, 796, 802, 809, 816, 822, 831, 838, 844, 851, 860, 867, 873, 880, and 988.

[1956] In some aspects, the antigen binding polypeptides provided herein comprise a VH1 comprising an amino acid sequence that is at least 65%, at least 70%, at least 75%, at least 80%, at least 85%, at least 90%, at least 95%, at least 99%, or 100% identical to any one of SEQ ID NOs: 8, 14, 21, 22, 29, 37, 47, 54, 57, 64, 71, 78, 85, 92, 98, 104, 111, 118, 125, 129, 136, 137, 144, 151, 158, 165, 171, 178, 185, 191, 198, 204, 211, 218, 225, 231, 238, 245, 254, 258, 260, 262, 264, 266, 268, 270, 272, 275, 277, 279, 280, 282, 298, 321, 331, 626, 644, 653, 662, 670, 681, 689, 698, 706, 715, 775, 777, 784, 791, 800, 806, 813, 820, 826, 835, 842, 848, 855, 864, 871, 877, and 884.

[1957] In some aspects, the antigen binding polypeptides provided herein comprise a VL2 comprising an amino acid sequence that is at least 65%, at least 70%, at least 75%, at least 80%, at least 85%, at least 90%, at least 95%, at least 99%, or 100% identical to any one of SEQ ID NOs: 4, 11, 17, 25, 33, 39, 43, 50, 60, 67, 74, 81, 88, 95, 101, 107, 114, 121, 127, 132, 140, 147, 154, 161, 168, 174, 181, 188, 194, 201, 207, 214, 221, 228, 234, 240, 243, 247, 250, 251, 252, 255, 284, 286, 289, 291, 293, 295, 299, 300, 302, 303, 305, 307, 308, 310, 312, 314, 315, 317, 323, 639, 649, 658, 667, 675, 686, 694, 702, 711, 772, 780, 787, 796, 802, 809, 816, 822, 831, 838, 844, 851, 860, 867, 873, 880, and 988.

[1958] In some aspects, the antigen binding polypeptides provided herein comprise a VH2 comprising an amino acid sequence that is at least 65%, at least 70%, at least 75%, at least 80%, at least 85%, at least 90%, at least 95%, at least 99%, or 100% identical to any one of SEQ ID NOs: 8, 14, 21, 22, 29, 37, 47, 54, 57, 64, 71, 78, 85, 92, 98, 104, 111, 118, 125, 129, 136, 137, 144, 151, 158, 165, 171, 178, 185, 191, 198, 204, 211, 218, 225, 231, 238, 245, 254, 258, 260, 262, 264, 266, 268, 270, 272, 275, 277, 279, 280, 282, 298, 321, 331, 626, 644, 653, 662, 670, 681, 689, 698, 706, 715, 775, 777, 784, 791, 800, 806, 813, 820, 826, 835, 842, 848, 855, 864, 871, 877, and 884.

[1959] In some aspects, the antigen binding polypeptides provided herein comprise (i) a VL1 comprising an amino acid sequence that is at least 65%, at least 70%, at least 75%, at least 80%, at least 85%, at least 90%, at least 95%, at least 99%, or 100% identical to any one of SEQ ID NOs: 4, 11, 17, 25, 33, 39, 43, 50, 60, 67, 74, 81, 88, 95, 101, 107, 114, 121, 127, 132, 140, 147, 154, 161, 168, 174, 181, 188, 194, 201, 207, 214, 221, 228, 234, 240, 243, 247, 250, 251, 252, 255, 284, 286, 289, 291, 293, 295, 299, 300, 302, 303, 305, 307, 308, 310, 312, 314, 315, 317, 323, 639, 649, 658, 667, 675, 686, 694, 702, 711, 772, 780, 787, 796, 802, 809, 816, 822, 831, 838, 844, 851, 860, 867, 873, 880, and 988; (ii) a VH1 comprising an amino acid sequence that is at least 65%, at least 70%, at least 75%, at least 80%, at least 85%, at least 90%, at least 95%, at least 99%, or 100% identical to any one of SEQ ID NOs: 8, 14, 21, 22, 29, 37, 47, 54, 57, 64, 71, 78, 85, 92, 98, 104, 111, 118, 125, 129, 136, 137, 144, 151, 158, 165, 171, 178, 185, 191, 198, 204, 211, 218, 225, 231, 238, 245, 254, 258, 260, 262, 264, 266, 268, 270, 272, 275, 277, 279, 280, 282, 298, 321, 331, 626, 644, 653, 662, 670, 681, 689, 698, 706, 715, 775, 777, 784, 791, 800, 806, 813, 820, 826, 835, 842, 848, 855, 864, 871, 877, and 884; (iii) a VL2 comprising an amino acid sequence that is at least 65%, at least 70%, at least 75%, at least 80%, at least 85%, at least 90%, at least 95%, at least 99%, or 100% identical to any one of SEQ ID NOs: 4, 11, 17, 25, 33, 39, 43, 50, 60, 67, 74, 81, 88, 95, 101, 107, 114, 121, 127, 132, 140, 147, 154, 161, 168, 174, 181, 188, 194, 201, 207, 214, 221, 228, 234, 240, 243, 247, 250, 251, 252, 255, 284, 286, 289, 291, 293, 295, 299, 300, 302, 303, 305, 307, 308, 310, 312, 314, 315, 317, 323, 639, 649, 658, 667, 675, 686, 694, 702, 711, 772, 780, 787, 796, 802, 809, 816, 822, 831, 838, 844, 851, 860, 867, 873, 880, and 988; and (iv) a VH2 comprising an amino acid sequence that is at least 65%, at least 70%, at least 75%, at least 80%, at least 85%, at least 90%, at least 95%, at least 99%, or 100% identical to any one of SEQ ID NOs: 8, 14, 21, 22, 29, 37, 47, 54, 57, 64, 71, 78, 85, 92, 98, 104, 111, 118, 125, 129, 136, 137, 144, 151, 158, 165, 171, 178, 185, 191, 198, 204, 211, 218, 225, 231, 238, 245, 254, 258, 260, 262, 264, 266, 268, 270, 272, 275, 277, 279, 280, 282, 298, 321, 331, 626, 644, 653, 662, 670, 681, 689, 698, 706, 715, 775, 777, 784, 791, 800, 806, 813, 820, 826, 835, 842, 848, 855, 864, 871, 877, and 884.

[1960] In some aspects, the antigen binding polypeptides provided herein comprise a VL1 comprising (i) a complementarity determining region (CDR) 1 having an amino acid sequence that is at least 65%, at least 70%, at least 75%, at least 80%, at least 85%, at least 90%, at least 95%, at least 99%, or 100% identical to any one of SEQ ID NOs: 1, 9, 15, 23, 30, 65, 72, 145, 152, 324, 627, 138, 172, 1045, 1050, 1055, 1060, and 1065; (ii) a CDR2 having an amino acid sequence that is at least 65%, at least 70%, at least 75%, at least 80%, at least 85%, at least 90%, at least 95%, at least 99%, or 100% identical to any one of SEQ ID NOs: 2, 31.628, 1046, 1051, 1056, and 1061, or at least 65%, at least 70%, at least 75%, at least 80%, at least 85%, at least 90%, at least 95%, at least 99%, or 100% identical to any one of amino acid sequences GAS, LGS, GTN, SAS, SDS, AAS, DAS, and DNT; and (iii) a CDR3 having an amino acid sequence that is at least 65%, at least 70%, at least 75%, at least 80%, at least 85%, at least 90%, at least 95%, at least 99%, or 100% identical to any one of SEQ ID NOs: 3, 10, 16, 24, 32, 38, 66, 73, 146, 153, 325, 326, 764, 766, 139, 856, 173, 792, and 1066.

[1961] In some aspects, the antigen binding polypeptides provided herein comprise a VL2 comprising (i) a complementarity determining region (CDR) 1 having an amino acid sequence that is at least 65%, at least 70%, at least 75%, at least 80%, at least 85%, at least 90%, at least 95%, at least 99%, or 100% identical to any one of SEQ ID NOs: 1, 9, 15, 23, 30, 65, 72, 145, 152, 324, 627, 138, 172, 1045, 1050, 1055, 1060, and 1065; (ii) a CDR2 having an amino acid sequence that is at least 65%, at least 70%, at least 75%, at least 80%, at least 85%, at least 90%, at least 95%, at least 99%, or 100% identical to any one of SEQ ID NOs: 2, 31.628, 1046, 1051, 1056, and 1061, or at least 65%, at least 70%, at least 75%, at least 80%, at least 85%, at least 90%, at least 95%, at least 99%, or 100% identical to any one of amino acid sequences GAS, LGS, GTN, SAS, SDS, AAS, DAS, and DNT; and (iii) a CDR3 having an amino acid sequence that is at least 65%, at least 70%, at least 75%, at least 80%, at least 85%, at least 90%, at least 95%, at least 99%, or 100% identical to any one of SEQ ID NOs: 3, 10, 16, 24, 32, 38, 66, 73, 146, 153, 325, 326, 764, 766, 139, 856, 173, 792, and 1066.

[1962] In some aspects, the antigen binding polypeptides provided herein comprise a VH1 comprising (i) a CDR1 having an amino acid sequence that is at least 65%, at least 70%, at least 75%, at least 80%, at least 85%, at least 90%, at least 95%, at least 99%, or 100% identical to any one of SEQ ID NOs: 5, 12, 18, 26, 34, 68, 75, 148, 155, 629, 141, 175, 1047, 1052, 1057, 1062, and 1067; (ii) a CDR2 having an amino acid sequence that is at least 65%, at least 70%, at least 75%, at least 80%, at least 85%, at least 90%, at least 95%, at least 99%, or 100% identical to any one of SEQ ID NOs: 6, 19, 27, 35, 69, 76, 149, 156, 630, 142, 176, 1048, 1053, 1058, 1063, and 1068; and (iii) a CDR3 having an amino acid sequence that is at least 65%, at least 70%, at least 75%, at least 80%, at least 85%, at least 90%, at least 95%, at least 99%, or 100% identical to any one of SEQ ID NOs: 7, 13, 20, 28, 36, 40, 70, 77, 327, 150, 157, 332, 631, 765, 767, 143, 857, 177, 793, 1049, 1054, 1059, 1064, and 1069.

[1963] In some aspects, the antigen binding polypeptides provided herein comprise a VH2 comprising (i) a CDR1 having an amino acid sequence that is at least 65%, at least 70%, at least 75%, at least 80%, at least 85%, at least 90%, at least 95%, at least 99%, or 100% identical to any one of SEQ ID NOs: 5, 12, 18, 26, 34, 68, 75, 148, 155, 629, 141, 175, 1047, 1052, 1057, 1062, and 1067; (ii) a CDR2 having an amino acid sequence that is at least 65%, at least 70%, at least 75%, at least 80%, at least 85%, at least 90%, at least 95%, at least 99%, or 100% identical to any one of SEQ ID NOs: 6, 19, 27, 35, 69, 76, 149, 156, 630, 142, 176, 1048, 1053, 1058, 1063, and 1068; and (iii) a CDR3 having an amino acid sequence that is at least 65%, at least 70%, at least 75%, at least 80%, at least 85%, at least 90%, at least 95%, at least 99%, or 100% identical to any one of SEQ ID NOs: 7, 13, 20, 28, 36, 40, 70, 77, 327, 150, 157, 332, 631, 765, 767, 143, 857, 177, 793, 1049, 1054, 1059, 1064, and 1069.

[1964] In some aspects, the antigen binding polypeptides provided herein comprise a VL1 comprising (i) a complementarity determining region (CDR) 1 having an amino acid sequence that is at least 65%, at least 70%, at least 75%, at least 80%, at least 85%, at least 90%, at least 95%, at least 99%, or 100% identical to any one of SEQ ID NOs: 1, 9, 15, 23, 30, 65, 72, 145, 152, 324, 627, 138, 172, 1045, 1050, 1055, 1060, and 1065; (ii) a CDR2 having an amino acid sequence that is at least 65%, at least 70%, at least 75%, at least 80%, at least 85%, at least 90%, at least 95%, at least 99%, or 100% identical to any one of SEQ ID NOs: 2, 31.628, 1046, 1051, 1056, and 1061, or at least 65%, at least 70%, at least 75%, at least 80%, at least 85%, at least 90%, at least 95%, at least 99%, or 100% identical to any one of amino acid sequences GAS, LGS, GTN, SAS, SDS, AAS, DAS, and DNT; and (iii) a CDR3 having an amino acid sequence that is at least 65%, at least 70%, at least 75%, at least 80%, at least 85%, at least 90%, at least 95%, at least 99%, or 100% identical to any one of SEQ ID NOs: 3, 10, 16, 24, 32, 38, 66, 73, 146, 153, 325, 326, 764, 766, 139, 856, 173, 792, and 1066; a VH1 comprising (i) a CDR1 having an amino acid sequence that is at least 65%, at least 70%, at least 75%, at least 80%, at least 85%, at least 90%, at least 95%, at least 99%, or 100% identical to any one of SEQ ID NOs: 5, 12, 18, 26, 34, 68, 75, 148, 155, 629, 141, 175, 1047, 1052, 1057, 1062, and 1067; (ii) a CDR2 having an amino acid sequence that is at least 65%, at least 70%, at least 75%, at least 80%, at least 85%, at least 90%, at least 95%, at least 99%, or 100% identical to any one of SEQ ID NOs: 6, 19, 27, 35, 69, 76, 149, 156, 630, 142, 176, 1048, 1053, 1058, 1063, and 1068; and (iii) a CDR3 having an amino acid sequence that is at least 65%, at least 70%, at least 75%, at least 80%, at least 85%, at least 90%, at least 95%, at least 99%, or 100% identical to any one of SEQ ID NOs: 7, 13, 20, 28, 36, 40, 70, 77, 327, 150, 157, 332, 631, 765, 767, 143, 857, 177, 793, 1049, 1054, 1059, 1064, and 1069; a VL2 comprising (i) a complementarity determining region (CDR) 1 having an amino acid sequence that is at least 65%, at least 70%, at least 75%, at least 80%, at least 85%, at least 90%, at least 95%, at least 99%, or 100% identical to any one of SEQ ID NOs: 1, 9, 15, 23, 30, 65, 72, 145, 152, 324, 627, 138, 172, 1045, 1050, 1055, 1060, and 1065; (ii) a CDR2 having an amino acid sequence that is at least 65%, at least 70%, at least 75%, at least 80%, at least 85%, at least 90%, at least 95%, at least 99%, or 100% identical to any one of SEQ ID NOs: 2, 31, 628, 1046, 1051, 1056, and 1061, or at least 65%, at least 70%, at least 75%, at least 80%, at least 85%, at least 90%, at least 95%, at least 99%, or 100% identical to any one of amino acid sequences GAS, LGS, GTN, SAS, SDS, AAS, DAS, and DNT; and (iii) a CDR3 having an amino acid sequence that is at least 65%, at least 70%, at least 75%, at least 80%, at least 85%, at least 90%, at least 95%, at least 99%, or 100% identical to any one of SEQ ID NOs: 3, 10, 16, 24, 32, 38, 66, 73, 146, 153, 325, 326, 764, 766, 139, 856, 173, 792, and 1066; and a VH2 comprising (i) a CDR1 having an amino acid sequence that is at least 65%, at least 70%, at least 75%, at least 80%, at least 85%, at least 90%, at least 95%, at least 99%, or 100% identical to any one of SEQ ID NOs: 5, 12, 18, 26, 34, 68, 75, 148, 155, 629, 141, 175, 1047, 1052, 1057, 1062, and 1067; (ii) a CDR2 having an amino acid sequence that is at least 65%, at least 70%, at least 75%, at least 80%, at least 85%, at least 90%, at least 95%, at least 99%, or 100% identical to any one of SEQ ID NOs: 6, 19, 27, 35, 69, 76, 149, 156, 630, 142, 176, 1048, 1053, 1058, 1063, and 1068; and (iii) a CDR3 having an amino acid sequence that is at least 65%, at least 70%, at least 75%, at least 80%, at least 85%, at least 90%, at least 95%, at least 99%, or 100% identical to any one of SEQ ID NOs: 7, 13, 20, 28, 36, 40, 70, 77, 327, 150, 157, 332, 631, 765, 767, 143, 857, 177, 793, 1049, 1054, 1059, 1064, and 1069.

[1965] In some aspects, the antigen binding polypeptides provided herein comprise a VL1 comprising an amino acid sequence that is at least 65%, at least 70%, at least 75%, at least 80%, at least 85%, at least 90%, at least 95%, at least 99%, or 100% identical to any one of SEQ ID NOs: 4, 11, 17, 25, 33, 39, 67, 74, 147, 154, 140, and 174.

[1966] In some aspects, the antigen binding polypeptides provided herein comprise a VH1 comprising an amino acid sequence that is at least 65%, at least 70%, at least 75%, at least 80%, at least 85%, at least 90%, at least 95%, at least 99%, or 100% identical to any one of SEQ ID NOs: 8, 14, 21, 22, 29, 37, 71, 78, 151, 158, 626, 144, and 178.

[1967] In some aspects, the antigen binding polypeptides provided herein comprise a VL2 comprising an amino acid sequence that is at least 65%, at least 70%, at least 75%, at least 80%, at least 85%, at least 90%, at least 95%, at least 99%, or 100% identical to any one of SEQ ID NOs: 4, 11, 17, 25, 33, 39, 67, 74, 147, 154, 140, and 174.

[1968] In some aspects, the antigen binding polypeptides provided herein comprise a VH2 comprising an amino acid sequence that is at least 65%, at least 70%, at least 75%, at least 80%, at least 85%, at least 90%, at least 95%, at least 99%, or 100% identical to any one of SEQ ID NOs: 8, 14, 21, 22, 29, 37, 71, 78, 151, 158, 626, 144, and 178.

[1969] In some aspects, the antigen binding polypeptides provided herein comprise (i) a VL1 comprising an amino acid sequence that is at least 65%, at least 70%, at least 75%, at least 80%, at least 85%, at least 90%, at least 95%, at least 99%, or 100% identical to any one of SEQ ID NOs: 4, 11, 17, 25, 33, 39, 67, 74, 147, 154, 140, and 174; (ii) a VH1 comprising an amino acid sequence that is at least 65%, at least 70%, at least 75%, at least 80%, at least 85%, at least 90%, at least 95%, at least 99%, or 100% identical to any one of SEQ ID NOs: 8, 14, 21, 22, 29, 37, 71, 78, 151, 158, 626, 144, and 178; (iii) a VL2 comprising an amino acid sequence that is at least 65%, at least 70%, at least 75%, at least 80%, at least 85%, at least 90%, at least 95%, at least 99%, or 100% identical to any one of SEQ ID NOs: 4, 11, 17, 25, 33, 39, 67, 74, 147, 154, 140, and 174; and (iv) a VH2 comprising an amino acid sequence that is at least 65%, at least 70%, at least 75%, at least 80%, at least 85%, at least 90%, at least 95%, at least 99%, or 100% identical to any one of SEQ ID NOs: 8, 14, 21, 22, 29, 37, 71, 78, 151, 158, 626, 144, and 178.

[1970] In some aspects, the antigen binding polypeptides provided herein comprise a VL1 comprising (i) a complementarity determining region (CDR) 1 having an amino acid sequence that is at least 65%, at least 70%, at least 75%, at least 80%, at least 85%, at least 90%, at least 95%, at least 99%, or 100% identical to any one of SEQ ID NOs: 41, 48, 138, 145, 152, 159, 166, 172, 192, 770, 778, 785, 794, 801, 807, 814, 827, 836, 849, 858, 865, 878, 1045, 1050, 1060, and 1065; (ii) a CDR2 having an amino acid sequence at least 65%, at least 70%, at least 75%, at least 80%, at least 85%, at least 90%, at least 95%, at least 99%, or 100% identical to any one of amino acid sequences AAS, GAS, DAS, NNN, SDS, SYN, WAS, and DAT, or at least 65%, at least 70%, at least 75%, at least 80%, at least 85%, at least 90%, at least 95%, at least 99%, or 100% identical to any one of SEQ ID NOs: 1046, 1051, and 1061; and (iii) a CDR3 having an amino acid sequence that is at least 65%, at least 70%, at least 75%, at least 80%, at least 85%, at least 90%, at least 95%, at least 99%, or 100% identical to any one of SEQ ID NOs: 42, 139, 146, 153, 160, 167, 173, 764, 766, 768, 771, 779, 786, 792, 795, 808, 815, 821, 830, 837, 843, 850, 856, 859, 866, 872, 879, 885, and 1066.

[1971] In some aspects, the antigen binding polypeptides provided herein comprise a VL2 comprising (i) a complementarity determining region (CDR) 1 having an amino acid sequence that is at least 65%, at least 70%, at least 75%, at least 80%, at least 85%, at least 90%, at least 95%, at least 99%, or 100% identical to any one of SEQ ID NOs: 41, 48, 138, 145, 152, 159, 166, 172, 192, 770, 778, 785, 794, 801, 807, 814, 827, 836, 849, 858, 865, 878, 1045, 1050, 1060, and 1065; (ii) a CDR2 having an amino acid sequence that is at least 65%, at least 70%, at least 75%, at least 80%, at least 85%, at least 90%, at least 95%, at least 99%, or 100% identical to any one of amino acid sequences AAS, GAS, DAS, NNN, SDS, SYN, WAS, and DAT, or at least 65%, at least 70%, at least 75%, at least 80%, at least 85%, at least 90%, at least 95%, at least 99%, or 100% identical to any one of SEQ ID NOs: 1046, 1051, and 1061; and (iii) a CDR3 having an amino acid sequence that is at least 65%, at least 70%, at least 75%, at least 80%, at least 85%, at least 90%, at least 95%, at least 99%, or 100% identical to any one of SEQ ID NOs: 42, 139, 146, 153, 160, 167, 173, 764, 766, 768, 771, 779, 786, 792, 795, 808, 815, 821, 830, 837, 843, 850, 856, 859, 866, 872, 879, 885, and 1066.

[1972] In some aspects, the antigen binding polypeptides provided herein comprise a VH1 comprising (i) a CDR1 having an amino acid sequence that is at least 65%, at least 70%, at least 75%, at least 80%, at least 85%, at least 90%, at least 95%, at least 99%, or 100% identical to any one of SEQ ID NOs: 44, 133, 141, 148, 155, 162, 175, 773, 781, 788, 797, 803, 810, 817, 823, 832, 839, 845, 852, 861, 868, 874, 881, 1047, 1052, 1062, and 1067; (ii) a CDR2 having an amino acid sequence that is at least 65%, at least 70%, at least 75%, at least 80%, at least 85%, at least 90%, at least 95%, at least 99%, or 100% identical to any one of SEQ ID NOs: 6, 142, 149, 156, 163, 169, 176, 776, 782, 789, 798, 804, 811, 818, 824, 833, 840, 846, 853, 862, 869, 875, 882, 1048, 1053, 1063, and 1068; and (iii) a CDR3 having an amino acid sequence that is at least 65%, at least 70%, at least 75%, at least 80%, at least 85%, at least 90%, at least 95%, at least 99%, or 100% identical to any one of SEQ ID NOs: 46, 143, 150, 157, 164, 170, 177, 765, 767, 769, 774, 783, 790, 793, 799, 805, 812, 819, 825, 834, 841, 847, 854, 857, 863, 870, 876, 883, 886, 1049, 1054, 1064, and 1069.

[1973] In some aspects, the antigen binding polypeptides provided herein comprise a VH2 comprising (i) a CDR1 having an amino acid sequence that is at least 65%, at least 70%, at least 75%, at least 80%, at least 85%, at least 90%, at least 95%, at least 99%, or 100% identical to any one of SEQ ID NOs: 44, 133, 141, 148, 155, 162, 175, 773, 781, 788, 797, 803, 810, 817, 823, 832, 839, 845, 852, 861, 868, 874, 881, 1047, 1052, 1062, and 1067; (ii) a CDR2 having an amino acid sequence that is at least 65%, at least 70%, at least 75%, at least 80%, at least 85%, at least 90%, at least 95%, at least 99%, or 100% identical to any one of SEQ ID NOs: 6, 142, 149, 156, 163, 169, 176, 776, 782, 789, 798, 804, 811, 818, 824, 833, 840, 846, 853, 862, 869, 875, 882, 1048, 1053, 1063, and 1068; and (iii) a CDR3 having an amino acid sequence that is at least 65%, at least 70%, at least 75%, at least 80%, at least 85%, at least 90%, at least 95%, at least 99%, or 100% identical to any one of SEQ ID NOs: 46, 143, 150, 157, 164, 170, 177, 765, 767, 769, 774, 783, 790, 793, 799, 805, 812, 819, 825, 834, 841, 847, 854, 857, 863, 870, 876, 883, 886, 1049, 1054, 1064, and 1069.

[1974] In some aspects, the antigen binding polypeptides provided herein comprise a VL1 comprising (i) a complementarity determining region (CDR) 1 having an amino acid sequence that is at least 65%, at least 70%, at least 75%, at least 80%, at least 85%, at least 90%, at least 95%, at least 99%, or 100% identical to any one of SEQ ID NOs: 41, 48, 138, 145, 152, 159, 166, 172, 192, 770, 778, 785, 794, 801, 807, 814, 827, 836, 849, 858, 865, 878, 1045, 1050, 1060, and 1065; (ii) a CDR2 having an amino acid sequence that is at least 65%, at least 70%, at least 75%, at least 80%, at least 85%, at least 90%, at least 95%, at least 99%, or 100% identical to any one of amino acid sequences AAS, GAS, DAS, NNN, SDS, SYN, WAS, and DAT, or at least 65%, at least 70%, at least 75%, at least 80%, at least 85%, at least 90%, at least 95%, at least 99%, or 100% identical to any one of SEQ ID NOs: 1046, 1051, and 1061; and (iii) a CDR3 having an amino acid sequence that is at least 65%, at least 70%, at least 75%, at least 80%, at least 85%, at least 90%, at least 95%, at least 99%, or 100% identical to any one of SEQ ID NOs: 42, 139, 146, 153, 160, 167, 173, 764, 766, 768, 771, 779, 786, 792, 795, 808, 815, 821, 830, 837, 843, 850, 856, 859, 866, 872, 879, 885, and 1066; a VH1 comprising (i) a CDR1 having an amino acid sequence that is at least 65%, at least 70%, at least 75%, at least 80%, at least 85%, at least 90%, at least 95%, at least 99%, or 100% identical to any one of SEQ ID NOs: 44, 133, 141, 148, 155, 162, 175, 773, 781, 788, 797, 803, 810, 817, 823, 832, 839, 845, 852, 861, 868, 874, 881, 1047, 1052, 1062, and 1067; (ii) a CDR2 having an amino acid sequence that is at least 65%, at least 70%, at least 75%, at least 80%, at least 85%, at least 90%, at least 95%, at least 99%, or 100% identical to any one of SEQ ID NOs: 6, 142, 149, 156, 163, 169, 176, 776, 782, 789, 798, 804, 811, 818, 824, 833, 840, 846, 853, 862, 869, 875, 882, 1048, 1053, 1063, and 1068; and (iii) a CDR3 having an amino acid sequence that is at least 65%, at least 70%, at least 75%, at least 80%, at least 85%, at least 90%, at least 95%, at least 99%, or 100% identical to any one of SEQ ID NOs: 46, 143, 150, 157, 164, 170, 177, 765, 767, 769, 774, 783, 790, 793, 799, 805, 812, 819, 825, 834, 841, 847, 854, 857, 863, 870, 876, 883, 886, 1049, 1054, 1064, and 1069; a VL2 comprising (i) a complementarity determining region (CDR) 1 having an amino acid sequence that is at least 65%, at least 70%, at least 75%, at least 80%, at least 85%, at least 90%, at least 95%, at least 99%, or 100% identical to any one of SEQ ID NOs: 41, 48, 138, 145, 152, 159, 166, 172, 192, 770, 778, 785, 794, 801, 807, 814, 827, 836, 849, 858, 865, 878, 1045, 1050, 1060, and 1065; (ii) a CDR2 having an amino acid sequence that is at least 65%, at least 70%, at least 75%, at least 80%, at least 85%, at least 90%, at least 95%, at least 99%, or 100% identical to any one of amino acid sequences AAS, GAS, DAS, NNN, SDS, SYN, WAS, and DAT, or at least 65%, at least 70%, at least 75%, at least 80%, at least 85%, at least 90%, at least 95%, at least 99%, or 100% identical to any one of SEQ ID NOs: 1046, 1051, and 1061; and (iii) a CDR3 having an amino acid sequence that is at least 65%, at least 70%, at least 75%, at least 80%, at least 85%, at least 90%, at least 95%, at least 99%, or 100% identical to any one of SEQ ID NOs: 42, 139, 146, 153, 160, 167, 173, 764, 766, 768, 771, 779, 786, 792, 795, 808, 815, 821, 830, 837, 843, 850, 856, 859, 866, 872, 879, 885, and 1066; and a VH2 comprising (i) a CDR1 having an amino acid sequence that is at least 65%, at least 70%, at least 75%, at least 80%, at least 85%, at least 90%, at least 95%, at least 99%, or 100% identical to any one of SEQ ID NOs: 44, 133, 141, 148, 155, 162, 175, 773, 781, 788, 797, 803, 810, 817, 823, 832, 839, 845, 852, 861, 868, 874, 881, 1047, 1052, 1062, and 1067; (ii) a CDR2 having an amino acid sequence that is at least 65%, at least 70%, at least 75%, at least 80%, at least 85%, at least 90%, at least 95%, at least 99%, or 100% identical to any one of SEQ ID NOs: 6, 142, 149, 156, 163, 169, 176, 776, 782, 789, 798, 804, 811, 818, 824, 833, 840, 846, 853, 862, 869, 875, 882, 1048, 1053, 1063, and 1068; and (iii) a CDR3 having an amino acid sequence that is at least 65%, at least 70%, at least 75%, at least 80%, at least 85%, at least 90%, at least 95%, at least 99%, or 100% identical to any one of SEQ ID NOs: 46, 143, 150, 157, 164, 170, 177, 765, 767, 769, 774, 783, 790, 793, 799, 805, 812, 819, 825, 834, 841, 847, 854, 857, 863, 870, 876, 883, 886, 1049, 1054, 1064, and 1069.

[1975] In some aspects, the antigen binding polypeptides provided herein comprise a VL1 comprising an amino acid sequence that is at least 65%, at least 70%, at least 75%, at least 80%, at least 85%, at least 90%, at least 95%, at least 99%, or 100% identical to any one of SEQ ID NOs: 43, 140, 147, 154, 161, 168, 174, 772, 780, 787, 796, 802, 809, 816, 822, 831, 838, 844, 851, 860, 867, 873, and 880.

[1976] In some aspects, the antigen binding polypeptides provided herein comprise a VH1 comprising an amino acid sequence that is at least 65%, at least 70%, at least 75%, at least 80%, at least 85%, at least 90%, at least 95%, at least 99%, or 100% identical to any one of SEQ ID NOs: 144, 151, 158, 165, 171, 178, 775, 777, 784, 791, 800, 806, 813, 820, 826, 835, 842, 848, 855, 864, 871, 877, and 884.

[1977] In some aspects, the antigen binding polypeptides provided herein comprise a VL2 comprising an amino acid sequence that is at least 65%, at least 70%, at least 75%, at least 80%, at least 85%, at least 90%, at least 95%, at least 99%, or 100% identical to any one of SEQ ID NOs: 43, 140, 147, 154, 161, 168, 174, 772, 780, 787, 796, 802, 809, 816, 822, 831, 838, 844, 851, 860, 867, 873, and 880.

[1978] In some aspects, the antigen binding polypeptides provided herein comprise a VH2 comprising an amino acid sequence that is at least 65%, at least 70%, at least 75%, at least 80%, at least 85%, at least 90%, at least 95%, at least 99%, or 100% identical to any one of SEQ ID NOs: 144, 151, 158, 165, 171, 178, 775, 777, 784, 791, 800, 806, 813, 820, 826, 835, 842, 848, 855, 864, 871, 877, and 884.

[1979] In some aspects, the antigen binding polypeptides provided herein comprise (i) a VL1 comprising an amino acid sequence that is at least 65%, at least 70%, at least 75%, at least 80%, at least 85%, at least 90%, at least 95%, at least 99%, or 100% identical to any one of SEQ ID NOs: 43, 140, 147, 154, 161, 168, 174, 772, 780, 787, 796, 802, 809, 816, 822, 831, 838, 844, 851, 860, 867, 873, and 880; (ii) a VH1 comprising an amino acid sequence that is at least 65%, at least 70%, at least 75%, at least 80%, at least 85%, at least 90%, at least 95%, at least 99%, or 100% identical to any one of SEQ ID NOs: 144, 151, 158, 165, 171, 178, 775, 777, 784, 791, 800, 806, 813, 820, 826, 835, 842, 848, 855, 864, 871, 877, and 884; (iii) a VL2 comprising an amino acid sequence that is at least 65%, at least 70%, at least 75%, at least 80%, at least 85%, at least 90%, at least 95%, at least 99%, or 100% identical to any one of SEQ ID NOs: 43, 140, 147, 154, 161, 168, 174, 772, 780, 787, 796, 802, 809, 816, 822, 831, 838, 844, 851, 860, 867, 873, and 880; and (iv) a VH2 comprising an amino acid sequence that is at least 65%, at least 70%, at least 75%, at least 80%, at least 85%, at least 90%, at least 95%, at least 99%, or 100% identical to any one of SEQ ID NOs: 144, 151, 158, 165, 171, 178, 775, 777, 784, 791, 800, 806, 813, 820, 826, 835, 842, 848, 855, 864, 871, 877, and 884.

[1980] In some aspects, at least one of VL1 or VL2 comprised in the antigen binding polypeptides provided herein comprises (i) a complementarity determining region (CDR) 1 having an amino acid sequence that is at least 65%, at least 70%, at least 75%, at least 80%, at least 85%, at least 90%, at least 95%, at least 99%, or 100% identical to SEQ ID NO: 145 or 1050; (ii) a CDR2 having an amino acid sequence at least 65%, at least 70%, at least 75%, at least 80%, at least 85%, at least 90%, at least 95%, at least 99%, or 100% identical to SEQ ID NO: 1051 or an amino acid sequence that is at least 65%, at least 70%, at least 75%, at least 80%, at least 85%, at least 90%, at least 95%, at least 99%, or 100% identical to amino acid sequence AAS; and (iii) a CDR3 having an amino acid sequence that is at least 65%, at least 70%, at least 75%, at least 80%, at least 85%, at least 90%, at least 95%, at least 99%, or 100% identical to SEQ ID NO: 146 or 764.

[1981] In some aspects, at least one of VH1 or VH2 comprised in the antigen binding polypeptides provided herein comprises (i) a complementarity determining region (CDR) 1 having an amino acid sequence that is at least 65%, at least 70%, at least 75%, at least 80%, at least 85%, at least 90%, at least 95%, at least 99%, or 100% identical to SEQ ID NO: 148 or 1052; (ii) a CDR2 having an amino acid sequence that is at least 65%, at least 70%, at least 75%, at least 80%, at least 85%, at least 90%, at least 95%, at least 99%, or 100% identical to SEQ ID NO: 149 or 1053; and (iii) a CDR3 having an amino acid sequence that is at least 65%, at least 70%, at least 75%, at least 80%, at least 85%, at least 90%, at least 95%, at least 99%, or 100% identical to SEQ ID NO: 150, 765, or 1054.

[1982] In some aspects, at least one of VL1 or VL2 comprised in the antigen binding polypeptides provided herein comprises (i) a complementarity determining region (CDR) 1 having an amino acid sequence that is at least 65%, at least 70%, at least 75%, at least 80%, at least 85%, at least 90%, at least 95%, at least 99%, or 100% identical to SEQ ID NO: 145 or 1050; (ii) a CDR2 having an amino acid sequence at least 65%, at least 70%, at least 75%, at least 80%, at least 85%, at least 90%, at least 95%, at least 99%, or 100% identical to SEQ ID NO: 1051 or an amino acid sequence that is at least 65%, at least 70%, at least 75%, at least 80%, at least 85%, at least 90%, at least 95%, at least 99%, or 100% identical to amino acid sequence AAS; and (iii) a CDR3 having an amino acid sequence that is at least 65%, at least 70%, at least 75%, at least 80%, at least 85%, at least 90%, at least 95%, at least 99%, or 100% identical to SEQ ID NO: 146 or 764; and at least one of VH1 or VH2 comprised in the antigen binding polypeptides provided herein comprises (iv) a complementarity determining region (CDR) 1 having an amino acid sequence that is at least 65%, at least 70%, at least 75%, at least 80%, at least 85%, at least 90%, at least 95%, at least 99%, or 100% identical to SEQ ID NO: 148 or 1052; (v) a CDR2 having an amino acid sequence that is at least 65%, at least 70%, at least 75%, at least 80%, at least 85%, at least 90%, at least 95%, at least 99%, or 100% identical to SEQ ID NO: 149 or 1053; and (vi) a CDR3 having an amino acid sequence that is at least 65%, at least 70%, at least 75%, at least 80%, at least 85%, at least 90%, at least 95%, at least 99%, or 100% identical to SEQ ID NO: 150, 765, or 1054.

[1983] In some aspects, at least one of VL1 or VL2 comprised in the antigen binding polypeptides provided herein comprises an amino acid sequence that is at least 65%, at least 70%, at least 75%, at least 80%, at least 85%, at least 90%, at least 95%, at least 99%, or 100% identical to SEQ ID NO: 147. In some aspects, at least one of VH1 or VH2 comprised in the antigen binding polypeptides provided herein comprises an amino acid sequence that is at least 65%, at least 70%, at least 75%, at least 80%, at least 85%, at least 90%, at least 95%, at least 99%, or 100% identical to SEQ ID NO: 151.

[1984] In some aspects, (i) at least one of VL1 or VL2 comprised in the antigen binding polypeptides provided herein comprises an amino acid sequence that is at least 65%, at least 70%, at least 75%, at least 80%, at least 85%, at least 90%, at least 95%, at least 99%, or 100% identical to SEQ ID NO: 147, and (ii) at least one of VH1 or VH2 comprised in the antigen binding polypeptides provided herein comprises an amino acid sequence that is at least 65%, at least 70%, at least 75%, at least 80%, at least 85%, at least 90%, at least 95%, at least 99%, or 100% identical to SEQ ID NO: 151.

[1985] In some aspects, the antigen binding polypeptides provided herein comprise a VL1 comprising (i) a complementarity determining region (CDR) 1 having an amino acid sequence that is at least 65%, at least 70%, at least 75%, at least 80%, at least 85%, at least 90%, at least 95%, at least 99%, or 100% identical to SEQ ID NO: 145 or 1050; (ii) a CDR2 having an amino acid sequence at least 65%, at least 70%, at least 75%, at least 80%, at least 85%, at least 90%, at least 95%, at least 99%, or 100% identical to SEQ ID NO: 1051 or an amino acid sequence that is at least 65%, at least 70%, at least 75%, at least 80%, at least 85%, at least 90%, at least 95%, at least 99%, or 100% identical to amino acid sequence AAS; and (iii) a CDR3 having an amino acid sequence that is at least 65%, at least 70%, at least 75%, at least 80%, at least 85%, at least 90%, at least 95%, at least 99%, or 100% identical to SEQ ID NO: 146 or 764; a VH1 comprising (iv) a complementarity determining region (CDR) 1 having an amino acid sequence that is at least 65%, at least 70%, at least 75%, at least 80%, at least 85%, at least 90%, at least 95%, at least 99%, or 100% identical to SEQ ID NO: 148 or 1052; (v) a CDR2 having an amino acid sequence that is at least 65%, at least 70%, at least 75%, at least 80%, at least 85%, at least 90%, at least 95%, at least 99%, or 100% identical to SEQ ID NO: 149 or 1053; and (vi) a CDR3 having an amino acid sequence that is at least 65%, at least 70%, at least 75%, at least 80%, at least 85%, at least 90%, at least 95%, at least 99%, or 100% identical to SEQ ID NO: 150, 765, or 1054; a VL2 comprising (vii) a complementarity determining region (CDR) 1 having an amino acid sequence that is at least 65%, at least 70%, at least 75%, at least 80%, at least 85%, at least 90%, at least 95%, at least 99%, or 100% identical to any one of SEQ ID NOs: 1, 9, 15, 23, 30, 41, 48, 55, 58, 65, 72, 79, 86, 93, 99, 105, 112, 119, 130, 138, 145, 152, 159, 166, 172, 179, 186, 192, 199, 205, 212, 219, 226, 232, 324, 627, 640, 650, 659, 676, 687, 695, 703, 712, 770, 778, 785, 794, 801, 807, 814, 827, 836, 849, 858, 865, 878, 1045, 1050, 1055, 1060, and 1065; (viii) a CDR2 having an amino acid sequence at least 65%, at least 70%, at least 75%, at least 80%, at least 85%, at least 90%, at least 95%, at least 99%, or 100% identical to any one of SEQ ID NOs: 2, 31, 628, 641, 677, 1046, 1051, 1056, and 1061; or at least 65%, at least 70%, at least 75%, at least 80%, at least 85%, at least 90%, at least 95%, at least 99%, or 100% identical to any one of amino acid sequences AAS, GAS, LGS, GTN, GTN, SAS, SDS, DNT, EVT, DAS, DVT, RNS, DVS, EDS, DDS, KDS, VAS, WAS, YTS, EVS, NNN, SYN, and DAT; and (ix) a CDR3 having an amino acid sequence at least 65%, at least 70%, at least 75%, at least 80%, at least 85%, at least 90%, at least 95%, at least 99%, or 100% identical to any one of SEQ ID NOs: 3, 10, 16, 24, 32, 38, 42, 49, 59, 66, 73, 80, 87, 94, 100, 106, 113, 120, 126, 131, 139, 146, 153, 160, 167, 173, 180, 187, 193, 200, 206, 213, 220, 227, 233, 239, 242, 246, 249, 256, 283, 285, 287, 288, 290, 292, 294, 296, 301, 304, 306, 309, 311, 313, 316, 325, 326, 329, 642, 651, 660, 668, 678, 651, 696, 704, 713, 764, 766, 768, 771, 779, 786, 792, 795, 808, 815, 821, 830, 837, 843, 850, 856, 859, 866, 872, 879, 885, and 1066; and a VH2 comprising (x) a CDR1 having an amino acid sequence at least 65%, at least 70%, at least 75%, at least 80%, at least 85%, at least 90%, at least 95%, at least 99%, or 100% identical to any one of SEQ ID NOs: 5, 12, 18, 26, 34, 44, 51, 61, 68, 75, 82, 89, 96, 102, 108, 115, 122, 133, 141, 148, 155, 162, 175, 182, 189, 195, 202, 208, 215, 222, 229, 235, 318, 629, 645, 654, 663, 671, 682, 690, 699, 707, 716, 773, 781, 788, 797, 803, 810, 817, 823, 832, 839, 845, 852, 861, 868, 874, 881, 1047, 1052, 1057, 1062, and 1067; (xi) a CDR2 having an amino acid sequence at least 65%, at least 70%, at least 75%, at least 80%, at least 85%, at least 90%, at least 95%, at least 99%, or 100% identical to any one of SEQ ID NOs: 6, 19, 27, 35, 45, 52, 56, 62, 69, 76, 83, 90, 109, 116, 123, 134, 142, 149, 156, 163, 169, 176, 183, 196, 209, 216, 223, 236, 273, 319, 328, 630, 646, 655, 664, 672, 683, 691, 708, 776, 782, 789, 798, 804, 811, 818, 824, 833, 840, 846, 853, 862, 869, 875, 882, 1048, 1053, 1058, 1063, and 1068; and (xii) a CDR3 having an amino acid sequence at least 65%, at least 70%, at least 75%, at least 80%, at least 85%, at least 90%, at least 95%, at least 99%, or 100% identical to any one of SEQ ID NOs: 7, 13, 20, 28, 36, 40, 46, 53, 63, 70, 77, 84, 91, 97, 103, 110, 117, 124, 128, 135, 143, 150, 157, 164, 170, 177, 184, 190, 197, 203, 210, 217, 224, 230, 237, 241, 244, 248, 253, 257, 259, 261, 263, 265, 267, 269, 271, 274, 276, 278, 281, 297, 320, 322, 327, 330, 332, 631, 647, 656, 665, 673, 684, 692, 700, 709, 717, 765, 767, 769, 774, 783, 790, 793, 799, 805, 812, 819, 825, 834, 841, 847, 854, 857, 863, 870, 876, 883, 886, 1049, 1054, 1059, 1064, and 1069.

[1986] In some aspects, the antigen binding polypeptides provided herein comprise (i) a VL1 comprising an amino acid sequence that is at least 65%, at least 70%, at least 75%, at least 80%, at least 85%, at least 90%, at least 95%, at least 99%, or 100% identical to SEQ ID NO: 147; (ii) a VH1 comprising an amino acid sequence that is at least 65%, at least 70%, at least 75%, at least 80%, at least 85%, at least 90%, at least 95%, at least 99%, or 100% identical to SEQ ID NO: 151; (iii) a VL2 comprising an amino acid sequence that is at least 65%, at least 70%, at least 75%, at least 80%, at least 85%, at least 90%, at least 95%, at least 99%, or 100% identical to any one of SEQ ID NOs: 4, 11, 17, 25, 33, 39, 43, 50, 60, 67, 74, 81, 88, 95, 101, 107, 114, 121, 127, 132, 140, 147, 154, 161, 168, 174, 181, 188, 194, 201, 207, 214, 221, 228, 234, 240, 243, 247, 250, 251, 252, 255, 284, 286, 289, 291, 293, 295, 299, 300, 302, 303, 305, 307, 308, 310, 312, 314, 315, 317, 323, 639, 649, 658, 667, 675, 686, 694, 702, 711, 772, 780, 787, 796, 802, 809, 816, 822, 831, 838, 844, 851, 860, 867, 873, 880, and 988; and (iv) a VH2 comprising an amino acid sequence that is at least 65%, at least 70%, at least 75%, at least 80%, at least 85%, at least 90%, at least 95%, at least 99%, or 100% identical to any one of SEQ ID NOs: 8, 14, 21, 22, 29, 37, 47, 54, 57, 64, 71, 78, 85, 92, 98, 104, 111, 118, 125, 129, 136, 137, 144, 151, 158, 165, 171, 178, 185, 191, 198, 204, 211, 218, 225, 231, 238, 245, 254, 258, 260, 262, 264, 266, 268, 270, 272, 275, 277, 279, 280, 282, 298, 321, 331, 626, 644, 653, 662, 670, 681, 689, 698, 706, 715, 775, 777, 784, 791, 800, 806, 813, 820, 826, 835, 842, 848, 855, 864, 871, 877, and 884.

[1987] In some aspects, the antigen binding polypeptides provided herein comprise a VL1 comprising (i) a complementarity determining region (CDR) 1 having an amino acid sequence that is at least 65%, at least 70%, at least 75%, at least 80%, at least 85%, at least 90%, at least 95%, at least 99%, or 100% identical to SEQ ID NO: 145 or 1050; (ii) a CDR2 having an amino acid sequence at least 65%, at least 70%, at least 75%, at least 80%, at least 85%, at least 90%, at least 95%, at least 99%, or 100% identical to SEQ ID NO: 1051 or an amino acid sequence that is at least 65%, at least 70%, at least 75%, at least 80%, at least 85%, at least 90%, at least 95%, at least 99%, or 100% identical to amino acid sequence AAS; and (iii) a CDR3 having an amino acid sequence that is at least 65%, at least 70%, at least 75%, at least 80%, at least 85%, at least 90%, at least 95%, at least 99%, or 100% identical to SEQ ID NO: 146 or 764; a VH1 comprising (iv) a complementarity determining region (CDR) 1 having an amino acid sequence that is at least 65%, at least 70%, at least 75%, at least 80%, at least 85%, at least 90%, at least 95%, at least 99%, or 100% identical to SEQ ID NO: 148 or 1052; (v) a CDR2 having an amino acid sequence that is at least 65%, at least 70%, at least 75%, at least 80%, at least 85%, at least 90%, at least 95%, at least 99%, or 100% identical to SEQ ID NO: 149 or 1053; and (vi) a CDR3 having an amino acid sequence that is at least 65%, at least 70%, at least 75%, at least 80%, at least 85%, at least 90%, at least 95%, at least 99%, or 100% identical to SEQ ID NO: 150, 765, or 1054; a VL2 comprising (vii) a complementarity determining region (CDR) 1 having an amino acid sequence that is at least 65%, at least 70%, at least 75%, at least 80%, at least 85%, at least 90%, at least 95%, at least 99%, or 100% identical to any one of SEQ ID NOs: 1, 9, 15, 23, 30, 65, 72, 145, 152, 324, 627, 138, 172, 1045, 1050, 1055, 1060, and 1065; (viii) a CDR2 having an amino acid sequence at least 65%, at least 70%, at least 75%, at least 80%, at least 85%, at least 90%, at least 95%, at least 99%, or 100% identical to any one of SEQ ID NOs: 2, 31, 628, 1046, 1051, 1056, and 1061, or at least 65%, at least 70%, at least 75%, at least 80%, at least 85%, at least 90%, at least 95%, at least 99%, or 100% identical to any one of amino acid sequences GAS, LGS, GTN, SAS, SDS, AAS, DAS, and DNT; and (ix) a CDR3 having an amino acid sequence at least 65%, at least 70%, at least 75%, at least 80%, at least 85%, at least 90%, at least 95%, at least 99%, or 100% identical to any one of SEQ ID NOs: 3, 10, 16, 24, 32, 38, 66, 73, 146, 153, 325, 326, 764, 766, 139, 856, 173, 792, and 1066; and a VH2 comprising (x) a CDR1 having an amino acid sequence at least 65%, at least 70%, at least 75%, at least 80%, at least 85%, at least 90%, at least 95%, at least 99%, or 100% identical to any one of SEQ ID NOs: 5, 12, 18, 26, 34, 68, 75, 148, 155, 629, 141, 175, 1047, 1052, 1057, 1062, and 1067; (xi) a CDR2 having an amino acid sequence at least 65%, at least 70%, at least 75%, at least 80%, at least 85%, at least 90%, at least 95%, at least 99%, or 100% identical to any one of ID NOs: 6, 19, 27, 35, 69, 76, 149, 156, 630, 142, 176, 1048, 1053, 1058, 1063, and 1068; (xii) a CDR3 having an amino acid sequence at least 65%, at least 70%, at least 75%, at least 80%, at least 85%, at least 90%, at least 95%, at least 99%, or 100% identical to any one of SEQ ID NOs: 7, 13, 20, 28, 36, 40, 70, 77, 327, 150, 157, 332, 631, 765, 767, 143, 857, 177, 793, 1049, 1054, 1059, 1064, and 1069.

[1988] In some aspects, the antigen binding polypeptides provided herein comprise (i) a VL1 comprising an amino acid sequence that is at least 65%, at least 70%, at least 75%, at least 80%, at least 85%, at least 90%, at least 95%, at least 99%, or 100% identical to SEQ ID NO: 147; (ii) a VH1 comprising an amino acid sequence that is at least 65%, at least 70%, at least 75%, at least 80%, at least 85%, at least 90%, at least 95%, at least 99%, or 100% identical to SEQ ID NO: 151; (iii) a VL2 comprising an amino acid sequence that is at least 65%, at least 70%, at least 75%, at least 80%, at least 85%, at least 90%, at least 95%, at least 99%, or 100% identical to any one of SEQ ID NOs: 4, 11, 17, 25, 33, 39, 67, 74, 147, 154, 140, and 174; and (iv) a VH2 comprising an amino acid sequence that is at least 65%, at least 70%, at least 75%, at least 80%, at least 85%, at least 90%, at least 95%, at least 99%, or 100% identical to any one of SEQ ID NOs: 8, 14, 21, 22, 29, 37, 71, 78, 151, 158, 626, 144, and 178.

[1989] In some aspects, the antigen binding polypeptides provided herein further comprise an Fc region. In some aspects, the antigen binding polypeptides provided herein further comprise an Fc region at the carboxy-terminus. In some aspects, the Fc region comprises an immunoglobulin heavy chain constant region 2 (CH2) and/or an immunoglobulin heavy chain constant region 3 (CH3). In some aspects, the Fc region further comprises an immunoglobulin hinge (i.e., a hinge region). In some aspects, the hinge region comprises an amino acid sequence at least 65%, at least 70%, at least 75%, at least 80%, at least 85%, at least 90%, at least 95%, at least 99%, or 100% identical to any one of SEQ ID NOs: 635, 636, 1072, 1073, or 1074. In some aspects, the Fc region comprises a CH2 and a CH3. In some aspects, the CH2 comprises an amino acid sequence that is at least 65%, at least 70%, at least 75%, at least 80%, at least 85%, at least 90%, at least 95%, at least 99%, or 100% identical to any one of SEQ ID NOs: 1075-1078. In some aspects, the CH3 comprises an amino acid sequence that is at least 65%, at least 70%, at least 75%, at least 80%, at least 85%, at least 90%, at least 95%, at least 99%, or 100% identical to any one of SEQ ID NOs: 1079-1085. In some aspects, the Fc region comprises an amino acid sequence that is at least 65%, at least 70%, at least 75%, at least 80%, at least 85%, at least 90%, at least 95%, at least 99%, or 100% identical to any one of SEQ ID NOs: 376-380.

[1990] In some aspects, the Fc region comprises one or more amino acid substitutions. In some aspects, the one or more amino acid substitutions comprise one or more half-life extension amino acid substitutions. In some aspects, the one or more half-life extension amino acid substitutions comprise one or more of amino acid substitutions M428L, N434A, N434S, L234F, L235E, P331S, M252Y, S254T, and T256E, or equivalent thereof, based on the EU numbering scheme. In some aspects, the one or more half-life extension amino acid substitutions comprise a LA (M428L and N434A, or equivalent thereof, based on the EU numbering scheme) amino acid substitution. In some aspects, the one or more half-life extension amino acid substitutions comprise a LS (M428L and N434S, or equivalent thereof, based on the EU numbering scheme) amino acid substitution. In some aspects, the one or more half-life extension amino acid substitutions comprise L234F and L235E, or equivalent thereof (based on the EU numbering scheme) amino acid substitutions. In some aspects, the one or more half-life extension amino acid substitutions comprise a TM (L234F, L235E, and P331S, or equivalent thereof, based on the EU numbering scheme) amino acid substitution. In some aspects, the one or more half-life extension amino acid substitutions comprise a YTE (M252Y, S254T, and T256E, or equivalent thereof, based on the EU numbering scheme) amino acid substitution.

[1991] In some aspects, the Fc region comprises at least one knob-into-hole modification. In some aspects, the antigen binding polypeptides disclosed herein are comprised in IgG1 or IgG4 antibodies or antigen binding fragments thereof. In some aspects, the knob-into-hole modification comprises one or more of knob substitutions of S354C and T366W, or equivalent thereof, and/or one or more of hole substitutions of Y349C, T366S, L368A, Y407V, or equivalent thereof, or a combination thereof, based on the EU numbering scheme. In some aspects, the Fc region comprises a knob-into-hole modification comprising knob substitutions of S354C and T366W, and/or hole substitutions of Y349C, T366S, L368A, and Y407V, or equivalent thereof, and/or a half-life extension amino acid substitution comprising: a LA (M428L and N434A, or equivalent thereof, based on the EU numbering scheme) amino acid substitution, a LS (M428L and N434S, or equivalent thereof, based on the EU numbering scheme) amino acid substitution. L234F and L235E, or equivalent thereof (based on the EU numbering scheme) amino acid substitutions, a TM (L234F, L235E, and P331S, or equivalent thereof, based on the EU numbering scheme) amino acid substitution, a YTE (M252Y, S254T, and T256E, or equivalent thereof, based on the EU numbering scheme) amino acid substitution, or any combination thereof.

[1992] In some aspects, the Fc region comprises knob substitutions of S354C and T366W, or equivalent thereof, and a half-life extension amino acid substitution comprising: a LA (M428L and N434A, or equivalent thereof, based on the EU numbering scheme) amino acid substitution, a LS (M428L and N434S, or equivalent thereof, based on the EU numbering scheme) amino acid substitution, L234F and L235E, or equivalent thereof (based on the EU numbering scheme) amino acid substitutions, a TM (L234F, L235E, and P331S, or equivalent thereof, based on the EU numbering scheme) amino acid substitution, a YTE (M252Y, S254T, and T256E, or equivalent thereof, based on the EU numbering scheme) amino acid substitution, or any combination thereof.

[1993] In some aspects, the Fc region comprises hole substitutions of Y349C, T366S, L368A, and Y407V, or equivalent thereof, and a half-life extension amino acid substitution comprising: a LA (M428L and N434A, or equivalent thereof, based on the EU numbering scheme) amino acid substitution, a LS (M428L and N434S, or equivalent thereof, based on the EU numbering scheme) amino acid substitution. L234F and L235E, or equivalent thereof (based on the EU numbering scheme) amino acid substitutions, a TM (L234F, L235E, and P331S, or equivalent thereof, based on the EU numbering scheme) amino acid substitution, a YTE (M252Y, S254T, and T256E, or equivalent thereof, based on the EU numbering scheme) amino acid substitution, or any combination thereof.

[1994] In some aspects, the antigen binding polypeptides disclosed herein comprise one or more Fc effector function knockout mutation. In some aspects, the antigen binding polypeptides disclosed herein are comprised in IgG1 or IgG4 antibodies or antigen binding fragments thereof. In some aspects, the Fc effector function knockout mutation is L234A, L235A, P239A, or equivalent thereof, or a combination thereof, based on the EU numbering scheme.

[1995] In some aspects, the antigen binding polypeptides disclosed herein comprise a mutation at a glycosylation site. In some aspects, the mutation at a glycosylation site is a mutation at an N-glycosylation site. In some aspects, the antigen binding polypeptides comprise a VH comprising a mutation at a glycosylation site. In some aspects, the mutation at a glycosylation site is a mutation at an N-glycosylation site. In some aspects, the mutation at an N-glycosylation site is at amino acid N62 of the VH region or equivalent thereof. In some aspects, the mutation at an N-glycosylation site at amino acid N62 is N62Q or N62S, or equivalent thereof.

[1996] In some aspects, the antigen binding polypeptides disclosed herein, comprise one or more optional linkers. The one or more optional linkers are indicated herein as Ln, wherein n is an integer, and the integer next to each L indicates each L comprised in the antigen binding polypeptides disclosed herein. For example, if an antigen binding polypeptide disclosed herein comprises two linkers, the first linker from N-terminus to C-terminus is herein indicated as L1, and the second linker from N-terminus to C-terminus is herein indicated as L2. In some aspects, any one of the optional linkers each independently have a length of from 0 amino acids to about 50 amino acids. In some aspects, any one of the optional linkers each independently have a length of from 5 amino acids to about 40 amino acids.

[1997] In some aspects, any one of the optional linkers are non-immunogenic. In some aspects, any one of the optional linkers do not contain a consensus T cell epitope.

[1998] In some aspects, any of Ln comprises an amino acid sequence of G or A, or an amino acid sequence at least 65%, at least 70%, at least 75%, at least 80%, at least 85%, at least 90%, at least 95%, at least 99%, or 100% identical to amino acid sequence GSS or ASG, or an amino acid sequence at least 65%, at least 70%, at least 75%, at least 80%, at least 85%, at least 90%, at least 95%, at least 99%, or 100% identical to any one of SEQ ID NOs: 333-373 and 967-971. In some aspects, Ln comprises an amino acid sequence at least 65%, at least 70%, at least 75%, at least 80%, at least 85%, at least 90%, at least 95%, at least 99%, or 100% identical to any one of SEQ ID NOs: 333-345 and 967-971.

[1999] In some aspects, the antigen binding polypeptides provided herein have a structure, from amino-terminus to carboxy-terminus, represented by:
[2000] VL1-L1-VL2-L2-VH2-L3-VH1;
[2001] VL1-L1-VH2-L2-VL2-L3-VH1;
[2002] VH1-L1-VH2-L2-VL2-L3-VL1; or
[2003] VH1-L1-VL2-L2-VH2-L3-VL1;
[2004] wherein:
[2005] VL1 is a first immunoglobulin light chain variable region that specifically binds to a severe acute respiratory syndrome coronavirus 2 (SARS-CoV-2) protein;
[2006] VL2 is a second immunoglobulin light chain variable region that specifically binds to a SARS-CoV-2 protein;
[2007] VH1 is a first immunoglobulin heavy chain variable region that specifically binds to a SARS-CoV-2 protein;
[2008] VH2 is a second immunoglobulin heavy chain variable region that specifically binds to a SARS-CoV-2 protein; and
[2009] L1-L3 are optional amino acid linkers.

[2010] In any aspect shown herein as a structure from amino terminus to carboxy terminus, and with binding pairs selected from VL and/or VH or other structural regions such as CH2, CH3, when shown without a specific linker such as L1, L2, etc., such linkers are optionally present in such structures between each designated subsequence VL, VH, etc.

[2011] In some aspects, the antigen binding polypeptides provided herein comprise a VL1 comprising (i) a complementarity determining region (CDR) 1 having an amino acid sequence that is at least 65%, at least 70%, at least 75%, at least 80%, at least 85%, at least 90%, at least 95%, at least 99%, or 100% identical to any one of SEQ ID NOs: 1, 9, 15, 23, 30, 41, 48, 55, 58, 65, 72, 79, 86, 93, 99, 105, 112, 119, 130, 138, 145, 152, 159, 166, 172, 179, 186, 192, 199, 205, 212, 219, 226, 232, 324, 627, 640, 650, 659, 676, 687, 695, 703, 712, 770, 778, 785, 794, 801, 807, 814, 827, 836, 849, 858, 865, 878, 1045, 1050, 1055, 1060, and 1065; (ii) a CDR2 having an amino acid sequence that is at least 65%, at least 70%, at least 75%, at least 80%, at least 85%, at least 90%, at least 95%, at least 99%, or 100% identical to any one of SEQ ID NOs: 2, 31, 628, 641, 677, 1046, 1051, 1056, and 1061; or at least 65%, at least 70%, at least 75%, at least 80%, at least 85%, at least 90%, at least 95%, at least 99%, or 100% identical to any one of amino acid sequences AAS, GAS, LGS, GTN, GTN, SAS, SDS, DNT, EVT, DAS, DVT, RNS, DVS, EDS, DDS, KDS, VAS, WAS, YTS, EVS, NNN, SYN, and DAT; and (iii) a CDR3 having an amino acid sequence that is at least 65%, at least 70%, at least 75%, at least 80%, at least 85%, at least 90%, at least 95%, at least 99%, or 100% identical to any one of SEQ ID NOs: 3, 10, 16, 24, 32, 38, 42, 49, 59, 66, 73, 80, 87, 94, 100, 106, 113, 120, 126, 131, 139, 146, 153, 160, 167, 173, 180, 187, 193, 200, 206, 213, 220, 227, 233, 239, 242, 246, 249, 256, 283, 285, 287, 288, 290, 292, 294, 296, 301, 304, 306, 309, 311, 313, 316, 325, 326, 329, 642, 651, 660, 668, 678, 651, 696, 704, 713, 764, 766, 768, 771, 779, 786, 792, 795, 808, 815, 821, 830, 837, 843, 850, 856, 859, 866, 872, 879, 885, and 1066.

[2012] In some aspects, the antigen binding polypeptides provided herein comprise a VL2 comprising (i) a complementarity determining region (CDR) 1 having an amino acid sequence that is at least 65%, at least 70%, at least 75%, at least 80%, at least 85%, at least 90%, at least 95%, at least 99%, or 100% identical to any one of SEQ ID NOs: 1, 9, 15, 23, 30, 41, 48, 55, 58, 65, 72, 79, 86, 93, 99, 105, 112, 119, 130, 138, 145, 152, 159, 166, 172, 179, 186, 192, 199, 205, 212, 219, 226, 232, 324, 627, 640, 650, 659, 676, 687, 695, 703, 712, 770, 778, 785, 794, 801, 807, 814, 827, 836, 849, 858, 865, 878, 1045, 1050, 1055, 1060, and 1065; (ii) a CDR2 having an amino acid sequence that is at least 65%, at least 70%, at least 75%, at least 80%, at least 85%, at least 90%, at least 95%, at least 99%, or 100% identical to any one of SEQ ID NOs: 2, 31, 628, 641, 677, 1046, 1051, 1056, and 1061; or at least 65%, at least 70%, at least 75%, at least 80%, at least 85%, at least 90%, at least 95%, at least 99%, or 100% identical to any one of amino acid sequences AAS, GAS, LGS, GTN, GTN, SAS, SDS, DNT, EVT, DAS, DVT, RNS, DVS, EDS, DDS, KDS, VAS, WAS, YTS, EVS, NNN, SYN, and DAT; and (iii) a CDR3 having an amino acid sequence that is at least 65%, at least 70%, at least 75%, at least 80%, at least 85%, at least 90%, at least 95%, at least 99%, or 100% identical to any one of SEQ ID NOs: 3, 10, 16, 24, 32, 38, 42, 49, 59, 66, 73, 80, 87, 94, 100, 106, 113, 120, 126, 131, 139, 146, 153, 160, 167, 173, 180, 187, 193, 200, 206, 213, 220, 227, 233, 239, 242, 246, 249, 256, 283, 285, 287, 288, 290, 292, 294, 296, 301, 304, 306, 309, 311, 313, 316, 325, 326, 329, 642, 651, 660, 668, 678, 651, 696, 704, 713, 764, 766, 768, 771, 779, 786, 792, 795, 808, 815, 821, 830, 837, 843, 850, 856, 859, 866, 872, 879, 885, and 1066.

[2013] In some aspects, the antigen binding polypeptides provided herein comprise a VH1 comprising (i) a CDR1 having an amino acid sequence that is at least 65%, at least 70%, at least 75%, at least 80%, at least 85%, at least 90%, at least 95%, at least 99%, or 100% identical to any one of SEQ ID NOs: 5, 12, 18, 26, 34, 44, 51, 61, 68, 75, 82, 89, 96, 102, 108, 115, 122, 133, 141, 148, 155, 162, 175, 182, 189, 195, 202, 208, 215, 222, 229, 235, 318, 629, 645, 654, 663, 671, 682, 690, 699, 707, 716, 773, 781, 788, 797, 803, 810, 817, 823, 832, 839, 845, 852, 861, 868, 874, 881, 1047, 1052, 1057, 1062, and 1067; (ii) a CDR2 having an amino acid sequence that is at least 65%, at least 70%, at least 75%, at least 80%, at least 85%, at least 90%, at least 95%, at least 99%, or 100% identical to any one of SEQ ID NOs: 6, 19, 27, 35, 45, 52, 56, 62, 69, 76, 83, 90, 109, 116, 123, 134, 142, 149, 156, 163, 169, 176, 183, 196, 209, 216, 223, 236, 273, 319, 328, 630, 646, 655, 664, 672, 683, 691, 708, 776, 782, 789, 798, 804, 811, 818, 824, 833, 840, 846, 853, 862, 869, 875, 882, 1048, 1053, 1058, 1063, and 1068; and (iii) a CDR3 having an amino acid sequence that is at least 65%, at least 70%, at least 75%, at least 80%, at least 85%, at least 90%, at least 95%, at least 99%, or 100% identical to any one of SEQ ID NOs: 7, 13, 20, 28, 36, 40, 46, 53, 63, 70, 77, 84, 91, 97, 103, 110, 117, 124, 128, 135, 143, 150, 157, 164, 170, 177, 184, 190, 197, 203, 210, 217, 224, 230, 237, 241, 244, 248, 253, 257, 259, 261, 263, 265, 267, 269, 271, 274, 276, 278, 281, 297, 320, 322, 327, 330, 332, 631, 647, 656, 665, 673, 684, 692, 700, 709, 717, 765, 767, 769, 774, 783, 790, 793, 799, 805, 812, 819, 825, 834, 841, 847, 854, 857, 863, 870, 876, 883, 886, 1049, 1054, 1059, 1064, and 1069.

[2014] In some aspects, the antigen binding polypeptides provided herein comprise a VH2 comprising (i) a CDR1 having an amino acid sequence that is at least 65%, at least 70%, at least 75%, at least 80%, at least 85%, at least 90%, at least 95%, at least 99%, or 100% identical to any one of SEQ ID NOs: 5, 12, 18, 26, 34, 44, 51, 61, 68, 75, 82, 89, 96, 102, 108, 115, 122, 133, 141, 148, 155, 162, 175, 182, 189, 195, 202, 208, 215, 222, 229, 235, 318, 629, 645, 654, 663, 671, 682, 690, 699, 707, 716, 773, 781, 788, 797, 803, 810, 817, 823, 832, 839, 845, 852, 861, 868, 874, 881, 1047, 1052, 1057, 1062, and 1067; (ii) a CDR2 having an amino acid sequence that is at least 65%, at least 70%, at least 75%, at least 80%, at least 85%, at least 90%, at least 95%, at least 99%, or 100% identical to any one of SEQ ID NOs: 6, 19, 27, 35, 45, 52, 56, 62, 69, 76, 83, 90, 109, 116, 123, 134, 142, 149, 156, 163, 169, 176, 183, 196, 209, 216, 223, 236, 273, 319, 328, 630, 646, 655, 664, 672, 683, 691, 708, 776, 782, 789, 798, 804, 811, 818, 824, 833, 840, 846, 853, 862, 869, 875, 882, 1048, 1053, 1058, 1063, and 1068; and (iii) a CDR3 having an amino acid sequence that is at least 65%, at least 70%, at least 75%, at least 80%, at least 85%, at least 90%, at least 95%, at least 99%, or 100% identical to any one of SEQ ID NOs: 7, 13, 20, 28, 36, 40, 46, 53, 63, 70, 77, 84, 91, 97, 103, 110, 117, 124, 128, 135, 143, 150, 157, 164, 170, 177, 184, 190, 197, 203, 210, 217, 224, 230, 237, 241, 244, 248, 253, 257, 259, 261, 263, 265, 267, 269, 271, 274, 276, 278, 281, 297, 320, 322, 327, 330, 332, 631, 647, 656, 665, 673, 684, 692, 700, 709, 717, 765, 767, 769, 774, 783, 790, 793, 799, 805, 812, 819, 825, 834, 841, 847, 854, 857, 863, 870, 876, 883, 886, 1049, 1054, 1059, 1064, and 1069.

[2015] In some aspects, the antigen binding polypeptides provided herein comprise a VL1 comprising (i) a complementarity determining region (CDR) 1 having an amino acid sequence that is at least 65%, at least 70%, at least 75%, at least 80%, at least 85%, at least 90%, at least 95%, at least 99%, or 100% identical to any one of SEQ ID NOs: 1, 9, 15, 23, 30, 41, 48, 55, 58, 65, 72, 79, 86, 93, 99, 105, 112, 119, 130, 138, 145, 152, 159, 166, 172, 179, 186, 192, 199, 205, 212, 219, 226, 232, 324, 627, 640, 650, 659, 676, 687, 695, 703, 712, 770, 778, 785, 794, 801, 807, 814, 827, 836, 849, 858, 865, 878, 1045, 1050, 1055, 1060, and 1065; (ii) a CDR2 having an amino acid sequence that is at least 65%, at least 70%, at least 75%, at least 80%, at least 85%, at least 90%, at least 95%, at least 99%, or 100% identical to any one of SEQ ID NOs: 2, 31, 628, 641, 677, 1046, 1051, 1056, and 1061; or at least 65%, at least 70%, at least 75%, at least 80%, at least 85%, at least 90%, at least 95%, at least 99%, or 100% identical to any one of amino acid sequences AAS, GAS, LGS, GTN, GTN, SAS, SDS, DNT, EVT, DAS, DVT, RNS, DVS, EDS, DDS, KDS, VAS, WAS, YTS, EVS, NNN, SYN, and DAT; and (iii) a CDR3 having an amino acid sequence that is at least 65%, at least 70%, at least 75%, at least 80%, at least 85%, at least 90%, at least 95%, at least 99%, or 100% identical to any one of SEQ ID NOs: 3, 10, 16, 24, 32, 38, 42, 49, 59, 66, 73, 80, 87, 94, 100, 106, 113, 120, 126, 131, 139, 146, 153, 160, 167, 173, 180, 187, 193, 200, 206, 213, 220, 227, 233, 239, 242, 246, 249, 256, 283, 285, 287, 288, 290, 292, 294, 296, 301, 304, 306, 309, 311, 313, 316, 325, 326, 329, 642, 651, 660, 668, 678, 651, 696, 704, 713, 764, 766, 768, 771, 779, 786, 792, 795, 808, 815, 821, 830, 837, 843, 850, 856, 859, 866, 872, 879, 885, and 1066; a VH1 comprising (i) a CDR1 having an amino acid sequence that is at least 65%, at least 70%, at least 75%, at least 80%, at least 85%, at least 90%, at least 95%, at least 99%, or 100% identical to any one of SEQ ID NOs: 5, 12, 18, 26, 34, 44, 51, 61, 68, 75, 82, 89, 96, 102, 108, 115, 122, 133, 141, 148, 155, 162, 175, 182, 189, 195, 202, 208, 215, 222, 229, 235, 318, 629, 645, 654, 663, 671, 682, 690, 699, 707, 716, 773, 781, 788, 797, 803, 810, 817, 823, 832, 839, 845, 852, 861, 868, 874, 881, 1047, 1052, 1057, 1062, and 1067; (ii) a CDR2 having an amino acid sequence that is at least 65%, at least 70%, at least 75%, at least 80%, at least 85%, at least 90%, at least 95%, at least 99%, or 100% identical to any one of SEQ ID NOs: 6, 19, 27, 35, 45, 52, 56, 62, 69, 76, 83, 90, 109, 116, 123, 134, 142, 149, 156, 163, 169, 176, 183, 196, 209, 216, 223, 236, 273, 319, 328, 630, 646, 655, 664, 672, 683, 691, 708, 776, 782, 789, 798, 804, 811, 818, 824, 833, 840, 846, 853, 862, 869, 875, 882, 1048, 1053, 1058, 1063, and 1068; and (iii) a CDR3 having an amino acid sequence that is at least 65%, at least 70%, at least 75%, at least 80%, at least 85%, at least 90%, at least 95%, at least 99%, or 100% identical to any one of SEQ ID NOs: 7, 13, 20, 28, 36, 40, 46, 53, 63, 70, 77, 84, 91, 97, 103, 110, 117, 124, 128, 135, 143, 150, 157, 164, 170, 177, 184, 190, 197, 203, 210, 217, 224, 230, 237, 241, 244, 248, 253, 257, 259, 261, 263, 265, 267, 269, 271, 274, 276, 278, 281, 297, 320, 322, 327, 330, 332, 631, 647, 656, 665, 673, 684, 692, 700, 709, 717, 765, 767, 769, 774, 783, 790, 793, 799, 805, 812, 819, 825, 834, 841, 847, 854, 857, 863, 870, 876, 883, 886, 1049, 1054, 1059, 1064, and 1069; a VL2 comprising (i) a complementarity determining region (CDR) 1 having an amino acid sequence that is at least 65%, at least 70%, at least 75%, at least 80%, at least 85%, at least 90%, at least 95%, at least 99%, or 100% identical to any one of SEQ ID NOs: 1, 9, 15, 23, 30, 41, 48, 55, 58, 65, 72, 79, 86, 93, 99, 105, 112, 119, 130, 138, 145, 152, 159, 166, 172, 179, 186, 192, 199, 205, 212, 219, 226, 232, 324, 627, 640, 650, 659, 676, 687, 695, 703, 712, 770, 778, 785, 794, 801, 807, 814, 827, 836, 849, 858, 865, 878, 1045, 1050, 1055, 1060, and 1065; (ii) a CDR2 having an amino acid sequence that is at least 65%, at least 70%, at least 75%, at least 80%, at least 85%, at least 90%, at least 95%, at least 99%, or 100% identical to any one of SEQ ID NOs: 2, 31, 628, 641, 677, 1046, 1051, 1056, and 1061; or at least 65%, at least 70%, at least 75%, at least 80%, at least 85%, at least 90%, at least 95%, at least 99%, or 100% identical to any one of amino acid sequences AAS, GAS, LGS, GTN, GTN, SAS, SDS, DNT, EVT, DAS, DVT, RNS, DVS, EDS, DDS, KDS, VAS, WAS, YTS, EVS, NNN, SYN, and DAT; and (iii) a CDR3 having an amino acid sequence that is at least 65%, at least 70%, at least 75%, at least 80%, at least 85%, at least 90%, at least 95%, at least 99%, or 100% identical to any one of SEQ ID NOs: 3, 10, 16, 24, 32, 38, 42, 49, 59, 66, 73, 80, 87, 94, 100, 106, 113, 120, 126, 131, 139, 146, 153, 160, 167, 173, 180, 187, 193, 200, 206, 213, 220, 227, 233, 239, 242, 246, 249, 256, 283, 285, 287, 288, 290, 292, 294, 296, 301, 304, 306, 309, 311, 313, 316, 325, 326, 329, 642, 651, 660, 668, 678, 651, 696, 704, 713, 764, 766, 768, 771, 779, 786, 792, 795, 808, 815, 821, 830, 837, 843, 850, 856, 859, 866, 872, 879, 885, and 1066; and a VH2 comprising (i) a CDR1 having an amino acid sequence that is at least 65%, at least 70%, at least 75%, at least 80%, at least 85%, at least 90%, at least 95%, at least 99%, or 100% identical to any one of SEQ ID NOs: 5, 12, 18, 26, 34, 44, 51, 61, 68, 75, 82, 89, 96, 102, 108, 115, 122, 133, 141, 148, 155, 162, 175, 182, 189, 195, 202, 208, 215, 222, 229, 235, 318, 629, 645, 654, 663, 671, 682, 690, 699, 707, 716, 773, 781, 788, 797, 803, 810, 817, 823, 832, 839, 845, 852, 861, 868, 874, 881, 1047, 1052, 1057, 1062, and 1067; (ii) a CDR2 having an amino acid sequence that is at least 65%, at least 70%, at least 75%, at least 80%, at least 85%, at least 90%, at least 95%, at least 99%, or 100% identical to any one of SEQ ID NOs: 6, 19, 27, 35, 45, 52, 56, 62, 69, 76, 83, 90, 109, 116, 123, 134, 142, 149, 156, 163, 169, 176, 183, 196, 209, 216, 223, 236, 273, 319, 328, 630, 646, 655, 664, 672, 683, 691, 708, 776, 782, 789, 798, 804, 811, 818, 824, 833, 840, 846, 853, 862, 869, 875, 882, 1048, 1053, 1058, 1063, and 1068; and (iii) a CDR3 having an amino acid sequence that is at least 65%, at least 70%, at least 75%, at least 80%, at least 85%, at least 90%, at least 95%, at least 99%, or 100% identical to any one of SEQ ID NOs: 7, 13, 20, 28, 36, 40, 46, 53, 63, 70, 77, 84, 91, 97, 103, 110, 117, 124, 128, 135, 143, 150, 157, 164, 170, 177, 184, 190, 197, 203, 210, 217, 224, 230, 237, 241, 244, 248, 253, 257, 259, 261, 263, 265, 267, 269, 271, 274, 276, 278, 281, 297, 320, 322, 327, 330, 332, 631, 647, 656, 665, 673, 684, 692, 700, 709, 717, 765, 767, 769, 774, 783, 790, 793, 799, 805, 812, 819, 825, 834, 841, 847, 854, 857, 863, 870, 876, 883, 886, 1049, 1054, 1059, 1064, and 1069.

[2016] In some aspects, the antigen binding polypeptides provided herein comprise a VL1 comprising an amino acid sequence that is at least 65%, at least 70%, at least 75%, at least 80%, at least 85%, at least 90%, at least 95%, at least 99%, or 100% identical to any one of SEQ ID NOs: 4, 11, 17, 25, 33, 39, 43, 50, 60, 67, 74, 81, 88, 95, 101, 107, 114, 121, 127, 132, 140, 147, 154, 161, 168, 174, 181, 188, 194, 201, 207, 214, 221, 228, 234, 240, 243, 247, 250, 251, 252, 255, 284, 286, 289, 291, 293, 295, 299, 300, 302, 303, 305, 307, 308, 310, 312, 314, 315, 317, 323, 639, 649, 658, 667, 675, 686, 694, 702, 711, 772, 780, 787, 796, 802, 809, 816, 822, 831, 838, 844, 851, 860, 867, 873, 880, and 988.

[2017] In some aspects, the antigen binding polypeptides provided herein comprise a VH1 comprising an amino acid sequence that is at least 65%, at least 70%, at least 75%, at least 80%, at least 85%, at least 90%, at least 95%, at least 99%, or 100% identical to any one of SEQ ID NOs: 8, 14, 21, 22, 29, 37, 47, 54, 57, 64, 71, 78, 85, 92, 98, 104, 111, 118, 125, 129, 136, 137, 144, 151, 158, 165, 171, 178, 185, 191, 198, 204, 211, 218, 225, 231, 238, 245, 254, 258, 260, 262, 264, 266, 268, 270, 272, 275, 277, 279, 280, 282, 298, 321, 331, 626, 644, 653, 662, 670, 681, 689, 698, 706, 715, 775, 777, 784, 791, 800, 806, 813, 820, 826, 835, 842, 848, 855, 864, 871, 877, and 884.

[2018] In some aspects, the antigen binding polypeptides provided herein comprise a VL2 comprising an amino acid sequence that is at least 65%, at least 70%, at least 75%, at least 80%, at least 85%, at least 90%, at least 95%, at least 99%, or 100% identical to any one of SEQ ID NOs: 4, 11, 17, 25, 33, 39, 43, 50, 60, 67, 74, 81, 88, 95, 101, 107, 114, 121, 127, 132, 140, 147, 154, 161, 168, 174, 181, 188, 194, 201, 207, 214, 221, 228, 234, 240, 243, 247, 250, 251, 252, 255, 284, 286, 289, 291, 293, 295, 299, 300, 302, 303, 305, 307, 308, 310, 312, 314, 315, 317, 323, 639, 649, 658, 667, 675, 686, 694, 702, 711, 772, 780, 787, 796, 802, 809, 816, 822, 831, 838, 844, 851, 860, 867, 873, 880, and 988.

[2019] In some aspects, the antigen binding polypeptides provided herein comprise a VH2 comprising an amino acid sequence that is at least 65%, at least 70%, at least 75%, at least 80%, at least 85%, at least 90%, at least 95%, at least 99%, or 100% identical to any one of SEQ ID NOs: 8, 14, 21, 22, 29, 37, 47, 54, 57, 64, 71, 78, 85, 92, 98, 104, 111, 118, 125, 129, 136, 137, 144, 151, 158, 165, 171, 178, 185, 191, 198, 204, 211, 218, 225, 231, 238, 245, 254, 258, 260, 262, 264, 266, 268, 270, 272, 275, 277, 279, 280, 282, 298, 321, 331, 626, 644, 653, 662, 670, 681, 689, 698, 706, 715, 775, 777, 784, 791, 800, 806, 813, 820, 826, 835, 842, 848, 855, 864, 871, 877, and 884.

[2020] In some aspects, the antigen binding polypeptides provided herein comprise (i) a VL1 comprising an amino acid sequence that is at least 65%, at least 70%, at least 75%, at least 80%, at least 85%, at least 90%, at least 95%, at least 99%, or 100% identical to any one of SEQ ID NOs: 4, 11, 17, 25, 33, 39, 43, 50, 60, 67, 74, 81, 88, 95, 101, 107, 114, 121, 127, 132, 140, 147, 154, 161, 168, 174, 181, 188, 194, 201, 207, 214, 221, 228, 234, 240, 243, 247, 250, 251, 252, 255, 284, 286, 289, 291, 293, 295, 299, 300, 302, 303, 305, 307, 308, 310, 312, 314, 315, 317, 323, 639, 649, 658, 667, 675, 686, 694, 702, 711, 772, 780, 787, 796, 802, 809, 816, 822, 831, 838, 844, 851, 860, 867, 873, 880, and 988; (ii) a VH1 comprising an amino acid sequence that is at least 65%, at least 70%, at least 75%, at least 80%, at least 85%, at least 90%, at least 95%, at least 99%, or 100% identical to any one of SEQ ID NOs: 8, 14, 21, 22, 29, 37, 47, 54, 57, 64, 71, 78, 85, 92, 98, 104, 111, 118, 125, 129, 136, 137, 144, 151, 158, 165, 171, 178, 185, 191, 198, 204, 211, 218, 225, 231, 238, 245, 254, 258, 260, 262, 264, 266, 268, 270, 272, 275, 277, 279, 280, 282, 298, 321, 331, 626, 644, 653, 662, 670, 681, 689, 698, 706, 715, 775, 777, 784, 791, 800, 806, 813, 820, 826, 835, 842, 848, 855, 864, 871, 877, and 884; (iii) a VL2 comprising an amino acid sequence that is at least 65%, at least 70%, at least 75%, at least 80%, at least 85%, at least 90%, at least 95%, at least 99%, or 100% identical to any one of SEQ ID NOs: 4, 11, 17, 25, 33, 39, 43, 50, 60, 67, 74, 81, 88, 95, 101, 107, 114, 121, 127, 132, 140, 147, 154, 161, 168, 174, 181, 188, 194, 201, 207, 214, 221, 228, 234, 240, 243, 247, 250, 251, 252, 255, 284, 286, 289, 291, 293, 295, 299, 300, 302, 303, 305, 307, 308, 310, 312, 314, 315, 317, 323, 639, 649, 658, 667, 675, 686, 694, 702, 711, 772, 780, 787, 796, 802, 809, 816, 822, 831, 838, 844, 851, 860, 867, 873, 880, and 988; and (iv) a VH2 comprising an amino acid sequence that is at least 65%, at least 70%, at least 75%, at least 80%, at least 85%, at least 90%, at least 95%, at least 99%, or 100% identical to any one of SEQ ID NOs: 8, 14, 21, 22, 29, 37, 47, 54, 57, 64, 71, 78, 85, 92, 98, 104, 111, 118, 125, 129, 136, 137, 144, 151, 158, 165, 171, 178, 185, 191, 198, 204, 211, 218, 225, 231, 238, 245, 254, 258, 260, 262, 264, 266, 268, 270, 272, 275, 277, 279, 280, 282, 298, 321, 331, 626, 644, 653, 662, 670, 681, 689, 698, 706, 715, 775, 777, 784, 791, 800, 806, 813, 820, 826, 835, 842, 848, 855, 864, 871, 877, and 884.

[2021] In some aspects, the antigen binding polypeptides provided herein comprise a VL1 comprising (i) a complementarity determining region (CDR) 1 having an amino acid sequence that is at least 65%, at least 70%, at least 75%, at least 80%, at least 85%, at least 90%, at least 95%, at least 99%, or 100% identical to any one of SEQ ID NOs: 1, 9, 15, 23, 30, 65, 72, 145, 152, 324, 627, 138, 172, 1045, 1050, 1055, 1060, and 1065; (ii) a CDR2 having an amino acid sequence that is at least 65%, at least 70%, at least 75%, at least 80%, at least 85%, at least 90%, at least 95%, at least 99%, or 100% identical to any one of SEQ ID NOs: 2, 31.628, 1046, 1051, 1056, and 1061, or at least 65%, at least 70%, at least 75%, at least 80%, at least 85%, at least 90%, at least 95%, at least 99%, or 100% identical to any one of amino acid sequences GAS, LGS, GTN, SAS, SDS, AAS, DAS, and DNT; and (iii) a CDR3 having an amino acid sequence that is at least 65%, at least 70%, at least 75%, at least 80%, at least 85%, at least 90%, at least 95%, at least 99%, or 100% identical to any one of SEQ ID NOs: 3, 10, 16, 24, 32, 38, 66, 73, 146, 153, 325, 326, 764, 766, 139, 856, 173, 792, and 1066.

[2022] In some aspects, the antigen binding polypeptides provided herein comprise a VL2 comprising (i) a complementarity determining region (CDR) 1 having an amino acid sequence that is at least 65%, at least 70%, at least 75%, at least 80%, at least 85%, at least 90%, at least 95%, at least 99%, or 100% identical to any one of SEQ ID NOs: 1, 9, 15, 23, 30, 65, 72, 145, 152, 324, 627, 138, 172, 1045, 1050, 1055, 1060, and 1065; (ii) a CDR2 having an amino acid sequence that is at least 65%, at least 70%, at least 75%, at least 80%, at least 85%, at least 90%, at least 95%, at least 99%, or 100% identical to any one of SEQ ID NOs: 2, 31.628, 1046, 1051, 1056, and 1061, or at least 65%, at least 70%, at least 75%, at least 80%, at least 85%, at least 90%, at least 95%, at least 99%, or 100% identical to any one of amino acid sequences GAS, LGS, GTN, SAS, SDS, AAS, DAS, and DNT; and (iii) a CDR3 having an amino acid sequence that is at least 65%, at least 70%, at least 75%, at least 80%, at least 85%, at least 90%, at least 95%, at least 99%, or 100% identical to any one of SEQ ID NOs: 3, 10, 16, 24, 32, 38, 66, 73, 146, 153, 325, 326, 764, 766, 139, 856, 173, 792, and 1066.

[2023] In some aspects, the antigen binding polypeptides provided herein comprise a VH1 comprising (i) a CDR1 having an amino acid sequence that is at least 65%, at least 70%, at least 75%, at least 80%, at least 85%, at least 90%, at least 95%, at least 99%, or 100% identical to any one of SEQ ID NOs: 5, 12, 18, 26, 34, 68, 75, 148, 155, 629, 141, 175, 1047, 1052, 1057, 1062, and 1067; (ii) a CDR2 having an amino acid sequence that is at least 65%, at least 70%, at least 75%, at least 80%, at least 85%, at least 90%, at least 95%, at least 99%, or 100% identical to any one of SEQ ID NOs: 6, 19, 27, 35, 69, 76, 149, 156, 630, 142, 176, 1048, 1053, 1058, 1063, and 1068; and (iii) a CDR3 having an amino acid sequence that is at least 65%, at least 70%, at least 75%, at least 80%, at least 85%, at least 90%, at least 95%, at least 99%, or 100% identical to any one of SEQ ID NOs: 7, 13, 20, 28, 36, 40, 70, 77, 327, 150, 157, 332, 631, 765, 767, 143, 857, 177, 793, 1049, 1054, 1059, 1064, and 1069.

[2024] In some aspects, the antigen binding polypeptides provided herein comprise a VH2 comprising (i) a CDR1 having an amino acid sequence that is at least 65%, at least 70%, at least 75%, at least 80%, at least 85%, at least 90%, at least 95%, at least 99%, or 100% identical to any one of SEQ ID NOs: 5, 12, 18, 26, 34, 68, 75, 148, 155, 629, 141, 175, 1047, 1052, 1057, 1062, and 1067; (ii) a CDR2 having an amino acid sequence that is at least 65%, at least 70%, at least 75%, at least 80%, at least 85%, at least 90%, at least 95%, at least 99%, or 100% identical to any one of SEQ ID NOs: 6, 19, 27, 35, 69, 76, 149, 156, 630, 142, 176, 1048, 1053, 1058, 1063, and 1068; and (iii) a CDR3 having an amino acid sequence that is at least 65%, at least 70%, at least 75%, at least 80%, at least 85%, at least 90%, at least 95%, at least 99%, or 100% identical to any one of SEQ ID NOs: 7, 13, 20, 28, 36, 40, 70, 77, 327, 150, 157, 332, 631, 765, 767, 143, 857, 177, 793, 1049, 1054, 1059, 1064, and 1069.

[2025] In some aspects, the antigen binding polypeptides provided herein comprise a VL1 comprising (i) a complementarity determining region (CDR) 1 having an amino acid sequence that is at least 65%, at least 70%, at least 75%, at least 80%, at least 85%, at least 90%, at least 95%, at least 99%, or 100% identical to any one of SEQ ID NOs: 1, 9, 15, 23, 30, 65, 72, 145, 152, 324, 627, 138, 172, 1045, 1050, 1055, 1060, and 1065; (ii) a CDR2 having an amino acid sequence that is at least 65%, at least 70%, at least 75%, at least 80%, at least 85%, at least 90%, at least 95%, at least 99%, or 100% identical to any one of SEQ ID NOs: 2, 31.628, 1046, 1051, 1056, and 1061, or at least 65%, at least 70%, at least 75%, at least 80%, at least 85%, at least 90%, at least 95%, at least 99%, or 100% identical to any one of amino acid sequences GAS, LGS, GTN, SAS, SDS, AAS, DAS, and DNT; and (iii) a CDR3 having an amino acid sequence that is at least 65%, at least 70%, at least 75%, at least 80%, at least 85%, at least 90%, at least 95%, at least 99%, or 100% identical to any one of SEQ ID NOs: 3, 10, 16, 24, 32, 38, 66, 73, 146, 153, 325, 326, 764, 766, 139, 856, 173, 792, and 1066; a VH1 comprising (i) a CDR1 having an amino acid sequence that is at least 65%, at least 70%, at least 75%, at least 80%, at least 85%, at least 90%, at least 95%, at least 99%, or 100% identical to any one of SEQ ID NOs: 5, 12, 18, 26, 34, 68, 75, 148, 155, 629, 141, 175, 1047, 1052, 1057, 1062, and 1067; (ii) a CDR2 having an amino acid sequence that is at least 65%, at least 70%, at least 75%, at least 80%, at least 85%, at least 90%, at least 95%, at least 99%, or 100% identical to any one of SEQ ID NOs: 6, 19, 27, 35, 69, 76, 149, 156, 630, 142, 176, 1048, 1053, 1058, 1063, and 1068; and (iii) a CDR3 having an amino acid sequence that is at least 65%, at least 70%, at least 75%, at least 80%, at least 85%, at least 90%, at least 95%, at least 99%, or 100% identical to any one of SEQ ID NOs: 7, 13, 20, 28, 36, 40, 70, 77, 327, 150, 157, 332, 631, 765, 767, 143, 857, 177, 793, 1049, 1054, 1059, 1064, and 1069; a VL2 comprising (i) a complementarity determining region (CDR) 1 having an amino acid sequence that is at least 65%, at least 70%, at least 75%, at least 80%, at least 85%, at least 90%, at least 95%, at least 99%, or 100% identical to any one of SEQ ID NOs: 1, 9, 15, 23, 30, 65, 72, 145, 152, 324, 627, 138, 172, 1045, 1050, 1055, 1060, and 1065; (ii) a CDR2 having an amino acid sequence that is at least 65%, at least 70%, at least 75%, at least 80%, at least 85%, at least 90%, at least 95%, at least 99%, or 100% identical to any one of SEQ ID NOs: 2, 31, 628, 1046, 1051, 1056, and 1061, or at least 65%, at least 70%, at least 75%, at least 80%, at least 85%, at least 90%, at least 95%, at least 99%, or 100% identical to any one of amino acid sequences GAS, LGS, GTN, SAS, SDS, AAS, DAS, and DNT; and (iii) a CDR3 having an amino acid sequence that is at least 65%, at least 70%, at least 75%, at least 80%, at least 85%, at least 90%, at least 95%, at least 99%, or 100% identical to any one of SEQ ID NOs: 3, 10, 16, 24, 32, 38, 66, 73, 146, 153, 325, 326, 764, 766, 139, 856, 173, 792, and 1066; and a VH2 comprising (i) a CDR1 having an amino acid sequence that is at least 65%, at least 70%, at least 75%, at least 80%, at least 85%, at least 90%, at least 95%, at least 99%, or 100% identical to any one of SEQ ID NOs: 5, 12, 18, 26, 34, 68, 75, 148, 155, 629, 141, 175, 1047, 1052, 1057, 1062, and 1067; (ii) a CDR2 having an amino acid sequence that is at least 65%, at least 70%, at least 75%, at least 80%, at least 85%, at least 90%, at least 95%, at least 99%, or 100% identical to any one of SEQ ID NOs: 6, 19, 27, 35, 69, 76, 149, 156, 630, 142, 176, 1048, 1053, 1058, 1063, and 1068; and (iii) a CDR3 having an amino acid sequence that is at least 65%, at least 70%, at least 75%, at least 80%, at least 85%, at least 90%, at least 95%, at least 99%, or 100% identical to any one of SEQ ID NOs: 7, 13, 20, 28, 36, 40, 70, 77, 327, 150, 157, 332, 631, 765, 767, 143, 857, 177, 793, 1049, 1054, 1059, 1064, and 1069.

[2026] In some aspects, the antigen binding polypeptides provided herein comprise a VL1 comprising an amino acid sequence that is at least 65%, at least 70%, at least 75%, at least 80%, at least 85%, at least 90%, at least 95%, at least 99%, or 100% identical to any one of SEQ ID NOs: 4, 11, 17, 25, 33, 39, 67, 74, 147, 154, 140, and 174.

[2027] In some aspects, the antigen binding polypeptides provided herein comprise a VH1 comprising an amino acid sequence that is at least 65%, at least 70%, at least 75%, at least 80%, at least 85%, at least 90%, at least 95%, at least 99%, or 100% identical to any one of SEQ ID NOs: 8, 14, 21, 22, 29, 37, 71, 78, 151, 158, 626, 144, and 178.

[2028] In some aspects, the antigen binding polypeptides provided herein comprise a VL2 comprising an amino acid sequence that is at least 65%, at least 70%, at least 75%, at least 80%, at least 85%, at least 90%, at least 95%, at least 99%, or 100% identical to any one of SEQ ID NOs: 4, 11, 17, 25, 33, 39, 67, 74, 147, 154, 140, and 174.

[2029] In some aspects, the antigen binding polypeptides provided herein comprise a VH2 comprising an amino acid sequence that is at least 65%, at least 70%, at least 75%, at least 80%, at least 85%, at least 90%, at least 95%, at least 99%, or 100% identical to any one of SEQ ID NOs: 8, 14, 21, 22, 29, 37, 71, 78, 151, 158, 626, 144, and 178.

[2030] In some aspects, the antigen binding polypeptides provided herein comprise (i) a VL1 comprising an amino acid sequence that is at least 65%, at least 70%, at least 75%, at least 80%, at least 85%, at least 90%, at least 95%, at least 99%, or 100% identical to any one of SEQ ID NOs: 4, 11, 17, 25, 33, 39, 67, 74, 147, 154, 140, and 174; (ii) a VH1 comprising an amino acid sequence that is at least 65%, at least 70%, at least 75%, at least 80%, at least 85%, at least 90%, at least 95%, at least 99%, or 100% identical to any one of SEQ ID NOs: 8, 14, 21, 22, 29, 37, 71, 78, 151, 158, 626, 144, and 178; (iii) a VL2 comprising an amino acid sequence that is at least 65%, at least 70%, at least 75%, at least 80%, at least 85%, at least 90%, at least 95%, at least 99%, or 100% identical to any one of SEQ ID NOs: 4, 11, 17, 25, 33, 39, 67, 74, 147, 154, 140, and 174; and (iv) a VH2 comprising an amino acid sequence that is at least 65%, at least 70%, at least 75%, at least 80%, at least 85%, at least 90%, at least 95%, at least 99%, or 100% identical to any one of SEQ ID NOs: 8, 14, 21, 22, 29, 37, 71, 78, 151, 158, 626, 144, and 178.

[2031] In some aspects, the antigen binding polypeptides provided herein comprise a VL1 comprising (i) a complementarity determining region (CDR) 1 having an amino acid sequence that is at least 65%, at least 70%, at least 75%, at least 80%, at least 85%, at least 90%, at least 95%, at least 99%, or 100% identical to any one of SEQ ID NOs: 41, 48, 138, 145, 152, 159, 166, 172, 192, 770, 778, 785, 794, 801, 807, 814, 827, 836, 849, 858, 865, 878, 1045, 1050, 1060, and 1065; (ii) a CDR2 having an amino acid sequence at least 65%, at least 70%, at least 75%, at least 80%, at least 85%, at least 90%, at least 95%, at least 99%, or 100% identical to any one of amino acid sequences AAS, GAS, DAS, NNN, SDS, SYN, WAS, and DAT, or at least 65%, at least 70%, at least 75%, at least 80%, at least 85%, at least 90%, at least 95%, at least 99%, or 100% identical to any one of SEQ ID NOs: 1046, 1051, and 1061; and (iii) a CDR3 having an amino acid sequence that is at least 65%, at least 70%, at least 75%, at least 80%, at least 85%, at least 90%, at least 95%, at least 99%, or 100% identical to any one of SEQ ID NOs: 42, 139, 146, 153, 160, 167, 173, 764, 766, 768, 771, 779, 786, 792, 795, 808, 815, 821, 830, 837, 843, 850, 856, 859, 866, 872, 879, 885, and 1066.

[2032] In some aspects, the antigen binding polypeptides provided herein comprise a VL2 comprising (i) a complementarity determining region (CDR) 1 having an amino acid sequence that is at least 65%, at least 70%, at least 75%, at least 80%, at least 85%, at least 90%, at least 95%, at least 99%, or 100% identical to any one of SEQ ID NOs: 41, 48, 138, 145, 152, 159, 166, 172, 192, 770, 778, 785, 794, 801, 807, 814, 827, 836, 849, 858, 865, 878, 1045, 1050, 1060, and 1065; (ii) a CDR2 having an amino acid sequence that is at least 65%, at least 70%, at least 75%, at least 80%, at least 85%, at least 90%, at least 95%, at least 99%, or 100% identical to any one of amino acid sequences AAS, GAS, DAS, NNN, SDS, SYN, WAS, and DAT, or at least 65%, at least 70%, at least 75%, at least 80%, at least 85%, at least 90%, at least 95%, at least 99%, or 100% identical to any one of SEQ ID NOs: 1046, 1051, and 1061; and (iii) a CDR3 having an amino acid sequence that is at least 65%, at least 70%, at least 75%, at least 80%, at least 85%, at least 90%, at least 95%, at least 99%, or 100% identical to any one of SEQ ID NOs: 42, 139, 146, 153, 160, 167, 173, 764, 766, 768, 771, 779, 786, 792, 795, 808, 815, 821, 830, 837, 843, 850, 856, 859, 866, 872, 879, 885, and 1066.

[2033] In some aspects, the antigen binding polypeptides provided herein comprise a VH1 comprising (i) a CDR1 having an amino acid sequence that is at least 65%, at least 70%, at least 75%, at least 80%, at least 85%, at least 90%, at least 95%, at least 99%, or 100% identical to any one of SEQ ID NOs: 44, 133, 141, 148, 155, 162, 175, 773, 781, 788, 797, 803, 810, 817, 823, 832, 839, 845, 852, 861, 868, 874, 881, 1047, 1052, 1062, and 1067; (ii) a CDR2 having an amino acid sequence that is at least 65%, at least 70%, at least 75%, at least 80%, at least 85%, at least 90%, at least 95%, at least 99%, or 100% identical to any one of SEQ ID NOs: 6, 142, 149, 156, 163, 169, 176, 776, 782, 789, 798, 804, 811, 818, 824, 833, 840, 846, 853, 862, 869, 875, 882, 1048, 1053, 1063, and 1068; and (iii) a CDR3 having an amino acid sequence that is at least 65%, at least 70%, at least 75%, at least 80%, at least 85%, at least 90%, at least 95%, at least 99%, or 100% identical to any one of SEQ ID NOs: 46, 143, 150, 157, 164, 170, 177, 765, 767, 769, 774, 783, 790, 793, 799, 805, 812, 819, 825, 834, 841, 847, 854, 857, 863, 870, 876, 883, 886, 1049, 1054, 1064, and 1069.

[2034] In some aspects, the antigen binding polypeptides provided herein comprise a VH2 comprising (i) a CDR1 having an amino acid sequence that is at least 65%, at least 70%, at least 75%, at least 80%, at least 85%, at least 90%, at least 95%, at least 99%, or 100% identical to any one of SEQ ID NOs: 44, 133, 141, 148, 155, 162, 175, 773, 781, 788, 797, 803, 810, 817, 823, 832, 839, 845, 852, 861, 868, 874, 881, 1047, 1052, 1062, and 1067; (ii) a CDR2 having an amino acid sequence that is at least 65%, at least 70%, at least 75%, at least 80%, at least 85%, at least 90%, at least 95%, at least 99%, or 100% identical to any one of SEQ ID NOs: 6, 142, 149, 156, 163, 169, 176, 776, 782, 789, 798, 804, 811, 818, 824, 833, 840, 846, 853, 862, 869, 875, 882, 1048, 1053, 1063, and 1068; and (iii) a CDR3 having an amino acid sequence that is at least 65%, at least 70%, at least 75%, at least 80%, at least 85%, at least 90%, at least 95%, at least 99%, or 100% identical to any one of SEQ ID NOs: 46, 143, 150, 157, 164, 170, 177, 765, 767, 769, 774, 783, 790, 793, 799, 805, 812, 819, 825, 834, 841, 847, 854, 857, 863, 870, 876, 883, 886, 1049, 1054, 1064, and 1069.

[2035] In some aspects, the antigen binding polypeptides provided herein comprise a VL1 comprising (i) a complementarity determining region (CDR) 1 having an amino acid sequence that is at least 65%, at least 70%, at least 75%, at least 80%, at least 85%, at least 90%, at least 95%, at least 99%, or 100% identical to any one of SEQ ID NOs: 41, 48, 138, 145, 152, 159, 166, 172, 192, 770, 778, 785, 794, 801, 807, 814, 827, 836, 849, 858, 865, 878, 1045, 1050, 1060, and 1065; (ii) a CDR2 having an amino acid sequence that is at least 65%, at least 70%, at least 75%, at least 80%, at least 85%, at least 90%, at least 95%, at least 99%, or 100% identical to any one of amino acid sequences AAS, GAS, DAS, NNN, SDS, SYN, WAS, and DAT, or at least 65%, at least 70%, at least 75%, at least 80%, at least 85%, at least 90%, at least 95%, at least 99%, or 100% identical to any one of SEQ ID NOs: 1046, 1051, and 1061; and (iii) a CDR3 having an amino acid sequence that is at least 65%, at least 70%, at least 75%, at least 80%, at least 85%, at least 90%, at least 95%, at least 99%, or 100% identical to any one of SEQ ID NOs: 42, 139, 146, 153, 160, 167, 173, 764, 766, 768, 771, 779, 786, 792, 795, 808, 815, 821, 830, 837, 843, 850, 856, 859, 866, 872, 879, 885, and 1066; a VH1 comprising (i) a CDR1 having an amino acid sequence that is at least 65%, at least 70%, at least 75%, at least 80%, at least 85%, at least 90%, at least 95%, at least 99%, or 100% identical to any one of SEQ ID NOs: 44, 133, 141, 148, 155, 162, 175, 773, 781, 788, 797, 803, 810, 817, 823, 832, 839, 845, 852, 861, 868, 874, 881, 1047, 1052, 1062, and 1067; (ii) a CDR2 having an amino acid sequence that is at least 65%, at least 70%, at least 75%, at least 80%, at least 85%, at least 90%, at least 95%, at least 99%, or 100% identical to any one of SEQ ID NOs: 6, 142, 149, 156, 163, 169, 176, 776, 782, 789, 798, 804, 811, 818, 824, 833, 840, 846, 853, 862, 869, 875, 882, 1048, 1053, 1063, and 1068; and (iii) a CDR3 having an amino acid sequence that is at least 65%, at least 70%, at least 75%, at least 80%, at least 85%, at least 90%, at least 95%, at least 99%, or 100% identical to any one of SEQ ID NOs: 46, 143, 150, 157, 164, 170, 177, 765, 767, 769, 774, 783, 790, 793, 799, 805, 812, 819, 825, 834, 841, 847, 854, 857, 863, 870, 876, 883, 886, 1049, 1054, 1064, and 1069; a VL2 comprising (i) a complementarity determining region (CDR) 1 having an amino acid sequence that is at least 65%, at least 70%, at least 75%, at least 80%, at least 85%, at least 90%, at least 95%, at least 99%, or 100% identical to any one of SEQ ID NOs: 41, 48, 138, 145, 152, 159, 166, 172, 192, 770, 778, 785, 794, 801, 807, 814, 827, 836, 849, 858, 865, 878, 1045, 1050, 1060, and 1065; (ii) a CDR2 having an amino acid sequence that is at least 65%, at least 70%, at least 75%, at least 80%, at least 85%, at least 90%, at least 95%, at least 99%, or 100% identical to any one of amino acid sequences AAS, GAS, DAS, NNN, SDS, SYN, WAS, and DAT, or at least 65%, at least 70%, at least 75%, at least 80%, at least 85%, at least 90%, at least 95%, at least 99%, or 100% identical to any one of SEQ ID NOs: 1046, 1051, and 1061; and (iii) a CDR3 having an amino acid sequence that is at least 65%, at least 70%, at least 75%, at least 80%, at least 85%, at least 90%, at least 95%, at least 99%, or 100% identical to any one of SEQ ID NOs: 42, 139, 146, 153, 160, 167, 173, 764, 766, 768, 771, 779, 786, 792, 795, 808, 815, 821, 830, 837, 843, 850, 856, 859, 866, 872, 879, 885, and 1066; and a VH2 comprising (i) a CDR1 having an amino acid sequence that is at least 65%, at least 70%, at least 75%, at least 80%, at least 85%, at least 90%, at least 95%, at least 99%, or 100% identical to any one of SEQ ID NOs: 44, 133, 141, 148, 155, 162, 175, 773, 781, 788, 797, 803, 810, 817, 823, 832, 839, 845, 852, 861, 868, 874, 881, 1047, 1052, 1062, and 1067; (ii) a CDR2 having an amino acid sequence that is at least 65%, at least 70%, at least 75%, at least 80%, at least 85%, at least 90%, at least 95%, at least 99%, or 100% identical to any one of SEQ ID NOs: 6, 142, 149, 156, 163, 169, 176, 776, 782, 789, 798, 804, 811, 818, 824, 833, 840, 846, 853, 862, 869, 875, 882, 1048, 1053, 1063, and 1068; and (iii) a CDR3 having an amino acid sequence that is at least 65%, at least 70%, at least 75%, at least 80%, at least 85%, at least 90%, at least 95%, at least 99%, or 100% identical to any one of SEQ ID NOs: 46, 143, 150, 157, 164, 170, 177, 765, 767, 769, 774, 783, 790, 793, 799, 805, 812, 819, 825, 834, 841, 847, 854, 857, 863, 870, 876, 883, 886, 1049, 1054, 1064, and 1069.

[2036] In some aspects, the antigen binding polypeptides provided herein comprise a VL1 comprising an amino acid sequence that is at least 65%, at least 70%, at least 75%, at least 80%, at least 85%, at least 90%, at least 95%, at least 99%, or 100% identical to any one of SEQ ID NOs: 43, 140, 147, 154, 161, 168, 174, 772, 780, 787, 796, 802, 809, 816, 822, 831, 838, 844, 851, 860, 867, 873, and 880.

[2037] In some aspects, the antigen binding polypeptides provided herein comprise a VH1 comprising an amino acid sequence that is at least 65%, at least 70%, at least 75%, at least 80%, at least 85%, at least 90%, at least 95%, at least 99%, or 100% identical to any one of SEQ ID NOs: 144, 151, 158, 165, 171, 178, 775, 777, 784, 791, 800, 806, 813, 820, 826, 835, 842, 848, 855, 864, 871, 877, and 884.

[2038] In some aspects, the antigen binding polypeptides provided herein comprise a VL2 comprising an amino acid sequence that is at least 65%, at least 70%, at least 75%, at least 80%, at least 85%, at least 90%, at least 95%, at least 99%, or 100% identical to any one of SEQ ID NOs: 43, 140, 147, 154, 161, 168, 174, 772, 780, 787, 796, 802, 809, 816, 822, 831, 838, 844, 851, 860, 867, 873, and 880.

[2039] In some aspects, the antigen binding polypeptides provided herein comprise a VH2 comprising an amino acid sequence that is at least 65%, at least 70%, at least 75%, at least 80%, at least 85%, at least 90%, at least 95%, at least 99%, or 100% identical to any one of SEQ ID NOs: 144, 151, 158, 165, 171, 178, 775, 777, 784, 791, 800, 806, 813, 820, 826, 835, 842, 848, 855, 864, 871, 877, and 884.

[2040] In some aspects, the antigen binding polypeptides provided herein comprise (i) a VL1 comprising an amino acid sequence that is at least 65%, at least 70%, at least 75%, at least 80%, at least 85%, at least 90%, at least 95%, at least 99%, or 100% identical to any one of SEQ ID NOs: 43, 140, 147, 154, 161, 168, 174, 772, 780, 787, 796, 802, 809, 816, 822, 831, 838, 844, 851, 860, 867, 873, and 880; (ii) a VH1 comprising an amino acid sequence that is at least 65%, at least 70%, at least 75%, at least 80%, at least 85%, at least 90%, at least 95%, at least 99%, or 100% identical to any one of SEQ ID NOs: 144, 151, 158, 165, 171, 178, 775, 777, 784, 791, 800, 806, 813, 820, 826, 835, 842, 848, 855, 864, 871, 877, and 884; (iii) a VL2 comprising an amino acid sequence that is at least 65%, at least 70%, at least 75%, at least 80%, at least 85%, at least 90%, at least 95%, at least 99%, or 100% identical to any one of SEQ ID NOs: 43, 140, 147, 154, 161, 168, 174, 772, 780, 787, 796, 802, 809, 816, 822, 831, 838, 844, 851, 860, 867, 873, and 880; and (iv) a VH2 comprising an amino acid sequence that is at least 65%, at least 70%, at least 75%, at least 80%, at least 85%, at least 90%, at least 95%, at least 99%, or 100% identical to any one of SEQ ID NOs: 144, 151, 158, 165, 171, 178, 775, 777, 784, 791, 800, 806, 813, 820, 826, 835, 842, 848, 855, 864, 871, 877, and 884.

[2041] In some aspects, at least one of VL1 or VL2 comprised in the antigen binding polypeptides provided herein comprises (i) a complementarity determining region (CDR) 1 having an amino acid sequence that is at least 65%, at least 70%, at least 75%, at least 80%, at least 85%, at least 90%, at least 95%, at least 99%, or 100% identical to SEQ ID NO: 145 or 1050; (ii) a CDR2 having an amino acid sequence at least 65%, at least 70%, at least 75%, at least 80%, at least 85%, at least 90%, at least 95%, at least 99%, or 100% identical to SEQ ID NO: 1051 or an amino acid sequence that is at least 65%, at least 70%, at least 75%, at least 80%, at least 85%, at least 90%, at least 95%, at least 99%, or 100% identical to amino acid sequence AAS; and (iii) a CDR3 having an amino acid sequence that is at least 65%, at least 70%, at least 75%, at least 80%, at least 85%, at least 90%, at least 95%, at least 99%, or 100% identical to SEQ ID NO: 146 or 764.

[2042] In some aspects, at least one of VH1 or VH2 comprised in the antigen binding polypeptides provided herein comprises (i) a complementarity determining region (CDR) 1 having an amino acid sequence that is at least 65%, at least 70%, at least 75%, at least 80%, at least 85%, at least 90%, at least 95%, at least 99%, or 100% identical to SEQ ID NO: 148 or 1052; (ii) a CDR2 having an amino acid sequence that is at least 65%, at least 70%, at least 75%, at least 80%, at least 85%, at least 90%, at least 95%, at least 99%, or 100% identical to SEQ ID NO: 149 or 1053; and (iii) a CDR3 having an amino acid sequence that is at least 65%, at least 70%, at least 75%, at least 80%, at least 85%, at least 90%, at least 95%, at least 99%, or 100% identical to SEQ ID NO: 150, 765, or 1054.

[2043] In some aspects, at least one of VL1 or VL2 comprised in the antigen binding polypeptides provided herein comprises (i) a complementarity determining region (CDR) 1 having an amino acid sequence that is at least 65%, at least 70%, at least 75%, at least 80%, at least 85%, at least 90%, at least 95%, at least 99%, or 100% identical to SEQ ID NO: 145 or 1050; (ii) a CDR2 having an amino acid sequence at least 65%, at least 70%, at least 75%, at least 80%, at least 85%, at least 90%, at least 95%, at least 99%, or 100% identical to SEQ ID NO: 1051 or an amino acid sequence that is at least 65%, at least 70%, at least 75%, at least 80%, at least 85%, at least 90%, at least 95%, at least 99%, or 100% identical to amino acid sequence AAS; and (iii) a CDR3 having an amino acid sequence that is at least 65%, at least 70%, at least 75%, at least 80%, at least 85%, at least 90%, at least 95%, at least 99%, or 100% identical to SEQ ID NO: 146 or 764; and at least one of VH1 or VH2 comprised in the antigen binding polypeptides provided herein comprises (iv) a complementarity determining region (CDR) 1 having an amino acid sequence that is at least 65%, at least 70%, at least 75%, at least 80%, at least 85%, at least 90%, at least 95%, at least 99%, or 100% identical to SEQ ID NO: 148 or 1052; (v) a CDR2 having an amino acid sequence that is at least 65%, at least 70%, at least 75%, at least 80%, at least 85%, at least 90%, at least 95%, at least 99%, or 100% identical to SEQ ID NO: 149 or 1053; and (vi) a CDR3 having an amino acid sequence that is at least 65%, at least 70%, at least 75%, at least 80%, at least 85%, at least 90%, at least 95%, at least 99%, or 100% identical to SEQ ID NO: 150, 765, or 1054.

[2044] In some aspects, at least one of VL1 or VL2 comprised in the antigen binding polypeptides provided herein comprises an amino acid sequence that is at least 65%, at least 70%, at least 75%, at least 80%, at least 85%, at least 90%, at least 95%, at least 99%, or 100% identical to SEQ ID NO: 147.

[2045] In some aspects, at least one of VH1 or VH2 comprised in the antigen binding polypeptides provided herein comprises an amino acid sequence that is at least 65%, at least 70%, at least 75%, at least 80%, at least 85%, at least 90%, at least 95%, at least 99%, or 100% identical to SEQ ID NO: 151.

[2046] In some aspects, (i) at least one of VL1 or VL2 comprised in the antigen binding polypeptides provided herein comprises an amino acid sequence that is at least 65%, at least 70%, at least 75%, at least 80%, at least 85%, at least 90%, at least 95%, at least 99%, or 100% identical to SEQ ID NO: 147, and (ii) at least one of VH1 or VH2 comprised in the antigen binding polypeptides provided herein comprises an amino acid sequence that is at least 65%, at least 70%, at least 75%, at least 80%, at least 85%, at least 90%, at least 95%, at least 99%, or 100% identical to SEQ ID NO: 151.

[2047] In some aspects, the antigen binding polypeptides provided herein comprise a VL1 comprising (i) a complementarity determining region (CDR) 1 having an amino acid sequence that is at least 65%, at least 70%, at least 75%, at least 80%, at least 85%, at least 90%, at least 95%, at least 99%, or 100% identical to SEQ ID NO: 145 or 1050; (ii) a CDR2 having an amino acid sequence at least 65%, at least 70%, at least 75%, at least 80%, at least 85%, at least 90%, at least 95%, at least 99%, or 100% identical to SEQ ID NO: 1051 or an amino acid sequence that is at least 65%, at least 70%, at least 75%, at least 80%, at least 85%, at least 90%, at least 95%, at least 99%, or 100% identical to amino acid sequence AAS; and (iii) a CDR3 having an amino acid sequence that is at least 65%, at least 70%, at least 75%, at least 80%, at least 85%, at least 90%, at least 95%, at least 99%, or 100% identical to SEQ ID NO: 146 or 764; a VH1 comprising (iv) a complementarity determining region (CDR) 1 having an amino acid sequence that is at least 65%, at least 70%, at least 75%, at least 80%, at least 85%, at least 90%, at least 95%, at least 99%, or 100% identical to SEQ ID NO: 148 or 1052; (v) a CDR2 having an amino acid sequence that is at least 65%, at least 70%, at least 75%, at least 80%, at least 85%, at least 90%, at least 95%, at least 99%, or 100% identical to SEQ ID NO: 149 or 1053; and (vi) a CDR3 having an amino acid sequence that is at least 65%, at least 70%, at least 75%, at least 80%, at least 85%, at least 90%, at least 95%, at least 99%, or 100% identical to SEQ ID NO: 150, 765, or 1054; a VL2 comprising (vii) a complementarity determining region (CDR) 1 having an amino acid sequence that is at least 65%, at least 70%, at least 75%, at least 80%, at least 85%, at least 90%, at least 95%, at least 99%, or 100% identical to any one of SEQ ID NOs: 1, 9, 15, 23, 30, 41, 48, 55, 58, 65, 72, 79, 86, 93, 99, 105, 112, 119, 130, 138, 145, 152, 159, 166, 172, 179, 186, 192, 199, 205, 212, 219, 226, 232, 324, 627, 640, 650, 659, 676, 687, 695, 703, 712, 770, 778, 785, 794, 801, 807, 814, 827, 836, 849, 858, 865, 878, 1045, 1050, 1055, 1060, and 1065; (viii) a CDR2 having an amino acid sequence at least 65%, at least 70%, at least 75%, at least 80%, at least 85%, at least 90%, at least 95%, at least 99%, or 100% identical to any one of SEQ ID NOs: 2, 31, 628, 641, 677, 1046, 1051, 1056, and 1061; or at least 65%, at least 70%, at least 75%, at least 80%, at least 85%, at least 90%, at least 95%, at least 99%, or 100% identical to any one of amino acid sequences AAS, GAS, LGS, GTN, GTN, SAS, SDS, DNT, EVT, DAS, DVT, RNS, DVS, EDS, DDS, KDS, VAS, WAS, YTS, EVS, NNN, SYN, and DAT; and (ix) a CDR3 having an amino acid sequence at least 65%, at least 70%, at least 75%, at least 80%, at least 85%, at least 90%, at least 95%, at least 99%, or 100% identical to any one of SEQ ID NOs: 3, 10, 16, 24, 32, 38, 42, 49, 59, 66, 73, 80, 87, 94, 100, 106, 113, 120, 126, 131, 139, 146, 153, 160, 167, 173, 180, 187, 193, 200, 206, 213, 220, 227, 233, 239, 242, 246, 249, 256, 283, 285, 287, 288, 290, 292, 294, 296, 301, 304, 306, 309, 311, 313, 316, 325, 326, 329, 642, 651, 660, 668, 678, 651, 696, 704, 713, 764, 766, 768, 771, 779, 786, 792, 795, 808, 815, 821, 830, 837, 843, 850, 856, 859, 866, 872, 879, 885, and 1066; and a VH2 comprising (x) a CDR1 having an amino acid sequence at least 65%, at least 70%, at least 75%, at least 80%, at least 85%, at least 90%, at least 95%, at least 99%, or 100% identical to any one of SEQ ID NOs: 5, 12, 18, 26, 34, 44, 51, 61, 68, 75, 82, 89, 96, 102, 108, 115, 122, 133, 141, 148, 155, 162, 175, 182, 189, 195, 202, 208, 215, 222, 229, 235, 318, 629, 645, 654, 663, 671, 682, 690, 699, 707, 716, 773, 781, 788, 797, 803, 810, 817, 823, 832, 839, 845, 852, 861, 868, 874, 881, 1047, 1052, 1057, 1062, and 1067; (xi) a CDR2 having an amino acid sequence at least 65%, at least 70%, at least 75%, at least 80%, at least 85%, at least 90%, at least 95%, at least 99%, or 100% identical to any one of SEQ ID NOs: 6, 19, 27, 35, 45, 52, 56, 62, 69, 76, 83, 90, 109, 116, 123, 134, 142, 149, 156, 163, 169, 176, 183, 196, 209, 216, 223, 236, 273, 319, 328, 630, 646, 655, 664, 672, 683, 691, 708, 776, 782, 789, 798, 804, 811, 818, 824, 833, 840, 846, 853, 862, 869, 875, 882, 1048, 1053, 1058, 1063, and 1068; and (xii) a CDR3 having an amino acid sequence at least 65%, at least 70%, at least 75%, at least 80%, at least 85%, at least 90%, at least 95%, at least 99%, or 100% identical to any one of SEQ ID NOs: 7, 13, 20, 28, 36, 40, 46, 53, 63, 70, 77, 84, 91, 97, 103, 110, 117, 124, 128, 135, 143, 150, 157, 164, 170, 177, 184, 190, 197, 203, 210, 217, 224, 230, 237, 241, 244, 248, 253, 257, 259, 261, 263, 265, 267, 269, 271, 274, 276, 278, 281, 297, 320, 322, 327, 330, 332, 631, 647, 656, 665, 673, 684, 692, 700, 709, 717, 765, 767, 769, 774, 783, 790, 793, 799, 805, 812, 819, 825, 834, 841, 847, 854, 857, 863, 870, 876, 883, 886, 1049, 1054, 1059, 1064, and 1069.

[2048] In some aspects, the antigen binding polypeptides provided herein comprise (i) a VL1 comprising an amino acid sequence that is at least 65%, at least 70%, at least 75%, at least 80%, at least 85%, at least 90%, at least 95%, at least 99%, or 100% identical to SEQ ID NO: 147; (ii) a VH1 comprising an amino acid sequence that is at least 65%, at least 70%, at least 75%, at least 80%, at least 85%, at least 90%, at least 95%, at least 99%, or 100% identical to SEQ ID NO: 151; (iii) a VL2 comprising an amino acid sequence that is at least 65%, at least 70%, at least 75%, at least 80%, at least 85%, at least 90%, at least 95%, at least 99%, or 100% identical to any one of SEQ ID NOs: 4, 11, 17, 25, 33, 39, 43, 50, 60, 67, 74, 81, 88, 95, 101, 107, 114, 121, 127, 132, 140, 147, 154, 161, 168, 174, 181, 188, 194, 201, 207, 214, 221, 228, 234, 240, 243, 247, 250, 251, 252, 255, 284, 286, 289, 291, 293, 295, 299, 300, 302, 303, 305, 307, 308, 310, 312, 314, 315, 317, 323, 639, 649, 658, 667, 675, 686, 694, 702, 711, 772, 780, 787, 796, 802, 809, 816, 822, 831, 838, 844, 851, 860, 867, 873, 880, and 988; and (iv) a VH2 comprising an amino acid sequence that is at least 65%, at least 70%, at least 75%, at least 80%, at least 85%, at least 90%, at least 95%, at least 99%, or 100% identical to any one of SEQ ID NOs: 8, 14, 21, 22, 29, 37, 47, 54, 57, 64, 71, 78, 85, 92, 98, 104, 111, 118, 125, 129, 136, 137, 144, 151, 158, 165, 171, 178, 185, 191, 198, 204, 211, 218, 225, 231, 238, 245, 254, 258, 260, 262, 264, 266, 268, 270, 272, 275, 277, 279, 280, 282, 298, 321, 331, 626, 644, 653, 662, 670, 681, 689, 698, 706, 715, 775, 777, 784, 791, 800, 806, 813, 820, 826, 835, 842, 848, 855, 864, 871, 877, and 884.

[2049] In some aspects, the antigen binding polypeptides provided herein comprise a VL1 comprising (i) a complementarity determining region (CDR) 1 having an amino acid sequence that is at least 65%, at least 70%, at least 75%, at least 80%, at least 85%, at least 90%, at least 95%, at least 99%, or 100% identical to SEQ ID NO: 145 or 1050; (ii) a CDR2 having an amino acid sequence at least 65%, at least 70%, at least 75%, at least 80%, at least 85%, at least 90%, at least 95%, at least 99%, or 100% identical to SEQ ID NO: 1051 or an amino acid sequence that is at least 65%, at least 70%, at least 75%, at least 80%, at least 85%, at least 90%, at least 95%, at least 99%, or 100% identical to amino acid sequence AAS; and (iii) a CDR3 having an amino acid sequence that is at least 65%, at least 70%, at least 75%, at least 80%, at least 85%, at least 90%, at least 95%, at least 99%, or 100% identical to SEQ ID NO: 146 or 764; a VH1 comprising (iv) a complementarity determining region (CDR) 1 having an amino acid sequence that is at least 65%, at least 70%, at least 75%, at least 80%, at least 85%, at least 90%, at least 95%, at least 99%, or 100% identical to SEQ ID NO: 148 or 1052; (v) a CDR2 having an amino acid sequence that is at least 65%, at least 70%, at least 75%, at least 80%, at least 85%, at least 90%, at least 95%, at least 99%, or 100% identical to SEQ ID NO: 149 or 1053; and (vi) a CDR3 having an amino acid sequence that is at least 65%, at least 70%, at least 75%, at least 80%, at least 85%, at least 90%, at least 95%, at least 99%, or 100% identical to SEQ ID NO: 150, 765, or 1054; a VL2 comprising (vii) a complementarity determining region (CDR) 1 having an amino acid sequence that is at least 65%, at least 70%, at least 75%, at least 80%, at least 85%, at least 90%, at least 95%, at least 99%, or 100% identical to any one of SEQ ID NOs: 1, 9, 15, 23, 30, 65, 72, 145, 152, 324, 627, 138, 172, 1045, 1050, 1055, 1060, and 1065; (viii) a CDR2 having an amino acid sequence at least 65%, at least 70%, at least 75%, at least 80%, at least 85%, at least 90%, at least 95%, at least 99%, or 100% identical to any one of SEQ ID NOs: 2, 31, 628, 1046, 1051, 1056, and 1061, or at least 65%, at least 70%, at least 75%, at least 80%, at least 85%, at least 90%, at least 95%, at least 99%, or 100% identical to any one of amino acid sequences GAS, LGS, GTN, SAS, SDS, AAS, DAS, and DNT; and (ix) a CDR3 having an amino acid sequence at least 65%, at least 70%, at least 75%, at least 80%, at least 85%, at least 90%, at least 95%, at least 99%, or 100% identical to any one of SEQ ID NOs: 3, 10, 16, 24, 32, 38, 66, 73, 146, 153, 325, 326, 764, 766, 139, 856, 173, 792, and 1066; and a VH2 comprising (x) a CDR1 having an amino acid sequence at least 65%, at least 70%, at least 75%, at least 80%, at least 85%, at least 90%, at least 95%, at least 99%, or 100% identical to any one of SEQ ID NOs: 5, 12, 18, 26, 34, 68, 75, 148, 155, 629, 141, 175, 1047, 1052, 1057, 1062, and 1067; (xi) a CDR2 having an amino acid sequence at least 65%, at least 70%, at least 75%, at least 80%, at least 85%, at least 90%, at least 95%, at least 99%, or 100% identical to any one of SEQ ID NOs: 6, 19, 27, 35, 69, 76, 149, 156, 630, 142, 176, 1048, 1053, 1058, 1063, and 1068; (xii) a CDR3 having an amino acid sequence at least 65%, at least 70%, at least 75%, at least 80%, at least 85%, at least 90%, at least 95%, at least 99%, or 100% identical to any one of SEQ ID NOs: 7, 13, 20, 28, 36, 40, 70, 77, 327, 150, 157, 332, 631, 765, 767, 143, 857, 177, 793, 1049, 1054, 1059, 1064, and 1069.

[2050] In some aspects, the antigen binding polypeptides provided herein comprise (i) a VL1 comprising an amino acid sequence that is at least 65%, at least 70%, at least 75%, at least 80%, at least 85%, at least 90%, at least 95%, at least 99%, or 100% identical to SEQ ID NO: 147; (ii) a VH1 comprising an amino acid sequence that is at least 65%, at least 70%, at least 75%, at least 80%, at least 85%, at least 90%, at least 95%, at least 99%, or 100% identical to SEQ ID NO: 151; (iii) a VL2 comprising an amino acid sequence that is at least 65%, at least 70%, at least 75%, at least 80%, at least 85%, at least 90%, at least 95%, at least 99%, or 100% identical to any one of SEQ ID NOs: 4, 11, 17, 25, 33, 39, 67, 74, 147, 154, 140, and 174; and (iv) a VH2 comprising an amino acid sequence that is at least 65%, at least 70%, at least 75%, at least 80%, at least 85%, at least 90%, at least 95%, at least 99%, or 100% identical to any one of SEQ ID NOs: 8, 14, 21, 22, 29, 37, 71, 78, 151, 158, 626, 144, and 178.

[2051] In some aspects, the antigen binding polypeptides provided herein further comprise an Fc region. In some aspects, the antigen binding polypeptides provided herein further comprise an Fc region at the carboxy-terminus. In some aspects, the Fc region comprises an immunoglobulin heavy chain constant region 2 (CH2) and/or an immunoglobulin heavy chain constant region 3 (CH3). In some aspects, the Fc region further comprises an immunoglobulin hinge (i.e., a hinge region). In some aspects, the hinge region comprises an amino acid sequence at least 65%, at least 70%, at least 75%, at least 80%, at least 85%, at least 90%, at least 95%, at least 99%, or 100% identical to any one of SEQ ID NOs: 635, 636, 1072, 1073, or 1074. In some aspects, the Fc region comprises a CH2 and a CH3. In some aspects, the CH2 comprises an amino acid sequence that is at least 65%, at least 70%, at least 75%, at least 80%, at least 85%, at least 90%, at least 95%, at least 99%, or 100% identical to any one of SEQ ID NOs: 1075-1078. In some aspects, the CH3 comprises an amino acid sequence that is at least 65%, at least 70%, at least 75%, at least 80%, at least 85%, at least 90%, at least 95%, at least 99%, or 100% identical to any one of SEQ ID NOs: 1079-1085. In some aspects, the Fc region comprises an amino acid sequence that is at least 65%, at least 70%, at least 75%, at least 80%, at least 85%, at least 90%, at least 95%, at least 99%, or 100% identical to any one of SEQ ID NOs: 376-380.

[2052] In some aspects, the Fc region comprises one or more amino acid substitutions. In some aspects, the one or more amino acid substitutions comprise one or more half-life extension amino acid substitutions. In some aspects, the one or more half-life extension amino acid substitutions comprise one or more of amino acid substitutions M428L, N434A, N434S, L234F, L235E, P331S, M252Y, S254T, and T256E, or equivalent thereof, based on the EU numbering scheme. In some aspects, the one or more half-life extension amino acid substitutions comprise a LA (M428L and N434A, or equivalent thereof, based on the EU numbering scheme) amino acid substitution. In some aspects, the one or more half-life extension amino acid substitutions comprise a LS (M428L and N434S, or equivalent thereof, based on the EU numbering scheme) amino acid substitution. In some aspects, the one or more half-life extension amino acid substitutions comprise L234F and L235E, or equivalent thereof (based on the EU numbering scheme) amino acid substitutions. In some aspects, the one or more half-life extension amino acid substitutions comprise a TM (L234F, L235E, and P331S, or equivalent thereof, based on the EU numbering scheme) amino acid substitution. In some aspects, the one or more half-life extension amino acid substitutions comprise a YTE (M252Y, S254T, and T256E, or equivalent thereof, based on the EU numbering scheme) amino acid substitution.

[2053] In some aspects, the Fc region comprises at least one knob-into-hole modification. In some aspects, the antigen binding polypeptides disclosed herein are comprised in IgG1 or IgG4 antibodies or antigen binding fragments thereof. In some aspects, the knob-into-hole modification comprises one or more of knob substitutions of S354C and T366W, or equivalent thereof, and/or one or more of hole substitutions of Y349C, T366S, L368A, Y407V, or equivalent thereof, or a combination thereof, based on the EU numbering scheme. In some aspects, the Fc region comprises a knob-into-hole modification comprising knob substitutions of S354C and T366W, or equivalent thereof, and/or hole substitutions of Y349C, T366S, L368A, and Y407V, or equivalent thereof, and/or a half-life extension amino acid substitution comprising: a LA (M428L and N434A, or equivalent thereof, based on the EU numbering scheme) amino acid substitution, a LS (M428L and N434S, or equivalent thereof, based on the EU numbering scheme) amino acid substitution. L234F and L235E, or equivalent thereof (based on the EU numbering scheme) amino acid substitutions, a TM (L234F, L235E, and P331S, or equivalent thereof, based on the EU numbering scheme) amino acid substitution, a YTE (M252Y, S254T, and T256E, or equivalent thereof, based on the EU numbering scheme) amino acid substitution, or any combination thereof.

[2054] In some aspects, the Fc region comprises knob substitutions of S354C and T366W, or equivalent thereof, and a half-life extension amino acid substitution comprising: a LA (M428L and N434A, or equivalent thereof, based on the EU numbering scheme) amino acid substitution, a LS (M428L and N434S, or equivalent thereof, based on the EU numbering scheme) amino acid substitution. L234F and L235E, or equivalent thereof (based on the EU numbering scheme) amino acid substitutions, a TM (L234F, L235E, and P331S, or equivalent thereof, based on the EU numbering scheme) amino acid substitution, a YTE (M252Y, S254T, and T256E, or equivalent thereof, based on the EU numbering scheme) amino acid substitution, or any combination thereof.

[2055] In some aspects, the Fc region comprises hole substitutions of Y349C, T366S, L368A, and Y407V, or equivalent thereof, and a half-life extension amino acid substitution comprising: a LA (M428L and N434A, or equivalent thereof, based on the EU numbering scheme) amino acid substitution, a LS (M428L and N434S, or equivalent thereof, based on the EU numbering scheme) amino acid substitution. L234F and L235E, or equivalent thereof (based on the EU numbering scheme) amino acid substitutions, a TM (L234F, L235E, and P331S, or equivalent thereof, based on the EU numbering scheme) amino acid substitution, a YTE (M252Y, S254T, and T256E, or equivalent thereof, based on the EU numbering scheme) amino acid substitution, or any combination thereof.

[2056] In some aspects, the antigen binding polypeptides disclosed herein comprise one or more Fc effector function knockout mutation. In some aspects, the antigen binding polypeptides disclosed herein are comprised in IgG1 or IgG4 antibodies or antigen binding fragments thereof. In some aspects, the Fc effector function knockout mutation is L234A, L235A, P239A, or equivalent thereof, or a combination thereof, based on the EU numbering scheme.

[2057] In some aspects, the antigen binding polypeptides disclosed herein comprise a mutation at a glycosylation site. In some aspects, the mutation at a glycosylation site is a mutation at an N-glycosylation site. In some aspects, the antigen binding polypeptides comprise a VH comprising a mutation at a glycosylation site. In some aspects, the mutation at a glycosylation site is a mutation at an N-glycosylation site. In some aspects, the mutation at an N-glycosylation site is at amino acid N62 of the VH region or equivalent thereof. In some aspects, the mutation at an N-glycosylation site at amino acid N62 is N62Q or N62S, or equivalent thereof.

[2058] In some aspects, the antigen binding polypeptides disclosed herein, comprise one or more optional linkers. The one or more optional linkers are indicated herein as Ln, wherein n is an integer, and the integer next to each L indicates each L comprised in the antigen binding polypeptides disclosed herein. For example, if an antigen binding polypeptide disclosed herein comprises two linkers, the first linker from N-terminus to C-terminus is herein indicated as L1, and the second linker from N-terminus to C-terminus is herein indicated as L2. In some aspects, any one of the optional linkers each independently have a length of from 0 amino acids to about 50 amino acids. In some aspects, any one of the optional linkers each independently have a length of from 5 amino acids to about 40 amino acids.

[2059] In some aspects, any one of the optional linkers are non-immunogenic. In some aspects, any one of the optional linkers do not contain a consensus T cell epitope.

[2060] In some aspects, any of Ln comprises an amino acid sequence of G or A, or an amino acid sequence at least 65%, at least 70%, at least 75%, at least 80%, at least 85%, at least 90%, at least 95%, at least 99%, or 100% identical to amino acid sequence GSS or ASG, or an amino acid sequence at least 65%, at least 70%, at least 75%, at least 80%, at least 85%, at least 90%, at least 95%, at least 99%, or 100% identical to any one of SEQ ID NOs: 333-373 and 967-971. In some aspects, Ln comprises an amino acid sequence at least 65%, at least 70%, at least 75%, at least 80%, at least 85%, at least 90%, at least 95%, at least 99%, or 100% identical to any one of SEQ ID NOs: 333-345 and 967-971.

[2061] In some aspects, the antigen binding polypeptide is selected from any one of the more specific aspects provided herein for an antigen binding polypeptide in an antigen binding polypeptide complex having no more than three polypeptide chains.

[2062] In some aspects, the antigen binding polypeptide further comprises one or more immunoglobulin heavy chain constant region 1 (CH1) and/or one or more immunoglobulin light chain constant region (CL) between any one of the variable regions and/or optional amino acid linkers (e.g., between VL1 and L1, between L1 and VH1, between VH1 and L2, between L2 and VL1, between L1 and VL2, between VL2 and L2, between L2 and VH2, between VH2 and L3, between L3 and VH1, between VL1 and L1, between L1 and VH2, between VH2 and L2, between. L2 and VL2, between VL2 and L3, between L3 and VH1, between VH1 and L4, between L4 and VH2, between VH2 and L5, between L5 and VL2, between VL2 and L6, between L6 and VL1, between VH1 and L4, between L4 and VL2, between L4 and VL2, between VL2 and L5, between L5 and VH2, between VH2 and L6, or between L6 and VL1).

[2063] In some aspects, the antigen binding polypeptide is selected from any one of the more specific aspects provided herein for an antigen binding polypeptide in an antigen binding polypeptide complex having no more than three polypeptide chains, and further comprises one or more immunoglobulin heavy chain constant region 1 (CH1) and/or one or more immunoglobulin light chain constant region (CL) between any one of the variable regions and/or optional amino acid linkers (e.g., between VL1 and L1, between L1 and VH1, between VH1 and L2, between L2 and VL1, between L1 and VL2, between VL2 and L2, between L2 and VH2, between VH2 and L3, between L3 and VH1, between VL1 and L1, between L1 and VH2, between VH2 and L2, between. L2 and VL2, between VL2 and L3, between L3 and VH1, between VH1 and L4, between L4 and VH2, between VH2 and L5, between L5 and VL2, between VL2 and L6, between L6 and VL1, between VH1 and L4, between L4 and VL2, between L4 and VL2, between VL2 and L5, between L5 and VH2, between VH2 and L6, or between L6 and VL1).

[2064] In some aspects, the antigen binding polypeptides provided herein have a structure, from amino-terminus to carboxy-terminus, represented by:
[2065] VL1-L1-VH1 or VH1-L1-VL1;
[2066] wherein:
[2067] VL1 is a first immunoglobulin light chain variable region that specifically binds to a severe acute respiratory syndrome coronavirus 2 (SARS-CoV-2) protein;
[2068] VH1 is a first immunoglobulin heavy chain variable region that specifically binds to a SARS-CoV-2 protein; and
[2069] L1 is an optional amino acid linker.

[2070] In any aspect shown herein as a structure from amino terminus to carboxy terminus, and with binding pairs selected from VL and/or VH or other structural regions such as CH2, CH3, when shown without a specific linker such as L1, L2, etc., such linkers are optionally present in such structures between each designated subsequence VL, VH, etc.

[2071] In some aspects, the antigen binding polypeptides provided herein comprise a VL1 comprising (i) a complementarity determining region (CDR) 1 having an amino acid sequence that is at least 65%, at least 70%, at least 75%, at least 80%, at least 85%, at least 90%, at least 95%, at least 99%, or 100% identical to any one of SEQ ID NOs: 1, 9, 15, 23, 30, 41, 48, 55, 58, 65, 72, 79, 86, 93, 99, 105, 112, 119, 130, 138, 145, 152, 159, 166, 172, 179, 186, 192, 199, 205, 212, 219, 226, 232, 324, 627, 640, 650, 659, 676, 687, 695, 703, 712, 770, 778, 785, 794, 801, 807, 814, 827, 836, 849, 858, 865, 878, 1045, 1050, 1055, 1060, and 1065; (ii) a CDR2 having an amino acid sequence that is at least 65%, at least 70%, at least 75%, at least 80%, at least 85%, at least 90%, at least 95%, at least 99%, or 100% identical to any one of SEQ ID NOs: 2, 31, 628, 641, 677, 1046, 1051, 1056, and 1061; or at least 65%, at least 70%, at least 75%, at least 80%, at least 85%, at least 90%, at least 95%, at least 99%, or 100% identical to any one of amino acid sequences AAS, GAS, LGS, GTN, GTN, SAS, SDS, DNT, EVT, DAS, DVT, RNS, DVS, EDS, DDS, KDS, VAS, WAS, YTS, EVS, NNN, SYN, and DAT; and (iii) a CDR3 having an amino acid sequence that is at least 65%, at least 70%, at least 75%, at least 80%, at least 85%, at least 90%, at least 95%, at least 99%, or 100% identical to any one of SEQ ID NOs: 3, 10, 16, 24, 32, 38, 42, 49, 59, 66, 73, 80, 87, 94, 100, 106, 113, 120, 126, 131, 139, 146, 153, 160, 167, 173, 180, 187, 193, 200, 206, 213, 220, 227, 233, 239, 242, 246, 249, 256, 283, 285, 287, 288, 290, 292, 294, 296, 301, 304, 306, 309, 311, 313, 316, 325, 326, 329, 642, 651, 660, 668, 678, 651, 696, 704, 713, 764, 766, 768, 771, 779, 786, 792, 795, 808, 815, 821, 830, 837, 843, 850, 856, 859, 866, 872, 879, 885, and 1066.

[2072] In some aspects, the antigen binding polypeptides provided herein comprise a VH1 comprising (i) a CDR1 having an amino acid sequence that is at least 65%, at least 70%, at least 75%, at least 80%, at least 85%, at least 90%, at least 95%, at least 99%, or 100% identical to any one of SEQ ID NOs: 5, 12, 18, 26, 34, 44, 51, 61, 68, 75, 82, 89, 96, 102, 108, 115, 122, 133, 141, 148, 155, 162, 175, 182, 189, 195, 202, 208, 215, 222, 229, 235, 318, 629, 645, 654, 663, 671, 682, 690, 699, 707, 716, 773, 781, 788, 797, 803, 810, 817, 823, 832, 839, 845, 852, 861, 868, 874, 881, 1047, 1052, 1057, 1062, and 1067; (ii) a CDR2 having an amino acid sequence that is at least 65%, at least 70%, at least 75%, at least 80%, at least 85%, at least 90%, at least 95%, at least 99%, or 100% identical to any one of SEQ ID NOs: 6, 19, 27, 35, 45, 52, 56, 62, 69, 76, 83, 90, 109, 116, 123, 134, 142, 149, 156, 163, 169, 176, 183, 196, 209, 216, 223, 236, 273, 319, 328, 630, 646, 655, 664, 672, 683, 691, 708, 776, 782, 789, 798, 804, 811, 818, 824, 833, 840, 846, 853, 862, 869, 875, 882, 1048, 1053, 1058, 1063, and 1068; and (iii) a CDR3 having an amino acid sequence that is at least 65%, at least 70%, at least 75%, at least 80%, at least 85%, at least 90%, at least 95%, at least 99%, or 100% identical to any one of SEQ ID NOs: 7, 13, 20, 28, 36, 40, 46, 53, 63, 70, 77, 84, 91, 97, 103, 110, 117, 124, 128, 135, 143, 150, 157, 164, 170, 177, 184, 190, 197, 203, 210, 217, 224, 230, 237, 241, 244, 248, 253, 257, 259, 261, 263, 265, 267, 269, 271, 274, 276, 278, 281, 297, 320, 322, 327, 330, 332, 631, 647, 656, 665, 673, 684, 692, 700, 709, 717, 765, 767, 769, 774, 783, 790, 793, 799, 805, 812, 819, 825, 834, 841, 847, 854, 857, 863, 870, 876, 883, 886, 1049, 1054, 1059, 1064, and 1069.

[2073] In some aspects, the antigen binding polypeptides provided herein comprise a VL1 comprising (i) a complementarity determining region (CDR) 1 having an amino acid sequence that is at least 65%, at least 70%, at least 75%, at least 80%, at least 85%, at least 90%, at least 95%, at least 99%, or 100% identical to any one of SEQ ID NOs: 1, 9, 15, 23, 30, 41, 48, 55, 58, 65, 72, 79, 86, 93, 99, 105, 112, 119, 130, 138, 145, 152, 159, 166, 172, 179, 186, 192, 199, 205, 212, 219, 226, 232, 324, 627, 640, 650, 659, 676, 687, 695, 703, 712, 770, 778, 785, 794, 801, 807, 814, 827, 836, 849, 858, 865, 878, 1045, 1050, 1055, 1060, and 1065; (ii) a CDR2 having an amino acid sequence that is at least 65%, at least 70%, at least 75%, at least 80%, at least 85%, at least 90%, at least 95%, at least 99%, or 100% identical to any one of SEQ ID NOs: 2, 31, 628, 641, 677, 1046, 1051, 1056, and 1061; or at least 65%, at least 70%, at least 75%, at least 80%, at least 85%, at least 90%, at least 95%, at least 99%, or 100% identical to any one of amino acid sequences AAS, GAS, LGS, GTN, GTN, SAS, SDS, DNT, EVT, DAS, DVT, RNS, DVS, EDS, DDS, KDS, VAS, WAS, YTS, EVS, NNN, SYN, and DAT; (iii) a CDR3 having an amino acid sequence that is at least 65%, at least 70%, at least 75%, at least 80%, at least 85%, at least 90%, at least 95%, at least 99%, or 100% identical to any one of SEQ ID NOs: 3, 10, 16, 24, 32, 38, 42, 49, 59, 66, 73, 80, 87, 94, 100, 106, 113, 120, 126, 131, 139, 146, 153, 160, 167, 173, 180, 187, 193, 200, 206, 213, 220, 227, 233, 239, 242, 246, 249, 256, 283, 285, 287, 288, 290, 292, 294, 296, 301, 304, 306, 309, 311, 313, 316, 325, 326, 329, 642, 651, 660, 668, 678, 651, 696, 704, 713, 764, 766, 768, 771, 779, 786, 792, 795, 808, 815, 821, 830, 837, 843, 850, 856, 859, 866, 872, 879, 885, and 1066; and a VH1 comprising (i) a CDR1 having an amino acid sequence that is at least 65%, at least 70%, at least 75%, at least 80%, at least 85%, at least 90%, at least 95%, at least 99%, or 100% identical to any one of SEQ ID NOs: 5, 12, 18, 26, 34, 44, 51, 61, 68, 75, 82, 89, 96, 102, 108, 115, 122, 133, 141, 148, 155, 162, 175, 182, 189, 195, 202, 208, 215, 222, 229, 235, 318, 629, 645, 654, 663, 671, 682, 690, 699, 707, 716, 773, 781, 788, 797, 803, 810, 817, 823, 832, 839, 845, 852, 861, 868, 874, 881, 1047, 1052, 1057, 1062, and 1067; (ii) a CDR2 having an amino acid sequence that is at least 65%, at least 70%, at least 75%, at least 80%, at least 85%, at least 90%, at least 95%, at least 99%, or 100% identical to any one of SEQ ID NOs: 6, 19, 27, 35, 45, 52, 56, 62, 69, 76, 83, 90, 109, 116, 123, 134, 142, 149, 156, 163, 169, 176, 183, 196, 209, 216, 223, 236, 273, 319, 328, 630, 646, 655, 664, 672, 683, 691, 708, 776, 782, 789, 798, 804, 811, 818, 824, 833, 840, 846, 853, 862, 869, 875, 882, 1048, 1053, 1058, 1063, and 1068; and (iii) a CDR3 having an amino acid sequence that is at least 65%, at least 70%, at least 75%, at least 80%, at least 85%, at least 90%, at least 95%, at least 99%, or 100% identical to any one of SEQ ID NOs: 7, 13, 20, 28, 36, 40, 46, 53, 63, 70, 77, 84, 91, 97, 103, 110, 117, 124, 128, 135, 143, 150, 157, 164, 170, 177, 184, 190, 197, 203, 210, 217, 224, 230, 237, 241, 244, 248, 253, 257, 259, 261, 263, 265, 267, 269, 271, 274, 276, 278, 281, 297, 320, 322, 327, 330, 332, 631, 647, 656, 665, 673, 684, 692, 700, 709, 717, 765, 767, 769, 774, 783, 790, 793, 799, 805, 812, 819, 825, 834, 841, 847, 854, 857, 863, 870, 876, 883, 886, 1049, 1054, 1059, 1064, and 1069.

[2074] In some aspects, the antigen binding polypeptides provided herein comprise a VL1 comprising an amino acid sequence that is at least 65%, at least 70%, at least 75%, at least 80%, at least 85%, at least 90%, at least 95%, at least 99%, or 100% identical to any one of SEQ ID NOs: 4, 11, 17, 25, 33, 39, 43, 50, 60, 67, 74, 81, 88, 95, 101, 107, 114, 121, 127, 132, 140, 147, 154, 161, 168, 174, 181, 188, 194, 201, 207, 214, 221, 228, 234, 240, 243, 247, 250, 251, 252, 255, 284, 286, 289, 291, 293, 295, 299, 300, 302, 303, 305, 307, 308, 310, 312, 314, 315, 317, 323, 639, 649, 658, 667, 675, 686, 694, 702, 711, 772, 780, 787, 796, 802, 809, 816, 822, 831, 838, 844, 851, 860, 867, 873, 880, and 988.

[2075] In some aspects, the antigen binding polypeptides provided herein comprise a VH1 comprising an amino acid sequence that is at least 65%, at least 70%, at least 75%, at least 80%, at least 85%, at least 90%, at least 95%, at least 99%, or 100% identical to any one of SEQ ID NOs: 8, 14, 21, 22, 29, 37, 47, 54, 57, 64, 71, 78, 85, 92, 98, 104, 111, 118, 125, 129, 136, 137, 144, 151, 158, 165, 171, 178, 185, 191, 198, 204, 211, 218, 225, 231, 238, 245, 254, 258, 260, 262, 264, 266, 268, 270, 272, 275, 277, 279, 280, 282, 298, 321, 331, 626, 644, 653, 662, 670, 681, 689, 698, 706, 715, 775, 777, 784, 791, 800, 806, 813, 820, 826, 835, 842, 848, 855, 864, 871, 877, and 884.

[2076] In some aspects, the antigen binding polypeptides provided herein comprise (i) a VL1 comprising an amino acid sequence that is at least 65%, at least 70%, at least 75%, at least 80%, at least 85%, at least 90%, at least 95%, at least 99%, or 100% identical to any one of SEQ ID NOs: 4, 11, 17, 25, 33, 39, 43, 50, 60, 67, 74, 81, 88, 95, 101, 107, 114, 121, 127, 132, 140, 147, 154, 161, 168, 174, 181, 188, 194, 201, 207, 214, 221, 228, 234, 240, 243, 247, 250, 251, 252, 255, 284, 286, 289, 291, 293, 295, 299, 300, 302, 303, 305, 307, 308, 310, 312, 314, 315, 317, 323, 639, 649, 658, 667, 675, 686, 694, 702, 711, 772, 780, 787, 796, 802, 809, 816, 822, 831, 838, 844, 851, 860, 867, 873, 880, and 988; and (ii) a VH1 comprising an amino acid sequence that is at least 65%, at least 70%, at least 75%, at least 80%, at least 85%, at least 90%, at least 95%, at least 99%, or 100% identical to any one of SEQ ID NOs: 8, 14, 21, 22, 29, 37, 47, 54, 57, 64, 71, 78, 85, 92, 98, 104, 111, 118, 125, 129, 136, 137, 144, 151, 158, 165, 171, 178, 185, 191, 198, 204, 211, 218, 225, 231, 238, 245, 254, 258, 260, 262, 264, 266, 268, 270, 272, 275, 277, 279, 280, 282, 298, 321, 331, 626, 644, 653, 662, 670, 681, 689, 698, 706, 715, 775, 777, 784, 791, 800, 806, 813, 820, 826, 835, 842, 848, 855, 864, 871, 877, and 884.

[2077] In some aspects, the antigen binding polypeptides provided herein comprise a VL1 comprising (i) a complementarity determining region (CDR) 1 having an amino acid sequence that is at least 65%, at least 70%, at least 75%, at least 80%, at least 85%, at least 90%, at least 95%, at least 99%, or 100% identical to any one of SEQ ID NOs: 1, 9, 15, 23, 30, 65, 72, 145, 152, 324, 627, 138, 172, 1045, 1050, 1055, 1060, and 1065; (ii) a CDR2 having an amino acid sequence that is at least 65%, at least 70%, at least 75%, at least 80%, at least 85%, at least 90%, at least 95%, at least 99%, or 100% identical to any one of SEQ ID NOs: 2, 31, 628, 1046, 1051, 1056, and 1061, or at least 65%, at least 70%, at least 75%, at least 80%, at least 85%, at least 90%, at least 95%, at least 99%, or 100% identical to any one of amino acid sequences GAS, LGS, GTN, SAS, SDS, AAS, DAS, and DNT; and (iii) a CDR3 having an amino acid sequence that is at least 65%, at least 70%, at least 75%, at least 80%, at least 85%, at least 90%, at least 95%, at least 99%, or 100% identical to any one of SEQ ID NOs: 3, 10, 16, 24, 32, 38, 66, 73, 146, 153, 325, 326, 764, 766, 139, 856, 173, 792, and 1066.

[2078] In some aspects, the antigen binding polypeptides provided herein comprise a VH1 comprising (i) a CDR1 having an amino acid sequence that is at least 65%, at least 70%, at least 75%, at least 80%, at least 85%, at least 90%, at least 95%, at least 99%, or 100% identical to any one of SEQ ID NOs: 5, 12, 18, 26, 34.68, 75, 148, 155, 629, 141, 175, 1047, 1052, 1057, 1062, and 1067; (ii) a CDR2 having an amino acid sequence that is at least 65%, at least 70%, at least 75%, at least 80%, at least 85%, at least 90%, at least 95%, at least 99%, or 100% identical to any one of SEQ ID NOs: 6, 19, 27, 35, 69, 76, 149, 156, 630, 142, 176, 1048, 1053, 1058, 1063, and 1068; and (iii) a CDR3 having an amino acid sequence that is at least 65%, at least 70%, at least 75%, at least 80%, at least 85%, at least 90%, at least 95%, at least 99%, or 100% identical to any one of SEQ ID NOs: 7, 13, 20, 28, 36, 40, 70, 77, 327, 150, 157, 332, 631, 765, 767, 143, 857, 177, 793, 1049, 1054, 1059, 1064, and 1069.

[2079] In some aspects, the antigen binding polypeptides provided herein comprise a VL1 comprising (i) a complementarity determining region (CDR) 1 having an amino acid sequence that is at least 65%, at least 70%, at least 75%, at least 80%, at least 85%, at least 90%, at least 95%, at least 99%, or 100% identical to any one of SEQ ID NOs: 1, 9, 15, 23, 30, 65, 72, 145, 152, 324, 627, 138, 172, 1045, 1050, 1055, 1060, and 1065; (ii) a CDR2 having an amino acid sequence that is at least 65%, at least 70%, at least 75%, at least 80%, at least 85%, at least 90%, at least 95%, at least 99%, or 100% identical to any one of SEQ ID NOs: 2, 31.628, 1046, 1051, 1056, and 1061, or at least 65%, at least 70%, at least 75%, at least 80%, at least 85%, at least 90%, at least 95%, at least 99%, or 100% identical to any one of amino acid sequences GAS, LGS, GTN, SAS, SDS, AAS, DAS, and DNT; and (iii) a CDR3 having an amino acid sequence that is at least 65%, at least 70%, at least 75%, at least 80%, at least 85%, at least 90%, at least 95%, at least 99%, or 100% identical to any one of SEQ ID NOs: 3, 10, 16, 24, 32, 38, 66, 73, 146, 153, 325, 326, 764, 766, 139, 856, 173, 792, and 1066; and a VH1 comprising (i) a CDR1 having an amino acid sequence that is at least 65%, at least 70%, at least 75%, at least 80%, at least 85%, at least 90%, at least 95%, at least 99%, or 100% identical to any one of SEQ ID NOs: 5, 12, 18, 26, 34, 68, 75, 148, 155, 629, 141, 175, 1047, 1052, 1057, 1062, and 1067; (ii) a CDR2 having an amino acid sequence that is at least 65%, at least 70%, at least 75%, at least 80%, at least 85%, at least 90%, at least 95%, at least 99%, or 100% identical to any one of SEQ ID NOs: 6, 19, 27, 35, 69, 76, 149, 156, 630, 142, 176, 1048, 1053, 1058, 1063, and 1068; and (iii) a CDR3 having an amino acid sequence that is at least 65%, at least 70%, at least 75%, at least 80%, at least 85%, at least 90%, at least 95%, at least 99%, or 100% identical to any one of SEQ ID NOs: 7, 13, 20, 28, 36, 40, 70, 77, 327, 150, 157, 332, 631, 765, 767, 143, 857, 177, 793, 1049, 1054, 1059, 1064, and 1069.

[2080] In some aspects, the antigen binding polypeptides provided herein comprise a VL1 comprising an amino acid sequence that is at least 65%, at least 70%, at least 75%, at least 80%, at least 85%, at least 90%, at least 95%, at least 99%, or 100% identical to any one of SEQ ID NOs: 4, 11, 17, 25, 33, 39, 67, 74, 147, 154, 140, and 174.

[2081] In some aspects, the antigen binding polypeptides provided herein comprise a VH1 comprising an amino acid sequence that is at least 65%, at least 70%, at least 75%, at least 80%, at least 85%, at least 90%, at least 95%, at least 99%, or 100% identical to any one of SEQ ID NOs: 8, 14, 21, 22, 29, 37, 71, 78, 151, 158, 626, 144, and 178.

[2082] In some aspects, the antigen binding polypeptides provided herein comprise (i) a VL1 comprising an amino acid sequence that is at least 65%, at least 70%, at least 75%, at least 80%, at least 85%, at least 90%, at least 95%, at least 99%, or 100% identical to any one of SEQ ID NOs: 4, 11, 17, 25, 33, 39, 67, 74, 147, 154, 140, and 174; and (ii) a VH1 comprising an amino acid sequence that is at least 65%, at least 70%, at least 75%, at least 80%, at least 85%, at least 90%, at least 95%, at least 99%, or 100% identical to any one of SEQ ID NOs: 8, 14, 21, 22, 29, 37, 71, 78, 151, 158, 626, 144, and 178.

[2083] In some aspects, the antigen binding polypeptides provided herein comprise a VL1 comprising (i) a complementarity determining region (CDR) 1 having an amino acid sequence that is at least 65%, at least 70%, at least 75%, at least 80%, at least 85%, at least 90%, at least 95%, at least 99%, or 100% identical to any one of SEQ ID NOs: 41, 48, 138, 145, 152, 159, 166, 172, 192, 770, 778, 785, 794, 801, 807, 814, 827, 836, 849, 858, 865, 878, 1045, 1050, 1060, and 1065; (ii) a CDR2 having an amino acid sequence at least 65%, at least 70%, at least 75%, at least 80%, at least 85%, at least 90%, at least 95%, at least 99%, or 100% identical to any one of amino acid sequences AAS, GAS, DAS, NNN, SDS, SYN, WAS, and DAT, or at least 65%, at least 70%, at least 75%, at least 80%, at least 85%, at least 90%, at least 95%, at least 99%, or 100% identical to any one of SEQ ID NOs: 1046, 1051, and 1061; and (iii) a CDR3 having an amino acid sequence that is at least 65%, at least 70%, at least 75%, at least 80%, at least 85%, at least 90%, at least 95%, at least 99%, or 100% identical to any one of SEQ ID NOs: 42, 139, 146, 153, 160, 167, 173, 764, 766, 768, 771, 779, 786, 792, 795, 808, 815, 821, 830, 837, 843, 850, 856, 859, 866, 872, 879, 885, and 1066.

[2084] In some aspects, the antigen binding polypeptides provided herein comprise a VH1 comprising (i) a CDR1 having an amino acid sequence that is at least 65%, at least 70%, at least 75%, at least 80%, at least 85%, at least 90%, at least 95%, at least 99%, or 100% identical to any one of SEQ ID NOs: 44, 133, 141, 148, 155, 162, 175, 773, 781, 788, 797, 803, 810, 817, 823, 832, 839, 845, 852, 861, 868, 874, 881, 1047, 1052, 1062, and 1067; (ii) a CDR2 having an amino acid sequence that is at least 65%, at least 70%, at least 75%, at least 80%, at least 85%, at least 90%, at least 95%, at least 99%, or 100% identical to any one of SEQ ID NOs: 6, 142, 149, 156, 163, 169, 176, 776, 782, 789, 798, 804, 811, 818, 824, 833, 840, 846, 853, 862, 869, 875, 882, 1048, 1053, 1063, and 1068; and (iii) a CDR3 having an amino acid sequence that is at least 65%, at least 70%, at least 75%, at least 80%, at least 85%, at least 90%, at least 95%, at least 99%, or 100% identical to any one of SEQ ID NOs: 46, 143, 150, 157, 164, 170, 177, 765, 767, 769, 774, 783, 790, 793, 799, 805, 812, 819, 825, 834, 841, 847, 854, 857, 863, 870, 876, 883, 886, 1049, 1054, 1064, and 1069.

[2085] In some aspects, the antigen binding polypeptides provided herein comprise a VL1 comprising (i) a complementarity determining region (CDR) 1 having an amino acid sequence that is at least 65%, at least 70%, at least 75%, at least 80%, at least 85%, at least 90%, at least 95%, at least 99%, or 100% identical to any one of SEQ ID NOs: 41, 48, 138, 145, 152, 159, 166, 172, 192, 770, 778, 785, 794, 801, 807, 814, 827, 836, 849, 858, 865, 878, 1045, 1050, 1060, and 1065; (ii) a CDR2 having an amino acid sequence that is at least 65%, at least 70%, at least 75%, at least 80%, at least 85%, at least 90%, at least 95%, at least 99%, or 100% identical to any one of amino acid sequences AAS, GAS, DAS, NNN, SDS, SYN, WAS, and DAT, or at least 65%, at least 70%, at least 75%, at least 80%, at least 85%, at least 90%, at least 95%, at least 99%, or 100% identical to any one of SEQ ID NOs: 1046, 1051, and 1061; and (iii) a CDR3 having an amino acid sequence that is at least 65%, at least 70%, at least 75%, at least 80%, at least 85%, at least 90%, at least 95%, at least 99%, or 100% identical to any one of SEQ ID NOs: 42, 139, 146, 153, 160, 167, 173, 764, 766, 768, 771, 779, 786, 792, 795, 808, 815, 821, 830, 837, 843, 850, 856, 859, 866, 872, 879, 885, and 1066; and a VH1 comprising (i) a CDR1 having an amino acid sequence that is at least 65%, at least 70%, at least 75%, at least 80%, at least 85%, at least 90%, at least 95%, at least 99%, or 100% identical to any one of SEQ ID NOs: 44, 133, 141, 148, 155, 162, 175, 773, 781, 788, 797, 803, 810, 817, 823, 832, 839, 845, 852, 861, 868, 874, 881, 1047, 1052, 1062, and 1067; (ii) a CDR2 having an amino acid sequence that is at least 65%, at least 70%, at least 75%, at least 80%, at least 85%, at least 90%, at least 95%, at least 99%, or 100% identical to any one of SEQ ID NOs: 6, 142, 149, 156, 163, 169, 176, 776, 782, 789, 798, 804, 811, 818, 824, 833, 840, 846, 853, 862, 869, 875, 882, 1048, 1053, 1063, and 1068; and (iii) a CDR3 having an amino acid sequence that is at least 65%, at least 70%, at least 75%, at least 80%, at least 85%, at least 90%, at least 95%, at least 99%, or 100% identical to any one of SEQ ID NOs: 46, 143, 150, 157, 164, 170, 177, 765, 767, 769, 774, 783, 790, 793, 799, 805, 812, 819, 825, 834, 841, 847, 854, 857, 863, 870, 876, 883, 886, 1049, 1054, 1064, and 1069.

[2086] In some aspects, the antigen binding polypeptides provided herein comprise a VL1 comprising an amino acid sequence that is at least 65%, at least 70%, at least 75%, at least 80%, at least 85%, at least 90%, at least 95%, at least 99%, or 100% identical to any one of SEQ ID NOs: 43, 140, 147, 154, 161, 168, 174, 772, 780, 787, 796, 802, 809, 816, 822, 831, 838, 844, 851, 860, 867, 873, and 880.

[2087] In some aspects, the antigen binding polypeptides provided herein comprise a VH1 comprising an amino acid sequence that is at least 65%, at least 70%, at least 75%, at least 80%, at least 85%, at least 90%, at least 95%, at least 99%, or 100% identical to any one of SEQ ID NOs: 144, 151, 158, 165, 171, 178, 775, 777, 784, 791, 800, 806, 813, 820, 826, 835, 842, 848, 855, 864, 871, 877, and 884.

[2088] In some aspects, the antigen binding polypeptides provided herein comprise (i) a VL1 comprising an amino acid sequence that is at least 65%, at least 70%, at least 75%, at least 80%, at least 85%, at least 90%, at least 95%, at least 99%, or 100% identical to any one of SEQ ID NOs: 43, 140, 147, 154, 161, 168, 174, 772, 780, 787, 796, 802, 809, 816, 822, 831, 838, 844, 851, 860, 867, 873, and 880; and (ii) a VH1 comprising an amino acid sequence that is at least 65%, at least 70%, at least 75%, at least 80%, at least 85%, at least 90%, at least 95%, at least 99%, or 100% identical to any one of SEQ ID NOs: 144, 151, 158, 165, 171, 178, 775, 777, 784, 791, 800, 806, 813, 820, 826, 835, 842, 848, 855, 864, 871, 877, and 884.

[2089] In some aspects, the VL1 comprised in the antigen binding polypeptides provided herein comprises (i) a complementarity determining region (CDR) 1 having an amino acid sequence that is at least 65%, at least 70%, at least 75%, at least 80%, at least 85%, at least 90%, at least 95%, at least 99%, or 100% identical to SEQ ID NO: 145 or 1050; (ii) a CDR2 having an amino acid sequence at least 65%, at least 70%, at least 75%, at least 80%, at least 85%, at least 90%, at least 95%, at least 99%, or 100% identical to SEQ ID NO: 1051 or an amino acid sequence that is at least 65%, at least 70%, at least 75%, at least 80%, at least 85%, at least 90%, at least 95%, at least 99%, or 100% identical to amino acid sequence AAS; and (iii) a CDR3 having an amino acid sequence that is at least 65%, at least 70%, at least 75%, at least 80%, at least 85%, at least 90%, at least 95%, at least 99%, or 100% identical to SEQ ID NO: 146 or 764.

[2090] In some aspects, the VH1 comprised in the antigen binding polypeptides provided herein comprises (i) a complementarity determining region (CDR) 1 having an amino acid sequence that is at least 65%, at least 70%, at least 75%, at least 80%, at least 85%, at least 90%, at least 95%, at least 99%, or 100% identical to SEQ ID NO: 148 or 1052; (ii) a CDR2 having an amino acid sequence that is at least 65%, at least 70%, at least 75%, at least 80%, at least 85%, at least 90%, at least 95%, at least 99%, or 100% identical to SEQ ID NO: 149 or 1053; and (iii) a CDR3 having an amino acid sequence that is at least 65%, at least 70%, at least 75%, at least 80%, at least 85%, at least 90%, at least 95%, at least 99%, or 100% identical to SEQ ID NO: 150, 765, or 1054.

[2091] In some aspects, the VL1 comprised in the antigen binding polypeptides provided herein comprises (i) a complementarity determining region (CDR) 1 having an amino acid sequence that is at least 65%, at least 70%, at least 75%, at least 80%, at least 85%, at least 90%, at least 95%, at least 99%, or 100% identical to SEQ ID NO: 145 or 1050; (ii) a CDR2 having an amino acid sequence at least 65%, at least 70%, at least 75%, at least 80%, at least 85%, at least 90%, at least 95%, at least 99%, or 100% identical to SEQ ID NO: 1051 or an amino acid sequence that is at least 65%, at least 70%, at least 75%, at least 80%, at least 85%, at least 90%, at least 95%, at least 99%, or 100% identical to amino acid sequence AAS; and (iii) a CDR3 having an amino acid sequence that is at least 65%, at least 70%, at least 75%, at least 80%, at least 85%, at least 90%, at least 95%, at least 99%, or 100% identical to SEQ ID NO: 146 or 764; and the VH1 comprised in the antigen binding polypeptides provided herein comprises (iv) a complementarity determining region (CDR) 1 having an amino acid sequence that is at least 65%, at least 70%, at least 75%, at least 80%, at least 85%, at least 90%, at least 95%, at least 99%, or 100% identical to SEQ ID NO: 148 or 1052; (v) a CDR2 having an amino acid sequence that is at least 65%, at least 70%, at least 75%, at least 80%, at least 85%, at least 90%, at least 95%, at least 99%, or 100% identical to SEQ ID NO: 149 or 1053; and (vi) a CDR3 having an amino acid sequence that is at least 65%, at least 70%, at least 75%, at least 80%, at least 85%, at least 90%, at least 95%, at least 99%, or 100% identical to SEQ ID NO: 150, 765, or 1054.

[2092] In some aspects, the VL1 comprised in the antigen binding polypeptides provided herein comprises an amino acid sequence that is at least 65%, at least 70%, at least 75%, at least 80%, at least 85%, at least 90%, at least 95%, at least 99%, or 100% identical to SEQ ID NO: 147.

[2093] In some aspects, the VH1 comprised in the antigen binding polypeptides provided herein comprises an amino acid sequence that is at least 65%, at least 70%, at least 75%, at least 80%, at least 85%, at least 90%, at least 95%, at least 99%, or 100% identical to SEQ ID NO: 151.

[2094] In some aspects, (i) the VL1 comprised in the antigen binding polypeptides provided herein comprises an amino acid sequence that is at least 65%, at least 70%, at least 75%, at least 80%, at least 85%, at least 90%, at least 95%, at least 99%, or 100% identical to SEQ ID NO: 147, and (ii) the VH1 comprised in the antigen binding polypeptides provided herein comprises an amino acid sequence that is at least 65%, at least 70%, at least 75%, at least 80%, at least 85%, at least 90%, at least 95%, at least 99%, or 100% identical to SEQ ID NO: 151.

[2095] In some aspects, the antigen binding polypeptides provided herein further comprise an Fc region. In some aspects, the antigen binding polypeptides provided herein further comprise an Fc region at the carboxy-terminus. In some aspects, the Fc region comprises an immunoglobulin heavy chain constant region 2 (CH2) and/or an immunoglobulin heavy chain constant region 3 (CH3). In some aspects, the Fc region further comprises an immunoglobulin hinge (i.e., a hinge region). In some aspects, the hinge region comprises an amino acid sequence at least 65%, at least 70%, at least 75%, at least 80%, at least 85%, at least 90%, at least 95%, at least 99%, or 100% identical to any one of SEQ ID NOs: 635, 636, 1072, 1073, or 1074. In some aspects, the Fc region comprises a CH2 and a CH3. In some aspects, the CH2 comprises an amino acid sequence that is at least 65%, at least 70%, at least 75%, at least 80%, at least 85%, at least 90%, at least 95%, at least 99%, or 100% identical to any one of SEQ ID NOs: 1075-1078. In some aspects, the CH3 comprises an amino acid sequence that is at least 65%, at least 70%, at least 75%, at least 80%, at least 85%, at least 90%, at least 95%, at least 99%, or 100% identical to any one of SEQ ID NOs: 1079-1085. In some aspects, the Fc region comprises an amino acid sequence that is at least 65%, at least 70%, at least 75%, at least 80%, at least 85%, at least 90%, at least 95%, at least 99%, or 100% identical to any one of SEQ ID NOs: 376-380.

[2096] In some aspects, the Fc region comprises one or more amino acid substitutions. In some aspects, the one or more amino acid substitutions comprise one or more half-life extension amino acid substitutions. In some aspects, the one or more half-life extension amino acid substitutions comprise one or more of amino acid substitutions M428L, N434A, N434S, L234F, L235E, P331S, M252Y, S254T, and T256E, or equivalent thereof, based on the EU numbering scheme. In some aspects, the one or more half-life extension amino acid substitutions comprise a LA (M428L and N434A, or equivalent thereof, based on the EU numbering scheme) amino acid substitution. In some aspects, the one or more half-life extension amino acid substitutions comprise a LS (M428L and N434S, or equivalent thereof, based on the EU numbering scheme) amino acid substitution. In some aspects, the one or more half-life extension amino acid substitutions comprise L234F and L235E, or equivalent thereof (based on the EU numbering scheme) amino acid substitutions. In some aspects, the one or more half-life extension amino acid substitutions comprise a TM (L234F, L235E, and P331S, or equivalent thereof, based on the EU numbering scheme) amino acid substitution. In some aspects, the one or more half-life extension amino acid substitutions comprise a YTE (M252Y, S254T, and T256E, or equivalent thereof, based on the EU numbering scheme) amino acid substitution.

[2097] In some aspects, the Fc region comprises at least one knob-into-hole modification. In some aspects, the antigen binding polypeptides disclosed herein are comprised in IgG1 or IgG4 antibodies or antigen binding fragments thereof. In some aspects, the knob-into-hole modification comprises one or more of knob substitutions of S354C and T366W, or equivalent thereof, and/or one or more of hole substitutions of Y349C, T366S, L368A, Y407V, or equivalent thereof, or a combination thereof, based on the EU numbering scheme. In some aspects, the Fc region comprises a knob-into-hole modification comprising knob substitutions of S354C and T366W, or equivalent thereof, and/or hole substitutions of Y349C, T366S, L368A, and Y407V, or equivalent thereof, and/or a half-life extension amino acid substitution comprising: a LA (M428L and N434A, or equivalent thereof, based on the EU numbering scheme) amino acid substitution, a LS (M428L and N434S, or equivalent thereof, based on the EU numbering scheme) amino acid substitution. L234F and L235E, or equivalent thereof (based on the EU numbering scheme) amino acid substitutions, a TM (L234F, L235E, and P331S, or equivalent thereof, based on the EU numbering scheme) amino acid substitution, a YTE (M252Y, S254T, and T256E, or equivalent thereof, based on the EU numbering scheme) amino acid substitution, or any combination thereof.

[2098] In some aspects, the Fc region comprises knob substitutions of S354C and T366W, or equivalent thereof, and a half-life extension amino acid substitution comprising: a LA (M428L and N434A, or equivalent thereof, based on the EU numbering scheme) amino acid substitution, a LS (M428L and N434S, or equivalent thereof, based on the EU numbering scheme) amino acid substitution. L234F and L235E, or equivalent thereof (based on the EU numbering scheme) amino acid substitutions, a TM (L234F, L235E, and P331S, or equivalent thereof, based on the EU numbering scheme) amino acid substitution, a YTE (M252Y, S254T, and T256E, or equivalent thereof, based on the EU numbering scheme) amino acid substitution, or any combination thereof.

[2099] In some aspects, the Fc region comprises hole substitutions of Y349C, T366S, L368A, and Y407V, or equivalent thereof, and a half-life extension amino acid substitution comprising: a LA (M428L and N434A, or equivalent thereof, based on the EU numbering scheme) amino acid substitution, a LS (M428L and N434S, or equivalent thereof, based on the EU numbering scheme) amino acid substitution. L234F and L235E, or equivalent thereof (based on the EU numbering scheme) amino acid substitutions, a TM (L234F, L235E, and P331S, or equivalent thereof, based on the EU numbering scheme) amino acid substitution, a YTE (M252Y, S254T, and T256E, or equivalent thereof, based on the EU numbering scheme) amino acid substitution, or any combination thereof.

[2100] In some aspects, the antigen binding polypeptides disclosed herein comprise one or more Fc effector function knockout mutation. In some aspects, the antigen binding polypeptides disclosed herein are comprised in IgG1 or IgG4 antibodies or antigen binding fragments thereof. In some aspects, the Fc effector function knockout mutation is L234A, L235A, P239A, or equivalent thereof, or a combination thereof, based on the EU numbering scheme.

[2101] In some aspects, the antigen binding polypeptides disclosed herein comprise a mutation at a glycosylation site. In some aspects, the mutation at a glycosylation site is a mutation at an N-glycosylation site. In some aspects, the antigen binding polypeptides comprise a VH comprising a mutation at a glycosylation site. In some aspects, the mutation at a glycosylation site is a mutation at an N-glycosylation site. In some aspects, the mutation at an N-glycosylation site is at amino acid N62 of the VH region or equivalent thereof. In some aspects, the mutation at an N-glycosylation site at amino acid N62 is N62Q or N62S, or equivalent thereof.

[2102] In some aspects, the antigen binding polypeptides disclosed herein, comprise one or more optional linkers. The one or more optional linkers are indicated herein as Ln, wherein n is an integer, and the integer next to each L indicates each L comprised in the antigen binding polypeptides disclosed herein. For example, if an antigen binding polypeptide disclosed herein comprises two linkers, the first linker from N-terminus to C-terminus is herein indicated as L1, and the second linker from N-terminus to C-terminus is herein indicated as L2. In some aspects, any one of the optional linkers each independently have a length of from 0 amino acids to about 50 amino acids. In some aspects, any one of the optional linkers each independently have a length of from 5 amino acids to about 40 amino acids.

[2103] In some aspects, any one of the optional linkers are non-immunogenic. In some aspects, any one of the optional linkers do not contain a consensus T cell epitope.

[2104] In some aspects, any of Ln comprises an amino acid sequence of G or A, or an amino acid sequence at least 65%, at least 70%, at least 75%, at least 80%, at least 85%, at least 90%, at least 95%, at least 99%, or 100% identical to amino acid sequence GSS or ASG, or an amino acid sequence at least 65%, at least 70%, at least 75%, at least 80%, at least 85%, at least 90%, at least 95%, at least 99%, or 100% identical to any one of SEQ ID NOs: 333-373 and 967-971. In some aspects, Ln comprises an amino acid sequence at least 65%, at least 70%, at least 75%, at least 80%, at least 85%, at least 90%, at least 95%, at least 99%, or 100% identical to any one of SEQ ID NOs: 333-345 and 967-971.

[2105] In some aspects, the antigen binding polypeptide is selected from any one of the more specific aspects provided herein for an antigen binding polypeptide in an antigen binding polypeptide complex having no more than three polypeptide chains.

[2106] In some aspects, the antigen binding polypeptide further comprises one or more immunoglobulin heavy chain constant region 1 (CH1) and/or one or more immunoglobulin light chain constant region (CL) between any one of the variable regions and/or optional amino acid linkers (e.g., between VL1 and L1, between L1 and VH1, between VH1 and L2, between L2 and VL1, between L1 and VL2, between VL2 and L2, between L2 and VH2, between VH2 and L3, between L3 and VH1, between VL1 and L1, between L1 and VH2, between VH2 and L2, between. L2 and VL2, between VL2 and L3, between L3 and VH1, between VH1 and L4, between L4 and VH2, between VH2 and L5, between L5 and VL2, between VL2 and L6, between L6 and VL1, between VH1 and L4, between L4 and VL2, between L4 and VL2, between VL2 and L5, between L5 and VH2, between VH2 and L6, or between L6 and VL1).

[2107] In some aspects, the antigen binding polypeptide is selected from any one of the more specific aspects provided herein for an antigen binding polypeptide in an antigen binding polypeptide complex having no more than three polypeptide chains, and further comprises one or more immunoglobulin heavy chain constant region 1 (CH1) and/or one or more immunoglobulin light chain constant region (CL) between any one of the variable regions and/or optional amino acid linkers (e.g., between VL1 and L1, between L1 and VH1, between VH1 and L2, between L2 and VL1, between L1 and VL2, between VL2 and L2, between L2 and VH2, between VH2 and L3, between L3 and VH1, between VL1 and L1, between L1 and VH2, between VH2 and L2, between. L2 and VL2, between VL2 and L3, between L3 and VH1, between VH1 and L4, between L4 and VH2, between VH2 and L5, between L5 and VL2, between VL2 and L6, between L6 and VL1, between VH1 and L4, between L4 and VL2, between L4 and VL2, between VL2 and L5, between L5 and VH2, between VH2 and L6, or between L6 and VL1).

[2108] In some aspects, an antigen binding polypeptide complex provided herein comprises a first polypeptide, and a second polypeptide; wherein the first polypeptide has a structure represented by VL1-CL-VH1-CH1, VL1-CH1-VH1-CL, VH1-CL-VL1-CH1, or VH1-CH1-VL1-CL; and wherein the second polypeptide has a structure represented by VL2-CL-VL3-VH3-VH2-CH1, VL2-CL-VH3-VL3-VH2-CH1, VL2-CH1-VL3-VH3-VH2-CL, VL2-CH1-VH3-VL3-VH2-CL, VH2-CL-VL3-VH3-VL2-CH1, VH2-CL-VH3-VL3-VL2-CH1, VH2-CH1-VL3-VH3-VL2-CL, VH2-CH1-VH3-VL3-VL2-CL, VL3-CL-VL2-VH2-VH3-CH1, VL3-CL-VH2-VL2-VH3-CH1, VL3-CH1-VL2-VH2-VH3-CL, VL3-CH1-VH2-VL2-VH3-CL, VH3-CL-VL2-VH2-VL3-CH1, VH3-CL-VH2-VL2-VL3-CH1, VH3-CH1-VL2-VH2-VL3-CL, or VH3-CH1-VH2-VL2-VL3-CL.

[2109] In some aspects, an antigen binding polypeptide complex provided herein comprises a first polypeptide, and a second polypeptide; wherein the first polypeptide has a structure represented by VL1-L1-CL-L2-VH1-L3-CH1, VL1-L1-CH1-L2-VH1-L3-CL, VH1-L1-CL-L2-VL1-L3-CH1, or VH1-L1- CH1-L2-VL1-L3-CL; and wherein the second polypeptide has a structure represented by VL2-L4-CL-L5-VL3-L6-VH3-L7-VH2-L8-CH1, VL2-L4-CL-L5-VH3-L6-VL3-L7-VH2-L8-CH1, VL2-L4-CH1-L5- VL3-L6-VH3-L7-VH2-L8-CL, VL2-L4-CH1-L5-VH3-L6-VL3-L7-VH2-L8-CL, VH2-L4-CL-L5-VL3-L6-VH3-L7-VL2-L8-CH1, VH2-L4-CL-L5-VH3-L6-VL3-L7-VL2-L8-CH1, VH2-L4-CH1-L5-VL3-L6- VH3-L7-VL2-L8-CL, VH2-L4-CH1-L5-VH3-L6-VL3-L7-VL2-L8-CL, VL3-L4-CL-L5-VL2-L6-VH2-L7-VH3-L8-CH1, VL3-L4-CL-L5-VH2-L6-VL2-L7-VH3-L8-CH1, VL3-L4-CH1-L5-VL2-L6-VH2-L7-VH3-L8-CL, VL3-L4-CH1-L5-VH2-L6-VL2-L7-VH3-L8-CL, VH3-L4-CL-L5-VL2-L6-VH2-L7-VL3-L8-CH1, VH3-L4-CL-L5-VH2-L6-VL2-L7-VL3-L8-CH1, VH3-L4-CH1-L5-VL2-L6-VH2-L7-VL3-L8-CL, or VH3-L4-CH1-L5-VH2-L6-VL2-L7-VL3-L8-CL.

[2110] In some aspects, an antigen binding polypeptide complex provided herein comprises a first polypeptide, and a second polypeptide; wherein the first polypeptide has a structure represented by VL1-CL-VH1-CH1-CH2-CH3, VL1-CH1-VH1-CL-CH2-CH3, VH1-CL-VL1-CH1-CH2-CH3, or VH1-CH1-VL1-CL-CH2-CH3; and wherein the second polypeptide has a structure represented by VL2-CL-VL3-VH3-VH2-CH1-CH2-CH3, VL2-CL-VH3-VL3-VH2-CH1-CH2-CH3, VL2-CH1-VL3-VH3-VH2-CL-CH2-CH3, VL2-CH1-VH3-VL3-VH2-CL-CH2-CH3, VH2-CL-VL3-VH3-VL2-CH1-CH2-CH3, VH2-CL-VH3-VL3-VL2-CH1-CH2-CH3, VH2-CH1-VL3-VH3-VL2-CL-CH2-CH3, VH2-CH1-VH3-VL3-VL2-CL-CH2-CH3, VL3-CL-VL2-VH2-VH3-CH1-CH2-CH3, VL3-CL-VH2-VL2-VH3-CH1-CH2-CH3, VL3-CH1-VL2-VH2-VH3-CL-CH2-CH3, VL3-CH1-VH2-VL2-VH3-CL-CH2-CH3, VH3-CL-VL2-VH2-VL3-CH1-CH2-CH3, VH3-CL-VH2-VL2-VL3-CH1-CH2-CH3, VH3-CH1-VL2-VH2-VL3-CL-CH2-CH3, or VH3-CH1-VH2-VL2-VL3-CL-CH2-CH3.

[2111] In some aspects, an antigen binding polypeptide complex provided herein comprises a first polypeptide, and a second polypeptide; wherein the first polypeptide has a structure represented by VL1-L1-CL-L2-VH1-L3-CH1-CH2-CH3, VL1-L1-CH1-L2-VH1-L3-CL-CH2-CH3, VH1-L1-CL-L2-VL1- L3-CH1-CH2-CH3, or VH1-L1-CH1-L2-VL1-L3-CL-CH2-CH3; and wherein the second polypeptide has a structure represented by VL2-L4-CL-L5-VL3-L6-VH3-L7-VH2-L8-CH1-CH2-CH3, VL2-L4-CL-L5-VH3-L6-VL3-L7-VH2-L8-CH1-CH2-CH3, VL2-L4-CH1-L5-VL3-L6-VH3-L7-VH2-L8-CL-CH2-CH3, VL2-L4-CH1-L5-VH3-L6-VL3-L7-VH2-L8-CL-CH2-CH3, VH2-L4-CL-L5-VL3-L6-VH3-L7-VL2-L8-CH1-CH2-CH3, VH2-L4-CL-L5-VH3-L6-VL3-L7-VL2-L8-CH1-CH2-CH3, VH2-L4-CH1-L5-VL3-L6-VH3-L7-VL2-L8-CL-CH2-CH3, VH2-L4-CH1-L5-VH3-L6-VL3-L7-VL2-L8-CL-CH2-CH3, VL3-L4-CL-L5-VL2-L6-VH2-L7-VH3-L8-CH1-CH2-CH3, VL3-L4-CL-L5-VH2-L6-VL2-L7-VH3-L8-CH1-CH2-CH3, VL3-L4-CH1-L5-VL2-L6-VH2-L7-VH3-L8-CL-CH2-CH3, VL3-L4-CH1-L5-VH2-L6-VL2-L7-VH3-L8-CL-CH2-CH3, VH3-L4-CL-L5-VL2-L6-VH2-L7-VL3-L8-CH1-CH2-CH3, VH3-L4-CL-L5-VH2-L6-VL2-L7-VL3-L8-CH1-CH2-CH3, VH3-L4-CH1-L5-VL2-L6-VH2-L7-VL3-L8-CL-CH2-CH3, or VH3-L4-CH1-L5-VH2-L6-VL2-L7-VL3-L8-CL-CH2-CH3.

[2112] In some aspects, an antigen binding polypeptide complex provided herein comprises a first polypeptide, and a second polypeptide; wherein the first polypeptide has a structure represented by VL1-CL-VH1-CH1, VL1-CH1-VH1-CL, VH1-CL-VL1-CH1, or VH1-CH1-VL1-CL; and wherein the second polypeptide has a structure represented by VL2-VH2-VL3-CL-VH3-CH1, VL2-VH2-VL3-CH1-VH3-CL, VL2-VH2-VH3-CL-VL3-CH1, VL2-VH2-VH3-CH1-VL3-CL, VL2-VL3-VH2-CL-VH3-CH1, VL2-VL3-VH2-CH1-VH3-CL, VL2-VH3-VH2-CL-VL3-CH1, VL2-VH3-VH2-CH1-VL3-CL, VH2-VL2-VL3-CL-VH3-CH1, VH2-VL2-VL3-CH1-VH3-CL, VH2-VL2-VH3-CL-VL3-CH1, VH2-VL2-VH3-CH1-VL3-CL, VH2-VL3-VL2-CL-VH3-CH1, VH2-VL3-VL2-CH1-VH3-CL, VH2-VH3-VL2-CL-VL3-CH1, VH2-VH3-VL2-CH1-VL3-CL, VL3-VL2-VH3-CL-VH2-CH1, VL3-VL2-VH3-CH1-VH2-CL, VL3-VH2-VH3-CL-VL2-CH1, VL3-VH2-VH3-CH1-VL2-CL, VL3-VH3-VL2-CL-VH2-CH1, VL3-VH3-VL2-CH1-VH2-CL, VL3-VH3-VH2-CL-VL2-CH1, VL3-VH3-VH2-CH1-VL2-CL, VH3-VL2-VL3-CL-VH2-CH1, VH3-VL2-VL3-CH1-VH2-CL, VH3-VH2-VL3-CL-VL2-CH1, VH3-VH2-VL3-CH1-VL2-CL, VH3-VL3-VL2-CL-VH2-CH1, VH3-VL3-VL2-CH1-VH2-CL, VH3-VL3-VH2-CL-VL2-CH1, or VH3-VL3-VH2-CH1-VL2-CL.

[2113] In some aspects, an antigen binding polypeptide complex provided herein comprises a first polypeptide, and a second polypeptide; wherein the first polypeptide has a structure represented by VL1-L1-CL-L2-VH1-L3-CH1, VL1-L1-CH1-L2-VH1-L3-CL, VH1-L1-CL-L2-VL1-L3-CH1, or VH1-L1- CH1-L2-VL1-L3-CL; and wherein the second polypeptide has a structure represented by VL2-L4-VH2-L5-VL3-L6-CL-L7-VH3-L8-CH1, VL2-L4-VH2-L5-VL3-L6-CH1-L7-VH3-L8-CL, VL2-L4-VH2-L5-VH3-L6-CL-L7-VL3-L8-CH1, VL2-L4-VH2-L5-VH3-L6-CH1-L7-VL3-L8-CL, VL2-L4-VL3-L5-VH2-L6-CL-L7-VH3-L8-CH1, VL2-L4-VL3-L5-VH2-L6-CH1-L7-VH3-L8-CL, VL2-L4-VH3-L5-VH2-L6-CL-L7-VL3-L8-CH1, VL2-L4-VH3-L5-VH2-L6-CH1-L7-VL3-L8-CL, VH2-L4-VL2-L5-VL3-L6-CL-L7-VH3-L8-CH1, VH2-L4-VL2-L5-VL3-L6-CH1-L7-VH3-L8-CL, VH2-L4-VL2-L5-VH3-L6-CL-L7-VL3-L8-CH1, VH2-L4-VL2-L5-VH3-L6-CH1-L7-VL3-L8-CL, VH2-L4-VL3-L5-VL2-L6-CL-L7-VH3-L8-CH1, VH2-L4-VL3-L5-VL2-L6-CH1-L7-VH3-L8-CL, VH2-L4-VH3-L5-VL2-L6-CL-L7-VL3-L8-CH1, VH2-L4-VH3-L5-VL2-L6-CH1-L7-VL3-L8-CL, VL3-L4-VL2-L5-VH3-L6-CL-L7-VH2-L8-CH1, VL3-L4-VL2-L5-VH3-L6-CH1-L7-VH2-L8-CL, VL3-L4-VH2-L5-VH3-L6-CL-L7-VL2-L8-CH1, VL3-L4-VH2-L5-VH3-L6-CH1-L7-VL2-L8-CL, VL3-L4-VH3-L5-VL2-L6-CL-L7-VH2-L8-CH1, VL3-L4-VH3-L5-VL2-L6-CH1-L7-VH2-L8-CL, VL3-L4-VH3-L5-VH2-L6-CL-L7-VL2-L8-CH1, VL3-L4-VH3-L5-VH2-L6-CH1-L7-VL2-L8-CL, VH3-L4-VL2-L5-VL3-L6-CL-L7-VH2-L8-CH1, VH3-L4-VL2-L5-VL3-L6-CH1-L7-VH2-L8-CL, VH3-L4-VH2-L5-VL3-L6-CL-L7-VL2-L8-CH1, VH3-L4-VH2-L5-VL3-L6-CH1-L7-VL2-L8-CL, VH3-L4-VL3-L5-VL2-L6-CL-L7-VH2-L8-CH1, VH3-L4-VL3-L5-VL2-L6-CH1-L7-VH2-L8-CL, VH3-L4-VL3-L5-VH2-L6-CL-L7-VL2-L8-CH1, or VH3-L4-VL3-L5-VH2-L6-CH1-L7-VL2-L8-CL.

[2114] In some aspects, an antigen binding polypeptide complex provided herein comprises a first polypeptide, and a second polypeptide; wherein the first polypeptide has a structure represented by VL1-CL-VH1-CH1-CH2-CH3, VL1-CH1-VH1-CL-CH2-CH3, VH1-CL-VL1-CH1-CH2-CH3, or VH1-CH1-VL1-CL-CH2-CH3; and wherein the second polypeptide has a structure represented by VL2-VH2-VL3-CL-VH3-CH1-CH2-CH3, VL2-VH2-VL3-CH1-VH3-CL-CH2-CH3, VL2-VH2-VH3-CL-VL3-CH1-CH2-CH3, VL2-VH2-VH3-CH1-VL3-CL-CH2-CH3, VL2-VL3-VH2-CL-VH3-CH1-CH2-CH3, VL2-VL3-VH2-CH1-VH3-CL-CH2-CH3, VL2-VH3-VH2-CL-VL3-CH1-CH2-CH3, VL2-VH3-VH2-CH1-VL3-CL-CH2-CH3, VH2-VL2-VL3-CL-VH3-CH1-CH2-CH3, VH2-VL2-VL3-CH1-VH3-CL-CH2-CH3, VH2-VL2-VH3-CL-VL3-CH1-CH2-CH3, VH2-VL2-VH3-CH1-VL3-CL-CH2-CH3, VH2-VL3-VL2-CL-VH3-CH1-CH2-CH3, VH2-VL3-VL2-CH1-VH3-CL-CH2-CH3, VH2-VH3-VL2-CL-VL3-CH1-CH2-CH3, VH2-VH3-VL2-CH1-VL3-CL-CH2-CH3, VL3-VL2-VH3-CL-VH2-CH1-CH2-CH3, VL3-VL2-VH3-CH1-VH2-CL-CH2-CH3, VL3-VH2-VH3-CL-VL2-CH1-CH2-CH3, VL3-VH2-VH3-CH1-VL2-CL-CH2-CH3, VL3-VH3-VL2-CL-VH2-CH1-CH2-CH3, VL3-VH3-VL2-CH1-VH2-CL-CH2-CH3, VL3-VH3-VH2-CL-VL2-CH1-CH2-CH3, VL3-VH3-VH2-CH1-VL2-CL-CH2-CH3, VH3-VL2-VL3-CL-VH2-CH1-CH2-CH3, VH3-VL2-VL3-CH1-VH2-CL-CH2-CH3, VH3-VH2-VL3-CL-VL2-CH1-CH2-CH3, VH3-VH2-VL3-CH1-VL2-CL-CH2-CH3, VH3-VL3-VL2-CL-VH2-CH1-CH2-CH3, VH3-VL3-VL2-CH1-VH2-CL-CH2-CH3, VH3-VL3-VH2-CL-VL2-CH1-CH2-CH3, or VH3-VL3-VH2-CH1-VL2-CL-CH2-CH3.

[2115] In some aspects, an antigen binding polypeptide complex provided herein comprises a first polypeptide, and a second polypeptide; wherein the first polypeptide has a structure represented by VL1-L1-CL-L2-VH1-L3-CH1-CH2-CH3, VL1-L1-CH1-L2-VH1-L3-CL-CH2-CH3, VH1-L1-CL-L2-VL1- L3-CH1-CH2-CH3, or VH1-L1-CH1-L2-VL1-L3-CL-CH2-CH3; and wherein the second polypeptide has a structure represented by VL2-L4-VH2-L5-VL3-L6-CL-L7-VH3-L8-CH1-CH2-CH3, VL2-L4-VH2-L5-VL3-L6-CH1-L7-VH3-L8-CL-CH2-CH3, VL2-L4-VH2-L5-VH3-L6-CL-L7-VL3-L8-CH1-CH2-CH3, VL2-L4-VH2-L5-VH3-L6-CH1-L7-VL3-L8-CL-CH2-CH3, VL2-L4-VL3-L5-VH2-L6-CL-L7-VH3-L8-CH1-CH2-CH3, VL2-L4-VL3-L5-VH2-L6-CH1-L7-VH3-L8-CL-CH2-CH3, VL2-L4-VH3-L5-VH2-L6-CL-L7-VL3-L8-CH1-CH2-CH3, VL2-L4-VH3-L5-VH2-L6-CH1-L7-VL3-L8-CL-CH2-CH3, VH2-L4-VL2-L5-VL3-L6-CL-L7-VH3-L8-CH1-CH2-CH3, VH2-L4-VL2-L5-VL3-L6-CH1-L7-VH3-L8- CL-CH2-CH3, VH2-L4-VL2-L5-VH3-L6-CL-L7-VL3-L8-CH1-CH2-CH3, VH2-L4-VL2-L5-VH3-L6-CH1-L7-VL3-L8-CL-CH2-CH3, VH2-L4-VL3-L5-VL2-L6-CL-L7-VH3-L8-CH1-CH2-CH3, VH2-L4-VL3-L5-VL2-L6-CH1-L7-VH3-L8-CL-CH2-CH3, VH2-L4-VH3-L5-VL2-L6-CL-L7-VL3-L8-CH1-CH2-CH3, VH2-L4-VH3-L5-VL2-L6-CH1-L7-VL3-L8-CL-CH2-CH3, VL3-L4-VL2-L5-VH3-L6-CL-L7-VH2-L8-CH1-CH2-CH3, VL3-L4-VL2-L5-VH3-L6-CH1-L7-VH2-L8-CL-CH2-CH3, VL3-L4-VH2-L5-VH3-L6-CL-L7-VL2-L8-CH1-CH2-CH3, VL3-L4-VH2-L5-VH3-L6-CH1-L7-VL2-L8-CL-CH2-CH3, VL3-L4-VH3-L5-VL2-L6-CL-L7-VH2-L8-CH1-CH2-CH3, VL3-L4-VH3-L5-VL2-L6-CH1-L7-VH2-L8- CL-CH2-CH3, VL3-L4-VH3-L5-VH2-L6-CL-L7-VL2-L8-CH1-CH2-CH3, VL3-L4-VH3-L5-VH2-L6-CH1-L7-VL2-L8-CL-CH2-CH3, VH3-L4-VL2-L5-VL3-L6-CL-L7-VH2-L8-CH1-CH2-CH3, VH3-L4-VL2-L5-VL3-L6-CH1-L7-VH2-L8-CL-CH2-CH3, VH3-L4-VH2-L5-VL3-L6-CL-L7-VL2-L8-CH1-CH2-CH3, VH3-L4-VH2-L5-VL3-L6-CH1-L7-VL2-L8-CL-CH2-CH3, VH3-L4-VL3-L5-VL2-L6-CL-L7-VH2-L8-CH1-CH2-CH3, VH3-L4-VL3-L5-VL2-L6-CH1-L7-VH2-L8-CL-CH2-CH3, VH3-L4-VL3-L5-VH2-L6-CL-L7-VL2-L8-CH1-CH2-CH3, or VH3-L4-VL3-L5-VH2-L6-CH1-L7-VL2-L8-CL-CH2-CH3.

[2116] In some aspects, an antigen binding polypeptide complex provided herein comprises a first polypeptide, and a second polypeptide; wherein the first polypeptide has a structure represented by VL1-CL-VH1-CH1, VL1-CH1-VH1-CL, VH1-CL-VL1-CH1, or VH1-CH1-VL1-CL; and wherein the second polypeptide has a structure represented by VL2-CL-VH2-CH1-VL3-VH3, VL2-CL-VH2-CH1-VH3-VL3, VL2-CL-VL3-CH1-VH2-VH3, VL2-CL-VH3-CH1-VH2-VL3, VL2-CH1-VH2-CL-VL3-VH3, VL2-CH1-VH2-CL-VH3-VL3, VL2-CH1-VL3-CL-VH2-VH3, VL2-CH1-VH3-CL-VH2-VL3, VH2-CL-VL2-CH1-VL3-VH3, VH2-CL-VL2-CH1-VH3-VL3, VH2-CL-VL3-CH1-VL2-VH3, VH2-CL-VH3-CH1-VL2-VL3, VH2-CH1-VL2-CL-VL3-VH3, VH2-CH1-VL2-CL-VH3-VL3, VH2-CH1-VL3-CL-VL2-VH3, VH2-CH1-VH3-CL-VL2-VL3, VL3-CL-VL2-CH1-VH3-VH2, VL3-CL-VH2-CH1-VH3-VL2, VL3-CL-VH3-CH1-VL2-VH2, VL3-CL-VH3-CH1-VH2-VL2, VL3-CH1-VL2-CL-VH3-VH2, VL3-CH1-VH2-CL-VH3-VL2, VL3-CH1-VH3-CL-VL2-VH2, VL3-CH1-VH3-CL-VH2-VL2, VH3-CL-VL2-CH1-VL3-VH2, VH3-CL-VH2-CH1-VL3-VL2, VH3-CL-VL3-CH1-VL2-VH2, VH3-CL-VL3-CH1-VH2-VL2, VH3-CH1-VL2-CL-VL3-VH2, VH3-CH1-VH2-CL-VL3-VL2, VH3-CH1-VL3-CL-VL2-VH2, or VH3-CH1-VL3-CL-VH2-VL2.

[2117] In some aspects, an antigen binding polypeptide complex provided herein comprises a first polypeptide, and a second polypeptide; wherein the first polypeptide has a structure represented by VL1-L1-CL-L2-VH1-L3-CH1, VL1-L1-CH1-L2-VH1-L3-CL, VH1-L1-CL-L2-VL1-L3-CH1, or VH1-L1- CH1-L2-VL1-L3-CL; and wherein the second polypeptide has a structure represented by VL2-L4-CL-L5-VH2-L6-CH1-L7-VL3-L8-VH3, VL2-L4-CL-L5-VH2-L6-CH1-L7-VH3-L8-VL3, VL2-L4-CL-L5-VL3-L6-CH1-L7-VH2-L8-VH3, VL2-L4-CL-L5-VH3-L6-CH1-L7-VH2-L8-VL3, VL2-L4-CH1-L5-VH2-L6-CL-L7-VL3-L8-VH3, VL2-L4-CH1-L5-VH2-L6-CL-L7-VH3-L8-VL3, VL2-L4-CH1-L5-VL3-L6-CL- L7-VH2-L8-VH3, VL2-L4-CH1-L5-VH3-L6-CL-L7-VH2-L8-VL3, VH2-L4-CL-L5-VL2-L6-CH1-L7-VL3-L8-VH3, VH2-L4-CL-L5-VL2-L6-CH1-L7-VH3-L8-VL3, VH2-L4-CL-L5-VL3-L6-CH1-L7-VL2-L8-VH3, VH2-L4-CL-L5-VH3-L6-CH1-L7-VL2-L8-VL3, VH2-L4-CH1-L5-VL2-L6-CL-L7-VL3-L8-VH3, VH2-L4-CH1-L5-VL2-L6-CL-L7-VH3-L8-VL3, VH2-L4-CH1-L5-VL3-L6-CL-L7-VL2-L8-VH3, VH2-L4-CH1-L5-VH3-L6-CL-L7-VL2-L8-VL3, VL3-L4-CL-L5-VL2-L6-CH1-L7-VH3-L8-VH2, VL3-L4-CL-L5-VH2-L6-CH1-L7-VH3-L8-VL2, VL3-L4-CL-L5-VH3-L6-CH1-L7-VL2-L8-VH2, VL3-L4-CL- L5-VH3-L6-CH1-L7-VH2-L8-VL2, VL3-L4-CH1-L5-VL2-L6-CL-L7-VH3-L8-VH2, VL3-L4-CH1-L5-VH2-L6-CL-L7-VH3-L8-VL2, VL3-L4-CH1-L5-VH3-L6-CL-L7-VL2-L8-VH2, VL3-L4-CH1-L5-VH3-L6-CL-L7-VH2-L8-VL2, VH3-L4-CL-L5-VL2-L6-CH1-L7-VL3-L8-VH2, VH3-L4-CL-L5-VH2-L6-CH1- L7-VL3-L8-VL2, VH3-L4-CL-L5-VL3-L6-CH1-L7-VL2-L8-VH2, VH3-L4-CL-L5-VL3-L6-CH1-L7-VH2-L8-VL2, VH3-L4-CH1-L5-VL2-L6-CL-L7-VL3-L8-VH2, VH3-L4-CH1-L5-VH2-L6-CL-L7-VL3-L8-VL2, VH3-L4-CH1-L5-VL3-L6-CL-L7-VL2-L8-VH2, or VH3-L4-CH1-L5-VL3-L6-CL-L7-VH2-L8-VL2.

[2118] In some aspects, an antigen binding polypeptide complex provided herein comprises a first polypeptide, and a second polypeptide; wherein the first polypeptide has a structure represented by VL1-CL-VH1-CH1-CH2-CH3, VL1-CH1-VH1-CL-CH2-CH3, VH1-CL-VL1-CH1-CH2-CH3, or VH1-CH1-VL1-CL-CH2-CH3; and wherein the second polypeptide has a structure represented by VL2-CL-VH2-CH1-VL3-VH3-CH2-CH3, VL2-CL-VH2-CH1-VH3-VL3-CH2-CH3, VL2-CL-VL3-CH1-VH2-VH3-CH2-CH3, VL2-CL-VH3-CH1-VH2-VL3-CH2-CH3, VL2-CH1-VH2-CL-VL3-VH3-CH2-CH3, VL2-CH1-VH2-CL-VH3-VL3-CH2-CH3, VL2-CH1-VL3-CL-VH2-VH3-CH2-CH3, VL2-CH1-VH3-CL-VH2-VL3-CH2-CH3, VH2-CL-VL2-CH1-VL3-VH3-CH2-CH3, VH2-CL-VL2-CH1-VH3-VL3-CH2-CH3, VH2-CL-VL3-CH1-VL2-VH3-CH2-CH3, VH2-CL-VH3-CH1-VL2-VL3-CH2-CH3, VH2-CH1-VL2-CL-VL3-VH3-CH2-CH3, VH2-CH1-VL2-CL-VH3-VL3-CH2-CH3, VH2-CH1-VL3-CL-VL2-VH3-CH2-CH3, VH2-CH1-VH3-CL-VL2-VL3-CH2-CH3, VL3-CL-VL2-CH1-VH3-VH2-CH2-CH3, VL3-CL-VH2-CH1-VH3-VL2-CH2-CH3, VL3-CL-VH3-CH1-VL2-VH2-CH2-CH3, VL3-CL-VH3-CH1-VH2-VL2-CH2-CH3, VL3-CH1-VL2-CL-VH3-VH2-CH2-CH3, VL3-CH1-VH2-CL-VH3-VL2-CH2-CH3, VL3-CH1-VH3-CL-VL2-VH2-CH2-CH3, VL3-CH1-VH3-CL-VH2-VL2-CH2-CH3, VH3-CL-VL2-CH1-VL3-VH2-CH2-CH3, VH3-CL-VH2-CH1-VL3-VL2-CH2-CH3, VH3-CL-VL3-CH1-VL2-VH2-CH2-CH3, VH3-CL-VL3-CH1-VH2-VL2-CH2-CH3, VH3-CH1-VL2-CL-VL3-VH2-CH2-CH3, VH3-CH1-VH2-CL-VL3-VL2-CH2-CH3, VH3-CH1-VL3-CL-VL2-VH2-CH2-CH3, or VH3-CH1-VL3-CL-VH2-VL2-CH2-CH3.

[2119] In some aspects, an antigen binding polypeptide complex provided herein comprises a first polypeptide, and a second polypeptide; wherein the first polypeptide has a structure represented by VL1-L1-CL-L2-VH1-L3-CH1-CH2-CH3, VL1-L1-CH1-L2-VH1-L3-CL-CH2-CH3, VH1-L1-CL-L2-VL1- L3-CH1-CH2-CH3, or VH1-L1-CH1-L2-VL1-L3-CL-CH2-CH3; and wherein the second polypeptide has a structure represented by VL2-L4-CL-L5-VH2-L6-CH1-L7-VL3-L8-VH3-CH2-CH3, VL2-L4-CL-L5-VH2-L6-CH1-L7-VH3-L8-VL3-CH2-CH3, VL2-L4-CL-L5-VL3-L6-CH1-L7-VH2-L8-VH3-CH2-CH3, VL2-L4-CL-L5-VH3-L6-CH1-L7-VH2-L8-VL3-CH2-CH3, VL2-L4-CH1-L5-VH2-L6-CL-L7-VL3-L8-VH3-CH2-CH3, VL2-L4-CH1-L5-VH2-L6-CL-L7-VH3-L8-VL3-CH2-CH3, VL2-L4-CH1-L5-VL3-L6-CL-L7-VH2-L8-VH3-CH2-CH3, VL2-L4-CH1-L5-VH3-L6-CL-L7-VH2-L8-VL3-CH2-CH3, VH2-L4-CL-L5-VL2-L6-CH1-L7-VL3-L8-VH3-CH2-CH3, VH2-L4-CL-L5-VL2-L6-CH1-L7-VH3-L8-VL3-CH2-CH3, VH2-L4-CL-L5-VL3-L6-CH1-L7-VL2-L8-VH3-CH2-CH3, VH2-L4-CL-L5-VH3-L6-CH1-L7-VL2-L8-VL3-CH2-CH3, VH2-L4-CH1-L5-VL2-L6-CL-L7-VL3-L8-VH3-CH2-CH3, VH2-L4-CH1-L5-VL2-L6-CL-L7-VH3-L8-VL3-CH2-CH3, VH2-L4-CH1-L5-VL3-L6-CL-L7-VL2-L8-VH3-CH2-CH3, VH2-L4-CH1-L5-VH3-L6-CL-L7-VL2-L8-VL3-CH2-CH3, VL3-L4-CL-L5-VL2-L6-CH1-L7-VH3-L8-VH2-CH2-CH3, VL3-L4-CL-L5-VH2-L6-CH1-L7-VH3-L8-VL2-CH2-CH3, VL3-L4-CL-L5-VH3-L6-CH1-L7-VL2-L8-VH2-CH2-CH3, VL3-L4-CL-L5-VH3-L6-CH1-L7-VH2-L8-VL2-CH2-CH3, VL3-L4-CH1-L5-VL2-L6-CL-L7-VH3-L8-VH2-CH2-CH3, VL3-L4-CH1-L5-VH2-L6-CL-L7-VH3-L8-VL2-CH2-CH3, VL3-L4-CH1-L5-VH3-L6-CL-L7-VL2-L8-VH2-CH2-CH3, VL3-L4-CH1-L5-VH3-L6-CL-L7-VH2-L8-VL2-CH2-CH3, VH3-L4-CL-L5-VL2-L6-CH1-L7-VL3-L8-VH2-CH2-CH3, VH3-L4-CL-L5-VH2-L6-CH1-L7-VL3-L8-VL2-CH2-CH3, VH3-L4-CL-L5-VL3-L6-CH1-L7-VL2-L8-VH2-CH2-CH3, VH3-L4-CL-L5-VL3-L6-CH1-L7-VH2-L8-VL2-CH2-CH3, VH3-L4-CH1-L5-VL2-L6-CL-L7-VL3-L8-VH2-CH2-CH3, VH3-L4-CH1-L5-VH2-L6-CL-L7-VL3-L8-VL2-CH2-CH3, VH3-L4-CH1-L5-VL3-L6-CL-L7-VL2-L8-VH2-CH2-CH3, or VH3-L4-CH1-L5-VL3-L6-CL-L7-VH2-L8-VL2-CH2-CH3.

[2120] In some aspects, VL1 is a first immunoglobulin light chain variable region that specifically binds to a SARS-CoV-2 protein (e.g., a SARS-CoV-2 spike protein); VL2 is a second immunoglobulin light chain variable region that specifically binds to a SARS-CoV-2 protein (e.g., a SARS-CoV-2 spike protein); VL3 is a third immunoglobulin light chain variable region that specifically binds to a SARS-CoV-2 protein (e.g., a SARS-CoV-2 spike protein); VH1 is a first immunoglobulin heavy chain variable region that specifically binds to a SARS-CoV-2 protein (e.g., a SARS-CoV-2 spike protein); VH2 is a second immunoglobulin heavy chain variable region that specifically binds to a SARS-CoV-2 protein (e.g., a SARS-CoV-2 spike protein); VH3 is a third immunoglobulin heavy chain variable region that specifically binds to a SARS-CoV-2 protein (e.g., a SARS-CoV-2 spike protein); CH1 is an immunoglobulin heavy chain constant region 1; CL is an immunoglobulin light chain constant region; and L1-L8 are optional amino acid linkers. In any aspect shown herein as a structure from amino terminus to carboxy terminus, and with binding pairs selected from VL and/or VH or other structural regions such as CH1, CL, CH2, CH3, when shown without a specific linker such as L1, L2, etc., such linkers are optionally present in such structures between each designated subsequence VL, VH, etc.

[2121] In some aspects, the VL1 and the VL2 each comprise a CDR1, a CDR2, and a CDR3 that are the same. In some aspects, the VL1 and the VL2 each comprise a CDR1, a CDR2, and a CDR3 that are different. In some aspects, the VL1 and the VL3 each comprise a CDR1, a CDR2, and a CDR3 that are the same. In some aspects, the VL1 and the VL3 each comprise a CDR1, a CDR2, and a CDR3 that are different. In some aspects, the VL2 and the VL3 each comprise a CDR1, a CDR2, and a CDR3 that are the same. In some aspects, the VL2 and the VL3 each comprise a CDR1, a CDR2, and a CDR3 that are different.

[2122] In some aspects, the VL1 and the VL2 each comprise an amino acid sequence, wherein the amino acid sequence comprised in VL1 and the amino acid sequence comprised in VL2 are the same. In some aspects, the VL1 and the VL2 each comprise an amino acid sequence, wherein the amino acid sequence comprised in VL1 and the amino acid sequence comprised in VL2 are different. In some aspects, the VL1 and the VL3 each comprise an amino acid sequence, wherein the amino acid sequence comprised in VL1 and the amino acid sequence comprised in VL3 are the same. In some aspects, the VL1 and the VL3 each comprise an amino acid sequence, wherein the amino acid sequence comprised in VL1 and the amino acid sequence comprised in VL3 are different. In some aspects, the VL2 and the VL3 each comprise an amino acid sequence, wherein the amino acid sequence comprised in VL2 and the amino acid sequence comprised in VL3 are the same. In some aspects, the VL2 and the VL3 each comprise an amino acid sequence, wherein the amino acid sequence comprised in VL2 and the amino acid sequence comprised in VL3 are different.

[2123] In some aspects, VL1 comprises a CDR1 having an amino acid sequence at least 65%, at least 70%, at least 75%, at least 80%, at least 85%, at least 90%, at least 95%, at least 99%, or 100% identical to any one of SEQ ID NOs: 1, 9, 15, 23, 30, 41, 48, 55, 58, 65, 72, 79, 86, 93, 99, 105, 112, 119, 130, 138, 145, 152, 159, 166, 172, 179, 186, 192, 199, 205, 212, 219, 226, 232, 324, 627, 640, 650, 659, 676, 687, 695, 703, 712, 770, 778, 785, 794, 801, 807, 814, 827, 836, 849, 858, 865, 878, 1045, 1050, 1055, 1060, and 1065.

[2124] In some aspects, VL1 comprises a CDR1 having an amino acid sequence at least 65%, at least 70%, at least 75%, at least 80%, at least 85%, at least 90%, at least 95%, at least 99%, or 100% identical to any one of SEQ ID NOs: 1, 9, 15, 23, 30, 65, 72, 145, 152, 324, 627, 138, 172, 1045, 1050, 1055, 1060, and 1065.

[2125] In some aspects, VL1 comprises a CDR2 having an amino acid sequence at least 65%, at least 70%, at least 75%, at least 80%, at least 85%, at least 90%, at least 95%, at least 99%, or 100% identical to any one of SEQ ID NOs: 2, 31, 628, 641, 677, 1046, 1051, 1056, and 1061; or at least 65%, at least 70%, at least 75%, at least 80%, at least 85%, at least 90%, at least 95%, at least 99%, or 100% identical to any one of amino acid sequences AAS, GAS, LGS, GTN, GTN, SAS, SDS, DNT, EVT, DAS, DVT, RNS, DVS, EDS, DDS, KDS, VAS, WAS, YTS, EVS, NNN, SYN, and DAT.

[2126] In some aspects, VL1 comprises a CDR2 having an amino acid sequence at least 65%, at least 70%, at least 75%, at least 80%, at least 85%, at least 90%, at least 95%, at least 99%, or 100% identical to any one of SEQ ID NOs: 2, 31, 628, 1046, 1051, 1056, and 1061, or at least 65%, at least 70%, at least 75%, at least 80%, at least 85%, at least 90%, at least 95%, at least 99%, or 100% identical to any one of amino acid sequences GAS, LGS, GTN, SAS, SDS, AAS, DAS, and DNT.

[2127] In some aspects, VL1 comprises a CDR3 having an amino acid sequence at least 65%, at least 70%, at least 75%, at least 80%, at least 85%, at least 90%, at least 95%, at least 99%, or 100% identical to any one of SEQ ID NOs: 3, 10, 16, 24, 32, 38, 42, 49, 59, 66, 73, 80, 87, 94, 100, 106, 113, 120, 126, 131, 139, 146, 153, 160, 167, 173, 180, 187, 193, 200, 206, 213, 220, 227, 233, 239, 242, 246, 249, 256, 283, 285, 287, 288, 290, 292, 294, 296, 301, 304, 306, 309, 311, 313, 316, 325, 326, 329, 642, 651, 660, 668, 678, 651, 696, 704, 713, 764, 766, 768, 771, 779, 786, 792, 795, 808, 815, 821, 830, 837, 843, 850, 856, 859, 866, 872, 879, 885, and 1066.

[2128] In some aspects, VL1 comprises a CDR3 having an amino acid sequence at least 65%, at least 70%, at least 75%, at least 80%, at least 85%, at least 90%, at least 95%, at least 99%, or 100% identical to any one of SEQ ID NOs: 3, 10, 16, 24, 32, 38, 66, 73, 146, 153, 325, 326, 764, 766, 139, 856, 173, 792, and 1066.

[2129] In some aspects, VL1 comprises a CDR1 having an amino acid sequence at least 65%, at least 70%, at least 75%, at least 80%, at least 85%, at least 90%, at least 95%, at least 99%, or 100% identical to SEQ ID NO: 9 or 1055, a CDR2 having an amino acid sequence at least 65%, at least 70%, at least 75%, at least 80%, at least 85%, at least 90%, at least 95%, at least 99%, or 100% identical to SEQ ID NO: 1056 or an amino acid sequence at least 65%, at least 70%, at least 75%, at least 80%, at least 85%, at least 90%, at least 95%, at least 99%, or 100% identical to amino acid sequence GAS, and a CDR3 having an amino acid sequence at least 65%, at least 70%, at least 75%, at least 80%, at least 85%, at least 90%, at least 95%, at least 99%, or 100% identical to SEQ ID NO: 10.

[2130] In some aspects, VL1 comprises an amino acid sequence at least 65%, at least 70%, at least 75%, at least 80%, at least 85%, at least 90%, at least 95%, at least 99%, or 100% identical to any one of SEQ ID NOs: 4, 11, 17, 25, 33, 39, 43, 50, 60, 67, 74, 81, 88, 95, 101, 107, 114, 121, 127, 132, 140, 147, 154, 161, 168, 174, 181, 188, 194, 201, 207, 214, 221, 228, 234, 240, 243, 247, 250, 251, 252, 255, 284, 286, 289, 291, 293, 295, 299, 300, 302, 303, 305, 307, 308, 310, 312, 314, 315, 317, 323, 639, 649, 658, 667, 675, 686, 694, 702, 711, 772, 780, 787, 796, 802, 809, 816, 822, 831, 838, 844, 851, 860, 867, 873, 880, and 988.

[2131] In some aspects, VL1 comprises an amino acid sequence at least 65%, at least 70%, at least 75%, at least 80%, at least 85%, at least 90%, at least 95%, at least 99%, or 100% identical to any one of SEQ ID NOs: 4, 11, 17, 25, 33, 39, 67, 74, 147, 154, 140, and 174.

[2132] In some aspects, VH1 comprises a CDR1 having an amino acid sequence at least 65%, at least 70%, at least 75%, at least 80%, at least 85%, at least 90%, at least 95%, at least 99%, or 100% identical to any one of SEQ ID NOs: 5, 12, 18, 26, 34, 44, 51, 61, 68, 75, 82, 89, 96, 102, 108, 115, 122, 133, 141, 148, 155, 162, 175, 182, 189, 195, 202, 208, 215, 222, 229, 235, 318, 629, 645, 654, 663, 671, 682, 690, 699, 707, 716, 773, 781, 788, 797, 803, 810, 817, 823, 832, 839, 845, 852, 861, 868, 874, 881, 1047, 1052, 1057, 1062, and 1067.

[2133] In some aspects, VH1 comprises a CDR1 having an amino acid sequence at least 65%, at least 70%, at least 75%, at least 80%, at least 85%, at least 90%, at least 95%, at least 99%, or 100% identical to any one of SEQ ID NOs: 5, 12, 18, 26, 34, 68, 75, 148, 155, 629, 141, 175, 1047, 1052, 1057, 1062, and 1067.

[2134] In some aspects, VH1 comprises a CDR2 having an amino acid sequence at least 65%, at least 70%, at least 75%, at least 80%, at least 85%, at least 90%, at least 95%, at least 99%, or 100% identical to any one of SEQ ID NOs: 6, 19, 27, 35, 45, 52, 56, 62, 69, 76, 83, 90, 109, 116, 123, 134, 142, 149, 156, 163, 169, 176, 183, 196, 209, 216, 223, 236, 273, 319, 328, 630, 646, 655, 664, 672, 683, 691, 708, 776, 782, 789, 798, 804, 811, 818, 824, 833, 840, 846, 853, 862, 869, 875, 882, 1048, 1053, 1058, 1063, and 1068.

[2135] In some aspects, VH1 comprises a CDR2 having an amino acid sequence at least 65%, at least 70%, at least 75%, at least 80%, at least 85%, at least 90%, at least 95%, at least 99%, or 100% identical to any one of SEQ ID NOs: 6, 19, 27, 35, 69, 76, 149, 156, 630, 142, 176, 1048, 1053, 1058, 1063, and 1068.

[2136] In some aspects, VH1 comprises a CDR3 having an amino acid sequence at least 65%, at least 70%, at least 75%, at least 80%, at least 85%, at least 90%, at least 95%, at least 99%, or 100% identical to any one of SEQ ID NOs: 7, 13, 20, 28, 36, 40, 46, 53, 63, 70, 77, 84, 91, 97, 103, 110, 117, 124, 128, 135, 143, 150, 157, 164, 170, 177, 184, 190, 197, 203, 210, 217, 224, 230, 237, 241, 244, 248, 253, 257, 259, 261, 263, 265, 267, 269, 271, 274, 276, 278, 281, 297, 320, 322, 327, 330, 332, 631, 647, 656, 665, 673, 684, 692, 700, 709, 717, 765, 767, 769, 774, 783, 790, 793, 799, 805, 812, 819, 825, 834, 841, 847, 854, 857, 863, 870, 876, 883, 886, 1049, 1054, 1059, 1064, and 1069.

[2137] In some aspects, VH1 comprises a CDR3 having an amino acid sequence at least 65%, at least 70%, at least 75%, at least 80%, at least 85%, at least 90%, at least 95%, at least 99%, or 100% identical to any one of SEQ ID NOs: 7, 13, 20, 28, 36, 40, 70, 77, 327, 150, 157, 332, 631, 765, 767, 143, 857, 177, 793, 1049, 1054, 1059, 1064, and 1069.

[2138] In some aspects, VH1 comprises a CDR1 having an amino acid sequence at least 65%, at least 70%, at least 75%, at least 80%, at least 85%, at least 90%, at least 95%, at least 99%, or 100% identical to SEQ ID NO: 12 or 1057, a CDR2 having an amino acid sequence at least 65%, at least 70%, at least 75%, at least 80%, at least 85%, at least 90%, at least 95%, at least 99%, or 100% identical to SEQ ID NO: 6 or 1058, and a CDR3 having an amino acid sequence at least 65%, at least 70%, at least 75%, at least 80%, at least 85%, at least 90%, at least 95%, at least 99%, or 100% identical to SEQ ID NO: 13 or 1059.

[2139] In some aspects, VH1 comprises an amino acid sequence at least 65%, at least 70%, at least 75%, at least 80%, at least 85%, at least 90%, at least 95%, at least 99%, or 100% identical to any one of SEQ ID NOs: 8, 14, 21, 22, 29, 37, 47, 54, 57, 64, 71, 78, 85, 92, 98, 104, 111, 118, 125, 129, 136, 137, 144, 151, 158, 165, 171, 178, 185, 191, 198, 204, 211, 218, 225, 231, 238, 245, 254, 258, 260, 262, 264, 266, 268, 270, 272, 275, 277, 279, 280, 282, 298, 321, 331, 626, 644, 653, 662, 670, 681, 689, 698, 706, 715, 775, 777, 784, 791, 800, 806, 813, 820, 826, 835, 842, 848, 855, 864, 871, 877, and 884.

[2140] In some aspects, VH1 comprises an amino acid sequence at least 65%, at least 70%, at least 75%, at least 80%, at least 85%, at least 90%, at least 95%, at least 99%, or 100% identical to any one of SEQ ID NOs: 8, 14, 21, 22, 29, 37, 71, 78, 151, 158, 626, 144, and 178.

[2141] In some aspects, VL2 comprises a CDR1 having an amino acid sequence at least 65%, at least 70%, at least 75%, at least 80%, at least 85%, at least 90%, at least 95%, at least 99%, or 100% identical to any one of SEQ ID NOs: 1, 9, 15, 23, 30, 41, 48, 55, 58, 65, 72, 79, 86, 93, 99, 105, 112, 119, 130, 138, 145, 152, 159, 166, 172, 179, 186, 192, 199, 205, 212, 219, 226, 232, 324, 627, 640, 650, 659, 676, 687, 695, 703, 712, 770, 778, 785, 794, 801, 807, 814, 827, 836, 849, 858, 865, 878, 1045, 1050, 1055, 1060, and 1065.

[2142] In some aspects, VL2 comprises a CDR1 having an amino acid sequence at least 65%, at least 70%, at least 75%, at least 80%, at least 85%, at least 90%, at least 95%, at least 99%, or 100% identical to any one of SEQ ID NOs: 1, 9, 15, 23, 30, 65, 72, 145, 152, 324, 627, 138, 172, 1045, 1050, 1055, 1060, and 1065.

[2143] In some aspects, VL2 comprises a CDR2 having an amino acid sequence at least 65%, at least 70%, at least 75%, at least 80%, at least 85%, at least 90%, at least 95%, at least 99%, or 100% identical to any one of SEQ ID NOs: 2, 31, 628, 641, 677, 1046, 1051, 1056, and 1061; or at least 65%, at least 70%, at least 75%, at least 80%, at least 85%, at least 90%, at least 95%, at least 99%, or 100% identical to any one of amino acid sequences AAS, GAS, LGS, GTN, GTN, SAS, SDS, DNT, EVT, DAS, DVT, RNS, DVS, EDS, DDS, KDS, VAS, WAS, YTS, EVS, NNN, SYN, and DAT.

[2144] In some aspects, VL2 comprises a CDR2 having an amino acid sequence at least 65%, at least 70%, at least 75%, at least 80%, at least 85%, at least 90%, at least 95%, at least 99%, or 100% identical to any one of SEQ ID NOs: 2, 31, 628, 1046, 1051, 1056, and 1061, or at least 65%, at least 70%, at least 75%, at least 80%, at least 85%, at least 90%, at least 95%, at least 99%, or 100% identical to any one of amino acid sequences GAS, LGS, GTN, SAS, SDS, AAS, DAS, and DNT.

[2145] In some aspects, VL2 comprises a CDR3 having an amino acid sequence at least 65%, at least 70%, at least 75%, at least 80%, at least 85%, at least 90%, at least 95%, at least 99%, or 100% identical to any one of SEQ ID NOs: 3, 10, 16, 24, 32, 38, 42, 49, 59, 66, 73, 80, 87, 94, 100, 106, 113, 120, 126, 131, 139, 146, 153, 160, 167, 173, 180, 187, 193, 200, 206, 213, 220, 227, 233, 239, 242, 246, 249, 256, 283, 285, 287, 288, 290, 292, 294, 296, 301, 304, 306, 309, 311, 313, 316, 325, 326, 329, 642, 651, 660, 668, 678, 651, 696, 704, 713, 764, 766, 768, 771, 779, 786, 792, 795, 808, 815, 821, 830, 837, 843, 850, 856, 859, 866, 872, 879, 885, and 1066.

[2146] In some aspects, VL2 comprises a CDR3 having an amino acid sequence at least 65%, at least 70%, at least 75%, at least 80%, at least 85%, at least 90%, at least 95%, at least 99%, or 100% identical to any one of SEQ ID NOs: 3, 10, 16, 24, 32, 38, 66, 73, 146, 153, 325, 326, 764, 766, 139, 856, 173, 792, and 1066.

[2147] In some aspects, VL2 comprises a CDR1 having an amino acid sequence at least 65%, at least 70%, at least 75%, at least 80%, at least 85%, at least 90%, at least 95%, at least 99%, or 100% identical to SEQ ID NO: 15, a CDR2 having an amino acid sequence at least 65%, at least 70%, at least 75%, at least 80%, at least 85%, at least 90%, at least 95%, at least 99%, or 100% identical to amino acid sequence LGS, and a CDR3 having an amino acid sequence at least 65%, at least 70%, at least 75%, at least 80%, at least 85%, at least 90%, at least 95%, at least 99%, or 100% identical to SEQ ID NO: 16.

[2148] In some aspects, VL2 comprises a CDR1 having an amino acid sequence at least 65%, at least 70%, at least 75%, at least 80%, at least 85%, at least 90%, at least 95%, at least 99%, or 100% identical to SEQ ID NO: 23, a CDR2 having an amino acid sequence at least 65%, at least 70%, at least 75%, at least 80%, at least 85%, at least 90%, at least 95%, at least 99%, or 100% identical to amino acid sequence GTN, and a CDR3 having an amino acid sequence at least 65%, at least 70%, at least 75%, at least 80%, at least 85%, at least 90%, at least 95%, at least 99%, or 100% identical to SEQ ID NO: 24 or 325.

[2149] In some aspects, VL2 comprises an amino acid sequence at least 65%, at least 70%, at least 75%, at least 80%, at least 85%, at least 90%, at least 95%, at least 99%, or 100% identical to any one of SEQ ID NOs: 4, 11, 17, 25, 33, 39, 43, 50, 60, 67, 74, 81, 88, 95, 101, 107, 114, 121, 127, 132, 140, 147, 154, 161, 168, 174, 181, 188, 194, 201, 207, 214, 221, 228, 234, 240, 243, 247, 250, 251, 252, 255, 284, 286, 289, 291, 293, 295, 299, 300, 302, 303, 305, 307, 308, 310, 312, 314, 315, 317, 323, 639, 649, 658, 667, 675, 686, 694, 702, 711, 772, 780, 787, 796, 802, 809, 816, 822, 831, 838, 844, 851, 860, 867, 873, 880, and 988.

[2150] In some aspects, VL2 comprises an amino acid sequence at least 65%, at least 70%, at least 75%, at least 80%, at least 85%, at least 90%, at least 95%, at least 99%, or 100% identical to any one of SEQ ID NOs: 4, 11, 17, 25, 33, 39, 67, 74, 147, 154, 140, and 174.

[2151] In some aspects, VH2 comprises a CDR1 having an amino acid sequence at least 65%, at least 70%, at least 75%, at least 80%, at least 85%, at least 90%, at least 95%, at least 99%, or 100% identical to any one of SEQ ID NOs: 5, 12, 18, 26, 34, 44, 51, 61, 68, 75, 82, 89, 96, 102, 108, 115, 122, 133, 141, 148, 155, 162, 175, 182, 189, 195, 202, 208, 215, 222, 229, 235, 318, 629, 645, 654, 663, 671, 682, 690, 699, 707, 716, 773, 781, 788, 797, 803, 810, 817, 823, 832, 839, 845, 852, 861, 868, 874, 881, 1047, 1052, 1057, 1062, and 1067.

[2152] In some aspects, VH2 comprises a CDR1 having an amino acid sequence at least 65%, at least 70%, at least 75%, at least 80%, at least 85%, at least 90%, at least 95%, at least 99%, or 100% identical to any one of SEQ ID NOs: 5, 12, 18, 26, 34, 68, 75, 148, 155, 629, 141, 175, 1047, 1052, 1057, 1062, and 1067.

[2153] In some aspects, VH2 comprises a CDR2 having an amino acid sequence at least 65%, at least 70%, at least 75%, at least 80%, at least 85%, at least 90%, at least 95%, at least 99%, or 100% identical to any one of SEQ ID NOs: 6, 19, 27, 35, 45, 52, 56, 62, 69, 76, 83, 90, 109, 116, 123, 134, 142, 149, 156, 163, 169, 176, 183, 196, 209, 216, 223, 236, 273, 319, 328, 630, 646, 655, 664, 672, 683, 691, 708, 776, 782, 789, 798, 804, 811, 818, 824, 833, 840, 846, 853, 862, 869, 875, 882, 1048, 1053, 1058, 1063, and 1068.

[2154] In some aspects, VH2 comprises a CDR2 having an amino acid sequence at least 65%, at least 70%, at least 75%, at least 80%, at least 85%, at least 90%, at least 95%, at least 99%, or 100% identical to any one of SEQ ID NOs: 6, 19, 27, 35, 69, 76, 149, 156, 630, 142, 176, 1048, 1053, 1058, 1063, and 1068.

[2155] In some aspects, VH2 comprises a CDR3 having an amino acid sequence at least 65%, at least 70%, at least 75%, at least 80%, at least 85%, at least 90%, at least 95%, at least 99%, or 100% identical to any one of SEQ ID NOs: 7, 13, 20, 28, 36, 40, 46, 53, 63, 70, 77, 84, 91, 97, 103, 110, 117, 124, 128, 135, 143, 150, 157, 164, 170, 177, 184, 190, 197, 203, 210, 217, 224, 230, 237, 241, 244, 248, 253, 257, 259, 261, 263, 265, 267, 269, 271, 274, 276, 278, 281, 297, 320, 322, 327, 330, 332, 631, 647, 656, 665, 673, 684, 692, 700, 709, 717, 765, 767, 769, 774, 783, 790, 793, 799, 805, 812, 819, 825, 834, 841, 847, 854, 857, 863, 870, 876, 883, 886, 1049, 1054, 1059, 1064, and 1069.

[2156] In some aspects, VH2 comprises a CDR3 having an amino acid sequence at least 65%, at least 70%, at least 75%, at least 80%, at least 85%, at least 90%, at least 95%, at least 99%, or 100% identical to any one of SEQ ID NOs: 7, 13, 20, 28, 36, 40, 70, 77, 150, 157, 327, 332, 631, 765, 767, 143, 857, 177, 793, 1049, 1054, 1059, 1064, and 1069.

[2157] In some aspects, VH2 comprises a CDR1 having an amino acid sequence at least 65%, at least 70%, at least 75%, at least 80%, at least 85%, at least 90%, at least 95%, at least 99%, or 100% identical to SEQ ID NO: 18, a CDR2 having an amino acid sequence at least 65%, at least 70%, at least 75%, at least 80%, at least 85%, at least 90%, at least 95%, at least 99%, or 100% identical to SEQ ID NO: 19, and a CDR3 having an amino acid sequence at least 65%, at least 70%, at least 75%, at least 80%, at least 85%, at least 90%, at least 95%, at least 99%, or 100% identical to SEQ ID NO: 20.

[2158] In some aspects, VH2 comprises a CDR1 having an amino acid sequence at least 65%, at least 70%, at least 75%, at least 80%, at least 85%, at least 90%, at least 95%, at least 99%, or 100% identical to SEQ ID NO: 26, a CDR2 having an amino acid sequence at least 65%, at least 70%, at least 75%, at least 80%, at least 85%, at least 90%, at least 95%, at least 99%, or 100% identical to SEQ ID NO: 27, and a CDR3 having an amino acid sequence at least 65%, at least 70%, at least 75%, at least 80%, at least 85%, at least 90%, at least 95%, at least 99%, or 100% identical to SEQ ID NO: 28 or 332.

[2159] In some aspects, VH2 comprises an amino acid sequence at least 65%, at least 70%, at least 75%, at least 80%, at least 85%, at least 90%, at least 95%, at least 99%, or 100% identical to any one of SEQ ID NOs: 8, 14, 21, 22, 29, 37, 47, 54, 57, 64, 71, 78, 85, 92, 98, 104, 111, 118, 125, 129, 136, 137, 144, 151, 158, 165, 171, 178, 185, 191, 198, 204, 211, 218, 225, 231, 238, 245, 254, 258, 260, 262, 264, 266, 268, 270, 272, 275, 277, 279, 280, 282, 298, 321, 331, 626, 644, 653, 662, 670, 681, 689, 698, 706, 715, 775, 777, 784, 791, 800, 806, 813, 820, 826, 835, 842, 848, 855, 864, 871, 877, and 884.

[2160] In some aspects, VH2 comprises an amino acid sequence at least 65%, at least 70%, at least 75%, at least 80%, at least 85%, at least 90%, at least 95%, at least 99%, or 100% identical to any one of SEQ ID NOs: 8, 14, 21, 22, 29, 37, 71, 78, 151, 158, 626, 144, and 178.

[2161] In some aspects, VL3 comprises a CDR1 having an amino acid sequence at least 65%, at least 70%, at least 75%, at least 80%, at least 85%, at least 90%, at least 95%, at least 99%, or 100% identical to any one of SEQ ID NOs: 1, 9, 15, 23, 30, 41, 48, 55, 58, 65, 72, 79, 86, 93, 99, 105, 112, 119, 130, 138, 145, 152, 159, 166, 172, 179, 186, 192, 199, 205, 212, 219, 226, 232, 324, 627, 640, 650, 659, 676, 687, 695, 703, 712, 770, 778, 785, 794, 801, 807, 814, 827, 836, 849, 858, 865, 878, 1045, 1050, 1055, 1060, and 1065.

[2162] In some aspects, VL3 comprises a CDR1 having an amino acid sequence at least 65%, at least 70%, at least 75%, at least 80%, at least 85%, at least 90%, at least 95%, at least 99%, or 100% identical to any one of SEQ ID NOs: 1, 9, 15, 23, 30, 65, 72, 145, 152, 324, 627, 138, 172, 1045, 1050, 1055, 1060, and 1065.

[2163] In some aspects, VL3 comprises a CDR2 having an amino acid sequence at least 65%, at least 70%, at least 75%, at least 80%, at least 85%, at least 90%, at least 95%, at least 99%, or 100% identical to any one of SEQ ID NOs: 2, 31, 628, 641, 677, 1046, 1051, 1056, and 1061; or at least 65%, at least 70%, at least 75%, at least 80%, at least 85%, at least 90%, at least 95%, at least 99%, or 100% identical to any one of amino acid sequences AAS, GAS, LGS, GTN, GTN, SAS, SDS, DNT, EVT, DAS, DVT, RNS, DVS, EDS, DDS, KDS, VAS, WAS, YTS, EVS, NNN, SYN, and DAT.

[2164] In some aspects, VL3 comprises a CDR2 having an amino acid sequence at least 65%, at least 70%, at least 75%, at least 80%, at least 85%, at least 90%, at least 95%, at least 99%, or 100% identical to any one of SEQ ID NOs: 2, 31, 628, 1046, 1051, 1056, and 1061 or an amino acid sequence at least 65%, at least 70%, at least 75%, at least 80%, at least 85%, at least 90%, at least 95%, at least 99%, or 100% identical to any one of amino acid sequences GAS, LGS, GTN, SAS, SDS, AAS, DAS, and DNT.

[2165] In some aspects, VL3 comprises a CDR3 having an amino acid sequence at least 65%, at least 70%, at least 75%, at least 80%, at least 85%, at least 90%, at least 95%, at least 99%, or 100% identical to any one of SEQ ID NOs: 3, 10, 16, 24, 32, 38, 42, 49, 59, 66, 73, 80, 87, 94, 100, 106, 113, 120, 126, 131, 139, 146, 153, 160, 167, 173, 180, 187, 193, 200, 206, 213, 220, 227, 233, 239, 242, 246, 249, 256, 283, 285, 287, 288, 290, 292, 294, 296, 301, 304, 306, 309, 311, 313, 316, 325, 326, 329, 642, 651, 660, 668, 678, 651, 696, 704, 713, 764, 766, 768, 771, 779, 786, 792, 795, 808, 815, 821, 830, 837, 843, 850, 856, 859, 866, 872, 879, 885, and 1066.

[2166] In some aspects, VL3 comprises a CDR3 having an amino acid sequence at least 65%, at least 70%, at least 75%, at least 80%, at least 85%, at least 90%, at least 95%, at least 99%, or 100% identical to any one of SEQ ID NOs: 3, 10, 16, 24, 32, 38, 66, 73, 146, 153, 325, 326, 764, 766, 139, 856, 173, 792, and 1066.

[2167] In some aspects, VL3 comprises a CDR1 having an amino acid sequence at least 65%, at least 70%, at least 75%, at least 80%, at least 85%, at least 90%, at least 95%, at least 99%, or 100% identical to SEQ ID NO: 15, a CDR2 having an amino acid sequence at least 65%, at least 70%, at least 75%, at least 80%, at least 85%, at least 90%, at least 95%, at least 99%, or 100% identical to amino acid sequence LGS, and a CDR3 having an amino acid sequence at least 65%, at least 70%, at least 75%, at least 80%, at least 85%, at least 90%, at least 95%, at least 99%, or 100% identical to SEQ ID NO: 16.

[2168] In some aspects, VL3 comprises a CDR1 having an amino acid sequence at least 65%, at least 70%, at least 75%, at least 80%, at least 85%, at least 90%, at least 95%, at least 99%, or 100% identical to SEQ ID NO: 23, a CDR2 having an amino acid sequence at least 65%, at least 70%, at least 75%, at least 80%, at least 85%, at least 90%, at least 95%, at least 99%, or 100% identical to amino acid sequence GTN, and a CDR3 having an amino acid sequence at least 65%, at least 70%, at least 75%, at least 80%, at least 85%, at least 90%, at least 95%, at least 99%, or 100% identical to SEQ ID NO: 24 or 325. In some aspects, VL3 comprises an amino acid sequence at least 65%, at least 70%, at least 75%, at least 80%, at least 85%, at least 90%, at least 95%, at least 99%, or 100% identical to any one of SEQ ID NOs: 4, 11, 17, 25, 33, 39, 43, 50, 60, 67, 74, 81, 88, 95, 101, 107, 114, 121, 127, 132, 140, 147, 154, 161, 168, 174, 181, 188, 194, 201, 207, 214, 221, 228, 234, 240, 243, 247, 250, 251, 252, 255, 284, 286, 289, 291, 293, 295, 299, 300, 302, 303, 305, 307, 308, 310, 312, 314, 315, 317, 323, 639, 649, 658, 667, 675, 686, 694, 702, 711, 772, 780, 787, 796, 802, 809, 816, 822, 831, 838, 844, 851, 860, 867, 873, 880, and 988.

[2169] In some aspects, VL3 comprises an amino acid sequence at least 65%, at least 70%, at least 75%, at least 80%, at least 85%, at least 90%, at least 95%, at least 99%, or 100% identical to any one of SEQ ID NOs: 4, 11, 17, 25, 33, 39, 67, 74, 147, 154, 140, and 174.

[2170] In some aspects, VH3 comprises a CDR1 having an amino acid sequence at least 65%, at least 70%, at least 75%, at least 80%, at least 85%, at least 90%, at least 95%, at least 99%, or 100% identical to any one of SEQ ID NOs: 5, 12, 18, 26, 34, 44, 51, 61, 68, 75, 82, 89, 96, 102, 108, 115, 122, 133, 141, 148, 155, 162, 175, 182, 189, 195, 202, 208, 215, 222, 229, 235, 318, 629, 645, 654, 663, 671, 682, 690, 699, 707, 716, 773, 781, 788, 797, 803, 810, 817, 823, 832, 839, 845, 852, 861, 868, 874, 881, 1047, 1052, 1057, 1062, and 1067.

[2171] In some aspects, VH3 comprises a CDR1 having an amino acid sequence at least 65%, at least 70%, at least 75%, at least 80%, at least 85%, at least 90%, at least 95%, at least 99%, or 100% identical to any one of SEQ ID NOs: 5, 12, 18, 26, 34, 68, 75, 148, 155, 629, 141, 175, 1047, 1052, 1057, 1062, and 1067.

[2172] In some aspects, VH3 comprises a CDR2 having an amino acid sequence at least 65%, at least 70%, at least 75%, at least 80%, at least 85%, at least 90%, at least 95%, at least 99%, or 100% identical to any one of SEQ ID NOs: 6, 19, 27, 35, 45, 52, 56, 62, 69, 76, 83, 90, 109, 116, 123, 134, 142, 149, 156, 163, 169, 176, 183, 196, 209, 216, 223, 236, 273, 319, 328, 630, 646, 655, 664, 672, 683, 691, 708, 776, 782, 789, 798, 804, 811, 818, 824, 833, 840, 846, 853, 862, 869, 875, 882, 1048, 1053, 1058, 1063, and 1068.

[2173] In some aspects, VH3 comprises a CDR2 having an amino acid sequence at least 65%, at least 70%, at least 75%, at least 80%, at least 85%, at least 90%, at least 95%, at least 99%, or 100% identical to any one of SEQ ID NOs: 6, 19, 27, 35, 69, 76, 149, 156, 630, 142, 176, 1048, 1053, 1058, 1063, and 1068. In some aspects, VH3 comprises a CDR3 having an amino acid sequence at least 65%, at least 70%, at least 75%, at least 80%, at least 85%, at least 90%, at least 95%, at least 99%, or 100% identical to any one of SEQ ID NOs: 7, 13, 20, 28, 36, 40, 46, 53, 63, 70, 77, 84, 91, 97, 103, 110, 117, 124, 128, 135, 143, 150, 157, 164, 170, 177, 184, 190, 197, 203, 210, 217, 224, 230, 237, 241, 244, 248, 253, 257, 259, 261, 263, 265, 267, 269, 271, 274, 276, 278, 281, 297, 320, 322, 327, 330, 332, 631, 647, 656, 665, 673, 684, 692, 700, 709, 717, 765, 767, 769, 774, 783, 790, 793, 799, 805, 812, 819, 825, 834, 841, 847, 854, 857, 863, 870, 876, 883, 886, 1049, 1054, 1059, 1064, and 1069.

[2174] In some aspects, VH3 comprises a CDR3 having an amino acid sequence at least 65%, at least 70%, at least 75%, at least 80%, at least 85%, at least 90%, at least 95%, at least 99%, or 100% identical to any one of SEQ ID NOs: 7, 13, 20, 28, 36, 40, 70, 77, 150, 157, 327, 332, 631, 765, 767, 143, 857, 177, 793, 1049, 1054, 1059, 1064, and 1069.

[2175] In some aspects, VH3 comprises a CDR1 having an amino acid sequence at least 65%, at least 70%, at least 75%, at least 80%, at least 85%, at least 90%, at least 95%, at least 99%, or 100% identical to SEQ ID NO: 18, a CDR2 having an amino acid sequence at least 65%, at least 70%, at least 75%, at least 80%, at least 85%, at least 90%, at least 95%, at least 99%, or 100% identical to SEQ ID NO: 19, and a CDR3 having an amino acid sequence at least 65%, at least 70%, at least 75%, at least 80%, at least 85%, at least 90%, at least 95%, at least 99%, or 100% identical to SEQ ID NO: 20.

[2176] In some aspects, VH3 comprises a CDR1 having an amino acid sequence at least 65%, at least 70%, at least 75%, at least 80%, at least 85%, at least 90%, at least 95%, at least 99%, or 100% identical to SEQ ID NO: 26, a CDR2 having an amino acid sequence at least 65%, at least 70%, at least 75%, at least 80%, at least 85%, at least 90%, at least 95%, at least 99%, or 100% identical to SEQ ID NO: 27, and a CDR3 having an amino acid sequence at least 65%, at least 70%, at least 75%, at least 80%, at least 85%, at least 90%, at least 95%, at least 99%, or 100% identical to SEQ ID NO: 28 or 332.

[2177] In some aspects, VH3 comprises an amino acid sequence at least 65%, at least 70%, at least 75%, at least 80%, at least 85%, at least 90%, at least 95%, at least 99%, or 100% identical to any one of SEQ ID NOs: 8, 14, 21, 22, 29, 37, 47, 54, 57, 64, 71, 78, 85, 92, 98, 104, 111, 118, 125, 129, 136, 137, 144, 151, 158, 165, 171, 178, 185, 191, 198, 204, 211, 218, 225, 231, 238, 245, 254, 258, 260, 262, 264, 266, 268, 270, 272, 275, 277, 279, 280, 282, 298, 321, 331, 626, 644, 653, 662, 670, 681, 689, 698, 706, 715, 775, 777, 784, 791, 800, 806, 813, 820, 826, 835, 842, 848, 855, 864, 871, 877, and 884.

[2178] In some aspects, VH3 comprises an amino acid sequence at least 65%, at least 70%, at least 75%, at least 80%, at least 85%, at least 90%, at least 95%, at least 99%, or 100% identical to any one of SEQ ID NOs: 8, 14, 21, 22, 29, 37, 71, 78, 151, 158, 626, 144, and 178.

[2179] In some aspects, at least one of VL1, VL2, or VL3 comprised in the antigen binding polypeptide complexes provided herein comprises (i) a complementarity determining region (CDR) 1 having an amino acid sequence that is at least 65%, at least 70%, at least 75%, at least 80%, at least 85%, at least 90%, at least 95%, at least 99%, or 100% identical to SEQ ID NO: 145 or 1050; (ii) a CDR2 having an amino acid sequence at least 65%, at least 70%, at least 75%, at least 80%, at least 85%, at least 90%, at least 95%, at least 99%, or 100% identical to SEQ ID NO: 1051 or an amino acid sequence that is at least 65%, at least 70%, at least 75%, at least 80%, at least 85%, at least 90%, at least 95%, at least 99%, or 100% identical to amino acid sequence AAS; and (iii) a CDR3 having an amino acid sequence that is at least 65%, at least 70%, at least 75%, at least 80%, at least 85%, at least 90%, at least 95%, at least 99%, or 100% identical to SEQ ID NO: 146 or 764.

[2180] In some aspects, at least one of VH1, VH2, or VH3 comprised in the antigen binding polypeptide complexes provided herein comprises (i) a complementarity determining region (CDR) 1 having an amino acid sequence that is at least 65%, at least 70%, at least 75%, at least 80%, at least 85%, at least 90%, at least 95%, at least 99%, or 100% identical to SEQ ID NO: 148 or 1052; (ii) a CDR2 having an amino acid sequence that is at least 65%, at least 70%, at least 75%, at least 80%, at least 85%, at least 90%, at least 95%, at least 99%, or 100% identical to SEQ ID NO: 149 or 1053; and (iii) a CDR3 having an amino acid sequence that is at least 65%, at least 70%, at least 75%, at least 80%, at least 85%, at least 90%, at least 95%, at least 99%, or 100% identical to SEQ ID NO: 150, 765, or 1054.

[2181] In some aspects, at least one of VL1, VL2, or VL3 comprised in the antigen binding polypeptide complexes provided herein comprises (i) a complementarity determining region (CDR) 1 having an amino acid sequence that is at least 65%, at least 70%, at least 75%, at least 80%, at least 85%, at least 90%, at least 95%, at least 99%, or 100% identical to SEQ ID NO: 145 or 1050; (ii) a CDR2 having an amino acid sequence at least 65%, at least 70%, at least 75%, at least 80%, at least 85%, at least 90%, at least 95%, at least 99%, or 100% identical to SEQ ID NO: 1051 or an amino acid sequence that is at least 65%, at least 70%, at least 75%, at least 80%, at least 85%, at least 90%, at least 95%, at least 99%, or 100% identical to amino acid sequence AAS; and (iii) a CDR3 having an amino acid sequence that is at least 65%, at least 70%, at least 75%, at least 80%, at least 85%, at least 90%, at least 95%, at least 99%, or 100% identical to SEQ ID NO: 146 or 764; and at least one of VH1, VH2, or VH3 comprised in the antigen binding polypeptide complexes provided herein comprises (iv) a complementarity determining region (CDR) 1 having an amino acid sequence that is at least 65%, at least 70%, at least 75%, at least 80%, at least 85%, at least 90%, at least 95%, at least 99%, or 100% identical to SEQ ID NO: 148 or 1052; (v) a CDR2 having an amino acid sequence that is at least 65%, at least 70%, at least 75%, at least 80%, at least 85%, at least 90%, at least 95%, at least 99%, or 100% identical to SEQ ID NO: 149 or 1053; and (vi) a CDR3 having an amino acid sequence that is at least 65%, at least 70%, at least 75%, at least 80%, at least 85%, at least 90%, at least 95%, at least 99%, or 100% identical to SEQ ID NO: 150, 765, or 1054.

[2182] In some aspects, at least one of VL1, VL2, or VL3 comprised in the antigen binding polypeptide complexes provided herein comprises an amino acid sequence that is at least 65%, at least 70%, at least 75%, at least 80%, at least 85%, at least 90%, at least 95%, at least 99%, or 100% identical to SEQ ID NO: 147.

[2183] In some aspects, at least one of VH1, VH2, or VH3 comprised in the antigen binding polypeptide complexes provided herein comprises an amino acid sequence that is at least 65%, at least 70%, at least 75%, at least 80%, at least 85%, at least 90%, at least 95%, at least 99%, or 100% identical to SEQ ID NO: 151.

[2184] In some aspects, (i) at least one of VL1, VL2, or VL3 comprised in the antigen binding polypeptide complexes provided herein comprises an amino acid sequence that is at least 65%, at least 70%, at least 75%, at least 80%, at least 85%, at least 90%, at least 95%, at least 99%, or 100% identical to SEQ ID NO: 147, and (ii) at least one of VH1, VH2, or VH3 comprised in the antigen binding polypeptide complexes provided herein comprises an amino acid sequence that is at least 65%, at least 70%, at least 75%, at least 80%, at least 85%, at least 90%, at least 95%, at least 99%, or 100% identical to SEQ ID NO: 151.

[2185] In some aspects, the antigen binding polypeptide complexes provided herein comprise a VL1 comprising (i) a complementarity determining region (CDR) 1 having an amino acid sequence that is at least 65%, at least 70%, at least 75%, at least 80%, at least 85%, at least 90%, at least 95%, at least 99%, or 100% identical to SEQ ID NO: 145 or 1050; (ii) a CDR2 having an amino acid sequence at least 65%, at least 70%, at least 75%, at least 80%, at least 85%, at least 90%, at least 95%, at least 99%, or 100% identical to SEQ ID NO: 1051 or an amino acid sequence that is at least 65%, at least 70%, at least 75%, at least 80%, at least 85%, at least 90%, at least 95%, at least 99%, or 100% identical to amino acid sequence AAS; and (iii) a CDR3 having an amino acid sequence that is at least 65%, at least 70%, at least 75%, at least 80%, at least 85%, at least 90%, at least 95%, at least 99%, or 100% identical to SEQ ID NO: 146 or 764; a VH1 comprising (iv) a complementarity determining region (CDR) 1 having an amino acid sequence that is at least 65%, at least 70%, at least 75%, at least 80%, at least 85%, at least 90%, at least 95%, at least 99%, or 100% identical to SEQ ID NO: 148 or 1052; (v) a CDR2 having an amino acid sequence that is at least 65%, at least 70%, at least 75%, at least 80%, at least 85%, at least 90%, at least 95%, at least 99%, or 100% identical to SEQ ID NO: 149 or 1053; and (vi) a CDR3 having an amino acid sequence that is at least 65%, at least 70%, at least 75%, at least 80%, at least 85%, at least 90%, at least 95%, at least 99%, or 100% identical to SEQ ID NO: 150, 765, or 1054; a VL2 comprising (vii) a complementarity determining region (CDR) 1 having an amino acid sequence that is at least 65%, at least 70%, at least 75%, at least 80%, at least 85%, at least 90%, at least 95%, at least 99%, or 100% identical to any one of SEQ ID NOs: 1, 9, 15, 23, 30, 41, 48, 55, 58, 65, 72, 79, 86, 93, 99, 105, 112, 119, 130, 138, 145, 152, 159, 166, 172, 179, 186, 192, 199, 205, 212, 219, 226, 232, 324, 627, 640, 650, 659, 676, 687, 695, 703, 712, 770, 778, 785, 794, 801, 807, 814, 827, 836, 849, 858, 865, 878, 1045, 1050, 1055, 1060, and 1065; (viii) a CDR2 having an amino acid sequence at least 65%, at least 70%, at least 75%, at least 80%, at least 85%, at least 90%, at least 95%, at least 99%, or 100% identical to any one of SEQ ID NOs: 2, 31, 628, 641, 677, 1046, 1051, 1056, and 1061; or at least 65%, at least 70%, at least 75%, at least 80%, at least 85%, at least 90%, at least 95%, at least 99%, or 100% identical to any one of amino acid sequences AAS, GAS, LGS, GTN, GTN, SAS, SDS, DNT, EVT, DAS, DVT, RNS, DVS, EDS, DDS, KDS, VAS, WAS, YTS, EVS, NNN, SYN, and DAT; and (ix) a CDR3 having an amino acid sequence at least 65%, at least 70%, at least 75%, at least 80%, at least 85%, at least 90%, at least 95%, at least 99%, or 100% identical to any one of SEQ ID NOs: 3, 10, 16, 24, 32, 38, 42, 49, 59, 66, 73, 80, 87, 94, 100, 106, 113, 120, 126, 131, 139, 146, 153, 160, 167, 173, 180, 187, 193, 200, 206, 213, 220, 227, 233, 239, 242, 246, 249, 256, 283, 285, 287, 288, 290, 292, 294, 296, 301, 304, 306, 309, 311, 313, 316, 325, 326, 329, 642, 651, 660, 668, 678, 651, 696, 704, 713, 764, 766, 768, 771, 779, 786, 792, 795, 808, 815, 821, 830, 837, 843, 850, 856, 859, 866, 872, 879, 885, and 1066; a VH2 comprising (x) a CDR1 having an amino acid sequence at least 65%, at least 70%, at least 75%, at least 80%, at least 85%, at least 90%, at least 95%, at least 99%, or 100% identical to any one of SEQ ID NOs: 5, 12, 18, 26, 34, 44, 51, 61, 68, 75, 82, 89, 96, 102, 108, 115, 122, 133, 141, 148, 155, 162, 175, 182, 189, 195, 202, 208, 215, 222, 229, 235, 318, 629, 645, 654, 663, 671, 682, 690, 699, 707, 716, 773, 781, 788, 797, 803, 810, 817, 823, 832, 839, 845, 852, 861, 868, 874, 881, 1047, 1052, 1057, 1062, and 1067; (xi) a CDR2 having an amino acid sequence at least 65%, at least 70%, at least 75%, at least 80%, at least 85%, at least 90%, at least 95%, at least 99%, or 100% identical to any one of SEQ ID NOs: 6, 19, 27, 35, 45, 52, 56, 62, 69, 76, 83, 90, 109, 116, 123, 134, 142, 149, 156, 163, 169, 176, 183, 196, 209, 216, 223, 236, 273, 319, 328, 630, 646, 655, 664, 672, 683, 691, 708, 776, 782, 789, 798, 804, 811, 818, 824, 833, 840, 846, 853, 862, 869, 875, 882, 1048, 1053, 1058, 1063, and 1068; and (xii) a CDR3 having an amino acid sequence at least 65%, at least 70%, at least 75%, at least 80%, at least 85%, at least 90%, at least 95%, at least 99%, or 100% identical to any one of SEQ ID NOs: 7, 13, 20, 28, 36, 40, 46, 53, 63, 70, 77, 84, 91, 97, 103, 110, 117, 124, 128, 135, 143, 150, 157, 164, 170, 177, 184, 190, 197, 203, 210, 217, 224, 230, 237, 241, 244, 248, 253, 257, 259, 261, 263, 265, 267, 269, 271, 274, 276, 278, 281, 297, 320, 322, 327, 330, 332, 631, 647, 656, 665, 673, 684, 692, 700, 709, 717, 765, 767, 769, 774, 783, 790, 793, 799, 805, 812, 819, 825, 834, 841, 847, 854, 857, 863, 870, 876, 883, 886, 1049, 1054, 1059, 1064, and 1069; a VL3 comprising (xiii) a complementarity determining region (CDR) 1 having an amino acid sequence that is at least 65%, at least 70%, at least 75%, at least 80%, at least 85%, at least 90%, at least 95%, at least 99%, or 100% identical to any one of SEQ ID NOs: 1, 9, 15, 23, 30, 41, 48, 55, 58, 65, 72, 79, 86, 93, 99, 105, 112, 119, 130, 138, 145, 152, 159, 166, 172, 179, 186, 192, 199, 205, 212, 219, 226, 232, 324, 627, 640, 650, 659, 676, 687, 695, 703, 712, 770, 778, 785, 794, 801, 807, 814, 827, 836, 849, 858, 865, 878, 1045, 1050, 1055, 1060, and 1065; (xiv) a CDR2 having an amino acid sequence at least 65%, at least 70%, at least 75%, at least 80%, at least 85%, at least 90%, at least 95%, at least 99%, or 100% identical to any one of SEQ ID NOs: 2, 31, 628, 641, 677, 1046, 1051, 1056, and 1061; or at least 65%, at least 70%, at least 75%, at least 80%, at least 85%, at least 90%, at least 95%, at least 99%, or 100% identical to any one of amino acid sequences AAS, GAS, LGS, GTN, GTN, SAS, SDS, DNT, EVT, DAS, DVT, RNS, DVS, EDS, DDS, KDS, VAS, WAS, YTS, EVS, NNN, SYN, and DAT; and (xv) a CDR3 having an amino acid sequence at least 65%, at least 70%, at least 75%, at least 80%, at least 85%, at least 90%, at least 95%, at least 99%, or 100% identical to any one of SEQ ID NOs: 3, 10, 16, 24, 32, 38, 42, 49, 59, 66, 73, 80, 87, 94, 100, 106, 113, 120, 126, 131, 139, 146, 153, 160, 167, 173, 180, 187, 193, 200, 206, 213, 220, 227, 233, 239, 242, 246, 249, 256, 283, 285, 287, 288, 290, 292, 294, 296, 301, 304, 306, 309, 311, 313, 316, 325, 326, 329, 642, 651, 660, 668, 678, 651, 696, 704, 713, 764, 766, 768, 771, 779, 786, 792, 795, 808, 815, 821, 830, 837, 843, 850, 856, 859, 866, 872, 879, 885, and 1066; and a VH3 comprising (xvi) a CDR1 having an amino acid sequence at least 65%, at least 70%, at least 75%, at least 80%, at least 85%, at least 90%, at least 95%, at least 99%, or 100% identical to any one of SEQ ID NOs: 5, 12, 18, 26, 34, 44, 51, 61, 68, 75, 82, 89, 96, 102, 108, 115, 122, 133, 141, 148, 155, 162, 175, 182, 189, 195, 202, 208, 215, 222, 229, 235, 318, 629, 645, 654, 663, 671, 682, 690, 699, 707, 716, 773, 781, 788, 797, 803, 810, 817, 823, 832, 839, 845, 852, 861, 868, 874, 881, 1047, 1052, 1057, 1062, and 1067; (xvii) a CDR2 having an amino acid sequence at least 65%, at least 70%, at least 75%, at least 80%, at least 85%, at least 90%, at least 95%, at least 99%, or 100% identical to any one of SEQ ID NOs: 6, 19, 27, 35, 45, 52, 56, 62, 69, 76, 83, 90, 109, 116, 123, 134, 142, 149, 156, 163, 169, 176, 183, 196, 209, 216, 223, 236, 273, 319, 328, 630, 646, 655, 664, 672, 683, 691, 708, 776, 782, 789, 798, 804, 811, 818, 824, 833, 840, 846, 853, 862, 869, 875, 882, 1048, 1053, 1058, 1063, and 1068; and (xviii) a CDR3 having an amino acid sequence at least 65%, at least 70%, at least 75%, at least 80%, at least 85%, at least 90%, at least 95%, at least 99%, or 100% identical to any one of SEQ ID NOs: 7, 13, 20, 28, 36, 40, 46, 53, 63, 70, 77, 84, 91, 97, 103, 110, 117, 124, 128, 135, 143, 150, 157, 164, 170, 177, 184, 190, 197, 203, 210, 217, 224, 230, 237, 241, 244, 248, 253, 257, 259, 261, 263, 265, 267, 269, 271, 274, 276, 278, 281, 297, 320, 322, 327, 330, 332, 631, 647, 656, 665, 673, 684, 692, 700, 709, 717, 765, 767, 769, 774, 783, 790, 793, 799, 805, 812, 819, 825, 834, 841, 847, 854, 857, 863, 870, 876, 883, 886, 1049, 1054, 1059, 1064, and 1069.

[2186] In some aspects, the antigen binding polypeptide complexes provided herein comprise (i) a VL1 comprising an amino acid sequence that is at least 65%, at least 70%, at least 75%, at least 80%, at least 85%, at least 90%, at least 95%, at least 99%, or 100% identical to SEQ ID NO: 147; (ii) a VH1 comprising an amino acid sequence that is at least 65%, at least 70%, at least 75%, at least 80%, at least 85%, at least 90%, at least 95%, at least 99%, or 100% identical to SEQ ID NO: 151; (iii) a VL2 comprising an amino acid sequence that is at least 65%, at least 70%, at least 75%, at least 80%, at least 85%, at least 90%, at least 95%, at least 99%, or 100% identical to any one of SEQ ID NOs: 4, 11, 17, 25, 33, 39, 43, 50, 60, 67, 74, 81, 88, 95, 101, 107, 114, 121, 127, 132, 140, 147, 154, 161, 168, 174, 181, 188, 194, 201, 207, 214, 221, 228, 234, 240, 243, 247, 250, 251, 252, 255, 284, 286, 289, 291, 293, 295, 299, 300, 302, 303, 305, 307, 308, 310, 312, 314, 315, 317, 323, 639, 649, 658, 667, 675, 686, 694, 702, 711, 772, 780, 787, 796, 802, 809, 816, 822, 831, 838, 844, 851, 860, 867, 873, 880, and 988; (iv) a VH2 comprising an amino acid sequence that is at least 65%, at least 70%, at least 75%, at least 80%, at least 85%, at least 90%, at least 95%, at least 99%, or 100% identical to any one of SEQ ID NOs: 8, 14, 21, 22, 29, 37, 47, 54, 57, 64, 71, 78, 85, 92, 98, 104, 111, 118, 125, 129, 136, 137, 144, 151, 158, 165, 171, 178, 185, 191, 198, 204, 211, 218, 225, 231, 238, 245, 254, 258, 260, 262, 264, 266, 268, 270, 272, 275, 277, 279, 280, 282, 298, 321, 331, 626, 644, 653, 662, 670, 681, 689, 698, 706, 715, 775, 777, 784, 791, 800, 806, 813, 820, 826, 835, 842, 848, 855, 864, 871, 877, and 884; (v) a VL3 comprising an amino acid sequence that is at least 65%, at least 70%, at least 75%, at least 80%, at least 85%, at least 90%, at least 95%, at least 99%, or 100% identical to any one of SEQ ID NOs: 4, 11, 17, 25, 33, 39, 43, 50, 60, 67, 74, 81, 88, 95, 101, 107, 114, 121, 127, 132, 140, 147, 154, 161, 168, 174, 181, 188, 194, 201, 207, 214, 221, 228, 234, 240, 243, 247, 250, 251, 252, 255, 284, 286, 289, 291, 293, 295, 299, 300, 302, 303, 305, 307, 308, 310, 312, 314, 315, 317, 323, 639, 649, 658, 667, 675, 686, 694, 702, 711, 772, 780, 787, 796, 802, 809, 816, 822, 831, 838, 844, 851.860, 867, 873, 880, and 988; (vi) and a VH3 comprising an amino acid sequence that is at least 65%, at least 70%, at least 75%, at least 80%, at least 85%, at least 90%, at least 95%, at least 99%, or 100% identical to any one of SEQ ID NOs: 8, 14, 21, 22, 29, 37, 47, 54, 57, 64, 71, 78, 85, 92, 98, 104, 111, 118, 125, 129, 136, 137, 144, 151, 158, 165, 171, 178, 185, 191, 198, 204, 211, 218, 225, 231, 238, 245, 254, 258, 260, 262, 264, 266, 268, 270, 272, 275, 277, 279, 280, 282, 298, 321, 331, 626, 644, 653, 662, 670, 681, 689, 698, 706, 715, 775, 777, 784, 791, 800, 806, 813, 820, 826, 835, 842, 848, 855, 864, 871, 877, and 884.

[2187] In some aspects, the antigen binding polypeptide complexes provided herein comprise a VL1 comprising (i) a complementarity determining region (CDR) 1 having an amino acid sequence that is at least 65%, at least 70%, at least 75%, at least 80%, at least 85%, at least 90%, at least 95%, at least 99%, or 100% identical to SEQ ID NO: 145 or 1050; (ii) a CDR2 having an amino acid sequence at least 65%, at least 70%, at least 75%, at least 80%, at least 85%, at least 90%, at least 95%, at least 99%, or 100% identical to SEQ ID NO: 1051 or an amino acid sequence that is at least 65%, at least 70%, at least 75%, at least 80%, at least 85%, at least 90%, at least 95%, at least 99%, or 100% identical to amino acid sequence AAS; and (iii) a CDR3 having an amino acid sequence that is at least 65%, at least 70%, at least 75%, at least 80%, at least 85%, at least 90%, at least 95%, at least 99%, or 100% identical to SEQ ID NO: 146 or 764; a VH1 comprising (iv) a complementarity determining region (CDR) 1 having an amino acid sequence that is at least 65%, at least 70%, at least 75%, at least 80%, at least 85%, at least 90%, at least 95%, at least 99%, or 100% identical to SEQ ID NO: 148 or 1052; (v) a CDR2 having an amino acid sequence that is at least 65%, at least 70%, at least 75%, at least 80%, at least 85%, at least 90%, at least 95%, at least 99%, or 100% identical to SEQ ID NO: 149 or 1053; and (vi) a CDR3 having an amino acid sequence that is at least 65%, at least 70%, at least 75%, at least 80%, at least 85%, at least 90%, at least 95%, at least 99%, or 100% identical to SEQ ID NO: 150, 765, or 1054; a VL2 comprising (vii) a complementarity determining region (CDR) 1 having an amino acid sequence that is at least 65%, at least 70%, at least 75%, at least 80%, at least 85%, at least 90%, at least 95%, at least 99%, or 100% identical to any one of SEQ ID NOs: 1, 9, 15, 23, 30, 65, 72, 145, 152, 324, 627, 138, 172, 1045, 1050, 1055, 1060, and 1065; (viii) a CDR2 having an amino acid sequence at least 65%, at least 70%, at least 75%, at least 80%, at least 85%, at least 90%, at least 95%, at least 99%, or 100% identical to any one of SEQ ID NOs: 2, 31, 628, 1046, 1051, 1056, and 1061, or at least 65%, at least 70%, at least 75%, at least 80%, at least 85%, at least 90%, at least 95%, at least 99%, or 100% identical to any one of amino acid sequences GAS, LGS, GTN, SAS, SDS, AAS, DAS, and DNT; and (ix) a CDR3 having an amino acid sequence at least 65%, at least 70%, at least 75%, at least 80%, at least 85%, at least 90%, at least 95%, at least 99%, or 100% identical to any one of SEQ ID NOs: 3, 10, 16, 24, 32, 38, 66, 73, 146, 153, 325, 326, 764, 766, 139, 856, 173, 792, and 1066; a VH2 comprising (x) a CDR1 having an amino acid sequence at least 65%, at least 70%, at least 75%, at least 80%, at least 85%, at least 90%, at least 95%, at least 99%, or 100% identical to any one of SEQ ID NOs: 5, 12, 18, 26, 34, 68, 75, 148, 155, 629, 141, 175, 1047, 1052, 1057, 1062, and 1067; (xi) a CDR2 having an amino acid sequence at least 65%, at least 70%, at least 75%, at least 80%, at least 85%, at least 90%, at least 95%, at least 99%, or 100% identical to any one of SEQ ID NOs: 6, 19, 27, 35, 69, 76, 149, 156, 630, 142, 176, 1048, 1053, 1058, 1063, and 1068; and (xii) a CDR3 having an amino acid sequence at least 65%, at least 70%, at least 75%, at least 80%, at least 85%, at least 90%, at least 95%, at least 99%, or 100% identical to any one of SEQ ID NOs: 7, 13, 20, 28, 36, 40, 70, 77, 327, 150, 157, 332, 631, 765, 767, 143, 857, 177, 793, 1049, 1054, 1059, 1064, and 1069; a VL3 comprising (xiii) a complementarity determining region (CDR) 1 having an amino acid sequence that is at least 65%, at least 70%, at least 75%, at least 80%, at least 85%, at least 90%, at least 95%, at least 99%, or 100% identical to any one of SEQ ID NOs: 1, 9, 15, 23, 30, 65, 72, 145, 152, 324, 627, 138, 172, 1045, 1050, 1055, 1060, and 1065; (xiv) a CDR2 having an amino acid sequence at least 65%, at least 70%, at least 75%, at least 80%, at least 85%, at least 90%, at least 95%, at least 99%, or 100% identical to any one of SEQ ID NOs: 2, 31, 628, 1046, 1051, 1056, and 1061, or at least 65%, at least 70%, at least 75%, at least 80%, at least 85%, at least 90%, at least 95%, at least 99%, or 100% identical to any one of amino acid sequences GAS, LGS, GTN, SAS, SDS, AAS, DAS, and DNT; and (xv) a CDR3 having an amino acid sequence at least 65%, at least 70%, at least 75%, at least 80%, at least 85%, at least 90%, at least 95%, at least 99%, or 100% identical to any one of SEQ ID NOs: 3, 10, 16, 24, 32, 38, 66, 73, 146, 153, 325, 326, 764, 766, 139, 856, 173, 792, and 1066; and a VH3 comprising (xvi) a CDR1 having an amino acid sequence at least 65%, at least 70%, at least 75%, at least 80%, at least 85%, at least 90%, at least 95%, at least 99%, or 100% identical to any one of SEQ ID NOs: 5, 12, 18, 26, 34, 68, 75, 148, 155, 629, 141, 175, 1047, 1052, 1057, 1062, and 1067; (xvii) a CDR2 having an amino acid sequence at least 65%, at least 70%, at least 75%, at least 80%, at least 85%, at least 90%, at least 95%, at least 99%, or 100% identical to any one of SEQ ID NOs: 6, 19, 27, 35, 69, 76, 149, 156, 630, 142, 176, 1048, 1053, 1058, 1063, and 1068; and (xviii) a CDR3 having an amino acid sequence at least 65%, at least 70%, at least 75%, at least 80%, at least 85%, at least 90%, at least 95%, at least 99%, or 100% identical to any one of SEQ ID NOs: 7, 13, 20, 28, 36, 40, 70, 77, 327, 150, 157, 332, 631, 765, 767, 143, 857, 177, 793, 1049, 1054, 1059, 1064, and 1069.

[2188] In some aspects, the antigen binding polypeptide complexes provided herein comprise (i) a VL1 comprising an amino acid sequence that is at least 65%, at least 70%, at least 75%, at least 80%, at least 85%, at least 90%, at least 95%, at least 99%, or 100% identical to SEQ ID NO: 147; (ii) a VH1 comprising an amino acid sequence that is at least 65%, at least 70%, at least 75%, at least 80%, at least 85%, at least 90%, at least 95%, at least 99%, or 100% identical to SEQ ID NO: 151; (iii) a VL2 comprising an amino acid sequence that is at least 65%, at least 70%, at least 75%, at least 80%, at least 85%, at least 90%, at least 95%, at least 99%, or 100% identical to any one of SEQ ID NOs: 4, 11, 17, 25, 33, 39, 67, 74, 147, 154, 140, and 174; (iv) a VH2 comprising an amino acid sequence that is at least 65%, at least 70%, at least 75%, at least 80%, at least 85%, at least 90%, at least 95%, at least 99%, or 100% identical to any one of SEQ ID NOs: 8, 14, 21, 22, 29, 37, 71, 78, 151, 158, 626, 144, and 178; (v) a VL3 comprising an amino acid sequence that is at least 65%, at least 70%, at least 75%, at least 80%, at least 85%, at least 90%, at least 95%, at least 99%, or 100% identical to any one of SEQ ID NOs: 4, 11, 17, 25, 33, 39, 67, 74, 147, 154, 140, and 174; and (vi) and a VH3 comprising an amino acid sequence that is at least 65%, at least 70%, at least 75%, at least 80%, at least 85%, at least 90%, at least 95%, at least 99%, or 100% identical to any one of SEQ ID NOs: 8, 14, 21, 22, 29, 37, 71, 78, 151, 158, 626, 144, and 178.

[2189] In some aspects, VL1 comprises an amino acid sequence at least 65%, at least 70%, at least 75%, at least 80%, at least 85%, at least 90%, at least 95%, at least 99%, or 100% identical to SEQ ID NO: 11, and VH1 comprises an amino acid sequence at least 65%, at least 70%, at least 75%, at least 80%, at least 85%, at least 90%, at least 95%, at least 99%, or 100% identical to SEQ ID NO: 14.

[2190] In some aspects, VL2 comprises an amino acid sequence at least 65%, at least 70%, at least 75%, at least 80%, at least 85%, at least 90%, at least 95%, at least 99%, or 100% identical to SEQ ID NO: 17, and VH2 comprises an amino acid sequence at least 65%, at least 70%, at least 75%, at least 80%, at least 85%, at least 90%, at least 95%, at least 99%, or 100% identical to SEQ ID NO: 21 or 22.

[2191] In some aspects, VL2 comprises an amino acid sequence at least 65%, at least 70%, at least 75%, at least 80%, at least 85%, at least 90%, at least 95%, at least 99%, or 100% identical to SEQ ID NO: 25, and VH2 comprises an amino acid sequence at least 65%, at least 70%, at least 75%, at least 80%, at least 85%, at least 90%, at least 95%, at least 99%, or 100% identical to SEQ ID NO: 29.

[2192] In some aspects, VL3 comprises an amino acid sequence at least 65%, at least 70%, at least 75%, at least 80%, at least 85%, at least 90%, at least 95%, at least 99%, or 100% identical to SEQ ID NO: 17, and VH3 comprises an amino acid sequence at least 65%, at least 70%, at least 75%, at least 80%, at least 85%, at least 90%, at least 95%, at least 99%, or 100% identical to SEQ ID NO: 21 or 22.

[2193] In some aspects, VL3 comprises an amino acid sequence at least 65%, at least 70%, at least 75%, at least 80%, at least 85%, at least 90%, at least 95%, at least 99%, or 100% identical to SEQ ID NO: 25, and VH3 comprises an amino acid sequence at least 65%, at least 70%, at least 75%, at least 80%, at least 85%, at least 90%, at least 95%, at least 99%, or 100% identical to SEQ ID NO: 29.

[2194] In some aspects, the first polypeptide comprises a structure represented by VL1-CL-VH1-CH1, VL1-L1-CL-L2-VH1-L3-CH1, VL1-CL-VH1-CH1-CH2-CH3, or VL1-L1-CL-L2-VH1-L3-CH1-CH2-CH3; and the second polypeptide comprises a structure represented by VL2-CL-VL3-VH3-VH2-CH1, VL2-L4-CL-L5-VL3-L6-VH3-L7-VH2-L8-CH1, VL2-CL-VL3-VH3-VH2-CH1-CH2-CH3, or VL2-L4-CL-L5-VL3-L6-VH3-L7-VH2-L8-CH1-CH2-CH3, wherein VL1 comprises an amino acid sequence at least 65%, at least 70%, at least 75%, at least 80%, at least 85%, at least 90%, at least 95%, at least 99%, or 100% identical to SEQ ID NO: 11, VH1 comprises an amino acid sequence at least 65%, at least 70%, at least 75%, at least 80%, at least 85%, at least 90%, at least 95%, at least 99%, or 100% identical to SEQ ID NO: 14, VL2 comprises an amino acid sequence at least 65%, at least 70%, at least 75%, at least 80%, at least 85%, at least 90%, at least 95%, at least 99%, or 100% identical to SEQ ID NO: 17, VH2 comprises an amino acid sequence at least 65%, at least 70%, at least 75%, at least 80%, at least 85%, at least 90%, at least 95%, at least 99%, or 100% identical to SEQ ID NO: 21 or 22, VL3 comprises an amino acid sequence at least 65%, at least 70%, at least 75%, at least 80%, at least 85%, at least 90%, at least 95%, at least 99%, or 100% identical to SEQ ID NO: 25 and VH3 comprises an amino acid sequence at least 65%, at least 70%, at least 75%, at least 80%, at least 85%, at least 90%, at least 95%, at least 99%, or 100% identical to SEQ ID NO: 29.

[2195] In some aspects, the first polypeptide comprises a structure represented by VL1-CL-VH1-CH1, VL1-L1-CL-L2-VH1-L3-CH1, VL1-CL-VH1-CH1-CH2-CH3, or VL1-L1-CL-L2-VH1-L3-CH1-CH2-CH3; and the second polypeptide comprises a structure represented by VL2-CL-VL3-VH3-VH2-CH1, VL2-L4-CL-L5-VL3-L6-VH3-L7-VH2-L8-CH1, VL2-CL-VL3-VH3-VH2-CH1-CH2-CH3, or VL2-L4-CL-L5-VL3-L6-VH3-L7-VH2-L8-CH1-CH2-CH3, wherein VL1 comprises an amino acid sequence at least 65%, at least 70%, at least 75%, at least 80%, at least 85%, at least 90%, at least 95%, at least 99%, or 100% identical to SEQ ID NO: 11, VH1 comprises an amino acid sequence at least 65%, at least 70%, at least 75%, at least 80%, at least 85%, at least 90%, at least 95%, at least 99%, or 100% identical to SEQ ID NO: 14, VL2 comprises an amino acid sequence at least 65%, at least 70%, at least 75%, at least 80%, at least 85%, at least 90%, at least 95%, at least 99%, or 100% identical to SEQ ID NO: 25, VH2 comprises an amino acid sequence at least 65%, at least 70%, at least 75%, at least 80%, at least 85%, at least 90%, at least 95%, at least 99%, or 100% identical to SEQ ID NO: 29, VL3 comprises an amino acid sequence at least 65%, at least 70%, at least 75%, at least 80%, at least 85%, at least 90%, at least 95%, at least 99%, or 100% identical to SEQ ID NO: 17, and VH3 comprises an amino acid sequence at least 65%, at least 70%, at least 75%, at least 80%, at least 85%, at least 90%, at least 95%, at least 99%, or 100% identical to SEQ ID NO: 21 or 22.

[2196] In some aspects, the first polypeptide comprises a structure represented by VL1-CL-VH1-CH1, VL1-L1-CL-L2-VH1-L3-CH1, VL1-CL-VH1-CH1-CH2-CH3, or VL1-L1-CL-L2-VH1-L3-CH1-CH2-CH3; and the second polypeptide comprises a structure represented by VL2-VH2-VL3-CL-VH3-CH1, VL2-L4-VH2-L5-VL3-L6-CL-L7-VH3-L8-CH1, VL2-VH2-VL3-CL-VH3-CH1-CH2-CH3, or VL2-L4-VH2-L5-VL3-L6-CL-L7-VH3-L8-CH1-CH2-CH3, wherein VL1 comprises an amino acid sequence at least 65%, at least 70%, at least 75%, at least 80%, at least 85%, at least 90%, at least 95%, at least 99%, or 100% identical to SEQ ID NO: 11, VH1 comprises an amino acid sequence at least 65%, at least 70%, at least 75%, at least 80%, at least 85%, at least 90%, at least 95%, at least 99%, or 100% identical to SEQ ID NO: 14, VL2 comprises an amino acid sequence at least 65%, at least 70%, at least 75%, at least 80%, at least 85%, at least 90%, at least 95%, at least 99%, or 100% identical to SEQ ID NO: 25, VH2 comprises an amino acid sequence at least 65%, at least 70%, at least 75%, at least 80%, at least 85%, at least 90%, at least 95%, at least 99%, or 100% identical to SEQ ID NO: 29, VL3 comprises an amino acid sequence at least 65%, at least 70%, at least 75%, at least 80%, at least 85%, at least 90%, at least 95%, at least 99%, or 100% identical to SEQ ID NO: 17, and VH3 comprises an amino acid sequence at least 65%, at least 70%, at least 75%, at least 80%, at least 85%, at least 90%, at least 95%, at least 99%, or 100% identical to SEQ ID NO: 21 or 22.

[2197] In some aspects, the first polypeptide comprises a structure represented by VL1-CL-VH1-CH1, VL1-L1-CL-L2-VH1-L3-CH1, VL1-CL-VH1-CH1-CH2-CH3, or VL1-L1-CL-L2-VH1-L3-CH1-CH2-CH3; and the second polypeptide comprises a structure represented by VL3-CL-VH3-CH1-VL4-VH4, VL3-L4-CL-L5-VH3-L6-CH1-L7-VL4-L8-VH4, VL3-CL-VH3-CH1-VL4-VH4-CH2-CH3, or VL3-L4-CL-L5-VH3-L6-CH1-L7-VL4-L8-VH4-CH2-CH3, wherein VL1 comprises an amino acid sequence at least 65%, at least 70%, at least 75%, at least 80%, at least 85%, at least 90%, at least 95%, at least 99%, or 100% identical to SEQ ID NO: 11, VH1 comprises an amino acid sequence at least 65%, at least 70%, at least 75%, at least 80%, at least 85%, at least 90%, at least 95%, at least 99%, or 100% identical to SEQ ID NO: 14, VL2 comprises an amino acid sequence at least 65%, at least 70%, at least 75%, at least 80%, at least 85%, at least 90%, at least 95%, at least 99%, or 100% identical to SEQ ID NO: 25, VH2 comprises an amino acid sequence at least 65%, at least 70%, at least 75%, at least 80%, at least 85%, at least 90%, at least 95%, at least 99%, or 100% identical to SEQ ID NO: 29, VL3 comprises an amino acid sequence at least 65%, at least 70%, at least 75%, at least 80%, at least 85%, at least 90%, at least 95%, at least 99%, or 100% identical to SEQ ID NO: 17, and VH3 comprises an amino acid sequence at least 65%, at least 70%, at least 75%, at least 80%, at least 85%, at least 90%, at least 95%, at least 99%, or 100% identical to SEQ ID NO: 21 or 22.

[2198] In some aspects, the first polypeptide comprises an amino acid sequence at least 65%, at least 70%, at least 75%, at least 80%, at least 85%, at least 90%, at least 95%, at least 99%, or 100% identical to SEQ ID NO: 445 and the second polypeptide comprises an amino acid sequence at least 65%, at least 70%, at least 75%, at least 80%, at least 85%, at least 90%, at least 95%, at least 99%, or 100% identical to SEQ ID NO: 446.

[2199] In some aspects, the first polypeptide is encoded by a nucleotide sequence at least 65%, at least 70%, at least 75%, at least 80%, at least 85%, at least 90%, at least 95%, at least 99%, or 100% identical to SEQ ID NO: 567 and the second polypeptide is encoded by a nucleotide sequence at least 65%, at least 70%, at least 75%, at least 80%, at least 85%, at least 90%, at least 95%, at least 99%, or 100% identical to SEQ ID NO: 568.

[2200] In some aspects, the first polypeptide comprises an amino acid sequence at least 65%, at least 70%, at least 75%, at least 80%, at least 85%, at least 90%, at least 95%, at least 99%, or 100% identical to SEQ ID NO: 447 and the second polypeptide comprises an amino acid sequence at least 65%, at least 70%, at least 75%, at least 80%, at least 85%, at least 90%, at least 95%, at least 99%, or 100% identical to SEQ ID NO: 448.

[2201] In some aspects, the first polypeptide is encoded by a nucleotide sequence at least 65%, at least 70%, at least 75%, at least 80%, at least 85%, at least 90%, at least 95%, at least 99%, or 100% identical to SEQ ID NO: 569 and the second polypeptide is encoded by a nucleotide sequence at least 65%, at least 70%, at least 75%, at least 80%, at least 85%, at least 90%, at least 95%, at least 99%, or 100% identical to SEQ ID NO: 570.

[2202] In some aspects, the first polypeptide comprises an amino acid sequence at least 65%, at least 70%, at least 75%, at least 80%, at least 85%, at least 90%, at least 95%, at least 99%, or 100% identical to SEQ ID NO: 449 and the second polypeptide comprises an amino acid sequence at least 65%, at least 70%, at least 75%, at least 80%, at least 85%, at least 90%, at least 95%, at least 99%, or 100% identical to SEQ ID NO: 450.

[2203] In some aspects, the first polypeptide is encoded by a nucleotide sequence at least 65%, at least 70%, at least 75%, at least 80%, at least 85%, at least 90%, at least 95%, at least 99%, or 100% identical to SEQ ID NO: 571 and the second polypeptide is encoded by a nucleotide sequence at least 65%, at least 70%, at least 75%, at least 80%, at least 85%, at least 90%, at least 95%, at least 99%, or 100% identical to SEQ ID NO: 572.

[2204] In some aspects, the first polypeptide comprises an amino acid sequence at least 65%, at least 70%, at least 75%, at least 80%, at least 85%, at least 90%, at least 95%, at least 99%, or 100% identical to SEQ ID NO: 451 and the second polypeptide comprises an amino acid sequence at least 65%, at least 70%, at least 75%, at least 80%, at least 85%, at least 90%, at least 95%, at least 99%, or 100% identical to SEQ ID NO: 452.

[2205] In some aspects, the first polypeptide is encoded by a nucleotide sequence at least 65%, at least 70%, at least 75%, at least 80%, at least 85%, at least 90%, at least 95%, at least 99%, or 100% identical to SEQ ID NO: 573 and the second polypeptide is encoded by a nucleotide sequence at least 65%, at least 70%, at least 75%, at least 80%, at least 85%, at least 90%, at least 95%, at least 99%, or 100% identical to SEQ ID NO: 574.

[2206] In some aspects, one or both of the antigen binding polypeptides comprised in the antigen binding polypeptide complexes disclosed herein, comprise one or more CL, as indicated in the formulas representing the antigen binding polypeptide complexes disclosed herein. In some aspects, the CL comprises an amino acid sequence at least 65%, at least 70%, at least 75%, at least 80%, at least 85%, at least 90%, at least 95%, at least 99%, or 100% identical to any one of SEQ ID NOs: 374, 637, or 1092-1095.

[2207] In some aspects, one or both of the antigen binding polypeptides comprised in the antigen binding polypeptide complexes disclosed herein, comprise one or more CH1, as indicated in the formulas representing the antigen binding polypeptide complexes disclosed herein. In some aspects, the CH1 comprises an amino acid sequence at least 65%, at least 70%, at least 75%, at least 80%, at least 85%, at least 90%, at least 95%, at least 99%, or 100% identical to any one of SEQ ID NOs: 375, 634, 1070, 1071, or 1086-1091.

[2208] In some aspects, one or both of the antigen binding polypeptides comprised in the antigen binding polypeptide complexes provided herein further comprise an Fc region. In some aspects, one or both of the antigen binding polypeptides comprised in the antigen binding polypeptide complexes provided herein further comprise an Fc region at the carboxy-terminus. In some aspects, the Fc region comprises an immunoglobulin heavy chain constant region 2 (CH2) and/or an immunoglobulin heavy chain constant region 3 (CH3). In some aspects, the Fc region further comprises an immunoglobulin hinge (i.e., a hinge region). In some aspects, the hinge region is interposed between a CH1 and a CH2 (i.e., a hinge region is localized between the carboxy terminal residue of a CH1 and the N-terminal residue of a CH2). In some aspects, the hinge region comprises an amino acid sequence at least 65%, at least 70%, at least 75%, at least 80%, at least 85%, at least 90%, at least 95%, at least 99%, or 100% identical to any one of SEQ ID NOS: 635.636, 1072, 1073, or 1074. In some aspects, the Fc region comprises a CH2 and a CH3. In some aspects, the CH2 comprises an amino acid sequence that is at least 65%, at least 70%, at least 75%, at least 80%, at least 85%, at least 90%, at least 95%, at least 99%, or 100% identical to any one of SEQ ID NOS: 1075-1078. In some aspects, the CH3 comprises an amino acid sequence that is at least 65%, at least 70%, at least 75%, at least 80%, at least 85%, at least 90%, at least 95%, at least 99%, or 100% identical to any one of SEQ ID NOs: 1079-1085. In some aspects, the Fc region comprises an amino acid sequence that is at least 65%, at least 70%, at least 75%, at least 80%, at least 85%, at least 90%, at least 95%, at least 99%, or 100% identical to any one of SEQ ID NOs: 376-380.

[2209] In some aspects, the Fc region comprises one or more amino acid substitutions. In some aspects, the one or more amino acid substitutions comprise one or more half-life extension amino acid substitutions. In some aspects, the one or more half-life extension amino acid substitutions comprise one or more of amino acid substitutions M428L, N434A, N434S, L234F, L235E, P331S, M252Y, S254T, or T256E, or equivalent thereof, based on the EU numbering scheme. In some aspects, the one or more half-life extension amino acid substitutions comprise a LA (M428L and N434A, or equivalent thereof, based on the EU numbering scheme) amino acid substitution. In some aspects, the one or more half-life extension amino acid substitutions comprise a LS (M428L and N434S, or equivalent thereof, based on the EU numbering scheme) amino acid substitution. In some aspects, the one or more half-life extension amino acid substitutions comprise L234F and L235E, or equivalent thereof (based on the EU numbering scheme) amino acid substitutions. In some aspects, the one or more half-life extension amino acid substitutions comprise a TM (L234F, L235E, and P331S, or equivalent thereof, based on the EU numbering scheme) amino acid substitution. In some aspects, the one or more half-life extension amino acid substitutions comprise a YTE (M252Y, S254T, and T256E, or equivalent thereof, based on the EU numbering scheme) amino acid substitution.

[2210] In some aspects, the Fc region comprises at least one knob-into-hole modification. In some aspects, the antigen binding polypeptides complexes disclosed herein are IgG1 or IgG4 antibodies or antigen binding fragments thereof. In some aspects, the knob-into-hole modification comprises one or more of knob substitutions of S354C and T366W, or equivalent thereof, and/or one or more of hole substitutions of Y349C, T366S, L368A, Y407V, or equivalent thereof, or a combination thereof, based on the EU numbering scheme. In some aspects, the Fc region comprises a knob-into-hole modification comprising knob substitutions of S354C and T366W, or equivalent thereof, and/or hole substitutions of Y349C, T366S, L368A, and Y407V, or equivalent thereof, and/or a half-life extension amino acid substitution comprising: a LA (M428L and N434A, or equivalent thereof, based on the EU numbering scheme) amino acid substitution, a LS (M428L and N434S, or equivalent thereof, based on the EU numbering scheme) amino acid substitution. L234F and L235E, or equivalent thereof (based on the EU numbering scheme) amino acid substitutions, a TM (L234F, L235E, and P331S, or equivalent thereof, based on the EU numbering scheme) amino acid substitution, a YTE (M252Y, S254T, and T256E, or equivalent thereof, based on the EU numbering scheme) amino acid substitution, or any combination thereof.

[2211] In some aspects, the Fc region comprises knob substitutions of S354C and T366W, or equivalent thereof, and a half-life extension amino acid substitution comprising: a LA (M428L and N434A, or equivalent thereof, based on the EU numbering scheme) amino acid substitution, a LS (M428L and N434S, or equivalent thereof, based on the EU numbering scheme) amino acid substitution. L234F and L235E, or equivalent thereof (based on the EU numbering scheme) amino acid substitutions, a TM (L234F, L235E, and P331S, or equivalent thereof, based on the EU numbering scheme) amino acid substitution, a YTE (M252Y, S254T, and T256E, or equivalent thereof, based on the EU numbering scheme) amino acid substitution, or any combination thereof.

[2212] In some aspects, the Fc region comprises hole substitutions of Y349C, T366S, L368A, and Y407V, or equivalent thereof, and a half-life extension amino acid substitution comprising: a LA (M428L and N434A, or equivalent thereof, based on the EU numbering scheme) amino acid substitution, a LS (M428L and N434S, or equivalent thereof, based on the EU numbering scheme) amino acid substitution. L234F and L235E, or equivalent thereof (based on the EU numbering scheme) amino acid substitutions, a TM (L234F, L235E, and P331S, or equivalent thereof, based on the EU numbering scheme) amino acid substitution, a YTE (M252Y, S254T, and T256E, or equivalent thereof, based on the EU numbering scheme) amino acid substitution, or any combination thereof.

[2213] In some aspects, one or both of the antigen binding polypeptides comprised in the antigen binding polypeptide complexes disclosed herein comprise one or more Fc effector function knockout mutation. In some aspects, one or both of the antigen binding polypeptides comprised in the antigen binding polypeptide complexes disclosed herein are IgG1 or IgG4 antibodies or antigen binding fragments thereof. In some aspects, the Fc effector function knockout mutation is L234A, L235A, P239A, or equivalent thereof, or a combination thereof, based on the EU numbering scheme.

[2214] In some aspects, one or both of the antigen binding polypeptides comprised in the antigen binding polypeptide complexes disclosed herein comprise a mutation at a glycosylation site. In some aspects, the mutation at a glycosylation site is a mutation at an N-glycosylation site. In some aspects, one or both of the antigen binding polypeptides comprised in the antigen binding polypeptide complexes disclosed herein comprise a VH comprising a mutation at a glycosylation site. In some aspects, the mutation at a glycosylation site is a mutation at an N-glycosylation site. In some aspects, the mutation at an N-glycosylation site is at amino acid N62 of the VH region or equivalent thereof. In some aspects, the mutation at an N-glycosylation site at amino acid N62 is N62Q or N62S, or equivalent thereof. In some aspects, one or both of the antigen binding polypeptides comprised in the antigen binding polypeptide complexes disclosed herein, comprise one or more optional linkers. The one or more optional linkers are indicated herein as Ln, wherein n is an integer, and the integer next to each L indicates each L comprised in the antigen binding polypeptides comprised in the antigen binding polypeptide complexes disclosed herein. For example, if an antigen binding polypeptide comprised in the antigen binding polypeptide complexes disclosed herein comprises two linkers, the first linker from N-terminus to C-terminus is herein indicated as L1, and the second linker from N-terminus to C-terminus is herein indicated as L2. If an antigen binding polypeptide complex disclosed herein comprises a first antigen binding polypeptide comprising two linkers, indicated herein as L1 and L2, as explained above, the linkers comprised in the second antigen binding polypeptide are indicated with the following integer, in this example, the first linker from N-terminus to C-terminus of the second antigen binding polypeptide is herein indicated as L3, the second linker from N-terminus to C-terminus of the second antigen binding polypeptide is herein indicated as L3. In some aspects, any one of the optional linkers each independently have a length of from 0 amino acids to about 50 amino acids. In some aspects, any one of the optional linkers each independently have a length of from 5 amino acids to about 40 amino acids.

[2215] In some aspects, any one of the optional linkers are non-immunogenic. In some aspects, any one of the optional linkers do not contain a consensus T cell epitope.

[2216] In some aspects, any of Ln comprises an amino acid sequence of G or A, or an amino acid sequence at least 65%, at least 70%, at least 75%, at least 80%, at least 85%, at least 90%, at least 95%, at least 99%, or 100% identical to amino acid sequence GSS or ASG, or an amino acid sequence at least 65%, at least 70%, at least 75%, at least 80%, at least 85%, at least 90%, at least 95%, at least 99%, or 100% identical to any one of SEQ ID NOs: 333-373 and 967-971. In some aspects, Ln comprises an amino acid sequence at least 65%, at least 70%, at least 75%, at least 80%, at least 85%, at least 90%, at least 95%, at least 99%, or 100% identical to any one of SEQ ID NOs: 333-345 and 967-971.

[2217] In some aspects, an antigen binding polypeptide complex provided herein comprises a first polypeptide, and a second polypeptide; wherein the first polypeptide has a structure represented by VL1-CL-VL2-VH2-VH1-CH1, VL1-CL-VH2-VL2-VH1-CH1, VL1-CH1-VL2-VH2-VH1-CL, VL1-CH1-VH2-VL2-VH1-CL, VH1-CL-VL2-VH2-VL1-CH1, VH1-CL-VH2-VL2-VL1-CH1, VH1-CH1-VL2-VH2-VL1-CL, VH1-CH1-VH2-VL2-VL1-CL, VL2-CL-VL1-VH1-VH2-CH1, VL2-CL-VH1-VL1-VH2-CH1, VL2-CH1-VL1-VH1-VH2-CL, VL2-CH1-VH1-VL1-VH2-CL, VH2-CL-VL1-VH1-VL2-CH1, VH2-CL-VH1-VL1-VL2-CH1, VH2-CH1-VL1-VH1-VL2-CL, or VH2-CH1-VH1-VL1-VL2-CL; and wherein the second polypeptide has a structure represented by VL3-CL-VL4-VH4-VH3-CH1, VL3-CL-VH4-VL4-VH3-CH1, VL3-CH1-VL4-VH4-VH3-CL, VL3-CH1-VH4-VL4-VH3-CL, VH3-CL-VL4-VH4-VL3-CH1, VH3-CL-VH4-VL4-VL3-CH1, VH3-CH1-VL4-VH4-VL3-CL, VH3-CH1-VH4-VL4-VL3-CL, VL4-CL-VL3-VH3-VH4-CH1, VL4-CL-VH3-VL3-VH4-CH1, VL4-CH1-VL3-VH3-VH4-CL, VL4-CH1-VH3-VL3-VH4-CL, VH4-CL-VL3-VH3-VL4-CH1, VH4-CL-VH3-VL3-VL4-CH1, VH4-CH1-VL3-VH3-VL4-CL, or VH4-CH1-VH3-VL3-VL4-CL.

[2218] In some aspects, an antigen binding polypeptide complex provided herein comprises a first polypeptide, and a second polypeptide; wherein the first polypeptide has a structure represented by VL1-L1-CL-L2-VL2-L3-VH2-L4-VH1-L5-CH1, VL1-L1-CL-L2-VH2-L3-VL2-L4-VH1-L5-CH1, VL1-L1-CH1-L2-VL2-L3-VH2-L4-VH1-L5-CL, VL1-L1-CH1-L2-VH2-L3-VL2-L4-VH1-L5-CL, VH1-L1-CL-L2-VL2-L3-VH2-L4-VL1-L5-CH1, VH1-L1-CL-L2-VH2-L3-VL2-L4-VL1-L5-CH1, VH1-L1-CH1-L2-VL2-L3-VH2-L4-VL1-L5-CL, VH1-L1-CH1-L2-VH2-L3-VL2-L4-VL1-L5-CL, VL2-L1-CL-L2-VL1-L3-VH1-L4-VH2-L5-CH1, VL2-L1-CL-L2-VH1-L3-VL1-L4-VH2-L5-CH1, VL2-L1-CH1-L2-VL1-L3-VH1-L4-VH2-L5-CL, VL2-L1-CH1-L2-VH1-L3-VL1-L4-VH2-L5-CL, VH2-L1-CL-L2-VL1-L3-VH1-L4-VL2-L5-CH1, VH2-L1-CL-L2-VH1-L3-VL1-L4-VL2-L5-CH1, VH2-L1-CH1-L2-VL1-L3-VH1-L4- VL2-L5-CL, or VH2-L1-CH1-L2-VH1-L3-VL1-L4-VL2-L5-CL; and wherein the second polypeptide has a structure represented by VL3-L6-CL-L7-VL4-L8-VH4-L9-VH3-L10-CH1, VL3-L6-CL-L7-VH4-L8-VL4-L9-VH3-L10-CH1, VL3-L6-CH1-L7-VL4-L8-VH4-L9-VH3-L10-CL, VL3-L6-CH1-L7-VH4-L8-VL4-L9-VH3-L10-CL, VH3-L6-CL-L7-VL4-L8-VH4-L9-VL3-L10-CH1, VH3-L6-CL-L7-VH4-L8-VL4-L9- VL3-L10-CH1, VH3-L6-CH1-L7-VL4-L8-VH4-L9-VL3-L10-CL, VH3-L6-CH1-L7-VH4-L8-VL4-L9-VL3-L10-CL, VL4-L6-CL-L7-VL3-L8-VH3-L9-VH4-L10-CH1, VL4-L6-CL-L7-VH3-L8-VL3-L9-VH4- L10-CH1, VL4-L6-CH1-L7-VL3-L8-VH3-L9-VH4-L10-CL, VL4-L6-CH1-L7-VH3-L8-VL3-L9-VH4-L10-CL, VH4-L6-CL-L7-VL3-L8-VH3-L9-VL4-L10-CH1, VH4-L6-CL-L7-VH3-L8-VL3-L9-VL4-L10- CH1, VH4-L6-CH1-L7-VL3-L8-VH3-L9-VL4-L10-CL, or VH4-L6-CH1-L7-VH3-L8-VL3-L9-VL4-L10-CL.

[2219] In some aspects, an antigen binding polypeptide complex provided herein comprises a first polypeptide, and a second polypeptide; wherein the first polypeptide has a structure represented by VL1-CL-L1-VL2-L2-VH2-L3-VH1-CH1; VL1-CL-L1-VH2-L2-VL2-L3-VH1-CH1; VL1-CH1-L1-VL2-L2-VH2-L3-VH1-CL; VL1-CH1-L1-VH2-L2-VL2-L3-VH1-CL; VH1-CL-L1-VL2-L2-VH2-L3-VL1-CH1; VH1-CL-L1-VH2-L2-VL2-L3-VL1-CH1; VH1-CH1-L1-VL2-L2-VH2-L3-VL1-CL; VH1-CH1-L1-VH2-L2-VL2-L3-VL1-CL; VL2-CL-L1-VL1-L2-VH1-L3-VH2-CH1; VL2-CL-L1-VH1-L2-VL1-L3-VH2- CH1; VL2-CH1-L1-VL1-L2-VH1-L3-VH2-CL; VL2-CH1-L1-VH1-L2-VL1-L3-VH2-CL; VH2-CL-L1-VL1-L2-VH1-L3-VL2-CH1; VH2-CL-L1-VH1-L2-VL1-L3-VL2-CH1; VH2-CH1-L1-VL1-L2-VH1-L3-VL2-CL; or VH2-CH1-L1-VH1-L2-VL1-L3-VL2-CL; and wherein the second polypeptide has a structure represented by VL3-CL-L4-VL4-L5-VH4-L6-VH3-CH1; VL3-CL-L4-VH4-L5-VL4-L6-VH3-CH1; VL3-CH1-L4-VL4-L5-VH4-L6-VH3-CL; VL3-CH1-L4-VH4-L5-VL4-L6-VH3-CL; VH3-CL-L4-VL4-L5-VH4-L6-VL3-CH1; VH3-CL-L4-VH4-L5-VL4-L6-VL3-CH1; VH3-CH1-L4-VL4-L5-VH4-L6-VL3-CL; VH3-CH1-L4-VH4-L5-VL4-L6-VL3-CL; VL4-CL-L4-VL3-L5-VH3-L6-VH4-CH1; VL4-CL-L4-VH3-L5-VL3-L6-VH4-CH1; VL4-CH1-L4-VL3-L5-VH3-L6-VH4-CL; VL4-CH1-L4-VH3-L5-VL3-L6-VH4-CL; VH4-CL-L4-VL3-L5-VH3-L6-VL4-CH1; VH4-CL-L4-VH3-L5-VL3-L6-VL4-CH1; VH4-CH1-L4-VL3-L5-VH3-L6-VL4-CL; or VH4-CH1-L4-VH3-L5-VL3-L6-VL4-CL.

[2220] In some aspects, an antigen binding polypeptide complex provided herein comprises a first polypeptide, and a second polypeptide; wherein the first polypeptide has a structure represented by VL1-CL-VL2-VH2-VH1-CH1-CH2-CH3, VL1-CL-VH2-VL2-VH1-CH1-CH2-CH3, VL1-CH1-VL2-VH2-VH1-CL-CH2-CH3, VL1-CH1-VH2-VL2-VH1-CL-CH2-CH3, VH1-CL-VL2-VH2-VL1-CH1-CH2-CH3, VH1-CL-VH2-VL2-VL1-CH1-CH2-CH3, VH1-CH1-VL2-VH2-VL1-CL-CH2-CH3, VH1-CH1-VH2-VL2-VL1-CL-CH2-CH3, VL2-CL-VL1-VH1-VH2-CH1-CH2-CH3, VL2-CL-VH1-VL1-VH2-CH1-CH2-CH3, VL2-CH1-VL1-VH1-VH2-CL-CH2-CH3, VL2-CH1-VH1-VL1-VH2-CL-CH2-CH3, VH2-CL-VL1-VH1-VL2-CH1-CH2-CH3, VH2-CL-VH1-VL1-VL2-CH1-CH2-CH3, VH2-CH1-VL1-VH1-VL2-CL-CH2-CH3, or VH2-CH1-VH1-VL1-VL2-CL-CH2-CH3; and wherein the second polypeptide has a structure represented by VL3-CL-VL4-VH4-VH3-CH1-CH2-CH3, VL3-CL-VH4-VL4-VH3-CH1-CH2-CH3, VL3-CH1-VL4-VH4-VH3-CL-CH2-CH3, VL3-CH1-VH4-VL4-VH3-CL-CH2-CH3, VH3-CL-VL4-VH4-VL3-CH1-CH2-CH3, VH3-CL-VH4-VL4-VL3-CH1-CH2-CH3, VH3-CH1-VL4-VH4-VL3-CL-CH2-CH3, VH3-CH1-VH4-VL4-VL3-CL-CH2-CH3, VL4-CL-VL3-VH3-VH4-CH1-CH2-CH3, VL4-CL-VH3-VL3-VH4-CH1-CH2-CH3, VL4-CH1-VL3-VH3-VH4-CL-CH2-CH3, VL4-CH1-VH3-VL3-VH4-CL-CH2-CH3, VH4-CL-VL3-VH3-VL4-CH1-CH2-CH3, VH4-CL-VH3-VL3-VL4-CH1-CH2-CH3, VH4-CH1-VL3-VH3-VL4-CL-CH2-CH3, or VH4-CH1-VH3-VL3-VL4-CL-CH2-CH3.

[2221] In some aspects, an antigen binding polypeptide complex provided herein comprises a first polypeptide, and a second polypeptide; wherein the first polypeptide has a structure represented by VL1-L1-CL-L2-VL2-L3-VH2-L4-VH1-L5-CH1-CH2-CH3, VL1-L1-CL-L2-VH2-L3-VL2-L4-VH1-L5-CH1-CH2-CH3, VL1-L1-CH1-L2-VL2-L3-VH2-L4-VH1-L5-CL-CH2-CH3, VL1-L1-CH1-L2-VH2-L3-VL2-L4-VH1-L5-CL-CH2-CH3, VH1-L1-CL-L2-VL2-L3-VH2-L4-VL1-L5-CH1-CH2-CH3, VH1-L1-CL- L2-VH2-L3-VL2-L4-VL1-L5-CH1-CH2-CH3, VH1-L1-CH1-L2-VL2-L3-VH2-L4-VL1-L5-CL-CH2-CH3, VH1-L1-CH1-L2-VH2-L3-VL2-L4-VL1-L5-CL-CH2-CH3, VL2-L1-CL-L2-VL1-L3-VH1-L4-VH2-L5-CH1-CH2-CH3, VL2-L1-CL-L2-VH1-L3-VL1-L4-VH2-L5-CH1-CH2-CH3, VL2-L1-CH1-L2-VL1-L3-VH1-L4-VH2-L5-CL-CH2-CH3, VL2-L1-CH1-L2-VH1-L3-VL1-L4-VH2-L5-CL-CH2-CH3, VH2-L1-CL-L2-VL1-L3-VH1-L4-VL2-L5-CH1-CH2-CH3, VH2-L1-CL-L2-VH1-L3-VL1-L4-VL2-L5-CH1-CH2-CH3, VH2-L1-CH1-L2-VL1-L3-VH1-L4-VL2-L5-CL-CH2-CH3, or VH2-L1-CH1-L2-VH1-L3-VL1-L4-VL2-L5-CL-CH2-CH3; and wherein the second polypeptide has a structure represented by VL3-L6-CL-L7-VL4-L8-VH4-L9-VH3-L10-CH1-CH2-CH3, VL3-L6-CL-L7-VH4-L8-VL4-L9-VH3-L10-CH1-CH2-CH3, VL3-L6-CH1-L7-VL4-L8-VH4-L9-VH3-L10-CL-CH2-CH3, VL3-L6-CH1-L7-VH4-L8-VL4-L9- VH3-L10-CL-CH2-CH3, VH3-L6-CL-L7-VL4-L8-VH4-L9-VL3-L10-CH1-CH2-CH3, VH3-L6-CL-L7-VH4-L8-VL4-L9-VL3-L10-CH1-CH2-CH3, VH3-L6-CH1-L7-VL4-L8-VH4-L9-VL3-L10-CL-CH2-CH3, VH3-L6-CH1-L7-VH4-L8-VL4-L9-VL3-L10-CL-CH2-CH3, VL4-L6-CL-L7-VL3-L8-VH3-L9-VH4-L10-CH1-CH2-CH3, VL4-L6-CL-L7-VH3-L8-VL3-L9-VH4-L10-CH1-CH2-CH3, VL4-L6-CH1-L7-VL3-L8-VH3-L9-VH4-L10-CL-CH2-CH3, VL4-L6-CH1-L7-VH3-L8-VL3-L9-VH4-L10-CL-CH2-CH3, VH4-L6-CL- L7-VL3-L8-VH3-L9-VL4-L10-CH1-CH2-CH3, VH4-L6-CL-L7-VH3-L8-VL3-L9-VL4-L10-CH1- CH2-CH3, VH4-L6-CH1-L7-VL3-L8-VH3-L9-VL4-L10-CL-CH2-CH3, or VH4-L6-CH1-L7-VH3-L8-VL3-L9-VL4-L10-CL-CH2-CH3.

[2222] In some aspects, an antigen binding polypeptide complex provided herein comprises a first polypeptide, and a second polypeptide; wherein the first polypeptide has a structure represented by VL1-CL-L1-VL2-L2-VH2-L3-VH1-CH1-CH2-CH3; VL1-CL-L1-VH2-L2-VL2-L3-VH1-CH1-CH2-CH3; VL1-CH1-L1-VL2-L2-VH2-L3-VH1-CL-CH2-CH3; VL1-CH1-L1-VH2-L2-VL2-L3-VH1-CL-CH2-CH3; VH1-CL-L1-VL2-L2-VH2-L3-VL1-CH1-CH2-CH3; VH1-CL-L1-VH2-L2-VL2-L3-VL1-CH1-CH2-CH3; VH1-CH1-L1-VL2-L2-VH2-L3-VL1-CL-CH2-CH3; VH1-CH1-L1-VH2-L2-VL2-L3-VL1-CL-CH2-CH3; VL2-CL-L1-VL1-L2-VH1-L3-VH2-CH1-CH2-CH3; VL2-CL-L1-VH1-L2-VL1-L3-VH2-CH1-CH2-CH3; VL2-CH1-L1-VL1-L2-VH1-L3-VH2-CL-CH2-CH3; VL2-CH1-L1-VH1-L2-VL1-L3-VH2-CL-CH2-CH3; VH2-CL-L1-VL1-L2-VH1-L3-VL2-CH1-CH2-CH3; VH2-CL-L1-VH1-L2-VL1-L3-VL2-CH1-CH2-CH3; VH2-CH1-L1-VL1-L2-VH1-L3-VL2-CL-CH2-CH3; or VH2-CH1-L1-VH1-L2-VL1-L3-VL2-CL-CH2-CH3; and wherein the second polypeptide has a structure represented by VL3-CL-L4-VL4-L5-VH4-L6-VH3-CH1-CH2-CH3; VL3-CL-L4-VH4-L5-VL4-L6-VH3-CH1-CH2-CH3; VL3-CH1-L4-VL4-L5-VH4-L6-VH3-CL-CH2-CH3; VL3-CH1-L4-VH4-L5-VL4-L6-VH3-CL-CH2-CH3; VH3-CL-L4-VL4-L5-VH4-L6-VL3-CH1-CH2-CH3; VH3-CL-L4-VH4-L5-VL4-L6-VL3-CH1-CH2-CH3; VH3-CH1-L4-VL4-L5-VH4-L6-VL3-CL-CH2-CH3; VH3-CH1-L4-VH4-L5-VL4-L6-VL3-CL-CH2-CH3; VL4-CL-L4-VL3-L5-VH3-L6-VH4-CH1-CH2-CH3; VL4-CL-L4-VH3-L5-VL3-L6-VH4-CH1-CH2-CH3; VL4-CH1-L4-VL3-L5-VH3-L6-VH4-CL-CH2-CH3; VL4-CH1-L4-VH3-L5-VL3-L6-VH4-CL-CH2-CH3; VH4-CL-L4-VL3-L5-VH3-L6-VL4-CH1-CH2-CH3; VH4-CL-L4-VH3-L5-VL3-L6-VL4-CH1-CH2-CH3; VH4-CH1-L4-VL3-L5-VH3-L6-VL4-CL-CH2-CH3; or VH4-CH1-L4-VH3-L5-VL3-L6-VL4-CL-CH2-CH3.

[2223] In some aspects, an antigen binding polypeptide complex provided herein comprises a first polypeptide, and a second polypeptide; wherein the first polypeptide has a structure represented by VL1-VH1-VL2-CL-VH2-CH1, VL1-VH1-VL2-CH1-VH2-CL, VL1-VH1-VH2-CL-VL2-CH1, VL1-VH1-VH2-CH1-VL2-CL, VL1-VL2-VH1-CL-VH2-CH1, VL1-VL2-VH1-CH1-VH2-CL, VL1-VH2-VH1-CL-VL2-CH1, VL1-VH2-VH1-CH1-VL2-CL, VH1-VL1-VL2-CL-VH2-CH1, VH1-VL1-VL2-CH1-VH2-CL, VH1-VL1-VH2-CL-VL2-CH1, VH1-VL1-VH2-CH1-VL2-CL, VH1-VL2-VL1-CL-VH2-CH1, VH1-VL2-VL1-CH1-VH2-CL, VH1-VH2-VL1-CL-VL2-CH1, VH1-VH2-VL1-CH1-VL2-CL, VL2-VL1-VH2-CL-VH1-CH1, VL2-VL1-VH2-CH1-VH1-CL, VL2-VH1-VH2-CL-VL1-CH1, VL2-VH1-VH2-CH1-VL1-CL, VL2-VH2-VL1-CL-VH1-CH1, VL2-VH2-VL1-CH1-VH1-CL, VL2-VH2-VH1-CL-VL1-CH1, VL2-VH2-VH1-CH1-VL1-CL, VH2-VL1-VL2-CL-VH1-CH1, VH2-VL1-VL2-CH1-VH1-CL, VH2-VH1-VL2-CL-VL1-CH1, VH2-VH1-VL2-CH1-VL1-CL, VH2-VL2-VL1-CL-VH1-CH1, VH2-VL2-VL1-CH1-VH1-CL, VH2-VL2-VH1-CL-VL1-CH1, or VH2-VL2-VH1-CH1-VL1-CL; and wherein the second polypeptide has a structure represented by VL3-VH3-VL4-CL-VH4-CH1, VL3-VH3-VL4-CH1-VH4-CL, VL3-VH3-VH4-CL-VL4-CH1, VL3-VH3-VH4-CH1-VL4-CL, VL3-VL4-VH3-CL-VH4-CH1, VL3-VL4-VH3-CH1-VH4-CL, VL3-VH4-VH3-CL-VL4-CH1, VL3-VH4-VH3-CH1-VL4-CL, VH3-VL3-VL4-CL-VH4-CH1, VH3-VL3-VL4-CH1-VH4-CL, VH3-VL3-VH4-CL-VL4-CH1, VH3-VL3-VH4-CH1-VL4-CL, VH3-VL4-VL3-CL-VH4-CH1, VH3-VL4-VL3-CH1-VH4-CL, VH3-VH4-VL3-CL-VL4-CH1, VH3-VH4-VL3-CH1-VL4-CL, VL4-VL3-VH4-CL-VH3-CH1, VL4-VL3-VH4-CH1-VH3-CL, VL4-VH3-VH4-CL-VL3-CH1, VL4-VH3-VH4-CH1-VL3-CL, VL4-VH4-VL3-CL-VH3-CH1, VL4-VH4-VL3-CH1-VH3-CL, VL4-VH4-VH3-CL-VL3-CH1, VL4-VH4-VH3-CH1-VL3-CL, VH4-VL3-VL4-CL-VH3-CH1, VH4-VL3-VL4-CH1-VH3-CL, VH4-VH3-VL4-CL-VL3-CH1, VH4-VH3-VL4-CH1-VL3-CL, VH4-VL4-VL3-CL-VH3-CH1, VH4-VL4-VL3-CH1-VH3-CL, VH4-VL4-VH3-CL-VL3-CH1, or VH4-VL4-VH3-CH1-VL3-CL.

[2224] In some aspects, an antigen binding polypeptide complex provided herein comprises a first polypeptide, and a second polypeptide; wherein the first polypeptide has a structure represented by VL1-L1-VH1-L2-VL2-L3-CL-L4-VH2-L5-CH1, VL1-L1-VH1-L2-VL2-L3-CH1-L4-VH2-L5-CL, VL1-L1-VH1-L2-VH2-L3-CL-L4-VL2-L5-CH1, VL1-L1-VH1-L2-VH2-L3-CH1-L4-VL2-L5-CL, VL1-L1-VL2-L2-VH1-L3-CL-L4-VH2-L5-CH1, VL1-L1-VL2-L2-VH1-L3-CH1-L4-VH2-L5-CL, VL1-L1-VH2-L2-VH1-L3-CL-L4-VL2-L5-CH1, VL1-L1-VH2-L2-VH1-L3-CH1-L4-VL2-L5-CL, VH1-L1-VL1-L2-VL2-L3-CL-L4-VH2-L5-CH1, VH1-L1-VL1-L2-VL2-L3-CH1-L4-VH2-L5-CL, VH1-L1-VL1-L2-VH2-L3-CL-L4-VL2-L5-CH1, VH1-L1-VL1-L2-VH2-L3-CH1-L4-VL2-L5-CL, VH1-L1-VL2-L2-VL1-L3-CL-L4-VH2-L5-CH1, VH1-L1-VL2-L2-VL1-L3-CH1-L4-VH2-L5-CL, VH1-L1-VH2-L2-VL1-L3-CL-L4-VL2-L5-CH1, VH1-L1-VH2-L2-VL1-L3-CH1-L4-VL2-L5-CL, VL2-L1-VL1-L2-VH2-L3-CL-L4-VH1-L5-CH1, VL2-L1-VL1-L2-VH2-L3-CH1-L4-VH1-L5-CL, VL2-L1-VH1-L2-VH2-L3-CL-L4-VL1-L5-CH1, VL2-L1-VH1-L2-VH2-L3-CH1-L4-VL1-L5-CL, VL2-L1-VH2-L2-VL1-L3-CL-L4-VH1-L5-CH1, VL2-L1-VH2-L2-VL1-L3-CH1-L4-VH1-L5-CL, VL2-L1-VH2-L2-VH1-L3-CL-L4-VL1-L5-CH1, VL2-L1-VH2-L2-VH1-L3-CH1-L4-VL1-L5-CL, VH2-L1-VL1-L2-VL2-L3-CL-L4-VH1-L5-CH1, VH2-L1-VL1-L2-VL2-L3-CH1-L4-VH1-L5-CL, VH2-L1-VH1-L2-VL2-L3-CL-L4-VL1-L5-CH1, VH2-L1-VH1-L2-VL2-L3-CH1-L4-VL1-L5-CL, VH2-L1-VL2-L2-VL1-L3-CL-L4-VH1-L5-CH1, VH2-L1-VL2-L2-VL1-L3-CH1-L4-VH1-L5-CL, VH2-L1-VL2-L2-VH1-L3-CL-L4-VL1-L5-CH1, or VH2-L1-VL2-L2-VH1-L3-CH1-L4-VL1-L5-CL; and wherein the second polypeptide has a structure represented by VL3-L6-VH3-L7-VL4-L8-CL-L9-VH4-L10-CH1, VL3-L6-VH3-L7-VL4-L8-CH1-L9-VH4-L10-CL, VL3-L6-VH3-L7-VH4-L8-CL-L9-VL4-L10-CH1, VL3-L6-VH3-L7-VH4-L8-CH1-L9-VL4-L10-CL, VL3-L6-VL4-L7-VH3-L8-CL-L9-VH4-L10-CH1, VL3-L6-VL4-L7-VH3-L8-CH1-L9-VH4-L10-CL, VL3-L6-VH4-L7-VH3-L8-CL-L9-VL4-L10-CH1, VL3-L6-VH4-L7-VH3-L8-CH1-L9-VL4-L10-CL, VH3-L6-VL3-L7-VL4-L8-CL-L9-VH4-L10-CH1, VH3-L6-VL3-L7-VL4-L8-CH1-L9-VH4-L10-CL, VH3-L6-VL3-L7-VH4-L8-CL-L9-VL4-L10-CH1, VH3-L6-VL3-L7-VH4-L8-CH1-L9-VL4-L10-CL, VH3-L6-VL4-L7-VL3-L8-CL-L9-VH4-L10-CH1, VH3-L6-VL4-L7-VL3-L8-CH1-L9-VH4-L10-CL, VH3-L6-VH4-L7-VL3-L8-CL-L9-VL4-L10-CH1, VH3-L6-VH4-L7-VL3-L8-CH1-L9-VL4-L10-CL, VL4-L6-VL3-L7-VH4-L8-CL-L9-VH3-L10-CH1, VL4-L6-VL3-L7-VH4-L8-CH1-L9-VH3-L10-CL, VL4-L6-VH3-L7-VH4-L8-CL-L9-VL3-L10-CH1, VL4-L6-VH3-L7-VH4-L8-CH1-L9-VL3-L10-CL, VL4-L6-VH4-L7-VL3-L8-CL-L9-VH3-L10-CH1, VL4-L6-VH4-L7-VL3-L8-CH1-L9-VH3-L10-CL, VL4-L6-VH4-L7-VH3-L8-CL- L9-VL3-L10-CH1, VL4-L6-VH4-L7-VH3-L8-CH1-L9-VL3-L10-CL, VH4-L6-VL3-L7-VL4-L8-CL-L9-VH3-L10-CH1, VH4-L6-VL3-L7-VL4-L8-CH1-L9-VH3-L10-CL, VH4-L6-VH3-L7-VL4-L8-CL-L9-VL3-L10-CH1, VH4-L6-VH3-L7-VL4-L8-CH1-L9-VL3-L10-CL, VH4-L6-VL4-L7-VL3-L8-CL-L9-VH3-L10-CH1, VH4-L6-VL4-L7-VL3-L8-CH1-L9-VH3-L10-CL, VH4-L6-VL4-L7-VH3-L8-CL-L9-VL3-L10-CH1, or VH4-L6-VL4-L7-VH3-L8-CH1-L9-VL3-L10-CL.

[2225] In some aspects, an antigen binding polypeptide complex provided herein comprises a first polypeptide, and a second polypeptide; wherein the first polypeptide has a structure represented by VL1-VH1-VL2-CL-VH2-CH1-CH2-CH3, VL1-VH1-VL2-CH1-VH2-CL-CH2-CH3, VL1-VH1-VH2-CL-VL2-CH1-CH2-CH3, VL1-VH1-VH2-CH1-VL2-CL-CH2-CH3, VL1-VL2-VH1-CL-VH2-CH1-CH2-CH3, VL1-VL2-VH1-CH1-VH2-CL-CH2-CH3, VL1-VH2-VH1-CL-VL2-CH1-CH2-CH3, VL1-VH2-VH1-CH1-VL2-CL-CH2-CH3, VH1-VL1-VL2-CL-VH2-CH1-CH2-CH3, VH1-VL1-VL2-CH1-VH2-CL-CH2-CH3, VH1-VL1-VH2-CL-VL2-CH1-CH2-CH3, VH1-VL1-VH2-CH1-VL2-CL-CH2-CH3, VH1-VL2-VL1-CL-VH2-CH1-CH2-CH3, VH1-VL2-VL1-CH1-VH2-CL-CH2-CH3, VH1-VH2-VL1-CL-VL2-CH1-CH2-CH3, VH1-VH2-VL1-CH1-VL2-CL-CH2-CH3, VL2-VL1-VH2-CL-VH1-CH1-CH2-CH3, VL2-VL1-VH2-CH1-VH1-CL-CH2-CH3, VL2-VH1-VH2-CL-VL1-CH1-CH2-CH3, VL2-VH1-VH2-CH1-VL1-CL-CH2-CH3, VL2-VH2-VL1-CL-VH1-CH1-CH2-CH3, VL2-VH2-VL1-CH1-VH1-CL-CH2-CH3, VL2-VH2-VH1-CL-VL1-CH1-CH2-CH3, VL2-VH2-VH1-CH1-VL1-CL-CH2-CH3, VH2-VL1-VL2-CL-VH1-CH1-CH2-CH3, VH2-VL1-VL2-CH1-VH1-CL-CH2-CH3, VH2-VH1-VL2-CL-VL1-CH1-CH2-CH3, VH2-VH1-VL2-CH1-VL1-CL-CH2-CH3, VH2-VL2-VL1-CL-VH1-CH1-CH2-CH3, VH2-VL2-VL1-CH1-VH1-CL-CH2-CH3, VH2-VL2-VH1-CL-VL1-CH1-CH2-CH3, or VH2-VL2-VH1-CH1-VL1-CL-CH2-CH3; and wherein the second polypeptide has a structure represented by VL3-VH3-VL4-CL-VH4-CH1-CH2-CH3, VL3-VH3-VL4-CH1-VH4-CL-CH2-CH3, VL3-VH3-VH4-CL-VL4-CH1-CH2-CH3, VL3-VH3-VH4-CH1-VL4-CL-CH2-CH3, VL3-VL4-VH3-CL-VH4-CH1-CH2-CH3, VL3-VL4-VH3-CH1-VH4-CL-CH2-CH3, VL3-VH4-VH3-CL-VL4-CH1-CH2-CH3, VL3-VH4-VH3-CH1-VL4-CL-CH2-CH3, VH3-VL3-VL4-CL-VH4-CH1-CH2-CH3, VH3-VL3-VL4-CH1-VH4-CL-CH2-CH3, VH3-VL3-VH4-CL-VL4-CH1-CH2-CH3, VH3-VL3-VH4-CH1-VL4-CL-CH2-CH3, VH3-VL4-VL3-CL-VH4-CH1-CH2-CH3, VH3-VL4-VL3-CH1-VH4-CL-CH2-CH3, VH3-VH4-VL3-CL-VL4-CH1-CH2-CH3, VH3-VH4-VL3-CH1-VL4-CL-CH2-CH3, VL4-VL3-VH4-CL-VH3-CH1-CH2-CH3, VL4-VL3-VH4-CH1-VH3-CL-CH2-CH3, VL4-VH3-VH4-CL-VL3-CH1-CH2-CH3, VL4-VH3-VH4-CH1-VL3-CL-CH2-CH3, VL4-VH4-VL3-CL-VH3-CH1-CH2-CH3, VL4-VH4-VL3-CH1-VH3-CL-CH2-CH3, VL4-VH4-VH3-CL-VL3-CH1-CH2-CH3, VL4-VH4-VH3-CH1-VL3-CL-CH2-CH3, VH4-VL3-VL4-CL-VH3-CH1-CH2-CH3, VH4-VL3-VL4-CH1-VH3-CL-CH2-CH3, VH4-VH3-VL4-CL-VL3-CH1-CH2-CH3, VH4-VH3-VL4-CH1-VL3-CL-CH2-CH3, VH4-VL4-VL3-CL-VH3-CH1-CH2-CH3, VH4-VL4-VL3-CH1-VH3-CL-CH2-CH3, VH4-VL4-VH3-CL-VL3-CH1-CH2-CH3, or VH4-VL4-VH3-CH1-VL3-CL-CH2-CH3.

[2226] In some aspects, an antigen binding polypeptide complex provided herein comprises a first polypeptide, and a second polypeptide; wherein the first polypeptide has a structure represented by VL1-L1-VH1-L2-VL2-L3-CL-L4-VH2-L5-CH1-CH2-CH3, VL1-L1-VH1-L2-VL2-L3-CH1-L4-VH2- L5-CL-CH2-CH3, VL1-L1-VH1-L2-VH2-L3-CL-L4-VL2-L5-CH1-CH2-CH3, VL1-L1-VH1-L2-VH2-L3-CH1-L4-VL2-L5-CL-CH2-CH3, VL1-L1-VL2-L2-VH1-L3-CL-L4-VH2-L5-CH1-CH2-CH3, VL1-L1-VL2-L2-VH1-L3-CH1-L4-VH2-L5-CL-CH2-CH3, VL1-L1-VH2-L2-VH1-L3-CL-L4-VL2-L5-CH1-CH2-CH3, VL1-L1-VH2-L2-VH1-L3-CH1-L4-VL2-L5-CL-CH2-CH3, VH1-L1-VL1-L2-VL2-L3-CL-L4-VH2-L5-CH1-CH2-CH3, VH1-L1-VL1-L2-VL2-L3-CH1-L4-VH2-L5-CL-CH2-CH3, VH1-L1-VL1-L2-VH2-L3-CL-L4-VL2-L5-CH1-CH2-CH3, VH1-L1-VL1-L2-VH2-L3-CH1-L4-VL2-L5-CL-CH2-CH3, VH1-L1-VL2-L2-VL1-L3-CL-L4-VH2-L5-CH1-CH2-CH3, VH1-L1-VL2-L2-VL1-L3-CH1-L4-VH2-L5- CL-CH2-CH3, VH1-L1-VH2-L2-VL1-L3-CL-L4-VL2-L5-CH1-CH2-CH3, VH1-L1-VH2-L2-VL1-L3-CH1-L4-VL2-L5-CL-CH2-CH3, VL2-L1-VL1-L2-VH2-L3-CL-L4-VH1-L5-CH1-CH2-CH3, VL2-L1-VL1-L2-VH2-L3-CH1-L4-VH1-L5-CL-CH2-CH3, VL2-L1-VH1-L2-VH2-L3-CL-L4-VL1-L5-CH1-CH2-CH3, VL2-L1-VH1-L2-VH2-L3-CH1-L4-VL1-L5-CL-CH2-CH3, VL2-L1-VH2-L2-VL1-L3-CL-L4-VH1-L5-CH1-CH2-CH3, VL2-L1-VH2-L2-VL1-L3-CH1-L4-VH1-L5-CL-CH2-CH3, VL2-L1-VH2-L2-VH1-L3-CL-L4-VL1-L5-CH1-CH2-CH3, VL2-L1-VH2-L2-VH1-L3-CH1-L4-VL1-L5-CL-CH2-CH3, VH2-L1-VL1-L2-VL2-L3-CL-L4-VH1-L5-CH1-CH2-CH3, VH2-L1-VL1-L2-VL2-L3-CH1-L4-VH1-L5- CL-CH2-CH3, VH2-L1-VH1-L2-VL2-L3-CL-L4-VL1-L5-CH1-CH2-CH3, VH2-L1-VH1-L2-VL2-L3-CH1-L4-VL1-L5-CL-CH2-CH3, VH2-L1-VL2-L2-VL1-L3-CL-L4-VH1-L5-CH1-CH2-CH3, VH2-L1-VL2-L2-VL1-L3-CH1-L4-VH1-L5-CL-CH2-CH3, VH2-L1-VL2-L2-VH1-L3-CL-L4-VL1-L5-CH1-CH2-CH3, or VH2-L1-VL2-L2-VH1-L3-CH1-L4-VL1-L5-CL-CH2-CH3; and wherein the second polypeptide has a structure represented by VL3-L6-VH3-L7-VL4-L8-CL-L9-VH4-L10-CH1-CH2-CH3, VL3-L6-VH3-L7-VL4-L8-CH1-L9-VH4-L10-CL-CH2-CH3, VL3-L6-VH3-L7-VH4-L8-CL-L9-VL4-L10-CH1-CH2-CH3, VL3-L6-VH3-L7-VH4-L8-CH1-L9-VL4-L10-CL-CH2-CH3, VL3-L6-VL4-L7-VH3-L8-CL-L9-VH4-L10-CH1-CH2-CH3, VL3-L6-VL4-L7-VH3-L8-CH1-L9-VH4-L10-CL-CH2-CH3, VL3-L6-VH4-L7-VH3-L8-CL-L9-VL4-L10-CH1-CH2-CH3, VL3-L6-VH4-L7-VH3-L8-CH1-L9-VL4-L10-CL-CH2-CH3, VH3- L6-VL3-L7-VL4-L8-CL-L9-VH4-L10-CH1-CH2-CH3, VH3-L6-VL3-L7-VL4-L8-CH1-L9-VH4-L10-CL-CH2-CH3, VH3-L6-VL3-L7-VH4-L8-CL-L9-VL4-L10-CH1-CH2-CH3, VH3-L6-VL3-L7-VH4-L8- CH1-L9-VL4-L10-CL-CH2-CH3, VH3-L6-VL4-L7-VL3-L8-CL-L9-VH4-L10-CH1-CH2-CH3, VH3-L6- VL4-L7-VL3-L8-CH1-L9-VH4-L10-CL-CH2-CH3, VH3-L6-VH4-L7-VL3-L8-CL-L9-VL4-L10-CH1-CH2-CH3, VH3-L6-VH4-L7-VL3-L8-CH1-L9-VL4-L10-CL-CH2-CH3, VL4-L6-VL3-L7-VH4-L8-CL-L9-VH3-L10-CH1-CH2-CH3, VL4-L6-VL3-L7-VH4-L8-CH1-L9-VH3-L10-CL-CH2-CH3, VL4-L6-VH3-L7-VH4-L8-CL-L9-VL3-L10-CH1-CH2-CH3, VL4-L6-VH3-L7-VH4-L8-CH1-L9-VL3-L10-CL-CH2-CH3, VL4-L6-VH4-L7-VL3-L8-CL-L9-VH3-L10-CH1-CH2-CH3, VL4-L6-VH4-L7-VL3-L8-CH1-L9-VH3-L10-CL-CH2-CH3, VL4-L6-VH4-L7-VH3-L8-CL-L9-VL3-L10-CH1-CH2-CH3, VL4-L6-VH4- L7-VH3-L8-CH1-L9-VL3-L10-CL-CH2-CH3, VH4-L6-VL3-L7-VL4-L8-CL-L9-VH3-L10-CH1-CH2-CH3, VH4-L6-VL3-L7-VL4-L8-CH1-L9-VH3-L10-CL-CH2-CH3, VH4-L6-VH3-L7-VL4-L8-CL-L9-VL3-L10-CH1-CH2-CH3, VH4-L6-VH3-L7-VL4-L8-CH1-L9-VL3-L10-CL-CH2-CH3, VH4-L6-VL4-L7-VL3-L8-CL-L9-VH3-L10-CH1-CH2-CH3, VH4-L6-VL4-L7-VL3-L8-CH1-L9-VH3-L10-CL-CH2-CH3, VH4- L6-VL4-L7-VH3-L8-CL-L9-VL3-L10-CH1-CH2-CH3, or VH4-L6-VL4-L7-VH3-L8-CH1-L9-VL3-L10-CL-CH2-CH3.

[2227] In some aspects, an antigen binding polypeptide complex provided herein comprises a first polypeptide, and a second polypeptide; wherein the first polypeptide has a structure represented by VL1-CL-VH1-CH1-VL2-VH2, VL1-CL-VH1-CH1-VH2-VL2, VL1-CL-VL2-CH1-VH1-VH2, VL1-CL-VH2-CH1-VH1-VL2, VL1-CH1-VH1-CL-VL2-VH2, VL1-CH1-VH1-CL-VH2-VL2, VL1-CH1-VL2-CL-VH1-VH2, VL1-CH1-VH2-CL-VH1-VL2, VH1-CL-VL1-CH1-VL2-VH2, VH1-CL-VL1-CH1-VH2-VL2, VH1-CL-VL2-CH1-VL1-VH2, VH1-CL-VH2-CH1-VL1-VL2, VH1-CH1-VL1-CL-VL2-VH2, VH1-CH1-VL1-CL-VH2-VL2, VH1-CH1-VL2-CL-VL1-VH2, VH1-CH1-VH2-CL-VL1-VL2, VL2-CL-VL1-CH1-VH2-VH1, VL2-CL-VH1-CH1-VH2-VL1, VL2-CL-VH2-CH1-VL1-VH1, VL2-CL-VH2-CH1-VH1-VL1, VL2-CH1-VL1-CL-VH2-VH1, VL2-CH1-VH1-CL-VH2-VL1, VL2-CH1-VH2-CL-VL1-VH1, VL2-CH1-VH2-CL-VH1-VL1, VH2-CL-VL1-CH1-VL2-VH1, VH2-CL-VH1-CH1-VL2-VL1, VH2-CL-VL2-CH1-VL1-VH1, VH2-CL-VL2-CH1-VH1-VL1, VH2-CH1-VL1-CL-VL2-VH1, VH2-CH1-VH1-CL-VL2-VL1, VH2-CH1-VL2-CL-VL1-VH1, or VH2-CH1-VL2-CL-VH1-VL1; and wherein the second polypeptide has a structure represented by VL3-CL-VH3-CH1-VL4-VH4, VL3-CL-VH3-CH1-VH4-VL4, VL3-CL-VL4-CH1-VH3-VH4, VL3-CL-VH4-CH1-VH3-VL4, VL3-CH1-VH3-CL-VL4-VH4, VL3-CH1-VH3-CL-VH4-VL4, VL3-CH1-VL4-CL-VH3-VH4, VL3-CH1-VH4-CL-VH3-VL4, VH3-CL-VL3-CH1-VL4-VH4, VH3-CL-VL3-CH1-VH4-VL4, VH3-CL-VL4-CH1-VL3-VH4, VH3-CL-VH4-CH1-VL3-VL4, VH3-CH1-VL3-CL-VL4-VH4, VH3-CH1-VL3-CL-VH4-VL4, VH3-CH1-VL4-CL-VL3-VH4, VH3-CH1-VH4-CL-VL3-VL4, VL4-CL-VL3-CH1-VH4-VH3, VL4-CL-VH3-CH1-VH4-VL3, VL4-CL-VH4-CH1-VL3-VH3, VL4-CL-VH4-CH1-VH3-VL3, VL4-CH1-VL3-CL-VH4-VH3, VL4-CH1-VH3-CL-VH4-VL3, VL4-CH1-VH4-CL-VL3-VH3, VL4-CH1-VH4-CL-VH3-VL3, VH4-CL-VL3-CH1-VL4-VH3, VH4-CL-VH3-CH1-VL4-VL3, VH4-CL-VL4-CH1-VL3-VH3, VH4-CL-VL4-CH1-VH3-VL3, VH4-CH1-VL3-CL-VL4-VH3, VH4-CH1-VH3-CL-VL4-VL3, VH4-CH1-VL4-CL-VL3-VH3, or VH4-CH1-VL4-CL-VH3-VL3.

[2228] In some aspects, an antigen binding polypeptide complex provided herein comprises a first polypeptide, and a second polypeptide; wherein the first polypeptide has a structure represented by VL1-L1-CL-L2-VH1-L3-CH1-L4-VL2-L5-VH2, VL1-L1-CL-L2-VH1-L3-CH1-L4-VH2-L5-VL2, VL1-L1-CL-L2-VL2-L3-CH1-L4-VH1-L5-VH2, VL1-L1-CL-L2-VH2-L3-CH1-L4-VH1-L5-VL2, VL1-L1-CH1-L2-VH1-L3-CL-L4-VL2-L5-VH2, VL1-L1-CH1-L2-VH1-L3-CL-L4-VH2-L5-VL2, VL1-L1-CH1-L2-VL2-L3-CL-L4-VH1-L5-VH2, VL1-L1-CH1-L2-VH2-L3-CL-L4-VH1-L5-VL2, VH1-L1-CL-L2-VL1-L3-CH1-L4-VL2-L5-VH2, VH1-L1-CL-L2-VL1-L3-CH1-L4-VH2-L5-VL2, VH1-L1-CL-L2-VL2-L3-CH1-L4-VL1-L5-VH2, VH1-L1-CL-L2-VH2-L3-CH1-L4-VL1-L5-VL2, VH1-L1-CH1-L2-VL1-L3- CL-L4-VL2-L5-VH2, VH1-L1-CH1-L2-VL1-L3-CL-L4-VH2-L5-VL2, VH1-L1-CH1-L2-VL2-L3-CL-L4-VL1-L5-VH2, VH1-L1-CH1-L2-VH2-L3-CL-L4-VL1-L5-VL2, VL2-L1-CL-L2-VL1-L3-CH1-L4-VH2-L5-VH1, VL2-L1-CL-L2-VH1-L3-CH1-L4-VH2-L5-VL1, VL2-L1-CL-L2-VH2-L3-CH1-L4-VL1-L5-VH1, VL2-L1-CL-L2-VH2-L3-CH1-L4-VH1-L5-VL1, VL2-L1-CH1-L2-VL1-L3-CL-L4-VH2-L5-VH1, VL2-L1-CH1-L2-VH1-L3-CL-L4-VH2-L5-VL1, VL2-L1-CH1-L2-VH2-L3-CL-L4-VL1-L5-VH1, VL2-L1-CH1-L2-VH2-L3-CL-L4-VH1-L5-VL1, VH2-L1-CL-L2-VL1-L3-CH1-L4-VL2-L5-VH1, VH2-L1-CL-L2-VH1-L3-CH1-L4-VL2-L5-VL1, VH2-L1-CL-L2-VL2-L3-CH1-L4-VL1-L5-VH1, VH2-L1-CL- L2-VL2-L3-CH1-L4-VH1-L5-VL1, VH2-L1-CH1-L2-VL1-L3-CL-L4-VL2-L5-VH1, VH2-L1-CH1-L2-VH1-L3-CL-L4-VL2-L5-VL1, VH2-L1-CH1-L2-VL2-L3-CL-L4-VL1-L5-VH1, or VH2-L1-CH1-L2-VL2-L3-CL-L4-VH1-L5-VL1; and wherein the second polypeptide has a structure represented by VL3-L6-CL-L7-VH3-L8-CH1-L9-VL4-L10-VH4, VL3-L6-CL-L7-VH3-L8-CH1-L9-VH4-L10-VL4, VL3-L6-CL-L7-VL4-L8-CH1-L9-VH3-L10-VH4, VL3-L6-CL-L7-VH4-L8-CH1-L9-VH3-L10-VL4, VL3-L6-CH1-L7-VH3-L8-CL-L9-VL4-L10-VH4, VL3-L6-CH1-L7-VH3-L8-CL-L9-VH4-L10-VL4, VL3-L6-CH1-L7-VL4-L8-CL-L9-VH3-L10-VH4, VL3-L6-CH1-L7-VH4-L8-CL-L9-VH3-L10-VL4, VH3-L6-CL-L7- VL3-L8-CH1-L9-VL4-L10-VH4, VH3-L6-CL-L7-VL3-L8-CH1-L9-VH4-L10-VL4, VH3-L6-CL-L7-VL4-L8-CH1-L9-VL3-L10-VH4, VH3-L6-CL-L7-VH4-L8-CH1-L9-VL3-L10-VL4, VH3-L6-CH1-L7-VL3-L8-CL-L9-VL4-L10-VH4, VH3-L6-CH1-L7-VL3-L8-CL-L9-VH4-L10-VL4, VH3-L6-CH1-L7-VL4-L8-CL-L9-VL3-L10-VH4, VH3-L6-CH1-L7-VH4-L8-CL-L9-VL3-L10-VL4, VL4-L6-CL-L7-VL3-L8-CH1- L9-VH4-L10-VH3, VL4-L6-CL-L7-VH3-L8-CH1-L9-VH4-L10-VL3, VL4-L6-CL-L7-VH4-L8-CH1-L9-VL3-L10-VH3, VL4-L6-CL-L7-VH4-L8-CH1-L9-VH3-L10-VL3, VL4-L6-CH1-L7-VL3-L8-CL-L9-VH4-L10-VH3, VL4-L6-CH1-L7-VH3-L8-CL-L9-VH4-L10-VL3, VL4-L6-CH1-L7-VH4-L8-CL-L9-VL3-L10-VH3, VL4-L6-CH1-L7-VH4-L8-CL-L9-VH3-L10-VL3, VH4-L6-CL-L7-VL3-L8-CH1-L9-VL4-L10-VH3, VH4-L6-CL-L7-VH3-L8-CH1-L9-VL4-L10-VL3, VH4-L6-CL-L7-VL4-L8-CH1-L9-VL3-L10-VH3, VH4-L6-CL-L7-VL4-L8-CH1-L9-VH3-L10-VL3, VH4-L6-CH1-L7-VL3-L8-CL-L9-VL4-L10-VH3, VH4-L6-CH1-L7-VH3-L8-CL-L9-VL4-L10-VL3, VH4-L6-CH1-L7-VL4-L8-CL-L9-VL3-L10-VH3, or VH4-L6-CH1-L7-VL4-L8-CL-L9-VH3-L10-VL3.

[2229] In some aspects, an antigen binding polypeptide complex provided herein comprises a first polypeptide, and a second polypeptide; wherein the first polypeptide has a structure represented by VL1-CL-VH1-CH1-VL2-VH2-CH2-CH3, VL1-CL-VH1-CH1-VH2-VL2-CH2-CH3, VL1-CL-VL2-CH1-VH1-VH2-CH2-CH3, VL1-CL-VH2-CH1-VH1-VL2-CH2-CH3, VL1-CH1-VH1-CL-VL2-VH2-CH2-CH3, VL1-CH1-VH1-CL-VH2-VL2-CH2-CH3, VL1-CH1-VL2-CL-VH1-VH2-CH2-CH3, VL1-CH1-VH2-CL-VH1-VL2-CH2-CH3, VH1-CL-VL1-CH1-VL2-VH2-CH2-CH3, VH1-CL-VL1-CH1-VH2-VL2-CH2-CH3, VH1-CL-VL2-CH1-VL1-VH2-CH2-CH3, VH1-CL-VH2-CH1-VL1-VL2-CH2-CH3, VH1-CH1-VL1-CL-VL2-VH2-CH2-CH3, VH1-CH1-VL1-CL-VH2-VL2-CH2-CH3, VH1-CH1-VL2-CL-VL1-VH2-CH2-CH3, VH1-CH1-VH2-CL-VL1-VL2-CH2-CH3, VL2-CL-VL1-CH1-VH2-VH1-CH2-CH3, VL2-CL-VH1-CH1-VH2-VL1-CH2-CH3, VL2-CL-VH2-CH1-VL1-VH1-CH2-CH3, VL2-CL-VH2-CH1-VH1-VL1-CH2-CH3, VL2-CH1-VL1-CL-VH2-VH1-CH2-CH3, VL2-CH1-VH1-CL-VH2-VL1-CH2-CH3, VL2-CH1-VH2-CL-VL1-VH1-CH2-CH3, VL2-CH1-VH2-CL-VH1-VL1-CH2-CH3, VH2-CL-VL1-CH1-VL2-VH1-CH2-CH3, VH2-CL-VH1-CH1-VL2-VL1-CH2-CH3, VH2-CL-VL2-CH1-VL1-VH1-CH2-CH3, VH2-CL-VL2-CH1-VH1-VL1-CH2-CH3, VH2-CH1-VL1-CL-VL2-VH1-CH2-CH3, VH2-CH1-VH1-CL-VL2-VL1-CH2-CH3, VH2-CH1-VL2-CL-VL1-VH1-CH2-CH3, or VH2-CH1-VL2-CL-VH1-VL1-CH2-CH3; and wherein the second polypeptide has a structure represented by VL3-CL-VH3-CH1-VL4-VH4-CH2-CH3, VL3-CL-VH3-CH1-VH4-VL4-CH2-CH3, VL3-CL-VL4-CH1-VH3-VH4-CH2-CH3, VL3-CL-VH4-CH1-VH3-VL4-CH2-CH3, VL3-CH1-VH3-CL-VL4-VH4-CH2-CH3, VL3-CH1-VH3-CL-VH4-VL4-CH2-CH3, VL3-CH1-VL4-CL-VH3-VH4-CH2-CH3, VL3-CH1-VH4-CL-VH3-VL4-CH2-CH3, VH3-CL-VL3-CH1-VL4-VH4-CH2-CH3, VH3-CL-VL3-CH1-VH4-VL4-CH2-CH3, VH3-CL-VL4-CH1-VL3-VH4-CH2-CH3, VH3-CL-VH4-CH1-VL3-VL4-CH2-CH3, VH3-CH1-VL3-CL-VL4-VH4-CH2-CH3, VH3-CH1-VL3-CL-VH4-VL4-CH2-CH3, VH3-CH1-VL4-CL-VL3-VH4-CH2-CH3, VH3-CH1-VH4-CL-VL3-VL4-CH2-CH3, VL4-CL-VL3-CH1-VH4-VH3-CH2-CH3, VL4-CL-VH3-CH1-VH4-VL3-CH2-CH3, VL4-CL-VH4-CH1-VL3-VH3-CH2-CH3, VL4-CL-VH4-CH1-VH3-VL3-CH2-CH3, VL4-CH1-VL3-CL-VH4-VH3-CH2-CH3, VL4-CH1-VH3-CL-VH4-VL3-CH2-CH3, VL4-CH1-VH4-CL-VL3-VH3-CH2-CH3, VL4-CH1-VH4-CL-VH3-VL3-CH2-CH3, VH4-CL-VL3-CH1-VL4-VH3-CH2-CH3, VH4-CL-VH3-CH1-VL4-VL3-CH2-CH3, VH4-CL-VL4-CH1-VL3-VH3-CH2-CH3, VH4-CL-VL4-CH1-VH3-VL3-CH2-CH3, VH4-CH1-VL3-CL-VL4-VH3-CH2-CH3, VH4-CH1-VH3-CL-VL4-VL3-CH2-CH3, VH4-CH1-VL4-CL-VL3-VH3-CH2-CH3, or VH4-CH1-VL4-CL-VH3-VL3-CH2-CH3.

[2230] In some aspects, an antigen binding polypeptide complex provided herein comprises a first polypeptide, and a second polypeptide; wherein the first polypeptide has a structure represented by VL1-L1-CL-L2-VH1-L3-CH1-L4-VL2-L5-VH2-CH2-CH3, VL1-L1-CL-L2-VH1-L3-CH1-L4-VH2-L5-VL2-CH2-CH3, VL1-L1-CL-L2-VL2-L3-CH1-L4-VH1-L5-VH2-CH2-CH3, VL1-L1-CL-L2-VH2-L3-CH1-L4-VH1-L5-VL2-CH2-CH3, VL1-L1-CH1-L2-VH1-L3-CL-L4-VL2-L5-VH2-CH2-CH3, VL1-L1-CH1-L2-VH1-L3-CL-L4-VH2-L5-VL2-CH2-CH3, VL1-L1-CH1-L2-VL2-L3-CL-L4-VH1-L5-VH2-CH2-CH3, VL1-L1-CH1-L2-VH2-L3-CL-L4-VH1-L5-VL2-CH2-CH3, VH1-L1-CL-L2-VL1-L3-CH1-L4-VL2-L5-VH2-CH2-CH3, VH1-L1-CL-L2-VL1-L3-CH1-L4-VH2-L5-VL2-CH2-CH3, VH1-L1-CL-L2-VL2-L3-CH1-L4-VL1-L5-VH2-CH2-CH3, VH1-L1-CL-L2-VH2-L3-CH1-L4-VL1-L5-VL2-CH2-CH3, VH1-L1-CH1-L2-VL1-L3-CL-L4-VL2-L5-VH2-CH2-CH3, VH1-L1-CH1-L2-VL1-L3-CL-L4-VH2-L5-VL2-CH2-CH3, VH1-L1-CH1-L2-VL2-L3-CL-L4-VL1-L5-VH2-CH2-CH3, VH1-L1-CH1-L2-VH2-L3-CL-L4-VL1-L5-VL2-CH2-CH3, VL2-L1-CL-L2-VL1-L3-CH1-L4-VH2-L5-VH1-CH2-CH3, VL2-L1-CL-L2-VH1-L3-CH1-L4-VH2-L5-VL1-CH2-CH3, VL2-L1-CL-L2-VH2-L3-CH1-L4-VL1-L5-VH1-CH2-CH3, VL2-L1-CL-L2-VH2-L3-CH1-L4-VH1-L5-VL1-CH2-CH3, VL2-L1-CH1-L2-VL1-L3-CL-L4-VH2-L5-VH1-CH2-CH3, VL2-L1-CH1-L2-VH1-L3-CL-L4-VH2-L5-VL1-CH2-CH3, VL2-L1-CH1-L2-VH2-L3-CL-L4-VL1-L5-VH1-CH2-CH3, VL2-L1-CH1-L2-VH2-L3-CL-L4-VH1-L5-VL1-CH2-CH3, VH2-L1-CL-L2-VL1-L3-CH1-L4-VL2-L5-VH1-CH2-CH3, VH2-L1-CL-L2-VH1-L3-CH1-L4-VL2-L5-VL1-CH2-CH3, VH2-L1-CL-L2-VL2-L3-CH1-L4-VL1-L5-VH1-CH2-CH3, VH2-L1-CL-L2-VL2-L3-CH1-L4-VH1-L5-VL1-CH2-CH3, VH2-L1-CH1-L2-VL1-L3-CL-L4-VL2-L5-VH1-CH2-CH3, VH2-L1-CH1-L2-VH1-L3-CL-L4-VL2-L5-VL1-CH2-CH3, VH2-L1-CH1-L2-VL2-L3-CL-L4-VL1-L5-VH1-CH2-CH3, or VH2-L1-CH1-L2-VL2-L3-CL-L4-VH1-L5-VL1-CH2-CH3; and wherein the second polypeptide has a structure represented by VL3-L6-CL-L7-VH3-L8-CH1-L9-VL4-L10-VH4-CH2-CH3, VL3-L6-CL-L7-VH3-L8-CH1-L9-VH4-L10-VL4-CH2-CH3, VL3-L6-CL-L7-VL4-L8-CH1-L9-VH3-L10-VH4-CH2-CH3, VL3-L6-CL-L7- VH4-L8-CH1-L9-VH3-L10-VL4-CH2-CH3, VL3-L6-CH1-L7-VH3-L8-CL-L9-VL4-L10-VH4-CH2-CH3, VL3-L6-CH1-L7-VH3-L8-CL-L9-VH4-L10-VL4-CH2-CH3, VL3-L6-CH1-L7-VL4-L8-CL-L9-VH3-L10-VH4-CH2-CH3, VL3-L6-CH1-L7-VH4-L8-CL-L9-VH3-L10-VL4-CH2-CH3, VH3-L6-CL-L7-VL3-L8-CH1-L9-VL4-L10-VH4-CH2-CH3, VH3-L6-CL-L7-VL3-L8-CH1-L9-VH4-L10-VL4-CH2-CH3, VH3-L6-CL-L7-VL4-L8-CH1-L9-VL3-L10-VH4-CH2-CH3, VH3-L6-CL-L7-VH4-L8-CH1-L9-VL3-L10-VL4- CH2-CH3, VH3-L6-CH1-L7-VL3-L8-CL-L9-VL4-L10-VH4-CH2-CH3, VH3-L6-CH1-L7-VL3-L8-CL-L9-VH4-L10-VL4-CH2-CH3, VH3-L6-CH1-L7-VL4-L8-CL-L9-VL3-L10-VH4-CH2-CH3, VH3-L6-CH1-L7-VH4-L8-CL-L9-VL3-L10-VL4-CH2-CH3, VL4-L6-CL-L7-VL3-L8-CH1-L9-VH4-L10-VH3-CH2-CH3, VL4-L6-CL-L7-VH3-L8-CH1-L9-VH4-L10-VL3-CH2-CH3, VL4-L6-CL-L7-VH4-L8-CH1-L9-VL3-L10-VH3-CH2-CH3, VL4-L6-CL-L7-VH4-L8-CH1-L9-VH3-L10-VL3-CH2-CH3, VL4-L6-CH1-L7-VL3-L8-CL-L9-VH4-L10-VH3-CH2-CH3, VL4-L6-CH1-L7-VH3-L8-CL-L9-VH4-L10-VL3-CH2-CH3, VL4-L6-CH1-L7-VH4-L8-CL-L9-VL3-L10-VH3-CH2-CH3, VL4-L6-CH1-L7-VH4-L8-CL-L9-VH3-L10-VL3-CH2-CH3, VH4-L6-CL-L7-VL3-L8-CH1-L9-VL4-L10-VH3-CH2-CH3, VH4-L6-CL-L7-VH3-L8-CH1-L9-VL4-L10-VL3-CH2-CH3, VH4-L6-CL-L7-VL4-L8-CH1-L9-VL3-L10-VH3-CH2-CH3, VH4-L6-CL-L7-VL4-L8-CH1-L9-VH3-L10-VL3-CH2-CH3, VH4-L6-CH1-L7-VL3-L8-CL-L9-VL4-L10-VH3-CH2-CH3, VH4-L6-CH1-L7-VH3-L8-CL-L9-VL4-L10-VL3-CH2-CH3, VH4-L6-CH1-L7-VL4-L8-CL-L9-VL3-L10-VH3-CH2-CH3, or VH4-L6-CH1-L7-VL4-L8-CL-L9-VH3-L10-VL3-CH2-CH3.

[2231] In some aspects, an antigen binding polypeptide complex provided herein comprises a first polypeptide, and a second polypeptide; wherein the first polypeptide has a structure represented by VL1-VL2-VH2-VH1-CL-CH1, VL1-VL2-VH2-VH1-CH1-CL, VL1-VH2-VL2-VH1-CL-CH1, VL1-VH2-VL2-VH1-CH1-CL, VH1-VL2-VH2-VL1-CL-CH1, VH1-VL2-VH2-VL1-CH1-CL, VH1-VH2-VL2-VL1-CL-CH1, VH1-VH2-VL2-VL1-CH1-CL, VL2-VL1-VH1-VH2-CL-CH1, VL2-VL1-VH1-VH2-CH1-CL, VL2-VH1-VL1-VH2-CL-CH1, VL2-VH1-VL1-VH2-CH1-CL, VH2-VL1-VH1-VL2-CL-CH1, VH2-VL1-VH1-VL2-CH1-CL, VH2-VH1-VL1-VL2-CL-CH1, or VH2-VH1-VL1-VL2-CH1-CL; and wherein the second polypeptide has a structure represented by VL3-VL4-VH4-VH3-CL-CH1, VL3-VL4-VH4-VH3-CH1-CL, VL3-VH4-VL4-VH3-CL-CH1, VL3-VH4-VL4-VH3-CH1-CL, VH3-VL4-VH4-VL3-CL-CH1, VH3-VL4-VH4-VL3-CH1-CL, VH3-VH4-VL4-VL3-CL-CH1, VH3-VH4-VL4-VL3-CH1-CL, VL4-VL3-VH3-VH4-CL-CH1, VL4-VL3-VH3-VH4-CH1-CL, VL4-VH3-VL3-VH4-CL-CH1, VL4-VH3-VL3-VH4-CH1-CL, VH4-VL3-VH3-VL4-CL-CH1, VH4-VL3-VH3-VL4-CH1-CL, VH4-VH3-VL3-VL4-CL-CH1, or VH4-VH3-VL3-VL4-CH1-CL.

[2232] In some aspects, an antigen binding polypeptide complex provided herein comprises a first polypeptide, and a second polypeptide; wherein the first polypeptide has a structure represented by VL1-L1-VL2-L2-VH2-L3-VH1-L4-CL-L5-CH1, VL1-L1-VL2-L2-VH2-L3-VH1-L4-CH1-L5-CL, VL1-L1-VH2-L2-VL2-L3-VH1-L4-CL-L5-CH1, VL1-L1-VH2-L2-VL2-L3-VH1-L4-CH1-L5-CL, VH1-L1-VL2-L2-VH2-L3-VL1-L4-CL-L5-CH1, VH1-L1-VL2-L2-VH2-L3-VL1-L4-CH1-L5-CL, VH1-L1-VH2-L2-VL2-L3-VL1-L4-CL-L5-CH1, VH1-L1-VH2-L2-VL2-L3-VL1-L4-CH1-L5-CL, VL2-L1-VL1-L2-VH1-L3-VH2-L4-CL-L5-CH1, VL2-L1-VL1-L2-VH1-L3-VH2-L4-CH1-L5-CL, VL2-L1-VH1-L2-VL1-L3-VH2-L4-CL-L5-CH1, VL2-L1-VH1-L2-VL1-L3-VH2-L4-CH1-L5-CL, VH2-L1-VL1-L2-VH1-L3-VL2-L4-CL-L5-CH1, VH2-L1-VL1-L2-VH1-L3-VL2-L4-CH1-L5-CL, VH2-L1-VH1-L2-VL1-L3-VL2-L4-CL-L5-CH1, or VH2-L1-VH1-L2-VL1-L3-VL2-L4-CH1-L5-CL; and wherein the second polypeptide has a structure represented by VL3-L6-VL4-L7-VH4-L8-VH3-L9-CL-L10-CH1, VL3-L6-VL4-L7-VH4-L8-VH3-L9-CH1-L10-CL, VL3-L6-VH4-L7-VL4-L8-VH3-L9-CL-L10-CH1, VL3-L6-VH4-L7-VL4-L8-VH3-L9-CH1-L10-CL, VH3-L6-VL4-L7-VH4-L8-VL3-L9-CL-L10-CH1, VH3-L6-VL4-L7-VH4-L8-VL3-L9-CH1-L10-CL, VH3-L6-VH4-L7-VL4-L8-VL3-L9-CL-L10-CH1, VH3-L6-VH4-L7-VL4-L8-VL3-L9-CH1-L10-CL, VL4-L6-VL3-L7-VH3-L8-VH4-L9-CL-L10-CH1, VL4-L6-VL3-L7-VH3-L8-VH4-L9-CH1-L10-CL, VL4-L6-VH3-L7-VL3-L8-VH4-L9-CL-L10-CH1, VL4-L6-VH3-L7-VL3-L8-VH4-L9-CH1-L10-CL, VH4-L6-VL3-L7-VH3-L8-VL4-L9-CL-L10-CH1, VH4-L6-VL3-L7-VH3-L8-VL4-L9-CH1-L10-CL, VH4-L6-VH3-L7-VL3-L8-VL4-L9-CL-L10-CH1, or VH4-L6-VH3-L7-VL3- L8-VL4-L9-CH1-L10-CL.

[2233] In some aspects, an antigen binding polypeptide complex provided herein comprises a first polypeptide, and a second polypeptide; wherein the first polypeptide has a structure represented by VL1-VL2-VH2-VH1-CL-CH1-CH2-CH3, VL1-VL2-VH2-VH1-CH1-CL-CH2-CH3, VL1-VH2-VL2-VH1-CL-CH1-CH2-CH3, VL1-VH2-VL2-VH1-CH1-CL-CH2-CH3, VH1-VL2-VH2-VL1-CL-CH1-CH2-CH3, VH1-VL2-VH2-VL1-CH1-CL-CH2-CH3, VH1-VH2-VL2-VL1-CL-CH1-CH2-CH3, VH1-VH2-VL2-VL1-CH1-CL-CH2-CH3, VL2-VL1-VH1-VH2-CL-CH1-CH2-CH3, VL2-VL1-VH1-VH2-CH1-CL-CH2-CH3, VL2-VH1-VL1-VH2-CL-CH1-CH2-CH3, VL2-VH1-VL1-VH2-CH1-CL-CH2-CH3, VH2-VL1-VH1-VL2-CL-CH1-CH2-CH3, VH2-VL1-VH1-VL2-CH1-CL-CH2-CH3, VH2-VH1-VL1-VL2-CL-CH1-CH2-CH3, or VH2-VH1-VL1-VL2-CH1-CL-CH2-CH3; and wherein the second polypeptide has a structure represented by VL3-VL4-VH4-VH3-CL-CH1-CH2-CH3, VL3-VL4-VH4-VH3-CH1-CL-CH2-CH3, VL3-VH4-VL4-VH3-CL-CH1-CH2-CH3, VL3-VH4-VL4-VH3-CH1-CL-CH2-CH3, VH3-VL4-VH4-VL3-CL-CH1-CH2-CH3, VH3-VL4-VH4-VL3-CH1-CL-CH2-CH3, VH3-VH4-VL4-VL3-CL-CH1-CH2-CH3, VH3-VH4-VL4-VL3-CH1-CL-CH2-CH3, VL4-VL3-VH3-VH4-CL-CH1-CH2-CH3, VL4-VL3-VH3-VH4-CH1-CL-CH2-CH3, VL4-VH3-VL3-VH4-CL-CH1-CH2-CH3, VL4-VH3-VL3-VH4-CH1-CL-CH2-CH3, VH4-VL3-VH3-VL4-CL-CH1-CH2-CH3, VH4-VL3-VH3-VL4-CH1-CL-CH2-CH3, VH4-VH3-VL3-VL4-CL-CH1-CH2-CH3, or VH4-VH3-VL3-VL4-CH1-CL-CH2-CH3.

[2234] In some aspects, an antigen binding polypeptide complex provided herein comprises a first polypeptide, and a second polypeptide; wherein the first polypeptide has a structure represented by VL1-L1-VL2-L2-VH2-L3-VH1-L4-CL-L5-CH1-CH2-CH3, VL1-L1-VL2-L2-VH2-L3-VH1-L4-CH1- L5-CL-CH2-CH3, VL1-L1-VH2-L2-VL2-L3-VH1-L4-CL-L5-CH1-CH2-CH3, VL1-L1-VH2-L2-VL2-L3-VH1-L4-CH1-L5-CL-CH2-CH3, VH1-L1-VL2-L2-VH2-L3-VL1-L4-CL-L5-CH1-CH2-CH3, VH1-L1-VL2-L2-VH2-L3-VL1-L4-CH1-L5-CL-CH2-CH3, VH1-L1-VH2-L2-VL2-L3-VL1-L4-CL-L5-CH1-CH2-CH3, VH1-L1-VH2-L2-VL2-L3-VL1-L4-CH1-L5-CL-CH2-CH3, VL2-L1-VL1-L2-VH1-L3-VH2-L4- CL-L5-CH1-CH2-CH3, VL2-L1-VL1-L2-VH1-L3-VH2-L4-CH1-L5-CL-CH2-CH3, VL2-L1-VH1-L2-VL1-L3-VH2-L4-CL-L5-CH1-CH2-CH3, VL2-L1-VH1-L2-VL1-L3-VH2-L4-CH1-L5-CL-CH2-CH3, VH2-L1-VL1-L2-VH1-L3-VL2-L4-CL-L5-CH1-CH2-CH3, VH2-L1-VL1-L2-VH1-L3-VL2-L4-CH1-L5- CL-CH2-CH3, VH2-L1-VH1-L2-VL1-L3-VL2-L4-CL-L5-CH1-CH2-CH3, or VH2-L1-VH1-L2-VL1-L3-VL2-L4-CH1-L5-CL-CH2-CH3; and wherein the second polypeptide has a structure represented by VL3-L6-VL4-L7-VH4-L8-VH3-L9-CL-L10-CH1-CH2-CH3, VL3-L6-VL4-L7-VH4-L8-VH3-L9-CH1-L10-CL-CH2-CH3, VL3-L6-VH4-L7-VL4-L8-VH3-L9-CL-L10-CH1-CH2-CH3, VL3-L6-VH4-L7-VL4-L8-VH3-L9-CH1-L10-CL-CH2-CH3, VH3-L6-VL4-L7-VH4-L8-VL3-L9-CL-L10-CH1-CH2-CH3, VH3-L6-VL4- L7-VH4-L8-VL3-L9-CH1-L10-CL-CH2-CH3, VH3-L6-VH4-L7-VL4-L8-VL3-L9-CL-L10-CH1-CH2-CH3, VH3-L6-VH4-L7-VL4-L8-VL3-L9-CH1-L10-CL-CH2-CH3, VL4-L6-VL3-L7-VH3-L8-VH4-L9- CL-L10-CH1-CH2-CH3, VL4-L6-VL3-L7-VH3-L8-VH4-L9-CH1-L10-CL-CH2-CH3, VL4-L6-VH3-L7-VL3-L8-VH4-L9-CL-L10-CH1-CH2-CH3, VL4-L6-VH3-L7-VL3-L8-VH4-L9-CH1-L10-CL-CH2-CH3, VH4- L6-VL3-L7-VH3-L8-VL4-L9-CL-L10-CH1-CH2-CH3, VH4-L6-VL3-L7-VH3-L8-VL4-L9-CH1-L10-CL-CH2-CH3, VH4-L6-VH3-L7-VL3-L8-VL4-L9-CL-L10-CH1-CH2-CH3, or VH4-L6-VH3-L7-VL3-L8-VL4-L9-CH1-L10-CL-CH2-CH3.

[2235] In some aspects, an antigen binding polypeptide complex provided herein comprises a first polypeptide, and a second polypeptide; wherein the first polypeptide has a structure represented by VL1-VH1-VL2-CL-VH2-CH1, VL1-VH1-VL2-CH1-VH2-CL, VL1-VH1-VH2-CL-VL2-CH1, VL1-VH1-VH2-CH1-VL2-CL, VL1-VL2-VH1-CL-VH2-CH1, VL1-VL2-VH1-CH1-VH2-CL, VL1-VH2-VH1-CL-VL2-CH1, VL1-VH2-VH1-CH1-VL2-CL, VH1-VL1-VL2-CL-VH2-CH1, VH1-VL1-VL2-CH1-VH2-CL, VH1-VL1-VH2-CL-VL2-CH1, VH1-VL1-VH2-CH1-VL2-CL, VH1-VL2-VL1-CL-VH2-CH1, VH1-VL2-VL1-CH1-VH2-CL, VH1-VH2-VL1-CL-VL2-CH1, VH1-VH2-VL1-CH1-VL2-CL, VL2-VL1-VH2-CL-VH1-CH1, VL2-VL1-VH2-CH1-VH1-CL, VL2-VH1-VH2-CL-VL1-CH1, VL2-VH1-VH2-CH1-VL1-CL, VL2-VH2-VL1-CL-VH1-CH1, VL2-VH2-VL1-CH1-VH1-CL, VL2-VH2-VH1-CL-VL1-CH1, VL2-VH2-VH1-CH1-VL1-CL, VH2-VL1-VL2-CL-VH1-CH1, VH2-VL1-VL2-CH1-VH1-CL, VH2-VH1-VL2-CL-VL1-CH1, VH2-VH1-VL2-CH1-VL1-CL, VH2-VL2-VL1-CL-VH1-CH1, VH2-VL2-VL1-CH1-VH1-CL, VH2-VL2-VH1-CL-VL1-CH1, or VH2-VL2-VH1-CH1-VL1-CL; and wherein the second polypeptide has a structure represented by VL3-CL-VH3-CH1-VL4-VH4, VL3-CL-VH3-CH1-VH4-VL4, VL3-CL-VL4-CH1-VH3-VH4, VL3-CL-VH4-CH1-VH3-VL4, VL3-CH1-VH3-CL-VL4-VH4, VL3-CH1-VH3-CL-VH4-VL4, VL3-CH1-VL4-CL-VH3-VH4, VL3-CH1-VH4-CL-VH3-VL4, VH3-CL-VL3-CH1-VL4-VH4, VH3-CL-VL3-CH1-VH4-VL4, VH3-CL-VL4-CH1-VL3-VH4, VH3-CL-VH4-CH1-VL3-VL4, VH3-CH1-VL3-CL-VL4-VH4, VH3-CH1-VL3-CL-VH4-VL4, VH3-CH1-VL4-CL-VL3-VH4, VH3-CH1-VH4-CL-VL3-VL4, VL4-CL-VL3-CH1-VH4-VH3, VL4-CL-VH3-CH1-VH4-VL3, VL4-CL-VH4-CH1-VL3-VH3, VL4-CL-VH4-CH1-VH3-VL3, VL4-CH1-VL3-CL-VH4-VH3, VL4-CH1-VH3-CL-VH4-VL3, VL4-CH1-VH4-CL-VL3-VH3, VL4-CH1-VH4-CL-VH3-VL3, VH4-CL-VL3-CH1-VL4-VH3, VH4-CL-VH3-CH1-VL4-VL3, VH4-CL-VL4-CH1-VL3-VH3, VH4-CL-VL4-CH1-VH3-VL3, VH4-CH1-VL3-CL-VL4-VH3, VH4-CH1-VH3-CL-VL4-VL3, VH4-CH1-VL4-CL-VL3-VH3, or VH4-CH1-VL4-CL-VH3-VL3.

[2236] In some aspects, an antigen binding polypeptide complex provided herein comprises a first polypeptide, and a second polypeptide; wherein the first polypeptide has a structure represented by VL1-L1-VH1-L2-VL2-L3-CL-L4-VH2-L5-CH1, VL1-L1-VH1-L2-VL2-L3-CH1-L4-VH2-L5-CL, VL1-L1-VH1-L2-VH2-L3-CL-L4-VL2-L5-CH1, VL1-L1-VH1-L2-VH2-L3-CH1-L4-VL2-L5-CL, VL1-L1-VL2-L2-VH1-L3-CL-L4-VH2-L5-CH1, VL1-L1-VL2-L2-VH1-L3-CH1-L4-VH2-L5-CL, VL1-L1-VH2-L2-VH1-L3-CL-L4-VL2-L5-CH1, VL1-L1-VH2-L2-VH1-L3-CH1-L4-VL2-L5-CL, VH1-L1-VL1-L2-VL2-L3-CL-L4-VH2-L5-CH1, VH1-L1-VL1-L2-VL2-L3-CH1-L4-VH2-L5-CL, VH1-L1-VL1-L2-VH2-L3-CL-L4-VL2-L5-CH1, VH1-L1-VL1-L2-VH2-L3-CH1-L4-VL2-L5-CL, VH1-L1-VL2-L2-VL1-L3-CL-L4-VH2-L5-CH1, VH1-L1-VL2-L2-VL1-L3-CH1-L4-VH2-L5-CL, VH1-L1-VH2-L2-VL1-L3-CL-L4-VL2-L5-CH1, VH1-L1-VH2-L2-VL1-L3-CH1-L4-VL2-L5-CL, VL2-L1-VL1-L2-VH2-L3-CL-L4-VH1-L5-CH1, VL2-L1-VL1-L2-VH2-L3-CH1-L4-VH1-L5-CL, VL2-L1-VH1-L2-VH2-L3-CL-L4-VL1-L5-CH1, VL2-L1-VH1-L2-VH2-L3-CH1-L4-VL1-L5-CL, VL2-L1-VH2-L2-VL1-L3-CL-L4-VH1-L5-CH1, VL2-L1-VH2-L2-VL1-L3-CH1-L4-VH1-L5-CL, VL2-L1-VH2-L2-VH1-L3-CL-L4-VL1-L5-CH1, VL2-L1-VH2-L2-VH1-L3-CH1-L4-VL1-L5-CL, VH2-L1-VL1-L2-VL2-L3-CL-L4-VH1-L5-CH1, VH2-L1-VL1-L2-VL2-L3-CH1-L4-VH1-L5-CL, VH2-L1-VH1-L2-VL2-L3-CL-L4-VL1-L5-CH1, VH2-L1-VH1-L2-VL2-L3-CH1-L4-VL1-L5-CL, VH2-L1-VL2-L2-VL1-L3-CL-L4-VH1-L5-CH1, VH2-L1-VL2-L2-VL1-L3-CH1-L4-VH1-L5-CL, VH2-L1-VL2-L2-VH1-L3-CL-L4-VL1-L5-CH1, or VH2-L1-VL2-L2-VH1-L3-CH1-L4-VL1-L5-CL; and wherein the second polypeptide has a structure represented by VL3-L6-CL-L7-VH3-L8-CH1-L9-VL4-L10-VH4, VL3-L6-CL-L7-VH3-L8-CH1-L9-VH4-L10-VL4, VL3-L6-CL-L7-VL4-L8-CH1-L9-VH3-L10-VH4, VL3-L6-CL-L7-VH4-L8-CH1-L9-VH3-L10-VL4, VL3-L6-CH1-L7-VH3-L8-CL-L9-VL4-L10-VH4, VL3-L6-CH1-L7-VH3-L8-CL-L9-VH4-L10-VL4, VL3-L6-CH1-L7-VL4-L8-CL-L9-VH3-L10-VH4, VL3-L6-CH1-L7-VH4-L8-CL-L9-VH3-L10-VL4, VH3-L6-CL-L7- VL3-L8-CH1-L9-VL4-L10-VH4, VH3-L6-CL-L7-VL3-L8-CH1-L9-VH4-L10-VL4, VH3-L6-CL-L7-VL4-L8-CH1-L9-VL3-L10-VH4, VH3-L6-CL-L7-VH4-L8-CH1-L9-VL3-L10-VL4, VH3-L6-CH1-L7-VL3-L8-CL-L9-VL4-L10-VH4, VH3-L6-CH1-L7-VL3-L8-CL-L9-VH4-L10-VL4, VH3-L6-CH1-L7-VL4-L8-CL-L9-VL3-L10-VH4, VH3-L6-CH1-L7-VH4-L8-CL-L9-VL3-L10-VL4, VL4-L6-CL-L7-VL3-L8-CH1- L9-VH4-L10-VH3, VL4-L6-CL-L7-VH3-L8-CH1-L9-VH4-L10-VL3, VL4-L6-CL-L7-VH4-L8-CH1-L9-VL3-L10-VH3, VL4-L6-CL-L7-VH4-L8-CH1-L9-VH3-L10-VL3, VL4-L6-CH1-L7-VL3-L8-CL-L9-VH4-L10-VH3, VL4-L6-CH1-L7-VH3-L8-CL-L9-VH4-L10-VL3, VL4-L6-CH1-L7-VH4-L8-CL-L9-VL3-L10-VH3, VL4-L6-CH1-L7-VH4-L8-CL-L9-VH3-L10-VL3, VH4-L6-CL-L7-VL3-L8-CH1-L9-VL4-L10-VH3, VH4-L6-CL-L7-VH3-L8-CH1-L9-VL4-L10-VL3, VH4-L6-CL-L7-VL4-L8-CH1-L9-VL3-L10-VH3, VH4-L6-CL-L7-VL4-L8-CH1-L9-VH3-L10-VL3, VH4-L6-CH1-L7-VL3-L8-CL-L9-VL4-L10-VH3, VH4-L6-CH1-L7-VH3-L8-CL-L9-VL4-L10-VL3, VH4-L6-CH1-L7-VL4-L8-CL-L9-VL3-L10-VH3, or VH4-L6-CH1-L7-VL4-L8-CL-L9-VH3-L10-VL3.

[2237] In some aspects, an antigen binding polypeptide complex provided herein comprises a first polypeptide, and a second polypeptide; wherein the first polypeptide has a structure represented by VL1-VH1-VL2-CL-VH2-CH1-CH2-CH3, VL1-VH1-VL2-CH1-VH2-CL-CH2-CH3, VL1-VH1-VH2-CL-VL2-CH1-CH2-CH3, VL1-VH1-VH2-CH1-VL2-CL-CH2-CH3, VL1-VL2-VH1-CL-VH2-CH1-CH2-CH3, VL1-VL2-VH1-CH1-VH2-CL-CH2-CH3, VL1-VH2-VH1-CL-VL2-CH1-CH2-CH3, VL1-VH2-VH1-CH1-VL2-CL-CH2-CH3, VH1-VL1-VL2-CL-VH2-CH1-CH2-CH3, VH1-VL1-VL2-CH1-VH2-CL-CH2-CH3, VH1-VL1-VH2-CL-VL2-CH1-CH2-CH3, VH1-VL1-VH2-CH1-VL2-CL-CH2-CH3, VH1-VL2-VL1-CL-VH2-CH1-CH2-CH3, VH1-VL2-VL1-CH1-VH2-CL-CH2-CH3, VH1-VH2-VL1-CL-VL2-CH1-CH2-CH3, VH1-VH2-VL1-CH1-VL2-CL-CH2-CH3, VL2-VL1-VH2-CL-VH1-CH1-CH2-CH3, VL2-VL1-VH2-CH1-VH1-CL-CH2-CH3, VL2-VH1-VH2-CL-VL1-CH1-CH2-CH3, VL2-VH1-VH2-CH1-VL1-CL-CH2-CH3, VL2-VH2-VL1-CL-VH1-CH1-CH2-CH3, VL2-VH2-VL1-CH1-VH1-CL-CH2-CH3, VL2-VH2-VH1-CL-VL1-CH1-CH2-CH3, VL2-VH2-VH1-CH1-VL1-CL-CH2-CH3, VH2-VL1-VL2-CL-VH1-CH1-CH2-CH3, VH2-VL1-VL2-CH1-VH1-CL-CH2-CH3, VH2-VH1-VL2-CL-VL1-CH1-CH2-CH3, VH2-VH1-VL2-CH1-VL1-CL-CH2-CH3, VH2-VL2-VL1-CL-VH1-CH1-CH2-CH3, VH2-VL2-VL1-CH1-VH1-CL-CH2-CH3, VH2-VL2-VH1-CL-VL1-CH1-CH2-CH3, or VH2-VL2-VH1-CH1-VL1-CL-CH2-CH3; and wherein the second polypeptide has a structure represented by VL3-CL-VH3-CH1-VL4-VH4-CH2-CH3, VL3-CL-VH3-CH1-VH4-VL4-CH2-CH3, VL3-CL-VL4-CH1-VH3-VH4-CH2-CH3, VL3-CL-VH4-CH1-VH3-VL4-CH2-CH3, VL3-CH1-VH3-CL-VL4-VH4-CH2-CH3, VL3-CH1-VH3-CL-VH4-VL4-CH2-CH3, VL3-CH1-VL4-CL-VH3-VH4-CH2-CH3, VL3-CH1-VH4-CL-VH3-VL4-CH2-CH3, VH3-CL-VL3-CH1-VL4-VH4-CH2-CH3, VH3-CL-VL3-CH1-VH4-VL4-CH2-CH3, VH3-CL-VL4-CH1-VL3-VH4-CH2-CH3, VH3-CL-VH4-CH1-VL3-VL4-CH2-CH3, VH3-CH1-VL3-CL-VL4-VH4-CH2-CH3, VH3-CH1-VL3-CL-VH4-VL4-CH2-CH3, VH3-CH1-VL4-CL-VL3-VH4-CH2-CH3, VH3-CH1-VH4-CL-VL3-VL4-CH2-CH3, VL4-CL-VL3-CH1-VH4-VH3-CH2-CH3, VL4-CL-VH3-CH1-VH4-VL3-CH2-CH3, VL4-CL-VH4-CH1-VL3-VH3-CH2-CH3, VL4-CL-VH4-CH1-VH3-VL3-CH2-CH3, VL4-CH1-VL3-CL-VH4-VH3-CH2-CH3, VL4-CH1-VH3-CL-VH4-VL3-CH2-CH3, VL4-CH1-VH4-CL-VL3-VH3-CH2-CH3, VL4-CH1-VH4-CL-VH3-VL3-CH2-CH3, VH4-CL-VL3-CH1-VL4-VH3-CH2-CH3, VH4-CL-VH3-CH1-VL4-VL3-CH2-CH3, VH4-CL-VL4-CH1-VL3-VH3-CH2-CH3, VH4-CL-VL4-CH1-VH3-VL3-CH2-CH3, VH4-CH1-VL3-CL-VL4-VH3-CH2-CH3, VH4-CH1-VH3-CL-VL4-VL3-CH2-CH3, VH4-CH1-VL4-CL-VL3-VH3-CH2-CH3, or VH4-CH1-VL4-CL-VH3-VL3-CH2-CH3.

[2238] In some aspects, an antigen binding polypeptide complex provided herein comprises a first polypeptide, and a second polypeptide; wherein the first polypeptide has a structure represented by VL1-L1-VH1-L2-VL2-L3-CL-L4-VH2-L5-CH1-CH2-CH3, VL1-L1-VH1-L2-VL2-L3-CH1-L4-VH2- L5-CL-CH2-CH3, VL1-L1-VH1-L2-VH2-L3-CL-L4-VL2-L5-CH1-CH2-CH3, VL1-L1-VH1-L2-VH2-L3-CH1-L4-VL2-L5-CL-CH2-CH3, VL1-L1-VL2-L2-VH1-L3-CL-L4-VH2-L5-CH1-CH2-CH3, VL1-L1-VL2-L2-VH1-L3-CH1-L4-VH2-L5-CL-CH2-CH3, VL1-L1-VH2-L2-VH1-L3-CL-L4-VL2-L5-CH1-CH2-CH3, VL1-L1-VH2-L2-VH1-L3-CH1-L4-VL2-L5-CL-CH2-CH3, VH1-L1-VL1-L2-VL2-L3-CL-L4-VH2-L5-CH1-CH2-CH3, VH1-L1-VL1-L2-VL2-L3-CH1-L4-VH2-L5-CL-CH2-CH3, VH1-L1-VL1-L2-VH2-L3-CL-L4-VL2-L5-CH1-CH2-CH3, VH1-L1-VL1-L2-VH2-L3-CH1-L4-VL2-L5-CL-CH2-CH3, VH1-L1-VL2-L2-VL1-L3-CL-L4-VH2-L5-CH1-CH2-CH3, VH1-L1-VL2-L2-VL1-L3-CH1-L4-VH2-L5- CL-CH2-CH3, VH1-L1-VH2-L2-VL1-L3-CL-L4-VL2-L5-CH1-CH2-CH3, VH1-L1-VH2-L2-VL1-L3-CH1-L4-VL2-L5-CL-CH2-CH3, VL2-L1-VL1-L2-VH2-L3-CL-L4-VH1-L5-CH1-CH2-CH3, VL2-L1-VL1-L2-VH2-L3-CH1-L4-VH1-L5-CL-CH2-CH3, VL2-L1-VH1-L2-VH2-L3-CL-L4-VL1-L5-CH1-CH2-CH3, VL2-L1-VH1-L2-VH2-L3-CH1-L4-VL1-L5-CL-CH2-CH3, VL2-L1-VH2-L2-VL1-L3-CL-L4-VH1-L5-CH1-CH2-CH3, VL2-L1-VH2-L2-VL1-L3-CH1-L4-VH1-L5-CL-CH2-CH3, VL2-L1-VH2-L2-VH1-L3-CL-L4-VL1-L5-CH1-CH2-CH3, VL2-L1-VH2-L2-VH1-L3-CH1-L4-VL1-L5-CL-CH2-CH3, VH2-L1-VL1-L2-VL2-L3-CL-L4-VH1-L5-CH1-CH2-CH3, VH2-L1-VL1-L2-VL2-L3-CH1-L4-VH1-L5- CL-CH2-CH3, VH2-L1-VH1-L2-VL2-L3-CL-L4-VL1-L5-CH1-CH2-CH3, VH2-L1-VH1-L2-VL2-L3-CH1-L4-VL1-L5-CL-CH2-CH3, VH2-L1-VL2-L2-VL1-L3-CL-L4-VH1-L5-CH1-CH2-CH3, VH2-L1-VL2-L2-VL1-L3-CH1-L4-VH1-L5-CL-CH2-CH3, VH2-L1-VL2-L2-VH1-L3-CL-L4-VL1-L5-CH1-CH2-CH3, or VH2-L1-VL2-L2-VH1-L3-CH1-L4-VL1-L5-CL-CH2-CH3; and wherein the second polypeptide has a structure represented by VL3-L6-CL-L7-VH3-L8-CH1-L9-VL4-L10-VH4-CH2-CH3, VL3-L6-CL-L7-VH3-L8-CH1-L9-VH4-L10-VL4-CH2-CH3, VL3-L6-CL-L7-VL4-L8-CH1-L9-VH3-L10-VH4-CH2-CH3, VL3-L6-CL-L7-VH4-L8-CH1-L9-VH3-L10-VL4-CH2-CH3, VL3-L6-CH1-L7-VH3-L8-CL-L9-VL4-L10-VH4-CH2-CH3, VL3-L6-CH1-L7-VH3-L8-CL-L9-VH4-L10-VL4-CH2-CH3, VL3-L6-CH1-L7-VL4-L8-CL-L9-VH3-L10-VH4-CH2-CH3, VL3-L6-CH1-L7-VH4-L8-CL-L9-VH3-L10-VL4-CH2-CH3, VH3- L6-CL-L7-VL3-L8-CH1-L9-VL4-L10-VH4-CH2-CH3, VH3-L6-CL-L7-VL3-L8-CH1-L9-VH4-L10-VL4-CH2-CH3, VH3-L6-CL-L7-VL4-L8-CH1-L9-VL3-L10-VH4-CH2-CH3, VH3-L6-CL-L7-VH4-L8-CH1-L9-VL3-L10-VL4-CH2-CH3, VH3-L6-CH1-L7-VL3-L8-CL-L9-VL4-L10-VH4-CH2-CH3, VH3-L6-CH1-L7-VL3-L8-CL-L9-VH4-L10-VL4-CH2-CH3, VH3-L6-CH1-L7-VL4-L8-CL-L9-VL3-L10-VH4-CH2-CH3, VH3-L6-CH1-L7-VH4-L8-CL-L9-VL3-L10-VL4-CH2-CH3, VL4-L6-CL-L7-VL3-L8-CH1-L9-VH4-L10-VH3-CH2-CH3, VL4-L6-CL-L7-VH3-L8-CH1-L9-VH4-L10-VL3-CH2-CH3, VL4-L6-CL- L7-VH4-L8-CH1-L9-VL3-L10-VH3-CH2-CH3, VL4-L6-CL-L7-VH4-L8-CH1-L9-VH3-L10-VL3-CH2-CH3, VL4-L6-CH1-L7-VL3-L8-CL-L9-VH4-L10-VH3-CH2-CH3, VL4-L6-CH1-L7-VH3-L8-CL-L9-VH4-L10-VL3-CH2-CH3, VL4-L6-CH1-L7-VH4-L8-CL-L9-VL3-L10-VH3-CH2-CH3, VL4-L6-CH1-L7-VH4-L8-CL-L9-VH3-L10-VL3-CH2-CH3, VH4-L6-CL-L7-VL3-L8-CH1-L9-VL4-L10-VH3-CH2-CH3, VH4- L6-CL-L7-VH3-L8-CH1-L9-VL4-L10-VL3-CH2-CH3, VH4-L6-CL-L7-VL4-L8-CH1-L9-VL3-L10-VH3-CH2-CH3, VH4-L6-CL-L7-VL4-L8-CH1-L9-VH3-L10-VL3-CH2-CH3, VH4-L6-CH1-L7-VL3-L8-CL-L9-VL4-L10-VH3-CH2-CH3, VH4-L6-CH1-L7-VH3-L8-CL-L9-VL4-L10-VL3-CH2-CH3, VH4-L6-CH1-L7-VL4-L8-CL-L9-VL3-L10-VH3-CH2-CH3, or VH4-L6-CH1-L7-VL4-L8-CL-L9-VH3-L10- VL3-CH2-CH3.

[2239] In some aspects, an antigen binding polypeptide complex provided herein comprises a first polypeptide, and a second polypeptide; wherein the first polypeptide has a structure represented by VL1-CL-VH1-CH1-VL2-VH2, VL1-CL-VH1-CH1-VH2-VL2, VL1-CL-VL2-CH1-VH1-VH2, VL1-CL-VH2-CH1-VH1-VL2, VL1-CH1-VH1-CL-VL2-VH2, VL1-CH1-VH1-CL-VH2-VL2, VL1-CH1-VL2-CL-VH1-VH2, VL1-CH1-VH2-CL-VH1-VL2, VH1-CL-VL1-CH1-VL2-VH2, VH1-CL-VL1-CH1-VH2-VL2, VH1-CL-VL2-CH1-VL1-VH2, VH1-CL-VH2-CH1-VL1-VL2, VH1-CH1-VL1-CL-VL2-VH2, VH1-CH1-VL1-CL-VH2-VL2, VH1-CH1-VL2-CL-VL1-VH2, VH1-CH1-VH2-CL-VL1-VL2, VL2-CL-VL1-CH1-VH2-VH1, VL2-CL-VH1-CH1-VH2-VL1, VL2-CL-VH2-CH1-VL1-VH1, VL2-CL-VH2-CH1-VH1-VL1, VL2-CH1-VL1-CL-VH2-VH1, VL2-CH1-VH1-CL-VH2-VL1, VL2-CH1-VH2-CL-VL1-VH1, VL2-CH1-VH2-CL-VH1-VL1, VH2-CL-VL1-CH1-VL2-VH1, VH2-CL-VH1-CH1-VL2-VL1, VH2-CL-VL2-CH1-VL1-VH1, VH2-CL-VL2-CH1-VH1-VL1, VH2-CH1-VL1-CL-VL2-VH1, VH2-CH1-VH1-CL-VL2-VL1, VH2-CH1-VL2-CL-VL1-VH1, or VH2-CH1-VL2-CL-VH1-VL1; and wherein the second polypeptide has a structure represented by VL3-VH3-VL4-CL-VH4-CH1, VL3-VH3-VL4-CH1-VH4-CL, VL3-VH3-VH4-CL-VL4-CH1, VL3-VH3-VH4-CH1-VL4-CL, VL3-VL4-VH3-CL-VH4-CH1, VL3-VL4-VH3-CH1-VH4-CL, VL3-VH4-VH3-CL-VL4-CH1, VL3-VH4-VH3-CH1-VL4-CL, VH3-VL3-VL4-CL-VH4-CH1, VH3-VL3-VL4-CH1-VH4-CL, VH3-VL3-VH4-CL-VL4-CH1, VH3-VL3-VH4-CH1-VL4-CL, VH3-VL4-VL3-CL-VH4-CH1, VH3-VL4-VL3-CH1-VH4-CL, VH3-VH4-VL3-CL-VL4-CH1, VH3-VH4-VL3-CH1-VL4-CL, VL4-VL3-VH4-CL-VH3-CH1, VL4-VL3-VH4-CH1-VH3-CL, VL4-VH3-VH4-CL-VL3-CH1, VL4-VH3-VH4-CH1-VL3-CL, VL4-VH4-VL3-CL-VH3-CH1, VL4-VH4-VL3-CH1-VH3-CL, VL4-VH4-VH3-CL-VL3-CH1, VL4-VH4-VH3-CH1-VL3-CL, VH4-VL3-VL4-CL-VH3-CH1, VH4-VL3-VL4-CH1-VH3-CL, VH4-VH3-VL4-CL-VL3-CH1, VH4-VH3-VL4-CH1-VL3-CL, VH4-VL4-VL3-CL-VH3-CH1, VH4-VL4-VL3-CH1-VH3-CL, VH4-VL4-VH3-CL-VL3-CH1, or VH4-VL4-VH3-CH1-VL3-CL.

[2240] In some aspects, an antigen binding polypeptide complex provided herein comprises a first polypeptide, and a second polypeptide; wherein the first polypeptide has a structure represented by VL1-L1-CL-L2-VH1-L3-CH1-L4-VL2-L5-VH2, VL1-L1-CL-L2-VH1-L3-CH1-L4-VH2-L5-VL2, VL1-L1-CL-L2-VL2-L3-CH1-L4-VH1-L5-VH2, VL1-L1-CL-L2-VH2-L3-CH1-L4-VH1-L5-VL2, VL1-L1-CH1-L2-VH1-L3-CL-L4-VL2-L5-VH2, VL1-L1-CH1-L2-VH1-L3-CL-L4-VH2-L5-VL2, VL1-L1-CH1-L2-VL2-L3-CL-L4-VH1-L5-VH2, VL1-L1-CH1-L2-VH2-L3-CL-L4-VH1-L5-VL2, VH1-L1-CL-L2-VL1-L3-CH1-L4-VL2-L5-VH2, VH1-L1-CL-L2-VL1-L3-CH1-L4-VH2-L5-VL2, VH1-L1-CL-L2-VL2-L3-CH1-L4-VL1-L5-VH2, VH1-L1-CL-L2-VH2-L3-CH1-L4-VL1-L5-VL2, VH1-L1-CH1-L2-VL1-L3- CL-L4-VL2-L5-VH2, VH1-L1-CH1-L2-VL1-L3-CL-L4-VH2-L5-VL2, VH1-L1-CH1-L2-VL2-L3-CL-L4-VL1-L5-VH2, VH1-L1-CH1-L2-VH2-L3-CL-L4-VL1-L5-VL2, VL2-L1-CL-L2-VL1-L3-CH1-L4-VH2-L5-VH1, VL2-L1-CL-L2-VH1-L3-CH1-L4-VH2-L5-VL1, VL2-L1-CL-L2-VH2-L3-CH1-L4-VL1-L5-VH1, VL2-L1-CL-L2-VH2-L3-CH1-L4-VH1-L5-VL1, VL2-L1-CH1-L2-VL1-L3-CL-L4-VH2-L5-VH1, VL2-L1-CH1-L2-VH1-L3-CL-L4-VH2-L5-VL1, VL2-L1-CH1-L2-VH2-L3-CL-L4-VL1-L5-VH1, VL2-L1-CH1-L2-VH2-L3-CL-L4-VH1-L5-VL1, VH2-L1-CL-L2-VL1-L3-CH1-L4-VL2-L5-VH1, VH2-L1-CL-L2-VH1-L3-CH1-L4-VL2-L5-VL1, VH2-L1-CL-L2-VL2-L3-CH1-L4-VL1-L5-VH1, VH2-L1-CL- L2-VL2-L3-CH1-L4-VH1-L5-VL1, VH2-L1-CH1-L2-VL1-L3-CL-L4-VL2-L5-VH1, VH2-L1-CH1-L2-VH1-L3-CL-L4-VL2-L5-VL1, VH2-L1-CH1-L2-VL2-L3-CL-L4-VL1-L5-VH1, or VH2-L1-CH1-L2-VL2-L3-CL-L4-VH1-L5-VL1; and wherein the second polypeptide has a structure represented by VL3-L6-VH3-L7-VL4-L8-CL-L9-VH4-L10-CH1, VL3-L6-VH3-L7-VL4-L8-CH1-L9-VH4-L10-CL, VL3-L6-VH3-L7-VH4-L8-CL-L9-VL4-L10-CH1, VL3-L6-VH3-L7-VH4-L8-CH1-L9-VL4-L10-CL, VL3-L6-VL4-L7-VH3-L8-CL-L9-VH4-L10-CH1, VL3-L6-VL4-L7-VH3-L8-CH1-L9-VH4-L10-CL, VL3-L6-VH4-L7-VH3-L8-CL-L9-VL4-L10-CH1, VL3-L6-VH4-L7-VH3-L8-CH1-L9-VL4-L10-CL, VH3-L6-VL3-L7-VL4-L8-CL-L9-VH4-L10-CH1, VH3-L6-VL3-L7-VL4-L8-CH1-L9-VH4-L10-CL, VH3-L6-VL3-L7-VH4-L8-CL-L9-VL4-L10-CH1, VH3-L6-VL3-L7-VH4-L8-CH1-L9-VL4-L10-CL, VH3-L6-VL4-L7-VL3-L8-CL-L9-VH4-L10-CH1, VH3-L6-VL4-L7-VL3-L8-CH1-L9-VH4-L10-CL, VH3-L6-VH4-L7-VL3-L8-CL-L9-VL4-L10-CH1, VH3-L6-VH4-L7-VL3-L8-CH1-L9-VL4-L10-CL, VL4-L6-VL3-L7-VH4-L8-CL-L9-VH3-L10-CH1, VL4-L6-VL3-L7-VH4-L8-CH1-L9-VH3-L10-CL, VL4-L6-VH3-L7-VH4-L8-CL-L9-VL3-L10-CH1, VL4-L6-VH3-L7-VH4-L8-CH1-L9-VL3-L10-CL, VL4-L6-VH4-L7-VL3-L8-CL-L9-VH3-L10-CH1, VL4-L6-VH4-L7-VL3-L8-CH1-L9-VH3-L10-CL, VL4-L6-VH4-L7-VH3-L8-CL- L9-VL3-L10-CH1, VL4-L6-VH4-L7-VH3-L8-CH1-L9-VL3-L10-CL, VH4-L6-VL3-L7-VL4-L8-CL-L9-VH3-L10-CH1, VH4-L6-VL3-L7-VL4-L8-CH1-L9-VH3-L10-CL, VH4-L6-VH3-L7-VL4-L8-CL-L9-VL3-L10-CH1, VH4-L6-VH3-L7-VL4-L8-CH1-L9-VL3-L10-CL, VH4-L6-VL4-L7-VL3-L8-CL-L9-VH3-L10-CH1, VH4-L6-VL4-L7-VL3-L8-CH1-L9-VH3-L10-CL, VH4-L6-VL4-L7-VH3-L8-CL-L9-VL3-L10-CH1, or VH4-L6-VL4-L7-VH3-L8-CH1-L9-VL3-L10-CL.

[2241] In some aspects, an antigen binding polypeptide complex provided herein comprises a first polypeptide, and a second polypeptide; wherein the first polypeptide has a structure represented by VL1-CL-VH1-CH1-VL2-VH2-CH2-CH3, VL1-CL-VH1-CH1-VH2-VL2-CH2-CH3, VL1-CL-VL2-CH1-VH1-VH2-CH2-CH3, VL1-CL-VH2-CH1-VH1-VL2-CH2-CH3, VL1-CH1-VH1-CL-VL2-VH2-CH2-CH3, VL1-CH1-VH1-CL-VH2-VL2-CH2-CH3, VL1-CH1-VL2-CL-VH1-VH2-CH2-CH3, VL1-CH1-VH2-CL-VH1-VL2-CH2-CH3, VH1-CL-VL1-CH1-VL2-VH2-CH2-CH3, VH1-CL-VL1-CH1-VH2-VL2-CH2-CH3, VH1-CL-VL2-CH1-VL1-VH2-CH2-CH3, VH1-CL-VH2-CH1-VL1-VL2-CH2-CH3, VH1-CH1-VL1-CL-VL2-VH2-CH2-CH3, VH1-CH1-VL1-CL-VH2-VL2-CH2-CH3, VH1-CH1-VL2-CL-VL1-VH2-CH2-CH3, VH1-CH1-VH2-CL-VL1-VL2-CH2-CH3, VL2-CL-VL1-CH1-VH2-VH1-CH2-CH3, VL2-CL-VH1-CH1-VH2-VL1-CH2-CH3, VL2-CL-VH2-CH1-VL1-VH1-CH2-CH3, VL2-CL-VH2-CH1-VH1-VL1-CH2-CH3, VL2-CH1-VL1-CL-VH2-VH1-CH2-CH3, VL2-CH1-VH1-CL-VH2-VL1-CH2-CH3, VL2-CH1-VH2-CL-VL1-VH1-CH2-CH3, VL2-CH1-VH2-CL-VH1-VL1-CH2-CH3, VH2-CL-VL1-CH1-VL2-VH1-CH2-CH3, VH2-CL-VH1-CH1-VL2-VL1-CH2-CH3, VH2-CL-VL2-CH1-VL1-VH1-CH2-CH3, VH2-CL-VL2-CH1-VH1-VL1-CH2-CH3, VH2-CH1-VL1-CL-VL2-VH1-CH2-CH3, VH2-CH1-VH1-CL-VL2-VL1-CH2-CH3, VH2-CH1-VL2-CL-VL1-VH1-CH2-CH3, or VH2-CH1-VL2-CL-VH1-VL1-CH2-CH3; and wherein the second polypeptide has a structure represented by VL3-VH3-VL4-CL-VH4-CH1-CH2-CH3, VL3-VH3-VL4-CH1-VH4-CL-CH2-CH3, VL3-VH3-VH4-CL-VL4-CH1-CH2-CH3, VL3-VH3-VH4-CH1-VL4-CL-CH2-CH3, VL3-VL4-VH3-CL-VH4-CH1-CH2-CH3, VL3-VL4-VH3-CH1-VH4-CL-CH2-CH3, VL3-VH4-VH3-CL-VL4-CH1-CH2-CH3, VL3-VH4-VH3-CH1-VL4-CL-CH2-CH3, VH3-VL3-VL4-CL-VH4-CH1-CH2-CH3, VH3-VL3-VL4-CH1-VH4-CL-CH2-CH3, VH3-VL3-VH4-CL-VL4-CH1-CH2-CH3, VH3-VL3-VH4-CH1-VL4-CL-CH2-CH3, VH3-VL4-VL3-CL-VH4-CH1-CH2-CH3, VH3-VL4-VL3-CH1-VH4-CL-CH2-CH3, VH3-VH4-VL3-CL-VL4-CH1-CH2-CH3, VH3-VH4-VL3-CH1-VL4-CL-CH2-CH3, VL4-VL3-VH4-CL-VH3-CH1-CH2-CH3, VL4-VL3-VH4-CH1-VH3-CL-CH2-CH3, VL4-VH3-VH4-CL-VL3-CH1-CH2-CH3, VL4-VH3-VH4-CH1-VL3-CL-CH2-CH3, VL4-VH4-VL3-CL-VH3-CH1-CH2-CH3, VL4-VH4-VL3-CH1-VH3-CL-CH2-CH3, VL4-VH4-VH3-CL-VL3-CH1-CH2-CH3, VL4-VH4-VH3-CH1-VL3-CL-CH2-CH3, VH4-VL3-VL4-CL-VH3-CH1-CH2-CH3, VH4-VL3-VL4-CH1-VH3-CL-CH2-CH3, VH4-VH3-VL4-CL-VL3-CH1-CH2-CH3, VH4-VH3-VL4-CH1-VL3-CL-CH2-CH3, VH4-VL4-VL3-CL-VH3-CH1-CH2-CH3, VH4-VL4-VL3-CH1-VH3-CL-CH2-CH3, VH4-VL4-VH3-CL-VL3-CH1-CH2-CH3, or VH4-VL4-VH3-CH1-VL3-CL-CH2-CH3.

[2242] In some aspects, an antigen binding polypeptide complex provided herein comprises a first polypeptide, and a second polypeptide; wherein the first polypeptide has a structure represented by VL1-L1-CL-L2-VH1-L3-CH1-L4-VL2-L5-VH2-CH2-CH3, VL1-L1-CL-L2-VH1-L3-CH1-L4-VH2-L5-VL2-CH2-CH3, VL1-L1-CL-L2-VL2-L3-CH1-L4-VH1-L5-VH2-CH2-CH3, VL1-L1-CL-L2-VH2-L3-CH1-L4-VH1-L5-VL2-CH2-CH3, VL1-L1-CH1-L2-VH1-L3-CL-L4-VL2-L5-VH2-CH2-CH3, VL1-L1-CH1-L2-VH1-L3-CL-L4-VH2-L5-VL2-CH2-CH3, VL1-L1-CH1-L2-VL2-L3-CL-L4-VH1-L5-VH2-CH2-CH3, VL1-L1-CH1-L2-VH2-L3-CL-L4-VH1-L5-VL2-CH2-CH3, VH1-L1-CL-L2-VL1-L3-CH1-L4-VL2-L5-VH2-CH2-CH3, VH1-L1-CL-L2-VL1-L3-CH1-L4-VH2-L5-VL2-CH2-CH3, VH1-L1-CL-L2-VL2-L3-CH1-L4-VL1-L5-VH2-CH2-CH3, VH1-L1-CL-L2-VH2-L3-CH1-L4-VL1-L5-VL2-CH2-CH3, VH1-L1-CH1-L2-VL1-L3-CL-L4-VL2-L5-VH2-CH2-CH3, VH1-L1-CH1-L2-VL1-L3-CL-L4-VH2-L5-VL2-CH2-CH3, VH1-L1-CH1-L2-VL2-L3-CL-L4-VL1-L5-VH2-CH2-CH3, VH1-L1-CH1-L2-VH2-L3-CL-L4-VL1-L5-VL2-CH2-CH3, VL2-L1-CL-L2-VL1-L3-CH1-L4-VH2-L5-VH1-CH2-CH3, VL2-L1-CL-L2-VH1-L3-CH1-L4-VH2-L5-VL1-CH2-CH3, VL2-L1-CL-L2-VH2-L3-CH1-L4-VL1-L5-VH1-CH2-CH3, VL2-L1-CL-L2-VH2-L3-CH1-L4-VH1-L5-VL1-CH2-CH3, VL2-L1-CH1-L2-VL1-L3-CL-L4-VH2-L5-VH1-CH2-CH3, VL2-L1-CH1-L2-VH1-L3-CL-L4-VH2-L5-VL1-CH2-CH3, VL2-L1-CH1-L2-VH2-L3-CL-L4-VL1-L5-VH1-CH2-CH3, VL2-L1-CH1-L2-VH2-L3-CL-L4-VH1-L5-VL1-CH2-CH3, VH2-L1-CL-L2-VL1-L3-CH1-L4-VL2-L5-VH1-CH2-CH3, VH2-L1-CL-L2-VH1-L3-CH1-L4-VL2-L5-VL1-CH2-CH3, VH2-L1-CL-L2-VL2-L3-CH1-L4-VL1-L5-VH1-CH2-CH3, VH2-L1-CL-L2-VL2-L3-CH1-L4-VH1-L5-VL1-CH2-CH3, VH2-L1-CH1-L2-VL1-L3-CL-L4-VL2-L5-VH1-CH2-CH3, VH2-L1-CH1-L2-VH1-L3-CL-L4-VL2-L5-VL1-CH2-CH3, VH2-L1-CH1-L2-VL2-L3-CL-L4-VL1-L5-VH1-CH2-CH3, or VH2-L1-CH1-L2-VL2-L3-CL-L4-VH1-L5-VL1-CH2-CH3; and wherein the second polypeptide has a structure represented by VL3-L6-VH3-L7-VL4-L8-CL-L9-VH4-L10-CH1-CH2-CH3, VL3-L6-VH3-L7-VL4-L8-CH1-L9-VH4-L10-CL-CH2-CH3, VL3-L6-VH3-L7-VH4-L8-CL-L9-VL4-L10-CH1-CH2-CH3, VL3-L6-VH3-L7- VH4-L8-CH1-L9-VL4-L10-CL-CH2-CH3, VL3-L6-VL4-L7-VH3-L8-CL-L9-VH4-L10-CH1-CH2-CH3, VL3-L6-VL4-L7-VH3-L8-CH1-L9-VH4-L10-CL-CH2-CH3, VL3-L6-VH4-L7-VH3-L8-CL-L9-VL4-L10-CH1-CH2-CH3, VL3-L6-VH4-L7-VH3-L8-CH1-L9-VL4-L10-CL-CH2-CH3, VH3-L6-VL3-L7-VL4-L8-CL-L9-VH4-L10-CH1-CH2-CH3, VH3-L6-VL3-L7-VL4-L8-CH1-L9-VH4-L10-CL-CH2-CH3, VH3-L6-VL3-L7-VH4-L8-CL-L9-VL4-L10-CH1-CH2-CH3, VH3-L6-VL3-L7-VH4-L8-CH1-L9-VL4-L10-CL-CH2-CH3, VH3-L6-VL4-L7-VL3-L8-CL-L9-VH4-L10-CH1-CH2-CH3, VH3-L6-VL4-L7-VL3-L8- CH1-L9-VH4-L10-CL-CH2-CH3, VH3-L6-VH4-L7-VL3-L8-CL-L9-VL4-L10-CH1-CH2-CH3, VH3-L6- VH4-L7-VL3-L8-CH1-L9-VL4-L10-CL-CH2-CH3, VL4-L6-VL3-L7-VH4-L8-CL-L9-VH3-L10-CH1-CH2-CH3, VL4-L6-VL3-L7-VH4-L8-CH1-L9-VH3-L10-CL-CH2-CH3, VL4-L6-VH3-L7-VH4-L8-CL-L9-VL3-L10-CH1-CH2-CH3, VL4-L6-VH3-L7-VH4-L8-CH1-L9-VL3-L10-CL-CH2-CH3, VL4-L6-VH4-L7-VL3-L8-CL-L9-VH3-L10-CH1-CH2-CH3, VL4-L6-VH4-L7-VL3-L8-CH1-L9-VH3-L10-CL-CH2-CH3, VL4-L6-VH4-L7-VH3-L8-CL-L9-VL3-L10-CH1-CH2-CH3, VL4-L6-VH4-L7-VH3-L8-CH1-L9- VL3-L10-CL-CH2-CH3, VH4-L6-VL3-L7-VL4-L8-CL-L9-VH3-L10-CH1-CH2-CH3, VH4-L6-VL3-L7- VL4-L8-CH1-L9-VH3-L10-CL-CH2-CH3, VH4-L6-VH3-L7-VL4-L8-CL-L9-VL3-L10-CH1-CH2-CH3, VH4-L6-VH3-L7-VL4-L8-CH1-L9-VL3-L10-CL-CH2-CH3, VH4-L6-VL4-L7-VL3-L8-CL-L9-VH3-L10-CH1-CH2-CH3, VH4-L6-VL4-L7-VL3-L8-CH1-L9-VH3-L10-CL-CH2-CH3, VH4-L6-VL4-L7-VH3-L8-CL-L9-VL3-L10-CH1-CH2-CH3, or VH4-L6-VL4-L7-VH3-L8-CH1-L9-VL3-L10-CL-CH2-CH3.

[2243] In some aspects, VL1 is a first immunoglobulin light chain variable region that specifically binds to a SARS-CoV-2 protein (e.g., a SARS-CoV-2 spike protein); VL2 is a second immunoglobulin light chain variable region that specifically binds to a SARS-CoV-2 protein (e.g., a SARS-CoV-2 spike protein); VL3 is a third immunoglobulin light chain variable region that specifically binds to a SARS-CoV-2 protein (e.g., a SARS-CoV-2 spike protein); VL4 is a fourth immunoglobulin light chain variable region that specifically binds to a SARS-CoV-2 protein (e.g., a SARS-CoV-2 spike protein); VH1 is a first immunoglobulin heavy chain variable region that specifically binds to a SARS-CoV-2 protein (e.g., a SARS-CoV-2 spike protein); VH2 is a second immunoglobulin heavy chain variable region that specifically binds to a SARS-CoV-2 protein (e.g., a SARS-CoV-2 spike protein); VH3 is a third immunoglobulin heavy chain variable region that specifically binds to a SARS-CoV-2 protein (e.g., a SARS-CoV-2 spike protein); VH4 is a fourth immunoglobulin heavy chain variable region that specifically binds to a SARS-CoV-2 protein (e.g., a SARS-CoV-2 spike protein); CH1 is an immunoglobulin heavy chain constant region 1; CL is an immunoglobulin light chain constant region; and L1-L10 are optional amino acid linkers. In any aspect shown herein as a structure from amino terminus to carboxy terminus, and with binding pairs selected from VL and/or VH or other structural regions such as CH1, CL, CH2, CH3, when shown without a specific linker such as L1, L2, etc., such linkers are optionally present in such structures between each designated subsequence VL, VH, etc.

[2244] In some aspects, the VL1 and the VL2 each comprise a CDR1, a CDR2, and a CDR3 that are the same. In some aspects, the VL1 and the VL2 each comprise a CDR1, a CDR2, and a CDR3 that are different. In some aspects, the VL1 and the VL3 each comprise a CDR1, a CDR2, and a CDR3 that are the same. In some aspects, the VL1 and the VL3 each comprise a CDR1, a CDR2, and a CDR3 that are different. In some aspects, the VL1 and the VL4 each comprise a CDR1, a CDR2, and a CDR3 that are the same. In some aspects, the VL1 and the VL4 each comprise a CDR1, a CDR2, and a CDR3 that are different. In some aspects, the VL2 and the VL3 each comprise a CDR1, a CDR2, and a CDR3 that are the same. In some aspects, the VL2 and the VL3 each comprise a CDR1, a CDR2, and a CDR3 that are different. In some aspects, the VL2 and the VL4 each comprise a CDR1, a CDR2, and a CDR3 that are the same. In some aspects, the VL2 and the VL4 each comprise a CDR1, a CDR2, and a CDR3 that are different. In some aspects, the VL3 and the VL4 each comprise a CDR1, a CDR2, and a CDR3 that are the same. In some aspects, the VL3 and the VL4 each comprise a CDR1, a CDR2, and a CDR3 that are different.

[2245] In some aspects, the VL1 and the VL2 each comprise an amino acid sequence, wherein the amino acid sequence comprised in VL1 and the amino acid sequence comprised in VL2 are the same. In some aspects, the VL1 and the VL2 each comprise an amino acid sequence, wherein the amino acid sequence comprised in VL1 and the amino acid sequence comprised in VL2 are different. In some aspects, the VL1 and the VL3 each comprise an amino acid sequence, wherein the amino acid sequence comprised in VL1 and the amino acid sequence comprised in VL3 are the same. In some aspects, the VL1 and the VL3 each comprise an amino acid sequence, wherein the amino acid sequence comprised in VL1 and the amino acid sequence comprised in VL3 are different. In some aspects, the VL1 and the VL4 each comprise an amino acid sequence, wherein the amino acid sequence comprised in VL1 and the amino acid sequence comprised in VL4 are the same. In some aspects, the VL1 and the VL4 each comprise an amino acid sequence, wherein the amino acid sequence comprised in VL1 and the amino acid sequence comprised in VL4 are different. In some aspects, the VL2 and the VL3 each comprise an amino acid sequence, wherein the amino acid sequence comprised in VL2 and the amino acid sequence comprised in VL3 are the same. In some aspects, the VL2 and the VL3 each comprise an amino acid sequence, wherein the amino acid sequence comprised in VL2 and the amino acid sequence comprised in VL3 are different. In some aspects, the VL2 and the VL4 each comprise an amino acid sequence, wherein the amino acid sequence comprised in VL2 and the amino acid sequence comprised in VL4 are the same. In some aspects, the VL2 and the VL4 each comprise an amino acid sequence, wherein the amino acid sequence comprised in VL2 and the amino acid sequence comprised in VL4 are different. In some aspects, the VL3 and the VL4 each comprise an amino acid sequence, wherein the amino acid sequence comprised in VL3 and the amino acid sequence comprised in VL4 are the same. In some aspects, the VL3 and the VL4 each comprise an amino acid sequence, wherein the amino acid sequence comprised in VL3 and the amino acid sequence comprised in VL4 are different.

[2246] In some aspects, VL1 comprises a CDR1 having an amino acid sequence at least 65%, at least 70%, at least 75%, at least 80%, at least 85%, at least 90%, at least 95%, at least 99%, or 100% identical to any one of SEQ ID NOs: 1, 9, 15, 23, 30, 41, 48, 55, 58, 65, 72, 79, 86, 93, 99, 105, 112, 119, 130, 138, 145, 152, 159, 166, 172, 179, 186, 192, 199, 205, 212, 219, 226, 232, 324, 627, 640, 650, 659, 676, 687, 695, 703, 712, 770, 778, 785, 794, 801, 807, 814, 827, 836, 849, 858, 865, 878, 1045, 1050, 1055, 1060, and 1065.

[2247] In some aspects, VL1 comprises a CDR1 having an amino acid sequence at least 65%, at least 70%, at least 75%, at least 80%, at least 85%, at least 90%, at least 95%, at least 99%, or 100% identical to any one of SEQ ID NOs: 1, 9, 15, 23, 30, 65, 72, 145, 152, 324, 627, 138, 172, 1045, 1050, 1055, 1060, and 1065.

[2248] In some aspects, VL1 comprises a CDR2 having an amino acid sequence at least 65%, at least 70%, at least 75%, at least 80%, at least 85%, at least 90%, at least 95%, at least 99%, or 100% identical to any one of SEQ ID NOs: 2, 31, 628, 641, 677, 1046, 1051, 1056, and 1061; or at least 65%, at least 70%, at least 75%, at least 80%, at least 85%, at least 90%, at least 95%, at least 99%, or 100% identical to any one of amino acid sequences AAS, GAS, LGS, GTN, GTN, SAS, SDS, DNT, EVT, DAS, DVT, RNS, DVS, EDS, DDS, KDS, VAS, WAS, YTS, EVS, NNN, SYN, and DAT.

[2249] In some aspects, VL1 comprises a CDR2 having an amino acid sequence at least 65%, at least 70%, at least 75%, at least 80%, at least 85%, at least 90%, at least 95%, at least 99%, or 100% identical to any one of SEQ ID NOs: 2, 31, 628, 1046, 1051, 1056, and 1061, or at least 65%, at least 70%, at least 75%, at least 80%, at least 85%, at least 90%, at least 95%, at least 99%, or 100% identical to any one of amino acid sequences GAS, LGS, GTN, SAS, SDS, AAS, DAS, and DNT.

[2250] In some aspects, VL1 comprises a CDR3 having an amino acid sequence at least 65%, at least 70%, at least 75%, at least 80%, at least 85%, at least 90%, at least 95%, at least 99%, or 100% identical to any one of SEQ ID NOs: 3, 10, 16, 24, 32, 38, 42, 49, 59, 66, 73, 80, 87, 94, 100, 106, 113, 120, 126, 131, 139, 146, 153, 160, 167, 173, 180, 187, 193, 200, 206, 213, 220, 227, 233, 239, 242, 246, 249, 256, 283, 285, 287, 288, 290, 292, 294, 296, 301, 304, 306, 309, 311, 313, 316, 325, 326, 329, 642, 651, 660, 668, 678, 651, 696, 704, 713, 764, 766, 768, 771, 779, 786, 792, 795, 808, 815, 821, 830, 837, 843, 850, 856, 859, 866, 872, 879, 885, and 1066.

[2251] In some aspects, VL1 comprises a CDR3 having an amino acid sequence at least 65%, at least 70%, at least 75%, at least 80%, at least 85%, at least 90%, at least 95%, at least 99%, or 100% identical to any one of SEQ ID NOs: 3, 10, 16, 24, 32, 38, 66, 73, 146, 153, 325, 326, 764, 766, 139, 856, 173, 792, and 1066.

[2252] In some aspects, VL1 comprises a CDR1 having an amino acid sequence at least 65%, at least 70%, at least 75%, at least 80%, at least 85%, at least 90%, at least 95%, at least 99%, or 100% identical to SEQ ID NO: 1 or 324, a CDR2 having an amino acid sequence at least 65%, at least 70%, at least 75%, at least 80%, at least 85%, at least 90%, at least 95%, at least 99%, or 100% identical to SEQ ID NO: 2 or an amino acid sequence at least 95% identical to amino acid sequence AAS, and a CDR3 having an amino acid sequence at least 65%, at least 70%, at least 75%, at least 80%, at least 85%, at least 90%, at least 95%, at least 99%, or 100% identical to SEQ ID NO: 3.

[2253] In some aspects, VL1 comprises a CDR1 having an amino acid sequence at least 65%, at least 70%, at least 75%, at least 80%, at least 85%, at least 90%, at least 95%, at least 99%, or 100% identical to SEQ ID NO: 9 or 1055, a CDR2 having an amino acid sequence at least 65%, at least 70%, at least 75%, at least 80%, at least 85%, at least 90%, at least 95%, at least 99%, or 100% identical to SEQ ID NO: 1056 or an amino acid sequence at least 65%, at least 70%, at least 75%, at least 80%, at least 85%, at least 90%, at least 95%, at least 99%, or 100% identical to amino acid sequence GAS, and a CDR3 having an amino acid sequence at least 65%, at least 70%, at least 75%, at least 80%, at least 85%, at least 90%, at least 95%, at least 99%, or 100% identical to SEQ ID NO: 10.

[2254] In some aspects, VL1 comprises a CDR1 having an amino acid sequence at least 65%, at least 70%, at least 75%, at least 80%, at least 85%, at least 90%, at least 95%, at least 99%, or 100% identical to SEQ ID NO: 15, a CDR2 having an amino acid sequence at least 65%, at least 70%, at least 75%, at least 80%, at least 85%, at least 90%, at least 95%, at least 99%, or 100% identical to amino acid sequence LGS, and a CDR3 having an amino acid sequence at least 65%, at least 70%, at least 75%, at least 80%, at least 85%, at least 90%, at least 95%, at least 99%, or 100% identical to SEQ ID NO: 16.

[2255] In some aspects, VL1 comprises a CDR1 having an amino acid sequence at least 65%, at least 70%, at least 75%, at least 80%, at least 85%, at least 90%, at least 95%, at least 99%, or 100% identical to SEQ ID NO: 23, a CDR2 having an amino acid sequence at least 65%, at least 70%, at least 75%, at least 80%, at least 85%, at least 90%, at least 95%, at least 99%, or 100% identical to amino acid sequence GTN, and a CDR3 having an amino acid sequence at least 65%, at least 70%, at least 75%, at least 80%, at least 85%, at least 90%, at least 95%, at least 99%, or 100% identical to SEQ ID NO: 24 or 325.

[2256] In some aspects, VL1 comprises a CDR1 having an amino acid sequence at least 65%, at least 70%, at least 75%, at least 80%, at least 85%, at least 90%, at least 95%, at least 99%, or 100% identical to SEQ ID NO: 30, a CDR2 having an amino acid sequence at least 95% identical to SEQ ID NO: 31 or an amino acid sequence at least 65%, at least 70%, at least 75%, at least 80%, at least 85%, at least 90%, at least 95%, at least 99%, or 100% identical to amino acid sequence SAS, and a CDR3 having an amino acid sequence at least 65%, at least 70%, at least 75%, at least 80%, at least 85%, at least 90%, at least 95%, at least 99%, or 100% identical to SEQ ID NO: 32, 38, or 326.

[2257] In some aspects, VL1 comprises a CDR1 having an amino acid sequence at least 65%, at least 70%, at least 75%, at least 80%, at least 85%, at least 90%, at least 95%, at least 99%, or 100% identical to SEQ ID NO: 65 or 627, a CDR2 having an amino acid sequence at least 65%, at least 70%, at least 75%, at least 80%, at least 85%, at least 90%, at least 95%, at least 99%, or 100% identical to SEQ ID NO: 628 or an amino acid sequence at least 65%, at least 70%, at least 75%, at least 80%, at least 85%, at least 90%, at least 95%, at least 99%, or 100% identical to amino acid sequence SDS, and a CDR3 having an amino acid sequence at least 65%, at least 70%, at least 75%, at least 80%, at least 85%, at least 90%, at least 95%, at least 99%, or 100% identical to SEQ ID NO: 66.

[2258] In some aspects, VL1 comprises a CDR1 having an amino acid sequence at least 65%, at least 70%, at least 75%, at least 80%, at least 85%, at least 90%, at least 95%, at least 99%, or 100% identical to SEQ ID NO: 72, a CDR2 having an amino acid sequence at least 65%, at least 70%, at least 75%, at least 80%, at least 85%, at least 90%, at least 95%, at least 99%, or 100% identical to amino acid sequence DNT, and a CDR3 having an amino acid sequence at least 65%, at least 70%, at least 75%, at least 80%, at least 85%, at least 90%, at least 95%, at least 99%, or 100% identical to SEQ ID NO: 73.

[2259] In some aspects, VL1 comprises a CDR1 having an amino acid sequence at least 65%, at least 70%, at least 75%, at least 80%, at least 85%, at least 90%, at least 95%, at least 99%, or 100% identical to SEQ ID NO: 145 or 1050, a CDR2 having an amino acid sequence at least 65%, at least 70%, at least 75%, at least 80%, at least 85%, at least 90%, at least 95%, at least 99%, or 100% identical to SEQ ID NO: 1051 or an amino acid sequence at least 65%, at least 70%, at least 75%, at least 80%, at least 85%, at least 90%, at least 95%, at least 99%, or 100% identical to amino acid sequence AAS, and a CDR3 having an amino acid sequence at least 65%, at least 70%, at least 75%, at least 80%, at least 85%, at least 90%, at least 95%, at least 99%, or 100% identical to SEQ ID NO: 146 or 764.

[2260] In some aspects, VL1 comprises a CDR1 having an amino acid sequence at least 65%, at least 70%, at least 75%, at least 80%, at least 85%, at least 90%, at least 95%, at least 99%, or 100% identical to SEQ ID NO: 152 or 1045, a CDR2 having an amino acid sequence at least 65%, at least 70%, at least 75%, at least 80%, at least 85%, at least 90%, at least 95%, at least 99%, or 100% identical to SEQ ID NO: 1046 or an amino acid sequence at least 65%, at least 70%, at least 75%, at least 80%, at least 85%, at least 90%, at least 95%, at least 99%, or 100% identical to amino acid sequence GAS, and a CDR3 having an amino acid sequence at least 65%, at least 70%, at least 75%, at least 80%, at least 85%, at least 90%, at least 95%, at least 99%, or 100% identical to SEQ ID NO: 153 or 766.

[2261] In some aspects, VL1 comprises a CDR1 having an amino acid sequence at least 65%, at least 70%, at least 75%, at least 80%, at least 85%, at least 90%, at least 95%, at least 99%, or 100% identical to SEQ ID NO: 138 or 1065, a CDR2 having an amino acid sequence at least 65%, at least 70%, at least 75%, at least 80%, at least 85%, at least 90%, at least 95%, at least 99%, or 100% identical to SEQ ID NO: 1061 or an amino acid sequence at least 65%, at least 70%, at least 75%, at least 80%, at least 85%, at least 90%, at least 95%, at least 99%, or 100% identical to amino acid sequence DAS, and a CDR3 having an amino acid sequence at least 65%, at least 70%, at least 75%, at least 80%, at least 85%, at least 90%, at least 95%, at least 99%, or 100% identical to SEQ ID NO: 139, 856, or 1066.

[2262] In some aspects, VL1 comprises a CDR1 having an amino acid sequence at least 65%, at least 70%, at least 75%, at least 80%, at least 85%, at least 90%, at least 95%, at least 99%, or 100% identical to SEQ ID NO: 172 or 1060, a CDR2 having an amino acid sequence at least 65%, at least 70%, at least 75%, at least 80%, at least 85%, at least 90%, at least 95%, at least 99%, or 100% identical to SEQ ID NO: 1061 or an amino acid sequence at least 65%, at least 70%, at least 75%, at least 80%, at least 85%, at least 90%, at least 95%, at least 99%, or 100% identical to amino acid sequence DAS, and a CDR3 having an amino acid sequence at least 65%, at least 70%, at least 75%, at least 80%, at least 85%, at least 90%, at least 95%, at least 99%, or 100% identical to SEQ ID NO: 173 or 792.

[2263] In some aspects, VL1 comprises an amino acid sequence at least 65%, at least 70%, at least 75%, at least 80%, at least 85%, at least 90%, at least 95%, at least 99%, or 100% identical to any one of SEQ ID NOs: 4, 11, 17, 25, 33, 39, 43, 50, 60, 67, 74, 81, 88, 95, 101, 107, 114, 121, 127, 132, 140, 147, 154, 161, 168, 174, 181, 188, 194, 201, 207, 214, 221, 228, 234, 240, 243, 247, 250, 251, 252, 255, 284, 286, 289, 291, 293, 295, 299, 300, 302, 303, 305, 307, 308, 310, 312, 314, 315, 317, 323, 639, 649, 658, 667, 675, 686, 694, 702, 711, 772, 780, 787, 796, 802, 809, 816, 822, 831, 838, 844, 851, 860, 867, 873, 880, and 988.

[2264] In some aspects, VL1 comprises an amino acid sequence at least 65%, at least 70%, at least 75%, at least 80%, at least 85%, at least 90%, at least 95%, at least 99%, or 100% identical to any one of SEQ ID NOs: 4, 11, 17, 25, 33, 39, 67, 74, 147, 154, 140, and 174.

[2265] In some aspects, VH1 comprises a CDR1 having an amino acid sequence at least 65%, at least 70%, at least 75%, at least 80%, at least 85%, at least 90%, at least 95%, at least 99%, or 100% identical to any one of SEQ ID NOs: 5, 12, 18, 26, 34, 44, 51, 61, 68, 75, 82, 89, 96, 102, 108, 115, 122, 133, 141, 148, 155, 162, 175, 182, 189, 195, 202, 208, 215, 222, 229, 235, 318, 629, 645, 654, 663, 671, 682, 690, 699, 707, 716, 773, 781, 788, 797, 803, 810, 817, 823, 832, 839, 845, 852, 861, 868, 874, 881, 1047, 1052, 1057, 1062, and 1067.

[2266] In some aspects, VH1 comprises a CDR1 having an amino acid sequence at least 65%, at least 70%, at least 75%, at least 80%, at least 85%, at least 90%, at least 95%, at least 99%, or 100% identical to any one of SEQ ID NOs: 5, 12, 18, 26, 34, 68, 75, 148, 155, 629, 141, 175, 1047, 1052, 1057, 1062, and 1067.

[2267] In some aspects, VH1 comprises a CDR2 having an amino acid sequence at least 65%, at least 70%, at least 75%, at least 80%, at least 85%, at least 90%, at least 95%, at least 99%, or 100% identical to any one of SEQ ID NOs: 6, 19, 27, 35, 45, 52, 56, 62, 69, 76, 83, 90, 109, 116, 123, 134, 142, 149, 156, 163, 169, 176, 183, 196, 209, 216, 223, 236, 273, 319, 328, 630, 646, 655, 664, 672, 683, 691, 708, 776, 782, 789, 798, 804, 811, 818, 824, 833, 840, 846, 853, 862, 869, 875, 882, 1048, 1053, 1058, 1063, and 1068.

[2268] In some aspects, VH1 comprises a CDR2 having an amino acid sequence at least 65%, at least 70%, at least 75%, at least 80%, at least 85%, at least 90%, at least 95%, at least 99%, or 100% identical to any one of SEQ ID NOs: 6, 19, 27, 35, 69, 76, 149, 156, 630, 142, 176, 1048, 1053, 1058, 1063, and 1068.

[2269] In some aspects, VH1 comprises a CDR3 having an amino acid sequence at least 65%, at least 70%, at least 75%, at least 80%, at least 85%, at least 90%, at least 95%, at least 99%, or 100% identical to any one of SEQ ID NOs: 7, 13, 20, 28, 36, 40, 46, 53, 63, 70, 77, 84, 91, 97, 103, 110, 117, 124, 128, 135, 143, 150, 157, 164, 170, 177, 184, 190, 197, 203, 210, 217, 224, 230, 237, 241, 244, 248, 253, 257, 259, 261, 263, 265, 267, 269, 271, 274, 276, 278, 281, 297, 320, 322, 327, 330, 332, 631, 647, 656, 665, 673, 684, 692, 700, 709, 717, 765, 767, 769, 774, 783, 790, 793, 799, 805, 812, 819, 825, 834, 841, 847, 854, 857, 863, 870, 876, 883, 886, 1049, 1054, 1059, 1064, and 1069.

[2270] In some aspects, VH1 comprises a CDR3 having an amino acid sequence at least 65%, at least 70%, at least 75%, at least 80%, at least 85%, at least 90%, at least 95%, at least 99%, or 100% identical to any one of SEQ ID NOs: 7, 13, 20, 28, 36, 40, 70, 77, 150, 157, 327, 332, 631, 765, 767, 143, 857, 177, 793, 1049, 1054, 1059, 1064, and 1069.

[2271] In some aspects, VH1 comprises a CDR1 having an amino acid sequence at least 65%, at least 70%, at least 75%, at least 80%, at least 85%, at least 90%, at least 95%, at least 99%, or 100% identical to SEQ ID NO: 5, a CDR2 having an amino acid sequence at least 65%, at least 70%, at least 75%, at least 80%, at least 85%, at least 90%, at least 95%, at least 99%, or 100% identical to SEQ ID NO: 6, and a CDR3 having an amino acid sequence at least 65%, at least 70%, at least 75%, at least 80%, at least 85%, at least 90%, at least 95%, at least 99%, or 100% identical to SEQ ID NO: 7.

[2272] In some aspects, VH1 comprises a CDR1 having an amino acid sequence at least 65%, at least 70%, at least 75%, at least 80%, at least 85%, at least 90%, at least 95%, at least 99%, or 100% identical to SEQ ID NO: 12 or 1057, a CDR2 having an amino acid sequence at least 65%, at least 70%, at least 75%, at least 80%, at least 85%, at least 90%, at least 95%, at least 99%, or 100% identical to SEQ ID NO: 6 or 1058, and a CDR3 having an amino acid sequence at least 65%, at least 70%, at least 75%, at least 80%, at least 85%, at least 90%, at least 95%, at least 99%, or 100% identical to SEQ ID NO: 13 or 1059.

[2273] In some aspects, VH1 comprises a CDR1 having an amino acid sequence at least 65%, at least 70%, at least 75%, at least 80%, at least 85%, at least 90%, at least 95%, at least 99%, or 100% identical to SEQ ID NO: 18, a CDR2 having an amino acid sequence at least 65%, at least 70%, at least 75%, at least 80%, at least 85%, at least 90%, at least 95%, at least 99%, or 100% identical to SEQ ID NO: 19, and a CDR3 having an amino acid sequence at least 65%, at least 70%, at least 75%, at least 80%, at least 85%, at least 90%, at least 95%, at least 99%, or 100% identical to SEQ ID NO: 20.

[2274] In some aspects, VH1 comprises a CDR1 having an amino acid sequence at least 65%, at least 70%, at least 75%, at least 80%, at least 85%, at least 90%, at least 95%, at least 99%, or 100% identical to SEQ ID NO: 26, a CDR2 having an amino acid sequence at least 65%, at least 70%, at least 75%, at least 80%, at least 85%, at least 90%, at least 95%, at least 99%, or 100% identical to SEQ ID NO: 27, and a CDR3 having an amino acid sequence at least 65%, at least 70%, at least 75%, at least 80%, at least 85%, at least 90%, at least 95%, at least 99%, or 100% identical to SEQ ID NO: 28 or 332.

[2275] In some aspects, VH1 comprises a CDR1 having an amino acid sequence at least 65%, at least 70%, at least 75%, at least 80%, at least 85%, at least 90%, at least 95%, at least 99%, or 100% identical to SEQ ID NO: 34, a CDR2 having an amino acid sequence at least 65%, at least 70%, at least 75%, at least 80%, at least 85%, at least 90%, at least 95%, at least 99%, or 100% identical to SEQ ID NO: 35, and a CDR3 having an amino acid sequence at least 65%, at least 70%, at least 75%, at least 80%, at least 85%, at least 90%, at least 95%, at least 99%, or 100% identical to SEQ ID NO: 36, 40, or 327.

[2276] In some aspects, VH1 comprises a CDR1 having an amino acid sequence at least 65%, at least 70%, at least 75%, at least 80%, at least 85%, at least 90%, at least 95%, at least 99%, or 100% identical to SEQ ID NO: 68 or 629, a CDR2 having an amino acid sequence at least 65%, at least 70%, at least 75%, at least 80%, at least 85%, at least 90%, at least 95%, at least 99%, or 100% identical to SEQ ID NO: 69 or 630, and a CDR3 having an amino acid sequence at least 65%, at least 70%, at least 75%, at least 80%, at least 85%, at least 90%, at least 95%, at least 99%, or 100% identical to SEQ ID NO: 70 or 631.

[2277] In some aspects, VH1 comprises a CDR1 having an amino acid sequence at least 65%, at least 70%, at least 75%, at least 80%, at least 85%, at least 90%, at least 95%, at least 99%, or 100% identical to SEQ ID NO: 75, a CDR2 having an amino acid sequence at least 65%, at least 70%, at least 75%, at least 80%, at least 85%, at least 90%, at least 95%, at least 99%, or 100% identical to SEQ ID NO: 76, and a CDR3 having an amino acid sequence at least 65%, at least 70%, at least 75%, at least 80%, at least 85%, at least 90%, at least 95%, at least 99%, or 100% identical to SEQ ID NO: 77.

[2278] In some aspects, VH1 comprises a CDR1 having an amino acid sequence at least 65%, at least 70%, at least 75%, at least 80%, at least 85%, at least 90%, at least 95%, at least 99%, or 100% identical to SEQ ID NO: 148 or 1052, a CDR2 having an amino acid sequence at least 65%, at least 70%, at least 75%, at least 80%, at least 85%, at least 90%, at least 95%, at least 99%, or 100% identical to SEQ ID NO: 149 or 1053, and a CDR3 having an amino acid sequence at least 65%, at least 70%, at least 75%, at least 80%, at least 85%, at least 90%, at least 95%, at least 99%, or 100% identical to SEQ ID NO: 150, 765, or 1054.

[2279] In some aspects, VH1 comprises a CDR1 having an amino acid sequence at least 65%, at least 70%, at least 75%, at least 80%, at least 85%, at least 90%, at least 95%, at least 99%, or 100% identical to SEQ ID NO: 155 or 1047, a CDR2 having an amino acid sequence at least 65%, at least 70%, at least 75%, at least 80%, at least 85%, at least 90%, at least 95%, at least 99%, or 100% identical to SEQ ID NO: 156 or 1048, and a CDR3 having an amino acid sequence at least 65%, at least 70%, at least 75%, at least 80%, at least 85%, at least 90%, at least 95%, at least 99%, or 100% identical to SEQ ID NO: 157, 767, or 1049.

[2280] In some aspects, VH1 comprises a CDR1 having an amino acid sequence at least 65%, at least 70%, at least 75%, at least 80%, at least 85%, at least 90%, at least 95%, at least 99%, or 100% identical to SEQ ID NO: 141 or 1067, a CDR2 having an amino acid sequence at least 65%, at least 70%, at least 75%, at least 80%, at least 85%, at least 90%, at least 95%, at least 99%, or 100% identical to SEQ ID NO: 142 or 1068, and a CDR3 having an amino acid sequence at least 65%, at least 70%, at least 75%, at least 80%, at least 85%, at least 90%, at least 95%, at least 99%, or 100% identical to SEQ ID NO: 143, 857, or 1069.

[2281] In some aspects, VH1 comprises a CDR1 having an amino acid sequence at least 65%, at least 70%, at least 75%, at least 80%, at least 85%, at least 90%, at least 95%, at least 99%, or 100% identical to SEQ ID NO: 175 or 1062, a CDR2 having an amino acid sequence at least 65%, at least 70%, at least 75%, at least 80%, at least 85%, at least 90%, at least 95%, at least 99%, or 100% identical to SEQ ID NO: 176 or 1063, and a CDR3 having an amino acid sequence at least 65%, at least 70%, at least 75%, at least 80%, at least 85%, at least 90%, at least 95%, at least 99%, or 100% identical to SEQ ID NO: 177, 793, or 1064.

[2282] In some aspects, VH1 comprises an amino acid sequence at least 65%, at least 70%, at least 75%, at least 80%, at least 85%, at least 90%, at least 95%, at least 99%, or 100% identical to any one of SEQ ID NOs: 8, 14, 21, 22, 29, 37, 47, 54, 57, 64, 71, 78, 85, 92, 98, 104, 111, 118, 125, 129, 136, 137, 144, 151, 158, 165, 171, 178, 185, 191, 198, 204, 211, 218, 225, 231, 238, 245, 254, 258, 260, 262, 264, 266, 268, 270, 272, 275, 277, 279, 280, 282, 298, 321, 331, 626, 644, 653, 662, 670, 681, 689, 698, 706, 715, 775, 777, 784, 791, 800, 806, 813, 820, 826, 835, 842, 848, 855, 864, 871, 877, and 884.

[2283] In some aspects, VH1 comprises an amino acid sequence at least 65%, at least 70%, at least 75%, at least 80%, at least 85%, at least 90%, at least 95%, at least 99%, or 100% identical to any one of SEQ ID NOs: 8, 14, 21, 22, 29, 37, 71, 78, 151, 158, 626, 144, and 178.

[2284] In some aspects, VL2 comprises a CDR1 having an amino acid sequence at least 65%, at least 70%, at least 75%, at least 80%, at least 85%, at least 90%, at least 95%, at least 99%, or 100% identical to any one of SEQ ID NOs: 1, 9, 15, 23, 30, 41, 48, 55, 58, 65, 72, 79, 86, 93, 99, 105, 112, 119, 130, 138, 145, 152, 159, 166, 172, 179, 186, 192, 199, 205, 212, 219, 226, 232, 324, 627, 640, 650, 659, 676, 687, 695, 703, 712, 770, 778, 785, 794, 801, 807, 814, 827, 836, 849, 858, 865, 878, 1045, 1050, 1055, 1060, and 1065.

[2285] In some aspects, VL2 comprises a CDR1 having an amino acid sequence at least 65%, at least 70%, at least 75%, at least 80%, at least 85%, at least 90%, at least 95%, at least 99%, or 100% identical to any one of SEQ ID NOs: 1, 9, 15, 23, 30, 65, 72, 145, 152, 324, 627, 138, 172, 1045, 1050, 1055, 1060, and 1065.

[2286] In some aspects, VL2 comprises a CDR2 having an amino acid sequence at least 65%, at least 70%, at least 75%, at least 80%, at least 85%, at least 90%, at least 95%, at least 99%, or 100% identical to any one of SEQ ID NOs: 2, 31, 628, 641, 677, 1046, 1051, 1056, and 1061; or at least 65%, at least 70%, at least 75%, at least 80%, at least 85%, at least 90%, at least 95%, at least 99%, or 100% identical to any one of amino acid sequences AAS, GAS, LGS, GTN, GTN, SAS, SDS, DNT, EVT, DAS, DVT, RNS, DVS, EDS, DDS, KDS, VAS, WAS, YTS, EVS, NNN, SYN, and DAT.

[2287] In some aspects, VL2 comprises a CDR2 having an amino acid sequence at least 65%, at least 70%, at least 75%, at least 80%, at least 85%, at least 90%, at least 95%, at least 99%, or 100% identical to any one of SEQ ID NOs: 2, 31, 628, 1046, 1051, 1056, and 1061, or at least 65%, at least 70%, at least 75%, at least 80%, at least 85%, at least 90%, at least 95%, at least 99%, or 100% identical to any one of amino acid sequences GAS, LGS, GTN, SAS, SDS, AAS, DAS, and DNT.

[2288] In some aspects, VL2 comprises a CDR3 having an amino acid sequence at least 65%, at least 70%, at least 75%, at least 80%, at least 85%, at least 90%, at least 95%, at least 99%, or 100% identical to any one of SEQ ID NOs: 3, 10, 16, 24, 32, 38, 42, 49, 59, 66, 73, 80, 87, 94, 100, 106, 113, 120, 126, 131, 139, 146, 153, 160, 167, 173, 180, 187, 193, 200, 206, 213, 220, 227, 233, 239, 242, 246, 249, 256, 283, 285, 287, 288, 290, 292, 294, 296, 301, 304, 306, 309, 311, 313, 316, 325, 326, 329, 642, 651, 660, 668, 678, 651, 696, 704, 713, 764, 766, 768, 771, 779, 786, 792, 795, 808, 815, 821, 830, 837, 843, 850, 856, 859, 866, 872, 879, 885, and 1066.

[2289] In some aspects, VL2 comprises a CDR3 having an amino acid sequence at least 65%, at least 70%, at least 75%, at least 80%, at least 85%, at least 90%, at least 95%, at least 99%, or 100% identical to any one of SEQ ID NOs: 3, 10, 16, 24, 32, 38, 66, 73, 146, 153, 325, 326, 764, 766, 139, 856, 173, 792, and 1066.

[2290] In some aspects, VL2 comprises a CDR1 having an amino acid sequence at least 65%, at least 70%, at least 75%, at least 80%, at least 85%, at least 90%, at least 95%, at least 99%, or 100% identical to SEQ ID NO: 1 or 324, a CDR2 having an amino acid sequence at least 65%, at least 70%, at least 75%, at least 80%, at least 85%, at least 90%, at least 95%, at least 99%, or 100% identical to SEQ ID NO: 2 or an amino acid sequence at least 65%, at least 70%, at least 75%, at least 80%, at least 85%, at least 90%, at least 95%, at least 99%, or 100% identical to amino acid sequence AAS, and a CDR3 having an amino acid sequence at least 65%, at least 70%, at least 75%, at least 80%, at least 85%, at least 90%, at least 95%, at least 99%, or 100% identical to SEQ ID NO: 3.

[2291] In some aspects, VL2 comprises a CDR1 having an amino acid sequence at least 65%, at least 70%, at least 75%, at least 80%, at least 85%, at least 90%, at least 95%, at least 99%, or 100% identical to SEQ ID NO: 9 or 1055, a CDR2 having an amino acid sequence at least 65%, at least 70%, at least 75%, at least 80%, at least 85%, at least 90%, at least 95%, at least 99%, or 100% identical to SEQ ID NO: 1056 or an amino acid sequence at least 65%, at least 70%, at least 75%, at least 80%, at least 85%, at least 90%, at least 95%, at least 99%, or 100% identical to amino acid sequence GAS, and a CDR3 having an amino acid sequence at least 65%, at least 70%, at least 75%, at least 80%, at least 85%, at least 90%, at least 95%, at least 99%, or 100% identical to SEQ ID NO: 10.

[2292] In some aspects, VL2 comprises a CDR1 having an amino acid sequence at least 65%, at least 70%, at least 75%, at least 80%, at least 85%, at least 90%, at least 95%, at least 99%, or 100% identical to SEQ ID NO: 15, a CDR2 having an amino acid sequence at least 65%, at least 70%, at least 75%, at least 80%, at least 85%, at least 90%, at least 95%, at least 99%, or 100% identical to amino acid sequence LGS, and a CDR3 having an amino acid sequence at least 65%, at least 70%, at least 75%, at least 80%, at least 85%, at least 90%, at least 95%, at least 99%, or 100% identical to SEQ ID NO: 16.

[2293] In some aspects, VL2 comprises a CDR1 having an amino acid sequence at least 65%, at least 70%, at least 75%, at least 80%, at least 85%, at least 90%, at least 95%, at least 99%, or 100% identical to SEQ ID NO: 23, a CDR2 having an amino acid sequence at least 65%, at least 70%, at least 75%, at least 80%, at least 85%, at least 90%, at least 95%, at least 99%, or 100% identical to amino acid sequence GTN, and a CDR3 having an amino acid sequence at least 65%, at least 70%, at least 75%, at least 80%, at least 85%, at least 90%, at least 95%, at least 99%, or 100% identical to SEQ ID NO: 24 or 325.

[2294] In some aspects, VL2 comprises a CDR1 having an amino acid sequence at least 65%, at least 70%, at least 75%, at least 80%, at least 85%, at least 90%, at least 95%, at least 99%, or 100% identical to SEQ ID NO: 30, a CDR2 having an amino acid sequence at least 95% identical to SEQ ID NO: 31 or an amino acid sequence at least 65%, at least 70%, at least 75%, at least 80%, at least 85%, at least 90%, at least 95%, at least 99%, or 100% identical to amino acid sequence SAS, and a CDR3 having an amino acid sequence at least 65%, at least 70%, at least 75%, at least 80%, at least 85%, at least 90%, at least 95%, at least 99%, or 100% identical to SEQ ID NO: 32, 38, or 326.

[2295] In some aspects, VL2 comprises a CDR1 having an amino acid sequence at least 65%, at least 70%, at least 75%, at least 80%, at least 85%, at least 90%, at least 95%, at least 99%, or 100% identical to SEQ ID NO: 65 or 627, a CDR2 having an amino acid sequence at least 65%, at least 70%, at least 75%, at least 80%, at least 85%, at least 90%, at least 95%, at least 99%, or 100% identical to SEQ ID NO: 628 or an amino acid sequence at least 65%, at least 70%, at least 75%, at least 80%, at least 85%, at least 90%, at least 95%, at least 99%, or 100% identical to amino acid sequence SDS, and a CDR3 having an amino acid sequence at least 65%, at least 70%, at least 75%, at least 80%, at least 85%, at least 90%, at least 95%, at least 99%, or 100% identical to SEQ ID NO: 66.

[2296] In some aspects, VL2 comprises a CDR1 having an amino acid sequence at least 65%, at least 70%, at least 75%, at least 80%, at least 85%, at least 90%, at least 95%, at least 99%, or 100% identical to SEQ ID NO: 72, a CDR2 having an amino acid sequence at least 65%, at least 70%, at least 75%, at least 80%, at least 85%, at least 90%, at least 95%, at least 99%, or 100% identical to amino acid sequence DNT, and a CDR3 having an amino acid sequence at least 65%, at least 70%, at least 75%, at least 80%, at least 85%, at least 90%, at least 95%, at least 99%, or 100% identical to SEQ ID NO: 73.

[2297] In some aspects, VL2 comprises a CDR1 having an amino acid sequence at least 65%, at least 70%, at least 75%, at least 80%, at least 85%, at least 90%, at least 95%, at least 99%, or 100% identical to SEQ ID NO: 145 or 1050, a CDR2 having an amino acid sequence at least 65%, at least 70%, at least 75%, at least 80%, at least 85%, at least 90%, at least 95%, at least 99%, or 100% identical to SEQ ID NO: 1051 or an amino acid sequence at least 65%, at least 70%, at least 75%, at least 80%, at least 85%, at least 90%, at least 95%, at least 99%, or 100% identical to amino acid sequence AAS, and a CDR3 having an amino acid sequence at least 65%, at least 70%, at least 75%, at least 80%, at least 85%, at least 90%, at least 95%, at least 99%, or 100% identical to SEQ ID NO: 146 or 764.

[2298] In some aspects, VL2 comprises a CDR1 having an amino acid sequence at least 65%, at least 70%, at least 75%, at least 80%, at least 85%, at least 90%, at least 95%, at least 99%, or 100% identical to SEQ ID NO: 152 or 1045, a CDR2 having an amino acid sequence at least 65%, at least 70%, at least 75%, at least 80%, at least 85%, at least 90%, at least 95%, at least 99%, or 100% identical to SEQ ID NO: 1046 or an amino acid sequence at least 65%, at least 70%, at least 75%, at least 80%, at least 85%, at least 90%, at least 95%, at least 99%, or 100% identical to amino acid sequence GAS, and a CDR3 having an amino acid sequence at least 65%, at least 70%, at least 75%, at least 80%, at least 85%, at least 90%, at least 95%, at least 99%, or 100% identical to SEQ ID NO: 153 or 766.

[2299] In some aspects, VL2 comprises a CDR1 having an amino acid sequence at least 65%, at least 70%, at least 75%, at least 80%, at least 85%, at least 90%, at least 95%, at least 99%, or 100% identical to SEQ ID NO: 138 or 1065, a CDR2 having an amino acid sequence at least 65%, at least 70%, at least 75%, at least 80%, at least 85%, at least 90%, at least 95%, at least 99%, or 100% identical to SEQ ID NO: 1061 or an amino acid sequence at least 65%, at least 70%, at least 75%, at least 80%, at least 85%, at least 90%, at least 95%, at least 99%, or 100% identical to amino acid sequence DAS, and a CDR3 having an amino acid sequence at least 65%, at least 70%, at least 75%, at least 80%, at least 85%, at least 90%, at least 95%, at least 99%, or 100% identical to SEQ ID NO: 139, 856, or 1066.

[2300] In some aspects, VL2 comprises a CDR1 having an amino acid sequence at least 65%, at least 70%, at least 75%, at least 80%, at least 85%, at least 90%, at least 95%, at least 99%, or 100% identical to SEQ ID NO: 172 or 1060, a CDR2 having an amino acid sequence at least 65%, at least 70%, at least 75%, at least 80%, at least 85%, at least 90%, at least 95%, at least 99%, or 100% identical to SEQ ID NO: 1061 or an amino acid sequence at least 65%, at least 70%, at least 75%, at least 80%, at least 85%, at least 90%, at least 95%, at least 99%, or 100% identical to amino acid sequence DAS, and a CDR3 having an amino acid sequence at least 65%, at least 70%, at least 75%, at least 80%, at least 85%, at least 90%, at least 95%, at least 99%, or 100% identical to SEQ ID NO: 173 or 792.

[2301] In some aspects, VL2 comprises an amino acid sequence at least 65%, at least 70%, at least 75%, at least 80%, at least 85%, at least 90%, at least 95%, at least 99%, or 100% identical to any one of SEQ ID NOs: 4, 11, 17, 25, 33, 39, 43, 50, 60, 67, 74, 81, 88, 95, 101, 107, 114, 121, 127, 132, 140, 147, 154, 161, 168, 174, 181, 188, 194, 201, 207, 214, 221, 228, 234, 240, 243, 247, 250, 251, 252, 255, 284, 286, 289, 291, 293, 295, 299, 300, 302, 303, 305, 307, 308, 310, 312, 314, 315, 317, 323, 639, 649, 658, 667, 675, 686, 694, 702, 711, 772, 780, 787, 796, 802, 809, 816, 822, 831, 838, 844, 851, 860, 867, 873, 880, and 988.

[2302] In some aspects, VL2 comprises an amino acid sequence at least 65%, at least 70%, at least 75%, at least 80%, at least 85%, at least 90%, at least 95%, at least 99%, or 100% identical to any one of SEQ ID NOs: 4, 11, 17, 25, 33, 39, 67, 74, 147, 154, 140, and 174.

[2303] In some aspects, VH2 comprises a CDR1 having an amino acid sequence at least 65%, at least 70%, at least 75%, at least 80%, at least 85%, at least 90%, at least 95%, at least 99%, or 100% identical to any one of SEQ ID NOs: 5, 12, 18, 26, 34, 44, 51, 61, 68, 75, 82, 89, 96, 102, 108, 115, 122, 133, 141, 148, 155, 162, 175, 182, 189, 195, 202, 208, 215, 222, 229, 235, 318, 629, 645, 654, 663, 671, 682, 690, 699, 707, 716, 773, 781, 788, 797, 803, 810, 817, 823, 832, 839, 845, 852, 861, 868, 874, 881, 1047, 1052, 1057, 1062, and 1067.

[2304] In some aspects, VH2 comprises a CDR1 having an amino acid sequence at least 65%, at least 70%, at least 75%, at least 80%, at least 85%, at least 90%, at least 95%, at least 99%, or 100% identical to any one of SEQ ID NOs: 5, 12, 18, 26, 34, 68, 75, 148, 155, 629, 141, 175, 1047, 1052, 1057, 1062, and 1067.

[2305] In some aspects, VH2 comprises a CDR2 having an amino acid sequence at least 65%, at least 70%, at least 75%, at least 80%, at least 85%, at least 90%, at least 95%, at least 99%, or 100% identical to any one of SEQ ID NOs: 6, 19, 27, 35, 45, 52, 56, 62, 69, 76, 83, 90, 109, 116, 123, 134, 142, 149, 156, 163, 169, 176, 183, 196, 209, 216, 223, 236, 273, 319, 328, 630, 646, 655, 664, 672, 683, 691, 708, 776, 782, 789, 798, 804, 811, 818, 824, 833, 840, 846, 853, 862, 869, 875, 882, 1048, 1053, 1058, 1063, and 1068.

[2306] In some aspects, VH2 comprises a CDR2 having an amino acid sequence at least 65%, at least 70%, at least 75%, at least 80%, at least 85%, at least 90%, at least 95%, at least 99%, or 100% identical to any one of SEQ ID NOs: 6, 19, 27, 35, 69, 76, 149, 156, 630, 142, 176, 1048, 1053, 1058, 1063, and 1068.

[2307] In some aspects, VH2 comprises a CDR3 having an amino acid sequence at least 65%, at least 70%, at least 75%, at least 80%, at least 85%, at least 90%, at least 95%, at least 99%, or 100% identical to any one of SEQ ID NOs: 7, 13, 20, 28, 36, 40, 46, 53, 63, 70, 77, 84, 91, 97, 103, 110, 117, 124, 128, 135, 143, 150, 157, 164, 170, 177, 184, 190, 197, 203, 210, 217, 224, 230, 237, 241, 244, 248, 253, 257, 259, 261, 263, 265, 267, 269, 271, 274, 276, 278, 281, 297, 320, 322, 327, 330, 332, 631, 647, 656, 665, 673, 684, 692, 700, 709, 717, 765, 767, 769, 774, 783, 790, 793, 799, 805, 812, 819, 825, 834, 841, 847, 854, 857, 863, 870, 876, 883, 886, 1049, 1054, 1059, 1064, and 1069.

[2308] In some aspects, VH2 comprises a CDR3 having an amino acid sequence at least 65%, at least 70%, at least 75%, at least 80%, at least 85%, at least 90%, at least 95%, at least 99%, or 100% identical to any one of SEQ ID NOs: 7, 13, 20, 28, 36, 40, 70, 77, 150, 157, 327, 332, 631, 765 767, 143, 857, 177, 793, 1049, 1054, 1059, 1064, and 1069.

[2309] In some aspects, VH2 comprises a CDR1 having an amino acid sequence at least 65%, at least 70%, at least 75%, at least 80%, at least 85%, at least 90%, at least 95%, at least 99%, or 100% identical to SEQ ID NO: 5, a CDR2 having an amino acid sequence at least 65%, at least 70%, at least 75%, at least 80%, at least 85%, at least 90%, at least 95%, at least 99%, or 100% identical to SEQ ID NO: 6, and a CDR3 having an amino acid sequence at least 65%, at least 70%, at least 75%, at least 80%, at least 85%, at least 90%, at least 95%, at least 99%, or 100% identical to SEQ ID NO: 7.

[2310] In some aspects, VH2 comprises a CDR1 having an amino acid sequence at least 65%, at least 70%, at least 75%, at least 80%, at least 85%, at least 90%, at least 95%, at least 99%, or 100% identical to SEQ ID NO: 12 or 1057, a CDR2 having an amino acid sequence at least 65%, at least 70%, at least 75%, at least 80%, at least 85%, at least 90%, at least 95%, at least 99%, or 100% identical to SEQ ID NO: 6 or 1058, and a CDR3 having an amino acid sequence at least 65%, at least 70%, at least 75%, at least 80%, at least 85%, at least 90%, at least 95%, at least 99%, or 100% identical to SEQ ID NO: 13 or 1059.

[2311] In some aspects, VH2 comprises a CDR1 having an amino acid sequence at least 65%, at least 70%, at least 75%, at least 80%, at least 85%, at least 90%, at least 95%, at least 99%, or 100% identical to SEQ ID NO: 18, a CDR2 having an amino acid sequence at least 65%, at least 70%, at least 75%, at least 80%, at least 85%, at least 90%, at least 95%, at least 99%, or 100% identical to SEQ ID NO: 19, and a CDR3 having an amino acid sequence at least 65%, at least 70%, at least 75%, at least 80%, at least 85%, at least 90%, at least 95%, at least 99%, or 100% identical to SEQ ID NO: 20.

[2312] In some aspects, VH2 comprises a CDR1 having an amino acid sequence at least 65%, at least 70%, at least 75%, at least 80%, at least 85%, at least 90%, at least 95%, at least 99%, or 100% identical to SEQ ID NO: 26, a CDR2 having an amino acid sequence at least 65%, at least 70%, at least 75%, at least 80%, at least 85%, at least 90%, at least 95%, at least 99%, or 100% identical to SEQ ID NO: 27, and a CDR3 having an amino acid sequence at least 65%, at least 70%, at least 75%, at least 80%, at least 85%, at least 90%, at least 95%, at least 99%, or 100% identical to SEQ ID NO: 28 or 332.

[2313] In some aspects, VH2 comprises a CDR1 having an amino acid sequence at least 65%, at least 70%, at least 75%, at least 80%, at least 85%, at least 90%, at least 95%, at least 99%, or 100% identical to SEQ ID NO: 34, a CDR2 having an amino acid sequence at least 65%, at least 70%, at least 75%, at least 80%, at least 85%, at least 90%, at least 95%, at least 99%, or 100% identical to SEQ ID NO: 35, and a CDR3 having an amino acid sequence at least 65%, at least 70%, at least 75%, at least 80%, at least 85%, at least 90%, at least 95%, at least 99%, or 100% identical to SEQ ID NO: 36, 40, or 327.

[2314] In some aspects, VH2 comprises a CDR1 having an amino acid sequence at least 65%, at least 70%, at least 75%, at least 80%, at least 85%, at least 90%, at least 95%, at least 99%, or 100% identical to SEQ ID NO: 68 or 629, a CDR2 having an amino acid sequence at least 65%, at least 70%, at least 75%, at least 80%, at least 85%, at least 90%, at least 95%, at least 99%, or 100% identical to SEQ ID NO: 69 or 630, and a CDR3 having an amino acid sequence at least 65%, at least 70%, at least 75%, at least 80%, at least 85%, at least 90%, at least 95%, at least 99%, or 100% identical to SEQ ID NO: 70 or 631.

[2315] In some aspects, VH2 comprises a CDR1 having an amino acid sequence at least 65%, at least 70%, at least 75%, at least 80%, at least 85%, at least 90%, at least 95%, at least 99%, or 100% identical to SEQ ID NO: 75, a CDR2 having an amino acid sequence at least 65%, at least 70%, at least 75%, at least 80%, at least 85%, at least 90%, at least 95%, at least 99%, or 100% identical to SEQ ID NO: 76, and a CDR3 having an amino acid sequence at least 65%, at least 70%, at least 75%, at least 80%, at least 85%, at least 90%, at least 95%, at least 99%, or 100% identical to SEQ ID NO: 77.

[2316] In some aspects, VH2 comprises a CDR1 having an amino acid sequence at least 65%, at least 70%, at least 75%, at least 80%, at least 85%, at least 90%, at least 95%, at least 99%, or 100% identical to SEQ ID NO: 148 or 1052, a CDR2 having an amino acid sequence at least 65%, at least 70%, at least 75%, at least 80%, at least 85%, at least 90%, at least 95%, at least 99%, or 100% identical to SEQ ID NO: 149 or 1053, and a CDR3 having an amino acid sequence at least 65%, at least 70%, at least 75%, at least 80%, at least 85%, at least 90%, at least 95%, at least 99%, or 100% identical to SEQ ID NO: 150, 765, or 1054.

[2317] In some aspects, VH2 comprises a CDR1 having an amino acid sequence at least 65%, at least 70%, at least 75%, at least 80%, at least 85%, at least 90%, at least 95%, at least 99%, or 100% identical to SEQ ID NO: 155 or 1047, a CDR2 having an amino acid sequence at least 65%, at least 70%, at least 75%, at least 80%, at least 85%, at least 90%, at least 95%, at least 99%, or 100% identical to SEQ ID NO: 156 or 1048, and a CDR3 having an amino acid sequence at least 65%, at least 70%, at least 75%, at least 80%, at least 85%, at least 90%, at least 95%, at least 99%, or 100% identical to SEQ ID NO: 157, 767, or 1049.

[2318] In some aspects, VH2 comprises a CDR1 having an amino acid sequence at least 65%, at least 70%, at least 75%, at least 80%, at least 85%, at least 90%, at least 95%, at least 99%, or 100% identical to SEQ ID NO: 141 or 1067, a CDR2 having an amino acid sequence at least 65%, at least 70%, at least 75%, at least 80%, at least 85%, at least 90%, at least 95%, at least 99%, or 100% identical to SEQ ID NO: 142 or 1068, and a CDR3 having an amino acid sequence at least 65%, at least 70%, at least 75%, at least 80%, at least 85%, at least 90%, at least 95%, at least 99%, or 100% identical to SEQ ID NO: 143, 857, or 1069. In some aspects, VH2 comprises a CDR1 having an amino acid sequence at least 65%, at least 70%, at least 75%, at least 80%, at least 85%, at least 90%, at least 95%, at least 99%, or 100% identical to SEQ ID NO: 175 or 1062, a CDR2 having an amino acid sequence at least 65%, at least 70%, at least 75%, at least 80%, at least 85%, at least 90%, at least 95%, at least 99%, or 100% identical to SEQ ID NO: 176 or 1063, and a CDR3 having an amino acid sequence at least 65%, at least 70%, at least 75%, at least 80%, at least 85%, at least 90%, at least 95%, at least 99%, or 100% identical to SEQ ID NO: 177, 793, or 1064.

[2319] In some aspects, VH2 comprises an amino acid sequence at least 65%, at least 70%, at least 75%, at least 80%, at least 85%, at least 90%, at least 95%, at least 99%, or 100% identical to any one of SEQ ID NOs: 8, 14, 21, 22, 29, 37, 47, 54, 57, 64, 71, 78, 85, 92, 98, 104, 111, 118, 125, 129, 136, 137, 144, 151, 158, 165, 171, 178, 185, 191, 198, 204, 211, 218, 225, 231, 238, 245, 254, 258, 260, 262, 264, 266, 268, 270, 272, 275, 277, 279, 280, 282, 298, 321, 331, 626, 644, 653, 662, 670, 681, 689, 698, 706, 715, 775, 777, 784, 791, 800, 806, 813, 820, 826, 835, 842, 848, 855, 864, 871, 877, and 884.

[2320] In some aspects, VH2 comprises an amino acid sequence at least 65%, at least 70%, at least 75%, at least 80%, at least 85%, at least 90%, at least 95%, at least 99%, or 100% identical to any one of SEQ ID NOs: 8, 14, 21, 22, 29, 37, 71, 78, 151, 158, 626, 144, and 178.

[2321] In some aspects, VL3 comprises a CDR1 having an amino acid sequence at least 65%, at least 70%, at least 75%, at least 80%, at least 85%, at least 90%, at least 95%, at least 99%, or 100% identical to any one of SEQ ID NOs: 1, 9, 15, 23, 30, 41, 48, 55, 58, 65, 72, 79, 86, 93, 99, 105, 112, 119, 130, 138, 145, 152, 159, 166, 172, 179, 186, 192, 199, 205, 212, 219, 226, 232, 324, 627, 640, 650, 659, 676, 687, 695, 703, 712, 770, 778, 785, 794, 801, 807, 814, 827, 836, 849, 858, 865, 878, 1045, 1050, 1055, 1060, and 1065.

[2322] In some aspects, VL3 comprises a CDR1 having an amino acid sequence at least 65%, at least 70%, at least 75%, at least 80%, at least 85%, at least 90%, at least 95%, at least 99%, or 100% identical to any one of SEQ ID NOs: 1, 9, 15, 23, 30, 65, 72, 145, 152, 324, 627, 138, 172, 1045, 1050, 1055, 1060, and 1065.

[2323] In some aspects, VL3 comprises a CDR2 having an amino acid sequence at least 65%, at least 70%, at least 75%, at least 80%, at least 85%, at least 90%, at least 95%, at least 99%, or 100% identical to any one of SEQ ID NOs: 2, 31, 628, 641, 677, 1046, 1051, 1056, and 1061; or at least 65%, at least 70%, at least 75%, at least 80%, at least 85%, at least 90%, at least 95%, at least 99%, or 100% identical to any one of amino acid sequences AAS, GAS, LGS, GTN, GTN, SAS, SDS, DNT, EVT, DAS, DVT, RNS, DVS, EDS, DDS, KDS, VAS, WAS, YTS, EVS, NNN, SYN, and DAT.

[2324] In some aspects, VL3 comprises a CDR2 having an amino acid sequence at least 65%, at least 70%, at least 75%, at least 80%, at least 85%, at least 90%, at least 95%, at least 99%, or 100% identical to any one of SEQ ID NOs: 2, 31, 628, 1046, 1051, 1056, and 1061, or at least 65%, at least 70%, at least 75%, at least 80%, at least 85%, at least 90%, at least 95%, at least 99%, or 100% identical to any one of amino acid sequences GAS, LGS, GTN, SAS, SDS, AAS, DAS, and DNT.

[2325] In some aspects, VL3 comprises a CDR3 having an amino acid sequence at least 65%, at least 70%, at least 75%, at least 80%, at least 85%, at least 90%, at least 95%, at least 99%, or 100% identical to any one of SEQ ID NOs: 3, 10, 16, 24, 32, 38, 42, 49, 59, 66, 73, 80, 87, 94, 100, 106, 113, 120, 126, 131, 139, 146, 153, 160, 167, 173, 180, 187, 193, 200, 206, 213, 220, 227, 233, 239, 242, 246, 249, 256, 283, 285, 287, 288, 290, 292, 294, 296, 301, 304, 306, 309, 311, 313, 316, 325, 326, 329, 642, 651, 660, 668, 678, 651, 696, 704, 71, 764, 766, 768, 771, 779, 786, 792, 795, 808, 815, 821, 830, 837, 843, 850, 856, 859, 866, 872, 879, and 885.

[2326] In some aspects, VL3 comprises a CDR3 having an amino acid sequence at least 65%, at least 70%, at least 75%, at least 80%, at least 85%, at least 90%, at least 95%, at least 99%, or 100% identical to any one of SEQ ID NOs: 3, 10, 16, 24, 32, 38, 66, 73, 146, 153, 325, 326, 764, 766, 139, 856, 173, 792, and 1066.

[2327] In some aspects, VL3 comprises a CDR1 having an amino acid sequence at least 65%, at least 70%, at least 75%, at least 80%, at least 85%, at least 90%, at least 95%, at least 99%, or 100% identical to SEQ ID NO: 1 or 324, a CDR2 having an amino acid sequence at least 65%, at least 70%, at least 75%, at least 80%, at least 85%, at least 90%, at least 95%, at least 99%, or 100% identical to SEQ ID NO: 2 or an amino acid sequence at least 65%, at least 70%, at least 75%, at least 80%, at least 85%, at least 90%, at least 95%, at least 99%, or 100% identical to amino acid sequence AAS, and a CDR3 having an amino acid sequence at least 65%, at least 70%, at least 75%, at least 80%, at least 85%, at least 90%, at least 95%, at least 99%, or 100% identical to SEQ ID NO: 3.

[2328] In some aspects, VL3 comprises a CDR1 having an amino acid sequence at least 65%, at least 70%, at least 75%, at least 80%, at least 85%, at least 90%, at least 95%, at least 99%, or 100% identical to SEQ ID NO: 9 or 1055, a CDR2 having an amino acid sequence at least 65%, at least 70%, at least 75%, at least 80%, at least 85%, at least 90%, at least 95%, at least 99%, or 100% identical to SEQ ID NO: 1056 or an amino acid sequence at least 65%, at least 70%, at least 75%, at least 80%, at least 85%, at least 90%, at least 95%, at least 99%, or 100% identical to amino acid sequence GAS, and a CDR3 having an amino acid sequence at least 65%, at least 70%, at least 75%, at least 80%, at least 85%, at least 90%, at least 95%, at least 99%, or 100% identical to SEQ ID NO: 10.

[2329] In some aspects, VL3 comprises a CDR1 having an amino acid sequence at least 65%, at least 70%, at least 75%, at least 80%, at least 85%, at least 90%, at least 95%, at least 99%, or 100% identical to SEQ ID NO: 15, a CDR2 having an amino acid sequence at least 65%, at least 70%, at least 75%, at least 80%, at least 85%, at least 90%, at least 95%, at least 99%, or 100% identical to amino acid sequence LGS, and a CDR3 having an amino acid sequence at least 65%, at least 70%, at least 75%, at least 80%, at least 85%, at least 90%, at least 95%, at least 99%, or 100% identical to SEQ ID NO: 16.

[2330] In some aspects, VL3 comprises a CDR1 having an amino acid sequence at least 65%, at least 70%, at least 75%, at least 80%, at least 85%, at least 90%, at least 95%, at least 99%, or 100% identical to SEQ ID NO: 23, a CDR2 having an amino acid sequence at least 65%, at least 70%, at least 75%, at least 80%, at least 85%, at least 90%, at least 95%, at least 99%, or 100% identical to amino acid sequence GTN, and a CDR3 having an amino acid sequence at least 65%, at least 70%, at least 75%, at least 80%, at least 85%, at least 90%, at least 95%, at least 99%, or 100% identical to SEQ ID NO: 24 or 325.

[2331] In some aspects, VL3 comprises a CDR1 having an amino acid sequence at least 65%, at least 70%, at least 75%, at least 80%, at least 85%, at least 90%, at least 95%, at least 99%, or 100% identical to SEQ ID NO: 30, a CDR2 having an amino acid sequence at least 65%, at least 70%, at least 75%, at least 80%, at least 85%, at least 90%, at least 95%, at least 99%, or 100% identical to SEQ ID NO: 31 or an amino acid sequence at least 65%, at least 70%, at least 75%, at least 80%, at least 85%, at least 90%, at least 95%, at least 99%, or 100% identical to amino acid sequence SAS, and a CDR3 having an amino acid sequence at least 65%, at least 70%, at least 75%, at least 80%, at least 85%, at least 90%, at least 95%, at least 99%, or 100% identical to SEQ ID NO: 32, 38, or 326.

[2332] In some aspects, VL3 comprises a CDR1 having an amino acid sequence at least 65%, at least 70%, at least 75%, at least 80%, at least 85%, at least 90%, at least 95%, at least 99%, or 100% identical to SEQ ID NO: 65 or 627, a CDR2 having an amino acid sequence at least 65%, at least 70%, at least 75%, at least 80%, at least 85%, at least 90%, at least 95%, at least 99%, or 100% identical to SEQ ID NO: 628 or an amino acid sequence at least 65%, at least 70%, at least 75%, at least 80%, at least 85%, at least 90%, at least 95%, at least 99%, or 100% identical to amino acid sequence SDS, and a CDR3 having an amino acid sequence at least 65%, at least 70%, at least 75%, at least 80%, at least 85%, at least 90%, at least 95%, at least 99%, or 100% identical to SEQ ID NO: 66.

[2333] In some aspects, VL3 comprises a CDR1 having an amino acid sequence at least 65%, at least 70%, at least 75%, at least 80%, at least 85%, at least 90%, at least 95%, at least 99%, or 100% identical to SEQ ID NO: 72, a CDR2 having an amino acid sequence at least 65%, at least 70%, at least 75%, at least 80%, at least 85%, at least 90%, at least 95%, at least 99%, or 100% identical to amino acid sequence DNT, and a CDR3 having an amino acid sequence at least 65%, at least 70%, at least 75%, at least 80%, at least 85%, at least 90%, at least 95%, at least 99%, or 100% identical to SEQ ID NO: 73.

[2334] In some aspects, VL3 comprises a CDR1 having an amino acid sequence at least 65%, at least 70%, at least 75%, at least 80%, at least 85%, at least 90%, at least 95%, at least 99%, or 100% identical to SEQ ID NO: 145 or 1050, a CDR2 having an amino acid sequence at least 65%, at least 70%, at least 75%, at least 80%, at least 85%, at least 90%, at least 95%, at least 99%, or 100% identical to SEQ ID NO: 1051 or an amino acid sequence at least 65%, at least 70%, at least 75%, at least 80%, at least 85%, at least 90%, at least 95%, at least 99%, or 100% identical to amino acid sequence AAS, and a CDR3 having an amino acid sequence at least 65%, at least 70%, at least 75%, at least 80%, at least 85%, at least 90%, at least 95%, at least 99%, or 100% identical to SEQ ID NO: 146 or 764.

[2335] In some aspects, VL3 comprises a CDR1 having an amino acid sequence at least 65%, at least 70%, at least 75%, at least 80%, at least 85%, at least 90%, at least 95%, at least 99%, or 100% identical to SEQ ID NO: 152 or 1045, a CDR2 having an amino acid sequence at least 65%, at least 70%, at least 75%, at least 80%, at least 85%, at least 90%, at least 95%, at least 99%, or 100% identical to SEQ ID NO: 1046 or an amino acid sequence at least 65%, at least 70%, at least 75%, at least 80%, at least 85%, at least 90%, at least 95%, at least 99%, or 100% identical to amino acid sequence GAS, and a CDR3 having an amino acid sequence at least 65%, at least 70%, at least 75%, at least 80%, at least 85%, at least 90%, at least 95%, at least 99%, or 100% identical to SEQ ID NO: 153 or 766.

[2336] In some aspects, VL3 comprises a CDR1 having an amino acid sequence at least 65%, at least 70%, at least 75%, at least 80%, at least 85%, at least 90%, at least 95%, at least 99%, or 100% identical to SEQ ID NO: 138 or 1065, a CDR2 having an amino acid sequence at least 65%, at least 70%, at least 75%, at least 80%, at least 85%, at least 90%, at least 95%, at least 99%, or 100% identical to SEQ ID NO: 1061 or an amino acid sequence at least 65%, at least 70%, at least 75%, at least 80%, at least 85%, at least 90%, at least 95%, at least 99%, or 100% identical to amino acid sequence DAS, and a CDR3 having an amino acid sequence at least 65%, at least 70%, at least 75%, at least 80%, at least 85%, at least 90%, at least 95%, at least 99%, or 100% identical to SEQ ID NO: 139, 856, or 1066.

[2337] In some aspects, VL3 comprises a CDR1 having an amino acid sequence at least 65%, at least 70%, at least 75%, at least 80%, at least 85%, at least 90%, at least 95%, at least 99%, or 100% identical to SEQ ID NO: 172 or 1060, a CDR2 having an amino acid sequence at least 65%, at least 70%, at least 75%, at least 80%, at least 85%, at least 90%, at least 95%, at least 99%, or 100% identical to SEQ ID NO: 1061 or an amino acid sequence at least 65%, at least 70%, at least 75%, at least 80%, at least 85%, at least 90%, at least 95%, at least 99%, or 100% identical to amino acid sequence DAS, and a CDR3 having an amino acid sequence at least 65%, at least 70%, at least 75%, at least 80%, at least 85%, at least 90%, at least 95%, at least 99%, or 100% identical to SEQ ID NO: 173 or 792.

[2338] In some aspects, VL3 comprises an amino acid sequence at least 65%, at least 70%, at least 75%, at least 80%, at least 85%, at least 90%, at least 95%, at least 99%, or 100% identical to any one of SEQ ID NOs: 4, 11, 17, 25, 33, 39, 43, 50, 60, 67, 74, 81, 88, 95, 101, 107, 114, 121, 127, 132, 140, 147, 154, 161, 168, 174, 181, 188, 194, 201, 207, 214, 221, 228, 234, 240, 243, 247, 250, 251, 252, 255, 284, 286, 289, 291, 293, 295, 299, 300, 302, 303, 305, 307, 308, 310, 312, 314, 315, 317, 323, 639, 649, 658, 667, 675, 686, 694, 702, 711, 772, 780, 787, 796, 802, 809, 816, 822, 831, 838, 844, 851, 860, 867, 873, 880, and 988.

[2339] In some aspects, VL3 comprises an amino acid sequence at least 65%, at least 70%, at least 75%, at least 80%, at least 85%, at least 90%, at least 95%, at least 99%, or 100% identical to any one of SEQ ID NOs: 4, 11, 17, 25, 33, 39, 67, 74, 147, 154, 140, and 174.

[2340] In some aspects, VH3 comprises a CDR1 having an amino acid sequence at least 65%, at least 70%, at least 75%, at least 80%, at least 85%, at least 90%, at least 95%, at least 99%, or 100% identical to any one of SEQ ID NOs: 5, 12, 18, 26, 34, 44, 51, 61, 68, 75, 82, 89, 96, 102, 108, 115, 122, 133, 141, 148, 155, 162, 175, 182, 189, 195, 202, 208, 215, 222, 229, 235, 318, 629, 645, 654, 663, 671, 682, 690, 699, 707, 716, 773, 781, 788, 797, 803, 810, 817, 823, 832, 839, 845, 852, 861, 868, 874, 881, 1047, 1052, 1057, 1062, and 1067.

[2341] In some aspects, VH3 comprises a CDR1 having an amino acid sequence at least 65%, at least 70%, at least 75%, at least 80%, at least 85%, at least 90%, at least 95%, at least 99%, or 100% identical to any one of SEQ ID NOs: 5, 12, 18, 26, 34, 68, 75, 148, 155, 629, 141, 175, 1047, 1052, 1057, 1062, and 1067.

[2342] In some aspects, VH3 comprises a CDR2 having an amino acid sequence at least 65%, at least 70%, at least 75%, at least 80%, at least 85%, at least 90%, at least 95%, at least 99%, or 100% identical to any one of SEQ ID NOs: 6, 19, 27, 35, 45, 52, 56, 62, 69, 76, 83, 90, 109, 116, 123, 134, 142, 149, 156, 163, 169, 176, 183, 196, 209, 216, 223, 236, 273, 319, 328, 630, 646, 655, 664, 672, 683, 691, 708, 776, 782, 789, 798, 804, 811, 818, 824, 833, 840, 846, 853, 862, 869, 875, 882, 1048, 1053, 1058, 1063, and 1068.

[2343] In some aspects, VH3 comprises a CDR2 having an amino acid sequence at least 65%, at least 70%, at least 75%, at least 80%, at least 85%, at least 90%, at least 95%, at least 99%, or 100% identical to any one of SEQ ID NOs: 6, 19, 27, 35, 69, 76, 149, 156, 630, 142, 176, 1048, 1053, 1058, 1063, and 1068.

[2344] In some aspects, VH3 comprises a CDR3 having an amino acid sequence at least 65%, at least 70%, at least 75%, at least 80%, at least 85%, at least 90%, at least 95%, at least 99%, or 100% identical to any one of SEQ ID NOs: 7, 13, 20, 28, 36, 40, 46, 53, 63, 70, 77, 84, 91, 97, 103, 110, 117, 124, 128, 135, 143, 150, 157, 164, 170, 177, 184, 190, 197, 203, 210, 217, 224, 230, 237, 241, 244, 248, 253, 257, 259, 261, 263, 265, 267, 269, 271, 274, 276, 278, 281, 297, 320, 322, 327, 330, 332, 631, 647, 656, 665, 673, 684, 692, 700, 709, 717, 765, 767, 769, 774, 783, 790, 793, 799, 805, 812, 819, 825, 834, 841, 847, 854, 857, 863, 870, 876, 883, 886, 1049, 1054, 1059, 1064, and 1069.

[2345] In some aspects, VH3 comprises a CDR3 having an amino acid sequence at least 65%, at least 70%, at least 75%, at least 80%, at least 85%, at least 90%, at least 95%, at least 99%, or 100% identical to any one of SEQ ID NOs: 7, 13, 20, 28, 36, 40, 70, 77, 150, 157, 327, 332, 631, 765, 767, 143, 857, 177, 793, 1049, 1054, 1059, 1064, and 1069.

[2346] In some aspects, VH3 comprises a CDR1 having an amino acid sequence at least 65%, at least 70%, at least 75%, at least 80%, at least 85%, at least 90%, at least 95%, at least 99%, or 100% identical to SEQ ID NO: 5, a CDR2 having an amino acid sequence at least 65%, at least 70%, at least 75%, at least 80%, at least 85%, at least 90%, at least 95%, at least 99%, or 100% identical to SEQ ID NO: 6, and a CDR3 having an amino acid sequence at least 65%, at least 70%, at least 75%, at least 80%, at least 85%, at least 90%, at least 95%, at least 99%, or 100% identical to SEQ ID NO: 7.

[2347] In some aspects, VH3 comprises a CDR1 having an amino acid sequence at least 65%, at least 70%, at least 75%, at least 80%, at least 85%, at least 90%, at least 95%, at least 99%, or 100% identical to SEQ ID NO: 12 or 1057, a CDR2 having an amino acid sequence at least 65%, at least 70%, at least 75%, at least 80%, at least 85%, at least 90%, at least 95%, at least 99%, or 100% identical to SEQ ID NO: 6 or 1058, and a CDR3 having an amino acid sequence at least 65%, at least 70%, at least 75%, at least 80%, at least 85%, at least 90%, at least 95%, at least 99%, or 100% identical to SEQ ID NO: 13 or 1059.

[2348] In some aspects, VH3 comprises a CDR1 having an amino acid sequence at least 65%, at least 70%, at least 75%, at least 80%, at least 85%, at least 90%, at least 95%, at least 99%, or 100% identical to SEQ ID NO: 18, a CDR2 having an amino acid sequence at least 65%, at least 70%, at least 75%, at least 80%, at least 85%, at least 90%, at least 95%, at least 99%, or 100% identical to SEQ ID NO: 19, and a CDR3 having an amino acid sequence at least 65%, at least 70%, at least 75%, at least 80%, at least 85%, at least 90%, at least 95%, at least 99%, or 100% identical to SEQ ID NO: 20.

[2349] In some aspects, VH3 comprises a CDR1 having an amino acid sequence at least 65%, at least 70%, at least 75%, at least 80%, at least 85%, at least 90%, at least 95%, at least 99%, or 100% identical to SEQ ID NO: 26, a CDR2 having an amino acid sequence at least 65%, at least 70%, at least 75%, at least 80%, at least 85%, at least 90%, at least 95%, at least 99%, or 100% identical to SEQ ID NO: 27, and a CDR3 having an amino acid sequence at least 65%, at least 70%, at least 75%, at least 80%, at least 85%, at least 90%, at least 95%, at least 99%, or 100% identical to SEQ ID NO: 28 or 332.

[2350] In some aspects, VH3 comprises a CDR1 having an amino acid sequence at least 65%, at least 70%, at least 75%, at least 80%, at least 85%, at least 90%, at least 95%, at least 99%, or 100% identical to SEQ ID NO: 34, a CDR2 having an amino acid sequence at least 65%, at least 70%, at least 75%, at least 80%, at least 85%, at least 90%, at least 95%, at least 99%, or 100% identical to SEQ ID NO: 35, and a CDR3 having an amino acid sequence at least 65%, at least 70%, at least 75%, at least 80%, at least 85%, at least 90%, at least 95%, at least 99%, or 100% identical to SEQ ID NO: 36, 40, or 327.

[2351] In some aspects, VH3 comprises a CDR1 having an amino acid sequence at least 65%, at least 70%, at least 75%, at least 80%, at least 85%, at least 90%, at least 95%, at least 99%, or 100% identical to SEQ ID NO: 68 or 629, a CDR2 having an amino acid sequence at least 65%, at least 70%, at least 75%, at least 80%, at least 85%, at least 90%, at least 95%, at least 99%, or 100% identical to SEQ ID NO: 69 or 630, and a CDR3 having an amino acid sequence at least 65%, at least 70%, at least 75%, at least 80%, at least 85%, at least 90%, at least 95%, at least 99%, or 100% identical to SEQ ID NO: 70 or 631.

[2352] In some aspects, VH3 comprises a CDR1 having an amino acid sequence at least 65%, at least 70%, at least 75%, at least 80%, at least 85%, at least 90%, at least 95%, at least 99%, or 100% identical to SEQ ID NO: 75, a CDR2 having an amino acid sequence at least 65%, at least 70%, at least 75%, at least 80%, at least 85%, at least 90%, at least 95%, at least 99%, or 100% identical to SEQ ID NO: 76, and a CDR3 having an amino acid sequence at least 65%, at least 70%, at least 75%, at least 80%, at least 85%, at least 90%, at least 95%, at least 99%, or 100% identical to SEQ ID NO: 77.

[2353] In some aspects, VH3 comprises a CDR1 having an amino acid sequence at least 65%, at least 70%, at least 75%, at least 80%, at least 85%, at least 90%, at least 95%, at least 99%, or 100% identical to SEQ ID NO: 148 or 1052, a CDR2 having an amino acid sequence at least 65%, at least 70%, at least 75%, at least 80%, at least 85%, at least 90%, at least 95%, at least 99%, or 100% identical to SEQ ID NO: 149 or 1053, and a CDR3 having an amino acid sequence at least 65%, at least 70%, at least 75%, at least 80%, at least 85%, at least 90%, at least 95%, at least 99%, or 100% identical to SEQ ID NO: 150, 765, or 1054.

[2354] In some aspects, VH3 comprises a CDR1 having an amino acid sequence at least 65%, at least 70%, at least 75%, at least 80%, at least 85%, at least 90%, at least 95%, at least 99%, or 100% identical to SEQ ID NO: 155 or 1047, a CDR2 having an amino acid sequence at least 65%, at least 70%, at least 75%, at least 80%, at least 85%, at least 90%, at least 95%, at least 99%, or 100% identical to SEQ ID NO: 156 or 1048, and a CDR3 having an amino acid sequence at least 65%, at least 70%, at least 75%, at least 80%, at least 85%, at least 90%, at least 95%, at least 99%, or 100% identical to SEQ ID NO: 157, 767, or 1049.

[2355] In some aspects, VH3 comprises a CDR1 having an amino acid sequence at least 65%, at least 70%, at least 75%, at least 80%, at least 85%, at least 90%, at least 95%, at least 99%, or 100% identical to SEQ ID NO: 141 or 1067, a CDR2 having an amino acid sequence at least 65%, at least 70%, at least 75%, at least 80%, at least 85%, at least 90%, at least 95%, at least 99%, or 100% identical to SEQ ID NO: 142 or 1068, and a CDR3 having an amino acid sequence at least 65%, at least 70%, at least 75%, at least 80%, at least 85%, at least 90%, at least 95%, at least 99%, or 100% identical to SEQ ID NO: 143, 857, or 1069.

[2356] In some aspects, VH3 comprises a CDR1 having an amino acid sequence at least 65%, at least 70%, at least 75%, at least 80%, at least 85%, at least 90%, at least 95%, at least 99%, or 100% identical to SEQ ID NO: 175 or 1062, a CDR2 having an amino acid sequence at least 65%, at least 70%, at least 75%, at least 80%, at least 85%, at least 90%, at least 95%, at least 99%, or 100% identical to SEQ ID NO: 176 or 1063, and a CDR3 having an amino acid sequence at least 65%, at least 70%, at least 75%, at least 80%, at least 85%, at least 90%, at least 95%, at least 99%, or 100% identical to SEQ ID NO: 177, 793, or 1064.

[2357] In some aspects, VH3 comprises an amino acid sequence at least 65%, at least 70%, at least 75%, at least 80%, at least 85%, at least 90%, at least 95%, at least 99%, or 100% identical to any one of SEQ ID NOs: 8, 14, 21, 22, 29, 37, 47, 54, 57, 64, 71, 78, 85, 92, 98, 104, 111, 118, 125, 129, 136, 137, 144, 151, 158, 165, 171, 178, 185, 191, 198, 204, 211, 218, 225, 231, 238, 245, 254, 258, 260, 262, 264, 266, 268, 270, 272, 275, 277, 279, 280, 282, 298, 321, 331, 626, 644, 653, 662, 670, 681, 689, 698, 706, 715, 775, 777, 784, 791, 800, 806, 813, 820, 826, 835, 842, 848, 855, 864, 871, 877, and 884.

[2358] In some aspects, VH3 comprises an amino acid sequence at least 65%, at least 70%, at least 75%, at least 80%, at least 85%, at least 90%, at least 95%, at least 99%, or 100% identical to any one of SEQ ID NOs: 8, 14, 21, 22, 29, 37, 71, 78, 151, 158, 626, 144, and 178.

[2359] In some aspects, VL4 comprises a CDR1 having an amino acid sequence at least 65%, at least 70%, at least 75%, at least 80%, at least 85%, at least 90%, at least 95%, at least 99%, or 100% identical to any one of SEQ ID NOs: 1, 9, 15, 23, 30, 41, 48, 55, 58, 65, 72, 79, 86, 93, 99, 105, 112, 119, 130, 138, 145, 152, 159, 166, 172, 179, 186, 192, 199, 205, 212, 219, 226, 232, 324, 627, 640, 650, 659, 676, 687, 695, 703, 712, 770, 778, 785, 794, 801, 807, 814, 827, 836, 849, 858, 865, 878, 1045, 1050, 1055, 1060, and 1065.

[2360] In some aspects, VL4 comprises a CDR1 having an amino acid sequence at least 65%, at least 70%, at least 75%, at least 80%, at least 85%, at least 90%, at least 95%, at least 99%, or 100% identical to any one of SEQ ID NOs: 1, 9, 15, 23, 30, 65, 72, 145, 152, 324, 627, 138, 172, 1045, 1050, 1055, 1060, and 1065.

[2361] In some aspects, VL4 comprises a CDR2 having an amino acid sequence at least 65%, at least 70%, at least 75%, at least 80%, at least 85%, at least 90%, at least 95%, at least 99%, or 100% identical to any one of SEQ ID NOs: 2, 31, 628, 641, 677, 1046, 1051, 1056, and 1061; or at least 65%, at least 70%, at least 75%, at least 80%, at least 85%, at least 90%, at least 95%, at least 99%, or 100% identical to any one of amino acid sequences AAS, GAS, LGS, GTN, GTN, SAS, SDS, DNT, EVT, DAS, DVT, RNS, DVS, EDS, DDS, KDS, VAS, WAS, YTS, EVS, NNN, SYN, and DAT.

[2362] In some aspects, VL4 comprises a CDR2 having an amino acid sequence at least 65%, at least 70%, at least 75%, at least 80%, at least 85%, at least 90%, at least 95%, at least 99%, or 100% identical to any one of SEQ ID NOs: 2, 31, 628, 1046, 1051, 1056, and 1061, or at least 65%, at least 70%, at least 75%, at least 80%, at least 85%, at least 90%, at least 95%, at least 99%, or 100% identical to any one of amino acid sequences GAS, LGS, GTN, SAS, SDS, AAS, DAS, and DNT.

[2363] In some aspects, VL4 comprises a CDR3 having an amino acid sequence at least 65%, at least 70%, at least 75%, at least 80%, at least 85%, at least 90%, at least 95%, at least 99%, or 100% identical to any one of SEQ ID NOs: 3, 10, 16, 24, 32, 38, 42, 49, 59, 66, 73, 80, 87, 94, 100, 106, 113, 120, 126, 131, 139, 146, 153, 160, 167, 173, 180, 187, 193, 200, 206, 213, 220, 227, 233, 239, 242, 246, 249, 256, 283, 285, 287, 288, 290, 292, 294, 296, 301, 304, 306, 309, 311, 313, 316, 325, 326, 329, 642, 651, 660, 668, 678, 651, 696, 704, 713, 764, 766, 768, 771, 779, 786, 792, 795, 808, 815, 821, 830, 837, 843, 850, 856, 859, 866, 872, 879, 885, and 1066.

[2364] In some aspects, VL4 comprises a CDR3 having an amino acid sequence at least 65%, at least 70%, at least 75%, at least 80%, at least 85%, at least 90%, at least 95%, at least 99%, or 100% identical to any one of SEQ ID NOs: 3, 10, 16, 24, 32, 38, 66, 73, 146, 153, 325, 326, 764, 766, 139, 856, 173, 792, and 1066.

[2365] In some aspects, VL4 comprises a CDR1 having an amino acid sequence at least 65%, at least 70%, at least 75%, at least 80%, at least 85%, at least 90%, at least 95%, at least 99%, or 100% identical to SEQ ID NO: 1 or 324, a CDR2 having an amino acid sequence at least 65%, at least 70%, at least 75%, at least 80%, at least 85%, at least 90%, at least 95%, at least 99%, or 100% identical to SEQ ID NO: 2 or an amino acid sequence at least 65%, at least 70%, at least 75%, at least 80%, at least 85%, at least 90%, at least 95%, at least 99%, or 100% identical to amino acid sequence AAS, and a CDR3 having an amino acid sequence at least 65%, at least 70%, at least 75%, at least 80%, at least 85%, at least 90%, at least 95%, at least 99%, or 100% identical to SEQ ID NO: 3.

[2366] In some aspects, VL4 comprises a CDR1 having an amino acid sequence at least 65%, at least 70%, at least 75%, at least 80%, at least 85%, at least 90%, at least 95%, at least 99%, or 100% identical to SEQ ID NO: 9 or 1055, a CDR2 having an amino acid sequence at least 65%, at least 70%, at least 75%, at least 80%, at least 85%, at least 90%, at least 95%, at least 99%, or 100% identical to SEQ ID NO: 1056 or an amino acid sequence at least 65%, at least 70%, at least 75%, at least 80%, at least 85%, at least 90%, at least 95%, at least 99%, or 100% identical to amino acid sequence GAS, and a CDR3 having an amino acid sequence at least 65%, at least 70%, at least 75%, at least 80%, at least 85%, at least 90%, at least 95%, at least 99%, or 100% identical to SEQ ID NO: 10.

[2367] In some aspects, VL4 comprises a CDR1 having an amino acid sequence at least 65%, at least 70%, at least 75%, at least 80%, at least 85%, at least 90%, at least 95%, at least 99%, or 100% identical to SEQ ID NO: 15, a CDR2 having an amino acid sequence at least 65%, at least 70%, at least 75%, at least 80%, at least 85%, at least 90%, at least 95%, at least 99%, or 100% identical to amino acid sequence LGS, and a CDR3 having an amino acid sequence at least 65%, at least 70%, at least 75%, at least 80%, at least 85%, at least 90%, at least 95%, at least 99%, or 100% identical to SEQ ID NO: 16.

[2368] In some aspects, VL4 comprises a CDR1 having an amino acid sequence at least 65%, at least 70%, at least 75%, at least 80%, at least 85%, at least 90%, at least 95%, at least 99%, or 100% identical to SEQ ID NO: 23, a CDR2 having an amino acid sequence at least 65%, at least 70%, at least 75%, at least 80%, at least 85%, at least 90%, at least 95%, at least 99%, or 100% identical to amino acid sequence GTN, and a CDR3 having an amino acid sequence at least 65%, at least 70%, at least 75%, at least 80%, at least 85%, at least 90%, at least 95%, at least 99%, or 100% identical to SEQ ID NO: 24 or 325.

[2369] In some aspects, VL4 comprises a CDR1 having an amino acid sequence at least 65%, at least 70%, at least 75%, at least 80%, at least 85%, at least 90%, at least 95%, at least 99%, or 100% identical to SEQ ID NO: 30, a CDR2 having an amino acid sequence at least 65%, at least 70%, at least 75%, at least 80%, at least 85%, at least 90%, at least 95%, at least 99%, or 100% identical to SEQ ID NO: 31 or an amino acid sequence at least 65%, at least 70%, at least 75%, at least 80%, at least 85%, at least 90%, at least 95%, at least 99%, or 100% identical to amino acid sequence SAS, and a CDR3 having an amino acid sequence at least 65%, at least 70%, at least 75%, at least 80%, at least 85%, at least 90%, at least 95%, at least 99%, or 100% identical to SEQ ID NO: 32, 38, or 326.

[2370] In some aspects, VL4 comprises a CDR1 having an amino acid sequence at least 65%, at least 70%, at least 75%, at least 80%, at least 85%, at least 90%, at least 95%, at least 99%, or 100% identical to SEQ ID NO: 65 or 627, a CDR2 having an amino acid sequence at least 65%, at least 70%, at least 75%, at least 80%, at least 85%, at least 90%, at least 95%, at least 99%, or 100% identical to SEQ ID NO: 628 or an amino acid sequence at least 65%, at least 70%, at least 75%, at least 80%, at least 85%, at least 90%, at least 95%, at least 99%, or 100% identical to amino acid sequence SDS, and a CDR3 having an amino acid sequence at least 65%, at least 70%, at least 75%, at least 80%, at least 85%, at least 90%, at least 95%, at least 99%, or 100% identical to SEQ ID NO: 66.

[2371] In some aspects, VL4 comprises a CDR1 having an amino acid sequence at least 65%, at least 70%, at least 75%, at least 80%, at least 85%, at least 90%, at least 95%, at least 99%, or 100% identical to SEQ ID NO: 72, a CDR2 having an amino acid sequence at least 65%, at least 70%, at least 75%, at least 80%, at least 85%, at least 90%, at least 95%, at least 99%, or 100% identical to amino acid sequence DNT, and a CDR3 having an amino acid sequence at least 65%, at least 70%, at least 75%, at least 80%, at least 85%, at least 90%, at least 95%, at least 99%, or 100% identical to SEQ ID NO: 73.

[2372] In some aspects, VL4 comprises a CDR1 having an amino acid sequence at least 65%, at least 70%, at least 75%, at least 80%, at least 85%, at least 90%, at least 95%, at least 99%, or 100% identical to SEQ ID NO: 145 or 1050, a CDR2 having an amino acid sequence at least 65%, at least 70%, at least 75%, at least 80%, at least 85%, at least 90%, at least 95%, at least 99%, or 100% identical to SEQ ID NO: 1051 or an amino acid sequence at least 65%, at least 70%, at least 75%, at least 80%, at least 85%, at least 90%, at least 95%, at least 99%, or 100% identical to amino acid sequence AAS, and a CDR3 having an amino acid sequence at least 65%, at least 70%, at least 75%, at least 80%, at least 85%, at least 90%, at least 95%, at least 99%, or 100% identical to SEQ ID NO: 146 or 764.

[2373] In some aspects, VL4 comprises a CDR1 having an amino acid sequence at least 65%, at least 70%, at least 75%, at least 80%, at least 85%, at least 90%, at least 95%, at least 99%, or 100% identical to SEQ ID NO: 152 or 1045, a CDR2 having an amino acid sequence at least 65%, at least 70%, at least 75%, at least 80%, at least 85%, at least 90%, at least 95%, at least 99%, or 100% identical to SEQ ID NO: 1046 or an amino acid sequence at least 65%, at least 70%, at least 75%, at least 80%, at least 85%, at least 90%, at least 95%, at least 99%, or 100% identical to amino acid sequence GAS, and a CDR3 having an amino acid sequence at least 65%, at least 70%, at least 75%, at least 80%, at least 85%, at least 90%, at least 95%, at least 99%, or 100% identical to SEQ ID NO: 153 or 766.

[2374] In some aspects, VL4 comprises a CDR1 having an amino acid sequence at least 65%, at least 70%, at least 75%, at least 80%, at least 85%, at least 90%, at least 95%, at least 99%, or 100% identical to SEQ ID NO: 138 or 1065, a CDR2 having an amino acid sequence at least 65%, at least 70%, at least 75%, at least 80%, at least 85%, at least 90%, at least 95%, at least 99%, or 100% identical to SEQ ID NO: 1061 or an amino acid sequence at least 65%, at least 70%, at least 75%, at least 80%, at least 85%, at least 90%, at least 95%, at least 99%, or 100% identical to amino acid sequence DAS, and a CDR3 having an amino acid sequence at least 65%, at least 70%, at least 75%, at least 80%, at least 85%, at least 90%, at least 95%, at least 99%, or 100% identical to SEQ ID NO: 139, 856, or 1066.

[2375] In some aspects, VL4 comprises a CDR1 having an amino acid sequence at least 65%, at least 70%, at least 75%, at least 80%, at least 85%, at least 90%, at least 95%, at least 99%, or 100% identical to SEQ ID NO: 172 or 1060, a CDR2 having an amino acid sequence at least 65%, at least 70%, at least 75%, at least 80%, at least 85%, at least 90%, at least 95%, at least 99%, or 100% identical to SEQ ID NO: 1061 or an amino acid sequence at least 65%, at least 70%, at least 75%, at least 80%, at least 85%, at least 90%, at least 95%, at least 99%, or 100% identical to amino acid sequence DAS, and a CDR3 having an amino acid sequence at least 65%, at least 70%, at least 75%, at least 80%, at least 85%, at least 90%, at least 95%, at least 99%, or 100% identical to SEQ ID NO: 173 or 792.

[2376] In some aspects, VL4 comprises an amino acid sequence at least 65%, at least 70%, at least 75%, at least 80%, at least 85%, at least 90%, at least 95%, at least 99%, or 100% identical to any one of SEQ ID NOs: 4, 11, 17, 25, 33, 39, 43, 50, 60, 67, 74, 81, 88, 95, 101, 107, 114, 121, 127, 132, 140, 147, 154, 161, 168, 174, 181, 188, 194, 201, 207, 214, 221, 228, 234, 240, 243, 247, 250, 251, 252, 255, 284, 286, 289, 291, 293, 295, 299, 300, 302, 303, 305, 307, 308, 310, 312, 314, 315, 317, 323, 639, 649, 658, 667, 675, 686, 694, 702, 711, 772, 780, 787, 796, 802, 809, 816, 822, 831, 838, 844, 851, 860, 867, 873, 880, and 988.

[2377] In some aspects, VL4 comprises an amino acid sequence at least 65%, at least 70%, at least 75%, at least 80%, at least 85%, at least 90%, at least 95%, at least 99%, or 100% identical to any one of SEQ ID NOs: 4, 11, 17, 25, 33, 39, 67, 74, 147, 154, 140, and 174.

[2378] In some aspects, VH4 comprises a CDR1 having an amino acid sequence at least 65%, at least 70%, at least 75%, at least 80%, at least 85%, at least 90%, at least 95%, at least 99%, or 100% identical to any one of SEQ ID NOs: 5, 12, 18, 26, 34, 44, 51, 61, 68, 75, 82, 89, 96, 102, 108, 115, 122, 133, 141, 148, 155, 162, 175, 182, 189, 195, 202, 208, 215, 222, 229, 235, 318, 629, 645, 654, 663, 671, 682, 690, 699, 707, 716, 773, 781, 788, 797, 803, 810, 817, 823, 832, 839, 845, 852, 861, 868, 874, 881, 1047, 1052, 1057, 1062, and 1067.

[2379] In some aspects, VH4 comprises a CDR1 having an amino acid sequence at least 65%, at least 70%, at least 75%, at least 80%, at least 85%, at least 90%, at least 95%, at least 99%, or 100% identical to any one of SEQ ID NOs: 5, 12, 18, 26, 34, 68, 75, 148, 155, 629, 141, 175, 1047, 1052, 1057, 1062, and 1067.

[2380] In some aspects, VH4 comprises a CDR2 having an amino acid sequence at least 65%, at least 70%, at least 75%, at least 80%, at least 85%, at least 90%, at least 95%, at least 99%, or 100% identical to any one of SEQ ID NOs: 6, 19, 27, 35, 45, 52, 56, 62, 69, 76, 83, 90, 109, 116, 123, 134, 142, 149, 156, 163, 169, 176, 183, 196, 209, 216, 223, 236, 273, 319, 328, 630, 646, 655, 664, 672, 683, 691, 708, 776, 782, 789, 798, 804, 811, 818, 824, 833, 840, 846, 853, 862, 869, 875, 882, 1048, 1053, 1058, 1063, and 1068.

[2381] In some aspects, VH4 comprises a CDR2 having an amino acid sequence at least 65%, at least 70%, at least 75%, at least 80%, at least 85%, at least 90%, at least 95%, at least 99%, or 100% identical to any one of SEQ ID NOs: 6, 19, 27, 35, 69, 76, 149, 156, 630, 142, 176, 1048, 1053, 1058, 1063, and 1068.

[2382] In some aspects, VH4 comprises a CDR3 having an amino acid sequence at least 65%, at least 70%, at least 75%, at least 80%, at least 85%, at least 90%, at least 95%, at least 99%, or 100% identical to any one of SEQ ID NOs: 7, 13, 20, 28, 36, 40, 46, 53, 63, 70, 77, 84, 91, 97, 103, 110, 117, 124, 128, 135, 143, 150, 157, 164, 170, 177, 184, 190, 197, 203, 210, 217, 224, 230, 237, 241, 244, 248, 253, 257, 259, 261, 263, 265, 267, 269, 271, 274, 276, 278, 281, 297, 320, 322, 327, 330, 332, 631, 647, 656, 665, 673, 684, 692, 700, 709, 717, 765, 767, 769, 774, 783, 790, 793, 799, 805, 812, 819, 825, 834, 841, 847, 854, 857, 863, 870, 876, 883, 886, 1049, 1054, 1059, 1064, and 1069.

[2383] In some aspects, VH4 comprises a CDR3 having an amino acid sequence at least 65%, at least 70%, at least 75%, at least 80%, at least 85%, at least 90%, at least 95%, at least 99%, or 100% identical to any one of SEQ ID NOs: 7, 13, 20, 28, 36, 40, 70, 77, 150, 157, 327, 332, 631, 765, 767, 143, 857, 177, 793, 1049, 1054, 1059, 1064, and 1069.

[2384] In some aspects, VH4 comprises a CDR1 having an amino acid sequence at least 65%, at least 70%, at least 75%, at least 80%, at least 85%, at least 90%, at least 95%, at least 99%, or 100% identical to SEQ ID NO: 5, a CDR2 having an amino acid sequence at least 65%, at least 70%, at least 75%, at least 80%, at least 85%, at least 90%, at least 95%, at least 99%, or 100% identical to SEQ ID NO: 6, and a CDR3 having an amino acid sequence at least 65%, at least 70%, at least 75%, at least 80%, at least 85%, at least 90%, at least 95%, at least 99%, or 100% identical to SEQ ID NO: 7.

[2385] In some aspects, VH4 comprises a CDR1 having an amino acid sequence at least 65%, at least 70%, at least 75%, at least 80%, at least 85%, at least 90%, at least 95%, at least 99%, or 100% identical to SEQ ID NO: 12 or 1057, a CDR2 having an amino acid sequence at least 65%, at least 70%, at least 75%, at least 80%, at least 85%, at least 90%, at least 95%, at least 99%, or 100% identical to SEQ ID NO: 6 or 1058, and a CDR3 having an amino acid sequence at least 65%, at least 70%, at least 75%, at least 80%, at least 85%, at least 90%, at least 95%, at least 99%, or 100% identical to SEQ ID NO: 13 or 1059.

[2386] In some aspects, VH4 comprises a CDR1 having an amino acid sequence at least 65%, at least 70%, at least 75%, at least 80%, at least 85%, at least 90%, at least 95%, at least 99%, or 100% identical to SEQ ID NO: 18, a CDR2 having an amino acid sequence at least 65%, at least 70%, at least 75%, at least 80%, at least 85%, at least 90%, at least 95%, at least 99%, or 100% identical to SEQ ID NO: 19, and a CDR3 having an amino acid sequence at least 65%, at least 70%, at least 75%, at least 80%, at least 85%, at least 90%, at least 95%, at least 99%, or 100% identical to SEQ ID NO: 20.

[2387] In some aspects, VH4 comprises a CDR1 having an amino acid sequence at least 65%, at least 70%, at least 75%, at least 80%, at least 85%, at least 90%, at least 95%, at least 99%, or 100% identical to SEQ ID NO: 26, a CDR2 having an amino acid sequence at least 65%, at least 70%, at least 75%, at least 80%, at least 85%, at least 90%, at least 95%, at least 99%, or 100% identical to SEQ ID NO: 27, and a CDR3 having an amino acid sequence at least 65%, at least 70%, at least 75%, at least 80%, at least 85%, at least 90%, at least 95%, at least 99%, or 100% identical to SEQ ID NO: 28 or 332.

[2388] In some aspects, VH4 comprises a CDR1 having an amino acid sequence at least 65%, at least 70%, at least 75%, at least 80%, at least 85%, at least 90%, at least 95%, at least 99%, or 100% identical to SEQ ID NO: 34, a CDR2 having an amino acid sequence at least 65%, at least 70%, at least 75%, at least 80%, at least 85%, at least 90%, at least 95%, at least 99%, or 100% identical to SEQ ID NO: 35, and a CDR3 having an amino acid sequence at least 65%, at least 70%, at least 75%, at least 80%, at least 85%, at least 90%, at least 95%, at least 99%, or 100% identical to SEQ ID NO: 36, 40, or 327.

[2389] In some aspects, VH4 comprises a CDR1 having an amino acid sequence at least 65%, at least 70%, at least 75%, at least 80%, at least 85%, at least 90%, at least 95%, at least 99%, or 100% identical to SEQ ID NO: 68 or 629, a CDR2 having an amino acid sequence at least 65%, at least 70%, at least 75%, at least 80%, at least 85%, at least 90%, at least 95%, at least 99%, or 100% identical to SEQ ID NO: 69 or 630, and a CDR3 having an amino acid sequence at least 65%, at least 70%, at least 75%, at least 80%, at least 85%, at least 90%, at least 95%, at least 99%, or 100% identical to SEQ ID NO: 70 or 631.

[2390] In some aspects, VH4 comprises a CDR1 having an amino acid sequence at least 65%, at least 70%, at least 75%, at least 80%, at least 85%, at least 90%, at least 95%, at least 99%, or 100% identical to SEQ ID NO: 75, a CDR2 having an amino acid sequence at least 65%, at least 70%, at least 75%, at least 80%, at least 85%, at least 90%, at least 95%, at least 99%, or 100% identical to SEQ ID NO: 76, and a CDR3 having an amino acid sequence at least 65%, at least 70%, at least 75%, at least 80%, at least 85%, at least 90%, at least 95%, at least 99%, or 100% identical to SEQ ID NO: 77.

[2391] In some aspects, VH4 comprises a CDR1 having an amino acid sequence at least 65%, at least 70%, at least 75%, at least 80%, at least 85%, at least 90%, at least 95%, at least 99%, or 100% identical to SEQ ID NO: 148 or 1052, a CDR2 having an amino acid sequence at least 65%, at least 70%, at least 75%, at least 80%, at least 85%, at least 90%, at least 95%, at least 99%, or 100% identical to SEQ ID NO: 149 or 1053, and a CDR3 having an amino acid sequence at least 65%, at least 70%, at least 75%, at least 80%, at least 85%, at least 90%, at least 95%, at least 99%, or 100% identical to SEQ ID NO: 150, 765, or 1054. In some aspects, VH4 comprises a CDR1 having an amino acid sequence at least 65%, at least 70%, at least 75%, at least 80%, at least 85%, at least 90%, at least 95%, at least 99%, or 100% identical to SEQ ID NO: 155 or 1047, a CDR2 having an amino acid sequence at least 65%, at least 70%, at least 75%, at least 80%, at least 85%, at least 90%, at least 95%, at least 99%, or 100% identical to SEQ ID NO: 156 or 1048, and a CDR3 having an amino acid sequence at least 65%, at least 70%, at least 75%, at least 80%, at least 85%, at least 90%, at least 95%, at least 99%, or 100% identical to SEQ ID NO: 157, 767, or 1049.

[2392] In some aspects, VH4 comprises a CDR1 having an amino acid sequence at least 65%, at least 70%, at least 75%, at least 80%, at least 85%, at least 90%, at least 95%, at least 99%, or 100% identical to SEQ ID NO: 141 or 1067, a CDR2 having an amino acid sequence at least 65%, at least 70%, at least 75%, at least 80%, at least 85%, at least 90%, at least 95%, at least 99%, or 100% identical to SEQ ID NO: 142 or 1068, and a CDR3 having an amino acid sequence at least 65%, at least 70%, at least 75%, at least 80%, at least 85%, at least 90%, at least 95%, at least 99%, or 100% identical to SEQ ID NO: 143, 857 or 1069.

[2393] In some aspects, VH4 comprises a CDR1 having an amino acid sequence at least 65%, at least 70%, at least 75%, at least 80%, at least 85%, at least 90%, at least 95%, at least 99%, or 100% identical to SEQ ID NO: 175 or 1062, a CDR2 having an amino acid sequence at least 65%, at least 70%, at least 75%, at least 80%, at least 85%, at least 90%, at least 95%, at least 99%, or 100% identical to SEQ ID NO: 176 or 1063, and a CDR3 having an amino acid sequence at least 65%, at least 70%, at least 75%, at least 80%, at least 85%, at least 90%, at least 95%, at least 99%, or 100% identical to SEQ ID NO: 177, 793, or 1064.

[2394] In some aspects, VH4 comprises an amino acid sequence at least 65%, at least 70%, at least 75%, at least 80%, at least 85%, at least 90%, at least 95%, at least 99%, or 100% identical to any one of SEQ ID NOs: 8, 14, 21, 22, 29, 37, 47, 54, 57, 64, 71, 78, 85, 92, 98, 104, 111, 118, 125, 129, 136, 137, 144, 151, 158, 165, 171, 178, 185, 191, 198, 204, 211, 218, 225, 231, 238, 245, 254, 258, 260, 262, 264, 266, 268, 270, 272, 275, 277, 279, 280, 282, 298, 321, 331, 626, 644, 653, 662, 670, 681, 689, 698, 706, 715, 775, 777, 784, 791, 800, 806, 813, 820, 826, 835, 842, 848, 855, 864, 871, 877, and 884.

[2395] In some aspects, VH4 comprises an amino acid sequence at least 65%, at least 70%, at least 75%, at least 80%, at least 85%, at least 90%, at least 95%, at least 99%, or 100% identical to any one of SEQ ID NOs: 8, 14, 21, 22, 29, 37, 71, 78, 151, 158, 626, 144, and 178.

[2396] In some aspects, at least one of VL1, VL2, VL3, or VL4 comprised in the antigen binding polypeptide complexes provided herein comprises (i) a complementarity determining region (CDR) 1 having an amino acid sequence that is at least 65%, at least 70%, at least 75%, at least 80%, at least 85%, at least 90%, at least 95%, at least 99%, or 100% identical to SEQ ID NO: 145 or 1050; (ii) a CDR2 having an amino acid sequence at least 65%, at least 70%, at least 75%, at least 80%, at least 85%, at least 90%, at least 95%, at least 99%, or 100% identical to SEQ ID NO: 1051 or an amino acid sequence that is at least 65%, at least 70%, at least 75%, at least 80%, at least 85%, at least 90%, at least 95%, at least 99%, or 100% identical to amino acid sequence AAS; and (iii) a CDR3 having an amino acid sequence that is at least 65%, at least 70%, at least 75%, at least 80%, at least 85%, at least 90%, at least 95%, at least 99%, or 100% identical to SEQ ID NO: 146 or 764.

[2397] In some aspects, at least one of VH1, VH2, VH3, or VH4 comprised in the antigen binding polypeptide complexes provided herein comprises (i) a complementarity determining region (CDR) 1 having an amino acid sequence that is at least 65%, at least 70%, at least 75%, at least 80%, at least 85%, at least 90%, at least 95%, at least 99%, or 100% identical to SEQ ID NO: 148 or 1052; (ii) a CDR2 having an amino acid sequence that is at least 65%, at least 70%, at least 75%, at least 80%, at least 85%, at least 90%, at least 95%, at least 99%, or 100% identical to SEQ ID NO: 149 or 1053; and (iii) a CDR3 having an amino acid sequence that is at least 65%, at least 70%, at least 75%, at least 80%, at least 85%, at least 90%, at least 95%, at least 99%, or 100% identical to SEQ ID NO: 150, 765, or 1054.

[2398] In some aspects, at least one of VL1, VL2, VL3, or VL4 comprised in the antigen binding polypeptide complexes provided herein comprises (i) a complementarity determining region (CDR) 1 having an amino acid sequence that is at least 65%, at least 70%, at least 75%, at least 80%, at least 85%, at least 90%, at least 95%, at least 99%, or 100% identical to SEQ ID NO: 145 or 1050; (ii) a CDR2 having an amino acid sequence at least 65%, at least 70%, at least 75%, at least 80%, at least 85%, at least 90%, at least 95%, at least 99%, or 100% identical to SEQ ID NO: 1051 or an amino acid sequence that is at least 65%, at least 70%, at least 75%, at least 80%, at least 85%, at least 90%, at least 95%, at least 99%, or 100% identical to amino acid sequence AAS; and (iii) a CDR3 having an amino acid sequence that is at least 65%, at least 70%, at least 75%, at least 80%, at least 85%, at least 90%, at least 95%, at least 99%, or 100% identical to SEQ ID NO: 146 or 764; and at least one of VH1, VH2, VH3, or VH4 comprised in the antigen binding polypeptide complexes provided herein comprises (iv) a complementarity determining region (CDR) 1 having an amino acid sequence that is at least 65%, at least 70%, at least 75%, at least 80%, at least 85%, at least 90%, at least 95%, at least 99%, or 100% identical to SEQ ID NO: 148 or 1052; (v) a CDR2 having an amino acid sequence that is at least 65%, at least 70%, at least 75%, at least 80%, at least 85%, at least 90%, at least 95%, at least 99%, or 100% identical to SEQ ID NO: 149 or 1053; and (vi) a CDR3 having an amino acid sequence that is at least 65%, at least 70%, at least 75%, at least 80%, at least 85%, at least 90%, at least 95%, at least 99%, or 100% identical to SEQ ID NO: 150, 765, or 1054.

[2399] In some aspects, at least one of VL1, VL2, VL3, or VL4 comprised in the antigen binding polypeptide complexes provided herein comprises an amino acid sequence that is at least 65%, at least 70%, at least 75%, at least 80%, at least 85%, at least 90%, at least 95%, at least 99%, or 100% identical to SEQ ID NO: 147.

[2400] In some aspects, at least one of VH1, VH2, VH3, or VH4 comprised in the antigen binding polypeptide complexes provided herein comprises an amino acid sequence that is at least 65%, at least 70%, at least 75%, at least 80%, at least 85%, at least 90%, at least 95%, at least 99%, or 100% identical to SEQ ID NO: 151.

[2401] In some aspects, (i) at least one of VL1, VL2, VL3, or VL4 comprised in the antigen binding polypeptide complexes provided herein comprises an amino acid sequence that is at least 65%, at least 70%, at least 75%, at least 80%, at least 85%, at least 90%, at least 95%, at least 99%, or 100% identical to SEQ ID NO: 147, and (ii) at least one of VH1, VH2, VH3, or VH4 comprised in the antigen binding polypeptide complexes provided herein comprises an amino acid sequence that is at least 65%, at least 70%, at least 75%, at least 80%, at least 85%, at least 90%, at least 95%, at least 99%, or 100% identical to SEQ ID NO: 151.

[2402] In some aspects, the antigen binding polypeptide complexes provided herein comprise a VL1 comprising (i) a complementarity determining region (CDR) 1 having an amino acid sequence that is at least 65%, at least 70%, at least 75%, at least 80%, at least 85%, at least 90%, at least 95%, at least 99%, or 100% identical to SEQ ID NO: 145 or 1050; (ii) a CDR2 having an amino acid sequence at least 65%, at least 70%, at least 75%, at least 80%, at least 85%, at least 90%, at least 95%, at least 99%, or 100% identical to SEQ ID NO: 1051 or an amino acid sequence that is at least 65%, at least 70%, at least 75%, at least 80%, at least 85%, at least 90%, at least 95%, at least 99%, or 100% identical to amino acid sequence AAS; and (iii) a CDR3 having an amino acid sequence that is at least 65%, at least 70%, at least 75%, at least 80%, at least 85%, at least 90%, at least 95%, at least 99%, or 100% identical to SEQ ID NO: 146 or 764; a VH1 comprising (iv) a complementarity determining region (CDR) 1 having an amino acid sequence that is at least 65%, at least 70%, at least 75%, at least 80%, at least 85%, at least 90%, at least 95%, at least 99%, or 100% identical to SEQ ID NO: 148 or 1052; (v) a CDR2 having an amino acid sequence that is at least 65%, at least 70%, at least 75%, at least 80%, at least 85%, at least 90%, at least 95%, at least 99%, or 100% identical to SEQ ID NO: 149 or 1053; and (vi) a CDR3 having an amino acid sequence that is at least 65%, at least 70%, at least 75%, at least 80%, at least 85%, at least 90%, at least 95%, at least 99%, or 100% identical to SEQ ID NO: 150, 765, or 1054; a VL2 comprising (vii) a complementarity determining region (CDR) 1 having an amino acid sequence that is at least 65%, at least 70%, at least 75%, at least 80%, at least 85%, at least 90%, at least 95%, at least 99%, or 100% identical to any one of SEQ ID NOs: 1, 9, 15, 23, 30, 41, 48, 55, 58, 65, 72, 79, 86, 93, 99, 105, 112, 119, 130, 138, 145, 152, 159, 166, 172, 179, 186, 192, 199, 205, 212, 219, 226, 232, 324, 627, 640, 650, 659, 676, 687, 695, 703, 712, 770, 778, 785, 794, 801, 807, 814, 827, 836, 849, 858, 865, 878, 1045, 1050, 1055, 1060, and 1065; (viii) a CDR2 having an amino acid sequence at least 65%, at least 70%, at least 75%, at least 80%, at least 85%, at least 90%, at least 95%, at least 99%, or 100% identical to any one of SEQ ID NOs: 2, 31, 628, 641, 677, 1046, 1051, 1056, and 1061; or at least 65%, at least 70%, at least 75%, at least 80%, at least 85%, at least 90%, at least 95%, at least 99%, or 100% identical to any one of amino acid sequences AAS, GAS, LGS, GTN, GTN, SAS, SDS, DNT, EVT, DAS, DVT, RNS, DVS, EDS, DDS, KDS, VAS, WAS, YTS, EVS, NNN, SYN, and DAT; and (ix) a CDR3 having an amino acid sequence at least 65%, at least 70%, at least 75%, at least 80%, at least 85%, at least 90%, at least 95%, at least 99%, or 100% identical to any one of SEQ ID NOs: 3, 10, 16, 24, 32, 38, 42, 49, 59, 66, 73, 80, 87, 94, 100, 106, 113, 120, 126, 131, 139, 146, 153, 160, 167, 173, 180, 187, 193, 200, 206, 213, 220, 227, 233, 239, 242, 246, 249, 256, 283, 285, 287, 288, 290, 292, 294, 296, 301, 304, 306, 309, 311, 313, 316, 325, 326, 329, 642, 651, 660, 668, 678, 651, 696, 704, 713, 764, 766, 768, 771, 779, 786, 792, 795, 808, 815, 821, 830, 837, 843, 850, 856, 859, 866, 872, 879, 885, and 1066; a VH2 comprising (x) a CDR1 having an amino acid sequence at least 65%, at least 70%, at least 75%, at least 80%, at least 85%, at least 90%, at least 95%, at least 99%, or 100% identical to any one of SEQ ID NOs: 5, 12, 18, 26, 34, 44, 51, 61, 68, 75, 82, 89, 96, 102, 108, 115, 122, 133, 141, 148, 155, 162, 175, 182, 189, 195, 202, 208, 215, 222, 229, 235, 318, 629, 645, 654, 663, 671, 682, 690, 699, 707, 716, 773, 781, 788, 797, 803, 810, 817, 823, 832, 839, 845, 852, 861, 868, 874, 881, 1047, 1052, 1057, 1062, and 1067; (xi) a CDR2 having an amino acid sequence at least 65%, at least 70%, at least 75%, at least 80%, at least 85%, at least 90%, at least 95%, at least 99%, or 100% identical to any one of SEQ ID NOs: 6, 19, 27, 35, 45, 52, 56, 62, 69, 76, 83, 90, 109, 116, 123, 134, 142, 149, 156, 163, 169, 176, 183, 196, 209, 216, 223, 236, 273, 319, 328, 630, 646, 655, 664, 672, 683, 691, 708, 776, 782, 789, 798, 804, 811, 818, 824, 833, 840, 846, 853, 862, 869, 875, 882, 1048, 1053, 1058, 1063, and 1068; and (xii) a CDR3 having an amino acid sequence at least 65%, at least 70%, at least 75%, at least 80%, at least 85%, at least 90%, at least 95%, at least 99%, or 100% identical to any one of SEQ ID NOs: 7, 13, 20, 28, 36, 40, 46, 53, 63, 70, 77, 84, 91, 97, 103, 110, 117, 124, 128, 135, 143, 150, 157, 164, 170, 177, 184, 190, 197, 203, 210, 217, 224, 230, 237, 241, 244, 248, 253, 257, 259, 261, 263, 265, 267, 269, 271, 274, 276, 278, 281, 297, 320, 322, 327, 330, 332, 631, 647, 656, 665, 673, 684, 692, 700, 709, 717, 765, 767, 769, 774, 783, 790, 793, 799, 805, 812, 819, 825, 834, 841, 847, 854, 857, 863, 870, 876, 883, 886, 1049, 1054, 1059, 1064, and 1069; a VL3 comprising (xiii) a complementarity determining region (CDR) 1 having an amino acid sequence that is at least 65%, at least 70%, at least 75%, at least 80%, at least 85%, at least 90%, at least 95%, at least 99%, or 100% identical to any one of SEQ ID NOs: 1, 9, 15, 23, 30, 41, 48, 55, 58, 65, 72, 79, 86, 93, 99, 105, 112, 119, 130, 138, 145, 152, 159, 166, 172, 179, 186, 192, 199, 205, 212, 219, 226, 232, 324, 627, 640, 650, 659, 676, 687, 695, 703, 712, 770, 778, 785, 794, 801, 807, 814, 827, 836, 849, 858, 865, 878, 1045, 1050, 1055, 1060, and 1065; (xiv) a CDR2 having an amino acid sequence at least 65%, at least 70%, at least 75%, at least 80%, at least 85%, at least 90%, at least 95%, at least 99%, or 100% identical to any one of SEQ ID NOs: 2, 31, 628, 641, 677, 1046, 1051, 1056, and 1061; or at least 65%, at least 70%, at least 75%, at least 80%, at least 85%, at least 90%, at least 95%, at least 99%, or 100% identical to any one of amino acid sequences AAS, GAS, LGS, GTN, GTN, SAS, SDS, DNT, EVT, DAS, DVT, RNS, DVS, EDS, DDS, KDS, VAS, WAS, YTS, EVS, NNN, SYN, and DAT; and (xv) a CDR3 having an amino acid sequence at least 65%, at least 70%, at least 75%, at least 80%, at least 85%, at least 90%, at least 95%, at least 99%, or 100% identical to any one of SEQ ID NOs: 3, 10, 16, 24, 32, 38, 42, 49, 59, 66, 73, 80, 87, 94, 100, 106, 113, 120, 126, 131, 139, 146, 153, 160, 167, 173, 180, 187, 193, 200, 206, 213, 220, 227, 233, 239, 242, 246, 249, 256, 283, 285, 287, 288, 290, 292, 294, 296, 301, 304, 306, 309, 311, 313, 316, 325, 326, 329, 642, 651, 660, 668, 678, 651, 696, 704, 713, 764, 766, 768, 771, 779, 786, 792, 795, 808, 815, 821, 830, 837, 843, 850, 856, 859, 866, 872, 879, 885, and 1066; a VH3 comprising (xvi) a CDR1 having an amino acid sequence at least 65%, at least 70%, at least 75%, at least 80%, at least 85%, at least 90%, at least 95%, at least 99%, or 100% identical to any one of SEQ ID NOs: 5, 12, 18, 26, 34, 44, 51, 61, 68, 75, 82, 89, 96, 102, 108, 115, 122, 133, 141, 148, 155, 162, 175, 182, 189, 195, 202, 208, 215, 222, 229, 235, 318, 629, 645, 654, 663, 671, 682, 690, 699, 707, 716, 773, 781, 788, 797, 803, 810, 817, 823, 832, 839, 845, 852, 861, 868, 874, 881, 1047, 1052, 1057, 1062, and 1067; (xvii) a CDR2 having an amino acid sequence at least 65%, at least 70%, at least 75%, at least 80%, at least 85%, at least 90%, at least 95%, at least 99%, or 100% identical to any one of SEQ ID NOs: 6, 19, 27, 35, 45, 52, 56, 62, 69, 76, 83, 90, 109, 116, 123, 134, 142, 149, 156, 163, 169, 176, 183, 196, 209, 216, 223, 236, 273, 319, 328, 630, 646, 655, 664, 672, 683, 691, 708, 776, 782, 789, 798, 804, 811, 818, 824, 833, 840, 846, 853, 862, 869, 875, 882, 1048, 1053, 1058, 1063, and 1068; and (xviii) a CDR3 having an amino acid sequence at least 65%, at least 70%, at least 75%, at least 80%, at least 85%, at least 90%, at least 95%, at least 99%, or 100% identical to any one of SEQ ID NOs: 7, 13, 20, 28, 36, 40, 46, 53, 63, 70, 77, 84, 91, 97, 103, 110, 117, 124, 128, 135, 143, 150, 157, 164, 170, 177, 184, 190, 197, 203, 210, 217, 224, 230, 237, 241, 244, 248, 253, 257, 259, 261, 263, 265, 267, 269, 271, 274, 276, 278, 281, 297, 320, 322, 327, 330, 332, 631, 647, 656, 665, 673, 684, 692, 700, 709, 717, 765, 767, 769, 774, 783, 790, 793, 799, 805, 812, 819, 825, 834, 841, 847, 854, 857, 863, 870, 876, 883, 886, 1049, 1054, 1059, 1064, and 1069; a VL4 comprising (xix) a complementarity determining region (CDR) 1 having an amino acid sequence that is at least 65%, at least 70%, at least 75%, at least 80%, at least 85%, at least 90%, at least 95%, at least 99%, or 100% identical to any one of SEQ ID NOs: 1, 9, 15, 23, 30, 41, 48, 55, 58, 65, 72, 79, 86, 93, 99, 105, 112, 119, 130, 138, 145, 152, 159, 166, 172, 179, 186, 192, 199, 205, 212, 219, 226, 232, 324, 627, 640, 650, 659, 676, 687, 695, 703, 712, 770, 778, 785, 794, 801, 807, 814, 827, 836, 849, 858, 865, 878, 1045, 1050, 1055, 1060, and 1065; (xx) a CDR2 having an amino acid sequence at least 65%, at least 70%, at least 75%, at least 80%, at least 85%, at least 90%, at least 95%, at least 99%, or 100% identical to any one of SEQ ID NOs: 2, 31, 628, 641, 677, 1046, 1051, 1056, and 1061; or at least 65%, at least 70%, at least 75%, at least 80%, at least 85%, at least 90%, at least 95%, at least 99%, or 100% identical to any one of amino acid sequences AAS, GAS, LGS, GTN, GTN, SAS, SDS, DNT, EVT, DAS, DVT, RNS, DVS, EDS, DDS, KDS, VAS, WAS, YTS, EVS, NNN, SYN, and DAT; and (xxi) a CDR3 having an amino acid sequence at least 65%, at least 70%, at least 75%, at least 80%, at least 85%, at least 90%, at least 95%, at least 99%, or 100% identical to any one of SEQ ID NOs: 3, 10, 16, 24, 32, 38, 42, 49, 59, 66, 73, 80, 87, 94, 100, 106, 113, 120, 126, 131, 139, 146, 153, 160, 167, 173, 180, 187, 193, 200, 206, 213, 220, 227, 233, 239, 242, 246, 249, 256, 283, 285, 287, 288, 290, 292, 294, 296, 301, 304, 306, 309, 311, 313, 316, 325, 326, 329, 642, 651, 660, 668, 678, 651, 696, 704, 713, 764, 766, 768, 771, 779, 786, 792, 795, 808, 815, 821, 830, 837, 843, 850, 856, 859, 866, 872, 879, 885, and 1066; and a VH4 comprising (xxii) a CDR1 having an amino acid sequence at least 65%, at least 70%, at least 75%, at least 80%, at least 85%, at least 90%, at least 95%, at least 99%, or 100% identical to any one of SEQ ID NOs: 5, 12, 18, 26, 34, 44, 51, 61, 68, 75, 82, 89, 96, 102, 108, 115, 122, 133, 141, 148, 155, 162, 175, 182, 189, 195, 202, 208, 215, 222, 229, 235, 318, 629, 645, 654, 663, 671, 682, 690, 699, 707, 716, 773, 781, 788, 797, 803, 810, 817, 823, 832, 839, 845, 852, 861, 868, 874, 881, 1047, 1052, 1057, 1062, and 1067; (xxiii) a CDR2 having an amino acid sequence at least 65%, at least 70%, at least 75%, at least 80%, at least 85%, at least 90%, at least 95%, at least 99%, or 100% identical to any one of SEQ ID NOs: 6, 19, 27, 35, 45, 52, 56, 62, 69, 76, 83, 90, 109, 116, 123, 134, 142, 149, 156, 163, 169, 176, 183, 196, 209, 216, 223, 236, 273, 319, 328, 630, 646, 655, 664, 672, 683, 691, 708, 776, 782, 789, 798, 804, 811, 818, 824, 833, 840, 846, 853, 862, 869, 875, 882, 1048, 1053, 1058, 1063, and 1068; and (xxiv) a CDR3 having an amino acid sequence at least 65%, at least 70%, at least 75%, at least 80%, at least 85%, at least 90%, at least 95%, at least 99%, or 100% identical to any one of SEQ ID NOs: 7, 13, 20, 28, 36, 40, 46, 53, 63, 70, 77, 84, 91, 97, 103, 110, 117, 124, 128, 135, 143, 150, 157, 164, 170, 177, 184, 190, 197, 203, 210, 217, 224, 230, 237, 241, 244, 248, 253, 257, 259, 261, 263, 265, 267, 269, 271, 274, 276, 278, 281, 297, 320, 322, 327, 330, 332, 631, 647, 656, 665, 673, 684, 692, 700, 709, 717, 765, 767, 769, 774, 783, 790, 793, 799, 805, 812, 819, 825, 834, 841, 847, 854, 857, 863, 870, 876, 883, 886, 1049, 1054, 1059, 1064, and 1069.

[2403] In some aspects, the antigen binding polypeptide complexes provided herein comprise (i) a VL1 comprising an amino acid sequence that is at least 65%, at least 70%, at least 75%, at least 80%, at least 85%, at least 90%, at least 95%, at least 99%, or 100% identical to SEQ ID NO: 147; (ii) a VH1 comprising an amino acid sequence that is at least 65%, at least 70%, at least 75%, at least 80%, at least 85%, at least 90%, at least 95%, at least 99%, or 100% identical to SEQ ID NO: 151; (iii) a VL2 comprising an amino acid sequence that is at least 65%, at least 70%, at least 75%, at least 80%, at least 85%, at least 90%, at least 95%, at least 99%, or 100% identical to any one of SEQ ID NOs: 4, 11, 17, 25, 33, 39, 43, 50, 60, 67, 74, 81, 88, 95, 101, 107, 114, 121, 127, 132, 140, 147, 154, 161, 168, 174, 181, 188, 194, 201, 207, 214, 221, 228, 234, 240, 243, 247, 250, 251, 252, 255, 284, 286, 289, 291, 293, 295, 299, 300, 302, 303, 305, 307, 308, 310, 312, 314, 315, 317, 323, 639, 649, 658, 667, 675, 686, 694, 702, 711, 772, 780, 787, 796, 802, 809, 816, 822, 831, 838, 844, 851, 860, 867, 873, 880, and 988; (iv) a VH2 comprising an amino acid sequence that is at least 65%, at least 70%, at least 75%, at least 80%, at least 85%, at least 90%, at least 95%, at least 99%, or 100% identical to any one of SEQ ID NOs: 8, 14, 21, 22, 29, 37, 47, 54, 57, 64, 71, 78, 85, 92, 98, 104, 111, 118, 125, 129, 136, 137, 144, 151, 158, 165, 171, 178, 185, 191, 198, 204, 211, 218, 225, 231, 238, 245, 254, 258, 260, 262, 264, 266, 268, 270, 272, 275, 277, 279, 280, 282, 298, 321, 331, 626, 644, 653, 662, 670, 681, 689, 698, 706, 715, 775, 777, 784, 791, 800, 806, 813, 820, 826, 835, 842, 848, 855, 864, 871, 877, and 884; (v) a VL3 comprising an amino acid sequence that is at least 65%, at least 70%, at least 75%, at least 80%, at least 85%, at least 90%, at least 95%, at least 99%, or 100% identical to any one of SEQ ID NOs: 4, 11, 17, 25, 33, 39, 43, 50, 60, 67, 74, 81, 88, 95, 101, 107, 114, 121, 127, 132, 140, 147, 154, 161, 168, 174, 181, 188, 194, 201, 207, 214, 221, 228, 234, 240, 243, 247, 250, 251, 252, 255, 284, 286, 289, 291, 293, 295, 299, 300, 302, 303, 305, 307, 308, 310, 312, 314, 315, 317, 323, 639, 649, 658, 667, 675, 686, 694, 702, 711, 772, 780, 787, 796, 802, 809, 816, 822, 831, 838, 844, 851, 860, 867, 873, 880, and 988; (vi) a VH3 comprising an amino acid sequence that is at least 65%, at least 70%, at least 75%, at least 80%, at least 85%, at least 90%, at least 95%, at least 99%, or 100% identical to any one of SEQ ID NOs: 8, 14, 21, 22, 29, 37, 47, 54, 57, 64, 71, 78, 85, 92, 98, 104, 111, 118, 125, 129, 136, 137, 144, 151, 158, 165, 171, 178, 185, 191, 198, 204, 211, 218, 225, 231, 238, 245, 254, 258, 260, 262, 264, 266, 268, 270, 272, 275, 277, 279, 280, 282, 298, 321, 331, 626, 644, 653, 662, 670, 681, 689, 698, 706, 715, 775, 777, 784, 791, 800, 806, 813, 820, 826, 835, 842, 848, 855, 864, 871, 877, and 884; (vii) a VL4 comprising an amino acid sequence that is at least 65%, at least 70%, at least 75%, at least 80%, at least 85%, at least 90%, at least 95%, at least 99%, or 100% identical to any one of SEQ ID NOs: 4, 11, 17, 25, 33, 39, 43, 50, 60, 67, 74, 81, 88, 95, 101, 107, 114, 121, 127, 132, 140, 147, 154, 161, 168, 174, 181, 188, 194, 201, 207, 214, 221, 228, 234, 240, 243, 247, 250, 251, 252, 255, 284, 286, 289, 291, 293, 295, 299, 300, 302, 303, 305, 307, 308, 310, 312, 314, 315, 317, 323, 639, 649, 658, 667, 675, 686, 694, 702, 711, 772, 780, 787, 796, 802, 809, 816, 822, 831, 838, 844, 851, 860, 867, 873, 880, and 988; and (viii) a VH4 comprising an amino acid sequence that is at least 65%, at least 70%, at least 75%, at least 80%, at least 85%, at least 90%, at least 95%, at least 99%, or 100% identical to any one of SEQ ID NOs: 8, 14, 21, 22, 29, 37, 47, 54, 57, 64, 71, 78, 85, 92, 98, 104, 111, 118, 125, 129, 136, 137, 144, 151, 158, 165, 171, 178, 185, 191, 198, 204, 211, 218, 225, 231, 238, 245, 254, 258, 260, 262, 264, 266, 268, 270, 272, 275, 277, 279, 280, 282, 298, 321, 331, 626, 644, 653, 662, 670, 681, 689, 698, 706, 715, 775, 777, 784, 791, 800, 806, 813, 820, 826, 835, 842, 848, 855, 864, 871, 877, and 884.

[2404] In some aspects, the antigen binding polypeptide complexes provided herein comprise a VL1 comprising (i) a complementarity determining region (CDR) 1 having an amino acid sequence that is at least 65%, at least 70%, at least 75%, at least 80%, at least 85%, at least 90%, at least 95%, at least 99%, or 100% identical to SEQ ID NO: 145 or 1050; (ii) a CDR2 having an amino acid sequence at least 65%, at least 70%, at least 75%, at least 80%, at least 85%, at least 90%, at least 95%, at least 99%, or 100% identical to SEQ ID NO: 1051 or an amino acid sequence that is at least 65%, at least 70%, at least 75%, at least 80%, at least 85%, at least 90%, at least 95%, at least 99%, or 100% identical to amino acid sequence AAS; and (iii) a CDR3 having an amino acid sequence that is at least 65%, at least 70%, at least 75%, at least 80%, at least 85%, at least 90%, at least 95%, at least 99%, or 100% identical to SEQ ID NO: 146 or 764; a VH1 comprising (iv) a complementarity determining region (CDR) 1 having an amino acid sequence that is at least 65%, at least 70%, at least 75%, at least 80%, at least 85%, at least 90%, at least 95%, at least 99%, or 100% identical to SEQ ID NO: 148 or 1052; (v) a CDR2 having an amino acid sequence that is at least 65%, at least 70%, at least 75%, at least 80%, at least 85%, at least 90%, at least 95%, at least 99%, or 100% identical to SEQ ID NO: 149 or 1053; and (vi) a CDR3 having an amino acid sequence that is at least 65%, at least 70%, at least 75%, at least 80%, at least 85%, at least 90%, at least 95%, at least 99%, or 100% identical to SEQ ID NO: 150, 765, or 1054; a VL2 comprising (vii) a complementarity determining region (CDR) 1 having an amino acid sequence that is at least 65%, at least 70%, at least 75%, at least 80%, at least 85%, at least 90%, at least 95%, at least 99%, or 100% identical to any one of SEQ ID NOs: 1, 9, 15, 23, 30, 65, 72, 145, 152, 324, 627, 138, 172, 1045, 1050, 1055, 1060, and 1065; (viii) a CDR2 having an amino acid sequence at least 65%, at least 70%, at least 75%, at least 80%, at least 85%, at least 90%, at least 95%, at least 99%, or 100% identical to any one of SEQ ID NOs: 2, 31, 628, 1046, 1051, 1056, and 1061, or at least 65%, at least 70%, at least 75%, at least 80%, at least 85%, at least 90%, at least 95%, at least 99%, or 100% identical to any one of amino acid sequences GAS, LGS, GTN, SAS, SDS, AAS, DAS, and DNT; and (ix) a CDR3 having an amino acid sequence at least 65%, at least 70%, at least 75%, at least 80%, at least 85%, at least 90%, at least 95%, at least 99%, or 100% identical to any one of SEQ ID NOs: 3, 10, 16, 24, 32, 38, 66, 73, 146, 153, 325, 326, 764, 766, 139, 856, 173, 792, and 1066; a VH2 comprising (x) a CDR1 having an amino acid sequence at least 65%, at least 70%, at least 75%, at least 80%, at least 85%, at least 90%, at least 95%, at least 99%, or 100% identical to any one of SEQ ID NOs: 5, 12, 18, 26, 34, 68, 75, 148, 155, 629, 141, 175, 1047, 1052, 1057, 1062, and 1067; (xi) a CDR2 having an amino acid sequence at least 65%, at least 70%, at least 75%, at least 80%, at least 85%, at least 90%, at least 95%, at least 99%, or 100% identical to any one of SEQ ID NOs: 6, 19, 27, 35, 69, 76, 149, 156, 630, 142, 176, 1048, 1053, 1058, 1063, and 1068; and (xii) a CDR3 having an amino acid sequence at least 65%, at least 70%, at least 75%, at least 80%, at least 85%, at least 90%, at least 95%, at least 99%, or 100% identical to any one of SEQ ID NOs: 7, 13, 20, 28, 36, 40, 70, 77, 327, 150, 157, 332, 631, 765, 767, 143, 857, 177, 793, 1049, 1054, 1059, 1064, and 1069; a VL3 comprising (xiii) a complementarity determining region (CDR) 1 having an amino acid sequence that is at least 65%, at least 70%, at least 75%, at least 80%, at least 85%, at least 90%, at least 95%, at least 99%, or 100% identical to any one of SEQ ID NOs: 1, 9, 15, 23, 30, 65, 72, 145, 152, 324, 627, 138, 172, 1045, 1050, 1055, 1060, and 1065; (xiv) a CDR2 having an amino acid sequence at least 65%, at least 70%, at least 75%, at least 80%, at least 85%, at least 90%, at least 95%, at least 99%, or 100% identical to any one of SEQ ID NOs: 2, 31, 628, 1046, 1051, 1056, and 1061, or at least 65%, at least 70%, at least 75%, at least 80%, at least 85%, at least 90%, at least 95%, at least 99%, or 100% identical to any one of amino acid sequences GAS, LGS, GTN, SAS, SDS, AAS, DAS, and DNT; and (xv) a CDR3 having an amino acid sequence at least 65%, at least 70%, at least 75%, at least 80%, at least 85%, at least 90%, at least 95%, at least 99%, or 100% identical to any one of SEQ ID NOs: 3, 10, 16, 24, 32, 38, 66, 73, 146, 153, 325, 326, 764, 766, 139, 856, 173, 792, and 1066; a VH3 comprising (xvi) a CDR1 having an amino acid sequence at least 65%, at least 70%, at least 75%, at least 80%, at least 85%, at least 90%, at least 95%, at least 99%, or 100% identical to any one of SEQ ID NOs: 5, 12, 18, 26, 34, 68, 75, 148, 155, 629, 141, 175, 1047, 1052, 1057, 1062, and 1067; (xvii) a CDR2 having an amino acid sequence at least 65%, at least 70%, at least 75%, at least 80%, at least 85%, at least 90%, at least 95%, at least 99%, or 100% identical to any one of SEQ ID NOs: 6, 19, 27, 35, 69, 76, 149, 156, 630, 142, 176, 1048, 1053, 1058, 1063, and 1068; and (xviii) a CDR3 having an amino acid sequence at least 65%, at least 70%, at least 75%, at least 80%, at least 85%, at least 90%, at least 95%, at least 99%, or 100% identical to any one of SEQ ID NOs: 7, 13, 20, 28, 36, 40, 70, 77, 327, 150, 157, 332, 631, 765, 767, 143, 857, 177, 793, 1049, 1054, 1059, 1064, and 1069; a VL4 comprising (xix) a complementarity determining region (CDR) 1 having an amino acid sequence that is at least 65%, at least 70%, at least 75%, at least 80%, at least 85%, at least 90%, at least 95%, at least 99%, or 100% identical to any one of SEQ ID NOs: 1, 9, 15, 23, 30, 65, 72, 145, 152, 324, 627, 138, 172, 1045, 1050, 1055, 1060, and 1065; (xx) a CDR2 having an amino acid sequence at least 65%, at least 70%, at least 75%, at least 80%, at least 85%, at least 90%, at least 95%, at least 99%, or 100% identical to any one of SEQ ID NOs: 2, 31, 628, 1046, 1051, 1056, and 1061, or at least 65%, at least 70%, at least 75%, at least 80%, at least 85%, at least 90%, at least 95%, at least 99%, or 100% identical to any one of amino acid sequences GAS, LGS, GTN, SAS, SDS, AAS, DAS, and DNT; and (xxi) a CDR3 having an amino acid sequence at least 65%, at least 70%, at least 75%, at least 80%, at least 85%, at least 90%, at least 95%, at least 99%, or 100% identical to any one of SEQ ID NOs: 3, 10, 16, 24, 32, 38, 66, 73, 146, 153, 325, 326, 764, 766, 139, 856, 173, 792, and 1066; and a VH4 comprising (xxii) a CDR1 having an amino acid sequence at least 65%, at least 70%, at least 75%, at least 80%, at least 85%, at least 90%, at least 95%, at least 99%, or 100% identical to any one of SEQ ID NOs: 5, 12, 18, 26, 34, 68, 75, 148, 155, 629, 141, 175, 1047, 1052, 1057, 1062, and 1067; (xxiii) a CDR2 having an amino acid sequence at least 65%, at least 70%, at least 75%, at least 80%, at least 85%, at least 90%, at least 95%, at least 99%, or 100% identical to any one of SEQ ID NOs: 6, 19, 27, 35, 69, 76, 149, 156, 630, 142, 176, 1048, 1053, 1058, 1063, and 1068; and (xxiv) a CDR3 having an amino acid sequence at least 65%, at least 70%, at least 75%, at least 80%, at least 85%, at least 90%, at least 95%, at least 99%, or 100% identical to any one of SEQ ID NOs: 7, 13, 20, 28, 36, 40, 70, 77, 327, 150, 157, 332, 631, 765, 767, 143, 857, 177, 793, 1049, 1054, 1059, 1064, and 1069.

[2405] In some aspects, the antigen binding polypeptide complexes provided herein comprise (i) a VL1 comprising an amino acid sequence that is at least 65%, at least 70%, at least 75%, at least 80%, at least 85%, at least 90%, at least 95%, at least 99%, or 100% identical to SEQ ID NO: 147; (ii) a VH1 comprising an amino acid sequence that is at least 65%, at least 70%, at least 75%, at least 80%, at least 85%, at least 90%, at least 95%, at least 99%, or 100% identical to SEQ ID NO: 151; (iii) a VL2 comprising an amino acid sequence that is at least 65%, at least 70%, at least 75%, at least 80%, at least 85%, at least 90%, at least 95%, at least 99%, or 100% identical to any one of SEQ ID NOs: 4, 11, 17, 25, 33, 39, 67, 74, 147, 154, 140, and 174; (iv) a VH2 comprising an amino acid sequence that is at least 65%, at least 70%, at least 75%, at least 80%, at least 85%, at least 90%, at least 95%, at least 99%, or 100% identical to any one of SEQ ID NOs: 8, 14, 21, 22, 29, 37, 71, 78, 151, 158, 626, 144, and 178; (v) a VL3 comprising an amino acid sequence that is at least 65%, at least 70%, at least 75%, at least 80%, at least 85%, at least 90%, at least 95%, at least 99%, or 100% identical to any one of SEQ ID NOs: 4, 11, 17, 25, 33, 39, 67, 74, 147, 154, 140, and 174; (vi) a VH3 comprising an amino acid sequence that is at least 65%, at least 70%, at least 75%, at least 80%, at least 85%, at least 90%, at least 95%, at least 99%, or 100% identical to any one of SEQ ID NOs: 8, 14, 21, 22, 29, 37, 71, 78, 151, 158, 626, 144, and 178; (vii) a VL4 comprising an amino acid sequence that is at least 65%, at least 70%, at least 75%, at least 80%, at least 85%, at least 90%, at least 95%, at least 99%, or 100% identical to any one of SEQ ID NOs: 4, 11, 17, 25, 33, 39, 67, 74, 147, 154, 140, and 174; and (viii) a VH4 comprising an amino acid sequence that is at least 65%, at least 70%, at least 75%, at least 80%, at least 85%, at least 90%, at least 95%, at least 99%, or 100% identical to any one of SEQ ID NOs: 8, 14, 21, 22, 29, 37, 71, 78, 151, 158, 626, 144, and 178.

[2406] In some aspects, the antigen binding polypeptide complexes provided herein comprise a VL1 comprising (i) a complementarity determining region (CDR) 1 having an amino acid sequence that is at least 65%, at least 70%, at least 75%, at least 80%, at least 85%, at least 90%, at least 95%, at least 99%, or 100% identical to SEQ ID NO: 145 or 1050; (ii) a CDR2 having an amino acid sequence at least 65%, at least 70%, at least 75%, at least 80%, at least 85%, at least 90%, at least 95%, at least 99%, or 100% identical to SEQ ID NO: 1051 or an amino acid sequence that is at least 65%, at least 70%, at least 75%, at least 80%, at least 85%, at least 90%, at least 95%, at least 99%, or 100% identical to amino acid sequence AAS; and (iii) a CDR3 having an amino acid sequence that is at least 65%, at least 70%, at least 75%, at least 80%, at least 85%, at least 90%, at least 95%, at least 99%, or 100% identical to SEQ ID NO: 146 or 764; a VH1 comprising (iv) a complementarity determining region (CDR) 1 having an amino acid sequence that is at least 65%, at least 70%, at least 75%, at least 80%, at least 85%, at least 90%, at least 95%, at least 99%, or 100% identical to SEQ ID NO: 148 or 1052; (v) a CDR2 having an amino acid sequence that is at least 65%, at least 70%, at least 75%, at least 80%, at least 85%, at least 90%, at least 95%, at least 99%, or 100% identical to SEQ ID NO: 149 or 1053; and (vi) a CDR3 having an amino acid sequence that is at least 65%, at least 70%, at least 75%, at least 80%, at least 85%, at least 90%, at least 95%, at least 99%, or 100% identical to SEQ ID NO: 150, 765, or 1054; a VL2 comprising (vii) a complementarity determining region (CDR) 1 having an amino acid sequence that is at least 65%, at least 70%, at least 75%, at least 80%, at least 85%, at least 90%, at least 95%, at least 99%, or 100% identical to SEQ ID NO: 138, 172, 1060 or 1065; (viii) a CDR2 having an amino acid sequence at least 65%, at least 70%, at least 75%, at least 80%, at least 85%, at least 90%, at least 95%, at least 99%, or 100% identical to SEQ ID NO: 1061 or an amino acid sequence at least 65%, at least 70%, at least 75%, at least 80%, at least 85%, at least 90%, at least 95%, at least 99%, or 100% identical to amino acid sequence DAS; and (ix) a CDR3 having an amino acid sequence at least 65%, at least 70%, at least 75%, at least 80%, at least 85%, at least 90%, at least 95%, at least 99%, or 100% identical to SEQ ID NO: 139, 856, 173, 792, or 1066; a VH2 comprising (x) a CDR1 having an amino acid sequence at least 65%, at least 70%, at least 75%, at least 80%, at least 85%, at least 90%, at least 95%, at least 99%, or 100% identical to SEQ ID NO: 141, 175 1062, or 1067; (xi) a CDR2 having an amino acid sequence at least 65%, at least 70%, at least 75%, at least 80%, at least 85%, at least 90%, at least 95%, at least 99%, or 100% identical to SEQ ID NO: 142, 176, 1063, or 1068; and (xii) a CDR3 having an amino acid sequence at least 65%, at least 70%, at least 75%, at least 80%, at least 85%, at least 90%, at least 95%, at least 99%, or 100% identical to SEQ ID NO: 143, 857, 177, 793, 1064, or 1069; a VL3 comprising (xiii) a complementarity determining region (CDR) 1 having an amino acid sequence that is at least 65%, at least 70%, at least 75%, at least 80%, at least 85%, at least 90%, at least 95%, at least 99%, or 100% identical to SEQ ID NO: 138, 172, 1060 or 1065; (xiv) a CDR2 having an amino acid sequence at least 65%, at least 70%, at least 75%, at least 80%, at least 85%, at least 90%, at least 95%, at least 99%, or 100% identical to SEQ ID NO: 1061 or an amino acid sequence at least 65%, at least 70%, at least 75%, at least 80%, at least 85%, at least 90%, at least 95%, at least 99%, or 100% identical to amino acid sequence DAS; and (xv) a CDR3 having an amino acid sequence at least 65%, at least 70%, at least 75%, at least 80%, at least 85%, at least 90%, at least 95%, at least 99%, or 100% identical to SEQ ID NO: 139, 856, 173, 792, or 1066; a VH3 comprising (xvi) a CDR1 having an amino acid sequence at least 65%, at least 70%, at least 75%, at least 80%, at least 85%, at least 90%, at least 95%, at least 99%, or 100% identical to SEQ ID NO: 141, 175 1062, or 1067; (xvii) a CDR2 having an amino acid sequence at least 65%, at least 70%, at least 75%, at least 80%, at least 85%, at least 90%, at least 95%, at least 99%, or 100% identical to SEQ ID NO: 142, 176, 1063, or 1068; and (xviii) a CDR3 having an amino acid sequence at least 65%, at least 70%, at least 75%, at least 80%, at least 85%, at least 90%, at least 95%, at least 99%, or 100% identical to SEQ ID NO: 143, 857, 177, 793, 1064, or 1069; a VL4 comprising (xix) a complementarity determining region (CDR) 1 having an amino acid sequence that is at least 65%, at least 70%, at least 75%, at least 80%, at least 85%, at least 90%, at least 95%, at least 99%, or 100% identical to SEQ ID NO: 138, 172, 1060 or 1065; (xx) a CDR2 having an amino acid sequence at least 65%, at least 70%, at least 75%, at least 80%, at least 85%, at least 90%, at least 95%, at least 99%, or 100% identical to SEQ ID NO: 1061 or an amino acid sequence at least 65%, at least 70%, at least 75%, at least 80%, at least 85%, at least 90%, at least 95%, at least 99%, or 100% identical to amino acid sequence DAS; and; and (xxi) a CDR3 having an amino acid sequence at least 65%, at least 70%, at least 75%, at least 80%, at least 85%, at least 90%, at least 95%, at least 99%, or 100% identical to SEQ ID NO: 139, 856, 173, 792, or 1066; a VH2 comprising; and a VH4 comprising (xxii) a CDR1 having an amino acid sequence at least 65%, at least 70%, at least 75%, at least 80%, at least 85%, at least 90%, at least 95%, at least 99%, or 100% identical to SEQ ID NO: 141, 175 1062, or 1067; (xxiii) a CDR2 having an amino acid sequence at least 65%, at least 70%, at least 75%, at least 80%, at least 85%, at least 90%, at least 95%, at least 99%, or 100% identical to SEQ ID NO: 142, 176, 1063, or 1068; and (xxiv) a CDR3 having an amino acid sequence at least 65%, at least 70%, at least 75%, at least 80%, at least 85%, at least 90%, at least 95%, at least 99%, or 100% identical to SEQ ID NO: 143, 857, 177, 793, 1064, or 1069.

[2407] In some aspects, the antigen binding polypeptide complexes provided herein comprise (i) a VL1 comprising an amino acid sequence that is at least 65%, at least 70%, at least 75%, at least 80%, at least 85%, at least 90%, at least 95%, at least 99%, or 100% identical to SEQ ID NO: 147; (ii) a VH1 comprising an amino acid sequence that is at least 65%, at least 70%, at least 75%, at least 80%, at least 85%, at least 90%, at least 95%, at least 99%, or 100% identical to SEQ ID NO: 151; (iii) a VL2 comprising an amino acid sequence that is at least 65%, at least 70%, at least 75%, at least 80%, at least 85%, at least 90%, at least 95%, at least 99%, or 100% identical to SEQ ID NO: 140 or 174; (iv) a VH2 comprising an amino acid sequence that is at least 65%, at least 70%, at least 75%, at least 80%, at least 85%, at least 90%, at least 95%, at least 99%, or 100% identical to SEQ ID NO: 144 or 178; (v) a VL3 comprising an amino acid sequence that is at least 65%, at least 70%, at least 75%, at least 80%, at least 85%, at least 90%, at least 95%, at least 99%, or 100% identical to SEQ ID NO: 140 or 174; (vi) a VH3 comprising an amino acid sequence that is at least 65%, at least 70%, at least 75%, at least 80%, at least 85%, at least 90%, at least 95%, at least 99%, or 100% identical to SEQ ID NO: 144 or 178; (vii) a VL4 comprising an amino acid sequence that is at least 65%, at least 70%, at least 75%, at least 80%, at least 85%, at least 90%, at least 95%, at least 99%, or 100% identical to SEQ ID NO: 140 or 174; and (viii) a VH4 comprising an amino acid sequence that is at least 65%, at least 70%, at least 75%, at least 80%, at least 85%, at least 90%, at least 95%, at least 99%, or 100% identical to SEQ ID NO: 144 or 178.

[2408] In some aspects, VL1 comprises an amino acid sequence at least 65%, at least 70%, at least 75%, at least 80%, at least 85%, at least 90%, at least 95%, at least 99%, or 100% identical to SEQ ID NO: 4; and VH1 comprises an amino acid sequence at least 65%, at least 70%, at least 75%, at least 80%, at least 85%, at least 90%, at least 95%, at least 99%, or 100% identical to SEQ ID NO: 8.

[2409] In some aspects, VL1 comprises an amino acid sequence at least 65%, at least 70%, at least 75%, at least 80%, at least 85%, at least 90%, at least 95%, at least 99%, or 100% identical to SEQ ID NO: 11; and VH1 comprises an amino acid sequence at least 65%, at least 70%, at least 75%, at least 80%, at least 85%, at least 90%, at least 95%, at least 99%, or 100% identical to SEQ ID NO: 14.

[2410] In some aspects, VL1 comprises an amino acid sequence at least 65%, at least 70%, at least 75%, at least 80%, at least 85%, at least 90%, at least 95%, at least 99%, or 100% identical to SEQ ID NO: 17; and VH1 comprises an amino acid sequence at least 65%, at least 70%, at least 75%, at least 80%, at least 85%, at least 90%, at least 95%, at least 99%, or 100% identical to SEQ ID NO: 21 or 22.

[2411] In some aspects, VL1 comprises an amino acid sequence at least 65%, at least 70%, at least 75%, at least 80%, at least 85%, at least 90%, at least 95%, at least 99%, or 100% identical to SEQ ID NO: 25; and VH1 comprises an amino acid sequence at least 65%, at least 70%, at least 75%, at least 80%, at least 85%, at least 90%, at least 95%, at least 99%, or 100% identical to SEQ ID NO: 29.

[2412] In some aspects, VL1 comprises an amino acid sequence at least 65%, at least 70%, at least 75%, at least 80%, at least 85%, at least 90%, at least 95%, at least 99%, or 100% identical to SEQ ID NO: 33 or 39; and VH1 comprises an amino acid sequence at least 65%, at least 70%, at least 75%, at least 80%, at least 85%, at least 90%, at least 95%, at least 99%, or 100% identical to SEQ ID NO: 37.

[2413] In some aspects, VL1 comprises an amino acid sequence at least 65%, at least 70%, at least 75%, at least 80%, at least 85%, at least 90%, at least 95%, at least 99%, or 100% identical to SEQ ID NO: 67; and VH1 comprises an amino acid sequence at least 65%, at least 70%, at least 75%, at least 80%, at least 85%, at least 90%, at least 95%, at least 99%, or 100% identical to SEQ ID NO: 71 or 626.

[2414] In some aspects, VL1 comprises an amino acid sequence at least 65%, at least 70%, at least 75%, at least 80%, at least 85%, at least 90%, at least 95%, at least 99%, or 100% identical to SEQ ID NO: 74; and VH1 comprises an amino acid sequence at least 65%, at least 70%, at least 75%, at least 80%, at least 85%, at least 90%, at least 95%, at least 99%, or 100% identical to SEQ ID NO: 78.

[2415] In some aspects, VL1 comprises an amino acid sequence at least 65%, at least 70%, at least 75%, at least 80%, at least 85%, at least 90%, at least 95%, at least 99%, or 100% identical to SEQ ID NO: 147; and VH1 comprises an amino acid sequence at least 65%, at least 70%, at least 75%, at least 80%, at least 85%, at least 90%, at least 95%, at least 99%, or 100% identical to SEQ ID NO: 151.

[2416] In some aspects, VL1 comprises an amino acid sequence at least 65%, at least 70%, at least 75%, at least 80%, at least 85%, at least 90%, at least 95%, at least 99%, or 100% identical to SEQ ID NO: 154; and VH1 comprises an amino acid sequence at least 65%, at least 70%, at least 75%, at least 80%, at least 85%, at least 90%, at least 95%, at least 99%, or 100% identical to SEQ ID NO: 158.

[2417] In some aspects, VL1 comprises an amino acid sequence at least 65%, at least 70%, at least 75%, at least 80%, at least 85%, at least 90%, at least 95%, at least 99%, or 100% identical to SEQ ID NO: 140; and VH1 comprises an amino acid sequence at least 65%, at least 70%, at least 75%, at least 80%, at least 85%, at least 90%, at least 95%, at least 99%, or 100% identical to SEQ ID NO: 144.

[2418] In some aspects, VL1 comprises an amino acid sequence at least 65%, at least 70%, at least 75%, at least 80%, at least 85%, at least 90%, at least 95%, at least 99%, or 100% identical to SEQ ID NO: 174; and VH1 comprises an amino acid sequence at least 65%, at least 70%, at least 75%, at least 80%, at least 85%, at least 90%, at least 95%, at least 99%, or 100% identical to SEQ ID NO: 178.

[2419] In some aspects, VL2 comprises an amino acid sequence at least 65%, at least 70%, at least 75%, at least 80%, at least 85%, at least 90%, at least 95%, at least 99%, or 100% identical to SEQ ID NO: 4; and VH2 comprises an amino acid sequence at least 65%, at least 70%, at least 75%, at least 80%, at least 85%, at least 90%, at least 95%, at least 99%, or 100% identical to SEQ ID NO: 8.

[2420] In some aspects, VL2 comprises an amino acid sequence at least 65%, at least 70%, at least 75%, at least 80%, at least 85%, at least 90%, at least 95%, at least 99%, or 100% identical to SEQ ID NO: 11; and VH2 comprises an amino acid sequence at least 65%, at least 70%, at least 75%, at least 80%, at least 85%, at least 90%, at least 95%, at least 99%, or 100% identical to SEQ ID NO: 14.

[2421] In some aspects, VL2 comprises an amino acid sequence at least 65%, at least 70%, at least 75%, at least 80%, at least 85%, at least 90%, at least 95%, at least 99%, or 100% identical to SEQ ID NO: 17; and VH2 comprises an amino acid sequence at least 65%, at least 70%, at least 75%, at least 80%, at least 85%, at least 90%, at least 95%, at least 99%, or 100% identical to SEQ ID NO: 21 or 22.

[2422] In some aspects, VL2 comprises an amino acid sequence at least 65%, at least 70%, at least 75%, at least 80%, at least 85%, at least 90%, at least 95%, at least 99%, or 100% identical to SEQ ID NO: 25; and VH2 comprises an amino acid sequence at least 65%, at least 70%, at least 75%, at least 80%, at least 85%, at least 90%, at least 95%, at least 99%, or 100% identical to SEQ ID NO: 29.

[2423] In some aspects, VL2 comprises an amino acid sequence at least 65%, at least 70%, at least 75%, at least 80%, at least 85%, at least 90%, at least 95%, at least 99%, or 100% identical to SEQ ID NO: 33 or 39; and VH2 comprises an amino acid sequence at least 65%, at least 70%, at least 75%, at least 80%, at least 85%, at least 90%, at least 95%, at least 99%, or 100% identical to SEQ ID NO: 37.

[2424] In some aspects, VL2 comprises an amino acid sequence at least 65%, at least 70%, at least 75%, at least 80%, at least 85%, at least 90%, at least 95%, at least 99%, or 100% identical to SEQ ID NO: 67; and VH2 comprises an amino acid sequence at least 65%, at least 70%, at least 75%, at least 80%, at least 85%, at least 90%, at least 95%, at least 99%, or 100% identical to SEQ ID NO: 71 or 626.

[2425] In some aspects, VL2 comprises an amino acid sequence at least 65%, at least 70%, at least 75%, at least 80%, at least 85%, at least 90%, at least 95%, at least 99%, or 100% identical to SEQ ID NO: 74; and VH2 comprises an amino acid sequence at least 65%, at least 70%, at least 75%, at least 80%, at least 85%, at least 90%, at least 95%, at least 99%, or 100% identical to SEQ ID NO: 78.

[2426] In some aspects, VL2 comprises an amino acid sequence at least 65%, at least 70%, at least 75%, at least 80%, at least 85%, at least 90%, at least 95%, at least 99%, or 100% identical to SEQ ID NO: 147; and VH2 comprises an amino acid sequence at least 65%, at least 70%, at least 75%, at least 80%, at least 85%, at least 90%, at least 95%, at least 99%, or 100% identical to SEQ ID NO: 151.

[2427] In some aspects, VL2 comprises an amino acid sequence at least 65%, at least 70%, at least 75%, at least 80%, at least 85%, at least 90%, at least 95%, at least 99%, or 100% identical to SEQ ID NO: 154; and VH2 comprises an amino acid sequence at least 65%, at least 70%, at least 75%, at least 80%, at least 85%, at least 90%, at least 95%, at least 99%, or 100% identical to SEQ ID NO: 158.

[2428] In some aspects, VL2 comprises an amino acid sequence at least 65%, at least 70%, at least 75%, at least 80%, at least 85%, at least 90%, at least 95%, at least 99%, or 100% identical to SEQ ID NO: 140; and VH2 comprises an amino acid sequence at least 65%, at least 70%, at least 75%, at least 80%, at least 85%, at least 90%, at least 95%, at least 99%, or 100% identical to SEQ ID NO: 144.

[2429] In some aspects, VL2 comprises an amino acid sequence at least 65%, at least 70%, at least 75%, at least 80%, at least 85%, at least 90%, at least 95%, at least 99%, or 100% identical to SEQ ID NO: 174; and VH2 comprises an amino acid sequence at least 65%, at least 70%, at least 75%, at least 80%, at least 85%, at least 90%, at least 95%, at least 99%, or 100% identical to SEQ ID NO: 178.

[2430] In some aspects, VL3 comprises an amino acid sequence at least 65%, at least 70%, at least 75%, at least 80%, at least 85%, at least 90%, at least 95%, at least 99%, or 100% identical to SEQ ID NO: 4; and VH3 comprises an amino acid sequence at least 65%, at least 70%, at least 75%, at least 80%, at least 85%, at least 90%, at least 95%, at least 99%, or 100% identical to SEQ ID NO: 8.

[2431] In some aspects, VL3 comprises an amino acid sequence at least 65%, at least 70%, at least 75%, at least 80%, at least 85%, at least 90%, at least 95%, at least 99%, or 100% identical to SEQ ID NO: 11; and VH3 comprises an amino acid sequence at least 65%, at least 70%, at least 75%, at least 80%, at least 85%, at least 90%, at least 95%, at least 99%, or 100% identical to SEQ ID NO: 14.

[2432] In some aspects, VL3 comprises an amino acid sequence at least 65%, at least 70%, at least 75%, at least 80%, at least 85%, at least 90%, at least 95%, at least 99%, or 100% identical to SEQ ID NO: 17; and VH3 comprises an amino acid sequence at least 65%, at least 70%, at least 75%, at least 80%, at least 85%, at least 90%, at least 95%, at least 99%, or 100% identical to SEQ ID NO: 21 or 22.

[2433] In some aspects, VL3 comprises an amino acid sequence at least 65%, at least 70%, at least 75%, at least 80%, at least 85%, at least 90%, at least 95%, at least 99%, or 100% identical to SEQ ID NO: 25; and VH3 comprises an amino acid sequence at least 65%, at least 70%, at least 75%, at least 80%, at least 85%, at least 90%, at least 95%, at least 99%, or 100% identical to SEQ ID NO: 29.

[2434] In some aspects, VL3 comprises an amino acid sequence at least 65%, at least 70%, at least 75%, at least 80%, at least 85%, at least 90%, at least 95%, at least 99%, or 100% identical to SEQ ID NO: 33 or 39; and VH3 comprises an amino acid sequence at least 65%, at least 70%, at least 75%, at least 80%, at least 85%, at least 90%, at least 95%, at least 99%, or 100% identical to SEQ ID NO: 37.

[2435] In some aspects, VL3 comprises an amino acid sequence at least 65%, at least 70%, at least 75%, at least 80%, at least 85%, at least 90%, at least 95%, at least 99%, or 100% identical to SEQ ID NO: 67; and VH3 comprises an amino acid sequence at least 65%, at least 70%, at least 75%, at least 80%, at least 85%, at least 90%, at least 95%, at least 99%, or 100% identical to SEQ ID NO: 71 or 626.

[2436] In some aspects, VL3 comprises an amino acid sequence at least 65%, at least 70%, at least 75%, at least 80%, at least 85%, at least 90%, at least 95%, at least 99%, or 100% identical to SEQ ID NO: 74; and VH3 comprises an amino acid sequence at least 65%, at least 70%, at least 75%, at least 80%, at least 85%, at least 90%, at least 95%, at least 99%, or 100% identical to SEQ ID NO: 78.

[2437] In some aspects, VL3 comprises an amino acid sequence at least 65%, at least 70%, at least 75%, at least 80%, at least 85%, at least 90%, at least 95%, at least 99%, or 100% identical to SEQ ID NO: 147; and VH3 comprises an amino acid sequence at least 65%, at least 70%, at least 75%, at least 80%, at least 85%, at least 90%, at least 95%, at least 99%, or 100% identical to SEQ ID NO: 151.

[2438] In some aspects, VL3 comprises an amino acid sequence at least 65%, at least 70%, at least 75%, at least 80%, at least 85%, at least 90%, at least 95%, at least 99%, or 100% identical to SEQ ID NO: 154; and VH3 comprises an amino acid sequence at least 65%, at least 70%, at least 75%, at least 80%, at least 85%, at least 90%, at least 95%, at least 99%, or 100% identical to SEQ ID NO: 158.

[2439] In some aspects, VL3 comprises an amino acid sequence at least 65%, at least 70%, at least 75%, at least 80%, at least 85%, at least 90%, at least 95%, at least 99%, or 100% identical to SEQ ID NO: 140; and VH3 comprises an amino acid sequence at least 65%, at least 70%, at least 75%, at least 80%, at least 85%, at least 90%, at least 95%, at least 99%, or 100% identical to SEQ ID NO: 144.

[2440] In some aspects, VL3 comprises an amino acid sequence at least 65%, at least 70%, at least 75%, at least 80%, at least 85%, at least 90%, at least 95%, at least 99%, or 100% identical to SEQ ID NO: 174; and VH3 comprises an amino acid sequence at least 65%, at least 70%, at least 75%, at least 80%, at least 85%, at least 90%, at least 95%, at least 99%, or 100% identical to SEQ ID NO: 178.

[2441] In some aspects, VL4 comprises an amino acid sequence at least 65%, at least 70%, at least 75%, at least 80%, at least 85%, at least 90%, at least 95%, at least 99%, or 100% identical to SEQ ID NO: 4; and VH4 comprises an amino acid sequence at least 65%, at least 70%, at least 75%, at least 80%, at least 85%, at least 90%, at least 95%, at least 99%, or 100% identical to SEQ ID NO: 8.

[2442] In some aspects, VL4 comprises an amino acid sequence at least 65%, at least 70%, at least 75%, at least 80%, at least 85%, at least 90%, at least 95%, at least 99%, or 100% identical to SEQ ID NO: 11; and VH4 comprises an amino acid sequence at least 65%, at least 70%, at least 75%, at least 80%, at least 85%, at least 90%, at least 95%, at least 99%, or 100% identical to SEQ ID NO: 14.

[2443] In some aspects, VL4 comprises an amino acid sequence at least 65%, at least 70%, at least 75%, at least 80%, at least 85%, at least 90%, at least 95%, at least 99%, or 100% identical to SEQ ID NO: 17; and VH4 comprises an amino acid sequence at least 65%, at least 70%, at least 75%, at least 80%, at least 85%, at least 90%, at least 95%, at least 99%, or 100% identical to SEQ ID NO: 21 or 22.

[2444] In some aspects, VL4 comprises an amino acid sequence at least 65%, at least 70%, at least 75%, at least 80%, at least 85%, at least 90%, at least 95%, at least 99%, or 100% identical to SEQ ID NO: 25; and VH4 comprises an amino acid sequence at least 65%, at least 70%, at least 75%, at least 80%, at least 85%, at least 90%, at least 95%, at least 99%, or 100% identical to SEQ ID NO: 29.

[2445] In some aspects, VL4 comprises an amino acid sequence at least 65%, at least 70%, at least 75%, at least 80%, at least 85%, at least 90%, at least 95%, at least 99%, or 100% identical to SEQ ID NO: 33 or 39; and VH4 comprises an amino acid sequence at least 65%, at least 70%, at least 75%, at least 80%, at least 85%, at least 90%, at least 95%, at least 99%, or 100% identical to SEQ ID NO: 37.

[2446] In some aspects, VL4 comprises an amino acid sequence at least 65%, at least 70%, at least 75%, at least 80%, at least 85%, at least 90%, at least 95%, at least 99%, or 100% identical to SEQ ID NO: 67; and VH4 comprises an amino acid sequence at least 65%, at least 70%, at least 75%, at least 80%, at least 85%, at least 90%, at least 95%, at least 99%, or 100% identical to SEQ ID NO: 71 or 626.

[2447] In some aspects, VL4 comprises an amino acid sequence at least 65%, at least 70%, at least 75%, at least 80%, at least 85%, at least 90%, at least 95%, at least 99%, or 100% identical to SEQ ID NO: 74; and VH4 comprises an amino acid sequence at least 65%, at least 70%, at least 75%, at least 80%, at least 85%, at least 90%, at least 95%, at least 99%, or 100% identical to SEQ ID NO: 78.

[2448] In some aspects, VL4 comprises an amino acid sequence at least 65%, at least 70%, at least 75%, at least 80%, at least 85%, at least 90%, at least 95%, at least 99%, or 100% identical to SEQ ID NO: 147; and VH4 comprises an amino acid sequence at least 65%, at least 70%, at least 75%, at least 80%, at least 85%, at least 90%, at least 95%, at least 99%, or 100% identical to SEQ ID NO: 151.

[2449] In some aspects, VL4 comprises an amino acid sequence at least 65%, at least 70%, at least 75%, at least 80%, at least 85%, at least 90%, at least 95%, at least 99%, or 100% identical to SEQ ID NO: 154; and VH4 comprises an amino acid sequence at least 65%, at least 70%, at least 75%, at least 80%, at least 85%, at least 90%, at least 95%, at least 99%, or 100% identical to SEQ ID NO: 158.

[2450] In some aspects, VL4 comprises an amino acid sequence at least 65%, at least 70%, at least 75%, at least 80%, at least 85%, at least 90%, at least 95%, at least 99%, or 100% identical to SEQ ID NO: 140; and VH4 comprises an amino acid sequence at least 65%, at least 70%, at least 75%, at least 80%, at least 85%, at least 90%, at least 95%, at least 99%, or 100% identical to SEQ ID NO: 144.

[2451] In some aspects, VL4 comprises an amino acid sequence at least 65%, at least 70%, at least 75%, at least 80%, at least 85%, at least 90%, at least 95%, at least 99%, or 100% identical to SEQ ID NO: 174; and VH4 comprises an amino acid sequence at least 65%, at least 70%, at least 75%, at least 80%, at least 85%, at least 90%, at least 95%, at least 99%, or 100% identical to SEQ ID NO: 178.

[2452] In some aspects, one or both of the antigen binding polypeptides comprised in the antigen binding polypeptide complexes disclosed herein, comprise one or more CL, as indicated in the formulas representing the antigen binding polypeptide complexes disclosed herein. In some aspects, the CL comprises an amino acid sequence at least 65%, at least 70%, at least 75%, at least 80%, at least 85%, at least 90%, at least 95%, at least 99%, or 100% identical to any one of SEQ ID NOs: 374, 637, or 1092-1095.

[2453] In some aspects, one or both of the antigen binding polypeptides comprised in the antigen binding polypeptide complexes disclosed herein, comprise one or more CH1, as indicated in the formulas representing the antigen binding polypeptide complexes disclosed herein. In some aspects, the CH1 comprises an amino acid sequence at least 65%, at least 70%, at least 75%, at least 80%, at least 85%, at least 90%, at least 95%, at least 99%, or 100% identical to any one of SEQ ID NOs: 375, 634, 1070, 1071, or 1086-1091.

[2454] In some aspects, one or both of the antigen binding polypeptides comprised in the antigen binding polypeptide complexes provided herein further comprise an Fc region. In some aspects, one or both of the antigen binding polypeptides comprised in the antigen binding polypeptide complexes provided herein further comprise an Fc region at the carboxy-terminus. In some aspects, the Fc region comprises an immunoglobulin heavy chain constant region 2 (CH2) and/or an immunoglobulin heavy chain constant region 3 (CH3). In some aspects, the Fc region further comprises an immunoglobulin hinge (i.e., a hinge region). In some aspects, the hinge region is interposed between a CH1 and a CH2 (i.e., a hinge region is localized between the carboxy terminal residue of a CH1 and the N-terminal residue of a CH2). In some aspects, the hinge region comprises an amino acid sequence at least 65%, at least 70%, at least 75%, at least 80%, at least 85%, at least 90%, at least 95%, at least 99%, or 100% identical to any one of SEQ ID NOs: 635, 636, 1072, 1073, or 1074. In some aspects, the Fc region comprises a CH2 and a CH3. In some aspects, the CH2 comprises an amino acid sequence that is at least 65%, at least 70%, at least 75%, at least 80%, at least 85%, at least 90%, at least 95%, at least 99%, or 100% identical to any one of SEQ ID NOs: 1075-1078. In some aspects, the CH3 comprises an amino acid sequence that is at least 65%, at least 70%, at least 75%, at least 80%, at least 85%, at least 90%, at least 95%, at least 99%, or 100% identical to any one of SEQ ID NOs: 1079-1085. In some aspects, the Fc region comprises an amino acid sequence that is at least 65%, at least 70%, at least 75%, at least 80%, at least 85%, at least 90%, at least 95%, at least 99%, or 100% identical to any one of SEQ ID NOs: 376-380.

[2455] In some aspects, the Fc region comprises one or more amino acid substitutions. In some aspects, the one or more amino acid substitutions comprise one or more half-life extension amino acid substitutions. In some aspects, the one or more half-life extension amino acid substitutions comprise one or more of amino acid substitutions M428L, N434A, N434S, L234F, L235E, P331S, M252Y, S254T, and T256E, or equivalent thereof, based on the EU numbering scheme. In some aspects, the one or more half-life extension amino acid substitutions comprise a LA (M428L and N434A, or equivalent thereof, based on the EU numbering scheme) amino acid substitution. In some aspects, the one or more half-life extension amino acid substitutions comprise a LS (M428L and N434S, or equivalent thereof, based on the EU numbering scheme) amino acid substitution. In some aspects, the one or more half-life extension amino acid substitutions comprise L234F and L235E, or equivalent thereof (based on the EU numbering scheme) amino acid substitutions. In some aspects, the one or more half-life extension amino acid substitutions comprise a TM (L234F, L235E, and P331S, or equivalent thereof, based on the EU numbering scheme) amino acid substitution. In some aspects, the one or more half-life extension amino acid substitutions comprise a YTE (M252Y, S254T, and T256E, or equivalent thereof, based on the EU numbering scheme) amino acid substitution.

[2456] In some aspects, the Fc region comprises at least one knob-into-hole modification. In some aspects, the antigen binding polypeptides disclosed herein are comprised in IgG1 or IgG4 antibodies or antigen binding fragments thereof. In some aspects, the knob-into-hole modification comprises one or more of knob substitutions of S354C and T366W, or equivalent thereof, and/or one or more of hole substitutions of Y349C, T366S, L368A, Y407V, or equivalent thereof, or a combination thereof, based on the EU numbering scheme. In some aspects, the Fc region comprises a knob-into-hole modification comprising knob substitutions of S354C and T366W, or equivalent thereof, and/or hole substitutions of Y349C, T366S, L368A, and Y407V, or equivalent thereof, and/or a half-life extension amino acid substitution comprising: a LA (M428L and N434A, or equivalent thereof, based on the EU numbering scheme) amino acid substitution, a LS (M428L and N434S, or equivalent thereof, based on the EU numbering scheme) amino acid substitution, L234F and L235E, or equivalent thereof (based on the EU numbering scheme) amino acid substitutions, a TM (L234F, L235E, and P331S, or equivalent thereof, based on the EU numbering scheme) amino acid substitution, a YTE (M252Y, S254T, and T256E, or equivalent thereof, based on the EU numbering scheme) amino acid substitution, or any combination thereof.

[2457] In some aspects, the Fc region comprises knob substitutions of S354C and T366W, or equivalent thereof, and a half-life extension amino acid substitution comprising: a LA (M428L and N434A, or equivalent thereof, based on the EU numbering scheme) amino acid substitution, a LS (M428L and N434S, or equivalent thereof, based on the EU numbering scheme) amino acid substitution. L234F and L235E, or equivalent thereof (based on the EU numbering scheme) amino acid substitutions, a TM (L234F, L235E, and P331S, or equivalent thereof, based on the EU numbering scheme) amino acid substitution, a YTE (M252Y, S254T, and T256E, or equivalent thereof, based on the EU numbering scheme) amino acid substitution, or any combination thereof.

[2458] In some aspects, the Fc region comprises hole substitutions of Y349C, T366S, L368A, and Y407V, or equivalent thereof, and a half-life extension amino acid substitution comprising: a LA (M428L and N434A, or equivalent thereof, based on the EU numbering scheme) amino acid substitution, a LS (M428L and N434S, or equivalent thereof, based on the EU numbering scheme) amino acid substitution. L234F and L235E, or equivalent thereof (based on the EU numbering scheme) amino acid substitutions, a TM (L234F, L235E, and P331S, or equivalent thereof, based on the EU numbering scheme) amino acid substitution, a YTE (M252Y, S254T, and T256E, or equivalent thereof, based on the EU numbering scheme) amino acid substitution, or any combination thereof.

[2459] In some aspects, one or both of the antigen binding polypeptides comprised in the antigen binding polypeptide complexes disclosed herein comprise one or more Fc effector function knockout mutation. In some aspects, the antigen binding polypeptide complexes disclosed herein are IgG1 or IgG4 antibodies or antigen binding fragments thereof. In some aspects, the Fc effector function knockout mutation is L234A, L235A, P239A, or equivalent thereof, or a combination thereof, based on the EU numbering scheme.

[2460] In some aspects, one or both of the antigen binding polypeptides comprised in the antigen binding polypeptide complexes disclosed herein comprise a mutation at a glycosylation site. In some aspects, the mutation at a glycosylation site is a mutation at an N-glycosylation site. In some aspects, one or both of the antigen binding polypeptides comprised in the antigen binding polypeptide complexes disclosed herein comprise a VH comprising a mutation at a glycosylation site. In some aspects, the mutation at a glycosylation site is a mutation at an N-glycosylation site. In some aspects, the mutation at an N-glycosylation site is at amino acid N62 of the VH region or equivalent thereof. In some aspects, the mutation at an N-glycosylation site at amino acid N62 is N62Q or N62S, or equivalent thereof.

[2461] In some aspects, one or both of the antigen binding polypeptides comprised in the antigen binding polypeptide complexes disclosed herein, comprise one or more optional linkers. The one or more optional linkers are indicated herein as Ln, wherein n is an integer, and the integer next to each L indicates each L comprised in the antigen binding polypeptides comprised in the antigen binding polypeptide complexes disclosed herein. For example, if an antigen binding polypeptide comprised in the antigen binding polypeptide complexes disclosed herein comprises two linkers, the first linker from N-terminus to C-terminus is herein indicated as L1, and the second linker from N-terminus to C-terminus is herein indicated as L2. If an antigen binding polypeptide complex disclosed herein comprises a first antigen binding polypeptide comprising two linkers, indicated herein as L1 and L2, as explained above, the linkers comprised in the second antigen binding polypeptide are indicated with the following integer, in this example, the first linker from N-terminus to C-terminus of the second antigen binding polypeptide is herein indicated as L3, the second linker from N-terminus to C-terminus of the second antigen binding polypeptide is herein indicated as L3. In some aspects, any one of the optional linkers each independently have a length of from 0 amino acids to about 50 amino acids. In some aspects, any one of the optional linkers each independently have a length of from 5 amino acids to about 40 amino acids.

[2462] In some aspects, any one of the optional linkers are non-immunogenic. In some aspects, any one of the optional linkers do not contain a consensus T cell epitope.

[2463] In some aspects, any of Ln comprises an amino acid sequence of G or A, or an amino acid sequence at least 65%, at least 70%, at least 75%, at least 80%, at least 85%, at least 90%, at least 95%, at least 99%, or 100% identical to amino acid sequence GSS or ASG, or an amino acid sequence at least 65%, at least 70%, at least 75%, at least 80%, at least 85%, at least 90%, at least 95%, at least 99%, or 100% identical to any one of SEQ ID NOs: 333-373 and 967-971. In some aspects, Ln comprises an amino acid sequence at least 65%, at least 70%, at least 75%, at least 80%, at least 85%, at least 90%, at least 95%, at least 99%, or 100% identical to any one of SEQ ID NOs: 333-345 and 967-971.

[2464] In some aspects, an antigen binding polypeptide complex provided herein comprises a first polypeptide, and a second polypeptide; wherein the first polypeptide has a structure represented by VL1-L1-VL2-L2-CH1 or VL2-L1-VL1-L2-CH1; and wherein the second polypeptide has a structure represented by VH1-L3-VH2-L4-CL or VH2-L3-VH1-L4-CL.

[2465] In some aspects, an antigen binding polypeptide complex provided herein comprises a first polypeptide, and a second polypeptide; wherein the first polypeptide has a structure represented by VL1-VL2-CH1-CH2-CH3 or VL2-VL1-CH1-CH2-CH3; and wherein the second polypeptide has a structure represented by VH1-VH2-CL-CH2-CH3 or VH2-VH1-CL-CH2-CH3.

[2466] In some aspects, an antigen binding polypeptide complex provided herein comprises a first polypeptide, and a second polypeptide; wherein the first polypeptide has a structure represented by VL1-L1-VL2-L2-CH1-CH2-CH3 or VL2-L1-VL1-L2-CH1-CH2-CH3; and wherein the second polypeptide has a structure represented by VH1-L3-VH2-L4-CL-CH2-CH3 or VH2-L3-VH1-L4-CL-CH2-CH3.

[2467] In some aspects, VL1 is a first immunoglobulin light chain variable region that specifically binds to a SARS-CoV-2 protein (e.g., a SARS-CoV-2 spike protein); VL2 is a second immunoglobulin light chain variable region that specifically binds to a SARS-CoV-2 protein (e.g., a SARS-CoV-2 spike protein); VH1 is a first immunoglobulin heavy chain variable region that specifically binds to a SARS-CoV-2 protein (e.g., a SARS-CoV-2 spike protein); and VH2 is a second immunoglobulin heavy chain variable region that specifically binds to a SARS-CoV-2 protein (e.g., a SARS-CoV-2 spike protein); CH1 is an immunoglobulin heavy chain constant region 1; CL is an immunoglobulin light chain constant region; and L1-L4 are optional amino acid linkers. In any aspect shown herein as a structure from amino terminus to carboxy terminus, and with binding pairs selected from VL and/or VH or other structural regions such as CH1, CL, CH2, CH3, when shown without a specific linker such as L1, L2, etc., such linkers are optionally present in such structures between each designated subsequence VL, VH, etc.

[2468] In some aspects, the VL1 and the VL2 each comprise a CDR1, a CDR2, and a CDR3 that are the same. In some aspects, the VL1 and the VL2 each comprise a CDR1, a CDR2, and a CDR3 that are different.

[2469] In some aspects, the VL1 and the VL2 each comprise an amino acid sequence, wherein the amino acid sequence comprised in VL1 and the amino acid sequence comprised in VL2 are the same. In some aspects, the VL1 and the VL2 each comprise an amino acid sequence, wherein the amino acid sequence comprised in VL1 and the amino acid sequence comprised in VL2 are different.

[2470] In some aspects, VL1 comprises a CDR1 having an amino acid sequence at least 65%, at least 70%, at least 75%, at least 80%, at least 85%, at least 90%, at least 95%, at least 99%, or 100% identical to any one of SEQ ID NOs: 1, 9, 15, 23, 30, 41, 48, 55, 58, 65, 72, 79, 86, 93, 99, 105, 112, 119, 130, 138, 145, 152, 159, 166, 172, 179, 186, 192, 199, 205, 212, 219, 226, 232, 324, 627, 640, 650, 659, 676, 687, 695, 703, 712, 770, 778, 785, 794, 801, 807, 814, 827, 836, 849, 858, 865, 878, 1045, 1050, 1055, 1060, and 1065.

[2471] In some aspects, VL1 comprises a CDR1 having an amino acid sequence at least 65%, at least 70%, at least 75%, at least 80%, at least 85%, at least 90%, at least 95%, at least 99%, or 100% identical to any one of SEQ ID NOs: 1, 9, 15, 23, 30, 65, 72, 145, 152, 324, 627, 138, 172, 1045, 1050, 1055, 1060, and 1065.

[2472] In some aspects, VL1 comprises a CDR2 having an amino acid sequence at least 65%, at least 70%, at least 75%, at least 80%, at least 85%, at least 90%, at least 95%, at least 99%, or 100% identical to any one of SEQ ID NOs: 2, 31, 628, 641, 677, 1046, 1051, 1056, and 1061; or at least 65%, at least 70%, at least 75%, at least 80%, at least 85%, at least 90%, at least 95%, at least 99%, or 100% identical to any one of amino acid sequences AAS, GAS, LGS, GTN, GTN, SAS, SDS, DNT, EVT, DAS, DVT, RNS, DVS, EDS, DDS, KDS, VAS, WAS, YTS, EVS, NNN, SYN, and DAT.

[2473] In some aspects, VL1 comprises a CDR2 having an amino acid sequence at least 65%, at least 70%, at least 75%, at least 80%, at least 85%, at least 90%, at least 95%, at least 99%, or 100% identical to any one of SEQ ID NOs: 2, 31, 628, 1046, 1051, 1056, and 1061, or at least 65%, at least 70%, at least 75%, at least 80%, at least 85%, at least 90%, at least 95%, at least 99%, or 100% identical to any one of amino acid sequences GAS, LGS, GTN, SAS, SDS, AAS, DAS, and DNT.

[2474] In some aspects, VL1 comprises a CDR3 having an amino acid sequence at least 65%, at least 70%, at least 75%, at least 80%, at least 85%, at least 90%, at least 95%, at least 99%, or 100% identical to any one of SEQ ID NOs: 3, 10, 16, 24, 32, 38, 42, 49, 59, 66, 73, 80, 87, 94, 100, 106, 113, 120, 126, 131, 139, 146, 153, 160, 167, 173, 180, 187, 193, 200, 206, 213, 220, 227, 233, 239, 242, 246, 249, 256, 283, 285, 287, 288, 290, 292, 294, 296, 301, 304, 306, 309, 311, 313, 316, 325, 326, 329, 642, 651, 660, 668, 678, 651, 696, 704, 713, 764, 766, 768, 771, 779, 786, 792, 795, 808, 815, 821, 830, 837, 843, 850, 856, 859, 866, 872, 879, 885, and 1066.

[2475] In some aspects, VL1 comprises a CDR3 having an amino acid sequence at least 65%, at least 70%, at least 75%, at least 80%, at least 85%, at least 90%, at least 95%, at least 99%, or 100% identical to any one of SEQ ID NOs: 3, 10, 16, 24, 32, 38, 66, 73, 146, 153, 325, 326, 764, 766, 139, 856, 173, 792, and 1066.

[2476] In some aspects, VL1 comprises an amino acid sequence at least 65%, at least 70%, at least 75%, at least 80%, at least 85%, at least 90%, at least 95%, at least 99%, or 100% identical to any one of SEQ ID NOs: 4, 11, 17, 25, 33, 39, 43, 50, 60, 67, 74, 81, 88, 95, 101, 107, 114, 121, 127, 132, 140, 147, 154, 161, 168, 174, 181, 188, 194, 201, 207, 214, 221, 228, 234, 240, 243, 247, 250, 251, 252, 255, 284, 286, 289, 291, 293, 295, 299, 300, 302, 303, 305, 307, 308, 310, 312, 314, 315, 317, 323, 639, 649, 658, 667, 675, 686, 694, 702, 711, 772, 780, 787, 796, 802, 809, 816, 822, 831, 838, 844, 851, 860, 867, 873, 880, and 988.

[2477] In some aspects, VL1 comprises an amino acid sequence at least 65%, at least 70%, at least 75%, at least 80%, at least 85%, at least 90%, at least 95%, at least 99%, or 100% identical to any one of SEQ ID NOs: 4, 11, 17, 25, 33, 39, 67, 74, 147, 154, 140, and 174.

[2478] In some aspects, VH1 comprises a CDR1 having an amino acid sequence at least 65%, at least 70%, at least 75%, at least 80%, at least 85%, at least 90%, at least 95%, at least 99%, or 100% identical to any one of SEQ ID NOs: 5, 12, 18, 26, 34, 44, 51, 61, 68, 75, 82, 89, 96, 102, 108, 115, 122, 133, 141, 148, 155, 162, 175, 182, 189, 195, 202, 208, 215, 222, 229, 235, 318, 629, 645, 654, 663, 671, 682, 690, 699, 707, 716, 773, 781, 788, 797, 803, 810, 817, 823, 832, 839, 845, 852, 861, 868, 874, 881, 1047, 1052, 1057, 1062, and 1067.

[2479] In some aspects, VH1 comprises a CDR1 having an amino acid sequence at least 65%, at least 70%, at least 75%, at least 80%, at least 85%, at least 90%, at least 95%, at least 99%, or 100% identical to any one of SEQ ID NOs: 5, 12, 18, 26, 34, 68, 75, 148, 155, 629, 141, 175, 1047, 1052, 1057, 1062, and 1067.

[2480] In some aspects, VH1 comprises a CDR2 having an amino acid sequence at least 65%, at least 70%, at least 75%, at least 80%, at least 85%, at least 90%, at least 95%, at least 99%, or 100% identical to any one of SEQ ID NOs: 6, 19, 27, 35, 45, 52, 56, 62, 69, 76, 83, 90, 109, 116, 123, 134, 142, 149, 156, 163, 169, 176, 183, 196, 209, 216, 223, 236, 273, 319, 328, 630, 646, 655, 664, 672, 683, 691, 708, 776, 782, 789, 798, 804, 811, 818, 824, 833, 840, 846, 853, 862, 869, 875, 882, 1048, 1053, 1058, 1063, and 1068.

[2481] In some aspects, VH1 comprises a CDR2 having an amino acid sequence at least 65%, at least 70%, at least 75%, at least 80%, at least 85%, at least 90%, at least 95%, at least 99%, or 100% identical to any one of SEQ ID NOs: 6, 19, 27, 35, 69, 76, 149, 156, 630, 142, 176, 1048, 1053, 1058, 1063, and 1068.

[2482] In some aspects, VH1 comprises a CDR3 having an amino acid sequence at least 65%, at least 70%, at least 75%, at least 80%, at least 85%, at least 90%, at least 95%, at least 99%, or 100% identical to any one of SEQ ID NOs: 7, 13, 20, 28, 36, 40, 46, 53, 63, 70, 77, 84, 91, 97, 103, 110, 117, 124, 128, 135, 143, 150, 157, 164, 170, 177, 184, 190, 197, 203, 210, 217, 224, 230, 237, 241, 244, 248, 253, 257, 259, 261, 263, 265, 267, 269, 271, 274, 276, 278, 281, 297, 320, 322, 327, 330, 332, 631, 647, 656, 665, 673, 684, 692, 700, 709, 717, 765, 767, 769, 774, 783, 790, 793, 799, 805, 812, 819, 825, 834, 841, 847, 854, 857, 863, 870, 876, 883, 886, 1049, 1054, 1059, 1064, and 1069.

[2483] In some aspects, VH1 comprises a CDR3 having an amino acid sequence at least 65%, at least 70%, at least 75%, at least 80%, at least 85%, at least 90%, at least 95%, at least 99%, or 100% identical to any one of SEQ ID NOs: 7, 13, 20, 28, 36, 40, 70, 77, 150, 157, 327, 332, 631, 765, 767, 143, 857, 177, 793, 1049, 1054, 1059, 1064, and 1069.

[2484] In some aspects, VH1 comprises an amino acid sequence at least 65%, at least 70%, at least 75%, at least 80%, at least 85%, at least 90%, at least 95%, at least 99%, or 100% identical to any one of SEQ ID NOs: 8, 14, 21, 22, 29, 37, 47, 54, 57, 64, 71, 78, 85, 92, 98, 104, 111, 118, 125, 129, 136, 137, 144, 151, 158, 165, 171, 178, 185, 191, 198, 204, 211, 218, 225, 231, 238, 245, 254, 258, 260, 262, 264, 266, 268, 270, 272, 275, 277, 279, 280, 282, 298, 321, 331, 626, 644, 653, 662, 670, 681, 689, 698, 706, 715, 775, 777, 784, 791, 800, 806, 813, 820, 826, 835, 842, 848, 855, 864, 871, 877, and 884.

[2485] In some aspects, VH1 comprises an amino acid sequence at least 65%, at least 70%, at least 75%, at least 80%, at least 85%, at least 90%, at least 95%, at least 99%, or 100% identical to any one of SEQ ID NOs: 8, 14, 21, 22, 29, 37, 71, 78, 151, 158, 626, 144, and 178.

[2486] In some aspects, VL2 comprises a CDR1 having an amino acid sequence at least 65%, at least 70%, at least 75%, at least 80%, at least 85%, at least 90%, at least 95%, at least 99%, or 100% identical to any one of SEQ ID NOs: 1, 9, 15, 23, 30, 41, 48, 55, 58, 65, 72, 79, 86, 93, 99, 105, 112, 119, 130, 138, 145, 152, 159, 166, 172, 179, 186, 192, 199, 205, 212, 219, 226, 232, 324, 627, 640, 650, 659, 676, 687, 695, 703, 712, 770, 778, 785, 794, 801, 807, 814, 827, 836, 849, 858, 865, 878, 1045, 1050, 1055, 1060, and 1065.

[2487] In some aspects, VL2 comprises a CDR1 having an amino acid sequence at least 65%, at least 70%, at least 75%, at least 80%, at least 85%, at least 90%, at least 95%, at least 99%, or 100% identical to any one of SEQ ID NOs: 1, 9, 15, 23, 30, 65, 72, 145, 152, 324, 627, 138, 172, 1045, 1050, 1055, 1060, and 1065.

[2488] In some aspects, VL2 comprises a CDR2 having an amino acid sequence at least 65%, at least 70%, at least 75%, at least 80%, at least 85%, at least 90%, at least 95%, at least 99%, or 100% identical to any one of SEQ ID NOs: 2, 31, 628, 641, 677, 1046, 1051, 1056, and 1061; or at least 65%, at least 70%, at least 75%, at least 80%, at least 85%, at least 90%, at least 95%, at least 99%, or 100% identical to any one of amino acid sequences AAS, GAS, LGS, GTN, GTN, SAS, SDS, DNT, EVT, DAS, DVT, RNS, DVS, EDS, DDS, KDS, VAS, WAS, YTS, EVS, NNN, SYN, and DAT.

[2489] In some aspects, VL2 comprises a CDR2 having an amino acid sequence at least 65%, at least 70%, at least 75%, at least 80%, at least 85%, at least 90%, at least 95%, at least 99%, or 100% identical to any one of SEQ ID NOs: 2, 31, 628, 1046, 1051, 1056, and 1061, or at least 65%, at least 70%, at least 75%, at least 80%, at least 85%, at least 90%, at least 95%, at least 99%, or 100% identical to any one of amino acid sequences GAS, LGS, GTN, SAS, SDS, AAS, DAS, and DNT.

[2490] In some aspects, VL2 comprises a CDR3 having an amino acid sequence at least 65%, at least 70%, at least 75%, at least 80%, at least 85%, at least 90%, at least 95%, at least 99%, or 100% identical to any one of SEQ ID NOs: 3, 10, 16, 24, 32, 38, 42, 49, 59, 66, 73, 80, 87, 94, 100, 106, 113, 120, 126, 131, 139, 146, 153, 160, 167, 173, 180, 187, 193, 200, 206, 213, 220, 227, 233, 239, 242, 246, 249, 256, 283, 285, 287, 288, 290, 292, 294, 296, 301, 304, 306, 309, 311, 313, 316, 325, 326, 329, 642, 651, 660, 668, 678, 651, 696, 704, 713, 764, 766, 768, 771, 779, 786, 792, 795, 808, 815, 821, 830, 837, 843, 850, 856, 859, 866, 872, 879, 885, and 1066.

[2491] In some aspects, VL2 comprises a CDR3 having an amino acid sequence at least 65%, at least 70%, at least 75%, at least 80%, at least 85%, at least 90%, at least 95%, at least 99%, or 100% identical to any one of SEQ ID NOs: 3, 10, 16, 24, 32, 38, 66, 73, 146, 153, 325, 326, 764, 766, 139, 856, 173, 792, and 1066.

[2492] In some aspects, VL2 comprises an amino acid sequence at least 65%, at least 70%, at least 75%, at least 80%, at least 85%, at least 90%, at least 95%, at least 99%, or 100% identical to any one of SEQ ID NOs: 4, 11, 17, 25, 33, 39, 43, 50, 60, 67, 74, 81, 88, 95, 101, 107, 114, 121, 127, 132, 140, 147, 154, 161, 168, 174, 181, 188, 194, 201, 207, 214, 221, 228, 234, 240, 243, 247, 250, 251, 252, 255, 284, 286, 289, 291, 293, 295, 299, 300, 302, 303, 305, 307, 308, 310, 312, 314, 315, 317, 323, 639, 649, 658, 667, 675, 686, 694, 702, 711, 772, 780, 787, 796, 802, 809, 816, 822, 831, 838, 844, 851, 860, 867, 873, 880, and 988.

[2493] In some aspects, VL2 comprises an amino acid sequence at least 65%, at least 70%, at least 75%, at least 80%, at least 85%, at least 90%, at least 95%, at least 99%, or 100% identical to any one of SEQ ID NOs: 4, 11, 17, 25, 33, 39, 67, 74, 147, 154, 140, and 174.

[2494] In some aspects, VH2 comprises a CDR1 having an amino acid sequence at least 65%, at least 70%, at least 75%, at least 80%, at least 85%, at least 90%, at least 95%, at least 99%, or 100% identical to any one of SEQ ID NOs: 5, 12, 18, 26, 34, 44, 51, 61, 68, 75, 82, 89, 96, 102, 108, 115, 122, 133, 141, 148, 155, 162, 175, 182, 189, 195, 202, 208, 215, 222, 229, 235, 318, 629, 645, 654, 663, 671, 682, 690, 699, 707, 716, 773, 781, 788, 797, 803, 810, 817, 823, 832, 839, 845, 852, 861, 868, 874, 881, 1047, 1052, 1057, 1062, and 1067.

[2495] In some aspects, VH2 comprises a CDR1 having an amino acid sequence at least 65%, at least 70%, at least 75%, at least 80%, at least 85%, at least 90%, at least 95%, at least 99%, or 100% identical to any one of SEQ ID NOs: 5, 12, 18, 26, 34, 68, 75, 148, 155, 629, 141, 175, 1047, 1052, 1057, 1062, and 1067.

[2496] In some aspects, VH2 comprises a CDR2 having an amino acid sequence at least 65%, at least 70%, at least 75%, at least 80%, at least 85%, at least 90%, at least 95%, at least 99%, or 100% identical to any one of SEQ ID NOs: 6, 19, 27, 35, 45, 52, 56, 62, 69, 76, 83, 90, 109, 116, 123, 134, 142, 149, 156, 163, 169, 176, 183, 196, 209, 216, 223, 236, 273, 319, 328, 630, 646, 655, 664, 672, 683, 691, 708, 776, 782, 789, 798, 804, 811, 818, 824, 833, 840, 846, 853, 862, 869, 875, 882, 1048, 1053, 1058, 1063, and 1068.

[2497] In some aspects, VH2 comprises a CDR2 having an amino acid sequence at least 65%, at least 70%, at least 75%, at least 80%, at least 85%, at least 90%, at least 95%, at least 99%, or 100% identical to any one of SEQ ID NOs: 6, 19, 27, 35, 69, 76, 149, 156, 630, 142, 176, 1048, 1053, 1058, 1063, and 1068.

[2498] In some aspects, VH2 comprises a CDR3 having an amino acid sequence at least 65%, at least 70%, at least 75%, at least 80%, at least 85%, at least 90%, at least 95%, at least 99%, or 100% identical to any one of SEQ ID NOs: 7, 13, 20, 28, 36, 40, 46, 53, 63, 70, 77, 84, 91, 97, 103, 110, 117, 124, 128, 135, 143, 150, 157, 164, 170, 177, 184, 190, 197, 203, 210, 217, 224, 230, 237, 241, 244, 248, 253, 257, 259, 261, 263, 265, 267, 269, 271, 274, 276, 278, 281, 297, 320, 322, 327, 330, 332, 631, 647, 656, 665, 673, 684, 692, 700, 709, 717, 765, 767, 769, 774, 783, 790, 793, 799, 805, 812, 819, 825, 834, 841, 847, 854, 857, 863, 870, 876, 883, 886, 1049, 1054, 1059, 1064, and 1069.

[2499] In some aspects, VH2 comprises a CDR3 having an amino acid sequence at least 65%, at least 70%, at least 75%, at least 80%, at least 85%, at least 90%, at least 95%, at least 99%, or 100% identical to any one of SEQ ID NOs: 7, 13, 20, 28, 36, 40, 70, 77, 150, 157, 327, 332, 631, 765, 767, 143, 857, 177, 793, 1049, 1054, 1059, 1064, and 1069.

[2500] In some aspects, VH2 comprises an amino acid sequence at least 65%, at least 70%, at least 75%, at least 80%, at least 85%, at least 90%, at least 95%, at least 99%, or 100% identical to any one of SEQ ID NOs: 8, 14, 21, 22, 29, 37, 47, 54, 57, 64, 71, 78, 85, 92, 98, 104, 111, 118, 125, 129, 136, 137, 144, 151, 158, 165, 171, 178, 185, 191, 198, 204, 211, 218, 225, 231, 238, 245, 254, 258, 260, 262, 264, 266, 268, 270, 272, 275, 277, 279, 280, 282, 298, 321, 331, 626, 644, 653, 662, 670, 681, 689, 698, 706, 715, 775, 777, 784, 791, 800, 806, 813, 820, 826, 835, 842, 848, 855, 864, 871, 877, and 884.

[2501] In some aspects, VH2 comprises an amino acid sequence at least 65%, at least 70%, at least 75%, at least 80%, at least 85%, at least 90%, at least 95%, at least 99%, or 100% identical to any one of SEQ ID NOs: 8, 14, 21, 22, 29, 37, 71, 78, 151, 158, 626, 144, and 178.

[2502] In some aspects, at least one of VL1 or VL2 comprised in the antigen binding polypeptide complexes provided herein comprises (i) a complementarity determining region (CDR) 1 having an amino acid sequence that is at least 65%, at least 70%, at least 75%, at least 80%, at least 85%, at least 90%, at least 95%, at least 99%, or 100% identical to SEQ ID NO: 145 or 1050; (ii) a CDR2 having an amino acid sequence at least 65%, at least 70%, at least 75%, at least 80%, at least 85%, at least 90%, at least 95%, at least 99%, or 100% identical to SEQ ID NO: 1051 or an amino acid sequence that is at least 65%, at least 70%, at least 75%, at least 80%, at least 85%, at least 90%, at least 95%, at least 99%, or 100% identical to amino acid sequence AAS; and (iii) a CDR3 having an amino acid sequence that is at least 65%, at least 70%, at least 75%, at least 80%, at least 85%, at least 90%, at least 95%, at least 99%, or 100% identical to SEQ ID NO: 146 or 764.

[2503] In some aspects, at least one of VH1 or VH2 comprised in the antigen binding polypeptide complexes provided herein comprises (i) a complementarity determining region (CDR) 1 having an amino acid sequence that is at least 65%, at least 70%, at least 75%, at least 80%, at least 85%, at least 90%, at least 95%, at least 99%, or 100% identical to SEQ ID NO: 148 or 1052; (ii) a CDR2 having an amino acid sequence that is at least 65%, at least 70%, at least 75%, at least 80%, at least 85%, at least 90%, at least 95%, at least 99%, or 100% identical to SEQ ID NO: 149 or 1053; and (iii) a CDR3 having an amino acid sequence that is at least 65%, at least 70%, at least 75%, at least 80%, at least 85%, at least 90%, at least 95%, at least 99%, or 100% identical to SEQ ID NO: 150, 765, or 1054.

[2504] In some aspects, at least one of VL1 or VL2 comprised in the antigen binding polypeptide complexes provided herein comprises (i) a complementarity determining region (CDR) 1 having an amino acid sequence that is at least 65%, at least 70%, at least 75%, at least 80%, at least 85%, at least 90%, at least 95%, at least 99%, or 100% identical to SEQ ID NO: 145 or 1050; (ii) a CDR2 having an amino acid sequence at least 65%, at least 70%, at least 75%, at least 80%, at least 85%, at least 90%, at least 95%, at least 99%, or 100% identical to SEQ ID NO: 1051 or an amino acid sequence that is at least 65%, at least 70%, at least 75%, at least 80%, at least 85%, at least 90%, at least 95%, at least 99%, or 100% identical to amino acid sequence AAS; and (iii) a CDR3 having an amino acid sequence that is at least 65%, at least 70%, at least 75%, at least 80%, at least 85%, at least 90%, at least 95%, at least 99%, or 100% identical to SEQ ID NO: 146 or 764; and at least one of VH1 or VH2 comprised in the antigen binding polypeptide complexes provided herein comprises (iv) a complementarity determining region (CDR) 1 having an amino acid sequence that is at least 65%, at least 70%, at least 75%, at least 80%, at least 85%, at least 90%, at least 95%, at least 99%, or 100% identical to SEQ ID NO: 148 or 1052; (v) a CDR2 having an amino acid sequence that is at least 65%, at least 70%, at least 75%, at least 80%, at least 85%, at least 90%, at least 95%, at least 99%, or 100% identical to SEQ ID NO: 149 or 1053; and (vi) a CDR3 having an amino acid sequence that is at least 65%, at least 70%, at least 75%, at least 80%, at least 85%, at least 90%, at least 95%, at least 99%, or 100% identical to SEQ ID NO: 150, 765, or 1054.

[2505] In some aspects, at least one of VL1 or VL2 comprised in the antigen binding polypeptide complexes provided herein comprises an amino acid sequence that is at least 65%, at least 70%, at least 75%, at least 80%, at least 85%, at least 90%, at least 95%, at least 99%, or 100% identical to SEQ ID NO: 147.

[2506] In some aspects, at least one of VH1 or VH2 comprised in the antigen binding polypeptide complexes provided herein comprises an amino acid sequence that is at least 65%, at least 70%, at least 75%, at least 80%, at least 85%, at least 90%, at least 95%, at least 99%, or 100% identical to SEQ ID NO: 151.

[2507] In some aspects, (i) at least one of VL1 or VL2 comprised in the antigen binding polypeptide complexes provided herein comprises an amino acid sequence that is at least 65%, at least 70%, at least 75%, at least 80%, at least 85%, at least 90%, at least 95%, at least 99%, or 100% identical to SEQ ID NO: 147, and (ii) at least one of VH1 or VH2 comprised in the antigen binding polypeptide complexes provided herein comprises an amino acid sequence that is at least 65%, at least 70%, at least 75%, at least 80%, at least 85%, at least 90%, at least 95%, at least 99%, or 100% identical to SEQ ID NO: 151.

[2508] In some aspects, the antigen binding polypeptide complexes provided herein comprise a VL1 comprising (i) a complementarity determining region (CDR) 1 having an amino acid sequence that is at least 65%, at least 70%, at least 75%, at least 80%, at least 85%, at least 90%, at least 95%, at least 99%, or 100% identical to SEQ ID NO: 145 or 1050; (ii) a CDR2 having an amino acid sequence at least 65%, at least 70%, at least 75%, at least 80%, at least 85%, at least 90%, at least 95%, at least 99%, or 100% identical to SEQ ID NO: 1051 or an amino acid sequence that is at least 65%, at least 70%, at least 75%, at least 80%, at least 85%, at least 90%, at least 95%, at least 99%, or 100% identical to amino acid sequence AAS; and (iii) a CDR3 having an amino acid sequence that is at least 65%, at least 70%, at least 75%, at least 80%, at least 85%, at least 90%, at least 95%, at least 99%, or 100% identical to SEQ ID NO: 146 or 764; a VH1 comprising (iv) a complementarity determining region (CDR) 1 having an amino acid sequence that is at least 65%, at least 70%, at least 75%, at least 80%, at least 85%, at least 90%, at least 95%, at least 99%, or 100% identical to SEQ ID NO: 148 or 1052; (v) a CDR2 having an amino acid sequence that is at least 65%, at least 70%, at least 75%, at least 80%, at least 85%, at least 90%, at least 95%, at least 99%, or 100% identical to SEQ ID NO: 149 or 1053; and (vi) a CDR3 having an amino acid sequence that is at least 65%, at least 70%, at least 75%, at least 80%, at least 85%, at least 90%, at least 95%, at least 99%, or 100% identical to SEQ ID NO: 150, 765, or 1054; a VL2 comprising (vii) a complementarity determining region (CDR) 1 having an amino acid sequence that is at least 65%, at least 70%, at least 75%, at least 80%, at least 85%, at least 90%, at least 95%, at least 99%, or 100% identical to any one of SEQ ID NOs: 1, 9, 15, 23, 30, 41, 48, 55, 58, 65, 72, 79, 86, 93, 99, 105, 112, 119, 130, 138, 145, 152, 159, 166, 172, 179, 186, 192, 199, 205, 212, 219, 226, 232, 324, 627, 640, 650, 659, 676, 687, 695, 703, 712, 770, 778, 785, 794, 801, 807, 814, 827, 836, 849, 858, 865, 878, 1045, 1050, 1055, 1060, and 1065; (viii) a CDR2 having an amino acid sequence at least 65%, at least 70%, at least 75%, at least 80%, at least 85%, at least 90%, at least 95%, at least 99%, or 100% identical to any one of SEQ ID NOs: 2, 31, 628, 641, 677, 1046, 1051, 1056, and 1061; or at least 65%, at least 70%, at least 75%, at least 80%, at least 85%, at least 90%, at least 95%, at least 99%, or 100% identical to any one of amino acid sequences AAS, GAS, LGS, GTN, GTN, SAS, SDS, DNT, EVT, DAS, DVT, RNS, DVS, EDS, DDS, KDS, VAS, WAS, YTS, EVS, NNN, SYN, and DAT; (ix) a CDR3 having an amino acid sequence at least 65%, at least 70%, at least 75%, at least 80%, at least 85%, at least 90%, at least 95%, at least 99%, or 100% identical to any one of SEQ ID NOs: 3, 10, 16, 24, 32, 38, 42, 49, 59, 66, 73, 80, 87, 94, 100, 106, 113, 120, 126, 131, 139, 146, 153, 160, 167, 173, 180, 187, 193, 200, 206, 213, 220, 227, 233, 239, 242, 246, 249, 256, 283, 285, 287, 288, 290, 292, 294, 296, 301, 304, 306, 309, 311, 313, 316, 325, 326, 329, 642, 651, 660, 668, 678, 651, 696, 704, 713, 764, 766, 768, 771, 779, 786, 792, 795, 808, 815, 821, 830, 837, 843, 850, 856, 859, 866, 872, 879, 885, and 1066; and a VH2 comprising (x) a CDR1 having an amino acid sequence at least 65%, at least 70%, at least 75%, at least 80%, at least 85%, at least 90%, at least 95%, at least 99%, or 100% identical to any one of SEQ ID NOs: 5, 12, 18, 26, 34, 44, 51, 61, 68, 75, 82, 89, 96, 102, 108, 115, 122, 133, 141, 148, 155, 162, 175, 182, 189, 195, 202, 208, 215, 222, 229, 235, 318, 629, 645, 654, 663, 671, 682, 690, 699, 707, 716, 773, 781, 788, 797, 803, 810, 817, 823, 832, 839, 845, 852, 861, 868, 874, 881, 1047, 1052, 1057, 1062, and 1067; (xi) a CDR2 having an amino acid sequence at least 65%, at least 70%, at least 75%, at least 80%, at least 85%, at least 90%, at least 95%, at least 99%, or 100% identical to any one of SEQ ID NOs: 6, 19, 27, 35, 45, 52, 56, 62, 69, 76, 83, 90, 109, 116, 123, 134, 142, 149, 156, 163, 169, 176, 183, 196, 209, 216, 223, 236, 273, 319, 328, 630, 646, 655, 664, 672, 683, 691, 708, 776, 782, 789, 798, 804, 811, 818, 824, 833, 840, 846, 853, 862, 869, 875, 882, 1048, 1053, 1058, 1063, and 1068; (xii) a CDR3 having an amino acid sequence at least 65%, at least 70%, at least 75%, at least 80%, at least 85%, at least 90%, at least 95%, at least 99%, or 100% identical to any one of SEQ ID NOs: 7, 13, 20, 28, 36, 40, 46, 53, 63, 70, 77, 84, 91, 97, 103, 110, 117, 124, 128, 135, 143, 150, 157, 164, 170, 177, 184, 190, 197, 203, 210, 217, 224, 230, 237, 241, 244, 248, 253, 257, 259, 261, 263, 265, 267, 269, 271, 274, 276, 278, 281, 297, 320, 322, 327, 330, 332, 631, 647, 656, 665, 673, 684, 692, 700, 709, 717, 765, 767, 769, 774, 783, 790, 793, 799, 805, 812, 819, 825, 834, 841, 847, 854, 857, 863, 870, 876, 883, 886, 1049, 1054, 1059, 1064, and 1069.

[2509] In some aspects, the antigen binding polypeptide complexes provided herein comprise (i) a VL1 comprising an amino acid sequence that is at least 65%, at least 70%, at least 75%, at least 80%, at least 85%, at least 90%, at least 95%, at least 99%, or 100% identical to SEQ ID NO: 147; (ii) a VH1 comprising an amino acid sequence that is at least 65%, at least 70%, at least 75%, at least 80%, at least 85%, at least 90%, at least 95%, at least 99%, or 100% identical to SEQ ID NO: 151; (iii) a VL2 comprising an amino acid sequence that is at least 65%, at least 70%, at least 75%, at least 80%, at least 85%, at least 90%, at least 95%, at least 99%, or 100% identical to any one of SEQ ID NOs: 4, 11, 17, 25, 33, 39, 43, 50, 60, 67, 74, 81, 88, 95, 101, 107, 114, 121, 127, 132, 140, 147, 154, 161, 168, 174, 181, 188, 194, 201, 207, 214, 221, 228, 234, 240, 243, 247, 250, 251, 252, 255, 284, 286, 289, 291, 293, 295, 299, 300, 302, 303, 305, 307, 308, 310, 312, 314, 315, 317, 323, 639, 649, 658, 667, 675, 686, 694, 702, 711, 772, 780, 787, 796, 802, 809, 816, 822, 831, 838, 844, 851, 860, 867, 873, 880, and 988; and (iv) a VH2 comprising an amino acid sequence that is at least 65%, at least 70%, at least 75%, at least 80%, at least 85%, at least 90%, at least 95%, at least 99%, or 100% identical to any one of SEQ ID NOs: 8, 14, 21, 22, 29, 37, 47, 54, 57, 64, 71, 78, 85, 92, 98, 104, 111, 118, 125, 129, 136, 137, 144, 151, 158, 165, 171, 178, 185, 191, 198, 204, 211, 218, 225, 231, 238, 245, 254, 258, 260, 262, 264, 266, 268, 270, 272, 275, 277, 279, 280, 282, 298, 321, 331, 626, 644, 653, 662, 670, 681, 689, 698, 706, 715, 775, 777, 784, 791, 800, 806, 813, 820, 826, 835, 842, 848, 855, 864, 871, 877, and 884.

[2510] In some aspects, the antigen binding polypeptide complexes provided herein comprise a VL1 comprising (i) a complementarity determining region (CDR) 1 having an amino acid sequence that is at least 65%, at least 70%, at least 75%, at least 80%, at least 85%, at least 90%, at least 95%, at least 99%, or 100% identical to SEQ ID NO: 145 or 1050; (ii) a CDR2 having an amino acid sequence at least 65%, at least 70%, at least 75%, at least 80%, at least 85%, at least 90%, at least 95%, at least 99%, or 100% identical to SEQ ID NO: 1051 or an amino acid sequence that is at least 65%, at least 70%, at least 75%, at least 80%, at least 85%, at least 90%, at least 95%, at least 99%, or 100% identical to amino acid sequence AAS; and (iii) a CDR3 having an amino acid sequence that is at least 65%, at least 70%, at least 75%, at least 80%, at least 85%, at least 90%, at least 95%, at least 99%, or 100% identical to SEQ ID NO: 146 or 764; a VH1 comprising (iv) a complementarity determining region (CDR) 1 having an amino acid sequence that is at least 65%, at least 70%, at least 75%, at least 80%, at least 85%, at least 90%, at least 95%, at least 99%, or 100% identical to SEQ ID NO: 148 or 1052; (v) a CDR2 having an amino acid sequence that is at least 65%, at least 70%, at least 75%, at least 80%, at least 85%, at least 90%, at least 95%, at least 99%, or 100% identical to SEQ ID NO: 149 or 1053; and (vi) a CDR3 having an amino acid sequence that is at least 65%, at least 70%, at least 75%, at least 80%, at least 85%, at least 90%, at least 95%, at least 99%, or 100% identical to SEQ ID NO: 150, 765, or 1054; a VL2 comprising (vii) a complementarity determining region (CDR) 1 having an amino acid sequence that is at least 65%, at least 70%, at least 75%, at least 80%, at least 85%, at least 90%, at least 95%, at least 99%, or 100% identical to any one of SEQ ID NOs: 1, 9, 15, 23, 30, 65, 72, 145, 152, 324, 627, 138, 172, 1045, 1050, 1055, 1060, and 1065; (viii) a CDR2 having an amino acid sequence at least 65%, at least 70%, at least 75%, at least 80%, at least 85%, at least 90%, at least 95%, at least 99%, or 100% identical to any one of SEQ ID NOs: 2, 31, 628, 1046, 1051, 1056, and 1061, or at least 65%, at least 70%, at least 75%, at least 80%, at least 85%, at least 90%, at least 95%, at least 99%, or 100% identical to any one of amino acid sequences GAS, LGS, GTN, SAS, SDS, AAS, DAS, and DNT; (ix) a CDR3 having an amino acid sequence at least 65%, at least 70%, at least 75%, at least 80%, at least 85%, at least 90%, at least 95%, at least 99%, or 100% identical to any one of SEQ ID NOs: 3, 10, 16, 24, 32, 38, 66, 73, 146, 153, 325, 326, 764, 766, 139, 856, 173, 792, and 1066; and a VH2 comprising (x) a CDR1 having an amino acid sequence at least 65%, at least 70%, at least 75%, at least 80%, at least 85%, at least 90%, at least 95%, at least 99%, or 100% identical to any one of SEQ ID NOs: 5, 12, 18, 26, 34, 68, 75, 148, 155, 629, 141, 175, 1047, 1052, 1057, 1062, and 1067; (xi) a CDR2 having an amino acid sequence at least 65%, at least 70%, at least 75%, at least 80%, at least 85%, at least 90%, at least 95%, at least 99%, or 100% identical to any one of SEQ ID NOs: 6, 19, 27, 35, 69, 76, 149, 156, 630, 142, 176, 1048, 1053, 1058, 1063, and 1068; (xii) a CDR3 having an amino acid sequence at least 65%, at least 70%, at least 75%, at least 80%, at least 85%, at least 90%, at least 95%, at least 99%, or 100% identical to any one of SEQ ID NOs: 7, 13, 20, 28, 36, 40, 70, 77, 327, 150, 157, 332, 631, 765, 767, 143, 857, 177, 793, 1049, 1054, 1059, 1064, and 1069.

[2511] In some aspects, the antigen binding polypeptide complexes provided herein comprise (i) a VL1 comprising an amino acid sequence that is at least 65%, at least 70%, at least 75%, at least 80%, at least 85%, at least 90%, at least 95%, at least 99%, or 100% identical to SEQ ID NO: 147; (ii) a VH1 comprising an amino acid sequence that is at least 65%, at least 70%, at least 75%, at least 80%, at least 85%, at least 90%, at least 95%, at least 99%, or 100% identical to SEQ ID NO: 151; (iii) a VL2 comprising an amino acid sequence that is at least 65%, at least 70%, at least 75%, at least 80%, at least 85%, at least 90%, at least 95%, at least 99%, or 100% identical to any one of SEQ ID NOs: 4, 11, 17, 25, 33, 39, 67, 74, 147, 154, 140, and 174; and (iv) a VH2 comprising an amino acid sequence that is at least 65%, at least 70%, at least 75%, at least 80%, at least 85%, at least 90%, at least 95%, at least 99%, or 100% identical to any one of SEQ ID NOs: 8, 14, 21, 22, 29, 37, 71, 78, 151, 158, 626, 144, and 178.

[2512] In some aspects, the second antigen binding polypeptide comprised in the antigen binding polypeptide complexes disclosed herein, comprises one or more CL, as indicated in the formulas representing the antigen binding polypeptide complexes disclosed herein. In some aspects, the CL comprises an amino acid sequence at least 65%, at least 70%, at least 75%, at least 80%, at least 85%, at least 90%, at least 95%, at least 99%, or 100% identical to any one of SEQ ID NOs: 374, 637, or 1092-1095.

[2513] In some aspects, the first antigen binding polypeptide comprised in the antigen binding polypeptide complexes disclosed herein, comprise one or more CH1, as indicated in the formulas representing the antigen binding polypeptide complexes disclosed herein. In some aspects, the CH1 comprises an amino acid sequence at least 65%, at least 70%, at least 75%, at least 80%, at least 85%, at least 90%, at least 95%, at least 99%, or 100% identical to any one of SEQ ID NO: 375, 634, 1070, 1071, or 1086-1091.

[2514] In some aspects, one or both of the antigen binding polypeptides comprised in the antigen binding polypeptide complexes provided herein further comprise an Fc region. In some aspects, one or both of the antigen binding polypeptides comprised in the antigen binding polypeptide complexes provided herein further comprise an Fc region at the carboxy-terminus. In some aspects, the Fc region comprises an immunoglobulin heavy chain constant region 2 (CH2) and/or an immunoglobulin heavy chain constant region 3 (CH3). In some aspects, the Fc region further comprises an immunoglobulin hinge (i.e., a hinge region). In some aspects, the hinge region is interposed between a CH1 and a CH2 (i.e., a hinge region is localized between the carboxy terminal residue of a CH1 and the N-terminal residue of a CH2). In some aspects, the hinge region comprises an amino acid sequence at least 65%, at least 70%, at least 75%, at least 80%, at least 85%, at least 90%, at least 95%, at least 99%, or 100% identical to any one of SEQ ID NOs: 635, 636, 1072, 1073, or 1074. In some aspects, the Fc region comprises a CH2 and a CH3. In some aspects, the CH2 comprises an amino acid sequence that is at least 65%, at least 70%, at least 75%, at least 80%, at least 85%, at least 90%, at least 95%, at least 99%, or 100% identical to any one of SEQ ID NOs: 1075-1078. In some aspects, the CH3 comprises an amino acid sequence that is at least 65%, at least 70%, at least 75%, at least 80%, at least 85%, at least 90%, at least 95%, at least 99%, or 100% identical to any one of SEQ ID NOs: 1079-1085. In some aspects, the Fc region comprises an amino acid sequence that is at least 65%, at least 70%, at least 75%, at least 80%, at least 85%, at least 90%, at least 95%, at least 99%, or 100% identical to any one of SEQ ID NOs: 376-380.

[2515] In some aspects, the Fc region comprises one or more amino acid substitutions. In some aspects, the one or more amino acid substitutions comprise one or more half-life extension amino acid substitutions. In some aspects, the one or more half-life extension amino acid substitutions comprise one or more of amino acid substitutions M428L, N434A, N434S, L234F, L235E, P331S, M252Y, S254T, or T256E, or equivalent thereof, based on the EU numbering scheme. In some aspects, the one or more half-life extension amino acid substitutions comprise a LA (M428L and N434A, or equivalent thereof, based on the EU numbering scheme) amino acid substitution. In some aspects, the one or more half-life extension amino acid substitutions comprise a LS (M428L and N434S, or equivalent thereof, based on the EU numbering scheme) amino acid substitution. In some aspects, the one or more half-life extension amino acid substitutions comprise L234F and L235E, or equivalent thereof (based on the EU numbering scheme) amino acid substitutions. In some aspects, the one or more half-life extension amino acid substitutions comprise a TM (L234F, L235E, and P331S, or equivalent thereof, based on the EU numbering scheme) amino acid substitution. In some aspects, the one or more half-life extension amino acid substitutions comprise a YTE (M252Y, S254T, and T256E, or equivalent thereof, based on the EU numbering scheme) amino acid substitution.

[2516] In some aspects, the Fc region comprises at least one knob-into-hole modification. In some aspects, the antigen binding polypeptides disclosed herein are comprised in IgG1 or IgG4 antibodies or antigen binding fragments thereof. In some aspects, the knob-into-hole modification comprises one or more of knob substitutions of S354C and T366W, or equivalent thereof, and/or one or more of hole substitutions of Y349C, T366S, L368A, Y407V, or equivalent thereof, or a combination thereof, based on the EU numbering scheme. In some aspects, the Fc region comprises a knob-into-hole modification comprising knob substitutions of S354C and T366W, or equivalent thereof, and/or hole substitutions of Y349C, T366S, L368A and Y407V, or equivalent thereof, and/or a half-life extension amino acid substitution comprising: a LA (M428L and N434A, or equivalent thereof, based on the EU numbering scheme) amino acid substitution, a LS (M428L and N434S, or equivalent thereof, based on the EU numbering scheme) amino acid substitution. L234F and L235E, or equivalent thereof (based on the EU numbering scheme) amino acid substitutions, a TM (L234F, L235E, and P331S, or equivalent thereof, based on the EU numbering scheme) amino acid substitution, a YTE (M252Y, S254T, and T256E, or equivalent thereof, based on the EU numbering scheme) amino acid substitution, or any combination thereof.

[2517] In some aspects, the Fc region comprises knob substitutions of S354C and T366W, or equivalent thereof, and a half-life extension amino acid substitution comprising: a LA (M428L and N434A, or equivalent thereof, based on the EU numbering scheme) amino acid substitution, a LS (M428L and N434S, or equivalent thereof, based on the EU numbering scheme) amino acid substitution. L234F and L235E, or equivalent thereof (based on the EU numbering scheme) amino acid substitutions, a TM (L234F, L235E, and P331S, or equivalent thereof, based on the EU numbering scheme) amino acid substitution, a YTE (M252Y, S254T, and T256E, or equivalent thereof, based on the EU numbering scheme) amino acid substitution, or any combination thereof.

[2518] In some aspects, the Fc region comprises hole substitutions of Y349C, T366S, L368A and Y407V, or equivalent thereof, and a half-life extension amino acid substitution comprising: a LA (M428L and N434A, or equivalent thereof, based on the EU numbering scheme) amino acid substitution, a LS (M428L and N434S, or equivalent thereof, based on the EU numbering scheme) amino acid substitution, L234F and L235E, or equivalent thereof (based on the EU numbering scheme) amino acid substitutions, a TM (L234F, L235E, and P331S, or equivalent thereof, based on the EU numbering scheme) amino acid substitution, a YTE (M252Y, S254T, and T256E, or equivalent thereof, based on the EU numbering scheme) amino acid substitution, or any combination thereof.

[2519] In some aspects, one or both of the antigen binding polypeptides comprised in the antigen binding polypeptide complexes disclosed herein comprise one or more Fc effector function knockout mutation. In some aspects, the antigen binding polypeptide complexes disclosed herein are IgG1 or IgG4 antibodies or antigen binding fragments thereof. In some aspects, the Fc effector function knockout mutation is L234A, L235A, P239A, or equivalent thereof, or a combination thereof, based on the EU numbering scheme.

[2520] In some aspects, one or both of the antigen binding polypeptides comprised in the antigen binding polypeptide complexes disclosed herein comprise a mutation at a glycosylation site. In some aspects, the mutation at a glycosylation site is a mutation at an N-glycosylation site. In some aspects, one or both of the antigen binding polypeptides comprised in the antigen binding polypeptide complexes disclosed herein comprise a VH comprising a mutation at a glycosylation site. In some aspects, the mutation at a glycosylation site is a mutation at an N-glycosylation site. In some aspects, the mutation at an N-glycosylation site is at amino acid N62 of the VH region or equivalent thereof. In some aspects, the mutation at an N-glycosylation site at amino acid N62 is N62Q or N62S, or equivalent thereof.

[2521] In some aspects, one or both of the antigen binding polypeptides comprised in the antigen binding polypeptide complexes disclosed herein, comprise one or more optional linkers. The one or more optional linkers are indicated herein as Ln, wherein n is an integer, and the integer next to each L indicates each L comprised in the antigen binding polypeptides comprised in the antigen binding polypeptide complexes disclosed herein. For example, if an antigen binding polypeptide comprised in the antigen binding polypeptide complexes disclosed herein comprises two linkers, the first linker from N-terminus to C-terminus is herein indicated as L1, and the second linker from N-terminus to C-terminus is herein indicated as L2. If an antigen binding polypeptide complex disclosed herein comprises a first antigen binding polypeptide comprising two linkers, indicated herein as L1 and L2, as explained above, the linkers comprised in the second antigen binding polypeptide are indicated with the following integer, in this example, the first linker from N-terminus to C-terminus of the second antigen binding polypeptide is herein indicated as L3, the second linker from N-terminus to C-terminus of the second antigen binding polypeptide is herein indicated as L3. In some aspects, any one of the optional linkers each independently have a length of from 0 amino acids to about 50 amino acids. In some aspects, any one of the optional linkers each independently have a length of from 5 amino acids to about 40 amino acids.

[2522] In some aspects, any one of the optional linkers are non-immunogenic. In some aspects, any one of the optional linkers do not contain a consensus T cell epitope.

[2523] In some aspects, any of Ln comprises an amino acid sequence of G or A, or an amino acid sequence at least 65%, at least 70%, at least 75%, at least 80%, at least 85%, at least 90%, at least 95%, at least 99%, or 100% identical to amino acid sequence GSS or ASG, or an amino acid sequence at least 65%, at least 70%, at least 75%, at least 80%, at least 85%, at least 90%, at least 95%, at least 99%, or 100% identical to any one of SEQ ID NOs: 333-373 or 967-971. In some aspects, Ln comprises an amino acid sequence at least 65%, at least 70%, at least 75%, at least 80%, at least 85%, at least 90%, at least 95%, at least 99%, or 100% identical to any one of SEQ ID NOs: 333-345 or 967-971.

[2524] In some aspects, an antigen binding polypeptide complex provided herein comprises a first polypeptide, and a second polypeptide; wherein the first polypeptide has a structure represented by VL1-VH1-CL or VH1-VL1-CL; and wherein the second polypeptide has a structure represented by VL2-VH2-CH1 or VH2-VL2-CH1.

[2525] In some aspects, an antigen binding polypeptide complex provided herein comprises a first polypeptide, and a second polypeptide; wherein the first polypeptide has a structure represented by VL1-L1-VH1-L2-CL or VH1-L1-VL1-L2-CL; and wherein the second polypeptide has a structure represented by VL2-L3-VH2-L4-CH1 or VH2-L3-VL2-L4-CH1.

[2526] In some aspects, an antigen binding polypeptide complex provided herein comprises a first polypeptide, and a second polypeptide; wherein the first polypeptide has a structure represented by VL1-VH1-CL-CH2-CH3 or VH1-VL1-CL-CH2-CH3; and wherein the second polypeptide has a structure represented by VL2-VH2-CH1-CH2-CH3 or VH2-VL2-CH1-CH2-CH3.

[2527] In some aspects, an antigen binding polypeptide complex provided herein comprises a first polypeptide, and a second polypeptide; wherein the first polypeptide has a structure represented by VL1-L1-VH1-L2-CL-CH2-CH3 or VH1-L1-VL1-L2-CL-CH2-CH3; and wherein the second polypeptide has a structure represented by VL2-L3-VH2-L4-CH1-CH2-CH3 or VH2-L3-VL2-L4-CH1-CH2-CH3.

[2528] In some aspects, VL1 is a first immunoglobulin light chain variable region that specifically binds to a SARS-CoV-2 protein (e.g., a SARS-CoV-2 spike protein); VL2 is a second immunoglobulin light chain variable region that specifically binds to a SARS-CoV-2 protein (e.g., a SARS-CoV-2 spike protein); VH1 is a first immunoglobulin heavy chain variable region that specifically binds to a SARS-CoV-2 protein (e.g., a SARS-CoV-2 spike protein); VH2 is a second immunoglobulin heavy chain variable region that specifically binds to a SARS-CoV-2 protein (e.g., a SARS-CoV-2 spike protein); CH1 is an immunoglobulin heavy chain constant region 1; CL is an immunoglobulin light chain constant region; and L1-L4 are optional amino acid linkers. In any aspect shown herein as a structure from amino terminus to carboxy terminus, and with binding pairs selected from VL and/or VH or other structural regions such as CH1, CL, CH2, CH3, when shown without a specific linker such as L1, L2, etc., such linkers are optionally present in such structures between each designated subsequence VL, VH, etc.

[2529] In some aspects, the VL1 and the VL2 each comprise a CDR1, a CDR2, and a CDR3 that are the same. In some aspects, the VL1 and the VL2 each comprise a CDR1, a CDR2, and a CDR3 that are different.

[2530] In some aspects, the VL1 and the VL2 each comprise an amino acid sequence, wherein the amino acid sequence comprised in VL1 and the amino acid sequence comprised in VL2 are the same. In some aspects, the VL1 and the VL2 each comprise an amino acid sequence, wherein the amino acid sequence comprised in VL1 and the amino acid sequence comprised in VL2 are different.

[2531] In some aspects, VL1 comprises a CDR1 having an amino acid sequence at least 65%, at least 70%, at least 75%, at least 80%, at least 85%, at least 90%, at least 95%, at least 99%, or 100% identical to any one of SEQ ID NOs: 1, 9, 15, 23, 30, 41, 48, 55, 58, 65, 72, 79, 86, 93, 99, 105, 112, 119, 130, 138, 145, 152, 159, 166, 172, 179, 186, 192, 199, 205, 212, 219, 226, 232, 324, 627, 640, 650, 659, 676, 687, 695, 703, 712, 770, 778, 785, 794, 801, 807, 814, 827, 836, 849, 858, 865, 878, 1045, 1050, 1055, 1060, and 1065.

[2532] In some aspects, VL1 comprises a CDR1 having an amino acid sequence at least 65%, at least 70%, at least 75%, at least 80%, at least 85%, at least 90%, at least 95%, at least 99%, or 100% identical to any one of SEQ ID NOs: 1, 9, 15, 23, 30, 65, 72, 145, 152, 324, 627, 138, 172, 1045, 1050, 1055, 1060, and 1065.

[2533] In some aspects, VL1 comprises a CDR2 having an amino acid sequence at least 65%, at least 70%, at least 75%, at least 80%, at least 85%, at least 90%, at least 95%, at least 99%, or 100% identical to any one of SEQ ID NOs: 2, 31, 628, 641, 677, 1046, 1051, 1056, and 1061; or at least 65%, at least 70%, at least 75%, at least 80%, at least 85%, at least 90%, at least 95%, at least 99%, or 100% identical to any one of amino acid sequences AAS, GAS, LGS, GTN, GTN, SAS, SDS, DNT, EVT, DAS, DVT, RNS, DVS, EDS, DDS, KDS, VAS, WAS, YTS, EVS, NNN, SYN, and DAT.

[2534] In some aspects, VL1 comprises a CDR2 having an amino acid sequence at least 65%, at least 70%, at least 75%, at least 80%, at least 85%, at least 90%, at least 95%, at least 99%, or 100% identical to any one of SEQ ID NOs: 2, 31, 628, 1046, 1051, 1056, and 1061, or at least 65%, at least 70%, at least 75%, at least 80%, at least 85%, at least 90%, at least 95%, at least 99%, or 100% identical to any one of amino acid sequences GAS, LGS, GTN, SAS, SDS, AAS, DAS, and DNT.

[2535] In some aspects, VL1 comprises a CDR3 having an amino acid sequence at least 65%, at least 70%, at least 75%, at least 80%, at least 85%, at least 90%, at least 95%, at least 99%, or 100% identical to any one of SEQ ID NOs: 3, 10, 16, 24, 32, 38, 42, 49, 59, 66, 73, 80, 87, 94, 100, 106, 113, 120, 126, 131, 139, 146, 153, 160, 167, 173, 180, 187, 193, 200, 206, 213, 220, 227, 233, 239, 242, 246, 249, 256, 283, 285, 287, 288, 290, 292, 294, 296, 301, 304, 306, 309, 311, 313, 316, 325, 326, 329, 642, 651, 660, 668, 678, 651, 696, 704, 713, 764, 766, 768, 771, 779, 786, 792, 795, 808, 815, 821, 830, 837, 843, 850, 856, 859, 866, 872, 879, 885, and 1066.

[2536] In some aspects, VL1 comprises a CDR3 having an amino acid sequence at least 65%, at least 70%, at least 75%, at least 80%, at least 85%, at least 90%, at least 95%, at least 99%, or 100% identical to any one of SEQ ID NOs: 3, 10, 16, 24, 32, 38, 66, 73, 146, 153, 325 326, 764, and 766.

[2537] In some aspects, VL1 comprises a CDR1 having an amino acid sequence at least 65%, at least 70%, at least 75%, at least 80%, at least 85%, at least 90%, at least 95%, at least 99%, or 100% identical to SEQ ID NO: 15, a CDR2 having an amino acid sequence at least 65%, at least 70%, at least 75%, at least 80%, at least 85%, at least 90%, at least 95%, at least 99%, or 100% identical to amino acid sequence LGS, and a CDR3 having an amino acid sequence at least 65%, at least 70%, at least 75%, at least 80%, at least 85%, at least 90%, at least 95%, at least 99%, or 100% identical to SEQ ID NO: 16.

[2538] In some aspects, VL1 comprises a CDR1 having an amino acid sequence at least 65%, at least 70%, at least 75%, at least 80%, at least 85%, at least 90%, at least 95%, at least 99%, or 100% identical to SEQ ID NO: 9 or 1055, a CDR2 having an amino acid sequence at least 65%, at least 70%, at least 75%, at least 80%, at least 85%, at least 90%, at least 95%, at least 99%, or 100% identical to SEQ ID NO: 1056 or an amino acid sequence at least 65%, at least 70%, at least 75%, at least 80%, at least 85%, at least 90%, at least 95%, at least 99%, or 100% identical to amino acid sequence GAS, and a CDR3 having an amino acid sequence at least 65%, at least 70%, at least 75%, at least 80%, at least 85%, at least 90%, at least 95%, at least 99%, or 100% identical to SEQ ID NO: 10.

[2539] In some aspects, VL1 comprises a CDR1 having an amino acid sequence at least 65%, at least 70%, at least 75%, at least 80%, at least 85%, at least 90%, at least 95%, at least 99%, or 100% identical to SEQ ID NO: 75, a CDR2 having an amino acid sequence at least 65%, at least 70%, at least 75%, at least 80%, at least 85%, at least 90%, at least 95%, at least 99%, or 100% identical to SEQ ID NO: 76, and a CDR3 having an amino acid sequence at least 65%, at least 70%, at least 75%, at least 80%, at least 85%, at least 90%, at least 95%, at least 99%, or 100% identical to SEQ ID NO: 77.

[2540] In some aspects, VL1 comprises an amino acid sequence at least 65%, at least 70%, at least 75%, at least 80%, at least 85%, at least 90%, at least 95%, at least 99%, or 100% identical to any one of SEQ ID NOs: 4, 11, 17, 25, 33, 39, 43, 50, 60, 67, 74, 81, 88, 95, 101, 107, 114, 121, 127, 132, 140, 147, 154, 161, 168, 174, 181, 188, 194, 201, 207, 214, 221, 228, 234, 240, 243, 247, 250, 251, 252, 255, 284, 286, 289, 291, 293, 295, 299, 300, 302, 303, 305, 307, 308, 310, 312, 314, 315, 317, 323, 639, 649, 658, 667, 675, 686, 694, 702, 711, 772, 780, 787, 796, 802, 809, 816, 822, 831, 838, 844, 851, 860, 867, 873, 880, and 988.

[2541] In some aspects, VL1 comprises an amino acid sequence at least 65%, at least 70%, at least 75%, at least 80%, at least 85%, at least 90%, at least 95%, at least 99%, or 100% identical to any one of SEQ ID NOs: 4, 11, 17, 25, 33, 39, 67, 74, 147, 154, 140, and 174.

[2542] In some aspects, VH1 comprises a CDR1 having an amino acid sequence at least 65%, at least 70%, at least 75%, at least 80%, at least 85%, at least 90%, at least 95%, at least 99%, or 100% identical to any one of SEQ ID NOs: 5, 12, 18, 26, 34, 44, 51, 61, 68, 75, 82, 89, 96, 102, 108, 115, 122, 133, 141, 148, 155, 162, 175, 182, 189, 195, 202, 208, 215, 222, 229, 235, 318, 629, 645, 654, 663, 671, 682, 690, 699, 707, 716, 773, 781, 788, 797, 803, 810, 817, 823, 832, 839, 845, 852, 861, 868, 874, 881, 1047, 1052, 1057, 1062, and 1067.

[2543] In some aspects, VH1 comprises a CDR1 having an amino acid sequence at least 65%, at least 70%, at least 75%, at least 80%, at least 85%, at least 90%, at least 95%, at least 99%, or 100% identical to any one of SEQ ID NOs: 5, 12, 18, 26, 34, 68, 75, 148, 155, 629, 141, 175, 1047, 1052, 1057, 1062, and 1067.

[2544] In some aspects, VH1 comprises a CDR2 having an amino acid sequence at least 65%, at least 70%, at least 75%, at least 80%, at least 85%, at least 90%, at least 95%, at least 99%, or 100% identical to any one of SEQ ID NOs: 6, 19, 27, 35, 45, 52, 56, 62, 69, 76, 83, 90, 109, 116, 123, 134, 142, 149, 156, 163, 169, 176, 183, 196, 209, 216, 223, 236, 273, 319, 328, 630, 646, 655, 664, 672, 683, 691, 708, 776, 782, 789, 798, 804, 811, 818, 824, 833, 840, 846, 853, 862, 869, 875, 882, 1048, 1053, 1058, 1063, and 1068.

[2545] In some aspects, VH1 comprises a CDR2 having an amino acid sequence at least 65%, at least 70%, at least 75%, at least 80%, at least 85%, at least 90%, at least 95%, at least 99%, or 100% identical to any one of SEQ ID NOs: 6, 19, 27, 35, 69, 76, 149, 156, 630, 142, 176, 1048, 1053, 1058, 1063, and 1068.

[2546] In some aspects, VH1 comprises a CDR3 having an amino acid sequence at least 65%, at least 70%, at least 75%, at least 80%, at least 85%, at least 90%, at least 95%, at least 99%, or 100% identical to any one of SEQ ID NOs: 7, 13, 20, 28, 36, 40, 46, 53, 63, 70, 77, 84, 91, 97, 103, 110, 117, 124, 128, 135, 143, 150, 157, 164, 170, 177, 184, 190, 197, 203, 210, 217, 224, 230, 237, 241, 244, 248, 253, 257, 259, 261, 263, 265, 267, 269, 271, 274, 276, 278, 281, 297, 320, 322, 327, 330, 332, 631, 647, 656, 665, 673, 684, 692, 700, 709, 717, 765, 767, 769, 774, 783, 790, 793, 799, 805, 812, 819, 825, 834, 841, 847, 854, 857, 863, 870, 876, 883, 886, 1049, 1054, 1059, 1064, and 1069.

[2547] In some aspects, VH1 comprises a CDR3 having an amino acid sequence at least 65%, at least 70%, at least 75%, at least 80%, at least 85%, at least 90%, at least 95%, at least 99%, or 100% identical to any one of SEQ ID NOs: 7, 13, 20, 28, 36, 40, 70, 77, 150, 157, 327, 332, 631, 765, 767, 143, 857, 177, 793, 1049, 1054, 1059, 1064, and 1069.

[2548] In some aspects, VH1 comprises a CDR1 having an amino acid sequence at least 65%, at least 70%, at least 75%, at least 80%, at least 85%, at least 90%, at least 95%, at least 99%, or 100% identical to SEQ ID NO: 18, a CDR2 having an amino acid sequence at least 65%, at least 70%, at least 75%, at least 80%, at least 85%, at least 90%, at least 95%, at least 99%, or 100% identical to SEQ ID NO: 19, and a CDR3 having an amino acid sequence at least 65%, at least 70%, at least 75%, at least 80%, at least 85%, at least 90%, at least 95%, at least 99%, or 100% identical to SEQ ID NO: 20.

[2549] In some aspects, VH1 comprises a CDR1 having an amino acid sequence at least 65%, at least 70%, at least 75%, at least 80%, at least 85%, at least 90%, at least 95%, at least 99%, or 100% identical to SEQ ID NO: 12 or 1057, a CDR2 having an amino acid sequence at least 65%, at least 70%, at least 75%, at least 80%, at least 85%, at least 90%, at least 95%, at least 99%, or 100% identical to SEQ ID NO: 6 or 1058, and a CDR3 having an amino acid sequence at least 65%, at least 70%, at least 75%, at least 80%, at least 85%, at least 90%, at least 95%, at least 99%, or 100% identical to SEQ ID NO: 13 or 1059.

[2550] In some aspects, VH1 comprises a CDR1 having an amino acid sequence at least 65%, at least 70%, at least 75%, at least 80%, at least 85%, at least 90%, at least 95%, at least 99%, or 100% identical to SEQ ID NO: 75, a CDR2 having an amino acid sequence at least 65%, at least 70%, at least 75%, at least 80%, at least 85%, at least 90%, at least 95%, at least 99%, or 100% identical to SEQ ID NO: 76, and a CDR3 having an amino acid sequence at least 65%, at least 70%, at least 75%, at least 80%, at least 85%, at least 90%, at least 95%, at least 99%, or 100% identical to SEQ ID NO: 77.

[2551] In some aspects, VH1 comprises an amino acid sequence at least 65%, at least 70%, at least 75%, at least 80%, at least 85%, at least 90%, at least 95%, at least 99%, or 100% identical to any one of SEQ ID NOs: 8, 14, 21, 22, 29, 37, 47, 54, 57, 64, 71, 78, 85, 92, 98, 104, 111, 118, 125, 129, 136, 137, 144, 151, 158, 165, 171, 178, 185, 191, 198, 204, 211, 218, 225, 231, 238, 245, 254, 258, 260, 262, 264, 266, 268, 270, 272, 275, 277, 279, 280, 282, 298, 321, 331, 626, 644, 653, 662, 670, 681, 689, 698, 706, 715, 775, 777, 784, 791, 800, 806, 813, 820, 826, 835, 842, 848, 855, 864, 871, 877, and 884.

[2552] In some aspects, VH1 comprises an amino acid sequence at least 65%, at least 70%, at least 75%, at least 80%, at least 85%, at least 90%, at least 95%, at least 99%, or 100% identical to any one of SEQ ID NOs: 8, 14, 21, 22, 29, 37, 71, 78, 151, 158, 626, 144, and 178.

[2553] In some aspects, VL2 comprises a CDR1 having an amino acid sequence at least 65%, at least 70%, at least 75%, at least 80%, at least 85%, at least 90%, at least 95%, at least 99%, or 100% identical to any one of SEQ ID NOs: 1, 9, 15, 23, 30, 41, 48, 55, 58, 65, 72, 79, 86, 93, 99, 105, 112, 119, 130, 138, 145, 152, 159, 166, 172, 179, 186, 192, 199, 205, 212, 219, 226, 232, 324, 627, 640, 650, 659, 676, 687, 695, 703, 712, 770, 778, 785, 794, 801, 807, 814, 827, 836, 849, 858, 865, 878, 1045, 1050, 1055, 1060, and 1065.

[2554] In some aspects, VL2 comprises a CDR1 having an amino acid sequence at least 65%, at least 70%, at least 75%, at least 80%, at least 85%, at least 90%, at least 95%, at least 99%, or 100% identical to any one of SEQ ID NOs: 1, 9, 15, 23, 30, 65, 72, 145, 152, 324, 627, 138, 172, 1045, 1050, 1055, 1060, and 1065.

[2555] In some aspects, VL2 comprises a CDR2 having an amino acid sequence at least 65%, at least 70%, at least 75%, at least 80%, at least 85%, at least 90%, at least 95%, at least 99%, or 100% identical to any one of SEQ ID NOs: 2, 31, 628, 641, 677, 1046, 1051, 1056, and 1061; or at least 65%, at least 70%, at least 75%, at least 80%, at least 85%, at least 90%, at least 95%, at least 99%, or 100% identical to any one of amino acid sequences AAS, GAS, LGS, GTN, GTN, SAS, SDS, DNT, EVT, DAS, DVT, RNS, DVS, EDS, DDS, KDS, VAS, WAS, YTS, EVS, NNN, SYN, and DAT.

[2556] In some aspects, VL2 comprises a CDR2 having an amino acid sequence at least 65%, at least 70%, at least 75%, at least 80%, at least 85%, at least 90%, at least 95%, at least 99%, or 100% identical to any one of SEQ ID NOs: 2, 31, 628, 1046, 1051, 1056, and 1061, or at least 65%, at least 70%, at least 75%, at least 80%, at least 85%, at least 90%, at least 95%, at least 99%, or 100% identical to any one of amino acid sequences GAS, LGS, GTN, SAS, SDS, AAS, DAS, and DNT.

[2557] In some aspects, VL2 comprises a CDR3 having an amino acid sequence at least 65%, at least 70%, at least 75%, at least 80%, at least 85%, at least 90%, at least 95%, at least 99%, or 100% identical to any one of SEQ ID NOs: 3, 10, 16, 24, 32, 38, 42, 49, 59, 66, 73, 80, 87, 94, 100, 106, 113, 120, 126, 131, 139, 146, 153, 160, 167, 173, 180, 187, 193, 200, 206, 213, 220, 227, 233, 239, 242, 246, 249, 256, 283, 285, 287, 288, 290, 292, 294, 296, 301, 304, 306, 309, 311, 313, 316, 325, 326, 329, 642, 651, 660, 668, 678, 651, 696, 704, 713, 764, 766, 768, 771, 779, 786, 792, 795, 808, 815, 821, 830, 837, 843, 850, 856, 859, 866, 872, 879, 885, and 1066.

[2558] In some aspects, VL2 comprises a CDR3 having an amino acid sequence at least 65%, at least 70%, at least 75%, at least 80%, at least 85%, at least 90%, at least 95%, at least 99%, or 100% identical to any one of SEQ ID NOs: 3, 10, 16, 24, 32, 38, 66, 73, 146, 153, 325 326, 764, and 766.

[2559] In some aspects, VL2 comprises a CDR1 having an amino acid sequence at least 65%, at least 70%, at least 75%, at least 80%, at least 85%, at least 90%, at least 95%, at least 99%, or 100% identical to SEQ ID NO: 15, a CDR2 having an amino acid sequence at least 65%, at least 70%, at least 75%, at least 80%, at least 85%, at least 90%, at least 95%, at least 99%, or 100% identical to amino acid sequence LGS, and a CDR3 having an amino acid sequence at least 65%, at least 70%, at least 75%, at least 80%, at least 85%, at least 90%, at least 95%, at least 99%, or 100% identical to SEQ ID NO: 16.

[2560] In some aspects, VL2 comprises a CDR1 having an amino acid sequence at least 65%, at least 70%, at least 75%, at least 80%, at least 85%, at least 90%, at least 95%, at least 99%, or 100% identical to SEQ ID NO: 9 or 1055, a CDR2 having an amino acid sequence at least 65%, at least 70%, at least 75%, at least 80%, at least 85%, at least 90%, at least 95%, at least 99%, or 100% identical to SEQ ID NO: 1056 or an amino acid sequence at least 65%, at least 70%, at least 75%, at least 80%, at least 85%, at least 90%, at least 95%, at least 99%, or 100% identical to amino acid sequence GAS, and a CDR3 having an amino acid sequence at least 65%, at least 70%, at least 75%, at least 80%, at least 85%, at least 90%, at least 95%, at least 99%, or 100% identical to SEQ ID NO: 10.

[2561] In some aspects, VL2 comprises a CDR1 having an amino acid sequence at least 65%, at least 70%, at least 75%, at least 80%, at least 85%, at least 90%, at least 95%, at least 99%, or 100% identical to SEQ ID NO: 72, a CDR2 having an amino acid sequence at least 65%, at least 70%, at least 75%, at least 80%, at least 85%, at least 90%, at least 95%, at least 99%, or 100% identical to amino acid sequence DNT, and a CDR3 having an amino acid sequence at least 65%, at least 70%, at least 75%, at least 80%, at least 85%, at least 90%, at least 95%, at least 99%, or 100% identical to SEQ ID NO: 73.

[2562] In some aspects, VL2 comprises an amino acid sequence at least 65%, at least 70%, at least 75%, at least 80%, at least 85%, at least 90%, at least 95%, at least 99%, or 100% identical to any one of SEQ ID NOs: 4, 11, 17, 25, 33, 39, 43, 50, 60, 67, 74, 81, 88, 95, 101, 107, 114, 121, 127, 132, 140, 147, 154, 161, 168, 174, 181, 188, 194, 201, 207, 214, 221, 228, 234, 240, 243, 247, 250, 251, 252, 255, 284, 286, 289, 291, 293, 295, 299, 300, 302, 303, 305, 307, 308, 310, 312, 314, 315, 317, 323, 639, 649, 658, 667, 675, 686, 694, 702, 711, 772, 780, 787, 796, 802, 809, 816, 822, 831, 838, 844, 851, 860, 867, 873, 880, and 988.

[2563] In some aspects, VL2 comprises an amino acid sequence at least 65%, at least 70%, at least 75%, at least 80%, at least 85%, at least 90%, at least 95%, at least 99%, or 100% identical to any one of SEQ ID NOs: 4, 11, 17, 25, 33, 39, 67, 74, 147, 154, 140, and 174.

[2564] In some aspects, VH2 comprises a CDR1 having an amino acid sequence at least 65%, at least 70%, at least 75%, at least 80%, at least 85%, at least 90%, at least 95%, at least 99%, or 100% identical to any one of SEQ ID NOs: 5, 12, 18, 26, 34, 44, 51, 61, 68, 75, 82, 89, 96, 102, 108, 115, 122, 133, 141, 148, 155, 162, 175, 182, 189, 195, 202, 208, 215, 222, 229, 235, 318, 629, 645, 654, 663, 671, 682, 690, 699, 707, 716, 773, 781, 788, 797, 803, 810, 817, 823, 832, 839, 845, 852, 861, 868, 874, 881, 1047, 1052, 1057, 1062, and 1067.

[2565] In some aspects, VH2 comprises a CDR1 having an amino acid sequence at least 65%, at least 70%, at least 75%, at least 80%, at least 85%, at least 90%, at least 95%, at least 99%, or 100% identical to any one of SEQ ID NOs: 5, 12, 18, 26, 34, 68, 75, 148, 155, 629, 141, 175, 1047, 1052, 1057, 1062, and 1067.

[2566] In some aspects, VH2 comprises a CDR2 having an amino acid sequence at least 65%, at least 70%, at least 75%, at least 80%, at least 85%, at least 90%, at least 95%, at least 99%, or 100% identical to any one of SEQ ID NOs: 6, 19, 27, 35, 45, 52, 56, 62, 69, 76, 83, 90, 109, 116, 123, 134, 142, 149, 156, 163, 169, 176, 183, 196, 209, 216, 223, 236, 273, 319, 328, 630, 646, 655, 664, 672, 683, 691, 708, 776, 782, 789, 798, 804, 811, 818, 824, 833, 840, 846, 853, 862, 869, 875, 882, 1048, 1053, 1058, 1063, and 1068.

[2567] In some aspects, VH2 comprises a CDR2 having an amino acid sequence at least 65%, at least 70%, at least 75%, at least 80%, at least 85%, at least 90%, at least 95%, at least 99%, or 100% identical to any one of SEQ ID NOs: 6, 19, 27, 35, 69, 76, 149, 156, 630, 142, 176, 1048, 1053, 1058, 1063, and 1068.

[2568] In some aspects, VH2 comprises a CDR3 having an amino acid sequence at least 65%, at least 70%, at least 75%, at least 80%, at least 85%, at least 90%, at least 95%, at least 99%, or 100% identical to any one of SEQ ID NOs: 7, 13, 20, 28, 36, 40, 46, 53, 63, 70, 77, 84, 91, 97, 103, 110, 117, 124, 128, 135, 143, 150, 157, 164, 170, 177, 184, 190, 197, 203, 210, 217, 224, 230, 237, 241, 244, 248, 253, 257, 259, 261, 263, 265, 267, 269, 271, 274, 276, 278, 281, 297, 320, 322, 327, 330, 332, 631, 647, 656, 665, 673, 684, 692, 700, 709, 717, 765, 767, 769, 774, 783, 790, 793, 799, 805, 812, 819, 825, 834, 841, 847, 854, 857, 863, 870, 876, 883, 886, 1049, 1054, 1059, 1064, and 1069.

[2569] In some aspects, VH2 comprises a CDR3 having an amino acid sequence at least 65%, at least 70%, at least 75%, at least 80%, at least 85%, at least 90%, at least 95%, at least 99%, or 100% identical to any one of SEQ ID NOs: 7, 13, 20, 28, 36, 40, 70, 77, 150, 157, 327, 332, 631, 765, 767, 143, 857, 177, 793, 1049, 1054, 1059, 1064, and 1069.

[2570] In some aspects, VH2 comprises a CDR1 having an amino acid sequence at least 65%, at least 70%, at least 75%, at least 80%, at least 85%, at least 90%, at least 95%, at least 99%, or 100% identical to SEQ ID NO: 18, a CDR2 having an amino acid sequence at least 65%, at least 70%, at least 75%, at least 80%, at least 85%, at least 90%, at least 95%, at least 99%, or 100% identical to SEQ ID NO: 19, and a CDR3 having an amino acid sequence at least 65%, at least 70%, at least 75%, at least 80%, at least 85%, at least 90%, at least 95%, at least 99%, or 100% identical to SEQ ID NO: 20.

[2571] In some aspects, VH2 comprises a CDR1 having an amino acid sequence at least 65%, at least 70%, at least 75%, at least 80%, at least 85%, at least 90%, at least 95%, at least 99%, or 100% identical to SEQ ID NO: 12 or 1057, a CDR2 having an amino acid sequence at least 65%, at least 70%, at least 75%, at least 80%, at least 85%, at least 90%, at least 95%, at least 99%, or 100% identical to SEQ ID NO: 6 or 1058, and a CDR3 having an amino acid sequence at least 65%, at least 70%, at least 75%, at least 80%, at least 85%, at least 90%, at least 95%, at least 99%, or 100% identical to SEQ ID NO: 13 or 1059.

[2572] In some aspects, VH2 comprises a CDR1 having an amino acid sequence at least 65%, at least 70%, at least 75%, at least 80%, at least 85%, at least 90%, at least 95%, at least 99%, or 100% identical to SEQ ID NO: 75, a CDR2 having an amino acid sequence at least 65%, at least 70%, at least 75%, at least 80%, at least 85%, at least 90%, at least 95%, at least 99%, or 100% identical to SEQ ID NO: 76, and a CDR3 having an amino acid sequence at least 65%, at least 70%, at least 75%, at least 80%, at least 85%, at least 90%, at least 95%, at least 99%, or 100% identical to SEQ ID NO: 77.

[2573] In some aspects, VH2 comprises an amino acid sequence at least 65%, at least 70%, at least 75%, at least 80%, at least 85%, at least 90%, at least 95%, at least 99%, or 100% identical to any one of SEQ ID NOs: 8, 14, 21, 22, 29, 37, 47, 54, 57, 64, 71, 78, 85, 92, 98, 104, 111, 118, 125, 129, 136, 137, 144, 151, 158, 165, 171, 178, 185, 191, 198, 204, 211, 218, 225, 231, 238, 245, 254, 258, 260, 262, 264, 266, 268, 270, 272, 275, 277, 279, 280, 282, 298, 321, 331, 626, 644, 653, 662, 670, 681, 689, 698, 706, 715, 775, 777, 784, 791, 800, 806, 813, 820, 826, 835, 842, 848, 855, 864, 871, 877, and 884.

[2574] In some aspects, VH2 comprises an amino acid sequence at least 65%, at least 70%, at least 75%, at least 80%, at least 85%, at least 90%, at least 95%, at least 99%, or 100% identical to any one of SEQ ID NOs: 8, 14, 21, 22, 29, 37, 71, 78, 151, 158, 626, 144, and 178.

[2575] In some aspects, at least one of VL1 or VL2 comprised in the antigen binding polypeptide complexes provided herein comprises (i) a complementarity determining region (CDR) 1 having an amino acid sequence that is at least 65%, at least 70%, at least 75%, at least 80%, at least 85%, at least 90%, at least 95%, at least 99%, or 100% identical to SEQ ID NO: 145 or 1050; (ii) a CDR2 having an amino acid sequence at least 65%, at least 70%, at least 75%, at least 80%, at least 85%, at least 90%, at least 95%, at least 99%, or 100% identical to SEQ ID NO: 1051 or an amino acid sequence that is at least 65%, at least 70%, at least 75%, at least 80%, at least 85%, at least 90%, at least 95%, at least 99%, or 100% identical to amino acid sequence AAS; and (iii) a CDR3 having an amino acid sequence that is at least 65%, at least 70%, at least 75%, at least 80%, at least 85%, at least 90%, at least 95%, at least 99%, or 100% identical to SEQ ID NO: 146 or 764.

[2576] In some aspects, at least one of VH1 or VH2 comprised in the antigen binding polypeptide complexes provided herein comprises (i) a complementarity determining region (CDR) 1 having an amino acid sequence that is at least 65%, at least 70%, at least 75%, at least 80%, at least 85%, at least 90%, at least 95%, at least 99%, or 100% identical to SEQ ID NO: 148 or 1052; (ii) a CDR2 having an amino acid sequence that is at least 65%, at least 70%, at least 75%, at least 80%, at least 85%, at least 90%, at least 95%, at least 99%, or 100% identical to SEQ ID NO: 149 or 1053; and (iii) a CDR3 having an amino acid sequence that is at least 65%, at least 70%, at least 75%, at least 80%, at least 85%, at least 90%, at least 95%, at least 99%, or 100% identical to SEQ ID NO: 150, 765, or 1054.

[2577] In some aspects, at least one of VL1 or VL2 comprised in the antigen binding polypeptide complexes provided herein comprises (i) a complementarity determining region (CDR) 1 having an amino acid sequence that is at least 65%, at least 70%, at least 75%, at least 80%, at least 85%, at least 90%, at least 95%, at least 99%, or 100% identical to SEQ ID NO: 145 or 1050; (ii) a CDR2 having an amino acid sequence at least 65%, at least 70%, at least 75%, at least 80%, at least 85%, at least 90%, at least 95%, at least 99%, or 100% identical to SEQ ID NO: 1051 or an amino acid sequence that is at least 65%, at least 70%, at least 75%, at least 80%, at least 85%, at least 90%, at least 95%, at least 99%, or 100% identical to amino acid sequence AAS; and (iii) a CDR3 having an amino acid sequence that is at least 65%, at least 70%, at least 75%, at least 80%, at least 85%, at least 90%, at least 95%, at least 99%, or 100% identical to SEQ ID NO: 146 or 764; and at least one of VH1 or VH2 comprised in the antigen binding polypeptide complexes provided herein comprises (iv) a complementarity determining region (CDR) 1 having an amino acid sequence that is at least 65%, at least 70%, at least 75%, at least 80%, at least 85%, at least 90%, at least 95%, at least 99%, or 100% identical to SEQ ID NO: 148 or 1052; (v) a CDR2 having an amino acid sequence that is at least 65%, at least 70%, at least 75%, at least 80%, at least 85%, at least 90%, at least 95%, at least 99%, or 100% identical to SEQ ID NO: 149 or 1053; and (vi) a CDR3 having an amino acid sequence that is at least 65%, at least 70%, at least 75%, at least 80%, at least 85%, at least 90%, at least 95%, at least 99%, or 100% identical to SEQ ID NO: 150, 765, or 1054.

[2578] In some aspects, at least one of VL1 or VL2 comprised in the antigen binding polypeptide complexes provided herein comprises an amino acid sequence that is at least 65%, at least 70%, at least 75%, at least 80%, at least 85%, at least 90%, at least 95%, at least 99%, or 100% identical to SEQ ID NO: 147.

[2579] In some aspects, at least one of VH1 or VH2 comprised in the antigen binding polypeptide complexes provided herein comprises an amino acid sequence that is at least 65%, at least 70%, at least 75%, at least 80%, at least 85%, at least 90%, at least 95%, at least 99%, or 100% identical to SEQ ID NO: 151.

[2580] In some aspects, (i) at least one of VL1 or VL2 comprised in the antigen binding polypeptide complexes provided herein comprises an amino acid sequence that is at least 65%, at least 70%, at least 75%, at least 80%, at least 85%, at least 90%, at least 95%, at least 99%, or 100% identical to SEQ ID NO: 147, and (ii) at least one of VH1 or VH2 comprised in the antigen binding polypeptide complexes provided herein comprises an amino acid sequence that is at least 65%, at least 70%, at least 75%, at least 80%, at least 85%, at least 90%, at least 95%, at least 99%, or 100% identical to SEQ ID NO: 151.

[2581] In some aspects, the antigen binding polypeptide complexes provided herein comprise a VL1 comprising (i) a complementarity determining region (CDR) 1 having an amino acid sequence that is at least 65%, at least 70%, at least 75%, at least 80%, at least 85%, at least 90%, at least 95%, at least 99%, or 100% identical to SEQ ID NO: 145 or 1050; (ii) a CDR2 having an amino acid sequence at least 65%, at least 70%, at least 75%, at least 80%, at least 85%, at least 90%, at least 95%, at least 99%, or 100% identical to SEQ ID NO: 1051 or an amino acid sequence that is at least 65%, at least 70%, at least 75%, at least 80%, at least 85%, at least 90%, at least 95%, at least 99%, or 100% identical to amino acid sequence AAS; and (iii) a CDR3 having an amino acid sequence that is at least 65%, at least 70%, at least 75%, at least 80%, at least 85%, at least 90%, at least 95%, at least 99%, or 100% identical to SEQ ID NO: 146 or 764; a VH1 comprising (iv) a complementarity determining region (CDR) 1 having an amino acid sequence that is at least 65%, at least 70%, at least 75%, at least 80%, at least 85%, at least 90%, at least 95%, at least 99%, or 100% identical to SEQ ID NO: 148 or 1052; (v) a CDR2 having an amino acid sequence that is at least 65%, at least 70%, at least 75%, at least 80%, at least 85%, at least 90%, at least 95%, at least 99%, or 100% identical to SEQ ID NO: 149 or 1053; and (vi) a CDR3 having an amino acid sequence that is at least 65%, at least 70%, at least 75%, at least 80%, at least 85%, at least 90%, at least 95%, at least 99%, or 100% identical to SEQ ID NO: 150, 765, or 1054; a VL2 comprising (vii) a complementarity determining region (CDR) 1 having an amino acid sequence that is at least 65%, at least 70%, at least 75%, at least 80%, at least 85%, at least 90%, at least 95%, at least 99%, or 100% identical to any one of SEQ ID NOs: 1, 9, 15, 23, 30, 41, 48, 55, 58, 65, 72, 79, 86, 93, 99, 105, 112, 119, 130, 138, 145, 152, 159, 166, 172, 179, 186, 192, 199, 205, 212, 219, 226, 232, 324, 627, 640, 650, 659, 676, 687, 695, 703, 712, 770, 778, 785, 794, 801, 807, 814, 827, 836, 849, 858, 865, 878, 1045, 1050, 1055, 1060, and 1065; (viii) a CDR2 having an amino acid sequence at least 65%, at least 70%, at least 75%, at least 80%, at least 85%, at least 90%, at least 95%, at least 99%, or 100% identical to any one of SEQ ID NOs: 2, 31, 628, 641, 677, 1046, 1051, 1056, and 1061; or at least 65%, at least 70%, at least 75%, at least 80%, at least 85%, at least 90%, at least 95%, at least 99%, or 100% identical to any one of amino acid sequences AAS, GAS, LGS, GTN, GTN, SAS, SDS, DNT, EVT, DAS, DVT, RNS, DVS, EDS, DDS, KDS, VAS, WAS, YTS, EVS, NNN, SYN, and DAT; (ix) a CDR3 having an amino acid sequence at least 65%, at least 70%, at least 75%, at least 80%, at least 85%, at least 90%, at least 95%, at least 99%, or 100% identical to any one of SEQ ID NOs: 3, 10, 16, 24, 32, 38, 42, 49, 59, 66, 73, 80, 87, 94, 100, 106, 113, 120, 126, 131, 139, 146, 153, 160, 167, 173, 180, 187, 193, 200, 206, 213, 220, 227, 233, 239, 242, 246, 249, 256, 283, 285, 287, 288, 290, 292, 294, 296, 301, 304, 306, 309, 311, 313, 316, 325, 326, 329, 642, 651, 660, 668, 678, 651, 696, 704, 713, 764, 766, 768, 771, 779, 786, 792, 795, 808, 815, 821, 830, 837, 843, 850, 856, 859, 866, 872, 879, 885, and 1066; and a VH2 comprising (x) a CDR1 having an amino acid sequence at least 65%, at least 70%, at least 75%, at least 80%, at least 85%, at least 90%, at least 95%, at least 99%, or 100% identical to any one of SEQ ID NOs: 5, 12, 18, 26, 34, 44, 51, 61, 68, 75, 82, 89, 96, 102, 108, 115, 122, 133, 141, 148, 155, 162, 175, 182, 189, 195, 202, 208, 215, 222, 229, 235, 318, 629, 645, 654, 663, 671, 682, 690, 699, 707, 716, 773, 781, 788, 797, 803, 810, 817, 823, 832, 839, 845, 852, 861, 868, 874, 881, 1047, 1052, 1057, 1062, and 1067; (xi) a CDR2 having an amino acid sequence at least 65%, at least 70%, at least 75%, at least 80%, at least 85%, at least 90%, at least 95%, at least 99%, or 100% identical to any one of SEQ ID NOs: 6, 19, 27, 35, 45, 52, 56, 62, 69, 76, 83, 90, 109, 116, 123, 134, 142, 149, 156, 163, 169, 176, 183, 196, 209, 216, 223, 236, 273, 319, 328, 630, 646, 655, 664, 672, 683, 691, 708, 776, 782, 789, 798, 804, 811, 818, 824, 833, 840, 846, 853, 862, 869, 875, 882, 1048, 1053, 1058, 1063, and 1068; (xii) a CDR3 having an amino acid sequence at least 65%, at least 70%, at least 75%, at least 80%, at least 85%, at least 90%, at least 95%, at least 99%, or 100% identical to any one of SEQ ID NOs: 7, 13, 20, 28, 36, 40, 46, 53, 63, 70, 77, 84, 91, 97, 103, 110, 117, 124, 128, 135, 143, 150, 157, 164, 170, 177, 184, 190, 197, 203, 210, 217, 224, 230, 237, 241, 244, 248, 253, 257, 259, 261, 263, 265, 267, 269, 271, 274, 276, 278, 281, 297, 320, 322, 327, 330, 332, 631, 647, 656, 665, 673, 684, 692, 700, 709, 717, 765, 767, 769, 774, 783, 790, 793, 799, 805, 812, 819, 825, 834, 841, 847, 854, 857, 863, 870, 876, 883, 886, 1049, 1054, 1059, 1064, and 1069.

[2582] In some aspects, the antigen binding polypeptide complexes provided herein comprise (i) a VL1 comprising an amino acid sequence that is at least 65%, at least 70%, at least 75%, at least 80%, at least 85%, at least 90%, at least 95%, at least 99%, or 100% identical to SEQ ID NO: 147; (ii) a VH1 comprising an amino acid sequence that is at least 65%, at least 70%, at least 75%, at least 80%, at least 85%, at least 90%, at least 95%, at least 99%, or 100% identical to SEQ ID NO: 151; (iii) a VL2 comprising an amino acid sequence that is at least 65%, at least 70%, at least 75%, at least 80%, at least 85%, at least 90%, at least 95%, at least 99%, or 100% identical to any one of SEQ ID NOs: 4, 11, 17, 25, 33, 39, 43, 50, 60, 67, 74, 81, 88, 95, 101, 107, 114, 121, 127, 132, 140, 147, 154, 161, 168, 174, 181, 188, 194, 201, 207, 214, 221, 228, 234, 240, 243, 247, 250, 251, 252, 255, 284, 286, 289, 291, 293, 295, 299, 300, 302, 303, 305, 307, 308, 310, 312, 314, 315, 317, 323, 639, 649, 658, 667, 675, 686, 694, 702, 711, 772, 780, 787, 796, 802, 809, 816, 822, 831, 838, 844, 851, 860, 867, 873, 880, and 988; and (iv) a VH2 comprising an amino acid sequence that is at least 65%, at least 70%, at least 75%, at least 80%, at least 85%, at least 90%, at least 95%, at least 99%, or 100% identical to any one of SEQ ID NOs: 8, 14, 21, 22, 29, 37, 47, 54, 57, 64, 71, 78, 85, 92, 98, 104, 111, 118, 125, 129, 136, 137, 144, 151, 158, 165, 171, 178, 185, 191, 198, 204, 211, 218, 225, 231, 238, 245, 254, 258, 260, 262, 264, 266, 268, 270, 272, 275, 277, 279, 280, 282, 298, 321, 331, 626, 644, 653, 662, 670, 681, 689, 698, 706, 715, 775, 777, 784, 791, 800, 806, 813, 820, 826, 835, 842, 848, 855, 864, 871, 877, and 884. In some aspects, the antigen binding polypeptide complexes provided herein comprise a VL1 comprising (i) a complementarity determining region (CDR) 1 having an amino acid sequence that is at least 65%, at least 70%, at least 75%, at least 80%, at least 85%, at least 90%, at least 95%, at least 99%, or 100% identical to SEQ ID NO: 145 or 1050; (ii) a CDR2 having an amino acid sequence at least 65%, at least 70%, at least 75%, at least 80%, at least 85%, at least 90%, at least 95%, at least 99%, or 100% identical to SEQ ID NO: 1051 or an amino acid sequence that is at least 65%, at least 70%, at least 75%, at least 80%, at least 85%, at least 90%, at least 95%, at least 99%, or 100% identical to amino acid sequence AAS; and (iii) a CDR3 having an amino acid sequence that is at least 65%, at least 70%, at least 75%, at least 80%, at least 85%, at least 90%, at least 95%, at least 99%, or 100% identical to SEQ ID NO: 146 or 764; a VH1 comprising (iv) a complementarity determining region (CDR) 1 having an amino acid sequence that is at least 65%, at least 70%, at least 75%, at least 80%, at least 85%, at least 90%, at least 95%, at least 99%, or 100% identical to SEQ ID NO: 148 or 1052; (v) a CDR2 having an amino acid sequence that is at least 65%, at least 70%, at least 75%, at least 80%, at least 85%, at least 90%, at least 95%, at least 99%, or 100% identical to SEQ ID NO: 149 or 1053; and (vi) a CDR3 having an amino acid sequence that is at least 65%, at least 70%, at least 75%, at least 80%, at least 85%, at least 90%, at least 95%, at least 99%, or 100% identical to SEQ ID NO: 150, 765, or 1054; a VL2 comprising (vii) a complementarity determining region (CDR) 1 having an amino acid sequence that is at least 65%, at least 70%, at least 75%, at least 80%, at least 85%, at least 90%, at least 95%, at least 99%, or 100% identical to any one of SEQ ID NOs: 1, 9, 15, 23, 30, 65, 72, 145, 152, 324, 627, 138, 172, 1045, 1050, 1055, 1060, and 1065; (viii) a CDR2 having an amino acid sequence at least 65%, at least 70%, at least 75%, at least 80%, at least 85%, at least 90%, at least 95%, at least 99%, or 100% identical to any one of SEQ ID NOs: 2, 31, 628, 1046, 1051, 1056, and 1061, or at least 65%, at least 70%, at least 75%, at least 80%, at least 85%, at least 90%, at least 95%, at least 99%, or 100% identical to any one of amino acid sequences GAS, LGS, GTN, SAS, SDS, AAS, DAS, and DNT; (ix) a CDR3 having an amino acid sequence at least 65%, at least 70%, at least 75%, at least 80%, at least 85%, at least 90%, at least 95%, at least 99%, or 100% identical to any one of SEQ ID NOs: 3, 10, 16, 24, 32, 38, 66, 73, 146, 153, 325, 326, 764, 766, 139, 856, 173, 792, and 1066; and a VH2 comprising (x) a CDR1 having an amino acid sequence at least 65%, at least 70%, at least 75%, at least 80%, at least 85%, at least 90%, at least 95%, at least 99%, or 100% identical to any one of SEQ ID NOs: 5, 12, 18, 26, 34, 68, 75, 148, 155, 629, 141, 175, 1047, 1052, 1057, 1062, and 1067; (xi) a CDR2 having an amino acid sequence at least 65%, at least 70%, at least 75%, at least 80%, at least 85%, at least 90%, at least 95%, at least 99%, or 100% identical to any one of SEQ ID NOs: 6, 19, 27, 35, 69, 76, 149, 156, 630, 142, 176, 1048, 1053, 1058, 1063, and 1068; (xii) a CDR3 having an amino acid sequence at least 65%, at least 70%, at least 75%, at least 80%, at least 85%, at least 90%, at least 95%, at least 99%, or 100% identical to any one of SEQ ID NOs: 7, 13, 20, 28, 36, 40, 70, 77, 327, 150, 157, 332, 631, 765, 767, 143, 857, 177, 793, 1049, 1054, 1059, 1064, and 1069.

[2583] In some aspects, the antigen binding polypeptide complexes provided herein comprise (i) a VL1 comprising an amino acid sequence that is at least 65%, at least 70%, at least 75%, at least 80%, at least 85%, at least 90%, at least 95%, at least 99%, or 100% identical to SEQ ID NO: 147; (ii) a VH1 comprising an amino acid sequence that is at least 65%, at least 70%, at least 75%, at least 80%, at least 85%, at least 90%, at least 95%, at least 99%, or 100% identical to SEQ ID NO: 151; (iii) a VL2 comprising an amino acid sequence that is at least 65%, at least 70%, at least 75%, at least 80%, at least 85%, at least 90%, at least 95%, at least 99%, or 100% identical to any one of SEQ ID NOs: 4, 11, 17, 25, 33, 39, 67, 74, 147, 154, 140, and 174; and (iv) a VH2 comprising an amino acid sequence that is at least 65%, at least 70%, at least 75%, at least 80%, at least 85%, at least 90%, at least 95%, at least 99%, or 100% identical to any one of SEQ ID NOs: 8, 14, 21, 22, 29, 37, 71, 78, 151, 158, 626, 144, and 178.

[2584] In some aspects, the first antigen binding polypeptide comprised in the antigen binding polypeptide complexes disclosed herein, comprises one or more CL, as indicated in the formulas representing the antigen binding polypeptide complexes disclosed herein. In some aspects, the CL comprises an amino acid sequence at least 65%, at least 70%, at least 75%, at least 80%, at least 85%, at least 90%, at least 95%, at least 99%, or 100% identical to any one of SEQ ID NOs: 374, 637, or 1092-1095.

[2585] In some aspects, the second antigen binding polypeptide comprised in the antigen binding polypeptide complexes disclosed herein, comprises one or more CH1, as indicated in the formulas representing the antigen binding polypeptide complexes disclosed herein. In some aspects, the CH1 comprises an amino acid sequence at least 65%, at least 70%, at least 75%, at least 80%, at least 85%, at least 90%, at least 95%, at least 99%, or 100% identical to any one of SEQ ID NOs: 375, 634, 1070, 1071, or 1086-1091.

[2586] In some aspects, one or both of the antigen binding polypeptides comprised in the antigen binding polypeptide complexes provided herein further comprise an Fc region. In some aspects, one or both of the antigen binding polypeptides comprised in the antigen binding polypeptide complexes provided herein further comprise an Fc region at the carboxy-terminus. In some aspects, the Fc region comprises an immunoglobulin heavy chain constant region 2 (CH2) and/or an immunoglobulin heavy chain constant region 3 (CH3). In some aspects, the Fc region further comprises an immunoglobulin hinge (i.e., a hinge region). In some aspects, the hinge region is interposed between a CH1 and a CH2 (i.e., a hinge region is localized between the carboxy terminal residue of a CH1 and the N-terminal residue of a CH2). In some aspects, the hinge region comprises an amino acid sequence at least 65%, at least 70%, at least 75%, at least 80%, at least 85%, at least 90%, at least 95%, at least 99%, or 100% identical to any one of SEQ ID NOS: 635, 636, 1072, 1073, or 1074. In some aspects, the Fc region comprises a CH2 and a CH3. In some aspects, the CH2 comprises an amino acid sequence that is at least 65%, at least 70%, at least 75%, at least 80%, at least 85%, at least 90%, at least 95%, at least 99%, or 100% identical to any one of SEQ ID NOs: 1075-1078. In some aspects, the CH3 comprises an amino acid sequence that is at least 65%, at least 70%, at least 75%, at least 80%, at least 85%, at least 90%, at least 95%, at least 99%, or 100% identical to any one of SEQ ID NOs: 1079-1085. In some aspects, the Fc region comprises an amino acid sequence that is at least 65%, at least 70%, at least 75%, at least 80%, at least 85%, at least 90%, at least 95%, at least 99%, or 100% identical to any one of SEQ ID NOs: 376-380.

[2587] In some aspects, the Fc region comprises one or more amino acid substitutions. In some aspects, the one or more amino acid substitutions comprise one or more half-life extension amino acid substitutions. In some aspects, the one or more half-life extension amino acid substitutions comprise one or more of amino acid substitutions M428L, N434A, N434S, L234F, L235E, P331S, M252Y, S254T, or T256E, or equivalent thereof, based on the EU numbering scheme. In some aspects, the one or more half-life extension amino acid substitutions comprise a LA (M428L and N434A, or equivalent thereof, based on the EU numbering scheme) amino acid substitution. In some aspects, the one or more half-life extension amino acid substitutions comprise a LS (M428L and N434S, or equivalent thereof, based on the EU numbering scheme) amino acid substitution. In some aspects, the one or more half-life extension amino acid substitutions comprise L234F and L235E, or equivalent thereof (based on the EU numbering scheme) amino acid substitutions. In some aspects, the one or more half-life extension amino acid substitutions comprise a TM (L234F, L235E, and P331S, or equivalent thereof, based on the EU numbering scheme) amino acid substitution. In some aspects, the one or more half-life extension amino acid substitutions comprise a YTE (M252Y, S254T, and T256E, or equivalent thereof, based on the EU numbering scheme) amino acid substitution.

[2588] In some aspects, the Fc region comprises at least one knob-into-hole modification. In some aspects, the antigen binding polypeptides disclosed herein are comprised in IgG1 or IgG4 antibodies or antigen binding fragments thereof. In some aspects, the knob-into-hole modification comprises one or more of knob substitutions of S354C and T366W, or equivalent thereof, and/or one or more of hole substitutions of Y349C, T366S, L368A, Y407V, or equivalent thereof, or a combination thereof, based on the EU numbering scheme. In some aspects, the Fc region comprises a knob-into-hole modification comprising knob substitutions of S354C and T366W, or equivalent thereof, and/or hole substitutions of Y349C, T366S, L368A and Y407V, or equivalent thereof, and/or a half-life extension amino acid substitution comprising: a LA (M428L and N434A, or equivalent thereof, based on the EU numbering scheme) amino acid substitution, a LS (M428L and N434S, or equivalent thereof, based on the EU numbering scheme) amino acid substitution, L234F and L235E, or equivalent thereof (based on the EU numbering scheme) amino acid substitutions, a TM (L234F, L235E, and P331S, or equivalent thereof, based on the EU numbering scheme) amino acid substitution, a YTE (M252Y, S254T, and T256E, or equivalent thereof, based on the EU numbering scheme) amino acid substitution, or any combination thereof.

[2589] In some aspects, the Fc region comprises knob substitutions of S354C and T366W, or equivalent thereof, and a half-life extension amino acid substitution comprising: a LA (M428L and N434A, or equivalent thereof, based on the EU numbering scheme) amino acid substitution, a LS (M428L and N434S, or equivalent thereof, based on the EU numbering scheme) amino acid substitution. L234F and L235E, or equivalent thereof (based on the EU numbering scheme) amino acid substitutions, a TM (L234F, L235E, and P331S, or equivalent thereof, based on the EU numbering scheme) amino acid substitution, a YTE (M252Y, S254T, and T256E, or equivalent thereof, based on the EU numbering scheme) amino acid substitution, or any combination thereof.

[2590] In some aspects, the Fc region comprises hole substitutions of Y349C, T366S, L368A and Y407V, or equivalent thereof, and a half-life extension amino acid substitution comprising: a LA (M428L and N434A, or equivalent thereof, based on the EU numbering scheme) amino acid substitution, a LS (M428L and N434S, or equivalent thereof, based on the EU numbering scheme) amino acid substitution, L234F and L235E, or equivalent thereof (based on the EU numbering scheme) amino acid substitutions, a TM (L234F, L235E, and P331S, or equivalent thereof, based on the EU numbering scheme) amino acid substitution, a YTE (M252Y, S254T, and T256E, or equivalent thereof, based on the EU numbering scheme) amino acid substitution, or any combination thereof.

[2591] In some aspects, one or both of the antigen binding polypeptides comprised in the antigen binding polypeptide complexes disclosed herein comprise one or more Fc effector function knockout mutation. In some aspects, the antigen binding polypeptide complexes disclosed herein are IgG1 or IgG4 antibodies or antigen binding fragments thereof. In some aspects, the Fc effector function knockout mutation is L234A, L235A, P239A, or equivalent thereof, or a combination thereof, based on the EU numbering scheme.

[2592] In some aspects, one or both of the antigen binding polypeptides comprised in the antigen binding polypeptide complexes disclosed herein comprise a mutation at a glycosylation site. In some aspects, the mutation at a glycosylation site is a mutation at an N-glycosylation site. In some aspects, one or both of the antigen binding polypeptides comprised in the antigen binding polypeptide complexes disclosed herein comprise a VH comprising a mutation at a glycosylation site. In some aspects, the mutation at a glycosylation site is a mutation at an N-glycosylation site. In some aspects, the mutation at an N-glycosylation site is at amino acid N62 of the VH region or equivalent thereof. In some aspects, the mutation at an N-glycosylation site at amino acid N62 is N62Q or N62S, or equivalent thereof.

[2593] In some aspects, one or both of the antigen binding polypeptides comprised in the antigen binding polypeptide complexes disclosed herein, comprise one or more optional linkers. The one or more optional linkers are indicated herein as Ln, wherein n is an integer, and the integer next to each L indicates each L comprised in the antigen binding polypeptides comprised in the antigen binding polypeptide complexes disclosed herein. For example, if an antigen binding polypeptide comprised in the antigen binding polypeptide complexes disclosed herein comprises two linkers, the first linker from N-terminus to C-terminus is herein indicated as L1, and the second linker from N-terminus to C-terminus is herein indicated as L2. If an antigen binding polypeptide complex disclosed herein comprises a first antigen binding polypeptide comprising two linkers, indicated herein as L1 and L2, as explained above, the linkers comprised in the second antigen binding polypeptide are indicated with the following integer, in this example, the first linker from N-terminus to C-terminus of the second antigen binding polypeptide is herein indicated as L3, the second linker from N-terminus to C-terminus of the second antigen binding polypeptide is herein indicated as L3. In some aspects, any one of the optional linkers each independently have a length of from 0 amino acids to about 50 amino acids. In some aspects, any one of the optional linkers each independently have a length of from 5 amino acids to about 40 amino acids.

[2594] In some aspects, any one of the optional linkers are non-immunogenic. In some aspects, any one of the optional linkers do not contain a consensus T cell epitope.

[2595] In some aspects, any of Ln comprises an amino acid sequence of G or A, or an amino acid sequence at least 65%, at least 70%, at least 75%, at least 80%, at least 85%, at least 90%, at least 95%, at least 99%, or 100% identical to amino acid sequence GSS or ASG, or an amino acid sequence at least 65%, at least 70%, at least 75%, at least 80%, at least 85%, at least 90%, at least 95%, at least 99%, or 100% identical to any one of SEQ ID NOs: 333-373 or 967-971. In some aspects, Ln comprises an amino acid sequence at least 65%, at least 70%, at least 75%, at least 80%, at least 85%, at least 90%, at least 95%, at least 99%, or 100% identical to any one of SEQ ID NOs: 333-345 or 967-971.

[2596] In some aspects, an antigen binding polypeptide complex provided herein comprises a first polypeptide, and a second polypeptide; wherein the first polypeptide has a structure represented by VL1-VL2-VL3-CH1, VL1-VL3-VL2-CH1, VL2-VL1-VL3-CH1, VL2-VL3-VL1-CH1, VL3-VL1-VL2-CH1, or VL3-VL2-VL1-CH1; and wherein the second polypeptide has a structure represented by VH1-VH2-VH3-CL, VH1-VH3-VH2-CL, VH2-VH1-VH3-CL, VH2-VH3-VH1-CL, VH3-VH1-VH2-CL, or VH3-VH2-VH1-CL.

[2597] In some aspects, an antigen binding polypeptide complex provided herein comprises a first polypeptide, and a second polypeptide; wherein the first polypeptide has a structure represented by VL1-L1-VL2-L2-VL3-L3-CH1, VL1-L1-VL3-L2-VL2-L3-CH1, VL2-L1-VL1-L2-VL3-L3-CH1, VL2-L1-VL3-L2-VL1-L3-CH1, VL3-L1-VL1-L2-VL2-L3-CH1, or VL3-L1-VL2-L2-VL1-L3-CH1; and wherein the second polypeptide has a structure represented by VH1-L4-VH2-L5-VH3-L6-CL, VH1-L4-VH3-L5-VH2-L6-CL, VH2-L4-VH1-L5-VH3-L6-CL, VH2-L4-VH3-L5-VH1-L6-CL, VH3-L4-VH1-L5-VH2-L6-CL, or VH3-L4-VH2-L5-VH1-L6-CL.

[2598] In some aspects, an antigen binding polypeptide complex provided herein comprises a first polypeptide, and a second polypeptide; wherein the first polypeptide has a structure represented by VL1-VL2-VL3-CH1-CH2-CH3, VL1-VL3-VL2-CH1-CH2-CH3, VL2-VL1-VL3-CH1-CH2-CH3, VL2-VL3-VL1-CH1-CH2-CH3, VL3-VL1-VL2-CH1-CH2-CH3, or VL3-VL2-VL1-CH1-CH2-CH3; and wherein the second polypeptide has a structure represented by VH1-VH2-VH3-CL-CH2-CH3, VH1-VH3-VH2-CL-CH2-CH3, VH2-VH1-VH3-CL-CH2-CH3, VH2-VH3-VH1-CL-CH2-CH3, VH3-VH1-VH2-CL-CH2-CH3, or VH3-VH2-VH1-CL-CH2-CH3.

[2599] In some aspects, an antigen binding polypeptide complex provided herein comprises a first polypeptide, and a second polypeptide; wherein the first polypeptide has a structure represented by VL1-L1-VL2-L2-VL3-L3-CH1-CH2-CH3, VL1-L1-VL3-L2-VL2-L3-CH1-CH2-CH3, VL2-L1-VL1- L2-VL3-L3-CH1-CH2-CH3, VL2-L1-VL3-L2-VL1-L3-CH1-CH2-CH3, VL3-L1-VL1-L2-VL2-L3-CH1- CH2-CH3, or VL3-L1-VL2-L2-VL1-L3-CH1-CH2-CH3; and wherein the second polypeptide has a structure represented by VH1-L1-VH2-L2-VH3-L3-CL-CH2-CH3, VH1-L1-VH3-L2-VH2-L3-CL-CH2-CH3, VH2-L1-VH1-L2-VH3-L3-CL-CH2-CH3, VH2-L1-VH3-L2-VH1-L3-CL-CH2-CH3, VH3-L1-VH1-L2-VH2-L3-CL-CH2-CH3, or VH3-L1-VH2-L2-VH1-L3-CL-CH2-CH3.

[2600] In some aspects, VL1 is a first immunoglobulin light chain variable region that specifically binds to a SARS-CoV-2 protein (e.g., a SARS-CoV-2 spike protein); VL2 is a second immunoglobulin light chain variable region that specifically binds to a SARS-CoV-2 protein (e.g., a SARS-CoV-2 spike protein); VL3 is a third immunoglobulin light chain variable region that specifically binds to a SARS-CoV-2 protein (e.g., a SARS-CoV-2 spike protein); VH1 is a first immunoglobulin heavy chain variable region that specifically binds to a SARS-CoV-2 protein (e.g., a SARS-CoV-2 spike protein); VH2 is a second immunoglobulin heavy chain variable region that specifically binds to a SARS-CoV-2 protein (e.g., a SARS-CoV-2 spike protein); VH3 is a third immunoglobulin heavy chain variable region that specifically binds to a SARS-CoV-2 protein (e.g., a SARS-CoV-2 spike protein); CH1 is an immunoglobulin heavy chain constant region 1; CL is an immunoglobulin light chain constant region; and L1-L6 are optional amino acid linkers. In any aspect shown herein as a structure from amino terminus to carboxy terminus, and with binding pairs selected from VL and/or VH or other structural regions such as CH1, CL, CH2, CH3, when shown without a specific linker such as L1, L2, etc., such linkers are optionally present in such structures between each designated subsequence VL, VH, etc.

[2601] In some aspects, the VL1 and the VL2 each comprise a CDR1, a CDR2, and a CDR3 that are the same. In some aspects, the VL1 and the VL2 each comprise a CDR1, a CDR2, and a CDR3 that are different. In some aspects, the VL1 and the VL3 each comprise a CDR1, a CDR2, and a CDR3 that are the same. In some aspects, the VL1 and the VL3 each comprise a CDR1, a CDR2, and a CDR3 that are different. In some aspects, the VL2 and the VL3 each comprise a CDR1, a CDR2, and a CDR3 that are the same. In some aspects, the VL2 and the VL3 each comprise a CDR1, a CDR2, and a CDR3 that are different.

[2602] In some aspects, the VL1 and the VL2 each comprise an amino acid sequence, wherein the amino acid sequence comprised in VL1 and the amino acid sequence comprised in VL2 are the same. In some aspects, the VL1 and the VL2 each comprise an amino acid sequence, wherein the amino acid sequence comprised in VL1 and the amino acid sequence comprised in VL2 are different. In some aspects, the VL1 and the VL3 each comprise an amino acid sequence, wherein the amino acid sequence comprised in VL1 and the amino acid sequence comprised in VL3 are the same. In some aspects, the VL1 and the VL3 each comprise an amino acid sequence, wherein the amino acid sequence comprised in VL1 and the amino acid sequence comprised in VL3 are different. In some aspects, the VL2 and the VL3 each comprise an amino acid sequence, wherein the amino acid sequence comprised in VL2 and the amino acid sequence comprised in VL3 are the same. In some aspects, the VL2 and the VL3 each comprise an amino acid sequence, wherein the amino acid sequence comprised in VL2 and the amino acid sequence comprised in VL3 are different.

[2603] In some aspects, VL1 comprises a CDR1 having an amino acid sequence at least 65%, at least 70%, at least 75%, at least 80%, at least 85%, at least 90%, at least 95%, at least 99%, or 100% identical to any one of SEQ ID NOs: 1, 9, 15, 23, 30, 41, 48, 55, 58, 65, 72, 79, 86, 93, 99, 105, 112, 119, 130, 138, 145, 152, 159, 166, 172, 179, 186, 192, 199, 205, 212, 219, 226, 232, 324, 627, 640, 650, 659, 676, 687, 695, 703, 712, 770, 778, 785, 794, 801, 807, 814, 827, 836, 849, 858, 865, 878, 1045, 1050, 1055, 1060, and 1065.

[2604] In some aspects, VL1 comprises a CDR1 having an amino acid sequence at least 65%, at least 70%, at least 75%, at least 80%, at least 85%, at least 90%, at least 95%, at least 99%, or 100% identical to any one of SEQ ID NOs: 1, 9, 15, 23, 30, 65, 72, 145, 152, 324, 627, 138, 172, 1045, 1050, 1055, 1060, and 1065.

[2605] In some aspects, VL1 comprises a CDR2 having an amino acid sequence at least 65%, at least 70%, at least 75%, at least 80%, at least 85%, at least 90%, at least 95%, at least 99%, or 100% identical to any one of SEQ ID NOs: 2, 31, 628, 641, 677, 1046, 1051, 1056, and 1061; or at least 65%, at least 70%, at least 75%, at least 80%, at least 85%, at least 90%, at least 95%, at least 99%, or 100% identical to any one of amino acid sequences AAS, GAS, LGS, GTN, GTN, SAS, SDS, DNT, EVT, DAS, DVT, RNS, DVS, EDS, DDS, KDS, VAS, WAS, YTS, EVS, NNN, SYN, and DAT.

[2606] In some aspects, VL1 comprises a CDR2 having an amino acid sequence at least 65%, at least 70%, at least 75%, at least 80%, at least 85%, at least 90%, at least 95%, at least 99%, or 100% identical to any one of SEQ ID NOs: 2, 31, 628, 1046, 1051, 1056, and 1061, or at least 65%, at least 70%, at least 75%, at least 80%, at least 85%, at least 90%, at least 95%, at least 99%, or 100% identical to any one of amino acid sequences GAS, LGS, GTN, SAS, SDS, AAS, DAS, and DNT.

[2607] In some aspects, VL1 comprises a CDR3 having an amino acid sequence at least 65%, at least 70%, at least 75%, at least 80%, at least 85%, at least 90%, at least 95%, at least 99%, or 100% identical to any one of SEQ ID NOs: 3, 10, 16, 24, 32, 38, 42, 49, 59, 66, 73, 80, 87, 94, 100, 106, 113, 120, 126, 131, 139, 146, 153, 160, 167, 173, 180, 187, 193, 200, 206, 213, 220, 227, 233, 239, 242, 246, 249, 256, 283, 285, 287, 288, 290, 292, 294, 296, 301, 304, 306, 309, 311, 313, 316, 325, 326, 329, 642, 651, 660, 668, 678, 651, 696, 704, 713, 764, 766, 768, 771, 779, 786, 792, 795, 808, 815, 821, 830, 837, 843, 850, 856, 859, 866, 872, 879, 885, and 1066.

[2608] In some aspects, VL1 comprises a CDR3 having an amino acid sequence at least 65%, at least 70%, at least 75%, at least 80%, at least 85%, at least 90%, at least 95%, at least 99%, or 100% identical to any one of SEQ ID NOs: 3, 10, 16, 24, 32, 38, 66, 73, 146, 153, 325, 326, 764, 766, 139, 856, 173, 792, and 1066.

[2609] In some aspects, VL1 comprises an amino acid sequence at least 65%, at least 70%, at least 75%, at least 80%, at least 85%, at least 90%, at least 95%, at least 99%, or 100% identical to any one of SEQ ID NOs: 4, 11, 17, 25, 33, 39, 43, 50, 60, 67, 74, 81, 88, 95, 101, 107, 114, 121, 127, 132, 140, 147, 154, 161, 168, 174, 181, 188, 194, 201, 207, 214, 221, 228, 234, 240, 243, 247, 250, 251, 252, 255, 284, 286, 289, 291, 293, 295, 299, 300, 302, 303, 305, 307, 308, 310, 312, 314, 315, 317, 323, 639, 649, 658, 667, 675, 686, 694, 702, 711, 772, 780, 787, 796, 802, 809, 816, 822, 831, 838, 844, 851, 860, 867, 873, 880, and 988.

[2610] In some aspects, VL1 comprises an amino acid sequence at least 65%, at least 70%, at least 75%, at least 80%, at least 85%, at least 90%, at least 95%, at least 99%, or 100% identical to any one of SEQ ID NOs: 4, 11, 17, 25, 33, 39, 67, 74, 147, 154, 140, and 174.

[2611] In some aspects, VH1 comprises a CDR1 having an amino acid sequence at least 65%, at least 70%, at least 75%, at least 80%, at least 85%, at least 90%, at least 95%, at least 99%, or 100% identical to any one of SEQ ID NOs: 5, 12, 18, 26, 34, 44, 51, 61, 68, 75, 82, 89, 96, 102, 108, 115, 122, 133, 141, 148, 155, 162, 175, 182, 189, 195, 202, 208, 215, 222, 229, 235, 318, 629, 645, 654, 663, 671, 682, 690, 699, 707, 716, 773, 781, 788, 797, 803, 810, 817, 823, 832, 839, 845, 852, 861, 868, 874, 881, 1047, 1052, 1057, 1062, and 1067.

[2612] In some aspects, VH1 comprises a CDR1 having an amino acid sequence at least 65%, at least 70%, at least 75%, at least 80%, at least 85%, at least 90%, at least 95%, at least 99%, or 100% identical to any one of SEQ ID NOs: 5, 12, 18, 26, 34, 68, 75, 148, 155, 629, 141, 175, 1047, 1052, 1057, 1062, and 1067.

[2613] In some aspects, VH1 comprises a CDR2 having an amino acid sequence at least 65%, at least 70%, at least 75%, at least 80%, at least 85%, at least 90%, at least 95%, at least 99%, or 100% identical to any one of SEQ ID NOs: 6, 19, 27, 35, 45, 52, 56, 62, 69, 76, 83, 90, 109, 116, 123, 134, 142, 149, 156, 163, 169, 176, 183, 196, 209, 216, 223, 236, 273, 319, 328, 630, 646, 655, 664, 672, 683, 691, 708, 776, 782, 789, 798, 804, 811, 818, 824, 833, 840, 846, 853, 862, 869, 875, 882, 1048, 1053, 1058, 1063, and 1068.

[2614] In some aspects, VH1 comprises a CDR2 having an amino acid sequence at least 65%, at least 70%, at least 75%, at least 80%, at least 85%, at least 90%, at least 95%, at least 99%, or 100% identical to any one of SEQ ID NOs: 6, 19, 27, 35, 69, 76, 149, 156, 630, 142, 176, 1048, 1053, 1058, 1063, and 1068.

[2615] In some aspects, VH1 comprises a CDR3 having an amino acid sequence at least 65%, at least 70%, at least 75%, at least 80%, at least 85%, at least 90%, at least 95%, at least 99%, or 100% identical to any one of SEQ ID NOs: 7, 13, 20, 28, 36, 40, 46, 53, 63, 70, 77, 84, 91, 97, 103, 110, 117, 124, 128, 135, 143, 150, 157, 164, 170, 177, 184, 190, 197, 203, 210, 217, 224, 230, 237, 241, 244, 248, 253, 257, 259, 261, 263, 265, 267, 269, 271, 274, 276, 278, 281, 297, 320, 322, 327, 330, 332, 631, 647, 656, 665, 673, 684, 692, 700, 709, 717, 765, 767, 769, 774, 783, 790, 793, 799, 805, 812, 819, 825, 834, 841, 847, 854, 857, 863, 870, 876, 883, 886, 1049, 1054, 1059, 1064, and 1069.

[2616] In some aspects, VH1 comprises a CDR3 having an amino acid sequence at least 65%, at least 70%, at least 75%, at least 80%, at least 85%, at least 90%, at least 95%, at least 99%, or 100% identical to any one of SEQ ID NOs: 7, 13, 20, 28, 36, 40, 70, 77, 150, 157, 327, 332, 631, 765, 767, 143, 857, 177, 793, 1049, 1054, 1059, 1064, and 1069.

[2617] In some aspects, VH1 comprises an amino acid sequence at least 65%, at least 70%, at least 75%, at least 80%, at least 85%, at least 90%, at least 95%, at least 99%, or 100% identical to any one of SEQ ID NOs: 8, 14, 21, 22, 29, 37, 47, 54, 57, 64, 71, 78, 85, 92, 98, 104, 111, 118, 125, 129, 136, 137, 144, 151, 158, 165, 171, 178, 185, 191, 198, 204, 211, 218, 225, 231, 238, 245, 254, 258, 260, 262, 264, 266, 268, 270, 272, 275, 277, 279, 280, 282, 298, 321, 331, 626, 644, 653, 662, 670, 681, 689, 698, 706, 715, 775, 777, 784, 791, 800, 806, 813, 820, 826, 835, 842, 848, 855, 864, 871, 877, and 884.

[2618] In some aspects, VH1 comprises an amino acid sequence at least 65%, at least 70%, at least 75%, at least 80%, at least 85%, at least 90%, at least 95%, at least 99%, or 100% identical to any one of SEQ ID NOs: 8, 14, 21, 22, 29, 37, 71, 78, 151, 158, 626, 144, and 178.

[2619] In some aspects, VL2 comprises a CDR1 having an amino acid sequence at least 65%, at least 70%, at least 75%, at least 80%, at least 85%, at least 90%, at least 95%, at least 99%, or 100% identical to any one of SEQ ID NOs: 1, 9, 15, 23, 30, 41, 48, 55, 58, 65, 72, 79, 86, 93, 99, 105, 112, 119, 130, 138, 145, 152, 159, 166, 172, 179, 186, 192, 199, 205, 212, 219, 226, 232, 324, 627, 640, 650, 659, 676, 687, 695, 703, 712, 770, 778, 785, 794, 801, 807, 814, 827, 836, 849, 858, 865, 878, 1045, 1050, 1055, 1060, and 1065.

[2620] In some aspects, VL2 comprises a CDR1 having an amino acid sequence at least 65%, at least 70%, at least 75%, at least 80%, at least 85%, at least 90%, at least 95%, at least 99%, or 100% identical to any one of SEQ ID NOs: 1, 9, 15, 23, 30, 65, 72, 145, 152, 324, 627, 138, 172, 1045, 1050, 1055, 1060, and 1065.

[2621] In some aspects, VL2 comprises a CDR2 having an amino acid sequence at least 65%, at least 70%, at least 75%, at least 80%, at least 85%, at least 90%, at least 95%, at least 99%, or 100% identical to any one of SEQ ID NOs: 2, 31, 628, 641, 677, 1046, 1051, 1056, and 1061; or at least 65%, at least 70%, at least 75%, at least 80%, at least 85%, at least 90%, at least 95%, at least 99%, or 100% identical to any one of amino acid sequences AAS, GAS, LGS, GTN, GTN, SAS, SDS, DNT, EVT, DAS, DVT, RNS, DVS, EDS, DDS, KDS, VAS, WAS, YTS, EVS, NNN, SYN, and DAT.

[2622] In some aspects, VL2 comprises a CDR2 having an amino acid sequence at least 65%, at least 70%, at least 75%, at least 80%, at least 85%, at least 90%, at least 95%, at least 99%, or 100% identical to any one of SEQ ID NOs: 2, 31, 628, 1046, 1051, 1056, and 1061, or at least 65%, at least 70%, at least 75%, at least 80%, at least 85%, at least 90%, at least 95%, at least 99%, or 100% identical to any one of amino acid sequences GAS, LGS, GTN, SAS, SDS, AAS, DAS, and DNT.

[2623] In some aspects, VL2 comprises a CDR3 having an amino acid sequence at least 65%, at least 70%, at least 75%, at least 80%, at least 85%, at least 90%, at least 95%, at least 99%, or 100% identical to any one of SEQ ID NOs: 3, 10, 16, 24, 32, 38, 42, 49, 59, 66, 73, 80, 87, 94, 100, 106, 113, 120, 126, 131, 139, 146, 153, 160, 167, 173, 180, 187, 193, 200, 206, 213, 220, 227, 233, 239, 242, 246, 249, 256, 283, 285, 287, 288, 290, 292, 294, 296, 301, 304, 306, 309, 311, 313, 316, 325, 326, 329, 642, 651, 660, 668, 678, 651, 696, 704, 713, 764, 766, 768, 771, 779, 786, 792, 795, 808, 815, 821, 830, 837, 843, 850, 856, 859, 866, 872, 879, 885, and 1066.

[2624] In some aspects, VL2 comprises a CDR3 having an amino acid sequence at least 65%, at least 70%, at least 75%, at least 80%, at least 85%, at least 90%, at least 95%, at least 99%, or 100% identical to any one of SEQ ID NOs: 3, 10, 16, 24, 32, 38, 66, 73, 146, 153, 325, 326, 764, 766, 139, 856, 173, 792, and 1066.

[2625] In some aspects, VL2 comprises an amino acid sequence at least 65%, at least 70%, at least 75%, at least 80%, at least 85%, at least 90%, at least 95%, at least 99%, or 100% identical to any one of SEQ ID NOs: 4, 11, 17, 25, 33, 39, 43, 50, 60, 67, 74, 81, 88, 95, 101, 107, 114, 121, 127, 132, 140, 147, 154, 161, 168, 174, 181, 188, 194, 201, 207, 214, 221, 228, 234, 240, 243, 247, 250, 251, 252, 255, 284, 286, 289, 291, 293, 295, 299, 300, 302, 303, 305, 307, 308, 310, 312, 314, 315, 317, 323, 639, 649, 658, 667, 675, 686, 694, 702, 711, 772, 780, 787, 796, 802, 809, 816, 822, 831, 838, 844, 851, 860, 867, 873, 880, and 988.

[2626] In some aspects, VL2 comprises an amino acid sequence at least 65%, at least 70%, at least 75%, at least 80%, at least 85%, at least 90%, at least 95%, at least 99%, or 100% identical to any one of SEQ ID NOs: 4, 11, 17, 25, 33, 39, 67, 74, 147, 154, 140, and 174.

[2627] In some aspects, VH2 comprises a CDR1 having an amino acid sequence at least 65%, at least 70%, at least 75%, at least 80%, at least 85%, at least 90%, at least 95%, at least 99%, or 100% identical to any one of SEQ ID NOs: 5, 12, 18, 26, 34, 44, 51, 61, 68, 75, 82, 89, 96, 102, 108, 115, 122, 133, 141, 148, 155, 162, 175, 182, 189, 195, 202, 208, 215, 222, 229, 235, 318, 629, 645, 654, 663, 671, 682, 690, 699, 707, 716, 773, 781, 788, 797, 803, 810, 817, 823, 832, 839, 845, 852, 861, 868, 874, 881, 1047, 1052, 1057, 1062, and 1067.

[2628] In some aspects, VH2 comprises a CDR1 having an amino acid sequence at least 65%, at least 70%, at least 75%, at least 80%, at least 85%, at least 90%, at least 95%, at least 99%, or 100% identical to any one of SEQ ID NOs: 5, 12, 18, 26, 34, 68, 75, 148, 155, 629, 141, 175, 1047, 1052, 1057, 1062, and 1067.

[2629] In some aspects, VH2 comprises a CDR2 having an amino acid sequence at least 65%, at least 70%, at least 75%, at least 80%, at least 85%, at least 90%, at least 95%, at least 99%, or 100% identical to any one of SEQ ID NOs: 6, 19, 27, 35, 45, 52, 56, 62, 69, 76, 83, 90, 109, 116, 123, 134, 142, 149, 156, 163, 169, 176, 183, 196, 209, 216, 223, 236, 273, 319, 328, 630, 646, 655, 664, 672, 683, 691, 708, 776, 782, 789, 798, 804, 811, 818, 824, 833, 840, 846, 853, 862, 869, 875, 882, 1048, 1053, 1058, 1063, and 1068.

[2630] In some aspects, VH2 comprises a CDR2 having an amino acid sequence at least 65%, at least 70%, at least 75%, at least 80%, at least 85%, at least 90%, at least 95%, at least 99%, or 100% identical to any one of SEQ ID NOs: 6, 19, 27, 35, 69, 76, 149, 156, 630, 142, 176, 1048, 1053, 1058, 1063, and 1068.

[2631] In some aspects, VH2 comprises a CDR3 having an amino acid sequence at least 65%, at least 70%, at least 75%, at least 80%, at least 85%, at least 90%, at least 95%, at least 99%, or 100% identical to any one of SEQ ID NOs: 7, 13, 20, 28, 36, 40, 46, 53, 63, 70, 77, 84, 91, 97, 103, 110, 117, 124, 128, 135, 143, 150, 157, 164, 170, 177, 184, 190, 197, 203, 210, 217, 224, 230, 237, 241, 244, 248, 253, 257, 259, 261, 263, 265, 267, 269, 271, 274, 276, 278, 281, 297, 320, 322, 327, 330, 332, 631, 647, 656, 665, 673, 684, 692, 700, 709, 717, 765, 767, 769, 774, 783, 790, 793, 799, 805, 812, 819, 825, 834, 841, 847, 854, 857, 863, 870, 876, 883, 886, 1049, 1054, 1059, 1064, and 1069.

[2632] In some aspects, VH2 comprises a CDR3 having an amino acid sequence at least 65%, at least 70%, at least 75%, at least 80%, at least 85%, at least 90%, at least 95%, at least 99%, or 100% identical to any one of SEQ ID NOs: 7, 13, 20, 28, 36, 40, 70, 77, 150, 157, 327, 332, 631, 765, 767, 143, 857, 177, 793, 1049, 1054, 1059, 1064, and 1069.

[2633] In some aspects, VH2 comprises an amino acid sequence at least 65%, at least 70%, at least 75%, at least 80%, at least 85%, at least 90%, at least 95%, at least 99%, or 100% identical to any one of SEQ ID NOs: 8, 14, 21, 22, 29, 37, 47, 54, 57, 64, 71, 78, 85, 92, 98, 104, 111, 118, 125, 129, 136, 137, 144, 151, 158, 165, 171, 178, 185, 191, 198, 204, 211, 218, 225, 231, 238, 245, 254, 258, 260, 262, 264, 266, 268, 270, 272, 275, 277, 279, 280, 282, 298, 321, 331, 626, 644, 653, 662, 670, 681, 689, 698, 706, 715, 775, 777, 784, 791, 800, 806, 813, 820, 826, 835, 842, 848, 855, 864, 871, 877, and 884.

[2634] In some aspects, VH2 comprises an amino acid sequence at least 65%, at least 70%, at least 75%, at least 80%, at least 85%, at least 90%, at least 95%, at least 99%, or 100% identical to any one of SEQ ID NOs: 8, 14, 21, 22, 29, 37, 71, 78, 151, 158, 626, 144, and 178.

[2635] In some aspects, VL3 comprises a CDR1 having an amino acid sequence at least 65%, at least 70%, at least 75%, at least 80%, at least 85%, at least 90%, at least 95%, at least 99%, or 100% identical to any one of SEQ ID NOs: 1, 9, 15, 23, 30, 41, 48, 55, 58, 65, 72, 79, 86, 93, 99, 105, 112, 119, 130, 138, 145, 152, 159, 166, 172, 179, 186, 192, 199, 205, 212, 219, 226, 232, 324, 627, 640, 650, 659, 676, 687, 695, 703, 712, 770, 778, 785, 794, 801, 807, 814, 827, 836, 849, 858, 865, 878, 1045, 1050, 1055, 1060, and 1065.

[2636] In some aspects, VL3 comprises a CDR1 having an amino acid sequence at least 65%, at least 70%, at least 75%, at least 80%, at least 85%, at least 90%, at least 95%, at least 99%, or 100% identical to any one of SEQ ID NOs: 1, 9, 15, 23, 30, 65, 72, 145, 152, 324, 627, 138, 172, 1045, 1050, 1055, 1060, and 1065.

[2637] In some aspects, VL3 comprises a CDR2 having an amino acid sequence at least 65%, at least 70%, at least 75%, at least 80%, at least 85%, at least 90%, at least 95%, at least 99%, or 100% identical to any one of SEQ ID NOs: 2, 31, 628, 641, 677, 1046, 1051, 1056, and 1061; or at least 65%, at least 70%, at least 75%, at least 80%, at least 85%, at least 90%, at least 95%, at least 99%, or 100% identical to any one of amino acid sequences AAS, GAS, LGS, GTN, GTN, SAS, SDS, DNT, EVT, DAS, DVT, RNS, DVS, EDS, DDS, KDS, VAS, WAS, YTS, EVS, NNN, SYN, and DAT.

[2638] In some aspects, VL3 comprises a CDR2 having an amino acid sequence at least 65%, at least 70%, at least 75%, at least 80%, at least 85%, at least 90%, at least 95%, at least 99%, or 100% identical to any one of SEQ ID NOs: 2, 31, 628, 1046, 1051, 1056, and 1061, or at least 65%, at least 70%, at least 75%, at least 80%, at least 85%, at least 90%, at least 95%, at least 99%, or 100% identical to any one of amino acid sequences GAS, LGS, GTN, SAS, SDS, AAS, DAS, and DNT.

[2639] In some aspects, VL3 comprises a CDR3 having an amino acid sequence at least 65%, at least 70%, at least 75%, at least 80%, at least 85%, at least 90%, at least 95%, at least 99%, or 100% identical to any one of SEQ ID NOs: 3, 10, 16, 24, 32, 38, 42, 49, 59, 66, 73, 80, 87, 94, 100, 106, 113, 120, 126, 131, 139, 146, 153, 160, 167, 173, 180, 187, 193, 200, 206, 213, 220, 227, 233, 239, 242, 246, 249, 256, 283, 285, 287, 288, 290, 292, 294, 296, 301, 304, 306, 309, 311, 313, 316, 325, 326, 329, 642, 651, 660, 668, 678, 651, 696, 704, 713, 764, 766, 768, 771, 779, 786, 792, 795, 808, 815, 821, 830, 837, 843, 850, 856, 859, 866, 872, 879, 885, and 1066.

[2640] In some aspects, VL3 comprises a CDR3 having an amino acid sequence at least 65%, at least 70%, at least 75%, at least 80%, at least 85%, at least 90%, at least 95%, at least 99%, or 100% identical to any one of SEQ ID NOs: 3, 10, 16, 24, 32, 38, 66, 73, 146, 153, 325, 326, 764, 766, 139, 856, 173, 792, and 1066.

[2641] In some aspects, VL3 comprises an amino acid sequence at least 65%, at least 70%, at least 75%, at least 80%, at least 85%, at least 90%, at least 95%, at least 99%, or 100% identical to any one of SEQ ID NOs: 4, 11, 17, 25, 33, 39, 43, 50, 60, 67, 74, 81, 88, 95, 101, 107, 114, 121, 127, 132, 140, 147, 154, 161, 168, 174, 181, 188, 194, 201, 207, 214, 221, 228, 234, 240, 243, 247, 250, 251, 252, 255, 284, 286, 289, 291, 293, 295, 299, 300, 302, 303, 305, 307, 308, 310, 312, 314, 315, 317, 323, 639, 649, 658, 667, 675, 686, 694, 702, 711, 772, 780, 787, 796, 802, 809, 816, 822, 831, 838, 844, 851, 860, 867, 873, 880, and 988.

[2642] In some aspects, VL3 comprises an amino acid sequence at least 65%, at least 70%, at least 75%, at least 80%, at least 85%, at least 90%, at least 95%, at least 99%, or 100% identical to any one of SEQ ID NOs: 4, 11, 17, 25, 33, 39, 67, 74, 147, 154, 140, and 174.

[2643] In some aspects, VH3 comprises a CDR1 having an amino acid sequence at least 65%, at least 70%, at least 75%, at least 80%, at least 85%, at least 90%, at least 95%, at least 99%, or 100% identical to any one of SEQ ID NOs: 5, 12, 18, 26, 34, 44, 51, 61, 68, 75, 82, 89, 96, 102, 108, 115, 122, 133, 141, 148, 155, 162, 175, 182, 189, 195, 202, 208, 215, 222, 229, 235, 318, 629, 645, 654, 663, 671, 682, 690, 699, 707, 716, 773, 781, 788, 797, 803, 810, 817, 823, 832, 839, 845, 852, 861, 868, 874, 881, 1047, 1052, 1057, 1062, and 1067.

[2644] In some aspects, VH3 comprises a CDR1 having an amino acid sequence at least 65%, at least 70%, at least 75%, at least 80%, at least 85%, at least 90%, at least 95%, at least 99%, or 100% identical to any one of SEQ ID NOs: 5, 12, 18, 26, 34, 68, 75, 148, 155, 629, 141, 175, 1047, 1052, 1057, 1062, and 1067.

[2645] In some aspects, VH3 comprises a CDR2 having an amino acid sequence at least 65%, at least 70%, at least 75%, at least 80%, at least 85%, at least 90%, at least 95%, at least 99%, or 100% identical to any one of SEQ ID NOs: 6, 19, 27, 35, 45, 52, 56, 62, 69, 76, 83, 90, 109, 116, 123, 134, 142, 149, 156, 163, 169, 176, 183, 196, 209, 216, 223, 236, 273, 319, 328, 630, 646, 655, 664, 672, 683, 691, 708, 776, 782, 789, 798, 804, 811, 818, 824, 833, 840, 846, 853, 862, 869, 875, 882, 1048, 1053, 1058, 1063, and 1068.

[2646] In some aspects, VH3 comprises a CDR2 having an amino acid sequence at least 65%, at least 70%, at least 75%, at least 80%, at least 85%, at least 90%, at least 95%, at least 99%, or 100% identical to any one of SEQ ID NOs: 6, 19, 27, 35, 69, 76, 149, 156, 630, 142, 176, 1048, 1053, 1058, 1063, and 1068. In some aspects, VH3 comprises a CDR3 having an amino acid sequence at least 65%, at least 70%, at least 75%, at least 80%, at least 85%, at least 90%, at least 95%, at least 99%, or 100% identical to any one of SEQ ID NOs: 7, 13, 20, 28, 36, 40, 46, 53, 63, 70, 77, 84, 91, 97, 103, 110, 117, 124, 128, 135, 143, 150, 157, 164, 170, 177, 184, 190, 197, 203, 210, 217, 224, 230, 237, 241, 244, 248, 253, 257, 259, 261, 263, 265, 267, 269, 271, 274, 276, 278, 281, 297, 320, 322, 327, 330, 332, 631, 647, 656, 665, 673, 684, 692, 700, 709, 717, 765, 767, 769, 774, 783, 790, 793, 799, 805, 812, 819, 825, 834, 841, 847, 854, 857, 863, 870, 876, 883, 886, 1049, 1054, 1059, 1064, and 1069.

[2647] In some aspects, VH3 comprises a CDR3 having an amino acid sequence at least 65%, at least 70%, at least 75%, at least 80%, at least 85%, at least 90%, at least 95%, at least 99%, or 100% identical to any one of SEQ ID NOs: 7, 13, 20, 28, 36, 40, 70, 77, 150, 157, 327, 332, 631, 765, 767, 143, 857, 177, 793, 1049, 1054, 1059, 1064, and 1069.

[2648] In some aspects, VH3 comprises an amino acid sequence at least 65%, at least 70%, at least 75%, at least 80%, at least 85%, at least 90%, at least 95%, at least 99%, or 100% identical to any one of SEQ ID NOs: 8, 14, 21, 22, 29, 37, 47, 54, 57, 64, 71, 78, 85, 92, 98, 104, 111, 118, 125, 129, 136, 137, 144, 151, 158, 165, 171, 178, 185, 191, 198, 204, 211, 218, 225, 231, 238, 245, 254, 258, 260, 262, 264, 266, 268, 270, 272, 275, 277, 279, 280, 282, 298, 321, 331, 626, 644, 653, 662, 670, 681, 689, 698, 706, 715, 775, 777, 784, 791, 800, 806, 813, 820, 826, 835, 842, 848, 855, 864, 871, 877, and 884.

[2649] In some aspects, VH3 comprises an amino acid sequence at least 65%, at least 70%, at least 75%, at least 80%, at least 85%, at least 90%, at least 95%, at least 99%, or 100% identical to any one of SEQ ID NOs: 8, 14, 21, 22, 29, 37, 71, 78, 151, 158, 626, 144, and 178.

[2650] In some aspects, at least one of VL1, VL2, or VL3 comprised in the antigen binding polypeptide complexes provided herein comprises (i) a complementarity determining region (CDR) 1 having an amino acid sequence that is at least 65%, at least 70%, at least 75%, at least 80%, at least 85%, at least 90%, at least 95%, at least 99%, or 100% identical to SEQ ID NO: 145 or 1050; (ii) a CDR2 having an amino acid sequence at least 65%, at least 70%, at least 75%, at least 80%, at least 85%, at least 90%, at least 95%, at least 99%, or 100% identical to SEQ ID NO: 1051 or an amino acid sequence that is at least 65%, at least 70%, at least 75%, at least 80%, at least 85%, at least 90%, at least 95%, at least 99%, or 100% identical to amino acid sequence AAS; and (iii) a CDR3 having an amino acid sequence that is at least 65%, at least 70%, at least 75%, at least 80%, at least 85%, at least 90%, at least 95%, at least 99%, or 100% identical to SEQ ID NO: 146 or 764.

[2651] In some aspects, at least one of VH1, VH2, or VH3 comprised in the antigen binding polypeptide complexes provided herein comprises (i) a complementarity determining region (CDR) 1 having an amino acid sequence that is at least 65%, at least 70%, at least 75%, at least 80%, at least 85%, at least 90%, at least 95%, at least 99%, or 100% identical to SEQ ID NO: 148 or 1052; (ii) a CDR2 having an amino acid sequence that is at least 65%, at least 70%, at least 75%, at least 80%, at least 85%, at least 90%, at least 95%, at least 99%, or 100% identical to SEQ ID NO: 149 or 1053; and (iii) a CDR3 having an amino acid sequence that is at least 65%, at least 70%, at least 75%, at least 80%, at least 85%, at least 90%, at least 95%, at least 99%, or 100% identical to SEQ ID NO: 150, 765, or 1054.

[2652] In some aspects, at least one of VL1, VL2, or VL3 comprised in the antigen binding polypeptide complexes provided herein comprises (i) a complementarity determining region (CDR) 1 having an amino acid sequence that is at least 65%, at least 70%, at least 75%, at least 80%, at least 85%, at least 90%, at least 95%, at least 99%, or 100% identical to SEQ ID NO: 145 or 1050; (ii) a CDR2 having an amino acid sequence at least 65%, at least 70%, at least 75%, at least 80%, at least 85%, at least 90%, at least 95%, at least 99%, or 100% identical to SEQ ID NO: 1051 or an amino acid sequence that is at least 65%, at least 70%, at least 75%, at least 80%, at least 85%, at least 90%, at least 95%, at least 99%, or 100% identical to amino acid sequence AAS; and (iii) a CDR3 having an amino acid sequence that is at least 65%, at least 70%, at least 75%, at least 80%, at least 85%, at least 90%, at least 95%, at least 99%, or 100% identical to SEQ ID NO: 146 or 764; and at least one of VH1, VH2, or VH3 comprised in the antigen binding polypeptide complexes provided herein comprises (iv) a complementarity determining region (CDR) 1 having an amino acid sequence that is at least 65%, at least 70%, at least 75%, at least 80%, at least 85%, at least 90%, at least 95%, at least 99%, or 100% identical to SEQ ID NO: 148 or 1052; (v) a CDR2 having an amino acid sequence that is at least 65%, at least 70%, at least 75%, at least 80%, at least 85%, at least 90%, at least 95%, at least 99%, or 100% identical to SEQ ID NO: 149 or 1053; and (vi) a CDR3 having an amino acid sequence that is at least 65%, at least 70%, at least 75%, at least 80%, at least 85%, at least 90%, at least 95%, at least 99%, or 100% identical to SEQ ID NO: 150, 765, or 1054.

[2653] In some aspects, at least one of VL1, VL2, or VL3 comprised in the antigen binding polypeptide complexes provided herein comprises an amino acid sequence that is at least 65%, at least 70%, at least 75%, at least 80%, at least 85%, at least 90%, at least 95%, at least 99%, or 100% identical to SEQ ID NO: 147.

[2654] In some aspects, at least one of VH1, VH2, or VH3 comprised in the antigen binding polypeptide complexes provided herein comprises an amino acid sequence that is at least 65%, at least 70%, at least 75%, at least 80%, at least 85%, at least 90%, at least 95%, at least 99%, or 100% identical to SEQ ID NO: 151.

[2655] In some aspects, (i) at least one of VL1, VL2, or VL3 comprised in the antigen binding polypeptide complexes provided herein comprises an amino acid sequence that is at least 65%, at least 70%, at least 75%, at least 80%, at least 85%, at least 90%, at least 95%, at least 99%, or 100% identical to SEQ ID NO: 147, and (ii) at least one of VH1, VH2, or VH3 comprised in the antigen binding polypeptide complexes provided herein comprises an amino acid sequence that is at least 65%, at least 70%, at least 75%, at least 80%, at least 85%, at least 90%, at least 95%, at least 99%, or 100% identical to SEQ ID NO: 151.

[2656] In some aspects, the antigen binding polypeptide complexes provided herein comprise a VL1 comprising (i) a complementarity determining region (CDR) 1 having an amino acid sequence that is at least 65%, at least 70%, at least 75%, at least 80%, at least 85%, at least 90%, at least 95%, at least 99%, or 100% identical to SEQ ID NO: 145 or 1050; (ii) a CDR2 having an amino acid sequence at least 65%, at least 70%, at least 75%, at least 80%, at least 85%, at least 90%, at least 95%, at least 99%, or 100% identical to SEQ ID NO: 1051 or an amino acid sequence that is at least 65%, at least 70%, at least 75%, at least 80%, at least 85%, at least 90%, at least 95%, at least 99%, or 100% identical to amino acid sequence AAS; and (iii) a CDR3 having an amino acid sequence that is at least 65%, at least 70%, at least 75%, at least 80%, at least 85%, at least 90%, at least 95%, at least 99%, or 100% identical to SEQ ID NO: 146 or 764; a VH1 comprising (iv) a complementarity determining region (CDR) 1 having an amino acid sequence that is at least 65%, at least 70%, at least 75%, at least 80%, at least 85%, at least 90%, at least 95%, at least 99%, or 100% identical to SEQ ID NO: 148 or 1052; (v) a CDR2 having an amino acid sequence that is at least 65%, at least 70%, at least 75%, at least 80%, at least 85%, at least 90%, at least 95%, at least 99%, or 100% identical to SEQ ID NO: 149 or 1053; and (vi) a CDR3 having an amino acid sequence that is at least 65%, at least 70%, at least 75%, at least 80%, at least 85%, at least 90%, at least 95%, at least 99%, or 100% identical to SEQ ID NO: 150, 765, or 1054; a VL2 comprising (vii) a complementarity determining region (CDR) 1 having an amino acid sequence that is at least 65%, at least 70%, at least 75%, at least 80%, at least 85%, at least 90%, at least 95%, at least 99%, or 100% identical to any one of SEQ ID NOs: 1, 9, 15, 23, 30, 41, 48, 55, 58, 65, 72, 79, 86, 93, 99, 105, 112, 119, 130, 138, 145, 152, 159, 166, 172, 179, 186, 192, 199, 205, 212, 219, 226, 232, 324, 627, 640, 650, 659, 676, 687, 695, 703, 712, 770, 778, 785, 794, 801, 807, 814, 827, 836, 849, 858, 865, 878, 1045, 1050, 1055, 1060, and 1065; (viii) a CDR2 having an amino acid sequence at least 65%, at least 70%, at least 75%, at least 80%, at least 85%, at least 90%, at least 95%, at least 99%, or 100% identical to any one of SEQ ID NOs: 2, 31, 628, 641, 677, 1046, 1051, 1056, and 1061; or at least 65%, at least 70%, at least 75%, at least 80%, at least 85%, at least 90%, at least 95%, at least 99%, or 100% identical to any one of amino acid sequences AAS, GAS, LGS, GTN, GTN, SAS, SDS, DNT, EVT, DAS, DVT, RNS, DVS, EDS, DDS, KDS, VAS, WAS, YTS, EVS, NNN, SYN, and DAT; (ix) a CDR3 having an amino acid sequence at least 65%, at least 70%, at least 75%, at least 80%, at least 85%, at least 90%, at least 95%, at least 99%, or 100% identical to any one of SEQ ID NOs: 3, 10, 16, 24, 32, 38, 42, 49, 59, 66, 73, 80, 87, 94, 100, 106, 113, 120, 126, 131, 139, 146, 153, 160, 167, 173, 180, 187, 193, 200, 206, 213, 220, 227, 233, 239, 242, 246, 249, 256, 283, 285, 287, 288, 290, 292, 294, 296, 301, 304, 306, 309, 311, 313, 316, 325, 326, 329, 642, 651, 660, 668, 678, 651, 696, 704, 713, 764, 766, 768, 771, 779, 786, 792, 795, 808, 815, 821, 830, 837, 843, 850, 856, 859, 866, 872, 879, 885, and 1066; a VH2 comprising (x) a CDR1 having an amino acid sequence at least 65%, at least 70%, at least 75%, at least 80%, at least 85%, at least 90%, at least 95%, at least 99%, or 100% identical to any one of SEQ ID NOs: 5, 12, 18, 26, 34, 44, 51, 61, 68, 75, 82, 89, 96, 102, 108, 115, 122, 133, 141, 148, 155, 162, 175, 182, 189, 195, 202, 208, 215, 222, 229, 235, 318, 629, 645, 654, 663, 671, 682, 690, 699, 707, 716, 773, 781, 788, 797, 803, 810, 817, 823, 832, 839, 845, 852, 861, 868, 874, 881, 1047, 1052, 1057, 1062, and 1067; (xi) a CDR2 having an amino acid sequence at least 65%, at least 70%, at least 75%, at least 80%, at least 85%, at least 90%, at least 95%, at least 99%, or 100% identical to any one of SEQ ID NOs: 6, 19, 27, 35, 45, 52, 56, 62, 69, 76, 83, 90, 109, 116, 123, 134, 142, 149, 156, 163, 169, 176, 183, 196, 209, 216, 223, 236, 273, 319, 328, 630, 646, 655, 664, 672, 683, 691, 708, 776, 782, 789, 798, 804, 811, 818, 824, 833, 840, 846, 853, 862, 869, 875, 882, 1048, 1053, 1058, 1063, and 1068; (xii) a CDR3 having an amino acid sequence at least 65%, at least 70%, at least 75%, at least 80%, at least 85%, at least 90%, at least 95%, at least 99%, or 100% identical to any one of SEQ ID NOs: 7, 13, 20, 28, 36, 40, 46, 53, 63, 70, 77, 84, 91, 97, 103, 110, 117, 124, 128, 135, 143, 150, 157, 164, 170, 177, 184, 190, 197, 203, 210, 217, 224, 230, 237, 241, 244, 248, 253, 257, 259, 261, 263, 265, 267, 269, 271, 274, 276, 278, 281, 297, 320, 322, 327, 330, 332, 631, 647, 656, 665, 673, 684, 692, 700, 709, 717, 765, 767, 769, 774, 783, 790, 793, 799, 805, 812, 819, 825, 834, 841, 847, 854, 857, 863, 870, 876, 883, 886, 1049, 1054, 1059, 1064, and 1069; a VL3 comprising (xiii) a complementarity determining region (CDR) 1 having an amino acid sequence that is at least 65%, at least 70%, at least 75%, at least 80%, at least 85%, at least 90%, at least 95%, at least 99%, or 100% identical to any one of SEQ ID NOs: 1, 9, 15, 23, 30, 41, 48, 55, 58, 65, 72, 79, 86, 93, 99, 105, 112, 119, 130, 138, 145, 152, 159, 166, 172, 179, 186, 192, 199, 205, 212, 219, 226, 232, 324, 627, 640, 650, 659, 676, 687, 695, 703, 712, 770, 778, 785, 794, 801, 807, 814, 827, 836, 849, 858, 865, 878, 1045, 1050, 1055, 1060, and 1065; (xiv) a CDR2 having an amino acid sequence at least 65%, at least 70%, at least 75%, at least 80%, at least 85%, at least 90%, at least 95%, at least 99%, or 100% identical to any one of SEQ ID NOs: 2, 31, 628, 641, 677, 1046, 1051, 1056, and 1061; or at least 65%, at least 70%, at least 75%, at least 80%, at least 85%, at least 90%, at least 95%, at least 99%, or 100% identical to any one of amino acid sequences AAS, GAS, LGS, GTN, GTN, SAS, SDS, DNT, EVT, DAS, DVT, RNS, DVS, EDS, DDS, KDS, VAS, WAS, YTS, EVS, NNN, SYN, and DAT; (xv) a CDR3 having an amino acid sequence at least 65%, at least 70%, at least 75%, at least 80%, at least 85%, at least 90%, at least 95%, at least 99%, or 100% identical to any one of SEQ ID NOs: 3, 10, 16, 24, 32, 38, 42, 49, 59, 66, 73, 80, 87, 94, 100, 106, 113, 120, 126, 131, 139, 146, 153, 160, 167, 173, 180, 187, 193, 200, 206, 213, 220, 227, 233, 239, 242, 246, 249, 256, 283, 285, 287, 288, 290, 292, 294, 296, 301, 304, 306, 309, 311, 313, 316, 325, 326, 329, 642, 651, 660, 668, 678, 651, 696, 704, 713, 764, 766, 768, 771, 779, 786, 792, 795, 808, 815, 821, 830, 837, 843, 850, 856, 859, 866, 872, 879, 885, and 1066; and a VH3 comprising (xvi) a CDR1 having an amino acid sequence at least 65%, at least 70%, at least 75%, at least 80%, at least 85%, at least 90%, at least 95%, at least 99%, or 100% identical to any one of SEQ ID NOs: 5, 12, 18, 26, 34, 44, 51, 61, 68, 75, 82, 89, 96, 102, 108, 115, 122, 133, 141, 148, 155, 162, 175, 182, 189, 195, 202, 208, 215, 222, 229, 235, 318, 629, 645, 654, 663, 671, 682, 690, 699, 707, 716, 773, 781, 788, 797, 803, 810, 817, 823, 832, 839, 845, 852, 861, 868, 874, 881, 1047, 1052, 1057, 1062, and 1067; (xvii) a CDR2 having an amino acid sequence at least 65%, at least 70%, at least 75%, at least 80%, at least 85%, at least 90%, at least 95%, at least 99%, or 100% identical to any one of SEQ ID NOs: 6, 19, 27, 35, 45, 52, 56, 62, 69, 76, 83, 90, 109, 116, 123, 134, 142, 149, 156, 163, 169, 176, 183, 196, 209, 216, 223, 236, 273, 319, 328, 630, 646, 655, 664, 672, 683, 691, 708, 776, 782, 789, 798, 804, 811, 818, 824, 833, 840, 846, 853, 862, 869, 875, 882, 1048, 1053, 1058, 1063, and 1068; (xviii) a CDR3 having an amino acid sequence at least 65%, at least 70%, at least 75%, at least 80%, at least 85%, at least 90%, at least 95%, at least 99%, or 100% identical to any one of SEQ ID NOs: 7, 13, 20, 28, 36, 40, 46, 53, 63, 70, 77, 84, 91, 97, 103, 110, 117, 124, 128, 135, 143, 150, 157, 164, 170, 177, 184, 190, 197, 203, 210, 217, 224, 230, 237, 241, 244, 248, 253, 257, 259, 261, 263, 265, 267, 269, 271, 274, 276, 278, 281, 297, 320, 322, 327, 330, 332, 631, 647, 656, 665, 673, 684, 692, 700, 709, 717, 765, 767, 769, 774, 783, 790, 793, 799, 805, 812, 819, 825, 834, 841, 847, 854, 857, 863, 870, 876, 883, 886, 1049, 1054, 1059, 1064, and 1069.

[2657] In some aspects, the antigen binding polypeptide complexes provided herein comprise (i) a VL1 comprising an amino acid sequence that is at least 65%, at least 70%, at least 75%, at least 80%, at least 85%, at least 90%, at least 95%, at least 99%, or 100% identical to SEQ ID NO: 147; (ii) a VH1 comprising an amino acid sequence that is at least 65%, at least 70%, at least 75%, at least 80%, at least 85%, at least 90%, at least 95%, at least 99%, or 100% identical to SEQ ID NO: 151; (iii) a VL2 comprising an amino acid sequence that is at least 65%, at least 70%, at least 75%, at least 80%, at least 85%, at least 90%, at least 95%, at least 99%, or 100% identical to any one of SEQ ID NOs: 4, 11, 17, 25, 33, 39, 43, 50, 60, 67, 74, 81, 88, 95, 101, 107, 114, 121, 127, 132, 140, 147, 154, 161, 168, 174, 181, 188, 194, 201, 207, 214, 221, 228, 234, 240, 243, 247, 250, 251, 252, 255, 284, 286, 289, 291, 293, 295, 299, 300, 302, 303, 305, 307, 308, 310, 312, 314, 315, 317, 323, 639, 649, 658, 667, 675, 686, 694, 702, 711, 772, 780, 787, 796, 802, 809, 816, 822, 831, 838, 844, 851, 860, 867, 873, 880, and 988; (iv) a VH2 comprising an amino acid sequence that is at least 65%, at least 70%, at least 75%, at least 80%, at least 85%, at least 90%, at least 95%, at least 99%, or 100% identical to any one of SEQ ID NOs: 8, 14, 21, 22, 29, 37, 47, 54, 57, 64, 71, 78, 85, 92, 98, 104, 111, 118, 125, 129, 136, 137, 144, 151, 158, 165, 171, 178, 185, 191, 198, 204, 211, 218, 225, 231, 238, 245, 254, 258, 260, 262, 264, 266, 268, 270, 272, 275, 277, 279, 280, 282, 298, 321, 331, 626, 644, 653, 662, 670, 681, 689, 698, 706, 715, 775, 777, 784, 791, 800, 806, 813, 820, 826, 835, 842, 848, 855, 864, 871, 877, and 884; (v) a VL3 comprising an amino acid sequence that is at least 65%, at least 70%, at least 75%, at least 80%, at least 85%, at least 90%, at least 95%, at least 99%, or 100% identical to any one of SEQ ID NOs: 4, 11, 17, 25, 33, 39, 43, 50, 60, 67, 74, 81, 88, 95, 101, 107, 114, 121, 127, 132, 140, 147, 154, 161, 168, 174, 181, 188, 194, 201, 207, 214, 221, 228, 234, 240, 243, 247, 250, 251, 252, 255, 284, 286, 289, 291, 293, 295, 299, 300, 302, 303, 305, 307, 308, 310, 312, 314, 315, 317, 323, 639, 649, 658, 667, 675, 686, 694, 702, 711, 772, 780, 787, 796, 802, 809, 816, 822, 831, 838, 844, 851, 860, 867, 873, 880, and 988; (vi) a VH3 comprising an amino acid sequence that is at least 65%, at least 70%, at least 75%, at least 80%, at least 85%, at least 90%, at least 95%, at least 99%, or 100% identical to any one of SEQ ID NOs: 8, 14, 21, 22, 29, 37, 47, 54, 57, 64, 71, 78, 85, 92, 98, 104, 111, 118, 125, 129, 136, 137, 144, 151, 158, 165, 171, 178, 185, 191, 198, 204, 211, 218, 225, 231, 238, 245, 254, 258, 260, 262, 264, 266, 268, 270, 272, 275, 277, 279, 280, 282, 298, 321, 331, 626, 644, 653, 662, 670, 681, 689, 698, 706, 715, 775, 777, 784, 791, 800, 806, 813, 820, 826, 835, 842, 848, 855, 864, 871, 877, and 884.

[2658] In some aspects, the antigen binding polypeptide complexes provided herein comprise a VL1 comprising (i) a complementarity determining region (CDR) 1 having an amino acid sequence that is at least 65%, at least 70%, at least 75%, at least 80%, at least 85%, at least 90%, at least 95%, at least 99%, or 100% identical to SEQ ID NO: 145 or 1050; (ii) a CDR2 having an amino acid sequence at least 65%, at least 70%, at least 75%, at least 80%, at least 85%, at least 90%, at least 95%, at least 99%, or 100% identical to SEQ ID NO: 1051 or an amino acid sequence that is at least 65%, at least 70%, at least 75%, at least 80%, at least 85%, at least 90%, at least 95%, at least 99%, or 100% identical to amino acid sequence AAS; and (iii) a CDR3 having an amino acid sequence that is at least 65%, at least 70%, at least 75%, at least 80%, at least 85%, at least 90%, at least 95%, at least 99%, or 100% identical to SEQ ID NO: 146 or 764; a VH1 comprising (iv) a complementarity determining region (CDR) 1 having an amino acid sequence that is at least 65%, at least 70%, at least 75%, at least 80%, at least 85%, at least 90%, at least 95%, at least 99%, or 100% identical to SEQ ID NO: 148 or 1052; (v) a CDR2 having an amino acid sequence that is at least 65%, at least 70%, at least 75%, at least 80%, at least 85%, at least 90%, at least 95%, at least 99%, or 100% identical to SEQ ID NO: 149 or 1053; and (vi) a CDR3 having an amino acid sequence that is at least 65%, at least 70%, at least 75%, at least 80%, at least 85%, at least 90%, at least 95%, at least 99%, or 100% identical to SEQ ID NO: 150, 765, or 1054; a VL2 comprising (vii) a complementarity determining region (CDR) 1 having an amino acid sequence that is at least 65%, at least 70%, at least 75%, at least 80%, at least 85%, at least 90%, at least 95%, at least 99%, or 100% identical to any one of SEQ ID NOs: 1, 9, 15, 23, 30, 65, 72, 145, 152, 324, 627, 138, 172, 1045, 1050, 1055, 1060, and 1065; (viii) a CDR2 having an amino acid sequence at least 65%, at least 70%, at least 75%, at least 80%, at least 85%, at least 90%, at least 95%, at least 99%, or 100% identical to any one of SEQ ID NOs: 2, 31, 628, 1046, 1051, 1056, and 1061, or at least 65%, at least 70%, at least 75%, at least 80%, at least 85%, at least 90%, at least 95%, at least 99%, or 100% identical to any one of amino acid sequences GAS, LGS, GTN, SAS, SDS, AAS, DAS, and DNT; (ix) a CDR3 having an amino acid sequence at least 65%, at least 70%, at least 75%, at least 80%, at least 85%, at least 90%, at least 95%, at least 99%, or 100% identical to any one of SEQ ID NOs: 3, 10, 16, 24, 32, 38, 66, 73, 146, 153, 325, 326, 764, 766, 139, 856, 173, 792, and 1066; a VH2 comprising (x) a CDR1 having an amino acid sequence at least 65%, at least 70%, at least 75%, at least 80%, at least 85%, at least 90%, at least 95%, at least 99%, or 100% identical to any one of SEQ ID NOs: 5, 12, 18, 26, 34, 68, 75, 148, 155, 629, 141, 175, 1047, 1052, 1057, 1062, and 1067; (xi) a CDR2 having an amino acid sequence at least 65%, at least 70%, at least 75%, at least 80%, at least 85%, at least 90%, at least 95%, at least 99%, or 100% identical to any one of SEQ ID NOs: 6, 19, 27, 35, 69, 76, 149, 156, 630, 142, 176, 1048, 1053, 1058, 1063, and 1068; (xii) a CDR3 having an amino acid sequence at least 65%, at least 70%, at least 75%, at least 80%, at least 85%, at least 90%, at least 95%, at least 99%, or 100% identical to any one of SEQ ID NOs: 7, 13, 20, 28, 36, 40, 70, 77, 327, 150, 157, 332, 631, 765, 767, 143, 857, 177, 793, 1049, 1054, 1059, 1064, and 1069; a VL3 comprising (xiii) a complementarity determining region (CDR) 1 having an amino acid sequence that is at least 65%, at least 70%, at least 75%, at least 80%, at least 85%, at least 90%, at least 95%, at least 99%, or 100% identical to any one of SEQ ID NOs: 1, 9, 15, 23, 30, 65, 72, 145, 152, 324, 627, 138, 172, 1045, 1050, 1055, 1060, and 1065; (xiv) a CDR2 having an amino acid sequence at least 65%, at least 70%, at least 75%, at least 80%, at least 85%, at least 90%, at least 95%, at least 99%, or 100% identical to any one of SEQ ID NOs: 2, 31, 628, 1046, 1051, 1056, and 1061, or at least 65%, at least 70%, at least 75%, at least 80%, at least 85%, at least 90%, at least 95%, at least 99%, or 100% identical to any one of amino acid sequences GAS, LGS, GTN, SAS, SDS, AAS, DAS, and DNT; (xv) a CDR3 having an amino acid sequence at least 65%, at least 70%, at least 75%, at least 80%, at least 85%, at least 90%, at least 95%, at least 99%, or 100% identical to any one of SEQ ID NOs: 3, 10, 16, 24, 32, 38, 66, 73, 146, 153, 325, 326, 764, 766, 139, 856, 173, 792, and 1066; and a VH3 comprising (xvi) a CDR1 having an amino acid sequence at least 65%, at least 70%, at least 75%, at least 80%, at least 85%, at least 90%, at least 95%, at least 99%, or 100% identical to any one of SEQ ID NOs: 5, 12, 18, 26, 34, 68, 75, 148, 155, 629, 141, 175, 1047, 1052, 1057, 1062, and 1067; (xvii) a CDR2 having an amino acid sequence at least 65%, at least 70%, at least 75%, at least 80%, at least 85%, at least 90%, at least 95%, at least 99%, or 100% identical to any one of SEQ ID NOs: 6, 19, 27, 35, 69, 76, 149, 156, 630, 142, 176, 1048, 1053, 1058, 1063, and 1068; (xviii) a CDR3 having an amino acid sequence at least 65%, at least 70%, at least 75%, at least 80%, at least 85%, at least 90%, at least 95%, at least 99%, or 100% identical to any one of SEQ ID NOs: 7, 13, 20, 28, 36, 40, 70, 77, 327, 150, 157, 332, 631, 765, 767, 143, 857, 177, 793, 1049, 1054, 1059, 1064, and 1069.

[2659] In some aspects, the antigen binding polypeptide complexes provided herein comprise (i) a VL1 comprising an amino acid sequence that is at least 65%, at least 70%, at least 75%, at least 80%, at least 85%, at least 90%, at least 95%, at least 99%, or 100% identical to SEQ ID NO: 147; (ii) a VH1 comprising an amino acid sequence that is at least 65%, at least 70%, at least 75%, at least 80%, at least 85%, at least 90%, at least 95%, at least 99%, or 100% identical to SEQ ID NO: 151; (iii) a VL2 comprising an amino acid sequence that is at least 65%, at least 70%, at least 75%, at least 80%, at least 85%, at least 90%, at least 95%, at least 99%, or 100% identical to any one of SEQ ID NOs: 4, 11, 17, 25, 33, 39, 67, 74, 147, 154, 140, and 174; (iv) a VH2 comprising an amino acid sequence that is at least 65%, at least 70%, at least 75%, at least 80%, at least 85%, at least 90%, at least 95%, at least 99%, or 100% identical to any one of SEQ ID NOs: 8, 14, 21, 22, 29, 37, 71, 78, 151, 158, 626, 144, and 178; (v) a VL3 comprising an amino acid sequence that is at least 65%, at least 70%, at least 75%, at least 80%, at least 85%, at least 90%, at least 95%, at least 99%, or 100% identical to any one of SEQ ID NOs: 4, 11, 17, 25, 33, 39, 67, 74, 147, 154, 140, and 174; (vi) a VH3 comprising an amino acid sequence that is at least 65%, at least 70%, at least 75%, at least 80%, at least 85%, at least 90%, at least 95%, at least 99%, or 100% identical to any one of SEQ ID NOs: 8, 14, 21, 22, 29, 37, 71, 78, 151, 158, 626, 144, and 178.

[2660] In some aspects, the second antigen binding polypeptide comprised in the antigen binding polypeptide complexes disclosed herein, comprises one or more CL, as indicated in the formulas representing the antigen binding polypeptide complexes disclosed herein. In some aspects, the CL comprises an amino acid sequence at least 65%, at least 70%, at least 75%, at least 80%, at least 85%, at least 90%, at least 95%, at least 99%, or 100% identical to any one of SEQ ID NOs: 374, 637, or 1092-1095.

[2661] In some aspects, the first antigen binding polypeptide comprised in the antigen binding polypeptide complexes disclosed herein, comprises one or more CH1, as indicated in the formulas representing the antigen binding polypeptide complexes disclosed herein. In some aspects, the CH1 comprises an amino acid sequence at least 65%, at least 70%, at least 75%, at least 80%, at least 85%, at least 90%, at least 95%, at least 99%, or 100% identical to any one of SEQ ID NOs: 375, 634, 1070, 1071, or 1086-1091.

[2662] In some aspects, one or both of the antigen binding polypeptides comprised in the antigen binding polypeptide complexes provided herein further comprise an Fc region. In some aspects, one or both of the antigen binding polypeptides comprised in the antigen binding polypeptide complexes provided herein further comprise an Fc region at the carboxy-terminus. In some aspects, the Fc region comprises an immunoglobulin heavy chain constant region 2 (CH2) and/or an immunoglobulin heavy chain constant region 3 (CH3). In some aspects, the Fc region further comprises an immunoglobulin hinge (i.e., a hinge region). In some aspects, the hinge region is interposed between a CH1 and a CH2 (i.e., a hinge region is localized between the carboxy terminal residue of a CH1 and the N-terminal residue of a CH2). In some aspects, the hinge region comprises an amino acid sequence at least 65%, at least 70%, at least 75%, at least 80%, at least 85%, at least 90%, at least 95%, at least 99%, or 100% identical to SEQ ID Ns: 635, 636, 1072, 1073, or 1074. In some aspects, the Fc region comprises a CH2 and a CH3. In some aspects, the CH2 comprises an amino acid sequence that is at least 65%, at least 70%, at least 75%, at least 80%, at least 85%, at least 90%, at least 95%, at least 99%, or 100% identical to any one of SEQ ID NOs: 1075-1078. In some aspects, the CH3 comprises an amino acid sequence that is at least 65%, at least 70%, at least 75%, at least 80%, at least 85%, at least 90%, at least 95%, at least 99%, or 100% identical to any one of SEQ ID NOs: 1079-1085. In some aspects, the Fc region comprises an amino acid sequence that is at least 65%, at least 70%, at least 75%, at least 80%, at least 85%, at least 90%, at least 95%, at least 99%, or 100% identical to any one of SEQ ID NOs: 376-380.

[2663] In some aspects, the Fc region comprises one or more amino acid substitutions. In some aspects, the one or more amino acid substitutions comprise one or more half-life extension amino acid substitutions. In some aspects, the one or more half-life extension amino acid substitutions comprise one or more of amino acid substitutions M428L, N434A, N434S, L234F, L235E, P331S, M252Y, S254T, or T256E, or equivalent thereof, based on the EU numbering scheme. In some aspects, the one or more half-life extension amino acid substitutions comprise a LA (M428L and N434A, or equivalent thereof, based on the EU numbering scheme) amino acid substitution. In some aspects, the one or more half-life extension amino acid substitutions comprise a LS (M428L and N434S, or equivalent thereof, based on the EU numbering scheme) amino acid substitution. In some aspects, the one or more half-life extension amino acid substitutions comprise L234F and L235E, or equivalent thereof (based on the EU numbering scheme) amino acid substitutions. In some aspects, the one or more half-life extension amino acid substitutions comprise a TM (L234F, L235E, and P331S, or equivalent thereof, based on the EU numbering scheme) amino acid substitution. In some aspects, the one or more half-life extension amino acid substitutions comprise a YTE (M252Y, S254T, and T256E, or equivalent thereof, based on the EU numbering scheme) amino acid substitution.

[2664] In some aspects, the Fc region comprises at least one knob-into-hole modification. In some aspects, the antigen binding polypeptides disclosed herein are comprised in IgG1 or IgG4 antibodies or antigen binding fragments thereof. In some aspects, the knob-into-hole modification comprises one or more of knob substitutions of S354C and T366W, or equivalent thereof, and/or one or more of hole substitutions of Y349C, T366S, L368A, Y407V, or equivalent thereof, or a combination thereof, based on the EU numbering scheme. In some aspects, the Fc region comprises a knob-into-hole modification comprising knob substitutions of S354C and T366W, or equivalent thereof, and/or hole substitutions of Y349C, T366S, L368A and Y407V, or equivalent thereof, and/or a half-life extension amino acid substitution comprising: a LA (M428L and N434A, or equivalent thereof, based on the EU numbering scheme) amino acid substitution, a LS (M428L and N434S, or equivalent thereof, based on the EU numbering scheme) amino acid substitution. L234F and L235E, or equivalent thereof (based on the EU numbering scheme) amino acid substitutions, a TM (L234F, L235E, and P331S, or equivalent thereof, based on the EU numbering scheme) amino acid substitution, a YTE (M252Y, S254T, and T256E, or equivalent thereof, based on the EU numbering scheme) amino acid substitution, or any combination thereof.

[2665] In some aspects, the Fc region comprises knob substitutions of S354C and T366W, or equivalent thereof, and a half-life extension amino acid substitution comprising: a LA (M428L and N434A, or equivalent thereof, based on the EU numbering scheme) amino acid substitution, a LS (M428L and N434S, or equivalent thereof, based on the EU numbering scheme) amino acid substitution. L234F and L235E, or equivalent thereof (based on the EU numbering scheme) amino acid substitutions, a TM (L234F, L235E, and P331S, or equivalent thereof, based on the EU numbering scheme) amino acid substitution, a YTE (M252Y, S254T, and T256E, or equivalent thereof, based on the EU numbering scheme) amino acid substitution, or any combination thereof.

[2666] In some aspects, the Fc region comprises hole substitutions of Y349C, T366S, L368A and Y407V, or equivalent thereof, and a half-life extension amino acid substitution comprising: a LA (M428L and N434A, or equivalent thereof, based on the EU numbering scheme) amino acid substitution, a LS (M428L and N434S, or equivalent thereof, based on the EU numbering scheme) amino acid substitution. L234F and L235E, or equivalent thereof (based on the EU numbering scheme) amino acid substitutions, a TM (L234F, L235E, and P331S, or equivalent thereof, based on the EU numbering scheme) amino acid substitution, a YTE (M252Y, S254T, and T256E, or equivalent thereof, based on the EU numbering scheme) amino acid substitution, or any combination thereof.

[2667] In some aspects, one or both of the antigen binding polypeptides comprised in the antigen binding polypeptide complexes disclosed herein comprise one or more Fc effector function knockout mutation. In some aspects, the antigen binding polypeptide complexes disclosed herein are IgG1 or IgG4 antibodies or antigen binding fragments thereof. In some aspects, the Fc effector function knockout mutation is L234A, L235A, P239A, or equivalent thereof, or a combination thereof, based on the EU numbering scheme.

[2668] In some aspects, one or both of the antigen binding polypeptides comprised in the antigen binding polypeptide complexes disclosed herein comprise a mutation at a glycosylation site. In some aspects, the mutation at a glycosylation site is a mutation at an N-glycosylation site. In some aspects, one or both of the antigen binding polypeptides comprised in the antigen binding polypeptide complexes disclosed herein comprise a VH comprising a mutation at a glycosylation site. In some aspects, the mutation at a glycosylation site is a mutation at an N-glycosylation site. In some aspects, the mutation at an N-glycosylation site is at amino acid N62 of the VH region or equivalent thereof. In some aspects, the mutation at an N-glycosylation site at amino acid N62 is N62Q or N62S, or equivalent thereof.

[2669] In some aspects, one or both of the antigen binding polypeptides comprised in the antigen binding polypeptide complexes disclosed herein, comprise one or more optional linkers. The one or more optional linkers are indicated herein as Ln, wherein n is an integer, and the integer next to each L indicates each L comprised in the antigen binding polypeptides comprised in the antigen binding polypeptide complexes disclosed herein. For example, if an antigen binding polypeptide comprised in the antigen binding polypeptide complexes disclosed herein comprises two linkers, the first linker from N-terminus to C-terminus is herein indicated as L1, and the second linker from N-terminus to C-terminus is herein indicated as L2. If an antigen binding polypeptide complex disclosed herein comprises a first antigen binding polypeptide comprising two linkers, indicated herein as L1 and L2, as explained above, the linkers comprised in the second antigen binding polypeptide are indicated with the following integer, in this example, the first linker from N-terminus to C-terminus of the second antigen binding polypeptide is herein indicated as L3, the second linker from N-terminus to C-terminus of the second antigen binding polypeptide is herein indicated as L3. In some aspects, any one of the optional linkers each independently have a length of from 0 amino acids to about 50 amino acids. In some aspects, any one of the optional linkers each independently have a length of from 5 amino acids to about 40 amino acids.

[2670] In some aspects, any one of the optional linkers are non-immunogenic. In some aspects, any one of the optional linkers do not contain a consensus T cell epitope.

[2671] In some aspects, any of Ln comprises an amino acid sequence of G or A, or an amino acid sequence at least 65%, at least 70%, at least 75%, at least 80%, at least 85%, at least 90%, at least 95%, at least 99%, or 100% identical to amino acid sequence GSS or ASG, or an amino acid sequence at least 65%, at least 70%, at least 75%, at least 80%, at least 85%, at least 90%, at least 95%, at least 99%, or 100% identical to any one of SEQ ID NOs: 333-373 or 967-971. In some aspects, Ln comprises an amino acid sequence at least 65%, at least 70%, at least 75%, at least 80%, at least 85%, at least 90%, at least 95%, at least 99%, or 100% identical to any one of SEQ ID NOs: 333-345 or 967-971.

[2672] In some aspects, the first polypeptide comprises a structure represented by VL1-CL-VL2-VH2-VH1-CH1, VL1-L1-CL-L2-VL2-L3-VH2-L4-VH1-L5-CH1, VL1-CL-L1-VL2-L2-VH2-L3-VH1-CH1, VL1-CL-VL2-VH2-VH1-CH1-CH2-CH3, VL1-L1-CL-L2-VL2-L3-VH2-L4-VH1-L5-CH1-CH2-CH3, or VL1-CL-L1-VL2-L2-VH2-L3-VH1-CH1-CH2-CH3, and the second polypeptide comprises a structure represented by VL3-CL-VL4-VH4-VH3-CH1, VL3-L6-CL-L7-VL4-L8-VH4-L9-VH3-L10-CH1, VL3-CL-L4-VL4-L5-VH4-L6-VH3-CH1, VL3-CL-VL4-VH4-VH3-CH1-CH2-CH3, VL3-L6-CL-L7-VL4-L8-VH4-L9-VH3-L10-CH1-CH2-CH3, or VL3-CL-L4-VL4-L5-VH4-L6-VH3-CH1-CH2-CH3, wherein:
[2673] (a) VL1 comprises the same light chain variable region as VL3, VH1 comprises the same heavy chain variable region as VH3, VL2 comprises the same light chain variable region as VL4, VH2 comprises the same heavy chain variable region as VH4, and
[2674] wherein:
[2675] VL1 comprises a CDR1 having an amino acid sequence at least 65%, at least 70%, at least 75%, at least 80%, at least 85%, at least 90%, at least 95%, at least 99%, or 100% identical to SEQ ID NO: 15, a CDR2 having an amino acid sequence at least 65%, at least 70%, at least 75%, at least 80%, at least 85%, at least 90%, at least 95%, at least 99%, or 100% identical to amino acid sequence LGS, and a CDR3 having an amino acid sequence at least 65%, at least 70%, at least 75%, at least 80%, at least 85%, at least 90%, at least 95%, at least 99%, or 100% identical to SEQ ID NO: 16,
[2676] VH1 comprises a CDR1 having an amino acid sequence at least 65%, at least 70%, at least 75%, at least 80%, at least 85%, at least 90%, at least 95%, at least 99%, or 100% identical to SEQ ID NO: 18, a CDR2 having an amino acid sequence at least 65%, at least 70%, at least 75%, at least 80%, at least 85%, at least 90%, at least 95%, at least 99%, or 100% identical to SEQ ID NO: 19, and a CDR3 having an amino acid sequence at least 65%, at least 70%, at least 75%, at least 80%, at least 85%, at least 90%, at least 95%, at least 99%, or 100% identical to SEQ ID NO: 20,
[2677] VL2 comprises a CDR1 having an amino acid sequence at least 65%, at least 70%, at least 75%, at least 80%, at least 85%, at least 90%, at least 95%, at least 99%, or 100% identical to SEQ ID NO: 9 or 1055, a CDR2 having an amino acid sequence at least 65%, at least 70%, at least 75%, at least 80%, at least 85%, at least 90%, at least 95%, at least 99%, or 100% identical to SEQ ID NO: 1056 or an amino acid sequence at least 65%, at least 70%, at least 75%, at least 80%, at least 85%, at least 90%, at least 95%, at least 99%, or 100% identical to amino acid sequence GAS, and a CDR3 having an amino acid sequence at least 65%, at least 70%, at least 75%, at least 80%, at least 85%, at least 90%, at least 95%, at least 99%, or 100% identical to SEQ ID NO: 10,
[2678] VH2 comprises a CDR1 having an amino acid sequence at least 65%, at least 70%, at least 75%, at least 80%, at least 85%, at least 90%, at least 95%, at least 99%, or 100% identical to SEQ ID NO: 12 or 1057, a CDR2 having an amino acid sequence at least 65%, at least 70%, at least 75%, at least 80%, at least 85%, at least 90%, at least 95%, at least 99%, or 100% identical to SEQ ID NO: 6 or 1058, and a CDR3 having an amino acid sequence at least 65%, at least 70%, at least 75%, at least 80%, at least 85%, at least 90%, at least 95%, at least 99%, or 100% identical to SEQ ID NO: 13 or 1059,
[2679] VL3 comprises a CDR1 having an amino acid sequence at least 65%, at least 70%, at least 75%, at least 80%, at least 85%, at least 90%, at least 95%, at least 99%, or 100% identical to SEQ ID NO: 15, a CDR2 having an amino acid sequence at least 65%, at least 70%, at least 75%, at least 80%, at least 85%, at least 90%, at least 95%, at least 99%, or 100% identical to amino acid sequence LGS, and a CDR3 having an amino acid sequence at least 65%, at least 70%, at least 75%, at least 80%, at least 85%, at least 90%, at least 95%, at least 99%, or 100% identical to SEQ ID NO: 16,
[2680] VH3 comprises a CDR1 having an amino acid sequence at least 65%, at least 70%, at least 75%, at least 80%, at least 85%, at least 90%, at least 95%, at least 99%, or 100% identical to SEQ ID NO: 18, a CDR2 having an amino acid sequence at least 65%, at least 70%, at least 75%, at least 80%, at least 85%, at least 90%, at least 95%, at least 99%, or 100% identical to SEQ ID NO: 19, and a CDR3 having an amino acid sequence at least 65%, at least 70%, at least 75%, at least 80%, at least 85%, at least 90%, at least 95%, at least 99%, or 100% identical to SEQ ID NO: 20,
[2681] VL4 comprises a CDR1 having an amino acid sequence at least 65%, at least 70%, at least 75%, at least 80%, at least 85%, at least 90%, at least 95%, at least 99%, or 100% identical to SEQ ID NO: 9 or 1055, a CDR2 having an amino acid sequence at least 65%, at least 70%, at least 75%, at least 80%, at least 85%, at least 90%, at least 95%, at least 99%, or 100% identical to SEQ ID NO: 1056 or an amino acid sequence at least 65%, at least 70%, at least 75%, at least 80%, at least 85%, at least 90%, at least 95%, at least 99%, or 100% identical to amino acid sequence GAS, and a CDR3 having an amino acid sequence at least 65%, at least 70%, at least 75%, at least 80%, at least 85%, at least 90%, at least 95%, at least 99%, or 100% identical to SEQ ID NO: 10, and
[2682] VH4 comprises a CDR1 having an amino acid sequence at least 65%, at least 70%, at least 75%, at least 80%, at least 85%, at least 90%, at least 95%, at least 99%, or 100% identical to SEQ ID NO: 12 or 1057, a CDR2 having an amino acid sequence at least 65%, at least 70%, at least 75%, at least 80%, at least 85%, at least 90%, at least 95%, at least 99%, or 100% identical to SEQ ID NO: 6 or 1058, and a CDR3 having an amino acid sequence at least 65%, at least 70%, at least 75%, at least 80%, at least 85%, at least 90%, at least 95%, at least 99%, or 100% identical to SEQ ID NO: 13 or 1059, or wherein:
[2683] VL1 and VL3 each comprise an amino acid sequence at least 65%, at least 70%, at least 75%, at least 80%, at least 85%, at least 90%, at least 95%, at least 99%, or 100% identical to SEQ ID NO: 17, VH1 and VH3 each comprise an amino acid sequence at least 65%, at least 70%, at least 75%, at least 80%, at least 85%, at least 90%, at least 95%, at least 99%, or 100% identical to SEQ ID NO: 21 or 22, VL2 and VL4 each comprise an amino acid sequence at least 65%, at least 70%, at least 75%, at least 80%, at least 85%, at least 90%, at least 95%, at least 99%, or 100% identical to SEQ ID NO: 11, and VH2 and VH4 each comprise an amino acid sequence at least 65%, at least 70%, at least 75%, at least 80%, at least 85%, at least 90%, at least 95%, at least 99%, or 100% identical to SEQ ID NO: 14; or
[2684] (b) VL1 comprises the same light chain variable region as VL3, VH1 comprises the same heavy chain variable region as VH3, VL2 comprises the same light chain variable region as VL4, VH2 comprises the same heavy chain variable region as VH4, and
[2685] wherein:
[2686] VL1 comprises a CDR1 having an amino acid sequence at least 65%, at least 70%, at least 75%, at least 80%, at least 85%, at least 90%, at least 95%, at least 99%, or 100% identical to SEQ ID NO: 9 or 1055, a CDR2 having an amino acid sequence at least 65%, at least 70%, at least 75%, at least 80%, at least 85%, at least 90%, at least 95%, at least 99%, or 100% identical to SEQ ID NO: 1056 or an amino acid sequence at least 65%, at least 70%, at least 75%, at least 80%, at least 85%, at least 90%, at least 95%, at least 99%, or 100% identical to amino acid sequence GAS, and a CDR3 having an amino acid sequence at least 65%, at least 70%, at least 75%, at least 80%, at least 85%, at least 90%, at least 95%, at least 99%, or 100% identical to SEQ ID NO: 10,
[2687] VH1 comprises a CDR1 having an amino acid sequence at least 65%, at least 70%, at least 75%, at least 80%, at least 85%, at least 90%, at least 95%, at least 99%, or 100% identical to SEQ ID NO: 12 or 1057, a CDR2 having an amino acid sequence at least 65%, at least 70%, at least 75%, at least 80%, at least 85%, at least 90%, at least 95%, at least 99%, or 100% identical to SEQ ID NO: 6 or 1058, and a CDR3 having an amino acid sequence at least 65%, at least 70%, at least 75%, at least 80%, at least 85%, at least 90%, at least 95%, at least 99%, or 100% identical to SEQ ID NO: 13 or 1059,
[2688] VL2 comprises a CDR1 having an amino acid sequence at least 65%, at least 70%, at least 75%, at least 80%, at least 85%, at least 90%, at least 95%, at least 99%, or 100% identical to SEQ ID NO: 15, a CDR2 having an amino acid sequence at least 65%, at least 70%, at least 75%, at least 80%, at least 85%, at least 90%, at least 95%, at least 99%, or 100% identical to amino acid sequence LGS, and a CDR3 having an amino acid sequence at least 65%, at least 70%, at least 75%, at least 80%, at least 85%, at least 90%, at least 95%, at least 99%, or 100% identical to SEQ ID NO: 16,
[2689] VH2 comprises a CDR1 having an amino acid sequence at least 65%, at least 70%, at least 75%, at least 80%, at least 85%, at least 90%, at least 95%, at least 99%, or 100% identical to SEQ ID NO: 18, a CDR2 having an amino acid sequence at least 65%, at least 70%, at least 75%, at least 80%, at least 85%, at least 90%, at least 95%, at least 99%, or 100% identical to SEQ ID NO: 19, and a CDR3 having an amino acid sequence at least 65%, at least 70%, at least 75%, at least 80%, at least 85%, at least 90%, at least 95%, at least 99%, or 100% identical to SEQ ID NO: 20,
[2690] VL3 comprises a CDR1 having an amino acid sequence at least 65%, at least 70%, at least 75%, at least 80%, at least 85%, at least 90%, at least 95%, at least 99%, or 100% identical to SEQ ID NO: 9 or 1055, a CDR2 having an amino acid sequence at least 65%, at least 70%, at least 75%, at least 80%, at least 85%, at least 90%, at least 95%, at least 99%, or 100% identical to SEQ ID NO: 1056 or an amino acid sequence at least 65%, at least 70%, at least 75%, at least 80%, at least 85%, at least 90%, at least 95%, at least 99%, or 100% identical to amino acid sequence GAS, and a CDR3 having an amino acid sequence at least 65%, at least 70%, at least 75%, at least 80%, at least 85%, at least 90%, at least 95%, at least 99%, or 100% identical to SEQ ID NO: 10,
[2691] VH3 comprises a CDR1 having an amino acid sequence at least 65%, at least 70%, at least 75%, at least 80%, at least 85%, at least 90%, at least 95%, at least 99%, or 100% identical to SEQ ID NO: 12 or 1057, a CDR2 having an amino acid sequence at least 65%, at least 70%, at least 75%, at least 80%, at least 85%, at least 90%, at least 95%, at least 99%, or 100% identical to SEQ ID NO: 6 or 1058, and a CDR3 having an amino acid sequence at least 65%, at least 70%, at least 75%, at least 80%, at least 85%, at least 90%, at least 95%, at least 99%, or 100% identical to SEQ ID NO: 13 or 1059,
[2692] VL4 comprises a CDR1 having an amino acid sequence at least 65%, at least 70%, at least 75%, at least 80%, at least 85%, at least 90%, at least 95%, at least 99%, or 100% identical to SEQ ID NO: 15, a CDR2 having an amino acid sequence at least 65%, at least 70%, at least 75%, at least 80%, at least 85%, at least 90%, at least 95%, at least 99%, or 100% identical to amino acid sequence LGS, and a CDR3 having an amino acid sequence at least 65%, at least 70%, at least 75%, at least 80%, at least 85%, at least 90%, at least 95%, at least 99%, or 100% identical to SEQ ID NO: 16, and
[2693] VH4 comprises a CDR1 having an amino acid sequence at least 65%, at least 70%, at least 75%, at least 80%, at least 85%, at least 90%, at least 95%, at least 99%, or 100% identical to SEQ ID NO: 18, a CDR2 having an amino acid sequence at least 65%, at least 70%, at least 75%, at least 80%, at least 85%, at least 90%, at least 95%, at least 99%, or 100% identical to SEQ ID NO: 19, and a CDR3 having an amino acid sequence at least 65%, at least 70%, at least 75%, at least 80%, at least 85%, at least 90%, at least 95%, at least 99%, or 100% identical to SEQ ID NO: 20, or
[2694] wherein:
[2695] VL1 and VL3 each comprise an amino acid sequence at least 65%, at least 70%, at least 75%, at least 80%, at least 85%, at least 90%, at least 95%, at least 99%, or 100% identical to SEQ ID NO: 11, VH1 and VH3 each comprise an amino acid sequence at least 65%, at least 70%, at least 75%, at least 80%, at least 85%, at least 90%, at least 95%, at least 99%, or 100% identical to SEQ ID NO: 14, VL2 and VL4 each comprise an amino acid sequence at least 65%, at least 70%, at least 75%, at least 80%, at least 85%, at least 90%, at least 95%, at least 99%, or 100% identical to SEQ ID NO: 17, and VH2 and VH4 each comprise an amino acid sequence at least 65%, at least 70%, at least 75%, at least 80%, at least 85%, at least 90%, at least 95%, at least 99%, or 100% identical to SEQ ID NO: 21 or 22; or
[2696] (c) VL1 comprises the same light chain variable region as VL4, VH1 comprises the same heavy chain variable region as VH4, VL2 comprises the same light chain variable region as VL3, VH2 comprises the same heavy chain variable region as VH3, and
[2697] wherein:
[2698] VL1 comprises a CDR1 having an amino acid sequence at least 65%, at least 70%, at least 75%, at least 80%, at least 85%, at least 90%, at least 95%, at least 99%, or 100% identical to SEQ ID NO: 15, a CDR2 having an amino acid sequence at least 65%, at least 70%, at least 75%, at least 80%, at least 85%, at least 90%, at least 95%, at least 99%, or 100% identical to amino acid sequence LGS, and a CDR3 having an amino acid sequence at least 65%, at least 70%, at least 75%, at least 80%, at least 85%, at least 90%, at least 95%, at least 99%, or 100% identical to SEQ ID NO: 16,
[2699] VH1 comprises a CDR1 having an amino acid sequence at least 65%, at least 70%, at least 75%, at least 80%, at least 85%, at least 90%, at least 95%, at least 99%, or 100% identical to SEQ ID NO: 18, a CDR2 having an amino acid sequence at least 65%, at least 70%, at least 75%, at least 80%, at least 85%, at least 90%, at least 95%, at least 99%, or 100% identical to SEQ ID NO: 19, and a CDR3 having an amino acid sequence at least 65%, at least 70%, at least 75%, at least 80%, at least 85%, at least 90%, at least 95%, at least 99%, or 100% identical to SEQ ID NO: 20,
[2700] VL2 comprises a CDR1 having an amino acid sequence at least 65%, at least 70%, at least 75%, at least 80%, at least 85%, at least 90%, at least 95%, at least 99%, or 100% identical to SEQ ID NO: 9 or 1055, a CDR2 having an amino acid sequence at least 65%, at least 70%, at least 75%, at least 80%, at least 85%, at least 90%, at least 95%, at least 99%, or 100% identical to SEQ ID NO: 1056 or an amino acid sequence at least 65%, at least 70%, at least 75%, at least 80%, at least 85%, at least 90%, at least 95%, at least 99%, or 100% identical to amino acid sequence GAS, and a CDR3 having an amino acid sequence at least 65%, at least 70%, at least 75%, at least 80%, at least 85%, at least 90%, at least 95%, at least 99%, or 100% identical to SEQ ID NO: 10,
[2701] VH2 comprises a CDR1 having an amino acid sequence at least 65%, at least 70%, at least 75%, at least 80%, at least 85%, at least 90%, at least 95%, at least 99%, or 100% identical to SEQ ID NO: 12 or 1057, a CDR2 having an amino acid sequence at least 65%, at least 70%, at least 75%, at least 80%, at least 85%, at least 90%, at least 95%, at least 99%, or 100% identical to SEQ ID NO: 6 or 1058, and a CDR3 having an amino acid sequence at least 65%, at least 70%, at least 75%, at least 80%, at least 85%, at least 90%, at least 95%, at least 99%, or 100% identical to SEQ ID NO: 13 or 1059,
[2702] VL3 comprises a CDR1 having an amino acid sequence at least 65%, at least 70%, at least 75%, at least 80%, at least 85%, at least 90%, at least 95%, at least 99%, or 100% identical to SEQ ID NO: 9 or 1055, a CDR2 having an amino acid sequence at least 65%, at least 70%, at least 75%, at least 80%, at least 85%, at least 90%, at least 95%, at least 99%, or 100% identical to SEQ ID NO: 1056 or an amino acid sequence at least 65%, at least 70%, at least 75%, at least 80%, at least 85%, at least 90%, at least 95%, at least 99%, or 100% identical to amino acid sequence GAS, and a CDR3 having an amino acid sequence at least 65%, at least 70%, at least 75%, at least 80%, at least 85%, at least 90%, at least 95%, at least 99%, or 100% identical to SEQ ID NO: 10,
[2703] VH3 comprises a CDR1 having an amino acid sequence at least 65%, at least 70%, at least 75%, at least 80%, at least 85%, at least 90%, at least 95%, at least 99%, or 100% identical to SEQ ID NO: 12 or 1057, a CDR2 having an amino acid sequence at least 65%, at least 70%, at least 75%, at least 80%, at least 85%, at least 90%, at least 95%, at least 99%, or 100% identical to SEQ ID NO: 6 or 1058, and a CDR3 having an amino acid sequence at least 65%, at least 70%, at least 75%, at least 80%, at least 85%, at least 90%, at least 95%, at least 99%, or 100% identical to SEQ ID NO: 13 or 1059,
[2704] VL4 comprises a CDR1 having an amino acid sequence at least 65%, at least 70%, at least 75%, at least 80%, at least 85%, at least 90%, at least 95%, at least 99%, or 100% identical to SEQ ID NO: 15, a CDR2 having an amino acid sequence at least 65%, at least 70%, at least 75%, at least 80%, at least 85%, at least 90%, at least 95%, at least 99%, or 100% identical to amino acid sequence LGS, and a CDR3 having an amino acid sequence at least 65%, at least 70%, at least 75%, at least 80%, at least 85%, at least 90%, at least 95%, at least 99%, or 100% identical to SEQ ID NO: 16, and
[2705] VH4 comprises a CDR1 having an amino acid sequence at least 65%, at least 70%, at least 75%, at least 80%, at least 85%, at least 90%, at least 95%, at least 99%, or 100% identical to SEQ ID NO: 18, a CDR2 having an amino acid sequence at least 65%, at least 70%, at least 75%, at least 80%, at least 85%, at least 90%, at least 95%, at least 99%, or 100% identical to SEQ ID NO: 19, and a CDR3 having an amino acid sequence at least 65%, at least 70%, at least 75%, at least 80%, at least 85%, at least 90%, at least 95%, at least 99%, or 100% identical to SEQ ID NO: 20, or
[2706] wherein:
[2707] VL1 and VL4 each comprise an amino acid sequence at least 65%, at least 70%, at least 75%, at least 80%, at least 85%, at least 90%, at least 95%, at least 99%, or 100% identical SEQ ID NO: 17, VH1 and VH4 each comprise an amino acid sequence at least 65%, at least 70%, at least 75%, at least 80%, at least 85%, at least 90%, at least 95%, at least 99%, or 100% identical to SEQ ID NO: 21 or 22, VL2 and VL3 each comprise an amino acid sequence at least 65%, at least 70%, at least 75%, at least 80%, at least 85%, at least 90%, at least 95%, at least 99%, or 100% identical to SEQ ID NO: 11, and VH2 and VH3 each comprise an amino acid sequence at least 65%, at least 70%, at least 75%, at least 80%, at least 85%, at least 90%, at least 95%, at least 99%, or 100% identical to SEQ ID NO: 14; or
[2708] (d) VL1 comprises the same light chain variable region as VL4, VH1 comprises the same heavy chain variable region as VH4, VL2 comprises the same light chain variable region as VL3, VH2 comprises the same heavy chain variable region as VH3, and
[2709] wherein:
[2710] VL1 comprises a CDR1 having an amino acid sequence at least 65%, at least 70%, at least 75%, at least 80%, at least 85%, at least 90%, at least 95%, at least 99%, or 100% identical to SEQ ID NO: 9 or 1055, a CDR2 having an amino acid sequence at least 65%, at least 70%, at least 75%, at least 80%, at least 85%, at least 90%, at least 95%, at least 99%, or 100% identical to SEQ ID NO: 1056 or an amino acid sequence at least 65%, at least 70%, at least 75%, at least 80%, at least 85%, at least 90%, at least 95%, at least 99%, or 100% identical to amino acid sequence GAS, and a CDR3 having an amino acid sequence at least 65%, at least 70%, at least 75%, at least 80%, at least 85%, at least 90%, at least 95%, at least 99%, or 100% identical to SEQ ID NO: 10,
[2711] VH1 comprises a CDR1 having an amino acid sequence at least 65%, at least 70%, at least 75%, at least 80%, at least 85%, at least 90%, at least 95%, at least 99%, or 100% identical to SEQ ID NO: 12 or 1057, a CDR2 having an amino acid sequence at least 65%, at least 70%, at least 75%, at least 80%, at least 85%, at least 90%, at least 95%, at least 99%, or 100% identical to SEQ ID NO: 6 or 1058, and a CDR3 having an amino acid sequence at least 65%, at least 70%, at least 75%, at least 80%, at least 85%, at least 90%, at least 95%, at least 99%, or 100% identical to SEQ ID NO: 13 or 1059,
[2712] VL2 comprises a CDR1 having an amino acid sequence at least 65%, at least 70%, at least 75%, at least 80%, at least 85%, at least 90%, at least 95%, at least 99%, or 100% identical to SEQ ID NO: 15, a CDR2 having an amino acid sequence at least 65%, at least 70%, at least 75%, at least 80%, at least 85%, at least 90%, at least 95%, at least 99%, or 100% identical to amino acid sequence LGS, and a CDR3 having an amino acid sequence at least 65%, at least 70%, at least 75%, at least 80%, at least 85%, at least 90%, at least 95%, at least 99%, or 100% identical to SEQ ID NO: 16,
[2713] VH2 comprises a CDR1 having an amino acid sequence at least 65%, at least 70%, at least 75%, at least 80%, at least 85%, at least 90%, at least 95%, at least 99%, or 100% identical to SEQ ID NO: 18, a CDR2 having an amino acid sequence at least 65%, at least 70%, at least 75%, at least 80%, at least 85%, at least 90%, at least 95%, at least 99%, or 100% identical to SEQ ID NO: 19, and a CDR3 having an amino acid sequence at least 65%, at least 70%, at least 75%, at least 80%, at least 85%, at least 90%, at least 95%, at least 99%, or 100% identical to SEQ ID NO: 20,
[2714] VL3 comprises a CDR1 having an amino acid sequence at least 65%, at least 70%, at least 75%, at least 80%, at least 85%, at least 90%, at least 95%, at least 99%, or 100% identical to SEQ ID NO: 15, a CDR2 having an amino acid sequence at least 65%, at least 70%, at least 75%, at least 80%, at least 85%, at least 90%, at least 95%, at least 99%, or 100% identical to amino acid sequence LGS, and a CDR3 having an amino acid sequence at least 65%, at least 70%, at least 75%, at least 80%, at least 85%, at least 90%, at least 95%, at least 99%, or 100% identical to SEQ ID NO: 16,
[2715] VH3 comprises a CDR1 having an amino acid sequence at least 65%, at least 70%, at least 75%, at least 80%, at least 85%, at least 90%, at least 95%, at least 99%, or 100% identical to SEQ ID NO: 18, a CDR2 having an amino acid sequence at least 65%, at least 70%, at least 75%, at least 80%, at least 85%, at least 90%, at least 95%, at least 99%, or 100% identical to SEQ ID NO: 19, and a CDR3 having an amino acid sequence at least 65%, at least 70%, at least 75%, at least 80%, at least 85%, at least 90%, at least 95%, at least 99%, or 100% identical to SEQ ID NO: 20,
[2716] VL4 comprises a CDR1 having an amino acid sequence at least 65%, at least 70%, at least 75%, at least 80%, at least 85%, at least 90%, at least 95%, at least 99%, or 100% identical to SEQ ID NO: 9 or 1055, a CDR2 having an amino acid sequence at least 65%, at least 70%, at least 75%, at least 80%, at least 85%, at least 90%, at least 95%, at least 99%, or 100% identical to SEQ ID NO: 1056 or an amino acid sequence at least 65%, at least 70%, at least 75%, at least 80%, at least 85%, at least 90%, at least 95%, at least 99%, or 100% identical to amino acid sequence GAS, and a CDR3 having an amino acid sequence at least 65%, at least 70%, at least 75%, at least 80%, at least 85%, at least 90%, at least 95%, at least 99%, or 100% identical to SEQ ID NO: 10, and
[2717] VH4 comprises a CDR1 having an amino acid sequence at least 65%, at least 70%, at least 75%, at least 80%, at least 85%, at least 90%, at least 95%, at least 99%, or 100% identical to SEQ ID NO: 12 or 1057, a CDR2 having an amino acid sequence at least 65%, at least 70%, at least 75%, at least 80%, at least 85%, at least 90%, at least 95%, at least 99%, or 100% identical to SEQ ID NO: 6 or 1058, and a CDR3 having an amino acid sequence at least 65%, at least 70%, at least 75%, at least 80%, at least 85%, at least 90%, at least 95%, at least 99%, or 100% identical to SEQ ID NO: 13 or 1059, or
[2718] wherein:
[2719] VL1 and VL4 each comprise an amino acid sequence at least 65%, at least 70%, at least 75%, at least 80%, at least 85%, at least 90%, at least 95%, at least 99%, or 100% identical to SEQ ID NO: 11, VH1 and VH4 each comprise an amino acid sequence at least 65%, at least 70%, at least 75%, at least 80%, at least 85%, at least 90%, at least 95%, at least 99%, or 100% identical to SEQ ID NO: 14, VL2 and VL3 each comprise an amino acid sequence at least 65%, at least 70%, at least 75%, at least 80%, at least 85%, at least 90%, at least 95%, at least 99%, or 100% identical to SEQ ID NO: 17, and VH2 and VH3 each comprise an amino acid sequence at least 65%, at least 70%, at least 75%, at least 80%, at least 85%, at least 90%, at least 95%, at least 99%, or 100% identical to SEQ ID NO: 21 or 22; or
[2720] (e) VL1 comprises the same light chain variable region as VL3, VH1 comprises the same heavy chain variable region as VH3, VL2 comprises the same light chain variable region as VL4, VH2 comprises the same heavy chain variable region as VH4, and
[2721] wherein:
[2722] VL1 comprises a CDR1 having an amino acid sequence at least 65%, at least 70%, at least 75%, at least 80%, at least 85%, at least 90%, at least 95%, at least 99%, or 100% identical to SEQ ID NO: 9 or 1055, a CDR2 having an amino acid sequence at least 65%, at least 70%, at least 75%, at least 80%, at least 85%, at least 90%, at least 95%, at least 99%, or 100% identical to SEQ ID NO: 1056 or an amino acid sequence at least 65%, at least 70%, at least 75%, at least 80%, at least 85%, at least 90%, at least 95%, at least 99%, or 100% identical to amino acid sequence GAS, and a CDR3 having an amino acid sequence at least 65%, at least 70%, at least 75%, at least 80%, at least 85%, at least 90%, at least 95%, at least 99%, or 100% identical to SEQ ID NO: 10,
[2723] VH1 comprises a CDR1 having an amino acid sequence at least 65%, at least 70%, at least 75%, at least 80%, at least 85%, at least 90%, at least 95%, at least 99%, or 100% identical to SEQ ID NO: 12 or 1057, a CDR2 having an amino acid sequence at least 65%, at least 70%, at least 75%, at least 80%, at least 85%, at least 90%, at least 95%, at least 99%, or 100% identical to SEQ ID NO: 6 or 1058, and a CDR3 having an amino acid sequence at least 65%, at least 70%, at least 75%, at least 80%, at least 85%, at least 90%, at least 95%, at least 99%, or 100% identical to SEQ ID NO: 13 or 1059,
[2724] VL2 comprises a CDR1 having an amino acid sequence at least 65%, at least 70%, at least 75%, at least 80%, at least 85%, at least 90%, at least 95%, at least 99%, or 100% identical to SEQ ID NO: 15, a CDR2 having an amino acid sequence at least 65%, at least 70%, at least 75%, at least 80%, at least 85%, at least 90%, at least 95%, at least 99%, or 100% identical to amino acid sequence LGS, and a CDR3 having an amino acid sequence at least 65%, at least 70%, at least 75%, at least 80%, at least 85%, at least 90%, at least 95%, at least 99%, or 100% identical to SEQ ID NO: 16,
[2725] VH2 comprises a CDR1 having an amino acid sequence at least 65%, at least 70%, at least 75%, at least 80%, at least 85%, at least 90%, at least 95%, at least 99%, or 100% identical to SEQ ID NO: 18, a CDR2 having an amino acid sequence at least 65%, at least 70%, at least 75%, at least 80%, at least 85%, at least 90%, at least 95%, at least 99%, or 100% identical to SEQ ID NO: 19, and a CDR3 having an amino acid sequence at least 65%, at least 70%, at least 75%, at least 80%, at least 85%, at least 90%, at least 95%, at least 99%, or 100% identical to SEQ ID NO: 20,
[2726] VL3 comprises a CDR1 having an amino acid sequence at least 65%, at least 70%, at least 75%, at least 80%, at least 85%, at least 90%, at least 95%, at least 99%, or 100% identical to SEQ ID NO: 15, a CDR2 having an amino acid sequence at least 65%, at least 70%, at least 75%, at least 80%, at least 85%, at least 90%, at least 95%, at least 99%, or 100% identical to amino acid sequence LGS, and a CDR3 having an amino acid sequence at least 65%, at least 70%, at least 75%, at least 80%, at least 85%, at least 90%, at least 95%, at least 99%, or 100% identical to SEQ ID NO: 16,
[2727] VH3 comprises a CDR1 having an amino acid sequence at least 65%, at least 70%, at least 75%, at least 80%, at least 85%, at least 90%, at least 95%, at least 99%, or 100% identical to SEQ ID NO: 18, a CDR2 having an amino acid sequence at least 65%, at least 70%, at least 75%, at least 80%, at least 85%, at least 90%, at least 95%, at least 99%, or 100% identical to SEQ ID NO: 19, and a CDR3 having an amino acid sequence at least 65%, at least 70%, at least 75%, at least 80%, at least 85%, at least 90%, at least 95%, at least 99%, or 100% identical to SEQ ID NO: 20,
[2728] VL4 comprises a CDR1 having an amino acid sequence at least 65%, at least 70%, at least 75%, at least 80%, at least 85%, at least 90%, at least 95%, at least 99%, or 100% identical to SEQ ID NO: 9 or 1055, a CDR2 having an amino acid sequence at least 65%, at least 70%, at least 75%, at least 80%, at least 85%, at least 90%, at least 95%, at least 99%, or 100% identical to SEQ ID NO: 1056 or an amino acid sequence at least 65%, at least 70%, at least 75%, at least 80%, at least 85%, at least 90%, at least 95%, at least 99%, or 100% identical to amino acid sequence GAS, and a CDR3 having an amino acid sequence at least 65%, at least 70%, at least 75%, at least 80%, at least 85%, at least 90%, at least 95%, at least 99%, or 100% identical to SEQ ID NO: 10, and
[2729] VH4 comprises a CDR1 having an amino acid sequence at least 65%, at least 70%, at least 75%, at least 80%, at least 85%, at least 90%, at least 95%, at least 99%, or 100% identical to SEQ ID NO: 12 or 1057, a CDR2 having an amino acid sequence at least 65%, at least 70%, at least 75%, at least 80%, at least 85%, at least 90%, at least 95%, at least 99%, or 100% identical to SEQ ID NO: 6 or 1058, and a CDR3 having an amino acid sequence at least 65%, at least 70%, at least 75%, at least 80%, at least 85%, at least 90%, at least 95%, at least 99%, or 100% identical to SEQ ID NO: 13 or 1059, or
[2730] wherein:
[2731] VL1 and VL3 each comprise an amino acid sequence at least 65%, at least 70%, at least 75%, at least 80%, at least 85%, at least 90%, at least 95%, at least 99%, or 100% identical to SEQ ID NO: 11, VH1 and VH3 each comprise an amino acid sequence at least 65%, at least 70%, at least 75%, at least 80%, at least 85%, at least 90%, at least 95%, at least 99%, or 100% identical to SEQ ID NO: 14, VL2 and VL4 each comprise an amino acid sequence at least 65%, at least 70%, at least 75%, at least 80%, at least 85%, at least 90%, at least 95%, at least 99%, or 100% identical to SEQ ID NO: 17, and VH2 and VH4 each comprise an amino acid sequence at least 65%, at least 70%, at least 75%, at least 80%, at least 85%, at least 90%, at least 95%, at least 99%, or 100% identical to SEQ ID NO: 21 or 22; or
[2732] (f) VL2 comprises the same light chain variable region as VL3, VH2 comprises the same heavy chain variable region as VH3, and
[2733] wherein:
[2734] VL1 comprises a CDR1 having an amino acid sequence at least 65%, at least 70%, at least 75%, at least 80%, at least 85%, at least 90%, at least 95%, at least 99%, or 100% identical to SEQ ID NO: 23, a CDR2 having an amino acid sequence at least 65%, at least 70%, at least 75%, at least 80%, at least 85%, at least 90%, at least 95%, at least 99%, or 100% identical to amino acid sequence GTN, and a CDR3 having an amino acid sequence at least 65%, at least 70%, at least 75%, at least 80%, at least 85%, at least 90%, at least 95%, at least 99%, or 100% identical to SEQ ID NO: 24 or 325,
[2735] VH1 comprises a CDR1 having an amino acid sequence at least 65%, at least 70%, at least 75%, at least 80%, at least 85%, at least 90%, at least 95%, at least 99%, or 100% identical to SEQ ID NO: 26, a CDR2 having an amino acid sequence at least 65%, at least 70%, at least 75%, at least 80%, at least 85%, at least 90%, at least 95%, at least 99%, or 100% identical to SEQ ID NO: 27, and a CDR3 having an amino acid sequence at least 65%, at least 70%, at least 75%, at least 80%, at least 85%, at least 90%, at least 95%, at least 99%, or 100% identical to SEQ ID NO: 28 or 332,
[2736] VL2 comprises a CDR1 having an amino acid sequence at least 65%, at least 70%, at least 75%, at least 80%, at least 85%, at least 90%, at least 95%, at least 99%, or 100% identical to SEQ ID NO: 9 or 1055, a CDR2 having an amino acid sequence at least 65%, at least 70%, at least 75%, at least 80%, at least 85%, at least 90%, at least 95%, at least 99%, or 100% identical to SEQ ID NO: 1056 or an amino acid sequence at least 65%, at least 70%, at least 75%, at least 80%, at least 85%, at least 90%, at least 95%, at least 99%, or 100% identical to amino acid sequence GAS, and a CDR3 having an amino acid sequence at least 65%, at least 70%, at least 75%, at least 80%, at least 85%, at least 90%, at least 95%, at least 99%, or 100% identical to SEQ ID NO: 10,
[2737] VH2 comprises a CDR1 having an amino acid sequence at least 65%, at least 70%, at least 75%, at least 80%, at least 85%, at least 90%, at least 95%, at least 99%, or 100% identical to SEQ ID NO: 12 or 1057, a CDR2 having an amino acid sequence at least 65%, at least 70%, at least 75%, at least 80%, at least 85%, at least 90%, at least 95%, at least 99%, or 100% identical to SEQ ID NO: 6 or 1058, and a CDR3 having an amino acid sequence at least 65%, at least 70%, at least 75%, at least 80%, at least 85%, at least 90%, at least 95%, at least 99%, or 100% identical to SEQ ID NO: 13 or 1059,
[2738] VL3 comprises a CDR1 having an amino acid sequence at least 65%, at least 70%, at least 75%, at least 80%, at least 85%, at least 90%, at least 95%, at least 99%, or 100% identical to SEQ ID NO: 9 or 1055, a CDR2 having an amino acid sequence at least 65%, at least 70%, at least 75%, at least 80%, at least 85%, at least 90%, at least 95%, at least 99%, or 100% identical to SEQ ID NO: 1056 or an amino acid sequence at least 65%, at least 70%, at least 75%, at least 80%, at least 85%, at least 90%, at least 95%, at least 99%, or 100% identical to amino acid sequence GAS, and a CDR3 having an amino acid sequence at least 65%, at least 70%, at least 75%, at least 80%, at least 85%, at least 90%, at least 95%, at least 99%, or 100% identical to SEQ ID NO: 10,
[2739] VH3 comprises a CDR1 having an amino acid sequence at least 65%, at least 70%, at least 75%, at least 80%, at least 85%, at least 90%, at least 95%, at least 99%, or 100% identical to SEQ ID NO: 12 or 1057, a CDR2 having an amino acid sequence at least 65%, at least 70%, at least 75%, at least 80%, at least 85%, at least 90%, at least 95%, at least 99%, or 100% identical to SEQ ID NO: 6 or 1058, and a CDR3 having an amino acid sequence at least 65%, at least 70%, at least 75%, at least 80%, at least 85%, at least 90%, at least 95%, at least 99%, or 100% identical to SEQ ID NO: 13 or 1059,
[2740] VL4 comprises a CDR1 having an amino acid sequence at least 65%, at least 70%, at least 75%, at least 80%, at least 85%, at least 90%, at least 95%, at least 99%, or 100% identical to SEQ ID NO: 15, a CDR2 having an amino acid sequence at least 65%, at least 70%, at least 75%, at least 80%, at least 85%, at least 90%, at least 95%, at least 99%, or 100% identical to amino acid sequence LGS, and a CDR3 having an amino acid sequence at least 65%, at least 70%, at least 75%, at least 80%, at least 85%, at least 90%, at least 95%, at least 99%, or 100% identical to SEQ ID NO: 16, and
[2741] VH4 comprises a CDR1 having an amino acid sequence at least 65%, at least 70%, at least 75%, at least 80%, at least 85%, at least 90%, at least 95%, at least 99%, or 100% identical to SEQ ID NO: 18, a CDR2 having an amino acid sequence at least 65%, at least 70%, at least 75%, at least 80%, at least 85%, at least 90%, at least 95%, at least 99%, or 100% identical to SEQ ID NO: 19, and a CDR3 having an amino acid sequence at least 65%, at least 70%, at least 75%, at least 80%, at least 85%, at least 90%, at least 95%, at least 99%, or 100% identical to SEQ ID NO: 20, or
[2742] wherein:
[2743] VL1 comprises an amino acid sequence at least 65%, at least 70%, at least 75%, at least 80%, at least 85%, at least 90%, at least 95%, at least 99%, or 100% identical to SEQ ID NO: 25, VH1 comprises an amino acid sequence at least 65%, at least 70%, at least 75%, at least 80%, at least 85%, at least 90%, at least 95%, at least 99%, or 100% identical to SEQ ID NO: 29, VL2 and VL3 each comprise an amino acid sequence at least 65%, at least 70%, at least 75%, at least 80%, at least 85%, at least 90%, at least 95%, at least 99%, or 100% identical to SEQ ID NO: 11, VH2 and VH3 each comprise an amino acid sequence at least 65%, at least 70%, at least 75%, at least 80%, at least 85%, at least 90%, at least 95%, at least 99%, or 100% identical to SEQ ID NO: 14, VL4 comprises an amino acid sequence at least 65%, at least 70%, at least 75%, at least 80%, at least 85%, at least 90%, at least 95%, at least 99%, or 100% identical to SEQ ID NO: 17, and VH4 comprises an amino acid sequence at least 65%, at least 70%, at least 75%, at least 80%, at least 85%, at least 90%, at least 95%, at least 99%, or 100% identical to SEQ ID NO: 21 or 22; or
[2744] (g) VL2 comprises the same light chain variable region as VL4, VH2 comprises the same heavy chain variable region as VH4, and
[2745] wherein:
[2746] VL1 comprises a CDR1 having an amino acid sequence at least 65%, at least 70%, at least 75%, at least 80%, at least 85%, at least 90%, at least 95%, at least 99%, or 100% identical to SEQ ID NO: 23, a CDR2 having an amino acid sequence at least 65%, at least 70%, at least 75%, at least 80%, at least 85%, at least 90%, at least 95%, at least 99%, or 100% identical to amino acid sequence GTN, and a CDR3 having an amino acid sequence at least 65%, at least 70%, at least 75%, at least 80%, at least 85%, at least 90%, at least 95%, at least 99%, or 100% identical to SEQ ID NO: 24 or 325,
[2747] VH1 comprises a CDR1 having an amino acid sequence at least 65%, at least 70%, at least 75%, at least 80%, at least 85%, at least 90%, at least 95%, at least 99%, or 100% identical to SEQ ID NO: 26, a CDR2 having an amino acid sequence at least 65%, at least 70%, at least 75%, at least 80%, at least 85%, at least 90%, at least 95%, at least 99%, or 100% identical to SEQ ID NO: 27, and a CDR3 having an amino acid sequence at least 65%, at least 70%, at least 75%, at least 80%, at least 85%, at least 90%, at least 95%, at least 99%, or 100% identical to SEQ ID NO: 28 or 332,
[2748] VL2 comprises a CDR1 having an amino acid sequence at least 65%, at least 70%, at least 75%, at least 80%, at least 85%, at least 90%, at least 95%, at least 99%, or 100% identical to SEQ ID NO: 9 or 1055, a CDR2 having an amino acid sequence at least 65%, at least 70%, at least 75%, at least 80%, at least 85%, at least 90%, at least 95%, at least 99%, or 100% identical to SEQ ID NO: 1056 or an amino acid sequence at least 65%, at least 70%, at least 75%, at least 80%, at least 85%, at least 90%, at least 95%, at least 99%, or 100% identical to amino acid sequence GAS, and a CDR3 having an amino acid sequence at least 65%, at least 70%, at least 75%, at least 80%, at least 85%, at least 90%, at least 95%, at least 99%, or 100% identical to SEQ ID NO: 10,
[2749] VH2 comprises a CDR1 having an amino acid sequence at least 65%, at least 70%, at least 75%, at least 80%, at least 85%, at least 90%, at least 95%, at least 99%, or 100% identical to SEQ ID NO: 12 or 1057, a CDR2 having an amino acid sequence at least 65%, at least 70%, at least 75%, at least 80%, at least 85%, at least 90%, at least 95%, at least 99%, or 100% identical to SEQ ID NO: 6 or 1058, and a CDR3 having an amino acid sequence at least 65%, at least 70%, at least 75%, at least 80%, at least 85%, at least 90%, at least 95%, at least 99%, or 100% identical to SEQ ID NO: 13 or 1059,
[2750] VL3 comprises a CDR1 having an amino acid sequence at least 65%, at least 70%, at least 75%, at least 80%, at least 85%, at least 90%, at least 95%, at least 99%, or 100% identical to SEQ ID NO: 15, a CDR2 having an amino acid sequence at least 65%, at least 70%, at least 75%, at least 80%, at least 85%, at least 90%, at least 95%, at least 99%, or 100% identical to amino acid sequence LGS, and a CDR3 having an amino acid sequence at least 65%, at least 70%, at least 75%, at least 80%, at least 85%, at least 90%, at least 95%, at least 99%, or 100% identical to SEQ ID NO: 16,
[2751] VH3 comprises a CDR1 having an amino acid sequence at least 65%, at least 70%, at least 75%, at least 80%, at least 85%, at least 90%, at least 95%, at least 99%, or 100% identical to SEQ ID NO: 18, a CDR2 having an amino acid sequence at least 65%, at least 70%, at least 75%, at least 80%, at least 85%, at least 90%, at least 95%, at least 99%, or 100% identical to SEQ ID NO: 19, and a CDR3 having an amino acid sequence at least 65%, at least 70%, at least 75%, at least 80%, at least 85%, at least 90%, at least 95%, at least 99%, or 100% identical to SEQ ID NO: 20,
[2752] VL4 comprises a CDR1 having an amino acid sequence at least 65%, at least 70%, at least 75%, at least 80%, at least 85%, at least 90%, at least 95%, at least 99%, or 100% identical to SEQ ID NO: 9 or 1055, a CDR2 having an amino acid sequence at least 65%, at least 70%, at least 75%, at least 80%, at least 85%, at least 90%, at least 95%, at least 99%, or 100% identical to SEQ ID NO: 1056 or an amino acid sequence at least 65%, at least 70%, at least 75%, at least 80%, at least 85%, at least 90%, at least 95%, at least 99%, or 100% identical to amino acid sequence GAS, and a CDR3 having an amino acid sequence at least 65%, at least 70%, at least 75%, at least 80%, at least 85%, at least 90%, at least 95%, at least 99%, or 100% identical to SEQ ID NO: 10, and
[2753] VH4 comprises a CDR1 having an amino acid sequence at least 65%, at least 70%, at least 75%, at least 80%, at least 85%, at least 90%, at least 95%, at least 99%, or 100% identical to SEQ ID NO: 12 or 1057, a CDR2 having an amino acid sequence at least 65%, at least 70%, at least 75%, at least 80%, at least 85%, at least 90%, at least 95%, at least 99%, or 100% identical to SEQ ID NO: 6 or 1058, and a CDR3 having an amino acid sequence at least 65%, at least 70%, at least 75%, at least 80%, at least 85%, at least 90%, at least 95%, at least 99%, or 100% identical to SEQ ID NO: 13 or 1059, or
[2754] wherein:
[2755] VL1 comprises an amino acid sequence at least 65%, at least 70%, at least 75%, at least 80%, at least 85%, at least 90%, at least 95%, at least 99%, or 100% identical to SEQ ID NO: 25, VH1 comprises an amino acid sequence at least 65%, at least 70%, at least 75%, at least 80%, at least 85%, at least 90%, at least 95%, at least 99%, or 100% identical to SEQ ID NO: 29, VL2 and VL4 each comprise an amino acid sequence at least 65%, at least 70%, at least 75%, at least 80%, at least 85%, at least 90%, at least 95%, at least 99%, or 100% identical to SEQ ID NO: 11, VH2 and VH4 each comprise an amino acid sequence at least 65%, at least 70%, at least 75%, at least 80%, at least 85%, at least 90%, at least 95%, at least 99%, or 100% identical to SEQ ID NO: 14, VL3 comprises an amino acid sequence at least 65%, at least 70%, at least 75%, at least 80%, at least 85%, at least 90%, at least 95%, at least 99%, or 100% identical to SEQ ID NO: 17, and VH3 comprises an amino acid sequence at least 65%, at least 70%, at least 75%, at least 80%, at least 85%, at least 90%, at least 95%, at least 99%, or 100% identical to SEQ ID NO: 21 or 22; or
[2756] (h) VL1 comprises the same light chain variable region as VL3, VH1 comprises the same heavy chain variable region as VH3, and
[2757] wherein:
[2758] VL1 comprises a CDR1 having an amino acid sequence at least 65%, at least 70%, at least 75%, at least 80%, at least 85%, at least 90%, at least 95%, at least 99%, or 100% identical to SEQ ID NO: 9 or 1055, a CDR2 having an amino acid sequence at least 65%, at least 70%, at least 75%, at least 80%, at least 85%, at least 90%, at least 95%, at least 99%, or 100% identical to SEQ ID NO: 1056 or an amino acid sequence at least 65%, at least 70%, at least 75%, at least 80%, at least 85%, at least 90%, at least 95%, at least 99%, or 100% identical to amino acid sequence GAS, and a CDR3 having an amino acid sequence at least 65%, at least 70%, at least 75%, at least 80%, at least 85%, at least 90%, at least 95%, at least 99%, or 100% identical to SEQ ID NO: 10,
[2759] VH1 comprises a CDR1 having an amino acid sequence at least 65%, at least 70%, at least 75%, at least 80%, at least 85%, at least 90%, at least 95%, at least 99%, or 100% identical to SEQ ID NO: 12 or 1057, a CDR2 having an amino acid sequence at least 65%, at least 70%, at least 75%, at least 80%, at least 85%, at least 90%, at least 95%, at least 99%, or 100% identical to SEQ ID NO: 6 or 1058, and a CDR3 having an amino acid sequence at least 65%, at least 70%, at least 75%, at least 80%, at least 85%, at least 90%, at least 95%, at least 99%, or 100% identical to SEQ ID NO: 13 or 1059,
[2760] VL2 comprises a CDR1 having an amino acid sequence at least 65%, at least 70%, at least 75%, at least 80%, at least 85%, at least 90%, at least 95%, at least 99%, or 100% identical to SEQ ID NO: 23, a CDR2 having an amino acid sequence at least 65%, at least 70%, at least 75%, at least 80%, at least 85%, at least 90%, at least 95%, at least 99%, or 100% identical to amino acid sequence GTN, and a CDR3 having an amino acid sequence at least 65%, at least 70%, at least 75%, at least 80%, at least 85%, at least 90%, at least 95%, at least 99%, or 100% identical to SEQ ID NO: 24 or 325,
[2761] VH2 comprises a CDR1 having an amino acid sequence at least 65%, at least 70%, at least 75%, at least 80%, at least 85%, at least 90%, at least 95%, at least 99%, or 100% identical to SEQ ID NO: 26, a CDR2 having an amino acid sequence at least 65%, at least 70%, at least 75%, at least 80%, at least 85%, at least 90%, at least 95%, at least 99%, or 100% identical to SEQ ID NO: 27, and a CDR3 having an amino acid sequence at least 65%, at least 70%, at least 75%, at least 80%, at least 85%, at least 90%, at least 95%, at least 99%, or 100% identical to SEQ ID NO: 28 or 332,
[2762] VL3 comprises a CDR1 having an amino acid sequence at least 65%, at least 70%, at least 75%, at least 80%, at least 85%, at least 90%, at least 95%, at least 99%, or 100% identical to SEQ ID NO: 9 or 1055, a CDR2 having an amino acid sequence at least 65%, at least 70%, at least 75%, at least 80%, at least 85%, at least 90%, at least 95%, at least 99%, or 100% identical to SEQ ID NO: 1056 or an amino acid sequence at least 65%, at least 70%, at least 75%, at least 80%, at least 85%, at least 90%, at least 95%, at least 99%, or 100% identical to amino acid sequence GAS, and a CDR3 having an amino acid sequence at least 65%, at least 70%, at least 75%, at least 80%, at least 85%, at least 90%, at least 95%, at least 99%, or 100% identical to SEQ ID NO: 10,
[2763] VH3 comprises a CDR1 having an amino acid sequence at least 65%, at least 70%, at least 75%, at least 80%, at least 85%, at least 90%, at least 95%, at least 99%, or 100% identical to SEQ ID NO: 12 or 1057, a CDR2 having an amino acid sequence at least 65%, at least 70%, at least 75%, at least 80%, at least 85%, at least 90%, at least 95%, at least 99%, or 100% identical to SEQ ID NO: 6 or 1058, and a CDR3 having an amino acid sequence at least 65%, at least 70%, at least 75%, at least 80%, at least 85%, at least 90%, at least 95%, at least 99%, or 100% identical to SEQ ID NO: 13 or 1059,
[2764] VL4 comprises a CDR1 having an amino acid sequence at least 65%, at least 70%, at least 75%, at least 80%, at least 85%, at least 90%, at least 95%, at least 99%, or 100% identical to SEQ ID NO: 15, a CDR2 having an amino acid sequence at least 65%, at least 70%, at least 75%, at least 80%, at least 85%, at least 90%, at least 95%, at least 99%, or 100% identical to amino acid sequence LGS, and a CDR3 having an amino acid sequence at least 65%, at least 70%, at least 75%, at least 80%, at least 85%, at least 90%, at least 95%, at least 99%, or 100% identical to SEQ ID NO: 16, and
[2765] VH4 comprises a CDR1 having an amino acid sequence at least 65%, at least 70%, at least 75%, at least 80%, at least 85%, at least 90%, at least 95%, at least 99%, or 100% identical to SEQ ID NO: 18, a CDR2 having an amino acid sequence at least 65%, at least 70%, at least 75%, at least 80%, at least 85%, at least 90%, at least 95%, at least 99%, or 100% identical to SEQ ID NO: 19, and a CDR3 having an amino acid sequence at least 65%, at least 70%, at least 75%, at least 80%, at least 85%, at least 90%, at least 95%, at least 99%, or 100% identical to SEQ ID NO: 20, or
[2766] wherein:
[2767] VL1 and VL3 each comprise an amino acid sequence at least 65%, at least 70%, at least 75%, at least 80%, at least 85%, at least 90%, at least 95%, at least 99%, or 100% identical to SEQ ID NO: 11, VH1 and VH3 each comprise an amino acid sequence at least 65%, at least 70%, at least 75%, at least 80%, at least 85%, at least 90%, at least 95%, at least 99%, or 100% identical to SEQ ID NO: 14, VL2 comprises an amino acid sequence at least 65%, at least 70%, at least 75%, at least 80%, at least 85%, at least 90%, at least 95%, at least 99%, or 100% identical to SEQ ID NO: 25, VH2 comprises an amino acid sequence at least 65%, at least 70%, at least 75%, at least 80%, at least 85%, at least 90%, at least 95%, at least 99%, or 100% identical to SEQ ID NO: 29, VL4 comprises an amino acid sequence at least 65%, at least 70%, at least 75%, at least 80%, at least 85%, at least 90%, at least 95%, at least 99%, or 100% identical to SEQ ID NO: 17, and VH4 comprises an amino acid sequence at least 65%, at least 70%, at least 75%, at least 80%, at least 85%, at least 90%, at least 95%, at least 99%, or 100% identical to SEQ ID NO: 21 or 22; or
[2768] (i) VL1 comprises the same light chain variable region as VL4, VH1 comprises the same heavy chain variable region as VH4, and
[2769] wherein:
[2770] VL1 comprises a CDR1 having an amino acid sequence at least 65%, at least 70%, at least 75%, at least 80%, at least 85%, at least 90%, at least 95%, at least 99%, or 100% identical to SEQ ID NO: 9 or 1055, a CDR2 having an amino acid sequence at least 65%, at least 70%, at least 75%, at least 80%, at least 85%, at least 90%, at least 95%, at least 99%, or 100% identical to SEQ ID NO: 1056 or an amino acid sequence at least 65%, at least 70%, at least 75%, at least 80%, at least 85%, at least 90%, at least 95%, at least 99%, or 100% identical to amino acid sequence GAS, and a CDR3 having an amino acid sequence at least 65%, at least 70%, at least 75%, at least 80%, at least 85%, at least 90%, at least 95%, at least 99%, or 100% identical to SEQ ID NO: 10,
[2771] VH1 comprises a CDR1 having an amino acid sequence at least 65%, at least 70%, at least 75%, at least 80%, at least 85%, at least 90%, at least 95%, at least 99%, or 100% identical to SEQ ID NO: 12 or 1057, a CDR2 having an amino acid sequence at least 65%, at least 70%, at least 75%, at least 80%, at least 85%, at least 90%, at least 95%, at least 99%, or 100% identical to SEQ ID NO: 6 or 1058, and a CDR3 having an amino acid sequence at least 65%, at least 70%, at least 75%, at least 80%, at least 85%, at least 90%, at least 95%, at least 99%, or 100% identical to SEQ ID NO: 13 or 1059,
[2772] VL2 comprises a CDR1 having an amino acid sequence at least 65%, at least 70%, at least 75%, at least 80%, at least 85%, at least 90%, at least 95%, at least 99%, or 100% identical to SEQ ID NO: 23, a CDR2 having an amino acid sequence at least 65%, at least 70%, at least 75%, at least 80%, at least 85%, at least 90%, at least 95%, at least 99%, or 100% identical to amino acid sequence GTN, and a CDR3 having an amino acid sequence at least 65%, at least 70%, at least 75%, at least 80%, at least 85%, at least 90%, at least 95%, at least 99%, or 100% identical to SEQ ID NO: 24 or 325,
[2773] VH2 comprises a CDR1 having an amino acid sequence at least 65%, at least 70%, at least 75%, at least 80%, at least 85%, at least 90%, at least 95%, at least 99%, or 100% identical to SEQ ID NO: 26, a CDR2 having an amino acid sequence at least 65%, at least 70%, at least 75%, at least 80%, at least 85%, at least 90%, at least 95%, at least 99%, or 100% identical to SEQ ID NO: 27, and a CDR3 having an amino acid sequence at least 65%, at least 70%, at least 75%, at least 80%, at least 85%, at least 90%, at least 95%, at least 99%, or 100% identical to SEQ ID NO: 28 or 332,
[2774] VL3 comprises a CDR1 having an amino acid sequence at least 65%, at least 70%, at least 75%, at least 80%, at least 85%, at least 90%, at least 95%, at least 99%, or 100% identical to SEQ ID NO: 15, a CDR2 having an amino acid sequence at least 65%, at least 70%, at least 75%, at least 80%, at least 85%, at least 90%, at least 95%, at least 99%, or 100% identical to amino acid sequence LGS, and a CDR3 having an amino acid sequence at least 65%, at least 70%, at least 75%, at least 80%, at least 85%, at least 90%, at least 95%, at least 99%, or 100% identical to SEQ ID NO: 16,
[2775] VH3 comprises a CDR1 having an amino acid sequence at least 65%, at least 70%, at least 75%, at least 80%, at least 85%, at least 90%, at least 95%, at least 99%, or 100% identical to SEQ ID NO: 18, a CDR2 having an amino acid sequence at least 65%, at least 70%, at least 75%, at least 80%, at least 85%, at least 90%, at least 95%, at least 99%, or 100% identical to SEQ ID NO: 19, and a CDR3 having an amino acid sequence at least 65%, at least 70%, at least 75%, at least 80%, at least 85%, at least 90%, at least 95%, at least 99%, or 100% identical to SEQ ID NO: 20,
[2776] VL4 comprises a CDR1 having an amino acid sequence at least 65%, at least 70%, at least 75%, at least 80%, at least 85%, at least 90%, at least 95%, at least 99%, or 100% identical to SEQ ID NO: 9 or 1055, a CDR2 having an amino acid sequence at least 65%, at least 70%, at least 75%, at least 80%, at least 85%, at least 90%, at least 95%, at least 99%, or 100% identical to SEQ ID NO: 1056 or an amino acid sequence at least 65%, at least 70%, at least 75%, at least 80%, at least 85%, at least 90%, at least 95%, at least 99%, or 100% identical to amino acid sequence GAS, and a CDR3 having an amino acid sequence at least 65%, at least 70%, at least 75%, at least 80%, at least 85%, at least 90%, at least 95%, at least 99%, or 100% identical to SEQ ID NO: 10, and
[2777] VH4 comprises a CDR1 having an amino acid sequence at least 65%, at least 70%, at least 75%, at least 80%, at least 85%, at least 90%, at least 95%, at least 99%, or 100% identical to SEQ ID NO: 12 or 1057, a CDR2 having an amino acid sequence at least 65%, at least 70%, at least 75%, at least 80%, at least 85%, at least 90%, at least 95%, at least 99%, or 100% identical to SEQ ID NO: 6 or 1058, and a CDR3 having an amino acid sequence at least 65%, at least 70%, at least 75%, at least 80%, at least 85%, at least 90%, at least 95%, at least 99%, or 100% identical to SEQ ID NO: 13 or 1059, or
[2778] wherein:
[2779] VL1 and VL4 each comprise an amino acid sequence at least 65%, at least 70%, at least 75%, at least 80%, at least 85%, at least 90%, at least 95%, at least 99%, or 100% identical to SEQ ID NO: 11, VH1 and VH4 each comprise an amino acid sequence at least 65%, at least 70%, at least 75%, at least 80%, at least 85%, at least 90%, at least 95%, at least 99%, or 100% identical to SEQ ID NO: 14, VL2 comprises an amino acid sequence at least 65%, at least 70%, at least 75%, at least 80%, at least 85%, at least 90%, at least 95%, at least 99%, or 100% identical to SEQ ID NO: 25, VH2 comprises an amino acid sequence at least 65%, at least 70%, at least 75%, at least 80%, at least 85%, at least 90%, at least 95%, at least 99%, or 100% identical to SEQ ID NO: 29, VL3 comprises an amino acid sequence at least 65%, at least 70%, at least 75%, at least 80%, at least 85%, at least 90%, at least 95%, at least 99%, or 100% identical to SEQ ID NO: 17, and VH3 comprises an amino acid sequence at least 65%, at least 70%, at least 75%, at least 80%, at least 85%, at least 90%, at least 95%, at least 99%, or 100% identical to SEQ ID NO: 21 or 22; or
[2780] (j)
[2781] VL1 comprises a CDR1 having an amino acid sequence at least 65%, at least 70%, at least 75%, at least 80%, at least 85%, at least 90%, at least 95%, at least 99%, or 100% identical to SEQ ID NO: 23, a CDR2 having an amino acid sequence at least 65%, at least 70%, at least 75%, at least 80%, at least 85%, at least 90%, at least 95%, at least 99%, or 100% identical to amino acid sequence GTN, and a CDR3 having an amino acid sequence at least 65%, at least 70%, at least 75%, at least 80%, at least 85%, at least 90%, at least 95%, at least 99%, or 100% identical to SEQ ID NO: 24 or 325,
[2782] VH1 comprises a CDR1 having an amino acid sequence at least 65%, at least 70%, at least 75%, at least 80%, at least 85%, at least 90%, at least 95%, at least 99%, or 100% identical to SEQ ID NO: 26, a CDR2 having an amino acid sequence at least 65%, at least 70%, at least 75%, at least 80%, at least 85%, at least 90%, at least 95%, at least 99%, or 100% identical to SEQ ID NO: 27, and a CDR3 having an amino acid sequence at least 65%, at least 70%, at least 75%, at least 80%, at least 85%, at least 90%, at least 95%, at least 99%, or 100% identical to SEQ ID NO: 28 or 332,
[2783] VL2 comprises a CDR1 having an amino acid sequence at least 65%, at least 70%, at least 75%, at least 80%, at least 85%, at least 90%, at least 95%, at least 99%, or 100% identical to SEQ ID NO: 1 or 324, a CDR2 having an amino acid sequence at least 65%, at least 70%, at least 75%, at least 80%, at least 85%, at least 90%, at least 95%, at least 99%, or 100% identical to SEQ ID NO: 2 or an amino acid sequence at least 65%, at least 70%, at least 75%, at least 80%, at least 85%, at least 90%, at least 95%, at least 99%, or 100% identical to amino acid sequence AAS, and a CDR3 having an amino acid sequence at least 65%, at least 70%, at least 75%, at least 80%, at least 85%, at least 90%, at least 95%, at least 99%, or 100% identical to SEQ ID NO: 3,
[2784] VH2 comprises a CDR1 having an amino acid sequence at least 65%, at least 70%, at least 75%, at least 80%, at least 85%, at least 90%, at least 95%, at least 99%, or 100% identical to SEQ ID NO: 5, a CDR2 having an amino acid sequence at least 65%, at least 70%, at least 75%, at least 80%, at least 85%, at least 90%, at least 95%, at least 99%, or 100% identical to SEQ ID NO: 6, and a CDR3 having an amino acid sequence at least 65%, at least 70%, at least 75%, at least 80%, at least 85%, at least 90%, at least 95%, at least 99%, or 100% identical to SEQ ID NO: 7,
[2785] VL3 comprises a CDR1 having an amino acid sequence at least 65%, at least 70%, at least 75%, at least 80%, at least 85%, at least 90%, at least 95%, at least 99%, or 100% identical to SEQ ID NO: 15, a CDR2 having an amino acid sequence at least 65%, at least 70%, at least 75%, at least 80%, at least 85%, at least 90%, at least 95%, at least 99%, or 100% identical to amino acid sequence LGS, and a CDR3 having an amino acid sequence at least 65%, at least 70%, at least 75%, at least 80%, at least 85%, at least 90%, at least 95%, at least 99%, or 100% identical to SEQ ID NO: 16,
[2786] VH3 comprises a CDR1 having an amino acid sequence at least 65%, at least 70%, at least 75%, at least 80%, at least 85%, at least 90%, at least 95%, at least 99%, or 100% identical to SEQ ID NO: 18, a CDR2 having an amino acid sequence at least 65%, at least 70%, at least 75%, at least 80%, at least 85%, at least 90%, at least 95%, at least 99%, or 100% identical to SEQ ID NO: 19, and a CDR3 having an amino acid sequence at least 65%, at least 70%, at least 75%, at least 80%, at least 85%, at least 90%, at least 95%, at least 99%, or 100% identical to SEQ ID NO: 20,
[2787] VL4 comprises a CDR1 having an amino acid sequence at least 65%, at least 70%, at least 75%, at least 80%, at least 85%, at least 90%, at least 95%, at least 99%, or 100% identical to SEQ ID NO: 30, a CDR2 having an amino acid sequence at least 65%, at least 70%, at least 75%, at least 80%, at least 85%, at least 90%, at least 95%, at least 99%, or 100% identical to SEQ ID NO: 31 or an amino acid sequence at least 65%, at least 70%, at least 75%, at least 80%, at least 85%, at least 90%, at least 95%, at least 99%, or 100% identical to amino acid sequence SAS, and a CDR3 having an amino acid sequence at least 65%, at least 70%, at least 75%, at least 80%, at least 85%, at least 90%, at least 95%, at least 99%, or 100% identical to SEQ ID NO: 32, 38, or 326, and
[2788] VH4 comprises a CDR1 having an amino acid sequence at least 65%, at least 70%, at least 75%, at least 80%, at least 85%, at least 90%, at least 95%, at least 99%, or 100% identical to SEQ ID NO: 34, a CDR2 having an amino acid sequence at least 65%, at least 70%, at least 75%, at least 80%, at least 85%, at least 90%, at least 95%, at least 99%, or 100% identical to SEQ ID NO: 35, and a CDR3 having an amino acid sequence at least 65%, at least 70%, at least 75%, at least 80%, at least 85%, at least 90%, at least 95%, at least 99%, or 100% identical to SEQ ID NO: 36, 40, or 327, or
[2789] VL1 comprises an amino acid sequence at least 65%, at least 70%, at least 75%, at least 80%, at least 85%, at least 90%, at least 95%, at least 99%, or 100% identical to SEQ ID NO: 25, VH1 comprises an amino acid sequence at least 65%, at least 70%, at least 75%, at least 80%, at least 85%, at least 90%, at least 95%, at least 99%, or 100% identical to SEQ ID NO: 29, VL2 comprises an amino acid sequence at least 65%, at least 70%, at least 75%, at least 80%, at least 85%, at least 90%, at least 95%, at least 99%, or 100% identical to SEQ ID NO: 4, VH2 comprises an amino acid sequence at least 65%, at least 70%, at least 75%, at least 80%, at least 85%, at least 90%, at least 95%, at least 99%, or 100% identical to SEQ ID NO: 8, VL3 comprises an amino acid sequence at least 65%, at least 70%, at least 75%, at least 80%, at least 85%, at least 90%, at least 95%, at least 99%, or 100% identical to SEQ ID NO: 17, VH3 comprises an amino acid sequence at least 65%, at least 70%, at least 75%, at least 80%, at least 85%, at least 90%, at least 95%, at least 99%, or 100% identical to SEQ ID NO: 21 or 22, VL4 comprises an amino acid sequence at least 65%, at least 70%, at least 75%, at least 80%, at least 85%, at least 90%, at least 95%, at least 99%, or 100% identical to SEQ ID NO: 33 or 39, and VH4 comprises an amino acid sequence at least 65%, at least 70%, at least 75%, at least 80%, at least 85%, at least 90%, at least 95%, at least 99%, or 100% identical to SEQ ID NO: 37; or
[2790] (k)
[2791] VL1 comprises a CDR1 having an amino acid sequence at least 65%, at least 70%, at least 75%, at least 80%, at least 85%, at least 90%, at least 95%, at least 99%, or 100% identical to SEQ ID NO: 23, a CDR2 having an amino acid sequence at least 65%, at least 70%, at least 75%, at least 80%, at least 85%, at least 90%, at least 95%, at least 99%, or 100% identical to amino acid sequence GTN, and a CDR3 having an amino acid sequence at least 65%, at least 70%, at least 75%, at least 80%, at least 85%, at least 90%, at least 95%, at least 99%, or 100% identical to SEQ ID NO: 24 or 325,
[2792] VH1 comprises a CDR1 having an amino acid sequence at least 65%, at least 70%, at least 75%, at least 80%, at least 85%, at least 90%, at least 95%, at least 99%, or 100% identical to SEQ ID NO: 26, a CDR2 having an amino acid sequence at least 65%, at least 70%, at least 75%, at least 80%, at least 85%, at least 90%, at least 95%, at least 99%, or 100% identical to SEQ ID NO: 27, and a CDR3 having an amino acid sequence at least 65%, at least 70%, at least 75%, at least 80%, at least 85%, at least 90%, at least 95%, at least 99%, or 100% identical to SEQ ID NO: 28 or 332,
[2793] VL2 comprises a CDR1 having an amino acid sequence at least 65%, at least 70%, at least 75%, at least 80%, at least 85%, at least 90%, at least 95%, at least 99%, or 100% identical to SEQ ID NO: 1 or 324, a CDR2 having an amino acid sequence at least 65%, at least 70%, at least 75%, at least 80%, at least 85%, at least 90%, at least 95%, at least 99%, or 100% identical to SEQ ID NO: 2 or an amino acid sequence at least 65%, at least 70%, at least 75%, at least 80%, at least 85%, at least 90%, at least 95%, at least 99%, or 100% identical to amino acid sequence AAS, and a CDR3 having an amino acid sequence at least 65%, at least 70%, at least 75%, at least 80%, at least 85%, at least 90%, at least 95%, at least 99%, or 100% identical to SEQ ID NO: 3,
[2794] VH2 comprises a CDR1 having an amino acid sequence at least 65%, at least 70%, at least 75%, at least 80%, at least 85%, at least 90%, at least 95%, at least 99%, or 100% identical to SEQ ID NO: 5, a CDR2 having an amino acid sequence at least 65%, at least 70%, at least 75%, at least 80%, at least 85%, at least 90%, at least 95%, at least 99%, or 100% identical to SEQ ID NO: 6, and a CDR3 having an amino acid sequence at least 65%, at least 70%, at least 75%, at least 80%, at least 85%, at least 90%, at least 95%, at least 99%, or 100% identical to SEQ ID NO: 7,
[2795] VL3 comprises a CDR1 having an amino acid sequence at least 65%, at least 70%, at least 75%, at least 80%, at least 85%, at least 90%, at least 95%, at least 99%, or 100% identical to SEQ ID NO: 30, a CDR2 having an amino acid sequence at least 65%, at least 70%, at least 75%, at least 80%, at least 85%, at least 90%, at least 95%, at least 99%, or 100% identical to SEQ ID NO: 31 or an amino acid sequence at least 65%, at least 70%, at least 75%, at least 80%, at least 85%, at least 90%, at least 95%, at least 99%, or 100% identical to amino acid sequence SAS, and a CDR3 having an amino acid sequence at least 65%, at least 70%, at least 75%, at least 80%, at least 85%, at least 90%, at least 95%, at least 99%, or 100% identical to SEQ ID NO: 32, 38, or 326,
[2796] VH3 comprises a CDR1 having an amino acid sequence at least 65%, at least 70%, at least 75%, at least 80%, at least 85%, at least 90%, at least 95%, at least 99%, or 100% identical to SEQ ID NO: 34, a CDR2 having an amino acid sequence at least 65%, at least 70%, at least 75%, at least 80%, at least 85%, at least 90%, at least 95%, at least 99%, or 100% identical to SEQ ID NO: 35, and a CDR3 having an amino acid sequence at least 65%, at least 70%, at least 75%, at least 80%, at least 85%, at least 90%, at least 95%, at least 99%, or 100% identical to SEQ ID NO: 36, 40, or 327,
[2797] VL4 comprises a CDR1 having an amino acid sequence at least 65%, at least 70%, at least 75%, at least 80%, at least 85%, at least 90%, at least 95%, at least 99%, or 100% identical to SEQ ID NO: 15, a CDR2 having an amino acid sequence at least 65%, at least 70%, at least 75%, at least 80%, at least 85%, at least 90%, at least 95%, at least 99%, or 100% identical to amino acid sequence LGS, and a CDR3 having an amino acid sequence at least 65%, at least 70%, at least 75%, at least 80%, at least 85%, at least 90%, at least 95%, at least 99%, or 100% identical to SEQ ID NO: 16, and
[2798] VH4 comprises a CDR1 having an amino acid sequence at least 65%, at least 70%, at least 75%, at least 80%, at least 85%, at least 90%, at least 95%, at least 99%, or 100% identical to SEQ ID NO: 18, a CDR2 having an amino acid sequence at least 65%, at least 70%, at least 75%, at least 80%, at least 85%, at least 90%, at least 95%, at least 99%, or 100% identical to SEQ ID NO: 19, and a CDR3 having an amino acid sequence at least 65%, at least 70%, at least 75%, at least 80%, at least 85%, at least 90%, at least 95%, at least 99%, or 100% identical to SEQ ID NO: 20, or
[2799] VL1 comprises an amino acid sequence at least 65%, at least 70%, at least 75%, at least 80%, at least 85%, at least 90%, at least 95%, at least 99%, or 100% identical to SEQ ID NO: 25, VH1 comprises an amino acid sequence at least 65%, at least 70%, at least 75%, at least 80%, at least 85%, at least 90%, at least 95%, at least 99%, or 100% identical to SEQ ID NO: 29, VL2 comprises an amino acid sequence at least 65%, at least 70%, at least 75%, at least 80%, at least 85%, at least 90%, at least 95%, at least 99%, or 100% identical to SEQ ID NO: 4, VH2 comprises an amino acid sequence at least 65%, at least 70%, at least 75%, at least 80%, at least 85%, at least 90%, at least 95%, at least 99%, or 100% identical to SEQ ID NO: 8, VL3 comprises an amino acid sequence at least 65%, at least 70%, at least 75%, at least 80%, at least 85%, at least 90%, at least 95%, at least 99%, or 100% identical to SEQ ID NO: 33 or 39, VH3 comprises an amino acid sequence at least 65%, at least 70%, at least 75%, at least 80%, at least 85%, at least 90%, at least 95%, at least 99%, or 100% identical to SEQ ID NO: 37, VL4 comprises an amino acid sequence at least 65%, at least 70%, at least 75%, at least 80%, at least 85%, at least 90%, at least 95%, at least 99%, or 100% identical to SEQ ID NO: 17, and VH4 comprises an amino acid sequence at least 65%, at least 70%, at least 75%, at least 80%, at least 85%, at least 90%, at least 95%, at least 99%, or 100% identical to SEQ ID NO: 21 or 22; or
[2800] (l)
[2801] VL1 comprises a CDR1 having an amino acid sequence at least 65%, at least 70%, at least 75%, at least 80%, at least 85%, at least 90%, at least 95%, at least 99%, or 100% identical to SEQ ID NO: 1 or 324, a CDR2 having an amino acid sequence at least 65%, at least 70%, at least 75%, at least 80%, at least 85%, at least 90%, at least 95%, at least 99%, or 100% identical to SEQ ID NO: 2 or an amino acid sequence at least 65%, at least 70%, at least 75%, at least 80%, at least 85%, at least 90%, at least 95%, at least 99%, or 100% identical to amino acid sequence AAS, and a CDR3 having an amino acid sequence at least 65%, at least 70%, at least 75%, at least 80%, at least 85%, at least 90%, at least 95%, at least 99%, or 100% identical to SEQ ID NO: 3,
[2802] VH1 comprises a CDR1 having an amino acid sequence at least 65%, at least 70%, at least 75%, at least 80%, at least 85%, at least 90%, at least 95%, at least 99%, or 100% identical to SEQ ID NO: 5, a CDR2 having an amino acid sequence at least 65%, at least 70%, at least 75%, at least 80%, at least 85%, at least 90%, at least 95%, at least 99%, or 100% identical to SEQ ID NO: 6, and a CDR3 having an amino acid sequence at least 65%, at least 70%, at least 75%, at least 80%, at least 85%, at least 90%, at least 95%, at least 99%, or 100% identical to SEQ ID NO: 7,
[2803] VL2 comprises a CDR1 having an amino acid sequence at least 65%, at least 70%, at least 75%, at least 80%, at least 85%, at least 90%, at least 95%, at least 99%, or 100% identical to SEQ ID NO: 23, a CDR2 having an amino acid sequence at least 65%, at least 70%, at least 75%, at least 80%, at least 85%, at least 90%, at least 95%, at least 99%, or 100% identical to amino acid sequence GTN, and a CDR3 having an amino acid sequence at least 65%, at least 70%, at least 75%, at least 80%, at least 85%, at least 90%, at least 95%, at least 99%, or 100% identical to SEQ ID NO: 24 or 325,
[2804] VH2 comprises a CDR1 having an amino acid sequence at least 65%, at least 70%, at least 75%, at least 80%, at least 85%, at least 90%, at least 95%, at least 99%, or 100% identical to SEQ ID NO: 26, a CDR2 having an amino acid sequence at least 65%, at least 70%, at least 75%, at least 80%, at least 85%, at least 90%, at least 95%, at least 99%, or 100% identical to SEQ ID NO: 27, and a CDR3 having an amino acid sequence at least 65%, at least 70%, at least 75%, at least 80%, at least 85%, at least 90%, at least 95%, at least 99%, or 100% identical to SEQ ID NO: 28 or 332,
[2805] VL3 comprises a CDR1 having an amino acid sequence at least 65%, at least 70%, at least 75%, at least 80%, at least 85%, at least 90%, at least 95%, at least 99%, or 100% identical to SEQ ID NO: 15, a CDR2 having an amino acid sequence at least 65%, at least 70%, at least 75%, at least 80%, at least 85%, at least 90%, at least 95%, at least 99%, or 100% identical to amino acid sequence LGS, and a CDR3 having an amino acid sequence at least 65%, at least 70%, at least 75%, at least 80%, at least 85%, at least 90%, at least 95%, at least 99%, or 100% identical to SEQ ID NO: 16,
[2806] VH3 comprises a CDR1 having an amino acid sequence at least 65%, at least 70%, at least 75%, at least 80%, at least 85%, at least 90%, at least 95%, at least 99%, or 100% identical to SEQ ID NO: 18, a CDR2 having an amino acid sequence at least 65%, at least 70%, at least 75%, at least 80%, at least 85%, at least 90%, at least 95%, at least 99%, or 100% identical to SEQ ID NO: 19, and a CDR3 having an amino acid sequence at least 65%, at least 70%, at least 75%, at least 80%, at least 85%, at least 90%, at least 95%, at least 99%, or 100% identical to SEQ ID NO: 20,
[2807] VL4 comprises a CDR1 having an amino acid sequence at least 65%, at least 70%, at least 75%, at least 80%, at least 85%, at least 90%, at least 95%, at least 99%, or 100% identical to SEQ ID NO: 30, a CDR2 having an amino acid sequence at least 65%, at least 70%, at least 75%, at least 80%, at least 85%, at least 90%, at least 95%, at least 99%, or 100% identical to SEQ ID NO: 31 or an amino acid sequence at least 65%, at least 70%, at least 75%, at least 80%, at least 85%, at least 90%, at least 95%, at least 99%, or 100% identical to amino acid sequence SAS, and a CDR3 having an amino acid sequence at least 65%, at least 70%, at least 75%, at least 80%, at least 85%, at least 90%, at least 95%, at least 99%, or 100% identical to SEQ ID NO: 32, 38, or 326, and
[2808] VH4 comprises a CDR1 having an amino acid sequence at least 65%, at least 70%, at least 75%, at least 80%, at least 85%, at least 90%, at least 95%, at least 99%, or 100% identical to SEQ ID NO: 34, a CDR2 having an amino acid sequence at least 65%, at least 70%, at least 75%, at least 80%, at least 85%, at least 90%, at least 95%, at least 99%, or 100% identical to SEQ ID NO: 35, and a CDR3 having an amino acid sequence at least 65%, at least 70%, at least 75%, at least 80%, at least 85%, at least 90%, at least 95%, at least 99%, or 100% identical to SEQ ID NO: 36, 40, or 327, or
[2809] VL1 comprises an amino acid sequence at least 65%, at least 70%, at least 75%, at least 80%, at least 85%, at least 90%, at least 95%, at least 99%, or 100% identical to SEQ ID NO: 4, VH1 comprises an amino acid sequence at least 65%, at least 70%, at least 75%, at least 80%, at least 85%, at least 90%, at least 95%, at least 99%, or 100% identical to SEQ ID NO: 8, VL2 comprises an amino acid sequence at least 65%, at least 70%, at least 75%, at least 80%, at least 85%, at least 90%, at least 95%, at least 99%, or 100% identical to SEQ ID NO: 25, VH2 comprises an amino acid sequence at least 65%, at least 70%, at least 75%, at least 80%, at least 85%, at least 90%, at least 95%, at least 99%, or 100% identical to SEQ ID NO: 29, VL3 comprises an amino acid sequence at least 65%, at least 70%, at least 75%, at least 80%, at least 85%, at least 90%, at least 95%, at least 99%, or 100% identical to SEQ ID NO: 17, VH3 comprises an amino acid sequence at least 65%, at least 70%, at least 75%, at least 80%, at least 85%, at least 90%, at least 95%, at least 99%, or 100% identical to SEQ ID NO: 21 or 22, VL4 comprises an amino acid sequence at least 65%, at least 70%, at least 75%, at least 80%, at least 85%, at least 90%, at least 95%, at least 99%, or 100% identical to SEQ ID NO: 33, or 39, and VH4 comprises an amino acid sequence at least 65%, at least 70%, at least 75%, at least 80%, at least 85%, at least 90%, at least 95%, at least 99%, or 100% identical to SEQ ID NO: 37; or
[2810] (m)
[2811] VL1 comprises a CDR1 having an amino acid sequence at least 65%, at least 70%, at least 75%, at least 80%, at least 85%, at least 90%, at least 95%, at least 99%, or 100% identical to SEQ ID NO: 1 or 324, a CDR2 having an amino acid sequence at least 65%, at least 70%, at least 75%, at least 80%, at least 85%, at least 90%, at least 95%, at least 99%, or 100% identical to SEQ ID NO: 2 or an amino acid sequence at least 65%, at least 70%, at least 75%, at least 80%, at least 85%, at least 90%, at least 95%, at least 99%, or 100% identical to amino acid sequence AAS, and a CDR3 having an amino acid sequence at least 65%, at least 70%, at least 75%, at least 80%, at least 85%, at least 90%, at least 95%, at least 99%, or 100% identical to SEQ ID NO: 3,
[2812] VH1 comprises a CDR1 having an amino acid sequence at least 65%, at least 70%, at least 75%, at least 80%, at least 85%, at least 90%, at least 95%, at least 99%, or 100% identical to SEQ ID NO: 5, a CDR2 having an amino acid sequence at least 65%, at least 70%, at least 75%, at least 80%, at least 85%, at least 90%, at least 95%, at least 99%, or 100% identical to SEQ ID NO: 6, and a CDR3 having an amino acid sequence at least 65%, at least 70%, at least 75%, at least 80%, at least 85%, at least 90%, at least 95%, at least 99%, or 100% identical to SEQ ID NO: 7,
[2813] VL2 comprises a CDR1 having an amino acid sequence at least 65%, at least 70%, at least 75%, at least 80%, at least 85%, at least 90%, at least 95%, at least 99%, or 100% identical to SEQ ID NO: 23, a CDR2 having an amino acid sequence at least 65%, at least 70%, at least 75%, at least 80%, at least 85%, at least 90%, at least 95%, at least 99%, or 100% identical to amino acid sequence GTN, and a CDR3 having an amino acid sequence at least 65%, at least 70%, at least 75%, at least 80%, at least 85%, at least 90%, at least 95%, at least 99%, or 100% identical to SEQ ID NO: 24 or 325,
[2814] VH2 comprises a CDR1 having an amino acid sequence at least 65%, at least 70%, at least 75%, at least 80%, at least 85%, at least 90%, at least 95%, at least 99%, or 100% identical to SEQ ID NO: 26, a CDR2 having an amino acid sequence at least 65%, at least 70%, at least 75%, at least 80%, at least 85%, at least 90%, at least 95%, at least 99%, or 100% identical to SEQ ID NO: 27, and a CDR3 having an amino acid sequence at least 65%, at least 70%, at least 75%, at least 80%, at least 85%, at least 90%, at least 95%, at least 99%, or 100% identical to SEQ ID NO: 28 or 332,
[2815] VL3 comprises a CDR1 having an amino acid sequence at least 65%, at least 70%, at least 75%, at least 80%, at least 85%, at least 90%, at least 95%, at least 99%, or 100% identical to SEQ ID NO: 30, a CDR2 having an amino acid sequence at least 65%, at least 70%, at least 75%, at least 80%, at least 85%, at least 90%, at least 95%, at least 99%, or 100% identical to SEQ ID NO: 31 or an amino acid sequence at least 65%, at least 70%, at least 75%, at least 80%, at least 85%, at least 90%, at least 95%, at least 99%, or 100% identical to amino acid sequence SAS, and a CDR3 having an amino acid sequence at least 65%, at least 70%, at least 75%, at least 80%, at least 85%, at least 90%, at least 95%, at least 99%, or 100% identical to SEQ ID NO: 32, 38, or 326,
[2816] VH3 comprises a CDR1 having an amino acid sequence at least 65%, at least 70%, at least 75%, at least 80%, at least 85%, at least 90%, at least 95%, at least 99%, or 100% identical to SEQ ID NO: 34, a CDR2 having an amino acid sequence at least 65%, at least 70%, at least 75%, at least 80%, at least 85%, at least 90%, at least 95%, at least 99%, or 100% identical to SEQ ID NO: 35, and a CDR3 having an amino acid sequence at least 65%, at least 70%, at least 75%, at least 80%, at least 85%, at least 90%, at least 95%, at least 99%, or 100% identical to SEQ ID NO: 36, 40, or 327,
[2817] VL4 comprises a CDR1 having an amino acid sequence at least 65%, at least 70%, at least 75%, at least 80%, at least 85%, at least 90%, at least 95%, at least 99%, or 100% identical to SEQ ID NO: 15, a CDR2 having an amino acid sequence at least 65%, at least 70%, at least 75%, at least 80%, at least 85%, at least 90%, at least 95%, at least 99%, or 100% identical to amino acid sequence LGS, and a CDR3 having an amino acid sequence at least 65%, at least 70%, at least 75%, at least 80%, at least 85%, at least 90%, at least 95%, at least 99%, or 100% identical to SEQ ID NO: 16, and
[2818] VH4 comprises a CDR1 having an amino acid sequence at least 65%, at least 70%, at least 75%, at least 80%, at least 85%, at least 90%, at least 95%, at least 99%, or 100% identical to SEQ ID NO: 18, a CDR2 having an amino acid sequence at least 65%, at least 70%, at least 75%, at least 80%, at least 85%, at least 90%, at least 95%, at least 99%, or 100% identical to SEQ ID NO: 19, and a CDR3 having an amino acid sequence at least 65%, at least 70%, at least 75%, at least 80%, at least 85%, at least 90%, at least 95%, at least 99%, or 100% identical to SEQ ID NO: 20, or
[2819] VL1 comprises an amino acid sequence at least 65%, at least 70%, at least 75%, at least 80%, at least 85%, at least 90%, at least 95%, at least 99%, or 100% identical to SEQ ID NO: 4, VH1 comprises an amino acid sequence at least 65%, at least 70%, at least 75%, at least 80%, at least 85%, at least 90%, at least 95%, at least 99%, or 100% identical to SEQ ID NO: 8, VL2 comprises an amino acid sequence at least 65%, at least 70%, at least 75%, at least 80%, at least 85%, at least 90%, at least 95%, at least 99%, or 100% identical to SEQ ID NO: 25, VH2 comprises an amino acid sequence at least 65%, at least 70%, at least 75%, at least 80%, at least 85%, at least 90%, at least 95%, at least 99%, or 100% identical to SEQ ID NO: 29, VL3 comprises an amino acid sequence at least 65%, at least 70%, at least 75%, at least 80%, at least 85%, at least 90%, at least 95%, at least 99%, or 100% identical to SEQ ID NO: 33 or 39, VH3 comprises an amino acid sequence at least 65%, at least 70%, at least 75%, at least 80%, at least 85%, at least 90%, at least 95%, at least 99%, or 100% identical to SEQ ID NO: 37, VL4 comprises an amino acid sequence at least 65%, at least 70%, at least 75%, at least 80%, at least 85%, at least 90%, at least 95%, at least 99%, or 100% identical to SEQ ID NO: 17, and VH4 comprises an amino acid sequence at least 65%, at least 70%, at least 75%, at least 80%, at least 85%, at least 90%, at least 95%, at least 99%, or 100% identical to SEQ ID NO: 21 or 22; or
[2820] (n)
[2821] VL1 comprises a CDR1 having an amino acid sequence at least 65%, at least 70%, at least 75%, at least 80%, at least 85%, at least 90%, at least 95%, at least 99%, or 100% identical to SEQ ID NO: 9 or 1055, a CDR2 having an amino acid sequence at least 65%, at least 70%, at least 75%, at least 80%, at least 85%, at least 90%, at least 95%, at least 99%, or 100% identical to SEQ ID NO: 1056 or an amino acid sequence at least 65%, at least 70%, at least 75%, at least 80%, at least 85%, at least 90%, at least 95%, at least 99%, or 100% identical to amino acid sequence GAS, and a CDR3 having an amino acid sequence at least 65%, at least 70%, at least 75%, at least 80%, at least 85%, at least 90%, at least 95%, at least 99%, or 100% identical to SEQ ID NO: 10,
[2822] VH1 comprises a CDR1 having an amino acid sequence at least 65%, at least 70%, at least 75%, at least 80%, at least 85%, at least 90%, at least 95%, at least 99%, or 100% identical to SEQ ID NO: 12 or 1057, a CDR2 having an amino acid sequence at least 65%, at least 70%, at least 75%, at least 80%, at least 85%, at least 90%, at least 95%, at least 99%, or 100% identical to SEQ ID NO: 6 or 1058, and a CDR3 having an amino acid sequence at least 65%, at least 70%, at least 75%, at least 80%, at least 85%, at least 90%, at least 95%, at least 99%, or 100% identical to SEQ ID NO: 13 or 1059,
[2823] VL2 comprises a CDR1 having an amino acid sequence at least 65%, at least 70%, at least 75%, at least 80%, at least 85%, at least 90%, at least 95%, at least 99%, or 100% identical to SEQ ID NO: 65 or 627, a CDR2 having an amino acid sequence at least 65%, at least 70%, at least 75%, at least 80%, at least 85%, at least 90%, at least 95%, at least 99%, or 100% identical to SEQ ID NO: 628 or an amino acid sequence at least 65%, at least 70%, at least 75%, at least 80%, at least 85%, at least 90%, at least 95%, at least 99%, or 100% identical to amino acid sequence SDS, and a CDR3 having an amino acid sequence at least 65%, at least 70%, at least 75%, at least 80%, at least 85%, at least 90%, at least 95%, at least 99%, or 100% identical to SEQ ID NO: 66,
[2824] VH2 comprises a CDR1 having an amino acid sequence at least 65%, at least 70%, at least 75%, at least 80%, at least 85%, at least 90%, at least 95%, at least 99%, or 100% identical to SEQ ID NO: 68 or 629, a CDR2 having an amino acid sequence at least 65%, at least 70%, at least 75%, at least 80%, at least 85%, at least 90%, at least 95%, at least 99%, or 100% identical to SEQ ID NO: 69 or 630, and a CDR3 having an amino acid sequence at least 65%, at least 70%, at least 75%, at least 80%, at least 85%, at least 90%, at least 95%, at least 99%, or 100% identical to SEQ ID NO: 70 or 631,
[2825] VL3 comprises a CDR1 having an amino acid sequence at least 65%, at least 70%, at least 75%, at least 80%, at least 85%, at least 90%, at least 95%, at least 99%, or 100% identical to SEQ ID NO: 9 or 1055, a CDR2 having an amino acid sequence at least 65%, at least 70%, at least 75%, at least 80%, at least 85%, at least 90%, at least 95%, at least 99%, or 100% identical to SEQ ID NO: 1056 or an amino acid sequence at least 65%, at least 70%, at least 75%, at least 80%, at least 85%, at least 90%, at least 95%, at least 99%, or 100% identical to amino acid sequence GAS, and a CDR3 having an amino acid sequence at least 65%, at least 70%, at least 75%, at least 80%, at least 85%, at least 90%, at least 95%, at least 99%, or 100% identical to SEQ ID NO: 10,
[2826] VH3 comprises a CDR1 having an amino acid sequence at least 65%, at least 70%, at least 75%, at least 80%, at least 85%, at least 90%, at least 95%, at least 99%, or 100% identical to SEQ ID NO: 12 or 1057, a CDR2 having an amino acid sequence at least 65%, at least 70%, at least 75%, at least 80%, at least 85%, at least 90%, at least 95%, at least 99%, or 100% identical to SEQ ID NO: 6 or 1058, and a CDR3 having an amino acid sequence at least 65%, at least 70%, at least 75%, at least 80%, at least 85%, at least 90%, at least 95%, at least 99%, or 100% identical to SEQ ID NO: 13 or 1059,
[2827] VL4 comprises a CDR1 having an amino acid sequence at least 65%, at least 70%, at least 75%, at least 80%, at least 85%, at least 90%, at least 95%, at least 99%, or 100% identical to SEQ ID NO: 15, a CDR2 having an amino acid sequence at least 65%, at least 70%, at least 75%, at least 80%, at least 85%, at least 90%, at least 95%, at least 99%, or 100% identical to amino acid sequence LGS, and a CDR3 having an amino acid sequence at least 65%, at least 70%, at least 75%, at least 80%, at least 85%, at least 90%, at least 95%, at least 99%, or 100% identical to SEQ ID NO: 16, and
[2828] VH4 comprises a CDR1 having an amino acid sequence at least 65%, at least 70%, at least 75%, at least 80%, at least 85%, at least 90%, at least 95%, at least 99%, or 100% identical to SEQ ID NO: 18, a CDR2 having an amino acid sequence at least 65%, at least 70%, at least 75%, at least 80%, at least 85%, at least 90%, at least 95%, at least 99%, or 100% identical to SEQ ID NO: 19, and a CDR3 having an amino acid sequence at least 65%, at least 70%, at least 75%, at least 80%, at least 85%, at least 90%, at least 95%, at least 99%, or 100% identical to SEQ ID NO: 20, or
[2829] VL1 and VL3 each comprise an amino acid sequence at least 65%, at least 70%, at least 75%, at least 80%, at least 85%, at least 90%, at least 95%, at least 99%, or 100% identical to SEQ ID NO: 11, VH1 and VH3 each comprise an amino acid sequence at least 65%, at least 70%, at least 75%, at least 80%, at least 85%, at least 90%, at least 95%, at least 99%, or 100% identical to SEQ ID NO: 14, VL2 comprises an amino acid sequence at least 65%, at least 70%, at least 75%, at least 80%, at least 85%, at least 90%, at least 95%, at least 99%, or 100% identical to SEQ ID NO: 67, VH2 comprises an amino acid sequence at least 65%, at least 70%, at least 75%, at least 80%, at least 85%, at least 90%, at least 95%, at least 99%, or 100% identical to SEQ ID NO: 71 or 626, VL4 comprises an amino acid sequence at least 65%, at least 70%, at least 75%, at least 80%, at least 85%, at least 90%, at least 95%, at least 99%, or 100% identical to SEQ ID NO: 17, and VH4 comprises an amino acid sequence at least 65%, at least 70%, at least 75%, at least 80%, at least 85%, at least 90%, at least 95%, at least 99%, or 100% identical to SEQ ID NO: 21 or 22; or
[2830] (o)
[2831] VL1 comprises a CDR1 having an amino acid sequence at least 65%, at least 70%, at least 75%, at least 80%, at least 85%, at least 90%, at least 95%, at least 99%, or 100% identical to SEQ ID NO: 9 or 1055, a CDR2 having an amino acid sequence at least 65%, at least 70%, at least 75%, at least 80%, at least 85%, at least 90%, at least 95%, at least 99%, or 100% identical to SEQ ID NO: 1056 or an amino acid sequence at least 65%, at least 70%, at least 75%, at least 80%, at least 85%, at least 90%, at least 95%, at least 99%, or 100% identical to amino acid sequence GAS, and a CDR3 having an amino acid sequence at least 65%, at least 70%, at least 75%, at least 80%, at least 85%, at least 90%, at least 95%, at least 99%, or 100% identical to SEQ ID NO: 10,
[2832] VH1 comprises a CDR1 having an amino acid sequence at least 65%, at least 70%, at least 75%, at least 80%, at least 85%, at least 90%, at least 95%, at least 99%, or 100% identical to SEQ ID NO: 12 or 1057, a CDR2 having an amino acid sequence at least 65%, at least 70%, at least 75%, at least 80%, at least 85%, at least 90%, at least 95%, at least 99%, or 100% identical to SEQ ID NO: 6 or 1058, and a CDR3 having an amino acid sequence at least 65%, at least 70%, at least 75%, at least 80%, at least 85%, at least 90%, at least 95%, at least 99%, or 100% identical to SEQ ID NO: 13 or 1059,
[2833] VL2 comprises a CDR1 having an amino acid sequence at least 65%, at least 70%, at least 75%, at least 80%, at least 85%, at least 90%, at least 95%, at least 99%, or 100% identical to SEQ ID NO: 65 or 627, a CDR2 having an amino acid sequence at least 65%, at least 70%, at least 75%, at least 80%, at least 85%, at least 90%, at least 95%, at least 99%, or 100% identical to SEQ ID NO: 628 or an amino acid sequence at least 65%, at least 70%, at least 75%, at least 80%, at least 85%, at least 90%, at least 95%, at least 99%, or 100% identical to amino acid sequence SDS, and a CDR3 having an amino acid sequence at least 65%, at least 70%, at least 75%, at least 80%, at least 85%, at least 90%, at least 95%, at least 99%, or 100% identical to SEQ ID NO: 66,
[2834] VH2 comprises a CDR1 having an amino acid sequence at least 65%, at least 70%, at least 75%, at least 80%, at least 85%, at least 90%, at least 95%, at least 99%, or 100% identical to SEQ ID NO: 68 or 629, a CDR2 having an amino acid sequence at least 65%, at least 70%, at least 75%, at least 80%, at least 85%, at least 90%, at least 95%, at least 99%, or 100% identical to SEQ ID NO: 69 or 630, and a CDR3 having an amino acid sequence at least 65%, at least 70%, at least 75%, at least 80%, at least 85%, at least 90%, at least 95%, at least 99%, or 100% identical to SEQ ID NO: 70 or 631,
[2835] VL3 comprises a CDR1 having an amino acid sequence at least 65%, at least 70%, at least 75%, at least 80%, at least 85%, at least 90%, at least 95%, at least 99%, or 100% identical to SEQ ID NO: 9 or 1055, a CDR2 having an amino acid sequence at least 65%, at least 70%, at least 75%, at least 80%, at least 85%, at least 90%, at least 95%, at least 99%, or 100% identical to SEQ ID NO: 1056 or an amino acid sequence at least 65%, at least 70%, at least 75%, at least 80%, at least 85%, at least 90%, at least 95%, at least 99%, or 100% identical to amino acid sequence GAS, and a CDR3 having an amino acid sequence at least 65%, at least 70%, at least 75%, at least 80%, at least 85%, at least 90%, at least 95%, at least 99%, or 100% identical to SEQ ID NO: 10,
[2836] VH3 comprises a CDR1 having an amino acid sequence at least 65%, at least 70%, at least 75%, at least 80%, at least 85%, at least 90%, at least 95%, at least 99%, or 100% identical to SEQ ID NO: 12 or 1057, a CDR2 having an amino acid sequence at least 65%, at least 70%, at least 75%, at least 80%, at least 85%, at least 90%, at least 95%, at least 99%, or 100% identical to SEQ ID NO: 6 or 1058, and a CDR3 having an amino acid sequence at least 65%, at least 70%, at least 75%, at least 80%, at least 85%, at least 90%, at least 95%, at least 99%, or 100% identical to SEQ ID NO: 13 or 1059,
[2837] VL4 comprises a CDR1 having an amino acid sequence at least 65%, at least 70%, at least 75%, at least 80%, at least 85%, at least 90%, at least 95%, at least 99%, or 100% identical to SEQ ID NO: 15, a CDR2 having an amino acid sequence at least 65%, at least 70%, at least 75%, at least 80%, at least 85%, at least 90%, at least 95%, at least 99%, or 100% identical to amino acid sequence LGS, and a CDR3 having an amino acid sequence at least 65%, at least 70%, at least 75%, at least 80%, at least 85%, at least 90%, at least 95%, at least 99%, or 100% identical to SEQ ID NO: 16, and
[2838] VH4 comprises a CDR1 having an amino acid sequence at least 65%, at least 70%, at least 75%, at least 80%, at least 85%, at least 90%, at least 95%, at least 99%, or 100% identical to SEQ ID NO: 18, a CDR2 having an amino acid sequence at least 65%, at least 70%, at least 75%, at least 80%, at least 85%, at least 90%, at least 95%, at least 99%, or 100% identical to SEQ ID NO: 19, and a CDR3 having an amino acid sequence at least 65%, at least 70%, at least 75%, at least 80%, at least 85%, at least 90%, at least 95%, at least 99%, or 100% identical to SEQ ID NO: 20, or
[2839] VL1 and VL3 each comprise an amino acid sequence at least 65%, at least 70%, at least 75%, at least 80%, at least 85%, at least 90%, at least 95%, at least 99%, or 100% identical to SEQ ID NO: 11, VH1 and VH3 each comprise an amino acid sequence at least 65%, at least 70%, at least 75%, at least 80%, at least 85%, at least 90%, at least 95%, at least 99%, or 100% identical to SEQ ID NO: 14, VL2 comprises an amino acid sequence at least 65%, at least 70%, at least 75%, at least 80%, at least 85%, at least 90%, at least 95%, at least 99%, or 100% identical to SEQ ID NO: 67, VH2 comprises an amino acid sequence at least 65%, at least 70%, at least 75%, at least 80%, at least 85%, at least 90%, at least 95%, at least 99%, or 100% identical to SEQ ID NO: 71 or 626, VL4 comprises an amino acid sequence at least 65%, at least 70%, at least 75%, at least 80%, at least 85%, at least 90%, at least 95%, at least 99%, or 100% identical to SEQ ID NO: 17, and VH4 comprises an amino acid sequence at least 65%, at least 70%, at least 75%, at least 80%, at least 85%, at least 90%, at least 95%, at least 99%, or 100% identical to SEQ ID NO: 21 or 22; or
[2840] (p)
[2841] VL1 comprises a CDR1 having an amino acid sequence at least 65%, at least 70%, at least 75%, at least 80%, at least 85%, at least 90%, at least 95%, at least 99%, or 100% identical to SEQ ID NO: 145 or 1050, a CDR2 having an amino acid sequence at least 65%, at least 70%, at least 75%, at least 80%, at least 85%, at least 90%, at least 95%, at least 99%, or 100% identical to SEQ ID NO: 1051 or an amino acid sequence at least 65%, at least 70%, at least 75%, at least 80%, at least 85%, at least 90%, at least 95%, at least 99%, or 100% identical to amino acid sequence AAS, and a CDR3 having an amino acid sequence at least 65%, at least 70%, at least 75%, at least 80%, at least 85%, at least 90%, at least 95%, at least 99%, or 100% identical to SEQ ID NO: 146 or 764,
[2842] VH1 comprises a CDR1 having an amino acid sequence at least 65%, at least 70%, at least 75%, at least 80%, at least 85%, at least 90%, at least 95%, at least 99%, or 100% identical to SEQ ID NO: 148 or 1052, a CDR2 having an amino acid sequence at least 65%, at least 70%, at least 75%, at least 80%, at least 85%, at least 90%, at least 95%, at least 99%, or 100% identical to SEQ ID NO: 149 or 1053, and a CDR3 having an amino acid sequence at least 65%, at least 70%, at least 75%, at least 80%, at least 85%, at least 90%, at least 95%, at least 99%, or 100% identical to SEQ ID NO: 150, 765, or 1054,
[2843] VL2 comprises a CDR1 having an amino acid sequence at least 65%, at least 70%, at least 75%, at least 80%, at least 85%, at least 90%, at least 95%, at least 99%, or 100% identical to SEQ ID NO: 9 or 1055, a CDR2 having an amino acid sequence at least 65%, at least 70%, at least 75%, at least 80%, at least 85%, at least 90%, at least 95%, at least 99%, or 100% identical to SEQ ID NO: 1056 or an amino acid sequence at least 65%, at least 70%, at least 75%, at least 80%, at least 85%, at least 90%, at least 95%, at least 99%, or 100% identical to amino acid sequence GAS, and a CDR3 having an amino acid sequence at least 65%, at least 70%, at least 75%, at least 80%, at least 85%, at least 90%, at least 95%, at least 99%, or 100% identical to SEQ ID NO: 10,
[2844] VH2 comprises a CDR1 having an amino acid sequence at least 65%, at least 70%, at least 75%, at least 80%, at least 85%, at least 90%, at least 95%, at least 99%, or 100% identical to SEQ ID NO: 12 or 1057, a CDR2 having an amino acid sequence at least 65%, at least 70%, at least 75%, at least 80%, at least 85%, at least 90%, at least 95%, at least 99%, or 100% identical to SEQ ID NO: 6 or 1058, and a CDR3 having an amino acid sequence at least 65%, at least 70%, at least 75%, at least 80%, at least 85%, at least 90%, at least 95%, at least 99%, or 100% identical to SEQ ID NO: 13 or 1059,
[2845] VL3 comprises a CDR1 having an amino acid sequence at least 65%, at least 70%, at least 75%, at least 80%, at least 85%, at least 90%, at least 95%, at least 99%, or 100% identical to SEQ ID NO: 65 or 627, a CDR2 having an amino acid sequence at least 65%, at least 70%, at least 75%, at least 80%, at least 85%, at least 90%, at least 95%, at least 99%, or 100% identical to SEQ ID NO: 628 or an amino acid sequence at least 65%, at least 70%, at least 75%, at least 80%, at least 85%, at least 90%, at least 95%, at least 99%, or 100% identical to amino acid sequence SDS, and a CDR3 having an amino acid sequence at least 65%, at least 70%, at least 75%, at least 80%, at least 85%, at least 90%, at least 95%, at least 99%, or 100% identical to SEQ ID NO: 66,
[2846] VH3 comprises a CDR1 having an amino acid sequence at least 65%, at least 70%, at least 75%, at least 80%, at least 85%, at least 90%, at least 95%, at least 99%, or 100% identical to SEQ ID NO: 68 or 629, a CDR2 having an amino acid sequence at least 65%, at least 70%, at least 75%, at least 80%, at least 85%, at least 90%, at least 95%, at least 99%, or 100% identical to SEQ ID NO: 69 or 630, and a CDR3 having an amino acid sequence at least 65%, at least 70%, at least 75%, at least 80%, at least 85%, at least 90%, at least 95%, at least 99%, or 100% identical to SEQ ID NO: 70 or 631,
[2847] VL4 comprises a CDR1 having an amino acid sequence at least 65%, at least 70%, at least 75%, at least 80%, at least 85%, at least 90%, at least 95%, at least 99%, or 100% identical to SEQ ID NO: 15, a CDR2 having an amino acid sequence at least 65%, at least 70%, at least 75%, at least 80%, at least 85%, at least 90%, at least 95%, at least 99%, or 100% identical to amino acid sequence LGS, and a CDR3 having an amino acid sequence at least 65%, at least 70%, at least 75%, at least 80%, at least 85%, at least 90%, at least 95%, at least 99%, or 100% identical to SEQ ID NO: 16, and
[2848] VH4 comprises a CDR1 having an amino acid sequence at least 65%, at least 70%, at least 75%, at least 80%, at least 85%, at least 90%, at least 95%, at least 99%, or 100% identical to SEQ ID NO: 18, a CDR2 having an amino acid sequence at least 65%, at least 70%, at least 75%, at least 80%, at least 85%, at least 90%, at least 95%, at least 99%, or 100% identical to SEQ ID NO: 19, and a CDR3 having an amino acid sequence at least 65%, at least 70%, at least 75%, at least 80%, at least 85%, at least 90%, at least 95%, at least 99%, or 100% identical to SEQ ID NO: 20, or
[2849] VL1 comprises an amino acid sequence at least 65%, at least 70%, at least 75%, at least 80%, at least 85%, at least 90%, at least 95%, at least 99%, or 100% identical to SEQ ID NO: 147, VH1 comprises an amino acid sequence at least 65%, at least 70%, at least 75%, at least 80%, at least 85%, at least 90%, at least 95%, at least 99%, or 100% identical to SEQ ID NO: 151, VL2 comprises an amino acid sequence at least 65%, at least 70%, at least 75%, at least 80%, at least 85%, at least 90%, at least 95%, at least 99%, or 100% identical to SEQ ID NO: 11, VH2 comprises an amino acid sequence at least 65%, at least 70%, at least 75%, at least 80%, at least 85%, at least 90%, at least 95%, at least 99%, or 100% identical to SEQ ID NO: 14, VL3 comprises an amino acid sequence at least 65%, at least 70%, at least 75%, at least 80%, at least 85%, at least 90%, at least 95%, at least 99%, or 100% identical to SEQ ID NO: 67, VH3 comprises an amino acid sequence at least 65%, at least 70%, at least 75%, at least 80%, at least 85%, at least 90%, at least 95%, at least 99%, or 100% identical to SEQ ID NO: 71 or 626, VL4 comprises an amino acid sequence at least 65%, at least 70%, at least 75%, at least 80%, at least 85%, at least 90%, at least 95%, at least 99%, or 100% identical to SEQ ID NO: 17, and VH4 comprises an amino acid sequence at least 65%, at least 70%, at least 75%, at least 80%, at least 85%, at least 90%, at least 95%, at least 99%, or 100% identical to SEQ ID NO: 21 or 22; or
[2850] (q)
[2851] VL1 comprises a CDR1 having an amino acid sequence at least 65%, at least 70%, at least 75%, at least 80%, at least 85%, at least 90%, at least 95%, at least 99%, or 100% identical to SEQ ID NO: 145 or 1050, a CDR2 having an amino acid sequence at least 65%, at least 70%, at least 75%, at least 80%, at least 85%, at least 90%, at least 95%, at least 99%, or 100% identical to SEQ ID NO: 1051 or an amino acid sequence at least 65%, at least 70%, at least 75%, at least 80%, at least 85%, at least 90%, at least 95%, at least 99%, or 100% identical to amino acid sequence AAS, and a CDR3 having an amino acid sequence at least 65%, at least 70%, at least 75%, at least 80%, at least 85%, at least 90%, at least 95%, at least 99%, or 100% identical to SEQ ID NO: 146 or 764,
[2852] VH1 comprises a CDR1 having an amino acid sequence at least 65%, at least 70%, at least 75%, at least 80%, at least 85%, at least 90%, at least 95%, at least 99%, or 100% identical to SEQ ID NO: 148 or 1052, a CDR2 having an amino acid sequence at least 65%, at least 70%, at least 75%, at least 80%, at least 85%, at least 90%, at least 95%, at least 99%, or 100% identical to SEQ ID NO: 149 or 1053, and a CDR3 having an amino acid sequence at least 65%, at least 70%, at least 75%, at least 80%, at least 85%, at least 90%, at least 95%, at least 99%, or 100% identical to SEQ ID NO: 150, 765, or 1054,
[2853] VL2 comprises a CDR1 having an amino acid sequence at least 65%, at least 70%, at least 75%, at least 80%, at least 85%, at least 90%, at least 95%, at least 99%, or 100% identical to SEQ ID NO: 9 or 1055, a CDR2 having an amino acid sequence at least 65%, at least 70%, at least 75%, at least 80%, at least 85%, at least 90%, at least 95%, at least 99%, or 100% identical to SEQ ID NO: 1056 or an amino acid sequence at least 65%, at least 70%, at least 75%, at least 80%, at least 85%, at least 90%, at least 95%, at least 99%, or 100% identical to amino acid sequence GAS, and a CDR3 having an amino acid sequence at least 65%, at least 70%, at least 75%, at least 80%, at least 85%, at least 90%, at least 95%, at least 99%, or 100% identical to SEQ ID NO: 10,
[2854] VH2 comprises a CDR1 having an amino acid sequence at least 65%, at least 70%, at least 75%, at least 80%, at least 85%, at least 90%, at least 95%, at least 99%, or 100% identical to SEQ ID NO: 12 or 1057, a CDR2 having an amino acid sequence at least 65%, at least 70%, at least 75%, at least 80%, at least 85%, at least 90%, at least 95%, at least 99%, or 100% identical to SEQ ID NO: 6 or 1058, and a CDR3 having an amino acid sequence at least 65%, at least 70%, at least 75%, at least 80%, at least 85%, at least 90%, at least 95%, at least 99%, or 100% identical to SEQ ID NO: 13 or 1059,
[2855] VL3 comprises a CDR1 having an amino acid sequence at least 65%, at least 70%, at least 75%, at least 80%, at least 85%, at least 90%, at least 95%, at least 99%, or 100% identical to SEQ ID NO: 65 or 627, a CDR2 having an amino acid sequence at least 65%, at least 70%, at least 75%, at least 80%, at least 85%, at least 90%, at least 95%, at least 99%, or 100% identical to SEQ ID NO: 628 or an amino acid sequence at least 65%, at least 70%, at least 75%, at least 80%, at least 85%, at least 90%, at least 95%, at least 99%, or 100% identical to amino acid sequence SDS, and a CDR3 having an amino acid sequence at least 65%, at least 70%, at least 75%, at least 80%, at least 85%, at least 90%, at least 95%, at least 99%, or 100% identical to SEQ ID NO: 66,
[2856] VH3 comprises a CDR1 having an amino acid sequence at least 65%, at least 70%, at least 75%, at least 80%, at least 85%, at least 90%, at least 95%, at least 99%, or 100% identical to SEQ ID NO: 68 or 629, a CDR2 having an amino acid sequence at least 65%, at least 70%, at least 75%, at least 80%, at least 85%, at least 90%, at least 95%, at least 99%, or 100% identical to SEQ ID NO: 69 or 630, and a CDR3 having an amino acid sequence at least 65%, at least 70%, at least 75%, at least 80%, at least 85%, at least 90%, at least 95%, at least 99%, or 100% identical to SEQ ID NO: 70 or 631,
[2857] VL4 comprises a CDR1 having an amino acid sequence at least 65%, at least 70%, at least 75%, at least 80%, at least 85%, at least 90%, at least 95%, at least 99%, or 100% identical to SEQ ID NO: 152 or 1045, a CDR2 having an amino acid sequence at least 65%, at least 70%, at least 75%, at least 80%, at least 85%, at least 90%, at least 95%, at least 99%, or 100% identical to SEQ ID NO: 1046 or an amino acid sequence at least 65%, at least 70%, at least 75%, at least 80%, at least 85%, at least 90%, at least 95%, at least 99%, or 100% identical to amino acid sequence GAS, and a CDR3 having an amino acid sequence at least 65%, at least 70%, at least 75%, at least 80%, at least 85%, at least 90%, at least 95%, at least 99%, or 100% identical to SEQ ID NO: 153 or 766, and
[2858] VH4 comprises a CDR1 having an amino acid sequence at least 65%, at least 70%, at least 75%, at least 80%, at least 85%, at least 90%, at least 95%, at least 99%, or 100% identical to SEQ ID NO: 155 or 1047, a CDR2 having an amino acid sequence at least 65%, at least 70%, at least 75%, at least 80%, at least 85%, at least 90%, at least 95%, at least 99%, or 100% identical to SEQ ID NO: 156 or 1048, and a CDR3 having an amino acid sequence at least 65%, at least 70%, at least 75%, at least 80%, at least 85%, at least 90%, at least 95%, at least 99%, or 100% identical to SEQ ID NO: 157, 767, or 1049, or
[2859] VL1 comprises an amino acid sequence at least 65%, at least 70%, at least 75%, at least 80%, at least 85%, at least 90%, at least 95%, at least 99%, or 100% identical to SEQ ID NO: 147, VH1 comprises an amino acid sequence at least 65%, at least 70%, at least 75%, at least 80%, at least 85%, at least 90%, at least 95%, at least 99%, or 100% identical to SEQ ID NO: 151, VL2 comprises an amino acid sequence at least 65%, at least 70%, at least 75%, at least 80%, at least 85%, at least 90%, at least 95%, at least 99%, or 100% identical to SEQ ID NO: 11, VH2 comprises an amino acid sequence at least 65%, at least 70%, at least 75%, at least 80%, at least 85%, at least 90%, at least 95%, at least 99%, or 100% identical to SEQ ID NO: 14, VL3 comprises an amino acid sequence at least 65%, at least 70%, at least 75%, at least 80%, at least 85%, at least 90%, at least 95%, at least 99%, or 100% identical to SEQ ID NO: 67, VH3 comprises an amino acid sequence at least 65%, at least 70%, at least 75%, at least 80%, at least 85%, at least 90%, at least 95%, at least 99%, or 100% identical to SEQ ID NO: 71 or 626, VL4 comprises an amino acid sequence at least 65%, at least 70%, at least 75%, at least 80%, at least 85%, at least 90%, at least 95%, at least 99%, or 100% identical to SEQ ID NO: 154, and VH4 comprises an amino acid sequence at least 65%, at least 70%, at least 75%, at least 80%, at least 85%, at least 90%, at least 95%, at least 99%, or 100% identical to SEQ ID NO: 158; or
[2860] (r)
[2861] VL1 comprises a CDR1 having an amino acid sequence at least 65%, at least 70%, at least 75%, at least 80%, at least 85%, at least 90%, at least 95%, at least 99%, or 100% identical to SEQ ID NO: 145 or 1050, a CDR2 having an amino acid sequence at least 65%, at least 70%, at least 75%, at least 80%, at least 85%, at least 90%, at least 95%, at least 99%, or 100% identical to SEQ ID NO: 1051 or an amino acid sequence at least 65%, at least 70%, at least 75%, at least 80%, at least 85%, at least 90%, at least 95%, at least 99%, or 100% identical to amino acid sequence AAS, and a CDR3 having an amino acid sequence at least 65%, at least 70%, at least 75%, at least 80%, at least 85%, at least 90%, at least 95%, at least 99%, or 100% identical to SEQ ID NO: 146 or 764,
[2862] VH1 comprises a CDR1 having an amino acid sequence at least 65%, at least 70%, at least 75%, at least 80%, at least 85%, at least 90%, at least 95%, at least 99%, or 100% identical to SEQ ID NO: 148 or 1052, a CDR2 having an amino acid sequence at least 65%, at least 70%, at least 75%, at least 80%, at least 85%, at least 90%, at least 95%, at least 99%, or 100% identical to SEQ ID NO: 149 or 1053, and a CDR3 having an amino acid sequence at least 65%, at least 70%, at least 75%, at least 80%, at least 85%, at least 90%, at least 95%, at least 99%, or 100% identical to SEQ ID NO: 150, 765, or 1054,
[2863] VL2 comprises a CDR1 having an amino acid sequence at least 65%, at least 70%, at least 75%, at least 80%, at least 85%, at least 90%, at least 95%, at least 99%, or 100% identical to SEQ ID NO: 9 or 1055, a CDR2 having an amino acid sequence at least 65%, at least 70%, at least 75%, at least 80%, at least 85%, at least 90%, at least 95%, at least 99%, or 100% identical to SEQ ID NO: 1056 or an amino acid sequence at least 65%, at least 70%, at least 75%, at least 80%, at least 85%, at least 90%, at least 95%, at least 99%, or 100% identical to amino acid sequence GAS, and a CDR3 having an amino acid sequence at least 65%, at least 70%, at least 75%, at least 80%, at least 85%, at least 90%, at least 95%, at least 99%, or 100% identical to SEQ ID NO: 10,
[2864] VH2 comprises a CDR1 having an amino acid sequence at least 65%, at least 70%, at least 75%, at least 80%, at least 85%, at least 90%, at least 95%, at least 99%, or 100% identical to SEQ ID NO: 12 or 1057, a CDR2 having an amino acid sequence at least 65%, at least 70%, at least 75%, at least 80%, at least 85%, at least 90%, at least 95%, at least 99%, or 100% identical to SEQ ID NO: 6 or 1058, and a CDR3 having an amino acid sequence at least 65%, at least 70%, at least 75%, at least 80%, at least 85%, at least 90%, at least 95%, at least 99%, or 100% identical to SEQ ID NO: 13 or 1059,
[2865] VL3 comprises a CDR1 having an amino acid sequence at least 65%, at least 70%, at least 75%, at least 80%, at least 85%, at least 90%, at least 95%, at least 99%, or 100% identical to SEQ ID NO: 15, a CDR2 having an amino acid sequence at least 65%, at least 70%, at least 75%, at least 80%, at least 85%, at least 90%, at least 95%, at least 99%, or 100% identical to amino acid sequence LGS, and a CDR3 having an amino acid sequence at least 65%, at least 70%, at least 75%, at least 80%, at least 85%, at least 90%, at least 95%, at least 99%, or 100% identical to SEQ ID NO: 16,
[2866] VH3 comprises a CDR1 having an amino acid sequence at least 65%, at least 70%, at least 75%, at least 80%, at least 85%, at least 90%, at least 95%, at least 99%, or 100% identical to SEQ ID NO: 18, a CDR2 having an amino acid sequence at least 65%, at least 70%, at least 75%, at least 80%, at least 85%, at least 90%, at least 95%, at least 99%, or 100% identical to SEQ ID NO: 19, and a CDR3 having an amino acid sequence at least 65%, at least 70%, at least 75%, at least 80%, at least 85%, at least 90%, at least 95%, at least 99%, or 100% identical to SEQ ID NO: 20,
[2867] VL4 comprises a CDR1 having an amino acid sequence at least 65%, at least 70%, at least 75%, at least 80%, at least 85%, at least 90%, at least 95%, at least 99%, or 100% identical to SEQ ID NO: 65 or 627, a CDR2 having an amino acid sequence at least 65%, at least 70%, at least 75%, at least 80%, at least 85%, at least 90%, at least 95%, at least 99%, or 100% identical to SEQ ID NO: 628 or an amino acid sequence at least 65%, at least 70%, at least 75%, at least 80%, at least 85%, at least 90%, at least 95%, at least 99%, or 100% identical to amino acid sequence SDS, and a CDR3 having an amino acid sequence at least 65%, at least 70%, at least 75%, at least 80%, at least 85%, at least 90%, at least 95%, at least 99%, or 100% identical to SEQ ID NO: 66, and
[2868] VH4 comprises a CDR1 having an amino acid sequence at least 65%, at least 70%, at least 75%, at least 80%, at least 85%, at least 90%, at least 95%, at least 99%, or 100% identical to SEQ ID NO: 68 or 629, a CDR2 having an amino acid sequence at least 65%, at least 70%, at least 75%, at least 80%, at least 85%, at least 90%, at least 95%, at least 99%, or 100% identical to SEQ ID NO: 69 or 630, and a CDR3 having an amino acid sequence at least 65%, at least 70%, at least 75%, at least 80%, at least 85%, at least 90%, at least 95%, at least 99%, or 100% identical to SEQ ID NO: 70 or 631, or VL1 comprises an amino acid sequence at least 65%, at least 70%, at least 75%, at least 80%, at least 85%, at least 90%, at least 95%, at least 99%, or 100% identical to SEQ ID NO: 147, VH1 comprises an amino acid sequence at least 65%, at least 70%, at least 75%, at least 80%, at least 85%, at least 90%, at least 95%, at least 99%, or 100% identical to SEQ ID NO: 151, VL2 comprises an amino acid sequence at least 65%, at least 70%, at least 75%, at least 80%, at least 85%, at least 90%, at least 95%, at least 99%, or 100% identical to SEQ ID NO: 11, VH2 comprises an amino acid sequence at least 65%, at least 70%, at least 75%, at least 80%, at least 85%, at least 90%, at least 95%, at least 99%, or 100% identical to SEQ ID NO: 14, VL3 comprises an amino acid sequence at least 65%, at least 70%, at least 75%, at least 80%, at least 85%, at least 90%, at least 95%, at least 99%, or 100% identical to SEQ ID NO: 17, VH3 comprises an amino acid sequence at least 65%, at least 70%, at least 75%, at least 80%, at least 85%, at least 90%, at least 95%, at least 99%, or 100% identical to SEQ ID NO: 21 or 22, VL4 comprises an amino acid sequence at least 65%, at least 70%, at least 75%, at least 80%, at least 85%, at least 90%, at least 95%, at least 99%, or 100% identical to SEQ ID NO: 67, and VH4 comprises an amino acid sequence at least 65%, at least 70%, at least 75%, at least 80%, at least 85%, at least 90%, at least 95%, at least 99%, or 100% identical to SEQ ID NO: 71 or 626; or(s) VL1 comprises a CDR1 having an amino acid sequence at least 65%, at least 70%, at least 75%, at least 80%, at least 85%, at least 90%, at least 95%, at least 99%, or 100% identical to SEQ ID NO: 145 or 1050, a CDR2 having an amino acid sequence at least 65%, at least 70%, at least 75%, at least 80%, at least 85%, at least 90%, at least 95%, at least 99%, or 100% identical to SEQ ID NO: 1051 or an amino acid sequence at least 65%, at least 70%, at least 75%, at least 80%, at least 85%, at least 90%, at least 95%, at least 99%, or 100% identical to amino acid sequence AAS, and a CDR3 having an amino acid sequence at least 65%, at least 70%, at least 75%, at least 80%, at least 85%, at least 90%, at least 95%, at least 99%, or 100% identical to SEQ ID NO: 146 or 764,
[2869] VH1 comprises a CDR1 having an amino acid sequence at least 65%, at least 70%, at least 75%, at least 80%, at least 85%, at least 90%, at least 95%, at least 99%, or 100% identical to SEQ ID NO: 148 or 1052, a CDR2 having an amino acid sequence at least 65%, at least 70%, at least 75%, at least 80%, at least 85%, at least 90%, at least 95%, at least 99%, or 100% identical to SEQ ID NO: 149 or 1053, and a CDR3 having an amino acid sequence at least 65%, at least 70%, at least 75%, at least 80%, at least 85%, at least 90%, at least 95%, at least 99%, or 100% identical to SEQ ID NO: 150, 765, or 1054,
[2870] VL2 comprises a CDR1 having an amino acid sequence at least 65%, at least 70%, at least 75%, at least 80%, at least 85%, at least 90%, at least 95%, at least 99%, or 100% identical to SEQ ID NO: 9 or 1055, a CDR2 having an amino acid sequence at least 65%, at least 70%, at least 75%, at least 80%, at least 85%, at least 90%, at least 95%, at least 99%, or 100% identical to SEQ ID NO: 1056 or an amino acid sequence at least 65%, at least 70%, at least 75%, at least 80%, at least 85%, at least 90%, at least 95%, at least 99%, or 100% identical to amino acid sequence GAS, and a CDR3 having an amino acid sequence at least 65%, at least 70%, at least 75%, at least 80%, at least 85%, at least 90%, at least 95%, at least 99%, or 100% identical to SEQ ID NO: 10,
[2871] VH2 comprises a CDR1 having an amino acid sequence at least 65%, at least 70%, at least 75%, at least 80%, at least 85%, at least 90%, at least 95%, at least 99%, or 100% identical to SEQ ID NO: 12 or 1057, a CDR2 having an amino acid sequence at least 65%, at least 70%, at least 75%, at least 80%, at least 85%, at least 90%, at least 95%, at least 99%, or 100% identical to SEQ ID NO: 6 or 1058, and a CDR3 having an amino acid sequence at least 65%, at least 70%, at least 75%, at least 80%, at least 85%, at least 90%, at least 95%, at least 99%, or 100% identical to SEQ ID NO: 13 or 1059,
[2872] VL3 comprises a CDR1 having an amino acid sequence at least 65%, at least 70%, at least 75%, at least 80%, at least 85%, at least 90%, at least 95%, at least 99%, or 100% identical to SEQ ID NO: 152 or 1045, a CDR2 having an amino acid sequence at least 65%, at least 70%, at least 75%, at least 80%, at least 85%, at least 90%, at least 95%, at least 99%, or 100% identical to SEQ ID NO: 1046 or an amino acid sequence at least 65%, at least 70%, at least 75%, at least 80%, at least 85%, at least 90%, at least 95%, at least 99%, or 100% identical to amino acid sequence GAS, and a CDR3 having an amino acid sequence at least 65%, at least 70%, at least 75%, at least 80%, at least 85%, at least 90%, at least 95%, at least 99%, or 100% identical to SEQ ID NO: 153 or 766,
[2873] VH3 comprises a CDR1 having an amino acid sequence at least 65%, at least 70%, at least 75%, at least 80%, at least 85%, at least 90%, at least 95%, at least 99%, or 100% identical to SEQ ID NO: 155 or 1047, a CDR2 having an amino acid sequence at least 65%, at least 70%, at least 75%, at least 80%, at least 85%, at least 90%, at least 95%, at least 99%, or 100% identical to SEQ ID NO: 156 or 1048, and a CDR3 having an amino acid sequence at least 65%, at least 70%, at least 75%, at least 80%, at least 85%, at least 90%, at least 95%, at least 99%, or 100% identical to SEQ ID NO: 157, 767, or 1049,
[2874] VL4 comprises a CDR1 having an amino acid sequence at least 65%, at least 70%, at least 75%, at least 80%, at least 85%, at least 90%, at least 95%, at least 99%, or 100% identical to SEQ ID NO: 65 or 627, a CDR2 having an amino acid sequence at least 65%, at least 70%, at least 75%, at least 80%, at least 85%, at least 90%, at least 95%, at least 99%, or 100% identical to SEQ ID NO: 628 or an amino acid sequence at least 65%, at least 70%, at least 75%, at least 80%, at least 85%, at least 90%, at least 95%, at least 99%, or 100% identical to amino acid sequence SDS, and a CDR3 having an amino acid sequence at least 65%, at least 70%, at least 75%, at least 80%, at least 85%, at least 90%, at least 95%, at least 99%, or 100% identical to SEQ ID NO: 66, and
[2875] VH4 comprises a CDR1 having an amino acid sequence at least 65%, at least 70%, at least 75%, at least 80%, at least 85%, at least 90%, at least 95%, at least 99%, or 100% identical to SEQ ID NO: 68 or 629, a CDR2 having an amino acid sequence at least 65%, at least 70%, at least 75%, at least 80%, at least 85%, at least 90%, at least 95%, at least 99%, or 100% identical to SEQ ID NO: 69 or 630, and a CDR3 having an amino acid sequence at least 65%, at least 70%, at least 75%, at least 80%, at least 85%, at least 90%, at least 95%, at least 99%, or 100% identical to SEQ ID NO: 70 or 631, or
[2876] VL1 comprises an amino acid sequence at least 65%, at least 70%, at least 75%, at least 80%, at least 85%, at least 90%, at least 95%, at least 99%, or 100% identical to SEQ ID NO: 147, VH1 comprises an amino acid sequence at least 65%, at least 70%, at least 75%, at least 80%, at least 85%, at least 90%, at least 95%, at least 99%, or 100% identical to SEQ ID NO: 151, VL2 comprises an amino acid sequence at least 65%, at least 70%, at least 75%, at least 80%, at least 85%, at least 90%, at least 95%, at least 99%, or 100% identical to SEQ ID NO: 11, VH2 comprises an amino acid sequence at least 65%, at least 70%, at least 75%, at least 80%, at least 85%, at least 90%, at least 95%, at least 99%, or 100% identical to SEQ ID NO: 14, VL3 comprises an amino acid sequence at least 65%, at least 70%, at least 75%, at least 80%, at least 85%, at least 90%, at least 95%, at least 99%, or 100% identical to SEQ ID NO: 154, VH3 comprises an amino acid sequence at least 65%, at least 70%, at least 75%, at least 80%, at least 85%, at least 90%, at least 95%, at least 99%, or 100% identical to SEQ ID NO: 158, VL4 comprises an amino acid sequence at least 65%, at least 70%, at least 75%, at least 80%, at least 85%, at least 90%, at least 95%, at least 99%, or 100% identical to SEQ ID NO: 67, and VH4 comprises an amino acid sequence at least 65%, at least 70%, at least 75%, at least 80%, at least 85%, at least 90%, at least 95%, at least 99%, or 100% identical to SEQ ID NO: 71 or 626; or
[2877] (t)
[2878] VL1 comprises a CDR1 having an amino acid sequence at least 65%, at least 70%, at least 75%, at least 80%, at least 85%, at least 90%, at least 95%, at least 99%, or 100% identical to SEQ ID NO: 9 or 1055, a CDR2 having an amino acid sequence at least 65%, at least 70%, at least 75%, at least 80%, at least 85%, at least 90%, at least 95%, at least 99%, or 100% identical to SEQ ID NO: 1056 or an amino acid sequence at least 65%, at least 70%, at least 75%, at least 80%, at least 85%, at least 90%, at least 95%, at least 99%, or 100% identical to amino acid sequence GAS, and a CDR3 having an amino acid sequence at least 65%, at least 70%, at least 75%, at least 80%, at least 85%, at least 90%, at least 95%, at least 99%, or 100% identical to SEQ ID NO: 10,
[2879] VH1 comprises a CDR1 having an amino acid sequence at least 65%, at least 70%, at least 75%, at least 80%, at least 85%, at least 90%, at least 95%, at least 99%, or 100% identical to SEQ ID NO: 12 or 1057, a CDR2 having an amino acid sequence at least 65%, at least 70%, at least 75%, at least 80%, at least 85%, at least 90%, at least 95%, at least 99%, or 100% identical to SEQ ID NO: 6 or 1058, and a CDR3 having an amino acid sequence at least 65%, at least 70%, at least 75%, at least 80%, at least 85%, at least 90%, at least 95%, at least 99%, or 100% identical to SEQ ID NO: 13 or 1059,
[2880] VL2 comprises a CDR1 having an amino acid sequence at least 65%, at least 70%, at least 75%, at least 80%, at least 85%, at least 90%, at least 95%, at least 99%, or 100% identical to SEQ ID NO: 65 or 627, a CDR2 having an amino acid sequence at least 65%, at least 70%, at least 75%, at least 80%, at least 85%, at least 90%, at least 95%, at least 99%, or 100% identical to SEQ ID NO: 628 or an amino acid sequence at least 65%, at least 70%, at least 75%, at least 80%, at least 85%, at least 90%, at least 95%, at least 99%, or 100% identical to amino acid sequence SDS, and a CDR3 having an amino acid sequence at least 65%, at least 70%, at least 75%, at least 80%, at least 85%, at least 90%, at least 95%, at least 99%, or 100% identical to SEQ ID NO: 66,
[2881] VH2 comprises a CDR1 having an amino acid sequence at least 65%, at least 70%, at least 75%, at least 80%, at least 85%, at least 90%, at least 95%, at least 99%, or 100% identical to SEQ ID NO: 68 or 629, a CDR2 having an amino acid sequence at least 65%, at least 70%, at least 75%, at least 80%, at least 85%, at least 90%, at least 95%, at least 99%, or 100% identical to SEQ ID NO: 69 or 630, and a CDR3 having an amino acid sequence at least 65%, at least 70%, at least 75%, at least 80%, at least 85%, at least 90%, at least 95%, at least 99%, or 100% identical to SEQ ID NO: 70 or 631,
[2882] VL3 comprises a CDR1 having an amino acid sequence at least 65%, at least 70%, at least 75%, at least 80%, at least 85%, at least 90%, at least 95%, at least 99%, or 100% identical to SEQ ID NO: 15, a CDR2 having an amino acid sequence at least 65%, at least 70%, at least 75%, at least 80%, at least 85%, at least 90%, at least 95%, at least 99%, or 100% identical to amino acid sequence LGS, and a CDR3 having an amino acid sequence at least 65%, at least 70%, at least 75%, at least 80%, at least 85%, at least 90%, at least 95%, at least 99%, or 100% identical to SEQ ID NO: 16,
[2883] VH3 comprises a CDR1 having an amino acid sequence at least 65%, at least 70%, at least 75%, at least 80%, at least 85%, at least 90%, at least 95%, at least 99%, or 100% identical to SEQ ID NO: 18, a CDR2 having an amino acid sequence at least 65%, at least 70%, at least 75%, at least 80%, at least 85%, at least 90%, at least 95%, at least 99%, or 100% identical to SEQ ID NO: 19, and a CDR3 having an amino acid sequence at least 65%, at least 70%, at least 75%, at least 80%, at least 85%, at least 90%, at least 95%, at least 99%, or 100% identical to SEQ ID NO: 20,
[2884] VL4 comprises a CDR1 having an amino acid sequence at least 65%, at least 70%, at least 75%, at least 80%, at least 85%, at least 90%, at least 95%, at least 99%, or 100% identical to SEQ ID NO: 145 or 1050, a CDR2 having an amino acid sequence at least 65%, at least 70%, at least 75%, at least 80%, at least 85%, at least 90%, at least 95%, at least 99%, or 100% identical to SEQ ID NO: 1051 or an amino acid sequence at least 65%, at least 70%, at least 75%, at least 80%, at least 85%, at least 90%, at least 95%, at least 99%, or 100% identical to amino acid sequence AAS, and a CDR3 having an amino acid sequence at least 65%, at least 70%, at least 75%, at least 80%, at least 85%, at least 90%, at least 95%, at least 99%, or 100% identical to SEQ ID NO: 146 or 764, and
[2885] VH4 comprises a CDR1 having an amino acid sequence at least 65%, at least 70%, at least 75%, at least 80%, at least 85%, at least 90%, at least 95%, at least 99%, or 100% identical to SEQ ID NO: 148 or 1052, a CDR2 having an amino acid sequence at least 65%, at least 70%, at least 75%, at least 80%, at least 85%, at least 90%, at least 95%, at least 99%, or 100% identical to SEQ ID NO: 149 or 1053, and a CDR3 having an amino acid sequence at least 65%, at least 70%, at least 75%, at least 80%, at least 85%, at least 90%, at least 95%, at least 99%, or 100% identical to SEQ ID NO: 150, 765, or 1054, or
[2886] VL1 comprises an amino acid sequence at least 65%, at least 70%, at least 75%, at least 80%, at least 85%, at least 90%, at least 95%, at least 99%, or 100% identical to SEQ ID NO: 11, VH1 comprises an amino acid sequence at least 65%, at least 70%, at least 75%, at least 80%, at least 85%, at least 90%, at least 95%, at least 99%, or 100% identical to SEQ ID NO: 14, VL2 comprises an amino acid sequence at least 65%, at least 70%, at least 75%, at least 80%, at least 85%, at least 90%, at least 95%, at least 99%, or 100% identical to SEQ ID NO: 67, VH2 comprises an amino acid sequence at least 65%, at least 70%, at least 75%, at least 80%, at least 85%, at least 90%, at least 95%, at least 99%, or 100% identical to SEQ ID NO: 71 or 626, VL3 comprises an amino acid sequence at least 65%, at least 70%, at least 75%, at least 80%, at least 85%, at least 90%, at least 95%, at least 99%, or 100% identical to SEQ ID NO: 17, VH3 comprises an amino acid sequence at least 65%, at least 70%, at least 75%, at least 80%, at least 85%, at least 90%, at least 95%, at least 99%, or 100% identical to SEQ ID NO: 21 or 22, VL4 comprises an amino acid sequence at least 65%, at least 70%, at least 75%, at least 80%, at least 85%, at least 90%, at least 95%, at least 99%, or 100% identical to SEQ ID NO: 147, and VH4 comprises an amino acid sequence at least 65%, at least 70%, at least 75%, at least 80%, at least 85%, at least 90%, at least 95%, at least 99%, or 100% identical to SEQ ID NO: 151; or
[2887] (u)
[2888] VL1 comprises a CDR1 having an amino acid sequence at least 65%, at least 70%, at least 75%, at least 80%, at least 85%, at least 90%, at least 95%, at least 99%, or 100% identical to SEQ ID NO: 9 or 1055, a CDR2 having an amino acid sequence at least 65%, at least 70%, at least 75%, at least 80%, at least 85%, at least 90%, at least 95%, at least 99%, or 100% identical to SEQ ID NO: 1056 or an amino acid sequence at least 65%, at least 70%, at least 75%, at least 80%, at least 85%, at least 90%, at least 95%, at least 99%, or 100% identical to amino acid sequence GAS, and a CDR3 having an amino acid sequence at least 65%, at least 70%, at least 75%, at least 80%, at least 85%, at least 90%, at least 95%, at least 99%, or 100% identical to SEQ ID NO: 10,
[2889] VH1 comprises a CDR1 having an amino acid sequence at least 65%, at least 70%, at least 75%, at least 80%, at least 85%, at least 90%, at least 95%, at least 99%, or 100% identical to SEQ ID NO: 12 or 1057, a CDR2 having an amino acid sequence at least 65%, at least 70%, at least 75%, at least 80%, at least 85%, at least 90%, at least 95%, at least 99%, or 100% identical to SEQ ID NO: 6 or 1058, and a CDR3 having an amino acid sequence at least 65%, at least 70%, at least 75%, at least 80%, at least 85%, at least 90%, at least 95%, at least 99%, or 100% identical to SEQ ID NO: 13 or 1059,
[2890] VL2 comprises a CDR1 having an amino acid sequence at least 65%, at least 70%, at least 75%, at least 80%, at least 85%, at least 90%, at least 95%, at least 99%, or 100% identical to SEQ ID NO: 65 or 627, a CDR2 having an amino acid sequence at least 65%, at least 70%, at least 75%, at least 80%, at least 85%, at least 90%, at least 95%, at least 99%, or 100% identical to SEQ ID NO: 628 or an amino acid sequence at least 65%, at least 70%, at least 75%, at least 80%, at least 85%, at least 90%, at least 95%, at least 99%, or 100% identical to amino acid sequence SDS, and a CDR3 having an amino acid sequence at least 65%, at least 70%, at least 75%, at least 80%, at least 85%, at least 90%, at least 95%, at least 99%, or 100% identical to SEQ ID NO: 66,
[2891] VH2 comprises a CDR1 having an amino acid sequence at least 65%, at least 70%, at least 75%, at least 80%, at least 85%, at least 90%, at least 95%, at least 99%, or 100% identical to SEQ ID NO: 68 or 629, a CDR2 having an amino acid sequence at least 65%, at least 70%, at least 75%, at least 80%, at least 85%, at least 90%, at least 95%, at least 99%, or 100% identical to SEQ ID NO: 69 or 630, and a CDR3 having an amino acid sequence at least 65%, at least 70%, at least 75%, at least 80%, at least 85%, at least 90%, at least 95%, at least 99%, or 100% identical to SEQ ID NO: 70 or 631,
[2892] VL3 comprises a CDR1 having an amino acid sequence at least 65%, at least 70%, at least 75%, at least 80%, at least 85%, at least 90%, at least 95%, at least 99%, or 100% identical to SEQ ID NO: 145 or 1050, a CDR2 having an amino acid sequence at least 65%, at least 70%, at least 75%, at least 80%, at least 85%, at least 90%, at least 95%, at least 99%, or 100% identical to SEQ ID NO: 1051 or an amino acid sequence at least 65%, at least 70%, at least 75%, at least 80%, at least 85%, at least 90%, at least 95%, at least 99%, or 100% identical to amino acid sequence AAS, and a CDR3 having an amino acid sequence at least 65%, at least 70%, at least 75%, at least 80%, at least 85%, at least 90%, at least 95%, at least 99%, or 100% identical to SEQ ID NO: 146 or 764,
[2893] VH3 comprises a CDR1 having an amino acid sequence at least 65%, at least 70%, at least 75%, at least 80%, at least 85%, at least 90%, at least 95%, at least 99%, or 100% identical to SEQ ID NO: 148 or 1052, a CDR2 having an amino acid sequence at least 65%, at least 70%, at least 75%, at least 80%, at least 85%, at least 90%, at least 95%, at least 99%, or 100% identical to SEQ ID NO: 149 or 1053, and a CDR3 having an amino acid sequence at least 65%, at least 70%, at least 75%, at least 80%, at least 85%, at least 90%, at least 95%, at least 99%, or 100% identical to SEQ ID NO: 150, 765, or 1054,
[2894] VL4 comprises a CDR1 having an amino acid sequence at least 65%, at least 70%, at least 75%, at least 80%, at least 85%, at least 90%, at least 95%, at least 99%, or 100% identical to SEQ ID NO: 15, a CDR2 having an amino acid sequence at least 65%, at least 70%, at least 75%, at least 80%, at least 85%, at least 90%, at least 95%, at least 99%, or 100% identical to amino acid sequence LGS, and a CDR3 having an amino acid sequence at least 65%, at least 70%, at least 75%, at least 80%, at least 85%, at least 90%, at least 95%, at least 99%, or 100% identical to SEQ ID NO: 16, and
[2895] VH4 comprises a CDR1 having an amino acid sequence at least 65%, at least 70%, at least 75%, at least 80%, at least 85%, at least 90%, at least 95%, at least 99%, or 100% identical to SEQ ID NO: 18, a CDR2 having an amino acid sequence at least 65%, at least 70%, at least 75%, at least 80%, at least 85%, at least 90%, at least 95%, at least 99%, or 100% identical to SEQ ID NO: 19, and a CDR3 having an amino acid sequence at least 65%, at least 70%, at least 75%, at least 80%, at least 85%, at least 90%, at least 95%, at least 99%, or 100% identical to SEQ ID NO: 20, or
[2896] VL1 comprises an amino acid sequence at least 65%, at least 70%, at least 75%, at least 80%, at least 85%, at least 90%, at least 95%, at least 99%, or 100% identical to SEQ ID NO: 11, VH1 comprises an amino acid sequence at least 65%, at least 70%, at least 75%, at least 80%, at least 85%, at least 90%, at least 95%, at least 99%, or 100% identical to SEQ ID NO: 14, VL2 comprises an amino acid sequence at least 65%, at least 70%, at least 75%, at least 80%, at least 85%, at least 90%, at least 95%, at least 99%, or 100% identical to SEQ ID NO: 67, VH2 comprises an amino acid sequence at least 65%, at least 70%, at least 75%, at least 80%, at least 85%, at least 90%, at least 95%, at least 99%, or 100% identical to SEQ ID NO: 71 or 626, VL3 comprises an amino acid sequence at least 65%, at least 70%, at least 75%, at least 80%, at least 85%, at least 90%, at least 95%, at least 99%, or 100% identical to SEQ ID NO: 147, VH3 comprises an amino acid sequence at least 65%, at least 70%, at least 75%, at least 80%, at least 85%, at least 90%, at least 95%, at least 99%, or 100% identical to SEQ ID NO: 151, VL4 comprises an amino acid sequence at least 65%, at least 70%, at least 75%, at least 80%, at least 85%, at least 90%, at least 95%, at least 99%, or 100% identical to SEQ ID NO: 17, and VH4 comprises an amino acid sequence at least 65%, at least 70%, at least 75%, at least 80%, at least 85%, at least 90%, at least 95%, at least 99%, or 100% identical to SEQ ID NO: 21 or 22; or
[2897] (v)
[2898] VL1 comprises a CDR1 having an amino acid sequence at least 65%, at least 70%, at least 75%, at least 80%, at least 85%, at least 90%, at least 95%, at least 99%, or 100% identical to SEQ ID NO: 65 or 627, a CDR2 having an amino acid sequence at least 65%, at least 70%, at least 75%, at least 80%, at least 85%, at least 90%, at least 95%, at least 99%, or 100% identical to SEQ ID NO: 628 or an amino acid sequence at least 65%, at least 70%, at least 75%, at least 80%, at least 85%, at least 90%, at least 95%, at least 99%, or 100% identical to amino acid sequence SDS, and a CDR3 having an amino acid sequence at least 65%, at least 70%, at least 75%, at least 80%, at least 85%, at least 90%, at least 95%, at least 99%, or 100% identical to SEQ ID NO: 66,
[2899] VH1 comprises a CDR1 having an amino acid sequence at least 65%, at least 70%, at least 75%, at least 80%, at least 85%, at least 90%, at least 95%, at least 99%, or 100% identical to SEQ ID NO: 68 or 629, a CDR2 having an amino acid sequence at least 65%, at least 70%, at least 75%, at least 80%, at least 85%, at least 90%, at least 95%, at least 99%, or 100% identical to SEQ ID NO: 69 or 630, and a CDR3 having an amino acid sequence at least 65%, at least 70%, at least 75%, at least 80%, at least 85%, at least 90%, at least 95%, at least 99%, or 100% identical to SEQ ID NO: 70 or 631,
[2900] VL2 comprises a CDR1 having an amino acid sequence at least 65%, at least 70%, at least 75%, at least 80%, at least 85%, at least 90%, at least 95%, at least 99%, or 100% identical to SEQ ID NO: 9 or 1055, a CDR2 having an amino acid sequence at least 65%, at least 70%, at least 75%, at least 80%, at least 85%, at least 90%, at least 95%, at least 99%, or 100% identical to SEQ ID NO: 1056 or an amino acid sequence at least 65%, at least 70%, at least 75%, at least 80%, at least 85%, at least 90%, at least 95%, at least 99%, or 100% identical to amino acid sequence GAS, and a CDR3 having an amino acid sequence at least 65%, at least 70%, at least 75%, at least 80%, at least 85%, at least 90%, at least 95%, at least 99%, or 100% identical to SEQ ID NO: 10,
[2901] VH2 comprises a CDR1 having an amino acid sequence at least 65%, at least 70%, at least 75%, at least 80%, at least 85%, at least 90%, at least 95%, at least 99%, or 100% identical to SEQ ID NO: 12 or 1057, a CDR2 having an amino acid sequence at least 65%, at least 70%, at least 75%, at least 80%, at least 85%, at least 90%, at least 95%, at least 99%, or 100% identical to SEQ ID NO: 6 or 1058, and a CDR3 having an amino acid sequence at least 65%, at least 70%, at least 75%, at least 80%, at least 85%, at least 90%, at least 95%, at least 99%, or 100% identical to SEQ ID NO: 13 or 1059,
[2902] VL3 comprises a CDR1 having an amino acid sequence at least 65%, at least 70%, at least 75%, at least 80%, at least 85%, at least 90%, at least 95%, at least 99%, or 100% identical to SEQ ID NO: 15, a CDR2 having an amino acid sequence at least 65%, at least 70%, at least 75%, at least 80%, at least 85%, at least 90%, at least 95%, at least 99%, or 100% identical to amino acid sequence LGS, and a CDR3 having an amino acid sequence at least 65%, at least 70%, at least 75%, at least 80%, at least 85%, at least 90%, at least 95%, at least 99%, or 100% identical to SEQ ID NO: 16,
[2903] VH3 comprises a CDR1 having an amino acid sequence at least 65%, at least 70%, at least 75%, at least 80%, at least 85%, at least 90%, at least 95%, at least 99%, or 100% identical to SEQ ID NO: 18, a CDR2 having an amino acid sequence at least 65%, at least 70%, at least 75%, at least 80%, at least 85%, at least 90%, at least 95%, at least 99%, or 100% identical to SEQ ID NO: 19, and a CDR3 having an amino acid sequence at least 65%, at least 70%, at least 75%, at least 80%, at least 85%, at least 90%, at least 95%, at least 99%, or 100% identical to SEQ ID NO: 20,
[2904] VL4 comprises a CDR1 having an amino acid sequence at least 65%, at least 70%, at least 75%, at least 80%, at least 85%, at least 90%, at least 95%, at least 99%, or 100% identical to SEQ ID NO: 145 or 1050, a CDR2 having an amino acid sequence at least 65%, at least 70%, at least 75%, at least 80%, at least 85%, at least 90%, at least 95%, at least 99%, or 100% identical to SEQ ID NO: 1051 or an amino acid sequence at least 65%, at least 70%, at least 75%, at least 80%, at least 85%, at least 90%, at least 95%, at least 99%, or 100% identical to amino acid sequence AAS, and a CDR3 having an amino acid sequence at least 65%, at least 70%, at least 75%, at least 80%, at least 85%, at least 90%, at least 95%, at least 99%, or 100% identical to SEQ ID NO: 146 or 764, and
[2905] VH4 comprises a CDR1 having an amino acid sequence at least 65%, at least 70%, at least 75%, at least 80%, at least 85%, at least 90%, at least 95%, at least 99%, or 100% identical to SEQ ID NO: 148 or 1052, a CDR2 having an amino acid sequence at least 65%, at least 70%, at least 75%, at least 80%, at least 85%, at least 90%, at least 95%, at least 99%, or 100% identical to SEQ ID NO: 149 or 1053, and a CDR3 having an amino acid sequence at least 65%, at least 70%, at least 75%, at least 80%, at least 85%, at least 90%, at least 95%, at least 99%, or 100% identical to SEQ ID NO: 150, 765, or 1054, or
[2906] VL1 comprises an amino acid sequence at least 65%, at least 70%, at least 75%, at least 80%, at least 85%, at least 90%, at least 95%, at least 99%, or 100% identical to SEQ ID NO: 67, VH1 comprises an amino acid sequence at least 65%, at least 70%, at least 75%, at least 80%, at least 85%, at least 90%, at least 95%, at least 99%, or 100% identical to SEQ ID NO: 71 or 626, VL2 comprises an amino acid sequence at least 65%, at least 70%, at least 75%, at least 80%, at least 85%, at least 90%, at least 95%, at least 99%, or 100% identical to SEQ ID NO: 11, VH2 comprises an amino acid sequence at least 65%, at least 70%, at least 75%, at least 80%, at least 85%, at least 90%, at least 95%, at least 99%, or 100% identical to SEQ ID NO: 14, VL3 comprises an amino acid sequence at least 65%, at least 70%, at least 75%, at least 80%, at least 85%, at least 90%, at least 95%, at least 99%, or 100% identical to SEQ ID NO: 17, VH3 comprises an amino acid sequence at least 65%, at least 70%, at least 75%, at least 80%, at least 85%, at least 90%, at least 95%, at least 99%, or 100% identical to SEQ ID NO: 21 or 22, VL4 comprises an amino acid sequence at least 65%, at least 70%, at least 75%, at least 80%, at least 85%, at least 90%, at least 95%, at least 99%, or 100% identical to SEQ ID NO: 147, and VH4 comprises an amino acid sequence at least 65%, at least 70%, at least 75%, at least 80%, at least 85%, at least 90%, at least 95%, at least 99%, or 100% identical to SEQ ID NO: 151; or
[2907] (w)
[2908] VL1 comprises a CDR1 having an amino acid sequence at least 65%, at least 70%, at least 75%, at least 80%, at least 85%, at least 90%, at least 95%, at least 99%, or 100% identical to SEQ ID NO: 65 or 627, a CDR2 having an amino acid sequence at least 65%, at least 70%, at least 75%, at least 80%, at least 85%, at least 90%, at least 95%, at least 99%, or 100% identical to SEQ ID NO: 628 or an amino acid sequence at least 65%, at least 70%, at least 75%, at least 80%, at least 85%, at least 90%, at least 95%, at least 99%, or 100% identical to amino acid sequence SDS, and a CDR3 having an amino acid sequence at least 65%, at least 70%, at least 75%, at least 80%, at least 85%, at least 90%, at least 95%, at least 99%, or 100% identical to SEQ ID NO: 66,
[2909] VH1 comprises a CDR1 having an amino acid sequence at least 65%, at least 70%, at least 75%, at least 80%, at least 85%, at least 90%, at least 95%, at least 99%, or 100% identical to SEQ ID NO: 68 or 629, a CDR2 having an amino acid sequence at least 65%, at least 70%, at least 75%, at least 80%, at least 85%, at least 90%, at least 95%, at least 99%, or 100% identical to SEQ ID NO: 69 or 630, and a CDR3 having an amino acid sequence at least 65%, at least 70%, at least 75%, at least 80%, at least 85%, at least 90%, at least 95%, at least 99%, or 100% identical to SEQ ID NO: 70 or 631,
[2910] VL2 comprises a CDR1 having an amino acid sequence at least 65%, at least 70%, at least 75%, at least 80%, at least 85%, at least 90%, at least 95%, at least 99%, or 100% identical to SEQ ID NO: 9 or 1055, a CDR2 having an amino acid sequence at least 65%, at least 70%, at least 75%, at least 80%, at least 85%, at least 90%, at least 95%, at least 99%, or 100% identical to SEQ ID NO: 1056 or an amino acid sequence at least 65%, at least 70%, at least 75%, at least 80%, at least 85%, at least 90%, at least 95%, at least 99%, or 100% identical to amino acid sequence GAS, and a CDR3 having an amino acid sequence at least 65%, at least 70%, at least 75%, at least 80%, at least 85%, at least 90%, at least 95%, at least 99%, or 100% identical to SEQ ID NO: 10,
[2911] VH2 comprises a CDR1 having an amino acid sequence at least 65%, at least 70%, at least 75%, at least 80%, at least 85%, at least 90%, at least 95%, at least 99%, or 100% identical to SEQ ID NO: 12 or 1057, a CDR2 having an amino acid sequence at least 65%, at least 70%, at least 75%, at least 80%, at least 85%, at least 90%, at least 95%, at least 99%, or 100% identical to SEQ ID NO: 6 or 1058, and a CDR3 having an amino acid sequence at least 65%, at least 70%, at least 75%, at least 80%, at least 85%, at least 90%, at least 95%, at least 99%, or 100% identical to SEQ ID NO: 13 or 1059,
[2912] VL3 comprises a CDR1 having an amino acid sequence at least 65%, at least 70%, at least 75%, at least 80%, at least 85%, at least 90%, at least 95%, at least 99%, or 100% identical to SEQ ID NO: 145 or 1050, a CDR2 having an amino acid sequence at least 65%, at least 70%, at least 75%, at least 80%, at least 85%, at least 90%, at least 95%, at least 99%, or 100% identical to SEQ ID NO: 1051 or an amino acid sequence at least 65%, at least 70%, at least 75%, at least 80%, at least 85%, at least 90%, at least 95%, at least 99%, or 100% identical to amino acid sequence AAS, and a CDR3 having an amino acid sequence at least 65%, at least 70%, at least 75%, at least 80%, at least 85%, at least 90%, at least 95%, at least 99%, or 100% identical to SEQ ID NO: 146 or 764,
[2913] VH3 comprises a CDR1 having an amino acid sequence at least 65%, at least 70%, at least 75%, at least 80%, at least 85%, at least 90%, at least 95%, at least 99%, or 100% identical to SEQ ID NO: 148 or 1052, a CDR2 having an amino acid sequence at least 65%, at least 70%, at least 75%, at least 80%, at least 85%, at least 90%, at least 95%, at least 99%, or 100% identical to SEQ ID NO: 149 or 1053, and a CDR3 having an amino acid sequence at least 65%, at least 70%, at least 75%, at least 80%, at least 85%, at least 90%, at least 95%, at least 99%, or 100% identical to SEQ ID NO: 150, 765, or 1054,
[2914] VL4 comprises a CDR1 having an amino acid sequence at least 65%, at least 70%, at least 75%, at least 80%, at least 85%, at least 90%, at least 95%, at least 99%, or 100% identical to SEQ ID NO: 15, a CDR2 having an amino acid sequence at least 65%, at least 70%, at least 75%, at least 80%, at least 85%, at least 90%, at least 95%, at least 99%, or 100% identical to amino acid sequence LGS, and a CDR3 having an amino acid sequence at least 65%, at least 70%, at least 75%, at least 80%, at least 85%, at least 90%, at least 95%, at least 99%, or 100% identical to SEQ ID NO: 16, and
[2915] VH4 comprises a CDR1 having an amino acid sequence at least 65%, at least 70%, at least 75%, at least 80%, at least 85%, at least 90%, at least 95%, at least 99%, or 100% identical to SEQ ID NO: 18, a CDR2 having an amino acid sequence at least 65%, at least 70%, at least 75%, at least 80%, at least 85%, at least 90%, at least 95%, at least 99%, or 100% identical to SEQ ID NO: 19, and a CDR3 having an amino acid sequence at least 65%, at least 70%, at least 75%, at least 80%, at least 85%, at least 90%, at least 95%, at least 99%, or 100% identical to SEQ ID NO: 20, or
[2916] VL1 comprises an amino acid sequence at least 65%, at least 70%, at least 75%, at least 80%, at least 85%, at least 90%, at least 95%, at least 99%, or 100% identical to SEQ ID NO: 67, VH1 comprises an amino acid sequence at least 65%, at least 70%, at least 75%, at least 80%, at least 85%, at least 90%, at least 95%, at least 99%, or 100% identical to SEQ ID NO: 71 or 626, VL2 comprises an amino acid sequence at least 65%, at least 70%, at least 75%, at least 80%, at least 85%, at least 90%, at least 95%, at least 99%, or 100% identical to SEQ ID NO: 11, VH2 comprises an amino acid sequence at least 65%, at least 70%, at least 75%, at least 80%, at least 85%, at least 90%, at least 95%, at least 99%, or 100% identical to SEQ ID NO: 14, VL3 comprises an amino acid sequence at least 65%, at least 70%, at least 75%, at least 80%, at least 85%, at least 90%, at least 95%, at least 99%, or 100% identical to SEQ ID NO: 147, VH3 comprises an amino acid sequence at least 65%, at least 70%, at least 75%, at least 80%, at least 85%, at least 90%, at least 95%, at least 99%, or 100% identical to SEQ ID NO: 151, VL4 comprises an amino acid sequence at least 65%, at least 70%, at least 75%, at least 80%, at least 85%, at least 90%, at least 95%, at least 99%, or 100% identical to SEQ ID NO: 17, and VH4 comprises an amino acid sequence at least 65%, at least 70%, at least 75%, at least 80%, at least 85%, at least 90%, at least 95%, at least 99%, or 100% identical to SEQ ID NO: 21 or 22; or
[2917] (x)
[2918] VL1 comprises a CDR1 having an amino acid sequence at least 65%, at least 70%, at least 75%, at least 80%, at least 85%, at least 90%, at least 95%, at least 99%, or 100% identical to SEQ ID NO: 9 or 1055, a CDR2 having an amino acid sequence at least 65%, at least 70%, at least 75%, at least 80%, at least 85%, at least 90%, at least 95%, at least 99%, or 100% identical to SEQ ID NO: 1056 or an amino acid sequence at least 65%, at least 70%, at least 75%, at least 80%, at least 85%, at least 90%, at least 95%, at least 99%, or 100% identical to amino acid sequence GAS, and a CDR3 having an amino acid sequence at least 65%, at least 70%, at least 75%, at least 80%, at least 85%, at least 90%, at least 95%, at least 99%, or 100% identical to SEQ ID NO: 10,
[2919] VH1 comprises a CDR1 having an amino acid sequence at least 65%, at least 70%, at least 75%, at least 80%, at least 85%, at least 90%, at least 95%, at least 99%, or 100% identical to SEQ ID NO: 12 or 1057, a CDR2 having an amino acid sequence at least 65%, at least 70%, at least 75%, at least 80%, at least 85%, at least 90%, at least 95%, at least 99%, or 100% identical to SEQ ID NO: 6 or 1058, and a CDR3 having an amino acid sequence at least 65%, at least 70%, at least 75%, at least 80%, at least 85%, at least 90%, at least 95%, at least 99%, or 100% identical to SEQ ID NO: 13 or 1059,
[2920] VL2 comprises a CDR1 having an amino acid sequence at least 65%, at least 70%, at least 75%, at least 80%, at least 85%, at least 90%, at least 95%, at least 99%, or 100% identical to SEQ ID NO: 15, a CDR2 having an amino acid sequence at least 65%, at least 70%, at least 75%, at least 80%, at least 85%, at least 90%, at least 95%, at least 99%, or 100% identical to amino acid sequence LGS, and a CDR3 having an amino acid sequence at least 65%, at least 70%, at least 75%, at least 80%, at least 85%, at least 90%, at least 95%, at least 99%, or 100% identical to SEQ ID NO: 16,
[2921] VH2 comprises a CDR1 having an amino acid sequence at least 65%, at least 70%, at least 75%, at least 80%, at least 85%, at least 90%, at least 95%, at least 99%, or 100% identical to SEQ ID NO: 18, a CDR2 having an amino acid sequence at least 65%, at least 70%, at least 75%, at least 80%, at least 85%, at least 90%, at least 95%, at least 99%, or 100% identical to SEQ ID NO: 19, and a CDR3 having an amino acid sequence at least 65%, at least 70%, at least 75%, at least 80%, at least 85%, at least 90%, at least 95%, at least 99%, or 100% identical to SEQ ID NO: 20,
[2922] VL3 comprises a CDR1 having an amino acid sequence at least 65%, at least 70%, at least 75%, at least 80%, at least 85%, at least 90%, at least 95%, at least 99%, or 100% identical to SEQ ID NO: 65 or 627, a CDR2 having an amino acid sequence at least 65%, at least 70%, at least 75%, at least 80%, at least 85%, at least 90%, at least 95%, at least 99%, or 100% identical to SEQ ID NO: 628 or an amino acid sequence at least 65%, at least 70%, at least 75%, at least 80%, at least 85%, at least 90%, at least 95%, at least 99%, or 100% identical to amino acid sequence SDS, and a CDR3 having an amino acid sequence at least 65%, at least 70%, at least 75%, at least 80%, at least 85%, at least 90%, at least 95%, at least 99%, or 100% identical to SEQ ID NO: 66,
[2923] VH3 comprises a CDR1 having an amino acid sequence at least 65%, at least 70%, at least 75%, at least 80%, at least 85%, at least 90%, at least 95%, at least 99%, or 100% identical to SEQ ID NO: 68 or 629, a CDR2 having an amino acid sequence at least 65%, at least 70%, at least 75%, at least 80%, at least 85%, at least 90%, at least 95%, at least 99%, or 100% identical to SEQ ID NO: 69 or 630, and a CDR3 having an amino acid sequence at least 65%, at least 70%, at least 75%, at least 80%, at least 85%, at least 90%, at least 95%, at least 99%, or 100% identical to SEQ ID NO: 70 or 631,
[2924] VL4 comprises a CDR1 having an amino acid sequence at least 65%, at least 70%, at least 75%, at least 80%, at least 85%, at least 90%, at least 95%, at least 99%, or 100% identical to SEQ ID NO: 145 or 1050, a CDR2 having an amino acid sequence at least 65%, at least 70%, at least 75%, at least 80%, at least 85%, at least 90%, at least 95%, at least 99%, or 100% identical to SEQ ID NO: 1051 or an amino acid sequence at least 65%, at least 70%, at least 75%, at least 80%, at least 85%, at least 90%, at least 95%, at least 99%, or 100% identical to amino acid sequence AAS, and a CDR3 having an amino acid sequence at least 65%, at least 70%, at least 75%, at least 80%, at least 85%, at least 90%, at least 95%, at least 99%, or 100% identical to SEQ ID NO: 146 or 764, and
[2925] VH4 comprises a CDR1 having an amino acid sequence at least 65%, at least 70%, at least 75%, at least 80%, at least 85%, at least 90%, at least 95%, at least 99%, or 100% identical to SEQ ID NO: 148 or 1052, a CDR2 having an amino acid sequence at least 65%, at least 70%, at least 75%, at least 80%, at least 85%, at least 90%, at least 95%, at least 99%, or 100% identical to SEQ ID NO: 149 or 1053, and a CDR3 having an amino acid sequence at least 65%, at least 70%, at least 75%, at least 80%, at least 85%, at least 90%, at least 95%, at least 99%, or 100% identical to SEQ ID NO: 150, 765, or 1054, or
[2926] VL1 comprises an amino acid sequence at least 65%, at least 70%, at least 75%, at least 80%, at least 85%, at least 90%, at least 95%, at least 99%, or 100% identical to SEQ ID NO: 11, VH1 comprises an amino acid sequence at least 65%, at least 70%, at least 75%, at least 80%, at least 85%, at least 90%, at least 95%, at least 99%, or 100% identical to SEQ ID NO: 14, VL2 comprises an amino acid sequence at least 65%, at least 70%, at least 75%, at least 80%, at least 85%, at least 90%, at least 95%, at least 99%, or 100% identical to SEQ ID NO: 17, VH2 comprises an amino acid sequence at least 65%, at least 70%, at least 75%, at least 80%, at least 85%, at least 90%, at least 95%, at least 99%, or 100% identical to SEQ ID NO: 21 or 22, VL3 comprises an amino acid sequence at least 65%, at least 70%, at least 75%, at least 80%, at least 85%, at least 90%, at least 95%, at least 99%, or 100% identical to SEQ ID NO: 67, VH3 comprises an amino acid sequence at least 65%, at least 70%, at least 75%, at least 80%, at least 85%, at least 90%, at least 95%, at least 99%, or 100% identical to SEQ ID NO: 71 or 626, VL4 comprises an amino acid sequence at least 65%, at least 70%, at least 75%, at least 80%, at least 85%, at least 90%, at least 95%, at least 99%, or 100% identical to SEQ ID NO: 147, and VH4 comprises an amino acid sequence at least 65%, at least 70%, at least 75%, at least 80%, at least 85%, at least 90%, at least 95%, at least 99%, or 100% identical to SEQ ID NO: 151; or
[2927] (y)
[2928] VL1 comprises a CDR1 having an amino acid sequence at least 65%, at least 70%, at least 75%, at least 80%, at least 85%, at least 90%, at least 95%, at least 99%, or 100% identical to SEQ ID NO: 9 or 1055, a CDR2 having an amino acid sequence at least 65%, at least 70%, at least 75%, at least 80%, at least 85%, at least 90%, at least 95%, at least 99%, or 100% identical to SEQ ID NO: 1056 or an amino acid sequence at least 65%, at least 70%, at least 75%, at least 80%, at least 85%, at least 90%, at least 95%, at least 99%, or 100% identical to amino acid sequence GAS, and a CDR3 having an amino acid sequence at least 65%, at least 70%, at least 75%, at least 80%, at least 85%, at least 90%, at least 95%, at least 99%, or 100% identical to SEQ ID NO: 10,
[2929] VH1 comprises a CDR1 having an amino acid sequence at least 65%, at least 70%, at least 75%, at least 80%, at least 85%, at least 90%, at least 95%, at least 99%, or 100% identical to SEQ ID NO: 12 or 1057, a CDR2 having an amino acid sequence at least 65%, at least 70%, at least 75%, at least 80%, at least 85%, at least 90%, at least 95%, at least 99%, or 100% identical to SEQ ID NO: 6 or 1058, and a CDR3 having an amino acid sequence at least 65%, at least 70%, at least 75%, at least 80%, at least 85%, at least 90%, at least 95%, at least 99%, or 100% identical to SEQ ID NO: 13 or 1059,
[2930] VL2 comprises a CDR1 having an amino acid sequence at least 65%, at least 70%, at least 75%, at least 80%, at least 85%, at least 90%, at least 95%, at least 99%, or 100% identical to SEQ ID NO: 15, a CDR2 having an amino acid sequence at least 65%, at least 70%, at least 75%, at least 80%, at least 85%, at least 90%, at least 95%, at least 99%, or 100% identical to amino acid sequence LGS, and a CDR3 having an amino acid sequence at least 65%, at least 70%, at least 75%, at least 80%, at least 85%, at least 90%, at least 95%, at least 99%, or 100% identical to SEQ ID NO: 16,
[2931] VH2 comprises a CDR1 having an amino acid sequence at least 65%, at least 70%, at least 75%, at least 80%, at least 85%, at least 90%, at least 95%, at least 99%, or 100% identical to SEQ ID NO: 18, a CDR2 having an amino acid sequence at least 65%, at least 70%, at least 75%, at least 80%, at least 85%, at least 90%, at least 95%, at least 99%, or 100% identical to SEQ ID NO: 19, and a CDR3 having an amino acid sequence at least 65%, at least 70%, at least 75%, at least 80%, at least 85%, at least 90%, at least 95%, at least 99%, or 100% identical to SEQ ID NO: 20,
[2932] VL3 comprises a CDR1 having an amino acid sequence at least 65%, at least 70%, at least 75%, at least 80%, at least 85%, at least 90%, at least 95%, at least 99%, or 100% identical to SEQ ID NO: 145 or 1050, a CDR2 having an amino acid sequence at least 65%, at least 70%, at least 75%, at least 80%, at least 85%, at least 90%, at least 95%, at least 99%, or 100% identical to SEQ ID NO: 1051 or an amino acid sequence at least 65%, at least 70%, at least 75%, at least 80%, at least 85%, at least 90%, at least 95%, at least 99%, or 100% identical to amino acid sequence AAS, and a CDR3 having an amino acid sequence at least 65%, at least 70%, at least 75%, at least 80%, at least 85%, at least 90%, at least 95%, at least 99%, or 100% identical to SEQ ID NO: 146 or 764,
[2933] VH3 comprises a CDR1 having an amino acid sequence at least 65%, at least 70%, at least 75%, at least 80%, at least 85%, at least 90%, at least 95%, at least 99%, or 100% identical to SEQ ID NO: 148 or 1052, a CDR2 having an amino acid sequence at least 65%, at least 70%, at least 75%, at least 80%, at least 85%, at least 90%, at least 95%, at least 99%, or 100% identical to SEQ ID NO: 149 or 1053, and a CDR3 having an amino acid sequence at least 65%, at least 70%, at least 75%, at least 80%, at least 85%, at least 90%, at least 95%, at least 99%, or 100% identical to SEQ ID NO: 150, 765, or 1054,
[2934] VL4 comprises a CDR1 having an amino acid sequence at least 65%, at least 70%, at least 75%, at least 80%, at least 85%, at least 90%, at least 95%, at least 99%, or 100% identical to SEQ ID NO: 65 or 627, a CDR2 having an amino acid sequence at least 65%, at least 70%, at least 75%, at least 80%, at least 85%, at least 90%, at least 95%, at least 99%, or 100% identical to SEQ ID NO: 628 or an amino acid sequence at least 65%, at least 70%, at least 75%, at least 80%, at least 85%, at least 90%, at least 95%, at least 99%, or 100% identical to amino acid sequence SDS, and a CDR3 having an amino acid sequence at least 65%, at least 70%, at least 75%, at least 80%, at least 85%, at least 90%, at least 95%, at least 99%, or 100% identical to SEQ ID NO: 66, and
[2935] VH4 comprises a CDR1 having an amino acid sequence at least 65%, at least 70%, at least 75%, at least 80%, at least 85%, at least 90%, at least 95%, at least 99%, or 100% identical to SEQ ID NO: 68 or 629, a CDR2 having an amino acid sequence at least 65%, at least 70%, at least 75%, at least 80%, at least 85%, at least 90%, at least 95%, at least 99%, or 100% identical to SEQ ID NO: 69 or 630, and a CDR3 having an amino acid sequence at least 65%, at least 70%, at least 75%, at least 80%, at least 85%, at least 90%, at least 95%, at least 99%, or 100% identical to SEQ ID NO: 70 or 631, or
[2936] VL1 comprises an amino acid sequence at least 65%, at least 70%, at least 75%, at least 80%, at least 85%, at least 90%, at least 95%, at least 99%, or 100% identical to SEQ ID NO: 11, VH1 comprises an amino acid sequence at least 65%, at least 70%, at least 75%, at least 80%, at least 85%, at least 90%, at least 95%, at least 99%, or 100% identical to SEQ ID NO: 14, VL2 comprises an amino acid sequence at least 65%, at least 70%, at least 75%, at least 80%, at least 85%, at least 90%, at least 95%, at least 99%, or 100% identical to SEQ ID NO: 17, VH2 comprises an amino acid sequence at least 65%, at least 70%, at least 75%, at least 80%, at least 85%, at least 90%, at least 95%, at least 99%, or 100% identical to SEQ ID NO: 21 or 22, VL3 comprises an amino acid sequence at least 65%, at least 70%, at least 75%, at least 80%, at least 85%, at least 90%, at least 95%, at least 99%, or 100% identical to SEQ ID NO: 147, VH3 comprises an amino acid sequence at least 65%, at least 70%, at least 75%, at least 80%, at least 85%, at least 90%, at least 95%, at least 99%, or 100% identical to SEQ ID NO: 151, VL4 comprises an amino acid sequence at least 65%, at least 70%, at least 75%, at least 80%, at least 85%, at least 90%, at least 95%, at least 99%, or 100% identical to SEQ ID NO: 67, and VH4 comprises an amino acid sequence at least 65%, at least 70%, at least 75%, at least 80%, at least 85%, at least 90%, at least 95%, at least 99%, or 100% identical to SEQ ID NO: 71 or 626; or
[2937] (z)
[2938] VL1 comprises a CDR1 having an amino acid sequence at least 65%, at least 70%, at least 75%, at least 80%, at least 85%, at least 90%, at least 95%, at least 99%, or 100% identical to SEQ ID NO: 15, a CDR2 having an amino acid sequence at least 65%, at least 70%, at least 75%, at least 80%, at least 85%, at least 90%, at least 95%, at least 99%, or 100% identical to amino acid sequence LGS, and a CDR3 having an amino acid sequence at least 65%, at least 70%, at least 75%, at least 80%, at least 85%, at least 90%, at least 95%, at least 99%, or 100% identical to SEQ ID NO: 16,
[2939] VH1 comprises a CDR1 having an amino acid sequence at least 65%, at least 70%, at least 75%, at least 80%, at least 85%, at least 90%, at least 95%, at least 99%, or 100% identical to SEQ ID NO: 18, a CDR2 having an amino acid sequence at least 65%, at least 70%, at least 75%, at least 80%, at least 85%, at least 90%, at least 95%, at least 99%, or 100% identical to SEQ ID NO: 19, and a CDR3 having an amino acid sequence at least 65%, at least 70%, at least 75%, at least 80%, at least 85%, at least 90%, at least 95%, at least 99%, or 100% identical to SEQ ID NO: 20,
[2940] VL2 comprises a CDR1 having an amino acid sequence at least 65%, at least 70%, at least 75%, at least 80%, at least 85%, at least 90%, at least 95%, at least 99%, or 100% identical to SEQ ID NO: 9 or 1055, a CDR2 having an amino acid sequence at least 65%, at least 70%, at least 75%, at least 80%, at least 85%, at least 90%, at least 95%, at least 99%, or 100% identical to SEQ ID NO: 1056 or an amino acid sequence at least 65%, at least 70%, at least 75%, at least 80%, at least 85%, at least 90%, at least 95%, at least 99%, or 100% identical to amino acid sequence GAS, and a CDR3 having an amino acid sequence at least 65%, at least 70%, at least 75%, at least 80%, at least 85%, at least 90%, at least 95%, at least 99%, or 100% identical to SEQ ID NO: 10,
[2941] VH2 comprises a CDR1 having an amino acid sequence at least 65%, at least 70%, at least 75%, at least 80%, at least 85%, at least 90%, at least 95%, at least 99%, or 100% identical to SEQ ID NO: 12 or 1057, a CDR2 having an amino acid sequence at least 65%, at least 70%, at least 75%, at least 80%, at least 85%, at least 90%, at least 95%, at least 99%, or 100% identical to SEQ ID NO: 6 or 1058, and a CDR3 having an amino acid sequence at least 65%, at least 70%, at least 75%, at least 80%, at least 85%, at least 90%, at least 95%, at least 99%, or 100% identical to SEQ ID NO: 13 or 1059,
[2942] VL3 comprises a CDR1 having an amino acid sequence at least 65%, at least 70%, at least 75%, at least 80%, at least 85%, at least 90%, at least 95%, at least 99%, or 100% identical to SEQ ID NO: 65 or 627, a CDR2 having an amino acid sequence at least 65%, at least 70%, at least 75%, at least 80%, at least 85%, at least 90%, at least 95%, at least 99%, or 100% identical to SEQ ID NO: 628 or an amino acid sequence at least 65%, at least 70%, at least 75%, at least 80%, at least 85%, at least 90%, at least 95%, at least 99%, or 100% identical to amino acid sequence SDS, and a CDR3 having an amino acid sequence at least 65%, at least 70%, at least 75%, at least 80%, at least 85%, at least 90%, at least 95%, at least 99%, or 100% identical to SEQ ID NO: 66,
[2943] VH3 comprises a CDR1 having an amino acid sequence at least 65%, at least 70%, at least 75%, at least 80%, at least 85%, at least 90%, at least 95%, at least 99%, or 100% identical to SEQ ID NO: 68 or 629, a CDR2 having an amino acid sequence at least 65%, at least 70%, at least 75%, at least 80%, at least 85%, at least 90%, at least 95%, at least 99%, or 100% identical to SEQ ID NO: 69 or 630, and a CDR3 having an amino acid sequence at least 65%, at least 70%, at least 75%, at least 80%, at least 85%, at least 90%, at least 95%, at least 99%, or 100% identical to SEQ ID NO: 70 or 631,
[2944] VL4 comprises a CDR1 having an amino acid sequence at least 65%, at least 70%, at least 75%, at least 80%, at least 85%, at least 90%, at least 95%, at least 99%, or 100% identical to SEQ ID NO: 145 or 1050, a CDR2 having an amino acid sequence at least 65%, at least 70%, at least 75%, at least 80%, at least 85%, at least 90%, at least 95%, at least 99%, or 100% identical to SEQ ID NO: 1051 or an amino acid sequence at least 65%, at least 70%, at least 75%, at least 80%, at least 85%, at least 90%, at least 95%, at least 99%, or 100% identical to amino acid sequence AAS, and a CDR3 having an amino acid sequence at least 65%, at least 70%, at least 75%, at least 80%, at least 85%, at least 90%, at least 95%, at least 99%, or 100% identical to SEQ ID NO: 146 or 764, and
[2945] VH4 comprises a CDR1 having an amino acid sequence at least 65%, at least 70%, at least 75%, at least 80%, at least 85%, at least 90%, at least 95%, at least 99%, or 100% identical to SEQ ID NO: 148 or 1052, a CDR2 having an amino acid sequence at least 65%, at least 70%, at least 75%, at least 80%, at least 85%, at least 90%, at least 95%, at least 99%, or 100% identical to SEQ ID NO: 149 or 1053, and a CDR3 having an amino acid sequence at least 65%, at least 70%, at least 75%, at least 80%, at least 85%, at least 90%, at least 95%, at least 99%, or 100% identical to SEQ ID NO: 150, 765, or 1054, or
[2946] VL1 comprises an amino acid sequence at least 65%, at least 70%, at least 75%, at least 80%, at least 85%, at least 90%, at least 95%, at least 99%, or 100% identical to SEQ ID NO: 17, VH1 comprises an amino acid sequence at least 65%, at least 70%, at least 75%, at least 80%, at least 85%, at least 90%, at least 95%, at least 99%, or 100% identical to SEQ ID NO: 21 or 22, VL2 comprises an amino acid sequence at least 65%, at least 70%, at least 75%, at least 80%, at least 85%, at least 90%, at least 95%, at least 99%, or 100% identical to SEQ ID NO: 11, VH2 comprises an amino acid sequence at least 65%, at least 70%, at least 75%, at least 80%, at least 85%, at least 90%, at least 95%, at least 99%, or 100% identical to SEQ ID NO: 14, VL3 comprises an amino acid sequence at least 65%, at least 70%, at least 75%, at least 80%, at least 85%, at least 90%, at least 95%, at least 99%, or 100% identical to SEQ ID NO: 67, VH3 comprises an amino acid sequence at least 65%, at least 70%, at least 75%, at least 80%, at least 85%, at least 90%, at least 95%, at least 99%, or 100% identical to SEQ ID NO: 71 or 626, VL4 comprises an amino acid sequence at least 65%, at least 70%, at least 75%, at least 80%, at least 85%, at least 90%, at least 95%, at least 99%, or 100% identical to SEQ ID NO: 147, and VH4 comprises an amino acid sequence at least 65%, at least 70%, at least 75%, at least 80%, at least 85%, at least 90%, at least 95%, at least 99%, or 100% identical to SEQ ID NO: 151; or
[2947] (aa)
[2948] VL1 comprises a CDR1 having an amino acid sequence at least 65%, at least 70%, at least 75%, at least 80%, at least 85%, at least 90%, at least 95%, at least 99%, or 100% identical to SEQ ID NO: 15, a CDR2 having an amino acid sequence at least 65%, at least 70%, at least 75%, at least 80%, at least 85%, at least 90%, at least 95%, at least 99%, or 100% identical to amino acid sequence LGS, and a CDR3 having an amino acid sequence at least 65%, at least 70%, at least 75%, at least 80%, at least 85%, at least 90%, at least 95%, at least 99%, or 100% identical to SEQ ID NO: 16,
[2949] VH1 comprises a CDR1 having an amino acid sequence at least 65%, at least 70%, at least 75%, at least 80%, at least 85%, at least 90%, at least 95%, at least 99%, or 100% identical to SEQ ID NO: 18, a CDR2 having an amino acid sequence at least 65%, at least 70%, at least 75%, at least 80%, at least 85%, at least 90%, at least 95%, at least 99%, or 100% identical to SEQ ID NO: 19, and a CDR3 having an amino acid sequence at least 65%, at least 70%, at least 75%, at least 80%, at least 85%, at least 90%, at least 95%, at least 99%, or 100% identical to SEQ ID NO: 20,
[2950] VL2 comprises a CDR1 having an amino acid sequence at least 65%, at least 70%, at least 75%, at least 80%, at least 85%, at least 90%, at least 95%, at least 99%, or 100% identical to SEQ ID NO: 9 or 1055, a CDR2 having an amino acid sequence at least 65%, at least 70%, at least 75%, at least 80%, at least 85%, at least 90%, at least 95%, at least 99%, or 100% identical to SEQ ID NO: 1056 or an amino acid sequence at least 65%, at least 70%, at least 75%, at least 80%, at least 85%, at least 90%, at least 95%, at least 99%, or 100% identical to amino acid sequence GAS, and a CDR3 having an amino acid sequence at least 65%, at least 70%, at least 75%, at least 80%, at least 85%, at least 90%, at least 95%, at least 99%, or 100% identical to SEQ ID NO: 10,
[2951] VH2 comprises a CDR1 having an amino acid sequence at least 65%, at least 70%, at least 75%, at least 80%, at least 85%, at least 90%, at least 95%, at least 99%, or 100% identical to SEQ ID NO: 12 or 1057, a CDR2 having an amino acid sequence at least 65%, at least 70%, at least 75%, at least 80%, at least 85%, at least 90%, at least 95%, at least 99%, or 100% identical to SEQ ID NO: 6 or 1058, and a CDR3 having an amino acid sequence at least 65%, at least 70%, at least 75%, at least 80%, at least 85%, at least 90%, at least 95%, at least 99%, or 100% identical to SEQ ID NO: 13 or 1059,
[2952] VL3 comprises a CDR1 having an amino acid sequence at least 65%, at least 70%, at least 75%, at least 80%, at least 85%, at least 90%, at least 95%, at least 99%, or 100% identical to SEQ ID NO: 145 or 1050, a CDR2 having an amino acid sequence at least 65%, at least 70%, at least 75%, at least 80%, at least 85%, at least 90%, at least 95%, at least 99%, or 100% identical to SEQ ID NO: 1051 or an amino acid sequence at least 65%, at least 70%, at least 75%, at least 80%, at least 85%, at least 90%, at least 95%, at least 99%, or 100% identical to amino acid sequence AAS, and a CDR3 having an amino acid sequence at least 65%, at least 70%, at least 75%, at least 80%, at least 85%, at least 90%, at least 95%, at least 99%, or 100% identical to SEQ ID NO: 146 or 764,
[2953] VH3 comprises a CDR1 having an amino acid sequence at least 65%, at least 70%, at least 75%, at least 80%, at least 85%, at least 90%, at least 95%, at least 99%, or 100% identical to SEQ ID NO: 148 or 1052, a CDR2 having an amino acid sequence at least 65%, at least 70%, at least 75%, at least 80%, at least 85%, at least 90%, at least 95%, at least 99%, or 100% identical to SEQ ID NO: 149 or 1053, and a CDR3 having an amino acid sequence at least 65%, at least 70%, at least 75%, at least 80%, at least 85%, at least 90%, at least 95%, at least 99%, or 100% identical to SEQ ID NO: 150, 765, or 1054,
[2954] VL4 comprises a CDR1 having an amino acid sequence at least 65%, at least 70%, at least 75%, at least 80%, at least 85%, at least 90%, at least 95%, at least 99%, or 100% identical to SEQ ID NO: 65 or 627, a CDR2 having an amino acid sequence at least 65%, at least 70%, at least 75%, at least 80%, at least 85%, at least 90%, at least 95%, at least 99%, or 100% identical to SEQ ID NO: 628 or an amino acid sequence at least 65%, at least 70%, at least 75%, at least 80%, at least 85%, at least 90%, at least 95%, at least 99%, or 100% identical to amino acid sequence SDS, and a CDR3 having an amino acid sequence at least 65%, at least 70%, at least 75%, at least 80%, at least 85%, at least 90%, at least 95%, at least 99%, or 100% identical to SEQ ID NO: 66, and
[2955] VH4 comprises a CDR1 having an amino acid sequence at least 65%, at least 70%, at least 75%, at least 80%, at least 85%, at least 90%, at least 95%, at least 99%, or 100% identical to SEQ ID NO: 68 or 629, a CDR2 having an amino acid sequence at least 65%, at least 70%, at least 75%, at least 80%, at least 85%, at least 90%, at least 95%, at least 99%, or 100% identical to SEQ ID NO: 69 or 630, and a CDR3 having an amino acid sequence at least 65%, at least 70%, at least 75%, at least 80%, at least 85%, at least 90%, at least 95%, at least 99%, or 100% identical to SEQ ID NO: 70 or 631, or
[2956] VL1 comprises an amino acid sequence at least 65%, at least 70%, at least 75%, at least 80%, at least 85%, at least 90%, at least 95%, at least 99%, or 100% identical to SEQ ID NO: 17, VH1 comprises an amino acid sequence at least 65%, at least 70%, at least 75%, at least 80%, at least 85%, at least 90%, at least 95%, at least 99%, or 100% identical to SEQ ID NO: 21 or 22, VL2 comprises an amino acid sequence at least 65%, at least 70%, at least 75%, at least 80%, at least 85%, at least 90%, at least 95%, at least 99%, or 100% identical to SEQ ID NO: 11, VH2 comprises an amino acid sequence at least 65%, at least 70%, at least 75%, at least 80%, at least 85%, at least 90%, at least 95%, at least 99%, or 100% identical to SEQ ID NO: 14, VL3 comprises an amino acid sequence at least 65%, at least 70%, at least 75%, at least 80%, at least 85%, at least 90%, at least 95%, at least 99%, or 100% identical to SEQ ID NO: 147, VH3 comprises an amino acid sequence at least 65%, at least 70%, at least 75%, at least 80%, at least 85%, at least 90%, at least 95%, at least 99%, or 100% identical to SEQ ID NO: 151, VL4 comprises an amino acid sequence at least 65%, at least 70%, at least 75%, at least 80%, at least 85%, at least 90%, at least 95%, at least 99%, or 100% identical to SEQ ID NO: 67, and VH4 comprises an amino acid sequence at least 65%, at least 70%, at least 75%, at least 80%, at least 85%, at least 90%, at least 95%, at least 99%, or 100% identical to SEQ ID NO: 71 or 626; or
[2957] (bb)
[2958] VL1 comprises a CDR1 having an amino acid sequence at least 65%, at least 70%, at least 75%, at least 80%, at least 85%, at least 90%, at least 95%, at least 99%, or 100% identical to SEQ ID NO: 9 or 1055, a CDR2 having an amino acid sequence at least 65%, at least 70%, at least 75%, at least 80%, at least 85%, at least 90%, at least 95%, at least 99%, or 100% identical to SEQ ID NO: 1056 or an amino acid sequence at least 65%, at least 70%, at least 75%, at least 80%, at least 85%, at least 90%, at least 95%, at least 99%, or 100% identical to amino acid sequence GAS, and a CDR3 having an amino acid sequence at least 65%, at least 70%, at least 75%, at least 80%, at least 85%, at least 90%, at least 95%, at least 99%, or 100% identical to SEQ ID NO: 10,
[2959] VH1 comprises a CDR1 having an amino acid sequence at least 65%, at least 70%, at least 75%, at least 80%, at least 85%, at least 90%, at least 95%, at least 99%, or 100% identical to SEQ ID NO: 12 or 1057, a CDR2 having an amino acid sequence at least 65%, at least 70%, at least 75%, at least 80%, at least 85%, at least 90%, at least 95%, at least 99%, or 100% identical to SEQ ID NO: 6 or 1058, and a CDR3 having an amino acid sequence at least 65%, at least 70%, at least 75%, at least 80%, at least 85%, at least 90%, at least 95%, at least 99%, or 100% identical to SEQ ID NO: 13 or 1059,
[2960] VL2 comprises a CDR1 having an amino acid sequence at least 65%, at least 70%, at least 75%, at least 80%, at least 85%, at least 90%, at least 95%, at least 99%, or 100% identical to SEQ ID NO: 145 or 1050, a CDR2 having an amino acid sequence at least 65%, at least 70%, at least 75%, at least 80%, at least 85%, at least 90%, at least 95%, at least 99%, or 100% identical to SEQ ID NO: 1051 or an amino acid sequence at least 65%, at least 70%, at least 75%, at least 80%, at least 85%, at least 90%, at least 95%, at least 99%, or 100% identical to amino acid sequence AAS, and a CDR3 having an amino acid sequence at least 65%, at least 70%, at least 75%, at least 80%, at least 85%, at least 90%, at least 95%, at least 99%, or 100% identical to SEQ ID NO: 146 or 764,
[2961] VH2 comprises a CDR1 having an amino acid sequence at least 65%, at least 70%, at least 75%, at least 80%, at least 85%, at least 90%, at least 95%, at least 99%, or 100% identical to SEQ ID NO: 148 or 1052, a CDR2 having an amino acid sequence at least 65%, at least 70%, at least 75%, at least 80%, at least 85%, at least 90%, at least 95%, at least 99%, or 100% identical to SEQ ID NO: 149 or 1053, and a CDR3 having an amino acid sequence at least 65%, at least 70%, at least 75%, at least 80%, at least 85%, at least 90%, at least 95%, at least 99%, or 100% identical to SEQ ID NO: 150, 765, or 1054,
[2962] VL3 comprises a CDR1 having an amino acid sequence at least 65%, at least 70%, at least 75%, at least 80%, at least 85%, at least 90%, at least 95%, at least 99%, or 100% identical to SEQ ID NO: 65 or 627, a CDR2 having an amino acid sequence at least 65%, at least 70%, at least 75%, at least 80%, at least 85%, at least 90%, at least 95%, at least 99%, or 100% identical to SEQ ID NO: 628 or an amino acid sequence at least 65%, at least 70%, at least 75%, at least 80%, at least 85%, at least 90%, at least 95%, at least 99%, or 100% identical to amino acid sequence SDS, and a CDR3 having an amino acid sequence at least 65%, at least 70%, at least 75%, at least 80%, at least 85%, at least 90%, at least 95%, at least 99%, or 100% identical to SEQ ID NO: 66,
[2963] VH3 comprises a CDR1 having an amino acid sequence at least 65%, at least 70%, at least 75%, at least 80%, at least 85%, at least 90%, at least 95%, at least 99%, or 100% identical to SEQ ID NO: 68 or 629, a CDR2 having an amino acid sequence at least 65%, at least 70%, at least 75%, at least 80%, at least 85%, at least 90%, at least 95%, at least 99%, or 100% identical to SEQ ID NO: 69 or 630, and a CDR3 having an amino acid sequence at least 65%, at least 70%, at least 75%, at least 80%, at least 85%, at least 90%, at least 95%, at least 99%, or 100% identical to SEQ ID NO: 70 or 631,
[2964] VL4 comprises a CDR1 having an amino acid sequence at least 65%, at least 70%, at least 75%, at least 80%, at least 85%, at least 90%, at least 95%, at least 99%, or 100% identical to SEQ ID NO: 15, a CDR2 having an amino acid sequence at least 65%, at least 70%, at least 75%, at least 80%, at least 85%, at least 90%, at least 95%, at least 99%, or 100% identical to amino acid sequence LGS, and a CDR3 having an amino acid sequence at least 65%, at least 70%, at least 75%, at least 80%, at least 85%, at least 90%, at least 95%, at least 99%, or 100% identical to SEQ ID NO: 16, and
[2965] VH4 comprises a CDR1 having an amino acid sequence at least 65%, at least 70%, at least 75%, at least 80%, at least 85%, at least 90%, at least 95%, at least 99%, or 100% identical to SEQ ID NO: 18, a CDR2 having an amino acid sequence at least 65%, at least 70%, at least 75%, at least 80%, at least 85%, at least 90%, at least 95%, at least 99%, or 100% identical to SEQ ID NO: 19, and a CDR3 having an amino acid sequence at least 65%, at least 70%, at least 75%, at least 80%, at least 85%, at least 90%, at least 95%, at least 99%, or 100% identical to SEQ ID NO: 20, or
[2966] VL1 comprises an amino acid sequence at least 65%, at least 70%, at least 75%, at least 80%, at least 85%, at least 90%, at least 95%, at least 99%, or 100% identical to SEQ ID NO: 11, VH1 comprises an amino acid sequence at least 65%, at least 70%, at least 75%, at least 80%, at least 85%, at least 90%, at least 95%, at least 99%, or 100% identical to SEQ ID NO: 14, VL2 comprises an amino acid sequence at least 65%, at least 70%, at least 75%, at least 80%, at least 85%, at least 90%, at least 95%, at least 99%, or 100% identical to SEQ ID NO: 147, VH2 comprises an amino acid sequence at least 65%, at least 70%, at least 75%, at least 80%, at least 85%, at least 90%, at least 95%, at least 99%, or 100% identical to SEQ ID NO: 151, VL3 comprises an amino acid sequence at least 65%, at least 70%, at least 75%, at least 80%, at least 85%, at least 90%, at least 95%, at least 99%, or 100% identical to SEQ ID NO: 67, VH3 comprises an amino acid sequence at least 65%, at least 70%, at least 75%, at least 80%, at least 85%, at least 90%, at least 95%, at least 99%, or 100% identical to SEQ ID NO: 71 or 626, VL4 comprises an amino acid sequence at least 65%, at least 70%, at least 75%, at least 80%, at least 85%, at least 90%, at least 95%, at least 99%, or 100% identical to SEQ ID NO: 17, and VH4 comprises an amino acid sequence at least 65%, at least 70%, at least 75%, at least 80%, at least 85%, at least 90%, at least 95%, at least 99%, or 100% identical to SEQ ID NO: 21 or 22; or
[2967] (cc)
[2968] VL1 comprises a CDR1 having an amino acid sequence at least 65%, at least 70%, at least 75%, at least 80%, at least 85%, at least 90%, at least 95%, at least 99%, or 100% identical to SEQ ID NO: 9 or 1055, a CDR2 having an amino acid sequence at least 65%, at least 70%, at least 75%, at least 80%, at least 85%, at least 90%, at least 95%, at least 99%, or 100% identical to SEQ ID NO: 1056 or an amino acid sequence at least 65%, at least 70%, at least 75%, at least 80%, at least 85%, at least 90%, at least 95%, at least 99%, or 100% identical to amino acid sequence GAS, and a CDR3 having an amino acid sequence at least 65%, at least 70%, at least 75%, at least 80%, at least 85%, at least 90%, at least 95%, at least 99%, or 100% identical to SEQ ID NO: 10,
[2969] VH1 comprises a CDR1 having an amino acid sequence at least 65%, at least 70%, at least 75%, at least 80%, at least 85%, at least 90%, at least 95%, at least 99%, or 100% identical to SEQ ID NO: 12 or 1057, a CDR2 having an amino acid sequence at least 65%, at least 70%, at least 75%, at least 80%, at least 85%, at least 90%, at least 95%, at least 99%, or 100% identical to SEQ ID NO: 6 or 1058, and a CDR3 having an amino acid sequence at least 65%, at least 70%, at least 75%, at least 80%, at least 85%, at least 90%, at least 95%, at least 99%, or 100% identical to SEQ ID NO: 13 or 1059,
[2970] VL2 comprises a CDR1 having an amino acid sequence at least 65%, at least 70%, at least 75%, at least 80%, at least 85%, at least 90%, at least 95%, at least 99%, or 100% identical to SEQ ID NO: 145 or 1050, a CDR2 having an amino acid sequence at least 65%, at least 70%, at least 75%, at least 80%, at least 85%, at least 90%, at least 95%, at least 99%, or 100% identical to SEQ ID NO: 1051 or an amino acid sequence at least 65%, at least 70%, at least 75%, at least 80%, at least 85%, at least 90%, at least 95%, at least 99%, or 100% identical to amino acid sequence AAS, and a CDR3 having an amino acid sequence at least 65%, at least 70%, at least 75%, at least 80%, at least 85%, at least 90%, at least 95%, at least 99%, or 100% identical to SEQ ID NO: 146 or 764,
[2971] VH2 comprises a CDR1 having an amino acid sequence at least 65%, at least 70%, at least 75%, at least 80%, at least 85%, at least 90%, at least 95%, at least 99%, or 100% identical to SEQ ID NO: 148 or 1052, a CDR2 having an amino acid sequence at least 65%, at least 70%, at least 75%, at least 80%, at least 85%, at least 90%, at least 95%, at least 99%, or 100% identical to SEQ ID NO: 149 or 1053, and a CDR3 having an amino acid sequence at least 65%, at least 70%, at least 75%, at least 80%, at least 85%, at least 90%, at least 95%, at least 99%, or 100% identical to SEQ ID NO: 150, 765, or 1054,
[2972] VL3 comprises a CDR1 having an amino acid sequence at least 65%, at least 70%, at least 75%, at least 80%, at least 85%, at least 90%, at least 95%, at least 99%, or 100% identical to SEQ ID NO: 15, a CDR2 having an amino acid sequence at least 65%, at least 70%, at least 75%, at least 80%, at least 85%, at least 90%, at least 95%, at least 99%, or 100% identical to amino acid sequence LGS, and a CDR3 having an amino acid sequence at least 65%, at least 70%, at least 75%, at least 80%, at least 85%, at least 90%, at least 95%, at least 99%, or 100% identical to SEQ ID NO: 16,
[2973] VH3 comprises a CDR1 having an amino acid sequence at least 65%, at least 70%, at least 75%, at least 80%, at least 85%, at least 90%, at least 95%, at least 99%, or 100% identical to SEQ ID NO: 18, a CDR2 having an amino acid sequence at least 65%, at least 70%, at least 75%, at least 80%, at least 85%, at least 90%, at least 95%, at least 99%, or 100% identical to SEQ ID NO: 19, and a CDR3 having an amino acid sequence at least 65%, at least 70%, at least 75%, at least 80%, at least 85%, at least 90%, at least 95%, at least 99%, or 100% identical to SEQ ID NO: 20,
[2974] VL4 comprises a CDR1 having an amino acid sequence at least 65%, at least 70%, at least 75%, at least 80%, at least 85%, at least 90%, at least 95%, at least 99%, or 100% identical to SEQ ID NO: 65 or 627, a CDR2 having an amino acid sequence at least 65%, at least 70%, at least 75%, at least 80%, at least 85%, at least 90%, at least 95%, at least 99%, or 100% identical to SEQ ID NO: 628 or an amino acid sequence at least 65%, at least 70%, at least 75%, at least 80%, at least 85%, at least 90%, at least 95%, at least 99%, or 100% identical to amino acid sequence SDS, and a CDR3 having an amino acid sequence at least 65%, at least 70%, at least 75%, at least 80%, at least 85%, at least 90%, at least 95%, at least 99%, or 100% identical to SEQ ID NO: 66, and
[2975] VH4 comprises a CDR1 having an amino acid sequence at least 65%, at least 70%, at least 75%, at least 80%, at least 85%, at least 90%, at least 95%, at least 99%, or 100% identical to SEQ ID NO: 68 or 629, a CDR2 having an amino acid sequence at least 65%, at least 70%, at least 75%, at least 80%, at least 85%, at least 90%, at least 95%, at least 99%, or 100% identical to SEQ ID NO: 69 or 630, and a CDR3 having an amino acid sequence at least 65%, at least 70%, at least 75%, at least 80%, at least 85%, at least 90%, at least 95%, at least 99%, or 100% identical to SEQ ID NO: 70 or 631, or
[2976] VL1 comprises an amino acid sequence at least 65%, at least 70%, at least 75%, at least 80%, at least 85%, at least 90%, at least 95%, at least 99%, or 100% identical to SEQ ID NO: 11, VH1 comprises an amino acid sequence at least 65%, at least 70%, at least 75%, at least 80%, at least 85%, at least 90%, at least 95%, at least 99%, or 100% identical to SEQ ID NO: 14, VL2 comprises an amino acid sequence at least 65%, at least 70%, at least 75%, at least 80%, at least 85%, at least 90%, at least 95%, at least 99%, or 100% identical to SEQ ID NO: 147, VH2 comprises an amino acid sequence at least 65%, at least 70%, at least 75%, at least 80%, at least 85%, at least 90%, at least 95%, at least 99%, or 100% identical to SEQ ID NO: 151, VL3 comprises an amino acid sequence at least 65%, at least 70%, at least 75%, at least 80%, at least 85%, at least 90%, at least 95%, at least 99%, or 100% identical to SEQ ID NO: 17, VH3 comprises an amino acid sequence at least 65%, at least 70%, at least 75%, at least 80%, at least 85%, at least 90%, at least 95%, at least 99%, or 100% identical to SEQ ID NO: 21 or 22, VL4 comprises an amino acid sequence at least 65%, at least 70%, at least 75%, at least 80%, at least 85%, at least 90%, at least 95%, at least 99%, or 100% identical to SEQ ID NO: 67, and VH4 comprises an amino acid sequence at least 65%, at least 70%, at least 75%, at least 80%, at least 85%, at least 90%, at least 95%, at least 99%, or 100% identical to SEQ ID NO: 71 or 626; or
[2977] (dd)
[2978] VL1 comprises a CDR1 having an amino acid sequence at least 65%, at least 70%, at least 75%, at least 80%, at least 85%, at least 90%, at least 95%, at least 99%, or 100% identical to SEQ ID NO: 9 or 1055, a CDR2 having an amino acid sequence at least 65%, at least 70%, at least 75%, at least 80%, at least 85%, at least 90%, at least 95%, at least 99%, or 100% identical to SEQ ID NO: 1056 or an amino acid sequence at least 65%, at least 70%, at least 75%, at least 80%, at least 85%, at least 90%, at least 95%, at least 99%, or 100% identical to amino acid sequence GAS, and a CDR3 having an amino acid sequence at least 65%, at least 70%, at least 75%, at least 80%, at least 85%, at least 90%, at least 95%, at least 99%, or 100% identical to SEQ ID NO: 10,
[2979] VH1 comprises a CDR1 having an amino acid sequence at least 65%, at least 70%, at least 75%, at least 80%, at least 85%, at least 90%, at least 95%, at least 99%, or 100% identical to SEQ ID NO: 12 or 1057, a CDR2 having an amino acid sequence at least 65%, at least 70%, at least 75%, at least 80%, at least 85%, at least 90%, at least 95%, at least 99%, or 100% identical to SEQ ID NO: 6 or 1058, and a CDR3 having an amino acid sequence at least 65%, at least 70%, at least 75%, at least 80%, at least 85%, at least 90%, at least 95%, at least 99%, or 100% identical to SEQ ID NO: 13 or 1059,
[2980] VL2 comprises a CDR1 having an amino acid sequence at least 65%, at least 70%, at least 75%, at least 80%, at least 85%, at least 90%, at least 95%, at least 99%, or 100% identical to SEQ ID NO: 65 or 627, a CDR2 having an amino acid sequence at least 65%, at least 70%, at least 75%, at least 80%, at least 85%, at least 90%, at least 95%, at least 99%, or 100% identical to SEQ ID NO: 628 or an amino acid sequence at least 65%, at least 70%, at least 75%, at least 80%, at least 85%, at least 90%, at least 95%, at least 99%, or 100% identical to amino acid sequence SDS, and a CDR3 having an amino acid sequence at least 65%, at least 70%, at least 75%, at least 80%, at least 85%, at least 90%, at least 95%, at least 99%, or 100% identical to SEQ ID NO: 66,
[2981] VH2 comprises a CDR1 having an amino acid sequence at least 65%, at least 70%, at least 75%, at least 80%, at least 85%, at least 90%, at least 95%, at least 99%, or 100% identical to SEQ ID NO: 68 or 629, a CDR2 having an amino acid sequence at least 65%, at least 70%, at least 75%, at least 80%, at least 85%, at least 90%, at least 95%, at least 99%, or 100% identical to SEQ ID NO: 69 or 630, and a CDR3 having an amino acid sequence at least 65%, at least 70%, at least 75%, at least 80%, at least 85%, at least 90%, at least 95%, at least 99%, or 100% identical to SEQ ID NO: 70 or 631,
[2982] VL3 comprises a CDR1 having an amino acid sequence at least 65%, at least 70%, at least 75%, at least 80%, at least 85%, at least 90%, at least 95%, at least 99%, or 100% identical to SEQ ID NO: 145 or 1050, a CDR2 having an amino acid sequence at least 65%, at least 70%, at least 75%, at least 80%, at least 85%, at least 90%, at least 95%, at least 99%, or 100% identical to SEQ ID NO: 1051 or an amino acid sequence at least 65%, at least 70%, at least 75%, at least 80%, at least 85%, at least 90%, at least 95%, at least 99%, or 100% identical to amino acid sequence AAS, and a CDR3 having an amino acid sequence at least 65%, at least 70%, at least 75%, at least 80%, at least 85%, at least 90%, at least 95%, at least 99%, or 100% identical to SEQ ID NO: 146 or 764,
[2983] VH3 comprises a CDR1 having an amino acid sequence at least 65%, at least 70%, at least 75%, at least 80%, at least 85%, at least 90%, at least 95%, at least 99%, or 100% identical to SEQ ID NO: 148 or 1052, a CDR2 having an amino acid sequence at least 65%, at least 70%, at least 75%, at least 80%, at least 85%, at least 90%, at least 95%, at least 99%, or 100% identical to SEQ ID NO: 149 or 1053, and a CDR3 having an amino acid sequence at least 65%, at least 70%, at least 75%, at least 80%, at least 85%, at least 90%, at least 95%, at least 99%, or 100% identical to SEQ ID NO: 150, 765, or 1054,
[2984] VL4 comprises a CDR1 having an amino acid sequence at least 65%, at least 70%, at least 75%, at least 80%, at least 85%, at least 90%, at least 95%, at least 99%, or 100% identical to SEQ ID NO: 15, a CDR2 having an amino acid sequence at least 65%, at least 70%, at least 75%, at least 80%, at least 85%, at least 90%, at least 95%, at least 99%, or 100% identical to amino acid sequence LGS, and a CDR3 having an amino acid sequence at least 65%, at least 70%, at least 75%, at least 80%, at least 85%, at least 90%, at least 95%, at least 99%, or 100% identical to SEQ ID NO: 16, and
[2985] VH4 comprises a CDR1 having an amino acid sequence at least 65%, at least 70%, at least 75%, at least 80%, at least 85%, at least 90%, at least 95%, at least 99%, or 100% identical to SEQ ID NO: 18, a CDR2 having an amino acid sequence at least 65%, at least 70%, at least 75%, at least 80%, at least 85%, at least 90%, at least 95%, at least 99%, or 100% identical to SEQ ID NO: 19, and a CDR3 having an amino acid sequence at least 65%, at least 70%, at least 75%, at least 80%, at least 85%, at least 90%, at least 95%, at least 99%, or 100% identical to SEQ ID NO: 20, or
[2986] VL1 comprises an amino acid sequence at least 65%, at least 70%, at least 75%, at least 80%, at least 85%, at least 90%, at least 95%, at least 99%, or 100% identical to SEQ ID NO: 11, VH1 comprises an amino acid sequence at least 65%, at least 70%, at least 75%, at least 80%, at least 85%, at least 90%, at least 95%, at least 99%, or 100% identical to SEQ ID NO: 14, VL2 comprises an amino acid sequence at least 65%, at least 70%, at least 75%, at least 80%, at least 85%, at least 90%, at least 95%, at least 99%, or 100% identical to SEQ ID NO: 67, VH2 comprises an amino acid sequence at least 65%, at least 70%, at least 75%, at least 80%, at least 85%, at least 90%, at least 95%, at least 99%, or 100% identical to SEQ ID NO: 71 or 626, VL3 comprises an amino acid sequence at least 65%, at least 70%, at least 75%, at least 80%, at least 85%, at least 90%, at least 95%, at least 99%, or 100% identical to SEQ ID NO: 147, VH3 comprises an amino acid sequence at least 65%, at least 70%, at least 75%, at least 80%, at least 85%, at least 90%, at least 95%, at least 99%, or 100% identical to SEQ ID NO: 151, VL4 comprises an amino acid sequence at least 65%, at least 70%, at least 75%, at least 80%, at least 85%, at least 90%, at least 95%, at least 99%, or 100% identical to SEQ ID NO: 17, and VH4 comprises an amino acid sequence at least 65%, at least 70%, at least 75%, at least 80%, at least 85%, at least 90%, at least 95%, at least 99%, or 100% identical to SEQ ID NO: 21 or 22; or
[2987] (ee)
[2988] VL1 comprises a CDR1 having an amino acid sequence at least 65%, at least 70%, at least 75%, at least 80%, at least 85%, at least 90%, at least 95%, at least 99%, or 100% identical to SEQ ID NO: 9 or 1055, a CDR2 having an amino acid sequence at least 65%, at least 70%, at least 75%, at least 80%, at least 85%, at least 90%, at least 95%, at least 99%, or 100% identical to SEQ ID NO: 1056 or an amino acid sequence at least 65%, at least 70%, at least 75%, at least 80%, at least 85%, at least 90%, at least 95%, at least 99%, or 100% identical to amino acid sequence GAS, and a CDR3 having an amino acid sequence at least 65%, at least 70%, at least 75%, at least 80%, at least 85%, at least 90%, at least 95%, at least 99%, or 100% identical to SEQ ID NO: 10,
[2989] VH1 comprises a CDR1 having an amino acid sequence at least 65%, at least 70%, at least 75%, at least 80%, at least 85%, at least 90%, at least 95%, at least 99%, or 100% identical to SEQ ID NO: 12 or 1057, a CDR2 having an amino acid sequence at least 65%, at least 70%, at least 75%, at least 80%, at least 85%, at least 90%, at least 95%, at least 99%, or 100% identical to SEQ ID NO: 6 or 1058, and a CDR3 having an amino acid sequence at least 65%, at least 70%, at least 75%, at least 80%, at least 85%, at least 90%, at least 95%, at least 99%, or 100% identical to SEQ ID NO: 13 or 1059,
[2990] VL2 comprises a CDR1 having an amino acid sequence at least 65%, at least 70%, at least 75%, at least 80%, at least 85%, at least 90%, at least 95%, at least 99%, or 100% identical to SEQ ID NO: 15, a CDR2 having an amino acid sequence at least 65%, at least 70%, at least 75%, at least 80%, at least 85%, at least 90%, at least 95%, at least 99%, or 100% identical to amino acid sequence LGS, and a CDR3 having an amino acid sequence at least 65%, at least 70%, at least 75%, at least 80%, at least 85%, at least 90%, at least 95%, at least 99%, or 100% identical to SEQ ID NO: 16,
[2991] VH2 comprises a CDR1 having an amino acid sequence at least 65%, at least 70%, at least 75%, at least 80%, at least 85%, at least 90%, at least 95%, at least 99%, or 100% identical to SEQ ID NO: 18, a CDR2 having an amino acid sequence at least 65%, at least 70%, at least 75%, at least 80%, at least 85%, at least 90%, at least 95%, at least 99%, or 100% identical to SEQ ID NO: 19, and a CDR3 having an amino acid sequence at least 65%, at least 70%, at least 75%, at least 80%, at least 85%, at least 90%, at least 95%, at least 99%, or 100% identical to SEQ ID NO: 20,
[2992] VL3 comprises a CDR1 having an amino acid sequence at least 65%, at least 70%, at least 75%, at least 80%, at least 85%, at least 90%, at least 95%, at least 99%, or 100% identical to SEQ ID NO: 65 or 627, a CDR2 having an amino acid sequence at least 65%, at least 70%, at least 75%, at least 80%, at least 85%, at least 90%, at least 95%, at least 99%, or 100% identical to SEQ ID NO: 628 or an amino acid sequence at least 65%, at least 70%, at least 75%, at least 80%, at least 85%, at least 90%, at least 95%, at least 99%, or 100% identical to amino acid sequence SDS, and a CDR3 having an amino acid sequence at least 65%, at least 70%, at least 75%, at least 80%, at least 85%, at least 90%, at least 95%, at least 99%, or 100% identical to SEQ ID NO: 66,
[2993] VH3 comprises a CDR1 having an amino acid sequence at least 65%, at least 70%, at least 75%, at least 80%, at least 85%, at least 90%, at least 95%, at least 99%, or 100% identical to SEQ ID NO: 68 or 629, a CDR2 having an amino acid sequence at least 65%, at least 70%, at least 75%, at least 80%, at least 85%, at least 90%, at least 95%, at least 99%, or 100% identical to SEQ ID NO: 69 or 630, and a CDR3 having an amino acid sequence at least 65%, at least 70%, at least 75%, at least 80%, at least 85%, at least 90%, at least 95%, at least 99%, or 100% identical to SEQ ID NO: 70 or 631,
[2994] VL4 comprises a CDR1 having an amino acid sequence at least 65%, at least 70%, at least 75%, at least 80%, at least 85%, at least 90%, at least 95%, at least 99%, or 100% identical to SEQ ID NO: 145 or 1050, a CDR2 having an amino acid sequence at least 65%, at least 70%, at least 75%, at least 80%, at least 85%, at least 90%, at least 95%, at least 99%, or 100% identical to SEQ ID NO: 1051 or an amino acid sequence at least 65%, at least 70%, at least 75%, at least 80%, at least 85%, at least 90%, at least 95%, at least 99%, or 100% identical to amino acid sequence AAS, and a CDR3 having an amino acid sequence at least 65%, at least 70%, at least 75%, at least 80%, at least 85%, at least 90%, at least 95%, at least 99%, or 100% identical to SEQ ID NO: 146 or 764, and
[2995] VH4 comprises a CDR1 having an amino acid sequence at least 65%, at least 70%, at least 75%, at least 80%, at least 85%, at least 90%, at least 95%, at least 99%, or 100% identical to SEQ ID NO: 148 or 1052, a CDR2 having an amino acid sequence at least 65%, at least 70%, at least 75%, at least 80%, at least 85%, at least 90%, at least 95%, at least 99%, or 100% identical to SEQ ID NO: 149 or 1053, and a CDR3 having an amino acid sequence at least 65%, at least 70%, at least 75%, at least 80%, at least 85%, at least 90%, at least 95%, at least 99%, or 100% identical to SEQ ID NO: 150, 765, or 1054, or
[2996] VL1 comprises an amino acid sequence at least 65%, at least 70%, at least 75%, at least 80%, at least 85%, at least 90%, at least 95%, at least 99%, or 100% identical to SEQ ID NO: 11, VH1 comprises an amino acid sequence at least 65%, at least 70%, at least 75%, at least 80%, at least 85%, at least 90%, at least 95%, at least 99%, or 100% identical to SEQ ID NO: 14, VL2 comprises an amino acid sequence at least 65%, at least 70%, at least 75%, at least 80%, at least 85%, at least 90%, at least 95%, at least 99%, or 100% identical to SEQ ID NO: 17, VH2 comprises an amino acid sequence at least 65%, at least 70%, at least 75%, at least 80%, at least 85%, at least 90%, at least 95%, at least 99%, or 100% identical to SEQ ID NO: 21 or 22, VL3 comprises an amino acid sequence at least 65%, at least 70%, at least 75%, at least 80%, at least 85%, at least 90%, at least 95%, at least 99%, or 100% identical to SEQ ID NO: 67, VH3 comprises an amino acid sequence at least 65%, at least 70%, at least 75%, at least 80%, at least 85%, at least 90%, at least 95%, at least 99%, or 100% identical to SEQ ID NO: 71 or 626, VL4 comprises an amino acid sequence at least 65%, at least 70%, at least 75%, at least 80%, at least 85%, at least 90%, at least 95%, at least 99%, or 100% identical to SEQ ID NO: 147, and VH4 comprises an amino acid sequence at least 65%, at least 70%, at least 75%, at least 80%, at least 85%, at least 90%, at least 95%, at least 99%, or 100% identical to SEQ ID NO: 151; or
[2997] (ff)
[2998] VL1 comprises a CDR1 having an amino acid sequence at least 65%, at least 70%, at least 75%, at least 80%, at least 85%, at least 90%, at least 95%, at least 99%, or 100% identical to SEQ ID NO: 9 or 1055, a CDR2 having an amino acid sequence at least 65%, at least 70%, at least 75%, at least 80%, at least 85%, at least 90%, at least 95%, at least 99%, or 100% identical to SEQ ID NO: 1056 or an amino acid sequence at least 65%, at least 70%, at least 75%, at least 80%, at least 85%, at least 90%, at least 95%, at least 99%, or 100% identical to amino acid sequence GAS, and a CDR3 having an amino acid sequence at least 65%, at least 70%, at least 75%, at least 80%, at least 85%, at least 90%, at least 95%, at least 99%, or 100% identical to SEQ ID NO: 10,
[2999] VH1 comprises a CDR1 having an amino acid sequence at least 65%, at least 70%, at least 75%, at least 80%, at least 85%, at least 90%, at least 95%, at least 99%, or 100% identical to SEQ ID NO: 12 or 1057, a CDR2 having an amino acid sequence at least 65%, at least 70%, at least 75%, at least 80%, at least 85%, at least 90%, at least 95%, at least 99%, or 100% identical to SEQ ID NO: 6 or 1058, and a CDR3 having an amino acid sequence at least 65%, at least 70%, at least 75%, at least 80%, at least 85%, at least 90%, at least 95%, at least 99%, or 100% identical to SEQ ID NO: 13 or 1059,
[3000] VL2 comprises a CDR1 having an amino acid sequence at least 65%, at least 70%, at least 75%, at least 80%, at least 85%, at least 90%, at least 95%, at least 99%, or 100% identical to SEQ ID NO: 65 or 627, a CDR2 having an amino acid sequence at least 65%, at least 70%, at least 75%, at least 80%, at least 85%, at least 90%, at least 95%, at least 99%, or 100% identical to SEQ ID NO: 628 or an amino acid sequence at least 65%, at least 70%, at least 75%, at least 80%, at least 85%, at least 90%, at least 95%, at least 99%, or 100% identical to amino acid sequence SDS, and a CDR3 having an amino acid sequence at least 65%, at least 70%, at least 75%, at least 80%, at least 85%, at least 90%, at least 95%, at least 99%, or 100% identical to SEQ ID NO: 66,
[3001] VH2 comprises a CDR1 having an amino acid sequence at least 65%, at least 70%, at least 75%, at least 80%, at least 85%, at least 90%, at least 95%, at least 99%, or 100% identical to SEQ ID NO: 68 or 629, a CDR2 having an amino acid sequence at least 65%, at least 70%, at least 75%, at least 80%, at least 85%, at least 90%, at least 95%, at least 99%, or 100% identical to SEQ ID NO: 69 or 630, and a CDR3 having an amino acid sequence at least 65%, at least 70%, at least 75%, at least 80%, at least 85%, at least 90%, at least 95%, at least 99%, or 100% identical to SEQ ID NO: 70 or 631,
[3002] VL3 comprises a CDR1 having an amino acid sequence at least 65%, at least 70%, at least 75%, at least 80%, at least 85%, at least 90%, at least 95%, at least 99%, or 100% identical to SEQ ID NO: 145 or 1050, a CDR2 having an amino acid sequence at least 65%, at least 70%, at least 75%, at least 80%, at least 85%, at least 90%, at least 95%, at least 99%, or 100% identical to SEQ ID NO: 1051 or an amino acid sequence at least 65%, at least 70%, at least 75%, at least 80%, at least 85%, at least 90%, at least 95%, at least 99%, or 100% identical to amino acid sequence AAS, and a CDR3 having an amino acid sequence at least 65%, at least 70%, at least 75%, at least 80%, at least 85%, at least 90%, at least 95%, at least 99%, or 100% identical to SEQ ID NO: 146 or 764,
[3003] VH3 comprises a CDR1 having an amino acid sequence at least 65%, at least 70%, at least 75%, at least 80%, at least 85%, at least 90%, at least 95%, at least 99%, or 100% identical to SEQ ID NO: 148 or 1052, a CDR2 having an amino acid sequence at least 65%, at least 70%, at least 75%, at least 80%, at least 85%, at least 90%, at least 95%, at least 99%, or 100% identical to SEQ ID NO: 149 or 1053, and a CDR3 having an amino acid sequence at least 65%, at least 70%, at least 75%, at least 80%, at least 85%, at least 90%, at least 95%, at least 99%, or 100% identical to SEQ ID NO: 150, 765, or 1054,
[3004] VL4 comprises a CDR1 having an amino acid sequence at least 65%, at least 70%, at least 75%, at least 80%, at least 85%, at least 90%, at least 95%, at least 99%, or 100% identical to SEQ ID NO: 152 or 1045, a CDR2 having an amino acid sequence at least 65%, at least 70%, at least 75%, at least 80%, at least 85%, at least 90%, at least 95%, at least 99%, or 100% identical to SEQ ID NO: 1046 or an amino acid sequence at least 65%, at least 70%, at least 75%, at least 80%, at least 85%, at least 90%, at least 95%, at least 99%, or 100% identical to amino acid sequence GAS, and a CDR3 having an amino acid sequence at least 65%, at least 70%, at least 75%, at least 80%, at least 85%, at least 90%, at least 95%, at least 99%, or 100% identical to SEQ ID NO: 153 or 766, and
[3005] VH4 comprises a CDR1 having an amino acid sequence at least 65%, at least 70%, at least 75%, at least 80%, at least 85%, at least 90%, at least 95%, at least 99%, or 100% identical to SEQ ID NO: 155 or 1047, a CDR2 having an amino acid sequence at least 65%, at least 70%, at least 75%, at least 80%, at least 85%, at least 90%, at least 95%, at least 99%, or 100% identical to SEQ ID NO: 156 or 1048, and a CDR3 having an amino acid sequence at least 65%, at least 70%, at least 75%, at least 80%, at least 85%, at least 90%, at least 95%, at least 99%, or 100% identical to SEQ ID NO: 157, 767, or 1049, or
[3006] VL1 comprises an amino acid sequence at least 65%, at least 70%, at least 75%, at least 80%, at least 85%, at least 90%, at least 95%, at least 99%, or 100% identical to SEQ ID NO: 11, VH1 comprises an amino acid sequence at least 65%, at least 70%, at least 75%, at least 80%, at least 85%, at least 90%, at least 95%, at least 99%, or 100% identical to SEQ ID NO: 14, VL2 comprises an amino acid sequence at least 65%, at least 70%, at least 75%, at least 80%, at least 85%, at least 90%, at least 95%, at least 99%, or 100% identical to SEQ ID NO: 67, VH2 comprises an amino acid sequence at least 65%, at least 70%, at least 75%, at least 80%, at least 85%, at least 90%, at least 95%, at least 99%, or 100% identical to SEQ ID NO: 71 or 626, VL3 comprises an amino acid sequence at least 65%, at least 70%, at least 75%, at least 80%, at least 85%, at least 90%, at least 95%, at least 99%, or 100% identical to SEQ ID NO: 147, VH3 comprises an amino acid sequence at least 65%, at least 70%, at least 75%, at least 80%, at least 85%, at least 90%, at least 95%, at least 99%, or 100% identical to SEQ ID NO: 151, VL4 comprises an amino acid sequence at least 65%, at least 70%, at least 75%, at least 80%, at least 85%, at least 90%, at least 95%, at least 99%, or 100% identical to SEQ ID NO: 154, and VH4 comprises an amino acid sequence at least 65%, at least 70%, at least 75%, at least 80%, at least 85%, at least 90%, at least 95%, at least 99%, or 100% identical to SEQ ID NO: 158; or
[3007] (gg)
[3008] VL1 comprises a CDR1 having an amino acid sequence at least 65%, at least 70%, at least 75%, at least 80%, at least 85%, at least 90%, at least 95%, at least 99%, or 100% identical to SEQ ID NO: 9 or 1055, a CDR2 having an amino acid sequence at least 65%, at least 70%, at least 75%, at least 80%, at least 85%, at least 90%, at least 95%, at least 99%, or 100% identical to SEQ ID NO: 1056 or an amino acid sequence at least 65%, at least 70%, at least 75%, at least 80%, at least 85%, at least 90%, at least 95%, at least 99%, or 100% identical to amino acid sequence GAS, and a CDR3 having an amino acid sequence at least 65%, at least 70%, at least 75%, at least 80%, at least 85%, at least 90%, at least 95%, at least 99%, or 100% identical to SEQ ID NO: 10,
[3009] VH1 comprises a CDR1 having an amino acid sequence at least 65%, at least 70%, at least 75%, at least 80%, at least 85%, at least 90%, at least 95%, at least 99%, or 100% identical to SEQ ID NO: 12 or 1057, a CDR2 having an amino acid sequence at least 65%, at least 70%, at least 75%, at least 80%, at least 85%, at least 90%, at least 95%, at least 99%, or 100% identical to SEQ ID NO: 6 or 1058, and a CDR3 having an amino acid sequence at least 65%, at least 70%, at least 75%, at least 80%, at least 85%, at least 90%, at least 95%, at least 99%, or 100% identical to SEQ ID NO: 13 or 1059,
[3010] VL2 comprises a CDR1 having an amino acid sequence at least 65%, at least 70%, at least 75%, at least 80%, at least 85%, at least 90%, at least 95%, at least 99%, or 100% identical to SEQ ID NO: 152 or 1045, a CDR2 having an amino acid sequence at least 65%, at least 70%, at least 75%, at least 80%, at least 85%, at least 90%, at least 95%, at least 99%, or 100% identical to SEQ ID NO: 1046 or an amino acid sequence at least 65%, at least 70%, at least 75%, at least 80%, at least 85%, at least 90%, at least 95%, at least 99%, or 100% identical to amino acid sequence GAS, and a CDR3 having an amino acid sequence at least 65%, at least 70%, at least 75%, at least 80%, at least 85%, at least 90%, at least 95%, at least 99%, or 100% identical to SEQ ID NO: 153 or 766,
[3011] VH2 comprises a CDR1 having an amino acid sequence at least 65%, at least 70%, at least 75%, at least 80%, at least 85%, at least 90%, at least 95%, at least 99%, or 100% identical to SEQ ID NO: 155 or 1047, a CDR2 having an amino acid sequence at least 65%, at least 70%, at least 75%, at least 80%, at least 85%, at least 90%, at least 95%, at least 99%, or 100% identical to SEQ ID NO: 156 or 1048, and a CDR3 having an amino acid sequence at least 65%, at least 70%, at least 75%, at least 80%, at least 85%, at least 90%, at least 95%, at least 99%, or 100% identical to SEQ ID NO: 157, 767, or 1049,
[3012] VL3 comprises a CDR1 having an amino acid sequence at least 65%, at least 70%, at least 75%, at least 80%, at least 85%, at least 90%, at least 95%, at least 99%, or 100% identical to SEQ ID NO: 65 or 627, a CDR2 having an amino acid sequence at least 65%, at least 70%, at least 75%, at least 80%, at least 85%, at least 90%, at least 95%, at least 99%, or 100% identical to SEQ ID NO: 628 or an amino acid sequence at least 65%, at least 70%, at least 75%, at least 80%, at least 85%, at least 90%, at least 95%, at least 99%, or 100% identical to amino acid sequence SDS, and a CDR3 having an amino acid sequence at least 65%, at least 70%, at least 75%, at least 80%, at least 85%, at least 90%, at least 95%, at least 99%, or 100% identical to SEQ ID NO: 66,
[3013] VH3 comprises a CDR1 having an amino acid sequence at least 65%, at least 70%, at least 75%, at least 80%, at least 85%, at least 90%, at least 95%, at least 99%, or 100% identical to SEQ ID NO: 68 or 629, a CDR2 having an amino acid sequence at least 65%, at least 70%, at least 75%, at least 80%, at least 85%, at least 90%, at least 95%, at least 99%, or 100% identical to SEQ ID NO: 69 or 630, and a CDR3 having an amino acid sequence at least 65%, at least 70%, at least 75%, at least 80%, at least 85%, at least 90%, at least 95%, at least 99%, or 100% identical to SEQ ID NO: 70 or 631,
[3014] VL4 comprises a CDR1 having an amino acid sequence at least 65%, at least 70%, at least 75%, at least 80%, at least 85%, at least 90%, at least 95%, at least 99%, or 100% identical to SEQ ID NO: 145 or 1050, a CDR2 having an amino acid sequence at least 65%, at least 70%, at least 75%, at least 80%, at least 85%, at least 90%, at least 95%, at least 99%, or 100% identical to SEQ ID NO: 1051 or an amino acid sequence at least 65%, at least 70%, at least 75%, at least 80%, at least 85%, at least 90%, at least 95%, at least 99%, or 100% identical to amino acid sequence AAS, and a CDR3 having an amino acid sequence at least 65%, at least 70%, at least 75%, at least 80%, at least 85%, at least 90%, at least 95%, at least 99%, or 100% identical to SEQ ID NO: 146 or 764, and
[3015] VH4 comprises a CDR1 having an amino acid sequence at least 65%, at least 70%, at least 75%, at least 80%, at least 85%, at least 90%, at least 95%, at least 99%, or 100% identical to SEQ ID NO: 148 or 1052, a CDR2 having an amino acid sequence at least 65%, at least 70%, at least 75%, at least 80%, at least 85%, at least 90%, at least 95%, at least 99%, or 100% identical to SEQ ID NO: 149 or 1053, and a CDR3 having an amino acid sequence at least 65%, at least 70%, at least 75%, at least 80%, at least 85%, at least 90%, at least 95%, at least 99%, or 100% identical to SEQ ID NO: 150, 765, or 1054, or
[3016] VL1 comprises an amino acid sequence at least 65%, at least 70%, at least 75%, at least 80%, at least 85%, at least 90%, at least 95%, at least 99%, or 100% identical to SEQ ID NO: 11, VH1 comprises an amino acid sequence at least 65%, at least 70%, at least 75%, at least 80%, at least 85%, at least 90%, at least 95%, at least 99%, or 100% identical to SEQ ID NO: 14, VL2 comprises an amino acid sequence at least 65%, at least 70%, at least 75%, at least 80%, at least 85%, at least 90%, at least 95%, at least 99%, or 100% identical to SEQ ID NO: 154, VH2 comprises an amino acid sequence at least 65%, at least 70%, at least 75%, at least 80%, at least 85%, at least 90%, at least 95%, at least 99%, or 100% identical to SEQ ID NO: 158, VL3 comprises an amino acid sequence at least 65%, at least 70%, at least 75%, at least 80%, at least 85%, at least 90%, at least 95%, at least 99%, or 100% identical to SEQ ID NO: 67, VH3 comprises an amino acid sequence at least 65%, at least 70%, at least 75%, at least 80%, at least 85%, at least 90%, at least 95%, at least 99%, or 100% identical to SEQ ID NO: 71 or 626, VL4 comprises an amino acid sequence at least 65%, at least 70%, at least 75%, at least 80%, at least 85%, at least 90%, at least 95%, at least 99%, or 100% identical to SEQ ID NO: 147, and VH4 comprises an amino acid sequence at least 65%, at least 70%, at least 75%, at least 80%, at least 85%, at least 90%, at least 95%, at least 99%, or 100% identical to SEQ ID NO: 151; or
[3017] (hh)
[3018] VL1 comprises the same light chain variable region as VL3, VH1 comprises the same heavy chain variable region as VH3, VL2 comprises the same light chain variable region as VL4, and VH2 comprises the same heavy chain variable region as VH4, and
[3019] wherein:
[3020] VL1 comprises a CDR1 having an amino acid sequence at least 65%, at least 70%, at least 75%, at least 80%, at least 85%, at least 90%, at least 95%, at least 99%, or 100% identical to SEQ ID NO: 152 or 1045, a CDR2 having an amino acid sequence at least 65%, at least 70%, at least 75%, at least 80%, at least 85%, at least 90%, at least 95%, at least 99%, or 100% identical to SEQ ID NO: 1046 or an amino acid sequence at least 65%, at least 70%, at least 75%, at least 80%, at least 85%, at least 90%, at least 95%, at least 99%, or 100% identical to amino acid sequence GAS, and a CDR3 having an amino acid sequence at least 65%, at least 70%, at least 75%, at least 80%, at least 85%, at least 90%, at least 95%, at least 99%, or 100% identical to SEQ ID NO: 153 or 766,
[3021] VH1 comprises a CDR1 having an amino acid sequence at least 65%, at least 70%, at least 75%, at least 80%, at least 85%, at least 90%, at least 95%, at least 99%, or 100% identical to SEQ ID NO: 155 or 1047, a CDR2 having an amino acid sequence at least 65%, at least 70%, at least 75%, at least 80%, at least 85%, at least 90%, at least 95%, at least 99%, or 100% identical to SEQ ID NO: 156 or 1048, and a CDR3 having an amino acid sequence at least 65%, at least 70%, at least 75%, at least 80%, at least 85%, at least 90%, at least 95%, at least 99%, or 100% identical to SEQ ID NO: 157, 767, or 1049,
[3022] VL2 comprises a CDR1 having an amino acid sequence at least 65%, at least 70%, at least 75%, at least 80%, at least 85%, at least 90%, at least 95%, at least 99%, or 100% identical to SEQ ID NO: 145 or 1050, a CDR2 having an amino acid sequence at least 65%, at least 70%, at least 75%, at least 80%, at least 85%, at least 90%, at least 95%, at least 99%, or 100% identical to SEQ ID NO: 1051 or an amino acid sequence at least 65%, at least 70%, at least 75%, at least 80%, at least 85%, at least 90%, at least 95%, at least 99%, or 100% identical to amino acid sequence AAS, and a CDR3 having an amino acid sequence at least 65%, at least 70%, at least 75%, at least 80%, at least 85%, at least 90%, at least 95%, at least 99%, or 100% identical to SEQ ID NO: 146 or 764,
[3023] VH2 comprises a CDR1 having an amino acid sequence at least 65%, at least 70%, at least 75%, at least 80%, at least 85%, at least 90%, at least 95%, at least 99%, or 100% identical to SEQ ID NO: 148 or 1052, a CDR2 having an amino acid sequence at least 65%, at least 70%, at least 75%, at least 80%, at least 85%, at least 90%, at least 95%, at least 99%, or 100% identical to SEQ ID NO: 149 or 1053, and a CDR3 having an amino acid sequence at least 65%, at least 70%, at least 75%, at least 80%, at least 85%, at least 90%, at least 95%, at least 99%, or 100% identical to SEQ ID NO: 150, 765, or 1054,
[3024] VL3 comprises a CDR1 having an amino acid sequence at least 65%, at least 70%, at least 75%, at least 80%, at least 85%, at least 90%, at least 95%, at least 99%, or 100% identical to SEQ ID NO: 152 or 1045, a CDR2 having an amino acid sequence at least 65%, at least 70%, at least 75%, at least 80%, at least 85%, at least 90%, at least 95%, at least 99%, or 100% identical to SEQ ID NO: 1046 or an amino acid sequence at least 65%, at least 70%, at least 75%, at least 80%, at least 85%, at least 90%, at least 95%, at least 99%, or 100% identical to amino acid sequence GAS, and a CDR3 having an amino acid sequence at least 65%, at least 70%, at least 75%, at least 80%, at least 85%, at least 90%, at least 95%, at least 99%, or 100% identical to SEQ ID NO: 153 or 766,
[3025] VH3 comprises a CDR1 having an amino acid sequence at least 65%, at least 70%, at least 75%, at least 80%, at least 85%, at least 90%, at least 95%, at least 99%, or 100% identical to SEQ ID NO: 155 or 1047, a CDR2 having an amino acid sequence at least 65%, at least 70%, at least 75%, at least 80%, at least 85%, at least 90%, at least 95%, at least 99%, or 100% identical to SEQ ID NO: 156 or 1048, and a CDR3 having an amino acid sequence at least 65%, at least 70%, at least 75%, at least 80%, at least 85%, at least 90%, at least 95%, at least 99%, or 100% identical to SEQ ID NO: 157, 767, or 1049,
[3026] VL4 comprises a CDR1 having an amino acid sequence at least 65%, at least 70%, at least 75%, at least 80%, at least 85%, at least 90%, at least 95%, at least 99%, or 100% identical to SEQ ID NO: 145 or 1050, a CDR2 having an amino acid sequence at least 65%, at least 70%, at least 75%, at least 80%, at least 85%, at least 90%, at least 95%, at least 99%, or 100% identical to SEQ ID NO: 1051 or an amino acid sequence at least 65%, at least 70%, at least 75%, at least 80%, at least 85%, at least 90%, at least 95%, at least 99%, or 100% identical to amino acid sequence AAS, and a CDR3 having an amino acid sequence at least 65%, at least 70%, at least 75%, at least 80%, at least 85%, at least 90%, at least 95%, at least 99%, or 100% identical to SEQ ID NO: 146 or 764, and
[3027] VH4 comprises a CDR1 having an amino acid sequence at least 65%, at least 70%, at least 75%, at least 80%, at least 85%, at least 90%, at least 95%, at least 99%, or 100% identical to SEQ ID NO: 148 or 1052, a CDR2 having an amino acid sequence at least 65%, at least 70%, at least 75%, at least 80%, at least 85%, at least 90%, at least 95%, at least 99%, or 100% identical to SEQ ID NO: 149 or 1053, and a CDR3 having an amino acid sequence at least 65%, at least 70%, at least 75%, at least 80%, at least 85%, at least 90%, at least 95%, at least 99%, or 100% identical to SEQ ID NO: 150, 765, or 1054, or
[3028] wherein:
[3029] VL1 and VL3 each comprise an amino acid sequence at least 65%, at least 70%, at least 75%, at least 80%, at least 85%, at least 90%, at least 95%, at least 99%, or 100% identical to SEQ ID NO: 154, VH1 and VH3 each comprise an amino acid sequence at least 65%, at least 70%, at least 75%, at least 80%, at least 85%, at least 90%, at least 95%, at least 99%, or 100% identical to SEQ ID NO: 158, VL2 and VL4 each comprise an amino acid sequence at least 65%, at least 70%, at least 75%, at least 80%, at least 85%, at least 90%, at least 95%, at least 99%, or 100% identical to SEQ ID NO: 147, and VH2 and VH4 each comprise an amino acid sequence at least 65%, at least 70%, at least 75%, at least 80%, at least 85%, at least 90%, at least 95%, at least 99%, or 100% identical to SEQ ID NO: 151; or
[3030] (ii)
[3031] VL1 comprises the same light chain variable region as VL3, VH1 comprises the same heavy chain variable region as VH3, VL2 comprises the same light chain variable region as VL4, and VH2 comprises the same heavy chain variable region as VH4, and
[3032] wherein:
[3033] VL1 comprises a CDR1 having an amino acid sequence at least 65%, at least 70%, at least 75%, at least 80%, at least 85%, at least 90%, at least 95%, at least 99%, or 100% identical to SEQ ID NO: 9 or 1055, a CDR2 having an amino acid sequence at least 65%, at least 70%, at least 75%, at least 80%, at least 85%, at least 90%, at least 95%, at least 99%, or 100% identical to SEQ ID NO: 1056 or an amino acid sequence at least 65%, at least 70%, at least 75%, at least 80%, at least 85%, at least 90%, at least 95%, at least 99%, or 100% identical to amino acid sequence GAS, and a CDR3 having an amino acid sequence at least 65%, at least 70%, at least 75%, at least 80%, at least 85%, at least 90%, at least 95%, at least 99%, or 100% identical to SEQ ID NO: 10,
[3034] VH1 comprises a CDR1 having an amino acid sequence at least 65%, at least 70%, at least 75%, at least 80%, at least 85%, at least 90%, at least 95%, at least 99%, or 100% identical to SEQ ID NO: 12 or 1057, a CDR2 having an amino acid sequence at least 65%, at least 70%, at least 75%, at least 80%, at least 85%, at least 90%, at least 95%, at least 99%, or 100% identical to SEQ ID NO: 6 or 1058, and a CDR3 having an amino acid sequence at least 65%, at least 70%, at least 75%, at least 80%, at least 85%, at least 90%, at least 95%, at least 99%, or 100% identical to SEQ ID NO: 13 or 1059,
[3035] VL2 comprises a CDR1 having an amino acid sequence at least 65%, at least 70%, at least 75%, at least 80%, at least 85%, at least 90%, at least 95%, at least 99%, or 100% identical to SEQ ID NO: 145 or 1050, a CDR2 having an amino acid sequence at least 65%, at least 70%, at least 75%, at least 80%, at least 85%, at least 90%, at least 95%, at least 99%, or 100% identical to SEQ ID NO: 1051 or an amino acid sequence at least 65%, at least 70%, at least 75%, at least 80%, at least 85%, at least 90%, at least 95%, at least 99%, or 100% identical to amino acid sequence AAS, and a CDR3 having an amino acid sequence at least 65%, at least 70%, at least 75%, at least 80%, at least 85%, at least 90%, at least 95%, at least 99%, or 100% identical to SEQ ID NO: 146 or 764,
[3036] VH2 comprises a CDR1 having an amino acid sequence at least 65%, at least 70%, at least 75%, at least 80%, at least 85%, at least 90%, at least 95%, at least 99%, or 100% identical to SEQ ID NO: 148 or 1052, a CDR2 having an amino acid sequence at least 65%, at least 70%, at least 75%, at least 80%, at least 85%, at least 90%, at least 95%, at least 99%, or 100% identical to SEQ ID NO: 149 or 1053, and a CDR3 having an amino acid sequence at least 65%, at least 70%, at least 75%, at least 80%, at least 85%, at least 90%, at least 95%, at least 99%, or 100% identical to SEQ ID NO: 150, 765, or 1054,
[3037] VL3 comprises a CDR1 having an amino acid sequence at least 65%, at least 70%, at least 75%, at least 80%, at least 85%, at least 90%, at least 95%, at least 99%, or 100% identical to SEQ ID NO: 9 or 1055, a CDR2 having an amino acid sequence at least 65%, at least 70%, at least 75%, at least 80%, at least 85%, at least 90%, at least 95%, at least 99%, or 100% identical to SEQ ID NO: 1056 or an amino acid sequence at least 65%, at least 70%, at least 75%, at least 80%, at least 85%, at least 90%, at least 95%, at least 99%, or 100% identical to amino acid sequence GAS, and a CDR3 having an amino acid sequence at least 65%, at least 70%, at least 75%, at least 80%, at least 85%, at least 90%, at least 95%, at least 99%, or 100% identical to SEQ ID NO: 10,
[3038] VH3 comprises a CDR1 having an amino acid sequence at least 65%, at least 70%, at least 75%, at least 80%, at least 85%, at least 90%, at least 95%, at least 99%, or 100% identical to SEQ ID NO: 12 or 1057, a CDR2 having an amino acid sequence at least 65%, at least 70%, at least 75%, at least 80%, at least 85%, at least 90%, at least 95%, at least 99%, or 100% identical to SEQ ID NO: 6 or 1058, and a CDR3 having an amino acid sequence at least 65%, at least 70%, at least 75%, at least 80%, at least 85%, at least 90%, at least 95%, at least 99%, or 100% identical to SEQ ID NO: 13 or 1059,
[3039] VL4 comprises a CDR1 having an amino acid sequence at least 65%, at least 70%, at least 75%, at least 80%, at least 85%, at least 90%, at least 95%, at least 99%, or 100% identical to SEQ ID NO: 145 or 1050, a CDR2 having an amino acid sequence at least 65%, at least 70%, at least 75%, at least 80%, at least 85%, at least 90%, at least 95%, at least 99%, or 100% identical to SEQ ID NO: 1051 or an amino acid sequence at least 65%, at least 70%, at least 75%, at least 80%, at least 85%, at least 90%, at least 95%, at least 99%, or 100% identical to amino acid sequence AAS, and a CDR3 having an amino acid sequence at least 65%, at least 70%, at least 75%, at least 80%, at least 85%, at least 90%, at least 95%, at least 99%, or 100% identical to SEQ ID NO: 146 or 764, and
[3040] VH4 comprises a CDR1 having an amino acid sequence at least 65%, at least 70%, at least 75%, at least 80%, at least 85%, at least 90%, at least 95%, at least 99%, or 100% identical to SEQ ID NO: 148 or 1052, a CDR2 having an amino acid sequence at least 65%, at least 70%, at least 75%, at least 80%, at least 85%, at least 90%, at least 95%, at least 99%, or 100% identical to SEQ ID NO: 149 or 1053, and a CDR3 having an amino acid sequence at least 65%, at least 70%, at least 75%, at least 80%, at least 85%, at least 90%, at least 95%, at least 99%, or 100% identical to SEQ ID NO: 150, 765, or 1054, or
[3041] wherein:
[3042] VL1 and VL3 each comprise an amino acid sequence at least 65%, at least 70%, at least 75%, at least 80%, at least 85%, at least 90%, at least 95%, at least 99%, or 100% identical to SEQ ID NO: 11, VH1 and VH3 each comprise an amino acid sequence at least 65%, at least 70%, at least 75%, at least 80%, at least 85%, at least 90%, at least 95%, at least 99%, or 100% identical to SEQ ID NO: 14, VL2 and VL4 each comprise an amino acid sequence at least 65%, at least 70%, at least 75%, at least 80%, at least 85%, at least 90%, at least 95%, at least 99%, or 100% identical to SEQ ID NO: 147, and VH2 and VH4 each comprise an amino acid sequence at least 65%, at least 70%, at least 75%, at least 80%, at least 85%, at least 90%, at least 95%, at least 99%, or 100% identical to SEQ ID NO: 151; or
[3043] (jj)
[3044] VL2 comprises the same light chain variable region as VL3, and VH2 comprises the same heavy chain variable region as VH3, and
[3045] wherein:
[3046] VL1 comprises a CDR1 having an amino acid sequence at least 65%, at least 70%, at least 75%, at least 80%, at least 85%, at least 90%, at least 95%, at least 99%, or 100% identical to SEQ ID NO: 9 or 1055, a CDR2 having an amino acid sequence at least 65%, at least 70%, at least 75%, at least 80%, at least 85%, at least 90%, at least 95%, at least 99%, or 100% identical to SEQ ID NO: 1056 or an amino acid sequence at least 65%, at least 70%, at least 75%, at least 80%, at least 85%, at least 90%, at least 95%, at least 99%, or 100% identical to amino acid sequence GAS, and a CDR3 having an amino acid sequence at least 65%, at least 70%, at least 75%, at least 80%, at least 85%, at least 90%, at least 95%, at least 99%, or 100% identical to SEQ ID NO: 10,
[3047] VH1 comprises a CDR1 having an amino acid sequence at least 65%, at least 70%, at least 75%, at least 80%, at least 85%, at least 90%, at least 95%, at least 99%, or 100% identical to SEQ ID NO: 12 or 1057, a CDR2 having an amino acid sequence at least 65%, at least 70%, at least 75%, at least 80%, at least 85%, at least 90%, at least 95%, at least 99%, or 100% identical to SEQ ID NO: 6 or 1058, and a CDR3 having an amino acid sequence at least 65%, at least 70%, at least 75%, at least 80%, at least 85%, at least 90%, at least 95%, at least 99%, or 100% identical to SEQ ID NO: 13 or 1059,
[3048] VL2 comprises a CDR1 having an amino acid sequence at least 65%, at least 70%, at least 75%, at least 80%, at least 85%, at least 90%, at least 95%, at least 99%, or 100% identical to SEQ ID NO: 145 or 1050, a CDR2 having an amino acid sequence at least 65%, at least 70%, at least 75%, at least 80%, at least 85%, at least 90%, at least 95%, at least 99%, or 100% identical to SEQ ID NO: 1051 or an amino acid sequence at least 65%, at least 70%, at least 75%, at least 80%, at least 85%, at least 90%, at least 95%, at least 99%, or 100% identical to amino acid sequence AAS, and a CDR3 having an amino acid sequence at least 65%, at least 70%, at least 75%, at least 80%, at least 85%, at least 90%, at least 95%, at least 99%, or 100% identical to SEQ ID NO: 146 or 764,
[3049] VH2 comprises a CDR1 having an amino acid sequence at least 65%, at least 70%, at least 75%, at least 80%, at least 85%, at least 90%, at least 95%, at least 99%, or 100% identical to SEQ ID NO: 148 or 1052, a CDR2 having an amino acid sequence at least 65%, at least 70%, at least 75%, at least 80%, at least 85%, at least 90%, at least 95%, at least 99%, or 100% identical to SEQ ID NO: 149 or 1053, and a CDR3 having an amino acid sequence at least 65%, at least 70%, at least 75%, at least 80%, at least 85%, at least 90%, at least 95%, at least 99%, or 100% identical to SEQ ID NO: 150, 765, or 1054,
[3050] VL3 comprises a CDR1 having an amino acid sequence at least 65%, at least 70%, at least 75%, at least 80%, at least 85%, at least 90%, at least 95%, at least 99%, or 100% identical to SEQ ID NO: 145 or 1050, a CDR2 having an amino acid sequence at least 65%, at least 70%, at least 75%, at least 80%, at least 85%, at least 90%, at least 95%, at least 99%, or 100% identical to SEQ ID NO: 1051 or an amino acid sequence at least 65%, at least 70%, at least 75%, at least 80%, at least 85%, at least 90%, at least 95%, at least 99%, or 100% identical to amino acid sequence AAS, and a CDR3 having an amino acid sequence at least 65%, at least 70%, at least 75%, at least 80%, at least 85%, at least 90%, at least 95%, at least 99%, or 100% identical to SEQ ID NO: 146 or 764,
[3051] VH3 comprises a CDR1 having an amino acid sequence at least 65%, at least 70%, at least 75%, at least 80%, at least 85%, at least 90%, at least 95%, at least 99%, or 100% identical to SEQ ID NO: 148 or 1052, a CDR2 having an amino acid sequence at least 65%, at least 70%, at least 75%, at least 80%, at least 85%, at least 90%, at least 95%, at least 99%, or 100% identical to SEQ ID NO: 149 or 1053, and a CDR3 having an amino acid sequence at least 65%, at least 70%, at least 75%, at least 80%, at least 85%, at least 90%, at least 95%, at least 99%, or 100% identical to SEQ ID NO: 150, 765, or 1054,
[3052] VL4 comprises a CDR1 having an amino acid sequence at least 65%, at least 70%, at least 75%, at least 80%, at least 85%, at least 90%, at least 95%, at least 99%, or 100% identical to SEQ ID NO: 152 or 1045, a CDR2 having an amino acid sequence at least 65%, at least 70%, at least 75%, at least 80%, at least 85%, at least 90%, at least 95%, at least 99%, or 100% identical to SEQ ID NO: 1046 or an amino acid sequence at least 65%, at least 70%, at least 75%, at least 80%, at least 85%, at least 90%, at least 95%, at least 99%, or 100% identical to amino acid sequence GAS, and a CDR3 having an amino acid sequence at least 65%, at least 70%, at least 75%, at least 80%, at least 85%, at least 90%, at least 95%, at least 99%, or 100% identical to SEQ ID NO: 153 or 766, and
[3053] VH4 comprises a CDR1 having an amino acid sequence at least 65%, at least 70%, at least 75%, at least 80%, at least 85%, at least 90%, at least 95%, at least 99%, or 100% identical to SEQ ID NO: 155 or 1047, a CDR2 having an amino acid sequence at least 65%, at least 70%, at least 75%, at least 80%, at least 85%, at least 90%, at least 95%, at least 99%, or 100% identical to SEQ ID NO: 156 or 1048, and a CDR3 having an amino acid sequence at least 65%, at least 70%, at least 75%, at least 80%, at least 85%, at least 90%, at least 95%, at least 99%, or 100% identical to SEQ ID NO: 157, 767, or 1049, or
[3054] wherein:
[3055] VL1 comprises an amino acid sequence at least 65%, at least 70%, at least 75%, at least 80%, at least 85%, at least 90%, at least 95%, at least 99%, or 100% identical to SEQ ID NO: 11, VH1 comprises an amino acid sequence at least 65%, at least 70%, at least 75%, at least 80%, at least 85%, at least 90%, at least 95%, at least 99%, or 100% identical to SEQ ID NO: 14, VL2 and VL3 each comprise an amino acid sequence at least 65%, at least 70%, at least 75%, at least 80%, at least 85%, at least 90%, at least 95%, at least 99%, or 100% identical to SEQ ID NO: 147, VH2 and VH3 each comprise an amino acid sequence at least 65%, at least 70%, at least 75%, at least 80%, at least 85%, at least 90%, at least 95%, at least 99%, or 100% identical to SEQ ID NO: 151, VL4 comprises an amino acid sequence at least 65%, at least 70%, at least 75%, at least 80%, at least 85%, at least 90%, at least 95%, at least 99%, or 100% identical to SEQ ID NO: 154, and VH4 comprises an amino acid sequence at least 65%, at least 70%, at least 75%, at least 80%, at least 85%, at least 90%, at least 95%, at least 99%, or 100% identical to SEQ ID NO: 158; or
[3056] (kk)
[3057] VL2 comprises the same light chain variable region as VL4, and VH2 comprises the same heavy chain variable region as VH4, and
[3058] wherein:
[3059] VL1 comprises a CDR1 having an amino acid sequence at least 65%, at least 70%, at least 75%, at least 80%, at least 85%, at least 90%, at least 95%, at least 99%, or 100% identical to SEQ ID NO: 9 or 1055, a CDR2 having an amino acid sequence at least 65%, at least 70%, at least 75%, at least 80%, at least 85%, at least 90%, at least 95%, at least 99%, or 100% identical to SEQ ID NO: 1056 or an amino acid sequence at least 65%, at least 70%, at least 75%, at least 80%, at least 85%, at least 90%, at least 95%, at least 99%, or 100% identical to amino acid sequence GAS, and a CDR3 having an amino acid sequence at least 65%, at least 70%, at least 75%, at least 80%, at least 85%, at least 90%, at least 95%, at least 99%, or 100% identical to SEQ ID NO: 10,
[3060] VH1 comprises a CDR1 having an amino acid sequence at least 65%, at least 70%, at least 75%, at least 80%, at least 85%, at least 90%, at least 95%, at least 99%, or 100% identical to SEQ ID NO: 12 or 1057, a CDR2 having an amino acid sequence at least 65%, at least 70%, at least 75%, at least 80%, at least 85%, at least 90%, at least 95%, at least 99%, or 100% identical to SEQ ID NO: 6 or 1058, and a CDR3 having an amino acid sequence at least 65%, at least 70%, at least 75%, at least 80%, at least 85%, at least 90%, at least 95%, at least 99%, or 100% identical to SEQ ID NO: 13 or 1059,
[3061] VL2 comprises a CDR1 having an amino acid sequence at least 65%, at least 70%, at least 75%, at least 80%, at least 85%, at least 90%, at least 95%, at least 99%, or 100% identical to SEQ ID NO: 145 or 1050, a CDR2 having an amino acid sequence at least 65%, at least 70%, at least 75%, at least 80%, at least 85%, at least 90%, at least 95%, at least 99%, or 100% identical to SEQ ID NO: 1051 or an amino acid sequence at least 65%, at least 70%, at least 75%, at least 80%, at least 85%, at least 90%, at least 95%, at least 99%, or 100% identical to amino acid sequence AAS, and a CDR3 having an amino acid sequence at least 65%, at least 70%, at least 75%, at least 80%, at least 85%, at least 90%, at least 95%, at least 99%, or 100% identical to SEQ ID NO: 146 or 764,
[3062] VH2 comprises a CDR1 having an amino acid sequence at least 65%, at least 70%, at least 75%, at least 80%, at least 85%, at least 90%, at least 95%, at least 99%, or 100% identical to SEQ ID NO: 148 or 1052, a CDR2 having an amino acid sequence at least 65%, at least 70%, at least 75%, at least 80%, at least 85%, at least 90%, at least 95%, at least 99%, or 100% identical to SEQ ID NO: 149 or 1053, and a CDR3 having an amino acid sequence at least 65%, at least 70%, at least 75%, at least 80%, at least 85%, at least 90%, at least 95%, at least 99%, or 100% identical to SEQ ID NO: 150, 765, or 1054,
[3063] VL3 comprises a CDR1 having an amino acid sequence at least 65%, at least 70%, at least 75%, at least 80%, at least 85%, at least 90%, at least 95%, at least 99%, or 100% identical to SEQ ID NO: 152 or 1045, a CDR2 having an amino acid sequence at least 65%, at least 70%, at least 75%, at least 80%, at least 85%, at least 90%, at least 95%, at least 99%, or 100% identical to SEQ ID NO: 1046 or an amino acid sequence at least 65%, at least 70%, at least 75%, at least 80%, at least 85%, at least 90%, at least 95%, at least 99%, or 100% identical to amino acid sequence GAS, and a CDR3 having an amino acid sequence at least 65%, at least 70%, at least 75%, at least 80%, at least 85%, at least 90%, at least 95%, at least 99%, or 100% identical to SEQ ID NO: 153 or 766,
[3064] VH3 comprises a CDR1 having an amino acid sequence at least 65%, at least 70%, at least 75%, at least 80%, at least 85%, at least 90%, at least 95%, at least 99%, or 100% identical to SEQ ID NO: 155 or 1047, a CDR2 having an amino acid sequence at least 65%, at least 70%, at least 75%, at least 80%, at least 85%, at least 90%, at least 95%, at least 99%, or 100% identical to SEQ ID NO: 156 or 1048, and a CDR3 having an amino acid sequence at least 65%, at least 70%, at least 75%, at least 80%, at least 85%, at least 90%, at least 95%, at least 99%, or 100% identical to SEQ ID NO: 157, 767, or 1049,
[3065] VL4 comprises a CDR1 having an amino acid sequence at least 65%, at least 70%, at least 75%, at least 80%, at least 85%, at least 90%, at least 95%, at least 99%, or 100% identical to SEQ ID NO: 145 or 1050, a CDR2 having an amino acid sequence at least 65%, at least 70%, at least 75%, at least 80%, at least 85%, at least 90%, at least 95%, at least 99%, or 100% identical to SEQ ID NO: 1051 or an amino acid sequence at least 65%, at least 70%, at least 75%, at least 80%, at least 85%, at least 90%, at least 95%, at least 99%, or 100% identical to amino acid sequence AAS, and a CDR3 having an amino acid sequence at least 65%, at least 70%, at least 75%, at least 80%, at least 85%, at least 90%, at least 95%, at least 99%, or 100% identical to SEQ ID NO: 146 or 764, and
[3066] VH4 comprises a CDR1 having an amino acid sequence at least 65%, at least 70%, at least 75%, at least 80%, at least 85%, at least 90%, at least 95%, at least 99%, or 100% identical to SEQ ID NO: 148 or 1052, a CDR2 having an amino acid sequence at least 65%, at least 70%, at least 75%, at least 80%, at least 85%, at least 90%, at least 95%, at least 99%, or 100% identical to SEQ ID NO: 149 or 1053, and a CDR3 having an amino acid sequence at least 65%, at least 70%, at least 75%, at least 80%, at least 85%, at least 90%, at least 95%, at least 99%, or 100% identical to SEQ ID NO: 150, 765, or 1054, or
[3067] wherein:
[3068] VL1 comprises an amino acid sequence at least 65%, at least 70%, at least 75%, at least 80%, at least 85%, at least 90%, at least 95%, at least 99%, or 100% identical to SEQ ID NO: 11, VH1 comprises an amino acid sequence at least 65%, at least 70%, at least 75%, at least 80%, at least 85%, at least 90%, at least 95%, at least 99%, or 100% identical to SEQ ID NO: 14, VL2 and VL4 each comprise an amino acid sequence at least 65%, at least 70%, at least 75%, at least 80%, at least 85%, at least 90%, at least 95%, at least 99%, or 100% identical to SEQ ID NO: 147, VH2 and VH4 each comprise an amino acid sequence at least 65%, at least 70%, at least 75%, at least 80%, at least 85%, at least 90%, at least 95%, at least 99%, or 100% identical to SEQ ID NO: 151, VL3 comprises an amino acid sequence at least 65%, at least 70%, at least 75%, at least 80%, at least 85%, at least 90%, at least 95%, at least 99%, or 100% identical to SEQ ID NO: 154, and VH3 comprises an amino acid sequence at least 65%, at least 70%, at least 75%, at least 80%, at least 85%, at least 90%, at least 95%, at least 99%, or 100% identical to SEQ ID NO: 158; or
[3069] (ll)
[3070] VL1 comprises the same light chain variable region as VL3, and VH1 comprises the same heavy chain variable region as VH3, and
[3071] wherein:
[3072] VL1 comprises a CDR1 having an amino acid sequence at least 65%, at least 70%, at least 75%, at least 80%, at least 85%, at least 90%, at least 95%, at least 99%, or 100% identical to SEQ ID NO: 145 or 1050, a CDR2 having an amino acid sequence at least 65%, at least 70%, at least 75%, at least 80%, at least 85%, at least 90%, at least 95%, at least 99%, or 100% identical to SEQ ID NO: 1051 or an amino acid sequence at least 65%, at least 70%, at least 75%, at least 80%, at least 85%, at least 90%, at least 95%, at least 99%, or 100% identical to amino acid sequence AAS, and a CDR3 having an amino acid sequence at least 65%, at least 70%, at least 75%, at least 80%, at least 85%, at least 90%, at least 95%, at least 99%, or 100% identical to SEQ ID NO: 146 or 764,
[3073] VH1 comprises a CDR1 having an amino acid sequence at least 65%, at least 70%, at least 75%, at least 80%, at least 85%, at least 90%, at least 95%, at least 99%, or 100% identical to SEQ ID NO: 148 or 1052, a CDR2 having an amino acid sequence at least 65%, at least 70%, at least 75%, at least 80%, at least 85%, at least 90%, at least 95%, at least 99%, or 100% identical to SEQ ID NO: 149 or 1053, and a CDR3 having an amino acid sequence at least 65%, at least 70%, at least 75%, at least 80%, at least 85%, at least 90%, at least 95%, at least 99%, or 100% identical to SEQ ID NO: 150, 765, or 1054,
[3074] VL2 comprises a CDR1 having an amino acid sequence at least 65%, at least 70%, at least 75%, at least 80%, at least 85%, at least 90%, at least 95%, at least 99%, or 100% identical to SEQ ID NO: 9 or 1055, a CDR2 having an amino acid sequence at least 65%, at least 70%, at least 75%, at least 80%, at least 85%, at least 90%, at least 95%, at least 99%, or 100% identical to SEQ ID NO: 1056 or an amino acid sequence at least 65%, at least 70%, at least 75%, at least 80%, at least 85%, at least 90%, at least 95%, at least 99%, or 100% identical to amino acid sequence GAS, and a CDR3 having an amino acid sequence at least 65%, at least 70%, at least 75%, at least 80%, at least 85%, at least 90%, at least 95%, at least 99%, or 100% identical to SEQ ID NO: 10,
[3075] VH2 comprises a CDR1 having an amino acid sequence at least 65%, at least 70%, at least 75%, at least 80%, at least 85%, at least 90%, at least 95%, at least 99%, or 100% identical to SEQ ID NO: 12 or 1057, a CDR2 having an amino acid sequence at least 65%, at least 70%, at least 75%, at least 80%, at least 85%, at least 90%, at least 95%, at least 99%, or 100% identical to SEQ ID NO: 6 or 1058, and a CDR3 having an amino acid sequence at least 65%, at least 70%, at least 75%, at least 80%, at least 85%, at least 90%, at least 95%, at least 99%, or 100% identical to SEQ ID NO: 13 or 1059,
[3076] VL3 comprises a CDR1 having an amino acid sequence at least 65%, at least 70%, at least 75%, at least 80%, at least 85%, at least 90%, at least 95%, at least 99%, or 100% identical to SEQ ID NO: 145 or 1050, a CDR2 having an amino acid sequence at least 65%, at least 70%, at least 75%, at least 80%, at least 85%, at least 90%, at least 95%, at least 99%, or 100% identical to SEQ ID NO: 1051 or an amino acid sequence at least 65%, at least 70%, at least 75%, at least 80%, at least 85%, at least 90%, at least 95%, at least 99%, or 100% identical to amino acid sequence AAS, and a CDR3 having an amino acid sequence at least 65%, at least 70%, at least 75%, at least 80%, at least 85%, at least 90%, at least 95%, at least 99%, or 100% identical to SEQ ID NO: 146 or 764,
[3077] VH3 comprises a CDR1 having an amino acid sequence at least 65%, at least 70%, at least 75%, at least 80%, at least 85%, at least 90%, at least 95%, at least 99%, or 100% identical to SEQ ID NO: 148 or 1052, a CDR2 having an amino acid sequence at least 65%, at least 70%, at least 75%, at least 80%, at least 85%, at least 90%, at least 95%, at least 99%, or 100% identical to SEQ ID NO: 149 or 1053, and a CDR3 having an amino acid sequence at least 65%, at least 70%, at least 75%, at least 80%, at least 85%, at least 90%, at least 95%, at least 99%, or 100% identical to SEQ ID NO: 150, 765, or 1054,
[3078] VL4 comprises a CDR1 having an amino acid sequence at least 65%, at least 70%, at least 75%, at least 80%, at least 85%, at least 90%, at least 95%, at least 99%, or 100% identical to SEQ ID NO: 152 or 1045, a CDR2 having an amino acid sequence at least 65%, at least 70%, at least 75%, at least 80%, at least 85%, at least 90%, at least 95%, at least 99%, or 100% identical to SEQ ID NO: 1046 or an amino acid sequence at least 65%, at least 70%, at least 75%, at least 80%, at least 85%, at least 90%, at least 95%, at least 99%, or 100% identical to amino acid sequence GAS, and a CDR3 having an amino acid sequence at least 65%, at least 70%, at least 75%, at least 80%, at least 85%, at least 90%, at least 95%, at least 99%, or 100% identical to SEQ ID NO: 153 or 766, and
[3079] VH4 comprises a CDR1 having an amino acid sequence at least 65%, at least 70%, at least 75%, at least 80%, at least 85%, at least 90%, at least 95%, at least 99%, or 100% identical to SEQ ID NO: 155 or 1047, a CDR2 having an amino acid sequence at least 65%, at least 70%, at least 75%, at least 80%, at least 85%, at least 90%, at least 95%, at least 99%, or 100% identical to SEQ ID NO: 156 or 1048, and a CDR3 having an amino acid sequence at least 65%, at least 70%, at least 75%, at least 80%, at least 85%, at least 90%, at least 95%, at least 99%, or 100% identical to SEQ ID NO: 157, 767, or 1049, or
[3080] wherein:
[3081] VL1 and VL3 each comprise an amino acid sequence at least 65%, at least 70%, at least 75%, at least 80%, at least 85%, at least 90%, at least 95%, at least 99%, or 100% identical to SEQ ID NO: 147, VH1 and VH3 each comprise an amino acid sequence at least 65%, at least 70%, at least 75%, at least 80%, at least 85%, at least 90%, at least 95%, at least 99%, or 100% identical to SEQ ID NO: 151, VL2 comprises an amino acid sequence at least 65%, at least 70%, at least 75%, at least 80%, at least 85%, at least 90%, at least 95%, at least 99%, or 100% identical to SEQ ID NO: 11, VH2 comprises an amino acid sequence at least 65%, at least 70%, at least 75%, at least 80%, at least 85%, at least 90%, at least 95%, at least 99%, or 100% identical to SEQ ID NO: 14, VL4 comprises an amino acid sequence at least 65%, at least 70%, at least 75%, at least 80%, at least 85%, at least 90%, at least 95%, at least 99%, or 100% identical to SEQ ID NO: 154, and VH4 comprises an amino acid sequence at least 65%, at least 70%, at least 75%, at least 80%, at least 85%, at least 90%, at least 95%, at least 99%, or 100% identical to SEQ ID NO: 158; or
[3082] (mm)
[3083] VL1 comprises the same light chain variable region as VL4, and VH1 comprises the same heavy chain variable region as VH4, and
[3084] wherein:
[3085] VL1 comprises a CDR1 having an amino acid sequence at least 65%, at least 70%, at least 75%, at least 80%, at least 85%, at least 90%, at least 95%, at least 99%, or 100% identical to SEQ ID NO: 145 or 1050, a CDR2 having an amino acid sequence at least 65%, at least 70%, at least 75%, at least 80%, at least 85%, at least 90%, at least 95%, at least 99%, or 100% identical to SEQ ID NO: 1051 or an amino acid sequence at least 65%, at least 70%, at least 75%, at least 80%, at least 85%, at least 90%, at least 95%, at least 99%, or 100% identical to amino acid sequence AAS, and a CDR3 having an amino acid sequence at least 65%, at least 70%, at least 75%, at least 80%, at least 85%, at least 90%, at least 95%, at least 99%, or 100% identical to SEQ ID NO: 146 or 764,
[3086] VH1 comprises a CDR1 having an amino acid sequence at least 65%, at least 70%, at least 75%, at least 80%, at least 85%, at least 90%, at least 95%, at least 99%, or 100% identical to SEQ ID NO: 148 or 1052, a CDR2 having an amino acid sequence at least 65%, at least 70%, at least 75%, at least 80%, at least 85%, at least 90%, at least 95%, at least 99%, or 100% identical to SEQ ID NO: 149 or 1053, and a CDR3 having an amino acid sequence at least 65%, at least 70%, at least 75%, at least 80%, at least 85%, at least 90%, at least 95%, at least 99%, or 100% identical to SEQ ID NO: 150, 765, or 1054,
[3087] VL2 comprises a CDR1 having an amino acid sequence at least 65%, at least 70%, at least 75%, at least 80%, at least 85%, at least 90%, at least 95%, at least 99%, or 100% identical to SEQ ID NO: 9 or 1055, a CDR2 having an amino acid sequence at least 65%, at least 70%, at least 75%, at least 80%, at least 85%, at least 90%, at least 95%, at least 99%, or 100% identical to SEQ ID NO: 1056 or an amino acid sequence at least 65%, at least 70%, at least 75%, at least 80%, at least 85%, at least 90%, at least 95%, at least 99%, or 100% identical to amino acid sequence GAS, and a CDR3 having an amino acid sequence at least 65%, at least 70%, at least 75%, at least 80%, at least 85%, at least 90%, at least 95%, at least 99%, or 100% identical to SEQ ID NO: 10,
[3088] VH2 comprises a CDR1 having an amino acid sequence at least 65%, at least 70%, at least 75%, at least 80%, at least 85%, at least 90%, at least 95%, at least 99%, or 100% identical to SEQ ID NO: 12 or 1057, a CDR2 having an amino acid sequence at least 65%, at least 70%, at least 75%, at least 80%, at least 85%, at least 90%, at least 95%, at least 99%, or 100% identical to SEQ ID NO: 6 or 1058, and a CDR3 having an amino acid sequence at least 65%, at least 70%, at least 75%, at least 80%, at least 85%, at least 90%, at least 95%, at least 99%, or 100% identical to SEQ ID NO: 13 or 1059,
[3089] VL3 comprises a CDR1 having an amino acid sequence at least 65%, at least 70%, at least 75%, at least 80%, at least 85%, at least 90%, at least 95%, at least 99%, or 100% identical to SEQ ID NO: 152 or 1045, a CDR2 having an amino acid sequence at least 65%, at least 70%, at least 75%, at least 80%, at least 85%, at least 90%, at least 95%, at least 99%, or 100% identical to SEQ ID NO: 1046 or an amino acid sequence at least 65%, at least 70%, at least 75%, at least 80%, at least 85%, at least 90%, at least 95%, at least 99%, or 100% identical to amino acid sequence GAS, and a CDR3 having an amino acid sequence at least 65%, at least 70%, at least 75%, at least 80%, at least 85%, at least 90%, at least 95%, at least 99%, or 100% identical to SEQ ID NO: 153 or 766,
[3090] VH3 comprises a CDR1 having an amino acid sequence at least 65%, at least 70%, at least 75%, at least 80%, at least 85%, at least 90%, at least 95%, at least 99%, or 100% identical to SEQ ID NO: 155 or 1047, a CDR2 having an amino acid sequence at least 65%, at least 70%, at least 75%, at least 80%, at least 85%, at least 90%, at least 95%, at least 99%, or 100% identical to SEQ ID NO: 156 or 1048, and a CDR3 having an amino acid sequence at least 65%, at least 70%, at least 75%, at least 80%, at least 85%, at least 90%, at least 95%, at least 99%, or 100% identical to SEQ ID NO: 157, 767, or 1049.
[3091] VL4 comprises a CDR1 having an amino acid sequence at least 65%, at least 70%, at least 75%, at least 80%, at least 85%, at least 90%, at least 95%, at least 99%, or 100% identical to SEQ ID NO: 145 or 1050, a CDR2 having an amino acid sequence at least 65%, at least 70%, at least 75%, at least 80%, at least 85%, at least 90%, at least 95%, at least 99%, or 100% identical to SEQ ID NO: 1051 or an amino acid sequence at least 65%, at least 70%, at least 75%, at least 80%, at least 85%, at least 90%, at least 95%, at least 99%, or 100% identical to amino acid sequence AAS, and a CDR3 having an amino acid sequence at least 65%, at least 70%, at least 75%, at least 80%, at least 85%, at least 90%, at least 95%, at least 99%, or 100% identical to SEQ ID NO: 146 or 764, and
[3092] VH4 comprises a CDR1 having an amino acid sequence at least 65%, at least 70%, at least 75%, at least 80%, at least 85%, at least 90%, at least 95%, at least 99%, or 100% identical to SEQ ID NO: 148 or 1052, a CDR2 having an amino acid sequence at least 65%, at least 70%, at least 75%, at least 80%, at least 85%, at least 90%, at least 95%, at least 99%, or 100% identical to SEQ ID NO: 149 or 1053, and a CDR3 having an amino acid sequence at least 65%, at least 70%, at least 75%, at least 80%, at least 85%, at least 90%, at least 95%, at least 99%, or 100% identical to SEQ ID NO: 150, 765, or 1054, or
[3093] wherein:
[3094] VL1 and VL4 each comprise an amino acid sequence at least 65%, at least 70%, at least 75%, at least 80%, at least 85%, at least 90%, at least 95%, at least 99%, or 100% identical to SEQ ID NO: 147, VH1 and VH4 each comprise an amino acid sequence at least 65%, at least 70%, at least 75%, at least 80%, at least 85%, at least 90%, at least 95%, at least 99%, or 100% identical to SEQ ID NO: 151, VL2 comprises an amino acid sequence at least 65%, at least 70%, at least 75%, at least 80%, at least 85%, at least 90%, at least 95%, at least 99%, or 100% identical to SEQ ID NO: 11, VH2 comprises an amino acid sequence at least 65%, at least 70%, at least 75%, at least 80%, at least 85%, at least 90%, at least 95%, at least 99%, or 100% identical to SEQ ID NO: 14, VL3 comprises an amino acid sequence at least 65%, at least 70%, at least 75%, at least 80%, at least 85%, at least 90%, at least 95%, at least 99%, or 100% identical to SEQ ID NO: 154, and VH3 comprises an amino acid sequence at least 65%, at least 70%, at least 75%, at least 80%, at least 85%, at least 90%, at least 95%, at least 99%, or 100% identical to SEQ ID NO: 158; or
[3095] (nn)
[3096] VL1 comprises the same light chain variable region as VL3, VH1 comprises the same heavy chain variable region as VH3, VL2 comprises the same light chain variable region as VL4, and VH2 comprises the same heavy chain variable region as VH4, and
[3097] wherein:
[3098] VL1 comprises a CDR1 having an amino acid sequence at least 65%, at least 70%, at least 75%, at least 80%, at least 85%, at least 90%, at least 95%, at least 99%, or 100% identical to SEQ ID NO: 172 or 1060, a CDR2 having an amino acid sequence at least 65%, at least 70%, at least 75%, at least 80%, at least 85%, at least 90%, at least 95%, at least 99%, or 100% identical to SEQ ID NO: 1061 or an amino acid sequence at least 65%, at least 70%, at least 75%, at least 80%, at least 85%, at least 90%, at least 95%, at least 99%, or 100% identical to amino acid sequence DAS, and a CDR3 having an amino acid sequence at least 65%, at least 70%, at least 75%, at least 80%, at least 85%, at least 90%, at least 95%, at least 99%, or 100% identical to SEQ ID NO: 173 or 792,
[3099] VH1 comprises a CDR1 having an amino acid sequence at least 65%, at least 70%, at least 75%, at least 80%, at least 85%, at least 90%, at least 95%, at least 99%, or 100% identical to SEQ ID NO: 175 or 1062, a CDR2 having an amino acid sequence at least 65%, at least 70%, at least 75%, at least 80%, at least 85%, at least 90%, at least 95%, at least 99%, or 100% identical to SEQ ID NO: 176 or 1063, and a CDR3 having an amino acid sequence at least 65%, at least 70%, at least 75%, at least 80%, at least 85%, at least 90%, at least 95%, at least 99%, or 100% identical to SEQ ID NO: 177, 793, or 1064,
[3100] VL2 comprises a CDR1 having an amino acid sequence at least 65%, at least 70%, at least 75%, at least 80%, at least 85%, at least 90%, at least 95%, at least 99%, or 100% identical to SEQ ID NO: 145 or 1050, a CDR2 having an amino acid sequence at least 65%, at least 70%, at least 75%, at least 80%, at least 85%, at least 90%, at least 95%, at least 99%, or 100% identical to SEQ ID NO: 1051 or an amino acid sequence at least 65%, at least 70%, at least 75%, at least 80%, at least 85%, at least 90%, at least 95%, at least 99%, or 100% identical to amino acid sequence AAS, and a CDR3 having an amino acid sequence at least 65%, at least 70%, at least 75%, at least 80%, at least 85%, at least 90%, at least 95%, at least 99%, or 100% identical to SEQ ID NO: 146 or 764,
[3101] VH2 comprises a CDR1 having an amino acid sequence at least 65%, at least 70%, at least 75%, at least 80%, at least 85%, at least 90%, at least 95%, at least 99%, or 100% identical to SEQ ID NO: 148 or 1052, a CDR2 having an amino acid sequence at least 65%, at least 70%, at least 75%, at least 80%, at least 85%, at least 90%, at least 95%, at least 99%, or 100% identical to SEQ ID NO: 149 or 1053, and a CDR3 having an amino acid sequence at least 65%, at least 70%, at least 75%, at least 80%, at least 85%, at least 90%, at least 95%, at least 99%, or 100% identical to SEQ ID NO: 150, 765, or 1054,
[3102] VL3 comprises a CDR1 having an amino acid sequence at least 65%, at least 70%, at least 75%, at least 80%, at least 85%, at least 90%, at least 95%, at least 99%, or 100% identical to SEQ ID NO: 172 or 1060, a CDR2 having an amino acid sequence at least 65%, at least 70%, at least 75%, at least 80%, at least 85%, at least 90%, at least 95%, at least 99%, or 100% identical to SEQ ID NO: 1061 or an amino acid sequence at least 65%, at least 70%, at least 75%, at least 80%, at least 85%, at least 90%, at least 95%, at least 99%, or 100% identical to amino acid sequence DAS, and a CDR3 having an amino acid sequence at least 65%, at least 70%, at least 75%, at least 80%, at least 85%, at least 90%, at least 95%, at least 99%, or 100% identical to SEQ ID NO: 173 or 792,
[3103] VH3 comprises a CDR1 having an amino acid sequence at least 65%, at least 70%, at least 75%, at least 80%, at least 85%, at least 90%, at least 95%, at least 99%, or 100% identical to SEQ ID NO: 175 or 1062, a CDR2 having an amino acid sequence at least 65%, at least 70%, at least 75%, at least 80%, at least 85%, at least 90%, at least 95%, at least 99%, or 100% identical to SEQ ID NO: 176 or 1063, and a CDR3 having an amino acid sequence at least 65%, at least 70%, at least 75%, at least 80%, at least 85%, at least 90%, at least 95%, at least 99%, or 100% identical to SEQ ID NO: 177, 793, or 1064,
[3104] VL4 comprises a CDR1 having an amino acid sequence at least 65%, at least 70%, at least 75%, at least 80%, at least 85%, at least 90%, at least 95%, at least 99%, or 100% identical to SEQ ID NO: 145 or 1050, a CDR2 having an amino acid sequence at least 65%, at least 70%, at least 75%, at least 80%, at least 85%, at least 90%, at least 95%, at least 99%, or 100% identical to SEQ ID NO: 1051 or an amino acid sequence at least 65%, at least 70%, at least 75%, at least 80%, at least 85%, at least 90%, at least 95%, at least 99%, or 100% identical to amino acid sequence AAS, and a CDR3 having an amino acid sequence at least 65%, at least 70%, at least 75%, at least 80%, at least 85%, at least 90%, at least 95%, at least 99%, or 100% identical to SEQ ID NO: 146 or 764, and
[3105] VH4 comprises a CDR1 having an amino acid sequence at least 65%, at least 70%, at least 75%, at least 80%, at least 85%, at least 90%, at least 95%, at least 99%, or 100% identical to SEQ ID NO: 148 or 1052, a CDR2 having an amino acid sequence at least 65%, at least 70%, at least 75%, at least 80%, at least 85%, at least 90%, at least 95%, at least 99%, or 100% identical to SEQ ID NO: 149 or 1053, and a CDR3 having an amino acid sequence at least 65%, at least 70%, at least 75%, at least 80%, at least 85%, at least 90%, at least 95%, at least 99%, or 100% identical to SEQ ID NO: 150, 765, or 1054, or
[3106] wherein:
[3107] VL1 and VL3 each comprise an amino acid sequence at least 65%, at least 70%, at least 75%, at least 80%, at least 85%, at least 90%, at least 95%, at least 99%, or 100% identical to SEQ ID NO: 174, VH1 and VH3 each comprise an amino acid sequence at least 65%, at least 70%, at least 75%, at least 80%, at least 85%, at least 90%, at least 95%, at least 99%, or 100% identical to SEQ ID NO: 178, VL2 and VL4 each comprise an amino acid sequence at least 65%, at least 70%, at least 75%, at least 80%, at least 85%, at least 90%, at least 95%, at least 99%, or 100% identical to SEQ ID NO: 147, and VH2 and VH4 each comprise an amino acid sequence at least 65%, at least 70%, at least 75%, at least 80%, at least 85%, at least 90%, at least 95%, at least 99%, or 100% identical to SEQ ID NO: 151; or
[3108] (oo)
[3109] VL2 comprises the same light chain variable region as VL3, and VH2 comprises the same heavy chain variable region as VH3, and
[3110] wherein:
[3111] VL1 comprises a CDR1 having an amino acid sequence at least 65%, at least 70%, at least 75%, at least 80%, at least 85%, at least 90%, at least 95%, at least 99%, or 100% identical to SEQ ID NO: 172 or 1060, a CDR2 having an amino acid sequence at least 65%, at least 70%, at least 75%, at least 80%, at least 85%, at least 90%, at least 95%, at least 99%, or 100% identical to SEQ ID NO: 1061 or an amino acid sequence at least 65%, at least 70%, at least 75%, at least 80%, at least 85%, at least 90%, at least 95%, at least 99%, or 100% identical to amino acid sequence DAS, and a CDR3 having an amino acid sequence at least 65%, at least 70%, at least 75%, at least 80%, at least 85%, at least 90%, at least 95%, at least 99%, or 100% identical to SEQ ID NO: 173 or 792,
[3112] VH1 comprises a CDR1 having an amino acid sequence at least 65%, at least 70%, at least 75%, at least 80%, at least 85%, at least 90%, at least 95%, at least 99%, or 100% identical to SEQ ID NO: 175 or 1062, a CDR2 having an amino acid sequence at least 65%, at least 70%, at least 75%, at least 80%, at least 85%, at least 90%, at least 95%, at least 99%, or 100% identical to SEQ ID NO: 176 or 1063, and a CDR3 having an amino acid sequence at least 65%, at least 70%, at least 75%, at least 80%, at least 85%, at least 90%, at least 95%, at least 99%, or 100% identical to SEQ ID NO: 177, 793, or 1064.
[3113] VL2 comprises a CDR1 having an amino acid sequence at least 65%, at least 70%, at least 75%, at least 80%, at least 85%, at least 90%, at least 95%, at least 99%, or 100% identical to SEQ ID NO: 145 or 1050, a CDR2 having an amino acid sequence at least 65%, at least 70%, at least 75%, at least 80%, at least 85%, at least 90%, at least 95%, at least 99%, or 100% identical to SEQ ID NO: 1051 or an amino acid sequence at least 65%, at least 70%, at least 75%, at least 80%, at least 85%, at least 90%, at least 95%, at least 99%, or 100% identical to amino acid sequence AAS, and a CDR3 having an amino acid sequence at least 65%, at least 70%, at least 75%, at least 80%, at least 85%, at least 90%, at least 95%, at least 99%, or 100% identical to SEQ ID NO: 146 or 764,
[3114] VH2 comprises a CDR1 having an amino acid sequence at least 65%, at least 70%, at least 75%, at least 80%, at least 85%, at least 90%, at least 95%, at least 99%, or 100% identical to SEQ ID NO: 148 or 1052, a CDR2 having an amino acid sequence at least 65%, at least 70%, at least 75%, at least 80%, at least 85%, at least 90%, at least 95%, at least 99%, or 100% identical to SEQ ID NO: 149 or 1053, and a CDR3 having an amino acid sequence at least 65%, at least 70%, at least 75%, at least 80%, at least 85%, at least 90%, at least 95%, at least 99%, or 100% identical to SEQ ID NO: 150, 765, or 1054,
[3115] VL3 comprises a CDR1 having an amino acid sequence at least 65%, at least 70%, at least 75%, at least 80%, at least 85%, at least 90%, at least 95%, at least 99%, or 100% identical to SEQ ID NO: 145 or 1050, a CDR2 having an amino acid sequence at least 65%, at least 70%, at least 75%, at least 80%, at least 85%, at least 90%, at least 95%, at least 99%, or 100% identical to SEQ ID NO: 1051 or an amino acid sequence at least 65%, at least 70%, at least 75%, at least 80%, at least 85%, at least 90%, at least 95%, at least 99%, or 100% identical to amino acid sequence AAS, and a CDR3 having an amino acid sequence at least 65%, at least 70%, at least 75%, at least 80%, at least 85%, at least 90%, at least 95%, at least 99%, or 100% identical to SEQ ID NO: 146 or 764,
[3116] VH3 comprises a CDR1 having an amino acid sequence at least 65%, at least 70%, at least 75%, at least 80%, at least 85%, at least 90%, at least 95%, at least 99%, or 100% identical to SEQ ID NO: 148 or 1052, a CDR2 having an amino acid sequence at least 65%, at least 70%, at least 75%, at least 80%, at least 85%, at least 90%, at least 95%, at least 99%, or 100% identical to SEQ ID NO: 149 or 1053, and a CDR3 having an amino acid sequence at least 65%, at least 70%, at least 75%, at least 80%, at least 85%, at least 90%, at least 95%, at least 99%, or 100% identical to SEQ ID NO: 150, 765, or 1054,
[3117] VL4 comprises a CDR1 having an amino acid sequence at least 65%, at least 70%, at least 75%, at least 80%, at least 85%, at least 90%, at least 95%, at least 99%, or 100% identical to SEQ ID NO: 152 or 1045, a CDR2 having an amino acid sequence at least 65%, at least 70%, at least 75%, at least 80%, at least 85%, at least 90%, at least 95%, at least 99%, or 100% identical to SEQ ID NO: 1046 or an amino acid sequence at least 65%, at least 70%, at least 75%, at least 80%, at least 85%, at least 90%, at least 95%, at least 99%, or 100% identical to amino acid sequence GAS, and a CDR3 having an amino acid sequence at least 65%, at least 70%, at least 75%, at least 80%, at least 85%, at least 90%, at least 95%, at least 99%, or 100% identical to SEQ ID NO: 153 or 766, and
[3118] VH4 comprises a CDR1 having an amino acid sequence at least 65%, at least 70%, at least 75%, at least 80%, at least 85%, at least 90%, at least 95%, at least 99%, or 100% identical to SEQ ID NO: 155 or 1047, a CDR2 having an amino acid sequence at least 65%, at least 70%, at least 75%, at least 80%, at least 85%, at least 90%, at least 95%, at least 99%, or 100% identical to SEQ ID NO: 156 or 1048, and a CDR3 having an amino acid sequence at least 65%, at least 70%, at least 75%, at least 80%, at least 85%, at least 90%, at least 95%, at least 99%, or 100% identical to SEQ ID NO: 157, 767, or 1049, or
[3119] wherein:
[3120] VL1 comprises an amino acid sequence at least 65%, at least 70%, at least 75%, at least 80%, at least 85%, at least 90%, at least 95%, at least 99%, or 100% identical to SEQ ID NO: 174, VH1 comprises an amino acid sequence at least 65%, at least 70%, at least 75%, at least 80%, at least 85%, at least 90%, at least 95%, at least 99%, or 100% identical to SEQ ID NO: 178, VL2 and VL3 each comprise an amino acid sequence at least 65%, at least 70%, at least 75%, at least 80%, at least 85%, at least 90%, at least 95%, at least 99%, or 100% identical to SEQ ID NO: 147, VH2 and VH3 each comprise an amino acid sequence at least 65%, at least 70%, at least 75%, at least 80%, at least 85%, at least 90%, at least 95%, at least 99%, or 100% identical to SEQ ID NO: 151, VL4 comprises an amino acid sequence at least 65%, at least 70%, at least 75%, at least 80%, at least 85%, at least 90%, at least 95%, at least 99%, or 100% identical to SEQ ID NO: 154, and VH4 comprises an amino acid sequence at least 65%, at least 70%, at least 75%, at least 80%, at least 85%, at least 90%, at least 95%, at least 99%, or 100% identical to SEQ ID NO: 158; or
[3121] (pp)
[3122] VL1 comprises a CDR1 having an amino acid sequence at least 65%, at least 70%, at least 75%, at least 80%, at least 85%, at least 90%, at least 95%, at least 99%, or 100% identical to SEQ ID NO: 145 or 1050, a CDR2 having an amino acid sequence at least 65%, at least 70%, at least 75%, at least 80%, at least 85%, at least 90%, at least 95%, at least 99%, or 100% identical to SEQ ID NO: 1051 or an amino acid sequence at least 65%, at least 70%, at least 75%, at least 80%, at least 85%, at least 90%, at least 95%, at least 99%, or 100% identical to amino acid sequence AAS, and a CDR3 having an amino acid sequence at least 65%, at least 70%, at least 75%, at least 80%, at least 85%, at least 90%, at least 95%, at least 99%, or 100% identical to SEQ ID NO: 146 or 764,
[3123] VH1 comprises a CDR1 having an amino acid sequence at least 65%, at least 70%, at least 75%, at least 80%, at least 85%, at least 90%, at least 95%, at least 99%, or 100% identical to SEQ ID NO: 148 or 1052, a CDR2 having an amino acid sequence at least 65%, at least 70%, at least 75%, at least 80%, at least 85%, at least 90%, at least 95%, at least 99%, or 100% identical to SEQ ID NO: 149 or 1053, and a CDR3 having an amino acid sequence at least 65%, at least 70%, at least 75%, at least 80%, at least 85%, at least 90%, at least 95%, at least 99%, or 100% identical to SEQ ID NO: 150, 765, or 1054,
[3124] VL2 comprises a CDR1 having an amino acid sequence at least 65%, at least 70%, at least 75%, at least 80%, at least 85%, at least 90%, at least 95%, at least 99%, or 100% identical to SEQ ID NO: 172 or 1060, a CDR2 having an amino acid sequence at least 65%, at least 70%, at least 75%, at least 80%, at least 85%, at least 90%, at least 95%, at least 99%, or 100% identical to SEQ ID NO: 1061 or an amino acid sequence at least 65%, at least 70%, at least 75%, at least 80%, at least 85%, at least 90%, at least 95%, at least 99%, or 100% identical to amino acid sequence DAS, and a CDR3 having an amino acid sequence at least 65%, at least 70%, at least 75%, at least 80%, at least 85%, at least 90%, at least 95%, at least 99%, or 100% identical to SEQ ID NO: 173 or 792,
[3125] VH2 comprises a CDR1 having an amino acid sequence at least 65%, at least 70%, at least 75%, at least 80%, at least 85%, at least 90%, at least 95%, at least 99%, or 100% identical to SEQ ID NO: 175 or 1062, a CDR2 having an amino acid sequence at least 65%, at least 70%, at least 75%, at least 80%, at least 85%, at least 90%, at least 95%, at least 99%, or 100% identical to SEQ ID NO: 176 or 1063, and a CDR3 having an amino acid sequence at least 65%, at least 70%, at least 75%, at least 80%, at least 85%, at least 90%, at least 95%, at least 99%, or 100% identical to SEQ ID NO: 177, 793, or 1064,
[3126] VL3 comprises a CDR1 having an amino acid sequence at least 65%, at least 70%, at least 75%, at least 80%, at least 85%, at least 90%, at least 95%, at least 99%, or 100% identical to SEQ ID NO: 65 or 627, a CDR2 having an amino acid sequence at least 65%, at least 70%, at least 75%, at least 80%, at least 85%, at least 90%, at least 95%, at least 99%, or 100% identical to SEQ ID NO: 628 or an amino acid sequence at least 65%, at least 70%, at least 75%, at least 80%, at least 85%, at least 90%, at least 95%, at least 99%, or 100% identical to amino acid sequence SDS, and a CDR3 having an amino acid sequence at least 65%, at least 70%, at least 75%, at least 80%, at least 85%, at least 90%, at least 95%, at least 99%, or 100% identical to SEQ ID NO: 66,
[3127] VH3 comprises a CDR1 having an amino acid sequence at least 65%, at least 70%, at least 75%, at least 80%, at least 85%, at least 90%, at least 95%, at least 99%, or 100% identical to SEQ ID NO: 68 or 629, a CDR2 having an amino acid sequence at least 65%, at least 70%, at least 75%, at least 80%, at least 85%, at least 90%, at least 95%, at least 99%, or 100% identical to SEQ ID NO: 69 or 630, and a CDR3 having an amino acid sequence at least 65%, at least 70%, at least 75%, at least 80%, at least 85%, at least 90%, at least 95%, at least 99%, or 100% identical to SEQ ID NO: 70 or 631,
[3128] VL4 comprises a CDR1 having an amino acid sequence at least 65%, at least 70%, at least 75%, at least 80%, at least 85%, at least 90%, at least 95%, at least 99%, or 100% identical to SEQ ID NO: 152 or 1045, a CDR2 having an amino acid sequence at least 65%, at least 70%, at least 75%, at least 80%, at least 85%, at least 90%, at least 95%, at least 99%, or 100% identical to SEQ ID NO: 1046 or an amino acid sequence at least 65%, at least 70%, at least 75%, at least 80%, at least 85%, at least 90%, at least 95%, at least 99%, or 100% identical to amino acid sequence GAS, and a CDR3 having an amino acid sequence at least 65%, at least 70%, at least 75%, at least 80%, at least 85%, at least 90%, at least 95%, at least 99%, or 100% identical to SEQ ID NO: 153 or 766, and
[3129] VH4 comprises a CDR1 having an amino acid sequence at least 65%, at least 70%, at least 75%, at least 80%, at least 85%, at least 90%, at least 95%, at least 99%, or 100% identical to SEQ ID NO: 155 or 1047, a CDR2 having an amino acid sequence at least 65%, at least 70%, at least 75%, at least 80%, at least 85%, at least 90%, at least 95%, at least 99%, or 100% identical to SEQ ID NO: 156 or 1048, and a CDR3 having an amino acid sequence at least 65%, at least 70%, at least 75%, at least 80%, at least 85%, at least 90%, at least 95%, at least 99%, or 100% identical to SEQ ID NO: 157, 767, or 1049, or
[3130] VL1 comprises an amino acid sequence at least 65%, at least 70%, at least 75%, at least 80%, at least 85%, at least 90%, at least 95%, at least 99%, or 100% identical to SEQ ID NO: 147, VH1 comprises an amino acid sequence at least 65%, at least 70%, at least 75%, at least 80%, at least 85%, at least 90%, at least 95%, at least 99%, or 100% identical to SEQ ID NO: 151, VL2 comprises an amino acid sequence at least 65%, at least 70%, at least 75%, at least 80%, at least 85%, at least 90%, at least 95%, at least 99%, or 100% identical to SEQ ID NO: 174, VH2 comprises an amino acid sequence at least 65%, at least 70%, at least 75%, at least 80%, at least 85%, at least 90%, at least 95%, at least 99%, or 100% identical to SEQ ID NO: 178, VL3 comprises an amino acid sequence at least 65%, at least 70%, at least 75%, at least 80%, at least 85%, at least 90%, at least 95%, at least 99%, or 100% identical to SEQ ID NO: 67, VH3 comprises an amino acid sequence at least 65%, at least 70%, at least 75%, at least 80%, at least 85%, at least 90%, at least 95%, at least 99%, or 100% identical to SEQ ID NO: 71 or 626, VL4 comprises an amino acid sequence at least 65%, at least 70%, at least 75%, at least 80%, at least 85%, at least 90%, at least 95%, at least 99%, or 100% identical to SEQ ID NO: 154, and VH4 comprises an amino acid sequence at least 65%, at least 70%, at least 75%, at least 80%, at least 85%, at least 90%, at least 95%, at least 99%, or 100% identical to SEQ ID NO: 158; or
[3131] (qq)
[3132] VL1 comprises a CDR1 having an amino acid sequence at least 65%, at least 70%, at least 75%, at least 80%, at least 85%, at least 90%, at least 95%, at least 99%, or 100% identical to SEQ ID NO: 145 or 1050, a CDR2 having an amino acid sequence at least 65%, at least 70%, at least 75%, at least 80%, at least 85%, at least 90%, at least 95%, at least 99%, or 100% identical to SEQ ID NO: 1051 or an amino acid sequence at least 65%, at least 70%, at least 75%, at least 80%, at least 85%, at least 90%, at least 95%, at least 99%, or 100% identical to amino acid sequence AAS, and a CDR3 having an amino acid sequence at least 65%, at least 70%, at least 75%, at least 80%, at least 85%, at least 90%, at least 95%, at least 99%, or 100% identical to SEQ ID NO: 146 or 764,
[3133] VH1 comprises a CDR1 having an amino acid sequence at least 65%, at least 70%, at least 75%, at least 80%, at least 85%, at least 90%, at least 95%, at least 99%, or 100% identical to SEQ ID NO: 148 or 1052, a CDR2 having an amino acid sequence at least 65%, at least 70%, at least 75%, at least 80%, at least 85%, at least 90%, at least 95%, at least 99%, or 100% identical to SEQ ID NO: 149 or 1053, and a CDR3 having an amino acid sequence at least 65%, at least 70%, at least 75%, at least 80%, at least 85%, at least 90%, at least 95%, at least 99%, or 100% identical to SEQ ID NO: 150, 765, or 1054,
[3134] VL2 comprises a CDR1 having an amino acid sequence at least 65%, at least 70%, at least 75%, at least 80%, at least 85%, at least 90%, at least 95%, at least 99%, or 100% identical to SEQ ID NO: 172 or 1060, a CDR2 having an amino acid sequence at least 65%, at least 70%, at least 75%, at least 80%, at least 85%, at least 90%, at least 95%, at least 99%, or 100% identical to SEQ ID NO: 1061 or an amino acid sequence at least 65%, at least 70%, at least 75%, at least 80%, at least 85%, at least 90%, at least 95%, at least 99%, or 100% identical to amino acid sequence DAS, and a CDR3 having an amino acid sequence at least 65%, at least 70%, at least 75%, at least 80%, at least 85%, at least 90%, at least 95%, at least 99%, or 100% identical to SEQ ID NO: 173 or 792,
[3135] VH2 comprises a CDR1 having an amino acid sequence at least 65%, at least 70%, at least 75%, at least 80%, at least 85%, at least 90%, at least 95%, at least 99%, or 100% identical to SEQ ID NO: 175 or 1062, a CDR2 having an amino acid sequence at least 65%, at least 70%, at least 75%, at least 80%, at least 85%, at least 90%, at least 95%, at least 99%, or 100% identical to SEQ ID NO: 176 or 1063, and a CDR3 having an amino acid sequence at least 65%, at least 70%, at least 75%, at least 80%, at least 85%, at least 90%, at least 95%, at least 99%, or 100% identical to SEQ ID NO: 177, 793, or 1064,
[3136] VL3 comprises a CDR1 having an amino acid sequence at least 65%, at least 70%, at least 75%, at least 80%, at least 85%, at least 90%, at least 95%, at least 99%, or 100% identical to SEQ ID NO: 138 or 1065, a CDR2 having an amino acid sequence at least 65%, at least 70%, at least 75%, at least 80%, at least 85%, at least 90%, at least 95%, at least 99%, or 100% identical to SEQ ID NO: 1061 or an amino acid sequence at least 65%, at least 70%, at least 75%, at least 80%, at least 85%, at least 90%, at least 95%, at least 99%, or 100% identical to amino acid sequence DAS, and a CDR3 having an amino acid sequence at least 65%, at least 70%, at least 75%, at least 80%, at least 85%, at least 90%, at least 95%, at least 99%, or 100% identical to SEQ ID NO: 139, 856, or 1066,
[3137] VH3 comprises a CDR1 having an amino acid sequence at least 65%, at least 70%, at least 75%, at least 80%, at least 85%, at least 90%, at least 95%, at least 99%, or 100% identical to SEQ ID NO: 141 or 1067, a CDR2 having an amino acid sequence at least 65%, at least 70%, at least 75%, at least 80%, at least 85%, at least 90%, at least 95%, at least 99%, or 100% identical to SEQ ID NO: 142 or 1068, and a CDR3 having an amino acid sequence at least 65%, at least 70%, at least 75%, at least 80%, at least 85%, at least 90%, at least 95%, at least 99%, or 100% identical to SEQ ID NO: 143, 857, or 1069,
[3138] VL4 comprises a CDR1 having an amino acid sequence at least 65%, at least 70%, at least 75%, at least 80%, at least 85%, at least 90%, at least 95%, at least 99%, or 100% identical to SEQ ID NO: 152 or 1045, a CDR2 having an amino acid sequence at least 65%, at least 70%, at least 75%, at least 80%, at least 85%, at least 90%, at least 95%, at least 99%, or 100% identical to SEQ ID NO: 1046 or an amino acid sequence at least 65%, at least 70%, at least 75%, at least 80%, at least 85%, at least 90%, at least 95%, at least 99%, or 100% identical to amino acid sequence GAS, and a CDR3 having an amino acid sequence at least 65%, at least 70%, at least 75%, at least 80%, at least 85%, at least 90%, at least 95%, at least 99%, or 100% identical to SEQ ID NO: 153 or 766, and
[3139] VH4 comprises a CDR1 having an amino acid sequence at least 65%, at least 70%, at least 75%, at least 80%, at least 85%, at least 90%, at least 95%, at least 99%, or 100% identical to SEQ ID NO: 155 or 1047, a CDR2 having an amino acid sequence at least 65%, at least 70%, at least 75%, at least 80%, at least 85%, at least 90%, at least 95%, at least 99%, or 100% identical to SEQ ID NO: 156 or 1048, and a CDR3 having an amino acid sequence at least 65%, at least 70%, at least 75%, at least 80%, at least 85%, at least 90%, at least 95%, at least 99%, or 100% identical to SEQ ID NO: 157, 767, or 1049, or
[3140] VL1 comprises an amino acid sequence at least 65%, at least 70%, at least 75%, at least 80%, at least 85%, at least 90%, at least 95%, at least 99%, or 100% identical to SEQ ID NO: 147, VH1 comprises an amino acid sequence at least 65%, at least 70%, at least 75%, at least 80%, at least 85%, at least 90%, at least 95%, at least 99%, or 100% identical to SEQ ID NO: 151, VL2 comprises an amino acid sequence at least 65%, at least 70%, at least 75%, at least 80%, at least 85%, at least 90%, at least 95%, at least 99%, or 100% identical to SEQ ID NO: 174, VH2 comprises an amino acid sequence at least 65%, at least 70%, at least 75%, at least 80%, at least 85%, at least 90%, at least 95%, at least 99%, or 100% identical to SEQ ID NO: 178, VL3 comprises an amino acid sequence at least 65%, at least 70%, at least 75%, at least 80%, at least 85%, at least 90%, at least 95%, at least 99%, or 100% identical to SEQ ID NO: 140, VH3 comprises an amino acid sequence at least 65%, at least 70%, at least 75%, at least 80%, at least 85%, at least 90%, at least 95%, at least 99%, or 100% identical to SEQ ID NO: 144, VL4 comprises an amino acid sequence at least 65%, at least 70%, at least 75%, at least 80%, at least 85%, at least 90%, at least 95%, at least 99%, or 100% identical to SEQ ID NO: 154, and VH4 comprises an amino acid sequence at least 65%, at least 70%, at least 75%, at least 80%, at least 85%, at least 90%, at least 95%, at least 99%, or 100% identical to SEQ ID NO: 158; or
[3141] (rr)
[3142] VL1 comprises a CDR1 having an amino acid sequence at least 65%, at least 70%, at least 75%, at least 80%, at least 85%, at least 90%, at least 95%, at least 99%, or 100% identical to SEQ ID NO: 145 or 1050, a CDR2 having an amino acid sequence at least 65%, at least 70%, at least 75%, at least 80%, at least 85%, at least 90%, at least 95%, at least 99%, or 100% identical to SEQ ID NO: 1051 or an amino acid sequence at least 65%, at least 70%, at least 75%, at least 80%, at least 85%, at least 90%, at least 95%, at least 99%, or 100% identical to amino acid sequence AAS, and a CDR3 having an amino acid sequence at least 65%, at least 70%, at least 75%, at least 80%, at least 85%, at least 90%, at least 95%, at least 99%, or 100% identical to SEQ ID NO: 146 or 764,
[3143] VH1 comprises a CDR1 having an amino acid sequence at least 65%, at least 70%, at least 75%, at least 80%, at least 85%, at least 90%, at least 95%, at least 99%, or 100% identical to SEQ ID NO: 148 or 1052, a CDR2 having an amino acid sequence at least 65%, at least 70%, at least 75%, at least 80%, at least 85%, at least 90%, at least 95%, at least 99%, or 100% identical to SEQ ID NO: 149 or 1053, and a CDR3 having an amino acid sequence at least 65%, at least 70%, at least 75%, at least 80%, at least 85%, at least 90%, at least 95%, at least 99%, or 100% identical to SEQ ID NO: 150, 765, or 1054,
[3144] VL2 comprises a CDR1 having an amino acid sequence at least 65%, at least 70%, at least 75%, at least 80%, at least 85%, at least 90%, at least 95%, at least 99%, or 100% identical to SEQ ID NO: 9 or 1055, a CDR2 having an amino acid sequence at least 65%, at least 70%, at least 75%, at least 80%, at least 85%, at least 90%, at least 95%, at least 99%, or 100% identical to SEQ ID NO: 1056 or an amino acid sequence at least 65%, at least 70%, at least 75%, at least 80%, at least 85%, at least 90%, at least 95%, at least 99%, or 100% identical to amino acid sequence GAS, and a CDR3 having an amino acid sequence at least 65%, at least 70%, at least 75%, at least 80%, at least 85%, at least 90%, at least 95%, at least 99%, or 100% identical to SEQ ID NO: 10,
[3145] VH2 comprises a CDR1 having an amino acid sequence at least 65%, at least 70%, at least 75%, at least 80%, at least 85%, at least 90%, at least 95%, at least 99%, or 100% identical to SEQ ID NO: 12 or 1057, a CDR2 having an amino acid sequence at least 65%, at least 70%, at least 75%, at least 80%, at least 85%, at least 90%, at least 95%, at least 99%, or 100% identical to SEQ ID NO: 6 or 1058, and a CDR3 having an amino acid sequence at least 65%, at least 70%, at least 75%, at least 80%, at least 85%, at least 90%, at least 95%, at least 99%, or 100% identical to SEQ ID NO: 13 or 1059,
[3146] VL3 comprises a CDR1 having an amino acid sequence at least 65%, at least 70%, at least 75%, at least 80%, at least 85%, at least 90%, at least 95%, at least 99%, or 100% identical to SEQ ID NO: 138 or 1065, a CDR2 having an amino acid sequence at least 65%, at least 70%, at least 75%, at least 80%, at least 85%, at least 90%, at least 95%, at least 99%, or 100% identical to SEQ ID NO: 1061 or an amino acid sequence at least 65%, at least 70%, at least 75%, at least 80%, at least 85%, at least 90%, at least 95%, at least 99%, or 100% identical to amino acid sequence DAS, and a CDR3 having an amino acid sequence at least 65%, at least 70%, at least 75%, at least 80%, at least 85%, at least 90%, at least 95%, at least 99%, or 100% identical to SEQ ID NO: 139, 856, or 1066,
[3147] VH3 comprises a CDR1 having an amino acid sequence at least 65%, at least 70%, at least 75%, at least 80%, at least 85%, at least 90%, at least 95%, at least 99%, or 100% identical to SEQ ID NO: 141 or 1067, a CDR2 having an amino acid sequence at least 65%, at least 70%, at least 75%, at least 80%, at least 85%, at least 90%, at least 95%, at least 99%, or 100% identical to SEQ ID NO: 142 or 1068, and a CDR3 having an amino acid sequence at least 65%, at least 70%, at least 75%, at least 80%, at least 85%, at least 90%, at least 95%, at least 99%, or 100% identical to SEQ ID NO: 143, 857, or 1069,
[3148] VL4 comprises a CDR1 having an amino acid sequence at least 65%, at least 70%, at least 75%, at least 80%, at least 85%, at least 90%, at least 95%, at least 99%, or 100% identical to SEQ ID NO: 152 or 1045, a CDR2 having an amino acid sequence at least 65%, at least 70%, at least 75%, at least 80%, at least 85%, at least 90%, at least 95%, at least 99%, or 100% identical to SEQ ID NO: 1046 or an amino acid sequence at least 65%, at least 70%, at least 75%, at least 80%, at least 85%, at least 90%, at least 95%, at least 99%, or 100% identical to amino acid sequence GAS, and a CDR3 having an amino acid sequence at least 65%, at least 70%, at least 75%, at least 80%, at least 85%, at least 90%, at least 95%, at least 99%, or 100% identical to SEQ ID NO: 153 or 766, and
[3149] VH4 comprises a CDR1 having an amino acid sequence at least 65%, at least 70%, at least 75%, at least 80%, at least 85%, at least 90%, at least 95%, at least 99%, or 100% identical to SEQ ID NO: 155 or 1047, a CDR2 having an amino acid sequence at least 65%, at least 70%, at least 75%, at least 80%, at least 85%, at least 90%, at least 95%, at least 99%, or 100% identical to SEQ ID NO: 156 or 1048, and a CDR3 having an amino acid sequence at least 65%, at least 70%, at least 75%, at least 80%, at least 85%, at least 90%, at least 95%, at least 99%, or 100% identical to SEQ ID NO: 157, 767, or 1049, or
[3150] VL1 comprises an amino acid sequence at least 65%, at least 70%, at least 75%, at least 80%, at least 85%, at least 90%, at least 95%, at least 99%, or 100% identical to SEQ ID NO: 147, VH1 comprises an amino acid sequence at least 65%, at least 70%, at least 75%, at least 80%, at least 85%, at least 90%, at least 95%, at least 99%, or 100% identical to SEQ ID NO: 151, VL2 comprises an amino acid sequence at least 65%, at least 70%, at least 75%, at least 80%, at least 85%, at least 90%, at least 95%, at least 99%, or 100% identical to SEQ ID NO: 11, VH2 comprises an amino acid sequence at least 65%, at least 70%, at least 75%, at least 80%, at least 85%, at least 90%, at least 95%, at least 99%, or 100% identical to SEQ ID NO: 14, VL3 comprises an amino acid sequence at least 65%, at least 70%, at least 75%, at least 80%, at least 85%, at least 90%, at least 95%, at least 99%, or 100% identical to SEQ ID NO: 140, VH3 comprises an amino acid sequence at least 65%, at least 70%, at least 75%, at least 80%, at least 85%, at least 90%, at least 95%, at least 99%, or 100% identical to SEQ ID NO: 144, VL4 comprises an amino acid sequence at least 65%, at least 70%, at least 75%, at least 80%, at least 85%, at least 90%, at least 95%, at least 99%, or 100% identical to SEQ ID NO: 154, and VH4 comprises an amino acid sequence at least 65%, at least 70%, at least 75%, at least 80%, at least 85%, at least 90%, at least 95%, at least 99%, or 100% identical to SEQ ID NO: 158, or
[3151] (ss)
[3152] VL1 comprises the same light chain variable region as VL2, VL3, and VL4, and VH1 comprises the same heavy chain variable region as VH2, VH3, and VH4, and
[3153] wherein:
[3154] VL1 comprises a CDR1 having an amino acid sequence at least 65%, at least 70%, at least 75%, at least 80%, at least 85%, at least 90%, at least 95%, at least 99%, or 100% identical to SEQ ID NO: 145 or 1050, a CDR2 having an amino acid sequence at least 65%, at least 70%, at least 75%, at least 80%, at least 85%, at least 90%, at least 95%, at least 99%, or 100% identical to SEQ ID NO: 1051 or an amino acid sequence at least 65%, at least 70%, at least 75%, at least 80%, at least 85%, at least 90%, at least 95%, at least 99%, or 100% identical to amino acid sequence AAS, and a CDR3 having an amino acid sequence at least 65%, at least 70%, at least 75%, at least 80%, at least 85%, at least 90%, at least 95%, at least 99%, or 100% identical to SEQ ID NO: 146 or 764,
[3155] VH1 comprises a CDR1 having an amino acid sequence at least 65%, at least 70%, at least 75%, at least 80%, at least 85%, at least 90%, at least 95%, at least 99%, or 100% identical to SEQ ID NO: 148 or 1052, a CDR2 having an amino acid sequence at least 65%, at least 70%, at least 75%, at least 80%, at least 85%, at least 90%, at least 95%, at least 99%, or 100% identical to SEQ ID NO: 149 or 1053, and a CDR3 having an amino acid sequence at least 65%, at least 70%, at least 75%, at least 80%, at least 85%, at least 90%, at least 95%, at least 99%, or 100% identical to SEQ ID NO: 150, 765, or 1054,
[3156] VL2 comprises a CDR1 having an amino acid sequence at least 65%, at least 70%, at least 75%, at least 80%, at least 85%, at least 90%, at least 95%, at least 99%, or 100% identical to SEQ ID NO: 145 or 1050, a CDR2 having an amino acid sequence at least 65%, at least 70%, at least 75%, at least 80%, at least 85%, at least 90%, at least 95%, at least 99%, or 100% identical to SEQ ID NO: 1051 or an amino acid sequence at least 65%, at least 70%, at least 75%, at least 80%, at least 85%, at least 90%, at least 95%, at least 99%, or 100% identical to amino acid sequence AAS, and a CDR3 having an amino acid sequence at least 65%, at least 70%, at least 75%, at least 80%, at least 85%, at least 90%, at least 95%, at least 99%, or 100% identical to SEQ ID NO: 146 or 764,
[3157] VH2 comprises a CDR1 having an amino acid sequence at least 65%, at least 70%, at least 75%, at least 80%, at least 85%, at least 90%, at least 95%, at least 99%, or 100% identical to SEQ ID NO: 148 or 1052, a CDR2 having an amino acid sequence at least 65%, at least 70%, at least 75%, at least 80%, at least 85%, at least 90%, at least 95%, at least 99%, or 100% identical to SEQ ID NO: 149 or 1053, and a CDR3 having an amino acid sequence at least 65%, at least 70%, at least 75%, at least 80%, at least 85%, at least 90%, at least 95%, at least 99%, or 100% identical to SEQ ID NO: 150, 765, or 1054,
[3158] VL3 comprises a CDR1 having an amino acid sequence at least 65%, at least 70%, at least 75%, at least 80%, at least 85%, at least 90%, at least 95%, at least 99%, or 100% identical to SEQ ID NO: 145 or 1050, a CDR2 having an amino acid sequence at least 65%, at least 70%, at least 75%, at least 80%, at least 85%, at least 90%, at least 95%, at least 99%, or 100% identical to SEQ ID NO: 1051 or an amino acid sequence at least 65%, at least 70%, at least 75%, at least 80%, at least 85%, at least 90%, at least 95%, at least 99%, or 100% identical to amino acid sequence AAS, and a CDR3 having an amino acid sequence at least 65%, at least 70%, at least 75%, at least 80%, at least 85%, at least 90%, at least 95%, at least 99%, or 100% identical to SEQ ID NO: 146 or 764,
[3159] VH3 comprises a CDR1 having an amino acid sequence at least 65%, at least 70%, at least 75%, at least 80%, at least 85%, at least 90%, at least 95%, at least 99%, or 100% identical to SEQ ID NO: 148 or 1052, a CDR2 having an amino acid sequence at least 65%, at least 70%, at least 75%, at least 80%, at least 85%, at least 90%, at least 95%, at least 99%, or 100% identical to SEQ ID NO: 149 or 1053, and a CDR3 having an amino acid sequence at least 65%, at least 70%, at least 75%, at least 80%, at least 85%, at least 90%, at least 95%, at least 99%, or 100% identical to SEQ ID NO: 150, 765, or 1054,
[3160] VL4 comprises a CDR1 having an amino acid sequence at least 65%, at least 70%, at least 75%, at least 80%, at least 85%, at least 90%, at least 95%, at least 99%, or 100% identical to SEQ ID NO: 145 or 1050, a CDR2 having an amino acid sequence at least 65%, at least 70%, at least 75%, at least 80%, at least 85%, at least 90%, at least 95%, at least 99%, or 100% identical to SEQ ID NO: 1051 or an amino acid sequence at least 65%, at least 70%, at least 75%, at least 80%, at least 85%, at least 90%, at least 95%, at least 99%, or 100% identical to amino acid sequence AAS, and a CDR3 having an amino acid sequence at least 65%, at least 70%, at least 75%, at least 80%, at least 85%, at least 90%, at least 95%, at least 99%, or 100% identical to SEQ ID NO: 146 or 764, and
[3161] VH4 comprises a CDR1 having an amino acid sequence at least 65%, at least 70%, at least 75%, at least 80%, at least 85%, at least 90%, at least 95%, at least 99%, or 100% identical to SEQ ID NO: 148 or 1052, a CDR2 having an amino acid sequence at least 65%, at least 70%, at least 75%, at least 80%, at least 85%, at least 90%, at least 95%, at least 99%, or 100% identical to SEQ ID NO: 149 or 1053, and a CDR3 having an amino acid sequence at least 65%, at least 70%, at least 75%, at least 80%, at least 85%, at least 90%, at least 95%, at least 99%, or 100% identical to SEQ ID NO: 150, 765, or 1054, or
[3162] wherein:
[3163] VL1, VL2, VL3, and VL4 each comprise an amino acid sequence at least 65%, at least 70%, at least 75%, at least 80%, at least 85%, at least 90%, at least 95%, at least 99%, or 100% identical to SEQ ID NO: 147, and VH1, VH2, VH3, and VH4 each comprise an amino acid sequence at least 65%, at least 70%, at least 75%, at least 80%, at least 85%, at least 90%, at least 95%, at least 99%, or 100% identical to SEQ ID NO: 151; or
[3164] (tt)
[3165] VL1 comprises the same light chain variable region as VL2, VL3, and VL4, and VH1 comprises the same heavy chain variable region as VH2, VH3, and VH4, and
[3166] wherein:
[3167] VL1 comprises a CDR1 having an amino acid sequence at least 65%, at least 70%, at least 75%, at least 80%, at least 85%, at least 90%, at least 95%, at least 99%, or 100% identical to SEQ ID NO: 152 or 1045, a CDR2 having an amino acid sequence at least 65%, at least 70%, at least 75%, at least 80%, at least 85%, at least 90%, at least 95%, at least 99%, or 100% identical to SEQ ID NO: 1046 or an amino acid sequence at least 65%, at least 70%, at least 75%, at least 80%, at least 85%, at least 90%, at least 95%, at least 99%, or 100% identical to amino acid sequence GAS, and a CDR3 having an amino acid sequence at least 65%, at least 70%, at least 75%, at least 80%, at least 85%, at least 90%, at least 95%, at least 99%, or 100% identical to SEQ ID NO: 153 or 766,
[3168] VH1 comprises a CDR1 having an amino acid sequence at least 65%, at least 70%, at least 75%, at least 80%, at least 85%, at least 90%, at least 95%, at least 99%, or 100% identical to SEQ ID NO: 155 or 1047, a CDR2 having an amino acid sequence at least 65%, at least 70%, at least 75%, at least 80%, at least 85%, at least 90%, at least 95%, at least 99%, or 100% identical to SEQ ID NO: 156 or 1048, and a CDR3 having an amino acid sequence at least 65%, at least 70%, at least 75%, at least 80%, at least 85%, at least 90%, at least 95%, at least 99%, or 100% identical to SEQ ID NO: 157, 767, or 1049,
[3169] VL2 comprises a CDR1 having an amino acid sequence at least 65%, at least 70%, at least 75%, at least 80%, at least 85%, at least 90%, at least 95%, at least 99%, or 100% identical to SEQ ID NO: 152 or 1045, a CDR2 having an amino acid sequence at least 65%, at least 70%, at least 75%, at least 80%, at least 85%, at least 90%, at least 95%, at least 99%, or 100% identical to SEQ ID NO: 1046 or an amino acid sequence at least 65%, at least 70%, at least 75%, at least 80%, at least 85%, at least 90%, at least 95%, at least 99%, or 100% identical to amino acid sequence GAS, and a CDR3 having an amino acid sequence at least 65%, at least 70%, at least 75%, at least 80%, at least 85%, at least 90%, at least 95%, at least 99%, or 100% identical to SEQ ID NO: 153 or 766,
[3170] VH2 comprises a CDR1 having an amino acid sequence at least 65%, at least 70%, at least 75%, at least 80%, at least 85%, at least 90%, at least 95%, at least 99%, or 100% identical to SEQ ID NO: 155 or 1047, a CDR2 having an amino acid sequence at least 65%, at least 70%, at least 75%, at least 80%, at least 85%, at least 90%, at least 95%, at least 99%, or 100% identical to SEQ ID NO: 156 or 1048, and a CDR3 having an amino acid sequence at least 65%, at least 70%, at least 75%, at least 80%, at least 85%, at least 90%, at least 95%, at least 99%, or 100% identical to SEQ ID NO: 157, 767, or 1049,
[3171] VL3 comprises a CDR1 having an amino acid sequence at least 65%, at least 70%, at least 75%, at least 80%, at least 85%, at least 90%, at least 95%, at least 99%, or 100% identical to SEQ ID NO: 152 or 1045, a CDR2 having an amino acid sequence at least 65%, at least 70%, at least 75%, at least 80%, at least 85%, at least 90%, at least 95%, at least 99%, or 100% identical to SEQ ID NO: 1046 or an amino acid sequence at least 65%, at least 70%, at least 75%, at least 80%, at least 85%, at least 90%, at least 95%, at least 99%, or 100% identical to amino acid sequence GAS, and a CDR3 having an amino acid sequence at least 65%, at least 70%, at least 75%, at least 80%, at least 85%, at least 90%, at least 95%, at least 99%, or 100% identical to SEQ ID NO: 153 or 766,
[3172] VH3 comprises a CDR1 having an amino acid sequence at least 65%, at least 70%, at least 75%, at least 80%, at least 85%, at least 90%, at least 95%, at least 99%, or 100% identical to SEQ ID NO: 155 or 1047, a CDR2 having an amino acid sequence at least 65%, at least 70%, at least 75%, at least 80%, at least 85%, at least 90%, at least 95%, at least 99%, or 100% identical to SEQ ID NO: 156 or 1048, and a CDR3 having an amino acid sequence at least 65%, at least 70%, at least 75%, at least 80%, at least 85%, at least 90%, at least 95%, at least 99%, or 100% identical to SEQ ID NO: 157, 767, or 1049,
[3173] VL4 comprises a CDR1 having an amino acid sequence at least 65%, at least 70%, at least 75%, at least 80%, at least 85%, at least 90%, at least 95%, at least 99%, or 100% identical to SEQ ID NO: 152 or 1045, a CDR2 having an amino acid sequence at least 65%, at least 70%, at least 75%, at least 80%, at least 85%, at least 90%, at least 95%, at least 99%, or 100% identical to SEQ ID NO: 1046 or an amino acid sequence at least 65%, at least 70%, at least 75%, at least 80%, at least 85%, at least 90%, at least 95%, at least 99%, or 100% identical to amino acid sequence GAS, and a CDR3 having an amino acid sequence at least 65%, at least 70%, at least 75%, at least 80%, at least 85%, at least 90%, at least 95%, at least 99%, or 100% identical to SEQ ID NO: 153 or 766, and
[3174] VH4 comprises a CDR1 having an amino acid sequence at least 65%, at least 70%, at least 75%, at least 80%, at least 85%, at least 90%, at least 95%, at least 99%, or 100% identical to SEQ ID NO: 155 or 1047, a CDR2 having an amino acid sequence at least 65%, at least 70%, at least 75%, at least 80%, at least 85%, at least 90%, at least 95%, at least 99%, or 100% identical to SEQ ID NO: 156 or 1048, and a CDR3 having an amino acid sequence at least 65%, at least 70%, at least 75%, at least 80%, at least 85%, at least 90%, at least 95%, at least 99%, or 100% identical to SEQ ID NO: 157, 767, or 1049, or
[3175] wherein:
[3176] VL1, VL2, VL3, and VL4 each comprise an amino acid sequence at least 65%, at least 70%, at least 75%, at least 80%, at least 85%, at least 90%, at least 95%, at least 99%, or 100% identical to SEQ ID NO: 154, and VH1, VH2, VH3, and VH4 each comprise an amino acid sequence at least 65%, at least 70%, at least 75%, at least 80%, at least 85%, at least 90%, at least 95%, at least 99%, or 100% identical to SEQ ID NO: 158; or
[3177] (uu)
[3178] VL1 comprises the same light chain variable region as VL2, VL3, and VL4, and VH1 comprises the same heavy chain variable region as VH2, VH3, and VH4, and
[3179] wherein:
[3180] VL1 comprises a CDR1 having an amino acid sequence at least 65%, at least 70%, at least 75%, at least 80%, at least 85%, at least 90%, at least 95%, at least 99%, or 100% identical to SEQ ID NO: 9 or 1055, a CDR2 having an amino acid sequence at least 65%, at least 70%, at least 75%, at least 80%, at least 85%, at least 90%, at least 95%, at least 99%, or 100% identical to SEQ ID NO: 1056 or an amino acid sequence at least 65%, at least 70%, at least 75%, at least 80%, at least 85%, at least 90%, at least 95%, at least 99%, or 100% identical to amino acid sequence GAS, and a CDR3 having an amino acid sequence at least 65%, at least 70%, at least 75%, at least 80%, at least 85%, at least 90%, at least 95%, at least 99%, or 100% identical to SEQ ID NO: 10,
[3181] VH1 comprises a CDR1 having an amino acid sequence at least 65%, at least 70%, at least 75%, at least 80%, at least 85%, at least 90%, at least 95%, at least 99%, or 100% identical to SEQ ID NO: 12 or 1057, a CDR2 having an amino acid sequence at least 65%, at least 70%, at least 75%, at least 80%, at least 85%, at least 90%, at least 95%, at least 99%, or 100% identical to SEQ ID NO: 6 or 1058, and a CDR3 having an amino acid sequence at least 65%, at least 70%, at least 75%, at least 80%, at least 85%, at least 90%, at least 95%, at least 99%, or 100% identical to SEQ ID NO: 13 or 1059,
[3182] VL2 comprises a CDR1 having an amino acid sequence at least 65%, at least 70%, at least 75%, at least 80%, at least 85%, at least 90%, at least 95%, at least 99%, or 100% identical to SEQ ID NO: 9 or 1055, a CDR2 having an amino acid sequence at least 65%, at least 70%, at least 75%, at least 80%, at least 85%, at least 90%, at least 95%, at least 99%, or 100% identical to SEQ ID NO: 1056 or an amino acid sequence at least 65%, at least 70%, at least 75%, at least 80%, at least 85%, at least 90%, at least 95%, at least 99%, or 100% identical to amino acid sequence GAS, and a CDR3 having an amino acid sequence at least 65%, at least 70%, at least 75%, at least 80%, at least 85%, at least 90%, at least 95%, at least 99%, or 100% identical to SEQ ID NO: 10,
[3183] VH2 comprises a CDR1 having an amino acid sequence at least 65%, at least 70%, at least 75%, at least 80%, at least 85%, at least 90%, at least 95%, at least 99%, or 100% identical to SEQ ID NO: 12 or 1057, a CDR2 having an amino acid sequence at least 65%, at least 70%, at least 75%, at least 80%, at least 85%, at least 90%, at least 95%, at least 99%, or 100% identical to SEQ ID NO: 6 or 1058, and a CDR3 having an amino acid sequence at least 65%, at least 70%, at least 75%, at least 80%, at least 85%, at least 90%, at least 95%, at least 99%, or 100% identical to SEQ ID NO: 13 or 1059,
[3184] VL3 comprises a CDR1 having an amino acid sequence at least 65%, at least 70%, at least 75%, at least 80%, at least 85%, at least 90%, at least 95%, at least 99%, or 100% identical to SEQ ID NO: 9 or 1055, a CDR2 having an amino acid sequence at least 65%, at least 70%, at least 75%, at least 80%, at least 85%, at least 90%, at least 95%, at least 99%, or 100% identical to SEQ ID NO: 1056 or an amino acid sequence at least 65%, at least 70%, at least 75%, at least 80%, at least 85%, at least 90%, at least 95%, at least 99%, or 100% identical to amino acid sequence GAS, and a CDR3 having an amino acid sequence at least 65%, at least 70%, at least 75%, at least 80%, at least 85%, at least 90%, at least 95%, at least 99%, or 100% identical to SEQ ID NO: 10,
[3185] VH3 comprises a CDR1 having an amino acid sequence at least 65%, at least 70%, at least 75%, at least 80%, at least 85%, at least 90%, at least 95%, at least 99%, or 100% identical to SEQ ID NO: 12 or 1057, a CDR2 having an amino acid sequence at least 65%, at least 70%, at least 75%, at least 80%, at least 85%, at least 90%, at least 95%, at least 99%, or 100% identical to SEQ ID NO: 6 or 1058, and a CDR3 having an amino acid sequence at least 65%, at least 70%, at least 75%, at least 80%, at least 85%, at least 90%, at least 95%, at least 99%, or 100% identical to SEQ ID NO: 13 or 1059,
[3186] VL4 comprises a CDR1 having an amino acid sequence at least 65%, at least 70%, at least 75%, at least 80%, at least 85%, at least 90%, at least 95%, at least 99%, or 100% identical to SEQ ID NO: 9 or 1055, a CDR2 having an amino acid sequence at least 65%, at least 70%, at least 75%, at least 80%, at least 85%, at least 90%, at least 95%, at least 99%, or 100% identical to SEQ ID NO: 1056 or an amino acid sequence at least 65%, at least 70%, at least 75%, at least 80%, at least 85%, at least 90%, at least 95%, at least 99%, or 100% identical to amino acid sequence GAS, and a CDR3 having an amino acid sequence at least 65%, at least 70%, at least 75%, at least 80%, at least 85%, at least 90%, at least 95%, at least 99%, or 100% identical to SEQ ID NO: 10, and
[3187] VH4 comprises a CDR1 having an amino acid sequence at least 65%, at least 70%, at least 75%, at least 80%, at least 85%, at least 90%, at least 95%, at least 99%, or 100% identical to SEQ ID NO: 12 or 1057, a CDR2 having an amino acid sequence at least 65%, at least 70%, at least 75%, at least 80%, at least 85%, at least 90%, at least 95%, at least 99%, or 100% identical to SEQ ID NO: 6 or 1058, and a CDR3 having an amino acid sequence at least 65%, at least 70%, at least 75%, at least 80%, at least 85%, at least 90%, at least 95%, at least 99%, or 100% identical to SEQ ID NO: 13 or 1059, or
[3188] wherein:
[3189] VL1, VL2, VL3, and VL4 each comprise an amino acid sequence at least 65%, at least 70%, at least 75%, at least 80%, at least 85%, at least 90%, at least 95%, at least 99%, or 100% identical to SEQ ID NO: 11, and VH1, VH2, VH3, and VH4 each comprise an amino acid sequence at least 65%, at least 70%, at least 75%, at least 80%, at least 85%, at least 90%, at least 95%, at least 99%, or 100% identical to SEQ ID NO: 14.

[3190] In some aspects, one or both of the antigen binding polypeptides comprised in the antigen binding polypeptide complexes disclosed herein, comprise one or more CL, as indicated in the formulas representing the antigen binding polypeptide complexes disclosed herein. In some aspects, the CL comprises an amino acid sequence at least 65%, at least 70%, at least 75%, at least 80%, at least 85%, at least 90%, at least 95%, at least 99%, or 100% identical to any one of SEQ ID NOs: 374, 637, or 1092-1095.

[3191] In some aspects, one or both of the antigen binding polypeptides comprised in the antigen binding polypeptide complexes disclosed herein, comprise one or more CH1, as indicated in the formulas representing the antigen binding polypeptide complexes disclosed herein. In some aspects, the CH1 comprises an amino acid sequence at least 65%, at least 70%, at least 75%, at least 80%, at least 85%, at least 90%, at least 95%, at least 99%, or 100% identical to any one of SEQ ID NOs: 375, 634, 1070, 1071, or 1086-1091.

[3192] In some aspects, one or both of the antigen binding polypeptides comprised in the antigen binding polypeptide complexes provided herein further comprise an Fc region. In some aspects, one or both of the antigen binding polypeptides comprised in the antigen binding polypeptide complexes provided herein further comprise an Fc region at the carboxy-terminus. In some aspects, the Fc region comprises an immunoglobulin heavy chain constant region 2 (CH2) and/or an immunoglobulin heavy chain constant region 3 (CH3). In some aspects, the Fc region further comprises an immunoglobulin hinge (i.e., a hinge region). In some aspects, the hinge region is interposed between a CH1 and a CH2 (i.e., a hinge region is localized between the carboxy terminal residue of a CH1 and the N-terminal residue of a CH2). In some aspects, the hinge region comprises an amino acid sequence at least 65%, at least 70%, at least 75%, at least 80%, at least 85%, at least 90%, at least 95%, at least 99%, or 100% identical to any one of SEQ ID NOs: 635, 636, 1072, 1073, or 1074. In some aspects, the Fc region comprises a CH2 and a CH3. In some aspects, the CH2 comprises an amino acid sequence that is at least 65%, at least 70%, at least 75%, at least 80%, at least 85%, at least 90%, at least 95%, at least 99%, or 100% identical to any one of SEQ ID NOS: 1075-1078. In some aspects, the CH3 comprises an amino acid sequence that is at least 65%, at least 70%, at least 75%, at least 80%, at least 85%, at least 90%, at least 95%, at least 99%, or 100% identical to any one of SEQ ID NOs: 1079-1085. In some aspects, the Fc region comprises an amino acid sequence that is at least 65%, at least 70%, at least 75%, at least 80%, at least 85%, at least 90%, at least 95%, at least 99%, or 100% identical to any one of SEQ ID NOs: 376-380.

[3193] In some aspects, the Fc region comprises one or more amino acid substitutions. In some aspects, the one or more amino acid substitutions comprise one or more half-life extension amino acid substitutions. In some aspects, the one or more half-life extension amino acid substitutions comprise one or more of amino acid substitutions M428L, N434A, N434S, L234F, L235E, P331S, M252Y, S254T, or T256E, or equivalent thereof, based on the EU numbering scheme. In some aspects, the one or more half-life extension amino acid substitutions comprise a LA (M428L and N434A, or equivalent thereof, based on the EU numbering scheme) amino acid substitution. In some aspects, the one or more half-life extension amino acid substitutions comprise a LS (M428L and N434S, or equivalent thereof, based on the EU numbering scheme) amino acid substitution. In some aspects, the one or more half-life extension amino acid substitutions comprise L234F and L235E, or equivalent thereof (based on the EU numbering scheme) amino acid substitutions. In some aspects, the one or more half-life extension amino acid substitutions comprise a TM (L234F, L235E, and P331S, or equivalent thereof, based on the EU numbering scheme) amino acid substitution. In some aspects, the one or more half-life extension amino acid substitutions comprise a YTE (M252Y, S254T, and T256E, or equivalent thereof, based on the EU numbering scheme) amino acid substitution.

[3194] In some aspects, the Fc region comprises at least one knob-into-hole modification. In some aspects, the antigen binding polypeptides disclosed herein are comprised in IgG1 or IgG4 antibodies or antigen binding fragments thereof. In some aspects, the knob-into-hole modification comprises one or more of knob substitutions of S354C and T366W, or equivalent thereof, and/or one or more of hole substitutions of Y349C, T366S, L368A, Y407V, or equivalent thereof, or a combination thereof, based on the EU numbering scheme. In some aspects, the Fc region comprises a knob-into-hole modification comprising knob substitutions of S354C and T366W, or equivalent thereof, and/or hole substitutions of Y349C, T366S, L368A and Y407V, or equivalent thereof, and/or a half-life extension amino acid substitution comprising: a LA (M428L and N434A, or equivalent thereof, based on the EU numbering scheme) amino acid substitution, a LS (M428L and N434S, or equivalent thereof, based on the EU numbering scheme) amino acid substitution. L234F and L235E, or equivalent thereof (based on the EU numbering scheme) amino acid substitutions, a TM (L234F, L235E, and P331S, or equivalent thereof, based on the EU numbering scheme) amino acid substitution, a YTE (M252Y, S254T, and T256E, or equivalent thereof, based on the EU numbering scheme) amino acid substitution, or any combination thereof.

[3195] In some aspects, the Fc region comprises knob substitutions of S354C and T366W, or equivalent thereof, and a half-life extension amino acid substitution comprising: a LA (M428L and N434A, or equivalent thereof, based on the EU numbering scheme) amino acid substitution, a LS (M428L and N434S, or equivalent thereof, based on the EU numbering scheme) amino acid substitution. L234F and L235E, or equivalent thereof (based on the EU numbering scheme) amino acid substitutions, a TM (L234F, L235E, and P331S, or equivalent thereof, based on the EU numbering scheme) amino acid substitution, a YTE (M252Y, S254T, and T256E, or equivalent thereof, based on the EU numbering scheme) amino acid substitution, or any combination thereof.

[3196] In some aspects, the Fc region comprises hole substitutions of Y349C, T366S, L368A and Y407V, or equivalent thereof, and a half-life extension amino acid substitution comprising: a LA (M428L and N434A, or equivalent thereof, based on the EU numbering scheme) amino acid substitution, a LS (M428L and N434S, or equivalent thereof, based on the EU numbering scheme) amino acid substitution. L234F and L235E, or equivalent thereof. (based on the EU numbering scheme) amino acid substitutions, a TM (L234F, L235E, and P331S, or equivalent thereof, based on the EU numbering scheme) amino acid substitution, a YTE (M252Y, S254T, and T256E, or equivalent thereof, based on the EU numbering scheme) amino acid substitution, or any combination thereof.

[3197] In some aspects, one or both of the antigen binding polypeptides comprised in the antigen binding polypeptide complexes disclosed herein comprise one or more Fc effector function knockout mutation. In some aspects, one or both of the antigen binding polypeptides comprised in the antigen binding polypeptide complexes disclosed herein are IgG1 or IgG4 antibodies or antigen binding fragments thereof. In some aspects, the Fc effector function knockout mutation is L234A, L235A, P239A, or equivalent thereof, or a combination thereof, based on the EU numbering scheme.

[3198] In some aspects, one or both of the antigen binding polypeptides comprised in the antigen binding polypeptide complexes disclosed herein comprise a mutation at a glycosylation site. In some aspects, the mutation at a glycosylation site is a mutation at an N-glycosylation site. In some aspects, one or both of the antigen binding polypeptides comprised in the antigen binding polypeptide complexes disclosed herein comprise a VH comprising a mutation at a glycosylation site. In some aspects, the mutation at a glycosylation site is a mutation at an N-glycosylation site. In some aspects, the mutation at an N-glycosylation site is at amino acid N62 of the VH region or equivalent thereof. In some aspects, the mutation at an N-glycosylation site at amino acid N62 is N62Q or N62S, or equivalent thereof.

[3199] In some aspects, one or both of the antigen binding polypeptides comprised in the antigen binding polypeptide complexes disclosed herein, comprise one or more optional linkers. The one or more optional linkers are indicated herein as Ln, wherein n is an integer, and the integer next to each L indicates each L comprised in the antigen binding polypeptides comprised in the antigen binding polypeptide complexes disclosed herein. For example, if an antigen binding polypeptide comprised in the antigen binding polypeptide complexes disclosed herein comprises two linkers, the first linker from N-terminus to C-terminus is herein indicated as L1, and the second linker from N-terminus to C-terminus is herein indicated as L2. If an antigen binding polypeptide complex disclosed herein comprises a first antigen binding polypeptide comprising two linkers, indicated herein as L1 and L2, as explained above, the linkers comprised in the second antigen binding polypeptide are indicated with the following integer, in this example, the first linker from N-terminus to C-terminus of the second antigen binding polypeptide is herein indicated as L3, the second linker from N-terminus to C-terminus of the second antigen binding polypeptide is herein indicated as L3. In some aspects, any one of the optional linkers each independently have a length of from 0 amino acids to about 50 amino acids. In some aspects, any one of the optional linkers each independently have a length of from 5 amino acids to about 40 amino acids.

[3200] In some aspects, any one of the optional linkers are non-immunogenic. In some aspects, any one of the optional linkers do not contain a consensus T cell epitope.

[3201] In some aspects, any of Ln comprises an amino acid sequence of G or A, or an amino acid sequence at least 65%, at least 70%, at least 75%, at least 80%, at least 85%, at least 90%, at least 95%, at least 99%, or 100% identical to amino acid sequence GSS or ASG, or an amino acid sequence at least 65%, at least 70%, at least 75%, at least 80%, at least 85%, at least 90%, at least 95%, at least 99%, or 100% identical to any one of SEQ ID NOs: 333-373 or 967-971. In some aspects, Ln comprises an amino acid sequence at least 65%, at least 70%, at least 75%, at least 80%, at least 85%, at least 90%, at least 95%, at least 99%, or 100% identical to any one of SEQ ID NOs: 333-345 or 967-971.

[3202] In some aspects, the first polypeptide comprises a structure represented by VL1-VH1-VL2-CL-VH2-CH1, VL1-L1-VH1-L2-VL2-L3-CL-L4-VH2-L5-CH1, VL1-VH1-VL2-CL-VH2-CH1-CH2-CH3, or VL1-L1-VH1-L2-VL2-L3-CL-L4-VH2-L5-CH1-CH2-CH3 and the second polypeptide comprises a structure represented by VL3-VH3-VL4-CL-VH4-CH1, VL3-L6-VH3-L7-VL4-L8-CL-L9-VH4-L10-CH1, VL3-VH3-VL4-CL-VH4-CH1-CH2-CH3, or VL3-L6-VH3-L7-VL4-L8-CL-L9-VH4-L10-CH1-CH2-CH3
[3203] wherein:
[3204] (a) VL1 comprises the same light chain variable region as VL3, VH1 comprises the same heavy chain variable region as VH3, VL2 comprises the same light chain variable region as VL4, VH2 comprises the same heavy chain variable region as VH4, and
[3205] wherein:
[3206] VL1 and VL3 each comprise an amino acid sequence at least 65%, at least 70%, at least 75%, at least 80%, at least 85%, at least 90%, at least 95%, at least 99%, or 100% identical to SEQ ID NO: 11, VH1 and VH3 each comprise an amino acid sequence at least 65%, at least 70%, at least 75%, at least 80%, at least 85%, at least 90%, at least 95%, at least 99%, or 100% identical to SEQ ID NO: 14, VL2 and VL4 each comprise an amino acid sequence at least 65%, at least 70%, at least 75%, at least 80%, at least 85%, at least 90%, at least 95%, at least 99%, or 100% identical to SEQ ID NO: 17, and VH2 and VH4 each comprise an amino acid sequence at least 65%, at least 70%, at least 75%, at least 80%, at least 85%, at least 90%, at least 95%, at least 99%, or 100% identical to SEQ ID NO: 21 or 22; or
[3207] (b) VL1 comprises the same light chain variable region as VL3, VH1 comprises the same heavy chain variable region as VH3, VL2 comprises the same light chain variable region as VL4, VH2 comprises the same heavy chain variable region as VH4, and
[3208] wherein:
[3209] VL1 and VL3 each comprise an amino acid sequence at least 65%, at least 70%, at least 75%, at least 80%, at least 85%, at least 90%, at least 95%, at least 99%, or 100% identical to SEQ ID NO: 17, VH1 and VH3 each comprise an amino acid sequence at least 65%, at least 70%, at least 75%, at least 80%, at least 85%, at least 90%, at least 95%, at least 99%, or 100% identical to SEQ ID NO: 21 or 22, VL2 and VL4 each comprise an amino acid sequence at least 65%, at least 70%, at least 75%, at least 80%, at least 85%, at least 90%, at least 95%, at least 99%, or 100% identical to SEQ ID NO: 11, and VH2 and VH4 each comprise an amino acid sequence at least 65%, at least 70%, at least 75%, at least 80%, at least 85%, at least 90%, at least 95%, at least 99%, or 100% identical to SEQ ID NO: 14; or
[3210] (c) VL1 comprises the same light chain variable region as VL4, VH1 comprises the same heavy chain variable region as VH4, and
[3211] wherein:
[3212] VL1 and VL4 each comprise an amino acid sequence at least 65%, at least 70%, at least 75%, at least 80%, at least 85%, at least 90%, at least 95%, at least 99%, or 100% identical to SEQ ID NO: 11, VH1 and VH4 each comprise an amino acid sequence at least 65%, at least 70%, at least 75%, at least 80%, at least 85%, at least 90%, at least 95%, at least 99%, or 100% identical to SEQ ID NO: 14, VL2 comprises an amino acid sequence at least 65%, at least 70%, at least 75%, at least 80%, at least 85%, at least 90%, at least 95%, at least 99%, or 100% identical to SEQ ID NO: 25, VH2 comprises an amino acid sequence at least 65%, at least 70%, at least 75%, at least 80%, at least 85%, at least 90%, at least 95%, at least 99%, or 100% identical to SEQ ID NO: 29, VL3 comprises an amino acid sequence at least 65%, at least 70%, at least 75%, at least 80%, at least 85%, at least 90%, at least 95%, at least 99%, or 100% identical to SEQ ID NO: 17, and VH3 comprises an amino acid sequence at least 65%, at least 70%, at least 75%, at least 80%, at least 85%, at least 90%, at least 95%, at least 99%, or 100% identical to SEQ ID NO: 21 or 22; or
[3213] (d) VL1 comprises an amino acid sequence at least 65%, at least 70%, at least 75%, at least 80%, at least 85%, at least 90%, at least 95%, at least 99%, or 100% identical to SEQ ID NO: 4, VH1 comprises an amino acid sequence at least 65%, at least 70%, at least 75%, at least 80%, at least 85%, at least 90%, at least 95%, at least 99%, or 100% identical to SEQ ID NO: 8, VL2 comprises an amino acid sequence at least 65%, at least 70%, at least 75%, at least 80%, at least 85%, at least 90%, at least 95%, at least 99%, or 100% identical to SEQ ID NO: 25, VH2 comprises an amino acid sequence at least 65%, at least 70%, at least 75%, at least 80%, at least 85%, at least 90%, at least 95%, at least 99%, or 100% identical to SEQ ID NO: 29, VL3 comprises an amino acid sequence at least 65%, at least 70%, at least 75%, at least 80%, at least 85%, at least 90%, at least 95%, at least 99%, or 100% identical to SEQ ID NO: 33 or 39, VH3 comprises an amino acid sequence at least 65%, at least 70%, at least 75%, at least 80%, at least 85%, at least 90%, at least 95%, at least 99%, or 100% identical to SEQ ID NO: 37, VL4 comprises an amino acid sequence at least 65%, at least 70%, at least 75%, at least 80%, at least 85%, at least 90%, at least 95%, at least 99%, or 100% identical to SEQ ID NO: 17, and VH4 comprises an amino acid sequence at least 65%, at least 70%, at least 75%, at least 80%, at least 85%, at least 90%, at least 95%, at least 99%, or 100% identical to SEQ ID NO: 21 or 22.

[3214] In some aspects, one or both of the antigen binding polypeptides comprised in the antigen binding polypeptide complexes disclosed herein, comprise one or more CL, as indicated in the formulas representing the antigen binding polypeptide complexes disclosed herein. In some aspects, the CL comprises an amino acid sequence at least 65%, at least 70%, at least 75%, at least 80%, at least 85%, at least 90%, at least 95%, at least 99%, or 100% identical to any one of SEQ ID NOs: 374, 637, or 1092-1095.

[3215] In some aspects, one or both of the antigen binding polypeptides comprised in the antigen binding polypeptide complexes disclosed herein, comprise one or more CH1, as indicated in the formulas representing the antigen binding polypeptide complexes disclosed herein. In some aspects, the CH1 comprises an amino acid sequence at least 65%, at least 70%, at least 75%, at least 80%, at least 85%, at least 90%, at least 95%, at least 99%, or 100% identical to any one of SEQ ID NOs: 375, 634, 1070, 1071, or 1086-1091.

[3216] In some aspects, one or both of the antigen binding polypeptides comprised in the antigen binding polypeptide complexes provided herein further comprise an Fc region. In some aspects, one or both of the antigen binding polypeptides comprised in the antigen binding polypeptide complexes provided herein further comprise an Fc region at the carboxy-terminus. In some aspects, the Fc region comprises an immunoglobulin heavy chain constant region 2 (CH2) and/or an immunoglobulin heavy chain constant region 3 (CH3). In some aspects, the Fc region further comprises an immunoglobulin hinge (i.e., a hinge region). In some aspects, the hinge region is interposed between a CH1 and a CH2 (i.e., a hinge region is localized between the carboxy terminal residue of a CH1 and the N-terminal residue of a CH2). In some aspects, the hinge region comprises an amino acid sequence at least 65%, at least 70%, at least 75%, at least 80%, at least 85%, at least 90%, at least 95%, at least 99%, or 100% identical to any one of SEQ ID NOS: 635, 636, 1072, 1073, or 1074. In some aspects, the Fc region comprises a CH2 and a CH3. In some aspects, the CH2 comprises an amino acid sequence that is at least 65%, at least 70%, at least 75%, at least 80%, at least 85%, at least 90%, at least 95%, at least 99%, or 100% identical to any one of SEQ ID NOs: 1075-1078. In some aspects, the CH3 comprises an amino acid sequence that is at least 65%, at least 70%, at least 75%, at least 80%, at least 85%, at least 90%, at least 95%, at least 99%, or 100% identical to any one of SEQ ID NOs: 1079-1085. In some aspects, the Fc region comprises an amino acid sequence that is at least 65%, at least 70%, at least 75%, at least 80%, at least 85%, at least 90%, at least 95%, at least 99%, or 100% identical to any one of SEQ ID NOs: 376-380.

[3217] In some aspects, the Fc region comprises one or more amino acid substitutions. In some aspects, the one or more amino acid substitutions comprise one or more half-life extension amino acid substitutions. In some aspects, the one or more half-life extension amino acid substitutions comprise one or more of amino acid substitutions M428L, N434A, N434S, L234F, L235E, P331S, M252Y, S254T, or T256E, or equivalent thereof, based on the EU numbering scheme. In some aspects, the one or more half-life extension amino acid substitutions comprise a LA (M428L and N434A, or equivalent thereof, based on the EU numbering scheme) amino acid substitution. In some aspects, the one or more half-life extension amino acid substitutions comprise a LS (M428L and N434S, or equivalent thereof, based on the EU numbering scheme) amino acid substitution. In some aspects, the one or more half-life extension amino acid substitutions comprise L234F and L235E, or equivalent thereof (based on the EU numbering scheme) amino acid substitutions. In some aspects, the one or more half-life extension amino acid substitutions comprise a TM (L234F, L235E, and P331S, or equivalent thereof, based on the EU numbering scheme) amino acid substitution. In some aspects, the one or more half-life extension amino acid substitutions comprise a YTE (M252Y, S254T, and T256E, or equivalent thereof, based on the EU numbering scheme) amino acid substitution.

[3218] In some aspects, the Fc region comprises at least one knob-into-hole modification. In some aspects, the antigen binding polypeptides disclosed herein are comprised in IgG1 or IgG4 antibodies or antigen binding fragments thereof. In some aspects, the knob-into-hole modification comprises one or more of knob substitutions of S354C and T366W, or equivalent thereof, and/or one or more of hole substitutions of Y349C, T366S, L368A, Y407V, or equivalent thereof, or a combination thereof, based on the EU numbering scheme. In some aspects, the Fc region comprises a knob-into-hole modification comprising knob substitutions of S354C and T366W, or equivalent thereof, and/or hole substitutions of Y349C, T366S, L368A and Y407V, or equivalent thereof, and/or a half-life extension amino acid substitution comprising: a LA (M428L and N434A, or equivalent thereof, based on the EU numbering scheme) amino acid substitution, a LS (M428L and N434S, or equivalent thereof, based on the EU numbering scheme) amino acid substitution, L234F and L235E, or equivalent thereof (based on the EU numbering scheme) amino acid substitutions, a TM (L234F, L235E, and P331S, or equivalent thereof, based on the EU numbering scheme) amino acid substitution, a YTE (M252Y, S254T, and T256E, or equivalent thereof, based on the EU numbering scheme) amino acid substitution, or any combination thereof.

[3219] In some aspects, the Fc region comprises knob substitutions of S354C and T366W, or equivalent thereof, and a half-life extension amino acid substitution comprising: a LA (M428L and N434A, or equivalent thereof, based on the EU numbering scheme) amino acid substitution, a LS (M428L and N434S, or equivalent thereof, based on the EU numbering scheme) amino acid substitution. L234F and L235E, or equivalent thereof (based on the EU numbering scheme) amino acid substitutions, a TM (L234F, L235E, and P331S, or equivalent thereof, based on the EU numbering scheme) amino acid substitution, a YTE (M252Y, S254T, and T256E, or equivalent thereof, based on the EU numbering scheme) amino acid substitution, or any combination thereof.

[3220] In some aspects, the Fc region comprises hole substitutions of Y349C, T366S, L368A and Y407V, or equivalent thereof, and a half-life extension amino acid substitution comprising: a LA (M428L and N434A, or equivalent thereof, based on the EU numbering scheme) amino acid substitution, a LS (M428L and N434S, or equivalent thereof, based on the EU numbering scheme) amino acid substitution. L234F and L235E, or equivalent thereof (based on the EU numbering scheme) amino acid substitutions, a TM (L234F, L235E, and P331S, or equivalent thereof, based on the EU numbering scheme) amino acid substitution, a YTE (M252Y, S254T, and T256E, or equivalent thereof, based on the EU numbering scheme) amino acid substitution, or any combination thereof.

[3221] In some aspects, one or both of the antigen binding polypeptides comprised in the antigen binding polypeptide complexes disclosed herein comprise one or more Fc effector function knockout mutation. In some aspects, the antigen binding polypeptide complexes disclosed herein are IgG1 or IgG4 antibodies or antigen binding fragments thereof. In some aspects, the Fc effector function knockout mutation is L234A, L235A, P239A, or equivalent thereof, or a combination thereof, based on the EU numbering scheme.

[3222] In some aspects, one or both of the antigen binding polypeptides comprised in the antigen binding polypeptide complexes disclosed herein comprise a mutation at a glycosylation site. In some aspects, the mutation at a glycosylation site is a mutation at an N-glycosylation site. In some aspects, one or both of the antigen binding polypeptides comprised in the antigen binding polypeptide complexes disclosed herein comprise a VH comprising a mutation at a glycosylation site. In some aspects, the mutation at a glycosylation site is a mutation at an N-glycosylation site. In some aspects, the mutation at an N-glycosylation site is at amino acid N62 of the VH region or equivalent thereof. In some aspects, the mutation at an N-glycosylation site at amino acid N62 is N62Q or N62S, or equivalent thereof.

[3223] In some aspects, one or both of the antigen binding polypeptides comprised in the antigen binding polypeptide complexes disclosed herein, comprise one or more optional linkers. The one or more optional linkers are indicated herein as Ln, wherein n is an integer, and the integer next to each L indicates each L comprised in the antigen binding polypeptides comprised in the antigen binding polypeptide complexes disclosed herein. For example, if an antigen binding polypeptide comprised in the antigen binding polypeptide complexes disclosed herein comprises two linkers, the first linker from N-terminus to C-terminus is herein indicated as L1, and the second linker from N-terminus to C-terminus is herein indicated as L2. If an antigen binding polypeptide complex disclosed herein comprises a first antigen binding polypeptide comprising two linkers, indicated herein as L1 and L2, as explained above, the linkers comprised in the second antigen binding polypeptide are indicated with the following integer, in this example, the first linker from N-terminus to C-terminus of the second antigen binding polypeptide is herein indicated as L3, the second linker from N-terminus to C-terminus of the second antigen binding polypeptide is herein indicated as L3. In some aspects, any one of the optional linkers each independently have a length of from 0 amino acids to about 50 amino acids. In some aspects, any one of the optional linkers each independently have a length of from 5 amino acids to about 40 amino acids.

[3224] In some aspects, any one of the optional linkers are non-immunogenic. In some aspects, any one of the optional linkers do not contain a consensus T cell epitope.

[3225] In some aspects, any of Ln comprises an amino acid sequence of G or A, or an amino acid sequence at least 65%, at least 70%, at least 75%, at least 80%, at least 85%, at least 90%, at least 95%, at least 99%, or 100% identical to amino acid sequence GSS or ASG, or an amino acid sequence at least 65%, at least 70%, at least 75%, at least 80%, at least 85%, at least 90%, at least 95%, at least 99%, or 100% identical to any one of SEQ ID NOs: 333-373 or 967-971. In some aspects, Ln comprises an amino acid sequence at least 65%, at least 70%, at least 75%, at least 80%, at least 85%, at least 90%, at least 95%, at least 99%, or 100% identical to any one of SEQ ID NOs: 333-345 or 967-971.

[3226] In some aspects, the first polypeptide comprises a structure represented by VL1-CL-VH1-CH1-VL2-VH2, VL1-L1-CL-L2-VH1-L3-CH1-L4-VL2-L5-VH2, VL1-CL-VH1-CH1-VL2-VH2-CH2-CH3, or VL1-L1-CL-L2-VH1-L3-CH1-L4-VL2-L5-VH2-CH2-CH3 and the second polypeptide comprises a structure represented by VL3-CL-VH3-CH1-VL4-VH4, VL3-L6-CL-L7-VH3-L8-CH1-L9-VL4-L10-VH4, VL3-CL-VH3-CH1-VL4-VH4-CH2-CH3, or VL3-L6-CL-L7-VH3-L8-CH1-L9-VL4-L10-VH4-CH2-CH3,
[3227] wherein:
[3228] (a) VL1 comprises the same light chain variable region as VL3, VH1 comprises the same heavy chain variable region as VH3, VL2 comprises the same light chain variable region as VL4, VH2 comprises the same heavy chain variable region as VH4, and
[3229] wherein:
[3230] VL1 and VL3 each comprise an amino acid sequence at least 65%, at least 70%, at least 75%, at least 80%, at least 85%, at least 90%, at least 95%, at least 99%, or 100% identical to SEQ ID NO: 11, VH1 and VH3 each comprise an amino acid sequence at least 65%, at least 70%, at least 75%, at least 80%, at least 85%, at least 90%, at least 95%, at least 99%, or 100% identical to SEQ ID NO: 14, VL2 and VL4 each comprise an amino acid sequence at least 65%, at least 70%, at least 75%, at least 80%, at least 85%, at least 90%, at least 95%, at least 99%, or 100% identical to SEQ ID NO: 17, and VH2 and VH4 each comprise an amino acid sequence at least 65%, at least 70%, at least 75%, at least 80%, at least 85%, at least 90%, at least 95%, at least 99%, or 100% identical to SEQ ID NO: 21 or 22; or
[3231] (b) VL1 comprises the same light chain variable region as VL4, VH1 comprises the same heavy chain variable region as VH4, and
[3232] wherein:
[3233] VL1 and VL4 each comprise an amino acid sequence at least 65%, at least 70%, at least 75%, at least 80%, at least 85%, at least 90%, at least 95%, at least 99%, or 100% identical to SEQ ID NO: 11, VH1 and VH4 each comprise an amino acid sequence at least 65%, at least 70%, at least 75%, at least 80%, at least 85%, at least 90%, at least 95%, at least 99%, or 100% identical to SEQ ID NO: 14, VL2 comprises an amino acid sequence at least 65%, at least 70%, at least 75%, at least 80%, at least 85%, at least 90%, at least 95%, at least 99%, or 100% identical to SEQ ID NO: 25, VH2 comprises an amino acid sequence at least 65%, at least 70%, at least 75%, at least 80%, at least 85%, at least 90%, at least 95%, at least 99%, or 100% identical to SEQ ID NO: 29, VL3 comprises an amino acid sequence at least 65%, at least 70%, at least 75%, at least 80%, at least 85%, at least 90%, at least 95%, at least 99%, or 100% identical to SEQ ID NO: 17, and VH3 comprises an amino acid sequence at least 65%, at least 70%, at least 75%, at least 80%, at least 85%, at least 90%, at least 95%, at least 99%, or 100% identical to SEQ ID NO: 21 or 22; or
[3234] (c) VL1 comprises an amino acid sequence at least 65%, at least 70%, at least 75%, at least 80%, at least 85%, at least 90%, at least 95%, at least 99%, or 100% identical to SEQ ID NO: 4, VH1 comprises an amino acid sequence at least 65%, at least 70%, at least 75%, at least 80%, at least 85%, at least 90%, at least 95%, at least 99%, or 100% identical to SEQ ID NO: 8, VL2 comprises an amino acid sequence at least 65%, at least 70%, at least 75%, at least 80%, at least 85%, at least 90%, at least 95%, at least 99%, or 100% identical to SEQ ID NO: 25, VH2 comprises an amino acid sequence at least 65%, at least 70%, at least 75%, at least 80%, at least 85%, at least 90%, at least 95%, at least 99%, or 100% identical to SEQ ID NO: 29, VL3 comprises an amino acid sequence at least 65%, at least 70%, at least 75%, at least 80%, at least 85%, at least 90%, at least 95%, at least 99%, or 100% identical to SEQ ID NO: 33 or 39, VH3 comprises an amino acid sequence at least 65%, at least 70%, at least 75%, at least 80%, at least 85%, at least 90%, at least 95%, at least 99%, or 100% identical to SEQ ID NO: 37, VL4 comprises an amino acid sequence at least 65%, at least 70%, at least 75%, at least 80%, at least 85%, at least 90%, at least 95%, at least 99%, or 100% identical to SEQ ID NO: 17, and VH4 comprises an amino acid sequence at least 65%, at least 70%, at least 75%, at least 80%, at least 85%, at least 90%, at least 95%, at least 99%, or 100% identical to SEQ ID NO: 21 or 22.

[3235] In some aspects, the first polypeptide comprises a structure represented by VL1-VL2-VH2-VH1-CL-CH1, VL1-L1-VL2-L2-VH2-L3-VH1-L4-CL-L5-CH1, VL1-VL2-VH2-VH1-CL-CH1-CH2-CH3, or VL1-L1-VL2-L2-VH2-L3-VH1-L4-CL-L5-CH1-CH2-CH3 and the second polypeptide comprises a structure represented by VL3-VL4-VH4-VH3-CL-CH1, VL3-L6-VL4-L7-VH4-L8-VH3-L9-CL-L10-CH1, VL3-VL4-VH4-VH3-CL-CH1-CH2-CH3, or VL3-L6-VL4-L7-VH4-L8-VH3-L9-CL-L10-CH1-CH2-CH3,
[3236] wherein:
[3237] (a) VL1 comprises the same light chain variable region as VL3, VH1 comprises the same heavy chain variable region as VH3, VL2 comprises the same light chain variable region as VL4, VH2 comprises the same heavy chain variable region as VH4, and
[3238] wherein:
[3239] VL1 and VL3 each comprise an amino acid sequence at least 65%, at least 70%, at least 75%, at least 80%, at least 85%, at least 90%, at least 95%, at least 99%, or 100% identical to SEQ ID NO: 11, VH1 and VH3 each comprise an amino acid sequence at least 65%, at least 70%, at least 75%, at least 80%, at least 85%, at least 90%, at least 95%, at least 99%, or 100% identical to SEQ ID NO: 14, VL2 and VL4 each comprise an amino acid sequence at least 65%, at least 70%, at least 75%, at least 80%, at least 85%, at least 90%, at least 95%, at least 99%, or 100% identical to SEQ ID NO: 17, and VH2 and VH4 each comprise an amino acid sequence at least 65%, at least 70%, at least 75%, at least 80%, at least 85%, at least 90%, at least 95%, at least 99%, or 100% identical to SEQ ID NO: 21 or 22; or
[3240] (b) VL1 comprises the same light chain variable region as VL3, VH1 comprises the same heavy chain variable region as VH3, VL2 comprises the same light chain variable region as VL4, VH2 comprises the same heavy chain variable region as VH4, and
[3241] wherein:
[3242] VL1 and VL3 each comprise an amino acid sequence at least 65%, at least 70%, at least 75%, at least 80%, at least 85%, at least 90%, at least 95%, at least 99%, or 100% identical to SEQ ID NO: 11, VH1 and VH3 each comprise an amino acid sequence at least 65%, at least 70%, at least 75%, at least 80%, at least 85%, at least 90%, at least 95%, at least 99%, or 100% identical to SEQ ID NO: 14, VL2 and VL4 each comprise an amino acid sequence at least 65%, at least 70%, at least 75%, at least 80%, at least 85%, at least 90%, at least 95%, at least 99%, or 100% identical to SEQ ID NO: 17, and VH2 and VH4 each comprise an amino acid sequence at least 65%, at least 70%, at least 75%, at least 80%, at least 85%, at least 90%, at least 95%, at least 99%, or 100% identical to SEQ ID NO: 21 or 22; or
[3243] (c) VL1 comprises the same light chain variable region as VL4, VH1 comprises the same heavy chain variable region as VH4, VL2 comprises the same light chain variable region as VL3, VH2 comprises the same heavy chain variable region as VH3, and
[3244] wherein:
[3245] VL1 and VL4 each comprise an amino acid sequence at least 65%, at least 70%, at least 75%, at least 80%, at least 85%, at least 90%, at least 95%, at least 99%, or 100% identical to SEQ ID NO: 17, VH1 and VH4 each comprise an amino acid sequence at least 65%, at least 70%, at least 75%, at least 80%, at least 85%, at least 90%, at least 95%, at least 99%, or 100% identical to SEQ ID NO: 21 or 22, VL2 and VL3 each comprise an amino acid sequence at least 65%, at least 70%, at least 75%, at least 80%, at least 85%, at least 90%, at least 95%, at least 99%, or 100% identical to SEQ ID NO: 11, and VH2 and VH3 each comprise an amino acid sequence at least 65%, at least 70%, at least 75%, at least 80%, at least 85%, at least 90%, at least 95%, at least 99%, or 100% identical to SEQ ID NO: 14; or
[3246] (d) VL1 comprises the same light chain variable region as VL4, VH1 comprises the same heavy chain variable region as VH4, VL2 comprises the same light chain variable region as VL3, VH2 comprises the same heavy chain variable region as VH3, and
[3247] wherein:
[3248] VL1 and VL4 each comprise an amino acid sequence at least 65%, at least 70%, at least 75%, at least 80%, at least 85%, at least 90%, at least 95%, at least 99%, or 100% identical to SEQ ID NO: 11, VH1 and VH4 each comprise an amino acid sequence at least 65%, at least 70%, at least 75%, at least 80%, at least 85%, at least 90%, at least 95%, at least 99%, or 100% identical to SEQ ID NO: 14, VL2 and VL3 each comprise an amino acid sequence at least 65%, at least 70%, at least 75%, at least 80%, at least 85%, at least 90%, at least 95%, at least 99%, or 100% identical to SEQ ID NO: 17, and VH2 and VH3 each comprise an amino acid sequence at least 65%, at least 70%, at least 75%, at least 80%, at least 85%, at least 90%, at least 95%, at least 99%, or 100% identical to SEQ ID NO: 21 or 22; or
[3249] (e) VL2 comprises the same light chain variable region as VL3, VH2 comprises the same heavy chain variable region as VH3, and
[3250] wherein:
[3251] VL1 comprises an amino acid sequence at least 65%, at least 70%, at least 75%, at least 80%, at least 85%, at least 90%, at least 95%, at least 99%, or 100% identical to SEQ ID NO: 25, VH1 comprises an amino acid sequence at least 65%, at least 70%, at least 75%, at least 80%, at least 85%, at least 90%, at least 95%, at least 99%, or 100% identical to SEQ ID NO: 29, VL2 and VL3 each comprise an amino acid sequence at least 65%, at least 70%, at least 75%, at least 80%, at least 85%, at least 90%, at least 95%, at least 99%, or 100% identical to SEQ ID NO: 11, VH2 and VH3 each comprise an amino acid sequence at least 65%, at least 70%, at least 75%, at least 80%, at least 85%, at least 90%, at least 95%, at least 99%, or 100% identical to SEQ ID NO: 14, VL4 comprises an amino acid sequence at least 65%, at least 70%, at least 75%, at least 80%, at least 85%, at least 90%, at least 95%, at least 99%, or 100% identical to SEQ ID NO: 17, and VH4 comprises an amino acid sequence at least 65%, at least 70%, at least 75%, at least 80%, at least 85%, at least 90%, at least 95%, at least 99%, or 100% identical to SEQ ID NO: 21 or 22; or
[3252] (f) VL1 comprises the same light chain variable region as VL3, VH1 comprises the same heavy chain variable region as VH3, and
[3253] wherein:
[3254] VL1 and VL3 each comprise an amino acid sequence at least 65%, at least 70%, at least 75%, at least 80%, at least 85%, at least 90%, at least 95%, at least 99%, or 100% identical to SEQ ID NO: 11, VH1 and VH3 each comprise an amino acid sequence at least 65%, at least 70%, at least 75%, at least 80%, at least 85%, at least 90%, at least 95%, at least 99%, or 100% identical to SEQ ID NO: 14, VL2 comprises an amino acid sequence at least 65%, at least 70%, at least 75%, at least 80%, at least 85%, at least 90%, at least 95%, at least 99%, or 100% identical to SEQ ID NO: 25, VH2 comprises an amino acid sequence at least 65%, at least 70%, at least 75%, at least 80%, at least 85%, at least 90%, at least 95%, at least 99%, or 100% identical to SEQ ID NO: 29, VL4 comprises an amino acid sequence at least 65%, at least 70%, at least 75%, at least 80%, at least 85%, at least 90%, at least 95%, at least 99%, or 100% identical to SEQ ID NO: 17, and VH4 comprises an amino acid sequence at least 65%, at least 70%, at least 75%, at least 80%, at least 85%, at least 90%, at least 95%, at least 99%, or 100% identical to SEQ ID NO: 21 or 22; or
[3255] (g) VL1 comprises the same light chain variable region as VL4, VH1 comprises the same heavy chain variable region as VH4, and
[3256] wherein:
[3257] VL1 and VL4 each comprise an amino acid sequence at least 65%, at least 70%, at least 75%, at least 80%, at least 85%, at least 90%, at least 95%, at least 99%, or 100% identical to SEQ ID NO: 11, VH1 and VH4 each comprise an amino acid sequence at least 65%, at least 70%, at least 75%, at least 80%, at least 85%, at least 90%, at least 95%, at least 99%, or 100% identical to SEQ ID NO: 14, VL2 comprises an amino acid sequence at least 65%, at least 70%, at least 75%, at least 80%, at least 85%, at least 90%, at least 95%, at least 99%, or 100% identical to SEQ ID NO: 25, VH2 comprises an amino acid sequence at least 65%, at least 70%, at least 75%, at least 80%, at least 85%, at least 90%, at least 95%, at least 99%, or 100% identical to SEQ ID NO: 29, VL3 comprises an amino acid sequence at least 65%, at least 70%, at least 75%, at least 80%, at least 85%, at least 90%, at least 95%, at least 99%, or 100% identical to SEQ ID NO: 17, and VH3 comprises an amino acid sequence at least 65%, at least 70%, at least 75%, at least 80%, at least 85%, at least 90%, at least 95%, at least 99%, or 100% identical to SEQ ID NO: 21 or 22; or
[3258] (h) VL1 comprises the same light chain variable region as VL3, VH1 comprises the same heavy chain variable region as VH3, and
[3259] wherein:
[3260] VL1 and VL3 each comprise an amino acid sequence at least 65%, at least 70%, at least 75%, at least 80%, at least 85%, at least 90%, at least 95%, at least 99%, or 100% identical to SEQ ID NO: 11, VH1 and VH3 each comprise an amino acid sequence at least 65%, at least 70%, at least 75%, at least 80%, at least 85%, at least 90%, at least 95%, at least 99%, or 100% identical to SEQ ID NO: 14, VL2 comprises an amino acid sequence at least 65%, at least 70%, at least 75%, at least 80%, at least 85%, at least 90%, at least 95%, at least 99%, or 100% identical to SEQ ID NO: 67, VH2 comprises an amino acid sequence at least 65%, at least 70%, at least 75%, at least 80%, at least 85%, at least 90%, at least 95%, at least 99%, or 100% identical to SEQ ID NO: 71 or 626, VL4 comprises an amino acid sequence at least 65%, at least 70%, at least 75%, at least 80%, at least 85%, at least 90%, at least 95%, at least 99%, or 100% identical to SEQ ID NO: 17, and VH4 comprises an amino acid sequence at least 65%, at least 70%, at least 75%, at least 80%, at least 85%, at least 90%, at least 95%, at least 99%, or 100% identical to SEQ ID NO: 21 or 22.

[3261] In some aspects, one or both of the antigen binding polypeptides comprised in the antigen binding polypeptide complexes disclosed herein, comprise one or more CL, as indicated in the formulas representing the antigen binding polypeptide complexes disclosed herein. In some aspects, the CL comprises an amino acid sequence at least 65%, at least 70%, at least 75%, at least 80%, at least 85%, at least 90%, at least 95%, at least 99%, or 100% identical to any one of SEQ ID NOs: 374, 637, or 1092-1095.

[3262] In some aspects, one or both of the antigen binding polypeptides comprised in the antigen binding polypeptide complexes disclosed herein, comprise one or more CH1, as indicated in the formulas representing the antigen binding polypeptide complexes disclosed herein. In some aspects, the CH1 comprises an amino acid sequence at least 65%, at least 70%, at least 75%, at least 80%, at least 85%, at least 90%, at least 95%, at least 99%, or 100% identical to any one of SEQ ID NOs: 375, 634, 1070, 1071, or 1086-1091.

[3263] In some aspects, one or both of the antigen binding polypeptides comprised in the antigen binding polypeptide complexes provided herein further comprise an Fc region. In some aspects, one or both of the antigen binding polypeptides comprised in the antigen binding polypeptide complexes provided herein further comprise an Fc region at the carboxy-terminus. In some aspects, the Fc region comprises an immunoglobulin heavy chain constant region 2 (CH2) and/or an immunoglobulin heavy chain constant region 3 (CH3). In some aspects, the Fc region further comprises an immunoglobulin hinge (i.e., a hinge region). In some aspects, the hinge region is interposed between a CH1 and a CH2 (i.e., a hinge region is localized between the carboxy terminal residue of a CH1 and the N-terminal residue of a CH2). In some aspects, the hinge region comprises an amino acid sequence at least 65%, at least 70%, at least 75%, at least 80%, at least 85%, at least 90%, at least 95%, at least 99%, or 100% identical to any one of SEQ ID NOS: 635, 636, 1072, 1073, or 1074. In some aspects, the Fc region comprises a CH2 and a CH3. In some aspects, the CH2 comprises an amino acid sequence that is at least 65%, at least 70%, at least 75%, at least 80%, at least 85%, at least 90%, at least 95%, at least 99%, or 100% identical to any one of SEQ ID NOS: 1075-1078. In some aspects, the CH3 comprises an amino acid sequence that is at least 65%, at least 70%, at least 75%, at least 80%, at least 85%, at least 90%, at least 95%, at least 99%, or 100% identical to any one of SEQ ID NOs: 1079-1085. In some aspects, the Fc region comprises an amino acid sequence that is at least 65%, at least 70%, at least 75%, at least 80%, at least 85%, at least 90%, at least 95%, at least 99%, or 100% identical to any one of SEQ ID NOs: 376-380.

[3264] In some aspects, the Fc region comprises one or more amino acid substitutions. In some aspects, the one or more amino acid substitutions comprise one or more half-life extension amino acid substitutions. In some aspects, the one or more half-life extension amino acid substitutions comprise one or more of amino acid substitutions M428L, N434A, N434S, L234F, L235E, P331S, M252Y, S254T, or T256E, or equivalent thereof, based on the EU numbering scheme. In some aspects, the one or more half-life extension amino acid substitutions comprise a LA (M428L and N434A, or equivalent thereof, based on the EU numbering scheme) amino acid substitution. In some aspects, the one or more half-life extension amino acid substitutions comprise a LS (M428L and N434S, or equivalent thereof, based on the EU numbering scheme) amino acid substitution. In some aspects, the one or more half-life extension amino acid substitutions comprise L234F and L235E, or equivalent thereof (based on the EU numbering scheme) amino acid substitutions. In some aspects, the one or more half-life extension amino acid substitutions comprise a TM (L234F, L235E, and P331S, or equivalent thereof, based on the EU numbering scheme) amino acid substitution. In some aspects, the one or more half-life extension amino acid substitutions comprise a YTE (M252Y, S254T, and T256E, or equivalent thereof, based on the EU numbering scheme) amino acid substitution.

[3265] In some aspects, the Fc region comprises at least one knob-into-hole modification. In some aspects, the antigen binding polypeptides disclosed herein are comprised in IgG1 or IgG4 antibodies or antigen binding fragments thereof. In some aspects, the knob-into-hole modification comprises one or more of knob substitutions of S354C and T366W, or equivalent thereof, and/or one or more of hole substitutions of Y349C, T366S, L368A, Y407V, or equivalent thereof, or a combination thereof, based on the EU numbering scheme. In some aspects, the Fc region comprises a knob-into-hole modification comprising knob substitutions of S354C and T366W, or equivalent thereof, and/or hole substitutions of Y349C, T366S, L368A and Y407V, or equivalent thereof, and/or a half-life extension amino acid substitution comprising: a LA (M428L and N434A, or equivalent thereof, based on the EU numbering scheme) amino acid substitution, a LS (M428L and N434S, or equivalent thereof, based on the EU numbering scheme) amino acid substitution, L234F and L235E, or equivalent thereof (based on the EU numbering scheme) amino acid substitutions, a TM (L234F, L235E, and P331S, or equivalent thereof, based on the EU numbering scheme) amino acid substitution, a YTE (M252Y, S254T, and T256E, or equivalent thereof, based on the EU numbering scheme) amino acid substitution, or any combination thereof.

[3266] In some aspects, the Fc region comprises knob substitutions of S354C and T366W, or equivalent thereof, and a half-life extension amino acid substitution comprising: a LA (M428L and N434A, or equivalent thereof, based on the EU numbering scheme) amino acid substitution, a LS (M428L and N434S, or equivalent thereof, based on the EU numbering scheme) amino acid substitution. L234F and L235E, or equivalent thereof (based on the EU numbering scheme) amino acid substitutions, a TM (L234F, L235E, and P331S, or equivalent thereof, based on the EU numbering scheme) amino acid substitution, a YTE (M252Y, S254T, and T256E, or equivalent thereof, based on the EU numbering scheme) amino acid substitution, or any combination thereof.

[3267] In some aspects, the Fc region comprises hole substitutions of Y349C, T366S, L368A and Y407V, or equivalent thereof, and a half-life extension amino acid substitution comprising: a LA (M428L and N434A, or equivalent thereof, based on the EU numbering scheme) amino acid substitution, a LS (M428L and N434S, or equivalent thereof, based on the EU numbering scheme) amino acid substitution, L234F and L235E, or equivalent thereof (based on the EU numbering scheme) amino acid substitutions, a TM (L234F, L235E, and P331S, or equivalent thereof, based on the EU numbering scheme) amino acid substitution, a YTE (M252Y, S254T, and T256E, or equivalent thereof, based on the EU numbering scheme) amino acid substitution, or any combination thereof.

[3268] In some aspects, one or both of the antigen binding polypeptides comprised in the antigen binding polypeptide complexes disclosed herein comprise one or more Fc effector function knockout mutation. In some aspects, the antigen binding polypeptide complexes disclosed herein are IgG1 or IgG4 antibodies or antigen binding fragments thereof. In some aspects, the Fc effector function knockout mutation is L234A, L235A, P239A, or equivalent thereof, or a combination thereof, based on the EU numbering scheme.

[3269] In some aspects, one or both of the antigen binding polypeptides comprised in the antigen binding polypeptide complexes disclosed herein comprise a mutation at a glycosylation site. In some aspects, the mutation at a glycosylation site is a mutation at an N-glycosylation site. In some aspects, one or both of the antigen binding polypeptides comprised in the antigen binding polypeptide complexes disclosed herein comprise a VH comprising a mutation at a glycosylation site. In some aspects, the mutation at a glycosylation site is a mutation at an N-glycosylation site. In some aspects, the mutation at an N-glycosylation site is at amino acid N62 of the VH region or equivalent thereof. In some aspects, the mutation at an N-glycosylation site at amino acid N62 is N62Q or N62S, or equivalent thereof.

[3270] In some aspects, one or both of the antigen binding polypeptides comprised in the antigen binding polypeptide complexes disclosed herein, comprise one or more optional linkers. The one or more optional linkers are indicated herein as Ln, wherein n is an integer, and the integer next to each L indicates each L comprised in the antigen binding polypeptides comprised in the antigen binding polypeptide complexes disclosed herein. For example, if an antigen binding polypeptide comprised in the antigen binding polypeptide complexes disclosed herein comprises two linkers, the first linker from N-terminus to C-terminus is herein indicated as L1, and the second linker from N-terminus to C-terminus is herein indicated as L2. If an antigen binding polypeptide complex disclosed herein comprises a first antigen binding polypeptide comprising two linkers, indicated herein as L1 and L2, as explained above, the linkers comprised in the second antigen binding polypeptide are indicated with the following integer, in this example, the first linker from N-terminus to C-terminus of the second antigen binding polypeptide is herein indicated as L3, the second linker from N-terminus to C-terminus of the second antigen binding polypeptide is herein indicated as L3. In some aspects, any one of the optional linkers each independently have a length of from 0 amino acids to about 50 amino acids. In some aspects, any one of the optional linkers each independently have a length of from 5 amino acids to about 40 amino acids.

[3271] In some aspects, any one of the optional linkers are non-immunogenic. In some aspects, any one of the optional linkers do not contain a consensus T cell epitope.

[3272] In some aspects, any of Ln comprises an amino acid sequence of G or A, or an amino acid sequence at least 65%, at least 70%, at least 75%, at least 80%, at least 85%, at least 90%, at least 95%, at least 99%, or 100% identical to amino acid sequence GSS or ASG, or an amino acid sequence at least 65%, at least 70%, at least 75%, at least 80%, at least 85%, at least 90%, at least 95%, at least 99%, or 100% identical to any one of SEQ ID NOs: 333-373 or 967-971. In some aspects, Ln comprises an amino acid sequence at least 65%, at least 70%, at least 75%, at least 80%, at least 85%, at least 90%, at least 95%, at least 99%, or 100% identical to any one of SEQ ID NOs: 333-345 or 967-971.

[3273] In some aspects, the first polypeptide comprises a structure represented by VL1-VH1-VL2-CL-VH2-CH1, VL1-L1-VH1-L2-VL2-L3-CL-L4-VH2-L5-CH1, VL1-VH1-VL2-CL-VH2-CH1-CH2-CH3, or VL1-L1-VH1-L2-VL2-L3-CL-L4-VH2-L5-CH1-CH2-CH3 and the second polypeptide comprises a structure represented by VL3-CL-VH3-CH1-VL4-VH4, VL3-L6-CL-L7-VH3-L8-CH1-L9-VL4-L10-VH4, VL3-CL-VH3-CH1-VL4-VH4-CH2-CH3, or VL3-L6-CL-L7-VH3-L8-CH1-L9-VL4-L10-VH4-CH2-CH3,
[3274] wherein:
[3275] (a) VL1 comprises the same light chain variable region as VL3, VH1 comprises the same heavy chain variable region as VH3, VL2 comprises the same light chain variable region as VL4, VH2 comprises the same heavy chain variable region as VH4, and
[3276] wherein:
[3277] VL1 and VL3 each comprise an amino acid sequence at least 65%, at least 70%, at least 75%, at least 80%, at least 85%, at least 90%, at least 95%, at least 99%, or 100% identical to SEQ ID NO: 11, VH1 and VH3 each comprise an amino acid sequence at least 65%, at least 70%, at least 75%, at least 80%, at least 85%, at least 90%, at least 95%, at least 99%, or 100% identical to SEQ ID NO: 14, VL2 and VL4 each comprise an amino acid sequence at least 65%, at least 70%, at least 75%, at least 80%, at least 85%, at least 90%, at least 95%, at least 99%, or 100% identical to SEQ ID NO: 17, and VH2 and VH4 each comprise an amino acid sequence at least 65%, at least 70%, at least 75%, at least 80%, at least 85%, at least 90%, at least 95%, at least 99%, or 100% identical to SEQ ID NO: 21 or 22; or
[3278] (b) VL1 comprises the same light chain variable region as VL4, VH1 comprises the same heavy chain variable region as VH4, and
[3279] wherein:
[3280] VL1 and VL4 each comprise an amino acid sequence at least 65%, at least 70%, at least 75%, at least 80%, at least 85%, at least 90%, at least 95%, at least 99%, or 100% identical to SEQ ID NO: 11, VH1 and VH4 each comprise an amino acid sequence at least 65%, at least 70%, at least 75%, at least 80%, at least 85%, at least 90%, at least 95%, at least 99%, or 100% identical to SEQ ID NO: 14, VL2 comprises an amino acid sequence at least 65%, at least 70%, at least 75%, at least 80%, at least 85%, at least 90%, at least 95%, at least 99%, or 100% identical to SEQ ID NO: 25, VH2 comprises an amino acid sequence at least 65%, at least 70%, at least 75%, at least 80%, at least 85%, at least 90%, at least 95%, at least 99%, or 100% identical to SEQ ID NO: 29, VL3 comprises an amino acid sequence at least 65%, at least 70%, at least 75%, at least 80%, at least 85%, at least 90%, at least 95%, at least 99%, or 100% identical to SEQ ID NO: 17, and VH3 comprises an amino acid sequence at least 65%, at least 70%, at least 75%, at least 80%, at least 85%, at least 90%, at least 95%, at least 99%, or 100% identical to SEQ ID NO: 21 or 22; or
[3281] (c) VL1 comprises an amino acid sequence at least 65%, at least 70%, at least 75%, at least 80%, at least 85%, at least 90%, at least 95%, at least 99%, or 100% identical to SEQ ID NO: 4, VH1 comprises an amino acid sequence at least 65%, at least 70%, at least 75%, at least 80%, at least 85%, at least 90%, at least 95%, at least 99%, or 100% identical to SEQ ID NO: 8, VL2 comprises an amino acid sequence at least 65%, at least 70%, at least 75%, at least 80%, at least 85%, at least 90%, at least 95%, at least 99%, or 100% identical to SEQ ID NO: 25, VH2 comprises an amino acid sequence at least 65%, at least 70%, at least 75%, at least 80%, at least 85%, at least 90%, at least 95%, at least 99%, or 100% identical to SEQ ID NO: 29, VL3 comprises an amino acid sequence at least 65%, at least 70%, at least 75%, at least 80%, at least 85%, at least 90%, at least 95%, at least 99%, or 100% identical to SEQ ID NO: 33, 34 or 39, VH3 comprises an amino acid sequence at least 65%, at least 70%, at least 75%, at least 80%, at least 85%, at least 90%, at least 95%, at least 99%, or 100% identical to SEQ ID NO: 37, VL4 comprises an amino acid sequence at least 65%, at least 70%, at least 75%, at least 80%, at least 85%, at least 90%, at least 95%, at least 99%, or 100% identical to SEQ ID NO: 17, and VH4 comprises an amino acid sequence at least 65%, at least 70%, at least 75%, at least 80%, at least 85%, at least 90%, at least 95%, at least 99%, or 100% identical to SEQ ID NO: 21 or 22.

[3282] In some aspects, the first polypeptide comprises a structure represented by VL1-CL-VH1-CH1-VL2-VH2, VL1-L1-CL-L2-VH1-L3-CH1-L4-VL2-L5-VH2, VL1-CL-VH1-CH1-VL2-VH2-CH2-CH3, or VL1-L1-CL-L2-VH1-L3-CH1-L4-VL2-L5-VH2-CH2-CH3 and the second polypeptide comprises a structure represented by VL3-VH3-VL4-CL-VH4-CH1, VL3-L6-VH3-L7-VL4-L8-CL-L9-VH4-L10-CH1, VL3-VH3-VL4-CL-VH4-CH1-CH2-CH3, or VL3-L6-VH3-L7-VL4-L8-CL-L9-VH4-L10-CH1-CH2-CH3.
[3283] wherein:
[3284] (a) VL1 comprises the same light chain variable region as VL3, VH1 comprises the same heavy chain variable region as VH3, VL2 comprises the same light chain variable region as VL4, VH2 comprises the same heavy chain variable region as VH4, and
[3285] wherein:
[3286] VL1 and VL3 each comprise an amino acid sequence at least 65%, at least 70%, at least 75%, at least 80%, at least 85%, at least 90%, at least 95%, at least 99%, or 100% identical to SEQ ID NO: 11, VH1 and VH3 each comprise an amino acid sequence at least 65%, at least 70%, at least 75%, at least 80%, at least 85%, at least 90%, at least 95%, at least 99%, or 100% identical to SEQ ID NO: 14, VL2 and VL4 each comprise an amino acid sequence at least 65%, at least 70%, at least 75%, at least 80%, at least 85%, at least 90%, at least 95%, at least 99%, or 100% identical to SEQ ID NO: 17, and VH2 and VH4 each comprise an amino acid sequence at least 65%, at least 70%, at least 75%, at least 80%, at least 85%, at least 90%, at least 95%, at least 99%, or 100% identical to SEQ ID NO: 21 or 22; or
[3287] (b) VL1 comprises the same light chain variable region as VL3, VH1 comprises the same heavy chain variable region as VH3, and
[3288] wherein:
[3289] VL1 and VL3 each comprise an amino acid sequence at least 65%, at least 70%, at least 75%, at least 80%, at least 85%, at least 90%, at least 95%, at least 99%, or 100% identical to SEQ ID NO: 17, VH1 and VH3 each comprise an amino acid sequence at least 65%, at least 70%, at least 75%, at least 80%, at least 85%, at least 90%, at least 95%, at least 99%, or 100% identical to SEQ ID NO: 21 or 22, VL2 comprises an amino acid sequence at least 65%, at least 70%, at least 75%, at least 80%, at least 85%, at least 90%, at least 95%, at least 99%, or 100% identical to SEQ ID NO: 25, VH2 comprises an amino acid sequence at least 65%, at least 70%, at least 75%, at least 80%, at least 85%, at least 90%, at least 95%, at least 99%, or 100% identical to SEQ ID NO: 29, VL4 comprises an amino acid sequence at least 65%, at least 70%, at least 75%, at least 80%, at least 85%, at least 90%, at least 95%, at least 99%, or 100% identical to SEQ ID NO: 11, and VH4 comprises an amino acid sequence at least 65%, at least 70%, at least 75%, at least 80%, at least 85%, at least 90%, at least 95%, at least 99%, or 100% identical to SEQ ID NO: 14; or
[3290] (c) VL1 comprises an amino acid sequence at least 65%, at least 70%, at least 75%, at least 80%, at least 85%, at least 90%, at least 95%, at least 99%, or 100% identical to SEQ ID NO: 4, VH1 comprises an amino acid sequence at least 65%, at least 70%, at least 75%, at least 80%, at least 85%, at least 90%, at least 95%, at least 99%, or 100% identical to SEQ ID NO: 8, VL2 comprises an amino acid sequence at least 65%, at least 70%, at least 75%, at least 80%, at least 85%, at least 90%, at least 95%, at least 99%, or 100% identical to SEQ ID NO: 25, VH2 comprises an amino acid sequence at least 65%, at least 70%, at least 75%, at least 80%, at least 85%, at least 90%, at least 95%, at least 99%, or 100% identical to SEQ ID NO: 29, VL3 comprises an amino acid sequence at least 65%, at least 70%, at least 75%, at least 80%, at least 85%, at least 90%, at least 95%, at least 99%, or 100% identical to SEQ ID NO: 33 or 39, VH3 comprises an amino acid sequence at least 65%, at least 70%, at least 75%, at least 80%, at least 85%, at least 90%, at least 95%, at least 99%, or 100% identical to SEQ ID NO: 37, VL4 comprises an amino acid sequence at least 65%, at least 70%, at least 75%, at least 80%, at least 85%, at least 90%, at least 95%, at least 99%, or 100% identical to SEQ ID NO: 17, and VH4 comprises an amino acid sequence at least 65%, at least 70%, at least 75%, at least 80%, at least 85%, at least 90%, at least 95%, at least 99%, or 100% identical to SEQ ID NO: 21 or 22.

[3291] In some aspects, the first polypeptide comprises a structure represented by VL1-VL2-CH1; VL1-L1-VL2-L2-CH1; VL1-VL2-CH1-CH2-CH3; or VL1-L1-VL2-L2-CH1-CH2-CH3 and the second polypeptide comprises a structure represented by VH1-VH2-CL; VH1-L3-VH2-L4-CL; VH1-VH2-CL-CH2-CH3; or VH1-L3-VH2-L4-CL-CH2-CH3.

[3292] In some aspects, the first polypeptide comprises a structure represented by VL1-VL2-VL3-CH1; VL1-L1-VL2-L2-VL3-L3-CH1; VL1-VL2-VL3-CH1-CH2-CH3; or VL1-L1-VL2-L2-VL3-L3-CH1-CH2-CH3 and the second polypeptide comprises a structure represented by VH1-VH2-VH3-CL; VH1-L4-VH2-L5-VH3-L6-CL; or VH1-L4-VH2-L5-VH3-L6-CL-CH2-CH3.

[3293] In some aspects, the first polypeptide comprises a structure represented by VL1-VH1-CL, VL1-L1-VH1-L2-CL; VL1-VH1-CL-CH2-CH3; VL1-L1-VH1-L2-CL-CH2-CH3 and the second polypeptide comprises a structure represented by VL2-VH2-CH1; VL2-L3-VH2-L4-CH1; VL2-VH2-CH1-CH2-CH3; VL2-L3-VH2-L4-CH1-CH2-CH3;
[3294] wherein:
[3295] (a) VL1 comprises an amino acid sequence at least 65%, at least 70%, at least 75%, at least 80%, at least 85%, at least 90%, at least 95%, at least 99%, or 100% identical to SEQ ID NO: 17, VH1 comprises an amino acid sequence at least 65%, at least 70%, at least 75%, at least 80%, at least 85%, at least 90%, at least 95%, at least 99%, or 100% identical to SEQ ID NO: 21 or 22, VL2 comprises an amino acid sequence at least 65%, at least 70%, at least 75%, at least 80%, at least 85%, at least 90%, at least 95%, at least 99%, or 100% identical to SEQ ID NO: 17, and VH2 comprises an amino acid sequence at least 65%, at least 70%, at least 75%, at least 80%, at least 85%, at least 90%, at least 95%, at least 99%, or 100% identical to SEQ ID NO: 21 or 22; or
[3296] (b) VL1 comprises an amino acid sequence at least 65%, at least 70%, at least 75%, at least 80%, at least 85%, at least 90%, at least 95%, at least 99%, or 100% identical to SEQ ID NO: 11, VH1 comprises an amino acid sequence at least 65%, at least 70%, at least 75%, at least 80%, at least 85%, at least 90%, at least 95%, at least 99%, or 100% identical to SEQ ID NO: 14, VL2 comprises an amino acid sequence at least 65%, at least 70%, at least 75%, at least 80%, at least 85%, at least 90%, at least 95%, at least 99%, or 100% identical to SEQ ID NO: 11, and VH2 comprises an amino acid sequence at least 65%, at least 70%, at least 75%, at least 80%, at least 85%, at least 90%, at least 95%, at least 99%, or 100% identical to SEQ ID NO: 14; or
[3297] (c) VL1 comprises an amino acid sequence at least 65%, at least 70%, at least 75%, at least 80%, at least 85%, at least 90%, at least 95%, at least 99%, or 100% identical to SEQ ID NO: 74, VH1 comprises an amino acid sequence at least 65%, at least 70%, at least 75%, at least 80%, at least 85%, at least 90%, at least 95%, at least 99%, or 100% identical to SEQ ID NO: 78, VL2 comprises an amino acid sequence at least 65%, at least 70%, at least 75%, at least 80%, at least 85%, at least 90%, at least 95%, at least 99%, or 100% identical to SEQ ID NO: 74, and VH2 comprises an amino acid sequence at least 65%, at least 70%, at least 75%, at least 80%, at least 85%, at least 90%, at least 95%, at least 99%, or 100% identical to SEQ ID NO: 78.

[3298] In some aspects, one or both of the antigen binding polypeptides comprised in the antigen binding polypeptide complexes disclosed herein, comprise one or more CL, as indicated in the formulas representing the antigen binding polypeptide complexes disclosed herein. In some aspects, the CL comprises an amino acid sequence at least 65%, at least 70%, at least 75%, at least 80%, at least 85%, at least 90%, at least 95%, at least 99%, or 100% identical to any one of SEQ ID NOs: 374, 637, or 1092-1095.

[3299] In some aspects, one or both of the antigen binding polypeptides comprised in the antigen binding polypeptide complexes disclosed herein, comprise one or more CH1, as indicated in the formulas representing the antigen binding polypeptide complexes disclosed herein. In some aspects, the CH1 comprises an amino acid sequence at least 65%, at least 70%, at least 75%, at least 80%, at least 85%, at least 90%, at least 95%, at least 99%, or 100% identical to any one of SEQ ID NOs: 375, 634, 1070, 1071, or 1086-1091.

[3300] In some aspects, one or both of the antigen binding polypeptides comprised in the antigen binding polypeptide complexes provided herein further comprise an Fc region. In some aspects, one or both of the antigen binding polypeptides comprised in the antigen binding polypeptide complexes provided herein further comprise an Fc region at the carboxy-terminus. In some aspects, the Fc region comprises an immunoglobulin heavy chain constant region 2 (CH2) and/or an immunoglobulin heavy chain constant region 3 (CH3). In some aspects, the Fc region further comprises an immunoglobulin hinge (i.e., a hinge region). In some aspects, the hinge region is interposed between a CH1 and a CH2 (i.e., a hinge region is localized between the carboxy terminal residue of a CH1 and the N-terminal residue of a CH2). In some aspects, the hinge region comprises an amino acid sequence at least 65%, at least 70%, at least 75%, at least 80%, at least 85%, at least 90%, at least 95%, at least 99%, or 100% identical to any one of SEQ ID NOS: 635, 636, 1072, 1073, or 1074. In some aspects, the Fc region comprises a CH2 and a CH3. In some aspects, the CH2 comprises an amino acid sequence that is at least 65%, at least 70%, at least 75%, at least 80%, at least 85%, at least 90%, at least 95%, at least 99%, or 100% identical to any one of SEQ ID NOs: 1075-1078. In some aspects, the CH3 comprises an amino acid sequence that is at least 65%, at least 70%, at least 75%, at least 80%, at least 85%, at least 90%, at least 95%, at least 99%, or 100% identical to any one of SEQ ID NOs: 1079-1085. In some aspects, the Fc region comprises an amino acid sequence that is at least 65%, at least 70%, at least 75%, at least 80%, at least 85%, at least 90%, at least 95%, at least 99%, or 100% identical to any one of SEQ ID NOs: 376-380.

[3301] In some aspects, the Fc region comprises one or more amino acid substitutions. In some aspects, the one or more amino acid substitutions comprise one or more half-life extension amino acid substitutions. In some aspects, the one or more half-life extension amino acid substitutions comprise one or more of amino acid substitutions M428L, N434A, N434S, L234F, L235E, P331S, M252Y, S254T, or T256E, or equivalent thereof, based on the EU numbering scheme. In some aspects, the one or more half-life extension amino acid substitutions comprise a LA (M428L and N434A, or equivalent thereof, based on the EU numbering scheme) amino acid substitution. In some aspects, the one or more half-life extension amino acid substitutions comprise a LS (M428L and N434S, or equivalent thereof, based on the EU numbering scheme) amino acid substitution. In some aspects, the one or more half-life extension amino acid substitutions comprise L234F and L235E, or equivalent thereof (based on the EU numbering scheme) amino acid substitutions. In some aspects, the one or more half-life extension amino acid substitutions comprise a TM (L234F, L235E, and P331S, or equivalent thereof, based on the EU numbering scheme) amino acid substitution. In some aspects, the one or more half-life extension amino acid substitutions comprise a YTE (M252Y, S254T, and T256E, or equivalent thereof, based on the EU numbering scheme) amino acid substitution.

[3302] In some aspects, the Fc region comprises at least one knob-into-hole modification. In some aspects, the antigen binding polypeptides disclosed herein are comprised in IgG1 or IgG4 antibodies or antigen binding fragments thereof. In some aspects, the knob-into-hole modification comprises one or more of knob substitutions of S354C and T366W, or equivalent thereof, and/or one or more of hole substitutions of Y349C, T366S, L368A, Y407V, or equivalent thereof, or a combination thereof, based on the EU numbering scheme. In some aspects, the Fc region comprises a knob-into-hole modification comprising knob substitutions of S354C and T366W, or equivalent thereof, and/or hole substitutions of Y349C, T366S, L368A and Y407V, or equivalent thereof, and/or a half-life extension amino acid substitution comprising: a LA (M428L and N434A, or equivalent thereof, based on the EU numbering scheme) amino acid substitution, a LS (M428L and N434S, or equivalent thereof, based on the EU numbering scheme) amino acid substitution. L234F and L235E, or equivalent thereof (based on the EU numbering scheme) amino acid substitutions, a TM (L234F, L235E, and P331S, or equivalent thereof, based on the EU numbering scheme) amino acid substitution, a YTE (M252Y, S254T, and T256E, or equivalent thereof, based on the EU numbering scheme) amino acid substitution, or any combination thereof.

[3303] In some aspects, the Fc region comprises knob substitutions of S354C and T366W, or equivalent thereof, and a half-life extension amino acid substitution comprising: a LA (M428L and N434A, or equivalent thereof, based on the EU numbering scheme) amino acid substitution, a LS (M428L and N434S, or equivalent thereof, based on the EU numbering scheme) amino acid substitution. L234F and L235E, or equivalent thereof (based on the EU numbering scheme) amino acid substitutions, a TM (L234F, L235E, and P331S, or equivalent thereof, based on the EU numbering scheme) amino acid substitution, a YTE (M252Y, S254T, and T256E, or equivalent thereof, based on the EU numbering scheme) amino acid substitution, or any combination thereof.

[3304] In some aspects, the Fc region comprises hole substitutions of Y349C, T366S, L368A and Y407V, or equivalent thereof, and a half-life extension amino acid substitution comprising: a LA (M428L and N434A, or equivalent thereof, based on the EU numbering scheme) amino acid substitution, a LS (M428L and N434S, or equivalent thereof, based on the EU numbering scheme) amino acid substitution. L234F and L235E, or equivalent thereof (based on the EU numbering scheme) amino acid substitutions, a TM (L234F, L235E, and P331S, or equivalent thereof, based on the EU numbering scheme) amino acid substitution, a YTE (M252Y, S254T, and T256E, or equivalent thereof, based on the EU numbering scheme) amino acid substitution, or any combination thereof.

[3305] In some aspects, one or both of the antigen binding polypeptides comprised in the antigen binding polypeptide complexes disclosed herein comprise one or more Fc effector function knockout mutation. In some aspects, the antigen binding polypeptide complexes disclosed herein are IgG1 or IgG4 antibodies or antigen binding fragments thereof. In some aspects, the Fc effector function knockout mutation is L234A, L235A, P239A, or equivalent thereof, or a combination thereof, based on the EU numbering scheme.

[3306] In some aspects, one or both of the antigen binding polypeptides comprised in the antigen binding polypeptide complexes disclosed herein comprise a mutation at a glycosylation site. In some aspects, the mutation at a glycosylation site is a mutation at an N-glycosylation site. In some aspects, one or both of the antigen binding polypeptides comprised in the antigen binding polypeptide complexes disclosed herein comprise a VH comprising a mutation at a glycosylation site. In some aspects, the mutation at a glycosylation site is a mutation at an N-glycosylation site. In some aspects, the mutation at an N-glycosylation site is at amino acid N62 of the VH region or equivalent thereof. In some aspects, the mutation at an N-glycosylation site at amino acid N62 is N62Q or N62S, or equivalent thereof.

[3307] In some aspects, one or both of the antigen binding polypeptides comprised in the antigen binding polypeptide complexes disclosed herein, comprise one or more optional linkers. The one or more optional linkers are indicated herein as Ln, wherein n is an integer, and the integer next to each L indicates each L comprised in the antigen binding polypeptides comprised in the antigen binding polypeptide complexes disclosed herein. For example, if an antigen binding polypeptide comprised in the antigen binding polypeptide complexes disclosed herein comprises two linkers, the first linker from N-terminus to C-terminus is herein indicated as L1, and the second linker from N-terminus to C-terminus is herein indicated as L2. If an antigen binding polypeptide complex disclosed herein comprises a first antigen binding polypeptide comprising two linkers, indicated herein as L1 and L2, as explained above, the linkers comprised in the second antigen binding polypeptide are indicated with the following integer, in this example, the first linker from N-terminus to C-terminus of the second antigen binding polypeptide is herein indicated as L3, the second linker from N-terminus to C-terminus of the second antigen binding polypeptide is herein indicated as L3. In some aspects, any one of the optional linkers each independently have a length of from 0 amino acids to about 50 amino acids. In some aspects, any one of the optional linkers each independently have a length of from 5 amino acids to about 40 amino acids.

[3308] In some aspects, any one of the optional linkers are non-immunogenic. In some aspects, any one of the optional linkers do not contain a consensus T cell epitope.

[3309] In some aspects, any of Ln comprises an amino acid sequence of G or A, or an amino acid sequence at least 65%, at least 70%, at least 75%, at least 80%, at least 85%, at least 90%, at least 95%, at least 99%, or 100% identical to amino acid sequence GSS or ASG, or an amino acid sequence at least 65%, at least 70%, at least 75%, at least 80%, at least 85%, at least 90%, at least 95%, at least 99%, or 100% identical to any one of SEQ ID NOs: 333-373 or 967-971. In some aspects, Ln comprises an amino acid sequence at least 65%, at least 70%, at least 75%, at least 80%, at least 85%, at least 90%, at least 95%, at least 99%, or 100% identical to any one of SEQ ID NOs: 333-345 or 967-971.

[3310] In some aspects, an antigen binding polypeptide complex provided herein comprises a first polypeptide, and a second polypeptide; wherein the first polypeptide has a structure represented by:
[3311] VL1-L1-VL2-L2-VH2-L3-VH1-L4-Fc;
[3312] VL1-L1-VH2-L2-VL2-L3-VH1-L4-Fc;
[3313] VH1-L1-VH2-L2-VL2-L3-VL1-L4-Fc; or
[3314] VH1-L1-VL2-L2-VH2-L3-VL1-L4-Fc;
   and wherein the second polypeptide has a structure represented by:
[3315] VL3-L5-VL4-L6-VH4-L7-VH3-L8-Fc;
[3316] VL3-L5-VH4-L6-VL4-L7-VH3-L8-Fc;
[3317] VH3-L5-VH4-L6-VL4-L7-VL3-L8-Fc; or
[3318] VH3-L5-VL4-L6-VH4-L7-VL3-L8-Fc;
[3319] wherein:
[3320] VL1 is a first immunoglobulin light chain variable region that specifically binds to a severe acute respiratory syndrome coronavirus 2 (SARS-CoV-2) protein;
[3321] VL2 is a second immunoglobulin light chain variable region that specifically binds to a SARS-CoV-2 protein;
[3322] VL3 is a third immunoglobulin light chain variable region that specifically binds to a SARS-CoV-2 protein;
[3323] VL4 is a fourth immunoglobulin light chain variable region that specifically binds to a SARS-CoV-2 protein;
[3324] VH1 is a first immunoglobulin heavy chain variable region that specifically binds to a SARS-CoV-2 protein;
[3325] VH2 is a second immunoglobulin heavy chain variable region that specifically binds to a SARS-CoV-2 protein;
[3326] VH3 is a third immunoglobulin heavy chain variable region that specifically binds to a SARS-CoV-2 protein;
[3327] VH4 is a fourth immunoglobulin heavy chain variable region that specifically binds to a SARS-CoV-2 protein;
[3328] L1-L8 are optional amino acid linkers; and
[3329] Fc is an immunoglobulin fragment crystallizable region comprising an immunoglobulin heavy chain constant region 2 (CH2), an immunoglobulin heavy chain constant region 3 (CH3), and optionally, an immunoglobulin hinge.

[3330] In some aspects, an antigen binding polypeptide complex provided herein comprises a first polypeptide, and a second polypeptide; wherein the first polypeptide has a structure represented by:
[3331] VL1-L1-VL2-L2-VH2-L3-VH1-L4-CH1-L5-CL-L6-Fc;
[3332] VL1-L1-VH2-L2-VL2-L3-VH1-L4-CH1-L5-CL-L6-Fc;
[3333] VH1-L1-VH2-L2-VL2-L3-VL1-L4-CH1-L5-CL-L6-Fc;
[3334] VH1-L1-VL2-L2-VH2-L3-VL1-L4-CH1-L5-CL-L6-Fc;
[3335] VL1-L1-VL2-L2-VH2-L3-VH1-L4-CL-L5-CH1-L6-Fc;
[3336] VL1-L1-VH2-L2-VL2-L3-VH1-L4-CL-L5-CH1-L6-Fc;
[3337] VH1-L1-VH2-L2-VL2-L3-VL1-L4-CL-L5-CH1-L6-Fc; or
[3338] VH1-L1-VL2-L2-VH2-L3-VL1-L4-CL-L5-CH1-L6-Fc;
   and wherein the second polypeptide has a structure represented by:
[3339] VL3-L7-VL4-L8-VH4-L9-VH3-L10-CH1-L11-CL-L12-Fc;
[3340] VL3-L7-VH4-L8-VL4-L9-VH3-L10-CH1-L11-CL-L12-Fc;
[3341] VH3-L7-VH4-L8-VL4-L9-VL3-L10-CH1-L11-CL-L12-Fc;
[3342] VH3-L7-VL4-L8-VH4-L9-VL3-L10-CH1-L11-CL-L12-Fc;
[3343] VL3-L7-VL4-L8-VH4-L9-VH3-L10-CL-L11-CH1-L12-Fc;
[3344] VL3-L7-VH4-L8-VL4-L9-VH3-L10-CL-L11-CH1-L12-Fc;
[3345] VH3-L7-VH4-L8-VL4-L9-VL3-L10-CL-L11-CH1-L12-Fc; or
[3346] VH3-L7-VL4-L8-VH4-L9-VL3-L10-CL-L11-CH1-L12-Fc;
   wherein:
[3347] VL1 is a first immunoglobulin light chain variable region that specifically binds to a severe acute respiratory syndrome coronavirus 2 (SARS-CoV-2) protein;
[3348] VL2 is a second immunoglobulin light chain variable region that specifically binds to a SARS-CoV-2 protein;
[3349] VL3 is a third immunoglobulin light chain variable region that specifically binds to a SARS-CoV-2 protein;
[3350] VL4 is a fourth immunoglobulin light chain variable region that specifically binds to a SARS-CoV-2 protein;
[3351] VH1 is a first immunoglobulin heavy chain variable region that specifically binds to a SARS-CoV-2 protein;
[3352] VH2 is a second immunoglobulin heavy chain variable region that specifically binds to a SARS-CoV-2 protein;
[3353] VH3 is a third immunoglobulin heavy chain variable region that specifically binds to a SARS-CoV-2 protein;
[3354] VH4 is a fourth immunoglobulin heavy chain variable region that specifically binds to a SARS-CoV-2 protein;
[3355] L1-L12 are optional amino acid linkers;
[3356] CH1 is an immunoglobulin heavy chain constant region 1;
[3357] CL is an immunoglobulin light chain constant region; and
[3358] Fc is an immunoglobulin fragment crystallizable region comprising an immunoglobulin heavy chain constant region 2 (CH2), an immunoglobulin heavy chain constant region 3 (CH3), and optionally, an immunoglobulin hinge.

[3359] In any aspect shown herein as a structure from amino terminus to carboxy terminus, and with binding pairs selected from VL and/or VH or other structural regions such as CH2, CH3, when shown without a specific linker such as L1, L2, etc., such linkers are optionally present in such structures between each designated subsequence VL, VH, etc.

[3360] In some aspects, the VL1 comprises (i) a complementarity determining region (CDR) 1 having an amino acid sequence that is at least 65%, at least 70%, at least 75%, at least 80%, at least 85%, at least 90%, at least 95%, at least 99%, or 100% identical to any one of SEQ ID NOs: 1, 9, 15, 23, 30, 41, 48, 55, 58, 65, 72, 79, 86, 93, 99, 105, 112, 119, 130, 138, 145, 152, 159, 166, 172, 179, 186, 192, 199, 205, 212, 219, 226, 232, 324, 627, 640, 650, 659, 676, 687, 695, 703, 712, 770, 778, 785, 794, 801, 807, 814, 827, 836, 849, 858, 865, 878, 1045, 1050, 1055, 1060, and 1065; (ii) a CDR2 having an amino acid sequence that is at least 65%, at least 70%, at least 75%, at least 80%, at least 85%, at least 90%, at least 95%, at least 99%, or 100% identical to any one of SEQ ID NOs: 2, 31, 628, 641, 677, 1046, 1051, 1056, and 1061; or at least 65%, at least 70%, at least 75%, at least 80%, at least 85%, at least 90%, at least 95%, at least 99%, or 100% identical to any one of amino acid sequences AAS, GAS, LGS, GTN, GTN, SAS, SDS, DNT, EVT, DAS, DVT, RNS, DVS, EDS, DDS, KDS, VAS, WAS, YTS, EVS, NNN, SYN, and DAT; and (iii) a CDR3 having an amino acid sequence that is at least 65%, at least 70%, at least 75%, at least 80%, at least 85%, at least 90%, at least 95%, at least 99%, or 100% identical to any one of SEQ ID NOs: 3, 10, 16, 24, 32, 38, 42, 49, 59, 66, 73, 80, 87, 94, 100, 106, 113, 120, 126, 131, 139, 146, 153, 160, 167, 173, 180, 187, 193, 200, 206, 213, 220, 227, 233, 239, 242, 246, 249, 256, 283, 285, 287, 288, 290, 292, 294, 296, 301, 304, 306, 309, 311, 313, 316, 325, 326, 329, 642, 651, 660, 668, 678, 651, 696, 704, 713, 764, 766, 768, 771, 779, 786, 792, 795, 808, 815, 821, 830, 837, 843, 850, 856, 859, 866, 872, 879, 885, and 1066.

[3361] In some aspects, the VL2 comprises (i) a complementarity determining region (CDR) 1 having an amino acid sequence that is at least 65%, at least 70%, at least 75%, at least 80%, at least 85%, at least 90%, at least 95%, at least 99%, or 100% identical to any one of SEQ ID NOs: 1, 9, 15, 23, 30, 41, 48, 55, 58, 65, 72, 79, 86, 93, 99, 105, 112, 119, 130, 138, 145, 152, 159, 166, 172, 179, 186, 192, 199, 205, 212, 219, 226, 232, 324, 627, 640, 650, 659, 676, 687, 695, 703, 712, 770, 778, 785, 794, 801, 807, 814, 827, 836, 849, 858, 865, 878, 1045, 1050, 1055, 1060, and 1065; (ii) a CDR2 having an amino acid sequence that is at least 65%, at least 70%, at least 75%, at least 80%, at least 85%, at least 90%, at least 95%, at least 99%, or 100% identical to any one of SEQ ID NOs: 2, 31, 628, 641, 677, 1046, 1051, 1056, and 1061; or at least 65%, at least 70%, at least 75%, at least 80%, at least 85%, at least 90%, at least 95%, at least 99%, or 100% identical to any one of amino acid sequences AAS, GAS, LGS, GTN, GTN, SAS, SDS, DNT, EVT, DAS, DVT, RNS, DVS, EDS, DDS, KDS, VAS, WAS, YTS, EVS, NNN, SYN, and DAT; and (iii) a CDR3 having an amino acid sequence that is at least 65%, at least 70%, at least 75%, at least 80%, at least 85%, at least 90%, at least 95%, at least 99%, or 100% identical to any one of SEQ ID NOs: 3, 10, 16, 24, 32, 38, 42, 49, 59, 66, 73, 80, 87, 94, 100, 106, 113, 120, 126, 131, 139, 146, 153, 160, 167, 173, 180, 187, 193, 200, 206, 213, 220, 227, 233, 239, 242, 246, 249, 256, 283, 285, 287, 288, 290, 292, 294, 296, 301, 304, 306, 309, 311, 313, 316, 325, 326, 329, 642, 651, 660, 668, 678, 651, 696, 704, 713, 764, 766, 768, 771, 779, 786, 792, 795, 808, 815, 821, 830, 837, 843, 850, 856, 859, 866, 872, 879, 885, and 1066.

[3362] In some aspects, the VL3 comprises (i) a complementarity determining region (CDR) 1 having an amino acid sequence that is at least 65%, at least 70%, at least 75%, at least 80%, at least 85%, at least 90%, at least 95%, at least 99%, or 100% identical to any one of SEQ ID NOs: 1, 9, 15, 23, 30, 41, 48, 55, 58, 65, 72, 79, 86, 93, 99, 105, 112, 119, 130, 138, 145, 152, 159, 166, 172, 179, 186, 192, 199, 205, 212, 219, 226, 232, 324, 627, 640, 650, 659, 676, 687, 695, 703, 712, 770, 778, 785, 794, 801, 807, 814, 827, 836, 849, 858, 865, 878, 1045, 1050, 1055, 1060, and 1065; (ii) a CDR2 having an amino acid sequence that is at least 65%, at least 70%, at least 75%, at least 80%, at least 85%, at least 90%, at least 95%, at least 99%, or 100% identical to any one of SEQ ID NOs: 2, 31, 628, 641, 677, 1046, 1051, 1056, and 1061; or at least 65%, at least 70%, at least 75%, at least 80%, at least 85%, at least 90%, at least 95%, at least 99%, or 100% identical to any one of amino acid sequences AAS, GAS, LGS, GTN, GTN, SAS, SDS, DNT, EVT, DAS, DVT, RNS, DVS, EDS, DDS, KDS, VAS, WAS, YTS, EVS, NNN, SYN, and DAT; and (iii) a CDR3 having an amino acid sequence that is at least 65%, at least 70%, at least 75%, at least 80%, at least 85%, at least 90%, at least 95%, at least 99%, or 100% identical to any one of SEQ ID NOs: 3, 10, 16, 24, 32, 38, 42, 49, 59, 66, 73, 80, 87, 94, 100, 106, 113, 120, 126, 131, 139, 146, 153, 160, 167, 173, 180, 187, 193, 200, 206, 213, 220, 227, 233, 239, 242, 246, 249, 256, 283, 285, 287, 288, 290, 292, 294, 296, 301, 304, 306, 309, 311, 313, 316, 325, 326, 329, 642, 651, 660, 668, 678, 651, 696, 704, 713, 764, 766, 768, 771, 779, 786, 792, 795, 808, 815, 821, 830, 837, 843, 850, 856, 859, 866, 872, 879, 885, and 1066.

[3363] In some aspects, the VL4 comprises (i) a complementarity determining region (CDR) 1 having an amino acid sequence that is at least 65%, at least 70%, at least 75%, at least 80%, at least 85%, at least 90%, at least 95%, at least 99%, or 100% identical to any one of SEQ ID NOs: 1, 9, 15, 23, 30, 41, 48, 55, 58, 65, 72, 79, 86, 93, 99, 105, 112, 119, 130, 138, 145, 152, 159, 166, 172, 179, 186, 192, 199, 205, 212, 219, 226, 232, 324, 627, 640, 650, 659, 676, 687, 695, 703, 712, 770, 778, 785, 794, 801, 807, 814, 827, 836, 849, 858, 865, 878, 1045, 1050, 1055, 1060, and 1065; (ii) a CDR2 having an amino acid sequence that is at least 65%, at least 70%, at least 75%, at least 80%, at least 85%, at least 90%, at least 95%, at least 99%, or 100% identical to any one of SEQ ID NOs: 2, 31, 628, 641, 677, 1046, 1051, 1056, and 1061; or at least 65%, at least 70%, at least 75%, at least 80%, at least 85%, at least 90%, at least 95%, at least 99%, or 100% identical to any one of amino acid sequences AAS, GAS, LGS, GTN, GTN, SAS, SDS, DNT, EVT, DAS, DVT, RNS, DVS, EDS, DDS, KDS, VAS, WAS, YTS, EVS, NNN, SYN, and DAT; and (iii) a CDR3 having an amino acid sequence that is at least 65%, at least 70%, at least 75%, at least 80%, at least 85%, at least 90%, at least 95%, at least 99%, or 100% identical to any one of SEQ ID NOs: 3, 10, 16, 24, 32, 38, 42, 49, 59, 66, 73, 80, 87, 94, 100, 106, 113, 120, 126, 131, 139, 146, 153, 160, 167, 173, 180, 187, 193, 200, 206, 213, 220, 227, 233, 239, 242, 246, 249, 256, 283, 285, 287, 288, 290, 292, 294, 296, 301, 304, 306, 309, 311, 313, 316, 325, 326, 329, 642, 651, 660, 668, 678, 651, 696, 704, 713, 764, 766, 768, 771, 779, 786, 792, 795, 808, 815, 821, 830, 837, 843, 850, 856, 859, 866, 872, 879, 885, and 1066.

[3364] In some aspects, the VH1 comprises (i) a CDR1 having an amino acid sequence that is at least 65%, at least 70%, at least 75%, at least 80%, at least 85%, at least 90%, at least 95%, at least 99%, or 100% identical to any one of SEQ ID NOs: 5, 12, 18, 26, 34, 44, 51, 61, 68, 75, 82, 89, 96, 102, 108, 115, 122, 133, 141, 148, 155, 162, 175, 182, 189, 195, 202, 208, 215, 222, 229, 235, 318, 629, 645, 654, 663, 671, 682, 690, 699, 707, 716, 773, 781, 788, 797, 803, 810, 817, 823, 832, 839, 845, 852, 861, 868, 874, 881, 1047, 1052, 1057, 1062, and 1067; (ii) a CDR2 having an amino acid sequence that is at least 65%, at least 70%, at least 75%, at least 80%, at least 85%, at least 90%, at least 95%, at least 99%, or 100% identical to any one of SEQ ID NOs: 6, 19, 27, 35, 45, 52, 56, 62, 69, 76, 83, 90, 109, 116, 123, 134, 142, 149, 156, 163, 169, 176, 183, 196, 209, 216, 223, 236, 273, 319, 328, 630, 646, 655, 664, 672, 683, 691, 708, 776, 782, 789, 798, 804, 811, 818, 824, 833, 840, 846, 853, 862, 869, 875, 882, 1048, 1053, 1058, 1063, and 1068; and (iii) a CDR3 having an amino acid sequence that is at least 65%, at least 70%, at least 75%, at least 80%, at least 85%, at least 90%, at least 95%, at least 99%, or 100% identical to any one of SEQ ID NOs: 7, 13, 20, 28, 36, 40, 46, 53, 63, 70, 77, 84, 91, 97, 103, 110, 117, 124, 128, 135, 143, 150, 157, 164, 170, 177, 184, 190, 197, 203, 210, 217, 224, 230, 237, 241, 244, 248, 253, 257, 259, 261, 263, 265, 267, 269, 271, 274, 276, 278, 281, 297, 320, 322, 327, 330, 332, 631, 647, 656, 665, 673, 684, 692, 700, 709, 717, 765, 767, 769, 774, 783, 790, 793, 799, 805, 812, 819, 825, 834, 841, 847, 854, 857, 863, 870, 876, 883, 886, 1049, 1054, 1059, 1064, and 1069.

[3365] In some aspects, the VH2 comprises (i) a CDR1 having an amino acid sequence that is at least 65%, at least 70%, at least 75%, at least 80%, at least 85%, at least 90%, at least 95%, at least 99%, or 100% identical to any one of SEQ ID NOs: 5, 12, 18, 26, 34, 44, 51, 61, 68, 75, 82, 89, 96, 102, 108, 115, 122, 133, 141, 148, 155, 162, 175, 182, 189, 195, 202, 208, 215, 222, 229, 235, 318, 629, 645, 654, 663, 671, 682, 690, 699, 707, 716, 773, 781, 788, 797, 803, 810, 817, 823, 832, 839, 845, 852, 861, 868, 874, 881, 1047, 1052, 1057, 1062, and 1067; (ii) a CDR2 having an amino acid sequence that is at least 65%, at least 70%, at least 75%, at least 80%, at least 85%, at least 90%, at least 95%, at least 99%, or 100% identical to any one of SEQ ID NOs: 6, 19, 27, 35, 45, 52, 56, 62, 69, 76, 83, 90, 109, 116, 123, 134, 142, 149, 156, 163, 169, 176, 183, 196, 209, 216, 223, 236, 273, 319, 328, 630, 646, 655, 664, 672, 683, 691, 708, 776, 782, 789, 798, 804, 811, 818, 824, 833, 840, 846, 853, 862, 869, 875, 882, 1048, 1053, 1058, 1063, and 1068; and (iii) a CDR3 having an amino acid sequence that is at least 65%, at least 70%, at least 75%, at least 80%, at least 85%, at least 90%, at least 95%, at least 99%, or 100% identical to any one of SEQ ID NOs: 7, 13, 20, 28, 36, 40, 46, 53, 63, 70, 77, 84, 91, 97, 103, 110, 117, 124, 128, 135, 143, 150, 157, 164, 170, 177, 184, 190, 197, 203, 210, 217, 224, 230, 237, 241, 244, 248, 253, 257, 259, 261, 263, 265, 267, 269, 271, 274, 276, 278, 281, 297, 320, 322, 327, 330, 332, 631, 647, 656, 665, 673, 684, 692, 700, 709, 717, 765, 767, 769, 774, 783, 790, 793, 799, 805, 812, 819, 825, 834, 841, 847, 854, 857, 863, 870, 876, 883, 886, 1049, 1054, 1059, 1064, and 1069.

[3366] In some aspects, the VH3 comprises (i) a CDR1 having an amino acid sequence that is at least 65%, at least 70%, at least 75%, at least 80%, at least 85%, at least 90%, at least 95%, at least 99%, or 100% identical to any one of SEQ ID NOs: 5, 12, 18, 26, 34, 44, 51, 61, 68, 75, 82, 89, 96, 102, 108, 115, 122, 133, 141, 148, 155, 162, 175, 182, 189, 195, 202, 208, 215, 222, 229, 235, 318, 629, 645, 654, 663, 671, 682, 690, 699, 707, 716, 773, 781, 788, 797, 803, 810, 817, 823, 832, 839, 845, 852, 861, 868, 874, 881, 1047, 1052, 1057, 1062, and 1067; (ii) a CDR2 having an amino acid sequence that is at least 65%, at least 70%, at least 75%, at least 80%, at least 85%, at least 90%, at least 95%, at least 99%, or 100% identical to any one of SEQ ID NOs: 6, 19, 27, 35, 45, 52, 56, 62, 69, 76, 83, 90, 109, 116, 123, 134, 142, 149, 156, 163, 169, 176, 183, 196, 209, 216, 223, 236, 273, 319, 328, 630, 646, 655, 664, 672, 683, 691, 708, 776, 782, 789, 798, 804, 811, 818, 824, 833, 840, 846, 853, 862, 869, 875, 882, 1048, 1053, 1058, 1063, and 1068; and (iii) a CDR3 having an amino acid sequence that is at least 65%, at least 70%, at least 75%, at least 80%, at least 85%, at least 90%, at least 95%, at least 99%, or 100% identical to any one of SEQ ID NOs: 7, 13, 20, 28, 36, 40, 46, 53, 63, 70, 77, 84, 91, 97, 103, 110, 117, 124, 128, 135, 143, 150, 157, 164, 170, 177, 184, 190, 197, 203, 210, 217, 224, 230, 237, 241, 244, 248, 253, 257, 259, 261, 263, 265, 267, 269, 271, 274, 276, 278, 281, 297, 320, 322, 327, 330, 332, 631, 647, 656, 665, 673, 684, 692, 700, 709, 717, 765, 767, 769, 774, 783, 790, 793, 799, 805, 812, 819, 825, 834, 841, 847, 854, 857, 863, 870, 876, 883, 886, 1049, 1054, 1059, 1064, and 1069.

[3367] In some aspects, the VH4 comprises (i) a CDR1 having an amino acid sequence that is at least 65%, at least 70%, at least 75%, at least 80%, at least 85%, at least 90%, at least 95%, at least 99%, or 100% identical to any one of SEQ ID NOs: 5, 12, 18, 26, 34, 44, 51, 61, 68, 75, 82, 89, 96, 102, 108, 115, 122, 133, 141, 148, 155, 162, 175, 182, 189, 195, 202, 208, 215, 222, 229, 235, 318, 629, 645, 654, 663, 671, 682, 690, 699, 707, 716, 773, 781, 788, 797, 803, 810, 817, 823, 832, 839, 845, 852, 861, 868, 874, 881, 1047, 1052, 1057, 1062, and 1067; (ii) a CDR2 having an amino acid sequence that is at least 65%, at least 70%, at least 75%, at least 80%, at least 85%, at least 90%, at least 95%, at least 99%, or 100% identical to any one of SEQ ID NOs: 6, 19, 27, 35, 45, 52, 56, 62, 69, 76, 83, 90, 109, 116, 123, 134, 142, 149, 156, 163, 169, 176, 183, 196, 209, 216, 223, 236, 273, 319, 328, 630, 646, 655, 664, 672, 683, 691, 708, 776, 782, 789, 798, 804, 811, 818, 824, 833, 840, 846, 853, 862, 869, 875, 882, 1048, 1053, 1058, 1063, and 1068; and (iii) a CDR3 having an amino acid sequence that is at least 65%, at least 70%, at least 75%, at least 80%, at least 85%, at least 90%, at least 95%, at least 99%, or 100% identical to any one of SEQ ID NOs: 7, 13, 20, 28, 36, 40, 46, 53, 63, 70, 77, 84, 91, 97, 103, 110, 117, 124, 128, 135, 143, 150, 157, 164, 170, 177, 184, 190, 197, 203, 210, 217, 224, 230, 237, 241, 244, 248, 253, 257, 259, 261, 263, 265, 267, 269, 271, 274, 276, 278, 281, 297, 320, 322, 327, 330, 332, 631, 647, 656, 665, 673, 684, 692, 700, 709, 717, 765, 767, 769, 774, 783, 790, 793, 799, 805, 812, 819, 825, 834, 841, 847, 854, 857, 863, 870, 876, 883, 886, 1049, 1054, 1059, 1064, and 1069.

[3368] In some aspects, the VL1 comprises (i) a complementarity determining region (CDR) 1 having an amino acid sequence that is at least 65%, at least 70%, at least 75%, at least 80%, at least 85%, at least 90%, at least 95%, at least 99%, or 100% identical to any one of SEQ ID NOs: 1, 9, 15, 23, 30, 41, 48, 55, 58, 65, 72, 79, 86, 93, 99, 105, 112, 119, 130, 138, 145, 152, 159, 166, 172, 179, 186, 192, 199, 205, 212, 219, 226, 232, 324, 627, 640, 650, 659, 676, 687, 695, 703, 712, 770, 778, 785, 794, 801, 807, 814, 827, 836, 849, 858, 865, 878, 1045, 1050, 1055, 1060, and 1065; (ii) a CDR2 having an amino acid sequence that is at least 65%, at least 70%, at least 75%, at least 80%, at least 85%, at least 90%, at least 95%, at least 99%, or 100% identical to any one of SEQ ID NOs: 2, 31, 628, 641, 677, 1046, 1051, 1056, and 1061; or at least 65%, at least 70%, at least 75%, at least 80%, at least 85%, at least 90%, at least 95%, at least 99%, or 100% identical to any one of amino acid sequences AAS, GAS, LGS, GTN, GTN, SAS, SDS, DNT, EVT, DAS, DVT, RNS, DVS, EDS, DDS, KDS, VAS, WAS, YTS, EVS, NNN, SYN, and DAT; (iii) a CDR3 having an amino acid sequence that is at least 65%, at least 70%, at least 75%, at least 80%, at least 85%, at least 90%, at least 95%, at least 99%, or 100% identical to any one of SEQ ID NOs: 3, 10, 16, 24, 32, 38, 42, 49, 59, 66, 73, 80, 87, 94, 100, 106, 113, 120, 126, 131, 139, 146, 153, 160, 167, 173, 180, 187, 193, 200, 206, 213, 220, 227, 233, 239, 242, 246, 249, 256, 283, 285, 287, 288, 290, 292, 294, 296, 301, 304, 306, 309, 311, 313, 316, 325, 326, 329, 642, 651, 660, 668, 678, 651, 696, 704, 713, 764, 766, 768, 771, 779, 786, 792, 795, 808, 815, 821, 830, 837, 843, 850, 856, 859, 866, 872, 879, 885, and 1066; the VH1 comprises (i) a CDR1 having an amino acid sequence that is at least 65%, at least 70%, at least 75%, at least 80%, at least 85%, at least 90%, at least 95%, at least 99%, or 100% identical to any one of SEQ ID NOs: 5, 12, 18, 26, 34, 44, 51, 61, 68, 75, 82, 89, 96, 102, 108, 115, 122, 133, 141, 148, 155, 162, 175, 182, 189, 195, 202, 208, 215, 222, 229, 235, 318, 629, 645, 654, 663, 671, 682, 690, 699, 707, 716, 773, 781, 788, 797, 803, 810, 817, 823, 832, 839, 845, 852, 861, 868, 874, 881, 1047, 1052, 1057, 1062, and 1067; (ii) a CDR2 having an amino acid sequence that is at least 65%, at least 70%, at least 75%, at least 80%, at least 85%, at least 90%, at least 95%, at least 99%, or 100% identical to any one of SEQ ID NOs: 6, 19, 27, 35, 45, 52, 56, 62, 69, 76, 83, 90, 109, 116, 123, 134, 142, 149, 156, 163, 169, 176, 183, 196, 209, 216, 223, 236, 273, 319, 328, 630, 646, 655, 664, 672, 683, 691, 708, 776, 782, 789, 798, 804, 811, 818, 824, 833, 840, 846, 853, 862, 869, 875, 882, 1048, 1053, 1058, 1063, and 1068; and (iii) a CDR3 having an amino acid sequence that is at least 65%, at least 70%, at least 75%, at least 80%, at least 85%, at least 90%, at least 95%, at least 99%, or 100% identical to any one of SEQ ID NOs: 7, 13, 20, 28, 36, 40, 46, 53, 63, 70, 77, 84, 91, 97, 103, 110, 117, 124, 128, 135, 143, 150, 157, 164, 170, 177, 184, 190, 197, 203, 210, 217, 224, 230, 237, 241, 244, 248, 253, 257, 259, 261, 263, 265, 267, 269, 271, 274, 276, 278, 281, 297, 320, 322, 327, 330, 332, 631, 647, 656, 665, 673, 684, 692, 700, 709, 717, 765, 767, 769, 774, 783, 790, 793, 799, 805, 812, 819, 825, 834, 841, 847, 854, 857, 863, 870, 876, 883, 886, 1049, 1054, 1059, 1064, and 1069; the VL2 comprises (i) a complementarity determining region (CDR) 1 having an amino acid sequence that is at least 65%, at least 70%, at least 75%, at least 80%, at least 85%, at least 90%, at least 95%, at least 99%, or 100% identical to any one of SEQ ID NOs: 1, 9, 15, 23, 30, 41, 48, 55, 58, 65, 72, 79, 86, 93, 99, 105, 112, 119, 130, 138, 145, 152, 159, 166, 172, 179, 186, 192, 199, 205, 212, 219, 226, 232, 324, 627, 640, 650, 659, 676, 687, 695, 703, 712, 770, 778, 785, 794, 801, 807, 814, 827, 836, 849, 858, 865, 878, 1045, 1050, 1055, 1060, and 1065; (ii) a CDR2 having an amino acid sequence that is at least 65%, at least 70%, at least 75%, at least 80%, at least 85%, at least 90%, at least 95%, at least 99%, or 100% identical to any one of SEQ ID NOs: 2, 31, 628, 641, 677, 1046, 1051, 1056, and 1061; or at least 65%, at least 70%, at least 75%, at least 80%, at least 85%, at least 90%, at least 95%, at least 99%, or 100% identical to any one of amino acid sequences AAS, GAS, LGS, GTN, GTN, SAS, SDS, DNT, EVT, DAS, DVT, RNS, DVS, EDS, DDS, KDS, VAS, WAS, YTS, EVS, NNN, SYN, and DAT; and (iii) a CDR3 having an amino acid sequence that is at least 65%, at least 70%, at least 75%, at least 80%, at least 85%, at least 90%, at least 95%, at least 99%, or 100% identical to any one of SEQ ID NOs: 3, 10, 16, 24, 32, 38, 42, 49, 59, 66, 73, 80, 87, 94, 100, 106, 113, 120, 126, 131, 139, 146, 153, 160, 167, 173, 180, 187, 193, 200, 206, 213, 220, 227, 233, 239, 242, 246, 249, 256, 283, 285, 287, 288, 290, 292, 294, 296, 301, 304, 306, 309, 311, 313, 316, 325, 326, 329, 642, 651, 660, 668, 678, 651, 696, 704, 713, 764, 766, 768, 771, 779, 786, 792, 795, 808, 815, 821, 830, 837, 843, 850, 856, 859, 866, 872, 879, 885, and 1066; the VH2 comprises (i) a CDR1 having an amino acid sequence that is at least 65%, at least 70%, at least 75%, at least 80%, at least 85%, at least 90%, at least 95%, at least 99%, or 100% identical to any one of SEQ ID NOs: 5, 12, 18, 26, 34, 44, 51, 61, 68, 75, 82, 89, 96, 102, 108, 115, 122, 133, 141, 148, 155, 162, 175, 182, 189, 195, 202, 208, 215, 222, 229, 235, 318, 629, 645, 654, 663, 671, 682, 690, 699, 707, 716, 773, 781, 788, 797, 803, 810, 817, 823, 832, 839, 845, 852, 861, 868, 874, 881, 1047, 1052, 1057, 1062, and 1067; (ii) a CDR2 having an amino acid sequence that is at least 65%, at least 70%, at least 75%, at least 80%, at least 85%, at least 90%, at least 95%, at least 99%, or 100% identical to any one of SEQ ID NOs: 6, 19, 27, 35, 45, 52, 56, 62, 69, 76, 83, 90, 109, 116, 123, 134, 142, 149, 156, 163, 169, 176, 183, 196, 209, 216, 223, 236, 273, 319, 328, 630, 646, 655, 664, 672, 683, 691, 708, 776, 782, 789, 798, 804, 811, 818, 824, 833, 840, 846, 853, 862, 869, 875, 882, 1048, 1053, 1058, 1063, and 1068; and (iii) a CDR3 having an amino acid sequence that is at least 65%, at least 70%, at least 75%, at least 80%, at least 85%, at least 90%, at least 95%, at least 99%, or 100% identical to any one of SEQ ID NOs: 7, 13, 20, 28, 36, 40, 46, 53, 63, 70, 77, 84, 91, 97, 103, 110, 117, 124, 128, 135, 143, 150, 157, 164, 170, 177, 184, 190, 197, 203, 210, 217, 224, 230, 237, 241, 244, 248, 253, 257, 259, 261, 263, 265, 267, 269, 271, 274, 276, 278, 281, 297, 320, 322, 327, 330, 332, 631, 647, 656, 665, 673, 684, 692, 700, 709, 717, 765, 767, 769, 774, 783, 790, 793, 799, 805, 812, 819, 825, 834, 841, 847, 854, 857, 863, 870, 876, 883, 886, 1049, 1054, 1059, 1064, and 1069; the VL3 comprises (i) a complementarity determining region (CDR) 1 having an amino acid sequence that is at least 65%, at least 70%, at least 75%, at least 80%, at least 85%, at least 90%, at least 95%, at least 99%, or 100% identical to any one of SEQ ID NOs: 1, 9, 15, 23, 30, 41, 48, 55, 58, 65, 72, 79, 86, 93, 99, 105, 112, 119, 130, 138, 145, 152, 159, 166, 172, 179, 186, 192, 199, 205, 212, 219, 226, 232, 324, 627, 640, 650, 659, 676, 687, 695, 703, 712, 770, 778, 785, 794, 801, 807, 814, 827, 836, 849, 858, 865, 878, 1045, 1050, 1055, 1060, and 1065; (ii) a CDR2 having an amino acid sequence that is at least 65%, at least 70%, at least 75%, at least 80%, at least 85%, at least 90%, at least 95%, at least 99%, or 100% identical to any one of SEQ ID NOs: 2, 31, 628, 641, 677, 1046, 1051, 1056, and 1061; or at least 65%, at least 70%, at least 75%, at least 80%, at least 85%, at least 90%, at least 95%, at least 99%, or 100% identical to any one of amino acid sequences AAS, GAS, LGS, GTN, GTN, SAS, SDS, DNT, EVT, DAS, DVT, RNS, DVS, EDS, DDS, KDS, VAS, WAS, YTS, EVS, NNN, SYN, and DAT; (iii) a CDR3 having an amino acid sequence that is at least 65%, at least 70%, at least 75%, at least 80%, at least 85%, at least 90%, at least 95%, at least 99%, or 100% identical to any one of SEQ ID NOs: 3, 10, 16, 24, 32, 38, 42, 49, 59, 66, 73, 80, 87, 94, 100, 106, 113, 120, 126, 131, 139, 146, 153, 160, 167, 173, 180, 187, 193, 200, 206, 213, 220, 227, 233, 239, 242, 246, 249, 256, 283, 285, 287, 288, 290, 292, 294, 296, 301, 304, 306, 309, 311, 313, 316, 325, 326, 329, 642, 651, 660, 668, 678, 651, 696, 704, 713, 764, 766, 768, 771, 779, 786, 792, 795, 808, 815, 821, 830, 837, 843, 850, 856, 859, 866, 872, 879, 885, and 1066; the VH3 comprises (i) a CDR1 having an amino acid sequence that is at least 65%, at least 70%, at least 75%, at least 80%, at least 85%, at least 90%, at least 95%, at least 99%, or 100% identical to any one of SEQ ID NOs: 5, 12, 18, 26, 34, 44, 51, 61, 68, 75, 82, 89, 96, 102, 108, 115, 122, 133, 141, 148, 155, 162, 175, 182, 189, 195, 202, 208, 215, 222, 229, 235, 318, 629, 645, 654, 663, 671, 682, 690, 699, 707, 716, 773, 781, 788, 797, 803, 810, 817, 823, 832, 839, 845, 852, 861, 868, 874, 881, 1047, 1052, 1057, 1062, and 1067; (ii) a CDR2 having an amino acid sequence that is at least 65%, at least 70%, at least 75%, at least 80%, at least 85%, at least 90%, at least 95%, at least 99%, or 100% identical to any one of SEQ ID NOs: 6, 19, 27, 35, 45, 52, 56, 62, 69, 76, 83, 90, 109, 116, 123, 134, 142, 149, 156, 163, 169, 176, 183, 196, 209, 216, 223, 236, 273, 319, 328, 630, 646, 655, 664, 672, 683, 691, 708, 776, 782, 789, 798, 804, 811, 818, 824, 833, 840, 846, 853, 862, 869, 875, 882, 1048, 1053, 1058, 1063, and 1068; and (iii) a CDR3 having an amino acid sequence that is at least 65%, at least 70%, at least 75%, at least 80%, at least 85%, at least 90%, at least 95%, at least 99%, or 100% identical to any one of SEQ ID NOs: 7, 13, 20, 28, 36, 40, 46, 53, 63, 70, 77, 84, 91, 97, 103, 110, 117, 124, 128, 135, 143, 150, 157, 164, 170, 177, 184, 190, 197, 203, 210, 217, 224, 230, 237, 241, 244, 248, 253, 257, 259, 261, 263, 265, 267, 269, 271, 274, 276, 278, 281, 297, 320, 322, 327, 330, 332, 631, 647, 656, 665, 673, 684, 692, 700, 709, 717, 765, 767, 769, 774, 783, 790, 793, 799, 805, 812, 819, 825, 834, 841, 847, 854, 857, 863, 870, 876, 883, 886, 1049, 1054, 1059, 1064, and 1069; the VL4 comprises (i) a complementarity determining region (CDR) 1 having an amino acid sequence that is at least 65%, at least 70%, at least 75%, at least 80%, at least 85%, at least 90%, at least 95%, at least 99%, or 100% identical to any one of SEQ ID NOs: 1, 9, 15, 23, 30, 41, 48, 55, 58, 65, 72, 79, 86, 93, 99, 105, 112, 119, 130, 138, 145, 152, 159, 166, 172, 179, 186, 192, 199, 205, 212, 219, 226, 232, 324, 627, 640, 650, 659, 676, 687, 695, 703, 712, 770, 778, 785, 794, 801, 807, 814, 827, 836, 849, 858, 865, 878, 1045, 1050, 1055, 1060, and 1065; (ii) a CDR2 having an amino acid sequence that is at least 65%, at least 70%, at least 75%, at least 80%, at least 85%, at least 90%, at least 95%, at least 99%, or 100% identical to any one of SEQ ID NOs: 2, 31, 628, 641, 677, 1046, 1051, 1056, and 1061; or at least 65%, at least 70%, at least 75%, at least 80%, at least 85%, at least 90%, at least 95%, at least 99%, or 100% identical to any one of amino acid sequences AAS, GAS, LGS, GTN, GTN, SAS, SDS, DNT, EVT, DAS, DVT, RNS, DVS, EDS, DDS, KDS, VAS, WAS, YTS, EVS, NNN, SYN, and DAT; (iii) a CDR3 having an amino acid sequence that is at least 65%, at least 70%, at least 75%, at least 80%, at least 85%, at least 90%, at least 95%, at least 99%, or 100% identical to any one of SEQ ID NOs: 3, 10, 16, 24, 32, 38, 42, 49, 59, 66, 73, 80, 87, 94, 100, 106, 113, 120, 126, 131, 139, 146, 153, 160, 167, 173, 180, 187, 193, 200, 206, 213, 220, 227, 233, 239, 242, 246, 249, 256, 283, 285, 287, 288, 290, 292, 294, 296, 301, 304, 306, 309, 311, 313, 316, 325, 326, 329, 642, 651, 660, 668, 678, 651, 696, 704, 713, 764, 766, 768, 771, 779, 786, 792, 795, 808, 815, 821, 830, 837, 843, 850, 856, 859, 866, 872, 879, 885, and 1066; and the VH4 comprises (i) a CDR1 having an amino acid sequence that is at least 65%, at least 70%, at least 75%, at least 80%, at least 85%, at least 90%, at least 95%, at least 99%, or 100% identical to any one of SEQ ID NOs: 5, 12, 18, 26, 34, 44, 51, 61, 68, 75, 82, 89, 96, 102, 108, 115, 122, 133, 141, 148, 155, 162, 175, 182, 189, 195, 202, 208, 215, 222, 229, 235, 318, 629, 645, 654, 663, 671, 682, 690, 699, 707, 716, 773, 781, 788, 797, 803, 810, 817, 823, 832, 839, 845, 852, 861, 868, 874, 881, 1047, 1052, 1057, 1062, and 1067; (ii) a CDR2 having an amino acid sequence that is at least 65%, at least 70%, at least 75%, at least 80%, at least 85%, at least 90%, at least 95%, at least 99%, or 100% identical to any one of SEQ ID NOs: 6, 19, 27, 35, 45, 52, 56, 62, 69, 76, 83, 90, 109, 116, 123, 134, 142, 149, 156, 163, 169, 176, 183, 196, 209, 216, 223, 236, 273, 319, 328, 630, 646, 655, 664, 672, 683, 691, 708, 776, 782, 789, 798, 804, 811, 818, 824, 833, 840, 846, 853, 862, 869, 875, 882, 1048, 1053, 1058, 1063, and 1068; and (iii) a CDR3 having an amino acid sequence that is at least 65%, at least 70%, at least 75%, at least 80%, at least 85%, at least 90%, at least 95%, at least 99%, or 100% identical to any one of SEQ ID NOs: 7, 13, 20, 28, 36, 40, 46, 53, 63, 70, 77, 84, 91, 97, 103, 110, 117, 124, 128, 135, 143, 150, 157, 164, 170, 177, 184, 190, 197, 203, 210, 217, 224, 230, 237, 241, 244, 248, 253, 257, 259, 261, 263, 265, 267, 269, 271, 274, 276, 278, 281, 297, 320, 322, 327, 330, 332, 631, 647, 656, 665, 673, 684, 692, 700, 709, 717, 765, 767, 769, 774, 783, 790, 793, 799, 805, 812, 819, 825, 834, 841, 847, 854, 857, 863, 870, 876, 883, 886, 1049, 1054, 1059, 1064, and 1069.

[3369] In some aspects, the VL1 comprises an amino acid sequence that is at least 65%, at least 70%, at least 75%, at least 80%, at least 85%, at least 90%, at least 95%, at least 99%, or 100% identical to any one of SEQ ID NOs: 4, 11, 17, 25, 33, 39, 43, 50, 60, 67, 74, 81, 88, 95, 101, 107, 114, 121, 127, 132, 140, 147, 154, 161, 168, 174, 181, 188, 194, 201, 207, 214, 221, 228, 234, 240, 243, 247, 250, 251, 252, 255, 284, 286, 289, 291, 293, 295, 299, 300, 302, 303, 305, 307, 308, 310, 312, 314, 315, 317, 323, 639, 649, 658, 667, 675, 686, 694, 702, 711, 772, 780, 787, 796, 802, 809, 816, 822, 831, 838, 844, 851, 860, 867, 873, 880, and 988.

[3370] In some aspects, the VH1 comprises an amino acid sequence that is at least 65%, at least 70%, at least 75%, at least 80%, at least 85%, at least 90%, at least 95%, at least 99%, or 100% identical to any one of SEQ ID NOs: 8, 14, 21, 22, 29, 37, 47, 54, 57, 64, 71, 78, 85, 92, 98, 104, 111, 118, 125, 129, 136, 137, 144, 151, 158, 165, 171, 178, 185, 191, 198, 204, 211, 218, 225, 231, 238, 245, 254, 258, 260, 262, 264, 266, 268, 270, 272, 275, 277, 279, 280, 282, 298, 321, 331, 626, 644, 653, 662, 670, 681, 689, 698, 706, 715, 775, 777, 784, 791, 800, 806, 813, 820, 826, 835, 842, 848, 855, 864, 871, 877, and 884.

[3371] In some aspects, the VL2 comprises an amino acid sequence that is at least 65%, at least 70%, at least 75%, at least 80%, at least 85%, at least 90%, at least 95%, at least 99%, or 100% identical to any one of SEQ ID NOs: 4, 11, 17, 25, 33, 39, 43, 50, 60, 67, 74, 81, 88, 95, 101, 107, 114, 121, 127, 132, 140, 147, 154, 161, 168, 174, 181, 188, 194, 201, 207, 214, 221, 228, 234, 240, 243, 247, 250, 251, 252, 255, 284, 286, 289, 291, 293, 295, 299, 300, 302, 303, 305, 307, 308, 310, 312, 314, 315, 317, 323, 639, 649, 658, 667, 675, 686, 694, 702, 711, 772, 780, 787, 796, 802, 809, 816, 822, 831, 838, 844, 851, 860, 867, 873, 880, and 988.

[3372] In some aspects, the VH2 comprises an amino acid sequence that is at least 65%, at least 70%, at least 75%, at least 80%, at least 85%, at least 90%, at least 95%, at least 99%, or 100% identical to any one of SEQ ID NOs: 8, 14, 21, 22, 29, 37, 47, 54, 57, 64, 71, 78, 85, 92, 98, 104, 111, 118, 125, 129, 136, 137, 144, 151, 158, 165, 171, 178, 185, 191, 198, 204, 211, 218, 225, 231, 238, 245, 254, 258, 260, 262, 264, 266, 268, 270, 272, 275, 277, 279, 280, 282, 298, 321, 331, 626, 644, 653, 662, 670, 681, 689, 698, 706, 715, 775, 777, 784, 791, 800, 806, 813, 820, 826, 835, 842, 848, 855, 864, 871, 877, and 884.

[3373] In some aspects, the VL3 comprises an amino acid sequence that is at least 65%, at least 70%, at least 75%, at least 80%, at least 85%, at least 90%, at least 95%, at least 99%, or 100% identical to any one of SEQ ID NOs: 4, 11, 17, 25, 33, 39, 43, 50, 60, 67, 74, 81, 88, 95, 101, 107, 114, 121, 127, 132, 140, 147, 154, 161, 168, 174, 181, 188, 194, 201, 207, 214, 221, 228, 234, 240, 243, 247, 250, 251, 252, 255, 284, 286, 289, 291, 293, 295, 299, 300, 302, 303, 305, 307, 308, 310, 312, 314, 315, 317, 323, 639, 649, 658, 667, 675, 686, 694, 702, 711, 772, 780, 787, 796, 802, 809, 816, 822, 831, 838, 844, 851, 860, 867, 873, 880, and 988.

[3374] In some aspects, the VH3 comprises an amino acid sequence that is at least 65%, at least 70%, at least 75%, at least 80%, at least 85%, at least 90%, at least 95%, at least 99%, or 100% identical to any one of SEQ ID NOs: 8, 14, 21, 22, 29, 37, 47, 54, 57, 64, 71, 78, 85, 92, 98, 104, 111, 118, 125, 129, 136, 137, 144, 151, 158, 165, 171, 178, 185, 191, 198, 204, 211, 218, 225, 231, 238, 245, 254, 258, 260, 262, 264, 266, 268, 270, 272, 275, 277, 279, 280, 282, 298, 321, 331, 626, 644, 653, 662, 670, 681, 689, 698, 706, 715, 775, 777, 784, 791, 800, 806, 813, 820, 826, 835, 842, 848, 855, 864, 871, 877, and 884.

[3375] In some aspects, the VL4 comprises an amino acid sequence that is at least 65%, at least 70%, at least 75%, at least 80%, at least 85%, at least 90%, at least 95%, at least 99%, or 100% identical to any one of SEQ ID NOs: 4, 11, 17, 25, 33, 39, 43, 50, 60, 67, 74, 81, 88, 95, 101, 107, 114, 121, 127, 132, 140, 147, 154, 161, 168, 174, 181, 188, 194, 201, 207, 214, 221, 228, 234, 240, 243, 247, 250, 251, 252, 255, 284, 286, 289, 291, 293, 295, 299, 300, 302, 303, 305, 307, 308, 310, 312, 314, 315, 317, 323, 639, 649, 658, 667, 675, 686, 694, 702, 711, 772, 780, 787, 796, 802, 809, 816, 822, 831, 838, 844, 851, 860, 867, 873, 880, and 988.

[3376] In some aspects, the VH4 comprises an amino acid sequence that is at least 65%, at least 70%, at least 75%, at least 80%, at least 85%, at least 90%, at least 95%, at least 99%, or 100% identical to any one of SEQ ID NOs: 8, 14, 21, 22, 29, 37, 47, 54, 57, 64, 71, 78, 85, 92, 98, 104, 111, 118, 125, 129, 136, 137, 144, 151, 158, 165, 171, 178, 185, 191, 198, 204, 211, 218, 225, 231, 238, 245, 254, 258, 260, 262, 264, 266, 268, 270, 272, 275, 277, 279, 280, 282, 298, 321, 331, 626, 644, 653, 662, 670, 681, 689, 698, 706, 715, 775, 777, 784, 791, 800, 806, 813, 820, 826, 835, 842, 848, 855, 864, 871, 877, and 884.

[3377] In some aspects, (i) the VL1 comprises an amino acid sequence that is at least 65%, at least 70%, at least 75%, at least 80%, at least 85%, at least 90%, at least 95%, at least 99%, or 100% identical to any one of SEQ ID NOs: 4, 11, 17, 25, 33, 39, 43, 50, 60, 67, 74, 81, 88, 95, 101, 107, 114, 121, 127, 132, 140, 147, 154, 161, 168, 174, 181, 188, 194, 201, 207, 214, 221, 228, 234, 240, 243, 247, 250, 251, 252, 255, 284, 286, 289, 291, 293, 295, 299, 300, 302, 303, 305, 307, 308, 310, 312, 314, 315, 317, 323, 639, 649, 658, 667, 675, 686, 694, 702, 711, 772, 780, 787, 796, 802, 809, 816, 822, 831, 838, 844, 851, 860, 867, 873, 880, and 988; (ii) the VH1 comprises an amino acid sequence that is at least 65%, at least 70%, at least 75%, at least 80%, at least 85%, at least 90%, at least 95%, at least 99%, or 100% identical to any one of SEQ ID NOs: 8, 14, 21, 22, 29, 37, 47, 54, 57, 64, 71, 78, 85, 92, 98, 104, 111, 118, 125, 129, 136, 137, 144, 151, 158, 165, 171, 178, 185, 191, 198, 204, 211, 218, 225, 231, 238, 245, 254, 258, 260, 262, 264, 266, 268, 270, 272, 275, 277, 279, 280, 282, 298, 321, 331, 626, 644, 653, 662, 670, 681, 689, 698, 706, 715, 775, 777, 784, 791, 800, 806, 813, 820, 826, 835, 842, 848, 855, 864, 871, 877, and 884; (iii) the VL2 comprises an amino acid sequence that is at least 65%, at least 70%, at least 75%, at least 80%, at least 85%, at least 90%, at least 95%, at least 99%, or 100% identical to any one of SEQ ID NOs: 4, 11, 17, 25, 33, 39, 43, 50, 60, 67, 74, 81, 88, 95, 101, 107, 114, 121, 127, 132, 140, 147, 154, 161, 168, 174, 181, 188, 194, 201, 207, 214, 221, 228, 234, 240, 243, 247, 250, 251, 252, 255, 284, 286, 289, 291, 293, 295, 299, 300, 302, 303, 305, 307, 308, 310, 312, 314, 315, 317, 323, 639, 649, 658, 667, 675, 686, 694, 702, 711, 772, 780, 787, 796, 802, 809, 816, 822, 831, 838, 844, 851, 860, 867, 873, 880, and 988; (iv) the VH2 comprises an amino acid sequence that is at least 65%, at least 70%, at least 75%, at least 80%, at least 85%, at least 90%, at least 95%, at least 99%, or 100% identical to any one of SEQ ID NOs: 8, 14, 21, 22, 29, 37, 47, 54, 57, 64, 71, 78, 85, 92, 98, 104, 111, 118, 125, 129, 136, 137, 144, 151, 158, 165, 171, 178, 185, 191, 198, 204, 211, 218, 225, 231, 238, 245, 254, 258, 260, 262, 264, 266, 268, 270, 272, 275, 277, 279, 280, 282, 298, 321, 331, 626, 644, 653, 662, 670, 681, 689, 698, 706, 715, 775, 777, 784, 791, 800, 806, 813, 820, 826, 835, 842, 848, 855, 864, 871, 877, and 884; (v) the VL3 comprises an amino acid sequence that is at least 65%, at least 70%, at least 75%, at least 80%, at least 85%, at least 90%, at least 95%, at least 99%, or 100% identical to any one of SEQ ID NOs: 4, 11, 17, 25, 33, 39, 43, 50, 60, 67, 74, 81, 88, 95, 101, 107, 114, 121, 127, 132, 140, 147, 154, 161, 168, 174, 181, 188, 194, 201, 207, 214, 221, 228, 234, 240, 243, 247, 250, 251, 252, 255, 284, 286, 289, 291, 293, 295, 299, 300, 302, 303, 305, 307, 308, 310, 312, 314, 315, 317, 323, 639, 649, 658, 667, 675, 686, 694, 702, 711, 772, 780, 787, 796, 802, 809, 816, 822, 831, 838, 844, 851, 860, 867, 873, 880, and 988; (vi) the VH3 comprises an amino acid sequence that is at least 65%, at least 70%, at least 75%, at least 80%, at least 85%, at least 90%, at least 95%, at least 99%, or 100% identical to any one of SEQ ID NOs: 8, 14, 21, 22, 29, 37, 47, 54, 57, 64, 71, 78, 85, 92, 98, 104, 111, 118, 125, 129, 136, 137, 144, 151, 158, 165, 171, 178, 185, 191, 198, 204, 211, 218, 225, 231, 238, 245, 254, 258, 260, 262, 264, 266, 268, 270, 272, 275, 277, 279, 280, 282, 298, 321, 331, 626, 644, 653, 662, 670, 681, 689, 698, 706, 715, 775, 777, 784, 791, 800, 806, 813, 820, 826, 835, 842, 848, 855, 864, 871, 877, and 884; (vii) the VL4 comprises an amino acid sequence that is at least 65%, at least 70%, at least 75%, at least 80%, at least 85%, at least 90%, at least 95%, at least 99%, or 100% identical to any one of SEQ ID NOs: 4, 11, 17, 25, 33, 39, 43, 50, 60, 67, 74, 81, 88, 95, 101, 107, 114, 121, 127, 132, 140, 147, 154, 161, 168, 174, 181, 188, 194, 201, 207, 214, 221, 228, 234, 240, 243, 247, 250, 251, 252, 255, 284, 286, 289, 291, 293, 295, 299, 300, 302, 303, 305, 307, 308, 310, 312, 314, 315, 317, 323, 639, 649, 658, 667, 675, 686, 694, 702, 711, 772, 780, 787, 796, 802, 809, 816, 822, 831, 838, 844, 851, 860, 867, 873, 880, and 988; and (viii) the VH4 comprises an amino acid sequence that is at least 65%, at least 70%, at least 75%, at least 80%, at least 85%, at least 90%, at least 95%, at least 99%, or 100% identical to any one of SEQ ID NOs: 8, 14, 21, 22, 29, 37, 47, 54, 57, 64, 71, 78, 85, 92, 98, 104, 111, 118, 125, 129, 136, 137, 144, 151, 158, 165, 171, 178, 185, 191, 198, 204, 211, 218, 225, 231, 238, 245, 254, 258, 260, 262, 264, 266, 268, 270, 272, 275, 277, 279, 280, 282, 298, 321, 331, 626, 644, 653, 662, 670, 681, 689, 698, 706, 715, 775, 777, 784, 791, 800, 806, 813, 820, 826, 835, 842, 848, 855, 864, 871, 877, and 884.

[3378] In some aspects, the VL1 comprises (i) a complementarity determining region (CDR) 1 having an amino acid sequence that is at least 65%, at least 70%, at least 75%, at least 80%, at least 85%, at least 90%, at least 95%, at least 99%, or 100% identical to any one of SEQ ID NOs: 1, 9, 15, 23, 30, 65, 72, 145, 152, 324, 627, 138, 172, 1045, 1050, 1055, 1060, and 1065; (ii) a CDR2 having an amino acid sequence that is at least 65%, at least 70%, at least 75%, at least 80%, at least 85%, at least 90%, at least 95%, at least 99%, or 100% identical to any one of SEQ ID NOs: 2, 31, 628, 1046, 1051, 1056, and 1061, or at least 65%, at least 70%, at least 75%, at least 80%, at least 85%, at least 90%, at least 95%, at least 99%, or 100% identical to any one of amino acid sequences GAS, LGS, GTN, SAS, SDS, AAS, DAS, and DNT; and (iii) a CDR3 having an amino acid sequence that is at least 65%, at least 70%, at least 75%, at least 80%, at least 85%, at least 90%, at least 95%, at least 99%, or 100% identical to any one of SEQ ID NOs: 3, 10, 16, 24, 32, 38, 66, 73, 146, 153, 325, 326, 764, 766, 139, 856, 173, 792, and 1066.

[3379] In some aspects, the VL2 comprises (i) a complementarity determining region (CDR) 1 having an amino acid sequence that is at least 65%, at least 70%, at least 75%, at least 80%, at least 85%, at least 90%, at least 95%, at least 99%, or 100% identical to any one of SEQ ID NOs: 1, 9, 15, 23, 30, 65, 72, 145, 152, 324, 627, 138, 172, 1045, 1050, 1055, 1060, and 1065; (ii) a CDR2 having an amino acid sequence that is at least 65%, at least 70%, at least 75%, at least 80%, at least 85%, at least 90%, at least 95%, at least 99%, or 100% identical to any one of SEQ ID NOs: 2, 31, 628, 1046, 1051, 1056, and 1061, or at least 65%, at least 70%, at least 75%, at least 80%, at least 85%, at least 90%, at least 95%, at least 99%, or 100% identical to any one of amino acid sequences GAS, LGS, GTN, SAS, SDS, AAS, DAS, and DNT; and (iii) a CDR3 having an amino acid sequence that is at least 65%, at least 70%, at least 75%, at least 80%, at least 85%, at least 90%, at least 95%, at least 99%, or 100% identical to any one of SEQ ID NOs: 3, 10, 16, 24, 32, 38, 66, 73, 146, 153, 325, 326, 764, 766, 139, 856, 173, 792, and 1066.

[3380] In some aspects, the VL3 comprises (i) a complementarity determining region (CDR) 1 having an amino acid sequence that is at least 65%, at least 70%, at least 75%, at least 80%, at least 85%, at least 90%, at least 95%, at least 99%, or 100% identical to any one of SEQ ID NOs: 1, 9, 15, 23, 30, 65, 72, 145, 152, 324, 627, 138, 172, 1045, 1050, 1055, 1060, and 1065; (ii) a CDR2 having an amino acid sequence that is at least 65%, at least 70%, at least 75%, at least 80%, at least 85%, at least 90%, at least 95%, at least 99%, or 100% identical to any one of SEQ ID NOs: 2, 31, 628, 1046, 1051, 1056, and 1061, or at least 65%, at least 70%, at least 75%, at least 80%, at least 85%, at least 90%, at least 95%, at least 99%, or 100% identical to any one of amino acid sequences GAS, LGS, GTN, SAS, SDS, AAS, DAS, and DNT; and (iii) a CDR3 having an amino acid sequence that is at least 65%, at least 70%, at least 75%, at least 80%, at least 85%, at least 90%, at least 95%, at least 99%, or 100% identical to any one of SEQ ID NOs: 3, 10, 16, 24, 32, 38, 66, 73, 146, 153, 325, 326, 764, 766, 139, 856, 173, 792, and 1066.

[3381] In some aspects, the VL4 comprises (i) a complementarity determining region (CDR) 1 having an amino acid sequence that is at least 65%, at least 70%, at least 75%, at least 80%, at least 85%, at least 90%, at least 95%, at least 99%, or 100% identical to any one of SEQ ID NOs: 1, 9, 15, 23, 30, 65, 72, 145, 152, 324, 627, 138, 172, 1045, 1050, 1055, 1060, and 1065; (ii) a CDR2 having an amino acid sequence that is at least 65%, at least 70%, at least 75%, at least 80%, at least 85%, at least 90%, at least 95%, at least 99%, or 100% identical to any one of SEQ ID NOs: 2, 31, 628, 1046, 1051, 1056, and 1061, or at least 65%, at least 70%, at least 75%, at least 80%, at least 85%, at least 90%, at least 95%, at least 99%, or 100% identical to any one of amino acid sequences GAS, LGS, GTN, SAS, SDS, AAS, DAS, and DNT; and (iii) a CDR3 having an amino acid sequence that is at least 65%, at least 70%, at least 75%, at least 80%, at least 85%, at least 90%, at least 95%, at least 99%, or 100% identical to any one of SEQ ID NOs: 3, 10, 16, 24, 32, 38, 66, 73, 146, 153, 325, 326, 764, 766, 139, 856, 173, 792, and 1066.

[3382] In some aspects, the VH1 comprises (i) a CDR1 having an amino acid sequence that is at least 65%, at least 70%, at least 75%, at least 80%, at least 85%, at least 90%, at least 95%, at least 99%, or 100% identical to any one of SEQ ID NOs: 5, 12, 18, 26, 34, 68, 75, 148, 155, 629, 141, 175, 1047, 1052, 1057, 1062, and 1067; (ii) a CDR2 having an amino acid sequence that is at least 65%, at least 70%, at least 75%, at least 80%, at least 85%, at least 90%, at least 95%, at least 99%, or 100% identical to any one of SEQ ID NOs: 6, 19, 27, 35, 69, 76, 149, 156, 630, 142, 176, 1048, 1053, 1058, 1063, and 1068; and (iii) a CDR3 having an amino acid sequence that is at least 65%, at least 70%, at least 75%, at least 80%, at least 85%, at least 90%, at least 95%, at least 99%, or 100% identical to any one of SEQ ID NOs: 7, 13, 20, 28, 36, 40, 70, 77, 327, 150, 157, 332, 631, 765, 767, 143, 857, 177, 793, 1049, 1054, 1059, 1064, and 1069.

[3383] In some aspects, the VH2 comprises (i) a CDR1 having an amino acid sequence that is at least 65%, at least 70%, at least 75%, at least 80%, at least 85%, at least 90%, at least 95%, at least 99%, or 100% identical to any one of SEQ ID NOs: 5, 12, 18, 26, 34, 68, 75, 148, 155, 629, 141, 175, 1047, 1052, 1057, 1062, and 1067; (ii) a CDR2 having an amino acid sequence that is at least 65%, at least 70%, at least 75%, at least 80%, at least 85%, at least 90%, at least 95%, at least 99%, or 100% identical to any one of SEQ ID NOs: 6, 19, 27, 35, 69, 76, 149, 156, 630, 142, 176, 1048, 1053, 1058, 1063, and 1068; and (iii) a CDR3 having an amino acid sequence that is at least 65%, at least 70%, at least 75%, at least 80%, at least 85%, at least 90%, at least 95%, at least 99%, or 100% identical to any one of SEQ ID NOs: 7, 13, 20, 28, 36, 40, 70, 77, 327, 150, 157, 332, 631, 765, 767, 143, 857, 177, 793, 1049, 1054, 1059, 1064, and 1069.

[3384] In some aspects, the VH3 comprises (i) a CDR1 having an amino acid sequence that is at least 65%, at least 70%, at least 75%, at least 80%, at least 85%, at least 90%, at least 95%, at least 99%, or 100% identical to any one of SEQ ID NOs: 5, 12, 18, 26, 34, 68, 75, 148, 155, 629, 141, 175, 1047, 1052, 1057, 1062, and 1067; (ii) a CDR2 having an amino acid sequence that is at least 65%, at least 70%, at least 75%, at least 80%, at least 85%, at least 90%, at least 95%, at least 99%, or 100% identical to any one of SEQ ID NOs: 6, 19, 27, 35, 69, 76, 149, 156, 630, 142, 176, 1048, 1053, 1058, 1063, and 1068; and (iii) a CDR3 having an amino acid sequence that is at least 65%, at least 70%, at least 75%, at least 80%, at least 85%, at least 90%, at least 95%, at least 99%, or 100% identical to any one of SEQ ID NOs: 7, 13, 20, 28, 36, 40, 70, 77, 327, 150, 157, 332, 631, 765, 767, 143, 857, 177, 793, 1049, 1054, 1059, 1064, and 1069.

[3385] In some aspects, the VH4 comprises (i) a CDR1 having an amino acid sequence that is at least 65%, at least 70%, at least 75%, at least 80%, at least 85%, at least 90%, at least 95%, at least 99%, or 100% identical to any one of SEQ ID NOs: 5, 12, 18, 26, 34, 68, 75, 148, 155, 629, 141, 175, 1047, 1052, 1057, 1062, and 1067; (ii) a CDR2 having an amino acid sequence that is at least 65%, at least 70%, at least 75%, at least 80%, at least 85%, at least 90%, at least 95%, at least 99%, or 100% identical to any one of SEQ ID NOs: 6, 19, 27, 35, 69, 76, 149, 156, 630, 142, 176, 1048, 1053, 1058, 1063, and 1068; and (iii) a CDR3 having an amino acid sequence that is at least 65%, at least 70%, at least 75%, at least 80%, at least 85%, at least 90%, at least 95%, at least 99%, or 100% identical to any one of SEQ ID NOs: 7, 13, 20, 28, 36, 40, 70, 77, 327, 150, 157, 332, 631, 765, 767, 143, 857, 177, 793, 1049, 1054, 1059, 1064, and 1069.

[3386] In some aspects, the VL1 comprises (i) a complementarity determining region (CDR) 1 having an amino acid sequence that is at least 65%, at least 70%, at least 75%, at least 80%, at least 85%, at least 90%, at least 95%, at least 99%, or 100% identical to any one of SEQ ID NOs: 1, 9, 15, 23, 30, 65, 72, 145, 152, 324, 627, 138, 172, 1045, 1050, 1055, 1060, and 1065; (ii) a CDR2 having an amino acid sequence that is at least 65%, at least 70%, at least 75%, at least 80%, at least 85%, at least 90%, at least 95%, at least 99%, or 100% identical to any one of SEQ ID NOs: 2, 31, 628, 1046, 1051, 1056, and 1061, or at least 65%, at least 70%, at least 75%, at least 80%, at least 85%, at least 90%, at least 95%, at least 99%, or 100% identical to any one of amino acid sequences GAS, LGS, GTN, SAS, SDS, AAS, DAS, and DNT; (iii) a CDR3 having an amino acid sequence that is at least 65%, at least 70%, at least 75%, at least 80%, at least 85%, at least 90%, at least 95%, at least 99%, or 100% identical to any one of SEQ ID NOs: 3, 10, 16, 24, 32, 38, 66, 73, 146, 153, 325, 326, 764, 766, 139, 856, 173, 792, and 1066; the VH1 comprises (i) a CDR1 having an amino acid sequence that is at least 65%, at least 70%, at least 75%, at least 80%, at least 85%, at least 90%, at least 95%, at least 99%, or 100% identical to any one of SEQ ID NOs: 5, 12, 18, 26, 34, 68, 75, 148, 155, 629, 141, 175, 1047, 1052, 1057, 1062, and 1067; (ii) a CDR2 having an amino acid sequence that is at least 65%, at least 70%, at least 75%, at least 80%, at least 85%, at least 90%, at least 95%, at least 99%, or 100% identical to any one of SEQ ID NOs: 6, 19, 27, 35, 69, 76, 149, 156, 630, 142, 176, 1048, 1053, 1058, 1063, and 1068; and (iii) a CDR3 having an amino acid sequence that is at least 65%, at least 70%, at least 75%, at least 80%, at least 85%, at least 90%, at least 95%, at least 99%, or 100% identical to any one of SEQ ID NOs: 7, 13, 20, 28, 36, 40, 70, 77, 327, 150, 157, 332, 631, 765, 767, 143, 857, 177, 793, 1049, 1054, 1059, 1064, and 1069; the VL2 comprises (i) a complementarity determining region (CDR) 1 having an amino acid sequence that is at least 65%, at least 70%, at least 75%, at least 80%, at least 85%, at least 90%, at least 95%, at least 99%, or 100% identical to any one of SEQ ID NOs: 1, 9, 15, 23, 30, 65, 72, 145, 152, 324, 627, 138, 172, 1045, 1050, 1055, 1060, and 1065; (ii) a CDR2 having an amino acid sequence that is at least 65%, at least 70%, at least 75%, at least 80%, at least 85%, at least 90%, at least 95%, at least 99%, or 100% identical to any one of SEQ ID NOs: 2, 31, 628, 1046, 1051, 1056, and 1061, or at least 65%, at least 70%, at least 75%, at least 80%, at least 85%, at least 90%, at least 95%, at least 99%, or 100% identical to any one of amino acid sequences GAS, LGS, GTN, SAS, SDS, AAS, DAS, and DNT; and (iii) a CDR3 having an amino acid sequence that is at least 65%, at least 70%, at least 75%, at least 80%, at least 85%, at least 90%, at least 95%, at least 99%, or 100% identical to any one of SEQ ID NOs: 3, 10, 16, 24, 32, 38, 66, 73, 146, 153, 325, 326, 764, 766, 139, 856, 173, 792, and 1066; the VH2 comprises (i) a CDR1 having an amino acid sequence that is at least 65%, at least 70%, at least 75%, at least 80%, at least 85%, at least 90%, at least 95%, at least 99%, or 100% identical to any one of SEQ ID NOs: 5, 12, 18, 26, 34, 68, 75, 148, 155, 629, 141, 175, 1047, 1052, 1057, 1062, and 1067; (ii) a CDR2 having an amino acid sequence that is at least 65%, at least 70%, at least 75%, at least 80%, at least 85%, at least 90%, at least 95%, at least 99%, or 100% identical to any one of SEQ ID NOs: 6, 19, 27, 35, 69, 76, 149, 156, 630, 142, 176, 1048, 1053, 1058, 1063, and 1068; and (iii) a CDR3 having an amino acid sequence that is at least 65%, at least 70%, at least 75%, at least 80%, at least 85%, at least 90%, at least 95%, at least 99%, or 100% identical to any one of SEQ ID NOs: 7, 13, 20, 28, 36, 40, 70, 77, 327, 150, 157, 332, 631, 765, 767, 143, 857, 177, 793, 1049, 1054, 1059, 1064, and 1069; the VL3 comprises (i) a complementarity determining region (CDR) 1 having an amino acid sequence that is at least 65%, at least 70%, at least 75%, at least 80%, at least 85%, at least 90%, at least 95%, at least 99%, or 100% identical to any one of SEQ ID NOs: 1, 9, 15, 23, 30, 65, 72, 145, 152, 324, 627, 138, 172, 1045, 1050, 1055, 1060, and 1065; (ii) a CDR2 having an amino acid sequence that is at least 65%, at least 70%, at least 75%, at least 80%, at least 85%, at least 90%, at least 95%, at least 99%, or 100% identical to any one of SEQ ID NOs: 2, 31, 628, 1046, 1051, 1056, and 1061, or at least 65%, at least 70%, at least 75%, at least 80%, at least 85%, at least 90%, at least 95%, at least 99%, or 100% identical to any one of amino acid sequences GAS, LGS, GTN, SAS, SDS, AAS, DAS, and DNT; (iii) a CDR3 having an amino acid sequence that is at least 65%, at least 70%, at least 75%, at least 80%, at least 85%, at least 90%, at least 95%, at least 99%, or 100% identical to any one of SEQ ID NOs: 3, 10, 16, 24, 32, 38, 66, 73, 146, 153, 325, 326, 764, 766, 139, 856, 173, 792, and 1066; the VH3 comprises (i) a CDR1 having an amino acid sequence that is at least 65%, at least 70%, at least 75%, at least 80%, at least 85%, at least 90%, at least 95%, at least 99%, or 100% identical to any one of SEQ ID NOs: 5, 12, 18, 26, 34, 68, 75, 148, 155, 629, 141, 175, 1047, 1052, 1057, 1062, and 1067; (ii) a CDR2 having an amino acid sequence that is at least 65%, at least 70%, at least 75%, at least 80%, at least 85%, at least 90%, at least 95%, at least 99%, or 100% identical to any one of SEQ ID NOs: 6, 19, 27, 35, 69, 76, 149, 156, 630, 142, 176, 1048, 1053, 1058, 1063, and 1068; and (iii) a CDR3 having an amino acid sequence that is at least 65%, at least 70%, at least 75%, at least 80%, at least 85%, at least 90%, at least 95%, at least 99%, or 100% identical to any one of SEQ ID NOs: 7, 13, 20, 28, 36, 40, 70, 77, 327, 150, 157, 332, 631, 765, 767, 143, 857, 177, 793, 1049, 1054, 1059, 1064, and 1069; the VL4 comprises (i) a complementarity determining region (CDR) 1 having an amino acid sequence that is at least 65%, at least 70%, at least 75%, at least 80%, at least 85%, at least 90%, at least 95%, at least 99%, or 100% identical to any one of SEQ ID NOs: 1, 9, 15, 23, 30, 65, 72, 145, 152, 324, 627, 138, 172, 1045, 1050, 1055, 1060, and 1065; (ii) a CDR2 having an amino acid sequence that is at least 65%, at least 70%, at least 75%, at least 80%, at least 85%, at least 90%, at least 95%, at least 99%, or 100% identical to any one of SEQ ID NOs: 2, 31.628, 1046, 1051, 1056, and 1061, or at least 65%, at least 70%, at least 75%, at least 80%, at least 85%, at least 90%, at least 95%, at least 99%, or 100% identical to any one of amino acid sequences GAS, LGS, GTN, SAS, SDS, AAS, DAS, and DNT; (iii) a CDR3 having an amino acid sequence that is at least 65%, at least 70%, at least 75%, at least 80%, at least 85%, at least 90%, at least 95%, at least 99%, or 100% identical to any one of SEQ ID NOs: 3, 10, 16, 24, 32, 38, 66, 73, 146, 153, 325, 326, 764, 766, 139, 856, 173, 792, and 1066; and the VH4 comprises (i) a CDR1 having an amino acid sequence that is at least 65%, at least 70%, at least 75%, at least 80%, at least 85%, at least 90%, at least 95%, at least 99%, or 100% identical to any one of SEQ ID NOs: 5, 12, 18, 26, 34, 68, 75, 148, 155, 629, 141, 175, 1047, 1052, 1057, 1062, and 1067; (ii) a CDR2 having an amino acid sequence that is at least 65%, at least 70%, at least 75%, at least 80%, at least 85%, at least 90%, at least 95%, at least 99%, or 100% identical to any one of SEQ ID NOs: 6, 19, 27, 35, 69, 76, 149, 156, 630, 142, 176, 1048, 1053, 1058, 1063, and 1068; and (iii) a CDR3 having an amino acid sequence that is at least 65%, at least 70%, at least 75%, at least 80%, at least 85%, at least 90%, at least 95%, at least 99%, or 100% identical to any one of SEQ ID NOs: 7, 13, 20, 28, 36, 40, 70, 77, 327, 150, 157, 332, 631, 765, 767, 143, 857, 177, 793, 1049, 1054, 1059, 1064, and 1069.

[3387] In some aspects, the VL1 comprises an amino acid sequence that is at least 65%, at least 70%, at least 75%, at least 80%, at least 85%, at least 90%, at least 95%, at least 99%, or 100% identical to any one of SEQ ID NOs: 4, 11, 17, 25, 33, 39, 67, 74, 147, 154, 140, and 174.

[3388] In some aspects, the VH1 comprises an amino acid sequence that is at least 65%, at least 70%, at least 75%, at least 80%, at least 85%, at least 90%, at least 95%, at least 99%, or 100% identical to any one of SEQ ID NOs: 8, 14, 21, 22, 29, 37, 71, 78, 151, 158, 626, 144, and 178.

[3389] In some aspects, the VL2 comprises an amino acid sequence that is at least 65%, at least 70%, at least 75%, at least 80%, at least 85%, at least 90%, at least 95%, at least 99%, or 100% identical to any one of SEQ ID NOs: 4, 11, 17, 25, 33, 39, 67, 74, 147, 154, 140, and 174.

[3390] In some aspects, the VH2 comprises an amino acid sequence that is at least 65%, at least 70%, at least 75%, at least 80%, at least 85%, at least 90%, at least 95%, at least 99%, or 100% identical to any one of SEQ ID NOs: 8, 14, 21, 22, 29, 37, 71, 78, 151, 158, 626, 144, and 178.

[3391] In some aspects, the VL3 comprises an amino acid sequence that is at least 65%, at least 70%, at least 75%, at least 80%, at least 85%, at least 90%, at least 95%, at least 99%, or 100% identical to any one of SEQ ID NOs: 4, 11, 17, 25, 33, 39, 67, 74, 147, 154, 140, and 174.

[3392] In some aspects, the VH3 comprises an amino acid sequence that is at least 65%, at least 70%, at least 75%, at least 80%, at least 85%, at least 90%, at least 95%, at least 99%, or 100% identical to any one of SEQ ID NOs: 8, 14, 21, 22, 29, 37, 71, 78, 151, 158, 626, 144, and 178.

[3393] In some aspects, the VL4 comprises an amino acid sequence that is at least 65%, at least 70%, at least 75%, at least 80%, at least 85%, at least 90%, at least 95%, at least 99%, or 100% identical to any one of SEQ ID NOs: 4, 11, 17, 25, 33, 39, 67, 74, 147, 154, 140, and 174.

[3394] In some aspects, the VH4 comprises an amino acid sequence that is at least 65%, at least 70%, at least 75%, at least 80%, at least 85%, at least 90%, at least 95%, at least 99%, or 100% identical to any one of SEQ ID NOs: 8, 14, 21, 22, 29, 37, 71, 78, 151, 158, 626, 144, and 178.

[3395] In some aspects, (i) the VL1 comprises an amino acid sequence that is at least 65%, at least 70%, at least 75%, at least 80%, at least 85%, at least 90%, at least 95%, at least 99%, or 100% identical to any one of SEQ ID NOs: 4, 11, 17, 25, 33, 39, 67, 74, 147, 154, 140, and 174; (ii) the VH1 comprises an amino acid sequence that is at least 65%, at least 70%, at least 75%, at least 80%, at least 85%, at least 90%, at least 95%, at least 99%, or 100% identical to any one of SEQ ID NOs: 8, 14, 21, 22, 29, 37, 71, 78, 151, 158, 626, 144, and 178; (iii) the VL2 comprises an amino acid sequence that is at least 65%, at least 70%, at least 75%, at least 80%, at least 85%, at least 90%, at least 95%, at least 99%, or 100% identical to any one of SEQ ID NOs: 4, 11, 17, 25, 33, 39, 67, 74, 147, 154, 140, and 174; (iv) the VH2 comprises an amino acid sequence that is at least 65%, at least 70%, at least 75%, at least 80%, at least 85%, at least 90%, at least 95%, at least 99%, or 100% identical to any one of SEQ ID NOs: 8, 14, 21, 22, 29, 37, 71, 78, 151, 158, 626, 144, and 178; (v) the VL3 comprises an amino acid sequence that is at least 65%, at least 70%, at least 75%, at least 80%, at least 85%, at least 90%, at least 95%, at least 99%, or 100% identical to any one of SEQ ID NOs: 4, 11, 17, 25, 33, 39, 67, 74, 147, 154, 140, and 174; (vi) the VH3 comprises an amino acid sequence that is at least 65%, at least 70%, at least 75%, at least 80%, at least 85%, at least 90%, at least 95%, at least 99%, or 100% identical to any one of SEQ ID NOs: 8, 14, 21, 22, 29, 37, 71, 78, 151, 158, 626, 144, and 178. (vii) the VL4 comprises an amino acid sequence that is at least 65%, at least 70%, at least 75%, at least 80%, at least 85%, at least 90%, at least 95%, at least 99%, or 100% identical to any one of SEQ ID NOs: 4, 11, 17, 25, 33, 39, 67, 74, 147, 154, 140, and 174; and (viii) the VH4 comprises an amino acid sequence that is at least 65%, at least 70%, at least 75%, at least 80%, at least 85%, at least 90%, at least 95%, at least 99%, or 100% identical to any one of SEQ ID NOs: 8, 14, 21, 22, 29, 37, 71, 78, 151, 158, 626, 144, and 178.

[3396] In some aspects, the VL1 comprises (i) a complementarity determining region (CDR) 1 having an amino acid sequence that is at least 65%, at least 70%, at least 75%, at least 80%, at least 85%, at least 90%, at least 95%, at least 99%, or 100% identical to any one of SEQ ID NOs: 41, 48, 138, 145, 152, 159, 166, 172, 192, 770, 778, 785, 794, 801, 807, 814, 827, 836, 849, 858, 865, 878, 1045, 1050, 1060, and 1065; (ii) a CDR2 having an amino acid sequence at least 65%, at least 70%, at least 75%, at least 80%, at least 85%, at least 90%, at least 95%, at least 99%, or 100% identical to any one of amino acid sequences AAS, GAS, DAS, NNN, SDS, SYN, WAS, and DAT, or at least 65%, at least 70%, at least 75%, at least 80%, at least 85%, at least 90%, at least 95%, at least 99%, or 100% identical to any one of SEQ ID NOs: 1046, 1051, and 1061; and (iii) a CDR3 having an amino acid sequence that is at least 65%, at least 70%, at least 75%, at least 80%, at least 85%, at least 90%, at least 95%, at least 99%, or 100% identical to any one of SEQ ID NOs: 42, 139, 146, 153, 160, 167, 173, 764, 766, 768, 771, 779, 786, 792, 795, 808, 815, 821, 830, 837, 843, 850, 856, 859, 866, 872, 879, 885, and 1066.

[3397] In some aspects, the VL2 comprises (i) a complementarity determining region (CDR) 1 having an amino acid sequence that is at least 65%, at least 70%, at least 75%, at least 80%, at least 85%, at least 90%, at least 95%, at least 99%, or 100% identical to any one of SEQ ID NOs: 41, 48, 138, 145, 152, 159, 166, 172, 192, 770, 778, 785, 794, 801, 807, 814, 827, 836, 849, 858, 865, 878, 1045, 1050, 1060, and 1065; (ii) a CDR2 having an amino acid sequence that is at least 65%, at least 70%, at least 75%, at least 80%, at least 85%, at least 90%, at least 95%, at least 99%, or 100% identical to any one of amino acid sequences AAS, GAS, DAS, NNN, SDS, SYN, WAS, and DAT, or at least 65%, at least 70%, at least 75%, at least 80%, at least 85%, at least 90%, at least 95%, at least 99%, or 100% identical to any one of SEQ ID NOs: 1046, 1051, and 1061; and (iii) a CDR3 having an amino acid sequence that is at least 65%, at least 70%, at least 75%, at least 80%, at least 85%, at least 90%, at least 95%, at least 99%, or 100% identical to any one of SEQ ID NOs: 42, 139, 146, 153, 160, 167, 173, 764, 766, 768, 771, 779, 786, 792, 795, 808, 815, 821, 830, 837, 843, 850, 856, 859, 866, 872, 879, 885, and 1066.

[3398] In some aspects, the VL3 comprises (i) a complementarity determining region (CDR) 1 having an amino acid sequence that is at least 65%, at least 70%, at least 75%, at least 80%, at least 85%, at least 90%, at least 95%, at least 99%, or 100% identical to any one of SEQ ID NOs: 41, 48, 138, 145, 152, 159, 166, 172, 192, 770, 778, 785, 794, 801, 807, 814, 827, 836, 849, 858, 865, 878, 1045, 1050, 1060, and 1065; (ii) a CDR2 having an amino acid sequence that is at least 65%, at least 70%, at least 75%, at least 80%, at least 85%, at least 90%, at least 95%, at least 99%, or 100% identical to any one of amino acid sequences AAS, GAS, DAS, NNN, SDS, SYN, WAS, and DAT, or at least 65%, at least 70%, at least 75%, at least 80%, at least 85%, at least 90%, at least 95%, at least 99%, or 100% identical to any one of SEQ ID NOs: 1046, 1051, and 1061; and (iii) a CDR3 having an amino acid sequence that is at least 65%, at least 70%, at least 75%, at least 80%, at least 85%, at least 90%, at least 95%, at least 99%, or 100% identical to any one of SEQ ID NOs: 42, 139, 146, 153, 160, 167, 173, 764, 766, 768, 771, 779, 786, 792, 795, 808, 815, 821, 830, 837, 843, 850, 856, 859, 866, 872, 879, 885, and 1066.

[3399] In some aspects, the VL4 comprises (i) a complementarity determining region (CDR) 1 having an amino acid sequence that is at least 65%, at least 70%, at least 75%, at least 80%, at least 85%, at least 90%, at least 95%, at least 99%, or 100% identical to any one of SEQ ID NOs: 41, 48, 138, 145, 152, 159, 166, 172, 192, 770, 778, 785, 794, 801, 807, 814, 827, 836, 849, 858, 865, 878, 1045, 1050, 1060, and 1065; (ii) a CDR2 having an amino acid sequence that is at least 65%, at least 70%, at least 75%, at least 80%, at least 85%, at least 90%, at least 95%, at least 99%, or 100% identical to any one of amino acid sequences AAS, GAS, DAS, NNN, SDS, SYN, WAS, and DAT, or at least 65%, at least 70%, at least 75%, at least 80%, at least 85%, at least 90%, at least 95%, at least 99%, or 100% identical to any one of SEQ ID NOs: 1046, 1051, and 1061; and (iii) a CDR3 having an amino acid sequence that is at least 65%, at least 70%, at least 75%, at least 80%, at least 85%, at least 90%, at least 95%, at least 99%, or 100% identical to any one of SEQ ID NOs: 42, 139, 146, 153, 160, 167, 173, 764, 766, 768, 771, 779, 786, 792, 795, 808, 815, 821, 830, 837, 843, 850, 856, 859, 866, 872, 879, 885, and 1066.

[3400] In some aspects, the VH1 comprises (i) a CDR1 having an amino acid sequence that is at least 65%, at least 70%, at least 75%, at least 80%, at least 85%, at least 90%, at least 95%, at least 99%, or 100% identical to any one of SEQ ID NOs: 44, 133, 141, 148, 155, 162, 175, 773, 781, 788, 797, 803, 810, 817, 823, 832, 839, 845, 852, 861, 868, 874, 881, 1047, 1052, 1062, and 1067; (ii) a CDR2 having an amino acid sequence that is at least 65%, at least 70%, at least 75%, at least 80%, at least 85%, at least 90%, at least 95%, at least 99%, or 100% identical to any one of SEQ ID NOs: 6, 142, 149, 156, 163, 169, 176, 776, 782, 789, 798, 804, 811, 818, 824, 833, 840, 846, 853, 862, 869, 875, 882, 1048, 1053, 1063, and 1068; and (iii) a CDR3 having an amino acid sequence that is at least 65%, at least 70%, at least 75%, at least 80%, at least 85%, at least 90%, at least 95%, at least 99%, or 100% identical to any one of SEQ ID NOs: 46, 143, 150, 157, 164, 170, 177, 765, 767, 769, 774, 783, 790, 793, 799, 805, 812, 819, 825, 834, 841, 847, 854, 857, 863, 870, 876, 883, 886, 1049, 1054, 1064, and 1069.

[3401] In some aspects, the VH2 comprises (i) a CDR1 having an amino acid sequence that is at least 65%, at least 70%, at least 75%, at least 80%, at least 85%, at least 90%, at least 95%, at least 99%, or 100% identical to any one of SEQ ID NOs: 44, 133, 141, 148, 155, 162, 175, 773, 781, 788, 797, 803, 810, 817, 823, 832, 839, 845, 852, 861, 868, 874, 881, 1047, 1052, 1062, and 1067; (ii) a CDR2 having an amino acid sequence that is at least 65%, at least 70%, at least 75%, at least 80%, at least 85%, at least 90%, at least 95%, at least 99%, or 100% identical to any one of SEQ ID NOs: 6, 142, 149, 156, 163, 169, 176, 776, 782, 789, 798, 804, 811, 818, 824, 833, 840, 846, 853, 862, 869, 875, 882, 1048, 1053, 1063, and 1068; and (iii) a CDR3 having an amino acid sequence that is at least 65%, at least 70%, at least 75%, at least 80%, at least 85%, at least 90%, at least 95%, at least 99%, or 100% identical to any one of SEQ ID NOs: 46, 143, 150, 157, 164, 170, 177, 765, 767, 769, 774, 783, 790, 793, 799, 805, 812, 819, 825, 834, 841, 847, 854, 857, 863, 870, 876, 883, 886, 1049, 1054, 1064, and 1069.

[3402] In some aspects, the VH3 comprises (i) a CDR1 having an amino acid sequence that is at least 65%, at least 70%, at least 75%, at least 80%, at least 85%, at least 90%, at least 95%, at least 99%, or 100% identical to any one of SEQ ID NOs: 44, 133, 141, 148, 155, 162, 175, 773, 781, 788, 797, 803, 810, 817, 823, 832, 839, 845, 852, 861, 868, 874, 881, 1047, 1052, 1062, and 1067; (ii) a CDR2 having an amino acid sequence that is at least 65%, at least 70%, at least 75%, at least 80%, at least 85%, at least 90%, at least 95%, at least 99%, or 100% identical to any one of SEQ ID NOs: 6, 142, 149, 156, 163, 169, 176, 776, 782, 789, 798, 804, 811, 818, 824, 833, 840, 846, 853, 862, 869, 875, 882, 1048, 1053, 1063, and 1068; and (iii) a CDR3 having an amino acid sequence that is at least 65%, at least 70%, at least 75%, at least 80%, at least 85%, at least 90%, at least 95%, at least 99%, or 100% identical to any one of SEQ ID NOs: 46, 143, 150, 157, 164, 170, 177, 765, 767, 769, 774, 783, 790, 793, 799, 805, 812, 819, 825, 834, 841, 847, 854, 857, 863, 870, 876, 883, 886, 1049, 1054, 1064, and 1069.

[3403] In some aspects, the VH4 comprises (i) a CDR1 having an amino acid sequence that is at least 65%, at least 70%, at least 75%, at least 80%, at least 85%, at least 90%, at least 95%, at least 99%, or 100% identical to any one of SEQ ID NOs: 44, 133, 141, 148, 155, 162, 175, 773, 781, 788, 797, 803, 810, 817, 823, 832, 839, 845, 852, 861, 868, 874, 881, 1047, 1052, 1062, and 1067; (ii) a CDR2 having an amino acid sequence that is at least 65%, at least 70%, at least 75%, at least 80%, at least 85%, at least 90%, at least 95%, at least 99%, or 100% identical to any one of SEQ ID NOs: 6, 142, 149, 156, 163, 169, 176, 776, 782, 789, 798, 804, 811, 818, 824, 833, 840, 846, 853, 862, 869, 875, 882, 1048, 1053, 1063, and 1068; and (iii) a CDR3 having an amino acid sequence that is at least 65%, at least 70%, at least 75%, at least 80%, at least 85%, at least 90%, at least 95%, at least 99%, or 100% identical to any one of SEQ ID NOs: 46, 143, 150, 157, 164, 170, 177, 765, 767, 769, 774, 783, 790, 793, 799, 805, 812, 819, 825, 834, 841, 847, 854, 857, 863, 870, 876, 883, 886, 1049, 1054, 1064, and 1069.

[3404] In some aspects, the VL1 comprises (i) a complementarity determining region (CDR) 1 having an amino acid sequence that is at least 65%, at least 70%, at least 75%, at least 80%, at least 85%, at least 90%, at least 95%, at least 99%, or 100% identical to any one of SEQ ID NOs: 41, 48, 138, 145, 152, 159, 166, 172, 192, 770, 778, 785, 794, 801, 807, 814, 827, 836, 849, 858, 865, 878, 1045, 1050, 1060, and 1065; (ii) a CDR2 having an amino acid sequence that is at least 65%, at least 70%, at least 75%, at least 80%, at least 85%, at least 90%, at least 95%, at least 99%, or 100% identical to any one of amino acid sequences AAS, GAS, DAS, NNN, SDS, SYN, WAS, and DAT, or at least 65%, at least 70%, at least 75%, at least 80%, at least 85%, at least 90%, at least 95%, at least 99%, or 100% identical to any one of SEQ ID NOs: 1046, 1051, and 1061; (iii) a CDR3 having an amino acid sequence that is at least 65%, at least 70%, at least 75%, at least 80%, at least 85%, at least 90%, at least 95%, at least 99%, or 100% identical to any one of SEQ ID NOs: 42, 139, 146, 153, 160, 167, 173, 764, 766, 768, 771, 779, 786, 792, 795, 808, 815, 821, 830, 837, 843, 850, 856, 859, 866, 872, 879, 885, and 1066; the VH1 comprises (i) a CDR1 having an amino acid sequence that is at least 65%, at least 70%, at least 75%, at least 80%, at least 85%, at least 90%, at least 95%, at least 99%, or 100% identical to any one of SEQ ID NOs: 44, 133, 141, 148, 155, 162, 175, 773, 781, 788, 797, 803, 810, 817, 823, 832, 839, 845, 852, 861, 868, 874, 881, 1047, 1052, 1062, and 1067; (ii) a CDR2 having an amino acid sequence that is at least 65%, at least 70%, at least 75%, at least 80%, at least 85%, at least 90%, at least 95%, at least 99%, or 100% identical to any one of SEQ ID NOs: 6, 142, 149, 156, 163, 169, 176, 776, 782, 789, 798, 804, 811, 818, 824, 833, 840, 846, 853, 862, 869, 875, 882, 1048, 1053, 1063, and 1068; and (iii) a CDR3 having an amino acid sequence that is at least 65%, at least 70%, at least 75%, at least 80%, at least 85%, at least 90%, at least 95%, at least 99%, or 100% identical to any one of SEQ ID NOs: 46, 143, 150, 157, 164, 170, 177, 765, 767, 769, 774, 783, 790, 793, 799, 805, 812, 819, 825, 834, 841, 847, 854, 857, 863, 870, 876, 883, 886, 1049, 1054, 1064, and 1069; the VL2 comprises (i) a complementarity determining region (CDR) 1 having an amino acid sequence that is at least 65%, at least 70%, at least 75%, at least 80%, at least 85%, at least 90%, at least 95%, at least 99%, or 100% identical to any one of SEQ ID NOs: 41, 48, 138, 145, 152, 159, 166, 172, 192, 770, 778, 785, 794, 801, 807, 814, 827, 836, 849, 858, 865, 878, 1045, 1050, 1060, and 1065; (ii) a CDR2 having an amino acid sequence that is at least 65%, at least 70%, at least 75%, at least 80%, at least 85%, at least 90%, at least 95%, at least 99%, or 100% identical to any one of amino acid sequences AAS, GAS, DAS, NNN, SDS, SYN, WAS, and DAT, or at least 65%, at least 70%, at least 75%, at least 80%, at least 85%, at least 90%, at least 95%, at least 99%, or 100% identical to any one of SEQ ID NOs: 1046, 1051, and 1061; and (iii) a CDR3 having an amino acid sequence that is at least 65%, at least 70%, at least 75%, at least 80%, at least 85%, at least 90%, at least 95%, at least 99%, or 100% identical to any one of SEQ ID NOs: 42, 139, 146, 153, 160, 167, 173, 764, 766, 768, 771, 779, 786, 792, 795, 808, 815, 821, 830, 837, 843, 850, 856, 859, 866, 872, 879, 885, and 1066; the VH2 comprises (i) a CDR1 having an amino acid sequence that is at least 65%, at least 70%, at least 75%, at least 80%, at least 85%, at least 90%, at least 95%, at least 99%, or 100% identical to any one of SEQ ID NOs: 44, 133, 141, 148, 155, 162, 175, 773, 781, 788, 797, 803, 810, 817, 823, 832, 839, 845, 852, 861, 868, 874, 881, 1047, 1052, 1062, and 1067; (ii) a CDR2 having an amino acid sequence that is at least 65%, at least 70%, at least 75%, at least 80%, at least 85%, at least 90%, at least 95%, at least 99%, or 100% identical to any one of SEQ ID NOs: 6, 142, 149, 156, 163, 169, 176, 776, 782, 789, 798, 804, 811, 818, 824, 833, 840, 846, 853, 862, 869, 875, 882, 1048, 1053, 1063, and 1068; and (iii) a CDR3 having an amino acid sequence that is at least 65%, at least 70%, at least 75%, at least 80%, at least 85%, at least 90%, at least 95%, at least 99%, or 100% identical to any one of SEQ ID NOs: 46, 143, 150, 157, 164, 170, 177, 765, 767, 769, 774, 783, 790, 793, 799, 805, 812, 819, 825, 834, 841, 847, 854, 857, 863, 870, 876, 883, 886, 1049, 1054, 1064, and 1069; the VL3 comprises (i) a complementarity determining region (CDR) 1 having an amino acid sequence that is at least 65%, at least 70%, at least 75%, at least 80%, at least 85%, at least 90%, at least 95%, at least 99%, or 100% identical to any one of SEQ ID NOs: 41, 48, 138, 145, 152, 159, 166, 172, 192, 770, 778, 785, 794, 801, 807, 814, 827, 836, 849, 858, 865, 878, 1045, 1050, 1060, and 1065; (ii) a CDR2 having an amino acid sequence that is at least 65%, at least 70%, at least 75%, at least 80%, at least 85%, at least 90%, at least 95%, at least 99%, or 100% identical to any one of amino acid sequences AAS, GAS, DAS, NNN, SDS, SYN, WAS, and DAT, or at least 65%, at least 70%, at least 75%, at least 80%, at least 85%, at least 90%, at least 95%, at least 99%, or 100% identical to any one of SEQ ID NOs: 1046, 1051, and 1061; (iii) a CDR3 having an amino acid sequence that is at least 65%, at least 70%, at least 75%, at least 80%, at least 85%, at least 90%, at least 95%, at least 99%, or 100% identical to any one of SEQ ID NOs: 42, 139, 146, 153, 160, 167, 173, 764, 766, 768, 771, 779, 786, 792, 795, 808, 815, 821, 830, 837, 843, 850, 856, 859, 866, 872, 879, 885, and 1066; the VH3 comprises (i) a CDR1 having an amino acid sequence that is at least 65%, at least 70%, at least 75%, at least 80%, at least 85%, at least 90%, at least 95%, at least 99%, or 100% identical to any one of SEQ ID NOs: 44, 133, 141, 148, 155, 162, 175, 773, 781, 788, 797, 803, 810, 817, 823, 832, 839, 845, 852, 861, 868, 874, 881, 1047, 1052, 1062, and 1067; (ii) a CDR2 having an amino acid sequence that is at least 65%, at least 70%, at least 75%, at least 80%, at least 85%, at least 90%, at least 95%, at least 99%, or 100% identical to any one of SEQ ID NOs: 6, 142, 149, 156, 163, 169, 176, 776, 782, 789, 798, 804, 811, 818, 824, 833, 840, 846, 853, 862, 869, 875, 882, 1048, 1053, 1063, and 1068; and (iii) a CDR3 having an amino acid sequence that is at least 65%, at least 70%, at least 75%, at least 80%, at least 85%, at least 90%, at least 95%, at least 99%, or 100% identical to any one of SEQ ID NOs: 46, 143, 150, 157, 164, 170, 177, 765, 767, 769, 774, 783, 790, 793, 799, 805, 812, 819, 825, 834, 841, 847, 854, 857, 863, 870, 876, 883, 886, 1049, 1054, 1064, and 1069; the VL4 comprises (i) a complementarity determining region (CDR) 1 having an amino acid sequence that is at least 65%, at least 70%, at least 75%, at least 80%, at least 85%, at least 90%, at least 95%, at least 99%, or 100% identical to any one of SEQ ID NOs: 41, 48, 138, 145, 152, 159, 166, 172, 192, 770, 778, 785, 794, 801, 807, 814, 827, 836, 849, 858, 865, 878, 1045, 1050, 1060, and 1065; (ii) a CDR2 having an amino acid sequence that is at least 65%, at least 70%, at least 75%, at least 80%, at least 85%, at least 90%, at least 95%, at least 99%, or 100% identical to any one of amino acid sequences AAS, GAS, DAS, NNN, SDS, SYN, WAS, and DAT, or at least 65%, at least 70%, at least 75%, at least 80%, at least 85%, at least 90%, at least 95%, at least 99%, or 100% identical to any one of SEQ ID NOs: 1046, 1051, and 1061; (iii) a CDR3 having an amino acid sequence that is at least 65%, at least 70%, at least 75%, at least 80%, at least 85%, at least 90%, at least 95%, at least 99%, or 100% identical to any one of SEQ ID NOs: 42, 139, 146, 153, 160, 167, 173, 764, 766, 768, 771, 779, 786, 792, 795, 808, 815, 821, 830, 837, 843, 850, 856, 859, 866, 872, 879, 885, and 1066; and the VH4 comprises (i) a CDR1 having an amino acid sequence that is at least 65%, at least 70%, at least 75%, at least 80%, at least 85%, at least 90%, at least 95%, at least 99%, or 100% identical to any one of SEQ ID NOs: 44, 133, 141, 148, 155, 162, 175, 773, 781, 788, 797, 803, 810, 817, 823, 832, 839, 845, 852, 861, 868, 874, 881, 1047, 1052, 1062, and 1067; (ii) a CDR2 having an amino acid sequence that is at least 65%, at least 70%, at least 75%, at least 80%, at least 85%, at least 90%, at least 95%, at least 99%, or 100% identical to any one of SEQ ID NOs: 6, 142, 149, 156, 163, 169, 176, 776, 782, 789, 798, 804, 811, 818, 824, 833, 840, 846, 853, 862, 869, 875, 882, 1048, 1053, 1063, and 1068; and (iii) a CDR3 having an amino acid sequence that is at least 65%, at least 70%, at least 75%, at least 80%, at least 85%, at least 90%, at least 95%, at least 99%, or 100% identical to any one of SEQ ID NOs: 46, 143, 150, 157, 164, 170, 177, 765, 767, 769, 774, 783, 790, 793, 799, 805, 812, 819, 825, 834, 841, 847, 854, 857, 863, 870, 876, 883, 886, 1049, 1054, 1064, and 1069.

[3405] In some aspects, the VL1 comprises an amino acid sequence that is at least 65%, at least 70%, at least 75%, at least 80%, at least 85%, at least 90%, at least 95%, at least 99%, or 100% identical to any one of SEQ ID NOs: 43, 140, 147, 154, 161, 168, 174, 772, 780, 787, 796, 802, 809, 816, 822, 831, 838, 844, 851, 860, 867, 873, and 880.

[3406] In some aspects, the VH1 comprises an amino acid sequence that is at least 65%, at least 70%, at least 75%, at least 80%, at least 85%, at least 90%, at least 95%, at least 99%, or 100% identical to any one of SEQ ID NOs: 144, 151, 158, 165, 171, 178, 775, 777, 784, 791, 800, 806, 813, 820, 826, 835, 842, 848, 855, 864, 871, 877, and 884.

[3407] In some aspects, the VL2 comprises an amino acid sequence that is at least 65%, at least 70%, at least 75%, at least 80%, at least 85%, at least 90%, at least 95%, at least 99%, or 100% identical to any one of SEQ ID NOs: 43, 140, 147, 154, 161, 168, 174, 772, 780, 787, 796, 802, 809, 816, 822, 831, 838, 844, 851, 860, 867, 873, and 880.

[3408] In some aspects, the VH2 comprises an amino acid sequence that is at least 65%, at least 70%, at least 75%, at least 80%, at least 85%, at least 90%, at least 95%, at least 99%, or 100% identical to any one of SEQ ID NOs: 144, 151, 158, 165, 171, 178, 775, 777, 784, 791, 800, 806, 813, 820, 826, 835, 842, 848, 855, 864, 871, 877, and 884.

[3409] In some aspects, the VL3 comprises an amino acid sequence that is at least 65%, at least 70%, at least 75%, at least 80%, at least 85%, at least 90%, at least 95%, at least 99%, or 100% identical to any one of SEQ ID NOs: 43, 140, 147, 154, 161, 168, 174, 772, 780, 787, 796, 802, 809, 816, 822, 831, 838, 844, 851, 860, 867, 873, and 880.

[3410] In some aspects, the VH3 comprises an amino acid sequence that is at least 65%, at least 70%, at least 75%, at least 80%, at least 85%, at least 90%, at least 95%, at least 99%, or 100% identical to any one of SEQ ID NOs: 144, 151, 158, 165, 171, 178, 775, 777, 784, 791, 800, 806, 813, 820, 826, 835, 842, 848, 855, 864, 871, 877, and 884.

[3411] In some aspects, the VL4 comprises an amino acid sequence that is at least 65%, at least 70%, at least 75%, at least 80%, at least 85%, at least 90%, at least 95%, at least 99%, or 100% identical to any one of SEQ ID NOs: 43, 140, 147, 154, 161, 168, 174, 772, 780, 787, 796, 802, 809, 816, 822, 831, 838, 844, 851, 860, 867, 873, and 880.

[3412] In some aspects, the VH4 comprises an amino acid sequence that is at least 65%, at least 70%, at least 75%, at least 80%, at least 85%, at least 90%, at least 95%, at least 99%, or 100% identical to any one of SEQ ID NOs: 144, 151, 158, 165, 171, 178, 775, 777, 784, 791, 800, 806, 813, 820, 826, 835, 842, 848, 855, 864, 871, 877, and 884.

[3413] In some aspects, (i) the VL1 comprises an amino acid sequence that is at least 65%, at least 70%, at least 75%, at least 80%, at least 85%, at least 90%, at least 95%, at least 99%, or 100% identical to any one of SEQ ID NOs: 43, 140, 147, 154, 161, 168, 174, 772, 780, 787, 796, 802, 809, 816, 822, 831, 838, 844, 851, 860, 867, 873, and 880; (ii) the VH1 comprises an amino acid sequence that is at least 65%, at least 70%, at least 75%, at least 80%, at least 85%, at least 90%, at least 95%, at least 99%, or 100% identical to any one of SEQ ID NOs: 144, 151, 158, 165, 171, 178, 775, 777, 784, 791, 800, 806, 813, 820, 826, 835, 842, 848, 855, 864, 871, 877, and 884; (iii) the VL2 comprises an amino acid sequence that is at least 65%, at least 70%, at least 75%, at least 80%, at least 85%, at least 90%, at least 95%, at least 99%, or 100% identical to any one of SEQ ID NOs: 43, 140, 147, 154, 161, 168, 174, 772, 780, 787, 796, 802, 809, 816, 822, 831, 838, 844, 851, 860, 867, 873, and 880; (iv) the VH2 comprises an amino acid sequence that is at least 65%, at least 70%, at least 75%, at least 80%, at least 85%, at least 90%, at least 95%, at least 99%, or 100% identical to any one of SEQ ID NOs: 144, 151, 158, 165, 171, 178, 775, 777, 784, 791, 800, 806, 813, 820, 826, 835, 842, 848, 855, 864, 871, 877, and 884; (v) the VL3 comprises an amino acid sequence that is at least 65%, at least 70%, at least 75%, at least 80%, at least 85%, at least 90%, at least 95%, at least 99%, or 100% identical to any one of SEQ ID NOs: 43, 140, 147, 154, 161, 168, 174, 772, 780, 787, 796, 802, 809, 816, 822, 831, 838, 844, 851, 860, 867, 873, and 880; (vi) the VH3 comprises an amino acid sequence that is at least 65%, at least 70%, at least 75%, at least 80%, at least 85%, at least 90%, at least 95%, at least 99%, or 100% identical to any one of SEQ ID NOs: 144, 151, 158, 165, 171, 178, 775, 777, 784, 791, 800, 806, 813, 820, 826, 835, 842, 848, 855, 864, 871, 877, and 884; (vii) the VL4 comprises an amino acid sequence that is at least 65%, at least 70%, at least 75%, at least 80%, at least 85%, at least 90%, at least 95%, at least 99%, or 100% identical to any one of SEQ ID NOs: 43, 140, 147, 154, 161, 168, 174, 772, 780, 787, 796, 802, 809, 816, 822, 831, 838, 844, 851, 860, 867, 873, and 880; and (viii) the VH4 comprises an amino acid sequence that is at least 65%, at least 70%, at least 75%, at least 80%, at least 85%, at least 90%, at least 95%, at least 99%, or 100% identical to any one of SEQ ID NOs: 144, 151, 158, 165, 171, 178, 775, 777, 784, 791, 800, 806, 813, 820, 826, 835, 842, 848, 855, 864, 871, 877, and 884.

[3414] In some aspects, at least one of VL1, VL2, VL3, or VL4 comprises (i) a complementarity determining region (CDR) 1 having an amino acid sequence that is at least 65%, at least 70%, at least 75%, at least 80%, at least 85%, at least 90%, at least 95%, at least 99%, or 100% identical to SEQ ID NO: 145 or 1050; (ii) a CDR2 having an amino acid sequence at least 65%, at least 70%, at least 75%, at least 80%, at least 85%, at least 90%, at least 95%, at least 99%, or 100% identical to SEQ ID NO: 1051 or an amino acid sequence that is at least 65%, at least 70%, at least 75%, at least 80%, at least 85%, at least 90%, at least 95%, at least 99%, or 100% identical to amino acid sequence AAS; and (iii) a CDR3 having an amino acid sequence that is at least 65%, at least 70%, at least 75%, at least 80%, at least 85%, at least 90%, at least 95%, at least 99%, or 100% identical to SEQ ID NO: 146 or 764.

[3415] In some aspects, at least one of VH1, VH2, VH3, or VH4 comprises (i) a complementarity determining region (CDR) 1 having an amino acid sequence that is at least 65%, at least 70%, at least 75%, at least 80%, at least 85%, at least 90%, at least 95%, at least 99%, or 100% identical to SEQ ID NO: 148 or 1052; (ii) a CDR2 having an amino acid sequence that is at least 65%, at least 70%, at least 75%, at least 80%, at least 85%, at least 90%, at least 95%, at least 99%, or 100% identical to SEQ ID NO: 149 or 1053; and (iii) a CDR3 having an amino acid sequence that is at least 65%, at least 70%, at least 75%, at least 80%, at least 85%, at least 90%, at least 95%, at least 99%, or 100% identical to SEQ ID NO: 150, 765, or 1054.

[3416] In some aspects, at least one of VL1, VL2, VL3, or VL4 comprises (i) a complementarity determining region (CDR) 1 having an amino acid sequence that is at least 65%, at least 70%, at least 75%, at least 80%, at least 85%, at least 90%, at least 95%, at least 99%, or 100% identical to SEQ ID NO: 145 or 1050; (ii) a CDR2 having an amino acid sequence at least 65%, at least 70%, at least 75%, at least 80%, at least 85%, at least 90%, at least 95%, at least 99%, or 100% identical to SEQ ID NO: 1051 or an amino acid sequence that is at least 65%, at least 70%, at least 75%, at least 80%, at least 85%, at least 90%, at least 95%, at least 99%, or 100% identical to amino acid sequence AAS; and (iii) a CDR3 having an amino acid sequence that is at least 65%, at least 70%, at least 75%, at least 80%, at least 85%, at least 90%, at least 95%, at least 99%, or 100% identical to SEQ ID NO: 146 or 764; and at least one of VH1, VH2, VH3, or VH4 comprises (iv) a complementarity determining region (CDR) 1 having an amino acid sequence that is at least 65%, at least 70%, at least 75%, at least 80%, at least 85%, at least 90%, at least 95%, at least 99%, or 100% identical to SEQ ID NO: 148 or 1052; (v) a CDR2 having an amino acid sequence that is at least 65%, at least 70%, at least 75%, at least 80%, at least 85%, at least 90%, at least 95%, at least 99%, or 100% identical to SEQ ID NO: 149 or 1053; and (vi) a CDR3 having an amino acid sequence that is at least 65%, at least 70%, at least 75%, at least 80%, at least 85%, at least 90%, at least 95%, at least 99%, or 100% identical to SEQ ID NO: 150, 765, or 1054.

[3417] In some aspects, at least one of VL1, VL2, VL3, or VL4 comprises an amino acid sequence that is at least 65%, at least 70%, at least 75%, at least 80%, at least 85%, at least 90%, at least 95%, at least 99%, or 100% identical to SEQ ID NO: 147.

[3418] In some aspects, at least one of VH1, VH2, VH3, or VH4 comprises an amino acid sequence that is at least 65%, at least 70%, at least 75%, at least 80%, at least 85%, at least 90%, at least 95%, at least 99%, or 100% identical to SEQ ID NO: 151.

[3419] In some aspects, (i) at least one of VL1, VL2, VL3, or VL4 comprises an amino acid sequence that is at least 65%, at least 70%, at least 75%, at least 80%, at least 85%, at least 90%, at least 95%, at least 99%, or 100% identical to SEQ ID NO: 147, and (ii) at least one of VH1, VH2, VH3, or VH4 comprises an amino acid sequence that is at least 65%, at least 70%, at least 75%, at least 80%, at least 85%, at least 90%, at least 95%, at least 99%, or 100% identical to SEQ ID NO: 151.

[3420] In some aspects, the VL1 comprises (i) a complementarity determining region (CDR) 1 having an amino acid sequence that is at least 65%, at least 70%, at least 75%, at least 80%, at least 85%, at least 90%, at least 95%, at least 99%, or 100% identical to SEQ ID NO: 145 or 1050; (ii) a CDR2 having an amino acid sequence at least 65%, at least 70%, at least 75%, at least 80%, at least 85%, at least 90%, at least 95%, at least 99%, or 100% identical to SEQ ID NO: 1051 or an amino acid sequence that is at least 65%, at least 70%, at least 75%, at least 80%, at least 85%, at least 90%, at least 95%, at least 99%, or 100% identical to amino acid sequence AAS; and (iii) a CDR3 having an amino acid sequence that is at least 65%, at least 70%, at least 75%, at least 80%, at least 85%, at least 90%, at least 95%, at least 99%, or 100% identical to SEQ ID NO: 146 or 764; the VH1 comprises (iv) a complementarity determining region (CDR) 1 having an amino acid sequence that is at least 65%, at least 70%, at least 75%, at least 80%, at least 85%, at least 90%, at least 95%, at least 99%, or 100% identical to SEQ ID NO: 148 or 1052; (v) a CDR2 having an amino acid sequence that is at least 65%, at least 70%, at least 75%, at least 80%, at least 85%, at least 90%, at least 95%, at least 99%, or 100% identical to SEQ ID NO: 149 or 1053; and (vi) a CDR3 having an amino acid sequence that is at least 65%, at least 70%, at least 75%, at least 80%, at least 85%, at least 90%, at least 95%, at least 99%, or 100% identical to SEQ ID NO: 150, 765, or 1054; the VL2 comprises (vii) a complementarity determining region (CDR) 1 having an amino acid sequence that is at least 65%, at least 70%, at least 75%, at least 80%, at least 85%, at least 90%, at least 95%, at least 99%, or 100% identical to any one of SEQ ID NOs: 1, 9, 15, 23, 30, 41, 48, 55, 58, 65, 72, 79, 86, 93, 99, 105, 112, 119, 130, 138, 145, 152, 159, 166, 172, 179, 186, 192, 199, 205, 212, 219, 226, 232, 324, 627, 640, 650, 659, 676, 687, 695, 703, 712, 770, 778, 785, 794, 801, 807, 814, 827, 836, 849, 858, 865, 878, 1045, 1050, 1055, 1060, and 1065; (viii) a CDR2 having an amino acid sequence at least 65%, at least 70%, at least 75%, at least 80%, at least 85%, at least 90%, at least 95%, at least 99%, or 100% identical to any one of SEQ ID NOs: 2, 31, 628, 641, 677, 1046, 1051, 1056, and 1061; or at least 65%, at least 70%, at least 75%, at least 80%, at least 85%, at least 90%, at least 95%, at least 99%, or 100% identical to any one of amino acid sequences AAS, GAS, LGS, GTN, GTN, SAS, SDS, DNT, EVT, DAS, DVT, RNS, DVS, EDS, DDS, KDS, VAS, WAS, YTS, EVS, NNN, SYN, and DAT; (ix) a CDR3 having an amino acid sequence at least 65%, at least 70%, at least 75%, at least 80%, at least 85%, at least 90%, at least 95%, at least 99%, or 100% identical to any one of SEQ ID NOs: 3, 10, 16, 24, 32, 38, 42, 49, 59, 66, 73, 80, 87, 94, 100, 106, 113, 120, 126, 131, 139, 146, 153, 160, 167, 173, 180, 187, 193, 200, 206, 213, 220, 227, 233, 239, 242, 246, 249, 256, 283, 285, 287, 288, 290, 292, 294, 296, 301, 304, 306, 309, 311, 313, 316, 325, 326, 329, 642, 651, 660, 668, 678, 651, 696, 704, 713, 764, 766, 768, 771, 779, 786, 792, 795, 808, 815, 821, 830, 837, 843, 850, 856, 859, 866, 872, 879, 885, and 1066; the VH2 comprises (x) a CDR1 having an amino acid sequence at least 65%, at least 70%, at least 75%, at least 80%, at least 85%, at least 90%, at least 95%, at least 99%, or 100% identical to any one of SEQ ID NOs: 5, 12, 18, 26, 34, 44, 51, 61, 68, 75, 82, 89, 96, 102, 108, 115, 122, 133, 141, 148, 155, 162, 175, 182, 189, 195, 202, 208, 215, 222, 229, 235, 318, 629, 645, 654, 663, 671, 682, 690, 699, 707, 716, 773, 781, 788, 797, 803, 810, 817, 823, 832, 839, 845, 852, 861, 868, 874, 881, 1047, 1052, 1057, 1062, and 1067; (xi) a CDR2 having an amino acid sequence at least 65%, at least 70%, at least 75%, at least 80%, at least 85%, at least 90%, at least 95%, at least 99%, or 100% identical to any one of SEQ ID NOs: 6, 19, 27, 35, 45, 52, 56, 62, 69, 76, 83, 90, 109, 116, 123, 134, 142, 149, 156, 163, 169, 176, 183, 196, 209, 216, 223, 236, 273, 319, 328, 630, 646, 655, 664, 672, 683, 691, 708, 776, 782, 789, 798, 804, 811, 818, 824, 833, 840, 846, 853, 862, 869, 875, 882, 1048, 1053, 1058, 1063, and 1068; (xii) a CDR3 having an amino acid sequence at least 65%, at least 70%, at least 75%, at least 80%, at least 85%, at least 90%, at least 95%, at least 99%, or 100% identical to any one of SEQ ID NOs: 7, 13, 20, 28, 36, 40, 46, 53, 63, 70, 77, 84, 91, 97, 103, 110, 117, 124, 128, 135, 143, 150, 157, 164, 170, 177, 184, 190, 197, 203, 210, 217, 224, 230, 237, 241, 244, 248, 253, 257, 259, 261, 263, 265, 267, 269, 271, 274, 276, 278, 281, 297, 320, 322, 327, 330, 332, 631, 647, 656, 665, 673, 684, 692, 700, 709, 717, 765, 767, 769, 774, 783, 790, 793, 799, 805, 812, 819, 825, 834, 841, 847, 854, 857, 863, 870, 876, 883, 886, 1049, 1054, 1059, 1064, and 1069; the VL3 comprises (xiii) a complementarity determining region (CDR) 1 having an amino acid sequence that is at least 65%, at least 70%, at least 75%, at least 80%, at least 85%, at least 90%, at least 95%, at least 99%, or 100% identical to any one of SEQ ID NOs: 1, 9, 15, 23, 30, 41, 48, 55, 58, 65, 72, 79, 86, 93, 99, 105, 112, 119, 130, 138, 145, 152, 159, 166, 172, 179, 186, 192, 199, 205, 212, 219, 226, 232, 324, 627, 640, 650, 659, 676, 687, 695, 703, 712, 770, 778, 785, 794, 801, 807, 814, 827, 836, 849, 858, 865, 878, 1045, 1050, 1055, 1060, and 1065; (xiv) a CDR2 having an amino acid sequence at least 65%, at least 70%, at least 75%, at least 80%, at least 85%, at least 90%, at least 95%, at least 99%, or 100% identical to any one of SEQ ID NOs: 2, 31, 628, 641, 677, 1046, 1051, 1056, and 1061; or at least 65%, at least 70%, at least 75%, at least 80%, at least 85%, at least 90%, at least 95%, at least 99%, or 100% identical to any one of amino acid sequences AAS, GAS, LGS, GTN, GTN, SAS, SDS, DNT, EVT, DAS, DVT, RNS, DVS, EDS, DDS, KDS, VAS, WAS, YTS, EVS, NNN, SYN, and DAT; (xv) a CDR3 having an amino acid sequence at least 65%, at least 70%, at least 75%, at least 80%, at least 85%, at least 90%, at least 95%, at least 99%, or 100% identical to any one of SEQ ID NOs: 3, 10, 16, 24, 32, 38, 42, 49, 59, 66, 73, 80, 87, 94, 100, 106, 113, 120, 126, 131, 139, 146, 153, 160, 167, 173, 180, 187, 193, 200, 206, 213, 220, 227, 233, 239, 242, 246, 249, 256, 283, 285, 287, 288, 290, 292, 294, 296, 301, 304, 306, 309, 311, 313, 316, 325, 326, 329, 642, 651, 660, 668, 678, 651, 696, 704, 713, 764, 766, 768, 771, 779, 786, 792, 795, 808, 815, 821, 830, 837, 843, 850, 856, 859, 866, 872, 879, 885, and 1066; the VH3 comprises (xvi) a CDR1 having an amino acid sequence at least 65%, at least 70%, at least 75%, at least 80%, at least 85%, at least 90%, at least 95%, at least 99%, or 100% identical to any one of SEQ ID NOs: 5, 12, 18, 26, 34, 44, 51, 61, 68, 75, 82, 89, 96, 102, 108, 115, 122, 133, 141, 148, 155, 162, 175, 182, 189, 195, 202, 208, 215, 222, 229, 235, 318, 629, 645, 654, 663, 671, 682, 690, 699, 707, 716, 773, 781, 788, 797, 803, 810, 817, 823, 832, 839, 845, 852, 861, 868, 874, 881, 1047, 1052, 1057, 1062, and 1067; (xvii) a CDR2 having an amino acid sequence at least 65%, at least 70%, at least 75%, at least 80%, at least 85%, at least 90%, at least 95%, at least 99%, or 100% identical to any one of SEQ ID NOs: 6, 19, 27, 35, 45, 52, 56, 62, 69, 76, 83, 90, 109, 116, 123, 134, 142, 149, 156, 163, 169, 176, 183, 196, 209, 216, 223, 236, 273, 319, 328, 630, 646, 655, 664, 672, 683, 691, 708, 776, 782, 789, 798, 804, 811, 818, 824, 833, 840, 846, 853, 862, 869, 875, 882, 1048, 1053, 1058, 1063, and 1068; (xviii) a CDR3 having an amino acid sequence at least 65%, at least 70%, at least 75%, at least 80%, at least 85%, at least 90%, at least 95%, at least 99%, or 100% identical to any one of SEQ ID NOs: 7, 13, 20, 28, 36, 40, 46, 53, 63, 70, 77, 84, 91, 97, 103, 110, 117, 124, 128, 135, 143, 150, 157, 164, 170, 177, 184, 190, 197, 203, 210, 217, 224, 230, 237, 241, 244, 248, 253, 257, 259, 261, 263, 265, 267, 269, 271, 274, 276, 278, 281, 297, 320, 322, 327, 330, 332, 631, 647, 656, 665, 673, 684, 692, 700, 709, 717, 765, 767, 769, 774, 783, 790, 793, 799, 805, 812, 819, 825, 834, 841, 847, 854, 857, 863, 870, 876, 883, 886, 1049, 1054, 1059, 1064, and 1069; the VL4 comprises (xix) a complementarity determining region (CDR) 1 having an amino acid sequence that is at least 65%, at least 70%, at least 75%, at least 80%, at least 85%, at least 90%, at least 95%, at least 99%, or 100% identical to any one of SEQ ID NOs: 1, 9, 15, 23, 30, 41, 48, 55, 58, 65, 72, 79, 86, 93, 99, 105, 112, 119, 130, 138, 145, 152, 159, 166, 172, 179, 186, 192, 199, 205, 212, 219, 226, 232, 324, 627, 640, 650, 659, 676, 687, 695, 703, 712, 770, 778, 785, 794, 801, 807, 814, 827, 836, 849, 858, 865, 878, 1045, 1050, 1055, 1060, and 1065; (xx) a CDR2 having an amino acid sequence at least 65%, at least 70%, at least 75%, at least 80%, at least 85%, at least 90%, at least 95%, at least 99%, or 100% identical to any one of SEQ ID NOs: 2, 31, 628, 641, 677, 1046, 1051, 1056, and 1061; or at least 65%, at least 70%, at least 75%, at least 80%, at least 85%, at least 90%, at least 95%, at least 99%, or 100% identical to any one of amino acid sequences AAS, GAS, LGS, GTN, GTN, SAS, SDS, DNT, EVT, DAS, DVT, RNS, DVS, EDS, DDS, KDS, VAS, WAS, YTS, EVS, NNN, SYN, and DAT; (xxi) a CDR3 having an amino acid sequence at least 65%, at least 70%, at least 75%, at least 80%, at least 85%, at least 90%, at least 95%, at least 99%, or 100% identical to any one of SEQ ID NOs: 3, 10, 16, 24, 32, 38, 42, 49, 59, 66, 73, 80, 87, 94, 100, 106, 113, 120, 126, 131, 139, 146, 153, 160, 167, 173, 180, 187, 193, 200, 206, 213, 220, 227, 233, 239, 242, 246, 249, 256, 283, 285, 287, 288, 290, 292, 294, 296, 301, 304, 306, 309, 311, 313, 316, 325, 326, 329, 642, 651, 660, 668, 678, 651, 696, 704, 713, 764, 766, 768, 771, 779, 786, 792, 795, 808, 815, 821, 830, 837, 843, 850, 856, 859, 866, 872, 879, 885, and 1066; and the VH4 comprises (xxii) a CDR1 having an amino acid sequence at least 65%, at least 70%, at least 75%, at least 80%, at least 85%, at least 90%, at least 95%, at least 99%, or 100% identical to any one of SEQ ID NOs: 5, 12, 18, 26, 34, 44, 51, 61, 68, 75, 82, 89, 96, 102, 108, 115, 122, 133, 141, 148, 155, 162, 175, 182, 189, 195, 202, 208, 215, 222, 229, 235, 318, 629, 645, 654, 663, 671, 682, 690, 699, 707, 716, 773, 781, 788, 797, 803, 810, 817, 823, 832, 839, 845, 852, 861, 868, 874, 881, 1047, 1052, 1057, 1062, and 1067; (xxiii) a CDR2 having an amino acid sequence at least 65%, at least 70%, at least 75%, at least 80%, at least 85%, at least 90%, at least 95%, at least 99%, or 100% identical to any one of SEQ ID NOs: 6, 19, 27, 35, 45, 52, 56, 62, 69, 76, 83, 90, 109, 116, 123, 134, 142, 149, 156, 163, 169, 176, 183, 196, 209, 216, 223, 236, 273, 319, 328, 630, 646, 655, 664, 672, 683, 691, 708, 776, 782, 789, 798, 804, 811, 818, 824, 833, 840, 846, 853, 862, 869, 875, 882, 1048, 1053, 1058, 1063, and 1068; (xxiv) a CDR3 having an amino acid sequence at least 65%, at least 70%, at least 75%, at least 80%, at least 85%, at least 90%, at least 95%, at least 99%, or 100% identical to any one of SEQ ID NOs: 7, 13, 20, 28, 36, 40, 46, 53, 63, 70, 77, 84, 91, 97, 103, 110, 117, 124, 128, 135, 143, 150, 157, 164, 170, 177, 184, 190, 197, 203, 210, 217, 224, 230, 237, 241, 244, 248, 253, 257, 259, 261, 263, 265, 267, 269, 271, 274, 276, 278, 281, 297, 320, 322, 327, 330, 332, 631, 647, 656, 665, 673, 684, 692, 700, 709, 717, 765, 767, 769, 774, 783, 790, 793, 799, 805, 812, 819, 825, 834, 841, 847, 854, 857, 863, 870, 876, 883, 886, 1049, 1054, 1059, 1064, and 1069.

[3421] In some aspects, (i) the VL1 comprises an amino acid sequence that is at least 65%, at least 70%, at least 75%, at least 80%, at least 85%, at least 90%, at least 95%, at least 99%, or 100% identical to SEQ ID NO: 147; (ii) the VH1 comprises an amino acid sequence that is at least 65%, at least 70%, at least 75%, at least 80%, at least 85%, at least 90%, at least 95%, at least 99%, or 100% identical to SEQ ID NO: 151; (iii) the VL2 comprises an amino acid sequence that is at least 65%, at least 70%, at least 75%, at least 80%, at least 85%, at least 90%, at least 95%, at least 99%, or 100% identical to any one of SEQ ID NOs: 4, 11, 17, 25, 33, 39, 43, 50, 60, 67, 74, 81, 88, 95, 101, 107, 114, 121, 127, 132, 140, 147, 154, 161, 168, 174, 181, 188, 194, 201, 207, 214, 221, 228, 234, 240, 243, 247, 250, 251, 252, 255, 284, 286, 289, 291, 293, 295, 299, 300, 302, 303, 305, 307, 308, 310, 312, 314, 315, 317, 323, 639, 649, 658, 667, 675, 686, 694, 702, 711, 772, 780, 787, 796, 802, 809, 816, 822, 831, 838, 844, 851, 860, 867, 873, 880, and 988; (iv) the VH2 comprises an amino acid sequence that is at least 65%, at least 70%, at least 75%, at least 80%, at least 85%, at least 90%, at least 95%, at least 99%, or 100% identical to any one of SEQ ID NOs: 8, 14, 21, 22, 29, 37, 47, 54, 57, 64, 71, 78, 85, 92, 98, 104, 111, 118, 125, 129, 136, 137, 144, 151, 158, 165, 171, 178, 185, 191, 198, 204, 211, 218, 225, 231, 238, 245, 254, 258, 260, 262, 264, 266, 268, 270, 272, 275, 277, 279, 280, 282, 298, 321, 331, 626, 644, 653, 662, 670, 681, 689, 698, 706, 715, 775, 777, 784, 791, 800, 806, 813, 820, 826, 835, 842, 848, 855, 864, 871, 877, and 884; (v) the VL3 comprises an amino acid sequence that is at least 65%, at least 70%, at least 75%, at least 80%, at least 85%, at least 90%, at least 95%, at least 99%, or 100% identical to any one of SEQ ID NOs: 4, 11, 17, 25, 33, 39, 43, 50, 60, 67, 74, 81, 88, 95, 101, 107, 114, 121, 127, 132, 140, 147, 154, 161, 168, 174, 181, 188, 194, 201, 207, 214, 221, 228, 234, 240, 243, 247, 250, 251, 252, 255, 284, 286, 289, 291, 293, 295, 299, 300, 302, 303, 305, 307, 308, 310, 312, 314, 315, 317, 323, 639, 649, 658, 667, 675, 686, 694, 702, 711, 772, 780, 787, 796, 802, 809, 816, 822, 831, 838, 844, 851, 860, 867, 873, 880, and 988; (vi) the VH3 comprises an amino acid sequence that is at least 65%, at least 70%, at least 75%, at least 80%, at least 85%, at least 90%, at least 95%, at least 99%, or 100% identical to any one of SEQ ID NOs: 8, 14, 21, 22, 29, 37, 47, 54, 57, 64, 71, 78, 85, 92, 98, 104, 111, 118, 125, 129, 136, 137, 144, 151, 158, 165, 171, 178, 185, 191, 198, 204, 211, 218, 225, 231, 238, 245, 254, 258, 260, 262, 264, 266, 268, 270, 272, 275, 277, 279, 280, 282, 298, 321, 331, 626, 644, 653, 662, 670, 681, 689, 698, 706, 715, 775, 777, 784, 791, 800, 806, 813, 820, 826, 835, 842, 848, 855, 864, 871, 877, and 884; (vii) the VL4 comprises an amino acid sequence that is at least 65%, at least 70%, at least 75%, at least 80%, at least 85%, at least 90%, at least 95%, at least 99%, or 100% identical to any one of SEQ ID NOs: 4, 11, 17, 25, 33, 39, 43, 50, 60, 67, 74, 81, 88, 95, 101, 107, 114, 121, 127, 132, 140, 147, 154, 161, 168, 174, 181, 188, 194, 201, 207, 214, 221, 228, 234, 240, 243, 247, 250, 251, 252, 255, 284, 286, 289, 291, 293, 295, 299, 300, 302, 303, 305, 307, 308, 310, 312, 314, 315, 317, 323, 639, 649, 658, 667, 675, 686, 694, 702, 711, 772, 780, 787, 796, 802, 809, 816, 822, 831, 838, 844, 851, 860, 867, 873, 880, and 988; and (viii) the VH4 comprises an amino acid sequence that is at least 65%, at least 70%, at least 75%, at least 80%, at least 85%, at least 90%, at least 95%, at least 99%, or 100% identical to any one of SEQ ID NOs: 8, 14, 21, 22, 29, 37, 47, 54, 57, 64, 71, 78, 85, 92, 98, 104, 111, 118, 125, 129, 136, 137, 144, 151, 158, 165, 171, 178, 185, 191, 198, 204, 211, 218, 225, 231, 238, 245, 254, 258, 260, 262, 264, 266, 268, 270, 272, 275, 277, 279, 280, 282, 298, 321, 331, 626, 644, 653, 662, 670, 681, 689, 698, 706, 715, 775, 777, 784, 791, 800, 806, 813, 820, 826, 835, 842, 848, 855, 864, 871, 877, and 884.

[3422] In some aspects, the VL1 comprises (i) a complementarity determining region (CDR) 1 having an amino acid sequence that is at least 65%, at least 70%, at least 75%, at least 80%, at least 85%, at least 90%, at least 95%, at least 99%, or 100% identical to SEQ ID NO: 145 or 1050; (ii) a CDR2 having an amino acid sequence at least 65%, at least 70%, at least 75%, at least 80%, at least 85%, at least 90%, at least 95%, at least 99%, or 100% identical to SEQ ID NO: 1051 or an amino acid sequence that is at least 65%, at least 70%, at least 75%, at least 80%, at least 85%, at least 90%, at least 95%, at least 99%, or 100% identical to amino acid sequence AAS; and (iii) a CDR3 having an amino acid sequence that is at least 65%, at least 70%, at least 75%, at least 80%, at least 85%, at least 90%, at least 95%, at least 99%, or 100% identical to SEQ ID NO: 146 or 764; the VH1 comprises (iv) a complementarity determining region (CDR) 1 having an amino acid sequence that is at least 65%, at least 70%, at least 75%, at least 80%, at least 85%, at least 90%, at least 95%, at least 99%, or 100% identical to SEQ ID NO: 148 or 1052; (v) a CDR2 having an amino acid sequence that is at least 65%, at least 70%, at least 75%, at least 80%, at least 85%, at least 90%, at least 95%, at least 99%, or 100% identical to SEQ ID NO: 149 or 1053; and (vi) a CDR3 having an amino acid sequence that is at least 65%, at least 70%, at least 75%, at least 80%, at least 85%, at least 90%, at least 95%, at least 99%, or 100% identical to SEQ ID NO: 150, 765, or 1054; the VL2 comprises (vii) a complementarity determining region (CDR) 1 having an amino acid sequence that is at least 65%, at least 70%, at least 75%, at least 80%, at least 85%, at least 90%, at least 95%, at least 99%, or 100% identical to any one of SEQ ID NOs: 1, 9, 15, 23, 30, 65, 72, 145, 152, 324, 627, 138, 172, 1045, 1050, 1055, 1060, and 1065; (viii) a CDR2 having an amino acid sequence at least 65%, at least 70%, at least 75%, at least 80%, at least 85%, at least 90%, at least 95%, at least 99%, or 100% identical to any one of SEQ ID NOs: 2, 31, 628, 1046, 1051, 1056, and 1061, or at least 65%, at least 70%, at least 75%, at least 80%, at least 85%, at least 90%, at least 95%, at least 99%, or 100% identical to any one of amino acid sequences GAS, LGS, GTN, SAS, SDS, AAS, DAS, and DNT; (ix) a CDR3 having an amino acid sequence at least 65%, at least 70%, at least 75%, at least 80%, at least 85%, at least 90%, at least 95%, at least 99%, or 100% identical to any one of SEQ ID NOs: 3, 10, 16, 24, 32, 38, 66, 73, 146, 153, 325, 326, 764, 766, 139, 856, 173, 792, and 1066; the VH2 comprises (x) a CDR1 having an amino acid sequence at least 65%, at least 70%, at least 75%, at least 80%, at least 85%, at least 90%, at least 95%, at least 99%, or 100% identical to any one of SEQ ID NOs: 5, 12, 18, 26, 34, 68, 75, 148, 155, 629, 141, 175, 1047, 1052, 1057, 1062, and 1067; (xi) a CDR2 having an amino acid sequence at least 65%, at least 70%, at least 75%, at least 80%, at least 85%, at least 90%, at least 95%, at least 99%, or 100% identical to any one of SEQ ID NOs: 6, 19, 27, 35, 69, 76, 149, 156, 630, 142, 176, 1048, 1053, 1058, 1063, and 1068; (xii) a CDR3 having an amino acid sequence at least 65%, at least 70%, at least 75%, at least 80%, at least 85%, at least 90%, at least 95%, at least 99%, or 100% identical to any one of SEQ ID NOs: 7, 13, 20, 28, 36, 40, 70, 77, 327, 150, 157, 332, 631, 765, 767, 143, 857, 177, 793, 1049, 1054, 1059, 1064, and 1069; the VL3 comprises (xiii) a complementarity determining region (CDR) 1 having an amino acid sequence that is at least 65%, at least 70%, at least 75%, at least 80%, at least 85%, at least 90%, at least 95%, at least 99%, or 100% identical to any one of SEQ ID NOs: 1, 9, 15, 23, 30, 65, 72, 145, 152, 324, 627, 138, 172, 1045, 1050, 1055, 1060, and 1065; (xiv) a CDR2 having an amino acid sequence at least 65%, at least 70%, at least 75%, at least 80%, at least 85%, at least 90%, at least 95%, at least 99%, or 100% identical to any one of SEQ ID NOs: 2, 31, 628, 1046, 1051, 1056, and 1061, or at least 65%, at least 70%, at least 75%, at least 80%, at least 85%, at least 90%, at least 95%, at least 99%, or 100% identical to any one of amino acid sequences GAS, LGS, GTN, SAS, SDS, AAS, DAS, and DNT; (xv) a CDR3 having an amino acid sequence at least 65%, at least 70%, at least 75%, at least 80%, at least 85%, at least 90%, at least 95%, at least 99%, or 100% identical to any one of SEQ ID NOs: 3, 10, 16, 24, 32, 38, 66, 73, 146, 153, 325, 326, 764, 766, 139, 856, 173, 792, and 1066; the VH3 comprises (xvi) a CDR1 having an amino acid sequence at least 65%, at least 70%, at least 75%, at least 80%, at least 85%, at least 90%, at least 95%, at least 99%, or 100% identical to any one of SEQ ID NOs: 5, 12, 18, 26, 34, 68, 75, 148, 155, 629, 141, 175, 1047, 1052, 1057, 1062, and 1067; (xvii) a CDR2 having an amino acid sequence at least 65%, at least 70%, at least 75%, at least 80%, at least 85%, at least 90%, at least 95%, at least 99%, or 100% identical to any one of SEQ ID NOs: 6, 19, 27, 35, 69, 76, 149, 156, 630, 142, 176, 1048, 1053, 1058, 1063, and 1068; (xviii) a CDR3 having an amino acid sequence at least 65%, at least 70%, at least 75%, at least 80%, at least 85%, at least 90%, at least 95%, at least 99%, or 100% identical to any one of SEQ ID NOs: 7, 13, 20, 28, 36, 40, 70, 77, 327, 150, 157, 332, 631, 765, 767, 143, 857, 177, 793, 1049, 1054, 1059, 1064, and 1069; the VL4 comprises (xix) a complementarity determining region (CDR) 1 having an amino acid sequence that is at least 65%, at least 70%, at least 75%, at least 80%, at least 85%, at least 90%, at least 95%, at least 99%, or 100% identical to any one of SEQ ID NOs: 1, 9, 15, 23, 30, 65, 72, 145, 152, 324, 627, 138, 172, 1045, 1050, 1055, 1060, and 1065; (xx) a CDR2 having an amino acid sequence at least 65%, at least 70%, at least 75%, at least 80%, at least 85%, at least 90%, at least 95%, at least 99%, or 100% identical to any one of SEQ ID NOs: 2, 31, 628, 1046, 1051, 1056, and 1061, or at least 65%, at least 70%, at least 75%, at least 80%, at least 85%, at least 90%, at least 95%, at least 99%, or 100% identical to any one of amino acid sequences GAS, LGS, GTN, SAS, SDS, AAS, DAS, and DNT; (xxi) a CDR3 having an amino acid sequence at least 65%, at least 70%, at least 75%, at least 80%, at least 85%, at least 90%, at least 95%, at least 99%, or 100% identical to any one of SEQ ID NOs: 3, 10, 16, 24, 32, 38, 66, 73, 146, 153, 325, 326, 764, 766, 139, 856, 173, 792, and 1066; and the VH4 comprises (xxii) a CDR1 having an amino acid sequence at least 65%, at least 70%, at least 75%, at least 80%, at least 85%, at least 90%, at least 95%, at least 99%, or 100% identical to any one of SEQ ID NOs: 5, 12, 18, 26, 34, 68, 75, 148, 155, 629, 141, 175, 1047, 1052, 1057, 1062, and 1067; (xxiii) a CDR2 having an amino acid sequence at least 65%, at least 70%, at least 75%, at least 80%, at least 85%, at least 90%, at least 95%, at least 99%, or 100% identical to any one of SEQ ID NOs: 6, 19, 27, 35, 69, 76, 149, 156, 630, 142, 176, 1048, 1053, 1058, 1063, and 1068; (xxiv) a CDR3 having an amino acid sequence at least 65%, at least 70%, at least 75%, at least 80%, at least 85%, at least 90%, at least 95%, at least 99%, or 100% identical to any one of SEQ ID NOs: 7, 13, 20, 28, 36, 40, 70, 77, 327, 150, 157, 332, 631, 765, 767, 143, 857, 177, 793, 1049, 1054, 1059, 1064, and 1069.

[3423] In some aspects, (i) the VL1 comprises an amino acid sequence that is at least 65%, at least 70%, at least 75%, at least 80%, at least 85%, at least 90%, at least 95%, at least 99%, or 100% identical to SEQ ID NO: 147; (ii) the VH1 comprises an amino acid sequence that is at least 65%, at least 70%, at least 75%, at least 80%, at least 85%, at least 90%, at least 95%, at least 99%, or 100% identical to SEQ ID NO: 151; (iii) the VL2 comprises an amino acid sequence that is at least 65%, at least 70%, at least 75%, at least 80%, at least 85%, at least 90%, at least 95%, at least 99%, or 100% identical to any one of SEQ ID NOs: 4, 11, 17, 25, 33, 39, 67, 74, 147, 154, 140, and 174; (iv) the VH2 comprises an amino acid sequence that is at least 65%, at least 70%, at least 75%, at least 80%, at least 85%, at least 90%, at least 95%, at least 99%, or 100% identical to any one of SEQ ID NOs: 8, 14, 21, 22, 29, 37, 71, 78, 151, 158, 626, 144, and 178; (v) the VL3 comprises an amino acid sequence that is at least 65%, at least 70%, at least 75%, at least 80%, at least 85%, at least 90%, at least 95%, at least 99%, or 100% identical to any one of SEQ ID NOs: 4, 11, 17, 25, 33, 39, 67, 74, 147, 154, 140, and 174; (vi) the VH3 comprises an amino acid sequence that is at least 65%, at least 70%, at least 75%, at least 80%, at least 85%, at least 90%, at least 95%, at least 99%, or 100% identical to any one of SEQ ID NOs: 8, 14, 21, 22, 29, 37, 71, 78, 151, 158, 626, 144, and 178; (vii) the VL4 comprises an amino acid sequence that is at least 65%, at least 70%, at least 75%, at least 80%, at least 85%, at least 90%, at least 95%, at least 99%, or 100% identical to any one of SEQ ID NOs: 4, 11, 17, 25, 33, 39, 67, 74, 147, 154, 140, and 174; (viii) the VH4 comprises an amino acid sequence that is at least 65%, at least 70%, at least 75%, at least 80%, at least 85%, at least 90%, at least 95%, at least 99%, or 100% identical to any one of SEQ ID NOs: 8, 14, 21, 22, 29, 37, 71, 78, 151, 158, 626, 144, and 178.

[3424] In some aspects, one or both of the antigen binding polypeptides comprised in the antigen binding polypeptide complexes disclosed herein, comprise one or more CL, as indicated in the formulas representing the antigen binding polypeptide complexes disclosed herein. In some aspects, the CL comprises an amino acid sequence at least 65%, at least 70%, at least 75%, at least 80%, at least 85%, at least 90%, at least 95%, at least 99%, or 100% identical to any one of SEQ ID NOs: 374, 637, or 1092-1095.

[3425] In some aspects, one or both of the antigen binding polypeptides comprised in the antigen binding polypeptide complexes disclosed herein, comprise one or more CH1, as indicated in the formulas representing the antigen binding polypeptide complexes disclosed herein. In some aspects, the CH1 comprises an amino acid sequence at least 65%, at least 70%, at least 75%, at least 80%, at least 85%, at least 90%, at least 95%, at least 99%, or 100% identical to any one of SEQ ID NOs: 375, 634, 1070, 1071, or 1086-1091.

[3426] In some aspects, one or both of the antigen binding polypeptides comprised in the antigen binding polypeptide complexes provided herein further comprise an Fc region. In some aspects, one or both of the antigen binding polypeptides comprised in the antigen binding polypeptide complexes provided herein further comprise an Fc region at the carboxy-terminus. In some aspects, the Fc region comprises an immunoglobulin heavy chain constant region 2 (CH2) and/or an immunoglobulin heavy chain constant region 3 (CH3). In some aspects, the Fc region further comprises an immunoglobulin hinge (i.e., a hinge region). In some aspects, the hinge region is interposed between a CH1 and a CH2 (i.e., a hinge region is localized between the carboxy terminal residue of a CH1 and the N-terminal residue of a CH2). In some aspects, the hinge region comprises an amino acid sequence at least 65%, at least 70%, at least 75%, at least 80%, at least 85%, at least 90%, at least 95%, at least 99%, or 100% identical to any one of SEQ ID NOs: 635, 636, 1072, 1073, or 1074. In some aspects, the Fc region comprises a CH2 and a CH3. In some aspects, the CH2 comprises an amino acid sequence that is at least 65%, at least 70%, at least 75%, at least 80%, at least 85%, at least 90%, at least 95%, at least 99%, or 100% identical to any one of SEQ ID NOs: 1075-1078. In some aspects, the CH3 comprises an amino acid sequence that is at least 65%, at least 70%, at least 75%, at least 80%, at least 85%, at least 90%, at least 95%, at least 99%, or 100% identical to any one of SEQ ID NOs: 1079-1085. In some aspects, the Fc region comprises an amino acid sequence that is at least 65%, at least 70%, at least 75%, at least 80%, at least 85%, at least 90%, at least 95%, at least 99%, or 100% identical to any one of SEQ ID NOs: 376-380.

[3427] In some aspects, the Fc region comprises one or more amino acid substitutions. In some aspects, the one or more amino acid substitutions comprise one or more half-life extension amino acid substitutions. In some aspects, the one or more half-life extension amino acid substitutions comprise one or more of amino acid substitutions M428L, N434A, N434S, L234F, L235E, P331S, M252Y, S254T, or T256E, or equivalent thereof, based on the EU numbering scheme. In some aspects, the one or more half-life extension amino acid substitutions comprise a LA (M428L and N434A, or equivalent thereof, based on the EU numbering scheme) amino acid substitution. In some aspects, the one or more half-life extension amino acid substitutions comprise a LS (M428L and N434S, or equivalent thereof, based on the EU numbering scheme) amino acid substitution. In some aspects, the one or more half-life extension amino acid substitutions comprise L234F and L235E, or equivalent thereof (based on the EU numbering scheme) amino acid substitutions. In some aspects, the one or more half-life extension amino acid substitutions comprise a TM (L234F, L235E, and P331S, or equivalent thereof, based on the EU numbering scheme) amino acid substitution. In some aspects, the one or more half-life extension amino acid substitutions comprise a YTE (M252Y, S254T, and T256E, or equivalent thereof, based on the EU numbering scheme) amino acid substitution.

[3428] In some aspects, the Fc region comprises at least one knob-into-hole modification. In some aspects, the antigen binding polypeptides disclosed herein are comprised in IgG1 or IgG4 antibodies or antigen binding fragments thereof. In some aspects, the knob-into-hole modification comprises one or more of knob substitutions of S354C and T366W, or equivalent thereof, and/or one or more of hole substitutions of Y349C, T366S, L368A, Y407V, or equivalent thereof, or a combination thereof, based on the EU numbering scheme. In some aspects, the Fc region comprises a knob-into-hole modification comprising knob substitutions of S354C and T366W, or equivalent thereof, and/or hole substitutions of Y349C, T366S, L368A and Y407V, or equivalent thereof, and/or a half-life extension amino acid substitution comprising: a LA (M428L and N434A, or equivalent thereof, based on the EU numbering scheme) amino acid substitution, a LS (M428L and N434S, or equivalent thereof, based on the EU numbering scheme) amino acid substitution. L234F and L235E, or equivalent thereof (based on the EU numbering scheme) amino acid substitutions, a TM (L234F, L235E, and P331S, or equivalent thereof, based on the EU numbering scheme) amino acid substitution, a YTE (M252Y, S254T, and T256E, or equivalent thereof, based on the EU numbering scheme) amino acid substitution, or any combination thereof.

[3429] In some aspects, the Fc region comprises knob substitutions of S354C and T366W, or equivalent thereof, and a half-life extension amino acid substitution comprising: a LA (M428L and N434A, or equivalent thereof, based on the EU numbering scheme) amino acid substitution, a LS (M428L and N434S, or equivalent thereof, based on the EU numbering scheme) amino acid substitution. L234F and L235E, or equivalent thereof (based on the EU numbering scheme) amino acid substitutions, a TM (L234F, L235E, and P331S, or equivalent thereof, based on the EU numbering scheme) amino acid substitution, a YTE (M252Y, S254T, and T256E, or equivalent thereof, based on the EU numbering scheme) amino acid substitution, or any combination thereof.

[3430] In some aspects, the Fc region comprises hole substitutions of Y349C, T366S, L368A and Y407V, or equivalent thereof, and a half-life extension amino acid substitution comprising: a LA (M428L and N434A, or equivalent thereof, based on the EU numbering scheme) amino acid substitution, a LS (M428L and N434S, or equivalent thereof, based on the EU numbering scheme) amino acid substitution. L234F and L235E, or equivalent thereof (based on the EU numbering scheme) amino acid substitutions, a TM (L234F, L235E, and P331S, or equivalent thereof, based on the EU numbering scheme) amino acid substitution, a YTE (M252Y, S254T, and T256E, or equivalent thereof, based on the EU numbering scheme) amino acid substitution, or any combination thereof.

[3431] In some aspects, one or both of the antigen binding polypeptides comprised in the antigen binding polypeptide complexes disclosed herein comprise one or more Fc effector function knockout mutation. In some aspects, one or both of the antigen binding polypeptides comprised in the antigen binding polypeptide complexes disclosed herein are IgG1 or IgG4 antibodies or antigen binding fragments thereof. In some aspects, the Fc effector function knockout mutation is L234A, L235A, P239A, or equivalent thereof, or a combination thereof, based on the EU numbering scheme.

[3432] In some aspects, one or both of the antigen binding polypeptides comprised in the antigen binding polypeptide complexes disclosed herein comprise a mutation at a glycosylation site. In some aspects, the mutation at a glycosylation site is a mutation at an N-glycosylation site. In some aspects, one or both of the antigen binding polypeptides comprised in the antigen binding polypeptide complexes disclosed herein comprise a VH comprising a mutation at a glycosylation site. In some aspects, the mutation at a glycosylation site is a mutation at an N-glycosylation site. In some aspects, the mutation at an N-glycosylation site is at amino acid N62 of the VH region or equivalent thereof. In some aspects, the mutation at an N-glycosylation site at amino acid N62 is N62Q or N62S, or equivalent thereof. In some aspects, one or both of the antigen binding polypeptides comprised in the antigen binding polypeptide complexes disclosed herein, comprise one or more optional linkers. The one or more optional linkers are indicated herein as Ln, wherein n is an integer, and the integer next to each L indicates each L comprised in the antigen binding polypeptides comprised in the antigen binding polypeptide complexes disclosed herein. For example, if an antigen binding polypeptide comprised in the antigen binding polypeptide complexes disclosed herein comprises two linkers, the first linker from N-terminus to C-terminus is herein indicated as L1, and the second linker from N-terminus to C-terminus is herein indicated as L2. If an antigen binding polypeptide complex disclosed herein comprises a first antigen binding polypeptide comprising two linkers, indicated herein as L1 and L2, as explained above, the linkers comprised in the second antigen binding polypeptide are indicated with the following integer, in this example, the first linker from N-terminus to C-terminus of the second antigen binding polypeptide is herein indicated as L3, the second linker from N-terminus to C-terminus of the second antigen binding polypeptide is herein indicated as L3. In some aspects, any one of the optional linkers each independently have a length of from 0 amino acids to about 50 amino acids. In some aspects, any one of the optional linkers each independently have a length of from 5 amino acids to about 40 amino acids.

[3433] In some aspects, any one of the optional linkers are non-immunogenic. In some aspects, any one of the optional linkers do not contain a consensus T cell epitope.

[3434] In some aspects, any of Ln comprises an amino acid sequence of G or A, or an amino acid sequence at least 65%, at least 70%, at least 75%, at least 80%, at least 85%, at least 90%, at least 95%, at least 99%, or 100% identical to amino acid sequence GSS or ASG, or an amino acid sequence at least 65%, at least 70%, at least 75%, at least 80%, at least 85%, at least 90%, at least 95%, at least 99%, or 100% identical to any one of SEQ ID NOs: 333-373 or 967-971. In some aspects, Ln comprises an amino acid sequence at least 65%, at least 70%, at least 75%, at least 80%, at least 85%, at least 90%, at least 95%, at least 99%, or 100% identical to any one of SEQ ID NOs: 333-345 or 967-971.

[3435] In some aspects, an antigen binding polypeptide complex provided herein comprises two antigen binding polypeptides wherein at least one antigen binding polypeptide has a structure represented by:
[3436] VL1-L1-VL2-L2-VH2-L3-VH1-L4-Fc-L5-Fc;
[3437] VL1-L1-VH2-L2-VL2-L3-VH1-L4-Fc-L5-Fc;
[3438] VH1-L1-VH2-L2-VL2-L3-VL1-L4-Fc-L5-Fc; or
[3439] VH1-L1-VL2-L2-VH2-L3-VL1-L4-Fc-L5-Fc;
[3440] wherein:
[3441] VL1 is a first immunoglobulin light chain variable region that specifically binds to a severe acute respiratory syndrome coronavirus 2 (SARS-CoV-2) protein;
[3442] VL2 is a second immunoglobulin light chain variable region that specifically binds to a SARS-CoV-2 protein;
[3443] VH1 is a first immunoglobulin heavy chain variable region that specifically binds to a SARS-CoV-2 protein;
[3444] VH2 is a second immunoglobulin heavy chain variable region that specifically binds to a SARS-CoV-2 protein;
[3445] L1-L5 are optional amino acid linkers; and
[3446] Fc is an immunoglobulin fragment crystallizable region comprising an immunoglobulin heavy chain constant region 2 (CH2), an immunoglobulin heavy chain constant region 3 (CH3), and optionally, an immunoglobulin hinge.

[3447] In any aspect shown herein as a structure from amino terminus to carboxy terminus, and with binding pairs selected from VL and/or VH or other structural regions such as CH2, CH3, when shown without a specific linker such as L1, L2, etc., such linkers are optionally present in such structures between each designated subsequence VL, VH, etc.

[3448] In some aspects, the VL1 comprises (i) a complementarity determining region (CDR) 1 having an amino acid sequence that is at least 65%, at least 70%, at least 75%, at least 80%, at least 85%, at least 90%, at least 95%, at least 99%, or 100% identical to any one of SEQ ID NOs: 1, 9, 15, 23, 30, 41, 48, 55, 58, 65, 72, 79, 86, 93, 99, 105, 112, 119, 130, 138, 145, 152, 159, 166, 172, 179, 186, 192, 199, 205, 212, 219, 226, 232, 324, 627, 640, 650, 659, 676, 687, 695, 703, 712, 770, 778, 785, 794, 801, 807, 814, 827, 836, 849, 858, 865, 878, 1045, 1050, 1055, 1060, and 1065; (ii) a CDR2 having an amino acid sequence that is at least 65%, at least 70%, at least 75%, at least 80%, at least 85%, at least 90%, at least 95%, at least 99%, or 100% identical to any one of SEQ ID NOs: 2, 31, 628, 641, 677, 1046, 1051, 1056, and 1061; or at least 65%, at least 70%, at least 75%, at least 80%, at least 85%, at least 90%, at least 95%, at least 99%, or 100% identical to any one of amino acid sequences AAS, GAS, LGS, GTN, GTN, SAS, SDS, DNT, EVT, DAS, DVT, RNS, DVS, EDS, DDS, KDS, VAS, WAS, YTS, EVS, NNN, SYN, and DAT; and (iii) a CDR3 having an amino acid sequence that is at least 65%, at least 70%, at least 75%, at least 80%, at least 85%, at least 90%, at least 95%, at least 99%, or 100% identical to any one of SEQ ID NOs: 3, 10, 16, 24, 32, 38, 42, 49, 59, 66, 73, 80, 87, 94, 100, 106, 113, 120, 126, 131, 139, 146, 153, 160, 167, 173, 180, 187, 193, 200, 206, 213, 220, 227, 233, 239, 242, 246, 249, 256, 283, 285, 287, 288, 290, 292, 294, 296, 301, 304, 306, 309, 311, 313, 316, 325, 326, 329, 642, 651, 660, 668, 678, 651, 696, 704, 713, 764, 766, 768, 771, 779, 786, 792, 795, 808, 815, 821, 830, 837, 843, 850, 856, 859, 866, 872, 879, 885, and 1066.

[3449] In some aspects, the VL2 comprises (i) a complementarity determining region (CDR) 1 having an amino acid sequence that is at least 65%, at least 70%, at least 75%, at least 80%, at least 85%, at least 90%, at least 95%, at least 99%, or 100% identical to any one of SEQ ID NOs: 1, 9, 15, 23, 30, 41, 48, 55, 58, 65, 72, 79, 86, 93, 99, 105, 112, 119, 130, 138, 145, 152, 159, 166, 172, 179, 186, 192, 199, 205, 212, 219, 226, 232, 324, 627, 640, 650, 659, 676, 687, 695, 703, 712, 770, 778, 785, 794, 801, 807, 814, 827, 836, 849, 858, 865, 878, 1045, 1050, 1055, 1060, and 1065; (ii) a CDR2 having an amino acid sequence that is at least 65%, at least 70%, at least 75%, at least 80%, at least 85%, at least 90%, at least 95%, at least 99%, or 100% identical to any one of SEQ ID NOs: 2, 31, 628, 641, 677, 1046, 1051, 1056, and 1061; or at least 65%, at least 70%, at least 75%, at least 80%, at least 85%, at least 90%, at least 95%, at least 99%, or 100% identical to any one of amino acid sequences AAS, GAS, LGS, GTN, GTN, SAS, SDS, DNT, EVT, DAS, DVT, RNS, DVS, EDS, DDS, KDS, VAS, WAS, YTS, EVS, NNN, SYN, and DAT; and (iii) a CDR3 having an amino acid sequence that is at least 65%, at least 70%, at least 75%, at least 80%, at least 85%, at least 90%, at least 95%, at least 99%, or 100% identical to any one of SEQ ID NOs: 3, 10, 16, 24, 32, 38, 42, 49, 59, 66, 73, 80, 87, 94, 100, 106, 113, 120, 126, 131, 139, 146, 153, 160, 167, 173, 180, 187, 193, 200, 206, 213, 220, 227, 233, 239, 242, 246, 249, 256, 283, 285, 287, 288, 290, 292, 294, 296, 301, 304, 306, 309, 311, 313, 316, 325, 326, 329, 642, 651, 660, 668, 678, 651, 696, 704, 713, 764, 766, 768, 771, 779, 786, 792, 795, 808, 815, 821, 830, 837, 843, 850, 856, 859, 866, 872, 879, 885, and 1066.

[3450] In some aspects, the VH1 comprises (i) a CDR1 having an amino acid sequence that is at least 65%, at least 70%, at least 75%, at least 80%, at least 85%, at least 90%, at least 95%, at least 99%, or 100% identical to any one of SEQ ID NOs: 5, 12, 18, 26, 34, 44, 51, 61, 68, 75, 82, 89, 96, 102, 108, 115, 122, 133, 141, 148, 155, 162, 175, 182, 189, 195, 202, 208, 215, 222, 229, 235, 318, 629, 645, 654, 663, 671, 682, 690, 699, 707, 716, 773, 781, 788, 797, 803, 810, 817, 823, 832, 839, 845, 852, 861, 868, 874, 881, 1047, 1052, 1057, 1062, and 1067; (ii) a CDR2 having an amino acid sequence that is at least 65%, at least 70%, at least 75%, at least 80%, at least 85%, at least 90%, at least 95%, at least 99%, or 100% identical to any one of SEQ ID NOs: 6, 19, 27, 35, 45, 52, 56, 62, 69, 76, 83, 90, 109, 116, 123, 134, 142, 149, 156, 163, 169, 176, 183, 196, 209, 216, 223, 236, 273, 319, 328, 630, 646, 655, 664, 672, 683, 691, 708, 776, 782, 789, 798, 804, 811, 818, 824, 833, 840, 846, 853, 862, 869, 875, 882, 1048, 1053, 1058, 1063, and 1068; and (iii) a CDR3 having an amino acid sequence that is at least 65%, at least 70%, at least 75%, at least 80%, at least 85%, at least 90%, at least 95%, at least 99%, or 100% identical to any one of SEQ ID NOs: 7, 13, 20, 28, 36, 40, 46, 53, 63, 70, 77, 84, 91, 97, 103, 110, 117, 124, 128, 135, 143, 150, 157, 164, 170, 177, 184, 190, 197, 203, 210, 217, 224, 230, 237, 241, 244, 248, 253, 257, 259, 261, 263, 265, 267, 269, 271, 274, 276, 278, 281, 297, 320, 322, 327, 330, 332, 631, 647, 656, 665, 673, 684, 692, 700, 709, 717, 765, 767, 769, 774, 783, 790, 793, 799, 805, 812, 819, 825, 834, 841, 847, 854, 857, 863, 870, 876, 883, 886, 1049, 1054, 1059, 1064, and 1069.

[3451] In some aspects, the VH2 comprises (i) a CDR1 having an amino acid sequence that is at least 65%, at least 70%, at least 75%, at least 80%, at least 85%, at least 90%, at least 95%, at least 99%, or 100% identical to any one of SEQ ID NOs: 5, 12, 18, 26, 34, 44, 51, 61, 68, 75, 82, 89, 96, 102, 108, 115, 122, 133, 141, 148, 155, 162, 175, 182, 189, 195, 202, 208, 215, 222, 229, 235, 318, 629, 645, 654, 663, 671, 682, 690, 699, 707, 716, 773, 781, 788, 797, 803, 810, 817, 823, 832, 839, 845, 852, 861, 868, 874, 881, 1047, 1052, 1057, 1062, and 1067; (ii) a CDR2 having an amino acid sequence that is at least 65%, at least 70%, at least 75%, at least 80%, at least 85%, at least 90%, at least 95%, at least 99%, or 100% identical to any one of SEQ ID NOs: 6, 19, 27, 35, 45, 52, 56, 62, 69, 76, 83, 90, 109, 116, 123, 134, 142, 149, 156, 163, 169, 176, 183, 196, 209, 216, 223, 236, 273, 319, 328, 630, 646, 655, 664, 672, 683, 691, 708, 776, 782, 789, 798, 804, 811, 818, 824, 833, 840, 846, 853, 862, 869, 875, 882, 1048, 1053, 1058, 1063, and 1068; and (iii) a CDR3 having an amino acid sequence that is at least 65%, at least 70%, at least 75%, at least 80%, at least 85%, at least 90%, at least 95%, at least 99%, or 100% identical to any one of SEQ ID NOs: 7, 13, 20, 28, 36, 40, 46, 53, 63, 70, 77, 84, 91, 97, 103, 110, 117, 124, 128, 135, 143, 150, 157, 164, 170, 177, 184, 190, 197, 203, 210, 217, 224, 230, 237, 241, 244, 248, 253, 257, 259, 261, 263, 265, 267, 269, 271, 274, 276, 278, 281, 297, 320, 322, 327, 330, 332, 631, 647, 656, 665, 673, 684, 692, 700, 709, 717, 765, 767, 769, 774, 783, 790, 793, 799, 805, 812, 819, 825, 834, 841, 847, 854, 857, 863, 870, 876, 883, 886, 1049, 1054, 1059, 1064, and 1069.

[3452] In some aspects, the VL1 comprises (i) a complementarity determining region (CDR) 1 having an amino acid sequence that is at least 65%, at least 70%, at least 75%, at least 80%, at least 85%, at least 90%, at least 95%, at least 99%, or 100% identical to any one of SEQ ID NOs: 1, 9, 15, 23, 30, 41, 48, 55, 58, 65, 72, 79, 86, 93, 99, 105, 112, 119, 130, 138, 145, 152, 159, 166, 172, 179, 186, 192, 199, 205, 212, 219, 226, 232, 324, 627, 640, 650, 659, 676, 687, 695, 703, 712, 770, 778, 785, 794, 801, 807, 814, 827, 836, 849, 858, 865, 878, 1045, 1050, 1055, 1060, and 1065; (ii) a CDR2 having an amino acid sequence that is at least 65%, at least 70%, at least 75%, at least 80%, at least 85%, at least 90%, at least 95%, at least 99%, or 100% identical to any one of SEQ ID NOs: 2, 31, 628, 641, 677, 1046, 1051, 1056, and 1061; or at least 65%, at least 70%, at least 75%, at least 80%, at least 85%, at least 90%, at least 95%, at least 99%, or 100% identical to any one of amino acid sequences AAS, GAS, LGS, GTN, GTN, SAS, SDS, DNT, EVT, DAS, DVT, RNS, DVS, EDS, DDS, KDS, VAS, WAS, YTS, EVS, NNN, SYN, and DAT; (iii) a CDR3 having an amino acid sequence that is at least 65%, at least 70%, at least 75%, at least 80%, at least 85%, at least 90%, at least 95%, at least 99%, or 100% identical to any one of SEQ ID NOs: 3, 10, 16, 24, 32, 38, 42, 49, 59, 66, 73, 80, 87, 94, 100, 106, 113, 120, 126, 131, 139, 146, 153, 160, 167, 173, 180, 187, 193, 200, 206, 213, 220, 227, 233, 239, 242, 246, 249, 256, 283, 285, 287, 288, 290, 292, 294, 296, 301, 304, 306, 309, 311, 313, 316, 325, 326, 329, 642, 651, 660, 668, 678, 651, 696, 704, 713, 764, 766, 768, 771, 779, 786, 792, 795, 808, 815, 821, 830, 837, 843, 850, 856, 859, 866, 872, 879, 885, and 1066; the VH1 comprises (i) a CDR1 having an amino acid sequence that is at least 65%, at least 70%, at least 75%, at least 80%, at least 85%, at least 90%, at least 95%, at least 99%, or 100% identical to any one of SEQ ID NOs: 5, 12, 18, 26, 34, 44, 51, 61, 68, 75, 82, 89, 96, 102, 108, 115, 122, 133, 141, 148, 155, 162, 175, 182, 189, 195, 202, 208, 215, 222, 229, 235, 318, 629, 645, 654, 663, 671, 682, 690, 699, 707, 716, 773, 781, 788, 797, 803, 810, 817, 823, 832, 839, 845, 852, 861, 868, 874, 881, 1047, 1052, 1057, 1062, and 1067; (ii) a CDR2 having an amino acid sequence that is at least 65%, at least 70%, at least 75%, at least 80%, at least 85%, at least 90%, at least 95%, at least 99%, or 100% identical to any one of SEQ ID NOs: 6, 19, 27, 35, 45, 52, 56, 62, 69, 76, 83, 90, 109, 116, 123, 134, 142, 149, 156, 163, 169, 176, 183, 196, 209, 216, 223, 236, 273, 319, 328, 630, 646, 655, 664, 672, 683, 691, 708, 776, 782, 789, 798, 804, 811, 818, 824, 833, 840, 846, 853, 862, 869, 875, 882, 1048, 1053, 1058, 1063, and 1068; and (iii) a CDR3 having an amino acid sequence that is at least 65%, at least 70%, at least 75%, at least 80%, at least 85%, at least 90%, at least 95%, at least 99%, or 100% identical to any one of SEQ ID NOs: 7, 13, 20, 28, 36, 40, 46, 53, 63, 70, 77, 84, 91, 97, 103, 110, 117, 124, 128, 135, 143, 150, 157, 164, 170, 177, 184, 190, 197, 203, 210, 217, 224, 230, 237, 241, 244, 248, 253, 257, 259, 261, 263, 265, 267, 269, 271, 274, 276, 278, 281, 297, 320, 322, 327, 330, 332, 631, 647, 656, 665, 673, 684, 692, 700, 709, 717, 765, 767, 769, 774, 783, 790, 793, 799, 805, 812, 819, 825, 834, 841, 847, 854, 857, 863, 870, 876, 883, 886, 1049, 1054, 1059, 1064, and 1069; the VL2 comprises (i) a complementarity determining region (CDR) 1 having an amino acid sequence that is at least 65%, at least 70%, at least 75%, at least 80%, at least 85%, at least 90%, at least 95%, at least 99%, or 100% identical to any one of SEQ ID NOs: 1, 9, 15, 23, 30, 41, 48, 55, 58, 65, 72, 79, 86, 93, 99, 105, 112, 119, 130, 138, 145, 152, 159, 166, 172, 179, 186, 192, 199, 205, 212, 219, 226, 232, 324, 627, 640, 650, 659, 676, 687, 695, 703, 712, 770, 778, 785, 794, 801, 807, 814, 827, 836, 849, 858, 865.878, 1045, 1050, 1055, 1060, and 1065; (ii) a CDR2 having an amino acid sequence that is at least 65%, at least 70%, at least 75%, at least 80%, at least 85%, at least 90%, at least 95%, at least 99%, or 100% identical to any one of SEQ ID NOs: 2, 31, 628, 641, 677, 1046, 1051, 1056, and 1061; or at least 65%, at least 70%, at least 75%, at least 80%, at least 85%, at least 90%, at least 95%, at least 99%, or 100% identical to any one of amino acid sequences AAS, GAS, LGS, GTN, GTN, SAS, SDS, DNT, EVT, DAS, DVT, RNS, DVS, EDS, DDS, KDS, VAS, WAS, YTS, EVS, NNN, SYN, and DAT; and (iii) a CDR3 having an amino acid sequence that is at least 65%, at least 70%, at least 75%, at least 80%, at least 85%, at least 90%, at least 95%, at least 99%, or 100% identical to any one of SEQ ID NOs: 3, 10, 16, 24, 32, 38, 42, 49, 59, 66, 73, 80, 87, 94, 100, 106, 113, 120, 126, 131, 139, 146, 153, 160, 167, 173, 180, 187, 193, 200, 206, 213, 220, 227, 233, 239, 242, 246, 249, 256, 283, 285, 287, 288, 290, 292, 294, 296, 301, 304, 306, 309, 311, 313, 316, 325, 326, 329, 642, 651, 660, 668, 678, 651, 696, 704, 713, 764, 766, 768, 771, 779, 786, 792, 795, 808, 815, 821, 830, 837, 843, 850, 856, 859, 866, 872, 879, 885, and 1066; and the VH2 comprises (i) a CDR1 having an amino acid sequence that is at least 65%, at least 70%, at least 75%, at least 80%, at least 85%, at least 90%, at least 95%, at least 99%, or 100% identical to any one of SEQ ID NOs: 5, 12, 18, 26, 34, 44, 51, 61, 68, 75, 82, 89, 96, 102, 108, 115, 122, 133, 141, 148, 155, 162, 175, 182, 189, 195, 202, 208, 215, 222, 229, 235, 318, 629, 645, 654, 663, 671, 682, 690, 699, 707, 716, 773, 781, 788, 797, 803, 810, 817, 823, 832, 839, 845, 852, 861, 868, 874, 881, 1047, 1052, 1057, 1062, and 1067; (ii) a CDR2 having an amino acid sequence that is at least 65%, at least 70%, at least 75%, at least 80%, at least 85%, at least 90%, at least 95%, at least 99%, or 100% identical to any one of SEQ ID NOs: 6, 19, 27, 35, 45, 52, 56, 62, 69, 76, 83, 90, 109, 116, 123, 134, 142, 149, 156, 163, 169, 176, 183, 196, 209, 216, 223, 236, 273, 319, 328, 630, 646, 655, 664, 672, 683, 691, 708, 776, 782, 789, 798, 804, 811, 818, 824, 833, 840, 846, 853, 862, 869, 875, 882, 1048, 1053, 1058, 1063, and 1068; and (iii) a CDR3 having an amino acid sequence that is at least 65%, at least 70%, at least 75%, at least 80%, at least 85%, at least 90%, at least 95%, at least 99%, or 100% identical to any one of SEQ ID NOs: 7, 13, 20, 28, 36, 40, 46, 53, 63, 70, 77, 84, 91, 97, 103, 110, 117, 124, 128, 135, 143, 150, 157, 164, 170, 177, 184, 190, 197, 203, 210, 217, 224, 230, 237, 241, 244, 248, 253, 257, 259, 261, 263, 265, 267, 269, 271, 274, 276, 278, 281, 297, 320, 322, 327, 330, 332, 631, 647, 656, 665, 673, 684, 692, 700, 709, 717, 765, 767, 769, 774, 783, 790, 793, 799, 805, 812, 819, 825, 834, 841, 847, 854, 857, 863, 870, 876, 883, 886, 1049, 1054, 1059, 1064, and 1069.

[3453] In some aspects, the VL1 comprises an amino acid sequence that is at least 65%, at least 70%, at least 75%, at least 80%, at least 85%, at least 90%, at least 95%, at least 99%, or 100% identical to any one of SEQ ID NOs: 4, 11, 17, 25, 33, 39, 43, 50, 60, 67, 74, 81, 88, 95, 101, 107, 114, 121, 127, 132, 140, 147, 154, 161, 168, 174, 181, 188, 194, 201, 207, 214, 221, 228, 234, 240, 243, 247, 250, 251, 252, 255, 284, 286, 289, 291, 293, 295, 299, 300, 302, 303, 305, 307, 308, 310, 312, 314, 315, 317, 323, 639, 649, 658, 667, 675, 686, 694, 702, 711, 772, 780, 787, 796, 802, 809, 816, 822, 831, 838, 844, 851, 860, 867, 873, 880, and 988.

[3454] In some aspects, the VH1 comprises an amino acid sequence that is at least 65%, at least 70%, at least 75%, at least 80%, at least 85%, at least 90%, at least 95%, at least 99%, or 100% identical to any one of SEQ ID NOs: 8, 14, 21, 22, 29, 37, 47, 54, 57, 64, 71, 78, 85, 92, 98, 104, 111, 118, 125, 129, 136, 137, 144, 151, 158, 165, 171, 178, 185, 191, 198, 204, 211, 218, 225, 231, 238, 245, 254, 258, 260, 262, 264, 266, 268, 270, 272, 275, 277, 279, 280, 282, 298, 321, 331, 626, 644, 653, 662, 670, 681, 689, 698, 706, 715, 775, 777, 784, 791, 800, 806, 813, 820, 826, 835, 842, 848, 855, 864, 871, 877, and 884.

[3455] In some aspects, the VL2 comprises an amino acid sequence that is at least 65%, at least 70%, at least 75%, at least 80%, at least 85%, at least 90%, at least 95%, at least 99%, or 100% identical to any one of SEQ ID NOs: 4, 11, 17, 25, 33, 39, 43, 50, 60, 67, 74, 81, 88, 95, 101, 107, 114, 121, 127, 132, 140, 147, 154, 161, 168, 174, 181, 188, 194, 201, 207, 214, 221, 228, 234, 240, 243, 247, 250, 251, 252, 255, 284, 286, 289, 291, 293, 295, 299, 300, 302, 303, 305, 307, 308, 310, 312, 314, 315, 317, 323, 639, 649, 658, 667, 675, 686, 694, 702, 711, 772, 780, 787, 796, 802, 809, 816, 822, 831, 838, 844, 851, 860, 867, 873, 880, and 988.

[3456] In some aspects, the VH2 comprises an amino acid sequence that is at least 65%, at least 70%, at least 75%, at least 80%, at least 85%, at least 90%, at least 95%, at least 99%, or 100% identical to any one of SEQ ID NOs: 8, 14, 21, 22, 29, 37, 47, 54, 57, 64, 71, 78, 85, 92, 98, 104, 111, 118, 125, 129, 136, 137, 144, 151, 158, 165, 171, 178, 185, 191, 198, 204, 211, 218, 225, 231, 238, 245, 254, 258, 260, 262, 264, 266, 268, 270, 272, 275, 277, 279, 280, 282, 298, 321, 331, 626, 644, 653, 662, 670, 681, 689, 698, 706, 715, 775, 777, 784, 791, 800, 806, 813, 820, 826, 835, 842, 848, 855, 864, 871, 877, and 884.

[3457] In some aspects, (i) the VL1 comprises an amino acid sequence that is at least 65%, at least 70%, at least 75%, at least 80%, at least 85%, at least 90%, at least 95%, at least 99%, or 100% identical to any one of SEQ ID NOs: 4, 11, 17, 25, 33, 39, 43, 50, 60, 67, 74, 81, 88, 95, 101, 107, 114, 121, 127, 132, 140, 147, 154, 161, 168, 174, 181, 188, 194, 201, 207, 214, 221, 228, 234, 240, 243, 247, 250, 251, 252, 255, 284, 286, 289, 291, 293, 295, 299, 300, 302, 303, 305, 307, 308, 310, 312, 314, 315, 317, 323, 639, 649, 658, 667, 675, 686, 694, 702, 711, 772, 780, 787, 796, 802, 809, 816, 822, 831, 838, 844, 851, 860, 867, 873, 880, and 988; (ii) the VH1 comprises an amino acid sequence that is at least 65%, at least 70%, at least 75%, at least 80%, at least 85%, at least 90%, at least 95%, at least 99%, or 100% identical to any one of SEQ ID NOs: 8, 14, 21, 22, 29, 37, 47, 54, 57, 64, 71, 78, 85, 92, 98, 104, 111, 118, 125, 129, 136, 137, 144, 151, 158, 165, 171, 178, 185, 191, 198, 204, 211, 218, 225, 231, 238, 245, 254, 258, 260, 262, 264, 266, 268, 270, 272, 275, 277, 279, 280, 282, 298, 321, 331, 626, 644, 653, 662, 670, 681, 689, 698, 706, 715, 775, 777, 784, 791, 800, 806, 813, 820, 826, 835, 842, 848, 855, 864, 871, 877, and 884; (iii) the VL2 comprises an amino acid sequence that is at least 65%, at least 70%, at least 75%, at least 80%, at least 85%, at least 90%, at least 95%, at least 99%, or 100% identical to any one of SEQ ID NOs: 4, 11, 17, 25, 33, 39, 43, 50, 60, 67, 74, 81, 88, 95, 101, 107, 114, 121, 127, 132, 140, 147, 154, 161, 168, 174, 181, 188, 194, 201, 207, 214, 221, 228, 234, 240, 243, 247, 250, 251, 252, 255, 284, 286, 289, 291, 293, 295, 299, 300, 302, 303, 305, 307, 308, 310, 312, 314, 315, 317, 323, 639, 649, 658, 667, 675, 686, 694, 702, 711, 772, 780, 787, 796, 802, 809, 816, 822, 831, 838, 844, 851, 860, 867, 873, 880, and 988; and (iv) the VH2 comprises an amino acid sequence that is at least 65%, at least 70%, at least 75%, at least 80%, at least 85%, at least 90%, at least 95%, at least 99%, or 100% identical to any one of SEQ ID NOs: 8, 14, 21, 22, 29, 37, 47, 54, 57, 64, 71, 78, 85, 92, 98, 104, 111, 118, 125, 129, 136, 137, 144, 151, 158, 165, 171, 178, 185, 191, 198, 204, 211, 218, 225, 231, 238, 245, 254, 258, 260, 262, 264, 266, 268, 270, 272, 275, 277, 279, 280, 282, 298, 321, 331, 626, 644, 653, 662, 670, 681, 689, 698, 706, 715, 775, 777, 784, 791, 800, 806, 813, 820, 826, 835, 842, 848, 855, 864, 871, 877, and 884.

[3458] In some aspects, the VL1 comprises (i) a complementarity determining region (CDR) 1 having an amino acid sequence that is at least 65%, at least 70%, at least 75%, at least 80%, at least 85%, at least 90%, at least 95%, at least 99%, or 100% identical to any one of SEQ ID NOs: 1, 9, 15, 23, 30, 65, 72, 145, 152, 324, 627, 138, 172, 1045, 1050, 1055, 1060, and 1065; (ii) a CDR2 having an amino acid sequence that is at least 65%, at least 70%, at least 75%, at least 80%, at least 85%, at least 90%, at least 95%, at least 99%, or 100% identical to any one of SEQ ID NOs: 2, 31, 628, 1046, 1051, 1056, and 1061, or at least 65%, at least 70%, at least 75%, at least 80%, at least 85%, at least 90%, at least 95%, at least 99%, or 100% identical to any one of amino acid sequences GAS, LGS, GTN, SAS, SDS, AAS, DAS, and DNT; and (iii) a CDR3 having an amino acid sequence that is at least 65%, at least 70%, at least 75%, at least 80%, at least 85%, at least 90%, at least 95%, at least 99%, or 100% identical to any one of SEQ ID NOs: 3, 10, 16, 24, 32, 38, 66, 73, 146, 153, 325, 326, 764, 766, 139, 856, 173, 792, and 1066.

[3459] In some aspects, the VL2 comprises (i) a complementarity determining region (CDR) 1 having an amino acid sequence that is at least 65%, at least 70%, at least 75%, at least 80%, at least 85%, at least 90%, at least 95%, at least 99%, or 100% identical to any one of SEQ ID NOs: 1, 9, 15, 23, 30, 65, 72, 145, 152, 324.627, 138, 172, 1045, 1050, 1055, 1060, and 1065; (ii) a CDR2 having an amino acid sequence that is at least 65%, at least 70%, at least 75%, at least 80%, at least 85%, at least 90%, at least 95%, at least 99%, or 100% identical to any one of SEQ ID NOs: 2, 31, 628, 1046, 1051, 1056, and 1061, or at least 65%, at least 70%, at least 75%, at least 80%, at least 85%, at least 90%, at least 95%, at least 99%, or 100% identical to any one of amino acid sequences GAS, LGS, GTN, SAS, SDS, AAS, DAS, and DNT; and (iii) a CDR3 having an amino acid sequence that is at least 65%, at least 70%, at least 75%, at least 80%, at least 85%, at least 90%, at least 95%, at least 99%, or 100% identical to any one of SEQ ID NOs: 3, 10, 16, 24, 32, 38, 66, 73, 146, 153, 325, 326, 764, 766, 139, 856, 173, 792, and 1066.

[3460] In some aspects, the VH1 comprises (i) a CDR1 having an amino acid sequence that is at least 65%, at least 70%, at least 75%, at least 80%, at least 85%, at least 90%, at least 95%, at least 99%, or 100% identical to any one of SEQ ID NOs: 5, 12, 18, 26, 34, 68, 75, 148, 155, 629, 141, 175, 1047, 1052, 1057, 1062, and 1067; (ii) a CDR2 having an amino acid sequence that is at least 65%, at least 70%, at least 75%, at least 80%, at least 85%, at least 90%, at least 95%, at least 99%, or 100% identical to any one of SEQ ID NOs: 6, 19, 27, 35, 69, 76, 149, 156, 630, 142, 176, 1048, 1053, 1058, 1063, and 1068; and (iii) a CDR3 having an amino acid sequence that is at least 65%, at least 70%, at least 75%, at least 80%, at least 85%, at least 90%, at least 95%, at least 99%, or 100% identical to any one of SEQ ID NOs: 7, 13, 20, 28, 36, 40, 70, 77, 327, 150, 157, 332, 631, 765, 767, 143, 857, 177, 793, 1049, 1054, 1059, 1064, and 1069.

[3461] In some aspects, the VH2 comprises (i) a CDR1 having an amino acid sequence that is at least 65%, at least 70%, at least 75%, at least 80%, at least 85%, at least 90%, at least 95%, at least 99%, or 100% identical to any one of SEQ ID NOs: 5, 12, 18, 26, 34, 68, 75, 148, 155, 629, 141, 175, 1047, 1052, 1057, 1062, and 1067; (ii) a CDR2 having an amino acid sequence that is at least 65%, at least 70%, at least 75%, at least 80%, at least 85%, at least 90%, at least 95%, at least 99%, or 100% identical to any one of SEQ ID NOs: 6, 19, 27, 35, 69, 76, 149, 156, 630, 142, 176, 1048, 1053, 1058, 1063, and 1068; and (iii) a CDR3 having an amino acid sequence that is at least 65%, at least 70%, at least 75%, at least 80%, at least 85%, at least 90%, at least 95%, at least 99%, or 100% identical to any one of SEQ ID NOs: 7, 13, 20, 28, 36, 40, 70, 77, 327, 150, 157, 332, 631, 765, 767, 143, 857, 177, 793, 1049, 1054, 1059, 1064, and 1069.

[3462] In some aspects, the VL1 comprises (i) a complementarity determining region (CDR) 1 having an amino acid sequence that is at least 65%, at least 70%, at least 75%, at least 80%, at least 85%, at least 90%, at least 95%, at least 99%, or 100% identical to any one of SEQ ID NOs: 1, 9, 15, 23, 30, 65, 72, 145, 152, 324, 627, 138, 172, 1045, 1050, 1055, 1060, and 1065; (ii) a CDR2 having an amino acid sequence that is at least 65%, at least 70%, at least 75%, at least 80%, at least 85%, at least 90%, at least 95%, at least 99%, or 100% identical to any one of SEQ ID NOs: 2, 31, 628, 1046, 1051, 1056, and 1061, or at least 65%, at least 70%, at least 75%, at least 80%, at least 85%, at least 90%, at least 95%, at least 99%, or 100% identical to any one of amino acid sequences GAS, LGS, GTN, SAS, SDS, AAS, DAS, and DNT; (iii) a CDR3 having an amino acid sequence that is at least 65%, at least 70%, at least 75%, at least 80%, at least 85%, at least 90%, at least 95%, at least 99%, or 100% identical to any one of SEQ ID NOs: 3, 10, 16, 24, 32, 38, 66, 73, 146, 153, 325, 326, 764, 766, 139, 856, 173, 792, and 1066; the VH1 comprises (i) a CDR1 having an amino acid sequence that is at least 65%, at least 70%, at least 75%, at least 80%, at least 85%, at least 90%, at least 95%, at least 99%, or 100% identical to any one of SEQ ID NOs: 5, 12, 18, 26, 34, 68, 75, 148, 155, 629, 141, 175, 1047, 1052, 1057, 1062, and 1067; (ii) a CDR2 having an amino acid sequence that is at least 65%, at least 70%, at least 75%, at least 80%, at least 85%, at least 90%, at least 95%, at least 99%, or 100% identical to any one of SEQ ID NOs: 6, 19, 27, 35, 69, 76, 149, 156, 630, 142, 176, 1048, 1053, 1058, 1063, and 1068; and (iii) a CDR3 having an amino acid sequence that is at least 65%, at least 70%, at least 75%, at least 80%, at least 85%, at least 90%, at least 95%, at least 99%, or 100% identical to any one of SEQ ID NOs: 7, 13, 20, 28, 36, 40, 70, 77, 327, 150, 157, 332, 631, 765, 767, 143, 857, 177, 793, 1049, 1054, 1059, 1064, and 1069; the VL2 comprises (i) a complementarity determining region (CDR) 1 having an amino acid sequence that is at least 65%, at least 70%, at least 75%, at least 80%, at least 85%, at least 90%, at least 95%, at least 99%, or 100% identical to any one of SEQ ID NOs: 1, 9, 15, 23, 30, 65, 72, 145, 152, 324, 627, 138, 172, 1045, 1050, 1055, 1060, and 1065; (ii) a CDR2 having an amino acid sequence that is at least 65%, at least 70%, at least 75%, at least 80%, at least 85%, at least 90%, at least 95%, at least 99%, or 100% identical to any one of SEQ ID NOs: 2, 31, 628, 1046, 1051, 1056, and 1061, or at least 65%, at least 70%, at least 75%, at least 80%, at least 85%, at least 90%, at least 95%, at least 99%, or 100% identical to any one of amino acid sequences GAS, LGS, GTN, SAS, SDS, AAS, DAS, and DNT; and (iii) a CDR3 having an amino acid sequence that is at least 65%, at least 70%, at least 75%, at least 80%, at least 85%, at least 90%, at least 95%, at least 99%, or 100% identical to any one of SEQ ID NOs: 3, 10, 16, 24, 32, 38, 66, 73, 146, 153, 325, 326, 764, 766, 139, 856, 173, 792, and 1066; and the VH2 comprises (i) a CDR1 having an amino acid sequence that is at least 65%, at least 70%, at least 75%, at least 80%, at least 85%, at least 90%, at least 95%, at least 99%, or 100% identical to any one of SEQ ID NOs: 5, 12, 18, 26, 34, 68, 75, 148, 155, 629, 141, 175, 1047, 1052, 1057, 1062, and 1067; (ii) a CDR2 having an amino acid sequence that is at least 65%, at least 70%, at least 75%, at least 80%, at least 85%, at least 90%, at least 95%, at least 99%, or 100% identical to any one of SEQ ID NOs: 6, 19, 27, 35, 69, 76, 149, 156, 630, 142, 176, 1048, 1053, 1058, 1063, and 1068; and (iii) a CDR3 having an amino acid sequence that is at least 65%, at least 70%, at least 75%, at least 80%, at least 85%, at least 90%, at least 95%, at least 99%, or 100% identical to any one of SEQ ID NOs: 7, 13, 20, 28, 36, 40, 70, 77, 327, 150, 157, 332, 631, 765, 767, 143, 857, 177, 793, 1049, 1054, 1059, 1064, and 1069.

[3463] In some aspects, the VL1 comprises an amino acid sequence that is at least 65%, at least 70%, at least 75%, at least 80%, at least 85%, at least 90%, at least 95%, at least 99%, or 100% identical to any one of SEQ ID NOs: 4, 11, 17, 25, 33, 39, 67, 74, 147, 154, 140, and 174.

[3464] In some aspects, the VH1 comprises an amino acid sequence that is at least 65%, at least 70%, at least 75%, at least 80%, at least 85%, at least 90%, at least 95%, at least 99%, or 100% identical to any one of SEQ ID NOs: 8, 14, 21, 22, 29, 37, 71, 78, 151, 158, 626, 144, and 178.

[3465] In some aspects, the VL2 comprises an amino acid sequence that is at least 65%, at least 70%, at least 75%, at least 80%, at least 85%, at least 90%, at least 95%, at least 99%, or 100% identical to any one of SEQ ID NOs: 4, 11, 17, 25, 33, 39, 67, 74, 147, 154, 140, and 174.

[3466] In some aspects, the VH2 comprises an amino acid sequence that is at least 65%, at least 70%, at least 75%, at least 80%, at least 85%, at least 90%, at least 95%, at least 99%, or 100% identical to any one of SEQ ID NOs: 8, 14, 21, 22, 29, 37, 71, 78, 151, 158, 626, 144, and 178.

[3467] In some aspects, (i) the VL1 comprises an amino acid sequence that is at least 65%, at least 70%, at least 75%, at least 80%, at least 85%, at least 90%, at least 95%, at least 99%, or 100% identical to any one of SEQ ID NOs: 4, 11, 17, 25, 33, 39, 67, 74, 147, 154, 140, and 174; (ii) the VH1 comprises an amino acid sequence that is at least 65%, at least 70%, at least 75%, at least 80%, at least 85%, at least 90%, at least 95%, at least 99%, or 100% identical to any one of SEQ ID NOs: 8, 14, 21, 22, 29, 37, 71, 78, 151, 158, 626, 144, and 178; (iii) the VL2 comprises an amino acid sequence that is at least 65%, at least 70%, at least 75%, at least 80%, at least 85%, at least 90%, at least 95%, at least 99%, or 100% identical to any one of SEQ ID NOs: 4, 11, 17, 25, 33, 39, 67, 74, 147, 154, 140, and 174; and (iv) the VH2 comprises an amino acid sequence that is at least 65%, at least 70%, at least 75%, at least 80%, at least 85%, at least 90%, at least 95%, at least 99%, or 100% identical to any one of SEQ ID NOs: 8, 14, 21, 22, 29, 37, 71, 78, 151, 158, 626, 144, and 178.

[3468] In some aspects, the VL1 comprises (i) a complementarity determining region (CDR) 1 having an amino acid sequence that is at least 65%, at least 70%, at least 75%, at least 80%, at least 85%, at least 90%, at least 95%, at least 99%, or 100% identical to any one of SEQ ID NOs: 41, 48, 138, 145, 152, 159, 166, 172, 192, 770, 778, 785, 794, 801, 807, 814, 827, 836, 849, 858, 865, 878, 1045, 1050, 1060, and 1065; (ii) a CDR2 having an amino acid sequence at least 65%, at least 70%, at least 75%, at least 80%, at least 85%, at least 90%, at least 95%, at least 99%, or 100% identical to any one of amino acid sequences AAS, GAS, DAS, NNN, SDS, SYN, WAS, and DAT, or at least 65%, at least 70%, at least 75%, at least 80%, at least 85%, at least 90%, at least 95%, at least 99%, or 100% identical to any one of SEQ ID NOs: 1046, 1051, and 1061; and (iii) a CDR3 having an amino acid sequence that is at least 65%, at least 70%, at least 75%, at least 80%, at least 85%, at least 90%, at least 95%, at least 99%, or 100% identical to any one of SEQ ID NOs: 42, 139, 146, 153, 160, 167, 173, 764, 766, 768, 771, 779, 786, 792, 795, 808, 815, 821, 830, 837, 843, 850, 856, 859, 866, 872, 879, 885, and 1066.

[3469] In some aspects, the VL2 comprises (i) a complementarity determining region (CDR) 1 having an amino acid sequence that is at least 65%, at least 70%, at least 75%, at least 80%, at least 85%, at least 90%, at least 95%, at least 99%, or 100% identical to any one of SEQ ID NOs: 41, 48, 138, 145, 152, 159, 166, 172, 192, 770, 778, 785, 794, 801, 807, 814, 827, 836, 849, 858, 865, 878, 1045, 1050, 1060, and 1065; (ii) a CDR2 having an amino acid sequence that is at least 65%, at least 70%, at least 75%, at least 80%, at least 85%, at least 90%, at least 95%, at least 99%, or 100% identical to any one of amino acid sequences AAS, GAS, DAS, NNN, SDS, SYN, WAS, and DAT, or at least 65%, at least 70%, at least 75%, at least 80%, at least 85%, at least 90%, at least 95%, at least 99%, or 100% identical to any one of SEQ ID NOs: 1046, 1051, and 1061; and (iii) a CDR3 having an amino acid sequence that is at least 65%, at least 70%, at least 75%, at least 80%, at least 85%, at least 90%, at least 95%, at least 99%, or 100% identical to any one of SEQ ID NOs: 42, 139, 146, 153, 160, 167, 173, 764, 766, 768, 771, 779, 786, 792, 795, 808, 815, 821, 830, 837, 843, 850, 856, 859, 866, 872, 879, 885, and 1066.

[3470] In some aspects, the VH1 comprises (i) a CDR1 having an amino acid sequence that is at least 65%, at least 70%, at least 75%, at least 80%, at least 85%, at least 90%, at least 95%, at least 99%, or 100% identical to any one of SEQ ID NOs: 44, 133, 141, 148, 155, 162, 175, 773, 781, 788, 797, 803, 810, 817, 823, 832, 839, 845, 852, 861, 868, 874, 881, 1047, 1052, 1062, and 1067; (ii) a CDR2 having an amino acid sequence that is at least 65%, at least 70%, at least 75%, at least 80%, at least 85%, at least 90%, at least 95%, at least 99%, or 100% identical to any one of SEQ ID NOs: 6, 142, 149, 156, 163, 169, 176, 776, 782, 789, 798, 804, 811, 818, 824, 833, 840, 846, 853, 862, 869, 875, 882, 1048, 1053, 1063, and 1068; and (iii) a CDR3 having an amino acid sequence that is at least 65%, at least 70%, at least 75%, at least 80%, at least 85%, at least 90%, at least 95%, at least 99%, or 100% identical to any one of SEQ ID NOs: 46, 143, 150, 157, 164, 170, 177, 765, 767, 769, 774, 783, 790, 793, 799, 805, 812, 819, 825, 834, 841, 847, 854, 857, 863, 870, 876, 883, 886, 1049, 1054, 1064, and 1069.

[3471] In some aspects, the VH2 comprises (i) a CDR1 having an amino acid sequence that is at least 65%, at least 70%, at least 75%, at least 80%, at least 85%, at least 90%, at least 95%, at least 99%, or 100% identical to any one of SEQ ID NOs: 44, 133, 141, 148, 155, 162, 175, 773, 781, 788, 797, 803, 810, 817, 823, 832, 839, 845, 852, 861, 868, 874, 881, 1047, 1052, 1062, and 1067; (ii) a CDR2 having an amino acid sequence that is at least 65%, at least 70%, at least 75%, at least 80%, at least 85%, at least 90%, at least 95%, at least 99%, or 100% identical to any one of SEQ ID NOs: 6, 142, 149, 156, 163, 169, 176, 776, 782, 789, 798, 804, 811, 818, 824, 833, 840, 846, 853, 862, 869, 875, 882, 1048, 1053, 1063, and 1068; and (iii) a CDR3 having an amino acid sequence that is at least 65%, at least 70%, at least 75%, at least 80%, at least 85%, at least 90%, at least 95%, at least 99%, or 100% identical to any one of SEQ ID NOs: 46, 143, 150, 157, 164, 170, 177, 765, 767, 769, 774, 783, 790, 793, 799, 805, 812, 819, 825, 834, 841, 847, 854, 857, 863, 870, 876, 883, 886, 1049, 1054, 1064, and 1069.

[3472] In some aspects, the VL1 comprises (i) a complementarity determining region (CDR) 1 having an amino acid sequence that is at least 65%, at least 70%, at least 75%, at least 80%, at least 85%, at least 90%, at least 95%, at least 99%, or 100% identical to any one of SEQ ID NOs: 41, 48, 138, 145, 152, 159, 166, 172, 192, 770, 778, 785, 794, 801, 807, 814, 827, 836, 849, 858, 865, 878, 1045, 1050, 1060, and 1065; (ii) a CDR2 having an amino acid sequence that is at least 65%, at least 70%, at least 75%, at least 80%, at least 85%, at least 90%, at least 95%, at least 99%, or 100% identical to any one of amino acid sequences AAS, GAS, DAS, NNN, SDS, SYN, WAS, and DAT, or at least 65%, at least 70%, at least 75%, at least 80%, at least 85%, at least 90%, at least 95%, at least 99%, or 100% identical to any one of SEQ ID NOs: 1046, 1051, and 1061; (iii) a CDR3 having an amino acid sequence that is at least 65%, at least 70%, at least 75%, at least 80%, at least 85%, at least 90%, at least 95%, at least 99%, or 100% identical to any one of SEQ ID NOs: 42, 139, 146, 153, 160, 167, 173, 764, 766, 768, 771, 779, 786, 792, 795, 808, 815, 821, 830, 837, 843, 850, 856, 859, 866, 872, 879, 885, and 1066; the VH1 comprises (i) a CDR1 having an amino acid sequence that is at least 65%, at least 70%, at least 75%, at least 80%, at least 85%, at least 90%, at least 95%, at least 99%, or 100% identical to any one of SEQ ID NOs: 44, 133, 141, 148, 155, 162, 175, 773, 781, 788, 797, 803, 810, 817, 823, 832, 839, 845, 852, 861, 868, 874, 881, 1047, 1052, 1062, and 1067; (ii) a CDR2 having an amino acid sequence that is at least 65%, at least 70%, at least 75%, at least 80%, at least 85%, at least 90%, at least 95%, at least 99%, or 100% identical to any one of SEQ ID NOs: 6, 142, 149, 156, 163, 169, 176, 776, 782, 789, 798, 804, 811, 818, 824, 833, 840, 846, 853, 862, 869, 875, 882, 1048, 1053, 1063, and 1068; and (iii) a CDR3 having an amino acid sequence that is at least 65%, at least 70%, at least 75%, at least 80%, at least 85%, at least 90%, at least 95%, at least 99%, or 100% identical to any one of SEQ ID NOs: 46, 143, 150, 157, 164, 170, 177, 765, 767, 769, 774, 783, 790, 793, 799, 805, 812, 819, 825, 834, 841, 847, 854, 857, 863, 870, 876, 883, 886, 1049, 1054, 1064, and 1069; the VL2 comprises (i) a complementarity determining region (CDR) 1 having an amino acid sequence that is at least 65%, at least 70%, at least 75%, at least 80%, at least 85%, at least 90%, at least 95%, at least 99%, or 100% identical to any one of SEQ ID NOs: 41, 48, 138, 145, 152, 159, 166, 172, 192, 770, 778, 785, 794, 801, 807, 814, 827, 836, 849, 858, 865, 878, 1045, 1050, 1060, and 1065; (ii) a CDR2 having an amino acid sequence that is at least 65%, at least 70%, at least 75%, at least 80%, at least 85%, at least 90%, at least 95%, at least 99%, or 100% identical to any one of amino acid sequences AAS, GAS, DAS, NNN, SDS, SYN, WAS, and DAT, or at least 65%, at least 70%, at least 75%, at least 80%, at least 85%, at least 90%, at least 95%, at least 99%, or 100% identical to any one of SEQ ID NOs: 1046, 1051, and 1061; and (iii) a CDR3 having an amino acid sequence that is at least 65%, at least 70%, at least 75%, at least 80%, at least 85%, at least 90%, at least 95%, at least 99%, or 100% identical to any one of SEQ ID NOs: 42, 139, 146, 153, 160, 167, 173, 764, 766, 768, 771, 779, 786, 792, 795, 808, 815, 821, 830, 837, 843, 850, 856, 859, 866, 872, 879, 885, and 1066; and the VH2 comprises (i) a CDR1 having an amino acid sequence that is at least 65%, at least 70%, at least 75%, at least 80%, at least 85%, at least 90%, at least 95%, at least 99%, or 100% identical to any one of SEQ ID NOs: 44, 133, 141, 148, 155, 162, 175, 773, 781, 788, 797, 803, 810, 817, 823, 832, 839, 845, 852, 861, 868, 874, 881, 1047, 1052, 1062, and 1067; (ii) a CDR2 having an amino acid sequence that is at least 65%, at least 70%, at least 75%, at least 80%, at least 85%, at least 90%, at least 95%, at least 99%, or 100% identical to any one of SEQ ID NOs: 6, 142, 149, 156, 163, 169, 176, 776, 782, 789, 798, 804, 811, 818, 824, 833, 840, 846, 853, 862, 869, 875, 882, 1048, 1053, 1063, and 1068; and (iii) a CDR3 having an amino acid sequence that is at least 65%, at least 70%, at least 75%, at least 80%, at least 85%, at least 90%, at least 95%, at least 99%, or 100% identical to any one of SEQ ID NOs: 46, 143, 150, 157, 164, 170, 177, 765, 767, 769, 774, 783, 790, 793, 799, 805, 812, 819, 825, 834, 841, 847, 854, 857, 863, 870, 876, 883, 886, 1049, 1054, 1064, and 1069.

[3473] In some aspects, the VL1 comprises an amino acid sequence that is at least 65%, at least 70%, at least 75%, at least 80%, at least 85%, at least 90%, at least 95%, at least 99%, or 100% identical to any one of SEQ ID NOs: 43, 140, 147, 154, 161, 168, 174, 772, 780, 787, 796, 802, 809, 816, 822, 831, 838, 844, 851, 860, 867, 873, and 880.

[3474] In some aspects, the VH1 comprises an amino acid sequence that is at least 65%, at least 70%, at least 75%, at least 80%, at least 85%, at least 90%, at least 95%, at least 99%, or 100% identical to any one of SEQ ID NOs: 144, 151, 158, 165, 171, 178, 775, 777, 784, 791, 800, 806, 813, 820, 826, 835, 842, 848, 855, 864, 871, 877, and 884.

[3475] In some aspects, the VL2 comprises an amino acid sequence that is at least 65%, at least 70%, at least 75%, at least 80%, at least 85%, at least 90%, at least 95%, at least 99%, or 100% identical to any one of SEQ ID NOs: 43, 140, 147, 154, 161, 168, 174, 772, 780, 787, 796, 802, 809, 816, 822, 831, 838, 844, 851, 860, 867, 873, and 880.

[3476] In some aspects, the VH2 comprises an amino acid sequence that is at least 65%, at least 70%, at least 75%, at least 80%, at least 85%, at least 90%, at least 95%, at least 99%, or 100% identical to any one of SEQ ID NOs: 144, 151, 158, 165, 171, 178, 775, 777, 784, 791, 800, 806, 813, 820, 826, 835, 842, 848, 855, 864, 871, 877, and 884.

[3477] In some aspects, (i) the VL1 comprises an amino acid sequence that is at least 65%, at least 70%, at least 75%, at least 80%, at least 85%, at least 90%, at least 95%, at least 99%, or 100% identical to any one of SEQ ID NOs: 43, 140, 147, 154, 161, 168, 174, 772, 780, 787, 796, 802, 809, 816, 822, 831, 838, 844, 851, 860, 867, 873, and 880; (ii) the VH1 comprises an amino acid sequence that is at least 65%, at least 70%, at least 75%, at least 80%, at least 85%, at least 90%, at least 95%, at least 99%, or 100% identical to any one of SEQ ID NOs: 144, 151, 158, 165, 171, 178, 775, 777, 784, 791, 800, 806, 813, 820, 826, 835, 842, 848, 855, 864, 871, 877, and 884; (iii) the VL2 comprises an amino acid sequence that is at least 65%, at least 70%, at least 75%, at least 80%, at least 85%, at least 90%, at least 95%, at least 99%, or 100% identical to any one of SEQ ID NOs: 43, 140, 147, 154, 161, 168, 174, 772, 780, 787, 796, 802, 809, 816, 822, 831, 838, 844, 851, 860, 867, 873, and 880; and (iv) the VH2 comprises an amino acid sequence that is at least 65%, at least 70%, at least 75%, at least 80%, at least 85%, at least 90%, at least 95%, at least 99%, or 100% identical to any one of SEQ ID NOs: 144, 151, 158, 165, 171, 178, 775, 777, 784, 791, 800, 806, 813, 820, 826, 835, 842, 848, 855, 864, 871, 877, and 884.

[3478] In some aspects, at least one of VL1 or VL2 comprises (i) a complementarity determining region (CDR) 1 having an amino acid sequence that is at least 65%, at least 70%, at least 75%, at least 80%, at least 85%, at least 90%, at least 95%, at least 99%, or 100% identical to SEQ ID NO: 145 or 1050; (ii) a CDR2 having an amino acid sequence at least 65%, at least 70%, at least 75%, at least 80%, at least 85%, at least 90%, at least 95%, at least 99%, or 100% identical to SEQ ID NO: 1051 or an amino acid sequence that is at least 65%, at least 70%, at least 75%, at least 80%, at least 85%, at least 90%, at least 95%, at least 99%, or 100% identical to amino acid sequence AAS; and (iii) a CDR3 having an amino acid sequence that is at least 65%, at least 70%, at least 75%, at least 80%, at least 85%, at least 90%, at least 95%, at least 99%, or 100% identical to SEQ ID NO: 146 or 764.

[3479] In some aspects, at least one of VH1 or VH2 comprises (i) a complementarity determining region (CDR) 1 having an amino acid sequence that is at least 65%, at least 70%, at least 75%, at least 80%, at least 85%, at least 90%, at least 95%, at least 99%, or 100% identical to SEQ ID NO: 148 or 1052; (ii) a CDR2 having an amino acid sequence that is at least 65%, at least 70%, at least 75%, at least 80%, at least 85%, at least 90%, at least 95%, at least 99%, or 100% identical to SEQ ID NO: 149 or 1053; and (iii) a CDR3 having an amino acid sequence that is at least 65%, at least 70%, at least 75%, at least 80%, at least 85%, at least 90%, at least 95%, at least 99%, or 100% identical to SEQ ID NO: 150, 765, or 1054.

[3480] In some aspects, at least one of VL1 or VL2, comprises (i) a complementarity determining region (CDR) 1 having an amino acid sequence that is at least 65%, at least 70%, at least 75%, at least 80%, at least 85%, at least 90%, at least 95%, at least 99%, or 100% identical to SEQ ID NO: 145 or 1050; (ii) a CDR2 having an amino acid sequence at least 65%, at least 70%, at least 75%, at least 80%, at least 85%, at least 90%, at least 95%, at least 99%, or 100% identical to SEQ ID NO: 1051 or an amino acid sequence that is at least 65%, at least 70%, at least 75%, at least 80%, at least 85%, at least 90%, at least 95%, at least 99%, or 100% identical to amino acid sequence AAS; and (iii) a CDR3 having an amino acid sequence that is at least 65%, at least 70%, at least 75%, at least 80%, at least 85%, at least 90%, at least 95%, at least 99%, or 100% identical to SEQ ID NO: 146 or 764; and at least one of VH1 or VH2 comprises (iv) a complementarity determining region (CDR) 1 having an amino acid sequence that is at least 65%, at least 70%, at least 75%, at least 80%, at least 85%, at least 90%, at least 95%, at least 99%, or 100% identical to SEQ ID NO: 148 or 1052; (v) a CDR2 having an amino acid sequence that is at least 65%, at least 70%, at least 75%, at least 80%, at least 85%, at least 90%, at least 95%, at least 99%, or 100% identical to SEQ ID NO: 149 or 1053; and (vi) a CDR3 having an amino acid sequence that is at least 65%, at least 70%, at least 75%, at least 80%, at least 85%, at least 90%, at least 95%, at least 99%, or 100% identical to SEQ ID NO: 150, 765, or 1054.

[3481] In some aspects, at least one of VL1 or VL2 comprises an amino acid sequence that is at least 65%, at least 70%, at least 75%, at least 80%, at least 85%, at least 90%, at least 95%, at least 99%, or 100% identical to SEQ ID NO: 147.

[3482] In some aspects, at least one of VH1 or VH2 comprises an amino acid sequence that is at least 65%, at least 70%, at least 75%, at least 80%, at least 85%, at least 90%, at least 95%, at least 99%, or 100% identical to SEQ ID NO: 151.

[3483] In some aspects, (i) at least one of VL1 or VL2 comprises an amino acid sequence that is at least 65%, at least 70%, at least 75%, at least 80%, at least 85%, at least 90%, at least 95%, at least 99%, or 100% identical to SEQ ID NO: 147, and (ii) at least one of VH1 or VH2 comprises an amino acid sequence that is at least 65%, at least 70%, at least 75%, at least 80%, at least 85%, at least 90%, at least 95%, at least 99%, or 100% identical to SEQ ID NO: 151.

[3484] In some aspects, the VL1 comprises (i) a complementarity determining region (CDR) 1 having an amino acid sequence that is at least 65%, at least 70%, at least 75%, at least 80%, at least 85%, at least 90%, at least 95%, at least 99%, or 100% identical to SEQ ID NO: 145 or 1050; (ii) a CDR2 having an amino acid sequence at least 65%, at least 70%, at least 75%, at least 80%, at least 85%, at least 90%, at least 95%, at least 99%, or 100% identical to SEQ ID NO: 1051 or an amino acid sequence that is at least 65%, at least 70%, at least 75%, at least 80%, at least 85%, at least 90%, at least 95%, at least 99%, or 100% identical to amino acid sequence AAS; and (iii) a CDR3 having an amino acid sequence that is at least 65%, at least 70%, at least 75%, at least 80%, at least 85%, at least 90%, at least 95%, at least 99%, or 100% identical to SEQ ID NO: 146 or 764; the VH1 comprises (iv) a complementarity determining region (CDR) 1 having an amino acid sequence that is at least 65%, at least 70%, at least 75%, at least 80%, at least 85%, at least 90%, at least 95%, at least 99%, or 100% identical to SEQ ID NO: 148 or 1052; (v) a CDR2 having an amino acid sequence that is at least 65%, at least 70%, at least 75%, at least 80%, at least 85%, at least 90%, at least 95%, at least 99%, or 100% identical to SEQ ID NO: 149 or 1053; and (vi) a CDR3 having an amino acid sequence that is at least 65%, at least 70%, at least 75%, at least 80%, at least 85%, at least 90%, at least 95%, at least 99%, or 100% identical to SEQ ID NO: 150, 765, or 1054; the VL2 comprises (vii) a complementarity determining region (CDR) 1 having an amino acid sequence that is at least 65%, at least 70%, at least 75%, at least 80%, at least 85%, at least 90%, at least 95%, at least 99%, or 100% identical to any one of SEQ ID NOs: 1, 9, 15, 23, 30, 41, 48, 55, 58, 65, 72, 79, 86, 93, 99, 105, 112, 119, 130, 138, 145, 152, 159, 166, 172, 179, 186, 192, 199, 205, 212, 219, 226, 232, 324, 627, 640, 650, 659, 676, 687, 695, 703, 712, 770, 778, 785, 794, 801, 807, 814, 827, 836, 849, 858, 865, 878, 1045, 1050, 1055, 1060, and 1065; (viii) a CDR2 having an amino acid sequence at least 65%, at least 70%, at least 75%, at least 80%, at least 85%, at least 90%, at least 95%, at least 99%, or 100% identical to any one of SEQ ID NOs: 2, 31, 628, 641, 677, 1046, 1051, 1056, and 1061; or at least 65%, at least 70%, at least 75%, at least 80%, at least 85%, at least 90%, at least 95%, at least 99%, or 100% identical to any one of amino acid sequences AAS, GAS, LGS, GTN, GTN, SAS, SDS, DNT, EVT, DAS, DVT, RNS, DVS, EDS, DDS, KDS, VAS, WAS, YTS, EVS, NNN, SYN, and DAT; (ix) a CDR3 having an amino acid sequence at least 65%, at least 70%, at least 75%, at least 80%, at least 85%, at least 90%, at least 95%, at least 99%, or 100% identical to any one of SEQ ID NOs: 3, 10, 16, 24, 32, 38, 42, 49, 59, 66, 73, 80, 87, 94, 100, 106, 113, 120, 126, 131, 139, 146, 153, 160, 167, 173, 180, 187, 193, 200, 206, 213, 220, 227, 233, 239, 242, 246, 249, 256, 283, 285, 287, 288, 290, 292, 294, 296, 301, 304, 306, 309, 311, 313, 316, 325, 326, 329, 642, 651, 660, 668, 678, 651, 696, 704, 713, 764, 766, 768, 771, 779, 786, 792, 795, 808, 815, 821, 830, 837, 843, 850, 856, 859, 866, 872, 879, 885, and 1066; and the VH2 comprises (x) a CDR1 having an amino acid sequence at least 65%, at least 70%, at least 75%, at least 80%, at least 85%, at least 90%, at least 95%, at least 99%, or 100% identical to any one of SEQ ID NOs: 5, 12, 18, 26, 34, 44, 51, 61, 68, 75, 82, 89, 96, 102, 108, 115, 122, 133, 141, 148, 155, 162, 175, 182, 189, 195, 202, 208, 215, 222, 229, 235, 318, 629, 645, 654, 663, 671, 682, 690, 699, 707, 716, 773, 781, 788, 797, 803, 810, 817, 823, 832, 839, 845, 852, 861, 868, 874, 881, 1047, 1052, 1057, 1062, and 1067; (xi) a CDR2 having an amino acid sequence at least 65%, at least 70%, at least 75%, at least 80%, at least 85%, at least 90%, at least 95%, at least 99%, or 100% identical to any one of SEQ ID NOs: 6, 19, 27, 35, 45, 52, 56, 62, 69, 76, 83, 90, 109, 116, 123, 134, 142, 149, 156, 163, 169, 176, 183, 196, 209, 216, 223, 236, 273, 319, 328, 630, 646, 655, 664, 672, 683, 691, 708, 776, 782, 789, 798, 804, 811, 818, 824, 833, 840, 846, 853, 862, 869, 875, 882, 1048, 1053, 1058, 1063, and 1068; (xii) a CDR3 having an amino acid sequence at least 65%, at least 70%, at least 75%, at least 80%, at least 85%, at least 90%, at least 95%, at least 99%, or 100% identical to any one of SEQ ID NOs: 7, 13, 20, 28, 36, 40, 46, 53, 63, 70, 77, 84, 91, 97, 103, 110, 117, 124, 128, 135, 143, 150, 157, 164, 170, 177, 184, 190, 197, 203, 210, 217, 224, 230, 237, 241, 244, 248, 253, 257, 259, 261, 263, 265, 267, 269, 271, 274, 276, 278, 281, 297, 320, 322, 327, 330, 332, 631, 647, 656, 665, 673, 684, 692, 700, 709, 717, 765, 767, 769, 774, 783, 790, 793, 799, 805, 812, 819, 825, 834, 841, 847, 854, 857, 863, 870, 876, 883, 886, 1049, 1054, 1059, 1064, and 1069.

[3485] In some aspects, (i) the VL1 comprises an amino acid sequence that is at least 65%, at least 70%, at least 75%, at least 80%, at least 85%, at least 90%, at least 95%, at least 99%, or 100% identical to SEQ ID NO: 147; (ii) the VH1 comprises an amino acid sequence that is at least 65%, at least 70%, at least 75%, at least 80%, at least 85%, at least 90%, at least 95%, at least 99%, or 100% identical to SEQ ID NO: 151; (iii) the VL2 comprises an amino acid sequence that is at least 65%, at least 70%, at least 75%, at least 80%, at least 85%, at least 90%, at least 95%, at least 99%, or 100% identical to any one of SEQ ID NOs: 4, 11, 17, 25, 33, 39, 43, 50, 60, 67, 74, 81, 88, 95, 101, 107, 114, 121, 127, 132, 140, 147, 154, 161, 168, 174, 181, 188, 194, 201, 207, 214, 221, 228, 234, 240, 243, 247, 250, 251, 252, 255, 284, 286, 289, 291, 293, 295, 299, 300, 302, 303, 305, 307, 308, 310, 312, 314, 315, 317, 323, 639, 649, 658, 667, 675, 686, 694, 702, 711, 772, 780, 787, 796, 802, 809, 816, 822, 831, 838, 844, 851, 860, 867, 873, 880, and 988; and (iv) the VH2 comprises an amino acid sequence that is at least 65%, at least 70%, at least 75%, at least 80%, at least 85%, at least 90%, at least 95%, at least 99%, or 100% identical to any one of SEQ ID NOs: 8, 14, 21, 22, 29, 37, 47, 54, 57, 64, 71, 78, 85, 92, 98, 104, 111, 118, 125, 129, 136, 137, 144, 151, 158, 165, 171, 178, 185, 191, 198, 204, 211, 218, 225, 231, 238, 245, 254, 258, 260, 262, 264, 266, 268, 270, 272, 275, 277, 279, 280, 282, 298, 321, 331, 626, 644, 653, 662, 670, 681, 689, 698, 706, 715, 775, 777, 784, 791, 800, 806, 813, 820, 826, 835, 842, 848, 855, 864, 871, 877, and 884.

[3486] In some aspects, the VL1 comprises (i) a complementarity determining region (CDR) 1 having an amino acid sequence that is at least 65%, at least 70%, at least 75%, at least 80%, at least 85%, at least 90%, at least 95%, at least 99%, or 100% identical to SEQ ID NO: 145 or 1050; (ii) a CDR2 having an amino acid sequence at least 65%, at least 70%, at least 75%, at least 80%, at least 85%, at least 90%, at least 95%, at least 99%, or 100% identical to SEQ ID NO: 1051 or an amino acid sequence that is at least 65%, at least 70%, at least 75%, at least 80%, at least 85%, at least 90%, at least 95%, at least 99%, or 100% identical to amino acid sequence AAS; and (iii) a CDR3 having an amino acid sequence that is at least 65%, at least 70%, at least 75%, at least 80%, at least 85%, at least 90%, at least 95%, at least 99%, or 100% identical to SEQ ID NO: 146 or 764; the VH1 comprises (iv) a complementarity determining region (CDR) 1 having an amino acid sequence that is at least 65%, at least 70%, at least 75%, at least 80%, at least 85%, at least 90%, at least 95%, at least 99%, or 100% identical to SEQ ID NO: 148 or 1052; (v) a CDR2 having an amino acid sequence that is at least 65%, at least 70%, at least 75%, at least 80%, at least 85%, at least 90%, at least 95%, at least 99%, or 100% identical to SEQ ID NO: 149 or 1053; and (vi) a CDR3 having an amino acid sequence that is at least 65%, at least 70%, at least 75%, at least 80%, at least 85%, at least 90%, at least 95%, at least 99%, or 100% identical to SEQ ID NO: 150, 765, or 1054; the VL2 comprises (vii) a complementarity determining region (CDR) 1 having an amino acid sequence that is at least 65%, at least 70%, at least 75%, at least 80%, at least 85%, at least 90%, at least 95%, at least 99%, or 100% identical to any one of SEQ ID NOs: 1, 9, 15, 23, 30, 65, 72, 145, 152, 324, 627, 138, 172, 1045, 1050, 1055, 1060, and 1065; (viii) a CDR2 having an amino acid sequence at least 65%, at least 70%, at least 75%, at least 80%, at least 85%, at least 90%, at least 95%, at least 99%, or 100% identical to any one of SEQ ID NOs: 2, 31, 628, 1046, 1051, 1056, and 1061, or at least 65%, at least 70%, at least 75%, at least 80%, at least 85%, at least 90%, at least 95%, at least 99%, or 100% identical to any one of amino acid sequences GAS, LGS, GTN, SAS, SDS, AAS, DAS, and DNT; (ix) a CDR3 having an amino acid sequence at least 65%, at least 70%, at least 75%, at least 80%, at least 85%, at least 90%, at least 95%, at least 99%, or 100% identical to any one of SEQ ID NOs: 3, 10, 16, 24, 32, 38, 66, 73, 146, 153, 325, 326, 764, 766, 139, 856, 173, 792, and 1066; and the VH2 comprises (x) a CDR1 having an amino acid sequence at least 65%, at least 70%, at least 75%, at least 80%, at least 85%, at least 90%, at least 95%, at least 99%, or 100% identical to any one of SEQ ID NOs: 5, 12, 18, 26, 34, 68, 75, 148, 155, 629, 141, 175, 1047, 1052, 1057, 1062, and 1067; (xi) a CDR2 having an amino acid sequence at least 65%, at least 70%, at least 75%, at least 80%, at least 85%, at least 90%, at least 95%, at least 99%, or 100% identical to any one of SEQ ID NOs: 6, 19, 27, 35, 69, 76, 149, 156, 630, 142, 176, 1048, 1053, 1058, 1063, and 1068; (xii) a CDR3 having an amino acid sequence at least 65%, at least 70%, at least 75%, at least 80%, at least 85%, at least 90%, at least 95%, at least 99%, or 100% identical to any one of SEQ ID NOs: 7, 13, 20, 28, 36, 40, 70, 77, 327, 150, 157, 332, 631, 765, 767, 143, 857, 177, 793, 1049, 1054, 1059, 1064, and 1069.

[3487] In some aspects, (i) the VL1 comprises an amino acid sequence that is at least 65%, at least 70%, at least 75%, at least 80%, at least 85%, at least 90%, at least 95%, at least 99%, or 100% identical to SEQ ID NO: 147; (ii) the VH1 comprises an amino acid sequence that is at least 65%, at least 70%, at least 75%, at least 80%, at least 85%, at least 90%, at least 95%, at least 99%, or 100% identical to SEQ ID NO: 151; (iii) the VL2 comprises an amino acid sequence that is at least 65%, at least 70%, at least 75%, at least 80%, at least 85%, at least 90%, at least 95%, at least 99%, or 100% identical to any one of SEQ ID NOs: 4, 11, 17, 25, 33, 39, 67, 74, 147, 154, 140, and 174; and (iv) the VH2 comprises an amino acid sequence that is at least 65%, at least 70%, at least 75%, at least 80%, at least 85%, at least 90%, at least 95%, at least 99%, or 100% identical to any one of SEQ ID NOs: 8, 14, 21, 22, 29, 37, 71, 78, 151, 158, 626, 144, and 178.

[3488] In some aspects, one or both of the antigen binding polypeptides comprised in the antigen binding polypeptide complexes provided herein further comprise an Fc region. In some aspects, one or both of the antigen binding polypeptides comprised in the antigen binding polypeptide complexes provided herein further comprise an Fc region at the carboxy-terminus. In some aspects, the Fc region comprises an immunoglobulin heavy chain constant region 2 (CH2) and/or an immunoglobulin heavy chain constant region 3 (CH3). In some aspects, the Fc region further comprises an immunoglobulin hinge (i.e., a hinge region). In some aspects, the hinge region is interposed between a CH1 and a CH2 (i.e., a hinge region is localized between the carboxy terminal residue of a CH1 and the N-terminal residue of a CH2). In some aspects, the hinge region comprises an amino acid sequence at least 65%, at least 70%, at least 75%, at least 80%, at least 85%, at least 90%, at least 95%, at least 99%, or 100% identical to any one of SEQ ID NOS: 635, 636, 1072, 1073, or 1074. In some aspects, the Fc region comprises a CH2 and a CH3. In some aspects, the CH2 comprises an amino acid sequence that is at least 65%, at least 70%, at least 75%, at least 80%, at least 85%, at least 90%, at least 95%, at least 99%, or 100% identical to any one of SEQ ID NOs: 1075-1078. In some aspects, the CH3 comprises an amino acid sequence that is at least 65%, at least 70%, at least 75%, at least 80%, at least 85%, at least 90%, at least 95%, at least 99%, or 100% identical to any one of SEQ ID NOs: 1079-1085. In some aspects, the Fc region comprises an amino acid sequence that is at least 65%, at least 70%, at least 75%, at least 80%, at least 85%, at least 90%, at least 95%, at least 99%, or 100% identical to any one of SEQ ID NOs: 376-380.

[3489] In some aspects, the Fc region comprises one or more amino acid substitutions. In some aspects, the one or more amino acid substitutions comprise one or more half-life extension amino acid substitutions. In some aspects, the one or more half-life extension amino acid substitutions comprise one or more of amino acid substitutions M428L, N434A, N434S, L234F, L235E, P331S, M252Y, S254T, or T256E, or equivalent thereof, based on the EU numbering scheme. In some aspects, the one or more half-life extension amino acid substitutions comprise a LA (M428L and N434A, or equivalent thereof, based on the EU numbering scheme) amino acid substitution. In some aspects, the one or more half-life extension amino acid substitutions comprise a LS (M428L and N434S, or equivalent thereof, based on the EU numbering scheme) amino acid substitution. In some aspects, the one or more half-life extension amino acid substitutions comprise L234F and L235E, or equivalent thereof (based on the EU numbering scheme) amino acid substitutions. In some aspects, the one or more half-life extension amino acid substitutions comprise a TM (L234F, L235E, and P331S, or equivalent thereof, based on the EU numbering scheme) amino acid substitution. In some aspects, the one or more half-life extension amino acid substitutions comprise a YTE (M252Y, S254T, and T256E, or equivalent thereof, based on the EU numbering scheme) amino acid substitution.

[3490] In some aspects, the Fc region comprises at least one knob-into-hole modification. In some aspects, the antigen binding polypeptides disclosed herein are comprised in IgG1 or IgG4 antibodies or antigen binding fragments thereof. In some aspects, the knob-into-hole modification comprises one or more of knob substitutions of S354C and T366W, or equivalent thereof, and/or one or more of hole substitutions of Y349C, T366S, L368A, Y407V, or equivalent thereof, or a combination thereof, based on the EU numbering scheme. In some aspects, the Fc region comprises a knob-into-hole modification comprising knob substitutions of S354C and T366W, or equivalent thereof, and/or hole substitutions of Y349C, T366S, L368A and Y407V, or equivalent thereof, and/or a half-life extension amino acid substitution comprising: a LA (M428L and N434A, or equivalent thereof, based on the EU numbering scheme) amino acid substitution, a LS (M428L and N434S, or equivalent thereof, based on the EU numbering scheme) amino acid substitution. L234F and L235E, or equivalent thereof (based on the EU numbering scheme) amino acid substitutions, a TM (L234F, L235E, and P331S, or equivalent thereof, based on the EU numbering scheme) amino acid substitution, a YTE (M252Y, S254T, and T256E, or equivalent thereof, based on the EU numbering scheme) amino acid substitution, or any combination thereof.

[3491] In some aspects, the Fc region comprises knob substitutions of S354C and T366W, or equivalent thereof, and a half-life extension amino acid substitution comprising: a LA (M428L and N434A, or equivalent thereof, based on the EU numbering scheme) amino acid substitution, a LS (M428L and N434S, or equivalent thereof, based on the EU numbering scheme) amino acid substitution. L234F and L235E, or equivalent thereof (based on the EU numbering scheme) amino acid substitutions, a TM (L234F, L235E, and P331S, or equivalent thereof, based on the EU numbering scheme) amino acid substitution, a YTE (M252Y, S254T, and T256E, or equivalent thereof, based on the EU numbering scheme) amino acid substitution, or any combination thereof.

[3492] In some aspects, the Fc region comprises hole substitutions of Y349C, T366S, L368A and Y407V, or equivalent thereof, and a half-life extension amino acid substitution comprising: a LA (M428L and N434A, or equivalent thereof, based on the EU numbering scheme) amino acid substitution, a LS (M428L and N434S, or equivalent thereof, based on the EU numbering scheme) amino acid substitution. L234F and L235E, or equivalent thereof (based on the EU numbering scheme) amino acid substitutions, a TM (L234F, L235E, and P331S, or equivalent thereof, based on the EU numbering scheme) amino acid substitution, a YTE (M252Y, S254T, and T256E, or equivalent thereof, based on the EU numbering scheme) amino acid substitution, or any combination thereof.

[3493] In some aspects, one or both of the antigen binding polypeptides comprised in the antigen binding polypeptide complexes disclosed herein comprise one or more Fc effector function knockout mutation. In some aspects, one or both of the antigen binding polypeptides comprised in the antigen binding polypeptide complexes disclosed herein are IgG1 or IgG4 antibodies or antigen binding fragments thereof. In some aspects, the Fc effector function knockout mutation is L234A, L235A, P239A, or equivalent thereof, or a combination thereof, based on the EU numbering scheme.

[3494] In some aspects, one or both of the antigen binding polypeptides comprised in the antigen binding polypeptide complexes disclosed herein comprise a mutation at a glycosylation site. In some aspects, the mutation at a glycosylation site is a mutation at an N-glycosylation site. In some aspects, one or both of the antigen binding polypeptides comprised in the antigen binding polypeptide complexes disclosed herein comprise a VH comprising a mutation at a glycosylation site. In some aspects, the mutation at a glycosylation site is a mutation at an N-glycosylation site. In some aspects, the mutation at an N-glycosylation site is at amino acid N62 of the VH region or equivalent thereof. In some aspects, the mutation at an N-glycosylation site at amino acid N62 is N62Q or N62S, or equivalent thereof.

[3495] In some aspects, one or both of the antigen binding polypeptides comprised in the antigen binding polypeptide complexes disclosed herein, comprise one or more optional linkers. The one or more optional linkers are indicated herein as Ln, wherein n is an integer, and the integer next to each L indicates each L comprised in the antigen binding polypeptides comprised in the antigen binding polypeptide complexes disclosed herein. For example, if an antigen binding polypeptide comprised in the antigen binding polypeptide complexes disclosed herein comprises two linkers, the first linker from N-terminus to C-terminus is herein indicated as L1, and the second linker from N-terminus to C-terminus is herein indicated as L2. If an antigen binding polypeptide complex disclosed herein comprises a first antigen binding polypeptide comprising two linkers, indicated herein as L1 and L2, as explained above, the linkers comprised in the second antigen binding polypeptide are indicated with the following integer, in this example, the first linker from N-terminus to C-terminus of the second antigen binding polypeptide is herein indicated as L3, the second linker from N-terminus to C-terminus of the second antigen binding polypeptide is herein indicated as L3. In some aspects, any one of the optional linkers each independently have a length of from 0 amino acids to about 50 amino acids. In some aspects, any one of the optional linkers each independently have a length of from 5 amino acids to about 40 amino acids.

[3496] In some aspects, any one of the optional linkers are non-immunogenic. In some aspects, any one of the optional linkers do not contain a consensus T cell epitope.

[3497] In some aspects, any of Ln comprises an amino acid sequence of G or A, or an amino acid sequence at least 65%, at least 70%, at least 75%, at least 80%, at least 85%, at least 90%, at least 95%, at least 99%, or 100% identical to amino acid sequence GSS or ASG, or an amino acid sequence at least 65%, at least 70%, at least 75%, at least 80%, at least 85%, at least 90%, at least 95%, at least 99%, or 100% identical to any one of SEQ ID NOs: 333-373 or 967-971. In some aspects, Ln comprises an amino acid sequence at least 65%, at least 70%, at least 75%, at least 80%, at least 85%, at least 90%, at least 95%, at least 99%, or 100% identical to any one of SEQ ID NOs: 333-345 or 967-971.

[3498] In some aspects, the antigen binding polypeptide is selected from any one of the more specific aspects provided herein for an antigen binding polypeptide in an antigen binding polypeptide complex having no more than three polypeptide chains.

[3499] In some aspects, the antigen binding polypeptide further comprises one or more immunoglobulin heavy chain constant region 1 (CH1) and/or one or more immunoglobulin light chain constant region (CL) between any one of the variable regions and/or optional amino acid linkers (e.g., between VL1 and L1, between L1 and VH1, between VH1 and L2, between L2 and VL1, between L1 and VL2, between VL2 and L2, between L2 and VH2, between VH2 and L3, between L3 and VH1, between VL1 and L1, between L1 and VH2, between VH2 and L2, between. L2 and VL2, between VL2 and L3, between L3 and VH1, between VH1 and L4, between L4 and VH2, between VH2 and L5, between L5 and VL2, between VL2 and L6, between L6 and VL1, between VH1 and L4, between L4 and VL2, between L4 and VL2, between VL2 and L5, between L5 and VH2, between VH2 and L6, or between L6 and VL1).

[3500] In some aspects, the antigen binding polypeptide is selected from any one of the more specific aspects provided herein for an antigen binding polypeptide in an antigen binding polypeptide complex having no more than three polypeptide chains, and further comprises one or more immunoglobulin heavy chain constant region 1 (CH1) and/or one or more immunoglobulin light chain constant region (CL) between any one of the variable regions and/or optional amino acid linkers (e.g., between VL1 and L1, between L1 and VH1, between VH1 and L2, between L2 and VL1, between L1 and VL2, between VL2 and L2, between L2 and VH2, between VH2 and L3, between L3 and VH1, between VL1 and L1, between L1 and VH2, between VH2 and L2, between. L2 and VL2, between VL2 and L3, between L3 and VH1, between VH1 and L4, between L4 and VH2, between VH2 and L5, between L5 and VL2, between VL2 and L6, between L6 and VL1, between VH1 and L4, between L4 and VL2, between L4 and VL2, between VL2 and L5, between L5 and VH2, between VH2 and L6, or between L6 and VL1).

[3501] In some aspects, one or both of the antigen binding polypeptides comprised in the antigen binding polypeptide complexes disclosed herein, comprise one or more CL, as indicated in the formulas representing the antigen binding polypeptide complexes disclosed herein. In some aspects, the CL comprises an amino acid sequence at least 65%, at least 70%, at least 75%, at least 80%, at least 85%, at least 90%, at least 95%, at least 99%, or 100% identical to any one of SEQ ID NOs: 374, 637, or 1092-1095.

[3502] In some aspects, one or both of the antigen binding polypeptides comprised in the antigen binding polypeptide complexes disclosed herein, comprise one or more CH1, as indicated in the formulas representing the antigen binding polypeptide complexes disclosed herein. In some aspects, the CH1 comprises an amino acid sequence at least 65%, at least 70%, at least 75%, at least 80%, at least 85%, at least 90%, at least 95%, at least 99%, or 100% identical to any one of SEQ ID NOs: 375, 634, 1070, 1071, or 1086-1091.

[3503] In some aspects, one or both of the antigen binding polypeptides comprised in the antigen binding polypeptide complexes provided herein further comprise an Fc region. In some aspects, one or both of the antigen binding polypeptides comprised in the antigen binding polypeptide complexes provided herein further comprise an Fc region at the carboxy-terminus. In some aspects, the Fc region comprises an immunoglobulin heavy chain constant region 2 (CH2) and/or an immunoglobulin heavy chain constant region 3 (CH3). In some aspects, the Fc region further comprises an immunoglobulin hinge (i.e., a hinge region). In some aspects, the hinge region is interposed between a CH1 and a CH2 (i.e., a hinge region is localized between the carboxy terminal residue of a CH1 and the N-terminal residue of a CH2). In some aspects, the hinge region comprises an amino acid sequence at least 65%, at least 70%, at least 75%, at least 80%, at least 85%, at least 90%, at least 95%, at least 99%, or 100% identical to any one of SEQ ID NOs: 635.636, 1072, 1073, or 1074. In some aspects, the Fc region comprises a CH2 and a CH3. In some aspects, the CH2 comprises an amino acid sequence that is at least 65%, at least 70%, at least 75%, at least 80%, at least 85%, at least 90%, at least 95%, at least 99%, or 100% identical to any one of SEQ ID NOS: 1075-1078. In some aspects, the CH3 comprises an amino acid sequence that is at least 65%, at least 70%, at least 75%, at least 80%, at least 85%, at least 90%, at least 95%, at least 99%, or 100% identical to any one of SEQ ID NOs: 1079-1085. In some aspects, the Fc region comprises an amino acid sequence that is at least 65%, at least 70%, at least 75%, at least 80%, at least 85%, at least 90%, at least 95%, at least 99%, or 100% identical to any one of SEQ ID NOs: 376-380.

[3504] In some aspects, the Fc region comprises one or more amino acid substitutions. In some aspects, the one or more amino acid substitutions comprise one or more half-life extension amino acid substitutions. In some aspects, the one or more half-life extension amino acid substitutions comprise one or more of amino acid substitutions M428L, N434A, N434S, L234F, L235E, P331S, M252Y, S254T, or T256E, or equivalent thereof, based on the EU numbering scheme. In some aspects, the one or more half-life extension amino acid substitutions comprise a LA (M428L and N434A, or equivalent thereof, based on the EU numbering scheme) amino acid substitution. In some aspects, the one or more half-life extension amino acid substitutions comprise a LS (M428L and N434S, or equivalent thereof, based on the EU numbering scheme) amino acid substitution. In some aspects, the one or more half-life extension amino acid substitutions comprise L234F and L235E, or equivalent thereof (based on the EU numbering scheme) amino acid substitutions. In some aspects, the one or more half-life extension amino acid substitutions comprise a TM (L234F, L235E, and P331S, or equivalent thereof, based on the EU numbering scheme) amino acid substitution. In some aspects, the one or more half-life extension amino acid substitutions comprise a YTE (M252Y, S254T, and T256E, or equivalent thereof, based on the EU numbering scheme) amino acid substitution.

[3505] In some aspects, the Fc region comprises at least one knob-into-hole modification. In some aspects, the antigen binding polypeptides disclosed herein are comprised in IgG1 or IgG4 antibodies or antigen binding fragments thereof. In some aspects, the knob-into-hole modification comprises one or more of knob substitutions of S354C and T366W, or equivalent thereof, and/or one or more of hole substitutions of Y349C, T366S, L368A, Y407V, or equivalent thereof, or a combination thereof, based on the EU numbering scheme. In some aspects, the Fc region comprises a knob-into-hole modification comprising knob substitutions of S354C and T366W, or equivalent thereof, and/or hole substitutions of Y349C, T366S, L368A and Y407V, or equivalent thereof, and/or a half-life extension amino acid substitution comprising: a LA (M428L and N434A, or equivalent thereof, based on the EU numbering scheme) amino acid substitution, a LS (M428L and N434S, or equivalent thereof, based on the EU numbering scheme) amino acid substitution. L234F and L235E, or equivalent thereof (based on the EU numbering scheme) amino acid substitutions, a TM (L234F, L235E, and P331S, or equivalent thereof, based on the EU numbering scheme) amino acid substitution, a YTE (M252Y, S254T, and T256E, or equivalent thereof, based on the EU numbering scheme) amino acid substitution, or any combination thereof.

[3506] In some aspects, the Fc region comprises knob substitutions of S354C and T366W, or equivalent thereof, and a half-life extension amino acid substitution comprising: a LA (M428L and N434A, or equivalent thereof, based on the EU numbering scheme) amino acid substitution, a LS (M428L and N434S, or equivalent thereof, based on the EU numbering scheme) amino acid substitution, L234F and L235E, or equivalent thereof (based on the EU numbering scheme) amino acid substitutions, a TM (L234F, L235E, and P331S, or equivalent thereof, based on the EU numbering scheme) amino acid substitution, a YTE (M252Y, S254T, and T256E, or equivalent thereof, based on the EU numbering scheme) amino acid substitution, or any combination thereof.

[3507] In some aspects, the Fc region comprises hole substitutions of Y349C, T366S, L368A and Y407V, or equivalent thereof, and a half-life extension amino acid substitution comprising: a LA (M428L and N434A, or equivalent thereof, based on the EU numbering scheme) amino acid substitution, a LS (M428L and N434S, or equivalent thereof, based on the EU numbering scheme) amino acid substitution. L234F and L235E, or equivalent thereof (based on the EU numbering scheme) amino acid substitutions, a TM (L234F, L235E, and P331S, or equivalent thereof, based on the EU numbering scheme) amino acid substitution, a YTE (M252Y, S254T, and T256E, or equivalent thereof, based on the EU numbering scheme) amino acid substitution, or any combination thereof.

[3508] In some aspects, one or both of the antigen binding polypeptides comprised in the antigen binding polypeptide complexes disclosed herein comprise one or more Fc effector function knockout mutation. In some aspects, one or both of the antigen binding polypeptides comprised in the antigen binding polypeptide complexes disclosed herein are IgG1 or IgG4 antibodies or antigen binding fragments thereof. In some aspects, the Fc effector function knockout mutation is L234A, L235A, P239A, or equivalent thereof, or a combination thereof, based on the EU numbering scheme.

[3509] In some aspects, one or both of the antigen binding polypeptides comprised in the antigen binding polypeptide complexes disclosed herein comprise a mutation at a glycosylation site. In some aspects, the mutation at a glycosylation site is a mutation at an N-glycosylation site. In some aspects, one or both of the antigen binding polypeptides comprised in the antigen binding polypeptide complexes disclosed herein comprise a VH comprising a mutation at a glycosylation site. In some aspects, the mutation at a glycosylation site is a mutation at an N-glycosylation site. In some aspects, the mutation at an N-glycosylation site is at amino acid N62 of the VH region or equivalent thereof. In some aspects, the mutation at an N-glycosylation site at amino acid N62 is N62Q or N62S, or equivalent thereof.

[3510] In some aspects, one or both of the antigen binding polypeptides comprised in the antigen binding polypeptide complexes disclosed herein, comprise one or more optional linkers. The one or more optional linkers are indicated herein as Ln, wherein n is an integer, and the integer next to each L indicates each L comprised in the antigen binding polypeptides comprised in the antigen binding polypeptide complexes disclosed herein. For example, if an antigen binding polypeptide comprised in the antigen binding polypeptide complexes disclosed herein comprises two linkers, the first linker from N-terminus to C-terminus is herein indicated as L1, and the second linker from N-terminus to C-terminus is herein indicated as L2. If an antigen binding polypeptide complex disclosed herein comprises a first antigen binding polypeptide comprising two linkers, indicated herein as L1 and L2, as explained above, the linkers comprised in the second antigen binding polypeptide are indicated with the following integer, in this example, the first linker from N-terminus to C-terminus of the second antigen binding polypeptide is herein indicated as L3, the second linker from N-terminus to C-terminus of the second antigen binding polypeptide is herein indicated as L3. In some aspects, any one of the optional linkers each independently have a length of from 0 amino acids to about 50 amino acids. In some aspects, any one of the optional linkers each independently have a length of from 5 amino acids to about 40 amino acids.

[3511] In some aspects, any one of the optional linkers are non-immunogenic. In some aspects, any one of the optional linkers do not contain a consensus T cell epitope.

[3512] In some aspects, any of Ln comprises an amino acid sequence of G or A, or an amino acid sequence at least 65%, at least 70%, at least 75%, at least 80%, at least 85%, at least 90%, at least 95%, at least 99%, or 100% identical to amino acid sequence GSS or ASG, or an amino acid sequence at least 65%, at least 70%, at least 75%, at least 80%, at least 85%, at least 90%, at least 95%, at least 99%, or 100% identical to any one of SEQ ID NOs: 333-373 or 967-971. In some aspects, Ln comprises an amino acid sequence at least 65%, at least 70%, at least 75%, at least 80%, at least 85%, at least 90%, at least 95%, at least 99%, or 100% identical to any one of SEQ ID NOs: 333-345 or 967-971.

[3513] In some aspects, the first polypeptide and the second polypeptide comprise a same amino acid sequence.

[3514] In some aspects, the first polypeptide and the second polypeptide comprise a different amino acid sequence.

[3515] In some aspects, the first polypeptide and the second polypeptide are encoded by the same nucleotide sequence.

[3516] In some aspects, the first polypeptide and the second polypeptide are encoded by a different nucleotide sequence.

[3517] In some aspects, the first polypeptide comprises an amino acid sequence at least 65%, at least 70%, at least 75%, at least 80%, at least 85%, at least 90%, at least 95%, at least 99%, or 100% identical to SEQ ID NO: 381 and the second polypeptide comprises an amino acid sequence at least 65%, at least 70%, at least 75%, at least 80%, at least 85%, at least 90%, at least 95%, at least 99%, or 100% identical to SEQ ID NO: 381.

[3518] In some aspects, the first polypeptide comprises an amino acid sequence at least 65%, at least 70%, at least 75%, at least 80%, at least 85%, at least 90%, at least 95%, at least 99%, or 100% identical to SEQ ID NO: 382 and the second polypeptide comprises an amino acid sequence at least 65%, at least 70%, at least 75%, at least 80%, at least 85%, at least 90%, at least 95%, at least 99%, or 100% identical to SEQ ID NO: 382.

[3519] In some aspects, the first polypeptide comprises an amino acid sequence at least 65%, at least 70%, at least 75%, at least 80%, at least 85%, at least 90%, at least 95%, at least 99%, or 100% identical to SEQ ID NO: 383 and the second polypeptide comprises an amino acid sequence at least 65%, at least 70%, at least 75%, at least 80%, at least 85%, at least 90%, at least 95%, at least 99%, or 100% identical to SEQ ID NO: 383.

[3520] In some aspects, the first polypeptide comprises an amino acid sequence at least 65%, at least 70%, at least 75%, at least 80%, at least 85%, at least 90%, at least 95%, at least 99%, or 100% identical to SEQ ID NO: 384 and the second polypeptide comprises an amino acid sequence at least 65%, at least 70%, at least 75%, at least 80%, at least 85%, at least 90%, at least 95%, at least 99%, or 100% identical to SEQ ID NO: 385.

[3521] In some aspects, the first polypeptide comprises an amino acid sequence at least 65%, at least 70%, at least 75%, at least 80%, at least 85%, at least 90%, at least 95%, at least 99%, or 100% identical to SEQ ID NO: 386 and the second polypeptide comprises an amino acid sequence at least 65%, at least 70%, at least 75%, at least 80%, at least 85%, at least 90%, at least 95%, at least 99%, or 100% identical to SEQ ID NO: 387.

[3522] In some aspects, the first polypeptide comprises an amino acid sequence at least 65%, at least 70%, at least 75%, at least 80%, at least 85%, at least 90%, at least 95%, at least 99%, or 100% identical to SEQ ID NO: 388 and the second polypeptide comprises an amino acid sequence at least 65%, at least 70%, at least 75%, at least 80%, at least 85%, at least 90%, at least 95%, at least 99%, or 100% identical to SEQ ID NO: 388.

[3523] In some aspects, the first polypeptide comprises an amino acid sequence at least 65%, at least 70%, at least 75%, at least 80%, at least 85%, at least 90%, at least 95%, at least 99%, or 100% identical to SEQ ID NO: 389 and the second polypeptide comprises an amino acid sequence at least 65%, at least 70%, at least 75%, at least 80%, at least 85%, at least 90%, at least 95%, at least 99%, or 100% identical to SEQ ID NO: 389.

[3524] In some aspects, the first polypeptide comprises an amino acid sequence at least 65%, at least 70%, at least 75%, at least 80%, at least 85%, at least 90%, at least 95%, at least 99%, or 100% identical to SEQ ID NO: 390 and the second polypeptide comprises an amino acid sequence at least 65%, at least 70%, at least 75%, at least 80%, at least 85%, at least 90%, at least 95%, at least 99%, or 100% identical to SEQ ID NO: 390.

[3525] In some aspects, the first polypeptide comprises an amino acid sequence at least 65%, at least 70%, at least 75%, at least 80%, at least 85%, at least 90%, at least 95%, at least 99%, or 100% identical to SEQ ID NO: 391 and the second polypeptide comprises an amino acid sequence at least 65%, at least 70%, at least 75%, at least 80%, at least 85%, at least 90%, at least 95%, at least 99%, or 100% identical to SEQ ID NO: 391.

[3526] In some aspects, the first polypeptide comprises an amino acid sequence at least 65%, at least 70%, at least 75%, at least 80%, at least 85%, at least 90%, at least 95%, at least 99%, or 100% identical to SEQ ID NO: 392 and the second polypeptide comprises an amino acid sequence at least 65%, at least 70%, at least 75%, at least 80%, at least 85%, at least 90%, at least 95%, at least 99%, or 100% identical to SEQ ID NO: 393.

[3527] In some aspects, the first polypeptide comprises an amino acid sequence at least 65%, at least 70%, at least 75%, at least 80%, at least 85%, at least 90%, at least 95%, at least 99%, or 100% identical to SEQ ID NO: 394 and the second polypeptide comprises an amino acid sequence at least 65%, at least 70%, at least 75%, at least 80%, at least 85%, at least 90%, at least 95%, at least 99%, or 100% identical to SEQ ID NO: 395.

[3528] In some aspects, the first polypeptide comprises an amino acid sequence at least 65%, at least 70%, at least 75%, at least 80%, at least 85%, at least 90%, at least 95%, at least 99%, or 100% identical to SEQ ID NO: 396 and the second polypeptide comprises an amino acid sequence at least 65%, at least 70%, at least 75%, at least 80%, at least 85%, at least 90%, at least 95%, at least 99%, or 100% identical to SEQ ID NO: 397.

[3529] In some aspects, the first polypeptide comprises an amino acid sequence at least 65%, at least 70%, at least 75%, at least 80%, at least 85%, at least 90%, at least 95%, at least 99%, or 100% identical to SEQ ID NO: 398 and the second polypeptide comprises an amino acid sequence at least 65%, at least 70%, at least 75%, at least 80%, at least 85%, at least 90%, at least 95%, at least 99%, or 100% identical to SEQ ID NO: 399.

[3530] In some aspects, the first polypeptide comprises an amino acid sequence at least 65%, at least 70%, at least 75%, at least 80%, at least 85%, at least 90%, at least 95%, at least 99%, or 100% identical to SEQ ID NO: 400 and the second polypeptide comprises an amino acid sequence at least 65%, at least 70%, at least 75%, at least 80%, at least 85%, at least 90%, at least 95%, at least 99%, or 100% identical to SEQ ID NO: 400.

[3531] In some aspects, the first polypeptide comprises an amino acid sequence at least 65%, at least 70%, at least 75%, at least 80%, at least 85%, at least 90%, at least 95%, at least 99%, or 100% identical to SEQ ID NO: 401 and the second polypeptide comprises an amino acid sequence at least 65%, at least 70%, at least 75%, at least 80%, at least 85%, at least 90%, at least 95%, at least 99%, or 100% identical to SEQ ID NO: 401.

[3532] In some aspects, the first polypeptide comprises an amino acid sequence at least 65%, at least 70%, at least 75%, at least 80%, at least 85%, at least 90%, at least 95%, at least 99%, or 100% identical to SEQ ID NO: 402 and the second polypeptide comprises an amino acid sequence at least 65%, at least 70%, at least 75%, at least 80%, at least 85%, at least 90%, at least 95%, at least 99%, or 100% identical to SEQ ID NO: 402.

[3533] In some aspects, the first polypeptide comprises an amino acid sequence at least 65%, at least 70%, at least 75%, at least 80%, at least 85%, at least 90%, at least 95%, at least 99%, or 100% identical to SEQ ID NO: 403 and the second polypeptide comprises an amino acid sequence at least 65%, at least 70%, at least 75%, at least 80%, at least 85%, at least 90%, at least 95%, at least 99%, or 100% identical to SEQ ID NO: 403.

[3534] In some aspects, the first polypeptide comprises an amino acid sequence at least 65%, at least 70%, at least 75%, at least 80%, at least 85%, at least 90%, at least 95%, at least 99%, or 100% identical to SEQ ID NO: 404 and the second polypeptide comprises an amino acid sequence at least 65%, at least 70%, at least 75%, at least 80%, at least 85%, at least 90%, at least 95%, at least 99%, or 100% identical to SEQ ID NO: 404.

[3535] In some aspects, the first polypeptide comprises an amino acid sequence at least 65%, at least 70%, at least 75%, at least 80%, at least 85%, at least 90%, at least 95%, at least 99%, or 100% identical to SEQ ID NO: 405 and the second polypeptide comprises an amino acid sequence at least 65%, at least 70%, at least 75%, at least 80%, at least 85%, at least 90%, at least 95%, at least 99%, or 100% identical to SEQ ID NO: 406.

[3536] In some aspects, the first polypeptide comprises an amino acid sequence at least 65%, at least 70%, at least 75%, at least 80%, at least 85%, at least 90%, at least 95%, at least 99%, or 100% identical to SEQ ID NO: 407 and the second polypeptide comprises an amino acid sequence at least 65%, at least 70%, at least 75%, at least 80%, at least 85%, at least 90%, at least 95%, at least 99%, or 100% identical to SEQ ID NO: 408.

[3537] In some aspects, the first polypeptide comprises an amino acid sequence at least 65%, at least 70%, at least 75%, at least 80%, at least 85%, at least 90%, at least 95%, at least 99%, or 100% identical to SEQ ID NO: 409 and the second polypeptide comprises an amino acid sequence at least 65%, at least 70%, at least 75%, at least 80%, at least 85%, at least 90%, at least 95%, at least 99%, or 100% identical to SEQ ID NO: 410.

[3538] In some aspects, the first polypeptide comprises an amino acid sequence at least 65%, at least 70%, at least 75%, at least 80%, at least 85%, at least 90%, at least 95%, at least 99%, or 100% identical to SEQ ID NO: 411 and the second polypeptide comprises an amino acid sequence at least 65%, at least 70%, at least 75%, at least 80%, at least 85%, at least 90%, at least 95%, at least 99%, or 100% identical to SEQ ID NO: 412.

[3539] In some aspects, the first polypeptide comprises an amino acid sequence at least 65%, at least 70%, at least 75%, at least 80%, at least 85%, at least 90%, at least 95%, at least 99%, or 100% identical to SEQ ID NO: 413 and the second polypeptide comprises an amino acid sequence at least 65%, at least 70%, at least 75%, at least 80%, at least 85%, at least 90%, at least 95%, at least 99%, or 100% identical to SEQ ID NO: 414.

[3540] In some aspects, the first polypeptide comprises an amino acid sequence at least 65%, at least 70%, at least 75%, at least 80%, at least 85%, at least 90%, at least 95%, at least 99%, or 100% identical to SEQ ID NO: 415 and the second polypeptide comprises an amino acid sequence at least 65%, at least 70%, at least 75%, at least 80%, at least 85%, at least 90%, at least 95%, at least 99%, or 100% identical to SEQ ID NO: 416.

[3541] In some aspects, the first polypeptide comprises an amino acid sequence at least 65%, at least 70%, at least 75%, at least 80%, at least 85%, at least 90%, at least 95%, at least 99%, or 100% identical to SEQ ID NO: 417 and the second polypeptide comprises an amino acid sequence at least 65%, at least 70%, at least 75%, at least 80%, at least 85%, at least 90%, at least 95%, at least 99%, or 100% identical to SEQ ID NO: 418.

[3542] In some aspects, the first polypeptide comprises an amino acid sequence at least 65%, at least 70%, at least 75%, at least 80%, at least 85%, at least 90%, at least 95%, at least 99%, or 100% identical to SEQ ID NO: 419 and the second polypeptide comprises an amino acid sequence at least 65%, at least 70%, at least 75%, at least 80%, at least 85%, at least 90%, at least 95%, at least 99%, or 100% identical to SEQ ID NO: 420.

[3543] In some aspects, the first polypeptide comprises an amino acid sequence at least 65%, at least 70%, at least 75%, at least 80%, at least 85%, at least 90%, at least 95%, at least 99%, or 100% identical to SEQ ID NO: 421 and the second polypeptide comprises an amino acid sequence at least 65%, at least 70%, at least 75%, at least 80%, at least 85%, at least 90%, at least 95%, at least 99%, or 100% identical to SEQ ID NO: 422.

[3544] In some aspects, the first polypeptide comprises an amino acid sequence at least 65%, at least 70%, at least 75%, at least 80%, at least 85%, at least 90%, at least 95%, at least 99%, or 100% identical to SEQ ID NO: 423 and the second polypeptide comprises an amino acid sequence at least 65%, at least 70%, at least 75%, at least 80%, at least 85%, at least 90%, at least 95%, at least 99%, or 100% identical to SEQ ID NO: 424.

[3545] In some aspects, the first polypeptide comprises an amino acid sequence at least 65%, at least 70%, at least 75%, at least 80%, at least 85%, at least 90%, at least 95%, at least 99%, or 100% identical to SEQ ID NO: 425 and the second polypeptide comprises an amino acid sequence at least 65%, at least 70%, at least 75%, at least 80%, at least 85%, at least 90%, at least 95%, at least 99%, or 100% identical to SEQ ID NO: 426.

[3546] In some aspects, the first polypeptide comprises an amino acid sequence at least 65%, at least 70%, at least 75%, at least 80%, at least 85%, at least 90%, at least 95%, at least 99%, or 100% identical to SEQ ID NO: 427 and the second polypeptide comprises an amino acid sequence at least 65%, at least 70%, at least 75%, at least 80%, at least 85%, at least 90%, at least 95%, at least 99%, or 100% identical to SEQ ID NO: 428.

[3547] In some aspects, the first polypeptide comprises an amino acid sequence at least 65%, at least 70%, at least 75%, at least 80%, at least 85%, at least 90%, at least 95%, at least 99%, or 100% identical to SEQ ID NO: 429 and the second polypeptide comprises an amino acid sequence at least 65%, at least 70%, at least 75%, at least 80%, at least 85%, at least 90%, at least 95%, at least 99%, or 100% identical to SEQ ID NO: 430.

[3548] In some aspects, the first polypeptide comprises an amino acid sequence at least 65%, at least 70%, at least 75%, at least 80%, at least 85%, at least 90%, at least 95%, at least 99%, or 100% identical to SEQ ID NO: 431 and the second polypeptide comprises an amino acid sequence at least 65%, at least 70%, at least 75%, at least 80%, at least 85%, at least 90%, at least 95%, at least 99%, or 100% identical to SEQ ID NO: 432.

[3549] In some aspects, the first polypeptide comprises an amino acid sequence at least 65%, at least 70%, at least 75%, at least 80%, at least 85%, at least 90%, at least 95%, at least 99%, or 100% identical to SEQ ID NO: 433 and the second polypeptide comprises an amino acid sequence at least 65%, at least 70%, at least 75%, at least 80%, at least 85%, at least 90%, at least 95%, at least 99%, or 100% identical to SEQ ID NO: 434.

[3550] In some aspects, the first polypeptide comprises an amino acid sequence at least 65%, at least 70%, at least 75%, at least 80%, at least 85%, at least 90%, at least 95%, at least 99%, or 100% identical to SEQ ID NO: 435 and the second polypeptide comprises an amino acid sequence at least 65%, at least 70%, at least 75%, at least 80%, at least 85%, at least 90%, at least 95%, at least 99%, or 100% identical to SEQ ID NO: 436.

[3551] In some aspects, the first polypeptide comprises an amino acid sequence at least 65%, at least 70%, at least 75%, at least 80%, at least 85%, at least 90%, at least 95%, at least 99%, or 100% identical to SEQ ID NO: 437 and the second polypeptide comprises an amino acid sequence at least 65%, at least 70%, at least 75%, at least 80%, at least 85%, at least 90%, at least 95%, at least 99%, or 100% identical to SEQ ID NO: 438.

[3552] In some aspects, the first polypeptide comprises an amino acid sequence at least 65%, at least 70%, at least 75%, at least 80%, at least 85%, at least 90%, at least 95%, at least 99%, or 100% identical to SEQ ID NO: 439 and the second polypeptide comprises an amino acid sequence at least 65%, at least 70%, at least 75%, at least 80%, at least 85%, at least 90%, at least 95%, at least 99%, or 100% identical to SEQ ID NO: 440.

[3553] In some aspects, the first polypeptide comprises an amino acid sequence at least 65%, at least 70%, at least 75%, at least 80%, at least 85%, at least 90%, at least 95%, at least 99%, or 100% identical to SEQ ID NO: 441 and the second polypeptide comprises an amino acid sequence at least 65%, at least 70%, at least 75%, at least 80%, at least 85%, at least 90%, at least 95%, at least 99%, or 100% identical to SEQ ID NO: 442.

[3554] In some aspects, the first polypeptide comprises an amino acid sequence at least 65%, at least 70%, at least 75%, at least 80%, at least 85%, at least 90%, at least 95%, at least 99%, or 100% identical to SEQ ID NO: 443 and the second polypeptide comprises an amino acid sequence at least 65%, at least 70%, at least 75%, at least 80%, at least 85%, at least 90%, at least 95%, at least 99%, or 100% identical to SEQ ID NO: 444.

[3555] In some aspects, the first polypeptide comprises an amino acid sequence at least 65%, at least 70%, at least 75%, at least 80%, at least 85%, at least 90%, at least 95%, at least 99%, or 100% identical to SEQ ID NO: 445 and the second polypeptide comprises an amino acid sequence at least 65%, at least 70%, at least 75%, at least 80%, at least 85%, at least 90%, at least 95%, at least 99%, or 100% identical to SEQ ID NO: 446.

[3556] In some aspects, the first polypeptide comprises an amino acid sequence at least 65%, at least 70%, at least 75%, at least 80%, at least 85%, at least 90%, at least 95%, at least 99%, or 100% identical to SEQ ID NO: 447 and the second polypeptide comprises an amino acid sequence at least 65%, at least 70%, at least 75%, at least 80%, at least 85%, at least 90%, at least 95%, at least 99%, or 100% identical to SEQ ID NO: 448.

[3557] In some aspects, the first polypeptide comprises an amino acid sequence at least 65%, at least 70%, at least 75%, at least 80%, at least 85%, at least 90%, at least 95%, at least 99%, or 100% identical to SEQ ID NO: 449 and the second polypeptide comprises an amino acid sequence at least 65%, at least 70%, at least 75%, at least 80%, at least 85%, at least 90%, at least 95%, at least 99%, or 100% identical to SEQ ID NO: 450.

[3558] In some aspects, the first polypeptide comprises an amino acid sequence at least 65%, at least 70%, at least 75%, at least 80%, at least 85%, at least 90%, at least 95%, at least 99%, or 100% identical to SEQ ID NO: 451 and the second polypeptide comprises an amino acid sequence at least 65%, at least 70%, at least 75%, at least 80%, at least 85%, at least 90%, at least 95%, at least 99%, or 100% identical to SEQ ID NO: 452.

[3559] In some aspects, the first polypeptide comprises an amino acid sequence at least 65%, at least 70%, at least 75%, at least 80%, at least 85%, at least 90%, at least 95%, at least 99%, or 100% identical to SEQ ID NO: 453 and the second polypeptide comprises an amino acid sequence at least 65%, at least 70%, at least 75%, at least 80%, at least 85%, at least 90%, at least 95%, at least 99%, or 100% identical to SEQ ID NO: 454.

[3560] In some aspects, the first polypeptide comprises an amino acid sequence at least 65%, at least 70%, at least 75%, at least 80%, at least 85%, at least 90%, at least 95%, at least 99%, or 100% identical to SEQ ID NO: 455 and the second polypeptide comprises an amino acid sequence at least 65%, at least 70%, at least 75%, at least 80%, at least 85%, at least 90%, at least 95%, at least 99%, or 100% identical to SEQ ID NO: 456.

[3561] In some aspects, the first polypeptide comprises an amino acid sequence at least 65%, at least 70%, at least 75%, at least 80%, at least 85%, at least 90%, at least 95%, at least 99%, or 100% identical to SEQ ID NO: 457 and the second polypeptide comprises an amino acid sequence at least 65%, at least 70%, at least 75%, at least 80%, at least 85%, at least 90%, at least 95%, at least 99%, or 100% identical to SEQ ID NO: 458.

[3562] In some aspects, the first polypeptide comprises an amino acid sequence at least 65%, at least 70%, at least 75%, at least 80%, at least 85%, at least 90%, at least 95%, at least 99%, or 100% identical to SEQ ID NO: 459 and the second polypeptide comprises an amino acid sequence at least 65%, at least 70%, at least 75%, at least 80%, at least 85%, at least 90%, at least 95%, at least 99%, or 100% identical to SEQ ID NO: 460.

[3563] In some aspects, the first polypeptide comprises an amino acid sequence at least 65%, at least 70%, at least 75%, at least 80%, at least 85%, at least 90%, at least 95%, at least 99%, or 100% identical to SEQ ID NO: 461 and the second polypeptide comprises an amino acid sequence at least 65%, at least 70%, at least 75%, at least 80%, at least 85%, at least 90%, at least 95%, at least 99%, or 100% identical to SEQ ID NO: 462.

[3564] In some aspects, the first polypeptide comprises an amino acid sequence at least 65%, at least 70%, at least 75%, at least 80%, at least 85%, at least 90%, at least 95%, at least 99%, or 100% identical to SEQ ID NO: 463 and the second polypeptide comprises an amino acid sequence at least 65%, at least 70%, at least 75%, at least 80%, at least 85%, at least 90%, at least 95%, at least 99%, or 100% identical to SEQ ID NO: 464.

[3565] In some aspects, the first polypeptide comprises an amino acid sequence at least 65%, at least 70%, at least 75%, at least 80%, at least 85%, at least 90%, at least 95%, at least 99%, or 100% identical to SEQ ID NO: 465 and the second polypeptide comprises an amino acid sequence at least 65%, at least 70%, at least 75%, at least 80%, at least 85%, at least 90%, at least 95%, at least 99%, or 100% identical to SEQ ID NO: 466.

[3566] In some aspects, the first polypeptide comprises an amino acid sequence at least 65%, at least 70%, at least 75%, at least 80%, at least 85%, at least 90%, at least 95%, at least 99%, or 100% identical to SEQ ID NO: 467 and the second polypeptide comprises an amino acid sequence at least 65%, at least 70%, at least 75%, at least 80%, at least 85%, at least 90%, at least 95%, at least 99%, or 100% identical to SEQ ID NO: 468.

[3567] In some aspects, the first polypeptide comprises an amino acid sequence at least 65%, at least 70%, at least 75%, at least 80%, at least 85%, at least 90%, at least 95%, at least 99%, or 100% identical to SEQ ID NO: 469 and the second polypeptide comprises an amino acid sequence at least 65%, at least 70%, at least 75%, at least 80%, at least 85%, at least 90%, at least 95%, at least 99%, or 100% identical to SEQ ID NO: 469.

[3568] In some aspects, the first polypeptide comprises an amino acid sequence at least 65%, at least 70%, at least 75%, at least 80%, at least 85%, at least 90%, at least 95%, at least 99%, or 100% identical to SEQ ID NO: 470 and the second polypeptide comprises an amino acid sequence at least 65%, at least 70%, at least 75%, at least 80%, at least 85%, at least 90%, at least 95%, at least 99%, or 100% identical to SEQ ID NO: 470.

[3569] In some aspects, the first polypeptide comprises an amino acid sequence at least 65%, at least 70%, at least 75%, at least 80%, at least 85%, at least 90%, at least 95%, at least 99%, or 100% identical to SEQ ID NO: 471 and the second polypeptide comprises an amino acid sequence at least 65%, at least 70%, at least 75%, at least 80%, at least 85%, at least 90%, at least 95%, at least 99%, or 100% identical to SEQ ID NO: 471.

[3570] In some aspects, the first polypeptide comprises an amino acid sequence at least 65%, at least 70%, at least 75%, at least 80%, at least 85%, at least 90%, at least 95%, at least 99%, or 100% identical to SEQ ID NO: 472 and the second polypeptide comprises an amino acid sequence at least 65%, at least 70%, at least 75%, at least 80%, at least 85%, at least 90%, at least 95%, at least 99%, or 100% identical to SEQ ID NO: 473.

[3571] In some aspects, the first polypeptide comprises an amino acid sequence at least 65%, at least 70%, at least 75%, at least 80%, at least 85%, at least 90%, at least 95%, at least 99%, or 100% identical to SEQ ID NO: 474 and the second polypeptide comprises an amino acid sequence at least 65%, at least 70%, at least 75%, at least 80%, at least 85%, at least 90%, at least 95%, at least 99%, or 100% identical to SEQ ID NO: 475.

[3572] In some aspects, the first polypeptide comprises an amino acid sequence at least 65%, at least 70%, at least 75%, at least 80%, at least 85%, at least 90%, at least 95%, at least 99%, or 100% identical to SEQ ID NO: 476 and the second polypeptide comprises an amino acid sequence at least 65%, at least 70%, at least 75%, at least 80%, at least 85%, at least 90%, at least 95%, at least 99%, or 100% identical to SEQ ID NO: 477.

[3573] In some aspects, the first polypeptide comprises an amino acid sequence at least 65%, at least 70%, at least 75%, at least 80%, at least 85%, at least 90%, at least 95%, at least 99%, or 100% identical to SEQ ID NO: 478 and the second polypeptide comprises an amino acid sequence at least 65%, at least 70%, at least 75%, at least 80%, at least 85%, at least 90%, at least 95%, at least 99%, or 100% identical to SEQ ID NO: 478.

[3574] In some aspects, the first polypeptide comprises an amino acid sequence at least 65%, at least 70%, at least 75%, at least 80%, at least 85%, at least 90%, at least 95%, at least 99%, or 100% identical to SEQ ID NO: 479 and the second polypeptide comprises an amino acid sequence at least 65%, at least 70%, at least 75%, at least 80%, at least 85%, at least 90%, at least 95%, at least 99%, or 100% identical to SEQ ID NO: 479.

[3575] In some aspects, the first polypeptide comprises an amino acid sequence at least 65%, at least 70%, at least 75%, at least 80%, at least 85%, at least 90%, at least 95%, at least 99%, or 100% identical to SEQ ID NO: 480 and the second polypeptide comprises an amino acid sequence at least 65%, at least 70%, at least 75%, at least 80%, at least 85%, at least 90%, at least 95%, at least 99%, or 100% identical to SEQ ID NO: 480.

[3576] In some aspects, the first polypeptide comprises an amino acid sequence at least 65%, at least 70%, at least 75%, at least 80%, at least 85%, at least 90%, at least 95%, at least 99%, or 100% identical to SEQ ID NO: 481 and the second polypeptide comprises an amino acid sequence at least 65%, at least 70%, at least 75%, at least 80%, at least 85%, at least 90%, at least 95%, at least 99%, or 100% identical to SEQ ID NO: 481.

[3577] In some aspects, the first polypeptide comprises an amino acid sequence at least 65%, at least 70%, at least 75%, at least 80%, at least 85%, at least 90%, at least 95%, at least 99%, or 100% identical to SEQ ID NO: 482 and the second polypeptide comprises an amino acid sequence at least 65%, at least 70%, at least 75%, at least 80%, at least 85%, at least 90%, at least 95%, at least 99%, or 100% identical to SEQ ID NO: 482.

[3578] In some aspects, the first polypeptide comprises an amino acid sequence at least 65%, at least 70%, at least 75%, at least 80%, at least 85%, at least 90%, at least 95%, at least 99%, or 100% identical to SEQ ID NO: 483 and the second polypeptide comprises an amino acid sequence at least 65%, at least 70%, at least 75%, at least 80%, at least 85%, at least 90%, at least 95%, at least 99%, or 100% identical to SEQ ID NO: 483.

[3579] In some aspects, the first polypeptide comprises an amino acid sequence at least 65%, at least 70%, at least 75%, at least 80%, at least 85%, at least 90%, at least 95%, at least 99%, or 100% identical to SEQ ID NO: 484 and the second polypeptide comprises an amino acid sequence at least 65%, at least 70%, at least 75%, at least 80%, at least 85%, at least 90%, at least 95%, at least 99%, or 100% identical to SEQ ID NO: 484.

[3580] In some aspects, the first polypeptide comprises an amino acid sequence at least 65%, at least 70%, at least 75%, at least 80%, at least 85%, at least 90%, at least 95%, at least 99%, or 100% identical to SEQ ID NO: 485 and the second polypeptide comprises an amino acid sequence at least 65%, at least 70%, at least 75%, at least 80%, at least 85%, at least 90%, at least 95%, at least 99%, or 100% identical to SEQ ID NO: 486.

[3581] In some aspects, the first polypeptide comprises an amino acid sequence at least 65%, at least 70%, at least 75%, at least 80%, at least 85%, at least 90%, at least 95%, at least 99%, or 100% identical to SEQ ID NO: 487 and the second polypeptide comprises an amino acid sequence at least 65%, at least 70%, at least 75%, at least 80%, at least 85%, at least 90%, at least 95%, at least 99%, or 100% identical to SEQ ID NO: 488.

[3582] In some aspects, the first polypeptide comprises an amino acid sequence at least 65%, at least 70%, at least 75%, at least 80%, at least 85%, at least 90%, at least 95%, at least 99%, or 100% identical to SEQ ID NO: 489 and the second polypeptide comprises an amino acid sequence at least 65%, at least 70%, at least 75%, at least 80%, at least 85%, at least 90%, at least 95%, at least 99%, or 100% identical to SEQ ID NO: 490.

[3583] In some aspects, the first polypeptide comprises an amino acid sequence at least 65%, at least 70%, at least 75%, at least 80%, at least 85%, at least 90%, at least 95%, at least 99%, or 100% identical to SEQ ID NO: 491 and the second polypeptide comprises an amino acid sequence at least 65%, at least 70%, at least 75%, at least 80%, at least 85%, at least 90%, at least 95%, at least 99%, or 100% identical to SEQ ID NO: 492.

[3584] In some aspects, the first polypeptide comprises an amino acid sequence at least 65%, at least 70%, at least 75%, at least 80%, at least 85%, at least 90%, at least 95%, at least 99%, or 100% identical to SEQ ID NO: 493 and the second polypeptide comprises an amino acid sequence at least 65%, at least 70%, at least 75%, at least 80%, at least 85%, at least 90%, at least 95%, at least 99%, or 100% identical to SEQ ID NO: 494.

[3585] In some aspects, the first polypeptide comprises an amino acid sequence at least 65%, at least 70%, at least 75%, at least 80%, at least 85%, at least 90%, at least 95%, at least 99%, or 100% identical to SEQ ID NO: 495 and the second polypeptide comprises an amino acid sequence at least 65%, at least 70%, at least 75%, at least 80%, at least 85%, at least 90%, at least 95%, at least 99%, or 100% identical to SEQ ID NO: 496.

[3586] In some aspects, the first polypeptide comprises an amino acid sequence at least 65%, at least 70%, at least 75%, at least 80%, at least 85%, at least 90%, at least 95%, at least 99%, or 100% identical to SEQ ID NO: 497 and the second polypeptide comprises an amino acid sequence at least 65%, at least 70%, at least 75%, at least 80%, at least 85%, at least 90%, at least 95%, at least 99%, or 100% identical to SEQ ID NO: 498.

[3587] In some aspects, the first polypeptide comprises an amino acid sequence at least 65%, at least 70%, at least 75%, at least 80%, at least 85%, at least 90%, at least 95%, at least 99%, or 100% identical to SEQ ID NO: 499 and the second polypeptide comprises an amino acid sequence at least 65%, at least 70%, at least 75%, at least 80%, at least 85%, at least 90%, at least 95%, at least 99%, or 100% identical to SEQ ID NO: 500.

[3588] In some aspects, the first polypeptide comprises an amino acid sequence at least 65%, at least 70%, at least 75%, at least 80%, at least 85%, at least 90%, at least 95%, at least 99%, or 100% identical to SEQ ID NO: 501 and the second polypeptide comprises an amino acid sequence at least 65%, at least 70%, at least 75%, at least 80%, at least 85%, at least 90%, at least 95%, at least 99%, or 100% identical to SEQ ID NO: 502.

[3589] In some aspects, the first polypeptide comprises an amino acid sequence at least 65%, at least 70%, at least 75%, at least 80%, at least 85%, at least 90%, at least 95%, at least 99%, or 100% identical to SEQ ID NO: 632 and the second polypeptide comprises an amino acid sequence at least 65%, at least 70%, at least 75%, at least 80%, at least 85%, at least 90%, at least 95%, at least 99%, or 100% identical to SEQ ID NO: 633.

[3590] In some aspects, the first polypeptide comprises an amino acid sequence at least 65%, at least 70%, at least 75%, at least 80%, at least 85%, at least 90%, at least 95%, at least 99%, or 100% identical to SEQ ID NO: 720 and the second polypeptide comprises an amino acid sequence at least 65%, at least 70%, at least 75%, at least 80%, at least 85%, at least 90%, at least 95%, at least 99%, or 100% identical to SEQ ID NO: 721.

[3591] In some aspects, the first polypeptide comprises an amino acid sequence at least 65%, at least 70%, at least 75%, at least 80%, at least 85%, at least 90%, at least 95%, at least 99%, or 100% identical to SEQ ID NO: 724 and the second polypeptide comprises an amino acid sequence at least 65%, at least 70%, at least 75%, at least 80%, at least 85%, at least 90%, at least 95%, at least 99%, or 100% identical to SEQ ID NO: 725.

[3592] In some aspects, the first polypeptide comprises an amino acid sequence at least 65%, at least 70%, at least 75%, at least 80%, at least 85%, at least 90%, at least 95%, at least 99%, or 100% identical to SEQ ID NO: 728 and the second polypeptide comprises an amino acid sequence at least 65%, at least 70%, at least 75%, at least 80%, at least 85%, at least 90%, at least 95%, at least 99%, or 100% identical to SEQ ID NO: 729.

[3593] In some aspects, the first polypeptide comprises an amino acid sequence at least 65%, at least 70%, at least 75%, at least 80%, at least 85%, at least 90%, at least 95%, at least 99%, or 100% identical to SEQ ID NO: 732 and the second polypeptide comprises an amino acid sequence at least 65%, at least 70%, at least 75%, at least 80%, at least 85%, at least 90%, at least 95%, at least 99%, or 100% identical to SEQ ID NO: 733.

[3594] In some aspects, the first polypeptide comprises an amino acid sequence at least 65%, at least 70%, at least 75%, at least 80%, at least 85%, at least 90%, at least 95%, at least 99%, or 100% identical to SEQ ID NO: 736 and the second polypeptide comprises an amino acid sequence at least 65%, at least 70%, at least 75%, at least 80%, at least 85%, at least 90%, at least 95%, at least 99%, or 100% identical to SEQ ID NO: 737.

[3595] In some aspects, the first polypeptide comprises an amino acid sequence at least 65%, at least 70%, at least 75%, at least 80%, at least 85%, at least 90%, at least 95%, at least 99%, or 100% identical to SEQ ID NO: 740 and the second polypeptide comprises an amino acid sequence at least 65%, at least 70%, at least 75%, at least 80%, at least 85%, at least 90%, at least 95%, at least 99%, or 100% identical to SEQ ID NO: 741.

[3596] In some aspects, the first polypeptide comprises an amino acid sequence at least 65%, at least 70%, at least 75%, at least 80%, at least 85%, at least 90%, at least 95%, at least 99%, or 100% identical to SEQ ID NO: 744 and the second polypeptide comprises an amino acid sequence at least 65%, at least 70%, at least 75%, at least 80%, at least 85%, at least 90%, at least 95%, at least 99%, or 100% identical to SEQ ID NO: 745.

[3597] In some aspects, the first polypeptide comprises an amino acid sequence at least 65%, at least 70%, at least 75%, at least 80%, at least 85%, at least 90%, at least 95%, at least 99%, or 100% identical to SEQ ID NO: 748 and the second polypeptide comprises an amino acid sequence at least 65%, at least 70%, at least 75%, at least 80%, at least 85%, at least 90%, at least 95%, at least 99%, or 100% identical to SEQ ID NO: 749.

[3598] In some aspects, the first polypeptide comprises an amino acid sequence at least 65%, at least 70%, at least 75%, at least 80%, at least 85%, at least 90%, at least 95%, at least 99%, or 100% identical to SEQ ID NO: 752 and the second polypeptide comprises an amino acid sequence at least 65%, at least 70%, at least 75%, at least 80%, at least 85%, at least 90%, at least 95%, at least 99%, or 100% identical to SEQ ID NO: 753.

[3599] In some aspects, the first polypeptide comprises an amino acid sequence at least 65%, at least 70%, at least 75%, at least 80%, at least 85%, at least 90%, at least 95%, at least 99%, or 100% identical to SEQ ID NO: 760 and the second polypeptide comprises an amino acid sequence at least 65%, at least 70%, at least 75%, at least 80%, at least 85%, at least 90%, at least 95%, at least 99%, or 100% identical to SEQ ID NO: 761.

[3600] In some aspects, the first polypeptide comprises an amino acid sequence at least 65%, at least 70%, at least 75%, at least 80%, at least 85%, at least 90%, at least 95%, at least 99%, or 100% identical to SEQ ID NO: 887 and the second polypeptide comprises an amino acid sequence at least 65%, at least 70%, at least 75%, at least 80%, at least 85%, at least 90%, at least 95%, at least 99%, or 100% identical to SEQ ID NO: 888.

[3601] In some aspects, the first polypeptide comprises an amino acid sequence at least 65%, at least 70%, at least 75%, at least 80%, at least 85%, at least 90%, at least 95%, at least 99%, or 100% identical to SEQ ID NO: 889 and the second polypeptide comprises an amino acid sequence at least 65%, at least 70%, at least 75%, at least 80%, at least 85%, at least 90%, at least 95%, at least 99%, or 100% identical to SEQ ID NO: 900.

[3602] In some aspects, the first polypeptide comprises an amino acid sequence at least 65%, at least 70%, at least 75%, at least 80%, at least 85%, at least 90%, at least 95%, at least 99%, or 100% identical to SEQ ID NO: 891 and the second polypeptide comprises an amino acid sequence at least 65%, at least 70%, at least 75%, at least 80%, at least 85%, at least 90%, at least 95%, at least 99%, or 100% identical to SEQ ID NO: 892.

[3603] In some aspects, the first polypeptide comprises an amino acid sequence at least 65%, at least 70%, at least 75%, at least 80%, at least 85%, at least 90%, at least 95%, at least 99%, or 100% identical to SEQ ID NO: 893 and the second polypeptide comprises an amino acid sequence at least 65%, at least 70%, at least 75%, at least 80%, at least 85%, at least 90%, at least 95%, at least 99%, or 100% identical to SEQ ID NO: 894.

[3604] In some aspects, the first polypeptide comprises an amino acid sequence at least 65%, at least 70%, at least 75%, at least 80%, at least 85%, at least 90%, at least 95%, at least 99%, or 100% identical to SEQ ID NO: 895 and the second polypeptide comprises an amino acid sequence at least 65%, at least 70%, at least 75%, at least 80%, at least 85%, at least 90%, at least 95%, at least 99%, or 100% identical to SEQ ID NO: 896.

[3605] In some aspects, the first polypeptide comprises an amino acid sequence at least 65%, at least 70%, at least 75%, at least 80%, at least 85%, at least 90%, at least 95%, at least 99%, or 100% identical to SEQ ID NO: 897 and the second polypeptide comprises an amino acid sequence at least 65%, at least 70%, at least 75%, at least 80%, at least 85%, at least 90%, at least 95%, at least 99%, or 100% identical to SEQ ID NO: 898.

[3606] In some aspects, the first polypeptide comprises an amino acid sequence at least 65%, at least 70%, at least 75%, at least 80%, at least 85%, at least 90%, at least 95%, at least 99%, or 100% identical to SEQ ID NO: 899 and the second polypeptide comprises an amino acid sequence at least 65%, at least 70%, at least 75%, at least 80%, at least 85%, at least 90%, at least 95%, at least 99%, or 100% identical to SEQ ID NO: 900.

[3607] In some aspects, the first polypeptide comprises an amino acid sequence at least 65%, at least 70%, at least 75%, at least 80%, at least 85%, at least 90%, at least 95%, at least 99%, or 100% identical to SEQ ID NO: 901 and the second polypeptide comprises an amino acid sequence at least 65%, at least 70%, at least 75%, at least 80%, at least 85%, at least 90%, at least 95%, at least 99%, or 100% identical to SEQ ID NO: 902.

[3608] In some aspects, the first polypeptide comprises an amino acid sequence at least 65%, at least 70%, at least 75%, at least 80%, at least 85%, at least 90%, at least 95%, at least 99%, or 100% identical to SEQ ID NO: 903 and the second polypeptide comprises an amino acid sequence at least 65%, at least 70%, at least 75%, at least 80%, at least 85%, at least 90%, at least 95%, at least 99%, or 100% identical to SEQ ID NO: 904.

[3609] In some aspects, the first polypeptide comprises an amino acid sequence at least 65%, at least 70%, at least 75%, at least 80%, at least 85%, at least 90%, at least 95%, at least 99%, or 100% identical to SEQ ID NO: 905 and the second polypeptide comprises an amino acid sequence at least 65%, at least 70%, at least 75%, at least 80%, at least 85%, at least 90%, at least 95%, at least 99%, or 100% identical to SEQ ID NO: 906.

[3610] In some aspects, the first polypeptide comprises an amino acid sequence at least 65%, at least 70%, at least 75%, at least 80%, at least 85%, at least 90%, at least 95%, at least 99%, or 100% identical to SEQ ID NO: 907 and the second polypeptide comprises an amino acid sequence at least 65%, at least 70%, at least 75%, at least 80%, at least 85%, at least 90%, at least 95%, at least 99%, or 100% identical to SEQ ID NO: 908.

[3611] In some aspects, the first polypeptide comprises an amino acid sequence at least 65%, at least 70%, at least 75%, at least 80%, at least 85%, at least 90%, at least 95%, at least 99%, or 100% identical to SEQ ID NO: 909 and the second polypeptide comprises an amino acid sequence at least 65%, at least 70%, at least 75%, at least 80%, at least 85%, at least 90%, at least 95%, at least 99%, or 100% identical to SEQ ID NO: 910.

[3612] In some aspects, the first polypeptide comprises an amino acid sequence at least 65%, at least 70%, at least 75%, at least 80%, at least 85%, at least 90%, at least 95%, at least 99%, or 100% identical to SEQ ID NO: 911 and the second polypeptide comprises an amino acid sequence at least 65%, at least 70%, at least 75%, at least 80%, at least 85%, at least 90%, at least 95%, at least 99%, or 100% identical to SEQ ID NO: 912.

[3613] In some aspects, the first polypeptide comprises an amino acid sequence at least 65%, at least 70%, at least 75%, at least 80%, at least 85%, at least 90%, at least 95%, at least 99%, or 100% identical to SEQ ID NO: 913 and the second polypeptide comprises an amino acid sequence at least 65%, at least 70%, at least 75%, at least 80%, at least 85%, at least 90%, at least 95%, at least 99%, or 100% identical to SEQ ID NO: 914.

[3614] In some aspects, the first polypeptide comprises an amino acid sequence at least 65%, at least 70%, at least 75%, at least 80%, at least 85%, at least 90%, at least 95%, at least 99%, or 100% identical to SEQ ID NO: 915 and the second polypeptide comprises an amino acid sequence at least 65%, at least 70%, at least 75%, at least 80%, at least 85%, at least 90%, at least 95%, at least 99%, or 100% identical to SEQ ID NO: 916.

[3615] In some aspects, the first polypeptide comprises an amino acid sequence at least 65%, at least 70%, at least 75%, at least 80%, at least 85%, at least 90%, at least 95%, at least 99%, or 100% identical to SEQ ID NO: 917 and the second polypeptide comprises an amino acid sequence at least 65%, at least 70%, at least 75%, at least 80%, at least 85%, at least 90%, at least 95%, at least 99%, or 100% identical to SEQ ID NO: 918.

[3616] In some aspects, the first polypeptide comprises an amino acid sequence at least 65%, at least 70%, at least 75%, at least 80%, at least 85%, at least 90%, at least 95%, at least 99%, or 100% identical to SEQ ID NO: 919 and the second polypeptide comprises an amino acid sequence at least 65%, at least 70%, at least 75%, at least 80%, at least 85%, at least 90%, at least 95%, at least 99%, or 100% identical to SEQ ID NO: 920.

[3617] In some aspects, the first polypeptide comprises an amino acid sequence at least 65%, at least 70%, at least 75%, at least 80%, at least 85%, at least 90%, at least 95%, at least 99%, or 100% identical to SEQ ID NO: 921 and the second polypeptide comprises an amino acid sequence at least 65%, at least 70%, at least 75%, at least 80%, at least 85%, at least 90%, at least 95%, at least 99%, or 100% identical to SEQ ID NO: 922.

[3618] In some aspects, the first polypeptide comprises an amino acid sequence at least 65%, at least 70%, at least 75%, at least 80%, at least 85%, at least 90%, at least 95%, at least 99%, or 100% identical to SEQ ID NO: 923 and the second polypeptide comprises an amino acid sequence at least 65%, at least 70%, at least 75%, at least 80%, at least 85%, at least 90%, at least 95%, at least 99%, or 100% identical to SEQ ID NO: 924.

[3619] In some aspects, the first polypeptide comprises an amino acid sequence at least 65%, at least 70%, at least 75%, at least 80%, at least 85%, at least 90%, at least 95%, at least 99%, or 100% identical to SEQ ID NO: 925 and the second polypeptide comprises an amino acid sequence at least 65%, at least 70%, at least 75%, at least 80%, at least 85%, at least 90%, at least 95%, at least 99%, or 100% identical to SEQ ID NO: 926.

[3620] In some aspects, the first polypeptide comprises an amino acid sequence at least 65%, at least 70%, at least 75%, at least 80%, at least 85%, at least 90%, at least 95%, at least 99%, or 100% identical to SEQ ID NO: 972 and the second polypeptide comprises an amino acid sequence at least 65%, at least 70%, at least 75%, at least 80%, at least 85%, at least 90%, at least 95%, at least 99%, or 100% identical to SEQ ID NO: 972.

[3621] In some aspects, the first polypeptide comprises an amino acid sequence at least 65%, at least 70%, at least 75%, at least 80%, at least 85%, at least 90%, at least 95%, at least 99%, or 100% identical to SEQ ID NO: 973 and the second polypeptide comprises an amino acid sequence at least 65%, at least 70%, at least 75%, at least 80%, at least 85%, at least 90%, at least 95%, at least 99%, or 100% identical to SEQ ID NO: 973.

[3622] In some aspects, the first polypeptide comprises an amino acid sequence at least 65%, at least 70%, at least 75%, at least 80%, at least 85%, at least 90%, at least 95%, at least 99%, or 100% identical to SEQ ID NO: 974 and the second polypeptide comprises an amino acid sequence at least 65%, at least 70%, at least 75%, at least 80%, at least 85%, at least 90%, at least 95%, at least 99%, or 100% identical to SEQ ID NO: 974.

[3623] In some aspects, the first polypeptide comprises an amino acid sequence at least 65%, at least 70%, at least 75%, at least 80%, at least 85%, at least 90%, at least 95%, at least 99%, or 100% identical to SEQ ID NO: 975 and the second polypeptide comprises an amino acid sequence at least 65%, at least 70%, at least 75%, at least 80%, at least 85%, at least 90%, at least 95%, at least 99%, or 100% identical to SEQ ID NO: 975.

[3624] In some aspects, the first polypeptide comprises an amino acid sequence at least 65%, at least 70%, at least 75%, at least 80%, at least 85%, at least 90%, at least 95%, at least 99%, or 100% identical to SEQ ID NO: 976 and the second polypeptide comprises an amino acid sequence at least 65%, at least 70%, at least 75%, at least 80%, at least 85%, at least 90%, at least 95%, at least 99%, or 100% identical to SEQ ID NO: 976.

[3625] In some aspects, the first polypeptide comprises an amino acid sequence at least 65%, at least 70%, at least 75%, at least 80%, at least 85%, at least 90%, at least 95%, at least 99%, or 100% identical to SEQ ID NO: 977 and the second polypeptide comprises an amino acid sequence at least 65%, at least 70%, at least 75%, at least 80%, at least 85%, at least 90%, at least 95%, at least 99%, or 100% identical to SEQ ID NO: 977.

[3626] In some aspects, the first polypeptide comprises an amino acid sequence at least 65%, at least 70%, at least 75%, at least 80%, at least 85%, at least 90%, at least 95%, at least 99%, or 100% identical to SEQ ID NO: 984 and the second polypeptide comprises an amino acid sequence at least 65%, at least 70%, at least 75%, at least 80%, at least 85%, at least 90%, at least 95%, at least 99%, or 100% identical to SEQ ID NO: 985.

[3627] In some aspects, the first polypeptide comprises an amino acid sequence at least 65%, at least 70%, at least 75%, at least 80%, at least 85%, at least 90%, at least 95%, at least 99%, or 100% identical to SEQ ID NO: 989 and the second polypeptide comprises an amino acid sequence at least 65%, at least 70%, at least 75%, at least 80%, at least 85%, at least 90%, at least 95%, at least 99%, or 100% identical to SEQ ID NO: 990.

[3628] In some aspects, the first polypeptide comprises an amino acid sequence at least 65%, at least 70%, at least 75%, at least 80%, at least 85%, at least 90%, at least 95%, at least 99%, or 100% identical to SEQ ID NO: 993 and the second polypeptide comprises an amino acid sequence at least 65%, at least 70%, at least 75%, at least 80%, at least 85%, at least 90%, at least 95%, at least 99%, or 100% identical to SEQ ID NO: 994.

[3629] In some aspects, the first polypeptide comprises an amino acid sequence at least 65%, at least 70%, at least 75%, at least 80%, at least 85%, at least 90%, at least 95%, at least 99%, or 100% identical to SEQ ID NO: 997 and the second polypeptide comprises an amino acid sequence at least 65%, at least 70%, at least 75%, at least 80%, at least 85%, at least 90%, at least 95%, at least 99%, or 100% identical to SEQ ID NO: 998.

[3630] In some aspects, the first polypeptide comprises an amino acid sequence at least 65%, at least 70%, at least 75%, at least 80%, at least 85%, at least 90%, at least 95%, at least 99%, or 100% identical to SEQ ID NO: 1001 and the second polypeptide comprises an amino acid sequence at least 65%, at least 70%, at least 75%, at least 80%, at least 85%, at least 90%, at least 95%, at least 99%, or 100% identical to SEQ ID NO: 1002.

[3631] In some aspects, the first polypeptide comprises an amino acid sequence at least 65%, at least 70%, at least 75%, at least 80%, at least 85%, at least 90%, at least 95%, at least 99%, or 100% identical to SEQ ID NO: 1005 and the second polypeptide comprises an amino acid sequence at least 65%, at least 70%, at least 75%, at least 80%, at least 85%, at least 90%, at least 95%, at least 99%, or 100% identical to SEQ ID NO: 1006.

[3632] In some aspects, the first polypeptide comprises an amino acid sequence at least 65%, at least 70%, at least 75%, at least 80%, at least 85%, at least 90%, at least 95%, at least 99%, or 100% identical to SEQ ID NO: 1009 and the second polypeptide comprises an amino acid sequence at least 65%, at least 70%, at least 75%, at least 80%, at least 85%, at least 90%, at least 95%, at least 99%, or 100% identical to SEQ ID NO: 1010.

[3633] In some aspects, the first polypeptide comprises an amino acid sequence at least 65%, at least 70%, at least 75%, at least 80%, at least 85%, at least 90%, at least 95%, at least 99%, or 100% identical to SEQ ID NO: 1013 and the second polypeptide comprises an amino acid sequence at least 65%, at least 70%, at least 75%, at least 80%, at least 85%, at least 90%, at least 95%, at least 99%, or 100% identical to SEQ ID NO: 1014.

[3634] In some aspects, the first polypeptide comprises an amino acid sequence at least 65%, at least 70%, at least 75%, at least 80%, at least 85%, at least 90%, at least 95%, at least 99%, or 100% identical to SEQ ID NO: 1017 and the second polypeptide comprises an amino acid sequence at least 65%, at least 70%, at least 75%, at least 80%, at least 85%, at least 90%, at least 95%, at least 99%, or 100% identical to SEQ ID NO: 1018.

[3635] In some aspects, the first polypeptide comprises an amino acid sequence at least 65%, at least 70%, at least 75%, at least 80%, at least 85%, at least 90%, at least 95%, at least 99%, or 100% identical to SEQ ID NO: 1021 and the second polypeptide comprises an amino acid sequence at least 65%, at least 70%, at least 75%, at least 80%, at least 85%, at least 90%, at least 95%, at least 99%, or 100% identical to SEQ ID NO: 1022.

[3636] In some aspects, the first polypeptide comprises an amino acid sequence at least 65%, at least 70%, at least 75%, at least 80%, at least 85%, at least 90%, at least 95%, at least 99%, or 100% identical to SEQ ID NO: 1025 and the second polypeptide comprises an amino acid sequence at least 65%, at least 70%, at least 75%, at least 80%, at least 85%, at least 90%, at least 95%, at least 99%, or 100% identical to SEQ ID NO: 1026.

[3637] In some aspects, the first polypeptide comprises an amino acid sequence at least 65%, at least 70%, at least 75%, at least 80%, at least 85%, at least 90%, at least 95%, at least 99%, or 100% identical to SEQ ID NO: 1029 and the second polypeptide comprises an amino acid sequence at least 65%, at least 70%, at least 75%, at least 80%, at least 85%, at least 90%, at least 95%, at least 99%, or 100% identical to SEQ ID NO: 1030.

[3638] In some aspects, the first polypeptide comprises an amino acid sequence at least 65%, at least 70%, at least 75%, at least 80%, at least 85%, at least 90%, at least 95%, at least 99%, or 100% identical to SEQ ID NO: 1033 and the second polypeptide comprises an amino acid sequence at least 65%, at least 70%, at least 75%, at least 80%, at least 85%, at least 90%, at least 95%, at least 99%, or 100% identical to SEQ ID NO: 1034.

[3639] In some aspects, the first polypeptide comprises an amino acid sequence at least 65%, at least 70%, at least 75%, at least 80%, at least 85%, at least 90%, at least 95%, at least 99%, or 100% identical to SEQ ID NO: 1037 and the second polypeptide comprises an amino acid sequence at least 65%, at least 70%, at least 75%, at least 80%, at least 85%, at least 90%, at least 95%, at least 99%, or 100% identical to SEQ ID NO: 1038.

[3640] In some aspects, the first polypeptide comprises an amino acid sequence at least 65%, at least 70%, at least 75%, at least 80%, at least 85%, at least 90%, at least 95%, at least 99%, or 100% identical to SEQ ID NO: 1041 and the second polypeptide comprises an amino acid sequence at least 65%, at least 70%, at least 75%, at least 80%, at least 85%, at least 90%, at least 95%, at least 99%, or 100% identical to SEQ ID NO: 1042.

[3641] In some aspects, the antigen binding polypeptides or the antigen binding polypeptide complexes disclosed herein, comprise one or more optional linkers. The one or more optional linkers are indicated herein as Ln, wherein n is an integer, and the integer next to each L indicates each L comprised in the antigen binding polypeptides or the antigen binding polypeptide complexes disclosed herein. For example, if an antigen binding polypeptide disclosed herein comprises two linkers, the first linker from N-terminus to C-terminus is herein indicated as L1, and the second linker from N-terminus to C-terminus is herein indicated as L2. If an antigen binding polypeptide complex disclosed herein comprises a first antigen binding polypeptide comprising two linkers, indicated herein as L1 and L2, as explained above, the linkers comprised in the second antigen binding polypeptide are indicated with the following integer, in this example, the first linker from N-terminus to C-terminus of the second antigen binding polypeptide is herein indicated as L3, the second linker from N-terminus to C-terminus of the second antigen binding polypeptide is herein indicated as L3.

[3642] In some aspects, any one of the optional linkers each independently have a length of from 0 amino acids to about 50 amino acids. In some aspects, any one of the optional linkers each independently have a length of from 5 amino acids to about 40 amino acids.

[3643] In some aspects, any one of the optional linkers are non-immunogenic. In some aspects, any one of the optional linkers do not contain a consensus T cell epitope.

[3644] In some aspects, any of Ln comprises an amino acid sequence of G or A, or an amino acid sequence at least 65%, at least 70%, at least 75%, at least 80%, at least 85%, at least 90%, at least 95%, at least 99%, or 100% identical to amino acid sequence GSS or ASG, or an amino acid sequence at least 65%, at least 70%, at least 75%, at least 80%, at least 85%, at least 90%, at least 95%, at least 99%, or 100% identical to any one of SEQ ID NOs: 333-373 or 967-971. In some aspects, Ln comprises an amino acid sequence at least 65%, at least 70%, at least 75%, at least 80%, at least 85%, at least 90%, at least 95%, at least 99%, or 100% identical to any one of SEQ ID NOs: 333-345 or 967-971.

[3645] In some aspects, the antigen binding polypeptides or the antigen binding polypeptide complexes disclosed herein, comprise one or more CL, as indicated in the formulas representing the antigen binding polypeptides or the antigen binding polypeptide complexes disclosed herein. In some aspects, the CL comprises an amino acid sequence at least 65%, at least 70%, at least 75%, at least 80%, at least 85%, at least 90%, at least 95%, at least 99%, or 100% identical to any one of SEQ ID NOs: 374, 637, or 1092-1095.

[3646] In some aspects, the antigen binding polypeptides or the antigen binding polypeptide complexes disclosed herein, comprise one or more CH1, as indicated in the formulas representing the antigen binding polypeptides or the antigen binding polypeptide complexes disclosed herein. In some aspects, the CH1 comprises an amino acid sequence at least 65%, at least 70%, at least 75%, at least 80%, at least 85%, at least 90%, at least 95%, at least 99%, or 100% identical to any one of SEQ ID NOs: 375, 634, 1070, 1071, or 1086-1091.

[3647] In some aspects, the antigen binding polypeptides or the antigen binding polypeptide complexes disclosed herein, comprise one or more hinge regions, wherein a hinge region is interposed between a CH1 and a CH2 (i.e., a hinge region is localized between the carboxy terminal residue of a CH1 and the N-terminal residue of a CH2). In some aspects, the hinge region comprises an amino acid sequence at least 65%, at least 70%, at least 75%, at least 80%, at least 85%, at least 90%, at least 95%, at least 99%, or 100% identical to any one of SEQ ID NOs: 635, 636, 1072, 1073, or 1074.

[3648] In some aspects, the antigen binding polypeptides or the antigen binding polypeptide complexes disclosed herein, comprise one or more Fc region. In some aspects, the Fc region is at the carboxy-terminus of the antigen binding polypeptides disclosed herein. In some aspects, the Fc region is at the carboxy-terminus of at least one of the antigen binding polypeptides comprised in the antigen binding polypeptide complexes disclosed herein. In some aspects, the Fc region comprises at least one knob-into-hole modification or Fc effector function knockout mutation. In some aspects, the Fc region comprises at least one knob-into-hole modification or Fc effector function knockout mutation. In some aspects, the Fc region comprises an immunoglobulin heavy chain constant region 2 (CH2) and/or an immunoglobulin heavy chain constant region 3 (CH3), as indicated in the formulas representing the antigen binding polypeptides or the antigen binding polypeptide complexes disclosed herein. In some aspects, the Fc region further comprises an immunoglobulin hinge (i.e., a hinge region). In some aspects, the hinge region comprises an amino acid sequence at least 65%, at least 70%, at least 75%, at least 80%, at least 85%, at least 90%, at least 95%, at least 99%, or 100% identical to any one of SEQ ID NOs: 635, 636, 1072, 1073, or 1074. In some aspects, the Fc region comprises one or more half-life extension amino acid substitutions. In some aspects, the one or more half-life extension amino acid substitutions comprise one or more of amino acid substitutions M428L, N434A, N434S, L234F, L235E, P331S, M252Y, S254T, or T256E, or equivalent thereof, based on the EU numbering scheme. In some aspects, the one or more half-life extension amino acid substitutions comprise one or more of the following amino acid substitutions:
[3649] M428L and N434A (LA);
[3650] M428L and N434S (LS);
[3651] L234F and L235E;
[3652] L234F, L235E, and P331S (TM); and/or
[3653] M252Y, S254T, and T256E (YTE);
[3654] or equivalent thereof, based on the EU numbering scheme.

[3655] In some aspects, the Fc region comprises a CH2 and a CH3. In some aspects, the CH2 comprises an amino acid sequence that is at least 65%, at least 70%, at least 75%, at least 80%, at least 85%, at least 90%, at least 95%, at least 99%, or 100% identical to any one of SEQ ID NOs: 1075-1078. In some aspects, the CH3 comprises an amino acid sequence that is at least 65%, at least 70%, at least 75%, at least 80%, at least 85%, at least 90%, at least 95%, at least 99%, or 100% identical to any one of SEQ ID NOs: 1079-1085. In some aspects, the Fc region comprises an amino acid sequence at least 65%, at least 70%, at least 75%, at least 80%, at least 85%, at least 90%, at least 95%, at least 99%, or 100% identical to any one of SEQ ID NOs: 376-380.

[3656] In some aspects, the Fc region comprises at least one knob-into-hole modification or Fc effector function knockout mutation. In some aspects, the antigen binding polypeptide or the antigen binding polypeptide complex disclosed herein is an IgG1 or IgG4 antibody or antigen binding fragment thereof and the knob-into-hole modification comprises:
[3657] (i) knob substitutions of S354C and T366W;
[3658] (ii) hole substitutions Y349C, T366S, L368A and Y407V;
[3659] (iii) a combination thereof;
[3660] or equivalent thereof, based on the EU numbering scheme.

[3661] In some aspects, the knob-into-hole modification comprises one or more of knob substitutions of S354C and T366W, or equivalent thereof, and/or one or more of hole substitutions of Y349C, T366S, L368A, Y407V, or equivalent thereof, or a combination thereof, based on the EU numbering scheme. In some aspects, the Fc region comprises a knob-into-hole modification comprising knob substitutions of S354C and T366W, or equivalent thereof, and/or hole substitutions of Y349C, T366S, L368A and Y407V, or equivalent thereof, and/or a half-life extension amino acid substitution comprising: a LA (M428L and N434A, or equivalent thereof, based on the EU numbering scheme) amino acid substitution, a LS (M428L and N434S, or equivalent thereof, based on the EU numbering scheme) amino acid substitution. L234F and L235E, or equivalent thereof (based on the EU numbering scheme) amino acid substitutions, a TM (L234F, L235E, and P331S, or equivalent thereof, based on the EU numbering scheme) amino acid substitution, a YTE (M252Y, S254T, and T256E, or equivalent thereof, based on the EU numbering scheme) amino acid substitution, or any combination thereof.

[3662] In some aspects, the Fc region comprises knob substitutions of S354C and T366W, or equivalent thereof, and a half-life extension amino acid substitution comprising: a LA (M428L and N434A, or equivalent thereof, based on the EU numbering scheme) amino acid substitution, a LS (M428L and N434S, or equivalent thereof, based on the EU numbering scheme) amino acid substitution. L234F and L235E, or equivalent thereof (based on the EU numbering scheme) amino acid substitutions, a TM (L234F, L235E, and P331S, or equivalent thereof, based on the EU numbering scheme) amino acid substitution, a YTE (M252Y, S254T, and T256E, or equivalent thereof, based on the EU numbering scheme) amino acid substitution, or any combination thereof.

[3663] In some aspects, the Fc region comprises hole substitutions of Y349C, T366S, L368A and Y407V, or equivalent thereof, and a half-life extension amino acid substitution comprising: a LA (M428L and N434A, or equivalent thereof, based on the EU numbering scheme) amino acid substitution, a LS (M428L and N434S, or equivalent thereof, based on the EU numbering scheme) amino acid substitution. L234F and L235E, or equivalent thereof (based on the EU numbering scheme) amino acid substitutions, a TM (L234F, L235E, and P331S, or equivalent thereof, based on the EU numbering scheme) amino acid substitution, a YTE (M252Y, S254T, and T256E, or equivalent thereof, based on the EU numbering scheme) amino acid substitution, or any combination thereof.

[3664] In some aspects, the antigen binding polypeptide or the antigen binding polypeptide complex disclosed herein is an IgG1 or IgG4 antibody or antigen binding fragment thereof and the Fc effector function knockout mutation is L234A, L235A, P239A, or equivalent thereof, or a combination thereof, based on the EU numbering scheme.

[3665] In some aspects, the antigen binding polypeptide or the antigen binding polypeptide complex disclosed herein comprise a mutation at a glycosylation site. In some aspects, the mutation at a glycosylation site is a mutation at an N-glycosylation site. In some aspects, one or both of the antigen binding polypeptides comprised in the antigen binding polypeptide complexes disclosed herein comprise a VH comprising a mutation at a glycosylation site. In some aspects, the mutation at a glycosylation site is a mutation at an N-glycosylation site. In some aspects, the mutation at an N-glycosylation site is at amino acid N62 of the VH region or equivalent thereof. In some aspects, the mutation at an N-glycosylation site at amino acid N62 is N62Q or N62S, or equivalent thereof.

[3666] In some aspects, the first polypeptide is encoded by a nucleotide sequence at least 65%, at least 70%, at least 75%, at least 80%, at least 85%, at least 90%, at least 95%, at least 99%, or 100% identical to SEQ ID NO: 503 and the second polypeptide is encoded by a nucleotide sequence at least 65%, at least 70%, at least 75%, at least 80%, at least 85%, at least 90%, at least 95%, at least 99%, or 100% identical to SEQ ID NO: 503.

[3667] In some aspects, the first polypeptide is encoded by a nucleotide sequence at least 65%, at least 70%, at least 75%, at least 80%, at least 85%, at least 90%, at least 95%, at least 99%, or 100% identical to SEQ ID NO: 504 and the second polypeptide is encoded by a nucleotide sequence at least 65%, at least 70%, at least 75%, at least 80%, at least 85%, at least 90%, at least 95%, at least 99%, or 100% identical to SEQ ID NO: 504.

[3668] In some aspects, the first polypeptide is encoded by a nucleotide sequence at least 65%, at least 70%, at least 75%, at least 80%, at least 85%, at least 90%, at least 95%, at least 99%, or 100% identical to SEQ ID NO: 505 and the second polypeptide is encoded by a nucleotide sequence at least 65%, at least 70%, at least 75%, at least 80%, at least 85%, at least 90%, at least 95%, at least 99%, or 100% identical to SEQ ID NO: 505.

[3669] In some aspects, the first polypeptide is encoded by a nucleotide sequence at least 65%, at least 70%, at least 75%, at least 80%, at least 85%, at least 90%, at least 95%, at least 99%, or 100% identical to SEQ ID NO: 506 and the second polypeptide is encoded by a nucleotide sequence at least 65%, at least 70%, at least 75%, at least 80%, at least 85%, at least 90%, at least 95%, at least 99%, or 100% identical to SEQ ID NO: 507.

[3670] In some aspects, the first polypeptide is encoded by a nucleotide sequence at least 65%, at least 70%, at least 75%, at least 80%, at least 85%, at least 90%, at least 95%, at least 99%, or 100% identical to SEQ ID NO: 508 and the second polypeptide is encoded by a nucleotide sequence at least 65%, at least 70%, at least 75%, at least 80%, at least 85%, at least 90%, at least 95%, at least 99%, or 100% identical to SEQ ID NO: 509.

[3671] In some aspects, the first polypeptide is encoded by a nucleotide sequence at least 65%, at least 70%, at least 75%, at least 80%, at least 85%, at least 90%, at least 95%, at least 99%, or 100% identical to SEQ ID NO: 510 and the second polypeptide is encoded by a nucleotide sequence at least 65%, at least 70%, at least 75%, at least 80%, at least 85%, at least 90%, at least 95%, at least 99%, or 100% identical to SEQ ID NO: 510.

[3672] In some aspects, the first polypeptide is encoded by a nucleotide sequence at least 65%, at least 70%, at least 75%, at least 80%, at least 85%, at least 90%, at least 95%, at least 99%, or 100% identical to SEQ ID NO: 511 and the second polypeptide is encoded by a nucleotide sequence at least 65%, at least 70%, at least 75%, at least 80%, at least 85%, at least 90%, at least 95%, at least 99%, or 100% identical to SEQ ID NO: 511.

[3673] In some aspects, the first polypeptide is encoded by a nucleotide sequence at least 65%, at least 70%, at least 75%, at least 80%, at least 85%, at least 90%, at least 95%, at least 99%, or 100% identical to SEQ ID NO: 512 and the second polypeptide is encoded by a nucleotide sequence at least 65%, at least 70%, at least 75%, at least 80%, at least 85%, at least 90%, at least 95%, at least 99%, or 100% identical to SEQ ID NO: 512.

[3674] In some aspects, the first polypeptide is encoded by a nucleotide sequence at least 65%, at least 70%, at least 75%, at least 80%, at least 85%, at least 90%, at least 95%, at least 99%, or 100% identical to SEQ ID NO: 513 and the second polypeptide is encoded by a nucleotide sequence at least 65%, at least 70%, at least 75%, at least 80%, at least 85%, at least 90%, at least 95%, at least 99%, or 100% identical to SEQ ID NO: 513.

[3675] In some aspects, the first polypeptide is encoded by a nucleotide sequence at least 65%, at least 70%, at least 75%, at least 80%, at least 85%, at least 90%, at least 95%, at least 99%, or 100% identical to SEQ ID NO: 514 and the second polypeptide is encoded by a nucleotide sequence at least 65%, at least 70%, at least 75%, at least 80%, at least 85%, at least 90%, at least 95%, at least 99%, or 100% identical to SEQ ID NO: 515.

[3676] In some aspects, the first polypeptide is encoded by a nucleotide sequence at least 65%, at least 70%, at least 75%, at least 80%, at least 85%, at least 90%, at least 95%, at least 99%, or 100% identical to SEQ ID NO: 516 and the second polypeptide is encoded by a nucleotide sequence at least 65%, at least 70%, at least 75%, at least 80%, at least 85%, at least 90%, at least 95%, at least 99%, or 100% identical to SEQ ID NO: 517.

[3677] In some aspects, the first polypeptide is encoded by a nucleotide sequence at least 65%, at least 70%, at least 75%, at least 80%, at least 85%, at least 90%, at least 95%, at least 99%, or 100% identical to SEQ ID NO: 518 and the second polypeptide is encoded by a nucleotide sequence at least 65%, at least 70%, at least 75%, at least 80%, at least 85%, at least 90%, at least 95%, at least 99%, or 100% identical to SEQ ID NO: 519.

[3678] In some aspects, the first polypeptide is encoded by a nucleotide sequence at least 65%, at least 70%, at least 75%, at least 80%, at least 85%, at least 90%, at least 95%, at least 99%, or 100% identical to SEQ ID NO: 520 and the second polypeptide is encoded by a nucleotide sequence at least 65%, at least 70%, at least 75%, at least 80%, at least 85%, at least 90%, at least 95%, at least 99%, or 100% identical to SEQ ID NO: 521.

[3679] In some aspects, the first polypeptide is encoded by a nucleotide sequence at least 65%, at least 70%, at least 75%, at least 80%, at least 85%, at least 90%, at least 95%, at least 99%, or 100% identical to SEQ ID NO: 522 and the second polypeptide is encoded by a nucleotide sequence at least 65%, at least 70%, at least 75%, at least 80%, at least 85%, at least 90%, at least 95%, at least 99%, or 100% identical to SEQ ID NO: 522.

[3680] In some aspects, the first polypeptide is encoded by a nucleotide sequence at least 65%, at least 70%, at least 75%, at least 80%, at least 85%, at least 90%, at least 95%, at least 99%, or 100% identical to SEQ ID NO: 523 and the second polypeptide is encoded by a nucleotide sequence at least 65%, at least 70%, at least 75%, at least 80%, at least 85%, at least 90%, at least 95%, at least 99%, or 100% identical to SEQ ID NO: 523.

[3681] In some aspects, the first polypeptide is encoded by a nucleotide sequence at least 65%, at least 70%, at least 75%, at least 80%, at least 85%, at least 90%, at least 95%, at least 99%, or 100% identical to SEQ ID NO: 524 and the second polypeptide is encoded by a nucleotide sequence at least 65%, at least 70%, at least 75%, at least 80%, at least 85%, at least 90%, at least 95%, at least 99%, or 100% identical to SEQ ID NO: 524.

[3682] In some aspects, the first polypeptide is encoded by a nucleotide sequence at least 65%, at least 70%, at least 75%, at least 80%, at least 85%, at least 90%, at least 95%, at least 99%, or 100% identical to SEQ ID NO: 525 and the second polypeptide is encoded by a nucleotide sequence at least 65%, at least 70%, at least 75%, at least 80%, at least 85%, at least 90%, at least 95%, at least 99%, or 100% identical to SEQ ID NO: 525.

[3683] In some aspects, the first polypeptide is encoded by a nucleotide sequence at least 65%, at least 70%, at least 75%, at least 80%, at least 85%, at least 90%, at least 95%, at least 99%, or 100% identical to SEQ ID NO: 526 and the second polypeptide is encoded by a nucleotide sequence at least 65%, at least 70%, at least 75%, at least 80%, at least 85%, at least 90%, at least 95%, at least 99%, or 100% identical to SEQ ID NO: 526.

[3684] In some aspects, the first polypeptide is encoded by a nucleotide sequence at least 65%, at least 70%, at least 75%, at least 80%, at least 85%, at least 90%, at least 95%, at least 99%, or 100% identical to SEQ ID NO: 527 and the second polypeptide is encoded by a nucleotide sequence at least 65%, at least 70%, at least 75%, at least 80%, at least 85%, at least 90%, at least 95%, at least 99%, or 100% identical to SEQ ID NO: 528.

[3685] In some aspects, the first polypeptide is encoded by a nucleotide sequence at least 65%, at least 70%, at least 75%, at least 80%, at least 85%, at least 90%, at least 95%, at least 99%, or 100% identical to SEQ ID NO: 529 and the second polypeptide is encoded by a nucleotide sequence at least 65%, at least 70%, at least 75%, at least 80%, at least 85%, at least 90%, at least 95%, at least 99%, or 100% identical to SEQ ID NO: 530.

[3686] In some aspects, the first polypeptide is encoded by a nucleotide sequence at least 65%, at least 70%, at least 75%, at least 80%, at least 85%, at least 90%, at least 95%, at least 99%, or 100% identical to SEQ ID NO: 531 and the second polypeptide is encoded by a nucleotide sequence at least 65%, at least 70%, at least 75%, at least 80%, at least 85%, at least 90%, at least 95%, at least 99%, or 100% identical to SEQ ID NO: 532.

[3687] In some aspects, the first polypeptide is encoded by a nucleotide sequence at least 65%, at least 70%, at least 75%, at least 80%, at least 85%, at least 90%, at least 95%, at least 99%, or 100% identical to SEQ ID NO: 533 and the second polypeptide is encoded by a nucleotide sequence at least 65%, at least 70%, at least 75%, at least 80%, at least 85%, at least 90%, at least 95%, at least 99%, or 100% identical to SEQ ID NO: 534.

[3688] In some aspects, the first polypeptide is encoded by a nucleotide sequence at least 65%, at least 70%, at least 75%, at least 80%, at least 85%, at least 90%, at least 95%, at least 99%, or 100% identical to SEQ ID NO: 535 and the second polypeptide is encoded by a nucleotide sequence at least 65%, at least 70%, at least 75%, at least 80%, at least 85%, at least 90%, at least 95%, at least 99%, or 100% identical to SEQ ID NO: 536.

[3689] In some aspects, the first polypeptide is encoded by a nucleotide sequence at least 65%, at least 70%, at least 75%, at least 80%, at least 85%, at least 90%, at least 95%, at least 99%, or 100% identical to SEQ ID NO: 537 and the second polypeptide is encoded by a nucleotide sequence at least 65%, at least 70%, at least 75%, at least 80%, at least 85%, at least 90%, at least 95%, at least 99%, or 100% identical to SEQ ID NO: 538.

[3690] In some aspects, the first polypeptide is encoded by a nucleotide sequence at least 65%, at least 70%, at least 75%, at least 80%, at least 85%, at least 90%, at least 95%, at least 99%, or 100% identical to SEQ ID NO: 539 and the second polypeptide is encoded by a nucleotide sequence at least 65%, at least 70%, at least 75%, at least 80%, at least 85%, at least 90%, at least 95%, at least 99%, or 100% identical to SEQ ID NO: 540.

[3691] In some aspects, the first polypeptide is encoded by a nucleotide sequence at least 65%, at least 70%, at least 75%, at least 80%, at least 85%, at least 90%, at least 95%, at least 99%, or 100% identical to SEQ ID NO: 541 and the second polypeptide is encoded by a nucleotide sequence at least 65%, at least 70%, at least 75%, at least 80%, at least 85%, at least 90%, at least 95%, at least 99%, or 100% identical to SEQ ID NO: 542.

[3692] In some aspects, the first polypeptide is encoded by a nucleotide sequence at least 65%, at least 70%, at least 75%, at least 80%, at least 85%, at least 90%, at least 95%, at least 99%, or 100% identical to SEQ ID NO: 543 and the second polypeptide is encoded by a nucleotide sequence at least 65%, at least 70%, at least 75%, at least 80%, at least 85%, at least 90%, at least 95%, at least 99%, or 100% identical to SEQ ID NO: 544.

[3693] In some aspects, the first polypeptide is encoded by a nucleotide sequence at least 65%, at least 70%, at least 75%, at least 80%, at least 85%, at least 90%, at least 95%, at least 99%, or 100% identical to SEQ ID NO: 545 and the second polypeptide is encoded by a nucleotide sequence at least 65%, at least 70%, at least 75%, at least 80%, at least 85%, at least 90%, at least 95%, at least 99%, or 100% identical to SEQ ID NO: 546.

[3694] In some aspects, the first polypeptide is encoded by a nucleotide sequence at least 65%, at least 70%, at least 75%, at least 80%, at least 85%, at least 90%, at least 95%, at least 99%, or 100% identical to SEQ ID NO: 547 and the second polypeptide is encoded by a nucleotide sequence at least 65%, at least 70%, at least 75%, at least 80%, at least 85%, at least 90%, at least 95%, at least 99%, or 100% identical to SEQ ID NO: 548.

[3695] In some aspects, the first polypeptide is encoded by a nucleotide sequence at least 65%, at least 70%, at least 75%, at least 80%, at least 85%, at least 90%, at least 95%, at least 99%, or 100% identical to SEQ ID NO: 549 and the second polypeptide is encoded by a nucleotide sequence at least 65%, at least 70%, at least 75%, at least 80%, at least 85%, at least 90%, at least 95%, at least 99%, or 100% identical to SEQ ID NO: 550.

[3696] In some aspects, the first polypeptide is encoded by a nucleotide sequence at least 65%, at least 70%, at least 75%, at least 80%, at least 85%, at least 90%, at least 95%, at least 99%, or 100% identical to SEQ ID NO: 551 and the second polypeptide is encoded by a nucleotide sequence at least 65%, at least 70%, at least 75%, at least 80%, at least 85%, at least 90%, at least 95%, at least 99%, or 100% identical to SEQ ID NO: 552.

[3697] In some aspects, the first polypeptide is encoded by a nucleotide sequence at least 65%, at least 70%, at least 75%, at least 80%, at least 85%, at least 90%, at least 95%, at least 99%, or 100% identical to SEQ ID NO: 553 and the second polypeptide is encoded by a nucleotide sequence at least 65%, at least 70%, at least 75%, at least 80%, at least 85%, at least 90%, at least 95%, at least 99%, or 100% identical to SEQ ID NO: 554.

[3698] In some aspects, the first polypeptide is encoded by a nucleotide sequence at least 65%, at least 70%, at least 75%, at least 80%, at least 85%, at least 90%, at least 95%, at least 99%, or 100% identical to SEQ ID NO: 555 and the second polypeptide is encoded by a nucleotide sequence at least 65%, at least 70%, at least 75%, at least 80%, at least 85%, at least 90%, at least 95%, at least 99%, or 100% identical to SEQ ID NO: 556.

[3699] In some aspects, the first polypeptide is encoded by a nucleotide sequence at least 65%, at least 70%, at least 75%, at least 80%, at least 85%, at least 90%, at least 95%, at least 99%, or 100% identical to SEQ ID NO: 557 and the second polypeptide is encoded by a nucleotide sequence at least 65%, at least 70%, at least 75%, at least 80%, at least 85%, at least 90%, at least 95%, at least 99%, or 100% identical to SEQ ID NO: 558.

[3700] In some aspects, the first polypeptide is encoded by a nucleotide sequence at least 65%, at least 70%, at least 75%, at least 80%, at least 85%, at least 90%, at least 95%, at least 99%, or 100% identical to SEQ ID NO: 559 and the second polypeptide is encoded by a nucleotide sequence at least 65%, at least 70%, at least 75%, at least 80%, at least 85%, at least 90%, at least 95%, at least 99%, or 100% identical to SEQ ID NO: 560.

[3701] In some aspects, the first polypeptide is encoded by a nucleotide sequence at least 65%, at least 70%, at least 75%, at least 80%, at least 85%, at least 90%, at least 95%, at least 99%, or 100% identical to SEQ ID NO: 561 and the second polypeptide is encoded by a nucleotide sequence at least 65%, at least 70%, at least 75%, at least 80%, at least 85%, at least 90%, at least 95%, at least 99%, or 100% identical to SEQ ID NO: 562.

[3702] In some aspects, the first polypeptide is encoded by a nucleotide sequence at least 65%, at least 70%, at least 75%, at least 80%, at least 85%, at least 90%, at least 95%, at least 99%, or 100% identical to SEQ ID NO: 563 and the second polypeptide is encoded by a nucleotide sequence at least 65%, at least 70%, at least 75%, at least 80%, at least 85%, at least 90%, at least 95%, at least 99%, or 100% identical to SEQ ID NO: 564.

[3703] In some aspects, the first polypeptide is encoded by a nucleotide sequence at least 65%, at least 70%, at least 75%, at least 80%, at least 85%, at least 90%, at least 95%, at least 99%, or 100% identical to SEQ ID NO: 565 and the second polypeptide is encoded by a nucleotide sequence at least 65%, at least 70%, at least 75%, at least 80%, at least 85%, at least 90%, at least 95%, at least 99%, or 100% identical to SEQ ID NO: 566.

[3704] In some aspects, the first polypeptide is encoded by a nucleotide sequence at least 65%, at least 70%, at least 75%, at least 80%, at least 85%, at least 90%, at least 95%, at least 99%, or 100% identical to SEQ ID NO: 567 and the second polypeptide is encoded by a nucleotide sequence at least 65%, at least 70%, at least 75%, at least 80%, at least 85%, at least 90%, at least 95%, at least 99%, or 100% identical to SEQ ID NO: 568.

[3705] In some aspects, the first polypeptide is encoded by a nucleotide sequence at least 65%, at least 70%, at least 75%, at least 80%, at least 85%, at least 90%, at least 95%, at least 99%, or 100% identical to SEQ ID NO: 569 and the second polypeptide is encoded by a nucleotide sequence at least 65%, at least 70%, at least 75%, at least 80%, at least 85%, at least 90%, at least 95%, at least 99%, or 100% identical to SEQ ID NO: 570.

[3706] In some aspects, the first polypeptide is encoded by a nucleotide sequence at least 65%, at least 70%, at least 75%, at least 80%, at least 85%, at least 90%, at least 95%, at least 99%, or 100% identical to SEQ ID NO: 571 and the second polypeptide is encoded by a nucleotide sequence at least 65%, at least 70%, at least 75%, at least 80%, at least 85%, at least 90%, at least 95%, at least 99%, or 100% identical to SEQ ID NO: 572.

[3707] In some aspects, the first polypeptide is encoded by a nucleotide sequence at least 65%, at least 70%, at least 75%, at least 80%, at least 85%, at least 90%, at least 95%, at least 99%, or 100% identical to SEQ ID NO: 573 and the second polypeptide is encoded by a nucleotide sequence at least 65%, at least 70%, at least 75%, at least 80%, at least 85%, at least 90%, at least 95%, at least 99%, or 100% identical to SEQ ID NO: 574.

[3708] In some aspects, the first polypeptide is encoded by a nucleotide sequence at least 65%, at least 70%, at least 75%, at least 80%, at least 85%, at least 90%, at least 95%, at least 99%, or 100% identical to SEQ ID NO: 575 and the second polypeptide is encoded by a nucleotide sequence at least 65%, at least 70%, at least 75%, at least 80%, at least 85%, at least 90%, at least 95%, at least 99%, or 100% identical to SEQ ID NO: 576.

[3709] In some aspects, the first polypeptide is encoded by a nucleotide sequence at least 65%, at least 70%, at least 75%, at least 80%, at least 85%, at least 90%, at least 95%, at least 99%, or 100% identical to SEQ ID NO: 577 and the second polypeptide is encoded by a nucleotide sequence at least 65%, at least 70%, at least 75%, at least 80%, at least 85%, at least 90%, at least 95%, at least 99%, or 100% identical to SEQ ID NO: 578.

[3710] In some aspects, the first polypeptide is encoded by a nucleotide sequence at least 65%, at least 70%, at least 75%, at least 80%, at least 85%, at least 90%, at least 95%, at least 99%, or 100% identical to SEQ ID NO: 579 and the second polypeptide is encoded by a nucleotide sequence at least 65%, at least 70%, at least 75%, at least 80%, at least 85%, at least 90%, at least 95%, at least 99%, or 100% identical to SEQ ID NO: 580.

[3711] In some aspects, the first polypeptide is encoded by a nucleotide sequence at least 65%, at least 70%, at least 75%, at least 80%, at least 85%, at least 90%, at least 95%, at least 99%, or 100% identical to SEQ ID NO: 581 and the second polypeptide is encoded by a nucleotide sequence at least 65%, at least 70%, at least 75%, at least 80%, at least 85%, at least 90%, at least 95%, at least 99%, or 100% identical to SEQ ID NO: 582.

[3712] In some aspects, the first polypeptide is encoded by a nucleotide sequence at least 65%, at least 70%, at least 75%, at least 80%, at least 85%, at least 90%, at least 95%, at least 99%, or 100% identical to SEQ ID NO: 583 and the second polypeptide is encoded by a nucleotide sequence at least 65%, at least 70%, at least 75%, at least 80%, at least 85%, at least 90%, at least 95%, at least 99%, or 100% identical to SEQ ID NO: 584.

[3713] In some aspects, the first polypeptide is encoded by a nucleotide sequence at least 65%, at least 70%, at least 75%, at least 80%, at least 85%, at least 90%, at least 95%, at least 99%, or 100% identical to SEQ ID NO: 585 and the second polypeptide is encoded by a nucleotide sequence at least 65%, at least 70%, at least 75%, at least 80%, at least 85%, at least 90%, at least 95%, at least 99%, or 100% identical to SEQ ID NO: 586.

[3714] In some aspects, the first polypeptide is encoded by a nucleotide sequence at least 65%, at least 70%, at least 75%, at least 80%, at least 85%, at least 90%, at least 95%, at least 99%, or 100% identical to SEQ ID NO: 587 and the second polypeptide is encoded by a nucleotide sequence at least 65%, at least 70%, at least 75%, at least 80%, at least 85%, at least 90%, at least 95%, at least 99%, or 100% identical to SEQ ID NO: 588.

[3715] In some aspects, the first polypeptide is encoded by a nucleotide sequence at least 65%, at least 70%, at least 75%, at least 80%, at least 85%, at least 90%, at least 95%, at least 99%, or 100% identical to SEQ ID NO: 589 and the second polypeptide is encoded by a nucleotide sequence at least 65%, at least 70%, at least 75%, at least 80%, at least 85%, at least 90%, at least 95%, at least 99%, or 100% identical to SEQ ID NO: 590.

[3716] In some aspects, the first polypeptide is encoded by a nucleotide sequence at least 65%, at least 70%, at least 75%, at least 80%, at least 85%, at least 90%, at least 95%, at least 99%, or 100% identical to SEQ ID NO: 591 and the second polypeptide is encoded by a nucleotide sequence at least 65%, at least 70%, at least 75%, at least 80%, at least 85%, at least 90%, at least 95%, at least 99%, or 100% identical to SEQ ID NO: 591.

[3717] In some aspects, the first polypeptide is encoded by a nucleotide sequence at least 65%, at least 70%, at least 75%, at least 80%, at least 85%, at least 90%, at least 95%, at least 99%, or 100% identical to SEQ ID NO: 592 and the second polypeptide is encoded by a nucleotide sequence at least 65%, at least 70%, at least 75%, at least 80%, at least 85%, at least 90%, at least 95%, at least 99%, or 100% identical to SEQ ID NO: 592.

[3718] In some aspects, the first polypeptide is encoded by a nucleotide sequence at least 65%, at least 70%, at least 75%, at least 80%, at least 85%, at least 90%, at least 95%, at least 99%, or 100% identical to SEQ ID NO: 593 and the second polypeptide is encoded by a nucleotide sequence at least 65%, at least 70%, at least 75%, at least 80%, at least 85%, at least 90%, at least 95%, at least 99%, or 100% identical to SEQ ID NO: 593.

[3719] In some aspects, the first polypeptide is encoded by a nucleotide sequence at least 65%, at least 70%, at least 75%, at least 80%, at least 85%, at least 90%, at least 95%, at least 99%, or 100% identical to SEQ ID NO: 594 and the second polypeptide is encoded by a nucleotide sequence at least 65%, at least 70%, at least 75%, at least 80%, at least 85%, at least 90%, at least 95%, at least 99%, or 100% identical to SEQ ID NO: 595.

[3720] In some aspects, the first polypeptide is encoded by a nucleotide sequence at least 65%, at least 70%, at least 75%, at least 80%, at least 85%, at least 90%, at least 95%, at least 99%, or 100% identical to SEQ ID NO: 596 and the second polypeptide is encoded by a nucleotide sequence at least 65%, at least 70%, at least 75%, at least 80%, at least 85%, at least 90%, at least 95%, at least 99%, or 100% identical to SEQ ID NO: 597.

[3721] In some aspects, the first polypeptide is encoded by a nucleotide sequence at least 65%, at least 70%, at least 75%, at least 80%, at least 85%, at least 90%, at least 95%, at least 99%, or 100% identical to SEQ ID NO: 598 and the second polypeptide is encoded by a nucleotide sequence at least 65%, at least 70%, at least 75%, at least 80%, at least 85%, at least 90%, at least 95%, at least 99%, or 100% identical to SEQ ID NO: 599.

[3722] In some aspects, the first polypeptide is encoded by a nucleotide sequence at least 65%, at least 70%, at least 75%, at least 80%, at least 85%, at least 90%, at least 95%, at least 99%, or 100% identical to SEQ ID NO: 600 and the second polypeptide is encoded by a nucleotide sequence at least 65%, at least 70%, at least 75%, at least 80%, at least 85%, at least 90%, at least 95%, at least 99%, or 100% identical to SEQ ID NO: 600.

[3723] In some aspects, the first polypeptide is encoded by a nucleotide sequence at least 65%, at least 70%, at least 75%, at least 80%, at least 85%, at least 90%, at least 95%, at least 99%, or 100% identical to SEQ ID NO: 601 and the second polypeptide is encoded by a nucleotide sequence at least 65%, at least 70%, at least 75%, at least 80%, at least 85%, at least 90%, at least 95%, at least 99%, or 100% identical to SEQ ID NO: 601.

[3724] In some aspects, the first polypeptide is encoded by a nucleotide sequence at least 65%, at least 70%, at least 75%, at least 80%, at least 85%, at least 90%, at least 95%, at least 99%, or 100% identical to SEQ ID NO: 602 and the second polypeptide is encoded by a nucleotide sequence at least 65%, at least 70%, at least 75%, at least 80%, at least 85%, at least 90%, at least 95%, at least 99%, or 100% identical to SEQ ID NO: 602.

[3725] In some aspects, the first polypeptide is encoded by a nucleotide sequence at least 65%, at least 70%, at least 75%, at least 80%, at least 85%, at least 90%, at least 95%, at least 99%, or 100% identical to SEQ ID NO: 603 and the second polypeptide is encoded by a nucleotide sequence at least 65%, at least 70%, at least 75%, at least 80%, at least 85%, at least 90%, at least 95%, at least 99%, or 100% identical to SEQ ID NO: 603.

[3726] In some aspects, the first polypeptide is encoded by a nucleotide sequence at least 65%, at least 70%, at least 75%, at least 80%, at least 85%, at least 90%, at least 95%, at least 99%, or 100% identical to SEQ ID NO: 604 and the second polypeptide is encoded by a nucleotide sequence at least 65%, at least 70%, at least 75%, at least 80%, at least 85%, at least 90%, at least 95%, at least 99%, or 100% identical to SEQ ID NO: 604.

[3727] In some aspects, the first polypeptide is encoded by a nucleotide sequence at least 65%, at least 70%, at least 75%, at least 80%, at least 85%, at least 90%, at least 95%, at least 99%, or 100% identical to SEQ ID NO: 605 and the second polypeptide is encoded by a nucleotide sequence at least 65%, at least 70%, at least 75%, at least 80%, at least 85%, at least 90%, at least 95%, at least 99%, or 100% identical to SEQ ID NO: 605.

[3728] In some aspects, the first polypeptide is encoded by a nucleotide sequence at least 65%, at least 70%, at least 75%, at least 80%, at least 85%, at least 90%, at least 95%, at least 99%, or 100% identical to SEQ ID NO: 606 and the second polypeptide is encoded by a nucleotide sequence at least 65%, at least 70%, at least 75%, at least 80%, at least 85%, at least 90%, at least 95%, at least 99%, or 100% identical to SEQ ID NO: 606.

[3729] In some aspects, the first polypeptide is encoded by a nucleotide sequence at least 65%, at least 70%, at least 75%, at least 80%, at least 85%, at least 90%, at least 95%, at least 99%, or 100% identical to SEQ ID NO: 607 and the second polypeptide is encoded by a nucleotide sequence at least 65%, at least 70%, at least 75%, at least 80%, at least 85%, at least 90%, at least 95%, at least 99%, or 100% identical to SEQ ID NO: 608.

[3730] In some aspects, the first polypeptide is encoded by a nucleotide sequence at least 65%, at least 70%, at least 75%, at least 80%, at least 85%, at least 90%, at least 95%, at least 99%, or 100% identical to SEQ ID NO: 609 and the second polypeptide is encoded by a nucleotide sequence at least 65%, at least 70%, at least 75%, at least 80%, at least 85%, at least 90%, at least 95%, at least 99%, or 100% identical to SEQ ID NO: 610.

[3731] In some aspects, the first polypeptide is encoded by a nucleotide sequence at least 65%, at least 70%, at least 75%, at least 80%, at least 85%, at least 90%, at least 95%, at least 99%, or 100% identical to SEQ ID NO: 611 and the second polypeptide is encoded by a nucleotide sequence at least 65%, at least 70%, at least 75%, at least 80%, at least 85%, at least 90%, at least 95%, at least 99%, or 100% identical to SEQ ID NO: 612.

[3732] In some aspects, the first polypeptide is encoded by a nucleotide sequence at least 65%, at least 70%, at least 75%, at least 80%, at least 85%, at least 90%, at least 95%, at least 99%, or 100% identical to SEQ ID NO: 613 and the second polypeptide is encoded by a nucleotide sequence at least 65%, at least 70%, at least 75%, at least 80%, at least 85%, at least 90%, at least 95%, at least 99%, or 100% identical to SEQ ID NO: 614.

[3733] In some aspects, the first polypeptide is encoded by a nucleotide sequence at least 65%, at least 70%, at least 75%, at least 80%, at least 85%, at least 90%, at least 95%, at least 99%, or 100% identical to SEQ ID NO: 615 and the second polypeptide is encoded by a nucleotide sequence at least 65%, at least 70%, at least 75%, at least 80%, at least 85%, at least 90%, at least 95%, at least 99%, or 100% identical to SEQ ID NO: 616.

[3734] In some aspects, the first polypeptide is encoded by a nucleotide sequence at least 65%, at least 70%, at least 75%, at least 80%, at least 85%, at least 90%, at least 95%, at least 99%, or 100% identical to SEQ ID NO: 617 and the second polypeptide is encoded by a nucleotide sequence at least 65%, at least 70%, at least 75%, at least 80%, at least 85%, at least 90%, at least 95%, at least 99%, or 100% identical to SEQ ID NO: 618.

[3735] In some aspects, the first polypeptide is encoded by a nucleotide sequence at least 65%, at least 70%, at least 75%, at least 80%, at least 85%, at least 90%, at least 95%, at least 99%, or 100% identical to SEQ ID NO: 619 and the second polypeptide is encoded by a nucleotide sequence at least 65%, at least 70%, at least 75%, at least 80%, at least 85%, at least 90%, at least 95%, at least 99%, or 100% identical to SEQ ID NO: 620.

[3736] In some aspects, the first polypeptide is encoded by a nucleotide sequence at least 65%, at least 70%, at least 75%, at least 80%, at least 85%, at least 90%, at least 95%, at least 99%, or 100% identical to SEQ ID NO: 621 and the second polypeptide is encoded by a nucleotide sequence at least 65%, at least 70%, at least 75%, at least 80%, at least 85%, at least 90%, at least 95%, at least 99%, or 100% identical to SEQ ID NO: 622.

[3737] In some aspects, the first polypeptide is encoded by a nucleotide sequence at least 65%, at least 70%, at least 75%, at least 80%, at least 85%, at least 90%, at least 95%, at least 99%, or 100% identical to SEQ ID NO: 623 and the second polypeptide is encoded by a nucleotide sequence at least 65%, at least 70%, at least 75%, at least 80%, at least 85%, at least 90%, at least 95%, at least 99%, or 100% identical to SEQ ID NO: 624.

[3738] In some aspects, the first polypeptide is encoded by a nucleotide sequence at least 65%, at least 70%, at least 75%, at least 80%, at least 85%, at least 90%, at least 95%, at least 99%, or 100% identical to SEQ ID NO: 718 and the second polypeptide is encoded by a nucleotide sequence at least 65%, at least 70%, at least 75%, at least 80%, at least 85%, at least 90%, at least 95%, at least 99%, or 100% identical to SEQ ID NO: 719.

[3739] In some aspects, the first polypeptide is encoded by a nucleotide sequence at least 65%, at least 70%, at least 75%, at least 80%, at least 85%, at least 90%, at least 95%, at least 99%, or 100% identical to SEQ ID NO: 722 and the second polypeptide is encoded by a nucleotide sequence at least 65%, at least 70%, at least 75%, at least 80%, at least 85%, at least 90%, at least 95%, at least 99%, or 100% identical to SEQ ID NO: 723.

[3740] In some aspects, the first polypeptide is encoded by a nucleotide sequence at least 65%, at least 70%, at least 75%, at least 80%, at least 85%, at least 90%, at least 95%, at least 99%, or 100% identical to SEQ ID NO: 726 and the second polypeptide is encoded by a nucleotide sequence at least 65%, at least 70%, at least 75%, at least 80%, at least 85%, at least 90%, at least 95%, at least 99%, or 100% identical to SEQ ID NO: 727.

[3741] In some aspects, the first polypeptide is encoded by a nucleotide sequence at least 65%, at least 70%, at least 75%, at least 80%, at least 85%, at least 90%, at least 95%, at least 99%, or 100% identical to SEQ ID NO: 730 and the second polypeptide is encoded by a nucleotide sequence at least 65%, at least 70%, at least 75%, at least 80%, at least 85%, at least 90%, at least 95%, at least 99%, or 100% identical to SEQ ID NO: 731.

[3742] In some aspects, the first polypeptide is encoded by a nucleotide sequence at least 65%, at least 70%, at least 75%, at least 80%, at least 85%, at least 90%, at least 95%, at least 99%, or 100% identical to SEQ ID NO: 734 and the second polypeptide is encoded by a nucleotide sequence at least 65%, at least 70%, at least 75%, at least 80%, at least 85%, at least 90%, at least 95%, at least 99%, or 100% identical to SEQ ID NO: 735.

[3743] In some aspects, the first polypeptide is encoded by a nucleotide sequence at least 65%, at least 70%, at least 75%, at least 80%, at least 85%, at least 90%, at least 95%, at least 99%, or 100% identical to SEQ ID NO: 738 and the second polypeptide is encoded by a nucleotide sequence at least 65%, at least 70%, at least 75%, at least 80%, at least 85%, at least 90%, at least 95%, at least 99%, or 100% identical to SEQ ID NO: 739.

[3744] In some aspects, the first polypeptide is encoded by a nucleotide sequence at least 65%, at least 70%, at least 75%, at least 80%, at least 85%, at least 90%, at least 95%, at least 99%, or 100% identical to SEQ ID NO: 742 and the second polypeptide is encoded by a nucleotide sequence at least 65%, at least 70%, at least 75%, at least 80%, at least 85%, at least 90%, at least 95%, at least 99%, or 100% identical to SEQ ID NO: 743.

[3745] In some aspects, the first polypeptide is encoded by a nucleotide sequence at least 65%, at least 70%, at least 75%, at least 80%, at least 85%, at least 90%, at least 95%, at least 99%, or 100% identical to SEQ ID NO: 746 and the second polypeptide is encoded by a nucleotide sequence at least 65%, at least 70%, at least 75%, at least 80%, at least 85%, at least 90%, at least 95%, at least 99%, or 100% identical to SEQ ID NO: 747.

[3746] In some aspects, the first polypeptide is encoded by a nucleotide sequence at least 65%, at least 70%, at least 75%, at least 80%, at least 85%, at least 90%, at least 95%, at least 99%, or 100% identical to SEQ ID NO: 750 and the second polypeptide is encoded by a nucleotide sequence at least 65%, at least 70%, at least 75%, at least 80%, at least 85%, at least 90%, at least 95%, at least 99%, or 100% identical to SEQ ID NO: 751.

[3747] In some aspects, the first polypeptide is encoded by a nucleotide sequence at least 65%, at least 70%, at least 75%, at least 80%, at least 85%, at least 90%, at least 95%, at least 99%, or 100% identical to SEQ ID NO: 754 and the second polypeptide is encoded by a nucleotide sequence at least 65%, at least 70%, at least 75%, at least 80%, at least 85%, at least 90%, at least 95%, at least 99%, or 100% identical to SEQ ID NO: 755.

[3748] In some aspects, the first polypeptide is encoded by a nucleotide sequence at least 65%, at least 70%, at least 75%, at least 80%, at least 85%, at least 90%, at least 95%, at least 99%, or 100% identical to SEQ ID NO: 762 and the second polypeptide is encoded by a nucleotide sequence at least 65%, at least 70%, at least 75%, at least 80%, at least 85%, at least 90%, at least 95%, at least 99%, or 100% identical to SEQ ID NO: 763.

[3749] In some aspects, the first polypeptide is encoded by a nucleotide sequence at least 65%, at least 70%, at least 75%, at least 80%, at least 85%, at least 90%, at least 95%, at least 99%, or 100% identical to SEQ ID NO: 927 and the second polypeptide is encoded by a nucleotide sequence at least 65%, at least 70%, at least 75%, at least 80%, at least 85%, at least 90%, at least 95%, at least 99%, or 100% identical to SEQ ID NO: 928.

[3750] In some aspects, the first polypeptide is encoded by a nucleotide sequence at least 65%, at least 70%, at least 75%, at least 80%, at least 85%, at least 90%, at least 95%, at least 99%, or 100% identical to SEQ ID NO: 929 and the second polypeptide is encoded by a nucleotide sequence at least 65%, at least 70%, at least 75%, at least 80%, at least 85%, at least 90%, at least 95%, at least 99%, or 100% identical to SEQ ID NO: 930.

[3751] In some aspects, the first polypeptide is encoded by a nucleotide sequence at least 65%, at least 70%, at least 75%, at least 80%, at least 85%, at least 90%, at least 95%, at least 99%, or 100% identical to SEQ ID NO: 931 and the second polypeptide is encoded by a nucleotide sequence at least 65%, at least 70%, at least 75%, at least 80%, at least 85%, at least 90%, at least 95%, at least 99%, or 100% identical to SEQ ID NO: 932.

[3752] In some aspects, the first polypeptide is encoded by a nucleotide sequence at least 65%, at least 70%, at least 75%, at least 80%, at least 85%, at least 90%, at least 95%, at least 99%, or 100% identical to SEQ ID NO: 933 and the second polypeptide is encoded by a nucleotide sequence at least 65%, at least 70%, at least 75%, at least 80%, at least 85%, at least 90%, at least 95%, at least 99%, or 100% identical to SEQ ID NO: 934.

[3753] In some aspects, the first polypeptide is encoded by a nucleotide sequence at least 65%, at least 70%, at least 75%, at least 80%, at least 85%, at least 90%, at least 95%, at least 99%, or 100% identical to SEQ ID NO: 935 and the second polypeptide is encoded by a nucleotide sequence at least 65%, at least 70%, at least 75%, at least 80%, at least 85%, at least 90%, at least 95%, at least 99%, or 100% identical to SEQ ID NO: 936.

[3754] In some aspects, the first polypeptide is encoded by a nucleotide sequence at least 65%, at least 70%, at least 75%, at least 80%, at least 85%, at least 90%, at least 95%, at least 99%, or 100% identical to SEQ ID NO: 937 and the second polypeptide is encoded by a nucleotide sequence at least 65%, at least 70%, at least 75%, at least 80%, at least 85%, at least 90%, at least 95%, at least 99%, or 100% identical to SEQ ID NO: 938.

[3755] In some aspects, the first polypeptide is encoded by a nucleotide sequence at least 65%, at least 70%, at least 75%, at least 80%, at least 85%, at least 90%, at least 95%, at least 99%, or 100% identical to SEQ ID NO: 939 and the second polypeptide is encoded by a nucleotide sequence at least 65%, at least 70%, at least 75%, at least 80%, at least 85%, at least 90%, at least 95%, at least 99%, or 100% identical to SEQ ID NO: 940.

[3756] In some aspects, the first polypeptide is encoded by a nucleotide sequence at least 65%, at least 70%, at least 75%, at least 80%, at least 85%, at least 90%, at least 95%, at least 99%, or 100% identical to SEQ ID NO: 941 and the second polypeptide is encoded by a nucleotide sequence at least 65%, at least 70%, at least 75%, at least 80%, at least 85%, at least 90%, at least 95%, at least 99%, or 100% identical to SEQ ID NO: 942.

[3757] In some aspects, the first polypeptide is encoded by a nucleotide sequence at least 65%, at least 70%, at least 75%, at least 80%, at least 85%, at least 90%, at least 95%, at least 99%, or 100% identical to SEQ ID NO: 943 and the second polypeptide is encoded by a nucleotide sequence at least 65%, at least 70%, at least 75%, at least 80%, at least 85%, at least 90%, at least 95%, at least 99%, or 100% identical to SEQ ID NO: 944.

[3758] In some aspects, the first polypeptide is encoded by a nucleotide sequence at least 65%, at least 70%, at least 75%, at least 80%, at least 85%, at least 90%, at least 95%, at least 99%, or 100% identical to SEQ ID NO: 945 and the second polypeptide is encoded by a nucleotide sequence at least 65%, at least 70%, at least 75%, at least 80%, at least 85%, at least 90%, at least 95%, at least 99%, or 100% identical to SEQ ID NO: 946.

[3759] In some aspects, the first polypeptide is encoded by a nucleotide sequence at least 65%, at least 70%, at least 75%, at least 80%, at least 85%, at least 90%, at least 95%, at least 99%, or 100% identical to SEQ ID NO: 947 and the second polypeptide is encoded by a nucleotide sequence at least 65%, at least 70%, at least 75%, at least 80%, at least 85%, at least 90%, at least 95%, at least 99%, or 100% identical to SEQ ID NO: 948.

[3760] In some aspects, the first polypeptide is encoded by a nucleotide sequence at least 65%, at least 70%, at least 75%, at least 80%, at least 85%, at least 90%, at least 95%, at least 99%, or 100% identical to SEQ ID NO: 949 and the second polypeptide is encoded by a nucleotide sequence at least 65%, at least 70%, at least 75%, at least 80%, at least 85%, at least 90%, at least 95%, at least 99%, or 100% identical to SEQ ID NO: 950.

[3761] In some aspects, the first polypeptide is encoded by a nucleotide sequence at least 65%, at least 70%, at least 75%, at least 80%, at least 85%, at least 90%, at least 95%, at least 99%, or 100% identical to SEQ ID NO: 951 and the second polypeptide is encoded by a nucleotide sequence at least 65%, at least 70%, at least 75%, at least 80%, at least 85%, at least 90%, at least 95%, at least 99%, or 100% identical to SEQ ID NO: 952.

[3762] In some aspects, the first polypeptide is encoded by a nucleotide sequence at least 65%, at least 70%, at least 75%, at least 80%, at least 85%, at least 90%, at least 95%, at least 99%, or 100% identical to SEQ ID NO: 953 and the second polypeptide is encoded by a nucleotide sequence at least 65%, at least 70%, at least 75%, at least 80%, at least 85%, at least 90%, at least 95%, at least 99%, or 100% identical to SEQ ID NO: 954.

[3763] In some aspects, the first polypeptide is encoded by a nucleotide sequence at least 65%, at least 70%, at least 75%, at least 80%, at least 85%, at least 90%, at least 95%, at least 99%, or 100% identical to SEQ ID NO: 955 and the second polypeptide is encoded by a nucleotide sequence at least 65%, at least 70%, at least 75%, at least 80%, at least 85%, at least 90%, at least 95%, at least 99%, or 100% identical to SEQ ID NO: 956.

[3764] In some aspects, the first polypeptide is encoded by a nucleotide sequence at least 65%, at least 70%, at least 75%, at least 80%, at least 85%, at least 90%, at least 95%, at least 99%, or 100% identical to SEQ ID NO: 957 and the second polypeptide is encoded by a nucleotide sequence at least 65%, at least 70%, at least 75%, at least 80%, at least 85%, at least 90%, at least 95%, at least 99%, or 100% identical to SEQ ID NO: 958.

[3765] In some aspects, the first polypeptide is encoded by a nucleotide sequence at least 65%, at least 70%, at least 75%, at least 80%, at least 85%, at least 90%, at least 95%, at least 99%, or 100% identical to SEQ ID NO: 959 and the second polypeptide is encoded by a nucleotide sequence at least 65%, at least 70%, at least 75%, at least 80%, at least 85%, at least 90%, at least 95%, at least 99%, or 100% identical to SEQ ID NO: 960.

[3766] In some aspects, the first polypeptide is encoded by a nucleotide sequence at least 65%, at least 70%, at least 75%, at least 80%, at least 85%, at least 90%, at least 95%, at least 99%, or 100% identical to SEQ ID NO: 961 and the second polypeptide is encoded by a nucleotide sequence at least 65%, at least 70%, at least 75%, at least 80%, at least 85%, at least 90%, at least 95%, at least 99%, or 100% identical to SEQ ID NO: 962.

[3767] In some aspects, the first polypeptide is encoded by a nucleotide sequence at least 65%, at least 70%, at least 75%, at least 80%, at least 85%, at least 90%, at least 95%, at least 99%, or 100% identical to SEQ ID NO: 963 and the second polypeptide is encoded by a nucleotide sequence at least 65%, at least 70%, at least 75%, at least 80%, at least 85%, at least 90%, at least 95%, at least 99%, or 100% identical to SEQ ID NO: 964.

[3768] In some aspects, the first polypeptide is encoded by a nucleotide sequence at least 65%, at least 70%, at least 75%, at least 80%, at least 85%, at least 90%, at least 95%, at least 99%, or 100% identical to SEQ ID NO: 965 and the second polypeptide is encoded by a nucleotide sequence at least 65%, at least 70%, at least 75%, at least 80%, at least 85%, at least 90%, at least 95%, at least 99%, or 100% identical to SEQ ID NO: 966.

[3769] In some aspects, the first polypeptide is encoded by a nucleotide sequence at least 65%, at least 70%, at least 75%, at least 80%, at least 85%, at least 90%, at least 95%, at least 99%, or 100% identical to SEQ ID NO: 978 and the second polypeptide is encoded by a nucleotide sequence at least 65%, at least 70%, at least 75%, at least 80%, at least 85%, at least 90%, at least 95%, at least 99%, or 100% identical to SEQ ID NO: 978.

[3770] In some aspects, the first polypeptide is encoded by a nucleotide sequence at least 65%, at least 70%, at least 75%, at least 80%, at least 85%, at least 90%, at least 95%, at least 99%, or 100% identical to SEQ ID NO: 979 and the second polypeptide is encoded by a nucleotide sequence at least 65%, at least 70%, at least 75%, at least 80%, at least 85%, at least 90%, at least 95%, at least 99%, or 100% identical to SEQ ID NO: 979.

[3771] In some aspects, the first polypeptide is encoded by a nucleotide sequence at least 65%, at least 70%, at least 75%, at least 80%, at least 85%, at least 90%, at least 95%, at least 99%, or 100% identical to SEQ ID NO: 980 and the second polypeptide is encoded by a nucleotide sequence at least 65%, at least 70%, at least 75%, at least 80%, at least 85%, at least 90%, at least 95%, at least 99%, or 100% identical to SEQ ID NO: 980.

[3772] In some aspects, the first polypeptide is encoded by a nucleotide sequence at least 65%, at least 70%, at least 75%, at least 80%, at least 85%, at least 90%, at least 95%, at least 99%, or 100% identical to SEQ ID NO: 981 and the second polypeptide is encoded by a nucleotide sequence at least 65%, at least 70%, at least 75%, at least 80%, at least 85%, at least 90%, at least 95%, at least 99%, or 100% identical to SEQ ID NO: 981.

[3773] In some aspects, the first polypeptide is encoded by a nucleotide sequence at least 65%, at least 70%, at least 75%, at least 80%, at least 85%, at least 90%, at least 95%, at least 99%, or 100% identical to SEQ ID NO: 982 and the second polypeptide is encoded by a nucleotide sequence at least 65%, at least 70%, at least 75%, at least 80%, at least 85%, at least 90%, at least 95%, at least 99%, or 100% identical to SEQ ID NO: 982.

[3774] In some aspects, the first polypeptide is encoded by a nucleotide sequence at least 65%, at least 70%, at least 75%, at least 80%, at least 85%, at least 90%, at least 95%, at least 99%, or 100% identical to SEQ ID NO: 983 and the second polypeptide is encoded by a nucleotide sequence at least 65%, at least 70%, at least 75%, at least 80%, at least 85%, at least 90%, at least 95%, at least 99%, or 100% identical to SEQ ID NO: 983.

[3775] In some aspects, the first polypeptide is encoded by a nucleotide sequence at least 65%, at least 70%, at least 75%, at least 80%, at least 85%, at least 90%, at least 95%, at least 99%, or 100% identical to SEQ ID NO: 986 and the second polypeptide is encoded by a nucleotide sequence at least 65%, at least 70%, at least 75%, at least 80%, at least 85%, at least 90%, at least 95%, at least 99%, or 100% identical to SEQ ID NO: 987.

[3776] In some aspects, the first polypeptide is encoded by a nucleotide sequence at least 65%, at least 70%, at least 75%, at least 80%, at least 85%, at least 90%, at least 95%, at least 99%, or 100% identical to SEQ ID NO: 625 and the second polypeptide is encoded by a nucleotide sequence at least 65%, at least 70%, at least 75%, at least 80%, at least 85%, at least 90%, at least 95%, at least 99%, or 100% identical to SEQ ID NO: 625.

[3777] In some aspects, the first polypeptide is encoded by a nucleotide sequence at least 65%, at least 70%, at least 75%, at least 80%, at least 85%, at least 90%, at least 95%, at least 99%, or 100% identical to SEQ ID NO: 991 and the second polypeptide is encoded by a nucleotide sequence at least 65%, at least 70%, at least 75%, at least 80%, at least 85%, at least 90%, at least 95%, at least 99%, or 100% identical to SEQ ID NO: 992.

[3778] In some aspects, the first polypeptide is encoded by a nucleotide sequence at least 65%, at least 70%, at least 75%, at least 80%, at least 85%, at least 90%, at least 95%, at least 99%, or 100% identical to SEQ ID NO: 995 and the second polypeptide is encoded by a nucleotide sequence at least 65%, at least 70%, at least 75%, at least 80%, at least 85%, at least 90%, at least 95%, at least 99%, or 100% identical to SEQ ID NO: 996.

[3779] In some aspects, the first polypeptide is encoded by a nucleotide sequence at least 65%, at least 70%, at least 75%, at least 80%, at least 85%, at least 90%, at least 95%, at least 99%, or 100% identical to SEQ ID NO: 999 and the second polypeptide is encoded by a nucleotide sequence at least 65%, at least 70%, at least 75%, at least 80%, at least 85%, at least 90%, at least 95%, at least 99%, or 100% identical to SEQ ID NO: 1000.

[3780] In some aspects, the first polypeptide is encoded by a nucleotide sequence at least 65%, at least 70%, at least 75%, at least 80%, at least 85%, at least 90%, at least 95%, at least 99%, or 100% identical to SEQ ID NO: 1003 and the second polypeptide is encoded by a nucleotide sequence at least 65%, at least 70%, at least 75%, at least 80%, at least 85%, at least 90%, at least 95%, at least 99%, or 100% identical to SEQ ID NO: 1004.

[3781] In some aspects, the first polypeptide is encoded by a nucleotide sequence at least 65%, at least 70%, at least 75%, at least 80%, at least 85%, at least 90%, at least 95%, at least 99%, or 100% identical to SEQ ID NO: 1007 and the second polypeptide is encoded by a nucleotide sequence at least 65%, at least 70%, at least 75%, at least 80%, at least 85%, at least 90%, at least 95%, at least 99%, or 100% identical to SEQ ID NO: 1008.

[3782] In some aspects, the first polypeptide is encoded by a nucleotide sequence at least 65%, at least 70%, at least 75%, at least 80%, at least 85%, at least 90%, at least 95%, at least 99%, or 100% identical to SEQ ID NO: 1011 and the second polypeptide is encoded by a nucleotide sequence at least 65%, at least 70%, at least 75%, at least 80%, at least 85%, at least 90%, at least 95%, at least 99%, or 100% identical to SEQ ID NO: 1012.

[3783] In some aspects, the first polypeptide is encoded by a nucleotide sequence at least 65%, at least 70%, at least 75%, at least 80%, at least 85%, at least 90%, at least 95%, at least 99%, or 100% identical to SEQ ID NO: 1015 and the second polypeptide is encoded by a nucleotide sequence at least 65%, at least 70%, at least 75%, at least 80%, at least 85%, at least 90%, at least 95%, at least 99%, or 100% identical to SEQ ID NO: 1016.

[3784] In some aspects, the first polypeptide is encoded by a nucleotide sequence at least 65%, at least 70%, at least 75%, at least 80%, at least 85%, at least 90%, at least 95%, at least 99%, or 100% identical to SEQ ID NO: 1019 and the second polypeptide is encoded by a nucleotide sequence at least 65%, at least 70%, at least 75%, at least 80%, at least 85%, at least 90%, at least 95%, at least 99%, or 100% identical to SEQ ID NO: 1020.

[3785] In some aspects, the first polypeptide is encoded by a nucleotide sequence at least 65%, at least 70%, at least 75%, at least 80%, at least 85%, at least 90%, at least 95%, at least 99%, or 100% identical to SEQ ID NO: 1023 and the second polypeptide is encoded by a nucleotide sequence at least 65%, at least 70%, at least 75%, at least 80%, at least 85%, at least 90%, at least 95%, at least 99%, or 100% identical to SEQ ID NO: 1024.

[3786] In some aspects, the first polypeptide is encoded by a nucleotide sequence at least 65%, at least 70%, at least 75%, at least 80%, at least 85%, at least 90%, at least 95%, at least 99%, or 100% identical to SEQ ID NO: 1027 and the second polypeptide is encoded by a nucleotide sequence at least 65%, at least 70%, at least 75%, at least 80%, at least 85%, at least 90%, at least 95%, at least 99%, or 100% identical to SEQ ID NO: 1028.

[3787] In some aspects, the first polypeptide is encoded by a nucleotide sequence at least 65%, at least 70%, at least 75%, at least 80%, at least 85%, at least 90%, at least 95%, at least 99%, or 100% identical to SEQ ID NO: 1031 and the second polypeptide is encoded by a nucleotide sequence at least 65%, at least 70%, at least 75%, at least 80%, at least 85%, at least 90%, at least 95%, at least 99%, or 100% identical to SEQ ID NO: 1032.

[3788] In some aspects, the first polypeptide is encoded by a nucleotide sequence at least 65%, at least 70%, at least 75%, at least 80%, at least 85%, at least 90%, at least 95%, at least 99%, or 100% identical to SEQ ID NO: 1035 and the second polypeptide is encoded by a nucleotide sequence at least 65%, at least 70%, at least 75%, at least 80%, at least 85%, at least 90%, at least 95%, at least 99%, or 100% identical to SEQ ID NO: 1036.

[3789] In some aspects, the first polypeptide is encoded by a nucleotide sequence at least 65%, at least 70%, at least 75%, at least 80%, at least 85%, at least 90%, at least 95%, at least 99%, or 100% identical to SEQ ID NO: 1039 and the second polypeptide is encoded by a nucleotide sequence at least 65%, at least 70%, at least 75%, at least 80%, at least 85%, at least 90%, at least 95%, at least 99%, or 100% identical to SEQ ID NO: 1040.

[3790] In some aspects, the first polypeptide is encoded by a nucleotide sequence at least 65%, at least 70%, at least 75%, at least 80%, at least 85%, at least 90%, at least 95%, at least 99%, or 100% identical to SEQ ID NO: 1043 and the second polypeptide is encoded by a nucleotide sequence at least 65%, at least 70%, at least 75%, at least 80%, at least 85%, at least 90%, at least 95%, at least 99%, or 100% identical to SEQ ID NO: 1044.

[3791] In some aspects, an antigen binding polypeptide or antigen binding polypeptide complex disclosed herein comprises a VL comprising a CDR1, a CDR2, and a CDR3 of any one of SEQ ID NOs: 4, 11, 17, 25, 33, 39, 43, 50, 60, 67, 74, 81, 88, 95, 101, 107, 114, 121, 127, 132, 140, 147, 154, 161, 168, 174, 181, 188, 194, 201, 207, 214, 221, 228, 234, 240, 243, 247, 250, 251, 252, 255, 284, 286, 289, 291, 293, 295, 299, 300, 302, 303, 305, 307, 308, 310, 312, 314, 315, 317, 323, 639, 649, 658, 667, 675, 686, 694, 702, 711, 772, 780, 787, 796, 802, 809, 816, 822, 831, 838, 844, 851, 860, 867, 873, 880, and 988.

[3792] In some aspects, an antigen binding polypeptide or antigen binding polypeptide complex disclosed herein comprises a VH comprising a CDR1, a CDR2, and a CDR3 of any one of SEQ ID NOs: 8, 14, 21, 22, 29, 37, 47, 54, 57, 64, 71, 78, 85, 92, 98, 104, 111, 118, 125, 129, 136, 137, 144, 151, 158, 165, 171, 178, 185, 191, 198, 204, 211, 218, 225, 231, 238, 245, 254, 258, 260, 262, 264, 266, 268, 270, 272, 275, 277, 279, 280, 282, 298, 321, 331, 626, 644, 653, 662, 670, 681, 689, 698, 706, 715, 775, 777, 784, 791, 800, 806, 813, 820, 826, 835, 842, 848, 855, 864, 871, 877, and 884.

[3793] In some aspects, an antigen binding polypeptide or antigen binding polypeptide complex disclosed herein comprises a VL comprising a CDR1, a CDR2, and a CDR3 of any one of Bebtelovimab, Nirsevimab, Cilgavimab, Tixagevimab, Casirivimab, Imdevimab, Tocilizumab, AZD3152, MEDI8852, Bamlanivimab, Etesevimab, Sotrovimab, Regdanvimab, TY027, BRII-196+BRII-198, BI 767551 (DZIF-10c), SCTA01, ADG20, MAD0004J08, MW33, DXP593, COVI-AMG (STI-2020), LY-CoV1404, LY-CoV555, LY-CoV016, XVR011, 47D11, ADM03820, DXP604, C144-LS, C-135-LS, BGB-DXP593, AZD7442, and AZD5156.

[3794] In some aspects, an antigen binding polypeptide or antigen binding polypeptide complex disclosed herein comprises a VH comprising a CDR1, a CDR2, and a CDR3 of any one of Bebtelovimab, Nirsevimab, Cilgavimab, Tixagevimab, Casirivimab, Imdevimab, Tocilizumab, AZD3152, MEDI8852, Bamlanivimab, Etesevimab, Sotrovimab, Regdanvimab, TY027, BRII-196+BRII-198, BI 767551 (DZIF-10c), SCTA01, ADG20, MAD0004J08, MW33, DXP593, COVI-AMG (STI-2020), LY-CoV1404, LY-CoV555, LY-CoV016, XVR011, 47D11, ADM03820, DXP604, C144-LS, C-135-LS, BGB-DXP593, AZD7442, and AZD5156.

[3795] In some aspects, an antigen binding polypeptide or antigen binding polypeptide complex disclosed herein comprise a detectable label. In some aspects, the detectable label is a radioactive label, chemiluminescent label, fluorescent label, enzyme, peptide tag, or a combination thereof. In some aspects, the peptide tag is a poly histidine tag consisting of from about four to about 10 histidine residues. In some aspects, the poly histidine tag consists of about eight histidine residues.

[3796] In some aspects, an antigen binding polypeptide or antigen binding polypeptide complex disclosed herein is conjugated to an agent as an antibody-drug conjugate (ADC). In some aspects, the agent is a cytotoxic agent, immunomodulating agent, imaging agent, or therapeutic protein, or a combination thereof.

[3797] In some aspects, an antigen binding polypeptide or antigen binding polypeptide complex disclosed herein specifically binds to the SARS-CoV-2 protein with an equilibrium dissociation constant (K_{D}) of from about 10 μM to about 1 pM.

[3798] In some aspects, an antigen binding polypeptide, antigen binding polypeptide complex, or antibody or antigen binding fragment thereof disclosed herein is or comprises a class I antibody or antigen binding fragment thereof; class II antibody or antigen binding fragment thereof; class III antibody or antigen binding fragment thereof; class IV antibody or antigen binding fragment thereof; class I and II antibody or antigen binding fragment thereof; class I and III antibody or antigen binding fragment thereof; class I and IV antibody or antigen binding fragment thereof; class II and III antibody or antigen binding fragment thereof; class II and IV antibody or antigen binding fragment thereof; class III and IV antibody or antigen binding fragment thereof; class I, II and III antibody or antigen binding fragment thereof; class I, II and IV antibody or antigen binding fragment thereof; class I, III and IV antibody or antigen binding fragment thereof; class II, III and IV antibody or antigen binding fragment thereof; or class I, II, III and IV antibody or antigen binding fragment thereof. According to the published literature, anti-SARS-CoV-2 antibodies are generally divided into four main classes depending on the epitopes they target in the RBD (receptor binding domain) of the S (spike) protein. Several different classification systems have been proposed, and the proposed classification systems are not rigid, with antibodies displaying characteristics and properties of more than one antibody classes. An exemplary classification, and the most commonly referenced, is that proposed by Barnes et al. (Barnes C O, et al., SARS-CoV-2 neutralizing antibody structures inform therapeutic strategies. Nature. 2020 December; 588(7839):682-687). Class 1 antibodies (or antigen binding fragments thereof) compete with ACE2 for binding site and only recognize “up” RBD. Class 2 antibodies (or antigen binding fragments thereof) are capable of binding to RBD in both “up” and “down” conformations. As with Class 1, they also compete with ACE2 for RBD binding. Class 3 antibodies (or antigen binding fragments thereof) bind to the RBD on the opposite side of Class 1 and Class 2 binding epitope close to an N-glycan attached to residue N343. Class 4 antibodies (or antigen binding fragments thereof) target a cryptic epitope that faces the interior of the S protein on “up” RBDs. Some anti-SARS-CoV-2 neutralizing antibodies (or antigen binding fragments thereof) can display properties of more than one Classes of anti-SARS-CoV-2 antibodies. For example, an antibody (e.g., A18-448, or antigen binding fragments thereof) can bind to an epitope to which antibodies (or antigen binding fragments thereof) belonging to one of the four anti-SARS-CoV-2 antibody Classes bind and can compete for binding with one or more antibodies (or antigen binding fragments thereof) belonging to one or more different Classes of anti-SARS-CoV-2 antibodies. For example, A18-448 (or antigen binding fragments thereof) binds to an epitope located in a region of RBD to which Class IV anti-SARS-CoV-2 antibodies (or antigen binding fragments thereof) bind, but can compete for binding to RBD with anti-SARS-CoV-2 antibodies (or antigen binding fragments thereof) belonging to Class I and Class III. Thus, A18-448 can be described, for example, as a Class I/IV anti-SARS-CoV-2 antibody (or antigen binding fragment thereof).

[3799] According to the published literature, anti-SARS-CoV-2 antibodies can also be divided into a different number of classes, for example, into five main classes (see, for example, Starr. T. N., Czudnochowski, N., Liu. Z, et al, SARS-CoV-2 RBD antibodies that maximize breadth and resistance to escape. Nature 597, 97-102 (2021). Thus, in some aspects, an antigen binding polypeptide, antigen binding polypeptide complex, or antibody or antigen binding fragment thereof disclosed herein can be or can comprise a class V antibody (or antigen binding fragments thereof), or an antibody (or antigen binding fragments thereof) having a combination of classes including class V and one or more other classes described herein (e.g., class I, class II, class III, and/or class IV).

[3800] In some aspects, an antigen binding polypeptide complex disclosed herein is bispecific, trispecific or tetraspecific and has greater neutralization potency against SARS-CoV-2 virus than a monospecific antigen binding polypeptide complex that specifically binds to one of the same antigens as the bispecific, trispecific or tetraspecific antigen binding polypeptide complex.

[3801] In some aspects, an antigen binding polypeptide complex disclosed herein is bispecific, trispecific or tetraspecific and has greater neutralization potency against SARS-CoV-2 virus than a mixture of monospecific antigen binding polypeptide complexes that specifically bind to the same antigens as the bispecific, trispecific or tetraspecific antigen binding polypeptide complex.

[3802] In some aspects, the antigen binding polypeptides or the antigen binding polypeptide complexes disclosed herein bind to a SARS-CoV-2 virus. In some aspects, the SARS-CoV-2 virus is the original Wuhan strain (WA1), a D614G spike protein mutant (e.g., D614G), an Alpha variant (e.g., B.1.1.7), a Beta variant (e.g., B.1.351), a Gamma variant (e.g., P.1), a Delta variant (e.g., B.1.617.2 or AY.1), a Kappa variant (e.g., B.1.617.1), an lota variant (e.g., B.1.526), a Lambda variant (e.g., C.37), an Epsilon variant (e.g., B.1.429, B.1.427 or CAL.20C), a Mu variant (e.g., B.1.621), a Theta variant (e.g., P.3), a Zeta variant (e.g., P.2), an Eta variant (e.g., B.1.525), a R.1 variant, a C.1.2 variant, or an Omicron variant (e.g., B.1.1.529, BA.1, BA.2, BA.2.12.1, BA.4, BA.4/5, BA.5, BQ.1, BQ.1.1, BA.2.75, BA.2.75.2, BA.4.6, BQ.1.1, BJ.1, XBB, XBB1.5, BF.7, CH.1.1, BA.2.86, EG.5, JN.1, JD.1, EG.5.1, FL.1.5.1, HK.3, HV.1, JD.1.1, JF.1, XBB.1, XBB.1.16, XBB.1.16.6, or XBB.2.3.2), or a combination or variant thereof. In some aspects, the SARS-CoV-2 virus is JN.1.13.1, KP.2, JN.1.16, JN.1.16.1, JN.1.13, JN.1.18, KP.2.3, LB.1, KP.3, KP.3.1.1, or a combination or variant thereof. In some aspects, the Omicron variant is B.1.1.529, BA.1, BA.2, BA.2.12.1, BA.4, BA.4/5, BA.5, BQ.1, BQ.1.1, BA.2.75, BA.2.75.2, BA.4.6, BQ.1.1, BJ.1, XBB, XBB1.5, BF.7, CH.1.1, BA.2.86, EG.5, JN.1, JD.1, EG.5.1, FL.1.5.1, HK.3, HV.1, JD.1.1, JF.1, XBB.1, XBB.1.16, XBB.1.16.6, XBB.2.3.2, JN.1.13.1, KP.2, JN.1.16, JN.1.16.1, JN.1.13, JN.1.18, KP.2.3, LB.1, KP.3, KP.3.1.1, or a combination or variant thereof.

[3803] In some aspects, the antigen binding polypeptides and polypeptide complexes disclosed herein have broad reactivity against a viral antigen selected from the group consisting of influenza virus neuraminidase, influenza virus hemagglutinin, human respiratory syncytial virus (RSV)-viral proteins, RSV F glycoprotein, RSV G glycoprotein, herpes simplex virus (HSV) viral proteins, herpes simplex virus glycoproteins gB, gC, gD, and gE, chlamydia MOMP and PorB antigens, core protein, matrix protein or other protein of Dengue virus, measles virus hemagglutinin, herpes simplex virus type 2 glycoprotein gB, poliovirus 1 VP1, envelope glycoproteins of HIV 1, hepatitis B surface antigen, diptheria toxin, streptococcus 24M epitope, gonococcal pilin, pseudorabies virus g50) (gpD), pseudorabies virus II (gpB), pseudorabies virus III (gpC), pseudorabies virus glycoprotein H, pseudorabies virus glycoprotein E, transmissible gastroenteritis glycoprotein 195, transmissible gastroenteritis matrix protein, swine rotavirus glycoprotein 38, swine parvovirus capsid protein, Serpulina hydodysenteriae protective antigen, bovine viral diarrhea glycoprotein 55. Newcastle disease virus hemagglutinin-neuraminidase, swine flu hemagglutinin, swine flu neuraminidase, foot and mouth disease virus, hog colera virus, swine influenza virus. African swine fever virus. Mycoplasma liyopneutiioniae, infectious bovine rhinotracheitis virus, infectious bovine rhinotracheitis virus glycoprotein E, glycoprotein G, infectious laryngotracheitis virus, infectious laryngotracheitis virus glycoprotein G or glycoprotein I, a glycoprotein of La Crosse virus, neonatal calf diarrhoea virus. Venezuelan equine encephalomyelitis virus, punta toro virus, murine leukemia virus, mouse mammary tumor virus, hepatitis B virus core protein and hepatitis B virus surface antigen or a fragment or derivative thereof, antigen of equine influenza virus or equine herpes virus, including equine influenza virus type A/Alaska 91 neuraminidase, equine influenza virus typeA/Miami 63 neuraminidase, equine influenza virus type A/Kentucky 81 neuraminidase equine herpes virus type 1 glycoprotein B, and equine herpes virus type 1 glycoprotein D, antigen of bovine respiratory syncytial virus or bovine parainfluenza virus, bovine respiratory syncytial virus attachment protein (BRSV G), bovine respiratory syncytial virus fusion protein (BRSV F), bovine respiratory syncytial virus nucleocapsid protein (BRSVN), bovine parainfluenza virus type 3 fusion protein, bovine parainfluenza virus type 3 hemagglutinin neuraminidase, bovine E viral diarrhoea virus glycoprotein 48 and glycoprotein 53, glycoprotein E of Dengue virus, and glycoprotein E1E2 of human hepatitis C virus.

[3804] In some aspects, the antigen binding polypeptides and polypeptide complexes disclosed herein bind to at least one epitope on at least one antigen selected from the group consisting of influenza virus neuraminidase, influenza virus hemagglutinin, human respiratory syncytial virus (RSV)-viral proteins, RSV F glycoprotein, RSV G glycoprotein, herpes simplex virus (HSV) viral proteins, herpes simplex virus glycoproteins gB, gC, gD, and gE, chlamydia MOMP and PorB antigens, core protein, matrix protein or other protein of Dengue virus, measles virus hemagglutinin, herpes simplex virus type 2 glycoprotein gB, poliovirus 1 VP1, envelope glycoproteins of HIV 1, hepatitis B surface antigen, diptheria toxin, streptococcus 24M epitope, gonococcal pilin, pseudorabies virus g50) (gpD), pseudorabies virus II (gpB), pseudorabies virus III (gpC), pseudorabies virus glycoprotein H, pseudorabies virus glycoprotein E, transmissible gastroenteritis glycoprotein 195, transmissible gastroenteritis matrix protein, swine rotavirus glycoprotein 38, swine parvovirus capsid protein. Serpulina hydodysenteriae protective antigen, bovine viral diarrhea glycoprotein 55. Newcastle disease virus hemagglutinin-neuraminidase, swine flu hemagglutinin, swine flu neuraminidase, foot and mouth disease virus, hog colera virus, swine influenza virus. African swine fever virus, Mycoplasma liyopneutiioniae, infectious bovine rhinotracheitis virus, infectious bovine rhinotracheitis virus glycoprotein E, glycoprotein G, infectious laryngotracheitis virus, infectious laryngotracheitis virus glycoprotein G or glycoprotein I, a glycoprotein of La Crosse virus, neonatal calf diarrhoea virus. Venezuelan equine encephalomyelitis virus, punta toro virus, murine leukemia virus, mouse mammary tumor virus, hepatitis B virus core protein and hepatitis B virus surface antigen or a fragment or derivative thereof, antigen of equine influenza virus or equine herpes virus, including equine influenza virus type A/Alaska 91 neuraminidase, equine influenza virus typeA/Miami 63 neuraminidase, equine influenza virus type A/Kentucky 81 neuraminidase equine herpes virus type 1 glycoprotein B, and equine herpes virus type 1 glycoprotein D, antigen of bovine respiratory syncytial virus or bovine parainfluenza virus, bovine respiratory syncytial virus attachment protein (BRSV G), bovine respiratory syncytial virus fusion protein (BRSV F), bovine respiratory syncytial virus nucleocapsid protein (BRSVN), bovine parainfluenza virus type 3 fusion protein, bovine parainfluenza virus type 3 hemagglutinin neuraminidase, bovine E viral diarrhoea virus glycoprotein 48 and glycoprotein 53, glycoprotein E of Dengue virus, and glycoprotein E1E2 of human hepatitis C virus.

[3805] In some aspects, the antigen binding polypeptides and polypeptide complexes disclosed herein specifically bind to at least one epitope on at least one antigen selected from the group consisting of A2AR, APRIL, ATPDase, BAFF, BAFFR, BCMA, BlyS, BTK, BTLA, B7DC, B7H1, B7H2, B7H3, B7H4, B7H5, B7H6, B7H7, B7RP1, B7-4, C3, C5, CCL2, CCL3, CCL4, CCL5, CCL7, CCL8, CCL11, CCL15, CCL17, CCL19, CCL20, CCL21, CCL25 CCR3, CCR4, CD3, CD16A, CD19, CD20, CD24, CD27, CD28, CD30, CD38, CD39, CD40, CD40L, CD47, CD52, CD70, CD80, CD86, CD123, CD133, CD137, CD137L, CD160, CD272, CEACAM5, CLEC9, CLEC91, CRTH2, CSF-1, CSF-2, CSF-3, CXCL1, CXCL2, CXCL4, CXCL12, CXCL13, CXCR3, cMet, CTLA4, DLL3, DLL4, DNGR-1, E-cadherin, EGFR, ENTPD1, EpCAM, FCER1, FCER1A, FCER2, FGFR, FLAP, FOLH1, Gi24, GITR, GITRL, GPR5, GP100, GPRC5D, HER2, HER3, ICOSL, ICOS, HHLA2, HMGB1, HVEM, IDO, IFNa, IgE, IGF1R, IL2Rbeta, IL1, IL1A, IL1B, IL1F10, IL2, IL4, IL4Ra, IL5, IL5R, IL6, IL7, IL7Ra, IL8, IL9, IL9R, IL10, rhIL1O, IL12, IL13, IL13Ra1, IL13Ra2, IL15, IL17, IL17Rb, IL18, IL22, IL23, IL25, IL7, IL33, IL35, ITGB4, ITK, KIR, LAG3, LAMP1, leptin, LPFS2, MHC class II, MUC-1, MUC-16, NCR3LG1, NKG2D, NKp46, NTPDase-1, OX40, OX40L, PD-1, PD-L1, PD-L2, PROM1, S152, SIRPalpha, SISP1, SLC, SPG64, ST2, STEAP1, STEAP2, Syk kinase, STEAP1, TROP2, TACI, TDO, TGFBETA, T14, TIGIT, TIM3, TLR, TLR2, TLR4, TLR5, TLR9, TMEF1, TNFa, TNFRSF7, Tp55, TREM1, TSLP, TSLPR, TWEAK, VEGF, VISTA, Vstm3, and WUCAM.

[3806] In some aspects, the antigen binding polypeptides or the antigen binding polypeptide complexes disclosed herein comprise a VH comprising a mutation at an N-glycosylation site. In some aspects, the mutation at an N-glycosylation site is at amino acid N62 of the VH region or equivalent thereof. In some aspects, the mutation at an N-glycosylation site at amino acid N62 is N62Q or N62S.

[3807] In some aspects, the antigen binding polypeptides or the antigen binding polypeptide complexes disclosed herein have an isoelectric point (pI) of from about 7 to about 9.

[3808] In some aspects, provided herein are antibodies or antigen binding fragments thereof comprising the antigen binding polypeptides or antigen binding polypeptide complexes disclosed herein. In some aspects, an antibody or antigen binding fragment thereof comprising the antigen binding polypeptides or antigen binding polypeptide complexes disclosed herein is IgG, IgM, IgE, IgA or IgD. In some aspects, the IgG is IgG1, IgG2, IgG3 or IgG4. In some aspects, an antibody or antigen binding fragment thereof comprising the antigen binding polypeptides or antigen binding polypeptide complexes disclosed herein is a Fab, scFab, Fab′, F(ab′)₂, Fv or scFv. In some aspects, an antibody or antigen binding fragment thereof comprising the antigen binding polypeptides or antigen binding polypeptide complexes disclosed herein is human or humanized.

[3809] In some aspects, provided herein are polynucleotides encoding the antigen binding polypeptides or antigen binding polypeptide complexes disclosed herein, or the antibodies or antigen binding fragments thereof comprising the antigen binding polypeptides or antigen binding polypeptide complexes disclosed herein. In some aspects, the polynucleotides disclosed herein comprise a nucleotide sequence having at least 65%, at least 70%, at least 75%, at least 80%, at least 85%, at least 90%, at least 95%, at least 99%, or 100% identity to a nucleotide sequence of any one of SEQ ID NOs: 503-625, 718-719, 722-723, 726-727, 730-731, 734-735, 738-739, 742-743, 746-747, 750-751, 754-755, 762-763, 927-966, 978-983, 986-987, 991-992, 995-996, 999-1000, 1003-1004, 1007-1008, 1011-1012, 1015-1016, 1019-1020, 1023-1024, 1027-1028, 1031-1032, 1035-1036, 1039-1040, and 1043-1044.

[3810] In some aspects, provided herein are vectors comprising the polynucleotides disclosed herein. In some aspects, provided herein are host cells comprising the vectors disclosed herein.

[3811] In some aspects, provided herein are mRNAs encoding the antigen binding polypeptides, antigen binding polypeptide complexes, or the antibodies or antigen binding fragments thereof provided herein. In some aspects, the mRNAs provided herein comprise a 5′-cap and/or a poly(A) tail.

[3812] In some aspects, provided herein are lipid nanoparticles (LNP) comprising the mRNAs provided herein.

[3813] In some aspects, provided herein are chimeric antigen receptor (CAR) comprising the antigen binding polypeptide, antigen binding polypeptide complexes, or antibodies or antigen binding fragments thereof disclosed herein. In some aspects, provided herein are immune cells comprising the CARs disclosed herein.

[3814] In some aspects, provided herein are pharmaceutical compositions comprising the antigen binding polypeptides, the antigen binding polypeptide complexes, the antibodies or antigen binding fragments thereof, the polynucleotides, the vectors, the host cells, the mRNAs, the LNPs, the CARs, the immune cells disclosed herein, or any combination thereof. In some aspects, the pharmaceutical compositions disclosed herein further comprise a pharmaceutically acceptable carrier, an additional pharmaceutical agent, or a combination thereof.

[3815] In some aspects, provided herein are kits comprising the antigen binding polypeptides, the antigen binding polypeptide complexes, the antibodies or antigen binding fragments thereof, the polynucleotides, the vectors, the host cells, the mRNAs, the LNPs, the CARs, the immune cells, the pharmaceutical compositions disclosed herein, or any combination thereof.

[3816] In some aspects, provided herein are methods of preventing or treating a SARS-CoV-2 viral infection in a subject in need thereof, comprising administering to the subject a therapeutically effective amount of the antigen binding polypeptides, the antigen binding polypeptide complexes, the antibodies or antigen binding fragments thereof, the polynucleotides, the vectors, the host cells, the mRNAs, the LNPs, the CARs, the immune cells, the pharmaceutical compositions disclosed herein, or any combination thereof.

[3817] In some aspects, provided herein are methods of preventing or treating coronavirus disease 2019 (COVID-19) in a subject in need thereof, comprising administering to the subject a therapeutically effective amount of the antigen binding polypeptides, the antigen binding polypeptide complexes, the antibodies or antigen binding fragments thereof, the polynucleotides, the vectors, the host cells, the mRNAs, the LNPs, the CARs, the immune cells, the pharmaceutical compositions disclosed herein, or any combination thereof.

[3818] In some aspects, provided herein are methods of diagnosing a subject as being infected with a SARS-CoV-2 virus or suspected of being infected with a SARS-CoV-2 virus, comprising (i) contacting a sample obtained from the subject with the antigen binding polypeptides, the antigen binding polypeptide complexes, the antibodies or antigen binding fragments thereof disclosed herein, or any combination thereof; (ii) detecting the presence or absence of a virus complex which contains the polypeptide or a fragment thereof, polypeptide complex or a fragment thereof, antibody or a fragment thereof and a SARS-CoV-2 virus, virion or fragment thereof; and (iii) diagnosing the subject as being infected with a SARS-CoV-2 virus or suspected of being infected with a SARS-CoV-2 virus when the presence of the virus complex is detected.

[3819] In some aspects, provided herein are methods of diagnosing a subject as not being infected with a SARS-CoV-2 virus or not suspected of being infected with a SARS-CoV-2 virus, comprising (i) contacting a sample obtained from the subject with the antigen binding polypeptides, the antigen binding polypeptide complexes, the antibodies or antigen binding fragments thereof disclosed herein, or any combination thereof; (ii) detecting the presence or absence of a virus complex which contains the polypeptide or a fragment thereof, polypeptide complex or a fragment thereof, antibody or a fragment thereof and a SARS-CoV-2 virus, virion or fragment thereof; and (iii) diagnosing the subject as not being infected with a SARS-CoV-2 virus or not suspected of being infected with a SARS-CoV-2 virus when the presence of the virus complex is not detected.

[3820] In some aspects, provided herein are methods of diagnosing a subject as having COVID-19 or suspected of having COVID-19, comprising (i) contacting a sample obtained from the subject with the antigen binding polypeptides, the antigen binding polypeptide complexes, the antibodies or antigen binding fragments thereof disclosed herein, or any combination thereof; (ii) detecting the presence or absence of a virus complex which contains the polypeptide or a fragment thereof, polypeptide complex or a fragment thereof, antibody or a fragment thereof and a SARS-CoV-2 virus, virion or fragment thereof; and (iii) diagnosing the subject as having COVID-19 or suspected of having COVID-19 when the presence of the virus complex is detected.

[3821] In some aspects, provided herein are methods of diagnosing a subject as not being infected with a SARS-CoV-2 virus or not suspected of being infected with a SARS-CoV-2 virus, comprising (i) contacting a sample obtained from the subject with the antigen binding polypeptides, the antigen binding polypeptide complexes, the antibodies or antigen binding fragments thereof disclosed herein, or any combination thereof; (ii) detecting the presence or absence of a virus complex which contains the polypeptide or a fragment thereof, polypeptide complex or a fragment thereof, antibody or a fragment thereof and a SARS-CoV-2 virus, virion or fragment thereof; and (iii) diagnosing the subject as not being infected with a SARS-CoV-2 virus or not suspected of being infected with a SARS-CoV-2 virus when the presence of the virus complex is not detected.

[3822] In some aspects, provided herein are methods of diagnosing a subject as having COVID-19 or suspected of having COVID-19, comprising (i) contacting a sample obtained from the subject with the antigen binding polypeptides, the antigen binding polypeptide complexes, the antibodies or antigen binding fragments thereof disclosed herein, or any combination thereof; (ii) detecting the presence or absence of a virus complex which contains the polypeptide or a fragment thereof, polypeptide complex or a fragment thereof, antibody or a fragment thereof and a SARS-CoV-2 virus, virion or fragment thereof; and (iii) diagnosing the subject as having COVID-19 or suspected of having COVID-19 when the presence of the virus complex is detected.

[3823] In some aspects, provided herein are of diagnosing a subject as not having COVID-19 or not suspected of having COVID-19, comprising (i) contacting a sample obtained from the subject with the antigen binding polypeptides, the antigen binding polypeptide complexes, the antibodies or antigen binding fragments thereof disclosed herein, or any combination thereof; (ii) detecting the presence or absence of a virus complex which contains the polypeptide or a fragment thereof, polypeptide complex or a fragment thereof, antibody or a fragment thereof and a SARS-CoV-2 virus, virion or fragment thereof; and (iii) diagnosing the subject as not having COVID-19 or not suspected of having COVID-19 when the presence of the virus complex is not detected.

[3824] In some aspects, the samples use in the methods provided herein are a nasal swab, tissue sample, saliva, plasma or blood. In some aspects, the methods provided herein comprise detecting the presence or absence of the virus complex comprises an enzyme linked immunosorbent assay (ELISA), immunospot assay, lateral flow assay, flow cytometry, immunohistochemistry or western blot.

[3825] In some aspects, provided herein are anti-SARS-CoV-2 virus antibodies or an antigen binding fragments thereof, wherein the anti-SARS-CoV-2 virus antibodies or an antigen binding fragments thereof comprise: (a) one or more immunoglobulin light chain constant domain (CL) and (b) one or more immunoglobulin heavy chain 1 constant domain (CH1); and wherein the anti-SARS-CoV-2 virus antibodies or an antigen binding fragments thereof (i) have an isoelectric point (pI), and after administered to a subject has (ii) a higher peak serum levels, and (iii) a reduced clearance levels, as compared to a same antibody or antigen binding fragments thereof not comprising one or more immunoglobulin light chain constant domain (CL) and (b) one or more immunoglobulin heavy chain 1 constant domain (CH1).

[3826] It is to be understood that “a same antibody not comprising a CL and a CH1” refers to an antibody (or antigen binding fragment thereof) having a same amino acid sequence as the reference antibody (or antigen binding fragment thereof) exception made for the CL and the CH1 being absent from the “same antibody not comprising a CL and a CH1.” For example, a reference antibody (or antigen binding fragment thereof) (antibody R, or antigen binding fragment thereof) may comprise an amino acid sequence represented by the formula VL1-CL-VL2-VH2-VH1-CH1. “a same antibody not comprising a CL and a CH1” (antibody R′, or antigen binding fragment thereof) it is to be understood as comprising an amino acid sequence that is represented by the formula VL1-VL2-VH2-VH1, wherein the VL1, the VL2, the VH1, and the VH1 in the antibody R (or antigen binding fragment thereof) comprise an amino acid sequence identical to the amino acid sequence comprised in the VL1, the VL2, the VH1, and the VH1 comprised in the antibody R′ (or antigen binding fragment thereof).

[3827] In some aspects, an anti-SARS-CoV-2 virus antibody or an antigen binding fragment thereof disclosed herein is an IgG, IgM, IgE, IgA or an IgD antibody or an antigen binding fragment thereof. In some aspects, an anti-SARS-CoV-2 virus antibody or an antigen binding fragment thereof disclosed herein is IgG1, IgG2, IgG3 or IgG4. In some aspects, an anti-SARS-CoV-2 virus antibody or an antigen binding fragment thereof disclosed herein is a Fab, scFab, Fab′, F(ab′)₂, Fv or scFv. In some aspects, an anti-SARS-CoV-2 virus antibody or an antigen binding fragment thereof disclosed herein is human or humanized. In some aspects, an anti-SARS-CoV-2 virus antibody or an antigen binding fragment thereof disclosed herein has an isoelectric point (pI) of from about 7 to about 9. In some aspects, an anti-SARS-CoV-2 virus antibody or an antigen binding fragment thereof disclosed herein binds to the SARS-CoV-2 protein with an equilibrium dissociation constant (K_{D}) of from about 10 μM to about 1 pM. In some aspects, an anti-SARS-CoV-2 virus antibody or an antigen binding fragment thereof disclosed herein is a class I antibody or antigen binding fragment thereof; class II antibody or antigen binding fragment thereof; class III antibody or antigen binding fragment thereof; class IV antibody or antigen binding fragment thereof; class I and II antibody or antigen binding fragment thereof; class I and III antibody or antigen binding fragment thereof; class I and IV antibody or antigen binding fragment thereof; class II and III antibody or antigen binding fragment thereof; class II and IV antibody or antigen binding fragment thereof; class III and IV antibody or antigen binding fragment thereof; class I, II and III antibody or antigen binding fragment thereof; class I, II and IV antibody or antigen binding fragment thereof; class I, III and IV antibody or antigen binding fragment thereof; class II, III and IV antibody or antigen binding fragment thereof; or class I, II, III and IV antibody or antigen binding fragment thereof. In some aspects, an anti-SARS-CoV-2 neutralizing antibody or antigen binding fragment thereof disclosed herein can display properties of more than one Classes of anti-SARS-CoV-2 antibodies or antigen binding fragments thereof. For example, an antibody (or antigen binding fragment thereof, e.g., A18-448 or antigen binding fragment thereof) can bind to an epitope to which antibodies (or antigen binding fragments thereof) belonging to one of the four anti-SARS-CoV-2 antibody Classes bind and can compete for binding with one or more antibodies (or antigen binding fragments thereof) belonging to one or more different Classes of anti-SARS-CoV-2 antibodies. For example, A18-448 (or antigen binding fragments thereof) binds to an epitope located in a region of RBD to which Class IV anti-SARS-CoV-2 antibodies (or antigen binding fragments thereof) bind, but can compete for binding to RBD with anti-SARS-CoV-2 antibodies (or antigen binding fragments thereof) belonging to Class I and Class III. Thus, A18-448 antibody or antigen binding fragments thereof can be described, for example, as a Class I/IV anti-SARS-CoV-2 antibody or antigen binding fragments thereof.

[3828] In some aspects, an anti-SARS-CoV-2 virus antibody or an antigen binding fragment thereof disclosed herein is bispecific, trispecific or tetraspecific and has greater neutralization potency against SARS-CoV-2 virus than a monospecific anti-SARS-CoV-2 virus antibody or an antigen binding fragment thereof that specifically binds to one of the same antigens as the bispecific, trispecific or tetraspecific anti-SARS-CoV-2 virus antibody or an antigen binding fragment thereof. In some aspects, an anti-SARS-CoV-2 virus antibody or an antigen binding fragment thereof disclosed herein is bispecific, trispecific or tetraspecific and has greater neutralization potency against SARS-CoV-2 virus than a mixture of monospecific anti-SARS-CoV-2 virus antibodies or an antigen binding fragments thereof that specifically binds to one of the same antigens as the bispecific, trispecific or tetraspecific anti-SARS-CoV-2 virus antibody or an antigen binding fragment thereof.

[3829] In some aspects, an anti-SARS-CoV-2 virus antibody or an antigen binding fragment thereof disclosed herein binds to a SARS-CoV-2 virus, and the SARS-CoV-2 virus is the original Wuhan strain (WA1), a D614G spike protein mutant (e.g., D614G), an Alpha variant (e.g., B.1.1.7), a Beta variant (e.g., B.1.351), a Gamma variant (e.g., P.1), a Delta variant (e.g., B.1.617.2 or AY.1), a Kappa variant (e.g., B.1.617.1), an lota variant (e.g., B.1.526), a Lambda variant (e.g., C.37), an Epsilon variant (e.g., B.1.429, B.1.427, or CAL.20C), a Mu variant (e.g., B.1.621), a Theta variant (e.g., P.3), a Zeta variant (e.g., P.2), an Eta variant (e.g., B.1.525), a R.1 variant, a C.1.2 variant, or an Omicron variant (e.g., B.1.1.529, BA.1, BA.2, BA.2.12.1, BA.4, BA.4/5, BA.5, BQ.1, BQ.1.1, BA.2.75, BA.2.75.2, BA.4.6, BQ.1.1, BJ.1, XBB, XBB1.5, BF.7, CH.1.1, BA.2.86, EG.5, JN.1, JD.1, EG.5.1, FL.1.5.1, HK.3, HV.1, JD.1.1, JF.1, XBB.1, XBB.1.16, XBB.1.16.6, or XBB.2.3.2), or a combination or variant thereof. In some aspects, the SARS-CoV-2 virus is JN.1.13.1, KP.2, JN.1.16, JN.1.16.1, JN.1.13, JN.1.18, KP.2.3, LB.1, KP.3, KP.3.1.1, or a combination or variant thereof. In some aspects, Omicron variant is B.1.1.529, BA.1, BA.2, BA.2.12.1, BA.4, BA.4/5, BA.5, BQ.1, BQ.1.1, BA.2.75, BA.2.75.2, BA.4.6, BQ.1.1, BJ.1, XBB, XBB1.5, BF.7, CH.1.1, BA.2.86, EG.5, JN.1, JD.1, EG.5.1, FL.1.5.1, HK.3, HV.1, JD.1.1, JF.1, XBB.1, XBB.1.16, XBB.1.16.6, XBB.2.3.2, JN.1.13.1, KP.2, JN.1.16, JN.1.16.1, JN.1.13, JN.1.18, KP.2.3, LB.1, KP.3, KP.3.1.1, or a combination or variant thereof.

[3830] In some aspects, an anti-SARS-CoV-2 virus antibody or an antigen binding fragment thereof disclosed herein comprises one or more variable heavy chain regions (VH) and at least one of the one or more VH has a mutation at an N-glycosylation site. In some aspects, the mutation is at amino acid N62 of the VH region or equivalent thereof. In some aspects, the N62 mutation is N62Q or N62S, or equivalent thereof.

[3831] In some aspects, an anti-SARS-CoV-2 virus antibody or an antigen binding fragment thereof disclosed herein comprises at least one variable heavy chain region (VH) and/or at least one variable light chain region (VL).

[3832] In some aspects, an anti-SARS-CoV-2 virus antibody or an antigen binding fragment thereof disclosed herein comprises at least one variable light chain region (VL). In some aspects, the at least one VL comprises: (i) a complementarity determining region (CDR) 1 having an amino acid sequence that is at least 65%, at least 70%, at least 75%, at least 80%, at least 85%, at least 90%, at least 95%, at least 99%, or 100% identical to any one of SEQ ID NOs: 1, 9, 15, 23, 30, 41, 48, 55, 58, 65, 72, 79, 86, 93, 99, 105, 112, 119, 130, 138, 145, 152, 159, 166, 172, 179, 186, 192, 199, 205, 212, 219, 226, 232, 324, 627, 640, 650, 659, 676, 687, 695, 703, 712, 770, 778, 785, 794, 801, 807, 814, 827, 836, 849, 858, 865, 878, 1045, 1050, 1055, 1060, and 1065; (ii) a CDR2 having an amino acid sequence that is at least 65%, at least 70%, at least 75%, at least 80%, at least 85%, at least 90%, at least 95%, at least 99%, or 100% identical to any one of SEQ ID NOs: 2, 31, 628, 641, 677, 1046, 1051, 1056, and 1061; or at least 65%, at least 70%, at least 75%, at least 80%, at least 85%, at least 90%, at least 95%, at least 99%, or 100% identical to any one of amino acid sequences AAS, GAS, LGS, GTN, GTN, SAS, SDS, DNT, EVT, DAS, DVT, RNS, DVS, EDS, DDS, KDS, VAS, WAS, YTS, EVS, NNN, SYN, and DAT; and (iii) a CDR3 having an amino acid sequence that is at least 65%, at least 70%, at least 75%, at least 80%, at least 85%, at least 90%, at least 95%, at least 99%, or 100% identical to any one of SEQ ID NOs: 3, 10, 16, 24, 32, 38, 42, 49, 59, 66, 73, 80, 87, 94, 100, 106, 113, 120, 126, 131, 139, 146, 153, 160, 167, 173, 180, 187, 193, 200, 206, 213, 220, 227, 233, 239, 242, 246, 249, 256, 283, 285, 287, 288, 290, 292, 294, 296, 301, 304, 306, 309, 311, 313, 316, 325, 326, 329, 642, 651, 660, 668, 678, 651, 696, 704, 713, 764, 766, 768, 771, 779, 786, 792, 795, 808, 815, 821, 830, 837, 843, 850, 856, 859, 866, 872, 879, 885, and 1066.

[3833] In some aspects, an anti-SARS-CoV-2 virus antibody or an antigen binding fragment thereof disclosed herein comprises at least one variable heavy chain region (VH). In some aspects, the at least one VH comprises: (i) a CDR1 having an amino acid sequence that is at least 65%, at least 70%, at least 75%, at least 80%, at least 85%, at least 90%, at least 95%, at least 99%, or 100% identical to any one of SEQ ID NOs: 5, 12, 18, 26, 34, 44, 51, 61, 68, 75, 82, 89, 96, 102, 108, 115, 122, 133, 141, 148, 155, 162, 175, 182, 189, 195, 202, 208, 215, 222, 229, 235, 318, 629, 645, 654, 663, 671, 682, 690, 699, 707, 716, 773, 781, 788, 797, 803, 810, 817, 823, 832, 839, 845, 852, 861, 868, 874, 881, 1047, 1052, 1057, 1062, and 1067; (ii) a CDR2 having an amino acid sequence that is at least 65%, at least 70%, at least 75%, at least 80%, at least 85%, at least 90%, at least 95%, at least 99%, or 100% identical to any one of SEQ ID NOs: 6, 19, 27, 35, 45, 52, 56, 62, 69, 76, 83, 90, 109, 116, 123, 134, 142, 149, 156, 163, 169, 176, 183, 196, 209, 216, 223, 236, 273, 319, 328, 630, 646, 655, 664, 672, 683, 691, 708, 776, 782, 789, 798, 804, 811, 818, 824, 833, 840, 846, 853, 862, 869, 875, 882, 1048, 1053, 1058, 1063, and 1068; and (iii) a CDR3 having an amino acid sequence that is at least 65%, at least 70%, at least 75%, at least 80%, at least 85%, at least 90%, at least 95%, at least 99%, or 100% identical to any one of SEQ ID NOs: 7, 13, 20, 28, 36, 40, 46, 53, 63, 70, 77, 84, 91, 97, 103, 110, 117, 124, 128, 135, 143, 150, 157, 164, 170, 177, 184, 190, 197, 203, 210, 217, 224, 230, 237, 241, 244, 248, 253, 257, 259, 261, 263, 265, 267, 269, 271, 274, 276, 278, 281, 297, 320, 322, 327, 330, 332, 631, 647, 656, 665, 673, 684, 692, 700, 709, 717, 765, 767, 769, 774, 783, 790, 793, 799, 805, 812, 819, 825, 834, 841, 847, 854, 857, 863, 870, 876, 883, 886, 1049, 1054, 1059, 1064, and 1069.

[3834] In some aspects, an anti-SARS-CoV-2 virus antibody or an antigen binding fragment thereof disclosed herein comprises at least one variable light chain region (VL). In some aspects, the at least one VL comprises an amino acid sequence that is at least 65%, at least 70%, at least 75%, at least 80%, at least 85%, at least 90%, at least 95%, at least 99%, or 100% identical to any one of SEQ ID NOs: 4, 11, 17, 25, 33, 39, 43, 50, 60, 67, 74, 81, 88, 95, 101, 107, 114, 121, 127, 132, 140, 147, 154, 161, 168, 174, 181, 188, 194, 201, 207, 214, 221, 228, 234, 240, 243, 247, 250, 251, 252, 255, 284, 286, 289, 291, 293, 295, 299, 300, 302, 303, 305, 307, 308, 310, 312, 314, 315, 317, 323, 639, 649, 658, 667, 675, 686, 694, 702, 711, 772, 780, 787, 796, 802, 809, 816, 822, 831, 838, 844, 851, 860, 867, 873, 880, and 988.

[3835] In some aspects, an anti-SARS-CoV-2 virus antibody or an antigen binding fragment thereof disclosed herein comprises at least one variable heavy chain region (VH). In some aspects, the at least one VH comprises an amino acid sequence that is at least 65%, at least 70%, at least 75%, at least 80%, at least 85%, at least 90%, at least 95%, at least 99%, or 100% identical to any one of SEQ ID NOs: 8, 14, 21, 22, 29, 37, 47, 54, 57, 64, 71, 78, 85, 92, 98, 104, 111, 118, 125, 129, 136, 137, 144, 151, 158, 165, 171, 178, 185, 191, 198, 204, 211, 218, 225, 231, 238, 245, 254, 258, 260, 262, 264, 266, 268, 270, 272, 275, 277, 279, 280, 282, 298, 321, 331, 626, 644, 653, 662, 670, 681, 689, 698, 706, 715, 775, 777, 784, 791, 800, 806, 813, 820, 826, 835, 842, 848, 855, 864, 871, 877, and 884.

[3836] In some aspects, an anti-SARS-CoV-2 virus antibody or an antigen binding fragment thereof disclosed herein is encoded by a nucleotide sequence at least 65%, at least 70%, at least 75%, at least 80%, at least 85%, at least 90%, at least 95%, at least 99%, or 100% identical to any one of SEQ ID NO: 503-625, 718-719, 722-723, 726-727, 730-731, 734-735, 738-739, 742-743, 746-747, 750-751, 754-755, 762-763, 927-966, 978-983, 986-987, 991-992, 995-996, 999-1000, 1003-1004, 1007-1008, 1011-1012, 1015-1016, 1019-1020, 1023-1024, 1027-1028, 1031-1032, 1035-1036, 1039-1040, and 1043-1044.

[3837] In some aspects, an anti-SARS-CoV-2 virus antibody or an antigen binding fragment thereof disclosed herein comprises an amino acid sequence at least 65%, at least 70%, at least 75%, at least 80%, at least 85%, at least 90%, at least 95%, at least 99%, or 100% identical to any one of SEQ ID NO: 381-502, 632-633, 720-721, 724-725, 728-729, 732-733, 736-737, 740-741, 744-745, 748-749, 752-753, 760-761, 887-926, 972-977, 984-985, 989-990, 993-994, 997-998, 1001-1002, 1005-1006, 1009-1010, 1013-1014, 1017-1018, 1021-1022, 1025-1026, 1029-1030, 1033-1034, 1037-1038, and 1041-1042.

[3838] Molecular biology and recombinant DNA methods for making, screening and engineering an antigen binding polypeptide or antigen binding polypeptide complex (e.g., an antibody or antigen binding fragment thereof) containing such sequences are well known and described, for example, in Adair et al. Human Antibodies, 5(1-2):41-47, 1994; Kostelny et al., J Immunol, 148(5):1547-1553, 1992. Shiraiwa et al., Methods, 154:10-20, 2019; and Zola. “Monoclonal Antibodies: A Manual of Techniques.” 1987, 1st Ed., CRC Press; and Steinitz. Human Antibodies, 18(1-2):1-10, 2009.

[3839] As used herein, an antigen binding polypeptide or antigen binding polypeptide complex (e.g., an antibody or antigen binding fragment thereof), or region or domain thereof that “specifically binds” refers to its association with an epitope by its antigen binding domain, and that the binding entails some complementarity between the antigen binding domain and the epitope. Specific binding to an epitope occurs where there is binding to that epitope via its antigen binding domain more readily than there would be binding to a random, unrelated epitope.

[3840] As used herein, an “epitope” refers to a localized region of an antigen to which an antigen binding polypeptide or antigen binding polypeptide complex (e.g., antibody or antigen binding fragment thereof) can specifically bind. An epitope can be, for example, contiguous amino acids of a polypeptide (linear or contiguous epitope) or an epitope can, for example, come together from two or more non-contiguous regions of a polypeptide or polypeptides (conformational, non-linear, discontinuous, or non-contiguous epitope). In some aspects, the epitope to which an antibody or antigen-binding fragment thereof binds can be determined by, e.g., NMR spectroscopy. X-ray diffraction crystallography studies, ELISA assays, hydrogen/deuterium exchange coupled with mass spectrometry (e.g., liquid chromatography electrospray mass spectrometry), array-based oligo-peptide scanning assays, and/or mutagenesis mapping (e.g., site-directed mutagenesis mapping). See, e.g., Giegé R et al., (1994) Acta Crystallogr D Biol Crystallogr 50 (Pt 4): 339-350; McPherson A (1990) Eur J Biochem 189:1-23; Chayen N E (1997) Structure 5:1269-1274; McPherson A (1976) J Biol Chem 251:6300-6303; Meth Enzymol (1985) volumes 114 & 115, eds Wyckoff H W et al., U.S. Pub. No. 2004/0014194). Bricogne G (1993) Acta Crystallogr D Biol Crystallogr 49 (Pt 1): 37-60, Bricogne G (1997) Meth Enzymol 276A: 361-423, ed Carter C W, and Roversi et al., (2000) Acta Crystallogr D Biol Crystallogr 56 (Pt 10): 1316-1323 (X-ray diffraction crystallography studies); and Champe et al., (1995) J Biol Chem 270:1388-1394 and Cunningham B C & Wells J A (1989) Science 244:1081-1085 (mutagenesis mapping).

[3841] Specific binding can be represented by a “binding affinity.” Binding affinity refers to an intrinsic binding affinity which reflects a 1:1 interaction between members of a binding pair (e.g., an antigen binding polypeptide complex and an antigen). Binding affinity can be measured and/or expressed in several ways known in the art, including, but not limited to, equilibrium dissociation constant (K_{D}), K_{D} is calculated from the quotient of k_{off}/kₒₙ, where kₒₙ refers to the association rate constant of, e.g., an antigen binding polypeptide complex to an antigen, and k_{off} refers to the dissociation of, e.g., an antigen binding polypeptide complex from an antigen. The kₒₙ and k_{off} can be determined by techniques known to one of ordinary skill in the art, such as Octet® BLI, BIAcore® or KinExA.

[3842] Accordingly, in some aspects, an antigen binding polypeptide complex provided herein is an antibody or antigen binding fragment thereof. In some aspects, an antigen binding polypeptide provided herein is part of an antibody or antigen binding fragment thereof.

[3843] In one aspect, the antibody or antigen binding fragment thereof specifically binds to an antigen with an equilibrium dissociation constant (K_{D})) of from about 10 μM to about 1 pM. In another aspect, the antibody or antigen binding fragment thereof is IgG, IgM, IgE, IgA or IgD. In another aspect, the IgG is IgG1, IgG2, IgG3 or IgG4. In another aspect, the antigen binding fragment is a Fab, scFab, Fab′, F(ab′)₂, Fv or scFv. In yet another aspect, the antibody or antigen binding fragment thereof is human or humanized.

[3844] In another aspect, an antigen binding polypeptide or an antigen binding polypeptide complex provided herein (e.g., an antibody or antigen binding fragment thereof) is trivalent or tetravalent.

[3845] In another aspect, an antigen binding polypeptide or an antigen binding polypeptide complex provided herein (e.g., an antibody or antigen binding fragment thereof) is monospecific, bispecific, trispecific, or tetraspecific.

[3846] In another aspect, an antigen binding polypeptide or antigen binding polypeptide complex provided herein potently inhibits one or more SARS-CoV-2 virus variants.

[3847] In some aspects, provided herein are antibodies or antigen binding fragments thereof (e.g., monospecific or multispecific antibodies or antigen binding fragments thereof) comprising an antigen binding polypeptide having a structure represented by:
[3848] VL1-L1-VL2-L2-VH2-L3-VH1;
[3849] VL1-L1-VH2-L2-VL2-L3-VH1;
[3850] VH1-L1-VH2-L2-VL2-L3-VL1; or
[3851] VH1-L1-VL2-L2-VH2-L3-VL1;
[3852] wherein:
[3853] VL1 is a first immunoglobulin light chain variable region that specifically binds to a severe acute respiratory syndrome coronavirus 2 (SARS-CoV-2) protein;
[3854] VL2 is a second immunoglobulin light chain variable region that specifically binds to a SARS-CoV-2 protein;
[3855] VH1 is a first immunoglobulin heavy chain variable region that specifically binds to a SARS-CoV-2 protein;
[3856] VH2 is a second immunoglobulin heavy chain variable region that specifically binds to a SARS-CoV-2 protein; and
[3857] L1-L3 are optional amino acid linkers.

[3858] In any aspect shown herein as a structure from amino terminus to carboxy terminus, and with binding pairs selected from VL and/or VH or other structural regions such as CH2, CH3, when shown without a specific linker such as L1, L2, etc., such linkers are optionally present in such structures between each designated subsequence VL, VH, etc.

[3859] In some aspects, the VL1 comprises (i) a complementarity determining region (CDR) 1 having an amino acid sequence that is at least 65%, at least 70%, at least 75%, at least 80%, at least 85%, at least 90%, at least 95%, at least 99%, or 100% identical to any one of SEQ ID NOs: 1, 9, 15, 23, 30, 41, 48, 55, 58, 65, 72, 79, 86, 93, 99, 105, 112, 119, 130, 138, 145, 152, 159, 166, 172, 179, 186, 192, 199, 205, 212, 219, 226, 232, 324, 627, 640, 650, 659, 676, 687, 695, 703, 712, 770, 778, 785, 794, 801, 807, 814, 827, 836, 849, 858, 865, 878, 1045, 1050, 1055, 1060, and 1065; (ii) a CDR2 having an amino acid sequence that is at least 65%, at least 70%, at least 75%, at least 80%, at least 85%, at least 90%, at least 95%, at least 99%, or 100% identical to any one of SEQ ID NOs: 2, 31, 628, 641, 677, 1046, 1051, 1056, and 1061; or at least 65%, at least 70%, at least 75%, at least 80%, at least 85%, at least 90%, at least 95%, at least 99%, or 100% identical to any one of amino acid sequences AAS, GAS, LGS, GTN, GTN, SAS, SDS, DNT, EVT, DAS, DVT, RNS, DVS, EDS, DDS, KDS, VAS, WAS, YTS, EVS, NNN, SYN, and DAT; and (iii) a CDR3 having an amino acid sequence that is at least 65%, at least 70%, at least 75%, at least 80%, at least 85%, at least 90%, at least 95%, at least 99%, or 100% identical to any one of SEQ ID NOs: 3, 10, 16, 24, 32, 38, 42, 49, 59, 66, 73, 80, 87, 94, 100, 106, 113, 120, 126, 131, 139, 146, 153, 160, 167, 173, 180, 187, 193, 200, 206, 213, 220, 227, 233, 239, 242, 246, 249, 256, 283, 285, 287, 288, 290, 292, 294, 296, 301, 304, 306, 309, 311, 313, 316, 325, 326, 329, 642, 651, 660, 668, 678, 651, 696, 704, 713, 764, 766, 768, 771, 779, 786, 792, 795, 808, 815, 821, 830, 837, 843, 850, 856, 859, 866, 872, 879, 885, and 1066.

[3860] In some aspects, the VL2 comprises (i) a complementarity determining region (CDR) 1 having an amino acid sequence that is at least 65%, at least 70%, at least 75%, at least 80%, at least 85%, at least 90%, at least 95%, at least 99%, or 100% identical to any one of SEQ ID NOs: 1, 9, 15, 23, 30, 41, 48, 55, 58, 65, 72, 79, 86, 93, 99, 105, 112, 119, 130, 138, 145, 152, 159, 166, 172, 179, 186, 192, 199, 205, 212, 219, 226, 232, 324, 627, 640, 650, 659, 676, 687, 695, 703, 712, 770, 778, 785, 794, 801, 807, 814, 827, 836, 849, 858, 865, 878, 1045, 1050, 1055, 1060, and 1065; (ii) a CDR2 having an amino acid sequence that is at least 65%, at least 70%, at least 75%, at least 80%, at least 85%, at least 90%, at least 95%, at least 99%, or 100% identical to any one of SEQ ID NOs: 2, 31, 628, 641, 677, 1046, 1051, 1056, and 1061; or at least 65%, at least 70%, at least 75%, at least 80%, at least 85%, at least 90%, at least 95%, at least 99%, or 100% identical to any one of amino acid sequences AAS, GAS, LGS, GTN, GTN, SAS, SDS, DNT, EVT, DAS, DVT, RNS, DVS, EDS, DDS, KDS, VAS, WAS, YTS, EVS, NNN, SYN, and DAT; and (iii) a CDR3 having an amino acid sequence that is at least 65%, at least 70%, at least 75%, at least 80%, at least 85%, at least 90%, at least 95%, at least 99%, or 100% identical to any one of SEQ ID NOs: 3, 10, 16, 24, 32, 38, 42, 49, 59, 66, 73, 80, 87, 94, 100, 106, 113, 120, 126, 131, 139, 146, 153, 160, 167, 173, 180, 187, 193, 200, 206, 213, 220, 227, 233, 239, 242, 246, 249, 256, 283, 285, 287, 288, 290, 292, 294, 296, 301, 304, 306, 309, 311, 313, 316, 325, 326, 329, 642, 651, 660, 668, 678, 651, 696, 704, 713, 764, 766, 768, 771, 779, 786, 792, 795, 808, 815, 821, 830, 837, 843, 850, 856, 859, 866, 872, 879, 885, and 1066.

[3861] In some aspects, the VH1 comprises (i) a CDR1 having an amino acid sequence that is at least 65%, at least 70%, at least 75%, at least 80%, at least 85%, at least 90%, at least 95%, at least 99%, or 100% identical to any one of SEQ ID NOs: 5, 12, 18, 26, 34, 44, 51, 61, 68, 75, 82, 89, 96, 102, 108, 115, 122, 133, 141, 148, 155, 162, 175, 182, 189, 195, 202, 208, 215, 222, 229, 235, 318, 629, 645, 654, 663, 671, 682, 690, 699, 707, 716, 773, 781, 788, 797, 803, 810, 817, 823, 832, 839, 845, 852, 861, 868, 874, 881, 1047, 1052, 1057, 1062, and 1067; (ii) a CDR2 having an amino acid sequence that is at least 65%, at least 70%, at least 75%, at least 80%, at least 85%, at least 90%, at least 95%, at least 99%, or 100% identical to any one of SEQ ID NOs: 6, 19, 27, 35, 45, 52, 56, 62, 69, 76, 83, 90, 109, 116, 123, 134, 142, 149, 156, 163, 169, 176, 183, 196, 209, 216, 223, 236, 273, 319, 328, 630, 646, 655, 664, 672, 683, 691, 708, 776, 782, 789, 798, 804, 811, 818, 824, 833, 840, 846, 853, 862, 869, 875, 882, 1048, 1053, 1058, 1063, and 1068; and (iii) a CDR3 having an amino acid sequence that is at least 65%, at least 70%, at least 75%, at least 80%, at least 85%, at least 90%, at least 95%, at least 99%, or 100% identical to any one of SEQ ID NOs: 7, 13, 20, 28, 36, 40, 46, 53, 63, 70, 77, 84, 91, 97, 103, 110, 117, 124, 128, 135, 143, 150, 157, 164, 170, 177, 184, 190, 197, 203, 210, 217, 224, 230, 237, 241, 244, 248, 253, 257, 259, 261, 263, 265, 267, 269, 271, 274, 276, 278, 281, 297, 320, 322, 327, 330, 332, 631, 647, 656, 665, 673, 684, 692, 700, 709, 717, 765, 767, 769, 774, 783, 790, 793, 799, 805, 812, 819, 825, 834, 841, 847, 854, 857, 863, 870, 876, 883, 886, 1049, 1054, 1059, 1064, and 1069.

[3862] In some aspects, the VH2 comprises (i) a CDR1 having an amino acid sequence that is at least 65%, at least 70%, at least 75%, at least 80%, at least 85%, at least 90%, at least 95%, at least 99%, or 100% identical to any one of SEQ ID NOs: 5, 12, 18, 26, 34, 44, 51, 61, 68, 75, 82, 89, 96, 102, 108, 115, 122, 133, 141, 148, 155, 162, 175, 182, 189, 195, 202, 208, 215, 222, 229, 235, 318, 629, 645, 654, 663, 671, 682, 690, 699, 707, 716, 773, 781, 788, 797, 803, 810, 817, 823, 832, 839, 845, 852, 861, 868, 874, 881, 1047, 1052, 1057, 1062, and 1067; (ii) a CDR2 having an amino acid sequence that is at least 65%, at least 70%, at least 75%, at least 80%, at least 85%, at least 90%, at least 95%, at least 99%, or 100% identical to any one of SEQ ID NOs: 6, 19, 27, 35, 45, 52, 56, 62, 69, 76, 83, 90, 109, 116, 123, 134, 142, 149, 156, 163, 169, 176, 183, 196, 209, 216, 223, 236, 273, 319, 328, 630, 646, 655, 664, 672, 683, 691, 708, 776, 782, 789, 798, 804, 811, 818, 824, 833, 840, 846, 853, 862, 869, 875, 882, 1048, 1053, 1058, 1063, and 1068; and (iii) a CDR3 having an amino acid sequence that is at least 65%, at least 70%, at least 75%, at least 80%, at least 85%, at least 90%, at least 95%, at least 99%, or 100% identical to any one of SEQ ID NOs: 7, 13, 20, 28, 36, 40, 46, 53, 63, 70, 77, 84, 91, 97, 103, 110, 117, 124, 128, 135, 143, 150, 157, 164, 170, 177, 184, 190, 197, 203, 210, 217, 224, 230, 237, 241, 244, 248, 253, 257, 259, 261, 263, 265, 267, 269, 271, 274, 276, 278, 281, 297, 320, 322, 327, 330, 332, 631, 647, 656, 665, 673, 684, 692, 700, 709, 717, 765, 767, 769, 774, 783, 790, 793, 799, 805, 812, 819, 825, 834, 841, 847, 854, 857, 863, 870, 876, 883, 886, 1049, 1054, 1059, 1064, and 1069.

[3863] In some aspects, the VL1 comprises (i) a complementarity determining region (CDR) 1 having an amino acid sequence that is at least 65%, at least 70%, at least 75%, at least 80%, at least 85%, at least 90%, at least 95%, at least 99%, or 100% identical to any one of SEQ ID NOs: 1, 9, 15, 23, 30, 41, 48, 55, 58, 65, 72, 79, 86, 93, 99, 105, 112, 119, 130, 138, 145, 152, 159, 166, 172, 179, 186, 192, 199, 205, 212, 219, 226, 232, 324, 627, 640, 650, 659, 676, 687, 695, 703, 712, 770, 778, 785, 794, 801, 807, 814, 827, 836, 849, 858, 865, 878, 1045, 1050, 1055, 1060, and 1065; (ii) a CDR2 having an amino acid sequence that is at least 65%, at least 70%, at least 75%, at least 80%, at least 85%, at least 90%, at least 95%, at least 99%, or 100% identical to any one of SEQ ID NOs: 2, 31, 628, 641, 677, 1046, 1051, 1056, and 1061; or at least 65%, at least 70%, at least 75%, at least 80%, at least 85%, at least 90%, at least 95%, at least 99%, or 100% identical to any one of amino acid sequences AAS, GAS, LGS, GTN, GTN, SAS, SDS, DNT, EVT, DAS, DVT, RNS, DVS, EDS, DDS, KDS, VAS, WAS, YTS, EVS, NNN, SYN, and DAT; (iii) a CDR3 having an amino acid sequence that is at least 65%, at least 70%, at least 75%, at least 80%, at least 85%, at least 90%, at least 95%, at least 99%, or 100% identical to any one of SEQ ID NOs: 3, 10, 16, 24, 32, 38, 42, 49, 59, 66, 73, 80, 87, 94, 100, 106, 113, 120, 126, 131, 139, 146, 153, 160, 167, 173, 180, 187, 193, 200, 206, 213, 220, 227, 233, 239, 242, 246, 249, 256, 283, 285, 287, 288, 290, 292, 294, 296, 301, 304, 306, 309, 311, 313, 316, 325, 326, 329, 642, 651, 660, 668, 678, 651, 696, 704, 713, 764, 766, 768, 771, 779, 786, 792, 795, 808, 815, 821, 830, 837, 843, 850, 856, 859, 866, 872, 879, 885, and 1066; the VH1 comprises (i) a CDR1 having an amino acid sequence that is at least 65%, at least 70%, at least 75%, at least 80%, at least 85%, at least 90%, at least 95%, at least 99%, or 100% identical to any one of SEQ ID NOs: 5, 12, 18, 26, 34, 44, 51, 61, 68, 75, 82, 89, 96, 102, 108, 115, 122, 133, 141, 148, 155, 162, 175, 182, 189, 195, 202, 208, 215, 222, 229, 235, 318, 629, 645, 654, 663, 671, 682, 690, 699, 707, 716, 773, 781, 788, 797, 803, 810, 817, 823, 832, 839, 845, 852, 861, 868, 874, 881, 1047, 1052, 1057, 1062, and 1067; (ii) a CDR2 having an amino acid sequence that is at least 65%, at least 70%, at least 75%, at least 80%, at least 85%, at least 90%, at least 95%, at least 99%, or 100% identical to any one of SEQ ID NOs: 6, 19, 27, 35, 45, 52, 56, 62, 69, 76, 83, 90, 109, 116, 123, 134, 142, 149, 156, 163, 169, 176, 183, 196, 209, 216, 223, 236, 273, 319, 328, 630, 646, 655, 664, 672, 683, 691, 708, 776, 782, 789, 798, 804, 811, 818, 824, 833, 840, 846, 853, 862, 869, 875, 882, 1048, 1053, 1058, 1063, and 1068; and (iii) a CDR3 having an amino acid sequence that is at least 65%, at least 70%, at least 75%, at least 80%, at least 85%, at least 90%, at least 95%, at least 99%, or 100% identical to any one of SEQ ID NOs: 7, 13, 20, 28, 36, 40, 46, 53, 63, 70, 77, 84, 91, 97, 103, 110, 117, 124, 128, 135, 143, 150, 157, 164, 170, 177, 184, 190, 197, 203, 210, 217, 224, 230, 237, 241, 244, 248, 253, 257, 259, 261, 263, 265, 267, 269, 271, 274, 276, 278, 281, 297, 320, 322, 327, 330, 332, 631, 647, 656, 665, 673, 684, 692, 700, 709, 717, 765, 767, 769, 774, 783, 790, 793, 799, 805, 812, 819, 825, 834, 841, 847, 854, 857, 863, 870, 876, 883, 886, 1049, 1054, 1059, 1064, and 1069; the VL2 comprises (i) a complementarity determining region (CDR) 1 having an amino acid sequence that is at least 65%, at least 70%, at least 75%, at least 80%, at least 85%, at least 90%, at least 95%, at least 99%, or 100% identical to any one of SEQ ID NOs: 1, 9, 15, 23, 30, 41, 48, 55, 58, 65, 72, 79, 86, 93, 99, 105, 112, 119, 130, 138, 145, 152, 159, 166, 172, 179, 186, 192, 199, 205, 212, 219, 226, 232, 324, 627, 640, 650, 659, 676, 687, 695, 703, 712, 770, 778, 785, 794, 801, 807, 814, 827, 836, 849, 858, 865, 878, 1045, 1050, 1055, 1060, and 1065; (ii) a CDR2 having an amino acid sequence that is at least 65%, at least 70%, at least 75%, at least 80%, at least 85%, at least 90%, at least 95%, at least 99%, or 100% identical to any one of SEQ ID NOs: 2, 31, 628, 641, 677, 1046, 1051, 1056, and 1061; or at least 65%, at least 70%, at least 75%, at least 80%, at least 85%, at least 90%, at least 95%, at least 99%, or 100% identical to any one of amino acid sequences AAS, GAS, LGS, GTN, GTN, SAS, SDS, DNT, EVT, DAS, DVT, RNS, DVS, EDS, DDS, KDS, VAS, WAS, YTS, EVS, NNN, SYN, and DAT; and (iii) a CDR3 having an amino acid sequence that is at least 65%, at least 70%, at least 75%, at least 80%, at least 85%, at least 90%, at least 95%, at least 99%, or 100% identical to any one of SEQ ID NOs: 3, 10, 16, 24, 32, 38, 42, 49, 59, 66, 73, 80, 87, 94, 100, 106, 113, 120, 126, 131, 139, 146, 153, 160, 167, 173, 180, 187, 193, 200, 206, 213, 220, 227, 233, 239, 242, 246, 249, 256, 283, 285, 287, 288, 290, 292, 294, 296, 301, 304, 306, 309, 311, 313, 316, 325, 326, 329, 642, 651, 660, 668, 678, 651, 696, 704, 713, 764, 766, 768, 771, 779, 786, 792, 795, 808, 815, 821, 830, 837, 843, 850, 856, 859, 866, 872, 879, 885, and 1066; and the VH2 comprises (i) a CDR1 having an amino acid sequence that is at least 65%, at least 70%, at least 75%, at least 80%, at least 85%, at least 90%, at least 95%, at least 99%, or 100% identical to any one of SEQ ID NOs: 5, 12, 18, 26, 34, 44, 51, 61, 68, 75, 82, 89, 96, 102, 108, 115, 122, 133, 141, 148, 155, 162, 175, 182, 189, 195, 202, 208, 215, 222, 229, 235, 318, 629, 645, 654, 663, 671, 682, 690, 699, 707, 716, 773, 781, 788, 797, 803, 810, 817, 823, 832, 839, 845, 852, 861, 868, 874, 881, 1047, 1052, 1057, 1062, and 1067; (ii) a CDR2 having an amino acid sequence that is at least 65%, at least 70%, at least 75%, at least 80%, at least 85%, at least 90%, at least 95%, at least 99%, or 100% identical to any one of SEQ ID NOs: 6, 19, 27, 35, 45, 52, 56, 62, 69, 76, 83, 90, 109, 116, 123, 134, 142, 149, 156, 163, 169, 176, 183, 196, 209, 216, 223, 236, 273, 319, 328, 630, 646, 655, 664, 672, 683, 691, 708, 776, 782, 789, 798, 804, 811, 818, 824, 833, 840, 846, 853, 862, 869, 875, 882, 1048, 1053, 1058, 1063, and 1068; and (iii) a CDR3 having an amino acid sequence that is at least 65%, at least 70%, at least 75%, at least 80%, at least 85%, at least 90%, at least 95%, at least 99%, or 100% identical to any one of SEQ ID NOs: 7, 13, 20, 28, 36, 40, 46, 53, 63, 70, 77, 84, 91, 97, 103, 110, 117, 124, 128, 135, 143, 150, 157, 164, 170, 177, 184, 190, 197, 203, 210, 217, 224, 230, 237, 241, 244, 248, 253, 257, 259, 261, 263, 265, 267, 269, 271, 274, 276, 278, 281, 297, 320, 322, 327, 330, 332, 631, 647, 656, 665, 673, 684, 692, 700, 709, 717, 765, 767, 769, 774, 783, 790, 793, 799, 805, 812, 819, 825, 834, 841, 847, 854, 857, 863, 870, 876, 883, 886, 1049, 1054, 1059, 1064, and 1069.

[3864] In some aspects, the VL1 comprises an amino acid sequence that is at least 65%, at least 70%, at least 75%, at least 80%, at least 85%, at least 90%, at least 95%, at least 99%, or 100% identical to any one of SEQ ID NOs: 4, 11, 17, 25, 33, 39, 43, 50, 60, 67, 74, 81, 88, 95, 101, 107, 114, 121, 127, 132, 140, 147, 154, 161, 168, 174, 181, 188, 194, 201, 207, 214, 221, 228, 234, 240, 243, 247, 250, 251, 252, 255, 284, 286, 289, 291, 293, 295, 299, 300, 302, 303, 305, 307, 308, 310, 312, 314, 315, 317, 323, 639, 649, 658, 667, 675, 686, 694, 702, 711, 772, 780, 787, 796, 802, 809, 816, 822, 831, 838, 844, 851, 860, 867, 873, 880, and 988.

[3865] In some aspects, the VH1 comprises an amino acid sequence that is at least 65%, at least 70%, at least 75%, at least 80%, at least 85%, at least 90%, at least 95%, at least 99%, or 100% identical to any one of SEQ ID NOs: 8, 14, 21, 22, 29, 37, 47, 54, 57, 64, 71, 78, 85, 92, 98, 104, 111, 118, 125, 129, 136, 137, 144, 151, 158, 165, 171, 178, 185, 191, 198, 204, 211, 218, 225, 231, 238, 245, 254, 258, 260, 262, 264, 266, 268, 270, 272, 275, 277, 279, 280, 282, 298, 321, 331, 626, 644, 653, 662, 670, 681, 689, 698, 706, 715, 775, 777, 784, 791, 800, 806, 813, 820, 826, 835, 842, 848, 855, 864, 871, 877, and 884.

[3866] In some aspects, the VL2 comprises an amino acid sequence that is at least 65%, at least 70%, at least 75%, at least 80%, at least 85%, at least 90%, at least 95%, at least 99%, or 100% identical to any one of SEQ ID NOs: 4, 11, 17, 25, 33, 39, 43, 50, 60, 67, 74, 81, 88, 95, 101, 107, 114, 121, 127, 132, 140, 147, 154, 161, 168, 174, 181, 188, 194, 201, 207, 214, 221, 228, 234, 240, 243, 247, 250, 251, 252, 255, 284, 286, 289, 291, 293, 295, 299, 300, 302, 303, 305, 307, 308, 310, 312, 314, 315, 317, 323, 639, 649, 658, 667, 675, 686, 694, 702, 711, 772, 780, 787, 796, 802, 809, 816, 822, 831, 838, 844, 851, 860, 867, 873, 880, and 988.

[3867] In some aspects, the VH2 comprises an amino acid sequence that is at least 65%, at least 70%, at least 75%, at least 80%, at least 85%, at least 90%, at least 95%, at least 99%, or 100% identical to any one of SEQ ID NOs: 8, 14, 21, 22, 29, 37, 47, 54, 57, 64, 71, 78, 85, 92, 98, 104, 111, 118, 125, 129, 136, 137, 144, 151, 158, 165, 171, 178, 185, 191, 198, 204, 211, 218, 225, 231, 238, 245, 254, 258, 260, 262, 264, 266, 268, 270, 272, 275, 277, 279, 280, 282, 298, 321, 331, 626, 644, 653, 662, 670, 681, 689, 698, 706, 715, 775, 777, 784, 791, 800, 806, 813, 820, 826, 835, 842, 848, 855, 864, 871, 877, and 884.

[3868] In some aspects, (i) the VL1 comprises an amino acid sequence that is at least 65%, at least 70%, at least 75%, at least 80%, at least 85%, at least 90%, at least 95%, at least 99%, or 100% identical to any one of SEQ ID NOs: 4, 11, 17, 25, 33, 39, 43, 50, 60, 67, 74, 81, 88, 95, 101, 107, 114, 121, 127, 132, 140, 147, 154, 161, 168, 174, 181, 188, 194, 201, 207, 214, 221, 228, 234, 240, 243, 247, 250, 251, 252, 255, 284, 286, 289, 291, 293, 295, 299, 300, 302, 303, 305, 307, 308, 310, 312, 314, 315, 317, 323, 639, 649, 658, 667, 675, 686, 694, 702, 711, 772, 780, 787, 796, 802, 809, 816, 822, 831, 838, 844, 851, 860, 867, 873, 880, and 988; (ii) the VH1 comprises an amino acid sequence that is at least 65%, at least 70%, at least 75%, at least 80%, at least 85%, at least 90%, at least 95%, at least 99%, or 100% identical to any one of SEQ ID NOs: 8, 14, 21, 22, 29, 37, 47, 54, 57, 64, 71, 78, 85, 92, 98, 104, 111, 118, 125, 129, 136, 137, 144, 151, 158, 165, 171, 178, 185, 191, 198, 204, 211, 218, 225, 231, 238, 245, 254, 258, 260, 262, 264, 266, 268, 270, 272, 275, 277, 279, 280, 282, 298, 321, 331, 626, 644, 653, 662, 670, 681, 689, 698, 706, 715, 775, 777, 784, 791, 800, 806, 813, 820, 826, 835, 842, 848, 855, 864, 871, 877, and 884; (iii) the VL2 comprises an amino acid sequence that is at least 65%, at least 70%, at least 75%, at least 80%, at least 85%, at least 90%, at least 95%, at least 99%, or 100% identical to any one of SEQ ID NOs: 4, 11, 17, 25, 33, 39, 43, 50, 60, 67, 74, 81, 88, 95, 101, 107, 114, 121, 127, 132, 140, 147, 154, 161, 168, 174, 181, 188, 194, 201, 207, 214, 221, 228, 234, 240, 243, 247, 250, 251, 252, 255, 284, 286, 289, 291, 293, 295, 299, 300, 302, 303, 305, 307, 308, 310, 312, 314, 315, 317, 323, 639, 649, 658, 667, 675, 686, 694, 702, 711, 772, 780, 787, 796, 802, 809, 816, 822, 831, 838, 844, 851, 860, 867, 873, 880, and 988; and (iv) the VH2 comprises an amino acid sequence that is at least 65%, at least 70%, at least 75%, at least 80%, at least 85%, at least 90%, at least 95%, at least 99%, or 100% identical to any one of SEQ ID NOs: 8, 14, 21, 22, 29, 37, 47, 54, 57, 64, 71, 78, 85, 92, 98, 104, 111, 118, 125, 129, 136, 137, 144, 151, 158, 165, 171, 178, 185, 191, 198, 204, 211, 218, 225, 231, 238, 245, 254, 258, 260, 262, 264, 266, 268, 270, 272, 275, 277, 279, 280, 282, 298, 321, 331, 626, 644, 653, 662, 670, 681, 689, 698, 706, 715, 775, 777, 784, 791, 800, 806, 813, 820, 826, 835, 842, 848, 855, 864, 871, 877, and 884.

[3869] In some aspects, the VL1 comprises (i) a complementarity determining region (CDR) 1 having an amino acid sequence that is at least 65%, at least 70%, at least 75%, at least 80%, at least 85%, at least 90%, at least 95%, at least 99%, or 100% identical to any one of SEQ ID NOs: 1, 9, 15, 23, 30, 65, 72, 145, 152, 324, 627, 138, 172, 1045, 1050, 1055, 1060, and 1065; (ii) a CDR2 having an amino acid sequence that is at least 65%, at least 70%, at least 75%, at least 80%, at least 85%, at least 90%, at least 95%, at least 99%, or 100% identical to any one of SEQ ID NOs: 2, 31, 628, 1046, 1051, 1056, and 1061, or at least 65%, at least 70%, at least 75%, at least 80%, at least 85%, at least 90%, at least 95%, at least 99%, or 100% identical to any one of amino acid sequences GAS, LGS, GTN, SAS, SDS, AAS, DAS, and DNT; and (iii) a CDR3 having an amino acid sequence that is at least 65%, at least 70%, at least 75%, at least 80%, at least 85%, at least 90%, at least 95%, at least 99%, or 100% identical to any one of SEQ ID NOs: 3, 10, 16, 24, 32, 38, 66, 73, 146, 153, 325, 326, 764, 766, 139, 856, 173, 792, and 1066.

[3870] In some aspects, the VL2 comprises (i) a complementarity determining region (CDR) 1 having an amino acid sequence that is at least 65%, at least 70%, at least 75%, at least 80%, at least 85%, at least 90%, at least 95%, at least 99%, or 100% identical to any one of SEQ ID NOs: 1, 9, 15, 23, 30, 65, 72, 145, 152, 324, 627, 138, 172, 1045, 1050, 1055, 1060, and 1065; (ii) a CDR2 having an amino acid sequence that is at least 65%, at least 70%, at least 75%, at least 80%, at least 85%, at least 90%, at least 95%, at least 99%, or 100% identical to any one of SEQ ID NOs: 2, 31, 628, 1046, 1051, 1056, and 1061, or at least 65%, at least 70%, at least 75%, at least 80%, at least 85%, at least 90%, at least 95%, at least 99%, or 100% identical to any one of amino acid sequences GAS, LGS, GTN, SAS, SDS, AAS, DAS, and DNT; and (iii) a CDR3 having an amino acid sequence that is at least 65%, at least 70%, at least 75%, at least 80%, at least 85%, at least 90%, at least 95%, at least 99%, or 100% identical to any one of SEQ ID NOs: 3, 10, 16, 24, 32, 38, 66, 73, 146, 153, 325, 326, 764, 766, 139, 856, 173, 792, and 1066.

[3871] In some aspects, the VH1 comprises (i) a CDR1 having an amino acid sequence that is at least 65%, at least 70%, at least 75%, at least 80%, at least 85%, at least 90%, at least 95%, at least 99%, or 100% identical to any one of SEQ ID NOs: 5, 12, 18, 26, 34, 68, 75, 148, 155, 629, 141, 175, 1047, 1052, 1057, 1062, and 1067; (ii) a CDR2 having an amino acid sequence that is at least 65%, at least 70%, at least 75%, at least 80%, at least 85%, at least 90%, at least 95%, at least 99%, or 100% identical to any one of SEQ ID NOs: 6, 19, 27, 35, 69, 76, 149, 156, 630, 142, 176, 1048, 1053, 1058, 1063, and 1068; and (iii) a CDR3 having an amino acid sequence that is at least 65%, at least 70%, at least 75%, at least 80%, at least 85%, at least 90%, at least 95%, at least 99%, or 100% identical to any one of SEQ ID NOs: 7, 13, 20, 28, 36, 40, 70, 77, 327, 150, 157, 332, 631, 765, 767, 143, 857, 177, 793, 1049, 1054, 1059, 1064, and 1069.

[3872] In some aspects, the VH2 comprises (i) a CDR1 having an amino acid sequence that is at least 65%, at least 70%, at least 75%, at least 80%, at least 85%, at least 90%, at least 95%, at least 99%, or 100% identical to any one of SEQ ID NOs: 5, 12, 18, 26, 34, 68, 75, 148, 155, 629, 141, 175, 1047, 1052, 1057, 1062, and 1067; (ii) a CDR2 having an amino acid sequence that is at least 65%, at least 70%, at least 75%, at least 80%, at least 85%, at least 90%, at least 95%, at least 99%, or 100% identical to any one of SEQ ID NOs: 6, 19, 27, 35, 69, 76, 149, 156, 630, 142, 176, 1048, 1053, 1058, 1063, and 1068; and (iii) a CDR3 having an amino acid sequence that is at least 65%, at least 70%, at least 75%, at least 80%, at least 85%, at least 90%, at least 95%, at least 99%, or 100% identical to any one of SEQ ID NOs: 7, 13, 20, 28, 36, 40, 70, 77, 327, 150, 157, 332, 631, 765, 767, 143, 857, 177, 793, 1049, 1054, 1059, 1064, and 1069.

[3873] In some aspects, the VL1 comprises (i) a complementarity determining region (CDR) 1 having an amino acid sequence that is at least 65%, at least 70%, at least 75%, at least 80%, at least 85%, at least 90%, at least 95%, at least 99%, or 100% identical to any one of SEQ ID NOs: 1, 9, 15, 23, 30, 65, 72, 145, 152, 324, 627, 138, 172, 1045, 1050, 1055, 1060, and 1065; (ii) a CDR2 having an amino acid sequence that is at least 65%, at least 70%, at least 75%, at least 80%, at least 85%, at least 90%, at least 95%, at least 99%, or 100% identical to any one of SEQ ID NOs: 2, 31, 628, 1046, 1051, 1056, and 1061, or at least 65%, at least 70%, at least 75%, at least 80%, at least 85%, at least 90%, at least 95%, at least 99%, or 100% identical to any one of amino acid sequences GAS, LGS, GTN, SAS, SDS, AAS, DAS, and DNT; (iii) a CDR3 having an amino acid sequence that is at least 65%, at least 70%, at least 75%, at least 80%, at least 85%, at least 90%, at least 95%, at least 99%, or 100% identical to any one of SEQ ID NOs: 3, 10, 16, 24, 32, 38, 66, 73, 146, 153, 325, 326, 764, 766, 139, 856, 173, 792, and 1066; the VH1 comprises (i) a CDR1 having an amino acid sequence that is at least 65%, at least 70%, at least 75%, at least 80%, at least 85%, at least 90%, at least 95%, at least 99%, or 100% identical to any one of SEQ ID NOs: 5, 12, 18, 26, 34, 68, 75, 148, 155, 629, 141, 175, 1047, 1052, 1057, 1062, and 1067; (ii) a CDR2 having an amino acid sequence that is at least 65%, at least 70%, at least 75%, at least 80%, at least 85%, at least 90%, at least 95%, at least 99%, or 100% identical to any one of SEQ ID NOs: 6, 19, 27, 35, 69, 76, 149, 156, 630, 142, 176, 1048, 1053, 1058, 1063, and 1068; and (iii) a CDR3 having an amino acid sequence that is at least 65%, at least 70%, at least 75%, at least 80%, at least 85%, at least 90%, at least 95%, at least 99%, or 100% identical to any one of SEQ ID NOs: 7, 13, 20, 28, 36, 40, 70, 77, 327, 150, 157, 332, 631, 765, 767, 143, 857, 177, 793, 1049, 1054, 1059, 1064, and 1069; the VL2 comprises (i) a complementarity determining region (CDR) 1 having an amino acid sequence that is at least 65%, at least 70%, at least 75%, at least 80%, at least 85%, at least 90%, at least 95%, at least 99%, or 100% identical to any one of SEQ ID NOs: 1, 9, 15, 23, 30, 65, 72, 145, 152, 324, 627, 138, 172, 1045, 1050, 1055, 1060, and 1065; (ii) a CDR2 having an amino acid sequence that is at least 65%, at least 70%, at least 75%, at least 80%, at least 85%, at least 90%, at least 95%, at least 99%, or 100% identical to any one of SEQ ID NOs: 2, 31, 628, 1046, 1051, 1056, and 1061, or at least 65%, at least 70%, at least 75%, at least 80%, at least 85%, at least 90%, at least 95%, at least 99%, or 100% identical to any one of amino acid sequences GAS, LGS, GTN, SAS, SDS, AAS, DAS, and DNT; and (iii) a CDR3 having an amino acid sequence that is at least 65%, at least 70%, at least 75%, at least 80%, at least 85%, at least 90%, at least 95%, at least 99%, or 100% identical to any one of SEQ ID NOs: 3, 10, 16, 24, 32, 38, 66, 73, 146, 153, 325, 326, 764, 766, 139, 856, 173, 792, and 1066; and the VH2 comprises (i) a CDR1 having an amino acid sequence that is at least 65%, at least 70%, at least 75%, at least 80%, at least 85%, at least 90%, at least 95%, at least 99%, or 100% identical to any one of SEQ ID NOs: 5, 12, 18, 26, 34, 68, 75, 148, 155, 629, 141, 175, 1047, 1052, 1057, 1062, and 1067; (ii) a CDR2 having an amino acid sequence that is at least 65%, at least 70%, at least 75%, at least 80%, at least 85%, at least 90%, at least 95%, at least 99%, or 100% identical to any one of SEQ ID NOs: 6, 19, 27, 35, 69, 76, 149, 156, 630, 142, 176, 1048, 1053, 1058, 1063, and 1068; and (iii) a CDR3 having an amino acid sequence that is at least 65%, at least 70%, at least 75%, at least 80%, at least 85%, at least 90%, at least 95%, at least 99%, or 100% identical to any one of SEQ ID NOs: 7, 13, 20, 28, 36, 40, 70, 77, 327, 150, 157, 332, 631, 765, 767, 143, 857, 177, 793, 1049, 1054, 1059, 1064, and 1069.

[3874] In some aspects, the VL1 comprises an amino acid sequence that is at least 65%, at least 70%, at least 75%, at least 80%, at least 85%, at least 90%, at least 95%, at least 99%, or 100% identical to any one of SEQ ID NOs: 4, 11, 17, 25, 33, 39, 67, 74, 147, 154, 140, and 174.

[3875] In some aspects, the VH1 comprises an amino acid sequence that is at least 65%, at least 70%, at least 75%, at least 80%, at least 85%, at least 90%, at least 95%, at least 99%, or 100% identical to any one of SEQ ID NOs: 8, 14, 21, 22, 29, 37, 71, 78, 151, 158, 626, 144, and 178.

[3876] In some aspects, the VL2 comprises an amino acid sequence that is at least 65%, at least 70%, at least 75%, at least 80%, at least 85%, at least 90%, at least 95%, at least 99%, or 100% identical to any one of SEQ ID NOs: 4, 11, 17, 25, 33, 39, 67, 74, 147, 154, 140, and 174.

[3877] In some aspects, the VH2 comprises an amino acid sequence that is at least 65%, at least 70%, at least 75%, at least 80%, at least 85%, at least 90%, at least 95%, at least 99%, or 100% identical to any one of SEQ ID NOs: 8, 14, 21, 22, 29, 37, 71, 78, 151, 158, 626, 144, and 178.

[3878] In some aspects, (i) the VL1 comprises an amino acid sequence that is at least 65%, at least 70%, at least 75%, at least 80%, at least 85%, at least 90%, at least 95%, at least 99%, or 100% identical to any one of SEQ ID NOs: 4, 11, 17, 25, 33, 39, 67, 74, 147, 154, 140, and 174; (ii) the VH1 comprises an amino acid sequence that is at least 65%, at least 70%, at least 75%, at least 80%, at least 85%, at least 90%, at least 95%, at least 99%, or 100% identical to any one of SEQ ID NOs: 8, 14, 21, 22, 29, 37, 71, 78, 151, 158, 626, 144, and 178; (iii) the VL2 comprises an amino acid sequence that is at least 65%, at least 70%, at least 75%, at least 80%, at least 85%, at least 90%, at least 95%, at least 99%, or 100% identical to any one of SEQ ID NOs: 4, 11, 17, 25, 33, 39, 67, 74, 147, 154, 140, and 174; and (iv) the VH2 comprises an amino acid sequence that is at least 65%, at least 70%, at least 75%, at least 80%, at least 85%, at least 90%, at least 95%, at least 99%, or 100% identical to any one of SEQ ID NOs: 8, 14, 21, 22, 29, 37, 71, 78, 151, 158, 626, 144, and 178.

[3879] In some aspects, the VL1 comprises (i) a complementarity determining region (CDR) 1 having an amino acid sequence that is at least 65%, at least 70%, at least 75%, at least 80%, at least 85%, at least 90%, at least 95%, at least 99%, or 100% identical to any one of SEQ ID NOs: 41, 48, 138, 145, 152, 159, 166, 172, 192, 770, 778, 785, 794, 801, 807, 814, 827, 836, 849, 858, 865, 878, 1045, 1050, 1060, and 1065; (ii) a CDR2 having an amino acid sequence at least 65%, at least 70%, at least 75%, at least 80%, at least 85%, at least 90%, at least 95%, at least 99%, or 100% identical to any one of amino acid sequences AAS, GAS, DAS, NNN, SDS, SYN, WAS, and DAT, or at least 65%, at least 70%, at least 75%, at least 80%, at least 85%, at least 90%, at least 95%, at least 99%, or 100% identical to any one of SEQ ID NOs: 1046, 1051, and 1061; and (iii) a CDR3 having an amino acid sequence that is at least 65%, at least 70%, at least 75%, at least 80%, at least 85%, at least 90%, at least 95%, at least 99%, or 100% identical to any one of SEQ ID NOs: 42, 139, 146, 153, 160, 167, 173, 764, 766, 768, 771, 779, 786, 792, 795, 808, 815, 821, 830, 837, 843, 850, 856, 859, 866, 872, 879, 885, and 1066.

[3880] In some aspects, the VL2 comprises (i) a complementarity determining region (CDR) 1 having an amino acid sequence that is at least 65%, at least 70%, at least 75%, at least 80%, at least 85%, at least 90%, at least 95%, at least 99%, or 100% identical to any one of SEQ ID NOs: 41, 48, 138, 145, 152, 159, 166, 172, 192, 770, 778, 785, 794, 801, 807, 814, 827, 836, 849, 858, 865, 878, 1045, 1050, 1060, and 1065; (ii) a CDR2 having an amino acid sequence that is at least 65%, at least 70%, at least 75%, at least 80%, at least 85%, at least 90%, at least 95%, at least 99%, or 100% identical to any one of amino acid sequences AAS, GAS, DAS, NNN, SDS, SYN, WAS, and DAT, or at least 65%, at least 70%, at least 75%, at least 80%, at least 85%, at least 90%, at least 95%, at least 99%, or 100% identical to any one of SEQ ID NOs: 1046, 1051, and 1061; and (iii) a CDR3 having an amino acid sequence that is at least 65%, at least 70%, at least 75%, at least 80%, at least 85%, at least 90%, at least 95%, at least 99%, or 100% identical to any one of SEQ ID NOs: 42, 139, 146, 153, 160, 167, 173, 764, 766, 768, 771, 779, 786, 792, 795, 808, 815, 821, 830, 837, 843, 850, 856, 859, 866, 872, 879, 885, and 1066.

[3881] In some aspects, the VH1 comprises (i) a CDR1 having an amino acid sequence that is at least 65%, at least 70%, at least 75%, at least 80%, at least 85%, at least 90%, at least 95%, at least 99%, or 100% identical to any one of SEQ ID NOs: 44, 133, 141, 148, 155, 162, 175, 773, 781, 788, 797, 803, 810, 817, 823, 832, 839, 845, 852, 861, 868, 874, 881, 1047, 1052, 1062, and 1067; (ii) a CDR2 having an amino acid sequence that is at least 65%, at least 70%, at least 75%, at least 80%, at least 85%, at least 90%, at least 95%, at least 99%, or 100% identical to any one of SEQ ID NOs: 6, 142, 149, 156, 163, 169, 176, 776, 782, 789, 798, 804, 811, 818, 824, 833, 840, 846, 853, 862, 869, 875, 882, 1048, 1053, 1063, and 1068; and (iii) a CDR3 having an amino acid sequence that is at least 65%, at least 70%, at least 75%, at least 80%, at least 85%, at least 90%, at least 95%, at least 99%, or 100% identical to any one of SEQ ID NOs: 46, 143, 150, 157, 164, 170, 177, 765, 767, 769, 774, 783, 790, 793, 799, 805, 812, 819, 825, 834, 841, 847, 854, 857, 863, 870, 876, 883, 886, 1049, 1054, 1064, and 1069.

[3882] In some aspects, the VH2 comprises (i) a CDR1 having an amino acid sequence that is at least 65%, at least 70%, at least 75%, at least 80%, at least 85%, at least 90%, at least 95%, at least 99%, or 100% identical to any one of SEQ ID NOs: 44, 133, 141, 148, 155, 162, 175, 773, 781, 788, 797, 803, 810, 817, 823, 832, 839, 845, 852, 861, 868, 874, 881, 1047, 1052, 1062, and 1067; (ii) a CDR2 having an amino acid sequence that is at least 65%, at least 70%, at least 75%, at least 80%, at least 85%, at least 90%, at least 95%, at least 99%, or 100% identical to any one of SEQ ID NOs: 6, 142, 149, 156, 163, 169, 176, 776, 782, 789, 798, 804, 811, 818, 824, 833, 840, 846, 853, 862, 869, 875, 882, 1048, 1053, 1063, and 1068; and (iii) a CDR3 having an amino acid sequence that is at least 65%, at least 70%, at least 75%, at least 80%, at least 85%, at least 90%, at least 95%, at least 99%, or 100% identical to any one of SEQ ID NOs: 46, 143, 150, 157, 164, 170, 177, 765, 767, 769, 774, 783, 790, 793, 799, 805, 812, 819, 825, 834, 841, 847, 854, 857, 863, 870, 876, 883, 886, 1049, 1054, 1064, and 1069.

[3883] In some aspects, the VL1 comprises (i) a complementarity determining region (CDR) 1 having an amino acid sequence that is at least 65%, at least 70%, at least 75%, at least 80%, at least 85%, at least 90%, at least 95%, at least 99%, or 100% identical to any one of SEQ ID NOs: 41, 48, 138, 145, 152, 159, 166, 172, 192, 770, 778, 785, 794, 801, 807, 814, 827, 836, 849, 858, 865, 878, 1045, 1050, 1060, and 1065; (ii) a CDR2 having an amino acid sequence that is at least 65%, at least 70%, at least 75%, at least 80%, at least 85%, at least 90%, at least 95%, at least 99%, or 100% identical to any one of amino acid sequences AAS, GAS, DAS, NNN, SDS, SYN, WAS, and DAT, or at least 65%, at least 70%, at least 75%, at least 80%, at least 85%, at least 90%, at least 95%, at least 99%, or 100% identical to any one of SEQ ID NOs: 1046, 1051, and 1061; (iii) a CDR3 having an amino acid sequence that is at least 65%, at least 70%, at least 75%, at least 80%, at least 85%, at least 90%, at least 95%, at least 99%, or 100% identical to any one of SEQ ID NOs: 42, 139, 146, 153, 160, 167, 173, 764, 766, 768, 771, 779, 786, 792, 795, 808, 815, 821, 830, 837, 843, 850, 856, 859, 866, 872, 879, 885, and 1066; the VH1 comprises (i) a CDR1 having an amino acid sequence that is at least 65%, at least 70%, at least 75%, at least 80%, at least 85%, at least 90%, at least 95%, at least 99%, or 100% identical to any one of SEQ ID NOs: 44, 133, 141, 148, 155, 162, 175, 773, 781, 788, 797, 803, 810, 817, 823, 832, 839, 845, 852, 861, 868, 874, 881, 1047, 1052, 1062, and 1067; (ii) a CDR2 having an amino acid sequence that is at least 65%, at least 70%, at least 75%, at least 80%, at least 85%, at least 90%, at least 95%, at least 99%, or 100% identical to any one of SEQ ID NOs: 6, 142, 149, 156, 163, 169, 176, 776, 782, 789, 798, 804, 811, 818, 824, 833, 840, 846, 853, 862, 869, 875, 882, 1048, 1053, 1063, and 1068; and (iii) a CDR3 having an amino acid sequence that is at least 65%, at least 70%, at least 75%, at least 80%, at least 85%, at least 90%, at least 95%, at least 99%, or 100% identical to any one of SEQ ID NOs: 46, 143, 150, 157, 164, 170, 177, 765, 767, 769, 774, 783, 790, 793, 799, 805, 812, 819, 825, 834, 841, 847, 854, 857, 863, 870, 876, 883, 886, 1049, 1054, 1064, and 1069; the VL2 comprises (i) a complementarity determining region (CDR) 1 having an amino acid sequence that is at least 65%, at least 70%, at least 75%, at least 80%, at least 85%, at least 90%, at least 95%, at least 99%, or 100% identical to any one of SEQ ID NOs: 41, 48, 138, 145, 152, 159, 166, 172, 192, 770, 778, 785, 794, 801, 807, 814, 827, 836, 849, 858, 865, 878, 1045, 1050, 1060, and 1065; (ii) a CDR2 having an amino acid sequence that is at least 65%, at least 70%, at least 75%, at least 80%, at least 85%, at least 90%, at least 95%, at least 99%, or 100% identical to any one of amino acid sequences AAS, GAS, DAS, NNN, SDS, SYN, WAS, and DAT, or at least 65%, at least 70%, at least 75%, at least 80%, at least 85%, at least 90%, at least 95%, at least 99%, or 100% identical to any one of SEQ ID NOs: 1046, 1051, and 1061; and (iii) a CDR3 having an amino acid sequence that is at least 65%, at least 70%, at least 75%, at least 80%, at least 85%, at least 90%, at least 95%, at least 99%, or 100% identical to any one of SEQ ID NOs: 42, 139, 146, 153, 160, 167, 173, 764, 766, 768, 771, 779, 786, 792, 795, 808, 815, 821, 830, 837, 843, 850, 856, 859, 866, 872, 879, 885, and 1066; and the VH2 comprises (i) a CDR1 having an amino acid sequence that is at least 65%, at least 70%, at least 75%, at least 80%, at least 85%, at least 90%, at least 95%, at least 99%, or 100% identical to any one of SEQ ID NOs: 44, 133, 141, 148, 155, 162, 175, 773, 781, 788, 797, 803, 810, 817, 823, 832, 839, 845, 852, 861, 868, 874, 881, 1047, 1052, 1062, and 1067; (ii) a CDR2 having an amino acid sequence that is at least 65%, at least 70%, at least 75%, at least 80%, at least 85%, at least 90%, at least 95%, at least 99%, or 100% identical to any one of SEQ ID NOs: 6, 142, 149, 156, 163, 169, 176, 776, 782, 789, 798, 804, 811, 818, 824, 833, 840, 846, 853, 862, 869, 875, 882, 1048, 1053, 1063, and 1068; and (iii) a CDR3 having an amino acid sequence that is at least 65%, at least 70%, at least 75%, at least 80%, at least 85%, at least 90%, at least 95%, at least 99%, or 100% identical to any one of SEQ ID NOs: 46, 143, 150, 157, 164, 170, 177, 765, 767, 769, 774, 783, 790, 793, 799, 805, 812, 819, 825, 834, 841, 847, 854, 857, 863, 870, 876, 883, 886, 1049, 1054, 1064, and 1069.

[3884] In some aspects, the VL1 comprises an amino acid sequence that is at least 65%, at least 70%, at least 75%, at least 80%, at least 85%, at least 90%, at least 95%, at least 99%, or 100% identical to any one of SEQ ID NOs: 43, 140, 147, 154, 161, 168, 174, 772, 780, 787, 796, 802, 809, 816, 822, 831, 838, 844, 851, 860, 867, 873, and 880.

[3885] In some aspects, the VH1 comprises an amino acid sequence that is at least 65%, at least 70%, at least 75%, at least 80%, at least 85%, at least 90%, at least 95%, at least 99%, or 100% identical to any one of SEQ ID NOs: 144, 151, 158, 165, 171, 178, 775, 777, 784, 791, 800, 806, 813, 820, 826, 835, 842, 848, 855, 864, 871, 877, and 884.

[3886] In some aspects, the VL2 comprises an amino acid sequence that is at least 65%, at least 70%, at least 75%, at least 80%, at least 85%, at least 90%, at least 95%, at least 99%, or 100% identical to any one of SEQ ID NOs: 43, 140, 147, 154, 161, 168, 174, 772, 780, 787, 796, 802, 809, 816, 822, 831, 838, 844, 851, 860, 867, 873, and 880.

[3887] In some aspects, the VH2 comprises an amino acid sequence that is at least 65%, at least 70%, at least 75%, at least 80%, at least 85%, at least 90%, at least 95%, at least 99%, or 100% identical to any one of SEQ ID NOs: 144, 151, 158, 165, 171, 178, 775, 777, 784, 791, 800, 806, 813, 820, 826, 835, 842, 848, 855, 864, 871, 877, and 884.

[3888] In some aspects, (i) the VL1 comprises an amino acid sequence that is at least 65%, at least 70%, at least 75%, at least 80%, at least 85%, at least 90%, at least 95%, at least 99%, or 100% identical to any one of SEQ ID NOs: 43, 140, 147, 154, 161, 168, 174, 772, 780, 787, 796, 802, 809, 816, 822, 831, 838, 844, 851, 860, 867, 873, and 880; (ii) the VH1 comprises an amino acid sequence that is at least 65%, at least 70%, at least 75%, at least 80%, at least 85%, at least 90%, at least 95%, at least 99%, or 100% identical to any one of SEQ ID NOs: 144, 151, 158, 165, 171, 178, 775, 777, 784, 791, 800, 806, 813, 820, 826, 835, 842, 848, 855, 864, 871, 877, and 884; (iii) the VL2 comprises an amino acid sequence that is at least 65%, at least 70%, at least 75%, at least 80%, at least 85%, at least 90%, at least 95%, at least 99%, or 100% identical to any one of SEQ ID NOs: 43, 140, 147, 154, 161, 168, 174, 772, 780, 787, 796, 802, 809, 816, 822, 831, 838, 844, 851, 860, 867, 873, and 880; and (iv) the VH2 comprises an amino acid sequence that is at least 65%, at least 70%, at least 75%, at least 80%, at least 85%, at least 90%, at least 95%, at least 99%, or 100% identical to any one of SEQ ID NOs: 144, 151, 158, 165, 171, 178, 775, 777, 784, 791, 800, 806, 813, 820, 826, 835, 842, 848, 855, 864, 871, 877, and 884.

[3889] In some aspects, at least one of VL1 or VL2 comprises (i) a complementarity determining region (CDR) 1 having an amino acid sequence that is at least 65%, at least 70%, at least 75%, at least 80%, at least 85%, at least 90%, at least 95%, at least 99%, or 100% identical to SEQ ID NO: 145 or 1050; (ii) a CDR2 having an amino acid sequence at least 65%, at least 70%, at least 75%, at least 80%, at least 85%, at least 90%, at least 95%, at least 99%, or 100% identical to SEQ ID NO: 1051 or an amino acid sequence that is at least 65%, at least 70%, at least 75%, at least 80%, at least 85%, at least 90%, at least 95%, at least 99%, or 100% identical to amino acid sequence AAS; and (iii) a CDR3 having an amino acid sequence that is at least 65%, at least 70%, at least 75%, at least 80%, at least 85%, at least 90%, at least 95%, at least 99%, or 100% identical to SEQ ID NO: 146 or 764.

[3890] In some aspects, at least one of VH1 or VH2 comprises (i) a complementarity determining region (CDR) 1 having an amino acid sequence that is at least 65%, at least 70%, at least 75%, at least 80%, at least 85%, at least 90%, at least 95%, at least 99%, or 100% identical to SEQ ID NO: 148 or 1052; (ii) a CDR2 having an amino acid sequence that is at least 65%, at least 70%, at least 75%, at least 80%, at least 85%, at least 90%, at least 95%, at least 99%, or 100% identical to SEQ ID NO: 149 or 1053; and (iii) a CDR3 having an amino acid sequence that is at least 65%, at least 70%, at least 75%, at least 80%, at least 85%, at least 90%, at least 95%, at least 99%, or 100% identical to SEQ ID NO: 150, 765, or 1054.

[3891] In some aspects, at least one of VL1 or VL2, comprises (i) a complementarity determining region (CDR) 1 having an amino acid sequence that is at least 65%, at least 70%, at least 75%, at least 80%, at least 85%, at least 90%, at least 95%, at least 99%, or 100% identical to SEQ ID NO: 145 or 1050; (ii) a CDR2 having an amino acid sequence at least 65%, at least 70%, at least 75%, at least 80%, at least 85%, at least 90%, at least 95%, at least 99%, or 100% identical to SEQ ID NO: 1051 or an amino acid sequence that is at least 65%, at least 70%, at least 75%, at least 80%, at least 85%, at least 90%, at least 95%, at least 99%, or 100% identical to amino acid sequence AAS; and (iii) a CDR3 having an amino acid sequence that is at least 65%, at least 70%, at least 75%, at least 80%, at least 85%, at least 90%, at least 95%, at least 99%, or 100% identical to SEQ ID NO: 146 or 764; and at least one of VH1 or VH2 comprises (iv) a complementarity determining region (CDR) 1 having an amino acid sequence that is at least 65%, at least 70%, at least 75%, at least 80%, at least 85%, at least 90%, at least 95%, at least 99%, or 100% identical to SEQ ID NO: 148 or 1052; (v) a CDR2 having an amino acid sequence that is at least 65%, at least 70%, at least 75%, at least 80%, at least 85%, at least 90%, at least 95%, at least 99%, or 100% identical to SEQ ID NO: 149 or 1053; and (vi) a CDR3 having an amino acid sequence that is at least 65%, at least 70%, at least 75%, at least 80%, at least 85%, at least 90%, at least 95%, at least 99%, or 100% identical to SEQ ID NO: 150, 765, or 1054.

[3892] In some aspects, at least one of VL1 or VL2 comprises an amino acid sequence that is at least 65%, at least 70%, at least 75%, at least 80%, at least 85%, at least 90%, at least 95%, at least 99%, or 100% identical to SEQ ID NO: 147.

[3893] In some aspects, at least one of VH1 or VH2 comprises an amino acid sequence that is at least 65%, at least 70%, at least 75%, at least 80%, at least 85%, at least 90%, at least 95%, at least 99%, or 100% identical to SEQ ID NO: 151.

[3894] In some aspects, (i) at least one of VL1 or VL2 comprises an amino acid sequence that is at least 65%, at least 70%, at least 75%, at least 80%, at least 85%, at least 90%, at least 95%, at least 99%, or 100% identical to SEQ ID NO: 147, and (ii) at least one of VH1 or VH2 comprises an amino acid sequence that is at least 65%, at least 70%, at least 75%, at least 80%, at least 85%, at least 90%, at least 95%, at least 99%, or 100% identical to SEQ ID NO: 151.

[3895] In some aspects, the VL1 comprises (i) a complementarity determining region (CDR) 1 having an amino acid sequence that is at least 65%, at least 70%, at least 75%, at least 80%, at least 85%, at least 90%, at least 95%, at least 99%, or 100% identical to SEQ ID NO: 145 or 1050; (ii) a CDR2 having an amino acid sequence at least 65%, at least 70%, at least 75%, at least 80%, at least 85%, at least 90%, at least 95%, at least 99%, or 100% identical to SEQ ID NO: 1051 or an amino acid sequence that is at least 65%, at least 70%, at least 75%, at least 80%, at least 85%, at least 90%, at least 95%, at least 99%, or 100% identical to amino acid sequence AAS; and (iii) a CDR3 having an amino acid sequence that is at least 65%, at least 70%, at least 75%, at least 80%, at least 85%, at least 90%, at least 95%, at least 99%, or 100% identical to SEQ ID NO: 146 or 764; the VH1 comprises (iv) a complementarity determining region (CDR) 1 having an amino acid sequence that is at least 65%, at least 70%, at least 75%, at least 80%, at least 85%, at least 90%, at least 95%, at least 99%, or 100% identical to SEQ ID NO: 148 or 1052; (v) a CDR2 having an amino acid sequence that is at least 65%, at least 70%, at least 75%, at least 80%, at least 85%, at least 90%, at least 95%, at least 99%, or 100% identical to SEQ ID NO: 149 or 1053; and (vi) a CDR3 having an amino acid sequence that is at least 65%, at least 70%, at least 75%, at least 80%, at least 85%, at least 90%, at least 95%, at least 99%, or 100% identical to SEQ ID NO: 150, 765, or 1054; the VL2 comprises (vii) a complementarity determining region (CDR) 1 having an amino acid sequence that is at least 65%, at least 70%, at least 75%, at least 80%, at least 85%, at least 90%, at least 95%, at least 99%, or 100% identical to any one of SEQ ID NOs: 1, 9, 15, 23, 30, 41, 48, 55, 58, 65, 72, 79, 86, 93, 99, 105, 112, 119, 130, 138, 145, 152, 159, 166, 172, 179, 186, 192, 199, 205, 212, 219, 226, 232, 324, 627, 640, 650, 659, 676, 687, 695, 703, 712, 770, 778, 785, 794, 801, 807, 814, 827, 836, 849, 858, 865, 878, 1045, 1050, 1055, 1060, and 1065; (viii) a CDR2 having an amino acid sequence at least 65%, at least 70%, at least 75%, at least 80%, at least 85%, at least 90%, at least 95%, at least 99%, or 100% identical to any one of SEQ ID NOs: 2, 31, 628, 641, 677, 1046, 1051, 1056, and 1061; or at least 65%, at least 70%, at least 75%, at least 80%, at least 85%, at least 90%, at least 95%, at least 99%, or 100% identical to any one of amino acid sequences AAS, GAS, LGS, GTN, GTN, SAS, SDS, DNT, EVT, DAS, DVT, RNS, DVS, EDS, DDS, KDS, VAS, WAS, YTS, EVS, NNN, SYN, and DAT; (ix) a CDR3 having an amino acid sequence at least 65%, at least 70%, at least 75%, at least 80%, at least 85%, at least 90%, at least 95%, at least 99%, or 100% identical to any one of SEQ ID NOs: 3, 10, 16, 24, 32, 38, 42, 49, 59, 66, 73, 80, 87, 94, 100, 106, 113, 120, 126, 131, 139, 146, 153, 160, 167, 173, 180, 187, 193, 200, 206, 213, 220, 227, 233, 239, 242, 246, 249, 256, 283, 285, 287, 288, 290, 292, 294, 296, 301, 304, 306, 309, 311, 313, 316, 325, 326, 329, 642, 651, 660, 668, 678, 651, 696, 704, 713, 764, 766, 768, 771, 779, 786, 792, 795, 808, 815, 821, 830, 837, 843, 850, 856, 859, 866, 872, 879, 885, and 1066; and the VH2 comprises (x) a CDR1 having an amino acid sequence at least 65%, at least 70%, at least 75%, at least 80%, at least 85%, at least 90%, at least 95%, at least 99%, or 100% identical to any one of SEQ ID NOs: 5, 12, 18, 26, 34, 44, 51, 61, 68, 75, 82, 89, 96, 102, 108, 115, 122, 133, 141, 148, 155, 162, 175, 182, 189, 195, 202, 208, 215, 222, 229, 235, 318, 629, 645, 654, 663, 671, 682, 690, 699, 707, 716, 773, 781, 788, 797, 803, 810, 817, 823, 832, 839, 845, 852, 861, 868, 874, 881, 1047, 1052, 1057, 1062, and 1067; (xi) a CDR2 having an amino acid sequence at least 65%, at least 70%, at least 75%, at least 80%, at least 85%, at least 90%, at least 95%, at least 99%, or 100% identical to any one of SEQ ID NOs: 6, 19, 27, 35, 45, 52, 56, 62, 69, 76, 83, 90, 109, 116, 123, 134, 142, 149, 156, 163, 169, 176, 183, 196, 209, 216, 223, 236, 273, 319, 328, 630, 646, 655, 664, 672, 683, 691, 708, 776, 782, 789, 798, 804, 811, 818, 824, 833, 840, 846, 853, 862, 869, 875, 882, 1048, 1053, 1058, 1063, and 1068; (xii) a CDR3 having an amino acid sequence at least 65%, at least 70%, at least 75%, at least 80%, at least 85%, at least 90%, at least 95%, at least 99%, or 100% identical to any one of SEQ ID NOs: 7, 13, 20, 28, 36, 40, 46, 53, 63, 70, 77, 84, 91, 97, 103, 110, 117, 124, 128, 135, 143, 150, 157, 164, 170, 177, 184, 190, 197, 203, 210, 217, 224, 230, 237, 241, 244, 248, 253, 257, 259, 261, 263, 265, 267, 269, 271, 274, 276, 278, 281, 297, 320, 322, 327, 330, 332, 631, 647, 656, 665, 673, 684, 692, 700, 709, 717, 765, 767, 769, 774, 783, 790, 793, 799, 805, 812, 819, 825, 834, 841, 847, 854, 857, 863, 870, 876, 883, 886, 1049, 1054, 1059, 1064, and 1069.

[3896] In some aspects, (i) the VL1 comprises an amino acid sequence that is at least 65%, at least 70%, at least 75%, at least 80%, at least 85%, at least 90%, at least 95%, at least 99%, or 100% identical to SEQ ID NO: 147; (ii) the VH1 comprises an amino acid sequence that is at least 65%, at least 70%, at least 75%, at least 80%, at least 85%, at least 90%, at least 95%, at least 99%, or 100% identical to SEQ ID NO: 151; (iii) the VL2 comprises an amino acid sequence that is at least 65%, at least 70%, at least 75%, at least 80%, at least 85%, at least 90%, at least 95%, at least 99%, or 100% identical to any one of SEQ ID NOs: 4, 11, 17, 25, 33, 39, 43, 50, 60, 67, 74, 81, 88, 95, 101, 107, 114, 121, 127, 132, 140, 147, 154, 161, 168, 174, 181, 188, 194, 201, 207, 214, 221, 228, 234, 240, 243, 247, 250, 251, 252, 255, 284, 286, 289, 291, 293, 295, 299, 300, 302, 303, 305, 307, 308, 310, 312, 314, 315, 317, 323, 639, 649, 658, 667, 675, 686, 694, 702, 711, 772, 780, 787, 796, 802, 809, 816, 822, 831, 838, 844, 851, 860, 867, 873, 880, and 988; and (iv) the VH2 comprises an amino acid sequence that is at least 65%, at least 70%, at least 75%, at least 80%, at least 85%, at least 90%, at least 95%, at least 99%, or 100% identical to any one of SEQ ID NOs: 8, 14, 21, 22, 29, 37, 47, 54, 57, 64, 71, 78, 85, 92, 98, 104, 111, 118, 125, 129, 136, 137, 144, 151, 158, 165, 171, 178, 185, 191, 198, 204, 211, 218, 225, 231, 238, 245, 254, 258, 260, 262, 264, 266, 268, 270, 272, 275, 277, 279, 280, 282, 298, 321, 331, 626, 644, 653, 662, 670, 681, 689, 698, 706, 715, 775, 777, 784, 791, 800, 806, 813, 820, 826, 835, 842, 848, 855, 864, 871, 877, and 884.

[3897] In some aspects, the VL1 comprises (i) a complementarity determining region (CDR) 1 having an amino acid sequence that is at least 65%, at least 70%, at least 75%, at least 80%, at least 85%, at least 90%, at least 95%, at least 99%, or 100% identical to SEQ ID NO: 145 or 1050; (ii) a CDR2 having an amino acid sequence at least 65%, at least 70%, at least 75%, at least 80%, at least 85%, at least 90%, at least 95%, at least 99%, or 100% identical to SEQ ID NO: 1051 or an amino acid sequence that is at least 65%, at least 70%, at least 75%, at least 80%, at least 85%, at least 90%, at least 95%, at least 99%, or 100% identical to amino acid sequence AAS; and (iii) a CDR3 having an amino acid sequence that is at least 65%, at least 70%, at least 75%, at least 80%, at least 85%, at least 90%, at least 95%, at least 99%, or 100% identical to SEQ ID NO: 146 or 764; the VH1 comprises (iv) a complementarity determining region (CDR) 1 having an amino acid sequence that is at least 65%, at least 70%, at least 75%, at least 80%, at least 85%, at least 90%, at least 95%, at least 99%, or 100% identical to SEQ ID NO: 148 or 1052; (v) a CDR2 having an amino acid sequence that is at least 65%, at least 70%, at least 75%, at least 80%, at least 85%, at least 90%, at least 95%, at least 99%, or 100% identical to SEQ ID NO: 149 or 1053; and (vi) a CDR3 having an amino acid sequence that is at least 65%, at least 70%, at least 75%, at least 80%, at least 85%, at least 90%, at least 95%, at least 99%, or 100% identical to SEQ ID NO: 150, 765, or 1054; the VL2 comprises (vii) a complementarity determining region (CDR) 1 having an amino acid sequence that is at least 65%, at least 70%, at least 75%, at least 80%, at least 85%, at least 90%, at least 95%, at least 99%, or 100% identical to any one of SEQ ID NOs: 1, 9, 15, 23, 30, 65, 72, 145, 152, 324, 627, 138, 172, 1045, 1050, 1055, 1060, and 1065; (viii) a CDR2 having an amino acid sequence at least 65%, at least 70%, at least 75%, at least 80%, at least 85%, at least 90%, at least 95%, at least 99%, or 100% identical to any one of SEQ ID NOs: 2, 31, 628, 1046, 1051, 1056, and 1061, or at least 65%, at least 70%, at least 75%, at least 80%, at least 85%, at least 90%, at least 95%, at least 99%, or 100% identical to any one of amino acid sequences GAS, LGS, GTN, SAS, SDS, AAS, DAS, and DNT; (ix) a CDR3 having an amino acid sequence at least 65%, at least 70%, at least 75%, at least 80%, at least 85%, at least 90%, at least 95%, at least 99%, or 100% identical to any one of SEQ ID NOs: 3, 10, 16, 24, 32, 38, 66, 73, 146, 153, 325, 326, 764, 766, 139, 856, 173, 792, and 1066; and the VH2 comprises (x) a CDR1 having an amino acid sequence at least 65%, at least 70%, at least 75%, at least 80%, at least 85%, at least 90%, at least 95%, at least 99%, or 100% identical to any one of SEQ ID NOs: 5, 12, 18, 26, 34, 68, 75, 148, 155, 629, 141, 175, 1047, 1052, 1057, 1062, and 1067; (xi) a CDR2 having an amino acid sequence at least 65%, at least 70%, at least 75%, at least 80%, at least 85%, at least 90%, at least 95%, at least 99%, or 100% identical to any one of SEQ ID NOs: 6, 19, 27, 35, 69, 76, 149, 156, 630, 142, 176, 1048, 1053, 1058, 1063, and 1068; (xii) a CDR3 having an amino acid sequence at least 65%, at least 70%, at least 75%, at least 80%, at least 85%, at least 90%, at least 95%, at least 99%, or 100% identical to any one of SEQ ID NOs: 7, 13, 20, 28, 36, 40, 70, 77, 327, 150, 157, 332, 631, 765, 767, 143, 857, 177, 793, 1049, 1054, 1059, 1064, and 1069.

[3898] In some aspects, (i) the VL1 comprises an amino acid sequence that is at least 65%, at least 70%, at least 75%, at least 80%, at least 85%, at least 90%, at least 95%, at least 99%, or 100% identical to SEQ ID NO: 147; (ii) the VH1 comprises an amino acid sequence that is at least 65%, at least 70%, at least 75%, at least 80%, at least 85%, at least 90%, at least 95%, at least 99%, or 100% identical to SEQ ID NO: 151; (iii) the VL2 comprises an amino acid sequence that is at least 65%, at least 70%, at least 75%, at least 80%, at least 85%, at least 90%, at least 95%, at least 99%, or 100% identical to any one of SEQ ID NOs: 4, 11, 17, 25, 33, 39, 67, 74, 147, 154, 140, and 174; and (iv) the VH2 comprises an amino acid sequence that is at least 65%, at least 70%, at least 75%, at least 80%, at least 85%, at least 90%, at least 95%, at least 99%, or 100% identical to any one of SEQ ID NOs: 8, 14, 21, 22, 29, 37, 71, 78, 151, 158, 626, 144, and 178.

[3899] In some aspects, the antigen binding polypeptides comprised in the antibodies or antigen binding fragments thereof (e.g., monospecific or multispecific antibodies or antigen binding fragments thereof) provided herein further comprise an Fc region. In some aspects, the antigen binding polypeptides comprised in the antibodies or antigen binding fragments thereof (e.g., monospecific or multispecific antibodies or antigen binding fragments thereof) provided herein further comprise an Fc region at the carboxy-terminus. In some aspects, the Fc region comprises an immunoglobulin heavy chain constant region 2 (CH2) and/or an immunoglobulin heavy chain constant region 3 (CH3). In some aspects, the Fc region further comprises an immunoglobulin hinge (i.e., a hinge region). In some aspects, the hinge region is interposed between a CH1 and a CH2 (i.e., a hinge region is localized between the carboxy terminal residue of a CH1 and the N-terminal residue of a CH2). In some aspects, the hinge region comprises an amino acid sequence at least 65%, at least 70%, at least 75%, at least 80%, at least 85%, at least 90%, at least 95%, at least 99%, or 100% identical to any one of SEQ ID NOs: 635, 636, 1072, 1073, or 1074. In some aspects, the Fc region comprises a CH2 and a CH3. In some aspects, the CH2 comprises an amino acid sequence that is at least 65%, at least 70%, at least 75%, at least 80%, at least 85%, at least 90%, at least 95%, at least 99%, or 100% identical to any one of SEQ ID NOs: 1075-1078. In some aspects, the CH3 comprises an amino acid sequence that is at least 65%, at least 70%, at least 75%, at least 80%, at least 85%, at least 90%, at least 95%, at least 99%, or 100% identical to any one of SEQ ID NOs: 1079-1085. In some aspects, the Fc region comprises an amino acid sequence that is at least 65%, at least 70%, at least 75%, at least 80%, at least 85%, at least 90%, at least 95%, at least 99%, or 100% identical to any one of SEQ ID NOs: 376-380.

[3900] In some aspects, the Fc region comprises one or more amino acid substitutions. In some aspects, the one or more amino acid substitutions comprise one or more half-life extension amino acid substitutions. In some aspects, the one or more half-life extension amino acid substitutions comprise one or more of amino acid substitutions M428L, N434A, N434S, L234F, L235E, P331S, M252Y, S254T, or T256E, or equivalent thereof, based on the EU numbering scheme. In some aspects, the one or more half-life extension amino acid substitutions comprise a LA (M428L and N434A, or equivalent thereof, based on the EU numbering scheme) amino acid substitution. In some aspects, the one or more half-life extension amino acid substitutions comprise a LS (M428L and N434S, or equivalent thereof, based on the EU numbering scheme) amino acid substitution. In some aspects, the one or more half-life extension amino acid substitutions comprise L234F and L235E, or equivalent thereof (based on the EU numbering scheme) amino acid substitutions. In some aspects, the one or more half-life extension amino acid substitutions comprise a TM (L234F, L235E, and P331S, or equivalent thereof, based on the EU numbering scheme) amino acid substitution. In some aspects, the one or more half-life extension amino acid substitutions comprise a YTE (M252Y, S254T, and T256E, or equivalent thereof, based on the EU numbering scheme) amino acid substitution.

[3901] In some aspects, the Fc region comprises at least one knob-into-hole modification. In some aspects, the antigen binding polypeptides are IgG1 or IgG4 antibodies or antigen binding fragments thereof.

[3902] In some aspects, the knob-into-hole modification comprises one or more of knob substitutions of S354C and T366W, or equivalent thereof, and/or one or more of hole substitutions of Y349C, T366S, L368A, Y407V, or equivalent thereof, or a combination thereof, based on the EU numbering scheme. In some aspects, the Fc region comprises a knob-into-hole modification comprising knob substitutions of S354C and T366W, or equivalent thereof, and/or hole substitutions of Y349C, T366S, L368A and Y407V, or equivalent thereof, and/or a half-life extension amino acid substitution comprising: a LA (M428L and N434A, or equivalent thereof, based on the EU numbering scheme) amino acid substitution, a LS (M428L and N434S, or equivalent thereof, based on the EU numbering scheme) amino acid substitution. L234F and L235E, or equivalent thereof (based on the EU numbering scheme) amino acid substitutions, a TM (L234F, L235E, and P331S, or equivalent thereof, based on the EU numbering scheme) amino acid substitution, a YTE (M252Y, S254T, and T256E, or equivalent thereof, based on the EU numbering scheme) amino acid substitution, or any combination thereof.

[3903] In some aspects, the Fc region comprises knob substitutions of S354C and T366W, or equivalent thereof, and a half-life extension amino acid substitution comprising: a LA (M428L and N434A, or equivalent thereof, based on the EU numbering scheme) amino acid substitution, a LS (M428L and N434S, or equivalent thereof, based on the EU numbering scheme) amino acid substitution. L234F and L235E, or equivalent thereof (based on the EU numbering scheme) amino acid substitutions, a TM (L234F, L235E, and P331S, or equivalent thereof, based on the EU numbering scheme) amino acid substitution, a YTE (M252Y, S254T, and T256E, or equivalent thereof, based on the EU numbering scheme) amino acid substitution, or any combination thereof.

[3904] In some aspects, the Fc region comprises hole substitutions of Y349C, T366S, L368A and Y407V, or equivalent thereof, and a half-life extension amino acid substitution comprising: a LA (M428L and N434A, or equivalent thereof, based on the EU numbering scheme) amino acid substitution, a LS (M428L and N434S, or equivalent thereof, based on the EU numbering scheme) amino acid substitution. L234F and L235E, or equivalent thereof (based on the EU numbering scheme) amino acid substitutions, a TM (L234F, L235E, and P331S, or equivalent thereof, based on the EU numbering scheme) amino acid substitution, a YTE (M252Y, S254T, and T256E, or equivalent thereof, based on the EU numbering scheme) amino acid substitution, or any combination thereof.

[3905] In some aspects, the antigen binding polypeptides comprised in the antibodies or antigen binding fragments thereof (e.g., monospecific or multispecific antibodies or antigen binding fragments thereof) disclosed herein comprise one or more Fc effector function knockout mutation. In some aspects, the antigen binding polypeptides comprised in the antibodies or antigen binding fragments thereof (e.g., monospecific or multispecific antibodies or antigen binding fragments thereof) disclosed herein are IgG1 or IgG4 antibodies or antigen binding fragments thereof. In some aspects, the Fc effector function knockout mutation is L234A, L235A, P239A, or equivalent thereof, or a combination thereof, based on the EU numbering scheme.

[3906] In some aspects, the antigen binding polypeptides comprised in the antibodies or antigen binding fragments thereof (e.g., monospecific or multispecific antibodies or antigen binding fragments thereof) disclosed herein comprise a mutation at a glycosylation site. In some aspects, the mutation at a glycosylation site is a mutation at an N-glycosylation site. In some aspects, the antigen binding polypeptides comprised in the antibodies or antigen binding fragments thereof (e.g., monospecific or multispecific antibodies or antigen binding fragments thereof) disclosed herein comprise a VH comprising a mutation at a glycosylation site. In some aspects, the mutation at a glycosylation site is a mutation at an N-glycosylation site. In some aspects, the mutation at an N-glycosylation site is at amino acid N62 of the VH region or equivalent thereof. In some aspects, the mutation at an N-glycosylation site at amino acid N62 is N62Q or N62S, or equivalent thereof.

[3907] In some aspects, the antigen binding polypeptides comprised in the antibodies or antigen binding fragments thereof (e.g., monospecific or multispecific antibodies or antigen binding fragments thereof) disclosed herein, comprise one or more optional linkers. The one or more optional linkers are indicated herein as Ln, wherein n is an integer, and the integer next to each L indicates each L comprised in the antigen binding polypeptides comprised in the antigen binding polypeptide complexes disclosed herein. For example, if an antigen binding polypeptide comprised in the antigen binding polypeptide complexes disclosed herein comprises two linkers, the first linker from N-terminus to C-terminus is herein indicated as L1, and the second linker from N-terminus to C-terminus is herein indicated as L2. If an antigen binding polypeptide complex disclosed herein comprises a first antigen binding polypeptide comprising two linkers, indicated herein as L1 and L2, as explained above, the linkers comprised in the second antigen binding polypeptide are indicated with the following integer, in this example, the first linker from N-terminus to C-terminus of the second antigen binding polypeptide is herein indicated as L3, the second linker from N-terminus to C-terminus of the second antigen binding polypeptide is herein indicated as L3. In some aspects, any one of the optional linkers each independently have a length of from 0 amino acids to about 50 amino acids. In some aspects, any one of the optional linkers each independently have a length of from 5 amino acids to about 40 amino acids.

[3908] In some aspects, any one of the optional linkers are non-immunogenic. In some aspects, any one of the optional linkers do not contain a consensus T cell epitope.

[3909] In some aspects, any of Ln comprises an amino acid sequence of G or A, or an amino acid sequence at least 65%, at least 70%, at least 75%, at least 80%, at least 85%, at least 90%, at least 95%, at least 99%, or 100% identical to amino acid sequence GSS or ASG, or an amino acid sequence at least 65%, at least 70%, at least 75%, at least 80%, at least 85%, at least 90%, at least 95%, at least 99%, or 100% identical to any one of SEQ ID NOs: 333-373 or 967-971. In some aspects, Ln comprises an amino acid sequence at least 65%, at least 70%, at least 75%, at least 80%, at least 85%, at least 90%, at least 95%, at least 99%, or 100% identical to any one of SEQ ID NOs: 333-345 or 967-971.

[3910] In some aspects, the antigen binding polypeptide is selected from any one of the more specific aspects provided herein for an antigen binding polypeptide in an antigen binding polypeptide complex having no more than three polypeptide chains.

[3911] In some aspects, the antigen binding polypeptide further comprises one or more immunoglobulin heavy chain constant region 1 (CH1) and/or one or more immunoglobulin light chain constant region (CL) between any one of the variable regions and/or optional amino acid linkers (e.g., between VL1 and L1, between L1 and VH1, between VH1 and L2, between L2 and VL1, between L1 and VL2, between VL2 and L2, between L2 and VH2, between VH2 and L3, between L3 and VH1, between VL1 and L1, between L1 and VH2, between VH2 and L2, between, L2 and VL2, between VL2 and L3, between L3 and VH1, between VH1 and L4, between L4 and VH2, between VH2 and L5, between L5 and VL2, between VL2 and L6, between L6 and VL1, between VH1 and L4, between L4 and VL2, between L4 and VL2, between VL2 and L5, between L5 and VH2, between VH2 and L6, or between L6 and VL1).

[3912] In some aspects, the antigen binding polypeptide is selected from any one of the more specific aspects provided herein for an antigen binding polypeptide in an antigen binding polypeptide complex having no more than three polypeptide chains, and further comprises one or more immunoglobulin heavy chain constant region 1 (CH1) and/or one or more immunoglobulin light chain constant region (CL) between any one of the variable regions and/or optional amino acid linkers (e.g., between VL1 and L1, between L1 and VH1, between VH1 and L2, between L2 and VL1, between L1 and VL2, between VL2 and L2, between L2 and VH2, between VH2 and L3, between L3 and VH1, between VL1 and L1, between L1 and VH2, between VH2 and L2, between. L2 and VL2, between VL2 and L3, between L3 and VH1, between VH1 and L4, between L4 and VH2, between VH2 and L5, between L5 and VL2, between VL2 and L6, between L6 and VL1, between VH1 and L4, between L4 and VL2, between L4 and VL2, between VL2 and L5, between L5 and VH2, between VH2 and L6, or between L6 and VL1).

[3913] In some aspects, the antigen binding polypeptides comprised in the antibodies or antigen binding fragments thereof (e.g., monospecific or multispecific antibodies or antigen binding fragments thereof) disclosed herein, comprise one or more CL, as indicated in the formulas representing the antigen binding polypeptide complexes disclosed herein. In some aspects, the CL comprises an amino acid sequence at least 65%, at least 70%, at least 75%, at least 80%, at least 85%, at least 90%, at least 95%, at least 99%, or 100% identical to any one of SEQ ID NOs: 374, 637, or 1092-1095.

[3914] In some aspects, the antigen binding polypeptides comprised in the antibodies or antigen binding fragments thereof (e.g., monospecific or multispecific antibodies or antigen binding fragments thereof) disclosed herein, comprise one or more CH1, as indicated in the formulas representing the antigen binding polypeptide complexes disclosed herein. In some aspects, the CH1 comprises an amino acid sequence at least 65%, at least 70%, at least 75%, at least 80%, at least 85%, at least 90%, at least 95%, at least 99%, or 100% identical to any one of SEQ ID NOs: 375, 634, 1070, 1071, or 1086-1091.

[3915] In some aspects, the antigen binding polypeptides comprised in the antibodies or antigen binding fragments thereof (e.g., monospecific or multispecific antibodies or antigen binding fragments thereof) provided herein further comprise an Fc region. In some aspects, the antigen binding polypeptides comprised in the antibodies or antigen binding fragments thereof (e.g., monospecific or multispecific antibodies or antigen binding fragments thereof) provided herein further comprise an Fc region at the carboxy-terminus. In some aspects, the Fc region comprises an immunoglobulin heavy chain constant region 2 (CH2) and/or an immunoglobulin heavy chain constant region 3 (CH3). In some aspects, the Fc region further comprises an immunoglobulin hinge (i.e., a hinge region). In some aspects, the hinge region is interposed between a CH1 and a CH2 (i.e., a hinge region is localized between the carboxy terminal residue of a CH1 and the N-terminal residue of a CH2). In some aspects, the hinge region comprises an amino acid sequence at least 65%, at least 70%, at least 75%, at least 80%, at least 85%, at least 90%, at least 95%, at least 99%, or 100% identical to any one of SEQ ID NOs: 635, 636, 1072, 1073, or 1074. In some aspects, the Fc region comprises a CH2 and a CH3. In some aspects, the CH2 comprises an amino acid sequence that is at least 65%, at least 70%, at least 75%, at least 80%, at least 85%, at least 90%, at least 95%, at least 99%, or 100% identical to any one of SEQ ID NOs: 1075-1078. In some aspects, the CH3 comprises an amino acid sequence that is at least 65%, at least 70%, at least 75%, at least 80%, at least 85%, at least 90%, at least 95%, at least 99%, or 100% identical to any one of SEQ ID NOs: 1079-1085. In some aspects, the Fc region comprises an amino acid sequence that is at least 65%, at least 70%, at least 75%, at least 80%, at least 85%, at least 90%, at least 95%, at least 99%, or 100% identical to any one of SEQ ID NOs: 376-380.

[3916] In some aspects, provided herein are antibodies or antigen binding fragments thereof (e.g., monospecific or multispecific antibodies or antigen binding fragments thereof) comprising an antigen binding polypeptide having a structure represented by:
[3917] VL1-L1-VH1 or VH1-L1-VL1;
[3918] wherein:
[3919] VL1 is a first immunoglobulin light chain variable region that specifically binds to a severe acute respiratory syndrome coronavirus 2 (SARS-CoV-2) protein;
[3920] VH1 is a first immunoglobulin heavy chain variable region that specifically binds to a SARS-CoV-2 protein; and
[3921] L1 is an optional amino acid linker.

[3922] In any aspect shown herein as a structure from amino terminus to carboxy terminus, and with binding pairs selected from VL and/or VH or other structural regions such as CH2, CH3, when shown without a specific linker such as L1, L2, etc., such linkers are optionally present in such structures between each designated subsequence VL, VH, etc.

[3923] In some aspects, the VL1 comprises (i) a complementarity determining region (CDR) 1 having an amino acid sequence that is at least 65%, at least 70%, at least 75%, at least 80%, at least 85%, at least 90%, at least 95%, at least 99%, or 100% identical to any one of SEQ ID NOs: 1, 9, 15, 23, 30, 41, 48, 55, 58, 65, 72, 79, 86, 93, 99, 105, 112, 119, 130, 138, 145, 152, 159, 166, 172, 179, 186, 192, 199, 205, 212, 219, 226, 232, 324, 627, 640, 650, 659, 676, 687, 695, 703, 712, 770, 778, 785, 794, 801, 807, 814, 827, 836, 849, 858, 865, 878, 1045, 1050, 1055, 1060, and 1065; (ii) a CDR2 having an amino acid sequence that is at least 65%, at least 70%, at least 75%, at least 80%, at least 85%, at least 90%, at least 95%, at least 99%, or 100% identical to any one of SEQ ID NOs: 2, 31, 628, 641, 677, 1046, 1051, 1056, and 1061; or at least 65%, at least 70%, at least 75%, at least 80%, at least 85%, at least 90%, at least 95%, at least 99%, or 100% identical to any one of amino acid sequences AAS, GAS, LGS, GTN, GTN, SAS, SDS, DNT, EVT, DAS, DVT, RNS, DVS, EDS, DDS, KDS, VAS, WAS, YTS, EVS, NNN, SYN, and DAT; and (iii) a CDR3 having an amino acid sequence that is at least 65%, at least 70%, at least 75%, at least 80%, at least 85%, at least 90%, at least 95%, at least 99%, or 100% identical to any one of SEQ ID NOs: 3, 10, 16, 24, 32, 38, 42, 49, 59, 66, 73, 80, 87, 94, 100, 106, 113, 120, 126, 131, 139, 146, 153, 160, 167, 173, 180, 187, 193, 200, 206, 213, 220, 227, 233, 239, 242, 246, 249, 256, 283, 285, 287, 288, 290, 292, 294, 296, 301, 304, 306, 309, 311, 313, 316, 325, 326, 329, 642, 651, 660, 668, 678, 651, 696, 704, 713, 764, 766, 768, 771, 779, 786, 792, 795, 808, 815, 821, 830, 837, 843, 850, 856, 859, 866, 872, 879, 885, and 1066.

[3924] In some aspects, the VH1 comprises (i) a CDR1 having an amino acid sequence that is at least 65%, at least 70%, at least 75%, at least 80%, at least 85%, at least 90%, at least 95%, at least 99%, or 100% identical to any one of SEQ ID NOs: 5, 12, 18, 26, 34, 44, 51, 61, 68, 75, 82, 89, 96, 102, 108, 115, 122, 133, 141, 148, 155, 162, 175, 182, 189, 195, 202, 208, 215, 222, 229, 235, 318, 629, 645, 654, 663, 671, 682, 690, 699, 707, 716, 773, 781, 788, 797, 803, 810, 817, 823, 832, 839, 845, 852, 861, 868, 874, 881, 1047, 1052, 1057, 1062, and 1067; (ii) a CDR2 having an amino acid sequence that is at least 65%, at least 70%, at least 75%, at least 80%, at least 85%, at least 90%, at least 95%, at least 99%, or 100% identical to any one of SEQ ID NOs: 6, 19, 27, 35, 45, 52, 56, 62, 69, 76, 83, 90, 109, 116, 123, 134, 142, 149, 156, 163, 169, 176, 183, 196, 209, 216, 223, 236, 273, 319, 328, 630, 646, 655, 664, 672, 683, 691, 708, 776, 782, 789, 798, 804, 811, 818, 824, 833, 840, 846, 853, 862, 869, 875, 882, 1048, 1053, 1058, 1063, and 1068; and (iii) a CDR3 having an amino acid sequence that is at least 65%, at least 70%, at least 75%, at least 80%, at least 85%, at least 90%, at least 95%, at least 99%, or 100% identical to any one of SEQ ID NOs: 7, 13, 20, 28, 36, 40, 46, 53, 63, 70, 77, 84, 91, 97, 103, 110, 117, 124, 128, 135, 143, 150, 157, 164, 170, 177, 184, 190, 197, 203, 210, 217, 224, 230, 237, 241, 244, 248, 253, 257, 259, 261, 263, 265, 267, 269, 271, 274, 276, 278, 281, 297, 320, 322, 327, 330, 332, 631, 647, 656, 665, 673, 684, 692, 700, 709, 717, 765, 767, 769, 774, 783, 790, 793, 799, 805, 812, 819, 825, 834, 841, 847, 854, 857, 863, 870, 876, 883, 886, 1049, 1054, 1059, 1064, and 1069.

[3925] In some aspects, the VL1 comprises (i) a complementarity determining region (CDR) 1 having an amino acid sequence that is at least 65%, at least 70%, at least 75%, at least 80%, at least 85%, at least 90%, at least 95%, at least 99%, or 100% identical to any one of SEQ ID NOs: 1, 9, 15, 23, 30, 41, 48, 55, 58, 65, 72, 79, 86, 93, 99, 105, 112, 119, 130, 138, 145, 152, 159, 166, 172, 179, 186, 192, 199, 205, 212, 219, 226, 232, 324, 627, 640, 650, 659, 676, 687, 695, 703, 712, 770, 778, 785, 794, 801, 807, 814, 827, 836, 849, 858, 865, 878, 1045, 1050, 1055, 1060, and 1065; (ii) a CDR2 having an amino acid sequence that is at least 65%, at least 70%, at least 75%, at least 80%, at least 85%, at least 90%, at least 95%, at least 99%, or 100% identical to any one of SEQ ID NOs: 2, 31, 628, 641, 677, 1046, 1051, 1056, and 1061; or at least 65%, at least 70%, at least 75%, at least 80%, at least 85%, at least 90%, at least 95%, at least 99%, or 100% identical to any one of amino acid sequences AAS, GAS, LGS, GTN, GTN, SAS, SDS, DNT, EVT, DAS, DVT, RNS, DVS, EDS, DDS, KDS, VAS, WAS, YTS, EVS, NNN, SYN, and DAT; (iii) a CDR3 having an amino acid sequence that is at least 65%, at least 70%, at least 75%, at least 80%, at least 85%, at least 90%, at least 95%, at least 99%, or 100% identical to any one of SEQ ID NOs: 3, 10, 16, 24, 32, 38, 42, 49, 59, 66, 73, 80, 87, 94, 100, 106, 113, 120, 126, 131, 139, 146, 153, 160, 167, 173, 180, 187, 193, 200, 206, 213, 220, 227, 233, 239, 242, 246, 249, 256, 283, 285, 287, 288, 290, 292, 294, 296, 301, 304, 306, 309, 311, 313, 316, 325, 326, 329, 642, 651, 660, 668, 678, 651, 696, 704, 713, 764, 766, 768, 771, 779, 786, 792, 795, 808, 815, 821, 830, 837, 843, 850, 856, 859, 866, 872, 879, 885, and 1066; and the VH1 comprises (i) a CDR1 having an amino acid sequence that is at least 65%, at least 70%, at least 75%, at least 80%, at least 85%, at least 90%, at least 95%, at least 99%, or 100% identical to any one of SEQ ID NOs: 5, 12, 18, 26, 34, 44, 51, 61, 68, 75, 82, 89, 96, 102, 108, 115, 122, 133, 141, 148, 155, 162, 175, 182, 189, 195, 202, 208, 215, 222, 229, 235, 318, 629, 645, 654, 663, 671, 682, 690, 699, 707, 716, 773, 781, 788, 797, 803, 810, 817, 823, 832, 839, 845, 852, 861, 868, 874, 881, 1047, 1052, 1057, 1062, and 1067; (ii) a CDR2 having an amino acid sequence that is at least 65%, at least 70%, at least 75%, at least 80%, at least 85%, at least 90%, at least 95%, at least 99%, or 100% identical to any one of SEQ ID NOs: 6, 19, 27, 35, 45, 52, 56, 62, 69, 76, 83, 90, 109, 116, 123, 134, 142, 149, 156, 163, 169, 176, 183, 196, 209, 216, 223, 236, 273, 319, 328, 630, 646, 655, 664, 672, 683, 691, 708, 776, 782, 789, 798, 804, 811, 818, 824, 833, 840, 846, 853, 862, 869, 875, 882, 1048, 1053, 1058, 1063, and 1068; and (iii) a CDR3 having an amino acid sequence that is at least 65%, at least 70%, at least 75%, at least 80%, at least 85%, at least 90%, at least 95%, at least 99%, or 100% identical to any one of SEQ ID NOs: 7, 13, 20, 28, 36, 40, 46, 53, 63, 70, 77, 84, 91, 97, 103, 110, 117, 124, 128, 135, 143, 150, 157, 164, 170, 177, 184, 190, 197, 203, 210, 217, 224, 230, 237, 241, 244, 248, 253, 257, 259, 261, 263, 265, 267, 269, 271, 274, 276, 278, 281, 297, 320, 322, 327, 330, 332, 631, 647, 656, 665, 673, 684, 692, 700, 709, 717, 765, 767, 769, 774, 783, 790, 793, 799, 805, 812, 819, 825, 834, 841, 847, 854, 857, 863, 870, 876, 883, 886, 1049, 1054, 1059, 1064, and 1069.

[3926] In some aspects, the VL1 comprises an amino acid sequence that is at least 65%, at least 70%, at least 75%, at least 80%, at least 85%, at least 90%, at least 95%, at least 99%, or 100% identical to any one of SEQ ID NOs: 4, 11, 17, 25, 33, 39, 43, 50, 60, 67, 74, 81, 88, 95, 101, 107, 114, 121, 127, 132, 140, 147, 154, 161, 168, 174, 181, 188, 194, 201, 207, 214, 221, 228, 234, 240, 243, 247, 250, 251, 252, 255, 284, 286, 289, 291, 293, 295, 299, 300, 302, 303, 305, 307, 308, 310, 312, 314, 315, 317, 323, 639, 649, 658, 667, 675, 686, 694, 702, 711, 772, 780, 787, 796, 802, 809, 816, 822, 831, 838, 844, 851, 860, 867, 873, 880, and 988.

[3927] In some aspects, the VH1 comprises an amino acid sequence that is at least 65%, at least 70%, at least 75%, at least 80%, at least 85%, at least 90%, at least 95%, at least 99%, or 100% identical to any one of SEQ ID NOs: 8, 14, 21, 22, 29, 37, 47, 54, 57, 64, 71, 78, 85, 92, 98, 104, 111, 118, 125, 129, 136, 137, 144, 151, 158, 165, 171, 178, 185, 191, 198, 204, 211, 218, 225, 231, 238, 245, 254, 258, 260, 262, 264, 266, 268, 270, 272, 275, 277, 279, 280, 282, 298, 321, 331, 626, 644, 653, 662, 670, 681, 689, 698, 706, 715, 775, 777, 784, 791, 800, 806, 813, 820, 826, 835, 842, 848, 855, 864, 871, 877, and 884.

[3928] In some aspects, (i) the VL1 comprises an amino acid sequence that is at least 65%, at least 70%, at least 75%, at least 80%, at least 85%, at least 90%, at least 95%, at least 99%, or 100% identical to any one of SEQ ID NOs: 4, 11, 17, 25, 33, 39, 43, 50, 60, 67, 74, 81, 88, 95, 101, 107, 114, 121, 127, 132, 140, 147, 154, 161, 168, 174, 181, 188, 194, 201, 207, 214, 221, 228, 234, 240, 243, 247, 250, 251, 252, 255, 284, 286, 289, 291, 293, 295, 299, 300, 302, 303, 305, 307, 308, 310, 312, 314, 315, 317, 323, 639, 649, 658, 667, 675, 686, 694, 702, 711, 772, 780, 787, 796, 802, 809, 816, 822, 831, 838, 844, 851, 860, 867, 873, 880, and 988; and (ii) the VH1 comprises an amino acid sequence that is at least 65%, at least 70%, at least 75%, at least 80%, at least 85%, at least 90%, at least 95%, at least 99%, or 100% identical to any one of SEQ ID NOs: 8, 14, 21, 22, 29, 37, 47, 54, 57, 64, 71, 78, 85, 92, 98, 104, 111, 118, 125, 129, 136, 137, 144, 151, 158, 165, 171, 178, 185, 191, 198, 204, 211, 218, 225, 231, 238, 245, 254, 258, 260, 262, 264, 266, 268, 270, 272, 275, 277, 279, 280, 282, 298, 321, 331, 626, 644, 653, 662, 670, 681, 689, 698, 706, 715, 775, 777, 784, 791, 800, 806, 813, 820, 826, 835, 842, 848, 855, 864, 871, 877, and 884.

[3929] In some aspects, the VL1 comprises (i) a complementarity determining region (CDR) 1 having an amino acid sequence that is at least 65%, at least 70%, at least 75%, at least 80%, at least 85%, at least 90%, at least 95%, at least 99%, or 100% identical to any one of SEQ ID NOs: 1, 9, 15, 23, 30, 65, 72, 145, 152, 324.627, 138, 172, 1045, 1050, 1055, 1060, and 1065; (ii) a CDR2 having an amino acid sequence that is at least 65%, at least 70%, at least 75%, at least 80%, at least 85%, at least 90%, at least 95%, at least 99%, or 100% identical to any one of SEQ ID NOs: 2, 31, 628, 1046, 1051, 1056, and 1061, or at least 65%, at least 70%, at least 75%, at least 80%, at least 85%, at least 90%, at least 95%, at least 99%, or 100% identical to any one of amino acid sequences GAS, LGS, GTN, SAS, SDS, AAS, DAS, and DNT; and (iii) a CDR3 having an amino acid sequence that is at least 65%, at least 70%, at least 75%, at least 80%, at least 85%, at least 90%, at least 95%, at least 99%, or 100% identical to any one of SEQ ID NOs: 3, 10, 16, 24, 32, 38, 66, 73, 146, 153, 325, 326, 764, 766, 139, 856, 173, 792, and 1066.

[3930] In some aspects, the VH1 comprises (i) a CDR1 having an amino acid sequence that is at least 65%, at least 70%, at least 75%, at least 80%, at least 85%, at least 90%, at least 95%, at least 99%, or 100% identical to any one of SEQ ID NOs: 5, 12, 18, 26, 34, 68, 75, 148, 155, 629, 141, 175, 1047, 1052, 1057, 1062, and 1067; (ii) a CDR2 having an amino acid sequence that is at least 65%, at least 70%, at least 75%, at least 80%, at least 85%, at least 90%, at least 95%, at least 99%, or 100% identical to any one of SEQ ID NOs: 6, 19, 27, 35, 69, 76, 149, 156, 630, 142, 176, 1048, 1053, 1058, 1063, and 1068; and (iii) a CDR3 having an amino acid sequence that is at least 65%, at least 70%, at least 75%, at least 80%, at least 85%, at least 90%, at least 95%, at least 99%, or 100% identical to any one of SEQ ID NOs: 7, 13, 20, 28, 36, 40, 70, 77, 327, 150, 157, 332, 631, 765, 767, 143, 857, 177, 793, 1049, 1054, 1059, 1064, and 1069.

[3931] In some aspects, the VL1 comprises (i) a complementarity determining region (CDR) 1 having an amino acid sequence that is at least 65%, at least 70%, at least 75%, at least 80%, at least 85%, at least 90%, at least 95%, at least 99%, or 100% identical to any one of SEQ ID NOs: 1, 9, 15, 23, 30, 65, 72, 145, 152, 324, 627, 138, 172, 1045, 1050, 1055, 1060, and 1065; (ii) a CDR2 having an amino acid sequence that is at least 65%, at least 70%, at least 75%, at least 80%, at least 85%, at least 90%, at least 95%, at least 99%, or 100% identical to any one of SEQ ID NOs: 2, 31, 628, 1046, 1051, 1056, and 1061, or at least 65%, at least 70%, at least 75%, at least 80%, at least 85%, at least 90%, at least 95%, at least 99%, or 100% identical to any one of amino acid sequences GAS, LGS, GTN, SAS, SDS, AAS, DAS, and DNT; (iii) a CDR3 having an amino acid sequence that is at least 65%, at least 70%, at least 75%, at least 80%, at least 85%, at least 90%, at least 95%, at least 99%, or 100% identical to any one of SEQ ID NOs: 3, 10, 16, 24, 32, 38, 66, 73, 146, 153, 325, 326, 764, 766, 139, 856, 173, 792, and 1066; and the VH1 comprises (i) a CDR1 having an amino acid sequence that is at least 65%, at least 70%, at least 75%, at least 80%, at least 85%, at least 90%, at least 95%, at least 99%, or 100% identical to any one of SEQ ID NOs: 5, 12, 18, 26, 34, 68, 75, 148, 155, 629, 141, 175, 1047, 1052, 1057, 1062, and 1067; (ii) a CDR2 having an amino acid sequence that is at least 65%, at least 70%, at least 75%, at least 80%, at least 85%, at least 90%, at least 95%, at least 99%, or 100% identical to any one of SEQ ID NOs: 6, 19, 27, 35, 69, 76, 149, 156, 630, 142, 176, 1048, 1053, 1058, 1063, and 1068; and (iii) a CDR3 having an amino acid sequence that is at least 65%, at least 70%, at least 75%, at least 80%, at least 85%, at least 90%, at least 95%, at least 99%, or 100% identical to any one of SEQ ID NOs: 7, 13, 20, 28, 36, 40, 70, 77, 327, 150, 157, 332, 631, 765, 767, 143, 857, 177, 793, 1049, 1054, 1059, 1064, and 1069.

[3932] In some aspects, the VL1 comprises an amino acid sequence that is at least 65%, at least 70%, at least 75%, at least 80%, at least 85%, at least 90%, at least 95%, at least 99%, or 100% identical to any one of SEQ ID NOs: 4, 11, 17, 25, 33, 39, 67, 74, 147, 154, 140, and 174.

[3933] In some aspects, the VH1 comprises an amino acid sequence that is at least 65%, at least 70%, at least 75%, at least 80%, at least 85%, at least 90%, at least 95%, at least 99%, or 100% identical to any one of SEQ ID NOs: 8, 14, 21, 22, 29, 37, 71, 78, 151, 158, 626, 144, and 178.

[3934] In some aspects, (i) the VL1 comprises an amino acid sequence that is at least 65%, at least 70%, at least 75%, at least 80%, at least 85%, at least 90%, at least 95%, at least 99%, or 100% identical to any one of SEQ ID NOs: 4, 11, 17, 25, 33, 39, 67, 74, 147, 154, 140, and 174; and (ii) the VH1 comprises an amino acid sequence that is at least 65%, at least 70%, at least 75%, at least 80%, at least 85%, at least 90%, at least 95%, at least 99%, or 100% identical to any one of SEQ ID NOs: 8, 14, 21, 22, 29, 37, 71, 78, 151, 158, 626, 144, and 178.

[3935] In some aspects, the VL1 comprises (i) a complementarity determining region (CDR) 1 having an amino acid sequence that is at least 65%, at least 70%, at least 75%, at least 80%, at least 85%, at least 90%, at least 95%, at least 99%, or 100% identical to any one of SEQ ID NOs: 41, 48, 138, 145, 152, 159, 166, 172, 192, 770, 778, 785, 794, 801, 807, 814, 827, 836, 849, 858, 865, 878, 1045, 1050, 1060, and 1065; (ii) a CDR2 having an amino acid sequence at least 65%, at least 70%, at least 75%, at least 80%, at least 85%, at least 90%, at least 95%, at least 99%, or 100% identical to any one of amino acid sequences AAS, GAS, DAS, NNN, SDS, SYN, WAS, and DAT, or at least 65%, at least 70%, at least 75%, at least 80%, at least 85%, at least 90%, at least 95%, at least 99%, or 100% identical to any one of SEQ ID NOs: 1046, 1051, and 1061; and (iii) a CDR3 having an amino acid sequence that is at least 65%, at least 70%, at least 75%, at least 80%, at least 85%, at least 90%, at least 95%, at least 99%, or 100% identical to any one of SEQ ID NOs: 42, 139, 146, 153, 160, 167, 173, 764, 766, 768, 771, 779, 786, 792, 795, 808, 815, 821, 830, 837, 843, 850, 856, 859, 866, 872, 879, 885, and 1066.

[3936] In some aspects, the VH1 comprises (i) a CDR1 having an amino acid sequence that is at least 65%, at least 70%, at least 75%, at least 80%, at least 85%, at least 90%, at least 95%, at least 99%, or 100% identical to any one of SEQ ID NOs: 44, 133, 141, 148, 155, 162, 175, 773, 781, 788, 797, 803, 810, 817, 823, 832, 839, 845, 852, 861, 868, 874, 881, 1047, 1052, 1062, and 1067; (ii) a CDR2 having an amino acid sequence that is at least 65%, at least 70%, at least 75%, at least 80%, at least 85%, at least 90%, at least 95%, at least 99%, or 100% identical to any one of SEQ ID NOs: 6, 142, 149, 156, 163, 169, 176, 776, 782, 789, 798, 804, 811, 818, 824, 833, 840, 846, 853, 862, 869, 875, 882, 1048, 1053, 1063, and 1068; and (iii) a CDR3 having an amino acid sequence that is at least 65%, at least 70%, at least 75%, at least 80%, at least 85%, at least 90%, at least 95%, at least 99%, or 100% identical to any one of SEQ ID NOs: 46, 143, 150, 157, 164, 170, 177, 765, 767, 769, 774, 783, 790, 793, 799, 805, 812, 819, 825, 834, 841, 847, 854, 857, 863, 870, 876, 883, 886, 1049, 1054, 1064, and 1069.

[3937] In some aspects, the VL1 comprises (i) a complementarity determining region (CDR) 1 having an amino acid sequence that is at least 65%, at least 70%, at least 75%, at least 80%, at least 85%, at least 90%, at least 95%, at least 99%, or 100% identical to any one of SEQ ID NOs: 41, 48, 138, 145, 152, 159, 166, 172, 192, 770, 778, 785, 794, 801, 807, 814, 827, 836, 849, 858, 865, 878, 1045, 1050, 1060, and 1065; (ii) a CDR2 having an amino acid sequence that is at least 65%, at least 70%, at least 75%, at least 80%, at least 85%, at least 90%, at least 95%, at least 99%, or 100% identical to any one of amino acid sequences AAS, GAS, DAS, NNN, SDS, SYN, WAS, and DAT, or at least 65%, at least 70%, at least 75%, at least 80%, at least 85%, at least 90%, at least 95%, at least 99%, or 100% identical to any one of SEQ ID NOs: 1046, 1051, and 1061; (iii) a CDR3 having an amino acid sequence that is at least 65%, at least 70%, at least 75%, at least 80%, at least 85%, at least 90%, at least 95%, at least 99%, or 100% identical to any one of SEQ ID NOs: 42, 139, 146, 153, 160, 167, 173, 764, 766, 768, 771, 779, 786, 792, 795, 808, 815, 821, 830, 837, 843, 850, 856, 859, 866, 872, 879, 885, and 1066; and the VH1 comprises (i) a CDR1 having an amino acid sequence that is at least 65%, at least 70%, at least 75%, at least 80%, at least 85%, at least 90%, at least 95%, at least 99%, or 100% identical to any one of SEQ ID NOs: 44, 133, 141, 148, 155, 162, 175, 773, 781, 788, 797, 803, 810, 817, 823, 832, 839, 845, 852, 861, 868, 874, 881, 1047, 1052, 1062, and 1067; (ii) a CDR2 having an amino acid sequence that is at least 65%, at least 70%, at least 75%, at least 80%, at least 85%, at least 90%, at least 95%, at least 99%, or 100% identical to any one of SEQ ID NOs: 6, 142, 149, 156, 163, 169, 176, 776, 782, 789, 798, 804, 811, 818, 824, 833, 840, 846, 853, 862, 869, 875, 882, 1048, 1053, 1063, and 1068; and (iii) a CDR3 having an amino acid sequence that is at least 65%, at least 70%, at least 75%, at least 80%, at least 85%, at least 90%, at least 95%, at least 99%, or 100% identical to any one of SEQ ID NOs: 46, 143, 150, 157, 164, 170, 177, 765, 767, 769, 774, 783, 790, 793, 799, 805, 812, 819, 825, 834, 841, 847, 854, 857, 863, 870, 876, 883, 886, 1049, 1054, 1064, and 1069.

[3938] In some aspects, the VL1 comprises an amino acid sequence that is at least 65%, at least 70%, at least 75%, at least 80%, at least 85%, at least 90%, at least 95%, at least 99%, or 100% identical to any one of SEQ ID NOs: 43, 140, 147, 154, 161, 168, 174, 772, 780, 787, 796, 802, 809, 816, 822, 831, 838, 844, 851, 860, 867, 873, and 880.

[3939] In some aspects, the VH1 comprises an amino acid sequence that is at least 65%, at least 70%, at least 75%, at least 80%, at least 85%, at least 90%, at least 95%, at least 99%, or 100% identical to any one of SEQ ID NOs: 144, 151, 158, 165, 171, 178, 775, 777, 784, 791, 800, 806, 813, 820, 826, 835, 842, 848, 855, 864, 871, 877, and 884.

[3940] In some aspects, (i) the VL1 comprises an amino acid sequence that is at least 65%, at least 70%, at least 75%, at least 80%, at least 85%, at least 90%, at least 95%, at least 99%, or 100% identical to any one of SEQ ID NOs: 43, 140, 147, 154, 161, 168, 174, 772, 780, 787, 796, 802, 809, 816, 822, 831, 838, 844, 851, 860, 867, 873, and 880; and (ii) the VH1 comprises an amino acid sequence that is at least 65%, at least 70%, at least 75%, at least 80%, at least 85%, at least 90%, at least 95%, at least 99%, or 100% identical to any one of SEQ ID NOs: 144, 151, 158, 165, 171, 178, 775, 777, 784, 791, 800, 806, 813, 820, 826, 835, 842, 848, 855, 864, 871, 877, and 884.

[3941] In some aspects, the VL1 comprises (i) a complementarity determining region (CDR) 1 having an amino acid sequence that is at least 65%, at least 70%, at least 75%, at least 80%, at least 85%, at least 90%, at least 95%, at least 99%, or 100% identical to SEQ ID NO: 145 or 1050; (ii) a CDR2 having an amino acid sequence at least 65%, at least 70%, at least 75%, at least 80%, at least 85%, at least 90%, at least 95%, at least 99%, or 100% identical to SEQ ID NO: 1051 or an amino acid sequence that is at least 65%, at least 70%, at least 75%, at least 80%, at least 85%, at least 90%, at least 95%, at least 99%, or 100% identical to amino acid sequence AAS; and (iii) a CDR3 having an amino acid sequence that is at least 65%, at least 70%, at least 75%, at least 80%, at least 85%, at least 90%, at least 95%, at least 99%, or 100% identical to SEQ ID NO: 146 or 764.

[3942] In some aspects, the VH1 comprises (i) a complementarity determining region (CDR) 1 having an amino acid sequence that is at least 65%, at least 70%, at least 75%, at least 80%, at least 85%, at least 90%, at least 95%, at least 99%, or 100% identical to SEQ ID NO: 148 or 1052; (ii) a CDR2 having an amino acid sequence that is at least 65%, at least 70%, at least 75%, at least 80%, at least 85%, at least 90%, at least 95%, at least 99%, or 100% identical to SEQ ID NO: 149 or 1053; and (iii) a CDR3 having an amino acid sequence that is at least 65%, at least 70%, at least 75%, at least 80%, at least 85%, at least 90%, at least 95%, at least 99%, or 100% identical to SEQ ID NO: 150, 765, or 1054.

[3943] In some aspects, the VL1 comprises (i) a complementarity determining region (CDR) 1 having an amino acid sequence that is at least 65%, at least 70%, at least 75%, at least 80%, at least 85%, at least 90%, at least 95%, at least 99%, or 100% identical to SEQ ID NO: 145 or 1050; (ii) a CDR2 having an amino acid sequence at least 65%, at least 70%, at least 75%, at least 80%, at least 85%, at least 90%, at least 95%, at least 99%, or 100% identical to SEQ ID NO: 1051 or an amino acid sequence that is at least 65%, at least 70%, at least 75%, at least 80%, at least 85%, at least 90%, at least 95%, at least 99%, or 100% identical to amino acid sequence AAS; and (iii) a CDR3 having an amino acid sequence that is at least 65%, at least 70%, at least 75%, at least 80%, at least 85%, at least 90%, at least 95%, at least 99%, or 100% identical to SEQ ID NO: 146 or 764; and the VH1 comprises (iv) a complementarity determining region (CDR) 1 having an amino acid sequence that is at least 65%, at least 70%, at least 75%, at least 80%, at least 85%, at least 90%, at least 95%, at least 99%, or 100% identical to SEQ ID NO: 148 or 1052; (v) a CDR2 having an amino acid sequence that is at least 65%, at least 70%, at least 75%, at least 80%, at least 85%, at least 90%, at least 95%, at least 99%, or 100% identical to SEQ ID NO: 149 or 1053; and (vi) a CDR3 having an amino acid sequence that is at least 65%, at least 70%, at least 75%, at least 80%, at least 85%, at least 90%, at least 95%, at least 99%, or 100% identical to SEQ ID NO: 150, 765, or 1054.

[3944] In some aspects, the VL1 comprises an amino acid sequence that is at least 65%, at least 70%, at least 75%, at least 80%, at least 85%, at least 90%, at least 95%, at least 99%, or 100% identical to SEQ ID NO: 147.

[3945] In some aspects, the VH1 comprises an amino acid sequence that is at least 65%, at least 70%, at least 75%, at least 80%, at least 85%, at least 90%, at least 95%, at least 99%, or 100% identical to SEQ ID NO: 151.

[3946] In some aspects, (i) the VL1 comprises an amino acid sequence that is at least 65%, at least 70%, at least 75%, at least 80%, at least 85%, at least 90%, at least 95%, at least 99%, or 100% identical to SEQ ID NO: 147, and (ii) the VH1 comprises an amino acid sequence that is at least 65%, at least 70%, at least 75%, at least 80%, at least 85%, at least 90%, at least 95%, at least 99%, or 100% identical to SEQ ID NO: 151.

[3947] In some aspects, the antigen binding polypeptides comprised in the antibodies or antigen binding fragments thereof (e.g., monospecific or multispecific antibodies or antigen binding fragments thereof) provided herein further comprise an Fc region. In some aspects, the antigen binding polypeptides comprised in the antibodies or antigen binding fragments thereof (e.g., monospecific or multispecific antibodies or antigen binding fragments thereof) provided herein further comprise an Fc region at the carboxy-terminus. In some aspects, the Fc region comprises an immunoglobulin heavy chain constant region 2 (CH2) and/or an immunoglobulin heavy chain constant region 3 (CH3). In some aspects, the Fc region further comprises an immunoglobulin hinge (i.e., a hinge region). In some aspects, the hinge region is interposed between a CH1 and a CH2 (i.e., a hinge region is localized between the carboxy terminal residue of a CH1 and the N-terminal residue of a CH2). In some aspects, the hinge region comprises an amino acid sequence at least 65%, at least 70%, at least 75%, at least 80%, at least 85%, at least 90%, at least 95%, at least 99%, or 100% identical to any one of SEQ ID NOs: 635, 636, 1072, 1073, or 1074. In some aspects, the Fc region comprises a CH2 and a CH3. In some aspects, the CH2 comprises an amino acid sequence that is at least 65%, at least 70%, at least 75%, at least 80%, at least 85%, at least 90%, at least 95%, at least 99%, or 100% identical to any one of SEQ ID NOs: 1075-1078. In some aspects, the CH3 comprises an amino acid sequence that is at least 65%, at least 70%, at least 75%, at least 80%, at least 85%, at least 90%, at least 95%, at least 99%, or 100% identical to any one of SEQ ID NOs: 1079-1085. In some aspects, the Fc region comprises an amino acid sequence that is at least 80%, at least 65%, at least 70%, at least 75%, at least 80%, at least 85%, at least 90%, at least 95%, at least 99%, or 100% identical to any one of SEQ ID NOs: 376-380.

[3948] In some aspects, the Fc region comprises one or more amino acid substitutions. In some aspects, the one or more amino acid substitutions comprise one or more half-life extension amino acid substitutions. In some aspects, the one or more half-life extension amino acid substitutions comprise one or more of amino acid substitutions M428L, N434A, N434S, L234F, L235E, P331S, M252Y, S254T, or T256E, or equivalent thereof, based on the EU numbering scheme. In some aspects, the one or more half-life extension amino acid substitutions comprise a LA (M428L and N434A, or equivalent thereof, based on the EU numbering scheme) amino acid substitution. In some aspects, the one or more half-life extension amino acid substitutions comprise a LS (M428L and N434S, or equivalent thereof, based on the EU numbering scheme) amino acid substitution. In some aspects, the one or more half-life extension amino acid substitutions comprise L234F and L235E, or equivalent thereof (based on the EU numbering scheme) amino acid substitutions. In some aspects, the one or more half-life extension amino acid substitutions comprise a TM (L234F, L235E, and P331S, or equivalent thereof, based on the EU numbering scheme) amino acid substitution. In some aspects, the one or more half-life extension amino acid substitutions comprise a YTE (M252Y, S254T, and T256E, or equivalent thereof, based on the EU numbering scheme) amino acid substitution.

[3949] In some aspects, the Fc region comprises at least one knob-into-hole modification. In some aspects, the antigen binding polypeptides are IgG1 or IgG4 antibodies or antigen binding fragments thereof. In some aspects, the knob-into-hole modification comprises one or more of knob substitutions of S354C and T366W, or equivalent thereof, and/or one or more of hole substitutions of Y349C, T366S, L368A, Y407V, or equivalent thereof, or a combination thereof, based on the EU numbering scheme. In some aspects, the Fc region comprises a knob-into-hole modification comprising knob substitutions of S354C and T366W, or equivalent thereof, and/or hole substitutions of Y349C, T366S, L368A and Y407V, or equivalent thereof, and/or a half-life extension amino acid substitution comprising: a LA (M428L and N434A, or equivalent thereof, based on the EU numbering scheme) amino acid substitution, a LS (M428L and N434S, or equivalent thereof, based on the EU numbering scheme) amino acid substitution. L234F and L235E, or equivalent thereof (based on the EU numbering scheme) amino acid substitutions, a TM (L234F, L235E, and P331S, or equivalent thereof, based on the EU numbering scheme) amino acid substitution, a YTE (M252Y, S254T, and T256E, or equivalent thereof, based on the EU numbering scheme) amino acid substitution, or any combination thereof.

[3950] In some aspects, the Fc region comprises knob substitutions of S354C and T366W, or equivalent thereof, and a half-life extension amino acid substitution comprising: a LA (M428L and N434A, or equivalent thereof, based on the EU numbering scheme) amino acid substitution, a LS (M428L and N434S, or equivalent thereof, based on the EU numbering scheme) amino acid substitution, L234F and L235E, or equivalent thereof (based on the EU numbering scheme) amino acid substitutions, a TM (L234F, L235E, and P331S, or equivalent thereof, based on the EU numbering scheme) amino acid substitution, a YTE (M252Y, S254T, and T256E, or equivalent thereof, based on the EU numbering scheme) amino acid substitution, or any combination thereof.

[3951] In some aspects, the Fc region comprises hole substitutions of Y349C, T366S, L368A and Y407V, or equivalent thereof, and a half-life extension amino acid substitution comprising: a LA (M428L and N434A, or equivalent thereof, based on the EU numbering scheme) amino acid substitution, a LS (M428L and N434S, or equivalent thereof, based on the EU numbering scheme) amino acid substitution. L234F and L235E, or equivalent thereof (based on the EU numbering scheme) amino acid substitutions, a TM (L234F, L235E, and P331S, or equivalent thereof, based on the EU numbering scheme) amino acid substitution, a YTE (M252Y, S254T, and T256E, or equivalent thereof, based on the EU numbering scheme) amino acid substitution, or any combination thereof.

[3952] In some aspects, the antigen binding polypeptides comprised in the antibodies or antigen binding fragments thereof (e.g., monospecific or multispecific antibodies or antigen binding fragments thereof) disclosed herein comprise one or more Fc effector function knockout mutation. In some aspects, the antigen binding polypeptides comprised in the antibodies or antigen binding fragments thereof (e.g., monospecific or multispecific antibodies or antigen binding fragments thereof) disclosed herein are IgG1 or IgG4 antibodies or antigen binding fragments thereof. In some aspects, the Fc effector function knockout mutation is L234A, L235A, P239A, or equivalent thereof, or a combination thereof, based on the EU numbering scheme.

[3953] In some aspects, the antigen binding polypeptides comprised in the antibodies or antigen binding fragments thereof (e.g., monospecific or multispecific antibodies or antigen binding fragments thereof) disclosed herein comprise a mutation at a glycosylation site. In some aspects, the mutation at a glycosylation site is a mutation at an N-glycosylation site. In some aspects, the antigen binding polypeptides comprised in the antibodies or antigen binding fragments thereof (e.g., monospecific or multispecific antibodies or antigen binding fragments thereof) disclosed herein comprise a VH comprising a mutation at a glycosylation site. In some aspects, the mutation at a glycosylation site is a mutation at an N-glycosylation site. In some aspects, the mutation at an N-glycosylation site is at amino acid N62 of the VH region or equivalent thereof. In some aspects, the mutation at an N-glycosylation site at amino acid N62 is N62Q or N62S, or equivalent thereof.

[3954] In some aspects, the antigen binding polypeptides comprised in the antibodies or antigen binding fragments thereof (e.g., monospecific or multispecific antibodies or antigen binding fragments thereof) disclosed herein, comprise one or more optional linkers. The one or more optional linkers are indicated herein as Ln, wherein n is an integer, and the integer next to each L indicates each L comprised in the antigen binding polypeptides comprised in the antigen binding polypeptide complexes disclosed herein. For example, if an antigen binding polypeptide comprised in the antigen binding polypeptide complexes disclosed herein comprises two linkers, the first linker from N-terminus to C-terminus is herein indicated as L1, and the second linker from N-terminus to C-terminus is herein indicated as L2. If an antigen binding polypeptide complex disclosed herein comprises a first antigen binding polypeptide comprising two linkers, indicated herein as L1 and L2, as explained above, the linkers comprised in the second antigen binding polypeptide are indicated with the following integer, in this example, the first linker from N-terminus to C-terminus of the second antigen binding polypeptide is herein indicated as L3, the second linker from N-terminus to C-terminus of the second antigen binding polypeptide is herein indicated as L3. In some aspects, any one of the optional linkers each independently have a length of from 0 amino acids to about 50 amino acids. In some aspects, any one of the optional linkers each independently have a length of from 5 amino acids to about 40 amino acids.

[3955] In some aspects, any one of the optional linkers are non-immunogenic. In some aspects, any one of the optional linkers do not contain a consensus T cell epitope.

[3956] In some aspects, any of Ln comprises an amino acid sequence of G or A, or an amino acid sequence at least 65%, at least 70%, at least 75%, at least 80%, at least 85%, at least 90%, at least 95%, at least 99%, or 100% identical to amino acid sequence GSS or ASG, or an amino acid sequence at least 65%, at least 70%, at least 75%, at least 80%, at least 85%, at least 90%, at least 95%, at least 99%, or 100% identical to any one of SEQ ID NOs: 333-373 or 967-971. In some aspects, Ln comprises an amino acid sequence at least 65%, at least 70%, at least 75%, at least 80%, at least 85%, at least 90%, at least 95%, at least 99%, or 100% identical to any one of SEQ ID NOs: 333-345 or 967-971.

[3957] In some aspects, the antigen binding polypeptide is selected from any one of the more specific aspects provided herein for an antigen binding polypeptide in an antigen binding polypeptide complex having no more than three polypeptide chains.

[3958] In some aspects, the antigen binding polypeptide further comprises one or more immunoglobulin heavy chain constant region 1 (CH1) and/or one or more immunoglobulin light chain constant region (CL) between any one of the variable regions and/or optional amino acid linkers (e.g., between VL1 and L1, between L1 and VH1, between VH1 and L2, between L2 and VL1, between L1 and VL2, between VL2 and L2, between L2 and VH2, between VH2 and L3, between L3 and VH1, between VL1 and L1, between L1 and VH2, between VH2 and L2, between. L2 and VL2, between VL2 and L3, between L3 and VH1, between VH1 and L4, between L4 and VH2, between VH2 and L5, between L5 and VL2, between VL2 and L6, between L6 and VL1, between VH1 and L4, between L4 and VL2, between L4 and VL2, between VL2 and L5, between L5 and VH2, between VH2 and L6, or between L6 and VL1).

[3959] In some aspects, the antigen binding polypeptide is selected from any one of the more specific aspects provided herein for an antigen binding polypeptide in an antigen binding polypeptide complex having no more than three polypeptide chains, and further comprises one or more immunoglobulin heavy chain constant region 1 (CH1) and/or one or more immunoglobulin light chain constant region (CL) between any one of the variable regions and/or optional amino acid linkers (e.g., between VL1 and L1, between L1 and VH1, between VH1 and L2, between L2 and VL1, between L1 and VL2, between VL2 and L2, between L2 and VH2, between VH2 and L3, between L3 and VH1, between VL1 and L1, between L1 and VH2, between VH2 and L2, between. L2 and VL2, between VL2 and L3, between L3 and VH1, between VH1 and L4, between L4 and VH2, between VH2 and L5, between L5 and VL2, between VL2 and L6, between L6 and VL1, between VH1 and L4, between L4 and VL2, between L4 and VL2, between VL2 and L5, between L5 and VH2, between VH2 and L6, or between L6 and VL1).

[3960] In some aspects, the antigen binding polypeptides comprised in the antibodies or antigen binding fragments thereof (e.g., monospecific or multispecific antibodies or antigen binding fragments thereof) disclosed herein, comprise one or more CL, as indicated in the formulas representing the antigen binding polypeptide complexes disclosed herein. In some aspects, the CL comprises an amino acid sequence at least 65%, at least 70%, at least 75%, at least 80%, at least 85%, at least 90%, at least 95%, at least 99%, or 100% identical to any one of SEQ ID NOs: 374, 637, or 1092-1095.

[3961] In some aspects, the antigen binding polypeptides comprised in the antibodies or antigen binding fragments thereof (e.g., monospecific or multispecific antibodies or antigen binding fragments thereof) disclosed herein, comprise one or more CH1, as indicated in the formulas representing the antigen binding polypeptide complexes disclosed herein. In some aspects, the CH1 comprises an amino acid sequence at least 65%, at least 70%, at least 75%, at least 80%, at least 85%, at least 90%, at least 95%, at least 99%, or 100% identical to any one of SEQ ID NOs: 375, 634, 1070, 1071, or 1086-1091.

[3962] In some aspects, the antigen binding polypeptides comprised in the antibodies or antigen binding fragments thereof (e.g., monospecific or multispecific antibodies or antigen binding fragments thereof) provided herein further comprise an Fc region. In some aspects, the antigen binding polypeptides comprised in the antibodies or antigen binding fragments thereof (e.g., monospecific or multispecific antibodies or antigen binding fragments thereof) provided herein further comprise an Fc region at the carboxy-terminus. In some aspects, the Fc region comprises an immunoglobulin heavy chain constant region 2 (CH2) and/or an immunoglobulin heavy chain constant region 3 (CH3). In some aspects, the Fc region further comprises an immunoglobulin hinge (i.e., a hinge region). In some aspects, the hinge region is interposed between a CH1 and a CH2 (i.e., a hinge region is localized between the carboxy terminal residue of a CH1 and the N-terminal residue of a CH2). In some aspects, the hinge region comprises an amino acid sequence at least 65%, at least 70%, at least 75%, at least 80%, at least 85%, at least 90%, at least 95%, at least 99%, or 100% identical to any one of SEQ ID NOs: 635, 636, 1072, 1073, or 1074. In some aspects, the Fc region comprises a CH2 and a CH3. In some aspects, the CH2 comprises an amino acid sequence that is at least 65%, at least 70%, at least 75%, at least 80%, at least 85%, at least 90%, at least 95%, at least 99%, or 100% identical to any one of SEQ ID NOs: 1075-1078. In some aspects, the CH3 comprises an amino acid sequence that is at least 65%, at least 70%, at least 75%, at least 80%, at least 85%, at least 90%, at least 95%, at least 99%, or 100% identical to any one of SEQ ID NOs: 1079-1085. In some aspects, the Fc region comprises an amino acid sequence that is at least 65%, at least 70%, at least 75%, at least 80%, at least 85%, at least 90%, at least 95%, at least 99%, or 100% identical to any one of SEQ ID NOs: 376-380.

[3963] In some aspects, any of the antigen binding polypeptides, antigen binding polypeptide complexes, or antibodies or antigen binding fragments thereof disclosed herein specifically binds to a sarbecovirus antigen. In some aspects, any of the antigen binding polypeptides, antigen binding polypeptide complexes, or antibodies or antigen binding fragments thereof disclosed herein specifically binds to a sarbecovirus protein. In some aspects, the sarbecovirus is a SARS-CoV-2 virus, a SARS-CoV-1 virus, a bat virus, or a pangolin virus. In some aspects, the sarbecovirus is a clade 1a sarbecovirus. In some aspects, the sarbecovirus is a clade 1b sarbecovirus. In some aspects, the sarbecovirus is a clade 2 sarbecovirus. In some aspects, the sarbecovirus is a clade 3 sarbecovirus. In some aspects, the sarbecovirus is a pangolin sarbecovirus (e.g., a Pangolin-GD virus, a Pangolin_GX-P5L virus, or a Pangolin_GX-P2V virus). In some aspects, the sarbecovirus is a bat sarbecovirus (e.g., a RaTG13-d21aa virus, a SHC014 virus, or a WIV1 virus). In some aspects, the sarbecovirus is Bat Cov W1V1, Bat Cov LYRall, Bat Cov Rs4231, or Bat Cov RSSHC014. In some aspects, the sarbecovirus is a SARS-CoV-1 sarbecovirus. In some aspects, the sarbecovirus is a SARS-CoV-2 sarbecovirus. In some aspects, the SARS-CoV-2 virus is the original Wuhan strain (WA1), a D614G spike protein mutant (e.g., D614G), an Alpha variant (e.g., B.1.1.7), a Beta variant (e.g., B.1.351), a Gamma variant (e.g., P.1), a Delta variant (e.g., B.1.617.2 or AY.1), a Kappa variant (e.g., B.1.617.1), an Iota variant (e.g., B.1.526), a Lambda variant (e.g., C.37), an Epsilon variant (e.g., B.1.429, B.1.427, or CAL.20C), a Mu variant (e.g., B.1.621), a Theta variant (e.g., P.3), a Zeta variant (e.g., P.2), an Eta variant (e.g., B.1.525), a R.1 variant, a C.1.2 variant, or an Omicron variant (e.g., B.1.1.529, BA.1, BA.2, BA.2.12.1, BA.4, BA.4/5, BA.5, BQ.1, BQ.1.1, BA.2.75, BA.2.75.2, BA.4.6, BQ.1.1, BJ.1, XBB, XBB1.5, BF.7, CH.1.1, BA.2.86, EG.5, JN.1, JD.1, EG.5.1, FL.1.5.1, HK.3, HV.1, JD.1.1, JF.1, XBB.1, XBB.1.16, XBB.1.16.6, or XBB.2.3.2), or a combination or variant thereof. In some aspects, the SARS-CoV-2 virus is JN.1.13.1, KP.2, JN.1.16, JN.1.16.1, JN.1.13, JN.1.18, KP.2.3, LB.1, KP.3, KP.3.1.1, or a combination or variant thereof.

[3964] In some aspects, any of the antigen binding polypeptides, antigen binding polypeptide complexes, or antibodies or antigen binding fragments thereof disclosed herein comprises:
[3965] a VL at least 65%, at least 70%, at least 75%, at least 80%, at least 85%, at least 90%, at least 95%, at least 99%, or 100% identical to SEQ ID NO: 4 and a VH at least 65%, at least 70%, at least 75%, at least 80%, at least 85%, at least 90%, at least 95%, at least 99%, or 100% identical to SEQ ID NO: 8;
[3966] a VL at least 65%, at least 70%, at least 75%, at least 80%, at least 85%, at least 90%, at least 95%, at least 99%, or 100% identical to SEQ ID NO: 11 and a VH at least 65%, at least 70%, at least 75%, at least 80%, at least 85%, at least 90%, at least 95%, at least 99%, or 100% identical to SEQ ID NO: 14;
[3967] a VL at least 65%, at least 70%, at least 75%, at least 80%, at least 85%, at least 90%, at least 95%, at least 99%, or 100% identical to SEQ ID NO: 17 and a VH at least 65%, at least 70%, at least 75%, at least 80%, at least 85%, at least 90%, at least 95%, at least 99%, or 100% identical to SEQ ID NO: 21;
[3968] a VL at least 65%, at least 70%, at least 75%, at least 80%, at least 85%, at least 90%, at least 95%, at least 99%, or 100% identical to SEQ ID NO: 17 and a VH at least 65%, at least 70%, at least 75%, at least 80%, at least 85%, at least 90%, at least 95%, at least 99%, or 100% identical to SEQ ID NO: 22;
[3969] a VL at least 65%, at least 70%, at least 75%, at least 80%, at least 85%, at least 90%, at least 95%, at least 99%, or 100% identical to SEQ ID NO: 25 and a VH at least 65%, at least 70%, at least 75%, at least 80%, at least 85%, at least 90%, at least 95%, at least 99%, or 100% identical to SEQ ID NO: 29;
[3970] a VL at least 65%, at least 70%, at least 75%, at least 80%, at least 85%, at least 90%, at least 95%, at least 99%, or 100% identical to SEQ ID NO: 33 and a VH at least 65%, at least 70%, at least 75%, at least 80%, at least 85%, at least 90%, at least 95%, at least 99%, or 100% identical to SEQ ID NO: 37;
[3971] a VL at least 65%, at least 70%, at least 75%, at least 80%, at least 85%, at least 90%, at least 95%, at least 99%, or 100% identical to SEQ ID NO: 39 and a VH at least 65%, at least 70%, at least 75%, at least 80%, at least 85%, at least 90%, at least 95%, at least 99%, or 100% identical to SEQ ID NO: 37;
[3972] a VL at least 65%, at least 70%, at least 75%, at least 80%, at least 85%, at least 90%, at least 95%, at least 99%, or 100% identical to SEQ ID NO: 43 and a VH at least 65%, at least 70%, at least 75%, at least 80%, at least 85%, at least 90%, at least 95%, at least 99%, or 100% identical to SEQ ID NO: 47;
[3973] a VL at least 65%, at least 70%, at least 75%, at least 80%, at least 85%, at least 90%, at least 95%, at least 99%, or 100% identical to SEQ ID NO: 988 and a VH at least 65%, at least 70%, at least 75%, at least 80%, at least 85%, at least 90%, at least 95%, at least 99%, or 100% identical to SEQ ID NO: 57;
[3974] a VL at least 65%, at least 70%, at least 75%, at least 80%, at least 85%, at least 90%, at least 95%, at least 99%, or 100% identical to SEQ ID NO: 50 and a VH at least 65%, at least 70%, at least 75%, at least 80%, at least 85%, at least 90%, at least 95%, at least 99%, or 100% identical to SEQ ID NO: 54;
[3975] a VL at least 65%, at least 70%, at least 75%, at least 80%, at least 85%, at least 90%, at least 95%, at least 99%, or 100% identical to SEQ ID NO: 60 and a VH at least 65%, at least 70%, at least 75%, at least 80%, at least 85%, at least 90%, at least 95%, at least 99%, or 100% identical to SEQ ID NO: 64;
[3976] a VL at least 65%, at least 70%, at least 75%, at least 80%, at least 85%, at least 90%, at least 95%, at least 99%, or 100% identical to SEQ ID NO: 67 and a VH at least 65%, at least 70%, at least 75%, at least 80%, at least 85%, at least 90%, at least 95%, at least 99%, or 100% identical to SEQ ID NO: 71;
[3977] a VL at least 65%, at least 70%, at least 75%, at least 80%, at least 85%, at least 90%, at least 95%, at least 99%, or 100% identical to SEQ ID NO: 67 and a VH at least 65%, at least 70%, at least 75%, at least 80%, at least 85%, at least 90%, at least 95%, at least 99%, or 100% identical to SEQ ID NO: 626;
[3978] a VL at least 65%, at least 70%, at least 75%, at least 80%, at least 85%, at least 90%, at least 95%, at least 99%, or 100% identical to SEQ ID NO: 74 and a VH at least 65%, at least 70%, at least 75%, at least 80%, at least 85%, at least 90%, at least 95%, at least 99%, or 100% identical to SEQ ID NO: 78;
[3979] a VL at least 65%, at least 70%, at least 75%, at least 80%, at least 85%, at least 90%, at least 95%, at least 99%, or 100% identical to SEQ ID NO: 81 and a VH at least 65%, at least 70%, at least 75%, at least 80%, at least 85%, at least 90%, at least 95%, at least 99%, or 100% identical to SEQ ID NO: 85;
[3980] a VL at least 65%, at least 70%, at least 75%, at least 80%, at least 85%, at least 90%, at least 95%, at least 99%, or 100% identical to SEQ ID NO: 88 and a VH at least 65%, at least 70%, at least 75%, at least 80%, at least 85%, at least 90%, at least 95%, at least 99%, or 100% identical to SEQ ID NO: 92;
[3981] a VL at least 65%, at least 70%, at least 75%, at least 80%, at least 85%, at least 90%, at least 95%, at least 99%, or 100% identical to SEQ ID NO: 95 and a VH at least 65%, at least 70%, at least 75%, at least 80%, at least 85%, at least 90%, at least 95%, at least 99%, or 100% identical to SEQ ID NO: 98;
[3982] a VL at least 65%, at least 70%, at least 75%, at least 80%, at least 85%, at least 90%, at least 95%, at least 99%, or 100% identical to SEQ ID NO: 101 and a VH at least 65%, at least 70%, at least 75%, at least 80%, at least 85%, at least 90%, at least 95%, at least 99%, or 100% identical to SEQ ID NO: 104;
[3983] a VL at least 65%, at least 70%, at least 75%, at least 80%, at least 85%, at least 90%, at least 95%, at least 99%, or 100% identical to SEQ ID NO: 107 and a VH at least 65%, at least 70%, at least 75%, at least 80%, at least 85%, at least 90%, at least 95%, at least 99%, or 100% identical to SEQ ID NO: 111;
[3984] a VL at least 65%, at least 70%, at least 75%, at least 80%, at least 85%, at least 90%, at least 95%, at least 99%, or 100% identical to SEQ ID NO: 114 and a VH at least 65%, at least 70%, at least 75%, at least 80%, at least 85%, at least 90%, at least 95%, at least 99%, or 100% identical to SEQ ID NO: 118;
[3985] a VL at least 65%, at least 70%, at least 75%, at least 80%, at least 85%, at least 90%, at least 95%, at least 99%, or 100% identical to SEQ ID NO: 121 and a VH at least 65%, at least 70%, at least 75%, at least 80%, at least 85%, at least 90%, at least 95%, at least 99%, or 100% identical to SEQ ID NO: 125;
[3986] a VL at least 65%, at least 70%, at least 75%, at least 80%, at least 85%, at least 90%, at least 95%, at least 99%, or 100% identical to SEQ ID NO: 127 and a VH at least 65%, at least 70%, at least 75%, at least 80%, at least 85%, at least 90%, at least 95%, at least 99%, or 100% identical to SEQ ID NO: 137;
[3987] a VL at least 65%, at least 70%, at least 75%, at least 80%, at least 85%, at least 90%, at least 95%, at least 99%, or 100% identical to SEQ ID NO: 127 and a VH at least 65%, at least 70%, at least 75%, at least 80%, at least 85%, at least 90%, at least 95%, at least 99%, or 100% identical to SEQ ID NO: 129;
[3988] a VL at least 65%, at least 70%, at least 75%, at least 80%, at least 85%, at least 90%, at least 95%, at least 99%, or 100% identical to SEQ ID NO: 132 and a VH at least 65%, at least 70%, at least 75%, at least 80%, at least 85%, at least 90%, at least 95%, at least 99%, or 100% identical to SEQ ID NO: 136;
[3989] a VL at least 65%, at least 70%, at least 75%, at least 80%, at least 85%, at least 90%, at least 95%, at least 99%, or 100% identical to SEQ ID NO: 140 and a VH at least 65%, at least 70%, at least 75%, at least 80%, at least 85%, at least 90%, at least 95%, at least 99%, or 100% identical to SEQ ID NO: 144;
[3990] a VL at least 65%, at least 70%, at least 75%, at least 80%, at least 85%, at least 90%, at least 95%, at least 99%, or 100% identical to SEQ ID NO: 147 and a VH at least 65%, at least 70%, at least 75%, at least 80%, at least 85%, at least 90%, at least 95%, at least 99%, or 100% identical to SEQ ID NO: 151;
[3991] a VL at least 65%, at least 70%, at least 75%, at least 80%, at least 85%, at least 90%, at least 95%, at least 99%, or 100% identical to SEQ ID NO: 154 and a VH at least 65%, at least 70%, at least 75%, at least 80%, at least 85%, at least 90%, at least 95%, at least 99%, or 100% identical to SEQ ID NO: 158;
[3992] a VL at least 65%, at least 70%, at least 75%, at least 80%, at least 85%, at least 90%, at least 95%, at least 99%, or 100% identical to SEQ ID NO: 161 and a VH at least 65%, at least 70%, at least 75%, at least 80%, at least 85%, at least 90%, at least 95%, at least 99%, or 100% identical to SEQ ID NO: 165;
[3993] a VL at least 65%, at least 70%, at least 75%, at least 80%, at least 85%, at least 90%, at least 95%, at least 99%, or 100% identical to SEQ ID NO: 168 and a VH at least 65%, at least 70%, at least 75%, at least 80%, at least 85%, at least 90%, at least 95%, at least 99%, or 100% identical to SEQ ID NO: 171;
[3994] a VL at least 65%, at least 70%, at least 75%, at least 80%, at least 85%, at least 90%, at least 95%, at least 99%, or 100% identical to SEQ ID NO: 174 and a VH at least 65%, at least 70%, at least 75%, at least 80%, at least 85%, at least 90%, at least 95%, at least 99%, or 100% identical to SEQ ID NO: 178;
[3995] a VL at least 65%, at least 70%, at least 75%, at least 80%, at least 85%, at least 90%, at least 95%, at least 99%, or 100% identical to SEQ ID NO: 181 and a VH at least 65%, at least 70%, at least 75%, at least 80%, at least 85%, at least 90%, at least 95%, at least 99%, or 100% identical to SEQ ID NO: 185;
[3996] a VL at least 65%, at least 70%, at least 75%, at least 80%, at least 85%, at least 90%, at least 95%, at least 99%, or 100% identical to SEQ ID NO: 188 and a VH at least 65%, at least 70%, at least 75%, at least 80%, at least 85%, at least 90%, at least 95%, at least 99%, or 100% identical to SEQ ID NO: 191;
[3997] a VL at least 65%, at least 70%, at least 75%, at least 80%, at least 85%, at least 90%, at least 95%, at least 99%, or 100% identical to SEQ ID NO: 194 and a VH at least 65%, at least 70%, at least 75%, at least 80%, at least 85%, at least 90%, at least 95%, at least 99%, or 100% identical to SEQ ID NO: 198;
[3998] a VL at least 65%, at least 70%, at least 75%, at least 80%, at least 85%, at least 90%, at least 95%, at least 99%, or 100% identical to SEQ ID NO: 201 and a VH at least 65%, at least 70%, at least 75%, at least 80%, at least 85%, at least 90%, at least 95%, at least 99%, or 100% identical to SEQ ID NO: 204;
[3999] a VL at least 65%, at least 70%, at least 75%, at least 80%, at least 85%, at least 90%, at least 95%, at least 99%, or 100% identical to SEQ ID NO: 207 and a VH at least 65%, at least 70%, at least 75%, at least 80%, at least 85%, at least 90%, at least 95%, at least 99%, or 100% identical to SEQ ID NO: 211;
[4000] a VL at least 65%, at least 70%, at least 75%, at least 80%, at least 85%, at least 90%, at least 95%, at least 99%, or 100% identical to SEQ ID NO: 214 and a VH at least 65%, at least 70%, at least 75%, at least 80%, at least 85%, at least 90%, at least 95%, at least 99%, or 100% identical to SEQ ID NO: 218;
[4001] a VL at least 65%, at least 70%, at least 75%, at least 80%, at least 85%, at least 90%, at least 95%, at least 99%, or 100% identical to SEQ ID NO: 221 and a VH at least 65%, at least 70%, at least 75%, at least 80%, at least 85%, at least 90%, at least 95%, at least 99%, or 100% identical to SEQ ID NO: 225;
[4002] a VL at least 65%, at least 70%, at least 75%, at least 80%, at least 85%, at least 90%, at least 95%, at least 99%, or 100% identical to SEQ ID NO: 228 and a VH at least 65%, at least 70%, at least 75%, at least 80%, at least 85%, at least 90%, at least 95%, at least 99%, or 100% identical to SEQ ID NO: 231;
[4003] a VL at least 65%, at least 70%, at least 75%, at least 80%, at least 85%, at least 90%, at least 95%, at least 99%, or 100% identical to SEQ ID NO: 234 and a VH at least 65%, at least 70%, at least 75%, at least 80%, at least 85%, at least 90%, at least 95%, at least 99%, or 100% identical to SEQ ID NO: 238;
[4004] a VL at least 65%, at least 70%, at least 75%, at least 80%, at least 85%, at least 90%, at least 95%, at least 99%, or 100% identical to SEQ ID NO: 240 and a VH at least 65%, at least 70%, at least 75%, at least 80%, at least 85%, at least 90%, at least 95%, at least 99%, or 100% identical to SEQ ID NO: 37;
[4005] a VL at least 65%, at least 70%, at least 75%, at least 80%, at least 85%, at least 90%, at least 95%, at least 99%, or 100% identical to SEQ ID NO: 243 and a VH at least 65%, at least 70%, at least 75%, at least 80%, at least 85%, at least 90%, at least 95%, at least 99%, or 100% identical to SEQ ID NO: 245;
[4006] a VL at least 65%, at least 70%, at least 75%, at least 80%, at least 85%, at least 90%, at least 95%, at least 99%, or 100% identical to SEQ ID NO: 247 and a VH at least 65%, at least 70%, at least 75%, at least 80%, at least 85%, at least 90%, at least 95%, at least 99%, or 100% identical to SEQ ID NO: 129;
[4007] a VL at least 65%, at least 70%, at least 75%, at least 80%, at least 85%, at least 90%, at least 95%, at least 99%, or 100% identical to SEQ ID NO: 250 and a VH at least 65%, at least 70%, at least 75%, at least 80%, at least 85%, at least 90%, at least 95%, at least 99%, or 100% identical to SEQ ID NO: 129;
[4008] a VL at least 65%, at least 70%, at least 75%, at least 80%, at least 85%, at least 90%, at least 95%, at least 99%, or 100% identical to SEQ ID NO: 251 and a VH at least 65%, at least 70%, at least 75%, at least 80%, at least 85%, at least 90%, at least 95%, at least 99%, or 100% identical to SEQ ID NO: 37;
[4009] a VL at least 65%, at least 70%, at least 75%, at least 80%, at least 85%, at least 90%, at least 95%, at least 99%, or 100% identical to SEQ ID NO: 252 and a VH at least 65%, at least 70%, at least 75%, at least 80%, at least 85%, at least 90%, at least 95%, at least 99%, or 100% identical to SEQ ID NO: 37;
[4010] a VL at least 65%, at least 70%, at least 75%, at least 80%, at least 85%, at least 90%, at least 95%, at least 99%, or 100% identical to SEQ ID NO: 33 and a VH at least 65%, at least 70%, at least 75%, at least 80%, at least 85%, at least 90%, at least 95%, at least 99%, or 100% identical to SEQ ID NO: 254;
[4011] a VL at least 65%, at least 70%, at least 75%, at least 80%, at least 85%, at least 90%, at least 95%, at least 99%, or 100% identical to SEQ ID NO: 255 and a VH at least 65%, at least 70%, at least 75%, at least 80%, at least 85%, at least 90%, at least 95%, at least 99%, or 100% identical to SEQ ID NO: 37;
[4012] a VL at least 65%, at least 70%, at least 75%, at least 80%, at least 85%, at least 90%, at least 95%, at least 99%, or 100% identical to SEQ ID NO: 255 and a VH at least 65%, at least 70%, at least 75%, at least 80%, at least 85%, at least 90%, at least 95%, at least 99%, or 100% identical to SEQ ID NO: 254;
[4013] a VL at least 65%, at least 70%, at least 75%, at least 80%, at least 85%, at least 90%, at least 95%, at least 99%, or 100% identical to SEQ ID NO: 255 and a VH at least 65%, at least 70%, at least 75%, at least 80%, at least 85%, at least 90%, at least 95%, at least 99%, or 100% identical to SEQ ID NO: 129;
[4014] a VL at least 65%, at least 70%, at least 75%, at least 80%, at least 85%, at least 90%, at least 95%, at least 99%, or 100% identical to SEQ ID NO: 127 and a VH at least 65%, at least 70%, at least 75%, at least 80%, at least 85%, at least 90%, at least 95%, at least 99%, or 100% identical to SEQ ID NO: 258;
[4015] a VL at least 65%, at least 70%, at least 75%, at least 80%, at least 85%, at least 90%, at least 95%, at least 99%, or 100% identical to SEQ ID NO: 127 and a VH at least 65%, at least 70%, at least 75%, at least 80%, at least 85%, at least 90%, at least 95%, at least 99%, or 100% identical to SEQ ID NO: 260;
[4016] a VL at least 65%, at least 70%, at least 75%, at least 80%, at least 85%, at least 90%, at least 95%, at least 99%, or 100% identical to SEQ ID NO: 127 and a VH at least 65%, at least 70%, at least 75%, at least 80%, at least 85%, at least 90%, at least 95%, at least 99%, or 100% identical to SEQ ID NO: 262;
[4017] a VL at least 65%, at least 70%, at least 75%, at least 80%, at least 85%, at least 90%, at least 95%, at least 99%, or 100% identical to SEQ ID NO: 127 and a VH at least 65%, at least 70%, at least 75%, at least 80%, at least 85%, at least 90%, at least 95%, at least 99%, or 100% identical to SEQ ID NO: 262;
[4018] a VL at least 65%, at least 70%, at least 75%, at least 80%, at least 85%, at least 90%, at least 95%, at least 99%, or 100% identical to SEQ ID NO: 127 and a VH at least 65%, at least 70%, at least 75%, at least 80%, at least 85%, at least 90%, at least 95%, at least 99%, or 100% identical to SEQ ID NO: 266;
[4019] a VL at least 65%, at least 70%, at least 75%, at least 80%, at least 85%, at least 90%, at least 95%, at least 99%, or 100% identical to SEQ ID NO: 127 and a VH at least 65%, at least 70%, at least 75%, at least 80%, at least 85%, at least 90%, at least 95%, at least 99%, or 100% identical to SEQ ID NO: 268;
[4020] a VL at least 65%, at least 70%, at least 75%, at least 80%, at least 85%, at least 90%, at least 95%, at least 99%, or 100% identical to SEQ ID NO: 127 and a VH at least 65%, at least 70%, at least 75%, at least 80%, at least 85%, at least 90%, at least 95%, at least 99%, or 100% identical to SEQ ID NO: 270;
[4021] a VL at least 65%, at least 70%, at least 75%, at least 80%, at least 85%, at least 90%, at least 95%, at least 99%, or 100% identical to SEQ ID NO: 127 and a VH at least 65%, at least 70%, at least 75%, at least 80%, at least 85%, at least 90%, at least 95%, at least 99%, or 100% identical to SEQ ID NO: 331;
[4022] a VL at least 65%, at least 70%, at least 75%, at least 80%, at least 85%, at least 90%, at least 95%, at least 99%, or 100% identical to SEQ ID NO: 127 and a VH at least 65%, at least 70%, at least 75%, at least 80%, at least 85%, at least 90%, at least 95%, at least 99%, or 100% identical to SEQ ID NO: 272;
[4023] a VL at least 65%, at least 70%, at least 75%, at least 80%, at least 85%, at least 90%, at least 95%, at least 99%, or 100% identical to SEQ ID NO: 127 and a VH at least 65%, at least 70%, at least 75%, at least 80%, at least 85%, at least 90%, at least 95%, at least 99%, or 100% identical to SEQ ID NO: 275;
[4024] a VL at least 65%, at least 70%, at least 75%, at least 80%, at least 85%, at least 90%, at least 95%, at least 99%, or 100% identical to SEQ ID NO: 127 and a VH at least 65%, at least 70%, at least 75%, at least 80%, at least 85%, at least 90%, at least 95%, at least 99%, or 100% identical to SEQ ID NO: 277;
[4025] a VL at least 65%, at least 70%, at least 75%, at least 80%, at least 85%, at least 90%, at least 95%, at least 99%, or 100% identical to SEQ ID NO: 127 and a VH at least 65%, at least 70%, at least 75%, at least 80%, at least 85%, at least 90%, at least 95%, at least 99%, or 100% identical to SEQ ID NO: 279;
[4026] a VL at least 65%, at least 70%, at least 75%, at least 80%, at least 85%, at least 90%, at least 95%, at least 99%, or 100% identical to SEQ ID NO: 127 and a VH at least 65%, at least 70%, at least 75%, at least 80%, at least 85%, at least 90%, at least 95%, at least 99%, or 100% identical to SEQ ID NO: 280;
[4027] a VL at least 65%, at least 70%, at least 75%, at least 80%, at least 85%, at least 90%, at least 95%, at least 99%, or 100% identical to SEQ ID NO: 127 and a VH at least 65%, at least 70%, at least 75%, at least 80%, at least 85%, at least 90%, at least 95%, at least 99%, or 100% identical to SEQ ID NO: 282;
[4028] a VL at least 65%, at least 70%, at least 75%, at least 80%, at least 85%, at least 90%, at least 95%, at least 99%, or 100% identical to SEQ ID NO: 284 and a VH at least 65%, at least 70%, at least 75%, at least 80%, at least 85%, at least 90%, at least 95%, at least 99%, or 100% identical to SEQ ID NO: 129;
[4029] a VL at least 65%, at least 70%, at least 75%, at least 80%, at least 85%, at least 90%, at least 95%, at least 99%, or 100% identical to SEQ ID NO: 323 and a VH at least 65%, at least 70%, at least 75%, at least 80%, at least 85%, at least 90%, at least 95%, at least 99%, or 100% identical to SEQ ID NO: 129;
[4030] a VL at least 65%, at least 70%, at least 75%, at least 80%, at least 85%, at least 90%, at least 95%, at least 99%, or 100% identical to SEQ ID NO: 286 and a VH at least 65%, at least 70%, at least 75%, at least 80%, at least 85%, at least 90%, at least 95%, at least 99%, or 100% identical to SEQ ID NO: 129;
[4031] a VL at least 65%, at least 70%, at least 75%, at least 80%, at least 85%, at least 90%, at least 95%, at least 99%, or 100% identical to SEQ ID NO: 289 and a VH at least 65%, at least 70%, at least 75%, at least 80%, at least 85%, at least 90%, at least 95%, at least 99%, or 100% identical to SEQ ID NO: 129;
[4032] a VL at least 65%, at least 70%, at least 75%, at least 80%, at least 85%, at least 90%, at least 95%, at least 99%, or 100% identical to SEQ ID NO: 291 and a VH at least 65%, at least 70%, at least 75%, at least 80%, at least 85%, at least 90%, at least 95%, at least 99%, or 100% identical to SEQ ID NO: 129;
[4033] a VL at least 65%, at least 70%, at least 75%, at least 80%, at least 85%, at least 90%, at least 95%, at least 99%, or 100% identical to SEQ ID NO: 293 and a VH at least 65%, at least 70%, at least 75%, at least 80%, at least 85%, at least 90%, at least 95%, at least 99%, or 100% identical to SEQ ID NO: 129;
[4034] a VL at least 65%, at least 70%, at least 75%, at least 80%, at least 85%, at least 90%, at least 95%, at least 99%, or 100% identical to SEQ ID NO: 295 and a VH at least 65%, at least 70%, at least 75%, at least 80%, at least 85%, at least 90%, at least 95%, at least 99%, or 100% identical to SEQ ID NO: 129;
[4035] a VL at least 65%, at least 70%, at least 75%, at least 80%, at least 85%, at least 90%, at least 95%, at least 99%, or 100% identical to SEQ ID NO: 247 and a VH at least 65%, at least 70%, at least 75%, at least 80%, at least 85%, at least 90%, at least 95%, at least 99%, or 100% identical to SEQ ID NO: 282;
[4036] a VL at least 65%, at least 70%, at least 75%, at least 80%, at least 85%, at least 90%, at least 95%, at least 99%, or 100% identical to SEQ ID NO: 250 and a VH at least 65%, at least 70%, at least 75%, at least 80%, at least 85%, at least 90%, at least 95%, at least 99%, or 100% identical to SEQ ID NO: 282;
[4037] a VL at least 65%, at least 70%, at least 75%, at least 80%, at least 85%, at least 90%, at least 95%, at least 99%, or 100% identical to SEQ ID NO: 39 and a VH at least 65%, at least 70%, at least 75%, at least 80%, at least 85%, at least 90%, at least 95%, at least 99%, or 100% identical to SEQ ID NO: 298;
[4038] a VL at least 65%, at least 70%, at least 75%, at least 80%, at least 85%, at least 90%, at least 95%, at least 99%, or 100% identical to SEQ ID NO: 39 and a VH at least 65%, at least 70%, at least 75%, at least 80%, at least 85%, at least 90%, at least 95%, at least 99%, or 100% identical to SEQ ID NO: 254;
[4039] a VL at least 65%, at least 70%, at least 75%, at least 80%, at least 85%, at least 90%, at least 95%, at least 99%, or 100% identical to SEQ ID NO: 299 and a VH at least 65%, at least 70%, at least 75%, at least 80%, at least 85%, at least 90%, at least 95%, at least 99%, or 100% identical to SEQ ID NO: 37;
[4040] a VL at least 65%, at least 70%, at least 75%, at least 80%, at least 85%, at least 90%, at least 95%, at least 99%, or 100% identical to SEQ ID NO: 300 and a VH at least 65%, at least 70%, at least 75%, at least 80%, at least 85%, at least 90%, at least 95%, at least 99%, or 100% identical to SEQ ID NO: 37;
[4041] a VL at least 65%, at least 70%, at least 75%, at least 80%, at least 85%, at least 90%, at least 95%, at least 99%, or 100% identical to SEQ ID NO: 302 and a VH at least 65%, at least 70%, at least 75%, at least 80%, at least 85%, at least 90%, at least 95%, at least 99%, or 100% identical to SEQ ID NO: 37;
[4042] a VL at least 65%, at least 70%, at least 75%, at least 80%, at least 85%, at least 90%, at least 95%, at least 99%, or 100% identical to SEQ ID NO: 303 and a VH at least 65%, at least 70%, at least 75%, at least 80%, at least 85%, at least 90%, at least 95%, at least 99%, or 100% identical to SEQ ID NO: 37;
[4043] a VL at least 65%, at least 70%, at least 75%, at least 80%, at least 85%, at least 90%, at least 95%, at least 99%, or 100% identical to SEQ ID NO: 305 and a VH at least 65%, at least 70%, at least 75%, at least 80%, at least 85%, at least 90%, at least 95%, at least 99%, or 100% identical to SEQ ID NO: 37;
[4044] a VL at least 65%, at least 70%, at least 75%, at least 80%, at least 85%, at least 90%, at least 95%, at least 99%, or 100% identical to SEQ ID NO: 307 and a VH at least 65%, at least 70%, at least 75%, at least 80%, at least 85%, at least 90%, at least 95%, at least 99%, or 100% identical to SEQ ID NO: 37;
[4045] a VL at least 65%, at least 70%, at least 75%, at least 80%, at least 85%, at least 90%, at least 95%, at least 99%, or 100% identical to SEQ ID NO: 308 and a VH at least 65%, at least 70%, at least 75%, at least 80%, at least 85%, at least 90%, at least 95%, at least 99%, or 100% identical to SEQ ID NO: 37;
[4046] a VL at least 65%, at least 70%, at least 75%, at least 80%, at least 85%, at least 90%, at least 95%, at least 99%, or 100% identical to SEQ ID NO: 310 and a VH at least 65%, at least 70%, at least 75%, at least 80%, at least 85%, at least 90%, at least 95%, at least 99%, or 100% identical to SEQ ID NO: 37;
[4047] a VL at least 65%, at least 70%, at least 75%, at least 80%, at least 85%, at least 90%, at least 95%, at least 99%, or 100% identical to SEQ ID NO: 312 and a VH at least 65%, at least 70%, at least 75%, at least 80%, at least 85%, at least 90%, at least 95%, at least 99%, or 100% identical to SEQ ID NO: 37;
[4048] a VL at least 65%, at least 70%, at least 75%, at least 80%, at least 85%, at least 90%, at least 95%, at least 99%, or 100% identical to SEQ ID NO: 314 and a VH at least 65%, at least 70%, at least 75%, at least 80%, at least 85%, at least 90%, at least 95%, at least 99%, or 100% identical to SEQ ID NO: 37;
[4049] a VL at least 65%, at least 70%, at least 75%, at least 80%, at least 85%, at least 90%, at least 95%, at least 99%, or 100% identical to SEQ ID NO: 315 and a VH at least 65%, at least 70%, at least 75%, at least 80%, at least 85%, at least 90%, at least 95%, at least 99%, or 100% identical to SEQ ID NO: 37;
[4050] a VL at least 65%, at least 70%, at least 75%, at least 80%, at least 85%, at least 90%, at least 95%, at least 99%, or 100% identical to SEQ ID NO: 305 and a VH at least 65%, at least 70%, at least 75%, at least 80%, at least 85%, at least 90%, at least 95%, at least 99%, or 100% identical to SEQ ID NO: 254;
[4051] a VL at least 65%, at least 70%, at least 75%, at least 80%, at least 85%, at least 90%, at least 95%, at least 99%, or 100% identical to SEQ ID NO: 251 and a VH at least 65%, at least 70%, at least 75%, at least 80%, at least 85%, at least 90%, at least 95%, at least 99%, or 100% identical to SEQ ID NO: 254;
[4052] a VL at least 65%, at least 70%, at least 75%, at least 80%, at least 85%, at least 90%, at least 95%, at least 99%, or 100% identical to SEQ ID NO: 255 and a VH at least 65%, at least 70%, at least 75%, at least 80%, at least 85%, at least 90%, at least 95%, at least 99%, or 100% identical to SEQ ID NO: 282;
[4053] a VL at least 65%, at least 70%, at least 75%, at least 80%, at least 85%, at least 90%, at least 95%, at least 99%, or 100% identical to SEQ ID NO: 317 and a VH at least 65%, at least 70%, at least 75%, at least 80%, at least 85%, at least 90%, at least 95%, at least 99%, or 100% identical to SEQ ID NO: 321;
[4054] a VL at least 65%, at least 70%, at least 75%, at least 80%, at least 85%, at least 90%, at least 95%, at least 99%, or 100% identical to SEQ ID NO: 772 and a VH at least 65%, at least 70%, at least 75%, at least 80%, at least 85%, at least 90%, at least 95%, at least 99%, or 100% identical to SEQ ID NO: 775;
[4055] a VL at least 65%, at least 70%, at least 75%, at least 80%, at least 85%, at least 90%, at least 95%, at least 99%, or 100% identical to SEQ ID NO: 43 and a VH at least 65%, at least 70%, at least 75%, at least 80%, at least 85%, at least 90%, at least 95%, at least 99%, or 100% identical to SEQ ID NO: 777;
[4056] a VL at least 65%, at least 70%, at least 75%, at least 80%, at least 85%, at least 90%, at least 95%, at least 99%, or 100% identical to SEQ ID NO: 780 and a VH at least 65%, at least 70%, at least 75%, at least 80%, at least 85%, at least 90%, at least 95%, at least 99%, or 100% identical to SEQ ID NO: 784;
[4057] a VL at least 65%, at least 70%, at least 75%, at least 80%, at least 85%, at least 90%, at least 95%, at least 99%, or 100% identical to SEQ ID NO: 787 and a VH at least 65%, at least 70%, at least 75%, at least 80%, at least 85%, at least 90%, at least 95%, at least 99%, or 100% identical to SEQ ID NO: 791;
[4058] a VL at least 65%, at least 70%, at least 75%, at least 80%, at least 85%, at least 90%, at least 95%, at least 99%, or 100% identical to SEQ ID NO: 796 and a VH at least 65%, at least 70%, at least 75%, at least 80%, at least 85%, at least 90%, at least 95%, at least 99%, or 100% identical to SEQ ID NO: 800;
[4059] a VL at least 65%, at least 70%, at least 75%, at least 80%, at least 85%, at least 90%, at least 95%, at least 99%, or 100% identical to SEQ ID NO: 802 and a VH at least 65%, at least 70%, at least 75%, at least 80%, at least 85%, at least 90%, at least 95%, at least 99%, or 100% identical to SEQ ID NO: 806;
[4060] a VL at least 65%, at least 70%, at least 75%, at least 80%, at least 85%, at least 90%, at least 95%, at least 99%, or 100% identical to SEQ ID NO: 809 and a VH at least 65%, at least 70%, at least 75%, at least 80%, at least 85%, at least 90%, at least 95%, at least 99%, or 100% identical to SEQ ID NO: 813;
[4061] a VL at least 65%, at least 70%, at least 75%, at least 80%, at least 85%, at least 90%, at least 95%, at least 99%, or 100% identical to SEQ ID NO: 816 and a VH at least 65%, at least 70%, at least 75%, at least 80%, at least 85%, at least 90%, at least 95%, at least 99%, or 100% identical to SEQ ID NO: 820;
[4062] a VL at least 65%, at least 70%, at least 75%, at least 80%, at least 85%, at least 90%, at least 95%, at least 99%, or 100% identical to SEQ ID NO: 822 and a VH at least 65%, at least 70%, at least 75%, at least 80%, at least 85%, at least 90%, at least 95%, at least 99%, or 100% identical to SEQ ID NO: 826;
[4063] a VL at least 65%, at least 70%, at least 75%, at least 80%, at least 85%, at least 90%, at least 95%, at least 99%, or 100% identical to SEQ ID NO: 831 and a VH at least 65%, at least 70%, at least 75%, at least 80%, at least 85%, at least 90%, at least 95%, at least 99%, or 100% identical to SEQ ID NO: 835;
[4064] a VL at least 65%, at least 70%, at least 75%, at least 80%, at least 85%, at least 90%, at least 95%, at least 99%, or 100% identical to SEQ ID NO: 838 and a VH at least 65%, at least 70%, at least 75%, at least 80%, at least 85%, at least 90%, at least 95%, at least 99%, or 100% identical to SEQ ID NO: 842;
[4065] a VL at least 65%, at least 70%, at least 75%, at least 80%, at least 85%, at least 90%, at least 95%, at least 99%, or 100% identical to SEQ ID NO: 844 and a VH at least 65%, at least 70%, at least 75%, at least 80%, at least 85%, at least 90%, at least 95%, at least 99%, or 100% identical to SEQ ID NO: 848;
[4066] a VL at least 65%, at least 70%, at least 75%, at least 80%, at least 85%, at least 90%, at least 95%, at least 99%, or 100% identical to SEQ ID NO: 851 and a VH at least 65%, at least 70%, at least 75%, at least 80%, at least 85%, at least 90%, at least 95%, at least 99%, or 100% identical to SEQ ID NO: 855;
[4067] a VL at least 65%, at least 70%, at least 75%, at least 80%, at least 85%, at least 90%, at least 95%, at least 99%, or 100% identical to SEQ ID NO: 860 and a VH at least 65%, at least 70%, at least 75%, at least 80%, at least 85%, at least 90%, at least 95%, at least 99%, or 100% identical to SEQ ID NO: 864;
[4068] a VL at least 65%, at least 70%, at least 75%, at least 80%, at least 85%, at least 90%, at least 95%, at least 99%, or 100% identical to SEQ ID NO: 867 and a VH at least 65%, at least 70%, at least 75%, at least 80%, at least 85%, at least 90%, at least 95%, at least 99%, or 100% identical to SEQ ID NO: 871;
[4069] a VL at least 65%, at least 70%, at least 75%, at least 80%, at least 85%, at least 90%, at least 95%, at least 99%, or 100% identical to SEQ ID NO: 873 and a VH at least 65%, at least 70%, at least 75%, at least 80%, at least 85%, at least 90%, at least 95%, at least 99%, or 100% identical to SEQ ID NO: 877; or
[4070] a VL at least 65%, at least 70%, at least 75%, at least 80%, at least 85%, at least 90%, at least 95%, at least 99%, or 100% identical to SEQ ID NO: 880 and a VH at least 65%, at least 70%, at least 75%, at least 80%, at least 85%, at least 90%, at least 95%, at least 99%, or 100% identical to SEQ ID NO: 884.

[4071] In some aspects, in any one of the antigen binding polypeptides or antigen binding polypeptide complexes disclosed herein:
[4072] (i) any one of the VL comprises a CDR1 having an amino acid sequence at least 65%, at least 70%, at least 75%, at least 80%, at least 85%, at least 90%, at least 95%, at least 99%, or 100% identical to SEQ ID NO: 152 or 1045, a CDR2 having an amino acid sequence at least 65%, at least 70%, at least 75%, at least 80%, at least 85%, at least 90%, at least 95%, at least 99%, or 100% identical to SEQ ID NO: 1046 or an amino acid sequence at least 65%, at least 70%, at least 75%, at least 80%, at least 85%, at least 90%, at least 95%, at least 99%, or 100% identical to amino acid sequence GAS, and a CDR3 having an amino acid sequence at least 65%, at least 70%, at least 75%, at least 80%, at least 85%, at least 90%, at least 95%, at least 99%, or 100% identical to SEQ ID NO: 153 or 766; and any one of the VH comprises a CDR1 having an amino acid sequence at least 65%, at least 70%, at least 75%, at least 80%, at least 85%, at least 90%, at least 95%, at least 99%, or 100% identical to SEQ ID NO: 155 or 1047, a CDR2 having an amino acid sequence at least 65%, at least 70%, at least 75%, at least 80%, at least 85%, at least 90%, at least 95%, at least 99%, or 100% identical to SEQ ID NO: 156 or 1048, and a CDR3 having an amino acid sequence at least 65%, at least 70%, at least 75%, at least 80%, at least 85%, at least 90%, at least 95%, at least 99%, or 100% identical to SEQ ID NO: 157, 767, or 1049;
[4073] and/or
[4074] (ii) any one of the VL comprises a CDR1 having an amino acid sequence at least 65%, at least 70%, at least 75%, at least 80%, at least 85%, at least 90%, at least 95%, at least 99%, or 100% identical to SEQ ID NO: 145 or 1050, a CDR2 having an amino acid sequence at least 65%, at least 70%, at least 75%, at least 80%, at least 85%, at least 90%, at least 95%, at least 99%, or 100% identical to SEQ ID NO: 1051 or an amino acid sequence at least 65%, at least 70%, at least 75%, at least 80%, at least 85%, at least 90%, at least 95%, at least 99%, or 100% identical to amino acid sequence AAS, and a CDR3 having an amino acid sequence at least 65%, at least 70%, at least 75%, at least 80%, at least 85%, at least 90%, at least 95%, at least 99%, or 100% identical to SEQ ID NO: 146 or 764; and any one of the VH comprises a CDR1 having an amino acid sequence at least 65%, at least 70%, at least 75%, at least 80%, at least 85%, at least 90%, at least 95%, at least 99%, or 100% identical to SEQ ID NO: 148 or 1052, a CDR2 having an amino acid sequence at least 65%, at least 70%, at least 75%, at least 80%, at least 85%, at least 90%, at least 95%, at least 99%, or 100% identical to SEQ ID NO: 149 or 1053, and a CDR3 having an amino acid sequence at least 65%, at least 70%, at least 75%, at least 80%, at least 85%, at least 90%, at least 95%, at least 99%, or 100% identical to SEQ ID NO: 150, 765, or 1054; and/or
[4075] (iii) any one of the VL comprises a CDR1 having an amino acid sequence at least 65%, at least 70%, at least 75%, at least 80%, at least 85%, at least 90%, at least 95%, at least 99%, or 100% identical to SEQ ID NO: 172 or 1060, a CDR2 having an amino acid sequence at least 65%, at least 70%, at least 75%, at least 80%, at least 85%, at least 90%, at least 95%, at least 99%, or 100% identical to SEQ ID NO: 1061 or an amino acid sequence at least 65%, at least 70%, at least 75%, at least 80%, at least 85%, at least 90%, at least 95%, at least 99%, or 100% identical to amino acid sequence DAS, and a CDR3 having an amino acid sequence at least 65%, at least 70%, at least 75%, at least 80%, at least 85%, at least 90%, at least 95%, at least 99%, or 100% identical to SEQ ID NO: 173 or 792; and any one of the VH comprises a CDR1 having an amino acid sequence at least 65%, at least 70%, at least 75%, at least 80%, at least 85%, at least 90%, at least 95%, at least 99%, or 100% identical to SEQ ID NO: 175 or 1062, a CDR2 having an amino acid sequence at least 65%, at least 70%, at least 75%, at least 80%, at least 85%, at least 90%, at least 95%, at least 99%, or 100% identical to SEQ ID NO: 176 or 1063, and a CDR3 having an amino acid sequence at least 65%, at least 70%, at least 75%, at least 80%, at least 85%, at least 90%, at least 95%, at least 99%, or 100% identical to SEQ ID NO: 177, 793, or 1064.

[4076] For example, an antigen binding polypeptide may comprise one VL/VH pair, wherein the VL/VH pair comprises one of (i), (ii), or (iii); or an antigen binding polypeptide may comprise two VL/VH pairs, wherein the first VL/VH pair comprises one of (i), (ii), or (iii) and the second VL/VH pair comprises one of (i), (ii), or (iii), in any combinations (e.g., the first VL/VH pair comprise (i) and the second VL/VH pair also comprises (i); or the first VL/VH pair comprise (i) and the second VL/VH pair comprises (ii); or the first VL/VH pair comprise (iii) and the second VL/VH pair comprises (ii); etc.).

[4077] For example, an antigen binding polypeptide complex may comprise three VL/VH pairs, wherein the first VL/VH pair comprises one of (i), (ii), or (iii), the second VL/VH pair comprises one of (i), (ii), or (iii), and the third VL/VH pair comprises one of (i), (ii), or (iii), in any combination (e.g., the first VL/VH pair comprises (i), the second VL/VH pair also comprises (i), and the third VL/VH pair comprises (ii); or the first VL/VH pair comprises (ii), the second VL/VH pair comprises (i), and the third VL/VH pair comprises (iii); or the first VL/VH pair comprises (iii), the second VL/VH pair comprises (ii), and the third VL/VH pair also comprises (ii); etc.); or an antigen binding polypeptide complex may comprise four VL/VH pairs, wherein the first VL/VH pair comprises one of (i), (ii), or (iii), the second VL/VH pair comprises one of (i), (ii), or (iii), the third VL/VH pair comprises one of (i), (ii), or (iii), and the fourth VL/VH pair comprises one of (i), (ii), or (iii), in any combination (e.g., the first VL/VH pair comprises (i), the second VL/VH pair also comprises (i), the third VL/VH pair comprises (ii), and the fourth VL/VH pair also comprises (ii); or the first VL/VH pair comprises (i), the second VL/VH pair comprises (ii), the third VL/VH pair comprises (iii), and the fourth VL/VH pair also comprises (iii); or the first VL/VH pair comprises (iii), the second VL/VH pair comprises (ii), the third VL/VH pair comprises (i), and the fourth VL/VH pair comprises (iii); etc.).

[4078] In some of those aspects, in any one of the antigen binding polypeptides or antigen binding polypeptide complexes disclosed herein:
[4079] (i) any one of the VL comprises an amino acid sequence that is at least 65%, at least 70%, at least 75%, at least 80%, at least 85%, at least 90%, at least 95%, at least 99%, or 100% identical to SEQ ID NO: 154; and any one of the VH comprises an amino acid sequence that is at least 65%, at least 70%, at least 75%, at least 80%, at least 85%, at least 90%, at least 95%, at least 99%, or 100% identical to SEQ ID NO: 158; and/or
[4080] (ii) any one of the VL comprises an amino acid sequence that is at least 65%, at least 70%, at least 75%, at least 80%, at least 85%, at least 90%, at least 95%, at least 99%, or 100% identical to SEQ ID NO: 147; and any one of the VH comprises an amino acid sequence that is at least 65%, at least 70%, at least 75%, at least 80%, at least 85%, at least 90%, at least 95%, at least 99%, or 100% identical to SEQ ID NO: 151; and/or
[4081] (iii) any one of the VL comprises an amino acid sequence that is at least 65%, at least 70%, at least 75%, at least 80%, at least 85%, at least 90%, at least 95%, at least 99%, or 100% identical to SEQ ID NO: 174; and any one of the VH comprises an amino acid sequence that is at least 65%, at least 70%, at least 75%, at least 80%, at least 85%, at least 90%, at least 95%, at least 99%, or 100% identical to SEQ ID NO: 178.

[4082] For example, an antigen binding polypeptide may comprise one VL/VH pair, wherein the VL/VH pair comprises one of (i), (ii), or (iii); or an antigen binding polypeptide may comprise two VL/VH pairs, wherein the first VL/VH pair comprises one of (i), (ii), or (iii) and the second VL/VH pair comprises one of (i), (ii), or (iii), in any combinations (e.g., the first VL/VH pair comprise (i) and the second VL/VH pair also comprises (i); or the first VL/VH pair comprise (i) and the second VL/VH pair comprises (ii); or the first VL/VH pair comprise (iii) and the second VL/VH pair comprises (ii); etc.).

[4083] For example, an antigen binding polypeptide complex may comprise three VL/VH pairs, wherein the first VL/VH pair comprises one of (i), (ii), or (iii), the second VL/VH pair comprises one of (i), (ii), or (iii), and the third VL/VH pair comprises one of (i), (ii), or (iii), in any combination (e.g., the first VL/VH pair comprises (i), the second VL/VH pair also comprises (i), and the third VL/VH pair comprises (ii); or the first VL/VH pair comprises (ii), the second VL/VH pair comprises (i), and the third VL/VH pair comprises (iii); or the first VL/VH pair comprises (iii), the second VL/VH pair comprises (ii), and the third VL/VH pair also comprises (ii); etc.); or an antigen binding polypeptide complex may comprise four VL/VH pairs, wherein the first VL/VH pair comprises one of (i), (ii), or (iii), the second VL/VH pair comprises one of (i), (ii), or (iii), the third VL/VH pair comprises one of (i), (ii), or (iii), and the fourth VL/VH pair comprises one of (i), (ii), or (iii), in any combination (e.g., the first VL/VH pair comprises (i), the second VL/VH pair also comprises (i), the third VL/VH pair comprises (ii), and the fourth VL/VH pair also comprises (ii); or the first VL/VH pair comprises (i), the second VL/VH pair comprises (ii), the third VL/VH pair comprises (iii), and the fourth VL/VH pair also comprises (iii); or the first VL/VH pair comprises (iii), the second VL/VH pair comprises (ii), the third VL/VH pair comprises (i), and the fourth VL/VH pair comprises (iii); etc.).

[4084] In some aspects, any one of the antigen binding polypeptides, antigen binding polypeptide complexes, polypeptides, antibodies or antigen binding fragments thereof (e.g., anti-SARS-CoV-2 virus antibodies or antigen binding fragments thereof) disclosed herein have a poly-reactivity score of from 0 to about 100, from 0 to about 90, from 0 to about 80, from 0 to about 70, from 0 to about 60, from 0 to about 50, from 0 to about 40, from 0 to about 30, from 0 to about 25, from 0 to about 20, from 0 to about 15, from 0 to about 10, or from 0 to about 5.

[4085] In some aspects, any one of the antigen binding polypeptides, antigen binding polypeptide complexes, polypeptides, antibodies or antigen binding fragments thereof (e.g., anti-SARS-CoV-2 virus antibodies or antigen binding fragments thereof) disclosed herein have a poly-reactivity score of from 0 to about 50, from 0 to about 40, from 0 to about 30, from 0 to about 25, from 0 to about 20, from 0 to about 15, from 0 to about 10, or from 0 to about 5.

[4086] In some aspects, any one of the antigen binding polypeptides, antigen binding polypeptide complexes, polypeptides, antibodies or antigen binding fragments thereof (e.g., anti-SARS-CoV-2 virus antibodies or antigen binding fragments thereof) disclosed herein have a poly-reactivity score of from 0 to about 10, or from 0 to about 5.

[4087] In some aspects, any one of the antigen binding polypeptides, antigen binding polypeptide complexes, polypeptides, antibodies or antigen binding fragments thereof (e.g., anti-SARS-CoV-2 virus antibodies or antigen binding fragments thereof) disclosed herein have a poly-reactivity score of about 100, 95, 90, 85, 80, 75, 70, 65, 60, 55, 50, 45, 40, 35, 30, 25, 20, 19, 18, 17, 16, 15, 14, 13, 12, 10, 9, 8, 7, 6, 5, 4, 3, 2, 1, or 0.

[4088] In some aspects, any one of the antigen binding polypeptides, antigen binding polypeptide complexes, polypeptides, antibodies or antigen binding fragments thereof (e.g., anti-SARS-CoV-2 virus antibodies or antigen binding fragments thereof) disclosed herein have a poly-reactivity score of about 20, 19, 18, 17, 16, 15, 14, 13, 12, 10, 9, 8, 7, 6, 5, 4, 3, 2, 1, or 0).

[4089] In some aspects, any one of the antigen binding polypeptides, antigen binding polypeptide complexes, polypeptides, antibodies or antigen binding fragments thereof (e.g., anti-SARS-CoV-2 virus antibodies or antigen binding fragments thereof) disclosed herein have a poly-reactivity score of about 10, 9, 8, 7, 6, 5, 4, 3, 2, 1, or 0).

### Amino Acid Linkers

[4090] In some aspects, an antigen binding polypeptide or polypeptide complex (e.g., an antibody or antigen binding fragment thereof) provided herein comprises one or more optional amino acid linkers between two or more regions of the antigen binding polypeptide or polypeptide complex.

[4091] As used herein, an “amino acid linker” can be a single amino acid or short amino acid sequence that is capable of joining two regions of an antigen binding polypeptide or polypeptide complex provided herein in a stable manner that maintains or promotes a function associated with the regions. However, as used herein, an “amino acid linker” can also include where an amino acid linker is not present between two regions (referred to herein as an amino acid linker having 0 amino acids). In some aspects, an amino acid linker is represented herein in a structure of an antigen binding polypeptide or polypeptide complex by the abbreviation “1” or “L” and a number (e.g., L1 to denote a first linker, L2 to denote a second linker, L3 to denote a third linker. L4 to denote a fourth linker. L5 to denote a fifth linker. L6 to denote a sixth linker. L7 to denote a seventh linker, and L8 to denote an eighth linker. L9 to denote a ninth linker. L10 to denote a tenth linker). In some aspects, such enumerated amino acid linkers (e.g., L1) can have the same or different sequence as any other enumerated amino acid linker (e.g., L2, etc.). The terms “amino acid linker” and “linker” are used interchangeably herein.

[4092] In one aspect, an amino acid linker (e.g., one or more of L1, L2, L3, L4, L5, L6, L7, L8, L9, or L10 of a first, second, third and/or fourth polypeptide of an antigen binding polypeptide or polypeptide complex structure provided herein) has a length of from 0 amino acids (i.e., an amino acid linker is not present) to about 50 amino acids. In another aspect, the amino acid linker has a length of from 0 amino acids to about 45 amino acids, 0 amino acids to about 40 amino acids, 0 amino acids to about 35 amino acids, 0 amino acids to about 30 amino acids, 0 amino acids to about 25 amino acids, 0 amino acids to about 20 amino acids, 0 amino acids to about 15 amino acids, 0 amino acids to about 10 amino acids, 0 amino acids to about 5 amino acids, about 1 amino acid to about 45 amino acids, about 1 amino acid to about 40 amino acids, about 1 amino acid to about 35 amino acids, about 1 amino acid to about 30 amino acids, about 1 amino acid to about 25 amino acids, about 1 amino acid to about 20 amino acids, 1 amino acid to about 15 amino acids, about 1 amino acid to about 10 amino acids, about 1 amino acid to about 5 amino acids, about 5 amino acids to about 50 amino acids, about 5 amino acids to about 45 amino acids, about 5 amino acids to about 40 amino acids, about 5 amino acids to about 35 amino acids, about 5 amino acids to about 30 amino acids, about 5 amino acids to about 25 amino acids, about 5 amino acids to about 20 amino acids, about 5 amino acids to about 15 amino acids, about 5 amino acids to about 10 amino acids, about 10 amino acids to about 50 amino acids, about 10 amino acids to about 45 amino acids, about 10 amino acids to about 40 amino acids, about 10 amino acids to about 35 amino acids, about 10 amino acids to about 30 amino acids, about 10 amino acids to about 25 amino acids, about 10 amino acids to about 20 amino acids, about 10 amino acids to about 15 amino acids, about 15 amino acids to about 50 amino acids, about 15 amino acids to about 45 amino acids, about 15 amino acids to about 40 amino acids, about 15 amino acids to about 35 amino acids, about 15 amino acids to about 30 amino acids, about 15 amino acids to about 25 amino acids, about 15 amino acids to about 20 amino acids, about 20 amino acids to about 50 amino acids, about 20 amino acids to about 45 amino acids, about 20 amino acids to about 40 amino acids, about 20 amino acids to about 35 amino acids, about 20 amino acids to about 30 amino acids, about 20 amino acids to about 25 amino acids, about 25 amino acids to about 50 amino acids, about 25 amino acids to about 45 amino acids, about 25 amino acids to about 40 amino acids, about 25 amino acids to about 35 amino acids, about 25 amino acids to about 30 amino acids, about 30 amino acids to about 50 amino acids, about 30 amino acids to about 45 amino acids, about 30 amino acids to about 40 amino acids, about 30 amino acids to about 35 amino acids, about 40 amino acids to about 50 amino acids, about 40 amino acids to about 45 amino acids, or about 45 amino acids to about 50 amino acids

[4093] In another aspect, the amino acid linker (e.g., one or more of L1, L2, L3, L4, L5, L6, L7, L8, L9, or L10 of a first, second, third and/or fourth polypeptide of an antigen binding polypeptide or polypeptide complex structure provided herein) has 0 amino acids (i.e., an amino acid linker is not present) or about 1, about 2, about 3, about 4, about 5, about 6, about 7, about 8, about 9), about 10), about 11, about 12, about 13, about 14, about 15, about 16, about 17, about 18, about 19, about 20, about 25, about 30, about 35, about 40), about 45, or about 50 amino acids.

[4094] In one aspect, the amino acid linker (e.g., one or more of L1, L2, L3, L4, L5, L6, L7, L8, L9, or L10 of a first, second, third and/or fourth polypeptide of an antigen binding polypeptide or polypeptide complex structure provided herein) consists of one or more amino acid residues. In one aspect, the amino acid residues are selected from the group consisting of glycine, alanine, serine, threonine, cysteine, asparagine, glutamine, leucine, isoleucine, valine, proline, histidine, aspartic acid, glutamic acid, lysine, arginine, methionine, phenylalanine, tryptophan, and tyrosine.

[4095] In one aspect, an amino acid linker is non-immunogenic. In one aspect, a non-immunogenic linker consists of serine, glycine and/or alanine residues, or consists of serine and/or glycine residues. In another aspect, an amino acid linker does not contain a T cell epitope or consensus T cell epitope.

[4096] In one aspect, an amino acid linker consists of one or more residues of alanine, cysteine, glycine, isoleucine, leucine, methionine, phenylalanine, proline, tryptophan, tyrosine, or valine (e.g., one or more of L1, L2, L3, L4, L5, L6, L7, L8, L9, or L10 of a first, second, third and/or fourth polypeptide of an antigen binding polypeptide or polypeptide complex structure provided herein).

[4097] Amino acid linker sequences that can be used with the antigen binding polypeptides or polypeptide complexes (e.g., an antibody or antigen binding fragment thereof) provided herein are well known and can be incorporated into the antigen binding polypeptides and polypeptide complexes provided herein using routine molecular biology and recombinant DNA techniques. See, e.g., Chen et al., Adv Drug Deliv Rev., 65(10):1357-1369, 2013; and Chichili et al., Protein Sci., 22(2):153-167, 2013.

[4098] In one aspect, an amino acid linker (e.g., one or more of L1, L2, L3, L4, L5, L6, L7, L8, L9, or L10 of a first, second, third and/or fourth polypeptide of an antigen binding polypeptide or polypeptide complex structure provided herein) comprises an amino acid sequence of G, or A, or an amino acid sequence having at least 65%, at least 70%, at least 75%, at least 80%, at least 85%, at least 90%, at least 95%, at least 99%, or 100% identity to amino acid sequence GSS or ASG, or an amino acid sequence having at least 65%, at least 70%, at least 75%, at least 80%, at least 85%, at least 90%, at least 95%, at least 99%, or 100% identity to any one of SEQ ID NOs: 333-373 or 967-971. In one aspect, an amino acid linker (e.g., one or more of L1, L2, L3, L4, L5, L6, L7, L8, L9, or L10 of a first, second, third and/or fourth polypeptide of an antigen binding polypeptide or polypeptide complex structure provided herein) comprises an amino acid sequence having at least 65%, at least 70%, at least 75%, at least 80%, at least 85%, at least 90%, at least 95%, at least 99%, or 100% identity to any one of SEQ ID NOs: 333-345 or 967-971.

[4099] In some aspects, L1 comprises an amino acid sequence of G, or A, or an amino acid sequence having at least 65%, at least 70%, at least 75%, at least 80%, at least 85%, at least 90%, at least 95%, at least 99%, or 100% identity to amino acid sequence GSS or ASG, or an amino acid sequence having at least 65%, at least 70%, at least 75%, at least 80%, at least 85%, at least 90%, at least 95%, at least 99%, or 100% identity to any one of SEQ ID NOs: 333-373 or 967-971. In some aspects, L1 comprises an amino acid sequence having at least 65%, at least 70%, at least 75%, at least 80%, at least 85%, at least 90%, at least 95%, at least 99%, or 100% identity to any one of SEQ ID NOs: 333-345 or 967-971. In some aspects, L1 comprises 0 amino acids (i.e., L1 is not present).

[4100] In some aspects, L2 comprises an amino acid sequence of G, or A, or an amino acid sequence having at least 65%, at least 70%, at least 75%, at least 80%, at least 85%, at least 90%, at least 95%, at least 99%, or 100% identity to amino acid sequence GSS or ASG, or an amino acid sequence having at least 65%, at least 70%, at least 75%, at least 80%, at least 85%, at least 90%, at least 95%, at least 99%, or 100% identity to any one of SEQ ID NOs: 333-373 or 967-971. In some aspects, L2 comprises an amino acid sequence having at least 65%, at least 70%, at least 75%, at least 80%, at least 85%, at least 90%, at least 95%, at least 99%, or 100% identity to any one of SEQ ID NOs: 333-345 or 967-971. In some aspects, L2 comprises 0 amino acids (i.e., L2 is not present).

[4101] In some aspects, L3 comprises an amino acid sequence of G, or A, or an amino acid sequence having at least 65%, at least 70%, at least 75%, at least 80%, at least 85%, at least 90%, at least 95%, at least 99%, or 100% identity to amino acid sequence GSS or ASG, or an amino acid sequence having at least 65%, at least 70%, at least 75%, at least 80%, at least 85%, at least 90%, at least 95%, at least 99%, or 100% identity to any one of SEQ ID NOs: 333-373 or 967-971. In some aspects, L3 comprises an amino acid sequence having at least 65%, at least 70%, at least 75%, at least 80%, at least 85%, at least 90%, at least 95%, at least 99%, or 100% identity to any one of SEQ ID NOs: 333-345 or 967-971. In some aspects, L3 comprises 0 amino acids (i.e., L3 is not present).

[4102] In some aspects, L4 comprises an amino acid sequence of G, or A, or an amino acid sequence having at least 65%, at least 70%, at least 75%, at least 80%, at least 85%, at least 90%, at least 95%, at least 99%, or 100% identity to amino acid sequence GSS or ASG, or an amino acid sequence having at least 65%, at least 70%, at least 75%, at least 80%, at least 85%, at least 90%, at least 95%, at least 99%, or 100% identity to any one of SEQ ID NOs: 333-373 or 967-971. In some aspects, L4 comprises an amino acid sequence having at least 65%, at least 70%, at least 75%, at least 80%, at least 85%, at least 90%, at least 95%, at least 99%, or 100% identity to any one of SEQ ID NOs: 333-345 or 967-971. In some aspects, L4 comprises 0 amino acids (i.e., L4 is not present).

[4103] In some aspects, L5 comprises an amino acid sequence of G, or A, or an amino acid sequence having at least 65%, at least 70%, at least 75%, at least 80%, at least 85%, at least 90%, at least 95%, at least 99%, or 100% identity to amino acid sequence GSS or ASG, or an amino acid sequence having at least 65%, at least 70%, at least 75%, at least 80%, at least 85%, at least 90%, at least 95%, at least 99%, or 100% identity to any one of SEQ ID NOs: 333-373 or 967-971. In some aspects, L5 comprises an amino acid sequence having at least 65%, at least 70%, at least 75%, at least 80%, at least 85%, at least 90%, at least 95%, at least 99%, or 100% identity to any one of SEQ ID NOs: 333-345 or 967-971. In some aspects, L5 comprises 0 amino acids (i.e., L5 is not present).

[4104] In some aspects, L6 comprises an amino acid sequence of G, or A, or an amino acid sequence having at least 65%, at least 70%, at least 75%, at least 80%, at least 85%, at least 90%, at least 95%, at least 99%, or 100% identity to amino acid sequence GSS or ASG, or an amino acid sequence having at least 65%, at least 70%, at least 75%, at least 80%, at least 85%, at least 90%, at least 95%, at least 99%, or 100% identity to any one of SEQ ID NOs: 333-373 or 967-971. In some aspects, L6 comprises an amino acid sequence having at least 65%, at least 70%, at least 75%, at least 80%, at least 85%, at least 90%, at least 95%, at least 99%, or 100% identity to any one of SEQ ID NOs: 333-345 or 967-971. In some aspects, L6 comprises 0 amino acids (i.e., L6 is not present).

[4105] In some aspects, L7 comprises an amino acid sequence of G, or A, or an amino acid sequence having at least 65%, at least 70%, at least 75%, at least 80%, at least 85%, at least 90%, at least 95%, at least 99%, or 100% identity to amino acid sequence GSS or ASG, or an amino acid sequence having at least 65%, at least 70%, at least 75%, at least 80%, at least 85%, at least 90%, at least 95%, at least 99%, or 100% identity to any one of SEQ ID NOs: 333-373 or 967-971. In some aspects, L7 comprises an amino acid sequence having at least 65%, at least 70%, at least 75%, at least 80%, at least 85%, at least 90%, at least 95%, at least 99%, or 100% identity to any one of SEQ ID NOs: 333-345 or 967-971. In some aspects, L7 comprises 0 amino acids (i.e., L7 is not present).

[4106] In some aspects, L8 comprises an amino acid sequence of G, or A, or an amino acid sequence having at least 65%, at least 70%, at least 75%, at least 80%, at least 85%, at least 90%, at least 95%, at least 99%, or 100% identity to amino acid sequence GSS or ASG, or an amino acid sequence having at least 65%, at least 70%, at least 75%, at least 80%, at least 85%, at least 90%, at least 95%, at least 99%, or 100% identity to any one of SEQ ID NOs: 333-373 or 967-971. In some aspects, L8 comprises an amino acid sequence having at least 65%, at least 70%, at least 75%, at least 80%, at least 85%, at least 90%, at least 95%, at least 99%, or 100% identity to any one of SEQ ID NOs: 333-345 or 967-971. In some aspects, L8 comprises 0 amino acids (i.e., L8 is not present).

[4107] In some aspects, L9 comprises an amino acid sequence of G, or A, or an amino acid sequence having at least 65%, at least 70%, at least 75%, at least 80%, at least 85%, at least 90%, at least 95%, at least 99%, or 100% identity to amino acid sequence GSS or ASG, or an amino acid sequence having at least 65%, at least 70%, at least 75%, at least 80%, at least 85%, at least 90%, at least 95%, at least 99%, or 100% identity to any one of SEQ ID NOs: 333-373 or 967-971. In some aspects, L9 comprises an amino acid sequence having at least 65%, at least 70%, at least 75%, at least 80%, at least 85%, at least 90%, at least 95%, at least 99%, or 100% identity to any one of SEQ ID NOs: 333-345 or 967-971. In some aspects, L9 comprises 0 amino acids (i.e., L9 is not present).

[4108] In some aspects, L10 comprises an amino acid sequence of G, or A, or an amino acid sequence having at least 65%, at least 70%, at least 75%, at least 80%, at least 85%, at least 90%, at least 95%, at least 99%, or 100% identity to amino acid sequence GSS or ASG, or an amino acid sequence having at least 65%, at least 70%, at least 75%, at least 80%, at least 85%, at least 90%, at least 95%, at least 99%, or 100% identity to any one of SEQ ID NOs: 333-373 or 967-971. In some aspects, L10 comprises an amino acid sequence having at least 65%, at least 70%, at least 75%, at least 80%, at least 85%, at least 90%, at least 95%, at least 99%, or 100% identity to any one of SEQ ID NOs: 333-345 or 967-971. In some aspects, L10 comprises 0 amino acids (i.e., L10 is not present).

[4109] In some aspects, L11 comprises an amino acid sequence of G, or A, or an amino acid sequence having at least 65%, at least 70%, at least 75%, at least 80%, at least 85%, at least 90%, at least 95%, at least 99%, or 100% identity to amino acid sequence GSS or ASG, or an amino acid sequence having at least 65%, at least 70%, at least 75%, at least 80%, at least 85%, at least 90%, at least 95%, at least 99%, or 100% identity to any one of SEQ ID NOs: 333-373 or 967-971. In some aspects, L10 comprises an amino acid sequence having at least 65%, at least 70%, at least 75%, at least 80%, at least 85%, at least 90%, at least 95%, at least 99%, or 100% identity to any one of SEQ ID NOs: 333-345 or 967-971. In some aspects, L10 comprises 0 amino acids (i.e., L11 is not present).

[4110] In some aspects, L12 comprises an amino acid sequence of G, or A, or an amino acid sequence having at least 65%, at least 70%, at least 75%, at least 80%, at least 85%, at least 90%, at least 95%, at least 99%, or 100% identity to amino acid sequence GSS or ASG, or an amino acid sequence having at least 65%, at least 70%, at least 75%, at least 80%, at least 85%, at least 90%, at least 95%, at least 99%, or 100% identity to any one of SEQ ID NOs: 333-373 or 967-971. In some aspects, L10 comprises an amino acid sequence having at least 65%, at least 70%, at least 75%, at least 80%, at least 85%, at least 90%, at least 95%, at least 99%, or 100% identity to any one of SEQ ID NOs: 333-345 or 967-971. In some aspects, L10 comprises 0 amino acids (i.e., L12 is not present).

[4111] In some aspects, the SARS-CoV-2 variant of the SARS-CoV-2 protein (e.g., SARS-CoV-2 spike protein) to which an antigen binding polypeptide or polypeptide complex provided herein specifically binds is a variant of concern (VOC). In some aspects, the SARS-CoV-2 variant of the SARS-CoV-2 protein (e.g., SARS-CoV-2 spike protein) to which an antigen binding polypeptide or polypeptide complex provided herein specifically binds is a variant under monitoring (e.g., variant with genetic changes suspected to affect virus characteristics and some indication of posing a future risk, but further studies are needed).

[4112] In some aspects, the SARS-CoV-2 variant of the SARS-CoV-2 protein (e.g., SARS-CoV-2 spike protein) to which an antigen binding polypeptide or polypeptide complex provided herein specifically binds is a the original Wuhan strain (WA1), a D614G spike protein mutant (e.g., D614G), an Alpha variant (e.g., B.1.1.7), a Beta variant (e.g., B.1.351), a Gamma variant (e.g., P.1), a Delta variant (e.g., B.1.617.2 or AY.1), a Kappa variant (e.g., B.1.617.1), an Iota variant (e.g., B.1.526), a Lambda variant (e.g., C.37), an Epsilon variant (e.g., B.1.429, B.1.427 or CAL.20C), a Mu variant (e.g., B.1.621), a Theta variant (e.g., P.3), a Zeta variant (e.g., P.2), an Eta variant (e.g., B.1.525), a R.1 variant, a C.1.2 variant, or an Omicron variant (e.g., B.1.1.529, BA.1, BA.2, BA.2.12.1, BA.4, BA.4/5, BA.5, BQ.1, BQ.1.1, BA.2.75, BA.2.75.2, BA.4.6, BQ.1.1, BJ.1, XBB, XBB1.5, BF.7, CH.1.1, BA.2.86, EG.5, JN.1, JD.1, EG.5.1, FL.1.5.1, HK.3, HV.1, JD.1.1, JF.1, XBB.1, XBB.1.16, XBB.1.16.6, or XBB.2.3.2), or a combination or variant thereof. In some aspects, the SARS-CoV-2 virus is JN.1.13.1, KP.2, JN.1.16, JN.1.16.1, JN.1.13, JN.1.18, KP.2.3, LB.1, KP.3, KP.3.1.1, or a combination or variant thereof.

[4113] In some aspects, the Omicron variant is B.1.1.529, BA.1, BA.2, BA.2.12.1, BA.4, BA.4/5, BA.5, BQ.1, BQ.1.1, BA.2.75, BA.2.75.2, BA.4.6, BQ.1.1, BJ.1, XBB, XBB1.5, BF.7, CH.1.1, BA.2.86, EG.5, JN.1, JD.1, EG.5.1, FL.1.5.1, HK.3, HV.1, JD.1.1, JF.1, XBB.1, XBB.1.16, XBB.1.16.6, XBB.2.3.2, JN.1.13.1, KP.2, JN.1.16, JN.1.16.1, JN.1.13, JN.1.18, KP.2.3, LB.1, KP.3, KP.3.1.1, or a combination or variant thereof.

[4114] In some aspects, the SARS-CoV-2 variant of the SARS-CoV-2 protein (e.g., SARS-CoV-2 spike protein) to which an antigen binding polypeptide or polypeptide complex provided herein specifically binds is a AZ.5, C.1.2, B.1.617.1, B.1.526, B.1.525, B.1.630, B.1.640, AV.1, AT.1, R.1, B.1.466.2, B.1.1.519, C.36.3, B.1.214.2, B.1.427, B.1.429, B.1.1.523, B.1.619, B.1.620, B.1.1.207, B.1.1.317, B.1.616, B.1.618, or B.1.640.2 variant, or a combination thereof.

[4115] In other aspects, the SARS-CoV-2 variant of the SARS-CoV-2 protein (e.g., SARS-CoV-2 spike protein) to which an antigen binding polypeptide or polypeptide complex provided herein specifically binds is an Alpha (B.1.1.7), Beta (B.1.351), Gamma (P.1), Delta (B.1.617.2), or Omicron (B.1.1.529) variant, or a combination thereof.

[4116] In some aspects, the SARS-CoV-2 spike protein has an amino acid mutation of one or more of the following: F2L, L5F, L5I, V6F, L7V, P9L, S12C, S13I, Q14H, C15F, N17K, L18F, T20I, T22N, T22A, T22I, Q23K, P25S, A27S, A27V, T29I, F32L, R34C, H49Y, S50L, T51I, Q52L, Q52H, L54F, L54W, F55I, P57L, H69Y, S71F, G72V, T73I, G75V, T76I, F79L, D80N, D80Y, N87Y, D88N, D88E, D88Y, D88A, V90F, T95A, T95I, E96D, K97T, S98F, R102I, I105L, D111N, K113R, L118F, V130A, E132D, C136R, D138H, L141-, L141F, G142V, G142-, V143F, V143-, Y144-, Y144V, Y145H, H146Y, K147E, N148S, S151I, W152C, M153T, M153V, M153I, E154V, F157L, R158S, L176F, M177I, D178N, G181V, L189F, R190K, I203M, I210-, R214L, D215Y, D215G, L216F, Q218L, F220L, S221L, A222V, A222P, D228H, L229F, Q239R, T240I, L242F, A243S, A243V, H245R, H245Y, R246K, D253Y, D253G, S254F, S256L, W258L, G261V, G261R, A262S, Y265C, V267L, R273S, E281Q, A288S, L293V, D294E, P295S, E298G, T307I, V308L, E309Q, Q314K, Q314L, Q314H, T315I, Q321L, T323I, P330S, A344S, T345S, A348T, A348S, N354K, R357K, V367F, V382L, P384L, V395I, R403K, V407I, A411S, G413R, K417T, N439K, N440K, L441I, G446V, R457K, K458Q, G476S, S477N, P479L, V483A, E484Q, E484K, Q493L, S494P, L452R, Y453F, Y508H, N501Y, H519Q, A520S, A522V, K529E, G545S, T547I, L552F, T553I, E554D, K558N, A570V, T572I, D574Y, E583D, I584V, S596I, I598V, N603H, Q613H, D614G, V615F, T618A, P621S, V622F, V622I, V622A, A623S, H625Y, A626V, P631S, W633R, G639V, S640F, A647S, A647V, E654Z, E654K, H655Y, N658Y, A668S, A672V, Q675R, Q675H, T676S, T676I, Q677H, Q677R, T678I, P681L, P681R, P681H, R682W, A684S, A684T, V687L, A688V, A688S, S689I, S691F, S698L, N703D, S704L, V705F, A706V, I714M, T716I, I720V, T724A, M731I, T732A, T732I, G744V, D745G, N751D, L754F, R765S, R765H, T768I, G769A, A771S, T778I, Q779H, E780Q, A783S, D808V, D808G, P809S, I818V, L822F, D830H, D830Y, Q836P, Q836L, G838D, A845S, A845D, A845V, A845D, A845S, A846V, R847I, K854R, N856S, T859I, D867N, A879V, A879S, F888L, A893E, A893V, E918V, L922F, A924S, A924V, S929I, D936H, D936Y, L938F, S939F, T941I, G946V, A958S, N969S, L981F, T1006I, V1008T, T1009I, A1016S, A1020V, F1052L, P1053T, L1063F, V1065L, A1070V, Q1071H, E1072V, K1073N, A1078V, A1078S, G1085R, K1086N, R1091L, H1101Y, V1104L, P1112L, D1118Y, T1120I, V1122L, S1123P, G1124V, G1124C, V1129A, I1130M, T1136I, D1139H, L1141F, D1146H, S1147L, D1153Y, P1162Q, P1162S, P1162Q, P1162S, D1163Y, G1167V, D1168H, V1176F, N1187Y, K1191N, N1192T, E1195Q, L1203F, K1205N, E1207A, I219V, G1219S, I1221T, V1228L, M1229I, V1230L, T1231I, T1231A, C1235F, M1237I, M1237V, M1237T, T1238I, K1245N, C1247F, G1251R, D1259H, S1261F, P1263L, V1264L, a deletion of residues 69 and 70, a deletion of residues 246-252 and D253N, or a combination thereof.

### Modifications

[4117] In some aspects, an antigen binding polypeptide or polypeptide complex (e.g., an antibody or antigen binding fragment thereof) provided herein comprises an effector function mutation or half-life extension mutation.

[4118] Effector functions are an important part of the humoral immune response and form a link between innate and adaptive immunity. Most effector functions are induced via the Fc region of an antibody, which can interact with complement proteins and specialized Fc receptors. As used herein, an “effector function mutation” or “Fc effector function mutation” refer to a change in the amino acid sequence, typically in the Fc region, which can increase or decrease effector function, for example, increase binding affinity of Fc for specific Fc receptors, or increase antibody-dependent cellular cytotoxicity (ADCC) activity.

[4119] “Half-life” of a pharmaceutically active substance is the time it takes for the amount of the substance, once administered to the body, to reduce by half. A “half-life extension mutation” of an antigen binding polypeptide or polypeptide complex provided herein refers to a change in the amino acid sequence, typically in the Fc region, which increases the half-life of the antigen binding polypeptide or polypeptide complex (e.g., by increasing Fc receptor binding affinity, slowing off-rate for Fc and Fc receptors, and/or increased sialylation).

[4120] Examples of Fc effector function mutations that decrease or knockout function include, but are not limited to, the following substitutions in the Fc region, based on the EU numbering scheme: (LA) L234A, L235A, (LS) M428L, N434S, P239A, N297A, or equivalent thereof, or a combination thereof.

[4121] Examples of Fc effector function mutations that increase function include, but are not limited to, the following substitutions in the Fc region, based on the EU numbering scheme: S298A/E333A/K334A, S239D/I332E, S239D/A330L/I332E, G236A/S239D/I332E, or equivalent thereof, or a combination thereof.

[4122] Additional examples of effector function mutations, half-life extension mutations and methods for incorporating the same into an amino acid sequence are known and described, for example, in Saunders, “Conceptual Approaches to Modulating Antibody Effector Functions and Circulation Half-Life.” Front. Immunol. Jun. 7, 2019.

[4123] In another aspect, an antigen binding polypeptide or polypeptide complex (e.g., an antibody or antigen binding fragment thereof) provided herein comprises one or more knob-into-hole modifications.

[4124] The term “knob-into-hole modification.” as used herein, refers to a genetic modification that directs the pairing of two polypeptides to promote heterodimerization. In one aspect, the modification introduces a protuberance (knob) into one polypeptide and a cavity (hole) into the other polypeptide at an interface in which the two polypeptides interact. In another aspect, a knob-into-hole modification can be created by introducing only a hole modification, for example, by replacing an amino acid residue with a smaller side chain than the original amino acid residue (e.g., a substitution of one or more serine, threonine, valine or alanine residues, or a combination thereof). In yet another aspect, a knob-into-hole modification can be created by introducing only a knob modification, for example, by replacing an amino acid residue with a larger side chain than the original amino acid residue (e.g., a substitution of one or more tryptophan or tyrosine residues, or a combination thereof).

[4125] In one aspect, the knob-into-hole modification is in the binding interface of two Fc regions, the binding interface of two CH2 regions, the binding interface of two CH3 regions, the binding interface of a CL region and a CH1 region, or the binding interface of a VH region and a VL region. Sec, e.g., U.S. Pub. No. 2007/0178552. Int'l Pub. No, WO 96/027011. Int'l Pub. No, WO 98/050431 and Zhu et al., Protein Science 6:781-788, 1987.

[4126] In one aspect, the antigen binding polypeptide or polypeptide complex comprises one, two, three, four, five, six, seven, eight, nine, ten, or more knob-into-hole modifications.

[4127] Knob-into-hole modifications are well known and can be incorporated into antigen binding polypeptides and polypeptide complexes provided herein using routine molecular biology and recombinant DNA techniques. See, e.g., U.S. Pub. No. 2003/0078385; Int'l Pub. No, WO 96/027011; Ridgway et al., Protein Eng., 9:617-621, 1996; and Merchant et al., Nat. Biotechnol., 16:677-681, 1998.

[4128] In one aspect, the knob-into-hole modification is an amino acid substitution. As used herein, such a substitution is described based on the EU numbering scheme of Kabat, which corresponds to the numbering in the Protein Data Bank (PDB).

[4129] In one aspect, the knob-into-hole modification is a knob substitution of S354C, T366W, or equivalent thereof, or a combination thereof based on the EU numbering scheme.

[4130] In one aspect, the knob-into-hole modification is a hole substitution of Y349C, T366S, L368A, Y407V, or equivalent thereof, or a combination thereof, based on the EU numbering scheme.

[4131] In another aspect, the knob-into-hole modifications are knob substitutions of S354C, T366W, or equivalent thereof, based on the EU numbering scheme.

[4132] In another aspect, the knob-into-hole modifications are hole substitutions of Y349C, T366S, L368A and Y407V, or equivalent thereof, based on the EU numbering scheme.

[4133] In another aspect, an antigen binding polypeptide complex is an IgG1 or IgG4 antibody or antigen binding fragment thereof and the knob-into-hole modifications are knob substitutions of S354C and T366W, or equivalent thereof, and/or hole substitutions of Y349C, T366S, L368A and Y407V, or equivalent thereof.

[4134] In one aspect, the antigen binding polypeptide complex is an IgG1 or IgG4 antibody or antigen binding fragment thereof and the knob-into-hole modifications are knob substitutions of S354C and T366W, or equivalent thereof.

[4135] In one aspect, the antigen binding polypeptide complex is an IgG1 or IgG4 antibody or antigen binding fragment thereof and the knob-into-hole modifications are hole substitutions of Y349C, T366S, L368A and Y407V, or equivalent thereof.

[4136] In one aspect, the antigen binding polypeptide complex is an IgG1 or IgG4 antibody or antigen binding fragment thereof and the knob-into-hole modifications are knob substitutions of S354C and T366W, or equivalent thereof, and hole substitutions of Y349C, T366S, L368A and Y407V, or equivalent thereof.

[4137] In one aspect, the antigen binding polypeptide complex is an IgG1 or IgG4 antibody or antigen binding fragment thereof and the Fc region comprises a knob-into-hole modification comprising knob substitutions of S354C and T366W, or equivalent thereof, and/or hole substitutions of Y349C, T366S, L368A and Y407V, or equivalent thereof, and/or a half-life extension amino acid substitution comprising: a LA (M428L and N434A, or equivalent thereof, based on the EU numbering scheme) amino acid substitution, a LS (M428L and N434S, or equivalent thereof, based on the EU numbering scheme) amino acid substitution. L234F and L235E, or equivalent thereof (based on the EU numbering scheme) amino acid substitutions, a TM (L234F, L235E, and P331S, or equivalent thereof, based on the EU numbering scheme) amino acid substitution, a YTE (M252Y, S254T, and T256E, or equivalent thereof, based on the EU numbering scheme) amino acid substitution, or any combination thereof.

[4138] In one aspect, the antigen binding polypeptide complex is an IgG1 or IgG4 antibody or antigen binding fragment thereof and the Fc region comprises knob substitutions of S354C and T366W, or equivalent thereof, and a half-life extension amino acid substitution comprising: a LA (M428L and N434A, or equivalent thereof, based on the EU numbering scheme) amino acid substitution, a LS (M428L and N434S, or equivalent thereof, based on the EU numbering scheme) amino acid substitution. L234F and L235E, or equivalent thereof (based on the EU numbering scheme) amino acid substitutions, a TM (L234F, L235E, and P331S, or equivalent thereof, based on the EU numbering scheme) amino acid substitution, a YTE (M252Y, S254T, and T256E, or equivalent thereof, based on the EU numbering scheme) amino acid substitution, or any combination thereof.

[4139] In one aspect, the antigen binding polypeptide complex is an IgG1 or IgG4 antibody or antigen binding fragment thereof and the Fc region comprises hole substitutions of Y349C, T366S, L368A and Y407V, or equivalent thereof, and a half-life extension amino acid substitution comprising: a LA (M428L and N434A, or equivalent thereof, based on the EU numbering scheme) amino acid substitution, a LS (M428L and N434S, or equivalent thereof, based on the EU numbering scheme) amino acid substitution. L234F and L235E, or equivalent thereof (based on the EU numbering scheme) amino acid substitutions, a TM (L234F, L235E, and P331S, or equivalent thereof, based on the EU numbering scheme) amino acid substitution, a YTE (M252Y, S254T, and T256E, or equivalent thereof, based on the EU numbering scheme) amino acid substitution, or any combination thereof.

### Detectable Labels

[4140] In some aspects, an antigen binding polypeptide or polypeptide complex (e.g., an antibody or antigen binding fragment thereof) provided herein comprises one or more detectable labels. An antigen binding polypeptide or polypeptide complex (e.g., an antibody or antigen binding fragment thereof) containing a detectable label is useful in therapeutic, diagnostic, imaging (e.g., radioimaging), or basic research applications.

[4141] In one aspect, the detectable label is a radioactive label. Examples of a radioactive label include, but are not limited to, the isotopes ³H, ¹⁴C, ³²P, ³⁵S, ³⁶Cl, ⁵¹Cr, ⁵⁷Co, ⁵⁸Co, ⁵⁹Fe, ⁹⁰Y, ¹²¹I, ¹²⁴I, ¹²⁵I, ¹³¹I, ¹¹¹In, ¹¹⁷Lu, ²¹¹At, ¹⁹⁸Au, ⁶⁷Cu, ²²⁵Ac, ²¹³Bi, ⁹⁹Tc, ¹⁸⁶Re and ⁸⁹Zr.

[4142] In another aspect, the detectable label is a chemiluminescent label, fluorescent label, enzyme, biotin, or a combination thereof.

[4143] In another aspect, the detectable label is a peptide tag. In one aspect, the peptide tag is located at or near the N-terminus of the polypeptide or polypeptide complex. In another aspect, the peptide tag is located or near at the C-terminus of the polypeptide or polypeptide complex. In another aspect, the peptide tag is an affinity tag or fusion tag.

[4144] In another aspect, the detectable label is a polyhistidine tag, polyarginine tag, glutathione-S-transferase (GST), maltose binding protein (MBP), chitin binding protein (CBP), Strep-tag, thioredoxin (TRX), poly (NANP), FLAG tag, ALFA-tag, V5-tag. Myc-tag, hemagglutinin (HA) tag, Spot tag, T7 tag, NE tag, or green fluorescence protein (GFP), or a combination thereof. In one aspect, the polyhistidine tag consists of from about 4 to about 10 histidine residues. In one aspect, the poly histidine tag consists of about 4, about 5, about 6, about 7, about 8, about 9, or about 10 histidine residues.

[4145] Additional examples of detectable labels and methods for introducing detectable labels into a polypeptide are known and include routine chemical, molecular biology and recombinant DNA techniques. Sec, e.g., Hnatowich et al., Science, 220(4597):613-615, 1983; Yao et al., Int. J. Mol. Sci., 17(2):194, 2016; Kimple et al., Curr. Protoc. Protein Sci., 73; Unit 9.9, 2013; Sambrook J. Fritsch E F. Molecular Cloning: A Laboratory Manual. Cold Spring Harbor Laboratory Press; Cold Spring Harbor, N.Y.: 1989; Molecular Cell Biology, 4^{th} edition, Section 3.5, Purifying, Detecting and Characterizing Proteins; and Mahmoodi et al., Cogent Biology, 5(1):DOI: 10/1080/23312025.2019.1665406.

### Polypeptides, Polynucleotides, Vectors, Cells, and Protein Production Methods

[4146] In some aspects, a polynucleotide encoding an antigen binding polypeptide or antigen polypeptide complex (e.g., an antibody or antigen binding fragment thereof) is provided herein.

[4147] In other aspects, a polypeptide provided herein comprises one or more amino acid sequences having at least 65%, at least 70%, at least 75%, at least 80%, at least 85%, at least 90%, at least 95%, at least 99%, or 100% identity to one or more of SEQ ID NOs: 381-502, 632-633, 720-721, 724-725, 728-729, 732-733, 736-737, 740-741, 744-745, 748-749, 752-753, 760-761, 887-926, 972-977, 984-985, 989-990, 993-994, 997-998, 1001-1002, 1005-1006, 1009-1010, 1013-1014, 1017-1018, 1021-1022, 1025-1026, 1029-1030, 1033-1034, 1037-1038, and 1041-1042.

[4148] In other aspects, a polypeptide provided herein comprises one or more amino acid sequences encoded by one or more polynucleotides having at least 65%, at least 70%, at least 75%, at least 80%, at least 85%, at least 90%, at least 95%, at least 99%, or 100% identity to one or more of SEQ ID NOs: 503-625, 718-719, 722-723, 726-727, 730-731, 734-735, 738-739, 742-743, 746-747, 750-751, 754-755, 762-763, 927-966, 978-983, 986-987, 991-992, 995-996, 999-1000, 1003-1004, 1007-1008, 1011-1012, 1015-1016, 1019-1020, 1023-1024, 1027-1028, 1031-1032, 1035-1036, 1039-1040, and 1043-1044.

[4149] In some aspects, the polypeptides provided herein comprise a CL and a CH1. In some aspects, a polypeptide provided herein has an improved isoelectric point compared to a same polypeptide not comprising a CL and a CH1. It is to be understood that “a same polypeptide not comprising a CL and a CH1” refers to a polypeptide having a same amino acid sequence as the reference polypeptide exception made for the CL and the CH1 being absent from the “same polypeptide not comprising a CL and a CH1.” For example, a reference polypeptide (polypeptide R) may comprise an amino acid sequence represented by the formula VL1-CL-VL2-VH2-VH1-CH1. “a same polypeptide not comprising a CL and a CH1” (polypeptide R′) it is to be understood as comprising an amino acid sequence that is represented by the formula VL1-VL2-VH2-VH1, wherein the VL1, the VL2, the VH1, and the VH1 in the polypeptide R comprise an amino acid sequence identical to the amino acid sequence comprised in the VL1, the VL2, the VH1, and the VH1 comprised in the polypeptide R′.

[4150] Without wishing to be bound to any particular theory, it is believed that the isoelectric point (pI) corresponds to the pH at which the antibody has no electrical charge. If the pH of the surrounding environment is below the antibody's pI, then the antibody molecule carries a net positive charge. If the pH of the surrounding environment is above the antibody's pI, then the antibody molecule carries a net negative charge. The pI of an antibody can influence its pharmacokinetics properties. The surface of most cells is negatively charged, thus antibodies (or antigen binding fragments thereof) having a net positive charge may possess advantageous pharmacokinetics properties. Increased net positive charge can also result in increased blood clearance and increased tissue retention with shorter half-life, whereas increased net negative charge can results in decreased tissue uptake and longer half-life. For an antibody to be positively charged the environmental pH needs to be below the pI of the antibody, and for an antibody to be negatively charged the environmental pH needs to be above the pI of the antibody. Physiological pH is of about 7-7.5 (generally between 7.35 and 7.45).

[4151] In other aspects, provided herein is a vector comprising a polynucleotide provided herein.

[4152] In yet other aspects, provided herein is a host cell comprising a polynucleotide or vector provided herein.

[4153] As used herein, the term “host cell” can be any type of cell, e.g., a primary cell, a cell in culture, a cell from a cell line, or a cell comprised in an organism. In some aspects, the term “host cell” refers to a cell containing a foreign nucleic acid molecule (e.g., a cell transformed, transfected, or transduced with a polynucleotide (e.g., DNA or mRNA)) as well as the progeny or potential progeny of such a cell. Progeny of such a cell may not be identical to the parent cell, e.g., due to mutations or environmental influences that may occur in succeeding generations or integration of the nucleic acid molecule into the host cell genome.

[4154] Methods which are well known to those skilled in the art can be used to construct vectors encoding antigen binding polypeptides and polypeptide complexes (e.g., CDR, VH, VL, heavy chain and/or light chain coding sequences and appropriate transcriptional and translational control signals). These methods include, for example, in vitro recombinant DNA techniques, synthetic techniques, and in vivo genetic engineering (e.g., transgenesis).

[4155] A vector can be transformed, transferred, or transduced into a host cell by conventional techniques and the resulting cell can then be cultured by conventional techniques to produce an antigen binding polypeptide or antigen binding polypeptide complex comprising, e.g., six CDRs, VH, VL, VH and VL, heavy chain, light chain, or heavy and light chain, or a domain thereof (e.g., one or more CDRs, VH, VL, VH and VL, heavy chain, or light chain). Thus, provided herein are host cells containing a polynucleotide encoding an antigen binding polypeptide or polypeptide complex comprising, e.g., comprising six CDRs, VH, VL, VH and VL, heavy chain, light chain, or heavy and light chain, or a domain thereof (e.g., one or more CDRs, VH, VL, VH and VL, heavy chain, or light chain), operably linked to a promoter for expression of such sequences in the host cell.

[4156] In some aspects, vectors encoding both heavy and light chains, or a domain thereof, individually, can be co-expressed in the host cell for expression. In some aspects, a host cell contains a vector comprising a polynucleotide encoding both a heavy chain and light chain, or a domain thereof. In some aspects, a host cell contains two different vectors, a first vector comprising a polynucleotide encoding a heavy chain or a domain thereof, and a second vector comprising a polynucleotide encoding a light chain or a domain thereof. In some aspects, a first host cell comprises a first vector comprising a polynucleotide encoding a heavy chain or a domain thereof, and a second host cell comprises a second vector comprising a polynucleotide encoding a light chain or a domain thereof. In some aspects, provided herein is a population of host cells comprising such a first host cell and such a second host cell.

[4157] In some aspects, provided herein is a population of vectors comprising a first vector comprising a polynucleotide encoding a light chain or domain thereof, and a second vector comprising a polynucleotide encoding a heavy chain or domain thereof. Alternatively, a single vector can be used which encodes, and is capable of expressing, both heavy and light chain polypeptides or a domain thereof.

[4158] A variety of host-vector systems can be utilized to express the polypeptides and polypeptide complexes provided herein. Such host-vector systems represent vehicles by which the coding sequences of interest can be produced and subsequently purified, but also represent cells which can, when transformed or transfected with the appropriate nucleotide coding sequences, express a polypeptide or polypeptide complex provided herein in situ. These include but are not limited to microorganisms such as bacteria (e.g., E. coli and B. subtilis) transformed with recombinant bacteriophage DNA, plasmid DNA or cosmid DNA expression vectors containing antibody or antigen binding fragment thereof coding sequences; yeast (e.g., Saccharomyces pichia) transformed with recombinant yeast expression vectors containing antibody or antigen binding fragment thereof coding sequences; insect cell systems infected with recombinant virus expression vectors (e.g., baculovirus) containing antibody or antigen binding fragment thereof coding sequences; plant cell systems (e.g., green algae such as Chlamydomonas reinhardtii) infected with recombinant virus expression vectors (e.g., cauliflower mosaic virus. CaMV; tobacco mosaic virus, TMV) or transformed with recombinant plasmid expression vectors (e.g., Ti plasmid) containing antibody or antigen binding fragment thereof coding sequences; or mammalian cell systems (e.g., COS (e.g., COSI or COS), CHO, BHK, MDCK, HEK 293, NS0, PER.C6, VERO, CRL7030, HsS78Bst, HeLa, and NIH 3T3, HEK-293T, HepG2, SP210, R1.1, B-W, L-M, BSC1, BSC40), YB/20, and BMT10) cells) harboring recombinant expression constructs containing promoters derived from the genome of mammalian cells (e.g., metallothionein promoter) or from mammalian viruses (e.g., the adenovirus late promoter; the vaccinia virus 7.5K promoter). In some aspects, cells for expressing polypeptide or polypeptide complexes provided herein are CHO cells, for example CHO cells from the CHO GS System™ (Lonza). In some aspects, cells for expressing the polypeptides or polypeptide complexes provided herein are human cells, e.g., human cell lines. In some aspects, a mammalian expression vector is pOptiVEC™ or pcDNA3.3. In some aspects, bacterial cells such as Escherichia coli, or eukaryotic cells (e.g., mammalian cells) are used for the expression of recombinant polypeptides. For example, mammalian cells such as Chinese hamster ovary (CHO) cells in conjunction with a vector such as the major intermediate early gene promoter element from human cytomegalovirus is an effective expression system for polypeptides (Foecking M K & Hofstetter H (1986) Gene 45:101-105; and Cockett M I et al., (1990) Biotechnology 8:662-667). In some aspects, the polypeptides or polypeptide complexes provided herein are produced by HEK-293T cells. In addition, a host cell strain can be chosen which modulates the expression of the inserted sequences, or modifies and processes the gene product in the specific fashion desired. Such modifications (e.g., glycosylation) and processing (e.g., cleavage) of protein products can contribute to the function of the protein. To this end, eukaryotic host cells which possess the cellular machinery for proper processing of the primary transcript, glycosylation, and phosphorylation of the gene product can be used. Such mammalian host cells include but are not limited to CHO, VERO, BHK. Hela, MDCK, HEK 293, NIH 3T3, W138, BT483, Hs578T, HTB2, BT20 and T47D, NS0 (a murine myeloma cell line that does not endogenously produce any immunoglobulin chains), CRL7030, COS (e.g., COSI or COS), PER.C6, VERO, HsS78Bst, HEK-293T, HepG2, SP210, R1.1, B-W, L-M, BSC1, BSC40, YB/20, BMT10) and HsS78Bst cells.

[4159] Once a polypeptide or polypeptide complex provided herein has been produced by recombinant expression, it can be purified by any method known in the art for purification of a protein or immunoglobulin molecule, for example, by chromatography (e.g., ion exchange, affinity, particularly by affinity for the specific antigen after Protein A, and size exclusion chromatography), centrifugation, differential solubility, or by any other standard technique for the purification of proteins. Further, the polypeptides or polypeptide complexes provided herein can be fused to heterologous polypeptide sequences provided herein (e.g., peptide tags) or otherwise known in the art to facilitate purification.

[4160] In some aspects, a polypeptide or polypeptide complex provided herein is isolated or purified. Generally, an isolated polypeptide or polypeptide complex is one that is substantially free of other polypeptides or polypeptide complexes with different antigenic specificities. For example, in some aspects, a preparation of a polypeptide or polypeptide complex provided herein is substantially free of cellular material and/or chemical precursors.

[4161] A vector can be transformed, transferred, or transduced into a host cell comprised in an organism by conventional techniques. The resulting host cell comprised in an organism can produce an antigen binding polypeptide or antigen binding polypeptide complex comprising, e.g., six CDRs, VH, VL, VH and VL, heavy chain, light chain, or heavy and light chain, or a domain thereof (e.g., one or more CDRs, VH, VL, VH and VL, heavy chain, or light chain).

[4162] Additionally, the resulting host cell comprised in an organism, as well as a host cell not comprised in an organism (e.g., a cell maintained in culture in vitro), can transmit copies of the nucleotide sequence comprised in the vector to its progeny. A nucleic acid sequence comprised in the vector can integrate in the genome of the host cell, replicate with the genome of the host cell, and thus be transmitted to the progeny of the host cell. A nucleic acid sequence comprised in the vector can also not integrate into the genome of the host cell, but instead can be maintained extrachromosomally in the host cell. In this case the vector may further comprise sequence elements that allow the nucleotide sequence comprised in the vector to self replicate. Self-replicated copies of the nucleotide sequence comprised in the vector can then be transmitted to the progeny of the host cell.

[4163] A vector disclosed herein can be a DNA vector, an RNA vector (e.g., mRNA), or a combination thereof, DNA and/or RNA vectors can be introduced into isolated host cells (e.g., cell in culture in vitro) or into host cells comprised in an organism.

[4164] In some aspects, the vectors provided herein are RNA vectors (e.g., mRNA vectors).

[4165] In some aspects, the present invention comprises a nucleic acid encoding an antigen binding polypeptide or antigen binding polypeptide complex for in vivo administration. In some aspects, the nucleic acid encoding an antigen binding polypeptide or antigen binding polypeptide complex is a stabilized nucleic acid selected from a stabilized mRNA.

[4166] In some aspects, the present disclosure relates to one or more mRNA that encodes an antigen binding polypeptide or antigen binding polypeptide complex (e.g., antibody or antigen binding fragment thereof). Examples of such mRNA include, but are not limited to, a sequence at least 65%, at least 70%, at least 75%, at least 80%, at least 85%, at least 90%, at least 95%, at least 99%, or 100% identical to any one of SEQ ID NOs: 503-625, 718-719, 722-723, 726-727, 730-731, 734-735, 738-739, 742-743, 746-747, 750-751, 754-755, 762-763, 927-966, 978-983, 986-987, 991-992, 995-996, 999-1000, 1003-1004, 1007-1008, 1011-1012, 1015-1016, 1019-1020, 1023-1024, 1027-1028, 1031-1032, 1035-1036, 1039-1040, and 1043-1044, wherein in any one of SEQ ID NOs: 503-625, 718-719, 722-723, 726-727, 730-731, 734-735, 738-739, 742-743, 746-747, 750-751, 754-755, 762-763, 927-966, 978-983, 986-987, 991-992, 995-996, 999-1000, 1003-1004, 1007-1008, 1011-1012, 1015-1016, 1019-1020, 1023-1024, 1027-1028, 1031-1032, 1035-1036, 1039-1040, and 1043-1044, wherein “T” is substituted with “U.”

[4167] In some aspects, a nucleic acid encoding an antigen binding polypeptide or antigen binding polypeptide complex comprises said nucleic acid or mRNA and a carrier to form a pharmaceutical composition.

[4168] The term “mRNA.” as used herein, refers to a single stranded RNA that encodes the amino acid sequence of one or more polypeptides (e.g., an antigen binding polypeptide or antigen binding polypeptide complex comprising, e.g., six CDRs, VH, VL, VH and VL, heavy chain, light chain, or heavy and light chain, or a domain thereof (e.g., one or more CDRs, VH, VL, VH and VL, heavy chain, or light chain)). The term “mRNA.” as used herein includes in vitro transcribed RNA (IVT RNA) or synthetic RNA. An mRNA molecule may also contain a 5′ untranslated region (5′-UTR), and/or a 3′ untranslated region (3′-UTR). In some aspects, the RNA is produced by in vitro transcription or chemical synthesis. In one aspect, the mRNA is produced by in vitro transcription using a DNA template where DNA refers to a nucleic acid that contains deoxyribonucleotides.

[4169] As used herein, the term “transcription” relates to a process, wherein the genetic code in a DNA sequence is transcribed into RNA. Subsequently, the RNA may be translated into peptide or protein. According to the present invention, the term “transcription” comprises “in vitro transcription”, wherein the term “in vitro transcription” relates to a process wherein RNA, in particular mRNA, is in vitro synthesized in a cell-free system, preferably using appropriate cell extracts, and/or isolated nucleotides, enzymes, co-enzymes, and co-factors in the appropriate reaction conditions (e.g., controlled temperature, controlled pH). Preferably, cloning vectors are applied for the generation of transcripts. These cloning vectors are generally designated as transcription vectors and are according to the present invention encompassed by the term “vector”. According to the present invention, the mRNA used in the present invention preferably is in vitro transcribed mRNA (IVT-mRNA) and may be obtained by in vitro transcription of an appropriate DNA template. The promoter for controlling transcription can be any promoter for any RNA polymerase. Particular examples of RNA polymerases are the T7, T3, and SP6 RNA polymerases. Preferably, the in vitro transcription according to the invention is controlled by a T7 or SP6 promoter. A DNA template for in vitro transcription may be obtained by cloning of a nucleic acid (e.g., cDNA) and introducing it into an appropriate vector for in vitro transcription. The nucleic acid cloned and inserted into the appropriate vector may be obtained by reverse transcription of RNA, directly isolated from the source organism, amplified by PCR, synthesized in vitro, or any combination thereof, or obtained and/or manipulated by any means known in the art. In certain aspects of the present disclosure, the RNA is “replicon RNA” or simply a “replicon”, in particular “self-replicating RNA” or “self-amplifying RNA”.

[4170] In some aspects, the mRNAs provided herein contain structural elements optimized for maximal efficacy of the mRNA with respect to stability and translational efficiency (5′-cap, 5′-UTR, 3′-UTR, poly(A) sequence). In some aspects, the messenger RNA (mRNA) molecule provided herein further comprises (i) at least one 5′ untranslated region (5′-UTR), and/or (ii) at least one 3′ untranslated region (3′-UTR), operably linked to the open reading frame (ORF). As used herein, the term “5′ untranslated region”, or “5′ UTR” refers to a region of a messenger RNA (mRNA) that is directly upstream from the initiation codon, and it is important for the regulation of translation of a transcript. The 5′ UTR may comprise a 5′-cap. In some aspects, the mRNA according to the present disclosure comprises a 5′-cap. In some aspects, the mRNA of the present disclosure does not have uncapped 5′-triphosphates. In some aspects, the mRNA may be modified by a 5′-cap analog. The term “5′-cap” refers to a structure found on the 5′-end of an mRNA molecule and generally consists of a guanosine nucleotide connected to the mRNA via a 5′- to 5′-triphosphate linkage. In one aspect, this guanosine is methylated at the 7-position. Providing an mRNA with a 5′-cap or 5′-cap analog may be achieved by in vitro transcription, in which the 5′-cap is co-transcriptionally expressed into the mRNA strand, or may be attached to mRNA post-transcriptionally using capping enzymes. As used herein, the term “3′ untranslated region”, or “3′-UTR”, refers to a region of messenger RNA (mRNA) that immediately follows the translation termination codon. The 3′-UTR often contains regulatory regions that post-transcriptionally influence gene expression. Regulatory regions within the 3′-untranslated region can influence polyadenylation, translation efficiency, localization, and stability of the mRNA. The 3′ UTR may comprise 3′ poly(A) tail. As used herein, the term “3′ poly(A) tail”, or “poly(A) sequence”, or “poly-A tail” refers to an uninterrupted or interrupted sequence of adenylate residues which is typically located at the 3′-end of an mRNA molecule. Poly(A) sequences are known to those of skill in the art and may follow the 3′-UTR in the mRNAs described herein. An uninterrupted poly(A) sequence is characterized by consecutive adenylate residues. In nature, an uninterrupted poly(A) sequence is typical, mRNAs disclosed herein can have a poly(A) sequence attached to the free 3′-end of the RNA by a template-independent RNA polymerase after transcription or a poly(A) sequence encoded by DNA and transcribed by a template-dependent RNA polymerase.

[4171] In some aspects, the invention features messenger RNA (mRNA) molecule comprising an open reading frame (ORF) of (i.e., encoding) an antigen binding polypeptide or antigen binding polypeptide complex comprising, e.g., six CDRs, VH, VL, VH and VL, heavy chain, light chain, or heavy and light chain, or a domain thereof (e.g., one or more CDRs, VH, VL, VH and VL, heavy chain, or light chain), wherein the antigen binding polypeptide comprises an amino acid sequence at least 65%, at least 70%, at least 75%, at least 80%, at least 85%, at least 90%, at least 95%, at least 99%, or 100% identical to any one of SEQ ID NOs: 381-502, 632-633, 720-721, 724-725, 728-729, 732-733, 736-737, 740-741, 744-745, 748-749, 752-753, 760-761, 887-926, 972-977, 984-985, 989-990, 993-994, 997-998, 1001-1002, 1005-1006, 1009-1010, 1013-1014, 1017-1018, 1021-1022, 1025-1026, 1029-1030, 1033-1034, 1037-1038, and 1041-1042. In some aspects, the invention features messenger RNA (mRNA) molecule comprising a nucleotide sequence at least 65%, at least 70%, at least 75%, at least 80%, at least 85%, at least 90%, at least 95%, at least 99%, or 100% identical to any one of SEQ ID NOs: 503-625, 718-719, 722-723, 726-727, 730-731, 734-735, 738-739, 742-743, 746-747, 750-751, 754-755, 762-763, 927-966, 978-983, 986-987, 991-992, 995-996, 999-1000, 1003-1004, 1007-1008, 1011-1012, 1015-1016, 1019-1020, 1023-1024, 1027-1028, 1031-1032, 1035-1036, 1039-1040, and 1043-1044, wherein in any one of SEQ ID NOs: 503-625, 718-719, 722-723, 726-727, 730-731, 734-735, 738-739, 742-743, 746-747, 750-751, 754-755, 762-763, 927-966, 978-983, 986-987, 991-992, 995-996, 999-1000, 1003-1004, 1007-1008, 1011-1012, 1015-1016, 1019-1020, 1023-1024, 1027-1028, 1031-1032, 1035-1036, 1039-1040, and 1043-1044, wherein “T” is substituted with “U”.

### Pharmaceutical Compositions and Kits

[4172] In some aspects, provided herein is a pharmaceutical composition comprising an antigen binding polypeptide, antigen binding polypeptide complex (e.g., antibody or antigen binding fragment thereof), polypeptide, polynucleotide, vector, or host cell provided herein.

[4173] In one aspect, a pharmaceutical composition provided herein comprises (1) an antigen binding polypeptide, antigen binding polypeptide complex (e.g., antibody or antigen binding fragment thereof), polypeptide, polynucleotide, vector, or host cell provided herein, and (2) a pharmaceutically acceptable carrier. The term “pharmaceutically acceptable carrier” includes any and all solvents, co-solvents, complexing agents, dispersion media, coatings, antibacterial and antifungal agents, isotonic and absorption delaying agents, and the like, which are not biologically or otherwise undesirable. The use of such media and agents for pharmaceutically active substances is known in the art. Except insofar as any conventional media or agent is incompatible with the active ingredient, its use in the therapeutic formulations is contemplated. Supplementary active ingredients can also be incorporated into the pharmaceutical compositions provided herein. In addition, various excipients, such as are commonly used in the art, can be included. These and other such compounds are described in the literature, e.g., in the Merck Index. Merck & Company. Rahway, NJ. Considerations for the inclusion of various components in pharmaceutical compositions are described, e.g., in Gilman et al. (Eds.) (2010); Goodman and Gilman's: The Pharmacological Basis of Therapeutics, 12th Ed., The McGraw-Hill Companies. In some aspects, the pharmaceutical composition is for parenteral, intravenous or subcutaneous administration.

[4174] In some aspects, a pharmaceutical composition provided herein comprises a polynucleotide or a vector disclosed herein (e.g., an mRNA disclosed herein) complexed, or packaged in a liposome, a nanoliposome, a lipid nanoparticle, a lipoplex, a micell, a nanomicell, a nanoemulsion, an oil-in-water emulsions, a PEG-conjugated lipid nanoparticle, a polymeric nanoparticle, a lipid-polymer hybrid nanoparticle, a polysaccharidic nanocarrier, an RNA-peptide nanoparticle, an RNA-peptide nanocomplex, a biomimetic nanovesicle, a lipidoid-RNA complex, a virus-like particle, dendrimer nanoparticle, a nanogel, a metallic nanoparticle, a gold nanoparticle (AuPNs), a magnetic nanoparticle, a theranostic nanoparticle, or any combination thereof.

[4175] In some aspects, a pharmaceutical composition provided herein comprises a lipid nanoparticle composition. As used herein, a “lipid nanoparticle composition.” “lipid nanoparticle formulation.” “LNP composition.” or “LNP formulation” is a composition comprising one or more lipids. The lipids in a lipid nanoparticle composition are typically sized on the order of micrometers or smaller. In some aspects, the lipids in a lipid nanoparticle composition have an average size of less than 1 micrometer.

[4176] In some aspects, the pharmaceutical composition comprises (1) one or more polynucleotides encoding an antigen binding polypeptide or antigen binding polypeptide complex provided herein, and (2) a lipid nanoparticle composition. In some aspects, the lipid nanoparticle composition comprises one or more of (i) a cationic and/or ionizable lipid, (ii) a structural lipid, (iii) a PEGylated lipid, and (iv) a phospholipid.

[4177] As used herein, a “cationic and/or ionizable lipid” is a lipid that has a positive or partial positive charge at physiological pH. Examples of a cationic and/or ionizable lipid include, but are not limited to, a lipid including a cyclic amine group, 3-(didodecylamino)-N1,N1,4-tridodecyl-1-piperazineethanamine (KL10), N1-[2-(didodecylamino)ethyl]-N1,N4,N4-tridodecyl-1,4-piperazinediethanamine (KL22), 14,25-ditridecyl-15,18,21,24-tetraaza-octatriacontane (KL25), 1,2-dilinoleyloxy-N,N-dimethylaminopropane (DLin-DMA), 2,2-dilinoleyl-4-dimethylaminomethyl-[1,3]-dioxolane (DLin-K-DMA), heptatriaconta-6,9,28,31-tetraen-19-yl 4-(dimethylamino) butanoate (DLin-MC3-DMA), 2,2-dilinoleyl-4-(2-dimethylaminoethyl)-[1,3]-dioxolane (DLin-KC2-DMA), 1,2-dioleyloxy-N,N-dimethylaminopropane (DODMA), 2-({8-[(3B)-cholest-5-en-3-yloxy]octyl}oxy)-N,N-dimethyl-3-[(9Z,12Z)-octadeca-9,12-dien-1-yloxy]propan-1-amine (Octyl-CLinDMA), (2R)-2-({8-[(3B)-cholest-5-en-3-yloxy]octyl}oxy)-N,N-dimethyl-3-[(9Z,12Z)-octadeca-9,12-dien-1-yloxy]propan-1-amine (Octyl-CLinDMA (2R)). (2S)-2-({8-[(3B)-cholest-5-en-3-yloxy]octyl}oxy)-N,N-dimethyl-3-[(9Z,12Z)-octadeca-9,12-dien-1-yloxy]propan-1-amine (Octyl-CLinDMA (2S)), and mixtures thereof.

[4178] As used herein, a “structural lipid” is a fat synthesized from mixtures of long-chain and medium-chain fatty acids. A structural lipid is typically a triacylglycerol restructured or modified to change the fatty acid composition and/or positional distribution. Examples of a structural lipid include, but are not limited to, cholesterol, fecosterol, sitosterol, ergosterol, campesterol, stigmasterol, brassicasterol, tomatidine, tomatine, ursolic acid, alpha-tocopherol, and mixtures thereof.

[4179] As used herein, a “PEGylated lipid” is a lipid that has been modified to include polyethylene glycol or “PEG.” Examples of a PEGylated lipid include, but are not limited to, PEG-modified phosphatidylethanolamines, PEG-modified phosphatidic acids, PEG-modified ceramides, PEG-modified dialkylamines, PEG-modified diacylglycerols, PEG-modified dialkylglycerols, PEG-c-DOMG, PEG-DMG, PEG-DLPE, PEG-DMPE, PEG-DPPC, a PEG-DSPE lipid, and mixtures thereof.

[4180] As used herein, a “phospholipid” is a class of lipids whose molecule has a hydrophilic “head” containing a phosphate group and two hydrophobic “tails” derived from fatty acids, joined by an alcohol residue (usually a glycerol molecule). Examples of a phospholipid include, but are not limited to, 1,2-distearoyl-sn-glycero-3-phosphocholine (DSPC), 1,2-dioleoyl-sn-glycero-3-phosphoethanolamine (DOPE), 1,2-dilinoleoyl-sn-glycero-3-phosphocholine (DLPC), 1,2-dimyristoyl-sn-glycero-phosphocholine (DMPC), 1,2-dioleoyl-sn-glycero-3-phosphocholine (DOPC), 1,2-dipalmitoyl-sn-glycero-3-phosphocholine (DPPC), 1,2-diundecanoyl-sn-glycero-phosphocholine (DUPC), 1-palmitoyl-2-oleoyl-sn-glycero-3-phosphocholine (POPC), 1,2-di-O-octadecenyl-sn-glycero-3-phosphocholine (18:0 Diether PC), 1-oleoyl-2-cholesterylhemisuccinoyl-sn-glycero-3-phosphocholine (OChemsPC), 1-hexadecyl-sn-glycero-3-phosphocholine (C16 Lyso PC), 1,2-dilinolenoyl-sn-glycero-3-phosphocholine, 1,2-diarachidonoyl-sn-glycero-3-phosphocholine, 1,2-didocosahexaenoyl-sn-glycero-3-phosphocholine, 1,2-diphytanoyl-sn-glycero-3-phosphoethanolamine (ME 16.0 PE), 1,2-distearoyl-sn-glycero-3-phosphoethanolamine, 1,2-dilinoleoyl-sn-glycero-3-phosphoethanolamine, 1,2-dilinolenoyl-sn-glycero-3-phosphoethanolamine, 1,2-diarachidonoyl-sn-glycero-3-phosphoethanolamine, 1,2-didocosahexaenoyl-sn-glycero-3-phosphoethanolamine, 1,2-dioleoyl-sn-glycero-3-phospho-rac-(1-glycerol) sodium salt (DOPG), sphingomyelin, and mixtures thereof. In some aspects, the phospholipid is DSPC. In some aspects, the phospholipid is DOPE. In some aspects, the phospholipid is DSPC and DOPE.

[4181] Exemplary lipid nanoparticle compositions and methods for making them are described, for example, herein and in U.S. Pat. Nos. 11,524,023; 11,485,972; 10,898,574; 10,703,789; 10,702,600; 10,577,403; 10,442,756; 10,266,485; 10,064,959; 9,868,692; Int'l Pub. No, WO 2019/046809; Int'l Pub. No, WO 2020/160397; U.S. Pub. No. 2020/0306191; Xu et al., Adv. Nanobio. Res. 2:2, 2022; Cullis et al., Mol. Ther. 25(7):1467-1475, 2017; Fan et al., J. Pharm. Biomed. Anal. 192:113642, 2020; Paunovska et al., Nature Rev., 23:265-280, 2022; Buck et al., ACS Nano. 13:3754-3782, 2019; Pardi et al., Nature Comm. 8:14630, 2017; and Pardi et al., J. Control Release, 217:345-351, 2015, which are incorporated by reference herein. Such methods include, but are not limited to, back translating DNA coding for an antigen binding polypeptide or antigen binding polypeptide complex provided herein (e.g., an antibody or antigen binding fragment thereof) into an in vitro transcription (IVT) plasmid according to such published methods.

[4182] Exemplary compositions and methods related to mRNA preparation and delivery are described, for example, herein and in Int'l Pub. No, WO 2018/081638, Int'l Pub. No, WO 2017/182524, U.S. Pat. No. 9,012,219, Int'l Pub. No, WO 2016/176330, U.S. Pat. No. 9,371,511, U.S. Appl. Pub. No. 2018/0028645, U.S. Appl. Pub. No. 23018/0344838, U.S. Pub. No. 2018/0265848, U.S. Appl. Pub. No. 2017/0043037, U.S. Appl. Pub. No. 2017/0327842, U.S. Pat. No. 10,006,007, U.S. Appl. Pub. No. 2013/0261172, U.S. Appl. Pub. No. 2013/0197068, U.S. Appl. Pub. No. 2015/0038558, U.S. Appl. Pub. No. 2016/0032316, U.S. Appl. Pub. No. 2013/0111615, U.S. Appl. Pub. No. 2009/0286852, Cullis et al., Mol. Ther. 25(7):1467-1475, 2017; Pardi et al., Nature Comm. 8:14630, 2017; Pardi et al., J. Control Release, 217:345-351, 2015; and Grier et al., Mol. Ther. Nucleic Acids, 5:e306 (2016), which are incorporated by reference herein. Such methods include, but are not limited to, in vitro transcription (e.g., using PCR products or a linearized plasmid); IVT vectors; and synthesizing mRNA using, e.g., HiScribe T7 High Yield RNA Synthesis Kit (New England Biolabs), incorporating, e.g., Pseudouridine-5′-Triphosphate (TriLink BioTechnologies). In some aspects, 5′ capped mRNA can also be generated during this process using, e.g., CleanCap Reagent AG (TriLink BioTechnologies) to form, e.g., 100 bp or 120 bp poly(A) tails.

[4183] In some aspects, the pharmaceutical composition comprises (1) one or more polynucleotides encoding an antigen binding polypeptide or antigen binding polypeptide complex, and (2) a carrier. In some aspects, the pharmaceutical composition comprises (1) one or more polynucleotides encoding an antigen binding polypeptide or antigen binding polypeptide complex (e.g., antibody or antigen binding fragment thereof) provided herein, and (2) a carrier selected from the group consisting of a lipid or a lipid nanoparticle. In some aspects, the one or more polynucleotides encoding an antigen binding polypeptide or antigen binding polypeptide complex is a stabilized polynucleotide resistant to degradation or decomposition in vivo. In some aspects, the stabilized polynucleotide is capped at one end (5′ cap) and has a long polyadenylated (poly A) tail at the other end to form a stabilized mRNA having 5′ and 3′ UTRs. In some aspects, the poly A tail is about 50 bp, about 100 bp, about 120 bp, or about 150 bp. In some aspects, modified nucleosides may be incorporated into the mRNA to increase translation and/or to lower potential immunogenicity.

[4184] Also provided herein is a pharmaceutical composition comprising an antigen binding polypeptide, antigen binding polypeptide complex (e.g., antibody or antigen binding fragment thereof), polypeptide, polynucleotide, vector, or host cell provided herein, and an additional pharmaceutical agent.

[4185] In some aspects, the additional pharmaceutical agent is 25-hydroxyvitamin D, an agent that potentiates vitamin D action, an anti-viral agent, an anti-malarial agent, an antibiotic, or a combination thereof.

[4186] In some aspects, the additional pharmaceutical agent is 25-hydroxyvitamin D.

[4187] In some aspects, the agent that potentiates vitamin D action is a CYP24 inhibitor, 1,25-dihydroxyvitamin D compound, or a combination thereof.

[4188] In some aspects, the anti-viral agent is an anti-retroviral agent, an antibody against SARS-CoV-2 virus or antigen binding fragment thereof, an inhibitor of reverse transcriptase, or a combination thereof.

[4189] In some aspects, the anti-viral agent is maraviroc, enfuvirtide, amantadine, lamivudine, nevirapine, efavirenz, dolutegravir, elvitegravir, raltegravir, acyclovir and any nucleoside analog of aciclovir, ganciclovir, cidofovir, forcarnet, ribavirin, interferon alpha, pegylated interferon alpha, boceprevir, atazanavir, darunavir, indinavir, oseltamivir, zanamivir, rimantadine, peremivir, valaciclovir, penciclovir, valganciclovir, foscarnet, tenofovir, adefovir, entecavir, lamivudine, telbivudine, ribavirin, glecaprevir, grazoprevir, paritaprevir, simeprevir, voxilaprevir, daclatasvir, elbasvir, ledipasvir, ombitasvir, pibrentasvir, velpatasvir, dasabuvir, famciclovir, remdesivir, trifluridine, sofobuvir, bebtelovimab (LY1404, LY-CoV1404, LY3853133), or a combination thereof.

[4190] In some aspects, the anti-viral agent is bebtelovimab.

[4191] In some aspects, the anti-viral agent is Retrovir®; (3′-azido-3′-deoxypyrimidine, zidovudine), 3′-azido-3′-deoxy thymidine (AZT), HMDR; (2′,3′-dideoxycytidine, zalcitabine), VidexEC® (2′,3′dideoxyinosine, didanosine), Epivir® (lamivudine), Zerit® (stavudine), Viread® (tenofovir DF), Ziagen® (abacavir), Emtriva® (emtricitabine, FTC), Rescriptor® (delavirdine), Sustiva® (efavirenz), Viramune® (nevirapine, 11-cyclopropyl-4-methyl-5,11-dihydro-6H-dipyrido[3,2-b:2′,3′-e][1,4]diazepin-6-one), trisodium phosphonoformate, ammonium-21-tungstenato-9-antimonate, 1-β-D-ribofuranoxyl-1,2,4-triazole-3-carboxamide, Aganerase® (amprenavir), Reyataz® (atazanavir), Lexiva® (fosamprenavir). Crixivan® (indinavir), Viracept® (nelfinavir), Norvir® (ritonavir), Fortovase® or Invirase® (saquinavir), lasinavir (5(S)-(tert-butoxycarbonylamino)-4(S)-hydroxy-6-phenyl-2(R) (2,3,4-trimethoxyphenylmethyl)-hexanoyl-(L)-valyl-N-(2-methoxy-ethyl)-amide), adriamycin, KVX-478, VX-478, 141W94, AG-1343, KNI-272, U-96988, BILA-2011 BS (palinavir), polymannoacetate, Fuzeon® (enfuvirtide, T-20), Epzicom® (abacavir and lamivudine), Trizivir® (abacavir, lamivudine and zidovudine). Truvada® (emtricitabine and tenofir DF). Combivir® (lamivudine and zidovudine), Kaletra® (lopinavir and ritonavir), bebtelovimab, or a combination thereof.

[4192] In some aspects, provided herein is a kit comprising an antigen binding polypeptide, antigen binding polypeptide complex (e.g., antibody or antigen binding fragment thereof), polypeptide, polynucleotide, vector, host cell, or pharmaceutical composition provided herein, or a combination thereof. Once a pharmaceutical composition has been formulated, it can be stored in sterile vials as a solution, suspension, gel, emulsion, solid, crystal, or as a dehydrated or lyophilized powder. Such formulations may be stored either in a ready-to-use form or in a form (e.g., lyophilized) that is reconstituted prior to administration. In some aspects, provided herein is a kit for producing a single-dose administration unit. In one aspect, the kit contains a first container having a dried antigen binding polypeptide or polypeptide complex provided herein (e.g., antibody or antigen binding fragment thereof) and a second container having an aqueous formulation. In some aspects, provided herein is a kit containing an antigen binding polypeptide or polypeptide complex provided herein (e.g., antibody or antigen binding fragment thereof) in a single and/or multi-chambered pre-filled syringe (e.g., liquid syringe and/or lyosyringe). In some aspects, the kit further contains components for intravenous or subcutaneous administration.

[4193] In some aspects, a kit provided herein comprises one or more antigen binding polypeptides or antigen binding polypeptide complexes (e.g., antibodies or antigen binding fragments thereof) provided herein (e.g., 1, 2, 3, 4, 5 or more). In some aspects, a kit provided herein comprises an antigen binding polypeptide or antigen binding polypeptide complexes (e.g., antibodies or antigen binding fragments thereof) provided herein.

[4194] In some aspects, a kit provided herein comprises one or more pharmaceutical compositions comprising an antigen binding polypeptide complex (e.g., antibody or antigen binding fragment thereof) provided herein (e.g., 1, 2, 3, 4, 5 or more). In some aspects, a kit provided herein comprises a pharmaceutical compositions comprising an antigen binding polypeptide complexes (e.g., antibody or antigen binding fragment thereof) provided herein. In some aspects, the pharmaceutical composition further comprises a pharmaceutically acceptable carrier.

[4195] In some aspects, a kit provided herein comprises (i) one or more antigen binding polypeptide complexes (e.g., antibodies or antigen binding fragments thereof) provided herein (e.g., 1, 2, 3, 4, 5 or more), and (ii) one or more additional pharmaceutical agents (e.g., 1, 2, 3, 4, 5 or more). In some aspects, a kit provided herein comprises (i) an antigen binding polypeptide complex (e.g., antibody or antigen binding fragment thereof) provided herein, and (ii) an additional pharmaceutical agent.

[4196] In some aspects, a kit provided herein comprises (i) one or more pharmaceutical compositions comprising an antigen binding polypeptide complex (e.g., antibody or antigen binding fragment thereof) provided herein (e.g., 1, 2, 3, 4, 5 or more), and (ii) one or more additional pharmaceutical agents (e.g., 1, 2, 3, 4, 5 or more). In some aspects, a kit provided herein comprises (i) a pharmaceutical composition comprising an antigen binding polypeptide complex (e.g., antibody or antigen binding fragment thereof) provided herein, and (ii) an additional pharmaceutical agent. In some aspects, the pharmaceutical composition further comprises a pharmaceutically acceptable carrier.

[4197] In some aspects, the kit further comprises instructions for use, for example, for any of the methods of use described herein (e.g., treating or preventing a SARS-CoV-2 infection).

### Methods of Use

[4198] In some aspects, provided herein are certain methods of use of an antigen binding polypeptide, antigen binding polypeptide complex (e.g., an antibody or antigen binding fragment thereof), polypeptide, polynucleotide, vector, host cell, or pharmaceutical composition provided herein, or a combination thereof.

[4199] In some aspects, provided herein is a method of preventing or treating a SARS-CoV-2 infection, comprising administering an antigen binding polypeptide, antigen binding polypeptide complex (e.g., an antibody or antigen binding fragment thereof), polypeptide, polynucleotide, vector, host cell or pharmaceutical composition provided herein, or a combination thereof.

[4200] In some aspects, provided herein is a method of preventing or treating a SARS-CoV-2 infection in a subject in need thereof, comprising administering to the subject a therapeutically effective amount of an antigen binding polypeptide, antigen binding polypeptide complex (e.g., an antibody or antigen binding fragment thereof), polypeptide, polynucleotide, vector, host cell or pharmaceutical composition provided herein, or a combination thereof.

[4201] In some aspects, provided herein is a method of preventing or treating coronavirus disease 2019 (COVID-19), comprising administering an antigen binding polypeptide, antigen binding polypeptide complex (e.g., an antibody or antigen binding fragment thereof), polypeptide, polynucleotide, vector, host cell or pharmaceutical composition, or a combination thereof.

[4202] In some aspects, provided herein is a method of preventing or treating COVID-19 in a subject in need thereof, comprising administering to the subject a therapeutically effective amount of an antigen binding polypeptide, antigen binding polypeptide complex (e.g., an antibody or antigen binding fragment thereof), polypeptide, polynucleotide, vector, host cell or pharmaceutical composition, or a combination thereof.

[4203] In some aspects, provided herein is a method of preventing immune escape of a SARS-CoV-2 variant, comprising administering an antigen binding polypeptide, antigen binding polypeptide complex (e.g., an antibody or antigen binding fragment thereof), polypeptide, polynucleotide, vector, host cell or pharmaceutical composition provided herein, or a combination thereof. In some aspects, provided herein is a method of preventing immune escape of a SARS-CoV-2 variant in a subject in need thereof, comprising administering to the subject a therapeutically effective amount of an antigen binding polypeptide, antigen binding polypeptide complex (e.g., an antibody or antigen binding fragment thereof), polypeptide, polynucleotide, vector, host cell or pharmaceutical composition provided herein, or a combination thereof.

[4204] In some aspects, the variant is the SARS-CoV-2 virus is the original Wuhan strain (WA1), a D614G spike protein mutant (e.g., D614G), an Alpha variant (e.g., B.1.1.7), a Beta variant (e.g., B.1.351), a Gamma variant (e.g., P.1), a Delta variant (e.g., B.1.617.2 or AY.1), a Kappa variant (e.g., B.1.617.1), an Iota variant (e.g., B.1.526), a Lambda variant (e.g., C.37), an Epsilon variant (e.g., B.1.429, B.1.427, or CAL.20C), a Mu variant (e.g., B.1.621), a Theta variant (e.g., P.3), a Zeta variant (e.g., P.2), an Eta variant (e.g., B.1.525), a R.1 variant, a C.1.2 variant, or an Omicron variant (e.g., B.1.1.529, BA.1, BA.2, BA.2.12.1, BA.4, BA.4/5, BA.5, BQ.1, BQ.1.1, BA.2.75, BA.2.75.2, BA.4.6, BQ.1.1, BJ.1, XBB, XBB1.5, BF.7, CH.1.1, BA.2.86, EG.5, JN.1, JD.1, EG.5.1, FL.1.5.1, HK.3, HV.1, JD.1.1, JF.1, XBB.1, XBB.1.16, XBB.1.16.6, or XBB.2.3.2), or a combination or variant thereof. In some aspects, the SARS-CoV-2 virus is JN.1.13.1, KP.2, JN.1.16, JN.1.16.1, JN.1.13, JN.1.18, KP.2.3, LB.1, KP.3, KP.3.1.1, or a combination or variant thereof. In some aspects, the variant is an Omicron variant. In some aspects, the Omicron variant is B.1.1.529, BA.1, BA.2, BA.2.12.1, BA.4, BA.4/5, BA.5, BQ.1, BQ.1.1, BA.2.75, BA.2.75.2, BA.4.6, BQ.1.1, BJ.1, XBB, XBB1.5, BF.7, CH.1.1, BA.2.86, EG.5, JN.1, JD.1, EG.5.1, FL.1.5.1, HK.3, HV.1, JD.1.1, JF.1, XBB.1, XBB.1.16, XBB.1.16.6, XBB.2.3.2, JN.1.13.1, KP.2, JN.1.16, JN.1.16.1, JN.1.13, JN.1.18, KP.2.3, LB.1, KP.3, KP.3.1.1, or a combination or variant thereof. In some aspects, the Omicron variant is BA1.1.529, BA.1, BA.2, BA.2.12.1, BA.4/5, or a combination or variant thereof.

[4205] In some aspects, provided herein is a method of increasing neutralization potency against a SARS-CoV-2 variant, comprising administering an antigen binding polypeptide, antigen binding polypeptide complex (e.g., an antibody or antigen binding fragment thereof), polypeptide, polynucleotide, vector, host cell or pharmaceutical composition provided herein, or a combination thereof. In some aspects, provided herein is a method of increasing neutralization potency against a SARS-CoV-2 variant in a subject in need thereof, comprising administering to the subject a therapeutically effective amount of an antigen binding polypeptide, antigen binding polypeptide complex (e.g., an antibody or antigen binding fragment thereof), polypeptide, polynucleotide, vector, host cell or pharmaceutical composition provided herein, or a combination thereof. In some aspects, the increased neutralization potency is relative to a monospecific antigen binding polypeptide complex that specifically binds to one of the same antigens as the antigen binding polypeptide complex. In some aspects, the increased neutralization potency is relative to a mixture of monospecific antigen binding polypeptide complexes that specifically binds to the same antigens as the antigen binding polypeptide complex.

[4206] In some aspects, the variant is the SARS-CoV-2 virus is the original Wuhan strain (WA1), a D614G spike protein mutant (e.g., D614G), an Alpha variant (e.g., B.1.1.7), a Beta variant (e.g., B.1.351), a Gamma variant (e.g., P.1), a Delta variant (e.g., B.1.617.2 or AY.1), a Kappa variant (e.g., B.1.617.1), an Iota variant (e.g., B.1.526), a Lambda variant (e.g., C.37), an Epsilon variant (e.g., B.1.429, B.1.427, or CAL.20C), a Mu variant (e.g., B.1.621), a Theta variant (e.g., P.3), a Zeta variant (e.g., P.2), an Eta variant (e.g., B.1.525), a R.1 variant, a C.1.2 variant, or an Omicron variant (e.g., B.1.1.529, BA.1, BA.2, BA.2.12.1, BA.4, BA.4/5, BA.5, BQ.1, BQ.1.1, BA.2.75, BA.2.75.2, BA.4.6, BQ.1.1, BJ.1, XBB, XBB1.5, BF.7, CH.1.1, BA.2.86, EG.5, JN.1, JD.1, EG.5.1, FL.1.5.1, HK.3, HV.1, JD.1.1, JF.1, XBB.1, XBB.1.16, XBB.1.16.6, or XBB.2.3.2), or a combination or variant thereof. In some aspects, the SARS-CoV-2 virus is JN.1.13.1, KP.2, JN.1.16, JN.1.16.1, JN.1.13, JN.1.18, KP.2.3, LB.1, KP.3, KP.3.1.1, or a combination or variant thereof. In some aspects, the variant is an Omicron variant. In some aspects, the Omicron variant is B.1.1.529, BA.1, BA.2, BA.2.12.1, BA.4, BA.4/5, BA.5, BQ.1, BQ.1.1, BA.2.75, BA.2.75.2, BA.4.6, BQ.1.1, BJ.1, XBB, XBB1.5, BF.7, CH.1.1, BA.2.86, EG.5, JN.1, JD.1, EG.5.1, FL.1.5.1, HK.3, HV.1, JD.1.1, JF.1, XBB.1, XBB.1.16, XBB.1.16.6, XBB.2.3.2, JN.1.13.1, KP.2, JN.1.16, JN.1.16.1, JN.1.13, JN.1.18, KP.2.3, LB.1, KP.3, KP.3.1.1, or a combination or variant thereof. In some aspects, the Omicron variant is BA1.1.529, BA.1, BA.2, BA.2.12.1, BA.4/5, or a combination or variant thereof.

[4207] In some aspects, provided herein is a method of increasing neutralization potency against multiple SARS-CoV-2 variants, comprising administering an antigen binding polypeptide, antigen binding polypeptide complex (e.g., an antibody or antigen binding fragment thereof), polypeptide, polynucleotide, vector, host cell or pharmaceutical composition provided herein, or a combination thereof. In some aspects, provided herein is a method of increasing neutralization potency against multiple SARS-CoV-2 variants in a subject in need thereof, comprising administering to the subject a therapeutically effective amount of an antigen binding polypeptide, antigen binding polypeptide complex (e.g., an antibody or antigen binding fragment thereof), polypeptide, polynucleotide, vector, host cell or pharmaceutical composition provided herein, or a combination thereof. In some aspects, the increased neutralization potency is relative to a monospecific antigen binding polypeptide complex that specifically binds to one of the same antigens as the antigen binding polypeptide complex. In some aspects, the increased neutralization potency is relative to a mixture of monospecific antigen binding polypeptide complexes that specifically bind to the same antigens as the antigen binding polypeptide complex.

[4208] In some aspects, the variant is the SARS-CoV-2 virus is the original Wuhan strain (WA1), a D614G spike protein mutant (e.g., D614G), an Alpha variant (e.g., B.1.1.7), a Beta variant (e.g., B.1.351), a Gamma variant (e.g., P.1), a Delta variant (e.g., B.1.617.2 or AY.1), a Kappa variant (e.g., B.1.617.1), an Iota variant (e.g., B.1.526), a Lambda variant (e.g., C.37), an Epsilon variant (e.g., B.1.429, B.1.427, or CAL.20C), a Mu variant (e.g., B.1.621), a Theta variant (e.g., P.3), a Zeta variant (e.g., P.2), an Eta variant (e.g., B.1.525), a R.1 variant, a C.1.2 variant, or an Omicron variant (e.g., B.1.1.529, BA.1, BA.2, BA.2.12.1, BA.4, BA.4/5, BA.5, BQ.1, BQ.1.1, BA.2.75, BA.2.75.2, BA.4.6, BQ.1.1, BJ.1, XBB, XBB1.5, BF.7, CH.1.1, BA.2.86, EG.5, JN.1, JD.1 EG.5.1, FL.1.5.1, HK.3, HV.1, JD.1.1, JF.1, XBB.1, XBB.1.16, XBB.1.16.6, or XBB.2.3.2), or a combination or variant thereof. In some aspects, the SARS-CoV-2 virus is JN.1.13.1, KP.2, JN.1.16, JN.1.16.1, JN.1.13, JN.1.18, KP.2.3, LB.1, KP.3, KP.3.1.1, or a combination or variant thereof. In some aspects, the variant is an Omicron variant. In some aspects, the Omicron variant is B.1.1.529, BA.1, BA.2, BA.2.12.1, BA.4, BA.4/5, BA.5, BQ.1, BQ.1.1, BA.2.75, BA.2.75.2, BA.4.6, BQ.1.1, BJ.1, XBB, XBB1.5, BF.7, CH.1.1, BA.2.86, EG.5, JN.1, JD.1, EG.5.1, FL.1.5.1, HK.3, HV.1, JD.1.1, JF.1, XBB.1, XBB.1.16, XBB.1.16.6, XBB.2.3.2, JN.1.13.1, KP.2, JN.1.16, JN.1.16.1, JN.1.13, JN.1.18, KP.2.3, LB.1, KP.3, KP.3.1.1, or a combination or variant thereof. In some aspects, the Omicron variant is BA1.1.529, BA.1, BA.2, BA.2.12.1, BA.4/5, or a combination or variant thereof. In some aspects, provided herein is a method of preventing or treating a viral infection (i.e., an infection caused by a virus) in a subject comprising administering to the subject an antigen binding polypeptide, antigen binding polypeptide complex (e.g., an antibody or antigen binding fragment thereof), polypeptide, polynucleotide, vector, host cell or pharmaceutical composition provided herein, or a combination thereof, wherein the virus is selected from the group consisting of influenza virus, respiratory syncytial virus (RSV), chlamydia, adenovirdiae, mastadeno virus, aviadenovirus, herpesviridae, herpes simplex virus 1, herpes simplex virus 2, herpes simplex virus 5, herpes simplex virus 6, leviviridae, levivirus, enterobacteria phase MS2, allolevirus, poxviridae, chordopoxvirinae, parapoxvirus, avipoxvirus, capripoxvirus, leporiipoxvirus, suipoxvirus, molluscipoxvirus, entomopoxvirinae, papovaviridae, polyomavirus, papillomavirus, paramyxoviridae, paramyxovirus, parainfluenza virus 1, mobillivirus, measles virus, rubulavirus, mumps virus, pneumonovirinae, pneumovirus, me tapneumo virus, avian pneumovirus, human metapneumovirus, picornaviridae, enterovirus, rhinovirus, hepatovirus, human hepatitis A virus, cardiovirus, andaptho virus, reoviridae, orthoreovirus, orbivirus, rotavirus, cypovirus, fijivirus, phytoreovirus, oryzavirus, retroviridae, mammalian type B retroviruses, mammalian type C retroviruses, avian type C retroviruses, type D retrovirus group, BLV-HTLV retroviruses, lentivirus, human immunodeficiency virus 1, human immunodeficiency virus 2, HTLV-I and -II viruses, herpes simplex E virus. Epstein Barr virus, cytomegalovirus, hepatitis virus (HCV, HAV, HBV, HDV, HEV), Toxoplasma gondii virus, Treponema pallidium virus, human T-lymphotrophic virus, encephalitis virus. West Nile virus. Dengue virus. Varicella Zoster Virus, rubcola, mumps, rubella, spumavirus, flaviviridae, hepatitis C virus, hepadnaviridae, hepatitis B virus, togaviridae, alphavirus sindbis virus, rubivirus, rubella virus, rhabdoviridae, vesiculovirus, lyssavirus, ephemerovirus, cytorhabdo virus, necleorhabdo virus, arenaviridae, arenavirus, lymphocytic choriomeningitis virus. Ippy virus, lassa virus, coronaviridae, coronavirus, and torovirus.

[4209] In these aspects, the antigen binding polypeptide or antigen binding polypeptide complex (e.g., an antibody or antigen binding fragment thereof) is to be understood to specifically bind to at least one epitope on at least one antigen of the virus causing the viral infection. Non-limiting examples of viral antigens are influenza virus neuraminidase, influenza virus hemagglutinin, human respiratory syncytial virus (RSV)-viral proteins, RSV F glycoprotein, RSV G glycoprotein, herpes simplex virus (HSV) viral proteins, herpes simplex virus glycoproteins gB, gC, gD, and gE, chlamydia MOMP and PorB antigens, core protein, matrix protein or other protein of Dengue virus, measles virus hemagglutinin, herpes simplex virus type 2 glycoprotein gB, poliovirus 1 VP1, envelope glycoproteins of HIV 1, hepatitis B surface antigen, diptheria toxin, streptococcus 24M epitope, gonococcal pilin, pseudorabies virus g50) (gpD), pseudorabies virus II (gpB), pseudorabies virus III (gpC), pseudorabies virus glycoprotein H, pseudorabies virus glycoprotein E, transmissible gastroenteritis glycoprotein 195, transmissible gastroenteritis matrix protein, swine rotavirus glycoprotein 38, swine parvovirus capsid protein. Serpulina hydodysenteriae protective antigen, bovine viral diarrhea glycoprotein 55. Newcastle disease virus hemagglutinin-neuraminidase, swine flu hemagglutinin, swine flu neuraminidase, foot and mouth disease virus, hog colera virus, swine influenza virus. African swine fever virus, Mycoplasma liyopneutiioniae, infectious bovine rhinotracheitis virus, infectious bovine rhinotracheitis virus glycoprotein E, glycoprotein G, infectious laryngotracheitis virus, infectious laryngotracheitis virus glycoprotein G or glycoprotein I, a glycoprotein of La Crosse virus, neonatal calf diarrhoea virus. Venezuelan equine encephalomyelitis virus, punta toro virus, murine leukemia virus, mouse mammary tumor virus, hepatitis B virus core protein and hepatitis B virus surface antigen or a fragment or derivative thereof, antigen of equine influenza virus or equine herpes virus, including equine influenza virus type A/Alaska 91 neuraminidase, equine influenza virus typeA/Miami 63 neuraminidase, equine influenza virus type A/Kentucky 81 neuraminidase equine herpes virus type 1 glycoprotein B, and equine herpes virus type 1 glycoprotein D, antigen of bovine respiratory syncytial virus or bovine parainfluenza virus, bovine respiratory syncytial virus attachment protein (BRSV G), bovine respiratory syncytial virus fusion protein (BRSV F), bovine respiratory syncytial virus nucleocapsid protein (BRSVN), bovine parainfluenza virus type 3 fusion protein, bovine parainfluenza virus type 3 hemagglutinin neuraminidase, bovine E viral diarrhoea virus glycoprotein 48 and glycoprotein 53, glycoprotein E of Dengue virus, and glycoprotein E1E2 of human hepatitis C virus.

[4210] In some aspects, provided herein is a method of preventing or treating a cancer (e.g., a solid tumor or a blood cancer) in a subject comprising administering to the subject an antigen binding polypeptide, antigen binding polypeptide complex (e.g., an antibody or antigen binding fragment thereof), polypeptide, polynucleotide, vector, host cell or pharmaceutical composition provided herein.

[4211] In these aspects, the antigen binding polypeptide or antigen binding polypeptide complex (e.g., an antibody or antigen binding fragment thereof) is to be understood to specifically bind to at least one epitope on at least one antigen associated with cancer (e.g., a tumor-associated antigens (TAAs), tumor-specific antigens (TSAs), or neoantigens), or to at least one epitope on at least one antigen selected from the group consisting of, e.g., A2AR, APRIL, ATPDase, BAFF, BAFFR, BCMA, BlyS, BTK, BTLA, B7DC, B7H1, B7H2, B7H3, B7H4, B7H5, B7H6, B7H7, B7RP1, B7-4, C3, C5, CCL2, CCL3, CCL4, CCL5, CCL7, CCL8, CCL11, CCL15, CCL17, CCL19, CCL20, CCL21, CCL25 CCR3, CCR4, CD3, CD16A, CD19, CD20, CD24, CD27, CD28, CD30, CD38, CD39, CD40, CD40L, CD47, CD52, CD70, CD80, CD86, CD123, CD133, CD137, CD137L, CD160, CD272, CEACAM5, CLEC9, CLEC91, CRTH2, CSF-1, CSF-2, CSF-3, CXCL1, CXCL2, CXCL4, CXCL12, CXCL13, CXCR3, cMet, CTLA4, DLL3, DLL4, DNGR-1, E-cadherin, EGFR, ENTPD1, EpCAM, FCER1, FCER1A, FCER2, FGFR, FLAP, FOLH1, Gi24, GITR, GITRL, GPR5, GP100, GPRC5D, HER2, HER3, ICOSL, ICOS, HHLA2, HMGB1, HVEM, IDO, IFNa, IgE, IGF1R, IL2Rbeta, IL1, IL1A, IL1B, IL1F10, IL2, IL4, IL4Ra, IL5, IL5R, IL6, IL7, IL7Ra, IL8, IL9, IL9R, IL10, rhIL1O, IL12, IL13, IL13Ra1, IL13Ra2, IL15, IL17, IL17Rb, IL18, IL22, IL23, IL25, IL7, IL33, IL35, ITGB4, ITK, KIR, LAG3, LAMP1, leptin, LPFS2, MHC class II, MUC-1, MUC-16, NCR3LG1, NKG2D, NKp46, NTPDase-1, OX40, OX40L, PD-1, PD-L1, PD-L2, PROM1, S152, SIRPalpha, SISP1, SLC, SPG64, ST2, STEAP1, STEAP2, Syk kinase, STEAP1, TROP2, TACI, TDO, TGFBETA, T14, TIGIT, TIM3, TLR, TLR2, TLR4, TLR5, TLR9, TMEF1, TNFa, TNFRSF7, Tp55, TREM1, TSLP, TSLPR, TWEAK, VEGF, VISTA, Vstm3, and WUCAM.

[4212] Delivery of the antigen binding polypeptide, antigen binding polypeptide complex (e.g., antibody or antigen binding fragment thereof), polypeptide, or antibody or antigen binding fragment thereof provided herein can be by direct administration of the antigen binding polypeptide, antigen binding polypeptide complex (e.g., antibody or antigen binding fragment thereof), polypeptide, or antibody or antigen binding fragment thereof provided herein or by an indirect method that is inclusive of delivery of a modified mRNA composition that is administered to the patient in need of treatment thereof by an antigen binding polypeptide, an antigen binding polypeptide complex (e.g., antibody or antigen binding fragment thereof), a polypeptide, or an antibody or antigen binding fragment thereof provided herein translated from the modified mRNA that codes for the antigen binding polypeptide, antigen binding polypeptide complex (e.g., antibody or antigen binding fragment thereof), polypeptide, or antibody or antigen binding fragment thereof provided herein.

[4213] As used herein, the terms “prevent” or “preventing” refer to the prevention of the onset, recurrence or spread, in whole or in part, of a disease or condition provided herein, or a symptom thereof. As used herein, the terms “treat” or “treating” refer to therapeutic or palliative measures. Beneficial or desired clinical results include, but are not limited to, alleviation, in whole or in part, of symptoms associated with a disease or disorder or condition, diminishment of the extent of disease, stabilized (i.e., not worsening) state of disease, delay or slowing of disease progression, amelioration or palliation of the disease state (e.g., one or more symptoms of the disease), and remission (whether partial or total), whether detectable or undetectable. “Treat” can also mean prolonging survival as compared to expected survival if not receiving treatment.

[4214] As used herein. “administering” is meant a method of giving a dosage of an antigen binding polypeptide or polypeptide complex (e.g., antibody or antigen binding fragment thereof) to a subject in need thereof (e.g., a patient). Administering can be by any suitable means, including parenteral, intrapulmonary or intranasal. Parenteral infusions include, for example, intramuscular, intravenous, intraarterial, intraperitoneal or subcutaneous administration. Dosing can be by any suitable route, e.g., by injection, such as intravenous or subcutaneous injection. Various dosing schedules including, but not limited to, single or multiple administrations over various time-points, bolus administration, and pulse infusion are contemplated herein.

[4215] As used herein, a “therapeutically effective amount” is an amount of an antigen binding polypeptide or antigen binding polypeptide complex (e.g., an antibody or antigen binding fragment thereof) that is sufficient to achieve the desired effect and can vary according to the nature and severity of the condition, and the potency of the polypeptide or polypeptide complex. In one aspect, an antigen binding polypeptide or polypeptide complex can be delivered by administering a polynucleotide, vector, or host cell that encodes the antigen binding polypeptide or polypeptide complex. In another aspect, an antigen binding polypeptide or polypeptide complex thereof can be delivered by administering a pharmaceutical composition containing the polypeptide or polypeptide complex. A therapeutic effect is the relief, to at least some extent, of one or more symptoms of the disease or disorder, and can include curing a disease or disorder. “Curing” means that the symptoms of active disease are eliminated. However, certain long-term or permanent effects of a disease or disorder can exist even after a cure is obtained.

[4216] As used herein, the term “subject” means a human or a non-human mammal, e.g., a dog, cat, mouse, rat, cow, sheep, pig, goat, non-human primate or bird, e.g., chicken, as well as any other vertebrate or invertebrate. In one aspect, the subject is a human. In another aspect, the subject is a veterinary animal. In one aspect, the subject is a mammal.

[4217] In some aspects, provided herein is a method of diagnosing a subject as being infected with a SARS-CoV-2 virus or suspected of being infected with a SARS-CoV-2 virus, comprising (i) contacting a sample obtained from the subject with the antigen binding polypeptide or polypeptide complex (e.g., an antibody or antigen binding fragment thereof) provided herein; (ii) detecting the presence or absence of a virus complex which contains the polypeptide or a fragment thereof, or polypeptide complex or a fragment thereof, and a SARS-CoV-2 virus, virion or fragment thereof; and (iii) diagnosing the subject as being infected with a SARS-CoV-2 virus or suspected of being infected with a SARS-CoV-2 virus when the presence of the virus complex is detected.

[4218] In some aspects, provided herein is a method of diagnosing a subject as not being infected with a SARS-CoV-2 virus or not suspected of being infected with a SARS-CoV-2 virus, comprising (i) contacting a sample obtained from the subject with the antigen binding polypeptide or polypeptide complex (e.g., an antibody or antigen binding fragment thereof) provided herein; (ii) detecting the presence or absence of a virus complex which contains the polypeptide or a fragment thereof, or polypeptide complex or a fragment thereof, and a SARS-CoV-2 virus, virion or fragment thereof; and (iii) diagnosing the subject as not being infected with a SARS-CoV-2 virus or not being suspected of being infected with a SARS-CoV-2 virus when the presence of the virus complex is not detected.

[4219] In some aspects, provided herein is a method of diagnosing a subject as having COVID-19 or suspected of having COVID-19, comprising (i) contacting a sample obtained from the subject with an antigen binding polypeptide or polypeptide complex (e.g., an antibody or antigen binding fragment thereof) provided herein; (ii) detecting the presence or absence of a virus complex which contains the polypeptide or a fragment thereof, or polypeptide complex or a fragment thereof, and a SARS-CoV-2 virus, virion or fragment thereof; and (iii) diagnosing the subject as having COVID-19 or suspected or having COVID-19 when the presence of the virus complex is detected.

[4220] In some aspects, provided herein is a method of diagnosing a subject as not having COVID-19 or not suspected of having COVID-19, comprising (i) contacting a sample obtained from the subject with an antigen binding polypeptide or polypeptide complex (e.g., an antibody or antigen binding fragment thereof) provided herein; (ii) detecting the presence or absence of a virus complex which contains the polypeptide or a fragment thereof, or polypeptide complex or a fragment thereof, and a SARS-CoV-2 virus, virion or fragment thereof; and (iii) diagnosing the subject as not having COVID-19 or not suspected of having COVID-19 when the presence of the virus complex is not detected.

[4221] The term “sample.” as used herein, refers to a composition that is obtained or derived from a subject that contains a cellular and/or other molecular entity that is to be characterized and/or identified, for example, based on physical, biochemical, chemical, and/or physiological characteristics. A sample includes, but is not limited to, nasal fluid or discharge (e.g., from a nasal swab), tissue, primary or cultured cells or cell lines, cell supernatants, cell lysates, platelets, serum, plasma, vitreous fluid, lymph fluid, synovial fluid, follicular fluid, seminal fluid, amniotic fluid, milk, whole blood, blood-derived cells, urine, cerebro-spinal fluid, saliva, sputum, tears, perspiration, mucus, tumor lysates, tissue culture medium, tissue extracts such as homogenized tissue, cellular extracts, and combinations thereof.

[4222] Methods for collecting, processing and storing a sample are known, and described, for example, in Vaught et al., IARC Sci. Pub., Unit 2. Chapter 3, pp. 23-42, 2011; CDC Interim Guidelines for Collecting and Handling of Clinical Specimens for COVID-19 Testing. Oct. 25, 2021; and Minghetti et al., Recommendations for collection, transport and storage of COVID-19 biological samples, ISS working group on Translational Research COVID-19. Istituto Superiore di Sanita. Apr. 15, 2020.

[4223] Methods for detecting the binding of an antigen binding polypeptide or polypeptide complex (e.g., antibody or antigen binding fragment thereof) provided herein and a SARS-CoV-2 virus, virion or fragment thereof are also known. Such methods include, but are not limited to, immunosorbent assay (ELISA), sodium dodecyl sulfate-polyacry lamide gel electrophoresis (SDS-PAGE), immunospot assay, lateral flow assay, flow cytometry, immunohistochemistry or western blot. See, e.g., Kumar et al., VirusDisease, 31:97-105, 2020; Gong et al., Front. Mol. Biosci. Jul. 23, 2021; and Espejo et al., Am. J. Clin. Pathol., 154(3)293-304, 2020.

[4224] In some aspects, the SARS-CoV-2 variant of the SARS-CoV-2 protein (e.g., SARS-CoV-2 spike protein) to which an antigen binding polypeptide or polypeptide complex provided herein specifically binds is a variant of concern (VOC). In some aspects, the SARS-CoV-2 variant of the SARS-CoV-2 protein (e.g., SARS-CoV-2 spike protein) to which an antigen binding polypeptide or polypeptide complex provided herein specifically binds is a variant under monitoring (e.g., variant with genetic changes suspected to affect virus characteristics and some indication of posing a future risk, but further studies are needed).

[4225] In some aspects, the SARS-CoV-2 of the SARS-CoV-2 protein (e.g., SARS-CoV-2 spike protein) to which an antigen binding polypeptide or polypeptide complex provided herein specifically binds is the original Wuhan strain (WA1), a D614G spike protein mutant (e.g., D614G), an Alpha variant (e.g., B.1.1.7), a Beta variant (e.g., B.1.351), a Gamma variant (e.g., P.1), a Delta variant (e.g., B.1.617.2 or AY.1), a Kappa variant (e.g., B.1.617.1), an Iota variant (e.g., B.1.526), a Lambda variant (e.g., C.37), an Epsilon variant (e.g., B.1.429, B.1.427, or CAL.20C), a Mu variant (e.g., B.1.621), a Theta variant (e.g., P.3), a Zeta variant (e.g., P.2), an Eta variant (e.g., B.1.525), a R.1 variant, a C.1.2 variant, or an Omicron variant (e.g., B.1.1.529, BA.1, BA.2, BA.2.12.1, BA.4, BA.4/5, BA.5, BQ.1, BQ.1.1, BA.2.75, BA.2.75.2, BA.4.6, BQ.1.1, BJ.1, XBB, XBB1.5, BF.7, CH.1.1, BA.2.86, EG.5, JN.1, JD.1, EG.5.1, FL.1.5.1, HK.3, HV.1, JD.1.1, JF.1, XBB.1, XBB.1.16, XBB.1.16.6, or XBB.2.3.2) or a combination or variant thereof. In some aspects, the SARS-CoV-2 virus is JN.1.13.1, KP.2, JN.1.16, JN.1.16.1, JN.1.13, JN.1.18, KP.2.3, LB.1, KP.3, KP.3.1.1, or a combination or variant thereof. In other aspects, the SARS-CoV-2 of SARS-CoV-2 protein (e.g., the SARS-CoV-2 spike protein) to which an antigen binding polypeptide or polypeptide complex provided herein specifically binds is an Alpha (e.g., B.1.1.7). Beta (e.g., B.1.351). Gamma (e.g., P.1), Delta (e.g., B.1.617.2), or Omicron (e.g., B.1.1.529) variant, or a combination or variant thereof. In some aspects, the variant is an Omicron variant. In some aspects, the Omicron variant is B.1.1.529, BA.1, BA.2, BA.2.12.1, BA.4, BA.4/5, BA.5, BQ.1, BQ.1.1, BA.2.75, BA.2.75.2, BA.4.6, BQ.1.1, BJ.1, XBB, XBB1.5, BF.7, CH.1.1, BA.2.86, EG.5, JN.1, JD.1, EG.5.1, FL.1.5.1, HK.3, HV.1, JD.1.1, JF.1, XBB.1, XBB.1.16, XBB.1.16.6, XBB.2.3.2, JN.1.13.1, KP.2, JN.1.16, JN.1.16.1, JN.1.13, JN.1.18, KP.2.3, LB.1, KP.3, KP.3.1.1, or a combination or variant thereof. In some aspects, the Omicron variant is BA1.1.529, BA.1, BA.2, BA.2.12.1, BA.4/5, or a combination or variant thereof.

[4226] In some aspects, the spike protein has an amino acid mutation of one or more of the following: F2L, L5F, L5I, V6F, L7V, POL, S12C, S13I, Q14H, C15F, N17K, L18F, T20I, T22N, T22A, T221, Q23K, P25S, A27S, A27V, T29I, F32L, R34C, H49Y, S50L, T51I, Q52L, Q52H, L54F, L54W, F55I, P57L, H69Y, S71F, G72V, T73I, G75V, T76I, F79L, D80N, D80Y, N87Y, D88N, D88E, D88Y, D88A, V90F, T95A, T95I, E96D, K97T, S98F, R102I, I105L, D111N, K113R, L118F, V130A, E132D, C136R, D138H, L141-, L141F, G142V, G142-, V143F, V143-, Y144-, Y144V, Y145H, H146Y, K147E, N148S, S151I, W152C, M153T, M153V, M153I, E154V, F157L, R158S, L176F, M177I, D178N, G181V, L189F, R190K, I203M, I210-, R214L, D215Y, D215G, L216F, Q218L, F220L, S221L, A222V, A222P, D228H, L229F, Q239R, T240I, L242F, A243S, A243V, H245R, H245Y, R246K, D253Y, D253G, S254F, S256L, W258L, G261V, G261R, A262S, Y265C, V267L, R273S, E281Q, A288S, L293V, D294E, P295S, E298G, T307I, V308L, E309Q, Q314K, Q314L, Q314H, T315I, Q321L, T323I, P330S, A344S, T345S, A348T, A348S, N354K, R357K, V367F, V382L, P384L, V395I, R403K, V407I, A411S, G413R, K417T, N439K, N440K, L441I, G446V, R457K, K458Q, G476S, S477N, P479L, V483A, E484Q, E484K, Q493L, S494P, L452R, Y453F, Y508H, N501Y, H519Q, A520S, A522V, K529E, G545S, T547I, L552F, T553I, E554D, K558N, A570V, T572I, D574Y, E583D, I584V, S596I, I598V, N603H, Q613H, D614G, V615F, T618A, P621S, V622F, V622I, V622A, A623S, H625Y, A626V, P631S, W633R, G639V, S640F, A647S, A647V, E654Z, E654K, H655Y, N658Y, A668S, A672V, Q675R, Q675H, T676S, T676I, Q677H, Q677R, T678I, P681L, P681R, P681H, R682W, A684S, A684T, V687L, A688V, A688S, S689I, S691F, S698L, N703D, S704L, V705F, A706V, I714M, T716I, I720V, T724A, M731I, T732A, T732I, G744V, D745G, N751D, L754F, R765S, R765H, T768I, G769A, A771S, T778I, Q779H, E780Q, A783S, D808V, D808G, P809S, I818V, L822F, D830H, D830Y, Q836P, Q836L, G838D, A845S, A845D, A845V, A845D, A845S, A846V, R847I, K854R, N856S, T859I, D867N, A879V, A879S, F888L, A893E, A893V, E918V, L922F, A924S, A924V, S929I, D936H, D936Y, L938F, S939F, T941I, G946V, A958S, N969S, L981F, T1006I, V1008T, T1009I, A1016S, A1020V, F1052L, P1053T, L1063F, V1065L, A1070V, Q1071H, E1072V, K1073N, A1078V, A1078S, G1085R, K1086N, R1091L, H1101Y, V1104L, P1112L, D1118Y, T1120I, V1122L, S1123P, G1124V, G1124C, V1129A, I1130M, T1136I, D1139H, L1141F, D1146H, S1147L, D1153Y, P1162Q, P1162S, P1162Q, P1162S, D1163Y, G1167V, D1168H, V1176F, N1187Y, K1191N, N1192T, E1195Q, L1203F, K1205N, E1207A, I219V, G1219S, I1221T, V1228L, M1229I, V1230L, T1231I, T1231A, C1235F, M1237I, M1237V, M1237T, T1238I, K1245N, C1247F, G1251R, D1259H, S1261F, P1263L, V1264L, a deletion of residues 69 and 70, a deletion of residues 246-252 and D253N, or a combination thereof.

[4227] In another aspect, the antigen binding polypeptides and antigen binding polypeptide complexes provided herein potently inhibit one or more SARS-CoV-2 virus variants.

[4228] In some aspects, the antigen binding polypeptides disclosed herein have a structure, from amino-terminus to carboxy-terminus, represented by:
[4229] (a)
[4230] VL1-L1-CL-L2-VL2-L3-VH2-L4-VH1-L5-CH1;
[4231] VL1-L1-CL-L2-VH2-L3-VL2-L4-VH1-L5-CH1;
[4232] VL1-L1-CH1-L2-VL2-L3-VH2-L4-VH1-L5-CL;
[4233] VL1-L1-CH1-L2-VH2-L3-VL2-L4-VH1-L5-CL;
[4234] VH1-L1-CL-L2-VL2-L3-VH2-L4-VL1-L5-CH1;
[4235] VH1-L1-CL-L2-VH2-L3-VL2-L4-VL1-L5-CH1;
[4236] VH1-L1-CH1-L2-VL2-L3-VH2-L4-VL1-L5-CL;
[4237] VH1-L1-CH1-L2-VH2-L3-VL2-L4-VL1-L5-CL;
[4238] VL2-L1-CL-L2-VL1-L3-VH1-L4-VH2-L5-CH1;
[4239] VL2-L1-CL-L2-VH1-L3-VL1-L4-VH2-L5-CH1;
[4240] VL2-L1-CH1-L2-VL1-L3-VH1-L4-VH2-L5-CL;
[4241] VL2-L1-CH1-L2-VH1-L3-VL1-L4-VH2-L5-CL;
[4242] VH2-L1-CL-L2-VL1-L3-VH1-L4-VL2-L5-CH1;
[4243] VH2-L1-CL-L2-VH1-L3-VL1-L4-VL2-L5-CH1;
[4244] VH2-L1-CH1-L2-VL1-L3-VH1-L4-VL2-L5-CL; or
[4245] VH2-L1-CH1-L2-VH1-L3-VL1-L4-VL2-L5-CL; or
[4246] (b)
[4247] VL1-CL-L1-VL2-L2-VH2-L3-VH1-CH1;
[4248] VL1-CL-L1-VH2-L2-VL2-L3-VH1-CH1;
[4249] VL1-CH1-L1-VL2-L2-VH2-L3-VH1-CL;
[4250] VL1-CH1-L1-VH2-L2-VL2-L3-VH1-CL;
[4251] VH1-CL-L1-VL2-L2-VH2-L3-VL1-CH1;
[4252] VH1-CL-L1-VH2-L2-VL2-L3-VL1-CH1;
[4253] VH1-CH1-L1-VL2-L2-VH2-L3-VL1-CL;
[4254] VH1-CH1-L1-VH2-L2-VL2-L3-VL1-CL;
[4255] VL2-CL-L1-VL1-L2-VH1-L3-VH2-CH1;
[4256] VL2-CL-L1-VH1-L2-VL1-L3-VH2-CH1;
[4257] VL2-CH1-L1-VL1-L2-VH1-L3-VH2-CL;
[4258] VL2-CH1-L1-VH1-L2-VL1-L3-VH2-CL;
[4259] VH2-CL-L1-VL1-L2-VH1-L3-VL2-CH1;
[4260] VH2-CL-L1-VH1-L2-VL1-L3-VL2-CH1;
[4261] VH2-CH1-L1-VL1-L2-VH1-L3-VL2-CL; or
[4262] VH2-CH1-L1-VH1-L2-VL1-L3-VL2-CL; or
[4263] (c)
[4264] VL1-L1-VH1-L2-VL2-L3-CL-L4-VH2-L5-CH1;
[4265] VL1-L1-VH1-L2-VL2-L3-CH1-L4-VH2-L5-CL;
[4266] VL1-L1-VH1-L2-VH2-L3-CL-L4-VL2-L5-CH1;
[4267] VL1-L1-VH1-L2-VH2-L3-CH1-L4-VL2-L5-CL;
[4268] VL1-L1-VL2-L2-VH1-L3-CL-L4-VH2-L5-CH1;
[4269] VL1-L1-VL2-L2-VH1-L3-CH1-L4-VH2-L5-CL;
[4270] VL1-L1-VH2-L2-VH1-L3-CL-L4-VL2-L5-CH1;
[4271] VL1-L1-VH2-L2-VH1-L3-CH1-L4-VL2-L5-CL;
[4272] VH1-L1-VL1-L2-VL2-L3-CL-L4-VH2-L5-CH1;
[4273] VH1-L1-VL1-L2-VL2-L3-CH1-L4-VH2-L5-CL;
[4274] VH1-L1-VL1-L2-VH2-L3-CL-L4-VL2-L5-CH1;
[4275] VH1-L1-VL1-L2-VH2-L3-CH1-L4-VL2-L5-CL;
[4276] VH1-L1-VL2-L2-VL1-L3-CL-L4-VH2-L5-CH1;
[4277] VH1-L1-VL2-L2-VL1-L3-CH1-L4-VH2-L5-CL;
[4278] VH1-L1-VH2-L2-VL1-L3-CL-L4-VL2-L5-CH1;
[4279] VH1-L1-VH2-L2-VL1-L3-CH1-L4-VL2-L5-CL;
[4280] VL2-L1-VL1-L2-VH2-L3-CL-L4-VH1-L5-CH1;
[4281] VL2-L1-VL1-L2-VH2-L3-CH1-L4-VH1-L5-CL;
[4282] VL2-L1-VH1-L2-VH2-L3-CL-L4-VL1-L5-CH1;
[4283] VL2-L1-VH1-L2-VH2-L3-CH1-L4-VL1-L5-CL;
[4284] VL2-L1-VH2-L2-VL1-L3-CL-L4-VH1-L5-CH1;
[4285] VL2-L1-VH2-L2-VL1-L3-CH1-L4-VH1-L5-CL;
[4286] VL2-L1-VH2-L2-VH1-L3-CL-L4-VL1-L5-CH1;
[4287] VL2-L1-VH2-L2-VH1-L3-CH1-L4-VL1-L5-CL;
[4288] VH2-L1-VL1-L2-VL2-L3-CL-L4-VH1-L5-CH1;
[4289] VH2-L1-VL1-L2-VL2-L3-CH1-L4-VH1-L5-CL;
[4290] VH2-L1-VH1-L2-VL2-L3-CL-L4-VL1-L5-CH1;
[4291] VH2-L1-VH1-L2-VL2-L3-CH1-L4-VL1-L5-CL;
[4292] VH2-L1-VL2-L2-VL1-L3-CL-L4-VH1-L5-CH1;
[4293] VH2-L1-VL2-L2-VL1-L3-CH1-L4-VH1-L5-CL;
[4294] VH2-L1-VL2-L2-VH1-L3-CL-L4-VL1-L5-CH1; or
[4295] VH2-L1-VL2-L2-VH1-L3-CH1-L4-VL1-L5-CL; or
[4296] (d)
[4297] VL1-L1-CL-L2-VH1-L3-CH1-L4-VL2-L5-VH2;
[4298] VL1-L1-CL-L2-VH1-L3-CH1-L4-VH2-L5-VL2;
[4299] VL1-L1-CL-L2-VL2-L3-CH1-L4-VH1-L5-VH2;
[4300] VL1-L1-CL-L2-VH2-L3-CH1-L4-VH1-L5-VL2;
[4301] VL1-L1-CH1-L2-VH1-L3-CL-L4-VL2-L5-VH2;
[4302] VL1-L1-CH1-L2-VH1-L3-CL-L4-VH2-L5-VL2;
[4303] VL1-L1-CH1-L2-VL2-L3-CL-L4-VH1-L5-VH2;
[4304] VL1-L1-CH1-L2-VH2-L3-CL-L4-VH1-L5-VL2;
[4305] VH1-L1-CL-L2-VL1-L3-CH1-L4-VL2-L5-VH2;
[4306] VH1-L1-CL-L2-VL1-L3-CH1-L4-VH2-L5-VL2;
[4307] VH1-L1-CL-L2-VL2-L3-CH1-L4-VL1-L5-VH2;
[4308] VH1-L1-CL-L2-VH2-L3-CH1-L4-VL1-L5-VL2;
[4309] VH1-L1-CH1-L2-VL1-L3-CL-L4-VL2-L5-VH2;
[4310] VH1-L1-CH1-L2-VL1-L3-CL-L4-VH2-L5-VL2;
[4311] VH1-L1-CH1-L2-VL2-L3-CL-L4-VL1-L5-VH2;
[4312] VH1-L1-CH1-L2-VH2-L3-CL-L4-VL1-L5-VL2;
[4313] VL2-L1-CL-L2-VL1-L3-CH1-L4-VH2-L5-VH1;
[4314] VL2-L1-CL-L2-VH1-L3-CH1-L4-VH2-L5-VL1;
[4315] VL2-L1-CL-L2-VH2-L3-CH1-L4-VL1-L5-VH1;
[4316] VL2-L1-CL-L2-VH2-L3-CH1-L4-VH1-L5-VL1;
[4317] VL2-L1-CH1-L2-VL1-L3-CL-L4-VH2-L5-VH1;
[4318] VL2-L1-CH1-L2-VH1-L3-CL-L4-VH2-L5-VL1;
[4319] VL2-L1-CH1-L2-VH2-L3-CL-L4-VL1-L5-VH1;
[4320] VL2-L1-CH1-L2-VH2-L3-CL-L4-VH1-L5-VL1;
[4321] VH2-L1-CL-L2-VL1-L3-CH1-L4-VL2-L5-VH1;
[4322] VH2-L1-CL-L2-VH1-L3-CH1-L4-VL2-L5-VL1;
[4323] VH2-L1-CL-L2-VL2-L3-CH1-L4-VL1-L5-VH1;
[4324] VH2-L1-CL-L2-VL2-L3-CH1-L4-VH1-L5-VL1;
[4325] VH2-L1-CH1-L2-VL1-L3-CL-L4-VL2-L5-VH1;
[4326] VH2-L1-CH1-L2-VH1-L3-CL-L4-VL2-L5-VL1;
[4327] VH2-L1-CH1-L2-VL2-L3-CL-L4-VL1-L5-VH1; or
[4328] VH2-L1-CH1-L2-VL2-L3-CL-L4-VH1-L5-VL1; or
[4329] (e)
[4330] VL1-L1-CL-L2-VH1-L3-CH1;
[4331] VL1-L1-CH1-L2-VH1-L3-CL;
[4332] VH1-L1-CL-L2-VL1-L3-CH1; or
[4333] VH1-L1-CH1-L2-VL1-L3-CL; or
[4334] (f)
[4335] VL1-L1-VH1-L2-CL; or
[4336] VH1-L1-VL1-L2-CL; or
[4337] (g)
[4338] VL1-L1-VH1-L2-CH1; or
[4339] VH1-L1-VL1-L2-CH1; or
[4340] (h)
[4341] VL1-L1-VL2-L2-CH1; or
[4342] VL2-L1-VL1-L2-CH1; or
[4343] (i)
[4344] VH1-L1-VH2-L2-CL; or
[4345] VH2-L1-VH1-L2-CL; or
[4346] (j)
[4347] VL1-L1-VL2-L2-VL3-L3-CH1;
[4348] VL1-L1-VL3-L2-VL2-L3-CH1;
[4349] VL2-L1-VL1-L2-VL3-L3-CH1;
[4350] VL2-L1-VL3-L2-VL1-L3-CH1;
[4351] VL3-L1-VL1-L2-VL2-L3-CH1; or
[4352] VL3-L1-VL2-L2-VL1-L3-CH1; or
[4353] (k)
[4354] VH1-L1-VH2-L2-VH3-L3-CL;
[4355] VH1-L1-VH3-L2-VH2-L3-CL;
[4356] VH2-L1-VH1-L2-VH3-L3-CL;
[4357] VH2-L1-VH3-L2-VH1-L3-CL;
[4358] VH3-L1-VH1-L2-VH2-L3-CL; or
[4359] VH3-L1-VH2-L2-VH1-L3-CL; or
[4360] (1)
[4361] VL1-L1-VL2-L2-VH2-L3-VH1-L4-CL-L5-CH1;
[4362] VL1-L1-VL2-L2-VH2-L3-VH1-L4-CH1-L5-CL;
[4363] VL1-L1-VH2-L2-VL2-L3-VH1-L4-CL-L5-CH1;
[4364] VL1-L1-VH2-L2-VL2-L3-VH1-L4-CH1-L5-CL;
[4365] VH1-L1-VL2-L2-VH2-L3-VL1-L4-CL-L5-CH1;
[4366] VH1-L1-VL2-L2-VH2-L3-VL1-L4-CH1-L5-CL;
[4367] VH1-L1-VH2-L2-VL2-L3-VL1-L4-CL-L5-CH1;
[4368] VH1-L1-VH2-L2-VL2-L3-VL1-L4-CH1-L5-CL;
[4369] VL2-L1-VL1-L2-VH1-L3-VH2-L4-CL-L5-CH1;
[4370] VL2-L1-VL1-L2-VH1-L3-VH2-L4-CH1-L5-CL;
[4371] VL2-L1-VH1-L2-VL1-L3-VH2-L4-CL-L5-CH1;
[4372] VL2-L1-VH1-L2-VL1-L3-VH2-L4-CH1-L5-CL;
[4373] VH2-L1-VL1-L2-VH1-L3-VL2-L4-CL-L5-CH1;
[4374] VH2-L1-VL1-L2-VH1-L3-VL2-L4-CH1-L5-CL;
[4375] VH2-L1-VH1-L2-VL1-L3-VL2-L4-CL-L5-CH1; or
[4376] VH2-L1-VH1-L2-VL1-L3-VL2-L4-CH1-L5-CL;
[4377] wherein:
   [4378] CL is an immunoglobulin light chain constant region;
   [4379] CH1 is an immunoglobulin heavy chain constant region 1; and
   [4380] Ln (e.g., L1, L2, etc.) are optional amino acid linkers;
   [4381] and
   [4382] any one or more of the VL (VL1 and/or VL2) comprises:
   [4383] (i) a LCDR1 having an amino acid sequence that is at least 65%, at least 70%, at least 75%, at least 80%, at least 85%, at least 90%, at least 95%, at least 99%, or 100% identical to any one of SEQ ID NOs: 1, 9, 15, 23, 30, 41, 48, 55, 58, 65, 72, 79, 86, 93, 99, 105, 112, 119, 130, 138, 145, 152, 159, 166, 172, 179, 186, 192, 199, 205, 212, 219, 226, 232, 324, 627, 640, 650, 659, 676, 687, 695, 703, 712, 770, 778, 785, 794, 801, 807, 814, 827, 836, 849, 858, 865, and 878, 1045, 1050, 1055, 1060, and 1065;
   [4384] (ii) a LCDR2 having an amino acid sequence that is at least 65%, at least 70%, at least 75%, at least 80%, at least 85%, at least 90%, at least 95%, at least 99%, or 100% identical to any one of SEQ ID NOs: 2, 31, 628, 641, 677, 1046, 1051, 1056, and 1061; or at least 65%, at least 70%, at least 75%, at least 80%, at least 85%, at least 90%, at least 95%, at least 99%, or 100% identical to any one of amino acid sequences AAS, GAS, LGS, GTN, GTN, SAS, SDS, DNT, EVT, DAS, DVT, RNS, DVS, EDS, DDS, KDS, VAS, WAS, YTS, EVS, NNN, SYN, and DAT; and
   [4385] (iii) a LCDR3 having an amino acid sequence that is at least 65%, at least 70%, at least 75%, at least 80%, at least 85%, at least 90%, at least 95%, at least 99%, or 100% identical to any one of SEQ ID NOs: 3, 10, 16, 24, 32, 38, 42, 49, 59, 66, 73, 80, 87, 94, 100, 106, 113, 120, 126, 131, 139, 146, 153, 160, 167, 173, 180, 187, 193, 200, 206, 213, 220, 227, 233, 239, 242, 246, 249, 256, 283, 285, 287, 288, 290, 292, 294, 296, 301, 304, 306, 309, 311, 313, 316, 325, 326, 329, 642, 651, 660, 668, 678, 651, 696, 704, 713, 764, 766, 768, 771, 779, 786, 792, 795, 808, 815, 821, 830, 837, 843, 850, 856, 859, 866, 872, 879, 885, and 1066; and/or
   [4386] any one or more of the VH (VH1 and/or VH2) comprises:
   [4387] (i) a HCDR1 having an amino acid sequence that is at least 65%, at least 70%, at least 75%, at least 80%, at least 85%, at least 90%, at least 95%, at least 99%, or 100% identical to any one of SEQ ID NOs: 5, 12, 18, 26, 34, 44, 51, 61, 68, 75, 82, 89, 96, 102, 108, 115, 122, 133, 141, 148, 155, 162, 175, 182, 189, 195, 202, 208, 215, 222, 229, 235, 318, 629, 645, 654, 663, 671, 682, 690, 699, 707, 716, 773, 781, 788, 797, 803, 810, 817, 823, 832, 839, 845, 852, 861, 868, 874, 881, 1047, 1052, 1057, 1062, and 1067;
   [4388] (ii) a HCDR2 having an amino acid sequence that is at least 65%, at least 70%, at least 75%, at least 80%, at least 85%, at least 90%, at least 95%, at least 99%, or 100% identical to SEQ ID NO: 6, 19, 27, 35, 45, 52, 56, 62, 69, 76, 83, 90, 109, 116, 123, 134, 142, 149, 156, 163, 169, 176, 183, 196, 209, 216, 223, 236, 273, 319, 328, 630, 646, 655, 664, 672, 683, 691, 708, 776, 782, 789, 798, 804, 811, 818, 824, 833, 840, 846, 853, 862, 869, 875, 882, 1048, 1053, 1058, 1063, and 1068; and
   [4389] (iii) a HCDR3 having an amino acid sequence that is at least 65%, at least 70%, at least 75%, at least 80%, at least 85%, at least 90%, at least 95%, at least 99%, or 100% identical to any one of SEQ ID NOs: 7, 13, 20, 28, 36, 40, 46, 53, 63, 70, 77, 84, 91, 97, 103, 110, 117, 124, 128, 135, 143, 150, 157, 164, 170, 177, 184, 190, 197, 203, 210, 217, 224, 230, 237, 241, 244, 248, 253, 257, 259, 261, 263, 265, 267, 269, 271, 274, 276, 278, 281, 297, 320, 322, 327, 330, 332, 631, 647, 656, 665, 673, 684, 692, 700, 709, 717, 765, 767, 769, 774, 783, 790, 793, 799, 805, 812, 819, 825, 834, 841, 847, 854, 857, 863, 870, 876, 883, 886, 1049, 1054, 1059, 1064, and 1069; and/or
   [4390] any one or more of the VL (VL1 and/or VL2) comprises:
   [4391] an amino acid sequence that is at least 65%, at least 70%, at least 75%, at least 80%, at least 85%, at least 90%, at least 95%, at least 99%, or 100% identical to any one of SEQ ID NOs: 4, 11, 17, 25, 33, 39, 43, 50, 60, 67, 74, 81, 88, 95, 101, 107, 114, 121, 127, 132, 140, 147, 154, 161, 168, 174, 181, 188, 194, 201, 207, 214, 221, 228, 234, 240, 243, 247, 250, 251, 252, 255, 284, 286, 289, 291, 293, 295, 299, 300, 302, 303, 305, 307, 308, 310, 312, 314, 315, 317, 323, 639, 649, 658, 667, 675, 686, 694, 702, 711, 772, 780, 787, 796, 802, 809, 816, 822, 831, 838, 844, 851, 860, 867, 873, 880, and 988; and/or
   [4392] any one or more of the VH (VH1 and/or VH2) comprises:
   [4393] an amino acid sequence that is at least 65%, at least 70%, at least 75%, at least 80%, at least 85%, at least 90%, at least 95%, at least 99%, or 100% identical to any one of SEQ ID NOs: 8, 14, 21, 22, 29, 37, 47, 54, 57, 64, 71, 78, 85, 92, 98, 104, 111, 118, 125, 129, 136, 137, 144, 151, 158, 165, 171, 178, 185, 191, 198, 204, 211, 218, 225, 231, 238, 245, 254, 258, 260, 262, 264, 266, 268, 270, 272, 275, 277, 279, 280, 282, 298, 321, 331, 626, 644, 653, 662, 670, 681, 689, 698, 706, 715, 775, 777, 784, 791, 800, 806, 813, 820, 826, 835, 842, 848, 855, 864, 871, 877, and 884.

[4394] In some aspects, the antigen binding polypeptide complexes disclosed herein comprise a first polypeptide and a second polypeptide, wherein:
[4395] (a)
[4396] the first polypeptide has a structure, from amino-terminus to carboxy-terminus, represented by:
[4397] VL1-L1-CL-L2-VL2-L3-VH2-L4-VH1-L5-CH1;
[4398] VL1-L1-CL-L2-VH2-L3-VL2-L4-VH1-L5-CH1;
[4399] VL1-L1-CH1-L2-VL2-L3-VH2-L4-VH1-L5-CL;
[4400] VL1-L1-CH1-L2-VH2-L3-VL2-L4-VH1-L5-CL;
[4401] VH1-L1-CL-L2-VL2-L3-VH2-L4-VL1-L5-CH1;
[4402] VH1-L1-CL-L2-VH2-L3-VL2-L4-VL1-L5-CH1;
[4403] VH1-L1-CH1-L2-VL2-L3-VH2-L4-VL1-L5-CL;
[4404] VH1-L1-CH1-L2-VH2-L3-VL2-L4-VL1-L5-CL;
[4405] VL2-L1-CL-L2-VL1-L3-VH1-L4-VH2-L5-CH1;
[4406] VL2-L1-CL-L2-VH1-L3-VL1-L4-VH2-L5-CH1;
[4407] VL2-L1-CH1-L2-VL1-L3-VH1-L4-VH2-L5-CL;
[4408] VL2-L1-CH1-L2-VH1-L3-VL1-L4-VH2-L5-CL;
[4409] VH2-L1-CL-L2-VL1-L3-VH1-L4-VL2-L5-CH1;
[4410] VH2-L1-CL-L2-VH1-L3-VL1-L4-VL2-L5-CH1;
[4411] VH2-L1-CH1-L2-VL1-L3-VH1-L4-VL2-L5-CL; or
[4412] VH2-L1-CH1-L2-VH1-L3-VL1-L4-VL2-L5-CL;
[4413] the second polypeptide has a structure, from amino-terminus to carboxy-terminus, represented by:
[4414] VL3-L6-CL-L7-VL4-L8-VH4-L9-VH3-L10-CH1;
[4415] VL3-L6-CL-L7-VH4-L8-VL4-L9-VH3-L10-CH1;
[4416] VL3-L6-CH1-L7-VL4-L8-VH4-L9-VH3-L10-CL;
[4417] VL3-L6-CH1-L7-VH4-L8-VL4-L9-VH3-L10-CL;
[4418] VH3-L6-CL-L7-VL4-L8-VH4-L9-VL3-L10-CH1;
[4419] VH3-L6-CL-L7-VH4-L8-VL4-L9-VL3-L10-CH1;
[4420] VH3-L6-CH1-L7-VL4-L8-VH4-L9-VL3-L10-CL;
[4421] VH3-L6-CH1-L7-VH4-L8-VL4-L9-VL3-L10-CL;
[4422] VL4-L6-CL-L7-VL3-L8-VH3-L9-VH4-L10-CH1;
[4423] VL4-L6-CL-L7-VH3-L8-VL3-L9-VH4-L10-CH1;
[4424] VL4-L6-CH1-L7-VL3-L8-VH3-L9-VH4-L10-CL;
[4425] VL4-L6-CH1-L7-VH3-L8-VL3-L9-VH4-L10-CL;
[4426] VH4-L6-CL-L7-VL3-L8-VH3-L9-VL4-L10-CH1;
[4427] VH4-L6-CL-L7-VH3-L8-VL3-L9-VL4-L10-CH1;
[4428] VH4-L6-CH1-L7-VL3-L8-VH3-L9-VL4-L10-CL; or
[4429] VH4-L6-CH1-L7-VH3-L8-VL3-L9-VL4-L10-CL; or
[4430] (b)
[4431] the first polypeptide has a structure, from amino-terminus to carboxy-terminus, represented by:
[4432] VL1-CL-L1-VL2-L2-VH2-L3-VH1-CH1;
[4433] VL1-CL-L1-VH2-L2-VL2-L3-VH1-CH1;
[4434] VL1-CH1-L1-VL2-L2-VH2-L3-VH1-CL;
[4435] VL1-CH1-L1-VH2-L2-VL2-L3-VH1-CL;
[4436] VH1-CL-L1-VL2-L2-VH2-L3-VL1-CH1;
[4437] VH1-CL-L1-VH2-L2-VL2-L3-VL1-CH1;
[4438] VH1-CH1-L1-VL2-L2-VH2-L3-VL1-CL;
[4439] VH1-CH1-L1-VH2-L2-VL2-L3-VL1-CL;
[4440] VL2-CL-L1-VL1-L2-VH1-L3-VH2-CH1;
[4441] VL2-CL-L1-VH1-L2-VL1-L3-VH2-CH1;
[4442] VL2-CH1-L1-VL1-L2-VH1-L3-VH2-CL;
[4443] VL2-CH1-L1-VH1-L2-VL1-L3-VH2-CL;
[4444] VH2-CL-L1-VL1-L2-VH1-L3-VL2-CH1;
[4445] VH2-CL-L1-VH1-L2-VL1-L3-VL2-CH1;
[4446] VH2-CH1-L1-VL1-L2-VH1-L3-VL2-CL; or
[4447] VH2-CH1-L1-VH1-L2-VL1-L3-VL2-CL;
[4448] the second polypeptide has a structure, from amino-terminus to carboxy-terminus, represented by:
[4449] VL3-CL-L4-VL4-L5-VH4-L6-VH3-CH1;
[4450] VL3-CL-L4-VH4-L5-VL4-L6-VH3-CH1;
[4451] VL3-CH1-L4-VL4-L5-VH4-L6-VH3-CL;
[4452] VL3-CH1-L4-VH4-L5-VL4-L6-VH3-CL;
[4453] VH3-CL-L4-VL4-L5-VH4-L6-VL3-CH1;
[4454] VH3-CL-L4-VH4-L5-VL4-L6-VL3-CH1;
[4455] VH3-CH1-L4-VL4-L5-VH4-L6-VL3-CL;
[4456] VH3-CH1-L4-VH4-L5-VL4-L6-VL3-CL;
[4457] VL4-CL-L4-VL3-L5-VH3-L6-VH4-CH1;
[4458] VL4-CL-L4-VH3-L5-VL3-L6-VH4-CH1;
[4459] VL4-CH1-L4-VL3-L5-VH3-L6-VH4-CL;
[4460] VL4-CH1-L4-VH3-L5-VL3-L6-VH4-CL;
[4461] VH4-CL-L4-VL3-L5-VH3-L6-VL4-CH1;
[4462] VH4-CL-L4-VH3-L5-VL3-L6-VL4-CH1;
[4463] VH4-CH1-L4-VL3-L5-VH3-L6-VL4-CL; or
[4464] VH4-CH1-L4-VH3-L5-VL3-L6-VL4-CL; or
[4465] (c)
[4466] the first polypeptide has a structure, from amino-terminus to carboxy-terminus, represented by:
[4467] VL1-L1-VH1-L2-VL2-L3-CL-L4-VH2-L5-CH1;
[4468] VL1-L1-VH1-L2-VL2-L3-CH1-L4-VH2-L5-CL;
[4469] VL1-L1-VH1-L2-VH2-L3-CL-L4-VL2-L5-CH1;
[4470] VL1-L1-VH1-L2-VH2-L3-CH1-L4-VL2-L5-CL;
[4471] VL1-L1-VL2-L2-VH1-L3-CL-L4-VH2-L5-CH1;
[4472] VL1-L1-VL2-L2-VH1-L3-CH1-L4-VH2-L5-CL;
[4473] VL1-L1-VH2-L2-VH1-L3-CL-L4-VL2-L5-CH1;
[4474] VL1-L1-VH2-L2-VH1-L3-CH1-L4-VL2-L5-CL;
[4475] VH1-L1-VL1-L2-VL2-L3-CL-L4-VH2-L5-CH1;
[4476] VH1-L1-VL1-L2-VL2-L3-CH1-L4-VH2-L5-CL;
[4477] VH1-L1-VL1-L2-VH2-L3-CL-L4-VL2-L5-CH1;
[4478] VH1-L1-VL1-L2-VH2-L3-CH1-L4-VL2-L5-CL;
[4479] VH1-L1-VL2-L2-VL1-L3-CL-L4-VH2-L5-CH1;
[4480] VH1-L1-VL2-L2-VL1-L3-CH1-L4-VH2-L5-CL;
[4481] VH1-L1-VH2-L2-VL1-L3-CL-L4-VL2-L5-CH1;
[4482] VH1-L1-VH2-L2-VL1-L3-CH1-L4-VL2-L5-CL;
[4483] VL2-L1-VL1-L2-VH2-L3-CL-L4-VH1-L5-CH1;
[4484] VL2-L1-VL1-L2-VH2-L3-CH1-L4-VH1-L5-CL;
[4485] VL2-L1-VH1-L2-VH2-L3-CL-L4-VL1-L5-CH1;
[4486] VL2-L1-VH1-L2-VH2-L3-CH1-L4-VL1-L5-CL;
[4487] VL2-L1-VH2-L2-VL1-L3-CL-L4-VH1-L5-CH1;
[4488] VL2-L1-VH2-L2-VL1-L3-CH1-L4-VH1-L5-CL;
[4489] VL2-L1-VH2-L2-VH1-L3-CL-L4-VL1-L5-CH1;
[4490] VL2-L1-VH2-L2-VH1-L3-CH1-L4-VL1-L5-CL;
[4491] VH2-L1-VL1-L2-VL2-L3-CL-L4-VH1-L5-CH1;
[4492] VH2-L1-VL1-L2-VL2-L3-CH1-L4-VH1-L5-CL;
[4493] VH2-L1-VH1-L2-VL2-L3-CL-L4-VL1-L5-CH1;
[4494] VH2-L1-VH1-L2-VL2-L3-CH1-L4-VL1-L5-CL;
[4495] VH2-L1-VL2-L2-VL1-L3-CL-L4-VH1-L5-CH1;
[4496] VH2-L1-VL2-L2-VL1-L3-CH1-L4-VH1-L5-CL;
[4497] VH2-L1-VL2-L2-VH1-L3-CL-L4-VL1-L5-CH1; or
[4498] VH2-L1-VL2-L2-VH1-L3-CH1-L4-VL1-L5-CL;
[4499] the second polypeptide has a structure, from amino-terminus to carboxy-terminus, represented by:
[4500] VL3-L6-VH3-L7-VL4-L8-CL-L9-VH4-L10-CH1;
[4501] VL3-L6-VH3-L7-VL4-L8-CH1-L9-VH4-L10-CL;
[4502] VL3-L6-VH3-L7-VH4-L8-CL-L9-VL4-L10-CH1;
[4503] VL3-L6-VH3-L7-VH4-L8-CH1-L9-VL4-L10-CL;
[4504] VL3-L6-VL4-L7-VH3-L8-CL-L9-VH4-L10-CH1;
[4505] VL3-L6-VL4-L7-VH3-L8-CH1-L9-VH4-L10-CL;
[4506] VL3-L6-VH4-L7-VH3-L8-CL-L9-VL4-L10-CH1;
[4507] VL3-L6-VH4-L7-VH3-L8-CH1-L9-VL4-L10-CL;
[4508] VH3-L6-VL3-L7-VL4-L8-CL-L9-VH4-L10-CH1;
[4509] VH3-L6-VL3-L7-VL4-L8-CH1-L9-VH4-L10-CL;
[4510] VH3-L6-VL3-L7-VH4-L8-CL-L9-VL4-L10-CH1;
[4511] VH3-L6-VL3-L7-VH4-L8-CH1-L9-VL4-L10-CL;
[4512] VH3-L6-VL4-L7-VL3-L8-CL-L9-VH4-L10-CH1;
[4513] VH3-L6-VL4-L7-VL3-L8-CH1-L9-VH4-L10-CL;
[4514] VH3-L6-VH4-L7-VL3-L8-CL-L9-VL4-L10-CH1;
[4515] VH3-L6-VH4-L7-VL3-L8-CH1-L9-VL4-L10-CL;
[4516] VL4-L6-VL3-L7-VH4-L8-CL-L9-VH3-L10-CH1;
[4517] VL4-L6-VL3-L7-VH4-L8-CH1-L9-VH3-L10-CL;
[4518] VL4-L6-VH3-L7-VH4-L8-CL-L9-VL3-L10-CH1;
[4519] VL4-L6-VH3-L7-VH4-L8-CH1-L9-VL3-L10-CL;
[4520] VL4-L6-VH4-L7-VL3-L8-CL-L9-VH3-L10-CH1;
[4521] VL4-L6-VH4-L7-VL3-L8-CH1-L9-VH3-L10-CL;
[4522] VL4-L6-VH4-L7-VH3-L8-CL-L9-VL3-L10-CH1;
[4523] VL4-L6-VH4-L7-VH3-L8-CH1-L9-VL3-L10-CL;
[4524] VH4-L6-VL3-L7-VL4-L8-CL-L9-VH3-L10-CH1;
[4525] VH4-L6-VL3-L7-VL4-L8-CH1-L9-VH3-L10-CL;
[4526] VH4-L6-VH3-L7-VL4-L8-CL-L9-VL3-L10-CH1;
[4527] VH4-L6-VH3-L7-VL4-L8-CH1-L9-VL3-L10-CL;
[4528] VH4-L6-VL4-L7-VL3-L8-CL-L9-VH3-L10-CH1;
[4529] VH4-L6-VL4-L7-VL3-L8-CH1-L9-VH3-L10-CL;
[4530] VH4-L6-VL4-L7-VH3-L8-CL-L9-VL3-L10-CH1; or
[4531] VH4-L6-VL4-L7-VH3-L8-CH1-L9-VL3-L10-CL; or
[4532] (d)
[4533] the first polypeptide has a structure, from amino-terminus to carboxy-terminus, represented by:
[4534] VL1-L1-CL-L2-VH1-L3-CH1-L4-VL2-L5-VH2;
[4535] VL1-L1-CL-L2-VH1-L3-CH1-L4-VH2-L5-VL2;
[4536] VL1-L1-CL-L2-VL2-L3-CH1-L4-VH1-L5-VH2;
[4537] VL1-L1-CL-L2-VH2-L3-CH1-L4-VH1-L5-VL2;
[4538] VL1-L1-CH1-L2-VH1-L3-CL-L4-VL2-L5-VH2;
[4539] VL1-L1-CH1-L2-VH1-L3-CL-L4-VH2-L5-VL2;
[4540] VL1-L1-CH1-L2-VL2-L3-CL-L4-VH1-L5-VH2;
[4541] VL1-L1-CH1-L2-VH2-L3-CL-L4-VH1-L5-VL2;
[4542] VH1-L1-CL-L2-VL1-L3-CH1-L4-VL2-L5-VH2;
[4543] VH1-L1-CL-L2-VL1-L3-CH1-L4-VH2-L5-VL2;
[4544] VH1-L1-CL-L2-VL2-L3-CH1-L4-VL1-L5-VH2;
[4545] VH1-L1-CL-L2-VH2-L3-CH1-L4-VL1-L5-VL2;
[4546] VH1-L1-CH1-L2-VL1-L3-CL-L4-VL2-L5-VH2;
[4547] VH1-L1-CH1-L2-VL1-L3-CL-L4-VH2-L5-VL2;
[4548] VH1-L1-CH1-L2-VL2-L3-CL-L4-VL1-L5-VH2;
[4549] VH1-L1-CH1-L2-VH2-L3-CL-L4-VL1-L5-VL2;
[4550] VL2-L1-CL-L2-VL1-L3-CH1-L4-VH2-L5-VH1;
[4551] VL2-L1-CL-L2-VH1-L3-CH1-L4-VH2-L5-VL1;
[4552] VL2-L1-CL-L2-VH2-L3-CH1-L4-VL1-L5-VH1;
[4553] VL2-L1-CL-L2-VH2-L3-CH1-L4-VH1-L5-VL1;
[4554] VL2-L1-CH1-L2-VL1-L3-CL-L4-VH2-L5-VH1;
[4555] VL2-L1-CH1-L2-VH1-L3-CL-L4-VH2-L5-VL1;
[4556] VL2-L1-CH1-L2-VH2-L3-CL-L4-VL1-L5-VH1;
[4557] VL2-L1-CH1-L2-VH2-L3-CL-L4-VH1-L5-VL1;
[4558] VH2-L1-CL-L2-VL1-L3-CH1-L4-VL2-L5-VH1;
[4559] VH2-L1-CL-L2-VH1-L3-CH1-L4-VL2-L5-VL1;
[4560] VH2-L1-CL-L2-VL2-L3-CH1-L4-VL1-L5-VH1;
[4561] VH2-L1-CL-L2-VL2-L3-CH1-L4-VH1-L5-VL1;
[4562] VH2-L1-CH1-L2-VL1-L3-CL-L4-VL2-L5-VH1;
[4563] VH2-L1-CH1-L2-VH1-L3-CL-L4-VL2-L5-VL1;
[4564] VH2-L1-CH1-L2-VL2-L3-CL-L4-VL1-L5-VH1; or
[4565] VH2-L1-CH1-L2-VL2-L3-CL-L4-VH1-L5-VL1;
[4566] the second polypeptide has a structure, from amino-terminus to carboxy-terminus, represented by:
[4567] VL3-L6-CL-L7-VH3-L8-CH1-L9-VL4-L10-VH4;
[4568] VL3-L6-CL-L7-VH3-L8-CH1-L9-VH4-L10-VL4;
[4569] VL3-L6-CL-L7-VL4-L8-CH1-L9-VH3-L10-VH4;
[4570] VL3-L6-CL-L7-VH4-L8-CH1-L9-VH3-L10-VL4;
[4571] VL3-L6-CH1-L7-VH3-L8-CL-L9-VL4-L10-VH4;
[4572] VL3-L6-CH1-L7-VH3-L8-CL-L9-VH4-L10-VL4;
[4573] VL3-L6-CH1-L7-VL4-L8-CL-L9-VH3-L10-VH4;
[4574] VL3-L6-CH1-L7-VH4-L8-CL-L9-VH3-L10-VL4;
[4575] VH3-L6-CL-L7-VL3-L8-CH1-L9-VL4-L10-VH4;
[4576] VH3-L6-CL-L7-VL3-L8-CH1-L9-VH4-L10-VL4;
[4577] VH3-L6-CL-L7-VL4-L8-CH1-L9-VL3-L10-VH4;
[4578] VH3-L6-CL-L7-VH4-L8-CH1-L9-VL3-L10-VL4;
[4579] VH3-L6-CH1-L7-VL3-L8-CL-L9-VL4-L10-VH4;
[4580] VH3-L6-CH1-L7-VL3-L8-CL-L9-VH4-L10-VL4;
[4581] VH3-L6-CH1-L7-VL4-L8-CL-L9-VL3-L10-VH4;
[4582] VH3-L6-CH1-L7-VH4-L8-CL-L9-VL3-L10-VL4;
[4583] VL4-L6-CL-L7-VL3-L8-CH1-L9-VH4-L10-VH3;
[4584] VL4-L6-CL-L7-VH3-L8-CH1-L9-VH4-L10-VL3;
[4585] VL4-L6-CL-L7-VH4-L8-CH1-L9-VL3-L10-VH3;
[4586] VL4-L6-CL-L7-VH4-L8-CH1-L9-VH3-L10-VL3;
[4587] VL4-L6-CH1-L7-VL3-L8-CL-L9-VH4-L10-VH3;
[4588] VL4-L6-CH1-L7-VH3-L8-CL-L9-VH4-L10-VL3;
[4589] VL4-L6-CH1-L7-VH4-L8-CL-L9-VL3-L10-VH3;
[4590] VL4-L6-CH1-L7-VH4-L8-CL-L9-VH3-L10-VL3;
[4591] VH4-L6-CL-L7-VL3-L8-CH1-L9-VL4-L10-VH3;
[4592] VH4-L6-CL-L7-VH3-L8-CH1-L9-VL4-L10-VL3;
[4593] VH4-L6-CL-L7-VL4-L8-CH1-L9-VL3-L10-VH3;
[4594] VH4-L6-CL-L7-VL4-L8-CH1-L9-VH3-L10-VL3;
[4595] VH4-L6-CH1-L7-VL3-L8-CL-L9-VL4-L10-VH3;
[4596] VH4-L6-CH1-L7-VH3-L8-CL-L9-VL4-L10-VL3;
[4597] VH4-L6-CH1-L7-VL4-L8-CL-L9-VL3-L10-VH3; or
[4598] VH4-L6-CH1-L7-VL4-L8-CL-L9-VH3-L10-VL3; or
[4599] (e)
[4600] the first polypeptide has a structure, from amino-terminus to carboxy-terminus, represented by:
[4601] VL1-L1-VH1-L2-VL2-L3-CL-L4-VH2-L5-CH1;
[4602] VL1-L1-VH1-L2-VL2-L3-CH1-L4-VH2-L5-CL;
[4603] VL1-L1-VH1-L2-VH2-L3-CL-L4-VL2-L5-CH1;
[4604] VL1-L1-VH1-L2-VH2-L3-CH1-L4-VL2-L5-CL;
[4605] VL1-L1-VL2-L2-VH1-L3-CL-L4-VH2-L5-CH1;
[4606] VL1-L1-VL2-L2-VH1-L3-CH1-L4-VH2-L5-CL;
[4607] VL1-L1-VH2-L2-VH1-L3-CL-L4-VL2-L5-CH1;
[4608] VL1-L1-VH2-L2-VH1-L3-CH1-L4-VL2-L5-CL;
[4609] VH1-L1-VL1-L2-VL2-L3-CL-L4-VH2-L5-CH1;
[4610] VH1-L1-VL1-L2-VL2-L3-CH1-L4-VH2-L5-CL;
[4611] VH1-L1-VL1-L2-VH2-L3-CL-L4-VL2-L5-CH1;
[4612] VH1-L1-VL1-L2-VH2-L3-CH1-L4-VL2-L5-CL;
[4613] VH1-L1-VL2-L2-VL1-L3-CL-L4-VH2-L5-CH1;
[4614] VH1-L1-VL2-L2-VL1-L3-CH1-L4-VH2-L5-CL;
[4615] VH1-L1-VH2-L2-VL1-L3-CL-L4-VL2-L5-CH1;
[4616] VH1-L1-VH2-L2-VL1-L3-CH1-L4-VL2-L5-CL;
[4617] VL2-L1-VL1-L2-VH2-L3-CL-L4-VH1-L5-CH1;
[4618] VL2-L1-VL1-L2-VH2-L3-CH1-L4-VH1-L5-CL;
[4619] VL2-L1-VH1-L2-VH2-L3-CL-L4-VL1-L5-CH1;
[4620] VL2-L1-VH1-L2-VH2-L3-CH1-L4-VL1-L5-CL;
[4621] VL2-L1-VH2-L2-VL1-L3-CL-L4-VH1-L5-CH1;
[4622] VL2-L1-VH2-L2-VL1-L3-CH1-L4-VH1-L5-CL;
[4623] VL2-L1-VH2-L2-VH1-L3-CL-L4-VL1-L5-CH1;
[4624] VL2-L1-VH2-L2-VH1-L3-CH1-L4-VL1-L5-CL;
[4625] VH2-L1-VL1-L2-VL2-L3-CL-L4-VH1-L5-CH1;
[4626] VH2-L1-VL1-L2-VL2-L3-CH1-L4-VH1-L5-CL;
[4627] VH2-L1-VH1-L2-VL2-L3-CL-L4-VL1-L5-CH1;
[4628] VH2-L1-VH1-L2-VL2-L3-CH1-L4-VL1-L5-CL;
[4629] VH2-L1-VL2-L2-VL1-L3-CL-L4-VH1-L5-CH1;
[4630] VH2-L1-VL2-L2-VL1-L3-CH1-L4-VH1-L5-CL;
[4631] VH2-L1-VL2-L2-VH1-L3-CL-L4-VL1-L5-CH1; or
[4632] VH2-L1-VL2-L2-VH1-L3-CH1-L4-VL1-L5-CL;
[4633] the second polypeptide has a structure, from amino-terminus to carboxy-terminus, represented by:
[4634] VL3-L6-CL-L7-VH3-L8-CH1-L9-VL4-L10-VH4;
[4635] VL3-L6-CL-L7-VH3-L8-CH1-L9-VH4-L10-VL4;
[4636] VL3-L6-CL-L7-VL4-L8-CH1-L9-VH3-L10-VH4;
[4637] VL3-L6-CL-L7-VH4-L8-CH1-L9-VH3-L10-VL4;
[4638] VL3-L6-CH1-L7-VH3-L8-CL-L9-VL4-L10-VH4;
[4639] VL3-L6-CH1-L7-VH3-L8-CL-L9-VH4-L10-VL4;
[4640] VL3-L6-CH1-L7-VL4-L8-CL-L9-VH3-L10-VH4;
[4641] VL3-L6-CH1-L7-VH4-L8-CL-L9-VH3-L10-VL4;
[4642] VH3-L6-CL-L7-VL3-L8-CH1-L9-VL4-L10-VH4;
[4643] VH3-L6-CL-L7-VL3-L8-CH1-L9-VH4-L10-VL4;
[4644] VH3-L6-CL-L7-VL4-L8-CH1-L9-VL3-L10-VH4;
[4645] VH3-L6-CL-L7-VH4-L8-CH1-L9-VL3-L10-VL4;
[4646] VH3-L6-CH1-L7-VL3-L8-CL-L9-VL4-L10-VH4;
[4647] VH3-L6-CH1-L7-VL3-L8-CL-L9-VH4-L10-VL4;
[4648] VH3-L6-CH1-L7-VL4-L8-CL-L9-VL3-L10-VH4;
[4649] VH3-L6-CH1-L7-VH4-L8-CL-L9-VL3-L10-VL4;
[4650] VL4-L6-CL-L7-VL3-L8-CH1-L9-VH4-L10-VH3;
[4651] VL4-L6-CL-L7-VH3-L8-CH1-L9-VH4-L10-VL3;
[4652] VL4-L6-CL-L7-VH4-L8-CH1-L9-VL3-L10-VH3;
[4653] VL4-L6-CL-L7-VH4-L8-CH1-L9-VH3-L10-VL3;
[4654] VL4-L6-CH1-L7-VL3-L8-CL-L9-VH4-L10-VH3;
[4655] VL4-L6-CH1-L7-VH3-L8-CL-L9-VH4-L10-VL3;
[4656] VL4-L6-CH1-L7-VH4-L8-CL-L9-VL3-L10-VH3;
[4657] VL4-L6-CH1-L7-VH4-L8-CL-L9-VH3-L10-VL3;
[4658] VH4-L6-CL-L7-VL3-L8-CH1-L9-VL4-L10-VH3;
[4659] VH4-L6-CL-L7-VH3-L8-CH1-L9-VL4-L10-VL3;
[4660] VH4-L6-CL-L7-VL4-L8-CH1-L9-VL3-L10-VH3;
[4661] VH4-L6-CL-L7-VL4-L8-CH1-L9-VH3-L10-VL3;
[4662] VH4-L6-CH1-L7-VL3-L8-CL-L9-VL4-L10-VH3;
[4663] VH4-L6-CH1-L7-VH3-L8-CL-L9-VL4-L10-VL3;
[4664] VH4-L6-CH1-L7-VL4-L8-CL-L9-VL3-L10-VH3; or
[4665] VH4-L6-CH1-L7-VL4-L8-CL-L9-VH3-L10-VL3; or
[4666] (f)
[4667] the first polypeptide has a structure, from amino-terminus to carboxy-terminus, represented by:
[4668] VL1-L1-CL-L2-VH1-L3-CH1-L4-VL2-L5-VH2;
[4669] VL1-L1-CL-L2-VH1-L3-CH1-L4-VH2-L5-VL2;
[4670] VL1-L1-CL-L2-VL2-L3-CH1-L4-VH1-L5-VH2;
[4671] VL1-L1-CL-L2-VH2-L3-CH1-L4-VH1-L5-VL2;
[4672] VL1-L1-CH1-L2-VH1-L3-CL-L4-VL2-L5-VH2;
[4673] VL1-L1-CH1-L2-VH1-L3-CL-L4-VH2-L5-VL2;
[4674] VL1-L1-CH1-L2-VL2-L3-CL-L4-VH1-L5-VH2;
[4675] VL1-L1-CH1-L2-VH2-L3-CL-L4-VH1-L5-VL2;
[4676] VH1-L1-CL-L2-VL1-L3-CH1-L4-VL2-L5-VH2;
[4677] VH1-L1-CL-L2-VL1-L3-CH1-L4-VH2-L5-VL2;
[4678] VH1-L1-CL-L2-VL2-L3-CH1-L4-VL1-L5-VH2;
[4679] VH1-L1-CL-L2-VH2-L3-CH1-L4-VL1-L5-VL2;
[4680] VH1-L1-CH1-L2-VL1-L3-CL-L4-VL2-L5-VH2;
[4681] VH1-L1-CH1-L2-VL1-L3-CL-L4-VH2-L5-VL2;
[4682] VH1-L1-CH1-L2-VL2-L3-CL-L4-VL1-L5-VH2;
[4683] VH1-L1-CH1-L2-VH2-L3-CL-L4-VL1-L5-VL2;
[4684] VL2-L1-CL-L2-VL1-L3-CH1-L4-VH2-L5-VH1;
[4685] VL2-L1-CL-L2-VH1-L3-CH1-L4-VH2-L5-VL1;
[4686] VL2-L1-CL-L2-VH2-L3-CH1-L4-VL1-L5-VH1;
[4687] VL2-L1-CL-L2-VH2-L3-CH1-L4-VH1-L5-VL1;
[4688] VL2-L1-CH1-L2-VL1-L3-CL-L4-VH2-L5-VH1;
[4689] VL2-L1-CH1-L2-VH1-L3-CL-L4-VH2-L5-VL1;
[4690] VL2-L1-CH1-L2-VH2-L3-CL-L4-VL1-L5-VH1;
[4691] VL2-L1-CH1-L2-VH2-L3-CL-L4-VH1-L5-VL1;
[4692] VH2-L1-CL-L2-VL1-L3-CH1-L4-VL2-L5-VH1;
[4693] VH2-L1-CL-L2-VH1-L3-CH1-L4-VL2-L5-VL1;
[4694] VH2-L1-CL-L2-VL2-L3-CH1-L4-VL1-L5-VH1;
[4695] VH2-L1-CL-L2-VL2-L3-CH1-L4-VH1-L5-VL1;
[4696] VH2-L1-CH1-L2-VL1-L3-CL-L4-VL2-L5-VH1;
[4697] VH2-L1-CH1-L2-VH1-L3-CL-L4-VL2-L5-VL1;
[4698] VH2-L1-CH1-L2-VL2-L3-CL-L4-VL1-L5-VH1; or
[4699] VH2-L1-CH1-L2-VL2-L3-CL-L4-VH1-L5-VL1;
[4700] the second polypeptide has a structure, from amino-terminus to carboxy-terminus, represented by:
[4701] VL3-L6-VH3-L7-VL4-L8-CL-L9-VH4-L10-CH1;
[4702] VL3-L6-VH3-L7-VL4-L8-CH1-L9-VH4-L10-CL;
[4703] VL3-L6-VH3-L7-VH4-L8-CL-L9-VL4-L10-CH1;
[4704] VL3-L6-VH3-L7-VH4-L8-CH1-L9-VL4-L10-CL;
[4705] VL3-L6-VL4-L7-VH3-L8-CL-L9-VH4-L10-CH1;
[4706] VL3-L6-VL4-L7-VH3-L8-CH1-L9-VH4-L10-CL;
[4707] VL3-L6-VH4-L7-VH3-L8-CL-L9-VL4-L10-CH1;
[4708] VL3-L6-VH4-L7-VH3-L8-CH1-L9-VL4-L10-CL;
[4709] VH3-L6-VL3-L7-VL4-L8-CL-L9-VH4-L10-CH1;
[4710] VH3-L6-VL3-L7-VL4-L8-CH1-L9-VH4-L10-CL;
[4711] VH3-L6-VL3-L7-VH4-L8-CL-L9-VL4-L10-CH1;
[4712] VH3-L6-VL3-L7-VH4-L8-CH1-L9-VL4-L10-CL;
[4713] VH3-L6-VL4-L7-VL3-L8-CL-L9-VH4-L10-CH1;
[4714] VH3-L6-VL4-L7-VL3-L8-CH1-L9-VH4-L10-CL;
[4715] VH3-L6-VH4-L7-VL3-L8-CL-L9-VL4-L10-CH1;
[4716] VH3-L6-VH4-L7-VL3-L8-CH1-L9-VL4-L10-CL;
[4717] VL4-L6-VL3-L7-VH4-L8-CL-L9-VH3-L10-CH1;
[4718] VL4-L6-VL3-L7-VH4-L8-CH1-L9-VH3-L10-CL;
[4719] VL4-L6-VH3-L7-VH4-L8-CL-L9-VL3-L10-CH1;
[4720] VL4-L6-VH3-L7-VH4-L8-CH1-L9-VL3-L10-CL;
[4721] VL4-L6-VH4-L7-VL3-L8-CL-L9-VH3-L10-CH1;
[4722] VL4-L6-VH4-L7-VL3-L8-CH1-L9-VH3-L10-CL;
[4723] VL4-L6-VH4-L7-VH3-L8-CL-L9-VL3-L10-CH1;
[4724] VL4-L6-VH4-L7-VH3-L8-CH1-L9-VL3-L10-CL;
[4725] VH4-L6-VL3-L7-VL4-L8-CL-L9-VH3-L10-CH1;
[4726] VH4-L6-VL3-L7-VL4-L8-CH1-L9-VH3-L10-CL;
[4727] VH4-L6-VH3-L7-VL4-L8-CL-L9-VL3-L10-CH1;
[4728] VH4-L6-VH3-L7-VL4-L8-CH1-L9-VL3-L10-CL;
[4729] VH4-L6-VL4-L7-VL3-L8-CL-L9-VH3-L10-CH1;
[4730] VH4-L6-VL4-L7-VL3-L8-CH1-L9-VH3-L10-CL;
[4731] VH4-L6-VL4-L7-VH3-L8-CL-L9-VL3-L10-CH1; or
[4732] VH4-L6-VL4-L7-VH3-L8-CH1-L9-VL3-L10-CL; or
[4733] (g)
[4734] the first polypeptide has a structure, from amino-terminus to carboxy-terminus, represented by:
[4735] VL1-L1-VL2-L2-VH2-L3-VH1-L4-CL-L5-CH1;
[4736] VL1-L1-VL2-L2-VH2-L3-VH1-L4-CH1-L5-CL;
[4737] VL1-L1-VH2-L2-VL2-L3-VH1-L4-CL-L5-CH1;
[4738] VL1-L1-VH2-L2-VL2-L3-VH1-L4-CH1-L5-CL;
[4739] VH1-L1-VL2-L2-VH2-L3-VL1-L4-CL-L5-CH1;
[4740] VH1-L1-VL2-L2-VH2-L3-VL1-L4-CH1-L5-CL;
[4741] VH1-L1-VH2-L2-VL2-L3-VL1-L4-CL-L5-CH1;
[4742] VH1-L1-VH2-L2-VL2-L3-VL1-L4-CH1-L5-CL;
[4743] VL2-L1-VL1-L2-VH1-L3-VH2-L4-CL-L5-CH1;
[4744] VL2-L1-VL1-L2-VH1-L3-VH2-L4-CH1-L5-CL;
[4745] VL2-L1-VH1-L2-VL1-L3-VH2-L4-CL-L5-CH1;
[4746] VL2-L1-VH1-L2-VL1-L3-VH2-L4-CH1-L5-CL;
[4747] VH2-L1-VL1-L2-VH1-L3-VL2-L4-CL-L5-CH1;
[4748] VH2-L1-VL1-L2-VH1-L3-VL2-L4-CH1-L5-CL;
[4749] VH2-L1-VH1-L2-VL1-L3-VL2-L4-CL-L5-CH1; or
[4750] VH2-L1-VH1-L2-VL1-L3-VL2-L4-CH1-L5-CL;
[4751] the second polypeptide has a structure, from amino-terminus to carboxy-terminus, represented by:
[4752] VL3-L6-VL4-L7-VH4-L8-VH3-L9-CL-L10-CH1;
[4753] VL3-L6-VL4-L7-VH4-L8-VH3-L9-CH1-L10-CL;
[4754] VL3-L6-VH4-L7-VL4-L8-VH3-L9-CL-L10-CH1;
[4755] VL3-L6-VH4-L7-VL4-L8-VH3-L9-CH1-L10-CL;
[4756] VH3-L6-VL4-L7-VH4-L8-VL3-L9-CL-L10-CH1;
[4757] VH3-L6-VL4-L7-VH4-L8-VL3-L9-CH1-L10-CL;
[4758] VH3-L6-VH4-L7-VL4-L8-VL3-L9-CL-L10-CH1;
[4759] VH3-L6-VH4-L7-VL4-L8-VL3-L9-CH1-L10-CL;
[4760] VL4-L6-VL3-L7-VH3-L8-VH4-L9-CL-L10-CH1;
[4761] VL4-L6-VL3-L7-VH3-L8-VH4-L9-CH1-L10-CL;
[4762] VL4-L6-VH3-L7-VL3-L8-VH4-L9-CL-L10-CH1;
[4763] VL4-L6-VH3-L7-VL3-L8-VH4-L9-CH1-L10-CL;
[4764] VH4-L6-VL3-L7-VH3-L8-VL4-L9-CL-L10-CH1;
[4765] VH4-L6-VL3-L7-VH3-L8-VL4-L9-CH1-L10-CL;
[4766] VH4-L6-VH3-L7-VL3-L8-VL4-L9-CL-L10-CH1; or
[4767] VH4-L6-VH3-L7-VL3-L8-VL4-L9-CH1-L10-CL; or
[4768] (h)
[4769] the first polypeptide has a structure, from amino-terminus to carboxy-terminus, represented by:
[4770] VL1-L1-CL-L2-VH1-L3-CH1;
[4771] VL1-L1-CH1-L2-VH1-L3-CL;
[4772] VH1-L1-CL-L2-VL1-L3-CH1; or
[4773] VH1-L1-CH1-L2-VL1-L3-CL;
[4774] the second polypeptide has a structure, from amino-terminus to carboxy-terminus, represented by:
[4775] VL2-L4-CL-L5-VL3-L6-VH3-L7-VH2-L8-CH1;
[4776] VL2-L4-CL-L5-VH3-L6-VL3-L7-VH2-L8-CH1;
[4777] VL2-L4-CH1-L5-VL3-L6-VH3-L7-VH2-L8-CL;
[4778] VL2-L4-CH1-L5-VH3-L6-VL3-L7-VH2-L8-CL;
[4779] VH2-L4-CL-L5-VL3-L6-VH3-L7-VL2-L8-CH1;
[4780] VH2-L4-CL-L5-VH3-L6-VL3-L7-VL2-L8-CH1;
[4781] VH2-L4-CH1-L5-VL3-L6-VH3-L7-VL2-L8-CL;
[4782] VH2-L4-CH1-L5-VH3-L6-VL3-L7-VL2-L8-CL;
[4783] VL3-L4-CL-L5-VL2-L6-VH2-L7-VH3-L8-CH1;
[4784] VL3-L4-CL-L5-VH2-L6-VL2-L7-VH3-L8-CH1;
[4785] VL3-L4-CH1-L5-VL2-L6-VH2-L7-VH3-L8-CL;
[4786] VL3-L4-CH1-L5-VH2-L6-VL2-L7-VH3-L8-CL;
[4787] VH3-L4-CL-L5-VL2-L6-VH2-L7-VL3-L8-CH1;
[4788] VH3-L4-CL-L5-VH2-L6-VL2-L7-VL3-L8-CH1;
[4789] VH3-L4-CH1-L5-VL2-L6-VH2-L7-VL3-L8-CL; or
[4790] VH3-L4-CH1-L5-VH2-L6-VL2-L7-VL3-L8-CL; or
[4791] (i)
[4792] the first polypeptide has a structure, from amino-terminus to carboxy-terminus, represented by:
[4793] VL1-L1-CL-L2-VH1-L3-CH1;
[4794] VL1-L1-CH1-L2-VH1-L3-CL;
[4795] VH1-L1-CL-L2-VL1-L3-CH1; or
[4796] VH1-L1-CH1-L2-VL1-L3-CL;
[4797] the second polypeptide has a structure, from amino-terminus to carboxy-terminus, represented by:
[4798] VL2-L4-VH2-L5-VL3-L6-CL-L7-VH3-L8-CH1;
[4799] VL2-L4-VH2-L5-VL3-L6-CH1-L7-VH3-L8-CL;
[4800] VL2-L4-VH2-L5-VH3-L6-CL-L7-VL3-L8-CH1;
[4801] VL2-L4-VH2-L5-VH3-L6-CH1-L7-VL3-L8-CL;
[4802] VL2-L4-VL3-L5-VH2-L6-CL-L7-VH3-L8-CH1;
[4803] VL2-L4-VL3-L5-VH2-L6-CH1-L7-VH3-L8-CL;
[4804] VL2-L4-VH3-L5-VH2-L6-CL-L7-VL3-L8-CH1;
[4805] VL2-L4-VH3-L5-VH2-L6-CH1-L7-VL3-L8-CL;
[4806] VH2-L4-VL2-L5-VL3-L6-CL-L7-VH3-L8-CH1;
[4807] VH2-L4-VL2-L5-VL3-L6-CH1-L7-VH3-L8-CL;
[4808] VH2-L4-VL2-L5-VH3-L6-CL-L7-VL3-L8-CH1;
[4809] VH2-L4-VL2-L5-VH3-L6-CH1-L7-VL3-L8-CL;
[4810] VH2-L4-VL3-L5-VL2-L6-CL-L7-VH3-L8-CH1;
[4811] VH2-L4-VL3-L5-VL2-L6-CH1-L7-VH3-L8-CL;
[4812] VH2-L4-VH3-L5-VL2-L6-CL-L7-VL3-L8-CH1;
[4813] VH2-L4-VH3-L5-VL2-L6-CH1-L7-VL3-L8-CL;
[4814] VL3-L4-VL2-L5-VH3-L6-CL-L7-VH2-L8-CH1;
[4815] VL3-L4-VL2-L5-VH3-L6-CH1-L7-VH2-L8-CL;
[4816] VL3-L4-VH2-L5-VH3-L6-CL-L7-VL2-L8-CH1;
[4817] VL3-L4-VH2-L5-VH3-L6-CH1-L7-VL2-L8-CL;
[4818] VL3-L4-VH3-L5-VL2-L6-CL-L7-VH2-L8-CH1;
[4819] VL3-L4-VH3-L5-VL2-L6-CH1-L7-VH2-L8-CL;
[4820] VL3-L4-VH3-L5-VH2-L6-CL-L7-VL2-L8-CH1;
[4821] VL3-L4-VH3-L5-VH2-L6-CH1-L7-VL2-L8-CL;
[4822] VH3-L4-VL2-L5-VL3-L6-CL-L7-VH2-L8-CH1;
[4823] VH3-L4-VL2-L5-VL3-L6-CH1-L7-VH2-L8-CL;
[4824] VH3-L4-VH2-L5-VL3-L6-CL-L7-VL2-L8-CH1;
[4825] VH3-L4-VH2-L5-VL3-L6-CH1-L7-VL2-L8-CL;
[4826] VH3-L4-VL3-L5-VL2-L6-CL-L7-VH2-L8-CH1;
[4827] VH3-L4-VL3-L5-VL2-L6-CH1-L7-VH2-L8-CL;
[4828] VH3-L4-VL3-L5-VH2-L6-CL-L7-VL2-L8-CH1; or
[4829] VH3-L4-VL3-L5-VH2-L6-CH1-L7-VL2-L8-CL; or
[4830] (j)
[4831] the first polypeptide has a structure, from amino-terminus to carboxy-terminus, represented by:
[4832] VL1-L1-CL-L2-VH1-L3-CH1;
[4833] VL1-L1-CH1-L2-VH1-L3-CL;
[4834] VH1-L1-CL-L2-VL1-L3-CH1; or
[4835] VH1-L1-CH1-L2-VL1-L3-CL;
[4836] the second polypeptide has a structure, from amino-terminus to carboxy-terminus, represented by:
[4837] VL2-L4-CL-L5-VH2-L6-CH1-L7-VL3-L8-VH3;
[4838] VL2-L4-CL-L5-VH2-L6-CH1-L7-VH3-L8-VL3;
[4839] VL2-L4-CL-L5-VL3-L6-CH1-L7-VH2-L8-VH3;
[4840] VL2-L4-CL-L5-VH3-L6-CH1-L7-VH2-L8-VL3;
[4841] VL2-L4-CH1-L5-VH2-L6-CL-L7-VL3-L8-VH3;
[4842] VL2-L4-CH1-L5-VH2-L6-CL-L7-VH3-L8-VL3;
[4843] VL2-L4-CH1-L5-VL3-L6-CL-L7-VH2-L8-VH3;
[4844] VL2-L4-CH1-L5-VH3-L6-CL-L7-VH2-L8-VL3;
[4845] VH2-L4-CL-L5-VL2-L6-CH1-L7-VL3-L8-VH3;
[4846] VH2-L4-CL-L5-VL2-L6-CH1-L7-VH3-L8-VL3;
[4847] VH2-L4-CL-L5-VL3-L6-CH1-L7-VL2-L8-VH3;
[4848] VH2-L4-CL-L5-VH3-L6-CH1-L7-VL2-L8-VL3;
[4849] VH2-L4-CH1-L5-VL2-L6-CL-L7-VL3-L8-VH3;
[4850] VH2-L4-CH1-L5-VL2-L6-CL-L7-VH3-L8-VL3;
[4851] VH2-L4-CH1-L5-VL3-L6-CL-L7-VL2-L8-VH3;
[4852] VH2-L4-CH1-L5-VH3-L6-CL-L7-VL2-L8-VL3;
[4853] VL3-L4-CL-L5-VL2-L6-CH1-L7-VH3-L8-VH2;
[4854] VL3-L4-CL-L5-VH2-L6-CH1-L7-VH3-L8-VL2;
[4855] VL3-L4-CL-L5-VH3-L6-CH1-L7-VL2-L8-VH2;
[4856] VL3-L4-CL-L5-VH3-L6-CH1-L7-VH2-L8-VL2;
[4857] VL3-L4-CH1-L5-VL2-L6-CL-L7-VH3-L8-VH2;
[4858] VL3-L4-CH1-L5-VH2-L6-CL-L7-VH3-L8-VL2;
[4859] VL3-L4-CH1-L5-VH3-L6-CL-L7-VL2-L8-VH2;
[4860] VL3-L4-CH1-L5-VH3-L6-CL-L7-VH2-L8-VL2;
[4861] VH3-L4-CL-L5-VL2-L6-CH1-L7-VL3-L8-VH2;
[4862] VH3-L4-CL-L5-VH2-L6-CH1-L7-VL3-L8-VL2;
[4863] VH3-L4-CL-L5-VL3-L6-CH1-L7-VL2-L8-VH2;
[4864] VH3-L4-CL-L5-VL3-L6-CH1-L7-VH2-L8-VL2;
[4865] VH3-L4-CH1-L5-VL2-L6-CL-L7-VL3-L8-VH2;
[4866] VH3-L4-CH1-L5-VH2-L6-CL-L7-VL3-L8-VL2;
[4867] VH3-L4-CH1-L5-VL3-L6-CL-L7-VL2-L8-VH2; or
[4868] VH3-L4-CH1-L5-VL3-L6-CL-L7-VH2-L8-VL2; or
[4869] (k)
[4870] the first polypeptide has a structure, from amino-terminus to carboxy-terminus, represented by:
[4871] VL1-L1-VH1-L2-CL; or
[4872] VH1-L3-VL1-L4-CL;
[4873] the second polypeptide has a structure, from amino-terminus to carboxy-terminus, represented by:
[4874] VL2-L1-VH2-L2-CH1; or
[4875] VH2-L3-VL2-L4-CH1; or
[4876] (1)
[4877] the first polypeptide has a structure, from amino-terminus to carboxy-terminus, represented by:
[4878] VL1-L1-VL2-L2-CH1; or
[4879] VL2-L1-VL1-L2-CH1;
[4880] the second polypeptide has a structure, from amino-terminus to carboxy-terminus, represented by:
[4881] VH1-L3-VH2-L4-CL; or
[4882] VH2-L3-VH1-L4-CL; or
[4883] (m)
[4884] the first polypeptide has a structure, from amino-terminus to carboxy-terminus, represented by:
[4885] VL1-L1-VL2-L2-VL3-L3-CH1;
[4886] VL1-L1-VL3-L2-VL2-L3-CH1;
[4887] VL2-L1-VL1-L2-VL3-L3-CH1;
[4888] VL2-L1-VL3-L2-VL1-L3-CH1;
[4889] VL3-L1-VL1-L2-VL2-L3-CH1; or
[4890] VL3-L1-VL2-L2-VL1-L3-CH1;
[4891] the second polypeptide has a structure, from amino-terminus to carboxy-terminus, represented by:
[4892] VH1-L4-VH2-L5-VH3-L6-CL;
[4893] VH1-L4-VH3-L5-VH2-L6-CL;
[4894] VH2-L4-VH1-L5-VH3-L6-CL;
[4895] VH2-L4-VH3-L5-VH1-L6-CL;
[4896] VH3-L4-VH1-L5-VH2-L6-CL; or
[4897] VH3-L4-VH2-L5-VH1-L6-CL; or
[4898] (n)
[4899] the first polypeptide has a structure represented by:
[4900] VL1-L1-VL2-L2-VH2-L3-VH1-L4-Fc;
[4901] VL1-L1-VH2-L2-VL2-L3-VH1-L4-Fc;
[4902] VH1-L1-VH2-L2-VL2-L3-VL1-L4-Fc; or
[4903] VH1-L1-VL2-L2-VH2-L3-VL1-L4-Fc;
[4904] the second polypeptide has a structure represented by:
[4905] VL3-L5-VL4-L6-VH4-L7-VH3-L8-Fc;
[4906] VL3-L5-VH4-L6-VL4-L7-VH3-L8-Fc;
[4907] VH3-L5-VH4-L6-VL4-L7-VL3-L8-Fc; or
[4908] VH3-L5-VL4-L6-VH4-L7-VL3-L8-Fc; or
[4909] (0)
[4910] the first polypeptide has a structure represented by:
[4911] VL1-L1-VL2-L2-VH2-L3-VH1-L4-Fc;
[4912] VL1-L1-VH2-L2-VL2-L3-VH1-L4-Fc;
[4913] VH1-L1-VH2-L2-VL2-37-VL1-L4-Fc; or
[4914] VH1-L1-VL2-L2-VH2-L3-VL1-L4-Fc;
[4915] the second polypeptide has a structure represented by:
[4916] VL3-L5-VL4-L6-VH4-L7-VH3-L8-Fc;
[4917] VL3-L5-VH4-L6-VL4-L7-VH3-L8-Fc;
[4918] VH3-L5-VH4-L6-VL4-L7-VL3-L8-Fc; or
[4919] VH3-L5-VL4-L6-VH4-L7-VL3-L8-Fc; or
[4920] (p)
[4921] the first polypeptide has a structure represented by:
[4922] VL1-L1-VL2-L2-VH2-L3-VH1-L4-Fc; or
[4923] VH1-L1-VH2-L2-VL2-L3-VL1-L4-Fc;
[4924] the second polypeptide has a structure represented by:
[4925] VL3-L5-VL4-L6-VH4-L7-VH3-L8-Fc; or
[4926] VH3-L5-VH4-L6-VL4-L7-VL3-L8-Fc; or
[4927] (q)
[4928] the first polypeptide has a structure represented by:
[4929] VL1-L1-VL2-L2-VH2-L3-VH1-L4-CH1-L5-CL-L6-Fc;
[4930] VL1-L1-VH2-L2-VL2-L3-VH1-L4-CH1-L5-CL-L6-Fc;
[4931] VH1-L1-VH2-L2-VL2-L3-VL1-L4-CH1-L5-CL-L6-Fc;
[4932] VH1-L1-VL2-L2-VH2-L3-VL1-L4-CH1-L5-CL-L6-Fc;
[4933] VL1-L1-VL2-L2-VH2-L3-VH1-L4-CL-L5-CH1-L6-Fc;
[4934] VL1-L1-VH2-L2-VL2-L3-VH1-L4-CL-L5-CH1-L6-Fc;
[4935] VH1-L1-VH2-L2-VL2-L3-VL1-L4-CL-L5-CH1-L6-Fc; or
[4936] VH1-L1-VL2-L2-VH2-L3-VL1-L4-CL-L5-CH1-L6-Fc;
[4937] wherein the second polypeptide has a structure represented by:
[4938] VL3-L7-VL4-L8-VH4-L9-VH3-L10-CH1-L11-CL-L12-Fc;
[4939] VL3-L7-VH4-L8-VL4-L9-VH3-L10-CH1-L11-CL-L12-Fc;
[4940] VH3-L7-VH4-L8-VL4-L9-VL3-L10-CH1-L11-CL-L12-Fc;
[4941] VH3-L7-VL4-L8-VH4-L9-VL3-L10-CH1-L11-CL-L12-Fc;
[4942] VL3-L7-VL4-L8-VH4-L9-VH3-L10-CL-L11-CH1-L12-Fc;
[4943] VL3-L7-VH4-L8-VL4-L9-VH3-L10-CL-L11-CH1-L12-Fc;
[4944] VH3-L7-VH4-L8-VL4-L9-VL3-L10-CL-L11-CH1-L12-Fc; or
[4945] VH3-L7-VL4-L8-VH4-L9-VL3-L10-CL-L11-CH1-L12-Fc;
[4946] wherein:
[4947] CL is an immunoglobulin light chain constant region;
[4948] CH1 is an immunoglobulin heavy chain constant region 1;
[4949] Fc is a region comprising an immunoglobulin heavy chain constant region 2 (CH2), an immunoglobulin heavy chain constant region 3 (CH3), and optionally, an immunoglobulin hinge;
[4950] Ln (e.g., L1, L2, etc.) are optional amino acid linkers;
[4951] and
[4952] any one or more of the VL (VL1, VL2, VL3 and/or VL4) comprises:
[4953] (i) a LCDR1 having an amino acid sequence that is at least 65%, at least 70%, at least 75%, at least 80%, at least 85%, at least 90%, at least 95%, at least 99%, or 100% identical to any one of SEQ ID NOs: 1, 9, 15, 23, 30, 41, 48, 55, 58, 65, 72, 79, 86, 93, 99, 105, 112, 119, 130, 138, 145, 152, 159, 166, 172, 179, 186, 192, 199, 205, 212, 219, 226, 232, 324, 627, 640, 650, 659, 676, 687, 695, 703, 712, 770, 778, 785, 794, 801, 807, 814, 827, 836, 849, 858, 865, and 878, 1045, 1050, 1055, 1060, and 1065;
[4954] (ii) a LCDR2 having an amino acid sequence that is at least 65%, at least 70%, at least 75%, at least 80%, at least 85%, at least 90%, at least 95%, at least 99%, or 100% identical to any one of SEQ ID NOs: 2, 31, 628, 641, 677, 1046, 1051, 1056, and 1061; or at least 65%, at least 70%, at least 75%, at least 80%, at least 85%, at least 90%, at least 95%, at least 99%, or 100% identical to any one of amino acid sequences AAS, GAS, LGS, GTN, GTN, SAS, SDS, DNT, EVT, DAS, DVT, RNS, DVS, EDS, DDS, KDS, VAS, WAS, YTS, EVS, NNN, SYN, and DAT; and
[4955] (iii) a LCDR3 having an amino acid sequence that is at least 65%, at least 70%, at least 75%, at least 80%, at least 85%, at least 90%, at least 95%, at least 99%, or 100% identical to any one of SEQ ID NOs: 3, 10, 16, 24, 32, 38, 42, 49, 59, 66, 73, 80, 87, 94, 100, 106, 113, 120, 126, 131, 139, 146, 153, 160, 167, 173, 180, 187, 193, 200, 206, 213, 220, 227, 233, 239, 242, 246, 249, 256, 283, 285, 287, 288, 290, 292, 294, 296, 301, 304, 306, 309, 311, 313, 316, 325, 326, 329, 642, 651, 660, 668, 678, 651, 696, 704, 713, 764, 766, 768, 771, 779, 786, 792, 795, 808, 815, 821, 830, 837, 843, 850, 856, 859, 866, 872, 879, 885, and 1066; and/or
[4956] any one or more of the VH (VH1, VH2, VH3 and/or VH4) comprises:
[4957] (i) a HCDR1 having an amino acid sequence that is at least 65%, at least 70%, at least 75%, at least 80%, at least 85%, at least 90%, at least 95%, at least 99%, or 100% identical to any one of SEQ ID NOs: 5, 12, 18, 26, 34, 44, 51, 61, 68, 75, 82, 89, 96, 102, 108, 115, 122, 133, 141, 148, 155, 162, 175, 182, 189, 195, 202, 208, 215, 222, 229, 235, 318, 629, 645, 654, 663, 671, 682, 690, 699, 707, 716, 773, 781, 788, 797, 803, 810, 817, 823, 832, 839, 845, 852, 861, 868, 874, 881, 1047, 1052, 1057, 1062, and 1067;
[4958] (ii) a HCDR2 having an amino acid sequence that is at least 65%, at least 70%, at least 75%, at least 80%, at least 85%, at least 90%, at least 95%, at least 99%, or 100% identical to SEQ ID NO: 6, 19, 27, 35, 45, 52, 56, 62, 69, 76, 83, 90, 109, 116, 123, 134, 142, 149, 156, 163, 169, 176, 183, 196, 209, 216, 223, 236, 273, 319, 328, 630, 646, 655, 664, 672, 683, 691, 708, 776, 782, 789, 798, 804, 811, 818, 824, 833, 840, 846, 853, 862, 869, 875, 882, 1048, 1053, 1058, 1063, and 1068; and
[4959] (iii) a HCDR3 having an amino acid sequence that is at least 65%, at least 70%, at least 75%, at least 80%, at least 85%, at least 90%, at least 95%, at least 99%, or 100% identical to any one of SEQ ID NOs: 7, 13, 20, 28, 36, 40, 46, 53, 63, 70, 77, 84, 91, 97, 103, 110, 117, 124, 128, 135, 143, 150, 157, 164, 170, 177, 184, 190, 197, 203, 210, 217, 224, 230, 237, 241, 244, 248, 253, 257, 259, 261, 263, 265, 267, 269, 271, 274, 276, 278, 281, 297, 320, 322, 327, 330, 332, 631, 647, 656, 665, 673, 684, 692, 700, 709, 717, 765, 767, 769, 774, 783, 790, 793, 799, 805, 812, 819, 825, 834, 841, 847, 854, 857, 863, 870, 876, 883, 886, 1049, 1054, 1059, 1064, and 1069; and/or
[4960] any one or more of the VL (VL1, VL2, VL3 and/or VL4) comprises:
[4961] an amino acid sequence that is at least 65%, at least 70%, at least 75%, at least 80%, at least 85%, at least 90%, at least 95%, at least 99%, or 100% identical to any one of SEQ ID NOs: 4, 11, 17, 25, 33, 39, 43, 50, 60, 67, 74, 81, 88, 95, 101, 107, 114, 121, 127, 132, 140, 147, 154, 161, 168, 174, 181, 188, 194, 201, 207, 214, 221, 228, 234, 240, 243, 247, 250, 251, 252, 255, 284, 286, 289, 291, 293, 295, 299, 300, 302, 303, 305, 307, 308, 310, 312, 314, 315, 317, 323, 639, 649, 658, 667, 675, 686, 694, 702, 711, 772, 780, 787, 796, 802, 809, 816, 822, 831, 838, 844, 851, 860, 867, 873, 880, and 988; and/or
[4962] any one or more of the VH (VH1, VH2, VH3 and/or VH4) comprises:
[4963] an amino acid sequence that is at least 65%, at least 70%, at least 75%, at least 80%, at least 85%, at least 90%, at least 95%, at least 99%, or 100% identical to any one of SEQ ID NOs: 8, 14, 21, 22, 29, 37, 47, 54, 57, 64, 71, 78, 85, 92, 98, 104, 111, 118, 125, 129, 136, 137, 144, 151, 158, 165, 171, 178, 185, 191, 198, 204, 211, 218, 225, 231, 238, 245, 254, 258, 260, 262, 264, 266, 268, 270, 272, 275, 277, 279, 280, 282, 298, 321, 331, 626, 644, 653, 662, 670, 681, 689, 698, 706, 715, 775, 777, 784, 791, 800, 806, 813, 820, 826, 835, 842, 848, 855, 864, 871, 877, and 884.

[4964] In some aspects, the antigen binding polypeptide complexes disclosed herein comprise a first polypeptide and a second polypeptide, wherein:
[4965] (a)
[4966] at least one antigen binding polypeptide has a structure represented by:
[4967] VL1-L1-VL2-L2-VH2-L3-VH1-L4-Fc-L5-Fc; VL1-L1-VH2-L2-VL2-L3-VH1-L4-Fc-L5-Fc; VH1-L1-VH2-L2-VL2-L3-VL1-L4-Fc-L5-Fc; or VH1-L1-VL2-L2-VH2-L3-VL1-L4-Fc-L5-Fc;
[4968] wherein:

[4969] Fc is a region comprising an immunoglobulin heavy chain constant region 2 (CH2), an immunoglobulin heavy chain constant region 3 (CH3), and optionally, an immunoglobulin hinge;
[4970] Ln (e.g., L1, L2, etc.) are optional amino acid linkers;
[4971] and
[4972] any one or more of the VL (VL1 and/or VL2) comprises:
[4973] (i) a LCDR1 having an amino acid sequence that is at least 65%, at least 70%, at least 75%, at least 80%, at least 85%, at least 90%, at least 95%, at least 99%, or 100% identical to any one of SEQ ID NOs: 1, 9, 15, 23, 30, 41, 48, 55, 58, 65, 72, 79, 86, 93, 99, 105, 112, 119, 130, 138, 145, 152, 159, 166, 172, 179, 186, 192, 199, 205, 212, 219, 226, 232, 324, 627, 640, 650, 659, 676, 687, 695, 703, 712, 770, 778, 785, 794, 801, 807, 814, 827, 836, 849, 858, 865, and 878, 1045, 1050, 1055, 1060, and 1065;
[4974] (ii) a LCDR2 having an amino acid sequence that is at least 65%, at least 70%, at least 75%, at least 80%, at least 85%, at least 90%, at least 95%, at least 99%, or 100% identical to any one of SEQ ID NOs: 2, 31, 628, 641, 677, 1046, 1051, 1056, and 1061; or at least 65%, at least 70%, at least 75%, at least 80%, at least 85%, at least 90%, at least 95%, at least 99%, or 100% identical to any one of amino acid sequences AAS, GAS, LGS, GTN, GTN, SAS, SDS, DNT, EVT, DAS, DVT, RNS, DVS, EDS, DDS, KDS, VAS, WAS, YTS, EVS, NNN, SYN, and DAT; and
[4975] (iii) a LCDR3 having an amino acid sequence that is at least 65%, at least 70%, at least 75%, at least 80%, at least 85%, at least 90%, at least 95%, at least 99%, or 100% identical to any one of SEQ ID NOs: 3, 10, 16, 24, 32, 38, 42, 49, 59, 66, 73, 80, 87, 94, 100, 106, 113, 120, 126, 131, 139, 146, 153, 160, 167, 173, 180, 187, 193, 200, 206, 213, 220, 227, 233, 239, 242, 246, 249, 256, 283, 285, 287, 288, 290, 292, 294, 296, 301, 304, 306, 309, 311, 313, 316, 325, 326, 329, 642, 651, 660, 668, 678, 651, 696, 704, 713, 764, 766, 768, 771, 779, 786, 792, 795, 808, 815, 821, 830, 837, 843, 850, 856, 859, 866, 872, 879, 885, and 1066; and/or
[4976] any one or more of the VH (VH1 and/or VH2) comprises:
[4977] (i) a HCDR1 having an amino acid sequence that is at least 65%, at least 70%, at least 75%, at least 80%, at least 85%, at least 90%, at least 95%, at least 99%, or 100% identical to any one of SEQ ID NOs: 5, 12, 18, 26, 34, 44, 51, 61, 68, 75, 82, 89, 96, 102, 108, 115, 122, 133, 141, 148, 155, 162, 175, 182, 189, 195, 202, 208, 215, 222, 229, 235, 318, 629, 645, 654, 663, 671, 682, 690, 699, 707, 716, 773, 781, 788, 797, 803, 810, 817, 823, 832, 839, 845, 852, 861, 868, 874, 881, 1047, 1052, 1057, 1062, and 1067;

[4978] (ii) a HCDR2 having an amino acid sequence that is at least 65%, at least 70%, at least 75%, at least 80%, at least 85%, at least 90%, at least 95%, at least 99%, or 100% identical to SEQ ID NO: 6, 19, 27, 35, 45, 52, 56, 62, 69, 76, 83, 90, 109, 116, 123, 134, 142, 149, 156, 163, 169, 176, 183, 196, 209, 216, 223, 236, 273, 319, 328, 630, 646, 655, 664, 672, 683, 691, 708, 776, 782, 789, 798, 804, 811, 818, 824, 833, 840, 846, 853, 862, 869, 875, 882, 1048, 1053, 1058, 1063, and 1068; and
[4979] (iii) a HCDR3 having an amino acid sequence that is at least 65%, at least 70%, at least 75%, at least 80%, at least 85%, at least 90%, at least 95%, at least 99%, or 100% identical to any one of SEQ ID NOs: 7, 13, 20, 28, 36, 40, 46, 53, 63, 70, 77, 84, 91, 97, 103, 110, 117, 124, 128, 135, 143, 150, 157, 164, 170, 177, 184, 190, 197, 203, 210, 217, 224, 230, 237, 241, 244, 248, 253, 257, 259, 261, 263, 265, 267, 269, 271, 274, 276, 278, 281, 297, 320, 322, 327, 330, 332, 631, 647, 656, 665, 673, 684, 692, 700, 709, 717, 765, 767, 769, 774, 783, 790, 793, 799, 805, 812, 819, 825, 834, 841, 847, 854, 857, 863, 870, 876, 883, 886, 1049, 1054, 1059, 1064, and 1069; and/or
[4980] any one or more of the VL (VL1 and/or VL2) comprises:
[4981] an amino acid sequence that is at least 65%, at least 70%, at least 75%, at least 80%, at least 85%, at least 90%, at least 95%, at least 99%, or 100% identical to any one of SEQ ID NOs: 4, 11, 17, 25, 33, 39, 43, 50, 60, 67, 74, 81, 88, 95, 101, 107, 114, 121, 127, 132, 140, 147, 154, 161, 168, 174, 181, 188, 194, 201, 207, 214, 221, 228, 234, 240, 243, 247, 250, 251, 252, 255, 284, 286, 289, 291, 293, 295, 299, 300, 302, 303, 305, 307, 308, 310, 312, 314, 315, 317, 323, 639, 649, 658, 667, 675, 686, 694, 702, 711, 772, 780, 787, 796, 802, 809, 816, 822, 831, 838, 844, 851, 860, 867, 873, 880, and 988; and/or
[4982] any one or more of the VH (VH1 and/or VH2) comprises:
[4983] an amino acid sequence that is at least 65%, at least 70%, at least 75%, at least 80%, at least 85%, at least 90%, at least 95%, at least 99%, or 100% identical to any one of SEQ ID NOs: 8, 14, 21, 22, 29, 37, 47, 54, 57, 64, 71, 78, 85, 92, 98, 104, 111, 118, 125, 129, 136, 137, 144, 151, 158, 165, 171, 178, 185, 191, 198, 204, 211, 218, 225, 231, 238, 245, 254, 258, 260, 262, 264, 266, 268, 270, 272, 275, 277, 279, 280, 282, 298, 321, 331, 626, 644, 653, 662, 670, 681, 689, 698, 706, 715, 775, 777, 784, 791, 800, 806, 813, 820, 826, 835, 842, 848, 855, 864, 871, 877, and 884.

[4984] In some aspects, the antigen binding polypeptide complexes disclosed herein comprise a polypeptide having a structure represented by:
[4985] (a)
[4986] VL1-L1-VL2-L2-VH2-L3-VH1-L4-Fc-L5-Fc; or
[4987] VH1-L1-VH2-L2-VL2-L3-VL1-L4-Fc-L5-Fc;
[4988] Fc is a region comprising an immunoglobulin heavy chain constant region 2 (CH2), an immunoglobulin heavy chain constant region 3 (CH3), and optionally, an immunoglobulin hinge;
[4989] Ln (e.g., L1, L2, etc.) are optional amino acid linkers;
[4990] and
[4991] any one or more of the VL (VL1 and/or VL2) comprises:
[4992] (i) a LCDR1 having an amino acid sequence that is at least 65%, at least 70%, at least 75%, at least 80%, at least 85%, at least 90%, at least 95%, at least 99%, or 100% identical to any one of SEQ ID NOs: 1, 9, 15, 23, 30, 41, 48, 55, 58, 65, 72, 79, 86, 93, 99, 105, 112, 119, 130, 138, 145, 152, 159, 166, 172, 179, 186, 192, 199, 205, 212, 219, 226, 232, 324, 627, 640, 650, 659, 676, 687, 695, 703, 712, 770, 778, 785, 794, 801, 807, 814, 827, 836, 849, 858, 865, and 878, 1045, 1050, 1055, 1060, and 1065;
[4993] (ii) a LCDR2 having an amino acid sequence that is at least 65%, at least 70%, at least 75%, at least 80%, at least 85%, at least 90%, at least 95%, at least 99%, or 100% identical to any one of SEQ ID NOs: 2, 31, 628, 641, 677, 1046, 1051, 1056, and 1061; or at least 65%, at least 70%, at least 75%, at least 80%, at least 85%, at least 90%, at least 95%, at least 99%, or 100% identical to any one of amino acid sequences AAS, GAS, LGS, GTN, GTN, SAS, SDS, DNT, EVT, DAS, DVT, RNS, DVS, EDS, DDS, KDS, VAS, WAS, YTS, EVS, NNN, SYN, and DAT; and
[4994] (iii) a LCDR3 having an amino acid sequence that is at least 65%, at least 70%, at least 75%, at least 80%, at least 85%, at least 90%, at least 95%, at least 99%, or 100% identical to any one of SEQ ID NOs: 3, 10, 16, 24, 32, 38, 42, 49, 59, 66, 73, 80, 87, 94, 100, 106, 113, 120, 126, 131, 139, 146, 153, 160, 167, 173, 180, 187, 193, 200, 206, 213, 220, 227, 233, 239, 242, 246, 249, 256, 283, 285, 287, 288, 290, 292, 294, 296, 301, 304, 306, 309, 311, 313, 316, 325, 326, 329, 642, 651, 660, 668, 678, 651, 696, 704, 713, 764, 766, 768, 771, 779, 786, 792, 795, 808, 815, 821, 830, 837, 843, 850, 856, 859, 866, 872, 879, 885, and 1066; and/or
[4995] any one or more of the VH (VH1 and/or VH2) comprises:
[4996] (i) a HCDR1 having an amino acid sequence that is at least 65%, at least 70%, at least 75%, at least 80%, at least 85%, at least 90%, at least 95%, at least 99%, or 100% identical to any one of SEQ ID NOs: 5, 12, 18, 26, 34, 44, 51, 61, 68, 75, 82, 89, 96, 102, 108, 115, 122, 133, 141, 148, 155, 162, 175, 182, 189, 195, 202, 208, 215, 222, 229, 235, 318, 629, 645, 654, 663, 671, 682, 690, 699, 707, 716, 773, 781, 788, 797, 803, 810, 817, 823, 832, 839, 845, 852, 861, 868, 874, 881, 1047, 1052, 1057, 1062, and 1067;
[4997] (ii) a HCDR2 having an amino acid sequence that is at least 65%, at least 70%, at least 75%, at least 80%, at least 85%, at least 90%, at least 95%, at least 99%, or 100% identical to SEQ ID NO: 6, 19, 27, 35, 45, 52, 56, 62, 69, 76, 83, 90, 109, 116, 123, 134, 142, 149, 156, 163, 169, 176, 183, 196, 209, 216, 223, 236, 273, 319, 328, 630, 646, 655, 664, 672, 683, 691, 708, 776, 782, 789, 798, 804, 811, 818, 824, 833, 840, 846, 853, 862, 869, 875, 882, 1048, 1053, 1058, 1063, and 1068; and
[4998] (iii) a HCDR3 having an amino acid sequence that is at least 65%, at least 70%, at least 75%, at least 80%, at least 85%, at least 90%, at least 95%, at least 99%, or 100% identical to any one of SEQ ID NOs: 7, 13, 20, 28, 36, 40, 46, 53, 63, 70, 77, 84, 91, 97, 103, 110, 117, 124, 128, 135, 143, 150, 157, 164, 170, 177, 184, 190, 197, 203, 210, 217, 224, 230, 237, 241, 244, 248, 253, 257, 259, 261, 263, 265, 267, 269, 271, 274, 276, 278, 281, 297, 320, 322, 327, 330, 332, 631, 647, 656, 665, 673, 684, 692, 700, 709, 717, 765, 767, 769, 774, 783, 790, 793, 799, 805, 812, 819, 825, 834, 841, 847, 854, 857, 863, 870, 876, 883, 886, 1049, 1054, 1059, 1064, and 1069; and/or
[4999] any one or more of the VL (VL1 and/or VL2) comprises:
[5000] an amino acid sequence that is at least 65%, at least 70%, at least 75%, at least 80%, at least 85%, at least 90%, at least 95%, at least 99%, or 100% identical to any one of SEQ ID NOs: 4, 11, 17, 25, 33, 39, 43, 50, 60, 67, 74, 81, 88, 95, 101, 107, 114, 121, 127, 132, 140, 147, 154, 161, 168, 174, 181, 188, 194, 201, 207, 214, 221, 228, 234, 240, 243, 247, 250, 251, 252, 255, 284, 286, 289, 291, 293, 295, 299, 300, 302, 303, 305, 307, 308, 310, 312, 314, 315, 317, 323, 639, 649, 658, 667, 675, 686, 694, 702, 711, 772, 780, 787, 796, 802, 809, 816, 822, 831, 838, 844, 851, 860, 867, 873, 880, and 988; and/or
[5001] any one or more of the VH (VH1 and/or VH2) comprises:
[5002] an amino acid sequence that is at least 65%, at least 70%, at least 75%, at least 80%, at least 85%, at least 90%, at least 95%, at least 99%, or 100% identical to any one of SEQ ID NOs: 8, 14, 21, 22, 29, 37, 47, 54, 57, 64, 71, 78, 85, 92, 98, 104, 111, 118, 125, 129, 136, 137, 144, 151, 158, 165, 171, 178, 185, 191, 198, 204, 211, 218, 225, 231, 238, 245, 254, 258, 260, 262, 264, 266, 268, 270, 272, 275, 277, 279, 280, 282, 298, 321, 331, 626, 644, 653, 662, 670, 681, 689, 698, 706, 715, 775, 777, 784, 791, 800, 806, 813, 820, 826, 835, 842, 848, 855, 864, 871, 877, and 884.

[5003] In some aspects, an anti-SARS-CoV-2 antibody or antigen binding fragment thereof disclosed herein comprises any one or more of the antigen binding polypeptides disclosed herein. In some aspects, an anti-SARS-CoV-2 antibody or antigen binding fragment thereof disclosed herein comprises any one of the antigen binding polypeptide complexes disclosed herein.

[5004] In some aspects, an antibody (e.g., anti-SARS-CoV-2 antibody) or antigen binding fragment thereof disclosed herein is selected from the group consisting of:
[5005] (a) an antigen binding polypeptide having a structure represented by:
[5006] VL1-L1-VH1 or VH1-L1-VL1; or
[5007] an antigen binding polypeptide having a structure represented by:
[5008] VL1-L1-VL2-L2-VH2-L3-VH1;
[5009] VL1-L1-VH2-L2-VL2-L3-VH1;
[5010] VH1-L1-VH2-L2-VL2-L3-VL1; or
[5011] VH1-L1-VL2-L2-VH2-L3-VL1;
[5012] (b) an antigen binding polypeptide having a structure represented by:
[5013] VL1-L1-VH1 or VH1-L1-VL1; or
[5014] an antigen binding polypeptide having a structure represented by:
[5015] VL1-L1-VL2-L2-VH2-L3-VH1;
[5016] VL1-L1-VH2-L2-VL2-L3-VH1;
[5017] VH1-L1-VH2-L2-VL2-L3-VL1; or
[5018] VH1-L1-VL2-L2-VH2-L3-VL1;
[5019] wherein:
[5020] Ln (e.g., L1, L2, etc.) are optional amino acid linkers;
[5021] and
[5022] any one or more of the VL (VL1 and/or VL2) comprises:
[5023] (i) a LCDR1 having an amino acid sequence that is at least 65%, at least 70%, at least 75%, at least 80%, at least 85%, at least 90%, at least 95%, at least 99%, or 100% identical to any one of SEQ ID NOs: 1, 9, 15, 23, 30, 41, 48, 55, 58, 65, 72, 79, 86, 93, 99, 105, 112, 119, 130, 138, 145, 152, 159, 166, 172, 179, 186, 192, 199, 205, 212, 219, 226, 232, 324, 627, 640, 650, 659, 676, 687, 695, 703, 712, 770, 778, 785, 794, 801, 807, 814, 827, 836, 849, 858, 865, and 878, 1045, 1050, 1055, 1060, and 1065;
[5024] (ii) a LCDR2 having an amino acid sequence that is at least 65%, at least 70%, at least 75%, at least 80%, at least 85%, at least 90%, at least 95%, at least 99%, or 100% identical to any one of SEQ ID NOs: 2, 31, 628, 641, 677, 1046, 1051, 1056, and 1061; or at least 65%, at least 70%, at least 75%, at least 80%, at least 85%, at least 90%, at least 95%, at least 99%, or 100% identical to any one of amino acid sequences AAS, GAS, LGS, GTN, GTN, SAS, SDS, DNT, EVT, DAS, DVT, RNS, DVS, EDS, DDS, KDS, VAS, WAS, YTS, EVS, NNN, SYN, and DAT; and
[5025] (iii) a LCDR3 having an amino acid sequence that is at least 65%, at least 70%, at least 75%, at least 80%, at least 85%, at least 90%, at least 95%, at least 99%, or 100% identical to any one of SEQ ID NOs: 3, 10, 16, 24, 32, 38, 42, 49, 59, 66, 73, 80, 87, 94, 100, 106, 113, 120, 126, 131, 139, 146, 153, 160, 167, 173, 180, 187, 193, 200, 206, 213, 220, 227, 233, 239, 242, 246, 249, 256, 283, 285, 287, 288, 290, 292, 294, 296, 301, 304, 306, 309, 311, 313, 316, 325, 326, 329, 642, 651, 660, 668, 678, 651, 696, 704, 713, 764, 766, 768, 771, 779, 786, 792, 795, 808, 815, 821, 830, 837, 843, 850, 856, 859, 866, 872, 879, 885, and 1066; and/or
[5026] any one or more of the VH (VH1 and/or VH2) comprises:
[5027] (i) a HCDR1 having an amino acid sequence that is at least 65%, at least 70%, at least 75%, at least 80%, at least 85%, at least 90%, at least 95%, at least 99%, or 100% identical to any one of SEQ ID NOs: 5, 12, 18, 26, 34, 44, 51, 61, 68, 75, 82, 89, 96, 102, 108, 115, 122, 133, 141, 148, 155, 162, 175, 182, 189, 195, 202, 208, 215, 222, 229, 235, 318, 629, 645, 654, 663, 671, 682, 690, 699, 707, 716, 773, 781, 788, 797, 803, 810, 817, 823, 832, 839, 845, 852, 861, 868, 874, 881, 1047, 1052, 1057, 1062, and 1067;
[5028] (ii) a HCDR2 having an amino acid sequence that is at least 65%, at least 70%, at least 75%, at least 80%, at least 85%, at least 90%, at least 95%, at least 99%, or 100% identical to SEQ ID NO: 6, 19, 27, 35, 45, 52, 56, 62, 69, 76, 83, 90, 109, 116, 123, 134, 142, 149, 156, 163, 169, 176, 183, 196, 209, 216, 223, 236, 273, 319, 328, 630, 646, 655, 664, 672, 683, 691, 708, 776, 782, 789, 798, 804, 811, 818, 824, 833, 840, 846, 853, 862, 869, 875, 882, 1048, 1053, 1058, 1063, and 1068; and
[5029] (iii) a HCDR3 having an amino acid sequence that is at least 65%, at least 70%, at least 75%, at least 80%, at least 85%, at least 90%, at least 95%, at least 99%, or 100% identical to any one of SEQ ID NOs: 7, 13, 20, 28, 36, 40, 46, 53, 63, 70, 77, 84, 91, 97, 103, 110, 117, 124, 128, 135, 143, 150, 157, 164, 170, 177, 184, 190, 197, 203, 210, 217, 224, 230, 237, 241, 244, 248, 253, 257, 259, 261, 263, 265, 267, 269, 271, 274, 276, 278, 281, 297, 320, 322, 327, 330, 332, 631, 647, 656, 665, 673, 684, 692, 700, 709, 717, 765, 767, 769, 774, 783, 790, 793, 799, 805, 812, 819, 825, 834, 841, 847, 854, 857, 863, 870, 876, 883, 886, 1049, 1054, 1059, 1064, and 1069; and/or
[5030] any one or more of the VL (VL1 and/or VL2) comprises:
[5031] an amino acid sequence that is at least 65%, at least 70%, at least 75%, at least 80%, at least 85%, at least 90%, at least 95%, at least 99%, or 100% identical to any one of SEQ ID NOs: 4, 11, 17, 25, 33, 39, 43, 50, 60, 67, 74, 81, 88, 95, 101, 107, 114, 121, 127, 132, 140, 147, 154, 161, 168, 174, 181, 188, 194, 201, 207, 214, 221, 228, 234, 240, 243, 247, 250, 251, 252, 255, 284, 286, 289, 291, 293, 295, 299, 300, 302, 303, 305, 307, 308, 310, 312, 314, 315, 317, 323, 639, 649, 658, 667, 675, 686, 694, 702, 711, 772, 780, 787, 796, 802, 809, 816, 822, 831, 838, 844, 851, 860, 867, 873, 880, and 988; and/or
[5032] any one or more of the VH (VH1 and/or VH2) comprises:
[5033] an amino acid sequence that is at least 65%, at least 70%, at least 75%, at least 80%, at least 85%, at least 90%, at least 95%, at least 99%, or 100% identical to any one of SEQ ID NOs: 8, 14, 21, 22, 29, 37, 47, 54, 57, 64, 71, 78, 85, 92, 98, 104, 111, 118, 125, 129, 136, 137, 144, 151, 158, 165, 171, 178, 185, 191, 198, 204, 211, 218, 225, 231, 238, 245, 254, 258, 260, 262, 264, 266, 268, 270, 272, 275, 277, 279, 280, 282, 298, 321, 331, 626, 644, 653, 662, 670, 681, 689, 698, 706, 715, 775, 777, 784, 791, 800, 806, 813, 820, 826, 835, 842, 848, 855, 864, 871, 877, and 884.

[5034] The following sequences are included as part of the present disclosure.

### Antigen Binding Polypeptides and Polypeptide Complexes-2

[5035] Provided herein are antigen binding polypeptides and antigen binding polypeptide complexes having certain structural features.

[5036] In some aspects, the antigen binding polypeptides provided herein comprise one or more immunoglobulin light chain variable regions (VL) and/or one or more immunoglobulin heavy chain variable regions (VH). In some aspects, the one or more VL (herein also referred to as, e.g., VL1, VL2, VL3, or VL4) specifically binds to an antigen, including an infectious disease antigen (including a viral antigen that is not a sarbecovirus antigen, a bacterial antigen, and a parasite antigen), a tumor-associated antigen, or an antigen associated with a pathology other than an infectious disease and a cancer/tumor. In some aspects, the one or more VL specifically binds to an infectious disease antigen. In some aspects, the one or more VL specifically binds to a viral antigen that is not a sarbecovirus antigen. In some aspects, the one or more VL specifically binds to a bacterial antigen. In some aspects, the one or more VL specifically binds to a parasite antigen. In some aspects, the one or more VL specifically binds to a tumor-associated antigen. In some aspects, the one or more VL specifically binds to an antigen associated with a pathology other than an infectious disease and a cancer/tumor. In some aspects, the one or more VH (herein also referred to as, e.g., VH1, VH2, VH3, or VH4) specifically binds to an antigen, including an infectious disease antigen (including a viral antigen that is not a sarbecovirus antigen, a bacterial antigen, and a parasite antigen), a tumor-associated antigen, or an antigen associated with a pathology other than an infectious disease and a cancer/tumor. In some aspects, the one or more VH specifically binds to an infectious disease antigen. In some aspects, the one or more VH specifically binds to a viral antigen that is not a sarbecovirus antigen. In some aspects, the one or more VH specifically binds to a bacterial antigen. In some aspects, the one or more VH specifically binds to a parasite antigen. In some aspects, the one or more VH specifically binds to a tumor-associated antigen. In some aspects, the one or more VH specifically binds to an antigen associated with a pathology other than an infectious disease and a cancer/tumor.

[5037] In some aspects, the antigen binding polypeptides provided herein comprise two VLs, each of the two VLs comprises a CDR1, a CDR2, and a CDR3 that are the same. In some aspects, each of the two VLs comprises a CDR1, a CDR2, and a CDR3 that are different between the two VLs.

[5038] In some aspects, the antigen binding polypeptides provided herein comprise more than two VLs. In some aspects, each of the more than two VLs comprises a CDR1, a CDR2, and a CDR3 that are the same. In some aspects, each of the more than two VLs comprises a CDR1, a CDR2, and a CDR3 that are different. In some aspects, some of the more than two VLs comprise a CDR1, a CDR2, and a CDR3 that are the same, and some of the more than two VLs comprise a CDR1, a CDR2, and a CDR3 that are different.

[5039] In some aspects, the antigen binding polypeptides provided herein comprise two VHs, each of the two VHs comprises a CDR1, a CDR2, and a CDR3 that are the same. In some aspects, each of the two VHs comprises a CDR1, a CDR2, and a CDR3 that are different between the two VHs.

[5040] In some aspects, the antigen binding polypeptides provided herein comprise more than two VHs. In some aspects, each of the more than two VHs comprises a CDR1, a CDR2, and a CDR3 that are the same. In some aspects, each of the more than two VHs comprises a CDR1, a CDR2, and a CDR3 that are different. In some aspects, some of the more than two VHs comprises a CDR1, a CDR2, and a CDR3 that are the same, and some of the more than two VHs comprises a CDR1, a CDR2, and a CDR3 that are different.

[5041] In some aspects, the antigen binding polypeptides provided herein comprise two VLs. In some aspects, the two VLs are the same. In some aspects, the two VLs are different.

[5042] In some aspects, the antigen binding polypeptides provided herein comprise more than two VLs. In some aspects, each of the more than two VLs is the same. In some aspects, each of the more than two VLs is different. In some aspects, some of the more than two VLs are the same, and some of the more than two VLs are different.

[5043] In some aspects, the antigen binding polypeptides provided herein comprise two VHs. In some aspects, the two VHs are the same. In some aspects, the two VHs are different.

[5044] In some aspects, the antigen binding polypeptides provided herein comprise more than two VHs. In some aspects, each of the more than two VHs is the same. In some aspects, each of the more than two VHs is different. In some aspects, some of the more than two VHs are the same, and some of the more than two VHs are different.

[5045] In some aspects, the antigen binding polypeptides provided herein comprise an immunoglobulin heavy chain constant region 1 (CH1). In some aspects, the antigen binding polypeptides provided herein comprise an immunoglobulin light chain constant region or domain (CL).

[5046] In some aspects, the antigen binding polypeptides provided herein comprise one or more optional amino acid linkers.

[5047] In some aspects, the antigen binding polypeptides provided herein have a structure, from amino-terminus to carboxy-terminus, represented by:
[5048] VL1-L1-CL-L2-VH1-L3-CH1;
[5049] VL1-L1-CH1-L2-VH1-L3-CL;
[5050] VH1-L1-CL-L2-VL1-L3-CH1; or
[5051] VH1-L1-CH1-L2-VL1-L3-CL;
[5052] wherein:
[5053] VL1 is an immunoglobulin light chain variable region that specifically binds to (i) a tumor-associated antigen (TAA), (ii) an infectious disease antigen that is not a sarbecovirus antigen, or (iii) an other-pathology antigen;
[5054] VH1 is an immunoglobulin heavy chain variable region that specifically binds to (i) a tumor-associated antigen (TAA), (ii) an infectious disease antigen that is not a sarbecovirus antigen, or (iii) an other-pathology antigen;
[5055] CL is an immunoglobulin light chain constant region;
[5056] CH1 is an immunoglobulin heavy chain constant region 1; and
[5057] L1-L3 are optional amino acid linkers.

[5058] In some aspects, the antigen binding polypeptides provided herein have a structure, from amino-terminus to carboxy-terminus, represented by
[5059] VL1-L1-VH1-L2-CL; or
[5060] VH1-L1-VL1-L2-CL;
[5061] wherein:
[5062] VL1 is an immunoglobulin light chain variable region that specifically binds to (i) a tumor-associated antigen (TAA), (ii) an infectious disease antigen that is not a sarbecovirus antigen, or (iii) an other-pathology antigen;
[5063] VH1 is an immunoglobulin heavy chain variable region that specifically binds to (i) a tumor-associated antigen (TAA), (ii) an infectious disease antigen that is not a sarbecovirus antigen, or (iii) an other-pathology antigen;
[5064] CL is an immunoglobulin light chain constant region; and
[5065] L1-L2 are optional amino acid linkers.

[5066] In some aspects, the antigen binding polypeptides provided herein have a structure, from amino-terminus to carboxy-terminus, represented by
[5067] VL1-L1-VH1-L2-CH1; or
[5068] VH1-L1-VL1-L2-CH1;
[5069] wherein:
[5070] VL1 is an immunoglobulin light chain variable region that specifically binds to (i) a tumor-associated antigen (TAA), (ii) an infectious disease antigen that is not a sarbecovirus antigen, or (iii) an other-pathology antigen;
[5071] VH1 is an immunoglobulin heavy chain variable region that specifically binds to (i) a tumor-associated antigen (TAA), (ii) an infectious disease antigen that is not a sarbecovirus antigen, or (iii) an other-pathology antigen;
[5072] CH1 is an immunoglobulin heavy chain constant region 1; and
[5073] L1-L2 are optional amino acid linkers.

[5074] In any aspect shown herein as a structure from amino terminus to carboxy terminus, and with binding pairs selected from VL and/or VH or other structural regions such as CH1, CL, CH2, CH3, when shown without a specific linker such as L1, L2, etc., such linkers are optionally present in such structures between each designated subsequence VL, VH, etc.

[5075] In some aspects, the TAA is selected from the group consisting of 5′-nucleotidase, 5T4, A2AR, activin receptor-like kinase 1, adenocarcinoma antigen, ADRB3, AFP, AKAP-4, ALK, alpha-fetoprotein, androgen receptor, angiopoietin 2, AOC3, APRIL, ATPDase, AXL, B7-4, B7DC, B7H1, B7H2, B7H3, B7H4, B7H5, B7H6, B7H7, B7RP1, BAFF, BAFFR, BCMA, bcr-abl, BlyS, BORIS, BST2, BTK, BTLA, C3, C5, C5a, C5a receptor, CA-125, CAIX, CanAg (a glycoform of MUC1), CCL11, CCL15, CCL17, CCL19, CCL2, CCL20, CCL21, CCL25, CCL3, CCL4, CCL5, CCL7, CCL8, CCR2, CCR3, CCR4, CCR5, CD11, CD11a, CD123, CD125, CD133, CD134, CD137, CD137L, CD147, CD15, CD154, CD160, CD16A, CD171, CD179a, CD18, CD184, CD19, CD2, CD20, CD200, CD22, CD221, CD23, CD24, CD242, CD25, CD27, CD272, CD276, CD278, CD279, CD28, CD3, CD30, CD300LF, CD319, CD33, CD37, CD38, CD39, CD3ε, CD4, CD40, CD40L, CD41, CD44v6, CD45, CD47, CD49B, CD5, CD51, CD52, CD54, CD56, CD6, CD62L, CD7, CD70, CD72, CD74, CD79a, CD79b, CD80, CD86, CD97, CEA, CEACAM5, claudin 18 isoform 2, CLDN6, CLEC12A, CLEC9, CLEC91, CLL-1, cMet, coagulation factor III, CRTH2, CS1, CSF-1, CSFIR, CSF-2, CSF-3, CTGF, CTLA4, CXCL1, CXCL12, CXCL13, CXCL2, CXCL4, CXCR3, CXORF61, CyclinB1, CYP1B1, dendritic cell-associated lectin 2, DLL3, DLL4, DNGR-1, DR5, E7, E-cadherin, EGFL7, EGFR, EGFRVIII, ELF2M, EMR2, endoglin, ENTPD1, EpCAM, EphA2, EPHA3, ephrin receptor A3, EphrinB2, episialin, ERBB2 (Her2/neu), ERBB3, ERG (TMPRSS2-ETS fusion gene), ETV6-AML, FAP, FCAR, FCER1, FCER1A, FCER2, FCRL5, FGF 23, FGFR, FGFR2, fibronectin extra domain-B, FLAP, FLT3, folate hydrolase, folate receptor 1, folate receptor alpha, folate receptor beta, FOLH1, Fos-relatedantigen1, Frizzled receptor, Fucosyl GM1, GD2, GD3, gelatinase B, Gi24, GITR, GITRL, GloboH, Glutamate carboxypeptidase II, glypican 3, GM3, GP100, GPC1, GPC2, GPC3, gplOO, GPNMB, GPR20, GPR5, GPRC5D, growth differentiation factor 8, GUCY2C, HAVCR1, HER1, HER2, HER3, HGF, HGFR, HHLA2, histone complex, HLA-DR, HMGB1, HMWMAA, HPVE6, hTERT, human telomerase reverse transcriptase, HVEM, ICAM-1, ICOS, ICOSL, IDO, IFNa, IgE, IGF-1, IGF1R, IGF-2, IGF-I receptor, IGLL1, IL1, IL10, IL12, IL13, IL13Ra2, IL-13Ra2, IL13Ra1, IL15, IL17, IL-17A, IL-17AF, IL-17F, IL17Rb, IL18, IL1B, IL1F10, IL-1a, IL-1B, IL2, IL-20, IL22, IL23, IL-23A, IL25, IL2Rbeta, IL-3 receptor, IL-31 receptor A, IL33, IL35, IL4, IL4Ra, IL5, IL5R, IL6, IL7, IL7Ra, IL8, IL9, IL9R, IL1A, IL-llRa, integrin α4, integrin α4 β7, integrin α5β1, integrin αIIbβ3, integrin αvβ3, integrin β7, interleukin 36 receptor IL1RAP, interleukin 36 receptor IL1RL2, intestinal carboxy lesterase, ITGB4, ITK, KIR, KIR2D, KIT, LAG3, LAGE-1a, LAIR1, LAMP1, LCK, legumain, leptin. LewisY, LILRA2, LIV-1, LMP2, LOXL2, LPFS2, LRRC15, LY6K, LY75, LYPD3, MAD-CT-1, MAD-CT-2, MAGEA1, MAGE-A1, MCAM, MCP-1, MelanA/MART1, mesothelin, MHC classII, MIF, ML-IAP, MS4A1, MST1R (RON), MUC1, MUC-1, MUC16, MUC-16, MUC5AC, muthsp70)-2, MYCN, NA17, NCA-90) granulocyte antigen, NCAM, NCR3LG1, nectin-4, NGNA ganglioside, NKG2A, NKG2D, NKp46, Notch 1, Notch receptor, NRP1, NTPDase-1, NY-BR-1, NY-ESO-1, o-acetyl-GD2, OR51E2, OX40), OX40L, OY-TES1, p53, p53mutant, PANX3, PAP, PAX3, PAX5, PCDC1, PCDP1, PCTA-1/Galectin8, PD-1, PDGFRA, PDGFR-beta, PD-L1, PD-L2, phosphate-sodium co-transporter, phosphatidylserine, PLAC1, polysialicacid, PROM1, prostase, prostein, PRSS21, PSCA, PSMA, PTK7, RAGE-1, RANKL, Ras mutant, rhIL1O, RhoC, root plate-specific spondin 3, ROR1, ROR2, RTN4, RU1, RU2, S152, sarcoma translocation breakpoints, SART3, scatter factor receptor kinase, SDC1, SIRPalpha, SISP1, SLAMF7, SLC, sLc, SLITRK6, spermprotein17, SPG64, sphingosine-1-phosphate, SSEA-4, SSX2, ST2, STEAP1, STEAP2, surviving and telomerase, Syk kinase, T14, TACI, TAG72, TARP, T-cell receptor, TCRβ, TDO, TEMI/CD248, TEM7R, tenascin C, TGFBETA, TGF-β1, TGF-β2, TGS5, the extracellular portion of the APRIL protein, Tie2, TIGIT, TIM3, TLR, TLR2, TLR4, TLR5, TLR9, TMEF1, TnAg, TNF, TNFa, TNFR superfamily member 4, TNFRSF7, Tp55, TRAC, TRAIL-R1, TRAIL-R2, TRAP, TREM1, TROP2, TRP-2, TSHR, TSLP, TSLPR, tumor antigen CTAA16.88, TWEAK, tyrosinase, TYRPI glycoprotein 75, UPK2, VAP-1, VEGF, VEGFA, VEGFR-1, VEGFR2, vimentin, VISTA. Vstm3, WT1, WUCAM, and XAGE1.

[5076] In some aspects, the antigen binding polypeptides provided herein comprise a VL1 comprising a light chain complementarity determining region 1 (LCDR1), LCDR2, and/or LCDR3 of an antibody selected from the group consisting of losatuxizumab vedotin, utomilumab, urelumab, oleclumab, naptumomab estafenatox, ascrinvacumab, pintumomab, tacatuzumab tetraxetan, nesvacumab, vanucizumab, timolumab, vapaliximab, vepalimomab, enapotamab vedotin, ianalumab, belimumab, tabalumab, tibulizumab, belantamab mafodotin, teclistamab, teclistamab, detumomab, nacolomab tafenatox, eculizumab, lendalizumab, pexelizumab, pozelimab, ravulizumab, tesidolumab, vilobelimab, abagovomab, igovomab, oregovomab, sofituzumab vedotin, cantuzumab mertansine, cantuzuma bravtansine, girentuximab, altumomab pentetate, arcitumomab, besilesomab, bertilimumab, plozalizumab, mogamulizumab, leronlimab, PRO140, rovelizumab, rovelizumab, talacotuzumab, benralizumab, tavolimab, vonlerolizumab, gavilimomab, ziralimumab, fanolesomab ipilimumab, ruplizumab, toralizumab, dapirolizumab pegol, toralizumab, dapirolizumab pegol, ruplizumab, blinatumomab, inebilizumab, loncastuximab tesirine, SGN-CD19A, tafasitamab, taplitumomab paptox, XMAB-5574, Budoprutug, Obexelimab, duvortuxizumab, englumafusp alfa, Emfizatamab, zeripatamig, siplizumab, blontuvetmab, FBTA05, ibritumomab tiuxetan, obinutuzumab, ocaratuzumab, ocrelizumab, ofatumumab, rituximab, tositumomab, ublituximab, veltuzumab, divozilimab, eramkafusp alfa, ripertamab, zuberitamab, glofitamab, nofetumomab merpentan, samalizumab, imvotamab, odronextamab, plamotamab, bectumomab, inotuzumab ozogamicin, moxetumomab pasudotox, pinatuzumab vedotin, gomiliximab, lumiliximab, inolimomab, inolimomab, daclizumab, camidanluma btesirine, basiliximab, varlilumab, omburtamab, enoblituzumab, vopratelimab, lulizumabpegol, TGN1412, muromonab-CD3, otelixizumab, teplizumab, visilizumab, epcoritamab, epcoritamab, brentuximab vedotin, iratumumab, azintuxizumab vedotin, gemtuzumab ozogamicin, lintuzumab, vadastuximab talirine, naratuximab emtansine, otlertuzumab, lilotomab satetraxetan, tetulomab, daratumumab, isatuximab, foralumab, mosunetuzumab, mosunetuzumab, cedelizumab, ibalizumab, keliximab, priliximab, tregalizumab, zanolimumab, bleselumab, iscalimab, lucatumumab, ravagalimab, selicrelumab, tencliximab, vanalimab, abciximab, bivatuzumab, iomab-B, telimomab aritox, zolimomab aritox, abituzumab, intetumumab, alemtuzumab, tamtuvetmab, lorvotuzumab mertansine, itolizumab, cusatuzumab, vorsetuzumab mafodotin, milatuzumab, iladatuzumab vedotin, polatuzumab vedotin, galiximab, cibisatamab, zolbetuximab, naxitamab, tisotumab vedotin, olendalizumab, pamrevlumab, lacnotuzumab, cabiralizumab, emactuzumab, axatilimab, gimsilumab, lenzilumab, namilumab, tremelimumab, ulocuplumab, tepoditamab, rovalpituzumab tesirine, tarlatamab, demcizumab, navicixizumab, drozitumab, parsatuzumab, depatuxizumab mafodotin, modotuximab, carotuximab, adecatumumab, adecatumumab, oportuzumab monatox, solitomab, tucotuzumab celmoleukin, edrecolomab, catumaxomab, ifabotuzumab, fibatuzumab, zalutumumab, panitumumab, cetuximab, futuximab, imgatuzumab, laprituximab emtansine, matuzumab, necitumumab, nimotuzumab, tomuzotuximab, amivantamab, amivantamab, epitumomab cituxetan, sontuzumab, duligotuzumab, elgemtumab, lumretuzumab, patritumab, seribantumab, zenocutuzumab, sibrotuzumab, burosumab, aprutumab ixadotin, radretumab, pasotuxizumab, farletuzumab, mirvetuximab soravtansine, vantictumab, TRBS07, 3F8, dinutuximab, dinutuximab beta, ecromeximab, mitumomab, andecaliximab, capromab, codrituzumab, glembatumumab vedotin, talquetamab, talquetamab, trevogrumab, indusatumab vedotin, ficlatuzumab, rilotumumab, zatuximab, pentuzimab, pentuzimab, margetuximab, timigutuzumab, trastuzumab, trastuzumab duocarmazine, trastuzumab emtansine, gancotamab, pertuzumab, ertumaxomab, emibetuzumab, telisotuzumab, telisotuzumab vedotin, derlotuximab biotin, apolizumab, onartuzumab, bersanlimab, enlimomabpegol, rontalizumab, sifalimumab, talizumab, ganitumab, istiratumab, robatumumab, teprotumumab, figitumumab, ganitumab, istiratumab, robatumumab, teprotumumab, cixutumumab, dalotuzumab, xentuzumab, dusigitumab, canakinumab, ustekinumab, ustekinumab, ustekinumab, briakinumab, briakinumab, abrezekimab, lebrikizumab, romilkimab, TNX-650, tralokinumab, anrukinzumab, brodalumab, ixckizumab, netakimab, perakizumab, secukinumab, vunakizumab, afascvikumab, afascvikumab, bimckizumab, bimekizumab, remtolumab, bermekimab, lutikizumab, lutikizumab, gevokizumab, cergutuzumab amunaleukin, fletikumab, fezakinumab, brazikumab, guselkumab, mirikizumab, tildrakizumab, risankizumab, flotetuzumab, nemolizumab, pascolizumab, dupilumab, mepolizumab, reslizumab, clazakizumab, elsilimomab, olokizumab, sarilumab, siltuximab, sirukumab, vobarilizumab, tocilizumab, SA237, satralizumab, enokizumab, prezalizumab, natalizumab, abrilumab, abrilumab, vedolizumab, volociximab, tadocizumab, etaracizumab, ctrolizumab, spesolimab, vatelizumab, erlizumab, lirilumab, relatlimab, cBR96-doxorubicinimmunoconjugate, odulimomab, efalizumab, ladiratuzumab vedotin, simtuzumab, samrotamab vedotin, aselizumab, lupartumab amadotin, imalumab, carlumab, imaprelimab, amatuximab, amatuximab, anetumab ravtansine, narnatumab, clivatuzumab tetraxetan, pemtumomab, gatipotuzumab, ensituximab, lemalesomab, sulesomab, enfortumab vedotin, racotumomab, monalizumab, brontictuzumab, tarextumab, vesencumab, oxelumab, gilvetmab, tislelizumab, dostarlimab, BCD-100, nivolumab, PDR001, pembrolizumab, pidilizumab, retifanlimab, spartalizumab, sintilimab, cemiplimab, olaratumab, tovetumab, rinucumab, atezolizumab, avelumab, durvalumab, lifastuzumab vedotin, bavituximab, acapatamab, capromab, rosopatamab, nezastomig, pasotuxizumab, pelgifatamab, voxalatamab, cofetuzumab pelidotin, denosumab, rosmantuzumab, cirmtuzumab, atinumab, indatuximab ravtansine, elotuzumab, sirtratumab vedotin, sonepcizumab, vandortuzumab vedotin, minretumomab, satumomab pendetide, maslimomab, ontuxizumab, tenatumomab, fresolimumab, metelimumab, lerdelimumab, tezepelumab, etigilimab, tiragotumab, placulumab, prezalumab, infliximab, nerelimomab, ozoralizumab, adalimumab, afclimomab, certolizumab pegol, golimumab, mapatumumab, conatumumab, lexatumumab, tigatuzumab, sacituzumab govitecan, votumumab, pogalizumab, letolizumab, pankomab, anatumomab mafenatox, enavatuzumab, flanvotumab, brolucizumab, ranibizumab, varisacumab, bevacizumab, faricimab, icrucumab, alacizumab pegol, ramucirumab, pritumumab, and onvatilimab.

[5077] In some aspects, the antigen binding polypeptides provided herein comprise a VH1 comprising a heavy chain complementarity determining region 1 (HCDR1), HCDR2, and/or HCDR3 of an antibody selected from the group consisting of losatuxizumab vedotin, utomilumab, urelumab, oleclumab, naptumomab estafenatox, ascrinvacumab, pintumomab, tacatuzumab tetraxetan, nesvacumab, vanucizumab, timolumab, vapaliximab, vepalimomab, enapotamab vedotin, ianalumab, belimumab, tabalumab, tibulizumab, belantamab mafodotin, teclistamab, teclistamab, detumomab, nacolomab tafenatox, eculizumab, lendalizumab, pexelizumab, pozelimab, ravulizumab, tesidolumab, vilobclimab, abagovomab, igovomab, oregovomab, sofituzumab vedotin, cantuzumab mertansine, cantuzuma bravtansine, girentuximab, altumomab pentetate, arcitumomab, besilesomab, bertilimumab, plozalizumab, mogamulizumab, leronlimab, PRO140, rovelizumab, rovelizumab, talacotuzumab, benralizumab, tavolimab, vonlerolizumab, gavilimomab, ziralimumab, fanolesomab, ipilimumab, ruplizumab, toralizumab, dapirolizumab pegol, toralizumab, dapirolizumab pegol, ruplizumab, blinatumomab, inebilizumab, loncastuximab tesirine, SGN-CD19A, tafasitamab, taplitumomab paptox, XMAB-5574, Budoprutug, Obexelimab, duvortuxizumab, englumafusp alfa, Emfizatamab, zeripatamig, siplizumab, blontuvetmab, FBTA05, ibritumomab tiuxctan, obinutuzumab, ocaratuzumab, ocrelizumab, ofatumumab, rituximab, tositumomab, ublituximab, veltuzumab, divozilimab, eramkafusp alfa, ripertamab, zuberitamab, glofitamab, nofetumomab merpentan, samalizumab, imvotamab, odronextamab, plamotamab, bectumomab, inotuzumab ozogamicin, moxetumomab pasudotox, pinatuzumab vedotin, gomiliximab, lumiliximab, inolimomab, inolimomab, daclizumab, camidanluma btesirine, basiliximab, varlilumab, omburtamab, enoblituzumab, vopratelimab, lulizumabpegol, TGN1412, muromonab-CD3, otelixizumab, teplizumab, visilizumab, epcoritamab, epcoritamab, brentuximab vedotin, iratumumab, azintuxizumab vedotin, gemtuzumab ozogamicin, lintuzumab, vadastuximab talirine, naratuximab emtansine, otlertuzumab, lilotomab satetraxetan, tetulomab, daratumumab, isatuximab, foralumab, mosunetuzumab, mosunetuzumab, cedelizumab, ibalizumab, keliximab, priliximab, tregalizumab, zanolimumab, blesclumab, iscalimab, lucatumumab, ravagalimab, selicrelumab, tencliximab, vanalimab, abciximab, bivatuzumab, iomab-B, telimomab aritox, zolimomab aritox, abituzumab, intetumumab, alemtuzumab, tamtuvetmab, lorvotuzumab mertansine, itolizumab, cusatuzumab, vorsetuzumab mafodotin, milatuzumab, iladatuzumab vedotin, polatuzumab vedotin, galiximab, cibisatamab, zolbetuximab, naxitamab, tisotumab vedotin, olendalizumab, pamrevlumab, lacnotuzumab, cabiralizumab, cmactuzumab, axatilimab, gimsilumab, lenzilumab, namilumab, tremelimumab, ulocuplumab, tepoditamab, rovalpituzumab tesirine, tarlatamab, demcizumab, navicixizumab, drozitumab, parsatuzumab, depatuxizumab mafodotin, modotuximab, carotuximab, adecatumumab, adecatumumab, oportuzumab monatox, solitomab, tucotuzumab celmoleukin, edrecolomab, catumaxomab, ifabotuzumab, fibatuzumab, zalutumumab, panitumumab, cetuximab, futuximab, imgatuzumab, laprituximab emtansine, matuzumab, necitumumab, nimotuzumab, tomuzotuximab, amivantamab, amivantamab, epitumomab cituxetan, sontuzumab, duligotuzumab, elgemtumab, lumretuzumab, patritumab, seribantumab, zenocutuzumab, sibrotuzumab, burosumab, aprutumab ixadotin, radretumab, pasotuxizumab, farletuzumab, mirvetuximab soravtansine, vantictumab, TRBS07, 3F8, dinutuximab, dinutuximab beta, ecromeximab, mitumomab, andecaliximab, capromab, codrituzumab, glembatumumab vedotin, talquetamab, talquetamab, trevogrumab, indusatumab vedotin, ficlatuzumab, rilotumumab, zatuximab, pentuzimab, pentuzimab, margetuximab, timigutuzumab, trastuzumab, trastuzumab duocarmazine, trastuzumab emtansine, gancotamab, pertuzumab, ertumaxomab, emibetuzumab, telisotuzumab, telisotuzumab vedotin, derlotuximab biotin, apolizumab, onartuzumab, bersanlimab, enlimomabpegol, rontalizumab, sifalimumab, talizumab, ganitumab, istiratumab, robatumumab, teprotumumab, figitumumab, ganitumab, istiratumab, robatumumab, teprotumumab, cixutumumab, dalotuzumab, xentuzumab, dusigitumab, canakinumab, ustekinumab, ustekinumab, ustekinumab, briakinumab, briakinumab, abrezekimab, lebrikizumab, romilkimab, TNX-650, tralokinumab, anrukinzumab, brodalumab, ixekizumab, netakimab, perakizumab, secukinumab, vunakizumab, afasevikumab, afasevikumab, bimekizumab, bimekizumab, remtolumab, bermekimab, lutikizumab, lutikizumab, gevokizumab, cergutuzumab amunaleukin, fletikumab, fezakinumab, brazikumab, guselkumab, mirikizumab, tildrakizumab, risankizumab, flotetuzumab, nemolizumab, pascolizumab, dupilumab, mepolizumab, reslizumab, clazakizumab, elsilimomab, olokizumab, sarilumab, siltuximab, sirukumab, vobarilizumab, tocilizumab, SA237, satralizumab, enokizumab, prezalizumab, natalizumab, abrilumab, abrilumab, vedolizumab, volociximab, tadocizumab, etaracizumab, etrolizumab, spesolimab, vatelizumab, erlizumab, lirilumab, relatlimab, cBR96-doxorubicinimmunoconjugate, odulimomab, efalizumab, ladiratuzumab vedotin, simtuzumab, samrotamab vedotin, aselizumab, lupartumab amadotin, imalumab, carlumab, imaprelimab, amatuximab, amatuximab, anetumab ravtansine, narnatumab, clivatuzumab tetraxetan, pemtumomab, gatipotuzumab, ensituximab, lemalesomab, sulesomab, enfortumab vedotin, racotumomab, monalizumab, brontictuzumab, tarextumab, vesencumab, oxelumab, gilvetmab, tislelizumab, dostarlimab, BCD-100, nivolumab, PDR001, pembrolizumab, pidilizumab, retifanlimab, spartalizumab, sintilimab, cemiplimab, olaratumab, tovetumab, rinucumab, atezolizumab, avelumab, durvalumab, lifastuzumab vedotin, bavituximab, acapatamab, capromab, rosopatamab, nezastomig, pasotuxizumab, pelgifatamab, voxalatamab, cofetuzumab pelidotin, denosumab, rosmantuzumab, cirmtuzumab, atinumab, indatuximab ravtansine, elotuzumab, sirtratumab vedotin, sonepcizumab, vandortuzumab vedotin, minretumomab, satumomab pendetide, maslimomab, ontuxizumab, tenatumomab, fresolimumab, metelimumab, lerdelimumab, tezepelumab, etigilimab, tiragotumab, placulumab, prezalumab, infliximab, nerelimomab, ozoralizumab, adalimumab, afelimomab, certolizumab pegol, golimumab, mapatumumab, conatumumab, lexatumumab, tigatuzumab, sacituzumab govitecan, votumumab, pogalizumab, letolizumab, pankomab, anatumomab mafenatox, enavatuzumab, flanvotumab, brolucizumab, ranibizumab, varisacumab, bevacizumab, faricimab, icrucumab, alacizumab pegol, ramucirumab, pritumumab, and onvatilimab.

[5078] In some aspects, the antigen binding polypeptides provided herein comprise a VL1 comprising a VL of an antibody selected from the group consisting of losatuxizumab vedotin, utomilumab, urclumab, oleclumab, naptumomab estafenatox, ascrinvacumab, pintumomab, tacatuzumab tetraxetan, nesvacumab, vanucizumab, timolumab, vapaliximab, vepalimomab, enapotamab vedotin, ianalumab, belimumab, tabalumab, tibulizumab, belantamab mafodotin, teclistamab, teclistamab, detumomab, nacolomab tafenatox, eculizumab, lendalizumab, pexelizumab, pozelimab, ravulizumab, tesidolumab, vilobelimab, abagovomab, igovomab, oregovomab, sofituzumab vedotin, cantuzumab mertansine, cantuzuma bravtansine, girentuximab, altumomab pentetate, arcitumomab, besilesomab, bertilimumab, plozalizumab, mogamulizumab, leronlimab, PRO140, rovelizumab, rovelizumab, talacotuzumab, benralizumab, tavolimab, vonlerolizumab, gavilimomab, ziralimumab, fanolesomab, ipilimumab, ruplizumab, toralizumab, dapirolizumab pegol, toralizumab, dapirolizumab pegol, ruplizumab, blinatumomab, inebilizumab, loncastuximab tesirine, SGN-CD19A, tafasitamab, taplitumomab paptox, XMAB-5574, Budoprutug, Obexelimab, duvortuxizumab, englumafusp alfa, Emfizatamab, zeripatamig, siplizumab, blontuvetmab, FBTA05, ibritumomab tiuxetan, obinutuzumab, ocaratuzumab, ocrelizumab, ofatumumab, rituximab, tositumomab, ublituximab, veltuzumab, divozilimab, eramkafusp alfa, ripertamab, zuberitamab, glofitamab, nofctumomab merpentan, samalizumab, imvotamab, odronextamab, plamotamab, bectumomab, inotuzumab ozogamicin, moxctumomab pasudotox, pinatuzumab vedotin, gomiliximab, lumiliximab, inolimomab, inolimomab, daclizumab, camidanluma btesirine, basiliximab, varlilumab, omburtamab, enoblituzumab, vopratelimab, lulizumabpegol, TGN1412, muromonab-CD3, otelixizumab, teplizumab, visilizumab, epcoritamab, epcoritamab, brentuximab vedotin, iratumumab, azintuxizumab vedotin, gemtuzumab ozogamicin, lintuzumab, vadastuximab talirine, naratuximab emtansine, otlertuzumab, lilotomab satetraxetan, tetulomab, daratumumab, isatuximab, foralumab, mosunetuzumab, mosunetuzumab, cedelizumab, ibalizumab, keliximab, priliximab, tregalizumab, zanolimumab, blesclumab, iscalimab, lucatumumab, ravagalimab, selicrelumab, tencliximab, vanalimab, abciximab, bivatuzumab, iomab-B, telimomab aritox, zolimomab aritox, abituzumab, intetumumab, alemtuzumab, tamtuvetmab, lorvotuzumab mertansine, itolizumab, cusatuzumab, vorsetuzumab mafodotin, milatuzumab, iladatuzumab vedotin, polatuzumab vedotin, galiximab, cibisatamab, zolbetuximab, naxitamab, tisotumab vedotin, olendalizumab, pamrevlumab, lacnotuzumab, cabiralizumab, emactuzumab, axatilimab, gimsilumab, lenzilumab, namilumab, tremelimumab, ulocuplumab, tepoditamab, rovalpituzumab tesirine, tarlatamab, demcizumab, navicixizumab, drozitumab, parsatuzumab, depatuxizumab mafodotin, modotuximab, carotuximab, adecatumumab, adecatumumab, oportuzumab monatox, solitomab, tucotuzumab celmoleukin, edrecolomab, catumaxomab, ifabotuzumab, fibatuzumab, zalutumumab, panitumumab, cetuximab, futuximab, imgatuzumab, laprituximab emtansine, matuzumab, necitumumab, nimotuzumab, tomuzotuximab, amivantamab, amivantamab, epitumomab cituxetan, sontuzumab, duligotuzumab, elgemtumab, lumretuzumab, patritumab, seribantumab, zenocutuzumab, sibrotuzumab, burosumab, aprutumab ixadotin, radretumab, pasotuxizumab, farletuzumab, mirvetuximab soravtansine, vantictumab, TRBS07, 3F8, dinutuximab, dinutuximab beta, ecromeximab, mitumomab, andecaliximab, capromab, codrituzumab, glembatumumab vedotin, talquetamab, talquetamab, trevogrumab, indusatumab vedotin, ficlatuzumab, rilotumumab, zatuximab, pentuzimab, pentuzimab, margetuximab, timigutuzumab, trastuzumab, trastuzumab duocarmazine, trastuzumab emtansine, gancotamab, pertuzumab, ertumaxomab, emibetuzumab, telisotuzumab, telisotuzumab vedotin, derlotuximab biotin, apolizumab, onartuzumab, bersanlimab, enlimomabpegol, rontalizumab, sifalimumab, talizumab, ganitumab, istiratumab, robatumumab, teprotumumab, figitumumab, ganitumab, istiratumab, robatumumab, teprotumumab, cixutumumab, dalotuzumab, xentuzumab, dusigitumab, canakinumab, ustekinumab, ustekinumab, ustekinumab, briakinumab, briakinumab, abrezekimab, lebrikizumab, romilkimab, TNX-650, tralokinumab, anrukinzumab, brodalumab, ixekizumab, netakimab, perakizumab, secukinumab, vunakizumab, afasevikumab, afasevikumab, bimekizumab, bimekizumab, remtolumab, bermekimab, lutikizumab, lutikizumab, gevokizumab, cergutuzumab amunaleukin, fletikumab, fezakinumab, brazikumab, guselkumab, mirikizumab, tildrakizumab, risankizumab, flotetuzumab, nemolizumab, pascolizumab, dupilumab, mepolizumab, reslizumab, clazakizumab, elsilimomab, olokizumab, sarilumab, siltuximab, sirukumab, vobarilizumab, tocilizumab, SA237, satralizumab, enokizumab, prezalizumab, natalizumab, abrilumab, abrilumab, vedolizumab, volociximab, tadocizumab, etaracizumab, etrolizumab, spesolimab, vatelizumab, erlizumab, lirilumab, relatlimab, cBR96-doxorubicinimmunoconjugate, odulimomab, efalizumab, ladiratuzumab vedotin, simtuzumab, samrotamab vedotin, aselizumab, lupartumab amadotin, imalumab, carlumab, imaprelimab, amatuximab, amatuximab, anetumab ravtansine, narnatumab, clivatuzumab tetraxetan, pemtumomab, gatipotuzumab, ensituximab, lemalesomab, sulesomab, enfortumab vedotin, racotumomab, monalizumab, brontictuzumab, tarextumab, vesencumab, oxelumab, gilvetmab, tislelizumab, dostarlimab, BCD-100, nivolumab, PDR001, pembrolizumab, pidilizumab, retifanlimab, spartalizumab, sintilimab, cemiplimab, olaratumab, tovetumab, rinucumab, atezolizumab, avelumab, durvalumab, lifastuzumab vedotin, bavituximab, acapatamab, capromab, rosopatamab, nezastomig, pasotuxizumab, pelgifatamab, voxalatamab, cofetuzumab pelidotin, denosumab, rosmantuzumab, cirmtuzumab, atinumab, indatuximab ravtansine, elotuzumab, sirtratumab vedotin, sonepcizumab, vandortuzumab vedotin, minretumomab, satumomab pendetide, maslimomab, ontuxizumab, tenatumomab, fresolimumab, metelimumab, lerdelimumab, tezepelumab, etigilimab, tiragotumab, placulumab, prezalumab, infliximab, nerelimomab, ozoralizumab, adalimumab, afelimomab, certolizumab pegol, golimumab, mapatumumab, conatumumab, lexatumumab, tigatuzumab, sacituzumab govitecan, votumumab, pogalizumab, letolizumab, pankomab, anatumomab mafenatox, enavatuzumab, flanvotumab, brolucizumab, ranibizumab, varisacumab, bevacizumab, faricimab, icrucumab, alacizumab pegol, ramucirumab, pritumumab, and onvatilimab.

[5079] In some aspects, the antigen binding polypeptides provided herein comprise a VH1 comprising a VH of an antibody selected from the group consisting of losatuxizumab vedotin, utomilumab, urelumab, oleclumab, naptumomab estafenatox, ascrinvacumab, pintumomab, tacatuzumab tetraxetan, nesvacumab, vanucizumab, timolumab, vapaliximab, vepalimomab, enapotamab vedotin, ianalumab, belimumab, tabalumab, tibulizumab, belantamab mafodotin, teclistamab, teclistamab, detumomab, nacolomab tafenatox, eculizumab, lendalizumab, pexelizumab, pozelimab, ravulizumab, tesidolumab, vilobelimab, abagovomab, igovomab, oregovomab, sofituzumab vedotin, cantuzumab mertansine, cantuzuma bravtansine, girentuximab, altumomab pentetate, arcitumomab, besilesomab, bertilimumab, plozalizumab, mogamulizumab, leronlimab, PRO140, rovelizumab, rovelizumab, talacotuzumab, benralizumab, tavolimab, vonlerolizumab, gavilimomab, ziralimumab, fanolesomab, ipilimumab, ruplizumab, toralizumab, dapirolizumab pegol, toralizumab, dapirolizumab pegol, ruplizumab, blinatumomab, inebilizumab, loncastuximab tesirine, SGN-CD19A, tafasitamab, taplitumomab paptox, XMAB-5574, Budoprutug, Obexelimab, duvortuxizumab, englumafusp alfa, Emfizatamab, zeripatamig, siplizumab, blontuvetmab, FBTA05, ibritumomab tiuxctan, obinutuzumab, ocaratuzumab, ocrelizumab, ofatumumab, rituximab, tositumomab, ublituximab, veltuzumab, divozilimab, eramkafusp alfa, ripertamab, zuberitamab, glofitamab, nofctumomab merpentan, samalizumab, imvotamab, odronextamab, plamotamab, bectumomab, inotuzumab ozogamicin, moxctumomab pasudotox, pinatuzumab vedotin, gomiliximab, lumiliximab, inolimomab, inolimomab, daclizumab, camidanluma btesirine, basiliximab, varlilumab, omburtamab, enoblituzumab, vopratelimab, lulizumabpegol, TGN1412, muromonab-CD3, otelixizumab, teplizumab, visilizumab, epcoritamab, epcoritamab, brentuximab vedotin, iratumumab, azintuxizumab vedotin, gemtuzumab ozogamicin, lintuzumab, vadastuximab talirine, naratuximab emtansine, otlertuzumab, lilotomab satetraxetan, tetulomab, daratumumab, isatuximab, foralumab, mosunetuzumab, mosunetuzumab, cedelizumab, ibalizumab, keliximab, priliximab, tregalizumab, zanolimumab, blesclumab, iscalimab, lucatumumab, ravagalimab, selicrelumab, tencliximab, vanalimab, abciximab, bivatuzumab, iomab-B, telimomab aritox, zolimomab aritox, abituzumab, intetumumab, alemtuzumab, tamtuvetmab, lorvotuzumab mertansine, itolizumab, cusatuzumab, vorsetuzumab mafodotin, milatuzumab, iladatuzumab vedotin, polatuzumab vedotin, galiximab, cibisatamab, zolbetuximab, naxitamab, tisotumab vedotin, olendalizumab, pamrevlumab, lacnotuzumab, cabiralizumab, emactuzumab, axatilimab, gimsilumab, lenzilumab, namilumab, tremelimumab, ulocuplumab, tepoditamab, rovalpituzumab tesirine, tarlatamab, demcizumab, navicixizumab, drozitumab, parsatuzumab, depatuxizumab mafodotin, modotuximab, carotuximab, adecatumumab, adecatumumab, oportuzumab monatox, solitomab, tucotuzumab celmoleukin, edrecolomab, catumaxomab, ifabotuzumab, fibatuzumab, zalutumumab, panitumumab, cetuximab, futuximab, imgatuzumab, laprituximab emtansine, matuzumab, necitumumab, nimotuzumab, tomuzotuximab, amivantamab, amivantamab, epitumomab cituxetan, sontuzumab, duligotuzumab, elgemtumab, lumretuzumab, patritumab, seribantumab, zenocutuzumab, sibrotuzumab, burosumab, aprutumab ixadotin, radretumab, pasotuxizumab, farletuzumab, mirvetuximab soravtansine, vantictumab, TRBS07, 3F8, dinutuximab, dinutuximab beta, ecromeximab, mitumomab, andecaliximab, capromab, codrituzumab, glembatumumab vedotin, talquetamab, talquetamab, trevogrumab, indusatumab vedotin, ficlatuzumab, rilotumumab, zatuximab, pentuzimab, pentuzimab, margetuximab, timigutuzumab, trastuzumab, trastuzumab duocarmazine, trastuzumab emtansine, gancotamab, pertuzumab, ertumaxomab, emibetuzumab, telisotuzumab, telisotuzumab vedotin, derlotuximab biotin, apolizumab, onartuzumab, bersanlimab, enlimomabpegol, rontalizumab, sifalimumab, talizumab, ganitumab, istiratumab, robatumumab, teprotumumab, figitumumab, ganitumab, istiratumab, robatumumab, teprotumumab, cixutumumab, dalotuzumab, xentuzumab, dusigitumab, canakinumab, ustekinumab, ustekinumab, ustekinumab, briakinumab, briakinumab, abrezekimab, lebrikizumab, romilkimab, TNX-650, tralokinumab, anrukinzumab, brodalumab, ixckizumab, netakimab, perakizumab, secukinumab, vunakizumab, afasevikumab, afasevikumab, bimckizumab, bimekizumab, remtolumab, bermekimab, lutikizumab, lutikizumab, gevokizumab, cergutuzumab amunaleukin, fletikumab, fezakinumab, brazikumab, guselkumab, mirikizumab, tildrakizumab, risankizumab, flotetuzumab, nemolizumab, pascolizumab, dupilumab, mepolizumab, reslizumab, clazakizumab, elsilimomab, olokizumab, sarilumab, siltuximab, sirukumab, vobarilizumab, tocilizumab, SA237, satralizumab, enokizumab, prezalizumab, natalizumab, abrilumab, abrilumab, vedolizumab, volociximab, tadocizumab, etaracizumab, ctrolizumab, spesolimab, vatelizumab, erlizumab, lirilumab, relatlimab, cBR96-doxorubicinimmunoconjugate, odulimomab, efalizumab, ladiratuzumab vedotin, simtuzumab, samrotamab vedotin, aselizumab, lupartumab amadotin, imalumab, carlumab, imaprelimab, amatuximab, amatuximab, anetumab ravtansine, narnatumab, clivatuzumab tetraxetan, pemtumomab, gatipotuzumab, ensituximab, lemalesomab, sulesomab, enfortumab vedotin, racotumomab, monalizumab, brontictuzumab, tarextumab, vesencumab, oxelumab, gilvetmab, tislelizumab, dostarlimab, BCD-100, nivolumab, PDR001, pembrolizumab, pidilizumab, retifanlimab, spartalizumab, sintilimab, cemiplimab, olaratumab, tovetumab, rinucumab, atezolizumab, avelumab, durvalumab, lifastuzumab vedotin, bavituximab, acapatamab, capromab, rosopatamab, nezastomig, pasotuxizumab, pelgifatamab, voxalatamab, cofetuzumab pelidotin, denosumab, rosmantuzumab, cirmtuzumab, atinumab, indatuximab ravtansine, elotuzumab, sirtratumab vedotin, sonepcizumab, vandortuzumab vedotin, minretumomab, satumomab pendetide, maslimomab, ontuxizumab, tenatumomab, fresolimumab, metelimumab, lerdelimumab, tezepelumab, etigilimab, tiragotumab, placulumab, prezalumab, infliximab, nerelimomab, ozoralizumab, adalimumab, afelimomab, certolizumab pegol, golimumab, mapatumumab, conatumumab, lexatumumab, tigatuzumab, sacituzumab govitecan, votumumab, pogalizumab, letolizumab, pankomab, anatumomab mafenatox, enavatuzumab, flanvotumab, brolucizumab, ranibizumab, varisacumab, bevacizumab, faricimab, icrucumab, alacizumab pegol, ramucirumab, pritumumab, and onvatilimab.

[5080] In some aspects, the antigen binding polypeptides provided herein comprise a VL1 comprising (i) a complementarity determining region (CDR) 1 having an amino acid sequence that is at least 65%, at least 70%, at least 75%, at least 80%, at least 85%, at least 90%, at least 95%, at least 99%, or 100% identical to any one of SEQ ID NOs: 1096, 1103, 1110, 1120, 1127, 1134, 1141, 1148, 1155, 1162, 1169, 1174, 1181, 1188, 1199, 1211, 1221, 1228, 1235, 1247, 1254, 1261, 1266, 1271, 1278, 1285, 1292, 1299, 1306, 1313, 1319, 1326, 1339, 1352, 1359, 1366, 1373, 1382, 1394, 1401, 1408, 1414, 1421, 1428, 1441, 1448, 1455, 1461, 1468, 1475, 1488, 1495, 1508, 1519, 1526, 1531, 1538, 1544, 1556, 1568, 1574, 1581, 1594, 1601, 1608, 1615, 1622, 1629, 1636, 1643, 1650, 1657, 1672, 1679, 1689, 1697, 1708, 1715, 1718, 1723, 1727, 1738, 1743, 1752, 1761, 1763, 1769, 1776, and 1786; (ii) a CDR2 having an amino acid sequence that is at least 65%, at least 70%, at least 75%, at least 80%, at least 85%, at least 90%, at least 95%, at least 99%, or 100% identical to any one of SEQ ID NOs: 1200, 1212, 1680, 1690, 1698, 1709, 1728, 1739, 1744, 1753, 1770, and 1777; or at least 65%, at least 70%, at least 75%, at least 80%, at least 85%, at least 90%, at least 95%, at least 99%, or 100% identical to any one of amino acid sequences AAS, APS, AT, ATS, DAS, DDG, DDS, DT, DTS, DVS, EAS, FTS, GAF, GAN, GAS, GAT, GIS, GKN, GNS, HTS, KVS, LAS, LGS, LVS, NAK, NTN, QMS, RMS, RTS, SAS, TTS, WAS, YAS, YAT, YGS, YRS, and YTS; and (iii) a CDR3 having an amino acid sequence that is at least 65%, at least 70%, at least 75%, at least 80%, at least 85%, at least 90%, at least 95%, at least 99%, or 100% identical to any one of SEQ ID NOs: 1097, 1104, 1111, 1121, 1128, 1135, 1142, 1149, 1156, 1163, 1170, 1175, 1182, 1189, 1195, 1201, 1207, 1213, 1222, 1229, 1236, 2009, 1248, 1255, 1262, 1267, 1272, 1279, 1286, 1293, 1300, 1307, 1320, 1327, 1333, 1340, 1346, 1353, 1360, 1367, 1374, 1383, 1389, 1395, 1402, 1409, 1415, 1422, 1429, 1435, 1442, 1449, 1456, 1462, 1469, 1476, 1482, 1489, 1496, 1502, 1509, 1513, 1520, 1532, 1539, 1545, 1557, 1562, 1569, 1575, 1582, 1588, 1595, 1602, 1609, 1616, 1623, 1630, 1637, 1644, 1651, 1658, 1663, 1673, 1681, 1691, 1699, 1710, 1729, 1735, 1745, 1751, 1754, 1778, 1787, and 1976.

[5081] In some aspects, the antigen binding polypeptides provided herein comprise a VH1 comprising (i) a complementarity determining region (CDR) 1 having an amino acid sequence that is at least 65%, at least 70%, at least 75%, at least 80%, at least 85%, at least 90%, at least 95%, at least 99%, or 100% identical to any one of SEQ ID NOs: 1099, 1106, 1113, 1117, 1123, 1130, 1137, 1144, 1151, 1158, 1165, 1177, 1184, 1191, 1203, 1215, 1224, 1231, 1238, 1243, 1250, 1257, 1264, 1274, 1281, 1288, 1295, 1302, 1309, 1315, 1322, 1329, 1335, 1342, 1348, 1355, 1362, 1369, 1376, 1385, 1397, 1404, 1417, 1424, 1431, 1437, 1444, 1451, 1458, 1464, 1471, 1478, 1484, 1491, 1498, 1504, 1511, 1515, 1522, 1534, 1547, 1552, 1564, 1577, 1584, 1590, 1597, 1604, 1611, 1618, 1625, 1632, 1639, 1646, 1653, 1660, 1665, 1675, 1683, 1693, 1701, 1705, 1716, 1719, 1731, 1736, 1747, 1756, 1772, 1780, and 1789; (ii) a CDR2 having an amino acid sequence that is at least 65%, at least 70%, at least 75%, at least 80%, at least 85%, at least 90%, at least 95%, at least 99%, or 100% identical to any one of SEQ ID NOs: 1100, 1107, 1114, 1118, 1124, 1131, 1138, 1145, 1152, 1159, 1166, 1178, 1185, 1192, 1204, 1216, 1225, 1232, 1239, 1244, 1251, 1258, 1275, 1282, 1289, 1296, 1303, 1310, 1316, 1323, 1330, 1336, 1343, 1349, 1356, 1363, 1370, 1377, 1386, 1391, 1398, 1405, 1411, 1418, 1425, 1432, 1438, 1445, 1452, 1465, 1472, 1479, 1485, 1492, 1499, 1505, 1516, 1523, 1528, 1535, 1541, 1548, 1553, 1559, 1565, 1571, 1578, 1585, 1591, 1598, 1605, 1612, 1619, 1626, 1633, 1640, 1647, 1654, 1666, 1676, 1684, 1687, 1694, 1702, 1706, 1712, 1717, 1720, 1725, 1732, 1737, 1741, 1748, 1757, 1767, 1773, 1781, and 1790; and (iii) a CDR3 having an amino acid sequence that is at least 65%, at least 70%, at least 75%, at least 80%, at least 85%, at least 90%, at least 95%, at least 99%, or 100% identical to any one of SEQ ID NOs: 1101, 1108, 1115, 1125, 1132, 1139, 1146, 1153, 1160, 1167, 1172, 1179, 1186, 1193, 1197, 1205, 1209, 1217, 1226, 1233, 1240, 1245, 1252, 1259, 1269, 1276, 1283, 1290, 1297, 1304, 1311, 1317, 1324, 1331, 1337, 1344, 1350, 1357, 1364, 1371, 1378, 1387, 1392, 1399, 1406, 1412, 1419, 1426, 1433, 1439, 1446, 1453, 1459, 1466, 1473, 1480, 1486, 1493, 1500, 1506, 1517, 1524, 1529, 1536, 1542, 1549, 1554, 1560, 1566, 1572, 1579, 1586, 1592, 1599, 1606, 1613, 1620, 1627, 1634, 1641, 1648, 1655, 1661, 1667, 1670, 1677, 1685, 1688, 1695, 1703, 1707, 1713, 1733, 1749, 1758, 1762, 1774, 1782, 1791, and 1975.

[5082] In some aspects, the antigen binding polypeptides provided herein comprise a VL1 comprising an amino acid sequence that is at least 65%, at least 70%, at least 75%, at least 80%, at least 85%, at least 90%, at least 95%, at least 99%, or 100% identical to any one of SEQ ID NOs: 1098, 1105, 1112, 1122, 1129, 1136, 1143, 1150, 1157, 1164, 1171, 1176, 1183, 1190, 1196, 1202, 1208, 1214, 1219, 1223, 1230, 1237, 1242, 1249, 1256, 1263, 1268, 1273, 1280, 1287, 1294, 1301, 1308, 1314, 1321, 1328, 1334, 1341, 1347, 1354, 1361, 1368, 1375, 1380, 1384, 1390, 1396, 1403, 1410, 1416, 1423, 1430, 1436, 1443, 1450, 1457, 1463, 1470, 1477, 1483, 1490, 1497, 1503, 1510, 1514, 1521, 1527, 1533, 1540, 1546, 1551, 1558, 1563, 1570, 1576, 1583, 1589, 1596, 1603, 1610, 1617, 1624, 1631, 1638, 1645, 1652, 1659, 1664, 1669, 1674, 1682, 1692, 1700, 1711, 1721, 1724, 1730, 1740, 1746, 1755, 1764, 1766, 1771, 1779, 1784, and 1788.

[5083] In some aspects, the antigen binding polypeptides provided herein comprise a VH1 comprising an amino acid sequence that is at least 65%, at least 70%, at least 75%, at least 80%, at least 85%, at least 90%, at least 95%, at least 99%, or 100% identical to any one of SEQ ID NOs: 1102, 1109, 1116, 1119, 1126, 1133, 1140, 1147, 1154, 1161, 1168, 1173, 1180, 1187, 1194, 1198, 1206, 1210, 1218, 1220, 1227, 1234, 1241, 1246, 1253, 1260, 1265, 1270, 1277, 1284, 1291, 1298, 1305, 1312, 1318, 1325, 1332, 1338, 1345, 1351, 1358, 1365, 1372, 1379, 1381, 1388, 1393, 1400, 1407, 1413, 1420, 1427, 1434, 1440, 1447, 1454, 1460, 1467, 1474, 1481, 1487, 1494, 1501, 1507, 1512, 1518, 1525, 1530, 1537, 1543, 1550, 1555, 1561, 1567, 1573, 1580, 1587, 1593, 1600, 1607, 1614, 1621, 1628, 1635, 1642, 1649, 1656, 1662, 1668, 1671, 1678, 1686, 1696, 1704, 1714, 1722, 1726, 1734, 1742, 1750, 1759, 1760, 1765, 1768, 1775, 1783, 1785, and 1792.

[5084] In some aspects, the infectious disease antigen that is not a sarbecovirus antigen is:
[5085] (i) a viral antigen elected from the group consisting of an influenza virus (A, B, C) antigen (e.g., influenza virus envelope proteins, for example, influenza virus neuraminidase (NA, N1, N2, N3, N4, N5, N6, N7, N8, N9, N10, N11), influenza virus hemagglutinin (H1, H2, H3, H4, H5, H6, H7, H8, H9, H10, H11, H12, H13, H14, H15, H16, H17, H18) (e.g., H1N1, H3N2, H5N1, H7N9, H9N2), Yamagata virus antigen, Victoria virus antigen, influenza virus structural proteins (e.g., M1, M2, capsid protein), influenza virus functional proteins (e.g., ribonucleoprotein (NP), primary interferon antagonist (NS1), nuclear export protein (NEP)) influenza virus accessory proteins (e.g., PB2, PB1, or PA), for example, anti-HA, anti-NA, anti-H1, anti-H3, anti-H5, anti-H7, anti-H9, anti-N1, anti-N2, anti-N9, anti-H1N1, anti-H3N2, anti-H5N1, anti-H7N9, anti-H9N2, anti-A protein, anti-B protein, anti-stem, anti-M1, anti-M2, anti-capsid, anti-NP, anti-NS1, anti-NEP, anti-PB1, anti-PB2, and anti-PA); a swine influenza virus antigen (e.g., swine flu hemagglutinin, swine flu neuraminidase); a classical swine fever (CSF) (hog colera) virus antigen; an equine influenza virus antigen (e.g., equine influenza virus typeA/Miami 63 neuraminidase, equine influenza virus type A/Kentucky 81 neuraminidase, equine influenza virus type A/Alaska 91 neuraminidase); parainfluenza viruses (e.g., bovine parainfluenza virus, bovine parainfluenza virus type 3 fusion protein, bovine parainfluenza virus type 3 hemagglutinin neuraminidase); a (human) respiratory syncytial virus (RSV)-viral antigen (e.g., RSV F glycoprotein, RSV G glycoprotein. F protein of respiratory syncytial virus, RSV fusion glycoprotein); a herpes simplex virus (HSV) antigen (e.g., herpes simplex virus glycoproteins gB, gC, gD, and gE, herpes simplex virus type 2 glycoprotein gB); a Dengue virus antigen (e.g., core protein, matrix protein, glycoprotein E of Dengue virus, or other protein of Dengue virus); a measles virus antigen (e.g., hemagglutinin); a poliovirus 1 antigen (e.g., poliovirus 1 proteins (VP1)), a HIV-1 antigen and HIV-2 antigen (e.g., HIV envelope proteins (e.g., envelope glycoproteins of HIV 1, HIV envelope glycoprotein (Env), HIV envelope glycoprotein gp160, HIV envelope surface glycoprotein gp120, HIV transmembrane envelope protein gp41), HIV structural proteins (e.g., p17, p24, p7, p55), HIV functional proteins (e.g., p66, HIV-1 protease (PR), p31), HIV accessory proteins (e.g., Nef, Tat, Rev, Vif, Vpr, Vpu)); a hepatitis virus (HAV, HBV, HCV, HDV, HEV) antigen (e.g., hepatitis B virus antigen (e.g., surface antigen, core protein), hepatitis C virus antigen (e.g., glycoprotein E1E2)); a rabies virus (Rabies lyssavirus) antigen (e.g., rabies virus glycoprotein, e.g., G glycoprotein); a pseudorabies virus antigen (e.g., pseudorabies virus g50 (gpD), pseudorabies virus II (gpB), pseudorabies virus III (gpC), pseudorabies virus glycoprotein H, pseudorabies virus glycoprotein E); a papillomavirus (HPV) antigen; an Epstein-Barr virus (EBV) (Gamma herpes virus 4) antigen; a Herpes simplex virus (HSV, HSV-1, HSV-2) antigen (e.g., human herpes virus 8, equine herpes virus antigen (e.g., type 1 glycoprotein B, type 1 glycoprotein D)); a Herpes zoster antigen; a Cytomegalovirus antigen (e.g., cytomegalovirus glycoprotein B); a Zika virus antigen; a Transmissible gastroenteritis virus (TGEV) antigen (e.g., glycoprotein 195, matrix protein); a rotavirus antigen (e.g., swine rotavirus glycoprotein 38); a parvovirus antigen (e.g., swine parvovirus capsid protein); a filoviruses (e.g., Marburg and Ebola) antigen; a bovine viral diarrhea virus antigen (e.g., glycoprotein 55); a Newcastle disease virus antigen (hemagglutinin, neuraminidase); an orthopoxvirus antigen; a coxsackievirus antigen and aphthovirus (foot and mouth disease virus) antigen; a yellow fever virus antigen; a Chikunga virus antigen; a Nipah virus antigen; an African swine fever virus antigen; a rhinotracheitis virus antigen (e.g., infectious bovine rhinotracheitis virus glycoprotein E, glycoprotein G); a laryngotracheitis virus antigen (e.g., infectious laryngotracheitis virus glycoprotein G or glycoprotein I); a La Crosse virus antigen (e.g., La Crosse virus glycoprotein); a neonatal calf diarrhoea virus antigen; a Venezuelan equine encephalomyelitis virus antigen; a punta toro virus antigen; a murine leukemia virus antigen; a mouse mammary tumor virus antigen; a bovine respiratory syncytial virus antigen (e.g., bovine respiratory syncytial virus attachment protein (BRSV G), bovine respiratory syncytial virus fusion protein (BRSV F), bovine respiratory syncytial virus nucleocapsid protein (BRSVN)); a bovine E viral diarrhoea virus antigen (e.g., glycoprotein 48 and glycoprotein 53); a metapneumovirus (HMPV) antigen; and an Ebola virus antigen (e.g., ebolavirus glycoprotein, e.g., Zaire ebolavirus glycoprotein); or
[5086] (ii) a bacterial or parasite antigen selected from the group consisting of a Plasmodium (e.g., Plasmodium falciparum, Plasmodium vivax, Plasmodium malariae, Plasmodium ovale, Plasmodium knowlesi) antigen, a Streptococcus (e.g., Streptococcus pneumoniae. Streptococcus pyogenes, Streptococcus agalactiae. Streptococcus mutans, Streptococcus viridans, Streptococcus anginosus, Streptococcus intermedius. Streptococcus constellatus) antigen (e.g., 24M epitope), a Neisseria gonorrhoeae antigen (e.g., gonococcal pilin), a Corynebacterium antigen (e.g., Corynebacterium diphtheria (diptheria toxin). Corynebacterium ulcerans. Corynebacterium pseudotuberculosis). Mycobacterium tuberculosis antigens. Brachyspira hyodysenteriae (Serpulina hydodysenteriae) antigen (e.g., Serpulina hydodysenteriae protective antigen), a Chlamydia antigen (e.g., Chlamydia trachomatis) (e.g., MOMP and PorB), a Mycoplasma sp. (e.g., Mycoplasma genitalium, Mycoplasma hyopneumoniae. Mycoplasma pneumonia) antigen, a Staphylococcus (e.g., Staphylococcus aureus, coagulase-negative staphylococci (CoNS). Staphylococcus aureus alpha toxin, Staphylococcus aureus bi-component leucocidin) antigen, a Klebsiella sp. antigen, an Escherichia coli antigen (e.g., E. coli shiga toxin type-2. E. coli shiga toxin type-1), a Bacillus sp. (e.g., Bacillus anthracis, e.g., Bacillus anthracis anthrax) antigen, a Pseudomonas aeruginosa antigen (e.g., Pseudomonas aeruginosa type III secretion system), an Enterococcus sp. antigen, an Enterobacter sp. antigen, a Proteus sp. antigen, an Actinobacter sp. antigen, a Mycobacterium avium (Mycobacterium avium complex (MAC)) antigen, a Salmonella bacteria antigen, a Clostridium difficile antigen, a Toxoplasma (e.g., Toxoplasma gondii) antigen, a Histoplasma antigen, a Candida antigen, a Coccidioides antigen, a Cryptococcus antigen, a Cryptosporidium antigen, and a Cystoisospora (e.g., Cystoisospora belli) antigen, and another antigen (e.g., endotoxins, lymphotoxins (e.g., lymphotoxin alpha LTA), phosphatidylserine, Hsp90, CCR5, lipoteichoic acid, clumping factor A).

[5087] In some aspects, the antigen binding polypeptides provided herein comprise a VL1 comprising a light chain complementarity determining region 1 (LCDR1), LCDR2, and/or LCDR3 of an antibody selected from the group consisting of libivirumab, rmab, rivabazumab pegol, setoxaximab, suvizumab, suvratoxumab, sevirumab, pritoxaximab, porgaviximab, REGN-EB3, obiltoxaximab, gedivumab, foravirumab, larcaviximab, motavizumab, palivizumab, rafivirumab, regavirumab, tuvirumab, cosfroviximab, felvizumab, atidortoxumab, edobacomab, nebacumab, pateclizumab, raxibacumab, urtoxazumab, tosatoxumab, berlimatoxumab, CR6261, diridavumab, firivumab, lesofavumab, navivumab, exbivirumab, lenvervimab, bavituximab, bezlotoxumab, efungumab, leronlimab, nirsevimab, pagibaximab, panobacumab, tefibazumab, ansuvimab, atoltivimab, maftivimab, and odesivimab.

[5088] In some aspects, the antigen binding polypeptides provided herein comprise a VH1 comprising a heavy chain complementarity determining region 1 (HCDR1), HCDR2, and/or HCDR3 of an antibody selected from the group consisting of libivirumab, rmab, rivabazumab pegol, setoxaximab, suvizumab, suvratoxumab, sevirumab, pritoxaximab, porgaviximab, REGN-EB3, obiltoxaximab, gedivumab, foravirumab, larcaviximab, motavizumab, palivizumab, rafivirumab, regavirumab, tuvirumab, cosfroviximab, felvizumab, atidortoxumab, edobacomab, nebacumab, pateclizumab, raxibacumab, urtoxazumab, tosatoxumab, berlimatoxumab, CR6261, diridavumab, firivumab, lesofavumab, navivumab, exbivirumab, lenvervimab, bavituximab, bezlotoxumab, efungumab, leronlimab, nirsevimab, pagibaximab, panobacumab, tefibazumab, ansuvimab, atoltivimab, maftivimab, and odesivimab.

[5089] In some aspects, the antigen binding polypeptides provided herein comprise a VL1 comprising a VL of an antibody selected from the group consisting of libivirumab, rmab, rivabazumab pegol, sctoxaximab, suvizumab, suvratoxumab, sevirumab, pritoxaximab, porgaviximab, REGN-EB3, obiltoxaximab, gedivumab, foravirumab, larcaviximab, motavizumab, palivizumab, rafivirumab, regavirumab, tuvirumab, cosfroviximab, felvizumab, atidortoxumab, edobacomab, nebacumab, pateclizumab, raxibacumab, urtoxazumab, tosatoxumab, berlimatoxumab, CR6261, diridavumab, firivumab, lesofavumab, navivumab, exbivirumab, lenvervimab, bavituximab, bezlotoxumab, efungumab, leronlimab, nirsevimab, pagibaximab, panobacumab, tefibazumab, ansuvimab, atoltivimab, maftivimab, and odesivimab.

[5090] In some aspects, the antigen binding polypeptides provided herein comprise a VH1 comprising a VH of an antibody selected from the group consisting of libivirumab, rmab, rivabazumab pegol, setoxaximab, suvizumab, suvratoxumab, sevirumab, pritoxaximab, porgaviximab, REGN-EB3, obiltoxaximab, gedivumab, foravirumab, larcaviximab, motavizumab, palivizumab, rafivirumab, regavirumab, tuvirumab, cosfroviximab, felvizumab, atidortoxumab, edobacomab, nebacumab, pateclizumab, raxibacumab, urtoxazumab, tosatoxumab, berlimatoxumab, CR6261, diridavumab, firivumab, lesofavumab, navivumab, exbivirumab, lenvervimab, bavituximab, bezlotoxumab, cfungumab, leronlimab, nirsevimab, pagibaximab, panobacumab, tefibazumab, ansuvimab, atoltivimab, maftivimab, and odesivimab.

[5091] In some aspects, the antigen binding polypeptides provided herein comprise a VL1 comprising (i) a complementarity determining region (CDR) 1 having an amino acid sequence that is at least 65%, at least 70%, at least 75%, at least 80%, at least 85%, at least 90%, at least 95%, at least 99%, or 100% identical to any one of SEQ ID NOs: 1428, 1793, 1798, 1810, 1817, 1824, 1977, 1985, 1993 and 2001; (ii) a CDR2 having an amino acid sequence that is at least 65%, at least 70%, at least 75%, at least 80%, at least 85%, at least 90%, at least 95%, at least 99%, or 100% identical to any one of SEQ ID NOs: 1978, 1986, 1994, and 2002; or at least 65%, at least 70%, at least 75%, at least 80%, at least 85%, at least 90%, at least 95%, at least 99%, or 100% identical to any one of amino acid sequences YTS, DTS, GAS, and AAS; and (iii) a CDR3 having an amino acid sequence that is at least 65%, at least 70%, at least 75%, at least 80%, at least 85%, at least 90%, at least 95%, at least 99%, or 100% identical to any one of SEQ ID NOs: 1229, 1799, 1805, 1811, 1818, 1825, 1979, 1987, 1995, and 2003.

[5092] In some aspects, the antigen binding polypeptides provided herein comprise a VH1 comprising (i) a complementarity determining region (CDR) 1 having an amino acid sequence that is at least 65%, at least 70%, at least 75%, at least 80%, at least 85%, at least 90%, at least 95%, at least 99%, or 100% identical to any one of SEQ ID NOs: 1577, 1795, 1801, 1813, 1820, 1827, 1981, 1989, 1997, and 2005; (ii) a CDR2 having an amino acid sequence that is at least 65%, at least 70%, at least 75%, at least 80%, at least 85%, at least 90%, at least 95%, at least 99%, or 100% identical to any one of SEQ ID NOs: 1159, 1802, 1807, 1814, 1821, 1828, 1982, 1990, 1998, and 2006; and (iii) a CDR3 having an amino acid sequence that is at least 65%, at least 70%, at least 75%, at least 80%, at least 85%, at least 90%, at least 95%, at least 99%, or 100% identical to any one of SEQ ID NOs: 1796, 1803, 1808, 1815, 1822, 1829, 1983, 1991, 1999, and 2007.

[5093] In some aspects, the antigen binding polypeptides provided herein comprise a VL1 comprising an amino acid sequence that is at least 65%, at least 70%, at least 75%, at least 80%, at least 85%, at least 90%, at least 95%, at least 99%, or 100% identical to any one of SEQ ID NOs: 1794, 1800, 1806, 1812, 1819, 1826, 1980, 1988, 1996, and 2004.

[5094] In some aspects, the antigen binding polypeptides provided herein comprise a VH1 comprising an amino acid sequence that is at least 65%, at least 70%, at least 75%, at least 80%, at least 85%, at least 90%, at least 95%, at least 99%, or 100% identical to any one of SEQ ID NOs: 1797, 1804, 1809, 1816, 1823, 1830, 1984, 1992, 2000, and 2008.

[5095] In some aspects, the other-pathology antigen is selected from the group consisting of Amyloid beta, β-amyloid, PCSK9, IFN-α/β receptor, Rhesus factor, nerve growth factor (NGF), DPP4, fibrin II beta chain, ACVR2B, serum amyloid A protein SOST, FGF 23, VWF, tissue factor pathway inhibitor (TFPI), 1-40 and 1-42, selectin P, glucagon receptor (GCGR), amyloid P component, GDF-8, CXCL10 IP-10, repulsive guidance molecule A RGMA, IFN-γ, activated F9/F10, calcitonin gene-related peptide (CGRP), angiopoietin 3, IFN receptor, IFN-γ, calcitonin, β-amyloid 1-40 and 1-42, tau protein, dabigatran, cardiac myosin, selectin P, Complement factor D (CFD), kallikrein, GDF-8, IGHE, tissue factor pathway inhibitor (TFPI), GMCSF receptor α-chain, amyloid, IgE Fc region, MASP-2, oxLDL, GMCSF, NOGO-A, Alpha-synuclein, NGF, myelin-associated glycoprotein, RHD (gene) (RHD), sclerostin, FCGRT, sclerostin SOST, mucosal addressin cell adhesion molecule, myostatin, RSVFR, complement component 1s C1s, C5, and IL31.

[5096] In some aspects, the antigen binding polypeptides provided herein comprise a VL1 comprising a light chain complementarity determining region 1 (LCDR1), LCDR2, and/or LCDR3 of an antibody selected from the group consisting of aducanumab, alirocumab, frovocimab, lodelcizumab, bococizumab, evolocumab, ralpancizumab, anifrolumab, atorolimumab, bapineuzumab, bedinvetmab, begelomab, biciromab, bimagrumab, birtamimab, blosozumab, burosumab, caplacizumab, concizumab, crenezumab, crizanlizumab, crotedumab, dezamizumab, domagrozumab, donanemab, eldelumab, elezanumab, emapalumab, emicizumab, eptinezumab, erenumab, evinacumab, faralimomab, fasinumab, fontolizumab, fremanezumab, frunevetmab, fulranumab, galcanezumab, gantenerumab, gosuranemab, idarucizumab, imciromab, inclacumab, lampalizumab, lanadelumab, landogrozumab, lecanemab, ligelizumab, marstacimab, mavrilimumab, morolimumab, NEOD001, omalizumab, oMS721, orticumab, otilimab, ozanezumab, ponezumab, prasinezumab, quilizumab, ranevetmab, refanezumab, roledumab, romosozumab, rozanolixizumab, setrusumab, SHP647, solanezumab, stamulumab, suptavumab, sutimlimab, tanezumab, crovalimab, and lokivetmab.

[5097] In some aspects, the antigen binding polypeptides provided herein comprise a VH1 comprising a heavy chain complementarity determining region 1 (HCDR1), HCDR2, and/or HCDR3 of an antibody selected from the group consisting of aducanumab, alirocumab, frovocimab, lodelcizumab, bococizumab, evolocumab, ralpancizumab, anifrolumab, atorolimumab, bapineuzumab, bedinvetmab, begelomab, biciromab, bimagrumab, birtamimab, blosozumab, burosumab, caplacizumab, concizumab, crenezumab, crizanlizumab, crotedumab, dezamizumab, domagrozumab, donanemab, eldelumab, elezanumab, emapalumab, emicizumab, eptinezumab, erenumab, evinacumab, faralimomab, fasinumab, fontolizumab, fremanezumab, frunevetmab, fulranumab, galcanezumab, gantenerumab, gosuranemab, idarucizumab, imciromab, inclacumab, lampalizumab, lanadelumab, landogrozumab, lecanemab, ligelizumab, marstacimab, mavrilimumab, morolimumab, NEOD001, omalizumab, oMS721, orticumab, otilimab, ozanezumab, ponezumab, prasinezumab, quilizumab, ranevetmab, refanezumab, roledumab, romosozumab, rozanolixizumab, setrusumab, SHP647, solanezumab, stamulumab, suptavumab, sutimlimab, tanezumab, crovalimab, and lokivetmab.

[5098] In some aspects, the antigen binding polypeptides provided herein comprise a VL1 comprising a VL of an antibody selected from the group consisting of aducanumab, alirocumab, frovocimab, lodelcizumab, bococizumab, evolocumab, ralpancizumab, anifrolumab, atorolimumab, bapineuzumab, bedinvetmab, begelomab, biciromab, bimagrumab, birtamimab, blosozumab, burosumab, caplacizumab, concizumab, crenezumab, crizanlizumab, crotedumab, dezamizumab, domagrozumab, donanemab, eldelumab, elezanumab, emapalumab, emicizumab, eptinezumab, erenumab, evinacumab, faralimomab, fasinumab, fontolizumab, fremanezumab, frunevetmab, fulranumab, galcanezumab, gantenerumab, gosuranemab, idarucizumab, imciromab, inclacumab, lampalizumab, lanadelumab, landogrozumab, lecanemab, ligelizumab, marstacimab, mavrilimumab, morolimumab, NEOD001, omalizumab, oMS721, orticumab, otilimab, ozanezumab, ponezumab, prasinezumab, quilizumab, ranevetmab, refanczumab, roledumab, romosozumab, rozanolixizumab, setrusumab, SHP647, solanezumab, stamulumab, suptavumab, sutimlimab, tanezumab, crovalimab, and lokivetmab.

[5099] In some aspects, the antigen binding polypeptides provided herein comprise a VH1 comprising a VH of an antibody selected from the group consisting of aducanumab, alirocumab, frovocimab, lodelcizumab, bococizumab, evolocumab, ralpancizumab, anifrolumab, atorolimumab, bapineuzumab, bedinvetmab, begelomab, biciromab, bimagrumab, birtamimab, blosozumab, burosumab, caplacizumab, concizumab, crenezumab, crizanlizumab, crotedumab, dezamizumab, domagrozumab, donanemab, eldelumab, elezanumab, emapalumab, emicizumab, eptinezumab, erenumab, evinacumab, faralimomab, fasinumab, fontolizumab, fremanezumab, frunevetmab, fulranumab, galcanezumab, gantenerumab, gosuranemab, idarucizumab, imciromab, inclacumab, lampalizumab, lanadelumab, landogrozumab, lecanemab, ligelizumab, marstacimab, mavrilimumab, morolimumab, NEOD001, omalizumab, oMS721, orticumab, otilimab, ozanezumab, ponezumab, prasinezumab, quilizumab, ranevetmab, refanezumab, roledumab, romosozumab, rozanolixizumab, setrusumab, SHP647, solanezumab, stamulumab, suptavumab, sutimlimab, tanezumab, crovalimab, and lokivetmab.

[5100] In some aspects, the antigen binding polypeptides provided herein comprise a VL1 comprising (i) a complementarity determining region (CDR) 1 having an amino acid sequence that is at least 65%, at least 70%, at least 75%, at least 80%, at least 85%, at least 90%, at least 95%, at least 99%, or 100% identical to any one of SEQ ID NOs: 1120, 1228, 1359, 1519, 1831, 1838, 1845, 1852, 1859, 1866, 1872, 1878, 1885, 1891, 1898, 1905, 1911, 1917, 1924, 1931, 1938, 1945, and 1963; (ii) a CDR2 having an amino acid sequence that is at least 65%, at least 70%, at least 75%, at least 80%, at least 85%, at least 90%, at least 95%, at least 99%, or 100% identical to any one of amino acid sequences AAS, AVS, DAS, DNN, EDN, EVS, GAS, GNG, KAS, KVS, LVS, NTD, STS, WAS, and YTS; and (iii) a CDR3 having an amino acid sequence that is at least 65%, at least 70%, at least 75%, at least 80%, at least 85%, at least 90%, at least 95%, at least 99%, or 100% identical to any one of SEQ ID NOs: 1360, 1832, 1839, 1846, 1853, 1860, 1867, 1873, 1879, 1886, 1892, 1899, 1906, 1912, 1918, 1925, 1932, 1939, 1946, 1951, 1957, 1964, and 1970.

[5101] In some aspects, the antigen binding polypeptides provided herein comprise a VH1 comprising (i) a complementarity determining region (CDR) 1 having an amino acid sequence that is at least 65%, at least 70%, at least 75%, at least 80%, at least 85%, at least 90%, at least 95%, at least 99%, or 100% identical to any one of SEQ ID NOs: 1309, 1362, 1437, 1552, 1618, 1639, 1834, 1841, 1848, 1855, 1862, 1881, 1894, 1901, 1920, 1927, 1934, 1941, 1953, 1959, and 1966; (ii) a CDR2 having an amino acid sequence that is at least 65%, at least 70%, at least 75%, at least 80%, at least 85%, at least 90%, at least 95%, at least 99%, or 100% identical to any one of SEQ ID NOs: 1363, 1835, 1842, 1849, 1856, 1863, 1869, 1875, 1882, 1888, 1895, 1902, 1908, 1914, 1921, 1928, 1935, 1942, 1948, 1954, 1960, 1967, and 1972; and (iii) a CDR3 having an amino acid sequence that is at least 65%, at least 70%, at least 75%, at least 80%, at least 85%, at least 90%, at least 95%, at least 99%, or 100% identical to any one of SEQ ID NOs: 1364, 1836, 1843, 1850, 1857, 1864, 1870, 1876, 1883, 1889, 1896, 1903, 1909, 1915, 1922, 1929, 1936, 1943, 1949, 1955, 1961, 1968, and 1973.

[5102] In some aspects, the antigen binding polypeptides provided herein comprise a VL1 comprising an amino acid sequence that is at least 65%, at least 70%, at least 75%, at least 80%, at least 85%, at least 90%, at least 95%, at least 99%, or 100% identical to any one of SEQ ID NOs: 1361, 1833, 1840, 1847, 1854, 1861, 1868, 1874, 1880, 1887, 1893, 1900, 1907, 1913, 1919, 1926, 1933, 1940, 1947, 1952, 1958, 1965, and 1971.

[5103] In some aspects, the antigen binding polypeptides provided herein comprise a VH1 comprising an amino acid sequence that is at least 65%, at least 70%, at least 75%, at least 80%, at least 85%, at least 90%, at least 95%, at least 99%, or 100% identical to any one of SEQ ID NOs: 1365, 1837, 1844, 1851, 1858, 1865, 1871, 1877, 1884, 1890, 1897, 1904, 1910, 1916, 1923, 1930, 1937, 1944, 1950, 1956, 1962, 1969, and 1974.

[5104] In some aspects, the antigen binding polypeptides disclosed herein, comprise one or more CL region, as indicated in the formulas representing the antigen binding polypeptides disclosed herein. In some aspects, the CL comprises an amino acid sequence at least 65%, at least 70%, at least 75%, at least 80%, at least 85%, at least 90%, at least 95%, at least 99%, or 100% identical to any one of SEQ ID NOs: 374, 637, or 1092-1095.

[5105] In some aspects, the antigen binding polypeptides disclosed herein, comprise one or more CH1 region, as indicated in the formulas representing the antigen binding polypeptides disclosed herein. In some aspects, the CH1 comprises an amino acid sequence at least 65%, at least 70%, at least 75%, at least 80%, at least 85%, at least 90%, at least 95%, at least 99%, or 100% identical to any one of SEQ ID NOs: 375, 634, 1070, 1071, or 1086-1091.

[5106] In some aspects, the antigen binding polypeptides provided herein further comprise an Fc region. In some aspects, the antigen binding polypeptides provided herein further comprise an Fc region at the carboxy-terminus. In some aspects, the Fc region comprises an immunoglobulin heavy chain constant region 2 (CH2) and/or an immunoglobulin heavy chain constant region 3 (CH3). In some aspects, the Fc region further comprises an immunoglobulin hinge (i.e., a hinge region). In some aspects, the hinge region comprises an amino acid sequence at least 65%, at least 70%, at least 75%, at least 80%, at least 85%, at least 90%, at least 95%, at least 99%, or 100% identical to any one of SEQ ID NOs: 635, 636, 1072, 1073, or 1074. In some aspects, the Fc region comprises a CH2 and a CH3. In some aspects, the CH2 comprises an amino acid sequence that is at least 65%, at least 70%, at least 75%, at least 80%, at least 85%, at least 90%, at least 95%, at least 99%, or 100% identical to any one of SEQ ID NOs: 1075-1078. In some aspects, the CH3 comprises an amino acid sequence that is at least 65%, at least 70%, at least 75%, at least 80%, at least 85%, at least 90%, at least 95%, at least 99%, or 100% identical to any one of SEQ ID NOs: 1079-1085. In some aspects, the Fc region comprises an amino acid sequence that is at least 65%, at least 70%, at least 75%, at least 80%, at least 85%, at least 90%, at least 95%, at least 99%, or 100% identical to any one of SEQ ID NOs: 376-380.

[5107] In some aspects, the Fc region comprises one or more amino acid substitutions. In some aspects, the one or more amino acid substitutions comprise one or more half-life extension amino acid substitutions. In some aspects, the one or more half-life extension amino acid substitutions comprise one or more of amino acid substitutions M428L, N434A, N434S, L234F, L235E, P331S, M252Y, S254T, and T256E, or equivalent thereof, based on the EU numbering scheme. In some aspects, the one or more half-life extension amino acid substitutions comprise a LA (M428L and N434A, or equivalent thereof, based on the EU numbering scheme) amino acid substitution. In some aspects, the one or more half-life extension amino acid substitutions comprise a LS (M428L and N434S, or equivalent thereof, based on the EU numbering scheme) amino acid substitution. In some aspects, the one or more half-life extension amino acid substitutions comprise L234F and L235E, or equivalent thereof (based on the EU numbering scheme) amino acid substitutions. In some aspects, the one or more half-life extension amino acid substitutions comprise a TM (L234F, L235E, and P331S, or equivalent thereof, based on the EU numbering scheme) amino acid substitution. In some aspects, the one or more half-life extension amino acid substitutions comprise a YTE (M252Y, S254T, and T256E, or equivalent thereof, based on the EU numbering scheme) amino acid substitution.

[5108] In some aspects, the Fc region comprises at least one knob-into-hole modification. In some aspects, the antigen binding polypeptides disclosed herein are comprised in IgG1 or IgG4 antibodies or antigen binding fragments thereof. In some aspects, the knob-into-hole modification comprises one or more of knob substitutions of S354C and T366W, or equivalent thereof, and/or one or more of hole substitutions of Y349C, T366S, L368A, Y407V, or equivalent thereof, or a combination thereof, based on the EU numbering scheme. In some aspects, the Fc region comprises a knob-into-hole modification comprising knob substitutions of S354C and T366W, or equivalent thereof, and/or hole substitutions of Y349C, T366S, L368A and Y407V, or equivalent thereof, and/or a half-life extension amino acid substitution comprising: a LA (M428L and N434A, or equivalent thereof, based on the EU numbering scheme) amino acid substitution, a LS (M428L and N434S, or equivalent thereof, based on the EU numbering scheme) amino acid substitution, L234F and L235E, or equivalent thereof (based on the EU numbering scheme) amino acid substitutions, a TM (L234F, L235E, and P331S, or equivalent thereof, based on the EU numbering scheme) amino acid substitution, a YTE (M252Y, S254T, and T256E, or equivalent thereof, based on the EU numbering scheme) amino acid substitution, or any combination thereof.

[5109] In some aspects, the Fc region comprises knob substitutions of S354C and T366W, or equivalent thereof, and a half-life extension amino acid substitution comprising: a LA (M428L and N434A, or equivalent thereof, based on the EU numbering scheme) amino acid substitution, a LS (M428L and N434S, or equivalent thereof, based on the EU numbering scheme) amino acid substitution. L234F and L235E, or equivalent thereof (based on the EU numbering scheme) amino acid substitutions, a TM (L234F, L235E, and P331S, or equivalent thereof, based on the EU numbering scheme) amino acid substitution, a YTE (M252Y, S254T, and T256E, or equivalent thereof, based on the EU numbering scheme) amino acid substitution, or any combination thereof.

[5110] In some aspects, the Fc region comprises hole substitutions of Y349C, T366S, L368A and Y407V, or equivalent thereof, and a half-life extension amino acid substitution comprising: a LA (M428L and N434A, or equivalent thereof, based on the EU numbering scheme) amino acid substitution, a LS (M428L and N434S, or equivalent thereof, based on the EU numbering scheme) amino acid substitution. L234F and L235E, or equivalent thereof (based on the EU numbering scheme) amino acid substitutions, a TM (L234F, L235E, and P331S, or equivalent thereof, based on the EU numbering scheme) amino acid substitution, a YTE (M252Y, S254T, and T256E, or equivalent thereof, based on the EU numbering scheme) amino acid substitution, or any combination thereof.

[5111] In some aspects, the antigen binding polypeptides disclosed herein comprise one or more Fc effector function knockout mutation. In some aspects, the antigen binding polypeptides disclosed herein are comprised in IgG1 or IgG4 antibodies or antigen binding fragments thereof. In some aspects, the Fc effector function knockout mutation is L234A, L235A, P239A, or equivalent thereof, or a combination thereof, based on the EU numbering scheme.

[5112] In some aspects, the antigen binding polypeptides disclosed herein comprise a mutation at a glycosylation site. In some aspects, the mutation at a glycosylation site is a mutation at an N-glycosylation site. In some aspects, the antigen binding polypeptides comprise a VH comprising a mutation at a glycosylation site. In some aspects, the mutation at a glycosylation site is a mutation at an N-glycosylation site. In some aspects, the mutation at an N-glycosylation site is at amino acid N62, or equivalent thereof, of the VH region or equivalent thereof. In some aspects, the mutation at an N-glycosylation site at amino acid N62 is N62Q or N62S, or equivalent thereof.

[5113] In some aspects, the antigen binding polypeptides disclosed herein, comprise one or more optional amino acid linkers. The one or more optional amino acid linkers are indicated herein as Ln, wherein n is an integer, and the integer next to each L indicates each L comprised in the antigen binding polypeptides disclosed herein. For example, if an antigen binding polypeptide disclosed herein comprises two linkers, the first linker from N-terminus to C-terminus is herein indicated as L1, and the second linker from N-terminus to C-terminus is herein indicated as L2. In some aspects, any one of the optional linkers each independently have a length of from 0 amino acids to about 50 amino acids. In some aspects, any one of the optional linkers each independently have a length of from 5 amino acids to about 40 amino acids.

[5114] In some aspects, any one of the optional linkers are non-immunogenic. In some aspects, any one of the optional linkers do not contain a consensus T cell epitope.

[5115] In some aspects, any of Ln comprises an amino acid sequence of G or A, or an amino acid sequence at least 65%, at least 70%, at least 75%, at least 80%, at least 85%, at least 90%, at least 95%, at least 99%, or 100% identical to amino acid sequence GSS or ASG, or an amino acid sequence at least 65%, at least 70%, at least 75%, at least 80%, at least 85%, at least 90%, at least 95%, at least 99%, or 100% identical to any one of SEQ ID NOs: 333-373 or 967-971. In some aspects, Ln comprises an amino acid sequence at least 65%, at least 70%, at least 75%, at least 80%, at least 85%, at least 90%, at least 95%, at least 99%, or 100% identical to any one of SEQ ID NOs: 333-345 or 967-971.

[5116] In some aspects, the antigen binding polypeptides provided herein have a structure, from amino-terminus to carboxy-terminus, represented by:
[5117] VL1-L1-CL-L2-VL2-L3-VH2-L4-VH1-L5-CH1;
[5118] VL1-L1-CL-L2-VH2-L3-VL2-L4-VH1-L5-CH1;
[5119] VL1-L1-CH1-L2-VL2-L3-VH2-L4-VH1-L5-CL;
[5120] VL1-L1-CH1-L2-VH2-L3-VL2-L4-VH1-L5-CL;
[5121] VH1-L1-CL-L2-VL2-L3-VH2-L4-VL1-L5-CH1;
[5122] VH1-L1-CL-L2-VH2-L3-VL2-L4-VL1-L5-CH1;
[5123] VH1-L1-CH1-L2-VL2-L3-VH2-L4-VL1-L5-CL;
[5124] VH1-L1-CH1-L2-VH2-L3-VL2-L4-VL1-L5-CL;
[5125] VL2-L1-CL-L2-VL1-L3-VH1-L4-VH2-L5-CH1;
[5126] VL2-L1-CL-L2-VH1-L3-VL1-L4-VH2-L5-CH1;
[5127] VL2-L1-CH1-L2-VL1-L3-VH1-L4-VH2-L5-CL;
[5128] VL2-L1-CH1-L2-VH1-L3-VL1-L4-VH2-L5-CL;
[5129] VH2-L1-CL-L2-VL1-L3-VH1-L4-VL2-L5-CH1;
[5130] VH2-L1-CL-L2-VH1-L3-VL1-L4-VL2-L5-CH1;
[5131] VH2-L1-CH1-L2-VL1-L3-VH1-L4-VL2-L5-CL; or
[5132] VH2-L1-CH1-L2-VH1-L3-VL1-L4-VL2-L5-CL;
[5133] wherein:
[5134] VL1 is a first immunoglobulin light chain variable region that specifically binds to (i) a tumor-associated antigen (TAA), (ii) an infectious disease antigen that is not a sarbecovirus antigen, or (iii) an other-pathology antigen;
[5135] VL2 is a second immunoglobulin light chain variable region that specifically binds to (i) a tumor-associated antigen (TAA), (ii) an infectious disease antigen that is not a sarbecovirus antigen, or (iii) an other-pathology antigen;
[5136] VH1 is a first immunoglobulin heavy chain variable region that specifically binds to (i) a tumor-associated antigen (TAA), (ii) an infectious disease antigen that is not a sarbecovirus antigen, or (iii) an other-pathology antigen;
[5137] VH2 is a second immunoglobulin heavy chain variable region that specifically binds to (i) a tumor-associated antigen (TAA), (ii) an infectious disease antigen that is not a sarbecovirus antigen, or (iii) an other-pathology antigen;
[5138] CL is an immunoglobulin light chain constant region;
[5139] CH1 is an immunoglobulin heavy chain constant region 1; and
[5140] L1-L5 are optional amino acid linkers.

[5141] In some aspects, the antigen binding polypeptides provided herein have a structure, from amino-terminus to carboxy-terminus, represented by:
[5142] VL1-CL-L1-VL2-L2-VH2-L3-VH1-CH1;
[5143] VL1-CL-L1-VH2-L2-VL2-L3-VH1-CH1;
[5144] VL1-CH1-L1-VL2-L2-VH2-L3-VH1-CL;
[5145] VL1-CH1-L1-VH2-L2-VL2-L3-VH1-CL;
[5146] VH1-CL-L1-VL2-L2-VH2-L3-VL1-CH1;
[5147] VH1-CL-L1-VH2-L2-VL2-L3-VL1-CH1;
[5148] VH1-CH1-L1-VL2-L2-VH2-L3-VL1-CL;
[5149] VH1-CH1-L1-VH2-L2-VL2-L3-VL1-CL;
[5150] VL2-CL-L1-VL1-L2-VH1-L3-VH2-CH1;
[5151] VL2-CL-L1-VH1-L2-VL1-L3-VH2-CH1;
[5152] VL2-CH1-L1-VL1-L2-VH1-L3-VH2-CL;
[5153] VL2-CH1-L1-VH1-L2-VL1-L3-VH2-CL;
[5154] VH2-CL-L1-VL1-L2-VH1-L3-VL2-CH1;
[5155] VH2-CL-L1-VH1-L2-VL1-L3-VL2-CH1;
[5156] VH2-CH1-L1-VL1-L2-VH1-L3-VL2-CL; or
[5157] VH2-CH1-L1-VH1-L2-VL1-L3-VL2-CL;
[5158] wherein:
[5159] VL1 is a first immunoglobulin light chain variable region that specifically binds to (i) a tumor-associated antigen (TAA), (ii) an infectious disease antigen that is not a sarbecovirus antigen, or (iii) an other-pathology antigen;
[5160] VL2 is a second immunoglobulin light chain variable region that specifically binds to (i) a tumor-associated antigen (TAA), (ii) an infectious disease antigen that is not a sarbecovirus antigen, or (iii) an other-pathology antigen;
[5161] VH1 is a first immunoglobulin heavy chain variable region that specifically binds to (i) a tumor-associated antigen (TAA), (ii) an infectious disease antigen that is not a sarbecovirus antigen, or (iii) an other-pathology antigen;
[5162] VH2 is a second immunoglobulin heavy chain variable region that specifically binds to (i) a tumor-associated antigen (TAA), (ii) an infectious disease antigen that is not a sarbecovirus antigen, or (iii) an other-pathology antigen;
[5163] CL is an immunoglobulin light chain constant region;
[5164] CH1 is an immunoglobulin heavy chain constant region 1; and
[5165] L1-L3 are amino acid linkers.

[5166] In some aspects, the antigen binding polypeptides provided herein have a structure, from amino-terminus to carboxy-terminus, represented by:
[5167] VL1-L1-VH1-L2-VL2-L3-CL-L4-VH2-L5-CH1;
[5168] VL1-L1-VH1-L2-VL2-L3-CH1-L4-VH2-L5-CL;
[5169] VL1-L1-VH1-L2-VH2-L3-CL-L4-VL2-L5-CH1;
[5170] VL1-L1-VH1-L2-VH2-L3-CH1-L4-VL2-L5-CL;
[5171] VL1-L1-VL2-L2-VH1-L3-CL-L4-VH2-L5-CH1;
[5172] VL1-L1-VL2-L2-VH1-L3-CH1-L4-VH2-L5-CL;
[5173] VL1-L1-VH2-L2-VH1-L3-CL-L4-VL2-L5-CH1;
[5174] VL1-L1-VH2-L2-VH1-L3-CH1-L4-VL2-L5-CL;
[5175] VH1-L1-VL1-L2-VL2-L3-CL-L4-VH2-L5-CH1;
[5176] VH1-L1-VL1-L2-VL2-L3-CH1-L4-VH2-L5-CL;
[5177] VH1-L1-VL1-L2-VH2-L3-CL-L4-VL2-L5-CH1;
[5178] VH1-L1-VL1-L2-VH2-L3-CH1-L4-VL2-L5-CL;
[5179] VH1-L1-VL2-L2-VL1-L3-CL-L4-VH2-L5-CH1;
[5180] VH1-L1-VL2-L2-VL1-L3-CH1-L4-VH2-L5-CL;
[5181] VH1-L1-VH2-L2-VL1-L3-CL-L4-VL2-L5-CH1;
[5182] VH1-L1-VH2-L2-VL1-L3-CH1-L4-VL2-L5-CL;
[5183] VL2-L1-VL1-L2-VH2-L3-CL-L4-VH1-L5-CH1;
[5184] VL2-L1-VL1-L2-VH2-L3-CH1-L4-VH1-L5-CL;
[5185] VL2-L1-VH1-L2-VH2-L3-CL-L4-VL1-L5-CH1;
[5186] VL2-L1-VH1-L2-VH2-L3-CH1-L4-VL1-L5-CL;
[5187] VL2-L1-VH2-L2-VL1-L3-CL-L4-VH1-L5-CH1;
[5188] VL2-L1-VH2-L2-VL1-L3-CH1-L4-VH1-L5-CL;
[5189] VL2-L1-VH2-L2-VH1-L3-CL-L4-VL1-L5-CH1;
[5190] VL2-L1-VH2-L2-VH1-L3-CH1-L4-VL1-L5-CL;
[5191] VH2-L1-VL1-L2-VL2-L3-CL-L4-VH1-L5-CH1;
[5192] VH2-L1-VL1-L2-VL2-L3-CH1-L4-VH1-L5-CL;
[5193] VH2-L1-VH1-L2-VL2-L3-CL-L4-VL1-L5-CH1;
[5194] VH2-L1-VH1-L2-VL2-L3-CH1-L4-VL1-L5-CL;
[5195] VH2-L1-VL2-L2-VL1-L3-CL-L4-VH1-L5-CH1;
[5196] VH2-L1-VL2-L2-VL1-L3-CH1-L4-VH1-L5-CL;
[5197] VH2-L1-VL2-L2-VH1-L3-CL-L4-VL1-L5-CH1; or
[5198] VH2-L1-VL2-L2-VH1-L3-CH1-L4-VL1-L5-CL;
[5199] wherein:
[5200] VL1 is a first immunoglobulin light chain variable region that specifically binds to (i) a tumor-associated antigen (TAA), (ii) an infectious disease antigen that is not a sarbecovirus antigen, or (iii) an other-pathology antigen;
[5201] VL2 is a second immunoglobulin light chain variable region that specifically binds to (i) a tumor-associated antigen (TAA), (ii) an infectious disease antigen that is not a sarbecovirus antigen, or (iii) an other-pathology antigen;
[5202] VH1 is a first immunoglobulin heavy chain variable region that specifically binds to (i) a tumor-associated antigen (TAA), (ii) an infectious disease antigen that is not a sarbecovirus antigen, or (iii) an other-pathology antigen;
[5203] VH2 is a second immunoglobulin heavy chain variable region that specifically binds to (i) a tumor-associated antigen (TAA), (ii) an infectious disease antigen that is not a sarbecovirus antigen, or (iii) an other-pathology antigen;
[5204] CL is an immunoglobulin light chain constant region;
[5205] CH1 is an immunoglobulin heavy chain constant region 1; and
[5206] L1-L5 are optional amino acid linkers.

[5207] In some aspects, the antigen binding polypeptides provided herein have a structure, from amino-terminus to carboxy-terminus, represented by:

[5208] VL1-L1-CL-L2-VH1-L3-CH1-L4-VL2-L5-VH2;
[5209] VL1-L1-CL-L2-VH1-L3-CH1-L4-VH2-L5-VL2;
[5210] VL1-L1-CL-L2-VL2-L3-CH1-L4-VH1-L5-VH2;
[5211] VL1-L1-CL-L2-VH2-L3-CH1-L4-VH1-L5-VL2;
[5212] VL1-L1-CH1-L2-VH1-L3-CL-L4-VL2-L5-VH2;
[5213] VL1-L1-CH1-L2-VH1-L3-CL-L4-VH2-L5-VL2;
[5214] VL1-L1-CH1-L2-VL2-L3-CL-L4-VH1-L5-VH2;
[5215] VL1-L1-CH1-L2-VH2-L3-CL-L4-VH1-L5-VL2;
[5216] VH1-L1-CL-L2-VL1-L3-CH1-L4-VL2-L5-VH2;
[5217] VH1-L1-CL-L2-VL1-L3-CH1-L4-VH2-L5-VL2;
[5218] VH1-L1-CL-L2-VL2-L3-CH1-L4-VL1-L5-VH2;
[5219] VH1-L1-CL-L2-VH2-L3-CH1-L4-VL1-L5-VL2;
[5220] VH1-L1-CH1-L2-VL1-L3-CL-L4-VL2-L5-VH2;
[5221] VH1-L1-CH1-L2-VL1-L3-CL-L4-VH2-L5-VL2;
[5222] VH1-L1-CH1-L2-VL2-L3-CL-L4-VL1-L5-VH2;
[5223] VH1-L1-CH1-L2-VH2-L3-CL-L4-VL1-L5-VL2;
[5224] VL2-L1-CL-L2-VL1-L3-CH1-L4-VH2-L5-VH1;
[5225] VL2-L1-CL-L2-VH1-L3-CH1-L4-VH2-L5-VL1;
[5226] VL2-L1-CL-L2-VH2-L3-CH1-L4-VL1-L5-VH1;
[5227] VL2-L1-CL-L2-VH2-L3-CH1-L4-VH1-L5-VL1;
[5228] VL2-L1-CH1-L2-VL1-L3-CL-L4-VH2-L5-VH1;
[5229] VL2-L1-CH1-L2-VH1-L3-CL-L4-VH2-L5-VL1;
[5230] VL2-L1-CH1-L2-VH2-L3-CL-L4-VL1-L5-VH1;
[5231] VL2-L1-CH1-L2-VH2-L3-CL-L4-VH1-L5-VL1;
[5232] VH2-L1-CL-L2-VL1-L3-CH1-L4-VL2-L5-VH1;
[5233] VH2-L1-CL-L2-VH1-L3-CH1-L4-VL2-L5-VL1;
[5234] VH2-L1-CL-L2-VL2-L3-CH1-L4-VL1-L5-VH1;
[5235] VH2-L1-CL-L2-VL2-L3-CH1-L4-VH1-L5-VL1;
[5236] VH2-L1-CH1-L2-VL1-L3-CL-L4-VL2-L5-VH1;
[5237] VH2-L1-CH1-L2-VH1-L3-CL-L4-VL2-L5-VL1;
[5238] VH2-L1-CH1-L2-VL2-L3-CL-L4-VL1-L5-VH1; or
[5239] VH2-L1-CH1-L2-VL2-L3-CL-L4-VH1-L5-VL1;
[5240] wherein:
[5241] VL1 is a first immunoglobulin light chain variable region that specifically binds to (i) a tumor-associated antigen (TAA), (ii) an infectious disease antigen that is not a sarbecovirus antigen, or (iii) an other-pathology antigen;
[5242] VL2 is a second immunoglobulin light chain variable region that specifically binds to (i) a tumor-associated antigen (TAA), (ii) an infectious disease antigen that is not a sarbecovirus antigen, or (iii) an other-pathology antigen;
[5243] VH1 is a first immunoglobulin heavy chain variable region that specifically binds to (i) a tumor-associated antigen (TAA), (ii) an infectious disease antigen that is not a sarbecovirus antigen, or (iii) an other-pathology antigen;
[5244] VH2 is a second immunoglobulin heavy chain variable region that specifically binds to (i) a tumor-associated antigen (TAA), (ii) an infectious disease antigen that is not a sarbecovirus antigen, or (iii) an other-pathology antigen;
[5245] CL is an immunoglobulin light chain constant region;
[5246] CH1 is an immunoglobulin heavy chain constant region 1; and
[5247] L1-L5 are optional amino acid linkers.

[5248] In any aspect shown herein as a structure from amino terminus to carboxy terminus, and with binding pairs selected from VL and/or VH or other structural regions such as CH1, CL, CH2, CH3, when shown without a specific linker such as L1, L2, etc., such linkers are optionally present in such structures between each designated subsequence VL, VH, etc.

[5249] In some aspects, the TAA is selected from the group consisting of 5′-nucleotidase, 5T4, A2AR, activin receptor-like kinase 1, adenocarcinoma antigen, ADRB3, AFP, AKAP-4, ALK, alpha-fetoprotein, androgen receptor, angiopoietin 2, AOC3, APRIL, ATPDase, AXL, B7-4, B7DC, B7H1, B7H2, B7H3, B7H4, B7H5, B7H6, B7H7, B7RP1, BAFF, BAFFR, BCMA, bcr-abl, BlyS, BORIS, BST2, BTK, BTLA, C3, C5, C5a, C5a receptor, CA-125, CAIX, CanAg (a glycoform of MUC1), CCL11, CCL15, CCL17, CCL19, CCL2, CCL20, CCL21, CCL25, CCL3, CCL4, CCL5, CCL7, CCL8, CCR2, CCR3, CCR4, CCR5, CD11, CD11a, CD123, CD125, CD133, CD134, CD137, CD137L, CD147, CD15, CD154, CD160, CD16A, CD171, CD179a, CD18, CD184, CD19, CD2, CD20, CD200, CD22, CD221, CD23, CD24, CD242, CD25, CD27, CD272, CD276, CD278, CD279, CD28, CD3, CD30, CD300LF, CD319, CD33, CD37, CD38, CD39, CD38, CD4, CD40, CD40L, CD41, CD44v6, CD45, CD47, CD49B, CD5, CD51, CD52, CD54, CD56, CD6, CD62L, CD7, CD70, CD72, CD74, CD79a, CD79b, CD80, CD86, CD97, CEA, CEACAM5, claudin 18 isoform 2, CLDN6, CLEC12A, CLEC9, CLEC91, CLL-1, cMet, coagulation factor III, CRTH2, CS1, CSF-1, CSFIR, CSF-2, CSF-3, CTGF, CTLA4, CXCL1, CXCL12, CXCL13, CXCL2, CXCL4, CXCR3, CXORF61, CyclinB1, CYP1B1, dendritic cell-associated lectin 2, DLL3, DLL4, DNGR-1, DR5, E7, E-cadherin, EGFL7, EGFR, EGFRVIII, ELF2M, EMR2, endoglin, ENTPD1, EpCAM, EphA2, EPHA3, ephrin receptor A3, EphrinB2, episialin, ERBB2 (Her2/neu), ERBB3, ERG (TMPRSS2-ETS fusion gene), ETV6-AML, FAP, FCAR, FCER1, FCER1A, FCER2, FCRL5, FGF 23, FGFR, FGFR2, fibronectin extra domain-B, FLAP, FLT3, folate hydrolase, folate receptor 1, folate receptor alpha, folate receptor beta, FOLH1, Fos-relatedantigen1, Frizzled receptor, Fucosyl GM1, GD2, GD3, gelatinase B, Gi24, GITR, GITRL, GloboH, Glutamate carboxypeptidase II, glypican 3, GM3, GP100, GPC1, GPC2, GPC3, gplOO, GPNMB, GPR20, GPR5, GPRC5D, growth differentiation factor 8, GUCY2C, HAVCR1, HER1, HER2, HER3, HGF, HGFR, HHLA2, histone complex, HLA-DR, HMGB1, HMWMAA, HPVE6, hTERT, human telomerase reverse transcriptase, HVEM, ICAM-1, ICOS, ICOSL, IDO, IFNa, IgE, IGF-1, IGF1R, IGF-2, IGF-I receptor, IGLL1, IL1, IL10, IL12, IL13, IL13Ra2, IL-13Ra2, IL13Ra1, IL15, IL17, IL-17A, IL-17AF, IL-17F, IL17Rb, IL18, IL1B, IL1F10, IL-1a, IL-1B, IL2, IL-20, IL22, IL23, IL-23A, IL25, IL2Rbeta, IL-3 receptor, IL-31 receptor A, IL33, IL35, IL4, IL4Ra, IL5, IL5R, IL6, IL7, IL7Ra, IL8, IL9, IL9R, IL1A, IL-llRa, integrin α4, integrin α4 β7, integrin α5β1, integrin αIIbβ3, integrin αvβ3, integrin β7, interleukin 36 receptor IL1RAP, interleukin 36 receptor IL1RL2, intestinal carboxy lesterase, ITGB4, ITK, KIR, KIR2D, KIT, LAG3, LAGE-1a, LAIR1, LAMP1, LCK, legumain, leptin, LewisY, LILRA2, LIV-1, LMP2, LOXL2, LPFS2, LRRC15, LY6K, LY75, LYPD3, MAD-CT-1, MAD-CT-2, MAGEA1, MAGE-A1, MCAM, MCP-1, MelanA/MART1, mesothelin, MHC classII, MIF, ML-IAP, MS4A1, MST1R (RON), MUC1, MUC-1, MUC16, MUC-16, MUC5AC, muthsp70-2, MYCN, NA17, NCA-90) granulocyte antigen, NCAM, NCR3LG1, nectin-4, NGNA ganglioside, NKG2A, NKG2D, NKp46, Notch 1, Notch receptor, NRP1, NTPDase-1, NY-BR-1, NY-ESO-1, o-acetyl-GD2, OR51E2, OX40), OX40L, OY-TES1, p53, p53mutant, PANX3, PAP, PAX3, PAX5, PCDC1, PCDP1, PCTA-1/Galectin8, PD-1, PDGFRA, PDGFR-beta, PD-L1, PD-L2, phosphate-sodium co-transporter, phosphatidylserine, PLAC1, polysialicacid, PROM1, prostase, prostein, PRSS21, PSCA, PSMA, PTK7, RAGE-1, RANKL, Ras mutant, rhIL1O, RhoC, root plate-specific spondin 3, ROR1, ROR2, RTN4, RU1, RU2, S152, sarcoma translocation breakpoints, SART3, scatter factor receptor kinase, SDC1, SIRPalpha, SISP1, SLAMF7, SLC, sLe, SLITRK6, spermprotein17, SPG64, sphingosine-1-phosphate, SSEA-4, SSX2, ST2, STEAP1, STEAP2, surviving and telomerase, Syk kinase, T14, TACI, TAG72, TARP, T-cell receptor, TCRβ, TDO, TEMI/CD248, TEM7R, tenascin C, TGFBETA, TGF-β1, TGF-β2, TGS5, the extracellular portion of the APRIL protein, Tie2, TIGIT, TIM3, TLR, TLR2, TLR4, TLR5, TLR9, TMEF1, TnAg, TNF, TNFa, TNFR superfamily member 4, TNFRSF7, Tp55, TRAC, TRAIL-R1, TRAIL-R2, TRAP, TREM1, TROP2, TRP-2, TSHR, TSLP, TSLPR, tumor antigen CTAA16.88, TWEAK, tyrosinase, TYRPI glycoprotein 75, UPK2, VAP-1, VEGF, VEGFA, VEGFR-1, VEGFR2, vimentin, VISTA, Vstm3, WT1, WUCAM, and XAGE1.

[5250] In some aspects, the antigen binding polypeptides provided herein comprise a VL1 comprising a light chain complementarity determining region 1 (LCDR1), LCDR2, and/or LCDR3 of an antibody selected from the group consisting of losatuxizumab vedotin, utomilumab, urelumab, oleclumab, naptumomab estafenatox, ascrinvacumab, pintumomab, tacatuzumab tetraxetan, nesvacumab, vanucizumab, timolumab, vapaliximab, vepalimomab, enapotamab vedotin, ianalumab, belimumab, tabalumab, tibulizumab, belantamab mafodotin, teclistamab, teclistamab, detumomab, nacolomab tafenatox, eculizumab, lendalizumab, pexelizumab, pozelimab, ravulizumab, tesidolumab, vilobelimab, abagovomab, igovomab, oregovomab, sofituzumab vedotin, cantuzumab mertansine, cantuzuma bravtansine, girentuximab, altumomab pentetate, arcitumomab, besilesomab, bertilimumab, plozalizumab, mogamulizumab, leronlimab, PRO140, rovelizumab, rovelizumab, talacotuzumab, benralizumab, tavolimab, vonlerolizumab, gavilimomab, ziralimumab, fanolesomab, ipilimumab, ruplizumab, toralizumab, dapirolizumab pegol, toralizumab, dapirolizumab pegol, ruplizumab, blinatumomab, inebilizumab, loncastuximab tesirine, SGN-CD19A, tafasitamab, taplitumomab paptox, XMAB-5574, Budoprutug, Obexelimab, duvortuxizumab, englumafusp alfa, Emfizatamab, zeripatamig, siplizumab, blontuvetmab, FBTA05, ibritumomab tiuxetan, obinutuzumab, ocaratuzumab, ocrelizumab, ofatumumab, rituximab, tositumomab, ublituximab, veltuzumab, divozilimab, eramkafusp alfa, ripertamab, zuberitamab, glofitamab, nofetumomab merpentan, samalizumab, imvotamab, odronextamab, plamotamab, bectumomab, inotuzumab ozogamicin, moxetumomab pasudotox, pinatuzumab vedotin, gomiliximab, lumiliximab, inolimomab, inolimomab, daclizumab, camidanluma btesirine, basiliximab, varlilumab, omburtamab, enoblituzumab, vopratelimab, lulizumabpegol, TGN1412, muromonab-CD3, otelixizumab, teplizumab, visilizumab, epcoritamab, epcoritamab, brentuximab vedotin, iratumumab, azintuxizumab vedotin, gemtuzumab ozogamicin, lintuzumab, vadastuximab talirine, naratuximab emtansine, otlertuzumab, lilotomab satetraxctan, tetulomab, daratumumab, isatuximab, foralumab, mosunetuzumab, mosunetuzumab, cedelizumab, ibalizumab, keliximab, priliximab, tregalizumab, zanolimumab, bleselumab, iscalimab, lucatumumab, ravagalimab, selicrelumab, teneliximab, vanalimab, abciximab, bivatuzumab, iomab-B, telimomab aritox, zolimomab aritox, abituzumab, intetumumab, alemtuzumab, tamtuvetmab, lorvotuzumab mertansinc, itolizumab, cusatuzumab, vorsetuzumab mafodotin, milatuzumab, iladatuzumab vedotin, polatuzumab vedotin, galiximab, cibisatamab, zolbetuximab, naxitamab, tisotumab vedotin, olendalizumab, pamrevlumab, lacnotuzumab, cabiralizumab, emactuzumab, axatilimab, gimsilumab, lenzilumab, namilumab, tremelimumab, ulocuplumab, tepoditamab, rovalpituzumab tesirine, tarlatamab, demcizumab, navicixizumab, drozitumab, parsatuzumab, depatuxizumab mafodotin, modotuximab, carotuximab, adecatumumab, adecatumumab, oportuzumab monatox, solitomab, tucotuzumab celmoleukin, edrecolomab, catumaxomab, ifabotuzumab, fibatuzumab, zalutumumab, panitumumab, cetuximab, futuximab, imgatuzumab, laprituximab emtansine, matuzumab, necitumumab, nimotuzumab, tomuzotuximab, amivantamab, amivantamab, epitumomab cituxetan, sontuzumab, duligotuzumab, elgemtumab, lumretuzumab, patritumab, seribantumab, zenocutuzumab, sibrotuzumab, burosumab, aprutumab ixadotin, radretumab, pasotuxizumab, farletuzumab, mirvetuximab soravtansine, vantictumab, TRBS07, 3F8, dinutuximab, dinutuximab beta, ecromeximab, mitumomab, andecaliximab, capromab, codrituzumab, glembatumumab vedotin, talquetamab, talquetamab, trevogrumab, indusatumab vedotin, ficlatuzumab, rilotumumab, zatuximab, pentuzimab, pentuzimab, margetuximab, timigutuzumab, trastuzumab, trastuzumab duocarmazine, trastuzumab emtansine, gancotamab, pertuzumab, ertumaxomab, emibetuzumab, telisotuzumab, telisotuzumab vedotin, derlotuximab biotin, apolizumab, onartuzumab, bersanlimab, enlimomabpegol, rontalizumab, sifalimumab, talizumab, ganitumab, istiratumab, robatumumab, teprotumumab, figitumumab, ganitumab, istiratumab, robatumumab, teprotumumab, cixutumumab, dalotuzumab, xentuzumab, dusigitumab, canakinumab, ustekinumab, ustekinumab, ustekinumab, briakinumab, briakinumab, abrezekimab, lebrikizumab, romilkimab, TNX-650, tralokinumab, anrukinzumab, brodalumab, ixckizumab, netakimab, perakizumab, secukinumab, vunakizumab, afasevikumab, afasevikumab, bimckizumab, bimekizumab, remtolumab, bermckimab, lutikizumab, lutikizumab, gevokizumab, cergutuzumab amunaleukin, fletikumab, fezakinumab, brazikumab, guselkumab, mirikizumab, tildrakizumab, risankizumab, flotetuzumab, nemolizumab, pascolizumab, dupilumab, mepolizumab, reslizumab, clazakizumab, elsilimomab, olokizumab, sarilumab, siltuximab, sirukumab, vobarilizumab, tocilizumab, SA237, satralizumab, enokizumab, prezalizumab, natalizumab, abrilumab, abrilumab, vedolizumab, volociximab, tadocizumab, etaracizumab, etrolizumab, spesolimab, vatelizumab, erlizumab, lirilumab, relatlimab, cBR96-doxorubicinimmunoconjugate, odulimomab, efalizumab, ladiratuzumab vedotin, simtuzumab, samrotamab vedotin, aselizumab, lupartumab amadotin, imalumab, carlumab, imaprelimab, amatuximab, amatuximab, anctumab ravtansine, narnatumab, clivatuzumab tetraxetan, pemtumomab, gatipotuzumab, ensituximab, lemalesomab, sulesomab, enfortumab vedotin, racotumomab, monalizumab, brontictuzumab, tarextumab, vesencumab, oxelumab, gilvetmab, tislelizumab, dostarlimab, BCD-100, nivolumab, PDR001, pembrolizumab, pidilizumab, retifanlimab, spartalizumab, sintilimab, cemiplimab, olaratumab, tovetumab, rinucumab, atezolizumab, avelumab, durvalumab, lifastuzumab vedotin, bavituximab, acapatamab, capromab, rosopatamab, nezastomig, pasotuxizumab, pelgifatamab, voxalatamab, cofetuzumab pelidotin, denosumab, rosmantuzumab, cirmtuzumab, atinumab, indatuximab ravtansine, elotuzumab, sirtratumab vedotin, sonepcizumab, vandortuzumab vedotin, minretumomab, satumomab pendetide, maslimomab, ontuxizumab, tenatumomab, fresolimumab, metelimumab, lerdelimumab, tezepelumab, etigilimab, tiragotumab, placulumab, prezalumab, infliximab, nerelimomab, ozoralizumab, adalimumab, afelimomab, certolizumab pegol, golimumab, mapatumumab, conatumumab, lexatumumab, tigatuzumab, sacituzumab govitecan, votumumab, pogalizumab, letolizumab, pankomab, anatumomab mafenatox, enavatuzumab, flanvotumab, brolucizumab, ranibizumab, varisacumab, bevacizumab, faricimab, icrucumab, alacizumab pegol, ramucirumab, pritumumab, and onvatilimab.

[5251] In some aspects, the antigen binding polypeptides provided herein comprise a VL2 comprising a light chain complementarity determining region 1 (LCDR1), LCDR2, and/or LCDR3 of an antibody selected from the group consisting of losatuxizumab vedotin, utomilumab, urelumab, oleclumab, naptumomab estafenatox, ascrinvacumab, pintumomab, tacatuzumab tetraxetan, nesvacumab, vanucizumab, timolumab, vapaliximab, vepalimomab, enapotamab vedotin, ianalumab, belimumab, tabalumab, tibulizumab, belantamab mafodotin, teclistamab, teclistamab, detumomab, nacolomab tafenatox, eculizumab, lendalizumab, pexelizumab, pozelimab, ravulizumab, tesidolumab, vilobelimab, abagovomab, igovomab, oregovomab, sofituzumab vedotin, cantuzumab mertansine, cantuzuma bravtansine, girentuximab, altumomab pentetate, arcitumomab, besilesomab, bertilimumab, plozalizumab, mogamulizumab, leronlimab, PRO140, rovelizumab, rovelizumab, talacotuzumab, benralizumab, tavolimab, vonlerolizumab, gavilimomab, ziralimumab, fanolesomab, ipilimumab, ruplizumab, toralizumab, dapirolizumab pegol, toralizumab, dapirolizumab pegol, ruplizumab, blinatumomab, inebilizumab, loncastuximab tesirine, SGN-CD19A, tafasitamab, taplitumomab paptox, XMAB-5574, Budoprutug, Obexelimab, duvortuxizumab, englumafusp alfa, Emfizatamab, zeripatamig, siplizumab, blontuvetmab, FBTA05, ibritumomab tiuxetan, obinutuzumab, ocaratuzumab, ocrelizumab, ofatumumab, rituximab, tositumomab, ublituximab, veltuzumab, divozilimab, eramkafusp alfa, ripertamab, zuberitamab, glofitamab, nofetumomab merpentan, samalizumab, imvotamab, odronextamab, plamotamab, bectumomab, inotuzumab ozogamicin, moxetumomab pasudotox, pinatuzumab vedotin, gomiliximab, lumiliximab, inolimomab, inolimomab, daclizumab, camidanluma btesirine, basiliximab, varlilumab, omburtamab, enoblituzumab, vopratelimab, lulizumabpegol, TGN1412, muromonab-CD3, otelixizumab, teplizumab, visilizumab, epcoritamab, epcoritamab, brentuximab vedotin, iratumumab, azintuxizumab vedotin, gemtuzumab ozogamicin, lintuzumab, vadastuximab talirine, naratuximab emtansine, otlertuzumab, lilotomab satetraxetan, tetulomab, daratumumab, isatuximab, foralumab, mosunetuzumab, mosunetuzumab, cedelizumab, ibalizumab, keliximab, priliximab, tregalizumab, zanolimumab, bleselumab, iscalimab, lucatumumab, ravagalimab, selicrelumab, teneliximab, vanalimab, abciximab, bivatuzumab, iomab-B, telimomab aritox, zolimomab aritox, abituzumab, intetumumab, alemtuzumab, tamtuvetmab, lorvotuzumab mertansine, itolizumab, cusatuzumab, vorsetuzumab mafodotin, milatuzumab, iladatuzumab vedotin, polatuzumab vedotin, galiximab, cibisatamab, zolbetuximab, naxitamab, tisotumab vedotin, olendalizumab, pamrevlumab, lacnotuzumab, cabiralizumab, emactuzumab, axatilimab, gimsilumab, lenzilumab, namilumab, tremelimumab, ulocuplumab, tepoditamab, rovalpituzumab tesirine, tarlatamab, demcizumab, navicixizumab, drozitumab, parsatuzumab, depatuxizumab mafodotin, modotuximab, carotuximab, adecatumumab, adecatumumab, oportuzumab monatox, solitomab, tucotuzumab celmoleukin, edrecolomab, catumaxomab, ifabotuzumab, fibatuzumab, zalutumumab, panitumumab, cetuximab, futuximab, imgatuzumab, laprituximab emtansine, matuzumab, necitumumab, nimotuzumab, tomuzotuximab, amivantamab, amivantamab, epitumomab cituxetan, sontuzumab, duligotuzumab, elgemtumab, lumretuzumab, patritumab, seribantumab, zenocutuzumab, sibrotuzumab, burosumab, aprutumab ixadotin, radretumab, pasotuxizumab, farletuzumab, mirvetuximab soravtansine, vantictumab, TRBS07, 3F8, dinutuximab, dinutuximab beta, ecromeximab, mitumomab, andecaliximab, capromab, codrituzumab, glembatumumab vedotin, talquetamab, talquetamab, trevogrumab, indusatumab vedotin, ficlatuzumab, rilotumumab, zatuximab, pentuzimab, pentuzimab, margetuximab, timigutuzumab, trastuzumab, trastuzumab duocarmazine, trastuzumab emtansine, gancotamab, pertuzumab, ertumaxomab, emibetuzumab, telisotuzumab, telisotuzumab vedotin, derlotuximab biotin, apolizumab, onartuzumab, bersanlimab, enlimomabpegol, rontalizumab, sifalimumab, talizumab, ganitumab, istiratumab, robatumumab, teprotumumab, figitumumab, ganitumab, istiratumab, robatumumab, teprotumumab, cixutumumab, dalotuzumab, xentuzumab, dusigitumab, canakinumab, ustekinumab, ustekinumab, ustekinumab, briakinumab, briakinumab, abrezekimab, lebrikizumab, romilkimab, TNX-650, tralokinumab, anrukinzumab, brodalumab, ixekizumab, netakimab, perakizumab, secukinumab, vunakizumab, afasevikumab, afasevikumab, bimekizumab, bimekizumab, remtolumab, bermekimab, lutikizumab, lutikizumab, gevokizumab, cergutuzumab amunaleukin, fletikumab, fezakinumab, brazikumab, guselkumab, mirikizumab, tildrakizumab, risankizumab, flotetuzumab, nemolizumab, pascolizumab, dupilumab, mepolizumab, reslizumab, clazakizumab, elsilimomab, olokizumab, sarilumab, siltuximab, sirukumab, vobarilizumab, tocilizumab, SA237, satralizumab, enokizumab, prezalizumab, natalizumab, abrilumab, abrilumab, vedolizumab, volociximab, tadocizumab, etaracizumab, etrolizumab, spesolimab, vatelizumab, erlizumab, lirilumab, relatlimab, cBR96-doxorubicinimmunoconjugate, odulimomab, efalizumab, ladiratuzumab vedotin, simtuzumab, samrotamab vedotin, aselizumab, lupartumab amadotin, imalumab, carlumab, imaprelimab, amatuximab, amatuximab, anetumab ravtansine, narnatumab, clivatuzumab tetraxetan, pemtumomab, gatipotuzumab, ensituximab, lemalesomab, sulesomab, enfortumab vedotin, racotumomab, monalizumab, brontictuzumab, tarextumab, vesencumab, oxelumab, gilvetmab, tislelizumab, dostarlimab, BCD-100, nivolumab, PDR001, pembrolizumab, pidilizumab, retifanlimab, spartalizumab, sintilimab, cemiplimab, olaratumab, tovetumab, rinucumab, atezolizumab, avelumab, durvalumab, lifastuzumab vedotin, bavituximab, acapatamab, capromab, rosopatamab, nezastomig, pasotuxizumab, pelgifatamab, voxalatamab, cofetuzumab pelidotin, denosumab, rosmantuzumab, cirmtuzumab, atinumab, indatuximab ravtansine, elotuzumab, sirtratumab vedotin, sonepcizumab, vandortuzumab vedotin, minretumomab, satumomab pendetide, maslimomab, ontuxizumab, tenatumomab, fresolimumab, metelimumab, lerdelimumab, tezepelumab, etigilimab, tiragotumab, placulumab, prezalumab, infliximab, nerelimomab, ozoralizumab, adalimumab, afelimomab, certolizumab pegol, golimumab, mapatumumab, conatumumab, lexatumumab, tigatuzumab, sacituzumab govitecan, votumumab, pogalizumab, letolizumab, pankomab, anatumomab mafenatox, enavatuzumab, flanvotumab, brolucizumab, ranibizumab, varisacumab, bevacizumab, faricimab, icrucumab, alacizumab pegol, ramucirumab, pritumumab, and onvatilimab.

[5252] In some aspects, the antigen binding polypeptides provided herein comprise a VH1 comprising a heavy chain complementarity determining region 1 (HCDR1), HCDR2, and/or HCDR3 of an antibody selected from the group consisting of losatuxizumab vedotin, utomilumab, urelumab, oleclumab, naptumomab estafenatox, ascrinvacumab, pintumomab, tacatuzumab tetraxetan, nesvacumab, vanucizumab, timolumab, vapaliximab, vepalimomab, enapotamab vedotin, ianalumab, belimumab, tabalumab, tibulizumab, belantamab mafodotin, teclistamab, teclistamab, detumomab, nacolomab tafenatox, eculizumab, lendalizumab, pexelizumab, pozelimab, ravulizumab, tesidolumab, vilobelimab, abagovomab, igovomab, oregovomab, sofituzumab vedotin, cantuzumab mertansine, cantuzuma bravtansine, girentuximab, altumomab pentetate, arcitumomab, besilesomab, bertilimumab, plozalizumab, mogamulizumab, leronlimab, PRO140, rovelizumab, rovelizumab, talacotuzumab, benralizumab, tavolimab, vonlerolizumab, gavilimomab, ziralimumab, fanolesomab, ipilimumab, ruplizumab, toralizumab, dapirolizumab pegol, toralizumab, dapirolizumab pegol, ruplizumab, blinatumomab, inebilizumab, loncastuximab tesirine, SGN-CD19A, tafasitamab, taplitumomab paptox, XMAB-5574, Budoprutug, Obexelimab, duvortuxizumab, englumafusp alfa, Emfizatamab, zeripatamig, siplizumab, blontuvetmab, FBTA05, ibritumomab tiuxetan, obinutuzumab, ocaratuzumab, ocrelizumab, ofatumumab, rituximab, tositumomab, ublituximab, veltuzumab, divozilimab, eramkafusp alfa, ripertamab, zuberitamab, glofitamab, nofetumomab merpentan, samalizumab, imvotamab, odronextamab, plamotamab, bectumomab, inotuzumab ozogamicin, moxetumomab pasudotox, pinatuzumab vedotin, gomiliximab, lumiliximab, inolimomab, inolimomab, daclizumab, camidanluma btesirine, basiliximab, varlilumab, omburtamab, enoblituzumab, vopratelimab, lulizumabpegol, TGN1412, muromonab-CD3, otelixizumab, teplizumab, visilizumab, epcoritamab, epcoritamab, brentuximab vedotin, iratumumab, azintuxizumab vedotin, gemtuzumab ozogamicin, lintuzumab, vadastuximab talirine, naratuximab emtansine, otlertuzumab, lilotomab satetraxetan, tetulomab, daratumumab, isatuximab, foralumab, mosunetuzumab, mosunetuzumab, cedelizumab, ibalizumab, keliximab, priliximab, tregalizumab, zanolimumab, bleselumab, iscalimab, lucatumumab, ravagalimab, selicrelumab, teneliximab, vanalimab, abciximab, bivatuzumab, iomab-B, telimomab aritox, zolimomab aritox, abituzumab, intetumumab, alemtuzumab, tamtuvetmab, lorvotuzumab mertansine, itolizumab, cusatuzumab, vorsetuzumab mafodotin, milatuzumab, iladatuzumab vedotin, polatuzumab vedotin, galiximab, cibisatamab, zolbetuximab, naxitamab, tisotumab vedotin, olendalizumab, pamrevlumab, lacnotuzumab, cabiralizumab, emactuzumab, axatilimab, gimsilumab, lenzilumab, namilumab, tremelimumab, ulocuplumab, tepoditamab, rovalpituzumab tesirine, tarlatamab, demcizumab, navicixizumab, drozitumab, parsatuzumab, depatuxizumab mafodotin, modotuximab, carotuximab, adecatumumab, adecatumumab, oportuzumab monatox, solitomab, tucotuzumab celmoleukin, edrecolomab, catumaxomab, ifabotuzumab, fibatuzumab, zalutumumab, panitumumab, cetuximab, futuximab, imgatuzumab, laprituximab emtansine, matuzumab, necitumumab, nimotuzumab, tomuzotuximab, amivantamab, amivantamab, epitumomab cituxetan, sontuzumab, duligotuzumab, elgemtumab, lumretuzumab, patritumab, seribantumab, zenocutuzumab, sibrotuzumab, burosumab, aprutumab ixadotin, radretumab, pasotuxizumab, farletuzumab, mirvetuximab soravtansine, vantictumab, TRBS07, 3F8, dinutuximab, dinutuximab beta, ecromeximab, mitumomab, andecaliximab, capromab, codrituzumab, glembatumumab vedotin, talquetamab, talquetamab, trevogrumab, indusatumab vedotin, ficlatuzumab, rilotumumab, zatuximab, pentuzimab, pentuzimab, margetuximab, timigutuzumab, trastuzumab, trastuzumab duocarmazine, trastuzumab emtansine, gancotamab, pertuzumab, ertumaxomab, emibetuzumab, telisotuzumab, telisotuzumab vedotin, derlotuximab biotin, apolizumab, onartuzumab, bersanlimab, enlimomabpegol, rontalizumab, sifalimumab, talizumab, ganitumab, istiratumab, robatumumab, teprotumumab, figitumumab, ganitumab, istiratumab, robatumumab, teprotumumab, cixutumumab, dalotuzumab, xentuzumab, dusigitumab, canakinumab, ustekinumab, ustekinumab, ustekinumab, briakinumab, briakinumab, abrezekimab, lebrikizumab, romilkimab, TNX-650, tralokinumab, anrukinzumab, brodalumab, ixekizumab, netakimab, perakizumab, secukinumab, vunakizumab, afasevikumab, afasevikumab, bimekizumab, bimekizumab, remtolumab, bermekimab, lutikizumab, lutikizumab, gevokizumab, cergutuzumab amunaleukin, fletikumab, fezakinumab, brazikumab, guselkumab, mirikizumab, tildrakizumab, risankizumab, flotetuzumab, nemolizumab, pascolizumab, dupilumab, mepolizumab, reslizumab, clazakizumab, elsilimomab, olokizumab, sarilumab, siltuximab, sirukumab, vobarilizumab, tocilizumab, SA237, satralizumab, enokizumab, prezalizumab, natalizumab, abrilumab, abrilumab, vedolizumab, volociximab, tadocizumab, etaracizumab, etrolizumab, spesolimab, vatelizumab, erlizumab, lirilumab, relatlimab, cBR96-doxorubicinimmunoconjugate, odulimomab, efalizumab, ladiratuzumab vedotin, simtuzumab, samrotamab vedotin, aselizumab, lupartumab amadotin, imalumab, carlumab, imaprelimab, amatuximab, amatuximab, anetumab ravtansine, narnatumab, clivatuzumab tetraxetan, pemtumomab, gatipotuzumab, ensituximab, lemalesomab, sulesomab, enfortumab vedotin, racotumomab, monalizumab, brontictuzumab, tarextumab, vesencumab, oxelumab, gilvetmab, tislelizumab, dostarlimab, BCD-100, nivolumab, PDR001, pembrolizumab, pidilizumab, retifanlimab, spartalizumab, sintilimab, cemiplimab, olaratumab, tovetumab, rinucumab, atezolizumab, avelumab, durvalumab, lifastuzumab vedotin, bavituximab, acapatamab, capromab, rosopatamab, nezastomig, pasotuxizumab, pelgifatamab, voxalatamab, cofetuzumab pelidotin, denosumab, rosmantuzumab, cirmtuzumab, atinumab, indatuximab ravtansine, elotuzumab, sirtratumab vedotin, sonepcizumab, vandortuzumab vedotin, minretumomab, satumomab pendetide, maslimomab, ontuxizumab, tenatumomab, fresolimumab, metelimumab, lerdelimumab, tezepelumab, etigilimab, tiragotumab, placulumab, prezalumab, infliximab, nerelimomab, ozoralizumab, adalimumab, afelimomab, certolizumab pegol, golimumab, mapatumumab, conatumumab, lexatumumab, tigatuzumab, sacituzumab govitecan, votumumab, pogalizumab, letolizumab, pankomab, anatumomab mafenatox, enavatuzumab, flanvotumab, brolucizumab, ranibizumab, varisacumab, bevacizumab, faricimab, icrucumab, alacizumab pegol, ramucirumab, pritumumab, and onvatilimab.

[5253] In some aspects, the antigen binding polypeptides provided herein comprise a VH2 comprising a heavy chain complementarity determining region 1 (HCDR1), HCDR2, and/or HCDR3 of an antibody selected from the group consisting of losatuxizumab vedotin, utomilumab, urelumab, oleclumab, naptumomab estafenatox, ascrinvacumab, pintumomab, tacatuzumab tetraxetan, nesvacumab, vanucizumab, timolumab, vapaliximab, vepalimomab, enapotamab vedotin, ianalumab, belimumab, tabalumab, tibulizumab, belantamab mafodotin, teclistamab, teclistamab, detumomab, nacolomab tafenatox, eculizumab, lendalizumab, pexelizumab, pozelimab, ravulizumab, tesidolumab, vilobelimab, abagovomab, igovomab, oregovomab, sofituzumab vedotin, cantuzumab mertansine, cantuzuma bravtansine, girentuximab, altumomab pentetate, arcitumomab, besilesomab, bertilimumab, plozalizumab, mogamulizumab, leronlimab, PRO140, rovelizumab, rovelizumab, talacotuzumab, benralizumab, tavolimab, vonlerolizumab, gavilimomab, ziralimumab, fanolesomab, ipilimumab, ruplizumab, toralizumab, dapirolizumab pegol, toralizumab, dapirolizumab pegol, ruplizumab, blinatumomab, inebilizumab, loncastuximab tesirine, SGN-CD19A, tafasitamab, taplitumomab paptox, XMAB-5574, Budoprutug, Obexelimab, duvortuxizumab, englumafusp alfa, Emfizatamab, zeripatamig, siplizumab, blontuvetmab, FBTA05, ibritumomab tiuxetan, obinutuzumab, ocaratuzumab, ocrelizumab, ofatumumab, rituximab, tositumomab, ublituximab, veltuzumab, divozilimab, eramkafusp alfa, ripertamab, zuberitamab, glofitamab, nofctumomab merpentan, samalizumab, imvotamab, odronextamab, plamotamab, bectumomab, inotuzumab ozogamicin, moxctumomab pasudotox, pinatuzumab vedotin, gomiliximab, lumiliximab, inolimomab, inolimomab, daclizumab, camidanluma btesirine, basiliximab, varlilumab, omburtamab, enoblituzumab, vopratelimab, lulizumabpegol, TGN1412, muromonab-CD3, otelixizumab, teplizumab, visilizumab, epcoritamab, epcoritamab, brentuximab vedotin, iratumumab, azintuxizumab vedotin, gemtuzumab ozogamicin, lintuzumab, vadastuximab talirine, naratuximab emtansine, otlertuzumab, lilotomab satetraxetan, tetulomab, daratumumab, isatuximab, foralumab, mosunetuzumab, mosunetuzumab, cedelizumab, ibalizumab, keliximab, priliximab, tregalizumab, zanolimumab, bleselumab, iscalimab, lucatumumab, ravagalimab, selicrelumab, tencliximab, vanalimab, abciximab, bivatuzumab, iomab-B, telimomab aritox, zolimomab aritox, abituzumab, intetumumab, alemtuzumab, tamtuvetmab, lorvotuzumab mertansine, itolizumab, cusatuzumab, vorsetuzumab mafodotin, milatuzumab, iladatuzumab vedotin, polatuzumab vedotin, galiximab, cibisatamab, zolbetuximab, naxitamab, tisotumab vedotin, olendalizumab, pamrevlumab, lacnotuzumab, cabiralizumab, emactuzumab, axatilimab, gimsilumab, lenzilumab, namilumab, tremelimumab, ulocuplumab, tepoditamab, rovalpituzumab tesirine, tarlatamab, demcizumab, navicixizumab, drozitumab, parsatuzumab, depatuxizumab mafodotin, modotuximab, carotuximab, adecatumumab, adecatumumab, oportuzumab monatox, solitomab, tucotuzumab celmoleukin, edrecolomab, catumaxomab, ifabotuzumab, fibatuzumab, zalutumumab, panitumumab, cetuximab, futuximab, imgatuzumab, laprituximab emtansine, matuzumab, necitumumab, nimotuzumab, tomuzotuximab, amivantamab, amivantamab, epitumomab cituxetan, sontuzumab, duligotuzumab, elgemtumab, lumretuzumab, patritumab, scribantumab, zenocutuzumab, sibrotuzumab, burosumab, aprutumab ixadotin, radretumab, pasotuxizumab, farletuzumab, mirvetuximab soravtansine, vantictumab, TRBS07, 3F8, dinutuximab, dinutuximab beta, ecromeximab, mitumomab, andecaliximab, capromab, codrituzumab, glembatumumab vedotin, talquetamab, talquetamab, trevogrumab, indusatumab vedotin, ficlatuzumab, rilotumumab, zatuximab, pentuzimab, pentuzimab, margetuximab, timigutuzumab, trastuzumab, trastuzumab duocarmazine, trastuzumab emtansine, gancotamab, pertuzumab, ertumaxomab, emibetuzumab, telisotuzumab, telisotuzumab vedotin, derlotuximab biotin, apolizumab, onartuzumab, bersanlimab, enlimomabpegol, rontalizumab, sifalimumab, talizumab, ganitumab, istiratumab, robatumumab, teprotumumab, figitumumab, ganitumab, istiratumab, robatumumab, teprotumumab, cixutumumab, dalotuzumab, xentuzumab, dusigitumab, canakinumab, ustekinumab, ustekinumab, ustekinumab, briakinumab, briakinumab, abrezekimab, lebrikizumab, romilkimab, TNX-650, tralokinumab, anrukinzumab, brodalumab, ixekizumab, netakimab, perakizumab, secukinumab, vunakizumab, afasevikumab, afasevikumab, bimekizumab, bimekizumab, remtolumab, bermekimab, lutikizumab, lutikizumab, gevokizumab, cergutuzumab amunaleukin, fletikumab, fezakinumab, brazikumab, guselkumab, mirikizumab, tildrakizumab, risankizumab, flotetuzumab, nemolizumab, pascolizumab, dupilumab, mepolizumab, reslizumab, clazakizumab, elsilimomab, olokizumab, sarilumab, siltuximab, sirukumab, vobarilizumab, tocilizumab, SA237, satralizumab, enokizumab, prezalizumab, natalizumab, abrilumab, abrilumab, vedolizumab, volociximab, tadocizumab, etaracizumab, etrolizumab, spesolimab, vatelizumab, erlizumab, lirilumab, relatlimab, cBR96-doxorubicinimmunoconjugate, odulimomab, efalizumab, ladiratuzumab vedotin, simtuzumab, samrotamab vedotin, aselizumab, lupartumab amadotin, imalumab, carlumab, imaprelimab, amatuximab, amatuximab, anetumab ravtansine, narnatumab, clivatuzumab tetraxetan, pemtumomab, gatipotuzumab, ensituximab, lemalesomab, sulesomab, enfortumab vedotin, racotumomab, monalizumab, brontictuzumab, tarextumab, vesencumab, oxelumab, gilvetmab, tislelizumab, dostarlimab, BCD-100, nivolumab, PDR001, pembrolizumab, pidilizumab, retifanlimab, spartalizumab, sintilimab, cemiplimab, olaratumab, tovetumab, rinucumab, atezolizumab, avelumab, durvalumab, lifastuzumab vedotin, bavituximab, acapatamab, capromab, rosopatamab, nezastomig, pasotuxizumab, pelgifatamab, voxalatamab, cofetuzumab pelidotin, denosumab, rosmantuzumab, cirmtuzumab, atinumab, indatuximab ravtansine, elotuzumab, sirtratumab vedotin, sonepcizumab, vandortuzumab vedotin, minretumomab, satumomab pendetide, maslimomab, ontuxizumab, tenatumomab, fresolimumab, metelimumab, lerdelimumab, tezepelumab, etigilimab, tiragotumab, placulumab, prezalumab, infliximab, nerelimomab, ozoralizumab, adalimumab, afelimomab, certolizumab pegol, golimumab, mapatumumab, conatumumab, lexatumumab, tigatuzumab, sacituzumab govitecan, votumumab, pogalizumab, letolizumab, pankomab, anatumomab mafenatox, enavatuzumab, flanvotumab, brolucizumab, ranibizumab, varisacumab, bevacizumab, faricimab, icrucumab, alacizumab pegol, ramucirumab, pritumumab, and onvatilimab.

[5254] In some aspects, the antigen binding polypeptides provided herein comprise a VL1 comprising a VL of an antibody selected from the group consisting of losatuxizumab vedotin, utomilumab, urelumab, oleclumab, naptumomab estafenatox, ascrinvacumab, pintumomab, tacatuzumab tetraxetan, nesvacumab, vanucizumab, timolumab, vapaliximab, vepalimomab, enapotamab vedotin, ianalumab, belimumab, tabalumab, tibulizumab, belantamab mafodotin, teclistamab, teclistamab, detumomab, nacolomab tafenatox, eculizumab, lendalizumab, pexelizumab, pozelimab, ravulizumab, tesidolumab, vilobelimab, abagovomab, igovomab, oregovomab, sofituzumab vedotin, cantuzumab mertansine, cantuzuma bravtansine, girentuximab, altumomab pentetate, arcitumomab, besilesomab, bertilimumab, plozalizumab, mogamulizumab, leronlimab, PRO140, rovelizumab, rovelizumab, talacotuzumab, benralizumab, tavolimab, vonlerolizumab, gavilimomab, ziralimumab, fanolesomab, ipilimumab, ruplizumab, toralizumab, dapirolizumab pegol, toralizumab, dapirolizumab pegol, ruplizumab, blinatumomab, inebilizumab, loncastuximab tesirine, SGN-CD19A, tafasitamab, taplitumomab paptox, XMAB-5574, Budoprutug, Obexelimab, duvortuxizumab, englumafusp alfa, Emfizatamab, zeripatamig, siplizumab, blontuvetmab, FBTA05, ibritumomab tiuxetan, obinutuzumab, ocaratuzumab, ocrelizumab, ofatumumab, rituximab, tositumomab, ublituximab, veltuzumab, divozilimab, eramkafusp alfa, ripertamab, zuberitamab, glofitamab, nofctumomab merpentan, samalizumab, imvotamab, odronextamab, plamotamab, bectumomab, inotuzumab ozogamicin, moxctumomab pasudotox, pinatuzumab vedotin, gomiliximab, lumiliximab, inolimomab, inolimomab, daclizumab, camidanluma btesirine, basiliximab, varlilumab, omburtamab, enoblituzumab, vopratelimab, lulizumabpegol, TGN1412, muromonab-CD3, otelixizumab, teplizumab, visilizumab, epcoritamab, epcoritamab, brentuximab vedotin, iratumumab, azintuxizumab vedotin, gemtuzumab ozogamicin, lintuzumab, vadastuximab talirine, naratuximab emtansine, otlertuzumab, lilotomab satetraxetan, tetulomab, daratumumab, isatuximab, foralumab, mosunctuzumab, mosunetuzumab, cedelizumab, ibalizumab, keliximab, priliximab, tregalizumab, zanolimumab, blesclumab, iscalimab, lucatumumab, ravagalimab, selicrelumab, tencliximab, vanalimab, abciximab, bivatuzumab, iomab-B, telimomab aritox, zolimomab aritox, abituzumab, intetumumab, alemtuzumab, tamtuvetmab, lorvotuzumab mertansine, itolizumab, cusatuzumab, vorsetuzumab mafodotin, milatuzumab, iladatuzumab vedotin, polatuzumab vedotin, galiximab, cibisatamab, zolbetuximab, naxitamab, tisotumab vedotin, olendalizumab, pamrevlumab, lacnotuzumab, cabiralizumab, emactuzumab, axatilimab, gimsilumab, lenzilumab, namilumab, tremelimumab, ulocuplumab, tepoditamab, rovalpituzumab tesirine, tarlatamab, demcizumab, navicixizumab, drozitumab, parsatuzumab, depatuxizumab mafodotin, modotuximab, carotuximab, adccatumumab, adecatumumab, oportuzumab monatox, solitomab, tucotuzumab celmoleukin, edrecolomab, catumaxomab, ifabotuzumab, fibatuzumab, zalutumumab, panitumumab, cetuximab, futuximab, imgatuzumab, laprituximab emtansine, matuzumab, necitumumab, nimotuzumab, tomuzotuximab, amivantamab, amivantamab, epitumomab cituxetan, sontuzumab, duligotuzumab, elgemtumab, lumretuzumab, patritumab, seribantumab, zenocutuzumab, sibrotuzumab, burosumab, aprutumab ixadotin, radretumab, pasotuxizumab, farletuzumab, mirvetuximab soravtansine, vantictumab, TRBS07, 3F8, dinutuximab, dinutuximab beta, ecromeximab, mitumomab, andecaliximab, capromab, codrituzumab, glembatumumab vedotin, talquetamab, talquetamab, trevogrumab, indusatumab vedotin, ficlatuzumab, rilotumumab, zatuximab, pentuzimab, pentuzimab, margetuximab, timigutuzumab, trastuzumab, trastuzumab duocarmazine, trastuzumab emtansine, gancotamab, pertuzumab, ertumaxomab, emibetuzumab, telisotuzumab, telisotuzumab vedotin, derlotuximab biotin, apolizumab, onartuzumab, bersanlimab, enlimomabpegol, rontalizumab, sifalimumab, talizumab, ganitumab, istiratumab, robatumumab, teprotumumab, figitumumab, ganitumab, istiratumab, robatumumab, teprotumumab, cixutumumab, dalotuzumab, xentuzumab, dusigitumab, canakinumab, ustekinumab, ustekinumab, ustekinumab, briakinumab, briakinumab, abrezekimab, lebrikizumab, romilkimab, TNX-650, tralokinumab, anrukinzumab, brodalumab, ixckizumab, netakimab, perakizumab, secukinumab, vunakizumab, afasevikumab, afasevikumab, bimekizumab, bimekizumab, remtolumab, bermckimab, lutikizumab, lutikizumab, gevokizumab, cergutuzumab amunaleukin, fletikumab, fezakinumab, brazikumab, guselkumab, mirikizumab, tildrakizumab, risankizumab, flotetuzumab, nemolizumab, pascolizumab, dupilumab, mepolizumab, reslizumab, clazakizumab, elsilimomab, olokizumab, sarilumab, siltuximab, sirukumab, vobarilizumab, tocilizumab, SA237, satralizumab, enokizumab, prezalizumab, natalizumab, abrilumab, abrilumab, vedolizumab, volociximab, tadocizumab, etaracizumab, ctrolizumab, spesolimab, vatelizumab, erlizumab, lirilumab, relatlimab, cBR96-doxorubicinimmunoconjugate, odulimomab, efalizumab, ladiratuzumab vedotin, simtuzumab, samrotamab vedotin, aselizumab, lupartumab amadotin, imalumab, carlumab, imaprelimab, amatuximab, amatuximab, anetumab ravtansine, narnatumab, clivatuzumab tetraxetan, pemtumomab, gatipotuzumab, ensituximab, lemalesomab, sulcsomab, enfortumab vedotin, racotumomab, monalizumab, brontictuzumab, tarextumab, vesencumab, oxelumab, gilvetmab, tislelizumab, dostarlimab, BCD-100, nivolumab, PDR001, pembrolizumab, pidilizumab, retifanlimab, spartalizumab, sintilimab, cemiplimab, olaratumab, tovetumab, rinucumab, atezolizumab, avelumab, durvalumab, lifastuzumab vedotin, bavituximab, acapatamab, capromab, rosopatamab, nezastomig, pasotuxizumab, pelgifatamab, voxalatamab, cofetuzumab pelidotin, denosumab, rosmantuzumab, cirmtuzumab, atinumab, indatuximab ravtansine, elotuzumab, sirtratumab vedotin, sonepcizumab, vandortuzumab vedotin, minretumomab, satumomab pendetide, maslimomab, ontuxizumab, tenatumomab, fresolimumab, metelimumab, lerdelimumab, tezepelumab, etigilimab, tiragotumab, placulumab, prezalumab, infliximab, nerelimomab, ozoralizumab, adalimumab, afclimomab, certolizumab pegol, golimumab, mapatumumab, conatumumab, lexatumumab, tigatuzumab, sacituzumab govitecan, votumumab, pogalizumab, letolizumab, pankomab, anatumomab mafenatox, enavatuzumab, flanvotumab, brolucizumab, ranibizumab, varisacumab, bevacizumab, faricimab, icrucumab, alacizumab pegol, ramucirumab, pritumumab, and onvatilimab.

[5255] In some aspects, the antigen binding polypeptides provided herein comprise a VL2 comprising a VL of an antibody selected from the group consisting of losatuxizumab vedotin, utomilumab, urelumab, oleclumab, naptumomab estafenatox, ascrinvacumab, pintumomab, tacatuzumab tetraxetan, nesvacumab, vanucizumab, timolumab, vapaliximab, vepalimomab, enapotamab vedotin, ianalumab, belimumab, tabalumab, tibulizumab, belantamab mafodotin, teclistamab, teclistamab, detumomab, nacolomab tafenatox, eculizumab, lendalizumab, pexelizumab, pozelimab, ravulizumab, tesidolumab, vilobclimab, abagovomab, igovomab, oregovomab, sofituzumab vedotin, cantuzumab mertansine, cantuzuma bravtansine, girentuximab, altumomab pentetate, arcitumomab, besilesomab, bertilimumab, plozalizumab, mogamulizumab, leronlimab, PRO140, rovelizumab, rovelizumab, talacotuzumab, benralizumab, tavolimab, vonlerolizumab, gavilimomab, ziralimumab, fanolesomab, ipilimumab, ruplizumab, toralizumab, dapirolizumab pegol, toralizumab, dapirolizumab pegol, ruplizumab, blinatumomab, inebilizumab, loncastuximab tesirine, SGN-CD19A, tafasitamab, taplitumomab paptox, XMAB-5574, Budoprutug, Obexelimab, duvortuxizumab, englumafusp alfa, Emfizatamab, zeripatamig, siplizumab, blontuvetmab, FBTA05, ibritumomab tiuxetan, obinutuzumab, ocaratuzumab, ocrelizumab, ofatumumab, rituximab, tositumomab, ublituximab, veltuzumab, divozilimab, eramkafusp alfa, ripertamab, zuberitamab, glofitamab, nofetumomab merpentan, samalizumab, imvotamab, odronextamab, plamotamab, bectumomab, inotuzumab ozogamicin, moxetumomab pasudotox, pinatuzumab vedotin, gomiliximab, lumiliximab, inolimomab, inolimomab, daclizumab, camidanluma btesirine, basiliximab, varlilumab, omburtamab, enoblituzumab, vopratelimab, lulizumabpegol, TGN1412, muromonab-CD3, otelixizumab, teplizumab, visilizumab, epcoritamab, epcoritamab, brentuximab vedotin, iratumumab, azintuxizumab vedotin, gemtuzumab ozogamicin, lintuzumab, vadastuximab talirine, naratuximab emtansine, otlertuzumab, lilotomab satetraxetan, tetulomab, daratumumab, isatuximab, foralumab, mosunetuzumab, mosunetuzumab, cedelizumab, ibalizumab, keliximab, priliximab, tregalizumab, zanolimumab, blesclumab, iscalimab, lucatumumab, ravagalimab, selicrelumab, teneliximab, vanalimab, abciximab, bivatuzumab, iomab-B, telimomab aritox, zolimomab aritox, abituzumab, intetumumab, alemtuzumab, tamtuvetmab, lorvotuzumab mertansine, itolizumab, cusatuzumab, vorsetuzumab mafodotin, milatuzumab, iladatuzumab vedotin, polatuzumab vedotin, galiximab, cibisatamab, zolbetuximab, naxitamab, tisotumab vedotin, olendalizumab, pamrevlumab, lacnotuzumab, cabiralizumab, emactuzumab, axatilimab, gimsilumab, lenzilumab, namilumab, tremelimumab, ulocuplumab, tepoditamab, rovalpituzumab tesirine, tarlatamab, demcizumab, navicixizumab, drozitumab, parsatuzumab, depatuxizumab mafodotin, modotuximab, carotuximab, adecatumumab, adecatumumab, oportuzumab monatox, solitomab, tucotuzumab celmoleukin, edrecolomab, catumaxomab, ifabotuzumab, fibatuzumab, zalutumumab, panitumumab, cetuximab, futuximab, imgatuzumab, laprituximab emtansine, matuzumab, necitumumab, nimotuzumab, tomuzotuximab, amivantamab, amivantamab, epitumomab cituxetan, sontuzumab, duligotuzumab, elgemtumab, lumretuzumab, patritumab, seribantumab, zenocutuzumab, sibrotuzumab, burosumab, aprutumab ixadotin, radretumab, pasotuxizumab, farletuzumab, mirvetuximab soravtansine, vantictumab, TRBS07, 3F8, dinutuximab, dinutuximab beta, ecromeximab, mitumomab, andecaliximab, capromab, codrituzumab, glembatumumab vedotin, talquetamab, talquetamab, trevogrumab, indusatumab vedotin, ficlatuzumab, rilotumumab, zatuximab, pentuzimab, pentuzimab, margetuximab, timigutuzumab, trastuzumab, trastuzumab duocarmazine, trastuzumab emtansine, gancotamab, pertuzumab, ertumaxomab, emibetuzumab, telisotuzumab, telisotuzumab vedotin, derlotuximab biotin, apolizumab, onartuzumab, bersanlimab, enlimomabpegol, rontalizumab, sifalimumab, talizumab, ganitumab, istiratumab, robatumumab, teprotumumab, figitumumab, ganitumab, istiratumab, robatumumab, teprotumumab, cixutumumab, dalotuzumab, xentuzumab, dusigitumab, canakinumab, ustekinumab, ustekinumab, ustekinumab, briakinumab, briakinumab, abrezekimab, lebrikizumab, romilkimab, TNX-650, tralokinumab, anrukinzumab, brodalumab, ixckizumab, netakimab, perakizumab, sccukinumab, vunakizumab, afasevikumab, afasevikumab, bimckizumab, bimckizumab, remtolumab, bermckimab, lutikizumab, lutikizumab, gevokizumab, cergutuzumab amunaleukin, fletikumab, fezakinumab, brazikumab, guselkumab, mirikizumab, tildrakizumab, risankizumab, flotetuzumab, nemolizumab, pascolizumab, dupilumab, mepolizumab, reslizumab, clazakizumab, elsilimomab, olokizumab, sarilumab, siltuximab, sirukumab, vobarilizumab, tocilizumab, SA237, satralizumab, enokizumab, prezalizumab, natalizumab, abrilumab, abrilumab, vedolizumab, volociximab, tadocizumab, etaracizumab, etrolizumab, spesolimab, vatelizumab, erlizumab, lirilumab, relatlimab, cBR96-doxorubicinimmunoconjugate, odulimomab, efalizumab, ladiratuzumab vedotin, simtuzumab, samrotamab vedotin, aselizumab, lupartumab amadotin, imalumab, carlumab, imaprelimab, amatuximab, amatuximab, anctumab ravtansine, narnatumab, clivatuzumab tetraxctan, pemtumomab, gatipotuzumab, ensituximab, lemalesomab, sulesomab, enfortumab vedotin, racotumomab, monalizumab, brontictuzumab, tarextumab, vesencumab, oxelumab, gilvetmab, tislelizumab, dostarlimab, BCD-100, nivolumab, PDR001, pembrolizumab, pidilizumab, retifanlimab, spartalizumab, sintilimab, cemiplimab, olaratumab, tovetumab, rinucumab, atezolizumab, avelumab, durvalumab, lifastuzumab vedotin, bavituximab, acapatamab, capromab, rosopatamab, nezastomig, pasotuxizumab, pelgifatamab, voxalatamab, cofetuzumab pelidotin, denosumab, rosmantuzumab, cirmtuzumab, atinumab, indatuximab ravtansine, elotuzumab, sirtratumab vedotin, sonepcizumab, vandortuzumab vedotin, minretumomab, satumomab pendetide, maslimomab, ontuxizumab, tenatumomab, fresolimumab, metelimumab, lerdelimumab, tezepelumab, etigilimab, tiragotumab, placulumab, prezalumab, infliximab, nerelimomab, ozoralizumab, adalimumab, afclimomab, certolizumab pegol, golimumab, mapatumumab, conatumumab, lexatumumab, tigatuzumab, sacituzumab govitecan, votumumab, pogalizumab, letolizumab, pankomab, anatumomab mafenatox, enavatuzumab, flanvotumab, brolucizumab, ranibizumab, varisacumab, bevacizumab, faricimab, icrucumab, alacizumab pegol, ramucirumab, pritumumab, and onvatilimab.

[5256] In some aspects, the antigen binding polypeptides provided herein comprise a VH1 comprising a VH of an antibody selected from the group consisting of losatuxizumab vedotin, utomilumab, urclumab, oleclumab, naptumomab estafenatox, ascrinvacumab, pintumomab, tacatuzumab tetraxetan, nesvacumab, vanucizumab, timolumab, vapaliximab, vepalimomab, enapotamab vedotin, ianalumab, belimumab, tabalumab, tibulizumab, belantamab mafodotin, teclistamab, teclistamab, detumomab, nacolomab tafenatox, eculizumab, lendalizumab, pexelizumab, pozelimab, ravulizumab, tesidolumab, vilobelimab, abagovomab, igovomab, oregovomab, sofituzumab vedotin, cantuzumab mertansine, cantuzuma bravtansine, girentuximab, altumomab pentetate, arcitumomab, besilesomab, bertilimumab, plozalizumab, mogamulizumab, leronlimab, PRO140, rovelizumab, rovelizumab, talacotuzumab, benralizumab, tavolimab, vonlerolizumab, gavilimomab, ziralimumab, fanolesomab, ipilimumab, ruplizumab, toralizumab, dapirolizumab pegol, toralizumab, dapirolizumab pegol, ruplizumab, blinatumomab, inebilizumab, loncastuximab tesirine, SGN-CD19A, tafasitamab, taplitumomab paptox, XMAB-5574, Budoprutug, Obexelimab, duvortuxizumab, englumafusp alfa, Emfizatamab, zeripatamig, siplizumab, blontuvetmab, FBTA05, ibritumomab tiuxetan, obinutuzumab, ocaratuzumab, ocrelizumab, ofatumumab, rituximab, tositumomab, ublituximab, veltuzumab, divozilimab, eramkafusp alfa, ripertamab, zuberitamab, glofitamab, nofctumomab merpentan, samalizumab, imvotamab, odronextamab, plamotamab, bectumomab, inotuzumab ozogamicin, moxctumomab pasudotox, pinatuzumab vedotin, gomiliximab, lumiliximab, inolimomab, inolimomab, daclizumab, camidanluma btesirine, basiliximab, varlilumab, omburtamab, enoblituzumab, vopratelimab, lulizumabpegol, TGN1412, muromonab-CD3, otelixizumab, teplizumab, visilizumab, epcoritamab, epcoritamab, brentuximab vedotin, iratumumab, azintuxizumab vedotin, gemtuzumab ozogamicin, lintuzumab, vadastuximab talirine, naratuximab emtansinc, otlertuzumab, lilotomab satetraxetan, tetulomab, daratumumab, isatuximab, foralumab, mosunetuzumab, mosunetuzumab, cedelizumab, ibalizumab, keliximab, priliximab, tregalizumab, zanolimumab, blesclumab, iscalimab, lucatumumab, ravagalimab, selicrelumab, teneliximab, vanalimab, abciximab, bivatuzumab, iomab-B, telimomab aritox, zolimomab aritox, abituzumab, intetumumab, alemtuzumab, tamtuvetmab, lorvotuzumab mertansine, itolizumab, cusatuzumab, vorsetuzumab mafodotin, milatuzumab, iladatuzumab vedotin, polatuzumab vedotin, galiximab, cibisatamab, zolbetuximab, naxitamab, tisotumab vedotin, olendalizumab, pamrevlumab, lacnotuzumab, cabiralizumab, emactuzumab, axatilimab, gimsilumab, lenzilumab, namilumab, tremelimumab, ulocuplumab, tepoditamab, rovalpituzumab tesirine, tarlatamab, demcizumab, navicixizumab, drozitumab, parsatuzumab, depatuxizumab mafodotin, modotuximab, carotuximab, adecatumumab, adecatumumab, oportuzumab monatox, solitomab, tucotuzumab celmoleukin, edrecolomab, catumaxomab, ifabotuzumab, fibatuzumab, zalutumumab, panitumumab, cetuximab, futuximab, imgatuzumab, laprituximab emtansine, matuzumab, necitumumab, nimotuzumab, tomuzotuximab, amivantamab, amivantamab, epitumomab cituxetan, sontuzumab, duligotuzumab, elgemtumab, lumretuzumab, patritumab, seribantumab, zenocutuzumab, sibrotuzumab, burosumab, aprutumab ixadotin, radretumab, pasotuxizumab, farletuzumab, mirvetuximab soravtansine, vantictumab, TRBS07, 3F8, dinutuximab, dinutuximab beta, ecromeximab, mitumomab, andecaliximab, capromab, codrituzumab, glembatumumab vedotin, talquetamab, talquetamab, trevogrumab, indusatumab vedotin, ficlatuzumab, rilotumumab, zatuximab, pentuzimab, pentuzimab, margetuximab, timigutuzumab, trastuzumab, trastuzumab duocarmazine, trastuzumab emtansine, gancotamab, pertuzumab, ertumaxomab, emibetuzumab, telisotuzumab, telisotuzumab vedotin, derlotuximab biotin, apolizumab, onartuzumab, bersanlimab, enlimomabpegol, rontalizumab, sifalimumab, talizumab, ganitumab, istiratumab, robatumumab, teprotumumab, figitumumab, ganitumab, istiratumab, robatumumab, teprotumumab, cixutumumab, dalotuzumab, xentuzumab, dusigitumab, canakinumab, ustekinumab, ustekinumab, ustekinumab, briakinumab, briakinumab, abrezekimab, lebrikizumab, romilkimab, TNX-650, tralokinumab, anrukinzumab, brodalumab, ixekizumab, netakimab, perakizumab, secukinumab, vunakizumab, afasevikumab, afasevikumab, bimekizumab, bimekizumab, remtolumab, bermekimab, lutikizumab, lutikizumab, gevokizumab, cergutuzumab amunaleukin, fletikumab, fezakinumab, brazikumab, guselkumab, mirikizumab, tildrakizumab, risankizumab, flotetuzumab, nemolizumab, pascolizumab, dupilumab, mepolizumab, reslizumab, clazakizumab, elsilimomab, olokizumab, sarilumab, siltuximab, sirukumab, vobarilizumab, tocilizumab, SA237, satralizumab, enokizumab, prezalizumab, natalizumab, abrilumab, abrilumab, vedolizumab, volociximab, tadocizumab, etaracizumab, etrolizumab, spesolimab, vatelizumab, erlizumab, lirilumab, relatlimab, cBR96-doxorubicinimmunoconjugate, odulimomab, efalizumab, ladiratuzumab vedotin, simtuzumab, samrotamab vedotin, aselizumab, lupartumab amadotin, imalumab, carlumab, imaprelimab, amatuximab, amatuximab, anetumab ravtansine, narnatumab, clivatuzumab tetraxetan, pemtumomab, gatipotuzumab, ensituximab, lemalesomab, sulesomab, enfortumab vedotin, racotumomab, monalizumab, brontictuzumab, tarextumab, vesencumab, oxelumab, gilvetmab, tislelizumab, dostarlimab, BCD-100, nivolumab, PDR001, pembrolizumab, pidilizumab, retifanlimab, spartalizumab, sintilimab, cemiplimab, olaratumab, tovetumab, rinucumab, atezolizumab, avelumab, durvalumab, lifastuzumab vedotin, bavituximab, acapatamab, capromab, rosopatamab, nezastomig, pasotuxizumab, pelgifatamab, voxalatamab, cofetuzumab pelidotin, denosumab, rosmantuzumab, cirmtuzumab, atinumab, indatuximab ravtansine, elotuzumab, sirtratumab vedotin, sonepcizumab, vandortuzumab vedotin, minretumomab, satumomab pendetide, maslimomab, ontuxizumab, tenatumomab, fresolimumab, metelimumab, lerdelimumab, tezepelumab, etigilimab, tiragotumab, placulumab, prezalumab, infliximab, nerelimomab, ozoralizumab, adalimumab, afelimomab, certolizumab pegol, golimumab, mapatumumab, conatumumab, lexatumumab, tigatuzumab, sacituzumab govitecan, votumumab, pogalizumab, letolizumab, pankomab, anatumomab mafenatox, enavatuzumab, flanvotumab, brolucizumab, ranibizumab, varisacumab, bevacizumab, faricimab, icrucumab, alacizumab pegol, ramucirumab, pritumumab, and onvatilimab.

[5257] In some aspects, the antigen binding polypeptides provided herein comprise a VH2 comprising a VH of an antibody selected from the group consisting of losatuxizumab vedotin, utomilumab, urelumab, oleclumab, naptumomab estafenatox, ascrinvacumab, pintumomab, tacatuzumab tetraxetan, nesvacumab, vanucizumab, timolumab, vapaliximab, vepalimomab, enapotamab vedotin, ianalumab, belimumab, tabalumab, tibulizumab, belantamab mafodotin, teclistamab, teclistamab, detumomab, nacolomab tafenatox, eculizumab, lendalizumab, pexelizumab, pozelimab, ravulizumab, tesidolumab, vilobclimab, abagovomab, igovomab, oregovomab, sofituzumab vedotin, cantuzumab mertansine, cantuzuma bravtansine, girentuximab, altumomab pentetate, arcitumomab, besilesomab, bertilimumab, plozalizumab, mogamulizumab, leronlimab, PRO140, rovelizumab, rovelizumab, talacotuzumab, benralizumab, tavolimab, vonlerolizumab, gavilimomab, ziralimumab, fanolesomab, ipilimumab, ruplizumab, toralizumab, dapirolizumab pegol, toralizumab, dapirolizumab pegol, ruplizumab, blinatumomab, inebilizumab, loncastuximab tesirine, SGN-CD19A, tafasitamab, taplitumomab paptox, XMAB-5574, Budoprutug, Obexelimab, duvortuxizumab, englumafusp alfa, Emfizatamab, zeripatamig, siplizumab, blontuvetmab, FBTA05, ibritumomab tiuxetan, obinutuzumab, ocaratuzumab, ocrelizumab, ofatumumab, rituximab, tositumomab, ublituximab, veltuzumab, divozilimab, eramkafusp alfa, ripertamab, zuberitamab, glofitamab, nofetumomab merpentan, samalizumab, imvotamab, odronextamab, plamotamab, bectumomab, inotuzumab ozogamicin, moxctumomab pasudotox, pinatuzumab vedotin, gomiliximab, lumiliximab, inolimomab, inolimomab, daclizumab, camidanluma btesirine, basiliximab, varlilumab, omburtamab, enoblituzumab, vopratclimab, lulizumabpegol, TGN1412, muromonab-CD3, otelixizumab, teplizumab, visilizumab, epcoritamab, epcoritamab, brentuximab vedotin, iratumumab, azintuxizumab vedotin, gemtuzumab ozogamicin, lintuzumab, vadastuximab talirine, naratuximab emtansine, otlertuzumab, lilotomab satetraxetan, tetulomab, daratumumab, isatuximab, foralumab, mosunetuzumab, mosunetuzumab, cedelizumab, ibalizumab, keliximab, priliximab, tregalizumab, zanolimumab, blesclumab, iscalimab, lucatumumab, ravagalimab, selicrelumab, teneliximab, vanalimab, abciximab, bivatuzumab, iomab-B, telimomab aritox, zolimomab aritox, abituzumab, intetumumab, alemtuzumab, tamtuvetmab, lorvotuzumab mertansine, itolizumab, cusatuzumab, vorsetuzumab mafodotin, milatuzumab, iladatuzumab vedotin, polatuzumab vedotin, galiximab, cibisatamab, zolbetuximab, naxitamab, tisotumab vedotin, olendalizumab, pamrevlumab, lacnotuzumab, cabiralizumab, emactuzumab, axatilimab, gimsilumab, lenzilumab, namilumab, tremelimumab, ulocuplumab, tepoditamab, rovalpituzumab tesirine, tarlatamab, demcizumab, navicixizumab, drozitumab, parsatuzumab, depatuxizumab mafodotin, modotuximab, carotuximab, adecatumumab, adecatumumab, oportuzumab monatox, solitomab, tucotuzumab celmoleukin, edrecolomab, catumaxomab, ifabotuzumab, fibatuzumab, zalutumumab, panitumumab, cetuximab, futuximab, imgatuzumab, laprituximab emtansine, matuzumab, necitumumab, nimotuzumab, tomuzotuximab, amivantamab, amivantamab, epitumomab cituxetan, sontuzumab, duligotuzumab, elgemtumab, lumretuzumab, patritumab, seribantumab, zenocutuzumab, sibrotuzumab, burosumab, aprutumab ixadotin, radretumab, pasotuxizumab, farletuzumab, mirvetuximab soravtansine, vantictumab, TRBS07, 3F8, dinutuximab, dinutuximab beta, ecromeximab, mitumomab, andecaliximab, capromab, codrituzumab, glembatumumab vedotin, talquetamab, talquetamab, trevogrumab, indusatumab vedotin, ficlatuzumab, rilotumumab, zatuximab, pentuzimab, pentuzimab, margetuximab, timigutuzumab, trastuzumab, trastuzumab duocarmazine, trastuzumab emtansine, gancotamab, pertuzumab, ertumaxomab, emibetuzumab, telisotuzumab, telisotuzumab vedotin, derlotuximab biotin, apolizumab, onartuzumab, bersanlimab, enlimomabpegol, rontalizumab, sifalimumab, talizumab, ganitumab, istiratumab, robatumumab, teprotumumab, figitumumab, ganitumab, istiratumab, robatumumab, teprotumumab, cixutumumab, dalotuzumab, xentuzumab, dusigitumab, canakinumab, ustekinumab, ustekinumab, ustekinumab, briakinumab, briakinumab, abrezekimab, lebrikizumab, romilkimab, TNX-650, tralokinumab, anrukinzumab, brodalumab, ixekizumab, netakimab, perakizumab, secukinumab, vunakizumab, afasevikumab, afasevikumab, bimekizumab, bimekizumab, remtolumab, bermekimab, lutikizumab, lutikizumab, gevokizumab, cergutuzumab amunaleukin, fletikumab, fezakinumab, brazikumab, guselkumab, mirikizumab, tildrakizumab, risankizumab, flotetuzumab, nemolizumab, pascolizumab, dupilumab, mepolizumab, reslizumab, clazakizumab, elsilimomab, olokizumab, sarilumab, siltuximab, sirukumab, vobarilizumab, tocilizumab, SA237, satralizumab, enokizumab, prezalizumab, natalizumab, abrilumab, abrilumab, vedolizumab, volociximab, tadocizumab, etaracizumab, etrolizumab, spesolimab, vatelizumab, erlizumab, lirilumab, relatlimab, cBR96-doxorubicinimmunoconjugate, odulimomab, efalizumab, ladiratuzumab vedotin, simtuzumab, samrotamab vedotin, aselizumab, lupartumab amadotin, imalumab, carlumab, imaprelimab, amatuximab, amatuximab, anetumab ravtansine, narnatumab, clivatuzumab tetraxetan, pemtumomab, gatipotuzumab, ensituximab, lemalesomab, sulesomab, enfortumab vedotin, racotumomab, monalizumab, brontictuzumab, tarextumab, vesencumab, oxelumab, gilvetmab, tislelizumab, dostarlimab, BCD-100, nivolumab, PDR001, pembrolizumab, pidilizumab, retifanlimab, spartalizumab, sintilimab, cemiplimab, olaratumab, tovetumab, rinucumab, atezolizumab, avelumab, durvalumab, lifastuzumab vedotin, bavituximab, acapatamab, capromab, rosopatamab, nezastomig, pasotuxizumab, pelgifatamab, voxalatamab, cofetuzumab pelidotin, denosumab, rosmantuzumab, cirmtuzumab, atinumab, indatuximab ravtansine, elotuzumab, sirtratumab vedotin, sonepcizumab, vandortuzumab vedotin, minretumomab, satumomab pendetide, maslimomab, ontuxizumab, tenatumomab, fresolimumab, metelimumab, lerdelimumab, tezepelumab, etigilimab, tiragotumab, placulumab, prezalumab, infliximab, nerelimomab, ozoralizumab, adalimumab, afelimomab, certolizumab pegol, golimumab, mapatumumab, conatumumab, lexatumumab, tigatuzumab, sacituzumab govitecan, votumumab, pogalizumab, letolizumab, pankomab, anatumomab mafenatox, enavatuzumab, flanvotumab, brolucizumab, ranibizumab, varisacumab, bevacizumab, faricimab, icrucumab, alacizumab pegol, ramucirumab, pritumumab, and onvatilimab.

[5258] In some aspects, the antigen binding polypeptides provided herein comprise a VL1 comprising (i) a complementarity determining region (CDR) 1 having an amino acid sequence that is at least 65%, at least 70%, at least 75%, at least 80%, at least 85%, at least 90%, at least 95%, at least 99%, or 100% identical to any one of SEQ ID NOs: 1096, 1103, 1110, 1120, 1127, 1134, 1141, 1148, 1155, 1162, 1169, 1174, 1181, 1188, 1199, 1211, 1221, 1228, 1235, 1247, 1254, 1261, 1266, 1271, 1278, 1285, 1292, 1299, 1306, 1313, 1319, 1326, 1339, 1352, 1359, 1366, 1373, 1382, 1394, 1401, 1408, 1414, 1421, 1428, 1441, 1448, 1455, 1461, 1468, 1475, 1488, 1495, 1508, 1519, 1526, 1531, 1538, 1544, 1556, 1568, 1574, 1581, 1594, 1601, 1608, 1615, 1622, 1629, 1636, 1643, 1650, 1657, 1672, 1679, 1689, 1697, 1708, 1715, 1718, 1723, 1727, 1738, 1743, 1752, 1761, 1763, 1769, 1776, and 1786; (ii) a CDR2 having an amino acid sequence that is at least 65%, at least 70%, at least 75%, at least 80%, at least 85%, at least 90%, at least 95%, at least 99%, or 100% identical to any one of SEQ ID NOs: 1200, 1212, 1680, 1690, 1698, 1709, 1728, 1739, 1744, 1753, 1770, and 1777; or at least 65%, at least 70%, at least 75%, at least 80%, at least 85%, at least 90%, at least 95%, at least 99%, or 100% identical to any one of amino acid sequences AAS, APS, AT, ATS, DAS, DDG, DDS, DT, DTS, DVS, EAS, FTS, GAF, GAN, GAS, GAT, GIS, GKN, GNS, HTS, KVS, LAS, LGS, LVS, NAK, NTN, QMS, RMS, RTS, SAS, TTS, WAS, YAS, YAT, YGS, YRS, and YTS; and (iii) a CDR3 having an amino acid sequence that is at least 65%, at least 70%, at least 75%, at least 80%, at least 85%, at least 90%, at least 95%, at least 99%, or 100% identical to any one of SEQ ID NOs: 1097, 1104, 1111, 1121, 1128, 1135, 1142, 1149, 1156, 1163, 1170, 1175, 1182, 1189, 1195, 1201, 1207, 1213, 1222, 1229, 1236, 2009, 1248, 1255, 1262, 1267, 1272, 1279, 1286, 1293, 1300, 1307, 1320, 1327, 1333, 1340, 1346, 1353, 1360, 1367, 1374, 1383, 1389, 1395, 1402, 1409, 1415, 1422, 1429, 1435, 1442, 1449, 1456, 1462, 1469, 1476, 1482, 1489, 1496, 1502, 1509, 1513, 1520, 1532, 1539, 1545, 1557, 1562, 1569, 1575, 1582, 1588, 1595, 1602, 1609, 1616, 1623, 1630, 1637, 1644, 1651, 1658, 1663, 1673, 1681, 1691, 1699, 1710, 1729, 1735, 1745, 1751, 1754, 1778, 1787, and 1976.

[5259] In some aspects, the antigen binding polypeptides provided herein comprise a VL2 comprising (i) a complementarity determining region (CDR) 1 having an amino acid sequence that is at least 65%, at least 70%, at least 75%, at least 80%, at least 85%, at least 90%, at least 95%, at least 99%, or 100% identical to any one of SEQ ID NOs: 1096, 1103, 1110, 1120, 1127, 1134, 1141, 1148, 1155, 1162, 1169, 1174, 1181, 1188, 1199, 1211, 1221, 1228, 1235, 1247, 1254, 1261, 1266, 1271, 1278, 1285, 1292, 1299, 1306, 1313, 1319, 1326, 1339, 1352, 1359, 1366, 1373, 1382, 1394, 1401, 1408, 1414, 1421, 1428, 1441, 1448, 1455, 1461, 1468, 1475, 1488, 1495, 1508, 1519, 1526, 1531, 1538, 1544, 1556, 1568, 1574, 1581, 1594, 1601, 1608, 1615, 1622, 1629, 1636, 1643, 1650, 1657, 1672, 1679, 1689, 1697, 1708, 1715, 1718, 1723, 1727, 1738, 1743, 1752, 1761, 1763, 1769, 1776, and 1786; (ii) a CDR2 having an amino acid sequence that is at least 65%, at least 70%, at least 75%, at least 80%, at least 85%, at least 90%, at least 95%, at least 99%, or 100% identical to any one of SEQ ID NOs: 1200, 1212, 1680, 1690, 1698, 1709, 1728, 1739, 1744, 1753, 1770, and 1777; or at least 65%, at least 70%, at least 75%, at least 80%, at least 85%, at least 90%, at least 95%, at least 99%, or 100% identical to any one of amino acid sequences AAS, APS, AT, ATS, DAS, DDG, DDS, DT, DTS, DVS, EAS, FTS, GAF, GAN, GAS, GAT, GIS, GKN, GNS, HTS, KVS, LAS, LGS, LVS, NAK, NTN, QMS, RMS, RTS, SAS, TTS, WAS, YAS, YAT, YGS, YRS, and YTS; and (iii) a CDR3 having an amino acid sequence that is at least 65%, at least 70%, at least 75%, at least 80%, at least 85%, at least 90%, at least 95%, at least 99%, or 100% identical to any one of SEQ ID NOs: 1097, 1104, 1111, 1121, 1128, 1135, 1142, 1149, 1156, 1163, 1170, 1175, 1182, 1189, 1195, 1201, 1207, 1213, 1222, 1229, 1236, 2009, 1248, 1255, 1262, 1267, 1272, 1279, 1286, 1293, 1300, 1307, 1320, 1327, 1333, 1340, 1346, 1353, 1360, 1367, 1374, 1383, 1389, 1395, 1402, 1409, 1415, 1422, 1429, 1435, 1442, 1449, 1456, 1462, 1469, 1476, 1482, 1489, 1496, 1502, 1509, 1513, 1520, 1532, 1539, 1545, 1557, 1562, 1569, 1575, 1582, 1588, 1595, 1602, 1609, 1616, 1623, 1630, 1637, 1644, 1651, 1658, 1663, 1673, 1681, 1691, 1699, 1710, 1729, 1735, 1745, 1751, 1754, 1778, 1787, and 1976.

[5260] In some aspects, the antigen binding polypeptides provided herein comprise a VH1 comprising (i) a complementarity determining region (CDR) 1 having an amino acid sequence that is at least 65%, at least 70%, at least 75%, at least 80%, at least 85%, at least 90%, at least 95%, at least 99%, or 100% identical to any one of SEQ ID NOs: 1099, 1106, 1113, 1117, 1123, 1130, 1137, 1144, 1151, 1158, 1165, 1177, 1184, 1191, 1203, 1215, 1224, 1231, 1238, 1243, 1250, 1257, 1264, 1274, 1281, 1288, 1295, 1302, 1309, 1315, 1322, 1329, 1335, 1342, 1348, 1355, 1362, 1369, 1376, 1385, 1397, 1404, 1417, 1424, 1431, 1437, 1444, 1451, 1458, 1464, 1471, 1478, 1484, 1491, 1498, 1504, 1511, 1515, 1522, 1534, 1547, 1552, 1564, 1577, 1584, 1590, 1597, 1604, 1611, 1618, 1625, 1632, 1639, 1646, 1653, 1660, 1665, 1675, 1683, 1693, 1701, 1705, 1716, 1719, 1731, 1736, 1747, 1756, 1772, 1780, and 1789; (ii) a CDR2 having an amino acid sequence that is at least 65%, at least 70%, at least 75%, at least 80%, at least 85%, at least 90%, at least 95%, at least 99%, or 100% identical to any one of SEQ ID NOs: 1100, 1107, 1114, 1118, 1124, 1131, 1138, 1145, 1152, 1159, 1166, 1178, 1185, 1192, 1204, 1216, 1225, 1232, 1239, 1244, 1251, 1258, 1275, 1282, 1289, 1296, 1303, 1310, 1316, 1323, 1330, 1336, 1343, 1349, 1356, 1363, 1370, 1377, 1386, 1391, 1398, 1405, 1411, 1418, 1425, 1432, 1438, 1445, 1452, 1465, 1472, 1479, 1485, 1492, 1499, 1505, 1516, 1523, 1528, 1535, 1541, 1548, 1553, 1559, 1565, 1571, 1578, 1585, 1591, 1598, 1605, 1612, 1619, 1626, 1633, 1640, 1647, 1654, 1666, 1676, 1684, 1687, 1694, 1702, 1706, 1712, 1717, 1720, 1725, 1732, 1737, 1741, 1748, 1757, 1767, 1773, 1781, and 1790; and (iii) a CDR3 having an amino acid sequence that is at least 65%, at least 70%, at least 75%, at least 80%, at least 85%, at least 90%, at least 95%, at least 99%, or 100% identical to any one of SEQ ID NOs: 1101, 1108, 1115, 1125, 1132, 1139, 1146, 1153, 1160, 1167, 1172, 1179, 1186, 1193, 1197, 1205, 1209, 1217, 1226, 1233, 1240, 1245, 1252, 1259, 1269, 1276, 1283, 1290, 1297, 1304, 1311, 1317, 1324, 1331, 1337, 1344, 1350, 1357, 1364, 1371, 1378, 1387, 1392, 1399, 1406, 1412, 1419, 1426, 1433, 1439, 1446, 1453, 1459, 1466, 1473, 1480, 1486, 1493, 1500, 1506, 1517, 1524, 1529, 1536, 1542, 1549, 1554, 1560, 1566, 1572, 1579, 1586, 1592, 1599, 1606, 1613, 1620, 1627, 1634, 1641, 1648, 1655, 1661, 1667, 1670, 1677, 1685, 1688, 1695, 1703, 1707, 1713, 1733, 1749, 1758, 1762, 1774, 1782, 1791, and 1975.

[5261] In some aspects, the antigen binding polypeptides provided herein comprise a VH2 comprising (i) a complementarity determining region (CDR) 1 having an amino acid sequence that is at least 65%, at least 70%, at least 75%, at least 80%, at least 85%, at least 90%, at least 95%, at least 99%, or 100% identical to any one of SEQ ID NOs: 1099, 1106, 1113, 1117, 1123, 1130, 1137, 1144, 1151, 1158, 1165, 1177, 1184, 1191, 1203, 1215, 1224, 1231, 1238, 1243, 1250, 1257, 1264, 1274, 1281, 1288, 1295, 1302, 1309, 1315, 1322, 1329, 1335, 1342, 1348, 1355, 1362, 1369, 1376, 1385, 1397, 1404, 1417, 1424, 1431, 1437, 1444, 1451, 1458, 1464, 1471, 1478, 1484, 1491, 1498, 1504, 1511, 1515, 1522, 1534, 1547, 1552, 1564, 1577, 1584, 1590, 1597, 1604, 1611, 1618, 1625, 1632, 1639, 1646, 1653, 1660, 1665, 1675, 1683, 1693, 1701, 1705, 1716, 1719, 1731, 1736, 1747, 1756, 1772, 1780, and 1789; (ii) a CDR2 having an amino acid sequence that is at least 65%, at least 70%, at least 75%, at least 80%, at least 85%, at least 90%, at least 95%, at least 99%, or 100% identical to any one of SEQ ID NOs: 1100, 1107, 1114, 1118, 1124, 1131, 1138, 1145, 1152, 1159, 1166, 1178, 1185, 1192, 1204, 1216, 1225, 1232, 1239, 1244, 1251, 1258, 1275, 1282, 1289, 1296, 1303, 1310, 1316, 1323, 1330, 1336, 1343, 1349, 1356, 1363, 1370, 1377, 1386, 1391, 1398, 1405, 1411, 1418, 1425, 1432, 1438, 1445, 1452, 1465, 1472, 1479, 1485, 1492, 1499, 1505, 1516, 1523, 1528, 1535, 1541, 1548, 1553, 1559, 1565, 1571, 1578, 1585, 1591, 1598, 1605, 1612, 1619, 1626, 1633, 1640, 1647, 1654, 1666, 1676, 1684, 1687, 1694, 1702, 1706, 1712, 1717, 1720, 1725, 1732, 1737, 1741, 1748, 1757, 1767, 1773, 1781, and 1790; and (iii) a CDR3 having an amino acid sequence that is at least 65%, at least 70%, at least 75%, at least 80%, at least 85%, at least 90%, at least 95%, at least 99%, or 100% identical to any one of SEQ ID NOs: 1101, 1108, 1115, 1125, 1132, 1139, 1146, 1153, 1160, 1167, 1172, 1179, 1186, 1193, 1197, 1205, 1209, 1217, 1226, 1233, 1240, 1245, 1252, 1259, 1269, 1276, 1283, 1290, 1297, 1304, 1311, 1317, 1324, 1331, 1337, 1344, 1350, 1357, 1364, 1371, 1378, 1387, 1392, 1399, 1406, 1412, 1419, 1426, 1433, 1439, 1446, 1453, 1459, 1466, 1473, 1480, 1486, 1493, 1500, 1506, 1517, 1524, 1529, 1536, 1542, 1549, 1554, 1560, 1566, 1572, 1579, 1586, 1592, 1599, 1606, 1613, 1620, 1627, 1634, 1641, 1648, 1655, 1661, 1667, 1670, 1677, 1685, 1688, 1695, 1703, 1707, 1713, 1733, 1749, 1758, 1762, 1774, 1782, 1791, and 1975.

[5262] In some aspects, the antigen binding polypeptides provided herein comprise a VL1 comprising an amino acid sequence that is at least 65%, at least 70%, at least 75%, at least 80%, at least 85%, at least 90%, at least 95%, at least 99%, or 100% identical to any one of SEQ ID NOs: 1098, 1105, 1112, 1122, 1129, 1136, 1143, 1150, 1157, 1164, 1171, 1176, 1183, 1190, 1196, 1202, 1208, 1214, 1219, 1223, 1230, 1237, 1242, 1249, 1256, 1263, 1268, 1273, 1280, 1287, 1294, 1301, 1308, 1314, 1321, 1328, 1334, 1341, 1347, 1354, 1361, 1368, 1375, 1380, 1384, 1390, 1396, 1403, 1410, 1416, 1423, 1430, 1436, 1443, 1450, 1457, 1463, 1470, 1477, 1483, 1490, 1497, 1503, 1510, 1514, 1521, 1527, 1533, 1540, 1546, 1551, 1558, 1563, 1570, 1576, 1583, 1589, 1596, 1603, 1610, 1617, 1624, 1631, 1638, 1645, 1652, 1659, 1664, 1669, 1674, 1682, 1692, 1700, 1711, 1721, 1724, 1730, 1740, 1746, 1755, 1764, 1766, 1771, 1779, 1784, and 1788.

[5263] In some aspects, the antigen binding polypeptides provided herein comprise a VL2 comprising an amino acid sequence that is at least 65%, at least 70%, at least 75%, at least 80%, at least 85%, at least 90%, at least 95%, at least 99%, or 100% identical to any one of SEQ ID NOs: 1098, 1105, 1112, 1122, 1129, 1136, 1143, 1150, 1157, 1164, 1171, 1176, 1183, 1190, 1196, 1202, 1208, 1214, 1219, 1223, 1230, 1237, 1242, 1249, 1256, 1263, 1268, 1273, 1280, 1287, 1294, 1301, 1308, 1314, 1321, 1328, 1334, 1341, 1347, 1354, 1361, 1368, 1375, 1380, 1384, 1390, 1396, 1403, 1410, 1416, 1423, 1430, 1436, 1443, 1450, 1457, 1463, 1470, 1477, 1483, 1490, 1497, 1503, 1510, 1514, 1521, 1527, 1533, 1540, 1546, 1551, 1558, 1563, 1570, 1576, 1583, 1589, 1596, 1603, 1610, 1617, 1624, 1631, 1638, 1645, 1652, 1659, 1664, 1669, 1674, 1682, 1692, 1700, 1711, 1721, 1724, 1730, 1740, 1746, 1755, 1764, 1766, 1771, 1779, 1784, and 1788.

[5264] In some aspects, the antigen binding polypeptides provided herein comprise a VH1 comprising an amino acid sequence that is at least 65%, at least 70%, at least 75%, at least 80%, at least 85%, at least 90%, at least 95%, at least 99%, or 100% identical to any one of SEQ ID NOs: 1102, 1109, 1116, 1119, 1126, 1133, 1140, 1147, 1154, 1161, 1168, 1173, 1180, 1187, 1194, 1198, 1206, 1210, 1218, 1220, 1227, 1234, 1241, 1246, 1253, 1260, 1265, 1270, 1277, 1284, 1291, 1298, 1305, 1312, 1318, 1325, 1332, 1338, 1345, 1351, 1358, 1365, 1372, 1379, 1381, 1388, 1393, 1400, 1407, 1413, 1420, 1427, 1434, 1440, 1447, 1454, 1460, 1467, 1474, 1481, 1487, 1494, 1501, 1507, 1512, 1518, 1525, 1530, 1537, 1543, 1550, 1555, 1561, 1567, 1573, 1580, 1587, 1593, 1600, 1607, 1614, 1621, 1628, 1635, 1642, 1649, 1656, 1662, 1668, 1671, 1678, 1686, 1696, 1704, 1714, 1722, 1726, 1734, 1742, 1750, 1759, 1760, 1765, 1768, 1775, 1783, 1785, and 1792.

[5265] In some aspects, the antigen binding polypeptides provided herein comprise a VH2 comprising an amino acid sequence that is at least 65%, at least 70%, at least 75%, at least 80%, at least 85%, at least 90%, at least 95%, at least 99%, or 100% identical to any one of SEQ ID NOs: 1102, 1109, 1116, 1119, 1126, 1133, 1140, 1147, 1154, 1161, 1168, 1173, 1180, 1187, 1194, 1198, 1206, 1210, 1218, 1220, 1227, 1234, 1241, 1246, 1253, 1260, 1265, 1270, 1277, 1284, 1291, 1298, 1305, 1312, 1318, 1325, 1332, 1338, 1345, 1351, 1358, 1365, 1372, 1379, 1381, 1388, 1393, 1400, 1407, 1413, 1420, 1427, 1434, 1440, 1447, 1454, 1460, 1467, 1474, 1481, 1487, 1494, 1501, 1507, 1512, 1518, 1525, 1530, 1537, 1543, 1550, 1555, 1561, 1567, 1573, 1580, 1587, 1593, 1600, 1607, 1614, 1621, 1628, 1635, 1642, 1649, 1656, 1662, 1668, 1671, 1678, 1686, 1696, 1704, 1714, 1722, 1726, 1734, 1742, 1750, 1759, 1760, 1765, 1768, 1775, 1783, 1785, and 1792.

[5266] In some aspects, the infectious disease antigen that is not a sarbecovirus antigen is:
[5267] (i) a viral antigen elected from the group consisting of an influenza virus (A, B, C) antigen (e.g., influenza virus envelope proteins, for example, influenza virus neuraminidase (NA, N1, N2, N3, N4, N5, N6, N7, N8, N9, N10, N11), influenza virus hemagglutinin (H1, H2, H3, H4, H5, H6, H7, H8, H9, H10, H11, H12, H13, H14, H15, H16, H17, H18) (e.g., H1N1, H3N2, H5N1, H7N9, H9N2), Yamagata virus antigen, Victoria virus antigen, influenza virus structural proteins (e.g., M1, M2, capsid protein), influenza virus functional proteins (e.g., ribonucleoprotein (NP), primary interferon antagonist (NS1), nuclear export protein (NEP)) influenza virus accessory proteins (e.g., PB2, PB1, or PA), for example, anti-HA, anti-NA, anti-H1, anti-H3, anti-H5, anti-H7, anti-H9, anti-N1, anti-N2, anti-N9, anti-H1N1, anti-H3N2, anti-H5N1, anti-H7N9, anti-H9N2, anti-A protein, anti-B protein, anti-stem, anti-M1, anti-M2, anti-capsid, anti-NP, anti-NS1, anti-NEP, anti-PB1, anti-PB2, and anti-PA); a swine influenza virus antigen (e.g., swine flu hemagglutinin, swine flu neuraminidase); a classical swine fever (CSF) (hog colera) virus antigen; an equine influenza virus antigen (e.g., equine influenza virus typeA/Miami 63 neuraminidase, equine influenza virus type A/Kentucky 81 neuraminidase, equine influenza virus type A/Alaska 91 neuraminidase); parainfluenza viruses (e.g., bovine parainfluenza virus, bovine parainfluenza virus type 3 fusion protein, bovine parainfluenza virus type 3 hemagglutinin neuraminidase); a (human) respiratory syncytial virus (RSV)-viral antigen (e.g., RSV F glycoprotein, RSV G glycoprotein. F protein of respiratory syncytial virus, RSV fusion glycoprotein); a herpes simplex virus (HSV) antigen (e.g., herpes simplex virus glycoproteins gB, gC, gD, and gE, herpes simplex virus type 2 glycoprotein gB); a Dengue virus antigen (e.g., core protein, matrix protein, glycoprotein E of Dengue virus, or other protein of Dengue virus); a measles virus antigen (e.g., hemagglutinin); a poliovirus 1 antigen (e.g., poliovirus 1 proteins (VP1)), a HIV-1 antigen and HIV-2 antigen (e.g., HIV envelope proteins (e.g., envelope glycoproteins of HIV 1, HIV envelope glycoprotein (Env), HIV envelope glycoprotein gp160, HIV envelope surface glycoprotein gp120, HIV transmembrane envelope protein gp41), HIV structural proteins (e.g., p17, p24, p7, p55), HIV functional proteins (e.g, p66, HIV-1 protease (PR), p31), HIV accessory proteins (e.g., Nef, Tat, Rev, Vif, Vpr, Vpu)); a hepatitis virus (HAV, HBV, HCV, HDV, HEV) antigen (e.g., hepatitis B virus antigen (e.g., surface antigen, core protein), hepatitis C virus antigen (e.g., glycoprotein E1E2)); a rabies virus (Rabies lyssavirus) antigen (e.g., rabies virus glycoprotein, e.g., G glycoprotein); a pseudorabies virus antigen (e.g., pseudorabies virus g50 (gpD), pseudorabies virus II (gpB), pseudorabies virus III (gpC), pseudorabies virus glycoprotein H, pseudorabies virus glycoprotein E); a papillomavirus (HPV) antigen; an Epstein-Barr virus (EBV) (Gamma herpes virus 4) antigen; a Herpes simplex virus (HSV, HSV-1, HSV-2) antigen (e.g., human herpes virus 8, equine herpes virus antigen (e.g., type 1 glycoprotein B, type 1 glycoprotein D)); a Herpes zoster antigen; a Cytomegalovirus antigen (e.g., cytomegalovirus glycoprotein B); a Zika virus antigen; a Transmissible gastroenteritis virus (TGEV) antigen (e.g., glycoprotein 195, matrix protein); a rotavirus antigen (e.g., swine rotavirus glycoprotein 38); a parvovirus antigen (e.g., swine parvovirus capsid protein); a filoviruses (e.g., Marburg and Ebola) antigen; a bovine viral diarrhea virus antigen (e.g., glycoprotein 55); a Newcastle disease virus antigen (hemagglutinin, neuraminidase); an orthopoxvirus antigen; a coxsackievirus antigen and aphthovirus (foot and mouth disease virus) antigen; a yellow fever virus antigen; a Chikunga virus antigen; a Nipah virus antigen; an African swine fever virus antigen; a rhinotracheitis virus antigen (e.g., infectious bovine rhinotracheitis virus glycoprotein E, glycoprotein G); a laryngotracheitis virus antigen (e.g., infectious laryngotracheitis virus glycoprotein G or glycoprotein I); a La Crosse virus antigen (e.g., La Crosse virus glycoprotein); a neonatal calf diarrhoea virus antigen; a Venezuelan equine encephalomyelitis virus antigen; a punta toro virus antigen; a murine leukemia virus antigen; a mouse mammary tumor virus antigen; a bovine respiratory syncytial virus antigen (e.g., bovine respiratory syncytial virus attachment protein (BRSV G), bovine respiratory syncytial virus fusion protein (BRSV F), bovine respiratory syncytial virus nucleocapsid protein (BRSVN)); a bovine E viral diarrhoea virus antigen (e.g., glycoprotein 48 and glycoprotein 53); a metapneumovirus (HMPV) antigen; and an Ebola virus antigen (e.g., ebolavirus glycoprotein, e.g., Zaire ebolavirus glycoprotein); or
[5268] (ii) a bacterial or parasite antigen selected from the group consisting of a Plasmodium (e.g., Plasmodium falciparum. Plasmodium vivax. Plasmodium malariae, Plasmodium ovale, Plasmodium knowlesi) antigen, a Streptococcus (e.g., Streptococcus pneumoniae, Streptococcus pyogenes, Streptococcus agalactiae. Streptococcus mutans. Streptococcus viridans, Streptococcus anginosus, Streptococcus intermedius, Streptococcus constellatus) antigen (e.g., 24M epitope), a Neisseria gonorrhoeae antigen (e.g., gonococcal pilin), a Corynebacterium antigen (e.g., Corynebacterium diphtheria (diptheria toxin). Corynebacterium ulcerans, Corynebacterium pseudotuberculosis). Mycobacterium tuberculosis antigens. Brachyspira hyodysenteriae (Serpulina hydodysenteriae) antigen (e.g., Serpulina hydodysenteriae protective antigen), a Chlamydia antigen (e.g., Chlamydia trachomatis) (e.g., MOMP and PorB), a Mycoplasma sp. (e.g., Mycoplasma genitalium, Mycoplasma hyopneumoniae, Mycoplasma pneumonia) antigen, a Staphylococcus (e.g., Staphylococcus aureus, coagulase-negative staphylococci (CoNS). Staphylococcus aureus alpha toxin. Staphylococcus aureus bi-component leucocidin) antigen, a Klebsiella sp. antigen, an Escherichia coli antigen (e.g., E. coli shiga toxin type-2. E. coli shiga toxin type-1), a Bacillus sp. (e.g., Bacillus anthracis, e.g., Bacillus anthracis anthrax) antigen, a Pseudomonas aeruginosa antigen (e.g., Pseudomonas aeruginosa type III secretion system), an Enterococcus sp. antigen, an Enterobacter sp. antigen, a Proteus sp. antigen, an Actinobacter sp. antigen, a Mycobacterium avium (Mycobacterium avium complex (MAC)) antigen, a Salmonella bacteria antigen, a Clostridium difficile antigen, a Toxoplasma (e.g., Toxoplasma gondii) antigen, a Histoplasma antigen, a Candida antigen, a Coccidioides antigen, a Cryptococcus antigen, a Cryptosporidium antigen, and a Cystoisospora (e.g., Cystoisospora belli) antigen, and another antigen (e.g., endotoxins, lymphotoxins (e.g., lymphotoxin alpha LTA), phosphatidylserine, Hsp90, CCR5, lipoteichoic acid, clumping factor A).

[5269] In some aspects, the antigen binding polypeptides provided herein comprise a VL1 comprising a light chain complementarity determining region 1 (LCDR1), LCDR2, and/or LCDR3 of an antibody selected from the group consisting of libivirumab, rmab, rivabazumab pegol, setoxaximab, suvizumab, suvratoxumab, sevirumab, pritoxaximab, porgaviximab, REGN-EB3, obiltoxaximab, gedivumab, foravirumab, larcaviximab, motavizumab, palivizumab, rafivirumab, regavirumab, tuvirumab, cosfroviximab, felvizumab, atidortoxumab, edobacomab, nebacumab, pateclizumab, raxibacumab, urtoxazumab, tosatoxumab, berlimatoxumab, CR6261, diridavumab, firivumab, lesofavumab, navivumab, exbivirumab, lenvervimab, bavituximab, bezlotoxumab, efungumab, leronlimab, nirsevimab, pagibaximab, panobacumab, tefibazumab, ansuvimab, atoltivimab, maftivimab, and odesivimab.

[5270] In some aspects, the antigen binding polypeptides provided herein comprise a VL2 comprising a light chain complementarity determining region 1 (LCDR1), LCDR2, and/or LCDR3 of an antibody selected from the group consisting of libivirumab, rmab, rivabazumab pegol, setoxaximab, suvizumab, suvratoxumab, sevirumab, pritoxaximab, porgaviximab, REGN-EB3, obiltoxaximab, gedivumab, foravirumab, larcaviximab, motavizumab, palivizumab, rafivirumab, regavirumab, tuvirumab, cosfroviximab, felvizumab, atidortoxumab, edobacomab, nebacumab, pateclizumab, raxibacumab, urtoxazumab, tosatoxumab, berlimatoxumab, CR6261, diridavumab, firivumab, lesofavumab, navivumab, exbivirumab, lenvervimab, bavituximab, bezlotoxumab, efungumab, leronlimab, nirsevimab, pagibaximab, panobacumab, tefibazumab, ansuvimab, atoltivimab, maftivimab, and odesivimab.

[5271] In some aspects, the antigen binding polypeptides provided herein comprise a VH1 comprising a heavy chain complementarity determining region 1 (HCDR1), HCDR2, and/or HCDR3 of an antibody selected from the group consisting of libivirumab, rmab, rivabazumab pegol, setoxaximab, suvizumab, suvratoxumab, sevirumab, pritoxaximab, porgaviximab, REGN-EB3, obiltoxaximab, gedivumab, foravirumab, larcaviximab, motavizumab, palivizumab, rafivirumab, regavirumab, tuvirumab, cosfroviximab, felvizumab, atidortoxumab, edobacomab, nebacumab, pateclizumab, raxibacumab, urtoxazumab, tosatoxumab, berlimatoxumab, CR6261, diridavumab, firivumab, lesofavumab, navivumab, exbivirumab, lenvervimab, bavituximab, bezlotoxumab, efungumab, leronlimab, nirsevimab, pagibaximab, panobacumab, tefibazumab, ansuvimab, atoltivimab, maftivimab, and odesivimab.

[5272] In some aspects, the antigen binding polypeptides provided herein comprise a VH2 comprising a heavy chain complementarity determining region 1 (HCDR1), HCDR2, and/or HCDR3 of an antibody selected from the group consisting of libivirumab, rmab, rivabazumab pegol, setoxaximab, suvizumab, suvratoxumab, sevirumab, pritoxaximab, porgaviximab, REGN-EB3, obiltoxaximab, gedivumab, foravirumab, larcaviximab, motavizumab, palivizumab, rafivirumab, regavirumab, tuvirumab, cosfroviximab, felvizumab, atidortoxumab, edobacomab, nebacumab, pateclizumab, raxibacumab, urtoxazumab, tosatoxumab, berlimatoxumab, CR6261, diridavumab, firivumab, lesofavumab, navivumab, exbivirumab, lenvervimab, bavituximab, bezlotoxumab, efungumab, leronlimab, nirsevimab, pagibaximab, panobacumab, tefibazumab, ansuvimab, atoltivimab, maftivimab, and odesivimab.

[5273] In some aspects, the antigen binding polypeptides provided herein comprise a VL1 comprising a VL of an antibody selected from the group consisting of libivirumab, rmab, rivabazumab pegol, setoxaximab, suvizumab, suvratoxumab, sevirumab, pritoxaximab, porgaviximab, REGN-EB3, obiltoxaximab, gedivumab, foravirumab, larcaviximab, motavizumab, palivizumab, rafivirumab, regavirumab, tuvirumab, cosfroviximab, felvizumab, atidortoxumab, edobacomab, nebacumab, pateclizumab, raxibacumab, urtoxazumab, tosatoxumab, berlimatoxumab, CR6261, diridavumab, firivumab, lesofavumab, navivumab, exbivirumab, lenvervimab, bavituximab, bezlotoxumab, efungumab, leronlimab, nirsevimab, pagibaximab, panobacumab, tefibazumab, ansuvimab, atoltivimab, maftivimab, and odesivimab.

[5274] In some aspects, the antigen binding polypeptides provided herein comprise a VL2 comprising a VL of an antibody selected from the group consisting of libivirumab, rmab, rivabazumab pegol, sctoxaximab, suvizumab, suvratoxumab, sevirumab, pritoxaximab, porgaviximab, REGN-EB3, obiltoxaximab, gedivumab, foravirumab, larcaviximab, motavizumab, palivizumab, rafivirumab, regavirumab, tuvirumab, cosfroviximab, felvizumab, atidortoxumab, cdobacomab, nebacumab, pateclizumab, raxibacumab, urtoxazumab, tosatoxumab, berlimatoxumab, CR6261, diridavumab, firivumab, lesofavumab, navivumab, exbivirumab, lenvervimab, bavituximab, bezlotoxumab, efungumab, leronlimab, nirsevimab, pagibaximab, panobacumab, tefibazumab, ansuvimab, atoltivimab, maftivimab, and odesivimab.

[5275] In some aspects, the antigen binding polypeptides provided herein comprise a VH1 comprising a VH of an antibody selected from the group consisting of libivirumab, rmab, rivabazumab pegol, setoxaximab, suvizumab, suvratoxumab, sevirumab, pritoxaximab, porgaviximab, REGN-EB3, obiltoxaximab, gedivumab, foravirumab, larcaviximab, motavizumab, palivizumab, rafivirumab, regavirumab, tuvirumab, cosfroviximab, felvizumab, atidortoxumab, edobacomab, nebacumab, pateclizumab, raxibacumab, urtoxazumab, tosatoxumab, berlimatoxumab, CR6261, diridavumab, firivumab, lesofavumab, navivumab, exbivirumab, lenvervimab, bavituximab, bezlotoxumab, efungumab, leronlimab, nirsevimab, pagibaximab, panobacumab, tefibazumab, ansuvimab, atoltivimab, maftivimab, and odesivimab.

[5276] In some aspects, the antigen binding polypeptides provided herein comprise a VH2 comprising a VH of an antibody selected from the group consisting of libivirumab, rmab, rivabazumab pegol, sctoxaximab, suvizumab, suvratoxumab, sevirumab, pritoxaximab, porgaviximab, REGN-EB3, obiltoxaximab, gedivumab, foravirumab, larcaviximab, motavizumab, palivizumab, rafivirumab, regavirumab, tuvirumab, cosfroviximab, felvizumab, atidortoxumab, edobacomab, nebacumab, pateclizumab, raxibacumab, urtoxazumab, tosatoxumab, berlimatoxumab, CR6261, diridavumab, firivumab, lesofavumab, navivumab, exbivirumab, lenvervimab, bavituximab, bezlotoxumab, efungumab, leronlimab, nirsevimab, pagibaximab, panobacumab, tefibazumab, ansuvimab, atoltivimab, maftivimab, and odesivimab.

[5277] In some aspects, the antigen binding polypeptides provided herein comprise a VL1 comprising (i) a complementarity determining region (CDR) 1 having an amino acid sequence that is at least 65%, at least 70%, at least 75%, at least 80%, at least 85%, at least 90%, at least 95%, at least 99%, or 100% identical to any one of SEQ ID NOs: 1428, 1793, 1798, 1810, 1817, 1824, 1977, 1985, 1993 and 2001; (ii) a CDR2 having an amino acid sequence that is at least 65%, at least 70%, at least 75%, at least 80%, at least 85%, at least 90%, at least 95%, at least 99%, or 100% identical to any one of SEQ ID NOs: 1978, 1986, 1994, and 2002; or at least 65%, at least 70%, at least 75%, at least 80%, at least 85%, at least 90%, at least 95%, at least 99%, or 100% identical to any one of amino acid sequences YTS, DTS, GAS, and AAS; and (iii) a CDR3 having an amino acid sequence that is at least 65%, at least 70%, at least 75%, at least 80%, at least 85%, at least 90%, at least 95%, at least 99%, or 100% identical to any one of SEQ ID NOs: 1229, 1799, 1805, 1811, 1818, 1825, 1979, 1987, 1995, and 2003.

[5278] In some aspects, the antigen binding polypeptides provided herein comprise a VL2 comprising (i) a complementarity determining region (CDR) 1 having an amino acid sequence that is at least 65%, at least 70%, at least 75%, at least 80%, at least 85%, at least 90%, at least 95%, at least 99%, or 100% identical to any one of SEQ ID NOs: 1428, 1793, 1798, 1810, 1817, 1824, 1977, 1985, 1993 and 2001; (ii) a CDR2 having an amino acid sequence that is at least 65%, at least 70%, at least 75%, at least 80%, at least 85%, at least 90%, at least 95%, at least 99%, or 100% identical to any one of SEQ ID NOs: 1978, 1986, 1994, and 2002; or at least 65%, at least 70%, at least 75%, at least 80%, at least 85%, at least 90%, at least 95%, at least 99%, or 100% identical to any one of amino acid sequences YTS, DTS, GAS, and AAS; and (iii) a CDR3 having an amino acid sequence that is at least 65%, at least 70%, at least 75%, at least 80%, at least 85%, at least 90%, at least 95%, at least 99%, or 100% identical to any one of SEQ ID NOs: 1229, 1799, 1805, 1811, 1818, 1825, 1979, 1987, 1995, and 2003.

[5279] In some aspects, the antigen binding polypeptides provided herein comprise a VH1 comprising (i) a complementarity determining region (CDR) 1 having an amino acid sequence that is at least 65%, at least 70%, at least 75%, at least 80%, at least 85%, at least 90%, at least 95%, at least 99%, or 100% identical to any one of SEQ ID NOs: 1577, 1795, 1801, 1813, 1820, 1827, 1981, 1989, 1997, and 2005; (ii) a CDR2 having an amino acid sequence that is at least 65%, at least 70%, at least 75%, at least 80%, at least 85%, at least 90%, at least 95%, at least 99%, or 100% identical to any one of SEQ ID NOs: 1159, 1802, 1807, 1814, 1821, 1828, 1982, 1990, 1998, and 2006; and (iii) a CDR3 having an amino acid sequence that is at least 65%, at least 70%, at least 75%, at least 80%, at least 85%, at least 90%, at least 95%, at least 99%, or 100% identical to any one of SEQ ID NOs: 1796, 1803, 1808, 1815, 1822, 1829, 1983, 1991, 1999, and 2007.

[5280] In some aspects, the antigen binding polypeptides provided herein comprise a VH2 comprising (i) a complementarity determining region (CDR) 1 having an amino acid sequence that is at least 65%, at least 70%, at least 75%, at least 80%, at least 85%, at least 90%, at least 95%, at least 99%, or 100% identical to any one of SEQ ID NOs: 1577, 1795, 1801, 1813, 1820, 1827, 1981, 1989, 1997, and 2005; (ii) a CDR2 having an amino acid sequence that is at least 65%, at least 70%, at least 75%, at least 80%, at least 85%, at least 90%, at least 95%, at least 99%, or 100% identical to any one of SEQ ID NOs: 1159, 1802, 1807, 1814, 1821, 1828, 1982, 1990, 1998, and 2006; and (iii) a CDR3 having an amino acid sequence that is at least 65%, at least 70%, at least 75%, at least 80%, at least 85%, at least 90%, at least 95%, at least 99%, or 100% identical to any one of SEQ ID NOs: 1796, 1803, 1808, 1815, 1822, 1829, 1983, 1991, 1999, and 2007.

[5281] In some aspects, the antigen binding polypeptides provided herein comprise a VL1 comprising an amino acid sequence that is at least 65%, at least 70%, at least 75%, at least 80%, at least 85%, at least 90%, at least 95%, at least 99%, or 100% identical to any one of SEQ ID NOs: 1794, 1800, 1806, 1812, 1819, 1826, 1980, 1988, 1996, and 2004.

[5282] In some aspects, the antigen binding polypeptides provided herein comprise a VL2 comprising an amino acid sequence that is at least 65%, at least 70%, at least 75%, at least 80%, at least 85%, at least 90%, at least 95%, at least 99%, or 100% identical to any one of SEQ ID NOs: 1794, 1800, 1806, 1812, 1819, 1826, 1980, 1988, 1996, and 2004.

[5283] In some aspects, the antigen binding polypeptides provided herein comprise a VH1 comprising an amino acid sequence that is at least 65%, at least 70%, at least 75%, at least 80%, at least 85%, at least 90%, at least 95%, at least 99%, or 100% identical to any one of SEQ ID NOs 1797, 1804, 1809, 1816, 1823, 1830, 1984, 1992, 2000, and 2008.

[5284] In some aspects, the antigen binding polypeptides provided herein comprise a VH2 comprising an amino acid sequence that is at least 65%, at least 70%, at least 75%, at least 80%, at least 85%, at least 90%, at least 95%, at least 99%, or 100% identical to any one of SEQ ID NOs 1797, 1804, 1809, 1816, 1823, 1830, 1984, 1992, 2000, and 2008.

[5285] In some aspects, the other-pathology antigen is selected from the group consisting of Amyloid beta, β-amyloid, PCSK9, IFN-α/β receptor, Rhesus factor, nerve growth factor (NGF), DPP4, fibrin II beta chain, ACVR2B, serum amyloid A protein SOST, FGF 23, VWF, tissue factor pathway inhibitor (TFPI), 1-40 and 1-42, selectin P, glucagon receptor (GCGR), amyloid P component, GDF-8, CXCL10 IP-10, repulsive guidance molecule A RGMA, IFN-γ, activated F9/F10, calcitonin gene-related peptide (CGRP), angiopoietin 3, IFN receptor, IFN-γ, calcitonin, β-amyloid 1-40 and 1-42, tau protein, dabigatran, cardiac myosin, selectin P. Complement factor D (CFD), kallikrein, GDF-8, IGHE, tissue factor pathway inhibitor (TFPI), GMCSF receptor α-chain, amyloid, IgE Fc region, MASP-2, oxLDL, GMCSF, NOGO-A. Alpha-synuclein, NGF, myelin-associated glycoprotein, RHD (gene) (RHD), sclerostin, FCGRT, sclerostin SOST, mucosal addressin cell adhesion molecule, myostatin, RSVFR, complement component 1s C1s, C5, and IL31.

[5286] In some aspects, the antigen binding polypeptides provided herein comprise a VL1 comprising a light chain complementarity determining region 1 (LCDR1), LCDR2, and/or LCDR3 of an antibody selected from the group consisting of aducanumab, alirocumab, frovocimab, lodelcizumab, bococizumab, evolocumab, ralpancizumab, anifrolumab, atorolimumab, bapineuzumab, bedinvetmab, begelomab, biciromab, bimagrumab, birtamimab, blosozumab, burosumab, caplacizumab, concizumab, crenezumab, crizanlizumab, crotedumab, dezamizumab, domagrozumab, donanemab, eldelumab, elezanumab, emapalumab, emicizumab, eptinezumab, erenumab, evinacumab, faralimomab, fasinumab, fontolizumab, fremanezumab, frunevetmab, fulranumab, galcanezumab, gantenerumab, gosuranemab, idarucizumab, imciromab, inclacumab, lampalizumab, lanadelumab, landogrozumab, lecanemab, ligelizumab, marstacimab, mavrilimumab, morolimumab, NEOD001, omalizumab, oMS721, orticumab, otilimab, ozanezumab, ponezumab, prasinezumab, quilizumab, ranevetmab, refanezumab, roledumab, romosozumab, rozanolixizumab, setrusumab, SHP647, solanezumab, stamulumab, suptavumab, sutimlimab, tanezumab, crovalimab, and lokivetmab.

[5287] In some aspects, the antigen binding polypeptides provided herein comprise a VL2 comprising a light chain complementarity determining region 1 (LCDR1), LCDR2, and/or LCDR3 of an antibody selected from the group consisting of aducanumab, alirocumab, frovocimab, lodelcizumab, bococizumab, evolocumab, ralpancizumab, anifrolumab, atorolimumab, bapineuzumab, bedinvetmab, begelomab, biciromab, bimagrumab, birtamimab, blosozumab, burosumab, caplacizumab, concizumab, crenezumab, crizanlizumab, crotedumab, dezamizumab, domagrozumab, donanemab, eldelumab, elezanumab, emapalumab, emicizumab, eptinezumab, erenumab, evinacumab, faralimomab, fasinumab, fontolizumab, fremanezumab, frunevetmab, fulranumab, galcanezumab, gantenerumab, gosuranemab, idarucizumab, imciromab, inclacumab, lampalizumab, lanadelumab, landogrozumab, lecanemab, ligelizumab, marstacimab, mavrilimumab, morolimumab, NEOD001, omalizumab, oMS721, orticumab, otilimab, ozanezumab, ponezumab, prasinezumab, quilizumab, ranevetmab, refanezumab, roledumab, romosozumab, rozanolixizumab, setrusumab, SHP647, solanczumab, stamulumab, suptavumab, sutimlimab, tanezumab, crovalimab, and lokivetmab.

[5288] In some aspects, the antigen binding polypeptides provided herein comprise a VH1 comprising a heavy chain complementarity determining region 1 (HCDR1), HCDR2, and/or HCDR3 of an antibody selected from the group consisting of aducanumab, alirocumab, frovocimab, lodelcizumab, bococizumab, evolocumab, ralpancizumab, anifrolumab, atorolimumab, bapineuzumab, bedinvetmab, begelomab, biciromab, bimagrumab, birtamimab, blosozumab, burosumab, caplacizumab, concizumab, crenezumab, crizanlizumab, crotedumab, dezamizumab, domagrozumab, donanemab, eldelumab, elezanumab, emapalumab, emicizumab, eptinezumab, erenumab, evinacumab, faralimomab, fasinumab, fontolizumab, fremanezumab, frunevetmab, fulranumab, galcanezumab, gantenerumab, gosuranemab, idarucizumab, imciromab, inclacumab, lampalizumab, lanadelumab, landogrozumab, lecanemab, ligelizumab, marstacimab, mavrilimumab, morolimumab, NEOD001, omalizumab, oMS721, orticumab, otilimab, ozanezumab, ponezumab, prasinezumab, quilizumab, ranevetmab, refanezumab, roledumab, romosozumab, rozanolixizumab, setrusumab, SHP647, solanezumab, stamulumab, suptavumab, sutimlimab, tanezumab, crovalimab, and lokivetmab.

[5289] In some aspects, the antigen binding polypeptides provided herein comprise a VH2 comprising a heavy chain complementarity determining region 1 (HCDR1), HCDR2, and/or HCDR3 of an antibody selected from the group consisting of aducanumab, alirocumab, frovocimab, lodelcizumab, bococizumab, evolocumab, ralpancizumab, anifrolumab, atorolimumab, bapineuzumab, bedinvetmab, begelomab, biciromab, bimagrumab, birtamimab, blosozumab, burosumab, caplacizumab, concizumab, crenezumab, crizanlizumab, crotedumab, dezamizumab, domagrozumab, donanemab, eldelumab, elezanumab, emapalumab, emicizumab, eptinezumab, erenumab, evinacumab, faralimomab, fasinumab, fontolizumab, fremanezumab, frunevetmab, fulranumab, galcanezumab, gantenerumab, gosuranemab, idarucizumab, imciromab, inclacumab, lampalizumab, lanadelumab, landogrozumab, lecanemab, ligelizumab, marstacimab, mavrilimumab, morolimumab, NEOD001, omalizumab, oMS721, orticumab, otilimab, ozanezumab, ponezumab, prasinezumab, quilizumab, ranevetmab, refanezumab, roledumab, romosozumab, rozanolixizumab, setrusumab, SHP647, solanezumab, stamulumab, suptavumab, sutimlimab, tanezumab, crovalimab, and lokivetmab.

[5290] In some aspects, the antigen binding polypeptides provided herein comprise a VL1 comprising a VL of an antibody selected from the group consisting of aducanumab, alirocumab, frovocimab, lodelcizumab, bococizumab, evolocumab, ralpancizumab, anifrolumab, atorolimumab, bapineuzumab, bedinvetmab, begelomab, biciromab, bimagrumab, birtamimab, blosozumab, burosumab, caplacizumab, concizumab, crenezumab, crizanlizumab, crotedumab, dezamizumab, domagrozumab, donanemab, eldelumab, elezanumab, emapalumab, emicizumab, eptinezumab, erenumab, evinacumab, faralimomab, fasinumab, fontolizumab, fremanezumab, frunevetmab, fulranumab, galcanezumab, gantenerumab, gosuranemab, idarucizumab, imciromab, inclacumab, lampalizumab, lanadelumab, landogrozumab, lecanemab, ligelizumab, marstacimab, mavrilimumab, morolimumab, NEOD001, omalizumab, oMS721, orticumab, otilimab, ozanezumab, ponezumab, prasinezumab, quilizumab, ranevetmab, refanezumab, roledumab, romosozumab, rozanolixizumab, setrusumab, SHP647, solanezumab, stamulumab, suptavumab, sutimlimab, tanezumab, crovalimab, and lokivetmab.

[5291] In some aspects, the antigen binding polypeptides provided herein comprise a VL2 comprising a VL of an antibody selected from the group consisting of aducanumab, alirocumab, frovocimab, lodelcizumab, bococizumab, evolocumab, ralpancizumab, anifrolumab, atorolimumab, bapincuzumab, bedinvetmab, begelomab, biciromab, bimagrumab, birtamimab, blosozumab, burosumab, caplacizumab, concizumab, crenezumab, crizanlizumab, crotedumab, dezamizumab, domagrozumab, donanemab, eldelumab, elezanumab, emapalumab, emicizumab, eptinezumab, erenumab, evinacumab, faralimomab, fasinumab, fontolizumab, fremanezumab, frunevetmab, fulranumab, galcanezumab, gantenerumab, gosuranemab, idarucizumab, imciromab, inclacumab, lampalizumab, lanadelumab, landogrozumab, lecanemab, ligelizumab, marstacimab, mavrilimumab, morolimumab, NEOD001, omalizumab, oMS721, orticumab, otilimab, ozanezumab, ponezumab, prasinezumab, quilizumab, ranevetmab, refanezumab, roledumab, romosozumab, rozanolixizumab, setrusumab, SHP647, solanezumab, stamulumab, suptavumab, sutimlimab, tanezumab, crovalimab, and lokivetmab.

[5292] In some aspects, the antigen binding polypeptides provided herein comprise a VH1 comprising a VH of an antibody selected from the group consisting of aducanumab, alirocumab, frovocimab, lodelcizumab, bococizumab, evolocumab, ralpancizumab, anifrolumab, atorolimumab, bapineuzumab, bedinvetmab, begelomab, biciromab, bimagrumab, birtamimab, blosozumab, burosumab, caplacizumab, concizumab, crenezumab, crizanlizumab, crotedumab, dezamizumab, domagrozumab, donanemab, eldelumab, elezanumab, emapalumab, emicizumab, eptinezumab, erenumab, evinacumab, faralimomab, fasinumab, fontolizumab, fremanezumab, frunevetmab, fulranumab, galcanezumab, gantenerumab, gosuranemab, idarucizumab, imciromab, inclacumab, lampalizumab, lanadelumab, landogrozumab, lecanemab, ligelizumab, marstacimab, mavrilimumab, morolimumab, NEOD001, omalizumab, oMS721, orticumab, otilimab, ozanezumab, ponezumab, prasinezumab, quilizumab, ranevetmab, refanezumab, roledumab, romosozumab, rozanolixizumab, setrusumab, SHP647, solanezumab, stamulumab, suptavumab, sutimlimab, tanezumab, crovalimab, and lokivetmab.

[5293] In some aspects, the antigen binding polypeptides provided herein comprise a VH2 comprising a VH of an antibody selected from the group consisting of aducanumab, alirocumab, frovocimab, lodelcizumab, bococizumab, evolocumab, ralpancizumab, anifrolumab, atorolimumab, bapineuzumab, bedinvetmab, begelomab, biciromab, bimagrumab, birtamimab, blosozumab, burosumab, caplacizumab, concizumab, crenezumab, crizanlizumab, crotedumab, dezamizumab, domagrozumab, donanemab, eldelumab, elezanumab, emapalumab, emicizumab, eptinezumab, erenumab, evinacumab, faralimomab, fasinumab, fontolizumab, fremanezumab, frunevetmab, fulranumab, galcanezumab, gantenerumab, gosuranemab, idarucizumab, imciromab, inclacumab, lampalizumab, lanadelumab, landogrozumab, lecanemab, ligelizumab, marstacimab, mavrilimumab, morolimumab, NEOD001, omalizumab, oMS721, orticumab, otilimab, ozanezumab, ponezumab, prasinezumab, quilizumab, ranevetmab, refanezumab, roledumab, romosozumab, rozanolixizumab, setrusumab, SHP647, solanezumab, stamulumab, suptavumab, sutimlimab, tanezumab, crovalimab, and lokivetmab.

[5294] In some aspects, the antigen binding polypeptides provided herein comprise a VL1 comprising (i) a complementarity determining region (CDR) 1 having an amino acid sequence that is at least 65%, at least 70%, at least 75%, at least 80%, at least 85%, at least 90%, at least 95%, at least 99%, or 100% identical to any one of SEQ ID NOs: 1120, 1228, 1359, 1519, 1831, 1838, 1845, 1852, 1859, 1866, 1872, 1878, 1885, 1891, 1898, 1905, 1911, 1917, 1924, 1931, 1938, 1945, and 1963; (ii) a CDR2 having an amino acid sequence that is at least 65%, at least 70%, at least 75%, at least 80%, at least 85%, at least 90%, at least 95%, at least 99%, or 100% identical to any one of amino acid sequences AAS, AVS, DAS, DNN, EDN, EVS, GAS, GNG, KAS, KVS, LVS, NTD, STS, WAS, and YTS; and (iii) a CDR3 having an amino acid sequence that is at least 65%, at least 70%, at least 75%, at least 80%, at least 85%, at least 90%, at least 95%, at least 99%, or 100% identical to any one of SEQ ID NOs: 1360, 1832, 1839, 1846, 1853, 1860, 1867, 1873, 1879, 1886, 1892, 1899, 1906, 1912, 1918, 1925, 1932, 1939, 1946, 1951, 1957, 1964, and 1970.

[5295] In some aspects, the antigen binding polypeptides provided herein comprise a VL2 comprising (i) a complementarity determining region (CDR) 1 having an amino acid sequence that is at least 65%, at least 70%, at least 75%, at least 80%, at least 85%, at least 90%, at least 95%, at least 99%, or 100% identical to any one of SEQ ID NOs: 1120, 1228, 1359, 1519, 1831, 1838, 1845, 1852, 1859, 1866, 1872, 1878, 1885, 1891, 1898, 1905, 1911, 1917, 1924, 1931, 1938, 1945, and 1963; (ii) a CDR2 having an amino acid sequence that is at least 65%, at least 70%, at least 75%, at least 80%, at least 85%, at least 90%, at least 95%, at least 99%, or 100% identical to any one of amino acid sequences AAS, AVS, DAS, DNN, EDN, EVS, GAS, GNG, KAS, KVS, LVS, NTD, STS, WAS, and YTS; and (iii) a CDR3 having an amino acid sequence that is at least 65%, at least 70%, at least 75%, at least 80%, at least 85%, at least 90%, at least 95%, at least 99%, or 100% identical to any one of SEQ ID NOs: 1360, 1832, 1839, 1846, 1853, 1860, 1867, 1873, 1879, 1886, 1892, 1899, 1906, 1912, 1918, 1925, 1932, 1939, 1946, 1951, 1957, 1964, and 1970.

[5296] In some aspects, the antigen binding polypeptides provided herein comprise a VH1 comprising (i) a complementarity determining region (CDR) 1 having an amino acid sequence that is at least 65%, at least 70%, at least 75%, at least 80%, at least 85%, at least 90%, at least 95%, at least 99%, or 100% identical to any one of SEQ ID NOs: 1309, 1362, 1437, 1552, 1618, 1639, 1834, 1841, 1848, 1855, 1862, 1881, 1894, 1901, 1920, 1927, 1934, 1941, 1953, 1959, and 1966; (ii) a CDR2 having an amino acid sequence that is at least 65%, at least 70%, at least 75%, at least 80%, at least 85%, at least 90%, at least 95%, at least 99%, or 100% identical to any one of SEQ ID NOs: 1363, 1835, 1842, 1849, 1856, 1863, 1869, 1875, 1882, 1888, 1895, 1902, 1908, 1914, 1921, 1928, 1935, 1942, 1948, 1954, 1960, 1967, and 1972; and (iii) a CDR3 having an amino acid sequence that is at least 65%, at least 70%, at least 75%, at least 80%, at least 85%, at least 90%, at least 95%, at least 99%, or 100% identical to any one of SEQ ID NOs: 1364, 1836, 1843, 1850, 1857, 1864, 1870, 1876, 1883, 1889, 1896, 1903, 1909, 1915, 1922, 1929, 1936, 1943, 1949, 1955, 1961, 1968, and 1973.

[5297] In some aspects, the antigen binding polypeptides provided herein comprise a VH2 comprising (i) a complementarity determining region (CDR) 1 having an amino acid sequence that is at least 65%, at least 70%, at least 75%, at least 80%, at least 85%, at least 90%, at least 95%, at least 99%, or 100% identical to any one of SEQ ID NOs: 1309, 1362, 1437, 1552, 1618, 1639, 1834, 1841, 1848, 1855, 1862, 1881, 1894, 1901, 1920, 1927, 1934, 1941, 1953, 1959, and 1966; (ii) a CDR2 having an amino acid sequence that is at least 65%, at least 70%, at least 75%, at least 80%, at least 85%, at least 90%, at least 95%, at least 99%, or 100% identical to any one of SEQ ID NOs: 1363, 1835, 1842, 1849, 1856, 1863, 1869, 1875, 1882, 1888, 1895, 1902, 1908, 1914, 1921, 1928, 1935, 1942, 1948, 1954, 1960, 1967, and 1972; and (iii) a CDR3 having an amino acid sequence that is at least 65%, at least 70%, at least 75%, at least 80%, at least 85%, at least 90%, at least 95%, at least 99%, or 100% identical to any one of SEQ ID NOs: 1364, 1836, 1843, 1850, 1857, 1864, 1870, 1876, 1883, 1889, 1896, 1903, 1909, 1915, 1922, 1929, 1936, 1943, 1949, 1955, 1961, 1968, and 1973.

[5298] In some aspects, the antigen binding polypeptides provided herein comprise a VL1 comprising an amino acid sequence that is at least 65%, at least 70%, at least 75%, at least 80%, at least 85%, at least 90%, at least 95%, at least 99%, or 100% identical to any one of SEQ ID NOs: 1361, 1833, 1840, 1847, 1854, 1861, 1868, 1874, 1880, 1887, 1893, 1900, 1907, 1913, 1919, 1926, 1933, 1940, 1947, 1952, 1958, 1965, and 1971.

[5299] In some aspects, the antigen binding polypeptides provided herein comprise a VL2 comprising an amino acid sequence that is at least 65%, at least 70%, at least 75%, at least 80%, at least 85%, at least 90%, at least 95%, at least 99%, or 100% identical to any one of SEQ ID NOs: 1361, 1833, 1840, 1847, 1854, 1861, 1868, 1874, 1880, 1887, 1893, 1900, 1907, 1913, 1919, 1926, 1933, 1940, 1947, 1952, 1958, 1965, and 1971.

[5300] In some aspects, the antigen binding polypeptides provided herein comprise a VH1 comprising an amino acid sequence that is at least 65%, at least 70%, at least 75%, at least 80%, at least 85%, at least 90%, at least 95%, at least 99%, or 100% identical to any one of SEQ ID NOs: 1365, 1837, 1844, 1851, 1858, 1865, 1871, 1877, 1884, 1890, 1897, 1904, 1910, 1916, 1923, 1930, 1937, 1944, 1950, 1956, 1962, 1969, and 1974.

[5301] In some aspects, the antigen binding polypeptides provided herein comprise a VH2 comprising an amino acid sequence that is at least 65%, at least 70%, at least 75%, at least 80%, at least 85%, at least 90%, at least 95%, at least 99%, or 100% identical to any one of SEQ ID NOs: 1365, 1837, 1844, 1851, 1858, 1865, 1871, 1877, 1884, 1890, 1897, 1904, 1910, 1916, 1923, 1930, 1937, 1944, 1950, 1956, 1962, 1969, and 1974.

[5302] In some aspects, the antigen binding polypeptides disclosed herein, comprise one or more CL, as indicated in the formulas representing the antigen binding polypeptides disclosed herein. In some aspects, the CL comprises an amino acid sequence at least 65%, at least 70%, at least 75%, at least 80%, at least 85%, at least 90%, at least 95%, at least 99%, or 100% identical to any one of SEQ ID NOs: 374, 637, or 1092-1095.

[5303] In some aspects, the antigen binding polypeptides disclosed herein, comprise one or more CH1, as indicated in the formulas representing the antigen binding polypeptides disclosed herein. In some aspects, the CH1 comprises an amino acid sequence at least 65%, at least 70%, at least 75%, at least 80%, at least 85%, at least 90%, at least 95%, at least 99%, or 100% identical to any one of SEQ ID NOs: 375, 634, 1070, 1071, or 1086-1091.

[5304] In some aspects, the antigen binding polypeptides provided herein further comprise an Fc region. In some aspects, the antigen binding polypeptides provided herein further comprise an Fc region at the carboxy-terminus. In some aspects, the Fc region comprises an immunoglobulin heavy chain constant region 2 (CH2) and/or an immunoglobulin heavy chain constant region 3 (CH3). In some aspects, the Fc region further comprises an immunoglobulin hinge (i.e., a hinge region). In some aspects, the hinge region comprises an amino acid sequence at least 65%, at least 70%, at least 75%, at least 80%, at least 85%, at least 90%, at least 95%, at least 99%, or 100% identical to any one of SEQ ID NOs: 635, 636, 1072, 1073, or 1074. In some aspects, the Fc region comprises a CH2 and a CH3. In some aspects, the CH2 comprises an amino acid sequence that is at least 65%, at least 70%, at least 75%, at least 80%, at least 85%, at least 90%, at least 95%, at least 99%, or 100% identical to any one of SEQ ID NOs: 1075-1078. In some aspects, the CH3 comprises an amino acid sequence that is at least 65%, at least 70%, at least 75%, at least 80%, at least 85%, at least 90%, at least 95%, at least 99%, or 100% identical to any one of SEQ ID NOs: 1079-1085. In some aspects, the Fc region comprises an amino acid sequence that is at least 65%, at least 70%, at least 75%, at least 80%, at least 85%, at least 90%, at least 95%, at least 99%, or 100% identical to any one of SEQ ID NOs: 376-380.

[5305] In some aspects, the Fc region comprises one or more amino acid substitutions. In some aspects, the one or more amino acid substitutions comprise one or more half-life extension amino acid substitutions. In some aspects, the one or more half-life extension amino acid substitutions comprise one or more of amino acid substitutions M428L, N434A, N434S, L234F, L235E, P331S, M252Y, S254T, and T256E, or equivalent thereof, based on the EU numbering scheme. In some aspects, the one or more half-life extension amino acid substitutions comprise a LA (M428L and N434A, or equivalent thereof, based on the EU numbering scheme) amino acid substitution. In some aspects, the one or more half-life extension amino acid substitutions comprise a LS (M428L and N434S, or equivalent thereof, based on the EU numbering scheme) amino acid substitution. In some aspects, the one or more half-life extension amino acid substitutions comprise L234F and L235E, or equivalent thereof (based on the EU numbering scheme) amino acid substitutions. In some aspects, the one or more half-life extension amino acid substitutions comprise a TM (L234F, L235E, and P331S, or equivalent thereof, based on the EU numbering scheme) amino acid substitution. In some aspects, the one or more half-life extension amino acid substitutions comprise a YTE (M252Y, S254T, and T256E, or equivalent thereof, based on the EU numbering scheme) amino acid substitution.

[5306] In some aspects, the Fc region comprises at least one knob-into-hole modification. In some aspects, the antigen binding polypeptides disclosed herein are comprised in IgG1 or IgG4 antibodies or antigen binding fragments thereof. In some aspects, the knob-into-hole modification comprises one or more of knob substitutions of S354C and T366W, or equivalent thereof, and/or one or more of hole substitutions of Y349C, T366S, L368A, Y407V, or equivalent thereof, or a combination thereof, based on the EU numbering scheme. In some aspects, the Fc region comprises a knob-into-hole modification comprising knob substitutions of S354C and T366W, or equivalent thereof, and/or hole substitutions of Y349C, T366S, L368A and Y407V, or equivalent thereof, and/or a half-life extension amino acid substitution comprising: a LA (M428L and N434A, or equivalent thereof, based on the EU numbering scheme) amino acid substitution, a LS (M428L and N434S, or equivalent thereof, based on the EU numbering scheme) amino acid substitution. L234F and L235E, or equivalent thereof (based on the EU numbering scheme) amino acid substitutions, a TM (L234F, L235E, and P331S, or equivalent thereof, based on the EU numbering scheme) amino acid substitution, a YTE (M252Y, S254T, and T256E, or equivalent thereof, based on the EU numbering scheme) amino acid substitution, or any combination thereof.

[5307] In some aspects, the Fc region comprises knob substitutions of S354C and T366W, or equivalent thereof, and a half-life extension amino acid substitution comprising: a LA (M428L and N434A, or equivalent thereof, based on the EU numbering scheme) amino acid substitution, a LS (M428L and N434S, or equivalent thereof, based on the EU numbering scheme) amino acid substitution, L234F and L235E, or equivalent thereof (based on the EU numbering scheme) amino acid substitutions, a TM (L234F, L235E, and P331S, or equivalent thereof, based on the EU numbering scheme) amino acid substitution, a YTE (M252Y, S254T, and T256E, or equivalent thereof, based on the EU numbering scheme) amino acid substitution, or any combination thereof.

[5308] In some aspects, the Fc region comprises hole substitutions of Y349C, T366S, L368A and Y407V, or equivalent thereof, and a half-life extension amino acid substitution comprising: a LA (M428L and N434A, or equivalent thereof, based on the EU numbering scheme) amino acid substitution, a LS (M428L and N434S, or equivalent thereof, based on the EU numbering scheme) amino acid substitution. L234F and L235E, or equivalent thereof (based on the EU numbering scheme) amino acid substitutions, a TM (L234F, L235E, and P331S, or equivalent thereof, based on the EU numbering scheme) amino acid substitution, a YTE (M252Y, S254T, and T256E, or equivalent thereof, based on the EU numbering scheme) amino acid substitution, or any combination thereof.

[5309] In some aspects, the antigen binding polypeptides disclosed herein comprise one or more Fc effector function knockout mutation. In some aspects, the antigen binding polypeptides disclosed herein are comprised in IgG1 or IgG4 antibodies or antigen binding fragments thereof. In some aspects, the Fc effector function knockout mutation is L234A, L235A, P239A, or equivalent thereof, or a combination thereof, based on the EU numbering scheme.

[5310] In some aspects, the antigen binding polypeptides disclosed herein comprise a mutation at a glycosylation site. In some aspects, the mutation at a glycosylation site is a mutation at an N-glycosylation site. In some aspects, the antigen binding polypeptides comprise a VH comprising a mutation at a glycosylation site. In some aspects, the mutation at a glycosylation site is a mutation at an N-glycosylation site. In some aspects, the mutation at an N-glycosylation site is at amino acid N62, or equivalent thereof, of the VH region or equivalent thereof. In some aspects, the mutation at an N-glycosylation site at amino acid N62 is N62Q or N62S, or equivalent thereof.

[5311] In some aspects, the antigen binding polypeptides disclosed herein, comprise one or more optional linkers. The one or more optional linkers are indicated herein as Ln, wherein n is an integer, and the integer next to each L indicates each L comprised in the antigen binding polypeptides disclosed herein. For example, if an antigen binding polypeptide disclosed herein comprises two linkers, the first linker from N-terminus to C-terminus is herein indicated as L1, and the second linker from N-terminus to C-terminus is herein indicated as L2. In some aspects, any one of the optional linkers each independently have a length of from 0 amino acids to about 50 amino acids. In some aspects, any one of the optional linkers each independently have a length of from 5 amino acids to about 40 amino acids.

[5312] In some aspects, any one of the optional linkers are non-immunogenic. In some aspects, any one of the optional linkers do not contain a consensus T cell epitope.

[5313] In some aspects, any of Ln comprises an amino acid sequence of G or A, or an amino acid sequence at least 65%, at least 70%, at least 75%, at least 80%, at least 85%, at least 90%, at least 95%, at least 99%, or 100% identical to amino acid sequence GSS or ASG, or an amino acid sequence at least 65%, at least 70%, at least 75%, at least 80%, at least 85%, at least 90%, at least 95%, at least 99%, or 100% identical to any one of SEQ ID NOs: 333-373 or 967-971. In some aspects, Ln comprises an amino acid sequence at least 65%, at least 70%, at least 75%, at least 80%, at least 85%, at least 90%, at least 95%, at least 99%, or 100% identical to any one of SEQ ID NOs: 333-345 or 967-971.

[5314] In some aspects, the antigen binding polypeptides provided herein have a structure, from amino-terminus to carboxy-terminus, represented by:
[5315] VL1-L1-VL2-L2-CH1; or
[5316] VL2-L1-VL1-L2-CH1;
[5317] wherein:
[5318] VL1 is a first immunoglobulin light chain variable region that specifically binds to (i) a tumor-associated antigen (TAA), (ii) an infectious disease antigen that is not a sarbecovirus antigen, or (iii) an other-pathology antigen;
[5319] VL2 is a second immunoglobulin light chain variable region that specifically binds to (i) a tumor-associated antigen (TAA), (ii) an infectious disease antigen that is not a sarbecovirus antigen, or (iii) an other-pathology antigen;
[5320] CH1 is an immunoglobulin heavy chain constant region 1; and
[5321] L1-L2 are optional amino acid linkers.

[5322] In any aspect shown herein as a structure from amino terminus to carboxy terminus, and with binding pairs selected from VL and/or VH or other structural regions such as CH1, CL, CH2, CH3, when shown without a specific linker such as L1, L2, etc., such linkers are optionally present in such structures between each designated subsequence VL, VH, etc.

[5323] In some aspects, the TAA is selected from the group consisting of 5′-nucleotidase, 5T4, A2AR, activin receptor-like kinase 1, adenocarcinoma antigen, ADRB3, AFP, AKAP-4, ALK, alpha-fetoprotein, androgen receptor, angiopoietin 2, AOC3, APRIL, ATPDase, AXL, B7-4, B7DC, B7H1, B7H2, B7H3, B7H4, B7H5, B7H6, B7H7, B7RP1, BAFF, BAFFR, BCMA, bcr-abl, BlyS, BORIS, BST2, BTK, BTLA, C3, C5, C5a, C5a receptor, CA-125, CAIX, CanAg (a glycoform of MUC1), CCL11, CCL15, CCL17, CCL19, CCL2, CCL20, CCL21, CCL25, CCL3, CCL4, CCL5, CCL7, CCL8, CCR2, CCR3, CCR4, CCR5, CD11, CD11a, CD123, CD125, CD133, CD134, CD137, CD137L, CD147, CD15, CD154, CD160, CD16A, CD171, CD179a, CD18, CD184, CD19, CD2, CD20, CD200, CD22, CD221, CD23, CD24, CD242, CD25, CD27, CD272, CD276, CD278, CD279, CD28, CD3, CD30, CD300LF, CD319, CD33, CD37, CD38, CD39, CD38, CD4, CD40, CD40L, CD41, CD44v6, CD45, CD47, CD49B, CD5, CD51, CD52, CD54, CD56, CD6, CD62L, CD7, CD70, CD72, CD74, CD79a, CD79b, CD80, CD86, CD97, CEA, CEACAM5, claudin 18 isoform 2, CLDN6, CLEC12A, CLEC9), CLEC91, CLL-1, cMet, coagulation factor III, CRTH2, CS1, CSF-1, CSFIR, CSF-2, CSF-3, CTGF, CTLA4, CXCL1, CXCL12, CXCL13, CXCL2, CXCL4, CXCR3, CXORF61, CyclinB1, CYP1B1, dendritic cell-associated lectin 2, DLL3, DLL4, DNGR-1, DR5, E7, E-cadherin, EGFL7, EGFR, EGFRVIII, ELF2M, EMR2, endoglin, ENTPD1, EpCAM, EphA2, EPHA3, ephrin receptor A3, EphrinB2, episialin, ERBB2 (Her2/neu), ERBB3, ERG (TMPRSS2-ETS fusion gene), ETV6-AML, FAP, FCAR, FCER1, FCER1A, FCER2, FCRL5, FGF 23, FGFR, FGFR2, fibronectin extra domain-B, FLAP, FLT3, folate hydrolase, folate receptor 1, folate receptor alpha, folate receptor beta, FOLH1, Fos-relatedantigen1, Frizzled receptor, Fucosyl GM1, GD2, GD3, gelatinase B, Gi24, GITR, GITRL, GloboH, Glutamate carboxypeptidase II, glypican 3, GM3, GP100, GPC1, GPC2, GPC3, gplOO, GPNMB, GPR20, GPR5, GPRC5D, growth differentiation factor 8, GUCY2C, HAVCR1, HER1, HER2, HER3, HGF, HGFR, HHLA2, histone complex, HLA-DR, HMGB1, HMWMAA, HPVE6, hTERT, human telomerase reverse transcriptase, HVEM, ICAM-1, ICOS, ICOSL, IDO, IFNa, IgE, IGF-1, IGF1R, IGF-2, IGF-I receptor, IGLL1, IL1, IL10, IL12, IL13, IL13Ra2, IL-13Ra2, IL13Ra1, IL15, IL17, IL-17A, IL-17AF, IL-17F, IL17Rb, IL18, IL1B, IL1F10, IL-1a, IL-1B, IL2, IL-20, IL22, IL23, IL-23A, IL25, IL2Rbeta, IL-3 receptor, IL-31 receptor A, IL33, IL35, IL4, IL4Ra, IL5, IL5R, IL6, IL7, IL7Ra, IL8, IL9, IL9R, IL1A, IL-llRa, integrin α4, integrin α4 β7, integrin α5β1, integrin αIIbβ3, integrin αvβ3, integrin β7, interleukin 36 receptor IL1RAP, interleukin 36 receptor IL1RL2, intestinal carboxy lesterase, ITGB4, ITK, KIR, KIR2D, KIT, LAG3, LAGE-1a, LAIR1, LAMP1, LCK, legumain, leptin. LewisY, LILRA2, LIV-1, LMP2, LOXL2, LPFS2, LRRC15, LY6K, LY75, LYPD3, MAD-CT-1, MAD-CT-2, MAGEA1, MAGE-A1, MCAM, MCP-1. MelanA/MART1, mesothelin, MHC classII, MIF, ML-IAP, MS4A1, MST1R (RON), MUC1, MUC-1, MUC16, MUC-16, MUC5AC, muthsp70)-2, MYCN, NA17, NCA-90) granulocyte antigen, NCAM, NCR3LG1, nectin-4, NGNA ganglioside, NKG2A, NKG2D, NKp46, Notch 1, Notch receptor, NRP1, NTPDase-1, NY-BR-1, NY-ESO-1, o-acetyl-GD2, OR51E2, OX40), OX40L, OY-TES1, p53, p53mutant, PANX3, PAP, PAX3, PAX5, PCDC1, PCDP1, PCTA-1/Galectin8, PD-1, PDGFRA, PDGFR-beta, PD-L1, PD-L2, phosphate-sodium co-transporter, phosphatidylserine, PLAC1, polysialicacid, PROM1, prostase, prostein, PRSS21, PSCA, PSMA, PTK7, RAGE-1, RANKL. Ras mutant, rhIL1O, RhoC, root plate-specific spondin 3, ROR1, ROR2, RTN4, RU1, RU2, S152, sarcoma translocation breakpoints, SART3, scatter factor receptor kinase, SDC1, SIRPalpha, SISP1, SLAMF7, SLC, sLc, SLITRK6, spermprotein17, SPG64, sphingosine-1-phosphate, SSEA-4, SSX2, ST2, STEAP1, STEAP2, surviving and telomerase, Syk kinase, T14, TACI, TAG72, TARP, T-cell receptor, TCRβ, TDO, TEMI/CD248, TEM7R, tenascin C, TGFBETA, TGF-β1, TGF-β2, TGS5, the extracellular portion of the APRIL protein. Tie2, TIGIT, TIM3, TLR, TLR2, TLR4, TLR5, TLR9, TMEF1. TnAg, TNF, TNFa, TNFR superfamily member 4, TNFRSF7, Tp55, TRAC, TRAIL-R1, TRAIL-R2, TRAP, TREM1, TROP2, TRP-2, TSHR, TSLP, TSLPR, tumor antigen CTAA16.88, TWEAK, tyrosinase, TYRPI glycoprotein 75, UPK2, VAP-1, VEGF, VEGFA, VEGFR-1, VEGFR2, vimentin, VISTA, Vstm3, WT1, WUCAM, and XAGE1.

[5324] In some aspects, the antigen binding polypeptides provided herein comprise a VL1 comprising a light chain complementarity determining region 1 (LCDR1), LCDR2, and/or LCDR3 of an antibody selected from the group consisting of losatuxizumab vedotin, utomilumab, urelumab, oleclumab, naptumomab estafenatox, ascrinvacumab, pintumomab, tacatuzumab tetraxetan, nesvacumab, vanucizumab, timolumab, vapaliximab, vepalimomab, enapotamab vedotin, ianalumab, belimumab, tabalumab, tibulizumab, belantamab mafodotin, teclistamab, teclistamab, detumomab, nacolomab tafenatox, eculizumab, lendalizumab, pexelizumab, pozelimab, ravulizumab, tesidolumab, vilobclimab, abagovomab, igovomab, oregovomab, sofituzumab vedotin, cantuzumab mertansine, cantuzuma bravtansine, girentuximab, altumomab pentetate, arcitumomab, besilesomab, bertilimumab, plozalizumab, mogamulizumab, leronlimab, PRO140, rovelizumab, rovelizumab, talacotuzumab, benralizumab, tavolimab, vonlerolizumab, gavilimomab, ziralimumab, fanolesomab, ipilimumab, ruplizumab, toralizumab, dapirolizumab pegol, toralizumab, dapirolizumab pegol, ruplizumab, blinatumomab, inebilizumab, loncastuximab tesirine, SGN-CD19A, tafasitamab, taplitumomab paptox, XMAB-5574, Budoprutug, Obexelimab, duvortuxizumab, englumafusp alfa, Emfizatamab, zeripatamig, siplizumab, blontuvetmab, FBTA05, ibritumomab tiuxctan, obinutuzumab, ocaratuzumab, ocrelizumab, ofatumumab, rituximab, tositumomab, ublituximab, veltuzumab, divozilimab, eramkafusp alfa, ripertamab, zuberitamab, glofitamab, nofetumomab merpentan, samalizumab, imvotamab, odronextamab, plamotamab, bectumomab, inotuzumab ozogamicin, moxctumomab pasudotox, pinatuzumab vedotin, gomiliximab, lumiliximab, inolimomab, inolimomab, daclizumab, camidanluma btesirine, basiliximab, varlilumab, omburtamab, enoblituzumab, vopratelimab, lulizumabpegol, TGN1412, muromonab-CD3, otelixizumab, teplizumab, visilizumab, epcoritamab, epcoritamab, brentuximab vedotin, iratumumab, azintuxizumab vedotin, gemtuzumab ozogamicin, lintuzumab, vadastuximab talirine, naratuximab emtansine, otlertuzumab, lilotomab satetraxctan, tetulomab, daratumumab, isatuximab, foralumab, mosunetuzumab, mosunetuzumab, cedelizumab, ibalizumab, keliximab, priliximab, tregalizumab, zanolimumab, blesclumab, iscalimab, lucatumumab, ravagalimab, sclicrelumab, tencliximab, vanalimab, abciximab, bivatuzumab, iomab-B, telimomab aritox, zolimomab aritox, abituzumab, intetumumab, alemtuzumab, tamtuvetmab, lorvotuzumab mertansine, itolizumab, cusatuzumab, vorsetuzumab mafodotin, milatuzumab, iladatuzumab vedotin, polatuzumab vedotin, galiximab, cibisatamab, zolbetuximab, naxitamab, tisotumab vedotin, olendalizumab, pamrevlumab, lacnotuzumab, cabiralizumab, emactuzumab, axatilimab, gimsilumab, lenzilumab, namilumab, tremelimumab, ulocuplumab, tepoditamab, rovalpituzumab tesirine, tarlatamab, demcizumab, navicixizumab, drozitumab, parsatuzumab, depatuxizumab mafodotin, modotuximab, carotuximab, adecatumumab, adecatumumab, oportuzumab monatox, solitomab, tucotuzumab celmoleukin, edrecolomab, catumaxomab, ifabotuzumab, fibatuzumab, zalutumumab, panitumumab, cetuximab, futuximab, imgatuzumab, laprituximab emtansine, matuzumab, necitumumab, nimotuzumab, tomuzotuximab, amivantamab, amivantamab, epitumomab cituxetan, sontuzumab, duligotuzumab, elgemtumab, lumretuzumab, patritumab, scribantumab, zenocutuzumab, sibrotuzumab, burosumab, aprutumab ixadotin, radretumab, pasotuxizumab, farletuzumab, mirvetuximab soravtansine, vantictumab, TRBS07, 3F8, dinutuximab, dinutuximab beta, ecromeximab, mitumomab, andecaliximab, capromab, codrituzumab, glembatumumab vedotin, talquetamab, talquetamab, trevogrumab, indusatumab vedotin, ficlatuzumab, rilotumumab, zatuximab, pentuzimab, pentuzimab, margetuximab, timigutuzumab, trastuzumab, trastuzumab duocarmazine, trastuzumab emtansine, gancotamab, pertuzumab, ertumaxomab, emibetuzumab, telisotuzumab, telisotuzumab vedotin, derlotuximab biotin, apolizumab, onartuzumab, bersanlimab, enlimomabpegol, rontalizumab, sifalimumab, talizumab, ganitumab, istiratumab, robatumumab, teprotumumab, figitumumab, ganitumab, istiratumab, robatumumab, teprotumumab, cixutumumab, dalotuzumab, xentuzumab, dusigitumab, canakinumab, ustekinumab, ustekinumab, ustekinumab, briakinumab, briakinumab, abrezekimab, lebrikizumab, romilkimab, TNX-650, tralokinumab, anrukinzumab, brodalumab, ixekizumab, netakimab, perakizumab, secukinumab, vunakizumab, afasevikumab, afasevikumab, bimekizumab, bimekizumab, remtolumab, bermekimab, lutikizumab, lutikizumab, gevokizumab, cergutuzumab amunaleukin, fletikumab, fezakinumab, brazikumab, guselkumab, mirikizumab, tildrakizumab, risankizumab, flotetuzumab, nemolizumab, pascolizumab, dupilumab, mepolizumab, reslizumab, clazakizumab, elsilimomab, olokizumab, sarilumab, siltuximab, sirukumab, vobarilizumab, tocilizumab, SA237, satralizumab, enokizumab, prezalizumab, natalizumab, abrilumab, abrilumab, vedolizumab, volociximab, tadocizumab, etaracizumab, etrolizumab, spesolimab, vatelizumab, erlizumab, lirilumab, relatlimab, cBR96-doxorubicinimmunoconjugate, odulimomab, efalizumab, ladiratuzumab vedotin, simtuzumab, samrotamab vedotin, aselizumab, lupartumab amadotin, imalumab, carlumab, imaprelimab, amatuximab, amatuximab, anetumab ravtansine, narnatumab, clivatuzumab tetraxetan, pemtumomab, gatipotuzumab, ensituximab, lemalesomab, sulesomab, enfortumab vedotin, racotumomab, monalizumab, brontictuzumab, tarextumab, vesencumab, oxelumab, gilvetmab, tislelizumab, dostarlimab, BCD-100, nivolumab, PDR001, pembrolizumab, pidilizumab, retifanlimab, spartalizumab, sintilimab, cemiplimab, olaratumab, tovetumab, rinucumab, atezolizumab, avelumab, durvalumab, lifastuzumab vedotin, bavituximab, acapatamab, capromab, rosopatamab, nezastomig, pasotuxizumab, pelgifatamab, voxalatamab, cofetuzumab pelidotin, denosumab, rosmantuzumab, cirmtuzumab, atinumab, indatuximab ravtansine, elotuzumab, sirtratumab vedotin, sonepcizumab, vandortuzumab vedotin, minretumomab, satumomab pendetide, maslimomab, ontuxizumab, tenatumomab, fresolimumab, metelimumab, lerdelimumab, tezepelumab, etigilimab, tiragotumab, placulumab, prezalumab, infliximab, nerelimomab, ozoralizumab, adalimumab, afelimomab, certolizumab pegol, golimumab, mapatumumab, conatumumab, lexatumumab, tigatuzumab, sacituzumab govitecan, votumumab, pogalizumab, letolizumab, pankomab, anatumomab mafenatox, enavatuzumab, flanvotumab, brolucizumab, ranibizumab, varisacumab, bevacizumab, faricimab, icrucumab, alacizumab pegol, ramucirumab, pritumumab, and onvatilimab.

[5325] In some aspects, the antigen binding polypeptides provided herein comprise a VL2 comprising a light chain complementarity determining region 1 (LCDR1), LCDR2, and/or LCDR3 of an antibody selected from the group consisting of losatuxizumab vedotin, utomilumab, urelumab, oleclumab, naptumomab estafenatox, ascrinvacumab, pintumomab, tacatuzumab tetraxetan, nesvacumab, vanucizumab, timolumab, vapaliximab, vepalimomab, enapotamab vedotin, ianalumab, belimumab, tabalumab, tibulizumab, belantamab mafodotin, teclistamab, teclistamab, detumomab, nacolomab tafenatox, eculizumab, lendalizumab, pexelizumab, pozelimab, ravulizumab, tesidolumab, vilobelimab, abagovomab, igovomab, oregovomab, sofituzumab vedotin, cantuzumab mertansine, cantuzuma bravtansine, girentuximab, altumomab pentetate, arcitumomab, besilesomab, bertilimumab, plozalizumab, mogamulizumab, leronlimab, PRO140, rovelizumab, rovelizumab, talacotuzumab, benralizumab, tavolimab, vonlerolizumab, gavilimomab, ziralimumab, fanolesomab, ipilimumab, ruplizumab, toralizumab, dapirolizumab pegol, toralizumab, dapirolizumab pegol, ruplizumab, blinatumomab, inebilizumab, loncastuximab tesirine, SGN-CD19A, tafasitamab, taplitumomab paptox, XMAB-5574, Budoprutug, Obexelimab, duvortuxizumab, englumafusp alfa, Emfizatamab, zeripatamig, siplizumab, blontuvetmab, FBTA05, ibritumomab tiuxetan, obinutuzumab, ocaratuzumab, ocrelizumab, ofatumumab, rituximab, tositumomab, ublituximab, veltuzumab, divozilimab, eramkafusp alfa, ripertamab, zuberitamab, glofitamab, nofctumomab merpentan, samalizumab, imvotamab, odronextamab, plamotamab, bectumomab, inotuzumab ozogamicin, moxctumomab pasudotox, pinatuzumab vedotin, gomiliximab, lumiliximab, inolimomab, inolimomab, daclizumab, camidanluma btesirine, basiliximab, varlilumab, omburtamab, enoblituzumab, vopratelimab, lulizumabpegol, TGN1412, muromonab-CD3, otelixizumab, teplizumab, visilizumab, epcoritamab, epcoritamab, brentuximab vedotin, iratumumab, azintuxizumab vedotin, gemtuzumab ozogamicin, lintuzumab, vadastuximab talirine, naratuximab emtansine, otlertuzumab, lilotomab satetraxetan, tetulomab, daratumumab, isatuximab, foralumab, mosunetuzumab, mosunetuzumab, cedelizumab, ibalizumab, keliximab, priliximab, tregalizumab, zanolimumab, bleselumab, iscalimab, lucatumumab, ravagalimab, selicrelumab, tencliximab, vanalimab, abciximab, bivatuzumab, iomab-B, telimomab aritox, zolimomab aritox, abituzumab, intetumumab, alemtuzumab, tamtuvetmab, lorvotuzumab mertansine, itolizumab, cusatuzumab, vorsetuzumab mafodotin, milatuzumab, iladatuzumab vedotin, polatuzumab vedotin, galiximab, cibisatamab, zolbetuximab, naxitamab, tisotumab vedotin, olendalizumab, pamrevlumab, lacnotuzumab, cabiralizumab, emactuzumab, axatilimab, gimsilumab, lenzilumab, namilumab, tremelimumab, ulocuplumab, tepoditamab, rovalpituzumab tesirine, tarlatamab, demcizumab, navicixizumab, drozitumab, parsatuzumab, depatuxizumab mafodotin, modotuximab, carotuximab, adecatumumab, adecatumumab, oportuzumab monatox, solitomab, tucotuzumab celmoleukin, edrecolomab, catumaxomab, ifabotuzumab, fibatuzumab, zalutumumab, panitumumab, cetuximab, futuximab, imgatuzumab, laprituximab emtansine, matuzumab, necitumumab, nimotuzumab, tomuzotuximab, amivantamab, amivantamab, epitumomab cituxetan, sontuzumab, duligotuzumab, elgemtumab, lumretuzumab, patritumab, scribantumab, zenocutuzumab, sibrotuzumab, burosumab, aprutumab ixadotin, radretumab, pasotuxizumab, farletuzumab, mirvetuximab soravtansine, vantictumab, TRBS07, 3F8, dinutuximab, dinutuximab beta, ecromeximab, mitumomab, andecaliximab, capromab, codrituzumab, glembatumumab vedotin, talquetamab, talquetamab, trevogrumab, indusatumab vedotin, ficlatuzumab, rilotumumab, zatuximab, pentuzimab, pentuzimab, margetuximab, timigutuzumab, trastuzumab, trastuzumab duocarmazine, trastuzumab emtansine, gancotamab, pertuzumab, ertumaxomab, emibetuzumab, telisotuzumab, telisotuzumab vedotin, derlotuximab biotin, apolizumab, onartuzumab, bersanlimab, enlimomabpegol, rontalizumab, sifalimumab, talizumab, ganitumab, istiratumab, robatumumab, teprotumumab, figitumumab, ganitumab, istiratumab, robatumumab, teprotumumab, cixutumumab, dalotuzumab, xentuzumab, dusigitumab, canakinumab, ustekinumab, ustekinumab, ustekinumab, briakinumab, briakinumab, abrezekimab, lebrikizumab, romilkimab, TNX-650, tralokinumab, anrukinzumab, brodalumab, ixekizumab, netakimab, perakizumab, secukinumab, vunakizumab, afasevikumab, afasevikumab, bimekizumab, bimekizumab, remtolumab, bermekimab, lutikizumab, lutikizumab, gevokizumab, cergutuzumab amunaleukin, fletikumab, fezakinumab, brazikumab, guselkumab, mirikizumab, tildrakizumab, risankizumab, flotetuzumab, nemolizumab, pascolizumab, dupilumab, mepolizumab, reslizumab, clazakizumab, elsilimomab, olokizumab, sarilumab, siltuximab, sirukumab, vobarilizumab, tocilizumab, SA237, satralizumab, enokizumab, prezalizumab, natalizumab, abrilumab, abrilumab, vedolizumab, volociximab, tadocizumab, etaracizumab, etrolizumab, spesolimab, vatelizumab, erlizumab, lirilumab, relatlimab, cBR96-doxorubicinimmunoconjugate, odulimomab, efalizumab, ladiratuzumab vedotin, simtuzumab, samrotamab vedotin, aselizumab, lupartumab amadotin, imalumab, carlumab, imaprelimab, amatuximab, amatuximab, anetumab ravtansine, narnatumab, clivatuzumab tetraxetan, pemtumomab, gatipotuzumab, ensituximab, lemalesomab, sulesomab, enfortumab vedotin, racotumomab, monalizumab, brontictuzumab, tarextumab, vesencumab, oxelumab, gilvetmab, tislelizumab, dostarlimab, BCD-100, nivolumab, PDR001, pembrolizumab, pidilizumab, retifanlimab, spartalizumab, sintilimab, cemiplimab, olaratumab, tovetumab, rinucumab, atezolizumab, avelumab, durvalumab, lifastuzumab vedotin, bavituximab, acapatamab, capromab, rosopatamab, nezastomig, pasotuxizumab, pelgifatamab, voxalatamab, cofetuzumab pelidotin, denosumab, rosmantuzumab, cirmtuzumab, atinumab, indatuximab ravtansine, elotuzumab, sirtratumab vedotin, sonepcizumab, vandortuzumab vedotin, minretumomab, satumomab pendetide, maslimomab, ontuxizumab, tenatumomab, fresolimumab, metelimumab, lerdelimumab, tezepelumab, etigilimab, tiragotumab, placulumab, prezalumab, infliximab, nerelimomab, ozoralizumab, adalimumab, afelimomab, certolizumab pegol, golimumab, mapatumumab, conatumumab, lexatumumab, tigatuzumab, sacituzumab govitecan, votumumab, pogalizumab, letolizumab, pankomab, anatumomab mafenatox, enavatuzumab, flanvotumab, brolucizumab, ranibizumab, varisacumab, bevacizumab, faricimab, icrucumab, alacizumab pegol, ramucirumab, pritumumab, and onvatilimab.

[5326] In some aspects, the antigen binding polypeptides provided herein comprise a VL1 comprising a VL of an antibody selected from the group consisting of losatuxizumab vedotin, utomilumab, urelumab, oleclumab, naptumomab estafenatox, ascrinvacumab, pintumomab, tacatuzumab tetraxetan, nesvacumab, vanucizumab, timolumab, vapaliximab, vepalimomab, enapotamab vedotin, ianalumab, belimumab, tabalumab, tibulizumab, belantamab mafodotin, teclistamab, teclistamab, detumomab, nacolomab tafenatox, eculizumab, lendalizumab, pexelizumab, pozelimab, ravulizumab, tesidolumab, vilobelimab, abagovomab, igovomab, oregovomab, sofituzumab vedotin, cantuzumab mertansine, cantuzuma bravtansine, girentuximab, altumomab pentetate, arcitumomab, besilesomab, bertilimumab, plozalizumab, mogamulizumab, leronlimab, PRO140, rovelizumab, rovelizumab, talacotuzumab, benralizumab, tavolimab, vonlerolizumab, gavilimomab, ziralimumab, fanolesomab, ipilimumab, ruplizumab, toralizumab, dapirolizumab pegol, toralizumab, dapirolizumab pegol, ruplizumab, blinatumomab, inebilizumab, loncastuximab tesirine, SGN-CD19A, tafasitamab, taplitumomab paptox, XMAB-5574, Budoprutug, Obexelimab, duvortuxizumab, englumafusp alfa, Emfizatamab, zeripatamig, siplizumab, blontuvetmab, FBTA05, ibritumomab tiuxetan, obinutuzumab, ocaratuzumab, ocrelizumab, ofatumumab, rituximab, tositumomab, ublituximab, veltuzumab, divozilimab, eramkafusp alfa, ripertamab, zuberitamab, glofitamab, nofctumomab merpentan, samalizumab, imvotamab, odronextamab, plamotamab, bectumomab, inotuzumab ozogamicin, moxctumomab pasudotox, pinatuzumab vedotin, gomiliximab, lumiliximab, inolimomab, inolimomab, daclizumab, camidanluma btesirine, basiliximab, varlilumab, omburtamab, enoblituzumab, vopratelimab, lulizumabpegol, TGN1412, muromonab-CD3, otelixizumab, teplizumab, visilizumab, epcoritamab, epcoritamab, brentuximab vedotin, iratumumab, azintuxizumab vedotin, gemtuzumab ozogamicin, lintuzumab, vadastuximab talirine, naratuximab emtansine, otlertuzumab, lilotomab satetraxetan, tetulomab, daratumumab, isatuximab, foralumab, mosunctuzumab, mosunetuzumab, cedelizumab, ibalizumab, keliximab, priliximab, tregalizumab, zanolimumab, blesclumab, iscalimab, lucatumumab, ravagalimab, selicrelumab, tencliximab, vanalimab, abciximab, bivatuzumab, iomab-B, telimomab aritox, zolimomab aritox, abituzumab, intetumumab, alemtuzumab, tamtuvetmab, lorvotuzumab mertansine, itolizumab, cusatuzumab, vorsetuzumab mafodotin, milatuzumab, iladatuzumab vedotin, polatuzumab vedotin, galiximab, cibisatamab, zolbetuximab, naxitamab, tisotumab vedotin, olendalizumab, pamrevlumab, lacnotuzumab, cabiralizumab, emactuzumab, axatilimab, gimsilumab, lenzilumab, namilumab, tremelimumab, ulocuplumab, tepoditamab, rovalpituzumab tesirine, tarlatamab, demcizumab, navicixizumab, drozitumab, parsatuzumab, depatuxizumab mafodotin, modotuximab, carotuximab, adccatumumab, adecatumumab, oportuzumab monatox, solitomab, tucotuzumab celmoleukin, edrecolomab, catumaxomab, ifabotuzumab, fibatuzumab, zalutumumab, panitumumab, cetuximab, futuximab, imgatuzumab, laprituximab emtansine, matuzumab, necitumumab, nimotuzumab, tomuzotuximab, amivantamab, amivantamab, epitumomab cituxetan, sontuzumab, duligotuzumab, elgemtumab, lumretuzumab, patritumab, seribantumab, zenocutuzumab, sibrotuzumab, burosumab, aprutumab ixadotin, radretumab, pasotuxizumab, farletuzumab, mirvetuximab soravtansine, vantictumab, TRBS07, 3F8, dinutuximab, dinutuximab beta, ecromeximab, mitumomab, andecaliximab, capromab, codrituzumab, glembatumumab vedotin, talquetamab, talquetamab, trevogrumab, indusatumab vedotin, ficlatuzumab, rilotumumab, zatuximab, pentuzimab, pentuzimab, margetuximab, timigutuzumab, trastuzumab, trastuzumab duocarmazine, trastuzumab emtansine, gancotamab, pertuzumab, ertumaxomab, emibetuzumab, telisotuzumab, telisotuzumab vedotin, derlotuximab biotin, apolizumab, onartuzumab, bersanlimab, enlimomabpegol, rontalizumab, sifalimumab, talizumab, ganitumab, istiratumab, robatumumab, teprotumumab, figitumumab, ganitumab, istiratumab, robatumumab, teprotumumab, cixutumumab, dalotuzumab, xentuzumab, dusigitumab, canakinumab, ustekinumab, ustekinumab, ustekinumab, briakinumab, briakinumab, abrezekimab, lebrikizumab, romilkimab, TNX-650, tralokinumab, anrukinzumab, brodalumab, ixckizumab, netakimab, perakizumab, secukinumab, vunakizumab, afasevikumab, afasevikumab, bimekizumab, bimekizumab, remtolumab, bermckimab, lutikizumab, lutikizumab, gevokizumab, cergutuzumab amunaleukin, fletikumab, fezakinumab, brazikumab, guselkumab, mirikizumab, tildrakizumab, risankizumab, flotetuzumab, nemolizumab, pascolizumab, dupilumab, mepolizumab, reslizumab, clazakizumab, elsilimomab, olokizumab, sarilumab, siltuximab, sirukumab, vobarilizumab, tocilizumab, SA237, satralizumab, enokizumab, prezalizumab, natalizumab, abrilumab, abrilumab, vedolizumab, volociximab, tadocizumab, etaracizumab, ctrolizumab, spesolimab, vatelizumab, erlizumab, lirilumab, relatlimab, cBR96-doxorubicinimmunoconjugate, odulimomab, efalizumab, ladiratuzumab vedotin, simtuzumab, samrotamab vedotin, aselizumab, lupartumab amadotin, imalumab, carlumab, imaprelimab, amatuximab, amatuximab, anetumab ravtansine, narnatumab, clivatuzumab tetraxetan, pemtumomab, gatipotuzumab, ensituximab, lemalesomab, sulcsomab, enfortumab vedotin, racotumomab, monalizumab, brontictuzumab, tarextumab, vesencumab, oxelumab, gilvetmab, tislelizumab, dostarlimab, BCD-100, nivolumab, PDR001, pembrolizumab, pidilizumab, retifanlimab, spartalizumab, sintilimab, cemiplimab, olaratumab, tovetumab, rinucumab, atezolizumab, avelumab, durvalumab, lifastuzumab vedotin, bavituximab, acapatamab, capromab, rosopatamab, nezastomig, pasotuxizumab, pelgifatamab, voxalatamab, cofetuzumab pelidotin, denosumab, rosmantuzumab, cirmtuzumab, atinumab, indatuximab ravtansine, elotuzumab, sirtratumab vedotin, sonepcizumab, vandortuzumab vedotin, minretumomab, satumomab pendetide, maslimomab, ontuxizumab, tenatumomab, fresolimumab, metelimumab, lerdelimumab, tezepelumab, etigilimab, tiragotumab, placulumab, prezalumab, infliximab, nerelimomab, ozoralizumab, adalimumab, afclimomab, certolizumab pegol, golimumab, mapatumumab, conatumumab, lexatumumab, tigatuzumab, sacituzumab govitecan, votumumab, pogalizumab, letolizumab, pankomab, anatumomab mafenatox, enavatuzumab, flanvotumab, brolucizumab, ranibizumab, varisacumab, bevacizumab, faricimab, icrucumab, alacizumab pegol, ramucirumab, pritumumab, and onvatilimab.

[5327] In some aspects, the antigen binding polypeptides provided herein comprise a VL2 comprising a VL of an antibody selected from the group consisting of losatuxizumab vedotin, utomilumab, urclumab, oleclumab, naptumomab estafenatox, ascrinvacumab, pintumomab, tacatuzumab tetraxetan, nesvacumab, vanucizumab, timolumab, vapaliximab, vepalimomab, enapotamab vedotin, ianalumab, belimumab, tabalumab, tibulizumab, belantamab mafodotin, teclistamab, teclistamab, detumomab, nacolomab tafenatox, eculizumab, lendalizumab, pexelizumab, pozelimab, ravulizumab, tesidolumab, vilobelimab, abagovomab, igovomab, oregovomab, sofituzumab vedotin, cantuzumab mertansine, cantuzuma bravtansine, girentuximab, altumomab pentetate, arcitumomab, besilesomab, bertilimumab, plozalizumab, mogamulizumab, leronlimab, PRO140, rovelizumab, rovelizumab, talacotuzumab, benralizumab, tavolimab, vonlerolizumab, gavilimomab, ziralimumab, fanolesomab, ipilimumab, ruplizumab, toralizumab, dapirolizumab pegol, toralizumab, dapirolizumab pegol, ruplizumab, blinatumomab, inebilizumab, loncastuximab tesirine, SGN-CD19A, tafasitamab, taplitumomab paptox, XMAB-5574, Budoprutug, Obexelimab, duvortuxizumab, englumafusp alfa, Emfizatamab, zeripatamig, siplizumab, blontuvetmab, FBTA05, ibritumomab tiuxetan, obinutuzumab, ocaratuzumab, ocrelizumab, ofatumumab, rituximab, tositumomab, ublituximab, veltuzumab, divozilimab, eramkafusp alfa, ripertamab, zuberitamab, glofitamab, nofetumomab merpentan, samalizumab, imvotamab, odronextamab, plamotamab, bectumomab, inotuzumab ozogamicin, moxetumomab pasudotox, pinatuzumab vedotin, gomiliximab, lumiliximab, inolimomab, inolimomab, daclizumab, camidanluma btesirine, basiliximab, varlilumab, omburtamab, enoblituzumab, vopratelimab, lulizumabpegol, TGN1412, muromonab-CD3, otelixizumab, teplizumab, visilizumab, epcoritamab, epcoritamab, brentuximab vedotin, iratumumab, azintuxizumab vedotin, gemtuzumab ozogamicin, lintuzumab, vadastuximab talirine, naratuximab emtansine, otlertuzumab, lilotomab satetraxetan, tetulomab, daratumumab, isatuximab, foralumab, mosunetuzumab, mosunetuzumab, cedelizumab, ibalizumab, keliximab, priliximab, tregalizumab, zanolimumab, blesclumab, iscalimab, lucatumumab, ravagalimab, selicrelumab, teneliximab, vanalimab, abciximab, bivatuzumab, iomab-B, telimomab aritox, zolimomab aritox, abituzumab, intetumumab, alemtuzumab, tamtuvetmab, lorvotuzumab mertansine, itolizumab, cusatuzumab, vorsetuzumab mafodotin, milatuzumab, iladatuzumab vedotin, polatuzumab vedotin, galiximab, cibisatamab, zolbetuximab, naxitamab, tisotumab vedotin, olendalizumab, pamrevlumab, lacnotuzumab, cabiralizumab, emactuzumab, axatilimab, gimsilumab, lenzilumab, namilumab, tremelimumab, ulocuplumab, tepoditamab, rovalpituzumab tesirine, tarlatamab, demcizumab, navicixizumab, drozitumab, parsatuzumab, depatuxizumab mafodotin, modotuximab, carotuximab, adecatumumab, adecatumumab, oportuzumab monatox, solitomab, tucotuzumab celmoleukin, edrecolomab, catumaxomab, ifabotuzumab, fibatuzumab, zalutumumab, panitumumab, cetuximab, futuximab, imgatuzumab, laprituximab emtansine, matuzumab, necitumumab, nimotuzumab, tomuzotuximab, amivantamab, amivantamab, epitumomab cituxetan, sontuzumab, duligotuzumab, elgemtumab, lumretuzumab, patritumab, seribantumab, zenocutuzumab, sibrotuzumab, burosumab, aprutumab ixadotin, radretumab, pasotuxizumab, farletuzumab, mirvetuximab soravtansine, vantictumab, TRBS07, 3F8, dinutuximab, dinutuximab beta, ecromeximab, mitumomab, andecaliximab, capromab, codrituzumab, glembatumumab vedotin, talquetamab, talquetamab, trevogrumab, indusatumab vedotin, ficlatuzumab, rilotumumab, zatuximab, pentuzimab, pentuzimab, margetuximab, timigutuzumab, trastuzumab, trastuzumab duocarmazine, trastuzumab emtansine, gancotamab, pertuzumab, ertumaxomab, emibetuzumab, telisotuzumab, telisotuzumab vedotin, derlotuximab biotin, apolizumab, onartuzumab, bersanlimab, enlimomabpegol, rontalizumab, sifalimumab, talizumab, ganitumab, istiratumab, robatumumab, teprotumumab, figitumumab, ganitumab, istiratumab, robatumumab, teprotumumab, cixutumumab, dalotuzumab, xentuzumab, dusigitumab, canakinumab, ustekinumab, ustekinumab, ustekinumab, briakinumab, briakinumab, abrezekimab, lebrikizumab, romilkimab, TNX-650, tralokinumab, anrukinzumab, brodalumab, ixckizumab, netakimab, perakizumab, sccukinumab, vunakizumab, afasevikumab, afasevikumab, bimckizumab, bimckizumab, remtolumab, bermckimab, lutikizumab, lutikizumab, gevokizumab, cergutuzumab amunaleukin, fletikumab, fezakinumab, brazikumab, guselkumab, mirikizumab, tildrakizumab, risankizumab, flotetuzumab, nemolizumab, pascolizumab, dupilumab, mepolizumab, reslizumab, clazakizumab, elsilimomab, olokizumab, sarilumab, siltuximab, sirukumab, vobarilizumab, tocilizumab, SA237, satralizumab, enokizumab, prezalizumab, natalizumab, abrilumab, abrilumab, vedolizumab, volociximab, tadocizumab, etaracizumab, etrolizumab, spesolimab, vatelizumab, erlizumab, lirilumab, relatlimab, cBR96-doxorubicinimmunoconjugate, odulimomab, efalizumab, ladiratuzumab vedotin, simtuzumab, samrotamab vedotin, aselizumab, lupartumab amadotin, imalumab, carlumab, imaprelimab, amatuximab, amatuximab, anctumab ravtansine, narnatumab, clivatuzumab tetraxctan, pemtumomab, gatipotuzumab, ensituximab, lemalesomab, sulesomab, enfortumab vedotin, racotumomab, monalizumab, brontictuzumab, tarextumab, vesencumab, oxelumab, gilvetmab, tislelizumab, dostarlimab, BCD-100, nivolumab, PDR001, pembrolizumab, pidilizumab, retifanlimab, spartalizumab, sintilimab, cemiplimab, olaratumab, tovetumab, rinucumab, atezolizumab, avelumab, durvalumab, lifastuzumab vedotin, bavituximab, acapatamab, capromab, rosopatamab, nezastomig, pasotuxizumab, pelgifatamab, voxalatamab, cofetuzumab pelidotin, denosumab, rosmantuzumab, cirmtuzumab, atinumab, indatuximab ravtansine, elotuzumab, sirtratumab vedotin, sonepcizumab, vandortuzumab vedotin, minretumomab, satumomab pendetide, maslimomab, ontuxizumab, tenatumomab, fresolimumab, metelimumab, lerdelimumab, tezepelumab, etigilimab, tiragotumab, placulumab, prezalumab, infliximab, nerelimomab, ozoralizumab, adalimumab, afelimomab, certolizumab pegol, golimumab, mapatumumab, conatumumab, lexatumumab, tigatuzumab, sacituzumab govitecan, votumumab, pogalizumab, letolizumab, pankomab, anatumomab mafenatox, enavatuzumab, flanvotumab, brolucizumab, ranibizumab, varisacumab, bevacizumab, faricimab, icrucumab, alacizumab pegol, ramucirumab, pritumumab, and onvatilimab.

[5328] In some aspects, the antigen binding polypeptides provided herein comprise a VL1 comprising (i) a complementarity determining region (CDR) 1 having an amino acid sequence that is at least 65%, at least 70%, at least 75%, at least 80%, at least 85%, at least 90%, at least 95%, at least 99%, or 100% identical to any one of SEQ ID NOs: 1096, 1103, 1110, 1120, 1127, 1134, 1141, 1148, 1155, 1162, 1169, 1174, 1181, 1188, 1199, 1211, 1221, 1228, 1235, 1247, 1254, 1261, 1266, 1271, 1278, 1285, 1292, 1299, 1306, 1313, 1319, 1326, 1339, 1352, 1359, 1366, 1373, 1382, 1394, 1401, 1408, 1414, 1421, 1428, 1441, 1448, 1455, 1461, 1468, 1475, 1488, 1495, 1508, 1519, 1526, 1531, 1538, 1544, 1556, 1568, 1574, 1581, 1594, 1601, 1608, 1615, 1622, 1629, 1636, 1643, 1650, 1657, 1672, 1679, 1689, 1697, 1708, 1715, 1718, 1723, 1727, 1738, 1743, 1752, 1761, 1763, 1769, 1776, and 1786; (ii) a CDR2 having an amino acid sequence that is at least 65%, at least 70%, at least 75%, at least 80%, at least 85%, at least 90%, at least 95%, at least 99%, or 100% identical to any one of SEQ ID NOs: 1200, 1212, 1680, 1690, 1698, 1709, 1728, 1739, 1744, 1753, 1770, and 1777; or at least 65%, at least 70%, at least 75%, at least 80%, at least 85%, at least 90%, at least 95%, at least 99%, or 100% identical to any one of amino acid sequences AAS, APS, AT, ATS, DAS, DDG, DDS, DT, DTS, DVS, EAS, FTS, GAF, GAN, GAS, GAT, GIS, GKN, GNS, HTS, KVS, LAS, LGS, LVS, NAK, NTN, QMS, RMS, RTS, SAS, TTS, WAS, YAS, YAT, YGS, YRS, and YTS; and (iii) a CDR3 having an amino acid sequence that is at least 65%, at least 70%, at least 75%, at least 80%, at least 85%, at least 90%, at least 95%, at least 99%, or 100% identical to any one of SEQ ID NOs: 1097, 1104, 1111, 1121, 1128, 1135, 1142, 1149, 1156, 1163, 1170, 1175, 1182, 1189, 1195, 1201, 1207, 1213, 1222, 1229, 1236, 2009, 1248, 1255, 1262, 1267, 1272, 1279, 1286, 1293, 1300, 1307, 1320, 1327, 1333, 1340, 1346, 1353, 1360, 1367, 1374, 1383, 1389, 1395, 1402, 1409, 1415, 1422, 1429, 1435, 1442, 1449, 1456, 1462, 1469, 1476, 1482, 1489, 1496, 1502, 1509, 1513, 1520, 1532, 1539, 1545, 1557, 1562, 1569, 1575, 1582, 1588, 1595, 1602, 1609, 1616, 1623, 1630, 1637, 1644, 1651, 1658, 1663, 1673, 1681, 1691, 1699, 1710, 1729, 1735, 1745, 1751, 1754, 1778, 1787, and 1976.

[5329] In some aspects, the antigen binding polypeptides provided herein comprise a VL2 comprising (i) a complementarity determining region (CDR) 1 having an amino acid sequence that is at least 65%, at least 70%, at least 75%, at least 80%, at least 85%, at least 90%, at least 95%, at least 99%, or 100% identical to any one of SEQ ID NOs: 1096, 1103, 1110, 1120, 1127, 1134, 1141, 1148, 1155, 1162, 1169, 1174, 1181, 1188, 1199, 1211, 1221, 1228, 1235, 1247, 1254, 1261, 1266, 1271, 1278, 1285, 1292, 1299, 1306, 1313, 1319, 1326, 1339, 1352, 1359, 1366, 1373, 1382, 1394, 1401, 1408, 1414, 1421, 1428, 1441, 1448, 1455, 1461, 1468, 1475, 1488, 1495, 1508, 1519, 1526, 1531, 1538, 1544, 1556, 1568, 1574, 1581, 1594, 1601, 1608, 1615, 1622, 1629, 1636, 1643, 1650, 1657, 1672, 1679, 1689, 1697, 1708, 1715, 1718, 1723, 1727, 1738, 1743, 1752, 1761, 1763, 1769, 1776, and 1786; (ii) a CDR2 having an amino acid sequence that is at least 65%, at least 70%, at least 75%, at least 80%, at least 85%, at least 90%, at least 95%, at least 99%, or 100% identical to any one of SEQ ID NOs: 1200, 1212, 1680, 1690, 1698, 1709, 1728, 1739, 1744, 1753, 1770, and 1777; or at least 65%, at least 70%, at least 75%, at least 80%, at least 85%, at least 90%, at least 95%, at least 99%, or 100% identical to any one of amino acid sequences AAS, APS, AT, ATS, DAS, DDG, DDS, DT, DTS, DVS, EAS, FTS, GAF, GAN, GAS, GAT, GIS, GKN, GNS, HTS, KVS, LAS, LGS, LVS, NAK, NTN, QMS, RMS, RTS, SAS, TTS, WAS, YAS, YAT, YGS, YRS, and YTS; and (iii) a CDR3 having an amino acid sequence that is at least 65%, at least 70%, at least 75%, at least 80%, at least 85%, at least 90%, at least 95%, at least 99%, or 100% identical to any one of SEQ ID NOs: 1097, 1104, 1111, 1121, 1128, 1135, 1142, 1149, 1156, 1163, 1170, 1175, 1182, 1189, 1195, 1201, 1207, 1213, 1222, 1229, 1236, 2009, 1248, 1255, 1262, 1267, 1272, 1279, 1286, 1293, 1300, 1307, 1320, 1327, 1333, 1340, 1346, 1353, 1360, 1367, 1374, 1383, 1389, 1395, 1402, 1409, 1415, 1422, 1429, 1435, 1442, 1449, 1456, 1462, 1469, 1476, 1482, 1489, 1496, 1502, 1509, 1513, 1520, 1532, 1539, 1545, 1557, 1562, 1569, 1575, 1582, 1588, 1595, 1602, 1609, 1616, 1623, 1630, 1637, 1644, 1651, 1658, 1663, 1673, 1681, 1691, 1699, 1710, 1729, 1735, 1745, 1751, 1754, 1778, 1787, and 1976.

[5330] In some aspects, the antigen binding polypeptides provided herein comprise a VL1 comprising an amino acid sequence that is at least 65%, at least 70%, at least 75%, at least 80%, at least 85%, at least 90%, at least 95%, at least 99%, or 100% identical to any one of SEQ ID NOs: 1098, 1105, 1112, 1122, 1129, 1136, 1143, 1150, 1157, 1164, 1171, 1176, 1183, 1190, 1196, 1202, 1208, 1214, 1219, 1223, 1230, 1237, 1242, 1249, 1256, 1263, 1268, 1273, 1280, 1287, 1294, 1301, 1308, 1314, 1321, 1328, 1334, 1341, 1347, 1354, 1361, 1368, 1375, 1380, 1384, 1390, 1396, 1403, 1410, 1416, 1423, 1430, 1436, 1443, 1450, 1457, 1463, 1470, 1477, 1483, 1490, 1497, 1503, 1510, 1514, 1521, 1527, 1533, 1540, 1546, 1551, 1558, 1563, 1570, 1576, 1583, 1589, 1596, 1603, 1610, 1617, 1624, 1631, 1638, 1645, 1652, 1659, 1664, 1669, 1674, 1682, 1692, 1700, 1711, 1721, 1724, 1730, 1740, 1746, 1755, 1764, 1766, 1771, 1779, 1784, and 1788.

[5331] In some aspects, the antigen binding polypeptides provided herein comprise a VL2 comprising an amino acid sequence that is at least 65%, at least 70%, at least 75%, at least 80%, at least 85%, at least 90%, at least 95%, at least 99%, or 100% identical to any one of SEQ ID NOs: 1098, 1105, 1112, 1122, 1129, 1136, 1143, 1150, 1157, 1164, 1171, 1176, 1183, 1190, 1196, 1202, 1208, 1214, 1219, 1223, 1230, 1237, 1242, 1249, 1256, 1263, 1268, 1273, 1280, 1287, 1294, 1301, 1308, 1314, 1321, 1328, 1334, 1341, 1347, 1354, 1361, 1368, 1375, 1380, 1384, 1390, 1396, 1403, 1410, 1416, 1423, 1430, 1436, 1443, 1450, 1457, 1463, 1470, 1477, 1483, 1490, 1497, 1503, 1510, 1514, 1521, 1527, 1533, 1540, 1546, 1551, 1558, 1563, 1570, 1576, 1583, 1589, 1596, 1603, 1610, 1617, 1624, 1631, 1638, 1645, 1652, 1659, 1664, 1669, 1674, 1682, 1692, 1700, 1711, 1721, 1724, 1730, 1740, 1746, 1755, 1764, 1766, 1771, 1779, 1784, and 1788.

[5332] In some aspects, the infectious disease antigen that is not a sarbecovirus antigen is:
[5333] (i) a viral antigen elected from the group consisting of an influenza virus (A, B, C) antigen (e.g., influenza virus envelope proteins, for example, influenza virus neuraminidase (NA, N1, N2, N3, N4, N5, N6, N7, N8, N9, N10, N11), influenza virus hemagglutinin (H1, H2, H3, H4, H5, H6, H7, H8, H9, H10, H11, H12, H13, H14, H15, H16, H17, H18) (e.g., H1N1, H3N2, H5N1, H7N9, H9N2), Yamagata virus antigen, Victoria virus antigen, influenza virus structural proteins (e.g., M1, M2, capsid protein), influenza virus functional proteins (e.g., ribonucleoprotein (NP), primary interferon antagonist (NS1), nuclear export protein (NEP)) influenza virus accessory proteins (e.g., PB2, PB1, or PA), for example, anti-HA, anti-NA, anti-H1, anti-H3, anti-H5, anti-H7, anti-H9, anti-N1, anti-N2, anti-N9, anti-H1N1, anti-H3N2, anti-H5N1, anti-H7N9, anti-H9N2, anti-A protein, anti-B protein, anti-stem, anti-M1, anti-M2, anti-capsid, anti-NP, anti-NS1, anti-NEP, anti-PB1, anti-PB2, and anti-PA); a swine influenza virus antigen (e.g., swine flu hemagglutinin, swine flu neuraminidase); a classical swine fever (CSF) (hog colera) virus antigen; an equine influenza virus antigen (e.g., equine influenza virus typeA/Miami 63 neuraminidase, equine influenza virus type A/Kentucky 81 neuraminidase, equine influenza virus type A/Alaska 91 neuraminidase); parainfluenza viruses (e.g., bovine parainfluenza virus, bovine parainfluenza virus type 3 fusion protein, bovine parainfluenza virus type 3 hemagglutinin neuraminidase); a (human) respiratory syncytial virus (RSV)-viral antigen (e.g., RSV F glycoprotein, RSV G glycoprotein. F protein of respiratory syncytial virus, RSV fusion glycoprotein); a herpes simplex virus (HSV) antigen (e.g., herpes simplex virus glycoproteins gB, gC, gD, and gE, herpes simplex virus type 2 glycoprotein gB); a Dengue virus antigen (e.g., core protein, matrix protein, glycoprotein E of Dengue virus, or other protein of Dengue virus); a measles virus antigen (e.g., hemagglutinin); a poliovirus 1 antigen (e.g., poliovirus 1 proteins (VP1)), a HIV-1 antigen and HIV-2 antigen (e.g., HIV envelope proteins (e.g., envelope glycoproteins of HIV 1, HIV envelope glycoprotein (Env), HIV envelope glycoprotein gp160, HIV envelope surface glycoprotein gp120, HIV transmembrane envelope protein gp41), HIV structural proteins (e.g., p17, p24, p7, p55), HIV functional proteins (e.g., p66, HIV-1 protease (PR), p31), HIV accessory proteins (e.g., Nef, Tat, Rev, Vif, Vpr, Vpu)); a hepatitis virus (HAV, HBV, HCV, HDV, HEV) antigen (e.g., hepatitis B virus antigen (e.g., surface antigen, core protein), hepatitis C virus antigen (e.g., glycoprotein E1E2)); a rabies virus (Rabies lyssavirus) antigen (e.g., rabies virus glycoprotein, e.g., G glycoprotein); a pseudorabies virus antigen (e.g., pseudorabies virus g50 (gpD), pseudorabies virus II (gpB), pseudorabies virus III (gpC), pseudorabies virus glycoprotein H, pseudorabies virus glycoprotein E); a papillomavirus (HPV) antigen; an Epstein-Barr virus (EBV) (Gamma herpes virus 4) antigen; a Herpes simplex virus (HSV, HSV-1, HSV-2) antigen (e.g., human herpes virus 8, equine herpes virus antigen (e.g., type 1 glycoprotein B, type 1 glycoprotein D)); a Herpes zoster antigen; a Cytomegalovirus antigen (e.g., cytomegalovirus glycoprotein B); a Zika virus antigen; a Transmissible gastroenteritis virus (TGEV) antigen (e.g., glycoprotein 195, matrix protein); a rotavirus antigen (e.g., swine rotavirus glycoprotein 38); a parvovirus antigen (e.g., swine parvovirus capsid protein); a filoviruses (e.g., Marburg and Ebola) antigen; a bovine viral diarrhea virus antigen (e.g., glycoprotein 55); a Newcastle disease virus antigen (hemagglutinin, neuraminidase); an orthopoxvirus antigen; a coxsackievirus antigen and aphthovirus (foot and mouth disease virus) antigen; a yellow fever virus antigen; a Chikunga virus antigen; a Nipah virus antigen; an African swine fever virus antigen; a rhinotracheitis virus antigen (e.g., infectious bovine rhinotracheitis virus glycoprotein E, glycoprotein G); a laryngotracheitis virus antigen (e.g., infectious laryngotracheitis virus glycoprotein G or glycoprotein I); a La Crosse virus antigen (e.g., La Crosse virus glycoprotein); a neonatal calf diarrhoea virus antigen; a Venezuelan equine encephalomyelitis virus antigen; a punta toro virus antigen; a murine leukemia virus antigen; a mouse mammary tumor virus antigen; a bovine respiratory syncytial virus antigen (e.g., bovine respiratory syncytial virus attachment protein (BRSV G), bovine respiratory syncytial virus fusion protein (BRSV F), bovine respiratory syncytial virus nucleocapsid protein (BRSVN)); a bovine E viral diarrhoea virus antigen (e.g., glycoprotein 48 and glycoprotein 53); a metapneumovirus (HMPV) antigen; and an Ebola virus antigen (e.g., ebolavirus glycoprotein, e.g., Zaire ebolavirus glycoprotein); or
[5334] (ii) a bacterial or parasite antigen selected from the group consisting of a Plasmodium (e.g., Plasmodium falciparum, Plasmodium vivax, Plasmodium malariae, Plasmodium ovale, Plasmodium knowlesi) antigen, a Streptococcus (e.g., Streptococcus pneumoniae. Streptococcus pyogenes, Streptococcus agalactiae. Streptococcus mutans, Streptococcus viridans, Streptococcus anginosus, Streptococcus intermedius. Streptococcus constellatus) antigen (e.g., 24M epitope), a Neisseria gonorrhoeae antigen (e.g., gonococcal pilin), a Corynebacterium antigen (e.g., Corynebacterium diphtheria (diptheria toxin). Corynebacterium ulcerans, Corynebacterium pseudotuberculosis). Mycobacterium tuberculosis antigens. Brachyspira hyodysenteriae (Serpulina hydodysenteriae) antigen (e.g., Serpulina hydodysenteriae protective antigen), a Chlamydia antigen (e.g., Chlamydia trachomatis) (e.g., MOMP and PorB), a Mycoplasma sp. (e.g., Mycoplasma genitalium. Mycoplasma hyopneumoniae, Mycoplasma pneumonia) antigen, a Staphylococcus (e.g., Staphylococcus aureus, coagulase-negative staphylococci (CoNS). Staphylococcus aureus alpha toxin. Staphylococcus aureus bi-component leucocidin) antigen, a Klebsiella sp. antigen, an Escherichia coli antigen (e.g., E. coli shiga toxin type-2. E. coli shiga toxin type-1), a Bacillus sp. (e.g., Bacillus anthracis, e.g., Bacillus anthracis anthrax) antigen, a Pseudomonas aeruginosa antigen (e.g., Pseudomonas aeruginosa type III secretion system), an Enterococcus sp. antigen, an Enterobacter sp. antigen, a Proteus sp. antigen, an Actinobacter sp. antigen, a Mycobacterium avium (Mycobacterium avium complex (MAC)) antigen, a Salmonella bacteria antigen, a Clostridium difficile antigen, a Toxoplasma (e.g., Toxoplasma gondii) antigen, a Histoplasma antigen, a Candida antigen, a Coccidioides antigen, a Cryptococcus antigen, a Cryptosporidium antigen, and a Cystoisospora (e.g., Cystoisospora belli) antigen, and another antigen (e.g., endotoxins, lymphotoxins (e.g., lymphotoxin alpha LTA), phosphatidylserine, Hsp90, CCR5, lipoteichoic acid, clumping factor A).

[5335] In some aspects, the antigen binding polypeptides provided herein comprise a VL1 comprising a light chain complementarity determining region 1 (LCDR1), LCDR2, and/or LCDR3 of an antibody selected from the group consisting of libivirumab, rmab, rivabazumab pegol, setoxaximab, suvizumab, suvratoxumab, sevirumab, pritoxaximab, porgaviximab, REGN-EB3, obiltoxaximab, gedivumab, foravirumab, larcaviximab, motavizumab, palivizumab, rafivirumab, regavirumab, tuvirumab, cosfroviximab, felvizumab, atidortoxumab, edobacomab, nebacumab, pateclizumab, raxibacumab, urtoxazumab, tosatoxumab, berlimatoxumab, CR6261, diridavumab, firivumab, lesofavumab, navivumab, exbivirumab, lenvervimab, bavituximab, bezlotoxumab, efungumab, leronlimab, nirsevimab, pagibaximab, panobacumab, tefibazumab, ansuvimab, atoltivimab, maftivimab, and odesivimab.

[5336] In some aspects, the antigen binding polypeptides provided herein comprise a VL2 comprising a light chain complementarity determining region 1 (LCDR1), LCDR2, and/or LCDR3 of an antibody selected from the group consisting of libivirumab, rmab, rivabazumab pegol, setoxaximab, suvizumab, suvratoxumab, sevirumab, pritoxaximab, porgaviximab, REGN-EB3, obiltoxaximab, gedivumab, foravirumab, larcaviximab, motavizumab, palivizumab, rafivirumab, regavirumab, tuvirumab, cosfroviximab, felvizumab, atidortoxumab, edobacomab, nebacumab, pateclizumab, raxibacumab, urtoxazumab, tosatoxumab, berlimatoxumab, CR6261, diridavumab, firivumab, lesofavumab, navivumab, exbivirumab, lenvervimab, bavituximab, bezlotoxumab, efungumab, leronlimab, nirsevimab, pagibaximab, panobacumab, tefibazumab, ansuvimab, atoltivimab, maftivimab, and odesivimab.

[5337] In some aspects, the antigen binding polypeptides provided herein comprise a VL1 comprising a VL of an antibody selected from the group consisting of libivirumab, rmab, rivabazumab pegol, sctoxaximab, suvizumab, suvratoxumab, sevirumab, pritoxaximab, porgaviximab, REGN-EB3, obiltoxaximab, gedivumab, foravirumab, larcaviximab, motavizumab, palivizumab, rafivirumab, regavirumab, tuvirumab, cosfroviximab, felvizumab, atidortoxumab, edobacomab, nebacumab, pateclizumab, raxibacumab, urtoxazumab, tosatoxumab, berlimatoxumab, CR6261, diridavumab, firivumab, lesofavumab, navivumab, exbivirumab, lenvervimab, bavituximab, bezlotoxumab, efungumab, leronlimab, nirsevimab, pagibaximab, panobacumab, tefibazumab, ansuvimab, atoltivimab, maftivimab, and odesivimab.

[5338] In some aspects, the antigen binding polypeptides provided herein comprise a VL2 comprising a VL of an antibody selected from the group consisting of libivirumab, rmab, rivabazumab pegol, sctoxaximab, suvizumab, suvratoxumab, sevirumab, pritoxaximab, porgaviximab, REGN-EB3, obiltoxaximab, gedivumab, foravirumab, larcaviximab, motavizumab, palivizumab, rafivirumab, regavirumab, tuvirumab, cosfroviximab, felvizumab, atidortoxumab, edobacomab, nebacumab, pateclizumab, raxibacumab, urtoxazumab, tosatoxumab, berlimatoxumab, CR6261, diridavumab, firivumab, lesofavumab, navivumab, exbivirumab, lenvervimab, bavituximab, bezlotoxumab, efungumab, leronlimab, nirsevimab, pagibaximab, panobacumab, tefibazumab, ansuvimab, atoltivimab, maftivimab, and odesivimab.

[5339] In some aspects, the antigen binding polypeptides provided herein comprise a VL1 comprising (i) a complementarity determining region (CDR) 1 having an amino acid sequence that is at least 65%, at least 70%, at least 75%, at least 80%, at least 85%, at least 90%, at least 95%, at least 99%, or 100% identical to any one of SEQ ID NOs: 1428, 1793, 1798, 1810, 1817, 1824, 1977, 1985, 1993 and 2001; (ii) a CDR2 having an amino acid sequence that is at least 65%, at least 70%, at least 75%, at least 80%, at least 85%, at least 90%, at least 95%, at least 99%, or 100% identical to any one of SEQ ID NOs: 1978, 1986, 1994, and 2002; or at least 65%, at least 70%, at least 75%, at least 80%, at least 85%, at least 90%, at least 95%, at least 99%, or 100% identical to any one of amino acid sequences YTS, DTS, GAS, and AAS; and (iii) a CDR3 having an amino acid sequence that is at least 65%, at least 70%, at least 75%, at least 80%, at least 85%, at least 90%, at least 95%, at least 99%, or 100% identical to any one of SEQ ID NOs: 1229, 1799, 1805, 1811, 1818, 1825, 1979, 1987, 1995, and 2003.

[5340] In some aspects, the antigen binding polypeptides provided herein comprise a VL2 comprising (i) a complementarity determining region (CDR) 1 having an amino acid sequence that is at least 65%, at least 70%, at least 75%, at least 80%, at least 85%, at least 90%, at least 95%, at least 99%, or 100% identical to any one of SEQ ID NOs: 1428, 1793, 1798, 1810, 1817, 1824, 1977, 1985, 1993 and 2001; (ii) a CDR2 having an amino acid sequence that is at least 65%, at least 70%, at least 75%, at least 80%, at least 85%, at least 90%, at least 95%, at least 99%, or 100% identical to any one of SEQ ID NOs: 1978, 1986, 1994, and 2002; or at least 65%, at least 70%, at least 75%, at least 80%, at least 85%, at least 90%, at least 95%, at least 99%, or 100% identical to any one of amino acid sequences YTS, DTS, GAS, and AAS; and (iii) a CDR3 having an amino acid sequence that is at least 65%, at least 70%, at least 75%, at least 80%, at least 85%, at least 90%, at least 95%, at least 99%, or 100% identical to any one of SEQ ID NOs: 1229, 1799, 1805, 1811, 1818, 1825, 1979, 1987, 1995, and 2003.

[5341] In some aspects, the antigen binding polypeptides provided herein comprise a VL1 comprising an amino acid sequence that is at least 65%, at least 70%, at least 75%, at least 80%, at least 85%, at least 90%, at least 95%, at least 99%, or 100% identical to any one of SEQ ID NOs: 1794, 1800, 1806, 1812, 1819, 1826, 1980, 1988, 1996, and 2004.

[5342] In some aspects, the antigen binding polypeptides provided herein comprise a VL2 comprising an amino acid sequence that is at least 65%, at least 70%, at least 75%, at least 80%, at least 85%, at least 90%, at least 95%, at least 99%, or 100% identical to any one of SEQ ID NOs: 1794, 1800, 1806, 1812, 1819, 1826, 1980, 1988, 1996, and 2004.

[5343] In some aspects, the other-pathology antigen is selected from the group consisting of Amyloid beta, β-amyloid, PCSK9, IFN-α/β receptor, Rhesus factor, nerve growth factor (NGF), DPP4, fibrin II beta chain, ACVR2B, scrum amyloid A protein SOST, FGF 23, VWF, tissue factor pathway inhibitor (TFPI), 1-40 and 1-42, selectin P, glucagon receptor (GCGR), amyloid P component, GDF-8, CXCL10 IP-10, repulsive guidance molecule A RGMA, IFN-γ, activated F9/F10, calcitonin gene-related peptide (CGRP), angiopoietin 3, IFN receptor, IFN-γ, calcitonin, β-amyloid 1-40 and 1-42, tau protein, dabigatran, cardiac myosin, selectin P. Complement factor D (CFD), kallikrein, GDF-8, IGHE, tissue factor pathway inhibitor (TFPI), GMCSF receptor α-chain, amyloid, IgE Fc region, MASP-2, oxLDL, GMCSF, NOGO-A. Alpha-synuclein, NGF, myelin-associated glycoprotein, RHD (gene) (RHD), sclerostin, FCGRT, sclerostin SOST, mucosal addressin cell adhesion molecule, myostatin, RSVFR, complement component 1s C1s, C5, and IL31.

[5344] In some aspects, the antigen binding polypeptides provided herein comprise a VL1 comprising a light chain complementarity determining region 1 (LCDR1), LCDR2, and/or LCDR3 of an antibody selected from the group consisting of aducanumab, alirocumab, frovocimab, lodelcizumab, bococizumab, evolocumab, ralpancizumab, anifrolumab, atorolimumab, bapineuzumab, bedinvetmab, begelomab, biciromab, bimagrumab, birtamimab, blosozumab, burosumab, caplacizumab, concizumab, crenczumab, crizanlizumab, crotedumab, dezamizumab, domagrozumab, donanemab, eldelumab, clezanumab, emapalumab, emicizumab, eptinezumab, erenumab, evinacumab, faralimomab, fasinumab, fontolizumab, fremanezumab, frunevetmab, fulranumab, galcanczumab, gantenerumab, gosuranemab, idarucizumab, imciromab, inclacumab, lampalizumab, lanadelumab, landogrozumab, lecanemab, ligelizumab, marstacimab, mavrilimumab, morolimumab, NEOD001, omalizumab, oMS721, orticumab, otilimab, ozanezumab, ponezumab, prasinezumab, quilizumab, ranevetmab, refanezumab, roledumab, romosozumab, rozanolixizumab, sctrusumab, SHP647, solanczumab, stamulumab, suptavumab, sutimlimab, tanezumab, crovalimab, and lokivetmab.

[5345] In some aspects, the antigen binding polypeptides provided herein comprise a VL2 comprising a light chain complementarity determining region 1 (LCDR1), LCDR2, and/or LCDR3 of an antibody selected from the group consisting of aducanumab, alirocumab, frovocimab, lodelcizumab, bococizumab, evolocumab, ralpancizumab, anifrolumab, atorolimumab, bapineuzumab, bedinvetmab, begelomab, biciromab, bimagrumab, birtamimab, blosozumab, burosumab, caplacizumab, concizumab, crenezumab, crizanlizumab, crotedumab, dezamizumab, domagrozumab, donanemab, eldelumab, elezanumab, emapalumab, emicizumab, eptinezumab, erenumab, evinacumab, faralimomab, fasinumab, fontolizumab, fremanezumab, frunevetmab, fulranumab, galcanezumab, gantenerumab, gosuranemab, idarucizumab, imciromab, inclacumab, lampalizumab, lanadelumab, landogrozumab, lecanemab, ligelizumab, marstacimab, mavrilimumab, morolimumab, NEOD001, omalizumab, oMS721, orticumab, otilimab, ozanezumab, ponezumab, prasinezumab, quilizumab, ranevetmab, refanezumab, roledumab, romosozumab, rozanolixizumab, setrusumab, SHP647, solanezumab, stamulumab, suptavumab, sutimlimab, tanezumab, crovalimab, and lokivetmab.

[5346] In some aspects, the antigen binding polypeptides provided herein comprise a VL1 comprising a VL of an antibody selected from the group consisting of aducanumab, alirocumab, frovocimab, lodelcizumab, bococizumab, evolocumab, ralpancizumab, anifrolumab, atorolimumab, bapineuzumab, bedinvetmab, begelomab, biciromab, bimagrumab, birtamimab, blosozumab, burosumab, caplacizumab, concizumab, crenezumab, crizanlizumab, crotedumab, dezamizumab, domagrozumab, donanemab, eldelumab, elezanumab, emapalumab, emicizumab, eptinezumab, erenumab, evinacumab, faralimomab, fasinumab, fontolizumab, fremanezumab, frunevetmab, fulranumab, galcanezumab, gantenerumab, gosuranemab, idarucizumab, imciromab, inclacumab, lampalizumab, lanadelumab, landogrozumab, lecanemab, ligelizumab, marstacimab, mavrilimumab, morolimumab, NEOD001, omalizumab, oMS721, orticumab, otilimab, ozanezumab, ponezumab, prasinezumab, quilizumab, ranevetmab, refanezumab, roledumab, romosozumab, rozanolixizumab, setrusumab, SHP647, solanezumab, stamulumab, suptavumab, sutimlimab, tanezumab, crovalimab, and lokivetmab.

[5347] In some aspects, the antigen binding polypeptides provided herein comprise a VL2 comprising a VL of an antibody selected from the group consisting of aducanumab, alirocumab, frovocimab, lodelcizumab, bococizumab, evolocumab, ralpancizumab, anifrolumab, atorolimumab, bapineuzumab, bedinvetmab, begelomab, biciromab, bimagrumab, birtamimab, blosozumab, burosumab, caplacizumab, concizumab, crenezumab, crizanlizumab, crotedumab, dezamizumab, domagrozumab, donanemab, eldelumab, elezanumab, emapalumab, emicizumab, eptinezumab, erenumab, evinacumab, faralimomab, fasinumab, fontolizumab, fremanezumab, frunevetmab, fulranumab, galcanezumab, gantenerumab, gosuranemab, idarucizumab, imciromab, inclacumab, lampalizumab, lanadelumab, landogrozumab, lecanemab, ligelizumab, marstacimab, mavrilimumab, morolimumab, NEOD001, omalizumab, oMS721, orticumab, otilimab, ozanezumab, ponezumab, prasinezumab, quilizumab, ranevetmab, refanezumab, roledumab, romosozumab, rozanolixizumab, setrusumab, SHP647, solanezumab, stamulumab, suptavumab, sutimlimab, tanezumab, crovalimab, and lokivetmab.

[5348] In some aspects, the antigen binding polypeptides provided herein comprise a VL1 comprising (i) a complementarity determining region (CDR) 1 having an amino acid sequence that is at least 65%, at least 70%, at least 75%, at least 80%, at least 85%, at least 90%, at least 95%, at least 99%, or 100% identical to any one of SEQ ID NOs: 1120, 1228, 1359, 1519, 1831, 1838, 1845, 1852, 1859, 1866, 1872, 1878, 1885, 1891, 1898, 1905, 1911, 1917, 1924, 1931, 1938, 1945, and 1963; (ii) a CDR2 having an amino acid sequence that is at least 65%, at least 70%, at least 75%, at least 80%, at least 85%, at least 90%, at least 95%, at least 99%, or 100% identical to any one of amino acid sequences AAS, AVS, DAS, DNN, EDN, EVS, GAS, GNG, KAS, KVS, LVS, NTD, STS, WAS, and YTS; and (iii) a CDR3 having an amino acid sequence that is at least 65%, at least 70%, at least 75%, at least 80%, at least 85%, at least 90%, at least 95%, at least 99%, or 100% identical to any one of SEQ ID NOs: 1360, 1832, 1839, 1846, 1853, 1860, 1867, 1873, 1879, 1886, 1892, 1899, 1906, 1912, 1918, 1925, 1932, 1939, 1946, 1951, 1957, 1964, and 1970.

[5349] In some aspects, the antigen binding polypeptides provided herein comprise a VL2 comprising (i) a complementarity determining region (CDR) 1 having an amino acid sequence that is at least 65%, at least 70%, at least 75%, at least 80%, at least 85%, at least 90%, at least 95%, at least 99%, or 100% identical to any one of SEQ ID NOs: 1120, 1228, 1359, 1519, 1831, 1838, 1845, 1852, 1859, 1866, 1872, 1878, 1885, 1891, 1898, 1905, 1911, 1917, 1924, 1931, 1938, 1945, and 1963; (ii) a CDR2 having an amino acid sequence that is at least 65%, at least 70%, at least 75%, at least 80%, at least 85%, at least 90%, at least 95%, at least 99%, or 100% identical to any one of amino acid sequences AAS, AVS, DAS, DNN, EDN, EVS, GAS, GNG, KAS, KVS, LVS, NTD, STS, WAS, and YTS; and (iii) a CDR3 having an amino acid sequence that is at least 65%, at least 70%, at least 75%, at least 80%, at least 85%, at least 90%, at least 95%, at least 99%, or 100% identical to any one of SEQ ID NOs: 1360, 1832, 1839, 1846, 1853, 1860, 1867, 1873, 1879, 1886, 1892, 1899, 1906, 1912, 1918, 1925, 1932, 1939, 1946, 1951, 1957, 1964, and 1970.

[5350] In some aspects, the antigen binding polypeptides provided herein comprise a VL1 comprising an amino acid sequence that is at least 65%, at least 70%, at least 75%, at least 80%, at least 85%, at least 90%, at least 95%, at least 99%, or 100% identical to any one of SEQ ID NOs: 1361, 1833, 1840, 1847, 1854, 1861, 1868, 1874, 1880, 1887, 1893, 1900, 1907, 1913, 1919, 1926, 1933, 1940, 1947, 1952, 1958, 1965, and 1971.

[5351] In some aspects, the antigen binding polypeptides provided herein comprise a VL2 comprising an amino acid sequence that is at least 65%, at least 70%, at least 75%, at least 80%, at least 85%, at least 90%, at least 95%, at least 99%, or 100% identical to any one of SEQ ID NOs: 1361, 1833, 1840, 1847, 1854, 1861, 1868, 1874, 1880, 1887, 1893, 1900, 1907, 1913, 1919, 1926, 1933, 1940, 1947, 1952, 1958, 1965, and 1971.

[5352] In some aspects, the antigen binding polypeptides disclosed herein, comprise one or more CH1, as indicated in the formulas representing the antigen binding polypeptides disclosed herein. In some aspects, the CH1 comprises an amino acid sequence at least 65%, at least 70%, at least 75%, at least 80%, at least 85%, at least 90%, at least 95%, at least 99%, or 100% identical to any one of SEQ ID NOs: 375, 634, 1070, 1071, or 1086-1091.

[5353] In some aspects, the antigen binding polypeptides provided herein further comprise an Fc region. In some aspects, the antigen binding polypeptides provided herein further comprise an Fc region at the carboxy-terminus. In some aspects, the Fc region comprises an immunoglobulin heavy chain constant region 2 (CH2) and/or an immunoglobulin heavy chain constant region 3 (CH3). In some aspects, the Fc region further comprises an immunoglobulin hinge (i.e., a hinge region). In some aspects, the hinge region comprises an amino acid sequence at least 65%, at least 70%, at least 75%, at least 80%, at least 85%, at least 90%, at least 95%, at least 99%, or 100% identical to any one of SEQ ID NOs: 635, 636, 1072, 1073, or 1074. In some aspects, the Fc region comprises a CH2 and a CH3. In some aspects, the CH2 comprises an amino acid sequence that is at least 65%, at least 70%, at least 75%, at least 80%, at least 85%, at least 90%, at least 95%, at least 99%, or 100% identical to any one of SEQ ID NOs: 1075-1078. In some aspects, the CH3 comprises an amino acid sequence that is at least 65%, at least 70%, at least 75%, at least 80%, at least 85%, at least 90%, at least 95%, at least 99%, or 100% identical to any one of SEQ ID NOs: 1079-1085. In some aspects, the Fc region comprises an amino acid sequence that is at least 65%, at least 70%, at least 75%, at least 80%, at least 85%, at least 90%, at least 95%, at least 99%, or 100% identical to any one of SEQ ID NOs: 376-380.

[5354] In some aspects, the Fc region comprises one or more amino acid substitutions. In some aspects, the one or more amino acid substitutions comprise one or more half-life extension amino acid substitutions. In some aspects, the one or more half-life extension amino acid substitutions comprise one or more of amino acid substitutions M428L, N434A, N434S, L234F, L235E, P331S, M252Y, S254T, and T256E, or equivalent thereof, based on the EU numbering scheme. In some aspects, the one or more half-life extension amino acid substitutions comprise a LA (M428L and N434A, or equivalent thereof, based on the EU numbering scheme) amino acid substitution. In some aspects, the one or more half-life extension amino acid substitutions comprise a LS (M428L and N434S, or equivalent thereof, based on the EU numbering scheme) amino acid substitution. In some aspects, the one or more half-life extension amino acid substitutions comprise L234F and L235E, or equivalent thereof (based on the EU numbering scheme) amino acid substitutions. In some aspects, the one or more half-life extension amino acid substitutions comprise a TM (L234F, L235E, and P331S, or equivalent thereof, based on the EU numbering scheme) amino acid substitution. In some aspects, the one or more half-life extension amino acid substitutions comprise a YTE (M252Y, S254T, and T256E, or equivalent thereof, based on the EU numbering scheme) amino acid substitution.

[5355] In some aspects, the Fc region comprises at least one knob-into-hole modification. In some aspects, the antigen binding polypeptides disclosed herein are comprised in IgG1 or IgG4 antibodies or antigen binding fragments thereof. In some aspects, the knob-into-hole modification comprises one or more of knob substitutions of S354C and T366W, or equivalent thereof, and/or one or more of hole substitutions of Y349C, T366S, L368A, Y407V, or equivalent thereof, or a combination thereof, based on the EU numbering scheme. In some aspects, the Fc region comprises a knob-into-hole modification comprising knob substitutions of S354C and T366W, or equivalent thereof, and/or hole substitutions of Y349C, T366S, L368A and Y407V, or equivalent thereof, and/or a half-life extension amino acid substitution comprising: a LA (M428L and N434A, or equivalent thereof, based on the EU numbering scheme) amino acid substitution, a LS (M428L and N434S, or equivalent thereof, based on the EU numbering scheme) amino acid substitution, L234F and L235E, or equivalent thereof (based on the EU numbering scheme) amino acid substitutions, a TM (L234F, L235E, and P331S, or equivalent thereof, based on the EU numbering scheme) amino acid substitution, a YTE (M252Y, S254T, and T256E, or equivalent thereof, based on the EU numbering scheme) amino acid substitution, or any combination thereof.

[5356] In some aspects, the Fc region comprises knob substitutions of S354C and T366W, or equivalent thereof, and a half-life extension amino acid substitution comprising: a LA (M428L and N434A, or equivalent thereof, based on the EU numbering scheme) amino acid substitution, a LS (M428L and N434S, or equivalent thereof, based on the EU numbering scheme) amino acid substitution. L234F and L235E, or equivalent thereof (based on the EU numbering scheme) amino acid substitutions, a TM (L234F, L235E, and P331S, or equivalent thereof, based on the EU numbering scheme) amino acid substitution, a YTE (M252Y, S254T, and T256E, or equivalent thereof, based on the EU numbering scheme) amino acid substitution, or any combination thereof.

[5357] In some aspects, the Fc region comprises hole substitutions of Y349C, T366S, L368A and Y407V, or equivalent thereof, and a half-life extension amino acid substitution comprising: a LA (M428L and N434A, or equivalent thereof, based on the EU numbering scheme) amino acid substitution, a LS (M428L and N434S, or equivalent thereof, based on the EU numbering scheme) amino acid substitution, L234F and L235E, or equivalent thereof (based on the EU numbering scheme) amino acid substitutions, a TM (L234F, L235E, and P331S, or equivalent thereof, based on the EU numbering scheme) amino acid substitution, a YTE (M252Y, S254T, and T256E, or equivalent thereof, based on the EU numbering scheme) amino acid substitution, or any combination thereof.

[5358] In some aspects, the antigen binding polypeptides disclosed herein comprise one or more Fc effector function knockout mutation. In some aspects, the antigen binding polypeptides disclosed herein are comprised in IgG1 or IgG4 antibodies or antigen binding fragments thereof. In some aspects, the Fc effector function knockout mutation is L234A, L235A, P239A, or equivalent thereof, or a combination thereof, based on the EU numbering scheme.

[5359] In some aspects, the antigen binding polypeptides disclosed herein comprise a mutation at a glycosylation site. In some aspects, the mutation at a glycosylation site is a mutation at an N-glycosylation site. In some aspects, the antigen binding polypeptides comprise a VH comprising a mutation at a glycosylation site. In some aspects, the mutation at a glycosylation site is a mutation at an N-glycosylation site. In some aspects, the mutation at an N-glycosylation site is at amino acid N62, or equivalent thereof, of the VH region or equivalent thereof. In some aspects, the mutation at an N-glycosylation site at amino acid N62 is N62Q or N62S, or equivalent thereof.

[5360] In some aspects, the antigen binding polypeptides disclosed herein, comprise one or more optional linkers. The one or more optional linkers are indicated herein as Ln, wherein n is an integer, and the integer next to each L indicates each L comprised in the antigen binding polypeptides disclosed herein. For example, if an antigen binding polypeptide disclosed herein comprises two linkers, the first linker from N-terminus to C-terminus is herein indicated as L1, and the second linker from N-terminus to C-terminus is herein indicated as L2. In some aspects, any one of the optional linkers each independently have a length of from 0 amino acids to about 50 amino acids. In some aspects, any one of the optional linkers each independently have a length of from 5 amino acids to about 40 amino acids.

[5361] In some aspects, any one of the optional linkers are non-immunogenic. In some aspects, any one of the optional linkers do not contain a consensus T cell epitope.

[5362] In some aspects, any of Ln comprises an amino acid sequence of G or A, or an amino acid sequence at least 65%, at least 70%, at least 75%, at least 80%, at least 85%, at least 90%, at least 95%, at least 99%, or 100% identical to amino acid sequence GSS or ASG, or an amino acid sequence at least 65%, at least 70%, at least 75%, at least 80%, at least 85%, at least 90%, at least 95%, at least 99%, or 100% identical to any one of SEQ ID NOs: 333-373 or 967-971. In some aspects, Ln comprises an amino acid sequence at least 65%, at least 70%, at least 75%, at least 80%, at least 85%, at least 90%, at least 95%, at least 99%, or 100% identical to any one of SEQ ID NOs: 333-345 or 967-971.

[5363] In some aspects, the antigen binding polypeptides provided herein have a structure, from amino-terminus to carboxy-terminus, represented by:
[5364] VH1-L1-VH2-L2-CL; or
[5365] VH2-L1-VH1-L2-CL;
[5366] wherein:
[5367] VH1 is a first immunoglobulin heavy chain variable region that specifically binds to (i) a tumor-associated antigen (TAA), (ii) an infectious disease antigen that is not a sarbecovirus antigen, or (iii) an other-pathology antigen;
[5368] VH2 is a second immunoglobulin heavy chain variable region that specifically binds to (i) a tumor-associated antigen (TAA), (ii) an infectious disease antigen that is not a sarbecovirus antigen, or (iii) an other-pathology antigen
[5369] CL is an immunoglobulin light chain constant region; and
[5370] L1-L2 are optional amino acid linkers.

[5371] In any aspect shown herein as a structure from amino terminus to carboxy terminus, and with binding pairs selected from VL and/or VH or other structural regions such as CH1, CL, CH2, CH3, when shown without a specific linker such as L1, L2, etc., such linkers are optionally present in such structures between each designated subsequence VL, VH, etc.

[5372] In some aspects, the TAA is selected from the group consisting of 5′-nucleotidase, 5T4, A2AR, activin receptor-like kinase 1, adenocarcinoma antigen, ADRB3, AFP, AKAP-4, ALK, alpha-fetoprotein, androgen receptor, angiopoietin 2, AOC3, APRIL, ATPDase, AXL, B7-4, B7DC, B7H1, B7H2, B7H3, B7H4, B7H5, B7H6, B7H7, B7RP1, BAFF, BAFFR, BCMA, bcr-abl, BlyS, BORIS, BST2, BTK, BTLA, C3, C5, C5a, C5a receptor, CA-125, CAIX, CanAg (a glycoform of MUC1), CCL11, CCL15, CCL17, CCL19, CCL2, CCL20, CCL21, CCL25, CCL3, CCL4, CCL5, CCL7, CCL8, CCR2, CCR3, CCR4, CCR5, CD11, CD11a, CD123, CD125, CD133, CD134, CD137, CD137L, CD147, CD15, CD154, CD160, CD16A, CD171, CD179a, CD18, CD184, CD19, CD2, CD20, CD200, CD22, CD221, CD23, CD24, CD242, CD25, CD27, CD272, CD276, CD278, CD279, CD28, CD3, CD30, CD300LF, CD319, CD33, CD37, CD38, CD39, CD38, CD4, CD40, CD40L, CD41, CD44v6, CD45, CD47, CD49B, CD5, CD51, CD52, CD54, CD56, CD6, CD62L, CD7, CD70, CD72, CD74, CD79a, CD79b, CD80, CD86, CD97, CEA, CEACAM5, claudin 18 isoform 2, CLDN6, CLEC12A, CLEC9, CLEC91, CLL-1, cMet, coagulation factor III, CRTH2, CS1, CSF-1, CSFIR, CSF-2, CSF-3, CTGF, CTLA4, CXCL1, CXCL12, CXCL13, CXCL2, CXCL4, CXCR3, CXORF61, CyclinB1, CYP1B1, dendritic cell-associated lectin 2, DLL3, DLL4, DNGR-1, DR5, E7, E-cadherin, EGFL7, EGFR, EGFRVIII, ELF2M, EMR2, endoglin, ENTPD1, EpCAM, EphA2, EPHA3, ephrin receptor A3, EphrinB2, episialin, ERBB2 (Her2/neu), ERBB3, ERG (TMPRSS2-ETS fusion gene), ETV6-AML, FAP, FCAR, FCER1, FCER1A, FCER2, FCRL5, FGF 23, FGFR, FGFR2, fibronectin extra domain-B, FLAP, FLT3, folate hydrolase, folate receptor 1, folate receptor alpha, folate receptor beta, FOLH1, Fos-relatedantigen1, Frizzled receptor, Fucosyl GM1, GD2, GD3, gelatinase B, Gi24, GITR, GITRL, GloboH, Glutamate carboxypeptidase II, glypican 3, GM3, GP100, GPC1, GPC2, GPC3, gplOO, GPNMB, GPR20, GPR5, GPRC5D, growth differentiation factor 8, GUCY2C, HAVCR1, HER1, HER2, HER3, HGF, HGFR, HHLA2, histone complex, HLA-DR, HMGB1, HMWMAA, HPVE6, hTERT, human telomerase reverse transcriptase, HVEM, ICAM-1, ICOS, ICOSL, IDO, IFNa, IgE, IGF-1, IGF1R, IGF-2, IGF-I receptor, IGLL1, IL1, IL10, IL12, IL13, IL13Ra2, IL-13Ra2, IL13Ra1, IL15, IL17, IL-17A, IL-17AF, IL-17F, IL17Rb, IL18, IL1B, IL1F10, IL-1a, IL-1B, IL2, IL-20, IL22, IL23, IL-23A, IL25, IL2Rbeta, IL-3 receptor, IL-31 receptor A, IL33, IL35, IL4, IL4Ra, IL5, IL5R, IL6, IL7, IL7Ra, IL8, IL9, IL9R, IL1A, IL-llRa, integrin α4, integrin α4 β7, integrin α5β1, integrin αIIbβ3, integrin αvβ3, integrin β7, interleukin 36 receptor IL1RAP, interleukin 36 receptor IL1RL2, intestinal carboxylesterase, ITGB4, ITK, KIR, KIR2D, KIT, LAG3, LAGE-1a, LAIR1, LAMP1, LCK, legumain, leptin. LewisY, LILRA2, LIV-1, LMP2, LOXL2, LPFS2, LRRC15, LY6K, LY75, LYPD3, MAD-CT-1, MAD-CT-2, MAGEA1, MAGE-A1, MCAM, MCP-1. MelanA/MART1, mesothelin, MHC classII, MIF, ML-IAP, MS4A1, MST1R (RON), MUC1, MUC-1, MUC16, MUC-16, MUC5AC, muthsp70-2, MYCN, NA17, NCA-90) granulocyte antigen, NCAM, NCR3LG1, nectin-4, NGNA ganglioside, NKG2A, NKG2D, NKp46, Notch 1, Notch receptor, NRP1, NTPDase-1, NY-BR-1, NY-ESO-1, o-acetyl-GD2, OR51E2, OX40), OX40L, OY-TES1, p53, p53mutant, PANX3, PAP, PAX3, PAX5, PCDC1, PCDP1, PCTA-1/Galectin8, PD-1, PDGFRA, PDGFR-beta, PD-L1, PD-L2, phosphate-sodium co-transporter, phosphatidylserine, PLAC1, polysialicacid, PROM1, prostase, prostein, PRSS21, PSCA, PSMA, PTK7, RAGE-1, RANKL. Ras mutant, rhIL1O, RhoC, root plate-specific spondin 3, ROR1, ROR2, RTN4, RU1, RU2, S152, sarcoma translocation breakpoints, SART3, scatter factor receptor kinase, SDC1, SIRPalpha, SISP1, SLAMF7, SLC, sLe, SLITRK6, spermprotein17, SPG64, sphingosine-1-phosphate, SSEA-4, SSX2, ST2, STEAP1, STEAP2, surviving and telomerase, Syk kinase, T14, TACI, TAG72, TARP, T-cell receptor, TCRβ, TDO, TEMI/CD248, TEM7R, tenascin C, TGFBETA, TGF-β1, TGF-β2, TGS5, the extracellular portion of the APRIL protein. Tie2, TIGIT, TIM3, TLR, TLR2, TLR4, TLR5, TLR9, TMEF1. TnAg, TNF, TNFa, TNFR superfamily member 4, TNFRSF7, Tp55, TRAC, TRAIL-R1, TRAIL-R2, TRAP, TREM1, TROP2, TRP-2, TSHR, TSLP, TSLPR, tumor antigen CTAA16.88, TWEAK, tyrosinase, TYRPI glycoprotein 75, UPK2, VAP-1, VEGF, VEGFA, VEGFR-1, VEGFR2, vimentin, VISTA. Vstm3, WT1, WUCAM, and XAGE1.

[5373] In some aspects, the antigen binding polypeptides provided herein comprise a VH1 comprising a heavy chain complementarity determining region 1 (HCDR1), HCDR2, and/or HCDR3 of an antibody selected from the group consisting of losatuxizumab vedotin, utomilumab, urelumab, oleclumab, naptumomab estafenatox, ascrinvacumab, pintumomab, tacatuzumab tetraxetan, nesvacumab, vanucizumab, timolumab, vapaliximab, vepalimomab, enapotamab vedotin, ianalumab, belimumab, tabalumab, tibulizumab, belantamab mafodotin, teclistamab, teclistamab, detumomab, nacolomab tafenatox, eculizumab, lendalizumab, pexelizumab, pozelimab, ravulizumab, tesidolumab, vilobelimab, abagovomab, igovomab, oregovomab, sofituzumab vedotin, cantuzumab mertansine, cantuzuma bravtansine, girentuximab, altumomab pentetate, arcitumomab, besilesomab, bertilimumab, plozalizumab, mogamulizumab, leronlimab, PRO140, rovelizumab, rovelizumab, talacotuzumab, benralizumab, tavolimab, vonlerolizumab, gavilimomab, ziralimumab, fanolesomab, ipilimumab, ruplizumab, toralizumab, dapirolizumab pegol, toralizumab, dapirolizumab pegol, ruplizumab, blinatumomab, inebilizumab, loncastuximab tesirine, SGN-CD19A, tafasitamab, taplitumomab paptox, XMAB-5574, Budoprutug, Obexelimab, duvortuxizumab, englumafusp alfa, Emfizatamab, zeripatamig, siplizumab, blontuvetmab, FBTA05, ibritumomab tiuxetan, obinutuzumab, ocaratuzumab, ocrelizumab, ofatumumab, rituximab, tositumomab, ublituximab, veltuzumab, divozilimab, eramkafusp alfa, ripertamab, zuberitamab, glofitamab, nofctumomab merpentan, samalizumab, imvotamab, odronextamab, plamotamab, bectumomab, inotuzumab ozogamicin, moxctumomab pasudotox, pinatuzumab vedotin, gomiliximab, lumiliximab, inolimomab, inolimomab, daclizumab, camidanluma btesirine, basiliximab, varlilumab, omburtamab, enoblituzumab, vopratelimab, lulizumabpegol, TGN1412, muromonab-CD3, otelixizumab, teplizumab, visilizumab, epcoritamab, epcoritamab, brentuximab vedotin, iratumumab, azintuxizumab vedotin, gemtuzumab ozogamicin, lintuzumab, vadastuximab talirine, naratuximab emtansine, otlertuzumab, lilotomab satetraxctan, tetulomab, daratumumab, isatuximab, foralumab, mosunctuzumab, mosunetuzumab, cedelizumab, ibalizumab, keliximab, priliximab, tregalizumab, zanolimumab, blesclumab, iscalimab, lucatumumab, ravagalimab, sclicrelumab, tencliximab, vanalimab, abciximab, bivatuzumab, iomab-B, telimomab aritox, zolimomab aritox, abituzumab, intetumumab, alemtuzumab, tamtuvetmab, lorvotuzumab mertansinc, itolizumab, cusatuzumab, vorsetuzumab mafodotin, milatuzumab, iladatuzumab vedotin, polatuzumab vedotin, galiximab, cibisatamab, zolbetuximab, naxitamab, tisotumab vedotin, olendalizumab, pamrevlumab, lacnotuzumab, cabiralizumab, emactuzumab, axatilimab, gimsilumab, lenzilumab, namilumab, tremelimumab, ulocuplumab, tepoditamab, rovalpituzumab tesirine, tarlatamab, demcizumab, navicixizumab, drozitumab, parsatuzumab, depatuxizumab mafodotin, modotuximab, carotuximab, adecatumumab, adecatumumab, oportuzumab monatox, solitomab, tucotuzumab celmoleukin, edrecolomab, catumaxomab, ifabotuzumab, fibatuzumab, zalutumumab, panitumumab, cetuximab, futuximab, imgatuzumab, laprituximab emtansine, matuzumab, necitumumab, nimotuzumab, tomuzotuximab, amivantamab, amivantamab, epitumomab cituxetan, sontuzumab, duligotuzumab, elgemtumab, lumretuzumab, patritumab, seribantumab, zenocutuzumab, sibrotuzumab, burosumab, aprutumab ixadotin, radretumab, pasotuxizumab, farletuzumab, mirvetuximab soravtansine, vantictumab, TRBS07, 3F8, dinutuximab, dinutuximab beta, ecromeximab, mitumomab, andecaliximab, capromab, codrituzumab, glembatumumab vedotin, talquetamab, talquetamab, trevogrumab, indusatumab vedotin, ficlatuzumab, rilotumumab, zatuximab, pentuzimab, pentuzimab, margetuximab, timigutuzumab, trastuzumab, trastuzumab duocarmazine, trastuzumab emtansine, gancotamab, pertuzumab, ertumaxomab, emibetuzumab, telisotuzumab, telisotuzumab vedotin, derlotuximab biotin, apolizumab, onartuzumab, bersanlimab, enlimomabpegol, rontalizumab, sifalimumab, talizumab, ganitumab, istiratumab, robatumumab, teprotumumab, figitumumab, ganitumab, istiratumab, robatumumab, teprotumumab, cixutumumab, dalotuzumab, xentuzumab, dusigitumab, canakinumab, ustekinumab, ustekinumab, ustekinumab, briakinumab, briakinumab, abrezekimab, lebrikizumab, romilkimab, TNX-650, tralokinumab, anrukinzumab, brodalumab, ixckizumab, netakimab, perakizumab, secukinumab, vunakizumab, afasevikumab, afasevikumab, bimekizumab, bimekizumab, remtolumab, bermekimab, lutikizumab, lutikizumab, gevokizumab, cergutuzumab amunaleukin, fletikumab, fezakinumab, brazikumab, guselkumab, mirikizumab, tildrakizumab, risankizumab, flotetuzumab, nemolizumab, pascolizumab, dupilumab, mepolizumab, reslizumab, clazakizumab, elsilimomab, olokizumab, sarilumab, siltuximab, sirukumab, vobarilizumab, tocilizumab, SA237, satralizumab, enokizumab, prezalizumab, natalizumab, abrilumab, abrilumab, vedolizumab, volociximab, tadocizumab, etaracizumab, etrolizumab, spesolimab, vatelizumab, erlizumab, lirilumab, relatlimab, cBR96-doxorubicinimmunoconjugate, odulimomab, efalizumab, ladiratuzumab vedotin, simtuzumab, samrotamab vedotin, aselizumab, lupartumab amadotin, imalumab, carlumab, imaprelimab, amatuximab, amatuximab, anetumab ravtansine, narnatumab, clivatuzumab tetraxetan, pemtumomab, gatipotuzumab, ensituximab, lemalesomab, sulesomab, enfortumab vedotin, racotumomab, monalizumab, brontictuzumab, tarextumab, vesencumab, oxelumab, gilvetmab, tislelizumab, dostarlimab, BCD-100, nivolumab, PDR001, pembrolizumab, pidilizumab, retifanlimab, spartalizumab, sintilimab, cemiplimab, olaratumab, tovetumab, rinucumab, atezolizumab, avelumab, durvalumab, lifastuzumab vedotin, bavituximab, acapatamab, capromab, rosopatamab, nezastomig, pasotuxizumab, pelgifatamab, voxalatamab, cofetuzumab pelidotin, denosumab, rosmantuzumab, cirmtuzumab, atinumab, indatuximab ravtansine, elotuzumab, sirtratumab vedotin, sonepcizumab, vandortuzumab vedotin, minretumomab, satumomab pendetide, maslimomab, ontuxizumab, tenatumomab, fresolimumab, metelimumab, lerdelimumab, tezepelumab, etigilimab, tiragotumab, placulumab, prezalumab, infliximab, nerelimomab, ozoralizumab, adalimumab, afelimomab, certolizumab pegol, golimumab, mapatumumab, conatumumab, lexatumumab, tigatuzumab, sacituzumab govitecan, votumumab, pogalizumab, letolizumab, pankomab, anatumomab mafenatox, enavatuzumab, flanvotumab, brolucizumab, ranibizumab, varisacumab, bevacizumab, faricimab, icrucumab, alacizumab pegol, ramucirumab, pritumumab, and onvatilimab.

[5374] In some aspects, the antigen binding polypeptides provided herein comprise a VH2 comprising a heavy chain complementarity determining region 1 (HCDR1), HCDR2, and/or HCDR3 of an antibody selected from the group consisting of losatuxizumab vedotin, utomilumab, urelumab, oleclumab, naptumomab estafenatox, ascrinvacumab, pintumomab, tacatuzumab tetraxetan, nesvacumab, vanucizumab, timolumab, vapaliximab, vepalimomab, enapotamab vedotin, ianalumab, belimumab, tabalumab, tibulizumab, belantamab mafodotin, teclistamab, teclistamab, detumomab, nacolomab tafenatox, eculizumab, lendalizumab, pexelizumab, pozelimab, ravulizumab, tesidolumab, vilobelimab, abagovomab, igovomab, oregovomab, sofituzumab vedotin, cantuzumab mertansine, cantuzuma bravtansine, girentuximab, altumomab pentetate, arcitumomab, besilesomab, bertilimumab, plozalizumab, mogamulizumab, leronlimab, PRO140, rovelizumab, rovelizumab, talacotuzumab, benralizumab, tavolimab, vonlerolizumab, gavilimomab, ziralimumab, fanolesomab, ipilimumab, ruplizumab, toralizumab, dapirolizumab pegol, toralizumab, dapirolizumab pegol, ruplizumab, blinatumomab, inebilizumab, loncastuximab tesirine, SGN-CD19A, tafasitamab, taplitumomab paptox, XMAB-5574, Budoprutug, Obexelimab, duvortuxizumab, englumafusp alfa, Emfizatamab, zeripatamig, siplizumab, blontuvetmab, FBTA05, ibritumomab tiuxetan, obinutuzumab, ocaratuzumab, ocrelizumab, ofatumumab, rituximab, tositumomab, ublituximab, veltuzumab, divozilimab, eramkafusp alfa, ripertamab, zuberitamab, glofitamab, nofetumomab merpentan, samalizumab, imvotamab, odronextamab, plamotamab, bectumomab, inotuzumab ozogamicin, moxetumomab pasudotox, pinatuzumab vedotin, gomiliximab, lumiliximab, inolimomab, inolimomab, daclizumab, camidanluma btesirine, basiliximab, varlilumab, omburtamab, enoblituzumab, vopratelimab, lulizumabpegol, TGN1412, muromonab-CD3, otelixizumab, teplizumab, visilizumab, epcoritamab, epcoritamab, brentuximab vedotin, iratumumab, azintuxizumab vedotin, gemtuzumab ozogamicin, lintuzumab, vadastuximab talirine, naratuximab emtansine, otlertuzumab, lilotomab satetraxctan, tetulomab, daratumumab, isatuximab, foralumab, mosunetuzumab, mosunetuzumab, cedelizumab, ibalizumab, keliximab, priliximab, tregalizumab, zanolimumab, blesclumab, iscalimab, lucatumumab, ravagalimab, sclicrelumab, tencliximab, vanalimab, abciximab, bivatuzumab, iomab-B, telimomab aritox, zolimomab aritox, abituzumab, intetumumab, alemtuzumab, tamtuvetmab, lorvotuzumab mertansine, itolizumab, cusatuzumab, vorsctuzumab mafodotin, milatuzumab, iladatuzumab vedotin, polatuzumab vedotin, galiximab, cibisatamab, zolbctuximab, naxitamab, tisotumab vedotin, olendalizumab, pamrevlumab, lacnotuzumab, cabiralizumab, emactuzumab, axatilimab, gimsilumab, lenzilumab, namilumab, tremelimumab, ulocuplumab, tepoditamab, rovalpituzumab tesirine, tarlatamab, demcizumab, navicixizumab, drozitumab, parsatuzumab, depatuxizumab mafodotin, modotuximab, carotuximab, adecatumumab, adecatumumab, oportuzumab monatox, solitomab, tucotuzumab celmoleukin, edrecolomab, catumaxomab, ifabotuzumab, fibatuzumab, zalutumumab, panitumumab, cetuximab, futuximab, imgatuzumab, laprituximab emtansine, matuzumab, necitumumab, nimotuzumab, tomuzotuximab, amivantamab, amivantamab, epitumomab cituxetan, sontuzumab, duligotuzumab, elgemtumab, lumretuzumab, patritumab, scribantumab, zenocutuzumab, sibrotuzumab, burosumab, aprutumab ixadotin, radretumab, pasotuxizumab, farletuzumab, mirvetuximab soravtansine, vantictumab, TRBS07, 3F8, dinutuximab, dinutuximab beta, ecromeximab, mitumomab, andecaliximab, capromab, codrituzumab, glembatumumab vedotin, talquetamab, talquetamab, trevogrumab, indusatumab vedotin, ficlatuzumab, rilotumumab, zatuximab, pentuzimab, pentuzimab, margetuximab, timigutuzumab, trastuzumab, trastuzumab duocarmazine, trastuzumab emtansine, gancotamab, pertuzumab, ertumaxomab, emibetuzumab, telisotuzumab, telisotuzumab vedotin, derlotuximab biotin, apolizumab, onartuzumab, bersanlimab, enlimomabpegol, rontalizumab, sifalimumab, talizumab, ganitumab, istiratumab, robatumumab, teprotumumab, figitumumab, ganitumab, istiratumab, robatumumab, teprotumumab, cixutumumab, dalotuzumab, xentuzumab, dusigitumab, canakinumab, ustekinumab, ustekinumab, ustekinumab, briakinumab, briakinumab, abrezekimab, lebrikizumab, romilkimab, TNX-650, tralokinumab, anrukinzumab, brodalumab, ixckizumab, netakimab, perakizumab, secukinumab, vunakizumab, afasevikumab, afascvikumab, bimekizumab, bimckizumab, remtolumab, bermckimab, lutikizumab, lutikizumab, gevokizumab, cergutuzumab amunaleukin, fletikumab, fezakinumab, brazikumab, guselkumab, mirikizumab, tildrakizumab, risankizumab, flotetuzumab, nemolizumab, pascolizumab, dupilumab, mepolizumab, reslizumab, clazakizumab, elsilimomab, olokizumab, sarilumab, siltuximab, sirukumab, vobarilizumab, tocilizumab, SA237, satralizumab, enokizumab, prezalizumab, natalizumab, abrilumab, abrilumab, vedolizumab, volociximab, tadocizumab, etaracizumab, ctrolizumab, spesolimab, vatelizumab, erlizumab, lirilumab, relatlimab, cBR96-doxorubicinimmunoconjugate, odulimomab, efalizumab, ladiratuzumab vedotin, simtuzumab, samrotamab vedotin, aselizumab, lupartumab amadotin, imalumab, carlumab, imaprelimab, amatuximab, amatuximab, anetumab ravtansine, narnatumab, clivatuzumab tetraxetan, pemtumomab, gatipotuzumab, ensituximab, lemalesomab, sulesomab, enfortumab vedotin, racotumomab, monalizumab, brontictuzumab, tarextumab, vesencumab, oxelumab, gilvetmab, tislelizumab, dostarlimab, BCD-100, nivolumab, PDR001, pembrolizumab, pidilizumab, retifanlimab, spartalizumab, sintilimab, cemiplimab, olaratumab, tovetumab, rinucumab, atezolizumab, avelumab, durvalumab, lifastuzumab vedotin, bavituximab, acapatamab, capromab, rosopatamab, nezastomig, pasotuxizumab, pelgifatamab, voxalatamab, cofetuzumab pelidotin, denosumab, rosmantuzumab, cirmtuzumab, atinumab, indatuximab ravtansine, elotuzumab, sirtratumab vedotin, sonepcizumab, vandortuzumab vedotin, minretumomab, satumomab pendetide, maslimomab, ontuxizumab, tenatumomab, fresolimumab, metelimumab, lerdelimumab, tezepelumab, etigilimab, tiragotumab, placulumab, prezalumab, infliximab, nerelimomab, ozoralizumab, adalimumab, afelimomab, certolizumab pegol, golimumab, mapatumumab, conatumumab, lexatumumab, tigatuzumab, sacituzumab govitecan, votumumab, pogalizumab, letolizumab, pankomab, anatumomab mafenatox, enavatuzumab, flanvotumab, brolucizumab, ranibizumab, varisacumab, bevacizumab, faricimab, icrucumab, alacizumab pegol, ramucirumab, pritumumab, and onvatilimab.

[5375] In some aspects, the antigen binding polypeptides provided herein comprise a VH1 comprising a VH of an antibody selected from the group consisting of losatuxizumab vedotin, utomilumab, urelumab, oleclumab, naptumomab estafenatox, ascrinvacumab, pintumomab, tacatuzumab tetraxetan, nesvacumab, vanucizumab, timolumab, vapaliximab, vepalimomab, enapotamab vedotin, ianalumab, belimumab, tabalumab, tibulizumab, belantamab mafodotin, teclistamab, teclistamab, detumomab, nacolomab tafenatox, eculizumab, lendalizumab, pexelizumab, pozelimab, ravulizumab, tesidolumab, vilobelimab, abagovomab, igovomab, oregovomab, sofituzumab vedotin, cantuzumab mertansine, cantuzuma bravtansine, girentuximab, altumomab pentetate, arcitumomab, besilesomab, bertilimumab, plozalizumab, mogamulizumab, leronlimab, PRO140, rovelizumab, rovelizumab, talacotuzumab, benralizumab, tavolimab, vonlerolizumab, gavilimomab, ziralimumab, fanolesomab, ipilimumab, ruplizumab, toralizumab, dapirolizumab pegol, toralizumab, dapirolizumab pegol, ruplizumab, blinatumomab, inebilizumab, loncastuximab tesirine, SGN-CD19A, tafasitamab, taplitumomab paptox, XMAB-5574, Budoprutug, Obexelimab, duvortuxizumab, englumafusp alfa, Emfizatamab, zeripatamig, siplizumab, blontuvetmab, FBTA05, ibritumomab tiuxetan, obinutuzumab, ocaratuzumab, ocrelizumab, ofatumumab, rituximab, tositumomab, ublituximab, veltuzumab, divozilimab, eramkafusp alfa, ripertamab, zuberitamab, glofitamab, nofetumomab merpentan, samalizumab, imvotamab, odronextamab, plamotamab, bectumomab, inotuzumab ozogamicin, moxetumomab pasudotox, pinatuzumab vedotin, gomiliximab, lumiliximab, inolimomab, inolimomab, daclizumab, camidanluma btesirine, basiliximab, varlilumab, omburtamab, enoblituzumab, vopratelimab, lulizumabpegol, TGN1412, muromonab-CD3, otelixizumab, teplizumab, visilizumab, epcoritamab, epcoritamab, brentuximab vedotin, iratumumab, azintuxizumab vedotin, gemtuzumab ozogamicin, lintuzumab, vadastuximab talirine, naratuximab emtansine, otlertuzumab, lilotomab satetraxetan, tetulomab, daratumumab, isatuximab, foralumab, mosunctuzumab, mosunetuzumab, cedelizumab, ibalizumab, keliximab, priliximab, tregalizumab, zanolimumab, bleselumab, iscalimab, lucatumumab, ravagalimab, selicrelumab, teneliximab, vanalimab, abciximab, bivatuzumab, iomab-B, telimomab aritox, zolimomab aritox, abituzumab, intetumumab, alemtuzumab, tamtuvetmab, lorvotuzumab mertansine, itolizumab, cusatuzumab, vorsctuzumab mafodotin, milatuzumab, iladatuzumab vedotin, polatuzumab vedotin, galiximab, cibisatamab, zolbetuximab, naxitamab, tisotumab vedotin, olendalizumab, pamrevlumab, lacnotuzumab, cabiralizumab, emactuzumab, axatilimab, gimsilumab, lenzilumab, namilumab, tremelimumab, ulocuplumab, tepoditamab, rovalpituzumab tesirine, tarlatamab, demcizumab, navicixizumab, drozitumab, parsatuzumab, depatuxizumab mafodotin modotuximab, carotuximab, adecatumumab, adccatumumab, oportuzumab monatox, solitomab, tucotuzumab celmoleukin, edrecolomab, catumaxomab, ifabotuzumab, fibatuzumab, zalutumumab, panitumumab, cetuximab, futuximab, imgatuzumab, laprituximab emtansine, matuzumab, necitumumab, nimotuzumab, tomuzotuximab, amivantamab, amivantamab, epitumomab cituxetan, sontuzumab, duligotuzumab, elgemtumab, lumretuzumab, patritumab, seribantumab, zenocutuzumab, sibrotuzumab, burosumab, aprutumab ixadotin, radretumab, pasotuxizumab, farletuzumab, mirvetuximab soravtansine, vantictumab, TRBS07, 3F8, dinutuximab, dinutuximab beta, ecromeximab, mitumomab, andecaliximab, capromab, codrituzumab, glembatumumab vedotin, talquetamab, talquetamab, trevogrumab, indusatumab vedotin, ficlatuzumab, rilotumumab, zatuximab, pentuzimab, pentuzimab, margetuximab, timigutuzumab, trastuzumab, trastuzumab duocarmazine, trastuzumab emtansine, gancotamab, pertuzumab, ertumaxomab, emibetuzumab, telisotuzumab, telisotuzumab vedotin, derlotuximab biotin, apolizumab, onartuzumab, bersanlimab, enlimomabpegol, rontalizumab, sifalimumab, talizumab, ganitumab, istiratumab, robatumumab, teprotumumab, figitumumab, ganitumab, istiratumab, robatumumab, teprotumumab, cixutumumab, dalotuzumab, xentuzumab, dusigitumab, canakinumab, ustekinumab, ustekinumab, ustekinumab, briakinumab, briakinumab, abrezekimab, lebrikizumab, romilkimab, TNX-650, tralokinumab, anrukinzumab, brodalumab, ixckizumab, netakimab, perakizumab, sccukinumab, vunakizumab, afasevikumab, afasevikumab, bimekizumab, bimckizumab, remtolumab, bermekimab, lutikizumab, lutikizumab, gevokizumab, cergutuzumab amunaleukin, fletikumab, fezakinumab, brazikumab, guselkumab, mirikizumab, tildrakizumab, risankizumab, flotetuzumab, nemolizumab, pascolizumab, dupilumab, mepolizumab, reslizumab, clazakizumab, clsilimomab, olokizumab, sarilumab, siltuximab, sirukumab, vobarilizumab, tocilizumab, SA237, satralizumab, enokizumab, prezalizumab, natalizumab, abrilumab, abrilumab, vedolizumab, volociximab, tadocizumab, etaracizumab, ctrolizumab, spesolimab, vatelizumab, erlizumab, lirilumab, relatlimab, cBR96-doxorubicinimmunoconjugate, odulimomab, efalizumab, ladiratuzumab vedotin, simtuzumab, samrotamab vedotin, asclizumab, lupartumab amadotin, imalumab, carlumab, imaprelimab, amatuximab, amatuximab, anetumab ravtansine, narnatumab, clivatuzumab tetraxetan, pemtumomab, gatipotuzumab, ensituximab, lemalesomab, sulesomab, enfortumab vedotin, racotumomab, monalizumab, brontictuzumab, tarextumab, vesencumab, oxelumab, gilvetmab, tislelizumab, dostarlimab, BCD-100, nivolumab, PDR001, pembrolizumab, pidilizumab, retifanlimab, spartalizumab, sintilimab, cemiplimab, olaratumab, tovetumab, rinucumab, atezolizumab, avelumab, durvalumab, lifastuzumab vedotin, bavituximab, acapatamab, capromab, rosopatamab, nezastomig, pasotuxizumab, pelgifatamab, voxalatamab, cofetuzumab pelidotin, denosumab, rosmantuzumab, cirmtuzumab, atinumab, indatuximab ravtansine, elotuzumab, sirtratumab vedotin, sonepcizumab, vandortuzumab vedotin, minretumomab, satumomab pendetide, maslimomab, ontuxizumab, tenatumomab, fresolimumab, metelimumab, lerdelimumab, tezepelumab, etigilimab, tiragotumab, placulumab, prezalumab, infliximab, nerelimomab, ozoralizumab, adalimumab, afelimomab, certolizumab pegol, golimumab, mapatumumab, conatumumab, lexatumumab, tigatuzumab, sacituzumab govitecan, votumumab, pogalizumab, letolizumab, pankomab, anatumomab mafenatox, enavatuzumab, flanvotumab, brolucizumab, ranibizumab, varisacumab, bevacizumab, faricimab, icrucumab, alacizumab pegol, ramucirumab, pritumumab, and onvatilimab.

[5376] In some aspects, the antigen binding polypeptides provided herein comprise a VH2 comprising a VH of an antibody selected from the group consisting of losatuxizumab vedotin, utomilumab, urelumab, oleclumab, naptumomab estafenatox, ascrinvacumab, pintumomab, tacatuzumab tetraxetan, nesvacumab, vanucizumab, timolumab, vapaliximab, vepalimomab, enapotamab vedotin, ianalumab, belimumab, tabalumab, tibulizumab, belantamab mafodotin, teclistamab, teclistamab, detumomab, nacolomab tafenatox, eculizumab, lendalizumab, pexelizumab, pozelimab, ravulizumab, tesidolumab, vilobelimab, abagovomab, igovomab, oregovomab, sofituzumab vedotin, cantuzumab mertansine, cantuzuma bravtansine, girentuximab, altumomab pentetate, arcitumomab, besilesomab, bertilimumab, plozalizumab, mogamulizumab, leronlimab, PRO140, rovelizumab, rovelizumab, talacotuzumab, benralizumab, tavolimab, vonlerolizumab, gavilimomab, ziralimumab, fanolesomab, ipilimumab, ruplizumab, toralizumab, dapirolizumab pegol, toralizumab, dapirolizumab pegol, ruplizumab, blinatumomab, inebilizumab, loncastuximab tesirine, SGN-CD19A, tafasitamab, taplitumomab paptox, XMAB-5574, Budoprutug, Obexelimab, duvortuxizumab, englumafusp alfa, Emfizatamab, zeripatamig, siplizumab, blontuvetmab, FBTA05, ibritumomab tiuxetan, obinutuzumab, ocaratuzumab, ocrelizumab, ofatumumab, rituximab, tositumomab, ublituximab, veltuzumab, divozilimab, eramkafusp alfa, ripertamab, zuberitamab, glofitamab, nofctumomab merpentan, samalizumab, imvotamab, odronextamab, plamotamab, bectumomab, inotuzumab ozogamicin, moxctumomab pasudotox, pinatuzumab vedotin, gomiliximab, lumiliximab, inolimomab, inolimomab, daclizumab, camidanluma btesirine, basiliximab, varlilumab, omburtamab, cnoblituzumab, vopratelimab, lulizumabpegol, TGN1412, muromonab-CD3, otelixizumab, teplizumab, visilizumab, epcoritamab, epcoritamab, brentuximab vedotin, iratumumab, azintuxizumab vedotin, gemtuzumab ozogamicin, lintuzumab, vadastuximab talirine, naratuximab emtansinc, otlertuzumab, lilotomab satetraxetan, tetulomab, daratumumab, isatuximab, foralumab, mosunetuzumab, mosunetuzumab, cedelizumab, ibalizumab, keliximab, priliximab, tregalizumab, zanolimumab, blesclumab, iscalimab, lucatumumab, ravagalimab, sclicrelumab, teneliximab, vanalimab, abciximab, bivatuzumab, iomab-B, telimomab aritox, zolimomab aritox, abituzumab, intetumumab, alemtuzumab, tamtuvetmab, lorvotuzumab mertansine, itolizumab, cusatuzumab, vorsetuzumab mafodotin, milatuzumab, iladatuzumab vedotin, polatuzumab vedotin, galiximab, cibisatamab, zolbetuximab, naxitamab, tisotumab vedotin, olendalizumab, pamrevlumab, lacnotuzumab, cabiralizumab, emactuzumab, axatilimab, gimsilumab, lenzilumab, namilumab, tremelimumab, ulocuplumab, tepoditamab, rovalpituzumab tesirine, tarlatamab, demcizumab, navicixizumab, drozitumab, parsatuzumab, depatuxizumab mafodotin, modotuximab, carotuximab, adecatumumab, adecatumumab, oportuzumab monatox, solitomab, tucotuzumab celmoleukin, edrecolomab, catumaxomab, ifabotuzumab, fibatuzumab, zalutumumab, panitumumab, cetuximab, futuximab, imgatuzumab, laprituximab emtansine, matuzumab, necitumumab, nimotuzumab, tomuzotuximab, amivantamab, amivantamab, epitumomab cituxetan, sontuzumab, duligotuzumab, elgemtumab, lumretuzumab, patritumab, seribantumab, zenocutuzumab, sibrotuzumab, burosumab, aprutumab ixadotin, radretumab, pasotuxizumab, farletuzumab, mirvetuximab soravtansine, vantictumab, TRBS07, 3F8, dinutuximab, dinutuximab beta, ecromeximab, mitumomab, andecaliximab, capromab, codrituzumab, glembatumumab vedotin, talquetamab, talquetamab, trevogrumab, indusatumab vedotin, ficlatuzumab, rilotumumab, zatuximab, pentuzimab, pentuzimab, margetuximab, timigutuzumab, trastuzumab, trastuzumab duocarmazine, trastuzumab emtansine, gancotamab, pertuzumab, ertumaxomab, emibetuzumab, telisotuzumab, telisotuzumab vedotin, derlotuximab biotin, apolizumab, onartuzumab, bersanlimab, enlimomabpegol, rontalizumab, sifalimumab, talizumab, ganitumab, istiratumab, robatumumab, teprotumumab, figitumumab, ganitumab, istiratumab, robatumumab, teprotumumab, cixutumumab, dalotuzumab, xentuzumab, dusigitumab, canakinumab, ustekinumab, ustekinumab, ustekinumab, briakinumab, briakinumab, abrezekimab, lebrikizumab, romilkimab, TNX-650, tralokinumab, anrukinzumab, brodalumab, ixekizumab, netakimab, perakizumab, secukinumab, vunakizumab, afasevikumab, afasevikumab, bimekizumab, bimekizumab, remtolumab, bermekimab, lutikizumab, lutikizumab, gevokizumab, cergutuzumab amunaleukin, fletikumab, fezakinumab, brazikumab, guselkumab, mirikizumab, tildrakizumab, risankizumab, flotetuzumab, nemolizumab, pascolizumab, dupilumab, mepolizumab, reslizumab, clazakizumab, elsilimomab, olokizumab, sarilumab, siltuximab, sirukumab, vobarilizumab, tocilizumab, SA237, satralizumab, enokizumab, prezalizumab, natalizumab, abrilumab, abrilumab, vedolizumab, volociximab, tadocizumab, etaracizumab, ctrolizumab, spesolimab, vatelizumab, erlizumab, lirilumab, relatlimab, cBR96-doxorubicinimmunoconjugate, odulimomab, efalizumab, ladiratuzumab vedotin, simtuzumab, samrotamab vedotin, asclizumab, lupartumab amadotin, imalumab, carlumab, imaprelimab, amatuximab, amatuximab, anetumab ravtansine, narnatumab, clivatuzumab tetraxetan, pemtumomab, gatipotuzumab, ensituximab, lemalesomab, sulesomab, enfortumab vedotin, racotumomab, monalizumab, brontictuzumab, tarextumab, vesencumab, oxelumab, gilvetmab, tislelizumab, dostarlimab, BCD-100, nivolumab, PDR001, pembrolizumab, pidilizumab, retifanlimab, spartalizumab, sintilimab, cemiplimab, olaratumab, tovetumab, rinucumab, atezolizumab, avelumab, durvalumab, lifastuzumab vedotin, bavituximab, acapatamab, capromab, rosopatamab, nezastomig, pasotuxizumab, pelgifatamab, voxalatamab, cofetuzumab pelidotin, denosumab, rosmantuzumab, cirmtuzumab, atinumab, indatuximab ravtansine, elotuzumab, sirtratumab vedotin, sonepcizumab, vandortuzumab vedotin, minretumomab, satumomab pendetide, maslimomab, ontuxizumab, tenatumomab, fresolimumab, metelimumab, lerdelimumab, tezepelumab, etigilimab, tiragotumab, placulumab, prezalumab, infliximab, nerelimomab, ozoralizumab, adalimumab, afelimomab, certolizumab pegol, golimumab, mapatumumab, conatumumab, lexatumumab, tigatuzumab, sacituzumab govitecan, votumumab, pogalizumab, letolizumab, pankomab, anatumomab mafenatox, enavatuzumab, flanvotumab, brolucizumab, ranibizumab, varisacumab, bevacizumab, faricimab, icrucumab, alacizumab pegol, ramucirumab, pritumumab, and onvatilimab.

[5377] In some aspects, the antigen binding polypeptides provided herein comprise a VH1 comprising (i) a complementarity determining region (CDR) 1 having an amino acid sequence that is at least 65%, at least 70%, at least 75%, at least 80%, at least 85%, at least 90%, at least 95%, at least 99%, or 100% identical to any one of SEQ ID NOs: 1099, 1106, 1113, 1117, 1123, 1130, 1137, 1144, 1151, 1158, 1165, 1177, 1184, 1191, 1203, 1215, 1224, 1231, 1238, 1243, 1250, 1257, 1264, 1274, 1281, 1288, 1295, 1302, 1309, 1315, 1322, 1329, 1335, 1342, 1348, 1355, 1362, 1369, 1376, 1385, 1397, 1404, 1417, 1424, 1431, 1437, 1444, 1451, 1458, 1464, 1471, 1478, 1484, 1491, 1498, 1504, 1511, 1515, 1522, 1534, 1547, 1552, 1564, 1577, 1584, 1590, 1597, 1604, 1611, 1618, 1625, 1632, 1639, 1646, 1653, 1660, 1665, 1675, 1683, 1693, 1701, 1705, 1716, 1719, 1731, 1736, 1747, 1756, 1772, 1780, and 1789; (ii) a CDR2 having an amino acid sequence that is at least 65%, at least 70%, at least 75%, at least 80%, at least 85%, at least 90%, at least 95%, at least 99%, or 100% identical to any one of SEQ ID NOs: 1100, 1107, 1114, 1118, 1124, 1131, 1138, 1145, 1152, 1159, 1166, 1178, 1185, 1192, 1204, 1216, 1225, 1232, 1239, 1244, 1251, 1258, 1275, 1282, 1289, 1296, 1303, 1310, 1316, 1323, 1330, 1336, 1343, 1349, 1356, 1363, 1370, 1377, 1386, 1391, 1398, 1405, 1411, 1418, 1425, 1432, 1438, 1445, 1452, 1465, 1472, 1479, 1485, 1492, 1499, 1505, 1516, 1523, 1528, 1535, 1541, 1548, 1553, 1559, 1565, 1571, 1578, 1585, 1591, 1598, 1605, 1612, 1619, 1626, 1633, 1640, 1647, 1654, 1666, 1676, 1684, 1687, 1694, 1702, 1706, 1712, 1717, 1720, 1725, 1732, 1737, 1741, 1748, 1757, 1767, 1773, 1781, and 1790; and (iii) a CDR3 having an amino acid sequence that is at least 65%, at least 70%, at least 75%, at least 80%, at least 85%, at least 90%, at least 95%, at least 99%, or 100% identical to any one of SEQ ID NOs: 1101, 1108, 1115, 1125, 1132, 1139, 1146, 1153, 1160, 1167, 1172, 1179, 1186, 1193, 1197, 1205, 1209, 1217, 1226, 1233, 1240, 1245, 1252, 1259, 1269, 1276, 1283, 1290, 1297, 1304, 1311, 1317, 1324, 1331, 1337, 1344, 1350, 1357, 1364, 1371, 1378, 1387, 1392, 1399, 1406, 1412, 1419, 1426, 1433, 1439, 1446, 1453, 1459, 1466, 1473, 1480, 1486, 1493, 1500, 1506, 1517, 1524, 1529, 1536, 1542, 1549, 1554, 1560, 1566, 1572, 1579, 1586, 1592, 1599, 1606, 1613, 1620, 1627, 1634, 1641, 1648, 1655, 1661, 1667, 1670, 1677, 1685, 1688, 1695, 1703, 1707, 1713, 1733, 1749, 1758, 1762, 1774, 1782, 1791, and 1975.

[5378] In some aspects, the antigen binding polypeptides provided herein comprise a VH2 comprising (i) a complementarity determining region (CDR) 1 having an amino acid sequence that is at least 65%, at least 70%, at least 75%, at least 80%, at least 85%, at least 90%, at least 95%, at least 99%, or 100% identical to any one of SEQ ID NOs: 1099, 1106, 1113, 1117, 1123, 1130, 1137, 1144, 1151, 1158, 1165, 1177, 1184, 1191, 1203, 1215, 1224, 1231, 1238, 1243, 1250, 1257, 1264, 1274, 1281, 1288, 1295, 1302, 1309, 1315, 1322, 1329, 1335, 1342, 1348, 1355, 1362, 1369, 1376, 1385, 1397, 1404, 1417, 1424, 1431, 1437, 1444, 1451, 1458, 1464, 1471, 1478, 1484, 1491, 1498, 1504, 1511, 1515, 1522, 1534, 1547, 1552, 1564, 1577, 1584, 1590, 1597, 1604, 1611, 1618, 1625, 1632, 1639, 1646, 1653, 1660, 1665, 1675, 1683, 1693, 1701, 1705, 1716, 1719, 1731, 1736, 1747, 1756, 1772, 1780, and 1789; (ii) a CDR2 having an amino acid sequence that is at least 65%, at least 70%, at least 75%, at least 80%, at least 85%, at least 90%, at least 95%, at least 99%, or 100% identical to any one of SEQ ID NOs: 1100, 1107, 1114, 1118, 1124, 1131, 1138, 1145, 1152, 1159, 1166, 1178, 1185, 1192, 1204, 1216, 1225, 1232, 1239, 1244, 1251, 1258, 1275, 1282, 1289, 1296, 1303, 1310, 1316, 1323, 1330, 1336, 1343, 1349, 1356, 1363, 1370, 1377, 1386, 1391, 1398, 1405, 1411, 1418, 1425, 1432, 1438, 1445, 1452, 1465, 1472, 1479, 1485, 1492, 1499, 1505, 1516, 1523, 1528, 1535, 1541, 1548, 1553, 1559, 1565, 1571, 1578, 1585, 1591, 1598, 1605, 1612, 1619, 1626, 1633, 1640, 1647, 1654, 1666, 1676, 1684, 1687, 1694, 1702, 1706, 1712, 1717, 1720, 1725, 1732, 1737, 1741, 1748, 1757, 1767, 1773, 1781, and 1790; and (iii) a CDR3 having an amino acid sequence that is at least 65%, at least 70%, at least 75%, at least 80%, at least 85%, at least 90%, at least 95%, at least 99%, or 100% identical to any one of SEQ ID NOs: 1101, 1108, 1115, 1125, 1132, 1139, 1146, 1153, 1160, 1167, 1172, 1179, 1186, 1193, 1197, 1205, 1209, 1217, 1226, 1233, 1240, 1245, 1252, 1259, 1269, 1276, 1283, 1290, 1297, 1304, 1311, 1317, 1324, 1331, 1337, 1344, 1350, 1357, 1364, 1371, 1378, 1387, 1392, 1399, 1406, 1412, 1419, 1426, 1433, 1439, 1446, 1453, 1459, 1466, 1473, 1480, 1486, 1493, 1500, 1506, 1517, 1524, 1529, 1536, 1542, 1549, 1554, 1560, 1566, 1572, 1579, 1586, 1592, 1599, 1606, 1613, 1620, 1627, 1634, 1641, 1648, 1655, 1661, 1667, 1670, 1677, 1685, 1688, 1695, 1703, 1707, 1713, 1733, 1749, 1758, 1762, 1774, 1782, 1791, and 1975.

[5379] In some aspects, the antigen binding polypeptides provided herein comprise a VH1 comprising an amino acid sequence that is at least 65%, at least 70%, at least 75%, at least 80%, at least 85%, at least 90%, at least 95%, at least 99%, or 100% identical to any one of SEQ ID NOs: 1102, 1109, 1116, 1119, 1126, 1133, 1140, 1147, 1154, 1161, 1168, 1173, 1180, 1187, 1194, 1198, 1206, 1210, 1218, 1220, 1227, 1234, 1241, 1246, 1253, 1260, 1265, 1270, 1277, 1284, 1291, 1298, 1305, 1312, 1318, 1325, 1332, 1338, 1345, 1351, 1358, 1365, 1372, 1379, 1381, 1388, 1393, 1400, 1407, 1413, 1420, 1427, 1434, 1440, 1447, 1454, 1460, 1467, 1474, 1481, 1487, 1494, 1501, 1507, 1512, 1518, 1525, 1530, 1537, 1543, 1550, 1555, 1561, 1567, 1573, 1580, 1587, 1593, 1600, 1607, 1614, 1621, 1628, 1635, 1642, 1649, 1656, 1662, 1668, 1671, 1678, 1686, 1696, 1704, 1714, 1722, 1726, 1734, 1742, 1750, 1759, 1760, 1765, 1768, 1775, 1783, 1785, and 1792.

[5380] In some aspects, the antigen binding polypeptides provided herein comprise a VH2 comprising an amino acid sequence that is at least 65%, at least 70%, at least 75%, at least 80%, at least 85%, at least 90%, at least 95%, at least 99%, or 100% identical to any one of SEQ ID NOs: 1102, 1109, 1116, 1119, 1126, 1133, 1140, 1147, 1154, 1161, 1168, 1173, 1180, 1187, 1194, 1198, 1206, 1210, 1218, 1220, 1227, 1234, 1241, 1246, 1253, 1260, 1265, 1270, 1277, 1284, 1291, 1298, 1305, 1312, 1318, 1325, 1332, 1338, 1345, 1351, 1358, 1365, 1372, 1379, 1381, 1388, 1393, 1400, 1407, 1413, 1420, 1427, 1434, 1440, 1447, 1454, 1460, 1467, 1474, 1481, 1487, 1494, 1501, 1507, 1512, 1518, 1525, 1530, 1537, 1543, 1550, 1555, 1561, 1567, 1573, 1580, 1587, 1593, 1600, 1607, 1614, 1621, 1628, 1635, 1642, 1649, 1656, 1662, 1668, 1671, 1678, 1686, 1696, 1704, 1714, 1722, 1726, 1734, 1742, 1750, 1759, 1760, 1765, 1768, 1775, 1783, 1785, and 1792.

[5381] In some aspects, the infectious disease antigen that is not a sarbecovirus antigen is:
[5382] (i) a viral antigen elected from the group consisting of an influenza virus (A, B, C) antigen (e.g., influenza virus envelope proteins, for example, influenza virus neuraminidase (NA, N1, N2, N3, N4, N5, N6, N7, N8, N9, N10, N11), influenza virus hemagglutinin (H1, H2, H3, H4, H5, H6, H7, H8, H9, H10, H11, H12, H13, H14, H15, H16, H17, H18) (e.g., H1N1, H3N2, H5N1, H7N9, H9N2), Yamagata virus antigen, Victoria virus antigen, influenza virus structural proteins (e.g., M1, M2, capsid protein), influenza virus functional proteins (e.g., ribonucleoprotein (NP), primary interferon antagonist (NS1), nuclear export protein (NEP)) influenza virus accessory proteins (e.g., PB2, PB1, or PA), for example, anti-HA, anti-NA, anti-H1, anti-H3, anti-H5, anti-H7, anti-H9, anti-N1, anti-N2, anti-N9, anti-H1N1, anti-H3N2, anti-H5N1, anti-H7N9, anti-H9N2, anti-A protein, anti-B protein, anti-stem, anti-M1, anti-M2, anti-capsid, anti-NP, anti-NS1, anti-NEP, anti-PB1, anti-PB2, and anti-PA); a swine influenza virus antigen (e.g., swine flu hemagglutinin, swine flu neuraminidase); a classical swine fever (CSF) (hog colera) virus antigen; an equine influenza virus antigen (e.g., equine influenza virus typeA/Miami 63 neuraminidase, equine influenza virus type A/Kentucky 81 neuraminidase, equine influenza virus type A/Alaska 91 neuraminidase); parainfluenza viruses (e.g., bovine parainfluenza virus, bovine parainfluenza virus type 3 fusion protein, bovine parainfluenza virus type 3 hemagglutinin neuraminidase); a (human) respiratory syncytial virus (RSV)-viral antigen (e.g., RSV F glycoprotein, RSV G glycoprotein. F protein of respiratory syncytial virus, RSV fusion glycoprotein); a herpes simplex virus (HSV) antigen (e.g., herpes simplex virus glycoproteins gB, gC, gD, and gE, herpes simplex virus type 2 glycoprotein gB); a Dengue virus antigen (e.g., core protein, matrix protein, glycoprotein E of Dengue virus, or other protein of Dengue virus); a measles virus antigen (e.g., hemagglutinin); a poliovirus 1 antigen (e.g., poliovirus 1 proteins (VP1)), a HIV-1 antigen and HIV-2 antigen (e.g., HIV envelope proteins (e.g., envelope glycoproteins of HIV 1, HIV envelope glycoprotein (Env), HIV envelope glycoprotein gp160, HIV envelope surface glycoprotein gp120, HIV transmembrane envelope protein gp41), HIV structural proteins (e.g., p17, p24, p7, p55), HIV functional proteins (e.g., p66, HIV-1 protease (PR), p31), HIV accessory proteins (e.g., Nef, Tat, Rev, Vif, Vpr, Vpu)); a hepatitis virus (HAV, HBV, HCV, HDV, HEV) antigen (e.g., hepatitis B virus antigen (e.g., surface antigen, core protein), hepatitis C virus antigen (e.g., glycoprotein E1E2)); a rabies virus (Rabies lyssavirus) antigen (e.g., rabies virus glycoprotein, e.g., G glycoprotein); a pseudorabies virus antigen (e.g., pseudorabies virus g50) (gpD), pseudorabies virus II (gpB), pseudorabies virus III (gpC), pseudorabies virus glycoprotein H, pseudorabies virus glycoprotein E); a papillomavirus (HPV) antigen; an Epstein-Barr virus (EBV) (Gamma herpes virus 4) antigen; a Herpes simplex virus (HSV, HSV-1, HSV-2) antigen (e.g., human herpes virus 8, equine herpes virus antigen (e.g., type 1 glycoprotein B, type 1 glycoprotein D)); a Herpes zoster antigen; a Cytomegalovirus antigen (e.g., cytomegalovirus glycoprotein B); a Zika virus antigen; a Transmissible gastroenteritis virus (TGEV) antigen (e.g., glycoprotein 195, matrix protein); a rotavirus antigen (e.g., swine rotavirus glycoprotein 38); a parvovirus antigen (e.g., swine parvovirus capsid protein); a filoviruses (e.g., Marburg and Ebola) antigen; a bovine viral diarrhea virus antigen (e.g., glycoprotein 55); a Newcastle disease virus antigen (hemagglutinin, neuraminidase); an orthopoxvirus antigen; a coxsackievirus antigen and aphthovirus (foot and mouth disease virus) antigen; a yellow fever virus antigen; a Chikunga virus antigen; a Nipah virus antigen; an African swine fever virus antigen; a rhinotracheitis virus antigen (e.g., infectious bovine rhinotracheitis virus glycoprotein E, glycoprotein G); a laryngotracheitis virus antigen (e.g., infectious laryngotracheitis virus glycoprotein G or glycoprotein I); a La Crosse virus antigen (e.g., La Crosse virus glycoprotein); a neonatal calf diarrhoea virus antigen; a Venezuelan equine encephalomyelitis virus antigen; a punta toro virus antigen; a murine leukemia virus antigen; a mouse mammary tumor virus antigen; a bovine respiratory syncytial virus antigen (e.g., bovine respiratory syncytial virus attachment protein (BRSV G), bovine respiratory syncytial virus fusion protein (BRSV F), bovine respiratory syncytial virus nucleocapsid protein (BRSVN)); a bovine E viral diarrhoea virus antigen (e.g., glycoprotein 48 and glycoprotein 53); a metapneumovirus (HMPV) antigen; and an Ebola virus antigen (e.g., ebolavirus glycoprotein, e.g., Zaire ebolavirus glycoprotein); or
[5383] (ii) a bacterial or parasite antigen selected from the group consisting of a Plasmodium (e.g., Plasmodium falciparum, Plasmodium vivax, Plasmodium malariae, Plasmodium ovale, Plasmodium knowlesi) antigen, a Streptococcus (e.g., Streptococcus pneumoniae. Streptococcus pyogenes, Streptococcus agalactiae. Streptococcus mutans, Streptococcus viridans, Streptococcus anginosus, Streptococcus intermedius, Streptococcus constellatus) antigen (e.g., 24M epitope), a Neisseria gonorrhoeae antigen (e.g., gonococcal pilin), a Corynebacterium antigen (e.g., Corynebacterium diphtheria (diptheria toxin). Corynebacterium ulcerans, Corynebacterium pseudotuberculosis). Mycobacterium tuberculosis antigens. Brachyspira hyodysenteriae (Serpulina hydodysenteriae) antigen (e.g., Serpulina hydodysenteriae protective antigen), a Chlamydia antigen (e.g., Chlamydia trachomatis) (e.g., MOMP and PorB), a Mycoplasma sp. (e.g., Mycoplasma genitalium, Mycoplasma hyopneumoniae. Mycoplasma pneumonia) antigen, a Staphylococcus (e.g., Staphylococcus aureus, coagulase-negative staphylococci (CoNS). Staphylococcus aureus alpha toxin. Staphylococcus aureus bi-component leucocidin) antigen, a Klebsiella sp. antigen, an Escherichia coli antigen (e.g., E. coli shiga toxin type-2. E. coli shiga toxin type-1), a Bacillus sp. (e.g., Bacillus anthracis, e.g., Bacillus anthracis anthrax) antigen, a Pseudomonas aeruginosa antigen (e.g., Pseudomonas aeruginosa type III secretion system), an Enterococcus sp. antigen, an Enterobacter sp. antigen, a Proteus sp. antigen, an Actinobacter sp. antigen, a Mycobacterium avium (Mycobacterium avium complex (MAC)) antigen, a Salmonella bacteria antigen, a Clostridium difficile antigen, a Toxoplasma (e.g., Toxoplasma gondii) antigen, a Histoplasma antigen, a Candida antigen, a Coccidioides antigen, a Cryptococcus antigen, a Cryptosporidium antigen, and a Cystoisospora (e.g., Cystoisospora belli) antigen, and another antigen (e.g., endotoxins, lymphotoxins (e.g., lymphotoxin alpha LTA), phosphatidylserine, Hsp90, CCR5, lipoteichoic acid, clumping factor A).

[5384] In some aspects, the antigen binding polypeptides provided herein comprise a VH1 comprising a heavy chain complementarity determining region 1 (HCDR1), HCDR2, and/or HCDR3 of an antibody selected from the group consisting of libivirumab, rmab, rivabazumab pegol, setoxaximab, suvizumab, suvratoxumab, sevirumab, pritoxaximab, porgaviximab, REGN-EB3, obiltoxaximab, gedivumab, foravirumab, larcaviximab, motavizumab, palivizumab, rafivirumab, regavirumab, tuvirumab, cosfroviximab, felvizumab, atidortoxumab, edobacomab, nebacumab, pateclizumab, raxibacumab, urtoxazumab, tosatoxumab, berlimatoxumab, CR6261, diridavumab, firivumab, lesofavumab, navivumab, exbivirumab, lenvervimab, bavituximab, bezlotoxumab, efungumab, leronlimab, nirsevimab, pagibaximab, panobacumab, tefibazumab, ansuvimab, atoltivimab, maftivimab, and odesivimab.

[5385] In some aspects, the antigen binding polypeptides provided herein comprise a VH2 comprising a heavy chain complementarity determining region 1 (HCDR1), HCDR2, and/or HCDR3 of an antibody selected from the group consisting of libivirumab, rmab, rivabazumab pegol, setoxaximab, suvizumab, suvratoxumab, sevirumab, pritoxaximab, porgaviximab, REGN-EB3, obiltoxaximab, gedivumab, foravirumab, larcaviximab, motavizumab, palivizumab, rafivirumab, regavirumab, tuvirumab, cosfroviximab, felvizumab, atidortoxumab, edobacomab, nebacumab, pateclizumab, raxibacumab, urtoxazumab, tosatoxumab, berlimatoxumab, CR6261, diridavumab, firivumab, lesofavumab, navivumab, exbivirumab, lenvervimab, bavituximab, bezlotoxumab, efungumab, leronlimab, nirsevimab, pagibaximab, panobacumab, tefibazumab, ansuvimab, atoltivimab, maftivimab, and odesivimab.

[5386] In some aspects, the antigen binding polypeptides provided herein comprise a VH1 comprising a VH of an antibody selected from the group consisting of libivirumab, rmab, rivabazumab pegol, setoxaximab, suvizumab, suvratoxumab, sevirumab, pritoxaximab, porgaviximab, REGN-EB3, obiltoxaximab, gedivumab, foravirumab, larcaviximab, motavizumab, palivizumab, rafivirumab, regavirumab, tuvirumab, cosfroviximab, felvizumab, atidortoxumab, edobacomab, nebacumab, pateclizumab, raxibacumab, urtoxazumab, tosatoxumab, berlimatoxumab, CR6261, diridavumab, firivumab, lesofavumab, navivumab, exbivirumab, lenvervimab, bavituximab, bezlotoxumab, efungumab, leronlimab, nirsevimab, pagibaximab, panobacumab, tefibazumab, ansuvimab, atoltivimab, maftivimab, and odesivimab.

[5387] In some aspects, the antigen binding polypeptides provided herein comprise a VH2 comprising a VH of an antibody selected from the group consisting of libivirumab, rmab, rivabazumab pegol, setoxaximab, suvizumab, suvratoxumab, sevirumab, pritoxaximab, porgaviximab, REGN-EB3, obiltoxaximab, gedivumab, foravirumab, larcaviximab, motavizumab, palivizumab, rafivirumab, regavirumab, tuvirumab, cosfroviximab, felvizumab, atidortoxumab, edobacomab, nebacumab, pateclizumab, raxibacumab, urtoxazumab, tosatoxumab, berlimatoxumab, CR6261, diridavumab, firivumab, lesofavumab, navivumab, exbivirumab, lenvervimab, bavituximab, bezlotoxumab, efungumab, leronlimab, nirsevimab, pagibaximab, panobacumab, tefibazumab, ansuvimab, atoltivimab, maftivimab, and odesivimab.

[5388] In some aspects, the antigen binding polypeptides provided herein comprise a VH1 comprising (i) a complementarity determining region (CDR) 1 having an amino acid sequence that is at least 65%, at least 70%, at least 75%, at least 80%, at least 85%, at least 90%, at least 95%, at least 99%, or 100% identical to any one of SEQ ID NOs: 1577, 1795, 1801, 1813, 1820, 1827, 1981, 1989, 1997, and 2005; (ii) a CDR2 having an amino acid sequence that is at least 65%, at least 70%, at least 75%, at least 80%, at least 85%, at least 90%, at least 95%, at least 99%, or 100% identical to any one of SEQ ID NOs: 1159, 1802, 1807, 1814, 1821, 1828, 1982, 1990, 1998, and 2006; and (iii) a CDR3 having an amino acid sequence that is at least 65%, at least 70%, at least 75%, at least 80%, at least 85%, at least 90%, at least 95%, at least 99%, or 100% identical to any one of SEQ ID NOs: 1796, 1803, 1808, 1815, 1822, 1829, 1983, 1991, 1999, and 2007.

[5389] In some aspects, the antigen binding polypeptides provided herein comprise a VH2 comprising (i) a complementarity determining region (CDR) 1 having an amino acid sequence that is at least 65%, at least 70%, at least 75%, at least 80%, at least 85%, at least 90%, at least 95%, at least 99%, or 100% identical to any one of SEQ ID NOs: 1577, 1795, 1801, 1813, 1820, 1827, 1981, 1989, 1997, and 2005; (ii) a CDR2 having an amino acid sequence that is at least 65%, at least 70%, at least 75%, at least 80%, at least 85%, at least 90%, at least 95%, at least 99%, or 100% identical to any one of SEQ ID NOs: 1159, 1802, 1807, 1814, 1821, 1828, 1982, 1990, 1998, and 2006; and (iii) a CDR3 having an amino acid sequence that is at least 65%, at least 70%, at least 75%, at least 80%, at least 85%, at least 90%, at least 95%, at least 99%, or 100% identical to any one of SEQ ID NOs: 1796, 1803, 1808, 1815, 1822, 1829, 1983, 1991, 1999, and 2007.

[5390] In some aspects, the antigen binding polypeptides provided herein comprise a VH1 comprising an amino acid sequence that is at least 65%, at least 70%, at least 75%, at least 80%, at least 85%, at least 90%, at least 95%, at least 99%, or 100% identical to any one of SEQ ID NOs 1797, 1804, 1809, 1816, 1823, 1830, 1984, 1992, 2000, and 2008.

[5391] In some aspects, the antigen binding polypeptides provided herein comprise a VH2 comprising an amino acid sequence that is at least 65%, at least 70%, at least 75%, at least 80%, at least 85%, at least 90%, at least 95%, at least 99%, or 100% identical to any one of SEQ ID NOs 1797, 1804, 1809, 1816, 1823, 1830, 1984, 1992, 2000, and 2008.

[5392] In some aspects, the other-pathology antigen is selected from the group consisting of Amyloid beta, β-amyloid, PCSK9), IFN-α/β receptor, Rhesus factor, nerve growth factor (NGF), DPP4, fibrin II beta chain, ACVR2B, serum amyloid A protein SOST, FGF 23, VWF, tissue factor pathway inhibitor (TFPI), 1-40) and 1-42, selectin P, glucagon receptor (GCGR), amyloid P component, GDF-8, CXCL10 IP-10, repulsive guidance molecule A RGMA, IFN-γ, activated F9/F10, calcitonin gene-related peptide (CGRP), angiopoietin 3, IFN receptor, IFN-γ, calcitonin, β-amyloid 1-40) and 1-42, tau protein, dabigatran, cardiac myosin, selectin P. Complement factor D (CFD), kallikrein, GDF-8, IGHE, tissue factor pathway inhibitor (TFPI), GMCSF receptor α-chain, amyloid, IgE Fc region, MASP-2, oxLDL, GMCSF, NOGO-A. Alpha-synuclein, NGF, myelin-associated glycoprotein, RHD (gene) (RHD), sclerostin, FCGRT, sclerostin SOST, mucosal addressin cell adhesion molecule, myostatin, RSVFR, complement component 1s C1s, C5, and IL31.

[5393] In some aspects, the antigen binding polypeptides provided herein comprise a VH1 comprising a heavy chain complementarity determining region 1 (HCDR1), HCDR2, and/or HCDR3 of an antibody selected from the group consisting of aducanumab, alirocumab, frovocimab, lodelcizumab, bococizumab, evolocumab, ralpancizumab, anifrolumab, atorolimumab, bapineuzumab, bedinvetmab, begelomab, biciromab, bimagrumab, birtamimab, blosozumab, burosumab, caplacizumab, concizumab, crenezumab, crizanlizumab, crotedumab, dezamizumab, domagrozumab, donanemab, eldelumab, elezanumab, emapalumab, emicizumab, eptinezumab, erenumab, evinacumab, faralimomab, fasinumab, fontolizumab, fremanezumab, frunevetmab, fulranumab, galcanezumab, gantenerumab, gosuranemab, idarucizumab, imciromab, inclacumab, lampalizumab, lanadelumab, landogrozumab, lecanemab, ligelizumab, marstacimab, mavrilimumab, morolimumab, NEOD001, omalizumab, oMS721, orticumab, otilimab, ozanezumab, ponezumab, prasinezumab, quilizumab, ranevetmab, refanezumab, roledumab, romosozumab, rozanolixizumab, setrusumab, SHP647, solanezumab, stamulumab, suptavumab, sutimlimab, tanezumab, crovalimab, and lokivetmab.

[5394] In some aspects, the antigen binding polypeptides provided herein comprise a VH2 comprising a heavy chain complementarity determining region 1 (HCDR1), HCDR2, and/or HCDR3 of an antibody selected from the group consisting of aducanumab, alirocumab, frovocimab, lodelcizumab, bococizumab, evolocumab, ralpancizumab, anifrolumab, atorolimumab, bapineuzumab, bedinvetmab, begelomab, biciromab, bimagrumab, birtamimab, blosozumab, burosumab, caplacizumab, concizumab, crenezumab, crizanlizumab, crotedumab, dezamizumab, domagrozumab, donanemab, eldelumab, elezanumab, emapalumab, emicizumab, eptinezumab, erenumab, evinacumab, faralimomab, fasinumab, fontolizumab, fremanezumab, frunevetmab, fulranumab, galcanezumab, gantenerumab, gosuranemab, idarucizumab, imciromab, inclacumab, lampalizumab, lanadelumab, landogrozumab, lecanemab, ligelizumab, marstacimab, mavrilimumab, morolimumab, NEOD001, omalizumab, oMS721, orticumab, otilimab, ozanezumab, ponezumab, prasinezumab, quilizumab, ranevetmab, refanezumab, roledumab, romosozumab, rozanolixizumab, setrusumab, SHP647, solanezumab, stamulumab, suptavumab, sutimlimab, tanezumab, crovalimab, and lokivetmab.

[5395] In some aspects, the antigen binding polypeptides provided herein comprise a VH1 comprising a VH of an antibody selected from the group consisting of aducanumab, alirocumab, frovocimab, lodelcizumab, bococizumab, evolocumab, ralpancizumab, anifrolumab, atorolimumab, bapincuzumab, bedinvetmab, begelomab, biciromab, bimagrumab, birtamimab, blosozumab, burosumab, caplacizumab, concizumab, crenezumab, crizanlizumab, crotedumab, dezamizumab, domagrozumab, donanemab, eldelumab, elezanumab, emapalumab, emicizumab, eptinezumab, erenumab, evinacumab, faralimomab, fasinumab, fontolizumab, fremanezumab, frunevetmab, fulranumab, galcanezumab, gantenerumab, gosuranemab, idarucizumab, imciromab, inclacumab, lampalizumab, lanadelumab, landogrozumab, lecanemab, ligelizumab, marstacimab, mavrilimumab, morolimumab, NEOD001, omalizumab, oMS721, orticumab, otilimab, ozanezumab, ponezumab, prasinezumab, quilizumab, ranevetmab, refanezumab, roledumab, romosozumab, rozanolixizumab, setrusumab, SHP647, solanezumab, stamulumab, suptavumab, sutimlimab, tanezumab, crovalimab, and lokivetmab.

[5396] In some aspects, the antigen binding polypeptides provided herein comprise a VH2 comprising a VH of an antibody selected from the group consisting of aducanumab, alirocumab, frovocimab, lodelcizumab, bococizumab, evolocumab, ralpancizumab, anifrolumab, atorolimumab, bapineuzumab, bedinvetmab, begelomab, biciromab, bimagrumab, birtamimab, blosozumab, burosumab, caplacizumab, concizumab, crenezumab, crizanlizumab, crotedumab, dezamizumab, domagrozumab, donanemab, eldelumab, elezanumab, emapalumab, emicizumab, eptinezumab, erenumab, evinacumab, faralimomab, fasinumab, fontolizumab, fremanezumab, frunevetmab, fulranumab, galcanezumab, gantenerumab, gosuranemab, idarucizumab, imciromab, inclacumab, lampalizumab, lanadelumab, landogrozumab, lecanemab, ligelizumab, marstacimab, mavrilimumab, morolimumab, NEOD001, omalizumab, oMS721, orticumab, otilimab, ozanezumab, ponezumab, prasinezumab, quilizumab, ranevetmab, refanezumab, roledumab, romosozumab, rozanolixizumab, setrusumab, SHP647, solanezumab, stamulumab, suptavumab, sutimlimab, tanezumab, crovalimab, and lokivetmab.

[5397] In some aspects, the antigen binding polypeptides provided herein comprise a VH1 comprising (i) a complementarity determining region (CDR) 1 having an amino acid sequence that is at least 65%, at least 70%, at least 75%, at least 80%, at least 85%, at least 90%, at least 95%, at least 99%, or 100% identical to any one of SEQ ID NOs: 1309, 1362, 1437, 1552, 1618, 1639, 1834, 1841, 1848, 1855, 1862, 1881, 1894, 1901, 1920, 1927, 1934, 1941, 1953, 1959, and 1966; (ii) a CDR2 having an amino acid sequence that is at least 65%, at least 70%, at least 75%, at least 80%, at least 85%, at least 90%, at least 95%, at least 99%, or 100% identical to any one of SEQ ID NOs: 1363, 1835, 1842, 1849, 1856, 1863, 1869, 1875, 1882, 1888, 1895, 1902, 1908, 1914, 1921, 1928, 1935, 1942, 1948, 1954, 1960, 1967, and 1972; and (iii) a CDR3 having an amino acid sequence that is at least 65%, at least 70%, at least 75%, at least 80%, at least 85%, at least 90%, at least 95%, at least 99%, or 100% identical to any one of SEQ ID NOs: 1364, 1836, 1843, 1850, 1857, 1864, 1870, 1876, 1883, 1889, 1896, 1903, 1909, 1915, 1922, 1929, 1936, 1943, 1949, 1955, 1961, 1968, and 1973.

[5398] In some aspects, the antigen binding polypeptides provided herein comprise a VH2 comprising (i) a complementarity determining region (CDR) 1 having an amino acid sequence that is at least 65%, at least 70%, at least 75%, at least 80%, at least 85%, at least 90%, at least 95%, at least 99%, or 100% identical to any one of SEQ ID NOs: 1309, 1362, 1437, 1552, 1618, 1639, 1834, 1841, 1848, 1855, 1862, 1881, 1894, 1901, 1920, 1927, 1934, 1941, 1953, 1959, and 1966; (ii) a CDR2 having an amino acid sequence that is at least 65%, at least 70%, at least 75%, at least 80%, at least 85%, at least 90%, at least 95%, at least 99%, or 100% identical to any one of SEQ ID NOs: 1363, 1835, 1842, 1849, 1856, 1863, 1869, 1875, 1882, 1888, 1895, 1902, 1908, 1914, 1921, 1928, 1935, 1942, 1948, 1954, 1960, 1967, and 1972; and (iii) a CDR3 having an amino acid sequence that is at least 65%, at least 70%, at least 75%, at least 80%, at least 85%, at least 90%, at least 95%, at least 99%, or 100% identical to any one of SEQ ID NOs: 1364, 1836, 1843, 1850, 1857, 1864, 1870, 1876, 1883, 1889, 1896, 1903, 1909, 1915, 1922, 1929, 1936, 1943, 1949, 1955, 1961, 1968, and 1973.

[5399] In some aspects, the antigen binding polypeptides provided herein comprise a VH1 comprising an amino acid sequence that is at least 65%, at least 70%, at least 75%, at least 80%, at least 85%, at least 90%, at least 95%, at least 99%, or 100% identical to any one of SEQ ID NOs: 1365, 1837, 1844, 1851, 1858, 1865, 1871, 1877, 1884, 1890, 1897, 1904, 1910, 1916, 1923, 1930, 1937, 1944, 1950, 1956, 1962, 1969, and 1974.

[5400] In some aspects, the antigen binding polypeptides provided herein comprise a VH2 comprising an amino acid sequence that is at least 65%, at least 70%, at least 75%, at least 80%, at least 85%, at least 90%, at least 95%, at least 99%, or 100% identical to any one of SEQ ID NOs: 1365, 1837, 1844, 1851, 1858, 1865, 1871, 1877, 1884, 1890, 1897, 1904, 1910, 1916, 1923, 1930, 1937, 1944, 1950, 1956, 1962, 1969, and 1974.

[5401] In some aspects, the antigen binding polypeptides disclosed herein, comprise one or more CL, as indicated in the formulas representing the antigen binding polypeptides disclosed herein. In some aspects, the CL comprises an amino acid sequence at least 65%, at least 70%, at least 75%, at least 80%, at least 85%, at least 90%, at least 95%, at least 99%, or 100% identical to any one of SEQ ID NOs: 374, 637, or 1092-1095.

[5402] In some aspects, the antigen binding polypeptides provided herein further comprise an Fc region. In some aspects, the antigen binding polypeptides provided herein further comprise an Fc region at the carboxy-terminus. In some aspects, the Fc region comprises an immunoglobulin heavy chain constant region 2 (CH2) and/or an immunoglobulin heavy chain constant region 3 (CH3). In some aspects, the Fc region further comprises an immunoglobulin hinge (i.e., a hinge region). In some aspects, the hinge region comprises an amino acid sequence at least 65%, at least 70%, at least 75%, at least 80%, at least 85%, at least 90%, at least 95%, at least 99%, or 100% identical to any one of SEQ ID NOs: 635, 636, 1072, 1073, or 1074. In some aspects, the Fc region comprises a CH2 and a CH3. In some aspects, the CH2 comprises an amino acid sequence that is at least 65%, at least 70%, at least 75%, at least 80%, at least 85%, at least 90%, at least 95%, at least 99%, or 100% identical to any one of SEQ ID NOs: 1075-1078. In some aspects, the CH3 comprises an amino acid sequence that is at least 65%, at least 70%, at least 75%, at least 80%, at least 85%, at least 90%, at least 95%, at least 99%, or 100% identical to any one of SEQ ID NOs: 1079-1085. In some aspects, the Fc region comprises an amino acid sequence that is at least 65%, at least 70%, at least 75%, at least 80%, at least 85%, at least 90%, at least 95%, at least 99%, or 100% identical to any one of SEQ ID NOs: 376-380.

[5403] In some aspects, the Fc region comprises one or more amino acid substitutions. In some aspects, the one or more amino acid substitutions comprise one or more half-life extension amino acid substitutions. In some aspects, the one or more half-life extension amino acid substitutions comprise one or more of amino acid substitutions M428L, N434A, N434S, L234F, L235E, P331S, M252Y, S254T, and T256E, or equivalent thereof, based on the EU numbering scheme. In some aspects, the one or more half-life extension amino acid substitutions comprise a LA (M428L and N434A, or equivalent thereof, based on the EU numbering scheme) amino acid substitution. In some aspects, the one or more half-life extension amino acid substitutions comprise a LS (M428L and N434S, or equivalent thereof, based on the EU numbering scheme) amino acid substitution. In some aspects, the one or more half-life extension amino acid substitutions comprise L234F and L235E, or equivalent thereof (based on the EU numbering scheme) amino acid substitutions. In some aspects, the one or more half-life extension amino acid substitutions comprise a TM (L234F, L235E, and P331S, or equivalent thereof, based on the EU numbering scheme) amino acid substitution. In some aspects, the one or more half-life extension amino acid substitutions comprise a YTE (M252Y, S254T, and T256E, or equivalent thereof, based on the EU numbering scheme) amino acid substitution.

[5404] In some aspects, the Fc region comprises at least one knob-into-hole modification. In some aspects, the antigen binding polypeptides disclosed herein are comprised in IgG1 or IgG4 antibodies or antigen binding fragments thereof. In some aspects, the knob-into-hole modification comprises one or more of knob substitutions of S354C and T366W, or equivalent thereof, and/or one or more of hole substitutions of Y349C, T366S, L368A, Y407V, or equivalent thereof, or a combination thereof, based on the EU numbering scheme. In some aspects, the Fc region comprises a knob-into-hole modification comprising knob substitutions of S354C and T366W, or equivalent thereof, and/or hole substitutions of Y349C, T366S, L368A and Y407V, or equivalent thereof, and/or a half-life extension amino acid substitution comprising: a LA (M428L and N434A, or equivalent thereof, based on the EU numbering scheme) amino acid substitution, a LS (M428L and N434S, or equivalent thereof, based on the EU numbering scheme) amino acid substitution. L234F and L235E, or equivalent thereof (based on the EU numbering scheme) amino acid substitutions, a TM (L234F, L235E, and P331S, or equivalent thereof, based on the EU numbering scheme) amino acid substitution, a YTE (M252Y, S254T, and T256E, or equivalent thereof, based on the EU numbering scheme) amino acid substitution, or any combination thereof.

[5405] In some aspects, the Fc region comprises knob substitutions of S354C and T366W, or equivalent thereof, and a half-life extension amino acid substitution comprising: a LA (M428L and N434A, or equivalent thereof, based on the EU numbering scheme) amino acid substitution, a LS (M428L and N434S, or equivalent thereof, based on the EU numbering scheme) amino acid substitution, L234F and L235E, or equivalent thereof (based on the EU numbering scheme) amino acid substitutions, a TM (L234F, L235E, and P331S, or equivalent thereof, based on the EU numbering scheme) amino acid substitution, a YTE (M252Y, S254T, and T256E, or equivalent thereof, based on the EU numbering scheme) amino acid substitution, or any combination thereof.

[5406] In some aspects, the Fc region comprises hole substitutions of Y349C, T366S, L368A and Y407V, or equivalent thereof, and a half-life extension amino acid substitution comprising: a LA (M428L and N434A, or equivalent thereof, based on the EU numbering scheme) amino acid substitution, a LS (M428L and N434S, or equivalent thereof, based on the EU numbering scheme) amino acid substitution. L234F and L235E, or equivalent thereof (based on the EU numbering scheme) amino acid substitutions, a TM (L234F, L235E, and P331S, or equivalent thereof, based on the EU numbering scheme) amino acid substitution, a YTE (M252Y, S254T, and T256E, or equivalent thereof, based on the EU numbering scheme) amino acid substitution, or any combination thereof.

[5407] In some aspects, the antigen binding polypeptides disclosed herein comprise one or more Fc effector function knockout mutation. In some aspects, the antigen binding polypeptides disclosed herein are comprised in IgG1 or IgG4 antibodies or antigen binding fragments thereof. In some aspects, the Fc effector function knockout mutation is L234A, L235A, P239A, or equivalent thereof, or a combination thereof, based on the EU numbering scheme.

[5408] In some aspects, the antigen binding polypeptides disclosed herein comprise a mutation at a glycosylation site. In some aspects, the mutation at a glycosylation site is a mutation at an N-glycosylation site. In some aspects, the antigen binding polypeptides comprise a VH comprising a mutation at a glycosylation site. In some aspects, the mutation at a glycosylation site is a mutation at an N-glycosylation site. In some aspects, the mutation at an N-glycosylation site is at amino acid N62, or equivalent thereof, of the VH region or equivalent thereof. In some aspects, the mutation at an N-glycosylation site at amino acid N62 is N62Q or N62S, or equivalent thereof.

[5409] In some aspects, the antigen binding polypeptides disclosed herein, comprise one or more optional linkers. The one or more optional linkers are indicated herein as Ln, wherein n is an integer, and the integer next to each L indicates each L comprised in the antigen binding polypeptides disclosed herein. For example, if an antigen binding polypeptide disclosed herein comprises two linkers, the first linker from N-terminus to C-terminus is herein indicated as L1, and the second linker from N-terminus to C-terminus is herein indicated as L2. In some aspects, any one of the optional linkers each independently have a length of from 0 amino acids to about 50 amino acids. In some aspects, any one of the optional linkers each independently have a length of from 5 amino acids to about 40 amino acids.

[5410] In some aspects, any one of the optional linkers are non-immunogenic. In some aspects, any one of the optional linkers do not contain a consensus T cell epitope.

[5411] In some aspects, any of Ln comprises an amino acid sequence of G or A, or an amino acid sequence at least 65%, at least 70%, at least 75%, at least 80%, at least 85%, at least 90%, at least 95%, at least 99%, or 100% identical to amino acid sequence GSS or ASG, or an amino acid sequence at least 65%, at least 70%, at least 75%, at least 80%, at least 85%, at least 90%, at least 95%, at least 99%, or 100% identical to any one of SEQ ID NOs: 333-373 or 967-971. In some aspects, Ln comprises an amino acid sequence at least 65%, at least 70%, at least 75%, at least 80%, at least 85%, at least 90%, at least 95%, at least 99%, or 100% identical to any one of SEQ ID NOs: 333-345 or 967-971.

[5412] In some aspects, the antigen binding polypeptides provided herein have a structure, from amino-terminus to carboxy-terminus, represented by:
[5413] VL1-L1-VL2-L2-VL3-L3-CH1;
[5414] VL1-L1-VL3-L2-VL2-L3-CH1;
[5415] VL2-L1-VL1-L2-VL3-L3-CH1;
[5416] VL2-L1-VL3-L2-VL1-L3-CH1;
[5417] VL3-L1-VL1-L2-VL2-L3-CH1; or
[5418] VL3-L1-VL2-L2-VL1-L3-CH1;
[5419] wherein:
[5420] VL1 is a first immunoglobulin light chain variable region that specifically binds to (i) a tumor-associated antigen (TAA), (ii) an infectious disease antigen that is not a sarbecovirus antigen, or (iii) an other-pathology antigen;
[5421] VL2 is a second immunoglobulin heavy chain variable region that specifically binds to (i) a tumor-associated antigen (TAA), (ii) an infectious disease antigen that is not a sarbecovirus antigen, or (iii) an other-pathology antigen;
[5422] VL3 is a third immunoglobulin heavy chain variable region that specifically binds to (i) a tumor-associated antigen (TAA), (ii) an infectious disease antigen that is not a sarbecovirus antigen, or (iii) an other-pathology antigen;
[5423] CH1 is an immunoglobulin heavy chain constant region 1; and
[5424] L1-L3 are optional amino acid linkers.

[5425] In any aspect shown herein as a structure from amino terminus to carboxy terminus, and with binding pairs selected from VL and/or VH or other structural regions such as CH1, CL, CH2, CH3, when shown without a specific linker such as L1, L2, etc., such linkers are optionally present in such structures between each designated subsequence VL, VH, etc.

[5426] In some aspects, the TAA is selected from the group consisting of 5′-nucleotidase, 5T4, A2AR, activin receptor-like kinase 1, adenocarcinoma antigen, ADRB3, AFP, AKAP-4, ALK, alpha-fetoprotein, androgen receptor, angiopoietin 2, AOC3, APRIL, ATPDase, AXL, B7-4, B7DC, B7H1, B7H2, B7H3, B7H4, B7H5, B7H6, B7H7, B7RP1, BAFF, BAFFR, BCMA, bcr-abl, BlyS, BORIS, BST2, BTK, BTLA, C3, C5, C5a, C5a receptor, CA-125, CAIX, CanAg (a glycoform of MUC1), CCL11, CCL15, CCL17, CCL19, CCL2, CCL20, CCL21, CCL25, CCL3, CCL4, CCL5, CCL7, CCL8, CCR2, CCR3, CCR4, CCR5, CD11, CD11a, CD123, CD125, CD133, CD134, CD137, CD137L, CD147, CD15, CD154, CD160, CD16A, CD171, CD179a, CD18, CD184, CD19, CD2, CD20, CD200, CD22, CD221, CD23, CD24, CD242, CD25, CD27, CD272, CD276, CD278, CD279, CD28, CD3, CD30, CD300LF, CD319, CD33, CD37, CD38, CD39, CD38, CD4, CD40, CD40L, CD41, CD44v6, CD45, CD47, CD49B, CD5, CD51, CD52, CD54, CD56, CD6, CD62L, CD7, CD70, CD72, CD74, CD79a, CD79b, CD80, CD86, CD97, CEA, CEACAM5, claudin 18 isoform 2, CLDN6, CLEC12A, CLEC9, CLEC91, CLL-1, cMet, coagulation factor III, CRTH2, CS1, CSF-1, CSFIR, CSF-2, CSF-3, CTGF, CTLA4, CXCL1, CXCL12, CXCL13, CXCL2, CXCL4, CXCR3, CXORF61, CyclinB1, CYP1B1, dendritic cell-associated lectin 2, DLL3, DLL4, DNGR-1, DR5, E7, E-cadherin, EGFL7, EGFR, EGFRVIII, ELF2M, EMR2, endoglin, ENTPD1, EpCAM, EphA2, EPHA3, ephrin receptor A3, EphrinB2, episialin, ERBB2 (Her2/neu), ERBB3, ERG (TMPRSS2-ETS fusion gene), ETV6-AML, FAP, FCAR, FCER1, FCER1A, FCER2, FCRL5, FGF 23, FGFR, FGFR2, fibronectin extra domain-B, FLAP, FLT3, folate hydrolase, folate receptor 1, folate receptor alpha, folate receptor beta, FOLH1, Fos-relatedantigen1, Frizzled receptor, Fucosyl GM1, GD2, GD3, gelatinase B, Gi24, GITR, GITRL, GloboH. Glutamate carboxypeptidase II, glypican 3, GM3, GP100, GPC1, GPC2, GPC3, gplOO, GPNMB, GPR20, GPR5, GPRC5D, growth differentiation factor 8, GUCY2C, HAVCR1, HER1, HER2, HER3, HGF, HGFR, HHLA2, histone complex, HLA-DR, HMGB1, HMWMAA, HPVE6, hTERT, human telomerase reverse transcriptase, HVEM, ICAM-1, ICOS, ICOSL, IDO, IFNa, IgE, IGF-1, IGF1R, IGF-2, IGF-I receptor, IGLL1, IL1, IL10, IL12, IL13, IL13Ra2, IL-13Ra2, IL13Ra1, IL15, IL17, IL-17A, IL-17AF, IL-17F, IL17Rb, IL18, IL1B, IL1F10, IL-1a, IL-1B, IL2, IL-20, IL22, IL23, IL-23A, IL25, IL2Rbeta, IL-3 receptor, IL-31 receptor A, IL33, IL35, IL4, IL4Ra, IL5, IL5R, IL6, IL7, IL7Ra, IL8, IL9, IL9R, IL1A, IL-llRa, integrin α4, integrin α4 β7, integrin α5β1, integrin αIIbβ3, integrin αvβ3, integrin β7, interleukin 36 receptor IL1RAP, interleukin 36 receptor IL1RL2, intestinal carboxy lesterase, ITGB4, ITK, KIR, KIR2D, KIT, LAG3, LAGE-1a, LAIR1, LAMP1, LCK, legumain, leptin. LewisY, LILRA2, LIV-1, LMP2, LOXL2, LPFS2, LRRC15, LY6K, LY75, LYPD3, MAD-CT-1, MAD-CT-2, MAGEA1, MAGE-A1, MCAM, MCP-1. MelanA/MART1, mesothelin, MHC classII, MIF, ML-IAP, MS4A1, MST1R (RON), MUC1, MUC-1, MUC16, MUC-16, MUC5AC, muthsp70)-2, MYCN, NA17, NCA-90) granulocyte antigen, NCAM, NCR3LG1, nectin-4, NGNA ganglioside, NKG2A, NKG2D, NKp46, Notch 1, Notch receptor, NRP1, NTPDase-1, NY-BR-1, NY-ESO-1, o-acetyl-GD2, OR51E2, OX40), OX40L, OY-TES1, p53, p53mutant, PANX3, PAP, PAX3, PAX5, PCDC1, PCDP1, PCTA-1/Galectin8, PD-1, PDGFRA, PDGFR-beta, PD-L1, PD-L2, phosphate-sodium co-transporter, phosphatidylserine, PLAC1, polysialicacid, PROM1, prostase, prostein, PRSS21, PSCA, PSMA, PTK7, RAGE-1, RANKL. Ras mutant, rhIL1O, RhoC, root plate-specific spondin 3, ROR1, ROR2, RTN4, RU1, RU2, S152, sarcoma translocation breakpoints, SART3, scatter factor receptor kinase, SDC1, SIRPalpha, SISP1, SLAMF7, SLC, sLe, SLITRK6, spermprotein17, SPG64, sphingosine-1-phosphate, SSEA-4, SSX2, ST2, STEAP1, STEAP2, surviving and telomerase, Syk kinase, T14, TACI, TAG72, TARP, T-cell receptor, TCRβ, TDO, TEMI/CD248, TEM7R, tenascin C, TGFBETA, TGF-β1, TGF-β2, TGS5, the extracellular portion of the APRIL protein. Tie2, TIGIT, TIM3, TLR, TLR2, TLR4, TLR5, TLR9), TMEF1. TnAg, TNF, TNFa, TNFR superfamily member 4, TNFRSF7, Tp55, TRAC, TRAIL-R1, TRAIL-R2, TRAP, TREM1, TROP2, TRP-2, TSHR, TSLP, TSLPR, tumor antigen CTAA16.88, TWEAK, tyrosinase, TYRPI glycoprotein 75, UPK2, VAP-1, VEGF, VEGFA, VEGFR-1, VEGFR2, vimentin, VISTA, Vstm3, WT1, WUCAM, and XAGE1.

[5427] In some aspects, the antigen binding polypeptides provided herein comprise a VL1 comprising a light chain complementarity determining region 1 (LCDR1), LCDR2, and/or LCDR3 of an antibody selected from the group consisting of losatuxizumab vedotin, utomilumab, urelumab, oleclumab, naptumomab estafenatox, ascrinvacumab, pintumomab, tacatuzumab tetraxetan, nesvacumab, vanucizumab, timolumab, vapaliximab, vepalimomab, enapotamab vedotin, ianalumab, belimumab, tabalumab, tibulizumab, belantamab mafodotin, teclistamab, teclistamab, detumomab, nacolomab tafenatox, eculizumab, lendalizumab, pexelizumab, pozelimab, ravulizumab, tesidolumab, vilobelimab, abagovomab, igovomab, oregovomab, sofituzumab vedotin, cantuzumab mertansine, cantuzuma bravtansine, girentuximab, altumomab pentetate, arcitumomab, besilesomab, bertilimumab, plozalizumab, mogamulizumab, leronlimab, PRO140, rovelizumab, rovelizumab, talacotuzumab, benralizumab, tavolimab, vonlerolizumab, gavilimomab, ziralimumab, fanolesomab, ipilimumab, ruplizumab, toralizumab, dapirolizumab pegol, toralizumab, dapirolizumab pegol, ruplizumab, blinatumomab, inebilizumab, loncastuximab tesirine, SGN-CD19A, tafasitamab, taplitumomab paptox, XMAB-5574, Budoprutug, Obexelimab, duvortuxizumab, englumafusp alfa, Emfizatamab, zeripatamig, siplizumab, blontuvetmab, FBTA05, ibritumomab tiuxetan, obinutuzumab, ocaratuzumab, ocrelizumab, ofatumumab, rituximab, tositumomab, ublituximab, veltuzumab, divozilimab, eramkafusp alfa, ripertamab, zuberitamab, glofitamab, nofctumomab merpentan, samalizumab, imvotamab, odronextamab, plamotamab, bectumomab, inotuzumab ozogamicin, moxctumomab pasudotox, pinatuzumab vedotin, gomiliximab, lumiliximab, inolimomab, inolimomab, daclizumab, camidanluma btesirine, basiliximab, varlilumab, omburtamab, enoblituzumab, vopratelimab, lulizumabpegol, TGN1412, muromonab-CD3, otelixizumab, teplizumab, visilizumab, epcoritamab, epcoritamab, brentuximab vedotin, iratumumab, azintuxizumab vedotin, gemtuzumab ozogamicin, lintuzumab, vadastuximab talirine, naratuximab emtansine, otlertuzumab, lilotomab satetraxetan, tetulomab, daratumumab, isatuximab, foralumab, mosunetuzumab, mosunetuzumab, cedelizumab, ibalizumab, keliximab, priliximab, tregalizumab, zanolimumab, bleselumab, iscalimab, lucatumumab, ravagalimab, selicrelumab, tencliximab, vanalimab, abciximab, bivatuzumab, iomab-B, telimomab aritox, zolimomab aritox, abituzumab, intetumumab, alemtuzumab, tamtuvetmab, lorvotuzumab mertansine, itolizumab, cusatuzumab, vorsetuzumab mafodotin, milatuzumab, iladatuzumab vedotin, polatuzumab vedotin, galiximab, cibisatamab, zolbetuximab, naxitamab, tisotumab vedotin, olendalizumab, pamrevlumab, lacnotuzumab, cabiralizumab, emactuzumab, axatilimab, gimsilumab, lenzilumab, namilumab, tremelimumab, ulocuplumab, tepoditamab, rovalpituzumab tesirine, tarlatamab, demcizumab, navicixizumab, drozitumab, parsatuzumab, depatuxizumab mafodotin, modotuximab, carotuximab, adecatumumab, adecatumumab, oportuzumab monatox, solitomab, tucotuzumab celmoleukin, edrecolomab, catumaxomab, ifabotuzumab, fibatuzumab, zalutumumab, panitumumab, cetuximab, futuximab, imgatuzumab, laprituximab emtansine, matuzumab, necitumumab, nimotuzumab, tomuzotuximab, amivantamab, amivantamab, epitumomab cituxetan, sontuzumab, duligotuzumab, elgemtumab, lumretuzumab, patritumab, scribantumab, zenocutuzumab, sibrotuzumab, burosumab, aprutumab ixadotin, radretumab, pasotuxizumab, farletuzumab, mirvetuximab soravtansine, vantictumab, TRBS07, 3F8, dinutuximab, dinutuximab beta, ecromeximab, mitumomab, andecaliximab, capromab, codrituzumab, glembatumumab vedotin, talquetamab, talquetamab, trevogrumab, indusatumab vedotin, ficlatuzumab, rilotumumab, zatuximab, pentuzimab, pentuzimab, margetuximab, timigutuzumab, trastuzumab, trastuzumab duocarmazine, trastuzumab emtansine, gancotamab, pertuzumab, ertumaxomab, emibetuzumab, telisotuzumab, telisotuzumab vedotin, derlotuximab biotin, apolizumab, onartuzumab, bersanlimab, enlimomabpegol, rontalizumab, sifalimumab, talizumab, ganitumab, istiratumab, robatumumab, teprotumumab, figitumumab, ganitumab, istiratumab, robatumumab, teprotumumab, cixutumumab, dalotuzumab, xentuzumab, dusigitumab, canakinumab, ustekinumab, ustekinumab, ustekinumab, briakinumab, briakinumab, abrezekimab, lebrikizumab, romilkimab, TNX-650, tralokinumab, anrukinzumab, brodalumab, ixekizumab, netakimab, perakizumab, secukinumab, vunakizumab, afasevikumab, afasevikumab, bimekizumab, bimekizumab, remtolumab, bermekimab, lutikizumab, lutikizumab, gevokizumab, cergutuzumab amunaleukin, fletikumab, fezakinumab, brazikumab, guselkumab, mirikizumab, tildrakizumab, risankizumab, flotetuzumab, nemolizumab, pascolizumab, dupilumab, mepolizumab, reslizumab, clazakizumab, elsilimomab, olokizumab, sarilumab, siltuximab, sirukumab, vobarilizumab, tocilizumab, SA237, satralizumab, enokizumab, prezalizumab, natalizumab, abrilumab, abrilumab, vedolizumab, volociximab, tadocizumab, etaracizumab, etrolizumab, spesolimab, vatelizumab, erlizumab, lirilumab, relatlimab, cBR96-doxorubicinimmunoconjugate, odulimomab, efalizumab, ladiratuzumab vedotin, simtuzumab, samrotamab vedotin, aselizumab, lupartumab amadotin, imalumab, carlumab, imaprelimab, amatuximab, amatuximab, anetumab ravtansine, narnatumab, clivatuzumab tetraxetan, pemtumomab, gatipotuzumab, ensituximab, lemalesomab, sulesomab, enfortumab vedotin, racotumomab, monalizumab, brontictuzumab, tarextumab, vesencumab, oxelumab, gilvetmab, tislelizumab, dostarlimab, BCD-100, nivolumab, PDR001, pembrolizumab, pidilizumab, retifanlimab, spartalizumab, sintilimab, cemiplimab, olaratumab, tovetumab, rinucumab, atezolizumab, avelumab, durvalumab, lifastuzumab vedotin, bavituximab, acapatamab, capromab, rosopatamab, nezastomig, pasotuxizumab, pelgifatamab, voxalatamab, cofetuzumab pelidotin, denosumab, rosmantuzumab, cirmtuzumab, atinumab, indatuximab ravtansine, elotuzumab, sirtratumab vedotin, sonepcizumab, vandortuzumab vedotin, minretumomab, satumomab pendetide, maslimomab, ontuxizumab, tenatumomab, fresolimumab, metelimumab, lerdelimumab, tezepelumab, etigilimab, tiragotumab, placulumab, prezalumab, infliximab, nerelimomab, ozoralizumab, adalimumab, afelimomab, certolizumab pegol, golimumab, mapatumumab, conatumumab, lexatumumab, tigatuzumab, sacituzumab govitecan, votumumab, pogalizumab, letolizumab, pankomab, anatumomab mafenatox, enavatuzumab, flanvotumab, brolucizumab, ranibizumab, varisacumab, bevacizumab, faricimab, icrucumab, alacizumab pegol, ramucirumab, pritumumab, and onvatilimab.

[5428] In some aspects, the antigen binding polypeptides provided herein comprise a VL2 comprising a light chain complementarity determining region 1 (LCDR1), LCDR2, and/or LCDR3 of an antibody selected from the group consisting of losatuxizumab vedotin, utomilumab, urelumab, oleclumab, naptumomab estafenatox, ascrinvacumab, pintumomab, tacatuzumab tetraxetan, nesvacumab, vanucizumab, timolumab, vapaliximab, vepalimomab, enapotamab vedotin, ianalumab, belimumab, tabalumab, tibulizumab, belantamab mafodotin, teclistamab, teclistamab, detumomab, nacolomab tafenatox, eculizumab, lendalizumab, pexelizumab, pozelimab, ravulizumab, tesidolumab, vilobelimab, abagovomab, igovomab, oregovomab, sofituzumab vedotin, cantuzumab mertansine, cantuzuma bravtansine, girentuximab, altumomab pentetate, arcitumomab, besilesomab, bertilimumab, plozalizumab, mogamulizumab, leronlimab, PRO140, rovelizumab, rovelizumab, talacotuzumab, benralizumab, tavolimab, vonlerolizumab, gavilimomab, ziralimumab, fanolesomab, ipilimumab, ruplizumab, toralizumab, dapirolizumab pegol, toralizumab, dapirolizumab pegol, ruplizumab, blinatumomab, inebilizumab, loncastuximab tesirine, SGN-CD19A, tafasitamab, taplitumomab paptox, XMAB-5574, Budoprutug, Obexelimab, duvortuxizumab, englumafusp alfa, Emfizatamab, zeripatamig, siplizumab, blontuvetmab, FBTA05, ibritumomab tiuxetan, obinutuzumab, ocaratuzumab, ocrelizumab, ofatumumab, rituximab, tositumomab, ublituximab, veltuzumab, divozilimab, eramkafusp alfa, ripertamab, zuberitamab, glofitamab, nofctumomab merpentan, samalizumab, imvotamab, odronextamab, plamotamab, bectumomab, inotuzumab ozogamicin, moxctumomab pasudotox, pinatuzumab vedotin, gomiliximab, lumiliximab, inolimomab, inolimomab, daclizumab, camidanluma btesirine, basiliximab, varlilumab, omburtamab, cnoblituzumab, vopratelimab, lulizumabpegol, TGN1412, muromonab-CD3, otelixizumab, teplizumab, visilizumab, epcoritamab, epcoritamab, brentuximab vedotin, iratumumab, azintuxizumab vedotin, gemtuzumab ozogamicin, lintuzumab, vadastuximab talirine, naratuximab emtansine, otlertuzumab, lilotomab satetraxetan, tetulomab, daratumumab, isatuximab, foralumab, mosunetuzumab, mosunetuzumab, cedelizumab, ibalizumab, keliximab, priliximab, tregalizumab, zanolimumab, blesclumab, iscalimab, lucatumumab, ravagalimab, selicrelumab, tencliximab, vanalimab, abciximab, bivatuzumab, iomab-B, telimomab aritox, zolimomab aritox, abituzumab, intetumumab, alemtuzumab, tamtuvetmab, lorvotuzumab mertansine, itolizumab, cusatuzumab, vorsetuzumab mafodotin, milatuzumab, iladatuzumab vedotin, polatuzumab vedotin, galiximab, cibisatamab, zolbetuximab, naxitamab, tisotumab vedotin, olendalizumab, pamrevlumab, lacnotuzumab, cabiralizumab, emactuzumab, axatilimab, gimsilumab, lenzilumab, namilumab, tremelimumab, ulocuplumab, tepoditamab, rovalpituzumab tesirine, tarlatamab, demcizumab, navicixizumab, drozitumab, parsatuzumab, depatuxizumab mafodotin, modotuximab, carotuximab, adecatumumab, adecatumumab, oportuzumab monatox, solitomab, tucotuzumab celmoleukin, edrecolomab, catumaxomab, ifabotuzumab, fibatuzumab, zalutumumab, panitumumab, cetuximab, futuximab, imgatuzumab, laprituximab emtansine, matuzumab, necitumumab, nimotuzumab, tomuzotuximab, amivantamab, amivantamab, epitumomab cituxetan, sontuzumab, duligotuzumab, elgemtumab, lumretuzumab, patritumab, seribantumab, zenocutuzumab, sibrotuzumab, burosumab, aprutumab ixadotin, radretumab, pasotuxizumab, farletuzumab, mirvetuximab soravtansine, vantictumab, TRBS07, 3F8, dinutuximab, dinutuximab beta, ecromeximab, mitumomab, andecaliximab, capromab, codrituzumab, glembatumumab vedotin, talquetamab, talquetamab, trevogrumab, indusatumab vedotin, ficlatuzumab, rilotumumab, zatuximab, pentuzimab, pentuzimab, margetuximab, timigutuzumab, trastuzumab, trastuzumab duocarmazine, trastuzumab emtansine, gancotamab, pertuzumab, ertumaxomab, emibetuzumab, telisotuzumab, telisotuzumab vedotin, derlotuximab biotin, apolizumab, onartuzumab, bersanlimab, enlimomabpegol, rontalizumab, sifalimumab, talizumab, ganitumab, istiratumab, robatumumab, teprotumumab, figitumumab, ganitumab, istiratumab, robatumumab, teprotumumab, cixutumumab, dalotuzumab, xentuzumab, dusigitumab, canakinumab, ustekinumab, ustekinumab, ustekinumab, briakinumab, briakinumab, abrezekimab, lebrikizumab, romilkimab, TNX-650, tralokinumab, anrukinzumab, brodalumab, ixckizumab, netakimab, perakizumab, secukinumab, vunakizumab, afasevikumab, afasevikumab, bimckizumab, bimckizumab, remtolumab, bermckimab, lutikizumab, lutikizumab, gevokizumab, cergutuzumab amunaleukin, fletikumab, fezakinumab, brazikumab, guselkumab, mirikizumab, tildrakizumab, risankizumab, flotetuzumab, nemolizumab, pascolizumab, dupilumab, mepolizumab, reslizumab, clazakizumab, elsilimomab, olokizumab, sarilumab, siltuximab, sirukumab, vobarilizumab, tocilizumab, SA237, satralizumab, enokizumab, prezalizumab, natalizumab, abrilumab, abrilumab, vedolizumab, volociximab, tadocizumab, etaracizumab, etrolizumab, spesolimab, vatelizumab, erlizumab, lirilumab, relatlimab, cBR96-doxorubicinimmunoconjugate, odulimomab, efalizumab, ladiratuzumab vedotin, simtuzumab, samrotamab vedotin, aselizumab, lupartumab amadotin, imalumab, carlumab, imaprelimab, amatuximab, amatuximab, anetumab ravtansine, narnatumab, clivatuzumab tetraxetan, pemtumomab, gatipotuzumab, ensituximab, lemalesomab, sulesomab, enfortumab vedotin, racotumomab, monalizumab, brontictuzumab, tarextumab, vesencumab, oxelumab, gilvetmab, tislelizumab, dostarlimab, BCD-100, nivolumab, PDR001, pembrolizumab, pidilizumab, retifanlimab, spartalizumab, sintilimab, cemiplimab, olaratumab, tovetumab, rinucumab, atezolizumab, avelumab, durvalumab, lifastuzumab vedotin, bavituximab, acapatamab, capromab, rosopatamab, nezastomig, pasotuxizumab, pelgifatamab, voxalatamab, cofetuzumab pelidotin, denosumab, rosmantuzumab, cirmtuzumab, atinumab, indatuximab ravtansine, elotuzumab, sirtratumab vedotin, sonepcizumab, vandortuzumab vedotin, minretumomab, satumomab pendetide, maslimomab, ontuxizumab, tenatumomab, fresolimumab, metelimumab, lerdelimumab, tezepelumab, etigilimab, tiragotumab, placulumab, prezalumab, infliximab, nerelimomab, ozoralizumab, adalimumab, afclimomab, certolizumab pegol, golimumab, mapatumumab, conatumumab, lexatumumab, tigatuzumab, sacituzumab govitecan, votumumab, pogalizumab, letolizumab, pankomab, anatumomab mafenatox, enavatuzumab, flanvotumab, brolucizumab, ranibizumab, varisacumab, bevacizumab, faricimab, icrucumab, alacizumab pegol, ramucirumab, pritumumab, and onvatilimab.

[5429] In some aspects, the antigen binding polypeptides provided herein comprise a VL3 comprising a light chain complementarity determining region 1 (LCDR1), LCDR2, and/or LCDR3 of an antibody selected from the group consisting of losatuxizumab vedotin, utomilumab, urelumab, oleclumab, naptumomab estafenatox, ascrinvacumab, pintumomab, tacatuzumab tetraxetan, nesvacumab, vanucizumab, timolumab, vapaliximab, vepalimomab, enapotamab vedotin, ianalumab, belimumab, tabalumab, tibulizumab, belantamab mafodotin, teclistamab, teclistamab, detumomab, nacolomab tafenatox, eculizumab, lendalizumab, pexelizumab, pozelimab, ravulizumab, tesidolumab, vilobelimab, abagovomab, igovomab, oregovomab, sofituzumab vedotin, cantuzumab mertansine, cantuzuma bravtansine, girentuximab, altumomab pentetate, arcitumomab, besilesomab, bertilimumab, plozalizumab, mogamulizumab, leronlimab, PRO140, rovelizumab, rovelizumab, talacotuzumab, benralizumab, tavolimab, vonlerolizumab, gavilimomab, ziralimumab, fanolesomab, ipilimumab, ruplizumab, toralizumab, dapirolizumab pegol, toralizumab, dapirolizumab pegol, ruplizumab, blinatumomab, inebilizumab, loncastuximab tesirine, SGN-CD19A, tafasitamab, taplitumomab paptox, XMAB-5574, Budoprutug, Obexelimab, duvortuxizumab, englumafusp alfa, Emfizatamab, zeripatamig, siplizumab, blontuvetmab, FBTA05, ibritumomab tiuxetan, obinutuzumab, ocaratuzumab, ocrelizumab, ofatumumab, rituximab, tositumomab, ublituximab, veltuzumab, divozilimab, eramkafusp alfa, ripertamab, zuberitamab, glofitamab, nofetumomab merpentan, samalizumab, imvotamab, odronextamab, plamotamab, bectumomab, inotuzumab ozogamicin, moxetumomab pasudotox, pinatuzumab vedotin, gomiliximab, lumiliximab, inolimomab, inolimomab, daclizumab, camidanluma btesirine, basiliximab, varlilumab, omburtamab, enoblituzumab, vopratelimab, lulizumabpegol, TGN1412, muromonab-CD3, otelixizumab, teplizumab, visilizumab, epcoritamab, epcoritamab, brentuximab vedotin, iratumumab, azintuxizumab vedotin, gemtuzumab ozogamicin, lintuzumab, vadastuximab talirine, naratuximab emtansine, otlertuzumab, lilotomab satetraxetan, tetulomab, daratumumab, isatuximab, foralumab, mosunetuzumab, mosunetuzumab, cedelizumab, ibalizumab, keliximab, priliximab, tregalizumab, zanolimumab, bleselumab, iscalimab, lucatumumab, ravagalimab, selicrelumab, tencliximab, vanalimab, abciximab, bivatuzumab, iomab-B, telimomab aritox, zolimomab aritox, abituzumab, intetumumab, alemtuzumab, tamtuvetmab, lorvotuzumab mertansinc, itolizumab, cusatuzumab, vorsetuzumab mafodotin, milatuzumab, iladatuzumab vedotin, polatuzumab vedotin, galiximab, cibisatamab, zolbetuximab, naxitamab, tisotumab vedotin, olendalizumab, pamrevlumab, lacnotuzumab, cabiralizumab, emactuzumab, axatilimab, gimsilumab, lenzilumab, namilumab, tremelimumab, ulocuplumab, tepoditamab, rovalpituzumab tesirine, tarlatamab, demcizumab, navicixizumab, drozitumab, parsatuzumab, depatuxizumab mafodotin, modotuximab, carotuximab, adecatumumab, adecatumumab, oportuzumab monatox, solitomab, tucotuzumab celmoleukin, edrecolomab, catumaxomab, ifabotuzumab, fibatuzumab, zalutumumab, panitumumab, cetuximab, futuximab, imgatuzumab, laprituximab emtansine, matuzumab, necitumumab, nimotuzumab, tomuzotuximab, amivantamab, amivantamab, epitumomab cituxetan, sontuzumab, duligotuzumab, elgemtumab, lumretuzumab, patritumab, seribantumab, zenocutuzumab, sibrotuzumab, burosumab, aprutumab ixadotin, radretumab, pasotuxizumab, farletuzumab, mirvetuximab soravtansine, vantictumab, TRBS07, 3F8, dinutuximab, dinutuximab beta, ecromeximab, mitumomab, andecaliximab, capromab, codrituzumab, glembatumumab vedotin, talquetamab, talquetamab, trevogrumab, indusatumab vedotin, ficlatuzumab, rilotumumab, zatuximab, pentuzimab, pentuzimab, margetuximab, timigutuzumab, trastuzumab, trastuzumab duocarmazine, trastuzumab emtansine, gancotamab, pertuzumab, ertumaxomab, emibetuzumab, telisotuzumab, telisotuzumab vedotin, derlotuximab biotin, apolizumab, onartuzumab, bersanlimab, enlimomabpegol, rontalizumab, sifalimumab, talizumab, ganitumab, istiratumab, robatumumab, teprotumumab, figitumumab, ganitumab, istiratumab, robatumumab, teprotumumab, cixutumumab, dalotuzumab, xentuzumab, dusigitumab, canakinumab, ustekinumab, ustekinumab, ustekinumab, briakinumab, briakinumab, abrezekimab, lebrikizumab, romilkimab, TNX-650, tralokinumab, anrukinzumab, brodalumab, ixckizumab, netakimab, perakizumab, secukinumab, vunakizumab, afasevikumab, afasevikumab, bimckizumab, bimekizumab, remtolumab, bermckimab, lutikizumab, lutikizumab, gevokizumab, cergutuzumab amunaleukin, fletikumab, fezakinumab, brazikumab, guselkumab, mirikizumab, tildrakizumab, risankizumab, flotetuzumab, nemolizumab, pascolizumab, dupilumab, mepolizumab, reslizumab, clazakizumab, elsilimomab, olokizumab, sarilumab, siltuximab, sirukumab, vobarilizumab, tocilizumab, SA237, satralizumab, enokizumab, prezalizumab, natalizumab, abrilumab, abrilumab, vedolizumab, volociximab, tadocizumab, etaracizumab, etrolizumab, spesolimab, vatelizumab, erlizumab, lirilumab, relatlimab, cBR96-doxorubicinimmunoconjugate, odulimomab, efalizumab, ladiratuzumab vedotin, simtuzumab, samrotamab vedotin, aselizumab, lupartumab amadotin, imalumab, carlumab, imaprelimab, amatuximab, amatuximab, anctumab ravtansine, narnatumab, clivatuzumab tetraxetan, pemtumomab, gatipotuzumab, ensituximab, lemalesomab, sulesomab, enfortumab vedotin, racotumomab, monalizumab, brontictuzumab, tarextumab, vesencumab, oxelumab, gilvetmab, tislelizumab, dostarlimab, BCD-100, nivolumab, PDR001, pembrolizumab, pidilizumab, retifanlimab, spartalizumab, sintilimab, cemiplimab, olaratumab, tovetumab, rinucumab, atezolizumab, avelumab, durvalumab, lifastuzumab vedotin, bavituximab, acapatamab, capromab, rosopatamab, nezastomig, pasotuxizumab, pelgifatamab, voxalatamab, cofetuzumab pelidotin, denosumab, rosmantuzumab, cirmtuzumab, atinumab, indatuximab ravtansine, elotuzumab, sirtratumab vedotin, sonepcizumab, vandortuzumab vedotin, minretumomab, satumomab pendetide, maslimomab, ontuxizumab, tenatumomab, fresolimumab, metelimumab, lerdelimumab, tezepelumab, etigilimab, tiragotumab, placulumab, prezalumab, infliximab, nerelimomab, ozoralizumab, adalimumab, afclimomab, certolizumab pegol, golimumab, mapatumumab, conatumumab, lexatumumab, tigatuzumab, sacituzumab govitecan, votumumab, pogalizumab, letolizumab, pankomab, anatumomab mafenatox, enavatuzumab, flanvotumab, brolucizumab, ranibizumab, varisacumab, bevacizumab, faricimab, icrucumab, alacizumab pegol, ramucirumab, pritumumab, and onvatilimab.

[5430] In some aspects, the antigen binding polypeptides provided herein comprise a VL1 comprising a VL of an antibody selected from the group consisting of losatuxizumab vedotin, utomilumab, urelumab, oleclumab, naptumomab estafenatox, ascrinvacumab, pintumomab, tacatuzumab tetraxetan, nesvacumab, vanucizumab, timolumab, vapaliximab, vepalimomab, enapotamab vedotin, ianalumab, belimumab, tabalumab, tibulizumab, belantamab mafodotin, teclistamab, teclistamab, detumomab, nacolomab tafenatox, eculizumab, lendalizumab, pexelizumab, pozelimab, ravulizumab, tesidolumab, vilobclimab, abagovomab, igovomab, oregovomab, sofituzumab vedotin, cantuzumab mertansine, cantuzuma bravtansine, girentuximab, altumomab pentetate, arcitumomab, besilesomab, bertilimumab, plozalizumab, mogamulizumab, leronlimab, PRO140, rovelizumab, rovelizumab, talacotuzumab, benralizumab, tavolimab, vonlerolizumab, gavilimomab, ziralimumab, fanolesomab, ipilimumab, ruplizumab, toralizumab, dapirolizumab pegol, toralizumab, dapirolizumab pegol, ruplizumab, blinatumomab, inebilizumab, loncastuximab tesirine, SGN-CD19A, tafasitamab, taplitumomab paptox, XMAB-5574, Budoprutug, Obexelimab, duvortuxizumab, englumafusp alfa, Emfizatamab, zeripatamig, siplizumab, blontuvetmab, FBTA05, ibritumomab tiuxctan, obinutuzumab, ocaratuzumab, ocrelizumab, ofatumumab, rituximab, tositumomab, ublituximab, veltuzumab, divozilimab, eramkafusp alfa, ripertamab, zuberitamab, glofitamab, nofetumomab merpentan, samalizumab, imvotamab, odronextamab, plamotamab, bectumomab, inotuzumab ozogamicin, moxctumomab pasudotox, pinatuzumab vedotin, gomiliximab, lumiliximab, inolimomab, inolimomab, daclizumab, camidanluma btesirine, basiliximab, varlilumab, omburtamab, enoblituzumab, vopratelimab, lulizumabpegol, TGN1412, muromonab-CD3, otelixizumab, teplizumab, visilizumab, epcoritamab, epcoritamab, brentuximab vedotin, iratumumab, azintuxizumab vedotin, gemtuzumab ozogamicin, lintuzumab, vadastuximab talirine, naratuximab emtansine, otlertuzumab, lilotomab satetraxetan, tetulomab, daratumumab, isatuximab, foralumab, mosunetuzumab, mosunetuzumab, cedelizumab, ibalizumab, keliximab, priliximab, tregalizumab, zanolimumab, blesclumab, iscalimab, lucatumumab, ravagalimab, selicrelumab, tencliximab, vanalimab, abciximab, bivatuzumab, iomab-B, telimomab aritox, zolimomab aritox, abituzumab, intetumumab, alemtuzumab, tamtuvetmab, lorvotuzumab mertansine, itolizumab, cusatuzumab, vorsetuzumab mafodotin, milatuzumab, iladatuzumab vedotin, polatuzumab vedotin, galiximab, cibisatamab, zolbetuximab, naxitamab, tisotumab vedotin, olendalizumab, pamrevlumab, lacnotuzumab, cabiralizumab, cmactuzumab, axatilimab, gimsilumab, lenzilumab, namilumab, tremelimumab, ulocuplumab, tepoditamab, rovalpituzumab tesirine, tarlatamab, demcizumab, navicixizumab, drozitumab, parsatuzumab, depatuxizumab mafodotin, modotuximab, carotuximab, adecatumumab, adecatumumab, oportuzumab monatox, solitomab, tucotuzumab celmoleukin, edrecolomab, catumaxomab, ifabotuzumab, fibatuzumab, zalutumumab, panitumumab, cetuximab, futuximab, imgatuzumab, laprituximab emtansine, matuzumab, necitumumab, nimotuzumab, tomuzotuximab, amivantamab, amivantamab, epitumomab cituxetan, sontuzumab, duligotuzumab, elgemtumab, lumretuzumab, patritumab, seribantumab, zenocutuzumab, sibrotuzumab, burosumab, aprutumab ixadotin, radretumab, pasotuxizumab, farletuzumab, mirvetuximab soravtansine, vantictumab, TRBS07, 3F8, dinutuximab, dinutuximab beta, ecromeximab, mitumomab, andecaliximab, capromab, codrituzumab, glembatumumab vedotin, talquetamab, talquetamab, trevogrumab, indusatumab vedotin, ficlatuzumab, rilotumumab, zatuximab, pentuzimab, pentuzimab, margetuximab, timigutuzumab, trastuzumab, trastuzumab duocarmazine, trastuzumab emtansine, gancotamab, pertuzumab, ertumaxomab, emibetuzumab, telisotuzumab, telisotuzumab vedotin, derlotuximab biotin, apolizumab, onartuzumab, bersanlimab, enlimomabpegol, rontalizumab, sifalimumab, talizumab, ganitumab, istiratumab, robatumumab, teprotumumab, figitumumab, ganitumab, istiratumab, robatumumab, teprotumumab, cixutumumab, dalotuzumab, xentuzumab, dusigitumab, canakinumab, ustekinumab, ustekinumab, ustekinumab, briakinumab, briakinumab, abrezekimab, lebrikizumab, romilkimab, TNX-650, tralokinumab, anrukinzumab, brodalumab, ixekizumab, netakimab, perakizumab, secukinumab, vunakizumab, afasevikumab, afasevikumab, bimekizumab, bimekizumab, remtolumab, bermekimab, lutikizumab, lutikizumab, gevokizumab, cergutuzumab amunaleukin, fletikumab, fezakinumab, brazikumab, guselkumab, mirikizumab, tildrakizumab, risankizumab, flotetuzumab, nemolizumab, pascolizumab, dupilumab, mepolizumab, reslizumab, clazakizumab, elsilimomab, olokizumab, sarilumab, siltuximab, sirukumab, vobarilizumab, tocilizumab, SA237, satralizumab, enokizumab, prezalizumab, natalizumab, abrilumab, abrilumab, vedolizumab, volociximab, tadocizumab, etaracizumab, etrolizumab, spesolimab, vatelizumab, erlizumab, lirilumab, relatlimab, cBR96-doxorubicinimmunoconjugate, odulimomab, efalizumab, ladiratuzumab vedotin, simtuzumab, samrotamab vedotin, aselizumab, lupartumab amadotin, imalumab, carlumab, imaprelimab, amatuximab, amatuximab, anetumab ravtansine, narnatumab, clivatuzumab tetraxetan, pemtumomab, gatipotuzumab, ensituximab, lemalesomab, sulesomab, enfortumab vedotin, racotumomab, monalizumab, brontictuzumab, tarextumab, vesencumab, oxelumab, gilvetmab, tislelizumab, dostarlimab, BCD-100, nivolumab, PDR001, pembrolizumab, pidilizumab, retifanlimab, spartalizumab, sintilimab, cemiplimab, olaratumab, tovetumab, rinucumab, atezolizumab, avelumab, durvalumab, lifastuzumab vedotin, bavituximab, acapatamab, capromab, rosopatamab, nezastomig, pasotuxizumab, pelgifatamab, voxalatamab, cofetuzumab pelidotin, denosumab, rosmantuzumab, cirmtuzumab, atinumab, indatuximab ravtansine, elotuzumab, sirtratumab vedotin, sonepcizumab, vandortuzumab vedotin, minretumomab, satumomab pendetide, maslimomab, ontuxizumab, tenatumomab, fresolimumab, metelimumab, lerdelimumab, tezepelumab, etigilimab, tiragotumab, placulumab, prezalumab, infliximab, nerelimomab, ozoralizumab, adalimumab, afelimomab, certolizumab pegol, golimumab, mapatumumab, conatumumab, lexatumumab, tigatuzumab, sacituzumab govitecan, votumumab, pogalizumab, letolizumab, pankomab, anatumomab mafenatox, enavatuzumab, flanvotumab, brolucizumab, ranibizumab, varisacumab, bevacizumab, faricimab, icrucumab, alacizumab pegol, ramucirumab, pritumumab, and onvatilimab.

[5431] In some aspects, the antigen binding polypeptides provided herein comprise a VL2 comprising a VL of an antibody selected from the group consisting of losatuxizumab vedotin, utomilumab, urelumab, oleclumab, naptumomab estafenatox, ascrinvacumab, pintumomab, tacatuzumab tetraxetan, nesvacumab, vanucizumab, timolumab, vapaliximab, vepalimomab, enapotamab vedotin, ianalumab, belimumab, tabalumab, tibulizumab, belantamab mafodotin, teclistamab, teclistamab, detumomab, nacolomab tafenatox, eculizumab, lendalizumab, pexelizumab, pozelimab, ravulizumab, tesidolumab, vilobelimab, abagovomab, igovomab, oregovomab, sofituzumab vedotin, cantuzumab mertansine, cantuzuma bravtansine, girentuximab, altumomab pentetate, arcitumomab, besilesomab, bertilimumab, plozalizumab, mogamulizumab, leronlimab, PRO140, rovelizumab, rovelizumab, talacotuzumab, benralizumab, tavolimab, vonlerolizumab, gavilimomab, ziralimumab, fanolesomab, ipilimumab, ruplizumab, toralizumab, dapirolizumab pegol, toralizumab, dapirolizumab pegol, ruplizumab, blinatumomab, inebilizumab, loncastuximab tesirine, SGN-CD19A, tafasitamab, taplitumomab paptox, XMAB-5574, Budoprutug, Obexelimab, duvortuxizumab, englumafusp alfa, Emfizatamab, zeripatamig, siplizumab, blontuvetmab, FBTA05, ibritumomab tiuxetan, obinutuzumab, ocaratuzumab, ocrelizumab, ofatumumab, rituximab, tositumomab, ublituximab, veltuzumab, divozilimab, eramkafusp alfa, ripertamab, zuberitamab, glofitamab, nofctumomab merpentan, samalizumab, imvotamab, odronextamab, plamotamab, bectumomab, inotuzumab ozogamicin, moxctumomab pasudotox, pinatuzumab vedotin, gomiliximab, lumiliximab, inolimomab, inolimomab, daclizumab, camidanluma btesirine, basiliximab, varlilumab, omburtamab, enoblituzumab, vopratelimab, lulizumabpegol, TGN1412, muromonab-CD3, otelixizumab, teplizumab, visilizumab, epcoritamab, epcoritamab, brentuximab vedotin, iratumumab, azintuxizumab vedotin, gemtuzumab ozogamicin, lintuzumab, vadastuximab talirine, naratuximab emtansine, otlertuzumab, lilotomab satetraxetan, tetulomab, daratumumab, isatuximab, foralumab, mosunetuzumab, mosunetuzumab, cedelizumab, ibalizumab, keliximab, priliximab, tregalizumab, zanolimumab, blesclumab, iscalimab, lucatumumab, ravagalimab, selicrelumab, tencliximab, vanalimab, abciximab, bivatuzumab, iomab-B, telimomab aritox, zolimomab aritox, abituzumab, intetumumab, alemtuzumab, tamtuvetmab, lorvotuzumab mertansine, itolizumab, cusatuzumab, vorsetuzumab mafodotin, milatuzumab, iladatuzumab vedotin, polatuzumab vedotin, galiximab, cibisatamab, zolbetuximab, naxitamab, tisotumab vedotin, olendalizumab, pamrevlumab, lacnotuzumab, cabiralizumab, emactuzumab, axatilimab, gimsilumab, lenzilumab, namilumab, tremelimumab, ulocuplumab, tepoditamab, rovalpituzumab tesirine, tarlatamab, demcizumab, navicixizumab, drozitumab, parsatuzumab, depatuxizumab mafodotin, modotuximab, carotuximab, adecatumumab, adecatumumab, oportuzumab monatox, solitomab, tucotuzumab celmoleukin, edrecolomab, catumaxomab, ifabotuzumab, fibatuzumab, zalutumumab, panitumumab, cetuximab, futuximab, imgatuzumab, laprituximab emtansine, matuzumab, necitumumab, nimotuzumab, tomuzotuximab, amivantamab, amivantamab, epitumomab cituxetan, sontuzumab, duligotuzumab, elgemtumab, lumretuzumab, patritumab, seribantumab, zenocutuzumab, sibrotuzumab, burosumab, aprutumab ixadotin, radretumab, pasotuxizumab, farletuzumab, mirvetuximab soravtansine, vantictumab, TRBS07, 3F8, dinutuximab, dinutuximab beta, ecromeximab, mitumomab, andecaliximab, capromab, codrituzumab, glembatumumab vedotin, talquetamab, talquetamab, trevogrumab, indusatumab vedotin, ficlatuzumab, rilotumumab, zatuximab, pentuzimab, pentuzimab, margetuximab, timigutuzumab, trastuzumab, trastuzumab duocarmazine, trastuzumab emtansine, gancotamab, pertuzumab, ertumaxomab, emibetuzumab, telisotuzumab, telisotuzumab vedotin, derlotuximab biotin, apolizumab, onartuzumab, bersanlimab, enlimomabpegol, rontalizumab, sifalimumab, talizumab, ganitumab, istiratumab, robatumumab, teprotumumab, figitumumab, ganitumab, istiratumab, robatumumab, teprotumumab, cixutumumab, dalotuzumab, xentuzumab, dusigitumab, canakinumab, ustekinumab, ustekinumab, ustekinumab, briakinumab, briakinumab, abrezekimab, lebrikizumab, romilkimab, TNX-650, tralokinumab, anrukinzumab, brodalumab, ixekizumab, netakimab, perakizumab, secukinumab, vunakizumab, afasevikumab, afasevikumab, bimekizumab, bimekizumab, remtolumab, bermekimab, lutikizumab, lutikizumab, gevokizumab, cergutuzumab amunaleukin, fletikumab, fezakinumab, brazikumab, guselkumab, mirikizumab, tildrakizumab, risankizumab, flotetuzumab, nemolizumab, pascolizumab, dupilumab, mepolizumab, reslizumab, clazakizumab, elsilimomab, olokizumab, sarilumab, siltuximab, sirukumab, vobarilizumab, tocilizumab, SA237, satralizumab, enokizumab, prezalizumab, natalizumab, abrilumab, abrilumab, vedolizumab, volociximab, tadocizumab, etaracizumab, etrolizumab, spesolimab, vatelizumab, erlizumab, lirilumab, relatlimab, cBR96-doxorubicinimmunoconjugate, odulimomab, efalizumab, ladiratuzumab vedotin, simtuzumab, samrotamab vedotin, aselizumab, lupartumab amadotin, imalumab, carlumab, imaprelimab, amatuximab, amatuximab, anetumab ravtansine, narnatumab, clivatuzumab tetraxetan, pemtumomab, gatipotuzumab, ensituximab, lemalesomab, sulesomab, enfortumab vedotin, racotumomab, monalizumab, brontictuzumab, tarextumab, vesencumab, oxelumab, gilvetmab, tislelizumab, dostarlimab, BCD-100, nivolumab, PDR001, pembrolizumab, pidilizumab, retifanlimab, spartalizumab, sintilimab, cemiplimab, olaratumab, tovetumab, rinucumab, atezolizumab, avelumab, durvalumab, lifastuzumab vedotin, bavituximab, acapatamab, capromab, rosopatamab, nezastomig, pasotuxizumab, pelgifatamab, voxalatamab, cofetuzumab pelidotin, denosumab, rosmantuzumab, cirmtuzumab, atinumab, indatuximab ravtansine, elotuzumab, sirtratumab vedotin, sonepcizumab, vandortuzumab vedotin, minretumomab, satumomab pendetide, maslimomab, ontuxizumab, tenatumomab, fresolimumab, metelimumab, lerdelimumab, tezepelumab, etigilimab, tiragotumab, placulumab, prezalumab, infliximab, nerelimomab, ozoralizumab, adalimumab, afelimomab, certolizumab pegol, golimumab, mapatumumab, conatumumab, lexatumumab, tigatuzumab, sacituzumab govitecan, votumumab, pogalizumab, letolizumab, pankomab, anatumomab mafenatox, enavatuzumab, flanvotumab, brolucizumab, ranibizumab, varisacumab, bevacizumab, faricimab, icrucumab, alacizumab pegol, ramucirumab, pritumumab, and onvatilimab.

[5432] In some aspects, the antigen binding polypeptides provided herein comprise a VL3 comprising a VL of an antibody selected from the group consisting of losatuxizumab vedotin, utomilumab, urelumab, oleclumab, naptumomab estafenatox, ascrinvacumab, pintumomab, tacatuzumab tetraxetan, nesvacumab, vanucizumab, timolumab, vapaliximab, vepalimomab, enapotamab vedotin, ianalumab, belimumab, tabalumab, tibulizumab, belantamab mafodotin, teclistamab, teclistamab, detumomab, nacolomab tafenatox, eculizumab, lendalizumab, pexelizumab, pozelimab, ravulizumab, tesidolumab, vilobelimab, abagovomab, igovomab, oregovomab, sofituzumab vedotin, cantuzumab mertansine, cantuzuma bravtansine, girentuximab, altumomab pentetate, arcitumomab, besilesomab, bertilimumab, plozalizumab, mogamulizumab, leronlimab, PRO140, rovelizumab, rovelizumab, talacotuzumab, benralizumab, tavolimab, vonlerolizumab, gavilimomab, ziralimumab, fanolesomab, ipilimumab, ruplizumab, toralizumab, dapirolizumab pegol, toralizumab, dapirolizumab pegol, ruplizumab, blinatumomab, inebilizumab, loncastuximab tesirine, SGN-CD19A, tafasitamab, taplitumomab paptox, XMAB-5574, Budoprutug, Obexelimab, duvortuxizumab, englumafusp alfa, Emfizatamab, zeripatamig, siplizumab, blontuvetmab, FBTA05, ibritumomab tiuxetan, obinutuzumab, ocaratuzumab, ocrelizumab, ofatumumab, rituximab, tositumomab, ublituximab, veltuzumab, divozilimab, eramkafusp alfa, ripertamab, zuberitamab, glofitamab, nofetumomab merpentan, samalizumab, imvotamab, odronextamab, plamotamab, bectumomab, inotuzumab ozogamicin, moxetumomab pasudotox, pinatuzumab vedotin, gomiliximab, lumiliximab, inolimomab, inolimomab, daclizumab, camidanluma btesirine, basiliximab, varlilumab, omburtamab, enoblituzumab, vopratelimab, lulizumabpegol, TGN1412, muromonab-CD3, otelixizumab, teplizumab, visilizumab, epcoritamab, epcoritamab, brentuximab vedotin, iratumumab, azintuxizumab vedotin, gemtuzumab ozogamicin, lintuzumab, vadastuximab talirine, naratuximab emtansine, otlertuzumab, lilotomab satetraxetan, tetulomab, daratumumab, isatuximab, foralumab, mosunetuzumab, mosunetuzumab, cedelizumab, ibalizumab, keliximab, priliximab, tregalizumab, zanolimumab, bleselumab, iscalimab, lucatumumab, ravagalimab, selicrelumab, teneliximab, vanalimab, abciximab, bivatuzumab, iomab-B, telimomab aritox, zolimomab aritox, abituzumab, intetumumab, alemtuzumab, tamtuvetmab, lorvotuzumab mertansine, itolizumab, cusatuzumab, vorsetuzumab mafodotin, milatuzumab, iladatuzumab vedotin, polatuzumab vedotin, galiximab, cibisatamab, zolbetuximab, naxitamab, tisotumab vedotin, olendalizumab, pamrevlumab, lacnotuzumab, cabiralizumab, emactuzumab, axatilimab, gimsilumab, lenzilumab, namilumab, tremelimumab, ulocuplumab, tepoditamab, rovalpituzumab tesirine, tarlatamab, demcizumab, navicixizumab, drozitumab, parsatuzumab, depatuxizumab mafodotin, modotuximab, carotuximab, adecatumumab, adecatumumab, oportuzumab monatox, solitomab, tucotuzumab celmoleukin, edrecolomab, catumaxomab, ifabotuzumab, fibatuzumab, zalutumumab, panitumumab, cetuximab, futuximab, imgatuzumab, laprituximab emtansine, matuzumab, necitumumab, nimotuzumab, tomuzotuximab, amivantamab, amivantamab, epitumomab cituxetan, sontuzumab, duligotuzumab, elgemtumab, lumretuzumab, patritumab, seribantumab, zenocutuzumab, sibrotuzumab, burosumab, aprutumab ixadotin, radretumab, pasotuxizumab, farletuzumab, mirvetuximab soravtansine, vantictumab, TRBS07, 3F8, dinutuximab, dinutuximab beta, ecromeximab, mitumomab, andecaliximab, capromab, codrituzumab, glembatumumab vedotin, talquetamab, talquetamab, trevogrumab, indusatumab vedotin, ficlatuzumab, rilotumumab, zatuximab, pentuzimab, pentuzimab, margetuximab, timigutuzumab, trastuzumab, trastuzumab duocarmazine, trastuzumab emtansine, gancotamab, pertuzumab, ertumaxomab, emibetuzumab, telisotuzumab, telisotuzumab vedotin, derlotuximab biotin, apolizumab, onartuzumab, bersanlimab, enlimomabpegol, rontalizumab, sifalimumab, talizumab, ganitumab, istiratumab, robatumumab, teprotumumab, figitumumab, ganitumab, istiratumab, robatumumab, teprotumumab, cixutumumab, dalotuzumab, xentuzumab, dusigitumab, canakinumab, ustekinumab, ustekinumab, ustekinumab, briakinumab, briakinumab, abrezekimab, lebrikizumab, romilkimab, TNX-650, tralokinumab, anrukinzumab, brodalumab, ixekizumab, netakimab, perakizumab, secukinumab, vunakizumab, afasevikumab, afasevikumab, bimekizumab, bimekizumab, remtolumab, bermekimab, lutikizumab, lutikizumab, gevokizumab, cergutuzumab amunaleukin, fletikumab, fezakinumab, brazikumab, guselkumab, mirikizumab, tildrakizumab, risankizumab, flotetuzumab, nemolizumab, pascolizumab, dupilumab, mepolizumab, reslizumab, clazakizumab, elsilimomab, olokizumab, sarilumab, siltuximab, sirukumab, vobarilizumab, tocilizumab, SA237, satralizumab, enokizumab, prezalizumab, natalizumab, abrilumab, abrilumab, vedolizumab, volociximab, tadocizumab, etaracizumab, etrolizumab, spesolimab, vatelizumab, erlizumab, lirilumab, relatlimab, cBR96-doxorubicinimmunoconjugate, odulimomab, efalizumab, ladiratuzumab vedotin, simtuzumab, samrotamab vedotin, aselizumab, lupartumab amadotin, imalumab, carlumab, imaprelimab, amatuximab, amatuximab, anetumab ravtansine, narnatumab, clivatuzumab tetraxetan, pemtumomab, gatipotuzumab, ensituximab, lemalesomab, sulesomab, enfortumab vedotin, racotumomab, monalizumab, brontictuzumab, tarextumab, vesencumab, oxelumab, gilvetmab, tislelizumab, dostarlimab, BCD-100, nivolumab, PDR001, pembrolizumab, pidilizumab, retifanlimab, spartalizumab, sintilimab, cemiplimab, olaratumab, tovetumab, rinucumab, atezolizumab, avelumab, durvalumab, lifastuzumab vedotin, bavituximab, acapatamab, capromab, rosopatamab, nezastomig, pasotuxizumab, pelgifatamab, voxalatamab, cofetuzumab pelidotin, denosumab, rosmantuzumab, cirmtuzumab, atinumab, indatuximab ravtansine, elotuzumab, sirtratumab vedotin, sonepcizumab, vandortuzumab vedotin, minretumomab, satumomab pendetide, maslimomab, ontuxizumab, tenatumomab, fresolimumab, metelimumab, lerdelimumab, tezepelumab, etigilimab, tiragotumab, placulumab, prezalumab, infliximab, nerelimomab, ozoralizumab, adalimumab, afelimomab, certolizumab pegol, golimumab, mapatumumab, conatumumab, lexatumumab, tigatuzumab, sacituzumab govitecan, votumumab, pogalizumab, letolizumab, pankomab, anatumomab mafenatox, enavatuzumab, flanvotumab, brolucizumab, ranibizumab, varisacumab, bevacizumab, faricimab, icrucumab, alacizumab pegol, ramucirumab, pritumumab, and onvatilimab.

[5433] In some aspects, the antigen binding polypeptides provided herein comprise a VL1 comprising (i) a complementarity determining region (CDR) 1 having an amino acid sequence that is at least 65%, at least 70%, at least 75%, at least 80%, at least 85%, at least 90%, at least 95%, at least 99%, or 100% identical to any one of SEQ ID NOs: 1096, 1103, 1110, 1120, 1127, 1134, 1141, 1148, 1155, 1162, 1169, 1174, 1181, 1188, 1199, 1211, 1221, 1228, 1235, 1247, 1254, 1261, 1266, 1271, 1278, 1285, 1292, 1299, 1306, 1313, 1319, 1326, 1339, 1352, 1359, 1366, 1373, 1382, 1394, 1401, 1408, 1414, 1421, 1428, 1441, 1448, 1455, 1461, 1468, 1475, 1488, 1495, 1508, 1519, 1526, 1531, 1538, 1544, 1556, 1568, 1574, 1581, 1594, 1601, 1608, 1615, 1622, 1629, 1636, 1643, 1650, 1657, 1672, 1679, 1689, 1697, 1708, 1715, 1718, 1723, 1727, 1738, 1743, 1752, 1761, 1763, 1769, 1776, and 1786; (ii) a CDR2 having an amino acid sequence that is at least 65%, at least 70%, at least 75%, at least 80%, at least 85%, at least 90%, at least 95%, at least 99%, or 100% identical to any one of SEQ ID NOs: 1200, 1212, 1680, 1690, 1698, 1709, 1728, 1739, 1744, 1753, 1770, and 1777; or at least 65%, at least 70%, at least 75%, at least 80%, at least 85%, at least 90%, at least 95%, at least 99%, or 100% identical to any one of amino acid sequences AAS, APS, AT, ATS, DAS, DDG, DDS, DT, DTS, DVS, EAS, FTS, GAF, GAN, GAS, GAT, GIS, GKN, GNS, HTS, KVS, LAS, LGS, LVS, NAK, NTN, QMS, RMS, RTS, SAS, TTS, WAS, YAS, YAT, YGS, YRS, and YTS; and (iii) a CDR3 having an amino acid sequence that is at least 65%, at least 70%, at least 75%, at least 80%, at least 85%, at least 90%, at least 95%, at least 99%, or 100% identical to any one of SEQ ID NOs: 1097, 1104, 1111, 1121, 1128, 1135, 1142, 1149, 1156, 1163, 1170, 1175, 1182, 1189, 1195, 1201, 1207, 1213, 1222, 1229, 1236, 2009, 1248, 1255, 1262, 1267, 1272, 1279, 1286, 1293, 1300, 1307, 1320, 1327, 1333, 1340, 1346, 1353, 1360, 1367, 1374, 1383, 1389, 1395, 1402, 1409, 1415, 1422, 1429, 1435, 1442, 1449, 1456, 1462, 1469, 1476, 1482, 1489, 1496, 1502, 1509, 1513, 1520, 1532, 1539, 1545, 1557, 1562, 1569, 1575, 1582, 1588, 1595, 1602, 1609, 1616, 1623, 1630, 1637, 1644, 1651, 1658, 1663, 1673, 1681, 1691, 1699, 1710, 1729, 1735, 1745, 1751, 1754, 1778, 1787, and 1976.

[5434] In some aspects, the antigen binding polypeptides provided herein comprise a VL2 comprising (i) a complementarity determining region (CDR) 1 having an amino acid sequence that is at least 65%, at least 70%, at least 75%, at least 80%, at least 85%, at least 90%, at least 95%, at least 99%, or 100% identical to any one of SEQ ID NOs: 1096, 1103, 1110, 1120, 1127, 1134, 1141, 1148, 1155, 1162, 1169, 1174, 1181, 1188, 1199, 1211, 1221, 1228, 1235, 1247, 1254, 1261, 1266, 1271, 1278, 1285, 1292, 1299, 1306, 1313, 1319, 1326, 1339, 1352, 1359, 1366, 1373, 1382, 1394, 1401, 1408, 1414, 1421, 1428, 1441, 1448, 1455, 1461, 1468, 1475, 1488, 1495, 1508, 1519, 1526, 1531, 1538, 1544, 1556, 1568, 1574, 1581, 1594, 1601, 1608, 1615, 1622, 1629, 1636, 1643, 1650, 1657, 1672, 1679, 1689, 1697, 1708, 1715, 1718, 1723, 1727, 1738, 1743, 1752, 1761, 1763, 1769, 1776, and 1786; (ii) a CDR2 having an amino acid sequence that is at least 65%, at least 70%, at least 75%, at least 80%, at least 85%, at least 90%, at least 95%, at least 99%, or 100% identical to any one of SEQ ID NOs: 1200, 1212, 1680, 1690, 1698, 1709, 1728, 1739, 1744, 1753, 1770, and 1777; or at least 65%, at least 70%, at least 75%, at least 80%, at least 85%, at least 90%, at least 95%, at least 99%, or 100% identical to any one of amino acid sequences AAS, APS, AT, ATS, DAS, DDG, DDS, DT, DTS, DVS, EAS, FTS, GAF, GAN, GAS, GAT, GIS, GKN, GNS, HTS, KVS, LAS, LGS, LVS, NAK, NTN, QMS, RMS, RTS, SAS, TTS, WAS, YAS, YAT, YGS, YRS, and YTS; and (iii) a CDR3 having an amino acid sequence that is at least 65%, at least 70%, at least 75%, at least 80%, at least 85%, at least 90%, at least 95%, at least 99%, or 100% identical to any one of SEQ ID NOs: 1097, 1104, 1111, 1121, 1128, 1135, 1142, 1149, 1156, 1163, 1170, 1175, 1182, 1189, 1195, 1201, 1207, 1213, 1222, 1229, 1236, 2009, 1248, 1255, 1262, 1267, 1272, 1279, 1286, 1293, 1300, 1307, 1320, 1327, 1333, 1340, 1346, 1353, 1360, 1367, 1374, 1383, 1389, 1395, 1402, 1409, 1415, 1422, 1429, 1435, 1442, 1449, 1456, 1462, 1469, 1476, 1482, 1489, 1496, 1502, 1509, 1513, 1520, 1532, 1539, 1545, 1557, 1562, 1569, 1575, 1582, 1588, 1595, 1602, 1609, 1616, 1623, 1630, 1637, 1644, 1651, 1658, 1663, 1673, 1681, 1691, 1699, 1710, 1729, 1735, 1745, 1751, 1754, 1778, 1787, and 1976.

[5435] In some aspects, the antigen binding polypeptides provided herein comprise a VL3 comprising (i) a complementarity determining region (CDR) 1 having an amino acid sequence that is at least 65%, at least 70%, at least 75%, at least 80%, at least 85%, at least 90%, at least 95%, at least 99%, or 100% identical to any one of SEQ ID NOs: 1096, 1103, 1110, 1120, 1127, 1134, 1141, 1148, 1155, 1162, 1169, 1174, 1181, 1188, 1199, 1211, 1221, 1228, 1235, 1247, 1254, 1261, 1266, 1271, 1278, 1285, 1292, 1299, 1306, 1313, 1319, 1326, 1339, 1352, 1359, 1366, 1373, 1382, 1394, 1401, 1408, 1414, 1421, 1428, 1441, 1448, 1455, 1461, 1468, 1475, 1488, 1495, 1508, 1519, 1526, 1531, 1538, 1544, 1556, 1568, 1574, 1581, 1594, 1601, 1608, 1615, 1622, 1629, 1636, 1643, 1650, 1657, 1672, 1679, 1689, 1697, 1708, 1715, 1718, 1723, 1727, 1738, 1743, 1752, 1761, 1763, 1769, 1776, and 1786; (ii) a CDR2 having an amino acid sequence that is at least 65%, at least 70%, at least 75%, at least 80%, at least 85%, at least 90%, at least 95%, at least 99%, or 100% identical to any one of SEQ ID NOs: 1200, 1212, 1680, 1690, 1698, 1709, 1728, 1739, 1744, 1753, 1770, and 1777; or at least 65%, at least 70%, at least 75%, at least 80%, at least 85%, at least 90%, at least 95%, at least 99%, or 100% identical to any one of amino acid sequences AAS, APS, AT, ATS, DAS, DDG, DDS, DT, DTS, DVS, EAS, FTS, GAF, GAN, GAS, GAT, GIS, GKN, GNS, HTS, KVS, LAS, LGS, LVS, NAK, NTN, QMS, RMS, RTS, SAS, TTS, WAS, YAS, YAT, YGS, YRS, and YTS; and (iii) a CDR3 having an amino acid sequence that is at least 65%, at least 70%, at least 75%, at least 80%, at least 85%, at least 90%, at least 95%, at least 99%, or 100% identical to any one of SEQ ID NOs: 1097, 1104, 1111, 1121, 1128, 1135, 1142, 1149, 1156, 1163, 1170, 1175, 1182, 1189, 1195, 1201, 1207, 1213, 1222, 1229, 1236, 2009, 1248, 1255, 1262, 1267, 1272, 1279, 1286, 1293, 1300, 1307, 1320, 1327, 1333, 1340, 1346, 1353, 1360, 1367, 1374, 1383, 1389, 1395, 1402, 1409, 1415, 1422, 1429, 1435, 1442, 1449, 1456, 1462, 1469, 1476, 1482, 1489, 1496, 1502, 1509, 1513, 1520, 1532, 1539, 1545, 1557, 1562, 1569, 1575, 1582, 1588, 1595, 1602, 1609, 1616, 1623, 1630, 1637, 1644, 1651, 1658, 1663, 1673, 1681, 1691, 1699, 1710, 1729, 1735, 1745, 1751, 1754, 1778, 1787, and 1976.

[5436] In some aspects, the antigen binding polypeptides provided herein comprise a VL1 comprising an amino acid sequence that is at least 65%, at least 70%, at least 75%, at least 80%, at least 85%, at least 90%, at least 95%, at least 99%, or 100% identical to any one of SEQ ID NOs: 1098, 1105, 1112, 1122, 1129, 1136, 1143, 1150, 1157, 1164, 1171, 1176, 1183, 1190, 1196, 1202, 1208, 1214, 1219, 1223, 1230, 1237, 1242, 1249, 1256, 1263, 1268, 1273, 1280, 1287, 1294, 1301, 1308, 1314, 1321, 1328, 1334, 1341, 1347, 1354, 1361, 1368, 1375, 1380, 1384, 1390, 1396, 1403, 1410, 1416, 1423, 1430, 1436, 1443, 1450, 1457, 1463, 1470, 1477, 1483, 1490, 1497, 1503, 1510, 1514, 1521, 1527, 1533, 1540, 1546, 1551, 1558, 1563, 1570, 1576, 1583, 1589, 1596, 1603, 1610, 1617, 1624, 1631, 1638, 1645, 1652, 1659, 1664, 1669, 1674, 1682, 1692, 1700, 1711, 1721, 1724, 1730, 1740, 1746, 1755, 1764, 1766, 1771, 1779, 1784, and 1788.

[5437] In some aspects, the antigen binding polypeptides provided herein comprise a VL2 comprising an amino acid sequence that is at least 65%, at least 70%, at least 75%, at least 80%, at least 85%, at least 90%, at least 95%, at least 99%, or 100% identical to any one of SEQ ID NOs: 1098, 1105, 1112, 1122, 1129, 1136, 1143, 1150, 1157, 1164, 1171, 1176, 1183, 1190, 1196, 1202, 1208, 1214, 1219, 1223, 1230, 1237, 1242, 1249, 1256, 1263, 1268, 1273, 1280, 1287, 1294, 1301, 1308, 1314, 1321, 1328, 1334, 1341, 1347, 1354, 1361, 1368, 1375, 1380, 1384, 1390, 1396, 1403, 1410, 1416, 1423, 1430, 1436, 1443, 1450, 1457, 1463, 1470, 1477, 1483, 1490, 1497, 1503, 1510, 1514, 1521, 1527, 1533, 1540, 1546, 1551, 1558, 1563, 1570, 1576, 1583, 1589, 1596, 1603, 1610, 1617, 1624, 1631, 1638, 1645, 1652, 1659, 1664, 1669, 1674, 1682, 1692, 1700, 1711, 1721, 1724, 1730, 1740, 1746, 1755, 1764, 1766, 1771, 1779, 1784, and 1788.

[5438] In some aspects, the antigen binding polypeptides provided herein comprise a VL3 comprising an amino acid sequence that is at least 65%, at least 70%, at least 75%, at least 80%, at least 85%, at least 90%, at least 95%, at least 99%, or 100% identical to any one of SEQ ID NOs: 1098, 1105, 1112, 1122, 1129, 1136, 1143, 1150, 1157, 1164, 1171, 1176, 1183, 1190, 1196, 1202, 1208, 1214, 1219, 1223, 1230, 1237, 1242, 1249, 1256, 1263, 1268, 1273, 1280, 1287, 1294, 1301, 1308, 1314, 1321, 1328, 1334, 1341, 1347, 1354, 1361, 1368, 1375, 1380, 1384, 1390, 1396, 1403, 1410, 1416, 1423, 1430, 1436, 1443, 1450, 1457, 1463, 1470, 1477, 1483, 1490, 1497, 1503, 1510, 1514, 1521, 1527, 1533, 1540, 1546, 1551, 1558, 1563, 1570, 1576, 1583, 1589, 1596, 1603, 1610, 1617, 1624, 1631, 1638, 1645, 1652, 1659, 1664, 1669, 1674, 1682, 1692, 1700, 1711, 1721, 1724, 1730, 1740, 1746, 1755, 1764, 1766, 1771, 1779, 1784, and 1788.

[5439] In some aspects, the infectious disease antigen that is not a sarbecovirus antigen is:
[5440] (i) a viral antigen elected from the group consisting of an influenza virus (A, B, C) antigen (e.g., influenza virus envelope proteins, for example, influenza virus neuraminidase (NA, N1, N2, N3, N4, N5, N6, N7, N8, N9, N10, N11), influenza virus hemagglutinin (H1, H2, H3, H4, H5, H6, H7, H8, H9, H10, H11, H12, H13, H14, H15, H16, H17, H18) (e.g., H1N1, H3N2, H5N1, H7N9, H9N2), Yamagata virus antigen, Victoria virus antigen, influenza virus structural proteins (e.g., M1, M2, capsid protein), influenza virus functional proteins (e.g., ribonucleoprotein (NP), primary interferon antagonist (NS1), nuclear export protein (NEP)) influenza virus accessory proteins (e.g., PB2, PB1, or PA), for example, anti-HA, anti-NA, anti-H1, anti-H3, anti-H5, anti-H7, anti-H9), anti-N1, anti-N2, anti-N9, anti-H1N1, anti-H3N2, anti-H5N1, anti-H7N9), anti-H9N2, anti-A protein, anti-B protein, anti-stem, anti-M1, anti-M2, anti-capsid, anti-NP, anti-NS1, anti-NEP, anti-PB1, anti-PB2, and anti-PA); a swine influenza virus antigen (e.g., swine flu hemagglutinin, swine flu neuraminidase); a classical swine fever (CSF) (hog colera) virus antigen; an equine influenza virus antigen (e.g., equine influenza virus typeA/Miami 63 neuraminidase, equine influenza virus type A/Kentucky 81 neuraminidase, equine influenza virus type A/Alaska 91 neuraminidase); parainfluenza viruses (e.g., bovine parainfluenza virus, bovine parainfluenza virus type 3 fusion protein, bovine parainfluenza virus type 3 hemagglutinin neuraminidase); a (human) respiratory syncytial virus (RSV)-viral antigen (e.g., RSV F glycoprotein, RSV G glycoprotein, F protein of respiratory syncytial virus, RSV fusion glycoprotein); a herpes simplex virus (HSV) antigen (e.g., herpes simplex virus glycoproteins gB, gC, gD, and gE, herpes simplex virus type 2 glycoprotein gB); a Dengue virus antigen (e.g., core protein, matrix protein, glycoprotein E of Dengue virus, or other protein of Dengue virus); a measles virus antigen (e.g., hemagglutinin); a poliovirus 1 antigen (e.g., poliovirus 1 proteins (VP1)), a HIV-1 antigen and HIV-2 antigen (e.g., HIV envelope proteins (e.g., envelope glycoproteins of HIV 1, HIV envelope glycoprotein (Env), HIV envelope glycoprotein gp160, HIV envelope surface glycoprotein gp120, HIV transmembrane envelope protein gp41), HIV structural proteins (e.g., p17, p24, p7, p55), HIV functional proteins (e.g., p66, HIV-1 protease (PR), p31), HIV accessory proteins (e.g., Nef, Tat, Rev, Vif, Vpr, Vpu)); a hepatitis virus (HAV, HBV, HCV, HDV, HEV) antigen (e.g., hepatitis B virus antigen (e.g., surface antigen, core protein), hepatitis C virus antigen (e.g., glycoprotein E1E2)); a rabies virus (Rabies lyssavirus) antigen (e.g., rabies virus glycoprotein, e.g., G glycoprotein); a pseudorabies virus antigen (e.g., pseudorabies virus g50) (gpD), pseudorabies virus II (gpB), pseudorabies virus III (gpC), pseudorabies virus glycoprotein H, pseudorabies virus glycoprotein E); a papillomavirus (HPV) antigen; an Epstein-Barr virus (EBV) (Gamma herpes virus 4) antigen; a Herpes simplex virus (HSV, HSV-1, HSV-2) antigen (e.g., human herpes virus 8, equine herpes virus antigen (e.g., type 1 glycoprotein B, type 1 glycoprotein D)); a Herpes zoster antigen; a Cytomegalovirus antigen (e.g., cytomegalovirus glycoprotein B); a Zika virus antigen; a Transmissible gastroenteritis virus (TGEV) antigen (e.g., glycoprotein 195, matrix protein); a rotavirus antigen (e.g., swine rotavirus glycoprotein 38); a parvovirus antigen (e.g., swine parvovirus capsid protein); a filoviruses (e.g., Marburg and Ebola) antigen; a bovine viral diarrhea virus antigen (e.g., glycoprotein 55); a Newcastle disease virus antigen (hemagglutinin, neuraminidase); an orthopoxvirus antigen; a coxsackievirus antigen and aphthovirus (foot and mouth disease virus) antigen; a yellow fever virus antigen; a Chikunga virus antigen; a Nipah virus antigen; an African swine fever virus antigen; a rhinotracheitis virus antigen (e.g., infectious bovine rhinotracheitis virus glycoprotein E, glycoprotein G); a laryngotracheitis virus antigen (e.g., infectious laryngotracheitis virus glycoprotein G or glycoprotein I); a La Crosse virus antigen (e.g., La Crosse virus glycoprotein); a neonatal calf diarrhoea virus antigen; a Venezuelan equine encephalomyelitis virus antigen; a punta toro virus antigen; a murine leukemia virus antigen; a mouse mammary tumor virus antigen; a bovine respiratory syncytial virus antigen (e.g., bovine respiratory syncytial virus attachment protein (BRSV G), bovine respiratory syncytial virus fusion protein (BRSV F), bovine respiratory syncytial virus nucleocapsid protein (BRSVN)); a bovine E viral diarrhoea virus antigen (e.g., glycoprotein 48 and glycoprotein 53); a metapneumovirus (HMPV) antigen; and an Ebola virus antigen (e.g., ebolavirus glycoprotein, e.g., Zaire ebolavirus glycoprotein); or
[5441] (ii) a bacterial or parasite antigen selected from the group consisting of a Plasmodium (e.g., Plasmodium falciparum, Plasmodium vivax, Plasmodium malariae, Plasmodium ovale, Plasmodium knowlesi) antigen, a Streptococcus (e.g., Streptococcus pneumoniae. Streptococcus pyogenes, Streptococcus agalactiae, Streptococcus mutans, Streptococcus viridans, Streptococcus anginosus, Streptococcus intermedius, Streptococcus constellatus) antigen (e.g., 24M epitope), a Neisseria gonorrhoeae antigen (e.g., gonococcal pilin), a Corynebacterium antigen (e.g., Corynebacterium diphtheria (diptheria toxin), Corynebacterium ulcerans. Corynebacterium pseudotuberculosis), Mycobacterium tuberculosis antigens, Brachyspira hyodysenteriae (Serpulina hydodysenteriae) antigen (e.g., Serpulina hydodysenteriae protective antigen), a Chlamydia antigen (e.g., Chlamydia trachomatis) (e.g., MOMP and PorB), a Mycoplasma sp. (e.g., Mycoplasma genitalium, Mycoplasma hyopneumoniae, Mycoplasma pneumonia) antigen, a Staphylococcus (e.g., Staphylococcus aureus, coagulase-negative staphylococci (CoNS), Staphylococcus aureus alpha toxin, Staphylococcus aureus bi-component leucocidin) antigen, a Klebsiella sp. antigen, an Escherichia coli antigen (e.g., E. coli shiga toxin type-2, E. coli shiga toxin type-1), a Bacillus sp. (e.g., Bacillus anthracis, e.g., Bacillus anthracis anthrax) antigen, a Pseudomonas aeruginosa antigen (e.g., Pseudomonas aeruginosa type III secretion system), an Enterococcus sp. antigen, an Enterobacter sp. antigen, a Proteus sp. antigen, an Actinobacter sp. antigen, a Mycobacterium avium (Mycobacterium avium complex (MAC)) antigen, a Salmonella bacteria antigen, a Clostridium difficile antigen, a Toxoplasma (e.g., Toxoplasma gondii) antigen, a Histoplasma antigen, a Candida antigen, a Coccidioides antigen, a Cryptococcus antigen, a Cryptosporidium antigen, and a Cystoisospora (e.g., Cystoisospora belli) antigen, and another antigen (e.g., endotoxins, lymphotoxins (e.g., lymphotoxin alpha LTA), phosphatidylserine, Hsp90, CCR5, lipoteichoic acid, clumping factor A).

[5442] In some aspects, the antigen binding polypeptides provided herein comprise a VL1 comprising a light chain complementarity determining region 1 (LCDR1), LCDR2, and/or LCDR3 of an antibody selected from the group consisting of libivirumab, rmab, rivabazumab pegol, setoxaximab, suvizumab, suvratoxumab, sevirumab, pritoxaximab, porgaviximab, REGN-EB3, obiltoxaximab, gedivumab, foravirumab, larcaviximab, motavizumab, palivizumab, rafivirumab, regavirumab, tuvirumab, cosfroviximab, felvizumab, atidortoxumab, edobacomab, nebacumab, pateclizumab, raxibacumab, urtoxazumab, tosatoxumab, berlimatoxumab, CR6261, diridavumab, firivumab, lesofavumab, navivumab, exbivirumab, lenvervimab, bavituximab, bezlotoxumab, efungumab, leronlimab, nirsevimab, pagibaximab, panobacumab, tefibazumab, ansuvimab, atoltivimab, maftivimab, and odesivimab.

[5443] In some aspects, the antigen binding polypeptides provided herein comprise a VL2 comprising a light chain complementarity determining region 1 (LCDR1), LCDR2, and/or LCDR3 of an antibody selected from the group consisting of libivirumab, rmab, rivabazumab pegol, setoxaximab, suvizumab, suvratoxumab, sevirumab, pritoxaximab, porgaviximab, REGN-EB3, obiltoxaximab, gedivumab, foravirumab, larcaviximab, motavizumab, palivizumab, rafivirumab, regavirumab, tuvirumab, cosfroviximab, felvizumab, atidortoxumab, edobacomab, nebacumab, pateclizumab, raxibacumab, urtoxazumab, tosatoxumab, berlimatoxumab, CR6261, diridavumab, firivumab, lesofavumab, navivumab, exbivirumab, lenvervimab, bavituximab, bezlotoxumab, efungumab, leronlimab, nirsevimab, pagibaximab, panobacumab, tefibazumab, ansuvimab, atoltivimab, maftivimab, and odesivimab.

[5444] In some aspects, the antigen binding polypeptides provided herein comprise a VL3 comprising a light chain complementarity determining region 1 (LCDR1), LCDR2, and/or LCDR3 of an antibody selected from the group consisting of libivirumab, rmab, rivabazumab pegol, setoxaximab, suvizumab, suvratoxumab, sevirumab, pritoxaximab, porgaviximab, REGN-EB3, obiltoxaximab, gedivumab, foravirumab, larcaviximab, motavizumab, palivizumab, rafivirumab, regavirumab, tuvirumab, cosfroviximab, felvizumab, atidortoxumab, edobacomab, nebacumab, pateclizumab, raxibacumab, urtoxazumab, tosatoxumab, berlimatoxumab, CR6261, diridavumab, firivumab, lesofavumab, navivumab, exbivirumab, lenvervimab, bavituximab, bezlotoxumab, efungumab, leronlimab, nirsevimab, pagibaximab, panobacumab, tefibazumab, ansuvimab, atoltivimab, maftivimab, and odesivimab.

[5445] In some aspects, the antigen binding polypeptides provided herein comprise a VL1 comprising a VL of an antibody selected from the group consisting of libivirumab, rmab, rivabazumab pegol, setoxaximab, suvizumab, suvratoxumab, sevirumab, pritoxaximab, porgaviximab, REGN-EB3, obiltoxaximab, gedivumab, foravirumab, larcaviximab, motavizumab, palivizumab, rafivirumab, regavirumab, tuvirumab, cosfroviximab, felvizumab, atidortoxumab, edobacomab, nebacumab, pateclizumab, raxibacumab, urtoxazumab, tosatoxumab, berlimatoxumab, CR6261, diridavumab, firivumab, lesofavumab, navivumab, exbivirumab, lenvervimab, bavituximab, bezlotoxumab, efungumab, leronlimab, nirsevimab, pagibaximab, panobacumab, tefibazumab, ansuvimab, atoltivimab, maftivimab, and odesivimab.

[5446] In some aspects, the antigen binding polypeptides provided herein comprise a VL2 comprising a VL of an antibody selected from the group consisting of libivirumab, rmab, rivabazumab pegol, setoxaximab, suvizumab, suvratoxumab, sevirumab, pritoxaximab, porgaviximab, REGN-EB3, obiltoxaximab, gedivumab, foravirumab, larcaviximab, motavizumab, palivizumab, rafivirumab, regavirumab, tuvirumab, cosfroviximab, felvizumab, atidortoxumab, edobacomab, nebacumab, pateclizumab, raxibacumab, urtoxazumab, tosatoxumab, berlimatoxumab, CR6261, diridavumab, firivumab, lesofavumab, navivumab, exbivirumab, lenvervimab, bavituximab, bezlotoxumab, efungumab, leronlimab, nirsevimab, pagibaximab, panobacumab, tefibazumab, ansuvimab, atoltivimab, maftivimab, and odesivimab.

[5447] In some aspects, the antigen binding polypeptides provided herein comprise a VL3 comprising a VL of an antibody selected from the group consisting of libivirumab, rmab, rivabazumab pegol, setoxaximab, suvizumab, suvratoxumab, sevirumab, pritoxaximab, porgaviximab, REGN-EB3, obiltoxaximab, gedivumab, foravirumab, larcaviximab, motavizumab, palivizumab, rafivirumab, regavirumab, tuvirumab, cosfroviximab, felvizumab, atidortoxumab, edobacomab, nebacumab, pateclizumab, raxibacumab, urtoxazumab, tosatoxumab, berlimatoxumab, CR6261, diridavumab, firivumab, lesofavumab, navivumab, exbivirumab, lenvervimab, bavituximab, bezlotoxumab, efungumab, leronlimab, nirsevimab, pagibaximab, panobacumab, tefibazumab, ansuvimab, atoltivimab, maftivimab, and odesivimab.

[5448] In some aspects, the antigen binding polypeptides provided herein comprise a VL1 comprising (i) a complementarity determining region (CDR) 1 having an amino acid sequence that is at least 65%, at least 70%, at least 75%, at least 80%, at least 85%, at least 90%, at least 95%, at least 99%, or 100% identical to any one of SEQ ID NOs: 1428, 1793, 1798, 1810, 1817, 1824, 1977, 1985, 1993 and 2001; (ii) a CDR2 having an amino acid sequence that is at least 65%, at least 70%, at least 75%, at least 80%, at least 85%, at least 90%, at least 95%, at least 99%, or 100% identical to any one of SEQ ID NOs: 1978, 1986, 1994, and 2002; or at least 65%, at least 70%, at least 75%, at least 80%, at least 85%, at least 90%, at least 95%, at least 99%, or 100% identical to any one of amino acid sequences YTS, DTS, GAS, and AAS; and (iii) a CDR3 having an amino acid sequence that is at least 65%, at least 70%, at least 75%, at least 80%, at least 85%, at least 90%, at least 95%, at least 99%, or 100% identical to any one of SEQ ID NOs: 1229, 1799, 1805, 1811, 1818, 1825, 1979, 1987, 1995, and 2003.

[5449] In some aspects, the antigen binding polypeptides provided herein comprise a VL2 comprising (i) a complementarity determining region (CDR) 1 having an amino acid sequence that is at least 65%, at least 70%, at least 75%, at least 80%, at least 85%, at least 90%, at least 95%, at least 99%, or 100% identical to any one of SEQ ID NOs: 1428, 1793, 1798, 1810, 1817, 1824, 1977, 1985, 1993 and 2001; (ii) a CDR2 having an amino acid sequence that is at least 65%, at least 70%, at least 75%, at least 80%, at least 85%, at least 90%, at least 95%, at least 99%, or 100% identical to any one of SEQ ID NOs: 1978, 1986, 1994, and 2002; or at least 65%, at least 70%, at least 75%, at least 80%, at least 85%, at least 90%, at least 95%, at least 99%, or 100% identical to any one of amino acid sequences YTS, DTS, GAS, and AAS; and (iii) a CDR3 having an amino acid sequence that is at least 65%, at least 70%, at least 75%, at least 80%, at least 85%, at least 90%, at least 95%, at least 99%, or 100% identical to any one of SEQ ID NOs: 1229, 1799, 1805, 1811, 1818, 1825, 1979, 1987, 1995, and 2003.

[5450] In some aspects, the antigen binding polypeptides provided herein comprise a VL3 comprising (i) a complementarity determining region (CDR) 1 having an amino acid sequence that is at least 65%, at least 70%, at least 75%, at least 80%, at least 85%, at least 90%, at least 95%, at least 99%, or 100% identical to any one of SEQ ID NOs: 1428, 1793, 1798, 1810, 1817, 1824, 1977, 1985, 1993 and 2001; (ii) a CDR2 having an amino acid sequence that is at least 65%, at least 70%, at least 75%, at least 80%, at least 85%, at least 90%, at least 95%, at least 99%, or 100% identical to any one of SEQ ID NOs: 1978, 1986, 1994, and 2002; or at least 65%, at least 70%, at least 75%, at least 80%, at least 85%, at least 90%, at least 95%, at least 99%, or 100% identical to any one of amino acid sequences YTS, DTS, GAS, and AAS; and (iii) a CDR3 having an amino acid sequence that is at least 65%, at least 70%, at least 75%, at least 80%, at least 85%, at least 90%, at least 95%, at least 99%, or 100% identical to any one of SEQ ID NOs: 1229, 1799, 1805, 1811, 1818, 1825, 1979, 1987, 1995, and 2003.

[5451] In some aspects, the antigen binding polypeptides provided herein comprise a VL1 comprising an amino acid sequence that is at least 65%, at least 70%, at least 75%, at least 80%, at least 85%, at least 90%, at least 95%, at least 99%, or 100% identical to any one of SEQ ID NOs: 1794, 1800, 1806, 1812, 1819, 1826, 1980, 1988, 1996, and 2004.

[5452] In some aspects, the antigen binding polypeptides provided herein comprise a VL2 comprising an amino acid sequence that is at least 65%, at least 70%, at least 75%, at least 80%, at least 85%, at least 90%, at least 95%, at least 99%, or 100% identical to any one of SEQ ID NOs: 1794, 1800, 1806, 1812, 1819, 1826, 1980, 1988, 1996, and 2004.

[5453] In some aspects, the antigen binding polypeptides provided herein comprise a VL3 comprising an amino acid sequence that is at least 65%, at least 70%, at least 75%, at least 80%, at least 85%, at least 90%, at least 95%, at least 99%, or 100% identical to any one of SEQ ID NOs: 1794, 1800, 1806, 1812, 1819, 1826, 1980, 1988, 1996, and 2004.

[5454] In some aspects, the other-pathology antigen is selected from the group consisting of Amyloid beta, β-amyloid, PCSK9, IFN-α/β receptor. Rhesus factor, nerve growth factor (NGF), DPP4, fibrin II beta chain, ACVR2B, scrum amyloid A protein SOST, FGF 23, VWF, tissue factor pathway inhibitor (TFPI), 1-40 and 1-42, selectin P, glucagon receptor (GCGR), amyloid P component, GDF-8, CXCL10 IP-10, repulsive guidance molecule A RGMA, IFN-γ, activated F9/F10, calcitonin gene-related peptide (CGRP), angiopoietin 3, IFN receptor, IFN-γ, calcitonin, β-amyloid 1-40 and 1-42, tau protein, dabigatran, cardiac myosin, selectin P, Complement factor D (CFD), kallikrein, GDF-8, IGHE, tissue factor pathway inhibitor (TFPI), GMCSF receptor α-chain, amyloid, IgE Fc region, MASP-2, oxLDL, GMCSF, NOGO-A, Alpha-synuclein, NGF, myelin-associated glycoprotein, RHD (gene) (RHD), sclerostin, FCGRT, sclerostin SOST, mucosal addressin cell adhesion molecule, myostatin, RSVFR, complement component 1s C1s, C5, and IL31.

[5455] In some aspects, the antigen binding polypeptides provided herein comprise a VL1 comprising a light chain complementarity determining region 1 (LCDR1), LCDR2, and/or LCDR3 of an antibody selected from the group consisting of aducanumab, alirocumab, frovocimab, lodelcizumab, bococizumab, evolocumab, ralpancizumab, anifrolumab, atorolimumab, bapineuzumab, bedinvetmab, begelomab, biciromab, bimagrumab, birtamimab, blosozumab, burosumab, caplacizumab, concizumab, crenezumab, crizanlizumab, crotedumab, dezamizumab, domagrozumab, donanemab, eldelumab, elezanumab, emapalumab, emicizumab, eptinezumab, erenumab, evinacumab, faralimomab, fasinumab, fontolizumab, fremanezumab, frunevetmab, fulranumab, galcanezumab, gantenerumab, gosuranemab, idarucizumab, imciromab, inclacumab, lampalizumab, lanadelumab, landogrozumab, lecanemab, ligelizumab, marstacimab, mavrilimumab, morolimumab, NEOD001, omalizumab, oMS721, orticumab, otilimab, ozanezumab, ponezumab, prasinezumab, quilizumab, ranevetmab, refanezumab, roledumab, romosozumab, rozanolixizumab, setrusumab, SHP647, solanezumab, stamulumab, suptavumab, sutimlimab, tanezumab, crovalimab, and lokivetmab.

[5456] In some aspects, the antigen binding polypeptides provided herein comprise a VL2 comprising a light chain complementarity determining region 1 (LCDR1), LCDR2, and/or LCDR3 of an antibody selected from the group consisting of aducanumab, alirocumab, frovocimab, lodelcizumab, bococizumab, evolocumab, ralpancizumab, anifrolumab, atorolimumab, bapincuzumab, bedinvetmab, begelomab, biciromab, bimagrumab, birtamimab, blosozumab, burosumab, caplacizumab, concizumab, crenezumab, crizanlizumab, crotedumab, dezamizumab, domagrozumab, donanemab, eldelumab, elezanumab, emapalumab, emicizumab, eptinezumab, erenumab, evinacumab, faralimomab, fasinumab, fontolizumab, fremanezumab, frunevetmab, fulranumab, galcanezumab, gantenerumab, gosuranemab, idarucizumab, imciromab, inclacumab, lampalizumab, lanadelumab, landogrozumab, lecanemab, ligelizumab, marstacimab, mavrilimumab, morolimumab, NEOD001, omalizumab, oMS721, orticumab, otilimab, ozanezumab, ponezumab, prasinezumab, quilizumab, ranevetmab, refanezumab, roledumab, romosozumab, rozanolixizumab, setrusumab, SHP647, solanezumab, stamulumab, suptavumab, sutimlimab, tanezumab, crovalimab, and lokivetmab.

[5457] In some aspects, the antigen binding polypeptides provided herein comprise a VL3 comprising a light chain complementarity determining region 1 (LCDR1), LCDR2, and/or LCDR3 of an antibody selected from the group consisting of aducanumab, alirocumab, frovocimab, lodelcizumab, bococizumab, evolocumab, ralpancizumab, anifrolumab, atorolimumab, bapineuzumab, bedinvetmab, begelomab, biciromab, bimagrumab, birtamimab, blosozumab, burosumab, caplacizumab, concizumab, crenezumab, crizanlizumab, crotedumab, dezamizumab, domagrozumab, donanemab, eldelumab, elezanumab, emapalumab, emicizumab, eptinezumab, erenumab, evinacumab, faralimomab, fasinumab, fontolizumab, fremanezumab, frunevetmab, fulranumab, galcanezumab, gantenerumab, gosuranemab, idarucizumab, imciromab, inclacumab, lampalizumab, lanadelumab, landogrozumab, lecanemab, ligelizumab, marstacimab, mavrilimumab, morolimumab, NEOD001, omalizumab, oMS721, orticumab, otilimab, ozanezumab, ponezumab, prasinezumab, quilizumab, ranevetmab, refanezumab, roledumab, romosozumab, rozanolixizumab, setrusumab, SHP647, solanezumab, stamulumab, suptavumab, sutimlimab, tanezumab, crovalimab, and lokivetmab.

[5458] In some aspects, the antigen binding polypeptides provided herein comprise a VL1 comprising a VL of an antibody selected from the group consisting of aducanumab, alirocumab, frovocimab, lodelcizumab, bococizumab, evolocumab, ralpancizumab, anifrolumab, atorolimumab, bapineuzumab, bedinvetmab, begelomab, biciromab, bimagrumab, birtamimab, blosozumab, burosumab, caplacizumab, concizumab, crenezumab, crizanlizumab, crotedumab, dezamizumab, domagrozumab, donanemab, eldelumab, elezanumab, emapalumab, emicizumab, eptinezumab, erenumab, evinacumab, faralimomab, fasinumab, fontolizumab, fremanezumab, frunevetmab, fulranumab, galcanezumab, gantenerumab, gosuranemab, idarucizumab, imciromab, inclacumab, lampalizumab, lanadelumab, landogrozumab, lecanemab, ligelizumab, marstacimab, mavrilimumab, morolimumab, NEOD001, omalizumab, oMS721, orticumab, otilimab, ozanezumab, ponezumab, prasinezumab, quilizumab, ranevetmab, refanezumab, roledumab, romosozumab, rozanolixizumab, setrusumab, SHP647, solanezumab, stamulumab, suptavumab, sutimlimab, tanezumab, crovalimab, and lokivetmab.

[5459] In some aspects, the antigen binding polypeptides provided herein comprise a VL2 comprising a VL of an antibody selected from the group consisting of aducanumab, alirocumab, frovocimab, lodelcizumab, bococizumab, evolocumab, ralpancizumab, anifrolumab, atorolimumab, bapineuzumab, bedinvetmab, begelomab, biciromab, bimagrumab, birtamimab, blosozumab, burosumab, caplacizumab, concizumab, crenezumab, crizanlizumab, crotedumab, dezamizumab, domagrozumab, donanemab, eldelumab, elezanumab, emapalumab, emicizumab, eptinezumab, erenumab, evinacumab, faralimomab, fasinumab, fontolizumab, fremanezumab, frunevetmab, fulranumab, galcanezumab, gantenerumab, gosuranemab, idarucizumab, imciromab, inclacumab, lampalizumab, lanadelumab, landogrozumab, lecanemab, ligelizumab, marstacimab, mavrilimumab, morolimumab, NEOD001, omalizumab, oMS721, orticumab, otilimab, ozanezumab, ponezumab, prasinezumab, quilizumab, ranevetmab, refanezumab, roledumab, romosozumab, rozanolixizumab, setrusumab, SHP647, solanezumab, stamulumab, suptavumab, sutimlimab, tanezumab, crovalimab, and lokivetmab.

[5460] In some aspects, the antigen binding polypeptides provided herein comprise a VL3 comprising a VL of an antibody selected from the group consisting of aducanumab, alirocumab, frovocimab, lodelcizumab, bococizumab, evolocumab, ralpancizumab, anifrolumab, atorolimumab, bapineuzumab, bedinvetmab, begelomab, biciromab, bimagrumab, birtamimab, blosozumab, burosumab, caplacizumab, concizumab, crenezumab, crizanlizumab, crotedumab, dezamizumab, domagrozumab, donanemab, eldelumab, elezanumab, emapalumab, emicizumab, eptinezumab, erenumab, evinacumab, faralimomab, fasinumab, fontolizumab, fremanezumab, frunevetmab, fulranumab, galcanezumab, gantenerumab, gosuranemab, idarucizumab, imciromab, inclacumab, lampalizumab, lanadelumab, landogrozumab, lecanemab, ligelizumab, marstacimab, mavrilimumab, morolimumab, NEOD001, omalizumab, oMS721, orticumab, otilimab, ozanezumab, ponezumab, prasinezumab, quilizumab, ranevetmab, refanezumab, roledumab, romosozumab, rozanolixizumab, setrusumab, SHP647, solanezumab, stamulumab, suptavumab, sutimlimab, tanezumab, crovalimab, and lokivetmab.

[5461] In some aspects, the antigen binding polypeptides provided herein comprise a VL1 comprising (i) a complementarity determining region (CDR) 1 having an amino acid sequence that is at least 65%, at least 70%, at least 75%, at least 80%, at least 85%, at least 90%, at least 95%, at least 99%, or 100% identical to any one of SEQ ID NOs: 1120, 1228, 1359, 1519, 1831, 1838, 1845, 1852, 1859, 1866, 1872, 1878, 1885, 1891, 1898, 1905, 1911, 1917, 1924, 1931, 1938, 1945, and 1963; (ii) a CDR2 having an amino acid sequence that is at least 65%, at least 70%, at least 75%, at least 80%, at least 85%, at least 90%, at least 95%, at least 99%, or 100% identical to any one of amino acid sequences AAS, AVS, DAS, DNN, EDN, EVS, GAS, GNG, KAS, KVS, LVS, NTD, STS, WAS, and YTS; and (iii) a CDR3 having an amino acid sequence that is at least 65%, at least 70%, at least 75%, at least 80%, at least 85%, at least 90%, at least 95%, at least 99%, or 100% identical to any one of SEQ ID NOs: 1360, 1832, 1839, 1846, 1853, 1860, 1867, 1873, 1879, 1886, 1892, 1899, 1906, 1912, 1918, 1925, 1932, 1939, 1946, 1951, 1957, 1964, and 1970.

[5462] In some aspects, the antigen binding polypeptides provided herein comprise a VL2 comprising (i) a complementarity determining region (CDR) 1 having an amino acid sequence that is at least 65%, at least 70%, at least 75%, at least 80%, at least 85%, at least 90%, at least 95%, at least 99%, or 100% identical to any one of SEQ ID NOs: 1120, 1228, 1359, 1519, 1831, 1838, 1845, 1852, 1859, 1866, 1872, 1878, 1885, 1891, 1898, 1905, 1911, 1917, 1924, 1931, 1938, 1945, and 1963; (ii) a CDR2 having an amino acid sequence that is at least 65%, at least 70%, at least 75%, at least 80%, at least 85%, at least 90%, at least 95%, at least 99%, or 100% identical to any one of amino acid sequences AAS, AVS, DAS, DNN, EDN, EVS, GAS, GNG, KAS, KVS, LVS, NTD, STS, WAS, and YTS; and (iii) a CDR3 having an amino acid sequence that is at least 65%, at least 70%, at least 75%, at least 80%, at least 85%, at least 90%, at least 95%, at least 99%, or 100% identical to any one of SEQ ID NOs: 1360, 1832, 1839, 1846, 1853, 1860, 1867, 1873, 1879, 1886, 1892, 1899, 1906, 1912, 1918, 1925, 1932, 1939, 1946, 1951, 1957, 1964, and 1970.

[5463] In some aspects, the antigen binding polypeptides provided herein comprise a VL3 comprising (i) a complementarity determining region (CDR) 1 having an amino acid sequence that is at least 65%, at least 70%, at least 75%, at least 80%, at least 85%, at least 90%, at least 95%, at least 99%, or 100% identical to any one of SEQ ID NOs: 1120, 1228, 1359, 1519, 1831, 1838, 1845, 1852, 1859, 1866, 1872, 1878, 1885, 1891, 1898, 1905, 1911, 1917, 1924, 1931, 1938, 1945, and 1963; (ii) a CDR2 having an amino acid sequence that is at least 65%, at least 70%, at least 75%, at least 80%, at least 85%, at least 90%, at least 95%, at least 99%, or 100% identical to any one of amino acid sequences AAS, AVS, DAS, DNN, EDN, EVS, GAS, GNG, KAS, KVS, LVS, NTD, STS, WAS, and YTS; and (iii) a CDR3 having an amino acid sequence that is at least 65%, at least 70%, at least 75%, at least 80%, at least 85%, at least 90%, at least 95%, at least 99%, or 100% identical to any one of SEQ ID NOs: 1360, 1832, 1839, 1846, 1853, 1860, 1867, 1873, 1879, 1886, 1892, 1899, 1906, 1912, 1918, 1925, 1932, 1939, 1946, 1951, 1957, 1964, and 1970.

[5464] In some aspects, the antigen binding polypeptides provided herein comprise a VL1 comprising an amino acid sequence that is at least 65%, at least 70%, at least 75%, at least 80%, at least 85%, at least 90%, at least 95%, at least 99%, or 100% identical to any one of SEQ ID NOs: 1361, 1833, 1840, 1847, 1854, 1861, 1868, 1874, 1880, 1887, 1893, 1900, 1907, 1913, 1919, 1926, 1933, 1940, 1947, 1952, 1958, 1965, and 1971.

[5465] In some aspects, the antigen binding polypeptides provided herein comprise a VL2 comprising an amino acid sequence that is at least 65%, at least 70%, at least 75%, at least 80%, at least 85%, at least 90%, at least 95%, at least 99%, or 100% identical to any one of SEQ ID NOs: 1361, 1833, 1840, 1847, 1854, 1861, 1868, 1874, 1880, 1887, 1893, 1900, 1907, 1913, 1919, 1926, 1933, 1940, 1947, 1952, 1958, 1965, and 1971.

[5466] In some aspects, the antigen binding polypeptides provided herein comprise a VL3 comprising an amino acid sequence that is at least 65%, at least 70%, at least 75%, at least 80%, at least 85%, at least 90%, at least 95%, at least 99%, or 100% identical to any one of SEQ ID NOs: 1361, 1833, 1840, 1847, 1854, 1861, 1868, 1874, 1880, 1887, 1893, 1900, 1907, 1913, 1919, 1926, 1933, 1940, 1947, 1952, 1958, 1965, and 1971.

[5467] In some aspects, the antigen binding polypeptides disclosed herein, comprise one or more CH1, as indicated in the formulas representing the antigen binding polypeptides disclosed herein. In some aspects, the CH1 comprises an amino acid sequence at least 65%, at least 70%, at least 75%, at least 80%, at least 85%, at least 90%, at least 95%, at least 99%, or 100% identical to any one of SEQ ID NOs: 375, 634, 1070, 1071, or 1086-1091.

[5468] In some aspects, the antigen binding polypeptides provided herein further comprise an Fc region. In some aspects, the antigen binding polypeptides provided herein further comprise an Fc region at the carboxy-terminus. In some aspects, the Fc region comprises an immunoglobulin heavy chain constant region 2 (CH2) and/or an immunoglobulin heavy chain constant region 3 (CH3). In some aspects, the Fc region further comprises an immunoglobulin hinge (i.e., a hinge region). In some aspects, the hinge region comprises an amino acid sequence at least 65%, at least 70%, at least 75%, at least 80%, at least 85%, at least 90%, at least 95%, at least 99%, or 100% identical to any one of SEQ ID NOs: 635, 636, 1072, 1073, or 1074. In some aspects, the Fc region comprises a CH2 and a CH3. In some aspects, the CH2 comprises an amino acid sequence that is at least 65%, at least 70%, at least 75%, at least 80%, at least 85%, at least 90%, at least 95%, at least 99%, or 100% identical to any one of SEQ ID NOs: 1075-1078. In some aspects, the CH3 comprises an amino acid sequence that is at least 65%, at least 70%, at least 75%, at least 80%, at least 85%, at least 90%, at least 95%, at least 99%, or 100% identical to any one of SEQ ID NOs: 1079-1085. In some aspects, the Fc region comprises an amino acid sequence that is at least 65%, at least 70%, at least 75%, at least 80%, at least 85%, at least 90%, at least 95%, at least 99%, or 100% identical to any one of SEQ ID NOs: 376-380.

[5469] In some aspects, the Fc region comprises one or more amino acid substitutions. In some aspects, the one or more amino acid substitutions comprise one or more half-life extension amino acid substitutions. In some aspects, the one or more half-life extension amino acid substitutions comprise one or more of amino acid substitutions M428L, N434A, N434S, L234F, L235E, P331S, M252Y, S254T, and T256E, or equivalent thereof, based on the EU numbering scheme. In some aspects, the one or more half-life extension amino acid substitutions comprise a LA (M428L and N434A, or equivalent thereof, based on the EU numbering scheme) amino acid substitution. In some aspects, the one or more half-life extension amino acid substitutions comprise a LS (M428L and N434S, or equivalent thereof, based on the EU numbering scheme) amino acid substitution. In some aspects, the one or more half-life extension amino acid substitutions comprise L234F and L235E, or equivalent thereof (based on the EU numbering scheme) amino acid substitutions. In some aspects, the one or more half-life extension amino acid substitutions comprise a TM (L234F, L235E, and P331S, or equivalent thereof, based on the EU numbering scheme) amino acid substitution. In some aspects, the one or more half-life extension amino acid substitutions comprise a YTE (M252Y, S254T, and T256E, or equivalent thereof, based on the EU numbering scheme) amino acid substitution.

[5470] In some aspects, the Fc region comprises at least one knob-into-hole modification. In some aspects, the antigen binding polypeptides disclosed herein are comprised in IgG1 or IgG4 antibodies or antigen binding fragments thereof. In some aspects, the knob-into-hole modification comprises one or more of knob substitutions of S354C and T366W, or equivalent thereof, and/or one or more of hole substitutions of Y349C, T366S, L368A, Y407V, or equivalent thereof, or a combination thereof, based on the EU numbering scheme. In some aspects, the Fc region comprises a knob-into-hole modification comprising knob substitutions of S354C and T366W, or equivalent thereof, and/or hole substitutions of Y349C, T366S, L368A and Y407V, or equivalent thereof, and/or a half-life extension amino acid substitution comprising: a LA (M428L and N434A, or equivalent thereof, based on the EU numbering scheme) amino acid substitution, a LS (M428L and N434S, or equivalent thereof, based on the EU numbering scheme) amino acid substitution, L234F and L235E, or equivalent thereof (based on the EU numbering scheme) amino acid substitutions, a TM (L234F, L235E, and P331S, or equivalent thereof, based on the EU numbering scheme) amino acid substitution, a YTE (M252Y, S254T, and T256E, or equivalent thereof, based on the EU numbering scheme) amino acid substitution, or any combination thereof.

[5471] In some aspects, the Fc region comprises knob substitutions of S354C and T366W, or equivalent thereof, and a half-life extension amino acid substitution comprising: a LA (M428L and N434A, or equivalent thereof, based on the EU numbering scheme) amino acid substitution, a LS (M428L and N434S, or equivalent thereof, based on the EU numbering scheme) amino acid substitution, L234F and L235E, or equivalent thereof (based on the EU numbering scheme) amino acid substitutions, a TM (L234F, L235E, and P331S, or equivalent thereof, based on the EU numbering scheme) amino acid substitution, a YTE (M252Y, S254T, and T256E, or equivalent thereof, based on the EU numbering scheme) amino acid substitution, or any combination thereof.

[5472] In some aspects, the Fc region comprises hole substitutions of Y349C, T366S, L368A and Y407V, or equivalent thereof, and a half-life extension amino acid substitution comprising: a LA (M428L and N434A, or equivalent thereof, based on the EU numbering scheme) amino acid substitution, a LS (M428L and N434S, or equivalent thereof, based on the EU numbering scheme) amino acid substitution, L234F and L235E, or equivalent thereof (based on the EU numbering scheme) amino acid substitutions, a TM (L234F, L235E, and P331S, or equivalent thereof, based on the EU numbering scheme) amino acid substitution, a YTE (M252Y, S254T, and T256E, or equivalent thereof, based on the EU numbering scheme) amino acid substitution, or any combination thereof.

[5473] In some aspects, the antigen binding polypeptides disclosed herein comprise one or more Fc effector function knockout mutation. In some aspects, the antigen binding polypeptides disclosed herein are comprised in IgG1 or IgG4 antibodies or antigen binding fragments thereof. In some aspects, the Fc effector function knockout mutation is L234A, L235A, P239A, or equivalent thereof, or a combination thereof, based on the EU numbering scheme.

[5474] In some aspects, the antigen binding polypeptides disclosed herein comprise a mutation at a glycosylation site. In some aspects, the mutation at a glycosylation site is a mutation at an N-glycosylation site. In some aspects, the antigen binding polypeptides comprise a VH comprising a mutation at a glycosylation site. In some aspects, the mutation at a glycosylation site is a mutation at an N-glycosylation site. In some aspects, the mutation at an N-glycosylation site is at amino acid N62, or equivalent thereof, of the VH region or equivalent thereof. In some aspects, the mutation at an N-glycosylation site at amino acid N62 is N62Q or N62S, or equivalent thereof.

[5475] In some aspects, the antigen binding polypeptides disclosed herein, comprise one or more optional linkers. The one or more optional linkers are indicated herein as Ln, wherein n is an integer, and the integer next to each L indicates each L comprised in the antigen binding polypeptides disclosed herein. For example, if an antigen binding polypeptide disclosed herein comprises two linkers, the first linker from N-terminus to C-terminus is herein indicated as L1, and the second linker from N-terminus to C-terminus is herein indicated as L2. In some aspects, any one of the optional linkers each independently have a length of from 0 amino acids to about 50 amino acids. In some aspects, any one of the optional linkers each independently have a length of from 5 amino acids to about 40 amino acids.

[5476] In some aspects, any one of the optional linkers are non-immunogenic. In some aspects, any one of the optional linkers do not contain a consensus T cell epitope.

[5477] In some aspects, any of Ln comprises an amino acid sequence of G or A, or an amino acid sequence at least 65%, at least 70%, at least 75%, at least 80%, at least 85%, at least 90%, at least 95%, at least 99%, or 100% identical to amino acid sequence GSS or ASG, or an amino acid sequence at least 65%, at least 70%, at least 75%, at least 80%, at least 85%, at least 90%, at least 95%, at least 99%, or 100% identical to any one of SEQ ID NOs: 333-373 or 967-971. In some aspects. Ln comprises an amino acid sequence at least 65%, at least 70%, at least 75%, at least 80%, at least 85%, at least 90%, at least 95%, at least 99%, or 100% identical to any one of SEQ ID NOs: 333-345 or 967-971.

[5478] In some aspects, the antigen binding polypeptides provided herein have a structure, from amino-terminus to carboxy-terminus, represented by:
[5479] VH1-L1-VH2-L2-VH3-L3-CL;
[5480] VH1-L1-VH3-L2-VH2-L3-CL;
[5481] VH2-L1-VH1-L2-VH3-L3-CL;
[5482] VH2-L1-VH3-L2-VH1-L3-CL;
[5483] VH3-L1-VH1-L2-VH2-L3-CL; or
[5484] VH3-L1-VH2-L2-VH1-L3-CL;
[5485] wherein:
[5486] VH1 is a first immunoglobulin heavy chain variable region that specifically binds to (i) a tumor-associated antigen (TAA), (ii) an infectious disease antigen that is not a sarbecovirus antigen, or (iii) an other-pathology antigen;
[5487] VH2 is a second immunoglobulin heavy chain variable region that specifically binds to (i) a tumor-associated antigen (TAA), (ii) an infectious disease antigen that is not a sarbecovirus antigen, or (iii) an other-pathology antigen;
[5488] VH3 is a third immunoglobulin heavy chain variable region that specifically binds to (i) a tumor-associated antigen (TAA), (ii) an infectious disease antigen that is not a sarbecovirus antigen, or (iii) an other-pathology antigen;
[5489] CL is an immunoglobulin light chain constant region; and
[5490] L1-L3 are optional amino acid linkers.

[5491] In any aspect shown herein as a structure from amino terminus to carboxy terminus, and with binding pairs selected from VL and/or VH or other structural regions such as CH1, CL, CH2, CH3, when shown without a specific linker such as L1, L2, etc., such linkers are optionally present in such structures between each designated subsequence VL, VH, etc.

[5492] In some aspects, the TAA is selected from the group consisting of 5′-nucleotidase, 5T4, A2AR, activin receptor-like kinase 1, adenocarcinoma antigen, ADRB3, AFP, AKAP-4, ALK, alpha-fetoprotein, androgenreceptor, angiopoietin 2, AOC3, APRIL, ATPDase, AXL, B7-4, B7DC, B7H1, B7H2, B7H3, B7H4, B7H5, B7H6, B7H7, B7RP1, BAFF, BAFFR, BCMA, bcr-abl, BlyS, BORIS, BST2, BTK, BTLA, C3, C5, C5a, C5a receptor, CA-125, CAIX, CanAg (a glycoform of MUC1), CCL11, CCL15, CCL17, CCL19, CCL2, CCL20, CCL21, CCL25, CCL3, CCL4, CCL5, CCL7, CCL8, CCR2, CCR3, CCR4, CCR5, CD11, CD11a, CD123, CD125, CD133, CD134, CD137, CD137L, CD147, CD15, CD154, CD160, CD16A, CD171, CD179a, CD18, CD184, CD19, CD2, CD20, CD200, CD22, CD221, CD23, CD24, CD242, CD25, CD27, CD272, CD276, CD278, CD279, CD28, CD3, CD30, CD300LF, CD319, CD33, CD37, CD38, CD39, CD38, CD4, CD40, CD40L, CD41, CD44v6, CD45, CD47, CD49B, CD5, CD51, CD52, CD54, CD56, CD6, CD62L, CD7, CD70, CD72, CD74, CD79a, CD79b, CD80, CD86, CD97, CEA, CEACAM5, claudin 18 isoform 2, CLDN6, CLEC12A, CLEC9, CLEC91, CLL-1, cMet, coagulation factor III, CRTH2, CS1, CSF-1, CSFIR, CSF-2, CSF-3, CTGF, CTLA4, CXCL1, CXCL12, CXCL13, CXCL2, CXCL4, CXCR3, CXORF61, CyclinB1, CYP1B1, dendritic cell-associated lectin 2, DLL3, DLL4, DNGR-1, DR5, E7, E-cadherin, EGFL7, EGFR, EGFRVIII, ELF2M, EMR2, endoglin, ENTPD1, EpCAM, EphA2, EPHA3, ephrin receptor A3, EphrinB2, episialin, ERBB2 (Her2/neu), ERBB3, ERG (TMPRSS2-ETS fusion gene), ETV6-AML, FAP, FCAR, FCER1, FCER1A, FCER2, FCRL5, FGF 23, FGFR, FGFR2, fibronectin extra domain-B, FLAP, FLT3, folate hydrolase, folate receptor 1, folate receptor alpha, folate receptor beta, FOLH1, Fos-relatedantigen1, Frizzled receptor, Fucosyl GM1, GD2, GD3, gelatinase B, Gi24, GITR, GITRL, GloboH, Glutamate carboxypeptidase II, glypican 3, GM3, GP100, GPC1, GPC2, GPC3, gplOO, GPNMB, GPR20, GPR5, GPRC5D, growth differentiation factor 8, GUCY2C, HAVCR1, HER1, HER2, HER3, HGF, HGFR, HHLA2, histone complex, HLA-DR, HMGB1, HMWMAA, HPVE6, hTERT, human telomerase reverse transcriptase, HVEM, ICAM-1, ICOS, ICOSL, IDO, IFNa, IgE, IGF-1, IGF1R, IGF-2, IGF-I receptor, IGLL1, IL1, IL10, IL12, IL13, IL13Ra2, IL-13Ra2, IL13Ra1, IL15, IL17, IL-17A, IL-17AF, IL-17F, IL17Rb, IL18, IL1B, IL1F10, IL-1a, IL-1B, IL2, IL-20, IL22, IL23, IL-23A, IL25, IL2Rbeta, IL-3 receptor, IL-31 receptor A, IL33, IL35, IL4, IL4Ra, IL5, IL5R, IL6, IL7, IL7Ra, IL8, IL9, IL9R, IL1A, IL-llRa, integrin α4, integrin α4 β7, integrin α5β1, integrin αIIbβ3, integrin αvβ3, integrin β7, interleukin 36 receptor IL1RAP, interleukin 36 receptor IL1RL2, intestinal carboxy lesterase, ITGB4, ITK, KIR, KIR2D, KIT, LAG3, LAGE-1a, LAIR1, LAMP1, LCK, legumain, leptin, LewisY, LILRA2, LIV-1, LMP2, LOXL2, LPFS2, LRRC15, LY6K, LY75, LYPD3, MAD-CT-1, MAD-CT-2, MAGEA1, MAGE-A1, MCAM, MCP-1, MelanA/MART1, mesothelin, MHC classII, MIF, ML-IAP, MS4A1, MST1R (RON), MUC1, MUC-1, MUC16, MUC-16, MUC5AC, muthsp70-2, MYCN, NA17, NCA-90 granulocyte antigen, NCAM, NCR3LG1, nectin-4, NGNA ganglioside, NKG2A, NKG2D, NKp46, Notch 1, Notch receptor, NRP1, NTPDase-1, NY-BR-1, NY-ESO-1, o-acetyl-GD2, OR51E2, OX40, OX40L, OY-TES1, p53, p53mutant, PANX3, PAP, PAX3, PAX5, PCDC1, PCDP1, PCTA-1/Galectin8, PD-1, PDGFRA, PDGFR-beta, PD-L1, PD-L2, phosphate-sodium co-transporter, phosphatidylserine, PLAC1, polysialic acid, PROM1, prostase, prostein, PRSS21, PSCA, PSMA, PTK7, RAGE-1, RANKL. Ras mutant, rhIL1O, RhoC, root plate-specific spondin 3, ROR1, ROR2, RTN4, RU1, RU2, S152, sarcoma translocation breakpoints, SART3, scatter factor receptor kinase, SDC1, SIRPalpha, SISP1, SLAMF7, SLC, sLc, SLITRK6, spermprotein17, SPG64, sphingosine-1-phosphate, SSEA-4, SSX2, ST2, STEAP1, STEAP2, surviving and telomerase, Syk kinase, T14, TACI, TAG72, TARP, T-cell receptor, TCRβ, TDO, TEM1/CD248, TEM7R, tenascin C, TGFBETA, TGF-β1, TGF-β2, TGS5, the extracellular portion of the APRIL protein, Tie2, TIGIT, TIM3, TLR, TLR2, TLR4, TLR5, TLR9, TMEF1, TnAg, TNF, TNFa, TNFR superfamily member 4, TNFRSF7, Tp55, TRAC, TRAIL-R1, TRAIL-R2, TRAP, TREM1, TROP2, TRP-2, TSHR, TSLP, TSLPR, tumor antigen CTAA16.88, TWEAK, tyrosinase, TYRPI glycoprotein 75, UPK2, VAP-1, VEGF, VEGFA, VEGFR-1, VEGFR2, vimentin, VISTA, Vstm3, WT1, WUCAM, and XAGE1.

[5493] In some aspects, the antigen binding polypeptides provided herein comprise a VH1 comprising a heavy chain complementarity determining region 1 (HCDR1), HCDR2, and/or HCDR3 of an antibody selected from the group consisting of losatuxizumab vedotin, utomilumab, urelumab, oleclumab, naptumomab estafenatox, ascrinvacumab, pintumomab, tacatuzumab tetraxetan, nesvacumab, vanucizumab, timolumab, vapaliximab, vepalimomab, enapotamab vedotin, ianalumab, belimumab, tabalumab, tibulizumab, belantamab mafodotin, teclistamab, teclistamab, detumomab, nacolomab tafenatox, eculizumab, lendalizumab, pexelizumab, pozelimab, ravulizumab, tesidolumab, vilobclimab, abagovomab, igovomab, oregovomab, sofituzumab vedotin, cantuzumab mertansine, cantuzuma bravtansine, girentuximab, altumomab pentetate, arcitumomab, besilesomab, bertilimumab, plozalizumab, mogamulizumab, leronlimab, PRO140, rovelizumab, rovelizumab, talacotuzumab, benralizumab, tavolimab, vonlerolizumab, gavilimomab, ziralimumab, fanolesomab, ipilimumab, ruplizumab, toralizumab, dapirolizumab pegol, toralizumab, dapirolizumab pegol, ruplizumab, blinatumomab, inebilizumab, loncastuximab tesirine, SGN-CD19A, tafasitamab, taplitumomab paptox, XMAB-5574, Budoprutug, Obexelimab, duvortuxizumab, englumafusp alfa, Emfizatamab, zeripatamig, siplizumab, blontuvetmab, FBTA05, ibritumomab tiuxetan, obinutuzumab, ocaratuzumab, ocrelizumab, ofatumumab, rituximab, tositumomab, ublituximab, veltuzumab, divozilimab, eramkafusp alfa, ripertamab, zuberitamab, glofitamab, nofetumomab merpentan, samalizumab, imvotamab, odronextamab, plamotamab, bectumomab, inotuzumab ozogamicin, moxetumomab pasudotox, pinatuzumab vedotin, gomiliximab, lumiliximab, inolimomab, inolimomab, daclizumab, camidanluma btesirine, basiliximab, varlilumab, omburtamab, enoblituzumab, vopratelimab, lulizumabpegol, TGN1412, muromonab-CD3, otelixizumab, teplizumab, visilizumab, epcoritamab, epcoritamab, brentuximab vedotin, iratumumab, azintuxizumab vedotin, gemtuzumab ozogamicin, lintuzumab, vadastuximab talirine, naratuximab emtansine, otlertuzumab, lilotomab satetraxetan, tetulomab, daratumumab, isatuximab, foralumab, mosunetuzumab, mosunetuzumab, cedelizumab, ibalizumab, keliximab, priliximab, tregalizumab, zanolimumab, bleselumab, iscalimab, lucatumumab, ravagalimab, selicrelumab, teneliximab, vanalimab, abciximab, bivatuzumab, iomab-B, telimomab aritox, zolimomab aritox, abituzumab, intetumumab, alemtuzumab, tamtuvetmab, lorvotuzumab mertansine, itolizumab, cusatuzumab, vorsetuzumab mafodotin, milatuzumab, iladatuzumab vedotin, polatuzumab vedotin, galiximab, cibisatamab, zolbetuximab, naxitamab, tisotumab vedotin, olendalizumab, pamrevlumab, lacnotuzumab, cabiralizumab, emactuzumab, axatilimab, gimsilumab, lenzilumab, namilumab, tremelimumab, ulocuplumab, tepoditamab, rovalpituzumab tesirine, tarlatamab, demcizumab, navicixizumab, drozitumab, parsatuzumab, depatuxizumab mafodotin, modotuximab, carotuximab, adecatumumab, adecatumumab, oportuzumab monatox, solitomab, tucotuzumab celmoleukin, edrecolomab, catumaxomab, ifabotuzumab, fibatuzumab, zalutumumab, panitumumab, cetuximab, futuximab, imgatuzumab, laprituximab emtansine, matuzumab, necitumumab, nimotuzumab, tomuzotuximab, amivantamab, amivantamab, cpitumomab cituxetan, sontuzumab, duligotuzumab, elgemtumab, lumretuzumab, patritumab, scribantumab, zenocutuzumab, sibrotuzumab, burosumab, aprutumab ixadotin, radretumab, pasotuxizumab, farletuzumab, mirvetuximab soravtansine, vantictumab, TRBS07, 3F8, dinutuximab, dinutuximab beta, ecromeximab, mitumomab, andecaliximab, capromab, codrituzumab, glembatumumab vedotin, talquetamab, talquetamab, trevogrumab, indusatumab vedotin, ficlatuzumab, rilotumumab, zatuximab, pentuzimab, pentuzimab, margetuximab, timigutuzumab, trastuzumab, trastuzumab duocarmazine, trastuzumab emtansine, gancotamab, pertuzumab, ertumaxomab, emibetuzumab, telisotuzumab, telisotuzumab vedotin, derlotuximab biotin, apolizumab, onartuzumab, bersanlimab, enlimomabpegol, rontalizumab, sifalimumab, talizumab, ganitumab, istiratumab, robatumumab, teprotumumab, figitumumab, ganitumab, istiratumab, robatumumab, teprotumumab, cixutumumab, dalotuzumab, xentuzumab, dusigitumab, canakinumab, ustekinumab, ustekinumab, ustekinumab, briakinumab, briakinumab, abrezekimab, lebrikizumab, romilkimab, TNX-650, tralokinumab, anrukinzumab, brodalumab, ixekizumab, netakimab, perakizumab, secukinumab, vunakizumab, afasevikumab, afasevikumab, bimekizumab, bimekizumab, remtolumab, bermekimab, lutikizumab, lutikizumab, gevokizumab, cergutuzumab amunaleukin, fletikumab, fezakinumab, brazikumab, guselkumab, mirikizumab, tildrakizumab, risankizumab, flotetuzumab, nemolizumab, pascolizumab, dupilumab, mepolizumab, reslizumab, clazakizumab, elsilimomab, olokizumab, sarilumab, siltuximab, sirukumab, vobarilizumab, tocilizumab, SA237, satralizumab, enokizumab, prezalizumab, natalizumab, abrilumab, abrilumab, vedolizumab, volociximab, tadocizumab, etaracizumab, etrolizumab, spesolimab, vatelizumab, erlizumab, lirilumab, relatlimab, cBR96-doxorubicinimmunoconjugate, odulimomab, efalizumab, ladiratuzumab vedotin, simtuzumab, samrotamab vedotin, aselizumab, lupartumab amadotin, imalumab, carlumab, imaprelimab, amatuximab, amatuximab, anetumab ravtansine, narnatumab, clivatuzumab tetraxetan, pemtumomab, gatipotuzumab, ensituximab, lemalesomab, sulesomab, enfortumab vedotin, racotumomab, monalizumab, brontictuzumab, tarextumab, vesencumab, oxelumab, gilvetmab, tislelizumab, dostarlimab, BCD-100, nivolumab, PDR001, pembrolizumab, pidilizumab, retifanlimab, spartalizumab, sintilimab, cemiplimab, olaratumab, tovetumab, rinucumab, atezolizumab, avelumab, durvalumab, lifastuzumab vedotin, bavituximab, acapatamab, capromab, rosopatamab, nezastomig, pasotuxizumab, pelgifatamab, voxalatamab, cofetuzumab pelidotin, denosumab, rosmantuzumab, cirmtuzumab, atinumab, indatuximab ravtansine, elotuzumab, sirtratumab vedotin, sonepcizumab, vandortuzumab vedotin, minretumomab, satumomab pendetide, maslimomab, ontuxizumab, tenatumomab, fresolimumab, metelimumab, lerdelimumab, tezepelumab, etigilimab, tiragotumab, placulumab, prezalumab, infliximab, nerelimomab, ozoralizumab, adalimumab, afelimomab, certolizumab pegol, golimumab, mapatumumab, conatumumab, lexatumumab, tigatuzumab, sacituzumab govitecan, votumumab, pogalizumab, letolizumab, pankomab, anatumomab mafenatox, enavatuzumab, flanvotumab, brolucizumab, ranibizumab, varisacumab, bevacizumab, faricimab, icrucumab, alacizumab pegol, ramucirumab, pritumumab, and onvatilimab.

[5494] In some aspects, the antigen binding polypeptides provided herein comprise a VH2 comprising a heavy chain complementarity determining region 1 (HCDR1), HCDR2, and/or HCDR3 of an antibody selected from the group consisting of losatuxizumab vedotin, utomilumab, urelumab, oleclumab, naptumomab estafenatox, ascrinvacumab, pintumomab, tacatuzumab tetraxetan, nesvacumab, vanucizumab, timolumab, vapaliximab, vepalimomab, enapotamab vedotin, ianalumab, belimumab, tabalumab, tibulizumab, belantamab mafodotin, teclistamab, teclistamab, detumomab, nacolomab tafenatox, eculizumab, lendalizumab, pexclizumab, pozelimab, ravulizumab, tesidolumab, vilobelimab, abagovomab, igovomab, oregovomab, sofituzumab vedotin, cantuzumab mertansine, cantuzuma bravtansine, girentuximab, altumomab pentetate, arcitumomab, besilesomab, bertilimumab, plozalizumab, mogamulizumab, leronlimab, PRO140, rovelizumab, rovelizumab, talacotuzumab, benralizumab, tavolimab, vonlerolizumab, gavilimomab, ziralimumab, fanolesomab, ipilimumab, ruplizumab, toralizumab, dapirolizumab pegol, toralizumab, dapirolizumab pegol, ruplizumab, blinatumomab, inebilizumab, loncastuximab tesirine, SGN-CD19A, tafasitamab, taplitumomab paptox, XMAB-5574, Budoprutug, Obexelimab, duvortuxizumab, englumafusp alfa, Emfizatamab, zeripatamig, siplizumab, blontuvetmab, FBTA05, ibritumomab tiuxetan, obinutuzumab, ocaratuzumab, ocrelizumab, ofatumumab, rituximab, tositumomab, ublituximab, veltuzumab, divozilimab, eramkafusp alfa, ripertamab, zuberitamab, glofitamab, nofetumomab merpentan, samalizumab, imvotamab, odronextamab, plamotamab, bectumomab, inotuzumab ozogamicin, moxetumomab pasudotox, pinatuzumab vedotin, gomiliximab, lumiliximab, inolimomab, inolimomab, daclizumab, camidanluma btesirine, basiliximab, varlilumab, omburtamab, enoblituzumab, vopratelimab, lulizumabpegol, TGN1412, muromonab-CD3, otelixizumab, teplizumab, visilizumab, epcoritamab, epcoritamab, brentuximab vedotin, iratumumab, azintuxizumab vedotin, gemtuzumab ozogamicin, lintuzumab, vadastuximab talirine, naratuximab emtansine, otlertuzumab, lilotomab satetraxetan, tetulomab, daratumumab, isatuximab, foralumab, mosunetuzumab, mosunetuzumab, cedelizumab, ibalizumab, keliximab, priliximab, tregalizumab, zanolimumab, bleselumab, iscalimab, lucatumumab, ravagalimab, selicrelumab, teneliximab, vanalimab, abciximab, bivatuzumab, iomab-B, telimomab aritox, zolimomab aritox, abituzumab, intetumumab, alemtuzumab, tamtuvetmab, lorvotuzumab mertansine, itolizumab, cusatuzumab, vorsetuzumab mafodotin, milatuzumab, iladatuzumab vedotin, polatuzumab vedotin, galiximab, cibisatamab, zolbetuximab, naxitamab, tisotumab vedotin, olendalizumab, pamrevlumab, lacnotuzumab, cabiralizumab, emactuzumab, axatilimab, gimsilumab, lenzilumab, namilumab, tremelimumab, ulocuplumab, tepoditamab, rovalpituzumab tesirine, tarlatamab, demcizumab, navicixizumab, drozitumab, parsatuzumab, depatuxizumab mafodotin, modotuximab, carotuximab, adecatumumab, adecatumumab, oportuzumab monatox, solitomab, tucotuzumab celmoleukin, edrecolomab, catumaxomab, ifabotuzumab, fibatuzumab, zalutumumab, panitumumab, cetuximab, futuximab, imgatuzumab, laprituximab emtansine, matuzumab, necitumumab, nimotuzumab, tomuzotuximab, amivantamab, amivantamab, epitumomab cituxetan, sontuzumab, duligotuzumab, elgemtumab, lumretuzumab, patritumab, scribantumab, zenocutuzumab, sibrotuzumab, burosumab, aprutumab ixadotin, radretumab, pasotuxizumab, farletuzumab, mirvetuximab soravtansine, vantictumab, TRBS07, 3F8, dinutuximab, dinutuximab beta, ecromeximab, mitumomab, andecaliximab, capromab, codrituzumab, glembatumumab vedotin, talquetamab, talquetamab, trevogrumab, indusatumab vedotin, ficlatuzumab, rilotumumab, zatuximab, pentuzimab, pentuzimab, margetuximab, timigutuzumab, trastuzumab, trastuzumab duocarmazine, trastuzumab emtansine, gancotamab, pertuzumab, ertumaxomab, emibetuzumab, telisotuzumab, telisotuzumab vedotin, derlotuximab biotin, apolizumab, onartuzumab, bersanlimab, enlimomabpegol, rontalizumab, sifalimumab, talizumab, ganitumab, istiratumab, robatumumab, teprotumumab, figitumumab, ganitumab, istiratumab, robatumumab, teprotumumab, cixutumumab, dalotuzumab, xentuzumab, dusigitumab, canakinumab, ustekinumab, ustekinumab, ustekinumab, briakinumab, briakinumab, abrezekimab, lebrikizumab, romilkimab, TNX-650, tralokinumab, anrukinzumab, brodalumab, ixekizumab, netakimab, perakizumab, secukinumab, vunakizumab, afasevikumab, afasevikumab, bimekizumab, bimekizumab, remtolumab, bermekimab, lutikizumab, lutikizumab, gevokizumab, cergutuzumab amunaleukin, fletikumab, fezakinumab, brazikumab, guselkumab, mirikizumab, tildrakizumab, risankizumab, flotetuzumab, nemolizumab, pascolizumab, dupilumab, mepolizumab, reslizumab, clazakizumab, elsilimomab, olokizumab, sarilumab, siltuximab, sirukumab, vobarilizumab, tocilizumab, SA237, satralizumab, enokizumab, prezalizumab, natalizumab, abrilumab, abrilumab, vedolizumab, volociximab, tadocizumab, etaracizumab, etrolizumab, spesolimab, vatelizumab, erlizumab, lirilumab, relatlimab, cBR96-doxorubicinimmunoconjugate, odulimomab, efalizumab, ladiratuzumab vedotin, simtuzumab, samrotamab vedotin, aselizumab, lupartumab amadotin, imalumab, carlumab, imaprelimab, amatuximab, amatuximab, anetumab ravtansine, narnatumab, clivatuzumab tetraxetan, pemtumomab, gatipotuzumab, ensituximab, lemalesomab, sulesomab, enfortumab vedotin, racotumomab, monalizumab, brontictuzumab, tarextumab, vesencumab, oxelumab, gilvetmab, tislelizumab, dostarlimab, BCD-100, nivolumab, PDR001, pembrolizumab, pidilizumab, retifanlimab, spartalizumab, sintilimab, cemiplimab, olaratumab, tovetumab, rinucumab, atezolizumab, avelumab, durvalumab, lifastuzumab vedotin, bavituximab, acapatamab, capromab, rosopatamab, nezastomig, pasotuxizumab, pelgifatamab, voxalatamab, cofetuzumab pelidotin, denosumab, rosmantuzumab, cirmtuzumab, atinumab, indatuximab ravtansine, elotuzumab, sirtratumab vedotin, sonepcizumab, vandortuzumab vedotin, minretumomab, satumomab pendetide, maslimomab, ontuxizumab, tenatumomab, fresolimumab, metelimumab, lerdelimumab, tezepelumab, etigilimab, tiragotumab, placulumab, prezalumab, infliximab, nerelimomab, ozoralizumab, adalimumab, afelimomab, certolizumab pegol, golimumab, mapatumumab, conatumumab, lexatumumab, tigatuzumab, sacituzumab govitecan, votumumab, pogalizumab, letolizumab, pankomab, anatumomab mafenatox, enavatuzumab, flanvotumab, brolucizumab, ranibizumab, varisacumab, bevacizumab, faricimab, icrucumab, alacizumab pegol, ramucirumab, pritumumab, and onvatilimab.

[5495] In some aspects, the antigen binding polypeptides provided herein comprise a VH3 comprising a heavy chain complementarity determining region 1 (HCDR1), HCDR2, and/or HCDR3 of an antibody selected from the group consisting of losatuxizumab vedotin, utomilumab, urelumab, oleclumab, naptumomab estafenatox, ascrinvacumab, pintumomab, tacatuzumab tetraxetan, nesvacumab, vanucizumab, timolumab, vapaliximab, vepalimomab, enapotamab vedotin, ianalumab, belimumab, tabalumab, tibulizumab, belantamab mafodotin, teclistamab, teclistamab, detumomab, nacolomab tafenatox, eculizumab, lendalizumab, pexelizumab, pozelimab, ravulizumab, tesidolumab, vilobelimab, abagovomab, igovomab, oregovomab, sofituzumab vedotin, cantuzumab mertansine, cantuzuma bravtansine, girentuximab, altumomab pentetate, arcitumomab, besilesomab, bertilimumab, plozalizumab, mogamulizumab, leronlimab, PRO140, rovelizumab, rovelizumab, talacotuzumab, benralizumab, tavolimab, vonlerolizumab, gavilimomab, ziralimumab, fanolesomab, ipilimumab, ruplizumab, toralizumab, dapirolizumab pegol, toralizumab, dapirolizumab pegol, ruplizumab, blinatumomab, inebilizumab, loncastuximab tesirine, SGN-CD19A, tafasitamab, taplitumomab paptox, XMAB-5574, Budoprutug, Obexelimab, duvortuxizumab, englumafusp alfa, Emfizatamab, zeripatamig, siplizumab, blontuvetmab, FBTA05, ibritumomab tiuxetan, obinutuzumab, ocaratuzumab, ocrelizumab, ofatumumab, rituximab, tositumomab, ublituximab, veltuzumab, divozilimab, eramkafusp alfa, ripertamab, zuberitamab, glofitamab, nofetumomab merpentan, samalizumab, imvotamab, odronextamab, plamotamab, bectumomab, inotuzumab ozogamicin, moxetumomab pasudotox, pinatuzumab vedotin, gomiliximab, lumiliximab, inolimomab, inolimomab, daclizumab, camidanluma btesirine, basiliximab, varlilumab, omburtamab, cnoblituzumab, vopratelimab, lulizumabpegol, TGN1412, muromonab-CD3, otelixizumab, teplizumab, visilizumab, epcoritamab, epcoritamab, brentuximab vedotin, iratumumab, azintuxizumab vedotin, gemtuzumab ozogamicin, lintuzumab, vadastuximab talirine, naratuximab emtansine, otlertuzumab, lilotomab satetraxetan, tetulomab, daratumumab, isatuximab, foralumab, mosunetuzumab, mosunetuzumab, cedelizumab, ibalizumab, keliximab, priliximab, tregalizumab, zanolimumab, bleselumab, iscalimab, lucatumumab, ravagalimab, selicrelumab, teneliximab, vanalimab, abciximab, bivatuzumab, iomab-B, telimomab aritox, zolimomab aritox, abituzumab, intetumumab, alemtuzumab, tamtuvetmab, lorvotuzumab mertansine, itolizumab, cusatuzumab, vorsetuzumab mafodotin, milatuzumab, iladatuzumab vedotin, polatuzumab vedotin, galiximab, cibisatamab, zolbetuximab, naxitamab, tisotumab vedotin, olendalizumab, pamrevlumab, lacnotuzumab, cabiralizumab, emactuzumab, axatilimab, gimsilumab, lenzilumab, namilumab, tremelimumab, ulocuplumab, tepoditamab, rovalpituzumab tesirine, tarlatamab, demcizumab, navicixizumab, drozitumab, parsatuzumab, depatuxizumab mafodotin, modotuximab, carotuximab, adecatumumab, adecatumumab, oportuzumab monatox, solitomab, tucotuzumab celmoleukin, edrecolomab, catumaxomab, ifabotuzumab, fibatuzumab, zalutumumab, panitumumab, cetuximab, futuximab, imgatuzumab, laprituximab emtansine, matuzumab, necitumumab, nimotuzumab, tomuzotuximab, amivantamab, amivantamab, epitumomab cituxetan, sontuzumab, duligotuzumab, elgemtumab, lumretuzumab, patritumab, seribantumab, zenocutuzumab, sibrotuzumab, burosumab, aprutumab ixadotin, radretumab, pasotuxizumab, farletuzumab, mirvetuximab soravtansine, vantictumab, TRBS07, 3F8, dinutuximab, dinutuximab beta, ecromeximab, mitumomab, andecaliximab, capromab, codrituzumab, glembatumumab vedotin, talquetamab, talquetamab, trevogrumab, indusatumab vedotin, ficlatuzumab, rilotumumab, zatuximab, pentuzimab, pentuzimab, margetuximab, timigutuzumab, trastuzumab, trastuzumab duocarmazine, trastuzumab emtansine, gancotamab, pertuzumab, ertumaxomab, emibetuzumab, telisotuzumab, telisotuzumab vedotin, derlotuximab biotin, apolizumab, onartuzumab, bersanlimab, enlimomabpegol, rontalizumab, sifalimumab, talizumab, ganitumab, istiratumab, robatumumab, teprotumumab, figitumumab, ganitumab, istiratumab, robatumumab, teprotumumab, cixutumumab, dalotuzumab, xentuzumab, dusigitumab, canakinumab, ustekinumab, ustekinumab, ustekinumab, briakinumab, briakinumab, abrezckimab, lebrikizumab, romilkimab, TNX-650, tralokinumab, anrukinzumab, brodalumab, ixekizumab, netakimab, perakizumab, secukinumab, vunakizumab, afasevikumab, afasevikumab, bimekizumab, bimekizumab, remtolumab, bermekimab, lutikizumab, lutikizumab, gevokizumab, cergutuzumab amunaleukin, fletikumab, fezakinumab, brazikumab, guselkumab, mirikizumab, tildrakizumab, risankizumab, flotetuzumab, nemolizumab, pascolizumab, dupilumab, mepolizumab, reslizumab, clazakizumab, elsilimomab, olokizumab, sarilumab, siltuximab, sirukumab, vobarilizumab, tocilizumab, SA237, satralizumab, enokizumab, prezalizumab, natalizumab, abrilumab, abrilumab, vedolizumab, volociximab, tadocizumab, etaracizumab, etrolizumab, spesolimab, vatelizumab, erlizumab, lirilumab, relatlimab, cBR96-doxorubicinimmunoconjugate, odulimomab, efalizumab, ladiratuzumab vedotin, simtuzumab, samrotamab vedotin, asclizumab, lupartumab amadotin, imalumab, carlumab, imaprelimab, amatuximab, amatuximab, anetumab ravtansine, narnatumab, clivatuzumab tetraxetan, pemtumomab, gatipotuzumab, ensituximab, lemalesomab, sulesomab, enfortumab vedotin, racotumomab, monalizumab, brontictuzumab, tarextumab, vesencumab, oxelumab, gilvetmab, tislelizumab, dostarlimab, BCD-100, nivolumab, PDR001, pembrolizumab, pidilizumab, retifanlimab, spartalizumab, sintilimab, cemiplimab, olaratumab, tovetumab, rinucumab, atezolizumab, avelumab, durvalumab, lifastuzumab vedotin, bavituximab, acapatamab, capromab, rosopatamab, nezastomig, pasotuxizumab, pelgifatamab, voxalatamab, cofetuzumab pelidotin, denosumab, rosmantuzumab, cirmtuzumab, atinumab, indatuximab ravtansine, elotuzumab, sirtratumab vedotin, sonepcizumab, vandortuzumab vedotin, minretumomab, satumomab pendetide, maslimomab, ontuxizumab, tenatumomab, fresolimumab, metelimumab, lerdelimumab, tezepelumab, etigilimab, tiragotumab, placulumab, prezalumab, infliximab, nerelimomab, ozoralizumab, adalimumab, afelimomab, certolizumab pegol, golimumab, mapatumumab, conatumumab, lexatumumab, tigatuzumab, sacituzumab govitecan, votumumab, pogalizumab, letolizumab, pankomab, anatumomab mafenatox, enavatuzumab, flanvotumab, brolucizumab, ranibizumab, varisacumab, bevacizumab, faricimab, icrucumab, alacizumab pegol, ramucirumab, pritumumab, and onvatilimab.

[5496] In some aspects, the antigen binding polypeptides provided herein comprise a VH1 comprising a VH of an antibody selected from the group consisting of losatuxizumab vedotin, utomilumab, urelumab, oleclumab, naptumomab estafenatox, ascrinvacumab, pintumomab, tacatuzumab tetraxetan, nesvacumab, vanucizumab, timolumab, vapaliximab, vepalimomab, enapotamab vedotin, ianalumab, belimumab, tabalumab, tibulizumab, belantamab mafodotin, teclistamab, teclistamab, detumomab, nacolomab tafenatox, eculizumab, lendalizumab, pexelizumab, pozelimab, ravulizumab, tesidolumab, vilobelimab, abagovomab, igovomab, oregovomab, sofituzumab vedotin, cantuzumab mertansine, cantuzuma bravtansine, girentuximab, altumomab pentetate, arcitumomab, besilesomab, bertilimumab, plozalizumab, mogamulizumab, leronlimab, PRO140, rovelizumab, rovelizumab, talacotuzumab, benralizumab, tavolimab, vonlerolizumab, gavilimomab, ziralimumab, fanolesomab, ipilimumab, ruplizumab, toralizumab, dapirolizumab pegol, toralizumab, dapirolizumab pegol, ruplizumab, blinatumomab, inebilizumab, loncastuximab tesirine, SGN-CD19A, tafasitamab, taplitumomab paptox, XMAB-5574, Budoprutug, Obexelimab, duvortuxizumab, englumafusp alfa, Emfizatamab, zeripatamig, siplizumab, blontuvetmab, FBTA05, ibritumomab tiuxetan, obinutuzumab, ocaratuzumab, ocrelizumab, ofatumumab, rituximab, tositumomab, ublituximab, veltuzumab, divozilimab, eramkafusp alfa, ripertamab, zuberitamab, glofitamab, nofetumomab merpentan, samalizumab, imvotamab, odronextamab, plamotamab, bectumomab, inotuzumab ozogamicin, moxetumomab pasudotox, pinatuzumab vedotin, gomiliximab, lumiliximab, inolimomab, inolimomab, daclizumab, camidanluma btesirine, basiliximab, varlilumab, omburtamab, cnoblituzumab, vopratelimab, lulizumabpegol, TGN1412, muromonab-CD3, otelixizumab, teplizumab, visilizumab, epcoritamab, epcoritamab, brentuximab vedotin, iratumumab, azintuxizumab vedotin, gemtuzumab ozogamicin, lintuzumab, vadastuximab talirine, naratuximab emtansine, otlertuzumab, lilotomab satetraxetan, tetulomab, daratumumab, isatuximab, foralumab, mosunetuzumab, mosunetuzumab, cedelizumab, ibalizumab, keliximab, priliximab, tregalizumab, zanolimumab, bleselumab, iscalimab, lucatumumab, ravagalimab, selicrelumab, teneliximab, vanalimab, abciximab, bivatuzumab, iomab-B, telimomab aritox, zolimomab aritox, abituzumab, intetumumab, alemtuzumab, tamtuvetmab, lorvotuzumab mertansine, itolizumab, cusatuzumab, vorsctuzumab mafodotin, milatuzumab, iladatuzumab vedotin, polatuzumab vedotin, galiximab, cibisatamab, zolbetuximab, naxitamab, tisotumab vedotin, olendalizumab, pamrevlumab, lacnotuzumab, cabiralizumab, emactuzumab, axatilimab, gimsilumab, lenzilumab, namilumab, tremelimumab, ulocuplumab, tepoditamab, rovalpituzumab tesirine, tarlatamab, demcizumab, navicixizumab, drozitumab, parsatuzumab, depatuxizumab mafodotin, modotuximab, carotuximab, adecatumumab, adecatumumab, oportuzumab monatox, solitomab, tucotuzumab celmoleukin, edrecolomab, catumaxomab, ifabotuzumab, fibatuzumab, zalutumumab, panitumumab, cetuximab, futuximab, imgatuzumab, laprituximab emtansine, matuzumab, necitumumab, nimotuzumab, tomuzotuximab, amivantamab, amivantamab, epitumomab cituxetan, sontuzumab, duligotuzumab, elgemtumab, lumretuzumab, patritumab, seribantumab, zenocutuzumab, sibrotuzumab, burosumab, aprutumab ixadotin, radretumab, pasotuxizumab, farletuzumab, mirvetuximab soravtansine, vantictumab, TRBS07, 3F8, dinutuximab, dinutuximab beta, ecromeximab, mitumomab, andecaliximab, capromab, codrituzumab, glembatumumab vedotin, talquetamab, talquetamab, trevogrumab, indusatumab vedotin, ficlatuzumab, rilotumumab, zatuximab, pentuzimab, pentuzimab, margetuximab, timigutuzumab, trastuzumab, trastuzumab duocarmazine, trastuzumab emtansine, gancotamab, pertuzumab, ertumaxomab, emibetuzumab, telisotuzumab, telisotuzumab vedotin, derlotuximab biotin, apolizumab, onartuzumab, bersanlimab, enlimomabpegol, rontalizumab, sifalimumab, talizumab, ganitumab, istiratumab, robatumumab, teprotumumab, figitumumab, ganitumab, istiratumab, robatumumab, teprotumumab, cixutumumab, dalotuzumab, xentuzumab, dusigitumab, canakinumab, ustekinumab, ustekinumab, ustekinumab, briakinumab, briakinumab, abrezekimab, lebrikizumab, romilkimab, TNX-650, tralokinumab, anrukinzumab, brodalumab, ixekizumab, netakimab, perakizumab, secukinumab, vunakizumab, afasevikumab, afasevikumab, bimekizumab, bimekizumab, remtolumab, bermekimab, lutikizumab, lutikizumab, gevokizumab, cergutuzumab amunaleukin, fletikumab, fezakinumab, brazikumab, guselkumab, mirikizumab, tildrakizumab, risankizumab, flotetuzumab, nemolizumab, pascolizumab, dupilumab, mepolizumab, reslizumab, clazakizumab, elsilimomab, olokizumab, sarilumab, siltuximab, sirukumab, vobarilizumab, tocilizumab, SA237, satralizumab, enokizumab, prezalizumab, natalizumab, abrilumab, abrilumab, vedolizumab, volociximab, tadocizumab, etaracizumab, etrolizumab, spesolimab, vatelizumab, erlizumab, lirilumab, relatlimab, cBR96-doxorubicinimmunoconjugate, odulimomab, efalizumab, ladiratuzumab vedotin, simtuzumab, samrotamab vedotin, aselizumab, lupartumab amadotin, imalumab, carlumab, imaprelimab, amatuximab, amatuximab, anetumab ravtansine, narnatumab, clivatuzumab tetraxetan, pemtumomab, gatipotuzumab, ensituximab, lemalesomab, sulesomab, enfortumab vedotin, racotumomab, monalizumab, brontictuzumab, tarextumab, vesencumab, oxelumab, gilvetmab, tislelizumab, dostarlimab, BCD-100, nivolumab, PDR001, pembrolizumab, pidilizumab, retifanlimab, spartalizumab, sintilimab, cemiplimab, olaratumab, tovetumab, rinucumab, atezolizumab, avelumab, durvalumab, lifastuzumab vedotin, bavituximab, acapatamab, capromab, rosopatamab, nezastomig, pasotuxizumab, pelgifatamab, voxalatamab, cofetuzumab pelidotin, denosumab, rosmantuzumab, cirmtuzumab, atinumab, indatuximab ravtansine, elotuzumab, sirtratumab vedotin, sonepcizumab, vandortuzumab vedotin, minretumomab, satumomab pendetide, maslimomab, ontuxizumab, tenatumomab, fresolimumab, metelimumab, lerdelimumab, tezepelumab, etigilimab, tiragotumab, placulumab, prezalumab, infliximab, nerelimomab, ozoralizumab, adalimumab, afelimomab, certolizumab pegol, golimumab, mapatumumab, conatumumab, lexatumumab, tigatuzumab, sacituzumab govitecan, votumumab, pogalizumab, letolizumab, pankomab, anatumomab mafenatox, enavatuzumab, flanvotumab, brolucizumab, ranibizumab, varisacumab, bevacizumab, faricimab, icrucumab, alacizumab pegol, ramucirumab, pritumumab, and onvatilimab.

[5497] In some aspects, the antigen binding polypeptides provided herein comprise a VH2 comprising a VH of an antibody selected from the group consisting of losatuxizumab vedotin, utomilumab, urelumab, oleclumab, naptumomab estafenatox, ascrinvacumab, pintumomab, tacatuzumab tetraxetan, nesvacumab, vanucizumab, timolumab, vapaliximab, vepalimomab, enapotamab vedotin, ianalumab, belimumab, tabalumab, tibulizumab, belantamab mafodotin, teclistamab, teclistamab, detumomab, nacolomab tafenatox, eculizumab, lendalizumab, pexelizumab, pozelimab, ravulizumab, tesidolumab, vilobelimab, abagovomab, igovomab, oregovomab, sofituzumab vedotin, cantuzumab mertansine, cantuzuma bravtansine, girentuximab, altumomab pentetate, arcitumomab, besilesomab, bertilimumab, plozalizumab, mogamulizumab, leronlimab, PRO140, rovelizumab, rovelizumab, talacotuzumab, benralizumab, tavolimab, vonlerolizumab, gavilimomab, ziralimumab, fanolesomab, ipilimumab, ruplizumab, toralizumab, dapirolizumab pegol, toralizumab, dapirolizumab pegol, ruplizumab, blinatumomab, inebilizumab, loncastuximab tesirine, SGN-CD19A, tafasitamab, taplitumomab paptox, XMAB-5574, Budoprutug, Obexclimab, duvortuxizumab, englumafusp alfa, Emfizatamab, zeripatamig, siplizumab, blontuvetmab, FBTA05, ibritumomab tiuxetan, obinutuzumab, ocaratuzumab, ocrelizumab, ofatumumab, rituximab, tositumomab, ublituximab, veltuzumab, divozilimab, eramkafusp alfa, ripertamab, zuberitamab, glofitamab, nofetumomab merpentan, samalizumab, imvotamab, odronextamab, plamotamab, bectumomab, inotuzumab ozogamicin, moxetumomab pasudotox, pinatuzumab vedotin, gomiliximab, lumiliximab, inolimomab, inolimomab, daclizumab, camidanluma btesirine, basiliximab, varlilumab, omburtamab, enoblituzumab, vopratelimab, lulizumabpegol, TGN1412, muromonab-CD3, otelixizumab, teplizumab, visilizumab, epcoritamab, epcoritamab, brentuximab vedotin, iratumumab, azintuxizumab vedotin, gemtuzumab ozogamicin, lintuzumab, vadastuximab talirine, naratuximab emtansine, otlertuzumab, lilotomab satetraxetan, tetulomab, daratumumab, isatuximab, foralumab, mosunetuzumab, mosunetuzumab, cedelizumab, ibalizumab, keliximab, priliximab, tregalizumab, zanolimumab, bleselumab, iscalimab, lucatumumab, ravagalimab, selicrelumab, teneliximab, vanalimab, abciximab, bivatuzumab, iomab-B, telimomab aritox, zolimomab aritox, abituzumab, intetumumab, alemtuzumab, tamtuvetmab, lorvotuzumab mertansine, itolizumab, cusatuzumab, vorsetuzumab mafodotin, milatuzumab, iladatuzumab vedotin, polatuzumab vedotin, galiximab, cibisatamab, zolbetuximab, naxitamab, tisotumab vedotin, olendalizumab, pamrevlumab, lacnotuzumab, cabiralizumab, emactuzumab, axatilimab, gimsilumab, lenzilumab, namilumab, tremelimumab, ulocuplumab, tepoditamab, rovalpituzumab tesirine, tarlatamab, demcizumab, navicixizumab, drozitumab, parsatuzumab, depatuxizumab mafodotin modotuximab, carotuximab, adecatumumab, adecatumumab, oportuzumab monatox, solitomab, tucotuzumab celmoleukin, edrecolomab, catumaxomab, ifabotuzumab, fibatuzumab, zalutumumab, panitumumab, cetuximab, futuximab, imgatuzumab, laprituximab emtansine, matuzumab, necitumumab, nimotuzumab, tomuzotuximab, amivantamab, amivantamab, epitumomab cituxetan, sontuzumab, duligotuzumab, elgemtumab, lumretuzumab, patritumab, seribantumab, zenocutuzumab, sibrotuzumab, burosumab, aprutumab ixadotin, radretumab, pasotuxizumab, farletuzumab, mirvetuximab soravtansine, vantictumab, TRBS07, 3F8, dinutuximab, dinutuximab beta, ecromeximab, mitumomab, andecaliximab, capromab, codrituzumab, glembatumumab vedotin, talquetamab, talquetamab, trevogrumab, indusatumab vedotin, ficlatuzumab, rilotumumab, zatuximab, pentuzimab, pentuzimab, margetuximab, timigutuzumab, trastuzumab, trastuzumab duocarmazine, trastuzumab emtansine, gancotamab, pertuzumab, ertumaxomab, emibetuzumab, telisotuzumab, telisotuzumab vedotin, derlotuximab biotin, apolizumab, onartuzumab, bersanlimab, enlimomabpegol, rontalizumab, sifalimumab, talizumab, ganitumab, istiratumab, robatumumab, teprotumumab, figitumumab, ganitumab, istiratumab, robatumumab, teprotumumab, cixutumumab, dalotuzumab, xentuzumab, dusigitumab, canakinumab, ustekinumab, ustekinumab, ustekinumab, briakinumab, briakinumab, abrezekimab, lebrikizumab, romilkimab, TNX-650, tralokinumab, anrukinzumab, brodalumab, ixekizumab, netakimab, perakizumab, secukinumab, vunakizumab, afasevikumab, afasevikumab, bimekizumab, bimekizumab, remtolumab, bermekimab, lutikizumab, lutikizumab, gevokizumab, cergutuzumab amunaleukin, fletikumab, fezakinumab, brazikumab, guselkumab, mirikizumab, tildrakizumab, risankizumab, flotetuzumab, nemolizumab, pascolizumab, dupilumab, mepolizumab, reslizumab, clazakizumab, elsilimomab, olokizumab, sarilumab, siltuximab, sirukumab, vobarilizumab, tocilizumab, SA237, satralizumab, enokizumab, prezalizumab, natalizumab, abrilumab, abrilumab, vedolizumab, volociximab, tadocizumab, etaracizumab, etrolizumab, spesolimab, vatelizumab, erlizumab, lirilumab, relatlimab, cBR96-doxorubicinimmunoconjugate, odulimomab, efalizumab, ladiratuzumab vedotin, simtuzumab, samrotamab vedotin, aselizumab, lupartumab amadotin, imalumab, carlumab, imaprelimab, amatuximab, amatuximab, anetumab ravtansine, narnatumab, clivatuzumab tetraxetan, pemtumomab, gatipotuzumab, ensituximab, lemalesomab, sulesomab, enfortumab vedotin, racotumomab, monalizumab, brontictuzumab, tarextumab, vesencumab, oxelumab, gilvetmab, tislelizumab, dostarlimab, BCD-100, nivolumab, PDR001, pembrolizumab, pidilizumab, retifanlimab, spartalizumab, sintilimab, cemiplimab, olaratumab, tovetumab, rinucumab, atezolizumab, avelumab, durvalumab, lifastuzumab vedotin, bavituximab, acapatamab, capromab, rosopatamab, nezastomig, pasotuxizumab, pelgifatamab, voxalatamab, cofetuzumab pelidotin, denosumab, rosmantuzumab, cirmtuzumab, atinumab, indatuximab ravtansine, elotuzumab, sirtratumab vedotin, sonepcizumab, vandortuzumab vedotin, minretumomab, satumomab pendetide, maslimomab, ontuxizumab, tenatumomab, fresolimumab, metelimumab, lerdelimumab, tezepelumab, etigilimab, tiragotumab, placulumab, prezalumab, infliximab, nerelimomab, ozoralizumab, adalimumab, afelimomab, certolizumab pegol, golimumab, mapatumumab, conatumumab, lexatumumab, tigatuzumab, sacituzumab govitecan, votumumab, pogalizumab, letolizumab, pankomab, anatumomab mafenatox, enavatuzumab, flanvotumab, brolucizumab, ranibizumab, varisacumab, bevacizumab, faricimab, icrucumab, alacizumab pegol, ramucirumab, pritumumab, and onvatilimab.

[5498] In some aspects, the antigen binding polypeptides provided herein comprise a VH3 comprising a VH of an antibody selected from the group consisting of losatuxizumab vedotin, utomilumab, urelumab, oleclumab, naptumomab estafenatox, ascrinvacumab, pintumomab, tacatuzumab tetraxetan, nesvacumab, vanucizumab, timolumab, vapaliximab, vepalimomab, enapotamab vedotin, ianalumab, belimumab, tabalumab, tibulizumab, belantamab mafodotin, teclistamab, teclistamab, detumomab, nacolomab tafenatox, eculizumab, lendalizumab, pexelizumab, pozelimab, ravulizumab, tesidolumab, vilobelimab, abagovomab, igovomab, oregovomab, sofituzumab vedotin, cantuzumab mertansine, cantuzuma bravtansine, girentuximab, altumomab pentetate, arcitumomab, besilesomab, bertilimumab, plozalizumab, mogamulizumab, leronlimab, PRO140, rovelizumab, rovelizumab, talacotuzumab, benralizumab, tavolimab, vonlerolizumab, gavilimomab, ziralimumab, fanolesomab, ipilimumab, ruplizumab, toralizumab, dapirolizumab pegol, toralizumab, dapirolizumab pegol, ruplizumab, blinatumomab, inebilizumab, loncastuximab tesirine, SGN-CD19A, tafasitamab, taplitumomab paptox, XMAB-5574, Budoprutug, Obexelimab, duvortuxizumab, englumafusp alfa, Emfizatamab, zeripatamig, siplizumab, blontuvetmab, FBTA05, ibritumomab tiuxetan, obinutuzumab, ocaratuzumab, ocrelizumab, ofatumumab, rituximab, tositumomab, ublituximab, veltuzumab, divozilimab, eramkafusp alfa, ripertamab, zuberitamab, glofitamab, nofetumomab merpentan, samalizumab, imvotamab, odronextamab, plamotamab, bectumomab, inotuzumab ozogamicin, moxetumomab pasudotox, pinatuzumab vedotin, gomiliximab, lumiliximab, inolimomab, inolimomab, daclizumab, camidanluma btesirine, basiliximab, varlilumab, omburtamab, enoblituzumab, vopratelimab, lulizumabpegol, TGN1412, muromonab-CD3, otelixizumab, teplizumab, visilizumab, epcoritamab, epcoritamab, brentuximab vedotin, iratumumab, azintuxizumab vedotin, gemtuzumab ozogamicin, lintuzumab, vadastuximab talirine, naratuximab emtansine, otlertuzumab, lilotomab satetraxetan, tetulomab, daratumumab, isatuximab, foralumab, mosunetuzumab, mosunetuzumab, cedelizumab, ibalizumab, keliximab, priliximab, tregalizumab, zanolimumab, bleselumab, iscalimab, lucatumumab, ravagalimab, selicrelumab, teneliximab, vanalimab, abciximab, bivatuzumab, iomab-B, telimomab aritox, zolimomab aritox, abituzumab, intetumumab, alemtuzumab, tamtuvetmab, lorvotuzumab mertansine, itolizumab, cusatuzumab, vorsetuzumab mafodotin, milatuzumab, iladatuzumab vedotin, polatuzumab vedotin, galiximab, cibisatamab, zolbetuximab, naxitamab, tisotumab vedotin, olendalizumab, pamrevlumab, lacnotuzumab, cabiralizumab, emactuzumab, axatilimab, gimsilumab, lenzilumab, namilumab, tremelimumab, ulocuplumab, tepoditamab, rovalpituzumab tesirine, tarlatamab, demcizumab, navicixizumab, drozitumab, parsatuzumab, depatuxizumab mafodotin, modotuximab, carotuximab, adecatumumab, adecatumumab, oportuzumab monatox, solitomab, tucotuzumab celmoleukin, edrecolomab, catumaxomab, ifabotuzumab, fibatuzumab, zalutumumab, panitumumab, cetuximab, futuximab, imgatuzumab, laprituximab emtansine, matuzumab, necitumumab, nimotuzumab, tomuzotuximab, amivantamab, amivantamab, epitumomab cituxetan, sontuzumab, duligotuzumab, elgemtumab, lumretuzumab, patritumab, seribantumab, zenocutuzumab, sibrotuzumab, burosumab, aprutumab ixadotin, radretumab, pasotuxizumab, farletuzumab, mirvetuximab soravtansine, vantictumab, TRBS07, 3F8, dinutuximab, dinutuximab beta, ecromeximab, mitumomab, andecaliximab, capromab, codrituzumab, glembatumumab vedotin, talquetamab, talquetamab, trevogrumab, indusatumab vedotin, ficlatuzumab, rilotumumab, zatuximab, pentuzimab, pentuzimab, margetuximab, timigutuzumab, trastuzumab, trastuzumab duocarmazine, trastuzumab emtansine, gancotamab, pertuzumab, ertumaxomab, emibetuzumab, telisotuzumab, telisotuzumab vedotin, derlotuximab biotin, apolizumab, onartuzumab, bersanlimab, enlimomabpegol, rontalizumab, sifalimumab, talizumab, ganitumab, istiratumab, robatumumab, teprotumumab, figitumumab, ganitumab, istiratumab, robatumumab, teprotumumab, cixutumumab, dalotuzumab, xentuzumab, dusigitumab, canakinumab, ustekinumab, ustekinumab, ustekinumab, briakinumab, briakinumab, abrezekimab, lebrikizumab, romilkimab, TNX-650, tralokinumab, anrukinzumab, brodalumab, ixekizumab, netakimab, perakizumab, secukinumab, vunakizumab, afasevikumab, afasevikumab, bimekizumab, bimekizumab, remtolumab, bermekimab, lutikizumab, lutikizumab, gevokizumab, cergutuzumab amunaleukin, fletikumab, fezakinumab, brazikumab, guselkumab, mirikizumab, tildrakizumab, risankizumab, flotetuzumab, nemolizumab, pascolizumab, dupilumab, mepolizumab, reslizumab, clazakizumab, elsilimomab, olokizumab, sarilumab, siltuximab, sirukumab, vobarilizumab, tocilizumab, SA237, satralizumab, enokizumab, prezalizumab, natalizumab, abrilumab, abrilumab, vedolizumab, volociximab, tadocizumab, etaracizumab, etrolizumab, spesolimab, vatelizumab, erlizumab, lirilumab, relatlimab, cBR96-doxorubicinimmunoconjugate, odulimomab, efalizumab, ladiratuzumab vedotin, simtuzumab, samrotamab vedotin, aselizumab, lupartumab amadotin, imalumab, carlumab, imaprelimab, amatuximab, amatuximab, anetumab ravtansine, narnatumab, clivatuzumab tetraxetan, pemtumomab, gatipotuzumab, ensituximab, lemalesomab, sulesomab, enfortumab vedotin, racotumomab, monalizumab, brontictuzumab, tarextumab, vesencumab, oxelumab, gilvetmab, tislelizumab, dostarlimab, BCD-100, nivolumab, PDR001, pembrolizumab, pidilizumab, retifanlimab, spartalizumab, sintilimab, cemiplimab, olaratumab, tovetumab, rinucumab, atezolizumab, avelumab, durvalumab, lifastuzumab vedotin, bavituximab, acapatamab, capromab, rosopatamab, nezastomig, pasotuxizumab, pelgifatamab, voxalatamab, cofetuzumab pelidotin, denosumab, rosmantuzumab, cirmtuzumab, atinumab, indatuximab ravtansine, elotuzumab, sirtratumab vedotin, sonepcizumab, vandortuzumab vedotin, minretumomab, satumomab pendetide, maslimomab, ontuxizumab, tenatumomab, fresolimumab, metelimumab, lerdelimumab, tezepelumab, etigilimab, tiragotumab, placulumab, prezalumab, infliximab, nerelimomab, ozoralizumab, adalimumab, afelimomab, certolizumab pegol, golimumab, mapatumumab, conatumumab, lexatumumab, tigatuzumab, sacituzumab govitecan, votumumab, pogalizumab, letolizumab, pankomab, anatumomab mafenatox, enavatuzumab, flanvotumab, brolucizumab, ranibizumab, varisacumab, bevacizumab, faricimab, icrucumab, alacizumab pegol, ramucirumab, pritumumab, and onvatilimab.

[5499] In some aspects, the antigen binding polypeptides provided herein comprise a VH1 comprising (i) a complementarity determining region (CDR) 1 having an amino acid sequence that is at least 65%, at least 70%, at least 75%, at least 80%, at least 85%, at least 90%, at least 95%, at least 99%, or 100% identical to any one of SEQ ID NOs: 1099, 1106, 1113, 1117, 1123, 1130, 1137, 1144, 1151, 1158, 1165, 1177, 1184, 1191, 1203, 1215, 1224, 1231, 1238, 1243, 1250, 1257, 1264, 1274, 1281, 1288, 1295, 1302, 1309, 1315, 1322, 1329, 1335, 1342, 1348, 1355, 1362, 1369, 1376, 1385, 1397, 1404, 1417, 1424, 1431, 1437, 1444, 1451, 1458, 1464, 1471, 1478, 1484, 1491, 1498, 1504, 1511, 1515, 1522, 1534, 1547, 1552, 1564, 1577, 1584, 1590, 1597, 1604, 1611, 1618, 1625, 1632, 1639, 1646, 1653, 1660, 1665, 1675, 1683, 1693, 1701, 1705, 1716, 1719, 1731, 1736, 1747, 1756, 1772, 1780, and 1789; (ii) a CDR2 having an amino acid sequence that is at least 65%, at least 70%, at least 75%, at least 80%, at least 85%, at least 90%, at least 95%, at least 99%, or 100% identical to any one of SEQ ID NOs: 1100, 1107, 1114, 1118, 1124, 1131, 1138, 1145, 1152, 1159, 1166, 1178, 1185, 1192, 1204, 1216, 1225, 1232, 1239, 1244, 1251, 1258, 1275, 1282, 1289, 1296, 1303, 1310, 1316, 1323, 1330, 1336, 1343, 1349, 1356, 1363, 1370, 1377, 1386, 1391, 1398, 1405, 1411, 1418, 1425, 1432, 1438, 1445, 1452, 1465, 1472, 1479, 1485, 1492, 1499, 1505, 1516, 1523, 1528, 1535, 1541, 1548, 1553, 1559, 1565, 1571, 1578, 1585, 1591, 1598, 1605, 1612, 1619, 1626, 1633, 1640, 1647, 1654, 1666, 1676, 1684, 1687, 1694, 1702, 1706, 1712, 1717, 1720, 1725, 1732, 1737, 1741, 1748, 1757, 1767, 1773, 1781, and 1790; and (iii) a CDR3 having an amino acid sequence that is at least 65%, at least 70%, at least 75%, at least 80%, at least 85%, at least 90%, at least 95%, at least 99%, or 100% identical to any one of SEQ ID NOs: 1101, 1108, 1115, 1125, 1132, 1139, 1146, 1153, 1160, 1167, 1172, 1179, 1186, 1193, 1197, 1205, 1209, 1217, 1226, 1233, 1240, 1245, 1252, 1259, 1269, 1276, 1283, 1290, 1297, 1304, 1311, 1317, 1324, 1331, 1337, 1344, 1350, 1357, 1364, 1371, 1378, 1387, 1392, 1399, 1406, 1412, 1419, 1426, 1433, 1439, 1446, 1453, 1459, 1466, 1473, 1480, 1486, 1493, 1500, 1506, 1517, 1524, 1529, 1536, 1542, 1549, 1554, 1560, 1566, 1572, 1579, 1586, 1592, 1599, 1606, 1613, 1620, 1627, 1634, 1641, 1648, 1655, 1661, 1667, 1670, 1677, 1685, 1688, 1695, 1703, 1707, 1713, 1733, 1749, 1758, 1762, 1774, 1782, 1791, and 1975.

[5500] In some aspects, the antigen binding polypeptides provided herein comprise a VH2 comprising (i) a complementarity determining region (CDR) 1 having an amino acid sequence that is at least 65%, at least 70%, at least 75%, at least 80%, at least 85%, at least 90%, at least 95%, at least 99%, or 100% identical to any one of SEQ ID NOs: 1099, 1106, 1113, 1117, 1123, 1130, 1137, 1144, 1151, 1158, 1165, 1177, 1184, 1191, 1203, 1215, 1224, 1231, 1238, 1243, 1250, 1257, 1264, 1274, 1281, 1288, 1295, 1302, 1309, 1315, 1322, 1329, 1335, 1342, 1348, 1355, 1362, 1369, 1376, 1385, 1397, 1404, 1417, 1424, 1431, 1437, 1444, 1451, 1458, 1464, 1471, 1478, 1484, 1491, 1498, 1504, 1511, 1515, 1522, 1534, 1547, 1552, 1564, 1577, 1584, 1590, 1597, 1604, 1611, 1618, 1625, 1632, 1639, 1646, 1653, 1660, 1665, 1675, 1683, 1693, 1701, 1705, 1716, 1719, 1731, 1736, 1747, 1756, 1772, 1780, and 1789; (ii) a CDR2 having an amino acid sequence that is at least 65%, at least 70%, at least 75%, at least 80%, at least 85%, at least 90%, at least 95%, at least 99%, or 100% identical to any one of SEQ ID NOs: 1100, 1107, 1114, 1118, 1124, 1131, 1138, 1145, 1152, 1159, 1166, 1178, 1185, 1192, 1204, 1216, 1225, 1232, 1239, 1244, 1251, 1258, 1275, 1282, 1289, 1296, 1303, 1310, 1316, 1323, 1330, 1336, 1343, 1349, 1356, 1363, 1370, 1377, 1386, 1391, 1398, 1405, 1411, 1418, 1425, 1432, 1438, 1445, 1452, 1465, 1472, 1479, 1485, 1492, 1499, 1505, 1516, 1523, 1528, 1535, 1541, 1548, 1553, 1559, 1565, 1571, 1578, 1585, 1591, 1598, 1605, 1612, 1619, 1626, 1633, 1640, 1647, 1654, 1666, 1676, 1684, 1687, 1694, 1702, 1706, 1712, 1717, 1720, 1725, 1732, 1737, 1741, 1748, 1757, 1767, 1773, 1781, and 1790; and (iii) a CDR3 having an amino acid sequence that is at least 65%, at least 70%, at least 75%, at least 80%, at least 85%, at least 90%, at least 95%, at least 99%, or 100% identical to any one of SEQ ID NOs: 1101, 1108, 1115, 1125, 1132, 1139, 1146, 1153, 1160, 1167, 1172, 1179, 1186, 1193, 1197, 1205, 1209, 1217, 1226, 1233, 1240, 1245, 1252, 1259, 1269, 1276, 1283, 1290, 1297, 1304, 1311, 1317, 1324, 1331, 1337, 1344, 1350, 1357, 1364, 1371, 1378, 1387, 1392, 1399, 1406, 1412, 1419, 1426, 1433, 1439, 1446, 1453, 1459, 1466, 1473, 1480, 1486, 1493, 1500, 1506, 1517, 1524, 1529, 1536, 1542, 1549, 1554, 1560, 1566, 1572, 1579, 1586, 1592, 1599, 1606, 1613, 1620, 1627, 1634, 1641, 1648, 1655, 1661, 1667, 1670, 1677, 1685, 1688, 1695, 1703, 1707, 1713, 1733, 1749, 1758, 1762, 1774, 1782, 1791, and 1975.

[5501] In some aspects, the antigen binding polypeptides provided herein comprise a VH3 comprising (i) a complementarity determining region (CDR) 1 having an amino acid sequence that is at least 65%, at least 70%, at least 75%, at least 80%, at least 85%, at least 90%, at least 95%, at least 99%, or 100% identical to any one of SEQ ID NOs: 1099, 1106, 1113, 1117, 1123, 1130, 1137, 1144, 1151, 1158, 1165, 1177, 1184, 1191, 1203, 1215, 1224, 1231, 1238, 1243, 1250, 1257, 1264, 1274, 1281, 1288, 1295, 1302, 1309, 1315, 1322, 1329, 1335, 1342, 1348, 1355, 1362, 1369, 1376, 1385, 1397, 1404, 1417, 1424, 1431, 1437, 1444, 1451, 1458, 1464, 1471, 1478, 1484, 1491, 1498, 1504, 1511, 1515, 1522, 1534, 1547, 1552, 1564, 1577, 1584, 1590, 1597, 1604, 1611, 1618, 1625, 1632, 1639, 1646, 1653, 1660, 1665, 1675, 1683, 1693, 1701, 1705, 1716, 1719, 1731, 1736, 1747, 1756, 1772, 1780, and 1789; (ii) a CDR2 having an amino acid sequence that is at least 65%, at least 70%, at least 75%, at least 80%, at least 85%, at least 90%, at least 95%, at least 99%, or 100% identical to any one of SEQ ID NOs: 1100, 1107, 1114, 1118, 1124, 1131, 1138, 1145, 1152, 1159, 1166, 1178, 1185, 1192, 1204, 1216, 1225, 1232, 1239, 1244, 1251, 1258, 1275, 1282, 1289, 1296, 1303, 1310, 1316, 1323, 1330, 1336, 1343, 1349, 1356, 1363, 1370, 1377, 1386, 1391, 1398, 1405, 1411, 1418, 1425, 1432, 1438, 1445, 1452, 1465, 1472, 1479, 1485, 1492, 1499, 1505, 1516, 1523, 1528, 1535, 1541, 1548, 1553, 1559, 1565, 1571, 1578, 1585, 1591, 1598, 1605, 1612, 1619, 1626, 1633, 1640, 1647, 1654, 1666, 1676, 1684, 1687, 1694, 1702, 1706, 1712, 1717, 1720, 1725, 1732, 1737, 1741, 1748, 1757, 1767, 1773, 1781, and 1790; and (iii) a CDR3 having an amino acid sequence that is at least 65%, at least 70%, at least 75%, at least 80%, at least 85%, at least 90%, at least 95%, at least 99%, or 100% identical to any one of SEQ ID NOs: 1101, 1108, 1115, 1125, 1132, 1139, 1146, 1153, 1160, 1167, 1172, 1179, 1186, 1193, 1197, 1205, 1209, 1217, 1226, 1233, 1240, 1245, 1252, 1259, 1269, 1276, 1283, 1290, 1297, 1304, 1311, 1317, 1324, 1331, 1337, 1344, 1350, 1357, 1364, 1371, 1378, 1387, 1392, 1399, 1406, 1412, 1419, 1426, 1433, 1439, 1446, 1453, 1459, 1466, 1473, 1480, 1486, 1493, 1500, 1506, 1517, 1524, 1529, 1536, 1542, 1549, 1554, 1560, 1566, 1572, 1579, 1586, 1592, 1599, 1606, 1613, 1620, 1627, 1634, 1641, 1648, 1655, 1661, 1667, 1670, 1677, 1685, 1688, 1695, 1703, 1707, 1713, 1733, 1749, 1758, 1762, 1774, 1782, 1791, and 1975.

[5502] In some aspects, the antigen binding polypeptides provided herein comprise a VH1 comprising an amino acid sequence that is at least 65%, at least 70%, at least 75%, at least 80%, at least 85%, at least 90%, at least 95%, at least 99%, or 100% identical to any one of SEQ ID NOs: 1102, 1109, 1116, 1119, 1126, 1133, 1140, 1147, 1154, 1161, 1168, 1173, 1180, 1187, 1194, 1198, 1206, 1210, 1218, 1220, 1227, 1234, 1241, 1246, 1253, 1260, 1265, 1270, 1277, 1284, 1291, 1298, 1305, 1312, 1318, 1325, 1332, 1338, 1345, 1351, 1358, 1365, 1372, 1379, 1381, 1388, 1393, 1400, 1407, 1413, 1420, 1427, 1434, 1440, 1447, 1454, 1460, 1467, 1474, 1481, 1487, 1494, 1501, 1507, 1512, 1518, 1525, 1530, 1537, 1543, 1550, 1555, 1561, 1567, 1573, 1580, 1587, 1593, 1600, 1607, 1614, 1621, 1628, 1635, 1642, 1649, 1656, 1662, 1668, 1671, 1678, 1686, 1696, 1704, 1714, 1722, 1726, 1734, 1742, 1750, 1759, 1760, 1765, 1768, 1775, 1783, 1785, and 1792.

[5503] In some aspects, the antigen binding polypeptides provided herein comprise a VH2 comprising an amino acid sequence that is at least 65%, at least 70%, at least 75%, at least 80%, at least 85%, at least 90%, at least 95%, at least 99%, or 100% identical to any one of SEQ ID NOs: 1102, 1109, 1116, 1119, 1126, 1133, 1140, 1147, 1154, 1161, 1168, 1173, 1180, 1187, 1194, 1198, 1206, 1210, 1218, 1220, 1227, 1234, 1241, 1246, 1253, 1260, 1265, 1270, 1277, 1284, 1291, 1298, 1305, 1312, 1318, 1325, 1332, 1338, 1345, 1351, 1358, 1365, 1372, 1379, 1381, 1388, 1393, 1400, 1407, 1413, 1420, 1427, 1434, 1440, 1447, 1454, 1460, 1467, 1474, 1481, 1487, 1494, 1501, 1507, 1512, 1518, 1525, 1530, 1537, 1543, 1550, 1555, 1561, 1567, 1573, 1580, 1587, 1593, 1600, 1607, 1614, 1621, 1628, 1635, 1642, 1649, 1656, 1662, 1668, 1671, 1678, 1686, 1696, 1704, 1714, 1722, 1726, 1734, 1742, 1750, 1759, 1760, 1765, 1768, 1775, 1783, 1785, and 1792.

[5504] In some aspects, the antigen binding polypeptides provided herein comprise a VH3 comprising an amino acid sequence that is at least 65%, at least 70%, at least 75%, at least 80%, at least 85%, at least 90%, at least 95%, at least 99%, or 100% identical to any one of SEQ ID NOs: 1102, 1109, 1116, 1119, 1126, 1133, 1140, 1147, 1154, 1161, 1168, 1173, 1180, 1187, 1194, 1198, 1206, 1210, 1218, 1220, 1227, 1234, 1241, 1246, 1253, 1260, 1265, 1270, 1277, 1284, 1291, 1298, 1305, 1312, 1318, 1325, 1332, 1338, 1345, 1351, 1358, 1365, 1372, 1379, 1381, 1388, 1393, 1400, 1407, 1413, 1420, 1427, 1434, 1440, 1447, 1454, 1460, 1467, 1474, 1481, 1487, 1494, 1501, 1507, 1512, 1518, 1525, 1530, 1537, 1543, 1550, 1555, 1561, 1567, 1573, 1580, 1587, 1593, 1600, 1607, 1614, 1621, 1628, 1635, 1642, 1649, 1656, 1662, 1668, 1671, 1678, 1686, 1696, 1704, 1714, 1722, 1726, 1734, 1742, 1750, 1759, 1760, 1765, 1768, 1775, 1783, 1785, and 1792.

[5505] In some aspects, the infectious disease antigen that is not a sarbecovirus antigen is:
[5506] (i) a viral antigen elected from the group consisting of an influenza virus (A, B, C) antigen (e.g., influenza virus envelope proteins, for example, influenza virus neuraminidase (NA, N1, N2, N3, N4, N5, N6, N7, N8, N9, N10, N11), influenza virus hemagglutinin (H1, H2, H3, H4, H5, H6, H7, H8, H9, H10, H11, H12, H13, H14, H15, H16, H17, H18) (e.g., H1N1, H3N2, H5N1, H7N9, H9N2), Yamagata virus antigen, Victoria virus antigen, influenza virus structural proteins (e.g., M1, M2, capsid protein), influenza virus functional proteins (e.g., ribonucleoprotein (NP), primary interferon antagonist (NS1), nuclear export protein (NEP)) influenza virus accessory proteins (e.g., PB2, PB1, or PA), for example, anti-HA, anti-NA, anti-H1, anti-H3, anti-H5, anti-H7, anti-H9, anti-N1, anti-N2, anti-N9, anti-H1N1, anti-H3N2, anti-H5N1, anti-H7N9, anti-H9N2, anti-A protein, anti-B protein, anti-stem, anti-M1, anti-M2, anti-capsid, anti-NP, anti-NS1, anti-NEP, anti-PB1, anti-PB2, and anti-PA); a swine influenza virus antigen (e.g., swine flu hemagglutinin, swine flu neuraminidase); a classical swine fever (CSF) (hog colera) virus antigen; an equine influenza virus antigen (e.g., equine influenza virus typeA/Miami 63 neuraminidase, equine influenza virus type A/Kentucky 81 neuraminidase, equine influenza virus type A/Alaska 91 neuraminidase); parainfluenza viruses (e.g., bovine parainfluenza virus, bovine parainfluenza virus type 3 fusion protein, bovine parainfluenza virus type 3 hemagglutinin neuraminidase); a (human) respiratory syncytial virus (RSV)-viral antigen (e.g., RSV F glycoprotein, RSV G glycoprotein, F protein of respiratory syncytial virus, RSV fusion glycoprotein); a herpes simplex virus (HSV) antigen (e.g., herpes simplex virus glycoproteins gB, gC, gD, and gE, herpes simplex virus type 2 glycoprotein gB); a Dengue virus antigen (e.g., core protein, matrix protein, glycoprotein E of Dengue virus, or other protein of Dengue virus); a measles virus antigen (e.g., hemagglutinin); a poliovirus 1 antigen (e.g., poliovirus 1 proteins (VP1)), a HIV-1 antigen and HIV-2 antigen (e.g., HIV envelope proteins (e.g., envelope glycoproteins of HIV 1, HIV envelope glycoprotein (Env), HIV envelope glycoprotein gp160, HIV envelope surface glycoprotein gp120, HIV transmembrane envelope protein gp41), HIV structural proteins (e.g., p17, p24, p7, p55), HIV functional proteins (e.g., p66, HIV-1 protease (PR), p31), HIV accessory proteins (e.g., Nef, Tat, Rev, Vif, Vpr, Vpu)); a hepatitis virus (HAV, HBV, HCV, HDV, HEV) antigen (e.g., hepatitis B virus antigen (e.g., surface antigen, core protein), hepatitis C virus antigen (e.g., glycoprotein E1E2)); a rabies virus (Rabies lyssavirus) antigen (e.g., rabies virus glycoprotein, e.g., G glycoprotein); a pseudorabies virus antigen (e.g., pseudorabies virus g50 (gpD), pseudorabies virus II (gpB), pseudorabies virus III (gpC), pseudorabies virus glycoprotein H, pseudorabies virus glycoprotein E); a papillomavirus (HPV) antigen; an Epstein-Barr virus (EBV) (Gamma herpes virus 4) antigen; a Herpes simplex virus (HSV, HSV-1, HSV-2) antigen (e.g., human herpes virus 8, equine herpes virus antigen (e.g., type 1 glycoprotein B, type 1 glycoprotein D)); a Herpes zoster antigen; a Cytomegalovirus antigen (e.g., cytomegalovirus glycoprotein B); a Zika virus antigen; a Transmissible gastroenteritis virus (TGEV) antigen (e.g., glycoprotein 195, matrix protein); a rotavirus antigen (e.g., swine rotavirus glycoprotein 38); a parvovirus antigen (e.g., swine parvovirus capsid protein); a filoviruses (e.g., Marburg and Ebola) antigen; a bovine viral diarrhea virus antigen (e.g., glycoprotein 55); a Newcastle disease virus antigen (hemagglutinin, neuraminidase); an orthopoxvirus antigen; a coxsackievirus antigen and aphthovirus (foot and mouth disease virus) antigen; a yellow fever virus antigen; a Chikunga virus antigen; a Nipah virus antigen; an African swine fever virus antigen; a rhinotracheitis virus antigen (e.g., infectious bovine rhinotracheitis virus glycoprotein E, glycoprotein G); a laryngotracheitis virus antigen (e.g., infectious laryngotracheitis virus glycoprotein G or glycoprotein I); a La Crosse virus antigen (e.g., La Crosse virus glycoprotein); a neonatal calf diarrhoea virus antigen; a Venezuelan equine encephalomyelitis virus antigen; a punta toro virus antigen; a murine leukemia virus antigen; a mouse mammary tumor virus antigen; a bovine respiratory syncytial virus antigen (e.g., bovine respiratory syncytial virus attachment protein (BRSV G), bovine respiratory syncytial virus fusion protein (BRSV F), bovine respiratory syncytial virus nucleocapsid protein (BRSVN)); a bovine E viral diarrhoea virus antigen (e.g., glycoprotein 48 and glycoprotein 53); a metapneumovirus (HMPV) antigen; and an Ebola virus antigen (e.g., ebolavirus glycoprotein, e.g., Zaire ebolavirus glycoprotein); or
[5507] (ii) a bacterial or parasite antigen selected from the group consisting of a Plasmodium (e.g., Plasmodium falciparum, Plasmodium vivax, Plasmodium malariae, Plasmodium ovale, Plasmodium knowlesi) antigen, a Streptococcus (e.g., Streptococcus pneumoniae. Streptococcus pyogenes, Streptococcus agalactiae, Streptococcus mutans, Streptococcus viridans, Streptococcus anginosus, Streptococcus intermedius, Streptococcus constellatus) antigen (e.g., 24M epitope), a Neisseria gonorrhoeae antigen (e.g., gonococcal pilin), a Corynebacterium antigen (e.g., Corynebacterium diphtheria (diptheria toxin), Corynebacterium ulcerans, Corynebacterium pseudotuberculosis), Mycobacterium tuberculosis antigens, Brachyspira hyodysenteriae (Serpulina hydodysenteriae) antigen (e.g., Serpulina hydodysenteriae protective antigen), a Chlamydia antigen (e.g., Chlamydia trachomatis) (e.g., MOMP and PorB), a Mycoplasma sp. (e.g., Mycoplasma genitalium, Mycoplasma hyopneumoniae, Mycoplasma pneumonia) antigen, a Staphylococcus (e.g., Staphylococcus aureus, coagulase-negative staphylococci (CoNS), Staphylococcus aureus alpha toxin, Staphylococcus aureus bi-component leucocidin) antigen, a Klebsiella sp. antigen, an Escherichia coli antigen (e.g., E. coli shiga toxin type-2, E. coli shiga toxin type-1), a Bacillus sp. (e.g., Bacillus anthracis, e.g., Bacillus anthracis anthrax) antigen, a Pseudomonas aeruginosa antigen (e.g., Pseudomonas aeruginosa type III secretion system), an Enterococcus sp. antigen, an Enterobacter sp. antigen, a Proteus sp. antigen, an Actinobacter sp. antigen, a Mycobacterium avium (Mycobacterium avium complex (MAC)) antigen, a Salmonella bacteria antigen, a Clostridium difficile antigen, a Toxoplasma (e.g., Toxoplasma gondii) antigen, a Histoplasma antigen, a Candida antigen, a Coccidioides antigen, a Cryptococcus antigen, a Cryptosporidium antigen, and a Cystoisospora (e.g., Cystoisospora belli) antigen, and another antigen (e.g., endotoxins, lymphotoxins (e.g., lymphotoxin alpha LTA), phosphatidylserine, Hsp90, CCR5, lipoteichoic acid, clumping factor A).

[5508] In some aspects, the antigen binding polypeptides provided herein comprise a VH1 comprising a heavy chain complementarity determining region 1 (HCDR1), HCDR2, and/or HCDR3 of an antibody selected from the group consisting of libivirumab, rmab, rivabazumab pegol, setoxaximab, suvizumab, suvratoxumab, sevirumab, pritoxaximab, porgaviximab, REGN-EB3, obiltoxaximab, gedivumab, foravirumab, larcaviximab, motavizumab, palivizumab, rafivirumab, regavirumab, tuvirumab, cosfroviximab, felvizumab, atidortoxumab, edobacomab, nebacumab, pateclizumab, raxibacumab, urtoxazumab, tosatoxumab, berlimatoxumab, CR6261, diridavumab, firivumab, lesofavumab, navivumab, exbivirumab, lenvervimab, bavituximab, bezlotoxumab, efungumab, leronlimab, nirsevimab, pagibaximab, panobacumab, tefibazumab, ansuvimab, atoltivimab, maftivimab, and odesivimab.

[5509] In some aspects, the antigen binding polypeptides provided herein comprise a VH2 comprising a heavy chain complementarity determining region 1 (HCDR1), HCDR2, and/or HCDR3 of an antibody selected from the group consisting of libivirumab, rmab, rivabazumab pegol, setoxaximab, suvizumab, suvratoxumab, sevirumab, pritoxaximab, porgaviximab, REGN-EB3, obiltoxaximab, gedivumab, foravirumab, larcaviximab, motavizumab, palivizumab, rafivirumab, regavirumab, tuvirumab, cosfroviximab, felvizumab, atidortoxumab, edobacomab, nebacumab, pateclizumab, raxibacumab, urtoxazumab, tosatoxumab, berlimatoxumab, CR6261, diridavumab, firivumab, lesofavumab, navivumab, exbivirumab, lenvervimab, bavituximab, bezlotoxumab, efungumab, leronlimab, nirsevimab, pagibaximab, panobacumab, tefibazumab, ansuvimab, atoltivimab, maftivimab, and odesivimab.

[5510] In some aspects, the antigen binding polypeptides provided herein comprise a VH3 comprising a heavy chain complementarity determining region 1 (HCDR1), HCDR2, and/or HCDR3 of an antibody selected from the group consisting of libivirumab, rmab, rivabazumab pegol, setoxaximab, suvizumab, suvratoxumab, sevirumab, pritoxaximab, porgaviximab, REGN-EB3, obiltoxaximab, gedivumab, foravirumab, larcaviximab, motavizumab, palivizumab, rafivirumab, regavirumab, tuvirumab, cosfroviximab, felvizumab, atidortoxumab, edobacomab, nebacumab, pateclizumab, raxibacumab, urtoxazumab, tosatoxumab, berlimatoxumab, CR6261, diridavumab, firivumab, lesofavumab, navivumab, exbivirumab, lenvervimab, bavituximab, bezlotoxumab, efungumab, leronlimab, nirsevimab, pagibaximab, panobacumab, tefibazumab, ansuvimab, atoltivimab, maftivimab, and odesivimab.

[5511] In some aspects, the antigen binding polypeptides provided herein comprise a VH1 comprising a VH of an antibody selected from the group consisting of libivirumab, rmab, rivabazumab pegol, setoxaximab, suvizumab, suvratoxumab, sevirumab, pritoxaximab, porgaviximab, REGN-EB3, obiltoxaximab, gedivumab, foravirumab, larcaviximab, motavizumab, palivizumab, rafivirumab, regavirumab, tuvirumab, cosfroviximab, felvizumab, atidortoxumab, edobacomab, nebacumab, pateclizumab, raxibacumab, urtoxazumab, tosatoxumab, berlimatoxumab, CR6261, diridavumab, firivumab, lesofavumab, navivumab, exbivirumab, lenvervimab, bavituximab, bezlotoxumab, efungumab, leronlimab, nirsevimab, pagibaximab, panobacumab, tefibazumab, ansuvimab, atoltivimab, maftivimab, and odesivimab.

[5512] In some aspects, the antigen binding polypeptides provided herein comprise a VH2 comprising a VH of an antibody selected from the group consisting of libivirumab, rmab, rivabazumab pegol, setoxaximab, suvizumab, suvratoxumab, sevirumab, pritoxaximab, porgaviximab, REGN-EB3, obiltoxaximab, gedivumab, foravirumab, larcaviximab, motavizumab, palivizumab, rafivirumab, regavirumab, tuvirumab, cosfroviximab, felvizumab, atidortoxumab, edobacomab, nebacumab, pateclizumab, raxibacumab, urtoxazumab, tosatoxumab, berlimatoxumab, CR6261, diridavumab, firivumab, lesofavumab, navivumab, exbivirumab, lenvervimab, bavituximab, bezlotoxumab, efungumab, leronlimab, nirsevimab, pagibaximab, panobacumab, tefibazumab, ansuvimab, atoltivimab, maftivimab, and odesivimab.

[5513] In some aspects, the antigen binding polypeptides provided herein comprise a VH3 comprising a VH of an antibody selected from the group consisting of libivirumab, rmab, rivabazumab pegol, setoxaximab, suvizumab, suvratoxumab, sevirumab, pritoxaximab, porgaviximab, REGN-EB3, obiltoxaximab, gedivumab, foravirumab, larcaviximab, motavizumab, palivizumab, rafivirumab, regavirumab, tuvirumab, cosfroviximab, felvizumab, atidortoxumab, edobacomab, nebacumab, pateclizumab, raxibacumab, urtoxazumab, tosatoxumab, berlimatoxumab, CR6261, diridavumab, firivumab, lesofavumab, navivumab, exbivirumab, lenvervimab, bavituximab, bezlotoxumab, efungumab, leronlimab, nirsevimab, pagibaximab, panobacumab, tefibazumab, ansuvimab, atoltivimab, maftivimab, and odesivimab.

[5514] In some aspects, the antigen binding polypeptides provided herein comprise a VH1 comprising (i) a complementarity determining region (CDR) 1 having an amino acid sequence that is at least 65%, at least 70%, at least 75%, at least 80%, at least 85%, at least 90%, at least 95%, at least 99%, or 100% identical to any one of SEQ ID NOs: 1577, 1795, 1801, 1813, 1820, 1827, 1981, 1989, 1997, and 2005; (ii) a CDR2 having an amino acid sequence that is at least 65%, at least 70%, at least 75%, at least 80%, at least 85%, at least 90%, at least 95%, at least 99%, or 100% identical to any one of SEQ ID NOs: 1159, 1802, 1807, 1814, 1821, 1828, 1982, 1990, 1998, and 2006; and (iii) a CDR3 having an amino acid sequence that is at least 65%, at least 70%, at least 75%, at least 80%, at least 85%, at least 90%, at least 95%, at least 99%, or 100% identical to any one of SEQ ID NOs: 1796, 1803, 1808, 1815, 1822, 1829, 1983, 1991, 1999, and 2007.

[5515] In some aspects, the antigen binding polypeptides provided herein comprise a VH2 comprising (i) a complementarity determining region (CDR) 1 having an amino acid sequence that is at least 65%, at least 70%, at least 75%, at least 80%, at least 85%, at least 90%, at least 95%, at least 99%, or 100% identical to any one of SEQ ID NOs: 1577, 1795, 1801, 1813, 1820, 1827, 1981, 1989, 1997, and 2005; (ii) a CDR2 having an amino acid sequence that is at least 65%, at least 70%, at least 75%, at least 80%, at least 85%, at least 90%, at least 95%, at least 99%, or 100% identical to any one of SEQ ID NOs: 1159, 1802, 1807, 1814, 1821, 1828, 1982, 1990, 1998, and 2006; and (iii) a CDR3 having an amino acid sequence that is at least 65%, at least 70%, at least 75%, at least 80%, at least 85%, at least 90%, at least 95%, at least 99%, or 100% identical to any one of SEQ ID NOs: 1796, 1803, 1808, 1815, 1822, 1829, 1983, 1991, 1999, and 2007.

[5516] In some aspects, the antigen binding polypeptides provided herein comprise a VH3 comprising (i) a complementarity determining region (CDR) 1 having an amino acid sequence that is at least 65%, at least 70%, at least 75%, at least 80%, at least 85%, at least 90%, at least 95%, at least 99%, or 100% identical to any one of SEQ ID NOs: 1577, 1795, 1801, 1813, 1820, 1827, 1981, 1989, 1997, and 2005; (ii) a CDR2 having an amino acid sequence that is at least 65%, at least 70%, at least 75%, at least 80%, at least 85%, at least 90%, at least 95%, at least 99%, or 100% identical to any one of SEQ ID NOs: 1159, 1802, 1807, 1814, 1821, 1828, 1982, 1990, 1998, and 2006; and (iii) a CDR3 having an amino acid sequence that is at least 65%, at least 70%, at least 75%, at least 80%, at least 85%, at least 90%, at least 95%, at least 99%, or 100% identical to any one of SEQ ID NOs: 1796, 1803, 1808, 1815, 1822, 1829, 1983, 1991, 1999, and 2007.

[5517] In some aspects, the antigen binding polypeptides provided herein comprise a VH1 comprising an amino acid sequence that is at least 65%, at least 70%, at least 75%, at least 80%, at least 85%, at least 90%, at least 95%, at least 99%, or 100% identical to any one of SEQ ID NOs 1797, 1804, 1809, 1816, 1823, 1830, 1984, 1992, 2000, and 2008.

[5518] In some aspects, the antigen binding polypeptides provided herein comprise a VH2 comprising an amino acid sequence that is at least 65%, at least 70%, at least 75%, at least 80%, at least 85%, at least 90%, at least 95%, at least 99%, or 100% identical to any one of SEQ ID NOs 1797, 1804, 1809, 1816, 1823, 1830, 1984, 1992, 2000, and 2008.

[5519] In some aspects, the antigen binding polypeptides provided herein comprise a VH3 comprising an amino acid sequence that is at least 65%, at least 70%, at least 75%, at least 80%, at least 85%, at least 90%, at least 95%, at least 99%, or 100% identical to any one of SEQ ID NOs 1797, 1804, 1809, 1816, 1823, 1830, 1984, 1992, 2000, and 2008.

[5520] In some aspects, the other-pathology antigen is selected from the group consisting of Amyloid beta, β-amyloid, PCSK9, IFN-α/β receptor. Rhesus factor, nerve growth factor (NGF), DPP4, fibrin II beta chain, ACVR2B, serum amyloid A protein SOST, FGF 23, VWF, tissue factor pathway inhibitor (TFPI), 1-40 and 1-42, selectin P, glucagon receptor (GCGR), amyloid P component, GDF-8, CXCL10 IP-10, repulsive guidance molecule A RGMA, IFN-γ, activated F9/F10, calcitonin gene-related peptide (CGRP), angiopoietin 3, IFN receptor, IFN-γ, calcitonin, β-amyloid 1-40 and 1-42, tau protein, dabigatran, cardiac myosin, selectin P, Complement factor D (CFD), kallikrein, GDF-8, IGHE, tissue factor pathway inhibitor (TFPI), GMCSF receptor α-chain, amyloid, IgE Fc region, MASP-2, oxLDL, GMCSF, NOGO-A, Alpha-synuclein, NGF, myelin-associated glycoprotein, RHD (gene) (RHD), sclerostin, FCGRT, sclerostin SOST, mucosal addressin cell adhesion molecule, myostatin, RSVFR, complement component 1s C1s, C5, and IL31.

[5521] In some aspects, the antigen binding polypeptides provided herein comprise a VH1 comprising a heavy chain complementarity determining region 1 (HCDR1), HCDR2, and/or HCDR3 of an antibody selected from the group consisting of aducanumab, alirocumab, frovocimab, lodelcizumab, bococizumab, evolocumab, ralpancizumab, anifrolumab, atorolimumab, bapineuzumab, bedinvetmab, begelomab, biciromab, bimagrumab, birtamimab, blosozumab, burosumab, caplacizumab, concizumab, crenezumab, crizanlizumab, crotedumab, dezamizumab, domagrozumab, donanemab, eldelumab, clezanumab, emapalumab, emicizumab, eptinezumab, erenumab, evinacumab, faralimomab, fasinumab, fontolizumab, fremanezumab, frunevetmab, fulranumab, galcanezumab, gantenerumab, gosuranemab, idarucizumab, imciromab, inclacumab, lampalizumab, lanadelumab, landogrozumab, lecanemab, ligelizumab, marstacimab, mavrilimumab, morolimumab, NEOD001, omalizumab, oMS721, orticumab, otilimab, ozanezumab, ponezumab, prasinezumab, quilizumab, ranevetmab, refanezumab, roledumab, romosozumab, rozanolixizumab, setrusumab, SHP647, solanezumab, stamulumab, suptavumab, sutimlimab, tanezumab, crovalimab, and lokivetmab.

[5522] In some aspects, the antigen binding polypeptides provided herein comprise a VH2 comprising a heavy chain complementarity determining region 1 (HCDR1), HCDR2, and/or HCDR3 of an antibody selected from the group consisting of aducanumab, alirocumab, frovocimab, lodelcizumab, bococizumab, evolocumab, ralpancizumab, anifrolumab, atorolimumab, bapineuzumab, bedinvetmab, begelomab, biciromab, bimagrumab, birtamimab, blosozumab, burosumab, caplacizumab, concizumab, crenezumab, crizanlizumab, crotedumab, dezamizumab, domagrozumab, donanemab, eldelumab, elezanumab, emapalumab, emicizumab, eptinezumab, erenumab, evinacumab, faralimomab, fasinumab, fontolizumab, fremanezumab, frunevetmab, fulranumab, galcanezumab, gantenerumab, gosuranemab, idarucizumab, imciromab, inclacumab, lampalizumab, lanadelumab, landogrozumab, lecanemab, ligelizumab, marstacimab, mavrilimumab, morolimumab, NEOD001, omalizumab, oMS721, orticumab, otilimab, ozanezumab, ponezumab, prasinezumab, quilizumab, ranevetmab, refanezumab, roledumab, romosozumab, rozanolixizumab, setrusumab, SHP647, solanezumab, stamulumab, suptavumab, sutimlimab, tanezumab, crovalimab, and lokivetmab.

[5523] In some aspects, the antigen binding polypeptides provided herein comprise a VH3 comprising a heavy chain complementarity determining region 1 (HCDR1), HCDR2, and/or HCDR3 of an antibody selected from the group consisting of aducanumab, alirocumab, frovocimab, lodelcizumab, bococizumab, evolocumab, ralpancizumab, anifrolumab, atorolimumab, bapineuzumab, bedinvetmab, begelomab, biciromab, bimagrumab, birtamimab, blosozumab, burosumab, caplacizumab, concizumab, crenezumab, crizanlizumab, crotedumab, dezamizumab, domagrozumab, donanemab, eldelumab, elezanumab, emapalumab, emicizumab, eptinezumab, erenumab, evinacumab, faralimomab, fasinumab, fontolizumab, fremanezumab, frunevetmab, fulranumab, galcanezumab, gantenerumab, gosuranemab, idarucizumab, imciromab, inclacumab, lampalizumab, lanadelumab, landogrozumab, lecanemab, ligelizumab, marstacimab, mavrilimumab, morolimumab, NEOD001, omalizumab, oMS721, orticumab, otilimab, ozanezumab, ponezumab, prasinezumab, quilizumab, ranevetmab, refanezumab, roledumab, romosozumab, rozanolixizumab, setrusumab, SHP647, solanezumab, stamulumab, suptavumab, sutimlimab, tanezumab, crovalimab, and lokivetmab.

[5524] In some aspects, the antigen binding polypeptides provided herein comprise a VH1 comprising a VH of an antibody selected from the group consisting of aducanumab, alirocumab, frovocimab, lodelcizumab, bococizumab, evolocumab, ralpancizumab, anifrolumab, atorolimumab, bapineuzumab, bedinvetmab, begelomab, biciromab, bimagrumab, birtamimab, blosozumab, burosumab, caplacizumab, concizumab, crenezumab, crizanlizumab, crotedumab, dezamizumab, domagrozumab, donanemab, eldelumab, elezanumab, emapalumab, emicizumab, eptinezumab, erenumab, evinacumab, faralimomab, fasinumab, fontolizumab, fremanezumab, frunevetmab, fulranumab, galcanezumab, gantenerumab, gosuranemab, idarucizumab, imciromab, inclacumab, lampalizumab, lanadelumab, landogrozumab, lecanemab, ligelizumab, marstacimab, mavrilimumab, morolimumab, NEOD001, omalizumab, oMS721, orticumab, otilimab, ozanezumab, ponezumab, prasinezumab, quilizumab, ranevetmab, refanezumab, roledumab, romosozumab, rozanolixizumab, setrusumab, SHP647, solanezumab, stamulumab, suptavumab, sutimlimab, tanezumab, crovalimab, and lokivetmab.

[5525] In some aspects, the antigen binding polypeptides provided herein comprise a VH2 comprising a VH of an antibody selected from the group consisting of aducanumab, alirocumab, frovocimab, lodelcizumab, bococizumab, evolocumab, ralpancizumab, anifrolumab, atorolimumab, bapineuzumab, bedinvetmab, begelomab, biciromab, bimagrumab, birtamimab, blosozumab, burosumab, caplacizumab, concizumab, crenezumab, crizanlizumab, crotedumab, devamizumab, domagrozumab, donanemab, eldelumab, elezanumab, emapalumab, emicizumab, eptinezumab, erenumab, evinacumab, faralimomab, fasinumab, fontolizumab, fremanezumab, frunevetmab, fulranumab, galcanezumab, gantenerumab, gosuranemab, idarucizumab, imciromab, inclacumab, lampalizumab, lanadelumab, landogrozumab, lecanemab, ligelizumab, marstacimab, mavrilimumab, morolimumab, NEOD001, omalizumab, oMS721, orticumab, otilimab, ozanezumab, ponezumab, prasinezumab, quilizumab, ranevetmab, refanezumab, roledumab, romosozumab, rozanolixizumab, setrusumab, SHP647, solanezumab, stamulumab, suptavumab, sutimlimab, tanezumab, crovalimab, and lokivetmab.

[5526] In some aspects, the antigen binding polypeptides provided herein comprise a VH3 comprising a VH of an antibody selected from the group consisting of aducanumab, alirocumab, frovocimab, lodelcizumab, bococizumab, evolocumab, ralpancizumab, anifrolumab, atorolimumab, bapineuzumab, bedinvetmab, begelomab, biciromab, bimagrumab, birtamimab, blosozumab, burosumab, caplacizumab, concizumab, crenezumab, crizanlizumab, crotedumab, dezamizumab, domagrozumab, donanemab, eldelumab, elezanumab, emapalumab, emicizumab, eptinezumab, erenumab, evinacumab, faralimomab, fasinumab, fontolizumab, fremanezumab, frunevetmab, fulranumab, galcanezumab, gantenerumab, gosuranemab, idarucizumab, imciromab, inclacumab, lampalizumab, lanadelumab, landogrozumab, lecanemab, ligelizumab, marstacimab, mavrilimumab, morolimumab, NEOD001, omalizumab, oMS721, orticumab, otilimab, ozanezumab, ponezumab, prasinezumab, quilizumab, ranevetmab, refanezumab, roledumab, romosozumab, rozanolixizumab, setrusumab, SHP647, solanezumab, stamulumab, suptavumab, sutimlimab, tanezumab, crovalimab, and lokivetmab.

[5527] In some aspects, the antigen binding polypeptides provided herein comprise a VH1 comprising (i) a complementarity determining region (CDR) 1 having an amino acid sequence that is at least 65%, at least 70%, at least 75%, at least 80%, at least 85%, at least 90%, at least 95%, at least 99%, or 100% identical to any one of SEQ ID NOs: 1309, 1362, 1437, 1552, 1618, 1639, 1834, 1841, 1848, 1855, 1862, 1881, 1894, 1901, 1920, 1927, 1934, 1941, 1953, 1959, and 1966; (ii) a CDR2 having an amino acid sequence that is at least 65%, at least 70%, at least 75%, at least 80%, at least 85%, at least 90%, at least 95%, at least 99%, or 100% identical to any one of SEQ ID NOs: 1363, 1835, 1842, 1849, 1856, 1863, 1869, 1875, 1882, 1888, 1895, 1902, 1908, 1914, 1921, 1928, 1935, 1942, 1948, 1954, 1960, 1967, and 1972; and (iii) a CDR3 having an amino acid sequence that is at least 65%, at least 70%, at least 75%, at least 80%, at least 85%, at least 90%, at least 95%, at least 99%, or 100% identical to any one of SEQ ID NOs: 1364, 1836, 1843, 1850, 1857, 1864, 1870, 1876, 1883, 1889, 1896, 1903, 1909, 1915, 1922, 1929, 1936, 1943, 1949, 1955, 1961, 1968, and 1973.

[5528] In some aspects, the antigen binding polypeptides provided herein comprise a VH2 comprising (i) a complementarity determining region (CDR) 1 having an amino acid sequence that is at least 65%, at least 70%, at least 75%, at least 80%, at least 85%, at least 90%, at least 95%, at least 99%, or 100% identical to any one of SEQ ID NOs: 1309, 1362, 1437, 1552, 1618, 1639, 1834, 1841, 1848, 1855, 1862, 1881, 1894, 1901, 1920, 1927, 1934, 1941, 1953, 1959, and 1966; (ii) a CDR2 having an amino acid sequence that is at least 65%, at least 70%, at least 75%, at least 80%, at least 85%, at least 90%, at least 95%, at least 99%, or 100% identical to any one of SEQ ID NOs: 1363, 1835, 1842, 1849, 1856, 1863, 1869, 1875, 1882, 1888, 1895, 1902, 1908, 1914, 1921, 1928, 1935, 1942, 1948, 1954, 1960, 1967, and 1972; and (iii) a CDR3 having an amino acid sequence that is at least 65%, at least 70%, at least 75%, at least 80%, at least 85%, at least 90%, at least 95%, at least 99%, or 100% identical to any one of SEQ ID NOs: 1364, 1836, 1843, 1850, 1857, 1864, 1870, 1876, 1883, 1889, 1896, 1903, 1909, 1915, 1922, 1929, 1936, 1943, 1949, 1955, 1961, 1968, and 1973.

[5529] In some aspects, the antigen binding polypeptides provided herein comprise a VH3 comprising (i) a complementarity determining region (CDR) 1 having an amino acid sequence that is at least 65%, at least 70%, at least 75%, at least 80%, at least 85%, at least 90%, at least 95%, at least 99%, or 100% identical to any one of SEQ ID NOs: 1309, 1362, 1437, 1552, 1618, 1639, 1834, 1841, 1848, 1855, 1862, 1881, 1894, 1901, 1920, 1927, 1934, 1941, 1953, 1959, and 1966; (ii) a CDR2 having an amino acid sequence that is at least 65%, at least 70%, at least 75%, at least 80%, at least 85%, at least 90%, at least 95%, at least 99%, or 100% identical to any one of SEQ ID NOs: 1363, 1835, 1842, 1849, 1856, 1863, 1869, 1875, 1882, 1888, 1895, 1902, 1908, 1914, 1921, 1928, 1935, 1942, 1948, 1954, 1960, 1967, and 1972; and (iii) a CDR3 having an amino acid sequence that is at least 65%, at least 70%, at least 75%, at least 80%, at least 85%, at least 90%, at least 95%, at least 99%, or 100% identical to any one of SEQ ID NOs: 1364, 1836, 1843, 1850, 1857, 1864, 1870, 1876, 1883, 1889, 1896, 1903, 1909, 1915, 1922, 1929, 1936, 1943, 1949, 1955, 1961, 1968, and 1973.

[5530] In some aspects, the antigen binding polypeptides provided herein comprise a VH1 comprising an amino acid sequence that is at least 65%, at least 70%, at least 75%, at least 80%, at least 85%, at least 90%, at least 95%, at least 99%, or 100% identical to any one of SEQ ID NOs: 1365, 1837, 1844, 1851, 1858, 1865, 1871, 1877, 1884, 1890, 1897, 1904, 1910, 1916, 1923, 1930, 1937, 1944, 1950, 1956, 1962, 1969, and 1974.

[5531] In some aspects, the antigen binding polypeptides provided herein comprise a VH2 comprising an amino acid sequence that is at least 65%, at least 70%, at least 75%, at least 80%, at least 85%, at least 90%, at least 95%, at least 99%, or 100% identical to any one of SEQ ID NOs: 1365, 1837, 1844, 1851, 1858, 1865, 1871, 1877, 1884, 1890, 1897, 1904, 1910, 1916, 1923, 1930, 1937, 1944, 1950, 1956, 1962, 1969, and 1974.

[5532] In some aspects, the antigen binding polypeptides provided herein comprise a VH3 comprising an amino acid sequence that is at least 65%, at least 70%, at least 75%, at least 80%, at least 85%, at least 90%, at least 95%, at least 99%, or 100% identical to any one of SEQ ID NOs: 1365, 1837, 1844, 1851, 1858, 1865, 1871, 1877, 1884, 1890, 1897, 1904, 1910, 1916, 1923, 1930, 1937, 1944, 1950, 1956, 1962, 1969, and 1974.

[5533] In some aspects, the antigen binding polypeptides disclosed herein, comprise one or more CH1, as indicated in the formulas representing the antigen binding polypeptides disclosed herein. In some aspects, the CH1 comprises an amino acid sequence at least 65%, at least 70%, at least 75%, at least 80%, at least 85%, at least 90%, at least 95%, at least 99%, or 100% identical to any one of SEQ ID NOs: 375, 634, 1070, 1071, or 1086-1091.

[5534] In some aspects, the antigen binding polypeptides provided herein further comprise an Fc region. In some aspects, the antigen binding polypeptides provided herein further comprise an Fc region at the carboxy-terminus. In some aspects, the Fc region comprises an immunoglobulin heavy chain constant region 2 (CH2) and/or an immunoglobulin heavy chain constant region 3 (CH3). In some aspects, the Fc region further comprises an immunoglobulin hinge (i.e., a hinge region). In some aspects, the hinge region comprises an amino acid sequence at least 65%, at least 70%, at least 75%, at least 80%, at least 85%, at least 90%, at least 95%, at least 99%, or 100% identical to any one of SEQ ID NOs: 635, 636, 1072, 1073, or 1074. In some aspects, the Fc region comprises a CH2 and a CH3. In some aspects, the CH2 comprises an amino acid sequence that is at least 65%, at least 70%, at least 75%, at least 80%, at least 85%, at least 90%, at least 95%, at least 99%, or 100% identical to any one of SEQ ID NOs: 1075-1078. In some aspects, the CH3 comprises an amino acid sequence that is at least 65%, at least 70%, at least 75%, at least 80%, at least 85%, at least 90%, at least 95%, at least 99%, or 100% identical to any one of SEQ ID NOs: 1079-1085. In some aspects, the Fc region comprises an amino acid sequence that is at least 65%, at least 70%, at least 75%, at least 80%, at least 85%, at least 90%, at least 95%, at least 99%, or 100% identical to any one of SEQ ID NOs: 376-380.

[5535] In some aspects, the Fc region comprises one or more amino acid substitutions. In some aspects, the one or more amino acid substitutions comprise one or more half-life extension amino acid substitutions. In some aspects, the one or more half-life extension amino acid substitutions comprise one or more of amino acid substitutions M428L, N434A, N434S, L234F, L235E, P331S, M252Y, S254T, and T256E, or equivalent thereof, based on the EU numbering scheme. In some aspects, the one or more half-life extension amino acid substitutions comprise a LA (M428L and N434A, or equivalent thereof, based on the EU numbering scheme) amino acid substitution. In some aspects, the one or more half-life extension amino acid substitutions comprise a LS (M428L and N434S, or equivalent thereof, based on the EU numbering scheme) amino acid substitution. In some aspects, the one or more half-life extension amino acid substitutions comprise L234F and L235E, or equivalent thereof (based on the EU numbering scheme) amino acid substitutions. In some aspects, the one or more half-life extension amino acid substitutions comprise a TM (L234F, L235E, and P331S, or equivalent thereof, based on the EU numbering scheme) amino acid substitution. In some aspects, the one or more half-life extension amino acid substitutions comprise a YTE (M252Y, S254T, and T256E, or equivalent thereof, based on the EU numbering scheme) amino acid substitution.

[5536] In some aspects, the Fc region comprises at least one knob-into-hole modification. In some aspects, the antigen binding polypeptides disclosed herein are comprised in IgG1 or IgG4 antibodies or antigen binding fragments thereof. In some aspects, the knob-into-hole modification comprises one or more of knob substitutions of S354C and T366W, or equivalent thereof, and/or one or more of hole substitutions of Y349C, T366S, L368A, Y407V, or equivalent thereof, or a combination thereof, based on the EU numbering scheme. In some aspects, the Fc region comprises a knob-into-hole modification comprising knob substitutions of S354C and T366W, or equivalent thereof, and/or hole substitutions of Y349C, T366S, L368A and Y407V, or equivalent thereof, and/or a half-life extension amino acid substitution comprising: a LA (M428L and N434A, or equivalent thereof, based on the EU numbering scheme) amino acid substitution, a LS (M428L and N434S, or equivalent thereof, based on the EU numbering scheme) amino acid substitution, L234F and L235E, or equivalent thereof (based on the EU numbering scheme) amino acid substitutions, a TM (L234F, L235E, and P331S, or equivalent thereof, based on the EU numbering scheme) amino acid substitution, a YTE (M252Y, S254T, and T256E, or equivalent thereof, based on the EU numbering scheme) amino acid substitution, or any combination thereof.

[5537] In some aspects, the Fc region comprises knob substitutions of S354C and T366W, or equivalent thereof, and a half-life extension amino acid substitution comprising: a LA (M428L and N434A, or equivalent thereof, based on the EU numbering scheme) amino acid substitution, a LS (M428L and N434S, or equivalent thereof, based on the EU numbering scheme) amino acid substitution, L234F and L235E, or equivalent thereof (based on the EU numbering scheme) amino acid substitutions, a TM (L234F, L235E, and P331S, or equivalent thereof, based on the EU numbering scheme) amino acid substitution, a YTE (M252Y, S254T, and T256E, or equivalent thereof, based on the EU numbering scheme) amino acid substitution, or any combination thereof.

[5538] In some aspects, the Fc region comprises hole substitutions of Y349C, T366S, L368A and Y407V, or equivalent thereof, and a half-life extension amino acid substitution comprising: a LA (M428L and N434A, or equivalent thereof, based on the EU numbering scheme) amino acid substitution, a LS (M428L and N434S, or equivalent thereof, based on the EU numbering scheme) amino acid substitution, L234F and L235E, or equivalent thereof (based on the EU numbering scheme) amino acid substitutions, a TM (L234F, L235E, and P331S, or equivalent thereof, based on the EU numbering scheme) amino acid substitution, a YTE (M252Y, S254T, and T256E, or equivalent thereof, based on the EU numbering scheme) amino acid substitution, or any combination thereof.

[5539] In some aspects, the antigen binding polypeptides disclosed herein comprise one or more Fc effector function knockout mutation. In some aspects, the antigen binding polypeptides disclosed herein are comprised in IgG1 or IgG4 antibodies or antigen binding fragments thereof. In some aspects, the Fc effector function knockout mutation is L234A, L235A, P239A, or equivalent thereof, or a combination thereof, based on the EU numbering scheme.

[5540] In some aspects, the antigen binding polypeptides disclosed herein comprise a mutation at a glycosylation site. In some aspects, the mutation at a glycosylation site is a mutation at an N-glycosylation site. In some aspects, the antigen binding polypeptides comprise a VH comprising a mutation at a glycosylation site. In some aspects, the mutation at a glycosylation site is a mutation at an N-glycosylation site. In some aspects, the mutation at an N-glycosylation site is at amino acid N62, or equivalent thereof, of the VH region or equivalent thereof. In some aspects, the mutation at an N-glycosylation site at amino acid N62 is N62Q or N62S, or equivalent thereof.

[5541] In some aspects, the antigen binding polypeptides disclosed herein, comprise one or more optional linkers. The one or more optional linkers are indicated herein as Ln, wherein n is an integer, and the integer next to each L indicates each L comprised in the antigen binding polypeptides disclosed herein. For example, if an antigen binding polypeptide disclosed herein comprises two linkers, the first linker from N-terminus to C-terminus is herein indicated as L1, and the second linker from N-terminus to C-terminus is herein indicated as L2. In some aspects, any one of the optional linkers each independently have a length of from 0 amino acids to about 50 amino acids. In some aspects, any one of the optional linkers each independently have a length of from 5 amino acids to about 40 amino acids.

[5542] In some aspects, any one of the optional linkers are non-immunogenic. In some aspects, any one of the optional linkers do not contain a consensus T cell epitope.

[5543] In some aspects, any of Ln comprises an amino acid sequence of G or A, or an amino acid sequence at least 65%, at least 70%, at least 75%, at least 80%, at least 85%, at least 90%, at least 95%, at least 99%, or 100% identical to amino acid sequence GSS or ASG, or an amino acid sequence at least 65%, at least 70%, at least 75%, at least 80%, at least 85%, at least 90%, at least 95%, at least 99%, or 100% identical to any one of SEQ ID NOs: 333-373 or 967-971. In some aspects. Ln comprises an amino acid sequence at least 65%, at least 70%, at least 75%, at least 80%, at least 85%, at least 90%, at least 95%, at least 99%, or 100% identical to any one of SEQ ID NOs: 333-345 or 967-971.

[5544] In some aspects, the antigen binding polypeptides provided herein have a structure, from amino-terminus to carboxy-terminus, represented by:
[5545] VL1-L1-VL2-L2-VH2-L3-VH1-L4-Fc;
[5546] VL1-L1-VH2-L2-VL2-L3-VH1-L4-Fc;
[5547] VH1-L1-VH2-L2-VL2-L3-VL1-L4-Fc; or
[5548] VH1-L1-VL2-L2-VH2-L3-VL1-L4-Fc;
[5549] wherein:
[5550] VL1 is a first immunoglobulin light chain variable region that specifically binds to (i) a tumor-associated antigen (TAA), (ii) an infectious disease antigen that is not a sarbecovirus antigen, or (iii) an other-pathology antigen;
[5551] VL2 is a second immunoglobulin light chain variable region that specifically binds to (i) a tumor-associated antigen (TAA), (ii) an infectious disease antigen that is not a sarbecovirus antigen, or (iii) an other-pathology antigen;
[5552] VH1 is a first immunoglobulin heavy chain variable region that specifically binds to (i) a tumor-associated antigen (TAA), (ii) an infectious disease antigen that is not a sarbecovirus antigen, or (iii) an other-pathology antigen;
[5553] VH2 is a second immunoglobulin heavy chain variable region that specifically binds to (i) a tumor-associated antigen (TAA), (ii) an infectious disease antigen that is not a sarbecovirus antigen, or (iii) an other-pathology antigen;
[5554] L1-L4 are optional amino acid linkers; and
[5555] Fc is an immunoglobulin fragment crystallizable region comprising an immunoglobulin heavy chain constant region 2 (CH2), an immunoglobulin heavy chain constant region 3 (CH3), and optionally, an immunoglobulin hinge.

[5556] In any aspect shown herein as a structure from amino terminus to carboxy terminus, and with binding pairs selected from VL and/or VH or other structural regions such as CH2, CH3, when shown without a specific linker such as L1, L2, etc., such linkers are optionally present in such structures between each designated subsequence VL, VH, etc.

[5557] In some aspects, the TAA is selected from the group consisting of 5′-nucleotidase, 5T4, A2AR, activin receptor-like kinase 1, adenocarcinoma antigen, ADRB3, AFP, AKAP-4, ALK, alpha-fetoprotein, androgenreceptor, angiopoietin 2, AOC3, APRIL, ATPDase, AXL, B7-4, B7DC, B7H1, B7H2, B7H3, B7H4, B7H5, B7H6, B7H7, B7RP1, BAFF, BAFFR, BCMA, bcr-abl, BlyS, BORIS, BST2, BTK, BTLA, C3, C5, C5a, C5a receptor, CA-125, CAIX, CanAg (a glycoform of MUC1), CCL11, CCL15, CCL17, CCL19, CCL2, CCL20, CCL21, CCL25, CCL3, CCL4, CCL5, CCL7, CCL8, CCR2, CCR3, CCR4, CCR5, CD11, CD11a, CD123, CD125, CD133, CD134, CD137, CD137L, CD147, CD15, CD154, CD160, CD16A, CD171, CD179a, CD18, CD184, CD19, CD2, CD20, CD200, CD22, CD221, CD23, CD24, CD242, CD25, CD27, CD272, CD276, CD278, CD279, CD28, CD3, CD30, CD300LF, CD319, CD33, CD37, CD38, CD39, CD38, CD4, CD40, CD40L, CD41, CD44v6, CD45, CD47, CD49B, CD5, CD51, CD52, CD54, CD56, CD6, CD62L, CD7, CD70, CD72, CD74, CD79a, CD79b, CD80, CD86, CD97, CEA, CEACAM5, claudin 18 isoform 2, CLDN6, CLEC12A, CLEC9, CLEC91, CLL-1, cMet, coagulation factor III, CRTH2, CS1, CSF-1, CSFIR, CSF-2, CSF-3, CTGF, CTLA4, CXCL1, CXCL12, CXCL13, CXCL2, CXCL4, CXCR3, CXORF61, CyclinB1, CYP1B1, dendritic cell-associated lectin 2, DLL3, DLL4, DNGR-1, DR5, E7, E-cadherin, EGFL7, EGFR, EGFRVIII, ELF2M, EMR2, endoglin, ENTPD1, EpCAM, EphA2, EPHA3, ephrin receptor A3, EphrinB2, episialin, ERBB2 (Her2/neu), ERBB3, ERG (TMPRSS2-ETS fusion gene), ETV6-AML, FAP, FCAR, FCER1, FCER1A, FCER2, FCRL5, FGF 23, FGFR, FGFR2, fibronectin extra domain-B, FLAP, FLT3, folate hydrolase, folate receptor 1, folate receptor alpha, folate receptor beta, FOLH1, Fos-relatedantigen1, Frizzled receptor, Fucosyl GM1, GD2, GD3, gelatinase B, Gi24, GITR, GITRL, GloboH, Glutamate carboxypeptidase II, glypican 3, GM3, GP100, GPC1, GPC2, GPC3, gplOO, GPNMB, GPR20, GPR5, GPRC5D, growth differentiation factor 8, GUCY2C, HAVCR1, HER1, HER2, HER3, HGF, HGFR, HHLA2, histone complex, HLA-DR, HMGB1, HMWMAA, HPVE6, hTERT, human telomerase reverse transcriptase, HVEM, ICAM-1, ICOS, ICOSL, IDO, IFNa, IgE, IGF-1, IGF1R, IGF-2, IGF-I receptor, IGLL1, IL1, IL10, IL12, IL13, IL13Ra2, IL-13Ra2, IL13Ra1, IL15, IL17, IL-17A, IL-17AF, IL-17F, IL17Rb, IL18, IL1B, IL1F10, IL-1a, IL-1B, IL2, IL-20, IL22, IL23, IL-23A, IL25, IL2Rbeta, IL-3 receptor, IL-31 receptor A, IL33, IL35, IL4, IL4Ra, IL5, IL5R, IL6, IL7, IL7Ra, IL8, IL9, IL9R, IL1A, IL-llRa, integrin α4, integrin α4 β7, integrin α5β1, integrin αIIbβ3, integrin αvβ3, integrin β7, interleukin 36 receptor IL1RAP, interleukin 36 receptor IL1RL2, intestinal carboxylesterase, ITGB4, ITK, KIR, KIR2D, KIT, LAG3, LAGE-1a, LAIR1, LAMP1, LCK, legumain, leptin, LewisY, LILRA2, LIV-1, LMP2, LOXL2, LPFS2, LRRC15, LY6K, LY75, LYPD3, MAD-CT-1, MAD-CT-2, MAGEA1, MAGE-A1, MCAM, MCP-1, MelanA/MART1, mesothelin, MHC classII, MIF, ML-IAP, MS4A1, MST1R (RON), MUC1, MUC-1, MUC16, MUC-16, MUC5AC, muthsp70-2, MYCN, NA17, NCA-90) granulocyte antigen, NCAM, NCR3LG1, nectin-4, NGNA ganglioside, NKG2A, NKG2D, NKp46, Notch 1, Notch receptor, NRP1, NTPDase-1, NY-BR-1, NY-ESO-1, o-acetyl-GD2, OR51E2, OX40), OX40L, OY-TES1, p53, p53mutant, PANX3, PAP, PAX3, PAX5, PCDC1, PCDP1, PCTA-1/Galectin8, PD-1, PDGFRA, PDGFR-beta, PD-L1, PD-L2, phosphate-sodium co-transporter, phosphatidylserine, PLAC1, polysialic acid, PROM1, prostase, prostein, PRSS21, PSCA, PSMA, PTK7, RAGE-1, RANKL. Ras mutant, rhIL1O, RhoC, root plate-specific spondin 3, ROR1, ROR2, RTN4, RU1, RU2, S152, sarcoma translocation breakpoints, SART3, scatter factor receptor kinase, SDC1, SIRPalpha, SISP1, SLAMF7, SLC, sLe, SLITRK6, spermprotein17, SPG64, sphingosine-1-phosphate, SSEA-4, SSX2, ST2, STEAP1, STEAP2, surviving and telomerase, Syk kinase, T14, TACI, TAG72, TARP, T-cell receptor, TCRβ, TDO, TEM1/CD248, TEM7R, tenascin C, TGFBETA, TGF-β1, TGF-β2, TGS5, the extracellular portion of the APRIL protein, Tie2, TIGIT, TIM3, TLR, TLR2, TLR4, TLR5, TLR9, TMEF1, TnAg, TNF, TNFa, TNFR superfamily member 4, TNFRSF7, Tp55, TRAC, TRAIL-R1, TRAIL-R2, TRAP, TREM1, TROP2, TRP-2, TSHR, TSLP, TSLPR, tumor antigen CTAA16.88, TWEAK, tyrosinase, TYRPI glycoprotein 75, UPK2, VAP-1, VEGF, VEGFA, VEGFR-1, VEGFR2, vimentin, VISTA, Vstm3, WT1, WUCAM, and XAGE1.

[5558] In some aspects, the antigen binding polypeptides provided herein comprise a VL1 comprising a light chain complementarity determining region 1 (LCDR1), LCDR2, and/or LCDR3 of an antibody selected from the group consisting of losatuxizumab vedotin, utomilumab, urelumab, oleclumab, naptumomab estafenatox, ascrinvacumab, pintumomab, tacatuzumab tetraxetan, nesvacumab, vanucizumab, timolumab, vapaliximab, vepalimomab, enapotamab vedotin, ianalumab, belimumab, tabalumab, tibulizumab, belantamab mafodotin, teclistamab, teclistamab, detumomab, nacolomab tafenatox, eculizumab, lendalizumab, pexelizumab, pozelimab, ravulizumab, tesidolumab, vilobelimab, abagovomab, igovomab, oregovomab, sofituzumab vedotin, cantuzumab mertansine, cantuzuma bravtansine, girentuximab, altumomab pentetate, arcitumomab, besilesomab, bertilimumab, plozalizumab, mogamulizumab, leronlimab, PRO140, rovelizumab, rovelizumab, talacotuzumab, benralizumab, tavolimab, vonlerolizumab, gavilimomab, ziralimumab, fanolesomab, ipilimumab, ruplizumab, toralizumab, dapirolizumab pegol, toralizumab, dapirolizumab pegol, ruplizumab, blinatumomab, inebilizumab, loncastuximab tesirine, SGN-CD19A, tafasitamab, taplitumomab paptox, XMAB-5574, Budoprutug, Obexelimab, duvortuxizumab, englumafusp alfa, Emfizatamab, zeripatamig, siplizumab, blontuvetmab, FBTA05, ibritumomab tiuxetan, obinutuzumab, ocaratuzumab, ocrelizumab, ofatumumab, rituximab, tositumomab, ublituximab, veltuzumab, divozilimab, eramkafusp alfa, ripertamab, zuberitamab, glofitamab, nofetumomab merpentan, samalizumab, imvotamab, odronextamab, plamotamab, bectumomab, inotuzumab ozogamicin, moxetumomab pasudotox, pinatuzumab vedotin, gomiliximab, lumiliximab, inolimomab, inolimomab, daclizumab, camidanluma btesirine, basiliximab, varlilumab, omburtamab, enoblituzumab, vopratclimab, lulizumabpegol, TGN1412, muromonab-CD3, otelixizumab, teplizumab, visilizumab, epcoritamab, epcoritamab, brentuximab vedotin, iratumumab, azintuxizumab vedotin, gemtuzumab ozogamicin, lintuzumab, vadastuximab talirine, naratuximab emtansine, otlertuzumab, lilotomab satetraxetan, tetulomab, daratumumab, isatuximab, foralumab, mosunetuzumab, mosunetuzumab, cedelizumab, ibalizumab, keliximab, priliximab, tregalizumab, zanolimumab, bleselumab, iscalimab, lucatumumab, ravagalimab, selicrelumab, teneliximab, vanalimab, abciximab, bivatuzumab, iomab-B, telimomab aritox, zolimomab aritox, abituzumab, intetumumab, alemtuzumab, tamtuvetmab, lorvotuzumab mertansine, itolizumab, cusatuzumab, vorsetuzumab mafodotin, milatuzumab, iladatuzumab vedotin, polatuzumab vedotin, galiximab, cibisatamab, zolbetuximab, naxitamab, tisotumab vedotin, olendalizumab, pamrevlumab, lacnotuzumab, cabiralizumab, emactuzumab, axatilimab, gimsilumab, lenzilumab, namilumab, tremelimumab, ulocuplumab, tepoditamab, rovalpituzumab tesirine, tarlatamab, demcizumab, navicixizumab, drozitumab, parsatuzumab, depatuxizumab mafodotin, modotuximab, carotuximab, adecatumumab, adecatumumab, oportuzumab monatox, solitomab, tucotuzumab celmoleukin, edrecolomab, catumaxomab, ifabotuzumab, fibatuzumab, zalutumumab, panitumumab, cetuximab, futuximab, imgatuzumab, laprituximab emtansine, matuzumab, necitumumab, nimotuzumab, tomuzotuximab, amivantamab, amivantamab, epitumomab cituxetan, sontuzumab, duligotuzumab, elgemtumab, lumretuzumab, patritumab, seribantumab, zenocutuzumab, sibrotuzumab, burosumab, aprutumab ixadotin, radretumab, pasotuxizumab, farletuzumab, mirvetuximab soravtansine, vantictumab, TRBS07, 3F8, dinutuximab, dinutuximab beta, ecromeximab, mitumomab, andecaliximab, capromab, codrituzumab, glembatumumab vedotin, talquetamab, talquetamab, trevogrumab, indusatumab vedotin, ficlatuzumab, rilotumumab, zatuximab, pentuzimab, pentuzimab, margetuximab, timigutuzumab, trastuzumab, trastuzumab duocarmazine, trastuzumab emtansine, gancotamab, pertuzumab, ertumaxomab, emibctuzumab, telisotuzumab, telisotuzumab vedotin, derlotuximab biotin, apolizumab, onartuzumab, bersanlimab, enlimomabpegol, rontalizumab, sifalimumab, talizumab, ganitumab, istiratumab, robatumumab, teprotumumab, figitumumab, ganitumab, istiratumab, robatumumab, teprotumumab, cixutumumab, dalotuzumab, xentuzumab, dusigitumab, canakinumab, ustekinumab, ustekinumab, ustekinumab, briakinumab, briakinumab, abrezekimab, lebrikizumab, romilkimab, TNX-650, tralokinumab, anrukinzumab, brodalumab, ixekizumab, netakimab, perakizumab, secukinumab, vunakizumab, afasevikumab, afasevikumab, bimekizumab, bimekizumab, remtolumab, bermekimab, lutikizumab, lutikizumab, gevokizumab, cergutuzumab amunaleukin, fletikumab, fezakinumab, brazikumab, guselkumab, mirikizumab, tildrakizumab, risankizumab, flotetuzumab, nemolizumab, pascolizumab, dupilumab, mepolizumab, reslizumab, clazakizumab, elsilimomab, olokizumab, sarilumab, siltuximab, sirukumab, vobarilizumab, tocilizumab, SA237, satralizumab, enokizumab, prezalizumab, natalizumab, abrilumab, abrilumab, vedolizumab, volociximab, tadocizumab, etaracizumab, etrolizumab, spesolimab, vatelizumab, erlizumab, lirilumab, relatlimab, cBR96-doxorubicinimmunoconjugate, odulimomab, efalizumab, ladiratuzumab vedotin, simtuzumab, samrotamab vedotin, asclizumab, lupartumab amadotin, imalumab, carlumab, imaprelimab, amatuximab, amatuximab, anctumab ravtansine, narnatumab, clivatuzumab tetraxetan, pemtumomab, gatipotuzumab, ensituximab, lemalesomab, sulesomab, enfortumab vedotin, racotumomab, monalizumab, brontictuzumab, tarextumab, vesencumab, oxelumab, gilvetmab, tislelizumab, dostarlimab, BCD-100, nivolumab, PDR001, pembrolizumab, pidilizumab, retifanlimab, spartalizumab, sintilimab, cemiplimab, olaratumab, tovetumab, rinucumab, atezolizumab, avelumab, durvalumab, lifastuzumab vedotin, bavituximab, acapatamab, capromab, rosopatamab, nezastomig, pasotuxizumab, pelgifatamab, voxalatamab, cofetuzumab pelidotin, denosumab, rosmantuzumab, cirmtuzumab, atinumab, indatuximab ravtansine, elotuzumab, sirtratumab vedotin, sonepcizumab, vandortuzumab vedotin, minretumomab, satumomab pendetide, maslimomab, ontuxizumab, tenatumomab, fresolimumab, metelimumab, lerdelimumab, tezepelumab, etigilimab, tiragotumab, placulumab, prezalumab, infliximab, nerelimomab, ozoralizumab, adalimumab, afelimomab, certolizumab pegol, golimumab, mapatumumab, conatumumab, lexatumumab, tigatuzumab, sacituzumab govitecan, votumumab, pogalizumab, letolizumab, pankomab, anatumomab mafenatox, enavatuzumab, flanvotumab, brolucizumab, ranibizumab, varisacumab, bevacizumab, faricimab, icrucumab, alacizumab pegol, ramucirumab, pritumumab, and onvatilimab.

[5559] In some aspects, the antigen binding polypeptides provided herein comprise a VL2 comprising a light chain complementarity determining region 1 (LCDR1), LCDR2, and/or LCDR3 of an antibody selected from the group consisting of losatuxizumab vedotin, utomilumab, urelumab, oleclumab, naptumomab estafenatox, ascrinvacumab, pintumomab, tacatuzumab tetraxetan, nesvacumab, vanucizumab, timolumab, vapaliximab, vepalimomab, enapotamab vedotin, ianalumab, belimumab, tabalumab, tibulizumab, belantamab mafodotin, teclistamab, teclistamab, detumomab, nacolomab tafenatox, eculizumab, lendalizumab, pexelizumab, pozelimab, ravulizumab, tesidolumab, vilobelimab, abagovomab, igovomab, oregovomab, sofituzumab vedotin, cantuzumab mertansine, cantuzuma bravtansine, girentuximab, altumomab pentetate, arcitumomab, besilesomab, bertilimumab, plozalizumab, mogamulizumab, leronlimab, PRO140, rovelizumab, rovelizumab, talacotuzumab, benralizumab, tavolimab, vonlerolizumab, gavilimomab, ziralimumab, fanolesomab, ipilimumab, ruplizumab, toralizumab, dapirolizumab pegol, toralizumab, dapirolizumab pegol, ruplizumab, blinatumomab, inebilizumab, loncastuximab tesirine, SGN-CD19A, tafasitamab, taplitumomab paptox, XMAB-5574, Budoprutug, Obexelimab, duvortuxizumab, englumafusp alfa, Emfizatamab, zeripatamig, siplizumab, blontuvetmab, FBTA05, ibritumomab tiuxetan, obinutuzumab, ocaratuzumab, ocrelizumab, ofatumumab, rituximab, tositumomab, ublituximab, veltuzumab, divozilimab, eramkafusp alfa, ripertamab, zuberitamab, glofitamab, nofetumomab merpentan, samalizumab, imvotamab, odronextamab, plamotamab, bectumomab, inotuzumab ozogamicin, moxetumomab pasudotox, pinatuzumab vedotin, gomiliximab, lumiliximab, inolimomab, inolimomab, daclizumab, camidanluma btesirine, basiliximab, varlilumab, omburtamab, enoblituzumab, vopratelimab, lulizumabpegol, TGN1412, muromonab-CD3, otelixizumab, teplizumab, visilizumab, epcoritamab, epcoritamab, brentuximab vedotin, iratumumab, azintuxizumab vedotin, gemtuzumab ozogamicin, lintuzumab, vadastuximab talirine, naratuximab emtansine, otlertuzumab, lilotomab satetraxetan, tetulomab, daratumumab, isatuximab, foralumab, mosunetuzumab, mosunetuzumab, cedelizumab, ibalizumab, keliximab, priliximab, tregalizumab, zanolimumab, bleselumab, iscalimab, lucatumumab, ravagalimab, selicrelumab, teneliximab, vanalimab, abciximab, bivatuzumab, iomab-B, telimomab aritox, zolimomab aritox, abituzumab, intetumumab, alemtuzumab, tamtuvetmab, lorvotuzumab mertansine, itolizumab, cusatuzumab, vorsetuzumab mafodotin, milatuzumab, iladatuzumab vedotin, polatuzumab vedotin, galiximab, cibisatamab, zolbetuximab, naxitamab, tisotumab vedotin, olendalizumab, pamrevlumab, lacnotuzumab, cabiralizumab, emactuzumab, axatilimab, gimsilumab, lenzilumab, namilumab, tremelimumab, ulocuplumab, tepoditamab, rovalpituzumab tesirine, tarlatamab, demcizumab, navicixizumab, drozitumab, parsatuzumab, depatuxizumab mafodotin, modotuximab, carotuximab, adecatumumab, adecatumumab, oportuzumab monatox, solitomab, tucotuzumab celmoleukin, edrecolomab, catumaxomab, ifabotuzumab, fibatuzumab, zalutumumab, panitumumab, cetuximab, futuximab, imgatuzumab, laprituximab emtansine, matuzumab, necitumumab, nimotuzumab, tomuzotuximab, amivantamab, amivantamab, epitumomab cituxetan, sontuzumab, duligotuzumab, elgemtumab, lumretuzumab, patritumab, seribantumab, zenocutuzumab, sibrotuzumab, burosumab, aprutumab ixadotin, radretumab, pasotuxizumab, farletuzumab, mirvetuximab soravtansine, vantictumab, TRBS07, 3F8, dinutuximab, dinutuximab beta, ecromeximab, mitumomab, andecaliximab, capromab, codrituzumab, glembatumumab vedotin, talquetamab, talquetamab, trevogrumab, indusatumab vedotin, ficlatuzumab, rilotumumab, zatuximab, pentuzimab, pentuzimab, margetuximab, timigutuzumab, trastuzumab, trastuzumab duocarmazine, trastuzumab emtansine, gancotamab, pertuzumab, ertumaxomab, emibetuzumab, telisotuzumab, telisotuzumab vedotin, derlotuximab biotin, apolizumab, onartuzumab, bersanlimab, enlimomabpegol, rontalizumab, sifalimumab, talizumab, ganitumab, istiratumab, robatumumab, teprotumumab, figitumumab, ganitumab, istiratumab, robatumumab, teprotumumab, cixutumumab, dalotuzumab, xentuzumab, dusigitumab, canakinumab, ustekinumab, ustekinumab, ustekinumab, briakinumab, briakinumab, abrezekimab, lebrikizumab, romilkimab, TNX-650, tralokinumab, anrukinzumab, brodalumab, ixekizumab, netakimab, perakizumab, secukinumab, vunakizumab, afasevikumab, afasevikumab, bimekizumab, bimekizumab, remtolumab, bermckimab, lutikizumab, lutikizumab, gevokizumab, cergutuzumab amunaleukin, fletikumab, fezakinumab, brazikumab, guselkumab, mirikizumab, tildrakizumab, risankizumab, flotetuzumab, nemolizumab, pascolizumab, dupilumab, mepolizumab, reslizumab, clazakizumab, elsilimomab, olokizumab, sarilumab, siltuximab, sirukumab, vobarilizumab, tocilizumab, SA237, satralizumab, enokizumab, prezalizumab, natalizumab, abrilumab, abrilumab, vedolizumab, volociximab, tadocizumab, etaracizumab, etrolizumab, spesolimab, vatelizumab, crlizumab, lirilumab, relatlimab, cBR96-doxorubicinimmunoconjugate, odulimomab, efalizumab, ladiratuzumab vedotin, simtuzumab, samrotamab vedotin, asclizumab, lupartumab amadotin, imalumab, carlumab, imaprelimab, amatuximab, amatuximab, anetumab ravtansine, narnatumab, clivatuzumab tetraxetan, pemtumomab, gatipotuzumab, ensituximab, lemalesomab, sulesomab, enfortumab vedotin, racotumomab, monalizumab, brontictuzumab, tarextumab, vesencumab, oxelumab, gilvetmab, tislelizumab, dostarlimab, BCD-100, nivolumab, PDR001, pembrolizumab, pidilizumab, retifanlimab, spartalizumab, sintilimab, cemiplimab, olaratumab, tovetumab, rinucumab, atezolizumab, aveclumab, durvalumab, lifastuzumab vedotin, bavituximab, acapatamab, capromab, rosopatamab, nezastomig, pasotuxizumab, pelgifatamab, voxalatamab, cofetuzumab pelidotin, denosumab, rosmantuzumab, cirmtuzumab, atinumab, indatuximab ravtansine, elotuzumab, sirtratumab vedotin, sonepcizumab, vandortuzumab vedotin, minretumomab, satumomab pendetide, maslimomab, ontuxizumab, tenatumomab, fresolimumab, metelimumab, lerdelimumab, tezepelumab, etigilimab, tiragotumab, placulumab, prezalumab, infliximab, nerelimomab, ozoralizumab, adalimumab, afelimomab, certolizumab pegol, golimumab, mapatumumab, conatumumab, lexatumumab, tigatuzumab, sacituzumab govitecan, votumumab, pogalizumab, letolizumab, pankomab, anatumomab mafenatox, enavatuzumab, flanvotumab, brolucizumab, ranibizumab, varisacumab, bevacizumab, faricimab, icrucumab, alacizumab pegol, ramucirumab, pritumumab, and onvatilimab.

[5560] In some aspects, the antigen binding polypeptides provided herein comprise a VH1 comprising a heavy chain complementarity determining region 1 (HCDR1), HCDR2, and/or HCDR3 of an antibody selected from the group consisting of losatuxizumab vedotin, utomilumab, urelumab, oleclumab, naptumomab estafenatox, ascrinvacumab, pintumomab, tacatuzumab tetraxetan, nesvacumab, vanucizumab, timolumab, vapaliximab, vepalimomab, enapotamab vedotin, ianalumab, belimumab, tabalumab, tibulizumab, belantamab mafodotin, teclistamab, teclistamab, detumomab, nacolomab tafenatox, eculizumab, lendalizumab, pexelizumab, pozelimab, ravulizumab, tesidolumab, vilobelimab, abagovomab, igovomab, oregovomab, sofituzumab vedotin, cantuzumab mertansine, cantuzuma bravtansine, girentuximab, altumomab pentetate, arcitumomab, besilesomab, bertilimumab, plozalizumab, mogamulizumab, leronlimab, PRO140, rovelizumab, rovelizumab, talacotuzumab, benralizumab, tavolimab, vonlerolizumab, gavilimomab, ziralimumab, fanolesomab, ipilimumab, ruplizumab, toralizumab, dapirolizumab pegol, toralizumab, dapirolizumab pegol, ruplizumab, blinatumomab, inebilizumab, loncastuximab tesirine, SGN-CD19A, tafasitamab, taplitumomab paptox, XMAB-5574, Budoprutug, Obexelimab, duvortuxizumab, englumafusp alfa, Emfizatamab, zeripatamig, siplizumab, blontuvetmab, FBTA05, ibritumomab tiuxetan, obinutuzumab, ocaratuzumab, ocrelizumab, ofatumumab, rituximab, tositumomab, ublituximab, veltuzumab, divozilimab, eramkafusp alfa, ripertamab, zuberitamab, glofitamab, nofetumomab merpentan, samalizumab, imvotamab, odronextamab, plamotamab, bectumomab, inotuzumab ozogamicin, moxetumomab pasudotox, pinatuzumab vedotin, gomiliximab, lumiliximab, inolimomab, inolimomab, daclizumab, camidanluma btesirine, basiliximab, varlilumab, omburtamab, enoblituzumab, vopratelimab, lulizumabpegol, TGN1412, muromonab-CD3, otelixizumab, teplizumab, visilizumab, epcoritamab, epcoritamab, brentuximab vedotin, iratumumab, azintuxizumab vedotin, gemtuzumab ozogamicin, lintuzumab, vadastuximab talirine, naratuximab emtansine, otlertuzumab, lilotomab satetraxetan, tetulomab, daratumumab, isatuximab, foralumab, mosunetuzumab, mosunetuzumab, cedelizumab, ibalizumab, keliximab, priliximab, tregalizumab, zanolimumab, bleselumab, iscalimab, lucatumumab, ravagalimab, selicrelumab, teneliximab, vanalimab, abciximab, bivatuzumab, iomab-B, telimomab aritox, zolimomab aritox, abituzumab, intetumumab, alemtuzumab, tamtuvetmab, lorvotuzumab mertansine, itolizumab, cusatuzumab, vorsetuzumab mafodotin, milatuzumab, iladatuzumab vedotin, polatuzumab vedotin, galiximab, cibisatamab, zolbetuximab, naxitamab, tisotumab vedotin, olendalizumab, pamrevlumab, lacnotuzumab, cabiralizumab, emactuzumab, axatilimab, gimsilumab, lenzilumab, namilumab, tremelimumab, ulocuplumab, tepoditamab, rovalpituzumab tesirine, tarlatamab, demcizumab, navicixizumab, drozitumab, parsatuzumab, depatuxizumab mafodotin, modotuximab, carotuximab, adecatumumab, adecatumumab, oportuzumab monatox, solitomab, tucotuzumab celmoleukin, edrecolomab, catumaxomab, ifabotuzumab, fibatuzumab, zalutumumab, panitumumab, cetuximab, futuximab, imgatuzumab, laprituximab emtansine, matuzumab, necitumumab, nimotuzumab, tomuzotuximab, amivantamab, amivantamab, epitumomab cituxetan, sontuzumab, duligotuzumab, elgemtumab, lumretuzumab, patritumab, seribantumab, zenocutuzumab, sibrotuzumab, burosumab, aprutumab ixadotin, radretumab, pasotuxizumab, farletuzumab, mirvetuximab soravtansine, vantictumab, TRBS07, 3F8, dinutuximab, dinutuximab beta, ecromeximab, mitumomab, andecaliximab, capromab, codrituzumab, glembatumumab vedotin, talquetamab, talquetamab, trevogrumab, indusatumab vedotin, ficlatuzumab, rilotumumab, zatuximab, pentuzimab, pentuzimab, margetuximab, timigutuzumab, trastuzumab, trastuzumab duocarmazine, trastuzumab emtansine, gancotamab, pertuzumab, ertumaxomab, emibetuzumab, telisotuzumab, telisotuzumab vedotin, derlotuximab biotin, apolizumab, onartuzumab, bersanlimab, enlimomabpegol, rontalizumab, sifalimumab, talizumab, ganitumab, istiratumab, robatumumab, teprotumumab, figitumumab, ganitumab, istiratumab, robatumumab, teprotumumab, cixutumumab, dalotuzumab, xentuzumab, dusigitumab, canakinumab, ustekinumab, ustekinumab, ustekinumab, briakinumab, briakinumab, abrezekimab, lebrikizumab, romilkimab, TNX-650, tralokinumab, anrukinzumab, brodalumab, ixekizumab, netakimab, perakizumab, secukinumab, vunakizumab, afasevikumab, afasevikumab, bimekizumab, bimekizumab, remtolumab, bermekimab, lutikizumab, lutikizumab, gevokizumab, cergutuzumab amunaleukin, fletikumab, fezakinumab, brazikumab, guselkumab, mirikizumab, tildrakizumab, risankizumab, flotetuzumab, nemolizumab, pascolizumab, dupilumab, mepolizumab, reslizumab, clazakizumab, elsilimomab, olokizumab, sarilumab, siltuximab, sirukumab, vobarilizumab, tocilizumab, SA237, satralizumab, enokizumab, prezalizumab, natalizumab, abrilumab, abrilumab, vedolizumab, volociximab, tadocizumab, etaracizumab, etrolizumab, spesolimab, vatelizumab, erlizumab, lirilumab, relatlimab, cBR96-doxorubicinimmunoconjugate, odulimomab, efalizumab, ladiratuzumab vedotin, simtuzumab, samrotamab vedotin, asclizumab, lupartumab amadotin, imalumab, carlumab, imaprelimab, amatuximab, amatuximab, anetumab ravtansine, narnatumab, clivatuzumab tetraxetan, pemtumomab, gatipotuzumab, ensituximab, lemalesomab, sulesomab, enfortumab vedotin, racotumomab, monalizumab, brontictuzumab, tarextumab, vesencumab, oxelumab, gilvetmab, tislelizumab, dostarlimab, BCD-100, nivolumab, PDR001, pembrolizumab, pidilizumab, retifanlimab, spartalizumab, sintilimab, cemiplimab, olaratumab, tovetumab, rinucumab, atezolizumab, avelumab, durvalumab, lifastuzumab vedotin, bavituximab, acapatamab, capromab, rosopatamab, nezastomig, pasotuxizumab, pelgifatamab, voxalatamab, cofetuzumab pelidotin, denosumab, rosmantuzumab, cirmtuzumab, atinumab, indatuximab ravtansine, elotuzumab, sirtratumab vedotin, sonepcizumab, vandortuzumab vedotin, minretumomab, satumomab pendetide, maslimomab, ontuxizumab, tenatumomab, fresolimumab, metelimumab, lerdelimumab, tezepelumab, etigilimab, tiragotumab, placulumab, prezalumab, infliximab, nerelimomab, ozoralizumab, adalimumab, afelimomab, certolizumab pegol, golimumab, mapatumumab, conatumumab, lexatumumab, tigatuzumab, sacituzumab govitecan, votumumab, pogalizumab, letolizumab, pankomab, anatumomab mafenatox, enavatuzumab, flanvotumab, brolucizumab, ranibizumab, varisacumab, bevacizumab, faricimab, icrucumab, alacizumab pegol, ramucirumab, pritumumab, and onvatilimab.

[5561] In some aspects, the antigen binding polypeptides provided herein comprise a VH2 comprising a heavy chain complementarity determining region 1 (HCDR1), HCDR2, and/or HCDR3 of an antibody selected from the group consisting of losatuxizumab vedotin, utomilumab, urelumab, oleclumab, naptumomab estafenatox, ascrinvacumab, pintumomab, tacatuzumab tetraxetan, nesvacumab, vanucizumab, timolumab, vapaliximab, vepalimomab, enapotamab vedotin, ianalumab, belimumab, tabalumab, tibulizumab, belantamab mafodotin, teclistamab, teclistamab, detumomab, nacolomab tafenatox, eculizumab, lendalizumab, pexelizumab, pozelimab, ravulizumab, tesidolumab, vilobelimab, abagovomab, igovomab, oregovomab, sofituzumab vedotin, cantuzumab mertansine, cantuzuma bravtansine, girentuximab, altumomab pentetate, arcitumomab, besilesomab, bertilimumab, plozalizumab, mogamulizumab, leronlimab, PRO140, rovelizumab, rovelizumab, talacotuzumab, benralizumab, tavolimab, vonlerolizumab, gavilimomab, ziralimumab, fanolesomab, ipilimumab, ruplizumab, toralizumab, dapirolizumab pegol, toralizumab, dapirolizumab pegol, ruplizumab, blinatumomab, inebilizumab, loncastuximab tesirine, SGN-CD19A, tafasitamab, taplitumomab paptox, XMAB-5574, Budoprutug, Obexelimab, duvortuxizumab, englumafusp alfa, Emfizatamab, zeripatamig, siplizumab, blontuvetmab, FBTA05, ibritumomab tiuxetan, obinutuzumab, ocaratuzumab, ocrelizumab, ofatumumab, rituximab, tositumomab, ublituximab, veltuzumab, divozilimab, eramkafusp alfa, ripertamab, zuberitamab, glofitamab, nofetumomab merpentan, samalizumab, imvotamab, odronextamab, plamotamab, bectumomab, inotuzumab ozogamicin, moxetumomab pasudotox, pinatuzumab vedotin, gomiliximab, lumiliximab, inolimomab, inolimomab, daclizumab, camidanluma btesirine, basiliximab, varlilumab, omburtamab, enoblituzumab, vopratclimab, lulizumabpegol, TGN1412, muromonab-CD3, otelixizumab, teplizumab, visilizumab, epcoritamab, epcoritamab, brentuximab vedotin, iratumumab, azintuxizumab vedotin, gemtuzumab ozogamicin, lintuzumab, vadastuximab talirine, naratuximab emtansine, otlertuzumab, lilotomab satetraxetan, tetulomab, daratumumab, isatuximab, foralumab, mosunetuzumab, mosunetuzumab, cedelizumab, ibalizumab, keliximab, priliximab, tregalizumab, zanolimumab, bleselumab, iscalimab, lucatumumab, ravagalimab, selicrelumab, teneliximab, vanalimab, abciximab, bivatuzumab, iomab-B, telimomab aritox, zolimomab aritox, abituzumab, intetumumab, alemtuzumab, tamtuvetmab, lorvotuzumab mertansine, itolizumab, cusatuzumab, vorsetuzumab mafodotin, milatuzumab, iladatuzumab vedotin, polatuzumab vedotin, galiximab, cibisatamab, zolbetuximab, naxitamab, tisotumab vedotin, olendalizumab, pamrevlumab, lacnotuzumab, cabiralizumab, emactuzumab, axatilimab, gimsilumab, lenzilumab, namilumab, tremelimumab, ulocuplumab, tepoditamab, rovalpituzumab tesirine, tarlatamab, demcizumab, navicixizumab, drozitumab, parsatuzumab, depatuxizumab mafodotin, modotuximab, carotuximab, adecatumumab, adecatumumab, oportuzumab monatox, solitomab, tucotuzumab celmoleukin, edrecolomab, catumaxomab, ifabotuzumab, fibatuzumab, zalutumumab, panitumumab, cetuximab, futuximab, imgatuzumab, laprituximab emtansine, matuzumab, necitumumab, nimotuzumab, tomuzotuximab, amivantamab, amivantamab, epitumomab cituxetan, sontuzumab, duligotuzumab, elgemtumab, lumretuzumab, patritumab, seribantumab, zenocutuzumab, sibrotuzumab, burosumab, aprutumab ixadotin, radretumab, pasotuxizumab, farletuzumab, mirvetuximab soravtansine, vantictumab, TRBS07, 3F8, dinutuximab, dinutuximab beta, ecromeximab, mitumomab, andecaliximab, capromab, codrituzumab, glembatumumab vedotin, talquetamab, talquetamab, trevogrumab, indusatumab vedotin, ficlatuzumab, rilotumumab, zatuximab, pentuzimab, pentuzimab, margetuximab, timigutuzumab, trastuzumab, trastuzumab duocarmazine, trastuzumab emtansine, gancotamab, pertuzumab, ertumaxomab, emibetuzumab, telisotuzumab, telisotuzumab vedotin, derlotuximab biotin, apolizumab, onartuzumab, bersanlimab, enlimomabpegol, rontalizumab, sifalimumab, talizumab, ganitumab, istiratumab, robatumumab, teprotumumab, figitumumab, ganitumab, istiratumab, robatumumab, teprotumumab, cixutumumab, dalotuzumab, xentuzumab, dusigitumab, canakinumab, ustekinumab, ustekinumab, ustekinumab, briakinumab, briakinumab, abrezekimab, lebrikizumab, romilkimab, TNX-650, tralokinumab, anrukinzumab, brodalumab, ixekizumab, netakimab, perakizumab, secukinumab, vunakizumab, afasevikumab, afasevikumab, bimekizumab, bimekizumab, remtolumab, bermekimab, lutikizumab, lutikizumab, gevokizumab, cergutuzumab amunaleukin, fletikumab, fezakinumab, brazikumab, guselkumab, mirikizumab, tildrakizumab, risankizumab, flotetuzumab, nemolizumab, pascolizumab, dupilumab, mepolizumab, reslizumab, clazakizumab, elsilimomab, olokizumab, sarilumab, siltuximab, sirukumab, vobarilizumab, tocilizumab, SA237, satralizumab, enokizumab, prezalizumab, natalizumab, abrilumab, abrilumab, vedolizumab, volociximab, tadocizumab, etaracizumab, etrolizumab, spesolimab, vatelizumab, erlizumab, lirilumab, relatlimab, cBR96-doxorubicinimmunoconjugate, odulimomab, efalizumab, ladiratuzumab vedotin, simtuzumab, samrotamab vedotin, aselizumab, lupartumab amadotin, imalumab, carlumab, imaprelimab, amatuximab, amatuximab, anetumab ravtansine, narnatumab, clivatuzumab tetraxetan, pemtumomab, gatipotuzumab, ensituximab, lemalesomab, sulesomab, enfortumab vedotin, racotumomab, monalizumab, brontictuzumab, tarextumab, vesencumab, oxelumab, gilvetmab, tislelizumab, dostarlimab, BCD-100, nivolumab, PDR001, pembrolizumab, pidilizumab, retifanlimab, spartalizumab, sintilimab, cemiplimab, olaratumab, tovetumab, rinucumab, atezolizumab, avelumab, durvalumab, lifastuzumab vedotin, bavituximab, acapatamab, capromab, rosopatamab, nezastomig, pasotuxizumab, pelgifatamab, voxalatamab, cofetuzumab pelidotin, denosumab, rosmantuzumab, cirmtuzumab, atinumab, indatuximab ravtansine, elotuzumab, sirtratumab vedotin, sonepcizumab, vandortuzumab vedotin, minretumomab, satumomab pendetide, maslimomab, ontuxizumab, tenatumomab, fresolimumab, metelimumab, lerdelimumab, tezepelumab, etigilimab, tiragotumab, placulumab, prezalumab, infliximab, nerelimomab, ozoralizumab, adalimumab, afelimomab, certolizumab pegol, golimumab, mapatumumab, conatumumab, lexatumumab, tigatuzumab, sacituzumab govitecan, votumumab, pogalizumab, letolizumab, pankomab, anatumomab mafenatox, enavatuzumab, flanvotumab, brolucizumab, ranibizumab, varisacumab, bevacizumab, faricimab, icrucumab, alacizumab pegol, ramucirumab, pritumumab, and onvatilimab.

[5562] In some aspects, the antigen binding polypeptides provided herein comprise a VL1 comprising a VL of an antibody selected from the group consisting of losatuxizumab vedotin, utomilumab, urelumab, oleclumab, naptumomab estafenatox, ascrinvacumab, pintumomab, tacatuzumab tetraxetan, nesvacumab, vanucizumab, timolumab, vapaliximab, vepalimomab, enapotamab vedotin, ianalumab, belimumab, tabalumab, tibulizumab, belantamab mafodotin, teclistamab, teclistamab, detumomab, nacolomab tafenatox, eculizumab, lendalizumab, pexelizumab, pozelimab, ravulizumab, tesidolumab, vilobelimab, abagovomab, igovomab, oregovomab, sofituzumab vedotin, cantuzumab mertansine, cantuzuma bravtansine, girentuximab, altumomab pentetate, arcitumomab, besilesomab, bertilimumab, plozalizumab, mogamulizumab, leronlimab, PRO140, rovelizumab, rovelizumab, talacotuzumab, benralizumab, tavolimab, vonlerolizumab, gavilimomab, ziralimumab, fanolesomab, ipilimumab, ruplizumab, toralizumab, dapirolizumab pegol, toralizumab, dapirolizumab pegol, ruplizumab, blinatumomab, inebilizumab, loncastuximab tesirine, SGN-CD19A, tafasitamab, taplitumomab paptox, XMAB-5574, Budoprutug, Obexclimab, duvortuxizumab, englumafusp alfa, Emfizatamab, zeripatamig, siplizumab, blontuvetmab, FBTA05, ibritumomab tiuxetan, obinutuzumab, ocaratuzumab, ocrelizumab, ofatumumab, rituximab, tositumomab, ublituximab, veltuzumab, divozilimab, eramkafusp alfa, ripertamab, zuberitamab, glofitamab, nofetumomab merpentan, samalizumab, imvotamab, odronextamab, plamotamab, bectumomab, inotuzumab ozogamicin, moxetumomab pasudotox, pinatuzumab vedotin, gomiliximab, lumiliximab, inolimomab, inolimomab, daclizumab, camidanluma btesirine, basiliximab, varlilumab, omburtamab, enoblituzumab, vopratelimab, lulizumabpegol, TGN1412, muromonab-CD3, otelixizumab, teplizumab, visilizumab, epcoritamab, epcoritamab, brentuximab vedotin, iratumumab, azintuxizumab vedotin, gemtuzumab ozogamicin, lintuzumab, vadastuximab talirine, naratuximab emtansine, otlertuzumab, lilotomab satetraxetan, tetulomab, daratumumab, isatuximab, foralumab, mosunetuzumab, mosunetuzumab, cedelizumab, ibalizumab, keliximab, priliximab, tregalizumab, zanolimumab, bleselumab, iscalimab, lucatumumab, ravagalimab, selicrelumab, teneliximab, vanalimab, abciximab, bivatuzumab, iomab-B, telimomab aritox, zolimomab aritox, abituzumab, intetumumab, alemtuzumab, tamtuvetmab, lorvotuzumab mertansine, itolizumab, cusatuzumab, vorsetuzumab mafodotin, milatuzumab, iladatuzumab vedotin, polatuzumab vedotin, galiximab, cibisatamab, zolbetuximab, naxitamab, tisotumab vedotin, olendalizumab, pamrevlumab, lacnotuzumab, cabiralizumab, emactuzumab, axatilimab, gimsilumab, lenzilumab, namilumab, tremelimumab, ulocuplumab, tepoditamab, rovalpituzumab tesirine, tarlatamab, demcizumab, navicixizumab, drozitumab, parsatuzumab, depatuxizumab mafodotin, modotuximab, carotuximab, adecatumumab, adecatumumab, oportuzumab monatox, solitomab, tucotuzumab celmoleukin, edrecolomab, catumaxomab, ifabotuzumab, fibatuzumab, zalutumumab, panitumumab, cetuximab, futuximab, imgatuzumab, laprituximab emtansine, matuzumab, necitumumab, nimotuzumab, tomuzotuximab, amivantamab, amivantamab, epitumomab cituxetan, sontuzumab, duligotuzumab, elgemtumab, lumretuzumab, patritumab, seribantumab, zenocutuzumab, sibrotuzumab, burosumab, aprutumab ixadotin, radretumab, pasotuxizumab, farletuzumab, mirvetuximab soravtansine, vantictumab, TRBS07, 3F8, dinutuximab, dinutuximab beta, eecromeximab, mitumomab, andecaliximab, capromab, codrituzumab, glembatumumab vedotin, talquetamab, talquetamab, trevogrumab, indusatumab vedotin, ficlatuzumab, rilotumumab, zatuximab, pentuzimab, pentuzimab, margetuximab, timigutuzumab, trastuzumab, trastuzumab duocarmazine, trastuzumab emtansine, gancotamab, pertuzumab, ertumaxomab, emibetuzumab, telisotuzumab, telisotuzumab vedotin, derlotuximab biotin, apolizumab, onartuzumab, bersanlimab, enlimomabpegol, rontalizumab, sifalimumab, talizumab, ganitumab, istiratumab, robatumumab, teprotumumab, figitumumab, ganitumab, istiratumab, robatumumab, teprotumumab, cixutumumab, dalotuzumab, xentuzumab, dusigitumab, canakinumab, ustekinumab, ustekinumab, ustekinumab, briakinumab, briakinumab, abrezekimab, lebrikizumab, romilkimab, TNX-650, tralokinumab, anrukinzumab, brodalumab, ixekizumab, netakimab, perakizumab, secukinumab, vunakizumab, afasevikumab, afasevikumab, bimekizumab, bimekizumab, remtolumab, bermckimab, lutikizumab, lutikizumab, gevokizumab, cergutuzumab amunaleukin, fletikumab, fezakinumab, brazikumab, guselkumab, mirikizumab, tildrakizumab, risankizumab, flotetuzumab, nemolizumab, pascolizumab, dupilumab, mepolizumab, reslizumab, clazakizumab, elsilimomab, olokizumab, sarilumab, siltuximab, sirukumab, vobarilizumab, tocilizumab, SA237, satralizumab, enokizumab, prezalizumab, natalizumab, abrilumab, abrilumab, vedolizumab, volociximab, tadocizumab, etaracizumab, etrolizumab, spesolimab, vatelizumab, erlizumab, lirilumab, relatlimab, cBR96-doxorubicinimmunoconjugate, odulimomab, efalizumab, ladiratuzumab vedotin, simtuzumab, samrotamab vedotin, asclizumab, lupartumab amadotin, imalumab, carlumab, imaprelimab, amatuximab, amatuximab, anetumab ravtansine, narnatumab, clivatuzumab tetraxetan, pemtumomab, gatipotuzumab, ensituximab, lemalesomab, sulcsomab, enfortumab vedotin, racotumomab, monalizumab, brontictuzumab, tarextumab, vesencumab, oxelumab, gilvetmab, tislelizumab, dostarlimab, BCD-100, nivolumab, PDR001, pembrolizumab, pidilizumab, retifanlimab, spartalizumab, sintilimab, cemiplimab, olaratumab, tovetumab, rinucumab, atezolizumab, avelumab, durvalumab, lifastuzumab vedotin, bavituximab, acapatamab, capromab, rosopatamab, nezastomig, pasotuxizumab, pelgifatamab, voxalatamab, cofetuzumab pelidotin, denosumab, rosmantuzumab, cirmtuzumab, atinumab, indatuximab ravtansine, elotuzumab, sirtratumab vedotin, sonepcizumab, vandortuzumab vedotin, minretumomab, satumomab pendetide, maslimomab, ontuxizumab, tenatumomab, fresolimumab, metelimumab, lerdelimumab, tezepelumab, etigilimab, tiragotumab, placulumab, prezalumab, infliximab, nerelimomab, ozoralizumab, adalimumab, afelimomab, certolizumab pegol, golimumab, mapatumumab, conatumumab, lexatumumab, tigatuzumab, sacituzumab govitecan, votumumab, pogalizumab, letolizumab, pankomab, anatumomab mafenatox, enavatuzumab, flanvotumab, brolucizumab, ranibizumab, varisacumab, bevacizumab, faricimab, icrucumab, alacizumab pegol, ramucirumab, pritumumab, and onvatilimab.

[5563] In some aspects, the antigen binding polypeptides provided herein comprise a VL2 comprising a VL of an antibody selected from the group consisting of losatuxizumab vedotin, utomilumab, urelumab, oleclumab, naptumomab estafenatox, ascrinvacumab, pintumomab, tacatuzumab tetraxetan, nesvacumab, vanucizumab, timolumab, vapaliximab, vepalimomab, enapotamab vedotin, ianalumab, belimumab, tabalumab, tibulizumab, belantamab mafodotin, teclistamab, teclistamab, detumomab, nacolomab tafenatox, eculizumab, lendalizumab, pexelizumab, pozelimab, ravulizumab, tesidolumab, vilobelimab, abagovomab, igovomab, oregovomab, sofituzumab vedotin, cantuzumab mertansine, cantuzuma bravtansine, girentuximab, altumomab pentetate, arcitumomab, besilesomab, bertilimumab, plozalizumab, mogamulizumab, leronlimab, PRO140, rovelizumab, rovelizumab, talacotuzumab, benralizumab, tavolimab, vonlerolizumab, gavilimomab, ziralimumab, fanolesomab, ipilimumab, ruplizumab, toralizumab, dapirolizumab pegol, toralizumab, dapirolizumab pegol, ruplizumab, blinatumomab, inebilizumab, loncastuximab tesirine, SGN-CD19A, tafasitamab, taplitumomab paptox, XMAB-5574, Budoprutug, Obexelimab, duvortuxizumab, englumafusp alfa, Emfizatamab, zeripatamig, siplizumab, blontuvetmab, FBTA05, ibritumomab tiuxetan, obinutuzumab, ocaratuzumab, ocrelizumab, ofatumumab, rituximab, tositumomab, ublituximab, veltuzumab, divozilimab, eramkafusp alfa, ripertamab, zuberitamab, glofitamab, nofetumomab merpentan, samalizumab, imvotamab, odronextamab, plamotamab, bectumomab, inotuzumab ozogamicin, moxetumomab pasudotox, pinatuzumab vedotin, gomiliximab, lumiliximab, inolimomab, inolimomab, daclizumab, camidanluma btesirine, basiliximab, varlilumab, omburtamab, enoblituzumab, vopratelimab, lulizumabpegol, TGN1412, muromonab-CD3, otelixizumab, teplizumab, visilizumab, epcoritamab, epcoritamab, brentuximab vedotin, iratumumab, azintuxizumab vedotin, gemtuzumab ozogamicin, lintuzumab, vadastuximab talirine, naratuximab emtansine, otlertuzumab, lilotomab satetraxetan, tetulomab, daratumumab, isatuximab, foralumab, mosunetuzumab, mosunetuzumab, cedelizumab, ibalizumab, keliximab, priliximab, tregalizumab, zanolimumab, bleselumab, iscalimab, lucatumumab, ravagalimab, selicrelumab, teneliximab, vanalimab, abciximab, bivatuzumab, iomab-B, telimomab aritox, zolimomab aritox, abituzumab, intetumumab, alemtuzumab, tamtuvetmab, lorvotuzumab mertansine, itolizumab, cusatuzumab, vorsetuzumab mafodotin, milatuzumab, iladatuzumab vedotin, polatuzumab vedotin, galiximab, cibisatamab, zolbetuximab, naxitamab, tisotumab vedotin, olendalizumab, pamrevlumab, lacnotuzumab, cabiralizumab, emactuzumab, axatilimab, gimsilumab, lenzilumab, namilumab, tremelimumab, ulocuplumab, tepoditamab, rovalpituzumab tesirine, tarlatamab, demcizumab, navicixizumab, drozitumab, parsatuzumab, depatuxizumab mafodotin, modotuximab, carotuximab, adecatumumab, adecatumumab, oportuzumab monatox, solitomab, tucotuzumab celmoleukin, edrecolomab, catumaxomab, ifabotuzumab, fibatuzumab, zalutumumab, panitumumab, cetuximab, futuximab, imgatuzumab, laprituximab emtansine, matuzumab, necitumumab, nimotuzumab, tomuzotuximab, amivantamab, amivantamab, epitumomab cituxetan, sontuzumab, duligotuzumab, elgemtumab, lumretuzumab, patritumab, seribantumab, zenocutuzumab, sibrotuzumab, burosumab, aprutumab ixadotin, radretumab, pasotuxizumab, farletuzumab, mirvetuximab soravtansine, vantictumab, TRBS07, 3F8, dinutuximab, dinutuximab beta, ecromeximab, mitumomab, andecaliximab, capromab, codrituzumab, glembatumumab vedotin, talquetamab, talquetamab, trevogrumab, indusatumab vedotin, ficlatuzumab, rilotumumab, zatuximab, pentuzimab, pentuzimab, margetuximab, timigutuzumab, trastuzumab, trastuzumab duocarmazine, trastuzumab emtansine, gancotamab, pertuzumab, ertumaxomab, emibetuzumab, telisotuzumab, telisotuzumab vedotin, derlotuximab biotin, apolizumab, onartuzumab, bersanlimab, enlimomabpegol, rontalizumab, sifalimumab, talizumab, ganitumab, istiratumab, robatumumab, teprotumumab, figitumumab, ganitumab, istiratumab, robatumumab, teprotumumab, cixutumumab, dalotuzumab, xentuzumab, dusigitumab, canakinumab, ustekinumab, ustekinumab, ustekinumab, briakinumab, briakinumab, abrezekimab, lebrikizumab, romilkimab, TNX-650, tralokinumab, anrukinzumab, brodalumab, ixekizumab, netakimab, perakizumab, secukinumab, vunakizumab, afasevikumab, afasevikumab, bimekizumab, bimekizumab, remtolumab, bermckimab, lutikizumab, lutikizumab, gevokizumab, cergutuzumab amunaleukin, fletikumab, fezakinumab, brazikumab, guselkumab, mirikizumab, tildrakizumab, risankizumab, flotetuzumab, nemolizumab, pascolizumab, dupilumab, mepolizumab, reslizumab, clazakizumab, elsilimomab, olokizumab, sarilumab, siltuximab, sirukumab, vobarilizumab, tocilizumab, SA237, satralizumab, enokizumab, prezalizumab, natalizumab, abrilumab, abrilumab, vedolizumab, volociximab, tadocizumab, etaracizumab, etrolizumab, spesolimab, vatelizumab, erlizumab, lirilumab, relatlimab, cBR96-doxorubicinimmunoconjugate, odulimomab, efalizumab, ladiratuzumab vedotin, simtuzumab, samrotamab vedotin, asclizumab, lupartumab amadotin, imalumab, carlumab, imaprelimab, amatuximab, amatuximab, anetumab ravtansine, narnatumab, clivatuzumab tetraxetan, pemtumomab, gatipotuzumab, ensituximab, lemalesomab, sulesomab, enfortumab vedotin, racotumomab, monalizumab, brontictuzumab, tarextumab, vesencumab, oxelumab, gilvetmab, tislelizumab, dostarlimab, BCD-100, nivolumab, PDR001, pembrolizumab, pidilizumab, retifanlimab, spartalizumab, sintilimab, cemiplimab, olaratumab, tovetumab, rinucumab, atezolizumab, avelumab, durvalumab, lifastuzumab vedotin, bavituximab, acapatamab, capromab, rosopatamab, nezastomig, pasotuxizumab, pelgifatamab, voxalatamab, cofetuzumab pelidotin, denosumab, rosmantuzumab, cirmtuzumab, atinumab, indatuximab ravtansine, elotuzumab, sirtratumab vedotin, sonepcizumab, vandortuzumab vedotin, minretumomab, satumomab pendetide, maslimomab, ontuxizumab, tenatumomab, fresolimumab, metelimumab, lerdelimumab, tezepelumab, etigilimab, tiragotumab, placulumab, prezalumab, infliximab, nerelimomab, ozoralizumab, adalimumab, afelimomab, certolizumab pegol, golimumab, mapatumumab, conatumumab, lexatumumab, tigatuzumab, sacituzumab govitecan, votumumab, pogalizumab, letolizumab, pankomab, anatumomab mafenatox, enavatuzumab, flanvotumab, brolucizumab, ranibizumab, varisacumab, bevacizumab, faricimab, icrucumab, alacizumab pegol, ramucirumab, pritumumab, and onvatilimab.

[5564] In some aspects, the antigen binding polypeptides provided herein comprise a VH1 comprising a VH of an antibody selected from the group consisting of losatuxizumab vedotin, utomilumab, urelumab, oleclumab, naptumomab estafenatox, ascrinvacumab, pintumomab, tacatuzumab tetraxetan, nesvacumab, vanucizumab, timolumab, vapaliximab, vepalimomab, enapotamab vedotin, ianalumab, belimumab, tabalumab, tibulizumab, belantamab mafodotin, teclistamab, teclistamab, detumomab, nacolomab tafenatox, eculizumab, lendalizumab, pexelizumab, pozelimab, ravulizumab, tesidolumab, vilobelimab, abagovomab, igovomab, oregovomab, sofituzumab vedotin, cantuzumab mertansine, cantuzuma bravtansine, girentuximab, altumomab pentetate, arcitumomab, besilesomab, bertilimumab, plozalizumab, mogamulizumab, leronlimab, PRO140, rovelizumab, rovelizumab, talacotuzumab, benralizumab, tavolimab, vonlerolizumab, gavilimomab, ziralimumab, fanolesomab, ipilimumab, ruplizumab, toralizumab, dapirolizumab pegol, toralizumab, dapirolizumab pegol, ruplizumab, blinatumomab, inebilizumab, loncastuximab tesirine, SGN-CD19A, tafasitamab, taplitumomab paptox, XMAB-5574, Budoprutug, Obexelimab, duvortuxizumab, englumafusp alfa, Emfizatamab, zeripatamig, siplizumab, blontuvetmab, FBTA05, ibritumomab tiuxetan, obinutuzumab, ocaratuzumab, ocrelizumab, ofatumumab, rituximab, tositumomab, ublituximab, veltuzumab, divozilimab, eramkafusp alfa, ripertamab, zuberitamab, glofitamab, nofetumomab merpentan, samalizumab, imvotamab, odronextamab, plamotamab, bectumomab, inotuzumab ozogamicin, moxetumomab pasudotox, pinatuzumab vedotin, gomiliximab, lumiliximab, inolimomab, inolimomab, daclizumab, camidanluma btesirine, basiliximab, varlilumab, omburtamab, enoblituzumab, vopratelimab, lulizumabpegol, TGN1412, muromonab-CD3, otelixizumab, teplizumab, visilizumab, epcoritamab, epcoritamab, brentuximab vedotin, iratumumab, azintuxizumab vedotin, gemtuzumab ozogamicin, lintuzumab, vadastuximab talirine, naratuximab emtansine, otlertuzumab, lilotomab satetraxetan, tetulomab, daratumumab, isatuximab, foralumab, mosunetuzumab, mosunetuzumab, cedelizumab, ibalizumab, keliximab, priliximab, tregalizumab, zanolimumab, bleselumab, iscalimab, lucatumumab, ravagalimab, selicrelumab, teneliximab, vanalimab, abciximab, bivatuzumab, iomab-B, telimomab aritox, zolimomab aritox, abituzumab, intetumumab, alemtuzumab, tamtuvetmab, lorvotuzumab mertansine, itolizumab, cusatuzumab, vorsetuzumab mafodotin, milatuzumab, iladatuzumab vedotin, polatuzumab vedotin, galiximab, cibisatamab, zolbetuximab, naxitamab, tisotumab vedotin, olendalizumab, pamrevlumab, lacnotuzumab, cabiralizumab, emactuzumab, axatilimab, gimsilumab, lenzilumab, namilumab, tremelimumab, ulocuplumab, tepoditamab, rovalpituzumab tesirine, tarlatamab, demcizumab, navicixizumab, drozitumab, parsatuzumab, depatuxizumab mafodotin, modotuximab, carotuximab, adecatumumab, adecatumumab, oportuzumab monatox, solitomab, tucotuzumab celmoleukin, edrecolomab, catumaxomab, ifabotuzumab, fibatuzumab, zalutumumab, panitumumab, cetuximab, futuximab, imgatuzumab, laprituximab emtansine, matuzumab, necitumumab, nimotuzumab, tomuzotuximab, amivantamab, amivantamab, epitumomab cituxetan, sontuzumab, duligotuzumab, elgemtumab, lumretuzumab, patritumab, seribantumab, zenocutuzumab, sibrotuzumab, burosumab, aprutumab ixadotin, radretumab, pasotuxizumab, farletuzumab, mirvetuximab soravtansine, vantictumab, TRBS07, 3F8, dinutuximab, dinutuximab beta, ecromeximab, mitumomab, andecaliximab, capromab, codrituzumab, glembatumumab vedotin, talquetamab, talquetamab, trevogrumab, indusatumab vedotin, ficlatuzumab, rilotumumab, zatuximab, pentuzimab, pentuzimab, margetuximab, timigutuzumab, trastuzumab, trastuzumab duocarmazine, trastuzumab emtansine, gancotamab, pertuzumab, ertumaxomab, emibetuzumab, telisotuzumab, telisotuzumab vedotin, derlotuximab biotin, apolizumab, onartuzumab, bersanlimab, enlimomabpegol, rontalizumab, sifalimumab, talizumab, ganitumab, istiratumab, robatumumab, teprotumumab, figitumumab, ganitumab, istiratumab, robatumumab, teprotumumab, cixutumumab, dalotuzumab, xentuzumab, dusigitumab, canakinumab, ustekinumab, ustekinumab, ustekinumab, briakinumab, briakinumab, abrezekimab, lebrikizumab, romilkimab, TNX-650, tralokinumab, anrukinzumab, brodalumab, ixekizumab, netakimab, perakizumab, secukinumab, vunakizumab, afasevikumab, afasevikumab, bimekizumab, bimekizumab, remtolumab, bermekimab, lutikizumab, lutikizumab, gevokizumab, cergutuzumab amunaleukin, fletikumab, fezakinumab, brazikumab, guselkumab, mirikizumab, tildrakizumab, risankizumab, flotetuzumab, nemolizumab, pascolizumab, dupilumab, mepolizumab, reslizumab, clazakizumab, elsilimomab, olokizumab, sarilumab, siltuximab, sirukumab, vobarilizumab, tocilizumab, SA237, satralizumab, enokizumab, prezalizumab, natalizumab, abrilumab, abrilumab, vedolizumab, volociximab, tadocizumab, etaracizumab, etrolizumab, spesolimab, vatelizumab, erlizumab, lirilumab, relatlimab, cBR96-doxorubicinimmunoconjugate, odulimomab, efalizumab, ladiratuzumab vedotin, simtuzumab, samrotamab vedotin, aselizumab, lupartumab amadotin, imalumab, carlumab, imaprelimab, amatuximab, amatuximab, anetumab ravtansine, narnatumab, clivatuzumab tetraxetan, pemtumomab, gatipotuzumab, ensituximab, lemalesomab, sulesomab, enfortumab vedotin, racotumomab, monalizumab, brontictuzumab, tarextumab, vesencumab, oxelumab, gilvetmab, tislelizumab, dostarlimab, BCD-100, nivolumab, PDR001, pembrolizumab, pidilizumab, retifanlimab, spartalizumab, sintilimab, cemiplimab, olaratumab, tovetumab, rinucumab, atezolizumab, avelumab, durvalumab, lifastuzumab vedotin, bavituximab, acapatamab, capromab, rosopatamab, nezastomig, pasotuxizumab, pelgifatamab, voxalatamab, cofetuzumab pelidotin, denosumab, rosmantuzumab, cirmtuzumab, atinumab, indatuximab ravtansine, elotuzumab, sirtratumab vedotin, sonepcizumab, vandortuzumab vedotin, minretumomab, satumomab pendetide, maslimomab, ontuxizumab, tenatumomab, fresolimumab, metelimumab, lerdelimumab, tezepelumab, etigilimab, tiragotumab, placulumab, prezalumab, infliximab, nerelimomab, ozoralizumab, adalimumab, afelimomab, certolizumab pegol, golimumab, mapatumumab, conatumumab, lexatumumab, tigatuzumab, sacituzumab govitecan, votumumab, pogalizumab, letolizumab, pankomab, anatumomab mafenatox, enavatuzumab, flanvotumab, brolucizumab, ranibizumab, varisacumab, bevacizumab, faricimab, icrucumab, alacizumab pegol, ramucirumab, pritumumab, and onvatilimab.

[5565] In some aspects, the antigen binding polypeptides provided herein comprise a VH2 comprising a VH of an antibody selected from the group consisting of losatuxizumab vedotin, utomilumab, urelumab, oleclumab, naptumomab estafenatox, ascrinvacumab, pintumomab, tacatuzumab tetraxetan, nesvacumab, vanucizumab, timolumab, vapaliximab, vepalimomab, enapotamab vedotin, ianalumab, belimumab, tabalumab, tibulizumab, belantamab mafodotin, teclistamab, teclistamab, detumomab, nacolomab tafenatox, eculizumab, lendalizumab, pexelizumab, pozelimab, ravulizumab, tesidolumab, vilobclimab, abagovomab, igovomab, oregovomab, sofituzumab vedotin, cantuzumab mertansine, cantuzuma bravtansine, girentuximab, altumomab pentetate, arcitumomab, besilesomab, bertilimumab, plozalizumab, mogamulizumab, leronlimab, PRO140, rovelizumab, rovelizumab, talacotuzumab, benralizumab, tavolimab, vonlerolizumab, gavilimomab, ziralimumab, fanolesomab, ipilimumab, ruplizumab, toralizumab, dapirolizumab pegol, toralizumab, dapirolizumab pegol, ruplizumab, blinatumomab, inebilizumab, loncastuximab tesirine, SGN-CD19A, tafasitamab, taplitumomab paptox, XMAB-5574, Budoprutug, Obexelimab, duvortuxizumab, englumafusp alfa, Emfizatamab, zeripatamig, siplizumab, blontuvetmab, FBTA05, ibritumomab tiuxetan, obinutuzumab, ocaratuzumab, ocrelizumab, ofatumumab, rituximab, tositumomab, ublituximab, veltuzumab, divozilimab, eramkafusp alfa, ripertamab, zuberitamab, glofitamab, nofetumomab merpentan, samalizumab, imvotamab, odronextamab, plamotamab, bectumomab, inotuzumab ozogamicin, moxetumomab pasudotox, pinatuzumab vedotin, gomiliximab, lumiliximab, inolimomab, inolimomab, daclizumab, camidanluma btesirine, basiliximab, varlilumab, omburtamab, enoblituzumab, vopratclimab, lulizumabpegol, TGN1412, muromonab-CD3, otelixizumab, teplizumab, visilizumab, epcoritamab, epcoritamab, brentuximab vedotin, iratumumab, azintuxizumab vedotin, gemtuzumab ozogamicin, lintuzumab, vadastuximab talirine, naratuximab emtansine, otlertuzumab, lilotomab satetraxetan, tetulomab, daratumumab, isatuximab, foralumab, mosunetuzumab, mosunetuzumab, cedelizumab, ibalizumab, keliximab, priliximab, tregalizumab, zanolimumab, bleselumab, iscalimab, lucatumumab, ravagalimab, selicrelumab, teneliximab, vanalimab, abciximab, bivatuzumab, iomab-B, telimomab aritox, zolimomab aritox, abituzumab, intetumumab, alemtuzumab, tamtuvetmab, lorvotuzumab mertansine, itolizumab, cusatuzumab, vorsetuzumab mafodotin, milatuzumab, iladatuzumab vedotin, polatuzumab vedotin, galiximab, cibisatamab, zolbetuximab, naxitamab, tisotumab vedotin, olendalizumab, pamrevlumab, lacnotuzumab, cabiralizumab, emactuzumab, axatilimab, gimsilumab, lenzilumab, namilumab, tremelimumab, ulocuplumab, tepoditamab, rovalpituzumab tesirine, tarlatamab, demcizumab, navicixizumab, drozitumab, parsatuzumab, depatuxizumab mafodotin, modotuximab, carotuximab, adecatumumab, adecatumumab, oportuzumab monatox, solitomab, tucotuzumab celmoleukin, edrecolomab, catumaxomab, ifabotuzumab, fibatuzumab, zalutumumab, panitumumab, cetuximab, futuximab, imgatuzumab, laprituximab emtansine, matuzumab, necitumumab, nimotuzumab, tomuzotuximab, amivantamab, amivantamab, epitumomab cituxetan, sontuzumab, duligotuzumab, elgemtumab, lumretuzumab, patritumab, seribantumab, zenocutuzumab, sibrotuzumab, burosumab, aprutumab ixadotin, radretumab, pasotuxizumab, farletuzumab, mirvetuximab soravtansine, vantictumab, TRBS07, 3F8, dinutuximab, dinutuximab beta, ecromeximab, mitumomab, andecaliximab, capromab, codrituzumab, glembatumumab vedotin, talquetamab, talquetamab, trevogrumab, indusatumab vedotin, ficlatuzumab, rilotumumab, zatuximab, pentuzimab, pentuzimab, margetuximab, timigutuzumab, trastuzumab, trastuzumab duocarmazine, trastuzumab emtansine, gancotamab, pertuzumab, ertumaxomab, emibetuzumab, telisotuzumab, telisotuzumab vedotin, derlotuximab biotin, apolizumab, onartuzumab, bersanlimab, enlimomabpegol, rontalizumab, sifalimumab, talizumab, ganitumab, istiratumab, robatumumab, teprotumumab, figitumumab, ganitumab, istiratumab, robatumumab, teprotumumab, cixutumumab, dalotuzumab, xentuzumab, dusigitumab, canakinumab, ustekinumab, ustekinumab, ustekinumab, briakinumab, briakinumab, abrezekimab, lebrikizumab, romilkimab, TNX-650, tralokinumab, anrukinzumab, brodalumab, ixekizumab, netakimab, perakizumab, secukinumab, vunakizumab, afasevikumab, afasevikumab, bimekizumab, bimekizumab, remtolumab, bermekimab, lutikizumab, lutikizumab, gevokizumab, cergutuzumab amunaleukin, fletikumab, fezakinumab, brazikumab, guselkumab, mirikizumab, tildrakizumab, risankizumab, flotetuzumab, nemolizumab, pascolizumab, dupilumab, mepolizumab, reslizumab, clazakizumab, elsilimomab, olokizumab, sarilumab, siltuximab, sirukumab, vobarilizumab, tocilizumab, SA237, satralizumab, enokizumab, prezalizumab, natalizumab, abrilumab, abrilumab, vedolizumab, volociximab, tadocizumab, etaracizumab, etrolizumab, spesolimab, vatelizumab, erlizumab, lirilumab, relatlimab, cBR96-doxorubicinimmunoconjugate, odulimomab, efalizumab, ladiratuzumab vedotin, simtuzumab, samrotamab vedotin, aselizumab, lupartumab amadotin, imalumab, carlumab, imaprelimab, amatuximab, amatuximab, anetumab ravtansine, narnatumab, clivatuzumab tetraxetan, pemtumomab, gatipotuzumab, ensituximab, lemalesomab, sulesomab, enfortumab vedotin, racotumomab, monalizumab, brontictuzumab, tarextumab, vesencumab, oxelumab, gilvetmab, tislelizumab, dostarlimab, BCD-100, nivolumab, PDR001, pembrolizumab, pidilizumab, retifanlimab, spartalizumab, sintilimab, cemiplimab, olaratumab, tovetumab, rinucumab, atezolizumab, avelumab, durvalumab, lifastuzumab vedotin, bavituximab, acapatamab, capromab, rosopatamab, nezastomig, pasotuxizumab, pelgifatamab, voxalatamab, cofetuzumab pelidotin, denosumab, rosmantuzumab, cirmtuzumab, atinumab, indatuximab ravtansine, elotuzumab, sirtratumab vedotin, sonepcizumab, vandortuzumab vedotin, minretumomab, satumomab pendetide, maslimomab, ontuxizumab, tenatumomab, fresolimumab, metelimumab, lerdelimumab, tezepelumab, etigilimab, tiragotumab, placulumab, prezalumab, infliximab, nerelimomab, ozoralizumab, adalimumab, afelimomab, certolizumab pegol, golimumab, mapatumumab, conatumumab, lexatumumab, tigatuzumab, sacituzumab govitecan, votumumab, pogalizumab, letolizumab, pankomab, anatumomab mafenatox, enavatuzumab, flanvotumab, brolucizumab, ranibizumab, varisacumab, bevacizumab, faricimab, icrucumab, alacizumab pegol, ramucirumab, pritumumab, and onvatilimab.

[5566] In some aspects, the antigen binding polypeptides provided herein comprise a VL1 comprising (i) a complementarity determining region (CDR) 1 having an amino acid sequence that is at least 65%, at least 70%, at least 75%, at least 80%, at least 85%, at least 90%, at least 95%, at least 99%, or 100% identical to any one of SEQ ID NOs: 1096, 1103, 1110, 1120, 1127, 1134, 1141, 1148, 1155, 1162, 1169, 1174, 1181, 1188, 1199, 1211, 1221, 1228, 1235, 1247, 1254, 1261, 1266, 1271, 1278, 1285, 1292, 1299, 1306, 1313, 1319, 1326, 1339, 1352, 1359, 1366, 1373, 1382, 1394, 1401, 1408, 1414, 1421, 1428, 1441, 1448, 1455, 1461, 1468, 1475, 1488, 1495, 1508, 1519, 1526, 1531, 1538, 1544, 1556, 1568, 1574, 1581, 1594, 1601, 1608, 1615, 1622, 1629, 1636, 1643, 1650, 1657, 1672, 1679, 1689, 1697, 1708, 1715, 1718, 1723, 1727, 1738, 1743, 1752, 1761, 1763, 1769, 1776, and 1786; (ii) a CDR2 having an amino acid sequence that is at least 65%, at least 70%, at least 75%, at least 80%, at least 85%, at least 90%, at least 95%, at least 99%, or 100% identical to any one of SEQ ID NOs: 1200, 1212, 1680, 1690, 1698, 1709, 1728, 1739, 1744, 1753, 1770, and 1777; or at least 65%, at least 70%, at least 75%, at least 80%, at least 85%, at least 90%, at least 95%, at least 99%, or 100% identical to any one of amino acid sequences AAS, APS, AT, ATS, DAS, DDG, DDS, DT, DTS, DVS, EAS, FTS, GAF, GAN, GAS, GAT, GIS, GKN, GNS, HTS, KVS, LAS, LGS, LVS, NAK, NTN, QMS, RMS, RTS, SAS, TTS, WAS, YAS, YAT, YGS, YRS, and YTS; and (iii) a CDR3 having an amino acid sequence that is at least 65%, at least 70%, at least 75%, at least 80%, at least 85%, at least 90%, at least 95%, at least 99%, or 100% identical to any one of SEQ ID NOs: 1097, 1104, 1111, 1121, 1128, 1135, 1142, 1149, 1156, 1163, 1170, 1175, 1182, 1189, 1195, 1201, 1207, 1213, 1222, 1229, 1236, 2009, 1248, 1255, 1262, 1267, 1272, 1279, 1286, 1293, 1300, 1307, 1320, 1327, 1333, 1340, 1346, 1353, 1360, 1367, 1374, 1383, 1389, 1395, 1402, 1409, 1415, 1422, 1429, 1435, 1442, 1449, 1456, 1462, 1469, 1476, 1482, 1489, 1496, 1502, 1509, 1513, 1520, 1532, 1539, 1545, 1557, 1562, 1569, 1575, 1582, 1588, 1595, 1602, 1609, 1616, 1623, 1630, 1637, 1644, 1651, 1658, 1663, 1673, 1681, 1691, 1699, 1710, 1729, 1735, 1745, 1751, 1754, 1778, 1787, and 1976.

[5567] In some aspects, the antigen binding polypeptides provided herein comprise a VL2 comprising (i) a complementarity determining region (CDR) 1 having an amino acid sequence that is at least 65%, at least 70%, at least 75%, at least 80%, at least 85%, at least 90%, at least 95%, at least 99%, or 100% identical to any one of SEQ ID NOs: 1096, 1103, 1110, 1120, 1127, 1134, 1141, 1148, 1155, 1162, 1169, 1174, 1181, 1188, 1199, 1211, 1221, 1228, 1235, 1247, 1254, 1261, 1266, 1271, 1278, 1285, 1292, 1299, 1306, 1313, 1319, 1326, 1339, 1352, 1359, 1366, 1373, 1382, 1394, 1401, 1408, 1414, 1421, 1428, 1441, 1448, 1455, 1461, 1468, 1475, 1488, 1495, 1508, 1519, 1526, 1531, 1538, 1544, 1556, 1568, 1574, 1581, 1594, 1601, 1608, 1615, 1622, 1629, 1636, 1643, 1650, 1657, 1672, 1679, 1689, 1697, 1708, 1715, 1718, 1723, 1727, 1738, 1743, 1752, 1761, 1763, 1769, 1776, and 1786; (ii) a CDR2 having an amino acid sequence that is at least 65%, at least 70%, at least 75%, at least 80%, at least 85%, at least 90%, at least 95%, at least 99%, or 100% identical to any one of SEQ ID NOs: 1200, 1212, 1680, 1690, 1698, 1709, 1728, 1739, 1744, 1753, 1770, and 1777; or at least 65%, at least 70%, at least 75%, at least 80%, at least 85%, at least 90%, at least 95%, at least 99%, or 100% identical to any one of amino acid sequences AAS, APS, AT, ATS, DAS, DDG, DDS, DT, DTS, DVS, EAS, FTS, GAF, GAN, GAS, GAT, GIS, GKN, GNS, HTS, KVS, LAS, LGS, LVS, NAK, NTN, QMS, RMS, RTS, SAS, TTS, WAS, YAS, YAT, YGS, YRS, and YTS; and (iii) a CDR3 having an amino acid sequence that is at least 65%, at least 70%, at least 75%, at least 80%, at least 85%, at least 90%, at least 95%, at least 99%, or 100% identical to any one of SEQ ID NOs: 1097, 1104, 1111, 1121, 1128, 1135, 1142, 1149, 1156, 1163, 1170, 1175, 1182, 1189, 1195, 1201, 1207, 1213, 1222, 1229, 1236, 2009, 1248, 1255, 1262, 1267, 1272, 1279, 1286, 1293, 1300, 1307, 1320, 1327, 1333, 1340, 1346, 1353, 1360, 1367, 1374, 1383, 1389, 1395, 1402, 1409, 1415, 1422, 1429, 1435, 1442, 1449, 1456, 1462, 1469, 1476, 1482, 1489, 1496, 1502, 1509, 1513, 1520, 1532, 1539, 1545, 1557, 1562, 1569, 1575, 1582, 1588, 1595, 1602, 1609, 1616, 1623, 1630, 1637, 1644, 1651, 1658, 1663, 1673, 1681, 1691, 1699, 1710, 1729, 1735, 1745, 1751, 1754, 1778, 1787, and 1976.

[5568] In some aspects, the antigen binding polypeptides provided herein comprise a VH1 comprising (i) a complementarity determining region (CDR) 1 having an amino acid sequence that is at least 65%, at least 70%, at least 75%, at least 80%, at least 85%, at least 90%, at least 95%, at least 99%, or 100% identical to any one of SEQ ID NOs: 1099, 1106, 1113, 1117, 1123, 1130, 1137, 1144, 1151, 1158, 1165, 1177, 1184, 1191, 1203, 1215, 1224, 1231, 1238, 1243, 1250, 1257, 1264, 1274, 1281, 1288, 1295, 1302, 1309, 1315, 1322, 1329, 1335, 1342, 1348, 1355, 1362, 1369, 1376, 1385, 1397, 1404, 1417, 1424, 1431, 1437, 1444, 1451, 1458, 1464, 1471, 1478, 1484, 1491, 1498, 1504, 1511, 1515, 1522, 1534, 1547, 1552, 1564, 1577, 1584, 1590, 1597, 1604, 1611, 1618, 1625, 1632, 1639, 1646, 1653, 1660, 1665, 1675, 1683, 1693, 1701, 1705, 1716, 1719, 1731, 1736, 1747, 1756, 1772, 1780, and 1789; (ii) a CDR2 having an amino acid sequence that is at least 65%, at least 70%, at least 75%, at least 80%, at least 85%, at least 90%, at least 95%, at least 99%, or 100% identical to any one of SEQ ID NOs: 1100, 1107, 1114, 1118, 1124, 1131, 1138, 1145, 1152, 1159, 1166, 1178, 1185, 1192, 1204, 1216, 1225, 1232, 1239, 1244, 1251, 1258, 1275, 1282, 1289, 1296, 1303, 1310, 1316, 1323, 1330, 1336, 1343, 1349, 1356, 1363, 1370, 1377, 1386, 1391, 1398, 1405, 1411, 1418, 1425, 1432, 1438, 1445, 1452, 1465, 1472, 1479, 1485, 1492, 1499, 1505, 1516, 1523, 1528, 1535, 1541, 1548, 1553, 1559, 1565, 1571, 1578, 1585, 1591, 1598, 1605, 1612, 1619, 1626, 1633, 1640, 1647, 1654, 1666, 1676, 1684, 1687, 1694, 1702, 1706, 1712, 1717, 1720, 1725, 1732, 1737, 1741, 1748, 1757, 1767, 1773, 1781, and 1790; and (iii) a CDR3 having an amino acid sequence that is at least 65%, at least 70%, at least 75%, at least 80%, at least 85%, at least 90%, at least 95%, at least 99%, or 100% identical to any one of SEQ ID NOs: 1101, 1108, 1115, 1125, 1132, 1139, 1146, 1153, 1160, 1167, 1172, 1179, 1186, 1193, 1197, 1205, 1209, 1217, 1226, 1233, 1240, 1245, 1252, 1259, 1269, 1276, 1283, 1290, 1297, 1304, 1311, 1317, 1324, 1331, 1337, 1344, 1350, 1357, 1364, 1371, 1378, 1387, 1392, 1399, 1406, 1412, 1419, 1426, 1433, 1439, 1446, 1453, 1459, 1466, 1473, 1480, 1486, 1493, 1500, 1506, 1517, 1524, 1529, 1536, 1542, 1549, 1554, 1560, 1566, 1572, 1579, 1586, 1592, 1599, 1606, 1613, 1620, 1627, 1634, 1641, 1648, 1655, 1661, 1667, 1670, 1677, 1685, 1688, 1695, 1703, 1707, 1713, 1733, 1749, 1758, 1762, 1774, 1782, 1791, and 1975.

[5569] In some aspects, the antigen binding polypeptides provided herein comprise a VH2 comprising (i) a complementarity determining region (CDR) 1 having an amino acid sequence that is at least 65%, at least 70%, at least 75%, at least 80%, at least 85%, at least 90%, at least 95%, at least 99%, or 100% identical to any one of SEQ ID NOs: 1099, 1106, 1113, 1117, 1123, 1130, 1137, 1144, 1151, 1158, 1165, 1177, 1184, 1191, 1203, 1215, 1224, 1231, 1238, 1243, 1250, 1257, 1264, 1274, 1281, 1288, 1295, 1302, 1309, 1315, 1322, 1329, 1335, 1342, 1348, 1355, 1362, 1369, 1376, 1385, 1397, 1404, 1417, 1424, 1431, 1437, 1444, 1451, 1458, 1464, 1471, 1478, 1484, 1491, 1498, 1504, 1511, 1515, 1522, 1534, 1547, 1552, 1564, 1577, 1584, 1590, 1597, 1604, 1611, 1618, 1625, 1632, 1639, 1646, 1653, 1660, 1665, 1675, 1683, 1693, 1701, 1705, 1716, 1719, 1731, 1736, 1747, 1756, 1772, 1780, and 1789; (ii) a CDR2 having an amino acid sequence that is at least 65%, at least 70%, at least 75%, at least 80%, at least 85%, at least 90%, at least 95%, at least 99%, or 100% identical to any one of SEQ ID NOs: 1100, 1107, 1114, 1118, 1124, 1131, 1138, 1145, 1152, 1159, 1166, 1178, 1185, 1192, 1204, 1216, 1225, 1232, 1239, 1244, 1251, 1258, 1275, 1282, 1289, 1296, 1303, 1310, 1316, 1323, 1330, 1336, 1343, 1349, 1356, 1363, 1370, 1377, 1386, 1391, 1398, 1405, 1411, 1418, 1425, 1432, 1438, 1445, 1452, 1465, 1472, 1479, 1485, 1492, 1499, 1505, 1516, 1523, 1528, 1535, 1541, 1548, 1553, 1559, 1565, 1571, 1578, 1585, 1591, 1598, 1605, 1612, 1619, 1626, 1633, 1640, 1647, 1654, 1666, 1676, 1684, 1687, 1694, 1702, 1706, 1712, 1717, 1720, 1725, 1732, 1737, 1741, 1748, 1757, 1767, 1773, 1781, and 1790; and (iii) a CDR3 having an amino acid sequence that is at least 65%, at least 70%, at least 75%, at least 80%, at least 85%, at least 90%, at least 95%, at least 99%, or 100% identical to any one of SEQ ID NOs: 1101, 1108, 1115, 1125, 1132, 1139, 1146, 1153, 1160, 1167, 1172, 1179, 1186, 1193, 1197, 1205, 1209, 1217, 1226, 1233, 1240, 1245, 1252, 1259, 1269, 1276, 1283, 1290, 1297, 1304, 1311, 1317, 1324, 1331, 1337, 1344, 1350, 1357, 1364, 1371, 1378, 1387, 1392, 1399, 1406, 1412, 1419, 1426, 1433, 1439, 1446, 1453, 1459, 1466, 1473, 1480, 1486, 1493, 1500, 1506, 1517, 1524, 1529, 1536, 1542, 1549, 1554, 1560, 1566, 1572, 1579, 1586, 1592, 1599, 1606, 1613, 1620, 1627, 1634, 1641, 1648, 1655, 1661, 1667, 1670, 1677, 1685, 1688, 1695, 1703, 1707, 1713, 1733, 1749, 1758, 1762, 1774, 1782, 1791, and 1975.

[5570] In some aspects, the antigen binding polypeptides provided herein comprise a VL1 comprising an amino acid sequence that is at least 65%, at least 70%, at least 75%, at least 80%, at least 85%, at least 90%, at least 95%, at least 99%, or 100% identical to any one of SEQ ID NOs: 1098, 1105, 1112, 1122, 1129, 1136, 1143, 1150, 1157, 1164, 1171, 1176, 1183, 1190, 1196, 1202, 1208, 1214, 1219, 1223, 1230, 1237, 1242, 1249, 1256, 1263, 1268, 1273, 1280, 1287, 1294, 1301, 1308, 1314, 1321, 1328, 1334, 1341, 1347, 1354, 1361, 1368, 1375, 1380, 1384, 1390, 1396, 1403, 1410, 1416, 1423, 1430, 1436, 1443, 1450, 1457, 1463, 1470, 1477, 1483, 1490, 1497, 1503, 1510, 1514, 1521, 1527, 1533, 1540, 1546, 1551, 1558, 1563, 1570, 1576, 1583, 1589, 1596, 1603, 1610, 1617, 1624, 1631, 1638, 1645, 1652, 1659, 1664, 1669, 1674, 1682, 1692, 1700, 1711, 1721, 1724, 1730, 1740, 1746, 1755, 1764, 1766, 1771, 1779, 1784, and 1788.

[5571] In some aspects, the antigen binding polypeptides provided herein comprise a VL2 comprising an amino acid sequence that is at least 65%, at least 70%, at least 75%, at least 80%, at least 85%, at least 90%, at least 95%, at least 99%, or 100% identical to any one of SEQ ID NOs: 1098, 1105, 1112, 1122, 1129, 1136, 1143, 1150, 1157, 1164, 1171, 1176, 1183, 1190, 1196, 1202, 1208, 1214, 1219, 1223, 1230, 1237, 1242, 1249, 1256, 1263, 1268, 1273, 1280, 1287, 1294, 1301, 1308, 1314, 1321, 1328, 1334, 1341, 1347, 1354, 1361, 1368, 1375, 1380, 1384, 1390, 1396, 1403, 1410, 1416, 1423, 1430, 1436, 1443, 1450, 1457, 1463, 1470, 1477, 1483, 1490, 1497, 1503, 1510, 1514, 1521, 1527, 1533, 1540, 1546, 1551, 1558, 1563, 1570, 1576, 1583, 1589, 1596, 1603, 1610, 1617, 1624, 1631, 1638, 1645, 1652, 1659, 1664, 1669, 1674, 1682, 1692, 1700, 1711, 1721, 1724, 1730, 1740, 1746, 1755, 1764, 1766, 1771, 1779, 1784, and 1788.

[5572] In some aspects, the antigen binding polypeptides provided herein comprise a VH1 comprising an amino acid sequence that is at least 65%, at least 70%, at least 75%, at least 80%, at least 85%, at least 90%, at least 95%, at least 99%, or 100% identical to any one of SEQ ID NOs: 1102, 1109, 1116, 1119, 1126, 1133, 1140, 1147, 1154, 1161, 1168, 1173, 1180, 1187, 1194, 1198, 1206, 1210, 1218, 1220, 1227, 1234, 1241, 1246, 1253, 1260, 1265, 1270, 1277, 1284, 1291, 1298, 1305, 1312, 1318, 1325, 1332, 1338, 1345, 1351, 1358, 1365, 1372, 1379, 1381, 1388, 1393, 1400, 1407, 1413, 1420, 1427, 1434, 1440, 1447, 1454, 1460, 1467, 1474, 1481, 1487, 1494, 1501, 1507, 1512, 1518, 1525, 1530, 1537, 1543, 1550, 1555, 1561, 1567, 1573, 1580, 1587, 1593, 1600, 1607, 1614, 1621, 1628, 1635, 1642, 1649, 1656, 1662, 1668, 1671, 1678, 1686, 1696, 1704, 1714, 1722, 1726, 1734, 1742, 1750, 1759, 1760, 1765, 1768, 1775, 1783, 1785, and 1792.

[5573] In some aspects, the antigen binding polypeptides provided herein comprise a VH2 comprising an amino acid sequence that is at least 65%, at least 70%, at least 75%, at least 80%, at least 85%, at least 90%, at least 95%, at least 99%, or 100% identical to any one of SEQ ID NOs: 1102, 1109, 1116, 1119, 1126, 1133, 1140, 1147, 1154, 1161, 1168, 1173, 1180, 1187, 1194, 1198, 1206, 1210, 1218, 1220, 1227, 1234, 1241, 1246, 1253, 1260, 1265, 1270, 1277, 1284, 1291, 1298, 1305, 1312, 1318, 1325, 1332, 1338, 1345, 1351, 1358, 1365, 1372, 1379, 1381, 1388, 1393, 1400, 1407, 1413, 1420, 1427, 1434, 1440, 1447, 1454, 1460, 1467, 1474, 1481, 1487, 1494, 1501, 1507, 1512, 1518, 1525, 1530, 1537, 1543, 1550, 1555, 1561, 1567, 1573, 1580, 1587, 1593, 1600, 1607, 1614, 1621, 1628, 1635, 1642, 1649, 1656, 1662, 1668, 1671, 1678, 1686, 1696, 1704, 1714, 1722, 1726, 1734, 1742, 1750, 1759, 1760, 1765, 1768, 1775, 1783, 1785, and 1792.

[5574] In some aspects, the infectious disease antigen that is not a sarbecovirus antigen is:
[5575] (i) a viral antigen elected from the group consisting of an influenza virus (A, B, C) antigen (e.g., influenza virus envelope proteins, for example, influenza virus neuraminidase (NA, N1, N2, N3, N4, N5, N6, N7, N8, N9, N10, N11), influenza virus hemagglutinin (H1, H2, H3, H4, H5, H6, H7, H8, H9, H10, H11, H12, H13, H14, H15, H16, H17, H18) (e.g., H1N1, H3N2, H5N1, H7N9, H9N2), Yamagata virus antigen, Victoria virus antigen, influenza virus structural proteins (e.g., M1, M2, capsid protein), influenza virus functional proteins (e.g., ribonucleoprotein (NP), primary interferon antagonist (NS1), nuclear export protein (NEP)) influenza virus accessory proteins (e.g., PB2, PB1, or PA), for example, anti-HA, anti-NA, anti-H1, anti-H3, anti-H5, anti-H7, anti-H9, anti-N1, anti-N2, anti-N9, anti-H1N1, anti-H3N2, anti-H5N1, anti-H7N9, anti-H9N2, anti-A protein, anti-B protein, anti-stem, anti-M1, anti-M2, anti-capsid, anti-NP, anti-NS1, anti-NEP, anti-PB1, anti-PB2, and anti-PA); a swine influenza virus antigen (e.g., swine flu hemagglutinin, swine flu neuraminidase); a classical swine fever (CSF) (hog colera) virus antigen; an equine influenza virus antigen (e.g., equine influenza virus typeA/Miami 63 neuraminidase, equine influenza virus type A/Kentucky 81 neuraminidase, equine influenza virus type A/Alaska 91 neuraminidase); parainfluenza viruses (e.g., bovine parainfluenza virus, bovine parainfluenza virus type 3 fusion protein, bovine parainfluenza virus type 3 hemagglutinin neuraminidase); a (human) respiratory syncytial virus (RSV)-viral antigen (e.g., RSV F glycoprotein, RSV G glycoprotein, F protein of respiratory syncytial virus, RSV fusion glycoprotein); a herpes simplex virus (HSV) antigen (e.g., herpes simplex virus glycoproteins gB, gC, gD, and gE, herpes simplex virus type 2 glycoprotein gB); a Dengue virus antigen (e.g., core protein, matrix protein, glycoprotein E of Dengue virus, or other protein of Dengue virus); a measles virus antigen (e.g., hemagglutinin); a poliovirus 1 antigen (e.g., poliovirus 1 proteins (VP1)), a HIV-1 antigen and HIV-2 antigen (e.g., HIV envelope proteins (e.g., envelope glycoproteins of HIV 1, HIV envelope glycoprotein (Env), HIV envelope glycoprotein gp160, HIV envelope surface glycoprotein gp120, HIV transmembrane envelope protein gp41), HIV structural proteins (e.g., p17, p24, p7, p55), HIV functional proteins (e.g., p66, HIV-1 protease (PR), p31), HIV accessory proteins (e.g., Nef, Tat, Rev, Vif, Vpr, Vpu)); a hepatitis virus (HAV, HBV, HCV, HDV, HEV) antigen (e.g., hepatitis B virus antigen (e.g., surface antigen, core protein), hepatitis C virus antigen (e.g., glycoprotein E1E2)); a rabies virus (Rabies lyssavirus) antigen (e.g., rabies virus glycoprotein, e.g., G glycoprotein); a pseudorabies virus antigen (e.g., pseudorabies virus g50 (gpD), pseudorabies virus II (gpB), pseudorabies virus III (gpC), pseudorabies virus glycoprotein H, pseudorabies virus glycoprotein E); a papillomavirus (HPV) antigen; an Epstein-Barr virus (EBV) (Gamma herpes virus 4) antigen; a Herpes simplex virus (HSV, HSV-1, HSV-2) antigen (e.g., human herpes virus 8, equine herpes virus antigen (e.g., type 1 glycoprotein B, type 1 glycoprotein D)); a Herpes zoster antigen; a Cytomegalovirus antigen (e.g., cytomegalovirus glycoprotein B); a Zika virus antigen; a Transmissible gastroenteritis virus (TGEV) antigen (e.g., glycoprotein 195, matrix protein); a rotavirus antigen (e.g., swine rotavirus glycoprotein 38); a parvovirus antigen (e.g., swine parvovirus capsid protein); a filoviruses (e.g., Marburg and Ebola) antigen; a bovine viral diarrhea virus antigen (e.g., glycoprotein 55); a Newcastle disease virus antigen (hemagglutinin, neuraminidase); an orthopoxvirus antigen; a coxsackievirus antigen and aphthovirus (foot and mouth disease virus) antigen; a yellow fever virus antigen; a Chikunga virus antigen; a Nipah virus antigen; an African swine fever virus antigen; a rhinotracheitis virus antigen (e.g., infectious bovine rhinotracheitis virus glycoprotein E, glycoprotein G); a laryngotracheitis virus antigen (e.g., infectious laryngotracheitis virus glycoprotein G or glycoprotein I); a La Crosse virus antigen (e.g., La Crosse virus glycoprotein); a neonatal calf diarrhoea virus antigen; a Venezuelan equine encephalomyelitis virus antigen; a punta toro virus antigen; a murine leukemia virus antigen; a mouse mammary tumor virus antigen; a bovine respiratory syncytial virus antigen (e.g., bovine respiratory syncytial virus attachment protein (BRSV G), bovine respiratory syncytial virus fusion protein (BRSV F), bovine respiratory syncytial virus nucleocapsid protein (BRSVN)); a bovine E viral diarrhoea virus antigen (e.g., glycoprotein 48 and glycoprotein 53); a metapneumovirus (HMPV) antigen; and an Ebola virus antigen (e.g., ebolavirus glycoprotein, e.g., Zaire ebolavirus glycoprotein); or
[5576] (ii) a bacterial or parasite antigen selected from the group consisting of a Plasmodium (e.g., Plasmodium falciparum, Plasmodium vivax, Plasmodium malariae, Plasmodium ovale, Plasmodium knowlesi) antigen, a Streptococcus (e.g., Streptococcus pneumoniae. Streptococcus pyogenes, Streptococcus agalactiae, Streptococcus mutans, Streptococcus viridans, Streptococcus anginosus, Streptococcus intermedius, Streptococcus constellatus) antigen (e.g., 24M epitope), a Neisseria gonorrhoeae antigen (e.g., gonococcal pilin), a Corynebacterium antigen (e.g., Corynebacterium diphtheria (diptheria toxin), Corynebacterium ulcerans. Corynebacterium pseudotuberculosis), Mycobacterium tuberculosis antigens, Brachyspira hyodysenteriae (Serpulina hydodysenteriae) antigen (e.g., Serpulina hydodysenteriae protective antigen), a Chlamydia antigen (e.g., Chlamydia trachomatis) (e.g., MOMP and PorB), a Mycoplasma sp. (e.g., Mycoplasma genitalium, Mycoplasma hyopneumoniae, Mycoplasma pneumonia) antigen, a Staphylococcus (e.g., Staphylococcus aureus, coagulase-negative staphylococci (CoNS), Staphylococcus aureus alpha toxin, Staphylococcus aureus bi-component leucocidin) antigen, a Klebsiella sp. antigen, an Escherichia coli antigen (e.g., E. coli shiga toxin type-2, E. coli shiga toxin type-1), a Bacillus sp. (e.g., Bacillus anthracis, e.g., Bacillus anthracis anthrax) antigen, a Pseudomonas aeruginosa antigen (e.g., Pseudomonas aeruginosa type III secretion system), an Enterococcus sp. antigen, an Enterobacter sp. antigen, a Proteus sp. antigen, an Actinobacter sp. antigen, a Mycobacterium avium (Mycobacterium avium complex (MAC)) antigen, a Salmonella bacteria antigen, a Clostridium difficile antigen, a Toxoplasma (e.g., Toxoplasma gondii) antigen, a Histoplasma antigen, a Candida antigen, a Coccidioides antigen, a Cryptococcus antigen, a Cryptosporidium antigen, and a Cystoisospora (e.g., Cystoisospora belli) antigen, and another antigen (e.g., endotoxins, lymphotoxins (e.g., lymphotoxin alpha LTA), phosphatidylserine, Hsp90, CCR5, lipoteichoic acid, clumping factor A).

[5577] In some aspects, the antigen binding polypeptides provided herein comprise a VL1 comprising a light chain complementarity determining region 1 (LCDR1), LCDR2, and/or LCDR3 of an antibody selected from the group consisting of libivirumab, rmab, rivabazumab pegol, setoxaximab, suvizumab, suvratoxumab, sevirumab, pritoxaximab, porgaviximab, REGN-EB3, obiltoxaximab, gedivumab, foravirumab, larcaviximab, motavizumab, palivizumab, rafivirumab, regavirumab, tuvirumab, cosfroviximab, felvizumab, atidortoxumab, edobacomab, nebacumab, pateclizumab, raxibacumab, urtoxazumab, tosatoxumab, berlimatoxumab, CR6261, diridavumab, firivumab, lesofavumab, navivumab, exbivirumab, lenvervimab, bavituximab, bezlotoxumab, efungumab, leronlimab, nirsevimab, pagibaximab, panobacumab, tefibazumab, ansuvimab, atoltivimab, maftivimab, and odesivimab.

[5578] In some aspects, the antigen binding polypeptides provided herein comprise a VL2 comprising a light chain complementarity determining region 1 (LCDR1), LCDR2, and/or LCDR3 of an antibody selected from the group consisting of libivirumab, rmab, rivabazumab pegol, setoxaximab, suvizumab, suvratoxumab, sevirumab, pritoxaximab, porgaviximab, REGN-EB3, obiltoxaximab, gedivumab, foravirumab, larcaviximab, motavizumab, palivizumab, rafivirumab, regavirumab, tuvirumab, cosfroviximab, felvizumab, atidortoxumab, edobacomab, nebacumab, pateclizumab, raxibacumab, urtoxazumab, tosatoxumab, berlimatoxumab, CR6261, diridavumab, firivumab, lesofavumab, navivumab, exbivirumab, lenvervimab, bavituximab, bezlotoxumab, efungumab, leronlimab, nirsevimab, pagibaximab, panobacumab, tefibazumab, ansuvimab, atoltivimab, maftivimab, and odesivimab.

[5579] In some aspects, the antigen binding polypeptides provided herein comprise a VH1 comprising a heavy chain complementarity determining region 1 (HCDR1), HCDR2, and/or HCDR3 of an antibody selected from the group consisting of libivirumab, rmab, rivabazumab pegol, setoxaximab, suvizumab, suvratoxumab, sevirumab, pritoxaximab, porgaviximab, REGN-EB3, obiltoxaximab, gedivumab, foravirumab, larcaviximab, motavizumab, palivizumab, rafivirumab, regavirumab, tuvirumab, cosfroviximab, felvizumab, atidortoxumab, edobacomab, nebacumab, pateclizumab, raxibacumab, urtoxazumab, tosatoxumab, berlimatoxumab, CR6261, diridavumab, firivumab, lesofavumab, navivumab, exbivirumab, lenvervimab, bavituximab, bezlotoxumab, efungumab, leronlimab, nirsevimab, pagibaximab, panobacumab, tefibazumab, ansuvimab, atoltivimab, maftivimab, and odesivimab.

[5580] In some aspects, the antigen binding polypeptides provided herein comprise a VH2 comprising a heavy chain complementarity determining region 1 (HCDR1), HCDR2, and/or HCDR3 of an antibody selected from the group consisting of libivirumab, rmab, rivabazumab pegol, setoxaximab, suvizumab, suvratoxumab, sevirumab, pritoxaximab, porgaviximab, REGN-EB3, obiltoxaximab, gedivumab, foravirumab, larcaviximab, motavizumab, palivizumab, rafivirumab, regavirumab, tuvirumab, cosfroviximab, felvizumab, atidortoxumab, edobacomab, nebacumab, pateclizumab, raxibacumab, urtoxazumab, tosatoxumab, berlimatoxumab, CR6261, diridavumab, firivumab, lesofavumab, navivumab, exbivirumab, lenvervimab, bavituximab, bezlotoxumab, efungumab, leronlimab, nirsevimab, pagibaximab, panobacumab, tefibazumab, ansuvimab, atoltivimab, maftivimab, and odesivimab.

[5581] In some aspects, the antigen binding polypeptides provided herein comprise a VL1 comprising a VL of an antibody selected from the group consisting of libivirumab, rmab, rivabazumab pegol, setoxaximab, suvizumab, suvratoxumab, sevirumab, pritoxaximab, porgaviximab, REGN-EB3, obiltoxaximab, gedivumab, foravirumab, larcaviximab, motavizumab, palivizumab, rafivirumab, regavirumab, tuvirumab, cosfroviximab, felvizumab, atidortoxumab, edobacomab, nebacumab, pateclizumab, raxibacumab, urtoxazumab, tosatoxumab, berlimatoxumab, CR6261, diridavumab, firivumab, lesofavumab, navivumab, exbivirumab, lenvervimab, bavituximab, bezlotoxumab, efungumab, leronlimab, nirsevimab, pagibaximab, panobacumab, tefibazumab, ansuvimab, atoltivimab, maftivimab, and odesivimab.

[5582] In some aspects, the antigen binding polypeptides provided herein comprise a VL2 comprising a VL of an antibody selected from the group consisting of libivirumab, rmab, rivabazumab pegol, setoxaximab, suvizumab, suvratoxumab, sevirumab, pritoxaximab, porgaviximab, REGN-EB3, obiltoxaximab, gedivumab, foravirumab, larcaviximab, motavizumab, palivizumab, rafivirumab, regavirumab, tuvirumab, cosfroviximab, felvizumab, atidortoxumab, edobacomab, nebacumab, pateclizumab, raxibacumab, urtoxazumab, tosatoxumab, berlimatoxumab, CR6261, diridavumab, firivumab, lesofavumab, navivumab, exbivirumab, lenvervimab, bavituximab, bezlotoxumab, efungumab, leronlimab, nirsevimab, pagibaximab, panobacumab, tefibazumab, ansuvimab, atoltivimab, maftivimab, and odesivimab.

[5583] In some aspects, the antigen binding polypeptides provided herein comprise a VH1 comprising a VH of an antibody selected from the group consisting of libivirumab, rmab, rivabazumab pegol, setoxaximab, suvizumab, suvratoxumab, sevirumab, pritoxaximab, porgaviximab, REGN-EB3, obiltoxaximab, gedivumab, foravirumab, larcaviximab, motavizumab, palivizumab, rafivirumab, regavirumab, tuvirumab, cosfroviximab, felvizumab, atidortoxumab, edobacomab, nebacumab, pateclizumab, raxibacumab, urtoxazumab, tosatoxumab, berlimatoxumab, CR6261, diridavumab, firivumab, lesofavumab, navivumab, exbivirumab, lenvervimab, bavituximab, bezlotoxumab, efungumab, leronlimab, nirsevimab, pagibaximab, panobacumab, tefibazumab, ansuvimab, atoltivimab, maftivimab, and odesivimab.

[5584] In some aspects, the antigen binding polypeptides provided herein comprise a VH2 comprising a VH of an antibody selected from the group consisting of libivirumab, rmab, rivabazumab pegol, setoxaximab, suvizumab, suvratoxumab, sevirumab, pritoxaximab, porgaviximab, REGN-EB3, obiltoxaximab, gedivumab, foravirumab, larcaviximab, motavizumab, palivizumab, rafivirumab, regavirumab, tuvirumab, cosfroviximab, felvizumab, atidortoxumab, edobacomab, nebacumab, pateclizumab, raxibacumab, urtoxazumab, tosatoxumab, berlimatoxumab, CR6261, diridavumab, firivumab, lesofavumab, navivumab, exbivirumab, lenvervimab, bavituximab, bezlotoxumab, efungumab, leronlimab, nirsevimab, pagibaximab, panobacumab, tefibazumab, ansuvimab, atoltivimab, maftivimab, and odesivimab.

[5585] In some aspects, the antigen binding polypeptides provided herein comprise a VL1 comprising (i) a complementarity determining region (CDR) 1 having an amino acid sequence that is at least 65%, at least 70%, at least 75%, at least 80%, at least 85%, at least 90%, at least 95%, at least 99%, or 100% identical to any one of SEQ ID NOs: 1428, 1793, 1798, 1810, 1817, 1824, 1977, 1985, 1993 and 2001; (ii) a CDR2 having an amino acid sequence that is at least 65%, at least 70%, at least 75%, at least 80%, at least 85%, at least 90%, at least 95%, at least 99%, or 100% identical to any one of SEQ ID NOs: 1978, 1986, 1994, and 2002; or at least 65%, at least 70%, at least 75%, at least 80%, at least 85%, at least 90%, at least 95%, at least 99%, or 100% identical to any one of amino acid sequences YTS, DTS, GAS, and AAS; and (iii) a CDR3 having an amino acid sequence that is at least 65%, at least 70%, at least 75%, at least 80%, at least 85%, at least 90%, at least 95%, at least 99%, or 100% identical to any one of SEQ ID NOs: 1229, 1799, 1805, 1811, 1818, 1825, 1979, 1987, 1995, and 2003.

[5586] In some aspects, the antigen binding polypeptides provided herein comprise a VL2 comprising (i) a complementarity determining region (CDR) 1 having an amino acid sequence that is at least 65%, at least 70%, at least 75%, at least 80%, at least 85%, at least 90%, at least 95%, at least 99%, or 100% identical to any one of SEQ ID NOs: 1428, 1793, 1798, 1810, 1817, 1824, 1977, 1985, 1993 and 2001; (ii) a CDR2 having an amino acid sequence that is at least 65%, at least 70%, at least 75%, at least 80%, at least 85%, at least 90%, at least 95%, at least 99%, or 100% identical to any one of SEQ ID NOs: 1978, 1986, 1994, and 2002; or at least 65%, at least 70%, at least 75%, at least 80%, at least 85%, at least 90%, at least 95%, at least 99%, or 100% identical to any one of amino acid sequences YTS, DTS, GAS, and AAS; and (iii) a CDR3 having an amino acid sequence that is at least 65%, at least 70%, at least 75%, at least 80%, at least 85%, at least 90%, at least 95%, at least 99%, or 100% identical to any one of SEQ ID NOs: 1229, 1799, 1805, 1811, 1818, 1825, 1979, 1987, 1995, and 2003.

[5587] In some aspects, the antigen binding polypeptides provided herein comprise a VH1 comprising (i) a complementarity determining region (CDR) 1 having an amino acid sequence that is at least 65%, at least 70%, at least 75%, at least 80%, at least 85%, at least 90%, at least 95%, at least 99%, or 100% identical to any one of SEQ ID NOs: 1577, 1795, 1801, 1813, 1820, 1827, 1981, 1989, 1997, and 2005; (ii) a CDR2 having an amino acid sequence that is at least 65%, at least 70%, at least 75%, at least 80%, at least 85%, at least 90%, at least 95%, at least 99%, or 100% identical to any one of SEQ ID NOs: 1159, 1802, 1807, 1814, 1821, 1828, 1982, 1990, 1998, and 2006; and (iii) a CDR3 having an amino acid sequence that is at least 65%, at least 70%, at least 75%, at least 80%, at least 85%, at least 90%, at least 95%, at least 99%, or 100% identical to any one of SEQ ID NOs: 1796, 1803, 1808, 1815, 1822, 1829, 1983, 1991, 1999, and 2007.

[5588] In some aspects, the antigen binding polypeptides provided herein comprise a VH2 comprising (i) a complementarity determining region (CDR) 1 having an amino acid sequence that is at least 65%, at least 70%, at least 75%, at least 80%, at least 85%, at least 90%, at least 95%, at least 99%, or 100% identical to any one of SEQ ID NOs: 1577, 1795, 1801, 1813, 1820, 1827, 1981, 1989, 1997, and 2005; (ii) a CDR2 having an amino acid sequence that is at least 65%, at least 70%, at least 75%, at least 80%, at least 85%, at least 90%, at least 95%, at least 99%, or 100% identical to any one of SEQ ID NOs: 1159, 1802, 1807, 1814, 1821, 1828, 1982, 1990, 1998, and 2006; and (iii) a CDR3 having an amino acid sequence that is at least 65%, at least 70%, at least 75%, at least 80%, at least 85%, at least 90%, at least 95%, at least 99%, or 100% identical to any one of SEQ ID NOs: 1796, 1803, 1808, 1815, 1822, 1829, 1983, 1991, 1999, and 2007.

[5589] In some aspects, the antigen binding polypeptides provided herein comprise a VL1 comprising an amino acid sequence that is at least 65%, at least 70%, at least 75%, at least 80%, at least 85%, at least 90%, at least 95%, at least 99%, or 100% identical to any one of SEQ ID NOs: 1794, 1800, 1806, 1812, 1819, 1826, 1980, 1988, 1996, and 2004.

[5590] In some aspects, the antigen binding polypeptides provided herein comprise a VL2 comprising an amino acid sequence that is at least 65%, at least 70%, at least 75%, at least 80%, at least 85%, at least 90%, at least 95%, at least 99%, or 100% identical to any one of SEQ ID NOs: 1794, 1800, 1806, 1812, 1819, 1826, 1980, 1988, 1996, and 2004.

[5591] In some aspects, the antigen binding polypeptides provided herein comprise a VH1 comprising an amino acid sequence that is at least 65%, at least 70%, at least 75%, at least 80%, at least 85%, at least 90%, at least 95%, at least 99%, or 100% identical to any one of SEQ ID NOs 1797, 1804, 1809, 1816, 1823, 1830, 1984, 1992, 2000, and 2008.

[5592] In some aspects, the antigen binding polypeptides provided herein comprise a VH2 comprising an amino acid sequence that is at least 65%, at least 70%, at least 75%, at least 80%, at least 85%, at least 90%, at least 95%, at least 99%, or 100% identical to any one of SEQ ID NOs 1797, 1804, 1809, 1816, 1823, 1830, 1984, 1992, 2000, and 2008.

[5593] In some aspects, the other-pathology antigen is selected from the group consisting of Amyloid beta, β-amyloid, PCSK9, IFN-α/β receptor. Rhesus factor, nerve growth factor (NGF), DPP4, fibrin II beta chain, ACVR2B, serum amyloid A protein SOST, FGF 23, VWF, tissue factor pathway inhibitor (TFPI), 1-40 and 1-42, selectin P, glucagon receptor (GCGR), amyloid P component, GDF-8, CXCL10 IP-10, repulsive guidance molecule A RGMA, IFN-γ, activated F9/F10, calcitonin gene-related peptide (CGRP), angiopoietin 3, IFN receptor, IFN-γ, calcitonin, β-amyloid 1-40 and 1-42, tau protein, dabigatran, cardiac myosin, selectin P, Complement factor D (CFD), kallikrein, GDF-8, IGHE, tissue factor pathway inhibitor (TFPI), GMCSF receptor α-chain, amyloid, IgE Fc region, MASP-2, oxLDL, GMCSF, NOGO-A, Alpha-synuclein, NGF, myelin-associated glycoprotein, RHD (gene) (RHD), sclerostin, FCGRT, sclerostin SOST, mucosal addressin cell adhesion molecule, myostatin, RSVFR, complement component 1s C1s, C5, and IL31.

[5594] In some aspects, the antigen binding polypeptides provided herein comprise a VL1 comprising a light chain complementarity determining region 1 (LCDR1), LCDR2, and/or LCDR3 of an antibody selected from the group consisting of aducanumab, alirocumab, frovocimab, lodelcizumab, bococizumab, evolocumab, ralpancizumab, anifrolumab, atorolimumab, bapineuzumab, bedinvetmab, begelomab, biciromab, bimagrumab, birtamimab, blosozumab, burosumab, caplacizumab, concizumab, crenezumab, crizanlizumab, crotedumab, dezamizumab, domagrozumab, donanemab, eldelumab, elezanumab, emapalumab, emicizumab, eptinezumab, erenumab, evinacumab, faralimomab, fasinumab, fontolizumab, fremanezumab, frunevetmab, fulranumab, galcanezumab, gantenerumab, gosuranemab, idarucizumab, imciromab, inclacumab, lampalizumab, lanadelumab, landogrozumab, lecanemab, ligelizumab, marstacimab, mavrilimumab, morolimumab, NEOD001, omalizumab, oMS721, orticumab, otilimab, ozanezumab, ponezumab, prasinezumab, quilizumab, ranevetmab, refanezumab, roledumab, romosozumab, rozanolixizumab, setrusumab, SHP647, solanezumab, stamulumab, suptavumab, sutimlimab, tanezumab, crovalimab, and lokivetmab.

[5595] In some aspects, the antigen binding polypeptides provided herein comprise a VL2 comprising a light chain complementarity determining region 1 (LCDR1), LCDR2, and/or LCDR3 of an antibody selected from the group consisting of aducanumab, alirocumab, frovocimab, lodelcizumab, bococizumab, evolocumab, ralpancizumab, anifrolumab, atorolimumab, bapineuzumab, bedinvetmab, begelomab, biciromab, bimagrumab, birtamimab, blosozumab, burosumab, caplacizumab, concizumab, crenezumab, crizanlizumab, crotedumab, dezamizumab, domagrozumab, donanemab, eldelumab, elezanumab, emapalumab, emicizumab, eptinezumab, erenumab, evinacumab, faralimomab, fasinumab, fontolizumab, fremanezumab, frunevetmab, fulranumab, galcanezumab, gantenerumab, gosuranemab, idarucizumab, imciromab, inclacumab, lampalizumab, lanadelumab, landogrozumab, lecanemab, ligelizumab, marstacimab, mavrilimumab, morolimumab, NEOD001, omalizumab, oMS721, orticumab, otilimab, ozanezumab, ponezumab, prasinezumab, quilizumab, ranevetmab, refanezumab, roledumab, romosozumab, rozanolixizumab, setrusumab, SHP647, solanezumab, stamulumab, suptavumab, sutimlimab, tanezumab, crovalimab, and lokivetmab.

[5596] In some aspects, the antigen binding polypeptides provided herein comprise a VH1 comprising a heavy chain complementarity determining region 1 (HCDR1), HCDR2, and/or HCDR3 of an antibody selected from the group consisting of aducanumab, alirocumab, frovocimab, lodelcizumab, bococizumab, evolocumab, ralpancizumab, anifrolumab, atorolimumab, bapineuzumab, bedinvetmab, begelomab, biciromab, bimagrumab, birtamimab, blosozumab, burosumab, caplacizumab, concizumab, crenczumab, crizanlizumab, crotedumab, dezamizumab, domagrozumab, donanemab, eldelumab, elezanumab, emapalumab, emicizumab, eptinezumab, erenumab, evinacumab, faralimomab, fasinumab, fontolizumab, fremanezumab, frunevetmab, fulranumab, galcanezumab, gantenerumab, gosuranemab, idarucizumab, imciromab, inclacumab, lampalizumab, lanadelumab, landogrozumab, lecanemab, ligelizumab, marstacimab, mavrilimumab, morolimumab, NEOD001, omalizumab, oMS721, orticumab, otilimab, ozanezumab, ponezumab, prasinezumab, quilizumab, ranevetmab, refanezumab, roledumab, romosozumab, rozanolixizumab, setrusumab, SHP647, solanezumab, stamulumab, suptavumab, sutimlimab, tanezumab, crovalimab, and lokivetmab.

[5597] In some aspects, the antigen binding polypeptides provided herein comprise a VH2 comprising a heavy chain complementarity determining region 1 (HCDR1), HCDR2, and/or HCDR3 of an antibody selected from the group consisting of aducanumab, alirocumab, frovocimab, lodelcizumab, bococizumab, evolocumab, ralpancizumab, anifrolumab, atorolimumab, bapineuzumab, bedinvetmab, begelomab, biciromab, bimagrumab, birtamimab, blosozumab, burosumab, caplacizumab, concizumab, crenezumab, crizanlizumab, crotedumab, dezamizumab, domagrozumab, donanemab, eldelumab, elezanumab, emapalumab, emicizumab, eptinezumab, erenumab, evinacumab, faralimomab, fasinumab, fontolizumab, fremanezumab, frunevetmab, fulranumab, galcanezumab, gantenerumab, gosuranemab, idarucizumab, imciromab, inclacumab, lampalizumab, lanadelumab, landogrozumab, lecanemab, ligelizumab, marstacimab, mavrilimumab, morolimumab, NEOD001, omalizumab, oMS721, orticumab, otilimab, ozanezumab, ponezumab, prasinezumab, quilizumab, ranevetmab, refanezumab, roledumab, romosozumab, rozanolixizumab, setrusumab, SHP647, solanezumab, stamulumab, suptavumab, sutimlimab, tanezumab, crovalimab, and lokivetmab.

[5598] In some aspects, the antigen binding polypeptides provided herein comprise a VL1 comprising a VL of an antibody selected from the group consisting of aducanumab, alirocumab, frovocimab, lodelcizumab, bococizumab, evolocumab, ralpancizumab, anifrolumab, atorolimumab, bapineuzumab, bedinvetmab, begelomab, biciromab, bimagrumab, birtamimab, blosozumab, burosumab, caplacizumab, concizumab, crenezumab, crizanlizumab, crotedumab, dezamizumab, domagrozumab, donanemab, eldelumab, elezanumab, emapalumab, emicizumab, eptinezumab, erenumab, evinacumab, faralimomab, fasinumab, fontolizumab, fremanezumab, frunevetmab, fulranumab, galcanezumab, gantenerumab, gosuranemab, idarucizumab, imciromab, inclacumab, lampalizumab, lanadelumab, landogrozumab, lecanemab, ligelizumab, marstacimab, mavrilimumab, morolimumab, NEOD001, omalizumab, oMS721, orticumab, otilimab, ozanezumab, ponezumab, prasinezumab, quilizumab, ranevetmab, refanezumab, roledumab, romosozumab, rozanolixizumab, setrusumab, SHP647, solanezumab, stamulumab, suptavumab, sutimlimab, tanezumab, crovalimab, and lokivetmab.

[5599] In some aspects, the antigen binding polypeptides provided herein comprise a VL2 comprising a VL of an antibody selected from the group consisting of aducanumab, alirocumab, frovocimab, lodelcizumab, bococizumab, evolocumab, ralpancizumab, anifrolumab, atorolimumab, bapineuzumab, bedinvetmab, begelomab, biciromab, bimagrumab, birtamimab, blosozumab, burosumab, caplacizumab, concizumab, crenezumab, crizanlizumab, crotedumab, dezamizumab, domagrozumab, donanemab, eldelumab, elezanumab, emapalumab, emicizumab, eptinezumab, erenumab, evinacumab, faralimomab, fasinumab, fontolizumab, fremanezumab, frunevetmab, fulranumab, galcanezumab, gantenerumab, gosuranemab, idarucizumab, imciromab, inclacumab, lampalizumab, lanadelumab, landogrozumab, lecanemab, ligelizumab, marstacimab, mavrilimumab, morolimumab, NEOD001, omalizumab, oMS721, orticumab, otilimab, ozanezumab, ponezumab, prasinezumab, quilizumab, ranevetmab, refanezumab, roledumab, romosozumab, rozanolixizumab, setrusumab, SHP647, solanezumab, stamulumab, suptavumab, sutimlimab, tanezumab, crovalimab, and lokivetmab.

[5600] In some aspects, the antigen binding polypeptides provided herein comprise a VH1 comprising a VH of an antibody selected from the group consisting of aducanumab, alirocumab, frovocimab, lodelcizumab, bococizumab, evolocumab, ralpancizumab, anifrolumab, atorolimumab, bapincuzumab, bedinvetmab, begelomab, biciromab, bimagrumab, birtamimab, blosozumab, burosumab, caplacizumab, concizumab, crenezumab, crizanlizumab, crotedumab, dezamizumab, domagrozumab, donanemab, eldelumab, elezanumab, emapalumab, emicizumab, eptinezumab, erenumab, evinacumab, faralimomab, fasinumab, fontolizumab, fremanezumab, frunevetmab, fulranumab, galcanezumab, gantenerumab, gosuranemab, idarucizumab, imciromab, inclacumab, lampalizumab, lanadelumab, landogrozumab, lecanemab, ligelizumab, marstacimab, mavrilimumab, morolimumab, NEOD001, omalizumab, oMS721, orticumab, otilimab, ozanezumab, ponezumab, prasinezumab, quilizumab, ranevetmab, refanezumab, roledumab, romosozumab, rozanolixizumab, setrusumab, SHP647, solanezumab, stamulumab, suptavumab, sutimlimab, tanezumab, crovalimab, and lokivetmab.

[5601] In some aspects, the antigen binding polypeptides provided herein comprise a VH2 comprising a VH of an antibody selected from the group consisting of aducanumab, alirocumab, frovocimab, lodelcizumab, bococizumab, evolocumab, ralpancizumab, anifrolumab, atorolimumab, bapineuzumab, bedinvetmab, begelomab, biciromab, bimagrumab, birtamimab, blosozumab, burosumab, caplacizumab, concizumab, crenezumab, crizanlizumab, crotedumab, dezamizumab, domagrozumab, donanemab, eldelumab, elezanumab, emapalumab, emicizumab, eptinezumab, erenumab, evinacumab, faralimomab, fasinumab, fontolizumab, fremanezumab, frunevetmab, fulranumab, galcanezumab, gantenerumab, gosuranemab, idarucizumab, imciromab, inclacumab, lampalizumab, lanadelumab, landogrozumab, lecanemab, ligelizumab, marstacimab, mavrilimumab, morolimumab, NEOD001, omalizumab, oMS721, orticumab, otilimab, ozanezumab, ponezumab, prasinezumab, quilizumab, ranevetmab, refanezumab, roledumab, romosozumab, rozanolixizumab, setrusumab, SHP647, solanezumab, stamulumab, suptavumab, sutimlimab, tanezumab, crovalimab, and lokivetmab.

[5602] In some aspects, the antigen binding polypeptides provided herein comprise a VL1 comprising (i) a complementarity determining region (CDR) 1 having an amino acid sequence that is at least 65%, at least 70%, at least 75%, at least 80%, at least 85%, at least 90%, at least 95%, at least 99%, or 100% identical to any one of SEQ ID NOs: 1120, 1228, 1359, 1519, 1831, 1838, 1845, 1852, 1859, 1866, 1872, 1878, 1885, 1891, 1898, 1905, 1911, 1917, 1924, 1931, 1938, 1945, and 1963; (ii) a CDR2 having an amino acid sequence that is at least 65%, at least 70%, at least 75%, at least 80%, at least 85%, at least 90%, at least 95%, at least 99%, or 100% identical to any one of amino acid sequences AAS, AVS, DAS, DNN, EDN, EVS, GAS, GNG, KAS, KVS, LVS, NTD, STS, WAS, and YTS; and (iii) a CDR3 having an amino acid sequence that is at least 65%, at least 70%, at least 75%, at least 80%, at least 85%, at least 90%, at least 95%, at least 99%, or 100% identical to any one of SEQ ID NOs: 1360, 1832, 1839, 1846, 1853, 1860, 1867, 1873, 1879, 1886, 1892, 1899, 1906, 1912, 1918, 1925, 1932, 1939, 1946, 1951, 1957, 1964, and 1970.

[5603] In some aspects, the antigen binding polypeptides provided herein comprise a VL2 comprising (i) a complementarity determining region (CDR) 1 having an amino acid sequence that is at least 65%, at least 70%, at least 75%, at least 80%, at least 85%, at least 90%, at least 95%, at least 99%, or 100% identical to any one of SEQ ID NOs: 1120, 1228, 1359, 1519, 1831, 1838, 1845, 1852, 1859, 1866, 1872, 1878, 1885, 1891, 1898, 1905, 1911, 1917, 1924, 1931, 1938, 1945, and 1963; (ii) a CDR2 having an amino acid sequence that is at least 65%, at least 70%, at least 75%, at least 80%, at least 85%, at least 90%, at least 95%, at least 99%, or 100% identical to any one of amino acid sequences AAS, AVS, DAS, DNN, EDN, EVS, GAS, GNG, KAS, KVS, LVS, NTD, STS, WAS, and YTS; and (iii) a CDR3 having an amino acid sequence that is at least 65%, at least 70%, at least 75%, at least 80%, at least 85%, at least 90%, at least 95%, at least 99%, or 100% identical to any one of SEQ ID NOs: 1360, 1832, 1839, 1846, 1853, 1860, 1867, 1873, 1879, 1886, 1892, 1899, 1906, 1912, 1918, 1925, 1932, 1939, 1946, 1951, 1957, 1964, and 1970.

[5604] In some aspects, the antigen binding polypeptides provided herein comprise a VH1 comprising (i) a complementarity determining region (CDR) 1 having an amino acid sequence that is at least 65%, at least 70%, at least 75%, at least 80%, at least 85%, at least 90%, at least 95%, at least 99%, or 100% identical to any one of SEQ ID NOs: 1309, 1362, 1437, 1552, 1618, 1639, 1834, 1841, 1848, 1855, 1862, 1881, 1894, 1901, 1920, 1927, 1934, 1941, 1953, 1959, and 1966; (ii) a CDR2 having an amino acid sequence that is at least 65%, at least 70%, at least 75%, at least 80%, at least 85%, at least 90%, at least 95%, at least 99%, or 100% identical to any one of SEQ ID NOs: 1363, 1835, 1842, 1849, 1856, 1863, 1869, 1875, 1882, 1888, 1895, 1902, 1908, 1914, 1921, 1928, 1935, 1942, 1948, 1954, 1960, 1967, and 1972; and (iii) a CDR3 having an amino acid sequence that is at least 65%, at least 70%, at least 75%, at least 80%, at least 85%, at least 90%, at least 95%, at least 99%, or 100% identical to any one of SEQ ID NOs: 1364, 1836, 1843, 1850, 1857, 1864, 1870, 1876, 1883, 1889, 1896, 1903, 1909, 1915, 1922, 1929, 1936, 1943, 1949, 1955, 1961, 1968, and 1973.

[5605] In some aspects, the antigen binding polypeptides provided herein comprise a VH2 comprising (i) a complementarity determining region (CDR) 1 having an amino acid sequence that is at least 65%, at least 70%, at least 75%, at least 80%, at least 85%, at least 90%, at least 95%, at least 99%, or 100% identical to any one of SEQ ID NOs: 1309, 1362, 1437, 1552, 1618, 1639, 1834, 1841, 1848, 1855, 1862, 1881, 1894, 1901, 1920, 1927, 1934, 1941, 1953, 1959, and 1966; (ii) a CDR2 having an amino acid sequence that is at least 65%, at least 70%, at least 75%, at least 80%, at least 85%, at least 90%, at least 95%, at least 99%, or 100% identical to any one of SEQ ID NOs: 1363, 1835, 1842, 1849, 1856, 1863, 1869, 1875, 1882, 1888, 1895, 1902, 1908, 1914, 1921, 1928, 1935, 1942, 1948, 1954, 1960, 1967, and 1972; and (iii) a CDR3 having an amino acid sequence that is at least 65%, at least 70%, at least 75%, at least 80%, at least 85%, at least 90%, at least 95%, at least 99%, or 100% identical to any one of SEQ ID NOs: 1364, 1836, 1843, 1850, 1857, 1864, 1870, 1876, 1883, 1889, 1896, 1903, 1909, 1915, 1922, 1929, 1936, 1943, 1949, 1955, 1961, 1968, and 1973.

[5606] In some aspects, the antigen binding polypeptides provided herein comprise a VL1 comprising an amino acid sequence that is at least 65%, at least 70%, at least 75%, at least 80%, at least 85%, at least 90%, at least 95%, at least 99%, or 100% identical to any one of SEQ ID NOs: 1361, 1833, 1840, 1847, 1854, 1861, 1868, 1874, 1880, 1887, 1893, 1900, 1907, 1913, 1919, 1926, 1933, 1940, 1947, 1952, 1958, 1965, and 1971.

[5607] In some aspects, the antigen binding polypeptides provided herein comprise a VL2 comprising an amino acid sequence that is at least 65%, at least 70%, at least 75%, at least 80%, at least 85%, at least 90%, at least 95%, at least 99%, or 100% identical to any one of SEQ ID NOs: 1361, 1833, 1840, 1847, 1854, 1861, 1868, 1874, 1880, 1887, 1893, 1900, 1907, 1913, 1919, 1926, 1933, 1940, 1947, 1952, 1958, 1965, and 1971.

[5608] In some aspects, the antigen binding polypeptides provided herein comprise a VH1 comprising an amino acid sequence that is at least 65%, at least 70%, at least 75%, at least 80%, at least 85%, at least 90%, at least 95%, at least 99%, or 100% identical to any one of SEQ ID NOs: 1365, 1837, 1844, 1851, 1858, 1865, 1871, 1877, 1884, 1890, 1897, 1904, 1910, 1916, 1923, 1930, 1937, 1944, 1950, 1956, 1962, 1969, and 1974.

[5609] In some aspects, the antigen binding polypeptides provided herein comprise a VH2 comprising an amino acid sequence that is at least 65%, at least 70%, at least 75%, at least 80%, at least 85%, at least 90%, at least 95%, at least 99%, or 100% identical to any one of SEQ ID NOs: 1365, 1837, 1844, 1851, 1858, 1865, 1871, 1877, 1884, 1890, 1897, 1904, 1910, 1916, 1923, 1930, 1937, 1944, 1950, 1956, 1962, 1969, and 1974.

[5610] In some aspects, the antigen binding polypeptides provided herein further comprise an Fc region. In some aspects, the antigen binding polypeptides provided herein further comprise an Fc region at the carboxy-terminus. In some aspects, the Fc region comprises an immunoglobulin heavy chain constant region 2 (CH2) and/or an immunoglobulin heavy chain constant region 3 (CH3). In some aspects, the Fc region further comprises an immunoglobulin hinge (i.e., a hinge region). In some aspects, the hinge region comprises an amino acid sequence at least 65%, at least 70%, at least 75%, at least 80%, at least 85%, at least 90%, at least 95%, at least 99%, or 100% identical to any one of SEQ ID NOs: 635, 636, 1072, 1073, or 1074. In some aspects, the Fc region comprises a CH2 and a CH3. In some aspects, the CH2 comprises an amino acid sequence that is at least 65%, at least 70%, at least 75%, at least 80%, at least 85%, at least 90%, at least 95%, at least 99%, or 100% identical to any one of SEQ ID NOs: 1075-1078. In some aspects, the CH3 comprises an amino acid sequence that is at least 65%, at least 70%, at least 75%, at least 80%, at least 85%, at least 90%, at least 95%, at least 99%, or 100% identical to any one of SEQ ID NOs: 1079-1085. In some aspects, the Fc region comprises an amino acid sequence that is at least 65%, at least 70%, at least 75%, at least 80%, at least 85%, at least 90%, at least 95%, at least 99%, or 100% identical to any one of SEQ ID NOs: 376-380.

[5611] In some aspects, the Fc region comprises one or more amino acid substitutions. In some aspects, the one or more amino acid substitutions comprise one or more half-life extension amino acid substitutions. In some aspects, the one or more half-life extension amino acid substitutions comprise one or more of amino acid substitutions M428L, N434A, N434S, L234F, L235E, P331S, M252Y, S254T, and T256E, or equivalent thereof, based on the EU numbering scheme. In some aspects, the one or more half-life extension amino acid substitutions comprise a LA (M428L and N434A, or equivalent thereof, based on the EU numbering scheme) amino acid substitution. In some aspects, the one or more half-life extension amino acid substitutions comprise a LS (M428L and N434S, or equivalent thereof, based on the EU numbering scheme) amino acid substitution. In some aspects, the one or more half-life extension amino acid substitutions comprise L234F and L235E, or equivalent thereof (based on the EU numbering scheme) amino acid substitutions. In some aspects, the one or more half-life extension amino acid substitutions comprise a TM (L234F, L235E, and P331S, or equivalent thereof, based on the EU numbering scheme) amino acid substitution. In some aspects, the one or more half-life extension amino acid substitutions comprise a YTE (M252Y, S254T, and T256E, or equivalent thereof, based on the EU numbering scheme) amino acid substitution.

[5612] In some aspects, the Fc region comprises at least one knob-into-hole modification. In some aspects, the antigen binding polypeptides disclosed herein are comprised in IgG1 or IgG4 antibodies or antigen binding fragments thereof. In some aspects, the knob-into-hole modification comprises one or more of knob substitutions of S354C and T366W, or equivalent thereof, and/or one or more of hole substitutions of Y349C, T366S, L368A, Y407V, or equivalent thereof, or a combination thereof, based on the EU numbering scheme. In some aspects, the Fc region comprises a knob-into-hole modification comprising knob substitutions of S354C and T366W, or equivalent thereof, and/or hole substitutions of Y349C, T366S, L368A and Y407V, or equivalent thereof, and/or a half-life extension amino acid substitution comprising: a LA (M428L and N434A, or equivalent thereof, based on the EU numbering scheme) amino acid substitution, a LS (M428L and N434S, or equivalent thereof, based on the EU numbering scheme) amino acid substitution, L234F and L235E, or equivalent thereof (based on the EU numbering scheme) amino acid substitutions, a TM (L234F, L235E, and P331S, or equivalent thereof, based on the EU numbering scheme) amino acid substitution, a YTE (M252Y, S254T, and T256E, or equivalent thereof, based on the EU numbering scheme) amino acid substitution, or any combination thereof.

[5613] In some aspects, the Fc region comprises knob substitutions of S354C and T366W, or equivalent thereof, and a half-life extension amino acid substitution comprising: a LA (M428L and N434A, or equivalent thereof, based on the EU numbering scheme) amino acid substitution, a LS (M428L and N434S, or equivalent thereof, based on the EU numbering scheme) amino acid substitution, L234F and L235E, or equivalent thereof (based on the EU numbering scheme) amino acid substitutions, a TM (L234F, L235E, and P331S, or equivalent thereof, based on the EU numbering scheme) amino acid substitution, a YTE (M252Y, S254T, and T256E, or equivalent thereof, based on the EU numbering scheme) amino acid substitution, or any combination thereof.

[5614] In some aspects, the Fc region comprises hole substitutions of Y349C, T366S, L368A and Y407V, or equivalent thereof, and a half-life extension amino acid substitution comprising: a LA (M428L and N434A, or equivalent thereof, based on the EU numbering scheme) amino acid substitution, a LS (M428L and N434S, or equivalent thereof, based on the EU numbering scheme) amino acid substitution, L234F and L235E, or equivalent thereof (based on the EU numbering scheme) amino acid substitutions, a TM (L234F, L235E, and P331S, or equivalent thereof, based on the EU numbering scheme) amino acid substitution, a YTE (M252Y, S254T, and T256E, or equivalent thereof, based on the EU numbering scheme) amino acid substitution, or any combination thereof.

[5615] In some aspects, the antigen binding polypeptides disclosed herein comprise one or more Fc effector function knockout mutation. In some aspects, the antigen binding polypeptides disclosed herein are comprised in IgG1 or IgG4 antibodies or antigen binding fragments thereof. In some aspects, the Fc effector function knockout mutation is L234A, L235A, P239A, or equivalent thereof, or a combination thereof, based on the EU numbering scheme.

[5616] In some aspects, the antigen binding polypeptides disclosed herein comprise a mutation at a glycosylation site. In some aspects, the mutation at a glycosylation site is a mutation at an N-glycosylation site. In some aspects, the antigen binding polypeptides comprise a VH comprising a mutation at a glycosylation site. In some aspects, the mutation at a glycosylation site is a mutation at an N-glycosylation site. In some aspects, the mutation at an N-glycosylation site is at amino acid N62, or equivalent thereof, of the VH region or equivalent thereof. In some aspects, the mutation at an N-glycosylation site at amino acid N62 is N62Q or N62S, or equivalent thereof.

[5617] In some aspects, the antigen binding polypeptides disclosed herein, comprise one or more optional linkers. The one or more optional linkers are indicated herein as Ln, wherein n is an integer, and the integer next to each L indicates each L comprised in the antigen binding polypeptides disclosed herein. For example, if an antigen binding polypeptide disclosed herein comprises two linkers, the first linker from N-terminus to C-terminus is herein indicated as L1, and the second linker from N-terminus to C-terminus is herein indicated as L2. In some aspects, any one of the optional linkers each independently have a length of from 0 amino acids to about 50 amino acids. In some aspects, any one of the optional linkers each independently have a length of from 5 amino acids to about 40 amino acids.

[5618] In some aspects, any one of the optional linkers are non-immunogenic. In some aspects, any one of the optional linkers do not contain a consensus T cell epitope.

[5619] In some aspects, any of Ln comprises an amino acid sequence of G or A, or an amino acid sequence at least 65%, at least 70%, at least 75%, at least 80%, at least 85%, at least 90%, at least 95%, at least 99%, or 100% identical to amino acid sequence GSS or ASG, or an amino acid sequence at least 65%, at least 70%, at least 75%, at least 80%, at least 85%, at least 90%, at least 95%, at least 99%, or 100% identical to any one of SEQ ID NOs: 333-373 or 967-971. In some aspects. Ln comprises an amino acid sequence at least 65%, at least 70%, at least 75%, at least 80%, at least 85%, at least 90%, at least 95%, at least 99%, or 100% identical to any one of SEQ ID NOs: 333-345 or 967-971.

[5620] In some aspects, the antigen binding polypeptides provided herein have a structure, from amino-terminus to carboxy-terminus, represented by:
[5621] VL1-L1-VL2-L2-VH2-L3-VH1-L4-CH1-L5-CL;
[5622] VL1-L1-VH2-L2-VL2-L3-VH1-L4-CH1-L5-CL;
[5623] VH1-L1-VH2-L2-VL2-L3-VL1-L4-CH1-L5-CL;
[5624] VH1-L1-VL2-L2-VH2-L3-VL1-L4-CH1-L5-CL;
[5625] VL1-L1-VL2-L2-VH2-L3-VH1-L4-CL-L5-CH1;
[5626] VL1-L1-VH2-L2-VL2-L3-VH1-L4-CL-L5-CH1;
[5627] VH1-L1-VH2-L2-VL2-L3-VL1-L4-CL-L5-CH1; or
[5628] VH1-L1-VL2-L2-VH2-L3-VL1-L4-CL-L5-CH1;
[5629] wherein:
[5630] VL1 is a first immunoglobulin light chain variable region that specifically binds to (i) a tumor-associated antigen (TAA), (ii) an infectious disease antigen that is not a sarbecovirus antigen, or (iii) an other-pathology antigen;
[5631] VL2 is a second immunoglobulin light chain variable region that specifically binds to (i) a tumor-associated antigen (TAA), (ii) an infectious disease antigen that is not a sarbecovirus antigen, or (iii) an other-pathology antigen;
[5632] VH1 is a first immunoglobulin heavy chain variable region that specifically binds to (i) a tumor-associated antigen (TAA), (ii) an infectious disease antigen that is not a sarbecovirus antigen, or (iii) an other-pathology antigen;
[5633] VH2 is a second immunoglobulin heavy chain variable region that specifically binds to (i) a tumor-associated antigen (TAA), (ii) an infectious disease antigen that is not a sarbecovirus antigen, or (iii) an other-pathology antigen;
[5634] L1-L5 are optional amino acid linkers;
[5635] CL is an immunoglobulin light chain constant region; and
[5636] CH1 is an immunoglobulin heavy chain constant region 1.

[5637] In some aspects, the antigen binding polypeptides provided herein have a structure, from amino-terminus to carboxy-terminus, represented by:
[5638] VL1-L1-VL2-L2-VH2-L3-VH1-L4-CH1-L5-CL-L6-Fc;
[5639] VL1-L1-VH2-L2-VL2-L3-VH1-L4-CH1-L5-CL-L6-Fc;
[5640] VH1-L1-VH2-L2-VL2-L3-VL1-L4-CH1-L5-CL-L6-Fc;
[5641] VH1-L1-VL2-L2-VH2-L3-VL1-L4-CH1-L5-CL-L6-Fc;
[5642] VL1-L1-VL2-L2-VH2-L3-VH1-L4-CL-L5-CH1-L6-Fc;
[5643] VL1-L1-VH2-L2-VL2-L3-VH1-L4-CL-L5-CH1-L6-Fc;
[5644] VH1-L1-VH2-L2-VL2-L3-VL1-L4-CL-L5-CH1-L6-Fc; or
[5645] VH1-L1-VL2-L2-VH2-L3-VL1-L4-CL-L5-CH1-L6-Fc;
[5646] wherein:
[5647] VL1 is a first immunoglobulin light chain variable region that specifically binds to (i) a tumor-associated antigen (TAA), (ii) an infectious disease antigen that is not a sarbecovirus antigen, or (iii) an other-pathology antigen;
[5648] VL2 is a second immunoglobulin light chain variable region that specifically binds to (i) a tumor-associated antigen (TAA), (ii) an infectious disease antigen that is not a sarbecovirus antigen, or (iii) an other-pathology antigen;
[5649] VH1 is a first immunoglobulin heavy chain variable region that specifically binds to (i) a tumor-associated antigen (TAA), (ii) an infectious disease antigen that is not a sarbecovirus antigen, or (iii) an other-pathology antigen;
[5650] VH2 is a second immunoglobulin heavy chain variable region that specifically binds to (i) a tumor-associated antigen (TAA), (ii) an infectious disease antigen that is not a sarbecovirus antigen, or (iii) an other-pathology antigen;
[5651] L1-L6 are optional amino acid linkers;
[5652] CL is an immunoglobulin light chain constant region;
[5653] CH1 is an immunoglobulin heavy chain constant region 1; and
[5654] Fc is an immunoglobulin fragment crystallizable region comprising an immunoglobulin heavy chain constant region 2 (CH2), an immunoglobulin heavy chain constant region 3 (CH3), and optionally, an immunoglobulin hinge.

[5655] In any aspect shown herein as a structure from amino terminus to carboxy terminus, and with binding pairs selected from VL and/or VH or other structural regions such as CH2, CH3, when shown without a specific linker such as L1, L2, etc., such linkers are optionally present in such structures between each designated subsequence VL, VH, etc.

[5656] In some aspects, the TAA is selected from the group consisting of 5′-nucleotidase, 5T4, A2AR, activin receptor-like kinase 1, adenocarcinoma antigen, ADRB3, AFP, AKAP-4, ALK, alpha-fetoprotein, androgenreceptor, angiopoietin 2, AOC3, APRIL, ATPDase, AXL, B7-4, B7DC, B7H1, B7H2, B7H3, B7H4, B7H5, B7H6, B7H7, B7RP1, BAFF, BAFFR, BCMA, bcr-abl, BlyS, BORIS, BST2, BTK, BTLA, C3, C5, C5a, C5a receptor, CA-125, CAIX, CanAg (a glycoform of MUC1), CCL11, CCL15, CCL17, CCL19, CCL2, CCL20, CCL21, CCL25, CCL3, CCL4, CCL5, CCL7, CCL8, CCR2, CCR3, CCR4, CCR5, CD11, CD11a, CD123, CD125, CD133, CD134, CD137, CD137L, CD147, CD15, CD154, CD160, CD16A, CD171, CD179a, CD18, CD184, CD19, CD2, CD20, CD200, CD22, CD221, CD23, CD24, CD242, CD25, CD27, CD272, CD276, CD278, CD279, CD28, CD3, CD30, CD300LF, CD319, CD33, CD37, CD38, CD39, CD38, CD4, CD40, CD40L, CD41, CD44v6, CD45, CD47, CD49B, CD5, CD51, CD52, CD54, CD56, CD6, CD62L, CD7, CD70, CD72, CD74, CD79a, CD79b, CD80, CD86, CD97, CEA, CEACAM5, claudin 18 isoform 2, CLDN6, CLEC12A, CLEC9, CLEC91, CLL-1, cMet, coagulation factor III, CRTH2, CS1, CSF-1, CSFIR, CSF-2, CSF-3, CTGF, CTLA4, CXCL1, CXCL12, CXCL13, CXCL2, CXCL4, CXCR3, CXORF61, CyclinB1, CYP1B1, dendritic cell-associated lectin 2, DLL3, DLL4, DNGR-1, DR5, E7, E-cadherin, EGFL7, EGFR, EGFRVIII, ELF2M, EMR2, endoglin, ENTPD1, EpCAM, EphA2, EPHA3, ephrin receptor A3, EphrinB2, episialin, ERBB2 (Her2/neu), ERBB3, ERG (TMPRSS2-ETS fusion gene), ETV6-AML, FAP, FCAR, FCER1, FCER1A, FCER2, FCRL5, FGF 23, FGFR, FGFR2, fibronectin extra domain-B, FLAP, FLT3, folate hydrolase, folate receptor 1, folate receptor alpha, folate receptor beta, FOLH1, Fos-relatedantigen1, Frizzled receptor, Fucosyl GM1, GD2, GD3, gelatinase B, Gi24, GITR, GITRL, GloboH, Glutamate carboxypeptidase II, glypican 3, GM3, GP100, GPC1, GPC2, GPC3, gplOO, GPNMB, GPR20, GPR5, GPRC5D, growth differentiation factor 8, GUCY2C, HAVCR1, HER1, HER2, HER3, HGF, HGFR, HHLA2, histone complex, HLA-DR, HMGB1, HMWMAA, HPVE6, hTERT, human telomerase reverse transcriptase, HVEM, ICAM-1, ICOS, ICOSL, IDO, IFNa, IgE, IGF-1, IGF1R, IGF-2, IGF-I receptor, IGLL1, IL1, IL10, IL12, IL13, IL13Ra2, IL-13Ra2, IL13Ra1, IL15, IL17, IL-17A, IL-17AF, IL-17F, IL17Rb, IL18, IL1B, IL1F10, IL-1a, IL-1B, IL2, IL-20, IL22, IL23, IL-23A, IL25, IL2Rbeta, IL-3 receptor, IL-31 receptor A, IL33, IL35, IL4, IL4Ra, IL5, IL5R, IL6, IL7, IL7Ra, IL8, IL9, IL9R, IL1A, IL-llRa, integrin α4, integrin α4 β7, integrin α5β1, integrin αIIbβ3, integrin αvβ3, integrin β7, interleukin 36 receptor IL1RAP, interleukin 36 receptor IL1RL2, intestinal carboxy lesterase, ITGB4, ITK, KIR, KIR2D, KIT, LAG3, LAGE-1a, LAIR1, LAMP1, LCK, legumain, leptin, LewisY, LILRA2, LIV-1, LMP2, LOXL2, LPFS2, LRRC15, LY6K, LY75, LYPD3, MAD-CT-1, MAD-CT-2, MAGEA1, MAGE-A1, MCAM, MCP-1, MelanA/MART1, mesothelin, MHC classII, MIF, ML-IAP, MS4A1, MST1R (RON), MUC1, MUC-1, MUC16, MUC-16, MUC5AC, muthsp70-2, MYCN, NA17, NCA-90 granulocyte antigen, NCAM, NCR3LG1, nectin-4, NGNA ganglioside, NKG2A, NKG2D, NKp46, Notch 1, Notch receptor, NRP1, NTPDase-1, NY-BR-1, NY-ESO-1, o-acetyl-GD2, OR51E2, OX40, OX40L, OY-TES1, p53, p53mutant, PANX3, PAP, PAX3, PAX5, PCDC1, PCDP1, PCTA-1/Galectin8, PD-1, PDGFRA, PDGFR-beta, PD-L1, PD-L2, phosphate-sodium co-transporter, phosphatidylserine, PLAC1, polysialic acid, PROM1, prostase, prostein, PRSS21, PSCA, PSMA, PTK7, RAGE-1, RANKL. Ras mutant, rhIL1O, RhoC, root plate-specific spondin 3, ROR1, ROR2, RTN4, RU1, RU2, S152, sarcoma translocation breakpoints, SART3, scatter factor receptor kinase, SDC1, SIRPalpha, SISP1, SLAMF7, SLC, sLc, SLITRK6, spermprotein17, SPG64, sphingosine-1-phosphate, SSEA-4, SSX2, ST2, STEAP1, STEAP2, surviving and telomerase, Syk kinase, T14, TACI, TAG72, TARP, T-cell receptor, TCRβ, TDO, TEM1/CD248, TEM7R, tenascin C, TGFBETA, TGF-β1, TGF-β2, TGS5, the extracellular portion of the APRIL protein, Tie2, TIGIT, TIM3, TLR, TLR2, TLR4, TLR5, TLR9, TMEF1, TnAg, TNF, TNFa, TNFR superfamily member 4, TNFRSF7, Tp55, TRAC, TRAIL-R1, TRAIL-R2, TRAP, TREM1, TROP2, TRP-2, TSHR, TSLP, TSLPR, tumor antigen CTAA16.88, TWEAK, tyrosinase, TYRPI glycoprotein 75, UPK2, VAP-1, VEGF, VEGFA, VEGFR-1, VEGFR2, vimentin, VISTA, Vstm3, WT1, WUCAM, and XAGE1.

[5657] In some aspects, the antigen binding polypeptides provided herein comprise a VL1 comprising a light chain complementarity determining region 1 (LCDR1), LCDR2, and/or LCDR3 of an antibody selected from the group consisting of losatuxizumab vedotin, utomilumab, urelumab, oleclumab, naptumomab estafenatox, ascrinvacumab, pintumomab, tacatuzumab tetraxetan, nesvacumab, vanucizumab, timolumab, vapaliximab, vepalimomab, enapotamab vedotin, ianalumab, belimumab, tabalumab, tibulizumab, belantamab mafodotin, teclistamab, teclistamab, detumomab, nacolomab tafenatox, eculizumab, lendalizumab, pexelizumab, pozelimab, ravulizumab, tesidolumab, vilobelimab, abagovomab, igovomab, oregovomab, sofituzumab vedotin, cantuzumab mertansine, cantuzuma bravtansine, girentuximab, altumomab pentetate, arcitumomab, besilesomab, bertilimumab, plozalizumab, mogamulizumab, leronlimab, PRO140, rovelizumab, rovelizumab, talacotuzumab, benralizumab, tavolimab, vonlerolizumab, gavilimomab, ziralimumab, fanolesomab, ipilimumab, ruplizumab, toralizumab, dapirolizumab pegol, toralizumab, dapirolizumab pegol, ruplizumab, blinatumomab, inebilizumab, loncastuximab tesirine, SGN-CD19A, tafasitamab, taplitumomab paptox, XMAB-5574, Budoprutug, Obexelimab, duvortuxizumab, englumafusp alfa, Emfizatamab, zeripatamig, siplizumab, blontuvetmab, FBTA05, ibritumomab tiuxetan, obinutuzumab, ocaratuzumab, ocrelizumab, ofatumumab, rituximab, tositumomab, ublituximab, veltuzumab, divozilimab, eramkafusp alfa, ripertamab, zuberitamab, glofitamab, nofetumomab merpentan, samalizumab, imvotamab, odronextamab, plamotamab, bectumomab, inotuzumab ozogamicin, moxetumomab pasudotox, pinatuzumab vedotin, gomiliximab, lumiliximab, inolimomab, inolimomab, daclizumab, camidanluma btesirine, basiliximab, varlilumab, omburtamab, enoblituzumab, vopratelimab, lulizumabpegol, TGN1412, muromonab-CD3, otelixizumab, teplizumab, visilizumab, epcoritamab, epcoritamab, brentuximab vedotin, iratumumab, azintuxizumab vedotin, gemtuzumab ozogamicin, lintuzumab, vadastuximab talirine, naratuximab emtansine, otlertuzumab, lilotomab satetraxetan, tetulomab, daratumumab, isatuximab, foralumab, mosunetuzumab, mosunetuzumab, cedelizumab, ibalizumab, keliximab, priliximab, tregalizumab, zanolimumab, bleselumab, iscalimab, lucatumumab, ravagalimab, selicrelumab, teneliximab, vanalimab, abciximab, bivatuzumab, iomab-B, telimomab aritox, zolimomab aritox, abituzumab, intetumumab, alemtuzumab, tamtuvetmab, lorvotuzumab mertansine, itolizumab, cusatuzumab, vorsetuzumab mafodotin, milatuzumab, iladatuzumab vedotin, polatuzumab vedotin, galiximab, cibisatamab, zolbetuximab, naxitamab, tisotumab vedotin, olendalizumab, pamrevlumab, lacnotuzumab, cabiralizumab, emactuzumab, axatilimab, gimsilumab, lenzilumab, namilumab, tremelimumab, ulocuplumab, tepoditamab, rovalpituzumab tesirine, tarlatamab, demcizumab, navicixizumab, drozitumab, parsatuzumab, depatuxizumab mafodotin, modotuximab, carotuximab, adecatumumab, adecatumumab, oportuzumab monatox, solitomab, tucotuzumab celmoleukin, edrecolomab, catumaxomab, ifabotuzumab, fibatuzumab, zalutumumab, panitumumab, cetuximab, futuximab, imgatuzumab, laprituximab emtansine, matuzumab, necitumumab, nimotuzumab, tomuzotuximab, amivantamab, amivantamab, epitumomab cituxetan, sontuzumab, duligotuzumab, elgemtumab, lumretuzumab, patritumab, seribantumab, zenocutuzumab, sibrotuzumab, burosumab, aprutumab ixadotin, radretumab, pasotuxizumab, farletuzumab, mirvetuximab soravtansine, vantictumab, TRBS07, 3F8, dinutuximab, dinutuximab beta, ecromeximab, mitumomab, andecaliximab, capromab, codrituzumab, glembatumumab vedotin, talquetamab, talquetamab, trevogrumab, indusatumab vedotin, ficlatuzumab, rilotumumab, zatuximab, pentuzimab, pentuzimab, margetuximab, timigutuzumab, trastuzumab, trastuzumab duocarmazine, trastuzumab emtansine, gancotamab, pertuzumab, ertumaxomab, emibetuzumab, telisotuzumab, telisotuzumab vedotin, derlotuximab biotin, apolizumab, onartuzumab, bersanlimab, enlimomabpegol, rontalizumab, sifalimumab, talizumab, ganitumab, istiratumab, robatumumab, teprotumumab, figitumumab, ganitumab, istiratumab, robatumumab, teprotumumab, cixutumumab, dalotuzumab, xentuzumab, dusigitumab, canakinumab, ustekinumab, ustekinumab, ustekinumab, briakinumab, briakinumab, abrezekimab, lebrikizumab, romilkimab, TNX-650, tralokinumab, anrukinzumab, brodalumab, ixekizumab, netakimab, perakizumab, secukinumab, vunakizumab, afasevikumab, afasevikumab, bimekizumab, bimekizumab, remtolumab, bermekimab, lutikizumab, lutikizumab, gevokizumab, cergutuzumab amunaleukin, fletikumab, fezakinumab, brazikumab, guselkumab, mirikizumab, tildrakizumab, risankizumab, flotetuzumab, nemolizumab, pascolizumab, dupilumab, mepolizumab, reslizumab, clazakizumab, elsilimomab, olokizumab, sarilumab, siltuximab, sirukumab, vobarilizumab, tocilizumab, SA237, satralizumab, enokizumab, prezalizumab, natalizumab, abrilumab, abrilumab, vedolizumab, volociximab, tadocizumab, etaracizumab, etrolizumab, spesolimab, vatelizumab, erlizumab, lirilumab, relatlimab, cBR96-doxorubicinimmunoconjugate, odulimomab, efalizumab, ladiratuzumab vedotin, simtuzumab, samrotamab vedotin, aselizumab, lupartumab amadotin, imalumab, carlumab, imaprelimab, amatuximab, amatuximab, anetumab ravtansine, narnatumab, clivatuzumab tetraxetan, pemtumomab, gatipotuzumab, ensituximab, lemalesomab, sulesomab, enfortumab vedotin, racotumomab, monalizumab, brontictuzumab, tarextumab, vesencumab, oxelumab, gilvetmab, tislelizumab, dostarlimab, BCD-100, nivolumab, PDR001, pembrolizumab, pidilizumab, retifanlimab, spartalizumab, sintilimab, cemiplimab, olaratumab, tovetumab, rinucumab, atezolizumab, avelumab, durvalumab, lifastuzumab vedotin, bavituximab, acapatamab, capromab, rosopatamab, nezastomig, pasotuxizumab, pelgifatamab, voxalatamab, cofetuzumab pelidotin, denosumab, rosmantuzumab, cirmtuzumab, atinumab, indatuximab ravtansine, elotuzumab, sirtratumab vedotin, sonepcizumab, vandortuzumab vedotin, minretumomab, satumomab pendetide, maslimomab, ontuxizumab, tenatumomab, fresolimumab, metelimumab, lerdelimumab, tezepelumab, etigilimab, tiragotumab, placulumab, prezalumab, infliximab, nerelimomab, ozoralizumab, adalimumab, afelimomab, certolizumab pegol, golimumab, mapatumumab, conatumumab, lexatumumab, tigatuzumab, sacituzumab govitecan, votumumab, pogalizumab, letolizumab, pankomab, anatumomab mafenatox, enavatuzumab, flanvotumab, brolucizumab, ranibizumab, varisacumab, bevacizumab, faricimab, icrucumab, alacizumab pegol, ramucirumab, pritumumab, and onvatilimab.

[5658] In some aspects, the antigen binding polypeptides provided herein comprise a VL2 comprising a light chain complementarity determining region 1 (LCDR1), LCDR2, and/or LCDR3 of an antibody selected from the group consisting of losatuxizumab vedotin, utomilumab, urelumab, oleclumab, naptumomab estafenatox, ascrinvacumab, pintumomab, tacatuzumab tetraxetan, nesvacumab, vanucizumab, timolumab, vapaliximab, vepalimomab, enapotamab vedotin, ianalumab, belimumab, tabalumab, tibulizumab, belantamab mafodotin, teclistamab, teclistamab, detumomab, nacolomab tafenatox, eculizumab, lendalizumab, pexelizumab, pozelimab, ravulizumab, tesidolumab, vilobelimab, abagovomab, igovomab, oregovomab, sofituzumab vedotin, cantuzumab mertansine, cantuzuma bravtansine, girentuximab, altumomab pentetate, arcitumomab, besilesomab, bertilimumab, plozalizumab, mogamulizumab, leronlimab, PRO140, rovelizumab, rovelizumab, talacotuzumab, benralizumab, tavolimab, vonlerolizumab, gavilimomab, ziralimumab, fanolesomab, ipilimumab, ruplizumab, toralizumab, dapirolizumab pegol, toralizumab, dapirolizumab pegol, ruplizumab, blinatumomab, inebilizumab, loncastuximab tesirine, SGN-CD19A, tafasitamab, taplitumomab paptox, XMAB-5574, Budoprutug, Obexelimab, duvortuxizumab, englumafusp alfa, Emfizatamab, zeripatamig, siplizumab, blontuvetmab, FBTA05, ibritumomab tiuxetan, obinutuzumab, ocaratuzumab, ocrelizumab, ofatumumab, rituximab, tositumomab, ublituximab, veltuzumab, divozilimab, eramkafusp alfa, ripertamab, zuberitamab, glofitamab, nofetumomab merpentan, samalizumab, imvotamab, odronextamab, plamotamab, bectumomab, inotuzumab ozogamicin, moxetumomab pasudotox, pinatuzumab vedotin, gomiliximab, lumiliximab, inolimomab, inolimomab, daclizumab, camidanluma btesirine, basiliximab, varlilumab, omburtamab, enoblituzumab, vopratelimab, lulizumabpegol, TGN1412, muromonab-CD3, otelixizumab, teplizumab, visilizumab, epcoritamab, epcoritamab, brentuximab vedotin, iratumumab, azintuxizumab vedotin, gemtuzumab ozogamicin, lintuzumab, vadastuximab talirine, naratuximab emtansine, otlertuzumab, lilotomab satetraxetan, tetulomab, daratumumab, isatuximab, foralumab, mosunetuzumab, mosunetuzumab, cedelizumab, ibalizumab, keliximab, priliximab, tregalizumab, zanolimumab, bleselumab, iscalimab, lucatumumab, ravagalimab, selicrelumab, teneliximab, vanalimab, abciximab, bivatuzumab, iomab-B, telimomab aritox, zolimomab aritox, abituzumab, intetumumab, alemtuzumab, tamtuvetmab, lorvotuzumab mertansine, itolizumab, cusatuzumab, vorsetuzumab mafodotin, milatuzumab, iladatuzumab vedotin, polatuzumab vedotin, galiximab, cibisatamab, zolbetuximab, naxitamab, tisotumab vedotin, olendalizumab, pamrevlumab, lacnotuzumab, cabiralizumab, emactuzumab, axatilimab, gimsilumab, lenzilumab, namilumab, tremelimumab, ulocuplumab, tepoditamab, rovalpituzumab tesirine, tarlatamab, demcizumab, navicixizumab, drozitumab, parsatuzumab, depatuxizumab mafodotin, modotuximab, carotuximab, adecatumumab, adecatumumab, oportuzumab monatox, solitomab, tucotuzumab celmoleukin, edrecolomab, catumaxomab, ifabotuzumab, fibatuzumab, zalutumumab, panitumumab, cetuximab, futuximab, imgatuzumab, laprituximab emtansine, matuzumab, necitumumab, nimotuzumab, tomuzotuximab, amivantamab, amivantamab, epitumomab cituxetan, sontuzumab, duligotuzumab, elgemtumab, lumretuzumab, patritumab, scribantumab, zenocutuzumab, sibrotuzumab, burosumab, aprutumab ixadotin, radretumab, pasotuxizumab, farletuzumab, mirvetuximab soravtansine, vantictumab, TRBS07, 3F8, dinutuximab, dinutuximab beta, ecromeximab, mitumomab, andecaliximab, capromab, codrituzumab, glembatumumab vedotin, talquetamab, talquetamab, trevogrumab, indusatumab vedotin, ficlatuzumab, rilotumumab, zatuximab, pentuzimab, pentuzimab, margetuximab, timigutuzumab, trastuzumab, trastuzumab duocarmazine, trastuzumab emtansine, gancotamab, pertuzumab, ertumaxomab, emibetuzumab, telisotuzumab, telisotuzumab vedotin, derlotuximab biotin, apolizumab, onartuzumab, bersanlimab, enlimomabpegol, rontalizumab, sifalimumab, talizumab, ganitumab, istiratumab, robatumumab, teprotumumab, figitumumab, ganitumab, istiratumab, robatumumab, teprotumumab, cixutumumab, dalotuzumab, xentuzumab, dusigitumab, canakinumab, ustekinumab, ustekinumab, ustekinumab, briakinumab, briakinumab, abrezekimab, lebrikizumab, romilkimab, TNX-650, tralokinumab, anrukinzumab, brodalumab, ixekizumab, netakimab, perakizumab, secukinumab, vunakizumab, afasevikumab, afasevikumab, bimekizumab, bimekizumab, remtolumab, bermekimab, lutikizumab, lutikizumab, gevokizumab, cergutuzumab amunaleukin, fletikumab, fezakinumab, brazikumab, guselkumab, mirikizumab, tildrakizumab, risankizumab, flotetuzumab, nemolizumab, pascolizumab, dupilumab, mepolizumab, reslizumab, clazakizumab, elsilimomab, olokizumab, sarilumab, siltuximab, sirukumab, vobarilizumab, tocilizumab, SA237, satralizumab, enokizumab, prezalizumab, natalizumab, abrilumab, abrilumab, vedolizumab, volociximab, tadocizumab, etaracizumab, etrolizumab, spesolimab, vatelizumab, erlizumab, lirilumab, relatlimab, cBR96-doxorubicinimmunoconjugate, odulimomab, efalizumab, ladiratuzumab vedotin, simtuzumab, samrotamab vedotin, aselizumab, lupartumab amadotin, imalumab, carlumab, imaprelimab, amatuximab, amatuximab, anetumab ravtansine, narnatumab, clivatuzumab tetraxetan, pemtumomab, gatipotuzumab, ensituximab, lemalesomab, sulesomab, enfortumab vedotin, racotumomab, monalizumab, brontictuzumab, tarextumab, vesencumab, oxelumab, gilvetmab, tislelizumab, dostarlimab, BCD-100, nivolumab, PDR001, pembrolizumab, pidilizumab, retifanlimab, spartalizumab, sintilimab, cemiplimab, olaratumab, tovetumab, rinucumab, atezolizumab, avelumab, durvalumab, lifastuzumab vedotin, bavituximab, acapatamab, capromab, rosopatamab, nezastomig, pasotuxizumab, pelgifatamab, voxalatamab, cofetuzumab pelidotin, denosumab, rosmantuzumab, cirmtuzumab, atinumab, indatuximab ravtansine, elotuzumab, sirtratumab vedotin, sonepcizumab, vandortuzumab vedotin, minretumomab, satumomab pendetide, maslimomab, ontuxizumab, tenatumomab, fresolimumab, metelimumab, lerdelimumab, tezepelumab, etigilimab, tiragotumab, placulumab, prezalumab, infliximab, nerelimomab, ozoralizumab, adalimumab, afelimomab, certolizumab pegol, golimumab, mapatumumab, conatumumab, lexatumumab, tigatuzumab, sacituzumab govitecan, votumumab, pogalizumab, letolizumab, pankomab, anatumomab mafenatox, enavatuzumab, flanvotumab, brolucizumab, ranibizumab, varisacumab, bevacizumab, faricimab, icrucumab, alacizumab pegol, ramucirumab, pritumumab, and onvatilimab.

[5659] In some aspects, the antigen binding polypeptides provided herein comprise a VH1 comprising a heavy chain complementarity determining region 1 (HCDR1), HCDR2, and/or HCDR3 of an antibody selected from the group consisting of losatuxizumab vedotin, utomilumab, urelumab, oleclumab, naptumomab estafenatox, ascrinvacumab, pintumomab, tacatuzumab tetraxetan, nesvacumab, vanucizumab, timolumab, vapaliximab, vepalimomab, enapotamab vedotin, ianalumab, belimumab, tabalumab, tibulizumab, belantamab mafodotin, teclistamab, teclistamab, detumomab, nacolomab tafenatox, eculizumab, lendalizumab, pexelizumab, pozelimab, ravulizumab, tesidolumab, vilobelimab, abagovomab, igovomab, oregovomab, sofituzumab vedotin, cantuzumab mertansine, cantuzuma bravtansine, girentuximab, altumomab pentetate, arcitumomab, besilesomab, bertilimumab, plozalizumab, mogamulizumab, leronlimab, PRO140, rovelizumab, rovelizumab, talacotuzumab, benralizumab, tavolimab, vonlerolizumab, gavilimomab, ziralimumab, fanolesomab, ipilimumab, ruplizumab, toralizumab, dapirolizumab pegol, toralizumab, dapirolizumab pegol, ruplizumab, blinatumomab, inebilizumab, loncastuximab tesirine, SGN-CD19A, tafasitamab, taplitumomab paptox, XMAB-5574, Budoprutug, Obexelimab, duvortuxizumab, englumafusp alfa, Emfizatamab, zeripatamig, siplizumab, blontuvetmab, FBTA05, ibritumomab tiuxetan, obinutuzumab, ocaratuzumab, ocrelizumab, ofatumumab, rituximab, tositumomab, ublituximab, veltuzumab, divozilimab, eramkafusp alfa, ripertamab, zuberitamab, glofitamab, nofetumomab merpentan, samalizumab, imvotamab, odronextamab, plamotamab, bectumomab, inotuzumab ozogamicin, moxetumomab pasudotox, pinatuzumab vedotin, gomiliximab, lumiliximab, inolimomab, inolimomab, daclizumab, camidanluma btesirine, basiliximab, varlilumab, omburtamab, cnoblituzumab, vopratelimab, lulizumabpegol, TGN1412, muromonab-CD3, otelixizumab, teplizumab, visilizumab, epcoritamab, epcoritamab, brentuximab vedotin, iratumumab, azintuxizumab vedotin, gemtuzumab ozogamicin, lintuzumab, vadastuximab talirine, naratuximab emtansine, otlertuzumab, lilotomab satetraxetan, tetulomab, daratumumab, isatuximab, foralumab, mosunetuzumab, mosunetuzumab, cedelizumab, ibalizumab, keliximab, priliximab, tregalizumab, zanolimumab, bleselumab, iscalimab, lucatumumab, ravagalimab, selicrelumab, teneliximab, vanalimab, abciximab, bivatuzumab, iomab-B, telimomab aritox, zolimomab aritox, abituzumab, intetumumab, alemtuzumab, tamtuvetmab, lorvotuzumab mertansine, itolizumab, cusatuzumab, vorsetuzumab mafodotin, milatuzumab, iladatuzumab vedotin, polatuzumab vedotin, galiximab, cibisatamab, zolbetuximab, naxitamab, tisotumab vedotin, olendalizumab, pamrevlumab, lacnotuzumab, cabiralizumab, emactuzumab, axatilimab, gimsilumab, lenzilumab, namilumab, tremelimumab, ulocuplumab, tepoditamab, rovalpituzumab tesirine, tarlatamab, demcizumab, navicixizumab, drozitumab, parsatuzumab, depatuxizumab mafodotin, modotuximab, carotuximab, adecatumumab, adecatumumab, oportuzumab monatox, solitomab, tucotuzumab celmoleukin, edrecolomab, catumaxomab, ifabotuzumab, fibatuzumab, zalutumumab, panitumumab, cetuximab, futuximab, imgatuzumab, laprituximab emtansine, matuzumab, necitumumab, nimotuzumab, tomuzotuximab, amivantamab, amivantamab, epitumomab cituxetan, sontuzumab, duligotuzumab, elgemtumab, lumretuzumab, patritumab, seribantumab, zenocutuzumab, sibrotuzumab, burosumab, aprutumab ixadotin, radretumab, pasotuxizumab, farletuzumab, mirvetuximab soravtansine, vantictumab, TRBS07, 3F8, dinutuximab, dinutuximab beta, ecromeximab, mitumomab, andecaliximab, capromab, codrituzumab, glembatumumab vedotin, talquetamab, talquetamab, trevogrumab, indusatumab vedotin, ficlatuzumab, rilotumumab, zatuximab, pentuzimab, pentuzimab, margetuximab, timigutuzumab, trastuzumab, trastuzumab duocarmazine, trastuzumab emtansine, gancotamab, pertuzumab, ertumaxomab, emibetuzumab, telisotuzumab, telisotuzumab vedotin, derlotuximab biotin, apolizumab, onartuzumab, bersanlimab, enlimomabpegol, rontalizumab, sifalimumab, talizumab, ganitumab, istiratumab, robatumumab, teprotumumab, figitumumab, ganitumab, istiratumab, robatumumab, teprotumumab, cixutumumab, dalotuzumab, xentuzumab, dusigitumab, canakinumab, ustekinumab, ustekinumab, ustekinumab, briakinumab, briakinumab, abrezckimab, lebrikizumab, romilkimab, TNX-650, tralokinumab, anrukinzumab, brodalumab, ixekizumab, netakimab, perakizumab, secukinumab, vunakizumab, afasevikumab, afasevikumab, bimekizumab, bimekizumab, remtolumab, bermekimab, lutikizumab, lutikizumab, gevokizumab, cergutuzumab amunaleukin, fletikumab, fezakinumab, brazikumab, guselkumab, mirikizumab, tildrakizumab, risankizumab, flotetuzumab, nemolizumab, pascolizumab, dupilumab, mepolizumab, reslizumab, clazakizumab, elsilimomab, olokizumab, sarilumab, siltuximab, sirukumab, vobarilizumab, tocilizumab, SA237, satralizumab, enokizumab, prezalizumab, natalizumab, abrilumab, abrilumab, vedolizumab, volociximab, tadocizumab, etaracizumab, etrolizumab, spesolimab, vatelizumab, erlizumab, lirilumab, relatlimab, cBR96-doxorubicinimmunoconjugate, odulimomab, efalizumab, ladiratuzumab vedotin, simtuzumab, samrotamab vedotin, aselizumab, lupartumab amadotin, imalumab, carlumab, imaprelimab, amatuximab, amatuximab, anetumab ravtansine, narnatumab, clivatuzumab tetraxetan, pemtumomab, gatipotuzumab, ensituximab, lemalesomab, sulesomab, enfortumab vedotin, racotumomab, monalizumab, brontictuzumab, tarextumab, vesencumab, oxelumab, gilvetmab, tislelizumab, dostarlimab, BCD-100, nivolumab, PDR001, pembrolizumab, pidilizumab, retifanlimab, spartalizumab, sintilimab, cemiplimab, olaratumab, tovetumab, rinucumab, atezolizumab, avelumab, durvalumab, lifastuzumab vedotin, bavituximab, acapatamab, capromab, rosopatamab, nezastomig, pasotuxizumab, pelgifatamab, voxalatamab, cofetuzumab pelidotin, denosumab, rosmantuzumab, cirmtuzumab, atinumab, indatuximab ravtansine, elotuzumab, sirtratumab vedotin, sonepcizumab, vandortuzumab vedotin, minretumomab, satumomab pendetide, maslimomab, ontuxizumab, tenatumomab, fresolimumab, metelimumab, lerdelimumab, tezepelumab, etigilimab, tiragotumab, placulumab, prezalumab, infliximab, nerelimomab, ozoralizumab, adalimumab, afelimomab, certolizumab pegol, golimumab, mapatumumab, conatumumab, lexatumumab, tigatuzumab, sacituzumab govitecan, votumumab, pogalizumab, letolizumab, pankomab, anatumomab mafenatox, enavatuzumab, flanvotumab, brolucizumab, ranibizumab, varisacumab, bevacizumab, faricimab, icrucumab, alacizumab pegol, ramucirumab, pritumumab, and onvatilimab.

[5660] In some aspects, the antigen binding polypeptides provided herein comprise a VH2 comprising a heavy chain complementarity determining region 1 (HCDR1), HCDR2, and/or HCDR3 of an antibody selected from the group consisting of losatuxizumab vedotin, utomilumab, urelumab, oleclumab, naptumomab estafenatox, ascrinvacumab, pintumomab, tacatuzumab tetraxetan, nesvacumab, vanucizumab, timolumab, vapaliximab, vepalimomab, enapotamab vedotin, ianalumab, belimumab, tabalumab, tibulizumab, belantamab mafodotin, teclistamab, teclistamab, detumomab, nacolomab tafenatox, eculizumab, lendalizumab, pexelizumab, pozelimab, ravulizumab, tesidolumab, vilobelimab, abagovomab, igovomab, oregovomab, sofituzumab vedotin, cantuzumab mertansine, cantuzuma bravtansine, girentuximab, altumomab pentetate, arcitumomab, besilesomab, bertilimumab, plozalizumab, mogamulizumab, leronlimab, PRO140, rovelizumab, rovelizumab, talacotuzumab, benralizumab, tavolimab, vonlerolizumab, gavilimomab, ziralimumab, fanolesomab, ipilimumab, ruplizumab, toralizumab, dapirolizumab pegol, toralizumab, dapirolizumab pegol, ruplizumab, blinatumomab, inebilizumab, loncastuximab tesirine, SGN-CD19A, tafasitamab, taplitumomab paptox, XMAB-5574, Budoprutug, Obexelimab, duvortuxizumab, englumafusp alfa, Emfizatamab, zeripatamig, siplizumab, blontuvetmab, FBTA05, ibritumomab tiuxetan, obinutuzumab, ocaratuzumab, ocrelizumab, ofatumumab, rituximab, tositumomab, ublituximab, veltuzumab, divozilimab, eramkafusp alfa, ripertamab, zuberitamab, glofitamab, nofetumomab merpentan, samalizumab, imvotamab, odronextamab, plamotamab, bectumomab, inotuzumab ozogamicin, moxetumomab pasudotox, pinatuzumab vedotin, gomiliximab, lumiliximab, inolimomab, inolimomab, daclizumab, camidanluma btesirine, basiliximab, varlilumab, omburtamab, enoblituzumab, vopratelimab, lulizumabpegol, TGN1412, muromonab-CD3, otelixizumab, teplizumab, visilizumab, epcoritamab, epcoritamab, brentuximab vedotin, iratumumab, azintuxizumab vedotin, gemtuzumab ozogamicin, lintuzumab, vadastuximab talirine, naratuximab emtansine, otlertuzumab, lilotomab satetraxetan, tetulomab, daratumumab, isatuximab, foralumab, mosunetuzumab, mosunetuzumab, cedelizumab, ibalizumab, keliximab, priliximab, tregalizumab, zanolimumab, bleselumab, iscalimab, lucatumumab, ravagalimab, selicrelumab, teneliximab, vanalimab, abciximab, bivatuzumab, iomab-B, telimomab aritox, zolimomab aritox, abituzumab, intetumumab, alemtuzumab, tamtuvetmab, lorvotuzumab mertansine, itolizumab, cusatuzumab, vorsetuzumab mafodotin, milatuzumab, iladatuzumab vedotin, polatuzumab vedotin, galiximab, cibisatamab, zolbetuximab, naxitamab, tisotumab vedotin, olendalizumab, pamrevlumab, lacnotuzumab, cabiralizumab, emactuzumab, axatilimab, gimsilumab, lenzilumab, namilumab, tremelimumab, ulocuplumab, tepoditamab, rovalpituzumab tesirine, tarlatamab, demcizumab, navicixizumab, drozitumab, parsatuzumab, depatuxizumab mafodotin, modotuximab, carotuximab, adecatumumab, adecatumumab, oportuzumab monatox, solitomab, tucotuzumab celmoleukin, edrecolomab, catumaxomab, ifabotuzumab, fibatuzumab, zalutumumab, panitumumab, cetuximab, futuximab, imgatuzumab, laprituximab emtansine, matuzumab, necitumumab, nimotuzumab, tomuzotuximab, amivantamab, amivantamab, cpitumomab cituxetan, sontuzumab, duligotuzumab, elgemtumab, lumretuzumab, patritumab, seribantumab, zenocutuzumab, sibrotuzumab, burosumab, aprutumab ixadotin, radretumab, pasotuxizumab, farletuzumab, mirvetuximab soravtansine, vantictumab, TRBS07, 3F8, dinutuximab, dinutuximab beta, ecromeximab, mitumomab, andecaliximab, capromab, codrituzumab, glembatumumab vedotin, talquetamab, talquetamab, trevogrumab, indusatumab vedotin, ficlatuzumab, rilotumumab, zatuximab, pentuzimab, pentuzimab, margetuximab, timigutuzumab, trastuzumab, trastuzumab duocarmazine, trastuzumab emtansine, gancotamab, pertuzumab, ertumaxomab, emibetuzumab, telisotuzumab, telisotuzumab vedotin, derlotuximab biotin, apolizumab, onartuzumab, bersanlimab, enlimomabpegol, rontalizumab, sifalimumab, talizumab, ganitumab, istiratumab, robatumumab, teprotumumab, figitumumab, ganitumab, istiratumab, robatumumab, teprotumumab, cixutumumab, dalotuzumab, xentuzumab, dusigitumab, canakinumab, ustekinumab, ustekinumab, ustekinumab, briakinumab, briakinumab, abrezekimab, lebrikizumab, romilkimab, TNX-650, tralokinumab, anrukinzumab, brodalumab, ixekizumab, netakimab, perakizumab, secukinumab, vunakizumab, afasevikumab, afasevikumab, bimekizumab, bimekizumab, remtolumab, bermckimab, lutikizumab, lutikizumab, gevokizumab, cergutuzumab amunaleukin, fletikumab, fezakinumab, brazikumab, guselkumab, mirikizumab, tildrakizumab, risankizumab, flotetuzumab, nemolizumab, pascolizumab, dupilumab, mepolizumab, reslizumab, clazakizumab, elsilimomab, olokizumab, sarilumab, siltuximab, sirukumab, vobarilizumab, tocilizumab, SA237, satralizumab, enokizumab, prezalizumab, natalizumab, abrilumab, abrilumab, vedolizumab, volociximab, tadocizumab, etaracizumab, etrolizumab, spesolimab, vatelizumab, crlizumab, lirilumab, relatlimab, cBR96-doxorubicinimmunoconjugate, odulimomab, efalizumab, ladiratuzumab vedotin, simtuzumab, samrotamab vedotin, aselizumab, lupartumab amadotin, imalumab, carlumab, imaprelimab, amatuximab, amatuximab, anctumab ravtansine, narnatumab, clivatuzumab tetraxetan, pemtumomab, gatipotuzumab, ensituximab, lemalesomab, sulesomab, enfortumab vedotin, racotumomab, monalizumab, brontictuzumab, tarextumab, vesencumab, oxelumab, gilvetmab, tislelizumab, dostarlimab, BCD-100, nivolumab, PDR001, pembrolizumab, pidilizumab, retifanlimab, spartalizumab, sintilimab, cemiplimab, olaratumab, tovetumab, rinucumab, atezolizumab, avelumab, durvalumab, lifastuzumab vedotin, bavituximab, acapatamab, capromab, rosopatamab, nezastomig, pasotuxizumab, pelgifatamab, voxalatamab, cofetuzumab pelidotin, denosumab, rosmantuzumab, cirmtuzumab, atinumab, indatuximab ravtansine, elotuzumab, sirtratumab vedotin, sonepcizumab, vandortuzumab vedotin, minretumomab, satumomab pendetide, maslimomab, ontuxizumab, tenatumomab, fresolimumab, metelimumab, lerdelimumab, tezepelumab, etigilimab, tiragotumab, placulumab, prezalumab, infliximab, nerelimomab, ozoralizumab, adalimumab, afelimomab, certolizumab pegol, golimumab, mapatumumab, conatumumab, lexatumumab, tigatuzumab, sacituzumab govitecan, votumumab, pogalizumab, letolizumab, pankomab, anatumomab mafenatox, enavatuzumab, flanvotumab, brolucizumab, ranibizumab, varisacumab, bevacizumab, faricimab, icrucumab, alacizumab pegol, ramucirumab, pritumumab, and onvatilimab.

[5661] In some aspects, the antigen binding polypeptides provided herein comprise a VL1 comprising a VL of an antibody selected from the group consisting of losatuxizumab vedotin, utomilumab, urelumab, oleclumab, naptumomab estafenatox, ascrinvacumab, pintumomab, tacatuzumab tetraxetan, nesvacumab, vanucizumab, timolumab, vapaliximab, vepalimomab, enapotamab vedotin, ianalumab, belimumab, tabalumab, tibulizumab, belantamab mafodotin, teclistamab, teclistamab, detumomab, nacolomab tafenatox, eculizumab, lendalizumab, pexelizumab, pozelimab, ravulizumab, tesidolumab, vilobclimab, abagovomab, igovomab, oregovomab, sofituzumab vedotin, cantuzumab mertansine, cantuzuma bravtansine, girentuximab, altumomab pentetate, arcitumomab, besilesomab, bertilimumab, plozalizumab, mogamulizumab, leronlimab, PRO140, rovelizumab, rovelizumab, talacotuzumab, benralizumab, tavolimab, vonlerolizumab, gavilimomab, ziralimumab, fanolesomab, ipilimumab, ruplizumab, toralizumab, dapirolizumab pegol, toralizumab, dapirolizumab pegol, ruplizumab, blinatumomab, inebilizumab, loncastuximab tesirine, SGN-CD19A, tafasitamab, taplitumomab paptox, XMAB-5574, Budoprutug, Obexelimab, duvortuxizumab, englumafusp alfa, Emfizatamab, zeripatamig, siplizumab, blontuvetmab, FBTA05, ibritumomab tiuxetan, obinutuzumab, ocaratuzumab, ocrelizumab, ofatumumab, rituximab, tositumomab, ublituximab, veltuzumab, divozilimab, eramkafusp alfa, ripertamab, zuberitamab, glofitamab, nofetumomab merpentan, samalizumab, imvotamab, odronextamab, plamotamab, bectumomab, inotuzumab ozogamicin, moxetumomab pasudotox, pinatuzumab vedotin, gomiliximab, lumiliximab, inolimomab, inolimomab, daclizumab, camidanluma btesirine, basiliximab, varlilumab, omburtamab, enoblituzumab, vopratelimab, lulizumabpegol, TGN1412, muromonab-CD3, otelixizumab, teplizumab, visilizumab, epcoritamab, epcoritamab, brentuximab vedotin, iratumumab, azintuxizumab vedotin, gemtuzumab ozogamicin, lintuzumab, vadastuximab talirine, naratuximab emtansine, otlertuzumab, lilotomab satetraxetan, tetulomab, daratumumab, isatuximab, foralumab, mosunetuzumab, mosunetuzumab, cedelizumab, ibalizumab, keliximab, priliximab, tregalizumab, zanolimumab, bleselumab, iscalimab, lucatumumab, ravagalimab, selicrelumab, teneliximab, vanalimab, abciximab, bivatuzumab, iomab-B, telimomab aritox, zolimomab aritox, abituzumab, intetumumab, alemtuzumab, tamtuvetmab, lorvotuzumab mertansine, itolizumab, cusatuzumab, vorsetuzumab mafodotin, milatuzumab, iladatuzumab vedotin, polatuzumab vedotin, galiximab, cibisatamab, zolbetuximab, naxitamab, tisotumab vedotin, olendalizumab, pamrevlumab, lacnotuzumab, cabiralizumab, emactuzumab, axatilimab, gimsilumab, lenzilumab, namilumab, tremelimumab, ulocuplumab, tepoditamab, rovalpituzumab tesirine, tarlatamab, demcizumab, navicixizumab, drozitumab, parsatuzumab, depatuxizumab mafodotin, modotuximab, carotuximab, adecatumumab, adecatumumab, oportuzumab monatox, solitomab, tucotuzumab celmoleukin, edrecolomab, catumaxomab, ifabotuzumab, fibatuzumab, zalutumumab, panitumumab, cetuximab, futuximab, imgatuzumab, laprituximab emtansine, matuzumab, necitumumab, nimotuzumab, tomuzotuximab, amivantamab, amivantamab, epitumomab cituxetan, sontuzumab, duligotuzumab, elgemtumab, lumretuzumab, patritumab, seribantumab, zenocutuzumab, sibrotuzumab, burosumab, aprutumab ixadotin, radretumab, pasotuxizumab, farletuzumab, mirvetuximab soravtansine, vantictumab, TRBS07, 3F8, dinutuximab, dinutuximab beta, ecromeximab, mitumomab, andecaliximab, capromab, codrituzumab, glembatumumab vedotin, talquetamab, talquetamab, trevogrumab, indusatumab vedotin, ficlatuzumab, rilotumumab, zatuximab, pentuzimab, pentuzimab, margetuximab, timigutuzumab, trastuzumab, trastuzumab duocarmazine, trastuzumab emtansine, gancotamab, pertuzumab, ertumaxomab, emibetuzumab, telisotuzumab, telisotuzumab vedotin, derlotuximab biotin, apolizumab, onartuzumab, bersanlimab, enlimomabpegol, rontalizumab, sifalimumab, talizumab, ganitumab, istiratumab, robatumumab, teprotumumab, figitumumab, ganitumab, istiratumab, robatumumab, teprotumumab, cixutumumab, dalotuzumab, xentuzumab, dusigitumab, canakinumab, ustekinumab, ustekinumab, ustekinumab, briakinumab, briakinumab, abrezekimab, lebrikizumab, romilkimab, TNX-650, tralokinumab, anrukinzumab, brodalumab, ixekizumab, netakimab, perakizumab, secukinumab, vunakizumab, afasevikumab, afasevikumab, bimekizumab, bimekizumab, remtolumab, bermekimab, lutikizumab, lutikizumab, gevokizumab, cergutuzumab amunaleukin, fletikumab, fezakinumab, brazikumab, guselkumab, mirikizumab, tildrakizumab, risankizumab, flotetuzumab, nemolizumab, pascolizumab, dupilumab, mepolizumab, reslizumab, clazakizumab, elsilimomab, olokizumab, sarilumab, siltuximab, sirukumab, vobarilizumab, tocilizumab, SA237, satralizumab, enokizumab, prezalizumab, natalizumab, abrilumab, abrilumab, vedolizumab, volociximab, tadocizumab, etaracizumab, etrolizumab, spesolimab, vatelizumab, erlizumab, lirilumab, relatlimab, cBR96-doxorubicinimmunoconjugate, odulimomab, efalizumab, ladiratuzumab vedotin, simtuzumab, samrotamab vedotin, aselizumab, lupartumab amadotin, imalumab, carlumab, imaprelimab, amatuximab, amatuximab, anetumab ravtansine, narnatumab, clivatuzumab tetraxetan, pemtumomab, gatipotuzumab, ensituximab, lemalesomab, sulesomab, enfortumab vedotin, racotumomab, monalizumab, brontictuzumab, tarextumab, vesencumab, oxelumab, gilvetmab, tislelizumab, dostarlimab, BCD-100, nivolumab, PDR001, pembrolizumab, pidilizumab, retifanlimab, spartalizumab, sintilimab, cemiplimab, olaratumab, tovetumab, rinucumab, atezolizumab, avelumab, durvalumab, lifastuzumab vedotin, bavituximab, acapatamab, capromab, rosopatamab, nezastomig, pasotuxizumab, pelgifatamab, voxalatamab, cofetuzumab pelidotin, denosumab, rosmantuzumab, cirmtuzumab, atinumab, indatuximab ravtansine, elotuzumab, sirtratumab vedotin, sonepcizumab, vandortuzumab vedotin, minretumomab, satumomab pendetide, maslimomab, ontuxizumab, tenatumomab, fresolimumab, metelimumab, lerdelimumab, tezepelumab, etigilimab, tiragotumab, placulumab, prezalumab, infliximab, nerelimomab, ozoralizumab, adalimumab, afelimomab, certolizumab pegol, golimumab, mapatumumab, conatumumab, lexatumumab, tigatuzumab, sacituzumab govitecan, votumumab, pogalizumab, letolizumab, pankomab, anatumomab mafenatox, enavatuzumab, flanvotumab, brolucizumab, ranibizumab, varisacumab, bevacizumab, faricimab, icrucumab, alacizumab pegol, ramucirumab, pritumumab, and onvatilimab.

[5662] In some aspects, the antigen binding polypeptides provided herein comprise a VL2 comprising a VL of an antibody selected from the group consisting of losatuxizumab vedotin, utomilumab, urelumab, oleclumab, naptumomab estafenatox, ascrinvacumab, pintumomab, tacatuzumab tetraxetan, nesvacumab, vanucizumab, timolumab, vapaliximab, vepalimomab, enapotamab vedotin, ianalumab, belimumab, tabalumab, tibulizumab, belantamab mafodotin, teclistamab, teclistamab, detumomab, nacolomab tafenatox, eculizumab, lendalizumab, pexelizumab, pozelimab, ravulizumab, tesidolumab, vilobelimab, abagovomab, igovomab, oregovomab, sofituzumab vedotin, cantuzumab mertansine, cantuzuma bravtansine, girentuximab, altumomab pentetate, arcitumomab, besilesomab, bertilimumab, plozalizumab, mogamulizumab, leronlimab, PRO140, rovelizumab, rovelizumab, talacotuzumab, benralizumab, tavolimab, vonlerolizumab, gavilimomab, ziralimumab, fanolesomab, ipilimumab, ruplizumab, toralizumab, dapirolizumab pegol, toralizumab, dapirolizumab pegol, ruplizumab, blinatumomab, inebilizumab, loncastuximab tesirine, SGN-CD19A, tafasitamab, taplitumomab paptox, XMAB-5574, Budoprutug, Obexelimab, duvortuxizumab, englumafusp alfa, Emfizatamab, zeripatamig, siplizumab, blontuvetmab, FBTA05, ibritumomab tiuxetan, obinutuzumab, ocaratuzumab, ocrelizumab, ofatumumab, rituximab, tositumomab, ublituximab, veltuzumab, divozilimab, eramkafusp alfa, ripertamab, zuberitamab, glofitamab, nofetumomab merpentan, samalizumab, imvotamab, odronextamab, plamotamab, bectumomab, inotuzumab ozogamicin, moxetumomab pasudotox, pinatuzumab vedotin, gomiliximab, lumiliximab, inolimomab, inolimomab, daclizumab, camidanluma btesirine, basiliximab, varlilumab, omburtamab, enoblituzumab, vopratelimab, lulizumabpegol, TGN1412, muromonab-CD3, otelixizumab, teplizumab, visilizumab, epcoritamab, epcoritamab, brentuximab vedotin, iratumumab, azintuxizumab vedotin, gemtuzumab ozogamicin, lintuzumab, vadastuximab talirine, naratuximab emtansine, otlertuzumab, lilotomab satetraxetan, tetulomab, daratumumab, isatuximab, foralumab, mosunetuzumab, mosunetuzumab, cedelizumab, ibalizumab, keliximab, priliximab, tregalizumab, zanolimumab, bleselumab, iscalimab, lucatumumab, ravagalimab, selicrelumab, teneliximab, vanalimab, abciximab, bivatuzumab, iomab-B, telimomab aritox, zolimomab aritox, abituzumab, intetumumab, alemtuzumab, tamtuvetmab, lorvotuzumab mertansine, itolizumab, cusatuzumab, vorsetuzumab mafodotin, milatuzumab, iladatuzumab vedotin, polatuzumab vedotin, galiximab, cibisatamab, zolbetuximab, naxitamab, tisotumab vedotin, olendalizumab, pamrevlumab, lacnotuzumab, cabiralizumab, emactuzumab, axatilimab, gimsilumab, lenzilumab, namilumab, tremelimumab, ulocuplumab, tepoditamab, rovalpituzumab tesirine, tarlatamab, demcizumab, navicixizumab, drozitumab, parsatuzumab, depatuxizumab mafodotin, modotuximab, carotuximab, adecatumumab, adecatumumab, oportuzumab monatox, solitomab, tucotuzumab celmoleukin, edrecolomab, catumaxomab, ifabotuzumab, fibatuzumab, zalutumumab, panitumumab, cetuximab, futuximab, imgatuzumab, laprituximab emtansine, matuzumab, necitumumab, nimotuzumab, tomuzotuximab, amivantamab, amivantamab, epitumomab cituxetan, sontuzumab, duligotuzumab, elgemtumab, lumretuzumab, patritumab, seribantumab, zenocutuzumab, sibrotuzumab, burosumab, aprutumab ixadotin, radretumab, pasotuxizumab, farletuzumab, mirvetuximab soravtansine, vantictumab, TRBS07, 3F8, dinutuximab, dinutuximab beta, ecromeximab, mitumomab, andecaliximab, capromab, codrituzumab, glembatumumab vedotin, talquetamab, talquetamab, trevogrumab, indusatumab vedotin, ficlatuzumab, rilotumumab, zatuximab, pentuzimab, pentuzimab, margetuximab, timigutuzumab, trastuzumab, trastuzumab duocarmazine, trastuzumab emtansine, gancotamab, pertuzumab, ertumaxomab, emibetuzumab, telisotuzumab, telisotuzumab vedotin, derlotuximab biotin, apolizumab, onartuzumab, bersanlimab, enlimomabpegol, rontalizumab, sifalimumab, talizumab, ganitumab, istiratumab, robatumumab, teprotumumab, figitumumab, ganitumab, istiratumab, robatumumab, teprotumumab, cixutumumab, dalotuzumab, xentuzumab, dusigitumab, canakinumab, ustekinumab, ustekinumab, ustekinumab, briakinumab, briakinumab, abrezekimab, lebrikizumab, romilkimab, TNX-650, tralokinumab, anrukinzumab, brodalumab, ixekizumab, netakimab, perakizumab, secukinumab, vunakizumab, afasevikumab, afasevikumab, bimekizumab, bimekizumab, remtolumab, bermekimab, lutikizumab, lutikizumab, gevokizumab, cergutuzumab amunaleukin, fletikumab, fezakinumab, brazikumab, guselkumab, mirikizumab, tildrakizumab, risankizumab, flotetuzumab, nemolizumab, pascolizumab, dupilumab, mepolizumab, reslizumab, clazakizumab, elsilimomab, olokizumab, sarilumab, siltuximab, sirukumab, vobarilizumab, tocilizumab, SA237, satralizumab, enokizumab, prezalizumab, natalizumab, abrilumab, abrilumab, vedolizumab, volociximab, tadocizumab, etaracizumab, etrolizumab, spesolimab, vatelizumab, erlizumab, lirilumab, relatlimab, cBR96-doxorubicinimmunoconjugate, odulimomab, efalizumab, ladiratuzumab vedotin, simtuzumab, samrotamab vedotin, aselizumab, lupartumab amadotin, imalumab, carlumab, imaprelimab, amatuximab, amatuximab, anetumab ravtansine, narnatumab, clivatuzumab tetraxetan, pemtumomab, gatipotuzumab, ensituximab, lemalesomab, sulesomab, enfortumab vedotin, racotumomab, monalizumab, brontictuzumab, tarextumab, vesencumab, oxelumab, gilvetmab, tislelizumab, dostarlimab, BCD-100, nivolumab, PDR001, pembrolizumab, pidilizumab, retifanlimab, spartalizumab, sintilimab, cemiplimab, olaratumab, tovetumab, rinucumab, atezolizumab, avelumab, durvalumab, lifastuzumab vedotin, bavituximab, acapatamab, capromab, rosopatamab, nezastomig, pasotuxizumab, pelgifatamab, voxalatamab, cofetuzumab pelidotin, denosumab, rosmantuzumab, cirmtuzumab, atinumab, indatuximab ravtansine, elotuzumab, sirtratumab vedotin, sonepcizumab, vandortuzumab vedotin, minretumomab, satumomab pendetide, maslimomab, ontuxizumab, tenatumomab, fresolimumab, metelimumab, lerdelimumab, tezepelumab, etigilimab, tiragotumab, placulumab, prezalumab, infliximab, nerelimomab, ozoralizumab, adalimumab, afelimomab, certolizumab pegol, golimumab, mapatumumab, conatumumab, lexatumumab, tigatuzumab, sacituzumab govitecan, votumumab, pogalizumab, letolizumab, pankomab, anatumomab mafenatox, enavatuzumab, flanvotumab, brolucizumab, ranibizumab, varisacumab, bevacizumab, faricimab, icrucumab, alacizumab pegol, ramucirumab, pritumumab, and onvatilimab.

[5663] In some aspects, the antigen binding polypeptides provided herein comprise a VH1 comprising a VH of an antibody selected from the group consisting of losatuxizumab vedotin, utomilumab, urelumab, oleclumab, naptumomab estafenatox, ascrinvacumab, pintumomab, tacatuzumab tetraxetan, nesvacumab, vanucizumab, timolumab, vapaliximab, vepalimomab, enapotamab vedotin, ianalumab, belimumab, tabalumab, tibulizumab, belantamab mafodotin, teclistamab, teclistamab, detumomab, nacolomab tafenatox, eculizumab, lendalizumab, pexelizumab, pozelimab, ravulizumab, tesidolumab, vilobelimab, abagovomab, igovomab, oregovomab, sofituzumab vedotin, cantuzumab mertansine, cantuzuma bravtansine, girentuximab, altumomab pentetate, arcitumomab, besilesomab, bertilimumab, plozalizumab, mogamulizumab, leronlimab, PRO140, rovelizumab, rovelizumab, talacotuzumab, benralizumab, tavolimab, vonlerolizumab, gavilimomab, ziralimumab, fanolesomab, ipilimumab, ruplizumab, toralizumab, dapirolizumab pegol, toralizumab, dapirolizumab pegol, ruplizumab, blinatumomab, inebilizumab, loncastuximab tesirine, SGN-CD19A, tafasitamab, taplitumomab paptox, XMAB-5574, Budoprutug, Obexelimab, duvortuxizumab, englumafusp alfa, Emfizatamab, zeripatamig, siplizumab, blontuvetmab, FBTA05, ibritumomab tiuxetan, obinutuzumab, ocaratuzumab, ocrelizumab, ofatumumab, rituximab, tositumomab, ublituximab, veltuzumab, divozilimab, eramkafusp alfa, ripertamab, zuberitamab, glofitamab, nofetumomab merpentan, samalizumab, imvotamab, odronextamab, plamotamab, bectumomab, inotuzumab ozogamicin, moxetumomab pasudotox, pinatuzumab vedotin, gomiliximab, lumiliximab, inolimomab, inolimomab, daclizumab, camidanluma btesirine, basiliximab, varlilumab, omburtamab, enoblituzumab, vopratelimab, lulizumabpegol, TGN1412, muromonab-CD3, otelixizumab, teplizumab, visilizumab, epcoritamab, epcoritamab, brentuximab vedotin, iratumumab, azintuxizumab vedotin, gemtuzumab ozogamicin, lintuzumab, vadastuximab talirine, naratuximab emtansine, otlertuzumab, lilotomab satetraxetan, tetulomab, daratumumab, isatuximab, foralumab, mosunetuzumab, mosunetuzumab, cedelizumab, ibalizumab, keliximab, priliximab, tregalizumab, zanolimumab, bleselumab, iscalimab, lucatumumab, ravagalimab, selicrelumab, teneliximab, vanalimab, abciximab, bivatuzumab, iomab-B, telimomab aritox, zolimomab aritox, abituzumab, intetumumab, alemtuzumab, tamtuvetmab, lorvotuzumab mertansine, itolizumab, cusatuzumab, vorsetuzumab mafodotin, milatuzumab, iladatuzumab vedotin, polatuzumab vedotin, galiximab, cibisatamab, zolbetuximab, naxitamab, tisotumab vedotin, olendalizumab, pamrevlumab, lacnotuzumab, cabiralizumab, emactuzumab, axatilimab, gimsilumab, lenzilumab, namilumab, tremelimumab, ulocuplumab, tepoditamab, rovalpituzumab tesirine, tarlatamab, demcizumab, navicixizumab, drozitumab, parsatuzumab, depatuxizumab mafodotin, modotuximab, carotuximab, adecatumumab, adecatumumab, oportuzumab monatox, solitomab, tucotuzumab celmoleukin, edrecolomab, catumaxomab, ifabotuzumab, fibatuzumab, zalutumumab, panitumumab, cetuximab, futuximab, imgatuzumab, laprituximab emtansine, matuzumab, necitumumab, nimotuzumab, tomuzotuximab, amivantamab, amivantamab, epitumomab cituxetan, sontuzumab, duligotuzumab, elgemtumab, lumretuzumab, patritumab, seribantumab, zenocutuzumab, sibrotuzumab, burosumab, aprutumab ixadotin, radretumab, pasotuxizumab, farletuzumab, mirvetuximab soravtansine, vantictumab, TRBS07, 3F8, dinutuximab, dinutuximab beta, ecromeximab, mitumomab, andecaliximab, capromab, codrituzumab, glembatumumab vedotin, talquetamab, talquetamab, trevogrumab, indusatumab vedotin, ficlatuzumab, rilotumumab, zatuximab, pentuzimab, pentuzimab, margetuximab, timigutuzumab, trastuzumab, trastuzumab duocarmazine, trastuzumab emtansine, gancotamab, pertuzumab, crtumaxomab, emibetuzumab, telisotuzumab, telisotuzumab vedotin, derlotuximab biotin, apolizumab, onartuzumab, bersanlimab, enlimomabpegol, rontalizumab, sifalimumab, talizumab, ganitumab, istiratumab, robatumumab, teprotumumab, figitumumab, ganitumab, istiratumab, robatumumab, teprotumumab, cixutumumab, dalotuzumab, xentuzumab, dusigitumab, canakinumab, ustekinumab, ustekinumab, ustekinumab, briakinumab, briakinumab, abrezekimab, lebrikizumab, romilkimab, TNX-650, tralokinumab, anrukinzumab, brodalumab, ixekizumab, netakimab, perakizumab, secukinumab, vunakizumab, afasevikumab, afasevikumab, bimekizumab, bimekizumab, remtolumab, bermekimab, lutikizumab, lutikizumab, gevokizumab, cergutuzumab amunaleukin, fletikumab, fezakinumab, brazikumab, guselkumab, mirikizumab, tildrakizumab, risankizumab, flotetuzumab, nemolizumab, pascolizumab, dupilumab, mepolizumab, reslizumab, clazakizumab, elsilimomab, olokizumab, sarilumab, siltuximab, sirukumab, vobarilizumab, tocilizumab, SA237, satralizumab, enokizumab, prezalizumab, natalizumab, abrilumab, abrilumab, vedolizumab, volociximab, tadocizumab, etaracizumab, etrolizumab, spesolimab, vatelizumab, erlizumab, lirilumab, relatlimab, cBR96-doxorubicinimmunoconjugate, odulimomab, efalizumab, ladiratuzumab vedotin, simtuzumab, samrotamab vedotin, asclizumab, lupartumab amadotin, imalumab, carlumab, imaprelimab, amatuximab, amatuximab, anetumab ravtansine, narnatumab, clivatuzumab tetraxetan, pemtumomab, gatipotuzumab, ensituximab, lemalesomab, sulesomab, enfortumab vedotin, racotumomab, monalizumab, brontictuzumab, tarextumab, vesencumab, oxelumab, gilvetmab, tislelizumab, dostarlimab, BCD-100, nivolumab, PDR001, pembrolizumab, pidilizumab, retifanlimab, spartalizumab, sintilimab, cemiplimab, olaratumab, tovetumab, rinucumab, atezolizumab, avelumab, durvalumab, lifastuzumab vedotin, bavituximab, acapatamab, capromab, rosopatamab, nezastomig, pasotuxizumab, pelgifatamab, voxalatamab, cofetuzumab pelidotin, denosumab, rosmantuzumab, cirmtuzumab, atinumab, indatuximab ravtansine, elotuzumab, sirtratumab vedotin, sonepcizumab, vandortuzumab vedotin, minretumomab, satumomab pendetide, maslimomab, ontuxizumab, tenatumomab, fresolimumab, metelimumab, lerdelimumab, tezepelumab, etigilimab, tiragotumab, placulumab, prezalumab, infliximab, nerelimomab, ozoralizumab, adalimumab, afelimomab, certolizumab pegol, golimumab, mapatumumab, conatumumab, lexatumumab, tigatuzumab, sacituzumab govitecan, votumumab, pogalizumab, letolizumab, pankomab, anatumomab mafenatox, enavatuzumab, flanvotumab, brolucizumab, ranibizumab, varisacumab, bevacizumab, faricimab, icrucumab, alacizumab pegol, ramucirumab, pritumumab, and onvatilimab.

[5664] In some aspects, the antigen binding polypeptides provided herein comprise a VH2 comprising a VH of an antibody selected from the group consisting of losatuxizumab vedotin, utomilumab, urelumab, oleclumab, naptumomab estafenatox, ascrinvacumab, pintumomab, tacatuzumab tetraxetan, nesvacumab, vanucizumab, timolumab, vapaliximab, vepalimomab, enapotamab vedotin, ianalumab, belimumab, tabalumab, tibulizumab, belantamab mafodotin, teclistamab, teclistamab, detumomab, nacolomab tafenatox, eculizumab, lendalizumab, pexelizumab, pozelimab, ravulizumab, tesidolumab, vilobelimab, abagovomab, igovomab, oregovomab, sofituzumab vedotin, cantuzumab mertansine, cantuzuma bravtansine, girentuximab, altumomab pentetate, arcitumomab, besilesomab, bertilimumab, plozalizumab, mogamulizumab, leronlimab, PRO140, rovelizumab, rovelizumab, talacotuzumab, benralizumab, tavolimab, vonlerolizumab, gavilimomab, ziralimumab, fanolesomab, ipilimumab, ruplizumab, toralizumab, dapirolizumab pegol, toralizumab, dapirolizumab pegol, ruplizumab, blinatumomab, inebilizumab, loncastuximab tesirine, SGN-CD19A, tafasitamab, taplitumomab paptox, XMAB-5574, Budoprutug, Obexelimab, duvortuxizumab, englumafusp alfa, Emfizatamab, zeripatamig, siplizumab, blontuvetmab, FBTA05, ibritumomab tiuxetan, obinutuzumab, ocaratuzumab, ocrelizumab, ofatumumab, rituximab, tositumomab, ublituximab, veltuzumab, divozilimab, eramkafusp alfa, ripertamab, zuberitamab, glofitamab, nofetumomab merpentan, samalizumab, imvotamab, odronextamab, plamotamab, bectumomab, inotuzumab ozogamicin, moxetumomab pasudotox, pinatuzumab vedotin, gomiliximab, lumiliximab, inolimomab, inolimomab, daclizumab, camidanluma btesirine, basiliximab, varlilumab, omburtamab, enoblituzumab, vopratelimab, lulizumabpegol, TGN1412, muromonab-CD3, otelixizumab, teplizumab, visilizumab, epcoritamab, epcoritamab, brentuximab vedotin, iratumumab, azintuxizumab vedotin, gemtuzumab ozogamicin, lintuzumab, vadastuximab talirine, naratuximab emtansine, otlertuzumab, lilotomab satetraxetan, tetulomab, daratumumab, isatuximab, foralumab, mosunetuzumab, mosunctuzumab, cedelizumab, ibalizumab, keliximab, priliximab, tregalizumab, zanolimumab, bleselumab, iscalimab, lucatumumab, ravagalimab, selicrelumab, teneliximab, vanalimab, abciximab, bivatuzumab, iomab-B, telimomab aritox, zolimomab aritox, abituzumab, intetumumab, alemtuzumab, tamtuvetmab, lorvotuzumab mertansine, itolizumab, cusatuzumab, vorsetuzumab mafodotin, milatuzumab, iladatuzumab vedotin, polatuzumab vedotin, galiximab, cibisatamab, zolbetuximab, naxitamab, tisotumab vedotin, olendalizumab, pamrevlumab, lacnotuzumab, cabiralizumab, emactuzumab, axatilimab, gimsilumab, lenzilumab, namilumab, tremelimumab, ulocuplumab, tepoditamab, rovalpituzumab tesirine, tarlatamab, demcizumab, navicixizumab, drozitumab, parsatuzumab, depatuxizumab mafodotin, modotuximab, carotuximab, adecatumumab, adecatumumab, oportuzumab monatox, solitomab, tucotuzumab celmoleukin, edrecolomab, catumaxomab, ifabotuzumab, fibatuzumab, zalutumumab, panitumumab, cetuximab, futuximab, imgatuzumab, laprituximab emtansine, matuzumab, necitumumab, nimotuzumab, tomuzotuximab, amivantamab, amivantamab, epitumomab cituxetan, sontuzumab, duligotuzumab, elgemtumab, lumretuzumab, patritumab, scribantumab, zenocutuzumab, sibrotuzumab, burosumab, aprutumab ixadotin, radretumab, pasotuxizumab, farletuzumab, mirvetuximab soravtansine, vantictumab, TRBS07, 3F8, dinutuximab, dinutuximab beta, ecromeximab, mitumomab, andecaliximab, capromab, codrituzumab, glembatumumab vedotin, talquetamab, talquetamab, trevogrumab, indusatumab vedotin, ficlatuzumab, rilotumumab, zatuximab, pentuzimab, pentuzimab, margetuximab, timigutuzumab, trastuzumab, trastuzumab duocarmazine, trastuzumab emtansine, gancotamab, pertuzumab, ertumaxomab, emibetuzumab, telisotuzumab, telisotuzumab vedotin, derlotuximab biotin, apolizumab, onartuzumab, bersanlimab, enlimomabpegol, rontalizumab, sifalimumab, talizumab, ganitumab, istiratumab, robatumumab, teprotumumab, figitumumab, ganitumab, istiratumab, robatumumab, teprotumumab, cixutumumab, dalotuzumab, xentuzumab, dusigitumab, canakinumab, ustekinumab, ustekinumab, ustekinumab, briakinumab, briakinumab, abrezekimab, lebrikizumab, romilkimab, TNX-650, tralokinumab, anrukinzumab, brodalumab, ixekizumab, netakimab, perakizumab, secukinumab, vunakizumab, afasevikumab, afasevikumab, bimekizumab, bimekizumab, remtolumab, bermekimab, lutikizumab, lutikizumab, gevokizumab, cergutuzumab amunaleukin, fletikumab, fezakinumab, brazikumab, gusclkumab, mirikizumab, tildrakizumab, risankizumab, flotetuzumab, nemolizumab, pascolizumab, dupilumab, mepolizumab, reslizumab, clazakizumab, elsilimomab, olokizumab, sarilumab, siltuximab, sirukumab, vobarilizumab, tocilizumab, SA237, satralizumab, enokizumab, prezalizumab, natalizumab, abrilumab, abrilumab, vedolizumab, volociximab, tadocizumab, etaracizumab, etrolizumab, spesolimab, vatelizumab, erlizumab, lirilumab, relatlimab, cBR96-doxorubicinimmunoconjugate, odulimomab, efalizumab, ladiratuzumab vedotin, simtuzumab, samrotamab vedotin, asclizumab, lupartumab amadotin, imalumab, carlumab, imaprelimab, amatuximab, amatuximab, anetumab ravtansine, narnatumab, clivatuzumab tetraxetan, pemtumomab, gatipotuzumab, ensituximab, lemalesomab, sulesomab, enfortumab vedotin, racotumomab, monalizumab, brontictuzumab, tarextumab, vesencumab, oxelumab, gilvetmab, tislelizumab, dostarlimab, BCD-100, nivolumab, PDR001, pembrolizumab, pidilizumab, retifanlimab, spartalizumab, sintilimab, cemiplimab, olaratumab, tovetumab, rinucumab, atezolizumab, avelumab, durvalumab, lifastuzumab vedotin, bavituximab, acapatamab, capromab, rosopatamab, nezastomig, pasotuxizumab, pelgifatamab, voxalatamab, cofetuzumab pelidotin, denosumab, rosmantuzumab, cirmtuzumab, atinumab, indatuximab ravtansine, elotuzumab, sirtratumab vedotin, sonepcizumab, vandortuzumab vedotin, minretumomab, satumomab pendetide, maslimomab, ontuxizumab, tenatumomab, fresolimumab, metelimumab, lerdelimumab, tezepelumab, etigilimab, tiragotumab, placulumab, prezalumab, infliximab, nerelimomab, ozoralizumab, adalimumab, afelimomab, certolizumab pegol, golimumab, mapatumumab, conatumumab, lexatumumab, tigatuzumab, sacituzumab govitecan, votumumab, pogalizumab, letolizumab, pankomab, anatumomab mafenatox, enavatuzumab, flanvotumab, brolucizumab, ranibizumab, varisacumab, bevacizumab, faricimab, icrucumab, alacizumab pegol, ramucirumab, pritumumab, and onvatilimab.

[5665] In some aspects, the antigen binding polypeptides provided herein comprise a VL1 comprising (i) a complementarity determining region (CDR) 1 having an amino acid sequence that is at least 65%, at least 70%, at least 75%, at least 80%, at least 85%, at least 90%, at least 95%, at least 99%, or 100% identical to any one of SEQ ID NOs: 1096, 1103, 1110, 1120, 1127, 1134, 1141, 1148, 1155, 1162, 1169, 1174, 1181, 1188, 1199, 1211, 1221, 1228, 1235, 1247, 1254, 1261, 1266, 1271, 1278, 1285, 1292, 1299, 1306, 1313, 1319, 1326, 1339, 1352, 1359, 1366, 1373, 1382, 1394, 1401, 1408, 1414, 1421, 1428, 1441, 1448, 1455, 1461, 1468, 1475, 1488, 1495, 1508, 1519, 1526, 1531, 1538, 1544, 1556, 1568, 1574, 1581, 1594, 1601, 1608, 1615, 1622, 1629, 1636, 1643, 1650, 1657, 1672, 1679, 1689, 1697, 1708, 1715, 1718, 1723, 1727, 1738, 1743, 1752, 1761, 1763, 1769, 1776, and 1786; (ii) a CDR2 having an amino acid sequence that is at least 65%, at least 70%, at least 75%, at least 80%, at least 85%, at least 90%, at least 95%, at least 99%, or 100% identical to any one of SEQ ID NOs: 1200, 1212, 1680, 1690, 1698, 1709, 1728, 1739, 1744, 1753, 1770, and 1777; or at least 65%, at least 70%, at least 75%, at least 80%, at least 85%, at least 90%, at least 95%, at least 99%, or 100% identical to any one of amino acid sequences AAS, APS, AT, ATS, DAS, DDG, DDS, DT, DTS, DVS, EAS, FTS, GAF, GAN, GAS, GAT, GIS, GKN, GNS, HTS, KVS, LAS, LGS, LVS, NAK, NTN, QMS, RMS, RTS, SAS, TTS, WAS, YAS, YAT, YGS, YRS, and YTS; and (iii) a CDR3 having an amino acid sequence that is at least 65%, at least 70%, at least 75%, at least 80%, at least 85%, at least 90%, at least 95%, at least 99%, or 100% identical to any one of SEQ ID NOs: 1097, 1104, 1111, 1121, 1128, 1135, 1142, 1149, 1156, 1163, 1170, 1175, 1182, 1189, 1195, 1201, 1207, 1213, 1222, 1229, 1236, 2009, 1248, 1255, 1262, 1267, 1272, 1279, 1286, 1293, 1300, 1307, 1320, 1327, 1333, 1340, 1346, 1353, 1360, 1367, 1374, 1383, 1389, 1395, 1402, 1409, 1415, 1422, 1429, 1435, 1442, 1449, 1456, 1462, 1469, 1476, 1482, 1489, 1496, 1502, 1509, 1513, 1520, 1532, 1539, 1545, 1557, 1562, 1569, 1575, 1582, 1588, 1595, 1602, 1609, 1616, 1623, 1630, 1637, 1644, 1651, 1658, 1663, 1673, 1681, 1691, 1699, 1710, 1729, 1735, 1745, 1751, 1754, 1778, 1787, and 1976.

[5666] In some aspects, the antigen binding polypeptides provided herein comprise a VL2 comprising (i) a complementarity determining region (CDR) 1 having an amino acid sequence that is at least 65%, at least 70%, at least 75%, at least 80%, at least 85%, at least 90%, at least 95%, at least 99%, or 100% identical to any one of SEQ ID NOs: 1096, 1103, 1110, 1120, 1127, 1134, 1141, 1148, 1155, 1162, 1169, 1174, 1181, 1188, 1199, 1211, 1221, 1228, 1235, 1247, 1254, 1261, 1266, 1271, 1278, 1285, 1292, 1299, 1306, 1313, 1319, 1326, 1339, 1352, 1359, 1366, 1373, 1382, 1394, 1401, 1408, 1414, 1421, 1428, 1441, 1448, 1455, 1461, 1468, 1475, 1488, 1495, 1508, 1519, 1526, 1531, 1538, 1544, 1556, 1568, 1574, 1581, 1594, 1601, 1608, 1615, 1622, 1629, 1636, 1643, 1650, 1657, 1672, 1679, 1689, 1697, 1708, 1715, 1718, 1723, 1727, 1738, 1743, 1752, 1761, 1763, 1769, 1776, and 1786; (ii) a CDR2 having an amino acid sequence that is at least 65%, at least 70%, at least 75%, at least 80%, at least 85%, at least 90%, at least 95%, at least 99%, or 100% identical to any one of SEQ ID NOs: 1200, 1212, 1680, 1690, 1698, 1709, 1728, 1739, 1744, 1753, 1770, and 1777; or at least 65%, at least 70%, at least 75%, at least 80%, at least 85%, at least 90%, at least 95%, at least 99%, or 100% identical to any one of amino acid sequences AAS, APS, AT, ATS, DAS, DDG, DDS, DT, DTS, DVS, EAS, FTS, GAF, GAN, GAS, GAT, GIS, GKN, GNS, HTS, KVS, LAS, LGS, LVS, NAK, NTN, QMS, RMS, RTS, SAS, TTS, WAS, YAS, YAT, YGS, YRS, and YTS; and (iii) a CDR3 having an amino acid sequence that is at least 65%, at least 70%, at least 75%, at least 80%, at least 85%, at least 90%, at least 95%, at least 99%, or 100% identical to any one of SEQ ID NOs: 1097, 1104, 1111, 1121, 1128, 1135, 1142, 1149, 1156, 1163, 1170, 1175, 1182, 1189, 1195, 1201, 1207, 1213, 1222, 1229, 1236, 2009, 1248, 1255, 1262, 1267, 1272, 1279, 1286, 1293, 1300, 1307, 1320, 1327, 1333, 1340, 1346, 1353, 1360, 1367, 1374, 1383, 1389, 1395, 1402, 1409, 1415, 1422, 1429, 1435, 1442, 1449, 1456, 1462, 1469, 1476, 1482, 1489, 1496, 1502, 1509, 1513, 1520, 1532, 1539, 1545, 1557, 1562, 1569, 1575, 1582, 1588, 1595, 1602, 1609, 1616, 1623, 1630, 1637, 1644, 1651, 1658, 1663, 1673, 1681, 1691, 1699, 1710, 1729, 1735, 1745, 1751, 1754, 1778, 1787, and 1976.

[5667] In some aspects, the antigen binding polypeptides provided herein comprise a VH1 comprising (i) a complementarity determining region (CDR) 1 having an amino acid sequence that is at least 65%, at least 70%, at least 75%, at least 80%, at least 85%, at least 90%, at least 95%, at least 99%, or 100% identical to any one of SEQ ID NOs: 1099, 1106, 1113, 1117, 1123, 1130, 1137, 1144, 1151, 1158, 1165, 1177, 1184, 1191, 1203, 1215, 1224, 1231, 1238, 1243, 1250, 1257, 1264, 1274, 1281, 1288, 1295, 1302, 1309, 1315, 1322, 1329, 1335, 1342, 1348, 1355, 1362, 1369, 1376, 1385, 1397, 1404, 1417, 1424, 1431, 1437, 1444, 1451, 1458, 1464, 1471, 1478, 1484, 1491, 1498, 1504, 1511, 1515, 1522, 1534, 1547, 1552, 1564, 1577, 1584, 1590, 1597, 1604, 1611, 1618, 1625, 1632, 1639, 1646, 1653, 1660, 1665, 1675, 1683, 1693, 1701, 1705, 1716, 1719, 1731, 1736, 1747, 1756, 1772, 1780, and 1789; (ii) a CDR2 having an amino acid sequence that is at least 65%, at least 70%, at least 75%, at least 80%, at least 85%, at least 90%, at least 95%, at least 99%, or 100% identical to any one of SEQ ID NOs: 1100, 1107, 1114, 1118, 1124, 1131, 1138, 1145, 1152, 1159, 1166, 1178, 1185, 1192, 1204, 1216, 1225, 1232, 1239, 1244, 1251, 1258, 1275, 1282, 1289, 1296, 1303, 1310, 1316, 1323, 1330, 1336, 1343, 1349, 1356, 1363, 1370, 1377, 1386, 1391, 1398, 1405, 1411, 1418, 1425, 1432, 1438, 1445, 1452, 1465, 1472, 1479, 1485, 1492, 1499, 1505, 1516, 1523, 1528, 1535, 1541, 1548, 1553, 1559, 1565, 1571, 1578, 1585, 1591, 1598, 1605, 1612, 1619, 1626, 1633, 1640, 1647, 1654, 1666, 1676, 1684, 1687, 1694, 1702, 1706, 1712, 1717, 1720, 1725, 1732, 1737, 1741, 1748, 1757, 1767, 1773, 1781, and 1790; and (iii) a CDR3 having an amino acid sequence that is at least 65%, at least 70%, at least 75%, at least 80%, at least 85%, at least 90%, at least 95%, at least 99%, or 100% identical to any one of SEQ ID NOs: 1101, 1108, 1115, 1125, 1132, 1139, 1146, 1153, 1160, 1167, 1172, 1179, 1186, 1193, 1197, 1205, 1209, 1217, 1226, 1233, 1240, 1245, 1252, 1259, 1269, 1276, 1283, 1290, 1297, 1304, 1311, 1317, 1324, 1331, 1337, 1344, 1350, 1357, 1364, 1371, 1378, 1387, 1392, 1399, 1406, 1412, 1419, 1426, 1433, 1439, 1446, 1453, 1459, 1466, 1473, 1480, 1486, 1493, 1500, 1506, 1517, 1524, 1529, 1536, 1542, 1549, 1554, 1560, 1566, 1572, 1579, 1586, 1592, 1599, 1606, 1613, 1620, 1627, 1634, 1641, 1648, 1655, 1661, 1667, 1670, 1677, 1685, 1688, 1695, 1703, 1707, 1713, 1733, 1749, 1758, 1762, 1774, 1782, 1791, and 1975.

[5668] In some aspects, the antigen binding polypeptides provided herein comprise a VH2 comprising (i) a complementarity determining region (CDR) 1 having an amino acid sequence that is at least 65%, at least 70%, at least 75%, at least 80%, at least 85%, at least 90%, at least 95%, at least 99%, or 100% identical to any one of SEQ ID NOs: 1099, 1106, 1113, 1117, 1123, 1130, 1137, 1144, 1151, 1158, 1165, 1177, 1184, 1191, 1203, 1215, 1224, 1231, 1238, 1243, 1250, 1257, 1264, 1274, 1281, 1288, 1295, 1302, 1309, 1315, 1322, 1329, 1335, 1342, 1348, 1355, 1362, 1369, 1376, 1385, 1397, 1404, 1417, 1424, 1431, 1437, 1444, 1451, 1458, 1464, 1471, 1478, 1484, 1491, 1498, 1504, 1511, 1515, 1522, 1534, 1547, 1552, 1564, 1577, 1584, 1590, 1597, 1604, 1611, 1618, 1625, 1632, 1639, 1646, 1653, 1660, 1665, 1675, 1683, 1693, 1701, 1705, 1716, 1719, 1731, 1736, 1747, 1756, 1772, 1780, and 1789; (ii) a CDR2 having an amino acid sequence that is at least 65%, at least 70%, at least 75%, at least 80%, at least 85%, at least 90%, at least 95%, at least 99%, or 100% identical to any one of SEQ ID NOs: 1100, 1107, 1114, 1118, 1124, 1131, 1138, 1145, 1152, 1159, 1166, 1178, 1185, 1192, 1204, 1216, 1225, 1232, 1239, 1244, 1251, 1258, 1275, 1282, 1289, 1296, 1303, 1310, 1316, 1323, 1330, 1336, 1343, 1349, 1356, 1363, 1370, 1377, 1386, 1391, 1398, 1405, 1411, 1418, 1425, 1432, 1438, 1445, 1452, 1465, 1472, 1479, 1485, 1492, 1499, 1505, 1516, 1523, 1528, 1535, 1541, 1548, 1553, 1559, 1565, 1571, 1578, 1585, 1591, 1598, 1605, 1612, 1619, 1626, 1633, 1640, 1647, 1654, 1666, 1676, 1684, 1687, 1694, 1702, 1706, 1712, 1717, 1720, 1725, 1732, 1737, 1741, 1748, 1757, 1767, 1773, 1781, and 1790; and (iii) a CDR3 having an amino acid sequence that is at least 65%, at least 70%, at least 75%, at least 80%, at least 85%, at least 90%, at least 95%, at least 99%, or 100% identical to any one of SEQ ID NOs: 1101, 1108, 1115, 1125, 1132, 1139, 1146, 1153, 1160, 1167, 1172, 1179, 1186, 1193, 1197, 1205, 1209, 1217, 1226, 1233, 1240, 1245, 1252, 1259, 1269, 1276, 1283, 1290, 1297, 1304, 1311, 1317, 1324, 1331, 1337, 1344, 1350, 1357, 1364, 1371, 1378, 1387, 1392, 1399, 1406, 1412, 1419, 1426, 1433, 1439, 1446, 1453, 1459, 1466, 1473, 1480, 1486, 1493, 1500, 1506, 1517, 1524, 1529, 1536, 1542, 1549, 1554, 1560, 1566, 1572, 1579, 1586, 1592, 1599, 1606, 1613, 1620, 1627, 1634, 1641, 1648, 1655, 1661, 1667, 1670, 1677, 1685, 1688, 1695, 1703, 1707, 1713, 1733, 1749, 1758, 1762, 1774, 1782, 1791, and 1975.

[5669] In some aspects, the antigen binding polypeptides provided herein comprise a VL1 comprising an amino acid sequence that is at least 65%, at least 70%, at least 75%, at least 80%, at least 85%, at least 90%, at least 95%, at least 99%, or 100% identical to any one of SEQ ID NOs: 1098, 1105, 1112, 1122, 1129, 1136, 1143, 1150, 1157, 1164, 1171, 1176, 1183, 1190, 1196, 1202, 1208, 1214, 1219, 1223, 1230, 1237, 1242, 1249, 1256, 1263, 1268, 1273, 1280, 1287, 1294, 1301, 1308, 1314, 1321, 1328, 1334, 1341, 1347, 1354, 1361, 1368, 1375, 1380, 1384, 1390, 1396, 1403, 1410, 1416, 1423, 1430, 1436, 1443, 1450, 1457, 1463, 1470, 1477, 1483, 1490, 1497, 1503, 1510, 1514, 1521, 1527, 1533, 1540, 1546, 1551, 1558, 1563, 1570, 1576, 1583, 1589, 1596, 1603, 1610, 1617, 1624, 1631, 1638, 1645, 1652, 1659, 1664, 1669, 1674, 1682, 1692, 1700, 1711, 1721, 1724, 1730, 1740, 1746, 1755, 1764, 1766, 1771, 1779, 1784, and 1788.

[5670] In some aspects, the antigen binding polypeptides provided herein comprise a VL2 comprising an amino acid sequence that is at least 65%, at least 70%, at least 75%, at least 80%, at least 85%, at least 90%, at least 95%, at least 99%, or 100% identical to any one of SEQ ID NOs: 1098, 1105, 1112, 1122, 1129, 1136, 1143, 1150, 1157, 1164, 1171, 1176, 1183, 1190, 1196, 1202, 1208, 1214, 1219, 1223, 1230, 1237, 1242, 1249, 1256, 1263, 1268, 1273, 1280, 1287, 1294, 1301, 1308, 1314, 1321, 1328, 1334, 1341, 1347, 1354, 1361, 1368, 1375, 1380, 1384, 1390, 1396, 1403, 1410, 1416, 1423, 1430, 1436, 1443, 1450, 1457, 1463, 1470, 1477, 1483, 1490, 1497, 1503, 1510, 1514, 1521, 1527, 1533, 1540, 1546, 1551, 1558, 1563, 1570, 1576, 1583, 1589, 1596, 1603, 1610, 1617, 1624, 1631, 1638, 1645, 1652, 1659, 1664, 1669, 1674, 1682, 1692, 1700, 1711, 1721, 1724, 1730, 1740, 1746, 1755, 1764, 1766, 1771, 1779, 1784, and 1788.

[5671] In some aspects, the antigen binding polypeptides provided herein comprise a VH1 comprising an amino acid sequence that is at least 65%, at least 70%, at least 75%, at least 80%, at least 85%, at least 90%, at least 95%, at least 99%, or 100% identical to any one of SEQ ID NOs: 1102, 1109, 1116, 1119, 1126, 1133, 1140, 1147, 1154, 1161, 1168, 1173, 1180, 1187, 1194, 1198, 1206, 1210, 1218, 1220, 1227, 1234, 1241, 1246, 1253, 1260, 1265, 1270, 1277, 1284, 1291, 1298, 1305, 1312, 1318, 1325, 1332, 1338, 1345, 1351, 1358, 1365, 1372, 1379, 1381, 1388, 1393, 1400, 1407, 1413, 1420, 1427, 1434, 1440, 1447, 1454, 1460, 1467, 1474, 1481, 1487, 1494, 1501, 1507, 1512, 1518, 1525, 1530, 1537, 1543, 1550, 1555, 1561, 1567, 1573, 1580, 1587, 1593, 1600, 1607, 1614, 1621, 1628, 1635, 1642, 1649, 1656, 1662, 1668, 1671, 1678, 1686, 1696, 1704, 1714, 1722, 1726, 1734, 1742, 1750, 1759, 1760, 1765, 1768, 1775, 1783, 1785, and 1792.

[5672] In some aspects, the antigen binding polypeptides provided herein comprise a VH2 comprising an amino acid sequence that is at least 65%, at least 70%, at least 75%, at least 80%, at least 85%, at least 90%, at least 95%, at least 99%, or 100% identical to any one of SEQ ID NOs: 1102, 1109, 1116, 1119, 1126, 1133, 1140, 1147, 1154, 1161, 1168, 1173, 1180, 1187, 1194, 1198, 1206, 1210, 1218, 1220, 1227, 1234, 1241, 1246, 1253, 1260, 1265, 1270, 1277, 1284, 1291, 1298, 1305, 1312, 1318, 1325, 1332, 1338, 1345, 1351, 1358, 1365, 1372, 1379, 1381, 1388, 1393, 1400, 1407, 1413, 1420, 1427, 1434, 1440, 1447, 1454, 1460, 1467, 1474, 1481, 1487, 1494, 1501, 1507, 1512, 1518, 1525, 1530, 1537, 1543, 1550, 1555, 1561, 1567, 1573, 1580, 1587, 1593, 1600, 1607, 1614, 1621, 1628, 1635, 1642, 1649, 1656, 1662, 1668, 1671, 1678, 1686, 1696, 1704, 1714, 1722, 1726, 1734, 1742, 1750, 1759, 1760, 1765, 1768, 1775, 1783, 1785, and 1792.

[5673] In some aspects, the infectious disease antigen that is not a sarbecovirus antigen is:
[5674] (i) a viral antigen elected from the group consisting of an influenza virus (A, B, C) antigen (e.g., influenza virus envelope proteins, for example, influenza virus neuraminidase (NA, N1, N2, N3, N4, N5, N6, N7, N8, N9, N10, N11), influenza virus hemagglutinin (H1, H2, H3, H4, H5, H6, H7, H8, H9, H10, H11, H12, H13, H14, H15, H16, H17, H18) (e.g., H1N1, H3N2, H5N1, H7N9, H9N2), Yamagata virus antigen, Victoria virus antigen, influenza virus structural proteins (e.g., M1, M2, capsid protein), influenza virus functional proteins (e.g., ribonucleoprotein (NP), primary interferon antagonist (NS1), nuclear export protein (NEP)) influenza virus accessory proteins (e.g., PB2, PB1, or PA), for example, anti-HA, anti-NA, anti-H1, anti-H3, anti-H5, anti-H7, anti-H9, anti-N1, anti-N2, anti-N9, anti-H1N1, anti-H3N2, anti-H5N1, anti-H7N9, anti-H9N2, anti-A protein, anti-B protein, anti-stem, anti-M1, anti-M2, anti-capsid, anti-NP, anti-NS1, anti-NEP, anti-PB1, anti-PB2, and anti-PA); a swine influenza virus antigen (e.g., swine flu hemagglutinin, swine flu neuraminidase); a classical swine fever (CSF) (hog colera) virus antigen; an equine influenza virus antigen (e.g., equine influenza virus typeA/Miami 63 neuraminidase, equine influenza virus type A/Kentucky 81 neuraminidase, equine influenza virus type A/Alaska 91 neuraminidase); parainfluenza viruses (e.g., bovine parainfluenza virus, bovine parainfluenza virus type 3 fusion protein, bovine parainfluenza virus type 3 hemagglutinin neuraminidase); a (human) respiratory syncytial virus (RSV)-viral antigen (e.g., RSV F glycoprotein, RSV G glycoprotein, F protein of respiratory syncytial virus, RSV fusion glycoprotein); a herpes simplex virus (HSV) antigen (e.g., herpes simplex virus glycoproteins gB, gC, gD, and gE, herpes simplex virus type 2 glycoprotein gB); a Dengue virus antigen (e.g., core protein, matrix protein, glycoprotein E of Dengue virus, or other protein of Dengue virus); a measles virus antigen (e.g., hemagglutinin); a poliovirus 1 antigen (e.g., poliovirus 1 proteins (VP1)), a HIV-1 antigen and HIV-2 antigen (e.g., HIV envelope proteins (e.g., envelope glycoproteins of HIV 1, HIV envelope glycoprotein (Env), HIV envelope glycoprotein gp160, HIV envelope surface glycoprotein gp120, HIV transmembrane envelope protein gp41), HIV structural proteins (e.g., p17, p24, p7, p55), HIV functional proteins (e.g., p66, HIV-1 protease (PR), p31), HIV accessory proteins (e.g., Nef, Tat, Rev, Vif, Vpr, Vpu)); a hepatitis virus (HAV, HBV, HCV, HDV, HEV) antigen (e.g., hepatitis B virus antigen (e.g., surface antigen, core protein), hepatitis C virus antigen (e.g., glycoprotein E1E2)); a rabies virus (Rabies lyssavirus) antigen (e.g., rabies virus glycoprotein, e.g., G glycoprotein); a pseudorabies virus antigen (e.g., pseudorabies virus g50) (gpD), pseudorabies virus II (gpB), pseudorabies virus III (gpC), pseudorabies virus glycoprotein H, pseudorabies virus glycoprotein E); a papillomavirus (HPV) antigen; an Epstein-Barr virus (EBV) (Gamma herpes virus 4) antigen; a Herpes simplex virus (HSV, HSV-1, HSV-2) antigen (e.g., human herpes virus 8, equine herpes virus antigen (e.g., type 1 glycoprotein B, type 1 glycoprotein D)); a Herpes zoster antigen; a Cytomegalovirus antigen (e.g., cytomegalovirus glycoprotein B); a Zika virus antigen; a Transmissible gastroenteritis virus (TGEV) antigen (e.g., glycoprotein 195, matrix protein); a rotavirus antigen (e.g., swine rotavirus glycoprotein 38); a parvovirus antigen (e.g., swine parvovirus capsid protein); a filoviruses (e.g., Marburg and Ebola) antigen; a bovine viral diarrhea virus antigen (e.g., glycoprotein 55); a Newcastle disease virus antigen (hemagglutinin, neuraminidase); an orthopoxvirus antigen; a coxsackievirus antigen and aphthovirus (foot and mouth disease virus) antigen; a yellow fever virus antigen; a Chikunga virus antigen; a Nipah virus antigen; an African swine fever virus antigen; a rhinotracheitis virus antigen (e.g., infectious bovine rhinotracheitis virus glycoprotein E, glycoprotein G); a laryngotracheitis virus antigen (e.g., infectious laryngotracheitis virus glycoprotein G or glycoprotein I); a La Crosse virus antigen (e.g., La Crosse virus glycoprotein); a neonatal calf diarrhoea virus antigen; a Venezuelan equine encephalomyelitis virus antigen; a punta toro virus antigen; a murine leukemia virus antigen; a mouse mammary tumor virus antigen; a bovine respiratory syncytial virus antigen (e.g., bovine respiratory syncytial virus attachment protein (BRSV G), bovine respiratory syncytial virus fusion protein (BRSV F), bovine respiratory syncytial virus nucleocapsid protein (BRSVN)); a bovine E viral diarrhoea virus antigen (e.g., glycoprotein 48 and glycoprotein 53); a metapneumovirus (HMPV) antigen; and an Ebola virus antigen (e.g., ebolavirus glycoprotein, e.g., Zaire ebolavirus glycoprotein); or
[5675] (ii) a bacterial or parasite antigen selected from the group consisting of a Plasmodium (e.g., Plasmodium falciparum, Plasmodium vivax, Plasmodium malariae, Plasmodium ovale, Plasmodium knowlesi) antigen, a Streptococcus (e.g., Streptococcus pneumoniae, Streptococcus pyogenes, Streptococcus agalactiae, Streptococcus mutans, Streptococcus viridans, Streptococcus anginosus, Streptococcus intermedius, Streptococcus constellatus) antigen (e.g., 24M epitope), a Neisseria gonorrhoeae antigen (e.g., gonococcal pilin), a Corynebacterium antigen (e.g., Corynebacterium diphtheria (diptheria toxin), Corynebacterium ulcerans, Corynebacterium pseudotuberculosis), Mycobacterium tuberculosis antigens, Brachyspira hyodysenteriae (Serpulina hydodysenteriae) antigen (e.g., Serpulina hydodysenteriae protective antigen), a Chlamydia antigen (e.g., Chlamydia trachomatis) (e.g., MOMP and PorB), a Mycoplasma sp. (e.g., Mycoplasma genitalium, Mycoplasma hyopneumoniae, Mycoplasma pneumonia) antigen, a Staphylococcus (e.g., Staphylococcus aureus, coagulase-negative staphylococci (CoNS), Staphylococcus aureus alpha toxin, Staphylococcus aureus bi-component leucocidin) antigen, a Klebsiella sp. antigen, an Escherichia coli antigen (e.g., E. coli shiga toxin type-2, E. coli shiga toxin type-1), a Bacillus sp. (e.g., Bacillus anthracis, e.g., Bacillus anthracis anthrax) antigen, a Pseudomonas aeruginosa antigen (e.g., Pseudomonas aeruginosa type III secretion system), an Enterococcus sp. antigen, an Enterobacter sp. antigen, a Proteus sp. antigen, an Actinobacter sp. antigen, a Mycobacterium avium (Mycobacterium avium complex (MAC)) antigen, a Salmonella bacteria antigen, a Clostridium difficile antigen, a Toxoplasma (e.g., Toxoplasma gondii) antigen, a Histoplasma antigen, a Candida antigen, a Coccidioides antigen, a Cryptococcus antigen, a Cryptosporidium antigen, and a Cystoisospora (e.g., Cystoisospora belli) antigen, and another antigen (e.g., endotoxins, lymphotoxins (e.g., lymphotoxin alpha LTA), phosphatidylserine, Hsp90, CCR5, lipoteichoic acid, clumping factor A).

[5676] In some aspects, the antigen binding polypeptides provided herein comprise a VL1 comprising a light chain complementarity determining region 1 (LCDR1), LCDR2, and/or LCDR3 of an antibody selected from the group consisting of libivirumab, rmab, rivabazumab pegol, setoxaximab, suvizumab, suvratoxumab, sevirumab, pritoxaximab, porgaviximab, REGN-EB3, obiltoxaximab, gedivumab, foravirumab, larcaviximab, motavizumab, palivizumab, rafivirumab, regavirumab, tuvirumab, cosfroviximab, felvizumab, atidortoxumab, edobacomab, nebacumab, pateclizumab, raxibacumab, urtoxazumab, tosatoxumab, berlimatoxumab, CR6261, diridavumab, firivumab, lesofavumab, navivumab, exbivirumab, lenvervimab, bavituximab, bezlotoxumab, efungumab, leronlimab, nirsevimab, pagibaximab, panobacumab, tefibazumab, ansuvimab, atoltivimab, maftivimab, and odesivimab.

[5677] In some aspects, the antigen binding polypeptides provided herein comprise a VL2 comprising a light chain complementarity determining region 1 (LCDR1), LCDR2, and/or LCDR3 of an antibody selected from the group consisting of libivirumab, rmab, rivabazumab pegol, setoxaximab, suvizumab, suvratoxumab, sevirumab, pritoxaximab, porgaviximab, REGN-EB3, obiltoxaximab, gedivumab, foravirumab, larcaviximab, motavizumab, palivizumab, rafivirumab, regavirumab, tuvirumab, cosfroviximab, felvizumab, atidortoxumab, edobacomab, nebacumab, pateclizumab, raxibacumab, urtoxazumab, tosatoxumab, berlimatoxumab, CR6261, diridavumab, firivumab, lesofavumab, navivumab, exbivirumab, lenvervimab, bavituximab, bezlotoxumab, efungumab, leronlimab, nirsevimab, pagibaximab, panobacumab, tefibazumab, ansuvimab, atoltivimab, maftivimab, and odesivimab.

[5678] In some aspects, the antigen binding polypeptides provided herein comprise a VH1 comprising a heavy chain complementarity determining region 1 (HCDR1), HCDR2, and/or HCDR3 of an antibody selected from the group consisting of libivirumab, rmab, rivabazumab pegol, setoxaximab, suvizumab, suvratoxumab, sevirumab, pritoxaximab, porgaviximab, REGN-EB3, obiltoxaximab, gedivumab, foravirumab, larcaviximab, motavizumab, palivizumab, rafivirumab, regavirumab, tuvirumab, cosfroviximab, felvizumab, atidortoxumab, edobacomab, nebacumab, pateclizumab, raxibacumab, urtoxazumab, tosatoxumab, berlimatoxumab, CR6261, diridavumab, firivumab, lesofavumab, navivumab, exbivirumab, lenvervimab, bavituximab, bezlotoxumab, efungumab, leronlimab, nirsevimab, pagibaximab, panobacumab, tefibazumab, ansuvimab, atoltivimab, maftivimab, and odesivimab.

[5679] In some aspects, the antigen binding polypeptides provided herein comprise a VH2 comprising a heavy chain complementarity determining region 1 (HCDR1), HCDR2, and/or HCDR3 of an antibody selected from the group consisting of libivirumab, rmab, rivabazumab pegol, setoxaximab, suvizumab, suvratoxumab, sevirumab, pritoxaximab, porgaviximab, REGN-EB3, obiltoxaximab, gedivumab, foravirumab, larcaviximab, motavizumab, palivizumab, rafivirumab, regavirumab, tuvirumab, cosfroviximab, felvizumab, atidortoxumab, edobacomab, nebacumab, pateclizumab, raxibacumab, urtoxazumab, tosatoxumab, berlimatoxumab, CR6261, diridavumab, firivumab, lesofavumab, navivumab, exbivirumab, lenvervimab, bavituximab, bezlotoxumab, efungumab, leronlimab, nirsevimab, pagibaximab, panobacumab, tefibazumab, ansuvimab, atoltivimab, maftivimab, and odesivimab.

[5680] In some aspects, the antigen binding polypeptides provided herein comprise a VL1 comprising a VL of an antibody selected from the group consisting of libivirumab, rmab, rivabazumab pegol, setoxaximab, suvizumab, suvratoxumab, sevirumab, pritoxaximab, porgaviximab, REGN-EB3, obiltoxaximab, gedivumab, foravirumab, larcaviximab, motavizumab, palivizumab, rafivirumab, regavirumab, tuvirumab, cosfroviximab, felvizumab, atidortoxumab, edobacomab, nebacumab, pateclizumab, raxibacumab, urtoxazumab, tosatoxumab, berlimatoxumab, CR6261, diridavumab, firivumab, lesofavumab, navivumab, exbivirumab, lenvervimab, bavituximab, bezlotoxumab, efungumab, leronlimab, nirsevimab, pagibaximab, panobacumab, tefibazumab, ansuvimab, atoltivimab, maftivimab, and odesivimab.

[5681] In some aspects, the antigen binding polypeptides provided herein comprise a VL2 comprising a VL of an antibody selected from the group consisting of libivirumab, rmab, rivabazumab pegol, setoxaximab, suvizumab, suvratoxumab, sevirumab, pritoxaximab, porgaviximab, REGN-EB3, obiltoxaximab, gedivumab, foravirumab, larcaviximab, motavizumab, palivizumab, rafivirumab, regavirumab, tuvirumab, cosfroviximab, felvizumab, atidortoxumab, edobacomab, nebacumab, pateclizumab, raxibacumab, urtoxazumab, tosatoxumab, berlimatoxumab, CR6261, diridavumab, firivumab, lesofavumab, navivumab, exbivirumab, lenvervimab, bavituximab, bezlotoxumab, efungumab, leronlimab, nirsevimab, pagibaximab, panobacumab, tefibazumab, ansuvimab, atoltivimab, maftivimab, and odesivimab.

[5682] In some aspects, the antigen binding polypeptides provided herein comprise a VH1 comprising a VH of an antibody selected from the group consisting of libivirumab, rmab, rivabazumab pegol, setoxaximab, suvizumab, suvratoxumab, sevirumab, pritoxaximab, porgaviximab, REGN-EB3, obiltoxaximab, gedivumab, foravirumab, larcaviximab, motavizumab, palivizumab, rafivirumab, regavirumab, tuvirumab, cosfroviximab, felvizumab, atidortoxumab, edobacomab, nebacumab, pateclizumab, raxibacumab, urtoxazumab, tosatoxumab, berlimatoxumab, CR6261, diridavumab, firivumab, lesofavumab, navivumab, exbivirumab, lenvervimab, bavituximab, bezlotoxumab, efungumab, leronlimab, nirsevimab, pagibaximab, panobacumab, tefibazumab, ansuvimab, atoltivimab, maftivimab, and odesivimab.

[5683] In some aspects, the antigen binding polypeptides provided herein comprise a VH2 comprising a VH of an antibody selected from the group consisting of libivirumab, rmab, rivabazumab pegol, setoxaximab, suvizumab, suvratoxumab, sevirumab, pritoxaximab, porgaviximab, REGN-EB3, obiltoxaximab, gedivumab, foravirumab, larcaviximab, motavizumab, palivizumab, rafivirumab, regavirumab, tuvirumab, cosfroviximab, felvizumab, atidortoxumab, edobacomab, nebacumab, pateclizumab, raxibacumab, urtoxazumab, tosatoxumab, berlimatoxumab, CR6261, diridavumab, firivumab, lesofavumab, navivumab, exbivirumab, lenvervimab, bavituximab, bezlotoxumab, efungumab, leronlimab, nirsevimab, pagibaximab, panobacumab, tefibazumab, ansuvimab, atoltivimab, maftivimab, and odesivimab.

[5684] In some aspects, the antigen binding polypeptides provided herein comprise a VL1 comprising (i) a complementarity determining region (CDR) 1 having an amino acid sequence that is at least 65%, at least 70%, at least 75%, at least 80%, at least 85%, at least 90%, at least 95%, at least 99%, or 100% identical to any one of SEQ ID NOs: 1428, 1793, 1798, 1810, 1817, 1824, 1977, 1985, 1993 and 2001; (ii) a CDR2 having an amino acid sequence that is at least 65%, at least 70%, at least 75%, at least 80%, at least 85%, at least 90%, at least 95%, at least 99%, or 100% identical to any one of SEQ ID NOs: 1978, 1986, 1994, and 2002; or at least 65%, at least 70%, at least 75%, at least 80%, at least 85%, at least 90%, at least 95%, at least 99%, or 100% identical to any one of amino acid sequences YTS, DTS, GAS, and AAS; and (iii) a CDR3 having an amino acid sequence that is at least 65%, at least 70%, at least 75%, at least 80%, at least 85%, at least 90%, at least 95%, at least 99%, or 100% identical to any one of SEQ ID NOs: 1229, 1799, 1805, 1811, 1818, 1825, 1979, 1987, 1995, and 2003.

[5685] In some aspects, the antigen binding polypeptides provided herein comprise a VL2 comprising (i) a complementarity determining region (CDR) 1 having an amino acid sequence that is at least 65%, at least 70%, at least 75%, at least 80%, at least 85%, at least 90%, at least 95%, at least 99%, or 100% identical to any one of SEQ ID NOs: 1428, 1793, 1798, 1810, 1817, 1824, 1977, 1985, 1993 and 2001; (ii) a CDR2 having an amino acid sequence that is at least 65%, at least 70%, at least 75%, at least 80%, at least 85%, at least 90%, at least 95%, at least 99%, or 100% identical to any one of SEQ ID NOs: 1978, 1986, 1994, and 2002; or at least 65%, at least 70%, at least 75%, at least 80%, at least 85%, at least 90%, at least 95%, at least 99%, or 100% identical to any one of amino acid sequences YTS, DTS, GAS, and AAS; and (iii) a CDR3 having an amino acid sequence that is at least 65%, at least 70%, at least 75%, at least 80%, at least 85%, at least 90%, at least 95%, at least 99%, or 100% identical to any one of SEQ ID NOs: 1229, 1799, 1805, 1811, 1818, 1825, 1979, 1987, 1995, and 2003.

[5686] In some aspects, the antigen binding polypeptides provided herein comprise a VH1 comprising (i) a complementarity determining region (CDR) 1 having an amino acid sequence that is at least 65%, at least 70%, at least 75%, at least 80%, at least 85%, at least 90%, at least 95%, at least 99%, or 100% identical to any one of SEQ ID NOs: 1577, 1795, 1801, 1813, 1820, 1827, 1981, 1989, 1997, and 2005; (ii) a CDR2 having an amino acid sequence that is at least 65%, at least 70%, at least 75%, at least 80%, at least 85%, at least 90%, at least 95%, at least 99%, or 100% identical to any one of SEQ ID NOs: 1159, 1802, 1807, 1814, 1821, 1828, 1982, 1990, 1998, and 2006; and (iii) a CDR3 having an amino acid sequence that is at least 65%, at least 70%, at least 75%, at least 80%, at least 85%, at least 90%, at least 95%, at least 99%, or 100% identical to any one of SEQ ID NOs: 1796, 1803, 1808, 1815, 1822, 1829, 1983, 1991, 1999, and 2007.

[5687] In some aspects, the antigen binding polypeptides provided herein comprise a VH2 comprising (i) a complementarity determining region (CDR) 1 having an amino acid sequence that is at least 65%, at least 70%, at least 75%, at least 80%, at least 85%, at least 90%, at least 95%, at least 99%, or 100% identical to any one of SEQ ID NOs: 1577, 1795, 1801, 1813, 1820, 1827, 1981, 1989, 1997, and 2005; (ii) a CDR2 having an amino acid sequence that is at least 65%, at least 70%, at least 75%, at least 80%, at least 85%, at least 90%, at least 95%, at least 99%, or 100% identical to any one of SEQ ID NOs: 1159, 1802, 1807, 1814, 1821, 1828, 1982, 1990, 1998, and 2006; and (iii) a CDR3 having an amino acid sequence that is at least 65%, at least 70%, at least 75%, at least 80%, at least 85%, at least 90%, at least 95%, at least 99%, or 100% identical to any one of SEQ ID NOs: 1796, 1803, 1808, 1815, 1822, 1829, 1983, 1991, 1999, and 2007.

[5688] In some aspects, the antigen binding polypeptides provided herein comprise a VL1 comprising an amino acid sequence that is at least 65%, at least 70%, at least 75%, at least 80%, at least 85%, at least 90%, at least 95%, at least 99%, or 100% identical to any one of SEQ ID NOs: 1794, 1800, 1806, 1812, 1819, 1826, 1980, 1988, 1996, and 2004.

[5689] In some aspects, the antigen binding polypeptides provided herein comprise a VL2 comprising an amino acid sequence that is at least 65%, at least 70%, at least 75%, at least 80%, at least 85%, at least 90%, at least 95%, at least 99%, or 100% identical to any one of SEQ ID NOs: 1794, 1800, 1806, 1812, 1819, 1826, 1980, 1988, 1996, and 2004.

[5690] In some aspects, the antigen binding polypeptides provided herein comprise a VH1 comprising an amino acid sequence that is at least 65%, at least 70%, at least 75%, at least 80%, at least 85%, at least 90%, at least 95%, at least 99%, or 100% identical to any one of SEQ ID NOs 1797, 1804, 1809, 1816, 1823, 1830, 1984, 1992, 2000, and 2008.

[5691] In some aspects, the antigen binding polypeptides provided herein comprise a VH2 comprising an amino acid sequence that is at least 65%, at least 70%, at least 75%, at least 80%, at least 85%, at least 90%, at least 95%, at least 99%, or 100% identical to any one of SEQ ID NOs 1797, 1804, 1809, 1816, 1823, 1830, 1984, 1992, 2000, and 2008.

[5692] In some aspects, the other-pathology antigen is selected from the group consisting of Amyloid beta, β-amyloid, PCSK9, IFN-α/β receptor. Rhesus factor, nerve growth factor (NGF), DPP4, fibrin II beta chain, ACVR2B, serum amyloid A protein SOST, FGF 23, VWF, tissue factor pathway inhibitor (TFPI), 1-40 and 1-42, selectin P, glucagon receptor (GCGR), amyloid P component, GDF-8, CXCL10 IP-10, repulsive guidance molecule A RGMA, IFN-γ, activated F9/F10, calcitonin gene-related peptide (CGRP), angiopoietin 3, IFN receptor, IFN-γ, calcitonin, β-amyloid 1-40 and 1-42, tau protein, dabigatran, cardiac myosin, selectin P, Complement factor D (CFD), kallikrein, GDF-8, IGHE, tissue factor pathway inhibitor (TFPI), GMCSF receptor α-chain, amyloid, IgE Fc region, MASP-2, oxLDL, GMCSF, NOGO-A, Alpha-synuclein, NGF, myelin-associated glycoprotein, RHD (gene) (RHD), sclerostin, FCGRT, sclerostin SOST, mucosal addressin cell adhesion molecule, myostatin, RSVFR, complement component 1s C1s, C5, and IL31.

[5693] In some aspects, the antigen binding polypeptides provided herein comprise a VL1 comprising a light chain complementarity determining region 1 (LCDR1), LCDR2, and/or LCDR3 of an antibody selected from the group consisting of aducanumab, alirocumab, frovocimab, lodelcizumab, bococizumab, evolocumab, ralpancizumab, anifrolumab, atorolimumab, bapineuzumab, bedinvetmab, begelomab, biciromab, bimagrumab, birtamimab, blosozumab, burosumab, caplacizumab, concizumab, crenezumab, crizanlizumab, crotedumab, dezamizumab, domagrozumab, donanemab, eldelumab, elezanumab, emapalumab, emicizumab, eptinezumab, erenumab, evinacumab, faralimomab, fasinumab, fontolizumab, fremanezumab, frunevetmab, fulranumab, galcanezumab, gantenerumab, gosuranemab, idarucizumab, imciromab, inclacumab, lampalizumab, lanadelumab, landogrozumab, lecanemab, ligelizumab, marstacimab, mavrilimumab, morolimumab, NEOD001, omalizumab, oMS721, orticumab, otilimab, ozanezumab, ponezumab, prasinezumab, quilizumab, ranevetmab, refanezumab, roledumab, romosozumab, rozanolixizumab, setrusumab, SHP647, solanezumab, stamulumab, suptavumab, sutimlimab, tanezumab, crovalimab, and lokivetmab.

[5694] In some aspects, the antigen binding polypeptides provided herein comprise a VL2 comprising a light chain complementarity determining region 1 (LCDR1), LCDR2, and/or LCDR3 of an antibody selected from the group consisting of aducanumab, alirocumab, frovocimab, lodelcizumab, bococizumab, evolocumab, ralpancizumab, anifrolumab, atorolimumab, bapineuzumab, bedinvetmab, begelomab, biciromab, bimagrumab, birtamimab, blosozumab, burosumab, caplacizumab, concizumab, crenezumab, crizanlizumab, crotedumab, dezamizumab, domagrozumab, donanemab, eldelumab, elezanumab, emapalumab, emicizumab, eptinezumab, erenumab, evinacumab, faralimomab, fasinumab, fontolizumab, fremanezumab, frunevetmab, fulranumab, galcanezumab, gantenerumab, gosuranemab, idarucizumab, imciromab, inclacumab, lampalizumab, lanadelumab, landogrozumab, lecanemab, ligelizumab, marstacimab, mavrilimumab, morolimumab, NEOD001, omalizumab, oMS721, orticumab, otilimab, ozanezumab, ponezumab, prasinezumab, quilizumab, ranevetmab, refanezumab, roledumab, romosozumab, rozanolixizumab, setrusumab, SHP647, solanezumab, stamulumab, suptavumab, sutimlimab, tanezumab, crovalimab, and lokivetmab.

[5695] In some aspects, the antigen binding polypeptides provided herein comprise a VH1 comprising a heavy chain complementarity determining region 1 (HCDR1), HCDR2, and/or HCDR3 of an antibody selected from the group consisting of aducanumab, alirocumab, frovocimab, lodelcizumab, bococizumab, evolocumab, ralpancizumab, anifrolumab, atorolimumab, bapineuzumab, bedinvetmab, begelomab, biciromab, bimagrumab, birtamimab, blosozumab, burosumab, caplacizumab, concizumab, crenezumab, crizanlizumab, crotedumab, dezamizumab, domagrozumab, donanemab, eldelumab, elezanumab, emapalumab, emicizumab, eptinezumab, erenumab, evinacumab, faralimomab, fasinumab, fontolizumab, fremanezumab, frunevetmab, fulranumab, galcanezumab, gantenerumab, gosuranemab, idarucizumab, imciromab, inclacumab, lampalizumab, lanadelumab, landogrozumab, lecanemab, ligelizumab, marstacimab, mavrilimumab, morolimumab, NEOD001, omalizumab, oMS721, orticumab, otilimab, ozanezumab, ponezumab, prasinezumab, quilizumab, ranevetmab, refanezumab, roledumab, romosozumab, rozanolixizumab, setrusumab, SHP647, solanezumab, stamulumab, suptavumab, sutimlimab, tanezumab, crovalimab, and lokivetmab.

[5696] In some aspects, the antigen binding polypeptides provided herein comprise a VH2 comprising a heavy chain complementarity determining region 1 (HCDR1), HCDR2, and/or HCDR3 of an antibody selected from the group consisting of aducanumab, alirocumab, frovocimab, lodelcizumab, bococizumab, evolocumab, ralpancizumab, anifrolumab, atorolimumab, bapineuzumab, bedinvetmab, begelomab, biciromab, bimagrumab, birtamimab, blosozumab, burosumab, caplacizumab, concizumab, crenezumab, crizanlizumab, crotedumab, dezamizumab, domagrozumab, donanemab, eldelumab, elezanumab, emapalumab, emicizumab, eptinezumab, erenumab, evinacumab, faralimomab, fasinumab, fontolizumab, fremanezumab, frunevetmab, fulranumab, galcanezumab, gantenerumab, gosuranemab, idarucizumab, imciromab, inclacumab, lampalizumab, lanadelumab, landogrozumab, lecanemab, ligelizumab, marstacimab, mavrilimumab, morolimumab, NEOD001, omalizumab, oMS721, orticumab, otilimab, ozanezumab, ponezumab, prasinezumab, quilizumab, ranevetmab, refanezumab, roledumab, romosozumab, rozanolixizumab, setrusumab, SHP647, solanezumab, stamulumab, suptavumab, sutimlimab, tanezumab, crovalimab, and lokivetmab.

[5697] In some aspects, the antigen binding polypeptides provided herein comprise a VL1 comprising a VL of an antibody selected from the group consisting of aducanumab, alirocumab, frovocimab, lodelcizumab, bococizumab, evolocumab, ralpancizumab, anifrolumab, atorolimumab, bapineuzumab, bedinvetmab, begelomab, biciromab, bimagrumab, birtamimab, blosozumab, burosumab, caplacizumab, concizumab, crenezumab, crizanlizumab, crotedumab, dezamizumab, domagrozumab, donanemab, eldelumab, elezanumab, emapalumab, emicizumab, eptinezumab, erenumab, evinacumab, faralimomab, fasinumab, fontolizumab, fremanezumab, frunevetmab, fulranumab, galcanezumab, gantenerumab, gosuranemab, idarucizumab, imciromab, inclacumab, lampalizumab, lanadelumab, landogrozumab, lecanemab, ligelizumab, marstacimab, mavrilimumab, morolimumab, NEOD001, omalizumab, oMS721, orticumab, otilimab, ozanezumab, ponezumab, prasinezumab, quilizumab, ranevetmab, refanezumab, roledumab, romosozumab, rozanolixizumab, setrusumab, SHP647, solanezumab, stamulumab, suptavumab, sutimlimab, tanezumab, crovalimab, and lokivetmab.

[5698] In some aspects, the antigen binding polypeptides provided herein comprise a VL2 comprising a VL of an antibody selected from the group consisting of aducanumab, alirocumab, frovocimab, lodelcizumab, bococizumab, evolocumab, ralpancizumab, anifrolumab, atorolimumab, bapineuzumab, bedinvetmab, begelomab, biciromab, bimagrumab, birtamimab, blosozumab, burosumab, caplacizumab, concizumab, crenezumab, crizanlizumab, crotedumab, dezamizumab, domagrozumab, donanemab, eldelumab, elezanumab, emapalumab, emicizumab, eptinezumab, erenumab, evinacumab, faralimomab, fasinumab, fontolizumab, fremanezumab, frunevetmab, fulranumab, galcanezumab, gantenerumab, gosuranemab, idarucizumab, imciromab, inclacumab, lampalizumab, lanadelumab, landogrozumab, lecanemab, ligelizumab, marstacimab, mavrilimumab, morolimumab, NEOD001, omalizumab, oMS721, orticumab, otilimab, ozanezumab, ponezumab, prasinezumab, quilizumab, ranevetmab, refanezumab, roledumab, romosozumab, rozanolixizumab, setrusumab, SHP647, solanezumab, stamulumab, suptavumab, sutimlimab, tanezumab, crovalimab, and lokivetmab.

[5699] In some aspects, the antigen binding polypeptides provided herein comprise a VH1 comprising a VH of an antibody selected from the group consisting of aducanumab, alirocumab, frovocimab, lodelcizumab, bococizumab, evolocumab, ralpancizumab, anifrolumab, atorolimumab, bapincuzumab, bedinvetmab, begelomab, biciromab, bimagrumab, birtamimab, blosozumab, burosumab, caplacizumab, concizumab, crenezumab, crizanlizumab, crotedumab, dezamizumab, domagrozumab, donanemab, eldelumab, elezanumab, emapalumab, emicizumab, eptinezumab, erenumab, evinacumab, faralimomab, fasinumab, fontolizumab, fremanezumab, frunevetmab, fulranumab, galcanezumab, gantenerumab, gosuranemab, idarucizumab, imciromab, inclacumab, lampalizumab, lanadelumab, landogrozumab, lecanemab, ligelizumab, marstacimab, mavrilimumab, morolimumab, NEOD001, omalizumab, oMS721, orticumab, otilimab, ozanezumab, ponezumab, prasinezumab, quilizumab, ranevetmab, refanezumab, roledumab, romosozumab, rozanolixizumab, setrusumab, SHP647, solanezumab, stamulumab, suptavumab, sutimlimab, tanezumab, crovalimab, and lokivetmab.

[5700] In some aspects, the antigen binding polypeptides provided herein comprise a VH2 comprising a VH of an antibody selected from the group consisting of aducanumab, alirocumab, frovocimab, lodelcizumab, bococizumab, evolocumab, ralpancizumab, anifrolumab, atorolimumab, bapineuzumab, bedinvetmab, begelomab, biciromab, bimagrumab, birtamimab, blosozumab, burosumab, caplacizumab, concizumab, crenezumab, crizanlizumab, crotedumab, dezamizumab, domagrozumab, donanemab, eldelumab, elezanumab, emapalumab, emicizumab, eptinezumab, erenumab, evinacumab, faralimomab, fasinumab, fontolizumab, fremanezumab, frunevetmab, fulranumab, galcanezumab, gantenerumab, gosuranemab, idarucizumab, imciromab, inclacumab, lampalizumab, lanadelumab, landogrozumab, lecanemab, ligelizumab, marstacimab, mavrilimumab, morolimumab, NEOD001, omalizumab, oMS721, orticumab, otilimab, ozanezumab, ponezumab, prasinezumab, quilizumab, ranevetmab, refanezumab, roledumab, romosozumab, rozanolixizumab, setrusumab, SHP647, solanezumab, stamulumab, suptavumab, sutimlimab, tanezumab, crovalimab, and lokivetmab.

[5701] In some aspects, the antigen binding polypeptides provided herein comprise a VL1 comprising (i) a complementarity determining region (CDR) 1 having an amino acid sequence that is at least 65%, at least 70%, at least 75%, at least 80%, at least 85%, at least 90%, at least 95%, at least 99%, or 100% identical to any one of SEQ ID NOs: 1120, 1228, 1359, 1519, 1831, 1838, 1845, 1852, 1859, 1866, 1872, 1878, 1885, 1891, 1898, 1905, 1911, 1917, 1924, 1931, 1938, 1945, and 1963; (ii) a CDR2 having an amino acid sequence that is at least 65%, at least 70%, at least 75%, at least 80%, at least 85%, at least 90%, at least 95%, at least 99%, or 100% identical to any one of amino acid sequences AAS, AVS, DAS, DNN, EDN, EVS, GAS, GNG, KAS, KVS, LVS, NTD, STS, WAS, and YTS; and (iii) a CDR3 having an amino acid sequence that is at least 65%, at least 70%, at least 75%, at least 80%, at least 85%, at least 90%, at least 95%, at least 99%, or 100% identical to any one of SEQ ID NOs: 1360, 1832, 1839, 1846, 1853, 1860, 1867, 1873, 1879, 1886, 1892, 1899, 1906, 1912, 1918, 1925, 1932, 1939, 1946, 1951, 1957, 1964, and 1970.

[5702] In some aspects, the antigen binding polypeptides provided herein comprise a VL2 comprising (i) a complementarity determining region (CDR) 1 having an amino acid sequence that is at least 65%, at least 70%, at least 75%, at least 80%, at least 85%, at least 90%, at least 95%, at least 99%, or 100% identical to any one of SEQ ID NOs: 1120, 1228, 1359, 1519, 1831, 1838, 1845, 1852, 1859, 1866, 1872, 1878, 1885, 1891, 1898, 1905, 1911, 1917, 1924, 1931, 1938, 1945, and 1963; (ii) a CDR2 having an amino acid sequence that is at least 65%, at least 70%, at least 75%, at least 80%, at least 85%, at least 90%, at least 95%, at least 99%, or 100% identical to any one of amino acid sequences AAS, AVS, DAS, DNN, EDN, EVS, GAS, GNG, KAS, KVS, LVS, NTD, STS, WAS, and YTS; and (iii) a CDR3 having an amino acid sequence that is at least 65%, at least 70%, at least 75%, at least 80%, at least 85%, at least 90%, at least 95%, at least 99%, or 100% identical to any one of SEQ ID NOs: 1360, 1832, 1839, 1846, 1853, 1860, 1867, 1873, 1879, 1886, 1892, 1899, 1906, 1912, 1918, 1925, 1932, 1939, 1946, 1951, 1957, 1964, and 1970.

[5703] In some aspects, the antigen binding polypeptides provided herein comprise a VH1 comprising (i) a complementarity determining region (CDR) 1 having an amino acid sequence that is at least 65%, at least 70%, at least 75%, at least 80%, at least 85%, at least 90%, at least 95%, at least 99%, or 100% identical to any one of SEQ ID NOs: 1309, 1362, 1437, 1552, 1618, 1639, 1834, 1841, 1848, 1855, 1862, 1881, 1894, 1901, 1920, 1927, 1934, 1941, 1953, 1959, and 1966; (ii) a CDR2 having an amino acid sequence that is at least 65%, at least 70%, at least 75%, at least 80%, at least 85%, at least 90%, at least 95%, at least 99%, or 100% identical to any one of SEQ ID NOs: 1363, 1835, 1842, 1849, 1856, 1863, 1869, 1875, 1882, 1888, 1895, 1902, 1908, 1914, 1921, 1928, 1935, 1942, 1948, 1954, 1960, 1967, and 1972; and (iii) a CDR3 having an amino acid sequence that is at least 65%, at least 70%, at least 75%, at least 80%, at least 85%, at least 90%, at least 95%, at least 99%, or 100% identical to any one of SEQ ID NOs: 1364, 1836, 1843, 1850, 1857, 1864, 1870, 1876, 1883, 1889, 1896, 1903, 1909, 1915, 1922, 1929, 1936, 1943, 1949, 1955, 1961, 1968, and 1973.

[5704] In some aspects, the antigen binding polypeptides provided herein comprise a VH2 comprising (i) a complementarity determining region (CDR) 1 having an amino acid sequence that is at least 65%, at least 70%, at least 75%, at least 80%, at least 85%, at least 90%, at least 95%, at least 99%, or 100% identical to any one of SEQ ID NOs: 1309, 1362, 1437, 1552, 1618, 1639, 1834, 1841, 1848, 1855, 1862, 1881, 1894, 1901, 1920, 1927, 1934, 1941, 1953, 1959, and 1966; (ii) a CDR2 having an amino acid sequence that is at least 65%, at least 70%, at least 75%, at least 80%, at least 85%, at least 90%, at least 95%, at least 99%, or 100% identical to any one of SEQ ID NOs: 1363, 1835, 1842, 1849, 1856, 1863, 1869, 1875, 1882, 1888, 1895, 1902, 1908, 1914, 1921, 1928, 1935, 1942, 1948, 1954, 1960, 1967, and 1972; and (iii) a CDR3 having an amino acid sequence that is at least 65%, at least 70%, at least 75%, at least 80%, at least 85%, at least 90%, at least 95%, at least 99%, or 100% identical to any one of SEQ ID NOs: 1364, 1836, 1843, 1850, 1857, 1864, 1870, 1876, 1883, 1889, 1896, 1903, 1909, 1915, 1922, 1929, 1936, 1943, 1949, 1955, 1961, 1968, and 1973.

[5705] In some aspects, the antigen binding polypeptides provided herein comprise a VL1 comprising an amino acid sequence that is at least 65%, at least 70%, at least 75%, at least 80%, at least 85%, at least 90%, at least 95%, at least 99%, or 100% identical to any one of SEQ ID NOs: 1361, 1833, 1840, 1847, 1854, 1861, 1868, 1874, 1880, 1887, 1893, 1900, 1907, 1913, 1919, 1926, 1933, 1940, 1947, 1952, 1958, 1965, and 1971.

[5706] In some aspects, the antigen binding polypeptides provided herein comprise a VL2 comprising an amino acid sequence that is at least 65%, at least 70%, at least 75%, at least 80%, at least 85%, at least 90%, at least 95%, at least 99%, or 100% identical to any one of SEQ ID NOs: 1361, 1833, 1840, 1847, 1854, 1861, 1868, 1874, 1880, 1887, 1893, 1900, 1907, 1913, 1919, 1926, 1933, 1940, 1947, 1952, 1958, 1965, and 1971.

[5707] In some aspects, the antigen binding polypeptides provided herein comprise a VH1 comprising an amino acid sequence that is at least 65%, at least 70%, at least 75%, at least 80%, at least 85%, at least 90%, at least 95%, at least 99%, or 100% identical to any one of SEQ ID NOs: 1365, 1837, 1844, 1851, 1858, 1865, 1871, 1877, 1884, 1890, 1897, 1904, 1910, 1916, 1923, 1930, 1937, 1944, 1950, 1956, 1962, 1969, and 1974.

[5708] In some aspects, the antigen binding polypeptides provided herein comprise a VH2 comprising an amino acid sequence that is at least 65%, at least 70%, at least 75%, at least 80%, at least 85%, at least 90%, at least 95%, at least 99%, or 100% identical to any one of SEQ ID NOs: 1365, 1837, 1844, 1851, 1858, 1865, 1871, 1877, 1884, 1890, 1897, 1904, 1910, 1916, 1923, 1930, 1937, 1944, 1950, 1956, 1962, 1969, and 1974.

[5709] In some aspects, the antigen binding polypeptides disclosed herein, comprise one or more CL, as indicated in the formulas representing the antigen binding polypeptides disclosed herein. In some aspects, the CL comprises an amino acid sequence at least 65%, at least 70%, at least 75%, at least 80%, at least 85%, at least 90%, at least 95%, at least 99%, or 100% identical to any one of SEQ ID NOs: 374, 637, or 1092-1095.

[5710] In some aspects, the antigen binding polypeptides disclosed herein, comprise one or more CH1, as indicated in the formulas representing the antigen binding polypeptides disclosed herein. In some aspects, the CH1 comprises an amino acid sequence at least 65%, at least 70%, at least 75%, at least 80%, at least 85%, at least 90%, at least 95%, at least 99%, or 100% identical to any one of SEQ ID NOs: 375, 634, 1070, 1071, or 1086-1091.

[5711] In some aspects, the antigen binding polypeptides provided herein further comprise an Fc region. In some aspects, the antigen binding polypeptides provided herein further comprise an Fc region at the carboxy-terminus. In some aspects, the Fc region comprises an immunoglobulin heavy chain constant region 2 (CH2) and/or an immunoglobulin heavy chain constant region 3 (CH3). In some aspects, the Fc region further comprises an immunoglobulin hinge (i.e., a hinge region). In some aspects, the hinge region comprises an amino acid sequence at least 65%, at least 70%, at least 75%, at least 80%, at least 85%, at least 90%, at least 95%, at least 99%, or 100% identical to any one of SEQ ID NOs: 635, 636, 1072, 1073, or 1074. In some aspects, the Fc region comprises a CH2 and a CH3. In some aspects, the CH2 comprises an amino acid sequence that is at least 65%, at least 70%, at least 75%, at least 80%, at least 85%, at least 90%, at least 95%, at least 99%, or 100% identical to any one of SEQ ID NOs: 1075-1078. In some aspects, the CH3 comprises an amino acid sequence that is at least 65%, at least 70%, at least 75%, at least 80%, at least 85%, at least 90%, at least 95%, at least 99%, or 100% identical to any one of SEQ ID NOs: 1079-1085. In some aspects, the Fc region comprises an amino acid sequence that is at least 65%, at least 70%, at least 75%, at least 80%, at least 85%, at least 90%, at least 95%, at least 99%, or 100% identical to any one of SEQ ID NOs: 376-380).

[5712] In some aspects, the Fc region comprises one or more amino acid substitutions. In some aspects, the one or more amino acid substitutions comprise one or more half-life extension amino acid substitutions. In some aspects, the one or more half-life extension amino acid substitutions comprise one or more of amino acid substitutions M428L, N434A, N434S, L234F, L235E, P331S, M252Y, S254T, and T256E, or equivalent thereof, based on the EU numbering scheme. In some aspects, the one or more half-life extension amino acid substitutions comprise a LA (M428L and N434A, or equivalent thereof, based on the EU numbering scheme) amino acid substitution. In some aspects, the one or more half-life extension amino acid substitutions comprise a LS (M428L and N434S, or equivalent thereof, based on the EU numbering scheme) amino acid substitution. In some aspects, the one or more half-life extension amino acid substitutions comprise L234F and L235E, or equivalent thereof (based on the EU numbering scheme) amino acid substitutions. In some aspects, the one or more half-life extension amino acid substitutions comprise a TM (L234F, L235E, and P331S, or equivalent thereof, based on the EU numbering scheme) amino acid substitution. In some aspects, the one or more half-life extension amino acid substitutions comprise a YTE (M252Y, S254T, and T256E, or equivalent thereof, based on the EU numbering scheme) amino acid substitution.

[5713] In some aspects, the Fc region comprises at least one knob-into-hole modification. In some aspects, the antigen binding polypeptides disclosed herein are comprised in IgG1 or IgG4 antibodies or antigen binding fragments thereof. In some aspects, the knob-into-hole modification comprises one or more of knob substitutions of S354C and T366W, or equivalent thereof, and/or one or more of hole substitutions of Y349C, T366S, L368A, Y407V, or equivalent thereof, or a combination thereof, based on the EU numbering scheme. In some aspects, the Fc region comprises a knob-into-hole modification comprising knob substitutions of S354C and T366W, or equivalent thereof, and/or hole substitutions of Y349C, T366S, L368A and Y407V, or equivalent thereof, and/or a half-life extension amino acid substitution comprising: a LA (M428L and N434A, or equivalent thereof, based on the EU numbering scheme) amino acid substitution, a LS (M428L and N434S, or equivalent thereof, based on the EU numbering scheme) amino acid substitution, L234F and L235E, or equivalent thereof (based on the EU numbering scheme) amino acid substitutions, a TM (L234F, L235E, and P331S, or equivalent thereof, based on the EU numbering scheme) amino acid substitution, a YTE (M252Y, S254T, and T256E, or equivalent thereof, based on the EU numbering scheme) amino acid substitution, or any combination thereof.

[5714] In some aspects, the Fc region comprises knob substitutions of S354C and T366W, or equivalent thereof, and a half-life extension amino acid substitution comprising: a LA (M428L and N434A, or equivalent thereof, based on the EU numbering scheme) amino acid substitution, a LS (M428L and N434S, or equivalent thereof, based on the EU numbering scheme) amino acid substitution, L234F and L235E, or equivalent thereof (based on the EU numbering scheme) amino acid substitutions, a TM (L234F, L235E, and P331S, or equivalent thereof, based on the EU numbering scheme) amino acid substitution, a YTE (M252Y, S254T, and T256E, or equivalent thereof, based on the EU numbering scheme) amino acid substitution, or any combination thereof.

[5715] In some aspects, the Fc region comprises hole substitutions of Y349C, T366S, L368A and Y407V, or equivalent thereof, and a half-life extension amino acid substitution comprising: a LA (M428L and N434A, or equivalent thereof, based on the EU numbering scheme) amino acid substitution, a LS (M428L and N434S, or equivalent thereof, based on the EU numbering scheme) amino acid substitution, L234F and L235E, or equivalent thereof (based on the EU numbering scheme) amino acid substitutions, a TM (L234F, L235E, and P331S, or equivalent thereof, based on the EU numbering scheme) amino acid substitution, a YTE (M252Y, S254T, and T256E, or equivalent thereof, based on the EU numbering scheme) amino acid substitution, or any combination thereof.

[5716] In some aspects, the antigen binding polypeptides disclosed herein comprise one or more Fc effector function knockout mutation. In some aspects, the antigen binding polypeptides disclosed herein are comprised in IgG1 or IgG4 antibodies or antigen binding fragments thereof. In some aspects, the Fc effector function knockout mutation is L234A, L235A, P239A, or equivalent thereof, or a combination thereof, based on the EU numbering scheme.

[5717] In some aspects, the antigen binding polypeptides disclosed herein comprise a mutation at a glycosylation site. In some aspects, the mutation at a glycosylation site is a mutation at an N-glycosylation site. In some aspects, the antigen binding polypeptides comprise a VH comprising a mutation at a glycosylation site. In some aspects, the mutation at a glycosylation site is a mutation at an N-glycosylation site. In some aspects, the mutation at an N-glycosylation site is at amino acid N62, or equivalent thereof, of the VH region or equivalent thereof. In some aspects, the mutation at an N-glycosylation site at amino acid N62 is N62Q or N62S, or equivalent thereof.

[5718] In some aspects, the antigen binding polypeptides disclosed herein, comprise one or more optional linkers. The one or more optional linkers are indicated herein as Ln, wherein n is an integer, and the integer next to each L indicates each L comprised in the antigen binding polypeptides disclosed herein. For example, if an antigen binding polypeptide disclosed herein comprises two linkers, the first linker from N-terminus to C-terminus is herein indicated as L1, and the second linker from N-terminus to C-terminus is herein indicated as L2. In some aspects, any one of the optional linkers each independently have a length of from 0 amino acids to about 50 amino acids. In some aspects, any one of the optional linkers each independently have a length of from 5 amino acids to about 40 amino acids.

[5719] In some aspects, any one of the optional linkers are non-immunogenic. In some aspects, any one of the optional linkers do not contain a consensus T cell epitope.

[5720] In some aspects, any of Ln comprises an amino acid sequence of G or A, or an amino acid sequence at least 65%, at least 70%, at least 75%, at least 80%, at least 85%, at least 90%, at least 95%, at least 99%, or 100% identical to amino acid sequence GSS or ASG, or an amino acid sequence at least 65%, at least 70%, at least 75%, at least 80%, at least 85%, at least 90%, at least 95%, at least 99%, or 100% identical to any one of SEQ ID NOs: 333-373 or 967-971. In some aspects. Ln comprises an amino acid sequence at least 65%, at least 70%, at least 75%, at least 80%, at least 85%, at least 90%, at least 95%, at least 99%, or 100% identical to any one of SEQ ID NOs: 333-345 or 967-971.

[5721] In some aspects, the antigen binding polypeptides provided herein have a structure, from amino-terminus to carboxy-terminus, represented by:
[5722] VL1-L1-VL2-L2-VH2-L3-VH1-L4-Fc-L5-Fc;
[5723] VL1-L1-VH2-L2-VL2-L3-VH1-L4-Fc-L5-Fc;
[5724] VH1-L1-VH2-L2-VL2-L3-VL1-L4-Fc-L5-Fc; or
[5725] VH1-L1-VL2-L2-VH2-L3-VL1-L4-Fc-L5-Fc;
[5726] wherein:
[5727] VL1 is a first immunoglobulin light chain variable region that specifically binds to (i) a tumor-associated antigen (TAA), (ii) an infectious disease antigen that is not a sarbecovirus antigen, or (iii) an other-pathology antigen;
[5728] VL2 is a second immunoglobulin light chain variable region that specifically binds to (i) a tumor-associated antigen (TAA), (ii) an infectious disease antigen that is not a sarbecovirus antigen, or (iii) an other-pathology antigen;
[5729] VH1 is a first immunoglobulin heavy chain variable region that specifically binds to (i) a tumor-associated antigen (TAA), (ii) an infectious disease antigen that is not a sarbecovirus antigen, or (iii) an other-pathology antigen;
[5730] VH2 is a second immunoglobulin heavy chain variable region that specifically binds to (i) a tumor-associated antigen (TAA), (ii) an infectious disease antigen that is not a sarbecovirus antigen, or (iii) an other-pathology antigen;
[5731] L1-L5 are optional amino acid linkers; and
[5732] Fc is an immunoglobulin fragment crystallizable region comprising an immunoglobulin heavy chain constant region 2 (CH2), an immunoglobulin heavy chain constant region 3 (CH3), and optionally, an immunoglobulin hinge.

[5733] In any aspect shown herein as a structure from amino terminus to carboxy terminus, and with binding pairs selected from VL and/or VH or other structural regions such as CH2, CH3, when shown without a specific linker such as L1, L2, etc., such linkers are optionally present in such structures between each designated subsequence VL, VH, etc.

[5734] In some aspects, the TAA is selected from the group consisting of 5′-nucleotidase, 5T4, A2AR, activin receptor-like kinase 1, adenocarcinoma antigen, ADRB3, AFP, AKAP-4, ALK, alpha-fetoprotein, androgenreceptor, angiopoietin 2, AOC3, APRIL, ATPDase, AXL, B7-4, B7DC, B7H1, B7H2, B7H3, B7H4, B7H5, B7H6, B7H7, B7RP1, BAFF, BAFFR, BCMA, bcr-abl, BlyS, BORIS, BST2, BTK, BTLA, C3, C5, C5a, C5a receptor, CA-125, CAIX, CanAg (a glycoform of MUC1), CCL11, CCL15, CCL17, CCL19, CCL2, CCL20, CCL21, CCL25, CCL3, CCL4, CCL5, CCL7, CCL8, CCR2, CCR3, CCR4, CCR5, CD11, CD11a, CD123, CD125, CD133, CD134, CD137, CD137L, CD147, CD15, CD154, CD160, CD16A, CD171, CD179a, CD18, CD184, CD19, CD2, CD20, CD200, CD22, CD221, CD23, CD24, CD242, CD25, CD27, CD272, CD276, CD278, CD279, CD28, CD3, CD30, CD300LF, CD319, CD33, CD37, CD38, CD39, CD38, CD4, CD40, CD40L, CD41, CD44v6, CD45, CD47, CD49B, CD5, CD51, CD52, CD54, CD56, CD6, CD62L, CD7, CD70, CD72, CD74, CD79a, CD79b, CD80, CD86, CD97, CEA, CEACAM5, claudin 18 isoform 2, CLDN6, CLEC12A, CLEC9, CLEC91, CLL-1, cMet, coagulation factor III, CRTH2, CS1, CSF-1, CSFIR, CSF-2, CSF-3, CTGF, CTLA4, CXCL1, CXCL12, CXCL13, CXCL2, CXCL4, CXCR3, CXORF61, CyclinB1, CYP1B1, dendritic cell-associated lectin 2, DLL3, DLL4, DNGR-1, DR5, E7, E-cadherin, EGFL7, EGFR, EGFRVIII, ELF2M, EMR2, endoglin, ENTPD1, EpCAM, EphA2, EPHA3, ephrin receptor A3, EphrinB2, episialin, ERBB2 (Her2/neu), ERBB3, ERG (TMPRSS2-ETS fusion gene), ETV6-AML, FAP, FCAR, FCER1, FCER1A, FCER2, FCRL5, FGF 23, FGFR, FGFR2, fibronectin extra domain-B, FLAP, FLT3, folate hydrolase, folate receptor 1, folate receptor alpha, folate receptor beta, FOLH1, Fos-relatedantigen1, Frizzled receptor, Fucosyl GM1, GD2, GD3, gelatinase B, Gi24, GITR, GITRL, GloboH, Glutamate carboxypeptidase II, glypican 3, GM3, GP100, GPC1, GPC2, GPC3, gplOO, GPNMB, GPR20, GPR5, GPRC5D, growth differentiation factor 8, GUCY2C, HAVCR1, HER1, HER2, HER3, HGF, HGFR, HHLA2, histone complex, HLA-DR, HMGB1, HMWMAA, HPVE6, hTERT, human telomerase reverse transcriptase, HVEM, ICAM-1, ICOS, ICOSL, IDO, IFNa, IgE, IGF-1, IGF1R, IGF-2, IGF-I receptor, IGLL1, IL1, IL10, IL12, IL13, IL13Ra2, IL-13Ra2, IL13Ra1, IL15, IL17, IL-17A, IL-17AF, IL-17F, IL17Rb, IL18, IL1B, IL1F10, IL-1a, IL-1B, IL2, IL-20, IL22, IL23, IL-23A, IL25, IL2Rbeta, IL-3 receptor, IL-31 receptor A, IL33, IL35, IL4, IL4Ra, IL5, ILSR, IL6, IL7, IL7Ra, IL8, IL9, IL9R, IL1A, IL-llRa, integrin α4, integrin α4 β7, integrin α5β1, integrin αIIbβ3, integrin αvβ3, integrin β7, interleukin 36 receptor IL1RAP, interleukin 36 receptor IL1RL2, intestinal carboxy lesterase, ITGB4, ITK, KIR, KIR2D, KIT, LAG3, LAGE-1a, LAIR1, LAMP1, LCK, legumain, leptin, LewisY, LILRA2, LIV-1, LMP2, LOXL2, LPFS2, LRRC15, LY6K, LY75, LYPD3, MAD-CT-1, MAD-CT-2, MAGEA1, MAGE-A1, MCAM, MCP-1, MelanA/MART1, mesothelin, MHC classII, MIF, ML-IAP, MS4A1, MST1R (RON), MUC1, MUC-1, MUC16, MUC-16, MUC5AC, muthsp70)-2, MYCN, NA17, NCA-90) granulocyte antigen, NCAM, NCR3LG1, nectin-4, NGNA ganglioside, NKG2A, NKG2D, NKp46, Notch 1, Notch receptor, NRP1, NTPDase-1, NY-BR-1, NY-ESO-1, o-acetyl-GD2, OR51E2, OX40), OX40L, OY-TES1, p53, p53mutant, PANX3, PAP, PAX3, PAX5, PCDC1, PCDP1, PCTA-1/Galectin8, PD-1, PDGFRA, PDGFR-beta, PD-L1, PD-L2, phosphate-sodium co-transporter, phosphatidylserine, PLAC1, polysialic acid, PROM1, prostase, prostein, PRSS21, PSCA, PSMA, PTK7, RAGE-1, RANKL. Ras mutant, rhIL1O, RhoC, root plate-specific spondin 3, ROR1, ROR2, RTN4, RU1, RU2, S152, sarcoma translocation breakpoints, SART3, scatter factor receptor kinase, SDC1, SIRPalpha, SISP1, SLAMF7, SLC, sLc, SLITRK6, spermprotein17, SPG64, sphingosine-1-phosphate, SSEA-4, SSX2, ST2, STEAP1, STEAP2, surviving and telomerase, Syk kinase, T14, TACI, TAG72, TARP, T-cell receptor, TCRβ, TDO, TEM1/CD248, TEM7R, tenascin C, TGFBETA, TGF-β1, TGF-β2, TGS5, the extracellular portion of the APRIL protein, Tie2, TIGIT, TIM3, TLR, TLR2, TLR4, TLR5, TLR9, TMEF1, TnAg, TNF, TNFa, TNFR superfamily member 4, TNFRSF7, Tp55, TRAC, TRAIL-R1, TRAIL-R2, TRAP, TREM1, TROP2, TRP-2, TSHR, TSLP, TSLPR, tumor antigen CTAA16.88, TWEAK, tyrosinase, TYRPI glycoprotein 75, UPK2, VAP-1, VEGF, VEGFA, VEGFR-1, VEGFR2, vimentin, VISTA, Vstm3, WT1, WUCAM, and XAGE1.

[5735] In some aspects, the antigen binding polypeptides provided herein comprise a VL1 comprising a light chain complementarity determining region 1 (LCDR1), LCDR2, and/or LCDR3 of an antibody selected from the group consisting of losatuxizumab vedotin, utomilumab, urelumab, oleclumab, naptumomab estafenatox, ascrinvacumab, pintumomab, tacatuzumab tetraxetan, nesvacumab, vanucizumab, timolumab, vapaliximab, vepalimomab, enapotamab vedotin, ianalumab, belimumab, tabalumab, tibulizumab, belantamab mafodotin, teclistamab, teclistamab, detumomab, nacolomab tafenatox, eculizumab, lendalizumab, pexelizumab, pozelimab, ravulizumab, tesidolumab, vilobelimab, abagovomab, igovomab, oregovomab, sofituzumab vedotin, cantuzumab mertansine, cantuzuma bravtansine, girentuximab, altumomab pentetate, arcitumomab, besilesomab, bertilimumab, plozalizumab, mogamulizumab, leronlimab, PRO140, rovelizumab, rovelizumab, talacotuzumab, benralizumab, tavolimab, vonlerolizumab, gavilimomab, ziralimumab, fanolesomab, ipilimumab, ruplizumab, toralizumab, dapirolizumab pegol, toralizumab, dapirolizumab pegol, ruplizumab, blinatumomab, inebilizumab, loncastuximab tesirine, SGN-CD19A, tafasitamab, taplitumomab paptox, XMAB-5574, Budoprutug, Obexelimab, duvortuxizumab, englumafusp alfa, Emfizatamab, zeripatamig, siplizumab, blontuvetmab, FBTA05, ibritumomab tiuxetan, obinutuzumab, ocaratuzumab, ocrelizumab, ofatumumab, rituximab, tositumomab, ublituximab, veltuzumab, divozilimab, eramkafusp alfa, ripertamab, zuberitamab, glofitamab, nofetumomab merpentan, samalizumab, imvotamab, odronextamab, plamotamab, bectumomab, inotuzumab ozogamicin, moxetumomab pasudotox, pinatuzumab vedotin, gomiliximab, lumiliximab, inolimomab, inolimomab, daclizumab, camidanluma btesirine, basiliximab, varlilumab, omburtamab, enoblituzumab, vopratelimab, lulizumabpegol, TGN1412, muromonab-CD3, otelixizumab, teplizumab, visilizumab, epcoritamab, epcoritamab, brentuximab vedotin, iratumumab, azintuxizumab vedotin, gemtuzumab ozogamicin, lintuzumab, vadastuximab talirine, naratuximab emtansine, otlertuzumab, lilotomab satetraxetan, tetulomab, daratumumab, isatuximab, foralumab, mosunetuzumab, mosunetuzumab, cedelizumab, ibalizumab, keliximab, priliximab, tregalizumab, zanolimumab, bleselumab, iscalimab, lucatumumab, ravagalimab, selicrelumab, teneliximab, vanalimab, abciximab, bivatuzumab, iomab-B, telimomab aritox, zolimomab aritox, abituzumab, intetumumab, alemtuzumab, tamtuvetmab, lorvotuzumab mertansine, itolizumab, cusatuzumab, vorsetuzumab mafodotin, milatuzumab, iladatuzumab vedotin, polatuzumab vedotin, galiximab, cibisatamab, zolbetuximab, naxitamab, tisotumab vedotin, olendalizumab, pamrevlumab, lacnotuzumab, cabiralizumab, emactuzumab, axatilimab, gimsilumab, lenzilumab, namilumab, tremelimumab, ulocuplumab, tepoditamab, rovalpituzumab tesirine, tarlatamab, demcizumab, navicixizumab, drozitumab, parsatuzumab, depatuxizumab mafodotin, modotuximab, carotuximab, adecatumumab, adecatumumab, oportuzumab monatox, solitomab, tucotuzumab celmoleukin, edrecolomab, catumaxomab, ifabotuzumab, fibatuzumab, zalutumumab, panitumumab, cetuximab, futuximab, imgatuzumab, laprituximab emtansine, matuzumab, necitumumab, nimotuzumab, tomuzotuximab, amivantamab, amivantamab, epitumomab cituxetan, sontuzumab, duligotuzumab, elgemtumab, lumretuzumab, patritumab, scribantumab, zenocutuzumab, sibrotuzumab, burosumab, aprutumab ixadotin, radretumab, pasotuxizumab, farletuzumab, mirvetuximab soravtansine, vantictumab, TRBS07, 3F8, dinutuximab, dinutuximab beta, ecromeximab, mitumomab, andecaliximab, capromab, codrituzumab, glembatumumab vedotin, talquetamab, talquetamab, trevogrumab, indusatumab vedotin, ficlatuzumab, rilotumumab, zatuximab, pentuzimab, pentuzimab, margetuximab, timigutuzumab, trastuzumab, trastuzumab duocarmazine, trastuzumab emtansine, gancotamab, pertuzumab, ertumaxomab, emibetuzumab, telisotuzumab, telisotuzumab vedotin, derlotuximab biotin, apolizumab, onartuzumab, bersanlimab, enlimomabpegol, rontalizumab, sifalimumab, talizumab, ganitumab, istiratumab, robatumumab, teprotumumab, figitumumab, ganitumab, istiratumab, robatumumab, teprotumumab, cixutumumab, dalotuzumab, xentuzumab, dusigitumab, canakinumab, ustekinumab, ustekinumab, ustekinumab, briakinumab, briakinumab, abrezekimab, lebrikizumab, romilkimab, TNX-650, tralokinumab, anrukinzumab, brodalumab, ixekizumab, netakimab, perakizumab, secukinumab, vunakizumab, afasevikumab, afasevikumab, bimekizumab, bimekizumab, remtolumab, bermekimab, lutikizumab, lutikizumab, gevokizumab, cergutuzumab amunaleukin, fletikumab, fezakinumab, brazikumab, guselkumab, mirikizumab, tildrakizumab, risankizumab, flotetuzumab, nemolizumab, pascolizumab, dupilumab, mepolizumab, reslizumab, clazakizumab, elsilimomab, olokizumab, sarilumab, siltuximab, sirukumab, vobarilizumab, tocilizumab, SA237, satralizumab, enokizumab, prezalizumab, natalizumab, abrilumab, abrilumab, vedolizumab, volociximab, tadocizumab, etaracizumab, etrolizumab, spesolimab, vatelizumab, erlizumab, lirilumab, relatlimab, cBR96-doxorubicinimmunoconjugate, odulimomab, efalizumab, ladiratuzumab vedotin, simtuzumab, samrotamab vedotin, aselizumab, lupartumab amadotin, imalumab, carlumab, imaprelimab, amatuximab, amatuximab, anetumab ravtansine, narnatumab, clivatuzumab tetraxetan, pemtumomab, gatipotuzumab, ensituximab, lemalesomab, sulesomab, enfortumab vedotin, racotumomab, monalizumab, brontictuzumab, tarextumab, vesencumab, oxelumab, gilvetmab, tislelizumab, dostarlimab, BCD-100, nivolumab, PDR001, pembrolizumab, pidilizumab, retifanlimab, spartalizumab, sintilimab, cemiplimab, olaratumab, tovetumab, rinucumab, atezolizumab, avelumab, durvalumab, lifastuzumab vedotin, bavituximab, acapatamab, capromab, rosopatamab, nezastomig, pasotuxizumab, pelgifatamab, voxalatamab, cofetuzumab pelidotin, denosumab, rosmantuzumab, cirmtuzumab, atinumab, indatuximab ravtansine, elotuzumab, sirtratumab vedotin, sonepcizumab, vandortuzumab vedotin, minretumomab, satumomab pendetide, maslimomab, ontuxizumab, tenatumomab, fresolimumab, metelimumab, lerdelimumab, tezepelumab, etigilimab, tiragotumab, placulumab, prezalumab, infliximab, nerelimomab, ozoralizumab, adalimumab, afelimomab, certolizumab pegol, golimumab, mapatumumab, conatumumab, lexatumumab, tigatuzumab, sacituzumab govitecan, votumumab, pogalizumab, letolizumab, pankomab, anatumomab mafenatox, enavatuzumab, flanvotumab, brolucizumab, ranibizumab, varisacumab, bevacizumab, faricimab, icrucumab, alacizumab pegol, ramucirumab, pritumumab, and onvatilimab.

[5736] In some aspects, the antigen binding polypeptides provided herein comprise a VL2 comprising a light chain complementarity determining region 1 (LCDR1), LCDR2, and/or LCDR3 of an antibody selected from the group consisting of losatuxizumab vedotin, utomilumab, urelumab, oleclumab, naptumomab estafenatox, ascrinvacumab, pintumomab, tacatuzumab tetraxetan, nesvacumab, vanucizumab, timolumab, vapaliximab, vepalimomab, enapotamab vedotin, ianalumab, belimumab, tabalumab, tibulizumab, belantamab mafodotin, teclistamab, teclistamab, detumomab, nacolomab tafenatox, eculizumab, lendalizumab, pexelizumab, pozelimab, ravulizumab, tesidolumab, vilobelimab, abagovomab, igovomab, oregovomab, sofituzumab vedotin, cantuzumab mertansine, cantuzuma bravtansine, girentuximab, altumomab pentetate, arcitumomab, besilesomab, bertilimumab, plozalizumab, mogamulizumab, leronlimab, PRO140, rovelizumab, rovelizumab, talacotuzumab, benralizumab, tavolimab, vonlerolizumab, gavilimomab, ziralimumab, fanolesomab, ipilimumab, ruplizumab, toralizumab, dapirolizumab pegol, toralizumab, dapirolizumab pegol, ruplizumab, blinatumomab, inebilizumab, loncastuximab tesirine, SGN-CD19A, tafasitamab, taplitumomab paptox, XMAB-5574, Budoprutug, Obexelimab, duvortuxizumab, englumafusp alfa, Emfizatamab, zeripatamig, siplizumab, blontuvetmab, FBTA05, ibritumomab tiuxetan, obinutuzumab, ocaratuzumab, ocrelizumab, ofatumumab, rituximab, tositumomab, ublituximab, veltuzumab, divozilimab, eramkafusp alfa, ripertamab, zuberitamab, glofitamab, nofetumomab merpentan, samalizumab, imvotamab, odronextamab, plamotamab, bectumomab, inotuzumab ozogamicin, moxetumomab pasudotox, pinatuzumab vedotin, gomiliximab, lumiliximab, inolimomab, inolimomab, daclizumab, camidanluma btesirine, basiliximab, varlilumab, omburtamab, enoblituzumab, vopratelimab, lulizumabpegol, TGN1412, muromonab-CD3, otelixizumab, teplizumab, visilizumab, epcoritamab, epcoritamab, brentuximab vedotin, iratumumab, azintuxizumab vedotin, gemtuzumab ozogamicin, lintuzumab, vadastuximab talirine, naratuximab emtansine, otlertuzumab, lilotomab satetraxetan, tetulomab, daratumumab, isatuximab, foralumab, mosunetuzumab, mosunetuzumab, cedelizumab, ibalizumab, keliximab, priliximab, tregalizumab, zanolimumab, bleselumab, iscalimab, lucatumumab, ravagalimab, selicrelumab, teneliximab, vanalimab, abciximab, bivatuzumab, iomab-B, telimomab aritox, zolimomab aritox, abituzumab, intetumumab, alemtuzumab, tamtuvetmab, lorvotuzumab mertansine, itolizumab, cusatuzumab, vorsctuzumab mafodotin, milatuzumab, iladatuzumab vedotin, polatuzumab vedotin, galiximab, cibisatamab, zolbetuximab, naxitamab, tisotumab vedotin, olendalizumab, pamrevlumab, lacnotuzumab, cabiralizumab, emactuzumab, axatilimab, gimsilumab, lenzilumab, namilumab, tremelimumab, ulocuplumab, tepoditamab, rovalpituzumab tesirine, tarlatamab, demcizumab, navicixizumab, drozitumab, parsatuzumab, depatuxizumab mafodotin, modotuximab, carotuximab, adecatumumab, adecatumumab, oportuzumab monatox, solitomab, tucotuzumab celmoleukin, edrecolomab, catumaxomab, ifabotuzumab, fibatuzumab, zalutumumab, panitumumab, cetuximab, futuximab, imgatuzumab, laprituximab emtansine, matuzumab, necitumumab, nimotuzumab, tomuzotuximab, amivantamab, amivantamab, epitumomab cituxetan, sontuzumab, duligotuzumab, elgemtumab, lumretuzumab, patritumab, seribantumab, zenocutuzumab, sibrotuzumab, burosumab, aprutumab ixadotin, radretumab, pasotuxizumab, farletuzumab, mirvetuximab soravtansine, vantictumab, TRBS07, 3F8, dinutuximab, dinutuximab beta, ecromeximab, mitumomab, andecaliximab, capromab, codrituzumab, glembatumumab vedotin, talquetamab, talquetamab, trevogrumab, indusatumab vedotin, ficlatuzumab, rilotumumab, zatuximab, pentuzimab, pentuzimab, margetuximab, timigutuzumab, trastuzumab, trastuzumab duocarmazine, trastuzumab emtansine, gancotamab, pertuzumab, ertumaxomab, emibetuzumab, telisotuzumab, telisotuzumab vedotin, derlotuximab biotin, apolizumab, onartuzumab, bersanlimab, enlimomabpegol, rontalizumab, sifalimumab, talizumab, ganitumab, istiratumab, robatumumab, teprotumumab, figitumumab, ganitumab, istiratumab, robatumumab, teprotumumab, cixutumumab, dalotuzumab, xentuzumab, dusigitumab, canakinumab, ustekinumab, ustekinumab, ustekinumab, briakinumab, briakinumab, abrezekimab, lebrikizumab, romilkimab, TNX-650, tralokinumab, anrukinzumab, brodalumab, ixekizumab, netakimab, perakizumab, secukinumab, vunakizumab, afasevikumab, afasevikumab, bimekizumab, bimekizumab, remtolumab, bermckimab, lutikizumab, lutikizumab, gevokizumab, cergutuzumab amunaleukin, fletikumab, fezakinumab, brazikumab, gusclkumab, mirikizumab, tildrakizumab, risankizumab, flotetuzumab, nemolizumab, pascolizumab, dupilumab, mepolizumab, reslizumab, clazakizumab, elsilimomab, olokizumab, sarilumab, siltuximab, sirukumab, vobarilizumab, tocilizumab, SA237, satralizumab, enokizumab, prezalizumab, natalizumab, abrilumab, abrilumab, vedolizumab, volociximab, tadocizumab, etaracizumab, etrolizumab, spesolimab, vatelizumab, erlizumab, lirilumab, relatlimab, cBR96-doxorubicinimmunoconjugate, odulimomab, efalizumab, ladiratuzumab vedotin, simtuzumab, samrotamab vedotin, aselizumab, lupartumab amadotin, imalumab, carlumab, imaprelimab, amatuximab, amatuximab, anetumab ravtansine, narnatumab, clivatuzumab tetraxetan, pemtumomab, gatipotuzumab, ensituximab, lemalesomab, sulesomab, enfortumab vedotin, racotumomab, monalizumab, brontictuzumab, tarextumab, vesencumab, oxelumab, gilvetmab, tislelizumab, dostarlimab, BCD-100, nivolumab, PDR001, pembrolizumab, pidilizumab, retifanlimab, spartalizumab, sintilimab, cemiplimab, olaratumab, tovetumab, rinucumab, atezolizumab, avelumab, durvalumab, lifastuzumab vedotin, bavituximab, acapatamab, capromab, rosopatamab, nezastomig, pasotuxizumab, pelgifatamab, voxalatamab, cofetuzumab pelidotin, denosumab, rosmantuzumab, cirmtuzumab, atinumab, indatuximab ravtansine, elotuzumab, sirtratumab vedotin, sonepcizumab, vandortuzumab vedotin, minretumomab, satumomab pendetide, maslimomab, ontuxizumab, tenatumomab, fresolimumab, metelimumab, lerdelimumab, tezepelumab, etigilimab, tiragotumab, placulumab, prezalumab, infliximab, nerelimomab, ozoralizumab, adalimumab, afelimomab, certolizumab pegol, golimumab, mapatumumab, conatumumab, lexatumumab, tigatuzumab, sacituzumab govitecan, votumumab, pogalizumab, letolizumab, pankomab, anatumomab mafenatox, enavatuzumab, flanvotumab, brolucizumab, ranibizumab, varisacumab, bevacizumab, faricimab, icrucumab, alacizumab pegol, ramucirumab, pritumumab, and onvatilimab.

[5737] In some aspects, the antigen binding polypeptides provided herein comprise a VH1 comprising a heavy chain complementarity determining region 1 (HCDR1), HCDR2, and/or HCDR3 of an antibody selected from the group consisting of losatuxizumab vedotin, utomilumab, urelumab, oleclumab, naptumomab estafenatox, ascrinvacumab, pintumomab, tacatuzumab tetraxetan, nesvacumab, vanucizumab, timolumab, vapaliximab, vepalimomab, enapotamab vedotin, ianalumab, belimumab, tabalumab, tibulizumab, belantamab mafodotin, teclistamab, teclistamab, detumomab, nacolomab tafenatox, eculizumab, lendalizumab, pexelizumab, pozelimab, ravulizumab, tesidolumab, vilobelimab, abagovomab, igovomab, oregovomab, sofituzumab vedotin, cantuzumab mertansine, cantuzuma bravtansine, girentuximab, altumomab pentetate, arcitumomab, besilesomab, bertilimumab, plozalizumab, mogamulizumab, leronlimab, PRO140, rovelizumab, rovelizumab, talacotuzumab, benralizumab, tavolimab, vonlerolizumab, gavilimomab, ziralimumab, fanolesomab, ipilimumab, ruplizumab, toralizumab, dapirolizumab pegol, toralizumab, dapirolizumab pegol, ruplizumab, blinatumomab, inebilizumab, loncastuximab tesirine, SGN-CD19A, tafasitamab, taplitumomab paptox, XMAB-5574, Budoprutug, Obexelimab, duvortuxizumab, englumafusp alfa, Emfizatamab, zeripatamig, siplizumab, blontuvetmab, FBTA05, ibritumomab tiuxetan, obinutuzumab, ocaratuzumab, ocrelizumab, ofatumumab, rituximab, tositumomab, ublituximab, veltuzumab, divozilimab, eramkafusp alfa, ripertamab, zuberitamab, glofitamab, nofetumomab merpentan, samalizumab, imvotamab, odronextamab, plamotamab, bectumomab, inotuzumab ozogamicin, moxetumomab pasudotox, pinatuzumab vedotin, gomiliximab, lumiliximab, inolimomab, inolimomab, daclizumab, camidanluma btesirine, basiliximab, varlilumab, omburtamab, enoblituzumab, vopratelimab, lulizumabpegol, TGN1412, muromonab-CD3, otelixizumab, teplizumab, visilizumab, epcoritamab, epcoritamab, brentuximab vedotin, iratumumab, azintuxizumab vedotin, gemtuzumab ozogamicin, lintuzumab, vadastuximab talirine, naratuximab emtansine, otlertuzumab, lilotomab satetraxetan, tetulomab, daratumumab, isatuximab, foralumab, mosunetuzumab, mosunetuzumab, cedelizumab, ibalizumab, keliximab, priliximab, tregalizumab, zanolimumab, bleselumab, iscalimab, lucatumumab, ravagalimab, selicrelumab, teneliximab, vanalimab, abciximab, bivatuzumab, iomab-B, telimomab aritox, zolimomab aritox, abituzumab, intetumumab, alemtuzumab, tamtuvetmab, lorvotuzumab mertansine, itolizumab, cusatuzumab, vorsetuzumab mafodotin, milatuzumab, iladatuzumab vedotin, polatuzumab vedotin, galiximab, cibisatamab, zolbetuximab, naxitamab, tisotumab vedotin, olendalizumab, pamrevlumab, lacnotuzumab, cabiralizumab, emactuzumab, axatilimab, gimsilumab, lenzilumab, namilumab, tremelimumab, ulocuplumab, tepoditamab, rovalpituzumab tesirine, tarlatamab, demcizumab, navicixizumab, drozitumab, parsatuzumab, depatuxizumab mafodotin, modotuximab, carotuximab, adecatumumab, adecatumumab, oportuzumab monatox, solitomab, tucotuzumab celmoleukin, edrecolomab, catumaxomab, ifabotuzumab, fibatuzumab, zalutumumab, panitumumab, cetuximab, futuximab, imgatuzumab, laprituximab emtansine, matuzumab, necitumumab, nimotuzumab, tomuzotuximab, amivantamab, amivantamab, epitumomab cituxetan, sontuzumab, duligotuzumab, elgemtumab, lumretuzumab, patritumab, scribantumab, zenocutuzumab, sibrotuzumab, burosumab, aprutumab ixadotin, radretumab, pasotuxizumab, farletuzumab, mirvetuximab soravtansine, vantictumab, TRBS07, 3F8, dinutuximab, dinutuximab beta, ecromeximab, mitumomab, andecaliximab, capromab, codrituzumab, glembatumumab vedotin, talquetamab, talquetamab, trevogrumab, indusatumab vedotin, ficlatuzumab, rilotumumab, zatuximab, pentuzimab, pentuzimab, margetuximab, timigutuzumab, trastuzumab, trastuzumab duocarmazine, trastuzumab emtansine, gancotamab, pertuzumab, ertumaxomab, emibetuzumab, telisotuzumab, telisotuzumab vedotin, derlotuximab biotin, apolizumab, onartuzumab, bersanlimab, enlimomabpegol, rontalizumab, sifalimumab, talizumab, ganitumab, istiratumab, robatumumab, teprotumumab, figitumumab, ganitumab, istiratumab, robatumumab, teprotumumab, cixutumumab, dalotuzumab, xentuzumab, dusigitumab, canakinumab, ustekinumab, ustekinumab, ustekinumab, briakinumab, briakinumab, abrezekimab, lebrikizumab, romilkimab, TNX-650, tralokinumab, anrukinzumab, brodalumab, ixekizumab, netakimab, perakizumab, secukinumab, vunakizumab, afasevikumab, afasevikumab, bimekizumab, bimekizumab, remtolumab, bermckimab, lutikizumab, lutikizumab, gevokizumab, cergutuzumab amunaleukin, fletikumab, fezakinumab, brazikumab, gusclkumab, mirikizumab, tildrakizumab, risankizumab, flotetuzumab, nemolizumab, pascolizumab, dupilumab, mepolizumab, reslizumab, clazakizumab, elsilimomab, olokizumab, sarilumab, siltuximab, sirukumab, vobarilizumab, tocilizumab, SA237, satralizumab, enokizumab, prezalizumab, natalizumab, abrilumab, abrilumab, vedolizumab, volociximab, tadocizumab, etaracizumab, etrolizumab, spesolimab, vatelizumab, erlizumab, lirilumab, relatlimab, cBR96-doxorubicinimmunoconjugate, odulimomab, efalizumab, ladiratuzumab vedotin, simtuzumab, samrotamab vedotin, aselizumab, lupartumab amadotin, imalumab, carlumab, imaprelimab, amatuximab, amatuximab, anetumab ravtansine, narnatumab, clivatuzumab tetraxetan, pemtumomab, gatipotuzumab, ensituximab, lemalesomab, sulesomab, enfortumab vedotin, racotumomab, monalizumab, brontictuzumab, tarextumab, vesencumab, oxelumab, gilvetmab, tislelizumab, dostarlimab, BCD-100, nivolumab, PDR001, pembrolizumab, pidilizumab, retifanlimab, spartalizumab, sintilimab, cemiplimab, olaratumab, tovetumab, rinucumab, atezolizumab, avelumab, durvalumab, lifastuzumab vedotin, bavituximab, acapatamab, capromab, rosopatamab, nezastomig, pasotuxizumab, pelgifatamab, voxalatamab, cofetuzumab pelidotin, denosumab, rosmantuzumab, cirmtuzumab, atinumab, indatuximab ravtansine, elotuzumab, sirtratumab vedotin, sonepcizumab, vandortuzumab vedotin, minretumomab, satumomab pendetide, maslimomab, ontuxizumab, tenatumomab, fresolimumab, metelimumab, lerdelimumab, tezepelumab, etigilimab, tiragotumab, placulumab, prezalumab, infliximab, nerelimomab, ozoralizumab, adalimumab, afelimomab, certolizumab pegol, golimumab, mapatumumab, conatumumab, lexatumumab, tigatuzumab, sacituzumab govitecan, votumumab, pogalizumab, letolizumab, pankomab, anatumomab mafenatox, enavatuzumab, flanvotumab, brolucizumab, ranibizumab, varisacumab, bevacizumab, faricimab, icrucumab, alacizumab pegol, ramucirumab, pritumumab, and onvatilimab.

[5738] In some aspects, the antigen binding polypeptides provided herein comprise a VH2 comprising a heavy chain complementarity determining region 1 (HCDR1), HCDR2, and/or HCDR3 of an antibody selected from the group consisting of losatuxizumab vedotin, utomilumab, urelumab, oleclumab, naptumomab estafenatox, ascrinvacumab, pintumomab, tacatuzumab tetraxetan, nesvacumab, vanucizumab, timolumab, vapaliximab, vepalimomab, enapotamab vedotin, ianalumab, belimumab, tabalumab, tibulizumab, belantamab mafodotin, teclistamab, teclistamab, detumomab, nacolomab tafenatox, eculizumab, lendalizumab, pexelizumab, pozelimab, ravulizumab, tesidolumab, vilobelimab, abagovomab, igovomab, oregovomab, sofituzumab vedotin, cantuzumab mertansine, cantuzuma bravtansine, girentuximab, altumomab pentetate, arcitumomab, besilesomab, bertilimumab, plozalizumab, mogamulizumab, leronlimab, PRO140, rovelizumab, rovelizumab, talacotuzumab, benralizumab, tavolimab, vonlerolizumab, gavilimomab, ziralimumab, fanolesomab, ipilimumab, ruplizumab, toralizumab, dapirolizumab pegol, toralizumab, dapirolizumab pegol, ruplizumab, blinatumomab, inebilizumab, loncastuximab tesirine, SGN-CD19A, tafasitamab, taplitumomab paptox, XMAB-5574, Budoprutug, Obexelimab, duvortuxizumab, englumafusp alfa, Emfizatamab, zeripatamig, siplizumab, blontuvetmab, FBTA05, ibritumomab tiuxetan, obinutuzumab, ocaratuzumab, ocrelizumab, ofatumumab, rituximab, tositumomab, ublituximab, veltuzumab, divozilimab, eramkafusp alfa, ripertamab, zuberitamab, glofitamab, nofetumomab merpentan, samalizumab, imvotamab, odronextamab, plamotamab, bectumomab, inotuzumab ozogamicin, moxetumomab pasudotox, pinatuzumab vedotin, gomiliximab, lumiliximab, inolimomab, inolimomab, daclizumab, camidanluma btesirine, basiliximab, varlilumab, omburtamab, enoblituzumab, vopratelimab, lulizumabpegol, TGN1412, muromonab-CD3, otelixizumab, teplizumab, visilizumab, epcoritamab, epcoritamab, brentuximab vedotin, iratumumab, azintuxizumab vedotin, gemtuzumab ozogamicin, lintuzumab, vadastuximab talirine, naratuximab emtansine, otlertuzumab, lilotomab satetraxetan, tetulomab, daratumumab, isatuximab, foralumab, mosunetuzumab, mosunetuzumab, cedelizumab, ibalizumab, keliximab, priliximab, tregalizumab, zanolimumab, bleselumab, iscalimab, lucatumumab, ravagalimab, selicrelumab, teneliximab, vanalimab, abciximab, bivatuzumab, iomab-B, telimomab aritox, zolimomab aritox, abituzumab, intetumumab, alemtuzumab, tamtuvetmab, lorvotuzumab mertansine, itolizumab, cusatuzumab, vorsetuzumab mafodotin, milatuzumab, iladatuzumab vedotin, polatuzumab vedotin, galiximab, cibisatamab, zolbetuximab, naxitamab, tisotumab vedotin, olendalizumab, pamrevlumab, lacnotuzumab, cabiralizumab, emactuzumab, axatilimab, gimsilumab, lenzilumab, namilumab, tremelimumab, ulocuplumab, tepoditamab, rovalpituzumab tesirine, tarlatamab, demcizumab, navicixizumab, drozitumab, parsatuzumab, depatuxizumab mafodotin, modotuximab, carotuximab, adecatumumab, adecatumumab, oportuzumab monatox, solitomab, tucotuzumab celmoleukin, edrecolomab, catumaxomab, ifabotuzumab, fibatuzumab, zalutumumab, panitumumab, cetuximab, futuximab, imgatuzumab, laprituximab emtansine, matuzumab, necitumumab, nimotuzumab, tomuzotuximab, amivantamab, amivantamab, epitumomab cituxetan, sontuzumab, duligotuzumab, elgemtumab, lumretuzumab, patritumab, scribantumab, zenocutuzumab, sibrotuzumab, burosumab, aprutumab ixadotin, radretumab, pasotuxizumab, farletuzumab, mirvetuximab soravtansine, vantictumab, TRBS07, 3F8, dinutuximab, dinutuximab beta, ecromeximab, mitumomab, andecaliximab, capromab, codrituzumab, glembatumumab vedotin, talquetamab, talquetamab, trevogrumab, indusatumab vedotin, ficlatuzumab, rilotumumab, zatuximab, pentuzimab, pentuzimab, margetuximab, timigutuzumab, trastuzumab, trastuzumab duocarmazine, trastuzumab emtansine, gancotamab, pertuzumab, ertumaxomab, emibetuzumab, telisotuzumab, telisotuzumab vedotin, derlotuximab biotin, apolizumab, onartuzumab, bersanlimab, enlimomabpegol, rontalizumab, sifalimumab, talizumab, ganitumab, istiratumab, robatumumab, teprotumumab, figitumumab, ganitumab, istiratumab, robatumumab, teprotumumab, cixutumumab, dalotuzumab, xentuzumab, dusigitumab, canakinumab, ustekinumab, ustekinumab, ustekinumab, briakinumab, briakinumab, abrezekimab, lebrikizumab, romilkimab, TNX-650, tralokinumab, anrukinzumab, brodalumab, ixekizumab, netakimab, perakizumab, secukinumab, vunakizumab, afasevikumab, afasevikumab, bimekizumab, bimekizumab, remtolumab, bermckimab, lutikizumab, lutikizumab, gevokizumab, cergutuzumab amunaleukin, fletikumab, fezakinumab, brazikumab, gusclkumab, mirikizumab, tildrakizumab, risankizumab, flotetuzumab, nemolizumab, pascolizumab, dupilumab, mepolizumab, reslizumab, clazakizumab, elsilimomab, olokizumab, sarilumab, siltuximab, sirukumab, vobarilizumab, tocilizumab, SA237, satralizumab, enokizumab, prezalizumab, natalizumab, abrilumab, abrilumab, vedolizumab, volociximab, tadocizumab, etaracizumab, etrolizumab, spesolimab, vatelizumab, crlizumab, lirilumab, relatlimab, cBR96-doxorubicinimmunoconjugate, odulimomab, efalizumab, ladiratuzumab vedotin, simtuzumab, samrotamab vedotin, asclizumab, lupartumab amadotin, imalumab, carlumab, imaprelimab, amatuximab, amatuximab, anetumab ravtansine, narnatumab, clivatuzumab tetraxetan, pemtumomab, gatipotuzumab, ensituximab, lemalesomab, sulesomab, enfortumab vedotin, racotumomab, monalizumab, brontictuzumab, tarextumab, vesencumab, oxelumab, gilvetmab, tislelizumab, dostarlimab, BCD-100, nivolumab, PDR001, pembrolizumab, pidilizumab, retifanlimab, spartalizumab, sintilimab, cemiplimab, olaratumab, tovetumab, rinucumab, atezolizumab, avelumab, durvalumab, lifastuzumab vedotin, bavituximab, acapatamab, capromab, rosopatamab, nezastomig, pasotuxizumab, pelgifatamab, voxalatamab, cofetuzumab pelidotin, denosumab, rosmantuzumab, cirmtuzumab, atinumab, indatuximab ravtansine, elotuzumab, sirtratumab vedotin, sonepcizumab, vandortuzumab vedotin, minretumomab, satumomab pendetide, maslimomab, ontuxizumab, tenatumomab, fresolimumab, metelimumab, lerdelimumab, tezepelumab, etigilimab, tiragotumab, placulumab, prezalumab, infliximab, nerelimomab, ozoralizumab, adalimumab, afelimomab, certolizumab pegol, golimumab, mapatumumab, conatumumab, lexatumumab, tigatuzumab, sacituzumab govitecan, votumumab, pogalizumab, letolizumab, pankomab, anatumomab mafenatox, enavatuzumab, flanvotumab, brolucizumab, ranibizumab, varisacumab, bevacizumab, faricimab, icrucumab, alacizumab pegol, ramucirumab, pritumumab, and onvatilimab.

[5739] In some aspects, the antigen binding polypeptides provided herein comprise a VL1 comprising a VL of an antibody selected from the group consisting of losatuxizumab vedotin, utomilumab, urelumab, oleclumab, naptumomab estafenatox, ascrinvacumab, pintumomab, tacatuzumab tetraxetan, nesvacumab, vanucizumab, timolumab, vapaliximab, vepalimomab, enapotamab vedotin, ianalumab, belimumab, tabalumab, tibulizumab, belantamab mafodotin, teclistamab, teclistamab, detumomab, nacolomab tafenatox, eculizumab, lendalizumab, pexelizumab, pozelimab, ravulizumab, tesidolumab, vilobelimab, abagovomab, igovomab, oregovomab, sofituzumab vedotin, cantuzumab mertansine, cantuzuma bravtansine, girentuximab, altumomab pentetate, arcitumomab, besilesomab, bertilimumab, plozalizumab, mogamulizumab, leronlimab, PRO140, rovelizumab, rovelizumab, talacotuzumab, benralizumab, tavolimab, vonlerolizumab, gavilimomab, ziralimumab, fanolesomab, ipilimumab, ruplizumab, toralizumab, dapirolizumab pegol, toralizumab, dapirolizumab pegol, ruplizumab, blinatumomab, inebilizumab, loncastuximab tesirine, SGN-CD19A, tafasitamab, taplitumomab paptox, XMAB-5574, Budoprutug, Obexelimab, duvortuxizumab, englumafusp alfa, Emfizatamab, zeripatamig, siplizumab, blontuvetmab, FBTA05, ibritumomab tiuxetan, obinutuzumab, ocaratuzumab, ocrelizumab, ofatumumab, rituximab, tositumomab, ublituximab, veltuzumab, divozilimab, eramkafusp alfa, ripertamab, zuberitamab, glofitamab, nofetumomab merpentan, samalizumab, imvotamab, odronextamab, plamotamab, bectumomab, inotuzumab ozogamicin, moxetumomab pasudotox, pinatuzumab vedotin, gomiliximab, lumiliximab, inolimomab, inolimomab, daclizumab, camidanluma btesirine, basiliximab, varlilumab, omburtamab, enoblituzumab, vopratelimab, lulizumabpegol, TGN1412, muromonab-CD3, otelixizumab, teplizumab, visilizumab, epcoritamab, epcoritamab, brentuximab vedotin, iratumumab, azintuxizumab vedotin, gemtuzumab ozogamicin, lintuzumab, vadastuximab talirine, naratuximab emtansine, otlertuzumab, lilotomab satetraxetan, tetulomab, daratumumab, isatuximab, foralumab, mosunetuzumab, mosunetuzumab, cedelizumab, ibalizumab, keliximab, priliximab, tregalizumab, zanolimumab, bleselumab, iscalimab, lucatumumab, ravagalimab, selicrelumab, teneliximab, vanalimab, abciximab, bivatuzumab, iomab-B, telimomab aritox, zolimomab aritox, abituzumab, intetumumab, alemtuzumab, tamtuvetmab, lorvotuzumab mertansine, itolizumab, cusatuzumab, vorsetuzumab mafodotin, milatuzumab, iladatuzumab vedotin, polatuzumab vedotin, galiximab, cibisatamab, zolbetuximab, naxitamab, tisotumab vedotin, olendalizumab, pamrevlumab, lacnotuzumab, cabiralizumab, emactuzumab, axatilimab, gimsilumab, lenzilumab, namilumab, tremelimumab, ulocuplumab, tepoditamab, rovalpituzumab tesirine, tarlatamab, demcizumab, navicixizumab, drozitumab, parsatuzumab, depatuxizumab mafodotin, modotuximab, carotuximab, adecatumumab, adecatumumab, oportuzumab monatox, solitomab, tucotuzumab celmoleukin, edrecolomab, catumaxomab, ifabotuzumab, fibatuzumab, zalutumumab, panitumumab, cetuximab, futuximab, imgatuzumab, laprituximab emtansine, matuzumab, necitumumab, nimotuzumab, tomuzotuximab, amivantamab, amivantamab, epitumomab cituxetan, sontuzumab, duligotuzumab, elgemtumab, lumretuzumab, patritumab, seribantumab, zenocutuzumab, sibrotuzumab, burosumab, aprutumab ixadotin, radretumab, pasotuxizumab, farletuzumab, mirvetuximab soravtansine, vantictumab, TRBS07, 3F8, dinutuximab, dinutuximab beta, ecromeximab, mitumomab, andecaliximab, capromab, codrituzumab, glembatumumab vedotin, talquetamab, talquetamab, trevogrumab, indusatumab vedotin, ficlatuzumab, rilotumumab, zatuximab, pentuzimab, pentuzimab, margetuximab, timigutuzumab, trastuzumab, trastuzumab duocarmazine, trastuzumab emtansine, gancotamab, pertuzumab, ertumaxomab, emibetuzumab, telisotuzumab, telisotuzumab vedotin, derlotuximab biotin, apolizumab, onartuzumab, bersanlimab, enlimomabpegol, rontalizumab, sifalimumab, talizumab, ganitumab, istiratumab, robatumumab, teprotumumab, figitumumab, ganitumab, istiratumab, robatumumab, teprotumumab, cixutumumab, dalotuzumab, xentuzumab, dusigitumab, canakinumab, ustekinumab, ustekinumab, ustekinumab, briakinumab, briakinumab, abrezekimab, lebrikizumab, romilkimab, TNX-650, tralokinumab, anrukinzumab, brodalumab, ixekizumab, netakimab, perakizumab, secukinumab, vunakizumab, afasevikumab, afasevikumab, bimekizumab, bimekizumab, remtolumab, bermekimab, lutikizumab, lutikizumab, gevokizumab, cergutuzumab amunaleukin, fletikumab, fezakinumab, brazikumab, gusclkumab, mirikizumab, tildrakizumab, risankizumab, flotetuzumab, nemolizumab, pascolizumab, dupilumab, mepolizumab, reslizumab, clazakizumab, elsilimomab, olokizumab, sarilumab, siltuximab, sirukumab, vobarilizumab, tocilizumab, SA237, satralizumab, enokizumab, prezalizumab, natalizumab, abrilumab, abrilumab, vedolizumab, volociximab, tadocizumab, etaracizumab, etrolizumab, spesolimab, vatelizumab, crlizumab, lirilumab, relatlimab, cBR96-doxorubicinimmunoconjugate, odulimomab, efalizumab, ladiratuzumab vedotin, simtuzumab, samrotamab vedotin, aselizumab, lupartumab amadotin, imalumab, carlumab, imaprelimab, amatuximab, amatuximab, anetumab ravtansine, narnatumab, clivatuzumab tetraxetan, pemtumomab, gatipotuzumab, ensituximab, lemalesomab, sulesomab, enfortumab vedotin, racotumomab, monalizumab, brontictuzumab, tarextumab, vesencumab, oxelumab, gilvetmab, tislelizumab, dostarlimab, BCD-100, nivolumab, PDR001, pembrolizumab, pidilizumab, retifanlimab, spartalizumab, sintilimab, cemiplimab, olaratumab, tovetumab, rinucumab, atezolizumab, avelumab, durvalumab, lifastuzumab vedotin, bavituximab, acapatamab, capromab, rosopatamab, nezastomig, pasotuxizumab, pelgifatamab, voxalatamab, cofetuzumab pelidotin, denosumab, rosmantuzumab, cirmtuzumab, atinumab, indatuximab ravtansine, elotuzumab, sirtratumab vedotin, sonepcizumab, vandortuzumab vedotin, minretumomab, satumomab pendetide, maslimomab, ontuxizumab, tenatumomab, fresolimumab, metelimumab, lerdelimumab, tezepelumab, etigilimab, tiragotumab, placulumab, prezalumab, infliximab, nerelimomab, ozoralizumab, adalimumab, afelimomab, certolizumab pegol, golimumab, mapatumumab, conatumumab, lexatumumab, tigatuzumab, sacituzumab govitecan, votumumab, pogalizumab, letolizumab, pankomab, anatumomab mafenatox, enavatuzumab, flanvotumab, brolucizumab, ranibizumab, varisacumab, bevacizumab, faricimab, icrucumab, alacizumab pegol, ramucirumab, pritumumab, and onvatilimab.

[5740] In some aspects, the antigen binding polypeptides provided herein comprise a VL2 comprising a VL of an antibody selected from the group consisting of losatuxizumab vedotin, utomilumab, urelumab, oleclumab, naptumomab estafenatox, ascrinvacumab, pintumomab, tacatuzumab tetraxetan, nesvacumab, vanucizumab, timolumab, vapaliximab, vepalimomab, enapotamab vedotin, ianalumab, belimumab, tabalumab, tibulizumab, belantamab mafodotin, teclistamab, teclistamab, detumomab, nacolomab tafenatox, eculizumab, lendalizumab, pexelizumab, pozelimab, ravulizumab, tesidolumab, vilobelimab, abagovomab, igovomab, oregovomab, sofituzumab vedotin, cantuzumab mertansine, cantuzuma bravtansine, girentuximab, altumomab pentetate, arcitumomab, besilesomab, bertilimumab, plozalizumab, mogamulizumab, leronlimab, PRO140, rovelizumab, rovelizumab, talacotuzumab, benralizumab, tavolimab, vonlerolizumab, gavilimomab, ziralimumab, fanolesomab, ipilimumab, ruplizumab, toralizumab, dapirolizumab pegol, toralizumab, dapirolizumab pegol, ruplizumab, blinatumomab, inebilizumab, loncastuximab tesirine, SGN-CD19A, tafasitamab, taplitumomab paptox, XMAB-5574, Budoprutug, Obexelimab, duvortuxizumab, englumafusp alfa, Emfizatamab, zeripatamig, siplizumab, blontuvetmab, FBTA05, ibritumomab tiuxetan, obinutuzumab, ocaratuzumab, ocrelizumab, ofatumumab, rituximab, tositumomab, ublituximab, veltuzumab, divozilimab, eramkafusp alfa, ripertamab, zuberitamab, glofitamab, nofetumomab merpentan, samalizumab, imvotamab, odronextamab, plamotamab, bectumomab, inotuzumab ozogamicin, moxetumomab pasudotox, pinatuzumab vedotin, gomiliximab, lumiliximab, inolimomab, inolimomab, daclizumab, camidanluma btesirine, basiliximab, varlilumab, omburtamab, enoblituzumab, vopratelimab, lulizumabpegol, TGN1412, muromonab-CD3, otelixizumab, teplizumab, visilizumab, epcoritamab, epcoritamab, brentuximab vedotin, iratumumab, azintuxizumab vedotin, gemtuzumab ozogamicin, lintuzumab, vadastuximab talirine, naratuximab emtansine, otlertuzumab, lilotomab satetraxetan, tetulomab, daratumumab, isatuximab, foralumab, mosunetuzumab, mosunetuzumab, cedelizumab, ibalizumab, keliximab, priliximab, tregalizumab, zanolimumab, bleselumab, iscalimab, lucatumumab, ravagalimab, selicrelumab, teneliximab, vanalimab, abciximab, bivatuzumab, iomab-B, telimomab aritox, zolimomab aritox, abituzumab, intetumumab, alemtuzumab, tamtuvetmab, lorvotuzumab mertansine, itolizumab, cusatuzumab, vorsetuzumab mafodotin, milatuzumab, iladatuzumab vedotin, polatuzumab vedotin, galiximab, cibisatamab, zolbetuximab, naxitamab, tisotumab vedotin, olendalizumab, pamrevlumab, lacnotuzumab, cabiralizumab, emactuzumab, axatilimab, gimsilumab, lenzilumab, namilumab, tremelimumab, ulocuplumab, tepoditamab, rovalpituzumab tesirine, tarlatamab, demcizumab, navicixizumab, drozitumab, parsatuzumab, depatuxizumab mafodotin, modotuximab, carotuximab, adecatumumab, adecatumumab, oportuzumab monatox, solitomab, tucotuzumab celmoleukin, edrecolomab, catumaxomab, ifabotuzumab, fibatuzumab, zalutumumab, panitumumab, cetuximab, futuximab, imgatuzumab, laprituximab emtansine, matuzumab, necitumumab, nimotuzumab, tomuzotuximab, amivantamab, amivantamab, epitumomab cituxetan, sontuzumab, duligotuzumab, elgemtumab, lumretuzumab, patritumab, scribantumab, zenocutuzumab, sibrotuzumab, burosumab, aprutumab ixadotin, radretumab, pasotuxizumab, farletuzumab, mirvetuximab soravtansine, vantictumab, TRBS07, 3F8, dinutuximab, dinutuximab beta, ecromeximab, mitumomab, andecaliximab, capromab, codrituzumab, glembatumumab vedotin, talquetamab, talquetamab, trevogrumab, indusatumab vedotin, ficlatuzumab, rilotumumab, zatuximab, pentuzimab, pentuzimab, margetuximab, timigutuzumab, trastuzumab, trastuzumab duocarmazine, trastuzumab emtansine, gancotamab, pertuzumab, ertumaxomab, emibetuzumab, telisotuzumab, telisotuzumab vedotin, derlotuximab biotin, apolizumab, onartuzumab, bersanlimab, enlimomabpegol, rontalizumab, sifalimumab, talizumab, ganitumab, istiratumab, robatumumab, teprotumumab, figitumumab, ganitumab, istiratumab, robatumumab, teprotumumab, cixutumumab, dalotuzumab, xentuzumab, dusigitumab, canakinumab, ustekinumab, ustekinumab, ustekinumab, briakinumab, briakinumab, abrezekimab, lebrikizumab, romilkimab, TNX-650, tralokinumab, anrukinzumab, brodalumab, ixekizumab, netakimab, perakizumab, secukinumab, vunakizumab, afasevikumab, afasevikumab, bimekizumab, bimekizumab, remtolumab, bermekimab, lutikizumab, lutikizumab, gevokizumab, cergutuzumab amunaleukin, fletikumab, fezakinumab, brazikumab, guselkumab, mirikizumab, tildrakizumab, risankizumab, flotetuzumab, nemolizumab, pascolizumab, dupilumab, mepolizumab, reslizumab, clazakizumab, elsilimomab, olokizumab, sarilumab, siltuximab, sirukumab, vobarilizumab, tocilizumab, SA237, satralizumab, enokizumab, prezalizumab, natalizumab, abrilumab, abrilumab, vedolizumab, volociximab, tadocizumab, etaracizumab, etrolizumab, spesolimab, vatelizumab, erlizumab, lirilumab, relatlimab, cBR96-doxorubicinimmunoconjugate, odulimomab, efalizumab, ladiratuzumab vedotin, simtuzumab, samrotamab vedotin, aselizumab, lupartumab amadotin, imalumab, carlumab, imaprelimab, amatuximab, amatuximab, anetumab ravtansine, narnatumab, clivatuzumab tetraxetan, pemtumomab, gatipotuzumab, ensituximab, lemalesomab, sulesomab, enfortumab vedotin, racotumomab, monalizumab, brontictuzumab, tarextumab, vesencumab, oxelumab, gilvetmab, tislelizumab, dostarlimab, BCD-100, nivolumab, PDR001, pembrolizumab, pidilizumab, retifanlimab, spartalizumab, sintilimab, cemiplimab, olaratumab, tovetumab, rinucumab, atezolizumab, avelumab, durvalumab, lifastuzumab vedotin, bavituximab, acapatamab, capromab, rosopatamab, nezastomig, pasotuxizumab, pelgifatamab, voxalatamab, cofetuzumab pelidotin, denosumab, rosmantuzumab, cirmtuzumab, atinumab, indatuximab ravtansine, elotuzumab, sirtratumab vedotin, sonepcizumab, vandortuzumab vedotin, minretumomab, satumomab pendetide, maslimomab, ontuxizumab, tenatumomab, fresolimumab, metelimumab, lerdelimumab, tezepelumab, etigilimab, tiragotumab, placulumab, prezalumab, infliximab, nerelimomab, ozoralizumab, adalimumab, afelimomab, certolizumab pegol, golimumab, mapatumumab, conatumumab, lexatumumab, tigatuzumab, sacituzumab govitecan, votumumab, pogalizumab, letolizumab, pankomab, anatumomab mafenatox, enavatuzumab, flanvotumab, brolucizumab, ranibizumab, varisacumab, bevacizumab, faricimab, icrucumab, alacizumab pegol, ramucirumab, pritumumab, and onvatilimab.

[5741] In some aspects, the antigen binding polypeptides provided herein comprise a VH1 comprising a VH of an antibody selected from the group consisting of losatuxizumab vedotin, utomilumab, urelumab, oleclumab, naptumomab estafenatox, ascrinvacumab, pintumomab, tacatuzumab tetraxetan, nesvacumab, vanucizumab, timolumab, vapaliximab, vepalimomab, enapotamab vedotin, ianalumab, belimumab, tabalumab, tibulizumab, belantamab mafodotin, teclistamab, teclistamab, detumomab, nacolomab tafenatox, eculizumab, lendalizumab, pexelizumab, pozelimab, ravulizumab, tesidolumab, vilobelimab, abagovomab, igovomab, oregovomab, sofituzumab vedotin, cantuzumab mertansine, cantuzuma bravtansine, girentuximab, altumomab pentetate, arcitumomab, besilesomab, bertilimumab, plozalizumab, mogamulizumab, leronlimab, PRO140, rovelizumab, rovelizumab, talacotuzumab, benralizumab, tavolimab, vonlerolizumab, gavilimomab, ziralimumab, fanolesomab, ipilimumab, ruplizumab, toralizumab, dapirolizumab pegol, toralizumab, dapirolizumab pegol, ruplizumab, blinatumomab, inebilizumab, loncastuximab tesirine, SGN-CD19A, tafasitamab, taplitumomab paptox, XMAB-5574, Budoprutug, Obexelimab, duvortuxizumab, englumafusp alfa, Emfizatamab, zeripatamig, siplizumab, blontuvetmab, FBTA05, ibritumomab tiuxetan, obinutuzumab, ocaratuzumab, ocrelizumab, ofatumumab, rituximab, tositumomab, ublituximab, veltuzumab, divozilimab, eramkafusp alfa, ripertamab, zuberitamab, glofitamab, nofetumomab merpentan, samalizumab, imvotamab, odronextamab, plamotamab, bectumomab, inotuzumab ozogamicin, moxetumomab pasudotox, pinatuzumab vedotin, gomiliximab, lumiliximab, inolimomab, inolimomab, daclizumab, camidanluma btesirine, basiliximab, varlilumab, omburtamab, enoblituzumab, vopratelimab, lulizumabpegol, TGN1412, muromonab-CD3, otelixizumab, teplizumab, visilizumab, epcoritamab, epcoritamab, brentuximab vedotin, iratumumab, azintuxizumab vedotin, gemtuzumab ozogamicin, lintuzumab, vadastuximab talirine, naratuximab emtansine, otlertuzumab, lilotomab satetraxetan, tetulomab, daratumumab, isatuximab, foralumab, mosunctuzumab, mosunetuzumab, cedelizumab, ibalizumab, keliximab, priliximab, tregalizumab, zanolimumab, bleselumab, iscalimab, lucatumumab, ravagalimab, selicrelumab, teneliximab, vanalimab, abciximab, bivatuzumab, iomab-B, telimomab aritox, zolimomab aritox, abituzumab, intetumumab, alemtuzumab, tamtuvetmab, lorvotuzumab mertansine, itolizumab, cusatuzumab, vorsctuzumab mafodotin, milatuzumab, iladatuzumab vedotin, polatuzumab vedotin, galiximab, cibisatamab, zolbetuximab, naxitamab, tisotumab vedotin, olendalizumab, pamrevlumab, lacnotuzumab, cabiralizumab, emactuzumab, axatilimab, gimsilumab, lenzilumab, namilumab, tremelimumab, ulocuplumab, tepoditamab, rovalpituzumab tesirine, tarlatamab, demcizumab, navicixizumab, drozitumab, parsatuzumab, depatuxizumab mafodotin, modotuximab, carotuximab, adecatumumab, adecatumumab, oportuzumab monatox, solitomab, tucotuzumab celmoleukin, edrecolomab, catumaxomab, ifabotuzumab, fibatuzumab, zalutumumab, panitumumab, cetuximab, futuximab, imgatuzumab, laprituximab emtansine, matuzumab, necitumumab, nimotuzumab, tomuzotuximab, amivantamab, amivantamab, epitumomab cituxetan, sontuzumab, duligotuzumab, elgemtumab, lumretuzumab, patritumab, scribantumab, zenocutuzumab, sibrotuzumab, burosumab, aprutumab ixadotin, radretumab, pasotuxizumab, farletuzumab, mirvetuximab soravtansine, vantictumab, TRBS07, 3F8, dinutuximab, dinutuximab beta, ecromeximab, mitumomab, andecaliximab, capromab, codrituzumab, glembatumumab vedotin, talquetamab, talquetamab, trevogrumab, indusatumab vedotin, ficlatuzumab, rilotumumab, zatuximab, pentuzimab, pentuzimab, margetuximab, timigutuzumab, trastuzumab, trastuzumab duocarmazine, trastuzumab emtansine, gancotamab, pertuzumab, ertumaxomab, emibetuzumab, telisotuzumab, telisotuzumab vedotin, derlotuximab biotin, apolizumab, onartuzumab, bersanlimab, enlimomabpegol, rontalizumab, sifalimumab, talizumab, ganitumab, istiratumab, robatumumab, teprotumumab, figitumumab, ganitumab, istiratumab, robatumumab, teprotumumab, cixutumumab, dalotuzumab, xentuzumab, dusigitumab, canakinumab, ustekinumab, ustekinumab, ustekinumab, briakinumab, briakinumab, abrezekimab, lebrikizumab, romilkimab, TNX-650, tralokinumab, anrukinzumab, brodalumab, ixekizumab, netakimab, perakizumab, secukinumab, vunakizumab, afasevikumab, afasevikumab, bimekizumab, bimekizumab, remtolumab, bermckimab, lutikizumab, lutikizumab, gevokizumab, cergutuzumab amunaleukin, fletikumab, fezakinumab, brazikumab, guselkumab, mirikizumab, tildrakizumab, risankizumab, flotetuzumab, nemolizumab, pascolizumab, dupilumab, mepolizumab, reslizumab, clazakizumab, elsilimomab, olokizumab, sarilumab, siltuximab, sirukumab, vobarilizumab, tocilizumab, SA237, satralizumab, enokizumab, prezalizumab, natalizumab, abrilumab, abrilumab, vedolizumab, volociximab, tadocizumab, etaracizumab, etrolizumab, spesolimab, vatelizumab, erlizumab, lirilumab, relatlimab, cBR96-doxorubicinimmunoconjugate, odulimomab, efalizumab, ladiratuzumab vedotin, simtuzumab, samrotamab vedotin, aselizumab, lupartumab amadotin, imalumab, carlumab, imaprelimab, amatuximab, amatuximab, anetumab ravtansine, narnatumab, clivatuzumab tetraxetan, pemtumomab, gatipotuzumab, ensituximab, lemalesomab, sulcsomab, enfortumab vedotin, racotumomab, monalizumab, brontictuzumab, tarextumab, vesencumab, oxelumab, gilvetmab, tislelizumab, dostarlimab, BCD-100, nivolumab, PDR001, pembrolizumab, pidilizumab, retifanlimab, spartalizumab, sintilimab, cemiplimab, olaratumab, tovetumab, rinucumab, atezolizumab, avelumab, durvalumab, lifastuzumab vedotin, bavituximab, acapatamab, capromab, rosopatamab, nezastomig, pasotuxizumab, pelgifatamab, voxalatamab, cofetuzumab pelidotin, denosumab, rosmantuzumab, cirmtuzumab, atinumab, indatuximab ravtansine, elotuzumab, sirtratumab vedotin, sonepcizumab, vandortuzumab vedotin, minretumomab, satumomab pendetide, maslimomab, ontuxizumab, tenatumomab, fresolimumab, metelimumab, lerdelimumab, tezepelumab, etigilimab, tiragotumab, placulumab, prezalumab, infliximab, nerelimomab, ozoralizumab, adalimumab, afelimomab, certolizumab pegol, golimumab, mapatumumab, conatumumab, lexatumumab, tigatuzumab, sacituzumab govitecan, votumumab, pogalizumab, letolizumab, pankomab, anatumomab mafenatox, enavatuzumab, flanvotumab, brolucizumab, ranibizumab, varisacumab, bevacizumab, faricimab, icrucumab, alacizumab pegol, ramucirumab, pritumumab, and onvatilimab.

[5742] In some aspects, the antigen binding polypeptides provided herein comprise a VH2 comprising a VH of an antibody selected from the group consisting of losatuxizumab vedotin, utomilumab, urelumab, oleclumab, naptumomab estafenatox, ascrinvacumab, pintumomab, tacatuzumab tetraxetan, nesvacumab, vanucizumab, timolumab, vapaliximab, vepalimomab, enapotamab vedotin, ianalumab, belimumab, tabalumab, tibulizumab, belantamab mafodotin, teclistamab, teclistamab, detumomab, nacolomab tafenatox, eculizumab, lendalizumab, pexelizumab, pozelimab, ravulizumab, tesidolumab, vilobelimab, abagovomab, igovomab, oregovomab, sofituzumab vedotin, cantuzumab mertansine, cantuzuma bravtansine, girentuximab, altumomab pentetate, arcitumomab, besilesomab, bertilimumab, plozalizumab, mogamulizumab, leronlimab, PRO140, rovelizumab, rovelizumab, talacotuzumab, benralizumab, tavolimab, vonlerolizumab, gavilimomab, ziralimumab, fanolesomab, ipilimumab, ruplizumab, toralizumab, dapirolizumab pegol, toralizumab, dapirolizumab pegol, ruplizumab, blinatumomab, inebilizumab, loncastuximab tesirine, SGN-CD19A, tafasitamab, taplitumomab paptox, XMAB-5574, Budoprutug, Obexelimab, duvortuxizumab, englumafusp alfa, Emfizatamab, zeripatamig, siplizumab, blontuvetmab, FBTA05, ibritumomab tiuxetan, obinutuzumab, ocaratuzumab, ocrelizumab, ofatumumab, rituximab, tositumomab, ublituximab, veltuzumab, divozilimab, eramkafusp alfa, ripertamab, zuberitamab, glofitamab, nofetumomab merpentan, samalizumab, imvotamab, odronextamab, plamotamab, bectumomab, inotuzumab ozogamicin, moxetumomab pasudotox, pinatuzumab vedotin, gomiliximab, lumiliximab, inolimomab, inolimomab, daclizumab, camidanluma btesirine, basiliximab, varlilumab, omburtamab, enoblituzumab, vopratelimab, lulizumabpegol, TGN1412, muromonab-CD3, otelixizumab, teplizumab, visilizumab, epcoritamab, epcoritamab, brentuximab vedotin, iratumumab, azintuxizumab vedotin, gemtuzumab ozogamicin, lintuzumab, vadastuximab talirine, naratuximab emtansine, otlertuzumab, lilotomab satetraxetan, tetulomab, daratumumab, isatuximab, foralumab, mosunetuzumab, mosunetuzumab, cedelizumab, ibalizumab, keliximab, priliximab, tregalizumab, zanolimumab, bleselumab, iscalimab, lucatumumab, ravagalimab, selicrelumab, teneliximab, vanalimab, abciximab, bivatuzumab, iomab-B, telimomab aritox, zolimomab aritox, abituzumab, intetumumab, alemtuzumab, tamtuvetmab, lorvotuzumab mertansine, itolizumab, cusatuzumab, vorsetuzumab mafodotin, milatuzumab, iladatuzumab vedotin, polatuzumab vedotin, galiximab, cibisatamab, zolbetuximab, naxitamab, tisotumab vedotin, olendalizumab, pamrevlumab, lacnotuzumab, cabiralizumab, emactuzumab, axatilimab, gimsilumab, lenzilumab, namilumab, tremelimumab, ulocuplumab, tepoditamab, rovalpituzumab tesirine, tarlatamab, demcizumab, navicixizumab, drozitumab, parsatuzumab, depatuxizumab mafodotin, modotuximab, carotuximab, adecatumumab, adecatumumab, oportuzumab monatox, solitomab, tucotuzumab celmoleukin, edrecolomab, catumaxomab, ifabotuzumab, fibatuzumab, zalutumumab, panitumumab, cetuximab, futuximab, imgatuzumab, laprituximab emtansine, matuzumab, necitumumab, nimotuzumab, tomuzotuximab, amivantamab, amivantamab, epitumomab cituxetan, sontuzumab, duligotuzumab, elgemtumab, lumretuzumab, patritumab, seribantumab, zenocutuzumab, sibrotuzumab, burosumab, aprutumab ixadotin, radretumab, pasotuxizumab, farletuzumab, mirvetuximab soravtansine, vantictumab, TRBS07, 3F8, dinutuximab, dinutuximab beta, ecromeximab, mitumomab, andecaliximab, capromab, codrituzumab, glembatumumab vedotin, talquetamab, talquetamab, trevogrumab, indusatumab vedotin, ficlatuzumab, rilotumumab, zatuximab, pentuzimab, pentuzimab, margetuximab, timigutuzumab, trastuzumab, trastuzumab duocarmazine, trastuzumab emtansine, gancotamab, pertuzumab, ertumaxomab, emibetuzumab, telisotuzumab, telisotuzumab vedotin, derlotuximab biotin, apolizumab, onartuzumab, bersanlimab, enlimomabpegol, rontalizumab, sifalimumab, talizumab, ganitumab, istiratumab, robatumumab, teprotumumab, figitumumab, ganitumab, istiratumab, robatumumab, teprotumumab, cixutumumab, dalotuzumab, xentuzumab, dusigitumab, canakinumab, ustekinumab, ustekinumab, ustekinumab, briakinumab, briakinumab, abrezekimab, lebrikizumab, romilkimab, TNX-650, tralokinumab, anrukinzumab, brodalumab, ixekizumab, netakimab, perakizumab, secukinumab, vunakizumab, afasevikumab, afasevikumab, bimekizumab, bimekizumab, remtolumab, bermckimab, lutikizumab, lutikizumab, gevokizumab, cergutuzumab amunaleukin, fletikumab, fezakinumab, brazikumab, guselkumab, mirikizumab, tildrakizumab, risankizumab, flotetuzumab, nemolizumab, pascolizumab, dupilumab, mepolizumab, reslizumab, clazakizumab, elsilimomab, olokizumab, sarilumab, siltuximab, sirukumab, vobarilizumab, tocilizumab, SA237, satralizumab, enokizumab, prezalizumab, natalizumab, abrilumab, abrilumab, vedolizumab, volociximab, tadocizumab, etaracizumab, etrolizumab, spesolimab, vatelizumab, crlizumab, lirilumab, relatlimab, cBR96-doxorubicinimmunoconjugate, odulimomab, efalizumab, ladiratuzumab vedotin, simtuzumab, samrotamab vedotin, aselizumab, lupartumab amadotin, imalumab, carlumab, imaprelimab, amatuximab, amatuximab, anctumab ravtansine, narnatumab, clivatuzumab tetraxetan, pemtumomab, gatipotuzumab, ensituximab, lemalesomab, sulesomab, enfortumab vedotin, racotumomab, monalizumab, brontictuzumab, tarextumab, vesencumab, oxelumab, gilvetmab, tislelizumab, dostarlimab, BCD-100, nivolumab, PDR001, pembrolizumab, pidilizumab, retifanlimab, spartalizumab, sintilimab, cemiplimab, olaratumab, tovetumab, rinucumab, atezolizumab, avelumab, durvalumab, lifastuzumab vedotin, bavituximab, acapatamab, capromab, rosopatamab, nezastomig, pasotuxizumab, pelgifatamab, voxalatamab, cofetuzumab pelidotin, denosumab, rosmantuzumab, cirmtuzumab, atinumab, indatuximab ravtansine, elotuzumab, sirtratumab vedotin, sonepcizumab, vandortuzumab vedotin, minretumomab, satumomab pendetide, maslimomab, ontuxizumab, tenatumomab, fresolimumab, metelimumab, lerdelimumab, tezepelumab, etigilimab, tiragotumab, placulumab, prezalumab, infliximab, nerelimomab, ozoralizumab, adalimumab, afelimomab, certolizumab pegol, golimumab, mapatumumab, conatumumab, lexatumumab, tigatuzumab, sacituzumab govitecan, votumumab, pogalizumab, letolizumab, pankomab, anatumomab mafenatox, enavatuzumab, flanvotumab, brolucizumab, ranibizumab, varisacumab, bevacizumab, faricimab, icrucumab, alacizumab pegol, ramucirumab, pritumumab, and onvatilimab.

[5743] In some aspects, the antigen binding polypeptides provided herein comprise a VL1 comprising (i) a complementarity determining region (CDR) 1 having an amino acid sequence that is at least 65%, at least 70%, at least 75%, at least 80%, at least 85%, at least 90%, at least 95%, at least 99%, or 100% identical to any one of SEQ ID NOs: 1096, 1103, 1110, 1120, 1127, 1134, 1141, 1148, 1155, 1162, 1169, 1174, 1181, 1188, 1199, 1211, 1221, 1228, 1235, 1247, 1254, 1261, 1266, 1271, 1278, 1285, 1292, 1299, 1306, 1313, 1319, 1326, 1339, 1352, 1359, 1366, 1373, 1382, 1394, 1401, 1408, 1414, 1421, 1428, 1441, 1448, 1455, 1461, 1468, 1475, 1488, 1495, 1508, 1519, 1526, 1531, 1538, 1544, 1556, 1568, 1574, 1581, 1594, 1601, 1608, 1615, 1622, 1629, 1636, 1643, 1650, 1657, 1672, 1679, 1689, 1697, 1708, 1715, 1718, 1723, 1727, 1738, 1743, 1752, 1761, 1763, 1769, 1776, and 1786; (ii) a CDR2 having an amino acid sequence that is at least 65%, at least 70%, at least 75%, at least 80%, at least 85%, at least 90%, at least 95%, at least 99%, or 100% identical to any one of SEQ ID NOs: 1200, 1212, 1680, 1690, 1698, 1709, 1728, 1739, 1744, 1753, 1770, and 1777; or at least 65%, at least 70%, at least 75%, at least 80%, at least 85%, at least 90%, at least 95%, at least 99%, or 100% identical to any one of amino acid sequences AAS, APS, AT, ATS, DAS, DDG, DDS, DT, DTS, DVS, EAS, FTS, GAF, GAN, GAS, GAT, GIS, GKN, GNS, HTS, KVS, LAS, LGS, LVS, NAK, NTN, QMS, RMS, RTS, SAS, TTS, WAS, YAS, YAT, YGS, YRS, and YTS; and (iii) a CDR3 having an amino acid sequence that is at least 65%, at least 70%, at least 75%, at least 80%, at least 85%, at least 90%, at least 95%, at least 99%, or 100% identical to any one of SEQ ID NOs: 1097, 1104, 1111, 1121, 1128, 1135, 1142, 1149, 1156, 1163, 1170, 1175, 1182, 1189, 1195, 1201, 1207, 1213, 1222, 1229, 1236, 2009, 1248, 1255, 1262, 1267, 1272, 1279, 1286, 1293, 1300, 1307, 1320, 1327, 1333, 1340, 1346, 1353, 1360, 1367, 1374, 1383, 1389, 1395, 1402, 1409, 1415, 1422, 1429, 1435, 1442, 1449, 1456, 1462, 1469, 1476, 1482, 1489, 1496, 1502, 1509, 1513, 1520, 1532, 1539, 1545, 1557, 1562, 1569, 1575, 1582, 1588, 1595, 1602, 1609, 1616, 1623, 1630, 1637, 1644, 1651, 1658, 1663, 1673, 1681, 1691, 1699, 1710, 1729, 1735, 1745, 1751, 1754, 1778, 1787, and 1976.

[5744] In some aspects, the antigen binding polypeptides provided herein comprise a VL2 comprising (i) a complementarity determining region (CDR) 1 having an amino acid sequence that is at least 65%, at least 70%, at least 75%, at least 80%, at least 85%, at least 90%, at least 95%, at least 99%, or 100% identical to any one of SEQ ID NOs: 1096, 1103, 1110, 1120, 1127, 1134, 1141, 1148, 1155, 1162, 1169, 1174, 1181, 1188, 1199, 1211, 1221, 1228, 1235, 1247, 1254, 1261, 1266, 1271, 1278, 1285, 1292, 1299, 1306, 1313, 1319, 1326, 1339, 1352, 1359, 1366, 1373, 1382, 1394, 1401, 1408, 1414, 1421, 1428, 1441, 1448, 1455, 1461, 1468, 1475, 1488, 1495, 1508, 1519, 1526, 1531, 1538, 1544, 1556, 1568, 1574, 1581, 1594, 1601, 1608, 1615, 1622, 1629, 1636, 1643, 1650, 1657, 1672, 1679, 1689, 1697, 1708, 1715, 1718, 1723, 1727, 1738, 1743, 1752, 1761, 1763, 1769, 1776, and 1786; (ii) a CDR2 having an amino acid sequence that is at least 65%, at least 70%, at least 75%, at least 80%, at least 85%, at least 90%, at least 95%, at least 99%, or 100% identical to any one of SEQ ID NOs: 1200, 1212, 1680, 1690, 1698, 1709, 1728, 1739, 1744, 1753, 1770, and 1777; or at least 65%, at least 70%, at least 75%, at least 80%, at least 85%, at least 90%, at least 95%, at least 99%, or 100% identical to any one of amino acid sequences AAS, APS, AT, ATS, DAS, DDG, DDS, DT, DTS, DVS, EAS, FTS, GAF, GAN, GAS, GAT, GIS, GKN, GNS, HTS, KVS, LAS, LGS, LVS, NAK, NTN, QMS, RMS, RTS, SAS, TTS, WAS, YAS, YAT, YGS, YRS, and YTS; and (iii) a CDR3 having an amino acid sequence that is at least 65%, at least 70%, at least 75%, at least 80%, at least 85%, at least 90%, at least 95%, at least 99%, or 100% identical to any one of SEQ ID NOs: 1097, 1104, 1111, 1121, 1128, 1135, 1142, 1149, 1156, 1163, 1170, 1175, 1182, 1189, 1195, 1201, 1207, 1213, 1222, 1229, 1236, 2009, 1248, 1255, 1262, 1267, 1272, 1279, 1286, 1293, 1300, 1307, 1320, 1327, 1333, 1340, 1346, 1353, 1360, 1367, 1374, 1383, 1389, 1395, 1402, 1409, 1415, 1422, 1429, 1435, 1442, 1449, 1456, 1462, 1469, 1476, 1482, 1489, 1496, 1502, 1509, 1513, 1520, 1532, 1539, 1545, 1557, 1562, 1569, 1575, 1582, 1588, 1595, 1602, 1609, 1616, 1623, 1630, 1637, 1644, 1651, 1658, 1663, 1673, 1681, 1691, 1699, 1710, 1729, 1735, 1745, 1751, 1754, 1778, 1787, and 1976.

[5745] In some aspects, the antigen binding polypeptides provided herein comprise a VH1 comprising (i) a complementarity determining region (CDR) 1 having an amino acid sequence that is at least 65%, at least 70%, at least 75%, at least 80%, at least 85%, at least 90%, at least 95%, at least 99%, or 100% identical to any one of SEQ ID NOs: 1099, 1106, 1113, 1117, 1123, 1130, 1137, 1144, 1151, 1158, 1165, 1177, 1184, 1191, 1203, 1215, 1224, 1231, 1238, 1243, 1250, 1257, 1264, 1274, 1281, 1288, 1295, 1302, 1309, 1315, 1322, 1329, 1335, 1342, 1348, 1355, 1362, 1369, 1376, 1385, 1397, 1404, 1417, 1424, 1431, 1437, 1444, 1451, 1458, 1464, 1471, 1478, 1484, 1491, 1498, 1504, 1511, 1515, 1522, 1534, 1547, 1552, 1564, 1577, 1584, 1590, 1597, 1604, 1611, 1618, 1625, 1632, 1639, 1646, 1653, 1660, 1665, 1675, 1683, 1693, 1701, 1705, 1716, 1719, 1731, 1736, 1747, 1756, 1772, 1780, and 1789; (ii) a CDR2 having an amino acid sequence that is at least 65%, at least 70%, at least 75%, at least 80%, at least 85%, at least 90%, at least 95%, at least 99%, or 100% identical to any one of SEQ ID NOs: 1100, 1107, 1114, 1118, 1124, 1131, 1138, 1145, 1152, 1159, 1166, 1178, 1185, 1192, 1204, 1216, 1225, 1232, 1239, 1244, 1251, 1258, 1275, 1282, 1289, 1296, 1303, 1310, 1316, 1323, 1330, 1336, 1343, 1349, 1356, 1363, 1370, 1377, 1386, 1391, 1398, 1405, 1411, 1418, 1425, 1432, 1438, 1445, 1452, 1465, 1472, 1479, 1485, 1492, 1499, 1505, 1516, 1523, 1528, 1535, 1541, 1548, 1553, 1559, 1565, 1571, 1578, 1585, 1591, 1598, 1605, 1612, 1619, 1626, 1633, 1640, 1647, 1654, 1666, 1676, 1684, 1687, 1694, 1702, 1706, 1712, 1717, 1720, 1725, 1732, 1737, 1741, 1748, 1757, 1767, 1773, 1781, and 1790; and (iii) a CDR3 having an amino acid sequence that is at least 65%, at least 70%, at least 75%, at least 80%, at least 85%, at least 90%, at least 95%, at least 99%, or 100% identical to any one of SEQ ID NOs: 1101, 1108, 1115, 1125, 1132, 1139, 1146, 1153, 1160, 1167, 1172, 1179, 1186, 1193, 1197, 1205, 1209, 1217, 1226, 1233, 1240, 1245, 1252, 1259, 1269, 1276, 1283, 1290, 1297, 1304, 1311, 1317, 1324, 1331, 1337, 1344, 1350, 1357, 1364, 1371, 1378, 1387, 1392, 1399, 1406, 1412, 1419, 1426, 1433, 1439, 1446, 1453, 1459, 1466, 1473, 1480, 1486, 1493, 1500, 1506, 1517, 1524, 1529, 1536, 1542, 1549, 1554, 1560, 1566, 1572, 1579, 1586, 1592, 1599, 1606, 1613, 1620, 1627, 1634, 1641, 1648, 1655, 1661, 1667, 1670, 1677, 1685, 1688, 1695, 1703, 1707, 1713, 1733, 1749, 1758, 1762, 1774, 1782, 1791, and 1975.

[5746] In some aspects, the antigen binding polypeptides provided herein comprise a VH2 comprising (i) a complementarity determining region (CDR) 1 having an amino acid sequence that is at least 65%, at least 70%, at least 75%, at least 80%, at least 85%, at least 90%, at least 95%, at least 99%, or 100% identical to any one of SEQ ID NOs: 1099, 1106, 1113, 1117, 1123, 1130, 1137, 1144, 1151, 1158, 1165, 1177, 1184, 1191, 1203, 1215, 1224, 1231, 1238, 1243, 1250, 1257, 1264, 1274, 1281, 1288, 1295, 1302, 1309, 1315, 1322, 1329, 1335, 1342, 1348, 1355, 1362, 1369, 1376, 1385, 1397, 1404, 1417, 1424, 1431, 1437, 1444, 1451, 1458, 1464, 1471, 1478, 1484, 1491, 1498, 1504, 1511, 1515, 1522, 1534, 1547, 1552, 1564, 1577, 1584, 1590, 1597, 1604, 1611, 1618, 1625, 1632, 1639, 1646, 1653, 1660, 1665, 1675, 1683, 1693, 1701, 1705, 1716, 1719, 1731, 1736, 1747, 1756, 1772, 1780, and 1789; (ii) a CDR2 having an amino acid sequence that is at least 65%, at least 70%, at least 75%, at least 80%, at least 85%, at least 90%, at least 95%, at least 99%, or 100% identical to any one of SEQ ID NOs: 1100, 1107, 1114, 1118, 1124, 1131, 1138, 1145, 1152, 1159, 1166, 1178, 1185, 1192, 1204, 1216, 1225, 1232, 1239, 1244, 1251, 1258, 1275, 1282, 1289, 1296, 1303, 1310, 1316, 1323, 1330, 1336, 1343, 1349, 1356, 1363, 1370, 1377, 1386, 1391, 1398, 1405, 1411, 1418, 1425, 1432, 1438, 1445, 1452, 1465, 1472, 1479, 1485, 1492, 1499, 1505, 1516, 1523, 1528, 1535, 1541, 1548, 1553, 1559, 1565, 1571, 1578, 1585, 1591, 1598, 1605, 1612, 1619, 1626, 1633, 1640, 1647, 1654, 1666, 1676, 1684, 1687, 1694, 1702, 1706, 1712, 1717, 1720, 1725, 1732, 1737, 1741, 1748, 1757, 1767, 1773, 1781, and 1790; and (iii) a CDR3 having an amino acid sequence that is at least 65%, at least 70%, at least 75%, at least 80%, at least 85%, at least 90%, at least 95%, at least 99%, or 100% identical to any one of SEQ ID NOs: 1101, 1108, 1115, 1125, 1132, 1139, 1146, 1153, 1160, 1167, 1172, 1179, 1186, 1193, 1197, 1205, 1209, 1217, 1226, 1233, 1240, 1245, 1252, 1259, 1269, 1276, 1283, 1290, 1297, 1304, 1311, 1317, 1324, 1331, 1337, 1344, 1350, 1357, 1364, 1371, 1378, 1387, 1392, 1399, 1406, 1412, 1419, 1426, 1433, 1439, 1446, 1453, 1459, 1466, 1473, 1480, 1486, 1493, 1500, 1506, 1517, 1524, 1529, 1536, 1542, 1549, 1554, 1560, 1566, 1572, 1579, 1586, 1592, 1599, 1606, 1613, 1620, 1627, 1634, 1641, 1648, 1655, 1661, 1667, 1670, 1677, 1685, 1688, 1695, 1703, 1707, 1713, 1733, 1749, 1758, 1762, 1774, 1782, 1791, and 1975.

[5747] In some aspects, the antigen binding polypeptides provided herein comprise a VL1 comprising an amino acid sequence that is at least 65%, at least 70%, at least 75%, at least 80%, at least 85%, at least 90%, at least 95%, at least 99%, or 100% identical to any one of SEQ ID NOs: 1098, 1105, 1112, 1122, 1129, 1136, 1143, 1150, 1157, 1164, 1171, 1176, 1183, 1190, 1196, 1202, 1208, 1214, 1219, 1223, 1230, 1237, 1242, 1249, 1256, 1263, 1268, 1273, 1280, 1287, 1294, 1301, 1308, 1314, 1321, 1328, 1334, 1341, 1347, 1354, 1361, 1368, 1375, 1380, 1384, 1390, 1396, 1403, 1410, 1416, 1423, 1430, 1436, 1443, 1450, 1457, 1463, 1470, 1477, 1483, 1490, 1497, 1503, 1510, 1514, 1521, 1527, 1533, 1540, 1546, 1551, 1558, 1563, 1570, 1576, 1583, 1589, 1596, 1603, 1610, 1617, 1624, 1631, 1638, 1645, 1652, 1659, 1664, 1669, 1674, 1682, 1692, 1700, 1711, 1721, 1724, 1730, 1740, 1746, 1755, 1764, 1766, 1771, 1779, 1784, and 1788.

[5748] In some aspects, the antigen binding polypeptides provided herein comprise a VL2 comprising an amino acid sequence that is at least 65%, at least 70%, at least 75%, at least 80%, at least 85%, at least 90%, at least 95%, at least 99%, or 100% identical to any one of SEQ ID NOs: 1098, 1105, 1112, 1122, 1129, 1136, 1143, 1150, 1157, 1164, 1171, 1176, 1183, 1190, 1196, 1202, 1208, 1214, 1219, 1223, 1230, 1237, 1242, 1249, 1256, 1263, 1268, 1273, 1280, 1287, 1294, 1301, 1308, 1314, 1321, 1328, 1334, 1341, 1347, 1354, 1361, 1368, 1375, 1380, 1384, 1390, 1396, 1403, 1410, 1416, 1423, 1430, 1436, 1443, 1450, 1457, 1463, 1470, 1477, 1483, 1490, 1497, 1503, 1510, 1514, 1521, 1527, 1533, 1540, 1546, 1551, 1558, 1563, 1570, 1576, 1583, 1589, 1596, 1603, 1610, 1617, 1624, 1631, 1638, 1645, 1652, 1659, 1664, 1669, 1674, 1682, 1692, 1700, 1711, 1721, 1724, 1730, 1740, 1746, 1755, 1764, 1766, 1771, 1779, 1784, and 1788.

[5749] In some aspects, the antigen binding polypeptides provided herein comprise a VH1 comprising an amino acid sequence that is at least 65%, at least 70%, at least 75%, at least 80%, at least 85%, at least 90%, at least 95%, at least 99%, or 100% identical to any one of SEQ ID NOs: 1102, 1109, 1116, 1119, 1126, 1133, 1140, 1147, 1154, 1161, 1168, 1173, 1180, 1187, 1194, 1198, 1206, 1210, 1218, 1220, 1227, 1234, 1241, 1246, 1253, 1260, 1265, 1270, 1277, 1284, 1291, 1298, 1305, 1312, 1318, 1325, 1332, 1338, 1345, 1351, 1358, 1365, 1372, 1379, 1381, 1388, 1393, 1400, 1407, 1413, 1420, 1427, 1434, 1440, 1447, 1454, 1460, 1467, 1474, 1481, 1487, 1494, 1501, 1507, 1512, 1518, 1525, 1530, 1537, 1543, 1550, 1555, 1561, 1567, 1573, 1580, 1587, 1593, 1600, 1607, 1614, 1621, 1628, 1635, 1642, 1649, 1656, 1662, 1668, 1671, 1678, 1686, 1696, 1704, 1714, 1722, 1726, 1734, 1742, 1750, 1759, 1760, 1765, 1768, 1775, 1783, 1785, and 1792.

[5750] In some aspects, the antigen binding polypeptides provided herein comprise a VH2 comprising an amino acid sequence that is at least 65%, at least 70%, at least 75%, at least 80%, at least 85%, at least 90%, at least 95%, at least 99%, or 100% identical to any one of SEQ ID NOs: 1102, 1109, 1116, 1119, 1126, 1133, 1140, 1147, 1154, 1161, 1168, 1173, 1180, 1187, 1194, 1198, 1206, 1210, 1218, 1220, 1227, 1234, 1241, 1246, 1253, 1260, 1265, 1270, 1277, 1284, 1291, 1298, 1305, 1312, 1318, 1325, 1332, 1338, 1345, 1351, 1358, 1365, 1372, 1379, 1381, 1388, 1393, 1400, 1407, 1413, 1420, 1427, 1434, 1440, 1447, 1454, 1460, 1467, 1474, 1481, 1487, 1494, 1501, 1507, 1512, 1518, 1525, 1530, 1537, 1543, 1550, 1555, 1561, 1567, 1573, 1580, 1587, 1593, 1600, 1607, 1614, 1621, 1628, 1635, 1642, 1649, 1656, 1662, 1668, 1671, 1678, 1686, 1696, 1704, 1714, 1722, 1726, 1734, 1742, 1750, 1759, 1760, 1765, 1768, 1775, 1783, 1785, and 1792.

[5751] In some aspects, the infectious disease antigen that is not a sarbecovirus antigen is:
[5752] (i) a viral antigen elected from the group consisting of an influenza virus (A, B, C) antigen (e.g., influenza virus envelope proteins, for example, influenza virus neuraminidase (NA, N1, N2, N3, N4, N5, N6, N7, N8, N9, N10, N11), influenza virus hemagglutinin (H1, H2, H3, H4, H5, H6, H7, H8, H9, H10, H11, H12, H13, H14, H15, H16, H17, H18) (e.g., H1N1, H3N2, H5N1, H7N9, H9N2), Yamagata virus antigen, Victoria virus antigen, influenza virus structural proteins (e.g., M1, M2, capsid protein), influenza virus functional proteins (e.g., ribonucleoprotein (NP), primary interferon antagonist (NS1), nuclear export protein (NEP)) influenza virus accessory proteins (e.g., PB2, PB1, or PA), for example, anti-HA, anti-NA, anti-H1, anti-H3, anti-H5, anti-H7, anti-H9, anti-N1, anti-N2, anti-N9, anti-H1N1, anti-H3N2, anti-H5N1, anti-H7N9, anti-H9N2, anti-A protein, anti-B protein, anti-stem, anti-M1, anti-M2, anti-capsid, anti-NP, anti-NS1, anti-NEP, anti-PB1, anti-PB2, and anti-PA); a swine influenza virus antigen (e.g., swine flu hemagglutinin, swine flu neuraminidase); a classical swine fever (CSF) (hog colera) virus antigen; an equine influenza virus antigen (e.g., equine influenza virus typeA/Miami 63 neuraminidase, equine influenza virus type A/Kentucky 81 neuraminidase, equine influenza virus type A/Alaska 91 neuraminidase); parainfluenza viruses (e.g., bovine parainfluenza virus, bovine parainfluenza virus type 3 fusion protein, bovine parainfluenza virus type 3 hemagglutinin neuraminidase); a (human) respiratory syncytial virus (RSV)-viral antigen (e.g., RSV F glycoprotein, RSV G glycoprotein, F protein of respiratory syncytial virus, RSV fusion glycoprotein); a herpes simplex virus (HSV) antigen (e.g., herpes simplex virus glycoproteins gB, gC, gD, and gE, herpes simplex virus type 2 glycoprotein gB); a Dengue virus antigen (e.g., core protein, matrix protein, glycoprotein E of Dengue virus, or other protein of Dengue virus); a measles virus antigen (e.g., hemagglutinin); a poliovirus 1 antigen (e.g., poliovirus 1 proteins (VP1)), a HIV-1 antigen and HIV-2 antigen (e.g., HIV envelope proteins (e.g., envelope glycoproteins of HIV 1, HIV envelope glycoprotein (Env), HIV envelope glycoprotein gp160, HIV envelope surface glycoprotein gp120, HIV transmembrane envelope protein gp41), HIV structural proteins (e.g., p17, p24, p7, p55), HIV functional proteins (e.g., p66, HIV-1 protease (PR), p31), HIV accessory proteins (e.g., Nef, Tat, Rev, Vif, Vpr, Vpu)); a hepatitis virus (HAV, HBV, HCV, HDV, HEV) antigen (e.g., hepatitis B virus antigen (e.g., surface antigen, core protein), hepatitis C virus antigen (e.g., glycoprotein E1E2)); a rabies virus (Rabies lyssavirus) antigen (e.g., rabies virus glycoprotein, e.g., G glycoprotein); a pseudorabies virus antigen (e.g., pseudorabies virus g50 (gpD), pseudorabies virus II (gpB), pseudorabies virus III (gpC), pseudorabies virus glycoprotein H, pseudorabies virus glycoprotein E); a papillomavirus (HPV) antigen; an Epstein-Barr virus (EBV) (Gamma herpes virus 4) antigen; a Herpes simplex virus (HSV, HSV-1, HSV-2) antigen (e.g., human herpes virus 8, equine herpes virus antigen (e.g., type 1 glycoprotein B, type 1 glycoprotein D)); a Herpes zoster antigen; a Cytomegalovirus antigen (e.g., cytomegalovirus glycoprotein B); a Zika virus antigen; a Transmissible gastroenteritis virus (TGEV) antigen (e.g., glycoprotein 195, matrix protein); a rotavirus antigen (e.g., swine rotavirus glycoprotein 38); a parvovirus antigen (e.g., swine parvovirus capsid protein); a filoviruses (e.g., Marburg and Ebola) antigen; a bovine viral diarrhea virus antigen (e.g., glycoprotein 55); a Newcastle disease virus antigen (hemagglutinin, neuraminidase); an orthopoxvirus antigen; a coxsackievirus antigen and aphthovirus (foot and mouth disease virus) antigen; a yellow fever virus antigen; a Chikunga virus antigen; a Nipah virus antigen; an African swine fever virus antigen; a rhinotracheitis virus antigen (e.g., infectious bovine rhinotracheitis virus glycoprotein E, glycoprotein G); a laryngotracheitis virus antigen (e.g., infectious laryngotracheitis virus glycoprotein G or glycoprotein I); a La Crosse virus antigen (e.g., La Crosse virus glycoprotein); a neonatal calf diarrhoea virus antigen; a Venezuelan equine encephalomyelitis virus antigen; a punta toro virus antigen; a murine leukemia virus antigen; a mouse mammary tumor virus antigen; a bovine respiratory syncytial virus antigen (e.g., bovine respiratory syncytial virus attachment protein (BRSV G), bovine respiratory syncytial virus fusion protein (BRSV F), bovine respiratory syncytial virus nucleocapsid protein (BRSVN)); a bovine E viral diarrhoea virus antigen (e.g., glycoprotein 48 and glycoprotein 53); a metapneumovirus (HMPV) antigen; and an Ebola virus antigen (e.g., ebolavirus glycoprotein, e.g., Zaire ebolavirus glycoprotein); or
[5753] (ii) a bacterial or parasite antigen selected from the group consisting of a Plasmodium (e.g., Plasmodium falciparum, Plasmodium vivax, Plasmodium malariae, Plasmodium ovale, Plasmodium knowlesi) antigen, a Streptococcus (e.g., Streptococcus pneumoniae, Streptococcus pyogenes, Streptococcus agalactiae, Streptococcus mutans, Streptococcus viridans, Streptococcus anginosus, Streptococcus intermedius, Streptococcus constellatus) antigen (e.g., 24M epitope), a Neisseria gonorrhoeae antigen (e.g., gonococcal pilin), a Corynebacterium antigen (e.g., Corynebacterium diphtheria (diptheria toxin), Corynebacterium ulcerans. Corynebacterium pseudotuberculosis), Mycobacterium tuberculosis antigens, Brachyspira hyodysenteriae (Serpulina hydodysenteriae) antigen (e.g., Serpulina hydodysenteriae protective antigen), a Chlamydia antigen (e.g., Chlamydia trachomatis) (e.g., MOMP and PorB), a Mycoplasma sp. (e.g., Mycoplasma genitalium, Mycoplasma hyopneumoniae, Mycoplasma pneumonia) antigen, a Staphylococcus (e.g., Staphylococcus aureus, coagulase-negative staphylococci (CoNS), Staphylococcus aureus alpha toxin, Staphylococcus aureus bi-component leucocidin) antigen, a Klebsiella sp. antigen, an Escherichia coli antigen (e.g., E. coli shiga toxin type-2, E. coli shiga toxin type-1), a Bacillus sp. (e.g., Bacillus anthracis, e.g., Bacillus anthracis anthrax) antigen, a Pseudomonas aeruginosa antigen (e.g., Pseudomonas aeruginosa type III secretion system), an Enterococcus sp. antigen, an Enterobacter sp. antigen, a Proteus sp. antigen, an Actinobacter sp. antigen, a Mycobacterium avium (Mycobacterium avium complex (MAC)) antigen, a Salmonella bacteria antigen, a Clostridium difficile antigen, a Toxoplasma (e.g., Toxoplasma gondii) antigen, a Histoplasma antigen, a Candida antigen, a Coccidioides antigen, a Cryptococcus antigen, a Cryptosporidium antigen, and a Cystoisospora (e.g., Cystoisospora belli) antigen, and another antigen (e.g., endotoxins, lymphotoxins (e.g., lymphotoxin alpha LTA), phosphatidylserine, Hsp90, CCR5, lipoteichoic acid, clumping factor A).

[5754] In some aspects, the antigen binding polypeptides provided herein comprise a VL1 comprising a light chain complementarity determining region 1 (LCDR1), LCDR2, and/or LCDR3 of an antibody selected from the group consisting of libivirumab, rmab, rivabazumab pegol, setoxaximab, suvizumab, suvratoxumab, sevirumab, pritoxaximab, porgaviximab, REGN-EB3, obiltoxaximab, gedivumab, foravirumab, larcaviximab, motavizumab, palivizumab, rafivirumab, regavirumab, tuvirumab, cosfroviximab, felvizumab, atidortoxumab, edobacomab, nebacumab, pateclizumab, raxibacumab, urtoxazumab, tosatoxumab, berlimatoxumab, CR6261, diridavumab, firivumab, lesofavumab, navivumab, exbivirumab, lenvervimab, bavituximab, bezlotoxumab, efungumab, leronlimab, nirsevimab, pagibaximab, panobacumab, tefibazumab, ansuvimab, atoltivimab, maftivimab, and odesivimab.

[5755] In some aspects, the antigen binding polypeptides provided herein comprise a VL2 comprising a light chain complementarity determining region 1 (LCDR1), LCDR2, and/or LCDR3 of an antibody selected from the group consisting of libivirumab, rmab, rivabazumab pegol, setoxaximab, suvizumab, suvratoxumab, sevirumab, pritoxaximab, porgaviximab, REGN-EB3, obiltoxaximab, gedivumab, foravirumab, larcaviximab, motavizumab, palivizumab, rafivirumab, regavirumab, tuvirumab, cosfroviximab, felvizumab, atidortoxumab, edobacomab, nebacumab, pateclizumab, raxibacumab, urtoxazumab, tosatoxumab, berlimatoxumab, CR6261, diridavumab, firivumab, lesofavumab, navivumab, exbivirumab, lenvervimab, bavituximab, bezlotoxumab, efungumab, leronlimab, nirsevimab, pagibaximab, panobacumab, tefibazumab, ansuvimab, atoltivimab, maftivimab, and odesivimab.

[5756] In some aspects, the antigen binding polypeptides provided herein comprise a VH1 comprising a heavy chain complementarity determining region 1 (HCDR1), HCDR2, and/or HCDR3 of an antibody selected from the group consisting of libivirumab, rmab, rivabazumab pegol, setoxaximab, suvizumab, suvratoxumab, sevirumab, pritoxaximab, porgaviximab, REGN-EB3, obiltoxaximab, gedivumab, foravirumab, larcaviximab, motavizumab, palivizumab, rafivirumab, regavirumab, tuvirumab, cosfroviximab, felvizumab, atidortoxumab, edobacomab, nebacumab, pateclizumab, raxibacumab, urtoxazumab, tosatoxumab, berlimatoxumab, CR6261, diridavumab, firivumab, lesofavumab, navivumab, exbivirumab, lenvervimab, bavituximab, bezlotoxumab, efungumab, leronlimab, nirsevimab, pagibaximab, panobacumab, tefibazumab, ansuvimab, atoltivimab, maftivimab, and odesivimab.

[5757] In some aspects, the antigen binding polypeptides provided herein comprise a VH2 comprising a heavy chain complementarity determining region 1 (HCDR1), HCDR2, and/or HCDR3 of an antibody selected from the group consisting of libivirumab, rmab, rivabazumab pegol, setoxaximab, suvizumab, suvratoxumab, sevirumab, pritoxaximab, porgaviximab, REGN-EB3, obiltoxaximab, gedivumab, foravirumab, larcaviximab, motavizumab, palivizumab, rafivirumab, regavirumab, tuvirumab, cosfroviximab, felvizumab, atidortoxumab, edobacomab, nebacumab, pateclizumab, raxibacumab, urtoxazumab, tosatoxumab, berlimatoxumab, CR6261, diridavumab, firivumab, lesofavumab, navivumab, exbivirumab, lenvervimab, bavituximab, bezlotoxumab, efungumab, leronlimab, nirsevimab, pagibaximab, panobacumab, tefibazumab, ansuvimab, atoltivimab, maftivimab, and odesivimab.

[5758] In some aspects, the antigen binding polypeptides provided herein comprise a VL1 comprising a VL of an antibody selected from the group consisting of libivirumab, rmab, rivabazumab pegol, setoxaximab, suvizumab, suvratoxumab, sevirumab, pritoxaximab, porgaviximab, REGN-EB3, obiltoxaximab, gedivumab, foravirumab, larcaviximab, motavizumab, palivizumab, rafivirumab, regavirumab, tuvirumab, cosfroviximab, felvizumab, atidortoxumab, edobacomab, nebacumab, pateclizumab, raxibacumab, urtoxazumab, tosatoxumab, berlimatoxumab, CR6261, diridavumab, firivumab, lesofavumab, navivumab, exbivirumab, lenvervimab, bavituximab, bezlotoxumab, efungumab, leronlimab, nirsevimab, pagibaximab, panobacumab, tefibazumab, ansuvimab, atoltivimab, maftivimab, and odesivimab.

[5759] In some aspects, the antigen binding polypeptides provided herein comprise a VL2 comprising a VL of an antibody selected from the group consisting of libivirumab, rmab, rivabazumab pegol, setoxaximab, suvizumab, suvratoxumab, sevirumab, pritoxaximab, porgaviximab, REGN-EB3, obiltoxaximab, gedivumab, foravirumab, larcaviximab, motavizumab, palivizumab, rafivirumab, regavirumab, tuvirumab, cosfroviximab, felvizumab, atidortoxumab, edobacomab, nebacumab, pateclizumab, raxibacumab, urtoxazumab, tosatoxumab, berlimatoxumab, CR6261, diridavumab, firivumab, lesofavumab, navivumab, exbivirumab, lenvervimab, bavituximab, bezlotoxumab, efungumab, leronlimab, nirsevimab, pagibaximab, panobacumab, tefibazumab, ansuvimab, atoltivimab, maftivimab, and odesivimab.

[5760] In some aspects, the antigen binding polypeptides provided herein comprise a VH1 comprising a VH of an antibody selected from the group consisting of libivirumab, rmab, rivabazumab pegol, setoxaximab, suvizumab, suvratoxumab, sevirumab, pritoxaximab, porgaviximab, REGN-EB3, obiltoxaximab, gedivumab, foravirumab, larcaviximab, motavizumab, palivizumab, rafivirumab, regavirumab, tuvirumab, cosfroviximab, felvizumab, atidortoxumab, edobacomab, nebacumab, pateclizumab, raxibacumab, urtoxazumab, tosatoxumab, berlimatoxumab, CR6261, diridavumab, firivumab, lesofavumab, navivumab, exbivirumab, lenvervimab, bavituximab, bezlotoxumab, efungumab, leronlimab, nirsevimab, pagibaximab, panobacumab, tefibazumab, ansuvimab, atoltivimab, maftivimab, and odesivimab.

[5761] In some aspects, the antigen binding polypeptides provided herein comprise a VH2 comprising a VH of an antibody selected from the group consisting of libivirumab, rmab, rivabazumab pegol, setoxaximab, suvizumab, suvratoxumab, sevirumab, pritoxaximab, porgaviximab, REGN-EB3, obiltoxaximab, gedivumab, foravirumab, larcaviximab, motavizumab, palivizumab, rafivirumab, regavirumab, tuvirumab, cosfroviximab, felvizumab, atidortoxumab, edobacomab, nebacumab, pateclizumab, raxibacumab, urtoxazumab, tosatoxumab, berlimatoxumab, CR6261, diridavumab, firivumab, lesofavumab, navivumab, exbivirumab, lenvervimab, bavituximab, bezlotoxumab, efungumab, leronlimab, nirsevimab, pagibaximab, panobacumab, tefibazumab, ansuvimab, atoltivimab, maftivimab, and odesivimab.

[5762] In some aspects, the antigen binding polypeptides provided herein comprise a VL1 comprising (i) a complementarity determining region (CDR) 1 having an amino acid sequence that is at least 65%, at least 70%, at least 75%, at least 80%, at least 85%, at least 90%, at least 95%, at least 99%, or 100% identical to any one of SEQ ID NOs: 1428, 1793, 1798, 1810, 1817, 1824, 1977, 1985, 1993 and 2001; (ii) a CDR2 having an amino acid sequence that is at least 65%, at least 70%, at least 75%, at least 80%, at least 85%, at least 90%, at least 95%, at least 99%, or 100% identical to any one of SEQ ID NOs: 1978, 1986, 1994, and 2002; or at least 65%, at least 70%, at least 75%, at least 80%, at least 85%, at least 90%, at least 95%, at least 99%, or 100% identical to any one of amino acid sequences YTS, DTS, GAS, and AAS; and (iii) a CDR3 having an amino acid sequence that is at least 65%, at least 70%, at least 75%, at least 80%, at least 85%, at least 90%, at least 95%, at least 99%, or 100% identical to any one of SEQ ID NOs: 1229, 1799, 1805, 1811, 1818, 1825, 1979, 1987, 1995, and 2003.

[5763] In some aspects, the antigen binding polypeptides provided herein comprise a VL2 comprising (i) a complementarity determining region (CDR) 1 having an amino acid sequence that is at least 65%, at least 70%, at least 75%, at least 80%, at least 85%, at least 90%, at least 95%, at least 99%, or 100% identical to any one of SEQ ID NOs: 1428, 1793, 1798, 1810, 1817, 1824, 1977, 1985, 1993 and 2001; (ii) a CDR2 having an amino acid sequence that is at least 65%, at least 70%, at least 75%, at least 80%, at least 85%, at least 90%, at least 95%, at least 99%, or 100% identical to any one of SEQ ID NOs: 1978, 1986, 1994, and 2002; or at least 65%, at least 70%, at least 75%, at least 80%, at least 85%, at least 90%, at least 95%, at least 99%, or 100% identical to any one of amino acid sequences YTS, DTS, GAS, and AAS; and (iii) a CDR3 having an amino acid sequence that is at least 65%, at least 70%, at least 75%, at least 80%, at least 85%, at least 90%, at least 95%, at least 99%, or 100% identical to any one of SEQ ID NOs: 1229, 1799, 1805, 1811, 1818, 1825, 1979, 1987, 1995, and 2003.

[5764] In some aspects, the antigen binding polypeptides provided herein comprise a VH1 comprising (i) a complementarity determining region (CDR) 1 having an amino acid sequence that is at least 65%, at least 70%, at least 75%, at least 80%, at least 85%, at least 90%, at least 95%, at least 99%, or 100% identical to any one of SEQ ID NOs: 1577, 1795, 1801, 1813, 1820, 1827, 1981, 1989, 1997, and 2005; (ii) a CDR2 having an amino acid sequence that is at least 65%, at least 70%, at least 75%, at least 80%, at least 85%, at least 90%, at least 95%, at least 99%, or 100% identical to any one of SEQ ID NOs: 1159, 1802, 1807, 1814, 1821, 1828, 1982, 1990, 1998, and 2006; and (iii) a CDR3 having an amino acid sequence that is at least 65%, at least 70%, at least 75%, at least 80%, at least 85%, at least 90%, at least 95%, at least 99%, or 100% identical to any one of SEQ ID NOs: 1796, 1803, 1808, 1815, 1822, 1829, 1983, 1991, 1999, and 2007.

[5765] In some aspects, the antigen binding polypeptides provided herein comprise a VH2 comprising (i) a complementarity determining region (CDR) 1 having an amino acid sequence that is at least 65%, at least 70%, at least 75%, at least 80%, at least 85%, at least 90%, at least 95%, at least 99%, or 100% identical to any one of SEQ ID NOs: 1577, 1795, 1801, 1813, 1820, 1827, 1981, 1989, 1997, and 2005; (ii) a CDR2 having an amino acid sequence that is at least 65%, at least 70%, at least 75%, at least 80%, at least 85%, at least 90%, at least 95%, at least 99%, or 100% identical to any one of SEQ ID NOs: 1159, 1802, 1807, 1814, 1821, 1828, 1982, 1990, 1998, and 2006; and (iii) a CDR3 having an amino acid sequence that is at least 65%, at least 70%, at least 75%, at least 80%, at least 85%, at least 90%, at least 95%, at least 99%, or 100% identical to any one of SEQ ID NOs: 1796, 1803, 1808, 1815, 1822, 1829, 1983, 1991, 1999, and 2007.

[5766] In some aspects, the antigen binding polypeptides provided herein comprise a VL1 comprising an amino acid sequence that is at least 65%, at least 70%, at least 75%, at least 80%, at least 85%, at least 90%, at least 95%, at least 99%, or 100% identical to any one of SEQ ID NOs: 1794, 1800, 1806, 1812, 1819, 1826, 1980, 1988, 1996, and 2004.

[5767] In some aspects, the antigen binding polypeptides provided herein comprise a VL2 comprising an amino acid sequence that is at least 65%, at least 70%, at least 75%, at least 80%, at least 85%, at least 90%, at least 95%, at least 99%, or 100% identical to any one of SEQ ID NOs: 1794, 1800, 1806, 1812, 1819, 1826, 1980, 1988, 1996, and 2004.

[5768] In some aspects, the antigen binding polypeptides provided herein comprise a VH1 comprising an amino acid sequence that is at least 65%, at least 70%, at least 75%, at least 80%, at least 85%, at least 90%, at least 95%, at least 99%, or 100% identical to any one of SEQ ID NOs 1797, 1804, 1809, 1816, 1823, 1830, 1984, 1992, 2000, and 2008.

[5769] In some aspects, the antigen binding polypeptides provided herein comprise a VH2 comprising an amino acid sequence that is at least 65%, at least 70%, at least 75%, at least 80%, at least 85%, at least 90%, at least 95%, at least 99%, or 100% identical to any one of SEQ ID NOs 1797, 1804, 1809, 1816, 1823, 1830, 1984, 1992, 2000, and 2008.

[5770] In some aspects, the other-pathology antigen is selected from the group consisting of Amyloid beta, β-amyloid, PCSK9, IFN-α/β receptor. Rhesus factor, nerve growth factor (NGF), DPP4, fibrin II beta chain, ACVR2B, serum amyloid A protein SOST, FGF 23, VWF, tissue factor pathway inhibitor (TFPI), 1-40 and 1-42, selectin P, glucagon receptor (GCGR), amyloid P component, GDF-8, CXCL10 IP-10, repulsive guidance molecule A RGMA, IFN-γ, activated F9/F10, calcitonin gene-related peptide (CGRP), angiopoietin 3, IFN receptor, IFN-γ, calcitonin, β-amyloid 1-40 and 1-42, tau protein, dabigatran, cardiac myosin, selectin P, Complement factor D (CFD), kallikrein, GDF-8, IGHE, tissue factor pathway inhibitor (TFPI), GMCSF receptor α-chain, amyloid, IgE Fc region, MASP-2, oxLDL, GMCSF, NOGO-A, Alpha-synuclein, NGF, myelin-associated glycoprotein, RHD (gene) (RHD), sclerostin, FCGRT, sclerostin SOST, mucosal addressin cell adhesion molecule, myostatin, RSVFR, complement component 1s C1s, C5, and IL31.

[5771] In some aspects, the antigen binding polypeptides provided herein comprise a VL1 comprising a light chain complementarity determining region 1 (LCDR1), LCDR2, and/or LCDR3 of an antibody selected from the group consisting of aducanumab, alirocumab, frovocimab, lodelcizumab, bococizumab, evolocumab, ralpancizumab, anifrolumab, atorolimumab, bapineuzumab, bedinvetmab, begelomab, biciromab, bimagrumab, birtamimab, blosozumab, burosumab, caplacizumab, concizumab, crenezumab, crizanlizumab, crotedumab, dezamizumab, domagrozumab, donanemab, eldelumab, elezanumab, emapalumab, emicizumab, eptinezumab, erenumab, evinacumab, faralimomab, fasinumab, fontolizumab, fremanezumab, frunevetmab, fulranumab, galcanezumab, gantenerumab, gosuranemab, idarucizumab, imciromab, inclacumab, lampalizumab, lanadelumab, landogrozumab, lecanemab, ligelizumab, marstacimab, mavrilimumab, morolimumab, NEOD001, omalizumab, oMS721, orticumab, otilimab, ozanezumab, ponezumab, prasinezumab, quilizumab, ranevetmab, refanezumab, roledumab, romosozumab, rozanolixizumab, setrusumab, SHP647, solanezumab, stamulumab, suptavumab, sutimlimab, tanezumab, crovalimab, and lokivetmab.

[5772] In some aspects, the antigen binding polypeptides provided herein comprise a VL2 comprising a light chain complementarity determining region 1 (LCDR1), LCDR2, and/or LCDR3 of an antibody selected from the group consisting of aducanumab, alirocumab, frovocimab, lodelcizumab, bococizumab, evolocumab, ralpancizumab, anifrolumab, atorolimumab, bapineuzumab, bedinvetmab, begelomab, biciromab, bimagrumab, birtamimab, blosozumab, burosumab, caplacizumab, concizumab, crenezumab, crizanlizumab, crotedumab, dezamizumab, domagrozumab, donanemab, eldelumab, elezanumab, emapalumab, emicizumab, eptinezumab, erenumab, evinacumab, faralimomab, fasinumab, fontolizumab, fremanezumab, frunevetmab, fulranumab, galcanezumab, gantenerumab, gosuranemab, idarucizumab, imciromab, inclacumab, lampalizumab, lanadelumab, landogrozumab, lecanemab, ligelizumab, marstacimab, mavrilimumab, morolimumab, NEOD001, omalizumab, oMS721, orticumab, otilimab, ozanezumab, ponezumab, prasinezumab, quilizumab, ranevetmab, refanezumab, roledumab, romosozumab, rozanolixizumab, setrusumab, SHP647, solanezumab, stamulumab, suptavumab, sutimlimab, tanezumab, crovalimab, and lokivetmab.

[5773] In some aspects, the antigen binding polypeptides provided herein comprise a VH1 comprising a heavy chain complementarity determining region 1 (HCDR1), HCDR2, and/or HCDR3 of an antibody selected from the group consisting of aducanumab, alirocumab, frovocimab, lodelcizumab, bococizumab, evolocumab, ralpancizumab, anifrolumab, atorolimumab, bapineuzumab, bedinvetmab, begelomab, biciromab, bimagrumab, birtamimab, blosozumab, burosumab, caplacizumab, concizumab, crenezumab, crizanlizumab, crotedumab, dezamizumab, domagrozumab, donanemab, eldelumab, elezanumab, emapalumab, emicizumab, eptinezumab, erenumab, evinacumab, faralimomab, fasinumab, fontolizumab, fremanezumab, frunevetmab, fulranumab, galcanezumab, gantenerumab, gosuranemab, idarucizumab, imciromab, inclacumab, lampalizumab, lanadelumab, landogrozumab, lecanemab, ligelizumab, marstacimab, mavrilimumab, morolimumab, NEOD001, omalizumab, oMS721, orticumab, otilimab, ozanezumab, ponezumab, prasinezumab, quilizumab, ranevetmab, refanezumab, roledumab, romosozumab, rozanolixizumab, setrusumab, SHP647, solanezumab, stamulumab, suptavumab, sutimlimab, tanezumab, crovalimab, and lokivetmab.

[5774] In some aspects, the antigen binding polypeptides provided herein comprise a VH2 comprising a heavy chain complementarity determining region 1 (HCDR1), HCDR2, and/or HCDR3 of an antibody selected from the group consisting of aducanumab, alirocumab, frovocimab, lodelcizumab, bococizumab, evolocumab, ralpancizumab, anifrolumab, atorolimumab, bapineuzumab, bedinvetmab, begelomab, biciromab, bimagrumab, birtamimab, blosozumab, burosumab, caplacizumab, concizumab, crenezumab, crizanlizumab, crotedumab, dezamizumab, domagrozumab, donanemab, eldelumab, elezanumab, emapalumab, emicizumab, eptinezumab, erenumab, evinacumab, faralimomab, fasinumab, fontolizumab, fremanezumab, frunevetmab, fulranumab, galcanezumab, gantenerumab, gosuranemab, idarucizumab, imciromab, inclacumab, lampalizumab, lanadelumab, landogrozumab, lecanemab, ligelizumab, marstacimab, mavrilimumab, morolimumab, NEOD001, omalizumab, oMS721, orticumab, otilimab, ozanezumab, ponezumab, prasinezumab, quilizumab, ranevetmab, refanezumab, roledumab, romosozumab, rozanolixizumab, setrusumab, SHP647, solanezumab, stamulumab, suptavumab, sutimlimab, tanezumab, crovalimab, and lokivetmab.

[5775] In some aspects, the antigen binding polypeptides provided herein comprise a VL1 comprising a VL of an antibody selected from the group consisting of aducanumab, alirocumab, frovocimab, lodelcizumab, bococizumab, evolocumab, ralpancizumab, anifrolumab, atorolimumab, bapineuzumab, bedinvetmab, begelomab, biciromab, bimagrumab, birtamimab, blosozumab, burosumab, caplacizumab, concizumab, crenezumab, crizanlizumab, crotedumab, dezamizumab, domagrozumab, donanemab, eldelumab, elezanumab, emapalumab, emicizumab, eptinezumab, erenumab, evinacumab, faralimomab, fasinumab, fontolizumab, fremanezumab, frunevetmab, fulranumab, galcanezumab, gantenerumab, gosuranemab, idarucizumab, imciromab, inclacumab, lampalizumab, lanadelumab, landogrozumab, lecanemab, ligelizumab, marstacimab, mavrilimumab, morolimumab, NEOD001, omalizumab, oMS721, orticumab, otilimab, ozanezumab, ponezumab, prasinezumab, quilizumab, ranevetmab, refanezumab, roledumab, romosozumab, rozanolixizumab, setrusumab, SHP647, solanezumab, stamulumab, suptavumab, sutimlimab, tanezumab, crovalimab, and lokivetmab.

[5776] In some aspects, the antigen binding polypeptides provided herein comprise a VL2 comprising a VL of an antibody selected from the group consisting of aducanumab, alirocumab, frovocimab, lodelcizumab, bococizumab, evolocumab, ralpancizumab, anifrolumab, atorolimumab, bapineuzumab, bedinvetmab, begelomab, biciromab, bimagrumab, birtamimab, blosozumab, burosumab, caplacizumab, concizumab, crenezumab, crizanlizumab, crotedumab, dezamizumab, domagrozumab, donanemab, eldelumab, elezanumab, emapalumab, emicizumab, eptinezumab, erenumab, evinacumab, faralimomab, fasinumab, fontolizumab, fremanezumab, frunevetmab, fulranumab, galcanezumab, gantenerumab, gosuranemab, idarucizumab, imciromab, inclacumab, lampalizumab, lanadelumab, landogrozumab, lecanemab, ligelizumab, marstacimab, mavrilimumab, morolimumab, NEOD001, omalizumab, oMS721, orticumab, otilimab, ozanezumab, ponezumab, prasinezumab, quilizumab, ranevetmab, refanezumab, roledumab, romosozumab, rozanolixizumab, setrusumab, SHP647, solanezumab, stamulumab, suptavumab, sutimlimab, tanezumab, crovalimab, and lokivetmab.

[5777] In some aspects, the antigen binding polypeptides provided herein comprise a VH1 comprising a VH of an antibody selected from the group consisting of aducanumab, alirocumab, frovocimab, lodelcizumab, bococizumab, evolocumab, ralpancizumab, anifrolumab, atorolimumab, bapineuzumab, bedinvetmab, begelomab, biciromab, bimagrumab, birtamimab, blosozumab, burosumab, caplacizumab, concizumab, crenezumab, crizanlizumab, crotedumab, dezamizumab, domagrozumab, donanemab, eldelumab, elezanumab, emapalumab, emicizumab, eptinezumab, erenumab, evinacumab, faralimomab, fasinumab, fontolizumab, fremanezumab, frunevetmab, fulranumab, galcanezumab, gantenerumab, gosuranemab, idarucizumab, imciromab, inclacumab, lampalizumab, lanadelumab, landogrozumab, lecanemab, ligelizumab, marstacimab, mavrilimumab, morolimumab, NEOD001, omalizumab, oMS721, orticumab, otilimab, ozanezumab, ponezumab, prasinezumab, quilizumab, ranevetmab, refanezumab, roledumab, romosozumab, rozanolixizumab, setrusumab, SHP647, solanezumab, stamulumab, suptavumab, sutimlimab, tanezumab, crovalimab, and lokivetmab.

[5778] In some aspects, the antigen binding polypeptides provided herein comprise a VH2 comprising a VH of an antibody selected from the group consisting of aducanumab, alirocumab, frovocimab, lodelcizumab, bococizumab, evolocumab, ralpancizumab, anifrolumab, atorolimumab, bapincuzumab, bedinvetmab, begelomab, biciromab, bimagrumab, birtamimab, blosozumab, burosumab, caplacizumab, concizumab, crenezumab, crizanlizumab, crotedumab, dezamizumab, domagrozumab, donanemab, eldelumab, elezanumab, emapalumab, emicizumab, eptinezumab, erenumab, evinacumab, faralimomab, fasinumab, fontolizumab, fremanezumab, frunevetmab, fulranumab, galcanezumab, gantenerumab, gosuranemab, idarucizumab, imciromab, inclacumab, lampalizumab, lanadelumab, landogrozumab, lecanemab, ligelizumab, marstacimab, mavrilimumab, morolimumab, NEOD001, omalizumab, oMS721, orticumab, otilimab, ozanezumab, ponezumab, prasinezumab, quilizumab, ranevetmab, refanezumab, roledumab, romosozumab, rozanolixizumab, setrusumab, SHP647, solanezumab, stamulumab, suptavumab, sutimlimab, tanezumab, crovalimab, and lokivetmab.

[5779] In some aspects, the antigen binding polypeptides provided herein comprise a VL1 comprising (i) a complementarity determining region (CDR) 1 having an amino acid sequence that is at least 65%, at least 70%, at least 75%, at least 80%, at least 85%, at least 90%, at least 95%, at least 99%, or 100% identical to any one of SEQ ID NOs: 1120, 1228, 1359, 1519, 1831, 1838, 1845, 1852, 1859, 1866, 1872, 1878, 1885, 1891, 1898, 1905, 1911, 1917, 1924, 1931, 1938, 1945, and 1963; (ii) a CDR2 having an amino acid sequence that is at least 65%, at least 70%, at least 75%, at least 80%, at least 85%, at least 90%, at least 95%, at least 99%, or 100% identical to any one of amino acid sequences AAS, AVS, DAS, DNN, EDN, EVS, GAS, GNG, KAS, KVS, LVS, NTD, STS, WAS, and YTS; and (iii) a CDR3 having an amino acid sequence that is at least 65%, at least 70%, at least 75%, at least 80%, at least 85%, at least 90%, at least 95%, at least 99%, or 100% identical to any one of SEQ ID NOs: 1360, 1832, 1839, 1846, 1853, 1860, 1867, 1873, 1879, 1886, 1892, 1899, 1906, 1912, 1918, 1925, 1932, 1939, 1946, 1951, 1957, 1964, and 1970.

[5780] In some aspects, the antigen binding polypeptides provided herein comprise a VL2 comprising (i) a complementarity determining region (CDR) 1 having an amino acid sequence that is at least 65%, at least 70%, at least 75%, at least 80%, at least 85%, at least 90%, at least 95%, at least 99%, or 100% identical to any one of SEQ ID NOs: 1120, 1228, 1359, 1519, 1831, 1838, 1845, 1852, 1859, 1866, 1872, 1878, 1885, 1891, 1898, 1905, 1911, 1917, 1924, 1931, 1938, 1945, and 1963; (ii) a CDR2 having an amino acid sequence that is at least 65%, at least 70%, at least 75%, at least 80%, at least 85%, at least 90%, at least 95%, at least 99%, or 100% identical to any one of amino acid sequences AAS, AVS, DAS, DNN, EDN, EVS, GAS, GNG, KAS, KVS, LVS, NTD, STS, WAS, and YTS; and (iii) a CDR3 having an amino acid sequence that is at least 65%, at least 70%, at least 75%, at least 80%, at least 85%, at least 90%, at least 95%, at least 99%, or 100% identical to any one of SEQ ID NOs: 1360, 1832, 1839, 1846, 1853, 1860, 1867, 1873, 1879, 1886, 1892, 1899, 1906, 1912, 1918, 1925, 1932, 1939, 1946, 1951, 1957, 1964, and 1970.

[5781] In some aspects, the antigen binding polypeptides provided herein comprise a VH1 comprising (i) a complementarity determining region (CDR) 1 having an amino acid sequence that is at least 65%, at least 70%, at least 75%, at least 80%, at least 85%, at least 90%, at least 95%, at least 99%, or 100% identical to any one of SEQ ID NOs: 1309, 1362, 1437, 1552, 1618, 1639, 1834, 1841, 1848, 1855, 1862, 1881, 1894, 1901, 1920, 1927, 1934, 1941, 1953, 1959, and 1966; (ii) a CDR2 having an amino acid sequence that is at least 65%, at least 70%, at least 75%, at least 80%, at least 85%, at least 90%, at least 95%, at least 99%, or 100% identical to any one of SEQ ID NOs: 1363, 1835, 1842, 1849, 1856, 1863, 1869, 1875, 1882, 1888, 1895, 1902, 1908, 1914, 1921, 1928, 1935, 1942, 1948, 1954, 1960, 1967, and 1972; and (iii) a CDR3 having an amino acid sequence that is at least 65%, at least 70%, at least 75%, at least 80%, at least 85%, at least 90%, at least 95%, at least 99%, or 100% identical to any one of SEQ ID NOs: 1364, 1836, 1843, 1850, 1857, 1864, 1870, 1876, 1883, 1889, 1896, 1903, 1909, 1915, 1922, 1929, 1936, 1943, 1949, 1955, 1961, 1968, and 1973.

[5782] In some aspects, the antigen binding polypeptides provided herein comprise a VH2 comprising (i) a complementarity determining region (CDR) 1 having an amino acid sequence that is at least 65%, at least 70%, at least 75%, at least 80%, at least 85%, at least 90%, at least 95%, at least 99%, or 100% identical to any one of SEQ ID NOs: 1309, 1362, 1437, 1552, 1618, 1639, 1834, 1841, 1848, 1855, 1862, 1881, 1894, 1901, 1920, 1927, 1934, 1941, 1953, 1959, and 1966; (ii) a CDR2 having an amino acid sequence that is at least 65%, at least 70%, at least 75%, at least 80%, at least 85%, at least 90%, at least 95%, at least 99%, or 100% identical to any one of SEQ ID NOs: 1363, 1835, 1842, 1849, 1856, 1863, 1869, 1875, 1882, 1888, 1895, 1902, 1908, 1914, 1921, 1928, 1935, 1942, 1948, 1954, 1960, 1967, and 1972; and (iii) a CDR3 having an amino acid sequence that is at least 65%, at least 70%, at least 75%, at least 80%, at least 85%, at least 90%, at least 95%, at least 99%, or 100% identical to any one of SEQ ID NOs: 1364, 1836, 1843, 1850, 1857, 1864, 1870, 1876, 1883, 1889, 1896, 1903, 1909, 1915, 1922, 1929, 1936, 1943, 1949, 1955, 1961, 1968, and 1973.

[5783] In some aspects, the antigen binding polypeptides provided herein comprise a VL1 comprising an amino acid sequence that is at least 65%, at least 70%, at least 75%, at least 80%, at least 85%, at least 90%, at least 95%, at least 99%, or 100% identical to any one of SEQ ID NOs: 1361, 1833, 1840, 1847, 1854, 1861, 1868, 1874, 1880, 1887, 1893, 1900, 1907, 1913, 1919, 1926, 1933, 1940, 1947, 1952, 1958, 1965, and 1971.

[5784] In some aspects, the antigen binding polypeptides provided herein comprise a VL2 comprising an amino acid sequence that is at least 65%, at least 70%, at least 75%, at least 80%, at least 85%, at least 90%, at least 95%, at least 99%, or 100% identical to any one of SEQ ID NOs: 1361, 1833, 1840, 1847, 1854, 1861, 1868, 1874, 1880, 1887, 1893, 1900, 1907, 1913, 1919, 1926, 1933, 1940, 1947, 1952, 1958, 1965, and 1971.

[5785] In some aspects, the antigen binding polypeptides provided herein comprise a VH1 comprising an amino acid sequence that is at least 65%, at least 70%, at least 75%, at least 80%, at least 85%, at least 90%, at least 95%, at least 99%, or 100% identical to any one of SEQ ID NOs: 1365, 1837, 1844, 1851, 1858, 1865, 1871, 1877, 1884, 1890, 1897, 1904, 1910, 1916, 1923, 1930, 1937, 1944, 1950, 1956, 1962, 1969, and 1974.

[5786] In some aspects, the antigen binding polypeptides provided herein comprise a VH2 comprising an amino acid sequence that is at least 65%, at least 70%, at least 75%, at least 80%, at least 85%, at least 90%, at least 95%, at least 99%, or 100% identical to any one of SEQ ID NOs: 1365, 1837, 1844, 1851, 1858, 1865, 1871, 1877, 1884, 1890, 1897, 1904, 1910, 1916, 1923, 1930, 1937, 1944, 1950, 1956, 1962, 1969, and 1974.

[5787] In some aspects, the antigen binding polypeptides provided herein further comprise an Fc region. In some aspects, the antigen binding polypeptides provided herein further comprise an Fc region at the carboxy-terminus. In some aspects, the Fc region comprises an immunoglobulin heavy chain constant region 2 (CH2) and/or an immunoglobulin heavy chain constant region 3 (CH3). In some aspects, the Fc region further comprises an immunoglobulin hinge (i.e., a hinge region). In some aspects, the hinge region comprises an amino acid sequence at least 65%, at least 70%, at least 75%, at least 80%, at least 85%, at least 90%, at least 95%, at least 99%, or 100% identical to any one of SEQ ID NOs: 635, 636, 1072, 1073, or 1074. In some aspects, the Fc region comprises a CH2 and a CH3. In some aspects, the CH2 comprises an amino acid sequence that is at least 65%, at least 70%, at least 75%, at least 80%, at least 85%, at least 90%, at least 95%, at least 99%, or 100% identical to any one of SEQ ID NOs: 1075-1078. In some aspects, the CH3 comprises an amino acid sequence that is at least 65%, at least 70%, at least 75%, at least 80%, at least 85%, at least 90%, at least 95%, at least 99%, or 100% identical to any one of SEQ ID NOs: 1079-1085. In some aspects, the Fc region comprises an amino acid sequence that is at least 65%, at least 70%, at least 75%, at least 80%, at least 85%, at least 90%, at least 95%, at least 99%, or 100% identical to any one of SEQ ID NOs: 376-380.

[5788] In some aspects, the Fc region comprises one or more amino acid substitutions. In some aspects, the one or more amino acid substitutions comprise one or more half-life extension amino acid substitutions. In some aspects, the one or more half-life extension amino acid substitutions comprise one or more of amino acid substitutions M428L, N434A, N434S, L234F, L235E, P331S, M252Y, S254T, and T256E, or equivalent thereof, based on the EU numbering scheme. In some aspects, the one or more half-life extension amino acid substitutions comprise a LA (M428L and N434A, or equivalent thereof, based on the EU numbering scheme) amino acid substitution. In some aspects, the one or more half-life extension amino acid substitutions comprise a LS (M428L and N434S, or equivalent thereof, based on the EU numbering scheme) amino acid substitution. In some aspects, the one or more half-life extension amino acid substitutions comprise L234F and L235E, or equivalent thereof (based on the EU numbering scheme) amino acid substitutions. In some aspects, the one or more half-life extension amino acid substitutions comprise a TM (L234F, L235E, and P331S, or equivalent thereof, based on the EU numbering scheme) amino acid substitution. In some aspects, the one or more half-life extension amino acid substitutions comprise a YTE (M252Y, S254T, and T256E, or equivalent thereof, based on the EU numbering scheme) amino acid substitution.

[5789] In some aspects, the Fc region comprises at least one knob-into-hole modification. In some aspects, the antigen binding polypeptides disclosed herein are comprised in IgG1 or IgG4 antibodies or antigen binding fragments thereof. In some aspects, the knob-into-hole modification comprises one or more of knob substitutions of S354C and T366W, or equivalent thereof, and/or one or more of hole substitutions of Y349C, T366S, L368A, Y407V, or equivalent thereof, or a combination thereof, based on the EU numbering scheme. In some aspects, the Fc region comprises a knob-into-hole modification comprising knob substitutions of S354C and T366W, or equivalent thereof, and/or hole substitutions of Y349C, T366S, L368A and Y407V, or equivalent thereof, and/or a half-life extension amino acid substitution comprising: a LA (M428L and N434A, or equivalent thereof, based on the EU numbering scheme) amino acid substitution, a LS (M428L and N434S, or equivalent thereof, based on the EU numbering scheme) amino acid substitution, L234F and L235E, or equivalent thereof (based on the EU numbering scheme) amino acid substitutions, a TM (L234F, L235E, and P331S, or equivalent thereof, based on the EU numbering scheme) amino acid substitution, a YTE (M252Y, S254T, and T256E, or equivalent thereof, based on the EU numbering scheme) amino acid substitution, or any combination thereof.

[5790] In some aspects, the Fc region comprises knob substitutions of S354C and T366W, or equivalent thereof, and a half-life extension amino acid substitution comprising: a LA (M428L and N434A, or equivalent thereof, based on the EU numbering scheme) amino acid substitution, a LS (M428L and N434S, or equivalent thereof, based on the EU numbering scheme) amino acid substitution, L234F and L235E, or equivalent thereof (based on the EU numbering scheme) amino acid substitutions, a TM (L234F, L235E, and P331S, or equivalent thereof, based on the EU numbering scheme) amino acid substitution, a YTE (M252Y, S254T, and T256E, or equivalent thereof, based on the EU numbering scheme) amino acid substitution, or any combination thereof.

[5791] In some aspects, the Fc region comprises hole substitutions of Y349C, T366S, L368A and Y407V, or equivalent thereof, and a half-life extension amino acid substitution comprising: a LA (M428L and N434A, or equivalent thereof, based on the EU numbering scheme) amino acid substitution, a LS (M428L and N434S, or equivalent thereof, based on the EU numbering scheme) amino acid substitution, L234F and L235E, or equivalent thereof (based on the EU numbering scheme) amino acid substitutions, a TM (L234F, L235E, and P331S, or equivalent thereof, based on the EU numbering scheme) amino acid substitution, a YTE (M252Y, S254T, and T256E, or equivalent thereof, based on the EU numbering scheme) amino acid substitution, or any combination thereof.

[5792] In some aspects, the antigen binding polypeptides disclosed herein comprise one or more Fc effector function knockout mutation. In some aspects, the antigen binding polypeptides disclosed herein are comprised in IgG1 or IgG4 antibodies or antigen binding fragments thereof. In some aspects, the Fc effector function knockout mutation is L234A, L235A, P239A, or equivalent thereof, or a combination thereof, based on the EU numbering scheme.

[5793] In some aspects, the antigen binding polypeptides disclosed herein comprise a mutation at a glycosylation site. In some aspects, the mutation at a glycosylation site is a mutation at an N-glycosylation site. In some aspects, the antigen binding polypeptides comprise a VH comprising a mutation at a glycosylation site. In some aspects, the mutation at a glycosylation site is a mutation at an N-glycosylation site. In some aspects, the mutation at an N-glycosylation site is at amino acid N62, or equivalent thereof, of the VH region or equivalent thereof. In some aspects, the mutation at an N-glycosylation site at amino acid N62 is N62Q or N62S, or equivalent thereof.

[5794] In some aspects, the antigen binding polypeptides disclosed herein, comprise one or more optional linkers. The one or more optional linkers are indicated herein as Ln, wherein n is an integer, and the integer next to each L indicates each L comprised in the antigen binding polypeptides disclosed herein. For example, if an antigen binding polypeptide disclosed herein comprises two linkers, the first linker from N-terminus to C-terminus is herein indicated as L1, and the second linker from N-terminus to C-terminus is herein indicated as L2. In some aspects, any one of the optional linkers each independently have a length of from 0 amino acids to about 50 amino acids. In some aspects, any one of the optional linkers each independently have a length of from 5 amino acids to about 40 amino acids.

[5795] In some aspects, any one of the optional linkers are non-immunogenic. In some aspects, any one of the optional linkers do not contain a consensus T cell epitope.

[5796] In some aspects, any of Ln comprises an amino acid sequence of G or A, or an amino acid sequence at least 65%, at least 70%, at least 75%, at least 80%, at least 85%, at least 90%, at least 95%, at least 99%, or 100% identical to amino acid sequence GSS or ASG, or an amino acid sequence at least 65%, at least 70%, at least 75%, at least 80%, at least 85%, at least 90%, at least 95%, at least 99%, or 100% identical to any one of SEQ ID NOs: 333-373 or 967-971. In some aspects. Ln comprises an amino acid sequence at least 65%, at least 70%, at least 75%, at least 80%, at least 85%, at least 90%, at least 95%, at least 99%, or 100% identical to any one of SEQ ID NOs: 333-345 or 967-971.

[5797] In some aspects, the antigen binding polypeptides provided herein have a structure, from amino-terminus to carboxy-terminus, represented by:
[5798] VL1-L1-VL2-L2-VH2-L3-VH1;
[5799] VL1-L1-VH2-L2-VL2-L3-VH1;
[5800] VH1-L1-VH2-L2-VL2-L3-VL1; or
[5801] VH1-L1-VL2-L2-VH2-L3-VL1;
[5802] wherein:
[5803] VL1 is a first immunoglobulin light chain variable region that specifically binds to (i) a tumor-associated antigen (TAA), (ii) an infectious disease antigen that is not a sarbecovirus antigen, or (iii) an other-pathology antigen;
[5804] VL2 is a second immunoglobulin light chain variable region that specifically binds to (i) a tumor-associated antigen (TAA), (ii) an infectious disease antigen that is not a sarbecovirus antigen, or (iii) an other-pathology antigen;
[5805] VH1 is a first immunoglobulin heavy chain variable region that specifically binds to (i) a tumor-associated antigen (TAA), (ii) an infectious disease antigen that is not a sarbecovirus antigen, or (iii) an other-pathology antigen;
[5806] VH2 is a second immunoglobulin heavy chain variable region that specifically binds to (i) a tumor-associated antigen (TAA), (ii) an infectious disease antigen that is not a sarbecovirus antigen, or (iii) an other-pathology antigen; and
[5807] L1-L3 are optional amino acid linkers.

[5808] In any aspect shown herein as a structure from amino terminus to carboxy terminus, and with binding pairs selected from VL and/or VH or other structural regions such as CH2, CH3, when shown without a specific linker such as L1, L2, etc., such linkers are optionally present in such structures between each designated subsequence VL, VH, etc.

[5809] In some aspects, the TAA is selected from the group consisting of 5′-nucleotidase, 5T4, A2AR, activin receptor-like kinase 1, adenocarcinoma antigen, ADRB3, AFP, AKAP-4, ALK, alpha-fetoprotein, androgenreceptor, angiopoietin 2, AOC3, APRIL, ATPDase, AXL, B7-4, B7DC, B7H1, B7H2, B7H3, B7H4, B7H5, B7H6, B7H7, B7RP1, BAFF, BAFFR, BCMA, bcr-abl, BlyS, BORIS, BST2, BTK, BTLA, C3, C5, C5a, C5a receptor, CA-125, CAIX, CanAg (a glycoform of MUC1), CCL11, CCL15, CCL17, CCL19, CCL2, CCL20, CCL21, CCL25, CCL3, CCL4, CCL5, CCL7, CCL8, CCR2, CCR3, CCR4, CCR5, CD11, CD11a, CD123, CD125, CD133, CD134, CD137, CD137L, CD147, CD15, CD154, CD160, CD16A, CD171, CD179a, CD18, CD184, CD19, CD2, CD20, CD200, CD22, CD221, CD23, CD24, CD242, CD25, CD27, CD272, CD276, CD278, CD279, CD28, CD3, CD30, CD300LF, CD319, CD33, CD37, CD38, CD39, CD38, CD4, CD40, CD40L, CD41, CD44v6, CD45, CD47, CD49B, CD5, CD51, CD52, CD54, CD56, CD6, CD62L, CD7, CD70, CD72, CD74, CD79a, CD79b, CD80, CD86, CD97, CEA, CEACAM5, claudin 18 isoform 2, CLDN6, CLEC12A, CLEC9, CLEC91, CLL-1, cMet, coagulation factor III, CRTH2, CS1, CSF-1, CSFIR, CSF-2, CSF-3, CTGF, CTLA4, CXCL1, CXCL12, CXCL13, CXCL2, CXCL4, CXCR3, CXORF61, CyclinB1, CYP1B1, dendritic cell-associated lectin 2, DLL3, DLL4, DNGR-1, DR5, E7, E-cadherin, EGFL7, EGFR, EGFRVIII, ELF2M, EMR2, endoglin, ENTPD1, EpCAM, EphA2, EPHA3, ephrin receptor A3, EphrinB2, episialin, ERBB2 (Her2/neu), ERBB3, ERG (TMPRSS2-ETS fusion gene), ETV6-AML, FAP, FCAR, FCER1, FCER1A, FCER2, FCRL5, FGF 23, FGFR, FGFR2, fibronectin extra domain-B, FLAP, FLT3, folate hydrolase, folate receptor 1, folate receptor alpha, folate receptor beta, FOLH1, Fos-relatedantigen1, Frizzled receptor, Fucosyl GM1, GD2, GD3, gelatinase B, Gi24, GITR, GITRL, GloboH, Glutamate carboxypeptidase II, glypican 3, GM3, GP100, GPC1, GPC2, GPC3, gplOO, GPNMB, GPR20, GPR5, GPRC5D, growth differentiation factor 8, GUCY2C, HAVCR1, HER1, HER2, HER3, HGF, HGFR, HHLA2, histone complex, HLA-DR, HMGB1, HMWMAA, HPVE6, hTERT, human telomerase reverse transcriptase, HVEM, ICAM-1, ICOS, ICOSL, IDO, IFNa, IgE, IGF-1, IGF1R, IGF-2, IGF-I receptor, IGLL1, IL1, IL10, IL12, IL13, IL13Ra2, IL-13Ra2, IL13Ra1, IL15, IL17, IL-17A, IL-17AF, IL-17F, IL17Rb, IL18, IL1B, IL1F10, IL-1a, IL-1B, IL2, IL-20, IL22, IL23, IL-23A, IL25, IL2Rbeta, IL-3 receptor, IL-31 receptor A, IL33, IL35, IL4, IL4Ra, IL5, IL5R, IL6, IL7, IL7Ra, IL8, IL9, IL9R, IL1A, IL-llRa, integrin α4, integrin α4 β7, integrin α5β1, integrin αIIbβ3, integrin αvβ3, integrin β7, interleukin 36 receptor IL1RAP, interleukin 36 receptor IL1RL2, intestinal carboxy lesterase, ITGB4, ITK, KIR, KIR2D, KIT, LAG3, LAGE-1a, LAIR1, LAMP1, LCK, legumain, leptin. LewisY, LILRA2, LIV-1, LMP2, LOXL2, LPFS2, LRRC15, LY6K, LY75, LYPD3, MAD-CT-1, MAD-CT-2, MAGEA1, MAGE-A1, MCAM, MCP-1, MelanA/MART1, mesothelin, MHC classII, MIF, ML-IAP, MS4A1, MST1R (RON), MUC1, MUC-1, MUC16, MUC-16, MUC5AC, muthsp70-2, MYCN, NA17, NCA-90) granulocyte antigen, NCAM, NCR3LG1, nectin-4, NGNA ganglioside, NKG2A, NKG2D, NKp46, Notch 1, Notch receptor, NRP1, NTPDase-1, NY-BR-1, NY-ESO-1, o-acetyl-GD2, OR51E2, OX40), OX40L, OY-TES1, p53, p53mutant, PANX3, PAP, PAX3, PAX5, PCDC1, PCDP1, PCTA-1/Galectin8, PD-1, PDGFRA, PDGFR-beta, PD-L1, PD-L2, phosphate-sodium co-transporter, phosphatidylserine, PLAC1, polysialic acid, PROM1, prostase, prostein, PRSS21, PSCA, PSMA, PTK7, RAGE-1, RANKL. Ras mutant, rhIL1O, RhoC, root plate-specific spondin 3, ROR1, ROR2, RTN4, RU1, RU2, S152, sarcoma translocation breakpoints, SART3, scatter factor receptor kinase, SDC1, SIRPalpha, SISP1, SLAMF7, SLC, sLe, SLITRK6, spermprotein17, SPG64, sphingosine-1-phosphate, SSEA-4, SSX2, ST2, STEAP1, STEAP2, surviving and telomerase, Syk kinase, T14, TACI, TAG72, TARP, T-cell receptor, TCRβ, TDO, TEM1/CD248, TEM7R, tenascin C, TGFBETA, TGF-β1, TGF-β2, TGS5, the extracellular portion of the APRIL protein, Tie2, TIGIT, TIM3, TLR, TLR2, TLR4, TLR5, TLR9, TMEF1, TnAg, TNF, TNFa, TNFR superfamily member 4, TNFRSF7, Tp55, TRAC, TRAIL-R1, TRAIL-R2, TRAP, TREM1, TROP2, TRP-2, TSHR, TSLP, TSLPR, tumor antigen CTAA16.88, TWEAK, tyrosinase, TYRPI glycoprotein 75, UPK2, VAP-1, VEGF, VEGFA, VEGFR-1, VEGFR2, vimentin, VISTA, Vstm3, WT1, WUCAM, and XAGE1.

[5810] In some aspects, the antigen binding polypeptides provided herein comprise a VL1 comprising a light chain complementarity determining region 1 (LCDR1), LCDR2, and/or LCDR3 of an antibody selected from the group consisting of losatuxizumab vedotin, utomilumab, urelumab, oleclumab, naptumomab estafenatox, ascrinvacumab, pintumomab, tacatuzumab tetraxetan, nesvacumab, vanucizumab, timolumab, vapaliximab, vepalimomab, enapotamab vedotin, ianalumab, belimumab, tabalumab, tibulizumab, belantamab mafodotin, teclistamab, teclistamab, detumomab, nacolomab tafenatox, eculizumab, lendalizumab, pexelizumab, pozelimab, ravulizumab, tesidolumab, vilobelimab, abagovomab, igovomab, oregovomab, sofituzumab vedotin, cantuzumab mertansine, cantuzuma bravtansine, girentuximab, altumomab pentetate, arcitumomab, besilesomab, bertilimumab, plozalizumab, mogamulizumab, leronlimab, PRO140, rovelizumab, rovelizumab, talacotuzumab, benralizumab, tavolimab, vonlerolizumab, gavilimomab, ziralimumab, fanolesomab, ipilimumab, ruplizumab, toralizumab, dapirolizumab pegol, toralizumab, dapirolizumab pegol, ruplizumab, blinatumomab, inebilizumab, loncastuximab tesirine, SGN-CD19A, tafasitamab, taplitumomab paptox, XMAB-5574, Budoprutug, Obexelimab, duvortuxizumab, englumafusp alfa, Emfizatamab, zeripatamig, siplizumab, blontuvetmab, FBTA05, ibritumomab tiuxetan, obinutuzumab, ocaratuzumab, ocrelizumab, ofatumumab, rituximab, tositumomab, ublituximab, veltuzumab, divozilimab, eramkafusp alfa, ripertamab, zuberitamab, glofitamab, nofetumomab merpentan, samalizumab, imvotamab, odronextamab, plamotamab, bectumomab, inotuzumab ozogamicin, moxetumomab pasudotox, pinatuzumab vedotin, gomiliximab, lumiliximab, inolimomab, inolimomab, daclizumab, camidanluma btesirine, basiliximab, varlilumab, omburtamab, enoblituzumab, vopratelimab, lulizumabpegol, TGN1412, muromonab-CD3, otelixizumab, teplizumab, visilizumab, epcoritamab, epcoritamab, brentuximab vedotin, iratumumab, azintuxizumab vedotin, gemtuzumab ozogamicin, lintuzumab, vadastuximab talirine, naratuximab emtansine, otlertuzumab, lilotomab satetraxetan, tetulomab, daratumumab, isatuximab, foralumab, mosunetuzumab, mosunctuzumab, cedelizumab, ibalizumab, keliximab, priliximab, tregalizumab, zanolimumab, bleselumab, iscalimab, lucatumumab, ravagalimab, selicrelumab, teneliximab, vanalimab, abciximab, bivatuzumab, iomab-B, telimomab aritox, zolimomab aritox, abituzumab, intetumumab, alemtuzumab, tamtuvetmab, lorvotuzumab mertansine, itolizumab, cusatuzumab, vorsetuzumab mafodotin, milatuzumab, iladatuzumab vedotin, polatuzumab vedotin, galiximab, cibisatamab, zolbetuximab, naxitamab, tisotumab vedotin, olendalizumab, pamrevlumab, lacnotuzumab, cabiralizumab, emactuzumab, axatilimab, gimsilumab, lenzilumab, namilumab, tremelimumab, ulocuplumab, tepoditamab, rovalpituzumab tesirine, tarlatamab, demcizumab, navicixizumab, drozitumab, parsatuzumab, depatuxizumab mafodotin, modotuximab, carotuximab, adecatumumab, adecatumumab, oportuzumab monatox, solitomab, tucotuzumab celmoleukin, edrecolomab, catumaxomab, ifabotuzumab, fibatuzumab, zalutumumab, panitumumab, cetuximab, futuximab, imgatuzumab, laprituximab emtansine, matuzumab, necitumumab, nimotuzumab, tomuzotuximab, amivantamab, amivantamab, epitumomab cituxetan, sontuzumab, duligotuzumab, elgemtumab, lumretuzumab, patritumab, seribantumab, zenocutuzumab, sibrotuzumab, burosumab, aprutumab ixadotin, radretumab, pasotuxizumab, farletuzumab, mirvetuximab soravtansine, vantictumab, TRBS07, 3F8, dinutuximab, dinutuximab beta, ecromeximab, mitumomab, andecaliximab, capromab, codrituzumab, glembatumumab vedotin, talquetamab, talquetamab, trevogrumab, indusatumab vedotin, ficlatuzumab, rilotumumab, zatuximab, pentuzimab, pentuzimab, margetuximab, timigutuzumab, trastuzumab, trastuzumab duocarmazine, trastuzumab emtansine, gancotamab, pertuzumab, ertumaxomab, emibetuzumab, telisotuzumab, telisotuzumab vedotin, derlotuximab biotin, apolizumab, onartuzumab, bersanlimab, enlimomabpegol, rontalizumab, sifalimumab, talizumab, ganitumab, istiratumab, robatumumab, teprotumumab, figitumumab, ganitumab, istiratumab, robatumumab, teprotumumab, cixutumumab, dalotuzumab, xentuzumab, dusigitumab, canakinumab, ustekinumab, ustekinumab, ustekinumab, briakinumab, briakinumab, abrezekimab, lebrikizumab, romilkimab, TNX-650, tralokinumab, anrukinzumab, brodalumab, ixekizumab, netakimab, perakizumab, secukinumab, vunakizumab, afasevikumab, afasevikumab, bimekizumab, bimekizumab, remtolumab, bermckimab, lutikizumab, lutikizumab, gevokizumab, cergutuzumab amunaleukin, fletikumab, fezakinumab, brazikumab, guselkumab, mirikizumab, tildrakizumab, risankizumab, flotetuzumab, nemolizumab, pascolizumab, dupilumab, mepolizumab, reslizumab, clazakizumab, elsilimomab, olokizumab, sarilumab, siltuximab, sirukumab, vobarilizumab, tocilizumab, SA237, satralizumab, enokizumab, prezalizumab, natalizumab, abrilumab, abrilumab, vedolizumab, volociximab, tadocizumab, etaracizumab, etrolizumab, spesolimab, vatelizumab, erlizumab, lirilumab, relatlimab, cBR96-doxorubicinimmunoconjugate, odulimomab, efalizumab, ladiratuzumab vedotin, simtuzumab, samrotamab vedotin, asclizumab, lupartumab amadotin, imalumab, carlumab, imaprelimab, amatuximab, amatuximab, anetumab ravtansine, narnatumab, clivatuzumab tetraxetan, pemtumomab, gatipotuzumab, ensituximab, lemalesomab, sulesomab, enfortumab vedotin, racotumomab, monalizumab, brontictuzumab, tarextumab, vesencumab, oxelumab, gilvetmab, tislelizumab, dostarlimab, BCD-100, nivolumab, PDR001, pembrolizumab, pidilizumab, retifanlimab, spartalizumab, sintilimab, cemiplimab, olaratumab, tovetumab, rinucumab, atezolizumab, avelumab, durvalumab, lifastuzumab vedotin, bavituximab, acapatamab, capromab, rosopatamab, nezastomig, pasotuxizumab, pelgifatamab, voxalatamab, cofetuzumab pelidotin, denosumab, rosmantuzumab, cirmtuzumab, atinumab, indatuximab ravtansine, elotuzumab, sirtratumab vedotin, sonepcizumab, vandortuzumab vedotin, minretumomab, satumomab pendetide, maslimomab, ontuxizumab, tenatumomab, fresolimumab, metelimumab, lerdelimumab, tezepelumab, etigilimab, tiragotumab, placulumab, prezalumab, infliximab, nerelimomab, ozoralizumab, adalimumab, afelimomab, certolizumab pegol, golimumab, mapatumumab, conatumumab, lexatumumab, tigatuzumab, sacituzumab govitecan, votumumab, pogalizumab, letolizumab, pankomab, anatumomab mafenatox, enavatuzumab, flanvotumab, brolucizumab, ranibizumab, varisacumab, bevacizumab, faricimab, icrucumab, alacizumab pegol, ramucirumab, pritumumab, and onvatilimab.

[5811] In some aspects, the antigen binding polypeptides provided herein comprise a VL2 comprising a light chain complementarity determining region 1 (LCDR1), LCDR2, and/or LCDR3 of an antibody selected from the group consisting of losatuxizumab vedotin, utomilumab, urelumab, oleclumab, naptumomab estafenatox, ascrinvacumab, pintumomab, tacatuzumab tetraxetan, nesvacumab, vanucizumab, timolumab, vapaliximab, vepalimomab, enapotamab vedotin, ianalumab, belimumab, tabalumab, tibulizumab, belantamab mafodotin, teclistamab, teclistamab, detumomab, nacolomab tafenatox, eculizumab, lendalizumab, pexelizumab, pozelimab, ravulizumab, tesidolumab, vilobelimab, abagovomab, igovomab, oregovomab, sofituzumab vedotin, cantuzumab mertansine, cantuzuma bravtansine, girentuximab, altumomab pentetate, arcitumomab, besilesomab, bertilimumab, plozalizumab, mogamulizumab, leronlimab, PRO140, rovelizumab, rovelizumab, talacotuzumab, benralizumab, tavolimab, vonlerolizumab, gavilimomab, ziralimumab, fanolesomab, ipilimumab, ruplizumab, toralizumab, dapirolizumab pegol, toralizumab, dapirolizumab pegol, ruplizumab, blinatumomab, inebilizumab, loncastuximab tesirine, SGN-CD19A, tafasitamab, taplitumomab paptox, XMAB-5574, Budoprutug, Obexelimab, duvortuxizumab, englumafusp alfa, Emfizatamab, zeripatamig, siplizumab, blontuvetmab, FBTA05, ibritumomab tiuxetan, obinutuzumab, ocaratuzumab, ocrelizumab, ofatumumab, rituximab, tositumomab, ublituximab, veltuzumab, divozilimab, eramkafusp alfa, ripertamab, zuberitamab, glofitamab, nofetumomab merpentan, samalizumab, imvotamab, odronextamab, plamotamab, bectumomab, inotuzumab ozogamicin, moxetumomab pasudotox, pinatuzumab vedotin, gomiliximab, lumiliximab, inolimomab, inolimomab, daclizumab, camidanluma btesirine, basiliximab, varlilumab, omburtamab, enoblituzumab, vopratelimab, lulizumabpegol, TGN1412, muromonab-CD3, otelixizumab, teplizumab, visilizumab, epcoritamab, epcoritamab, brentuximab vedotin, iratumumab, azintuxizumab vedotin, gemtuzumab ozogamicin, lintuzumab, vadastuximab talirine, naratuximab emtansine, otlertuzumab, lilotomab satetraxetan, tetulomab, daratumumab, isatuximab, foralumab, mosunetuzumab, mosunetuzumab, cedelizumab, ibalizumab, keliximab, priliximab, tregalizumab, zanolimumab, bleselumab, iscalimab, lucatumumab, ravagalimab, selicrelumab, teneliximab, vanalimab, abciximab, bivatuzumab, iomab-B, telimomab aritox, zolimomab aritox, abituzumab, intetumumab, alemtuzumab, tamtuvetmab, lorvotuzumab mertansine, itolizumab, cusatuzumab, vorsetuzumab mafodotin, milatuzumab, iladatuzumab vedotin, polatuzumab vedotin, galiximab, cibisatamab, zolbetuximab, naxitamab, tisotumab vedotin, olendalizumab, pamrevlumab, lacnotuzumab, cabiralizumab, emactuzumab, axatilimab, gimsilumab, lenzilumab, namilumab, tremelimumab, ulocuplumab, tepoditamab, rovalpituzumab tesirine, tarlatamab, demcizumab, navicixizumab, drozitumab, parsatuzumab, depatuxizumab mafodotin, modotuximab, carotuximab, adecatumumab, adecatumumab, oportuzumab monatox, solitomab, tucotuzumab celmoleukin, edrecolomab, catumaxomab, ifabotuzumab, fibatuzumab, zalutumumab, panitumumab, cetuximab, futuximab, imgatuzumab, laprituximab emtansine, matuzumab, necitumumab, nimotuzumab, tomuzotuximab, amivantamab, amivantamab, epitumomab cituxetan, sontuzumab, duligotuzumab, elgemtumab, lumretuzumab, patritumab, seribantumab, zenocutuzumab, sibrotuzumab, burosumab, aprutumab ixadotin, radretumab, pasotuxizumab, farletuzumab, mirvetuximab soravtansine, vantictumab, TRBS07, 3F8, dinutuximab, dinutuximab beta, ecromeximab, mitumomab, andecaliximab, capromab, codrituzumab, glembatumumab vedotin, talquetamab, talquetamab, trevogrumab, indusatumab vedotin, ficlatuzumab, rilotumumab, zatuximab, pentuzimab, pentuzimab, margetuximab, timigutuzumab, trastuzumab, trastuzumab duocarmazine, trastuzumab emtansine, gancotamab, pertuzumab, crtumaxomab, emibetuzumab, telisotuzumab, telisotuzumab vedotin, derlotuximab biotin, apolizumab, onartuzumab, bersanlimab, enlimomabpegol, rontalizumab, sifalimumab, talizumab, ganitumab, istiratumab, robatumumab, teprotumumab, figitumumab, ganitumab, istiratumab, robatumumab, teprotumumab, cixutumumab, dalotuzumab, xentuzumab, dusigitumab, canakinumab, ustekinumab, ustekinumab, ustekinumab, briakinumab, briakinumab, abrezekimab, lebrikizumab, romilkimab, TNX-650, tralokinumab, anrukinzumab, brodalumab, ixekizumab, netakimab, perakizumab, secukinumab, vunakizumab, afasevikumab, afasevikumab, bimekizumab, bimekizumab, remtolumab, bermekimab, lutikizumab, lutikizumab, gevokizumab, cergutuzumab amunaleukin, fletikumab, fezakinumab, brazikumab, guselkumab, mirikizumab, tildrakizumab, risankizumab, flotetuzumab, nemolizumab, pascolizumab, dupilumab, mepolizumab, reslizumab, clazakizumab, elsilimomab, olokizumab, sarilumab, siltuximab, sirukumab, vobarilizumab, tocilizumab, SA237, satralizumab, enokizumab, prezalizumab, natalizumab, abrilumab, abrilumab, vedolizumab, volociximab, tadocizumab, etaracizumab, etrolizumab, spesolimab, vatelizumab, erlizumab, lirilumab, relatlimab, cBR96-doxorubicinimmunoconjugate, odulimomab, efalizumab, ladiratuzumab vedotin, simtuzumab, samrotamab vedotin, aselizumab, lupartumab amadotin, imalumab, carlumab, imaprelimab, amatuximab, amatuximab, anctumab ravtansine, narnatumab, clivatuzumab tetraxetan, pemtumomab, gatipotuzumab, ensituximab, lemalesomab, sulesomab, enfortumab vedotin, racotumomab, monalizumab, brontictuzumab, tarextumab, vesencumab, oxelumab, gilvetmab, tislelizumab, dostarlimab, BCD-100, nivolumab, PDR001, pembrolizumab, pidilizumab, retifanlimab, spartalizumab, sintilimab, cemiplimab, olaratumab, tovetumab, rinucumab, atezolizumab, avelumab, durvalumab, lifastuzumab vedotin, bavituximab, acapatamab, capromab, rosopatamab, nezastomig, pasotuxizumab, pelgifatamab, voxalatamab, cofetuzumab pelidotin, denosumab, rosmantuzumab, cirmtuzumab, atinumab, indatuximab ravtansinc, elotuzumab, sirtratumab vedotin, sonepcizumab, vandortuzumab vedotin, minretumomab, satumomab pendetide, maslimomab, ontuxizumab, tenatumomab, fresolimumab, metelimumab, lerdelimumab, tezepelumab, etigilimab, tiragotumab, placulumab, prezalumab, infliximab, nerelimomab, ozoralizumab, adalimumab, afelimomab, certolizumab pegol, golimumab, mapatumumab, conatumumab, lexatumumab, tigatuzumab, sacituzumab govitecan, votumumab, pogalizumab, letolizumab, pankomab, anatumomab mafenatox, enavatuzumab, flanvotumab, brolucizumab, ranibizumab, varisacumab, bevacizumab, faricimab, icrucumab, alacizumab pegol, ramucirumab, pritumumab, and onvatilimab.

[5812] In some aspects, the antigen binding polypeptides provided herein comprise a VH1 comprising a heavy chain complementarity determining region 1 (HCDR1), HCDR2, and/or HCDR3 of an antibody selected from the group consisting of losatuxizumab vedotin, utomilumab, urelumab, oleclumab, naptumomab estafenatox, ascrinvacumab, pintumomab, tacatuzumab tetraxetan, nesvacumab, vanucizumab, timolumab, vapaliximab, vepalimomab, enapotamab vedotin, ianalumab, belimumab, tabalumab, tibulizumab, belantamab mafodotin, teclistamab, teclistamab, detumomab, nacolomab tafenatox, eculizumab, lendalizumab, pexelizumab, pozelimab, ravulizumab, tesidolumab, vilobelimab, abagovomab, igovomab, oregovomab, sofituzumab vedotin, cantuzumab mertansine, cantuzuma bravtansine, girentuximab, altumomab pentetate, arcitumomab, besilesomab, bertilimumab, plozalizumab, mogamulizumab, leronlimab, PRO140, rovelizumab, rovelizumab, talacotuzumab, benralizumab, tavolimab, vonlerolizumab, gavilimomab, ziralimumab, fanolesomab, ipilimumab, ruplizumab, toralizumab, dapirolizumab pegol, toralizumab, dapirolizumab pegol, ruplizumab, blinatumomab, inebilizumab, loncastuximab tesirine, SGN-CD19A, tafasitamab, taplitumomab paptox, XMAB-5574, Budoprutug, Obexelimab, duvortuxizumab, englumafusp alfa, Emfizatamab, zeripatamig, siplizumab, blontuvetmab, FBTA05, ibritumomab tiuxetan, obinutuzumab, ocaratuzumab, ocrelizumab, ofatumumab, rituximab, tositumomab, ublituximab, veltuzumab, divozilimab, eramkafusp alfa, ripertamab, zuberitamab, glofitamab, nofetumomab merpentan, samalizumab, imvotamab, odronextamab, plamotamab, bectumomab, inotuzumab ozogamicin, moxetumomab pasudotox, pinatuzumab vedotin, gomiliximab, lumiliximab, inolimomab, inolimomab, daclizumab, camidanluma btesirine, basiliximab, varlilumab, omburtamab, enoblituzumab, vopratelimab, lulizumabpegol, TGN1412, muromonab-CD3, otelixizumab, teplizumab, visilizumab, epcoritamab, epcoritamab, brentuximab vedotin, iratumumab, azintuxizumab vedotin, gemtuzumab ozogamicin, lintuzumab, vadastuximab talirine, naratuximab emtansine, otlertuzumab, lilotomab satetraxetan, tetulomab, daratumumab, isatuximab, foralumab, mosunetuzumab, mosunetuzumab, cedelizumab, ibalizumab, keliximab, priliximab, tregalizumab, zanolimumab, bleselumab, iscalimab, lucatumumab, ravagalimab, selicrelumab, teneliximab, vanalimab, abciximab, bivatuzumab, iomab-B, telimomab aritox, zolimomab aritox, abituzumab, intetumumab, alemtuzumab, tamtuvetmab, lorvotuzumab mertansine, itolizumab, cusatuzumab, vorsetuzumab mafodotin, milatuzumab, iladatuzumab vedotin, polatuzumab vedotin, galiximab, cibisatamab, zolbetuximab, naxitamab, tisotumab vedotin, olendalizumab, pamrevlumab, lacnotuzumab, cabiralizumab, emactuzumab, axatilimab, gimsilumab, lenzilumab, namilumab, tremelimumab, ulocuplumab, tepoditamab, rovalpituzumab tesirine, tarlatamab, demcizumab, navicixizumab, drozitumab, parsatuzumab, depatuxizumab mafodotin, modotuximab, carotuximab, adecatumumab, adecatumumab, oportuzumab monatox, solitomab, tucotuzumab celmoleukin, edrecolomab, catumaxomab, ifabotuzumab, fibatuzumab, zalutumumab, panitumumab, cetuximab, futuximab, imgatuzumab, laprituximab emtansine, matuzumab, necitumumab, nimotuzumab, tomuzotuximab, amivantamab, amivantamab, epitumomab cituxetan, sontuzumab, duligotuzumab, elgemtumab, lumretuzumab, patritumab, seribantumab, zenocutuzumab, sibrotuzumab, burosumab, aprutumab ixadotin, radretumab, pasotuxizumab, farletuzumab, mirvetuximab soravtansine, vantictumab, TRBS07, 3F8, dinutuximab, dinutuximab beta, ecromeximab, mitumomab, andecaliximab, capromab, codrituzumab, glembatumumab vedotin, talquetamab, talquetamab, trevogrumab, indusatumab vedotin, ficlatuzumab, rilotumumab, zatuximab, pentuzimab, pentuzimab, margetuximab, timigutuzumab, trastuzumab, trastuzumab duocarmazine, trastuzumab emtansine, gancotamab, pertuzumab, ertumaxomab, emibetuzumab, telisotuzumab, telisotuzumab vedotin, derlotuximab biotin, apolizumab, onartuzumab, bersanlimab, enlimomabpegol, rontalizumab, sifalimumab, talizumab, ganitumab, istiratumab, robatumumab, teprotumumab, figitumumab, ganitumab, istiratumab, robatumumab, teprotumumab, cixutumumab, dalotuzumab, xentuzumab, dusigitumab, canakinumab, ustekinumab, ustekinumab, ustekinumab, briakinumab, briakinumab, abrezekimab, lebrikizumab, romilkimab, TNX-650, tralokinumab, anrukinzumab, brodalumab, ixekizumab, netakimab, perakizumab, secukinumab, vunakizumab, afasevikumab, afasevikumab, bimekizumab, bimekizumab, remtolumab, bermekimab, lutikizumab, lutikizumab, gevokizumab, cergutuzumab amunaleukin, fletikumab, fezakinumab, brazikumab, guselkumab, mirikizumab, tildrakizumab, risankizumab, flotetuzumab, nemolizumab, pascolizumab, dupilumab, mepolizumab, reslizumab, clazakizumab, elsilimomab, olokizumab, sarilumab, siltuximab, sirukumab, vobarilizumab, tocilizumab, SA237, satralizumab, enokizumab, prezalizumab, natalizumab, abrilumab, abrilumab, vedolizumab, volociximab, tadocizumab, etaracizumab, etrolizumab, spesolimab, vatelizumab, erlizumab, lirilumab, relatlimab, cBR96-doxorubicinimmunoconjugate, odulimomab, efalizumab, ladiratuzumab vedotin, simtuzumab, samrotamab vedotin, aselizumab, lupartumab amadotin, imalumab, carlumab, imaprelimab, amatuximab, amatuximab, anetumab ravtansine, narnatumab, clivatuzumab tetraxetan, pemtumomab, gatipotuzumab, ensituximab, lemalesomab, sulesomab, enfortumab vedotin, racotumomab, monalizumab, brontictuzumab, tarextumab, vesencumab, oxelumab, gilvetmab, tislelizumab, dostarlimab, BCD-100, nivolumab, PDR001, pembrolizumab, pidilizumab, retifanlimab, spartalizumab, sintilimab, cemiplimab, olaratumab, tovetumab, rinucumab, atezolizumab, avelumab, durvalumab, lifastuzumab vedotin, bavituximab, acapatamab, capromab, rosopatamab, nezastomig, pasotuxizumab, pelgifatamab, voxalatamab, cofetuzumab pelidotin, denosumab, rosmantuzumab, cirmtuzumab, atinumab, indatuximab ravtansine, elotuzumab, sirtratumab vedotin, sonepcizumab, vandortuzumab vedotin, minretumomab, satumomab pendetide, maslimomab, ontuxizumab, tenatumomab, fresolimumab, metelimumab, lerdelimumab, tezepelumab, etigilimab, tiragotumab, placulumab, prezalumab, infliximab, nerelimomab, ozoralizumab, adalimumab, afelimomab, certolizumab pegol, golimumab, mapatumumab, conatumumab, lexatumumab, tigatuzumab, sacituzumab govitecan, votumumab, pogalizumab, letolizumab, pankomab, anatumomab mafenatox, enavatuzumab, flanvotumab, brolucizumab, ranibizumab, varisacumab, bevacizumab, faricimab, icrucumab, alacizumab pegol, ramucirumab, pritumumab, and onvatilimab.

[5813] In some aspects, the antigen binding polypeptides provided herein comprise a VH2 comprising a heavy chain complementarity determining region 1 (HCDR1), HCDR2, and/or HCDR3 of an antibody selected from the group consisting of losatuxizumab vedotin, utomilumab, urelumab, oleclumab, naptumomab estafenatox, ascrinvacumab, pintumomab, tacatuzumab tetraxetan, nesvacumab, vanucizumab, timolumab, vapaliximab, vepalimomab, enapotamab vedotin, ianalumab, belimumab, tabalumab, tibulizumab, belantamab mafodotin, teclistamab, teclistamab, detumomab, nacolomab tafenatox, eculizumab, lendalizumab, pexelizumab, pozelimab, ravulizumab, tesidolumab, vilobelimab, abagovomab, igovomab, oregovomab, sofituzumab vedotin, cantuzumab mertansine, cantuzuma bravtansine, girentuximab, altumomab pentetate, arcitumomab, besilesomab, bertilimumab, plozalizumab, mogamulizumab, leronlimab, PRO140, rovelizumab, rovelizumab, talacotuzumab, benralizumab, tavolimab, vonlerolizumab, gavilimomab, ziralimumab, fanolesomab, ipilimumab, ruplizumab, toralizumab, dapirolizumab pegol, toralizumab, dapirolizumab pegol, ruplizumab, blinatumomab, inebilizumab, loncastuximab tesirine, SGN-CD19A, tafasitamab, taplitumomab paptox, XMAB-5574, Budoprutug, Obexelimab, duvortuxizumab, englumafusp alfa, Emfizatamab, zeripatamig, siplizumab, blontuvetmab, FBTA05, ibritumomab tiuxetan, obinutuzumab, ocaratuzumab, ocrelizumab, ofatumumab, rituximab, tositumomab, ublituximab, veltuzumab, divozilimab, eramkafusp alfa, ripertamab, zuberitamab, glofitamab, nofetumomab merpentan, samalizumab, imvotamab, odronextamab, plamotamab, bectumomab, inotuzumab ozogamicin, moxetumomab pasudotox, pinatuzumab vedotin, gomiliximab, lumiliximab, inolimomab, inolimomab, daclizumab, camidanluma btesirine, basiliximab, varlilumab, omburtamab, enoblituzumab, vopratelimab, lulizumabpegol, TGN1412, muromonab-CD3, otelixizumab, teplizumab, visilizumab, epcoritamab, epcoritamab, brentuximab vedotin, iratumumab, azintuxizumab vedotin, gemtuzumab ozogamicin, lintuzumab, vadastuximab talirine, naratuximab emtansine, otlertuzumab, lilotomab satetraxetan, tetulomab, daratumumab, isatuximab, foralumab, mosunetuzumab, mosunetuzumab, cedelizumab, ibalizumab, keliximab, priliximab, tregalizumab, zanolimumab, bleselumab, iscalimab, lucatumumab, ravagalimab, selicrelumab, teneliximab, vanalimab, abciximab, bivatuzumab, iomab-B, telimomab aritox, zolimomab aritox, abituzumab, intetumumab, alemtuzumab, tamtuvetmab, lorvotuzumab mertansine, itolizumab, cusatuzumab, vorsetuzumab mafodotin, milatuzumab, iladatuzumab vedotin, polatuzumab vedotin, galiximab, cibisatamab, zolbetuximab, naxitamab, tisotumab vedotin, olendalizumab, pamrevlumab, lacnotuzumab, cabiralizumab, emactuzumab, axatilimab, gimsilumab, lenzilumab, namilumab, tremelimumab, ulocuplumab, tepoditamab, rovalpituzumab tesirine, tarlatamab, demcizumab, navicixizumab, drozitumab, parsatuzumab, depatuxizumab mafodotin, modotuximab, carotuximab, adecatumumab, adecatumumab, oportuzumab monatox, solitomab, tucotuzumab celmoleukin, edrecolomab, catumaxomab, ifabotuzumab, fibatuzumab, zalutumumab, panitumumab, cetuximab, futuximab, imgatuzumab, laprituximab emtansine, matuzumab, necitumumab, nimotuzumab, tomuzotuximab, amivantamab, amivantamab, epitumomab cituxetan, sontuzumab, duligotuzumab, elgemtumab, lumretuzumab, patritumab, scribantumab, zenocutuzumab, sibrotuzumab, burosumab, aprutumab ixadotin, radretumab, pasotuxizumab, farletuzumab, mirvetuximab soravtansine, vantictumab, TRBS07, 3F8, dinutuximab, dinutuximab beta, ecromeximab, mitumomab, andecaliximab, capromab, codrituzumab, glembatumumab vedotin, talquetamab, talquetamab, trevogrumab, indusatumab vedotin, ficlatuzumab, rilotumumab, zatuximab, pentuzimab, pentuzimab, margetuximab, timigutuzumab, trastuzumab, trastuzumab duocarmazine, trastuzumab emtansine, gancotamab, pertuzumab, ertumaxomab, emibetuzumab, telisotuzumab, telisotuzumab vedotin, derlotuximab biotin, apolizumab, onartuzumab, bersanlimab, enlimomabpegol, rontalizumab, sifalimumab, talizumab, ganitumab, istiratumab, robatumumab, teprotumumab, figitumumab, ganitumab, istiratumab, robatumumab, teprotumumab, cixutumumab, dalotuzumab, xentuzumab, dusigitumab, canakinumab, ustekinumab, ustekinumab, ustekinumab, briakinumab, briakinumab, abrezekimab, lebrikizumab, romilkimab, TNX-650, tralokinumab, anrukinzumab, brodalumab, ixekizumab, netakimab, perakizumab, secukinumab, vunakizumab, afasevikumab, afasevikumab, bimekizumab, bimekizumab, remtolumab, bermekimab, lutikizumab, lutikizumab, gevokizumab, cergutuzumab amunaleukin, fletikumab, fezakinumab, brazikumab, guselkumab, mirikizumab, tildrakizumab, risankizumab, flotetuzumab, nemolizumab, pascolizumab, dupilumab, mepolizumab, reslizumab, clazakizumab, elsilimomab, olokizumab, sarilumab, siltuximab, sirukumab, vobarilizumab, tocilizumab, SA237, satralizumab, enokizumab, prezalizumab, natalizumab, abrilumab, abrilumab, vedolizumab, volociximab, tadocizumab, etaracizumab, etrolizumab, spesolimab, vatelizumab, erlizumab, lirilumab, relatlimab, cBR96-doxorubicinimmunoconjugate, odulimomab, efalizumab, ladiratuzumab vedotin, simtuzumab, samrotamab vedotin, aselizumab, lupartumab amadotin, imalumab, carlumab, imaprelimab, amatuximab, amatuximab, anetumab ravtansine, narnatumab, clivatuzumab tetraxetan, pemtumomab, gatipotuzumab, ensituximab, lemalesomab, sulesomab, enfortumab vedotin, racotumomab, monalizumab, brontictuzumab, tarextumab, vesencumab, oxelumab, gilvetmab, tislelizumab, dostarlimab, BCD-100, nivolumab, PDR001, pembrolizumab, pidilizumab, retifanlimab, spartalizumab, sintilimab, cemiplimab, olaratumab, tovetumab, rinucumab, atezolizumab, avelumab, durvalumab, lifastuzumab vedotin, bavituximab, acapatamab, capromab, rosopatamab, nezastomig, pasotuxizumab, pelgifatamab, voxalatamab, cofetuzumab pelidotin, denosumab, rosmantuzumab, cirmtuzumab, atinumab, indatuximab ravtansine, elotuzumab, sirtratumab vedotin, sonepcizumab, vandortuzumab vedotin, minretumomab, satumomab pendetide, maslimomab, ontuxizumab, tenatumomab, fresolimumab, metelimumab, lerdelimumab, tezepelumab, etigilimab, tiragotumab, placulumab, prezalumab, infliximab, nerelimomab, ozoralizumab, adalimumab, afelimomab, certolizumab pegol, golimumab, mapatumumab, conatumumab, lexatumumab, tigatuzumab, sacituzumab govitecan, votumumab, pogalizumab, letolizumab, pankomab, anatumomab mafenatox, enavatuzumab, flanvotumab, brolucizumab, ranibizumab, varisacumab, bevacizumab, faricimab, icrucumab, alacizumab pegol, ramucirumab, pritumumab, and onvatilimab.

[5814] In some aspects, the antigen binding polypeptides provided herein comprise a VL1 comprising a VL of an antibody selected from the group consisting of losatuxizumab vedotin, utomilumab, urelumab, oleclumab, naptumomab estafenatox, ascrinvacumab, pintumomab, tacatuzumab tetraxetan, nesvacumab, vanucizumab, timolumab, vapaliximab, vepalimomab, enapotamab vedotin, ianalumab, belimumab, tabalumab, tibulizumab, belantamab mafodotin, teclistamab, teclistamab, detumomab, nacolomab tafenatox, eculizumab, lendalizumab, pexelizumab, pozelimab, ravulizumab, tesidolumab, vilobelimab, abagovomab, igovomab, oregovomab, sofituzumab vedotin, cantuzumab mertansine, cantuzuma bravtansine, girentuximab, altumomab pentetate, arcitumomab, besilesomab, bertilimumab, plozalizumab, mogamulizumab, leronlimab, PRO140, rovelizumab, rovelizumab, talacotuzumab, benralizumab, tavolimab, vonlerolizumab, gavilimomab, ziralimumab, fanolesomab, ipilimumab, ruplizumab, toralizumab, dapirolizumab pegol, toralizumab, dapirolizumab pegol, ruplizumab, blinatumomab, inebilizumab, loncastuximab tesirine, SGN-CD19A, tafasitamab, taplitumomab paptox, XMAB-5574, Budoprutug, Obexelimab, duvortuxizumab, englumafusp alfa, Emfizatamab, zeripatamig, siplizumab, blontuvetmab, FBTA05, ibritumomab tiuxetan, obinutuzumab, ocaratuzumab, ocrelizumab, ofatumumab, rituximab, tositumomab, ublituximab, veltuzumab, divozilimab, eramkafusp alfa, ripertamab, zuberitamab, glofitamab, nofetumomab merpentan, samalizumab, imvotamab, odronextamab, plamotamab, bectumomab, inotuzumab ozogamicin, moxetumomab pasudotox, pinatuzumab vedotin, gomiliximab, lumiliximab, inolimomab, inolimomab, daclizumab, camidanluma btesirine, basiliximab, varlilumab, omburtamab, enoblituzumab, vopratelimab, lulizumabpegol, TGN1412, muromonab-CD3, otelixizumab, teplizumab, visilizumab, epcoritamab, epcoritamab, brentuximab vedotin, iratumumab, azintuxizumab vedotin, gemtuzumab ozogamicin, lintuzumab, vadastuximab talirine, naratuximab emtansine, otlertuzumab, lilotomab satetraxetan, tetulomab, daratumumab, isatuximab, foralumab, mosunctuzumab, mosunetuzumab, cedelizumab, ibalizumab, keliximab, priliximab, tregalizumab, zanolimumab, bleselumab, iscalimab, lucatumumab, ravagalimab, selicrelumab, teneliximab, vanalimab, abciximab, bivatuzumab, iomab-B, telimomab aritox, zolimomab aritox, abituzumab, intetumumab, alemtuzumab, tamtuvetmab, lorvotuzumab mertansine, itolizumab, cusatuzumab, vorsetuzumab mafodotin, milatuzumab, iladatuzumab vedotin, polatuzumab vedotin, galiximab, cibisatamab, zolbetuximab, naxitamab, tisotumab vedotin, olendalizumab, pamrevlumab, lacnotuzumab, cabiralizumab, emactuzumab, axatilimab, gimsilumab, lenzilumab, namilumab, tremelimumab, ulocuplumab, tepoditamab, rovalpituzumab tesirine, tarlatamab, demcizumab, navicixizumab, drozitumab, parsatuzumab, depatuxizumab mafodotin, modotuximab, carotuximab, adecatumumab, adecatumumab, oportuzumab monatox, solitomab, tucotuzumab celmoleukin, edrecolomab, catumaxomab, ifabotuzumab, fibatuzumab, zalutumumab, panitumumab, cetuximab, futuximab, imgatuzumab, laprituximab emtansine, matuzumab, necitumumab, nimotuzumab, tomuzotuximab, amivantamab, amivantamab, epitumomab cituxetan, sontuzumab, duligotuzumab, elgemtumab, lumretuzumab, patritumab, seribantumab, zenocutuzumab, sibrotuzumab, burosumab, aprutumab ixadotin, radretumab, pasotuxizumab, farletuzumab, mirvetuximab soravtansine, vantictumab, TRBS07, 3F8, dinutuximab, dinutuximab beta, ecromeximab, mitumomab, andecaliximab, capromab, codrituzumab, glembatumumab vedotin, talquetamab, talquetamab, trevogrumab, indusatumab vedotin, ficlatuzumab, rilotumumab, zatuximab, pentuzimab, pentuzimab, margetuximab, timigutuzumab, trastuzumab, trastuzumab duocarmazine, trastuzumab emtansine, gancotamab, pertuzumab, ertumaxomab, emibetuzumab, telisotuzumab, telisotuzumab vedotin, derlotuximab biotin, apolizumab, onartuzumab, bersanlimab, enlimomabpegol, rontalizumab, sifalimumab, talizumab, ganitumab, istiratumab, robatumumab, teprotumumab, figitumumab, ganitumab, istiratumab, robatumumab, teprotumumab, cixutumumab, dalotuzumab, xentuzumab, dusigitumab, canakinumab, ustekinumab, ustekinumab, ustekinumab, briakinumab, briakinumab, abrezekimab, lebrikizumab, romilkimab, TNX-650, tralokinumab, anrukinzumab, brodalumab, ixekizumab, netakimab, perakizumab, secukinumab, vunakizumab, afasevikumab, afasevikumab, bimekizumab, bimekizumab, remtolumab, bermckimab, lutikizumab, lutikizumab, gevokizumab, cergutuzumab amunaleukin, fletikumab, fezakinumab, brazikumab, guselkumab, mirikizumab, tildrakizumab, risankizumab, flotetuzumab, nemolizumab, pascolizumab, dupilumab, mepolizumab, reslizumab, clazakizumab, elsilimomab, olokizumab, sarilumab, siltuximab, sirukumab, vobarilizumab, tocilizumab, SA237, satralizumab, enokizumab, prezalizumab, natalizumab, abrilumab, abrilumab, vedolizumab, volociximab, tadocizumab, etaracizumab, etrolizumab, spesolimab, vatelizumab, crlizumab, lirilumab, relatlimab, cBR96-doxorubicinimmunoconjugate, odulimomab, efalizumab, ladiratuzumab vedotin, simtuzumab, samrotamab vedotin, aselizumab, lupartumab amadotin, imalumab, carlumab, imaprelimab, amatuximab, amatuximab, anetumab ravtansine, narnatumab, clivatuzumab tetraxetan, pemtumomab, gatipotuzumab, ensituximab, lemalesomab, sulcsomab, enfortumab vedotin, racotumomab, monalizumab, brontictuzumab, tarextumab, vesencumab, oxelumab, gilvetmab, tislelizumab, dostarlimab, BCD-100, nivolumab, PDR001, pembrolizumab, pidilizumab, retifanlimab, spartalizumab, sintilimab, cemiplimab, olaratumab, tovetumab, rinucumab, atezolizumab, avelumab, durvalumab, lifastuzumab vedotin, bavituximab, acapatamab, capromab, rosopatamab, nezastomig, pasotuxizumab, pelgifatamab, voxalatamab, cofetuzumab pelidotin, denosumab, rosmantuzumab, cirmtuzumab, atinumab, indatuximab ravtansine, elotuzumab, sirtratumab vedotin, sonepcizumab, vandortuzumab vedotin, minretumomab, satumomab pendetide, maslimomab, ontuxizumab, tenatumomab, fresolimumab, metelimumab, lerdelimumab, tezepelumab, etigilimab, tiragotumab, placulumab, prezalumab, infliximab, nerelimomab, ozoralizumab, adalimumab, afelimomab, certolizumab pegol, golimumab, mapatumumab, conatumumab, lexatumumab, tigatuzumab, sacituzumab govitecan, votumumab, pogalizumab, letolizumab, pankomab, anatumomab mafenatox, enavatuzumab, flanvotumab, brolucizumab, ranibizumab, varisacumab, bevacizumab, faricimab, icrucumab, alacizumab pegol, ramucirumab, pritumumab, and onvatilimab.

[5815] In some aspects, the antigen binding polypeptides provided herein comprise a VL2 comprising a VL of an antibody selected from the group consisting of losatuxizumab vedotin, utomilumab, urelumab, oleclumab, naptumomab estafenatox, ascrinvacumab, pintumomab, tacatuzumab tetraxetan, nesvacumab, vanucizumab, timolumab, vapaliximab, vepalimomab, enapotamab vedotin, ianalumab, belimumab, tabalumab, tibulizumab, belantamab mafodotin, teclistamab, teclistamab, detumomab, nacolomab tafenatox, eculizumab, lendalizumab, pexelizumab, pozelimab, ravulizumab, tesidolumab, vilobelimab, abagovomab, igovomab, oregovomab, sofituzumab vedotin, cantuzumab mertansine, cantuzuma bravtansine, girentuximab, altumomab pentetate, arcitumomab, besilesomab, bertilimumab, plozalizumab, mogamulizumab, leronlimab, PRO140, rovelizumab, rovelizumab, talacotuzumab, benralizumab, tavolimab, vonlerolizumab, gavilimomab, ziralimumab, fanolesomab, ipilimumab, ruplizumab, toralizumab, dapirolizumab pegol, toralizumab, dapirolizumab pegol, ruplizumab, blinatumomab, inebilizumab, loncastuximab tesirine, SGN-CD19A, tafasitamab, taplitumomab paptox, XMAB-5574, Budoprutug, Obexelimab, duvortuxizumab, englumafusp alfa, Emfizatamab, zeripatamig, siplizumab, blontuvetmab, FBTA05, ibritumomab tiuxetan, obinutuzumab, ocaratuzumab, ocrelizumab, ofatumumab, rituximab, tositumomab, ublituximab, veltuzumab, divozilimab, eramkafusp alfa, ripertamab, zuberitamab, glofitamab, nofetumomab merpentan, samalizumab, imvotamab, odronextamab, plamotamab, bectumomab, inotuzumab ozogamicin, moxetumomab pasudotox, pinatuzumab vedotin, gomiliximab, lumiliximab, inolimomab, inolimomab, daclizumab, camidanluma btesirine, basiliximab, varlilumab, omburtamab, enoblituzumab, vopratelimab, lulizumabpegol, TGN1412, muromonab-CD3, otelixizumab, teplizumab, visilizumab, epcoritamab, epcoritamab, brentuximab vedotin, iratumumab, azintuxizumab vedotin, gemtuzumab ozogamicin, lintuzumab, vadastuximab talirine, naratuximab emtansine, otlertuzumab, lilotomab satetraxetan, tetulomab, daratumumab, isatuximab, foralumab, mosunetuzumab, mosunetuzumab, cedelizumab, ibalizumab, keliximab, priliximab, tregalizumab, zanolimumab, bleselumab, iscalimab, lucatumumab, ravagalimab, selicrelumab, teneliximab, vanalimab, abciximab, bivatuzumab, iomab-B, telimomab aritox, zolimomab aritox, abituzumab, intetumumab, alemtuzumab, tamtuvetmab, lorvotuzumab mertansine, itolizumab, cusatuzumab, vorsetuzumab mafodotin, milatuzumab, iladatuzumab vedotin, polatuzumab vedotin, galiximab, cibisatamab, zolbetuximab, naxitamab, tisotumab vedotin, olendalizumab, pamrevlumab, lacnotuzumab, cabiralizumab, emactuzumab, axatilimab, gimsilumab, lenzilumab, namilumab, tremelimumab, ulocuplumab, tepoditamab, rovalpituzumab tesirine, tarlatamab, demcizumab, navicixizumab, drozitumab, parsatuzumab, depatuxizumab mafodotin, modotuximab, carotuximab, adecatumumab, adecatumumab, oportuzumab monatox, solitomab, tucotuzumab celmoleukin, edrecolomab, catumaxomab, ifabotuzumab, fibatuzumab, zalutumumab, panitumumab, cetuximab, futuximab, imgatuzumab, laprituximab emtansine, matuzumab, necitumumab, nimotuzumab, tomuzotuximab, amivantamab, amivantamab, epitumomab cituxetan, sontuzumab, duligotuzumab, elgemtumab, lumretuzumab, patritumab, seribantumab, zenocutuzumab, sibrotuzumab, burosumab, aprutumab ixadotin, radretumab, pasotuxizumab, farletuzumab, mirvetuximab soravtansine, vantictumab, TRBS07, 3F8, dinutuximab, dinutuximab beta, ecromeximab, mitumomab, andecaliximab, capromab, codrituzumab, glembatumumab vedotin, talquetamab, talquetamab, trevogrumab, indusatumab vedotin, ficlatuzumab, rilotumumab, zatuximab, pentuzimab, pentuzimab, margetuximab, timigutuzumab, trastuzumab, trastuzumab duocarmazine, trastuzumab emtansine, gancotamab, pertuzumab, ertumaxomab, emibetuzumab, telisotuzumab, telisotuzumab vedotin, derlotuximab biotin, apolizumab, onartuzumab, bersanlimab, enlimomabpegol, rontalizumab, sifalimumab, talizumab, ganitumab, istiratumab, robatumumab, teprotumumab, figitumumab, ganitumab, istiratumab, robatumumab, teprotumumab, cixutumumab, dalotuzumab, xentuzumab, dusigitumab, canakinumab, ustekinumab, ustekinumab, ustekinumab, briakinumab, briakinumab, abrezekimab, lebrikizumab, romilkimab, TNX-650, tralokinumab, anrukinzumab, brodalumab, ixekizumab, netakimab, perakizumab, secukinumab, vunakizumab, afasevikumab, afasevikumab, bimekizumab, bimekizumab, remtolumab, bermckimab, lutikizumab, lutikizumab, gevokizumab, cergutuzumab amunaleukin, fletikumab, fezakinumab, brazikumab, guselkumab, mirikizumab, tildrakizumab, risankizumab, flotetuzumab, nemolizumab, pascolizumab, dupilumab, mepolizumab, reslizumab, clazakizumab, elsilimomab, olokizumab, sarilumab, siltuximab, sirukumab, vobarilizumab, tocilizumab, SA237, satralizumab, enokizumab, prezalizumab, natalizumab, abrilumab, abrilumab, vedolizumab, volociximab, tadocizumab, etaracizumab, etrolizumab, spesolimab, vatelizumab, crlizumab, lirilumab, relatlimab, cBR96-doxorubicinimmunoconjugate, odulimomab, efalizumab, ladiratuzumab vedotin, simtuzumab, samrotamab vedotin, aselizumab, lupartumab amadotin, imalumab, carlumab, imaprelimab, amatuximab, amatuximab, anctumab ravtansine, narnatumab, clivatuzumab tetraxetan, pemtumomab, gatipotuzumab, ensituximab, lemalesomab, sulesomab, enfortumab vedotin, racotumomab, monalizumab, brontictuzumab, tarextumab, vesencumab, oxelumab, gilvetmab, tislelizumab, dostarlimab, BCD-100, nivolumab, PDR001, pembrolizumab, pidilizumab, retifanlimab, spartalizumab, sintilimab, cemiplimab, olaratumab, tovetumab, rinucumab, atezolizumab, avelumab, durvalumab, lifastuzumab vedotin, bavituximab, acapatamab, capromab, rosopatamab, nezastomig, pasotuxizumab, pelgifatamab, voxalatamab, cofetuzumab pelidotin, denosumab, rosmantuzumab, cirmtuzumab, atinumab, indatuximab ravtansine, elotuzumab, sirtratumab vedotin, sonepcizumab, vandortuzumab vedotin, minretumomab, satumomab pendetide, maslimomab, ontuxizumab, tenatumomab, fresolimumab, metelimumab, lerdelimumab, tezepelumab, etigilimab, tiragotumab, placulumab, prezalumab, infliximab, nerelimomab, ozoralizumab, adalimumab, afelimomab, certolizumab pegol, golimumab, mapatumumab, conatumumab, lexatumumab, tigatuzumab, sacituzumab govitecan, votumumab, pogalizumab, letolizumab, pankomab, anatumomab mafenatox, enavatuzumab, flanvotumab, brolucizumab, ranibizumab, varisacumab, bevacizumab, faricimab, icrucumab, alacizumab pegol, ramucirumab, pritumumab, and onvatilimab.

[5816] In some aspects, the antigen binding polypeptides provided herein comprise a VH1 comprising a VH of an antibody selected from the group consisting of losatuxizumab vedotin, utomilumab, urelumab, oleclumab, naptumomab estafenatox, ascrinvacumab, pintumomab, tacatuzumab tetraxetan, nesvacumab, vanucizumab, timolumab, vapaliximab, vepalimomab, enapotamab vedotin, ianalumab, belimumab, tabalumab, tibulizumab, belantamab mafodotin, teclistamab, teclistamab, detumomab, nacolomab tafenatox, eculizumab, lendalizumab, pexelizumab, pozelimab, ravulizumab, tesidolumab, vilobelimab, abagovomab, igovomab, oregovomab, sofituzumab vedotin, cantuzumab mertansine, cantuzuma bravtansine, girentuximab, altumomab pentetate, arcitumomab, besilesomab, bertilimumab, plozalizumab, mogamulizumab, leronlimab, PRO140, rovelizumab, rovelizumab, talacotuzumab, benralizumab, tavolimab, vonlerolizumab, gavilimomab, ziralimumab, fanolesomab, ipilimumab, ruplizumab, toralizumab, dapirolizumab pegol, toralizumab, dapirolizumab pegol, ruplizumab, blinatumomab, inebilizumab, loncastuximab tesirine, SGN-CD19A, tafasitamab, taplitumomab paptox, XMAB-5574, Budoprutug, Obexelimab, duvortuxizumab, englumafusp alfa, Emfizatamab, zeripatamig, siplizumab, blontuvetmab, FBTA05, ibritumomab tiuxetan, obinutuzumab, ocaratuzumab, ocrelizumab, ofatumumab, rituximab, tositumomab, ublituximab, veltuzumab, divozilimab, eramkafusp alfa, ripertamab, zuberitamab, glofitamab, nofetumomab merpentan, samalizumab, imvotamab, odronextamab, plamotamab, bectumomab, inotuzumab ozogamicin, moxetumomab pasudotox, pinatuzumab vedotin, gomiliximab, lumiliximab, inolimomab, inolimomab, daclizumab, camidanluma btesirine, basiliximab, varlilumab, omburtamab, enoblituzumab, vopratelimab, lulizumabpegol, TGN1412, muromonab-CD3, otelixizumab, teplizumab, visilizumab, epcoritamab, epcoritamab, brentuximab vedotin, iratumumab, azintuxizumab vedotin, gemtuzumab ozogamicin, lintuzumab, vadastuximab talirine, naratuximab emtansine, otlertuzumab, lilotomab satetraxetan, tetulomab, daratumumab, isatuximab, foralumab, mosunetuzumab, mosunetuzumab, cedelizumab, ibalizumab, keliximab, priliximab, tregalizumab, zanolimumab, bleselumab, iscalimab, lucatumumab, ravagalimab, selicrelumab, teneliximab, vanalimab, abciximab, bivatuzumab, iomab-B, telimomab aritox, zolimomab aritox, abituzumab, intetumumab, alemtuzumab, tamtuvetmab, lorvotuzumab mertansine, itolizumab, cusatuzumab, vorsetuzumab mafodotin, milatuzumab, iladatuzumab vedotin, polatuzumab vedotin, galiximab, cibisatamab, zolbetuximab, naxitamab, tisotumab vedotin, olendalizumab, pamrevlumab, lacnotuzumab, cabiralizumab, emactuzumab, axatilimab, gimsilumab, lenzilumab, namilumab, tremelimumab, ulocuplumab, tepoditamab, rovalpituzumab tesirine, tarlatamab, demcizumab, navicixizumab, drozitumab, parsatuzumab, depatuxizumab mafodotin, modotuximab, carotuximab, adecatumumab, adecatumumab, oportuzumab monatox, solitomab, tucotuzumab celmoleukin, edrecolomab, catumaxomab, ifabotuzumab, fibatuzumab, zalutumumab, panitumumab, cetuximab, futuximab, imgatuzumab, laprituximab emtansine, matuzumab, necitumumab, nimotuzumab, tomuzotuximab, amivantamab, amivantamab, epitumomab cituxetan, sontuzumab, duligotuzumab, elgemtumab, lumretuzumab, patritumab, seribantumab, zenocutuzumab, sibrotuzumab, burosumab, aprutumab ixadotin, radretumab, pasotuxizumab, farletuzumab, mirvetuximab soravtansine, vantictumab, TRBS07, 3F8, dinutuximab, dinutuximab beta, ecromeximab, mitumomab, andecaliximab, capromab, codrituzumab, glembatumumab vedotin, talquetamab, talquetamab, trevogrumab, indusatumab vedotin, ficlatuzumab, rilotumumab, zatuximab, pentuzimab, pentuzimab, margetuximab, timigutuzumab, trastuzumab, trastuzumab duocarmazine, trastuzumab emtansine, gancotamab, pertuzumab, ertumaxomab, emibetuzumab, telisotuzumab, telisotuzumab vedotin, derlotuximab biotin, apolizumab, onartuzumab, bersanlimab, enlimomabpegol, rontalizumab, sifalimumab, talizumab, ganitumab, istiratumab, robatumumab, teprotumumab, figitumumab, ganitumab, istiratumab, robatumumab, teprotumumab, cixutumumab, dalotuzumab, xentuzumab, dusigitumab, canakinumab, ustekinumab, ustekinumab, ustekinumab, briakinumab, briakinumab, abrezekimab, lebrikizumab, romilkimab, TNX-650, tralokinumab, anrukinzumab, brodalumab, ixekizumab, netakimab, perakizumab, secukinumab, vunakizumab, afasevikumab, afasevikumab, bimekizumab, bimekizumab, remtolumab, bermekimab, lutikizumab, lutikizumab, gevokizumab, cergutuzumab amunaleukin, fletikumab, fezakinumab, brazikumab, guselkumab, mirikizumab, tildrakizumab, risankizumab, flotetuzumab, nemolizumab, pascolizumab, dupilumab, mepolizumab, reslizumab, clazakizumab, elsilimomab, olokizumab, sarilumab, siltuximab, sirukumab, vobarilizumab, tocilizumab, SA237, satralizumab, enokizumab, prezalizumab, natalizumab, abrilumab, abrilumab, vedolizumab, volociximab, tadocizumab, etaracizumab, etrolizumab, spesolimab, vatelizumab, erlizumab, lirilumab, relatlimab, cBR96-doxorubicinimmunoconjugate, odulimomab, efalizumab, ladiratuzumab vedotin, simtuzumab, samrotamab vedotin, aselizumab, lupartumab amadotin, imalumab, carlumab, imaprelimab, amatuximab, amatuximab, anetumab ravtansine, narnatumab, clivatuzumab tetraxetan, pemtumomab, gatipotuzumab, ensituximab, lemalesomab, sulesomab, enfortumab vedotin, racotumomab, monalizumab, brontictuzumab, tarextumab, vesencumab, oxelumab, gilvetmab, tislelizumab, dostarlimab, BCD-100, nivolumab, PDR001, pembrolizumab, pidilizumab, retifanlimab, spartalizumab, sintilimab, cemiplimab, olaratumab, tovetumab, rinucumab, atezolizumab, avelumab, durvalumab, lifastuzumab vedotin, bavituximab, acapatamab, capromab, rosopatamab, nezastomig, pasotuxizumab, pelgifatamab, voxalatamab, cofetuzumab pelidotin, denosumab, rosmantuzumab, cirmtuzumab, atinumab, indatuximab ravtansine, elotuzumab, sirtratumab vedotin, sonepcizumab, vandortuzumab vedotin, minretumomab, satumomab pendetide, maslimomab, ontuxizumab, tenatumomab, fresolimumab, metelimumab, lerdelimumab, tezepelumab, etigilimab, tiragotumab, placulumab, prezalumab, infliximab, nerelimomab, ozoralizumab, adalimumab, afelimomab, certolizumab pegol, golimumab, mapatumumab, conatumumab, lexatumumab, tigatuzumab, sacituzumab govitecan, votumumab, pogalizumab, letolizumab, pankomab, anatumomab mafenatox, enavatuzumab, flanvotumab, brolucizumab, ranibizumab, varisacumab, bevacizumab, faricimab, icrucumab, alacizumab pegol, ramucirumab, pritumumab, and onvatilimab.

[5817] In some aspects, the antigen binding polypeptides provided herein comprise a VH2 comprising a VH of an antibody selected from the group consisting of losatuxizumab vedotin, utomilumab, urelumab, oleclumab, naptumomab estafenatox, ascrinvacumab, pintumomab, tacatuzumab tetraxetan, nesvacumab, vanucizumab, timolumab, vapaliximab, vepalimomab, enapotamab vedotin, ianalumab, belimumab, tabalumab, tibulizumab, belantamab mafodotin, teclistamab, teclistamab, detumomab, nacolomab tafenatox, eculizumab, lendalizumab, pexelizumab, pozelimab, ravulizumab, tesidolumab, vilobelimab, abagovomab, igovomab, oregovomab, sofituzumab vedotin, cantuzumab mertansine, cantuzuma bravtansine, girentuximab, altumomab pentetate, arcitumomab, besilesomab, bertilimumab, plozalizumab, mogamulizumab, leronlimab, PRO140, rovelizumab, rovelizumab, talacotuzumab, benralizumab, tavolimab, vonlerolizumab, gavilimomab, ziralimumab, fanolesomab, ipilimumab, ruplizumab, toralizumab, dapirolizumab pegol, toralizumab, dapirolizumab pegol, ruplizumab, blinatumomab, inebilizumab, loncastuximab tesirine, SGN-CD19A, tafasitamab, taplitumomab paptox, XMAB-5574, Budoprutug, Obexelimab, duvortuxizumab, englumafusp alfa, Emfizatamab, zeripatamig, siplizumab, blontuvetmab, FBTA05, ibritumomab tiuxetan, obinutuzumab, ocaratuzumab, ocrelizumab, ofatumumab, rituximab, tositumomab, ublituximab, veltuzumab, divozilimab, eramkafusp alfa, ripertamab, zuberitamab, glofitamab, nofetumomab merpentan, samalizumab, imvotamab, odronextamab, plamotamab, bectumomab, inotuzumab ozogamicin, moxetumomab pasudotox, pinatuzumab vedotin, gomiliximab, lumiliximab, inolimomab, inolimomab, daclizumab, camidanluma btesirine, basiliximab, varlilumab, omburtamab, enoblituzumab, vopratclimab, lulizumabpegol, TGN1412, muromonab-CD3, otelixizumab, teplizumab, visilizumab, epcoritamab, epcoritamab, brentuximab vedotin, iratumumab, azintuxizumab vedotin, gemtuzumab ozogamicin, lintuzumab, vadastuximab talirine, naratuximab emtansine, otlertuzumab, lilotomab satetraxetan, tetulomab, daratumumab, isatuximab, foralumab, mosunetuzumab, mosunetuzumab, cedelizumab, ibalizumab, keliximab, priliximab, tregalizumab, zanolimumab, bleselumab, iscalimab, lucatumumab, ravagalimab, selicrelumab, teneliximab, vanalimab, abciximab, bivatuzumab, iomab-B, telimomab aritox, zolimomab aritox, abituzumab, intetumumab, alemtuzumab, tamtuvetmab, lorvotuzumab mertansine, itolizumab, cusatuzumab, vorsetuzumab mafodotin, milatuzumab, iladatuzumab vedotin, polatuzumab vedotin, galiximab, cibisatamab, zolbetuximab, naxitamab, tisotumab vedotin, olendalizumab, pamrevlumab, lacnotuzumab, cabiralizumab, emactuzumab, axatilimab, gimsilumab, lenzilumab, namilumab, tremelimumab, ulocuplumab, tepoditamab, rovalpituzumab tesirine, tarlatamab, demcizumab, navicixizumab, drozitumab, parsatuzumab, depatuxizumab mafodotin, modotuximab, carotuximab, adecatumumab, adecatumumab, oportuzumab monatox, solitomab, tucotuzumab celmoleukin, edrecolomab, catumaxomab, ifabotuzumab, fibatuzumab, zalutumumab, panitumumab, cetuximab, futuximab, imgatuzumab, laprituximab emtansine, matuzumab, necitumumab, nimotuzumab, tomuzotuximab, amivantamab, amivantamab, epitumomab cituxetan, sontuzumab, duligotuzumab, elgemtumab, lumretuzumab, patritumab, seribantumab, zenocutuzumab, sibrotuzumab, burosumab, aprutumab ixadotin, radretumab, pasotuxizumab, farletuzumab, mirvetuximab soravtansine, vantictumab, TRBS07, 3F8, dinutuximab, dinutuximab beta, ecromeximab, mitumomab, andecaliximab, capromab, codrituzumab, glembatumumab vedotin, talquetamab, talquetamab, trevogrumab, indusatumab vedotin, ficlatuzumab, rilotumumab, zatuximab, pentuzimab, pentuzimab, margetuximab, timigutuzumab, trastuzumab, trastuzumab duocarmazine, trastuzumab emtansine, gancotamab, pertuzumab, ertumaxomab, emibetuzumab, telisotuzumab, telisotuzumab vedotin, derlotuximab biotin, apolizumab, onartuzumab, bersanlimab, enlimomabpegol, rontalizumab, sifalimumab, talizumab, ganitumab, istiratumab, robatumumab, teprotumumab, figitumumab, ganitumab, istiratumab, robatumumab, teprotumumab, cixutumumab, dalotuzumab, xentuzumab, dusigitumab, canakinumab, ustekinumab, ustekinumab, ustekinumab, briakinumab, briakinumab, abrezekimab, lebrikizumab, romilkimab, TNX-650, tralokinumab, anrukinzumab, brodalumab, ixekizumab, netakimab, perakizumab, secukinumab, vunakizumab, afasevikumab, afasevikumab, bimekizumab, bimekizumab, remtolumab, bermekimab, lutikizumab, lutikizumab, gevokizumab, cergutuzumab amunaleukin, fletikumab, fezakinumab, brazikumab, guselkumab, mirikizumab, tildrakizumab, risankizumab, flotetuzumab, nemolizumab, pascolizumab, dupilumab, mepolizumab, reslizumab, clazakizumab, elsilimomab, olokizumab, sarilumab, siltuximab, sirukumab, vobarilizumab, tocilizumab, SA237, satralizumab, enokizumab, prezalizumab, natalizumab, abrilumab, abrilumab, vedolizumab, volociximab, tadocizumab, etaracizumab, etrolizumab, spesolimab, vatelizumab, erlizumab, lirilumab, relatlimab, cBR96-doxorubicinimmunoconjugate, odulimomab, efalizumab, ladiratuzumab vedotin, simtuzumab, samrotamab vedotin, aselizumab, lupartumab amadotin, imalumab, carlumab, imaprelimab, amatuximab, amatuximab, anetumab ravtansine, narnatumab, clivatuzumab tetraxetan, pemtumomab, gatipotuzumab, ensituximab, lemalesomab, sulesomab, enfortumab vedotin, racotumomab, monalizumab, brontictuzumab, tarextumab, vesencumab, oxelumab, gilvetmab, tislelizumab, dostarlimab, BCD-100, nivolumab, PDR001, pembrolizumab, pidilizumab, retifanlimab, spartalizumab, sintilimab, cemiplimab, olaratumab, tovetumab, rinucumab, atezolizumab, avelumab, durvalumab, lifastuzumab vedotin, bavituximab, acapatamab, capromab, rosopatamab, nezastomig, pasotuxizumab, pelgifatamab, voxalatamab, cofetuzumab pelidotin, denosumab, rosmantuzumab, cirmtuzumab, atinumab, indatuximab ravtansine, elotuzumab, sirtratumab vedotin, sonepcizumab, vandortuzumab vedotin, minretumomab, satumomab pendetide, maslimomab, ontuxizumab, tenatumomab, fresolimumab, metelimumab, lerdelimumab, tezepelumab, etigilimab, tiragotumab, placulumab, prezalumab, infliximab, nerelimomab, ozoralizumab, adalimumab, afelimomab, certolizumab pegol, golimumab, mapatumumab, conatumumab, lexatumumab, tigatuzumab, sacituzumab govitecan, votumumab, pogalizumab, letolizumab, pankomab, anatumomab mafenatox, enavatuzumab, flanvotumab, brolucizumab, ranibizumab, varisacumab, bevacizumab, faricimab, icrucumab, alacizumab pegol, ramucirumab, pritumumab, and onvatilimab.

[5818] In some aspects, the antigen binding polypeptides provided herein comprise a VL1 comprising (i) a complementarity determining region (CDR) 1 having an amino acid sequence that is at least 65%, at least 70%, at least 75%, at least 80%, at least 85%, at least 90%, at least 95%, at least 99%, or 100% identical to any one of SEQ ID NOs: 1096, 1103, 1110, 1120, 1127, 1134, 1141, 1148, 1155, 1162, 1169, 1174, 1181, 1188, 1199, 1211, 1221, 1228, 1235, 1247, 1254, 1261, 1266, 1271, 1278, 1285, 1292, 1299, 1306, 1313, 1319, 1326, 1339, 1352, 1359, 1366, 1373, 1382, 1394, 1401, 1408, 1414, 1421, 1428, 1441, 1448, 1455, 1461, 1468, 1475, 1488, 1495, 1508, 1519, 1526, 1531, 1538, 1544, 1556, 1568, 1574, 1581, 1594, 1601, 1608, 1615, 1622, 1629, 1636, 1643, 1650, 1657, 1672, 1679, 1689, 1697, 1708, 1715, 1718, 1723, 1727, 1738, 1743, 1752, 1761, 1763, 1769, 1776, and 1786; (ii) a CDR2 having an amino acid sequence that is at least 65%, at least 70%, at least 75%, at least 80%, at least 85%, at least 90%, at least 95%, at least 99%, or 100% identical to any one of SEQ ID NOs: 1200, 1212, 1680, 1690, 1698, 1709, 1728, 1739, 1744, 1753, 1770, and 1777; or at least 65%, at least 70%, at least 75%, at least 80%, at least 85%, at least 90%, at least 95%, at least 99%, or 100% identical to any one of amino acid sequences AAS, APS, AT, ATS, DAS, DDG, DDS, DT, DTS, DVS, EAS, FTS, GAF, GAN, GAS, GAT, GIS, GKN, GNS, HTS, KVS, LAS, LGS, LVS, NAK, NTN, QMS, RMS, RTS, SAS, TTS, WAS, YAS, YAT, YGS, YRS, and YTS; and (iii) a CDR3 having an amino acid sequence that is at least 65%, at least 70%, at least 75%, at least 80%, at least 85%, at least 90%, at least 95%, at least 99%, or 100% identical to any one of SEQ ID NOs: 1097, 1104, 1111, 1121, 1128, 1135, 1142, 1149, 1156, 1163, 1170, 1175, 1182, 1189, 1195, 1201, 1207, 1213, 1222, 1229, 1236, 2009, 1248, 1255, 1262, 1267, 1272, 1279, 1286, 1293, 1300, 1307, 1320, 1327, 1333, 1340, 1346, 1353, 1360, 1367, 1374, 1383, 1389, 1395, 1402, 1409, 1415, 1422, 1429, 1435, 1442, 1449, 1456, 1462, 1469, 1476, 1482, 1489, 1496, 1502, 1509, 1513, 1520, 1532, 1539, 1545, 1557, 1562, 1569, 1575, 1582, 1588, 1595, 1602, 1609, 1616, 1623, 1630, 1637, 1644, 1651, 1658, 1663, 1673, 1681, 1691, 1699, 1710, 1729, 1735, 1745, 1751, 1754, 1778, 1787, and 1976.

[5819] In some aspects, the antigen binding polypeptides provided herein comprise a VL2 comprising (i) a complementarity determining region (CDR) 1 having an amino acid sequence that is at least 65%, at least 70%, at least 75%, at least 80%, at least 85%, at least 90%, at least 95%, at least 99%, or 100% identical to any one of SEQ ID NOs: 1096, 1103, 1110, 1120, 1127, 1134, 1141, 1148, 1155, 1162, 1169, 1174, 1181, 1188, 1199, 1211, 1221, 1228, 1235, 1247, 1254, 1261, 1266, 1271, 1278, 1285, 1292, 1299, 1306, 1313, 1319, 1326, 1339, 1352, 1359, 1366, 1373, 1382, 1394, 1401, 1408, 1414, 1421, 1428, 1441, 1448, 1455, 1461, 1468, 1475, 1488, 1495, 1508, 1519, 1526, 1531, 1538, 1544, 1556, 1568, 1574, 1581, 1594, 1601, 1608, 1615, 1622, 1629, 1636, 1643, 1650, 1657, 1672, 1679, 1689, 1697, 1708, 1715, 1718, 1723, 1727, 1738, 1743, 1752, 1761, 1763, 1769, 1776, and 1786; (ii) a CDR2 having an amino acid sequence that is at least 65%, at least 70%, at least 75%, at least 80%, at least 85%, at least 90%, at least 95%, at least 99%, or 100% identical to any one of SEQ ID NOs: 1200, 1212, 1680, 1690, 1698, 1709, 1728, 1739, 1744, 1753, 1770, and 1777; or at least 65%, at least 70%, at least 75%, at least 80%, at least 85%, at least 90%, at least 95%, at least 99%, or 100% identical to any one of amino acid sequences AAS, APS, AT, ATS, DAS, DDG, DDS, DT, DTS, DVS, EAS, FTS, GAF, GAN, GAS, GAT, GIS, GKN, GNS, HTS, KVS, LAS, LGS, LVS, NAK, NTN, QMS, RMS, RTS, SAS, TTS, WAS, YAS, YAT, YGS, YRS, and YTS; and (iii) a CDR3 having an amino acid sequence that is at least 65%, at least 70%, at least 75%, at least 80%, at least 85%, at least 90%, at least 95%, at least 99%, or 100% identical to any one of SEQ ID NOs: 1097, 1104, 1111, 1121, 1128, 1135, 1142, 1149, 1156, 1163, 1170, 1175, 1182, 1189, 1195, 1201, 1207, 1213, 1222, 1229, 1236, 2009, 1248, 1255, 1262, 1267, 1272, 1279, 1286, 1293, 1300, 1307, 1320, 1327, 1333, 1340, 1346, 1353, 1360, 1367, 1374, 1383, 1389, 1395, 1402, 1409, 1415, 1422, 1429, 1435, 1442, 1449, 1456, 1462, 1469, 1476, 1482, 1489, 1496, 1502, 1509, 1513, 1520, 1532, 1539, 1545, 1557, 1562, 1569, 1575, 1582, 1588, 1595, 1602, 1609, 1616, 1623, 1630, 1637, 1644, 1651, 1658, 1663, 1673, 1681, 1691, 1699, 1710, 1729, 1735, 1745, 1751, 1754, 1778, 1787, and 1976.

[5820] In some aspects, the antigen binding polypeptides provided herein comprise a VH1 comprising (i) a complementarity determining region (CDR) 1 having an amino acid sequence that is at least 65%, at least 70%, at least 75%, at least 80%, at least 85%, at least 90%, at least 95%, at least 99%, or 100% identical to any one of SEQ ID NOs: 1099, 1106, 1113, 1117, 1123, 1130, 1137, 1144, 1151, 1158, 1165, 1177, 1184, 1191, 1203, 1215, 1224, 1231, 1238, 1243, 1250, 1257, 1264, 1274, 1281, 1288, 1295, 1302, 1309, 1315, 1322, 1329, 1335, 1342, 1348, 1355, 1362, 1369, 1376, 1385, 1397, 1404, 1417, 1424, 1431, 1437, 1444, 1451, 1458, 1464, 1471, 1478, 1484, 1491, 1498, 1504, 1511, 1515, 1522, 1534, 1547, 1552, 1564, 1577, 1584, 1590, 1597, 1604, 1611, 1618, 1625, 1632, 1639, 1646, 1653, 1660, 1665, 1675, 1683, 1693, 1701, 1705, 1716, 1719, 1731, 1736, 1747, 1756, 1772, 1780, and 1789; (ii) a CDR2 having an amino acid sequence that is at least 65%, at least 70%, at least 75%, at least 80%, at least 85%, at least 90%, at least 95%, at least 99%, or 100% identical to any one of SEQ ID NOs: 1100, 1107, 1114, 1118, 1124, 1131, 1138, 1145, 1152, 1159, 1166, 1178, 1185, 1192, 1204, 1216, 1225, 1232, 1239, 1244, 1251, 1258, 1275, 1282, 1289, 1296, 1303, 1310, 1316, 1323, 1330, 1336, 1343, 1349, 1356, 1363, 1370, 1377, 1386, 1391, 1398, 1405, 1411, 1418, 1425, 1432, 1438, 1445, 1452, 1465, 1472, 1479, 1485, 1492, 1499, 1505, 1516, 1523, 1528, 1535, 1541, 1548, 1553, 1559, 1565, 1571, 1578, 1585, 1591, 1598, 1605, 1612, 1619, 1626, 1633, 1640, 1647, 1654, 1666, 1676, 1684, 1687, 1694, 1702, 1706, 1712, 1717, 1720, 1725, 1732, 1737, 1741, 1748, 1757, 1767, 1773, 1781, and 1790; and (iii) a CDR3 having an amino acid sequence that is at least 65%, at least 70%, at least 75%, at least 80%, at least 85%, at least 90%, at least 95%, at least 99%, or 100% identical to any one of SEQ ID NOs: 1101, 1108, 1115, 1125, 1132, 1139, 1146, 1153, 1160, 1167, 1172, 1179, 1186, 1193, 1197, 1205, 1209, 1217, 1226, 1233, 1240, 1245, 1252, 1259, 1269, 1276, 1283, 1290, 1297, 1304, 1311, 1317, 1324, 1331, 1337, 1344, 1350, 1357, 1364, 1371, 1378, 1387, 1392, 1399, 1406, 1412, 1419, 1426, 1433, 1439, 1446, 1453, 1459, 1466, 1473, 1480, 1486, 1493, 1500, 1506, 1517, 1524, 1529, 1536, 1542, 1549, 1554, 1560, 1566, 1572, 1579, 1586, 1592, 1599, 1606, 1613, 1620, 1627, 1634, 1641, 1648, 1655, 1661, 1667, 1670, 1677, 1685, 1688, 1695, 1703, 1707, 1713, 1733, 1749, 1758, 1762, 1774, 1782, 1791, and 1975.

[5821] In some aspects, the antigen binding polypeptides provided herein comprise a VH2 comprising (i) a complementarity determining region (CDR) 1 having an amino acid sequence that is at least 65%, at least 70%, at least 75%, at least 80%, at least 85%, at least 90%, at least 95%, at least 99%, or 100% identical to any one of SEQ ID NOs: 1099, 1106, 1113, 1117, 1123, 1130, 1137, 1144, 1151, 1158, 1165, 1177, 1184, 1191, 1203, 1215, 1224, 1231, 1238, 1243, 1250, 1257, 1264, 1274, 1281, 1288, 1295, 1302, 1309, 1315, 1322, 1329, 1335, 1342, 1348, 1355, 1362, 1369, 1376, 1385, 1397, 1404, 1417, 1424, 1431, 1437, 1444, 1451, 1458, 1464, 1471, 1478, 1484, 1491, 1498, 1504, 1511, 1515, 1522, 1534, 1547, 1552, 1564, 1577, 1584, 1590, 1597, 1604, 1611, 1618, 1625, 1632, 1639, 1646, 1653, 1660, 1665, 1675, 1683, 1693, 1701, 1705, 1716, 1719, 1731, 1736, 1747, 1756, 1772, 1780, and 1789; (ii) a CDR2 having an amino acid sequence that is at least 65%, at least 70%, at least 75%, at least 80%, at least 85%, at least 90%, at least 95%, at least 99%, or 100% identical to any one of SEQ ID NOs: 1100, 1107, 1114, 1118, 1124, 1131, 1138, 1145, 1152, 1159, 1166, 1178, 1185, 1192, 1204, 1216, 1225, 1232, 1239, 1244, 1251, 1258, 1275, 1282, 1289, 1296, 1303, 1310, 1316, 1323, 1330, 1336, 1343, 1349, 1356, 1363, 1370, 1377, 1386, 1391, 1398, 1405, 1411, 1418, 1425, 1432, 1438, 1445, 1452, 1465, 1472, 1479, 1485, 1492, 1499, 1505, 1516, 1523, 1528, 1535, 1541, 1548, 1553, 1559, 1565, 1571, 1578, 1585, 1591, 1598, 1605, 1612, 1619, 1626, 1633, 1640, 1647, 1654, 1666, 1676, 1684, 1687, 1694, 1702, 1706, 1712, 1717, 1720, 1725, 1732, 1737, 1741, 1748, 1757, 1767, 1773, 1781, and 1790; and (iii) a CDR3 having an amino acid sequence that is at least 65%, at least 70%, at least 75%, at least 80%, at least 85%, at least 90%, at least 95%, at least 99%, or 100% identical to any one of SEQ ID NOs: 1101, 1108, 1115, 1125, 1132, 1139, 1146, 1153, 1160, 1167, 1172, 1179, 1186, 1193, 1197, 1205, 1209, 1217, 1226, 1233, 1240, 1245, 1252, 1259, 1269, 1276, 1283, 1290, 1297, 1304, 1311, 1317, 1324, 1331, 1337, 1344, 1350, 1357, 1364, 1371, 1378, 1387, 1392, 1399, 1406, 1412, 1419, 1426, 1433, 1439, 1446, 1453, 1459, 1466, 1473, 1480, 1486, 1493, 1500, 1506, 1517, 1524, 1529, 1536, 1542, 1549, 1554, 1560, 1566, 1572, 1579, 1586, 1592, 1599, 1606, 1613, 1620, 1627, 1634, 1641, 1648, 1655, 1661, 1667, 1670, 1677, 1685, 1688, 1695, 1703, 1707, 1713, 1733, 1749, 1758, 1762, 1774, 1782, 1791, and 1975.

[5822] In some aspects, the antigen binding polypeptides provided herein comprise a VL1 comprising an amino acid sequence that is at least 65%, at least 70%, at least 75%, at least 80%, at least 85%, at least 90%, at least 95%, at least 99%, or 100% identical to any one of SEQ ID NOs: 1098, 1105, 1112, 1122, 1129, 1136, 1143, 1150, 1157, 1164, 1171, 1176, 1183, 1190, 1196, 1202, 1208, 1214, 1219, 1223, 1230, 1237, 1242, 1249, 1256, 1263, 1268, 1273, 1280, 1287, 1294, 1301, 1308, 1314, 1321, 1328, 1334, 1341, 1347, 1354, 1361, 1368, 1375, 1380, 1384, 1390, 1396, 1403, 1410, 1416, 1423, 1430, 1436, 1443, 1450, 1457, 1463, 1470, 1477, 1483, 1490, 1497, 1503, 1510, 1514, 1521, 1527, 1533, 1540, 1546, 1551, 1558, 1563, 1570, 1576, 1583, 1589, 1596, 1603, 1610, 1617, 1624, 1631, 1638, 1645, 1652, 1659, 1664, 1669, 1674, 1682, 1692, 1700, 1711, 1721, 1724, 1730, 1740, 1746, 1755, 1764, 1766, 1771, 1779, 1784, and 1788.

[5823] In some aspects, the antigen binding polypeptides provided herein comprise a VL2 comprising an amino acid sequence that is at least 65%, at least 70%, at least 75%, at least 80%, at least 85%, at least 90%, at least 95%, at least 99%, or 100% identical to any one of SEQ ID NOs: 1098, 1105, 1112, 1122, 1129, 1136, 1143, 1150, 1157, 1164, 1171, 1176, 1183, 1190, 1196, 1202, 1208, 1214, 1219, 1223, 1230, 1237, 1242, 1249, 1256, 1263, 1268, 1273, 1280, 1287, 1294, 1301, 1308, 1314, 1321, 1328, 1334, 1341, 1347, 1354, 1361, 1368, 1375, 1380, 1384, 1390, 1396, 1403, 1410, 1416, 1423, 1430, 1436, 1443, 1450, 1457, 1463, 1470, 1477, 1483, 1490, 1497, 1503, 1510, 1514, 1521, 1527, 1533, 1540, 1546, 1551, 1558, 1563, 1570, 1576, 1583, 1589, 1596, 1603, 1610, 1617, 1624, 1631, 1638, 1645, 1652, 1659, 1664, 1669, 1674, 1682, 1692, 1700, 1711, 1721, 1724, 1730, 1740, 1746, 1755, 1764, 1766, 1771, 1779, 1784, and 1788.

[5824] In some aspects, the antigen binding polypeptides provided herein comprise a VH1 comprising an amino acid sequence that is at least 65%, at least 70%, at least 75%, at least 80%, at least 85%, at least 90%, at least 95%, at least 99%, or 100% identical to any one of SEQ ID NOs: 1102, 1109, 1116, 1119, 1126, 1133, 1140, 1147, 1154, 1161, 1168, 1173, 1180, 1187, 1194, 1198, 1206, 1210, 1218, 1220, 1227, 1234, 1241, 1246, 1253, 1260, 1265, 1270, 1277, 1284, 1291, 1298, 1305, 1312, 1318, 1325, 1332, 1338, 1345, 1351, 1358, 1365, 1372, 1379, 1381, 1388, 1393, 1400, 1407, 1413, 1420, 1427, 1434, 1440, 1447, 1454, 1460, 1467, 1474, 1481, 1487, 1494, 1501, 1507, 1512, 1518, 1525, 1530, 1537, 1543, 1550, 1555, 1561, 1567, 1573, 1580, 1587, 1593, 1600, 1607, 1614, 1621, 1628, 1635, 1642, 1649, 1656, 1662, 1668, 1671, 1678, 1686, 1696, 1704, 1714, 1722, 1726, 1734, 1742, 1750, 1759, 1760, 1765, 1768, 1775, 1783, 1785, and 1792.

[5825] In some aspects, the antigen binding polypeptides provided herein comprise a VH2 comprising an amino acid sequence that is at least 65%, at least 70%, at least 75%, at least 80%, at least 85%, at least 90%, at least 95%, at least 99%, or 100% identical to any one of SEQ ID NOs: 1102, 1109, 1116, 1119, 1126, 1133, 1140, 1147, 1154, 1161, 1168, 1173, 1180, 1187, 1194, 1198, 1206, 1210, 1218, 1220, 1227, 1234, 1241, 1246, 1253, 1260, 1265, 1270, 1277, 1284, 1291, 1298, 1305, 1312, 1318, 1325, 1332, 1338, 1345, 1351, 1358, 1365, 1372, 1379, 1381, 1388, 1393, 1400, 1407, 1413, 1420, 1427, 1434, 1440, 1447, 1454, 1460, 1467, 1474, 1481, 1487, 1494, 1501, 1507, 1512, 1518, 1525, 1530, 1537, 1543, 1550, 1555, 1561, 1567, 1573, 1580, 1587, 1593, 1600, 1607, 1614, 1621, 1628, 1635, 1642, 1649, 1656, 1662, 1668, 1671, 1678, 1686, 1696, 1704, 1714, 1722, 1726, 1734, 1742, 1750, 1759, 1760, 1765, 1768, 1775, 1783, 1785, and 1792.

[5826] In some aspects, the infectious disease antigen that is not a sarbecovirus antigen is:
[5827] (i) a viral antigen elected from the group consisting of an influenza virus (A, B, C) antigen (e.g., influenza virus envelope proteins, for example, influenza virus neuraminidase (NA, N1, N2, N3, N4, N5, N6, N7, N8, N9, N10, N11), influenza virus hemagglutinin (H1, H2, H3, H4, H5, H6, H7, H8, H9, H10, H11, H12, H13, H14, H15, H16, H17, H18) (e.g., H1N1, H3N2, H5N1, H7N9, H9N2), Yamagata virus antigen, Victoria virus antigen, influenza virus structural proteins (e.g., M1, M2, capsid protein), influenza virus functional proteins (e.g., ribonucleoprotein (NP), primary interferon antagonist (NS1), nuclear export protein (NEP)) influenza virus accessory proteins (e.g., PB2, PB1, or PA), for example, anti-HA, anti-NA, anti-H1, anti-H3, anti-H5, anti-H7, anti-H9, anti-N1, anti-N2, anti-N9, anti-H1N1, anti-H3N2, anti-H5N1, anti-H7N9, anti-H9N2, anti-A protein, anti-B protein, anti-stem, anti-M1, anti-M2, anti-capsid, anti-NP, anti-NS1, anti-NEP, anti-PB1, anti-PB2, and anti-PA); a swine influenza virus antigen (e.g., swine flu hemagglutinin, swine flu neuraminidase); a classical swine fever (CSF) (hog colera) virus antigen; an equine influenza virus antigen (e.g., equine influenza virus typeA/Miami 63 neuraminidase, equine influenza virus type A/Kentucky 81 neuraminidase, equine influenza virus type A/Alaska 91 neuraminidase); parainfluenza viruses (e.g., bovine parainfluenza virus, bovine parainfluenza virus type 3 fusion protein, bovine parainfluenza virus type 3 hemagglutinin neuraminidase); a (human) respiratory syncytial virus (RSV)-viral antigen (e.g., RSV F glycoprotein, RSV G glycoprotein, F protein of respiratory syncytial virus, RSV fusion glycoprotein); a herpes simplex virus (HSV) antigen (e.g., herpes simplex virus glycoproteins gB, gC, gD, and gE, herpes simplex virus type 2 glycoprotein gB); a Dengue virus antigen (e.g., core protein, matrix protein, glycoprotein E of Dengue virus, or other protein of Dengue virus); a measles virus antigen (e.g., hemagglutinin); a poliovirus 1 antigen (e.g., poliovirus 1 proteins (VP1)), a HIV-1 antigen and HIV-2 antigen (e.g., HIV envelope proteins (e.g., envelope glycoproteins of HIV 1, HIV envelope glycoprotein (Env), HIV envelope glycoprotein gp160, HIV envelope surface glycoprotein gp120, HIV transmembrane envelope protein gp41), HIV structural proteins (e.g., p17, p24, p7, p55), HIV functional proteins (e.g, p66, HIV-1 protease (PR), p31), HIV accessory proteins (e.g., Nef, Tat, Rev, Vif, Vpr, Vpu)); a hepatitis virus (HAV, HBV, HCV, HDV, HEV) antigen (e.g., hepatitis B virus antigen (e.g., surface antigen, core protein), hepatitis C virus antigen (e.g., glycoprotein E1E2)); a rabies virus (Rabies lyssavirus) antigen (e.g., rabies virus glycoprotein, e.g., G glycoprotein); a pseudorabies virus antigen (e.g., pseudorabies virus g50 (gpD), pseudorabies virus II (gpB), pseudorabies virus III (gpC), pseudorabies virus glycoprotein H, pseudorabies virus glycoprotein E); a papillomavirus (HPV) antigen; an Epstein-Barr virus (EBV) (Gamma herpes virus 4) antigen; a Herpes simplex virus (HSV, HSV-1, HSV-2) antigen (e.g., human herpes virus 8, equine herpes virus antigen (e.g., type 1 glycoprotein B, type 1 glycoprotein D)); a Herpes zoster antigen; a Cytomegalovirus antigen (e.g., cytomegalovirus glycoprotein B); a Zika virus antigen; a Transmissible gastroenteritis virus (TGEV) antigen (e.g., glycoprotein 195, matrix protein); a rotavirus antigen (e.g., swine rotavirus glycoprotein 38); a parvovirus antigen (e.g., swine parvovirus capsid protein); a filoviruses (e.g., Marburg and Ebola) antigen; a bovine viral diarrhea virus antigen (e.g., glycoprotein 55); a Newcastle disease virus antigen (hemagglutinin, neuraminidase); an orthopoxvirus antigen; a coxsackievirus antigen and aphthovirus (foot and mouth disease virus) antigen; a yellow fever virus antigen; a Chikunga virus antigen; a Nipah virus antigen; an African swine fever virus antigen; a rhinotracheitis virus antigen (e.g., infectious bovine rhinotracheitis virus glycoprotein E, glycoprotein G); a laryngotracheitis virus antigen (e.g., infectious laryngotracheitis virus glycoprotein G or glycoprotein I); a La Crosse virus antigen (e.g., La Crosse virus glycoprotein); a neonatal calf diarrhoea virus antigen; a Venezuelan equine encephalomyelitis virus antigen; a punta toro virus antigen; a murine leukemia virus antigen; a mouse mammary tumor virus antigen; a bovine respiratory syncytial virus antigen (e.g., bovine respiratory syncytial virus attachment protein (BRSV G), bovine respiratory syncytial virus fusion protein (BRSV F), bovine respiratory syncytial virus nucleocapsid protein (BRSVN)); a bovine E viral diarrhoea virus antigen (e.g., glycoprotein 48 and glycoprotein 53); a metapneumovirus (HMPV) antigen; and an Ebola virus antigen (e.g., ebolavirus glycoprotein, e.g., Zaire ebolavirus glycoprotein); or
[5828] (ii) a bacterial or parasite antigen selected from the group consisting of a Plasmodium (e.g., Plasmodium falciparum, Plasmodium vivax, Plasmodium malariae, Plasmodium ovale, Plasmodium knowlesi) antigen, a Streptococcus (e.g., Streptococcus pneumoniae, Streptococcus pyogenes, Streptococcus agalactiae, Streptococcus mutans. Streptococcus viridans, Streptococcus anginosus, Streptococcus intermedius, Streptococcus constellatus) antigen (e.g., 24M epitope), a Neisseria gonorrhoeae antigen (e.g., gonococcal pilin), a Corynebacterium antigen (e.g., Corynebacterium diphtheria (diptheria toxin), Corynebacterium ulcerans, Corynebacterium pseudotuberculosis), Mycobacterium tuberculosis antigens, Brachyspira hyodysenteriae (Serpulina hydodysenteriae) antigen (e.g., Serpulina hydodysenteriae protective antigen), a Chlamydia antigen (e.g., Chlamydia trachomatis) (e.g., MOMP and PorB), a Mycoplasma sp. (e.g., Mycoplasma genitalium, Mycoplasma hyopneumoniae, Mycoplasma pneumonia) antigen, a Staphylococcus (e.g., Staphylococcus aureus, coagulase-negative staphylococci (CoNS), Staphylococcus aureus alpha toxin, Staphylococcus aureus bi-component leucocidin) antigen, a Klebsiella sp. antigen, an Escherichia coli antigen (e.g., E. coli shiga toxin type-2, E. coli shiga toxin type-1), a Bacillus sp. (e.g., Bacillus anthracis, e.g., Bacillus anthracis anthrax) antigen, a Pseudomonas aeruginosa antigen (e.g., Pseudomonas aeruginosa type III secretion system), an Enterococcus sp. antigen, an Enterobacter sp. antigen, a Proteus sp. antigen, an Actinobacter sp. antigen, a Mycobacterium avium (Mycobacterium avium complex (MAC)) antigen, a Salmonella bacteria antigen, a Clostridium difficile antigen, a Toxoplasma (e.g., Toxoplasma gondii) antigen, a Histoplasma antigen, a Candida antigen, a Coccidioides antigen, a Cryptococcus antigen, a Cryptosporidium antigen, and a Cystoisospora (e.g., Cystoisospora belli) antigen, and another antigen (e.g., endotoxins, lymphotoxins (e.g., lymphotoxin alpha LTA), phosphatidylserine, Hsp90, CCR5, lipoteichoic acid, clumping factor A).

[5829] In some aspects, the antigen binding polypeptides provided herein comprise a VL1 comprising a light chain complementarity determining region 1 (LCDR1), LCDR2, and/or LCDR3 of an antibody selected from the group consisting of libivirumab, rmab, rivabazumab pegol, setoxaximab, suvizumab, suvratoxumab, sevirumab, pritoxaximab, porgaviximab, REGN-EB3, obiltoxaximab, gedivumab, foravirumab, larcaviximab, motavizumab, palivizumab, rafivirumab, regavirumab, tuvirumab, cosfroviximab, felvizumab, atidortoxumab, edobacomab, nebacumab, pateclizumab, raxibacumab, urtoxazumab, tosatoxumab, berlimatoxumab, CR6261, diridavumab, firivumab, lesofavumab, navivumab, exbivirumab, lenvervimab, bavituximab, bezlotoxumab, efungumab, leronlimab, nirsevimab, pagibaximab, panobacumab, tefibazumab, ansuvimab, atoltivimab, maftivimab, and odesivimab.

[5830] In some aspects, the antigen binding polypeptides provided herein comprise a VL2 comprising a light chain complementarity determining region 1 (LCDR1), LCDR2, and/or LCDR3 of an antibody selected from the group consisting of libivirumab, rmab, rivabazumab pegol, setoxaximab, suvizumab, suvratoxumab, sevirumab, pritoxaximab, porgaviximab, REGN-EB3, obiltoxaximab, gedivumab, foravirumab, larcaviximab, motavizumab, palivizumab, rafivirumab, regavirumab, tuvirumab, cosfroviximab, felvizumab, atidortoxumab, edobacomab, nebacumab, pateclizumab, raxibacumab, urtoxazumab, tosatoxumab, berlimatoxumab, CR6261, diridavumab, firivumab, lesofavumab, navivumab, exbivirumab, lenvervimab, bavituximab, bezlotoxumab, efungumab, leronlimab, nirsevimab, pagibaximab, panobacumab, tefibazumab, ansuvimab, atoltivimab, maftivimab, and odesivimab.

[5831] In some aspects, the antigen binding polypeptides provided herein comprise a VH1 comprising a heavy chain complementarity determining region 1 (HCDR1), HCDR2, and/or HCDR3 of an antibody selected from the group consisting of libivirumab, rmab, rivabazumab pegol, setoxaximab, suvizumab, suvratoxumab, sevirumab, pritoxaximab, porgaviximab, REGN-EB3, obiltoxaximab, gedivumab, foravirumab, larcaviximab, motavizumab, palivizumab, rafivirumab, regavirumab, tuvirumab, cosfroviximab, felvizumab, atidortoxumab, edobacomab, nebacumab, pateclizumab, raxibacumab, urtoxazumab, tosatoxumab, berlimatoxumab, CR6261, diridavumab, firivumab, lesofavumab, navivumab, exbivirumab, lenvervimab, bavituximab, bezlotoxumab, efungumab, leronlimab, nirsevimab, pagibaximab, panobacumab, tefibazumab, ansuvimab, atoltivimab, maftivimab, and odesivimab.

[5832] In some aspects, the antigen binding polypeptides provided herein comprise a VH2 comprising a heavy chain complementarity determining region 1 (HCDR1), HCDR2, and/or HCDR3 of an antibody selected from the group consisting of libivirumab, rmab, rivabazumab pegol, setoxaximab, suvizumab, suvratoxumab, sevirumab, pritoxaximab, porgaviximab, REGN-EB3, obiltoxaximab, gedivumab, foravirumab, larcaviximab, motavizumab, palivizumab, rafivirumab, regavirumab, tuvirumab, cosfroviximab, felvizumab, atidortoxumab, edobacomab, nebacumab, pateclizumab, raxibacumab, urtoxazumab, tosatoxumab, berlimatoxumab, CR6261, diridavumab, firivumab, lesofavumab, navivumab, exbivirumab, lenvervimab, bavituximab, bezlotoxumab, efungumab, leronlimab, nirsevimab, pagibaximab, panobacumab, tefibazumab, ansuvimab, atoltivimab, maftivimab, and odesivimab.

[5833] In some aspects, the antigen binding polypeptides provided herein comprise a VL1 comprising a VL of an antibody selected from the group consisting of libivirumab, rmab, rivabazumab pegol, setoxaximab, suvizumab, suvratoxumab, sevirumab, pritoxaximab, porgaviximab, REGN-EB3, obiltoxaximab, gedivumab, foravirumab, larcaviximab, motavizumab, palivizumab, rafivirumab, regavirumab, tuvirumab, cosfroviximab, felvizumab, atidortoxumab, edobacomab, nebacumab, pateclizumab, raxibacumab, urtoxazumab, tosatoxumab, berlimatoxumab, CR6261, diridavumab, firivumab, lesofavumab, navivumab, exbivirumab, lenvervimab, bavituximab, bezlotoxumab, efungumab, leronlimab, nirsevimab, pagibaximab, panobacumab, tefibazumab, ansuvimab, atoltivimab, maftivimab, and odesivimab.

[5834] In some aspects, the antigen binding polypeptides provided herein comprise a VL2 comprising a VL of an antibody selected from the group consisting of libivirumab, rmab, rivabazumab pegol, setoxaximab, suvizumab, suvratoxumab, sevirumab, pritoxaximab, porgaviximab, REGN-EB3, obiltoxaximab, gedivumab, foravirumab, larcaviximab, motavizumab, palivizumab, rafivirumab, regavirumab, tuvirumab, cosfroviximab, felvizumab, atidortoxumab, edobacomab, nebacumab, pateclizumab, raxibacumab, urtoxazumab, tosatoxumab, berlimatoxumab, CR6261, diridavumab, firivumab, lesofavumab, navivumab, exbivirumab, lenvervimab, bavituximab, bezlotoxumab, efungumab, leronlimab, nirsevimab, pagibaximab, panobacumab, tefibazumab, ansuvimab, atoltivimab, maftivimab, and odesivimab.

[5835] In some aspects, the antigen binding polypeptides provided herein comprise a VH1 comprising a VH of an antibody selected from the group consisting of libivirumab, rmab, rivabazumab pegol, setoxaximab, suvizumab, suvratoxumab, sevirumab, pritoxaximab, porgaviximab, REGN-EB3, obiltoxaximab, gedivumab, foravirumab, larcaviximab, motavizumab, palivizumab, rafivirumab, regavirumab, tuvirumab, cosfroviximab, felvizumab, atidortoxumab, edobacomab, nebacumab, pateclizumab, raxibacumab, urtoxazumab, tosatoxumab, berlimatoxumab, CR6261, diridavumab, firivumab, lesofavumab, navivumab, exbivirumab, lenvervimab, bavituximab, bezlotoxumab, efungumab, leronlimab, nirsevimab, pagibaximab, panobacumab, tefibazumab, ansuvimab, atoltivimab, maftivimab, and odesivimab.

[5836] In some aspects, the antigen binding polypeptides provided herein comprise a VH2 comprising a VH of an antibody selected from the group consisting of libivirumab, rmab, rivabazumab pegol, setoxaximab, suvizumab, suvratoxumab, sevirumab, pritoxaximab, porgaviximab, REGN-EB3, obiltoxaximab, gedivumab, foravirumab, larcaviximab, motavizumab, palivizumab, rafivirumab, regavirumab, tuvirumab, cosfroviximab, felvizumab, atidortoxumab, edobacomab, nebacumab, pateclizumab, raxibacumab, urtoxazumab, tosatoxumab, berlimatoxumab, CR6261, diridavumab, firivumab, lesofavumab, navivumab, exbivirumab, lenvervimab, bavituximab, bezlotoxumab, efungumab, leronlimab, nirsevimab, pagibaximab, panobacumab, tefibazumab, ansuvimab, atoltivimab, maftivimab, and odesivimab.

[5837] In some aspects, the antigen binding polypeptides provided herein comprise a VL1 comprising (i) a complementarity determining region (CDR) 1 having an amino acid sequence that is at least 65%, at least 70%, at least 75%, at least 80%, at least 85%, at least 90%, at least 95%, at least 99%, or 100% identical to any one of SEQ ID NOs: 1428, 1793, 1798, 1810, 1817, 1824, 1977, 1985, 1993 and 2001; (ii) a CDR2 having an amino acid sequence that is at least 65%, at least 70%, at least 75%, at least 80%, at least 85%, at least 90%, at least 95%, at least 99%, or 100% identical to any one of SEQ ID NOs: 1978, 1986, 1994, and 2002; or at least 65%, at least 70%, at least 75%, at least 80%, at least 85%, at least 90%, at least 95%, at least 99%, or 100% identical to any one of amino acid sequences YTS, DTS, GAS, and AAS; and (iii) a CDR3 having an amino acid sequence that is at least 65%, at least 70%, at least 75%, at least 80%, at least 85%, at least 90%, at least 95%, at least 99%, or 100% identical to any one of SEQ ID NOs: 1229, 1799, 1805, 1811, 1818, 1825, 1979, 1987, 1995, and 2003.

[5838] In some aspects, the antigen binding polypeptides provided herein comprise a VL2 comprising (i) a complementarity determining region (CDR) 1 having an amino acid sequence that is at least 65%, at least 70%, at least 75%, at least 80%, at least 85%, at least 90%, at least 95%, at least 99%, or 100% identical to any one of SEQ ID NOs: 1428, 1793, 1798, 1810, 1817, 1824, 1977, 1985, 1993 and 2001; (ii) a CDR2 having an amino acid sequence that is at least 65%, at least 70%, at least 75%, at least 80%, at least 85%, at least 90%, at least 95%, at least 99%, or 100% identical to any one of SEQ ID NOs: 1978, 1986, 1994, and 2002; or at least 65%, at least 70%, at least 75%, at least 80%, at least 85%, at least 90%, at least 95%, at least 99%, or 100% identical to any one of amino acid sequences YTS, DTS, GAS, and AAS; and (iii) a CDR3 having an amino acid sequence that is at least 65%, at least 70%, at least 75%, at least 80%, at least 85%, at least 90%, at least 95%, at least 99%, or 100% identical to any one of SEQ ID NOs: 1229, 1799, 1805, 1811, 1818, 1825, 1979, 1987, 1995, and 2003.

[5839] In some aspects, the antigen binding polypeptides provided herein comprise a VH1 comprising (i) a complementarity determining region (CDR) 1 having an amino acid sequence that is at least 65%, at least 70%, at least 75%, at least 80%, at least 85%, at least 90%, at least 95%, at least 99%, or 100% identical to any one of SEQ ID NOs: 1577, 1795, 1801, 1813, 1820, 1827, 1981, 1989, 1997, and 2005; (ii) a CDR2 having an amino acid sequence that is at least 65%, at least 70%, at least 75%, at least 80%, at least 85%, at least 90%, at least 95%, at least 99%, or 100% identical to any one of SEQ ID NOs: 1159, 1802, 1807, 1814, 1821, 1828, 1982, 1990, 1998, and 2006; and (iii) a CDR3 having an amino acid sequence that is at least 65%, at least 70%, at least 75%, at least 80%, at least 85%, at least 90%, at least 95%, at least 99%, or 100% identical to any one of SEQ ID NOs: 1796, 1803, 1808, 1815, 1822, 1829, 1983, 1991, 1999, and 2007.

[5840] In some aspects, the antigen binding polypeptides provided herein comprise a VH2 comprising (i) a complementarity determining region (CDR) 1 having an amino acid sequence that is at least 65%, at least 70%, at least 75%, at least 80%, at least 85%, at least 90%, at least 95%, at least 99%, or 100% identical to any one of SEQ ID NOs: 1577, 1795, 1801, 1813, 1820, 1827, 1981, 1989, 1997, and 2005; (ii) a CDR2 having an amino acid sequence that is at least 65%, at least 70%, at least 75%, at least 80%, at least 85%, at least 90%, at least 95%, at least 99%, or 100% identical to any one of SEQ ID NOs: 1159, 1802, 1807, 1814, 1821, 1828, 1982, 1990, 1998, and 2006; and (iii) a CDR3 having an amino acid sequence that is at least 65%, at least 70%, at least 75%, at least 80%, at least 85%, at least 90%, at least 95%, at least 99%, or 100% identical to any one of SEQ ID NOs: 1796, 1803, 1808, 1815, 1822, 1829, 1983, 1991, 1999, and 2007.

[5841] In some aspects, the antigen binding polypeptides provided herein comprise a VL1 comprising an amino acid sequence that is at least 65%, at least 70%, at least 75%, at least 80%, at least 85%, at least 90%, at least 95%, at least 99%, or 100% identical to any one of SEQ ID NOs: 1794, 1800, 1806, 1812, 1819, 1826, 1980, 1988, 1996, and 2004.

[5842] In some aspects, the antigen binding polypeptides provided herein comprise a VL2 comprising an amino acid sequence that is at least 65%, at least 70%, at least 75%, at least 80%, at least 85%, at least 90%, at least 95%, at least 99%, or 100% identical to any one of SEQ ID NOs: 1794, 1800, 1806, 1812, 1819, 1826, 1980, 1988, 1996, and 2004.

[5843] In some aspects, the antigen binding polypeptides provided herein comprise a VH1 comprising an amino acid sequence that is at least 65%, at least 70%, at least 75%, at least 80%, at least 85%, at least 90%, at least 95%, at least 99%, or 100% identical to any one of SEQ ID NOs 1797, 1804, 1809, 1816, 1823, 1830, 1984, 1992, 2000, and 2008.

[5844] In some aspects, the antigen binding polypeptides provided herein comprise a VH2 comprising an amino acid sequence that is at least 65%, at least 70%, at least 75%, at least 80%, at least 85%, at least 90%, at least 95%, at least 99%, or 100% identical to any one of SEQ ID NOs 1797, 1804, 1809, 1816, 1823, 1830, 1984, 1992, 2000, and 2008.

[5845] In some aspects, the other-pathology antigen is selected from the group consisting of Amyloid beta, β-amyloid, PCSK9, IFN-α/β receptor. Rhesus factor, nerve growth factor (NGF), DPP4, fibrin II beta chain, ACVR2B, serum amyloid A protein SOST, FGF 23, VWF, tissue factor pathway inhibitor (TFPI), 1-40 and 1-42, selectin P, glucagon receptor (GCGR), amyloid P component, GDF-8, CXCL10 IP-10, repulsive guidance molecule A RGMA, IFN-γ, activated F9/F10, calcitonin gene-related peptide (CGRP), angiopoietin 3, IFN receptor, IFN-γ, calcitonin, β-amyloid 1-40 and 1-42, tau protein, dabigatran, cardiac myosin, selectin P, Complement factor D (CFD), kallikrein, GDF-8, IGHE, tissue factor pathway inhibitor (TFPI), GMCSF receptor α-chain, amyloid, IgE Fc region, MASP-2, oxLDL, GMCSF, NOGO-A, Alpha-synuclein, NGF, myelin-associated glycoprotein, RHD (gene) (RHD), sclerostin, FCGRT, sclerostin SOST, mucosal addressin cell adhesion molecule, myostatin, RSVFR, complement component 1s C1s, C5, and IL31.

[5846] In some aspects, the antigen binding polypeptides provided herein comprise a VL1 comprising a light chain complementarity determining region 1 (LCDR1), LCDR2, and/or LCDR3 of an antibody selected from the group consisting of aducanumab, alirocumab, frovocimab, lodelcizumab, bococizumab, evolocumab, ralpancizumab, anifrolumab, atorolimumab, bapineuzumab, bedinvetmab, begelomab, biciromab, bimagrumab, birtamimab, blosozumab, burosumab, caplacizumab, concizumab, crenczumab, crizanlizumab, crotedumab, dezamizumab, domagrozumab, donanemab, eldelumab, elezanumab, emapalumab, emicizumab, eptinezumab, erenumab, evinacumab, faralimomab, fasinumab, fontolizumab, fremanezumab, frunevetmab, fulranumab, galcanezumab, gantenerumab, gosuranemab, idarucizumab, imciromab, inclacumab, lampalizumab, lanadelumab, landogrozumab, lecanemab, ligelizumab, marstacimab, mavrilimumab, morolimumab, NEOD001, omalizumab, oMS721, orticumab, otilimab, ozanezumab, ponezumab, prasinezumab, quilizumab, ranevetmab, refanezumab, roledumab, romosozumab, rozanolixizumab, setrusumab, SHP647, solanezumab, stamulumab, suptavumab, sutimlimab, tanezumab, crovalimab, and lokivetmab.

[5847] In some aspects, the antigen binding polypeptides provided herein comprise a VL2 comprising a light chain complementarity determining region 1 (LCDR1), LCDR2, and/or LCDR3 of an antibody selected from the group consisting of aducanumab, alirocumab, frovocimab, lodelcizumab, bococizumab, evolocumab, ralpancizumab, anifrolumab, atorolimumab, bapineuzumab, bedinvetmab, begelomab, biciromab, bimagrumab, birtamimab, blosozumab, burosumab, caplacizumab, concizumab, crenczumab, crizanlizumab, crotedumab, dezamizumab, domagrozumab, donanemab, eldelumab, elezanumab, emapalumab, emicizumab, eptinezumab, erenumab, evinacumab, faralimomab, fasinumab, fontolizumab, fremanezumab, frunevetmab, fulranumab, galcanezumab, gantenerumab, gosuranemab, idarucizumab, imciromab, inclacumab, lampalizumab, lanadelumab, landogrozumab, lecanemab, ligelizumab, marstacimab, mavrilimumab, morolimumab, NEOD001, omalizumab, oMS721, orticumab, otilimab, ozanezumab, ponezumab, prasinezumab, quilizumab, ranevetmab, refanezumab, roledumab, romosozumab, rozanolixizumab, setrusumab, SHP647, solanezumab, stamulumab, suptavumab, sutimlimab, tanezumab, crovalimab, and lokivetmab.

[5848] In some aspects, the antigen binding polypeptides provided herein comprise a VH1 comprising a heavy chain complementarity determining region 1 (HCDR1), HCDR2, and/or HCDR3 of an antibody selected from the group consisting of aducanumab, alirocumab, frovocimab, lodelcizumab, bococizumab, evolocumab, ralpancizumab, anifrolumab, atorolimumab, bapineuzumab, bedinvetmab, begelomab, biciromab, bimagrumab, birtamimab, blosozumab, burosumab, caplacizumab, concizumab, crenezumab, crizanlizumab, crotedumab, dezamizumab, domagrozumab, donanemab, eldelumab, elezanumab, emapalumab, emicizumab, eptinezumab, erenumab, evinacumab, faralimomab, fasinumab, fontolizumab, fremanezumab, frunevetmab, fulranumab, galcanezumab, gantenerumab, gosuranemab, idarucizumab, imciromab, inclacumab, lampalizumab, lanadelumab, landogrozumab, lecanemab, ligelizumab, marstacimab, mavrilimumab, morolimumab, NEOD001, omalizumab, oMS721, orticumab, otilimab, ozanezumab, ponezumab, prasinezumab, quilizumab, ranevetmab, refanezumab, roledumab, romosozumab, rozanolixizumab, setrusumab, SHP647, solanezumab, stamulumab, suptavumab, sutimlimab, tanezumab, crovalimab, and lokivetmab.

[5849] In some aspects, the antigen binding polypeptides provided herein comprise a VH2 comprising a heavy chain complementarity determining region 1 (HCDR1), HCDR2, and/or HCDR3 of an antibody selected from the group consisting of aducanumab, alirocumab, frovocimab, lodelcizumab, bococizumab, evolocumab, ralpancizumab, anifrolumab, atorolimumab, bapineuzumab, bedinvetmab, begelomab, biciromab, bimagrumab, birtamimab, blosozumab, burosumab, caplacizumab, concizumab, crenezumab, crizanlizumab, crotedumab, dezamizumab, domagrozumab, donanemab, eldelumab, elezanumab, emapalumab, emicizumab, eptinezumab, erenumab, evinacumab, faralimomab, fasinumab, fontolizumab, fremanezumab, frunevetmab, fulranumab, galcanezumab, gantenerumab, gosuranemab, idarucizumab, imciromab, inclacumab, lampalizumab, lanadelumab, landogrozumab, lecanemab, ligelizumab, marstacimab, mavrilimumab, morolimumab, NEOD001, omalizumab, oMS721, orticumab, otilimab, ozanczumab, ponezumab, prasinezumab, quilizumab, ranevetmab, refanezumab, roledumab, romosozumab, rozanolixizumab, setrusumab, SHP647, solanezumab, stamulumab, suptavumab, sutimlimab, tanezumab, crovalimab, and lokivetmab.

[5850] In some aspects, the antigen binding polypeptides provided herein comprise a VL1 comprising a VL of an antibody selected from the group consisting of aducanumab, alirocumab, frovocimab, lodelcizumab, bococizumab, evolocumab, ralpancizumab, anifrolumab, atorolimumab, bapineuzumab, bedinvetmab, begelomab, biciromab, bimagrumab, birtamimab, blosozumab, burosumab, caplacizumab, concizumab, crenezumab, crizanlizumab, crotedumab, dezamizumab, domagrozumab, donanemab, eldelumab, elezanumab, emapalumab, emicizumab, eptinezumab, erenumab, evinacumab, faralimomab, fasinumab, fontolizumab, fremanezumab, frunevetmab, fulranumab, galcanezumab, gantenerumab, gosuranemab, idarucizumab, imciromab, inclacumab, lampalizumab, lanadelumab, landogrozumab, lecanemab, ligelizumab, marstacimab, mavrilimumab, morolimumab, NEOD001, omalizumab, oMS721, orticumab, otilimab, ozanezumab, ponezumab, prasinezumab, quilizumab, ranevetmab, refanezumab, roledumab, romosozumab, rozanolixizumab, setrusumab, SHP647, solanezumab, stamulumab, suptavumab, sutimlimab, tanezumab, crovalimab, and lokivetmab.

[5851] In some aspects, the antigen binding polypeptides provided herein comprise a VL2 comprising a VL of an antibody selected from the group consisting of aducanumab, alirocumab, frovocimab, lodelcizumab, bococizumab, evolocumab, ralpancizumab, anifrolumab, atorolimumab, bapineuzumab, bedinvetmab, begelomab, biciromab, bimagrumab, birtamimab, blosozumab, burosumab, caplacizumab, concizumab, crenezumab, crizanlizumab, crotedumab, dezamizumab, domagrozumab, donanemab, eldelumab, elezanumab, emapalumab, emicizumab, eptinezumab, erenumab, evinacumab, faralimomab, fasinumab, fontolizumab, fremanezumab, frunevetmab, fulranumab, galcanezumab, gantenerumab, gosuranemab, idarucizumab, imciromab, inclacumab, lampalizumab, lanadelumab, landogrozumab, lecanemab, ligelizumab, marstacimab, mavrilimumab, morolimumab, NEOD001, omalizumab, oMS721, orticumab, otilimab, ozanezumab, ponezumab, prasinezumab, quilizumab, ranevetmab, refanezumab, roledumab, romosozumab, rozanolixizumab, setrusumab, SHP647, solanezumab, stamulumab, suptavumab, sutimlimab, tanezumab, crovalimab, and lokivetmab.

[5852] In some aspects, the antigen binding polypeptides provided herein comprise a VH1 comprising a VH of an antibody selected from the group consisting of aducanumab, alirocumab, frovocimab, lodelcizumab, bococizumab, evolocumab, ralpancizumab, anifrolumab, atorolimumab, bapineuzumab, bedinvetmab, begelomab, biciromab, bimagrumab, birtamimab, blosozumab, burosumab, caplacizumab, concizumab, crenezumab, crizanlizumab, crotedumab, dezamizumab, domagrozumab, donanemab, eldelumab, elezanumab, emapalumab, emicizumab, eptinezumab, erenumab, evinacumab, faralimomab, fasinumab, fontolizumab, fremanezumab, frunevetmab, fulranumab, galcanezumab, gantenerumab, gosuranemab, idarucizumab, imciromab, inclacumab, lampalizumab, lanadelumab, landogrozumab, lecanemab, ligelizumab, marstacimab, mavrilimumab, morolimumab, NEOD001, omalizumab, oMS721, orticumab, otilimab, ozanezumab, ponezumab, prasinezumab, quilizumab, ranevetmab, refanezumab, roledumab, romosozumab, rozanolixizumab, setrusumab, SHP647, solanezumab, stamulumab, suptavumab, sutimlimab, tanezumab, crovalimab, and lokivetmab.

[5853] In some aspects, the antigen binding polypeptides provided herein comprise a VH2 comprising a VH of an antibody selected from the group consisting of aducanumab, alirocumab, frovocimab, lodelcizumab, bococizumab, evolocumab, ralpancizumab, anifrolumab, atorolimumab, bapineuzumab, bedinvetmab, begelomab, biciromab, bimagrumab, birtamimab, blosozumab, burosumab, caplacizumab, concizumab, crenezumab, crizanlizumab, crotedumab, dezamizumab, domagrozumab, donanemab, eldelumab, elezanumab, emapalumab, emicizumab, eptinezumab, erenumab, evinacumab, faralimomab, fasinumab, fontolizumab, fremanezumab, frunevetmab, fulranumab, galcanezumab, gantenerumab, gosuranemab, idarucizumab, imciromab, inclacumab, lampalizumab, lanadelumab, landogrozumab, lecanemab, ligelizumab, marstacimab, mavrilimumab, morolimumab, NEOD001, omalizumab, oMS721, orticumab, otilimab, ozanezumab, ponezumab, prasinezumab, quilizumab, ranevetmab, refanezumab, roledumab, romosozumab, rozanolixizumab, setrusumab, SHP647, solanezumab, stamulumab, suptavumab, sutimlimab, tanezumab, crovalimab, and lokivetmab.

[5854] In some aspects, the antigen binding polypeptides provided herein comprise a VL1 comprising (i) a complementarity determining region (CDR) 1 having an amino acid sequence that is at least 65%, at least 70%, at least 75%, at least 80%, at least 85%, at least 90%, at least 95%, at least 99%, or 100% identical to any one of SEQ ID NOs: 1120, 1228, 1359, 1519, 1831, 1838, 1845, 1852, 1859, 1866, 1872, 1878, 1885, 1891, 1898, 1905, 1911, 1917, 1924, 1931, 1938, 1945, and 1963; (ii) a CDR2 having an amino acid sequence that is at least 65%, at least 70%, at least 75%, at least 80%, at least 85%, at least 90%, at least 95%, at least 99%, or 100% identical to any one of amino acid sequences AAS, AVS, DAS, DNN, EDN, EVS, GAS, GNG, KAS, KVS, LVS, NTD, STS, WAS, and YTS; and (iii) a CDR3 having an amino acid sequence that is at least 65%, at least 70%, at least 75%, at least 80%, at least 85%, at least 90%, at least 95%, at least 99%, or 100% identical to any one of SEQ ID NOs: 1360, 1832, 1839, 1846, 1853, 1860, 1867, 1873, 1879, 1886, 1892, 1899, 1906, 1912, 1918, 1925, 1932, 1939, 1946, 1951, 1957, 1964, and 1970.

[5855] In some aspects, the antigen binding polypeptides provided herein comprise a VL2 comprising (i) a complementarity determining region (CDR) 1 having an amino acid sequence that is at least 65%, at least 70%, at least 75%, at least 80%, at least 85%, at least 90%, at least 95%, at least 99%, or 100% identical to any one of SEQ ID NOs: 1120, 1228, 1359, 1519, 1831, 1838, 1845, 1852, 1859, 1866, 1872, 1878, 1885, 1891, 1898, 1905, 1911, 1917, 1924, 1931, 1938, 1945, and 1963; (ii) a CDR2 having an amino acid sequence that is at least 65%, at least 70%, at least 75%, at least 80%, at least 85%, at least 90%, at least 95%, at least 99%, or 100% identical to any one of amino acid sequences AAS, AVS, DAS, DNN, EDN, EVS, GAS, GNG, KAS, KVS, LVS, NTD, STS, WAS, and YTS; and (iii) a CDR3 having an amino acid sequence that is at least 65%, at least 70%, at least 75%, at least 80%, at least 85%, at least 90%, at least 95%, at least 99%, or 100% identical to any one of SEQ ID NOs: 1360, 1832, 1839, 1846, 1853, 1860, 1867, 1873, 1879, 1886, 1892, 1899, 1906, 1912, 1918, 1925, 1932, 1939, 1946, 1951, 1957, 1964, and 1970.

[5856] In some aspects, the antigen binding polypeptides provided herein comprise a VH1 comprising (i) a complementarity determining region (CDR) 1 having an amino acid sequence that is at least 65%, at least 70%, at least 75%, at least 80%, at least 85%, at least 90%, at least 95%, at least 99%, or 100% identical to any one of SEQ ID NOs: 1309, 1362, 1437, 1552, 1618, 1639, 1834, 1841, 1848, 1855, 1862, 1881, 1894, 1901, 1920, 1927, 1934, 1941, 1953, 1959, and 1966; (ii) a CDR2 having an amino acid sequence that is at least 65%, at least 70%, at least 75%, at least 80%, at least 85%, at least 90%, at least 95%, at least 99%, or 100% identical to any one of SEQ ID NOs: 1363, 1835, 1842, 1849, 1856, 1863, 1869, 1875, 1882, 1888, 1895, 1902, 1908, 1914, 1921, 1928, 1935, 1942, 1948, 1954, 1960, 1967, and 1972; and (iii) a CDR3 having an amino acid sequence that is at least 65%, at least 70%, at least 75%, at least 80%, at least 85%, at least 90%, at least 95%, at least 99%, or 100% identical to any one of SEQ ID NOs: 1364, 1836, 1843, 1850, 1857, 1864, 1870, 1876, 1883, 1889, 1896, 1903, 1909, 1915, 1922, 1929, 1936, 1943, 1949, 1955, 1961, 1968, and 1973.

[5857] In some aspects, the antigen binding polypeptides provided herein comprise a VH2 comprising (i) a complementarity determining region (CDR) 1 having an amino acid sequence that is at least 65%, at least 70%, at least 75%, at least 80%, at least 85%, at least 90%, at least 95%, at least 99%, or 100% identical to any one of SEQ ID NOs: 1309, 1362, 1437, 1552, 1618, 1639, 1834, 1841, 1848, 1855, 1862, 1881, 1894, 1901, 1920, 1927, 1934, 1941, 1953, 1959, and 1966; (ii) a CDR2 having an amino acid sequence that is at least 65%, at least 70%, at least 75%, at least 80%, at least 85%, at least 90%, at least 95%, at least 99%, or 100% identical to any one of SEQ ID NOs: 1363, 1835, 1842, 1849, 1856, 1863, 1869, 1875, 1882, 1888, 1895, 1902, 1908, 1914, 1921, 1928, 1935, 1942, 1948, 1954, 1960, 1967, and 1972; and (iii) a CDR3 having an amino acid sequence that is at least 65%, at least 70%, at least 75%, at least 80%, at least 85%, at least 90%, at least 95%, at least 99%, or 100% identical to any one of SEQ ID NOs: 1364, 1836, 1843, 1850, 1857, 1864, 1870, 1876, 1883, 1889, 1896, 1903, 1909, 1915, 1922, 1929, 1936, 1943, 1949, 1955, 1961, 1968, and 1973.

[5858] In some aspects, the antigen binding polypeptides provided herein comprise a VL1 comprising an amino acid sequence that is at least 65%, at least 70%, at least 75%, at least 80%, at least 85%, at least 90%, at least 95%, at least 99%, or 100% identical to any one of SEQ ID NOs: 1361, 1833, 1840, 1847, 1854, 1861, 1868, 1874, 1880, 1887, 1893, 1900, 1907, 1913, 1919, 1926, 1933, 1940, 1947, 1952, 1958, 1965, and 1971.

[5859] In some aspects, the antigen binding polypeptides provided herein comprise a VL2 comprising an amino acid sequence that is at least 65%, at least 70%, at least 75%, at least 80%, at least 85%, at least 90%, at least 95%, at least 99%, or 100% identical to any one of SEQ ID NOs: 1361, 1833, 1840, 1847, 1854, 1861, 1868, 1874, 1880, 1887, 1893, 1900, 1907, 1913, 1919, 1926, 1933, 1940, 1947, 1952, 1958, 1965, and 1971.

[5860] In some aspects, the antigen binding polypeptides provided herein comprise a VH1 comprising an amino acid sequence that is at least 65%, at least 70%, at least 75%, at least 80%, at least 85%, at least 90%, at least 95%, at least 99%, or 100% identical to any one of SEQ ID NOs: 1365, 1837, 1844, 1851, 1858, 1865, 1871, 1877, 1884, 1890, 1897, 1904, 1910, 1916, 1923, 1930, 1937, 1944, 1950, 1956, 1962, 1969, and 1974.

[5861] In some aspects, the antigen binding polypeptides provided herein comprise a VH2 comprising an amino acid sequence that is at least 65%, at least 70%, at least 75%, at least 80%, at least 85%, at least 90%, at least 95%, at least 99%, or 100% identical to any one of SEQ ID NOs: 1365, 1837, 1844, 1851, 1858, 1865, 1871, 1877, 1884, 1890, 1897, 1904, 1910, 1916, 1923, 1930, 1937, 1944, 1950, 1956, 1962, 1969, and 1974.

[5862] In some aspects, the antigen binding polypeptides provided herein further comprise an Fc region. In some aspects, the antigen binding polypeptides provided herein further comprise an Fc region at the carboxy-terminus. In some aspects, the Fc region comprises an immunoglobulin heavy chain constant region 2 (CH2) and/or an immunoglobulin heavy chain constant region 3 (CH3). In some aspects, the Fc region further comprises an immunoglobulin hinge (i.e., a hinge region). In some aspects, the hinge region comprises an amino acid sequence at least 65%, at least 70%, at least 75%, at least 80%, at least 85%, at least 90%, at least 95%, at least 99%, or 100% identical to any one of SEQ ID NOs: 635, 636, 1072, 1073, or 1074. In some aspects, the Fc region comprises a CH2 and a CH3. In some aspects, the CH2 comprises an amino acid sequence that is at least 65%, at least 70%, at least 75%, at least 80%, at least 85%, at least 90%, at least 95%, at least 99%, or 100% identical to any one of SEQ ID NOs: 1075-1078. In some aspects, the CH3 comprises an amino acid sequence that is at least 65%, at least 70%, at least 75%, at least 80%, at least 85%, at least 90%, at least 95%, at least 99%, or 100% identical to any one of SEQ ID NOs: 1079-1085. In some aspects, the Fc region comprises an amino acid sequence that is at least 65%, at least 70%, at least 75%, at least 80%, at least 85%, at least 90%, at least 95%, at least 99%, or 100% identical to any one of SEQ ID NOs: 376-380.

[5863] In some aspects, the Fc region comprises one or more amino acid substitutions. In some aspects, the one or more amino acid substitutions comprise one or more half-life extension amino acid substitutions. In some aspects, the one or more half-life extension amino acid substitutions comprise one or more of amino acid substitutions M428L, N434A, N434S, L234F, L235E, P331S, M252Y, S254T, and T256E, or equivalent thereof, based on the EU numbering scheme. In some aspects, the one or more half-life extension amino acid substitutions comprise a LA (M428L and N434A, or equivalent thereof, based on the EU numbering scheme) amino acid substitution. In some aspects, the one or more half-life extension amino acid substitutions comprise a LS (M428L and N434S, or equivalent thereof, based on the EU numbering scheme) amino acid substitution. In some aspects, the one or more half-life extension amino acid substitutions comprise L234F and L235E, or equivalent thereof (based on the EU numbering scheme) amino acid substitutions. In some aspects, the one or more half-life extension amino acid substitutions comprise a TM (L234F, L235E, and P331S, or equivalent thereof, based on the EU numbering scheme) amino acid substitution. In some aspects, the one or more half-life extension amino acid substitutions comprise a YTE (M252Y, S254T, and T256E, or equivalent thereof, based on the EU numbering scheme) amino acid substitution.

[5864] In some aspects, the Fc region comprises at least one knob-into-hole modification. In some aspects, the antigen binding polypeptides disclosed herein are comprised in IgG1 or IgG4 antibodies or antigen binding fragments thereof. In some aspects, the knob-into-hole modification comprises one or more of knob substitutions of S354C and T366W, or equivalent thereof, and/or one or more of hole substitutions of Y349C, T366S, L368A, Y407V, or equivalent thereof, or a combination thereof, based on the EU numbering scheme. In some aspects, the Fc region comprises a knob-into-hole modification comprising knob substitutions of S354C and T366W, or equivalent thereof, and/or hole substitutions of Y349C, T366S, L368A and Y407V, or equivalent thereof, and/or a half-life extension amino acid substitution comprising: a LA (M428L and N434A, or equivalent thereof, based on the EU numbering scheme) amino acid substitution, a LS (M428L and N434S, or equivalent thereof, based on the EU numbering scheme) amino acid substitution, L234F and L235E, or equivalent thereof (based on the EU numbering scheme) amino acid substitutions, a TM (L234F, L235E, and P331S, or equivalent thereof, based on the EU numbering scheme) amino acid substitution, a YTE (M252Y, S254T, and T256E, or equivalent thereof, based on the EU numbering scheme) amino acid substitution, or any combination thereof.

[5865] In some aspects, the Fc region comprises knob substitutions of S354C and T366W, or equivalent thereof, and a half-life extension amino acid substitution comprising: a LA (M428L and N434A, or equivalent thereof, based on the EU numbering scheme) amino acid substitution, a LS (M428L and N434S, or equivalent thereof, based on the EU numbering scheme) amino acid substitution, L234F and L235E, or equivalent thereof (based on the EU numbering scheme) amino acid substitutions, a TM (L234F, L235E, and P331S, or equivalent thereof, based on the EU numbering scheme) amino acid substitution, a YTE (M252Y, S254T, and T256E, or equivalent thereof, based on the EU numbering scheme) amino acid substitution, or any combination thereof.

[5866] In some aspects, the Fc region comprises hole substitutions of Y349C, T366S, L368A and Y407V, or equivalent thereof, and a half-life extension amino acid substitution comprising: a LA (M428L and N434A, or equivalent thereof, based on the EU numbering scheme) amino acid substitution, a LS (M428L and N434S, or equivalent thereof, based on the EU numbering scheme) amino acid substitution, L234F and L235E, or equivalent thereof (based on the EU numbering scheme) amino acid substitutions, a TM (L234F, L235E, and P331S, or equivalent thereof, based on the EU numbering scheme) amino acid substitution, a YTE (M252Y, S254T, and T256E, or equivalent thereof, based on the EU numbering scheme) amino acid substitution, or any combination thereof.

[5867] In some aspects, the antigen binding polypeptides disclosed herein comprise one or more Fc effector function knockout mutation. In some aspects, the antigen binding polypeptides disclosed herein are comprised in IgG1 or IgG4 antibodies or antigen binding fragments thereof. In some aspects, the Fc effector function knockout mutation is L234A, L235A, P239A, or equivalent thereof, or a combination thereof, based on the EU numbering scheme.

[5868] In some aspects, the antigen binding polypeptides disclosed herein comprise a mutation at a glycosylation site. In some aspects, the mutation at a glycosylation site is a mutation at an N-glycosylation site. In some aspects, the antigen binding polypeptides comprise a VH comprising a mutation at a glycosylation site. In some aspects, the mutation at a glycosylation site is a mutation at an N-glycosylation site. In some aspects, the mutation at an N-glycosylation site is at amino acid N62, or equivalent thereof, of the VH region or equivalent thereof. In some aspects, the mutation at an N-glycosylation site at amino acid N62 is N62Q or N62S, or equivalent thereof.

[5869] In some aspects, the antigen binding polypeptides disclosed herein, comprise one or more optional linkers. The one or more optional linkers are indicated herein as Ln, wherein n is an integer, and the integer next to each L indicates each L comprised in the antigen binding polypeptides disclosed herein. For example, if an antigen binding polypeptide disclosed herein comprises two linkers, the first linker from N-terminus to C-terminus is herein indicated as L1, and the second linker from N-terminus to C-terminus is herein indicated as L2. In some aspects, any one of the optional linkers each independently have a length of from 0 amino acids to about 50 amino acids. In some aspects, any one of the optional linkers each independently have a length of from 5 amino acids to about 40 amino acids.

[5870] In some aspects, any one of the optional linkers are non-immunogenic. In some aspects, any one of the optional linkers do not contain a consensus T cell epitope.

[5871] In some aspects, any of Ln comprises an amino acid sequence of G or A, or an amino acid sequence at least 65%, at least 70%, at least 75%, at least 80%, at least 85%, at least 90%, at least 95%, at least 99%, or 100% identical to amino acid sequence GSS or ASG, or an amino acid sequence at least 65%, at least 70%, at least 75%, at least 80%, at least 85%, at least 90%, at least 95%, at least 99%, or 100% identical to any one of SEQ ID NOs: 333-373 or 967-971. In some aspects. Ln comprises an amino acid sequence at least 65%, at least 70%, at least 75%, at least 80%, at least 85%, at least 90%, at least 95%, at least 99%, or 100% identical to any one of SEQ ID NOs: 333-345 or 967-971.

[5872] In some aspects, the antigen binding polypeptide is selected from any one of the more specific aspects provided herein for an antigen binding polypeptide in an antigen binding polypeptide complex having no more than three polypeptide chains.

[5873] In some aspects, the antigen binding polypeptide further comprises one or more immunoglobulin heavy chain constant region 1 (CH1) and/or one or more immunoglobulin light chain constant region (CL) between any one of the variable regions and/or optional amino acid linkers (e.g., between VL1 and L1, between L1 and VH1, between VH1 and L2, between L2 and VL1, between L1 and VL2, between VL2 and L2, between L2 and VH2, between VH2 and L3, between L3 and VH1, between VL1 and L1, between L1 and VH2, between VH2 and L2, between. L2 and VL2, between VL2 and L3, between L3 and VH1, between VH1 and L4, between L4 and VH2, between VH2 and L5, between L5 and VL2, between VL2 and L6, between L6 and VL1, between VH1 and L4, between L4 and VL2, between L4 and VL2, between VL2 and L5, between L5 and VH2, between VH2 and L6, or between L6 and VL1).

[5874] In some aspects, the antigen binding polypeptide is selected from any one of the more specific aspects provided herein for an antigen binding polypeptide in an antigen binding polypeptide complex having no more than three polypeptide chains, and further comprises one or more immunoglobulin heavy chain constant region 1 (CH1) and/or one or more immunoglobulin light chain constant region (CL) between any one of the variable regions and/or optional amino acid linkers (e.g., between VL1 and L1, between L1 and VH1, between VH1 and L2, between L2 and VL1, between L1 and VL2, between VL2 and L2, between L2 and VH2, between VH2 and L3, between L3 and VH1, between VL1 and L1, between L1 and VH2, between VH2 and L2, between. L2 and VL2, between VL2 and L3, between L3 and VH1, between VH1 and L4, between L4 and VH2, between VH2 and L5, between L5 and VL2, between VL2 and L6, between L6 and VL1, between VH1 and L4, between L4 and VL2, between L4 and VL2, between VL2 and L5, between L5 and VH2, between VH2 and L6, or between L6 and VL1).

[5875] In some aspects, the antigen binding polypeptides provided herein have a structure, from amino-terminus to carboxy-terminus, represented by:
[5876] VL1-L1-VH1 or VH1-L1-VL1;
[5877] wherein:
[5878] VL1 is a first immunoglobulin light chain variable region that specifically binds to (i) a tumor-associated antigen (TAA), (ii) an infectious disease antigen that is not a sarbecovirus antigen, or (iii) an other-pathology antigen;
[5879] VH1 is a first immunoglobulin heavy chain variable region that specifically binds to (i) a tumor-associated antigen (TAA), (ii) an infectious disease antigen that is not a sarbecovirus antigen, or (iii) an other-pathology antigen; and
[5880] L1 is an optional amino acid linker.

[5881] In any aspect shown herein as a structure from amino terminus to carboxy terminus, and with binding pairs selected from VL and/or VH or other structural regions such as CH2, CH3, when shown without a specific linker such as L1, L2, etc., such linkers are optionally present in such structures between each designated subsequence VL, VH, etc.

[5882] In some aspects, the TAA is selected from the group consisting of 5′-nucleotidase, 5T4, A2AR, activin receptor-like kinase 1, adenocarcinoma antigen, ADRB3, AFP, AKAP-4, ALK, alpha-fetoprotein, androgenreceptor, angiopoietin 2, AOC3, APRIL, ATPDase, AXL, B7-4, B7DC, B7H1, B7H2, B7H3, B7H4, B7H5, B7H6, B7H7, B7RP1, BAFF, BAFFR, BCMA, bcr-abl, BlyS, BORIS, BST2, BTK, BTLA, C3, C5, C5a, C5a receptor, CA-125, CAIX, CanAg (a glycoform of MUC1), CCL11, CCL15, CCL17, CCL19, CCL2, CCL20, CCL21, CCL25, CCL3, CCL4, CCL5, CCL7, CCL8, CCR2, CCR3, CCR4, CCR5, CD11, CD11a, CD123, CD125, CD133, CD134, CD137, CD137L, CD147, CD15, CD154, CD160, CD16A, CD171, CD179a, CD18, CD184, CD19, CD2, CD20, CD200, CD22, CD221, CD23, CD24, CD242, CD25, CD27, CD272, CD276, CD278, CD279, CD28, CD3, CD30, CD300LF, CD319, CD33, CD37, CD38, CD39, CD38, CD4, CD40, CD40L, CD41, CD44v6, CD45, CD47, CD49B, CD5, CD51, CD52, CD54, CD56, CD6, CD62L, CD7, CD70, CD72, CD74, CD79a, CD79b, CD80, CD86, CD97, CEA, CEACAM5, claudin 18 isoform 2, CLDN6, CLEC12A, CLEC9, CLEC91, CLL-1, cMet, coagulation factor III, CRTH2, CS1, CSF-1, CSFIR, CSF-2, CSF-3, CTGF, CTLA4, CXCL1, CXCL12, CXCL13, CXCL2, CXCL4, CXCR3, CXORF61, CyclinB1, CYP1B1, dendritic cell-associated lectin 2, DLL3, DLL4, DNGR-1, DR5, E7, E-cadherin, EGFL7, EGFR, EGFRVIII, ELF2M, EMR2, endoglin, ENTPD1, EpCAM, EphA2, EPHA3, ephrin receptor A3, EphrinB2, episialin, ERBB2 (Her2/neu), ERBB3, ERG (TMPRSS2-ETS fusion gene), ETV6-AML, FAP, FCAR, FCER1, FCER1A, FCER2, FCRL5, FGF 23, FGFR, FGFR2, fibronectin extra domain-B, FLAP, FLT3, folate hydrolase, folate receptor 1, folate receptor alpha, folate receptor beta, FOLH1, Fos-relatedantigen1, Frizzled receptor, Fucosyl GM1, GD2, GD3, gelatinase B, Gi24, GITR, GITRL, GloboH, Glutamate carboxypeptidase II, glypican 3, GM3, GP100, GPC1, GPC2, GPC3, gplOO, GPNMB, GPR20, GPR5, GPRC5D, growth differentiation factor 8, GUCY2C, HAVCR1, HER1, HER2, HER3, HGF, HGFR, HHLA2, histone complex, HLA-DR, HMGB1, HMWMAA, HPVE6, hTERT, human telomerase reverse transcriptase, HVEM, ICAM-1, ICOS, ICOSL, IDO, IFNa, IgE, IGF-1, IGF1R, IGF-2, IGF-I receptor, IGLL1, IL1, IL10, IL12, IL13, IL13Ra2, IL-13Ra2, IL13Ra1, IL15, IL17, IL-17A, IL-17AF, IL-17F, IL17Rb, IL18, IL1B, IL1F10, IL-1a, IL-1B, IL2, IL-20, IL22, IL23, IL-23A, IL25, IL2Rbeta, IL-3 receptor, IL-31 receptor A, IL33, IL35, IL4, IL4Ra, IL5, ILSR, IL6, IL7, IL7Ra, IL8, IL9, IL9R, IL1A, IL-llRa, integrin α4, integrin α4 β7, integrin α5β1, integrin αIIbβ3, integrin αvβ3, integrin 7, interleukin 36 receptor IL1RAP, interleukin 36 receptor IL1RL2, intestinal carboxy lesterase, ITGB4, ITK, KIR, KIR2D, KIT, LAG3, LAGE-1a, LAIR1, LAMP1, LCK, legumain, leptin. LewisY, LILRA2, LIV-1, LMP2, LOXL2, LPFS2, LRRC15, LY6K, LY75, LYPD3, MAD-CT-1, MAD-CT-2, MAGEA1, MAGE-A1, MCAM, MCP-1, MelanA/MART1, mesothelin, MHC classII, MIF, ML-IAP, MS4A1, MST1R (RON), MUC1, MUC-1, MUC16, MUC-16, MUC5AC, muthsp70)-2, MYCN, NA17, NCA-90) granulocyte antigen, NCAM, NCR3LG1, nectin-4, NGNA ganglioside, NKG2A, NKG2D, NKp46, Notch 1, Notch receptor, NRP1, NTPDase-1, NY-BR-1, NY-ESO-1, o-acetyl-GD2, OR51E2, OX40), OX40L, OY-TES1, p53, p53mutant, PANX3, PAP, PAX3, PAX5, PCDC1, PCDP1, PCTA-1/Galectin8, PD-1, PDGFRA, PDGFR-beta, PD-L1, PD-L2, phosphate-sodium co-transporter, phosphatidylserine, PLAC1, polysialic acid, PROM1, prostase, prostein, PRSS21, PSCA, PSMA, PTK7, RAGE-1, RANKL. Ras mutant, rhIL1O, RhoC, root plate-specific spondin 3, ROR1, ROR2, RTN4, RU1, RU2, S152, sarcoma translocation breakpoints, SART3, scatter factor receptor kinase, SDC1, SIRPalpha, SISP1, SLAMF7, SLC, sLe, SLITRK6, spermprotein17, SPG64, sphingosine-1-phosphate, SSEA-4, SSX2, ST2, STEAP1, STEAP2, surviving and telomerase, Syk kinase, T14, TACI, TAG72, TARP, T-cell receptor, TCRβ, TDO, TEM1/CD248, TEM7R, tenascin C, TGFBETA, TGF-β1, TGF-β2, TGS5, the extracellular portion of the APRIL protein, Tie2, TIGIT, TIM3, TLR, TLR2, TLR4, TLR5, TLR9, TMEF1, TnAg, TNF, TNFa, TNFR superfamily member 4, TNFRSF7, Tp55, TRAC, TRAIL-R1, TRAIL-R2, TRAP, TREM1, TROP2, TRP-2, TSHR, TSLP, TSLPR, tumor antigen CTAA16.88, TWEAK, tyrosinase, TYRPI glycoprotein 75, UPK2, VAP-1, VEGF, VEGFA, VEGFR-1, VEGFR2, vimentin, VISTA, Vstm3, WT1, WUCAM, and XAGE1.

[5883] In some aspects, the antigen binding polypeptides provided herein comprise a VL1 comprising a light chain complementarity determining region 1 (LCDR1), LCDR2, and/or LCDR3 of an antibody selected from the group consisting of losatuxizumab vedotin, utomilumab, urelumab, oleclumab, naptumomab estafenatox, ascrinvacumab, pintumomab, tacatuzumab tetraxetan, nesvacumab, vanucizumab, timolumab, vapaliximab, vepalimomab, enapotamab vedotin, ianalumab, belimumab, tabalumab, tibulizumab, belantamab mafodotin, teclistamab, teclistamab, detumomab, nacolomab tafenatox, eculizumab, lendalizumab, pexelizumab, pozelimab, ravulizumab, tesidolumab, vilobelimab, abagovomab, igovomab, oregovomab, sofituzumab vedotin, cantuzumab mertansine, cantuzuma bravtansine, girentuximab, altumomab pentetate, arcitumomab, besilesomab, bertilimumab, plozalizumab, mogamulizumab, leronlimab, PRO140, rovelizumab, rovelizumab, talacotuzumab, benralizumab, tavolimab, vonlerolizumab, gavilimomab, ziralimumab, fanolesomab, ipilimumab, ruplizumab, toralizumab, dapirolizumab pegol, toralizumab, dapirolizumab pegol, ruplizumab, blinatumomab, inebilizumab, loncastuximab tesirine, SGN-CD19A, tafasitamab, taplitumomab paptox, XMAB-5574, Budoprutug, Obexelimab, duvortuxizumab, englumafusp alfa, Emfizatamab, zeripatamig, siplizumab, blontuvetmab, FBTA05, ibritumomab tiuxetan, obinutuzumab, ocaratuzumab, ocrelizumab, ofatumumab, rituximab, tositumomab, ublituximab, veltuzumab, divozilimab, eramkafusp alfa, ripertamab, zuberitamab, glofitamab, nofetumomab merpentan, samalizumab, imvotamab, odronextamab, plamotamab, bectumomab, inotuzumab ozogamicin, moxetumomab pasudotox, pinatuzumab vedotin, gomiliximab, lumiliximab, inolimomab, inolimomab, daclizumab, camidanluma btesirine, basiliximab, varlilumab, omburtamab, enoblituzumab, vopratelimab, lulizumabpegol, TGN1412, muromonab-CD3, otelixizumab, teplizumab, visilizumab, epcoritamab, epcoritamab, brentuximab vedotin, iratumumab, azintuxizumab vedotin, gemtuzumab ozogamicin, lintuzumab, vadastuximab talirine, naratuximab emtansine, otlertuzumab, lilotomab satetraxetan, tetulomab, daratumumab, isatuximab, foralumab, mosunetuzumab, mosunetuzumab, cedelizumab, ibalizumab, keliximab, priliximab, tregalizumab, zanolimumab, bleselumab, iscalimab, lucatumumab, ravagalimab, selicrelumab, teneliximab, vanalimab, abciximab, bivatuzumab, iomab-B, telimomab aritox, zolimomab aritox, abituzumab, intetumumab, alemtuzumab, tamtuvetmab, lorvotuzumab mertansine, itolizumab, cusatuzumab, vorsetuzumab mafodotin, milatuzumab, iladatuzumab vedotin, polatuzumab vedotin, galiximab, cibisatamab, zolbetuximab, naxitamab, tisotumab vedotin, olendalizumab, pamrevlumab, lacnotuzumab, cabiralizumab, emactuzumab, axatilimab, gimsilumab, lenzilumab, namilumab, tremelimumab, ulocuplumab, tepoditamab, rovalpituzumab tesirine, tarlatamab, demcizumab, navicixizumab, drozitumab, parsatuzumab, depatuxizumab mafodotin, modotuximab, carotuximab, adecatumumab, adecatumumab, oportuzumab monatox, solitomab, tucotuzumab celmoleukin, edrecolomab, catumaxomab, ifabotuzumab, fibatuzumab, zalutumumab, panitumumab, cetuximab, futuximab, imgatuzumab, laprituximab emtansine, matuzumab, necitumumab, nimotuzumab, tomuzotuximab, amivantamab, amivantamab, epitumomab cituxetan, sontuzumab, duligotuzumab, elgemtumab, lumretuzumab, patritumab, seribantumab, zenocutuzumab, sibrotuzumab, burosumab, aprutumab ixadotin, radretumab, pasotuxizumab, farletuzumab, mirvetuximab soravtansine, vantictumab, TRBS07, 3F8, dinutuximab, dinutuximab beta, ecromeximab, mitumomab, andecaliximab, capromab, codrituzumab, glembatumumab vedotin, talquetamab, talquetamab, trevogrumab, indusatumab vedotin, ficlatuzumab, rilotumumab, zatuximab, pentuzimab, pentuzimab, margetuximab, timigutuzumab, trastuzumab, trastuzumab duocarmazine, trastuzumab emtansine, gancotamab, pertuzumab, ertumaxomab, emibetuzumab, telisotuzumab, telisotuzumab vedotin, derlotuximab biotin, apolizumab, onartuzumab, bersanlimab, enlimomabpegol, rontalizumab, sifalimumab, talizumab, ganitumab, istiratumab, robatumumab, teprotumumab, figitumumab, ganitumab, istiratumab, robatumumab, teprotumumab, cixutumumab, dalotuzumab, xentuzumab, dusigitumab, canakinumab, ustekinumab, ustekinumab, ustekinumab, briakinumab, briakinumab, abrezekimab, lebrikizumab, romilkimab, TNX-650, tralokinumab, anrukinzumab, brodalumab, ixekizumab, netakimab, perakizumab, secukinumab, vunakizumab, afasevikumab, afasevikumab, bimekizumab, bimekizumab, remtolumab, bermckimab, lutikizumab, lutikizumab, gevokizumab, cergutuzumab amunaleukin, fletikumab, fezakinumab, brazikumab, guselkumab, mirikizumab, tildrakizumab, risankizumab, flotetuzumab, nemolizumab, pascolizumab, dupilumab, mepolizumab, reslizumab, clazakizumab, elsilimomab, olokizumab, sarilumab, siltuximab, sirukumab, vobarilizumab, tocilizumab, SA237, satralizumab, enokizumab, prezalizumab, natalizumab, abrilumab, abrilumab, vedolizumab, volociximab, tadocizumab, etaracizumab, etrolizumab, spesolimab, vatelizumab, crlizumab, lirilumab, relatlimab, cBR96-doxorubicinimmunoconjugate, odulimomab, efalizumab, ladiratuzumab vedotin, simtuzumab, samrotamab vedotin, aselizumab, lupartumab amadotin, imalumab, carlumab, imaprelimab, amatuximab, amatuximab, anetumab ravtansine, narnatumab, clivatuzumab tetraxetan, pemtumomab, gatipotuzumab, ensituximab, lemalesomab, sulesomab, enfortumab vedotin, racotumomab, monalizumab, brontictuzumab, tarextumab, vesencumab, oxelumab, gilvetmab, tislelizumab, dostarlimab, BCD-100, nivolumab, PDR001, pembrolizumab, pidilizumab, retifanlimab, spartalizumab, sintilimab, cemiplimab, olaratumab, tovetumab, rinucumab, atezolizumab, avelumab, durvalumab, lifastuzumab vedotin, bavituximab, acapatamab, capromab, rosopatamab, nezastomig, pasotuxizumab, pelgifatamab, voxalatamab, cofetuzumab pelidotin, denosumab, rosmantuzumab, cirmtuzumab, atinumab, indatuximab ravtansine, elotuzumab, sirtratumab vedotin, sonepcizumab, vandortuzumab vedotin, minretumomab, satumomab pendetide, maslimomab, ontuxizumab, tenatumomab, fresolimumab, metelimumab, lerdelimumab, tezepelumab, etigilimab, tiragotumab, placulumab, prezalumab, infliximab, nerelimomab, ozoralizumab, adalimumab, afelimomab, certolizumab pegol, golimumab, mapatumumab, conatumumab, lexatumumab, tigatuzumab, sacituzumab govitecan, votumumab, pogalizumab, letolizumab, pankomab, anatumomab mafenatox, enavatuzumab, flanvotumab, brolucizumab, ranibizumab, varisacumab, bevacizumab, faricimab, icrucumab, alacizumab pegol, ramucirumab, pritumumab, and onvatilimab.

[5884] In some aspects, the antigen binding polypeptides provided herein comprise a VH1 comprising a heavy chain complementarity determining region 1 (HCDR1), HCDR2, and/or HCDR3 of an antibody selected from the group consisting of losatuxizumab vedotin, utomilumab, urelumab, oleclumab, naptumomab estafenatox, ascrinvacumab, pintumomab, tacatuzumab tetraxetan, nesvacumab, vanucizumab, timolumab, vapaliximab, vepalimomab, enapotamab vedotin, ianalumab, belimumab, tabalumab, tibulizumab, belantamab mafodotin, teclistamab, teclistamab, detumomab, nacolomab tafenatox, eculizumab, lendalizumab, pexelizumab, pozelimab, ravulizumab, tesidolumab, vilobelimab, abagovomab, igovomab, oregovomab, sofituzumab vedotin, cantuzumab mertansine, cantuzuma bravtansine, girentuximab, altumomab pentetate, arcitumomab, besilesomab, bertilimumab, plozalizumab, mogamulizumab, leronlimab, PRO140, rovelizumab, rovelizumab, talacotuzumab, benralizumab, tavolimab, vonlerolizumab, gavilimomab, ziralimumab, fanolesomab, ipilimumab, ruplizumab, toralizumab, dapirolizumab pegol, toralizumab, dapirolizumab pegol, ruplizumab, blinatumomab, inebilizumab, loncastuximab tesirine, SGN-CD19A, tafasitamab, taplitumomab paptox, XMAB-5574, Budoprutug, Obexelimab, duvortuxizumab, englumafusp alfa, Emfizatamab, zeripatamig, siplizumab, blontuvetmab, FBTA05, ibritumomab tiuxetan, obinutuzumab, ocaratuzumab, ocrelizumab, ofatumumab, rituximab, tositumomab, ublituximab, veltuzumab, divozilimab, eramkafusp alfa, ripertamab, zuberitamab, glofitamab, nofetumomab merpentan, samalizumab, imvotamab, odronextamab, plamotamab, bectumomab, inotuzumab ozogamicin, moxetumomab pasudotox, pinatuzumab vedotin, gomiliximab, lumiliximab, inolimomab, inolimomab, daclizumab, camidanluma btesirine, basiliximab, varlilumab, omburtamab, enoblituzumab, vopratelimab, lulizumabpegol, TGN1412, muromonab-CD3, otelixizumab, teplizumab, visilizumab, epcoritamab, epcoritamab, brentuximab vedotin, iratumumab, azintuxizumab vedotin, gemtuzumab ozogamicin, lintuzumab, vadastuximab talirine, naratuximab emtansine, otlertuzumab, lilotomab satetraxetan, tetulomab, daratumumab, isatuximab, foralumab, mosunetuzumab, mosunetuzumab, cedelizumab, ibalizumab, keliximab, priliximab, tregalizumab, zanolimumab, bleselumab, iscalimab, lucatumumab, ravagalimab, selicrelumab, teneliximab, vanalimab, abciximab, bivatuzumab, iomab-B, telimomab aritox, zolimomab aritox, abituzumab, intetumumab, alemtuzumab, tamtuvetmab, lorvotuzumab mertansine, itolizumab, cusatuzumab, vorsetuzumab mafodotin, milatuzumab, iladatuzumab vedotin, polatuzumab vedotin, galiximab, cibisatamab, zolbetuximab, naxitamab, tisotumab vedotin, olendalizumab, pamrevlumab, lacnotuzumab, cabiralizumab, emactuzumab, axatilimab, gimsilumab, lenzilumab, namilumab, tremelimumab, ulocuplumab, tepoditamab, rovalpituzumab tesirine, tarlatamab, demcizumab, navicixizumab, drozitumab, parsatuzumab, depatuxizumab mafodotin, modotuximab, carotuximab, adecatumumab, adecatumumab, oportuzumab monatox, solitomab, tucotuzumab celmoleukin, edrecolomab, catumaxomab, ifabotuzumab, fibatuzumab, zalutumumab, panitumumab, cetuximab, futuximab, imgatuzumab, laprituximab emtansine, matuzumab, necitumumab, nimotuzumab, tomuzotuximab, amivantamab, amivantamab, epitumomab cituxetan, sontuzumab, duligotuzumab, elgemtumab, lumretuzumab, patritumab, seribantumab, zenocutuzumab, sibrotuzumab, burosumab, aprutumab ixadotin, radretumab, pasotuxizumab, farletuzumab, mirvetuximab soravtansine, vantictumab, TRBS07, 3F8, dinutuximab, dinutuximab beta, ecromeximab, mitumomab, andecaliximab, capromab, codrituzumab, glembatumumab vedotin, talquetamab, talquetamab, trevogrumab, indusatumab vedotin, ficlatuzumab, rilotumumab, zatuximab, pentuzimab, pentuzimab, margetuximab, timigutuzumab, trastuzumab, trastuzumab duocarmazine, trastuzumab emtansine, gancotamab, pertuzumab, ertumaxomab, emibetuzumab, telisotuzumab, telisotuzumab vedotin, derlotuximab biotin, apolizumab, onartuzumab, bersanlimab, enlimomabpegol, rontalizumab, sifalimumab, talizumab, ganitumab, istiratumab, robatumumab, teprotumumab, figitumumab, ganitumab, istiratumab, robatumumab, teprotumumab, cixutumumab, dalotuzumab, xentuzumab, dusigitumab, canakinumab, ustekinumab, ustekinumab, ustekinumab, briakinumab, briakinumab, abrezekimab, lebrikizumab, romilkimab, TNX-650, tralokinumab, anrukinzumab, brodalumab, ixekizumab, netakimab, perakizumab, secukinumab, vunakizumab, afasevikumab, afasevikumab, bimekizumab, bimekizumab, remtolumab, bermekimab, lutikizumab, lutikizumab, gevokizumab, cergutuzumab amunaleukin, fletikumab, fezakinumab, brazikumab, guselkumab, mirikizumab, tildrakizumab, risankizumab, flotetuzumab, nemolizumab, pascolizumab, dupilumab, mepolizumab, reslizumab, clazakizumab, elsilimomab, olokizumab, sarilumab, siltuximab, sirukumab, vobarilizumab, tocilizumab, SA237, satralizumab, enokizumab, prezalizumab, natalizumab, abrilumab, abrilumab, vedolizumab, volociximab, tadocizumab, etaracizumab, etrolizumab, spesolimab, vatelizumab, erlizumab, lirilumab, relatlimab, cBR96-doxorubicinimmunoconjugate, odulimomab, efalizumab, ladiratuzumab vedotin, simtuzumab, samrotamab vedotin, aselizumab, lupartumab amadotin, imalumab, carlumab, imaprelimab, amatuximab, amatuximab, anetumab ravtansine, narnatumab, clivatuzumab tetraxetan, pemtumomab, gatipotuzumab, ensituximab, lemalesomab, sulesomab, enfortumab vedotin, racotumomab, monalizumab, brontictuzumab, tarextumab, vesencumab, oxelumab, gilvetmab, tislelizumab, dostarlimab, BCD-100, nivolumab, PDR001, pembrolizumab, pidilizumab, retifanlimab, spartalizumab, sintilimab, cemiplimab, olaratumab, tovetumab, rinucumab, atezolizumab, avelumab, durvalumab, lifastuzumab vedotin, bavituximab, acapatamab, capromab, rosopatamab, nezastomig, pasotuxizumab, pelgifatamab, voxalatamab, cofetuzumab pelidotin, denosumab, rosmantuzumab, cirmtuzumab, atinumab, indatuximab ravtansine, elotuzumab, sirtratumab vedotin, sonepcizumab, vandortuzumab vedotin, minretumomab, satumomab pendetide, maslimomab, ontuxizumab, tenatumomab, fresolimumab, metelimumab, lerdelimumab, tezepelumab, etigilimab, tiragotumab, placulumab, prezalumab, infliximab, nerelimomab, ozoralizumab, adalimumab, afelimomab, certolizumab pegol, golimumab, mapatumumab, conatumumab, lexatumumab, tigatuzumab, sacituzumab govitecan, votumumab, pogalizumab, letolizumab, pankomab, anatumomab mafenatox, enavatuzumab, flanvotumab, brolucizumab, ranibizumab, varisacumab, bevacizumab, faricimab, icrucumab, alacizumab pegol, ramucirumab, pritumumab, and onvatilimab.

[5885] In some aspects, the antigen binding polypeptides provided herein comprise a VL1 comprising a VL of an antibody selected from the group consisting of losatuxizumab vedotin, utomilumab, urelumab, oleclumab, naptumomab estafenatox, ascrinvacumab, pintumomab, tacatuzumab tetraxetan, nesvacumab, vanucizumab, timolumab, vapaliximab, vepalimomab, enapotamab vedotin, ianalumab, belimumab, tabalumab, tibulizumab, belantamab mafodotin, teclistamab, teclistamab, detumomab, nacolomab tafenatox, eculizumab, lendalizumab, pexelizumab, pozelimab, ravulizumab, tesidolumab, vilobelimab, abagovomab, igovomab, oregovomab, sofituzumab vedotin, cantuzumab mertansine, cantuzuma bravtansine, girentuximab, altumomab pentetate, arcitumomab, besilesomab, bertilimumab, plozalizumab, mogamulizumab, leronlimab, PRO140, rovelizumab, rovelizumab, talacotuzumab, benralizumab, tavolimab, vonlerolizumab, gavilimomab, ziralimumab, fanolesomab, ipilimumab, ruplizumab, toralizumab, dapirolizumab pegol, toralizumab, dapirolizumab pegol, ruplizumab, blinatumomab, inebilizumab, loncastuximab tesirine, SGN-CD19A, tafasitamab, taplitumomab paptox, XMAB-5574, Budoprutug, Obexelimab, duvortuxizumab, englumafusp alfa, Emfizatamab, zeripatamig, siplizumab, blontuvetmab, FBTA05, ibritumomab tiuxetan, obinutuzumab, ocaratuzumab, ocrelizumab, ofatumumab, rituximab, tositumomab, ublituximab, veltuzumab, divozilimab, eramkafusp alfa, ripertamab, zuberitamab, glofitamab, nofetumomab merpentan, samalizumab, imvotamab, odronextamab, plamotamab, bectumomab, inotuzumab ozogamicin, moxetumomab pasudotox, pinatuzumab vedotin, gomiliximab, lumiliximab, inolimomab, inolimomab, daclizumab, camidanluma btesirine, basiliximab, varlilumab, omburtamab, enoblituzumab, vopratelimab, lulizumabpegol, TGN1412, muromonab-CD3, otelixizumab, teplizumab, visilizumab, epcoritamab, epcoritamab, brentuximab vedotin, iratumumab, azintuxizumab vedotin, gemtuzumab ozogamicin, lintuzumab, vadastuximab talirine, naratuximab emtansine, otlertuzumab, lilotomab satetraxetan, tetulomab, daratumumab, isatuximab, foralumab, mosunetuzumab, mosunetuzumab, cedelizumab, ibalizumab, keliximab, priliximab, tregalizumab, zanolimumab, bleselumab, iscalimab, lucatumumab, ravagalimab, selicrelumab, teneliximab, vanalimab, abciximab, bivatuzumab, iomab-B, telimomab aritox, zolimomab aritox, abituzumab, intetumumab, alemtuzumab, tamtuvetmab, lorvotuzumab mertansine, itolizumab, cusatuzumab, vorsetuzumab mafodotin, milatuzumab, iladatuzumab vedotin, polatuzumab vedotin, galiximab, cibisatamab, zolbetuximab, naxitamab, tisotumab vedotin, olendalizumab, pamrevlumab, lacnotuzumab, cabiralizumab, emactuzumab, axatilimab, gimsilumab, lenzilumab, namilumab, tremelimumab, ulocuplumab, tepoditamab, rovalpituzumab tesirine, tarlatamab, demcizumab, navicixizumab, drozitumab, parsatuzumab, depatuxizumab mafodotin, modotuximab, carotuximab, adecatumumab, adecatumumab, oportuzumab monatox, solitomab, tucotuzumab celmoleukin, edrecolomab, catumaxomab, ifabotuzumab, fibatuzumab, zalutumumab, panitumumab, cetuximab, futuximab, imgatuzumab, laprituximab emtansine, matuzumab, necitumumab, nimotuzumab, tomuzotuximab, amivantamab, amivantamab, epitumomab cituxetan, sontuzumab, duligotuzumab, elgemtumab, lumretuzumab, patritumab, seribantumab, zenocutuzumab, sibrotuzumab, burosumab, aprutumab ixadotin, radretumab, pasotuxizumab, farletuzumab, mirvetuximab soravtansine, vantictumab, TRBS07, 3F8, dinutuximab, dinutuximab beta, ecromeximab, mitumomab, andecaliximab, capromab, codrituzumab, glembatumumab vedotin, talquetamab, talquetamab, trevogrumab, indusatumab vedotin, ficlatuzumab, rilotumumab, zatuximab, pentuzimab, pentuzimab, margetuximab, timigutuzumab, trastuzumab, trastuzumab duocarmazine, trastuzumab emtansine, gancotamab, pertuzumab, ertumaxomab, emibetuzumab, telisotuzumab, telisotuzumab vedotin, derlotuximab biotin, apolizumab, onartuzumab, bersanlimab, enlimomabpegol, rontalizumab, sifalimumab, talizumab, ganitumab, istiratumab, robatumumab, teprotumumab, figitumumab, ganitumab, istiratumab, robatumumab, teprotumumab, cixutumumab, dalotuzumab, xentuzumab, dusigitumab, canakinumab, ustekinumab, ustekinumab, ustekinumab, briakinumab, briakinumab, abrezekimab, lebrikizumab, romilkimab, TNX-650, tralokinumab, anrukinzumab, brodalumab, ixekizumab, netakimab, perakizumab, secukinumab, vunakizumab, afasevikumab, afasevikumab, bimekizumab, bimekizumab, remtolumab, bermekimab, lutikizumab, lutikizumab, gevokizumab, cergutuzumab amunaleukin, fletikumab, fezakinumab, brazikumab, guselkumab, mirikizumab, tildrakizumab, risankizumab, flotetuzumab, nemolizumab, pascolizumab, dupilumab, mepolizumab, reslizumab, clazakizumab, elsilimomab, olokizumab, sarilumab, siltuximab, sirukumab, vobarilizumab, tocilizumab, SA237, satralizumab, enokizumab, prezalizumab, natalizumab, abrilumab, abrilumab, vedolizumab, volociximab, tadocizumab, etaracizumab, etrolizumab, spesolimab, vatelizumab, erlizumab, lirilumab, relatlimab, cBR96-doxorubicinimmunoconjugate, odulimomab, efalizumab, ladiratuzumab vedotin, simtuzumab, samrotamab vedotin, aselizumab, lupartumab amadotin, imalumab, carlumab, imaprelimab, amatuximab, amatuximab, anetumab ravtansine, narnatumab, clivatuzumab tetraxetan, pemtumomab, gatipotuzumab, ensituximab, lemalesomab, sulesomab, enfortumab vedotin, racotumomab, monalizumab, brontictuzumab, tarextumab, vesencumab, oxelumab, gilvetmab, tislelizumab, dostarlimab, BCD-100, nivolumab, PDR001, pembrolizumab, pidilizumab, retifanlimab, spartalizumab, sintilimab, cemiplimab, olaratumab, tovetumab, rinucumab, atezolizumab, avelumab, durvalumab, lifastuzumab vedotin, bavituximab, acapatamab, capromab, rosopatamab, nezastomig, pasotuxizumab, pelgifatamab, voxalatamab, cofetuzumab pelidotin, denosumab, rosmantuzumab, cirmtuzumab, atinumab, indatuximab ravtansine, elotuzumab, sirtratumab vedotin, sonepcizumab, vandortuzumab vedotin, minretumomab, satumomab pendetide, maslimomab, ontuxizumab, tenatumomab, fresolimumab, metelimumab, lerdelimumab, tezepelumab, etigilimab, tiragotumab, placulumab, prezalumab, infliximab, nerelimomab, ozoralizumab, adalimumab, afelimomab, certolizumab pegol, golimumab, mapatumumab, conatumumab, lexatumumab, tigatuzumab, sacituzumab govitecan, votumumab, pogalizumab, letolizumab, pankomab, anatumomab mafenatox, enavatuzumab, flanvotumab, brolucizumab, ranibizumab, varisacumab, bevacizumab, faricimab, icrucumab, alacizumab pegol, ramucirumab, pritumumab, and onvatilimab.

[5886] In some aspects, the antigen binding polypeptides provided herein comprise a VH1 comprising a VH of an antibody selected from the group consisting of losatuxizumab vedotin, utomilumab, urelumab, oleclumab, naptumomab estafenatox, ascrinvacumab, pintumomab, tacatuzumab tetraxetan, nesvacumab, vanucizumab, timolumab, vapaliximab, vepalimomab, enapotamab vedotin, ianalumab, belimumab, tabalumab, tibulizumab, belantamab mafodotin, teclistamab, teclistamab, detumomab, nacolomab tafenatox, eculizumab, lendalizumab, pexelizumab, pozelimab, ravulizumab, tesidolumab, vilobelimab, abagovomab, igovomab, oregovomab, sofituzumab vedotin, cantuzumab mertansine, cantuzuma bravtansine, girentuximab, altumomab pentetate, arcitumomab, besilesomab, bertilimumab, plozalizumab, mogamulizumab, leronlimab, PRO140, rovelizumab, rovelizumab, talacotuzumab, benralizumab, tavolimab, vonlerolizumab, gavilimomab, ziralimumab, fanolesomab, ipilimumab, ruplizumab, toralizumab, dapirolizumab pegol, toralizumab, dapirolizumab pegol, ruplizumab, blinatumomab, inebilizumab, loncastuximab tesirine, SGN-CD19A, tafasitamab, taplitumomab paptox, XMAB-5574, Budoprutug, Obexelimab, duvortuxizumab, englumafusp alfa, Emfizatamab, zeripatamig, siplizumab, blontuvetmab, FBTA05, ibritumomab tiuxetan, obinutuzumab, ocaratuzumab, ocrelizumab, ofatumumab, rituximab, tositumomab, ublituximab, veltuzumab, divozilimab, eramkafusp alfa, ripertamab, zuberitamab, glofitamab, nofetumomab merpentan, samalizumab, imvotamab, odronextamab, plamotamab, bectumomab, inotuzumab ozogamicin, moxetumomab pasudotox, pinatuzumab vedotin, gomiliximab, lumiliximab, inolimomab, inolimomab, daclizumab, camidanluma btesirine, basiliximab, varlilumab, omburtamab, enoblituzumab, vopratelimab, lulizumabpegol, TGN1412, muromonab-CD3, otelixizumab, teplizumab, visilizumab, epcoritamab, epcoritamab, brentuximab vedotin, iratumumab, azintuxizumab vedotin, gemtuzumab ozogamicin, lintuzumab, vadastuximab talirine, naratuximab emtansine, otlertuzumab, lilotomab satetraxetan, tetulomab, daratumumab, isatuximab, foralumab, mosunetuzumab, mosunetuzumab, cedelizumab, ibalizumab, keliximab, priliximab, tregalizumab, zanolimumab, bleselumab, iscalimab, lucatumumab, ravagalimab, selicrelumab, teneliximab, vanalimab, abciximab, bivatuzumab, iomab-B, telimomab aritox, zolimomab aritox, abituzumab, intetumumab, alemtuzumab, tamtuvetmab, lorvotuzumab mertansine, itolizumab, cusatuzumab, vorsetuzumab mafodotin, milatuzumab, iladatuzumab vedotin, polatuzumab vedotin, galiximab, cibisatamab, zolbetuximab, naxitamab, tisotumab vedotin, olendalizumab, pamrevlumab, lacnotuzumab, cabiralizumab, emactuzumab, axatilimab, gimsilumab, lenzilumab, namilumab, tremelimumab, ulocuplumab, tepoditamab, rovalpituzumab tesirine, tarlatamab, demcizumab, navicixizumab, drozitumab, parsatuzumab, depatuxizumab mafodotin, modotuximab, carotuximab, adecatumumab, adecatumumab, oportuzumab monatox, solitomab, tucotuzumab celmoleukin, edrecolomab, catumaxomab, ifabotuzumab, fibatuzumab, zalutumumab, panitumumab, cetuximab, futuximab, imgatuzumab, laprituximab emtansine, matuzumab, necitumumab, nimotuzumab, tomuzotuximab, amivantamab, amivantamab, epitumomab cituxetan, sontuzumab, duligotuzumab, elgemtumab, lumretuzumab, patritumab, seribantumab, zenocutuzumab, sibrotuzumab, burosumab, aprutumab ixadotin, radretumab, pasotuxizumab, farletuzumab, mirvetuximab soravtansine, vantictumab, TRBS07, 3F8, dinutuximab, dinutuximab beta, ecromeximab, mitumomab, andecaliximab, capromab, codrituzumab, glembatumumab vedotin, talquetamab, talquetamab, trevogrumab, indusatumab vedotin, ficlatuzumab, rilotumumab, zatuximab, pentuzimab, pentuzimab, margetuximab, timigutuzumab, trastuzumab, trastuzumab duocarmazine, trastuzumab emtansine, gancotamab, pertuzumab, ertumaxomab, emibetuzumab, telisotuzumab, telisotuzumab vedotin, derlotuximab biotin, apolizumab, onartuzumab, bersanlimab, enlimomabpegol, rontalizumab, sifalimumab, talizumab, ganitumab, istiratumab, robatumumab, teprotumumab, figitumumab, ganitumab, istiratumab, robatumumab, teprotumumab, cixutumumab, dalotuzumab, xentuzumab, dusigitumab, canakinumab, ustekinumab, ustekinumab, ustekinumab, briakinumab, briakinumab, abrezekimab, lebrikizumab, romilkimab, TNX-650, tralokinumab, anrukinzumab, brodalumab, ixekizumab, netakimab, perakizumab, secukinumab, vunakizumab, afasevikumab, afasevikumab, bimekizumab, bimekizumab, remtolumab, bermekimab, lutikizumab, lutikizumab, gevokizumab, cergutuzumab amunaleukin, fletikumab, fezakinumab, brazikumab, guselkumab, mirikizumab, tildrakizumab, risankizumab, flotetuzumab, nemolizumab, pascolizumab, dupilumab, mepolizumab, reslizumab, clazakizumab, elsilimomab, olokizumab, sarilumab, siltuximab, sirukumab, vobarilizumab, tocilizumab, SA237, satralizumab, enokizumab, prezalizumab, natalizumab, abrilumab, abrilumab, vedolizumab, volociximab, tadocizumab, etaracizumab, etrolizumab, spesolimab, vatelizumab, erlizumab, lirilumab, relatlimab, cBR96-doxorubicinimmunoconjugate, odulimomab, efalizumab, ladiratuzumab vedotin, simtuzumab, samrotamab vedotin, aselizumab, lupartumab amadotin, imalumab, carlumab, imaprelimab, amatuximab, amatuximab, anetumab ravtansine, narnatumab, clivatuzumab tetraxetan, pemtumomab, gatipotuzumab, ensituximab, lemalesomab, sulesomab, enfortumab vedotin, racotumomab, monalizumab, brontictuzumab, tarextumab, vesencumab, oxelumab, gilvetmab, tislelizumab, dostarlimab, BCD-100, nivolumab, PDR001, pembrolizumab, pidilizumab, retifanlimab, spartalizumab, sintilimab, cemiplimab, olaratumab, tovetumab, rinucumab, atezolizumab, avelumab, durvalumab, lifastuzumab vedotin, bavituximab, acapatamab, capromab, rosopatamab, nezastomig, pasotuxizumab, pelgifatamab, voxalatamab, cofetuzumab pelidotin, denosumab, rosmantuzumab, cirmtuzumab, atinumab, indatuximab ravtansine, elotuzumab, sirtratumab vedotin, sonepcizumab, vandortuzumab vedotin, minretumomab, satumomab pendetide, maslimomab, ontuxizumab, tenatumomab, fresolimumab, metelimumab, lerdelimumab, tezepelumab, etigilimab, tiragotumab, placulumab, prezalumab, infliximab, nerelimomab, ozoralizumab, adalimumab, afelimomab, certolizumab pegol, golimumab, mapatumumab, conatumumab, lexatumumab, tigatuzumab, sacituzumab govitecan, votumumab, pogalizumab, letolizumab, pankomab, anatumomab mafenatox, enavatuzumab, flanvotumab, brolucizumab, ranibizumab, varisacumab, bevacizumab, faricimab, icrucumab, alacizumab pegol, ramucirumab, pritumumab, and onvatilimab.

[5887] In some aspects, the antigen binding polypeptides provided herein comprise a VL1 comprising (i) a complementarity determining region (CDR) 1 having an amino acid sequence that is at least 65%, at least 70%, at least 75%, at least 80%, at least 85%, at least 90%, at least 95%, at least 99%, or 100% identical to any one of SEQ ID NOs: 1096, 1103, 1110, 1120, 1127, 1134, 1141, 1148, 1155, 1162, 1169, 1174, 1181, 1188, 1199, 1211, 1221, 1228, 1235, 1247, 1254, 1261, 1266, 1271, 1278, 1285, 1292, 1299, 1306, 1313, 1319, 1326, 1339, 1352, 1359, 1366, 1373, 1382, 1394, 1401, 1408, 1414, 1421, 1428, 1441, 1448, 1455, 1461, 1468, 1475, 1488, 1495, 1508, 1519, 1526, 1531, 1538, 1544, 1556, 1568, 1574, 1581, 1594, 1601, 1608, 1615, 1622, 1629, 1636, 1643, 1650, 1657, 1672, 1679, 1689, 1697, 1708, 1715, 1718, 1723, 1727, 1738, 1743, 1752, 1761, 1763, 1769, 1776, and 1786; (ii) a CDR2 having an amino acid sequence that is at least 65%, at least 70%, at least 75%, at least 80%, at least 85%, at least 90%, at least 95%, at least 99%, or 100% identical to any one of SEQ ID NOs: 1200, 1212, 1680, 1690, 1698, 1709, 1728, 1739, 1744, 1753, 1770, and 1777; or at least 65%, at least 70%, at least 75%, at least 80%, at least 85%, at least 90%, at least 95%, at least 99%, or 100% identical to any one of amino acid sequences AAS, APS, AT, ATS, DAS, DDG, DDS, DT, DTS, DVS, EAS, FTS, GAF, GAN, GAS, GAT, GIS, GKN, GNS, HTS, KVS, LAS, LGS, LVS, NAK, NTN, QMS, RMS, RTS, SAS, TTS, WAS, YAS, YAT, YGS, YRS, and YTS; and (iii) a CDR3 having an amino acid sequence that is at least 65%, at least 70%, at least 75%, at least 80%, at least 85%, at least 90%, at least 95%, at least 99%, or 100% identical to any one of SEQ ID NOs: 1097, 1104, 1111, 1121, 1128, 1135, 1142, 1149, 1156, 1163, 1170, 1175, 1182, 1189, 1195, 1201, 1207, 1213, 1222, 1229, 1236, 2009, 1248, 1255, 1262, 1267, 1272, 1279, 1286, 1293, 1300, 1307, 1320, 1327, 1333, 1340, 1346, 1353, 1360, 1367, 1374, 1383, 1389, 1395, 1402, 1409, 1415, 1422, 1429, 1435, 1442, 1449, 1456, 1462, 1469, 1476, 1482, 1489, 1496, 1502, 1509, 1513, 1520, 1532, 1539, 1545, 1557, 1562, 1569, 1575, 1582, 1588, 1595, 1602, 1609, 1616, 1623, 1630, 1637, 1644, 1651, 1658, 1663, 1673, 1681, 1691, 1699, 1710, 1729, 1735, 1745, 1751, 1754, 1778, 1787, and 1976.

[5888] In some aspects, the antigen binding polypeptides provided herein comprise a VH1 comprising (i) a complementarity determining region (CDR) 1 having an amino acid sequence that is at least 65%, at least 70%, at least 75%, at least 80%, at least 85%, at least 90%, at least 95%, at least 99%, or 100% identical to any one of SEQ ID NOs: 1099, 1106, 1113, 1117, 1123, 1130, 1137, 1144, 1151, 1158, 1165, 1177, 1184, 1191, 1203, 1215, 1224, 1231, 1238, 1243, 1250, 1257, 1264, 1274, 1281, 1288, 1295, 1302, 1309, 1315, 1322, 1329, 1335, 1342, 1348, 1355, 1362, 1369, 1376, 1385, 1397, 1404, 1417, 1424, 1431, 1437, 1444, 1451, 1458, 1464, 1471, 1478, 1484, 1491, 1498, 1504, 1511, 1515, 1522, 1534, 1547, 1552, 1564, 1577, 1584, 1590, 1597, 1604, 1611, 1618, 1625, 1632, 1639, 1646, 1653, 1660, 1665, 1675, 1683, 1693, 1701, 1705, 1716, 1719, 1731, 1736, 1747, 1756, 1772, 1780, and 1789; (ii) a CDR2 having an amino acid sequence that is at least 65%, at least 70%, at least 75%, at least 80%, at least 85%, at least 90%, at least 95%, at least 99%, or 100% identical to any one of SEQ ID NOs: 1100, 1107, 1114, 1118, 1124, 1131, 1138, 1145, 1152, 1159, 1166, 1178, 1185, 1192, 1204, 1216, 1225, 1232, 1239, 1244, 1251, 1258, 1275, 1282, 1289, 1296, 1303, 1310, 1316, 1323, 1330, 1336, 1343, 1349, 1356, 1363, 1370, 1377, 1386, 1391, 1398, 1405, 1411, 1418, 1425, 1432, 1438, 1445, 1452, 1465, 1472, 1479, 1485, 1492, 1499, 1505, 1516, 1523, 1528, 1535, 1541, 1548, 1553, 1559, 1565, 1571, 1578, 1585, 1591, 1598, 1605, 1612, 1619, 1626, 1633, 1640, 1647, 1654, 1666, 1676, 1684, 1687, 1694, 1702, 1706, 1712, 1717, 1720, 1725, 1732, 1737, 1741, 1748, 1757, 1767, 1773, 1781, and 1790; and (iii) a CDR3 having an amino acid sequence that is at least 65%, at least 70%, at least 75%, at least 80%, at least 85%, at least 90%, at least 95%, at least 99%, or 100% identical to any one of SEQ ID NOs: 1101, 1108, 1115, 1125, 1132, 1139, 1146, 1153, 1160, 1167, 1172, 1179, 1186, 1193, 1197, 1205, 1209, 1217, 1226, 1233, 1240, 1245, 1252, 1259, 1269, 1276, 1283, 1290, 1297, 1304, 1311, 1317, 1324, 1331, 1337, 1344, 1350, 1357, 1364, 1371, 1378, 1387, 1392, 1399, 1406, 1412, 1419, 1426, 1433, 1439, 1446, 1453, 1459, 1466, 1473, 1480, 1486, 1493, 1500, 1506, 1517, 1524, 1529, 1536, 1542, 1549, 1554, 1560, 1566, 1572, 1579, 1586, 1592, 1599, 1606, 1613, 1620, 1627, 1634, 1641, 1648, 1655, 1661, 1667, 1670, 1677, 1685, 1688, 1695, 1703, 1707, 1713, 1733, 1749, 1758, 1762, 1774, 1782, 1791, and 1975.

[5889] In some aspects, the antigen binding polypeptides provided herein comprise a VL1 comprising an amino acid sequence that is at least 65%, at least 70%, at least 75%, at least 80%, at least 85%, at least 90%, at least 95%, at least 99%, or 100% identical to any one of SEQ ID NOs: 1098, 1105, 1112, 1122, 1129, 1136, 1143, 1150, 1157, 1164, 1171, 1176, 1183, 1190, 1196, 1202, 1208, 1214, 1219, 1223, 1230, 1237, 1242, 1249, 1256, 1263, 1268, 1273, 1280, 1287, 1294, 1301, 1308, 1314, 1321, 1328, 1334, 1341, 1347, 1354, 1361, 1368, 1375, 1380, 1384, 1390, 1396, 1403, 1410, 1416, 1423, 1430, 1436, 1443, 1450, 1457, 1463, 1470, 1477, 1483, 1490, 1497, 1503, 1510, 1514, 1521, 1527, 1533, 1540, 1546, 1551, 1558, 1563, 1570, 1576, 1583, 1589, 1596, 1603, 1610, 1617, 1624, 1631, 1638, 1645, 1652, 1659, 1664, 1669, 1674, 1682, 1692, 1700, 1711, 1721, 1724, 1730, 1740, 1746, 1755, 1764, 1766, 1771, 1779, 1784, and 1788.

[5890] In some aspects, the antigen binding polypeptides provided herein comprise a VH1 comprising an amino acid sequence that is at least 65%, at least 70%, at least 75%, at least 80%, at least 85%, at least 90%, at least 95%, at least 99%, or 100% identical to any one of SEQ ID NOs: 1102, 1109, 1116, 1119, 1126, 1133, 1140, 1147, 1154, 1161, 1168, 1173, 1180, 1187, 1194, 1198, 1206, 1210, 1218, 1220, 1227, 1234, 1241, 1246, 1253, 1260, 1265, 1270, 1277, 1284, 1291, 1298, 1305, 1312, 1318, 1325, 1332, 1338, 1345, 1351, 1358, 1365, 1372, 1379, 1381, 1388, 1393, 1400, 1407, 1413, 1420, 1427, 1434, 1440, 1447, 1454, 1460, 1467, 1474, 1481, 1487, 1494, 1501, 1507, 1512, 1518, 1525, 1530, 1537, 1543, 1550, 1555, 1561, 1567, 1573, 1580, 1587, 1593, 1600, 1607, 1614, 1621, 1628, 1635, 1642, 1649, 1656, 1662, 1668, 1671, 1678, 1686, 1696, 1704, 1714, 1722, 1726, 1734, 1742, 1750, 1759, 1760, 1765, 1768, 1775, 1783, 1785, and 1792.

[5891] In some aspects, the infectious disease antigen that is not a sarbecovirus antigen is:
[5892] (i) a viral antigen elected from the group consisting of an influenza virus (A, B, C) antigen (e.g., influenza virus envelope proteins, for example, influenza virus neuraminidase (NA, N1, N2, N3, N4, N5, N6, N7, N8, N9, N10, N11), influenza virus hemagglutinin (H1, H2, H3, H4, H5, H6, H7, H8, H9, H10, H11, H12, H13, H14, H15, H16, H17, H18) (e.g., H1N1, H3N2, H5N1, H7N9, H9N2), Yamagata virus antigen, Victoria virus antigen, influenza virus structural proteins (e.g., M1, M2, capsid protein), influenza virus functional proteins (e.g., ribonucleoprotein (NP), primary interferon antagonist (NS1), nuclear export protein (NEP)) influenza virus accessory proteins (e.g., PB2, PB1, or PA), for example, anti-HA, anti-NA, anti-H1, anti-H3, anti-H5, anti-H7, anti-H9, anti-N1, anti-N2, anti-N9, anti-H1N1, anti-H3N2, anti-H5N1, anti-H7N9, anti-H9N2, anti-A protein, anti-B protein, anti-stem, anti-M1, anti-M2, anti-capsid, anti-NP, anti-NS1, anti-NEP, anti-PB1, anti-PB2, and anti-PA); a swine influenza virus antigen (e.g., swine flu hemagglutinin, swine flu neuraminidase); a classical swine fever (CSF) (hog colera) virus antigen; an equine influenza virus antigen (e.g., equine influenza virus typeA/Miami 63 neuraminidase, equine influenza virus type A/Kentucky 81 neuraminidase, equine influenza virus type A/Alaska 91 neuraminidase); parainfluenza viruses (e.g., bovine parainfluenza virus, bovine parainfluenza virus type 3 fusion protein, bovine parainfluenza virus type 3 hemagglutinin neuraminidase); a (human) respiratory syncytial virus (RSV)-viral antigen (e.g., RSV F glycoprotein, RSV G glycoprotein, F protein of respiratory syncytial virus, RSV fusion glycoprotein); a herpes simplex virus (HSV) antigen (e.g., herpes simplex virus glycoproteins gB, gC, gD, and gE, herpes simplex virus type 2 glycoprotein gB); a Dengue virus antigen (e.g., core protein, matrix protein, glycoprotein E of Dengue virus, or other protein of Dengue virus); a measles virus antigen (e.g., hemagglutinin); a poliovirus 1 antigen (e.g., poliovirus 1 proteins (VP1)), a HIV-1 antigen and HIV-2 antigen (e.g., HIV envelope proteins (e.g., envelope glycoproteins of HIV 1, HIV envelope glycoprotein (Env), HIV envelope glycoprotein gp160, HIV envelope surface glycoprotein gp120, HIV transmembrane envelope protein gp41), HIV structural proteins (e.g., p17, p24, p7, p55), HIV functional proteins (e.g., p66, HIV-1 protease (PR), p31), HIV accessory proteins (e.g., Nef, Tat, Rev, Vif, Vpr, Vpu)); a hepatitis virus (HAV, HBV, HCV, HDV, HEV) antigen (e.g., hepatitis B virus antigen (e.g., surface antigen, core protein), hepatitis C virus antigen (e.g., glycoprotein E1E2)); a rabies virus (Rabies lyssavirus) antigen (e.g., rabies virus glycoprotein, e.g., G glycoprotein); a pseudorabies virus antigen (e.g., pseudorabies virus g50 (gpD), pseudorabies virus II (gpB), pseudorabies virus III (gpC), pseudorabies virus glycoprotein H, pseudorabies virus glycoprotein E); a papillomavirus (HPV) antigen; an Epstein-Barr virus (EBV) (Gamma herpes virus 4) antigen; a Herpes simplex virus (HSV, HSV-1, HSV-2) antigen (e.g., human herpes virus 8, equine herpes virus antigen (e.g., type 1 glycoprotein B, type 1 glycoprotein D)); a Herpes zoster antigen; a Cytomegalovirus antigen (e.g., cytomegalovirus glycoprotein B); a Zika virus antigen; a Transmissible gastroenteritis virus (TGEV) antigen (e.g., glycoprotein 195, matrix protein); a rotavirus antigen (e.g., swine rotavirus glycoprotein 38); a parvovirus antigen (e.g., swine parvovirus capsid protein); a filoviruses (e.g., Marburg and Ebola) antigen; a bovine viral diarrhea virus antigen (e.g., glycoprotein 55); a Newcastle disease virus antigen (hemagglutinin, neuraminidase); an orthopoxvirus antigen; a coxsackievirus antigen and aphthovirus (foot and mouth disease virus) antigen; a yellow fever virus antigen; a Chikunga virus antigen; a Nipah virus antigen; an African swine fever virus antigen; a rhinotracheitis virus antigen (e.g., infectious bovine rhinotracheitis virus glycoprotein E, glycoprotein G); a laryngotracheitis virus antigen (e.g., infectious laryngotracheitis virus glycoprotein G or glycoprotein I); a La Crosse virus antigen (e.g., La Crosse virus glycoprotein); a neonatal calf diarrhoea virus antigen; a Venezuelan equine encephalomyelitis virus antigen; a punta toro virus antigen; a murine leukemia virus antigen; a mouse mammary tumor virus antigen; a bovine respiratory syncytial virus antigen (e.g., bovine respiratory syncytial virus attachment protein (BRSV G), bovine respiratory syncytial virus fusion protein (BRSV F), bovine respiratory syncytial virus nucleocapsid protein (BRSVN)); a bovine E viral diarrhoea virus antigen (e.g., glycoprotein 48 and glycoprotein 53); a metapneumovirus (HMPV) antigen; and an Ebola virus antigen (e.g., ebolavirus glycoprotein, e.g., Zaire ebolavirus glycoprotein); or
[5893] (ii) a bacterial or parasite antigen selected from the group consisting of a Plasmodium (e.g., Plasmodium falciparum, Plasmodium vivax, Plasmodium malariae, Plasmodium ovale, Plasmodium knowlesi) antigen, a Streptococcus (e.g., Streptococcus pneumoniae. Streptococcus pyogenes, Streptococcus agalactiae, Streptococcus mutans, Streptococcus viridans, Streptococcus anginosus, Streptococcus intermedius, Streptococcus constellatus) antigen (e.g., 24M epitope), a Neisseria gonorrhoeae antigen (e.g., gonococcal pilin), a Corynebacterium antigen (e.g., Corynebacterium diphtheria (diptheria toxin), Corynebacterium ulcerans. Corynebacterium pseudotuberculosis), Mycobacterium tuberculosis antigens, Brachyspira hyodysenteriae (Serpulina hydodysenteriae) antigen (e.g., Serpulina hydodysenteriae protective antigen), a Chlamydia antigen (e.g., Chlamydia trachomatis) (e.g., MOMP and PorB), a Mycoplasma sp. (e.g., Mycoplasma genitalium, Mycoplasma hyopneumoniae, Mycoplasma pneumonia) antigen, a Staphylococcus (e.g., Staphylococcus aureus, coagulase-negative staphylococci (CoNS), Staphylococcus aureus alpha toxin, Staphylococcus aureus bi-component leucocidin) antigen, a Klebsiella sp. antigen, an Escherichia coli antigen (e.g., E. coli shiga toxin type-2, E. coli shiga toxin type-1), a Bacillus sp. (e.g., Bacillus anthracis, e.g., Bacillus anthracis anthrax) antigen, a Pseudomonas aeruginosa antigen (e.g., Pseudomonas aeruginosa type III secretion system), an Enterococcus sp. antigen, an Enterobacter sp. antigen, a Proteus sp. antigen, an Actinobacter sp. antigen, a Mycobacterium avium (Mycobacterium avium complex (MAC)) antigen, a Salmonella bacteria antigen, a Clostridium difficile antigen, a Toxoplasma (e.g., Toxoplasma gondii) antigen, a Histoplasma antigen, a Candida antigen, a Coccidioides antigen, a Cryptococcus antigen, a Cryptosporidium antigen, and a Cystoisospora (e.g., Cystoisospora belli) antigen, and another antigen (e.g., endotoxins, lymphotoxins (e.g., lymphotoxin alpha LTA), phosphatidylserine, Hsp90, CCR5, lipoteichoic acid, clumping factor A).

[5894] In some aspects, the antigen binding polypeptides provided herein comprise a VL1 comprising a light chain complementarity determining region 1 (LCDR1), LCDR2, and/or LCDR3 of an antibody selected from the group consisting of libivirumab, rmab, rivabazumab pegol, setoxaximab, suvizumab, suvratoxumab, sevirumab, pritoxaximab, porgaviximab, REGN-EB3, obiltoxaximab, gedivumab, foravirumab, larcaviximab, motavizumab, palivizumab, rafivirumab, regavirumab, tuvirumab, cosfroviximab, felvizumab, atidortoxumab, edobacomab, nebacumab, pateclizumab, raxibacumab, urtoxazumab, tosatoxumab, berlimatoxumab, CR6261, diridavumab, firivumab, lesofavumab, navivumab, exbivirumab, lenvervimab, bavituximab, bezlotoxumab, efungumab, leronlimab, nirsevimab, pagibaximab, panobacumab, tefibazumab, ansuvimab, atoltivimab, maftivimab, and odesivimab.

[5895] In some aspects, the antigen binding polypeptides provided herein comprise a VH1 comprising a heavy chain complementarity determining region 1 (HCDR1), HCDR2, and/or HCDR3 of an antibody selected from the group consisting of libivirumab, rmab, rivabazumab pegol, setoxaximab, suvizumab, suvratoxumab, sevirumab, pritoxaximab, porgaviximab, REGN-EB3, obiltoxaximab, gedivumab, foravirumab, larcaviximab, motavizumab, palivizumab, rafivirumab, regavirumab, tuvirumab, cosfroviximab, felvizumab, atidortoxumab, edobacomab, nebacumab, pateclizumab, raxibacumab, urtoxazumab, tosatoxumab, berlimatoxumab, CR6261, diridavumab, firivumab, lesofavumab, navivumab, exbivirumab, lenvervimab, bavituximab, bezlotoxumab, efungumab, leronlimab, nirsevimab, pagibaximab, panobacumab, tefibazumab, ansuvimab, atoltivimab, maftivimab, and odesivimab.

[5896] In some aspects, the antigen binding polypeptides provided herein comprise a VL1 comprising a VL of an antibody selected from the group consisting of libivirumab, rmab, rivabazumab pegol, setoxaximab, suvizumab, suvratoxumab, sevirumab, pritoxaximab, porgaviximab, REGN-EB3, obiltoxaximab, gedivumab, foravirumab, larcaviximab, motavizumab, palivizumab, rafivirumab, regavirumab, tuvirumab, cosfroviximab, felvizumab, atidortoxumab, edobacomab, nebacumab, pateclizumab, raxibacumab, urtoxazumab, tosatoxumab, berlimatoxumab, CR6261, diridavumab, firivumab, lesofavumab, navivumab, exbivirumab, lenvervimab, bavituximab, bezlotoxumab, efungumab, leronlimab, nirsevimab, pagibaximab, panobacumab, tefibazumab, ansuvimab, atoltivimab, maftivimab, and odesivimab.

[5897] In some aspects, the antigen binding polypeptides provided herein comprise a VH1 comprising a VH of an antibody selected from the group consisting of libivirumab, rmab, rivabazumab pegol, setoxaximab, suvizumab, suvratoxumab, sevirumab, pritoxaximab, porgaviximab, REGN-EB3, obiltoxaximab, gedivumab, foravirumab, larcaviximab, motavizumab, palivizumab, rafivirumab, regavirumab, tuvirumab, cosfroviximab, felvizumab, atidortoxumab, edobacomab, nebacumab, pateclizumab, raxibacumab, urtoxazumab, tosatoxumab, berlimatoxumab, CR6261, diridavumab, firivumab, lesofavumab, navivumab, exbivirumab, lenvervimab, bavituximab, bezlotoxumab, efungumab, leronlimab, nirsevimab, pagibaximab, panobacumab, tefibazumab, ansuvimab, atoltivimab, maftivimab, and odesivimab.

[5898] In some aspects, the antigen binding polypeptides provided herein comprise a VL1 comprising (i) a complementarity determining region (CDR) 1 having an amino acid sequence that is at least 65%, at least 70%, at least 75%, at least 80%, at least 85%, at least 90%, at least 95%, at least 99%, or 100% identical to any one of SEQ ID NOs: 1428, 1793, 1798, 1810, 1817, 1824, 1977, 1985, 1993 and 2001; (ii) a CDR2 having an amino acid sequence that is at least 65%, at least 70%, at least 75%, at least 80%, at least 85%, at least 90%, at least 95%, at least 99%, or 100% identical to any one of SEQ ID NOs: 1978, 1986, 1994, and 2002; or at least 65%, at least 70%, at least 75%, at least 80%, at least 85%, at least 90%, at least 95%, at least 99%, or 100% identical to any one of amino acid sequences YTS, DTS, GAS, and AAS; and (iii) a CDR3 having an amino acid sequence that is at least 65%, at least 70%, at least 75%, at least 80%, at least 85%, at least 90%, at least 95%, at least 99%, or 100% identical to any one of SEQ ID NOs: 1229, 1799, 1805, 1811, 1818, 1825, 1979, 1987, 1995, and 2003.

[5899] In some aspects, the antigen binding polypeptides provided herein comprise a VH1 comprising (i) a complementarity determining region (CDR) 1 having an amino acid sequence that is at least 65%, at least 70%, at least 75%, at least 80%, at least 85%, at least 90%, at least 95%, at least 99%, or 100% identical to any one of SEQ ID NOs: 1577, 1795, 1801, 1813, 1820, 1827, 1981, 1989, 1997, and 2005; (ii) a CDR2 having an amino acid sequence that is at least 65%, at least 70%, at least 75%, at least 80%, at least 85%, at least 90%, at least 95%, at least 99%, or 100% identical to any one of SEQ ID NOs: 1159, 1802, 1807, 1814, 1821, 1828, 1982, 1990, 1998, and 2006; and (iii) a CDR3 having an amino acid sequence that is at least 65%, at least 70%, at least 75%, at least 80%, at least 85%, at least 90%, at least 95%, at least 99%, or 100% identical to any one of SEQ ID NOs: 1796, 1803, 1808, 1815, 1822, 1829, 1983, 1991, 1999, and 2007.

[5900] In some aspects, the antigen binding polypeptides provided herein comprise a VL1 comprising an amino acid sequence that is at least 65%, at least 70%, at least 75%, at least 80%, at least 85%, at least 90%, at least 95%, at least 99%, or 100% identical to any one of SEQ ID NOs: 1794, 1800, 1806, 1812, 1819, 1826, 1980, 1988, 1996, and 2004.

[5901] In some aspects, the antigen binding polypeptides provided herein comprise a VH1 comprising an amino acid sequence that is at least 65%, at least 70%, at least 75%, at least 80%, at least 85%, at least 90%, at least 95%, at least 99%, or 100% identical to any one of SEQ ID NOs 1797, 1804, 1809, 1816, 1823, 1830, 1984, 1992, 2000, and 2008.

[5902] In some aspects, the other-pathology antigen is selected from the group consisting of Amyloid beta, β-amyloid, PCSK9, IFN-α/β receptor. Rhesus factor, nerve growth factor (NGF), DPP4, fibrin II beta chain, ACVR2B, serum amyloid A protein SOST, FGF 23, VWF, tissue factor pathway inhibitor (TFPI), 1-40 and 1-42, selectin P, glucagon receptor (GCGR), amyloid P component, GDF-8, CXCL10 IP-10, repulsive guidance molecule A RGMA, IFN-γ, activated F9/F10, calcitonin gene-related peptide (CGRP), angiopoietin 3, IFN receptor, IFN-γ, calcitonin, β-amyloid 1-40 and 1-42, tau protein, dabigatran, cardiac myosin, selectin P, Complement factor D (CFD), kallikrein, GDF-8, IGHE, tissue factor pathway inhibitor (TFPI), GMCSF receptor α-chain, amyloid, IgE Fc region, MASP-2, oxLDL, GMCSF, NOGO-A, Alpha-synuclein, NGF, myelin-associated glycoprotein, RHD (gene) (RHD), sclerostin, FCGRT, sclerostin SOST, mucosal addressin cell adhesion molecule, myostatin, RSVFR, complement component 1s C1s, C5, and IL31.

[5903] In some aspects, the antigen binding polypeptides provided herein comprise a VL1 comprising a light chain complementarity determining region 1 (LCDR1), LCDR2, and/or LCDR3 of an antibody selected from the group consisting of aducanumab, alirocumab, frovocimab, lodelcizumab, bococizumab, evolocumab, ralpancizumab, anifrolumab, atorolimumab, bapineuzumab, bedinvetmab, begelomab, biciromab, bimagrumab, birtamimab, blosozumab, burosumab, caplacizumab, concizumab, crenezumab, crizanlizumab, crotedumab, dezamizumab, domagrozumab, donanemab, eldelumab, elezanumab, emapalumab, emicizumab, eptinezumab, erenumab, evinacumab, faralimomab, fasinumab, fontolizumab, fremanezumab, frunevetmab, fulranumab, galcanezumab, gantenerumab, gosuranemab, idarucizumab, imciromab, inclacumab, lampalizumab, lanadelumab, landogrozumab, lecanemab, ligelizumab, marstacimab, mavrilimumab, morolimumab, NEOD001, omalizumab, oMS721, orticumab, otilimab, ozanezumab, ponezumab, prasinezumab, quilizumab, ranevetmab, refanezumab, roledumab, romosozumab, rozanolixizumab, setrusumab, SHP647, solanezumab, stamulumab, suptavumab, sutimlimab, tanezumab, crovalimab, and lokivetmab.

[5904] In some aspects, the antigen binding polypeptides provided herein comprise a VH1 comprising a heavy chain complementarity determining region 1 (HCDR1), HCDR2, and/or HCDR3 of an antibody selected from the group consisting of aducanumab, alirocumab, frovocimab, lodelcizumab, bococizumab, evolocumab, ralpancizumab, anifrolumab, atorolimumab, bapineuzumab, bedinvetmab, begelomab, biciromab, bimagrumab, birtamimab, blosozumab, burosumab, caplacizumab, concizumab, crenezumab, crizanlizumab, crotedumab, dezamizumab, domagrozumab, donanemab, eldelumab, elezanumab, emapalumab, emicizumab, eptinezumab, erenumab, evinacumab, faralimomab, fasinumab, fontolizumab, fremanezumab, frunevetmab, fulranumab, galcanezumab, gantenerumab, gosuranemab, idarucizumab, imciromab, inclacumab, lampalizumab, lanadelumab, landogrozumab, lecanemab, ligelizumab, marstacimab, mavrilimumab, morolimumab, NEOD001, omalizumab, oMS721, orticumab, otilimab, ozanezumab, ponezumab, prasinezumab, quilizumab, ranevetmab, refanezumab, roledumab, romosozumab, rozanolixizumab, setrusumab, SHP647, solanezumab, stamulumab, suptavumab, sutimlimab, tanezumab, crovalimab, and lokivetmab.

[5905] In some aspects, the antigen binding polypeptides provided herein comprise a VL1 comprising a VL of an antibody selected from the group consisting of aducanumab, alirocumab, frovocimab, lodelcizumab, bococizumab, evolocumab, ralpancizumab, anifrolumab, atorolimumab, bapineuzumab, bedinvetmab, begelomab, biciromab, bimagrumab, birtamimab, blosozumab, burosumab, caplacizumab, concizumab, crenezumab, crizanlizumab, crotedumab, dezamizumab, domagrozumab, donanemab, eldelumab, elezanumab, emapalumab, emicizumab, eptinezumab, erenumab, evinacumab, faralimomab, fasinumab, fontolizumab, fremanezumab, frunevetmab, fulranumab, galcanezumab, gantenerumab, gosuranemab, idarucizumab, imciromab, inclacumab, lampalizumab, lanadelumab, landogrozumab, lecanemab, ligelizumab, marstacimab, mavrilimumab, morolimumab, NEOD001, omalizumab, oMS721, orticumab, otilimab, ozanezumab, ponezumab, prasinezumab, quilizumab, ranevetmab, refanczumab, roledumab, romosozumab, rozanolixizumab, setrusumab, SHP647, solanezumab, stamulumab, suptavumab, sutimlimab, tanezumab, crovalimab, and lokivetmab.

[5906] In some aspects, the antigen binding polypeptides provided herein comprise a VH1 comprising a VH of an antibody selected from the group consisting of aducanumab, alirocumab, frovocimab, lodelcizumab, bococizumab, evolocumab, ralpancizumab, anifrolumab, atorolimumab, bapineuzumab, bedinvetmab, begelomab, biciromab, bimagrumab, birtamimab, blosozumab, burosumab, caplacizumab, concizumab, crenezumab, crizanlizumab, crotedumab, dezamizumab, domagrozumab, donanemab, eldelumab, elezanumab, emapalumab, emicizumab, eptinezumab, erenumab, evinacumab, faralimomab, fasinumab, fontolizumab, fremanezumab, frunevetmab, fulranumab, galcanezumab, gantenerumab, gosuranemab, idarucizumab, imciromab, inclacumab, lampalizumab, lanadelumab, landogrozumab, lecanemab, ligelizumab, marstacimab, mavrilimumab, morolimumab, NEOD001, omalizumab, oMS721, orticumab, otilimab, ozanezumab, ponezumab, prasinezumab, quilizumab, ranevetmab, refanezumab, roledumab, romosozumab, rozanolixizumab, setrusumab, SHP647, solanezumab, stamulumab, suptavumab, sutimlimab, tanezumab, crovalimab, and lokivetmab.

[5907] In some aspects, the antigen binding polypeptides provided herein comprise a VL1 comprising (i) a complementarity determining region (CDR) 1 having an amino acid sequence that is at least 65%, at least 70%, at least 75%, at least 80%, at least 85%, at least 90%, at least 95%, at least 99%, or 100% identical to any one of SEQ ID NOs: 1120, 1228, 1359, 1519, 1831, 1838, 1845, 1852, 1859, 1866, 1872, 1878, 1885, 1891, 1898, 1905, 1911, 1917, 1924, 1931, 1938, 1945, and 1963; (ii) a CDR2 having an amino acid sequence that is at least 65%, at least 70%, at least 75%, at least 80%, at least 85%, at least 90%, at least 95%, at least 99%, or 100% identical to any one of amino acid sequences AAS, AVS, DAS, DNN, EDN, EVS, GAS, GNG, KAS, KVS, LVS, NTD, STS, WAS, and YTS; and (iii) a CDR3 having an amino acid sequence that is at least 65%, at least 70%, at least 75%, at least 80%, at least 85%, at least 90%, at least 95%, at least 99%, or 100% identical to any one of SEQ ID NOs: 1360, 1832, 1839, 1846, 1853, 1860, 1867, 1873, 1879, 1886, 1892, 1899, 1906, 1912, 1918, 1925, 1932, 1939, 1946, 1951, 1957, 1964, and 1970.

[5908] In some aspects, the antigen binding polypeptides provided herein comprise a VH1 comprising (i) a complementarity determining region (CDR) 1 having an amino acid sequence that is at least 65%, at least 70%, at least 75%, at least 80%, at least 85%, at least 90%, at least 95%, at least 99%, or 100% identical to any one of SEQ ID NOs: 1309, 1362, 1437, 1552, 1618, 1639, 1834, 1841, 1848, 1855, 1862, 1881, 1894, 1901, 1920, 1927, 1934, 1941, 1953, 1959, and 1966; (ii) a CDR2 having an amino acid sequence that is at least 65%, at least 70%, at least 75%, at least 80%, at least 85%, at least 90%, at least 95%, at least 99%, or 100% identical to any one of SEQ ID NOs: 1363, 1835, 1842, 1849, 1856, 1863, 1869, 1875, 1882, 1888, 1895, 1902, 1908, 1914, 1921, 1928, 1935, 1942, 1948, 1954, 1960, 1967, and 1972; and (iii) a CDR3 having an amino acid sequence that is at least 65%, at least 70%, at least 75%, at least 80%, at least 85%, at least 90%, at least 95%, at least 99%, or 100% identical to any one of SEQ ID NOs: 1364, 1836, 1843, 1850, 1857, 1864, 1870, 1876, 1883, 1889, 1896, 1903, 1909, 1915, 1922, 1929, 1936, 1943, 1949, 1955, 1961, 1968, and 1973.

[5909] In some aspects, the antigen binding polypeptides provided herein comprise a VL1 comprising an amino acid sequence that is at least 65%, at least 70%, at least 75%, at least 80%, at least 85%, at least 90%, at least 95%, at least 99%, or 100% identical to any one of SEQ ID NOs: 1361, 1833, 1840, 1847, 1854, 1861, 1868, 1874, 1880, 1887, 1893, 1900, 1907, 1913, 1919, 1926, 1933, 1940, 1947, 1952, 1958, 1965, and 1971.

[5910] In some aspects, the antigen binding polypeptides provided herein comprise a VH1 comprising an amino acid sequence that is at least 65%, at least 70%, at least 75%, at least 80%, at least 85%, at least 90%, at least 95%, at least 99%, or 100% identical to any one of SEQ ID NOs: 1365, 1837, 1844, 1851, 1858, 1865, 1871, 1877, 1884, 1890, 1897, 1904, 1910, 1916, 1923, 1930, 1937, 1944, 1950, 1956, 1962, 1969, and 1974.

[5911] In some aspects, the antigen binding polypeptides provided herein further comprise an Fc region. In some aspects, the antigen binding polypeptides provided herein further comprise an Fc region at the carboxy-terminus. In some aspects, the Fc region comprises an immunoglobulin heavy chain constant region 2 (CH2) and/or an immunoglobulin heavy chain constant region 3 (CH3). In some aspects, the Fc region further comprises an immunoglobulin hinge (i.e., a hinge region). In some aspects, the hinge region comprises an amino acid sequence at least 65%, at least 70%, at least 75%, at least 80%, at least 85%, at least 90%, at least 95%, at least 99%, or 100% identical to any one of SEQ ID NOs: 635, 636, 1072, 1073, or 1074. In some aspects, the Fc region comprises a CH2 and a CH3. In some aspects, the CH2 comprises an amino acid sequence that is at least 65%, at least 70%, at least 75%, at least 80%, at least 85%, at least 90%, at least 95%, at least 99%, or 100% identical to any one of SEQ ID NOs: 1075-1078. In some aspects, the CH3 comprises an amino acid sequence that is at least 65%, at least 70%, at least 75%, at least 80%, at least 85%, at least 90%, at least 95%, at least 99%, or 100% identical to any one of SEQ ID NOs: 1079-1085. In some aspects, the Fc region comprises an amino acid sequence that is at least 65%, at least 70%, at least 75%, at least 80%, at least 85%, at least 90%, at least 95%, at least 99%, or 100% identical to any one of SEQ ID NOs: 376-380.

[5912] In some aspects, the Fc region comprises one or more amino acid substitutions. In some aspects, the one or more amino acid substitutions comprise one or more half-life extension amino acid substitutions. In some aspects, the one or more half-life extension amino acid substitutions comprise one or more of amino acid substitutions M428L, N434A, N434S, L234F, L235E, P331S, M252Y, S254T, and T256E, or equivalent thereof, based on the EU numbering scheme. In some aspects, the one or more half-life extension amino acid substitutions comprise a LA (M428L and N434A, or equivalent thereof, based on the EU numbering scheme) amino acid substitution. In some aspects, the one or more half-life extension amino acid substitutions comprise a LS (M428L and N434S, or equivalent thereof, based on the EU numbering scheme) amino acid substitution. In some aspects, the one or more half-life extension amino acid substitutions comprise L234F and L235E, or equivalent thereof (based on the EU numbering scheme) amino acid substitutions. In some aspects, the one or more half-life extension amino acid substitutions comprise a TM (L234F, L235E, and P331S, or equivalent thereof, based on the EU numbering scheme) amino acid substitution. In some aspects, the one or more half-life extension amino acid substitutions comprise a YTE (M252Y, S254T, and T256E, or equivalent thereof, based on the EU numbering scheme) amino acid substitution.

[5913] In some aspects, the Fc region comprises at least one knob-into-hole modification. In some aspects, the antigen binding polypeptides disclosed herein are comprised in IgG1 or IgG4 antibodies or antigen binding fragments thereof. In some aspects, the knob-into-hole modification comprises one or more of knob substitutions of S354C and T366W, or equivalent thereof, and/or one or more of hole substitutions of Y349C, T366S, L368A, Y407V, or equivalent thereof, or a combination thereof, based on the EU numbering scheme. In some aspects, the Fc region comprises a knob-into-hole modification comprising knob substitutions of S354C and T366W, or equivalent thereof, and/or hole substitutions of Y349C, T366S, L368A and Y407V, or equivalent thereof, and/or a half-life extension amino acid substitution comprising: a LA (M428L and N434A, or equivalent thereof, based on the EU numbering scheme) amino acid substitution, a LS (M428L and N434S, or equivalent thereof, based on the EU numbering scheme) amino acid substitution, L234F and L235E, or equivalent thereof (based on the EU numbering scheme) amino acid substitutions, a TM (L234F, L235E, and P331S, or equivalent thereof, based on the EU numbering scheme) amino acid substitution, a YTE (M252Y, S254T, and T256E, or equivalent thereof, based on the EU numbering scheme) amino acid substitution, or any combination thereof.

[5914] In some aspects, the Fc region comprises knob substitutions of S354C and T366W, or equivalent thereof, and a half-life extension amino acid substitution comprising: a LA (M428L and N434A, or equivalent thereof, based on the EU numbering scheme) amino acid substitution, a LS (M428L and N434S, or equivalent thereof, based on the EU numbering scheme) amino acid substitution, L234F and L235E, or equivalent thereof (based on the EU numbering scheme) amino acid substitutions, a TM (L234F, L235E, and P331S, or equivalent thereof, based on the EU numbering scheme) amino acid substitution, a YTE (M252Y, S254T, and T256E, or equivalent thereof, based on the EU numbering scheme) amino acid substitution, or any combination thereof.

[5915] In some aspects, the Fc region comprises hole substitutions of Y349C, T366S, L368A and Y407V, or equivalent thereof, and a half-life extension amino acid substitution comprising: a LA (M428L and N434A, or equivalent thereof, based on the EU numbering scheme) amino acid substitution, a LS (M428L and N434S, or equivalent thereof, based on the EU numbering scheme) amino acid substitution, L234F and L235E, or equivalent thereof (based on the EU numbering scheme) amino acid substitutions, a TM (L234F, L235E, and P331S, or equivalent thereof, based on the EU numbering scheme) amino acid substitution, a YTE (M252Y, S254T, and T256E, or equivalent thereof, based on the EU numbering scheme) amino acid substitution, or any combination thereof.

[5916] In some aspects, the antigen binding polypeptides disclosed herein comprise one or more Fc effector function knockout mutation. In some aspects, the antigen binding polypeptides disclosed herein are comprised in IgG1 or IgG4 antibodies or antigen binding fragments thereof. In some aspects, the Fc effector function knockout mutation is L234A, L235A, P239A, or equivalent thereof, or a combination thereof, based on the EU numbering scheme.

[5917] In some aspects, the antigen binding polypeptides disclosed herein comprise a mutation at a glycosylation site. In some aspects, the mutation at a glycosylation site is a mutation at an N-glycosylation site. In some aspects, the antigen binding polypeptides comprise a VH comprising a mutation at a glycosylation site. In some aspects, the mutation at a glycosylation site is a mutation at an N-glycosylation site. In some aspects, the mutation at an N-glycosylation site is at amino acid N62, or equivalent thereof, of the VH region or equivalent thereof. In some aspects, the mutation at an N-glycosylation site at amino acid N62 is N62Q or N62S, or equivalent thereof.

[5918] In some aspects, the antigen binding polypeptides disclosed herein, comprise one or more optional linkers. The one or more optional linkers are indicated herein as Ln, wherein n is an integer, and the integer next to each L indicates each L comprised in the antigen binding polypeptides disclosed herein. For example, if an antigen binding polypeptide disclosed herein comprises two linkers, the first linker from N-terminus to C-terminus is herein indicated as L1, and the second linker from N-terminus to C-terminus is herein indicated as L2. In some aspects, any one of the optional linkers each independently have a length of from 0 amino acids to about 50 amino acids. In some aspects, any one of the optional linkers each independently have a length of from 5 amino acids to about 40 amino acids.

[5919] In some aspects, any one of the optional linkers are non-immunogenic. In some aspects, any one of the optional linkers do not contain a consensus T cell epitope.

[5920] In some aspects, any of Ln comprises an amino acid sequence of G or A, or an amino acid sequence at least 65%, at least 70%, at least 75%, at least 80%, at least 85%, at least 90%, at least 95%, at least 99%, or 100% identical to amino acid sequence GSS or ASG, or an amino acid sequence at least 65%, at least 70%, at least 75%, at least 80%, at least 85%, at least 90%, at least 95%, at least 99%, or 100% identical to any one of SEQ ID NOs: 333-373 or 967-971. In some aspects. Ln comprises an amino acid sequence at least 65%, at least 70%, at least 75%, at least 80%, at least 85%, at least 90%, at least 95%, at least 99%, or 100% identical to any one of SEQ ID NOs: 333-345 or 967-971.

[5921] In some aspects, the antigen binding polypeptide is selected from any one of the more specific aspects provided herein for an antigen binding polypeptide in an antigen binding polypeptide complex having no more than three polypeptide chains.

[5922] In some aspects, the antigen binding polypeptide further comprises one or more immunoglobulin heavy chain constant region 1 (CH1) and/or one or more immunoglobulin light chain constant region (CL) between any one of the variable regions and/or optional amino acid linkers (e.g., between VL1 and L1, between L1 and VH1, between VH1 and L2, between L2 and VL1, between L1 and VL2, between VL2 and L2, between L2 and VH2, between VH2 and L3, between L3 and VH1, between VL1 and L1, between L1 and VH2, between VH2 and L2, between. L2 and VL2, between VL2 and L3, between L3 and VH1, between VH1 and L4, between L4 and VH2, between VH2 and L5, between L5 and VL2, between VL2 and L6, between L6 and VL1, between VH1 and L4, between L4 and VL2, between L4 and VL2, between VL2 and L5, between L5 and VH2, between VH2 and L6, or between L6 and VL1).

[5923] In some aspects, the antigen binding polypeptide is selected from any one of the more specific aspects provided herein for an antigen binding polypeptide in an antigen binding polypeptide complex having no more than three polypeptide chains, and further comprises one or more immunoglobulin heavy chain constant region 1 (CH1) and/or one or more immunoglobulin light chain constant region (CL) between any one of the variable regions and/or optional amino acid linkers (e.g., between VL1 and L1, between L1 and VH1, between VH1 and L2, between L2 and VL1, between L1 and VL2, between VL2 and L2, between L2 and VH2, between VH2 and L3, between L3 and VH1, between VL1 and L1, between L1 and VH2, between VH2 and L2, between. L2 and VL2, between VL2 and L3, between L3 and VH1, between VH1 and L4, between L4 and VH2, between VH2 and L5, between L5 and VL2, between VL2 and L6, between L6 and VL1, between VH1 and L4, between L4 and VL2, between L4 and VL2, between VL2 and L5, between L5 and VH2, between VH2 and L6, or between L6 and VL1).

[5924] In some aspects, an antigen binding polypeptide complex provided herein comprises a first polypeptide, and a second polypeptide; wherein the first polypeptide has a structure represented by VL1-CL-VH1-CH1, VL1-CH1-VH1-CL, VH1-CL-VL1-CH1, or VH1-CH1-VL1-CL; and wherein the second polypeptide has a structure represented by VL2-CL-VL3-VH3-VH2-CH1, VL2-CL-VH3-VL3-VH2-CH1, VL2-CH1-VL3-VH3-VH2-CL, VL2-CH1-VH3-VL3-VH2-CL, VH2-CL-VL3-VH3-VL2-CH1, VH2-CL-VH3-VL3-VL2-CH1, VH2-CH1-VL3-VH3-VL2-CL, VH2-CH1-VH3-VL3-VL2-CL, VL3-CL-VL2-VH2-VH3-CH1, VL3-CL-VH2-VL2-VH3-CH1, VL3-CH1-VL2-VH2-VH3-CL, VL3-CH1-VH2-VL2-VH3-CL, VH3-CL-VL2-VH2-VL3-CH1, VH3-CL-VH2-VL2-VL3-CH1, VH3-CH1-VL2-VH2-VL3-CL, or VH3-CH1-VH2-VL2-VL3-CL.

[5925] In some aspects, an antigen binding polypeptide complex provided herein comprises a first polypeptide, and a second polypeptide; wherein the first polypeptide has a structure represented by VL1-L1-CL-L2-VH1-L3-CH1, VL1-L1-CH1-L2-VH1-L3-CL, VH1-L1-CL-L2-VL1-L3-CH1, or VH1-L1- CH1-L2-VL1-L3-CL; and wherein the second polypeptide has a structure represented by VL2-L4-CL-L5-VL3-L6-VH3-L7-VH2-L8-CH1, VL2-L4-CL-L5-VH3-L6-VL3-L7-VH2-L8-CH1, VL2-L4-CH1-L5- VL3-L6-VH3-L7-VH2-L8-CL, VL2-L4-CH1-L5-VH3-L6-VL3-L7-VH2-L8-CL, VH2-L4-CL-L5-VL3-L6-VH3-L7-VL2-L8-CH1, VH2-L4-CL-L5-VH3-L6-VL3-L7-VL2-L8-CH1, VH2-L4-CH1-L5-VL3-L6- VH3-L7-VL2-L8-CL, VH2-L4-CH1-L5-VH3-L6-VL3-L7-VL2-L8-CL, VL3-L4-CL-L5-VL2-L6-VH2-L7-VH3-L8-CH1, VL3-L4-CL-L5-VH2-L6-VL2-L7-VH3-L8-CH1, VL3-L4-CH1-L5-VL2-L6-VH2-L7-VH3-L8-CL, VL3-L4-CH1-L5-VH2-L6-VL2-L7-VH3-L8-CL, VH3-L4-CL-L5-VL2-L6-VH2-L7-VL3-L8-CH1, VH3-L4-CL-L5-VH2-L6-VL2-L7-VL3-L8-CH1, VH3-L4-CH1-L5-VL2-L6-VH2-L7-VL3-L8-CL, or VH3-L4-CH1-L5-VH2-L6-VL2-L7-VL3-L8-CL.

[5926] In some aspects, an antigen binding polypeptide complex provided herein comprises a first polypeptide, and a second polypeptide; wherein the first polypeptide has a structure represented by VL1-CL-VH1-CH1-CH2-CH3, VL1-CH1-VH1-CL-CH2-CH3, VH1-CL-VL1-CH1-CH2-CH3, or VH1-CH1-VL1-CL-CH2-CH3; and wherein the second polypeptide has a structure represented by VL2-CL-VL3-VH3-VH2-CH1-CH2-CH3, VL2-CL-VH3-VL3-VH2-CH1-CH2-CH3, VL2-CH1-VL3-VH3-VH2-CL-CH2-CH3, VL2-CH1-VH3-VL3-VH2-CL-CH2-CH3, VH2-CL-VL3-VH3-VL2-CH1-CH2-CH3, VH2-CL-VH3-VL3-VL2-CH1-CH2-CH3, VH2-CH1-VL3-VH3-VL2-CL-CH2-CH3, VH2-CH1-VH3-VL3-VL2-CL-CH2-CH3, VL3-CL-VL2-VH2-VH3-CH1-CH2-CH3, VL3-CL-VH2-VL2-VH3-CH1-CH2-CH3, VL3-CH1-VL2-VH2-VH3-CL-CH2-CH3, VL3-CH1-VH2-VL2-VH3-CL-CH2-CH3, VH3-CL-VL2-VH2-VL3-CH1-CH2-CH3, VH3-CL-VH2-VL2-VL3-CH1-CH2-CH3, VH3-CH1-VL2-VH2-VL3-CL-CH2-CH3, or VH3-CH1-VH2-VL2-VL3-CL-CH2-CH3.

[5927] In some aspects, an antigen binding polypeptide complex provided herein comprises a first polypeptide, and a second polypeptide; wherein the first polypeptide has a structure represented by VL1-L1-CL-L2-VH1-L3-CH1-CH2-CH3, VL1-L1-CH1-L2-VH1-L3-CL-CH2-CH3, VH1-L1-CL-L2-VL1- L3-CH1-CH2-CH3, or VH1-L1-CH1-L2-VL1-L3-CL-CH2-CH3; and wherein the second polypeptide has a structure represented by VL2-L4-CL-L5-VL3-L6-VH3-L7-VH2-L8-CH1-CH2-CH3, VL2-L4-CL-L5-VH3-L6-VL3-L7-VH2-L8-CH1-CH2-CH3, VL2-L4-CH1-L5-VL3-L6-VH3-L7-VH2-L8-CL-CH2-CH3, VL2-L4-CH1-L5-VH3-L6-VL3-L7-VH2-L8-CL-CH2-CH3, VH2-L4-CL-L5-VL3-L6-VH3-L7-VL2-L8-CH1-CH2-CH3, VH2-L4-CL-L5-VH3-L6-VL3-L7-VL2-L8-CH1-CH2-CH3, VH2-L4-CH1-L5-VL3-L6-VH3-L7-VL2-L8-CL-CH2-CH3, VH2-L4-CH1-L5-VH3-L6-VL3-L7-VL2-L8-CL-CH2-CH3, VL3-L4-CL-L5-VL2-L6-VH2-L7-VH3-L8-CH1-CH2-CH3, VL3-L4-CL-L5-VH2-L6-VL2-L7-VH3-L8-CH1-CH2-CH3, VL3-L4-CH1-L5-VL2-L6-VH2-L7-VH3-L8-CL-CH2-CH3, VL3-L4-CH1-L5-VH2-L6-VL2-L7-VH3-L8-CL-CH2-CH3, VH3-L4-CL-L5-VL2-L6-VH2-L7-VL3-L8-CH1-CH2-CH3, VH3-L4-CL-L5-VH2-L6-VL2-L7-VL3-L8-CH1-CH2-CH3, VH3-L4-CH1-L5-VL2-L6-VH2-L7-VL3-L8-CL-CH2-CH3, or VH3-L4-CH1-L5-VH2-L6-VL2-L7-VL3-L8-CL-CH2-CH3.

[5928] In some aspects, an antigen binding polypeptide complex provided herein comprises a first polypeptide, and a second polypeptide; wherein the first polypeptide has a structure represented by VL1-CL-VH1-CH1, VL1-CH1-VH1-CL, VH1-CL-VL1-CH1, or VH1-CH1-VL1-CL; and wherein the second polypeptide has a structure represented by VL2-VH2-VL3-CL-VH3-CH1, VL2-VH2-VL3-CH1-VH3-CL, VL2-VH2-VH3-CL-VL3-CH1, VL2-VH2-VH3-CH1-VL3-CL, VL2-VL3-VH2-CL-VH3-CH1, VL2-VL3-VH2-CH1-VH3-CL, VL2-VH3-VH2-CL-VL3-CH1, VL2-VH3-VH2-CH1-VL3-CL, VH2-VL2-VL3-CL-VH3-CH1, VH2-VL2-VL3-CH1-VH3-CL, VH2-VL2-VH3-CL-VL3-CH1, VH2-VL2-VH3-CH1-VL3-CL, VH2-VL3-VL2-CL-VH3-CH1, VH2-VL3-VL2-CH1-VH3-CL, VH2-VH3-VL2-CL-VL3-CH1, VH2-VH3-VL2-CH1-VL3-CL, VL3-VL2-VH3-CL-VH2-CH1, VL3-VL2-VH3-CH1-VH2-CL, VL3-VH2-VH3-CL-VL2-CH1, VL3-VH2-VH3-CH1-VL2-CL, VL3-VH3-VL2-CL-VH2-CH1, VL3-VH3-VL2-CH1-VH2-CL, VL3-VH3-VH2-CL-VL2-CH1, VL3-VH3-VH2-CH1-VL2-CL, VH3-VL2-VL3-CL-VH2-CH1, VH3-VL2-VL3-CH1-VH2-CL, VH3-VH2-VL3-CL-VL2-CH1, VH3-VH2-VL3-CH1-VL2-CL, VH3-VL3-VL2-CL-VH2-CH1, VH3-VL3-VL2-CH1-VH2-CL, VH3-VL3-VH2-CL-VL2-CH1, or VH3-VL3-VH2-CH1-VL2-CL.

[5929] In some aspects, an antigen binding polypeptide complex provided herein comprises a first polypeptide, and a second polypeptide; wherein the first polypeptide has a structure represented by VL1-L1-CL-L2-VH1-L3-CH1, VL1-L1-CH1-L2-VH1-L3-CL, VH1-L1-CL-L2-VL1-L3-CH1, or VH1-L1- CH1-L2-VL1-L3-CL; and wherein the second polypeptide has a structure represented by VL2-L4-VH2-L5-VL3-L6-CL-L7-VH3-L8-CH1, VL2-L4-VH2-L5-VL3-L6-CH1-L7-VH3-L8-CL, VL2-L4-VH2-L5-VH3-L6-CL-L7-VL3-L8-CH1, VL2-L4-VH2-L5-VH3-L6-CH1-L7-VL3-L8-CL, VL2-L4-VL3-L5-VH2-L6-CL-L7-VH3-L8-CH1, VL2-L4-VL3-L5-VH2-L6-CH1-L7-VH3-L8-CL, VL2-L4-VH3-L5-VH2-L6-CL-L7-VL3-L8-CH1, VL2-L4-VH3-L5-VH2-L6-CH1-L7-VL3-L8-CL, VH2-L4-VL2-L5-VL3-L6-CL-L7-VH3-L8-CH1, VH2-L4-VL2-L5-VL3-L6-CH1-L7-VH3-L8-CL, VH2-L4-VL2-L5-VH3-L6-CL-L7-VL3-L8-CH1, VH2-L4-VL2-L5-VH3-L6-CH1-L7-VL3-L8-CL, VH2-L4-VL3-L5-VL2-L6-CL-L7-VH3-L8-CH1, VH2-L4-VL3-L5-VL2-L6-CH1-L7-VH3-L8-CL, VH2-L4-VH3-L5-VL2-L6-CL-L7-VL3-L8-CH1, VH2-L4-VH3-L5-VL2-L6-CH1-L7-VL3-L8-CL, VL3-L4-VL2-L5-VH3-L6-CL-L7-VH2-L8-CH1, VL3-L4-VL2-L5-VH3-L6-CH1-L7-VH2-L8-CL, VL3-L4-VH2-L5-VH3-L6-CL-L7-VL2-L8-CH1, VL3-L4-VH2-L5-VH3-L6-CH1-L7-VL2-L8-CL, VL3-L4-VH3-L5-VL2-L6-CL-L7-VH2-L8-CH1, VL3-L4-VH3-L5-VL2-L6-CH1-L7-VH2-L8-CL, VL3-L4-VH3-L5-VH2-L6-CL-L7-VL2-L8-CH1, VL3-L4-VH3-L5-VH2-L6-CH1-L7-VL2-L8-CL, VH3-L4-VL2-L5-VL3-L6-CL-L7-VH2-L8-CH1, VH3-L4-VL2-L5-VL3-L6-CH1-L7-VH2-L8-CL, VH3-L4-VH2-L5-VL3-L6-CL-L7-VL2-L8-CH1, VH3-L4-VH2-L5-VL3-L6-CH1-L7-VL2-L8-CL, VH3-L4-VL3-L5-VL2-L6-CL-L7-VH2-L8-CH1, VH3-L4-VL3-L5-VL2-L6-CH1-L7-VH2-L8-CL, VH3-L4-VL3-L5-VH2-L6-CL-L7-VL2-L8-CH1, or VH3-L4-VL3-L5-VH2-L6-CH1-L7-VL2-L8-CL.

[5930] In some aspects, an antigen binding polypeptide complex provided herein comprises a first polypeptide, and a second polypeptide; wherein the first polypeptide has a structure represented by VL1-CL-VH1-CH1-CH2-CH3, VL1-CH1-VH1-CL-CH2-CH3, VH1-CL-VL1-CH1-CH2-CH3, or VH1-CH1-VL1-CL-CH2-CH3; and wherein the second polypeptide has a structure represented by VL2-VH2-VL3-CL-VH3-CH1-CH2-CH3, VL2-VH2-VL3-CH1-VH3-CL-CH2-CH3, VL2-VH2-VH3-CL-VL3-CH1-CH2-CH3, VL2-VH2-VH3-CH1-VL3-CL-CH2-CH3, VL2-VL3-VH2-CL-VH3-CH1-CH2-CH3, VL2-VL3-VH2-CH1-VH3-CL-CH2-CH3, VL2-VH3-VH2-CL-VL3-CH1-CH2-CH3, VL2-VH3-VH2-CH1-VL3-CL-CH2-CH3, VH2-VL2-VL3-CL-VH3-CH1-CH2-CH3, VH2-VL2-VL3-CH1-VH3-CL-CH2-CH3, VH2-VL2-VH3-CL-VL3-CH1-CH2-CH3, VH2-VL2-VH3-CH1-VL3-CL-CH2-CH3, VH2-VL3-VL2-CL-VH3-CH1-CH2-CH3, VH2-VL3-VL2-CH1-VH3-CL-CH2-CH3, VH2-VH3-VL2-CL-VL3-CH1-CH2-CH3, VH2-VH3-VL2-CH1-VL3-CL-CH2-CH3, VL3-VL2-VH3-CL-VH2-CH1-CH2-CH3, VL3-VL2-VH3-CH1-VH2-CL-CH2-CH3, VL3-VH2-VH3-CL-VL2-CH1-CH2-CH3, VL3-VH2-VH3-CH1-VL2-CL-CH2-CH3, VL3-VH3-VL2-CL-VH2-CH1-CH2-CH3, VL3-VH3-VL2-CH1-VH2-CL-CH2-CH3, VL3-VH3-VH2-CL-VL2-CH1-CH2-CH3, VL3-VH3-VH2-CH1-VL2-CL-CH2-CH3, VH3-VL2-VL3-CL-VH2-CH1-CH2-CH3, VH3-VL2-VL3-CH1-VH2-CL-CH2-CH3, VH3-VH2-VL3-CL-VL2-CH1-CH2-CH3, VH3-VH2-VL3-CH1-VL2-CL-CH2-CH3, VH3-VL3-VL2-CL-VH2-CH1-CH2-CH3, VH3-VL3-VL2-CH1-VH2-CL-CH2-CH3, VH3-VL3-VH2-CL-VL2-CH1-CH2-CH3, or VH3-VL3-VH2-CH1-VL2-CL-CH2-CH3.

[5931] In some aspects, an antigen binding polypeptide complex provided herein comprises a first polypeptide, and a second polypeptide; wherein the first polypeptide has a structure represented by VL1-L1-CL-L2-VH1-L3-CH1-CH2-CH3, VL1-L1-CH1-L2-VH1-L3-CL-CH2-CH3, VH1-L1-CL-L2-VL1- L3-CH1-CH2-CH3, or VH1-L1-CH1-L2-VL1-L3-CL-CH2-CH3; and wherein the second polypeptide has a structure represented by VL2-L4-VH2-L5-VL3-L6-CL-L7-VH3-L8-CH1-CH2-CH3, VL2-L4-VH2-L5-VL3-L6-CH1-L7-VH3-L8-CL-CH2-CH3, VL2-L4-VH2-L5-VH3-L6-CL-L7-VL3-L8-CH1-CH2-CH3, VL2-L4-VH2-L5-VH3-L6-CH1-L7-VL3-L8-CL-CH2-CH3, VL2-L4-VL3-L5-VH2-L6-CL-L7-VH3-L8-CH1-CH2-CH3, VL2-L4-VL3-L5-VH2-L6-CH1-L7-VH3-L8-CL-CH2-CH3, VL2-L4-VH3-L5-VH2-L6-CL-L7-VL3-L8-CH1-CH2-CH3, VL2-L4-VH3-L5-VH2-L6-CH1-L7-VL3-L8-CL-CH2-CH3, VH2-L4-VL2-L5-VL3-L6-CL-L7-VH3-L8-CH1-CH2-CH3, VH2-L4-VL2-L5-VL3-L6-CH1-L7-VH3-L8- CL-CH2-CH3, VH2-L4-VL2-L5-VH3-L6-CL-L7-VL3-L8-CH1-CH2-CH3, VH2-L4-VL2-L5-VH3-L6-CH1-L7-VL3-L8-CL-CH2-CH3, VH2-L4-VL3-L5-VL2-L6-CL-L7-VH3-L8-CH1-CH2-CH3, VH2-L4-VL3-L5-VL2-L6-CH1-L7-VH3-L8-CL-CH2-CH3, VH2-L4-VH3-L5-VL2-L6-CL-L7-VL3-L8-CH1-CH2-CH3, VH2-L4-VH3-L5-VL2-L6-CH1-L7-VL3-L8-CL-CH2-CH3, VL3-L4-VL2-L5-VH3-L6-CL-L7-VH2-L8-CH1-CH2-CH3, VL3-L4-VL2-L5-VH3-L6-CH1-L7-VH2-L8-CL-CH2-CH3, VL3-L4-VH2-L5-VH3-L6-CL-L7-VL2-L8-CH1-CH2-CH3, VL3-L4-VH2-L5-VH3-L6-CH1-L7-VL2-L8-CL-CH2-CH3, VL3-L4-VH3-L5-VL2-L6-CL-L7-VH2-L8-CH1-CH2-CH3, VL3-L4-VH3-L5-VL2-L6-CH1-L7-VH2-L8- CL-CH2-CH3, VL3-L4-VH3-L5-VH2-L6-CL-L7-VL2-L8-CH1-CH2-CH3, VL3-L4-VH3-L5-VH2-L6-CH1-L7-VL2-L8-CL-CH2-CH3, VH3-L4-VL2-L5-VL3-L6-CL-L7-VH2-L8-CH1-CH2-CH3, VH3-L4-VL2-L5-VL3-L6-CH1-L7-VH2-L8-CL-CH2-CH3, VH3-L4-VH2-L5-VL3-L6-CL-L7-VL2-L8-CH1-CH2-CH3, VH3-L4-VH2-L5-VL3-L6-CH1-L7-VL2-L8-CL-CH2-CH3, VH3-L4-VL3-L5-VL2-L6-CL-L7-VH2-L8-CH1-CH2-CH3, VH3-L4-VL3-L5-VL2-L6-CH1-L7-VH2-L8-CL-CH2-CH3, VH3-L4-VL3-L5-VH2-L6-CL-L7-VL2-L8-CH1-CH2-CH3, or VH3-L4-VL3-L5-VH2-L6-CH1-L7-VL2-L8-CL-CH2-CH3.

[5932] In some aspects, an antigen binding polypeptide complex provided herein comprises a first polypeptide, and a second polypeptide; wherein the first polypeptide has a structure represented by VL1-CL-VH1-CH1, VL1-CH1-VH1-CL, VH1-CL-VL1-CH1, or VH1-CH1-VL1-CL; and wherein the second polypeptide has a structure represented by VL2-CL-VH2-CH1-VL3-VH3, VL2-CL-VH2-CH1-VH3-VL3, VL2-CL-VL3-CH1-VH2-VH3, VL2-CL-VH3-CH1-VH2-VL3, VL2-CH1-VH2-CL-VL3-VH3, VL2-CH1-VH2-CL-VH3-VL3, VL2-CH1-VL3-CL-VH2-VH3, VL2-CH1-VH3-CL-VH2-VL3, VH2-CL-VL2-CH1-VL3-VH3, VH2-CL-VL2-CH1-VH3-VL3, VH2-CL-VL3-CH1-VL2-VH3, VH2-CL-VH3-CH1-VL2-VL3, VH2-CH1-VL2-CL-VL3-VH3, VH2-CH1-VL2-CL-VH3-VL3, VH2-CH1-VL3-CL-VL2-VH3, VH2-CH1-VH3-CL-VL2-VL3, VL3-CL-VL2-CH1-VH3-VH2, VL3-CL-VH2-CH1-VH3-VL2, VL3-CL-VH3-CH1-VL2-VH2, VL3-CL-VH3-CH1-VH2-VL2, VL3-CH1-VL2-CL-VH3-VH2, VL3-CH1-VH2-CL-VH3-VL2, VL3-CH1-VH3-CL-VL2-VH2, VL3-CH1-VH3-CL-VH2-VL2, VH3-CL-VL2-CH1-VL3-VH2, VH3-CL-VH2-CH1-VL3-VL2, VH3-CL-VL3-CH1-VL2-VH2, VH3-CL-VL3-CH1-VH2-VL2, VH3-CH1-VL2-CL-VL3-VH2, VH3-CH1-VH2-CL-VL3-VL2, VH3-CH1-VL3-CL-VL2-VH2, or VH3-CH1-VL3-CL-VH2-VL2.

[5933] In some aspects, an antigen binding polypeptide complex provided herein comprises a first polypeptide, and a second polypeptide; wherein the first polypeptide has a structure represented by VL1-L1-CL-L2-VH1-L3-CH1, VL1-L1-CH1-L2-VH1-L3-CL, VH1-L1-CL-L2-VL1-L3-CH1, or VH1-L1- CH1-L2-VL1-L3-CL; and wherein the second polypeptide has a structure represented by VL2-L4-CL-L5-VH2-L6-CH1-L7-VL3-L8-VH3, VL2-L4-CL-L5-VH2-L6-CH1-L7-VH3-L8-VL3, VL2-L4-CL-L5-VL3-L6-CH1-L7-VH2-L8-VH3, VL2-L4-CL-L5-VH3-L6-CH1-L7-VH2-L8-VL3, VL2-L4-CH1-L5-VH2-L6-CL-L7-VL3-L8-VH3, VL2-L4-CH1-L5-VH2-L6-CL-L7-VH3-L8-VL3, VL2-L4-CH1-L5-VL3-L6-CL- L7-VH2-L8-VH3, VL2-L4-CH1-L5-VH3-L6-CL-L7-VH2-L8-VL3, VH2-L4-CL-L5-VL2-L6-CH1-L7-VL3-L8-VH3, VH2-L4-CL-L5-VL2-L6-CH1-L7-VH3-L8-VL3, VH2-L4-CL-L5-VL3-L6-CH1-L7-VL2-L8-VH3, VH2-L4-CL-L5-VH3-L6-CH1-L7-VL2-L8-VL3, VH2-L4-CH1-L5-VL2-L6-CL-L7-VL3-L8-VH3, VH2-L4-CH1-L5-VL2-L6-CL-L7-VH3-L8-VL3, VH2-L4-CH1-L5-VL3-L6-CL-L7-VL2-L8-VH3, VH2-L4-CH1-L5-VH3-L6-CL-L7-VL2-L8-VL3, VL3-L4-CL-L5-VL2-L6-CH1-L7-VH3-L8-VH2, VL3-L4-CL-L5-VH2-L6-CH1-L7-VH3-L8-VL2, VL3-L4-CL-L5-VH3-L6-CH1-L7-VL2-L8-VH2, VL3-L4-CL- L5-VH3-L6-CH1-L7-VH2-L8-VL2, VL3-L4-CH1-L5-VL2-L6-CL-L7-VH3-L8-VH2, VL3-L4-CH1-L5-VH2-L6-CL-L7-VH3-L8-VL2, VL3-L4-CH1-L5-VH3-L6-CL-L7-VL2-L8-VH2, VL3-L4-CH1-L5-VH3-L6-CL-L7-VH2-L8-VL2, VH3-L4-CL-L5-VL2-L6-CH1-L7-VL3-L8-VH2, VH3-L4-CL-L5-VH2-L6-CH1- L7-VL3-L8-VL2, VH3-L4-CL-L5-VL3-L6-CH1-L7-VL2-L8-VH2, VH3-L4-CL-L5-VL3-L6-CH1-L7-VH2-L8-VL2, VH3-L4-CH1-L5-VL2-L6-CL-L7-VL3-L8-VH2, VH3-L4-CH1-L5-VH2-L6-CL-L7-VL3-L8-VL2, VH3-L4-CH1-L5-VL3-L6-CL-L7-VL2-L8-VH2, or VH3-L4-CH1-L5-VL3-L6-CL-L7-VH2-L8-VL2.

[5934] In some aspects, an antigen binding polypeptide complex provided herein comprises a first polypeptide, and a second polypeptide; wherein the first polypeptide has a structure represented by VL1-CL-VH1-CH1-CH2-CH3, VL1-CH1-VH1-CL-CH2-CH3, VH1-CL-VL1-CH1-CH2-CH3, or VH1-CH1-VL1-CL-CH2-CH3; and wherein the second polypeptide has a structure represented by VL2-CL-VH2-CH1-VL3-VH3-CH2-CH3, VL2-CL-VH2-CH1-VH3-VL3-CH2-CH3, VL2-CL-VL3-CH1-VH2-VH3-CH2-CH3, VL2-CL-VH3-CH1-VH2-VL3-CH2-CH3, VL2-CH1-VH2-CL-VL3-VH3-CH2-CH3, VL2-CH1-VH2-CL-VH3-VL3-CH2-CH3, VL2-CH1-VL3-CL-VH2-VH3-CH2-CH3, VL2-CH1-VH3-CL-VH2-VL3-CH2-CH3, VH2-CL-VL2-CH1-VL3-VH3-CH2-CH3, VH2-CL-VL2-CH1-VH3-VL3-CH2-CH3, VH2-CL-VL3-CH1-VL2-VH3-CH2-CH3, VH2-CL-VH3-CH1-VL2-VL3-CH2-CH3, VH2-CH1-VL2-CL-VL3-VH3-CH2-CH3, VH2-CH1-VL2-CL-VH3-VL3-CH2-CH3, VH2-CH1-VL3-CL-VL2-VH3-CH2-CH3, VH2-CH1-VH3-CL-VL2-VL3-CH2-CH3, VL3-CL-VL2-CH1-VH3-VH2-CH2-CH3, VL3-CL-VH2-CH1-VH3-VL2-CH2-CH3, VL3-CL-VH3-CH1-VL2-VH2-CH2-CH3, VL3-CL-VH3-CH1-VH2-VL2-CH2-CH3, VL3-CH1-VL2-CL-VH3-VH2-CH2-CH3, VL3-CH1-VH2-CL-VH3-VL2-CH2-CH3, VL3-CH1-VH3-CL-VL2-VH2-CH2-CH3, VL3-CH1-VH3-CL-VH2-VL2-CH2-CH3, VH3-CL-VL2-CH1-VL3-VH2-CH2-CH3, VH3-CL-VH2-CH1-VL3-VL2-CH2-CH3, VH3-CL-VL3-CH1-VL2-VH2-CH2-CH3, VH3-CL-VL3-CH1-VH2-VL2-CH2-CH3, VH3-CH1-VL2-CL-VL3-VH2-CH2-CH3, VH3-CH1-VH2-CL-VL3-VL2-CH2-CH3, VH3-CH1-VL3-CL-VL2-VH2-CH2-CH3, or VH3-CH1-VL3-CL-VH2-VL2-CH2-CH3.

[5935] In some aspects, an antigen binding polypeptide complex provided herein comprises a first polypeptide, and a second polypeptide; wherein the first polypeptide has a structure represented by VL1-L1-CL-L2-VH1-L3-CH1-CH2-CH3, VL1-L1-CH1-L2-VH1-L3-CL-CH2-CH3, VH1-L1-CL-L2-VL1- L3-CH1-CH2-CH3, or VH1-L1-CH1-L2-VL1-L3-CL-CH2-CH3; and wherein the second polypeptide has a structure represented by VL2-L4-CL-L5-VH2-L6-CH1-L7-VL3-L8-VH3-CH2-CH3, VL2-L4-CL-L5-VH2-L6-CH1-L7-VH3-L8-VL3-CH2-CH3, VL2-L4-CL-L5-VL3-L6-CH1-L7-VH2-L8-VH3-CH2-CH3, VL2-L4-CL-L5-VH3-L6-CH1-L7-VH2-L8-VL3-CH2-CH3, VL2-L4-CH1-L5-VH2-L6-CL-L7-VL3-L8-VH3-CH2-CH3, VL2-L4-CH1-L5-VH2-L6-CL-L7-VH3-L8-VL3-CH2-CH3, VL2-L4-CH1-L5-VL3-L6-CL-L7-VH2-L8-VH3-CH2-CH3, VL2-L4-CH1-L5-VH3-L6-CL-L7-VH2-L8-VL3-CH2-CH3, VH2-L4-CL-L5-VL2-L6-CH1-L7-VL3-L8-VH3-CH2-CH3, VH2-L4-CL-L5-VL2-L6-CH1-L7-VH3-L8-VL3-CH2-CH3, VH2-L4-CL-L5-VL3-L6-CH1-L7-VL2-L8-VH3-CH2-CH3, VH2-L4-CL-L5-VH3-L6-CH1-L7-VL2-L8-VL3-CH2-CH3, VH2-L4-CH1-L5-VL2-L6-CL-L7-VL3-L8-VH3-CH2-CH3, VH2-L4-CH1-L5-VL2-L6-CL-L7-VH3-L8-VL3-CH2-CH3, VH2-L4-CH1-L5-VL3-L6-CL-L7-VL2-L8-VH3-CH2-CH3, VH2-L4-CH1-L5-VH3-L6-CL-L7-VL2-L8-VL3-CH2-CH3, VL3-L4-CL-L5-VL2-L6-CH1-L7-VH3-L8-VH2-CH2-CH3, VL3-L4-CL-L5-VH2-L6-CH1-L7-VH3-L8-VL2-CH2-CH3, VL3-L4-CL-L5-VH3-L6-CH1-L7-VL2-L8-VH2-CH2-CH3, VL3-L4-CL-L5-VH3-L6-CH1-L7-VH2-L8-VL2-CH2-CH3, VL3-L4-CH1-L5-VL2-L6-CL-L7-VH3-L8-VH2-CH2-CH3, VL3-L4-CH1-L5-VH2-L6-CL-L7-VH3-L8-VL2-CH2-CH3, VL3-L4-CH1-L5-VH3-L6-CL-L7-VL2-L8-VH2-CH2-CH3, VL3-L4-CH1-L5-VH3-L6-CL-L7-VH2-L8-VL2-CH2-CH3, VH3-L4-CL-L5-VL2-L6-CH1-L7-VL3-L8-VH2-CH2-CH3, VH3-L4-CL-L5-VH2-L6-CH1-L7-VL3-L8-VL2-CH2-CH3, VH3-L4-CL-L5-VL3-L6-CH1-L7-VL2-L8-VH2-CH2-CH3, VH3-L4-CL-L5-VL3-L6-CH1-L7-VH2-L8-VL2-CH2-CH3, VH3-L4-CH1-L5-VL2-L6-CL-L7-VL3-L8-VH2-CH2-CH3, VH3-L4-CH1-L5-VH2-L6-CL-L7-VL3-L8-VL2-CH2-CH3, VH3-L4-CH1-L5-VL3-L6-CL-L7-VL2-L8-VH2-CH2-CH3, or VH3-L4-CH1-L5-VL3-L6-CL-L7-VH2-L8-VL2-CH2-CH3.

[5936] In some aspects, VL1 is a first immunoglobulin light chain variable region that specifically binds to (i) a tumor-associated antigen (TAA), (ii) an infectious disease antigen that is not a sarbecovirus antigen, or (iii) an other-pathology antigen; VL2 is a second immunoglobulin light chain variable region that specifically binds to (i) a tumor-associated antigen (TAA), (ii) an infectious disease antigen that is not a sarbecovirus antigen, or (iii) an other-pathology antigen; VL3 is a third immunoglobulin light chain variable region that specifically binds to (i) a tumor-associated antigen (TAA), (ii) an infectious disease antigen that is not a sarbecovirus antigen, or (iii) an other-pathology antigen; VH1 is a first immunoglobulin heavy chain variable region that specifically binds to (i) a tumor-associated antigen (TAA), (ii) an infectious disease antigen that is not a sarbecovirus antigen, or (iii) an other-pathology antigen; VH2 is a second immunoglobulin heavy chain variable region that specifically binds to (i) a tumor-associated antigen (TAA), (ii) an infectious disease antigen that is not a sarbecovirus antigen, or (iii) an other-pathology antigen; VH3 is a third immunoglobulin heavy chain variable region that specifically binds to (i) a tumor-associated antigen (TAA), (ii) an infectious disease antigen that is not a sarbecovirus antigen, or (iii) an other-pathology antigen; CH1 is an immunoglobulin heavy chain constant region 1; CL is an immunoglobulin light chain constant region; and L1-L8 are optional amino acid linkers. In any aspect shown herein as a structure from amino terminus to carboxy terminus, and with binding pairs selected from VL and/or VH or other structural regions such as CH1, CL, CH2, CH3, when shown without a specific linker such as L1, L2, etc., such linkers are optionally present in such structures between each designated subsequence VL, VH, etc.

[5937] In some aspects, the VL1 and the VL2 each comprise a CDR1, a CDR2, and a CDR3 that are the same. In some aspects, the VL1 and the VL2 each comprise a CDR1, a CDR2, and a CDR3 that are different. In some aspects, the VL1 and the VL3 each comprise a CDR1, a CDR2, and a CDR3 that are the same. In some aspects, the VL1 and the VL3 each comprise a CDR1, a CDR2, and a CDR3 that are different. In some aspects, the VL2 and the VL3 each comprise a CDR1, a CDR2, and a CDR3 that are the same. In some aspects, the VL2 and the VL3 each comprise a CDR1, a CDR2, and a CDR3 that are different.

[5938] In some aspects, the VL1 and the VL2 each comprise an amino acid sequence, wherein the amino acid sequence comprised in VL1 and the amino acid sequence comprised in VL2 are the same. In some aspects, the VL1 and the VL2 each comprise an amino acid sequence, wherein the amino acid sequence comprised in VL1 and the amino acid sequence comprised in VL2 are different. In some aspects, the VL1 and the VL3 each comprise an amino acid sequence, wherein the amino acid sequence comprised in VL1 and the amino acid sequence comprised in VL3 are the same. In some aspects, the VL1 and the VL3 each comprise an amino acid sequence, wherein the amino acid sequence comprised in VL1 and the amino acid sequence comprised in VL3 are different. In some aspects, the VL2 and the VL3 each comprise an amino acid sequence, wherein the amino acid sequence comprised in VL2 and the amino acid sequence comprised in VL3 are the same. In some aspects, the VL2 and the VL3 each comprise an amino acid sequence, wherein the amino acid sequence comprised in VL2 and the amino acid sequence comprised in VL3 are different.

[5939] In some aspects, the TAA is selected from the group consisting of 5′-nucleotidase, 5T4, A2AR, activin receptor-like kinase 1, adenocarcinoma antigen, ADRB3, AFP, AKAP-4, ALK, alpha-fetoprotein, androgenreceptor, angiopoietin 2, AOC3, APRIL, ATPDase, AXL, B7-4, B7DC, B7H1, B7H2, B7H3, B7H4, B7H5, B7H6, B7H7, B7RP1, BAFF, BAFFR, BCMA, bcr-abl, BlyS, BORIS, BST2, BTK, BTLA, C3, C5, C5a, C5a receptor, CA-125, CAIX, CanAg (a glycoform of MUC1), CCL11, CCL15, CCL17, CCL19, CCL2, CCL20, CCL21, CCL25, CCL3, CCL4, CCL5, CCL7, CCL8, CCR2, CCR3, CCR4, CCR5, CD11, CD11a, CD123, CD125, CD133, CD134, CD137, CD137L, CD147, CD15, CD154, CD160, CD16A, CD171, CD179a, CD18, CD184, CD19, CD2, CD20, CD200, CD22, CD221, CD23, CD24, CD242, CD25, CD27, CD272, CD276, CD278, CD279, CD28, CD3, CD30, CD300LF, CD319, CD33, CD37, CD38, CD39, CD38, CD4, CD40, CD40L, CD41, CD44v6, CD45, CD47, CD49B, CD5, CD51, CD52, CD54, CD56, CD6, CD62L, CD7, CD70, CD72, CD74, CD79a, CD79b, CD80, CD86, CD97, CEA, CEACAM5, claudin 18 isoform 2, CLDN6, CLEC12A, CLEC9, CLEC91, CLL-1, cMet, coagulation factor III, CRTH2, CS1, CSF-1, CSFIR, CSF-2, CSF-3, CTGF, CTLA4, CXCL1, CXCL12, CXCL13, CXCL2, CXCL4, CXCR3, CXORF61, CyclinB1, CYP1B1, dendritic cell-associated lectin 2, DLL3, DLL4, DNGR-1, DR5, E7, E-cadherin, EGFL7, EGFR, EGFRVIII, ELF2M, EMR2, endoglin, ENTPD1, EpCAM, EphA2, EPHA3, ephrin receptor A3, EphrinB2, episialin, ERBB2 (Her2/neu), ERBB3, ERG (TMPRSS2-ETS fusion gene), ETV6-AML, FAP, FCAR, FCER1, FCER1A, FCER2, FCRL5, FGF 23, FGFR, FGFR2, fibronectin extra domain-B, FLAP, FLT3, folate hydrolase, folate receptor 1, folate receptor alpha, folate receptor beta, FOLH1, Fos-relatedantigen1, Frizzled receptor, Fucosyl GM1, GD2, GD3, gelatinase B, Gi24, GITR, GITRL, GloboH, Glutamate carboxypeptidase II, glypican 3, GM3, GP100, GPC1, GPC2, GPC3, gplOO, GPNMB, GPR20, GPR5, GPRC5D, growth differentiation factor 8, GUCY2C, HAVCR1, HER1, HER2, HER3, HGF, HGFR, HHLA2, histone complex, HLA-DR, HMGB1, HMWMAA, HPVE6, hTERT, human telomerase reverse transcriptase, HVEM, ICAM-1, ICOS, ICOSL, IDO, IFNa, IgE, IGF-1, IGF1R, IGF-2, IGF-I receptor, IGLL1, IL1, IL10, IL12, IL13, IL13Ra2, IL-13Ra2, IL13Ra1, IL15, IL17, IL-17A, IL-17AF, IL-17F, IL17Rb, IL18, IL1B, IL1F10, IL-1a, IL-1B, IL2, IL-20, IL22, IL23, IL-23A, IL25, IL2Rbeta, IL-3 receptor, IL-31 receptor A, IL33, IL35, IL4, IL4Ra, IL5, ILSR, IL6, IL7, IL7Ra, IL8, IL9, IL9R, IL1A, IL-llRa, integrin α4, integrin α4 β7, integrin α5β1, integrin αIIbβ3, integrin αvβ3, integrin β7, interleukin 36 receptor IL1RAP, interleukin 36 receptor IL1RL2, intestinal carboxy lesterase, ITGB4, ITK, KIR, KIR2D, KIT, LAG3, LAGE-1a, LAIR1, LAMP1, LCK, legumain, leptin, LewisY, LILRA2, LIV-1, LMP2, LOXL2, LPFS2, LRRC15, LY6K, LY75, LYPD3, MAD-CT-1, MAD-CT-2, MAGEA1, MAGE-A1, MCAM, MCP-1, MelanA/MART1, mesothelin, MHC classII, MIF, ML-IAP, MS4A1, MST1R (RON), MUC1, MUC-1, MUC16, MUC-16, MUC5AC, muthsp70-2, MYCN, NA17, NCA-90 granulocyte antigen, NCAM, NCR3LG1, nectin-4, NGNA ganglioside, NKG2A, NKG2D, NKp46, Notch 1, Notch receptor, NRP1, NTPDase-1, NY-BR-1, NY-ESO-1, o-acetyl-GD2, OR51E2, OX40), OX40L, OY-TES1, p53, p53mutant, PANX3, PAP, PAX3, PAX5, PCDC1, PCDP1, PCTA-1/Galectin8, PD-1, PDGFRA, PDGFR-beta, PD-L1, PD-L2, phosphate-sodium co-transporter, phosphatidylserine, PLAC1, polysialic acid, PROM1, prostase, prostein, PRSS21, PSCA, PSMA, PTK7, RAGE-1, RANKL. Ras mutant, rhIL1O, RhoC, root plate-specific spondin 3, ROR1, ROR2, RTN4, RU1, RU2, S152, sarcoma translocation breakpoints, SART3, scatter factor receptor kinase, SDC1, SIRPalpha, SISP1, SLAMF7, SLC, sLe, SLITRK6, spermprotein17, SPG64, sphingosine-1-phosphate, SSEA-4, SSX2, ST2, STEAP1, STEAP2, surviving and telomerase, Syk kinase, T14, TACI, TAG72, TARP, T-cell receptor, TCRβ, TDO, TEM1/CD248, TEM7R, tenascin C, TGFBETA, TGF-β1, TGF-β2, TGS5, the extracellular portion of the APRIL protein, Tie2, TIGIT, TIM3, TLR, TLR2, TLR4, TLR5, TLR9, TMEF1, TnAg, TNF, TNFa, TNFR superfamily member 4, TNFRSF7, Tp55, TRAC, TRAIL-R1, TRAIL-R2, TRAP, TREM1, TROP2, TRP-2, TSHR, TSLP, TSLPR, tumor antigen CTAA16.88, TWEAK, tyrosinase, TYRPI glycoprotein 75, UPK2, VAP-1, VEGF, VEGFA, VEGFR-1, VEGFR2, vimentin, VISTA, Vstm3, WT1, WUCAM, and XAGE1.

[5940] In some aspects, the antigen binding polypeptide complexes provided herein comprise a VL1 comprising a light chain complementarity determining region 1 (LCDR1), LCDR2, and/or LCDR3 of an antibody selected from the group consisting of losatuxizumab vedotin, utomilumab, urelumab, oleclumab, naptumomab estafenatox, ascrinvacumab, pintumomab, tacatuzumab tetraxetan, nesvacumab, vanucizumab, timolumab, vapaliximab, vepalimomab, enapotamab vedotin, ianalumab, belimumab, tabalumab, tibulizumab, belantamab mafodotin, teclistamab, teclistamab, detumomab, nacolomab tafenatox, eculizumab, lendalizumab, pexelizumab, pozelimab, ravulizumab, tesidolumab, vilobelimab, abagovomab, igovomab, oregovomab, sofituzumab vedotin, cantuzumab mertansine, cantuzuma bravtansine, girentuximab, altumomab pentetate, arcitumomab, besilesomab, bertilimumab, plozalizumab, mogamulizumab, leronlimab, PRO140, rovelizumab, rovelizumab, talacotuzumab, benralizumab, tavolimab, vonlerolizumab, gavilimomab, ziralimumab, fanolesomab, ipilimumab, ruplizumab, toralizumab, dapirolizumab pegol, toralizumab, dapirolizumab pegol, ruplizumab, blinatumomab, inebilizumab, loncastuximab tesirine, SGN-CD19A, tafasitamab, taplitumomab paptox, XMAB-5574, Budoprutug, Obexelimab, duvortuxizumab, englumafusp alfa, Emfizatamab, zeripatamig, siplizumab, blontuvetmab, FBTA05, ibritumomab tiuxetan, obinutuzumab, ocaratuzumab, ocrelizumab, ofatumumab, rituximab, tositumomab, ublituximab, veltuzumab, divozilimab, eramkafusp alfa, ripertamab, zuberitamab, glofitamab, nofetumomab merpentan, samalizumab, imvotamab, odronextamab, plamotamab, bectumomab, inotuzumab ozogamicin, moxetumomab pasudotox, pinatuzumab vedotin, gomiliximab, lumiliximab, inolimomab, inolimomab, daclizumab, camidanluma btesirine, basiliximab, varlilumab, omburtamab, enoblituzumab, vopratelimab, lulizumabpegol, TGN1412, muromonab-CD3, otelixizumab, teplizumab, visilizumab, epcoritamab, epcoritamab, brentuximab vedotin, iratumumab, azintuxizumab vedotin, gemtuzumab ozogamicin, lintuzumab, vadastuximab talirine, naratuximab emtansine, otlertuzumab, lilotomab satetraxetan, tetulomab, daratumumab, isatuximab, foralumab, mosunetuzumab, mosunetuzumab, cedelizumab, ibalizumab, keliximab, priliximab, tregalizumab, zanolimumab, bleselumab, iscalimab, lucatumumab, ravagalimab, selicrelumab, teneliximab, vanalimab, abciximab, bivatuzumab, iomab-B, telimomab aritox, zolimomab aritox, abituzumab, intetumumab, alemtuzumab, tamtuvetmab, lorvotuzumab mertansine, itolizumab, cusatuzumab, vorsetuzumab mafodotin, milatuzumab, iladatuzumab vedotin, polatuzumab vedotin, galiximab, cibisatamab, zolbetuximab, naxitamab, tisotumab vedotin, olendalizumab, pamrevlumab, lacnotuzumab, cabiralizumab, emactuzumab, axatilimab, gimsilumab, lenzilumab, namilumab, tremelimumab, ulocuplumab, tepoditamab, rovalpituzumab tesirine, tarlatamab, demcizumab, navicixizumab, drozitumab, parsatuzumab, depatuxizumab mafodotin modotuximab, carotuximab, adecatumumab, adecatumumab, oportuzumab monatox, solitomab, tucotuzumab celmoleukin, edrecolomab, catumaxomab, ifabotuzumab, fibatuzumab, zalutumumab, panitumumab, cetuximab, futuximab, imgatuzumab, laprituximab emtansine, matuzumab, necitumumab, nimotuzumab, tomuzotuximab, amivantamab, amivantamab, epitumomab cituxetan, sontuzumab, duligotuzumab, elgemtumab, lumretuzumab, patritumab, seribantumab, zenocutuzumab, sibrotuzumab, burosumab, aprutumab ixadotin, radretumab, pasotuxizumab, farletuzumab, mirvetuximab soravtansine, vantictumab, TRBS07, 3F8, dinutuximab, dinutuximab beta, ecromeximab, mitumomab, andecaliximab, capromab, codrituzumab, glembatumumab vedotin, talquetamab, talquetamab, trevogrumab, indusatumab vedotin, ficlatuzumab, rilotumumab, zatuximab, pentuzimab, pentuzimab, margetuximab, timigutuzumab, trastuzumab, trastuzumab duocarmazine, trastuzumab emtansine, gancotamab, pertuzumab, ertumaxomab, emibetuzumab, telisotuzumab, telisotuzumab vedotin, derlotuximab biotin, apolizumab, onartuzumab, bersanlimab, enlimomabpegol, rontalizumab, sifalimumab, talizumab, ganitumab, istiratumab, robatumumab, teprotumumab, figitumumab, ganitumab, istiratumab, robatumumab, teprotumumab, cixutumumab, dalotuzumab, xentuzumab, dusigitumab, canakinumab, ustekinumab, ustekinumab, ustekinumab, briakinumab, briakinumab, abrezekimab, lebrikizumab, romilkimab, TNX-650, tralokinumab, anrukinzumab, brodalumab, ixekizumab, netakimab, perakizumab, secukinumab, vunakizumab, afasevikumab, afasevikumab, bimekizumab, bimekizumab, remtolumab, bermekimab, lutikizumab, lutikizumab, gevokizumab, cergutuzumab amunaleukin, fletikumab, fezakinumab, brazikumab, guselkumab, mirikizumab, tildrakizumab, risankizumab, flotetuzumab, nemolizumab, pascolizumab, dupilumab, mepolizumab, reslizumab, clazakizumab, elsilimomab, olokizumab, sarilumab, siltuximab, sirukumab, vobarilizumab, tocilizumab, SA237, satralizumab, enokizumab, prezalizumab, natalizumab, abrilumab, abrilumab, vedolizumab, volociximab, tadocizumab, etaracizumab, etrolizumab, spesolimab, vatelizumab, erlizumab, lirilumab, relatlimab, cBR96-doxorubicinimmunoconjugate, odulimomab, efalizumab, ladiratuzumab vedotin, simtuzumab, samrotamab vedotin, aselizumab, lupartumab amadotin, imalumab, carlumab, imaprelimab, amatuximab, amatuximab, anetumab ravtansine, narnatumab, clivatuzumab tetraxetan, pemtumomab, gatipotuzumab, ensituximab, lemalesomab, sulesomab, enfortumab vedotin, racotumomab, monalizumab, brontictuzumab, tarextumab, vesencumab, oxelumab, gilvetmab, tislelizumab, dostarlimab, BCD-100, nivolumab, PDR001, pembrolizumab, pidilizumab, retifanlimab, spartalizumab, sintilimab, cemiplimab, olaratumab, tovetumab, rinucumab, atezolizumab, avelumab, durvalumab, lifastuzumab vedotin, bavituximab, acapatamab, capromab, rosopatamab, nezastomig, pasotuxizumab, pelgifatamab, voxalatamab, cofetuzumab pelidotin, denosumab, rosmantuzumab, cirmtuzumab, atinumab, indatuximab ravtansine, elotuzumab, sirtratumab vedotin, sonepcizumab, vandortuzumab vedotin, minretumomab, satumomab pendetide, maslimomab, ontuxizumab, tenatumomab, fresolimumab, metelimumab, lerdelimumab, tezepelumab, etigilimab, tiragotumab, placulumab, prezalumab, infliximab, nerelimomab, ozoralizumab, adalimumab, afelimomab, certolizumab pegol, golimumab, mapatumumab, conatumumab, lexatumumab, tigatuzumab, sacituzumab govitecan, votumumab, pogalizumab, letolizumab, pankomab, anatumomab mafenatox, enavatuzumab, flanvotumab, brolucizumab, ranibizumab, varisacumab, bevacizumab, faricimab, icrucumab, alacizumab pegol, ramucirumab, pritumumab, and onvatilimab.

[5941] In some aspects, the antigen binding polypeptide complexes provided herein comprise a VL2 comprising a light chain complementarity determining region 1 (LCDR1), LCDR2, and/or LCDR3 of an antibody selected from the group consisting of losatuxizumab vedotin, utomilumab, urelumab, oleclumab, naptumomab estafenatox, ascrinvacumab, pintumomab, tacatuzumab tetraxetan, nesvacumab, vanucizumab, timolumab, vapaliximab, vepalimomab, enapotamab vedotin, ianalumab, belimumab, tabalumab, tibulizumab, belantamab mafodotin, teclistamab, teclistamab, detumomab, nacolomab tafenatox, eculizumab, lendalizumab, pexelizumab, pozelimab, ravulizumab, tesidolumab, vilobelimab, abagovomab, igovomab, oregovomab, sofituzumab vedotin, cantuzumab mertansine, cantuzuma bravtansine, girentuximab, altumomab pentetate, arcitumomab, besilesomab, bertilimumab, plozalizumab, mogamulizumab, leronlimab, PRO140, rovelizumab, rovelizumab, talacotuzumab, benralizumab, tavolimab, vonlerolizumab, gavilimomab, ziralimumab, fanolesomab, ipilimumab, ruplizumab, toralizumab, dapirolizumab pegol, toralizumab, dapirolizumab pegol, ruplizumab, blinatumomab, inebilizumab, loncastuximab tesirine, SGN-CD19A, tafasitamab, taplitumomab paptox, XMAB-5574, Budoprutug, Obexelimab, duvortuxizumab, englumafusp alfa, Emfizatamab, zeripatamig, siplizumab, blontuvetmab, FBTA05, ibritumomab tiuxetan, obinutuzumab, ocaratuzumab, ocrelizumab, ofatumumab, rituximab, tositumomab, ublituximab, veltuzumab, divozilimab, eramkafusp alfa, ripertamab, zuberitamab, glofitamab, nofetumomab merpentan, samalizumab, imvotamab, odronextamab, plamotamab, bectumomab, inotuzumab ozogamicin, moxetumomab pasudotox, pinatuzumab vedotin, gomiliximab, lumiliximab, inolimomab, inolimomab, daclizumab, camidanluma btesirine, basiliximab, varlilumab, omburtamab, enoblituzumab, vopratelimab, lulizumabpegol, TGN1412, muromonab-CD3, otelixizumab, teplizumab, visilizumab, epcoritamab, epcoritamab, brentuximab vedotin, iratumumab, azintuxizumab vedotin, gemtuzumab ozogamicin, lintuzumab, vadastuximab talirine, naratuximab emtansine, otlertuzumab, lilotomab satetraxetan, tetulomab, daratumumab, isatuximab, foralumab, mosunetuzumab, mosunetuzumab, cedelizumab, ibalizumab, keliximab, priliximab, tregalizumab, zanolimumab, bleselumab, iscalimab, lucatumumab, ravagalimab, selicrelumab, teneliximab, vanalimab, abciximab, bivatuzumab, iomab-B, telimomab aritox, zolimomab aritox, abituzumab, intetumumab, alemtuzumab, tamtuvetmab, lorvotuzumab mertansine, itolizumab, cusatuzumab, vorsetuzumab mafodotin, milatuzumab, iladatuzumab vedotin, polatuzumab vedotin, galiximab, cibisatamab, zolbetuximab, naxitamab, tisotumab vedotin, olendalizumab, pamrevlumab, lacnotuzumab, cabiralizumab, emactuzumab, axatilimab, gimsilumab, lenzilumab, namilumab, tremelimumab, ulocuplumab, tepoditamab, rovalpituzumab tesirine, tarlatamab, demcizumab, navicixizumab, drozitumab, parsatuzumab, depatuxizumab mafodotin, modotuximab, carotuximab, adecatumumab, adecatumumab, oportuzumab monatox, solitomab, tucotuzumab celmoleukin, edrecolomab, catumaxomab, ifabotuzumab, fibatuzumab, zalutumumab, panitumumab, cetuximab, futuximab, imgatuzumab, laprituximab emtansine, matuzumab, necitumumab, nimotuzumab, tomuzotuximab, amivantamab, amivantamab, epitumomab cituxetan, sontuzumab, duligotuzumab, elgemtumab, lumretuzumab, patritumab, seribantumab, zenocutuzumab, sibrotuzumab, burosumab, aprutumab ixadotin, radretumab, pasotuxizumab, farletuzumab, mirvetuximab soravtansine, vantictumab, TRBS07, 3F8, dinutuximab, dinutuximab beta, ecromeximab, mitumomab, andecaliximab, capromab, codrituzumab, glembatumumab vedotin, talquetamab, talquetamab, trevogrumab, indusatumab vedotin, ficlatuzumab, rilotumumab, zatuximab, pentuzimab, pentuzimab, margetuximab, timigutuzumab, trastuzumab, trastuzumab duocarmazine, trastuzumab emtansine, gancotamab, pertuzumab, ertumaxomab, emibetuzumab, telisotuzumab, telisotuzumab vedotin, derlotuximab biotin, apolizumab, onartuzumab, bersanlimab, enlimomabpegol, rontalizumab, sifalimumab, talizumab, ganitumab, istiratumab, robatumumab, teprotumumab, figitumumab, ganitumab, istiratumab, robatumumab, teprotumumab, cixutumumab, dalotuzumab, xentuzumab, dusigitumab, canakinumab, ustekinumab, ustekinumab, ustekinumab, briakinumab, briakinumab, abrezekimab, lebrikizumab, romilkimab, TNX-650, tralokinumab, anrukinzumab, brodalumab, ixekizumab, netakimab, perakizumab, secukinumab, vunakizumab, afasevikumab, afasevikumab, bimekizumab, bimekizumab, remtolumab, bermekimab, lutikizumab, lutikizumab, gevokizumab, cergutuzumab amunaleukin, fletikumab, fezakinumab, brazikumab, guselkumab, mirikizumab, tildrakizumab, risankizumab, flotetuzumab, nemolizumab, pascolizumab, dupilumab, mepolizumab, reslizumab, clazakizumab, elsilimomab, olokizumab, sarilumab, siltuximab, sirukumab, vobarilizumab, tocilizumab, SA237, satralizumab, enokizumab, prezalizumab, natalizumab, abrilumab, abrilumab, vedolizumab, volociximab, tadocizumab, etaracizumab, etrolizumab, spesolimab, vatelizumab, erlizumab, lirilumab, relatlimab, cBR96-doxorubicinimmunoconjugate, odulimomab, efalizumab, ladiratuzumab vedotin, simtuzumab, samrotamab vedotin, aselizumab, lupartumab amadotin, imalumab, carlumab, imaprelimab, amatuximab, amatuximab, anetumab ravtansine, narnatumab, clivatuzumab tetraxetan, pemtumomab, gatipotuzumab, ensituximab, lemalesomab, sulesomab, enfortumab vedotin, racotumomab, monalizumab, brontictuzumab, tarextumab, vesencumab, oxelumab, gilvetmab, tislelizumab, dostarlimab, BCD-100, nivolumab, PDR001, pembrolizumab, pidilizumab, retifanlimab, spartalizumab, sintilimab, cemiplimab, olaratumab, tovetumab, rinucumab, atezolizumab, avelumab, durvalumab, lifastuzumab vedotin, bavituximab, acapatamab, capromab, rosopatamab, nezastomig, pasotuxizumab, pelgifatamab, voxalatamab, cofetuzumab pelidotin, denosumab, rosmantuzumab, cirmtuzumab, atinumab, indatuximab ravtansine, elotuzumab, sirtratumab vedotin, sonepcizumab, vandortuzumab vedotin, minretumomab, satumomab pendetide, maslimomab, ontuxizumab, tenatumomab, fresolimumab, metelimumab, lerdelimumab, tezepelumab, etigilimab, tiragotumab, placulumab, prezalumab, infliximab, nerelimomab, ozoralizumab, adalimumab, afelimomab, certolizumab pegol, golimumab, mapatumumab, conatumumab, lexatumumab, tigatuzumab, sacituzumab govitecan, votumumab, pogalizumab, letolizumab, pankomab, anatumomab mafenatox, enavatuzumab, flanvotumab, brolucizumab, ranibizumab, varisacumab, bevacizumab, faricimab, icrucumab, alacizumab pegol, ramucirumab, pritumumab, and onvatilimab.

[5942] In some aspects, the antigen binding polypeptide complexes provided herein comprise a VL3 comprising a light chain complementarity determining region 1 (LCDR1), LCDR2, and/or LCDR3 of an antibody selected from the group consisting of losatuxizumab vedotin, utomilumab, urelumab, oleclumab, naptumomab estafenatox, ascrinvacumab, pintumomab, tacatuzumab tetraxetan, nesvacumab, vanucizumab, timolumab, vapaliximab, vepalimomab, enapotamab vedotin, ianalumab, belimumab, tabalumab, tibulizumab, belantamab mafodotin, teclistamab, teclistamab, detumomab, nacolomab tafenatox, eculizumab, lendalizumab, pexelizumab, pozelimab, ravulizumab, tesidolumab, vilobelimab, abagovomab, igovomab, oregovomab, sofituzumab vedotin, cantuzumab mertansine, cantuzuma bravtansine, girentuximab, altumomab pentetate, arcitumomab, besilesomab, bertilimumab, plozalizumab, mogamulizumab, leronlimab, PRO140, rovelizumab, rovelizumab, talacotuzumab, benralizumab, tavolimab, vonlerolizumab, gavilimomab, ziralimumab, fanolesomab, ipilimumab, ruplizumab, toralizumab, dapirolizumab pegol, toralizumab, dapirolizumab pegol, ruplizumab, blinatumomab, inebilizumab, loncastuximab tesirine, SGN-CD19A, tafasitamab, taplitumomab paptox, XMAB-5574, Budoprutug, Obexelimab, duvortuxizumab, englumafusp alfa, Emfizatamab, zeripatamig, siplizumab, blontuvetmab, FBTA05, ibritumomab tiuxetan, obinutuzumab, ocaratuzumab, ocrelizumab, ofatumumab, rituximab, tositumomab, ublituximab, veltuzumab, divozilimab, eramkafusp alfa, ripertamab, zuberitamab, glofitamab, nofetumomab merpentan, samalizumab, imvotamab, odronextamab, plamotamab, bectumomab, inotuzumab ozogamicin, moxetumomab pasudotox, pinatuzumab vedotin, gomiliximab, lumiliximab, inolimomab, inolimomab, daclizumab, camidanluma btesirine, basiliximab, varlilumab, omburtamab, enoblituzumab, vopratelimab, lulizumabpegol, TGN1412, muromonab-CD3, otelixizumab, teplizumab, visilizumab, epcoritamab, epcoritamab, brentuximab vedotin, iratumumab, azintuxizumab vedotin, gemtuzumab ozogamicin, lintuzumab, vadastuximab talirine, naratuximab emtansine, otlertuzumab, lilotomab satetraxetan, tetulomab, daratumumab, isatuximab, foralumab, mosunetuzumab, mosunetuzumab, cedelizumab, ibalizumab, keliximab, priliximab, tregalizumab, zanolimumab, bleselumab, iscalimab, lucatumumab, ravagalimab, selicrelumab, teneliximab, vanalimab, abciximab, bivatuzumab, iomab-B, telimomab aritox, zolimomab aritox, abituzumab, intetumumab, alemtuzumab, tamtuvetmab, lorvotuzumab mertansine, itolizumab, cusatuzumab, vorsetuzumab mafodotin, milatuzumab, iladatuzumab vedotin, polatuzumab vedotin, galiximab, cibisatamab, zolbetuximab, naxitamab, tisotumab vedotin, olendalizumab, pamrevlumab, lacnotuzumab, cabiralizumab, emactuzumab, axatilimab, gimsilumab, lenzilumab, namilumab, tremelimumab, ulocuplumab, tepoditamab, rovalpituzumab tesirine, tarlatamab, demcizumab, navicixizumab, drozitumab, parsatuzumab, depatuxizumab mafodotin, modotuximab, carotuximab, adecatumumab, adecatumumab, oportuzumab monatox, solitomab, tucotuzumab celmoleukin, edrecolomab, catumaxomab, ifabotuzumab, fibatuzumab, zalutumumab, panitumumab, cetuximab, futuximab, imgatuzumab, laprituximab emtansine, matuzumab, necitumumab, nimotuzumab, tomuzotuximab, amivantamab, amivantamab, epitumomab cituxetan, sontuzumab, duligotuzumab, elgemtumab, lumretuzumab, patritumab, seribantumab, zenocutuzumab, sibrotuzumab, burosumab, aprutumab ixadotin, radretumab, pasotuxizumab, farletuzumab, mirvetuximab soravtansine, vantictumab, TRBS07, 3F8, dinutuximab, dinutuximab beta, ecromeximab, mitumomab, andecaliximab, capromab, codrituzumab, glembatumumab vedotin, talquetamab, talquetamab, trevogrumab, indusatumab vedotin, ficlatuzumab, rilotumumab, zatuximab, pentuzimab, pentuzimab, margetuximab, timigutuzumab, trastuzumab, trastuzumab duocarmazine, trastuzumab emtansine, gancotamab, pertuzumab, ertumaxomab, emibetuzumab, telisotuzumab, telisotuzumab vedotin, derlotuximab biotin, apolizumab, onartuzumab, bersanlimab, enlimomabpegol, rontalizumab, sifalimumab, talizumab, ganitumab, istiratumab, robatumumab, teprotumumab, figitumumab, ganitumab, istiratumab, robatumumab, teprotumumab, cixutumumab, dalotuzumab, xentuzumab, dusigitumab, canakinumab, ustekinumab, ustekinumab, ustekinumab, briakinumab, briakinumab, abrezekimab, lebrikizumab, romilkimab, TNX-650, tralokinumab, anrukinzumab, brodalumab, ixekizumab, netakimab, perakizumab, secukinumab, vunakizumab, afasevikumab, afasevikumab, bimekizumab, bimekizumab, remtolumab, bermekimab, lutikizumab, lutikizumab, gevokizumab, cergutuzumab amunaleukin, fletikumab, fezakinumab, brazikumab, guselkumab, mirikizumab, tildrakizumab, risankizumab, flotetuzumab, nemolizumab, pascolizumab, dupilumab, mepolizumab, reslizumab, clazakizumab, elsilimomab, olokizumab, sarilumab, siltuximab, sirukumab, vobarilizumab, tocilizumab, SA237, satralizumab, enokizumab, prezalizumab, natalizumab, abrilumab, abrilumab, vedolizumab, volociximab, tadocizumab, etaracizumab, etrolizumab, spesolimab, vatelizumab, erlizumab, lirilumab, relatlimab, cBR96-doxorubicinimmunoconjugate, odulimomab, efalizumab, ladiratuzumab vedotin, simtuzumab, samrotamab vedotin, aselizumab, lupartumab amadotin, imalumab, carlumab, imaprelimab, amatuximab, amatuximab, anetumab ravtansine, narnatumab, clivatuzumab tetraxetan, pemtumomab, gatipotuzumab, ensituximab, lemalesomab, sulesomab, enfortumab vedotin, racotumomab, monalizumab, brontictuzumab, tarextumab, vesencumab, oxelumab, gilvetmab, tislelizumab, dostarlimab, BCD-100, nivolumab, PDR001, pembrolizumab, pidilizumab, retifanlimab, spartalizumab, sintilimab, cemiplimab, olaratumab, tovetumab, rinucumab, atezolizumab, avelumab, durvalumab, lifastuzumab vedotin, bavituximab, acapatamab, capromab, rosopatamab, nezastomig, pasotuxizumab, pelgifatamab, voxalatamab, cofetuzumab pelidotin, denosumab, rosmantuzumab, cirmtuzumab, atinumab, indatuximab ravtansine, elotuzumab, sirtratumab vedotin, sonepcizumab, vandortuzumab vedotin, minretumomab, satumomab pendetide, maslimomab, ontuxizumab, tenatumomab, fresolimumab, metelimumab, lerdelimumab, tezepelumab, etigilimab, tiragotumab, placulumab, prezalumab, infliximab, nerelimomab, ozoralizumab, adalimumab, afelimomab, certolizumab pegol, golimumab, mapatumumab, conatumumab, lexatumumab, tigatuzumab, sacituzumab govitecan, votumumab, pogalizumab, letolizumab, pankomab, anatumomab mafenatox, enavatuzumab, flanvotumab, brolucizumab, ranibizumab, varisacumab, bevacizumab, faricimab, icrucumab, alacizumab pegol, ramucirumab, pritumumab, and onvatilimab.

[5943] In some aspects, the antigen binding polypeptide complexes provided herein comprise a VH1 comprising a heavy chain complementarity determining region 1 (HCDR1), HCDR2, and/or HCDR3 of an antibody selected from the group consisting of losatuxizumab vedotin, utomilumab, urelumab, oleclumab, naptumomab estafenatox, ascrinvacumab, pintumomab, tacatuzumab tetraxetan, nesvacumab, vanucizumab, timolumab, vapaliximab, vepalimomab, enapotamab vedotin, ianalumab, belimumab, tabalumab, tibulizumab, belantamab mafodotin, teclistamab, teclistamab, detumomab, nacolomab tafenatox, eculizumab, lendalizumab, pexelizumab, pozelimab, ravulizumab, tesidolumab, vilobelimab, abagovomab, igovomab, oregovomab, sofituzumab vedotin, cantuzumab mertansine, cantuzuma bravtansine, girentuximab, altumomab pentetate, arcitumomab, besilesomab, bertilimumab, plozalizumab, mogamulizumab, leronlimab, PRO140, rovelizumab, rovelizumab, talacotuzumab, benralizumab, tavolimab, vonlerolizumab, gavilimomab, ziralimumab, fanolesomab, ipilimumab, ruplizumab, toralizumab, dapirolizumab pegol, toralizumab, dapirolizumab pegol, ruplizumab, blinatumomab, inebilizumab, loncastuximab tesirine, SGN-CD19A, tafasitamab, taplitumomab paptox, XMAB-5574, Budoprutug, Obexelimab, duvortuxizumab, englumafusp alfa, Emfizatamab, zeripatamig, siplizumab, blontuvetmab, FBTA05, ibritumomab tiuxetan, obinutuzumab, ocaratuzumab, ocrelizumab, ofatumumab, rituximab, tositumomab, ublituximab, veltuzumab, divozilimab, eramkafusp alfa, ripertamab, zuberitamab, glofitamab, nofetumomab merpentan, samalizumab, imvotamab, odronextamab, plamotamab, bectumomab, inotuzumab ozogamicin, moxetumomab pasudotox, pinatuzumab vedotin, gomiliximab, lumiliximab, inolimomab, inolimomab, daclizumab, camidanluma btesirine, basiliximab, varlilumab, omburtamab, enoblituzumab, vopratelimab, lulizumabpegol, TGN1412, muromonab-CD3, otelixizumab, teplizumab, visilizumab, epcoritamab, epcoritamab, brentuximab vedotin, iratumumab, azintuxizumab vedotin, gemtuzumab ozogamicin, lintuzumab, vadastuximab talirine, naratuximab emtansine, otlertuzumab, lilotomab satetraxetan, tetulomab, daratumumab, isatuximab, foralumab, mosunetuzumab, mosunetuzumab, cedelizumab, ibalizumab, keliximab, priliximab, tregalizumab, zanolimumab, bleselumab, iscalimab, lucatumumab, ravagalimab, selicrelumab, teneliximab, vanalimab, abciximab, bivatuzumab, iomab-B, telimomab aritox, zolimomab aritox, abituzumab, intetumumab, alemtuzumab, tamtuvetmab, lorvotuzumab mertansine, itolizumab, cusatuzumab, vorsetuzumab mafodotin, milatuzumab, iladatuzumab vedotin, polatuzumab vedotin, galiximab, cibisatamab, zolbetuximab, naxitamab, tisotumab vedotin, olendalizumab, pamrevlumab, lacnotuzumab, cabiralizumab, emactuzumab, axatilimab, gimsilumab, lenzilumab, namilumab, tremelimumab, ulocuplumab, tepoditamab, rovalpituzumab tesirine, tarlatamab, demcizumab, navicixizumab, drozitumab, parsatuzumab, depatuxizumab mafodotin, modotuximab, carotuximab, adecatumumab, adecatumumab, oportuzumab monatox, solitomab, tucotuzumab celmoleukin, edrecolomab, catumaxomab, ifabotuzumab, fibatuzumab, zalutumumab, panitumumab, cetuximab, futuximab, imgatuzumab, laprituximab emtansine, matuzumab, necitumumab, nimotuzumab, tomuzotuximab, amivantamab, amivantamab, epitumomab cituxetan, sontuzumab, duligotuzumab, elgemtumab, lumretuzumab, patritumab, seribantumab, zenocutuzumab, sibrotuzumab, burosumab, aprutumab ixadotin, radretumab, pasotuxizumab, farletuzumab, mirvetuximab soravtansine, vantictumab, TRBS07, 3F8, dinutuximab, dinutuximab beta, ecromeximab, mitumomab, andecaliximab, capromab, codrituzumab, glembatumumab vedotin, talquetamab, talquetamab, trevogrumab, indusatumab vedotin, ficlatuzumab, rilotumumab, zatuximab, pentuzimab, pentuzimab, margetuximab, timigutuzumab, trastuzumab, trastuzumab duocarmazine, trastuzumab emtansine, gancotamab, pertuzumab, crtumaxomab, emibetuzumab, telisotuzumab, telisotuzumab vedotin, derlotuximab biotin, apolizumab, onartuzumab, bersanlimab, enlimomabpegol, rontalizumab, sifalimumab, talizumab, ganitumab, istiratumab, robatumumab, teprotumumab, figitumumab, ganitumab, istiratumab, robatumumab, teprotumumab, cixutumumab, dalotuzumab, xentuzumab, dusigitumab, canakinumab, ustekinumab, ustekinumab, ustekinumab, briakinumab, briakinumab, abrezekimab, lebrikizumab, romilkimab, TNX-650, tralokinumab, anrukinzumab, brodalumab, ixekizumab, netakimab, perakizumab, secukinumab, vunakizumab, afasevikumab, afasevikumab, bimekizumab, bimekizumab, remtolumab, bermekimab, lutikizumab, lutikizumab, gevokizumab, cergutuzumab amunaleukin, fletikumab, fezakinumab, brazikumab, guselkumab, mirikizumab, tildrakizumab, risankizumab, flotetuzumab, nemolizumab, pascolizumab, dupilumab, mepolizumab, reslizumab, clazakizumab, elsilimomab, olokizumab, sarilumab, siltuximab, sirukumab, vobarilizumab, tocilizumab, SA237, satralizumab, enokizumab, prezalizumab, natalizumab, abrilumab, abrilumab, vedolizumab, volociximab, tadocizumab, etaracizumab, etrolizumab, spesolimab, vatelizumab, erlizumab, lirilumab, relatlimab, cBR96-doxorubicinimmunoconjugate, odulimomab, efalizumab, ladiratuzumab vedotin, simtuzumab, samrotamab vedotin, aselizumab, lupartumab amadotin, imalumab, carlumab, imaprelimab, amatuximab, amatuximab, anetumab ravtansine, narnatumab, clivatuzumab tetraxetan, pemtumomab, gatipotuzumab, ensituximab, lemalesomab, sulesomab, enfortumab vedotin, racotumomab, monalizumab, brontictuzumab, tarextumab, vesencumab, oxelumab, gilvetmab, tislelizumab, dostarlimab, BCD-100, nivolumab, PDR001, pembrolizumab, pidilizumab, retifanlimab, spartalizumab, sintilimab, cemiplimab, olaratumab, tovetumab, rinucumab, atezolizumab, avelumab, durvalumab, lifastuzumab vedotin, bavituximab, acapatamab, capromab, rosopatamab, nezastomig, pasotuxizumab, pelgifatamab, voxalatamab, cofetuzumab pelidotin, denosumab, rosmantuzumab, cirmtuzumab, atinumab, indatuximab ravtansine, elotuzumab, sirtratumab vedotin, sonepcizumab, vandortuzumab vedotin, minretumomab, satumomab pendetide, maslimomab, ontuxizumab, tenatumomab, fresolimumab, metelimumab, lerdelimumab, tezepelumab, etigilimab, tiragotumab, placulumab, prezalumab, infliximab, nerelimomab, ozoralizumab, adalimumab, afelimomab, certolizumab pegol, golimumab, mapatumumab, conatumumab, lexatumumab, tigatuzumab, sacituzumab govitecan, votumumab, pogalizumab, letolizumab, pankomab, anatumomab mafenatox, enavatuzumab, flanvotumab, brolucizumab, ranibizumab, varisacumab, bevacizumab, faricimab, icrucumab, alacizumab pegol, ramucirumab, pritumumab, and onvatilimab.

[5944] In some aspects, the antigen binding polypeptide complexes provided herein comprise a VH2 comprising a heavy chain complementarity determining region 1 (HCDR1), HCDR2, and/or HCDR3 of an antibody selected from the group consisting of losatuxizumab vedotin, utomilumab, urelumab, oleclumab, naptumomab estafenatox, ascrinvacumab, pintumomab, tacatuzumab tetraxetan, nesvacumab, vanucizumab, timolumab, vapaliximab, vepalimomab, enapotamab vedotin, ianalumab, belimumab, tabalumab, tibulizumab, belantamab mafodotin, teclistamab, teclistamab, detumomab, nacolomab tafenatox, eculizumab, lendalizumab, pexelizumab, pozelimab, ravulizumab, tesidolumab, vilobelimab, abagovomab, igovomab, oregovomab, sofituzumab vedotin, cantuzumab mertansine, cantuzuma bravtansine, girentuximab, altumomab pentetate, arcitumomab, besilesomab, bertilimumab, plozalizumab, mogamulizumab, leronlimab, PRO140, rovelizumab, rovelizumab, talacotuzumab, benralizumab, tavolimab, vonlerolizumab, gavilimomab, ziralimumab, fanolesomab, ipilimumab, ruplizumab, toralizumab, dapirolizumab pegol, toralizumab, dapirolizumab pegol, ruplizumab, blinatumomab, inebilizumab, loncastuximab tesirine, SGN-CD19A, tafasitamab, taplitumomab paptox, XMAB-5574, Budoprutug, Obexelimab, duvortuxizumab, englumafusp alfa, Emfizatamab, zeripatamig, siplizumab, blontuvetmab, FBTA05, ibritumomab tiuxetan, obinutuzumab, ocaratuzumab, ocrelizumab, ofatumumab, rituximab, tositumomab, ublituximab, veltuzumab, divozilimab, eramkafusp alfa, ripertamab, zuberitamab, glofitamab, nofetumomab merpentan, samalizumab, imvotamab, odronextamab, plamotamab, bectumomab, inotuzumab ozogamicin, moxetumomab pasudotox, pinatuzumab vedotin, gomiliximab, lumiliximab, inolimomab, inolimomab, daclizumab, camidanluma btesirine, basiliximab, varlilumab, omburtamab, enoblituzumab, vopratelimab, lulizumabpegol, TGN1412, muromonab-CD3, otelixizumab, teplizumab, visilizumab, epcoritamab, epcoritamab, brentuximab vedotin, iratumumab, azintuxizumab vedotin, gemtuzumab ozogamicin, lintuzumab, vadastuximab talirine, naratuximab emtansine, otlertuzumab, lilotomab satetraxetan, tetulomab, daratumumab, isatuximab, foralumab, mosunetuzumab, mosunetuzumab, cedelizumab, ibalizumab, keliximab, priliximab, tregalizumab, zanolimumab, bleselumab, iscalimab, lucatumumab, ravagalimab, selicrelumab, teneliximab, vanalimab, abciximab, bivatuzumab, iomab-B, telimomab aritox, zolimomab aritox, abituzumab, intetumumab, alemtuzumab, tamtuvetmab, lorvotuzumab mertansine, itolizumab, cusatuzumab, vorsetuzumab mafodotin, milatuzumab, iladatuzumab vedotin, polatuzumab vedotin, galiximab, cibisatamab, zolbetuximab, naxitamab, tisotumab vedotin, olendalizumab, pamrevlumab, lacnotuzumab, cabiralizumab, emactuzumab, axatilimab, gimsilumab, lenzilumab, namilumab, tremelimumab, ulocuplumab, tepoditamab, rovalpituzumab tesirine, tarlatamab, demcizumab, navicixizumab, drozitumab, parsatuzumab, depatuxizumab mafodotin, modotuximab, carotuximab, adecatumumab, adecatumumab, oportuzumab monatox, solitomab, tucotuzumab celmoleukin, edrecolomab, catumaxomab, ifabotuzumab, fibatuzumab, zalutumumab, panitumumab, cetuximab, futuximab, imgatuzumab, laprituximab emtansine, matuzumab, necitumumab, nimotuzumab, tomuzotuximab, amivantamab, amivantamab, epitumomab cituxetan, sontuzumab, duligotuzumab, elgemtumab, lumretuzumab, patritumab, seribantumab, zenocutuzumab, sibrotuzumab, burosumab, aprutumab ixadotin, radretumab, pasotuxizumab, farletuzumab, mirvetuximab soravtansine, vantictumab, TRBS07, 3F8, dinutuximab, dinutuximab beta, ecromeximab, mitumomab, andecaliximab, capromab, codrituzumab, glembatumumab vedotin, talquetamab, talquetamab, trevogrumab, indusatumab vedotin, ficlatuzumab, rilotumumab, zatuximab, pentuzimab, pentuzimab, margetuximab, timigutuzumab, trastuzumab, trastuzumab duocarmazine, trastuzumab emtansine, gancotamab, pertuzumab, ertumaxomab, emibctuzumab, telisotuzumab, telisotuzumab vedotin, derlotuximab biotin, apolizumab, onartuzumab, bersanlimab, enlimomabpegol, rontalizumab, sifalimumab, talizumab, ganitumab, istiratumab, robatumumab, teprotumumab, figitumumab, ganitumab, istiratumab, robatumumab, teprotumumab, cixutumumab, dalotuzumab, xentuzumab, dusigitumab, canakinumab, ustekinumab, ustekinumab, ustekinumab, briakinumab, briakinumab, abrezekimab, lebrikizumab, romilkimab, TNX-650, tralokinumab, anrukinzumab, brodalumab, ixekizumab, netakimab, perakizumab, secukinumab, vunakizumab, afasevikumab, afasevikumab, bimekizumab, bimekizumab, remtolumab, bermekimab, lutikizumab, lutikizumab, gevokizumab, cergutuzumab amunaleukin, fletikumab, fezakinumab, brazikumab, guselkumab, mirikizumab, tildrakizumab, risankizumab, flotetuzumab, nemolizumab, pascolizumab, dupilumab, mepolizumab, reslizumab, clazakizumab, elsilimomab, olokizumab, sarilumab, siltuximab, sirukumab, vobarilizumab, tocilizumab, SA237, satralizumab, enokizumab, prezalizumab, natalizumab, abrilumab, abrilumab, vedolizumab, volociximab, tadocizumab, etaracizumab, etrolizumab, spesolimab, vatelizumab, erlizumab, lirilumab, relatlimab, cBR96-doxorubicinimmunoconjugate, odulimomab, efalizumab, ladiratuzumab vedotin, simtuzumab, samrotamab vedotin, asclizumab, lupartumab amadotin, imalumab, carlumab, imaprelimab, amatuximab, amatuximab, anctumab ravtansine, narnatumab, clivatuzumab tetraxetan, pemtumomab, gatipotuzumab, ensituximab, lemalesomab, sulesomab, enfortumab vedotin, racotumomab, monalizumab, brontictuzumab, tarextumab, vesencumab, oxelumab, gilvetmab, tislelizumab, dostarlimab, BCD-100, nivolumab, PDR001, pembrolizumab, pidilizumab, retifanlimab, spartalizumab, sintilimab, cemiplimab, olaratumab, tovetumab, rinucumab, atezolizumab, avelumab, durvalumab, lifastuzumab vedotin, bavituximab, acapatamab, capromab, rosopatamab, nezastomig, pasotuxizumab, pelgifatamab, voxalatamab, cofetuzumab pelidotin, denosumab, rosmantuzumab, cirmtuzumab, atinumab, indatuximab ravtansine, elotuzumab, sirtratumab vedotin, sonepcizumab, vandortuzumab vedotin, minretumomab, satumomab pendetide, maslimomab, ontuxizumab, tenatumomab, fresolimumab, metelimumab, lerdelimumab, tezepelumab, etigilimab, tiragotumab, placulumab, prezalumab, infliximab, nerelimomab, ozoralizumab, adalimumab, afelimomab, certolizumab pegol, golimumab, mapatumumab, conatumumab, lexatumumab, tigatuzumab, sacituzumab govitecan, votumumab, pogalizumab, letolizumab, pankomab, anatumomab mafenatox, enavatuzumab, flanvotumab, brolucizumab, ranibizumab, varisacumab, bevacizumab, faricimab, icrucumab, alacizumab pegol, ramucirumab, pritumumab, and onvatilimab.

[5945] In some aspects, the antigen binding polypeptide complexes provided herein comprise a VH3 comprising a heavy chain complementarity determining region 1 (HCDR1), HCDR2, and/or HCDR3 of an antibody selected from the group consisting of losatuxizumab vedotin, utomilumab, urelumab, oleclumab, naptumomab estafenatox, ascrinvacumab, pintumomab, tacatuzumab tetraxetan, nesvacumab, vanucizumab, timolumab, vapaliximab, vepalimomab, enapotamab vedotin, ianalumab, belimumab, tabalumab, tibulizumab, belantamab mafodotin, teclistamab, teclistamab, detumomab, nacolomab tafenatox, eculizumab, lendalizumab, pexelizumab, pozelimab, ravulizumab, tesidolumab, vilobelimab, abagovomab, igovomab, oregovomab, sofituzumab vedotin, cantuzumab mertansine, cantuzuma bravtansine, girentuximab, altumomab pentetate, arcitumomab, besilesomab, bertilimumab, plozalizumab, mogamulizumab, leronlimab, PRO140, rovelizumab, rovelizumab, talacotuzumab, benralizumab, tavolimab, vonlerolizumab, gavilimomab, ziralimumab, fanolesomab, ipilimumab, ruplizumab, toralizumab, dapirolizumab pegol, toralizumab, dapirolizumab pegol, ruplizumab, blinatumomab, inebilizumab, loncastuximab tesirine, SGN-CD19A, tafasitamab, taplitumomab paptox, XMAB-5574, Budoprutug, Obexelimab, duvortuxizumab, englumafusp alfa, Emfizatamab, zeripatamig, siplizumab, blontuvetmab, FBTA05, ibritumomab tiuxetan, obinutuzumab, ocaratuzumab, ocrelizumab, ofatumumab, rituximab, tositumomab, ublituximab, veltuzumab, divozilimab, eramkafusp alfa, ripertamab, zuberitamab, glofitamab, nofetumomab merpentan, samalizumab, imvotamab, odronextamab, plamotamab, bectumomab, inotuzumab ozogamicin, moxetumomab pasudotox, pinatuzumab vedotin, gomiliximab, lumiliximab, inolimomab, inolimomab, daclizumab, camidanluma btesirine, basiliximab, varlilumab, omburtamab, enoblituzumab, vopratelimab, lulizumabpegol, TGN1412, muromonab-CD3, otelixizumab, teplizumab, visilizumab, epcoritamab, epcoritamab, brentuximab vedotin, iratumumab, azintuxizumab vedotin, gemtuzumab ozogamicin, lintuzumab, vadastuximab talirine, naratuximab emtansine, otlertuzumab, lilotomab satetraxetan, tetulomab, daratumumab, isatuximab, foralumab, mosunetuzumab, mosunetuzumab, cedelizumab, ibalizumab, keliximab, priliximab, tregalizumab, zanolimumab, bleselumab, iscalimab, lucatumumab, ravagalimab, selicrelumab, teneliximab, vanalimab, abciximab, bivatuzumab, iomab-B, telimomab aritox, zolimomab aritox, abituzumab, intetumumab, alemtuzumab, tamtuvetmab, lorvotuzumab mertansine, itolizumab, cusatuzumab, vorsetuzumab mafodotin, milatuzumab, iladatuzumab vedotin, polatuzumab vedotin, galiximab, cibisatamab, zolbetuximab, naxitamab, tisotumab vedotin, olendalizumab, pamrevlumab, lacnotuzumab, cabiralizumab, emactuzumab, axatilimab, gimsilumab, lenzilumab, namilumab, tremelimumab, ulocuplumab, tepoditamab, rovalpituzumab tesirine, tarlatamab, demcizumab, navicixizumab, drozitumab, parsatuzumab, depatuxizumab mafodotin, modotuximab, carotuximab, adecatumumab, adecatumumab, oportuzumab monatox, solitomab, tucotuzumab celmoleukin, edrecolomab, catumaxomab, ifabotuzumab, fibatuzumab, zalutumumab, panitumumab, cetuximab, futuximab, imgatuzumab, laprituximab emtansine, matuzumab, necitumumab, nimotuzumab, tomuzotuximab, amivantamab, amivantamab, epitumomab cituxetan, sontuzumab, duligotuzumab, elgemtumab, lumretuzumab, patritumab, seribantumab, zenocutuzumab, sibrotuzumab, burosumab, aprutumab ixadotin, radretumab, pasotuxizumab, farletuzumab, mirvetuximab soravtansine, vantictumab, TRBS07, 3F8, dinutuximab, dinutuximab beta, ecromeximab, mitumomab, andecaliximab, capromab, codrituzumab, glembatumumab vedotin, talquetamab, talquetamab, trevogrumab, indusatumab vedotin, ficlatuzumab, rilotumumab, zatuximab, pentuzimab, pentuzimab, margetuximab, timigutuzumab, trastuzumab, trastuzumab duocarmazine, trastuzumab emtansine, gancotamab, pertuzumab, ertumaxomab, emibetuzumab, telisotuzumab, telisotuzumab vedotin, derlotuximab biotin, apolizumab, onartuzumab, bersanlimab, enlimomabpegol, rontalizumab, sifalimumab, talizumab, ganitumab, istiratumab, robatumumab, teprotumumab, figitumumab, ganitumab, istiratumab, robatumumab, teprotumumab, cixutumumab, dalotuzumab, xentuzumab, dusigitumab, canakinumab, ustekinumab, ustekinumab, ustekinumab, briakinumab, briakinumab, abrezekimab, lebrikizumab, romilkimab, TNX-650, tralokinumab, anrukinzumab, brodalumab, ixekizumab, netakimab, perakizumab, secukinumab, vunakizumab, afasevikumab, afasevikumab, bimekizumab, bimekizumab, remtolumab, bermckimab, lutikizumab, lutikizumab, gevokizumab, cergutuzumab amunaleukin, fletikumab, fezakinumab, brazikumab, guselkumab, mirikizumab, tildrakizumab, risankizumab, flotetuzumab, nemolizumab, pascolizumab, dupilumab, mepolizumab, reslizumab, clazakizumab, elsilimomab, olokizumab, sarilumab, siltuximab, sirukumab, vobarilizumab, tocilizumab, SA237, satralizumab, enokizumab, prezalizumab, natalizumab, abrilumab, abrilumab, vedolizumab, volociximab, tadocizumab, etaracizumab, etrolizumab, spesolimab, vatelizumab, erlizumab, lirilumab, relatlimab, cBR96-doxorubicinimmunoconjugate, odulimomab, efalizumab, ladiratuzumab vedotin, simtuzumab, samrotamab vedotin, asclizumab, lupartumab amadotin, imalumab, carlumab, imaprelimab, amatuximab, amatuximab, anetumab ravtansine, narnatumab, clivatuzumab tetraxetan, pemtumomab, gatipotuzumab, ensituximab, lemalesomab, sulesomab, enfortumab vedotin, racotumomab, monalizumab, brontictuzumab, tarextumab, vesencumab, oxelumab, gilvetmab, tislelizumab, dostarlimab, BCD-100, nivolumab, PDR001, pembrolizumab, pidilizumab, retifanlimab, spartalizumab, sintilimab, cemiplimab, olaratumab, tovetumab, rinucumab, atezolizumab, avelumab, durvalumab, lifastuzumab vedotin, bavituximab, acapatamab, capromab, rosopatamab, nezastomig, pasotuxizumab, pelgifatamab, voxalatamab, cofetuzumab pelidotin, denosumab, rosmantuzumab, cirmtuzumab, atinumab, indatuximab ravtansine, elotuzumab, sirtratumab vedotin, sonepcizumab, vandortuzumab vedotin, minretumomab, satumomab pendetide, maslimomab, ontuxizumab, tenatumomab, fresolimumab, metelimumab, lerdelimumab, tezepelumab, etigilimab, tiragotumab, placulumab, prezalumab, infliximab, nerelimomab, ozoralizumab, adalimumab, afelimomab, certolizumab pegol, golimumab, mapatumumab, conatumumab, lexatumumab, tigatuzumab, sacituzumab govitecan, votumumab, pogalizumab, letolizumab, pankomab, anatumomab mafenatox, enavatuzumab, flanvotumab, brolucizumab, ranibizumab, varisacumab, bevacizumab, faricimab, icrucumab, alacizumab pegol, ramucirumab, pritumumab, and onvatilimab.

[5946] In some aspects, the antigen binding polypeptide complexes provided herein comprise a VL1 comprising a VL of an antibody selected from the group consisting of losatuxizumab vedotin, utomilumab, urelumab, oleclumab, naptumomab estafenatox, ascrinvacumab, pintumomab, tacatuzumab tetraxetan, nesvacumab, vanucizumab, timolumab, vapaliximab, vepalimomab, enapotamab vedotin, ianalumab, belimumab, tabalumab, tibulizumab, belantamab mafodotin, teclistamab, teclistamab, detumomab, nacolomab tafenatox, eculizumab, lendalizumab, pexelizumab, pozelimab, ravulizumab, tesidolumab, vilobelimab, abagovomab, igovomab, oregovomab, sofituzumab vedotin, cantuzumab mertansine, cantuzuma bravtansine, girentuximab, altumomab pentetate, arcitumomab, besilesomab, bertilimumab, plozalizumab, mogamulizumab, leronlimab, PRO140, rovelizumab, rovelizumab, talacotuzumab, benralizumab, tavolimab, vonlerolizumab, gavilimomab, ziralimumab, fanolesomab, ipilimumab, ruplizumab, toralizumab, dapirolizumab pegol, toralizumab, dapirolizumab pegol, ruplizumab, blinatumomab, inebilizumab, loncastuximab tesirine, SGN-CD19A, tafasitamab, taplitumomab paptox, XMAB-5574, Budoprutug, Obexelimab, duvortuxizumab, englumafusp alfa, Emfizatamab, zeripatamig, siplizumab, blontuvetmab, FBTA05, ibritumomab tiuxetan, obinutuzumab, ocaratuzumab, ocrelizumab, ofatumumab, rituximab, tositumomab, ublituximab, veltuzumab, divozilimab, eramkafusp alfa, ripertamab, zuberitamab, glofitamab, nofetumomab merpentan, samalizumab, imvotamab, odronextamab, plamotamab, bectumomab, inotuzumab ozogamicin, moxetumomab pasudotox, pinatuzumab vedotin, gomiliximab, lumiliximab, inolimomab, inolimomab, daclizumab, camidanluma btesirine, basiliximab, varlilumab, omburtamab, enoblituzumab, vopratelimab, lulizumabpegol, TGN1412, muromonab-CD3, otelixizumab, teplizumab, visilizumab, epcoritamab, epcoritamab, brentuximab vedotin, iratumumab, azintuxizumab vedotin, gemtuzumab ozogamicin, lintuzumab, vadastuximab talirine, naratuximab emtansine, otlertuzumab, lilotomab satetraxetan, tetulomab, daratumumab, isatuximab, foralumab, mosunetuzumab, mosunetuzumab, cedelizumab, ibalizumab, keliximab, priliximab, tregalizumab, zanolimumab, bleselumab, iscalimab, lucatumumab, ravagalimab, selicrelumab, teneliximab, vanalimab, abciximab, bivatuzumab, iomab-B, telimomab aritox, zolimomab aritox, abituzumab, intetumumab, alemtuzumab, tamtuvetmab, lorvotuzumab mertansine, itolizumab, cusatuzumab, vorsctuzumab mafodotin, milatuzumab, iladatuzumab vedotin, polatuzumab vedotin, galiximab, cibisatamab, zolbetuximab, naxitamab, tisotumab vedotin, olendalizumab, pamrevlumab, lacnotuzumab, cabiralizumab, emactuzumab, axatilimab, gimsilumab, lenzilumab, namilumab, tremelimumab, ulocuplumab, tepoditamab, rovalpituzumab tesirine, tarlatamab, demcizumab, navicixizumab, drozitumab, parsatuzumab, depatuxizumab mafodotin, modotuximab, carotuximab, adecatumumab, adecatumumab, oportuzumab monatox, solitomab, tucotuzumab celmoleukin, edrecolomab, catumaxomab, ifabotuzumab, fibatuzumab, zalutumumab, panitumumab, cetuximab, futuximab, imgatuzumab, laprituximab emtansine, matuzumab, necitumumab, nimotuzumab, tomuzotuximab, amivantamab, amivantamab, epitumomab cituxetan, sontuzumab, duligotuzumab, elgemtumab, lumretuzumab, patritumab, seribantumab, zenocutuzumab, sibrotuzumab, burosumab, aprutumab ixadotin, radretumab, pasotuxizumab, farletuzumab, mirvetuximab soravtansine, vantictumab, TRBS07, 3F8, dinutuximab, dinutuximab beta, ecromeximab, mitumomab, andecaliximab, capromab, codrituzumab, glembatumumab vedotin, talquetamab, talquetamab, trevogrumab, indusatumab vedotin, ficlatuzumab, rilotumumab, zatuximab, pentuzimab, pentuzimab, margetuximab, timigutuzumab, trastuzumab, trastuzumab duocarmazine, trastuzumab emtansine, gancotamab, pertuzumab, ertumaxomab, emibetuzumab, telisotuzumab, telisotuzumab vedotin, derlotuximab biotin, apolizumab, onartuzumab, bersanlimab, enlimomabpegol, rontalizumab, sifalimumab, talizumab, ganitumab, istiratumab, robatumumab, teprotumumab, figitumumab, ganitumab, istiratumab, robatumumab, teprotumumab, cixutumumab, dalotuzumab, xentuzumab, dusigitumab, canakinumab, ustekinumab, ustekinumab, ustekinumab, briakinumab, briakinumab, abrezekimab, lebrikizumab, romilkimab, TNX-650, tralokinumab, anrukinzumab, brodalumab, ixekizumab, netakimab, perakizumab, secukinumab, vunakizumab, afasevikumab, afasevikumab, bimekizumab, bimekizumab, remtolumab, bermekimab, lutikizumab, lutikizumab, gevokizumab, cergutuzumab amunaleukin, fletikumab, fezakinumab, brazikumab, guselkumab, mirikizumab, tildrakizumab, risankizumab, flotetuzumab, nemolizumab, pascolizumab, dupilumab, mepolizumab, reslizumab, clazakizumab, elsilimomab, olokizumab, sarilumab, siltuximab, sirukumab, vobarilizumab, tocilizumab, SA237, satralizumab, enokizumab, prezalizumab, natalizumab, abrilumab, abrilumab, vedolizumab, volociximab, tadocizumab, etaracizumab, etrolizumab, spesolimab, vatelizumab, erlizumab, lirilumab, relatlimab, cBR96-doxorubicinimmunoconjugate, odulimomab, efalizumab, ladiratuzumab vedotin, simtuzumab, samrotamab vedotin, aselizumab, lupartumab amadotin, imalumab, carlumab, imaprelimab, amatuximab, amatuximab, anetumab ravtansine, narnatumab, clivatuzumab tetraxetan, pemtumomab, gatipotuzumab, ensituximab, lemalesomab, sulesomab, enfortumab vedotin, racotumomab, monalizumab, brontictuzumab, tarextumab, vesencumab, oxelumab, gilvetmab, tislelizumab, dostarlimab, BCD-100, nivolumab, PDR001, pembrolizumab, pidilizumab, retifanlimab, spartalizumab, sintilimab, cemiplimab, olaratumab, tovetumab, rinucumab, atezolizumab, avelumab, durvalumab, lifastuzumab vedotin, bavituximab, acapatamab, capromab, rosopatamab, nezastomig, pasotuxizumab, pelgifatamab, voxalatamab, cofetuzumab pelidotin, denosumab, rosmantuzumab, cirmtuzumab, atinumab, indatuximab ravtansine, elotuzumab, sirtratumab vedotin, sonepcizumab, vandortuzumab vedotin, minretumomab, satumomab pendetide, maslimomab, ontuxizumab, tenatumomab, fresolimumab, metelimumab, lerdelimumab, tezepelumab, etigilimab, tiragotumab, placulumab, prezalumab, infliximab, nerelimomab, ozoralizumab, adalimumab, afelimomab, certolizumab pegol, golimumab, mapatumumab, conatumumab, lexatumumab, tigatuzumab, sacituzumab govitecan, votumumab, pogalizumab, letolizumab, pankomab, anatumomab mafenatox, enavatuzumab, flanvotumab, brolucizumab, ranibizumab, varisacumab, bevacizumab, faricimab, icrucumab, alacizumab pegol, ramucirumab, pritumumab, and onvatilimab.

[5947] In some aspects, the antigen binding polypeptide complexes provided herein comprise a VL2 comprising a VL of an antibody selected from the group consisting of losatuxizumab vedotin, utomilumab, urelumab, oleclumab, naptumomab estafenatox, ascrinvacumab, pintumomab, tacatuzumab tetraxetan, nesvacumab, vanucizumab, timolumab, vapaliximab, vepalimomab, enapotamab vedotin, ianalumab, belimumab, tabalumab, tibulizumab, belantamab mafodotin, teclistamab, teclistamab, detumomab, nacolomab tafenatox, eculizumab, lendalizumab, pexelizumab, pozelimab, ravulizumab, tesidolumab, vilobelimab, abagovomab, igovomab, oregovomab, sofituzumab vedotin, cantuzumab mertansine, cantuzuma bravtansine, girentuximab, altumomab pentetate, arcitumomab, besilesomab, bertilimumab, plozalizumab, mogamulizumab, leronlimab, PRO140, rovelizumab, rovelizumab, talacotuzumab, benralizumab, tavolimab, vonlerolizumab, gavilimomab, ziralimumab, fanolesomab, ipilimumab, ruplizumab, toralizumab, dapirolizumab pegol, toralizumab, dapirolizumab pegol, ruplizumab, blinatumomab, inebilizumab, loncastuximab tesirine, SGN-CD19A, tafasitamab, taplitumomab paptox, XMAB-5574, Budoprutug, Obexelimab, duvortuxizumab, englumafusp alfa, Emfizatamab, zeripatamig, siplizumab, blontuvetmab, FBTA05, ibritumomab tiuxetan, obinutuzumab, ocaratuzumab, ocrelizumab, ofatumumab, rituximab, tositumomab, ublituximab, veltuzumab, divozilimab, eramkafusp alfa, ripertamab, zuberitamab, glofitamab, nofetumomab merpentan, samalizumab, imvotamab, odronextamab, plamotamab, bectumomab, inotuzumab ozogamicin, moxetumomab pasudotox, pinatuzumab vedotin, gomiliximab, lumiliximab, inolimomab, inolimomab, daclizumab, camidanluma btesirine, basiliximab, varlilumab, omburtamab, enoblituzumab, vopratelimab, lulizumabpegol, TGN1412, muromonab-CD3, otelixizumab, teplizumab, visilizumab, epcoritamab, epcoritamab, brentuximab vedotin, iratumumab, azintuxizumab vedotin, gemtuzumab ozogamicin, lintuzumab, vadastuximab talirine, naratuximab emtansine, otlertuzumab, lilotomab satetraxetan, tetulomab, daratumumab, isatuximab, foralumab, mosunetuzumab, mosunetuzumab, cedelizumab, ibalizumab, keliximab, priliximab, tregalizumab, zanolimumab, bleselumab, iscalimab, lucatumumab, ravagalimab, selicrelumab, teneliximab, vanalimab, abciximab, bivatuzumab, iomab-B, telimomab aritox, zolimomab aritox, abituzumab, intetumumab, alemtuzumab, tamtuvetmab, lorvotuzumab mertansine, itolizumab, cusatuzumab, vorsetuzumab mafodotin, milatuzumab, iladatuzumab vedotin, polatuzumab vedotin, galiximab, cibisatamab, zolbetuximab, naxitamab, tisotumab vedotin, olendalizumab, pamrevlumab, lacnotuzumab, cabiralizumab, emactuzumab, axatilimab, gimsilumab, lenzilumab, namilumab, tremelimumab, ulocuplumab, tepoditamab, rovalpituzumab tesirine, tarlatamab, demcizumab, navicixizumab, drozitumab, parsatuzumab, depatuxizumab mafodotin, modotuximab, carotuximab, adecatumumab, adecatumumab, oportuzumab monatox, solitomab, tucotuzumab celmoleukin, edrecolomab, catumaxomab, ifabotuzumab, fibatuzumab, zalutumumab, panitumumab, cetuximab, futuximab, imgatuzumab, laprituximab emtansine, matuzumab, necitumumab, nimotuzumab, tomuzotuximab, amivantamab, amivantamab, epitumomab cituxetan, sontuzumab, duligotuzumab, elgemtumab, lumretuzumab, patritumab, seribantumab, zenocutuzumab, sibrotuzumab, burosumab, aprutumab ixadotin, radretumab, pasotuxizumab, farletuzumab, mirvetuximab soravtansine, vantictumab, TRBS07, 3F8, dinutuximab, dinutuximab beta, ecromeximab, mitumomab, andecaliximab, capromab, codrituzumab, glembatumumab vedotin, talquetamab, talquetamab, trevogrumab, indusatumab vedotin, ficlatuzumab, rilotumumab, zatuximab, pentuzimab, pentuzimab, margetuximab, timigutuzumab, trastuzumab, trastuzumab duocarmazine, trastuzumab emtansine, gancotamab, pertuzumab, ertumaxomab, emibetuzumab, telisotuzumab, telisotuzumab vedotin, derlotuximab biotin, apolizumab, onartuzumab, bersanlimab, enlimomabpegol, rontalizumab, sifalimumab, talizumab, ganitumab, istiratumab, robatumumab, teprotumumab, figitumumab, ganitumab, istiratumab, robatumumab, teprotumumab, cixutumumab, dalotuzumab, xentuzumab, dusigitumab, canakinumab, ustekinumab, ustekinumab, ustekinumab, briakinumab, briakinumab, abrezekimab, lebrikizumab, romilkimab, TNX-650, tralokinumab, anrukinzumab, brodalumab, ixekizumab, netakimab, perakizumab, secukinumab, vunakizumab, afasevikumab, afasevikumab, bimekizumab, bimekizumab, remtolumab, bermekimab, lutikizumab, lutikizumab, gevokizumab, cergutuzumab amunaleukin, fletikumab, fezakinumab, brazikumab, guselkumab, mirikizumab, tildrakizumab, risankizumab, flotetuzumab, nemolizumab, pascolizumab, dupilumab, mepolizumab, reslizumab, clazakizumab, elsilimomab, olokizumab, sarilumab, siltuximab, sirukumab, vobarilizumab, tocilizumab, SA237, satralizumab, enokizumab, prezalizumab, natalizumab, abrilumab, abrilumab, vedolizumab, volociximab, tadocizumab, etaracizumab, etrolizumab, spesolimab, vatelizumab, erlizumab, lirilumab, relatlimab, cBR96-doxorubicinimmunoconjugate, odulimomab, efalizumab, ladiratuzumab vedotin, simtuzumab, samrotamab vedotin, aselizumab, lupartumab amadotin, imalumab, carlumab, imaprelimab, amatuximab, amatuximab, anetumab ravtansine, narnatumab, clivatuzumab tetraxetan, pemtumomab, gatipotuzumab, ensituximab, lemalesomab, sulesomab, enfortumab vedotin, racotumomab, monalizumab, brontictuzumab, tarextumab, vesencumab, oxelumab, gilvetmab, tislelizumab, dostarlimab, BCD-100, nivolumab, PDR001, pembrolizumab, pidilizumab, retifanlimab, spartalizumab, sintilimab, cemiplimab, olaratumab, tovetumab, rinucumab, atezolizumab, avelumab, durvalumab, lifastuzumab vedotin, bavituximab, acapatamab, capromab, rosopatamab, nezastomig, pasotuxizumab, pelgifatamab, voxalatamab, cofetuzumab pelidotin, denosumab, rosmantuzumab, cirmtuzumab, atinumab, indatuximab ravtansine, elotuzumab, sirtratumab vedotin, sonepcizumab, vandortuzumab vedotin, minretumomab, satumomab pendetide, maslimomab, ontuxizumab, tenatumomab, fresolimumab, metelimumab, lerdelimumab, tezepelumab, etigilimab, tiragotumab, placulumab, prezalumab, infliximab, nerelimomab, ozoralizumab, adalimumab, afelimomab, certolizumab pegol, golimumab, mapatumumab, conatumumab, lexatumumab, tigatuzumab, sacituzumab govitecan, votumumab, pogalizumab, letolizumab, pankomab, anatumomab mafenatox, enavatuzumab, flanvotumab, brolucizumab, ranibizumab, varisacumab, bevacizumab, faricimab, icrucumab, alacizumab pegol, ramucirumab, pritumumab, and onvatilimab.

[5948] In some aspects, the antigen binding polypeptide complexes provided herein comprise a VL3 comprising a VL of an antibody selected from the group consisting of losatuxizumab vedotin, utomilumab, urelumab, oleclumab, naptumomab estafenatox, ascrinvacumab, pintumomab, tacatuzumab tetraxetan, nesvacumab, vanucizumab, timolumab, vapaliximab, vepalimomab, enapotamab vedotin, ianalumab, belimumab, tabalumab, tibulizumab, belantamab mafodotin, teclistamab, teclistamab, detumomab, nacolomab tafenatox, eculizumab, lendalizumab, pexelizumab, pozelimab, ravulizumab, tesidolumab, vilobelimab, abagovomab, igovomab, oregovomab, sofituzumab vedotin, cantuzumab mertansine, cantuzuma bravtansine, girentuximab, altumomab pentetate, arcitumomab, besilesomab, bertilimumab, plozalizumab, mogamulizumab, leronlimab, PRO140, rovelizumab, rovelizumab, talacotuzumab, benralizumab, tavolimab, vonlerolizumab, gavilimomab, ziralimumab, fanolesomab, ipilimumab, ruplizumab, toralizumab, dapirolizumab pegol, toralizumab, dapirolizumab pegol, ruplizumab, blinatumomab, inebilizumab, loncastuximab tesirine, SGN-CD19A, tafasitamab, taplitumomab paptox, XMAB-5574, Budoprutug, Obexelimab, duvortuxizumab, englumafusp alfa, Emfizatamab, zeripatamig, siplizumab, blontuvetmab, FBTA05, ibritumomab tiuxetan, obinutuzumab, ocaratuzumab, ocrelizumab, ofatumumab, rituximab, tositumomab, ublituximab, veltuzumab, divozilimab, eramkafusp alfa, ripertamab, zuberitamab, glofitamab, nofetumomab merpentan, samalizumab, imvotamab, odronextamab, plamotamab, bectumomab, inotuzumab ozogamicin, moxetumomab pasudotox, pinatuzumab vedotin, gomiliximab, lumiliximab, inolimomab, inolimomab, daclizumab, camidanluma btesirine, basiliximab, varlilumab, omburtamab, enoblituzumab, vopratelimab, lulizumabpegol, TGN1412, muromonab-CD3, otelixizumab, teplizumab, visilizumab, epcoritamab, epcoritamab, brentuximab vedotin, iratumumab, azintuxizumab vedotin, gemtuzumab ozogamicin, lintuzumab, vadastuximab talirine, naratuximab emtansine, otlertuzumab, lilotomab satetraxetan, tetulomab, daratumumab, isatuximab, foralumab, mosunetuzumab, mosunetuzumab, cedelizumab, ibalizumab, keliximab, priliximab, tregalizumab, zanolimumab, bleselumab, iscalimab, lucatumumab, ravagalimab, selicrelumab, teneliximab, vanalimab, abciximab, bivatuzumab, iomab-B, telimomab aritox, zolimomab aritox, abituzumab, intetumumab, alemtuzumab, tamtuvetmab, lorvotuzumab mertansine, itolizumab, cusatuzumab, vorsetuzumab mafodotin, milatuzumab, iladatuzumab vedotin, polatuzumab vedotin, galiximab, cibisatamab, zolbetuximab, naxitamab, tisotumab vedotin, olendalizumab, pamrevlumab, lacnotuzumab, cabiralizumab, emactuzumab, axatilimab, gimsilumab, lenzilumab, namilumab, tremelimumab, ulocuplumab, tepoditamab, rovalpituzumab tesirine, tarlatamab, demcizumab, navicixizumab, drozitumab, parsatuzumab, depatuxizumab mafodotin, modotuximab, carotuximab, adecatumumab, adecatumumab, oportuzumab monatox, solitomab, tucotuzumab celmoleukin, edrecolomab, catumaxomab, ifabotuzumab, fibatuzumab, zalutumumab, panitumumab, cetuximab, futuximab, imgatuzumab, laprituximab emtansine, matuzumab, necitumumab, nimotuzumab, tomuzotuximab, amivantamab, amivantamab, epitumomab cituxetan, sontuzumab, duligotuzumab, elgemtumab, lumretuzumab, patritumab, scribantumab, zenocutuzumab, sibrotuzumab, burosumab, aprutumab ixadotin, radretumab, pasotuxizumab, farletuzumab, mirvetuximab soravtansine, vantictumab, TRBS07, 3F8, dinutuximab, dinutuximab beta, ecromeximab, mitumomab, andecaliximab, capromab, codrituzumab, glembatumumab vedotin, talquetamab, talquetamab, trevogrumab, indusatumab vedotin, ficlatuzumab, rilotumumab, zatuximab, pentuzimab, pentuzimab, margetuximab, timigutuzumab, trastuzumab, trastuzumab duocarmazine, trastuzumab emtansine, gancotamab, pertuzumab, ertumaxomab, emibetuzumab, telisotuzumab, telisotuzumab vedotin, derlotuximab biotin, apolizumab, onartuzumab, bersanlimab, enlimomabpegol, rontalizumab, sifalimumab, talizumab, ganitumab, istiratumab, robatumumab, teprotumumab, figitumumab, ganitumab, istiratumab, robatumumab, teprotumumab, cixutumumab, dalotuzumab, xentuzumab, dusigitumab, canakinumab, ustekinumab, ustekinumab, ustekinumab, briakinumab, briakinumab, abrezckimab, lebrikizumab, romilkimab, TNX-650, tralokinumab, anrukinzumab, brodalumab, ixekizumab, netakimab, perakizumab, secukinumab, vunakizumab, afasevikumab, afasevikumab, bimekizumab, bimekizumab, remtolumab, bermckimab, lutikizumab, lutikizumab, gevokizumab, cergutuzumab amunaleukin, fletikumab, fezakinumab, brazikumab, guselkumab, mirikizumab, tildrakizumab, risankizumab, flotetuzumab, nemolizumab, pascolizumab, dupilumab, mepolizumab, reslizumab, clazakizumab, elsilimomab, olokizumab, sarilumab, siltuximab, sirukumab, vobarilizumab, tocilizumab, SA237, satralizumab, enokizumab, prezalizumab, natalizumab, abrilumab, abrilumab, vedolizumab, volociximab, tadocizumab, etaracizumab, etrolizumab, spesolimab, vatelizumab, erlizumab, lirilumab, relatlimab, cBR96-doxorubicinimmunoconjugate, odulimomab, efalizumab, ladiratuzumab vedotin, simtuzumab, samrotamab vedotin, aselizumab, lupartumab amadotin, imalumab, carlumab, imaprelimab, amatuximab, amatuximab, anetumab ravtansine, narnatumab, clivatuzumab tetraxetan, pemtumomab, gatipotuzumab, ensituximab, lemalesomab, sulesomab, enfortumab vedotin, racotumomab, monalizumab, brontictuzumab, tarextumab, vesencumab, oxelumab, gilvetmab, tislelizumab, dostarlimab, BCD-100, nivolumab, PDR001, pembrolizumab, pidilizumab, retifanlimab, spartalizumab, sintilimab, cemiplimab, olaratumab, tovetumab, rinucumab, atezolizumab, avelumab, durvalumab, lifastuzumab vedotin, bavituximab, acapatamab, capromab, rosopatamab, nezastomig, pasotuxizumab, pelgifatamab, voxalatamab, cofetuzumab pelidotin, denosumab, rosmantuzumab, cirmtuzumab, atinumab, indatuximab ravtansine, elotuzumab, sirtratumab vedotin, sonepcizumab, vandortuzumab vedotin, minretumomab, satumomab pendetide, maslimomab, ontuxizumab, tenatumomab, fresolimumab, metelimumab, lerdelimumab, tezepelumab, etigilimab, tiragotumab, placulumab, prezalumab, infliximab, nerelimomab, ozoralizumab, adalimumab, afelimomab, certolizumab pegol, golimumab, mapatumumab, conatumumab, lexatumumab, tigatuzumab, sacituzumab govitecan, votumumab, pogalizumab, letolizumab, pankomab, anatumomab mafenatox, enavatuzumab, flanvotumab, brolucizumab, ranibizumab, varisacumab, bevacizumab, faricimab, icrucumab, alacizumab pegol, ramucirumab, pritumumab, and onvatilimab.

[5949] In some aspects, the antigen binding polypeptide complexes provided herein comprise a VH1 comprising a VH of an antibody selected from the group consisting of losatuxizumab vedotin, utomilumab, urelumab, oleclumab, naptumomab estafenatox, ascrinvacumab, pintumomab, tacatuzumab tetraxetan, nesvacumab, vanucizumab, timolumab, vapaliximab, vepalimomab, enapotamab vedotin, ianalumab, belimumab, tabalumab, tibulizumab, belantamab mafodotin, teclistamab, teclistamab, detumomab, nacolomab tafenatox, eculizumab, lendalizumab, pexelizumab, pozelimab, ravulizumab, tesidolumab, vilobelimab, abagovomab, igovomab, oregovomab, sofituzumab vedotin, cantuzumab mertansine, cantuzuma bravtansine, girentuximab, altumomab pentetate, arcitumomab, besilesomab, bertilimumab, plozalizumab, mogamulizumab, leronlimab, PRO140, rovelizumab, rovelizumab, talacotuzumab, benralizumab, tavolimab, vonlerolizumab, gavilimomab, ziralimumab, fanolesomab, ipilimumab, ruplizumab, toralizumab, dapirolizumab pegol, toralizumab, dapirolizumab pegol, ruplizumab, blinatumomab, inebilizumab, loncastuximab tesirine, SGN-CD19A, tafasitamab, taplitumomab paptox, XMAB-5574, Budoprutug, Obexelimab, duvortuxizumab, englumafusp alfa, Emfizatamab, zeripatamig, siplizumab, blontuvetmab, FBTA05, ibritumomab tiuxetan, obinutuzumab, ocaratuzumab, ocrelizumab, ofatumumab, rituximab, tositumomab, ublituximab, veltuzumab, divozilimab, eramkafusp alfa, ripertamab, zuberitamab, glofitamab, nofetumomab merpentan, samalizumab, imvotamab, odronextamab, plamotamab, bectumomab, inotuzumab ozogamicin, moxetumomab pasudotox, pinatuzumab vedotin, gomiliximab, lumiliximab, inolimomab, inolimomab, daclizumab, camidanluma btesirine, basiliximab, varlilumab, omburtamab, enoblituzumab, vopratelimab, lulizumabpegol, TGN1412, muromonab-CD3, otelixizumab, teplizumab, visilizumab, epcoritamab, epcoritamab, brentuximab vedotin, iratumumab, azintuxizumab vedotin, gemtuzumab ozogamicin, lintuzumab, vadastuximab talirine, naratuximab emtansine, otlertuzumab, lilotomab satetraxetan, tetulomab, daratumumab, isatuximab, foralumab, mosunetuzumab, mosunetuzumab, cedelizumab, ibalizumab, keliximab, priliximab, tregalizumab, zanolimumab, bleselumab, iscalimab, lucatumumab, ravagalimab, selicrelumab, teneliximab, vanalimab, abciximab, bivatuzumab, iomab-B, telimomab aritox, zolimomab aritox, abituzumab, intetumumab, alemtuzumab, tamtuvetmab, lorvotuzumab mertansine, itolizumab, cusatuzumab, vorsetuzumab mafodotin, milatuzumab, iladatuzumab vedotin, polatuzumab vedotin, galiximab, cibisatamab, zolbctuximab, naxitamab, tisotumab vedotin, olendalizumab, pamrevlumab, lacnotuzumab, cabiralizumab, emactuzumab, axatilimab, gimsilumab, lenzilumab, namilumab, tremelimumab, ulocuplumab, tepoditamab, rovalpituzumab tesirine, tarlatamab, demcizumab, navicixizumab, drozitumab, parsatuzumab, depatuxizumab mafodotin, modotuximab, carotuximab, adecatumumab, adecatumumab, oportuzumab monatox, solitomab, tucotuzumab celmoleukin, edrecolomab, catumaxomab, ifabotuzumab, fibatuzumab, zalutumumab, panitumumab, cetuximab, futuximab, imgatuzumab, laprituximab emtansine, matuzumab, necitumumab, nimotuzumab, tomuzotuximab, amivantamab, amivantamab, epitumomab cituxetan, sontuzumab, duligotuzumab, elgemtumab, lumretuzumab, patritumab, seribantumab, zenocutuzumab, sibrotuzumab, burosumab, aprutumab ixadotin, radretumab, pasotuxizumab, farletuzumab, mirvetuximab soravtansine, vantictumab, TRBS07, 3F8, dinutuximab, dinutuximab beta, ecromeximab, mitumomab, andecaliximab, capromab, codrituzumab, glembatumumab vedotin, talquetamab, talquetamab, trevogrumab, indusatumab vedotin, ficlatuzumab, rilotumumab, zatuximab, pentuzimab, pentuzimab, margetuximab, timigutuzumab, trastuzumab, trastuzumab duocarmazine, trastuzumab emtansine, gancotamab, pertuzumab, ertumaxomab, emibetuzumab, telisotuzumab, telisotuzumab vedotin, derlotuximab biotin, apolizumab, onartuzumab, bersanlimab, enlimomabpegol, rontalizumab, sifalimumab, talizumab, ganitumab, istiratumab, robatumumab, teprotumumab, figitumumab, ganitumab, istiratumab, robatumumab, teprotumumab, cixutumumab, dalotuzumab, xentuzumab, dusigitumab, canakinumab, ustekinumab, ustekinumab, ustekinumab, briakinumab, briakinumab, abrezekimab, lebrikizumab, romilkimab, TNX-650, tralokinumab, anrukinzumab, brodalumab, ixekizumab, netakimab, perakizumab, secukinumab, vunakizumab, afasevikumab, afasevikumab, bimekizumab, bimekizumab, remtolumab, bermekimab, lutikizumab, lutikizumab, gevokizumab, cergutuzumab amunaleukin, fletikumab, fezakinumab, brazikumab, guselkumab, mirikizumab, tildrakizumab, risankizumab, flotetuzumab, nemolizumab, pascolizumab, dupilumab, mepolizumab, reslizumab, clazakizumab, elsilimomab, olokizumab, sarilumab, siltuximab, sirukumab, vobarilizumab, tocilizumab, SA237, satralizumab, enokizumab, prezalizumab, natalizumab, abrilumab, abrilumab, vedolizumab, volociximab, tadocizumab, etaracizumab, etrolizumab, spesolimab, vatelizumab, erlizumab, lirilumab, relatlimab, cBR96-doxorubicinimmunoconjugate, odulimomab, efalizumab, ladiratuzumab vedotin, simtuzumab, samrotamab vedotin, aselizumab, lupartumab amadotin, imalumab, carlumab, imaprelimab, amatuximab, amatuximab, anetumab ravtansine, narnatumab, clivatuzumab tetraxetan, pemtumomab, gatipotuzumab, ensituximab, lemalesomab, sulesomab, enfortumab vedotin, racotumomab, monalizumab, brontictuzumab, tarextumab, vesencumab, oxelumab, gilvetmab, tislelizumab, dostarlimab, BCD-100, nivolumab, PDR001, pembrolizumab, pidilizumab, retifanlimab, spartalizumab, sintilimab, cemiplimab, olaratumab, tovetumab, rinucumab, atezolizumab, avelumab, durvalumab, lifastuzumab vedotin, bavituximab, acapatamab, capromab, rosopatamab, nezastomig, pasotuxizumab, pelgifatamab, voxalatamab, cofetuzumab pelidotin, denosumab, rosmantuzumab, cirmtuzumab, atinumab, indatuximab ravtansine, elotuzumab, sirtratumab vedotin, sonepcizumab, vandortuzumab vedotin, minretumomab, satumomab pendetide, maslimomab, ontuxizumab, tenatumomab, fresolimumab, metelimumab, lerdelimumab, tezepelumab, etigilimab, tiragotumab, placulumab, prezalumab, infliximab, nerelimomab, ozoralizumab, adalimumab, afelimomab, certolizumab pegol, golimumab, mapatumumab, conatumumab, lexatumumab, tigatuzumab, sacituzumab govitecan, votumumab, pogalizumab, letolizumab, pankomab, anatumomab mafenatox, enavatuzumab, flanvotumab, brolucizumab, ranibizumab, varisacumab, bevacizumab, faricimab, icrucumab, alacizumab pegol, ramucirumab, pritumumab, and onvatilimab.

[5950] In some aspects, the antigen binding polypeptide complexes provided herein comprise a VH2 comprising a VH of an antibody selected from the group consisting of losatuxizumab vedotin, utomilumab, urelumab, oleclumab, naptumomab estafenatox, ascrinvacumab, pintumomab, tacatuzumab tetraxetan, nesvacumab, vanucizumab, timolumab, vapaliximab, vepalimomab, enapotamab vedotin, ianalumab, belimumab, tabalumab, tibulizumab, belantamab mafodotin, teclistamab, teclistamab, detumomab, nacolomab tafenatox, eculizumab, lendalizumab, pexelizumab, pozelimab, ravulizumab, tesidolumab, vilobelimab, abagovomab, igovomab, oregovomab, sofituzumab vedotin, cantuzumab mertansine, cantuzuma bravtansine, girentuximab, altumomab pentetate, arcitumomab, besilesomab, bertilimumab, plozalizumab, mogamulizumab, leronlimab, PRO140, rovelizumab, rovelizumab, talacotuzumab, benralizumab, tavolimab, vonlerolizumab, gavilimomab, ziralimumab, fanolesomab, ipilimumab, ruplizumab, toralizumab, dapirolizumab pegol, toralizumab, dapirolizumab pegol, ruplizumab, blinatumomab, inebilizumab, loncastuximab tesirine, SGN-CD19A, tafasitamab, taplitumomab paptox, XMAB-5574, Budoprutug, Obexelimab, duvortuxizumab, englumafusp alfa, Emfizatamab, zeripatamig, siplizumab, blontuvetmab, FBTA05, ibritumomab tiuxetan, obinutuzumab, ocaratuzumab, ocrelizumab, ofatumumab, rituximab, tositumomab, ublituximab, veltuzumab, divozilimab, eramkafusp alfa, ripertamab, zuberitamab, glofitamab, nofetumomab merpentan, samalizumab, imvotamab, odronextamab, plamotamab, bectumomab, inotuzumab ozogamicin, moxetumomab pasudotox, pinatuzumab vedotin, gomiliximab, lumiliximab, inolimomab, inolimomab, daclizumab, camidanluma btesirine, basiliximab, varlilumab, omburtamab, enoblituzumab, vopratelimab, lulizumabpegol, TGN1412, muromonab-CD3, otelixizumab, teplizumab, visilizumab, epcoritamab, epcoritamab, brentuximab vedotin, iratumumab, azintuxizumab vedotin, gemtuzumab ozogamicin, lintuzumab, vadastuximab talirine, naratuximab emtansine, otlertuzumab, lilotomab satetraxetan, tetulomab, daratumumab, isatuximab, foralumab, mosunctuzumab, mosunetuzumab, cedelizumab, ibalizumab, keliximab, priliximab, tregalizumab, zanolimumab, bleselumab, iscalimab, lucatumumab, ravagalimab, selicrelumab, teneliximab, vanalimab, abciximab, bivatuzumab, iomab-B, telimomab aritox, zolimomab aritox, abituzumab, intetumumab, alemtuzumab, tamtuvetmab, lorvotuzumab mertansine, itolizumab, cusatuzumab, vorsetuzumab mafodotin, milatuzumab, iladatuzumab vedotin, polatuzumab vedotin, galiximab, cibisatamab, zolbetuximab, naxitamab, tisotumab vedotin, olendalizumab, pamrevlumab, lacnotuzumab, cabiralizumab, emactuzumab, axatilimab, gimsilumab, lenzilumab, namilumab, tremelimumab, ulocuplumab, tepoditamab, rovalpituzumab tesirine, tarlatamab, demcizumab, navicixizumab, drozitumab, parsatuzumab, depatuxizumab mafodotin, modotuximab, carotuximab, adecatumumab, adecatumumab, oportuzumab monatox, solitomab, tucotuzumab celmoleukin, edrecolomab, catumaxomab, ifabotuzumab, fibatuzumab, zalutumumab, panitumumab, cetuximab, futuximab, imgatuzumab, laprituximab emtansine, matuzumab, necitumumab, nimotuzumab, tomuzotuximab, amivantamab, amivantamab, epitumomab cituxetan, sontuzumab, duligotuzumab, elgemtumab, lumretuzumab, patritumab, seribantumab, zenocutuzumab, sibrotuzumab, burosumab, aprutumab ixadotin, radretumab, pasotuxizumab, farletuzumab, mirvetuximab soravtansine, vantictumab, TRBS07, 3F8, dinutuximab, dinutuximab beta, ecromeximab, mitumomab, andecaliximab, capromab, codrituzumab, glembatumumab vedotin, talquetamab, talquetamab, trevogrumab, indusatumab vedotin, ficlatuzumab, rilotumumab, zatuximab, pentuzimab, pentuzimab, margetuximab, timigutuzumab, trastuzumab, trastuzumab duocarmazine, trastuzumab emtansine, gancotamab, pertuzumab, ertumaxomab, emibetuzumab, telisotuzumab, telisotuzumab vedotin, derlotuximab biotin, apolizumab, onartuzumab, bersanlimab, enlimomabpegol, rontalizumab, sifalimumab, talizumab, ganitumab, istiratumab, robatumumab, teprotumumab, figitumumab, ganitumab, istiratumab, robatumumab, teprotumumab, cixutumumab, dalotuzumab, xentuzumab, dusigitumab, canakinumab, ustekinumab, ustekinumab, ustekinumab, briakinumab, briakinumab, abrezekimab, lebrikizumab, romilkimab, TNX-650, tralokinumab, anrukinzumab, brodalumab, ixekizumab, netakimab, perakizumab, secukinumab, vunakizumab, afasevikumab, afasevikumab, bimekizumab, bimekizumab, remtolumab, bermekimab, lutikizumab, lutikizumab, gevokizumab, cergutuzumab amunaleukin, fletikumab, fezakinumab, brazikumab, guselkumab, mirikizumab, tildrakizumab, risankizumab, flotetuzumab, nemolizumab, pascolizumab, dupilumab, mepolizumab, reslizumab, clazakizumab, elsilimomab, olokizumab, sarilumab, siltuximab, sirukumab, vobarilizumab, tocilizumab, SA237, satralizumab, enokizumab, prezalizumab, natalizumab, abrilumab, abrilumab, vedolizumab, volociximab, tadocizumab, etaracizumab, etrolizumab, spesolimab, vatelizumab, erlizumab, lirilumab, relatlimab, cBR96-doxorubicinimmunoconjugate, odulimomab, efalizumab, ladiratuzumab vedotin, simtuzumab, samrotamab vedotin, aselizumab, lupartumab amadotin, imalumab, carlumab, imaprelimab, amatuximab, amatuximab, anetumab ravtansine, narnatumab, clivatuzumab tetraxetan, pemtumomab, gatipotuzumab, ensituximab, lemalesomab, sulesomab, enfortumab vedotin, racotumomab, monalizumab, brontictuzumab, tarextumab, vesencumab, oxelumab, gilvetmab, tislelizumab, dostarlimab, BCD-100, nivolumab, PDR001, pembrolizumab, pidilizumab, retifanlimab, spartalizumab, sintilimab, cemiplimab, olaratumab, tovetumab, rinucumab, atezolizumab, avelumab, durvalumab, lifastuzumab vedotin, bavituximab, acapatamab, capromab, rosopatamab, nezastomig, pasotuxizumab, pelgifatamab, voxalatamab, cofetuzumab pelidotin, denosumab, rosmantuzumab, cirmtuzumab, atinumab, indatuximab ravtansine, elotuzumab, sirtratumab vedotin, sonepcizumab, vandortuzumab vedotin, minretumomab, satumomab pendetide, maslimomab, ontuxizumab, tenatumomab, fresolimumab, metelimumab, lerdelimumab, tezepelumab, etigilimab, tiragotumab, placulumab, prezalumab, infliximab, nerelimomab, ozoralizumab, adalimumab, afelimomab, certolizumab pegol, golimumab, mapatumumab, conatumumab, lexatumumab, tigatuzumab, sacituzumab govitecan, votumumab, pogalizumab, letolizumab, pankomab, anatumomab mafenatox, enavatuzumab, flanvotumab, brolucizumab, ranibizumab, varisacumab, bevacizumab, faricimab, icrucumab, alacizumab pegol, ramucirumab, pritumumab, and onvatilimab.

[5951] In some aspects, the antigen binding polypeptide complexes provided herein comprise a VH3 comprising a VH of an antibody selected from the group consisting of losatuxizumab vedotin, utomilumab, urelumab, oleclumab, naptumomab estafenatox, ascrinvacumab, pintumomab, tacatuzumab tetraxetan, nesvacumab, vanucizumab, timolumab, vapaliximab, vepalimomab, enapotamab vedotin, ianalumab, belimumab, tabalumab, tibulizumab, belantamab mafodotin, teclistamab, teclistamab, detumomab, nacolomab tafenatox, eculizumab, lendalizumab, pexelizumab, pozclimab, ravulizumab, tesidolumab, vilobelimab, abagovomab, igovomab, oregovomab, sofituzumab vedotin, cantuzumab mertansine, cantuzuma bravtansine, girentuximab, altumomab pentetate, arcitumomab, besilesomab, bertilimumab, plozalizumab, mogamulizumab, leronlimab, PRO140, rovelizumab, rovelizumab, talacotuzumab, benralizumab, tavolimab, vonlerolizumab, gavilimomab, ziralimumab, fanolesomab, ipilimumab, ruplizumab, toralizumab, dapirolizumab pegol, toralizumab, dapirolizumab pegol, ruplizumab, blinatumomab, inebilizumab, loncastuximab tesirine, SGN-CD19A, tafasitamab, taplitumomab paptox, XMAB-5574, Budoprutug, Obexelimab, duvortuxizumab, englumafusp alfa, Emfizatamab, zeripatamig, siplizumab, blontuvetmab, FBTA05, ibritumomab tiuxetan, obinutuzumab, ocaratuzumab, ocrelizumab, ofatumumab, rituximab, tositumomab, ublituximab, veltuzumab, divozilimab, eramkafusp alfa, ripertamab, zuberitamab, glofitamab, nofetumomab merpentan, samalizumab, imvotamab, odronextamab, plamotamab, bectumomab, inotuzumab ozogamicin, moxetumomab pasudotox, pinatuzumab vedotin, gomiliximab, lumiliximab, inolimomab, inolimomab, daclizumab, camidanluma btesirine, basiliximab, varlilumab, omburtamab, enoblituzumab, vopratelimab, lulizumabpegol, TGN1412, muromonab-CD3, otelixizumab, teplizumab, visilizumab, epcoritamab, epcoritamab, brentuximab vedotin, iratumumab, azintuxizumab vedotin, gemtuzumab ozogamicin, lintuzumab, vadastuximab talirine, naratuximab emtansine, otlertuzumab, lilotomab satetraxetan, tetulomab, daratumumab, isatuximab, foralumab, mosunetuzumab, mosunetuzumab, cedelizumab, ibalizumab, keliximab, priliximab, tregalizumab, zanolimumab, bleselumab, iscalimab, lucatumumab, ravagalimab, selicrelumab, teneliximab, vanalimab, abciximab, bivatuzumab, iomab-B, telimomab aritox, zolimomab aritox, abituzumab, intetumumab, alemtuzumab, tamtuvetmab, lorvotuzumab mertansine, itolizumab, cusatuzumab, vorsetuzumab mafodotin, milatuzumab, iladatuzumab vedotin, polatuzumab vedotin, galiximab, cibisatamab, zolbetuximab, naxitamab, tisotumab vedotin, olendalizumab, pamrevlumab, lacnotuzumab, cabiralizumab, emactuzumab, axatilimab, gimsilumab, lenzilumab, namilumab, tremelimumab, ulocuplumab, tepoditamab, rovalpituzumab tesirine, tarlatamab, demcizumab, navicixizumab, drozitumab, parsatuzumab, depatuxizumab mafodotin, modotuximab, carotuximab, adecatumumab, adecatumumab, oportuzumab monatox, solitomab, tucotuzumab celmoleukin, edrecolomab, catumaxomab, ifabotuzumab, fibatuzumab, zalutumumab, panitumumab, cetuximab, futuximab, imgatuzumab, laprituximab emtansine, matuzumab, necitumumab, nimotuzumab, tomuzotuximab, amivantamab, amivantamab, epitumomab cituxetan, sontuzumab, duligotuzumab, elgemtumab, lumretuzumab, patritumab, seribantumab, zenocutuzumab, sibrotuzumab, burosumab, aprutumab ixadotin, radretumab, pasotuxizumab, farletuzumab, mirvetuximab soravtansine, vantictumab, TRBS07, 3F8, dinutuximab, dinutuximab beta, ecromeximab, mitumomab, andecaliximab, capromab, codrituzumab, glembatumumab vedotin, talquetamab, talquetamab, trevogrumab, indusatumab vedotin, ficlatuzumab, rilotumumab, zatuximab, pentuzimab, pentuzimab, margetuximab, timigutuzumab, trastuzumab, trastuzumab duocarmazine, trastuzumab emtansine, gancotamab, pertuzumab, ertumaxomab, emibetuzumab, telisotuzumab, telisotuzumab vedotin, derlotuximab biotin, apolizumab, onartuzumab, bersanlimab, enlimomabpegol, rontalizumab, sifalimumab, talizumab, ganitumab, istiratumab, robatumumab, teprotumumab, figitumumab, ganitumab, istiratumab, robatumumab, teprotumumab, cixutumumab, dalotuzumab, xentuzumab, dusigitumab, canakinumab, ustekinumab, ustekinumab, ustekinumab, briakinumab, briakinumab, abrezekimab, lebrikizumab, romilkimab, TNX-650, tralokinumab, anrukinzumab, brodalumab, ixekizumab, netakimab, perakizumab, secukinumab, vunakizumab, afasevikumab, afasevikumab, bimekizumab, bimekizumab, remtolumab, bermekimab, lutikizumab, lutikizumab, gevokizumab, cergutuzumab amunaleukin, fletikumab, fezakinumab, brazikumab, guselkumab, mirikizumab, tildrakizumab, risankizumab, flotetuzumab, nemolizumab, pascolizumab, dupilumab, mepolizumab, reslizumab, clazakizumab, elsilimomab, olokizumab, sarilumab, siltuximab, sirukumab, vobarilizumab, tocilizumab, SA237, satralizumab, enokizumab, prezalizumab, natalizumab, abrilumab, abrilumab, vedolizumab, volociximab, tadocizumab, etaracizumab, etrolizumab, spesolimab, vatelizumab, erlizumab, lirilumab, relatlimab, cBR96-doxorubicinimmunoconjugate, odulimomab, efalizumab, ladiratuzumab vedotin, simtuzumab, samrotamab vedotin, aselizumab, lupartumab amadotin, imalumab, carlumab, imaprelimab, amatuximab, amatuximab, anetumab ravtansine, narnatumab, clivatuzumab tetraxetan, pemtumomab, gatipotuzumab, ensituximab, lemalesomab, sulesomab, enfortumab vedotin, racotumomab, monalizumab, brontictuzumab, tarextumab, vesencumab, oxelumab, gilvetmab, tislelizumab, dostarlimab, BCD-100, nivolumab, PDR001, pembrolizumab, pidilizumab, retifanlimab, spartalizumab, sintilimab, cemiplimab, olaratumab, tovetumab, rinucumab, atezolizumab, avelumab, durvalumab, lifastuzumab vedotin, bavituximab, acapatamab, capromab, rosopatamab, nezastomig, pasotuxizumab, pelgifatamab, voxalatamab, cofetuzumab pelidotin, denosumab, rosmantuzumab, cirmtuzumab, atinumab, indatuximab ravtansine, elotuzumab, sirtratumab vedotin, sonepcizumab, vandortuzumab vedotin, minretumomab, satumomab pendetide, maslimomab, ontuxizumab, tenatumomab, fresolimumab, metelimumab, lerdelimumab, tezepelumab, etigilimab, tiragotumab, placulumab, prezalumab, infliximab, nerelimomab, ozoralizumab, adalimumab, afelimomab, certolizumab pegol, golimumab, mapatumumab, conatumumab, lexatumumab, tigatuzumab, sacituzumab govitecan, votumumab, pogalizumab, letolizumab, pankomab, anatumomab mafenatox, enavatuzumab, flanvotumab, brolucizumab, ranibizumab, varisacumab, bevacizumab, faricimab, icrucumab, alacizumab pegol, ramucirumab, pritumumab, and onvatilimab.

[5952] In some aspects, the antigen binding polypeptide complexes provided herein comprise a VL1 comprising (i) a complementarity determining region (CDR) 1 having an amino acid sequence that is at least 65%, at least 70%, at least 75%, at least 80%, at least 85%, at least 90%, at least 95%, at least 99%, or 100% identical to any one of SEQ ID NOs: 1096, 1103, 1110, 1120, 1127, 1134, 1141, 1148, 1155, 1162, 1169, 1174, 1181, 1188, 1199, 1211, 1221, 1228, 1235, 1247, 1254, 1261, 1266, 1271, 1278, 1285, 1292, 1299, 1306, 1313, 1319, 1326, 1339, 1352, 1359, 1366, 1373, 1382, 1394, 1401, 1408, 1414, 1421, 1428, 1441, 1448, 1455, 1461, 1468, 1475, 1488, 1495, 1508, 1519, 1526, 1531, 1538, 1544, 1556, 1568, 1574, 1581, 1594, 1601, 1608, 1615, 1622, 1629, 1636, 1643, 1650, 1657, 1672, 1679, 1689, 1697, 1708, 1715, 1718, 1723, 1727, 1738, 1743, 1752, 1761, 1763, 1769, 1776, and 1786; (ii) a CDR2 having an amino acid sequence that is at least 65%, at least 70%, at least 75%, at least 80%, at least 85%, at least 90%, at least 95%, at least 99%, or 100% identical to any one of SEQ ID NOs: 1200, 1212, 1680, 1690, 1698, 1709, 1728, 1739, 1744, 1753, 1770, and 1777; or at least 65%, at least 70%, at least 75%, at least 80%, at least 85%, at least 90%, at least 95%, at least 99%, or 100% identical to any one of amino acid sequences AAS, APS, AT, ATS, DAS, DDG, DDS, DT, DTS, DVS, EAS, FTS, GAF, GAN, GAS, GAT, GIS, GKN, GNS, HTS, KVS, LAS, LGS, LVS, NAK, NTN, QMS, RMS, RTS, SAS, TTS, WAS, YAS, YAT, YGS, YRS, and YTS; and (iii) a CDR3 having an amino acid sequence that is at least 65%, at least 70%, at least 75%, at least 80%, at least 85%, at least 90%, at least 95%, at least 99%, or 100% identical to any one of SEQ ID NOs: 1097, 1104, 1111, 1121, 1128, 1135, 1142, 1149, 1156, 1163, 1170, 1175, 1182, 1189, 1195, 1201, 1207, 1213, 1222, 1229, 1236, 2009, 1248, 1255, 1262, 1267, 1272, 1279, 1286, 1293, 1300, 1307, 1320, 1327, 1333, 1340, 1346, 1353, 1360, 1367, 1374, 1383, 1389, 1395, 1402, 1409, 1415, 1422, 1429, 1435, 1442, 1449, 1456, 1462, 1469, 1476, 1482, 1489, 1496, 1502, 1509, 1513, 1520, 1532, 1539, 1545, 1557, 1562, 1569, 1575, 1582, 1588, 1595, 1602, 1609, 1616, 1623, 1630, 1637, 1644, 1651, 1658, 1663, 1673, 1681, 1691, 1699, 1710, 1729, 1735, 1745, 1751, 1754, 1778, 1787, and 1976.

[5953] In some aspects, the antigen binding polypeptide complexes provided herein comprise a VL2 comprising (i) a complementarity determining region (CDR) 1 having an amino acid sequence that is at least 65%, at least 70%, at least 75%, at least 80%, at least 85%, at least 90%, at least 95%, at least 99%, or 100% identical to any one of SEQ ID NOs: 1096, 1103, 1110, 1120, 1127, 1134, 1141, 1148, 1155, 1162, 1169, 1174, 1181, 1188, 1199, 1211, 1221, 1228, 1235, 1247, 1254, 1261, 1266, 1271, 1278, 1285, 1292, 1299, 1306, 1313, 1319, 1326, 1339, 1352, 1359, 1366, 1373, 1382, 1394, 1401, 1408, 1414, 1421, 1428, 1441, 1448, 1455, 1461, 1468, 1475, 1488, 1495, 1508, 1519, 1526, 1531, 1538, 1544, 1556, 1568, 1574, 1581, 1594, 1601, 1608, 1615, 1622, 1629, 1636, 1643, 1650, 1657, 1672, 1679, 1689, 1697, 1708, 1715, 1718, 1723, 1727, 1738, 1743, 1752, 1761, 1763, 1769, 1776, and 1786; (ii) a CDR2 having an amino acid sequence that is at least 65%, at least 70%, at least 75%, at least 80%, at least 85%, at least 90%, at least 95%, at least 99%, or 100% identical to any one of SEQ ID NOs: 1200, 1212, 1680, 1690, 1698, 1709, 1728, 1739, 1744, 1753, 1770, and 1777; or at least 65%, at least 70%, at least 75%, at least 80%, at least 85%, at least 90%, at least 95%, at least 99%, or 100% identical to any one of amino acid sequences AAS, APS, AT, ATS, DAS, DDG, DDS, DT, DTS, DVS, EAS, FTS, GAF, GAN, GAS, GAT, GIS, GKN, GNS, HTS, KVS, LAS, LGS, LVS, NAK, NTN, QMS, RMS, RTS, SAS, TTS, WAS, YAS, YAT, YGS, YRS, and YTS; and (iii) a CDR3 having an amino acid sequence that is at least 65%, at least 70%, at least 75%, at least 80%, at least 85%, at least 90%, at least 95%, at least 99%, or 100% identical to any one of SEQ ID NOs: 1097, 1104, 1111, 1121, 1128, 1135, 1142, 1149, 1156, 1163, 1170, 1175, 1182, 1189, 1195, 1201, 1207, 1213, 1222, 1229, 1236, 2009, 1248, 1255, 1262, 1267, 1272, 1279, 1286, 1293, 1300, 1307, 1320, 1327, 1333, 1340, 1346, 1353, 1360, 1367, 1374, 1383, 1389, 1395, 1402, 1409, 1415, 1422, 1429, 1435, 1442, 1449, 1456, 1462, 1469, 1476, 1482, 1489, 1496, 1502, 1509, 1513, 1520, 1532, 1539, 1545, 1557, 1562, 1569, 1575, 1582, 1588, 1595, 1602, 1609, 1616, 1623, 1630, 1637, 1644, 1651, 1658, 1663, 1673, 1681, 1691, 1699, 1710, 1729, 1735, 1745, 1751, 1754, 1778, 1787, and 1976.

[5954] In some aspects, the antigen binding polypeptide complexes provided herein comprise a VL3 comprising (i) a complementarity determining region (CDR) 1 having an amino acid sequence that is at least 65%, at least 70%, at least 75%, at least 80%, at least 85%, at least 90%, at least 95%, at least 99%, or 100% identical to any one of SEQ ID NOs: 1096, 1103, 1110, 1120, 1127, 1134, 1141, 1148, 1155, 1162, 1169, 1174, 1181, 1188, 1199, 1211, 1221, 1228, 1235, 1247, 1254, 1261, 1266, 1271, 1278, 1285, 1292, 1299, 1306, 1313, 1319, 1326, 1339, 1352, 1359, 1366, 1373, 1382, 1394, 1401, 1408, 1414, 1421, 1428, 1441, 1448, 1455, 1461, 1468, 1475, 1488, 1495, 1508, 1519, 1526, 1531, 1538, 1544, 1556, 1568, 1574, 1581, 1594, 1601, 1608, 1615, 1622, 1629, 1636, 1643, 1650, 1657, 1672, 1679, 1689, 1697, 1708, 1715, 1718, 1723, 1727, 1738, 1743, 1752, 1761, 1763, 1769, 1776, and 1786; (ii) a CDR2 having an amino acid sequence that is at least 65%, at least 70%, at least 75%, at least 80%, at least 85%, at least 90%, at least 95%, at least 99%, or 100% identical to any one of SEQ ID NOs: 1200, 1212, 1680, 1690, 1698, 1709, 1728, 1739, 1744, 1753, 1770, and 1777; or at least 65%, at least 70%, at least 75%, at least 80%, at least 85%, at least 90%, at least 95%, at least 99%, or 100% identical to any one of amino acid sequences AAS, APS, AT, ATS, DAS, DDG, DDS, DT, DTS, DVS, EAS, FTS, GAF, GAN, GAS, GAT, GIS, GKN, GNS, HTS, KVS, LAS, LGS, LVS, NAK, NTN, QMS, RMS, RTS, SAS, TTS, WAS, YAS, YAT, YGS, YRS, and YTS; and (iii) a CDR3 having an amino acid sequence that is at least 65%, at least 70%, at least 75%, at least 80%, at least 85%, at least 90%, at least 95%, at least 99%, or 100% identical to any one of SEQ ID NOs: 1097, 1104, 1111, 1121, 1128, 1135, 1142, 1149, 1156, 1163, 1170, 1175, 1182, 1189, 1195, 1201, 1207, 1213, 1222, 1229, 1236, 2009, 1248, 1255, 1262, 1267, 1272, 1279, 1286, 1293, 1300, 1307, 1320, 1327, 1333, 1340, 1346, 1353, 1360, 1367, 1374, 1383, 1389, 1395, 1402, 1409, 1415, 1422, 1429, 1435, 1442, 1449, 1456, 1462, 1469, 1476, 1482, 1489, 1496, 1502, 1509, 1513, 1520, 1532, 1539, 1545, 1557, 1562, 1569, 1575, 1582, 1588, 1595, 1602, 1609, 1616, 1623, 1630, 1637, 1644, 1651, 1658, 1663, 1673, 1681, 1691, 1699, 1710, 1729, 1735, 1745, 1751, 1754, 1778, 1787, and 1976.

[5955] In some aspects, the antigen binding polypeptide complexes provided herein comprise a VH1 comprising (i) a complementarity determining region (CDR) 1 having an amino acid sequence that is at least 65%, at least 70%, at least 75%, at least 80%, at least 85%, at least 90%, at least 95%, at least 99%, or 100% identical to any one of SEQ ID NOs: 1099, 1106, 1113, 1117, 1123, 1130, 1137, 1144, 1151, 1158, 1165, 1177, 1184, 1191, 1203, 1215, 1224, 1231, 1238, 1243, 1250, 1257, 1264, 1274, 1281, 1288, 1295, 1302, 1309, 1315, 1322, 1329, 1335, 1342, 1348, 1355, 1362, 1369, 1376, 1385, 1397, 1404, 1417, 1424, 1431, 1437, 1444, 1451, 1458, 1464, 1471, 1478, 1484, 1491, 1498, 1504, 1511, 1515, 1522, 1534, 1547, 1552, 1564, 1577, 1584, 1590, 1597, 1604, 1611, 1618, 1625, 1632, 1639, 1646, 1653, 1660, 1665, 1675, 1683, 1693, 1701, 1705, 1716, 1719, 1731, 1736, 1747, 1756, 1772, 1780, and 1789; (ii) a CDR2 having an amino acid sequence that is at least 65%, at least 70%, at least 75%, at least 80%, at least 85%, at least 90%, at least 95%, at least 99%, or 100% identical to any one of SEQ ID NOs: 1100, 1107, 1114, 1118, 1124, 1131, 1138, 1145, 1152, 1159, 1166, 1178, 1185, 1192, 1204, 1216, 1225, 1232, 1239, 1244, 1251, 1258, 1275, 1282, 1289, 1296, 1303, 1310, 1316, 1323, 1330, 1336, 1343, 1349, 1356, 1363, 1370, 1377, 1386, 1391, 1398, 1405, 1411, 1418, 1425, 1432, 1438, 1445, 1452, 1465, 1472, 1479, 1485, 1492, 1499, 1505, 1516, 1523, 1528, 1535, 1541, 1548, 1553, 1559, 1565, 1571, 1578, 1585, 1591, 1598, 1605, 1612, 1619, 1626, 1633, 1640, 1647, 1654, 1666, 1676, 1684, 1687, 1694, 1702, 1706, 1712, 1717, 1720, 1725, 1732, 1737, 1741, 1748, 1757, 1767, 1773, 1781, and 1790; and (iii) a CDR3 having an amino acid sequence that is at least 65%, at least 70%, at least 75%, at least 80%, at least 85%, at least 90%, at least 95%, at least 99%, or 100% identical to any one of SEQ ID NOs: 1101, 1108, 1115, 1125, 1132, 1139, 1146, 1153, 1160, 1167, 1172, 1179, 1186, 1193, 1197, 1205, 1209, 1217, 1226, 1233, 1240, 1245, 1252, 1259, 1269, 1276, 1283, 1290, 1297, 1304, 1311, 1317, 1324, 1331, 1337, 1344, 1350, 1357, 1364, 1371, 1378, 1387, 1392, 1399, 1406, 1412, 1419, 1426, 1433, 1439, 1446, 1453, 1459, 1466, 1473, 1480, 1486, 1493, 1500, 1506, 1517, 1524, 1529, 1536, 1542, 1549, 1554, 1560, 1566, 1572, 1579, 1586, 1592, 1599, 1606, 1613, 1620, 1627, 1634, 1641, 1648, 1655, 1661, 1667, 1670, 1677, 1685, 1688, 1695, 1703, 1707, 1713, 1733, 1749, 1758, 1762, 1774, 1782, 1791, and 1975.

[5956] In some aspects, the antigen binding polypeptide complexes provided herein comprise a VH2 comprising (i) a complementarity determining region (CDR) 1 having an amino acid sequence that is at least 65%, at least 70%, at least 75%, at least 80%, at least 85%, at least 90%, at least 95%, at least 99%, or 100% identical to any one of SEQ ID NOs: 1099, 1106, 1113, 1117, 1123, 1130, 1137, 1144, 1151, 1158, 1165, 1177, 1184, 1191, 1203, 1215, 1224, 1231, 1238, 1243, 1250, 1257, 1264, 1274, 1281, 1288, 1295, 1302, 1309, 1315, 1322, 1329, 1335, 1342, 1348, 1355, 1362, 1369, 1376, 1385, 1397, 1404, 1417, 1424, 1431, 1437, 1444, 1451, 1458, 1464, 1471, 1478, 1484, 1491, 1498, 1504, 1511, 1515, 1522, 1534, 1547, 1552, 1564, 1577, 1584, 1590, 1597, 1604, 1611, 1618, 1625, 1632, 1639, 1646, 1653, 1660, 1665, 1675, 1683, 1693, 1701, 1705, 1716, 1719, 1731, 1736, 1747, 1756, 1772, 1780, and 1789; (ii) a CDR2 having an amino acid sequence that is at least 65%, at least 70%, at least 75%, at least 80%, at least 85%, at least 90%, at least 95%, at least 99%, or 100% identical to any one of SEQ ID NOs: 1100, 1107, 1114, 1118, 1124, 1131, 1138, 1145, 1152, 1159, 1166, 1178, 1185, 1192, 1204, 1216, 1225, 1232, 1239, 1244, 1251, 1258, 1275, 1282, 1289, 1296, 1303, 1310, 1316, 1323, 1330, 1336, 1343, 1349, 1356, 1363, 1370, 1377, 1386, 1391, 1398, 1405, 1411, 1418, 1425, 1432, 1438, 1445, 1452, 1465, 1472, 1479, 1485, 1492, 1499, 1505, 1516, 1523, 1528, 1535, 1541, 1548, 1553, 1559, 1565, 1571, 1578, 1585, 1591, 1598, 1605, 1612, 1619, 1626, 1633, 1640, 1647, 1654, 1666, 1676, 1684, 1687, 1694, 1702, 1706, 1712, 1717, 1720, 1725, 1732, 1737, 1741, 1748, 1757, 1767, 1773, 1781, and 1790; and (iii) a CDR3 having an amino acid sequence that is at least 65%, at least 70%, at least 75%, at least 80%, at least 85%, at least 90%, at least 95%, at least 99%, or 100% identical to any one of SEQ ID NOs: 1101, 1108, 1115, 1125, 1132, 1139, 1146, 1153, 1160, 1167, 1172, 1179, 1186, 1193, 1197, 1205, 1209, 1217, 1226, 1233, 1240, 1245, 1252, 1259, 1269, 1276, 1283, 1290, 1297, 1304, 1311, 1317, 1324, 1331, 1337, 1344, 1350, 1357, 1364, 1371, 1378, 1387, 1392, 1399, 1406, 1412, 1419, 1426, 1433, 1439, 1446, 1453, 1459, 1466, 1473, 1480, 1486, 1493, 1500, 1506, 1517, 1524, 1529, 1536, 1542, 1549, 1554, 1560, 1566, 1572, 1579, 1586, 1592, 1599, 1606, 1613, 1620, 1627, 1634, 1641, 1648, 1655, 1661, 1667, 1670, 1677, 1685, 1688, 1695, 1703, 1707, 1713, 1733, 1749, 1758, 1762, 1774, 1782, 1791, and 1975.

[5957] In some aspects, the antigen binding polypeptide complexes provided herein comprise a VH3 comprising (i) a complementarity determining region (CDR) 1 having an amino acid sequence that is at least 65%, at least 70%, at least 75%, at least 80%, at least 85%, at least 90%, at least 95%, at least 99%, or 100% identical to any one of SEQ ID NOs: 1099, 1106, 1113, 1117, 1123, 1130, 1137, 1144, 1151, 1158, 1165, 1177, 1184, 1191, 1203, 1215, 1224, 1231, 1238, 1243, 1250, 1257, 1264, 1274, 1281, 1288, 1295, 1302, 1309, 1315, 1322, 1329, 1335, 1342, 1348, 1355, 1362, 1369, 1376, 1385, 1397, 1404, 1417, 1424, 1431, 1437, 1444, 1451, 1458, 1464, 1471, 1478, 1484, 1491, 1498, 1504, 1511, 1515, 1522, 1534, 1547, 1552, 1564, 1577, 1584, 1590, 1597, 1604, 1611, 1618, 1625, 1632, 1639, 1646, 1653, 1660, 1665, 1675, 1683, 1693, 1701, 1705, 1716, 1719, 1731, 1736, 1747, 1756, 1772, 1780, and 1789; (ii) a CDR2 having an amino acid sequence that is at least 65%, at least 70%, at least 75%, at least 80%, at least 85%, at least 90%, at least 95%, at least 99%, or 100% identical to any one of SEQ ID NOs: 1100, 1107, 1114, 1118, 1124, 1131, 1138, 1145, 1152, 1159, 1166, 1178, 1185, 1192, 1204, 1216, 1225, 1232, 1239, 1244, 1251, 1258, 1275, 1282, 1289, 1296, 1303, 1310, 1316, 1323, 1330, 1336, 1343, 1349, 1356, 1363, 1370, 1377, 1386, 1391, 1398, 1405, 1411, 1418, 1425, 1432, 1438, 1445, 1452, 1465, 1472, 1479, 1485, 1492, 1499, 1505, 1516, 1523, 1528, 1535, 1541, 1548, 1553, 1559, 1565, 1571, 1578, 1585, 1591, 1598, 1605, 1612, 1619, 1626, 1633, 1640, 1647, 1654, 1666, 1676, 1684, 1687, 1694, 1702, 1706, 1712, 1717, 1720, 1725, 1732, 1737, 1741, 1748, 1757, 1767, 1773, 1781, and 1790; and (iii) a CDR3 having an amino acid sequence that is at least 65%, at least 70%, at least 75%, at least 80%, at least 85%, at least 90%, at least 95%, at least 99%, or 100% identical to any one of SEQ ID NOs: 1101, 1108, 1115, 1125, 1132, 1139, 1146, 1153, 1160, 1167, 1172, 1179, 1186, 1193, 1197, 1205, 1209, 1217, 1226, 1233, 1240, 1245, 1252, 1259, 1269, 1276, 1283, 1290, 1297, 1304, 1311, 1317, 1324, 1331, 1337, 1344, 1350, 1357, 1364, 1371, 1378, 1387, 1392, 1399, 1406, 1412, 1419, 1426, 1433, 1439, 1446, 1453, 1459, 1466, 1473, 1480, 1486, 1493, 1500, 1506, 1517, 1524, 1529, 1536, 1542, 1549, 1554, 1560, 1566, 1572, 1579, 1586, 1592, 1599, 1606, 1613, 1620, 1627, 1634, 1641, 1648, 1655, 1661, 1667, 1670, 1677, 1685, 1688, 1695, 1703, 1707, 1713, 1733, 1749, 1758, 1762, 1774, 1782, 1791, and 1975.

[5958] In some aspects, the antigen binding polypeptide complexes provided herein comprise a VL1 comprising an amino acid sequence that is at least 65%, at least 70%, at least 75%, at least 80%, at least 85%, at least 90%, at least 95%, at least 99%, or 100% identical to any one of SEQ ID NOs: 1098, 1105, 1112, 1122, 1129, 1136, 1143, 1150, 1157, 1164, 1171, 1176, 1183, 1190, 1196, 1202, 1208, 1214, 1219, 1223, 1230, 1237, 1242, 1249, 1256, 1263, 1268, 1273, 1280, 1287, 1294, 1301, 1308, 1314, 1321, 1328, 1334, 1341, 1347, 1354, 1361, 1368, 1375, 1380, 1384, 1390, 1396, 1403, 1410, 1416, 1423, 1430, 1436, 1443, 1450, 1457, 1463, 1470, 1477, 1483, 1490, 1497, 1503, 1510, 1514, 1521, 1527, 1533, 1540, 1546, 1551, 1558, 1563, 1570, 1576, 1583, 1589, 1596, 1603, 1610, 1617, 1624, 1631, 1638, 1645, 1652, 1659, 1664, 1669, 1674, 1682, 1692, 1700, 1711, 1721, 1724, 1730, 1740, 1746, 1755, 1764, 1766, 1771, 1779, 1784, and 1788.

[5959] In some aspects, the antigen binding polypeptide complexes provided herein comprise a VL2 comprising an amino acid sequence that is at least 65%, at least 70%, at least 75%, at least 80%, at least 85%, at least 90%, at least 95%, at least 99%, or 100% identical to any one of SEQ ID NOs: 1098, 1105, 1112, 1122, 1129, 1136, 1143, 1150, 1157, 1164, 1171, 1176, 1183, 1190, 1196, 1202, 1208, 1214, 1219, 1223, 1230, 1237, 1242, 1249, 1256, 1263, 1268, 1273, 1280, 1287, 1294, 1301, 1308, 1314, 1321, 1328, 1334, 1341, 1347, 1354, 1361, 1368, 1375, 1380, 1384, 1390, 1396, 1403, 1410, 1416, 1423, 1430, 1436, 1443, 1450, 1457, 1463, 1470, 1477, 1483, 1490, 1497, 1503, 1510, 1514, 1521, 1527, 1533, 1540, 1546, 1551, 1558, 1563, 1570, 1576, 1583, 1589, 1596, 1603, 1610, 1617, 1624, 1631, 1638, 1645, 1652, 1659, 1664, 1669, 1674, 1682, 1692, 1700, 1711, 1721, 1724, 1730, 1740, 1746, 1755, 1764, 1766, 1771, 1779, 1784, and 1788.

[5960] In some aspects, the antigen binding polypeptide complexes provided herein comprise a VL3 comprising an amino acid sequence that is at least 65%, at least 70%, at least 75%, at least 80%, at least 85%, at least 90%, at least 95%, at least 99%, or 100% identical to any one of SEQ ID NOs: 1098, 1105, 1112, 1122, 1129, 1136, 1143, 1150, 1157, 1164, 1171, 1176, 1183, 1190, 1196, 1202, 1208, 1214, 1219, 1223, 1230, 1237, 1242, 1249, 1256, 1263, 1268, 1273, 1280, 1287, 1294, 1301, 1308, 1314, 1321, 1328, 1334, 1341, 1347, 1354, 1361, 1368, 1375, 1380, 1384, 1390, 1396, 1403, 1410, 1416, 1423, 1430, 1436, 1443, 1450, 1457, 1463, 1470, 1477, 1483, 1490, 1497, 1503, 1510, 1514, 1521, 1527, 1533, 1540, 1546, 1551, 1558, 1563, 1570, 1576, 1583, 1589, 1596, 1603, 1610, 1617, 1624, 1631, 1638, 1645, 1652, 1659, 1664, 1669, 1674, 1682, 1692, 1700, 1711, 1721, 1724, 1730, 1740, 1746, 1755, 1764, 1766, 1771, 1779, 1784, and 1788.

[5961] In some aspects, the antigen binding polypeptide complexes provided herein comprise a VH1 comprising an amino acid sequence that is at least 65%, at least 70%, at least 75%, at least 80%, at least 85%, at least 90%, at least 95%, at least 99%, or 100% identical to any one of SEQ ID NOs: 1102, 1109, 1116, 1119, 1126, 1133, 1140, 1147, 1154, 1161, 1168, 1173, 1180, 1187, 1194, 1198, 1206, 1210, 1218, 1220, 1227, 1234, 1241, 1246, 1253, 1260, 1265, 1270, 1277, 1284, 1291, 1298, 1305, 1312, 1318, 1325, 1332, 1338, 1345, 1351, 1358, 1365, 1372, 1379, 1381, 1388, 1393, 1400, 1407, 1413, 1420, 1427, 1434, 1440, 1447, 1454, 1460, 1467, 1474, 1481, 1487, 1494, 1501, 1507, 1512, 1518, 1525, 1530, 1537, 1543, 1550, 1555, 1561, 1567, 1573, 1580, 1587, 1593, 1600, 1607, 1614, 1621, 1628, 1635, 1642, 1649, 1656, 1662, 1668, 1671, 1678, 1686, 1696, 1704, 1714, 1722, 1726, 1734, 1742, 1750, 1759, 1760, 1765, 1768, 1775, 1783, 1785, and 1792.

[5962] In some aspects, the antigen binding polypeptide complexes provided herein comprise a VH2 comprising an amino acid sequence that is at least 65%, at least 70%, at least 75%, at least 80%, at least 85%, at least 90%, at least 95%, at least 99%, or 100% identical to any one of SEQ ID NOs: 1102, 1109, 1116, 1119, 1126, 1133, 1140, 1147, 1154, 1161, 1168, 1173, 1180, 1187, 1194, 1198, 1206, 1210, 1218, 1220, 1227, 1234, 1241, 1246, 1253, 1260, 1265, 1270, 1277, 1284, 1291, 1298, 1305, 1312, 1318, 1325, 1332, 1338, 1345, 1351, 1358, 1365, 1372, 1379, 1381, 1388, 1393, 1400, 1407, 1413, 1420, 1427, 1434, 1440, 1447, 1454, 1460, 1467, 1474, 1481, 1487, 1494, 1501, 1507, 1512, 1518, 1525, 1530, 1537, 1543, 1550, 1555, 1561, 1567, 1573, 1580, 1587, 1593, 1600, 1607, 1614, 1621, 1628, 1635, 1642, 1649, 1656, 1662, 1668, 1671, 1678, 1686, 1696, 1704, 1714, 1722, 1726, 1734, 1742, 1750, 1759, 1760, 1765, 1768, 1775, 1783, 1785, and 1792.

[5963] In some aspects, the antigen binding polypeptide complexes provided herein comprise a VH3 comprising an amino acid sequence that is at least 65%, at least 70%, at least 75%, at least 80%, at least 85%, at least 90%, at least 95%, at least 99%, or 100% identical to any one of SEQ ID NOs: 1102, 1109, 1116, 1119, 1126, 1133, 1140, 1147, 1154, 1161, 1168, 1173, 1180, 1187, 1194, 1198, 1206, 1210, 1218, 1220, 1227, 1234, 1241, 1246, 1253, 1260, 1265, 1270, 1277, 1284, 1291, 1298, 1305, 1312, 1318, 1325, 1332, 1338, 1345, 1351, 1358, 1365, 1372, 1379, 1381, 1388, 1393, 1400, 1407, 1413, 1420, 1427, 1434, 1440, 1447, 1454, 1460, 1467, 1474, 1481, 1487, 1494, 1501, 1507, 1512, 1518, 1525, 1530, 1537, 1543, 1550, 1555, 1561, 1567, 1573, 1580, 1587, 1593, 1600, 1607, 1614, 1621, 1628, 1635, 1642, 1649, 1656, 1662, 1668, 1671, 1678, 1686, 1696, 1704, 1714, 1722, 1726, 1734, 1742, 1750, 1759, 1760, 1765, 1768, 1775, 1783, 1785, and 1792.

[5964] In some aspects, the infectious disease antigen that is not a sarbecovirus antigen is:
[5965] (i) a viral antigen elected from the group consisting of an influenza virus (A, B, C) antigen (e.g., influenza virus envelope proteins, for example, influenza virus neuraminidase (NA, N1, N2, N3, N4, N5, N6, N7, N8, N9, N10, N11), influenza virus hemagglutinin (H1, H2, H3, H4, H5, H6, H7, H8, H9, H10, H11, H12, H13, H14, H15, H16, H17, H18) (e.g., H1N1, H3N2, H5N1, H7N9, H9N2), Yamagata virus antigen, Victoria virus antigen, influenza virus structural proteins (e.g., M1, M2, capsid protein), influenza virus functional proteins (e.g., ribonucleoprotein (NP), primary interferon antagonist (NS1), nuclear export protein (NEP)) influenza virus accessory proteins (e.g., PB2, PB1, or PA), for example, anti-HA, anti-NA, anti-H1, anti-H3, anti-H5, anti-H7, anti-H9, anti-N1, anti-N2, anti-N9, anti-H1N1, anti-H3N2, anti-H5N1, anti-H7N9, anti-H9N2, anti-A protein, anti-B protein, anti-stem, anti-M1, anti-M2, anti-capsid, anti-NP, anti-NS1, anti-NEP, anti-PB1, anti-PB2, and anti-PA); a swine influenza virus antigen (e.g., swine flu hemagglutinin, swine flu neuraminidase); a classical swine fever (CSF) (hog colera) virus antigen; an equine influenza virus antigen (e.g., equine influenza virus typeA/Miami 63 neuraminidase, equine influenza virus type A/Kentucky 81 neuraminidase, equine influenza virus type A/Alaska 91 neuraminidase); parainfluenza viruses (e.g., bovine parainfluenza virus, bovine parainfluenza virus type 3 fusion protein, bovine parainfluenza virus type 3 hemagglutinin neuraminidase); a (human) respiratory syncytial virus (RSV)-viral antigen (e.g., RSV F glycoprotein, RSV G glycoprotein, F protein of respiratory syncytial virus, RSV fusion glycoprotein); a herpes simplex virus (HSV) antigen (e.g., herpes simplex virus glycoproteins gB, gC, gD, and gE, herpes simplex virus type 2 glycoprotein gB); a Dengue virus antigen (e.g., core protein, matrix protein, glycoprotein E of Dengue virus, or other protein of Dengue virus); a measles virus antigen (e.g., hemagglutinin); a poliovirus 1 antigen (e.g., poliovirus 1 proteins (VP1)), a HIV-1 antigen and HIV-2 antigen (e.g., HIV envelope proteins (e.g., envelope glycoproteins of HIV 1, HIV envelope glycoprotein (Env), HIV envelope glycoprotein gp160, HIV envelope surface glycoprotein gp120, HIV transmembrane envelope protein gp41), HIV structural proteins (e.g., p17, p24, p7, p55), HIV functional proteins (e.g., p66, HIV-1 protease (PR), p31), HIV accessory proteins (e.g., Nef, Tat, Rev, Vif, Vpr, Vpu)); a hepatitis virus (HAV, HBV, HCV, HDV, HEV) antigen (e.g., hepatitis B virus antigen (e.g., surface antigen, core protein), hepatitis C virus antigen (e.g., glycoprotein E1E2)); a rabies virus (Rabies lyssavirus) antigen (e.g., rabies virus glycoprotein, e.g., G glycoprotein); a pseudorabies virus antigen (e.g., pseudorabies virus g50 (gpD), pseudorabies virus II (gpB), pseudorabies virus III (gpC), pseudorabies virus glycoprotein H, pseudorabies virus glycoprotein E); a papillomavirus (HPV) antigen; an Epstein-Barr virus (EBV) (Gamma herpes virus 4) antigen; a Herpes simplex virus (HSV, HSV-1, HSV-2) antigen (e.g., human herpes virus 8, equine herpes virus antigen (e.g., type 1 glycoprotein B, type 1 glycoprotein D)); a Herpes zoster antigen; a Cytomegalovirus antigen (e.g., cytomegalovirus glycoprotein B); a Zika virus antigen; a Transmissible gastroenteritis virus (TGEV) antigen (e.g., glycoprotein 195, matrix protein); a rotavirus antigen (e.g., swine rotavirus glycoprotein 38); a parvovirus antigen (e.g., swine parvovirus capsid protein); a filoviruses (e.g., Marburg and Ebola) antigen; a bovine viral diarrhea virus antigen (e.g., glycoprotein 55); a Newcastle disease virus antigen (hemagglutinin, neuraminidase); an orthopoxvirus antigen; a coxsackievirus antigen and aphthovirus (foot and mouth disease virus) antigen; a yellow fever virus antigen; a Chikunga virus antigen; a Nipah virus antigen; an African swine fever virus antigen; a rhinotracheitis virus antigen (e.g., infectious bovine rhinotracheitis virus glycoprotein E, glycoprotein G); a laryngotracheitis virus antigen (e.g., infectious laryngotracheitis virus glycoprotein G or glycoprotein I); a La Crosse virus antigen (e.g., La Crosse virus glycoprotein); a neonatal calf diarrhoea virus antigen; a Venezuelan equine encephalomyelitis virus antigen; a punta toro virus antigen; a murine leukemia virus antigen; a mouse mammary tumor virus antigen; a bovine respiratory syncytial virus antigen (e.g., bovine respiratory syncytial virus attachment protein (BRSV G), bovine respiratory syncytial virus fusion protein (BRSV F), bovine respiratory syncytial virus nucleocapsid protein (BRSVN)); a bovine E viral diarrhoea virus antigen (e.g., glycoprotein 48 and glycoprotein 53); a metapneumovirus (HMPV) antigen; and an Ebola virus antigen (e.g., ebolavirus glycoprotein, e.g., Zaire ebolavirus glycoprotein); or

[5966] (ii) a bacterial or parasite antigen selected from the group consisting of a Plasmodium (e.g., Plasmodium falciparum, Plasmodium vivax, Plasmodium malariae, Plasmodium ovale, Plasmodium knowlesi) antigen, a Streptococcus (e.g., Streptococcus pneumoniae, Streptococcus pyogenes, Streptococcus agalactiae, Streptococcus mutans, Streptococcus viridans, Streptococcus anginosus, Streptococcus intermedius, Streptococcus constellatus) antigen (e.g., 24M epitope), a Neisseria gonorrhoeae antigen (e.g., gonococcal pilin), a Corynebacterium antigen (e.g., Corynebacterium diphtheria (diptheria toxin), Corynebacterium ulcerans, Corynebacterium pseudotuberculosis), Mycobacterium tuberculosis antigens, Brachyspira hyodysenteriae (Serpulina hydodysenteriae) antigen (e.g., Serpulina hydodysenteriae protective antigen), a Chlamydia antigen (e.g., Chlamydia trachomatis) (e.g., MOMP and PorB), a Mycoplasma sp. (e.g., Mycoplasma genitalium, Mycoplasma hyopneumoniae, Mycoplasma pneumonia) antigen, a Staphylococcus (e.g., Staphylococcus aureus, coagulase-negative staphylococci (CoNS), Staphylococcus aureus alpha toxin, Staphylococcus aureus bi-component leucocidin) antigen, a Klebsiella sp. antigen, an Escherichia coli antigen (e.g., E. coli shiga toxin type-2, E. coli shiga toxin type-1), a Bacillus sp. (e.g., Bacillus anthracis, e.g., Bacillus anthracis anthrax) antigen, a Pseudomonas aeruginosa antigen (e.g., Pseudomonas aeruginosa type III secretion system), an Enterococcus sp. antigen, an Enterobacter sp. antigen, a Proteus sp. antigen, an Actinobacter sp. antigen, a Mycobacterium avium (Mycobacterium avium complex (MAC)) antigen, a Salmonella bacteria antigen, a Clostridium difficile antigen, a Toxoplasma (e.g., Toxoplasma gondii) antigen, a Histoplasma antigen, a Candida antigen, a Coccidioides antigen, a Cryptococcus antigen, a Cryptosporidium antigen, and a Cystoisospora (e.g., Cystoisospora belli) antigen, and another antigen (e.g., endotoxins, lymphotoxins (e.g., lymphotoxin alpha LTA), phosphatidylserine, Hsp90, CCR5, lipoteichoic acid, clumping factor A).

[5967] In some aspects, the antigen binding polypeptide complexes provided herein comprise a VL1 comprising a light chain complementarity determining region 1 (LCDR1), LCDR2, and/or LCDR3 of an antibody selected from the group consisting of libivirumab, rmab, rivabazumab pegol, setoxaximab, suvizumab, suvratoxumab, sevirumab, pritoxaximab, porgaviximab, REGN-EB3, obiltoxaximab, gedivumab, foravirumab, larcaviximab, motavizumab, palivizumab, rafivirumab, regavirumab, tuvirumab, cosfroviximab, felvizumab, atidortoxumab, edobacomab, nebacumab, pateclizumab, raxibacumab, urtoxazumab, tosatoxumab, berlimatoxumab, CR6261, diridavumab, firivumab, lesofavumab, navivumab, exbivirumab, lenvervimab, bavituximab, bezlotoxumab, efungumab, leronlimab, nirsevimab, pagibaximab, panobacumab, tefibazumab, ansuvimab, atoltivimab, maftivimab, and odesivimab.

[5968] In some aspects, the antigen binding polypeptide complexes provided herein comprise a VL2 comprising a light chain complementarity determining region 1 (LCDR1), LCDR2, and/or LCDR3 of an antibody selected from the group consisting of libivirumab, rmab, rivabazumab pegol, setoxaximab, suvizumab, suvratoxumab, sevirumab, pritoxaximab, porgaviximab, REGN-EB3, obiltoxaximab, gedivumab, foravirumab, larcaviximab, motavizumab, palivizumab, rafivirumab, regavirumab, tuvirumab, cosfroviximab, felvizumab, atidortoxumab, edobacomab, nebacumab, pateclizumab, raxibacumab, urtoxazumab, tosatoxumab, berlimatoxumab, CR6261, diridavumab, firivumab, lesofavumab, navivumab, exbivirumab, lenvervimab, bavituximab, bezlotoxumab, efungumab, leronlimab, nirsevimab, pagibaximab, panobacumab, tefibazumab, ansuvimab, atoltivimab, maftivimab, and odesivimab.

[5969] In some aspects, the antigen binding polypeptide complexes provided herein comprise a VL3 comprising a light chain complementarity determining region 1 (LCDR1), LCDR2, and/or LCDR3 of an antibody selected from the group consisting of libivirumab, rmab, rivabazumab pegol, setoxaximab, suvizumab, suvratoxumab, sevirumab, pritoxaximab, porgaviximab, REGN-EB3, obiltoxaximab, gedivumab, foravirumab, larcaviximab, motavizumab, palivizumab, rafivirumab, regavirumab, tuvirumab, cosfroviximab, felvizumab, atidortoxumab, edobacomab, nebacumab, pateclizumab, raxibacumab, urtoxazumab, tosatoxumab, berlimatoxumab, CR6261, diridavumab, firivumab, lesofavumab, navivumab, exbivirumab, lenvervimab, bavituximab, bezlotoxumab, efungumab, leronlimab, nirsevimab, pagibaximab, panobacumab, tefibazumab, ansuvimab, atoltivimab, maftivimab, and odesivimab.

[5970] In some aspects, the antigen binding polypeptide complexes provided herein comprise a VH1 comprising a heavy chain complementarity determining region 1 (HCDR1), HCDR2, and/or HCDR3 of an antibody selected from the group consisting of libivirumab, rmab, rivabazumab pegol, setoxaximab, suvizumab, suvratoxumab, sevirumab, pritoxaximab, porgaviximab, REGN-EB3, obiltoxaximab, gedivumab, foravirumab, larcaviximab, motavizumab, palivizumab, rafivirumab, regavirumab, tuvirumab, cosfroviximab, felvizumab, atidortoxumab, edobacomab, nebacumab, pateclizumab, raxibacumab, urtoxazumab, tosatoxumab, berlimatoxumab, CR6261, diridavumab, firivumab, lesofavumab, navivumab, exbivirumab, lenvervimab, bavituximab, bezlotoxumab, efungumab, leronlimab, nirsevimab, pagibaximab, panobacumab, tefibazumab, ansuvimab, atoltivimab, maftivimab, and odesivimab.

[5971] In some aspects, the antigen binding polypeptide complexes provided herein comprise a VH2 comprising a heavy chain complementarity determining region 1 (HCDR1), HCDR2, and/or HCDR3 of an antibody selected from the group consisting of libivirumab, rmab, rivabazumab pegol, setoxaximab, suvizumab, suvratoxumab, sevirumab, pritoxaximab, porgaviximab, REGN-EB3, obiltoxaximab, gedivumab, foravirumab, larcaviximab, motavizumab, palivizumab, rafivirumab, regavirumab, tuvirumab, cosfroviximab, felvizumab, atidortoxumab, edobacomab, nebacumab, pateclizumab, raxibacumab, urtoxazumab, tosatoxumab, berlimatoxumab, CR6261, diridavumab, firivumab, lesofavumab, navivumab, exbivirumab, lenvervimab, bavituximab, bezlotoxumab, efungumab, leronlimab, nirsevimab, pagibaximab, panobacumab, tefibazumab, ansuvimab, atoltivimab, maftivimab, and odesivimab.

[5972] In some aspects, the antigen binding polypeptide complexes provided herein comprise a VH3 comprising a heavy chain complementarity determining region 1 (HCDR1), HCDR2, and/or HCDR3 of an antibody selected from the group consisting of libivirumab, rmab, rivabazumab pegol, setoxaximab, suvizumab, suvratoxumab, sevirumab, pritoxaximab, porgaviximab, REGN-EB3, obiltoxaximab, gedivumab, foravirumab, larcaviximab, motavizumab, palivizumab, rafivirumab, regavirumab, tuvirumab, cosfroviximab, felvizumab, atidortoxumab, edobacomab, nebacumab, pateclizumab, raxibacumab, urtoxazumab, tosatoxumab, berlimatoxumab, CR6261, diridavumab, firivumab, lesofavumab, navivumab, exbivirumab, lenvervimab, bavituximab, bezlotoxumab, efungumab, leronlimab, nirsevimab, pagibaximab, panobacumab, tefibazumab, ansuvimab, atoltivimab, maftivimab, and odesivimab.

[5973] In some aspects, the antigen binding polypeptide complexes provided herein comprise a VL1 comprising a VL of an antibody selected from the group consisting of libivirumab, rmab, rivabazumab pegol, setoxaximab, suvizumab, suvratoxumab, sevirumab, pritoxaximab, porgaviximab, REGN-EB3, obiltoxaximab, gedivumab, foravirumab, larcaviximab, motavizumab, palivizumab, rafivirumab, regavirumab, tuvirumab, cosfroviximab, felvizumab, atidortoxumab, edobacomab, nebacumab, pateclizumab, raxibacumab, urtoxazumab, tosatoxumab, berlimatoxumab, CR6261, diridavumab, firivumab, lesofavumab, navivumab, exbivirumab, lenvervimab, bavituximab, bezlotoxumab, efungumab, leronlimab, nirsevimab, pagibaximab, panobacumab, tefibazumab, ansuvimab, atoltivimab, maftivimab, and odesivimab.

[5974] In some aspects, the antigen binding polypeptide complexes provided herein comprise a VL2 comprising a VL of an antibody selected from the group consisting of libivirumab, rmab, rivabazumab pegol, setoxaximab, suvizumab, suvratoxumab, sevirumab, pritoxaximab, porgaviximab, REGN-EB3, obiltoxaximab, gedivumab, foravirumab, larcaviximab, motavizumab, palivizumab, rafivirumab, regavirumab, tuvirumab, cosfroviximab, felvizumab, atidortoxumab, edobacomab, nebacumab, pateclizumab, raxibacumab, urtoxazumab, tosatoxumab, berlimatoxumab, CR6261, diridavumab, firivumab, lesofavumab, navivumab, exbivirumab, lenvervimab, bavituximab, bezlotoxumab, efungumab, leronlimab, nirsevimab, pagibaximab, panobacumab, tefibazumab, ansuvimab, atoltivimab, maftivimab, and odesivimab.

[5975] In some aspects, the antigen binding polypeptide complexes provided herein comprise a VL3 comprising a VL of an antibody selected from the group consisting of libivirumab, rmab, rivabazumab pegol, setoxaximab, suvizumab, suvratoxumab, sevirumab, pritoxaximab, porgaviximab, REGN-EB3, obiltoxaximab, gedivumab, foravirumab, larcaviximab, motavizumab, palivizumab, rafivirumab, regavirumab, tuvirumab, cosfroviximab, felvizumab, atidortoxumab, edobacomab, nebacumab, pateclizumab, raxibacumab, urtoxazumab, tosatoxumab, berlimatoxumab, CR6261, diridavumab, firivumab, lesofavumab, navivumab, exbivirumab, lenvervimab, bavituximab, bezlotoxumab, efungumab, leronlimab, nirsevimab, pagibaximab, panobacumab, tefibazumab, ansuvimab, atoltivimab, maftivimab, and odesivimab.

[5976] In some aspects, the antigen binding polypeptide complexes provided herein comprise a VH1 comprising a VH of an antibody selected from the group consisting of libivirumab, rmab, rivabazumab pegol, setoxaximab, suvizumab, suvratoxumab, sevirumab, pritoxaximab, porgaviximab, REGN-EB3, obiltoxaximab, gedivumab, foravirumab, larcaviximab, motavizumab, palivizumab, rafivirumab, regavirumab, tuvirumab, cosfroviximab, felvizumab, atidortoxumab, edobacomab, nebacumab, pateclizumab, raxibacumab, urtoxazumab, tosatoxumab, berlimatoxumab, CR6261, diridavumab, firivumab, lesofavumab, navivumab, exbivirumab, lenvervimab, bavituximab, bezlotoxumab, efungumab, leronlimab, nirsevimab, pagibaximab, panobacumab, tefibazumab, ansuvimab, atoltivimab, maftivimab, and odesivimab.

[5977] In some aspects, the antigen binding polypeptide complexes provided herein comprise a VH2 comprising a VH of an antibody selected from the group consisting of libivirumab, rmab, rivabazumab pegol, setoxaximab, suvizumab, suvratoxumab, sevirumab, pritoxaximab, porgaviximab, REGN-EB3, obiltoxaximab, gedivumab, foravirumab, larcaviximab, motavizumab, palivizumab, rafivirumab, regavirumab, tuvirumab, cosfroviximab, felvizumab, atidortoxumab, edobacomab, nebacumab, pateclizumab, raxibacumab, urtoxazumab, tosatoxumab, berlimatoxumab, CR6261, diridavumab, firivumab, lesofavumab, navivumab, exbivirumab, lenvervimab, bavituximab, bezlotoxumab, efungumab, leronlimab, nirsevimab, pagibaximab, panobacumab, tefibazumab, ansuvimab, atoltivimab, maftivimab, and odesivimab.

[5978] In some aspects, the antigen binding polypeptide complexes provided herein comprise a VH3 comprising a VH of an antibody selected from the group consisting of libivirumab, rmab, rivabazumab pegol, setoxaximab, suvizumab, suvratoxumab, sevirumab, pritoxaximab, porgaviximab, REGN-EB3, obiltoxaximab, gedivumab, foravirumab, larcaviximab, motavizumab, palivizumab, rafivirumab, regavirumab, tuvirumab, cosfroviximab, felvizumab, atidortoxumab, edobacomab, nebacumab, pateclizumab, raxibacumab, urtoxazumab, tosatoxumab, berlimatoxumab, CR6261, diridavumab, firivumab, lesofavumab, navivumab, exbivirumab, lenvervimab, bavituximab, bezlotoxumab, efungumab, leronlimab, nirsevimab, pagibaximab, panobacumab, tefibazumab, ansuvimab, atoltivimab, maftivimab, and odesivimab.

[5979] In some aspects, the antigen binding polypeptide complexes provided herein comprise a VL1 comprising (i) a complementarity determining region (CDR) 1 having an amino acid sequence that is at least 65%, at least 70%, at least 75%, at least 80%, at least 85%, at least 90%, at least 95%, at least 99%, or 100% identical to any one of SEQ ID NOs: 1428, 1793, 1798, 1810, 1817, 1824, 1977, 1985, 1993 and 2001; (ii) a CDR2 having an amino acid sequence that is at least 65%, at least 70%, at least 75%, at least 80%, at least 85%, at least 90%, at least 95%, at least 99%, or 100% identical to any one of SEQ ID NOs: 1978, 1986, 1994, and 2002; or at least 65%, at least 70%, at least 75%, at least 80%, at least 85%, at least 90%, at least 95%, at least 99%, or 100% identical to any one of amino acid sequences YTS, DTS, GAS, and AAS; and (iii) a CDR3 having an amino acid sequence that is at least 65%, at least 70%, at least 75%, at least 80%, at least 85%, at least 90%, at least 95%, at least 99%, or 100% identical to any one of SEQ ID NOs: 1229, 1799, 1805, 1811, 1818, 1825, 1979, 1987, 1995, and 2003.

[5980] In some aspects, the antigen binding polypeptide complexes provided herein comprise a VL2 comprising (i) a complementarity determining region (CDR) 1 having an amino acid sequence that is at least 65%, at least 70%, at least 75%, at least 80%, at least 85%, at least 90%, at least 95%, at least 99%, or 100% identical to any one of SEQ ID NOs: 1428, 1793, 1798, 1810, 1817, 1824, 1977, 1985, 1993 and 2001; (ii) a CDR2 having an amino acid sequence that is at least 65%, at least 70%, at least 75%, at least 80%, at least 85%, at least 90%, at least 95%, at least 99%, or 100% identical to any one of SEQ ID NOs: 1978, 1986, 1994, and 2002; or at least 65%, at least 70%, at least 75%, at least 80%, at least 85%, at least 90%, at least 95%, at least 99%, or 100% identical to any one of amino acid sequences YTS, DTS, GAS, and AAS; and (iii) a CDR3 having an amino acid sequence that is at least 65%, at least 70%, at least 75%, at least 80%, at least 85%, at least 90%, at least 95%, at least 99%, or 100% identical to any one of SEQ ID NOs: 1229, 1799, 1805, 1811, 1818, 1825, 1979, 1987, 1995, and 2003.

[5981] In some aspects, the antigen binding polypeptide complexes provided herein comprise a VL3 comprising (i) a complementarity determining region (CDR) 1 having an amino acid sequence that is at least 65%, at least 70%, at least 75%, at least 80%, at least 85%, at least 90%, at least 95%, at least 99%, or 100% identical to any one of SEQ ID NOs: 1428, 1793, 1798, 1810, 1817, 1824, 1977, 1985, 1993 and 2001; (ii) a CDR2 having an amino acid sequence that is at least 65%, at least 70%, at least 75%, at least 80%, at least 85%, at least 90%, at least 95%, at least 99%, or 100% identical to any one of SEQ ID NOs: 1978, 1986, 1994, and 2002; or at least 65%, at least 70%, at least 75%, at least 80%, at least 85%, at least 90%, at least 95%, at least 99%, or 100% identical to any one of amino acid sequences YTS, DTS, GAS, and AAS; and (iii) a CDR3 having an amino acid sequence that is at least 65%, at least 70%, at least 75%, at least 80%, at least 85%, at least 90%, at least 95%, at least 99%, or 100% identical to any one of SEQ ID NOs: 1229, 1799, 1805, 1811, 1818, 1825, 1979, 1987, 1995, and 2003.

[5982] In some aspects, the antigen binding polypeptide complexes provided herein comprise a VH1 comprising (i) a complementarity determining region (CDR) 1 having an amino acid sequence that is at least 65%, at least 70%, at least 75%, at least 80%, at least 85%, at least 90%, at least 95%, at least 99%, or 100% identical to any one of SEQ ID NOs: 1577, 1795, 1801, 1813, 1820, 1827, 1981, 1989, 1997, and 2005; (ii) a CDR2 having an amino acid sequence that is at least 65%, at least 70%, at least 75%, at least 80%, at least 85%, at least 90%, at least 95%, at least 99%, or 100% identical to any one of SEQ ID NOS: 1159, 1802, 1807, 1814, 1821, 1828, 1982, 1990, 1998, and 2006; and (iii) a CDR3 having an amino acid sequence that is at least 65%, at least 70%, at least 75%, at least 80%, at least 85%, at least 90%, at least 95%, at least 99%, or 100% identical to any one of SEQ ID NOs: 1796, 1803, 1808, 1815, 1822, 1829, 1983, 1991, 1999, and 2007.

[5983] In some aspects, the antigen binding polypeptide complexes provided herein comprise a VH2 comprising (i) a complementarity determining region (CDR) 1 having an amino acid sequence that is at least 65%, at least 70%, at least 75%, at least 80%, at least 85%, at least 90%, at least 95%, at least 99%, or 100% identical to any one of SEQ ID NOs: 1577, 1795, 1801, 1813, 1820, 1827, 1981, 1989, 1997, and 2005; (ii) a CDR2 having an amino acid sequence that is at least 65%, at least 70%, at least 75%, at least 80%, at least 85%, at least 90%, at least 95%, at least 99%, or 100% identical to any one of SEQ ID NOs: 1159, 1802, 1807, 1814, 1821, 1828, 1982, 1990, 1998, and 2006; and (iii) a CDR3 having an amino acid sequence that is at least 65%, at least 70%, at least 75%, at least 80%, at least 85%, at least 90%, at least 95%, at least 99%, or 100% identical to any one of SEQ ID NOs: 1796, 1803, 1808, 1815, 1822, 1829, 1983, 1991, 1999, and 2007.

[5984] In some aspects, the antigen binding polypeptide complexes provided herein comprise a VH3 comprising (i) a complementarity determining region (CDR) 1 having an amino acid sequence that is at least 65%, at least 70%, at least 75%, at least 80%, at least 85%, at least 90%, at least 95%, at least 99%, or 100% identical to any one of SEQ ID NOs: 1577, 1795, 1801, 1813, 1820, 1827, 1981, 1989, 1997, and 2005; (ii) a CDR2 having an amino acid sequence that is at least 65%, at least 70%, at least 75%, at least 80%, at least 85%, at least 90%, at least 95%, at least 99%, or 100% identical to any one of SEQ ID NOS: 1159, 1802, 1807, 1814, 1821, 1828, 1982, 1990, 1998, and 2006; and (iii) a CDR3 having an amino acid sequence that is at least 65%, at least 70%, at least 75%, at least 80%, at least 85%, at least 90%, at least 95%, at least 99%, or 100% identical to any one of SEQ ID NOs: 1796, 1803, 1808, 1815, 1822, 1829, 1983, 1991, 1999, and 2007.

[5985] In some aspects, the antigen binding polypeptide complexes provided herein comprise a VL1 comprising an amino acid sequence that is at least 65%, at least 70%, at least 75%, at least 80%, at least 85%, at least 90%, at least 95%, at least 99%, or 100% identical to any one of SEQ ID NOs: 1794, 1800, 1806, 1812, 1819, 1826, 1980, 1988, 1996, and 2004.

[5986] In some aspects, the antigen binding polypeptide complexes provided herein comprise a VL2 comprising an amino acid sequence that is at least 65%, at least 70%, at least 75%, at least 80%, at least 85%, at least 90%, at least 95%, at least 99%, or 100% identical to any one of SEQ ID NOs: 1794, 1800, 1806, 1812, 1819, 1826, 1980, 1988, 1996, and 2004.

[5987] In some aspects, the antigen binding polypeptide complexes provided herein comprise a VL3 comprising an amino acid sequence that is at least 65%, at least 70%, at least 75%, at least 80%, at least 85%, at least 90%, at least 95%, at least 99%, or 100% identical to any one of SEQ ID NOs: 1794, 1800, 1806, 1812, 1819, 1826, 1980, 1988, 1996, and 2004.

[5988] In some aspects, the antigen binding polypeptide complexes provided herein comprise a VH1 comprising an amino acid sequence that is at least 65%, at least 70%, at least 75%, at least 80%, at least 85%, at least 90%, at least 95%, at least 99%, or 100% identical to any one of SEQ ID NOs 1797, 1804, 1809, 1816, 1823, 1830, 1984, 1992, 2000, and 2008.

[5989] In some aspects, the antigen binding polypeptide complexes provided herein comprise a VH2 comprising an amino acid sequence that is at least 65%, at least 70%, at least 75%, at least 80%, at least 85%, at least 90%, at least 95%, at least 99%, or 100% identical to any one of SEQ ID NOs 1797, 1804, 1809, 1816, 1823, 1830, 1984, 1992, 2000, and 2008.

[5990] In some aspects, the antigen binding polypeptide complexes provided herein comprise a VH3 comprising an amino acid sequence that is at least 65%, at least 70%, at least 75%, at least 80%, at least 85%, at least 90%, at least 95%, at least 99%, or 100% identical to any one of SEQ ID NOs 1797, 1804, 1809, 1816, 1823, 1830, 1984, 1992, 2000, and 2008.

[5991] In some aspects, the other-pathology antigen is selected from the group consisting of Amyloid beta, β-amyloid, PCSK9, IFN-α/β receptor. Rhesus factor, nerve growth factor (NGF), DPP4, fibrin II beta chain, ACVR2B, serum amyloid A protein SOST, FGF 23, VWF, tissue factor pathway inhibitor (TFPI), 1-40 and 1-42, selectin P, glucagon receptor (GCGR), amyloid P component, GDF-8, CXCL10 IP-10, repulsive guidance molecule A RGMA, IFN-γ, activated F9/F10, calcitonin gene-related peptide (CGRP), angiopoietin 3, IFN receptor, IFN-γ, calcitonin, β-amyloid 1-40 and 1-42, tau protein, dabigatran, cardiac myosin, selectin P, Complement factor D (CFD), kallikrein, GDF-8, IGHE, tissue factor pathway inhibitor (TFPI), GMCSF receptor α-chain, amyloid, IgE Fc region, MASP-2, oxLDL, GMCSF, NOGO-A, Alpha-synuclein, NGF, myelin-associated glycoprotein, RHD (gene) (RHD), sclerostin, FCGRT, sclerostin SOST, mucosal addressin cell adhesion molecule, myostatin, RSVFR, complement component 1s C1s, C5, and IL31.

[5992] In some aspects, the antigen binding polypeptide complexes provided herein comprise a VL1 comprising a light chain complementarity determining region 1 (LCDR1), LCDR2, and/or LCDR3 of an antibody selected from the group consisting of aducanumab, alirocumab, frovocimab, lodelcizumab, bococizumab, evolocumab, ralpancizumab, anifrolumab, atorolimumab, bapineuzumab, bedinvetmab, begelomab, biciromab, bimagrumab, birtamimab, blosozumab, burosumab, caplacizumab, concizumab, crenezumab, crizanlizumab, crotedumab, dezamizumab, domagrozumab, donanemab, eldelumab, elezanumab, emapalumab, emicizumab, eptinezumab, erenumab, evinacumab, faralimomab, fasinumab, fontolizumab, fremanezumab, frunevetmab, fulranumab, galcanezumab, gantenerumab, gosuranemab, idarucizumab, imciromab, inclacumab, lampalizumab, lanadelumab, landogrozumab, lecanemab, ligelizumab, marstacimab, mavrilimumab, morolimumab, NEOD001, omalizumab, oMS721, orticumab, otilimab, ozanezumab, ponezumab, prasinezumab, quilizumab, ranevetmab, refanezumab, roledumab, romosozumab, rozanolixizumab, setrusumab, SHP647, solanezumab, stamulumab, suptavumab, sutimlimab, tanezumab, crovalimab, and lokivetmab.

[5993] In some aspects, the antigen binding polypeptide complexes provided herein comprise a VL2 comprising a light chain complementarity determining region 1 (LCDR1), LCDR2, and/or LCDR3 of an antibody selected from the group consisting of aducanumab, alirocumab, frovocimab, lodelcizumab, bococizumab, evolocumab, ralpancizumab, anifrolumab, atorolimumab, bapineuzumab, bedinvetmab, begelomab, biciromab, bimagrumab, birtamimab, blosozumab, burosumab, caplacizumab, concizumab, crenezumab, crizanlizumab, crotedumab, dezamizumab, domagrozumab, donanemab, eldelumab, elezanumab, emapalumab, emicizumab, eptinezumab, erenumab, evinacumab, faralimomab, fasinumab, fontolizumab, fremanezumab, frunevetmab, fulranumab, galcanezumab, gantenerumab, gosuranemab, idarucizumab, imciromab, inclacumab, lampalizumab, lanadelumab, landogrozumab, lecanemab, ligelizumab, marstacimab, mavrilimumab, morolimumab, NEOD001, omalizumab, oMS721, orticumab, otilimab, ozanezumab, ponezumab, prasinezumab, quilizumab, ranevetmab, refanezumab, roledumab, romosozumab, rozanolixizumab, setrusumab, SHP647, solanezumab, stamulumab, suptavumab, sutimlimab, tanezumab, crovalimab, and lokivetmab.

[5994] In some aspects, the antigen binding polypeptide complexes provided herein comprise a VL3 comprising a light chain complementarity determining region 1 (LCDR1), LCDR2, and/or LCDR3 of an antibody selected from the group consisting of aducanumab, alirocumab, frovocimab, lodelcizumab, bococizumab, evolocumab, ralpancizumab, anifrolumab, atorolimumab, bapineuzumab, bedinvetmab, begelomab, biciromab, bimagrumab, birtamimab, blosozumab, burosumab, caplacizumab, concizumab, crenezumab, crizanlizumab, crotedumab, dezamizumab, domagrozumab, donanemab, eldelumab, clezanumab, emapalumab, emicizumab, eptinezumab, erenumab, evinacumab, faralimomab, fasinumab, fontolizumab, fremanezumab, frunevetmab, fulranumab, galcanezumab, gantenerumab, gosuranemab, idarucizumab, imciromab, inclacumab, lampalizumab, lanadelumab, landogrozumab, lecanemab, ligelizumab, marstacimab, mavrilimumab, morolimumab, NEOD001, omalizumab, oMS721, orticumab, otilimab, ozanezumab, ponezumab, prasinezumab, quilizumab, ranevetmab, refanezumab, roledumab, romosozumab, rozanolixizumab, setrusumab, SHP647, solanezumab, stamulumab, suptavumab, sutimlimab, tanezumab, crovalimab, and lokivetmab.

[5995] In some aspects, the antigen binding polypeptide complexes provided herein comprise a VH1 comprising a heavy chain complementarity determining region 1 (HCDR1), HCDR2, and/or HCDR3 of an antibody selected from the group consisting of aducanumab, alirocumab, frovocimab, lodelcizumab, bococizumab, evolocumab, ralpancizumab, anifrolumab, atorolimumab, bapineuzumab, bedinvetmab, begelomab, biciromab, bimagrumab, birtamimab, blosozumab, burosumab, caplacizumab, concizumab, crenezumab, crizanlizumab, crotedumab, dezamizumab, domagrozumab, donanemab, eldelumab, elezanumab, emapalumab, emicizumab, eptinezumab, erenumab, evinacumab, faralimomab, fasinumab, fontolizumab, fremanezumab, frunevetmab, fulranumab, galcanezumab, gantenerumab, gosuranemab, idarucizumab, imciromab, inclacumab, lampalizumab, lanadelumab, landogrozumab, lecanemab, ligelizumab, marstacimab, mavrilimumab, morolimumab, NEOD001, omalizumab, oMS721, orticumab, otilimab, ozanezumab, ponezumab, prasinezumab, quilizumab, ranevetmab, refanezumab, roledumab, romosozumab, rozanolixizumab, setrusumab, SHP647, solanezumab, stamulumab, suptavumab, sutimlimab, tanezumab, crovalimab, and lokivetmab.

[5996] In some aspects, the antigen binding polypeptide complexes provided herein comprise a VH2 comprising a heavy chain complementarity determining region 1 (HCDR1), HCDR2, and/or HCDR3 of an antibody selected from the group consisting of aducanumab, alirocumab, frovocimab, lodelcizumab, bococizumab, evolocumab, ralpancizumab, anifrolumab, atorolimumab, bapineuzumab, bedinvetmab, begelomab, biciromab, bimagrumab, birtamimab, blosozumab, burosumab, caplacizumab, concizumab, crenezumab, crizanlizumab, crotedumab, dezamizumab, domagrozumab, donanemab, eldelumab, elezanumab, emapalumab, emicizumab, eptinezumab, erenumab, evinacumab, faralimomab, fasinumab, fontolizumab, fremanezumab, frunevetmab, fulranumab, galcanezumab, gantenerumab, gosuranemab, idarucizumab, imciromab, inclacumab, lampalizumab, lanadelumab, landogrozumab, lecanemab, ligelizumab, marstacimab, mavrilimumab, morolimumab, NEOD001, omalizumab, oMS721, orticumab, otilimab, ozanezumab, ponezumab, prasinezumab, quilizumab, ranevetmab, refanezumab, roledumab, romosozumab, rozanolixizumab, setrusumab, SHP647, solanezumab, stamulumab, suptavumab, sutimlimab, tanezumab, crovalimab, and lokivetmab.

[5997] In some aspects, the antigen binding polypeptide complexes provided herein comprise a VH3 comprising a heavy chain complementarity determining region 1 (HCDR1), HCDR2, and/or HCDR3 of an antibody selected from the group consisting of aducanumab, alirocumab, frovocimab, lodelcizumab, bococizumab, evolocumab, ralpancizumab, anifrolumab, atorolimumab, bapineuzumab, bedinvetmab, begelomab, biciromab, bimagrumab, birtamimab, blosozumab, burosumab, caplacizumab, concizumab, crenezumab, crizanlizumab, crotedumab, dezamizumab, domagrozumab, donanemab, eldelumab, elevanumab, emapalumab, emicizumab, eptinezumab, erenumab, evinacumab, faralimomab, fasinumab, fontolizumab, fremanezumab, frunevetmab, fulranumab, galcanezumab, gantenerumab, gosuranemab, idarucizumab, imciromab, inclacumab, lampalizumab, lanadelumab, landogrozumab, lecanemab, ligelizumab, marstacimab, mavrilimumab, morolimumab, NEOD001, omalizumab, oMS721, orticumab, otilimab, ozanezumab, ponezumab, prasinezumab, quilizumab, ranevetmab, refanezumab, roledumab, romosozumab, rozanolixizumab, setrusumab, SHP647, solanezumab, stamulumab, suptavumab, sutimlimab, tanezumab, crovalimab, and lokivetmab.

[5998] In some aspects, the antigen binding polypeptide complexes provided herein comprise a VL1 comprising a VL of an antibody selected from the group consisting of aducanumab, alirocumab, frovocimab, lodelcizumab, bococizumab, evolocumab, ralpancizumab, anifrolumab, atorolimumab, bapineuzumab, bedinvetmab, begelomab, biciromab, bimagrumab, birtamimab, blosozumab, burosumab, caplacizumab, concizumab, crenezumab, crizanlizumab, crotedumab, dezamizumab, domagrozumab, donanemab, eldelumab, elezanumab, emapalumab, emicizumab, eptinezumab, erenumab, evinacumab, faralimomab, fasinumab, fontolizumab, fremanezumab, frunevetmab, fulranumab, galcanezumab, gantenerumab, gosuranemab, idarucizumab, imciromab, inclacumab, lampalizumab, lanadelumab, landogrozumab, lecanemab, ligelizumab, marstacimab, mavrilimumab, morolimumab, NEOD001, omalizumab, oMS721, orticumab, otilimab, ozanezumab, ponezumab, prasinezumab, quilizumab, ranevetmab, refanezumab, roledumab, romosozumab, rozanolixizumab, setrusumab, SHP647, solanezumab, stamulumab, suptavumab, sutimlimab, tanezumab, crovalimab, and lokivetmab.

[5999] In some aspects, the antigen binding polypeptide complexes provided herein comprise a VL2 comprising a VL of an antibody selected from the group consisting of aducanumab, alirocumab, frovocimab, lodelcizumab, bococizumab, evolocumab, ralpancizumab, anifrolumab, atorolimumab, bapineuzumab, bedinvetmab, begelomab, biciromab, bimagrumab, birtamimab, blosozumab, burosumab, caplacizumab, concizumab, crenezumab, crizanlizumab, crotedumab, dezamizumab, domagrozumab, donanemab, eldelumab, elezanumab, emapalumab, emicizumab, eptinezumab, erenumab, evinacumab, faralimomab, fasinumab, fontolizumab, fremanezumab, frunevetmab, fulranumab, galcanezumab, gantenerumab, gosuranemab, idarucizumab, imciromab, inclacumab, lampalizumab, lanadelumab, landogrozumab, lecanemab, ligelizumab, marstacimab, mavrilimumab, morolimumab, NEOD001, omalizumab, oMS721, orticumab, otilimab, ozanezumab, ponezumab, prasinezumab, quilizumab, ranevetmab, refanezumab, roledumab, romosozumab, rozanolixizumab, setrusumab, SHP647, solanezumab, stamulumab, suptavumab, sutimlimab, tanezumab, crovalimab, and lokivetmab.

[6000] In some aspects, the antigen binding polypeptide complexes provided herein comprise a VL3 comprising a VL of an antibody selected from the group consisting of aducanumab, alirocumab, frovocimab, lodelcizumab, bococizumab, evolocumab, ralpancizumab, anifrolumab, atorolimumab, bapincuzumab, bedinvetmab, begelomab, biciromab, bimagrumab, birtamimab, blosozumab, burosumab, caplacizumab, concizumab, crenezumab, crizanlizumab, crotedumab, dezamizumab, domagrozumab, donanemab, eldelumab, elezanumab, emapalumab, emicizumab, eptinezumab, erenumab, evinacumab, faralimomab, fasinumab, fontolizumab, fremanezumab, frunevetmab, fulranumab, galcanezumab, gantenerumab, gosuranemab, idarucizumab, imciromab, inclacumab, lampalizumab, lanadelumab, landogrozumab, lecanemab, ligelizumab, marstacimab, mavrilimumab, morolimumab, NEOD001, omalizumab, oMS721, orticumab, otilimab, ozanezumab, ponezumab, prasinezumab, quilizumab, ranevetmab, refanezumab, roledumab, romosozumab, rozanolixizumab, setrusumab, SHP647, solanezumab, stamulumab, suptavumab, sutimlimab, tanezumab, crovalimab, and lokivetmab.

[6001] In some aspects, the antigen binding polypeptide complexes provided herein comprise a VH1 comprising a VH of an antibody selected from the group consisting of aducanumab, alirocumab, frovocimab, lodelcizumab, bococizumab, evolocumab, ralpancizumab, anifrolumab, atorolimumab, bapineuzumab, bedinvetmab, begelomab, biciromab, bimagrumab, birtamimab, blosozumab, burosumab, caplacizumab, concizumab, crenezumab, crizanlizumab, crotedumab, dezamizumab, domagrozumab, donanemab, eldelumab, elezanumab, emapalumab, emicizumab, eptinezumab, erenumab, evinacumab, faralimomab, fasinumab, fontolizumab, fremanezumab, frunevetmab, fulranumab, galcanezumab, gantenerumab, gosuranemab, idarucizumab, imciromab, inclacumab, lampalizumab, lanadelumab, landogrozumab, lecanemab, ligelizumab, marstacimab, mavrilimumab, morolimumab, NEOD001, omalizumab, oMS721, orticumab, otilimab, ozanezumab, ponezumab, prasinezumab, quilizumab, ranevetmab, refanezumab, roledumab, romosozumab, rozanolixizumab, setrusumab, SHP647, solanezumab, stamulumab, suptavumab, sutimlimab, tanezumab, crovalimab, and lokivetmab.

[6002] In some aspects, the antigen binding polypeptide complexes provided herein comprise a VH2 comprising a VH of an antibody selected from the group consisting of aducanumab, alirocumab, frovocimab, lodelcizumab, bococizumab, evolocumab, ralpancizumab, anifrolumab, atorolimumab, bapineuzumab, bedinvetmab, begelomab, biciromab, bimagrumab, birtamimab, blosozumab, burosumab, caplacizumab, concizumab, crenezumab, crizanlizumab, crotedumab, dezamizumab, domagrozumab, donanemab, eldelumab, elezanumab, emapalumab, emicizumab, eptinezumab, erenumab, evinacumab, faralimomab, fasinumab, fontolizumab, fremanezumab, frunevetmab, fulranumab, galcanezumab, gantenerumab, gosuranemab, idarucizumab, imciromab, inclacumab, lampalizumab, lanadelumab, landogrozumab, lecanemab, ligelizumab, marstacimab, mavrilimumab, morolimumab, NEOD001, omalizumab, oMS721, orticumab, otilimab, ozanezumab, ponezumab, prasinezumab, quilizumab, ranevetmab, refanezumab, roledumab, romosozumab, rozanolixizumab, setrusumab, SHP647, solanezumab, stamulumab, suptavumab, sutimlimab, tanezumab, crovalimab, and lokivetmab.

[6003] In some aspects, the antigen binding polypeptide complexes provided herein comprise a VH3 comprising a VH of an antibody selected from the group consisting of aducanumab, alirocumab, frovocimab, lodelcizumab, bococizumab, evolocumab, ralpancizumab, anifrolumab, atorolimumab, bapineuzumab, bedinvetmab, begelomab, biciromab, bimagrumab, birtamimab, blosozumab, burosumab, caplacizumab, concizumab, crenezumab, crizanlizumab, crotedumab, dezamizumab, domagrozumab, donanemab, eldelumab, elezanumab, emapalumab, emicizumab, eptinezumab, erenumab, evinacumab, faralimomab, fasinumab, fontolizumab, fremanezumab, frunevetmab, fulranumab, galcanezumab, gantenerumab, gosuranemab, idarucizumab, imciromab, inclacumab, lampalizumab, lanadelumab, landogrozumab, lecanemab, ligelizumab, marstacimab, mavrilimumab, morolimumab, NEOD001, omalizumab, oMS721, orticumab, otilimab, ozanezumab, ponezumab, prasinezumab, quilizumab, ranevetmab, refanezumab, roledumab, romosozumab, rozanolixizumab, setrusumab, SHP647, solanezumab, stamulumab, suptavumab, sutimlimab, tanezumab, crovalimab, and lokivetmab.

[6004] In some aspects, the antigen binding polypeptide complexes provided herein comprise a VL1 comprising (i) a complementarity determining region (CDR) 1 having an amino acid sequence that is at least 65%, at least 70%, at least 75%, at least 80%, at least 85%, at least 90%, at least 95%, at least 99%, or 100% identical to any one of SEQ ID NOs: 1120, 1228, 1359, 1519, 1831, 1838, 1845, 1852, 1859, 1866, 1872, 1878, 1885, 1891, 1898, 1905, 1911, 1917, 1924, 1931, 1938, 1945, and 1963; (ii) a CDR2 having an amino acid sequence that is at least 65%, at least 70%, at least 75%, at least 80%, at least 85%, at least 90%, at least 95%, at least 99%, or 100% identical to any one of amino acid sequences AAS, AVS, DAS, DNN, EDN, EVS, GAS, GNG, KAS, KVS, LVS, NTD, STS, WAS, and YTS; and (iii) a CDR3 having an amino acid sequence that is at least 65%, at least 70%, at least 75%, at least 80%, at least 85%, at least 90%, at least 95%, at least 99%, or 100% identical to any one of SEQ ID NOs: 1360, 1832, 1839, 1846, 1853, 1860, 1867, 1873, 1879, 1886, 1892, 1899, 1906, 1912, 1918, 1925, 1932, 1939, 1946, 1951, 1957, 1964, and 1970.

[6005] In some aspects, the antigen binding polypeptide complexes provided herein comprise a VL2 comprising (i) a complementarity determining region (CDR) 1 having an amino acid sequence that is at least 65%, at least 70%, at least 75%, at least 80%, at least 85%, at least 90%, at least 95%, at least 99%, or 100% identical to any one of SEQ ID NOs: 1120, 1228, 1359, 1519, 1831, 1838, 1845, 1852, 1859, 1866, 1872, 1878, 1885, 1891, 1898, 1905, 1911, 1917, 1924, 1931, 1938, 1945, and 1963; (ii) a CDR2 having an amino acid sequence that is at least 65%, at least 70%, at least 75%, at least 80%, at least 85%, at least 90%, at least 95%, at least 99%, or 100% identical to any one of amino acid sequences AAS, AVS, DAS, DNN, EDN, EVS, GAS, GNG, KAS, KVS, LVS, NTD, STS, WAS, and YTS; and (iii) a CDR3 having an amino acid sequence that is at least 65%, at least 70%, at least 75%, at least 80%, at least 85%, at least 90%, at least 95%, at least 99%, or 100% identical to any one of SEQ ID NOs: 1360, 1832, 1839, 1846, 1853, 1860, 1867, 1873, 1879, 1886, 1892, 1899, 1906, 1912, 1918, 1925, 1932, 1939, 1946, 1951, 1957, 1964, and 1970.

[6006] In some aspects, the antigen binding polypeptide complexes provided herein comprise a VL3 comprising (i) a complementarity determining region (CDR) 1 having an amino acid sequence that is at least 65%, at least 70%, at least 75%, at least 80%, at least 85%, at least 90%, at least 95%, at least 99%, or 100% identical to any one of SEQ ID NOs: 1120, 1228, 1359, 1519, 1831, 1838, 1845, 1852, 1859, 1866, 1872, 1878, 1885, 1891, 1898, 1905, 1911, 1917, 1924, 1931, 1938, 1945, and 1963; (ii) a CDR2 having an amino acid sequence that is at least 65%, at least 70%, at least 75%, at least 80%, at least 85%, at least 90%, at least 95%, at least 99%, or 100% identical to any one of amino acid sequences AAS, AVS, DAS, DNN, EDN, EVS, GAS, GNG, KAS, KVS, LVS, NTD, STS, WAS, and YTS; and (iii) a CDR3 having an amino acid sequence that is at least 65%, at least 70%, at least 75%, at least 80%, at least 85%, at least 90%, at least 95%, at least 99%, or 100% identical to any one of SEQ ID NOs: 1360, 1832, 1839, 1846, 1853, 1860, 1867, 1873, 1879, 1886, 1892, 1899, 1906, 1912, 1918, 1925, 1932, 1939, 1946, 1951, 1957, 1964, and 1970.

[6007] In some aspects, the antigen binding polypeptide complexes provided herein comprise a VH1 comprising (i) a complementarity determining region (CDR) 1 having an amino acid sequence that is at least 65%, at least 70%, at least 75%, at least 80%, at least 85%, at least 90%, at least 95%, at least 99%, or 100% identical to any one of SEQ ID NOs: 1309, 1362, 1437, 1552, 1618, 1639, 1834, 1841, 1848, 1855, 1862, 1881, 1894, 1901, 1920, 1927, 1934, 1941, 1953, 1959, and 1966; (ii) a CDR2 having an amino acid sequence that is at least 65%, at least 70%, at least 75%, at least 80%, at least 85%, at least 90%, at least 95%, at least 99%, or 100% identical to any one of SEQ ID NOs: 1363, 1835, 1842, 1849, 1856, 1863, 1869, 1875, 1882, 1888, 1895, 1902, 1908, 1914, 1921, 1928, 1935, 1942, 1948, 1954, 1960, 1967, and 1972; and (iii) a CDR3 having an amino acid sequence that is at least 65%, at least 70%, at least 75%, at least 80%, at least 85%, at least 90%, at least 95%, at least 99%, or 100% identical to any one of SEQ ID NOs: 1364, 1836, 1843, 1850, 1857, 1864, 1870, 1876, 1883, 1889, 1896, 1903, 1909, 1915, 1922, 1929, 1936, 1943, 1949, 1955, 1961, 1968, and 1973.

[6008] In some aspects, the antigen binding polypeptide complexes provided herein comprise a VH2 comprising (i) a complementarity determining region (CDR) 1 having an amino acid sequence that is at least 65%, at least 70%, at least 75%, at least 80%, at least 85%, at least 90%, at least 95%, at least 99%, or 100% identical to any one of SEQ ID NOs: 1309, 1362, 1437, 1552, 1618, 1639, 1834, 1841, 1848, 1855, 1862, 1881, 1894, 1901, 1920, 1927, 1934, 1941, 1953, 1959, and 1966; (ii) a CDR2 having an amino acid sequence that is at least 65%, at least 70%, at least 75%, at least 80%, at least 85%, at least 90%, at least 95%, at least 99%, or 100% identical to any one of SEQ ID NOs: 1363, 1835, 1842, 1849, 1856, 1863, 1869, 1875, 1882, 1888, 1895, 1902, 1908, 1914, 1921, 1928, 1935, 1942, 1948, 1954, 1960, 1967, and 1972; and (iii) a CDR3 having an amino acid sequence that is at least 65%, at least 70%, at least 75%, at least 80%, at least 85%, at least 90%, at least 95%, at least 99%, or 100% identical to any one of SEQ ID NOs: 1364, 1836, 1843, 1850, 1857, 1864, 1870, 1876, 1883, 1889, 1896, 1903, 1909, 1915, 1922, 1929, 1936, 1943, 1949, 1955, 1961, 1968, and 1973.

[6009] In some aspects, the antigen binding polypeptide complexes provided herein comprise a VH3 comprising (i) a complementarity determining region (CDR) 1 having an amino acid sequence that is at least 65%, at least 70%, at least 75%, at least 80%, at least 85%, at least 90%, at least 95%, at least 99%, or 100% identical to any one of SEQ ID NOs: 1309, 1362, 1437, 1552, 1618, 1639, 1834, 1841, 1848, 1855, 1862, 1881, 1894, 1901, 1920, 1927, 1934, 1941, 1953, 1959, and 1966; (ii) a CDR2 having an amino acid sequence that is at least 65%, at least 70%, at least 75%, at least 80%, at least 85%, at least 90%, at least 95%, at least 99%, or 100% identical to any one of SEQ ID NOs: 1363, 1835, 1842, 1849, 1856, 1863, 1869, 1875, 1882, 1888, 1895, 1902, 1908, 1914, 1921, 1928, 1935, 1942, 1948, 1954, 1960, 1967, and 1972; and (iii) a CDR3 having an amino acid sequence that is at least 65%, at least 70%, at least 75%, at least 80%, at least 85%, at least 90%, at least 95%, at least 99%, or 100% identical to any one of SEQ ID NOs: 1364, 1836, 1843, 1850, 1857, 1864, 1870, 1876, 1883, 1889, 1896, 1903, 1909, 1915, 1922, 1929, 1936, 1943, 1949, 1955, 1961, 1968, and 1973.

[6010] In some aspects, the antigen binding polypeptide complexes provided herein comprise a VL1 comprising an amino acid sequence that is at least 65%, at least 70%, at least 75%, at least 80%, at least 85%, at least 90%, at least 95%, at least 99%, or 100% identical to any one of SEQ ID NOs: 1361, 1833, 1840, 1847, 1854, 1861, 1868, 1874, 1880, 1887, 1893, 1900, 1907, 1913, 1919, 1926, 1933, 1940, 1947, 1952, 1958, 1965, and 1971.

[6011] In some aspects, the antigen binding polypeptide complexes provided herein comprise a VL2 comprising an amino acid sequence that is at least 65%, at least 70%, at least 75%, at least 80%, at least 85%, at least 90%, at least 95%, at least 99%, or 100% identical to any one of SEQ ID NOs: 1361, 1833, 1840, 1847, 1854, 1861, 1868, 1874, 1880, 1887, 1893, 1900, 1907, 1913, 1919, 1926, 1933, 1940, 1947, 1952, 1958, 1965, and 1971.

[6012] In some aspects, the antigen binding polypeptide complexes provided herein comprise a VL3 comprising an amino acid sequence that is at least 65%, at least 70%, at least 75%, at least 80%, at least 85%, at least 90%, at least 95%, at least 99%, or 100% identical to any one of SEQ ID NOs: 1361, 1833, 1840, 1847, 1854, 1861, 1868, 1874, 1880, 1887, 1893, 1900, 1907, 1913, 1919, 1926, 1933, 1940, 1947, 1952, 1958, 1965, and 1971.

[6013] In some aspects, the antigen binding polypeptide complexes provided herein comprise a VH1 comprising an amino acid sequence that is at least 65%, at least 70%, at least 75%, at least 80%, at least 85%, at least 90%, at least 95%, at least 99%, or 100% identical to any one of SEQ ID NOs: 1365, 1837, 1844, 1851, 1858, 1865, 1871, 1877, 1884, 1890, 1897, 1904, 1910, 1916, 1923, 1930, 1937, 1944, 1950, 1956, 1962, 1969, and 1974.

[6014] In some aspects, the antigen binding polypeptide complexes provided herein comprise a VH2 comprising an amino acid sequence that is at least 65%, at least 70%, at least 75%, at least 80%, at least 85%, at least 90%, at least 95%, at least 99%, or 100% identical to any one of SEQ ID NOs: 1365, 1837, 1844, 1851, 1858, 1865, 1871, 1877, 1884, 1890, 1897, 1904, 1910, 1916, 1923, 1930, 1937, 1944, 1950, 1956, 1962, 1969, and 1974.

[6015] In some aspects, the antigen binding polypeptide complexes provided herein comprise a VH3 comprising an amino acid sequence that is at least 65%, at least 70%, at least 75%, at least 80%, at least 85%, at least 90%, at least 95%, at least 99%, or 100% identical to any one of SEQ ID NOs: 1365, 1837, 1844, 1851, 1858, 1865, 1871, 1877, 1884, 1890, 1897, 1904, 1910, 1916, 1923, 1930, 1937, 1944, 1950, 1956, 1962, 1969, and 1974.

[6016] In some aspects, one or both of the antigen binding polypeptides comprised in the antigen binding polypeptide complexes disclosed herein, comprise one or more CL, as indicated in the formulas representing the antigen binding polypeptide complexes disclosed herein. In some aspects, the CL comprises an amino acid sequence at least 65%, at least 70%, at least 75%, at least 80%, at least 85%, at least 90%, at least 95%, at least 99%, or 100% identical to any one of SEQ ID NOs: 374, 637, or 1092-1095.

[6017] In some aspects, one or both of the antigen binding polypeptides comprised in the antigen binding polypeptide complexes disclosed herein, comprise one or more CH1, as indicated in the formulas representing the antigen binding polypeptide complexes disclosed herein. In some aspects, the CH1 comprises an amino acid sequence at least 65%, at least 70%, at least 75%, at least 80%, at least 85%, at least 90%, at least 95%, at least 99%, or 100% identical to any one of SEQ ID NOs: 375, 634, 1070, 1071, or 1086-1091.

[6018] In some aspects, one or both of the antigen binding polypeptides comprised in the antigen binding polypeptide complexes provided herein further comprise an Fc region. In some aspects, one or both of the antigen binding polypeptides comprised in the antigen binding polypeptide complexes provided herein further comprise an Fc region at the carboxy-terminus. In some aspects, the Fc region comprises an immunoglobulin heavy chain constant region 2 (CH2) and/or an immunoglobulin heavy chain constant region 3 (CH3). In some aspects, the Fc region further comprises an immunoglobulin hinge (i.e., a hinge region). In some aspects, the hinge region is interposed between a CH1 and a CH2 (i.e., a hinge region is localized between the carboxy terminal residue of a CH1 and the N-terminal residue of a CH2). In some aspects, the hinge region comprises an amino acid sequence at least 65%, at least 70%, at least 75%, at least 80%, at least 85%, at least 90%, at least 95%, at least 99%, or 100% identical to any one of SEQ ID NOs: 635, 636, 1072, 1073, or 1074. In some aspects, the Fc region comprises a CH2 and a CH3. In some aspects, the CH2 comprises an amino acid sequence that is at least 65%, at least 70%, at least 75%, at least 80%, at least 85%, at least 90%, at least 95%, at least 99%, or 100% identical to any one of SEQ ID NOs: 1075-1078. In some aspects, the CH3 comprises an amino acid sequence that is at least 65%, at least 70%, at least 75%, at least 80%, at least 85%, at least 90%, at least 95%, at least 99%, or 100% identical to any one of SEQ ID NOs: 1079-1085. In some aspects, the Fc region comprises an amino acid sequence that is at least 65%, at least 70%, at least 75%, at least 80%, at least 85%, at least 90%, at least 95%, at least 99%, or 100% identical to any one of SEQ ID NOs: 376-380.

[6019] In some aspects, the Fc region comprises one or more amino acid substitutions. In some aspects, the one or more amino acid substitutions comprise one or more half-life extension amino acid substitutions. In some aspects, the one or more half-life extension amino acid substitutions comprise one or more of amino acid substitutions M428L, N434A, N434S, L234F, L235E, P331S, M252Y, S254T, or T256E, or equivalent thereof, based on the EU numbering scheme. In some aspects, the one or more half-life extension amino acid substitutions comprise a LA (M428L and N434A, or equivalent thereof, based on the EU numbering scheme) amino acid substitution. In some aspects, the one or more half-life extension amino acid substitutions comprise a LS (M428L and N434S, or equivalent thereof, based on the EU numbering scheme) amino acid substitution. In some aspects, the one or more half-life extension amino acid substitutions comprise L234F and L235E, or equivalent thereof (based on the EU numbering scheme) amino acid substitutions. In some aspects, the one or more half-life extension amino acid substitutions comprise a TM (L234F, L235E, and P331S, or equivalent thereof, based on the EU numbering scheme) amino acid substitution. In some aspects, the one or more half-life extension amino acid substitutions comprise a YTE (M252Y, S254T, and T256E, or equivalent thereof, based on the EU numbering scheme) amino acid substitution.

[6020] In some aspects, the Fc region comprises at least one knob-into-hole modification. In some aspects, the antigen binding polypeptides complexes disclosed herein are IgG1 or IgG4 antibodies or antigen binding fragments thereof. In some aspects, the knob-into-hole modification comprises one or more of knob substitutions of S354C and T366W, or equivalent thereof, and/or one or more of hole substitutions of Y349C, T366S, L368A, Y407V, or equivalent thereof, or a combination thereof, based on the EU numbering scheme. In some aspects, the Fc region comprises a knob-into-hole modification comprising knob substitutions of S354C and T366W, or equivalent thereof, and/or hole substitutions of Y349C, T366S, L368A, and Y407V, or equivalent thereof, and/or a half-life extension amino acid substitution comprising: a LA (M428L and N434A, or equivalent thereof, based on the EU numbering scheme) amino acid substitution, a LS (M428L and N434S, or equivalent thereof, based on the EU numbering scheme) amino acid substitution, L234F and L235E, or equivalent thereof (based on the EU numbering scheme) amino acid substitutions, a TM (L234F, L235E, and P331S, or equivalent thereof, based on the EU numbering scheme) amino acid substitution, a YTE (M252Y, S254T, and T256E, or equivalent thereof, based on the EU numbering scheme) amino acid substitution, or any combination thereof.

[6021] In some aspects, the Fc region comprises knob substitutions of S354C and T366W, or equivalent thereof, and a half-life extension amino acid substitution comprising: a LA (M428L and N434A, or equivalent thereof, based on the EU numbering scheme) amino acid substitution, a LS (M428L and N434S, or equivalent thereof, based on the EU numbering scheme) amino acid substitution, L234F and L235E, or equivalent thereof (based on the EU numbering scheme) amino acid substitutions, a TM (L234F, L235E, and P331S, or equivalent thereof, based on the EU numbering scheme) amino acid substitution, a YTE (M252Y, S254T, and T256E, or equivalent thereof, based on the EU numbering scheme) amino acid substitution, or any combination thereof.

[6022] In some aspects, the Fc region comprises hole substitutions of Y349C, T366S, L368A, and Y407V, or equivalent thereof, and a half-life extension amino acid substitution comprising: a LA (M428L and N434A, or equivalent thereof, based on the EU numbering scheme) amino acid substitution, a LS (M428L and N434S, or equivalent thereof, based on the EU numbering scheme) amino acid substitution. L234F and L235E, or equivalent thereof (based on the EU numbering scheme) amino acid substitutions, a TM (L234F, L235E, and P331S, or equivalent thereof, based on the EU numbering scheme) amino acid substitution, a YTE (M252Y, S254T, and T256E, or equivalent thereof, based on the EU numbering scheme) amino acid substitution, or any combination thereof.

[6023] In some aspects, one or both of the antigen binding polypeptides comprised in the antigen binding polypeptide complexes disclosed herein comprise one or more Fc effector function knockout mutation. In some aspects, one or both of the antigen binding polypeptides comprised in the antigen binding polypeptide complexes disclosed herein are IgG1 or IgG4 antibodies or antigen binding fragments thereof. In some aspects, the Fc effector function knockout mutation is L234A, L235A, P239A, or equivalent thereof, or a combination thereof, based on the EU numbering scheme.

[6024] In some aspects, one or both of the antigen binding polypeptides comprised in the antigen binding polypeptide complexes disclosed herein comprise a mutation at a glycosylation site. In some aspects, the mutation at a glycosylation site is a mutation at an N-glycosylation site. In some aspects, one or both of the antigen binding polypeptides comprised in the antigen binding polypeptide complexes disclosed herein comprise a VH comprising a mutation at a glycosylation site. In some aspects, the mutation at a glycosylation site is a mutation at an N-glycosylation site. In some aspects, the mutation at an N-glycosylation site is at amino acid N62, or equivalent thereof, of the VH region or equivalent thereof. In some aspects, the mutation at an N-glycosylation site at amino acid N62 is N62Q or N62S, or equivalent thereof.

[6025] In some aspects, one or both of the antigen binding polypeptides comprised in the antigen binding polypeptide complexes disclosed herein, comprise one or more optional linkers. The one or more optional linkers are indicated herein as Ln, wherein n is an integer, and the integer next to each L indicates each L comprised in the antigen binding polypeptides comprised in the antigen binding polypeptide complexes disclosed herein. For example, if an antigen binding polypeptide comprised in the antigen binding polypeptide complexes disclosed herein comprises two linkers, the first linker from N-terminus to C-terminus is herein indicated as L1, and the second linker from N-terminus to C-terminus is herein indicated as L2. If an antigen binding polypeptide complex disclosed herein comprises a first antigen binding polypeptide comprising two linkers, indicated herein as L1 and L2, as explained above, the linkers comprised in the second antigen binding polypeptide are indicated with the following integer, in this example, the first linker from N-terminus to C-terminus of the second antigen binding polypeptide is herein indicated as L3, the second linker from N-terminus to C-terminus of the second antigen binding polypeptide is herein indicated as L3. In some aspects, any one of the optional linkers each independently have a length of from 0 amino acids to about 50 amino acids. In some aspects, any one of the optional linkers each independently have a length of from 5 amino acids to about 40 amino acids.

[6026] In some aspects, any one of the optional linkers are non-immunogenic. In some aspects, any one of the optional linkers do not contain a consensus T cell epitope.

[6027] In some aspects, any of Ln comprises an amino acid sequence of G or A, or an amino acid sequence at least 65%, at least 70%, at least 75%, at least 80%, at least 85%, at least 90%, at least 95%, at least 99%, or 100% identical to amino acid sequence GSS or ASG, or an amino acid sequence at least 65%, at least 70%, at least 75%, at least 80%, at least 85%, at least 90%, at least 95%, at least 99%, or 100% identical to any one of SEQ ID NOs: 333-373 and 967-971. In some aspects. Ln comprises an amino acid sequence at least 65%, at least 70%, at least 75%, at least 80%, at least 85%, at least 90%, at least 95%, at least 99%, or 100% identical to any one of SEQ ID NOs: 333-345 and 967-971.

[6028] In some aspects, an antigen binding polypeptide complex provided herein comprises a first polypeptide, and a second polypeptide; wherein the first polypeptide has a structure represented by VL1-CL-VL2-VH2-VH1-CH1, VL1-CL-VH2-VL2-VH1-CH1, VL1-CH1-VL2-VH2-VH1-CL, VL1-CH1-VH2-VL2-VH1-CL, VH1-CL-VL2-VH2-VL1-CH1, VH1-CL-VH2-VL2-VL1-CH1, VH1-CH1-VL2-VH2-VL1-CL, VH1-CH1-VH2-VL2-VL1-CL, VL2-CL-VL1-VH1-VH2-CH1, VL2-CL-VH1-VL1-VH2-CH1, VL2-CH1-VL1-VH1-VH2-CL, VL2-CH1-VH1-VL1-VH2-CL, VH2-CL-VL1-VH1-VL2-CH1, VH2-CL-VH1-VL1-VL2-CH1, VH2-CH1-VL1-VH1-VL2-CL, or VH2-CH1-VH1-VL1-VL2-CL; and wherein the second polypeptide has a structure represented by VL3-CL-VL4-VH4-VH3-CH1, VL3-CL-VH4-VL4-VH3-CH1, VL3-CH1-VL4-VH4-VH3-CL, VL3-CH1-VH4-VL4-VH3-CL, VH3-CL-VL4-VH4-VL3-CH1, VH3-CL-VH4-VL4-VL3-CH1, VH3-CH1-VL4-VH4-VL3-CL, VH3-CH1-VH4-VL4-VL3-CL, VL4-CL-VL3-VH3-VH4-CH1, VL4-CL-VH3-VL3-VH4-CH1, VL4-CH1-VL3-VH3-VH4-CL, VL4-CH1-VH3-VL3-VH4-CL, VH4-CL-VL3-VH3-VL4-CH1, VH4-CL-VH3-VL3-VL4-CH1, VH4-CH1-VL3-VH3-VL4-CL, or VH4-CH1-VH3-VL3-VL4-CL.

[6029] In some aspects, an antigen binding polypeptide complex provided herein comprises a first polypeptide, and a second polypeptide; wherein the first polypeptide has a structure represented by VL1-L1-CL-L2-VL2-L3-VH2-L4-VH1-L5-CH1, VL1-L1-CL-L2-VH2-L3-VL2-L4-VH1-L5-CH1, VL1-L1-CH1-L2-VL2-L3-VH2-L4-VH1-L5-CL, VL1-L1-CH1-L2-VH2-L3-VL2-L4-VH1-L5-CL, VH1-L1-CL-L2-VL2-L3-VH2-L4-VL1-L5-CH1, VH1-L1-CL-L2-VH2-L3-VL2-L4-VL1-L5-CH1, VH1-L1-CH1-L2-VL2-L3-VH2-L4-VL1-L5-CL, VH1-L1-CH1-L2-VH2-L3-VL2-L4-VL1-L5-CL, VL2-L1-CL-L2-VL1-L3-VH1-L4-VH2-L5-CH1, VL2-L1-CL-L2-VH1-L3-VL1-L4-VH2-L5-CH1, VL2-L1-CH1-L2-VL1-L3-VH1-L4-VH2-L5-CL, VL2-L1-CH1-L2-VH1-L3-VL1-L4-VH2-L5-CL, VH2-L1-CL-L2-VL1-L3-VH1-L4-VL2-L5-CH1, VH2-L1-CL-L2-VH1-L3-VL1-L4-VL2-L5-CH1, VH2-L1-CH1-L2-VL1-L3-VH1-L4- VL2-L5-CL, or VH2-L1-CH1-L2-VH1-L3-VL1-L4-VL2-L5-CL; and wherein the second polypeptide has a structure represented by VL3-L6-CL-L7-VL4-L8-VH4-L9-VH3-L10-CH1, VL3-L6-CL-L7-VH4-L8-VL4-L9-VH3-L10-CH1, VL3-L6-CH1-L7-VL4-L8-VH4-L9-VH3-L10-CL, VL3-L6-CH1-L7-VH4-L8-VL4-L9-VH3-L10-CL, VH3-L6-CL-L7-VL4-L8-VH4-L9-VL3-L10-CH1, VH3-L6-CL-L7-VH4-L8-VL4-L9- VL3-L10-CH1, VH3-L6-CH1-L7-VL4-L8-VH4-L9-VL3-L10-CL, VH3-L6-CH1-L7-VH4-L8-VL4-L9-VL3-L10-CL, VL4-L6-CL-L7-VL3-L8-VH3-L9-VH4-L10-CH1, VL4-L6-CL-L7-VH3-L8-VL3-L9-VH4- L10-CH1, VL4-L6-CH1-L7-VL3-L8-VH3-L9-VH4-L10-CL, VL4-L6-CH1-L7-VH3-L8-VL3-L9-VH4-L10-CL, VH4-L6-CL-L7-VL3-L8-VH3-L9-VL4-L10-CH1, VH4-L6-CL-L7-VH3-L8-VL3-L9-VL4-L10- CH1, VH4-L6-CH1-L7-VL3-L8-VH3-L9-VL4-L10-CL, or VH4-L6-CH1-L7-VH3-L8-VL3-L9-VL4-L10-CL.

[6030] In some aspects, an antigen binding polypeptide complex provided herein comprises a first polypeptide, and a second polypeptide; wherein the first polypeptide has a structure represented by VL1-CL-L1-VL2-L2-VH2-L3-VH1-CH1; VL1-CL-L1-VH2-L2-VL2-L3-VH1-CH1; VL1-CH1-L1-VL2-L2-VH2-L3-VH1-CL; VL1-CH1-L1-VH2-L2-VL2-L3-VH1-CL; VH1-CL-L1-VL2-L2-VH2-L3-VL1-CH1; VH1-CL-L1-VH2-L2-VL2-L3-VL1-CH1; VH1-CH1-L1-VL2-L2-VH2-L3-VL1-CL; VH1-CH1-L1-VH2-L2-VL2-L3-VL1-CL; VL2-CL-L1-VL1-L2-VH1-L3-VH2-CH1; VL2-CL-L1-VH1-L2-VL1-L3-VH2- CH1; VL2-CH1-L1-VL1-L2-VH1-L3-VH2-CL; VL2-CH1-L1-VH1-L2-VL1-L3-VH2-CL; VH2-CL-L1-VL1-L2-VH1-L3-VL2-CH1; VH2-CL-L1-VH1-L2-VL1-L3-VL2-CH1; VH2-CH1-L1-VL1-L2-VH1-L3-VL2-CL; or VH2-CH1-L1-VH1-L2-VL1-L3-VL2-CL; and wherein the second polypeptide has a structure represented by VL3-CL-L4-VL4-L5-VH4-L6-VH3-CH1; VL3-CL-L4-VH4-L5-VL4-L6-VH3-CH1; VL3-CH1-L4-VL4-L5-VH4-L6-VH3-CL; VL3-CH1-L4-VH4-L5-VL4-L6-VH3-CL; VH3-CL-L4-VL4-L5-VH4-L6-VL3-CH1; VH3-CL-L4-VH4-L5-VL4-L6-VL3-CH1; VH3-CH1-L4-VL4-L5-VH4-L6-VL3-CL; VH3-CH1-L4-VH4-L5-VL4-L6-VL3-CL; VL4-CL-L4-VL3-L5-VH3-L6-VH4-CH1; VL4-CL-L4-VH3-L5-VL3-L6-VH4-CH1; VL4-CH1-L4-VL3-L5-VH3-L6-VH4-CL; VL4-CH1-L4-VH3-L5-VL3-L6-VH4-CL; VH4-CL-L4-VL3-L5-VH3-L6-VL4-CH1; VH4-CL-L4-VH3-L5-VL3-L6-VL4-CH1; VH4-CH1-L4-VL3-L5-VH3-L6-VL4-CL; or VH4-CH1-L4-VH3-L5-VL3-L6-VL4-CL.

[6031] In some aspects, an antigen binding polypeptide complex provided herein comprises a first polypeptide, and a second polypeptide; wherein the first polypeptide has a structure represented by VL1-CL-VL2-VH2-VH1-CH1-CH2-CH3, VL1-CL-VH2-VL2-VH1-CH1-CH2-CH3, VL1-CH1-VL2-VH2-VH1-CL-CH2-CH3, VL1-CH1-VH2-VL2-VH1-CL-CH2-CH3, VH1-CL-VL2-VH2-VL1-CH1-CH2-CH3, VH1-CL-VH2-VL2-VL1-CH1-CH2-CH3, VH1-CH1-VL2-VH2-VL1-CL-CH2-CH3, VH1-CH1-VH2-VL2-VL1-CL-CH2-CH3, VL2-CL-VL1-VH1-VH2-CH1-CH2-CH3, VL2-CL-VH1-VL1-VH2-CH1-CH2-CH3, VL2-CH1-VL1-VH1-VH2-CL-CH2-CH3, VL2-CH1-VH1-VL1-VH2-CL-CH2-CH3, VH2-CL-VL1-VH1-VL2-CH1-CH2-CH3, VH2-CL-VH1-VL1-VL2-CH1-CH2-CH3, VH2-CH1-VL1-VH1-VL2-CL-CH2-CH3, or VH2-CH1-VH1-VL1-VL2-CL-CH2-CH3; and wherein the second polypeptide has a structure represented by VL3-CL-VL4-VH4-VH3-CH1-CH2-CH3, VL3-CL-VH4-VL4-VH3-CH1-CH2-CH3, VL3-CH1-VL4-VH4-VH3-CL-CH2-CH3, VL3-CH1-VH4-VL4-VH3-CL-CH2-CH3, VH3-CL-VL4-VH4-VL3-CH1-CH2-CH3, VH3-CL-VH4-VL4-VL3-CH1-CH2-CH3, VH3-CH1-VL4-VH4-VL3-CL-CH2-CH3, VH3-CH1-VH4-VL4-VL3-CL-CH2-CH3, VL4-CL-VL3-VH3-VH4-CH1-CH2-CH3, VL4-CL-VH3-VL3-VH4-CH1-CH2-CH3, VL4-CH1-VL3-VH3-VH4-CL-CH2-CH3, VL4-CH1-VH3-VL3-VH4-CL-CH2-CH3, VH4-CL-VL3-VH3-VL4-CH1-CH2-CH3, VH4-CL-VH3-VL3-VL4-CH1-CH2-CH3, VH4-CH1-VL3-VH3-VL4-CL-CH2-CH3, or VH4-CH1-VH3-VL3-VL4-CL-CH2-CH3.

[6032] In some aspects, an antigen binding polypeptide complex provided herein comprises a first polypeptide, and a second polypeptide; wherein the first polypeptide has a structure represented by VL1-L1-CL-L2-VL2-L3-VH2-L4-VH1-L5-CH1-CH2-CH3, VL1-L1-CL-L2-VH2-L3-VL2-L4-VH1-L5-CH1-CH2-CH3, VL1-L1-CH1-L2-VL2-L3-VH2-L4-VH1-L5-CL-CH2-CH3, VL1-L1-CH1-L2-VH2-L3-VL2-L4-VH1-L5-CL-CH2-CH3, VH1-L1-CL-L2-VL2-L3-VH2-L4-VL1-L5-CH1-CH2-CH3, VH1-L1-CL- L2-VH2-L3-VL2-L4-VL1-L5-CH1-CH2-CH3, VH1-L1-CH1-L2-VL2-L3-VH2-L4-VL1-L5-CL-CH2-CH3, VH1-L1-CH1-L2-VH2-L3-VL2-L4-VL1-L5-CL-CH2-CH3, VL2-L1-CL-L2-VL1-L3-VH1-L4-VH2-L5-CH1-CH2-CH3, VL2-L1-CL-L2-VH1-L3-VL1-L4-VH2-L5-CH1-CH2-CH3, VL2-L1-CH1-L2-VL1-L3-VH1-L4-VH2-L5-CL-CH2-CH3, VL2-L1-CH1-L2-VH1-L3-VL1-L4-VH2-L5-CL-CH2-CH3, VH2-L1-CL-L2-VL1-L3-VH1-L4-VL2-L5-CH1-CH2-CH3, VH2-L1-CL-L2-VH1-L3-VL1-L4-VL2-L5-CH1-CH2-CH3, VH2-L1-CH1-L2-VL1-L3-VH1-L4-VL2-L5-CL-CH2-CH3, or VH2-L1-CH1-L2-VH1-L3-VL1-L4-VL2-L5-CL-CH2-CH3; and wherein the second polypeptide has a structure represented by VL3-L6-CL-L7-VL4-L8-VH4-L9-VH3-L10-CH1-CH2-CH3, VL3-L6-CL-L7-VH4-L8-VL4-L9-VH3-L10-CH1-CH2-CH3, VL3-L6-CH1-L7-VL4-L8-VH4-L9-VH3-L10-CL-CH2-CH3, VL3-L6-CH1-L7-VH4-L8-VL4-L9- VH3-L10-CL-CH2-CH3, VH3-L6-CL-L7-VL4-L8-VH4-L9-VL3-L10-CH1-CH2-CH3, VH3-L6-CL-L7-VH4-L8-VL4-L9-VL3-L10-CH1-CH2-CH3, VH3-L6-CH1-L7-VL4-L8-VH4-L9-VL3-L10-CL-CH2-CH3, VH3-L6-CH1-L7-VH4-L8-VL4-L9-VL3-L10-CL-CH2-CH3, VL4-L6-CL-L7-VL3-L8-VH3-L9-VH4-L10-CH1-CH2-CH3, VL4-L6-CL-L7-VH3-L8-VL3-L9-VH4-L10-CH1-CH2-CH3, VL4-L6-CH1-L7-VL3-L8-VH3-L9-VH4-L10-CL-CH2-CH3, VL4-L6-CH1-L7-VH3-L8-VL3-L9-VH4-L10-CL-CH2-CH3, VH4-L6-CL- L7-VL3-L8-VH3-L9-VL4-L10-CH1-CH2-CH3, VH4-L6-CL-L7-VH3-L8-VL3-L9-VL4-L10-CH1- CH2-CH3, VH4-L6-CH1-L7-VL3-L8-VH3-L9-VL4-L10-CL-CH2-CH3, or VH4-L6-CH1-L7-VH3-L8-VL3-L9-VL4-L10-CL-CH2-CH3.

[6033] In some aspects, an antigen binding polypeptide complex provided herein comprises a first polypeptide, and a second polypeptide; wherein the first polypeptide has a structure represented by VL1-CL-L1-VL2-L2-VH2-L3-VH1-CH1-CH2-CH3; VL1-CL-L1-VH2-L2-VL2-L3-VH1-CH1-CH2-CH3; VL1-CH1-L1-VL2-L2-VH2-L3-VH1-CL-CH2-CH3; VL1-CH1-L1-VH2-L2-VL2-L3-VH1-CL-CH2-CH3; VH1-CL-L1-VL2-L2-VH2-L3-VL1-CH1-CH2-CH3; VH1-CL-L1-VH2-L2-VL2-L3-VL1-CH1-CH2-CH3; VH1-CH1-L1-VL2-L2-VH2-L3-VL1-CL-CH2-CH3; VH1-CH1-L1-VH2-L2-VL2-L3-VL1-CL-CH2-CH3; VL2-CL-L1-VL1-L2-VH1-L3-VH2-CH1-CH2-CH3; VL2-CL-L1-VH1-L2-VL1-L3-VH2-CH1-CH2-CH3; VL2-CH1-L1-VL1-L2-VH1-L3-VH2-CL-CH2-CH3; VL2-CH1-L1-VH1-L2-VL1-L3-VH2-CL-CH2-CH3; VH2-CL-L1-VL1-L2-VH1-L3-VL2-CH1-CH2-CH3; VH2-CL-L1-VH1-L2-VL1-L3-VL2-CH1-CH2-CH3; VH2-CH1-L1-VL1-L2-VH1-L3-VL2-CL-CH2-CH3; or VH2-CH1-L1-VH1-L2-VL1-L3-VL2-CL-CH2-CH3; and wherein the second polypeptide has a structure represented by VL3-CL-L4-VL4-L5-VH4-L6-VH3-CH1-CH2-CH3; VL3-CL-L4-VH4-L5-VL4-L6-VH3-CH1-CH2-CH3; VL3-CH1-L4-VL4-L5-VH4-L6-VH3-CL-CH2-CH3; VL3-CH1-L4-VH4-L5-VL4-L6-VH3-CL-CH2-CH3; VH3-CL-L4-VL4-L5-VH4-L6-VL3-CH1-CH2-CH3; VH3-CL-L4-VH4-L5-VL4-L6-VL3-CH1-CH2-CH3; VH3-CH1-L4-VL4-L5-VH4-L6-VL3-CL-CH2-CH3; VH3-CH1-L4-VH4-L5-VL4-L6-VL3-CL-CH2-CH3; VL4-CL-L4-VL3-L5-VH3-L6-VH4-CH1-CH2-CH3; VL4-CL-L4-VH3-L5-VL3-L6-VH4-CH1-CH2-CH3; VL4-CH1-L4-VL3-L5-VH3-L6-VH4-CL-CH2-CH3; VL4-CH1-L4-VH3-L5-VL3-L6-VH4-CL-CH2-CH3; VH4-CL-L4-VL3-L5-VH3-L6-VL4-CH1-CH2-CH3; VH4-CL-L4-VH3-L5-VL3-L6-VL4-CH1-CH2-CH3; VH4-CH1-L4-VL3-L5-VH3-L6-VL4-CL-CH2-CH3; or VH4-CH1-L4-VH3-L5-VL3-L6-VL4-CL-CH2-CH3.

[6034] In some aspects, an antigen binding polypeptide complex provided herein comprises a first polypeptide, and a second polypeptide; wherein the first polypeptide has a structure represented by VL1-VH1-VL2-CL-VH2-CH1, VL1-VH1-VL2-CH1-VH2-CL, VL1-VH1-VH2-CL-VL2-CH1, VL1-VH1-VH2-CH1-VL2-CL, VL1-VL2-VH1-CL-VH2-CH1, VL1-VL2-VH1-CH1-VH2-CL, VL1-VH2-VH1-CL-VL2-CH1, VL1-VH2-VH1-CH1-VL2-CL, VH1-VL1-VL2-CL-VH2-CH1, VH1-VL1-VL2-CH1-VH2-CL, VH1-VL1-VH2-CL-VL2-CH1, VH1-VL1-VH2-CH1-VL2-CL, VH1-VL2-VL1-CL-VH2-CH1, VH1-VL2-VL1-CH1-VH2-CL, VH1-VH2-VL1-CL-VL2-CH1, VH1-VH2-VL1-CH1-VL2-CL, VL2-VL1-VH2-CL-VH1-CH1, VL2-VL1-VH2-CH1-VH1-CL, VL2-VH1-VH2-CL-VL1-CH1, VL2-VH1-VH2-CH1-VL1-CL, VL2-VH2-VL1-CL-VH1-CH1, VL2-VH2-VL1-CH1-VH1-CL, VL2-VH2-VH1-CL-VL1-CH1, VL2-VH2-VH1-CH1-VL1-CL, VH2-VL1-VL2-CL-VH1-CH1, VH2-VL1-VL2-CH1-VH1-CL, VH2-VH1-VL2-CL-VL1-CH1, VH2-VH1-VL2-CH1-VL1-CL, VH2-VL2-VL1-CL-VH1-CH1, VH2-VL2-VL1-CH1-VH1-CL, VH2-VL2-VH1-CL-VL1-CH1, or VH2-VL2-VH1-CH1-VL1-CL; and wherein the second polypeptide has a structure represented by VL3-VH3-VL4-CL-VH4-CH1, VL3-VH3-VL4-CH1-VH4-CL, VL3-VH3-VH4-CL-VL4-CH1, VL3-VH3-VH4-CH1-VL4-CL, VL3-VL4-VH3-CL-VH4-CH1, VL3-VL4-VH3-CH1-VH4-CL, VL3-VH4-VH3-CL-VL4-CH1, VL3-VH4-VH3-CH1-VL4-CL, VH3-VL3-VL4-CL-VH4-CH1, VH3-VL3-VL4-CH1-VH4-CL, VH3-VL3-VH4-CL-VL4-CH1, VH3-VL3-VH4-CH1-VL4-CL, VH3-VL4-VL3-CL-VH4-CH1, VH3-VL4-VL3-CH1-VH4-CL, VH3-VH4-VL3-CL-VL4-CH1, VH3-VH4-VL3-CH1-VL4-CL, VL4-VL3-VH4-CL-VH3-CH1, VL4-VL3-VH4-CH1-VH3-CL, VL4-VH3-VH4-CL-VL3-CH1, VL4-VH3-VH4-CH1-VL3-CL, VL4-VH4-VL3-CL-VH3-CH1, VL4-VH4-VL3-CH1-VH3-CL, VL4-VH4-VH3-CL-VL3-CH1, VL4-VH4-VH3-CH1-VL3-CL, VH4-VL3-VL4-CL-VH3-CH1, VH4-VL3-VL4-CH1-VH3-CL, VH4-VH3-VL4-CL-VL3-CH1, VH4-VH3-VL4-CH1-VL3-CL, VH4-VL4-VL3-CL-VH3-CH1, VH4-VL4-VL3-CH1-VH3-CL, VH4-VL4-VH3-CL-VL3-CH1, or VH4-VL4-VH3-CH1-VL3-CL.

[6035] In some aspects, an antigen binding polypeptide complex provided herein comprises a first polypeptide, and a second polypeptide; wherein the first polypeptide has a structure represented by VL1-L1-VH1-L2-VL2-L3-CL-L4-VH2-L5-CH1, VL1-L1-VH1-L2-VL2-L3-CH1-L4-VH2-L5-CL, VL1-L1-VH1-L2-VH2-L3-CL-L4-VL2-L5-CH1, VL1-L1-VH1-L2-VH2-L3-CH1-L4-VL2-L5-CL, VL1-L1-VL2-L2-VH1-L3-CL-L4-VH2-L5-CH1, VL1-L1-VL2-L2-VH1-L3-CH1-L4-VH2-L5-CL, VL1-L1-VH2-L2-VH1-L3-CL-L4-VL2-L5-CH1, VL1-L1-VH2-L2-VH1-L3-CH1-L4-VL2-L5-CL, VH1-L1-VL1-L2-VL2-L3-CL-L4-VH2-L5-CH1, VH1-L1-VL1-L2-VL2-L3-CH1-L4-VH2-L5-CL, VH1-L1-VL1-L2-VH2-L3-CL-L4-VL2-L5-CH1, VH1-L1-VL1-L2-VH2-L3-CH1-L4-VL2-L5-CL, VH1-L1-VL2-L2-VL1-L3-CL-L4-VH2-L5-CH1, VH1-L1-VL2-L2-VL1-L3-CH1-L4-VH2-L5-CL, VH1-L1-VH2-L2-VL1-L3-CL-L4-VL2-L5-CH1, VH1-L1-VH2-L2-VL1-L3-CH1-L4-VL2-L5-CL, VL2-L1-VL1-L2-VH2-L3-CL-L4-VH1-L5-CH1, VL2-L1-VL1-L2-VH2-L3-CH1-L4-VH1-L5-CL, VL2-L1-VH1-L2-VH2-L3-CL-L4-VL1-L5-CH1, VL2-L1-VH1-L2-VH2-L3-CH1-L4-VL1-L5-CL, VL2-L1-VH2-L2-VL1-L3-CL-L4-VH1-L5-CH1, VL2-L1-VH2-L2-VL1-L3-CH1-L4-VH1-L5-CL, VL2-L1-VH2-L2-VH1-L3-CL-L4-VL1-L5-CH1, VL2-L1-VH2-L2-VH1-L3-CH1-L4-VL1-L5-CL, VH2-L1-VL1-L2-VL2-L3-CL-L4-VH1-L5-CH1, VH2-L1-VL1-L2-VL2-L3-CH1-L4-VH1-L5-CL, VH2-L1-VH1-L2-VL2-L3-CL-L4-VL1-L5-CH1, VH2-L1-VH1-L2-VL2-L3-CH1-L4-VL1-L5-CL, VH2-L1-VL2-L2-VL1-L3-CL-L4-VH1-L5-CH1, VH2-L1-VL2-L2-VL1-L3-CH1-L4-VH1-L5-CL, VH2-L1-VL2-L2-VH1-L3-CL-L4-VL1-L5-CH1, or VH2-L1-VL2-L2-VH1-L3-CH1-L4-VL1-L5-CL; and wherein the second polypeptide has a structure represented by VL3-L6-VH3-L7-VL4-L8-CL-L9-VH4-L10-CH1, VL3-L6-VH3-L7-VL4-L8-CH1-L9-VH4-L10-CL, VL3-L6-VH3-L7-VH4-L8-CL-L9-VL4-L10-CH1, VL3-L6-VH3-L7-VH4-L8-CH1-L9-VL4-L10-CL, VL3-L6-VL4-L7-VH3-L8-CL-L9-VH4-L10-CH1, VL3-L6-VL4-L7-VH3-L8-CH1-L9-VH4-L10-CL, VL3-L6-VH4-L7-VH3-L8-CL-L9-VL4-L10-CH1, VL3-L6-VH4-L7-VH3-L8-CH1-L9-VL4-L10-CL, VH3-L6-VL3-L7-VL4-L8-CL-L9-VH4-L10-CH1, VH3-L6-VL3-L7-VL4-L8-CH1-L9-VH4-L10-CL, VH3-L6-VL3-L7-VH4-L8-CL-L9-VL4-L10-CH1, VH3-L6-VL3-L7-VH4-L8-CH1-L9-VL4-L10-CL, VH3-L6-VL4-L7-VL3-L8-CL-L9-VH4-L10-CH1, VH3-L6-VL4-L7-VL3-L8-CH1-L9-VH4-L10-CL, VH3-L6-VH4-L7-VL3-L8-CL-L9-VL4-L10-CH1, VH3-L6-VH4-L7-VL3-L8-CH1-L9-VL4-L10-CL, VL4-L6-VL3-L7-VH4-L8-CL-L9-VH3-L10-CH1, VL4-L6-VL3-L7-VH4-L8-CH1-L9-VH3-L10-CL, VL4-L6-VH3-L7-VH4-L8-CL-L9-VL3-L10-CH1, VL4-L6-VH3-L7-VH4-L8-CH1-L9-VL3-L10-CL, VL4-L6-VH4-L7-VL3-L8-CL-L9-VH3-L10-CH1, VL4-L6-VH4-L7-VL3-L8-CH1-L9-VH3-L10-CL, VL4-L6-VH4-L7-VH3-L8-CL- L9-VL3-L10-CH1, VL4-L6-VH4-L7-VH3-L8-CH1-L9-VL3-L10-CL, VH4-L6-VL3-L7-VL4-L8-CL-L9-VH3-L10-CH1, VH4-L6-VL3-L7-VL4-L8-CH1-L9-VH3-L10-CL, VH4-L6-VH3-L7-VL4-L8-CL-L9-VL3-L10-CH1, VH4-L6-VH3-L7-VL4-L8-CH1-L9-VL3-L10-CL, VH4-L6-VL4-L7-VL3-L8-CL-L9-VH3-L10-CH1, VH4-L6-VL4-L7-VL3-L8-CH1-L9-VH3-L10-CL, VH4-L6-VL4-L7-VH3-L8-CL-L9-VL3-L10-CH1, or VH4-L6-VL4-L7-VH3-L8-CH1-L9-VL3-L10-CL.

[6036] In some aspects, an antigen binding polypeptide complex provided herein comprises a first polypeptide, and a second polypeptide; wherein the first polypeptide has a structure represented by VL1-VH1-VL2-CL-VH2-CH1-CH2-CH3, VL1-VH1-VL2-CH1-VH2-CL-CH2-CH3, VL1-VH1-VH2-CL-VL2-CH1-CH2-CH3, VL1-VH1-VH2-CH1-VL2-CL-CH2-CH3, VL1-VL2-VH1-CL-VH2-CH1-CH2-CH3, VL1-VL2-VH1-CH1-VH2-CL-CH2-CH3, VL1-VH2-VH1-CL-VL2-CH1-CH2-CH3, VL1-VH2-VH1-CH1-VL2-CL-CH2-CH3, VH1-VL1-VL2-CL-VH2-CH1-CH2-CH3, VH1-VL1-VL2-CH1-VH2-CL-CH2-CH3, VH1-VL1-VH2-CL-VL2-CH1-CH2-CH3, VH1-VL1-VH2-CH1-VL2-CL-CH2-CH3, VH1-VL2-VL1-CL-VH2-CH1-CH2-CH3, VH1-VL2-VL1-CH1-VH2-CL-CH2-CH3, VH1-VH2-VL1-CL-VL2-CH1-CH2-CH3, VH1-VH2-VL1-CH1-VL2-CL-CH2-CH3, VL2-VL1-VH2-CL-VH1-CH1-CH2-CH3, VL2-VL1-VH2-CH1-VH1-CL-CH2-CH3, VL2-VH1-VH2-CL-VL1-CH1-CH2-CH3, VL2-VH1-VH2-CH1-VL1-CL-CH2-CH3, VL2-VH2-VL1-CL-VH1-CH1-CH2-CH3, VL2-VH2-VL1-CH1-VH1-CL-CH2-CH3, VL2-VH2-VH1-CL-VL1-CH1-CH2-CH3, VL2-VH2-VH1-CH1-VL1-CL-CH2-CH3, VH2-VL1-VL2-CL-VH1-CH1-CH2-CH3, VH2-VL1-VL2-CH1-VH1-CL-CH2-CH3, VH2-VH1-VL2-CL-VL1-CH1-CH2-CH3, VH2-VH1-VL2-CH1-VL1-CL-CH2-CH3, VH2-VL2-VL1-CL-VH1-CH1-CH2-CH3, VH2-VL2-VL1-CH1-VH1-CL-CH2-CH3, VH2-VL2-VH1-CL-VL1-CH1-CH2-CH3, or VH2-VL2-VH1-CH1-VL1-CL-CH2-CH3; and wherein the second polypeptide has a structure represented by VL3-VH3-VL4-CL-VH4-CH1-CH2-CH3, VL3-VH3-VL4-CH1-VH4-CL-CH2-CH3, VL3-VH3-VH4-CL-VL4-CH1-CH2-CH3, VL3-VH3-VH4-CH1-VL4-CL-CH2-CH3, VL3-VL4-VH3-CL-VH4-CH1-CH2-CH3, VL3-VL4-VH3-CH1-VH4-CL-CH2-CH3, VL3-VH4-VH3-CL-VL4-CH1-CH2-CH3, VL3-VH4-VH3-CH1-VL4-CL-CH2-CH3, VH3-VL3-VL4-CL-VH4-CH1-CH2-CH3, VH3-VL3-VL4-CH1-VH4-CL-CH2-CH3, VH3-VL3-VH4-CL-VL4-CH1-CH2-CH3, VH3-VL3-VH4-CH1-VL4-CL-CH2-CH3, VH3-VL4-VL3-CL-VH4-CH1-CH2-CH3, VH3-VL4-VL3-CH1-VH4-CL-CH2-CH3, VH3-VH4-VL3-CL-VL4-CH1-CH2-CH3, VH3-VH4-VL3-CH1-VL4-CL-CH2-CH3, VL4-VL3-VH4-CL-VH3-CH1-CH2-CH3, VL4-VL3-VH4-CH1-VH3-CL-CH2-CH3, VL4-VH3-VH4-CL-VL3-CH1-CH2-CH3, VL4-VH3-VH4-CH1-VL3-CL-CH2-CH3, VL4-VH4-VL3-CL-VH3-CH1-CH2-CH3, VL4-VH4-VL3-CH1-VH3-CL-CH2-CH3, VL4-VH4-VH3-CL-VL3-CH1-CH2-CH3, VL4-VH4-VH3-CH1-VL3-CL-CH2-CH3, VH4-VL3-VL4-CL-VH3-CH1-CH2-CH3, VH4-VL3-VL4-CH1-VH3-CL-CH2-CH3, VH4-VH3-VL4-CL-VL3-CH1-CH2-CH3, VH4-VH3-VL4-CH1-VL3-CL-CH2-CH3, VH4-VL4-VL3-CL-VH3-CH1-CH2-CH3, VH4-VL4-VL3-CH1-VH3-CL-CH2-CH3, VH4-VL4-VH3-CL-VL3-CH1-CH2-CH3, or VH4-VL4-VH3-CH1-VL3-CL-CH2-CH3.

[6037] In some aspects, an antigen binding polypeptide complex provided herein comprises a first polypeptide, and a second polypeptide; wherein the first polypeptide has a structure represented by VL1-L1-VH1-L2-VL2-L3-CL-L4-VH2-L5-CH1-CH2-CH3, VL1-L1-VH1-L2-VL2-L3-CH1-L4-VH2- L5-CL-CH2-CH3, VL1-L1-VH1-L2-VH2-L3-CL-L4-VL2-L5-CH1-CH2-CH3, VL1-L1-VH1-L2-VH2-L3-CH1-L4-VL2-L5-CL-CH2-CH3, VL1-L1-VL2-L2-VH1-L3-CL-L4-VH2-L5-CH1-CH2-CH3, VL1-L1-VL2-L2-VH1-L3-CH1-L4-VH2-L5-CL-CH2-CH3, VL1-L1-VH2-L2-VH1-L3-CL-L4-VL2-L5-CH1-CH2-CH3, VL1-L1-VH2-L2-VH1-L3-CH1-L4-VL2-L5-CL-CH2-CH3, VH1-L1-VL1-L2-VL2-L3-CL-L4-VH2-L5-CH1-CH2-CH3, VH1-L1-VL1-L2-VL2-L3-CH1-L4-VH2-L5-CL-CH2-CH3, VH1-L1-VL1-L2-VH2-L3-CL-L4-VL2-L5-CH1-CH2-CH3, VH1-L1-VL1-L2-VH2-L3-CH1-L4-VL2-L5-CL-CH2-CH3, VH1-L1-VL2-L2-VL1-L3-CL-L4-VH2-L5-CH1-CH2-CH3, VH1-L1-VL2-L2-VL1-L3-CH1-L4-VH2-L5- CL-CH2-CH3, VH1-L1-VH2-L2-VL1-L3-CL-L4-VL2-L5-CH1-CH2-CH3, VH1-L1-VH2-L2-VL1-L3-CH1-L4-VL2-L5-CL-CH2-CH3, VL2-L1-VL1-L2-VH2-L3-CL-L4-VH1-L5-CH1-CH2-CH3, VL2-L1-VL1-L2-VH2-L3-CH1-L4-VH1-L5-CL-CH2-CH3, VL2-L1-VH1-L2-VH2-L3-CL-L4-VL1-L5-CH1-CH2-CH3, VL2-L1-VH1-L2-VH2-L3-CH1-L4-VL1-L5-CL-CH2-CH3, VL2-L1-VH2-L2-VL1-L3-CL-L4-VH1-L5-CH1-CH2-CH3, VL2-L1-VH2-L2-VL1-L3-CH1-L4-VH1-L5-CL-CH2-CH3, VL2-L1-VH2-L2-VH1-L3-CL-L4-VL1-L5-CH1-CH2-CH3, VL2-L1-VH2-L2-VH1-L3-CH1-L4-VL1-L5-CL-CH2-CH3, VH2-L1-VL1-L2-VL2-L3-CL-L4-VH1-L5-CH1-CH2-CH3, VH2-L1-VL1-L2-VL2-L3-CH1-L4-VH1-L5- CL-CH2-CH3, VH2-L1-VH1-L2-VL2-L3-CL-L4-VL1-L5-CH1-CH2-CH3, VH2-L1-VH1-L2-VL2-L3-CH1-L4-VL1-L5-CL-CH2-CH3, VH2-L1-VL2-L2-VL1-L3-CL-L4-VH1-L5-CH1-CH2-CH3, VH2-L1-VL2-L2-VL1-L3-CH1-L4-VH1-L5-CL-CH2-CH3, VH2-L1-VL2-L2-VH1-L3-CL-L4-VL1-L5-CH1-CH2-CH3, or VH2-L1-VL2-L2-VH1-L3-CH1-L4-VL1-L5-CL-CH2-CH3; and wherein the second polypeptide has a structure represented by VL3-L6-VH3-L7-VL4-L8-CL-L9-VH4-L10-CH1-CH2-CH3, VL3-L6-VH3-L7-VL4-L8-CH1-L9-VH4-L10-CL-CH2-CH3, VL3-L6-VH3-L7-VH4-L8-CL-L9-VL4-L10-CH1-CH2-CH3, VL3-L6-VH3-L7-VH4-L8-CH1-L9-VL4-L10-CL-CH2-CH3, VL3-L6-VL4-L7-VH3-L8-CL-L9-VH4-L10-CH1-CH2-CH3, VL3-L6-VL4-L7-VH3-L8-CH1-L9-VH4-L10-CL-CH2-CH3, VL3-L6-VH4-L7-VH3-L8-CL-L9-VL4-L10-CH1-CH2-CH3, VL3-L6-VH4-L7-VH3-L8-CH1-L9-VL4-L10-CL-CH2-CH3, VH3- L6-VL3-L7-VL4-L8-CL-L9-VH4-L10-CH1-CH2-CH3, VH3-L6-VL3-L7-VL4-L8-CH1-L9-VH4-L10-CL-CH2-CH3, VH3-L6-VL3-L7-VH4-L8-CL-L9-VL4-L10-CH1-CH2-CH3, VH3-L6-VL3-L7-VH4-L8- CH1-L9-VL4-L10-CL-CH2-CH3, VH3-L6-VL4-L7-VL3-L8-CL-L9-VH4-L10-CH1-CH2-CH3, VH3-L6- VL4-L7-VL3-L8-CH1-L9-VH4-L10-CL-CH2-CH3, VH3-L6-VH4-L7-VL3-L8-CL-L9-VL4-L10-CH1-CH2-CH3, VH3-L6-VH4-L7-VL3-L8-CH1-L9-VL4-L10-CL-CH2-CH3, VL4-L6-VL3-L7-VH4-L8-CL-L9-VH3-L10-CH1-CH2-CH3, VL4-L6-VL3-L7-VH4-L8-CH1-L9-VH3-L10-CL-CH2-CH3, VL4-L6-VH3-L7-VH4-L8-CL-L9-VL3-L10-CH1-CH2-CH3, VL4-L6-VH3-L7-VH4-L8-CH1-L9-VL3-L10-CL-CH2-CH3, VL4-L6-VH4-L7-VL3-L8-CL-L9-VH3-L10-CH1-CH2-CH3, VL4-L6-VH4-L7-VL3-L8-CH1-L9-VH3-L10-CL-CH2-CH3, VL4-L6-VH4-L7-VH3-L8-CL-L9-VL3-L10-CH1-CH2-CH3, VL4-L6-VH4- L7-VH3-L8-CH1-L9-VL3-L10-CL-CH2-CH3, VH4-L6-VL3-L7-VL4-L8-CL-L9-VH3-L10-CH1-CH2-CH3, VH4-L6-VL3-L7-VL4-L8-CH1-L9-VH3-L10-CL-CH2-CH3, VH4-L6-VH3-L7-VL4-L8-CL-L9-VL3-L10-CH1-CH2-CH3, VH4-L6-VH3-L7-VL4-L8-CH1-L9-VL3-L10-CL-CH2-CH3, VH4-L6-VL4-L7-VL3-L8-CL-L9-VH3-L10-CH1-CH2-CH3, VH4-L6-VL4-L7-VL3-L8-CH1-L9-VH3-L10-CL-CH2-CH3, VH4- L6-VL4-L7-VH3-L8-CL-L9-VL3-L10-CH1-CH2-CH3, or VH4-L6-VL4-L7-VH3-L8-CH1-L9-VL3-L10-CL-CH2-CH3.

[6038] In some aspects, an antigen binding polypeptide complex provided herein comprises a first polypeptide, and a second polypeptide; wherein the first polypeptide has a structure represented by VL1-CL-VH1-CH1-VL2-VH2, VL1-CL-VH1-CH1-VH2-VL2, VL1-CL-VL2-CH1-VH1-VH2, VL1-CL-VH2-CH1-VH1-VL2, VL1-CH1-VH1-CL-VL2-VH2, VL1-CH1-VH1-CL-VH2-VL2, VL1-CH1-VL2-CL-VH1-VH2, VL1-CH1-VH2-CL-VH1-VL2, VH1-CL-VL1-CH1-VL2-VH2, VH1-CL-VL1-CH1-VH2-VL2, VH1-CL-VL2-CH1-VL1-VH2, VH1-CL-VH2-CH1-VL1-VL2, VH1-CH1-VL1-CL-VL2-VH2, VH1-CH1-VL1-CL-VH2-VL2, VH1-CH1-VL2-CL-VL1-VH2, VH1-CH1-VH2-CL-VL1-VL2, VL2-CL-VL1-CH1-VH2-VH1, VL2-CL-VH1-CH1-VH2-VL1, VL2-CL-VH2-CH1-VL1-VH1, VL2-CL-VH2-CH1-VH1-VL1, VL2-CH1-VL1-CL-VH2-VH1, VL2-CH1-VH1-CL-VH2-VL1, VL2-CH1-VH2-CL-VL1-VH1, VL2-CH1-VH2-CL-VH1-VL1, VH2-CL-VL1-CH1-VL2-VH1, VH2-CL-VH1-CH1-VL2-VL1, VH2-CL-VL2-CH1-VL1-VH1, VH2-CL-VL2-CH1-VH1-VL1, VH2-CH1-VL1-CL-VL2-VH1, VH2-CH1-VH1-CL-VL2-VL1, VH2-CH1-VL2-CL-VL1-VH1, or VH2-CH1-VL2-CL-VH1-VL1; and wherein the second polypeptide has a structure represented by VL3-CL-VH3-CH1-VL4-VH4, VL3-CL-VH3-CH1-VH4-VL4, VL3-CL-VL4-CH1-VH3-VH4, VL3-CL-VH4-CH1-VH3-VL4, VL3-CH1-VH3-CL-VL4-VH4, VL3-CH1-VH3-CL-VH4-VL4, VL3-CH1-VL4-CL-VH3-VH4, VL3-CH1-VH4-CL-VH3-VL4, VH3-CL-VL3-CH1-VL4-VH4, VH3-CL-VL3-CH1-VH4-VL4, VH3-CL-VL4-CH1-VL3-VH4, VH3-CL-VH4-CH1-VL3-VL4, VH3-CH1-VL3-CL-VL4-VH4, VH3-CH1-VL3-CL-VH4-VL4, VH3-CH1-VL4-CL-VL3-VH4, VH3-CH1-VH4-CL-VL3-VL4, VL4-CL-VL3-CH1-VH4-VH3, VL4-CL-VH3-CH1-VH4-VL3, VL4-CL-VH4-CH1-VL3-VH3, VL4-CL-VH4-CH1-VH3-VL3, VL4-CH1-VL3-CL-VH4-VH3, VL4-CH1-VH3-CL-VH4-VL3, VL4-CH1-VH4-CL-VL3-VH3, VL4-CH1-VH4-CL-VH3-VL3, VH4-CL-VL3-CH1-VL4-VH3, VH4-CL-VH3-CH1-VL4-VL3, VH4-CL-VL4-CH1-VL3-VH3, VH4-CL-VL4-CH1-VH3-VL3, VH4-CH1-VL3-CL-VL4-VH3, VH4-CH1-VH3-CL-VL4-VL3, VH4-CH1-VL4-CL-VL3-VH3, or VH4-CH1-VL4-CL-VH3-VL3.

[6039] In some aspects, an antigen binding polypeptide complex provided herein comprises a first polypeptide, and a second polypeptide; wherein the first polypeptide has a structure represented by VL1-L1-CL-L2-VH1-L3-CH1-L4-VL2-L5-VH2, VL1-L1-CL-L2-VH1-L3-CH1-L4-VH2-L5-VL2, VL1-L1-CL-L2-VL2-L3-CH1-L4-VH1-L5-VH2, VL1-L1-CL-L2-VH2-L3-CH1-L4-VH1-L5-VL2, VL1-L1-CH1-L2-VH1-L3-CL-L4-VL2-L5-VH2, VL1-L1-CH1-L2-VH1-L3-CL-L4-VH2-L5-VL2, VL1-L1-CH1-L2-VL2-L3-CL-L4-VH1-L5-VH2, VL1-L1-CH1-L2-VH2-L3-CL-L4-VH1-L5-VL2, VH1-L1-CL-L2-VL1-L3-CH1-L4-VL2-L5-VH2, VH1-L1-CL-L2-VL1-L3-CH1-L4-VH2-L5-VL2, VH1-L1-CL-L2-VL2-L3-CH1-L4-VL1-L5-VH2, VH1-L1-CL-L2-VH2-L3-CH1-L4-VL1-L5-VL2, VH1-L1-CH1-L2-VL1-L3- CL-L4-VL2-L5-VH2, VH1-L1-CH1-L2-VL1-L3-CL-L4-VH2-L5-VL2, VH1-L1-CH1-L2-VL2-L3-CL-L4-VL1-L5-VH2, VH1-L1-CH1-L2-VH2-L3-CL-L4-VL1-L5-VL2, VL2-L1-CL-L2-VL1-L3-CH1-L4-VH2-L5-VH1, VL2-L1-CL-L2-VH1-L3-CH1-L4-VH2-L5-VL1, VL2-L1-CL-L2-VH2-L3-CH1-L4-VL1-L5-VH1, VL2-L1-CL-L2-VH2-L3-CH1-L4-VH1-L5-VL1, VL2-L1-CH1-L2-VL1-L3-CL-L4-VH2-L5-VH1, VL2-L1-CH1-L2-VH1-L3-CL-L4-VH2-L5-VL1, VL2-L1-CH1-L2-VH2-L3-CL-L4-VL1-L5-VH1, VL2-L1-CH1-L2-VH2-L3-CL-L4-VH1-L5-VL1, VH2-L1-CL-L2-VL1-L3-CH1-L4-VL2-L5-VH1, VH2-L1-CL-L2-VH1-L3-CH1-L4-VL2-L5-VL1, VH2-L1-CL-L2-VL2-L3-CH1-L4-VL1-L5-VH1, VH2-L1-CL- L2-VL2-L3-CH1-L4-VH1-L5-VL1, VH2-L1-CH1-L2-VL1-L3-CL-L4-VL2-L5-VH1, VH2-L1-CH1-L2-VH1-L3-CL-L4-VL2-L5-VL1, VH2-L1-CH1-L2-VL2-L3-CL-L4-VL1-L5-VH1, or VH2-L1-CH1-L2-VL2-L3-CL-L4-VH1-L5-VL1; and wherein the second polypeptide has a structure represented by VL3-L6-CL-L7-VH3-L8-CH1-L9-VL4-L10-VH4, VL3-L6-CL-L7-VH3-L8-CH1-L9-VH4-L10-VL4, VL3-L6-CL-L7-VL4-L8-CH1-L9-VH3-L10-VH4, VL3-L6-CL-L7-VH4-L8-CH1-L9-VH3-L10-VL4, VL3-L6-CH1-L7-VH3-L8-CL-L9-VL4-L10-VH4, VL3-L6-CH1-L7-VH3-L8-CL-L9-VH4-L10-VL4, VL3-L6-CH1-L7-VL4-L8-CL-L9-VH3-L10-VH4, VL3-L6-CH1-L7-VH4-L8-CL-L9-VH3-L10-VL4, VH3-L6-CL-L7- VL3-L8-CH1-L9-VL4-L10-VH4, VH3-L6-CL-L7-VL3-L8-CH1-L9-VH4-L10-VL4, VH3-L6-CL-L7-VL4-L8-CH1-L9-VL3-L10-VH4, VH3-L6-CL-L7-VH4-L8-CH1-L9-VL3-L10-VL4, VH3-L6-CH1-L7-VL3-L8-CL-L9-VL4-L10-VH4, VH3-L6-CH1-L7-VL3-L8-CL-L9-VH4-L10-VL4, VH3-L6-CH1-L7-VL4-L8-CL-L9-VL3-L10-VH4, VH3-L6-CH1-L7-VH4-L8-CL-L9-VL3-L10-VL4, VL4-L6-CL-L7-VL3-L8-CH1- L9-VH4-L10-VH3, VL4-L6-CL-L7-VH3-L8-CH1-L9-VH4-L10-VL3, VL4-L6-CL-L7-VH4-L8-CH1-L9-VL3-L10-VH3, VL4-L6-CL-L7-VH4-L8-CH1-L9-VH3-L10-VL3, VL4-L6-CH1-L7-VL3-L8-CL-L9-VH4-L10-VH3, VL4-L6-CH1-L7-VH3-L8-CL-L9-VH4-L10-VL3, VL4-L6-CH1-L7-VH4-L8-CL-L9-VL3-L10-VH3, VL4-L6-CH1-L7-VH4-L8-CL-L9-VH3-L10-VL3, VH4-L6-CL-L7-VL3-L8-CH1-L9-VL4-L10-VH3, VH4-L6-CL-L7-VH3-L8-CH1-L9-VL4-L10-VL3, VH4-L6-CL-L7-VL4-L8-CH1-L9-VL3-L10-VH3, VH4-L6-CL-L7-VL4-L8-CH1-L9-VH3-L10-VL3, VH4-L6-CH1-L7-VL3-L8-CL-L9-VL4-L10-VH3, VH4-L6-CH1-L7-VH3-L8-CL-L9-VL4-L10-VL3, VH4-L6-CH1-L7-VL4-L8-CL-L9-VL3-L10-VH3, or VH4-L6-CH1-L7-VL4-L8-CL-L9-VH3-L10-VL3.

[6040] In some aspects, an antigen binding polypeptide complex provided herein comprises a first polypeptide, and a second polypeptide; wherein the first polypeptide has a structure represented by VL1-CL-VH1-CH1-VL2-VH2-CH2-CH3, VL1-CL-VH1-CH1-VH2-VL2-CH2-CH3, VL1-CL-VL2-CH1-VH1-VH2-CH2-CH3, VL1-CL-VH2-CH1-VH1-VL2-CH2-CH3, VL1-CH1-VH1-CL-VL2-VH2-CH2-CH3, VL1-CH1-VH1-CL-VH2-VL2-CH2-CH3, VL1-CH1-VL2-CL-VH1-VH2-CH2-CH3, VL1-CH1-VH2-CL-VH1-VL2-CH2-CH3, VH1-CL-VL1-CH1-VL2-VH2-CH2-CH3, VH1-CL-VL1-CH1-VH2-VL2-CH2-CH3, VH1-CL-VL2-CH1-VL1-VH2-CH2-CH3, VH1-CL-VH2-CH1-VL1-VL2-CH2-CH3, VH1-CH1-VL1-CL-VL2-VH2-CH2-CH3, VH1-CH1-VL1-CL-VH2-VL2-CH2-CH3, VH1-CH1-VL2-CL-VL1-VH2-CH2-CH3, VH1-CH1-VH2-CL-VL1-VL2-CH2-CH3, VL2-CL-VL1-CH1-VH2-VH1-CH2-CH3, VL2-CL-VH1-CH1-VH2-VL1-CH2-CH3, VL2-CL-VH2-CH1-VL1-VH1-CH2-CH3, VL2-CL-VH2-CH1-VH1-VL1-CH2-CH3, VL2-CH1-VL1-CL-VH2-VH1-CH2-CH3, VL2-CH1-VH1-CL-VH2-VL1-CH2-CH3, VL2-CH1-VH2-CL-VL1-VH1-CH2-CH3, VL2-CH1-VH2-CL-VH1-VL1-CH2-CH3, VH2-CL-VL1-CH1-VL2-VH1-CH2-CH3, VH2-CL-VH1-CH1-VL2-VL1-CH2-CH3, VH2-CL-VL2-CH1-VL1-VH1-CH2-CH3, VH2-CL-VL2-CH1-VH1-VL1-CH2-CH3, VH2-CH1-VL1-CL-VL2-VH1-CH2-CH3, VH2-CH1-VH1-CL-VL2-VL1-CH2-CH3, VH2-CH1-VL2-CL-VL1-VH1-CH2-CH3, or VH2-CH1-VL2-CL-VH1-VL1-CH2-CH3; and wherein the second polypeptide has a structure represented by VL3-CL-VH3-CH1-VL4-VH4-CH2-CH3, VL3-CL-VH3-CH1-VH4-VL4-CH2-CH3, VL3-CL-VL4-CH1-VH3-VH4-CH2-CH3, VL3-CL-VH4-CH1-VH3-VL4-CH2-CH3, VL3-CH1-VH3-CL-VL4-VH4-CH2-CH3, VL3-CH1-VH3-CL-VH4-VL4-CH2-CH3, VL3-CH1-VL4-CL-VH3-VH4-CH2-CH3, VL3-CH1-VH4-CL-VH3-VL4-CH2-CH3, VH3-CL-VL3-CH1-VL4-VH4-CH2-CH3, VH3-CL-VL3-CH1-VH4-VL4-CH2-CH3, VH3-CL-VL4-CH1-VL3-VH4-CH2-CH3, VH3-CL-VH4-CH1-VL3-VL4-CH2-CH3, VH3-CH1-VL3-CL-VL4-VH4-CH2-CH3, VH3-CH1-VL3-CL-VH4-VL4-CH2-CH3, VH3-CH1-VL4-CL-VL3-VH4-CH2-CH3, VH3-CH1-VH4-CL-VL3-VL4-CH2-CH3, VL4-CL-VL3-CH1-VH4-VH3-CH2-CH3, VL4-CL-VH3-CH1-VH4-VL3-CH2-CH3, VL4-CL-VH4-CH1-VL3-VH3-CH2-CH3, VL4-CL-VH4-CH1-VH3-VL3-CH2-CH3, VL4-CH1-VL3-CL-VH4-VH3-CH2-CH3, VL4-CH1-VH3-CL-VH4-VL3-CH2-CH3, VL4-CH1-VH4-CL-VL3-VH3-CH2-CH3, VL4-CH1-VH4-CL-VH3-VL3-CH2-CH3, VH4-CL-VL3-CH1-VL4-VH3-CH2-CH3, VH4-CL-VH3-CH1-VL4-VL3-CH2-CH3, VH4-CL-VL4-CH1-VL3-VH3-CH2-CH3, VH4-CL-VL4-CH1-VH3-VL3-CH2-CH3, VH4-CH1-VL3-CL-VL4-VH3-CH2-CH3, VH4-CH1-VH3-CL-VL4-VL3-CH2-CH3, VH4-CH1-VL4-CL-VL3-VH3-CH2-CH3, or VH4-CH1-VL4-CL-VH3-VL3-CH2-CH3.

[6041] In some aspects, an antigen binding polypeptide complex provided herein comprises a first polypeptide, and a second polypeptide; wherein the first polypeptide has a structure represented by VL1-L1-CL-L2-VH1-L3-CH1-L4-VL2-L5-VH2-CH2-CH3, VL1-L1-CL-L2-VH1-L3-CH1-L4-VH2-L5-VL2-CH2-CH3, VL1-L1-CL-L2-VL2-L3-CH1-L4-VH1-L5-VH2-CH2-CH3, VL1-L1-CL-L2-VH2-L3-CH1-L4-VH1-L5-VL2-CH2-CH3, VL1-L1-CH1-L2-VH1-L3-CL-L4-VL2-L5-VH2-CH2-CH3, VL1-L1-CH1-L2-VH1-L3-CL-L4-VH2-L5-VL2-CH2-CH3, VL1-L1-CH1-L2-VL2-L3-CL-L4-VH1-L5-VH2-CH2-CH3, VL1-L1-CH1-L2-VH2-L3-CL-L4-VH1-L5-VL2-CH2-CH3, VH1-L1-CL-L2-VL1-L3-CH1-L4-VL2-L5-VH2-CH2-CH3, VH1-L1-CL-L2-VL1-L3-CH1-L4-VH2-L5-VL2-CH2-CH3, VH1-L1-CL-L2-VL2-L3-CH1-L4-VL1-L5-VH2-CH2-CH3, VH1-L1-CL-L2-VH2-L3-CH1-L4-VL1-L5-VL2-CH2-CH3, VH1-L1-CH1-L2-VL1-L3-CL-L4-VL2-L5-VH2-CH2-CH3, VH1-L1-CH1-L2-VL1-L3-CL-L4-VH2-L5-VL2-CH2-CH3, VH1-L1-CH1-L2-VL2-L3-CL-L4-VL1-L5-VH2-CH2-CH3, VH1-L1-CH1-L2-VH2-L3-CL-L4-VL1-L5-VL2-CH2-CH3, VL2-L1-CL-L2-VL1-L3-CH1-L4-VH2-L5-VH1-CH2-CH3, VL2-L1-CL-L2-VH1-L3-CH1-L4-VH2-L5-VL1-CH2-CH3, VL2-L1-CL-L2-VH2-L3-CH1-L4-VL1-L5-VH1-CH2-CH3, VL2-L1-CL-L2-VH2-L3-CH1-L4-VH1-L5-VL1-CH2-CH3, VL2-L1-CH1-L2-VL1-L3-CL-L4-VH2-L5-VH1-CH2-CH3, VL2-L1-CH1-L2-VH1-L3-CL-L4-VH2-L5-VL1-CH2-CH3, VL2-L1-CH1-L2-VH2-L3-CL-L4-VL1-L5-VH1-CH2-CH3, VL2-L1-CH1-L2-VH2-L3-CL-L4-VH1-L5-VL1-CH2-CH3, VH2-L1-CL-L2-VL1-L3-CH1-L4-VL2-L5-VH1-CH2-CH3, VH2-L1-CL-L2-VH1-L3-CH1-L4-VL2-L5-VL1-CH2-CH3, VH2-L1-CL-L2-VL2-L3-CH1-L4-VL1-L5-VH1-CH2-CH3, VH2-L1-CL-L2-VL2-L3-CH1-L4-VH1-L5-VL1-CH2-CH3, VH2-L1-CH1-L2-VL1-L3-CL-L4-VL2-L5-VH1-CH2-CH3, VH2-L1-CH1-L2-VH1-L3-CL-L4-VL2-L5-VL1-CH2-CH3, VH2-L1-CH1-L2-VL2-L3-CL-L4-VL1-L5-VH1-CH2-CH3, or VH2-L1-CH1-L2-VL2-L3-CL-L4-VH1-L5-VL1-CH2-CH3; and wherein the second polypeptide has a structure represented by VL3-L6-CL-L7-VH3-L8-CH1-L9-VL4-L10-VH4-CH2-CH3, VL3-L6-CL-L7-VH3-L8-CH1-L9-VH4-L10-VL4-CH2-CH3, VL3-L6-CL-L7-VL4-L8-CH1-L9-VH3-L10-VH4-CH2-CH3, VL3-L6-CL-L7- VH4-L8-CH1-L9-VH3-L10-VL4-CH2-CH3, VL3-L6-CH1-L7-VH3-L8-CL-L9-VL4-L10-VH4-CH2-CH3, VL3-L6-CH1-L7-VH3-L8-CL-L9-VH4-L10-VL4-CH2-CH3, VL3-L6-CH1-L7-VL4-L8-CL-L9-VH3-L10-VH4-CH2-CH3, VL3-L6-CH1-L7-VH4-L8-CL-L9-VH3-L10-VL4-CH2-CH3, VH3-L6-CL-L7-VL3-L8-CH1-L9-VL4-L10-VH4-CH2-CH3, VH3-L6-CL-L7-VL3-L8-CH1-L9-VH4-L10-VL4-CH2-CH3, VH3-L6-CL-L7-VL4-L8-CH1-L9-VL3-L10-VH4-CH2-CH3, VH3-L6-CL-L7-VH4-L8-CH1-L9-VL3-L10-VL4- CH2-CH3, VH3-L6-CH1-L7-VL3-L8-CL-L9-VL4-L10-VH4-CH2-CH3, VH3-L6-CH1-L7-VL3-L8-CL-L9-VH4-L10-VL4-CH2-CH3, VH3-L6-CH1-L7-VL4-L8-CL-L9-VL3-L10-VH4-CH2-CH3, VH3-L6-CH1-L7-VH4-L8-CL-L9-VL3-L10-VL4-CH2-CH3, VL4-L6-CL-L7-VL3-L8-CH1-L9-VH4-L10-VH3-CH2-CH3, VL4-L6-CL-L7-VH3-L8-CH1-L9-VH4-L10-VL3-CH2-CH3, VL4-L6-CL-L7-VH4-L8-CH1-L9-VL3-L10-VH3-CH2-CH3, VL4-L6-CL-L7-VH4-L8-CH1-L9-VH3-L10-VL3-CH2-CH3, VL4-L6-CH1-L7-VL3-L8-CL-L9-VH4-L10-VH3-CH2-CH3, VL4-L6-CH1-L7-VH3-L8-CL-L9-VH4-L10-VL3-CH2-CH3, VL4-L6-CH1-L7-VH4-L8-CL-L9-VL3-L10-VH3-CH2-CH3, VL4-L6-CH1-L7-VH4-L8-CL-L9-VH3-L10-VL3-CH2-CH3, VH4-L6-CL-L7-VL3-L8-CH1-L9-VL4-L10-VH3-CH2-CH3, VH4-L6-CL-L7-VH3-L8-CH1-L9-VL4-L10-VL3-CH2-CH3, VH4-L6-CL-L7-VL4-L8-CH1-L9-VL3-L10-VH3-CH2-CH3, VH4-L6-CL-L7-VL4-L8-CH1-L9-VH3-L10-VL3-CH2-CH3, VH4-L6-CH1-L7-VL3-L8-CL-L9-VL4-L10-VH3-CH2-CH3, VH4-L6-CH1-L7-VH3-L8-CL-L9-VL4-L10-VL3-CH2-CH3, VH4-L6-CH1-L7-VL4-L8-CL-L9-VL3-L10-VH3-CH2-CH3, or VH4-L6-CH1-L7-VL4-L8-CL-L9-VH3-L10-VL3-CH2-CH3.

[6042] In some aspects, an antigen binding polypeptide complex provided herein comprises a first polypeptide, and a second polypeptide; wherein the first polypeptide has a structure represented by VL1-VL2-VH2-VH1-CL-CH1, VL1-VL2-VH2-VH1-CH1-CL, VL1-VH2-VL2-VH1-CL-CH1, VL1-VH2-VL2-VH1-CH1-CL, VH1-VL2-VH2-VL1-CL-CH1, VH1-VL2-VH2-VL1-CH1-CL, VH1-VH2-VL2-VL1-CL-CH1, VH1-VH2-VL2-VL1-CH1-CL, VL2-VL1-VH1-VH2-CL-CH1, VL2-VL1-VH1-VH2-CH1-CL, VL2-VH1-VL1-VH2-CL-CH1, VL2-VH1-VL1-VH2-CH1-CL, VH2-VL1-VH1-VL2-CL-CH1, VH2-VL1-VH1-VL2-CH1-CL, VH2-VH1-VL1-VL2-CL-CH1, or VH2-VH1-VL1-VL2-CH1-CL; and wherein the second polypeptide has a structure represented by VL3-VL4-VH4-VH3-CL-CH1, VL3-VL4-VH4-VH3-CH1-CL, VL3-VH4-VL4-VH3-CL-CH1, VL3-VH4-VL4-VH3-CH1-CL, VH3-VL4-VH4-VL3-CL-CH1, VH3-VL4-VH4-VL3-CH1-CL, VH3-VH4-VL4-VL3-CL-CH1, VH3-VH4-VL4-VL3-CH1-CL, VL4-VL3-VH3-VH4-CL-CH1, VL4-VL3-VH3-VH4-CH1-CL, VL4-VH3-VL3-VH4-CL-CH1, VL4-VH3-VL3-VH4-CH1-CL, VH4-VL3-VH3-VL4-CL-CH1, VH4-VL3-VH3-VL4-CH1-CL, VH4-VH3-VL3-VL4-CL-CH1, or VH4-VH3-VL3-VL4-CH1-CL.

[6043] In some aspects, an antigen binding polypeptide complex provided herein comprises a first polypeptide, and a second polypeptide; wherein the first polypeptide has a structure represented by VL1-L1-VL2-L2-VH2-L3-VH1-L4-CL-L5-CH1, VL1-L1-VL2-L2-VH2-L3-VH1-L4-CH1-L5-CL, VL1-L1-VH2-L2-VL2-L3-VH1-L4-CL-L5-CH1, VL1-L1-VH2-L2-VL2-L3-VH1-L4-CH1-L5-CL, VH1-L1-VL2-L2-VH2-L3-VL1-L4-CL-L5-CH1, VH1-L1-VL2-L2-VH2-L3-VL1-L4-CH1-L5-CL, VH1-L1-VH2-L2-VL2-L3-VL1-L4-CL-L5-CH1, VH1-L1-VH2-L2-VL2-L3-VL1-L4-CH1-L5-CL, VL2-L1-VL1-L2-VH1-L3-VH2-L4-CL-L5-CH1, VL2-L1-VL1-L2-VH1-L3-VH2-L4-CH1-L5-CL, VL2-L1-VH1-L2-VL1-L3-VH2-L4-CL-L5-CH1, VL2-L1-VH1-L2-VL1-L3-VH2-L4-CH1-L5-CL, VH2-L1-VL1-L2-VH1-L3-VL2-L4-CL-L5-CH1, VH2-L1-VL1-L2-VH1-L3-VL2-L4-CH1-L5-CL, VH2-L1-VH1-L2-VL1-L3-VL2-L4-CL-L5-CH1, or VH2-L1-VH1-L2-VL1-L3-VL2-L4-CH1-L5-CL; and wherein the second polypeptide has a structure represented by VL3-L6-VL4-L7-VH4-L8-VH3-L9-CL-L10-CH1, VL3-L6-VL4-L7-VH4-L8-VH3-L9-CH1-L10-CL, VL3-L6-VH4-L7-VL4-L8-VH3-L9-CL-L10-CH1, VL3-L6-VH4-L7-VL4-L8-VH3-L9-CH1-L10-CL, VH3-L6-VL4-L7-VH4-L8-VL3-L9-CL-L10-CH1, VH3-L6-VL4-L7-VH4-L8-VL3-L9-CH1-L10-CL, VH3-L6-VH4-L7-VL4-L8-VL3-L9-CL-L10-CH1, VH3-L6-VH4-L7-VL4-L8-VL3-L9-CH1-L10-CL, VL4-L6-VL3-L7-VH3-L8-VH4-L9-CL-L10-CH1, VL4-L6-VL3-L7-VH3-L8-VH4-L9-CH1-L10-CL, VL4-L6-VH3-L7-VL3-L8-VH4-L9-CL-L10-CH1, VL4-L6-VH3-L7-VL3-L8-VH4-L9-CH1-L10-CL, VH4-L6-VL3-L7-VH3-L8-VL4-L9-CL-L10-CH1, VH4-L6-VL3-L7-VH3-L8-VL4-L9-CH1-L10-CL, VH4-L6-VH3-L7-VL3-L8-VL4-L9-CL-L10-CH1, or VH4-L6-VH3-L7-VL3- L8-VL4-L9-CH1-L10-CL.

[6044] In some aspects, an antigen binding polypeptide complex provided herein comprises a first polypeptide, and a second polypeptide; wherein the first polypeptide has a structure represented by VL1-VL2-VH2-VH1-CL-CH1-CH2-CH3, VL1-VL2-VH2-VH1-CH1-CL-CH2-CH3, VL1-VH2-VL2-VH1-CL-CH1-CH2-CH3, VL1-VH2-VL2-VH1-CH1-CL-CH2-CH3, VH1-VL2-VH2-VL1-CL-CH1-CH2-CH3, VH1-VL2-VH2-VL1-CH1-CL-CH2-CH3, VH1-VH2-VL2-VL1-CL-CH1-CH2-CH3, VH1-VH2-VL2-VL1-CH1-CL-CH2-CH3, VL2-VL1-VH1-VH2-CL-CH1-CH2-CH3, VL2-VL1-VH1-VH2-CH1-CL-CH2-CH3, VL2-VH1-VL1-VH2-CL-CH1-CH2-CH3, VL2-VH1-VL1-VH2-CH1-CL-CH2-CH3, VH2-VL1-VH1-VL2-CL-CH1-CH2-CH3, VH2-VL1-VH1-VL2-CH1-CL-CH2-CH3, VH2-VH1-VL1-VL2-CL-CH1-CH2-CH3, or VH2-VH1-VL1-VL2-CH1-CL-CH2-CH3; and wherein the second polypeptide has a structure represented by VL3-VL4-VH4-VH3-CL-CH1-CH2-CH3, VL3-VL4-VH4-VH3-CH1-CL-CH2-CH3, VL3-VH4-VL4-VH3-CL-CH1-CH2-CH3, VL3-VH4-VL4-VH3-CH1-CL-CH2-CH3, VH3-VL4-VH4-VL3-CL-CH1-CH2-CH3, VH3-VL4-VH4-VL3-CH1-CL-CH2-CH3, VH3-VH4-VL4-VL3-CL-CH1-CH2-CH3, VH3-VH4-VL4-VL3-CH1-CL-CH2-CH3, VL4-VL3-VH3-VH4-CL-CH1-CH2-CH3, VL4-VL3-VH3-VH4-CH1-CL-CH2-CH3, VL4-VH3-VL3-VH4-CL-CH1-CH2-CH3, VL4-VH3-VL3-VH4-CH1-CL-CH2-CH3, VH4-VL3-VH3-VL4-CL-CH1-CH2-CH3, VH4-VL3-VH3-VL4-CH1-CL-CH2-CH3, VH4-VH3-VL3-VL4-CL-CH1-CH2-CH3, or VH4-VH3-VL3-VL4-CH1-CL-CH2-CH3.

[6045] In some aspects, an antigen binding polypeptide complex provided herein comprises a first polypeptide, and a second polypeptide; wherein the first polypeptide has a structure represented by VL1-L1-VL2-L2-VH2-L3-VH1-L4-CL-L5-CH1-CH2-CH3, VL1-L1-VL2-L2-VH2-L3-VH1-L4-CH1- L5-CL-CH2-CH3, VL1-L1-VH2-L2-VL2-L3-VH1-L4-CL-L5-CH1-CH2-CH3, VL1-L1-VH2-L2-VL2-L3-VH1-L4-CH1-L5-CL-CH2-CH3, VH1-L1-VL2-L2-VH2-L3-VL1-L4-CL-L5-CH1-CH2-CH3, VH1-L1-VL2-L2-VH2-L3-VL1-L4-CH1-L5-CL-CH2-CH3, VH1-L1-VH2-L2-VL2-L3-VL1-L4-CL-L5-CH1-CH2-CH3, VH1-L1-VH2-L2-VL2-L3-VL1-L4-CH1-L5-CL-CH2-CH3, VL2-L1-VL1-L2-VH1-L3-VH2-L4- CL-L5-CH1-CH2-CH3, VL2-L1-VL1-L2-VH1-L3-VH2-L4-CH1-L5-CL-CH2-CH3, VL2-L1-VH1-L2-VL1-L3-VH2-L4-CL-L5-CH1-CH2-CH3, VL2-L1-VH1-L2-VL1-L3-VH2-L4-CH1-L5-CL-CH2-CH3, VH2-L1-VL1-L2-VH1-L3-VL2-L4-CL-L5-CH1-CH2-CH3, VH2-L1-VL1-L2-VH1-L3-VL2-L4-CH1-L5- CL-CH2-CH3, VH2-L1-VH1-L2-VL1-L3-VL2-L4-CL-L5-CH1-CH2-CH3, or VH2-L1-VH1-L2-VL1-L3-VL2-L4-CH1-L5-CL-CH2-CH3; and wherein the second polypeptide has a structure represented by VL3-L6-VL4-L7-VH4-L8-VH3-L9-CL-L10-CH1-CH2-CH3, VL3-L6-VL4-L7-VH4-L8-VH3-L9-CH1-L10-CL-CH2-CH3, VL3-L6-VH4-L7-VL4-L8-VH3-L9-CL-L10-CH1-CH2-CH3, VL3-L6-VH4-L7-VL4-L8-VH3-L9-CH1-L10-CL-CH2-CH3, VH3-L6-VL4-L7-VH4-L8-VL3-L9-CL-L10-CH1-CH2-CH3, VH3-L6-VL4- L7-VH4-L8-VL3-L9-CH1-L10-CL-CH2-CH3, VH3-L6-VH4-L7-VL4-L8-VL3-L9-CL-L10-CH1-CH2-CH3, VH3-L6-VH4-L7-VL4-L8-VL3-L9-CH1-L10-CL-CH2-CH3, VL4-L6-VL3-L7-VH3-L8-VH4-L9- CL-L10-CH1-CH2-CH3, VL4-L6-VL3-L7-VH3-L8-VH4-L9-CH1-L10-CL-CH2-CH3, VL4-L6-VH3-L7-VL3-L8-VH4-L9-CL-L10-CH1-CH2-CH3, VL4-L6-VH3-L7-VL3-L8-VH4-L9-CH1-L10-CL-CH2-CH3, VH4- L6-VL3-L7-VH3-L8-VL4-L9-CL-L10-CH1-CH2-CH3, VH4-L6-VL3-L7-VH3-L8-VL4-L9-CH1-L10-CL-CH2-CH3, VH4-L6-VH3-L7-VL3-L8-VL4-L9-CL-L10-CH1-CH2-CH3, or VH4-L6-VH3-L7-VL3-L8-VL4-L9-CH1-L10-CL-CH2-CH3.

[6046] In some aspects, an antigen binding polypeptide complex provided herein comprises a first polypeptide, and a second polypeptide; wherein the first polypeptide has a structure represented by VL1-VH1-VL2-CL-VH2-CH1, VL1-VH1-VL2-CH1-VH2-CL, VL1-VH1-VH2-CL-VL2-CH1, VL1-VH1-VH2-CH1-VL2-CL, VL1-VL2-VH1-CL-VH2-CH1, VL1-VL2-VH1-CH1-VH2-CL, VL1-VH2-VH1-CL-VL2-CH1, VL1-VH2-VH1-CH1-VL2-CL, VH1-VL1-VL2-CL-VH2-CH1, VH1-VL1-VL2-CH1-VH2-CL, VH1-VL1-VH2-CL-VL2-CH1, VH1-VL1-VH2-CH1-VL2-CL, VH1-VL2-VL1-CL-VH2-CH1, VH1-VL2-VL1-CH1-VH2-CL, VH1-VH2-VL1-CL-VL2-CH1, VH1-VH2-VL1-CH1-VL2-CL, VL2-VL1-VH2-CL-VH1-CH1, VL2-VL1-VH2-CH1-VH1-CL, VL2-VH1-VH2-CL-VL1-CH1, VL2-VH1-VH2-CH1-VL1-CL, VL2-VH2-VL1-CL-VH1-CH1, VL2-VH2-VL1-CH1-VH1-CL, VL2-VH2-VH1-CL-VL1-CH1, VL2-VH2-VH1-CH1-VL1-CL, VH2-VL1-VL2-CL-VH1-CH1, VH2-VL1-VL2-CH1-VH1-CL, VH2-VH1-VL2-CL-VL1-CH1, VH2-VH1-VL2-CH1-VL1-CL, VH2-VL2-VL1-CL-VH1-CH1, VH2-VL2-VL1-CH1-VH1-CL, VH2-VL2-VH1-CL-VL1-CH1, or VH2-VL2-VH1-CH1-VL1-CL; and wherein the second polypeptide has a structure represented by VL3-CL-VH3-CH1-VL4-VH4, VL3-CL-VH3-CH1-VH4-VL4, VL3-CL-VL4-CH1-VH3-VH4, VL3-CL-VH4-CH1-VH3-VL4, VL3-CH1-VH3-CL-VL4-VH4, VL3-CH1-VH3-CL-VH4-VL4, VL3-CH1-VL4-CL-VH3-VH4, VL3-CH1-VH4-CL-VH3-VL4, VH3-CL-VL3-CH1-VL4-VH4, VH3-CL-VL3-CH1-VH4-VL4, VH3-CL-VL4-CH1-VL3-VH4, VH3-CL-VH4-CH1-VL3-VL4, VH3-CH1-VL3-CL-VL4-VH4, VH3-CH1-VL3-CL-VH4-VL4, VH3-CH1-VL4-CL-VL3-VH4, VH3-CH1-VH4-CL-VL3-VL4, VL4-CL-VL3-CH1-VH4-VH3, VL4-CL-VH3-CH1-VH4-VL3, VL4-CL-VH4-CH1-VL3-VH3, VL4-CL-VH4-CH1-VH3-VL3, VL4-CH1-VL3-CL-VH4-VH3, VL4-CH1-VH3-CL-VH4-VL3, VL4-CH1-VH4-CL-VL3-VH3, VL4-CH1-VH4-CL-VH3-VL3, VH4-CL-VL3-CH1-VL4-VH3, VH4-CL-VH3-CH1-VL4-VL3, VH4-CL-VL4-CH1-VL3-VH3, VH4-CL-VL4-CH1-VH3-VL3, VH4-CH1-VL3-CL-VL4-VH3, VH4-CH1-VH3-CL-VL4-VL3, VH4-CH1-VL4-CL-VL3-VH3, or VH4-CH1-VL4-CL-VH3-VL3.

[6047] In some aspects, an antigen binding polypeptide complex provided herein comprises a first polypeptide, and a second polypeptide; wherein the first polypeptide has a structure represented by VL1-L1-VH1-L2-VL2-L3-CL-L4-VH2-L5-CH1, VL1-L1-VH1-L2-VL2-L3-CH1-L4-VH2-L5-CL, VL1-L1-VH1-L2-VH2-L3-CL-L4-VL2-L5-CH1, VL1-L1-VH1-L2-VH2-L3-CH1-L4-VL2-L5-CL, VL1-L1-VL2-L2-VH1-L3-CL-L4-VH2-L5-CH1, VL1-L1-VL2-L2-VH1-L3-CH1-L4-VH2-L5-CL, VL1-L1-VH2-L2-VH1-L3-CL-L4-VL2-L5-CH1, VL1-L1-VH2-L2-VH1-L3-CH1-L4-VL2-L5-CL, VH1-L1-VL1-L2-VL2-L3-CL-L4-VH2-L5-CH1, VH1-L1-VL1-L2-VL2-L3-CH1-L4-VH2-L5-CL, VH1-L1-VL1-L2-VH2-L3-CL-L4-VL2-L5-CH1, VH1-L1-VL1-L2-VH2-L3-CH1-L4-VL2-L5-CL, VH1-L1-VL2-L2-VL1-L3-CL-L4-VH2-L5-CH1, VH1-L1-VL2-L2-VL1-L3-CH1-L4-VH2-L5-CL, VH1-L1-VH2-L2-VL1-L3-CL-L4-VL2-L5-CH1, VH1-L1-VH2-L2-VL1-L3-CH1-L4-VL2-L5-CL, VL2-L1-VL1-L2-VH2-L3-CL-L4-VH1-L5-CH1, VL2-L1-VL1-L2-VH2-L3-CH1-L4-VH1-L5-CL, VL2-L1-VH1-L2-VH2-L3-CL-L4-VL1-L5-CH1, VL2-L1-VH1-L2-VH2-L3-CH1-L4-VL1-L5-CL, VL2-L1-VH2-L2-VL1-L3-CL-L4-VH1-L5-CH1, VL2-L1-VH2-L2-VL1-L3-CH1-L4-VH1-L5-CL, VL2-L1-VH2-L2-VH1-L3-CL-L4-VL1-L5-CH1, VL2-L1-VH2-L2-VH1-L3-CH1-L4-VL1-L5-CL, VH2-L1-VL1-L2-VL2-L3-CL-L4-VH1-L5-CH1, VH2-L1-VL1-L2-VL2-L3-CH1-L4-VH1-L5-CL, VH2-L1-VH1-L2-VL2-L3-CL-L4-VL1-L5-CH1, VH2-L1-VH1-L2-VL2-L3-CH1-L4-VL1-L5-CL, VH2-L1-VL2-L2-VL1-L3-CL-L4-VH1-L5-CH1, VH2-L1-VL2-L2-VL1-L3-CH1-L4-VH1-L5-CL, VH2-L1-VL2-L2-VH1-L3-CL-L4-VL1-L5-CH1, or VH2-L1-VL2-L2-VH1-L3-CH1-L4-VL1-L5-CL; and wherein the second polypeptide has a structure represented by VL3-L6-CL-L7-VH3-L8-CH1-L9-VL4-L10-VH4, VL3-L6-CL-L7-VH3-L8-CH1-L9-VH4-L10-VL4, VL3-L6-CL-L7-VL4-L8-CH1-L9-VH3-L10-VH4, VL3-L6-CL-L7-VH4-L8-CH1-L9-VH3-L10-VL4, VL3-L6-CH1-L7-VH3-L8-CL-L9-VL4-L10-VH4, VL3-L6-CH1-L7-VH3-L8-CL-L9-VH4-L10-VL4, VL3-L6-CH1-L7-VL4-L8-CL-L9-VH3-L10-VH4, VL3-L6-CH1-L7-VH4-L8-CL-L9-VH3-L10-VL4, VH3-L6-CL-L7- VL3-L8-CH1-L9-VL4-L10-VH4, VH3-L6-CL-L7-VL3-L8-CH1-L9-VH4-L10-VL4, VH3-L6-CL-L7-VL4-L8-CH1-L9-VL3-L10-VH4, VH3-L6-CL-L7-VH4-L8-CH1-L9-VL3-L10-VL4, VH3-L6-CH1-L7-VL3-L8-CL-L9-VL4-L10-VH4, VH3-L6-CH1-L7-VL3-L8-CL-L9-VH4-L10-VL4, VH3-L6-CH1-L7-VL4-L8-CL-L9-VL3-L10-VH4, VH3-L6-CH1-L7-VH4-L8-CL-L9-VL3-L10-VL4, VL4-L6-CL-L7-VL3-L8-CH1- L9-VH4-L10-VH3, VL4-L6-CL-L7-VH3-L8-CH1-L9-VH4-L10-VL3, VL4-L6-CL-L7-VH4-L8-CH1-L9-VL3-L10-VH3, VL4-L6-CL-L7-VH4-L8-CH1-L9-VH3-L10-VL3, VL4-L6-CH1-L7-VL3-L8-CL-L9-VH4-L10-VH3, VL4-L6-CH1-L7-VH3-L8-CL-L9-VH4-L10-VL3, VL4-L6-CH1-L7-VH4-L8-CL-L9-VL3-L10-VH3, VL4-L6-CH1-L7-VH4-L8-CL-L9-VH3-L10-VL3, VH4-L6-CL-L7-VL3-L8-CH1-L9-VL4-L10-VH3, VH4-L6-CL-L7-VH3-L8-CH1-L9-VL4-L10-VL3, VH4-L6-CL-L7-VL4-L8-CH1-L9-VL3-L10-VH3, VH4-L6-CL-L7-VL4-L8-CH1-L9-VH3-L10-VL3, VH4-L6-CH1-L7-VL3-L8-CL-L9-VL4-L10-VH3, VH4-L6-CH1-L7-VH3-L8-CL-L9-VL4-L10-VL3, VH4-L6-CH1-L7-VL4-L8-CL-L9-VL3-L10-VH3, or VH4-L6-CH1-L7-VL4-L8-CL-L9-VH3-L10-VL3.

[6048] In some aspects, an antigen binding polypeptide complex provided herein comprises a first polypeptide, and a second polypeptide; wherein the first polypeptide has a structure represented by VL1-VH1-VL2-CL-VH2-CH1-CH2-CH3, VL1-VH1-VL2-CH1-VH2-CL-CH2-CH3, VL1-VH1-VH2-CL-VL2-CH1-CH2-CH3, VL1-VH1-VH2-CH1-VL2-CL-CH2-CH3, VL1-VL2-VH1-CL-VH2-CH1-CH2-CH3, VL1-VL2-VH1-CH1-VH2-CL-CH2-CH3, VL1-VH2-VH1-CL-VL2-CH1-CH2-CH3, VL1-VH2-VH1-CH1-VL2-CL-CH2-CH3, VH1-VL1-VL2-CL-VH2-CH1-CH2-CH3, VH1-VL1-VL2-CH1-VH2-CL-CH2-CH3, VH1-VL1-VH2-CL-VL2-CH1-CH2-CH3, VH1-VL1-VH2-CH1-VL2-CL-CH2-CH3, VH1-VL2-VL1-CL-VH2-CH1-CH2-CH3, VH1-VL2-VL1-CH1-VH2-CL-CH2-CH3, VH1-VH2-VL1-CL-VL2-CH1-CH2-CH3, VH1-VH2-VL1-CH1-VL2-CL-CH2-CH3, VL2-VL1-VH2-CL-VH1-CH1-CH2-CH3, VL2-VL1-VH2-CH1-VH1-CL-CH2-CH3, VL2-VH1-VH2-CL-VL1-CH1-CH2-CH3, VL2-VH1-VH2-CH1-VL1-CL-CH2-CH3, VL2-VH2-VL1-CL-VH1-CH1-CH2-CH3, VL2-VH2-VL1-CH1-VH1-CL-CH2-CH3, VL2-VH2-VH1-CL-VL1-CH1-CH2-CH3, VL2-VH2-VH1-CH1-VL1-CL-CH2-CH3, VH2-VL1-VL2-CL-VH1-CH1-CH2-CH3, VH2-VL1-VL2-CH1-VH1-CL-CH2-CH3, VH2-VH1-VL2-CL-VL1-CH1-CH2-CH3, VH2-VH1-VL2-CH1-VL1-CL-CH2-CH3, VH2-VL2-VL1-CL-VH1-CH1-CH2-CH3, VH2-VL2-VL1-CH1-VH1-CL-CH2-CH3, VH2-VL2-VH1-CL-VL1-CH1-CH2-CH3, or VH2-VL2-VH1-CH1-VL1-CL-CH2-CH3; and wherein the second polypeptide has a structure represented by VL3-CL-VH3-CH1-VL4-VH4-CH2-CH3, VL3-CL-VH3-CH1-VH4-VL4-CH2-CH3, VL3-CL-VL4-CH1-VH3-VH4-CH2-CH3, VL3-CL-VH4-CH1-VH3-VL4-CH2-CH3, VL3-CH1-VH3-CL-VL4-VH4-CH2-CH3, VL3-CH1-VH3-CL-VH4-VL4-CH2-CH3, VL3-CH1-VL4-CL-VH3-VH4-CH2-CH3, VL3-CH1-VH4-CL-VH3-VL4-CH2-CH3, VH3-CL-VL3-CH1-VL4-VH4-CH2-CH3, VH3-CL-VL3-CH1-VH4-VL4-CH2-CH3, VH3-CL-VL4-CH1-VL3-VH4-CH2-CH3, VH3-CL-VH4-CH1-VL3-VL4-CH2-CH3, VH3-CH1-VL3-CL-VL4-VH4-CH2-CH3, VH3-CH1-VL3-CL-VH4-VL4-CH2-CH3, VH3-CH1-VL4-CL-VL3-VH4-CH2-CH3, VH3-CH1-VH4-CL-VL3-VL4-CH2-CH3, VL4-CL-VL3-CH1-VH4-VH3-CH2-CH3, VL4-CL-VH3-CH1-VH4-VL3-CH2-CH3, VL4-CL-VH4-CH1-VL3-VH3-CH2-CH3, VL4-CL-VH4-CH1-VH3-VL3-CH2-CH3, VL4-CH1-VL3-CL-VH4-VH3-CH2-CH3, VL4-CH1-VH3-CL-VH4-VL3-CH2-CH3, VL4-CH1-VH4-CL-VL3-VH3-CH2-CH3, VL4-CH1-VH4-CL-VH3-VL3-CH2-CH3, VH4-CL-VL3-CH1-VL4-VH3-CH2-CH3, VH4-CL-VH3-CH1-VL4-VL3-CH2-CH3, VH4-CL-VL4-CH1-VL3-VH3-CH2-CH3, VH4-CL-VL4-CH1-VH3-VL3-CH2-CH3, VH4-CH1-VL3-CL-VL4-VH3-CH2-CH3, VH4-CH1-VH3-CL-VL4-VL3-CH2-CH3, VH4-CH1-VL4-CL-VL3-VH3-CH2-CH3, or VH4-CH1-VL4-CL-VH3-VL3-CH2-CH3.

[6049] In some aspects, an antigen binding polypeptide complex provided herein comprises a first polypeptide, and a second polypeptide; wherein the first polypeptide has a structure represented by VL1-L1-VH1-L2-VL2-L3-CL-L4-VH2-L5-CH1-CH2-CH3, VL1-L1-VH1-L2-VL2-L3-CH1-L4-VH2- L5-CL-CH2-CH3, VL1-L1-VH1-L2-VH2-L3-CL-L4-VL2-L5-CH1-CH2-CH3, VL1-L1-VH1-L2-VH2-L3-CH1-L4-VL2-L5-CL-CH2-CH3, VL1-L1-VL2-L2-VH1-L3-CL-L4-VH2-L5-CH1-CH2-CH3, VL1-L1-VL2-L2-VH1-L3-CH1-L4-VH2-L5-CL-CH2-CH3, VL1-L1-VH2-L2-VH1-L3-CL-L4-VL2-L5-CH1-CH2-CH3, VL1-L1-VH2-L2-VH1-L3-CH1-L4-VL2-L5-CL-CH2-CH3, VH1-L1-VL1-L2-VL2-L3-CL-L4-VH2-L5-CH1-CH2-CH3, VH1-L1-VL1-L2-VL2-L3-CH1-L4-VH2-L5-CL-CH2-CH3, VH1-L1-VL1-L2-VH2-L3-CL-L4-VL2-L5-CH1-CH2-CH3, VH1-L1-VL1-L2-VH2-L3-CH1-L4-VL2-L5-CL-CH2-CH3, VH1-L1-VL2-L2-VL1-L3-CL-L4-VH2-L5-CH1-CH2-CH3, VH1-L1-VL2-L2-VL1-L3-CH1-L4-VH2-L5- CL-CH2-CH3, VH1-L1-VH2-L2-VL1-L3-CL-L4-VL2-L5-CH1-CH2-CH3, VH1-L1-VH2-L2-VL1-L3-CH1-L4-VL2-L5-CL-CH2-CH3, VL2-L1-VL1-L2-VH2-L3-CL-L4-VH1-L5-CH1-CH2-CH3, VL2-L1-VL1-L2-VH2-L3-CH1-L4-VH1-L5-CL-CH2-CH3, VL2-L1-VH1-L2-VH2-L3-CL-L4-VL1-L5-CH1-CH2-CH3, VL2-L1-VH1-L2-VH2-L3-CH1-L4-VL1-L5-CL-CH2-CH3, VL2-L1-VH2-L2-VL1-L3-CL-L4-VH1-L5-CH1-CH2-CH3, VL2-L1-VH2-L2-VL1-L3-CH1-L4-VH1-L5-CL-CH2-CH3, VL2-L1-VH2-L2-VH1-L3-CL-L4-VL1-L5-CH1-CH2-CH3, VL2-L1-VH2-L2-VH1-L3-CH1-L4-VL1-L5-CL-CH2-CH3, VH2-L1-VL1-L2-VL2-L3-CL-L4-VH1-L5-CH1-CH2-CH3, VH2-L1-VL1-L2-VL2-L3-CH1-L4-VH1-L5- CL-CH2-CH3, VH2-L1-VH1-L2-VL2-L3-CL-L4-VL1-L5-CH1-CH2-CH3, VH2-L1-VH1-L2-VL2-L3-CH1-L4-VL1-L5-CL-CH2-CH3, VH2-L1-VL2-L2-VL1-L3-CL-L4-VH1-L5-CH1-CH2-CH3, VH2-L1-VL2-L2-VL1-L3-CH1-L4-VH1-L5-CL-CH2-CH3, VH2-L1-VL2-L2-VH1-L3-CL-L4-VL1-L5-CH1-CH2-CH3, or VH2-L1-VL2-L2-VH1-L3-CH1-L4-VL1-L5-CL-CH2-CH3; and wherein the second polypeptide has a structure represented by VL3-L6-CL-L7-VH3-L8-CH1-L9-VL4-L10-VH4-CH2-CH3, VL3-L6-CL-L7-VH3-L8-CH1-L9-VH4-L10-VL4-CH2-CH3, VL3-L6-CL-L7-VL4-L8-CH1-L9-VH3-L10-VH4-CH2-CH3, VL3-L6-CL-L7-VH4-L8-CH1-L9-VH3-L10-VL4-CH2-CH3, VL3-L6-CH1-L7-VH3-L8-CL-L9-VL4-L10-VH4-CH2-CH3, VL3-L6-CH1-L7-VH3-L8-CL-L9-VH4-L10-VL4-CH2-CH3, VL3-L6-CH1-L7-VL4-L8-CL-L9-VH3-L10-VH4-CH2-CH3, VL3-L6-CH1-L7-VH4-L8-CL-L9-VH3-L10-VL4-CH2-CH3, VH3- L6-CL-L7-VL3-L8-CH1-L9-VL4-L10-VH4-CH2-CH3, VH3-L6-CL-L7-VL3-L8-CH1-L9-VH4-L10-VL4-CH2-CH3, VH3-L6-CL-L7-VL4-L8-CH1-L9-VL3-L10-VH4-CH2-CH3, VH3-L6-CL-L7-VH4-L8-CH1-L9-VL3-L10-VL4-CH2-CH3, VH3-L6-CH1-L7-VL3-L8-CL-L9-VL4-L10-VH4-CH2-CH3, VH3-L6-CH1-L7-VL3-L8-CL-L9-VH4-L10-VL4-CH2-CH3, VH3-L6-CH1-L7-VL4-L8-CL-L9-VL3-L10-VH4-CH2-CH3, VH3-L6-CH1-L7-VH4-L8-CL-L9-VL3-L10-VL4-CH2-CH3, VL4-L6-CL-L7-VL3-L8-CH1-L9-VH4-L10-VH3-CH2-CH3, VL4-L6-CL-L7-VH3-L8-CH1-L9-VH4-L10-VL3-CH2-CH3, VL4-L6-CL- L7-VH4-L8-CH1-L9-VL3-L10-VH3-CH2-CH3, VL4-L6-CL-L7-VH4-L8-CH1-L9-VH3-L10-VL3-CH2-CH3, VL4-L6-CH1-L7-VL3-L8-CL-L9-VH4-L10-VH3-CH2-CH3, VL4-L6-CH1-L7-VH3-L8-CL-L9-VH4-L10-VL3-CH2-CH3, VL4-L6-CH1-L7-VH4-L8-CL-L9-VL3-L10-VH3-CH2-CH3, VL4-L6-CH1-L7-VH4-L8-CL-L9-VH3-L10-VL3-CH2-CH3, VH4-L6-CL-L7-VL3-L8-CH1-L9-VL4-L10-VH3-CH2-CH3, VH4- L6-CL-L7-VH3-L8-CH1-L9-VL4-L10-VL3-CH2-CH3, VH4-L6-CL-L7-VL4-L8-CH1-L9-VL3-L10-VH3-CH2-CH3, VH4-L6-CL-L7-VL4-L8-CH1-L9-VH3-L10-VL3-CH2-CH3, VH4-L6-CH1-L7-VL3-L8-CL-L9-VL4-L10-VH3-CH2-CH3, VH4-L6-CH1-L7-VH3-L8-CL-L9-VL4-L10-VL3-CH2-CH3, VH4-L6-CH1-L7-VL4-L8-CL-L9-VL3-L10-VH3-CH2-CH3, or VH4-L6-CH1-L7-VL4-L8-CL-L9-VH3-L10- VL3-CH2-CH3.

[6050] In some aspects, an antigen binding polypeptide complex provided herein comprises a first polypeptide, and a second polypeptide; wherein the first polypeptide has a structure represented by VL1-CL-VH1-CH1-VL2-VH2, VL1-CL-VH1-CH1-VH2-VL2, VL1-CL-VL2-CH1-VH1-VH2, VL1-CL-VH2-CH1-VH1-VL2, VL1-CH1-VH1-CL-VL2-VH2, VL1-CH1-VH1-CL-VH2-VL2, VL1-CH1-VL2-CL-VH1-VH2, VL1-CH1-VH2-CL-VH1-VL2, VH1-CL-VL1-CH1-VL2-VH2, VH1-CL-VL1-CH1-VH2-VL2, VH1-CL-VL2-CH1-VL1-VH2, VH1-CL-VH2-CH1-VL1-VL2, VH1-CH1-VL1-CL-VL2-VH2, VH1-CH1-VL1-CL-VH2-VL2, VH1-CH1-VL2-CL-VL1-VH2, VH1-CH1-VH2-CL-VL1-VL2, VL2-CL-VL1-CH1-VH2-VH1, VL2-CL-VH1-CH1-VH2-VL1, VL2-CL-VH2-CH1-VL1-VH1, VL2-CL-VH2-CH1-VH1-VL1, VL2-CH1-VL1-CL-VH2-VH1, VL2-CH1-VH1-CL-VH2-VL1, VL2-CH1-VH2-CL-VL1-VH1, VL2-CH1-VH2-CL-VH1-VL1, VH2-CL-VL1-CH1-VL2-VH1, VH2-CL-VH1-CH1-VL2-VL1, VH2-CL-VL2-CH1-VL1-VH1, VH2-CL-VL2-CH1-VH1-VL1, VH2-CH1-VL1-CL-VL2-VH1, VH2-CH1-VH1-CL-VL2-VL1, VH2-CH1-VL2-CL-VL1-VH1, or VH2-CH1-VL2-CL-VH1-VL1; and wherein the second polypeptide has a structure represented by VL3-VH3-VL4-CL-VH4-CH1, VL3-VH3-VL4-CH1-VH4-CL, VL3-VH3-VH4-CL-VL4-CH1, VL3-VH3-VH4-CH1-VL4-CL, VL3-VL4-VH3-CL-VH4-CH1, VL3-VL4-VH3-CH1-VH4-CL, VL3-VH4-VH3-CL-VL4-CH1, VL3-VH4-VH3-CH1-VL4-CL, VH3-VL3-VL4-CL-VH4-CH1, VH3-VL3-VL4-CH1-VH4-CL, VH3-VL3-VH4-CL-VL4-CH1, VH3-VL3-VH4-CH1-VL4-CL, VH3-VL4-VL3-CL-VH4-CH1, VH3-VL4-VL3-CH1-VH4-CL, VH3-VH4-VL3-CL-VL4-CH1, VH3-VH4-VL3-CH1-VL4-CL, VL4-VL3-VH4-CL-VH3-CH1, VL4-VL3-VH4-CH1-VH3-CL, VL4-VH3-VH4-CL-VL3-CH1, VL4-VH3-VH4-CH1-VL3-CL, VL4-VH4-VL3-CL-VH3-CH1, VL4-VH4-VL3-CH1-VH3-CL, VL4-VH4-VH3-CL-VL3-CH1, VL4-VH4-VH3-CH1-VL3-CL, VH4-VL3-VL4-CL-VH3-CH1, VH4-VL3-VL4-CH1-VH3-CL, VH4-VH3-VL4-CL-VL3-CH1, VH4-VH3-VL4-CH1-VL3-CL, VH4-VL4-VL3-CL-VH3-CH1, VH4-VL4-VL3-CH1-VH3-CL, VH4-VL4-VH3-CL-VL3-CH1, or VH4-VL4-VH3-CH1-VL3-CL.

[6051] In some aspects, an antigen binding polypeptide complex provided herein comprises a first polypeptide, and a second polypeptide; wherein the first polypeptide has a structure represented by VL1-L1-CL-L2-VH1-L3-CH1-L4-VL2-L5-VH2, VL1-L1-CL-L2-VH1-L3-CH1-L4-VH2-L5-VL2, VL1-L1-CL-L2-VL2-L3-CH1-L4-VH1-L5-VH2, VL1-L1-CL-L2-VH2-L3-CH1-L4-VH1-L5-VL2, VL1-L1-CH1-L2-VH1-L3-CL-L4-VL2-L5-VH2, VL1-L1-CH1-L2-VH1-L3-CL-L4-VH2-L5-VL2, VL1-L1-CH1-L2-VL2-L3-CL-L4-VH1-L5-VH2, VL1-L1-CH1-L2-VH2-L3-CL-L4-VH1-L5-VL2, VH1-L1-CL-L2-VL1-L3-CH1-L4-VL2-L5-VH2, VH1-L1-CL-L2-VL1-L3-CH1-L4-VH2-L5-VL2, VH1-L1-CL-L2-VL2-L3-CH1-L4-VL1-L5-VH2, VH1-L1-CL-L2-VH2-L3-CH1-L4-VL1-L5-VL2, VH1-L1-CH1-L2-VL1-L3- CL-L4-VL2-L5-VH2, VH1-L1-CH1-L2-VL1-L3-CL-L4-VH2-L5-VL2, VH1-L1-CH1-L2-VL2-L3-CL-L4-VL1-L5-VH2, VH1-L1-CH1-L2-VH2-L3-CL-L4-VL1-L5-VL2, VL2-L1-CL-L2-VL1-L3-CH1-L4-VH2-L5-VH1, VL2-L1-CL-L2-VH1-L3-CH1-L4-VH2-L5-VL1, VL2-L1-CL-L2-VH2-L3-CH1-L4-VL1-L5-VH1, VL2-L1-CL-L2-VH2-L3-CH1-L4-VH1-L5-VL1, VL2-L1-CH1-L2-VL1-L3-CL-L4-VH2-L5-VH1, VL2-L1-CH1-L2-VH1-L3-CL-L4-VH2-L5-VL1, VL2-L1-CH1-L2-VH2-L3-CL-L4-VL1-L5-VH1, VL2-L1-CH1-L2-VH2-L3-CL-L4-VH1-L5-VL1, VH2-L1-CL-L2-VL1-L3-CH1-L4-VL2-L5-VH1, VH2-L1-CL-L2-VH1-L3-CH1-L4-VL2-L5-VL1, VH2-L1-CL-L2-VL2-L3-CH1-L4-VL1-L5-VH1, VH2-L1-CL- L2-VL2-L3-CH1-L4-VH1-L5-VL1, VH2-L1-CH1-L2-VL1-L3-CL-L4-VL2-L5-VH1, VH2-L1-CH1-L2-VH1-L3-CL-L4-VL2-L5-VL1, VH2-L1-CH1-L2-VL2-L3-CL-L4-VL1-L5-VH1, or VH2-L1-CH1-L2-VL2-L3-CL-L4-VH1-L5-VL1; and wherein the second polypeptide has a structure represented by VL3-L6-VH3-L7-VL4-L8-CL-L9-VH4-L10-CH1, VL3-L6-VH3-L7-VL4-L8-CH1-L9-VH4-L10-CL, VL3-L6-VH3-L7-VH4-L8-CL-L9-VL4-L10-CH1, VL3-L6-VH3-L7-VH4-L8-CH1-L9-VL4-L10-CL, VL3-L6-VL4-L7-VH3-L8-CL-L9-VH4-L10-CH1, VL3-L6-VL4-L7-VH3-L8-CH1-L9-VH4-L10-CL, VL3-L6-VH4-L7-VH3-L8-CL-L9-VL4-L10-CH1, VL3-L6-VH4-L7-VH3-L8-CH1-L9-VL4-L10-CL, VH3-L6-VL3-L7-VL4-L8-CL-L9-VH4-L10-CH1, VH3-L6-VL3-L7-VL4-L8-CH1-L9-VH4-L10-CL, VH3-L6-VL3-L7-VH4-L8-CL-L9-VL4-L10-CH1, VH3-L6-VL3-L7-VH4-L8-CH1-L9-VL4-L10-CL, VH3-L6-VL4-L7-VL3-L8-CL-L9-VH4-L10-CH1, VH3-L6-VL4-L7-VL3-L8-CH1-L9-VH4-L10-CL, VH3-L6-VH4-L7-VL3-L8-CL-L9-VL4-L10-CH1, VH3-L6-VH4-L7-VL3-L8-CH1-L9-VL4-L10-CL, VL4-L6-VL3-L7-VH4-L8-CL-L9-VH3-L10-CH1, VL4-L6-VL3-L7-VH4-L8-CH1-L9-VH3-L10-CL, VL4-L6-VH3-L7-VH4-L8-CL-L9-VL3-L10-CH1, VL4-L6-VH3-L7-VH4-L8-CH1-L9-VL3-L10-CL, VL4-L6-VH4-L7-VL3-L8-CL-L9-VH3-L10-CH1, VL4-L6-VH4-L7-VL3-L8-CH1-L9-VH3-L10-CL, VL4-L6-VH4-L7-VH3-L8-CL- L9-VL3-L10-CH1, VL4-L6-VH4-L7-VH3-L8-CH1-L9-VL3-L10-CL, VH4-L6-VL3-L7-VL4-L8-CL-L9-VH3-L10-CH1, VH4-L6-VL3-L7-VL4-L8-CH1-L9-VH3-L10-CL, VH4-L6-VH3-L7-VL4-L8-CL-L9-VL3-L10-CH1, VH4-L6-VH3-L7-VL4-L8-CH1-L9-VL3-L10-CL, VH4-L6-VL4-L7-VL3-L8-CL-L9-VH3-L10-CH1, VH4-L6-VL4-L7-VL3-L8-CH1-L9-VH3-L10-CL, VH4-L6-VL4-L7-VH3-L8-CL-L9-VL3-L10-CH1, or VH4-L6-VL4-L7-VH3-L8-CH1-L9-VL3-L10-CL.

[6052] In some aspects, an antigen binding polypeptide complex provided herein comprises a first polypeptide, and a second polypeptide; wherein the first polypeptide has a structure represented by VL1-CL-VH1-CH1-VL2-VH2-CH2-CH3, VL1-CL-VH1-CH1-VH2-VL2-CH2-CH3, VL1-CL-VL2-CH1-VH1-VH2-CH2-CH3, VL1-CL-VH2-CH1-VH1-VL2-CH2-CH3, VL1-CH1-VH1-CL-VL2-VH2-CH2-CH3, VL1-CH1-VH1-CL-VH2-VL2-CH2-CH3, VL1-CH1-VL2-CL-VH1-VH2-CH2-CH3, VL1-CH1-VH2-CL-VH1-VL2-CH2-CH3, VH1-CL-VL1-CH1-VL2-VH2-CH2-CH3, VH1-CL-VL1-CH1-VH2-VL2-CH2-CH3, VH1-CL-VL2-CH1-VL1-VH2-CH2-CH3, VH1-CL-VH2-CH1-VL1-VL2-CH2-CH3, VH1-CH1-VL1-CL-VL2-VH2-CH2-CH3, VH1-CH1-VL1-CL-VH2-VL2-CH2-CH3, VH1-CH1-VL2-CL-VL1-VH2-CH2-CH3, VH1-CH1-VH2-CL-VL1-VL2-CH2-CH3, VL2-CL-VL1-CH1-VH2-VH1-CH2-CH3, VL2-CL-VH1-CH1-VH2-VL1-CH2-CH3, VL2-CL-VH2-CH1-VL1-VH1-CH2-CH3, VL2-CL-VH2-CH1-VH1-VL1-CH2-CH3, VL2-CH1-VL1-CL-VH2-VH1-CH2-CH3, VL2-CH1-VH1-CL-VH2-VL1-CH2-CH3, VL2-CH1-VH2-CL-VL1-VH1-CH2-CH3, VL2-CH1-VH2-CL-VH1-VL1-CH2-CH3, VH2-CL-VL1-CH1-VL2-VH1-CH2-CH3, VH2-CL-VH1-CH1-VL2-VL1-CH2-CH3, VH2-CL-VL2-CH1-VL1-VH1-CH2-CH3, VH2-CL-VL2-CH1-VH1-VL1-CH2-CH3, VH2-CH1-VL1-CL-VL2-VH1-CH2-CH3, VH2-CH1-VH1-CL-VL2-VL1-CH2-CH3, VH2-CH1-VL2-CL-VL1-VH1-CH2-CH3, or VH2-CH1-VL2-CL-VH1-VL1-CH2-CH3; and wherein the second polypeptide has a structure represented by VL3-VH3-VL4-CL-VH4-CH1-CH2-CH3, VL3-VH3-VL4-CH1-VH4-CL-CH2-CH3, VL3-VH3-VH4-CL-VL4-CH1-CH2-CH3, VL3-VH3-VH4-CH1-VL4-CL-CH2-CH3, VL3-VL4-VH3-CL-VH4-CH1-CH2-CH3, VL3-VL4-VH3-CH1-VH4-CL-CH2-CH3, VL3-VH4-VH3-CL-VL4-CH1-CH2-CH3, VL3-VH4-VH3-CH1-VL4-CL-CH2-CH3, VH3-VL3-VL4-CL-VH4-CH1-CH2-CH3, VH3-VL3-VL4-CH1-VH4-CL-CH2-CH3, VH3-VL3-VH4-CL-VL4-CH1-CH2-CH3, VH3-VL3-VH4-CH1-VL4-CL-CH2-CH3, VH3-VL4-VL3-CL-VH4-CH1-CH2-CH3, VH3-VL4-VL3-CH1-VH4-CL-CH2-CH3, VH3-VH4-VL3-CL-VL4-CH1-CH2-CH3, VH3-VH4-VL3-CH1-VL4-CL-CH2-CH3, VL4-VL3-VH4-CL-VH3-CH1-CH2-CH3, VL4-VL3-VH4-CH1-VH3-CL-CH2-CH3, VL4-VH3-VH4-CL-VL3-CH1-CH2-CH3, VL4-VH3-VH4-CH1-VL3-CL-CH2-CH3, VL4-VH4-VL3-CL-VH3-CH1-CH2-CH3, VL4-VH4-VL3-CH1-VH3-CL-CH2-CH3, VL4-VH4-VH3-CL-VL3-CH1-CH2-CH3, VL4-VH4-VH3-CH1-VL3-CL-CH2-CH3, VH4-VL3-VL4-CL-VH3-CH1-CH2-CH3, VH4-VL3-VL4-CH1-VH3-CL-CH2-CH3, VH4-VH3-VL4-CL-VL3-CH1-CH2-CH3, VH4-VH3-VL4-CH1-VL3-CL-CH2-CH3, VH4-VL4-VL3-CL-VH3-CH1-CH2-CH3, VH4-VL4-VL3-CH1-VH3-CL-CH2-CH3, VH4-VL4-VH3-CL-VL3-CH1-CH2-CH3, or VH4-VL4-VH3-CH1-VL3-CL-CH2-CH3.

[6053] In some aspects, an antigen binding polypeptide complex provided herein comprises a first polypeptide, and a second polypeptide; wherein the first polypeptide has a structure represented by VL1-L1-CL-L2-VH1-L3-CH1-L4-VL2-L5-VH2-CH2-CH3, VL1-L1-CL-L2-VH1-L3-CH1-L4-VH2-L5-VL2-CH2-CH3, VL1-L1-CL-L2-VL2-L3-CH1-L4-VH1-L5-VH2-CH2-CH3, VL1-L1-CL-L2-VH2-L3-CH1-L4-VH1-L5-VL2-CH2-CH3, VL1-L1-CH1-L2-VH1-L3-CL-L4-VL2-L5-VH2-CH2-CH3, VL1-L1-CH1-L2-VH1-L3-CL-L4-VH2-L5-VL2-CH2-CH3, VL1-L1-CH1-L2-VL2-L3-CL-L4-VH1-L5-VH2-CH2-CH3, VL1-L1-CH1-L2-VH2-L3-CL-L4-VH1-L5-VL2-CH2-CH3, VH1-L1-CL-L2-VL1-L3-CH1-L4-VL2-L5-VH2-CH2-CH3, VH1-L1-CL-L2-VL1-L3-CH1-L4-VH2-L5-VL2-CH2-CH3, VH1-L1-CL-L2-VL2-L3-CH1-L4-VL1-L5-VH2-CH2-CH3, VH1-L1-CL-L2-VH2-L3-CH1-L4-VL1-L5-VL2-CH2-CH3, VH1-L1-CH1-L2-VL1-L3-CL-L4-VL2-L5-VH2-CH2-CH3, VH1-L1-CH1-L2-VL1-L3-CL-L4-VH2-L5-VL2-CH2-CH3, VH1-L1-CH1-L2-VL2-L3-CL-L4-VL1-L5-VH2-CH2-CH3, VH1-L1-CH1-L2-VH2-L3-CL-L4-VL1-L5-VL2-CH2-CH3, VL2-L1-CL-L2-VL1-L3-CH1-L4-VH2-L5-VH1-CH2-CH3, VL2-L1-CL-L2-VH1-L3-CH1-L4-VH2-L5-VL1-CH2-CH3, VL2-L1-CL-L2-VH2-L3-CH1-L4-VL1-L5-VH1-CH2-CH3, VL2-L1-CL-L2-VH2-L3-CH1-L4-VH1-L5-VL1-CH2-CH3, VL2-L1-CH1-L2-VL1-L3-CL-L4-VH2-L5-VH1-CH2-CH3, VL2-L1-CH1-L2-VH1-L3-CL-L4-VH2-L5-VL1-CH2-CH3, VL2-L1-CH1-L2-VH2-L3-CL-L4-VL1-L5-VH1-CH2-CH3, VL2-L1-CH1-L2-VH2-L3-CL-L4-VH1-L5-VL1-CH2-CH3, VH2-L1-CL-L2-VL1-L3-CH1-L4-VL2-L5-VH1-CH2-CH3, VH2-L1-CL-L2-VH1-L3-CH1-L4-VL2-L5-VL1-CH2-CH3, VH2-L1-CL-L2-VL2-L3-CH1-L4-VL1-L5-VH1-CH2-CH3, VH2-L1-CL-L2-VL2-L3-CH1-L4-VH1-L5-VL1-CH2-CH3, VH2-L1-CH1-L2-VL1-L3-CL-L4-VL2-L5-VH1-CH2-CH3, VH2-L1-CH1-L2-VH1-L3-CL-L4-VL2-L5-VL1-CH2-CH3, VH2-L1-CH1-L2-VL2-L3-CL-L4-VL1-L5-VH1-CH2-CH3, or VH2-L1-CH1-L2-VL2-L3-CL-L4-VH1-L5-VL1-CH2-CH3; and wherein the second polypeptide has a structure represented by VL3-L6-VH3-L7-VL4-L8-CL-L9-VH4-L10-CH1-CH2-CH3, VL3-L6-VH3-L7-VL4-L8-CH1-L9-VH4-L10-CL-CH2-CH3, VL3-L6-VH3-L7-VH4-L8-CL-L9-VL4-L10-CH1-CH2-CH3, VL3-L6-VH3-L7- VH4-L8-CH1-L9-VL4-L10-CL-CH2-CH3, VL3-L6-VL4-L7-VH3-L8-CL-L9-VH4-L10-CH1-CH2-CH3, VL3-L6-VL4-L7-VH3-L8-CH1-L9-VH4-L10-CL-CH2-CH3, VL3-L6-VH4-L7-VH3-L8-CL-L9-VL4-L10-CH1-CH2-CH3, VL3-L6-VH4-L7-VH3-L8-CH1-L9-VL4-L10-CL-CH2-CH3, VH3-L6-VL3-L7-VL4-L8-CL-L9-VH4-L10-CH1-CH2-CH3, VH3-L6-VL3-L7-VL4-L8-CH1-L9-VH4-L10-CL-CH2-CH3, VH3-L6-VL3-L7-VH4-L8-CL-L9-VL4-L10-CH1-CH2-CH3, VH3-L6-VL3-L7-VH4-L8-CH1-L9-VL4-L10-CL-CH2-CH3, VH3-L6-VL4-L7-VL3-L8-CL-L9-VH4-L10-CH1-CH2-CH3, VH3-L6-VL4-L7-VL3-L8- CH1-L9-VH4-L10-CL-CH2-CH3, VH3-L6-VH4-L7-VL3-L8-CL-L9-VL4-L10-CH1-CH2-CH3, VH3-L6- VH4-L7-VL3-L8-CH1-L9-VL4-L10-CL-CH2-CH3, VL4-L6-VL3-L7-VH4-L8-CL-L9-VH3-L10-CH1-CH2-CH3, VL4-L6-VL3-L7-VH4-L8-CH1-L9-VH3-L10-CL-CH2-CH3, VL4-L6-VH3-L7-VH4-L8-CL-L9-VL3-L10-CH1-CH2-CH3, VL4-L6-VH3-L7-VH4-L8-CH1-L9-VL3-L10-CL-CH2-CH3, VL4-L6-VH4-L7-VL3-L8-CL-L9-VH3-L10-CH1-CH2-CH3, VL4-L6-VH4-L7-VL3-L8-CH1-L9-VH3-L10-CL-CH2-CH3, VL4-L6-VH4-L7-VH3-L8-CL-L9-VL3-L10-CH1-CH2-CH3, VL4-L6-VH4-L7-VH3-L8-CH1-L9- VL3-L10-CL-CH2-CH3, VH4-L6-VL3-L7-VL4-L8-CL-L9-VH3-L10-CH1-CH2-CH3, VH4-L6-VL3-L7- VL4-L8-CH1-L9-VH3-L10-CL-CH2-CH3, VH4-L6-VH3-L7-VL4-L8-CL-L9-VL3-L10-CH1-CH2-CH3, VH4-L6-VH3-L7-VL4-L8-CH1-L9-VL3-L10-CL-CH2-CH3, VH4-L6-VL4-L7-VL3-L8-CL-L9-VH3-L10-CH1-CH2-CH3, VH4-L6-VL4-L7-VL3-L8-CH1-L9-VH3-L10-CL-CH2-CH3, VH4-L6-VL4-L7-VH3-L8-CL-L9-VL3-L10-CH1-CH2-CH3, or VH4-L6-VL4-L7-VH3-L8-CH1-L9-VL3-L10-CL-CH2-CH3.

[6054] In some aspects, VL1 is a first immunoglobulin light chain variable region that specifically binds to (i) a tumor-associated antigen (TAA), (ii) an infectious disease antigen that is not a sarbecovirus antigen, or (iii) an other-pathology antigen; VL2 is a second immunoglobulin light chain variable region that specifically binds to (i) a tumor-associated antigen (TAA), (ii) an infectious disease antigen that is not a sarbecovirus antigen, or (iii) an other-pathology antigen; VL3 is a third immunoglobulin light chain variable region that specifically binds to (i) a tumor-associated antigen (TAA), (ii) an infectious disease antigen that is not a sarbecovirus antigen, or (iii) an other-pathology antigen; VL4 is a fourth immunoglobulin light chain variable region that specifically binds to (i) a tumor-associated antigen (TAA), (ii) an infectious disease antigen that is not a sarbecovirus antigen, or (iii) an other-pathology antigen; VH1 is a first immunoglobulin heavy chain variable region that specifically binds to (i) a tumor-associated antigen (TAA), (ii) an infectious disease antigen that is not a sarbecovirus antigen, or (iii) an other-pathology antigen; VH2 is a second immunoglobulin heavy chain variable region that specifically binds to (i) a tumor-associated antigen (TAA), (ii) an infectious disease antigen that is not a sarbecovirus antigen, or (iii) an other-pathology antigen; VH3 is a third immunoglobulin heavy chain variable region that specifically binds to (i) a tumor-associated antigen (TAA), (ii) an infectious disease antigen that is not a sarbecovirus antigen, or (iii) an other-pathology antigen; VH4 is a fourth immunoglobulin heavy chain variable region that specifically binds to (i) a tumor-associated antigen (TAA), (ii) an infectious disease antigen that is not a sarbecovirus antigen, or (iii) an other-pathology antigen; CH1 is an immunoglobulin heavy chain constant region 1; CL is an immunoglobulin light chain constant region; and L1-L10 are optional amino acid linkers. In any aspect shown herein as a structure from amino terminus to carboxy terminus, and with binding pairs selected from VL and/or VH or other structural regions such as CH1, CL, CH2, CH3, when shown without a specific linker such as L1, L2, etc., such linkers are optionally present in such structures between each designated subsequence VL, VH, etc.

[6055] In some aspects, the VL1 and the VL2 each comprise a CDR1, a CDR2, and a CDR3 that are the same. In some aspects, the VL1 and the VL2 each comprise a CDR1, a CDR2, and a CDR3 that are different. In some aspects, the VL1 and the VL3 each comprise a CDR1, a CDR2, and a CDR3 that are the same. In some aspects, the VL1 and the VL3 each comprise a CDR1, a CDR2, and a CDR3 that are different. In some aspects, the VL1 and the VL4 each comprise a CDR1, a CDR2, and a CDR3 that are the same. In some aspects, the VL1 and the VL4 each comprise a CDR1, a CDR2, and a CDR3 that are different. In some aspects, the VL2 and the VL3 each comprise a CDR1, a CDR2, and a CDR3 that are the same. In some aspects, the VL2 and the VL3 each comprise a CDR1, a CDR2, and a CDR3 that are different. In some aspects, the VL2 and the VL4 each comprise a CDR1, a CDR2, and a CDR3 that are the same. In some aspects, the VL2 and the VL4 each comprise a CDR1, a CDR2, and a CDR3 that are different. In some aspects, the VL3 and the VL4 each comprise a CDR1, a CDR2, and a CDR3 that are the same. In some aspects, the VL3 and the VL4 each comprise a CDR1, a CDR2, and a CDR3 that are different.

[6056] In some aspects, the VL1 and the VL2 each comprise an amino acid sequence, wherein the amino acid sequence comprised in VL1 and the amino acid sequence comprised in VL2 are the same. In some aspects, the VL1 and the VL2 each comprise an amino acid sequence, wherein the amino acid sequence comprised in VL1 and the amino acid sequence comprised in VL2 are different. In some aspects, the VL1 and the VL3 each comprise an amino acid sequence, wherein the amino acid sequence comprised in VL1 and the amino acid sequence comprised in VL3 are the same. In some aspects, the VL1 and the VL3 each comprise an amino acid sequence, wherein the amino acid sequence comprised in VL1 and the amino acid sequence comprised in VL3 are different. In some aspects, the VL1 and the VL4 each comprise an amino acid sequence, wherein the amino acid sequence comprised in VL1 and the amino acid sequence comprised in VL4 are the same. In some aspects, the VL1 and the VL4 each comprise an amino acid sequence, wherein the amino acid sequence comprised in VL1 and the amino acid sequence comprised in VL4 are different. In some aspects, the VL2 and the VL3 each comprise an amino acid sequence, wherein the amino acid sequence comprised in VL2 and the amino acid sequence comprised in VL3 are the same. In some aspects, the VL2 and the VL3 each comprise an amino acid sequence, wherein the amino acid sequence comprised in VL2 and the amino acid sequence comprised in VL3 are different. In some aspects, the VL2 and the VL4 each comprise an amino acid sequence, wherein the amino acid sequence comprised in VL2 and the amino acid sequence comprised in VL4 are the same. In some aspects, the VL2 and the VL4 each comprise an amino acid sequence, wherein the amino acid sequence comprised in VL2 and the amino acid sequence comprised in VL4 are different. In some aspects, the VL3 and the VL4 each comprise an amino acid sequence, wherein the amino acid sequence comprised in VL3 and the amino acid sequence comprised in VL4 are the same. In some aspects, the VL3 and the VL4 each comprise an amino acid sequence, wherein the amino acid sequence comprised in VL3 and the amino acid sequence comprised in VL4 are different.

[6057] In some aspects, the TAA is selected from the group consisting of 5′-nucleotidase, 5T4, A2AR, activin receptor-like kinase 1, adenocarcinoma antigen, ADRB3, AFP, AKAP-4, ALK, alpha-fetoprotein, androgenreceptor, angiopoietin 2, AOC3, APRIL, ATPDase, AXL, B7-4, B7DC, B7H1, B7H2, B7H3, B7H4, B7H5, B7H6, B7H7, B7RP1, BAFF, BAFFR, BCMA, bcr-abl, BlyS, BORIS, BST2, BTK, BTLA, C3, C5, C5a, C5a receptor, CA-125, CAIX, CanAg (a glycoform of MUC1), CCL11, CCL15, CCL17, CCL19, CCL2, CCL20, CCL21, CCL25, CCL3, CCL4, CCL5, CCL7, CCL8, CCR2, CCR3, CCR4, CCR5, CD11, CDIla, CD123, CD125, CD133, CD134, CD137, CD137L, CD147, CD15, CD154, CD160, CD16A, CD171, CD179a, CD18, CD184, CD19, CD2, CD20, CD200, CD22, CD221, CD23, CD24, CD242, CD25, CD27, CD272, CD276, CD278, CD279, CD28, CD3, CD30, CD300LF, CD319, CD33, CD37, CD38, CD39, CD38, CD4, CD40, CD40L, CD41, CD44v6, CD45, CD47, CD49B, CD5, CD51, CD52, CD54, CD56, CD6, CD62L, CD7, CD70, CD72, CD74, CD79a, CD79b, CD80, CD86, CD97, CEA, CEACAM5, claudin 18 isoform 2, CLDN6, CLEC12A, CLEC9, CLEC91, CLL-1, cMet, coagulation factor III, CRTH2, CS1, CSF-1, CSFIR, CSF-2, CSF-3, CTGF, CTLA4, CXCL1, CXCL12, CXCL13, CXCL2, CXCL4, CXCR3, CXORF61, CyclinB1, CYP1B1, dendritic cell-associated lectin 2, DLL3, DLL4, DNGR-1, DR5, E7, E-cadherin, EGFL7, EGFR, EGFRVIII, ELF2M, EMR2, endoglin, ENTPD1, EpCAM, EphA2, EPHA3, ephrin receptor A3, EphrinB2, episialin, ERBB2 (Her2/neu), ERBB3, ERG (TMPRSS2-ETS fusion gene), ETV6-AML, FAP, FCAR, FCER1, FCER1A, FCER2, FCRL5, FGF 23, FGFR, FGFR2, fibronectin extra domain-B, FLAP, FLT3, folate hydrolase, folate receptor 1, folate receptor alpha, folate receptor beta, FOLH1, Fos-relatedantigen1, Frizzled receptor, Fucosyl GM1, GD2, GD3, gelatinase B, Gi24, GITR, GITRL, GloboH, Glutamate carboxypeptidase II, glypican 3, GM3, GP100, GPC1, GPC2, GPC3, gplOO, GPNMB, GPR20, GPR5, GPRC5D, growth differentiation factor 8, GUCY2C, HAVCR1, HER1, HER2, HER3, HGF, HGFR, HHLA2, histone complex, HLA-DR, HMGB1, HMWMAA, HPVE6, hTERT, human telomerase reverse transcriptase, HVEM, ICAM-1, ICOS, ICOSL, IDO, IFNa, IgE, IGF-1, IGF1R, IGF-2, IGF-I receptor, IGLL1, IL1, IL10, IL12, IL13, IL13Ra2, IL-13Ra2, IL13Ra1, IL15, IL17, IL-17A, IL-17AF, IL-17F, IL17Rb, IL18, IL1B, IL1F10, IL-1a, IL-1B, IL2, IL-20, IL22, IL23, IL-23A, IL25, IL2Rbeta, IL-3 receptor, IL-31 receptor A, IL33, IL35, IL4, IL4Ra, IL5, IL5R, IL6, IL7, IL7Ra, IL8, IL9, IL9R, IL1A, IL-llRa, integrin α4, integrin α4 β7, integrin α5β1, integrin αIIbβ3, integrin αvβ3, integrin β7, interleukin 36 receptor IL1RAP, interleukin 36 receptor IL1RL2, intestinal carboxylesterase, ITGB4, ITK, KIR, KIR2D, KIT, LAG3, LAGE-1a, LAIR1, LAMP1, LCK, legumain, leptin. LewisY, LILRA2, LIV-1, LMP2, LOXL2, LPFS2, LRRC15, LY6K, LY75, LYPD3, MAD-CT-1, MAD-CT-2, MAGEA1, MAGE-A1, MCAM, MCP-1, MelanA/MART1, mesothelin, MHC classII, MIF, ML-IAP, MS4A1, MST1R (RON), MUC1, MUC-1, MUC16, MUC-16, MUC5AC, muthsp70-2, MYCN, NA17, NCA-90) granulocyte antigen, NCAM, NCR3LG1, nectin-4, NGNA ganglioside, NKG2A, NKG2D, NKp46, Notch 1, Notch receptor, NRP1, NTPDase-1, NY-BR-1, NY-ESO-1, o-acetyl-GD2, OR51E2, OX40), OX40L, OY-TES1, p53, p53mutant, PANX3, PAP, PAX3, PAX5, PCDC1, PCDP1, PCTA-1/Galectin8, PD-1, PDGFRA, PDGFR-beta, PD-L1, PD-L2, phosphate-sodium co-transporter, phosphatidylserine, PLAC1, polysialic acid, PROM1, prostase, prostein, PRSS21, PSCA, PSMA, PTK7, RAGE-1, RANKL. Ras mutant, rhIL1O, RhoC, root plate-specific spondin 3, ROR1, ROR2, RTN4, RU1, RU2, S152, sarcoma translocation breakpoints, SART3, scatter factor receptor kinase, SDC1, SIRPalpha, SISP1, SLAMF7, SLC, sLe, SLITRK6, spermprotein17, SPG64, sphingosine-1-phosphate, SSEA-4, SSX2, ST2, STEAP1, STEAP2, surviving and telomerase, Syk kinase, T14, TACI, TAG72, TARP, T-cell receptor, TCRβ, TDO, TEM1/CD248, TEM7R, tenascin C, TGFBETA, TGF-β1, TGF-β2, TGS5, the extracellular portion of the APRIL protein, Tie2, TIGIT, TIM3, TLR, TLR2, TLR4, TLR5, TLR9, TMEF1, TnAg, TNF, TNFa, TNFR superfamily member 4, TNFRSF7, Tp55, TRAC, TRAIL-R1, TRAIL-R2, TRAP, TREM1, TROP2, TRP-2, TSHR, TSLP, TSLPR, tumor antigen CTAA16.88, TWEAK, tyrosinase, TYRPI glycoprotein 75, UPK2, VAP-1, VEGF, VEGFA, VEGFR-1, VEGFR2, vimentin, VISTA, Vstm3, WT1, WUCAM, and XAGE1.

[6058] In some aspects, the antigen binding polypeptide complexes provided herein comprise a VL1 comprising a light chain complementarity determining region 1 (LCDR1), LCDR2, and/or LCDR3 of an antibody selected from the group consisting of losatuxizumab vedotin, utomilumab, urelumab, oleclumab, naptumomab estafenatox, ascrinvacumab, pintumomab, tacatuzumab tetraxetan, nesvacumab, vanucizumab, timolumab, vapaliximab, vepalimomab, enapotamab vedotin, ianalumab, belimumab, tabalumab, tibulizumab, belantamab mafodotin, teclistamab, teclistamab, detumomab, nacolomab tafenatox, eculizumab, lendalizumab, pexelizumab, pozelimab, ravulizumab, tesidolumab, vilobelimab, abagovomab, igovomab, oregovomab, sofituzumab vedotin, cantuzumab mertansine, cantuzuma bravtansine, girentuximab, altumomab pentetate, arcitumomab, besilesomab, bertilimumab, plozalizumab, mogamulizumab, leronlimab, PRO140, rovelizumab, rovelizumab, talacotuzumab, benralizumab, tavolimab, vonlerolizumab, gavilimomab, ziralimumab, fanolesomab, ipilimumab, ruplizumab, toralizumab, dapirolizumab pegol, toralizumab, dapirolizumab pegol, ruplizumab, blinatumomab, inebilizumab, loncastuximab tesirine, SGN-CD19A, tafasitamab, taplitumomab paptox, XMAB-5574, Budoprutug, Obexelimab, duvortuxizumab, englumafusp alfa, Emfizatamab, zeripatamig, siplizumab, blontuvetmab, FBTA05, ibritumomab tiuxetan, obinutuzumab, ocaratuzumab, ocrelizumab, ofatumumab, rituximab, tositumomab, ublituximab, veltuzumab, divozilimab, eramkafusp alfa, ripertamab, zuberitamab, glofitamab, nofetumomab merpentan, samalizumab, imvotamab, odronextamab, plamotamab, bectumomab, inotuzumab ozogamicin, moxetumomab pasudotox, pinatuzumab vedotin, gomiliximab, lumiliximab, inolimomab, inolimomab, daclizumab, camidanluma btesirine, basiliximab, varlilumab, omburtamab, enoblituzumab, vopratelimab, lulizumabpegol, TGN1412, muromonab-CD3, otelixizumab, teplizumab, visilizumab, epcoritamab, epcoritamab, brentuximab vedotin, iratumumab, azintuxizumab vedotin, gemtuzumab ozogamicin, lintuzumab, vadastuximab talirine, naratuximab emtansine, otlertuzumab, lilotomab satetraxetan, tetulomab, daratumumab, isatuximab, foralumab, mosunetuzumab, mosunetuzumab, cedelizumab, ibalizumab, keliximab, priliximab, tregalizumab, zanolimumab, bleselumab, iscalimab, lucatumumab, ravagalimab, selicrelumab, teneliximab, vanalimab, abciximab, bivatuzumab, iomab-B, telimomab aritox, zolimomab aritox, abituzumab, intetumumab, alemtuzumab, tamtuvetmab, lorvotuzumab mertansine, itolizumab, cusatuzumab, vorsetuzumab mafodotin, milatuzumab, iladatuzumab vedotin, polatuzumab vedotin, galiximab, cibisatamab, zolbetuximab, naxitamab, tisotumab vedotin, olendalizumab, pamrevlumab, lacnotuzumab, cabiralizumab, emactuzumab, axatilimab, gimsilumab, lenzilumab, namilumab, tremelimumab, ulocuplumab, tepoditamab, rovalpituzumab tesirine, tarlatamab, demcizumab, navicixizumab, drozitumab, parsatuzumab, depatuxizumab mafodotin, modotuximab, carotuximab, adecatumumab, adecatumumab, oportuzumab monatox, solitomab, tucotuzumab celmoleukin, edrecolomab, catumaxomab, ifabotuzumab, fibatuzumab, zalutumumab, panitumumab, cetuximab, futuximab, imgatuzumab, laprituximab emtansine, matuzumab, necitumumab, nimotuzumab, tomuzotuximab, amivantamab, amivantamab, epitumomab cituxetan, sontuzumab, duligotuzumab, elgemtumab, lumretuzumab, patritumab, seribantumab, zenocutuzumab, sibrotuzumab, burosumab, aprutumab ixadotin, radretumab, pasotuxizumab, farletuzumab, mirvetuximab soravtansine, vantictumab, TRBS07, 3F8, dinutuximab, dinutuximab beta, eecromeximab, mitumomab, andecaliximab, capromab, codrituzumab, glembatumumab vedotin, talquetamab, talquetamab, trevogrumab, indusatumab vedotin, ficlatuzumab, rilotumumab, zatuximab, pentuzimab, pentuzimab, margetuximab, timigutuzumab, trastuzumab, trastuzumab duocarmazine, trastuzumab emtansine, gancotamab, pertuzumab, ertumaxomab, emibetuzumab, telisotuzumab, telisotuzumab vedotin, derlotuximab biotin, apolizumab, onartuzumab, bersanlimab, enlimomabpegol, rontalizumab, sifalimumab, talizumab, ganitumab, istiratumab, robatumumab, teprotumumab, figitumumab, ganitumab, istiratumab, robatumumab, teprotumumab, cixutumumab, dalotuzumab, xentuzumab, dusigitumab, canakinumab, ustekinumab, ustekinumab, ustekinumab, briakinumab, briakinumab, abrezekimab, lebrikizumab, romilkimab, TNX-650, tralokinumab, anrukinzumab, brodalumab, ixekizumab, netakimab, perakizumab, secukinumab, vunakizumab, afasevikumab, afasevikumab, bimekizumab, bimekizumab, remtolumab, bermckimab, lutikizumab, lutikizumab, gevokizumab, cergutuzumab amunaleukin, fletikumab, fezakinumab, brazikumab, guselkumab, mirikizumab, tildrakizumab, risankizumab, flotetuzumab, nemolizumab, pascolizumab, dupilumab, mepolizumab, reslizumab, clazakizumab, elsilimomab, olokizumab, sarilumab, siltuximab, sirukumab, vobarilizumab, tocilizumab, SA237, satralizumab, enokizumab, prezalizumab, natalizumab, abrilumab, abrilumab, vedolizumab, volociximab, tadocizumab, etaracizumab, etrolizumab, spesolimab, vatelizumab, erlizumab, lirilumab, relatlimab, cBR96-doxorubicinimmunoconjugate, odulimomab, efalizumab, ladiratuzumab vedotin, simtuzumab, samrotamab vedotin, aselizumab, lupartumab amadotin, imalumab, carlumab, imaprelimab, amatuximab, amatuximab, anetumab ravtansine, narnatumab, clivatuzumab tetraxetan, pemtumomab, gatipotuzumab, ensituximab, lemalesomab, sulesomab, enfortumab vedotin, racotumomab, monalizumab, brontictuzumab, tarextumab, vesencumab, oxelumab, gilvetmab, tislelizumab, dostarlimab, BCD-100, nivolumab, PDR001, pembrolizumab, pidilizumab, retifanlimab, spartalizumab, sintilimab, cemiplimab, olaratumab, tovetumab, rinucumab, atezolizumab, avelumab, durvalumab, lifastuzumab vedotin, bavituximab, acapatamab, capromab, rosopatamab, nezastomig, pasotuxizumab, pelgifatamab, voxalatamab, cofetuzumab pelidotin, denosumab, rosmantuzumab, cirmtuzumab, atinumab, indatuximab ravtansine, elotuzumab, sirtratumab vedotin, sonepcizumab, vandortuzumab vedotin, minretumomab, satumomab pendetide, maslimomab, ontuxizumab, tenatumomab, fresolimumab, metelimumab, lerdelimumab, tezepelumab, etigilimab, tiragotumab, placulumab, prezalumab, infliximab, nerelimomab, ozoralizumab, adalimumab, afelimomab, certolizumab pegol, golimumab, mapatumumab, conatumumab, lexatumumab, tigatuzumab, sacituzumab govitecan, votumumab, pogalizumab, letolizumab, pankomab, anatumomab mafenatox, enavatuzumab, flanvotumab, brolucizumab, ranibizumab, varisacumab, bevacizumab, faricimab, icrucumab, alacizumab pegol, ramucirumab, pritumumab, and onvatilimab.

[6059] In some aspects, the antigen binding polypeptide complexes provided herein comprise a VL2 comprising a light chain complementarity determining region 1 (LCDR1), LCDR2, and/or LCDR3 of an antibody selected from the group consisting of losatuxizumab vedotin, utomilumab, urelumab, oleclumab, naptumomab estafenatox, ascrinvacumab, pintumomab, tacatuzumab tetraxetan, nesvacumab, vanucizumab, timolumab, vapaliximab, vepalimomab, enapotamab vedotin, ianalumab, belimumab, tabalumab, tibulizumab, belantamab mafodotin, teclistamab, teclistamab, detumomab, nacolomab tafenatox, eculizumab, lendalizumab, pexelizumab, pozelimab, ravulizumab, tesidolumab, vilobelimab, abagovomab, igovomab, oregovomab, sofituzumab vedotin, cantuzumab mertansine, cantuzuma bravtansine, girentuximab, altumomab pentetate, arcitumomab, besilesomab, bertilimumab, plozalizumab, mogamulizumab, leronlimab, PRO140, rovelizumab, rovelizumab, talacotuzumab, benralizumab, tavolimab, vonlerolizumab, gavilimomab, ziralimumab, fanolesomab, ipilimumab, ruplizumab, toralizumab, dapirolizumab pegol, toralizumab, dapirolizumab pegol, ruplizumab, blinatumomab, inebilizumab, loncastuximab tesirine, SGN-CD19A, tafasitamab, taplitumomab paptox, XMAB-5574, Budoprutug, Obexelimab, duvortuxizumab, englumafusp alfa, Emfizatamab, zeripatamig, siplizumab, blontuvetmab, FBTA05, ibritumomab tiuxetan, obinutuzumab, ocaratuzumab, ocrelizumab, ofatumumab, rituximab, tositumomab, ublituximab, veltuzumab, divozilimab, eramkafusp alfa, ripertamab, zuberitamab, glofitamab, nofetumomab merpentan, samalizumab, imvotamab, odronextamab, plamotamab, bectumomab, inotuzumab ozogamicin, moxetumomab pasudotox, pinatuzumab vedotin, gomiliximab, lumiliximab, inolimomab, inolimomab, daclizumab, camidanluma btesirine, basiliximab, varlilumab, omburtamab, enoblituzumab, vopratelimab, lulizumabpegol, TGN1412, muromonab-CD3, otelixizumab, teplizumab, visilizumab, epcoritamab, epcoritamab, brentuximab vedotin, iratumumab, azintuxizumab vedotin, gemtuzumab ozogamicin, lintuzumab, vadastuximab talirine, naratuximab emtansine, otlertuzumab, lilotomab satetraxetan, tetulomab, daratumumab, isatuximab, foralumab, mosunetuzumab, mosunetuzumab, cedelizumab, ibalizumab, keliximab, priliximab, tregalizumab, zanolimumab, bleselumab, iscalimab, lucatumumab, ravagalimab, selicrelumab, teneliximab, vanalimab, abciximab, bivatuzumab, iomab-B, telimomab aritox, zolimomab aritox, abituzumab, intetumumab, alemtuzumab, tamtuvetmab, lorvotuzumab mertansine, itolizumab, cusatuzumab, vorsetuzumab mafodotin, milatuzumab, iladatuzumab vedotin, polatuzumab vedotin, galiximab, cibisatamab, zolbetuximab, naxitamab, tisotumab vedotin, olendalizumab, pamrevlumab, lacnotuzumab, cabiralizumab, emactuzumab, axatilimab, gimsilumab, lenzilumab, namilumab, tremelimumab, ulocuplumab, tepoditamab, rovalpituzumab tesirine, tarlatamab, demcizumab, navicixizumab, drozitumab, parsatuzumab, depatuxizumab mafodotin, modotuximab, carotuximab, adecatumumab, adecatumumab, oportuzumab monatox, solitomab, tucotuzumab celmoleukin, edrecolomab, catumaxomab, ifabotuzumab, fibatuzumab, zalutumumab, panitumumab, cetuximab, futuximab, imgatuzumab, laprituximab emtansine, matuzumab, necitumumab, nimotuzumab, tomuzotuximab, amivantamab, amivantamab, epitumomab cituxetan, sontuzumab, duligotuzumab, elgemtumab, lumretuzumab, patritumab, seribantumab, zenocutuzumab, sibrotuzumab, burosumab, aprutumab ixadotin, radretumab, pasotuxizumab, farletuzumab, mirvetuximab soravtansine, vantictumab, TRBS07, 3F8, dinutuximab, dinutuximab beta, ecromeximab, mitumomab, andecaliximab, capromab, codrituzumab, glembatumumab vedotin, talquetamab, talquetamab, trevogrumab, indusatumab vedotin, ficlatuzumab, rilotumumab, zatuximab, pentuzimab, pentuzimab, margetuximab, timigutuzumab, trastuzumab, trastuzumab duocarmazine, trastuzumab emtansine, gancotamab, pertuzumab, ertumaxomab, emibetuzumab, telisotuzumab, telisotuzumab vedotin, derlotuximab biotin, apolizumab, onartuzumab, bersanlimab, enlimomabpegol, rontalizumab, sifalimumab, talizumab, ganitumab, istiratumab, robatumumab, teprotumumab, figitumumab, ganitumab, istiratumab, robatumumab, teprotumumab, cixutumumab, dalotuzumab, xentuzumab, dusigitumab, canakinumab, ustekinumab, ustekinumab, ustckinumab, briakinumab, briakinumab, abrezekimab, lebrikizumab, romilkimab, TNX-650, tralokinumab, anrukinzumab, brodalumab, ixekizumab, netakimab, perakizumab, secukinumab, vunakizumab, afasevikumab, afasevikumab, bimekizumab, bimekizumab, remtolumab, bermckimab, lutikizumab, lutikizumab, gevokizumab, cergutuzumab amunaleukin, fletikumab, fezakinumab, brazikumab, guselkumab, mirikizumab, tildrakizumab, risankizumab, flotetuzumab, nemolizumab, pascolizumab, dupilumab, mepolizumab, reslizumab, clazakizumab, elsilimomab, olokizumab, sarilumab, siltuximab, sirukumab, vobarilizumab, tocilizumab, SA237, satralizumab, enokizumab, prezalizumab, natalizumab, abrilumab, abrilumab, vedolizumab, volociximab, tadocizumab, etaracizumab, etrolizumab, spesolimab, vatelizumab, crlizumab, lirilumab, relatlimab, cBR96-doxorubicinimmunoconjugate, odulimomab, efalizumab, ladiratuzumab vedotin, simtuzumab, samrotamab vedotin, asclizumab, lupartumab amadotin, imalumab, carlumab, imaprelimab, amatuximab, amatuximab, anetumab ravtansine, narnatumab, clivatuzumab tetraxetan, pemtumomab, gatipotuzumab, ensituximab, lemalesomab, sulesomab, enfortumab vedotin, racotumomab, monalizumab, brontictuzumab, tarextumab, vesencumab, oxelumab, gilvetmab, tislelizumab, dostarlimab, BCD-100, nivolumab, PDR001, pembrolizumab, pidilizumab, retifanlimab, spartalizumab, sintilimab, cemiplimab, olaratumab, tovetumab, rinucumab, atezolizumab, avelumab, durvalumab, lifastuzumab vedotin, bavituximab, acapatamab, capromab, rosopatamab, nezastomig, pasotuxizumab, pelgifatamab, voxalatamab, cofetuzumab pelidotin, denosumab, rosmantuzumab, cirmtuzumab, atinumab, indatuximab ravtansine, elotuzumab, sirtratumab vedotin, sonepcizumab, vandortuzumab vedotin, minretumomab, satumomab pendetide, maslimomab, ontuxizumab, tenatumomab, fresolimumab, metelimumab, lerdelimumab, tezepelumab, etigilimab, tiragotumab, placulumab, prezalumab, infliximab, nerelimomab, ozoralizumab, adalimumab, afelimomab, certolizumab pegol, golimumab, mapatumumab, conatumumab, lexatumumab, tigatuzumab, sacituzumab govitecan, votumumab, pogalizumab, letolizumab, pankomab, anatumomab mafenatox, enavatuzumab, flanvotumab, brolucizumab, ranibizumab, varisacumab, bevacizumab, faricimab, icrucumab, alacizumab pegol, ramucirumab, pritumumab, and onvatilimab.

[6060] In some aspects, the antigen binding polypeptide complexes provided herein comprise a VL3 comprising a light chain complementarity determining region 1 (LCDR1), LCDR2, and/or LCDR3 of an antibody selected from the group consisting of losatuxizumab vedotin, utomilumab, urelumab, oleclumab, naptumomab estafenatox, ascrinvacumab, pintumomab, tacatuzumab tetraxetan, nesvacumab, vanucizumab, timolumab, vapaliximab, vepalimomab, enapotamab vedotin, ianalumab, belimumab, tabalumab, tibulizumab, belantamab mafodotin, teclistamab, teclistamab, detumomab, nacolomab tafenatox, eculizumab, lendalizumab, pexelizumab, pozelimab, ravulizumab, tesidolumab, vilobelimab, abagovomab, igovomab, oregovomab, sofituzumab vedotin, cantuzumab mertansine, cantuzuma bravtansine, girentuximab, altumomab pentetate, arcitumomab, besilesomab, bertilimumab, plozalizumab, mogamulizumab, leronlimab, PRO140, rovelizumab, rovelizumab, talacotuzumab, benralizumab, tavolimab, vonlerolizumab, gavilimomab, ziralimumab, fanolesomab, ipilimumab, ruplizumab, toralizumab, dapirolizumab pegol, toralizumab, dapirolizumab pegol, ruplizumab, blinatumomab, inebilizumab, loncastuximab tesirine, SGN-CD19A, tafasitamab, taplitumomab paptox, XMAB-5574, Budoprutug, Obexelimab, duvortuxizumab, englumafusp alfa, Emfizatamab, zeripatamig, siplizumab, blontuvetmab, FBTA05, ibritumomab tiuxetan, obinutuzumab, ocaratuzumab, ocrelizumab, ofatumumab, rituximab, tositumomab, ublituximab, veltuzumab, divozilimab, eramkafusp alfa, ripertamab, zuberitamab, glofitamab, nofetumomab merpentan, samalizumab, imvotamab, odronextamab, plamotamab, bectumomab, inotuzumab ozogamicin, moxetumomab pasudotox, pinatuzumab vedotin, gomiliximab, lumiliximab, inolimomab, inolimomab, daclizumab, camidanluma btesirine, basiliximab, varlilumab, omburtamab, enoblituzumab, vopratelimab, lulizumabpegol, TGN1412, muromonab-CD3, otelixizumab, teplizumab, visilizumab, epcoritamab, epcoritamab, brentuximab vedotin, iratumumab, azintuxizumab vedotin, gemtuzumab ozogamicin, lintuzumab, vadastuximab talirine, naratuximab emtansine, otlertuzumab, lilotomab satetraxetan, tetulomab, daratumumab, isatuximab, foralumab, mosunetuzumab, mosunetuzumab, cedelizumab, ibalizumab, keliximab, priliximab, tregalizumab, zanolimumab, bleselumab, iscalimab, lucatumumab, ravagalimab, selicrelumab, teneliximab, vanalimab, abciximab, bivatuzumab, iomab-B, telimomab aritox, zolimomab aritox, abituzumab, intetumumab, alemtuzumab, tamtuvetmab, lorvotuzumab mertansine, itolizumab, cusatuzumab, vorsetuzumab mafodotin, milatuzumab, iladatuzumab vedotin, polatuzumab vedotin, galiximab, cibisatamab, zolbetuximab, naxitamab, tisotumab vedotin, olendalizumab, pamrevlumab, lacnotuzumab, cabiralizumab, emactuzumab, axatilimab, gimsilumab, lenzilumab, namilumab, tremelimumab, ulocuplumab, tepoditamab, rovalpituzumab tesirine, tarlatamab, demcizumab, navicixizumab, drozitumab, parsatuzumab, depatuxizumab mafodotin, modotuximab, carotuximab, adecatumumab, adecatumumab, oportuzumab monatox, solitomab, tucotuzumab celmoleukin, edrecolomab, catumaxomab, ifabotuzumab, fibatuzumab, zalutumumab, panitumumab, cetuximab, futuximab, imgatuzumab, laprituximab emtansine, matuzumab, necitumumab, nimotuzumab, tomuzotuximab, amivantamab, amivantamab, epitumomab cituxetan, sontuzumab, duligotuzumab, elgemtumab, lumretuzumab, patritumab, seribantumab, zenocutuzumab, sibrotuzumab, burosumab, aprutumab ixadotin, radretumab, pasotuxizumab, farletuzumab, mirvetuximab soravtansine, vantictumab, TRBS07, 3F8, dinutuximab, dinutuximab beta, ecromeximab, mitumomab, andecaliximab, capromab, codrituzumab, glembatumumab vedotin, talquetamab, talquetamab, trevogrumab, indusatumab vedotin, ficlatuzumab, rilotumumab, zatuximab, pentuzimab, pentuzimab, margetuximab, timigutuzumab, trastuzumab, trastuzumab duocarmazine, trastuzumab emtansine, gancotamab, pertuzumab, ertumaxomab, emibctuzumab, telisotuzumab, telisotuzumab vedotin, derlotuximab biotin, apolizumab, onartuzumab, bersanlimab, enlimomabpegol, rontalizumab, sifalimumab, talizumab, ganitumab, istiratumab, robatumumab, teprotumumab, figitumumab, ganitumab, istiratumab, robatumumab, teprotumumab, cixutumumab, dalotuzumab, xentuzumab, dusigitumab, canakinumab, ustekinumab, ustekinumab, ustekinumab, briakinumab, briakinumab, abrezekimab, lebrikizumab, romilkimab, TNX-650, tralokinumab, anrukinzumab, brodalumab, ixekizumab, netakimab, perakizumab, secukinumab, vunakizumab, afasevikumab, afasevikumab, bimekizumab, bimekizumab, remtolumab, bermekimab, lutikizumab, lutikizumab, gevokizumab, cergutuzumab amunaleukin, fletikumab, fezakinumab, brazikumab, guselkumab, mirikizumab, tildrakizumab, risankizumab, flotetuzumab, nemolizumab, pascolizumab, dupilumab, mepolizumab, reslizumab, clazakizumab, elsilimomab, olokizumab, sarilumab, siltuximab, sirukumab, vobarilizumab, tocilizumab, SA237, satralizumab, enokizumab, prezalizumab, natalizumab, abrilumab, abrilumab, vedolizumab, volociximab, tadocizumab, etaracizumab, etrolizumab, spesolimab, vatelizumab, erlizumab, lirilumab, relatlimab, cBR96-doxorubicinimmunoconjugate, odulimomab, efalizumab, ladiratuzumab vedotin, simtuzumab, samrotamab vedotin, asclizumab, lupartumab amadotin, imalumab, carlumab, imaprelimab, amatuximab, amatuximab, anctumab ravtansine, narnatumab, clivatuzumab tetraxetan, pemtumomab, gatipotuzumab, ensituximab, lemalesomab, sulesomab, enfortumab vedotin, racotumomab, monalizumab, brontictuzumab, tarextumab, vesencumab, oxelumab, gilvetmab, tislelizumab, dostarlimab, BCD-100, nivolumab, PDR001, pembrolizumab, pidilizumab, retifanlimab, spartalizumab, sintilimab, cemiplimab, olaratumab, tovetumab, rinucumab, atezolizumab, avelumab, durvalumab, lifastuzumab vedotin, bavituximab, acapatamab, capromab, rosopatamab, nezastomig, pasotuxizumab, pelgifatamab, voxalatamab, cofetuzumab pelidotin, denosumab, rosmantuzumab, cirmtuzumab, atinumab, indatuximab ravtansine, elotuzumab, sirtratumab vedotin, sonepcizumab, vandortuzumab vedotin, minretumomab, satumomab pendetide, maslimomab, ontuxizumab, tenatumomab, fresolimumab, metelimumab, lerdelimumab, tezepelumab, etigilimab, tiragotumab, placulumab, prezalumab, infliximab, nerelimomab, ozoralizumab, adalimumab, afelimomab, certolizumab pegol, golimumab, mapatumumab, conatumumab, lexatumumab, tigatuzumab, sacituzumab govitecan, votumumab, pogalizumab, letolizumab, pankomab, anatumomab mafenatox, enavatuzumab, flanvotumab, brolucizumab, ranibizumab, varisacumab, bevacizumab, faricimab, icrucumab, alacizumab pegol, ramucirumab, pritumumab, and onvatilimab.

[6061] In some aspects, the antigen binding polypeptide complexes provided herein comprise a VL4 comprising a light chain complementarity determining region 1 (LCDR1), LCDR2, and/or LCDR3 of an antibody selected from the group consisting of losatuxizumab vedotin, utomilumab, urelumab, oleclumab, naptumomab estafenatox, ascrinvacumab, pintumomab, tacatuzumab tetraxetan, nesvacumab, vanucizumab, timolumab, vapaliximab, vepalimomab, enapotamab vedotin, ianalumab, belimumab, tabalumab, tibulizumab, belantamab mafodotin, teclistamab, teclistamab, detumomab, nacolomab tafenatox, eculizumab, lendalizumab, pexelizumab, pozelimab, ravulizumab, tesidolumab, vilobelimab, abagovomab, igovomab, oregovomab, sofituzumab vedotin, cantuzumab mertansine, cantuzuma bravtansine, girentuximab, altumomab pentetate, arcitumomab, besilesomab, bertilimumab, plozalizumab, mogamulizumab, leronlimab, PRO140, rovelizumab, rovelizumab, talacotuzumab, benralizumab, tavolimab, vonlerolizumab, gavilimomab, ziralimumab, fanolesomab, ipilimumab, ruplizumab, toralizumab, dapirolizumab pegol, toralizumab, dapirolizumab pegol, ruplizumab, blinatumomab, inebilizumab, loncastuximab tesirine, SGN-CD19A, tafasitamab, taplitumomab paptox, XMAB-5574, Budoprutug, Obexelimab, duvortuxizumab, englumafusp alfa, Emfizatamab, zeripatamig, siplizumab, blontuvetmab, FBTA05, ibritumomab tiuxetan, obinutuzumab, ocaratuzumab, ocrelizumab, ofatumumab, rituximab, tositumomab, ublituximab, veltuzumab, divozilimab, eramkafusp alfa, ripertamab, zuberitamab, glofitamab, nofetumomab merpentan, samalizumab, imvotamab, odronextamab, plamotamab, bectumomab, inotuzumab ozogamicin, moxetumomab pasudotox, pinatuzumab vedotin, gomiliximab, lumiliximab, inolimomab, inolimomab, daclizumab, camidanluma btesirine, basiliximab, varlilumab, omburtamab, enoblituzumab, vopratelimab, lulizumabpegol, TGN1412, muromonab-CD3, otelixizumab, teplizumab, visilizumab, epcoritamab, epcoritamab, brentuximab vedotin, iratumumab, azintuxizumab vedotin, gemtuzumab ozogamicin, lintuzumab, vadastuximab talirine, naratuximab emtansine, otlertuzumab, lilotomab satetraxetan, tetulomab, daratumumab, isatuximab, foralumab, mosunetuzumab, mosunetuzumab, cedelizumab, ibalizumab, keliximab, priliximab, tregalizumab, zanolimumab, bleselumab, iscalimab, lucatumumab, ravagalimab, selicrelumab, teneliximab, vanalimab, abciximab, bivatuzumab, iomab-B, telimomab aritox, zolimomab aritox, abituzumab, intetumumab, alemtuzumab, tamtuvetmab, lorvotuzumab mertansine, itolizumab, cusatuzumab, vorsetuzumab mafodotin, milatuzumab, iladatuzumab vedotin, polatuzumab vedotin, galiximab, cibisatamab, zolbetuximab, naxitamab, tisotumab vedotin, olendalizumab, pamrevlumab, lacnotuzumab, cabiralizumab, emactuzumab, axatilimab, gimsilumab, lenzilumab, namilumab, tremelimumab, ulocuplumab, tepoditamab, rovalpituzumab tesirine, tarlatamab, demcizumab, navicixizumab, drozitumab, parsatuzumab, depatuxizumab mafodotin, modotuximab, carotuximab, adecatumumab, adecatumumab, oportuzumab monatox, solitomab, tucotuzumab celmoleukin, edrecolomab, catumaxomab, ifabotuzumab, fibatuzumab, zalutumumab, panitumumab, cetuximab, futuximab, imgatuzumab, laprituximab emtansine, matuzumab, necitumumab, nimotuzumab, tomuzotuximab, amivantamab, amivantamab, epitumomab cituxetan, sontuzumab, duligotuzumab, elgemtumab, lumretuzumab, patritumab, seribantumab, zenocutuzumab, sibrotuzumab, burosumab, aprutumab ixadotin, radretumab, pasotuxizumab, farletuzumab, mirvetuximab soravtansine, vantictumab, TRBS07, 3F8, dinutuximab, dinutuximab beta, ecromeximab, mitumomab, andecaliximab, capromab, codrituzumab, glembatumumab vedotin, talquetamab, talquetamab, trevogrumab, indusatumab vedotin, ficlatuzumab, rilotumumab, zatuximab, pentuzimab, pentuzimab, margetuximab, timigutuzumab, trastuzumab, trastuzumab duocarmazine, trastuzumab emtansine, gancotamab, pertuzumab, ertumaxomab, emibetuzumab, telisotuzumab, telisotuzumab vedotin, derlotuximab biotin, apolizumab, onartuzumab, bersanlimab, enlimomabpegol, rontalizumab, sifalimumab, talizumab, ganitumab, istiratumab, robatumumab, teprotumumab, figitumumab, ganitumab, istiratumab, robatumumab, teprotumumab, cixutumumab, dalotuzumab, xentuzumab, dusigitumab, canakinumab, ustekinumab, ustekinumab, ustekinumab, briakinumab, briakinumab, abrezekimab, lebrikizumab, romilkimab, TNX-650, tralokinumab, anrukinzumab, brodalumab, ixekizumab, netakimab, perakizumab, secukinumab, vunakizumab, afasevikumab, afasevikumab, bimekizumab, bimekizumab, remtolumab, bermekimab, lutikizumab, lutikizumab, gevokizumab, cergutuzumab amunaleukin, fletikumab, fezakinumab, brazikumab, guselkumab, mirikizumab, tildrakizumab, risankizumab, flotetuzumab, nemolizumab, pascolizumab, dupilumab, mepolizumab, reslizumab, clazakizumab, elsilimomab, olokizumab, sarilumab, siltuximab, sirukumab, vobarilizumab, tocilizumab, SA237, satralizumab, enokizumab, prezalizumab, natalizumab, abrilumab, abrilumab, vedolizumab, volociximab, tadocizumab, etaracizumab, etrolizumab, spesolimab, vatelizumab, erlizumab, lirilumab, relatlimab, cBR96-doxorubicinimmunoconjugate, odulimomab, efalizumab, ladiratuzumab vedotin, simtuzumab, samrotamab vedotin, aselizumab, lupartumab amadotin, imalumab, carlumab, imaprelimab, amatuximab, amatuximab, anetumab ravtansine, narnatumab, clivatuzumab tetraxetan, pemtumomab, gatipotuzumab, ensituximab, lemalesomab, sulesomab, enfortumab vedotin, racotumomab, monalizumab, brontictuzumab, tarextumab, vesencumab, oxelumab, gilvetmab, tislelizumab, dostarlimab, BCD-100, nivolumab, PDR001, pembrolizumab, pidilizumab, retifanlimab, spartalizumab, sintilimab, cemiplimab, olaratumab, tovetumab, rinucumab, atezolizumab, avelumab, durvalumab, lifastuzumab vedotin, bavituximab, acapatamab, capromab, rosopatamab, nezastomig, pasotuxizumab, pelgifatamab, voxalatamab, cofetuzumab pelidotin, denosumab, rosmantuzumab, cirmtuzumab, atinumab, indatuximab ravtansine, elotuzumab, sirtratumab vedotin, sonepcizumab, vandortuzumab vedotin, minretumomab, satumomab pendetide, maslimomab, ontuxizumab, tenatumomab, fresolimumab, metelimumab, lerdelimumab, tezepelumab, etigilimab, tiragotumab, placulumab, prezalumab, infliximab, nerelimomab, ozoralizumab, adalimumab, afelimomab, certolizumab pegol, golimumab, mapatumumab, conatumumab, lexatumumab, tigatuzumab, sacituzumab govitecan, votumumab, pogalizumab, letolizumab, pankomab, anatumomab mafenatox, enavatuzumab, flanvotumab, brolucizumab, ranibizumab, varisacumab, bevacizumab, faricimab, icrucumab, alacizumab pegol, ramucirumab, pritumumab, and onvatilimab.

[6062] In some aspects, the antigen binding polypeptide complexes provided herein comprise a VH1 comprising a heavy chain complementarity determining region 1 (HCDR1), HCDR2, and/or HCDR3 of an antibody selected from the group consisting of losatuxizumab vedotin, utomilumab, urelumab, oleclumab, naptumomab estafenatox, ascrinvacumab, pintumomab, tacatuzumab tetraxetan, nesvacumab, vanucizumab, timolumab, vapaliximab, vepalimomab, enapotamab vedotin, ianalumab, belimumab, tabalumab, tibulizumab, belantamab mafodotin, teclistamab, teclistamab, detumomab, nacolomab tafenatox, eculizumab, lendalizumab, pexelizumab, pozelimab, ravulizumab, tesidolumab, vilobclimab, abagovomab, igovomab, oregovomab, sofituzumab vedotin, cantuzumab mertansine, cantuzuma bravtansine, girentuximab, altumomab pentetate, arcitumomab, besilesomab, bertilimumab, plozalizumab, mogamulizumab, leronlimab, PRO140, rovelizumab, rovelizumab, talacotuzumab, benralizumab, tavolimab, vonlerolizumab, gavilimomab, ziralimumab, fanolesomab, ipilimumab, ruplizumab, toralizumab, dapirolizumab pegol, toralizumab, dapirolizumab pegol, ruplizumab, blinatumomab, inebilizumab, loncastuximab tesirine, SGN-CD19A, tafasitamab, taplitumomab paptox, XMAB-5574, Budoprutug, Obexelimab, duvortuxizumab, englumafusp alfa, Emfizatamab, zeripatamig, siplizumab, blontuvetmab, FBTA05, ibritumomab tiuxetan, obinutuzumab, ocaratuzumab, ocrelizumab, ofatumumab, rituximab, tositumomab, ublituximab, veltuzumab, divozilimab, eramkafusp alfa, ripertamab, zuberitamab, glofitamab, nofetumomab merpentan, samalizumab, imvotamab, odronextamab, plamotamab, bectumomab, inotuzumab ozogamicin, moxetumomab pasudotox, pinatuzumab vedotin, gomiliximab, lumiliximab, inolimomab, inolimomab, daclizumab, camidanluma btesirine, basiliximab, varlilumab, omburtamab, enoblituzumab, vopratelimab, lulizumabpegol, TGN1412, muromonab-CD3, otelixizumab, teplizumab, visilizumab, epcoritamab, epcoritamab, brentuximab vedotin, iratumumab, azintuxizumab vedotin, gemtuzumab ozogamicin, lintuzumab, vadastuximab talirine, naratuximab emtansine, otlertuzumab, lilotomab satetraxetan, tetulomab, daratumumab, isatuximab, foralumab, mosunetuzumab, mosunctuzumab, cedelizumab, ibalizumab, keliximab, priliximab, tregalizumab, zanolimumab, bleselumab, iscalimab, lucatumumab, ravagalimab, selicrelumab, teneliximab, vanalimab, abciximab, bivatuzumab, iomab-B, telimomab aritox, zolimomab aritox, abituzumab, intetumumab, alemtuzumab, tamtuvetmab, lorvotuzumab mertansine, itolizumab, cusatuzumab, vorsetuzumab mafodotin, milatuzumab, iladatuzumab vedotin, polatuzumab vedotin, galiximab, cibisatamab, zolbetuximab, naxitamab, tisotumab vedotin, olendalizumab, pamrevlumab, lacnotuzumab, cabiralizumab, emactuzumab, axatilimab, gimsilumab, lenzilumab, namilumab, tremelimumab, ulocuplumab, tepoditamab, rovalpituzumab tesirine, tarlatamab, demcizumab, navicixizumab, drozitumab, parsatuzumab, depatuxizumab mafodotin, modotuximab, carotuximab, adecatumumab, adecatumumab, oportuzumab monatox, solitomab, tucotuzumab celmoleukin, edrecolomab, catumaxomab, ifabotuzumab, fibatuzumab, zalutumumab, panitumumab, cetuximab, futuximab, imgatuzumab, laprituximab emtansine, matuzumab, necitumumab, nimotuzumab, tomuzotuximab, amivantamab, amivantamab, epitumomab cituxetan, sontuzumab, duligotuzumab, elgemtumab, lumretuzumab, patritumab, seribantumab, zenocutuzumab, sibrotuzumab, burosumab, aprutumab ixadotin, radretumab, pasotuxizumab, farletuzumab, mirvetuximab soravtansine, vantictumab, TRBS07, 3F8, dinutuximab, dinutuximab beta, ecromeximab, mitumomab, andecaliximab, capromab, codrituzumab, glembatumumab vedotin, talquetamab, talquetamab, trevogrumab, indusatumab vedotin, ficlatuzumab, rilotumumab, zatuximab, pentuzimab, pentuzimab, margetuximab, timigutuzumab, trastuzumab, trastuzumab duocarmazine, trastuzumab emtansine, gancotamab, pertuzumab, ertumaxomab, emibetuzumab, telisotuzumab, telisotuzumab vedotin, derlotuximab biotin, apolizumab, onartuzumab, bersanlimab, enlimomabpegol, rontalizumab, sifalimumab, talizumab, ganitumab, istiratumab, robatumumab, teprotumumab, figitumumab, ganitumab, istiratumab, robatumumab, teprotumumab, cixutumumab, dalotuzumab, xentuzumab, dusigitumab, canakinumab, ustekinumab, ustekinumab, ustekinumab, briakinumab, briakinumab, abrezekimab, lebrikizumab, romilkimab, TNX-650, tralokinumab, anrukinzumab, brodalumab, ixekizumab, netakimab, perakizumab, secukinumab, vunakizumab, afasevikumab, afasevikumab, bimekizumab, bimekizumab, remtolumab, bermekimab, lutikizumab, lutikizumab, gevokizumab, cergutuzumab amunaleukin, fletikumab, fezakinumab, brazikumab, guselkumab, mirikizumab, tildrakizumab, risankizumab, flotetuzumab, nemolizumab, pascolizumab, dupilumab, mepolizumab, reslizumab, clazakizumab, elsilimomab, olokizumab, sarilumab, siltuximab, sirukumab, vobarilizumab, tocilizumab, SA237, satralizumab, enokizumab, prezalizumab, natalizumab, abrilumab, abrilumab, vedolizumab, volociximab, tadocizumab, etaracizumab, etrolizumab, spesolimab, vatelizumab, erlizumab, lirilumab, relatlimab, cBR96-doxorubicinimmunoconjugate, odulimomab, efalizumab, ladiratuzumab vedotin, simtuzumab, samrotamab vedotin, aselizumab, lupartumab amadotin, imalumab, carlumab, imaprelimab, amatuximab, amatuximab, anetumab ravtansine, narnatumab, clivatuzumab tetraxetan, pemtumomab, gatipotuzumab, ensituximab, lemalesomab, sulesomab, enfortumab vedotin, racotumomab, monalizumab, brontictuzumab, tarextumab, vesencumab, oxelumab, gilvetmab, tislelizumab, dostarlimab, BCD-100, nivolumab, PDR001, pembrolizumab, pidilizumab, retifanlimab, spartalizumab, sintilimab, cemiplimab, olaratumab, tovetumab, rinucumab, atezolizumab, avelumab, durvalumab, lifastuzumab vedotin, bavituximab, acapatamab, capromab, rosopatamab, nezastomig, pasotuxizumab, pelgifatamab, voxalatamab, cofetuzumab pelidotin, denosumab, rosmantuzumab, cirmtuzumab, atinumab, indatuximab ravtansine, elotuzumab, sirtratumab vedotin, sonepcizumab, vandortuzumab vedotin, minretumomab, satumomab pendetide, maslimomab, ontuxizumab, tenatumomab, fresolimumab, metelimumab, lerdelimumab, tezepelumab, etigilimab, tiragotumab, placulumab, prezalumab, infliximab, nerelimomab, ozoralizumab, adalimumab, afelimomab, certolizumab pegol, golimumab, mapatumumab, conatumumab, lexatumumab, tigatuzumab, sacituzumab govitecan, votumumab, pogalizumab, letolizumab, pankomab, anatumomab mafenatox, enavatuzumab, flanvotumab, brolucizumab, ranibizumab, varisacumab, bevacizumab, faricimab, icrucumab, alacizumab pegol, ramucirumab, pritumumab, and onvatilimab.

[6063] In some aspects, the antigen binding polypeptide complexes provided herein comprise a VH2 comprising a heavy chain complementarity determining region 1 (HCDR1), HCDR2, and/or HCDR3 of an antibody selected from the group consisting of losatuxizumab vedotin, utomilumab, urelumab, oleclumab, naptumomab estafenatox, ascrinvacumab, pintumomab, tacatuzumab tetraxetan, nesvacumab, vanucizumab, timolumab, vapaliximab, vepalimomab, enapotamab vedotin, ianalumab, belimumab, tabalumab, tibulizumab, belantamab mafodotin, teclistamab, teclistamab, detumomab, nacolomab tafenatox, eculizumab, lendalizumab, pexelizumab, pozelimab, ravulizumab, tesidolumab, vilobelimab, abagovomab, igovomab, oregovomab, sofituzumab vedotin, cantuzumab mertansine, cantuzuma bravtansine, girentuximab, altumomab pentetate, arcitumomab, besilesomab, bertilimumab, plozalizumab, mogamulizumab, leronlimab, PRO140, rovelizumab, rovelizumab, talacotuzumab, benralizumab, tavolimab, vonlerolizumab, gavilimomab, ziralimumab, fanolesomab, ipilimumab, ruplizumab, toralizumab, dapirolizumab pegol, toralizumab, dapirolizumab pegol, ruplizumab, blinatumomab, inebilizumab, loncastuximab tesirine, SGN-CD19A, tafasitamab, taplitumomab paptox, XMAB-5574, Budoprutug, Obexelimab, duvortuxizumab, englumafusp alfa, Emfizatamab, zeripatamig, siplizumab, blontuvetmab, FBTA05, ibritumomab tiuxetan, obinutuzumab, ocaratuzumab, ocrelizumab, ofatumumab, rituximab, tositumomab, ublituximab, veltuzumab, divozilimab, eramkafusp alfa, ripertamab, zuberitamab, glofitamab, nofetumomab merpentan, samalizumab, imvotamab, odronextamab, plamotamab, bectumomab, inotuzumab ozogamicin, moxetumomab pasudotox, pinatuzumab vedotin, gomiliximab, lumiliximab, inolimomab, inolimomab, daclizumab, camidanluma btesirine, basiliximab, varlilumab, omburtamab, enoblituzumab, vopratelimab, lulizumabpegol, TGN1412, muromonab-CD3, otelixizumab, teplizumab, visilizumab, epcoritamab, epcoritamab, brentuximab vedotin, iratumumab, azintuxizumab vedotin, gemtuzumab ozogamicin, lintuzumab, vadastuximab talirine, naratuximab emtansine, otlertuzumab, lilotomab satetraxetan, tetulomab, daratumumab, isatuximab, foralumab, mosunetuzumab, mosunctuzumab, cedelizumab, ibalizumab, keliximab, priliximab, tregalizumab, zanolimumab, bleselumab, iscalimab, lucatumumab, ravagalimab, selicrelumab, teneliximab, vanalimab, abciximab, bivatuzumab, iomab-B, telimomab aritox, zolimomab aritox, abituzumab, intetumumab, alemtuzumab, tamtuvetmab, lorvotuzumab mertansine, itolizumab, cusatuzumab, vorsctuzumab mafodotin, milatuzumab, iladatuzumab vedotin, polatuzumab vedotin, galiximab, cibisatamab, zolbetuximab, naxitamab, tisotumab vedotin, olendalizumab, pamrevlumab, lacnotuzumab, cabiralizumab, emactuzumab, axatilimab, gimsilumab, lenzilumab, namilumab, tremelimumab, ulocuplumab, tepoditamab, rovalpituzumab tesirine, tarlatamab, demcizumab, navicixizumab, drozitumab, parsatuzumab, depatuxizumab mafodotin, modotuximab, carotuximab, adecatumumab, adecatumumab, oportuzumab monatox, solitomab, tucotuzumab celmoleukin, edrecolomab, catumaxomab, ifabotuzumab, fibatuzumab, zalutumumab, panitumumab, cetuximab, futuximab, imgatuzumab, laprituximab emtansine, matuzumab, necitumumab, nimotuzumab, tomuzotuximab, amivantamab, amivantamab, epitumomab cituxetan, sontuzumab, duligotuzumab, elgemtumab, lumretuzumab, patritumab, seribantumab, zenocutuzumab, sibrotuzumab, burosumab, aprutumab ixadotin, radretumab, pasotuxizumab, farletuzumab, mirvetuximab soravtansine, vantictumab, TRBS07, 3F8, dinutuximab, dinutuximab beta, ecromeximab, mitumomab, andecaliximab, capromab, codrituzumab, glembatumumab vedotin, talquetamab, talquetamab, trevogrumab, indusatumab vedotin, ficlatuzumab, rilotumumab, zatuximab, pentuzimab, pentuzimab, margetuximab, timigutuzumab, trastuzumab, trastuzumab duocarmazine, trastuzumab emtansine, gancotamab, pertuzumab, ertumaxomab, emibetuzumab, telisotuzumab, telisotuzumab vedotin, derlotuximab biotin, apolizumab, onartuzumab, bersanlimab, enlimomabpegol, rontalizumab, sifalimumab, talizumab, ganitumab, istiratumab, robatumumab, teprotumumab, figitumumab, ganitumab, istiratumab, robatumumab, teprotumumab, cixutumumab, dalotuzumab, xentuzumab, dusigitumab, canakinumab, ustekinumab, ustekinumab, ustekinumab, briakinumab, briakinumab, abrezekimab, lebrikizumab, romilkimab, TNX-650, tralokinumab, anrukinzumab, brodalumab, ixekizumab, netakimab, perakizumab, secukinumab, vunakizumab, afasevikumab, afasevikumab, bimekizumab, bimekizumab, remtolumab, bermckimab, lutikizumab, lutikizumab, gevokizumab, cergutuzumab amunaleukin, fletikumab, fezakinumab, brazikumab, guselkumab, mirikizumab, tildrakizumab, risankizumab, flotetuzumab, nemolizumab, pascolizumab, dupilumab, mepolizumab, reslizumab, clazakizumab, elsilimomab, olokizumab, sarilumab, siltuximab, sirukumab, vobarilizumab, tocilizumab, SA237, satralizumab, enokizumab, prezalizumab, natalizumab, abrilumab, abrilumab, vedolizumab, volociximab, tadocizumab, etaracizumab, etrolizumab, spesolimab, vatelizumab, erlizumab, lirilumab, relatlimab, cBR96-doxorubicinimmunoconjugate, odulimomab, efalizumab, ladiratuzumab vedotin, simtuzumab, samrotamab vedotin, aselizumab, lupartumab amadotin, imalumab, carlumab, imaprelimab, amatuximab, amatuximab, anetumab ravtansine, narnatumab, clivatuzumab tetraxetan, pemtumomab, gatipotuzumab, ensituximab, lemalesomab, sulesomab, enfortumab vedotin, racotumomab, monalizumab, brontictuzumab, tarextumab, vesencumab, oxelumab, gilvetmab, tislelizumab, dostarlimab, BCD-100, nivolumab, PDR001, pembrolizumab, pidilizumab, retifanlimab, spartalizumab, sintilimab, cemiplimab, olaratumab, tovetumab, rinucumab, atezolizumab, avelumab, durvalumab, lifastuzumab vedotin, bavituximab, acapatamab, capromab, rosopatamab, nezastomig, pasotuxizumab, pelgifatamab, voxalatamab, cofetuzumab pelidotin, denosumab, rosmantuzumab, cirmtuzumab, atinumab, indatuximab ravtansine, elotuzumab, sirtratumab vedotin, sonepcizumab, vandortuzumab vedotin, minretumomab, satumomab pendetide, maslimomab, ontuxizumab, tenatumomab, fresolimumab, metelimumab, lerdelimumab, tezepelumab, etigilimab, tiragotumab, placulumab, prezalumab, infliximab, nerelimomab, ozoralizumab, adalimumab, afelimomab, certolizumab pegol, golimumab, mapatumumab, conatumumab, lexatumumab, tigatuzumab, sacituzumab govitecan, votumumab, pogalizumab, letolizumab, pankomab, anatumomab mafenatox, enavatuzumab, flanvotumab, brolucizumab, ranibizumab, varisacumab, bevacizumab, faricimab, icrucumab, alacizumab pegol, ramucirumab, pritumumab, and onvatilimab.

[6064] In some aspects, the antigen binding polypeptide complexes provided herein comprise a VH3 comprising a heavy chain complementarity determining region 1 (HCDR1), HCDR2, and/or HCDR3 of an antibody selected from the group consisting of losatuxizumab vedotin, utomilumab, urelumab, oleclumab, naptumomab estafenatox, ascrinvacumab, pintumomab, tacatuzumab tetraxetan, nesvacumab, vanucizumab, timolumab, vapaliximab, vepalimomab, enapotamab vedotin, ianalumab, belimumab, tabalumab, tibulizumab, belantamab mafodotin, teclistamab, teclistamab, detumomab, nacolomab tafenatox, eculizumab, lendalizumab, pexelizumab, pozelimab, ravulizumab, tesidolumab, vilobelimab, abagovomab, igovomab, oregovomab, sofituzumab vedotin, cantuzumab mertansine, cantuzuma bravtansine, girentuximab, altumomab pentetate, arcitumomab, besilesomab, bertilimumab, plozalizumab, mogamulizumab, leronlimab, PRO140, rovelizumab, rovelizumab, talacotuzumab, benralizumab, tavolimab, vonlerolizumab, gavilimomab, ziralimumab, fanolesomab, ipilimumab, ruplizumab, toralizumab, dapirolizumab pegol, toralizumab, dapirolizumab pegol, ruplizumab, blinatumomab, inebilizumab, loncastuximab tesirine, SGN-CD19A, tafasitamab, taplitumomab paptox, XMAB-5574, Budoprutug, Obexelimab, duvortuxizumab, englumafusp alfa, Emfizatamab, zeripatamig, siplizumab, blontuvetmab, FBTA05, ibritumomab tiuxetan, obinutuzumab, ocaratuzumab, ocrelizumab, ofatumumab, rituximab, tositumomab, ublituximab, veltuzumab, divozilimab, eramkafusp alfa, ripertamab, zuberitamab, glofitamab, nofetumomab merpentan, samalizumab, imvotamab, odronextamab, plamotamab, bectumomab, inotuzumab ozogamicin, moxetumomab pasudotox, pinatuzumab vedotin, gomiliximab, lumiliximab, inolimomab, inolimomab, daclizumab, camidanluma btesirine, basiliximab, varlilumab, omburtamab, enoblituzumab, vopratelimab, lulizumabpegol, TGN1412, muromonab-CD3, otelixizumab, teplizumab, visilizumab, epcoritamab, epcoritamab, brentuximab vedotin, iratumumab, azintuxizumab vedotin, gemtuzumab ozogamicin, lintuzumab, vadastuximab talirine, naratuximab emtansine, otlertuzumab, lilotomab satetraxetan, tetulomab, daratumumab, isatuximab, foralumab, mosunetuzumab, mosunctuzumab, cedelizumab, ibalizumab, keliximab, priliximab, tregalizumab, zanolimumab, bleselumab, iscalimab, lucatumumab, ravagalimab, selicrelumab, teneliximab, vanalimab, abciximab, bivatuzumab, iomab-B, telimomab aritox, zolimomab aritox, abituzumab, intetumumab, alemtuzumab, tamtuvetmab, lorvotuzumab mertansine, itolizumab, cusatuzumab, vorsetuzumab mafodotin, milatuzumab, iladatuzumab vedotin, polatuzumab vedotin, galiximab, cibisatamab, zolbetuximab, naxitamab, tisotumab vedotin, olendalizumab, pamrevlumab, lacnotuzumab, cabiralizumab, emactuzumab, axatilimab, gimsilumab, lenzilumab, namilumab, tremelimumab, ulocuplumab, tepoditamab, rovalpituzumab tesirine, tarlatamab, demcizumab, navicixizumab, drozitumab, parsatuzumab, depatuxizumab mafodotin, modotuximab, carotuximab, adecatumumab, adecatumumab, oportuzumab monatox, solitomab, tucotuzumab celmoleukin, edrecolomab, catumaxomab, ifabotuzumab, fibatuzumab, zalutumumab, panitumumab, cetuximab, futuximab, imgatuzumab, laprituximab emtansine, matuzumab, necitumumab, nimotuzumab, tomuzotuximab, amivantamab, amivantamab, epitumomab cituxetan, sontuzumab, duligotuzumab, elgemtumab, lumretuzumab, patritumab, seribantumab, zenocutuzumab, sibrotuzumab, burosumab, aprutumab ixadotin, radretumab, pasotuxizumab, farletuzumab, mirvetuximab soravtansine, vantictumab, TRBS07, 3F8, dinutuximab, dinutuximab beta, ecromeximab, mitumomab, andecaliximab, capromab, codrituzumab, glembatumumab vedotin, talquetamab, talquetamab, trevogrumab, indusatumab vedotin, ficlatuzumab, rilotumumab, zatuximab, pentuzimab, pentuzimab, margetuximab, timigutuzumab, trastuzumab, trastuzumab duocarmazine, trastuzumab emtansine, gancotamab, pertuzumab, ertumaxomab, emibetuzumab, telisotuzumab, telisotuzumab vedotin, derlotuximab biotin, apolizumab, onartuzumab, bersanlimab, enlimomabpegol, rontalizumab, sifalimumab, talizumab, ganitumab, istiratumab, robatumumab, teprotumumab, figitumumab, ganitumab, istiratumab, robatumumab, teprotumumab, cixutumumab, dalotuzumab, xentuzumab, dusigitumab, canakinumab, ustekinumab, ustekinumab, ustekinumab, briakinumab, briakinumab, abrezekimab, lebrikizumab, romilkimab, TNX-650, tralokinumab, anrukinzumab, brodalumab, ixekizumab, netakimab, perakizumab, secukinumab, vunakizumab, afasevikumab, afasevikumab, bimekizumab, bimekizumab, remtolumab, bermckimab, lutikizumab, lutikizumab, gevokizumab, cergutuzumab amunaleukin, fletikumab, fezakinumab, brazikumab, guselkumab, mirikizumab, tildrakizumab, risankizumab, flotetuzumab, nemolizumab, pascolizumab, dupilumab, mepolizumab, reslizumab, clazakizumab, elsilimomab, olokizumab, sarilumab, siltuximab, sirukumab, vobarilizumab, tocilizumab, SA237, satralizumab, enokizumab, prezalizumab, natalizumab, abrilumab, abrilumab, vedolizumab, volociximab, tadocizumab, etaracizumab, etrolizumab, spesolimab, vatelizumab, erlizumab, lirilumab, relatlimab, cBR96-doxorubicinimmunoconjugate, odulimomab, efalizumab, ladiratuzumab vedotin, simtuzumab, samrotamab vedotin, asclizumab, lupartumab amadotin, imalumab, carlumab, imaprelimab, amatuximab, amatuximab, anetumab ravtansine, narnatumab, clivatuzumab tetraxetan, pemtumomab, gatipotuzumab, ensituximab, lemalesomab, sulesomab, enfortumab vedotin, racotumomab, monalizumab, brontictuzumab, tarextumab, vesencumab, oxelumab, gilvetmab, tislelizumab, dostarlimab, BCD-100, nivolumab, PDR001, pembrolizumab, pidilizumab, retifanlimab, spartalizumab, sintilimab, cemiplimab, olaratumab, tovetumab, rinucumab, atezolizumab, avelumab, durvalumab, lifastuzumab vedotin, bavituximab, acapatamab, capromab, rosopatamab, nezastomig, pasotuxizumab, pelgifatamab, voxalatamab, cofetuzumab pelidotin, denosumab, rosmantuzumab, cirmtuzumab, atinumab, indatuximab ravtansine, elotuzumab, sirtratumab vedotin, sonepcizumab, vandortuzumab vedotin, minretumomab, satumomab pendetide, maslimomab, ontuxizumab, tenatumomab, fresolimumab, metelimumab, lerdelimumab, tezepelumab, etigilimab, tiragotumab, placulumab, prezalumab, infliximab, nerelimomab, ozoralizumab, adalimumab, afelimomab, certolizumab pegol, golimumab, mapatumumab, conatumumab, lexatumumab, tigatuzumab, sacituzumab govitecan, votumumab, pogalizumab, letolizumab, pankomab, anatumomab mafenatox, enavatuzumab, flanvotumab, brolucizumab, ranibizumab, varisacumab, bevacizumab, faricimab, icrucumab, alacizumab pegol, ramucirumab, pritumumab, and onvatilimab.

[6065] In some aspects, the antigen binding polypeptide complexes provided herein comprise a VH4 comprising a heavy chain complementarity determining region 1 (HCDR1), HCDR2, and/or HCDR3 of an antibody selected from the group consisting of losatuxizumab vedotin, utomilumab, urelumab, oleclumab, naptumomab estafenatox, ascrinvacumab, pintumomab, tacatuzumab tetraxetan, nesvacumab, vanucizumab, timolumab, vapaliximab, vepalimomab, enapotamab vedotin, ianalumab, belimumab, tabalumab, tibulizumab, belantamab mafodotin, teclistamab, teclistamab, detumomab, nacolomab tafenatox, eculizumab, lendalizumab, pexelizumab, pozelimab, ravulizumab, tesidolumab, vilobelimab, abagovomab, igovomab, oregovomab, sofituzumab vedotin, cantuzumab mertansine, cantuzuma bravtansine, girentuximab, altumomab pentetate, arcitumomab, besilesomab, bertilimumab, plozalizumab, mogamulizumab, leronlimab, PRO140, rovelizumab, rovelizumab, talacotuzumab, benralizumab, tavolimab, vonlerolizumab, gavilimomab, ziralimumab, fanolesomab, ipilimumab, ruplizumab, toralizumab, dapirolizumab pegol, toralizumab, dapirolizumab pegol, ruplizumab, blinatumomab, inebilizumab, loncastuximab tesirine, SGN-CD19A, tafasitamab, taplitumomab paptox, XMAB-5574, Budoprutug, Obexelimab, duvortuxizumab, englumafusp alfa, Emfizatamab, zeripatamig, siplizumab, blontuvetmab, FBTA05, ibritumomab tiuxetan, obinutuzumab, ocaratuzumab, ocrelizumab, ofatumumab, rituximab, tositumomab, ublituximab, veltuzumab, divozilimab, eramkafusp alfa, ripertamab, zuberitamab, glofitamab, nofetumomab merpentan, samalizumab, imvotamab, odronextamab, plamotamab, bectumomab, inotuzumab ozogamicin, moxetumomab pasudotox, pinatuzumab vedotin, gomiliximab, lumiliximab, inolimomab, inolimomab, daclizumab, camidanluma btesirine, basiliximab, varlilumab, omburtamab, enoblituzumab, vopratelimab, lulizumabpegol, TGN1412, muromonab-CD3, otelixizumab, teplizumab, visilizumab, epcoritamab, epcoritamab, brentuximab vedotin, iratumumab, azintuxizumab vedotin, gemtuzumab ozogamicin, lintuzumab, vadastuximab talirine, naratuximab emtansine, otlertuzumab, lilotomab satetraxetan, tetulomab, daratumumab, isatuximab, foralumab, mosunetuzumab, mosunetuzumab, cedelizumab, ibalizumab, keliximab, priliximab, tregalizumab, zanolimumab, bleselumab, iscalimab, lucatumumab, ravagalimab, selicrelumab, teneliximab, vanalimab, abciximab, bivatuzumab, iomab-B, telimomab aritox, zolimomab aritox, abituzumab, intetumumab, alemtuzumab, tamtuvetmab, lorvotuzumab mertansine, itolizumab, cusatuzumab, vorsetuzumab mafodotin, milatuzumab, iladatuzumab vedotin, polatuzumab vedotin, galiximab, cibisatamab, zolbetuximab, naxitamab, tisotumab vedotin, olendalizumab, pamrevlumab, lacnotuzumab, cabiralizumab, emactuzumab, axatilimab, gimsilumab, lenzilumab, namilumab, tremelimumab, ulocuplumab, tepoditamab, rovalpituzumab tesirine, tarlatamab, demcizumab, navicixizumab, drozitumab, parsatuzumab, depatuxizumab mafodotin, modotuximab, carotuximab, adecatumumab, adecatumumab, oportuzumab monatox, solitomab, tucotuzumab celmoleukin, edrecolomab, catumaxomab, ifabotuzumab, fibatuzumab, zalutumumab, panitumumab, cetuximab, futuximab, imgatuzumab, laprituximab emtansine, matuzumab, necitumumab, nimotuzumab, tomuzotuximab, amivantamab, amivantamab, epitumomab cituxetan, sontuzumab, duligotuzumab, elgemtumab, lumretuzumab, patritumab, seribantumab, zenocutuzumab, sibrotuzumab, burosumab, aprutumab ixadotin, radretumab, pasotuxizumab, farletuzumab, mirvetuximab soravtansine, vantictumab, TRBS07, 3F8, dinutuximab, dinutuximab beta, ecromeximab, mitumomab, andecaliximab, capromab, codrituzumab, glembatumumab vedotin, talquetamab, talquetamab, trevogrumab, indusatumab vedotin, ficlatuzumab, rilotumumab, zatuximab, pentuzimab, pentuzimab, margetuximab, timigutuzumab, trastuzumab, trastuzumab duocarmazine, trastuzumab emtansine, gancotamab, pertuzumab, crtumaxomab, emibetuzumab, telisotuzumab, telisotuzumab vedotin, derlotuximab biotin, apolizumab, onartuzumab, bersanlimab, enlimomabpegol, rontalizumab, sifalimumab, talizumab, ganitumab, istiratumab, robatumumab, teprotumumab, figitumumab, ganitumab, istiratumab, robatumumab, teprotumumab, cixutumumab, dalotuzumab, xentuzumab, dusigitumab, canakinumab, ustekinumab, ustekinumab, ustekinumab, briakinumab, briakinumab, abrezekimab, lebrikizumab, romilkimab, TNX-650, tralokinumab, anrukinzumab, brodalumab, ixekizumab, netakimab, perakizumab, secukinumab, vunakizumab, afasevikumab, afasevikumab, bimekizumab, bimekizumab, remtolumab, bermekimab, lutikizumab, lutikizumab, gevokizumab, cergutuzumab amunaleukin, fletikumab, fezakinumab, brazikumab, guselkumab, mirikizumab, tildrakizumab, risankizumab, flotetuzumab, nemolizumab, pascolizumab, dupilumab, mepolizumab, reslizumab, clazakizumab, elsilimomab, olokizumab, sarilumab, siltuximab, sirukumab, vobarilizumab, tocilizumab, SA237, satralizumab, enokizumab, prezalizumab, natalizumab, abrilumab, abrilumab, vedolizumab, volociximab, tadocizumab, etaracizumab, etrolizumab, spesolimab, vatelizumab, erlizumab, lirilumab, relatlimab, cBR96-doxorubicinimmunoconjugate, odulimomab, efalizumab, ladiratuzumab vedotin, simtuzumab, samrotamab vedotin, aselizumab, lupartumab amadotin, imalumab, carlumab, imaprelimab, amatuximab, amatuximab, anctumab ravtansine, narnatumab, clivatuzumab tetraxetan, pemtumomab, gatipotuzumab, ensituximab, lemalesomab, sulesomab, enfortumab vedotin, racotumomab, monalizumab, brontictuzumab, tarextumab, vesencumab, oxelumab, gilvetmab, tislelizumab, dostarlimab, BCD-100, nivolumab, PDR001, pembrolizumab, pidilizumab, retifanlimab, spartalizumab, sintilimab, cemiplimab, olaratumab, tovetumab, rinucumab, atezolizumab, avelumab, durvalumab, lifastuzumab vedotin, bavituximab, acapatamab, capromab, rosopatamab, nezastomig, pasotuxizumab, pelgifatamab, voxalatamab, cofetuzumab pelidotin, denosumab, rosmantuzumab, cirmtuzumab, atinumab, indatuximab ravtansinc, elotuzumab, sirtratumab vedotin, sonepcizumab, vandortuzumab vedotin, minretumomab, satumomab pendetide, maslimomab, ontuxizumab, tenatumomab, fresolimumab, metelimumab, lerdelimumab, tezepelumab, etigilimab, tiragotumab, placulumab, prezalumab, infliximab, nerelimomab, ozoralizumab, adalimumab, afelimomab, certolizumab pegol, golimumab, mapatumumab, conatumumab, lexatumumab, tigatuzumab, sacituzumab govitecan, votumumab, pogalizumab, letolizumab, pankomab, anatumomab mafenatox, enavatuzumab, flanvotumab, brolucizumab, ranibizumab, varisacumab, bevacizumab, faricimab, icrucumab, alacizumab pegol, ramucirumab, pritumumab, and onvatilimab.

[6066] In some aspects, the antigen binding polypeptide complexes provided herein comprise a VL1 comprising a VL of an antibody selected from the group consisting of losatuxizumab vedotin, utomilumab, urelumab, oleclumab, naptumomab estafenatox, ascrinvacumab, pintumomab, tacatuzumab tetraxetan, nesvacumab, vanucizumab, timolumab, vapaliximab, vepalimomab, enapotamab vedotin, ianalumab, belimumab, tabalumab, tibulizumab, belantamab mafodotin, teclistamab, teclistamab, detumomab, nacolomab tafenatox, eculizumab, lendalizumab, pexelizumab, pozelimab, ravulizumab, tesidolumab, vilobelimab, abagovomab, igovomab, oregovomab, sofituzumab vedotin, cantuzumab mertansine, cantuzuma bravtansine, girentuximab, altumomab pentetate, arcitumomab, besilesomab, bertilimumab, plozalizumab, mogamulizumab, leronlimab, PRO140, rovelizumab, rovelizumab, talacotuzumab, benralizumab, tavolimab, vonlerolizumab, gavilimomab, ziralimumab, fanolesomab, ipilimumab, ruplizumab, toralizumab, dapirolizumab pegol, toralizumab, dapirolizumab pegol, ruplizumab, blinatumomab, inebilizumab, loncastuximab tesirine, SGN-CD19A, tafasitamab, taplitumomab paptox, XMAB-5574, Budoprutug, Obexelimab, duvortuxizumab, englumafusp alfa, Emfizatamab, zeripatamig, siplizumab, blontuvetmab, FBTA05, ibritumomab tiuxetan, obinutuzumab, ocaratuzumab, ocrelizumab, ofatumumab, rituximab, tositumomab, ublituximab, veltuzumab, divozilimab, eramkafusp alfa, ripertamab, zuberitamab, glofitamab, nofetumomab merpentan, samalizumab, imvotamab, odronextamab, plamotamab, bectumomab, inotuzumab ozogamicin, moxetumomab pasudotox, pinatuzumab vedotin, gomiliximab, lumiliximab, inolimomab, inolimomab, daclizumab, camidanluma btesirine, basiliximab, varlilumab, omburtamab, enoblituzumab, vopratelimab, lulizumabpegol, TGN1412, muromonab-CD3, otelixizumab, teplizumab, visilizumab, epcoritamab, epcoritamab, brentuximab vedotin, iratumumab, azintuxizumab vedotin, gemtuzumab ozogamicin, lintuzumab, vadastuximab talirine, naratuximab emtansine, otlertuzumab, lilotomab satetraxetan, tetulomab, daratumumab, isatuximab, foralumab, mosunctuzumab, mosunetuzumab, cedelizumab, ibalizumab, keliximab, priliximab, tregalizumab, zanolimumab, bleselumab, iscalimab, lucatumumab, ravagalimab, selicrelumab, teneliximab, vanalimab, abciximab, bivatuzumab, iomab-B, telimomab aritox, zolimomab aritox, abituzumab, intetumumab, alemtuzumab, tamtuvetmab, lorvotuzumab mertansine, itolizumab, cusatuzumab, vorsetuzumab mafodotin, milatuzumab, iladatuzumab vedotin, polatuzumab vedotin, galiximab, cibisatamab, zolbetuximab, naxitamab, tisotumab vedotin, olendalizumab, pamrevlumab, lacnotuzumab, cabiralizumab, emactuzumab, axatilimab, gimsilumab, lenzilumab, namilumab, tremelimumab, ulocuplumab, tepoditamab, rovalpituzumab tesirine, tarlatamab, demcizumab, navicixizumab, drozitumab, parsatuzumab, depatuxizumab mafodotin, modotuximab, carotuximab, adecatumumab, adecatumumab, oportuzumab monatox, solitomab, tucotuzumab celmoleukin, edrecolomab, catumaxomab, ifabotuzumab, fibatuzumab, zalutumumab, panitumumab, cetuximab, futuximab, imgatuzumab, laprituximab emtansine, matuzumab, necitumumab, nimotuzumab, tomuzotuximab, amivantamab, amivantamab, epitumomab cituxetan, sontuzumab, duligotuzumab, elgemtumab, lumretuzumab, patritumab, scribantumab, zenocutuzumab, sibrotuzumab, burosumab, aprutumab ixadotin, radretumab, pasotuxizumab, farletuzumab, mirvetuximab soravtansine, vantictumab, TRBS07, 3F8, dinutuximab, dinutuximab beta, ecromeximab, mitumomab, andecaliximab, capromab, codrituzumab, glembatumumab vedotin, talquetamab, talquetamab, trevogrumab, indusatumab vedotin, ficlatuzumab, rilotumumab, zatuximab, pentuzimab, pentuzimab, margetuximab, timigutuzumab, trastuzumab, trastuzumab duocarmazine, trastuzumab emtansine, gancotamab, pertuzumab, ertumaxomab, emibetuzumab, telisotuzumab, telisotuzumab vedotin, derlotuximab biotin, apolizumab, onartuzumab, bersanlimab, enlimomabpegol, rontalizumab, sifalimumab, talizumab, ganitumab, istiratumab, robatumumab, teprotumumab, figitumumab, ganitumab, istiratumab, robatumumab, teprotumumab, cixutumumab, dalotuzumab, xentuzumab, dusigitumab, canakinumab, ustekinumab, ustekinumab, ustekinumab, briakinumab, briakinumab, abrezekimab, lebrikizumab, romilkimab, TNX-650, tralokinumab, anrukinzumab, brodalumab, ixekizumab, netakimab, perakizumab, secukinumab, vunakizumab, afasevikumab, afasevikumab, bimekizumab, bimekizumab, remtolumab, bermekimab, lutikizumab, lutikizumab, gevokizumab, cergutuzumab amunaleukin, fletikumab, fezakinumab, brazikumab, guselkumab, mirikizumab, tildrakizumab, risankizumab, flotetuzumab, nemolizumab, pascolizumab, dupilumab, mepolizumab, reslizumab, clazakizumab, elsilimomab, olokizumab, sarilumab, siltuximab, sirukumab, vobarilizumab, tocilizumab, SA237, satralizumab, enokizumab, prezalizumab, natalizumab, abrilumab, abrilumab, vedolizumab, volociximab, tadocizumab, etaracizumab, etrolizumab, spesolimab, vatelizumab, erlizumab, lirilumab, relatlimab, cBR96-doxorubicinimmunoconjugate, odulimomab, efalizumab, ladiratuzumab vedotin, simtuzumab, samrotamab vedotin, aselizumab, lupartumab amadotin, imalumab, carlumab, imaprelimab, amatuximab, amatuximab, anetumab ravtansine, narnatumab, clivatuzumab tetraxetan, pemtumomab, gatipotuzumab, ensituximab, lemalesomab, sulesomab, enfortumab vedotin, racotumomab, monalizumab, brontictuzumab, tarextumab, vesencumab, oxelumab, gilvetmab, tislelizumab, dostarlimab, BCD-100, nivolumab, PDR001, pembrolizumab, pidilizumab, retifanlimab, spartalizumab, sintilimab, cemiplimab, olaratumab, tovetumab, rinucumab, atezolizumab, avelumab, durvalumab, lifastuzumab vedotin, bavituximab, acapatamab, capromab, rosopatamab, nezastomig, pasotuxizumab, pelgifatamab, voxalatamab, cofetuzumab pelidotin, denosumab, rosmantuzumab, cirmtuzumab, atinumab, indatuximab ravtansine, elotuzumab, sirtratumab vedotin, sonepcizumab, vandortuzumab vedotin, minretumomab, satumomab pendetide, maslimomab, ontuxizumab, tenatumomab, fresolimumab, metelimumab, lerdelimumab, tezepelumab, etigilimab, tiragotumab, placulumab, prezalumab, infliximab, nerelimomab, ozoralizumab, adalimumab, afelimomab, certolizumab pegol, golimumab, mapatumumab, conatumumab, lexatumumab, tigatuzumab, sacituzumab govitecan, votumumab, pogalizumab, letolizumab, pankomab, anatumomab mafenatox, enavatuzumab, flanvotumab, brolucizumab, ranibizumab, varisacumab, bevacizumab, faricimab, icrucumab, alacizumab pegol, ramucirumab, pritumumab, and onvatilimab.

[6067] In some aspects, the antigen binding polypeptide complexes provided herein comprise a VL2 comprising a VL of an antibody selected from the group consisting of losatuxizumab vedotin, utomilumab, urelumab, oleclumab, naptumomab estafenatox, ascrinvacumab, pintumomab, tacatuzumab tetraxetan, nesvacumab, vanucizumab, timolumab, vapaliximab, vepalimomab, enapotamab vedotin, ianalumab, belimumab, tabalumab, tibulizumab, belantamab mafodotin, teclistamab, teclistamab, detumomab, nacolomab tafenatox, eculizumab, lendalizumab, pexelizumab, pozelimab, ravulizumab, tesidolumab, vilobelimab, abagovomab, igovomab, oregovomab, sofituzumab vedotin, cantuzumab mertansine, cantuzuma bravtansine, girentuximab, altumomab pentetate, arcitumomab, besilesomab, bertilimumab, plozalizumab, mogamulizumab, leronlimab, PRO140, rovelizumab, rovelizumab, talacotuzumab, benralizumab, tavolimab, vonlerolizumab, gavilimomab, ziralimumab, fanolesomab, ipilimumab, ruplizumab, toralizumab, dapirolizumab pegol, toralizumab, dapirolizumab pegol, ruplizumab, blinatumomab, inebilizumab, loncastuximab tesirine, SGN-CD19A, tafasitamab, taplitumomab paptox, XMAB-5574, Budoprutug, Obexclimab, duvortuxizumab, englumafusp alfa, Emfizatamab, zeripatamig, siplizumab, blontuvetmab, FBTA05, ibritumomab tiuxetan, obinutuzumab, ocaratuzumab, ocrelizumab, ofatumumab, rituximab, tositumomab, ublituximab, veltuzumab, divozilimab, eramkafusp alfa, ripertamab, zuberitamab, glofitamab, nofetumomab merpentan, samalizumab, imvotamab, odronextamab, plamotamab, bectumomab, inotuzumab ozogamicin, moxetumomab pasudotox, pinatuzumab vedotin, gomiliximab, lumiliximab, inolimomab, inolimomab, daclizumab, camidanluma btesirine, basiliximab, varlilumab, omburtamab, enoblituzumab, vopratelimab, lulizumabpegol, TGN1412, muromonab-CD3, otelixizumab, teplizumab, visilizumab, epcoritamab, epcoritamab, brentuximab vedotin, iratumumab, azintuxizumab vedotin, gemtuzumab ozogamicin, lintuzumab, vadastuximab talirine, naratuximab emtansine, otlertuzumab, lilotomab satetraxetan, tetulomab, daratumumab, isatuximab, foralumab, mosunetuzumab, mosunetuzumab, cedelizumab, ibalizumab, keliximab, priliximab, tregalizumab, zanolimumab, bleselumab, iscalimab, lucatumumab, ravagalimab, selicrelumab, teneliximab, vanalimab, abciximab, bivatuzumab, iomab-B, telimomab aritox, zolimomab aritox, abituzumab, intetumumab, alemtuzumab, tamtuvetmab, lorvotuzumab mertansine, itolizumab, cusatuzumab, vorsetuzumab mafodotin, milatuzumab, iladatuzumab vedotin, polatuzumab vedotin, galiximab, cibisatamab, zolbetuximab, naxitamab, tisotumab vedotin, olendalizumab, pamrevlumab, lacnotuzumab, cabiralizumab, emactuzumab, axatilimab, gimsilumab, lenzilumab, namilumab, tremelimumab, ulocuplumab, tepoditamab, rovalpituzumab tesirine, tarlatamab, demcizumab, navicixizumab, drozitumab, parsatuzumab, depatuxizumab mafodotin, modotuximab, carotuximab, adecatumumab, adecatumumab, oportuzumab monatox, solitomab, tucotuzumab celmoleukin, edrecolomab, catumaxomab, ifabotuzumab, fibatuzumab, zalutumumab, panitumumab, cetuximab, futuximab, imgatuzumab, laprituximab emtansine, matuzumab, necitumumab, nimotuzumab, tomuzotuximab, amivantamab, amivantamab, epitumomab cituxetan, sontuzumab, duligotuzumab, elgemtumab, lumretuzumab, patritumab, seribantumab, zenocutuzumab, sibrotuzumab, burosumab, aprutumab ixadotin, radretumab, pasotuxizumab, farletuzumab, mirvetuximab soravtansine, vantictumab, TRBS07, 3F8, dinutuximab, dinutuximab beta, ecromeximab, mitumomab, andecaliximab, capromab, codrituzumab, glembatumumab vedotin, talquetamab, talquetamab, trevogrumab, indusatumab vedotin, ficlatuzumab, rilotumumab, zatuximab, pentuzimab, pentuzimab, margetuximab, timigutuzumab, trastuzumab, trastuzumab duocarmazine, trastuzumab emtansine, gancotamab, pertuzumab, ertumaxomab, emibetuzumab, telisotuzumab, telisotuzumab vedotin, derlotuximab biotin, apolizumab, onartuzumab, bersanlimab, enlimomabpegol, rontalizumab, sifalimumab, talizumab, ganitumab, istiratumab, robatumumab, teprotumumab, figitumumab, ganitumab, istiratumab, robatumumab, teprotumumab, cixutumumab, dalotuzumab, xentuzumab, dusigitumab, canakinumab, ustekinumab, ustekinumab, ustekinumab, briakinumab, briakinumab, abrezekimab, lebrikizumab, romilkimab, TNX-650, tralokinumab, anrukinzumab, brodalumab, ixekizumab, netakimab, perakizumab, secukinumab, vunakizumab, afasevikumab, afasevikumab, bimekizumab, bimekizumab, remtolumab, bermekimab, lutikizumab, lutikizumab, gevokizumab, cergutuzumab amunaleukin, fletikumab, fezakinumab, brazikumab, guselkumab, mirikizumab, tildrakizumab, risankizumab, flotetuzumab, nemolizumab, pascolizumab, dupilumab, mepolizumab, reslizumab, clazakizumab, elsilimomab, olokizumab, sarilumab, siltuximab, sirukumab, vobarilizumab, tocilizumab, SA237, satralizumab, enokizumab, prezalizumab, natalizumab, abrilumab, abrilumab, vedolizumab, volociximab, tadocizumab, etaracizumab, etrolizumab, spesolimab, vatelizumab, erlizumab, lirilumab, relatlimab, cBR96-doxorubicinimmunoconjugate, odulimomab, efalizumab, ladiratuzumab vedotin, simtuzumab, samrotamab vedotin, aselizumab, lupartumab amadotin, imalumab, carlumab, imaprelimab, amatuximab, amatuximab, anetumab ravtansine, narnatumab, clivatuzumab tetraxetan, pemtumomab, gatipotuzumab, ensituximab, lemalesomab, sulesomab, enfortumab vedotin, racotumomab, monalizumab, brontictuzumab, tarextumab, vesencumab, oxelumab, gilvetmab, tislelizumab, dostarlimab, BCD-100, nivolumab, PDR001, pembrolizumab, pidilizumab, retifanlimab, spartalizumab, sintilimab, cemiplimab, olaratumab, tovetumab, rinucumab, atezolizumab, avelumab, durvalumab, lifastuzumab vedotin, bavituximab, acapatamab, capromab, rosopatamab, nezastomig, pasotuxizumab, pelgifatamab, voxalatamab, cofetuzumab pelidotin, denosumab, rosmantuzumab, cirmtuzumab, atinumab, indatuximab ravtansine, elotuzumab, sirtratumab vedotin, sonepcizumab, vandortuzumab vedotin, minretumomab, satumomab pendetide, maslimomab, ontuxizumab, tenatumomab, fresolimumab, metelimumab, lerdelimumab, tezepelumab, etigilimab, tiragotumab, placulumab, prezalumab, infliximab, nerelimomab, ozoralizumab, adalimumab, afelimomab, certolizumab pegol, golimumab, mapatumumab, conatumumab, lexatumumab, tigatuzumab, sacituzumab govitecan, votumumab, pogalizumab, letolizumab, pankomab, anatumomab mafenatox, enavatuzumab, flanvotumab, brolucizumab, ranibizumab, varisacumab, bevacizumab, faricimab, icrucumab, alacizumab pegol, ramucirumab, pritumumab, and onvatilimab.

[6068] In some aspects, the antigen binding polypeptide complexes provided herein comprise a VL3 comprising a VL of an antibody selected from the group consisting of losatuxizumab vedotin, utomilumab, urelumab, oleclumab, naptumomab estafenatox, ascrinvacumab, pintumomab, tacatuzumab tetraxetan, nesvacumab, vanucizumab, timolumab, vapaliximab, vepalimomab, enapotamab vedotin, ianalumab, belimumab, tabalumab, tibulizumab, belantamab mafodotin, teclistamab, teclistamab, detumomab, nacolomab tafenatox, eculizumab, lendalizumab, pexelizumab, pozelimab, ravulizumab, tesidolumab, vilobelimab, abagovomab, igovomab, oregovomab, sofituzumab vedotin, cantuzumab mertansine, cantuzuma bravtansine, girentuximab, altumomab pentetate, arcitumomab, besilesomab, bertilimumab, plozalizumab, mogamulizumab, leronlimab, PRO140, rovelizumab, rovelizumab, talacotuzumab, benralizumab, tavolimab, vonlerolizumab, gavilimomab, ziralimumab, fanolesomab, ipilimumab, ruplizumab, toralizumab, dapirolizumab pegol, toralizumab, dapirolizumab pegol, ruplizumab, blinatumomab, inebilizumab, loncastuximab tesirine, SGN-CD19A, tafasitamab, taplitumomab paptox, XMAB-5574, Budoprutug, Obexelimab, duvortuxizumab, englumafusp alfa, Emfizatamab, zeripatamig, siplizumab, blontuvetmab, FBTA05, ibritumomab tiuxetan, obinutuzumab, ocaratuzumab, ocrelizumab, ofatumumab, rituximab, tositumomab, ublituximab, veltuzumab, divozilimab, eramkafusp alfa, ripertamab, zuberitamab, glofitamab, nofetumomab merpentan, samalizumab, imvotamab, odronextamab, plamotamab, bectumomab, inotuzumab ozogamicin, moxetumomab pasudotox, pinatuzumab vedotin, gomiliximab, lumiliximab, inolimomab, inolimomab, daclizumab, camidanluma btesirine, basiliximab, varlilumab, omburtamab, enoblituzumab, vopratelimab, lulizumabpegol, TGN1412, muromonab-CD3, otelixizumab, teplizumab, visilizumab, epcoritamab, epcoritamab, brentuximab vedotin, iratumumab, azintuxizumab vedotin, gemtuzumab ozogamicin, lintuzumab, vadastuximab talirine, naratuximab emtansine, otlertuzumab, lilotomab satetraxetan, tetulomab, daratumumab, isatuximab, foralumab, mosunetuzumab, mosunetuzumab, cedelizumab, ibalizumab, keliximab, priliximab, tregalizumab, zanolimumab, bleselumab, iscalimab, lucatumumab, ravagalimab, selicrelumab, teneliximab, vanalimab, abciximab, bivatuzumab, iomab-B, telimomab aritox, zolimomab aritox, abituzumab, intetumumab, alemtuzumab, tamtuvetmab, lorvotuzumab mertansine, itolizumab, cusatuzumab, vorsetuzumab mafodotin, milatuzumab, iladatuzumab vedotin, polatuzumab vedotin, galiximab, cibisatamab, zolbetuximab, naxitamab, tisotumab vedotin, olendalizumab, pamrevlumab, lacnotuzumab, cabiralizumab, emactuzumab, axatilimab, gimsilumab, lenzilumab, namilumab, tremelimumab, ulocuplumab, tepoditamab, rovalpituzumab tesirine, tarlatamab, demcizumab, navicixizumab, drozitumab, parsatuzumab, depatuxizumab mafodotin, modotuximab, carotuximab, adecatumumab, adecatumumab, oportuzumab monatox, solitomab, tucotuzumab celmoleukin, edrecolomab, catumaxomab, ifabotuzumab, fibatuzumab, zalutumumab, panitumumab, cetuximab, futuximab, imgatuzumab, laprituximab emtansine, matuzumab, necitumumab, nimotuzumab, tomuzotuximab, amivantamab, amivantamab, epitumomab cituxetan, sontuzumab, duligotuzumab, elgemtumab, lumretuzumab, patritumab, seribantumab, zenocutuzumab, sibrotuzumab, burosumab, aprutumab ixadotin, radretumab, pasotuxizumab, farletuzumab, mirvetuximab soravtansine, vantictumab, TRBS07, 3F8, dinutuximab, dinutuximab beta, ecromeximab, mitumomab, andecaliximab, capromab, codrituzumab, glembatumumab vedotin, talquetamab, talquetamab, trevogrumab, indusatumab vedotin, ficlatuzumab, rilotumumab, zatuximab, pentuzimab, pentuzimab, margetuximab, timigutuzumab, trastuzumab, trastuzumab duocarmazine, trastuzumab emtansine, gancotamab, pertuzumab, ertumaxomab, emibctuzumab, telisotuzumab, telisotuzumab vedotin, derlotuximab biotin, apolizumab, onartuzumab, bersanlimab, enlimomabpegol, rontalizumab, sifalimumab, talizumab, ganitumab, istiratumab, robatumumab, teprotumumab, figitumumab, ganitumab, istiratumab, robatumumab, teprotumumab, cixutumumab, dalotuzumab, xentuzumab, dusigitumab, canakinumab, ustekinumab, ustekinumab, ustekinumab, briakinumab, briakinumab, abrezekimab, lebrikizumab, romilkimab, TNX-650, tralokinumab, anrukinzumab, brodalumab, ixekizumab, netakimab, perakizumab, secukinumab, vunakizumab, afasevikumab, afasevikumab, bimekizumab, bimekizumab, remtolumab, bermekimab, lutikizumab, lutikizumab, gevokizumab, cergutuzumab amunaleukin, fletikumab, fezakinumab, brazikumab, guselkumab, mirikizumab, tildrakizumab, risankizumab, flotetuzumab, nemolizumab, pascolizumab, dupilumab, mepolizumab, reslizumab, clazakizumab, elsilimomab, olokizumab, sarilumab, siltuximab, sirukumab, vobarilizumab, tocilizumab, SA237, satralizumab, enokizumab, prezalizumab, natalizumab, abrilumab, abrilumab, vedolizumab, volociximab, tadocizumab, etaracizumab, etrolizumab, spesolimab, vatelizumab, erlizumab, lirilumab, relatlimab, cBR96-doxorubicinimmunoconjugate, odulimomab, efalizumab, ladiratuzumab vedotin, simtuzumab, samrotamab vedotin, aselizumab, lupartumab amadotin, imalumab, carlumab, imaprelimab, amatuximab, amatuximab, anetumab ravtansine, narnatumab, clivatuzumab tetraxetan, pemtumomab, gatipotuzumab, ensituximab, lemalesomab, sulesomab, enfortumab vedotin, racotumomab, monalizumab, brontictuzumab, tarextumab, vesencumab, oxelumab, gilvetmab, tislelizumab, dostarlimab, BCD-100, nivolumab, PDR001, pembrolizumab, pidilizumab, retifanlimab, spartalizumab, sintilimab, cemiplimab, olaratumab, tovetumab, rinucumab, atezolizumab, avelumab, durvalumab, lifastuzumab vedotin, bavituximab, acapatamab, capromab, rosopatamab, nezastomig, pasotuxizumab, pelgifatamab, voxalatamab, cofetuzumab pelidotin, denosumab, rosmantuzumab, cirmtuzumab, atinumab, indatuximab ravtansine, elotuzumab, sirtratumab vedotin, sonepcizumab, vandortuzumab vedotin, minretumomab, satumomab pendetide, maslimomab, ontuxizumab, tenatumomab, fresolimumab, metelimumab, lerdelimumab, tezepelumab, etigilimab, tiragotumab, placulumab, prezalumab, infliximab, nerelimomab, ozoralizumab, adalimumab, afelimomab, certolizumab pegol, golimumab, mapatumumab, conatumumab, lexatumumab, tigatuzumab, sacituzumab govitecan, votumumab, pogalizumab, letolizumab, pankomab, anatumomab mafenatox, enavatuzumab, flanvotumab, brolucizumab, ranibizumab, varisacumab, bevacizumab, faricimab, icrucumab, alacizumab pegol, ramucirumab, pritumumab, and onvatilimab.

[6069] In some aspects, the antigen binding polypeptide complexes provided herein comprise a VL4 comprising a VL of an antibody selected from the group consisting of losatuxizumab vedotin, utomilumab, urelumab, oleclumab, naptumomab estafenatox, ascrinvacumab, pintumomab, tacatuzumab tetraxetan, nesvacumab, vanucizumab, timolumab, vapaliximab, vepalimomab, enapotamab vedotin, ianalumab, belimumab, tabalumab, tibulizumab, belantamab mafodotin, teclistamab, teclistamab, detumomab, nacolomab tafenatox, eculizumab, lendalizumab, pexelizumab, pozelimab, ravulizumab, tesidolumab, vilobelimab, abagovomab, igovomab, oregovomab, sofituzumab vedotin, cantuzumab mertansine, cantuzuma bravtansine, girentuximab, altumomab pentetate, arcitumomab, besilesomab, bertilimumab, plozalizumab, mogamulizumab, leronlimab, PRO140, rovelizumab, rovelizumab, talacotuzumab, benralizumab, tavolimab, vonlerolizumab, gavilimomab, ziralimumab, fanolesomab, ipilimumab, ruplizumab, toralizumab, dapirolizumab pegol, toralizumab, dapirolizumab pegol, ruplizumab, blinatumomab, inebilizumab, loncastuximab tesirine, SGN-CD19A, tafasitamab, taplitumomab paptox, XMAB-5574, Budoprutug, Obexclimab, duvortuxizumab, englumafusp alfa, Emfizatamab, zeripatamig, siplizumab, blontuvetmab, FBTA05, ibritumomab tiuxetan, obinutuzumab, ocaratuzumab, ocrelizumab, ofatumumab, rituximab, tositumomab, ublituximab, veltuzumab, divozilimab, eramkafusp alfa, ripertamab, zuberitamab, glofitamab, nofetumomab merpentan, samalizumab, imvotamab, odronextamab, plamotamab, bectumomab, inotuzumab ozogamicin, moxetumomab pasudotox, pinatuzumab vedotin, gomiliximab, lumiliximab, inolimomab, inolimomab, daclizumab, camidanluma btesirine, basiliximab, varlilumab, omburtamab, enoblituzumab, vopratelimab, lulizumabpegol, TGN1412, muromonab-CD3, otelixizumab, teplizumab, visilizumab, epcoritamab, epcoritamab, brentuximab vedotin, iratumumab, azintuxizumab vedotin, gemtuzumab ozogamicin, lintuzumab, vadastuximab talirine, naratuximab emtansine, otlertuzumab, lilotomab satetraxetan, tetulomab, daratumumab, isatuximab, foralumab, mosunetuzumab, mosunetuzumab, cedelizumab, ibalizumab, keliximab, priliximab, tregalizumab, zanolimumab, bleselumab, iscalimab, lucatumumab, ravagalimab, selicrelumab, teneliximab, vanalimab, abciximab, bivatuzumab, iomab-B, telimomab aritox, zolimomab aritox, abituzumab, intetumumab, alemtuzumab, tamtuvetmab, lorvotuzumab mertansine, itolizumab, cusatuzumab, vorsetuzumab mafodotin, milatuzumab, iladatuzumab vedotin, polatuzumab vedotin, galiximab, cibisatamab, zolbetuximab, naxitamab, tisotumab vedotin, olendalizumab, pamrevlumab, lacnotuzumab, cabiralizumab, emactuzumab, axatilimab, gimsilumab, lenzilumab, namilumab, tremelimumab, ulocuplumab, tepoditamab, rovalpituzumab tesirine, tarlatamab, demcizumab, navicixizumab, drozitumab, parsatuzumab, depatuxizumab mafodotin, modotuximab, carotuximab, adecatumumab, adecatumumab, oportuzumab monatox, solitomab, tucotuzumab celmoleukin, edrecolomab, catumaxomab, ifabotuzumab, fibatuzumab, zalutumumab, panitumumab, cetuximab, futuximab, imgatuzumab, laprituximab emtansine, matuzumab, necitumumab, nimotuzumab, tomuzotuximab, amivantamab, amivantamab, epitumomab cituxetan, sontuzumab, duligotuzumab, elgemtumab, lumretuzumab, patritumab, seribantumab, zenocutuzumab, sibrotuzumab, burosumab, aprutumab ixadotin, radretumab, pasotuxizumab, farletuzumab, mirvetuximab soravtansine, vantictumab, TRBS07, 3F8, dinutuximab, dinutuximab beta, ecromeximab, mitumomab, andecaliximab, capromab, codrituzumab, glembatumumab vedotin, talquetamab, talquetamab, trevogrumab, indusatumab vedotin, ficlatuzumab, rilotumumab, zatuximab, pentuzimab, pentuzimab, margetuximab, timigutuzumab, trastuzumab, trastuzumab duocarmazine, trastuzumab emtansine, gancotamab, pertuzumab, ertumaxomab, emibetuzumab, telisotuzumab, telisotuzumab vedotin, derlotuximab biotin, apolizumab, onartuzumab, bersanlimab, enlimomabpegol, rontalizumab, sifalimumab, talizumab, ganitumab, istiratumab, robatumumab, teprotumumab, figitumumab, ganitumab, istiratumab, robatumumab, teprotumumab, cixutumumab, dalotuzumab, xentuzumab, dusigitumab, canakinumab, ustekinumab, ustekinumab, ustekinumab, briakinumab, briakinumab, abrezekimab, lebrikizumab, romilkimab, TNX-650, tralokinumab, anrukinzumab, brodalumab, ixekizumab, netakimab, perakizumab, secukinumab, vunakizumab, afasevikumab, afasevikumab, bimekizumab, bimekizumab, remtolumab, bermckimab, lutikizumab, lutikizumab, gevokizumab, cergutuzumab amunaleukin, fletikumab, fezakinumab, brazikumab, guselkumab, mirikizumab, tildrakizumab, risankizumab, flotetuzumab, nemolizumab, pascolizumab, dupilumab, mepolizumab, reslizumab, clazakizumab, elsilimomab, olokizumab, sarilumab, siltuximab, sirukumab, vobarilizumab, tocilizumab, SA237, satralizumab, enokizumab, prezalizumab, natalizumab, abrilumab, abrilumab, vedolizumab, volociximab, tadocizumab, etaracizumab, etrolizumab, spesolimab, vatelizumab, erlizumab, lirilumab, relatlimab, cBR96-doxorubicinimmunoconjugate, odulimomab, efalizumab, ladiratuzumab vedotin, simtuzumab, samrotamab vedotin, asclizumab, lupartumab amadotin, imalumab, carlumab, imaprelimab, amatuximab, amatuximab, anetumab ravtansine, narnatumab, clivatuzumab tetraxetan, pemtumomab, gatipotuzumab, ensituximab, lemalesomab, sulesomab, enfortumab vedotin, racotumomab, monalizumab, brontictuzumab, tarextumab, vesencumab, oxelumab, gilvetmab, tislelizumab, dostarlimab, BCD-100, nivolumab, PDR001, pembrolizumab, pidilizumab, retifanlimab, spartalizumab, sintilimab, cemiplimab, olaratumab, tovetumab, rinucumab, atezolizumab, avelumab, durvalumab, lifastuzumab vedotin, bavituximab, acapatamab, capromab, rosopatamab, nezastomig, pasotuxizumab, pelgifatamab, voxalatamab, cofetuzumab pelidotin, denosumab, rosmantuzumab, cirmtuzumab, atinumab, indatuximab ravtansine, elotuzumab, sirtratumab vedotin, sonepcizumab, vandortuzumab vedotin, minretumomab, satumomab pendetide, maslimomab, ontuxizumab, tenatumomab, fresolimumab, metelimumab, lerdelimumab, tezepelumab, etigilimab, tiragotumab, placulumab, prezalumab, infliximab, nerelimomab, ozoralizumab, adalimumab, afelimomab, certolizumab pegol, golimumab, mapatumumab, conatumumab, lexatumumab, tigatuzumab, sacituzumab govitecan, votumumab, pogalizumab, letolizumab, pankomab, anatumomab mafenatox, enavatuzumab, flanvotumab, brolucizumab, ranibizumab, varisacumab, bevacizumab, faricimab, icrucumab, alacizumab pegol, ramucirumab, pritumumab, and onvatilimab.

[6070] In some aspects, the antigen binding polypeptide complexes provided herein comprise a VH1 comprising a VH of an antibody selected from the group consisting of losatuxizumab vedotin, utomilumab, urelumab, oleclumab, naptumomab estafenatox, ascrinvacumab, pintumomab, tacatuzumab tetraxetan, nesvacumab, vanucizumab, timolumab, vapaliximab, vepalimomab, enapotamab vedotin, ianalumab, belimumab, tabalumab, tibulizumab, belantamab mafodotin, teclistamab, teclistamab, detumomab, nacolomab tafenatox, eculizumab, lendalizumab, pexelizumab, pozelimab, ravulizumab, tesidolumab, vilobelimab, abagovomab, igovomab, oregovomab, sofituzumab vedotin, cantuzumab mertansine, cantuzuma bravtansine, girentuximab, altumomab pentetate, arcitumomab, besilesomab, bertilimumab, plozalizumab, mogamulizumab, leronlimab, PRO140, rovelizumab, rovelizumab, talacotuzumab, benralizumab, tavolimab, vonlerolizumab, gavilimomab, ziralimumab, fanolesomab, ipilimumab, ruplizumab, toralizumab, dapirolizumab pegol, toralizumab, dapirolizumab pegol, ruplizumab, blinatumomab, inebilizumab, loncastuximab tesirine, SGN-CD19A, tafasitamab, taplitumomab paptox, XMAB-5574, Budoprutug, Obexelimab, duvortuxizumab, englumafusp alfa, Emfizatamab, zeripatamig, siplizumab, blontuvetmab, FBTA05, ibritumomab tiuxetan, obinutuzumab, ocaratuzumab, ocrelizumab, ofatumumab, rituximab, tositumomab, ublituximab, veltuzumab, divozilimab, eramkafusp alfa, ripertamab, zuberitamab, glofitamab, nofetumomab merpentan, samalizumab, imvotamab, odronextamab, plamotamab, bectumomab, inotuzumab ozogamicin, moxetumomab pasudotox, pinatuzumab vedotin, gomiliximab, lumiliximab, inolimomab, inolimomab, daclizumab, camidanluma btesirine, basiliximab, varlilumab, omburtamab, enoblituzumab, vopratelimab, lulizumabpegol, TGN1412, muromonab-CD3, otelixizumab, teplizumab, visilizumab, epcoritamab, epcoritamab, brentuximab vedotin, iratumumab, azintuxizumab vedotin, gemtuzumab ozogamicin, lintuzumab, vadastuximab talirine, naratuximab emtansine, otlertuzumab, lilotomab satetraxetan, tetulomab, daratumumab, isatuximab, foralumab, mosunetuzumab, mosunetuzumab, cedelizumab, ibalizumab, keliximab, priliximab, tregalizumab, zanolimumab, bleselumab, iscalimab, lucatumumab, ravagalimab, selicrelumab, teneliximab, vanalimab, abciximab, bivatuzumab, iomab-B, telimomab aritox, zolimomab aritox, abituzumab, intetumumab, alemtuzumab, tamtuvetmab, lorvotuzumab mertansine, itolizumab, cusatuzumab, vorsctuzumab mafodotin, milatuzumab, iladatuzumab vedotin, polatuzumab vedotin, galiximab, cibisatamab, zolbetuximab, naxitamab, tisotumab vedotin, olendalizumab, pamrevlumab, lacnotuzumab, cabiralizumab, emactuzumab, axatilimab, gimsilumab, lenzilumab, namilumab, tremelimumab, ulocuplumab, tepoditamab, rovalpituzumab tesirine, tarlatamab, demcizumab, navicixizumab, drozitumab, parsatuzumab, depatuxizumab mafodotin, modotuximab, carotuximab, adecatumumab, adecatumumab, oportuzumab monatox, solitomab, tucotuzumab celmoleukin, edrecolomab, catumaxomab, ifabotuzumab, fibatuzumab, zalutumumab, panitumumab, cetuximab, futuximab, imgatuzumab, laprituximab emtansine, matuzumab, necitumumab, nimotuzumab, tomuzotuximab, amivantamab, amivantamab, epitumomab cituxetan, sontuzumab, duligotuzumab, elgemtumab, lumretuzumab, patritumab, seribantumab, zenocutuzumab, sibrotuzumab, burosumab, aprutumab ixadotin, radretumab, pasotuxizumab, farletuzumab, mirvetuximab soravtansine, vantictumab, TRBS07, 3F8, dinutuximab, dinutuximab beta, ecromeximab, mitumomab, andecaliximab, capromab, codrituzumab, glembatumumab vedotin, talquetamab, talquetamab, trevogrumab, indusatumab vedotin, ficlatuzumab, rilotumumab, zatuximab, pentuzimab, pentuzimab, margetuximab, timigutuzumab, trastuzumab, trastuzumab duocarmazine, trastuzumab emtansine, gancotamab, pertuzumab, ertumaxomab, emibetuzumab, telisotuzumab, telisotuzumab vedotin, derlotuximab biotin, apolizumab, onartuzumab, bersanlimab, enlimomabpegol, rontalizumab, sifalimumab, talizumab, ganitumab, istiratumab, robatumumab, teprotumumab, figitumumab, ganitumab, istiratumab, robatumumab, teprotumumab, cixutumumab, dalotuzumab, xentuzumab, dusigitumab, canakinumab, ustekinumab, ustekinumab, ustekinumab, briakinumab, briakinumab, abrezekimab, lebrikizumab, romilkimab, TNX-650, tralokinumab, anrukinzumab, brodalumab, ixekizumab, netakimab, perakizumab, secukinumab, vunakizumab, afasevikumab, afasevikumab, bimekizumab, bimekizumab, remtolumab, bermekimab, lutikizumab, lutikizumab, gevokizumab, cergutuzumab amunaleukin, fletikumab, fezakinumab, brazikumab, guselkumab, mirikizumab, tildrakizumab, risankizumab, flotetuzumab, nemolizumab, pascolizumab, dupilumab, mepolizumab, reslizumab, clazakizumab, elsilimomab, olokizumab, sarilumab, siltuximab, sirukumab, vobarilizumab, tocilizumab, SA237, satralizumab, enokizumab, prezalizumab, natalizumab, abrilumab, abrilumab, vedolizumab, volociximab, tadocizumab, etaracizumab, etrolizumab, spesolimab, vatelizumab, erlizumab, lirilumab, relatlimab, cBR96-doxorubicinimmunoconjugate, odulimomab, efalizumab, ladiratuzumab vedotin, simtuzumab, samrotamab vedotin, aselizumab, lupartumab amadotin, imalumab, carlumab, imaprelimab, amatuximab, amatuximab, anetumab ravtansine, narnatumab, clivatuzumab tetraxetan, pemtumomab, gatipotuzumab, ensituximab, lemalesomab, sulesomab, enfortumab vedotin, racotumomab, monalizumab, brontictuzumab, tarextumab, vesencumab, oxelumab, gilvetmab, tislelizumab, dostarlimab, BCD-100, nivolumab, PDR001, pembrolizumab, pidilizumab, retifanlimab, spartalizumab, sintilimab, cemiplimab, olaratumab, tovetumab, rinucumab, atezolizumab, avelumab, durvalumab, lifastuzumab vedotin, bavituximab, acapatamab, capromab, rosopatamab, nezastomig, pasotuxizumab, pelgifatamab, voxalatamab, cofetuzumab pelidotin, denosumab, rosmantuzumab, cirmtuzumab, atinumab, indatuximab ravtansine, elotuzumab, sirtratumab vedotin, sonepcizumab, vandortuzumab vedotin, minretumomab, satumomab pendetide, maslimomab, ontuxizumab, tenatumomab, fresolimumab, metelimumab, lerdelimumab, tezepelumab, etigilimab, tiragotumab, placulumab, prezalumab, infliximab, nerelimomab, ozoralizumab, adalimumab, afelimomab, certolizumab pegol, golimumab, mapatumumab, conatumumab, lexatumumab, tigatuzumab, sacituzumab govitecan, votumumab, pogalizumab, letolizumab, pankomab, anatumomab mafenatox, enavatuzumab, flanvotumab, brolucizumab, ranibizumab, varisacumab, bevacizumab, faricimab, icrucumab, alacizumab pegol, ramucirumab, pritumumab, and onvatilimab.

[6071] In some aspects, the antigen binding polypeptide complexes provided herein comprise a VH2 comprising a VH of an antibody selected from the group consisting of losatuxizumab vedotin, utomilumab, urelumab, oleclumab, naptumomab estafenatox, ascrinvacumab, pintumomab, tacatuzumab tetraxetan, nesvacumab, vanucizumab, timolumab, vapaliximab, vepalimomab, enapotamab vedotin, ianalumab, belimumab, tabalumab, tibulizumab, belantamab mafodotin, teclistamab, teclistamab, detumomab, nacolomab tafenatox, eculizumab, lendalizumab, pexelizumab, pozelimab, ravulizumab, tesidolumab, vilobelimab, abagovomab, igovomab, oregovomab, sofituzumab vedotin, cantuzumab mertansine, cantuzuma bravtansine, girentuximab, altumomab pentetate, arcitumomab, besilesomab, bertilimumab, plozalizumab, mogamulizumab, leronlimab, PRO140, rovelizumab, rovelizumab, talacotuzumab, benralizumab, tavolimab, vonlerolizumab, gavilimomab, ziralimumab, fanolesomab, ipilimumab, ruplizumab, toralizumab, dapirolizumab pegol, toralizumab, dapirolizumab pegol, ruplizumab, blinatumomab, inebilizumab, loncastuximab tesirine, SGN-CD19A, tafasitamab, taplitumomab paptox, XMAB-5574, Budoprutug, Obexelimab, duvortuxizumab, englumafusp alfa, Emfizatamab, zeripatamig, siplizumab, blontuvetmab, FBTA05, ibritumomab tiuxetan, obinutuzumab, ocaratuzumab, ocrelizumab, ofatumumab, rituximab, tositumomab, ublituximab, veltuzumab, divozilimab, eramkafusp alfa, ripertamab, zuberitamab, glofitamab, nofetumomab merpentan, samalizumab, imvotamab, odronextamab, plamotamab, bectumomab, inotuzumab ozogamicin, moxetumomab pasudotox, pinatuzumab vedotin, gomiliximab, lumiliximab, inolimomab, inolimomab, daclizumab, camidanluma btesirine, basiliximab, varlilumab, omburtamab, enoblituzumab, vopratelimab, lulizumabpegol, TGN1412, muromonab-CD3, otelixizumab, teplizumab, visilizumab, epcoritamab, epcoritamab, brentuximab vedotin, iratumumab, azintuxizumab vedotin, gemtuzumab ozogamicin, lintuzumab, vadastuximab talirine, naratuximab emtansine, otlertuzumab, lilotomab satetraxetan, tetulomab, daratumumab, isatuximab, foralumab, mosunetuzumab, mosunetuzumab, cedelizumab, ibalizumab, keliximab, priliximab, tregalizumab, zanolimumab, bleselumab, iscalimab, lucatumumab, ravagalimab, selicrelumab, teneliximab, vanalimab, abciximab, bivatuzumab, iomab-B, telimomab aritox, zolimomab aritox, abituzumab, intetumumab, alemtuzumab, tamtuvetmab, lorvotuzumab mertansine, itolizumab, cusatuzumab, vorsetuzumab mafodotin, milatuzumab, iladatuzumab vedotin, polatuzumab vedotin, galiximab, cibisatamab, zolbetuximab, naxitamab, tisotumab vedotin, olendalizumab, pamrevlumab, lacnotuzumab, cabiralizumab, emactuzumab, axatilimab, gimsilumab, lenzilumab, namilumab, tremelimumab, ulocuplumab, tepoditamab, rovalpituzumab tesirine, tarlatamab, demcizumab, navicixizumab, drozitumab, parsatuzumab, depatuxizumab mafodotin, modotuximab, carotuximab, adecatumumab, adecatumumab, oportuzumab monatox, solitomab, tucotuzumab celmoleukin, edrecolomab, catumaxomab, ifabotuzumab, fibatuzumab, zalutumumab, panitumumab, cetuximab, futuximab, imgatuzumab, laprituximab emtansine, matuzumab, necitumumab, nimotuzumab, tomuzotuximab, amivantamab, amivantamab, epitumomab cituxetan, sontuzumab, duligotuzumab, elgemtumab, lumretuzumab, patritumab, seribantumab, zenocutuzumab, sibrotuzumab, burosumab, aprutumab ixadotin, radretumab, pasotuxizumab, farletuzumab, mirvetuximab soravtansine, vantictumab, TRBS07, 3F8, dinutuximab, dinutuximab beta, ecromeximab, mitumomab, andecaliximab, capromab, codrituzumab, glembatumumab vedotin, talquetamab, talquetamab, trevogrumab, indusatumab vedotin, ficlatuzumab, rilotumumab, zatuximab, pentuzimab, pentuzimab, margetuximab, timigutuzumab, trastuzumab, trastuzumab duocarmazine, trastuzumab emtansine, gancotamab, pertuzumab, ertumaxomab, emibetuzumab, telisotuzumab, telisotuzumab vedotin, derlotuximab biotin, apolizumab, onartuzumab, bersanlimab, enlimomabpegol, rontalizumab, sifalimumab, talizumab, ganitumab, istiratumab, robatumumab, teprotumumab, figitumumab, ganitumab, istiratumab, robatumumab, teprotumumab, cixutumumab, dalotuzumab, xentuzumab, dusigitumab, canakinumab, ustekinumab, ustekinumab, ustekinumab, briakinumab, briakinumab, abrezekimab, lebrikizumab, romilkimab, TNX-650, tralokinumab, anrukinzumab, brodalumab, ixekizumab, netakimab, perakizumab, secukinumab, vunakizumab, afasevikumab, afasevikumab, bimekizumab, bimekizumab, remtolumab, bermekimab, lutikizumab, lutikizumab, gevokizumab, cergutuzumab amunaleukin, fletikumab, fezakinumab, brazikumab, guselkumab, mirikizumab, tildrakizumab, risankizumab, flotetuzumab, nemolizumab, pascolizumab, dupilumab, mepolizumab, reslizumab, clazakizumab, elsilimomab, olokizumab, sarilumab, siltuximab, sirukumab, vobarilizumab, tocilizumab, SA237, satralizumab, enokizumab, prezalizumab, natalizumab, abrilumab, abrilumab, vedolizumab, volociximab, tadocizumab, etaracizumab, etrolizumab, spesolimab, vatelizumab, erlizumab, lirilumab, relatlimab, cBR96-doxorubicinimmunoconjugate, odulimomab, efalizumab, ladiratuzumab vedotin, simtuzumab, samrotamab vedotin, aselizumab, lupartumab amadotin, imalumab, carlumab, imaprelimab, amatuximab, amatuximab, anetumab ravtansine, narnatumab, clivatuzumab tetraxetan, pemtumomab, gatipotuzumab, ensituximab, lemalesomab, sulesomab, enfortumab vedotin, racotumomab, monalizumab, brontictuzumab, tarextumab, vesencumab, oxelumab, gilvetmab, tislelizumab, dostarlimab, BCD-100, nivolumab, PDR001, pembrolizumab, pidilizumab, retifanlimab, spartalizumab, sintilimab, cemiplimab, olaratumab, tovetumab, rinucumab, atezolizumab, avelumab, durvalumab, lifastuzumab vedotin, bavituximab, acapatamab, capromab, rosopatamab, nezastomig, pasotuxizumab, pelgifatamab, voxalatamab, cofetuzumab pelidotin, denosumab, rosmantuzumab, cirmtuzumab, atinumab, indatuximab ravtansine, elotuzumab, sirtratumab vedotin, sonepcizumab, vandortuzumab vedotin, minretumomab, satumomab pendetide, maslimomab, ontuxizumab, tenatumomab, fresolimumab, metelimumab, lerdelimumab, tezepelumab, etigilimab, tiragotumab, placulumab, prezalumab, infliximab, nerelimomab, ozoralizumab, adalimumab, afelimomab, certolizumab pegol, golimumab, mapatumumab, conatumumab, lexatumumab, tigatuzumab, sacituzumab govitecan, votumumab, pogalizumab, letolizumab, pankomab, anatumomab mafenatox, enavatuzumab, flanvotumab, brolucizumab, ranibizumab, varisacumab, bevacizumab, faricimab, icrucumab, alacizumab pegol, ramucirumab, pritumumab, and onvatilimab.

[6072] In some aspects, the antigen binding polypeptide complexes provided herein comprise a VH3 comprising a VH of an antibody selected from the group consisting of losatuxizumab vedotin, utomilumab, urelumab, oleclumab, naptumomab estafenatox, ascrinvacumab, pintumomab, tacatuzumab tetraxetan, nesvacumab, vanucizumab, timolumab, vapaliximab, vepalimomab, enapotamab vedotin, ianalumab, belimumab, tabalumab, tibulizumab, belantamab mafodotin, teclistamab, teclistamab, detumomab, nacolomab tafenatox, eculizumab, lendalizumab, pexelizumab, pozelimab, ravulizumab, tesidolumab, vilobelimab, abagovomab, igovomab, oregovomab, sofituzumab vedotin, cantuzumab mertansine, cantuzuma bravtansine, girentuximab, altumomab pentetate, arcitumomab, besilesomab, bertilimumab, plozalizumab, mogamulizumab, leronlimab, PRO140, rovelizumab, rovelizumab, talacotuzumab, benralizumab, tavolimab, vonlerolizumab, gavilimomab, ziralimumab, fanolesomab, ipilimumab, ruplizumab, toralizumab, dapirolizumab pegol, toralizumab, dapirolizumab pegol, ruplizumab, blinatumomab, inebilizumab, loncastuximab tesirine, SGN-CD19A, tafasitamab, taplitumomab paptox, XMAB-5574, Budoprutug, Obexelimab, duvortuxizumab, englumafusp alfa, Emfizatamab, zeripatamig, siplizumab, blontuvetmab, FBTA05, ibritumomab tiuxetan, obinutuzumab, ocaratuzumab, ocrelizumab, ofatumumab, rituximab, tositumomab, ublituximab, veltuzumab, divozilimab, eramkafusp alfa, ripertamab, zuberitamab, glofitamab, nofetumomab merpentan, samalizumab, imvotamab, odronextamab, plamotamab, bectumomab, inotuzumab ozogamicin, moxetumomab pasudotox, pinatuzumab vedotin, gomiliximab, lumiliximab, inolimomab, inolimomab, daclizumab, camidanluma btesirine, basiliximab, varlilumab, omburtamab, enoblituzumab, vopratelimab, lulizumabpegol, TGN1412, muromonab-CD3, otelixizumab, teplizumab, visilizumab, epcoritamab, epcoritamab, brentuximab vedotin, iratumumab, azintuxizumab vedotin, gemtuzumab ozogamicin, lintuzumab, vadastuximab talirine, naratuximab emtansine, otlertuzumab, lilotomab satetraxetan, tetulomab, daratumumab, isatuximab, foralumab, mosunetuzumab, mosunetuzumab, cedelizumab, ibalizumab, keliximab, priliximab, tregalizumab, zanolimumab, bleselumab, iscalimab, lucatumumab, ravagalimab, selicrelumab, teneliximab, vanalimab, abciximab, bivatuzumab, iomab-B, telimomab aritox, zolimomab aritox, abituzumab, intetumumab, alemtuzumab, tamtuvetmab, lorvotuzumab mertansine, itolizumab, cusatuzumab, vorsetuzumab mafodotin, milatuzumab, iladatuzumab vedotin, polatuzumab vedotin, galiximab, cibisatamab, zolbetuximab, naxitamab, tisotumab vedotin, olendalizumab, pamrevlumab, lacnotuzumab, cabiralizumab, emactuzumab, axatilimab, gimsilumab, lenzilumab, namilumab, tremelimumab, ulocuplumab, tepoditamab, rovalpituzumab tesirine, tarlatamab, demcizumab, navicixizumab, drozitumab, parsatuzumab, depatuxizumab mafodotin, modotuximab, carotuximab, adecatumumab, adecatumumab, oportuzumab monatox, solitomab, tucotuzumab celmoleukin, edrecolomab, catumaxomab, ifabotuzumab, fibatuzumab, zalutumumab, panitumumab, cetuximab, futuximab, imgatuzumab, laprituximab emtansine, matuzumab, necitumumab, nimotuzumab, tomuzotuximab, amivantamab, amivantamab, epitumomab cituxetan, sontuzumab, duligotuzumab, elgemtumab, lumretuzumab, patritumab, scribantumab, zenocutuzumab, sibrotuzumab, burosumab, aprutumab ixadotin, radretumab, pasotuxizumab, farletuzumab, mirvetuximab soravtansine, vantictumab, TRBS07, 3F8, dinutuximab, dinutuximab beta, ecromeximab, mitumomab, andecaliximab, capromab, codrituzumab, glembatumumab vedotin, talquetamab, talquetamab, trevogrumab, indusatumab vedotin, ficlatuzumab, rilotumumab, zatuximab, pentuzimab, pentuzimab, margetuximab, timigutuzumab, trastuzumab, trastuzumab duocarmazine, trastuzumab emtansine, gancotamab, pertuzumab, ertumaxomab, emibetuzumab, telisotuzumab, telisotuzumab vedotin, derlotuximab biotin, apolizumab, onartuzumab, bersanlimab, enlimomabpegol, rontalizumab, sifalimumab, talizumab, ganitumab, istiratumab, robatumumab, teprotumumab, figitumumab, ganitumab, istiratumab, robatumumab, teprotumumab, cixutumumab, dalotuzumab, xentuzumab, dusigitumab, canakinumab, ustekinumab, ustekinumab, ustekinumab, briakinumab, briakinumab, abrezckimab, lebrikizumab, romilkimab, TNX-650, tralokinumab, anrukinzumab, brodalumab, ixekizumab, netakimab, perakizumab, secukinumab, vunakizumab, afasevikumab, afasevikumab, bimekizumab, bimekizumab, remtolumab, bermckimab, lutikizumab, lutikizumab, gevokizumab, cergutuzumab amunaleukin, fletikumab, fezakinumab, brazikumab, guselkumab, mirikizumab, tildrakizumab, risankizumab, flotetuzumab, nemolizumab, pascolizumab, dupilumab, mepolizumab, reslizumab, clazakizumab, elsilimomab, olokizumab, sarilumab, siltuximab, sirukumab, vobarilizumab, tocilizumab, SA237, satralizumab, enokizumab, prezalizumab, natalizumab, abrilumab, abrilumab, vedolizumab, volociximab, tadocizumab, etaracizumab, etrolizumab, spesolimab, vatelizumab, erlizumab, lirilumab, relatlimab, cBR96-doxorubicinimmunoconjugate, odulimomab, efalizumab, ladiratuzumab vedotin, simtuzumab, samrotamab vedotin, aselizumab, lupartumab amadotin, imalumab, carlumab, imaprelimab, amatuximab, amatuximab, anetumab ravtansine, narnatumab, clivatuzumab tetraxetan, pemtumomab, gatipotuzumab, ensituximab, lemalesomab, sulesomab, enfortumab vedotin, racotumomab, monalizumab, brontictuzumab, tarextumab, vesencumab, oxelumab, gilvetmab, tislelizumab, dostarlimab, BCD-100, nivolumab, PDR001, pembrolizumab, pidilizumab, retifanlimab, spartalizumab, sintilimab, cemiplimab, olaratumab, tovetumab, rinucumab, atezolizumab, avelumab, durvalumab, lifastuzumab vedotin, bavituximab, acapatamab, capromab, rosopatamab, nezastomig, pasotuxizumab, pelgifatamab, voxalatamab, cofetuzumab pelidotin, denosumab, rosmantuzumab, cirmtuzumab, atinumab, indatuximab ravtansine, elotuzumab, sirtratumab vedotin, sonepcizumab, vandortuzumab vedotin, minretumomab, satumomab pendetide, maslimomab, ontuxizumab, tenatumomab, fresolimumab, metelimumab, lerdelimumab, tezepelumab, etigilimab, tiragotumab, placulumab, prezalumab, infliximab, nerelimomab, ozoralizumab, adalimumab, afelimomab, certolizumab pegol, golimumab, mapatumumab, conatumumab, lexatumumab, tigatuzumab, sacituzumab govitecan, votumumab, pogalizumab, letolizumab, pankomab, anatumomab mafenatox, enavatuzumab, flanvotumab, brolucizumab, ranibizumab, varisacumab, bevacizumab, faricimab, icrucumab, alacizumab pegol, ramucirumab, pritumumab, and onvatilimab.

[6073] In some aspects, the antigen binding polypeptide complexes provided herein comprise a VH4 comprising a VH of an antibody selected from the group consisting of losatuxizumab vedotin, utomilumab, urelumab, oleclumab, naptumomab estafenatox, ascrinvacumab, pintumomab, tacatuzumab tetraxetan, nesvacumab, vanucizumab, timolumab, vapaliximab, vepalimomab, enapotamab vedotin, ianalumab, belimumab, tabalumab, tibulizumab, belantamab mafodotin, teclistamab, teclistamab, detumomab, nacolomab tafenatox, eculizumab, lendalizumab, pexelizumab, pozelimab, ravulizumab, tesidolumab, vilobelimab, abagovomab, igovomab, oregovomab, sofituzumab vedotin, cantuzumab mertansine, cantuzuma bravtansine, girentuximab, altumomab pentetate, arcitumomab, besilesomab, bertilimumab, plozalizumab, mogamulizumab, leronlimab, PRO140, rovelizumab, rovelizumab, talacotuzumab, benralizumab, tavolimab, vonlerolizumab, gavilimomab, ziralimumab, fanolesomab, ipilimumab, ruplizumab, toralizumab, dapirolizumab pegol, toralizumab, dapirolizumab pegol, ruplizumab, blinatumomab, inebilizumab, loncastuximab tesirine, SGN-CD19A, tafasitamab, taplitumomab paptox, XMAB-5574, Budoprutug, Obexelimab, duvortuxizumab, englumafusp alfa, Emfizatamab, zeripatamig, siplizumab, blontuvetmab, FBTA05, ibritumomab tiuxetan, obinutuzumab, ocaratuzumab, ocrelizumab, ofatumumab, rituximab, tositumomab, ublituximab, veltuzumab, divozilimab, eramkafusp alfa, ripertamab, zuberitamab, glofitamab, nofetumomab merpentan, samalizumab, imvotamab, odronextamab, plamotamab, bectumomab, inotuzumab ozogamicin, moxetumomab pasudotox, pinatuzumab vedotin, gomiliximab, lumiliximab, inolimomab, inolimomab, daclizumab, camidanluma btesirine, basiliximab, varlilumab, omburtamab, enoblituzumab, vopratelimab, lulizumabpegol, TGN1412, muromonab-CD3, otelixizumab, teplizumab, visilizumab, epcoritamab, epcoritamab, brentuximab vedotin, iratumumab, azintuxizumab vedotin, gemtuzumab ozogamicin, lintuzumab, vadastuximab talirine, naratuximab emtansine, otlertuzumab, lilotomab satetraxetan, tetulomab, daratumumab, isatuximab, foralumab, mosunetuzumab, mosunetuzumab, cedelizumab, ibalizumab, keliximab, priliximab, tregalizumab, zanolimumab, bleselumab, iscalimab, lucatumumab, ravagalimab, selicrelumab, teneliximab, vanalimab, abciximab, bivatuzumab, iomab-B, telimomab aritox, zolimomab aritox, abituzumab, intetumumab, alemtuzumab, tamtuvetmab, lorvotuzumab mertansine, itolizumab, cusatuzumab, vorsetuzumab mafodotin, milatuzumab, iladatuzumab vedotin, polatuzumab vedotin, galiximab, cibisatamab, zolbctuximab, naxitamab, tisotumab vedotin, olendalizumab, pamrevlumab, lacnotuzumab, cabiralizumab, emactuzumab, axatilimab, gimsilumab, lenzilumab, namilumab, tremelimumab, ulocuplumab, tepoditamab, rovalpituzumab tesirine, tarlatamab, demcizumab, navicixizumab, drozitumab, parsatuzumab, depatuxizumab mafodotin, modotuximab, carotuximab, adecatumumab, adecatumumab, oportuzumab monatox, solitomab, tucotuzumab celmoleukin, edrecolomab, catumaxomab, ifabotuzumab, fibatuzumab, zalutumumab, panitumumab, cetuximab, futuximab, imgatuzumab, laprituximab emtansine, matuzumab, necitumumab, nimotuzumab, tomuzotuximab, amivantamab, amivantamab, epitumomab cituxetan, sontuzumab, duligotuzumab, elgemtumab, lumretuzumab, patritumab, seribantumab, zenocutuzumab, sibrotuzumab, burosumab, aprutumab ixadotin, radretumab, pasotuxizumab, farletuzumab, mirvetuximab soravtansine, vantictumab, TRBS07, 3F8, dinutuximab, dinutuximab beta, ecromeximab, mitumomab, andecaliximab, capromab, codrituzumab, glembatumumab vedotin, talquetamab, talquetamab, trevogrumab, indusatumab vedotin, ficlatuzumab, rilotumumab, zatuximab, pentuzimab, pentuzimab, margetuximab, timigutuzumab, trastuzumab, trastuzumab duocarmazine, trastuzumab emtansine, gancotamab, pertuzumab, ertumaxomab, emibetuzumab, telisotuzumab, telisotuzumab vedotin, derlotuximab biotin, apolizumab, onartuzumab, bersanlimab, enlimomabpegol, rontalizumab, sifalimumab, talizumab, ganitumab, istiratumab, robatumumab, teprotumumab, figitumumab, ganitumab, istiratumab, robatumumab, teprotumumab, cixutumumab, dalotuzumab, xentuzumab, dusigitumab, canakinumab, ustekinumab, ustekinumab, ustekinumab, briakinumab, briakinumab, abrezekimab, lebrikizumab, romilkimab, TNX-650, tralokinumab, anrukinzumab, brodalumab, ixekizumab, netakimab, perakizumab, secukinumab, vunakizumab, afasevikumab, afasevikumab, bimekizumab, bimekizumab, remtolumab, bermekimab, lutikizumab, lutikizumab, gevokizumab, cergutuzumab amunaleukin, fletikumab, fezakinumab, brazikumab, guselkumab, mirikizumab, tildrakizumab, risankizumab, flotetuzumab, nemolizumab, pascolizumab, dupilumab, mepolizumab, reslizumab, clazakizumab, elsilimomab, olokizumab, sarilumab, siltuximab, sirukumab, vobarilizumab, tocilizumab, SA237, satralizumab, enokizumab, prezalizumab, natalizumab, abrilumab, abrilumab, vedolizumab, volociximab, tadocizumab, etaracizumab, etrolizumab, spesolimab, vatelizumab, erlizumab, lirilumab, relatlimab, cBR96-doxorubicinimmunoconjugate, odulimomab, efalizumab, ladiratuzumab vedotin, simtuzumab, samrotamab vedotin, aselizumab, lupartumab amadotin, imalumab, carlumab, imaprelimab, amatuximab, amatuximab, anetumab ravtansine, narnatumab, clivatuzumab tetraxetan, pemtumomab, gatipotuzumab, ensituximab, lemalesomab, sulesomab, enfortumab vedotin, racotumomab, monalizumab, brontictuzumab, tarextumab, vesencumab, oxelumab, gilvetmab, tislelizumab, dostarlimab, BCD-100, nivolumab, PDR001, pembrolizumab, pidilizumab, retifanlimab, spartalizumab, sintilimab, cemiplimab, olaratumab, tovetumab, rinucumab, atezolizumab, avelumab, durvalumab, lifastuzumab vedotin, bavituximab, acapatamab, capromab, rosopatamab, nezastomig, pasotuxizumab, pelgifatamab, voxalatamab, cofetuzumab pelidotin, denosumab, rosmantuzumab, cirmtuzumab, atinumab, indatuximab ravtansine, elotuzumab, sirtratumab vedotin, sonepcizumab, vandortuzumab vedotin, minretumomab, satumomab pendetide, maslimomab, ontuxizumab, tenatumomab, fresolimumab, metelimumab, lerdelimumab, tezepelumab, etigilimab, tiragotumab, placulumab, prezalumab, infliximab, nerelimomab, ozoralizumab, adalimumab, afelimomab, certolizumab pegol, golimumab, mapatumumab, conatumumab, lexatumumab, tigatuzumab, sacituzumab govitecan, votumumab, pogalizumab, letolizumab, pankomab, anatumomab mafenatox, enavatuzumab, flanvotumab, brolucizumab, ranibizumab, varisacumab, bevacizumab, faricimab, icrucumab, alacizumab pegol, ramucirumab, pritumumab, and onvatilimab.

[6074] In some aspects, the antigen binding polypeptide complexes provided herein comprise a VL1 comprising (i) a complementarity determining region (CDR) 1 having an amino acid sequence that is at least 65%, at least 70%, at least 75%, at least 80%, at least 85%, at least 90%, at least 95%, at least 99%, or 100% identical to any one of SEQ ID NOs: 1096, 1103, 1110, 1120, 1127, 1134, 1141, 1148, 1155, 1162, 1169, 1174, 1181, 1188, 1199, 1211, 1221, 1228, 1235, 1247, 1254, 1261, 1266, 1271, 1278, 1285, 1292, 1299, 1306, 1313, 1319, 1326, 1339, 1352, 1359, 1366, 1373, 1382, 1394, 1401, 1408, 1414, 1421, 1428, 1441, 1448, 1455, 1461, 1468, 1475, 1488, 1495, 1508, 1519, 1526, 1531, 1538, 1544, 1556, 1568, 1574, 1581, 1594, 1601, 1608, 1615, 1622, 1629, 1636, 1643, 1650, 1657, 1672, 1679, 1689, 1697, 1708, 1715, 1718, 1723, 1727, 1738, 1743, 1752, 1761, 1763, 1769, 1776, and 1786; (ii) a CDR2 having an amino acid sequence that is at least 65%, at least 70%, at least 75%, at least 80%, at least 85%, at least 90%, at least 95%, at least 99%, or 100% identical to any one of SEQ ID NOs: 1200, 1212, 1680, 1690, 1698, 1709, 1728, 1739, 1744, 1753, 1770, and 1777; or at least 65%, at least 70%, at least 75%, at least 80%, at least 85%, at least 90%, at least 95%, at least 99%, or 100% identical to any one of amino acid sequences AAS, APS, AT, ATS, DAS, DDG, DDS, DT, DTS, DVS, EAS, FTS, GAF, GAN, GAS, GAT, GIS, GKN, GNS, HTS, KVS, LAS, LGS, LVS, NAK, NTN, QMS, RMS, RTS, SAS, TTS, WAS, YAS, YAT, YGS, YRS, and YTS; and (iii) a CDR3 having an amino acid sequence that is at least 65%, at least 70%, at least 75%, at least 80%, at least 85%, at least 90%, at least 95%, at least 99%, or 100% identical to any one of SEQ ID NOs: 1097, 1104, 1111, 1121, 1128, 1135, 1142, 1149, 1156, 1163, 1170, 1175, 1182, 1189, 1195, 1201, 1207, 1213, 1222, 1229, 1236, 2009, 1248, 1255, 1262, 1267, 1272, 1279, 1286, 1293, 1300, 1307, 1320, 1327, 1333, 1340, 1346, 1353, 1360, 1367, 1374, 1383, 1389, 1395, 1402, 1409, 1415, 1422, 1429, 1435, 1442, 1449, 1456, 1462, 1469, 1476, 1482, 1489, 1496, 1502, 1509, 1513, 1520, 1532, 1539, 1545, 1557, 1562, 1569, 1575, 1582, 1588, 1595, 1602, 1609, 1616, 1623, 1630, 1637, 1644, 1651, 1658, 1663, 1673, 1681, 1691, 1699, 1710, 1729, 1735, 1745, 1751, 1754, 1778, 1787, and 1976.

[6075] In some aspects, the antigen binding polypeptide complexes provided herein comprise a VL2 comprising (i) a complementarity determining region (CDR) 1 having an amino acid sequence that is at least 65%, at least 70%, at least 75%, at least 80%, at least 85%, at least 90%, at least 95%, at least 99%, or 100% identical to any one of SEQ ID NOs: 1096, 1103, 1110, 1120, 1127, 1134, 1141, 1148, 1155, 1162, 1169, 1174, 1181, 1188, 1199, 1211, 1221, 1228, 1235, 1247, 1254, 1261, 1266, 1271, 1278, 1285, 1292, 1299, 1306, 1313, 1319, 1326, 1339, 1352, 1359, 1366, 1373, 1382, 1394, 1401, 1408, 1414, 1421, 1428, 1441, 1448, 1455, 1461, 1468, 1475, 1488, 1495, 1508, 1519, 1526, 1531, 1538, 1544, 1556, 1568, 1574, 1581, 1594, 1601, 1608, 1615, 1622, 1629, 1636, 1643, 1650, 1657, 1672, 1679, 1689, 1697, 1708, 1715, 1718, 1723, 1727, 1738, 1743, 1752, 1761, 1763, 1769, 1776, and 1786; (ii) a CDR2 having an amino acid sequence that is at least 65%, at least 70%, at least 75%, at least 80%, at least 85%, at least 90%, at least 95%, at least 99%, or 100% identical to any one of SEQ ID NOs: 1200, 1212, 1680, 1690, 1698, 1709, 1728, 1739, 1744, 1753, 1770, and 1777; or at least 65%, at least 70%, at least 75%, at least 80%, at least 85%, at least 90%, at least 95%, at least 99%, or 100% identical to any one of amino acid sequences AAS, APS, AT, ATS, DAS, DDG, DDS, DT, DTS, DVS, EAS, FTS, GAF, GAN, GAS, GAT, GIS, GKN, GNS, HTS, KVS, LAS, LGS, LVS, NAK, NTN, QMS, RMS, RTS, SAS, TTS, WAS, YAS, YAT, YGS, YRS, and YTS; and (iii) a CDR3 having an amino acid sequence that is at least 65%, at least 70%, at least 75%, at least 80%, at least 85%, at least 90%, at least 95%, at least 99%, or 100% identical to any one of SEQ ID NOs: 1097, 1104, 1111, 1121, 1128, 1135, 1142, 1149, 1156, 1163, 1170, 1175, 1182, 1189, 1195, 1201, 1207, 1213, 1222, 1229, 1236, 2009, 1248, 1255, 1262, 1267, 1272, 1279, 1286, 1293, 1300, 1307, 1320, 1327, 1333, 1340, 1346, 1353, 1360, 1367, 1374, 1383, 1389, 1395, 1402, 1409, 1415, 1422, 1429, 1435, 1442, 1449, 1456, 1462, 1469, 1476, 1482, 1489, 1496, 1502, 1509, 1513, 1520, 1532, 1539, 1545, 1557, 1562, 1569, 1575, 1582, 1588, 1595, 1602, 1609, 1616, 1623, 1630, 1637, 1644, 1651, 1658, 1663, 1673, 1681, 1691, 1699, 1710, 1729, 1735, 1745, 1751, 1754, 1778, 1787, and 1976.

[6076] In some aspects, the antigen binding polypeptide complexes provided herein comprise a VL3 comprising (i) a complementarity determining region (CDR) 1 having an amino acid sequence that is at least 65%, at least 70%, at least 75%, at least 80%, at least 85%, at least 90%, at least 95%, at least 99%, or 100% identical to any one of SEQ ID NOs: 1096, 1103, 1110, 1120, 1127, 1134, 1141, 1148, 1155, 1162, 1169, 1174, 1181, 1188, 1199, 1211, 1221, 1228, 1235, 1247, 1254, 1261, 1266, 1271, 1278, 1285, 1292, 1299, 1306, 1313, 1319, 1326, 1339, 1352, 1359, 1366, 1373, 1382, 1394, 1401, 1408, 1414, 1421, 1428, 1441, 1448, 1455, 1461, 1468, 1475, 1488, 1495, 1508, 1519, 1526, 1531, 1538, 1544, 1556, 1568, 1574, 1581, 1594, 1601, 1608, 1615, 1622, 1629, 1636, 1643, 1650, 1657, 1672, 1679, 1689, 1697, 1708, 1715, 1718, 1723, 1727, 1738, 1743, 1752, 1761, 1763, 1769, 1776, and 1786; (ii) a CDR2 having an amino acid sequence that is at least 65%, at least 70%, at least 75%, at least 80%, at least 85%, at least 90%, at least 95%, at least 99%, or 100% identical to any one of SEQ ID NOs: 1200, 1212, 1680, 1690, 1698, 1709, 1728, 1739, 1744, 1753, 1770, and 1777; or at least 65%, at least 70%, at least 75%, at least 80%, at least 85%, at least 90%, at least 95%, at least 99%, or 100% identical to any one of amino acid sequences AAS, APS, AT, ATS, DAS, DDG, DDS, DT, DTS, DVS, EAS, FTS, GAF, GAN, GAS, GAT, GIS, GKN, GNS, HTS, KVS, LAS, LGS, LVS, NAK, NTN, QMS, RMS, RTS, SAS, TTS, WAS, YAS, YAT, YGS, YRS, and YTS; and (iii) a CDR3 having an amino acid sequence that is at least 65%, at least 70%, at least 75%, at least 80%, at least 85%, at least 90%, at least 95%, at least 99%, or 100% identical to any one of SEQ ID NOs: 1097, 1104, 1111, 1121, 1128, 1135, 1142, 1149, 1156, 1163, 1170, 1175, 1182, 1189, 1195, 1201, 1207, 1213, 1222, 1229, 1236, 2009, 1248, 1255, 1262, 1267, 1272, 1279, 1286, 1293, 1300, 1307, 1320, 1327, 1333, 1340, 1346, 1353, 1360, 1367, 1374, 1383, 1389, 1395, 1402, 1409, 1415, 1422, 1429, 1435, 1442, 1449, 1456, 1462, 1469, 1476, 1482, 1489, 1496, 1502, 1509, 1513, 1520, 1532, 1539, 1545, 1557, 1562, 1569, 1575, 1582, 1588, 1595, 1602, 1609, 1616, 1623, 1630, 1637, 1644, 1651, 1658, 1663, 1673, 1681, 1691, 1699, 1710, 1729, 1735, 1745, 1751, 1754, 1778, 1787, and 1976.

[6077] In some aspects, the antigen binding polypeptide complexes provided herein comprise a VL4 comprising (i) a complementarity determining region (CDR) 1 having an amino acid sequence that is at least 65%, at least 70%, at least 75%, at least 80%, at least 85%, at least 90%, at least 95%, at least 99%, or 100% identical to any one of SEQ ID NOs: 1096, 1103, 1110, 1120, 1127, 1134, 1141, 1148, 1155, 1162, 1169, 1174, 1181, 1188, 1199, 1211, 1221, 1228, 1235, 1247, 1254, 1261, 1266, 1271, 1278, 1285, 1292, 1299, 1306, 1313, 1319, 1326, 1339, 1352, 1359, 1366, 1373, 1382, 1394, 1401, 1408, 1414, 1421, 1428, 1441, 1448, 1455, 1461, 1468, 1475, 1488, 1495, 1508, 1519, 1526, 1531, 1538, 1544, 1556, 1568, 1574, 1581, 1594, 1601, 1608, 1615, 1622, 1629, 1636, 1643, 1650, 1657, 1672, 1679, 1689, 1697, 1708, 1715, 1718, 1723, 1727, 1738, 1743, 1752, 1761, 1763, 1769, 1776, and 1786; (ii) a CDR2 having an amino acid sequence that is at least 65%, at least 70%, at least 75%, at least 80%, at least 85%, at least 90%, at least 95%, at least 99%, or 100% identical to any one of SEQ ID NOs: 1200, 1212, 1680, 1690, 1698, 1709, 1728, 1739, 1744, 1753, 1770, and 1777; or at least 65%, at least 70%, at least 75%, at least 80%, at least 85%, at least 90%, at least 95%, at least 99%, or 100% identical to any one of amino acid sequences AAS, APS, AT, ATS, DAS, DDG, DDS, DT, DTS, DVS, EAS, FTS, GAF, GAN, GAS, GAT, GIS, GKN, GNS, HTS, KVS, LAS, LGS, LVS, NAK, NTN, QMS, RMS, RTS, SAS, TTS, WAS, YAS, YAT, YGS, YRS, and YTS; and (iii) a CDR3 having an amino acid sequence that is at least 65%, at least 70%, at least 75%, at least 80%, at least 85%, at least 90%, at least 95%, at least 99%, or 100% identical to any one of SEQ ID NOs: 1097, 1104, 1111, 1121, 1128, 1135, 1142, 1149, 1156, 1163, 1170, 1175, 1182, 1189, 1195, 1201, 1207, 1213, 1222, 1229, 1236, 2009, 1248, 1255, 1262, 1267, 1272, 1279, 1286, 1293, 1300, 1307, 1320, 1327, 1333, 1340, 1346, 1353, 1360, 1367, 1374, 1383, 1389, 1395, 1402, 1409, 1415, 1422, 1429, 1435, 1442, 1449, 1456, 1462, 1469, 1476, 1482, 1489, 1496, 1502, 1509, 1513, 1520, 1532, 1539, 1545, 1557, 1562, 1569, 1575, 1582, 1588, 1595, 1602, 1609, 1616, 1623, 1630, 1637, 1644, 1651, 1658, 1663, 1673, 1681, 1691, 1699, 1710, 1729, 1735, 1745, 1751, 1754, 1778, 1787, and 1976.

[6078] In some aspects, the antigen binding polypeptide complexes provided herein comprise a VH1 comprising (i) a complementarity determining region (CDR) 1 having an amino acid sequence that is at least 65%, at least 70%, at least 75%, at least 80%, at least 85%, at least 90%, at least 95%, at least 99%, or 100% identical to any one of SEQ ID NOs: 1099, 1106, 1113, 1117, 1123, 1130, 1137, 1144, 1151, 1158, 1165, 1177, 1184, 1191, 1203, 1215, 1224, 1231, 1238, 1243, 1250, 1257, 1264, 1274, 1281, 1288, 1295, 1302, 1309, 1315, 1322, 1329, 1335, 1342, 1348, 1355, 1362, 1369, 1376, 1385, 1397, 1404, 1417, 1424, 1431, 1437, 1444, 1451, 1458, 1464, 1471, 1478, 1484, 1491, 1498, 1504, 1511, 1515, 1522, 1534, 1547, 1552, 1564, 1577, 1584, 1590, 1597, 1604, 1611, 1618, 1625, 1632, 1639, 1646, 1653, 1660, 1665, 1675, 1683, 1693, 1701, 1705, 1716, 1719, 1731, 1736, 1747, 1756, 1772, 1780, and 1789; (ii) a CDR2 having an amino acid sequence that is at least 65%, at least 70%, at least 75%, at least 80%, at least 85%, at least 90%, at least 95%, at least 99%, or 100% identical to any one of SEQ ID NOs: 1100, 1107, 1114, 1118, 1124, 1131, 1138, 1145, 1152, 1159, 1166, 1178, 1185, 1192, 1204, 1216, 1225, 1232, 1239, 1244, 1251, 1258, 1275, 1282, 1289, 1296, 1303, 1310, 1316, 1323, 1330, 1336, 1343, 1349, 1356, 1363, 1370, 1377, 1386, 1391, 1398, 1405, 1411, 1418, 1425, 1432, 1438, 1445, 1452, 1465, 1472, 1479, 1485, 1492, 1499, 1505, 1516, 1523, 1528, 1535, 1541, 1548, 1553, 1559, 1565, 1571, 1578, 1585, 1591, 1598, 1605, 1612, 1619, 1626, 1633, 1640, 1647, 1654, 1666, 1676, 1684, 1687, 1694, 1702, 1706, 1712, 1717, 1720, 1725, 1732, 1737, 1741, 1748, 1757, 1767, 1773, 1781, and 1790; and (iii) a CDR3 having an amino acid sequence that is at least 65%, at least 70%, at least 75%, at least 80%, at least 85%, at least 90%, at least 95%, at least 99%, or 100% identical to any one of SEQ ID NOs: 1101, 1108, 1115, 1125, 1132, 1139, 1146, 1153, 1160, 1167, 1172, 1179, 1186, 1193, 1197, 1205, 1209, 1217, 1226, 1233, 1240, 1245, 1252, 1259, 1269, 1276, 1283, 1290, 1297, 1304, 1311, 1317, 1324, 1331, 1337, 1344, 1350, 1357, 1364, 1371, 1378, 1387, 1392, 1399, 1406, 1412, 1419, 1426, 1433, 1439, 1446, 1453, 1459, 1466, 1473, 1480, 1486, 1493, 1500, 1506, 1517, 1524, 1529, 1536, 1542, 1549, 1554, 1560, 1566, 1572, 1579, 1586, 1592, 1599, 1606, 1613, 1620, 1627, 1634, 1641, 1648, 1655, 1661, 1667, 1670, 1677, 1685, 1688, 1695, 1703, 1707, 1713, 1733, 1749, 1758, 1762, 1774, 1782, 1791, and 1975.

[6079] In some aspects, the antigen binding polypeptide complexes provided herein comprise a VH2 comprising (i) a complementarity determining region (CDR) 1 having an amino acid sequence that is at least 65%, at least 70%, at least 75%, at least 80%, at least 85%, at least 90%, at least 95%, at least 99%, or 100% identical to any one of SEQ ID NOs: 1099, 1106, 1113, 1117, 1123, 1130, 1137, 1144, 1151, 1158, 1165, 1177, 1184, 1191, 1203, 1215, 1224, 1231, 1238, 1243, 1250, 1257, 1264, 1274, 1281, 1288, 1295, 1302, 1309, 1315, 1322, 1329, 1335, 1342, 1348, 1355, 1362, 1369, 1376, 1385, 1397, 1404, 1417, 1424, 1431, 1437, 1444, 1451, 1458, 1464, 1471, 1478, 1484, 1491, 1498, 1504, 1511, 1515, 1522, 1534, 1547, 1552, 1564, 1577, 1584, 1590, 1597, 1604, 1611, 1618, 1625, 1632, 1639, 1646, 1653, 1660, 1665, 1675, 1683, 1693, 1701, 1705, 1716, 1719, 1731, 1736, 1747, 1756, 1772, 1780, and 1789; (ii) a CDR2 having an amino acid sequence that is at least 65%, at least 70%, at least 75%, at least 80%, at least 85%, at least 90%, at least 95%, at least 99%, or 100% identical to any one of SEQ ID NOs: 1100, 1107, 1114, 1118, 1124, 1131, 1138, 1145, 1152, 1159, 1166, 1178, 1185, 1192, 1204, 1216, 1225, 1232, 1239, 1244, 1251, 1258, 1275, 1282, 1289, 1296, 1303, 1310, 1316, 1323, 1330, 1336, 1343, 1349, 1356, 1363, 1370, 1377, 1386, 1391, 1398, 1405, 1411, 1418, 1425, 1432, 1438, 1445, 1452, 1465, 1472, 1479, 1485, 1492, 1499, 1505, 1516, 1523, 1528, 1535, 1541, 1548, 1553, 1559, 1565, 1571, 1578, 1585, 1591, 1598, 1605, 1612, 1619, 1626, 1633, 1640, 1647, 1654, 1666, 1676, 1684, 1687, 1694, 1702, 1706, 1712, 1717, 1720, 1725, 1732, 1737, 1741, 1748, 1757, 1767, 1773, 1781, and 1790; and (iii) a CDR3 having an amino acid sequence that is at least 65%, at least 70%, at least 75%, at least 80%, at least 85%, at least 90%, at least 95%, at least 99%, or 100% identical to any one of SEQ ID NOs: 1101, 1108, 1115, 1125, 1132, 1139, 1146, 1153, 1160, 1167, 1172, 1179, 1186, 1193, 1197, 1205, 1209, 1217, 1226, 1233, 1240, 1245, 1252, 1259, 1269, 1276, 1283, 1290, 1297, 1304, 1311, 1317, 1324, 1331, 1337, 1344, 1350, 1357, 1364, 1371, 1378, 1387, 1392, 1399, 1406, 1412, 1419, 1426, 1433, 1439, 1446, 1453, 1459, 1466, 1473, 1480, 1486, 1493, 1500, 1506, 1517, 1524, 1529, 1536, 1542, 1549, 1554, 1560, 1566, 1572, 1579, 1586, 1592, 1599, 1606, 1613, 1620, 1627, 1634, 1641, 1648, 1655, 1661, 1667, 1670, 1677, 1685, 1688, 1695, 1703, 1707, 1713, 1733, 1749, 1758, 1762, 1774, 1782, 1791, and 1975.

[6080] In some aspects, the antigen binding polypeptide complexes provided herein comprise a VH3 comprising (i) a complementarity determining region (CDR) 1 having an amino acid sequence that is at least 65%, at least 70%, at least 75%, at least 80%, at least 85%, at least 90%, at least 95%, at least 99%, or 100% identical to any one of SEQ ID NOs: 1099, 1106, 1113, 1117, 1123, 1130, 1137, 1144, 1151, 1158, 1165, 1177, 1184, 1191, 1203, 1215, 1224, 1231, 1238, 1243, 1250, 1257, 1264, 1274, 1281, 1288, 1295, 1302, 1309, 1315, 1322, 1329, 1335, 1342, 1348, 1355, 1362, 1369, 1376, 1385, 1397, 1404, 1417, 1424, 1431, 1437, 1444, 1451, 1458, 1464, 1471, 1478, 1484, 1491, 1498, 1504, 1511, 1515, 1522, 1534, 1547, 1552, 1564, 1577, 1584, 1590, 1597, 1604, 1611, 1618, 1625, 1632, 1639, 1646, 1653, 1660, 1665, 1675, 1683, 1693, 1701, 1705, 1716, 1719, 1731, 1736, 1747, 1756, 1772, 1780, and 1789; (ii) a CDR2 having an amino acid sequence that is at least 65%, at least 70%, at least 75%, at least 80%, at least 85%, at least 90%, at least 95%, at least 99%, or 100% identical to any one of SEQ ID NOs: 1100, 1107, 1114, 1118, 1124, 1131, 1138, 1145, 1152, 1159, 1166, 1178, 1185, 1192, 1204, 1216, 1225, 1232, 1239, 1244, 1251, 1258, 1275, 1282, 1289, 1296, 1303, 1310, 1316, 1323, 1330, 1336, 1343, 1349, 1356, 1363, 1370, 1377, 1386, 1391, 1398, 1405, 1411, 1418, 1425, 1432, 1438, 1445, 1452, 1465, 1472, 1479, 1485, 1492, 1499, 1505, 1516, 1523, 1528, 1535, 1541, 1548, 1553, 1559, 1565, 1571, 1578, 1585, 1591, 1598, 1605, 1612, 1619, 1626, 1633, 1640, 1647, 1654, 1666, 1676, 1684, 1687, 1694, 1702, 1706, 1712, 1717, 1720, 1725, 1732, 1737, 1741, 1748, 1757, 1767, 1773, 1781, and 1790; and (iii) a CDR3 having an amino acid sequence that is at least 65%, at least 70%, at least 75%, at least 80%, at least 85%, at least 90%, at least 95%, at least 99%, or 100% identical to any one of SEQ ID NOs: 1101, 1108, 1115, 1125, 1132, 1139, 1146, 1153, 1160, 1167, 1172, 1179, 1186, 1193, 1197, 1205, 1209, 1217, 1226, 1233, 1240, 1245, 1252, 1259, 1269, 1276, 1283, 1290, 1297, 1304, 1311, 1317, 1324, 1331, 1337, 1344, 1350, 1357, 1364, 1371, 1378, 1387, 1392, 1399, 1406, 1412, 1419, 1426, 1433, 1439, 1446, 1453, 1459, 1466, 1473, 1480, 1486, 1493, 1500, 1506, 1517, 1524, 1529, 1536, 1542, 1549, 1554, 1560, 1566, 1572, 1579, 1586, 1592, 1599, 1606, 1613, 1620, 1627, 1634, 1641, 1648, 1655, 1661, 1667, 1670, 1677, 1685, 1688, 1695, 1703, 1707, 1713, 1733, 1749, 1758, 1762, 1774, 1782, 1791, and 1975.

[6081] In some aspects, the antigen binding polypeptide complexes provided herein comprise a VH4 comprising (i) a complementarity determining region (CDR) 1 having an amino acid sequence that is at least 65%, at least 70%, at least 75%, at least 80%, at least 85%, at least 90%, at least 95%, at least 99%, or 100% identical to any one of SEQ ID NOs: 1099, 1106, 1113, 1117, 1123, 1130, 1137, 1144, 1151, 1158, 1165, 1177, 1184, 1191, 1203, 1215, 1224, 1231, 1238, 1243, 1250, 1257, 1264, 1274, 1281, 1288, 1295, 1302, 1309, 1315, 1322, 1329, 1335, 1342, 1348, 1355, 1362, 1369, 1376, 1385, 1397, 1404, 1417, 1424, 1431, 1437, 1444, 1451, 1458, 1464, 1471, 1478, 1484, 1491, 1498, 1504, 1511, 1515, 1522, 1534, 1547, 1552, 1564, 1577, 1584, 1590, 1597, 1604, 1611, 1618, 1625, 1632, 1639, 1646, 1653, 1660, 1665, 1675, 1683, 1693, 1701, 1705, 1716, 1719, 1731, 1736, 1747, 1756, 1772, 1780, and 1789; (ii) a CDR2 having an amino acid sequence that is at least 65%, at least 70%, at least 75%, at least 80%, at least 85%, at least 90%, at least 95%, at least 99%, or 100% identical to any one of SEQ ID NOs: 1100, 1107, 1114, 1118, 1124, 1131, 1138, 1145, 1152, 1159, 1166, 1178, 1185, 1192, 1204, 1216, 1225, 1232, 1239, 1244, 1251, 1258, 1275, 1282, 1289, 1296, 1303, 1310, 1316, 1323, 1330, 1336, 1343, 1349, 1356, 1363, 1370, 1377, 1386, 1391, 1398, 1405, 1411, 1418, 1425, 1432, 1438, 1445, 1452, 1465, 1472, 1479, 1485, 1492, 1499, 1505, 1516, 1523, 1528, 1535, 1541, 1548, 1553, 1559, 1565, 1571, 1578, 1585, 1591, 1598, 1605, 1612, 1619, 1626, 1633, 1640, 1647, 1654, 1666, 1676, 1684, 1687, 1694, 1702, 1706, 1712, 1717, 1720, 1725, 1732, 1737, 1741, 1748, 1757, 1767, 1773, 1781, and 1790; and (iii) a CDR3 having an amino acid sequence that is at least 65%, at least 70%, at least 75%, at least 80%, at least 85%, at least 90%, at least 95%, at least 99%, or 100% identical to any one of SEQ ID NOs: 1101, 1108, 1115, 1125, 1132, 1139, 1146, 1153, 1160, 1167, 1172, 1179, 1186, 1193, 1197, 1205, 1209, 1217, 1226, 1233, 1240, 1245, 1252, 1259, 1269, 1276, 1283, 1290, 1297, 1304, 1311, 1317, 1324, 1331, 1337, 1344, 1350, 1357, 1364, 1371, 1378, 1387, 1392, 1399, 1406, 1412, 1419, 1426, 1433, 1439, 1446, 1453, 1459, 1466, 1473, 1480, 1486, 1493, 1500, 1506, 1517, 1524, 1529, 1536, 1542, 1549, 1554, 1560, 1566, 1572, 1579, 1586, 1592, 1599, 1606, 1613, 1620, 1627, 1634, 1641, 1648, 1655, 1661, 1667, 1670, 1677, 1685, 1688, 1695, 1703, 1707, 1713, 1733, 1749, 1758, 1762, 1774, 1782, 1791, and 1975.

[6082] In some aspects, the antigen binding polypeptide complexes provided herein comprise a VL1 comprising an amino acid sequence that is at least 65%, at least 70%, at least 75%, at least 80%, at least 85%, at least 90%, at least 95%, at least 99%, or 100% identical to any one of SEQ ID NOs: 1098, 1105, 1112, 1122, 1129, 1136, 1143, 1150, 1157, 1164, 1171, 1176, 1183, 1190, 1196, 1202, 1208, 1214, 1219, 1223, 1230, 1237, 1242, 1249, 1256, 1263, 1268, 1273, 1280, 1287, 1294, 1301, 1308, 1314, 1321, 1328, 1334, 1341, 1347, 1354, 1361, 1368, 1375, 1380, 1384, 1390, 1396, 1403, 1410, 1416, 1423, 1430, 1436, 1443, 1450, 1457, 1463, 1470, 1477, 1483, 1490, 1497, 1503, 1510, 1514, 1521, 1527, 1533, 1540, 1546, 1551, 1558, 1563, 1570, 1576, 1583, 1589, 1596, 1603, 1610, 1617, 1624, 1631, 1638, 1645, 1652, 1659, 1664, 1669, 1674, 1682, 1692, 1700, 1711, 1721, 1724, 1730, 1740, 1746, 1755, 1764, 1766, 1771, 1779, 1784, and 1788.

[6083] In some aspects, the antigen binding polypeptide complexes provided herein comprise a VL2 comprising an amino acid sequence that is at least 65%, at least 70%, at least 75%, at least 80%, at least 85%, at least 90%, at least 95%, at least 99%, or 100% identical to any one of SEQ ID NOs: 1098, 1105, 1112, 1122, 1129, 1136, 1143, 1150, 1157, 1164, 1171, 1176, 1183, 1190, 1196, 1202, 1208, 1214, 1219, 1223, 1230, 1237, 1242, 1249, 1256, 1263, 1268, 1273, 1280, 1287, 1294, 1301, 1308, 1314, 1321, 1328, 1334, 1341, 1347, 1354, 1361, 1368, 1375, 1380, 1384, 1390, 1396, 1403, 1410, 1416, 1423, 1430, 1436, 1443, 1450, 1457, 1463, 1470, 1477, 1483, 1490, 1497, 1503, 1510, 1514, 1521, 1527, 1533, 1540, 1546, 1551, 1558, 1563, 1570, 1576, 1583, 1589, 1596, 1603, 1610, 1617, 1624, 1631, 1638, 1645, 1652, 1659, 1664, 1669, 1674, 1682, 1692, 1700, 1711, 1721, 1724, 1730, 1740, 1746, 1755, 1764, 1766, 1771, 1779, 1784, and 1788.

[6084] In some aspects, the antigen binding polypeptide complexes provided herein comprise a VL3 comprising an amino acid sequence that is at least 65%, at least 70%, at least 75%, at least 80%, at least 85%, at least 90%, at least 95%, at least 99%, or 100% identical to any one of SEQ ID NOs: 1098, 1105, 1112, 1122, 1129, 1136, 1143, 1150, 1157, 1164, 1171, 1176, 1183, 1190, 1196, 1202, 1208, 1214, 1219, 1223, 1230, 1237, 1242, 1249, 1256, 1263, 1268, 1273, 1280, 1287, 1294, 1301, 1308, 1314, 1321, 1328, 1334, 1341, 1347, 1354, 1361, 1368, 1375, 1380, 1384, 1390, 1396, 1403, 1410, 1416, 1423, 1430, 1436, 1443, 1450, 1457, 1463, 1470, 1477, 1483, 1490, 1497, 1503, 1510, 1514, 1521, 1527, 1533, 1540, 1546, 1551, 1558, 1563, 1570, 1576, 1583, 1589, 1596, 1603, 1610, 1617, 1624, 1631, 1638, 1645, 1652, 1659, 1664, 1669, 1674, 1682, 1692, 1700, 1711, 1721, 1724, 1730, 1740, 1746, 1755, 1764, 1766, 1771, 1779, 1784, and 1788.

[6085] In some aspects, the antigen binding polypeptide complexes provided herein comprise a VL4 comprising an amino acid sequence that is at least 65%, at least 70%, at least 75%, at least 80%, at least 85%, at least 90%, at least 95%, at least 99%, or 100% identical to any one of SEQ ID NOs: 1098, 1105, 1112, 1122, 1129, 1136, 1143, 1150, 1157, 1164, 1171, 1176, 1183, 1190, 1196, 1202, 1208, 1214, 1219, 1223, 1230, 1237, 1242, 1249, 1256, 1263, 1268, 1273, 1280, 1287, 1294, 1301, 1308, 1314, 1321, 1328, 1334, 1341, 1347, 1354, 1361, 1368, 1375, 1380, 1384, 1390, 1396, 1403, 1410, 1416, 1423, 1430, 1436, 1443, 1450, 1457, 1463, 1470, 1477, 1483, 1490, 1497, 1503, 1510, 1514, 1521, 1527, 1533, 1540, 1546, 1551, 1558, 1563, 1570, 1576, 1583, 1589, 1596, 1603, 1610, 1617, 1624, 1631, 1638, 1645, 1652, 1659, 1664, 1669, 1674, 1682, 1692, 1700, 1711, 1721, 1724, 1730, 1740, 1746, 1755, 1764, 1766, 1771, 1779, 1784, and 1788.

[6086] In some aspects, the antigen binding polypeptide complexes provided herein comprise a VH1 comprising an amino acid sequence that is at least 65%, at least 70%, at least 75%, at least 80%, at least 85%, at least 90%, at least 95%, at least 99%, or 100% identical to any one of SEQ ID NOs: 1102, 1109, 1116, 1119, 1126, 1133, 1140, 1147, 1154, 1161, 1168, 1173, 1180, 1187, 1194, 1198, 1206, 1210, 1218, 1220, 1227, 1234, 1241, 1246, 1253, 1260, 1265, 1270, 1277, 1284, 1291, 1298, 1305, 1312, 1318, 1325, 1332, 1338, 1345, 1351, 1358, 1365, 1372, 1379, 1381, 1388, 1393, 1400, 1407, 1413, 1420, 1427, 1434, 1440, 1447, 1454, 1460, 1467, 1474, 1481, 1487, 1494, 1501, 1507, 1512, 1518, 1525, 1530, 1537, 1543, 1550, 1555, 1561, 1567, 1573, 1580, 1587, 1593, 1600, 1607, 1614, 1621, 1628, 1635, 1642, 1649, 1656, 1662, 1668, 1671, 1678, 1686, 1696, 1704, 1714, 1722, 1726, 1734, 1742, 1750, 1759, 1760, 1765, 1768, 1775, 1783, 1785, and 1792.

[6087] In some aspects, the antigen binding polypeptide complexes provided herein comprise a VH2 comprising an amino acid sequence that is at least 65%, at least 70%, at least 75%, at least 80%, at least 85%, at least 90%, at least 95%, at least 99%, or 100% identical to any one of SEQ ID NOs: 1102, 1109, 1116, 1119, 1126, 1133, 1140, 1147, 1154, 1161, 1168, 1173, 1180, 1187, 1194, 1198, 1206, 1210, 1218, 1220, 1227, 1234, 1241, 1246, 1253, 1260, 1265, 1270, 1277, 1284, 1291, 1298, 1305, 1312, 1318, 1325, 1332, 1338, 1345, 1351, 1358, 1365, 1372, 1379, 1381, 1388, 1393, 1400, 1407, 1413, 1420, 1427, 1434, 1440, 1447, 1454, 1460, 1467, 1474, 1481, 1487, 1494, 1501, 1507, 1512, 1518, 1525, 1530, 1537, 1543, 1550, 1555, 1561, 1567, 1573, 1580, 1587, 1593, 1600, 1607, 1614, 1621, 1628, 1635, 1642, 1649, 1656, 1662, 1668, 1671, 1678, 1686, 1696, 1704, 1714, 1722, 1726, 1734, 1742, 1750, 1759, 1760, 1765, 1768, 1775, 1783, 1785, and 1792.

[6088] In some aspects, the antigen binding polypeptide complexes provided herein comprise a VH3 comprising an amino acid sequence that is at least 65%, at least 70%, at least 75%, at least 80%, at least 85%, at least 90%, at least 95%, at least 99%, or 100% identical to any one of SEQ ID NOs: 1102, 1109, 1116, 1119, 1126, 1133, 1140, 1147, 1154, 1161, 1168, 1173, 1180, 1187, 1194, 1198, 1206, 1210, 1218, 1220, 1227, 1234, 1241, 1246, 1253, 1260, 1265, 1270, 1277, 1284, 1291, 1298, 1305, 1312, 1318, 1325, 1332, 1338, 1345, 1351, 1358, 1365, 1372, 1379, 1381, 1388, 1393, 1400, 1407, 1413, 1420, 1427, 1434, 1440, 1447, 1454, 1460, 1467, 1474, 1481, 1487, 1494, 1501, 1507, 1512, 1518, 1525, 1530, 1537, 1543, 1550, 1555, 1561, 1567, 1573, 1580, 1587, 1593, 1600, 1607, 1614, 1621, 1628, 1635, 1642, 1649, 1656, 1662, 1668, 1671, 1678, 1686, 1696, 1704, 1714, 1722, 1726, 1734, 1742, 1750, 1759, 1760, 1765, 1768, 1775, 1783, 1785, and 1792.

[6089] In some aspects, the antigen binding polypeptide complexes provided herein comprise a VH4 comprising an amino acid sequence that is at least 65%, at least 70%, at least 75%, at least 80%, at least 85%, at least 90%, at least 95%, at least 99%, or 100% identical to any one of SEQ ID NOs: 1102, 1109, 1116, 1119, 1126, 1133, 1140, 1147, 1154, 1161, 1168, 1173, 1180, 1187, 1194, 1198, 1206, 1210, 1218, 1220, 1227, 1234, 1241, 1246, 1253, 1260, 1265, 1270, 1277, 1284, 1291, 1298, 1305, 1312, 1318, 1325, 1332, 1338, 1345, 1351, 1358, 1365, 1372, 1379, 1381, 1388, 1393, 1400, 1407, 1413, 1420, 1427, 1434, 1440, 1447, 1454, 1460, 1467, 1474, 1481, 1487, 1494, 1501, 1507, 1512, 1518, 1525, 1530, 1537, 1543, 1550, 1555, 1561, 1567, 1573, 1580, 1587, 1593, 1600, 1607, 1614, 1621, 1628, 1635, 1642, 1649, 1656, 1662, 1668, 1671, 1678, 1686, 1696, 1704, 1714, 1722, 1726, 1734, 1742, 1750, 1759, 1760, 1765, 1768, 1775, 1783, 1785, and 1792.

[6090] In some aspects, the infectious disease antigen that is not a sarbecovirus antigen is:
[6091] (i) a viral antigen elected from the group consisting of an influenza virus (A, B, C) antigen (e.g., influenza virus envelope proteins, for example, influenza virus neuraminidase (NA, N1, N2, N3, N4, N5, N6, N7, N8, N9, N10, N11), influenza virus hemagglutinin (H1, H2, H3, H4, H5, H6, H7, H8, H9, H10, H11, H12, H13, H14, H15, H16, H17, H18) (e.g., H1N1, H3N2, H5N1, H7N9, H9N2), Yamagata virus antigen, Victoria virus antigen, influenza virus structural proteins (e.g., M1, M2, capsid protein), influenza virus functional proteins (e.g., ribonucleoprotein (NP), primary interferon antagonist (NS1), nuclear export protein (NEP)) influenza virus accessory proteins (e.g., PB2, PB1, or PA), for example, anti-HA, anti-NA, anti-H1, anti-H3, anti-H5, anti-H7, anti-H9, anti-N1, anti-N2, anti-N9, anti-H1N1, anti-H3N2, anti-H5N1, anti-H7N9, anti-H9N2, anti-A protein, anti-B protein, anti-stem, anti-M1, anti-M2, anti-capsid, anti-NP, anti-NS1, anti-NEP, anti-PB1, anti-PB2, and anti-PA); a swine influenza virus antigen (e.g., swine flu hemagglutinin, swine flu neuraminidase); a classical swine fever (CSF) (hog colera) virus antigen; an equine influenza virus antigen (e.g., equine influenza virus typeA/Miami 63 neuraminidase, equine influenza virus type A/Kentucky 81 neuraminidase, equine influenza virus type A/Alaska 91 neuraminidase); parainfluenza viruses (e.g., bovine parainfluenza virus, bovine parainfluenza virus type 3 fusion protein, bovine parainfluenza virus type 3 hemagglutinin neuraminidase); a (human) respiratory syncytial virus (RSV)-viral antigen (e.g., RSV F glycoprotein, RSV G glycoprotein, F protein of respiratory syncytial virus, RSV fusion glycoprotein); a herpes simplex virus (HSV) antigen (e.g., herpes simplex virus glycoproteins gB, gC, gD, and gE, herpes simplex virus type 2 glycoprotein gB); a Dengue virus antigen (e.g., core protein, matrix protein, glycoprotein E of Dengue virus, or other protein of Dengue virus); a measles virus antigen (e.g., hemagglutinin); a poliovirus 1 antigen (e.g., poliovirus 1 proteins (VP1)), a HIV-1 antigen and HIV-2 antigen (e.g., HIV envelope proteins (e.g., envelope glycoproteins of HIV 1, HIV envelope glycoprotein (Env), HIV envelope glycoprotein gp160, HIV envelope surface glycoprotein gp120, HIV transmembrane envelope protein gp41), HIV structural proteins (e.g., p17, p24, p7, p55), HIV functional proteins (e.g., p66, HIV-1 protease (PR), p31), HIV accessory proteins (e.g., Nef, Tat, Rev, Vif, Vpr, Vpu)); a hepatitis virus (HAV, HBV, HCV, HDV, HEV) antigen (e.g., hepatitis B virus antigen (e.g., surface antigen, core protein), hepatitis C virus antigen (e.g., glycoprotein E1E2)); a rabies virus (Rabies lyssavirus) antigen (e.g., rabies virus glycoprotein, e.g., G glycoprotein); a pseudorabies virus antigen (e.g., pseudorabies virus g50 (gpD), pseudorabies virus II (gpB), pseudorabies virus III (gpC), pseudorabies virus glycoprotein H, pseudorabies virus glycoprotein E); a papillomavirus (HPV) antigen; an Epstein-Barr virus (EBV) (Gamma herpes virus 4) antigen; a Herpes simplex virus (HSV, HSV-1, HSV-2) antigen (e.g., human herpes virus 8, equine herpes virus antigen (e.g., type 1 glycoprotein B, type 1 glycoprotein D)); a Herpes zoster antigen; a Cytomegalovirus antigen (e.g., cytomegalovirus glycoprotein B); a Zika virus antigen; a Transmissible gastroenteritis virus (TGEV) antigen (e.g., glycoprotein 195, matrix protein); a rotavirus antigen (e.g., swine rotavirus glycoprotein 38); a parvovirus antigen (e.g., swine parvovirus capsid protein); a filoviruses (e.g., Marburg and Ebola) antigen; a bovine viral diarrhea virus antigen (e.g., glycoprotein 55); a Newcastle disease virus antigen (hemagglutinin, neuraminidase); an orthopoxvirus antigen; a coxsackievirus antigen and aphthovirus (foot and mouth disease virus) antigen; a yellow fever virus antigen; a Chikunga virus antigen; a Nipah virus antigen; an African swine fever virus antigen; a rhinotracheitis virus antigen (e.g., infectious bovine rhinotracheitis virus glycoprotein E, glycoprotein G); a laryngotracheitis virus antigen (e.g., infectious laryngotracheitis virus glycoprotein G or glycoprotein I); a La Crosse virus antigen (e.g., La Crosse virus glycoprotein); a neonatal calf diarrhoea virus antigen; a Venezuelan equine encephalomyelitis virus antigen; a punta toro virus antigen; a murine leukemia virus antigen; a mouse mammary tumor virus antigen; a bovine respiratory syncytial virus antigen (e.g., bovine respiratory syncytial virus attachment protein (BRSV G), bovine respiratory syncytial virus fusion protein (BRSV F), bovine respiratory syncytial virus nucleocapsid protein (BRSVN)); a bovine E viral diarrhoea virus antigen (e.g., glycoprotein 48 and glycoprotein 53); a metapneumovirus (HMPV) antigen; and an Ebola virus antigen (e.g., ebolavirus glycoprotein, e.g., Zaire ebolavirus glycoprotein); or
[6092] (ii) a bacterial or parasite antigen selected from the group consisting of a Plasmodium (e.g., Plasmodium falciparum, Plasmodium vivax, Plasmodium malariae, Plasmodium ovale, Plasmodium knowlesi) antigen, a Streptococcus (e.g., Streptococcus pneumoniae, Streptococcus pyogenes, Streptococcus agalactiae, Streptococcus mutans, Streptococcus viridans, Streptococcus anginosus, Streptococcus intermedius, Streptococcus constellatus) antigen (e.g., 24M epitope), a Neisseria gonorrhoeae antigen (e.g., gonococcal pilin), a Corynebacterium antigen (e.g., Corynebacterium diphtheria (diptheria toxin), Corynebacterium ulcerans. Corynebacterium pseudotuberculosis), Mycobacterium tuberculosis antigens, Brachyspira hyodysenteriae (Serpulina hydodysenteriae) antigen (e.g., Serpulina hydodysenteriae protective antigen), a Chlamydia antigen (e.g., Chlamydia trachomatis) (e.g., MOMP and PorB), a Mycoplasma sp. (e.g., Mycoplasma genitalium. Mycoplasma hyopneumoniae, Mycoplasma pneumonia) antigen, a Staphylococcus (e.g., Staphylococcus aureus, coagulase-negative staphylococci (CoNS), Staphylococcus aureus alpha toxin, Staphylococcus aureus bi-component leucocidin) antigen, a Klebsiella sp. antigen, an Escherichia coli antigen (e.g., E. coli shiga toxin type-2, E. coli shiga toxin type-1), a Bacillus sp. (e.g., Bacillus anthracis, e.g., Bacillus anthracis anthrax) antigen, a Pseudomonas aeruginosa antigen (e.g., Pseudomonas aeruginosa type III secretion system), an Enterococcus sp. antigen, an Enterobacter sp. antigen, a Proteus sp. antigen, an Actinobacter sp. antigen, a Mycobacterium avium (Mycobacterium avium complex (MAC)) antigen, a Salmonella bacteria antigen, a Clostridium difficile antigen, a Toxoplasma (e.g., Toxoplasma gondii) antigen, a Histoplasma antigen, a Candida antigen, a Coccidioides antigen, a Cryptococcus antigen, a Cryptosporidium antigen, and a Cystoisospora (e.g., Cystoisospora belli) antigen, and another antigen (e.g., endotoxins, lymphotoxins (e.g., lymphotoxin alpha LTA), phosphatidylserine, Hsp90, CCR5, lipoteichoic acid, clumping factor A).

[6093] In some aspects, the antigen binding polypeptide complexes provided herein comprise a VL1 comprising a light chain complementarity determining region 1 (LCDR1), LCDR2, and/or LCDR3 of an antibody selected from the group consisting of libivirumab, rmab, rivabazumab pegol, setoxaximab, suvizumab, suvratoxumab, sevirumab, pritoxaximab, porgaviximab, REGN-EB3, obiltoxaximab, gedivumab, foravirumab, larcaviximab, motavizumab, palivizumab, rafivirumab, regavirumab, tuvirumab, cosfroviximab, felvizumab, atidortoxumab, edobacomab, nebacumab, pateclizumab, raxibacumab, urtoxazumab, tosatoxumab, berlimatoxumab, CR6261, diridavumab, firivumab, lesofavumab, navivumab, exbivirumab, lenvervimab, bavituximab, bezlotoxumab, efungumab, leronlimab, nirsevimab, pagibaximab, panobacumab, tefibazumab, ansuvimab, atoltivimab, maftivimab, and odesivimab.

[6094] In some aspects, the antigen binding polypeptide complexes provided herein comprise a VL2 comprising a light chain complementarity determining region 1 (LCDR1), LCDR2, and/or LCDR3 of an antibody selected from the group consisting of libivirumab, rmab, rivabazumab pegol, setoxaximab, suvizumab, suvratoxumab, sevirumab, pritoxaximab, porgaviximab, REGN-EB3, obiltoxaximab, gedivumab, foravirumab, larcaviximab, motavizumab, palivizumab, rafivirumab, regavirumab, tuvirumab, cosfroviximab, felvizumab, atidortoxumab, edobacomab, nebacumab, pateclizumab, raxibacumab, urtoxazumab, tosatoxumab, berlimatoxumab, CR6261, diridavumab, firivumab, lesofavumab, navivumab, exbivirumab, lenvervimab, bavituximab, bezlotoxumab, efungumab, leronlimab, nirsevimab, pagibaximab, panobacumab, tefibazumab, ansuvimab, atoltivimab, maftivimab, and odesivimab.

[6095] In some aspects, the antigen binding polypeptide complexes provided herein comprise a VL3 comprising a light chain complementarity determining region 1 (LCDR1), LCDR2, and/or LCDR3 of an antibody selected from the group consisting of libivirumab, rmab, rivabazumab pegol, setoxaximab, suvizumab, suvratoxumab, sevirumab, pritoxaximab, porgaviximab, REGN-EB3, obiltoxaximab, gedivumab, foravirumab, larcaviximab, motavizumab, palivizumab, rafivirumab, regavirumab, tuvirumab, cosfroviximab, felvizumab, atidortoxumab, edobacomab, nebacumab, pateclizumab, raxibacumab, urtoxazumab, tosatoxumab, berlimatoxumab, CR6261, diridavumab, firivumab, lesofavumab, navivumab, exbivirumab, lenvervimab, bavituximab, bezlotoxumab, efungumab, leronlimab, nirsevimab, pagibaximab, panobacumab, tefibazumab, ansuvimab, atoltivimab, maftivimab, and odesivimab.

[6096] In some aspects, the antigen binding polypeptide complexes provided herein comprise a VL4 comprising a light chain complementarity determining region 1 (LCDR1), LCDR2, and/or LCDR3 of an antibody selected from the group consisting of libivirumab, rmab, rivabazumab pegol, setoxaximab, suvizumab, suvratoxumab, sevirumab, pritoxaximab, porgaviximab, REGN-EB3, obiltoxaximab, gedivumab, foravirumab, larcaviximab, motavizumab, palivizumab, rafivirumab, regavirumab, tuvirumab, cosfroviximab, felvizumab, atidortoxumab, edobacomab, nebacumab, pateclizumab, raxibacumab, urtoxazumab, tosatoxumab, berlimatoxumab, CR6261, diridavumab, firivumab, lesofavumab, navivumab, exbivirumab, lenvervimab, bavituximab, bezlotoxumab, efungumab, leronlimab, nirsevimab, pagibaximab, panobacumab, tefibazumab, ansuvimab, atoltivimab, maftivimab, and odesivimab.

[6097] In some aspects, the antigen binding polypeptide complexes provided herein comprise a VH1 comprising a heavy chain complementarity determining region 1 (HCDR1), HCDR2, and/or HCDR3 of an antibody selected from the group consisting of libivirumab, rmab, rivabazumab pegol, setoxaximab, suvizumab, suvratoxumab, sevirumab, pritoxaximab, porgaviximab, REGN-EB3, obiltoxaximab, gedivumab, foravirumab, larcaviximab, motavizumab, palivizumab, rafivirumab, regavirumab, tuvirumab, cosfroviximab, felvizumab, atidortoxumab, edobacomab, nebacumab, pateclizumab, raxibacumab, urtoxazumab, tosatoxumab, berlimatoxumab, CR6261, diridavumab, firivumab, lesofavumab, navivumab, exbivirumab, lenvervimab, bavituximab, bezlotoxumab, efungumab, leronlimab, nirsevimab, pagibaximab, panobacumab, tefibazumab, ansuvimab, atoltivimab, maftivimab, and odesivimab.

[6098] In some aspects, the antigen binding polypeptide complexes provided herein comprise a VH2 comprising a heavy chain complementarity determining region 1 (HCDR1), HCDR2, and/or HCDR3 of an antibody selected from the group consisting of libivirumab, rmab, rivabazumab pegol, setoxaximab, suvizumab, suvratoxumab, sevirumab, pritoxaximab, porgaviximab, REGN-EB3, obiltoxaximab, gedivumab, foravirumab, larcaviximab, motavizumab, palivizumab, rafivirumab, regavirumab, tuvirumab, cosfroviximab, felvizumab, atidortoxumab, edobacomab, nebacumab, pateclizumab, raxibacumab, urtoxazumab, tosatoxumab, berlimatoxumab, CR6261, diridavumab, firivumab, lesofavumab, navivumab, exbivirumab, lenvervimab, bavituximab, bezlotoxumab, efungumab, leronlimab, nirsevimab, pagibaximab, panobacumab, tefibazumab, ansuvimab, atoltivimab, maftivimab, and odesivimab.

[6099] In some aspects, the antigen binding polypeptide complexes provided herein comprise a VH3 comprising a heavy chain complementarity determining region 1 (HCDR1), HCDR2, and/or HCDR3 of an antibody selected from the group consisting of libivirumab, rmab, rivabazumab pegol, setoxaximab, suvizumab, suvratoxumab, sevirumab, pritoxaximab, porgaviximab, REGN-EB3, obiltoxaximab, gedivumab, foravirumab, larcaviximab, motavizumab, palivizumab, rafivirumab, regavirumab, tuvirumab, cosfroviximab, felvizumab, atidortoxumab, edobacomab, nebacumab, pateclizumab, raxibacumab, urtoxazumab, tosatoxumab, berlimatoxumab, CR6261, diridavumab, firivumab, lesofavumab, navivumab, exbivirumab, lenvervimab, bavituximab, bezlotoxumab, efungumab, leronlimab, nirsevimab, pagibaximab, panobacumab, tefibazumab, ansuvimab, atoltivimab, maftivimab, and odesivimab.

[6100] In some aspects, the antigen binding polypeptide complexes provided herein comprise a VH4 comprising a heavy chain complementarity determining region 1 (HCDR1), HCDR2, and/or HCDR3 of an antibody selected from the group consisting of libivirumab, rmab, rivabazumab pegol, setoxaximab, suvizumab, suvratoxumab, sevirumab, pritoxaximab, porgaviximab, REGN-EB3, obiltoxaximab, gedivumab, foravirumab, larcaviximab, motavizumab, palivizumab, rafivirumab, regavirumab, tuvirumab, cosfroviximab, felvizumab, atidortoxumab, edobacomab, nebacumab, pateclizumab, raxibacumab, urtoxazumab, tosatoxumab, berlimatoxumab, CR6261, diridavumab, firivumab, lesofavumab, navivumab, exbivirumab, lenvervimab, bavituximab, bezlotoxumab, efungumab, leronlimab, nirsevimab, pagibaximab, panobacumab, tefibazumab, ansuvimab, atoltivimab, maftivimab, and odesivimab.

[6101] In some aspects, the antigen binding polypeptide complexes provided herein comprise a VL1 comprising a VL of an antibody selected from the group consisting of libivirumab, rmab, rivabazumab pegol, setoxaximab, suvizumab, suvratoxumab, sevirumab, pritoxaximab, porgaviximab, REGN-EB3, obiltoxaximab, gedivumab, foravirumab, larcaviximab, motavizumab, palivizumab, rafivirumab, regavirumab, tuvirumab, cosfroviximab, felvizumab, atidortoxumab, edobacomab, nebacumab, pateclizumab, raxibacumab, urtoxazumab, tosatoxumab, berlimatoxumab, CR6261, diridavumab, firivumab, lesofavumab, navivumab, exbivirumab, lenvervimab, bavituximab, bezlotoxumab, efungumab, leronlimab, nirsevimab, pagibaximab, panobacumab, tefibazumab, ansuvimab, atoltivimab, maftivimab, and odesivimab.

[6102] In some aspects, the antigen binding polypeptide complexes provided herein comprise a VL2 comprising a VL of an antibody selected from the group consisting of libivirumab, rmab, rivabazumab pegol, setoxaximab, suvizumab, suvratoxumab, sevirumab, pritoxaximab, porgaviximab, REGN-EB3, obiltoxaximab, gedivumab, foravirumab, larcaviximab, motavizumab, palivizumab, rafivirumab, regavirumab, tuvirumab, cosfroviximab, felvizumab, atidortoxumab, edobacomab, nebacumab, pateclizumab, raxibacumab, urtoxazumab, tosatoxumab, berlimatoxumab, CR6261, diridavumab, firivumab, lesofavumab, navivumab, exbivirumab, lenvervimab, bavituximab, bezlotoxumab, efungumab, leronlimab, nirsevimab, pagibaximab, panobacumab, tefibazumab, ansuvimab, atoltivimab, maftivimab, and odesivimab.

[6103] In some aspects, the antigen binding polypeptide complexes provided herein comprise a VL3 comprising a VL of an antibody selected from the group consisting of libivirumab, rmab, rivabazumab pegol, setoxaximab, suvizumab, suvratoxumab, sevirumab, pritoxaximab, porgaviximab, REGN-EB3, obiltoxaximab, gedivumab, foravirumab, larcaviximab, motavizumab, palivizumab, rafivirumab, regavirumab, tuvirumab, cosfroviximab, felvizumab, atidortoxumab, edobacomab, nebacumab, pateclizumab, raxibacumab, urtoxazumab, tosatoxumab, berlimatoxumab, CR6261, diridavumab, firivumab, lesofavumab, navivumab, exbivirumab, lenvervimab, bavituximab, bezlotoxumab, efungumab, leronlimab, nirsevimab, pagibaximab, panobacumab, tefibazumab, ansuvimab, atoltivimab, maftivimab, and odesivimab.

[6104] In some aspects, the antigen binding polypeptide complexes provided herein comprise a VL4 comprising a VL of an antibody selected from the group consisting of libivirumab, rmab, rivabazumab pegol, setoxaximab, suvizumab, suvratoxumab, sevirumab, pritoxaximab, porgaviximab, REGN-EB3, obiltoxaximab, gedivumab, foravirumab, larcaviximab, motavizumab, palivizumab, rafivirumab, regavirumab, tuvirumab, cosfroviximab, felvizumab, atidortoxumab, edobacomab, nebacumab, pateclizumab, raxibacumab, urtoxazumab, tosatoxumab, berlimatoxumab, CR6261, diridavumab, firivumab, lesofavumab, navivumab, exbivirumab, lenvervimab, bavituximab, bezlotoxumab, efungumab, leronlimab, nirsevimab, pagibaximab, panobacumab, tefibazumab, ansuvimab, atoltivimab, maftivimab, and odesivimab.

[6105] In some aspects, the antigen binding polypeptide complexes provided herein comprise a VH1 comprising a VH of an antibody selected from the group consisting of libivirumab, rmab, rivabazumab pegol, setoxaximab, suvizumab, suvratoxumab, sevirumab, pritoxaximab, porgaviximab, REGN-EB3, obiltoxaximab, gedivumab, foravirumab, larcaviximab, motavizumab, palivizumab, rafivirumab, regavirumab, tuvirumab, cosfroviximab, felvizumab, atidortoxumab, edobacomab, nebacumab, pateclizumab, raxibacumab, urtoxazumab, tosatoxumab, berlimatoxumab, CR6261, diridavumab, firivumab, lesofavumab, navivumab, exbivirumab, lenvervimab, bavituximab, bezlotoxumab, efungumab, leronlimab, nirsevimab, pagibaximab, panobacumab, tefibazumab, ansuvimab, atoltivimab, maftivimab, and odesivimab.

[6106] In some aspects, the antigen binding polypeptide complexes provided herein comprise a VH2 comprising a VH of an antibody selected from the group consisting of libivirumab, rmab, rivabazumab pegol, setoxaximab, suvizumab, suvratoxumab, sevirumab, pritoxaximab, porgaviximab, REGN-EB3, obiltoxaximab, gedivumab, foravirumab, larcaviximab, motavizumab, palivizumab, rafivirumab, regavirumab, tuvirumab, cosfroviximab, felvizumab, atidortoxumab, edobacomab, nebacumab, pateclizumab, raxibacumab, urtoxazumab, tosatoxumab, berlimatoxumab, CR6261, diridavumab, firivumab, lesofavumab, navivumab, exbivirumab, lenvervimab, bavituximab, bezlotoxumab, efungumab, leronlimab, nirsevimab, pagibaximab, panobacumab, tefibazumab, ansuvimab, atoltivimab, maftivimab, and odesivimab.

[6107] In some aspects, the antigen binding polypeptide complexes provided herein comprise a VH3 comprising a VH of an antibody selected from the group consisting of libivirumab, rmab, rivabazumab pegol, setoxaximab, suvizumab, suvratoxumab, sevirumab, pritoxaximab, porgaviximab, REGN-EB3, obiltoxaximab, gedivumab, foravirumab, larcaviximab, motavizumab, palivizumab, rafivirumab, regavirumab, tuvirumab, cosfroviximab, felvizumab, atidortoxumab, edobacomab, nebacumab, pateclizumab, raxibacumab, urtoxazumab, tosatoxumab, berlimatoxumab, CR6261, diridavumab, firivumab, lesofavumab, navivumab, exbivirumab, lenvervimab, bavituximab, bezlotoxumab, efungumab, leronlimab, nirsevimab, pagibaximab, panobacumab, tefibazumab, ansuvimab, atoltivimab, maftivimab, and odesivimab.

[6108] In some aspects, the antigen binding polypeptide complexes provided herein comprise a VH4 comprising a VH of an antibody selected from the group consisting of libivirumab, rmab, rivabazumab pegol, setoxaximab, suvizumab, suvratoxumab, sevirumab, pritoxaximab, porgaviximab, REGN-EB3, obiltoxaximab, gedivumab, foravirumab, larcaviximab, motavizumab, palivizumab, rafivirumab, regavirumab, tuvirumab, cosfroviximab, felvizumab, atidortoxumab, edobacomab, nebacumab, pateclizumab, raxibacumab, urtoxazumab, tosatoxumab, berlimatoxumab, CR6261, diridavumab, firivumab, lesofavumab, navivumab, exbivirumab, lenvervimab, bavituximab, bezlotoxumab, efungumab, leronlimab, nirsevimab, pagibaximab, panobacumab, tefibazumab, ansuvimab, atoltivimab, maftivimab, and odesivimab.

[6109] In some aspects, the antigen binding polypeptide complexes provided herein comprise a VL1 comprising (i) a complementarity determining region (CDR) 1 having an amino acid sequence that is at least 65%, at least 70%, at least 75%, at least 80%, at least 85%, at least 90%, at least 95%, at least 99%, or 100% identical to any one of SEQ ID NOs: 1428, 1793, 1798, 1810, 1817, 1824, 1977, 1985, 1993 and 2001; (ii) a CDR2 having an amino acid sequence that is at least 65%, at least 70%, at least 75%, at least 80%, at least 85%, at least 90%, at least 95%, at least 99%, or 100% identical to any one of SEQ ID NOS: 1978, 1986, 1994, and 2002; or at least 65%, at least 70%, at least 75%, at least 80%, at least 85%, at least 90%, at least 95%, at least 99%, or 100% identical to any one of amino acid sequences YTS, DTS, GAS, and AAS; and (iii) a CDR3 having an amino acid sequence that is at least 65%, at least 70%, at least 75%, at least 80%, at least 85%, at least 90%, at least 95%, at least 99%, or 100% identical to any one of SEQ ID NOs: 1229, 1799, 1805, 1811, 1818, 1825, 1979, 1987, 1995, and 2003.

[6110] In some aspects, the antigen binding polypeptide complexes provided herein comprise a VL2 comprising (i) a complementarity determining region (CDR) 1 having an amino acid sequence that is at least 65%, at least 70%, at least 75%, at least 80%, at least 85%, at least 90%, at least 95%, at least 99%, or 100% identical to any one of SEQ ID NOs: 1428, 1793, 1798, 1810, 1817, 1824, 1977, 1985, 1993 and 2001; (ii) a CDR2 having an amino acid sequence that is at least 65%, at least 70%, at least 75%, at least 80%, at least 85%, at least 90%, at least 95%, at least 99%, or 100% identical to any one of SEQ ID NOS: 1978, 1986, 1994, and 2002; or at least 65%, at least 70%, at least 75%, at least 80%, at least 85%, at least 90%, at least 95%, at least 99%, or 100% identical to any one of amino acid sequences YTS, DTS, GAS, and AAS; and (iii) a CDR3 having an amino acid sequence that is at least 65%, at least 70%, at least 75%, at least 80%, at least 85%, at least 90%, at least 95%, at least 99%, or 100% identical to any one of SEQ ID NOs: 1229, 1799, 1805, 1811, 1818, 1825, 1979, 1987, 1995, and 2003.

[6111] In some aspects, the antigen binding polypeptide complexes provided herein comprise a VL3 comprising (i) a complementarity determining region (CDR) 1 having an amino acid sequence that is at least 65%, at least 70%, at least 75%, at least 80%, at least 85%, at least 90%, at least 95%, at least 99%, or 100% identical to any one of SEQ ID NOs: 1428, 1793, 1798, 1810, 1817, 1824, 1977, 1985, 1993 and 2001; (ii) a CDR2 having an amino acid sequence that is at least 65%, at least 70%, at least 75%, at least 80%, at least 85%, at least 90%, at least 95%, at least 99%, or 100% identical to any one of SEQ ID NOs: 1978, 1986, 1994, and 2002; or at least 65%, at least 70%, at least 75%, at least 80%, at least 85%, at least 90%, at least 95%, at least 99%, or 100% identical to any one of amino acid sequences YTS, DTS, GAS, and AAS; and (iii) a CDR3 having an amino acid sequence that is at least 65%, at least 70%, at least 75%, at least 80%, at least 85%, at least 90%, at least 95%, at least 99%, or 100% identical to any one of SEQ ID NOs: 1229, 1799, 1805, 1811, 1818, 1825, 1979, 1987, 1995, and 2003.

[6112] In some aspects, the antigen binding polypeptide complexes provided herein comprise a VL4 comprising (i) a complementarity determining region (CDR) 1 having an amino acid sequence that is at least 65%, at least 70%, at least 75%, at least 80%, at least 85%, at least 90%, at least 95%, at least 99%, or 100% identical to any one of SEQ ID NOs: 1428, 1793, 1798, 1810, 1817, 1824, 1977, 1985, 1993 and 2001; (ii) a CDR2 having an amino acid sequence that is at least 65%, at least 70%, at least 75%, at least 80%, at least 85%, at least 90%, at least 95%, at least 99%, or 100% identical to any one of SEQ ID NOs: 1978, 1986, 1994, and 2002; or at least 65%, at least 70%, at least 75%, at least 80%, at least 85%, at least 90%, at least 95%, at least 99%, or 100% identical to any one of amino acid sequences YTS, DTS, GAS, and AAS; and (iii) a CDR3 having an amino acid sequence that is at least 65%, at least 70%, at least 75%, at least 80%, at least 85%, at least 90%, at least 95%, at least 99%, or 100% identical to any one of SEQ ID NOs: 1229, 1799, 1805, 1811, 1818, 1825, 1979, 1987, 1995, and 2003.

[6113] In some aspects, the antigen binding polypeptide complexes provided herein comprise a VH1 comprising (i) a complementarity determining region (CDR) 1 having an amino acid sequence that is at least 65%, at least 70%, at least 75%, at least 80%, at least 85%, at least 90%, at least 95%, at least 99%, or 100% identical to any one of SEQ ID NOs: 1577, 1795, 1801, 1813, 1820, 1827, 1981, 1989, 1997, and 2005; (ii) a CDR2 having an amino acid sequence that is at least 65%, at least 70%, at least 75%, at least 80%, at least 85%, at least 90%, at least 95%, at least 99%, or 100% identical to any one of SEQ ID NOs: 1159, 1802, 1807, 1814, 1821, 1828, 1982, 1990, 1998, and 2006; and (iii) a CDR3 having an amino acid sequence that is at least 65%, at least 70%, at least 75%, at least 80%, at least 85%, at least 90%, at least 95%, at least 99%, or 100% identical to any one of SEQ ID NOs: 1796, 1803, 1808, 1815, 1822, 1829, 1983, 1991, 1999, and 2007.

[6114] In some aspects, the antigen binding polypeptide complexes provided herein comprise a VH2 comprising (i) a complementarity determining region (CDR) 1 having an amino acid sequence that is at least 65%, at least 70%, at least 75%, at least 80%, at least 85%, at least 90%, at least 95%, at least 99%, or 100% identical to any one of SEQ ID NOs: 1577, 1795, 1801, 1813, 1820, 1827, 1981, 1989, 1997, and 2005; (ii) a CDR2 having an amino acid sequence that is at least 65%, at least 70%, at least 75%, at least 80%, at least 85%, at least 90%, at least 95%, at least 99%, or 100% identical to any one of SEQ ID NOs: 1159, 1802, 1807, 1814, 1821, 1828, 1982, 1990, 1998, and 2006; and (iii) a CDR3 having an amino acid sequence that is at least 65%, at least 70%, at least 75%, at least 80%, at least 85%, at least 90%, at least 95%, at least 99%, or 100% identical to any one of SEQ ID NOs: 1796, 1803, 1808, 1815, 1822, 1829, 1983, 1991, 1999, and 2007.

[6115] In some aspects, the antigen binding polypeptide complexes provided herein comprise a VH3 comprising (i) a complementarity determining region (CDR) 1 having an amino acid sequence that is at least 65%, at least 70%, at least 75%, at least 80%, at least 85%, at least 90%, at least 95%, at least 99%, or 100% identical to any one of SEQ ID NOs: 1577, 1795, 1801, 1813, 1820, 1827, 1981, 1989, 1997, and 2005; (ii) a CDR2 having an amino acid sequence that is at least 65%, at least 70%, at least 75%, at least 80%, at least 85%, at least 90%, at least 95%, at least 99%, or 100% identical to any one of SEQ ID NOs: 1159, 1802, 1807, 1814, 1821, 1828, 1982, 1990, 1998, and 2006; and (iii) a CDR3 having an amino acid sequence that is at least 65%, at least 70%, at least 75%, at least 80%, at least 85%, at least 90%, at least 95%, at least 99%, or 100% identical to any one of SEQ ID NOs: 1796, 1803, 1808, 1815, 1822, 1829, 1983, 1991, 1999, and 2007.

[6116] In some aspects, the antigen binding polypeptide complexes provided herein comprise a VH4 comprising (i) a complementarity determining region (CDR) 1 having an amino acid sequence that is at least 65%, at least 70%, at least 75%, at least 80%, at least 85%, at least 90%, at least 95%, at least 99%, or 100% identical to any one of SEQ ID NOs: 1577, 1795, 1801, 1813, 1820, 1827, 1981, 1989, 1997, and 2005; (ii) a CDR2 having an amino acid sequence that is at least 65%, at least 70%, at least 75%, at least 80%, at least 85%, at least 90%, at least 95%, at least 99%, or 100% identical to any one of SEQ ID NOs: 1159, 1802, 1807, 1814, 1821, 1828, 1982, 1990, 1998, and 2006; and (iii) a CDR3 having an amino acid sequence that is at least 65%, at least 70%, at least 75%, at least 80%, at least 85%, at least 90%, at least 95%, at least 99%, or 100% identical to any one of SEQ ID NOs: 1796, 1803, 1808, 1815, 1822, 1829, 1983, 1991, 1999, and 2007.

[6117] In some aspects, the antigen binding polypeptide complexes provided herein comprise a VL1 comprising an amino acid sequence that is at least 65%, at least 70%, at least 75%, at least 80%, at least 85%, at least 90%, at least 95%, at least 99%, or 100% identical to any one of SEQ ID NOs: 1794, 1800, 1806, 1812, 1819, 1826, 1980, 1988, 1996, and 2004.

[6118] In some aspects, the antigen binding polypeptide complexes provided herein comprise a VL2 comprising an amino acid sequence that is at least 65%, at least 70%, at least 75%, at least 80%, at least 85%, at least 90%, at least 95%, at least 99%, or 100% identical to any one of SEQ ID NOs: 1794, 1800, 1806, 1812, 1819, 1826, 1980, 1988, 1996, and 2004.

[6119] In some aspects, the antigen binding polypeptide complexes provided herein comprise a VL3 comprising an amino acid sequence that is at least 65%, at least 70%, at least 75%, at least 80%, at least 85%, at least 90%, at least 95%, at least 99%, or 100% identical to any one of SEQ ID NOs: 1794, 1800, 1806, 1812, 1819, 1826, 1980, 1988, 1996, and 2004.

[6120] In some aspects, the antigen binding polypeptide complexes provided herein comprise a VL4 comprising an amino acid sequence that is at least 65%, at least 70%, at least 75%, at least 80%, at least 85%, at least 90%, at least 95%, at least 99%, or 100% identical to any one of SEQ ID NOs: 1794, 1800, 1806, 1812, 1819, 1826, 1980, 1988, 1996, and 2004.

[6121] In some aspects, the antigen binding polypeptide complexes provided herein comprise a VH1 comprising an amino acid sequence that is at least 65%, at least 70%, at least 75%, at least 80%, at least 85%, at least 90%, at least 95%, at least 99%, or 100% identical to any one of SEQ ID NOs 1797, 1804, 1809, 1816, 1823, 1830, 1984, 1992, 2000, and 2008.

[6122] In some aspects, the antigen binding polypeptide complexes provided herein comprise a VH2 comprising an amino acid sequence that is at least 65%, at least 70%, at least 75%, at least 80%, at least 85%, at least 90%, at least 95%, at least 99%, or 100% identical to any one of SEQ ID NOs 1797, 1804, 1809, 1816, 1823, 1830, 1984, 1992, 2000, and 2008.

[6123] In some aspects, the antigen binding polypeptide complexes provided herein comprise a VH3 comprising an amino acid sequence that is at least 65%, at least 70%, at least 75%, at least 80%, at least 85%, at least 90%, at least 95%, at least 99%, or 100% identical to any one of SEQ ID NOs 1797, 1804, 1809, 1816, 1823, 1830, 1984, 1992, 2000, and 2008.

[6124] In some aspects, the antigen binding polypeptide complexes provided herein comprise a VH4 comprising an amino acid sequence that is at least 65%, at least 70%, at least 75%, at least 80%, at least 85%, at least 90%, at least 95%, at least 99%, or 100% identical to any one of SEQ ID NOs 1797, 1804, 1809, 1816, 1823, 1830, 1984, 1992, 2000, and 2008.

[6125] In some aspects, the other-pathology antigen is selected from the group consisting of Amyloid beta, β-amyloid, PCSK9, IFN-α/β receptor. Rhesus factor, nerve growth factor (NGF), DPP4, fibrin II beta chain, ACVR2B, serum amyloid A protein SOST, FGF 23, VWF, tissue factor pathway inhibitor (TFPI), 1-40 and 1-42, selectin P, glucagon receptor (GCGR), amyloid P component, GDF-8, CXCL10 IP-10, repulsive guidance molecule A RGMA, IFN-γ, activated F9/F10, calcitonin gene-related peptide (CGRP), angiopoietin 3, IFN receptor, IFN-γ, calcitonin, β-amyloid 1-40 and 1-42, tau protein, dabigatran, cardiac myosin, selectin P, Complement factor D (CFD), kallikrein, GDF-8, IGHE, tissue factor pathway inhibitor (TFPI), GMCSF receptor α-chain, amyloid, IgE Fc region, MASP-2, oxLDL, GMCSF, NOGO-A, Alpha-synuclein, NGF, myelin-associated glycoprotein, RHD (gene) (RHD), sclerostin, FCGRT, sclerostin SOST, mucosal addressin cell adhesion molecule, myostatin, RSVFR, complement component 1s C1s, C5, and IL31.

[6126] In some aspects, the antigen binding polypeptide complexes provided herein comprise a VL1 comprising a light chain complementarity determining region 1 (LCDR1), LCDR2, and/or LCDR3 of an antibody selected from the group consisting of aducanumab, alirocumab, frovocimab, lodelcizumab, bococizumab, evolocumab, ralpancizumab, anifrolumab, atorolimumab, bapineuzumab, bedinvetmab, begelomab, biciromab, bimagrumab, birtamimab, blosozumab, burosumab, caplacizumab, concizumab, crenezumab, crizanlizumab, crotedumab, dezamizumab, domagrozumab, donanemab, eldelumab, elezanumab, emapalumab, emicizumab, eptinezumab, erenumab, evinacumab, faralimomab, fasinumab, fontolizumab, fremanezumab, frunevetmab, fulranumab, galcanezumab, gantenerumab, gosuranemab, idarucizumab, imciromab, inclacumab, lampalizumab, lanadelumab, landogrozumab, lecanemab, ligelizumab, marstacimab, mavrilimumab, morolimumab, NEOD001, omalizumab, oMS721, orticumab, otilimab, ozanezumab, ponezumab, prasinezumab, quilizumab, ranevetmab, refanezumab, roledumab, romosozumab, rozanolixizumab, setrusumab, SHP647, solanezumab, stamulumab, suptavumab, sutimlimab, tanezumab, crovalimab, and lokivetmab.

[6127] In some aspects, the antigen binding polypeptide complexes provided herein comprise a VL2 comprising a light chain complementarity determining region 1 (LCDR1), LCDR2, and/or LCDR3 of an antibody selected from the group consisting of aducanumab, alirocumab, frovocimab, lodelcizumab, bococizumab, evolocumab, ralpancizumab, anifrolumab, atorolimumab, bapineuzumab, bedinvetmab, begelomab, biciromab, bimagrumab, birtamimab, blosozumab, burosumab, caplacizumab, concizumab, crenezumab, crizanlizumab, crotedumab, dezamizumab, domagrozumab, donanemab, eldelumab, elezanumab, emapalumab, emicizumab, eptinezumab, erenumab, evinacumab, faralimomab, fasinumab, fontolizumab, fremanezumab, frunevetmab, fulranumab, galcanezumab, gantenerumab, gosuranemab, idarucizumab, imciromab, inclacumab, lampalizumab, lanadelumab, landogrozumab, lecanemab, ligelizumab, marstacimab, mavrilimumab, morolimumab, NEOD001, omalizumab, oMS721, orticumab, otilimab, ozanezumab, ponezumab, prasinezumab, quilizumab, ranevetmab, refanezumab, roledumab, romosozumab, rozanolixizumab, setrusumab, SHP647, solanezumab, stamulumab, suptavumab, sutimlimab, tanezumab, crovalimab, and lokivetmab.

[6128] In some aspects, the antigen binding polypeptide complexes provided herein comprise a VL3 comprising a light chain complementarity determining region 1 (LCDR1), LCDR2, and/or LCDR3 of an antibody selected from the group consisting of aducanumab, alirocumab, frovocimab, lodelcizumab, bococizumab, evolocumab, ralpancizumab, anifrolumab, atorolimumab, bapineuzumab, bedinvetmab, begelomab, biciromab, bimagrumab, birtamimab, blosozumab, burosumab, caplacizumab, concizumab, crenezumab, crizanlizumab, crotedumab, dezamizumab, domagrozumab, donanemab, eldelumab, elezanumab, emapalumab, emicizumab, eptinezumab, erenumab, evinacumab, faralimomab, fasinumab, fontolizumab, fremanezumab, frunevetmab, fulranumab, galcanezumab, gantenerumab, gosuranemab, idarucizumab, imciromab, inclacumab, lampalizumab, lanadelumab, landogrozumab, lecanemab, ligelizumab, marstacimab, mavrilimumab, morolimumab, NEOD001, omalizumab, oMS721, orticumab, otilimab, ozanezumab, ponezumab, prasinezumab, quilizumab, ranevetmab, refanezumab, roledumab, romosozumab, rozanolixizumab, setrusumab, SHP647, solanezumab, stamulumab, suptavumab, sutimlimab, tanezumab, crovalimab, and lokivetmab.

[6129] In some aspects, the antigen binding polypeptide complexes provided herein comprise a VL4 comprising a light chain complementarity determining region 1 (LCDR1), LCDR2, and/or LCDR3 of an antibody selected from the group consisting of aducanumab, alirocumab, frovocimab, lodelcizumab, bococizumab, evolocumab, ralpancizumab, anifrolumab, atorolimumab, bapineuzumab, bedinvetmab, begelomab, biciromab, bimagrumab, birtamimab, blosozumab, burosumab, caplacizumab, concizumab, crenezumab, crizanlizumab, crotedumab, dezamizumab, domagrozumab, donanemab, eldelumab, elezanumab, emapalumab, emicizumab, eptinezumab, erenumab, evinacumab, faralimomab, fasinumab, fontolizumab, fremanezumab, frunevetmab, fulranumab, galcanezumab, gantenerumab, gosuranemab, idarucizumab, imciromab, inclacumab, lampalizumab, lanadelumab, landogrozumab, lecanemab, ligelizumab, marstacimab, mavrilimumab, morolimumab, NEOD001, omalizumab, oMS721, orticumab, otilimab, ozanezumab, ponezumab, prasinezumab, quilizumab, ranevetmab, refanezumab, roledumab, romosozumab, rozanolixizumab, setrusumab, SHP647, solanezumab, stamulumab, suptavumab, sutimlimab, tanezumab, crovalimab, and lokivetmab.

[6130] In some aspects, the antigen binding polypeptide complexes provided herein comprise a VH1 comprising a heavy chain complementarity determining region 1 (HCDR1), HCDR2, and/or HCDR3 of an antibody selected from the group consisting of aducanumab, alirocumab, frovocimab, lodelcizumab, bococizumab, evolocumab, ralpancizumab, anifrolumab, atorolimumab, bapineuzumab, bedinvetmab, begelomab, biciromab, bimagrumab, birtamimab, blosozumab, burosumab, caplacizumab, concizumab, crenezumab, crizanlizumab, crotedumab, dezamizumab, domagrozumab, donanemab, eldelumab, cleanumab, emapalumab, emicizumab, eptinezumab, erenumab, evinacumab, faralimomab, fasinumab, fontolizumab, fremanezumab, frunevetmab, fulranumab, galcanezumab, gantenerumab, gosuranemab, idarucizumab, imciromab, inclacumab, lampalizumab, lanadelumab, landogrozumab, lecanemab, ligelizumab, marstacimab, mavrilimumab, morolimumab, NEOD001, omalizumab, oMS721, orticumab, otilimab, ozanezumab, ponezumab, prasinezumab, quilizumab, ranevetmab, refanezumab, roledumab, romosozumab, rozanolixizumab, setrusumab, SHP647, solanezumab, stamulumab, suptavumab, sutimlimab, tanezumab, crovalimab, and lokivetmab.

[6131] In some aspects, the antigen binding polypeptide complexes provided herein comprise a VH2 comprising a heavy chain complementarity determining region 1 (HCDR1), HCDR2, and/or HCDR3 of an antibody selected from the group consisting of aducanumab, alirocumab, frovocimab, lodelcizumab, bococizumab, evolocumab, ralpancizumab, anifrolumab, atorolimumab, bapineuzumab, bedinvetmab, begelomab, biciromab, bimagrumab, birtamimab, blosozumab, burosumab, caplacizumab, concizumab, crenezumab, crizanlizumab, crotedumab, dezamizumab, domagrozumab, donanemab, eldelumab, elezanumab, emapalumab, emicizumab, eptinezumab, erenumab, evinacumab, faralimomab, fasinumab, fontolizumab, fremanezumab, frunevetmab, fulranumab, galcanezumab, gantenerumab, gosuranemab, idarucizumab, imciromab, inclacumab, lampalizumab, lanadelumab, landogrozumab, lecanemab, ligelizumab, marstacimab, mavrilimumab, morolimumab, NEOD001, omalizumab, oMS721, orticumab, otilimab, ozanezumab, ponezumab, prasinezumab, quilizumab, ranevetmab, refanezumab, roledumab, romosozumab, rozanolixizumab, setrusumab, SHP647, solanezumab, stamulumab, suptavumab, sutimlimab, tanezumab, crovalimab, and lokivetmab.

[6132] In some aspects, the antigen binding polypeptide complexes provided herein comprise a VH3 comprising a heavy chain complementarity determining region 1 (HCDR1), HCDR2, and/or HCDR3 of an antibody selected from the group consisting of aducanumab, alirocumab, frovocimab, lodelcizumab, bococizumab, evolocumab, ralpancizumab, anifrolumab, atorolimumab, bapineuzumab, bedinvetmab, begelomab, biciromab, bimagrumab, birtamimab, blosozumab, burosumab, caplacizumab, concizumab, crenezumab, crizanlizumab, crotedumab, dezamizumab, domagrozumab, donanemab, eldelumab, elezanumab, emapalumab, emicizumab, eptinezumab, erenumab, evinacumab, faralimomab, fasinumab, fontolizumab, fremanezumab, frunevetmab, fulranumab, galcanezumab, gantenerumab, gosuranemab, idarucizumab, imciromab, inclacumab, lampalizumab, lanadelumab, landogrozumab, lecanemab, ligelizumab, marstacimab, mavrilimumab, morolimumab, NEOD001, omalizumab, oMS721, orticumab, otilimab, ozanezumab, ponezumab, prasinezumab, quilizumab, ranevetmab, refanezumab, roledumab, romosozumab, rozanolixizumab, setrusumab, SHP647, solanezumab, stamulumab, suptavumab, sutimlimab, tanezumab, crovalimab, and lokivetmab.

[6133] In some aspects, the antigen binding polypeptide complexes provided herein comprise a VH4 comprising a heavy chain complementarity determining region 1 (HCDR1), HCDR2, and/or HCDR3 of an antibody selected from the group consisting of aducanumab, alirocumab, frovocimab, lodelcizumab, bococizumab, evolocumab, ralpancizumab, anifrolumab, atorolimumab, bapineuzumab, bedinvetmab, begelomab, biciromab, bimagrumab, birtamimab, blosozumab, burosumab, caplacizumab, concizumab, crenezumab, crizanlizumab, crotedumab, dezamizumab, domagrozumab, donanemab, eldelumab, elezanumab, emapalumab, emicizumab, eptinezumab, erenumab, evinacumab, faralimomab, fasinumab, fontolizumab, fremanezumab, frunevetmab, fulranumab, galcanezumab, gantenerumab, gosuranemab, idarucizumab, imciromab, inclacumab, lampalizumab, lanadelumab, landogrozumab, lecanemab, ligelizumab, marstacimab, mavrilimumab, morolimumab, NEOD001, omalizumab, oMS721, orticumab, otilimab, ozanezumab, ponezumab, prasinezumab, quilizumab, ranevetmab, refanezumab, roledumab, romosozumab, rozanolixizumab, setrusumab, SHP647, solanezumab, stamulumab, suptavumab, sutimlimab, tanezumab, crovalimab, and lokivetmab.

[6134] In some aspects, the antigen binding polypeptide complexes provided herein comprise a VL1 comprising a VL of an antibody selected from the group consisting of aducanumab, alirocumab, frovocimab, lodelcizumab, bococizumab, evolocumab, ralpancizumab, anifrolumab, atorolimumab, bapineuzumab, bedinvetmab, begelomab, biciromab, bimagrumab, birtamimab, blosozumab, burosumab, caplacizumab, concizumab, crenezumab, crizanlizumab, crotedumab, dezamizumab, domagrozumab, donanemab, eldelumab, elezanumab, emapalumab, emicizumab, eptinezumab, erenumab, evinacumab, faralimomab, fasinumab, fontolizumab, fremanezumab, frunevetmab, fulranumab, galcanezumab, gantenerumab, gosuranemab, idarucizumab, imciromab, inclacumab, lampalizumab, lanadelumab, landogrozumab, lecanemab, ligelizumab, marstacimab, mavrilimumab, morolimumab, NEOD001, omalizumab, oMS721, orticumab, otilimab, ozanezumab, ponezumab, prasinezumab, quilizumab, ranevetmab, refanezumab, roledumab, romosozumab, rozanolixizumab, setrusumab, SHP647, solanezumab, stamulumab, suptavumab, sutimlimab, tanezumab, crovalimab, and lokivetmab.

[6135] In some aspects, the antigen binding polypeptide complexes provided herein comprise a VL2 comprising a VL of an antibody selected from the group consisting of aducanumab, alirocumab, frovocimab, lodelcizumab, bococizumab, evolocumab, ralpancizumab, anifrolumab, atorolimumab, bapineuzumab, bedinvetmab, begelomab, biciromab, bimagrumab, birtamimab, blosozumab, burosumab, caplacizumab, concizumab, crenezumab, crizanlizumab, crotedumab, dezamizumab, domagrozumab, donanemab, eldelumab, elezanumab, emapalumab, emicizumab, eptinezumab, erenumab, evinacumab, faralimomab, fasinumab, fontolizumab, fremanezumab, frunevetmab, fulranumab, galcanezumab, gantenerumab, gosuranemab, idarucizumab, imciromab, inclacumab, lampalizumab, lanadelumab, landogrozumab, lecanemab, ligelizumab, marstacimab, mavrilimumab, morolimumab, NEOD001, omalizumab, oMS721, orticumab, otilimab, ozanezumab, ponezumab, prasinezumab, quilizumab, ranevetmab, refanezumab, roledumab, romosozumab, rozanolixizumab, setrusumab, SHP647, solanezumab, stamulumab, suptavumab, sutimlimab, tanezumab, crovalimab, and lokivetmab.

[6136] In some aspects, the antigen binding polypeptide complexes provided herein comprise a VL3 comprising a VL of an antibody selected from the group consisting of aducanumab, alirocumab, frovocimab, lodelcizumab, bococizumab, evolocumab, ralpancizumab, anifrolumab, atorolimumab, bapincuzumab, bedinvetmab, begelomab, biciromab, bimagrumab, birtamimab, blosozumab, burosumab, caplacizumab, concizumab, crenezumab, crizanlizumab, crotedumab, dezamizumab, domagrozumab, donanemab, eldelumab, elezanumab, emapalumab, emicizumab, eptinezumab, erenumab, evinacumab, faralimomab, fasinumab, fontolizumab, fremanezumab, frunevetmab, fulranumab, galcanezumab, gantenerumab, gosuranemab, idarucizumab, imciromab, inclacumab, lampalizumab, lanadelumab, landogrozumab, lecanemab, ligelizumab, marstacimab, mavrilimumab, morolimumab, NEOD001, omalizumab, oMS721, orticumab, otilimab, ozanezumab, ponezumab, prasinezumab, quilizumab, ranevetmab, refanezumab, roledumab, romosozumab, rozanolixizumab, setrusumab, SHP647, solanezumab, stamulumab, suptavumab, sutimlimab, tanezumab, crovalimab, and lokivetmab.

[6137] In some aspects, the antigen binding polypeptide complexes provided herein comprise a VL4 comprising a VL of an antibody selected from the group consisting of aducanumab, alirocumab, frovocimab, lodelcizumab, bococizumab, evolocumab, ralpancizumab, anifrolumab, atorolimumab, bapincuzumab, bedinvetmab, begelomab, biciromab, bimagrumab, birtamimab, blosozumab, burosumab, caplacizumab, concizumab, crenezumab, crizanlizumab, crotedumab, dezamizumab, domagrozumab, donanemab, eldelumab, elezanumab, emapalumab, emicizumab, eptinezumab, erenumab, evinacumab, faralimomab, fasinumab, fontolizumab, fremanezumab, frunevetmab, fulranumab, galcanezumab, gantenerumab, gosuranemab, idarucizumab, imciromab, inclacumab, lampalizumab, lanadelumab, landogrozumab, lecanemab, ligelizumab, marstacimab, mavrilimumab, morolimumab, NEOD001, omalizumab, oMS721, orticumab, otilimab, ozanezumab, ponezumab, prasinezumab, quilizumab, ranevetmab, refanezumab, roledumab, romosozumab, rozanolixizumab, setrusumab, SHP647, solanezumab, stamulumab, suptavumab, sutimlimab, tanezumab, crovalimab, and lokivetmab.

[6138] In some aspects, the antigen binding polypeptide complexes provided herein comprise a VH1 comprising a VH of an antibody selected from the group consisting of aducanumab, alirocumab, frovocimab, lodelcizumab, bococizumab, evolocumab, ralpancizumab, anifrolumab, atorolimumab, bapineuzumab, bedinvetmab, begelomab, biciromab, bimagrumab, birtamimab, blosozumab, burosumab, caplacizumab, concizumab, crenezumab, crizanlizumab, crotedumab, dezamizumab, domagrozumab, donanemab, eldelumab, elezanumab, emapalumab, emicizumab, eptinezumab, erenumab, evinacumab, faralimomab, fasinumab, fontolizumab, fremanezumab, frunevetmab, fulranumab, galcanezumab, gantenerumab, gosuranemab, idarucizumab, imciromab, inclacumab, lampalizumab, lanadelumab, landogrozumab, lecanemab, ligelizumab, marstacimab, mavrilimumab, morolimumab, NEOD001, omalizumab, oMS721, orticumab, otilimab, ozanezumab, ponezumab, prasinezumab, quilizumab, ranevetmab, refanezumab, roledumab, romosozumab, rozanolixizumab, setrusumab, SHP647, solanezumab, stamulumab, suptavumab, sutimlimab, tanezumab, crovalimab, and lokivetmab.

[6139] In some aspects, the antigen binding polypeptide complexes provided herein comprise a VH2 comprising a VH of an antibody selected from the group consisting of aducanumab, alirocumab, frovocimab, lodelcizumab, bococizumab, evolocumab, ralpancizumab, anifrolumab, atorolimumab, bapincuzumab, bedinvetmab, begelomab, biciromab, bimagrumab, birtamimab, blosozumab, burosumab, caplacizumab, concizumab, crenezumab, crizanlizumab, crotedumab, dezamizumab, domagrozumab, donanemab, eldelumab, elezanumab, emapalumab, emicizumab, eptinezumab, erenumab, evinacumab, faralimomab, fasinumab, fontolizumab, fremanezumab, frunevetmab, fulranumab, galcanezumab, gantenerumab, gosuranemab, idarucizumab, imciromab, inclacumab, lampalizumab, lanadelumab, landogrozumab, lecanemab, ligelizumab, marstacimab, mavrilimumab, morolimumab, NEOD001, omalizumab, oMS721, orticumab, otilimab, ozanezumab, ponezumab, prasinezumab, quilizumab, ranevetmab, refanezumab, roledumab, romosozumab, rozanolixizumab, setrusumab, SHP647, solanezumab, stamulumab, suptavumab, sutimlimab, tanezumab, crovalimab, and lokivetmab.

[6140] In some aspects, the antigen binding polypeptide complexes provided herein comprise a VH3 comprising a VH of an antibody selected from the group consisting of aducanumab, alirocumab, frovocimab, lodelcizumab, bococizumab, evolocumab, ralpancizumab, anifrolumab, atorolimumab, bapineuzumab, bedinvetmab, begelomab, biciromab, bimagrumab, birtamimab, blosozumab, burosumab, caplacizumab, concizumab, crenezumab, crizanlizumab, crotedumab, dezamizumab, domagrozumab, donanemab, eldelumab, clezanumab, emapalumab, emicizumab, eptinezumab, erenumab, evinacumab, faralimomab, fasinumab, fontolizumab, fremanezumab, frunevetmab, fulranumab, galcanezumab, gantenerumab, gosuranemab, idarucizumab, imciromab, inclacumab, lampalizumab, lanadelumab, landogrozumab, lecanemab, ligelizumab, marstacimab, mavrilimumab, morolimumab, NEOD001, omalizumab, oMS721, orticumab, otilimab, ozanezumab, ponezumab, prasinezumab, quilizumab, ranevetmab, refanezumab, roledumab, romosozumab, rozanolixizumab, setrusumab, SHP647, solanezumab, stamulumab, suptavumab, sutimlimab, tanezumab, crovalimab, and lokivetmab.

[6141] In some aspects, the antigen binding polypeptide complexes provided herein comprise a VH4 comprising a VH of an antibody selected from the group consisting of aducanumab, alirocumab, frovocimab, lodelcizumab, bococizumab, evolocumab, ralpancizumab, anifrolumab, atorolimumab, bapincuzumab, bedinvetmab, begelomab, biciromab, bimagrumab, birtamimab, blosozumab, burosumab, caplacizumab, concizumab, crenezumab, crizanlizumab, crotedumab, dezamizumab, domagrozumab, donanemab, eldelumab, elezanumab, emapalumab, emicizumab, eptinezumab, erenumab, evinacumab, faralimomab, fasinumab, fontolizumab, fremanezumab, frunevetmab, fulranumab, galcanezumab, gantenerumab, gosuranemab, idarucizumab, imciromab, inclacumab, lampalizumab, lanadelumab, landogrozumab, lecanemab, ligelizumab, marstacimab, mavrilimumab, morolimumab, NEOD001, omalizumab, oMS721, orticumab, otilimab, ozanezumab, ponezumab, prasinezumab, quilizumab, ranevetmab, refanezumab, roledumab, romosozumab, rozanolixizumab, setrusumab, SHP647, solanezumab, stamulumab, suptavumab, sutimlimab, tanezumab, crovalimab, and lokivetmab.

[6142] In some aspects, the antigen binding polypeptide complexes provided herein comprise a VL1 comprising (i) a complementarity determining region (CDR) 1 having an amino acid sequence that is at least 65%, at least 70%, at least 75%, at least 80%, at least 85%, at least 90%, at least 95%, at least 99%, or 100% identical to any one of SEQ ID NOs: 1120, 1228, 1359, 1519, 1831, 1838, 1845, 1852, 1859, 1866, 1872, 1878, 1885, 1891, 1898, 1905, 1911, 1917, 1924, 1931, 1938, 1945, and 1963; (ii) a CDR2 having an amino acid sequence that is at least 65%, at least 70%, at least 75%, at least 80%, at least 85%, at least 90%, at least 95%, at least 99%, or 100% identical to any one of amino acid sequences AAS, AVS, DAS, DNN, EDN, EVS, GAS, GNG, KAS, KVS, LVS, NTD, STS, WAS, and YTS; and (iii) a CDR3 having an amino acid sequence that is at least 65%, at least 70%, at least 75%, at least 80%, at least 85%, at least 90%, at least 95%, at least 99%, or 100% identical to any one of SEQ ID NOs: 1360, 1832, 1839, 1846, 1853, 1860, 1867, 1873, 1879, 1886, 1892, 1899, 1906, 1912, 1918, 1925, 1932, 1939, 1946, 1951, 1957, 1964, and 1970.

[6143] In some aspects, the antigen binding polypeptide complexes provided herein comprise a VL2 comprising (i) a complementarity determining region (CDR) 1 having an amino acid sequence that is at least 65%, at least 70%, at least 75%, at least 80%, at least 85%, at least 90%, at least 95%, at least 99%, or 100% identical to any one of SEQ ID NOs: 1120, 1228, 1359, 1519, 1831, 1838, 1845, 1852, 1859, 1866, 1872, 1878, 1885, 1891, 1898, 1905, 1911, 1917, 1924, 1931, 1938, 1945, and 1963; (ii) a CDR2 having an amino acid sequence that is at least 65%, at least 70%, at least 75%, at least 80%, at least 85%, at least 90%, at least 95%, at least 99%, or 100% identical to any one of amino acid sequences AAS, AVS, DAS, DNN, EDN, EVS, GAS, GNG, KAS, KVS, LVS, NTD, STS, WAS, and YTS; and (iii) a CDR3 having an amino acid sequence that is at least 65%, at least 70%, at least 75%, at least 80%, at least 85%, at least 90%, at least 95%, at least 99%, or 100% identical to any one of SEQ ID NOs: 1360, 1832, 1839, 1846, 1853, 1860, 1867, 1873, 1879, 1886, 1892, 1899, 1906, 1912, 1918, 1925, 1932, 1939, 1946, 1951, 1957, 1964, and 1970.

[6144] In some aspects, the antigen binding polypeptide complexes provided herein comprise a VL3 comprising (i) a complementarity determining region (CDR) 1 having an amino acid sequence that is at least 65%, at least 70%, at least 75%, at least 80%, at least 85%, at least 90%, at least 95%, at least 99%, or 100% identical to any one of SEQ ID NOs: 1120, 1228, 1359, 1519, 1831, 1838, 1845, 1852, 1859, 1866, 1872, 1878, 1885, 1891, 1898, 1905, 1911, 1917, 1924, 1931, 1938, 1945, and 1963; (ii) a CDR2 having an amino acid sequence that is at least 65%, at least 70%, at least 75%, at least 80%, at least 85%, at least 90%, at least 95%, at least 99%, or 100% identical to any one of amino acid sequences AAS, AVS, DAS, DNN, EDN, EVS, GAS, GNG, KAS, KVS, LVS, NTD, STS, WAS, and YTS; and (iii) a CDR3 having an amino acid sequence that is at least 65%, at least 70%, at least 75%, at least 80%, at least 85%, at least 90%, at least 95%, at least 99%, or 100% identical to any one of SEQ ID NOs: 1360, 1832, 1839, 1846, 1853, 1860, 1867, 1873, 1879, 1886, 1892, 1899, 1906, 1912, 1918, 1925, 1932, 1939, 1946, 1951, 1957, 1964, and 1970.

[6145] In some aspects, the antigen binding polypeptide complexes provided herein comprise a VL4 comprising (i) a complementarity determining region (CDR) 1 having an amino acid sequence that is at least 65%, at least 70%, at least 75%, at least 80%, at least 85%, at least 90%, at least 95%, at least 99%, or 100% identical to any one of SEQ ID NOs: 1120, 1228, 1359, 1519, 1831, 1838, 1845, 1852, 1859, 1866, 1872, 1878, 1885, 1891, 1898, 1905, 1911, 1917, 1924, 1931, 1938, 1945, and 1963; (ii) a CDR2 having an amino acid sequence that is at least 65%, at least 70%, at least 75%, at least 80%, at least 85%, at least 90%, at least 95%, at least 99%, or 100% identical to any one of amino acid sequences AAS, AVS, DAS, DNN, EDN, EVS, GAS, GNG, KAS, KVS, LVS, NTD, STS, WAS, and YTS; and (iii) a CDR3 having an amino acid sequence that is at least 65%, at least 70%, at least 75%, at least 80%, at least 85%, at least 90%, at least 95%, at least 99%, or 100% identical to any one of SEQ ID NOs: 1360, 1832, 1839, 1846, 1853, 1860, 1867, 1873, 1879, 1886, 1892, 1899, 1906, 1912, 1918, 1925, 1932, 1939, 1946, 1951, 1957, 1964, and 1970.

[6146] In some aspects, the antigen binding polypeptide complexes provided herein comprise a VH1 comprising (i) a complementarity determining region (CDR) 1 having an amino acid sequence that is at least 65%, at least 70%, at least 75%, at least 80%, at least 85%, at least 90%, at least 95%, at least 99%, or 100% identical to any one of SEQ ID NOs: 1309, 1362, 1437, 1552, 1618, 1639, 1834, 1841, 1848, 1855, 1862, 1881, 1894, 1901, 1920, 1927, 1934, 1941, 1953, 1959, and 1966; (ii) a CDR2 having an amino acid sequence that is at least 65%, at least 70%, at least 75%, at least 80%, at least 85%, at least 90%, at least 95%, at least 99%, or 100% identical to any one of SEQ ID NOs: 1363, 1835, 1842, 1849, 1856, 1863, 1869, 1875, 1882, 1888, 1895, 1902, 1908, 1914, 1921, 1928, 1935, 1942, 1948, 1954, 1960, 1967, and 1972; and (iii) a CDR3 having an amino acid sequence that is at least 65%, at least 70%, at least 75%, at least 80%, at least 85%, at least 90%, at least 95%, at least 99%, or 100% identical to any one of SEQ ID NOs: 1364, 1836, 1843, 1850, 1857, 1864, 1870, 1876, 1883, 1889, 1896, 1903, 1909, 1915, 1922, 1929, 1936, 1943, 1949, 1955, 1961, 1968, and 1973.

[6147] In some aspects, the antigen binding polypeptide complexes provided herein comprise a VH2 comprising (i) a complementarity determining region (CDR) 1 having an amino acid sequence that is at least 65%, at least 70%, at least 75%, at least 80%, at least 85%, at least 90%, at least 95%, at least 99%, or 100% identical to any one of SEQ ID NOs: 1309, 1362, 1437, 1552, 1618, 1639, 1834, 1841, 1848, 1855, 1862, 1881, 1894, 1901, 1920, 1927, 1934, 1941, 1953, 1959, and 1966; (ii) a CDR2 having an amino acid sequence that is at least 65%, at least 70%, at least 75%, at least 80%, at least 85%, at least 90%, at least 95%, at least 99%, or 100% identical to any one of SEQ ID NOs: 1363, 1835, 1842, 1849, 1856, 1863, 1869, 1875, 1882, 1888, 1895, 1902, 1908, 1914, 1921, 1928, 1935, 1942, 1948, 1954, 1960, 1967, and 1972; and (iii) a CDR3 having an amino acid sequence that is at least 65%, at least 70%, at least 75%, at least 80%, at least 85%, at least 90%, at least 95%, at least 99%, or 100% identical to any one of SEQ ID NOs: 1364, 1836, 1843, 1850, 1857, 1864, 1870, 1876, 1883, 1889, 1896, 1903, 1909, 1915, 1922, 1929, 1936, 1943, 1949, 1955, 1961, 1968, and 1973.

[6148] In some aspects, the antigen binding polypeptide complexes provided herein comprise a VH3 comprising (i) a complementarity determining region (CDR) 1 having an amino acid sequence that is at least 65%, at least 70%, at least 75%, at least 80%, at least 85%, at least 90%, at least 95%, at least 99%, or 100% identical to any one of SEQ ID NOs: 1309, 1362, 1437, 1552, 1618, 1639, 1834, 1841, 1848, 1855, 1862, 1881, 1894, 1901, 1920, 1927, 1934, 1941, 1953, 1959, and 1966; (ii) a CDR2 having an amino acid sequence that is at least 65%, at least 70%, at least 75%, at least 80%, at least 85%, at least 90%, at least 95%, at least 99%, or 100% identical to any one of SEQ ID NOs: 1363, 1835, 1842, 1849, 1856, 1863, 1869, 1875, 1882, 1888, 1895, 1902, 1908, 1914, 1921, 1928, 1935, 1942, 1948, 1954, 1960, 1967, and 1972; and (iii) a CDR3 having an amino acid sequence that is at least 65%, at least 70%, at least 75%, at least 80%, at least 85%, at least 90%, at least 95%, at least 99%, or 100% identical to any one of SEQ ID NOs: 1364, 1836, 1843, 1850, 1857, 1864, 1870, 1876, 1883, 1889, 1896, 1903, 1909, 1915, 1922, 1929, 1936, 1943, 1949, 1955, 1961, 1968, and 1973.

[6149] In some aspects, the antigen binding polypeptide complexes provided herein comprise a VH4 comprising (i) a complementarity determining region (CDR) 1 having an amino acid sequence that is at least 65%, at least 70%, at least 75%, at least 80%, at least 85%, at least 90%, at least 95%, at least 99%, or 100% identical to any one of SEQ ID NOs: 1309, 1362, 1437, 1552, 1618, 1639, 1834, 1841, 1848, 1855, 1862, 1881, 1894, 1901, 1920, 1927, 1934, 1941, 1953, 1959, and 1966; (ii) a CDR2 having an amino acid sequence that is at least 65%, at least 70%, at least 75%, at least 80%, at least 85%, at least 90%, at least 95%, at least 99%, or 100% identical to any one of SEQ ID NOs: 1363, 1835, 1842, 1849, 1856, 1863, 1869, 1875, 1882, 1888, 1895, 1902, 1908, 1914, 1921, 1928, 1935, 1942, 1948, 1954, 1960, 1967, and 1972; and (iii) a CDR3 having an amino acid sequence that is at least 65%, at least 70%, at least 75%, at least 80%, at least 85%, at least 90%, at least 95%, at least 99%, or 100% identical to any one of SEQ ID NOs: 1364, 1836, 1843, 1850, 1857, 1864, 1870, 1876, 1883, 1889, 1896, 1903, 1909, 1915, 1922, 1929, 1936, 1943, 1949, 1955, 1961, 1968, and 1973.

[6150] In some aspects, the antigen binding polypeptide complexes provided herein comprise a VL1 comprising an amino acid sequence that is at least 65%, at least 70%, at least 75%, at least 80%, at least 85%, at least 90%, at least 95%, at least 99%, or 100% identical to any one of SEQ ID NOs: 1361, 1833, 1840, 1847, 1854, 1861, 1868, 1874, 1880, 1887, 1893, 1900, 1907, 1913, 1919, 1926, 1933, 1940, 1947, 1952, 1958, 1965, and 1971.

[6151] In some aspects, the antigen binding polypeptide complexes provided herein comprise a VL2 comprising an amino acid sequence that is at least 65%, at least 70%, at least 75%, at least 80%, at least 85%, at least 90%, at least 95%, at least 99%, or 100% identical to any one of SEQ ID NOs: 1361, 1833, 1840, 1847, 1854, 1861, 1868, 1874, 1880, 1887, 1893, 1900, 1907, 1913, 1919, 1926, 1933, 1940, 1947, 1952, 1958, 1965, and 1971.

[6152] In some aspects, the antigen binding polypeptide complexes provided herein comprise a VL3 comprising an amino acid sequence that is at least 65%, at least 70%, at least 75%, at least 80%, at least 85%, at least 90%, at least 95%, at least 99%, or 100% identical to any one of SEQ ID NOs: 1361, 1833, 1840, 1847, 1854, 1861, 1868, 1874, 1880, 1887, 1893, 1900, 1907, 1913, 1919, 1926, 1933, 1940, 1947, 1952, 1958, 1965, and 1971.

[6153] In some aspects, the antigen binding polypeptide complexes provided herein comprise a VL4 comprising an amino acid sequence that is at least 65%, at least 70%, at least 75%, at least 80%, at least 85%, at least 90%, at least 95%, at least 99%, or 100% identical to any one of SEQ ID NOs: 1361, 1833, 1840, 1847, 1854, 1861, 1868, 1874, 1880, 1887, 1893, 1900, 1907, 1913, 1919, 1926, 1933, 1940, 1947, 1952, 1958, 1965, and 1971.

[6154] In some aspects, the antigen binding polypeptide complexes provided herein comprise a VH1 comprising an amino acid sequence that is at least 65%, at least 70%, at least 75%, at least 80%, at least 85%, at least 90%, at least 95%, at least 99%, or 100% identical to any one of SEQ ID NOs: 1365, 1837, 1844, 1851, 1858, 1865, 1871, 1877, 1884, 1890, 1897, 1904, 1910, 1916, 1923, 1930, 1937, 1944, 1950, 1956, 1962, 1969, and 1974.

[6155] In some aspects, the antigen binding polypeptide complexes provided herein comprise a VH2 comprising an amino acid sequence that is at least 65%, at least 70%, at least 75%, at least 80%, at least 85%, at least 90%, at least 95%, at least 99%, or 100% identical to any one of SEQ ID NOs: 1365, 1837, 1844, 1851, 1858, 1865, 1871, 1877, 1884, 1890, 1897, 1904, 1910, 1916, 1923, 1930, 1937, 1944, 1950, 1956, 1962, 1969, and 1974.

[6156] In some aspects, the antigen binding polypeptide complexes provided herein comprise a VH3 comprising an amino acid sequence that is at least 65%, at least 70%, at least 75%, at least 80%, at least 85%, at least 90%, at least 95%, at least 99%, or 100% identical to any one of SEQ ID NOs: 1365, 1837, 1844, 1851, 1858, 1865, 1871, 1877, 1884, 1890, 1897, 1904, 1910, 1916, 1923, 1930, 1937, 1944, 1950, 1956, 1962, 1969, and 1974.

[6157] In some aspects, the antigen binding polypeptide complexes provided herein comprise a VH4 comprising an amino acid sequence that is at least 65%, at least 70%, at least 75%, at least 80%, at least 85%, at least 90%, at least 95%, at least 99%, or 100% identical to any one of SEQ ID NOs: 1365, 1837, 1844, 1851, 1858, 1865, 1871, 1877, 1884, 1890, 1897, 1904, 1910, 1916, 1923, 1930, 1937, 1944, 1950, 1956, 1962, 1969, and 1974.

[6158] In some aspects, one or both of the antigen binding polypeptides comprised in the antigen binding polypeptide complexes disclosed herein, comprise one or more CL, as indicated in the formulas representing the antigen binding polypeptide complexes disclosed herein. In some aspects, the CL comprises an amino acid sequence at least 65%, at least 70%, at least 75%, at least 80%, at least 85%, at least 90%, at least 95%, at least 99%, or 100% identical to any one of SEQ ID NOs: 374, 637, or 1092-1095.

[6159] In some aspects, one or both of the antigen binding polypeptides comprised in the antigen binding polypeptide complexes disclosed herein, comprise one or more CH1, as indicated in the formulas representing the antigen binding polypeptide complexes disclosed herein. In some aspects, the CH1 comprises an amino acid sequence at least 65%, at least 70%, at least 75%, at least 80%, at least 85%, at least 90%, at least 95%, at least 99%, or 100% identical to any one of SEQ ID NOs: 375, 634, 1070, 1071, or 1086-1091.

[6160] In some aspects, one or both of the antigen binding polypeptides comprised in the antigen binding polypeptide complexes provided herein further comprise an Fc region. In some aspects, one or both of the antigen binding polypeptides comprised in the antigen binding polypeptide complexes provided herein further comprise an Fc region at the carboxy-terminus. In some aspects, the Fc region comprises an immunoglobulin heavy chain constant region 2 (CH2) and/or an immunoglobulin heavy chain constant region 3 (CH3). In some aspects, the Fc region further comprises an immunoglobulin hinge (i.e., a hinge region). In some aspects, the hinge region is interposed between a CH1 and a CH2 (i.e., a hinge region is localized between the carboxy terminal residue of a CH1 and the N-terminal residue of a CH2). In some aspects, the hinge region comprises an amino acid sequence at least 65%, at least 70%, at least 75%, at least 80%, at least 85%, at least 90%, at least 95%, at least 99%, or 100% identical to any one of SEQ ID NOs: 635, 636, 1072, 1073, or 1074. In some aspects, the Fc region comprises a CH2 and a CH3. In some aspects, the CH2 comprises an amino acid sequence that is at least 65%, at least 70%, at least 75%, at least 80%, at least 85%, at least 90%, at least 95%, at least 99%, or 100% identical to any one of SEQ ID NOs: 1075-1078. In some aspects, the CH3 comprises an amino acid sequence that is at least 65%, at least 70%, at least 75%, at least 80%, at least 85%, at least 90%, at least 95%, at least 99%, or 100% identical to any one of SEQ ID NOs: 1079-1085. In some aspects, the Fc region comprises an amino acid sequence that is at least 65%, at least 70%, at least 75%, at least 80%, at least 85%, at least 90%, at least 95%, at least 99%, or 100% identical to any one of SEQ ID NOs: 376-380.

[6161] In some aspects, the Fc region comprises one or more amino acid substitutions. In some aspects, the one or more amino acid substitutions comprise one or more half-life extension amino acid substitutions. In some aspects, the one or more half-life extension amino acid substitutions comprise one or more of amino acid substitutions M428L, N434A, N434S, L234F, L235E, P331S, M252Y, S254T, or T256E, or equivalent thereof, based on the EU numbering scheme. In some aspects, the one or more half-life extension amino acid substitutions comprise a LA (M428L and N434A, or equivalent thereof, based on the EU numbering scheme) amino acid substitution. In some aspects, the one or more half-life extension amino acid substitutions comprise a LS (M428L and N434S, or equivalent thereof, based on the EU numbering scheme) amino acid substitution. In some aspects, the one or more half-life extension amino acid substitutions comprise L234F and L235E, or equivalent thereof (based on the EU numbering scheme) amino acid substitutions. In some aspects, the one or more half-life extension amino acid substitutions comprise a TM (L234F, L235E, and P331S, or equivalent thereof, based on the EU numbering scheme) amino acid substitution. In some aspects, the one or more half-life extension amino acid substitutions comprise a YTE (M252Y, S254T, and T256E, or equivalent thereof, based on the EU numbering scheme) amino acid substitution.

[6162] In some aspects, the Fc region comprises at least one knob-into-hole modification. In some aspects, the antigen binding polypeptides complexes disclosed herein are IgG1 or IgG4 antibodies or antigen binding fragments thereof. In some aspects, the knob-into-hole modification comprises one or more of knob substitutions of S354C and T366W, or equivalent thereof, and/or one or more of hole substitutions of Y349C, T366S, L368A, Y407V, or equivalent thereof, or a combination thereof, based on the EU numbering scheme. In some aspects, the Fc region comprises a knob-into-hole modification comprising knob substitutions of S354C and T366W, or equivalent thereof, and/or hole substitutions of Y349C, T366S, L368A, and Y407V, or equivalent thereof, and/or a half-life extension amino acid substitution comprising: a LA (M428L and N434A, or equivalent thereof, based on the EU numbering scheme) amino acid substitution, a LS (M428L and N434S, or equivalent thereof, based on the EU numbering scheme) amino acid substitution, L234F and L235E, or equivalent thereof (based on the EU numbering scheme) amino acid substitutions, a TM (L234F, L235E, and P331S, or equivalent thereof, based on the EU numbering scheme) amino acid substitution, a YTE (M252Y, S254T, and T256E, or equivalent thereof, based on the EU numbering scheme) amino acid substitution, or any combination thereof.

[6163] In some aspects, the Fc region comprises knob substitutions of S354C and T366W, or equivalent thereof, and a half-life extension amino acid substitution comprising: a LA (M428L and N434A, or equivalent thereof, based on the EU numbering scheme) amino acid substitution, a LS (M428L and N434S, or equivalent thereof, based on the EU numbering scheme) amino acid substitution, L234F and L235E, or equivalent thereof (based on the EU numbering scheme) amino acid substitutions, a TM (L234F, L235E, and P331S, or equivalent thereof, based on the EU numbering scheme) amino acid substitution, a YTE (M252Y, S254T, and T256E, or equivalent thereof, based on the EU numbering scheme) amino acid substitution, or any combination thereof.

[6164] In some aspects, the Fc region comprises hole substitutions of Y349C, T366S, L368A, and Y407V, or equivalent thereof, and a half-life extension amino acid substitution comprising: a LA (M428L and N434A, or equivalent thereof, based on the EU numbering scheme) amino acid substitution, a LS (M428L and N434S, or equivalent thereof, based on the EU numbering scheme) amino acid substitution. L234F and L235E, or equivalent thereof (based on the EU numbering scheme) amino acid substitutions, a TM (L234F, L235E, and P331S, or equivalent thereof, based on the EU numbering scheme) amino acid substitution, a YTE (M252Y, S254T, and T256E, or equivalent thereof, based on the EU numbering scheme) amino acid substitution, or any combination thereof.

[6165] In some aspects, one or both of the antigen binding polypeptides comprised in the antigen binding polypeptide complexes disclosed herein comprise one or more Fc effector function knockout mutation. In some aspects, one or both of the antigen binding polypeptides comprised in the antigen binding polypeptide complexes disclosed herein are IgG1 or IgG4 antibodies or antigen binding fragments thereof. In some aspects, the Fc effector function knockout mutation is L234A, L235A, P239A, or equivalent thereof, or a combination thereof, based on the EU numbering scheme.

[6166] In some aspects, one or both of the antigen binding polypeptides comprised in the antigen binding polypeptide complexes disclosed herein comprise a mutation at a glycosylation site. In some aspects, the mutation at a glycosylation site is a mutation at an N-glycosylation site. In some aspects, one or both of the antigen binding polypeptides comprised in the antigen binding polypeptide complexes disclosed herein comprise a VH comprising a mutation at a glycosylation site. In some aspects, the mutation at a glycosylation site is a mutation at an N-glycosylation site. In some aspects, the mutation at an N-glycosylation site is at amino acid N62, or equivalent thereof, of the VH region or equivalent thereof. In some aspects, the mutation at an N-glycosylation site at amino acid N62 is N62Q or N62S, or equivalent thereof.

[6167] In some aspects, one or both of the antigen binding polypeptides comprised in the antigen binding polypeptide complexes disclosed herein, comprise one or more optional linkers. The one or more optional linkers are indicated herein as Ln, wherein n is an integer, and the integer next to each L indicates each L comprised in the antigen binding polypeptides comprised in the antigen binding polypeptide complexes disclosed herein. For example, if an antigen binding polypeptide comprised in the antigen binding polypeptide complexes disclosed herein comprises two linkers, the first linker from N-terminus to C-terminus is herein indicated as L1, and the second linker from N-terminus to C-terminus is herein indicated as L2. If an antigen binding polypeptide complex disclosed herein comprises a first antigen binding polypeptide comprising two linkers, indicated herein as L1 and L2, as explained above, the linkers comprised in the second antigen binding polypeptide are indicated with the following integer, in this example, the first linker from N-terminus to C-terminus of the second antigen binding polypeptide is herein indicated as L3, the second linker from N-terminus to C-terminus of the second antigen binding polypeptide is herein indicated as L3. In some aspects, any one of the optional linkers each independently have a length of from 0 amino acids to about 50 amino acids. In some aspects, any one of the optional linkers each independently have a length of from 5 amino acids to about 40 amino acids.

[6168] In some aspects, any one of the optional linkers are non-immunogenic. In some aspects, any one of the optional linkers do not contain a consensus T cell epitope.

[6169] In some aspects, any of Ln comprises an amino acid sequence of G or A, or an amino acid sequence at least 65%, at least 70%, at least 75%, at least 80%, at least 85%, at least 90%, at least 95%, at least 99%, or 100% identical to amino acid sequence GSS or ASG, or an amino acid sequence at least 65%, at least 70%, at least 75%, at least 80%, at least 85%, at least 90%, at least 95%, at least 99%, or 100% identical to any one of SEQ ID NOs: 333-373 and 967-971. In some aspects. Ln comprises an amino acid sequence at least 65%, at least 70%, at least 75%, at least 80%, at least 85%, at least 90%, at least 95%, at least 99%, or 100% identical to any one of SEQ ID NOs: 333-345 and 967-971.

[6170] In some aspects, an antigen binding polypeptide complex provided herein comprises a first polypeptide, and a second polypeptide; wherein the first polypeptide has a structure represented by VL1-L1-VL2-L2-CH1 or VL2-L1-VL1-L2-CH1; and wherein the second polypeptide has a structure represented by VH1-L3-VH2-L4-CL or VH2-L3-VH1-L4-CL.

[6171] In some aspects, an antigen binding polypeptide complex provided herein comprises a first polypeptide, and a second polypeptide; wherein the first polypeptide has a structure represented by VL1-VL2-CH1-CH2-CH3 or VL2-VL1-CH1-CH2-CH3; and wherein the second polypeptide has a structure represented by VH1-VH2-CL-CH2-CH3 or VH2-VH1-CL-CH2-CH3.

[6172] In some aspects, an antigen binding polypeptide complex provided herein comprises a first polypeptide, and a second polypeptide; wherein the first polypeptide has a structure represented by VL1-L1-VL2-L2-CH1-CH2-CH3 or VL2-L1-VL1-L2-CH1-CH2-CH3; and wherein the second polypeptide has a structure represented by VH1-L3-VH2-L4-CL-CH2-CH3 or VH2-L3-VH1-L4-CL-CH2-CH3.

[6173] In some aspects, an antigen binding polypeptide complex provided herein comprises a first polypeptide, and a second polypeptide; wherein the first polypeptide has a structure represented by VL1-VH1-CL or VH1-VL1-CL; and wherein the second polypeptide has a structure represented by VL2-VH2-CH1 or VH2-VL2-CH1.

[6174] In some aspects, an antigen binding polypeptide complex provided herein comprises a first polypeptide, and a second polypeptide; wherein the first polypeptide has a structure represented by VL1-L1-VH1-L2-CL or VH1-L1-VL1-L2-CL; and wherein the second polypeptide has a structure represented by VL2-L3-VH2-L4-CH1 or VH2-L3-VL2-L4-CH1.

[6175] In some aspects, an antigen binding polypeptide complex provided herein comprises a first polypeptide, and a second polypeptide; wherein the first polypeptide has a structure represented by VL1-VH1-CL-CH2-CH3 or VH1-VL1-CL-CH2-CH3; and wherein the second polypeptide has a structure represented by VL2-VH2-CH1-CH2-CH3 or VH2-VL2-CH1-CH2-CH3.

[6176] In some aspects, an antigen binding polypeptide complex provided herein comprises a first polypeptide, and a second polypeptide; wherein the first polypeptide has a structure represented by VL1-L1-VH1-L2-CL-CH2-CH3 or VH1-L1-VL1-L2-CL-CH2-CH3; and wherein the second polypeptide has a structure represented by VL2-L3-VH2-L4-CH1-CH2-CH3 or VH2-L3-VL2-L4-CH1-CH2-CH3. In some aspects, VL1 is a first immunoglobulin light chain variable region that specifically binds to (i) a tumor-associated antigen (TAA), (ii) an infectious disease antigen that is not a sarbecovirus antigen, or (iii) an other-pathology antigen; VL2 is a second immunoglobulin light chain variable region that specifically binds to (i) a tumor-associated antigen (TAA), (ii) an infectious disease antigen that is not a sarbecovirus antigen, or (iii) an other-pathology antigen; VH1 is a first immunoglobulin heavy chain variable region that specifically binds to (i) a tumor-associated antigen (TAA), (ii) an infectious disease antigen that is not a sarbecovirus antigen, or (iii) an other-pathology antigen; and VH2 is a second immunoglobulin heavy chain variable region that specifically binds to (i) a tumor-associated antigen (TAA), (ii) an infectious disease antigen that is not a sarbecovirus antigen, or (iii) an other-pathology antigen; CH1 is an immunoglobulin heavy chain constant region 1; CL is an immunoglobulin light chain constant region; and L1-L4 are optional amino acid linkers. In any aspect shown herein as a structure from amino terminus to carboxy terminus, and with binding pairs selected from VL and/or VH or other structural regions such as CH1, CL, CH2, CH3, when shown without a specific linker such as L1, L2, etc., such linkers are optionally present in such structures between each designated subsequence VL, VH, etc.

[6177] In some aspects, the VL1 and the VL2 each comprise a CDR1, a CDR2, and a CDR3 that are the same. In some aspects, the VL1 and the VL2 each comprise a CDR1, a CDR2, and a CDR3 that are different.

[6178] In some aspects, the VL1 and the VL2 each comprise an amino acid sequence, wherein the amino acid sequence comprised in VL1 and the amino acid sequence comprised in VL2 are the same. In some aspects, the VL1 and the VL2 each comprise an amino acid sequence, wherein the amino acid sequence comprised in VL1 and the amino acid sequence comprised in VL2 are different.

[6179] In some aspects, the TAA is selected from the group consisting of 5′-nucleotidase, 5T4, A2AR, activin receptor-like kinase 1, adenocarcinoma antigen, ADRB3, AFP, AKAP-4, ALK, alpha-fetoprotein, androgenreceptor, angiopoietin 2, AOC3, APRIL, ATPDase, AXL, B7-4, B7DC, B7H1, B7H2, B7H3, B7H4, B7H5, B7H6, B7H7, B7RP1, BAFF, BAFFR, BCMA, bcr-abl, BlyS, BORIS, BST2, BTK, BTLA, C3, C5, C5a, C5a receptor, CA-125, CAIX, CanAg (a glycoform of MUC1), CCL11, CCL15, CCL17, CCL19, CCL2, CCL20, CCL21, CCL25, CCL3, CCL4, CCL5, CCL7, CCL8, CCR2, CCR3, CCR4, CCR5, CD11, CD11a, CD123, CD125, CD133, CD134, CD137, CD137L, CD147, CD15, CD154, CD160, CD16A, CD171, CD179a, CD18, CD184, CD19, CD2, CD20, CD200, CD22, CD221, CD23, CD24, CD242, CD25, CD27, CD272, CD276, CD278, CD279, CD28, CD3, CD30, CD300LF, CD319, CD33, CD37, CD38, CD39, CD38, CD4, CD40, CD40L, CD41, CD44v6, CD45, CD47, CD49B, CD5, CD51, CD52, CD54, CD56, CD6, CD62L, CD7, CD70, CD72, CD74, CD79a, CD79b, CD80, CD86, CD97, CEA, CEACAM5, claudin 18 isoform 2, CLDN6, CLEC12A, CLEC9, CLEC91, CLL-1, cMet, coagulation factor III, CRTH2, CS1, CSF-1, CSFIR, CSF-2, CSF-3, CTGF, CTLA4, CXCL1, CXCL12, CXCL13, CXCL2, CXCL4, CXCR3, CXORF61, CyclinB1, CYP1B1, dendritic cell-associated lectin 2, DLL3, DLL4, DNGR-1, DR5, E7, E-cadherin, EGFL7, EGFR, EGFRVIII, ELF2M, EMR2, endoglin, ENTPD1, EpCAM, EphA2, EPHA3, ephrin receptor A3, EphrinB2, episialin, ERBB2 (Her2/neu), ERBB3, ERG (TMPRSS2-ETS fusion gene), ETV6-AML, FAP, FCAR, FCER1, FCER1A, FCER2, FCRL5, FGF 23, FGFR, FGFR2, fibronectin extra domain-B, FLAP, FLT3, folate hydrolase, folate receptor 1, folate receptor alpha, folate receptor beta, FOLH1, Fos-relatedantigen1, Frizzled receptor, Fucosyl GM1, GD2, GD3, gelatinase B, Gi24, GITR, GITRL, GloboH, Glutamate carboxypeptidase II, glypican 3, GM3, GP100, GPC1, GPC2, GPC3, gplOO, GPNMB, GPR20, GPR5, GPRC5D, growth differentiation factor 8, GUCY2C, HAVCR1, HER1, HER2, HER3, HGF, HGFR, HHLA2, histone complex, HLA-DR, HMGB1, HMWMAA, HPVE6, hTERT, human telomerase reverse transcriptase, HVEM, ICAM-1, ICOS, ICOSL, IDO, IFNa, IgE, IGF-1, IGF1R, IGF-2, IGF-I receptor, IGLL1, IL1, IL10, IL12, IL13, IL13Ra2, IL-13Ra2, IL13Ra1, IL15, IL17, IL-17A, IL-17AF, IL-17F, IL17Rb, IL18, IL1B, IL1F10, IL-1a, IL-1B, IL2, IL-20, IL22, IL23, IL-23A, IL25, IL2Rbeta, IL-3 receptor, IL-31 receptor A, IL33, IL35, IL4, IL4Ra, IL5, IL5R, IL6, IL7, IL7Ra, IL8, IL9, IL9R, IL1A, IL-llRa, integrin α4, integrin α4 β7, integrin α5β1, integrin αIIbβ3, integrin αvβ3, integrin β7, interleukin 36 receptor IL1RAP, interleukin 36 receptor IL1RL2, intestinal carboxy lesterase, ITGB4, ITK, KIR, KIR2D, KIT, LAG3, LAGE-1a, LAIR1, LAMP1, LCK, legumain, leptin, LewisY, LILRA2, LIV-1, LMP2, LOXL2, LPFS2, LRRC15, LY6K, LY75, LYPD3, MAD-CT-1, MAD-CT-2, MAGEA1, MAGE-A1, MCAM, MCP-1, MelanA/MART1, mesothelin, MHC classII, MIF, ML-IAP, MS4A1, MST1R (RON), MUC1, MUC-1, MUC16, MUC-16, MUC5AC, muthsp70-2, MYCN, NA17, NCA-90 granulocyte antigen, NCAM, NCR3LG1, nectin-4, NGNA ganglioside, NKG2A, NKG2D, NKp46, Notch 1, Notch receptor, NRP1, NTPDase-1, NY-BR-1, NY-ESO-1, o-acetyl-GD2, OR51E2, OX40, OX40L, OY-TES1, p53, p53mutant, PANX3, PAP, PAX3, PAX5, PCDC1, PCDP1, PCTA-1/Galectin8, PD-1, PDGFRA, PDGFR-beta, PD-L1, PD-L2, phosphate-sodium co-transporter, phosphatidylserine, PLAC1, polysialic acid, PROM1, prostase, prostein, PRSS21, PSCA, PSMA, PTK7, RAGE-1, RANKL. Ras mutant, rhIL1O, RhoC, root plate-specific spondin 3, ROR1, ROR2, RTN4, RU1, RU2, S152, sarcoma translocation breakpoints, SART3, scatter factor receptor kinase, SDC1, SIRPalpha, SISP1, SLAMF7, SLC, sLc, SLITRK6, spermprotein17, SPG64, sphingosine-1-phosphate, SSEA-4, SSX2, ST2, STEAP1, STEAP2, surviving and telomerase, Syk kinase, T14, TACI, TAG72, TARP, T-cell receptor, TCRβ, TDO, TEM1/CD248, TEM7R, tenascin C, TGFBETA, TGF-β1, TGF-β2, TGS5, the extracellular portion of the APRIL protein, Tie2, TIGIT, TIM3, TLR, TLR2, TLR4, TLR5, TLR9, TMEF1, TnAg, TNF, TNFa, TNFR superfamily member 4, TNFRSF7, Tp55, TRAC, TRAIL-R1, TRAIL-R2, TRAP, TREM1, TROP2, TRP-2, TSHR, TSLP, TSLPR, tumor antigen CTAA16.88, TWEAK, tyrosinase, TYRPI glycoprotein 75, UPK2, VAP-1, VEGF, VEGFA, VEGFR-1, VEGFR2, vimentin, VISTA, Vstm3, WT1, WUCAM, and XAGE1.

[6180] In some aspects, the antigen binding polypeptide complexes provided herein comprise a VL1 comprising a light chain complementarity determining region 1 (LCDR1), LCDR2, and/or LCDR3 of an antibody selected from the group consisting of losatuxizumab vedotin, utomilumab, urelumab, oleclumab, naptumomab estafenatox, ascrinvacumab, pintumomab, tacatuzumab tetraxetan, nesvacumab, vanucizumab, timolumab, vapaliximab, vepalimomab, enapotamab vedotin, ianalumab, belimumab, tabalumab, tibulizumab, belantamab mafodotin, teclistamab, teclistamab, detumomab, nacolomab tafenatox, eculizumab, lendalizumab, pexelizumab, pozelimab, ravulizumab, tesidolumab, vilobelimab, abagovomab, igovomab, oregovomab, sofituzumab vedotin, cantuzumab mertansine, cantuzuma bravtansine, girentuximab, altumomab pentetate, arcitumomab, besilesomab, bertilimumab, plozalizumab, mogamulizumab, leronlimab, PRO140, rovelizumab, rovelizumab, talacotuzumab, benralizumab, tavolimab, vonlerolizumab, gavilimomab, ziralimumab, fanolesomab, ipilimumab, ruplizumab, toralizumab, dapirolizumab pegol, toralizumab, dapirolizumab pegol, ruplizumab, blinatumomab, inebilizumab, loncastuximab tesirine, SGN-CD19A, tafasitamab, taplitumomab paptox, XMAB-5574, Budoprutug, Obexelimab, duvortuxizumab, englumafusp alfa, Emfizatamab, zeripatamig, siplizumab, blontuvetmab, FBTA05, ibritumomab tiuxetan, obinutuzumab, ocaratuzumab, ocrelizumab, ofatumumab, rituximab, tositumomab, ublituximab, veltuzumab, divozilimab, eramkafusp alfa, ripertamab, zuberitamab, glofitamab, nofetumomab merpentan, samalizumab, imvotamab, odronextamab, plamotamab, bectumomab, inotuzumab ozogamicin, moxetumomab pasudotox, pinatuzumab vedotin, gomiliximab, lumiliximab, inolimomab, inolimomab, daclizumab, camidanluma btesirine, basiliximab, varlilumab, omburtamab, enoblituzumab, vopratelimab, lulizumabpegol, TGN1412, muromonab-CD3, otelixizumab, teplizumab, visilizumab, epcoritamab, epcoritamab, brentuximab vedotin, iratumumab, azintuxizumab vedotin, gemtuzumab ozogamicin, lintuzumab, vadastuximab talirine, naratuximab emtansine, otlertuzumab, lilotomab satetraxetan, tetulomab, daratumumab, isatuximab, foralumab, mosunetuzumab, mosunetuzumab, cedelizumab, ibalizumab, keliximab, priliximab, tregalizumab, zanolimumab, bleselumab, iscalimab, lucatumumab, ravagalimab, selicrelumab, teneliximab, vanalimab, abciximab, bivatuzumab, iomab-B, telimomab aritox, zolimomab aritox, abituzumab, intetumumab, alemtuzumab, tamtuvetmab, lorvotuzumab mertansine, itolizumab, cusatuzumab, vorsetuzumab mafodotin, milatuzumab, iladatuzumab vedotin, polatuzumab vedotin, galiximab, cibisatamab, zolbetuximab, naxitamab, tisotumab vedotin, olendalizumab, pamrevlumab, lacnotuzumab, cabiralizumab, emactuzumab, axatilimab, gimsilumab, lenzilumab, namilumab, tremelimumab, ulocuplumab, tepoditamab, rovalpituzumab tesirine, tarlatamab, demcizumab, navicixizumab, drozitumab, parsatuzumab, depatuxizumab mafodotin, modotuximab, carotuximab, adecatumumab, adecatumumab, oportuzumab monatox, solitomab, tucotuzumab celmoleukin, edrecolomab, catumaxomab, ifabotuzumab, fibatuzumab, zalutumumab, panitumumab, cetuximab, futuximab, imgatuzumab, laprituximab emtansine, matuzumab, necitumumab, nimotuzumab, tomuzotuximab, amivantamab, amivantamab, cpitumomab cituxetan, sontuzumab, duligotuzumab, elgemtumab, lumretuzumab, patritumab, scribantumab, zenocutuzumab, sibrotuzumab, burosumab, aprutumab ixadotin, radretumab, pasotuxizumab, farletuzumab, mirvetuximab soravtansine, vantictumab, TRBS07, 3F8, dinutuximab, dinutuximab beta, ecromeximab, mitumomab, andecaliximab, capromab, codrituzumab, glembatumumab vedotin, talquetamab, talquetamab, trevogrumab, indusatumab vedotin, ficlatuzumab, rilotumumab, zatuximab, pentuzimab, pentuzimab, margetuximab, timigutuzumab, trastuzumab, trastuzumab duocarmazine, trastuzumab emtansine, gancotamab, pertuzumab, ertumaxomab, emibetuzumab, telisotuzumab, telisotuzumab vedotin, derlotuximab biotin, apolizumab, onartuzumab, bersanlimab, enlimomabpegol, rontalizumab, sifalimumab, talizumab, ganitumab, istiratumab, robatumumab, teprotumumab, figitumumab, ganitumab, istiratumab, robatumumab, teprotumumab, cixutumumab, dalotuzumab, xentuzumab, dusigitumab, canakinumab, ustekinumab, ustekinumab, ustekinumab, briakinumab, briakinumab, abrezekimab, lebrikizumab, romilkimab, TNX-650, tralokinumab, anrukinzumab, brodalumab, ixekizumab, netakimab, perakizumab, secukinumab, vunakizumab, afasevikumab, afasevikumab, bimekizumab, bimekizumab, remtolumab, bermekimab, lutikizumab, lutikizumab, gevokizumab, cergutuzumab amunaleukin, fletikumab, fezakinumab, brazikumab, guselkumab, mirikizumab, tildrakizumab, risankizumab, flotetuzumab, nemolizumab, pascolizumab, dupilumab, mepolizumab, reslizumab, clazakizumab, elsilimomab, olokizumab, sarilumab, siltuximab, sirukumab, vobarilizumab, tocilizumab, SA237, satralizumab, enokizumab, prezalizumab, natalizumab, abrilumab, abrilumab, vedolizumab, volociximab, tadocizumab, etaracizumab, etrolizumab, spesolimab, vatelizumab, erlizumab, lirilumab, relatlimab, cBR96-doxorubicinimmunoconjugate, odulimomab, efalizumab, ladiratuzumab vedotin, simtuzumab, samrotamab vedotin, aselizumab, lupartumab amadotin, imalumab, carlumab, imaprelimab, amatuximab, amatuximab, anetumab ravtansine, narnatumab, clivatuzumab tetraxetan, pemtumomab, gatipotuzumab, ensituximab, lemalesomab, sulesomab, enfortumab vedotin, racotumomab, monalizumab, brontictuzumab, tarextumab, vesencumab, oxelumab, gilvetmab, tislelizumab, dostarlimab, BCD-100, nivolumab, PDR001, pembrolizumab, pidilizumab, retifanlimab, spartalizumab, sintilimab, cemiplimab, olaratumab, tovetumab, rinucumab, atezolizumab, avelumab, durvalumab, lifastuzumab vedotin, bavituximab, acapatamab, capromab, rosopatamab, nezastomig, pasotuxizumab, pelgifatamab, voxalatamab, cofetuzumab pelidotin, denosumab, rosmantuzumab, cirmtuzumab, atinumab, indatuximab ravtansine, elotuzumab, sirtratumab vedotin, sonepcizumab, vandortuzumab vedotin, minretumomab, satumomab pendetide, maslimomab, ontuxizumab, tenatumomab, fresolimumab, metelimumab, lerdelimumab, tezepelumab, etigilimab, tiragotumab, placulumab, prezalumab, infliximab, nerelimomab, ozoralizumab, adalimumab, afelimomab, certolizumab pegol, golimumab, mapatumumab, conatumumab, lexatumumab, tigatuzumab, sacituzumab govitecan, votumumab, pogalizumab, letolizumab, pankomab, anatumomab mafenatox, enavatuzumab, flanvotumab, brolucizumab, ranibizumab, varisacumab, bevacizumab, faricimab, icrucumab, alacizumab pegol, ramucirumab, pritumumab, and onvatilimab.

[6181] In some aspects, the antigen binding polypeptide complexes provided herein comprise a VL2 comprising a light chain complementarity determining region 1 (LCDR1), LCDR2, and/or LCDR3 of an antibody selected from the group consisting of losatuxizumab vedotin, utomilumab, urelumab, oleclumab, naptumomab estafenatox, ascrinvacumab, pintumomab, tacatuzumab tetraxetan, nesvacumab, vanucizumab, timolumab, vapaliximab, vepalimomab, enapotamab vedotin, ianalumab, belimumab, tabalumab, tibulizumab, belantamab mafodotin, teclistamab, teclistamab, detumomab, nacolomab tafenatox, eculizumab, lendalizumab, pexclizumab, pozelimab, ravulizumab, tesidolumab, vilobelimab, abagovomab, igovomab, oregovomab, sofituzumab vedotin, cantuzumab mertansine, cantuzuma bravtansine, girentuximab, altumomab pentetate, arcitumomab, besilesomab, bertilimumab, plozalizumab, mogamulizumab, leronlimab, PRO140, rovelizumab, rovelizumab, talacotuzumab, benralizumab, tavolimab, vonlerolizumab, gavilimomab, ziralimumab, fanolesomab, ipilimumab, ruplizumab, toralizumab, dapirolizumab pegol, toralizumab, dapirolizumab pegol, ruplizumab, blinatumomab, inebilizumab, loncastuximab tesirine, SGN-CD19A, tafasitamab, taplitumomab paptox, XMAB-5574, Budoprutug, Obexelimab, duvortuxizumab, englumafusp alfa, Emfizatamab, zeripatamig, siplizumab, blontuvetmab, FBTA05, ibritumomab tiuxetan, obinutuzumab, ocaratuzumab, ocrelizumab, ofatumumab, rituximab, tositumomab, ublituximab, veltuzumab, divozilimab, eramkafusp alfa, ripertamab, zuberitamab, glofitamab, nofetumomab merpentan, samalizumab, imvotamab, odronextamab, plamotamab, bectumomab, inotuzumab ozogamicin, moxetumomab pasudotox, pinatuzumab vedotin, gomiliximab, lumiliximab, inolimomab, inolimomab, daclizumab, camidanluma btesirine, basiliximab, varlilumab, omburtamab, enoblituzumab, vopratelimab, lulizumabpegol, TGN1412, muromonab-CD3, otelixizumab, teplizumab, visilizumab, epcoritamab, epcoritamab, brentuximab vedotin, iratumumab, azintuxizumab vedotin, gemtuzumab ozogamicin, lintuzumab, vadastuximab talirine, naratuximab emtansine, otlertuzumab, lilotomab satetraxetan, tetulomab, daratumumab, isatuximab, foralumab, mosunetuzumab, mosunetuzumab, cedelizumab, ibalizumab, keliximab, priliximab, tregalizumab, zanolimumab, bleselumab, iscalimab, lucatumumab, ravagalimab, selicrelumab, teneliximab, vanalimab, abciximab, bivatuzumab, iomab-B, telimomab aritox, zolimomab aritox, abituzumab, intetumumab, alemtuzumab, tamtuvetmab, lorvotuzumab mertansine, itolizumab, cusatuzumab, vorsetuzumab mafodotin, milatuzumab, iladatuzumab vedotin, polatuzumab vedotin, galiximab, cibisatamab, zolbetuximab, naxitamab, tisotumab vedotin, olendalizumab, pamrevlumab, lacnotuzumab, cabiralizumab, emactuzumab, axatilimab, gimsilumab, lenzilumab, namilumab, tremelimumab, ulocuplumab, tepoditamab, rovalpituzumab tesirine, tarlatamab, demcizumab, navicixizumab, drozitumab, parsatuzumab, depatuxizumab mafodotin, modotuximab, carotuximab, adecatumumab, adecatumumab, oportuzumab monatox, solitomab, tucotuzumab celmoleukin, edrecolomab, catumaxomab, ifabotuzumab, fibatuzumab, zalutumumab, panitumumab, cetuximab, futuximab, imgatuzumab, laprituximab emtansine, matuzumab, necitumumab, nimotuzumab, tomuzotuximab, amivantamab, amivantamab, epitumomab cituxetan, sontuzumab, duligotuzumab, elgemtumab, lumretuzumab, patritumab, scribantumab, zenocutuzumab, sibrotuzumab, burosumab, aprutumab ixadotin, radretumab, pasotuxizumab, farletuzumab, mirvetuximab soravtansine, vantictumab, TRBS07, 3F8, dinutuximab, dinutuximab beta, ecromeximab, mitumomab, andecaliximab, capromab, codrituzumab, glembatumumab vedotin, talquetamab, talquetamab, trevogrumab, indusatumab vedotin, ficlatuzumab, rilotumumab, zatuximab, pentuzimab, pentuzimab, margetuximab, timigutuzumab, trastuzumab, trastuzumab duocarmazine, trastuzumab emtansine, gancotamab, pertuzumab, ertumaxomab, emibetuzumab, telisotuzumab, telisotuzumab vedotin, derlotuximab biotin, apolizumab, onartuzumab, bersanlimab, enlimomabpegol, rontalizumab, sifalimumab, talizumab, ganitumab, istiratumab, robatumumab, teprotumumab, figitumumab, ganitumab, istiratumab, robatumumab, teprotumumab, cixutumumab, dalotuzumab, xentuzumab, dusigitumab, canakinumab, ustekinumab, ustekinumab, ustekinumab, briakinumab, briakinumab, abrezekimab, lebrikizumab, romilkimab, TNX-650, tralokinumab, anrukinzumab, brodalumab, ixekizumab, netakimab, perakizumab, secukinumab, vunakizumab, afasevikumab, afasevikumab, bimekizumab, bimekizumab, remtolumab, bermekimab, lutikizumab, lutikizumab, gevokizumab, cergutuzumab amunaleukin, fletikumab, fezakinumab, brazikumab, guselkumab, mirikizumab, tildrakizumab, risankizumab, flotetuzumab, nemolizumab, pascolizumab, dupilumab, mepolizumab, reslizumab, clazakizumab, elsilimomab, olokizumab, sarilumab, siltuximab, sirukumab, vobarilizumab, tocilizumab, SA237, satralizumab, enokizumab, prezalizumab, natalizumab, abrilumab, abrilumab, vedolizumab, volociximab, tadocizumab, etaracizumab, etrolizumab, spesolimab, vatelizumab, erlizumab, lirilumab, relatlimab, cBR96-doxorubicinimmunoconjugate, odulimomab, efalizumab, ladiratuzumab vedotin, simtuzumab, samrotamab vedotin, aselizumab, lupartumab amadotin, imalumab, carlumab, imaprelimab, amatuximab, amatuximab, anetumab ravtansine, narnatumab, clivatuzumab tetraxetan, pemtumomab, gatipotuzumab, ensituximab, lemalesomab, sulesomab, enfortumab vedotin, racotumomab, monalizumab, brontictuzumab, tarextumab, vesencumab, oxelumab, gilvetmab, tislelizumab, dostarlimab, BCD-100, nivolumab, PDR001, pembrolizumab, pidilizumab, retifanlimab, spartalizumab, sintilimab, cemiplimab, olaratumab, tovetumab, rinucumab, atezolizumab, avelumab, durvalumab, lifastuzumab vedotin, bavituximab, acapatamab, capromab, rosopatamab, nezastomig, pasotuxizumab, pelgifatamab, voxalatamab, cofetuzumab pelidotin, denosumab, rosmantuzumab, cirmtuzumab, atinumab, indatuximab ravtansine, elotuzumab, sirtratumab vedotin, sonepcizumab, vandortuzumab vedotin, minretumomab, satumomab pendetide, maslimomab, ontuxizumab, tenatumomab, fresolimumab, metelimumab, lerdelimumab, tezepelumab, etigilimab, tiragotumab, placulumab, prezalumab, infliximab, nerelimomab, ozoralizumab, adalimumab, afelimomab, certolizumab pegol, golimumab, mapatumumab, conatumumab, lexatumumab, tigatuzumab, sacituzumab govitecan, votumumab, pogalizumab, letolizumab, pankomab, anatumomab mafenatox, enavatuzumab, flanvotumab, brolucizumab, ranibizumab, varisacumab, bevacizumab, faricimab, icrucumab, alacizumab pegol, ramucirumab, pritumumab, and onvatilimab.

[6182] In some aspects, the antigen binding polypeptide complexes provided herein comprise a VH1 comprising a heavy chain complementarity determining region 1 (HCDR1), HCDR2, and/or HCDR3 of an antibody selected from the group consisting of losatuxizumab vedotin, utomilumab, urelumab, oleclumab, naptumomab estafenatox, ascrinvacumab, pintumomab, tacatuzumab tetraxetan, nesvacumab, vanucizumab, timolumab, vapaliximab, vepalimomab, enapotamab vedotin, ianalumab, belimumab, tabalumab, tibulizumab, belantamab mafodotin, teclistamab, teclistamab, detumomab, nacolomab tafenatox, eculizumab, lendalizumab, pexelizumab, pozelimab, ravulizumab, tesidolumab, vilobelimab, abagovomab, igovomab, oregovomab, sofituzumab vedotin, cantuzumab mertansine, cantuzuma bravtansine, girentuximab, altumomab pentetate, arcitumomab, besilesomab, bertilimumab, plozalizumab, mogamulizumab, leronlimab, PRO140, rovelizumab, rovelizumab, talacotuzumab, benralizumab, tavolimab, vonlerolizumab, gavilimomab, ziralimumab, fanolesomab, ipilimumab, ruplizumab, toralizumab, dapirolizumab pegol, toralizumab, dapirolizumab pegol, ruplizumab, blinatumomab, inebilizumab, loncastuximab tesirine, SGN-CD19A, tafasitamab, taplitumomab paptox, XMAB-5574, Budoprutug, Obexelimab, duvortuxizumab, englumafusp alfa, Emfizatamab, zeripatamig, siplizumab, blontuvetmab, FBTA05, ibritumomab tiuxetan, obinutuzumab, ocaratuzumab, ocrelizumab, ofatumumab, rituximab, tositumomab, ublituximab, veltuzumab, divozilimab, eramkafusp alfa, ripertamab, zuberitamab, glofitamab, nofetumomab merpentan, samalizumab, imvotamab, odronextamab, plamotamab, bectumomab, inotuzumab ozogamicin, moxetumomab pasudotox, pinatuzumab vedotin, gomiliximab, lumiliximab, inolimomab, inolimomab, daclizumab, camidanluma btesirine, basiliximab, varlilumab, omburtamab, cnoblituzumab, vopratelimab, lulizumabpegol, TGN1412, muromonab-CD3, otelixizumab, teplizumab, visilizumab, epcoritamab, epcoritamab, brentuximab vedotin, iratumumab, azintuxizumab vedotin, gemtuzumab ozogamicin, lintuzumab, vadastuximab talirine, naratuximab emtansine, otlertuzumab, lilotomab satetraxetan, tetulomab, daratumumab, isatuximab, foralumab, mosunetuzumab, mosunetuzumab, cedelizumab, ibalizumab, keliximab, priliximab, tregalizumab, zanolimumab, bleselumab, iscalimab, lucatumumab, ravagalimab, selicrelumab, teneliximab, vanalimab, abciximab, bivatuzumab, iomab-B, telimomab aritox, zolimomab aritox, abituzumab, intetumumab, alemtuzumab, tamtuvetmab, lorvotuzumab mertansine, itolizumab, cusatuzumab, vorsetuzumab mafodotin, milatuzumab, iladatuzumab vedotin, polatuzumab vedotin, galiximab, cibisatamab, zolbetuximab, naxitamab, tisotumab vedotin, olendalizumab, pamrevlumab, lacnotuzumab, cabiralizumab, emactuzumab, axatilimab, gimsilumab, lenzilumab, namilumab, tremelimumab, ulocuplumab, tepoditamab, rovalpituzumab tesirine, tarlatamab, demcizumab, navicixizumab, drozitumab, parsatuzumab, depatuxizumab mafodotin, modotuximab, carotuximab, adecatumumab, adecatumumab, oportuzumab monatox, solitomab, tucotuzumab celmoleukin, edrecolomab, catumaxomab, ifabotuzumab, fibatuzumab, zalutumumab, panitumumab, cetuximab, futuximab, imgatuzumab, laprituximab emtansine, matuzumab, necitumumab, nimotuzumab, tomuzotuximab, amivantamab, amivantamab, epitumomab cituxetan, sontuzumab, duligotuzumab, elgemtumab, lumretuzumab, patritumab, seribantumab, zenocutuzumab, sibrotuzumab, burosumab, aprutumab ixadotin, radretumab, pasotuxizumab, farletuzumab, mirvetuximab soravtansine, vantictumab, TRBS07, 3F8, dinutuximab, dinutuximab beta, ecromeximab, mitumomab, andecaliximab, capromab, codrituzumab, glembatumumab vedotin, talquetamab, talquetamab, trevogrumab, indusatumab vedotin, ficlatuzumab, rilotumumab, zatuximab, pentuzimab, pentuzimab, margetuximab, timigutuzumab, trastuzumab, trastuzumab duocarmazine, trastuzumab emtansine, gancotamab, pertuzumab, ertumaxomab, emibetuzumab, telisotuzumab, telisotuzumab vedotin, derlotuximab biotin, apolizumab, onartuzumab, bersanlimab, enlimomabpegol, rontalizumab, sifalimumab, talizumab, ganitumab, istiratumab, robatumumab, teprotumumab, figitumumab, ganitumab, istiratumab, robatumumab, teprotumumab, cixutumumab, dalotuzumab, xentuzumab, dusigitumab, canakinumab, ustekinumab, ustekinumab, ustekinumab, briakinumab, briakinumab, abrezekimab, lebrikizumab, romilkimab, TNX-650, tralokinumab, anrukinzumab, brodalumab, ixekizumab, netakimab, perakizumab, secukinumab, vunakizumab, afasevikumab, afasevikumab, bimekizumab, bimekizumab, remtolumab, bermckimab, lutikizumab, lutikizumab, gevokizumab, cergutuzumab amunaleukin, fletikumab, fezakinumab, brazikumab, guselkumab, mirikizumab, tildrakizumab, risankizumab, flotetuzumab, nemolizumab, pascolizumab, dupilumab, mepolizumab, reslizumab, clazakizumab, elsilimomab, olokizumab, sarilumab, siltuximab, sirukumab, vobarilizumab, tocilizumab, SA237, satralizumab, enokizumab, prezalizumab, natalizumab, abrilumab, abrilumab, vedolizumab, volociximab, tadocizumab, etaracizumab, etrolizumab, spesolimab, vatelizumab, erlizumab, lirilumab, relatlimab, cBR96-doxorubicinimmunoconjugate, odulimomab, efalizumab, ladiratuzumab vedotin, simtuzumab, samrotamab vedotin, aselizumab, lupartumab amadotin, imalumab, carlumab, imaprelimab, amatuximab, amatuximab, anetumab ravtansine, narnatumab, clivatuzumab tetraxetan, pemtumomab, gatipotuzumab, ensituximab, lemalesomab, sulesomab, enfortumab vedotin, racotumomab, monalizumab, brontictuzumab, tarextumab, vesencumab, oxelumab, gilvetmab, tislelizumab, dostarlimab, BCD-100, nivolumab, PDR001, pembrolizumab, pidilizumab, retifanlimab, spartalizumab, sintilimab, cemiplimab, olaratumab, tovetumab, rinucumab, atezolizumab, avelumab, durvalumab, lifastuzumab vedotin, bavituximab, acapatamab, capromab, rosopatamab, nezastomig, pasotuxizumab, pelgifatamab, voxalatamab, cofetuzumab pelidotin, denosumab, rosmantuzumab, cirmtuzumab, atinumab, indatuximab ravtansine, elotuzumab, sirtratumab vedotin, sonepcizumab, vandortuzumab vedotin, minretumomab, satumomab pendetide, maslimomab, ontuxizumab, tenatumomab, fresolimumab, metelimumab, lerdelimumab, tezepelumab, etigilimab, tiragotumab, placulumab, prezalumab, infliximab, nerelimomab, ozoralizumab, adalimumab, afelimomab, certolizumab pegol, golimumab, mapatumumab, conatumumab, lexatumumab, tigatuzumab, sacituzumab govitecan, votumumab, pogalizumab, letolizumab, pankomab, anatumomab mafenatox, enavatuzumab, flanvotumab, brolucizumab, ranibizumab, varisacumab, bevacizumab, faricimab, icrucumab, alacizumab pegol, ramucirumab, pritumumab, and onvatilimab.

[6183] In some aspects, the antigen binding polypeptide complexes provided herein comprise a VH2 comprising a heavy chain complementarity determining region 1 (HCDR1), HCDR2, and/or HCDR3 of an antibody selected from the group consisting of losatuxizumab vedotin, utomilumab, urelumab, oleclumab, naptumomab estafenatox, ascrinvacumab, pintumomab, tacatuzumab tetraxetan, nesvacumab, vanucizumab, timolumab, vapaliximab, vepalimomab, enapotamab vedotin, ianalumab, belimumab, tabalumab, tibulizumab, belantamab mafodotin, teclistamab, teclistamab, detumomab, nacolomab tafenatox, eculizumab, lendalizumab, pexelizumab, pozelimab, ravulizumab, tesidolumab, vilobelimab, abagovomab, igovomab, oregovomab, sofituzumab vedotin, cantuzumab mertansine, cantuzuma bravtansine, girentuximab, altumomab pentetate, arcitumomab, besilesomab, bertilimumab, plozalizumab, mogamulizumab, leronlimab, PRO140, rovelizumab, rovelizumab, talacotuzumab, benralizumab, tavolimab, vonlerolizumab, gavilimomab, ziralimumab, fanolesomab, ipilimumab, ruplizumab, toralizumab, dapirolizumab pegol, toralizumab, dapirolizumab pegol, ruplizumab, blinatumomab, inebilizumab, loncastuximab tesirine, SGN-CD19A, tafasitamab, taplitumomab paptox, XMAB-5574, Budoprutug, Obexelimab, duvortuxizumab, englumafusp alfa, Emfizatamab, zeripatamig, siplizumab, blontuvetmab, FBTA05, ibritumomab tiuxetan, obinutuzumab, ocaratuzumab, ocrelizumab, ofatumumab, rituximab, tositumomab, ublituximab, veltuzumab, divozilimab, eramkafusp alfa, ripertamab, zuberitamab, glofitamab, nofetumomab merpentan, samalizumab, imvotamab, odronextamab, plamotamab, bectumomab, inotuzumab ozogamicin, moxetumomab pasudotox, pinatuzumab vedotin, gomiliximab, lumiliximab, inolimomab, inolimomab, daclizumab, camidanluma btesirine, basiliximab, varlilumab, omburtamab, enoblituzumab, vopratelimab, lulizumabpegol, TGN1412, muromonab-CD3, otelixizumab, teplizumab, visilizumab, epcoritamab, epcoritamab, brentuximab vedotin, iratumumab, azintuxizumab vedotin, gemtuzumab ozogamicin, lintuzumab, vadastuximab talirine, naratuximab emtansine, otlertuzumab, lilotomab satetraxetan, tetulomab, daratumumab, isatuximab, foralumab, mosunetuzumab, mosunetuzumab, cedelizumab, ibalizumab, keliximab, priliximab, tregalizumab, zanolimumab, bleselumab, iscalimab, lucatumumab, ravagalimab, selicrelumab, teneliximab, vanalimab, abciximab, bivatuzumab, iomab-B, telimomab aritox, zolimomab aritox, abituzumab, intetumumab, alemtuzumab, tamtuvetmab, lorvotuzumab mertansine, itolizumab, cusatuzumab, vorsetuzumab mafodotin, milatuzumab, iladatuzumab vedotin, polatuzumab vedotin, galiximab, cibisatamab, zolbetuximab, naxitamab, tisotumab vedotin, olendalizumab, pamrevlumab, lacnotuzumab, cabiralizumab, emactuzumab, axatilimab, gimsilumab, lenzilumab, namilumab, tremelimumab, ulocuplumab, tepoditamab, rovalpituzumab tesirine, tarlatamab, demcizumab, navicixizumab, drozitumab, parsatuzumab, depatuxizumab mafodotin, modotuximab, carotuximab, adecatumumab, adecatumumab, oportuzumab monatox, solitomab, tucotuzumab celmoleukin, edrecolomab, catumaxomab, ifabotuzumab, fibatuzumab, zalutumumab, panitumumab, cetuximab, futuximab, imgatuzumab, laprituximab emtansine, matuzumab, necitumumab, nimotuzumab, tomuzotuximab, amivantamab, amivantamab, cpitumomab cituxetan, sontuzumab, duligotuzumab, elgemtumab, lumretuzumab, patritumab, seribantumab, zenocutuzumab, sibrotuzumab, burosumab, aprutumab ixadotin, radretumab, pasotuxizumab, farletuzumab, mirvetuximab soravtansine, vantictumab, TRBS07, 3F8, dinutuximab, dinutuximab beta, ecromeximab, mitumomab, andecaliximab, capromab, codrituzumab, glembatumumab vedotin, talquetamab, talquetamab, trevogrumab, indusatumab vedotin, ficlatuzumab, rilotumumab, zatuximab, pentuzimab, pentuzimab, margetuximab, timigutuzumab, trastuzumab, trastuzumab duocarmazine, trastuzumab emtansine, gancotamab, pertuzumab, ertumaxomab, emibetuzumab, telisotuzumab, telisotuzumab vedotin, derlotuximab biotin, apolizumab, onartuzumab, bersanlimab, enlimomabpegol, rontalizumab, sifalimumab, talizumab, ganitumab, istiratumab, robatumumab, teprotumumab, figitumumab, ganitumab, istiratumab, robatumumab, teprotumumab, cixutumumab, dalotuzumab, xentuzumab, dusigitumab, canakinumab, ustekinumab, ustekinumab, ustekinumab, briakinumab, briakinumab, abrezekimab, lebrikizumab, romilkimab, TNX-650, tralokinumab, anrukinzumab, brodalumab, ixekizumab, netakimab, perakizumab, secukinumab, vunakizumab, afasevikumab, afasevikumab, bimekizumab, bimekizumab, remtolumab, bermekimab, lutikizumab, lutikizumab, gevokizumab, cergutuzumab amunaleukin, fletikumab, fezakinumab, brazikumab, guselkumab, mirikizumab, tildrakizumab, risankizumab, flotetuzumab, nemolizumab, pascolizumab, dupilumab, mepolizumab, reslizumab, clazakizumab, elsilimomab, olokizumab, sarilumab, siltuximab, sirukumab, vobarilizumab, tocilizumab, SA237, satralizumab, enokizumab, prezalizumab, natalizumab, abrilumab, abrilumab, vedolizumab, volociximab, tadocizumab, etaracizumab, etrolizumab, spesolimab, vatelizumab, erlizumab, lirilumab, relatlimab, cBR96-doxorubicinimmunoconjugate, odulimomab, efalizumab, ladiratuzumab vedotin, simtuzumab, samrotamab vedotin, asclizumab, lupartumab amadotin, imalumab, carlumab, imaprelimab, amatuximab, amatuximab, anetumab ravtansine, narnatumab, clivatuzumab tetraxetan, pemtumomab, gatipotuzumab, ensituximab, lemalesomab, sulesomab, enfortumab vedotin, racotumomab, monalizumab, brontictuzumab, tarextumab, vesencumab, oxelumab, gilvetmab, tislelizumab, dostarlimab, BCD-100, nivolumab, PDR001, pembrolizumab, pidilizumab, retifanlimab, spartalizumab, sintilimab, cemiplimab, olaratumab, tovetumab, rinucumab, atezolizumab, avelumab, durvalumab, lifastuzumab vedotin, bavituximab, acapatamab, capromab, rosopatamab, nezastomig, pasotuxizumab, pelgifatamab, voxalatamab, cofetuzumab pelidotin, denosumab, rosmantuzumab, cirmtuzumab, atinumab, indatuximab ravtansine, elotuzumab, sirtratumab vedotin, sonepcizumab, vandortuzumab vedotin, minretumomab, satumomab pendetide, maslimomab, ontuxizumab, tenatumomab, fresolimumab, metelimumab, lerdelimumab, tezepelumab, etigilimab, tiragotumab, placulumab, prezalumab, infliximab, nerelimomab, ozoralizumab, adalimumab, afelimomab, certolizumab pegol, golimumab, mapatumumab, conatumumab, lexatumumab, tigatuzumab, sacituzumab govitecan, votumumab, pogalizumab, letolizumab, pankomab, anatumomab mafenatox, enavatuzumab, flanvotumab, brolucizumab, ranibizumab, varisacumab, bevacizumab, faricimab, icrucumab, alacizumab pegol, ramucirumab, pritumumab, and onvatilimab.

[6184] In some aspects, the antigen binding polypeptide complexes provided herein comprise a VL1 comprising a VL of an antibody selected from the group consisting of losatuxizumab vedotin, utomilumab, urelumab, oleclumab, naptumomab estafenatox, ascrinvacumab, pintumomab, tacatuzumab tetraxetan, nesvacumab, vanucizumab, timolumab, vapaliximab, vepalimomab, enapotamab vedotin, ianalumab, belimumab, tabalumab, tibulizumab, belantamab mafodotin, teclistamab, teclistamab, detumomab, nacolomab tafenatox, eculizumab, lendalizumab, pexelizumab, pozelimab, ravulizumab, tesidolumab, vilobelimab, abagovomab, igovomab, oregovomab, sofituzumab vedotin, cantuzumab mertansine, cantuzuma bravtansine, girentuximab, altumomab pentetate, arcitumomab, besilesomab, bertilimumab, plozalizumab, mogamulizumab, leronlimab, PRO140, rovelizumab, rovelizumab, talacotuzumab, benralizumab, tavolimab, vonlerolizumab, gavilimomab, ziralimumab, fanolesomab, ipilimumab, ruplizumab, toralizumab, dapirolizumab pegol, toralizumab, dapirolizumab pegol, ruplizumab, blinatumomab, inebilizumab, loncastuximab tesirine, SGN-CD19A, tafasitamab, taplitumomab paptox, XMAB-5574, Budoprutug, Obexelimab, duvortuxizumab, englumafusp alfa, Emfizatamab, zeripatamig, siplizumab, blontuvetmab, FBTA05, ibritumomab tiuxetan, obinutuzumab, ocaratuzumab, ocrelizumab, ofatumumab, rituximab, tositumomab, ublituximab, veltuzumab, divozilimab, eramkafusp alfa, ripertamab, zuberitamab, glofitamab, nofetumomab merpentan, samalizumab, imvotamab, odronextamab, plamotamab, bectumomab, inotuzumab ozogamicin, moxetumomab pasudotox, pinatuzumab vedotin, gomiliximab, lumiliximab, inolimomab, inolimomab, daclizumab, camidanluma btesirine, basiliximab, varlilumab, omburtamab, enoblituzumab, vopratelimab, lulizumabpegol, TGN1412, muromonab-CD3, otelixizumab, teplizumab, visilizumab, epcoritamab, epcoritamab, brentuximab vedotin, iratumumab, azintuxizumab vedotin, gemtuzumab ozogamicin, lintuzumab, vadastuximab talirine, naratuximab emtansine, otlertuzumab, lilotomab satetraxetan, tetulomab, daratumumab, isatuximab, foralumab, mosunctuzumab, mosunetuzumab, cedelizumab, ibalizumab, keliximab, priliximab, tregalizumab, zanolimumab, bleselumab, iscalimab, lucatumumab, ravagalimab, selicrelumab, teneliximab, vanalimab, abciximab, bivatuzumab, iomab-B, telimomab aritox, zolimomab aritox, abituzumab, intetumumab, alemtuzumab, tamtuvetmab, lorvotuzumab mertansine, itolizumab, cusatuzumab, vorsetuzumab mafodotin, milatuzumab, iladatuzumab vedotin, polatuzumab vedotin, galiximab, cibisatamab, zolbetuximab, naxitamab, tisotumab vedotin, olendalizumab, pamrevlumab, lacnotuzumab, cabiralizumab, emactuzumab, axatilimab, gimsilumab, lenzilumab, namilumab, tremelimumab, ulocuplumab, tepoditamab, rovalpituzumab tesirine, tarlatamab, demcizumab, navicixizumab, drozitumab, parsatuzumab, depatuxizumab mafodotin, modotuximab, carotuximab, adecatumumab, adecatumumab, oportuzumab monatox, solitomab, tucotuzumab celmoleukin, edrecolomab, catumaxomab, ifabotuzumab, fibatuzumab, zalutumumab, panitumumab, cetuximab, futuximab, imgatuzumab, laprituximab emtansine, matuzumab, necitumumab, nimotuzumab, tomuzotuximab, amivantamab, amivantamab, epitumomab cituxetan, sontuzumab, duligotuzumab, elgemtumab, lumretuzumab, patritumab, seribantumab, zenocutuzumab, sibrotuzumab, burosumab, aprutumab ixadotin, radretumab, pasotuxizumab, farletuzumab, mirvetuximab soravtansine, vantictumab, TRBS07, 3F8, dinutuximab, dinutuximab beta, ecromeximab, mitumomab, andecaliximab, capromab, codrituzumab, glembatumumab vedotin, talquetamab, talquetamab, trevogrumab, indusatumab vedotin, ficlatuzumab, rilotumumab, zatuximab, pentuzimab, pentuzimab, margetuximab, timigutuzumab, trastuzumab, trastuzumab duocarmazine, trastuzumab emtansine, gancotamab, pertuzumab, ertumaxomab, emibetuzumab, telisotuzumab, telisotuzumab vedotin, derlotuximab biotin, apolizumab, onartuzumab, bersanlimab, enlimomabpegol, rontalizumab, sifalimumab, talizumab, ganitumab, istiratumab, robatumumab, teprotumumab, figitumumab, ganitumab, istiratumab, robatumumab, teprotumumab, cixutumumab, dalotuzumab, xentuzumab, dusigitumab, canakinumab, ustekinumab, ustekinumab, ustekinumab, briakinumab, briakinumab, abrezekimab, lebrikizumab, romilkimab, TNX-650, tralokinumab, anrukinzumab, brodalumab, ixekizumab, netakimab, perakizumab, secukinumab, vunakizumab, afasevikumab, afasevikumab, bimekizumab, bimekizumab, remtolumab, bermekimab, lutikizumab, lutikizumab, gevokizumab, cergutuzumab amunaleukin, fletikumab, fezakinumab, brazikumab, guselkumab, mirikizumab, tildrakizumab, risankizumab, flotetuzumab, nemolizumab, pascolizumab, dupilumab, mepolizumab, reslizumab, clazakizumab, elsilimomab, olokizumab, sarilumab, siltuximab, sirukumab, vobarilizumab, tocilizumab, SA237, satralizumab, enokizumab, prezalizumab, natalizumab, abrilumab, abrilumab, vedolizumab, volociximab, tadocizumab, etaracizumab, etrolizumab, spesolimab, vatelizumab, erlizumab, lirilumab, relatlimab, cBR96-doxorubicinimmunoconjugate, odulimomab, efalizumab, ladiratuzumab vedotin, simtuzumab, samrotamab vedotin, aselizumab, lupartumab amadotin, imalumab, carlumab, imaprelimab, amatuximab, amatuximab, anetumab ravtansine, narnatumab, clivatuzumab tetraxetan, pemtumomab, gatipotuzumab, ensituximab, lemalesomab, sulesomab, enfortumab vedotin, racotumomab, monalizumab, brontictuzumab, tarextumab, vesencumab, oxelumab, gilvetmab, tislelizumab, dostarlimab, BCD-100, nivolumab, PDR001, pembrolizumab, pidilizumab, retifanlimab, spartalizumab, sintilimab, cemiplimab, olaratumab, tovetumab, rinucumab, atezolizumab, avelumab, durvalumab, lifastuzumab vedotin, bavituximab, acapatamab, capromab, rosopatamab, nezastomig, pasotuxizumab, pelgifatamab, voxalatamab, cofetuzumab pelidotin, denosumab, rosmantuzumab, cirmtuzumab, atinumab, indatuximab ravtansine, elotuzumab, sirtratumab vedotin, sonepcizumab, vandortuzumab vedotin, minretumomab, satumomab pendetide, maslimomab, ontuxizumab, tenatumomab, fresolimumab, metelimumab, lerdelimumab, tezepelumab, etigilimab, tiragotumab, placulumab, prezalumab, infliximab, nerelimomab, ozoralizumab, adalimumab, afelimomab, certolizumab pegol, golimumab, mapatumumab, conatumumab, lexatumumab, tigatuzumab, sacituzumab govitecan, votumumab, pogalizumab, letolizumab, pankomab, anatumomab mafenatox, enavatuzumab, flanvotumab, brolucizumab, ranibizumab, varisacumab, bevacizumab, faricimab, icrucumab, alacizumab pegol, ramucirumab, pritumumab, and onvatilimab.

[6185] In some aspects, the antigen binding polypeptide complexes provided herein comprise a VL2 comprising a VL of an antibody selected from the group consisting of losatuxizumab vedotin, utomilumab, urelumab, oleclumab, naptumomab estafenatox, ascrinvacumab, pintumomab, tacatuzumab tetraxetan, nesvacumab, vanucizumab, timolumab, vapaliximab, vepalimomab, enapotamab vedotin, ianalumab, belimumab, tabalumab, tibulizumab, belantamab mafodotin, teclistamab, teclistamab, detumomab, nacolomab tafenatox, eculizumab, lendalizumab, pexelizumab, pozelimab, ravulizumab, tesidolumab, vilobelimab, abagovomab, igovomab, oregovomab, sofituzumab vedotin, cantuzumab mertansine, cantuzuma bravtansine, girentuximab, altumomab pentetate, arcitumomab, besilesomab, bertilimumab, plozalizumab, mogamulizumab, leronlimab, PRO140, rovelizumab, rovelizumab, talacotuzumab, benralizumab, tavolimab, vonlerolizumab, gavilimomab, ziralimumab, fanolesomab, ipilimumab, ruplizumab, toralizumab, dapirolizumab pegol, toralizumab, dapirolizumab pegol, ruplizumab, blinatumomab, inebilizumab, loncastuximab tesirine, SGN-CD19A, tafasitamab, taplitumomab paptox, XMAB-5574, Budoprutug, Obexelimab, duvortuxizumab, englumafusp alfa, Emfizatamab, zeripatamig, siplizumab, blontuvetmab, FBTA05, ibritumomab tiuxetan, obinutuzumab, ocaratuzumab, ocrelizumab, ofatumumab, rituximab, tositumomab, ublituximab, veltuzumab, divozilimab, eramkafusp alfa, ripertamab, zuberitamab, glofitamab, nofetumomab merpentan, samalizumab, imvotamab, odronextamab, plamotamab, bectumomab, inotuzumab ozogamicin, moxetumomab pasudotox, pinatuzumab vedotin, gomiliximab, lumiliximab, inolimomab, inolimomab, daclizumab, camidanluma btesirine, basiliximab, varlilumab, omburtamab, enoblituzumab, vopratelimab, lulizumabpegol, TGN1412, muromonab-CD3, otelixizumab, teplizumab, visilizumab, epcoritamab, epcoritamab, brentuximab vedotin, iratumumab, azintuxizumab vedotin, gemtuzumab ozogamicin, lintuzumab, vadastuximab talirine, naratuximab emtansine, otlertuzumab, lilotomab satetraxetan, tetulomab, daratumumab, isatuximab, foralumab, mosunetuzumab, mosunetuzumab, cedelizumab, ibalizumab, keliximab, priliximab, tregalizumab, zanolimumab, bleselumab, iscalimab, lucatumumab, ravagalimab, selicrelumab, teneliximab, vanalimab, abciximab, bivatuzumab, iomab-B, telimomab aritox, zolimomab aritox, abituzumab, intetumumab, alemtuzumab, tamtuvetmab, lorvotuzumab mertansine, itolizumab, cusatuzumab, vorsetuzumab mafodotin, milatuzumab, iladatuzumab vedotin, polatuzumab vedotin, galiximab, cibisatamab, zolbetuximab, naxitamab, tisotumab vedotin, olendalizumab, pamrevlumab, lacnotuzumab, cabiralizumab, emactuzumab, axatilimab, gimsilumab, lenzilumab, namilumab, tremelimumab, ulocuplumab, tepoditamab, rovalpituzumab tesirine, tarlatamab, demcizumab, navicixizumab, drozitumab, parsatuzumab, depatuxizumab mafodotin, modotuximab, carotuximab, adecatumumab, adecatumumab, oportuzumab monatox, solitomab, tucotuzumab celmoleukin, edrecolomab, catumaxomab, ifabotuzumab, fibatuzumab, zalutumumab, panitumumab, cetuximab, futuximab, imgatuzumab, laprituximab emtansine, matuzumab, necitumumab, nimotuzumab, tomuzotuximab, amivantamab, amivantamab, epitumomab cituxetan, sontuzumab, duligotuzumab, elgemtumab, lumretuzumab, patritumab, seribantumab, zenocutuzumab, sibrotuzumab, burosumab, aprutumab ixadotin, radretumab, pasotuxizumab, farletuzumab, mirvetuximab soravtansine, vantictumab, TRBS07, 3F8, dinutuximab, dinutuximab beta, ecromeximab, mitumomab, andecaliximab, capromab, codrituzumab, glembatumumab vedotin, talquetamab, talquetamab, trevogrumab, indusatumab vedotin, ficlatuzumab, rilotumumab, zatuximab, pentuzimab, pentuzimab, margetuximab, timigutuzumab, trastuzumab, trastuzumab duocarmazine, trastuzumab emtansine, gancotamab, pertuzumab, ertumaxomab, emibetuzumab, telisotuzumab, telisotuzumab vedotin, derlotuximab biotin, apolizumab, onartuzumab, bersanlimab, enlimomabpegol, rontalizumab, sifalimumab, talizumab, ganitumab, istiratumab, robatumumab, teprotumumab, figitumumab, ganitumab, istiratumab, robatumumab, teprotumumab, cixutumumab, dalotuzumab, xentuzumab, dusigitumab, canakinumab, ustekinumab, ustekinumab, ustekinumab, briakinumab, briakinumab, abrezekimab, lebrikizumab, romilkimab, TNX-650, tralokinumab, anrukinzumab, brodalumab, ixekizumab, netakimab, perakizumab, secukinumab, vunakizumab, afasevikumab, afasevikumab, bimekizumab, bimekizumab, remtolumab, bermekimab, lutikizumab, lutikizumab, gevokizumab, cergutuzumab amunaleukin, fletikumab, fezakinumab, brazikumab, guselkumab, mirikizumab, tildrakizumab, risankizumab, flotetuzumab, nemolizumab, pascolizumab, dupilumab, mepolizumab, reslizumab, clazakizumab, elsilimomab, olokizumab, sarilumab, siltuximab, sirukumab, vobarilizumab, tocilizumab, SA237, satralizumab, enokizumab, prezalizumab, natalizumab, abrilumab, abrilumab, vedolizumab, volociximab, tadocizumab, etaracizumab, etrolizumab, spesolimab, vatelizumab, erlizumab, lirilumab, relatlimab, cBR96-doxorubicinimmunoconjugate, odulimomab, efalizumab, ladiratuzumab vedotin, simtuzumab, samrotamab vedotin, aselizumab, lupartumab amadotin, imalumab, carlumab, imaprelimab, amatuximab, amatuximab, anetumab ravtansine, narnatumab, clivatuzumab tetraxetan, pemtumomab, gatipotuzumab, ensituximab, lemalesomab, sulesomab, enfortumab vedotin, racotumomab, monalizumab, brontictuzumab, tarextumab, vesencumab, oxelumab, gilvetmab, tislelizumab, dostarlimab, BCD-100, nivolumab, PDR001, pembrolizumab, pidilizumab, retifanlimab, spartalizumab, sintilimab, cemiplimab, olaratumab, tovetumab, rinucumab, atezolizumab, avelumab, durvalumab, lifastuzumab vedotin, bavituximab, acapatamab, capromab, rosopatamab, nezastomig, pasotuxizumab, pelgifatamab, voxalatamab, cofetuzumab pelidotin, denosumab, rosmantuzumab, cirmtuzumab, atinumab, indatuximab ravtansine, elotuzumab, sirtratumab vedotin, sonepcizumab, vandortuzumab vedotin, minretumomab, satumomab pendetide, maslimomab, ontuxizumab, tenatumomab, fresolimumab, metelimumab, lerdelimumab, tezepelumab, etigilimab, tiragotumab, placulumab, prezalumab, infliximab, nerelimomab, ozoralizumab, adalimumab, afelimomab, certolizumab pegol, golimumab, mapatumumab, conatumumab, lexatumumab, tigatuzumab, sacituzumab govitecan, votumumab, pogalizumab, letolizumab, pankomab, anatumomab mafenatox, enavatuzumab, flanvotumab, brolucizumab, ranibizumab, varisacumab, bevacizumab, faricimab, icrucumab, alacizumab pegol, ramucirumab, pritumumab, and onvatilimab.

[6186] In some aspects, the antigen binding polypeptide complexes provided herein comprise a VH1 comprising a VH of an antibody selected from the group consisting of losatuxizumab vedotin, utomilumab, urelumab, oleclumab, naptumomab estafenatox, ascrinvacumab, pintumomab, tacatuzumab tetraxetan, nesvacumab, vanucizumab, timolumab, vapaliximab, vepalimomab, enapotamab vedotin, ianalumab, belimumab, tabalumab, tibulizumab, belantamab mafodotin, teclistamab, teclistamab, detumomab, nacolomab tafenatox, eculizumab, lendalizumab, pexelizumab, pozelimab, ravulizumab, tesidolumab, vilobelimab, abagovomab, igovomab, oregovomab, sofituzumab vedotin, cantuzumab mertansine, cantuzuma bravtansine, girentuximab, altumomab pentetate, arcitumomab, besilesomab, bertilimumab, plozalizumab, mogamulizumab, leronlimab, PRO140, rovelizumab, rovelizumab, talacotuzumab, benralizumab, tavolimab, vonlerolizumab, gavilimomab, ziralimumab, fanolesomab, ipilimumab, ruplizumab, toralizumab, dapirolizumab pegol, toralizumab, dapirolizumab pegol, ruplizumab, blinatumomab, inebilizumab, loncastuximab tesirine, SGN-CD19A, tafasitamab, taplitumomab paptox, XMAB-5574, Budoprutug, Obexelimab, duvortuxizumab, englumafusp alfa, Emfizatamab, zeripatamig, siplizumab, blontuvetmab, FBTA05, ibritumomab tiuxetan, obinutuzumab, ocaratuzumab, ocrelizumab, ofatumumab, rituximab, tositumomab, ublituximab, veltuzumab, divozilimab, eramkafusp alfa, ripertamab, zuberitamab, glofitamab, nofetumomab merpentan, samalizumab, imvotamab, odronextamab, plamotamab, bectumomab, inotuzumab ozogamicin, moxetumomab pasudotox, pinatuzumab vedotin, gomiliximab, lumiliximab, inolimomab, inolimomab, daclizumab, camidanluma btesirine, basiliximab, varlilumab, omburtamab, enoblituzumab, vopratelimab, lulizumabpegol, TGN1412, muromonab-CD3, otelixizumab, teplizumab, visilizumab, epcoritamab, epcoritamab, brentuximab vedotin, iratumumab, azintuxizumab vedotin, gemtuzumab ozogamicin, lintuzumab, vadastuximab talirine, naratuximab emtansine, otlertuzumab, lilotomab satetraxetan, tetulomab, daratumumab, isatuximab, foralumab, mosunetuzumab, mosunetuzumab, cedelizumab, ibalizumab, keliximab, priliximab, tregalizumab, zanolimumab, bleselumab, iscalimab, lucatumumab, ravagalimab, selicrelumab, teneliximab, vanalimab, abciximab, bivatuzumab, iomab-B, telimomab aritox, zolimomab aritox, abituzumab, intetumumab, alemtuzumab, tamtuvetmab, lorvotuzumab mertansine, itolizumab, cusatuzumab, vorsetuzumab mafodotin, milatuzumab, iladatuzumab vedotin, polatuzumab vedotin, galiximab, cibisatamab, zolbetuximab, naxitamab, tisotumab vedotin, olendalizumab, pamrevlumab, lacnotuzumab, cabiralizumab, emactuzumab, axatilimab, gimsilumab, lenzilumab, namilumab, tremelimumab, ulocuplumab, tepoditamab, rovalpituzumab tesirine, tarlatamab, demcizumab, navicixizumab, drozitumab, parsatuzumab, depatuxizumab mafodotin, modotuximab, carotuximab, adecatumumab, adecatumumab, oportuzumab monatox, solitomab, tucotuzumab celmoleukin, edrecolomab, catumaxomab, ifabotuzumab, fibatuzumab, zalutumumab, panitumumab, cetuximab, futuximab, imgatuzumab, laprituximab emtansine, matuzumab, necitumumab, nimotuzumab, tomuzotuximab, amivantamab, amivantamab, epitumomab cituxetan, sontuzumab, duligotuzumab, elgemtumab, lumretuzumab, patritumab, scribantumab, zenocutuzumab, sibrotuzumab, burosumab, aprutumab ixadotin, radretumab, pasotuxizumab, farletuzumab, mirvetuximab soravtansine, vantictumab, TRBS07, 3F8, dinutuximab, dinutuximab beta, ecromeximab, mitumomab, andecaliximab, capromab, codrituzumab, glembatumumab vedotin, talquetamab, talquetamab, trevogrumab, indusatumab vedotin, ficlatuzumab, rilotumumab, zatuximab, pentuzimab, pentuzimab, margetuximab, timigutuzumab, trastuzumab, trastuzumab duocarmazine, trastuzumab emtansine, gancotamab, pertuzumab, ertumaxomab, emibetuzumab, telisotuzumab, telisotuzumab vedotin, derlotuximab biotin, apolizumab, onartuzumab, bersanlimab, enlimomabpegol, rontalizumab, sifalimumab, talizumab, ganitumab, istiratumab, robatumumab, teprotumumab, figitumumab, ganitumab, istiratumab, robatumumab, teprotumumab, cixutumumab, dalotuzumab, xentuzumab, dusigitumab, canakinumab, ustekinumab, ustekinumab, ustekinumab, briakinumab, briakinumab, abrezekimab, lebrikizumab, romilkimab, TNX-650, tralokinumab, anrukinzumab, brodalumab, ixekizumab, netakimab, perakizumab, secukinumab, vunakizumab, afasevikumab, afasevikumab, bimekizumab, bimekizumab, remtolumab, bermekimab, lutikizumab, lutikizumab, gevokizumab, cergutuzumab amunaleukin, fletikumab, fezakinumab, brazikumab, guselkumab, mirikizumab, tildrakizumab, risankizumab, flotetuzumab, nemolizumab, pascolizumab, dupilumab, mepolizumab, reslizumab, clazakizumab, elsilimomab, olokizumab, sarilumab, siltuximab, sirukumab, vobarilizumab, tocilizumab, SA237, satralizumab, enokizumab, prezalizumab, natalizumab, abrilumab, abrilumab, vedolizumab, volociximab, tadocizumab, etaracizumab, etrolizumab, spesolimab, vatelizumab, erlizumab, lirilumab, relatlimab, cBR96-doxorubicinimmunoconjugate, odulimomab, efalizumab, ladiratuzumab vedotin, simtuzumab, samrotamab vedotin, asclizumab, lupartumab amadotin, imalumab, carlumab, imaprelimab, amatuximab, amatuximab, anetumab ravtansine, narnatumab, clivatuzumab tetraxetan, pemtumomab, gatipotuzumab, ensituximab, lemalesomab, sulesomab, enfortumab vedotin, racotumomab, monalizumab, brontictuzumab, tarextumab, vesencumab, oxelumab, gilvetmab, tislelizumab, dostarlimab, BCD-100, nivolumab, PDR001, pembrolizumab, pidilizumab, retifanlimab, spartalizumab, sintilimab, cemiplimab, olaratumab, tovetumab, rinucumab, atezolizumab, avelumab, durvalumab, lifastuzumab vedotin, bavituximab, acapatamab, capromab, rosopatamab, nezastomig, pasotuxizumab, pelgifatamab, voxalatamab, cofetuzumab pelidotin, denosumab, rosmantuzumab, cirmtuzumab, atinumab, indatuximab ravtansine, elotuzumab, sirtratumab vedotin, sonepcizumab, vandortuzumab vedotin, minretumomab, satumomab pendetide, maslimomab, ontuxizumab, tenatumomab, fresolimumab, metelimumab, lerdelimumab, tezepelumab, etigilimab, tiragotumab, placulumab, prezalumab, infliximab, nerelimomab, ozoralizumab, adalimumab, afelimomab, certolizumab pegol, golimumab, mapatumumab, conatumumab, lexatumumab, tigatuzumab, sacituzumab govitecan, votumumab, pogalizumab, letolizumab, pankomab, anatumomab mafenatox, enavatuzumab, flanvotumab, brolucizumab, ranibizumab, varisacumab, bevacizumab, faricimab, icrucumab, alacizumab pegol, ramucirumab, pritumumab, and onvatilimab.

[6187] In some aspects, the antigen binding polypeptide complexes provided herein comprise a VH2 comprising a VH of an antibody selected from the group consisting of losatuxizumab vedotin, utomilumab, urelumab, oleclumab, naptumomab estafenatox, ascrinvacumab, pintumomab, tacatuzumab tetraxetan, nesvacumab, vanucizumab, timolumab, vapaliximab, vepalimomab, enapotamab vedotin, ianalumab, belimumab, tabalumab, tibulizumab, belantamab mafodotin, teclistamab, teclistamab, detumomab, nacolomab tafenatox, eculizumab, lendalizumab, pexelizumab, pozelimab, ravulizumab, tesidolumab, vilobelimab, abagovomab, igovomab, oregovomab, sofituzumab vedotin, cantuzumab mertansine, cantuzuma bravtansine, girentuximab, altumomab pentetate, arcitumomab, besilesomab, bertilimumab, plozalizumab, mogamulizumab, leronlimab, PRO140, rovelizumab, rovelizumab, talacotuzumab, benralizumab, tavolimab, vonlerolizumab, gavilimomab, ziralimumab, fanolesomab, ipilimumab, ruplizumab, toralizumab, dapirolizumab pegol, toralizumab, dapirolizumab pegol, ruplizumab, blinatumomab, inebilizumab, loncastuximab tesirine, SGN-CD19A, tafasitamab, taplitumomab paptox, XMAB-5574, Budoprutug, Obexelimab, duvortuxizumab, englumafusp alfa, Emfizatamab, zeripatamig, siplizumab, blontuvetmab, FBTA05, ibritumomab tiuxetan, obinutuzumab, ocaratuzumab, ocrelizumab, ofatumumab, rituximab, tositumomab, ublituximab, veltuzumab, divozilimab, eramkafusp alfa, ripertamab, zuberitamab, glofitamab, nofetumomab merpentan, samalizumab, imvotamab, odronextamab, plamotamab, bectumomab, inotuzumab ozogamicin, moxetumomab pasudotox, pinatuzumab vedotin, gomiliximab, lumiliximab, inolimomab, inolimomab, daclizumab, camidanluma btesirine, basiliximab, varlilumab, omburtamab, enoblituzumab, vopratelimab, lulizumabpegol, TGN1412, muromonab-CD3, otelixizumab, teplizumab, visilizumab, epcoritamab, epcoritamab, brentuximab vedotin, iratumumab, azintuxizumab vedotin, gemtuzumab ozogamicin, lintuzumab, vadastuximab talirine, naratuximab emtansine, otlertuzumab, lilotomab satetraxetan, tetulomab, daratumumab, isatuximab, foralumab, mosunctuzumab, mosunetuzumab, cedelizumab, ibalizumab, keliximab, priliximab, tregalizumab, zanolimumab, bleselumab, iscalimab, lucatumumab, ravagalimab, selicrelumab, teneliximab, vanalimab, abciximab, bivatuzumab, iomab-B, telimomab aritox, zolimomab aritox, abituzumab, intetumumab, alemtuzumab, tamtuvetmab, lorvotuzumab mertansine, itolizumab, cusatuzumab, vorsetuzumab mafodotin, milatuzumab, iladatuzumab vedotin, polatuzumab vedotin, galiximab, cibisatamab, zolbetuximab, naxitamab, tisotumab vedotin, olendalizumab, pamrevlumab, lacnotuzumab, cabiralizumab, emactuzumab, axatilimab, gimsilumab, lenzilumab, namilumab, tremelimumab, ulocuplumab, tepoditamab, rovalpituzumab tesirine, tarlatamab, demcizumab, navicixizumab, drozitumab, parsatuzumab, depatuxizumab mafodotin, modotuximab, carotuximab, adecatumumab, adecatumumab, oportuzumab monatox, solitomab, tucotuzumab celmoleukin, edrecolomab, catumaxomab, ifabotuzumab, fibatuzumab, zalutumumab, panitumumab, cetuximab, futuximab, imgatuzumab, laprituximab emtansine, matuzumab, necitumumab, nimotuzumab, tomuzotuximab, amivantamab, amivantamab, epitumomab cituxetan, sontuzumab, duligotuzumab, elgemtumab, lumretuzumab, patritumab, scribantumab, zenocutuzumab, sibrotuzumab, burosumab, aprutumab ixadotin, radretumab, pasotuxizumab, farletuzumab, mirvetuximab soravtansine, vantictumab, TRBS07, 3F8, dinutuximab, dinutuximab beta, ecromeximab, mitumomab, andecaliximab, capromab, codrituzumab, glembatumumab vedotin, talquetamab, talquetamab, trevogrumab, indusatumab vedotin, ficlatuzumab, rilotumumab, zatuximab, pentuzimab, pentuzimab, margetuximab, timigutuzumab, trastuzumab, trastuzumab duocarmazine, trastuzumab emtansine, gancotamab, pertuzumab, ertumaxomab, emibetuzumab, telisotuzumab, telisotuzumab vedotin, derlotuximab biotin, apolizumab, onartuzumab, bersanlimab, enlimomabpegol, rontalizumab, sifalimumab, talizumab, ganitumab, istiratumab, robatumumab, teprotumumab, figitumumab, ganitumab, istiratumab, robatumumab, teprotumumab, cixutumumab, dalotuzumab, xentuzumab, dusigitumab, canakinumab, ustekinumab, ustekinumab, ustekinumab, briakinumab, briakinumab, abrezekimab, lebrikizumab, romilkimab, TNX-650, tralokinumab, anrukinzumab, brodalumab, ixekizumab, netakimab, perakizumab, secukinumab, vunakizumab, afasevikumab, afasevikumab, bimekizumab, bimekizumab, remtolumab, bermckimab, lutikizumab, lutikizumab, gevokizumab, cergutuzumab amunaleukin, fletikumab, fezakinumab, brazikumab, gusclkumab, mirikizumab, tildrakizumab, risankizumab, flotetuzumab, nemolizumab, pascolizumab, dupilumab, mepolizumab, reslizumab, clazakizumab, elsilimomab, olokizumab, sarilumab, siltuximab, sirukumab, vobarilizumab, tocilizumab, SA237, satralizumab, enokizumab, prezalizumab, natalizumab, abrilumab, abrilumab, vedolizumab, volociximab, tadocizumab, etaracizumab, etrolizumab, spesolimab, vatelizumab, erlizumab, lirilumab, relatlimab, cBR96-doxorubicinimmunoconjugate, odulimomab, efalizumab, ladiratuzumab vedotin, simtuzumab, samrotamab vedotin, aselizumab, lupartumab amadotin, imalumab, carlumab, imaprelimab, amatuximab, amatuximab, anetumab ravtansine, narnatumab, clivatuzumab tetraxetan, pemtumomab, gatipotuzumab, ensituximab, lemalesomab, sulesomab, enfortumab vedotin, racotumomab, monalizumab, brontictuzumab, tarextumab, vesencumab, oxelumab, gilvetmab, tislelizumab, dostarlimab, BCD-100, nivolumab, PDR001, pembrolizumab, pidilizumab, retifanlimab, spartalizumab, sintilimab, cemiplimab, olaratumab, tovetumab, rinucumab, atezolizumab, avelumab, durvalumab, lifastuzumab vedotin, bavituximab, acapatamab, capromab, rosopatamab, nezastomig, pasotuxizumab, pelgifatamab, voxalatamab, cofetuzumab pelidotin, denosumab, rosmantuzumab, cirmtuzumab, atinumab, indatuximab ravtansine, elotuzumab, sirtratumab vedotin, sonepcizumab, vandortuzumab vedotin, minretumomab, satumomab pendetide, maslimomab, ontuxizumab, tenatumomab, fresolimumab, metelimumab, lerdelimumab, tezepelumab, etigilimab, tiragotumab, placulumab, prezalumab, infliximab, nerelimomab, ozoralizumab, adalimumab, afelimomab, certolizumab pegol, golimumab, mapatumumab, conatumumab, lexatumumab, tigatuzumab, sacituzumab govitecan, votumumab, pogalizumab, letolizumab, pankomab, anatumomab mafenatox, enavatuzumab, flanvotumab, brolucizumab, ranibizumab, varisacumab, bevacizumab, faricimab, icrucumab, alacizumab pegol, ramucirumab, pritumumab, and onvatilimab.

[6188] In some aspects, the antigen binding polypeptide complexes provided herein comprise a VL1 comprising (i) a complementarity determining region (CDR) 1 having an amino acid sequence that is at least 65%, at least 70%, at least 75%, at least 80%, at least 85%, at least 90%, at least 95%, at least 99%, or 100% identical to any one of SEQ ID NOs: 1096, 1103, 1110, 1120, 1127, 1134, 1141, 1148, 1155, 1162, 1169, 1174, 1181, 1188, 1199, 1211, 1221, 1228, 1235, 1247, 1254, 1261, 1266, 1271, 1278, 1285, 1292, 1299, 1306, 1313, 1319, 1326, 1339, 1352, 1359, 1366, 1373, 1382, 1394, 1401, 1408, 1414, 1421, 1428, 1441, 1448, 1455, 1461, 1468, 1475, 1488, 1495, 1508, 1519, 1526, 1531, 1538, 1544, 1556, 1568, 1574, 1581, 1594, 1601, 1608, 1615, 1622, 1629, 1636, 1643, 1650, 1657, 1672, 1679, 1689, 1697, 1708, 1715, 1718, 1723, 1727, 1738, 1743, 1752, 1761, 1763, 1769, 1776, and 1786; (ii) a CDR2 having an amino acid sequence that is at least 65%, at least 70%, at least 75%, at least 80%, at least 85%, at least 90%, at least 95%, at least 99%, or 100% identical to any one of SEQ ID NOs: 1200, 1212, 1680, 1690, 1698, 1709, 1728, 1739, 1744, 1753, 1770, and 1777; or at least 65%, at least 70%, at least 75%, at least 80%, at least 85%, at least 90%, at least 95%, at least 99%, or 100% identical to any one of amino acid sequences AAS, APS, AT, ATS, DAS, DDG, DDS, DT, DTS, DVS, EAS, FTS, GAF, GAN, GAS, GAT, GIS, GKN, GNS, HTS, KVS, LAS, LGS, LVS, NAK, NTN, QMS, RMS, RTS, SAS, TTS, WAS, YAS, YAT, YGS, YRS, and YTS; and (iii) a CDR3 having an amino acid sequence that is at least 65%, at least 70%, at least 75%, at least 80%, at least 85%, at least 90%, at least 95%, at least 99%, or 100% identical to any one of SEQ ID NOs: 1097, 1104, 1111, 1121, 1128, 1135, 1142, 1149, 1156, 1163, 1170, 1175, 1182, 1189, 1195, 1201, 1207, 1213, 1222, 1229, 1236, 2009, 1248, 1255, 1262, 1267, 1272, 1279, 1286, 1293, 1300, 1307, 1320, 1327, 1333, 1340, 1346, 1353, 1360, 1367, 1374, 1383, 1389, 1395, 1402, 1409, 1415, 1422, 1429, 1435, 1442, 1449, 1456, 1462, 1469, 1476, 1482, 1489, 1496, 1502, 1509, 1513, 1520, 1532, 1539, 1545, 1557, 1562, 1569, 1575, 1582, 1588, 1595, 1602, 1609, 1616, 1623, 1630, 1637, 1644, 1651, 1658, 1663, 1673, 1681, 1691, 1699, 1710, 1729, 1735, 1745, 1751, 1754, 1778, 1787, and 1976.

[6189] In some aspects, the antigen binding polypeptide complexes provided herein comprise a VL2 comprising (i) a complementarity determining region (CDR) 1 having an amino acid sequence that is at least 65%, at least 70%, at least 75%, at least 80%, at least 85%, at least 90%, at least 95%, at least 99%, or 100% identical to any one of SEQ ID NOs: 1096, 1103, 1110, 1120, 1127, 1134, 1141, 1148, 1155, 1162, 1169, 1174, 1181, 1188, 1199, 1211, 1221, 1228, 1235, 1247, 1254, 1261, 1266, 1271, 1278, 1285, 1292, 1299, 1306, 1313, 1319, 1326, 1339, 1352, 1359, 1366, 1373, 1382, 1394, 1401, 1408, 1414, 1421, 1428, 1441, 1448, 1455, 1461, 1468, 1475, 1488, 1495, 1508, 1519, 1526, 1531, 1538, 1544, 1556, 1568, 1574, 1581, 1594, 1601, 1608, 1615, 1622, 1629, 1636, 1643, 1650, 1657, 1672, 1679, 1689, 1697, 1708, 1715, 1718, 1723, 1727, 1738, 1743, 1752, 1761, 1763, 1769, 1776, and 1786; (ii) a CDR2 having an amino acid sequence that is at least 65%, at least 70%, at least 75%, at least 80%, at least 85%, at least 90%, at least 95%, at least 99%, or 100% identical to any one of SEQ ID NOs: 1200, 1212, 1680, 1690, 1698, 1709, 1728, 1739, 1744, 1753, 1770, and 1777; or at least 65%, at least 70%, at least 75%, at least 80%, at least 85%, at least 90%, at least 95%, at least 99%, or 100% identical to any one of amino acid sequences AAS, APS, AT, ATS, DAS, DDG, DDS, DT, DTS, DVS, EAS, FTS, GAF, GAN, GAS, GAT, GIS, GKN, GNS, HTS, KVS, LAS, LGS, LVS, NAK, NTN, QMS, RMS, RTS, SAS, TTS, WAS, YAS, YAT, YGS, YRS, and YTS; and (iii) a CDR3 having an amino acid sequence that is at least 65%, at least 70%, at least 75%, at least 80%, at least 85%, at least 90%, at least 95%, at least 99%, or 100% identical to any one of SEQ ID NOs: 1097, 1104, 1111, 1121, 1128, 1135, 1142, 1149, 1156, 1163, 1170, 1175, 1182, 1189, 1195, 1201, 1207, 1213, 1222, 1229, 1236, 2009, 1248, 1255, 1262, 1267, 1272, 1279, 1286, 1293, 1300, 1307, 1320, 1327, 1333, 1340, 1346, 1353, 1360, 1367, 1374, 1383, 1389, 1395, 1402, 1409, 1415, 1422, 1429, 1435, 1442, 1449, 1456, 1462, 1469, 1476, 1482, 1489, 1496, 1502, 1509, 1513, 1520, 1532, 1539, 1545, 1557, 1562, 1569, 1575, 1582, 1588, 1595, 1602, 1609, 1616, 1623, 1630, 1637, 1644, 1651, 1658, 1663, 1673, 1681, 1691, 1699, 1710, 1729, 1735, 1745, 1751, 1754, 1778, 1787, and 1976.

[6190] In some aspects, the antigen binding polypeptide complexes provided herein comprise a VH1 comprising (i) a complementarity determining region (CDR) 1 having an amino acid sequence that is at least 65%, at least 70%, at least 75%, at least 80%, at least 85%, at least 90%, at least 95%, at least 99%, or 100% identical to any one of SEQ ID NOs: 1099, 1106, 1113, 1117, 1123, 1130, 1137, 1144, 1151, 1158, 1165, 1177, 1184, 1191, 1203, 1215, 1224, 1231, 1238, 1243, 1250, 1257, 1264, 1274, 1281, 1288, 1295, 1302, 1309, 1315, 1322, 1329, 1335, 1342, 1348, 1355, 1362, 1369, 1376, 1385, 1397, 1404, 1417, 1424, 1431, 1437, 1444, 1451, 1458, 1464, 1471, 1478, 1484, 1491, 1498, 1504, 1511, 1515, 1522, 1534, 1547, 1552, 1564, 1577, 1584, 1590, 1597, 1604, 1611, 1618, 1625, 1632, 1639, 1646, 1653, 1660, 1665, 1675, 1683, 1693, 1701, 1705, 1716, 1719, 1731, 1736, 1747, 1756, 1772, 1780, and 1789; (ii) a CDR2 having an amino acid sequence that is at least 65%, at least 70%, at least 75%, at least 80%, at least 85%, at least 90%, at least 95%, at least 99%, or 100% identical to any one of SEQ ID NOs: 1100, 1107, 1114, 1118, 1124, 1131, 1138, 1145, 1152, 1159, 1166, 1178, 1185, 1192, 1204, 1216, 1225, 1232, 1239, 1244, 1251, 1258, 1275, 1282, 1289, 1296, 1303, 1310, 1316, 1323, 1330, 1336, 1343, 1349, 1356, 1363, 1370, 1377, 1386, 1391, 1398, 1405, 1411, 1418, 1425, 1432, 1438, 1445, 1452, 1465, 1472, 1479, 1485, 1492, 1499, 1505, 1516, 1523, 1528, 1535, 1541, 1548, 1553, 1559, 1565, 1571, 1578, 1585, 1591, 1598, 1605, 1612, 1619, 1626, 1633, 1640, 1647, 1654, 1666, 1676, 1684, 1687, 1694, 1702, 1706, 1712, 1717, 1720, 1725, 1732, 1737, 1741, 1748, 1757, 1767, 1773, 1781, and 1790; and (iii) a CDR3 having an amino acid sequence that is at least 65%, at least 70%, at least 75%, at least 80%, at least 85%, at least 90%, at least 95%, at least 99%, or 100% identical to any one of SEQ ID NOs: 1101, 1108, 1115, 1125, 1132, 1139, 1146, 1153, 1160, 1167, 1172, 1179, 1186, 1193, 1197, 1205, 1209, 1217, 1226, 1233, 1240, 1245, 1252, 1259, 1269, 1276, 1283, 1290, 1297, 1304, 1311, 1317, 1324, 1331, 1337, 1344, 1350, 1357, 1364, 1371, 1378, 1387, 1392, 1399, 1406, 1412, 1419, 1426, 1433, 1439, 1446, 1453, 1459, 1466, 1473, 1480, 1486, 1493, 1500, 1506, 1517, 1524, 1529, 1536, 1542, 1549, 1554, 1560, 1566, 1572, 1579, 1586, 1592, 1599, 1606, 1613, 1620, 1627, 1634, 1641, 1648, 1655, 1661, 1667, 1670, 1677, 1685, 1688, 1695, 1703, 1707, 1713, 1733, 1749, 1758, 1762, 1774, 1782, 1791, and 1975.

[6191] In some aspects, the antigen binding polypeptide complexes provided herein comprise a VH2 comprising (i) a complementarity determining region (CDR) 1 having an amino acid sequence that is at least 65%, at least 70%, at least 75%, at least 80%, at least 85%, at least 90%, at least 95%, at least 99%, or 100% identical to any one of SEQ ID NOs: 1099, 1106, 1113, 1117, 1123, 1130, 1137, 1144, 1151, 1158, 1165, 1177, 1184, 1191, 1203, 1215, 1224, 1231, 1238, 1243, 1250, 1257, 1264, 1274, 1281, 1288, 1295, 1302, 1309, 1315, 1322, 1329, 1335, 1342, 1348, 1355, 1362, 1369, 1376, 1385, 1397, 1404, 1417, 1424, 1431, 1437, 1444, 1451, 1458, 1464, 1471, 1478, 1484, 1491, 1498, 1504, 1511, 1515, 1522, 1534, 1547, 1552, 1564, 1577, 1584, 1590, 1597, 1604, 1611, 1618, 1625, 1632, 1639, 1646, 1653, 1660, 1665, 1675, 1683, 1693, 1701, 1705, 1716, 1719, 1731, 1736, 1747, 1756, 1772, 1780, and 1789; (ii) a CDR2 having an amino acid sequence that is at least 65%, at least 70%, at least 75%, at least 80%, at least 85%, at least 90%, at least 95%, at least 99%, or 100% identical to any one of SEQ ID NOs: 1100, 1107, 1114, 1118, 1124, 1131, 1138, 1145, 1152, 1159, 1166, 1178, 1185, 1192, 1204, 1216, 1225, 1232, 1239, 1244, 1251, 1258, 1275, 1282, 1289, 1296, 1303, 1310, 1316, 1323, 1330, 1336, 1343, 1349, 1356, 1363, 1370, 1377, 1386, 1391, 1398, 1405, 1411, 1418, 1425, 1432, 1438, 1445, 1452, 1465, 1472, 1479, 1485, 1492, 1499, 1505, 1516, 1523, 1528, 1535, 1541, 1548, 1553, 1559, 1565, 1571, 1578, 1585, 1591, 1598, 1605, 1612, 1619, 1626, 1633, 1640, 1647, 1654, 1666, 1676, 1684, 1687, 1694, 1702, 1706, 1712, 1717, 1720, 1725, 1732, 1737, 1741, 1748, 1757, 1767, 1773, 1781, and 1790; and (iii) a CDR3 having an amino acid sequence that is at least 65%, at least 70%, at least 75%, at least 80%, at least 85%, at least 90%, at least 95%, at least 99%, or 100% identical to any one of SEQ ID NOs: 1101, 1108, 1115, 1125, 1132, 1139, 1146, 1153, 1160, 1167, 1172, 1179, 1186, 1193, 1197, 1205, 1209, 1217, 1226, 1233, 1240, 1245, 1252, 1259, 1269, 1276, 1283, 1290, 1297, 1304, 1311, 1317, 1324, 1331, 1337, 1344, 1350, 1357, 1364, 1371, 1378, 1387, 1392, 1399, 1406, 1412, 1419, 1426, 1433, 1439, 1446, 1453, 1459, 1466, 1473, 1480, 1486, 1493, 1500, 1506, 1517, 1524, 1529, 1536, 1542, 1549, 1554, 1560, 1566, 1572, 1579, 1586, 1592, 1599, 1606, 1613, 1620, 1627, 1634, 1641, 1648, 1655, 1661, 1667, 1670, 1677, 1685, 1688, 1695, 1703, 1707, 1713, 1733, 1749, 1758, 1762, 1774, 1782, 1791, and 1975.

[6192] In some aspects, the antigen binding polypeptide complexes provided herein comprise a VL1 comprising an amino acid sequence that is at least 65%, at least 70%, at least 75%, at least 80%, at least 85%, at least 90%, at least 95%, at least 99%, or 100% identical to any one of SEQ ID NOs: 1098, 1105, 1112, 1122, 1129, 1136, 1143, 1150, 1157, 1164, 1171, 1176, 1183, 1190, 1196, 1202, 1208, 1214, 1219, 1223, 1230, 1237, 1242, 1249, 1256, 1263, 1268, 1273, 1280, 1287, 1294, 1301, 1308, 1314, 1321, 1328, 1334, 1341, 1347, 1354, 1361, 1368, 1375, 1380, 1384, 1390, 1396, 1403, 1410, 1416, 1423, 1430, 1436, 1443, 1450, 1457, 1463, 1470, 1477, 1483, 1490, 1497, 1503, 1510, 1514, 1521, 1527, 1533, 1540, 1546, 1551, 1558, 1563, 1570, 1576, 1583, 1589, 1596, 1603, 1610, 1617, 1624, 1631, 1638, 1645, 1652, 1659, 1664, 1669, 1674, 1682, 1692, 1700, 1711, 1721, 1724, 1730, 1740, 1746, 1755, 1764, 1766, 1771, 1779, 1784, and 1788.

[6193] In some aspects, the antigen binding polypeptide complexes provided herein comprise a VL2 comprising an amino acid sequence that is at least 65%, at least 70%, at least 75%, at least 80%, at least 85%, at least 90%, at least 95%, at least 99%, or 100% identical to any one of SEQ ID NOs: 1098, 1105, 1112, 1122, 1129, 1136, 1143, 1150, 1157, 1164, 1171, 1176, 1183, 1190, 1196, 1202, 1208, 1214, 1219, 1223, 1230, 1237, 1242, 1249, 1256, 1263, 1268, 1273, 1280, 1287, 1294, 1301, 1308, 1314, 1321, 1328, 1334, 1341, 1347, 1354, 1361, 1368, 1375, 1380, 1384, 1390, 1396, 1403, 1410, 1416, 1423, 1430, 1436, 1443, 1450, 1457, 1463, 1470, 1477, 1483, 1490, 1497, 1503, 1510, 1514, 1521, 1527, 1533, 1540, 1546, 1551, 1558, 1563, 1570, 1576, 1583, 1589, 1596, 1603, 1610, 1617, 1624, 1631, 1638, 1645, 1652, 1659, 1664, 1669, 1674, 1682, 1692, 1700, 1711, 1721, 1724, 1730, 1740, 1746, 1755, 1764, 1766, 1771, 1779, 1784, and 1788.

[6194] In some aspects, the antigen binding polypeptide complexes provided herein comprise a VH1 comprising an amino acid sequence that is at least 65%, at least 70%, at least 75%, at least 80%, at least 85%, at least 90%, at least 95%, at least 99%, or 100% identical to any one of SEQ ID NOs: 1102, 1109, 1116, 1119, 1126, 1133, 1140, 1147, 1154, 1161, 1168, 1173, 1180, 1187, 1194, 1198, 1206, 1210, 1218, 1220, 1227, 1234, 1241, 1246, 1253, 1260, 1265, 1270, 1277, 1284, 1291, 1298, 1305, 1312, 1318, 1325, 1332, 1338, 1345, 1351, 1358, 1365, 1372, 1379, 1381, 1388, 1393, 1400, 1407, 1413, 1420, 1427, 1434, 1440, 1447, 1454, 1460, 1467, 1474, 1481, 1487, 1494, 1501, 1507, 1512, 1518, 1525, 1530, 1537, 1543, 1550, 1555, 1561, 1567, 1573, 1580, 1587, 1593, 1600, 1607, 1614, 1621, 1628, 1635, 1642, 1649, 1656, 1662, 1668, 1671, 1678, 1686, 1696, 1704, 1714, 1722, 1726, 1734, 1742, 1750, 1759, 1760, 1765, 1768, 1775, 1783, 1785, and 1792.

[6195] In some aspects, the antigen binding polypeptide complexes provided herein comprise a VH2 comprising an amino acid sequence that is at least 65%, at least 70%, at least 75%, at least 80%, at least 85%, at least 90%, at least 95%, at least 99%, or 100% identical to any one of SEQ ID NOs: 1102, 1109, 1116, 1119, 1126, 1133, 1140, 1147, 1154, 1161, 1168, 1173, 1180, 1187, 1194, 1198, 1206, 1210, 1218, 1220, 1227, 1234, 1241, 1246, 1253, 1260, 1265, 1270, 1277, 1284, 1291, 1298, 1305, 1312, 1318, 1325, 1332, 1338, 1345, 1351, 1358, 1365, 1372, 1379, 1381, 1388, 1393, 1400, 1407, 1413, 1420, 1427, 1434, 1440, 1447, 1454, 1460, 1467, 1474, 1481, 1487, 1494, 1501, 1507, 1512, 1518, 1525, 1530, 1537, 1543, 1550, 1555, 1561, 1567, 1573, 1580, 1587, 1593, 1600, 1607, 1614, 1621, 1628, 1635, 1642, 1649, 1656, 1662, 1668, 1671, 1678, 1686, 1696, 1704, 1714, 1722, 1726, 1734, 1742, 1750, 1759, 1760, 1765, 1768, 1775, 1783, 1785, and 1792.

[6196] In some aspects, the infectious disease antigen that is not a sarbecovirus antigen is:
[6197] (i) a viral antigen elected from the group consisting of an influenza virus (A, B, C) antigen (e.g., influenza virus envelope proteins, for example, influenza virus neuraminidase (NA, N1, N2, N3, N4, N5, N6, N7, N8, N9, N10, N11), influenza virus hemagglutinin (H1, H2, H3, H4, H5, H6, H7, H8, H9, H10, H11, H12, H13, H14, H15, H16, H17, H18) (e.g., H1N1, H3N2, H5N1, H7N9, H9N2), Yamagata virus antigen, Victoria virus antigen, influenza virus structural proteins (e.g., M1, M2, capsid protein), influenza virus functional proteins (e.g., ribonucleoprotein (NP), primary interferon antagonist (NS1), nuclear export protein (NEP)) influenza virus accessory proteins (e.g., PB2, PB1, or PA), for example, anti-HA, anti-NA, anti-H1, anti-H3, anti-H5, anti-H7, anti-H9, anti-N1, anti-N2, anti-N9, anti-H1N1, anti-H3N2, anti-H5N1, anti-H7N9, anti-H9N2, anti-A protein, anti-B protein, anti-stem, anti-M1, anti-M2, anti-capsid, anti-NP, anti-NS1, anti-NEP, anti-PB1, anti-PB2, and anti-PA); a swine influenza virus antigen (e.g., swine flu hemagglutinin, swine flu neuraminidase); a classical swine fever (CSF) (hog colera) virus antigen; an equine influenza virus antigen (e.g., equine influenza virus typeA/Miami 63 neuraminidase, equine influenza virus type A/Kentucky 81 neuraminidase, equine influenza virus type A/Alaska 91 neuraminidase); parainfluenza viruses (e.g., bovine parainfluenza virus, bovine parainfluenza virus type 3 fusion protein, bovine parainfluenza virus type 3 hemagglutinin neuraminidase); a (human) respiratory syncytial virus (RSV)-viral antigen (e.g., RSV F glycoprotein, RSV G glycoprotein, F protein of respiratory syncytial virus, RSV fusion glycoprotein); a herpes simplex virus (HSV) antigen (e.g., herpes simplex virus glycoproteins gB, gC, gD, and gE, herpes simplex virus type 2 glycoprotein gB); a Dengue virus antigen (e.g., core protein, matrix protein, glycoprotein E of Dengue virus, or other protein of Dengue virus); a measles virus antigen (e.g., hemagglutinin); a poliovirus 1 antigen (e.g., poliovirus 1 proteins (VP1)), a HIV-1 antigen and HIV-2 antigen (e.g., HIV envelope proteins (e.g., envelope glycoproteins of HIV 1, HIV envelope glycoprotein (Env), HIV envelope glycoprotein gp160, HIV envelope surface glycoprotein gp120, HIV transmembrane envelope protein gp41), HIV structural proteins (e.g., p17, p24, p7, p55), HIV functional proteins (e.g., p66, HIV-1 protease (PR), p31), HIV accessory proteins (e.g., Nef, Tat, Rev, Vif, Vpr, Vpu)); a hepatitis virus (HAV, HBV, HCV, HDV, HEV) antigen (e.g., hepatitis B virus antigen (e.g., surface antigen, core protein), hepatitis C virus antigen (e.g., glycoprotein E1E2)); a rabies virus (Rabies lyssavirus) antigen (e.g., rabies virus glycoprotein, e.g., G glycoprotein); a pseudorabies virus antigen (e.g., pseudorabies virus g50 (gpD), pseudorabies virus II (gpB), pseudorabies virus III (gpC), pseudorabies virus glycoprotein H, pseudorabies virus glycoprotein E); a papillomavirus (HPV) antigen; an Epstein-Barr virus (EBV) (Gamma herpes virus 4) antigen; a Herpes simplex virus (HSV, HSV-1, HSV-2) antigen (e.g., human herpes virus 8, equine herpes virus antigen (e.g., type 1 glycoprotein B, type 1 glycoprotein D)); a Herpes zoster antigen; a Cytomegalovirus antigen (e.g., cytomegalovirus glycoprotein B); a Zika virus antigen; a Transmissible gastroenteritis virus (TGEV) antigen (e.g., glycoprotein 195, matrix protein); a rotavirus antigen (e.g., swine rotavirus glycoprotein 38); a parvovirus antigen (e.g., swine parvovirus capsid protein); a filoviruses (e.g., Marburg and Ebola) antigen; a bovine viral diarrhea virus antigen (e.g., glycoprotein 55); a Newcastle disease virus antigen (hemagglutinin, neuraminidase); an orthopoxvirus antigen; a coxsackievirus antigen and aphthovirus (foot and mouth disease virus) antigen; a yellow fever virus antigen; a Chikunga virus antigen; a Nipah virus antigen; an African swine fever virus antigen; a rhinotracheitis virus antigen (e.g., infectious bovine rhinotracheitis virus glycoprotein E, glycoprotein G); a laryngotracheitis virus antigen (e.g., infectious laryngotracheitis virus glycoprotein G or glycoprotein I); a La Crosse virus antigen (e.g., La Crosse virus glycoprotein); a neonatal calf diarrhoea virus antigen; a Venezuelan equine encephalomyelitis virus antigen; a punta toro virus antigen; a murine leukemia virus antigen; a mouse mammary tumor virus antigen; a bovine respiratory syncytial virus antigen (e.g., bovine respiratory syncytial virus attachment protein (BRSV G), bovine respiratory syncytial virus fusion protein (BRSV F), bovine respiratory syncytial virus nucleocapsid protein (BRSVN)); a bovine E viral diarrhoea virus antigen (e.g., glycoprotein 48 and glycoprotein 53); a metapneumovirus (HMPV) antigen; and an Ebola virus antigen (e.g., ebolavirus glycoprotein, e.g., Zaire ebolavirus glycoprotein); or
[6198] (ii) a bacterial or parasite antigen selected from the group consisting of a Plasmodium (e.g., Plasmodium falciparum, Plasmodium vivax, Plasmodium malariae, Plasmodium ovale, Plasmodium knowlesi) antigen, a Streptococcus (e.g., Streptococcus pneumoniae. Streptococcus pyogenes, Streptococcus agalactiae, Streptococcus mutans, Streptococcus viridans, Streptococcus anginosus, Streptococcus intermedius, Streptococcus constellatus) antigen (e.g., 24M epitope), a Neisseria gonorrhoeae antigen (e.g., gonococcal pilin), a Corynebacterium antigen (e.g., Corynebacterium diphtheria (diptheria toxin), Corynebacterium ulcerans, Corynebacterium pseudotuberculosis), Mycobacterium tuberculosis antigens, Brachyspira hyodysenteriae (Serpulina hydodysenteriae) antigen (e.g., Serpulina hydodysenteriae protective antigen), a Chlamydia antigen (e.g., Chlamydia trachomatis) (e.g., MOMP and PorB), a Mycoplasma sp. (e.g., Mycoplasma genitalium. Mycoplasma hyopneumoniae, Mycoplasma pneumonia) antigen, a Staphylococcus (e.g., Staphylococcus aureus, coagulase-negative staphylococci (CoNS), Staphylococcus aureus alpha toxin, Staphylococcus aureus bi-component leucocidin) antigen, a Klebsiella sp. antigen, an Escherichia coli antigen (e.g., E. coli shiga toxin type-2, E. coli shiga toxin type-1), a Bacillus sp. (e.g., Bacillus anthracis, e.g., Bacillus anthracis anthrax) antigen, a Pseudomonas aeruginosa antigen (e.g., Pseudomonas aeruginosa type III secretion system), an Enterococcus sp. antigen, an Enterobacter sp. antigen, a Proteus sp. antigen, an Actinobacter sp. antigen, a Mycobacterium avium (Mycobacterium avium complex (MAC)) antigen, a Salmonella bacteria antigen, a Clostridium difficile antigen, a Toxoplasma (e.g., Toxoplasma gondii) antigen, a Histoplasma antigen, a Candida antigen, a Coccidioides antigen, a Cryptococcus antigen, a Cryptosporidium antigen, and a Cystoisospora (e.g., Cystoisospora belli) antigen, and another antigen (e.g., endotoxins, lymphotoxins (e.g., lymphotoxin alpha LTA), phosphatidylserine, Hsp90, CCR5, lipoteichoic acid, clumping factor A).

[6199] In some aspects, the antigen binding polypeptide complexes provided herein comprise a VL1 comprising a light chain complementarity determining region 1 (LCDR1), LCDR2, and/or LCDR3 of an antibody selected from the group consisting of libivirumab, rmab, rivabazumab pegol, setoxaximab, suvizumab, suvratoxumab, sevirumab, pritoxaximab, porgaviximab, REGN-EB3, obiltoxaximab, gedivumab, foravirumab, larcaviximab, motavizumab, palivizumab, rafivirumab, regavirumab, tuvirumab, cosfroviximab, felvizumab, atidortoxumab, edobacomab, nebacumab, pateclizumab, raxibacumab, urtoxazumab, tosatoxumab, berlimatoxumab, CR6261, diridavumab, firivumab, lesofavumab, navivumab, exbivirumab, lenvervimab, bavituximab, bezlotoxumab, efungumab, leronlimab, nirsevimab, pagibaximab, panobacumab, tefibazumab, ansuvimab, atoltivimab, maftivimab, and odesivimab.

[6200] In some aspects, the antigen binding polypeptide complexes provided herein comprise a VL2 comprising a light chain complementarity determining region 1 (LCDR1), LCDR2, and/or LCDR3 of an antibody selected from the group consisting of libivirumab, rmab, rivabazumab pegol, setoxaximab, suvizumab, suvratoxumab, sevirumab, pritoxaximab, porgaviximab, REGN-EB3, obiltoxaximab, gedivumab, foravirumab, larcaviximab, motavizumab, palivizumab, rafivirumab, regavirumab, tuvirumab, cosfroviximab, felvizumab, atidortoxumab, edobacomab, nebacumab, pateclizumab, raxibacumab, urtoxazumab, tosatoxumab, berlimatoxumab, CR6261, diridavumab, firivumab, lesofavumab, navivumab, exbivirumab, lenvervimab, bavituximab, bezlotoxumab, efungumab, leronlimab, nirsevimab, pagibaximab, panobacumab, tefibazumab, ansuvimab, atoltivimab, maftivimab, and odesivimab.

[6201] In some aspects, the antigen binding polypeptide complexes provided herein comprise a VH1 comprising a heavy chain complementarity determining region 1 (HCDR1), HCDR2, and/or HCDR3 of an antibody selected from the group consisting of libivirumab, rmab, rivabazumab pegol, setoxaximab, suvizumab, suvratoxumab, sevirumab, pritoxaximab, porgaviximab, REGN-EB3, obiltoxaximab, gedivumab, foravirumab, larcaviximab, motavizumab, palivizumab, rafivirumab, regavirumab, tuvirumab, cosfroviximab, felvizumab, atidortoxumab, edobacomab, nebacumab, pateclizumab, raxibacumab, urtoxazumab, tosatoxumab, berlimatoxumab, CR6261, diridavumab, firivumab, lesofavumab, navivumab, exbivirumab, lenvervimab, bavituximab, bezlotoxumab, efungumab, leronlimab, nirsevimab, pagibaximab, panobacumab, tefibazumab, ansuvimab, atoltivimab, maftivimab, and odesivimab.

[6202] In some aspects, the antigen binding polypeptide complexes provided herein comprise a VH2 comprising a heavy chain complementarity determining region 1 (HCDR1), HCDR2, and/or HCDR3 of an antibody selected from the group consisting of libivirumab, rmab, rivabazumab pegol, setoxaximab, suvizumab, suvratoxumab, sevirumab, pritoxaximab, porgaviximab, REGN-EB3, obiltoxaximab, gedivumab, foravirumab, larcaviximab, motavizumab, palivizumab, rafivirumab, regavirumab, tuvirumab, cosfroviximab, felvizumab, atidortoxumab, edobacomab, nebacumab, pateclizumab, raxibacumab, urtoxazumab, tosatoxumab, berlimatoxumab, CR6261, diridavumab, firivumab, lesofavumab, navivumab, exbivirumab, lenvervimab, bavituximab, bezlotoxumab, efungumab, leronlimab, nirsevimab, pagibaximab, panobacumab, tefibazumab, ansuvimab, atoltivimab, maftivimab, and odesivimab.

[6203] In some aspects, the antigen binding polypeptide complexes provided herein comprise a VL1 comprising a VL of an antibody selected from the group consisting of libivirumab, rmab, rivabazumab pegol, setoxaximab, suvizumab, suvratoxumab, sevirumab, pritoxaximab, porgaviximab, REGN-EB3, obiltoxaximab, gedivumab, foravirumab, larcaviximab, motavizumab, palivizumab, rafivirumab, regavirumab, tuvirumab, cosfroviximab, felvizumab, atidortoxumab, edobacomab, nebacumab, pateclizumab, raxibacumab, urtoxazumab, tosatoxumab, berlimatoxumab, CR6261, diridavumab, firivumab, lesofavumab, navivumab, exbivirumab, lenvervimab, bavituximab, bezlotoxumab, efungumab, leronlimab, nirsevimab, pagibaximab, panobacumab, tefibazumab, ansuvimab, atoltivimab, maftivimab, and odesivimab.

[6204] In some aspects, the antigen binding polypeptide complexes provided herein comprise a VL2 comprising a VL of an antibody selected from the group consisting of libivirumab, rmab, rivabazumab pegol, setoxaximab, suvizumab, suvratoxumab, sevirumab, pritoxaximab, porgaviximab, REGN-EB3, obiltoxaximab, gedivumab, foravirumab, larcaviximab, motavizumab, palivizumab, rafivirumab, regavirumab, tuvirumab, cosfroviximab, felvizumab, atidortoxumab, edobacomab, nebacumab, pateclizumab, raxibacumab, urtoxazumab, tosatoxumab, berlimatoxumab, CR6261, diridavumab, firivumab, lesofavumab, navivumab, exbivirumab, lenvervimab, bavituximab, bezlotoxumab, efungumab, leronlimab, nirsevimab, pagibaximab, panobacumab, tefibazumab, ansuvimab, atoltivimab, maftivimab, and odesivimab.

[6205] In some aspects, the antigen binding polypeptide complexes provided herein comprise a VH1 comprising a VH of an antibody selected from the group consisting of libivirumab, rmab, rivabazumab pegol, setoxaximab, suvizumab, suvratoxumab, sevirumab, pritoxaximab, porgaviximab, REGN-EB3, obiltoxaximab, gedivumab, foravirumab, larcaviximab, motavizumab, palivizumab, rafivirumab, regavirumab, tuvirumab, cosfroviximab, felvizumab, atidortoxumab, edobacomab, nebacumab, pateclizumab, raxibacumab, urtoxazumab, tosatoxumab, berlimatoxumab, CR6261, diridavumab, firivumab, lesofavumab, navivumab, exbivirumab, lenvervimab, bavituximab, bezlotoxumab, efungumab, leronlimab, nirsevimab, pagibaximab, panobacumab, tefibazumab, ansuvimab, atoltivimab, maftivimab, and odesivimab.

[6206] In some aspects, the antigen binding polypeptide complexes provided herein comprise a VH2 comprising a VH of an antibody selected from the group consisting of libivirumab, rmab, rivabazumab pegol, setoxaximab, suvizumab, suvratoxumab, sevirumab, pritoxaximab, porgaviximab, REGN-EB3, obiltoxaximab, gedivumab, foravirumab, larcaviximab, motavizumab, palivizumab, rafivirumab, regavirumab, tuvirumab, cosfroviximab, felvizumab, atidortoxumab, edobacomab, nebacumab, pateclizumab, raxibacumab, urtoxazumab, tosatoxumab, berlimatoxumab, CR6261, diridavumab, firivumab, lesofavumab, navivumab, exbivirumab, lenvervimab, bavituximab, bezlotoxumab, efungumab, leronlimab, nirsevimab, pagibaximab, panobacumab, tefibazumab, ansuvimab, atoltivimab, maftivimab, and odesivimab.

[6207] In some aspects, the antigen binding polypeptide complexes provided herein comprise a VL1 comprising (i) a complementarity determining region (CDR) 1 having an amino acid sequence that is at least 65%, at least 70%, at least 75%, at least 80%, at least 85%, at least 90%, at least 95%, at least 99%, or 100% identical to any one of SEQ ID NOs: 1428, 1793, 1798, 1810, 1817, 1824, 1977, 1985, 1993 and 2001; (ii) a CDR2 having an amino acid sequence that is at least 65%, at least 70%, at least 75%, at least 80%, at least 85%, at least 90%, at least 95%, at least 99%, or 100% identical to any one of SEQ ID NOS: 1978, 1986, 1994, and 2002; or at least 65%, at least 70%, at least 75%, at least 80%, at least 85%, at least 90%, at least 95%, at least 99%, or 100% identical to any one of amino acid sequences YTS, DTS, GAS, and AAS; and (iii) a CDR3 having an amino acid sequence that is at least 65%, at least 70%, at least 75%, at least 80%, at least 85%, at least 90%, at least 95%, at least 99%, or 100% identical to any one of SEQ ID NOs: 1229, 1799, 1805, 1811, 1818, 1825, 1979, 1987, 1995, and 2003.

[6208] In some aspects, the antigen binding polypeptide complexes provided herein comprise a VL2 comprising (i) a complementarity determining region (CDR) 1 having an amino acid sequence that is at least 65%, at least 70%, at least 75%, at least 80%, at least 85%, at least 90%, at least 95%, at least 99%, or 100% identical to any one of SEQ ID NOs: 1428, 1793, 1798, 1810, 1817, 1824, 1977, 1985, 1993 and 2001; (ii) a CDR2 having an amino acid sequence that is at least 65%, at least 70%, at least 75%, at least 80%, at least 85%, at least 90%, at least 95%, at least 99%, or 100% identical to any one of SEQ ID NOS: 1978, 1986, 1994, and 2002; or at least 65%, at least 70%, at least 75%, at least 80%, at least 85%, at least 90%, at least 95%, at least 99%, or 100% identical to any one of amino acid sequences YTS, DTS, GAS, and AAS; and (iii) a CDR3 having an amino acid sequence that is at least 65%, at least 70%, at least 75%, at least 80%, at least 85%, at least 90%, at least 95%, at least 99%, or 100% identical to any one of SEQ ID NOs: 1229, 1799, 1805, 1811, 1818, 1825, 1979, 1987, 1995, and 2003.

[6209] In some aspects, the antigen binding polypeptide complexes provided herein comprise a VH1 comprising (i) a complementarity determining region (CDR) 1 having an amino acid sequence that is at least 65%, at least 70%, at least 75%, at least 80%, at least 85%, at least 90%, at least 95%, at least 99%, or 100% identical to any one of SEQ ID NOs: 1577, 1795, 1801, 1813, 1820, 1827, 1981, 1989, 1997, and 2005; (ii) a CDR2 having an amino acid sequence that is at least 65%, at least 70%, at least 75%, at least 80%, at least 85%, at least 90%, at least 95%, at least 99%, or 100% identical to any one of SEQ ID NOs: 1159, 1802, 1807, 1814, 1821, 1828, 1982, 1990, 1998, and 2006; and (iii) a CDR3 having an amino acid sequence that is at least 65%, at least 70%, at least 75%, at least 80%, at least 85%, at least 90%, at least 95%, at least 99%, or 100% identical to any one of SEQ ID NOs: 1796, 1803, 1808, 1815, 1822, 1829, 1983, 1991, 1999, and 2007.

[6210] In some aspects, the antigen binding polypeptide complexes provided herein comprise a VH2 comprising (i) a complementarity determining region (CDR) 1 having an amino acid sequence that is at least 65%, at least 70%, at least 75%, at least 80%, at least 85%, at least 90%, at least 95%, at least 99%, or 100% identical to any one of SEQ ID NOs: 1577, 1795, 1801, 1813, 1820, 1827, 1981, 1989, 1997, and 2005; (ii) a CDR2 having an amino acid sequence that is at least 65%, at least 70%, at least 75%, at least 80%, at least 85%, at least 90%, at least 95%, at least 99%, or 100% identical to any one of SEQ ID NOs: 1159, 1802, 1807, 1814, 1821, 1828, 1982, 1990, 1998, and 2006; and (iii) a CDR3 having an amino acid sequence that is at least 65%, at least 70%, at least 75%, at least 80%, at least 85%, at least 90%, at least 95%, at least 99%, or 100% identical to any one of SEQ ID NOs: 1796, 1803, 1808, 1815, 1822, 1829, 1983, 1991, 1999, and 2007.

[6211] In some aspects, the antigen binding polypeptide complexes provided herein comprise a VL1 comprising an amino acid sequence that is at least 65%, at least 70%, at least 75%, at least 80%, at least 85%, at least 90%, at least 95%, at least 99%, or 100% identical to any one of SEQ ID NOs: 1794, 1800, 1806, 1812, 1819, 1826, 1980, 1988, 1996, and 2004.

[6212] In some aspects, the antigen binding polypeptide complexes provided herein comprise a VL2 comprising an amino acid sequence that is at least 65%, at least 70%, at least 75%, at least 80%, at least 85%, at least 90%, at least 95%, at least 99%, or 100% identical to any one of SEQ ID NOs: 1794, 1800, 1806, 1812, 1819, 1826, 1980, 1988, 1996, and 2004.

[6213] In some aspects, the antigen binding polypeptide complexes provided herein comprise a VH1 comprising an amino acid sequence that is at least 65%, at least 70%, at least 75%, at least 80%, at least 85%, at least 90%, at least 95%, at least 99%, or 100% identical to any one of SEQ ID NOs 1797, 1804, 1809, 1816, 1823, 1830, 1984, 1992, 2000, and 2008.

[6214] In some aspects, the antigen binding polypeptide complexes provided herein comprise a VH2 comprising an amino acid sequence that is at least 65%, at least 70%, at least 75%, at least 80%, at least 85%, at least 90%, at least 95%, at least 99%, or 100% identical to any one of SEQ ID NOs 1797, 1804, 1809, 1816, 1823, 1830, 1984, 1992, 2000, and 2008.

[6215] In some aspects, the other-pathology antigen is selected from the group consisting of Amyloid beta, β-amyloid, PCSK9, IFN-α/β receptor. Rhesus factor, nerve growth factor (NGF), DPP4, fibrin II beta chain, ACVR2B, serum amyloid A protein SOST, FGF 23, VWF, tissue factor pathway inhibitor (TFPI), 1-40 and 1-42, selectin P, glucagon receptor (GCGR), amyloid P component, GDF-8, CXCL10) IP-10, repulsive guidance molecule A RGMA, IFN-γ, activated F9)/F10, calcitonin gene-related peptide (CGRP), angiopoietin 3, IFN receptor, IFN-γ, calcitonin, β-amyloid 1-40) and 1-42, tau protein, dabigatran, cardiac myosin, selectin P, Complement factor D (CFD), kallikrein, GDF-8, IGHE, tissue factor pathway inhibitor (TFPI), GMCSF receptor α-chain, amyloid, IgE Fc region, MASP-2, oxLDL, GMCSF, NOGO-A, Alpha-synuclein, NGF, myelin-associated glycoprotein, RHD (gene) (RHD), sclerostin, FCGRT, sclerostin SOST, mucosal addressin cell adhesion molecule, myostatin, RSVFR, complement component 1s C1s, C5, and IL31.

[6216] In some aspects, the antigen binding polypeptide complexes provided herein comprise a VL1 comprising a light chain complementarity determining region 1 (LCDR1), LCDR2, and/or LCDR3 of an antibody selected from the group consisting of aducanumab, alirocumab, frovocimab, lodelcizumab, bococizumab, evolocumab, ralpancizumab, anifrolumab, atorolimumab, bapineuzumab, bedinvetmab, begelomab, biciromab, bimagrumab, birtamimab, blosozumab, burosumab, caplacizumab, concizumab, crenezumab, crizanlizumab, crotedumab, dezamizumab, domagrozumab, donanemab, eldelumab, clezanumab, emapalumab, emicizumab, eptinezumab, erenumab, evinacumab, faralimomab, fasinumab, fontolizumab, fremanezumab, frunevetmab, fulranumab, galcanezumab, gantenerumab, gosuranemab, idarucizumab, imciromab, inclacumab, lampalizumab, lanadelumab, landogrozumab, lecanemab, ligelizumab, marstacimab, mavrilimumab, morolimumab, NEOD001, omalizumab, oMS721, orticumab, otilimab, ozanezumab, ponezumab, prasinezumab, quilizumab, ranevetmab, refanezumab, roledumab, romosozumab, rozanolixizumab, setrusumab, SHP647, solanezumab, stamulumab, suptavumab, sutimlimab, tanezumab, crovalimab, and lokivetmab.

[6217] In some aspects, the antigen binding polypeptide complexes provided herein comprise a VL2 comprising a light chain complementarity determining region 1 (LCDR1), LCDR2, and/or LCDR3 of an antibody selected from the group consisting of aducanumab, alirocumab, frovocimab, lodelcizumab, bococizumab, evolocumab, ralpancizumab, anifrolumab, atorolimumab, bapineuzumab, bedinvetmab, begelomab, biciromab, bimagrumab, birtamimab, blosozumab, burosumab, caplacizumab, concizumab, crenezumab, crizanlizumab, crotedumab, dezamizumab, domagrozumab, donanemab, eldelumab, elezanumab, emapalumab, emicizumab, eptinezumab, erenumab, evinacumab, faralimomab, fasinumab, fontolizumab, fremanezumab, frunevetmab, fulranumab, galcanezumab, gantenerumab, gosuranemab, idarucizumab, imciromab, inclacumab, lampalizumab, lanadelumab, landogrozumab, lecanemab, ligelizumab, marstacimab, mavrilimumab, morolimumab, NEOD001, omalizumab, oMS721, orticumab, otilimab, ozanezumab, ponczumab, prasinezumab, quilizumab, ranevetmab, refanezumab, roledumab, romosozumab, rozanolixizumab, setrusumab, SHP647, solanezumab, stamulumab, suptavumab, sutimlimab, tanezumab, crovalimab, and lokivetmab.

[6218] In some aspects, the antigen binding polypeptide complexes provided herein comprise a VH1 comprising a heavy chain complementarity determining region 1 (HCDR1), HCDR2, and/or HCDR3 of an antibody selected from the group consisting of aducanumab, alirocumab, frovocimab, lodelcizumab, bococizumab, evolocumab, ralpancizumab, anifrolumab, atorolimumab, bapineuzumab, bedinvetmab, begelomab, biciromab, bimagrumab, birtamimab, blosozumab, burosumab, caplacizumab, concizumab, crenezumab, crizanlizumab, crotedumab, dezamizumab, domagrozumab, donanemab, eldelumab, elezanumab, emapalumab, emicizumab, eptinezumab, erenumab, evinacumab, faralimomab, fasinumab, fontolizumab, fremanezumab, frunevetmab, fulranumab, galcanezumab, gantenerumab, gosuranemab, idarucizumab, imciromab, inclacumab, lampalizumab, lanadelumab, landogrozumab, lecanemab, ligelizumab, marstacimab, mavrilimumab, morolimumab, NEOD001, omalizumab, oMS721, orticumab, otilimab, ozanezumab, ponezumab, prasinezumab, quilizumab, ranevetmab, refanezumab, roledumab, romosozumab, rozanolixizumab, setrusumab, SHP647, solanezumab, stamulumab, suptavumab, sutimlimab, tanezumab, crovalimab, and lokivetmab.

[6219] In some aspects, the antigen binding polypeptide complexes provided herein comprise a VH2 comprising a heavy chain complementarity determining region 1 (HCDR1), HCDR2, and/or HCDR3 of an antibody selected from the group consisting of aducanumab, alirocumab, frovocimab, lodelcizumab, bococizumab, evolocumab, ralpancizumab, anifrolumab, atorolimumab, bapineuzumab, bedinvetmab, begelomab, biciromab, bimagrumab, birtamimab, blosozumab, burosumab, caplacizumab, concizumab, crenezumab, crizanlizumab, crotedumab, dezamizumab, domagrozumab, donanemab, eldelumab, elevanumab, emapalumab, emicizumab, eptinezumab, erenumab, evinacumab, faralimomab, fasinumab, fontolizumab, fremanezumab, frunevetmab, fulranumab, galcanezumab, gantenerumab, gosuranemab, idarucizumab, imciromab, inclacumab, lampalizumab, lanadelumab, landogrozumab, lecanemab, ligelizumab, marstacimab, mavrilimumab, morolimumab, NEOD001, omalizumab, oMS721, orticumab, otilimab, ozanezumab, ponezumab, prasinezumab, quilizumab, ranevetmab, refanezumab, roledumab, romosozumab, rozanolixizumab, setrusumab, SHP647, solanezumab, stamulumab, suptavumab, sutimlimab, tanezumab, crovalimab, and lokivetmab.

[6220] In some aspects, the antigen binding polypeptide complexes provided herein comprise a VL1 comprising a VL of an antibody selected from the group consisting of aducanumab, alirocumab, frovocimab, lodelcizumab, bococizumab, evolocumab, ralpancizumab, anifrolumab, atorolimumab, bapineuzumab, bedinvetmab, begelomab, biciromab, bimagrumab, birtamimab, blosozumab, burosumab, caplacizumab, concizumab, crenezumab, crizanlizumab, crotedumab, dezamizumab, domagrozumab, donanemab, eldelumab, elezanumab, emapalumab, emicizumab, eptinezumab, erenumab, evinacumab, faralimomab, fasinumab, fontolizumab, fremanezumab, frunevetmab, fulranumab, galcanezumab, gantenerumab, gosuranemab, idarucizumab, imciromab, inclacumab, lampalizumab, lanadelumab, landogrozumab, lecanemab, ligelizumab, marstacimab, mavrilimumab, morolimumab, NEOD001, omalizumab, oMS721, orticumab, otilimab, ozanezumab, ponezumab, prasinezumab, quilizumab, ranevetmab, refanezumab, roledumab, romosozumab, rozanolixizumab, setrusumab, SHP647, solanezumab, stamulumab, suptavumab, sutimlimab, tanezumab, crovalimab, and lokivetmab.

[6221] In some aspects, the antigen binding polypeptide complexes provided herein comprise a VL2 comprising a VL of an antibody selected from the group consisting of aducanumab, alirocumab, frovocimab, lodelcizumab, bococizumab, evolocumab, ralpancizumab, anifrolumab, atorolimumab, bapineuzumab, bedinvetmab, begelomab, biciromab, bimagrumab, birtamimab, blosozumab, burosumab, caplacizumab, concizumab, crenezumab, crizanlizumab, crotedumab, dezamizumab, domagrozumab, donanemab, eldelumab, elezanumab, emapalumab, emicizumab, eptinezumab, erenumab, evinacumab, faralimomab, fasinumab, fontolizumab, fremanezumab, frunevetmab, fulranumab, galcanezumab, gantenerumab, gosuranemab, idarucizumab, imciromab, inclacumab, lampalizumab, lanadelumab, landogrozumab, lecanemab, ligelizumab, marstacimab, mavrilimumab, morolimumab, NEOD001, omalizumab, oMS721, orticumab, otilimab, ozanezumab, ponezumab, prasinezumab, quilizumab, ranevetmab, refanezumab, roledumab, romosozumab, rozanolixizumab, setrusumab, SHP647, solanezumab, stamulumab, suptavumab, sutimlimab, tanezumab, crovalimab, and lokivetmab.

[6222] In some aspects, the antigen binding polypeptide complexes provided herein comprise a VH1 comprising a VH of an antibody selected from the group consisting of aducanumab, alirocumab, frovocimab, lodelcizumab, bococizumab, evolocumab, ralpancizumab, anifrolumab, atorolimumab, bapincuzumab, bedinvetmab, begelomab, biciromab, bimagrumab, birtamimab, blosozumab, burosumab, caplacizumab, concizumab, crenezumab, crizanlizumab, crotedumab, dezamizumab, domagrozumab, donanemab, eldelumab, elezanumab, emapalumab, emicizumab, eptinezumab, erenumab, evinacumab, faralimomab, fasinumab, fontolizumab, fremanezumab, frunevetmab, fulranumab, galcanezumab, gantenerumab, gosuranemab, idarucizumab, imciromab, inclacumab, lampalizumab, lanadelumab, landogrozumab, lecanemab, ligelizumab, marstacimab, mavrilimumab, morolimumab, NEOD001, omalizumab, oMS721, orticumab, otilimab, ozanezumab, ponezumab, prasinezumab, quilizumab, ranevetmab, refanezumab, roledumab, romosozumab, rozanolixizumab, setrusumab, SHP647, solanezumab, stamulumab, suptavumab, sutimlimab, tanezumab, crovalimab, and lokivetmab.

[6223] In some aspects, the antigen binding polypeptide complexes provided herein comprise a VH2 comprising a VH of an antibody selected from the group consisting of aducanumab, alirocumab, frovocimab, lodelcizumab, bococizumab, evolocumab, ralpancizumab, anifrolumab, atorolimumab, bapineuzumab, bedinvetmab, begelomab, biciromab, bimagrumab, birtamimab, blosozumab, burosumab, caplacizumab, concizumab, crenezumab, crizanlizumab, crotedumab, dezamizumab, domagrozumab, donanemab, eldelumab, clezanumab, emapalumab, emicizumab, eptinezumab, erenumab, evinacumab, faralimomab, fasinumab, fontolizumab, fremanezumab, frunevetmab, fulranumab, galcanezumab, gantenerumab, gosuranemab, idarucizumab, imciromab, inclacumab, lampalizumab, lanadelumab, landogrozumab, lecanemab, ligelizumab, marstacimab, mavrilimumab, morolimumab, NEOD001, omalizumab, oMS721, orticumab, otilimab, ozanezumab, ponezumab, prasinezumab, quilizumab, ranevetmab, refanezumab, roledumab, romosozumab, rozanolixizumab, setrusumab, SHP647, solanezumab, stamulumab, suptavumab, sutimlimab, tanezumab, crovalimab, and lokivetmab.

[6224] In some aspects, the antigen binding polypeptide complexes provided herein comprise a VL1 comprising (i) a complementarity determining region (CDR) 1 having an amino acid sequence that is at least 65%, at least 70%, at least 75%, at least 80%, at least 85%, at least 90%, at least 95%, at least 99%, or 100% identical to any one of SEQ ID NOs: 1120, 1228, 1359, 1519, 1831, 1838, 1845, 1852, 1859, 1866, 1872, 1878, 1885, 1891, 1898, 1905, 1911, 1917, 1924, 1931, 1938, 1945, and 1963; (ii) a CDR2 having an amino acid sequence that is at least 65%, at least 70%, at least 75%, at least 80%, at least 85%, at least 90%, at least 95%, at least 99%, or 100% identical to any one of amino acid sequences AAS, AVS, DAS, DNN, EDN, EVS, GAS, GNG, KAS, KVS, LVS, NTD, STS, WAS, and YTS; and (iii) a CDR3 having an amino acid sequence that is at least 65%, at least 70%, at least 75%, at least 80%, at least 85%, at least 90%, at least 95%, at least 99%, or 100% identical to any one of SEQ ID NOs: 1360, 1832, 1839, 1846, 1853, 1860, 1867, 1873, 1879, 1886, 1892, 1899, 1906, 1912, 1918, 1925, 1932, 1939, 1946, 1951, 1957, 1964, and 1970.

[6225] In some aspects, the antigen binding polypeptide complexes provided herein comprise a VL2 comprising (i) a complementarity determining region (CDR) 1 having an amino acid sequence that is at least 65%, at least 70%, at least 75%, at least 80%, at least 85%, at least 90%, at least 95%, at least 99%, or 100% identical to any one of SEQ ID NOs: 1120, 1228, 1359, 1519, 1831, 1838, 1845, 1852, 1859, 1866, 1872, 1878, 1885, 1891, 1898, 1905, 1911, 1917, 1924, 1931, 1938, 1945, and 1963; (ii) a CDR2 having an amino acid sequence that is at least 65%, at least 70%, at least 75%, at least 80%, at least 85%, at least 90%, at least 95%, at least 99%, or 100% identical to any one of amino acid sequences AAS, AVS, DAS, DNN, EDN, EVS, GAS, GNG, KAS, KVS, LVS, NTD, STS, WAS, and YTS; and (iii) a CDR3 having an amino acid sequence that is at least 65%, at least 70%, at least 75%, at least 80%, at least 85%, at least 90%, at least 95%, at least 99%, or 100% identical to any one of SEQ ID NOs: 1360, 1832, 1839, 1846, 1853, 1860, 1867, 1873, 1879, 1886, 1892, 1899, 1906, 1912, 1918, 1925, 1932, 1939, 1946, 1951, 1957, 1964, and 1970.

[6226] In some aspects, the antigen binding polypeptide complexes provided herein comprise a VH1 comprising (i) a complementarity determining region (CDR) 1 having an amino acid sequence that is at least 65%, at least 70%, at least 75%, at least 80%, at least 85%, at least 90%, at least 95%, at least 99%, or 100% identical to any one of SEQ ID NOs: 1309, 1362, 1437, 1552, 1618, 1639, 1834, 1841, 1848, 1855, 1862, 1881, 1894, 1901, 1920, 1927, 1934, 1941, 1953, 1959, and 1966; (ii) a CDR2 having an amino acid sequence that is at least 65%, at least 70%, at least 75%, at least 80%, at least 85%, at least 90%, at least 95%, at least 99%, or 100% identical to any one of SEQ ID NOs: 1363, 1835, 1842, 1849, 1856, 1863, 1869, 1875, 1882, 1888, 1895, 1902, 1908, 1914, 1921, 1928, 1935, 1942, 1948, 1954, 1960, 1967, and 1972; and (iii) a CDR3 having an amino acid sequence that is at least 65%, at least 70%, at least 75%, at least 80%, at least 85%, at least 90%, at least 95%, at least 99%, or 100% identical to any one of SEQ ID NOs: 1364, 1836, 1843, 1850, 1857, 1864, 1870, 1876, 1883, 1889, 1896, 1903, 1909, 1915, 1922, 1929, 1936, 1943, 1949, 1955, 1961, 1968, and 1973.

[6227] In some aspects, the antigen binding polypeptide complexes provided herein comprise a VH2 comprising (i) a complementarity determining region (CDR) 1 having an amino acid sequence that is at least 65%, at least 70%, at least 75%, at least 80%, at least 85%, at least 90%, at least 95%, at least 99%, or 100% identical to any one of SEQ ID NOs: 1309, 1362, 1437, 1552, 1618, 1639, 1834, 1841, 1848, 1855, 1862, 1881, 1894, 1901, 1920, 1927, 1934, 1941, 1953, 1959, and 1966; (ii) a CDR2 having an amino acid sequence that is at least 65%, at least 70%, at least 75%, at least 80%, at least 85%, at least 90%, at least 95%, at least 99%, or 100% identical to any one of SEQ ID NOs: 1363, 1835, 1842, 1849, 1856, 1863, 1869, 1875, 1882, 1888, 1895, 1902, 1908, 1914, 1921, 1928, 1935, 1942, 1948, 1954, 1960, 1967, and 1972; and (iii) a CDR3 having an amino acid sequence that is at least 65%, at least 70%, at least 75%, at least 80%, at least 85%, at least 90%, at least 95%, at least 99%, or 100% identical to any one of SEQ ID NOs: 1364, 1836, 1843, 1850, 1857, 1864, 1870, 1876, 1883, 1889, 1896, 1903, 1909, 1915, 1922, 1929, 1936, 1943, 1949, 1955, 1961, 1968, and 1973.

[6228] In some aspects, the antigen binding polypeptide complexes provided herein comprise a VL1 comprising an amino acid sequence that is at least 65%, at least 70%, at least 75%, at least 80%, at least 85%, at least 90%, at least 95%, at least 99%, or 100% identical to any one of SEQ ID NOs: 1361, 1833, 1840, 1847, 1854, 1861, 1868, 1874, 1880, 1887, 1893, 1900, 1907, 1913, 1919, 1926, 1933, 1940, 1947, 1952, 1958, 1965, and 1971.

[6229] In some aspects, the antigen binding polypeptide complexes provided herein comprise a VL2 comprising an amino acid sequence that is at least 65%, at least 70%, at least 75%, at least 80%, at least 85%, at least 90%, at least 95%, at least 99%, or 100% identical to any one of SEQ ID NOs: 1361, 1833, 1840, 1847, 1854, 1861, 1868, 1874, 1880, 1887, 1893, 1900, 1907, 1913, 1919, 1926, 1933, 1940, 1947, 1952, 1958, 1965, and 1971.

[6230] In some aspects, the antigen binding polypeptide complexes provided herein comprise a VH1 comprising an amino acid sequence that is at least 65%, at least 70%, at least 75%, at least 80%, at least 85%, at least 90%, at least 95%, at least 99%, or 100% identical to any one of SEQ ID NOs: 1365, 1837, 1844, 1851, 1858, 1865, 1871, 1877, 1884, 1890, 1897, 1904, 1910, 1916, 1923, 1930, 1937, 1944, 1950, 1956, 1962, 1969, and 1974.

[6231] In some aspects, the antigen binding polypeptide complexes provided herein comprise a VH2 comprising an amino acid sequence that is at least 65%, at least 70%, at least 75%, at least 80%, at least 85%, at least 90%, at least 95%, at least 99%, or 100% identical to any one of SEQ ID NOs: 1365, 1837, 1844, 1851, 1858, 1865, 1871, 1877, 1884, 1890, 1897, 1904, 1910, 1916, 1923, 1930, 1937, 1944, 1950, 1956, 1962, 1969, and 1974.

[6232] In some aspects, one or both of the antigen binding polypeptides comprised in the antigen binding polypeptide complexes disclosed herein, comprise one or more CL, as indicated in the formulas representing the antigen binding polypeptide complexes disclosed herein. In some aspects, the CL comprises an amino acid sequence at least 65%, at least 70%, at least 75%, at least 80%, at least 85%, at least 90%, at least 95%, at least 99%, or 100% identical to any one of SEQ ID NOs: 374, 637, or 1092-1095.

[6233] In some aspects, one or both of the antigen binding polypeptides comprised in the antigen binding polypeptide complexes disclosed herein, comprise one or more CH1, as indicated in the formulas representing the antigen binding polypeptide complexes disclosed herein. In some aspects, the CH1 comprises an amino acid sequence at least 65%, at least 70%, at least 75%, at least 80%, at least 85%, at least 90%, at least 95%, at least 99%, or 100% identical to any one of SEQ ID NOs: 375, 634, 1070, 1071, or 1086-1091.

[6234] In some aspects, one or both of the antigen binding polypeptides comprised in the antigen binding polypeptide complexes provided herein further comprise an Fc region. In some aspects, one or both of the antigen binding polypeptides comprised in the antigen binding polypeptide complexes provided herein further comprise an Fc region at the carboxy-terminus. In some aspects, the Fc region comprises an immunoglobulin heavy chain constant region 2 (CH2) and/or an immunoglobulin heavy chain constant region 3 (CH3). In some aspects, the Fc region further comprises an immunoglobulin hinge (i.e., a hinge region). In some aspects, the hinge region is interposed between a CH1 and a CH2 (i.e., a hinge region is localized between the carboxy terminal residue of a CH1 and the N-terminal residue of a CH2). In some aspects, the hinge region comprises an amino acid sequence at least 65%, at least 70%, at least 75%, at least 80%, at least 85%, at least 90%, at least 95%, at least 99%, or 100% identical to any one of SEQ ID NOS: 635, 636, 1072, 1073, or 1074. In some aspects, the Fc region comprises a CH2 and a CH3. In some aspects, the CH2 comprises an amino acid sequence that is at least 65%, at least 70%, at least 75%, at least 80%, at least 85%, at least 90%, at least 95%, at least 99%, or 100% identical to any one of SEQ ID NOs: 1075-1078. In some aspects, the CH3 comprises an amino acid sequence that is at least 65%, at least 70%, at least 75%, at least 80%, at least 85%, at least 90%, at least 95%, at least 99%, or 100% identical to any one of SEQ ID NOs: 1079-1085. In some aspects, the Fc region comprises an amino acid sequence that is at least 65%, at least 70%, at least 75%, at least 80%, at least 85%, at least 90%, at least 95%, at least 99%, or 100% identical to any one of SEQ ID NOs: 376-380.

[6235] In some aspects, the Fc region comprises one or more amino acid substitutions. In some aspects, the one or more amino acid substitutions comprise one or more half-life extension amino acid substitutions. In some aspects, the one or more half-life extension amino acid substitutions comprise one or more of amino acid substitutions M428L, N434A, N434S, L234F, L235E, P331S, M252Y, S254T, or T256E, or equivalent thereof, based on the EU numbering scheme. In some aspects, the one or more half-life extension amino acid substitutions comprise a LA (M428L and N434A, or equivalent thereof, based on the EU numbering scheme) amino acid substitution. In some aspects, the one or more half-life extension amino acid substitutions comprise a LS (M428L and N434S, or equivalent thereof, based on the EU numbering scheme) amino acid substitution. In some aspects, the one or more half-life extension amino acid substitutions comprise L234F and L235E, or equivalent thereof (based on the EU numbering scheme) amino acid substitutions. In some aspects, the one or more half-life extension amino acid substitutions comprise a TM (L234F, L235E, and P331S, or equivalent thereof, based on the EU numbering scheme) amino acid substitution. In some aspects, the one or more half-life extension amino acid substitutions comprise a YTE (M252Y, S254T, and T256E, or equivalent thereof, based on the EU numbering scheme) amino acid substitution.

[6236] In some aspects, the Fc region comprises at least one knob-into-hole modification. In some aspects, the antigen binding polypeptides complexes disclosed herein are IgG1 or IgG4 antibodies or antigen binding fragments thereof. In some aspects, the knob-into-hole modification comprises one or more of knob substitutions of S354C and T366W, or equivalent thereof, and/or one or more of hole substitutions of Y349C, T366S, L368A, Y407V, or equivalent thereof, or a combination thereof, based on the EU numbering scheme. In some aspects, the Fc region comprises a knob-into-hole modification comprising knob substitutions of S354C and T366W, or equivalent thereof, and/or hole substitutions of Y349C, T366S, L368A, and Y407V, or equivalent thereof, and/or a half-life extension amino acid substitution comprising: a LA (M428L and N434A, or equivalent thereof, based on the EU numbering scheme) amino acid substitution, a LS (M428L and N434S, or equivalent thereof, based on the EU numbering scheme) amino acid substitution, L234F and L235E, or equivalent thereof (based on the EU numbering scheme) amino acid substitutions, a TM (L234F, L235E, and P331S, or equivalent thereof, based on the EU numbering scheme) amino acid substitution, a YTE (M252Y, S254T, and T256E, or equivalent thereof, based on the EU numbering scheme) amino acid substitution, or any combination thereof.

[6237] In some aspects, the Fc region comprises knob substitutions of S354C and T366W, or equivalent thereof, and a half-life extension amino acid substitution comprising: a LA (M428L and N434A, or equivalent thereof, based on the EU numbering scheme) amino acid substitution, a LS (M428L and N434S, or equivalent thereof, based on the EU numbering scheme) amino acid substitution, L234F and L235E, or equivalent thereof (based on the EU numbering scheme) amino acid substitutions, a TM (L234F, L235E, and P331S, or equivalent thereof, based on the EU numbering scheme) amino acid substitution, a YTE (M252Y, S254T, and T256E, or equivalent thereof, based on the EU numbering scheme) amino acid substitution, or any combination thereof.

[6238] In some aspects, the Fc region comprises hole substitutions of Y349C, T366S, L368A, and Y407V, or equivalent thereof, and a half-life extension amino acid substitution comprising: a LA (M428L and N434A, or equivalent thereof, based on the EU numbering scheme) amino acid substitution, a LS (M428L and N434S, or equivalent thereof, based on the EU numbering scheme) amino acid substitution. L234F and L235E, or equivalent thereof (based on the EU numbering scheme) amino acid substitutions, a TM (L234F, L235E, and P331S, or equivalent thereof, based on the EU numbering scheme) amino acid substitution, a YTE (M252Y, S254T, and T256E, or equivalent thereof, based on the EU numbering scheme) amino acid substitution, or any combination thereof.

[6239] In some aspects, one or both of the antigen binding polypeptides comprised in the antigen binding polypeptide complexes disclosed herein comprise one or more Fc effector function knockout mutation. In some aspects, one or both of the antigen binding polypeptides comprised in the antigen binding polypeptide complexes disclosed herein are IgG1 or IgG4 antibodies or antigen binding fragments thereof. In some aspects, the Fc effector function knockout mutation is L234A, L235A, P239A, or equivalent thereof, or a combination thereof, based on the EU numbering scheme.

[6240] In some aspects, one or both of the antigen binding polypeptides comprised in the antigen binding polypeptide complexes disclosed herein comprise a mutation at a glycosylation site. In some aspects, the mutation at a glycosylation site is a mutation at an N-glycosylation site. In some aspects, one or both of the antigen binding polypeptides comprised in the antigen binding polypeptide complexes disclosed herein comprise a VH comprising a mutation at a glycosylation site. In some aspects, the mutation at a glycosylation site is a mutation at an N-glycosylation site. In some aspects, the mutation at an N-glycosylation site is at amino acid N62, or equivalent thereof, of the VH region or equivalent thereof. In some aspects, the mutation at an N-glycosylation site at amino acid N62 is N62Q or N62S, or equivalent thereof.

[6241] In some aspects, one or both of the antigen binding polypeptides comprised in the antigen binding polypeptide complexes disclosed herein, comprise one or more optional linkers. The one or more optional linkers are indicated herein as Ln, wherein n is an integer, and the integer next to each L indicates each L comprised in the antigen binding polypeptides comprised in the antigen binding polypeptide complexes disclosed herein. For example, if an antigen binding polypeptide comprised in the antigen binding polypeptide complexes disclosed herein comprises two linkers, the first linker from N-terminus to C-terminus is herein indicated as L1, and the second linker from N-terminus to C-terminus is herein indicated as L2. If an antigen binding polypeptide complex disclosed herein comprises a first antigen binding polypeptide comprising two linkers, indicated herein as L1 and L2, as explained above, the linkers comprised in the second antigen binding polypeptide are indicated with the following integer, in this example, the first linker from N-terminus to C-terminus of the second antigen binding polypeptide is herein indicated as L3, the second linker from N-terminus to C-terminus of the second antigen binding polypeptide is herein indicated as L3. In some aspects, any one of the optional linkers each independently have a length of from 0 amino acids to about 50 amino acids. In some aspects, any one of the optional linkers each independently have a length of from 5 amino acids to about 40 amino acids.

[6242] In some aspects, any one of the optional linkers are non-immunogenic. In some aspects, any one of the optional linkers do not contain a consensus T cell epitope.

[6243] In some aspects, any of Ln comprises an amino acid sequence of G or A, or an amino acid sequence at least 65%, at least 70%, at least 75%, at least 80%, at least 85%, at least 90%, at least 95%, at least 99%, or 100% identical to amino acid sequence GSS or ASG, or an amino acid sequence at least 65%, at least 70%, at least 75%, at least 80%, at least 85%, at least 90%, at least 95%, at least 99%, or 100% identical to any one of SEQ ID NOs: 333-373 and 967-971. In some aspects. Ln comprises an amino acid sequence at least 65%, at least 70%, at least 75%, at least 80%, at least 85%, at least 90%, at least 95%, at least 99%, or 100% identical to any one of SEQ ID NOs: 333-345 and 967-971.

[6244] In some aspects, an antigen binding polypeptide complex provided herein comprises a first polypeptide, and a second polypeptide; wherein the first polypeptide has a structure represented by VL1-VL2-VL3-CH1, VL1-VL3-VL2-CH1, VL2-VL1-VL3-CH1, VL2-VL3-VL1-CH1, VL3-VL1-VL2-CH1, or VL3-VL2-VL1-CH1; and wherein the second polypeptide has a structure represented by VH1-VH2-VH3-CL, VH1-VH3-VH2-CL, VH2-VH1-VH3-CL, VH2-VH3-VH1-CL, VH3-VH1-VH2-CL, or VH3-VH2-VH1-CL.

[6245] In some aspects, an antigen binding polypeptide complex provided herein comprises a first polypeptide, and a second polypeptide; wherein the first polypeptide has a structure represented by VL1-L1-VL2-L2-VL3-L3-CH1, VL1-L1-VL3-L2-VL2-L3-CH1, VL2-L1-VL1-L2-VL3-L3-CH1, VL2-L1-VL3-L2-VL1-L3-CH1, VL3-L1-VL1-L2-VL2-L3-CH1, or VL3-L1-VL2-L2-VL1-L3-CH1; and wherein the second polypeptide has a structure represented by VH1-L4-VH2-L5-VH3-L6-CL, VH1-L4-VH3-L5-VH2-L6-CL, VH2-L4-VH1-L5-VH3-L6-CL, VH2-L4-VH3-L5-VH1-L6-CL, VH3-L4-VH1-L5-VH2-L6-CL, or VH3-L4-VH2-L5-VH1-L6-CL.

[6246] In some aspects, an antigen binding polypeptide complex provided herein comprises a first polypeptide, and a second polypeptide; wherein the first polypeptide has a structure represented by VL1-VL2-VL3-CH1-CH2-CH3, VL1-VL3-VL2-CH1-CH2-CH3, VL2-VL1-VL3-CH1-CH2-CH3, VL2-VL3-VL1-CH1-CH2-CH3, VL3-VL1-VL2-CH1-CH2-CH3, or VL3-VL2-VL1-CH1-CH2-CH3; and wherein the second polypeptide has a structure represented by VH1-VH2-VH3-CL-CH2-CH3, VH1-VH3-VH2-CL-CH2-CH3, VH2-VH1-VH3-CL-CH2-CH3, VH2-VH3-VH1-CL-CH2-CH3, VH3-VH1-VH2-CL-CH2-CH3, or VH3-VH2-VH1-CL-CH2-CH3.

[6247] In some aspects, an antigen binding polypeptide complex provided herein comprises a first polypeptide, and a second polypeptide; wherein the first polypeptide has a structure represented by VL1-L1-VL2-L2-VL3-L3-CH1-CH2-CH3, VL1-L1-VL3-L2-VL2-L3-CH1-CH2-CH3, VL2-L1-VL1- L2-VL3-L3-CH1-CH2-CH3, VL2-L1-VL3-L2-VL1-L3-CH1-CH2-CH3, VL3-L1-VL1-L2-VL2-L3-CH1- CH2-CH3, or VL3-L1-VL2-L2-VL1-L3-CH1-CH2-CH3; and wherein the second polypeptide has a structure represented by VH1-L1-VH2-L2-VH3-L3-CL-CH2-CH3, VH1-L1-VH3-L2-VH2-L3-CL-CH2-CH3, VH2-L1-VH1-L2-VH3-L3-CL-CH2-CH3, VH2-L1-VH3-L2-VH1-L3-CL-CH2-CH3, VH3-L1-VH1-L2-VH2-L3-CL-CH2-CH3, or VH3-L1-VH2-L2-VH1-L3-CL-CH2-CH3.

[6248] In some aspects, VL1 is a first immunoglobulin light chain variable region that specifically binds to (i) a tumor-associated antigen (TAA), (ii) an infectious disease antigen that is not a sarbecovirus antigen, or (iii) an other-pathology antigen; VL2 is a second immunoglobulin light chain variable region that specifically binds to (i) a tumor-associated antigen (TAA), (ii) an infectious disease antigen that is not a sarbecovirus antigen, or (iii) an other-pathology antigen; VL3 is a third immunoglobulin light chain variable region that specifically binds to (i) a tumor-associated antigen (TAA), (ii) an infectious disease antigen that is not a sarbecovirus antigen, or (iii) an other-pathology antigen; VH1 is a first immunoglobulin heavy chain variable region that specifically binds to (i) a tumor-associated antigen (TAA), (ii) an infectious disease antigen that is not a sarbecovirus antigen, or (iii) an other-pathology antigen; VH2 is a second immunoglobulin heavy chain variable region that specifically binds to (i) a tumor-associated antigen (TAA), (ii) an infectious disease antigen that is not a sarbecovirus antigen, or (iii) an other-pathology antigen; VH3 is a third immunoglobulin heavy chain variable region that specifically binds to (i) a tumor-associated antigen (TAA), (ii) an infectious disease antigen that is not a sarbecovirus antigen, or (iii) an other-pathology antigen; CH1 is an immunoglobulin heavy chain constant region 1; CL is an immunoglobulin light chain constant region; and L1-L6 are optional amino acid linkers. In any aspect shown herein as a structure from amino terminus to carboxy terminus, and with binding pairs selected from VL and/or VH or other structural regions such as CH1, CL, CH2, CH3, when shown without a specific linker such as L1, L2, etc., such linkers are optionally present in such structures between each designated subsequence VL, VH, etc.

[6249] In some aspects, the VL1 and the VL2 each comprise a CDR1, a CDR2, and a CDR3 that are the same. In some aspects, the VL1 and the VL2 each comprise a CDR1, a CDR2, and a CDR3 that are different. In some aspects, the VL1 and the VL3 each comprise a CDR1, a CDR2, and a CDR3 that are the same. In some aspects, the VL1 and the VL3 each comprise a CDR1, a CDR2, and a CDR3 that are different. In some aspects, the VL2 and the VL3 each comprise a CDR1, a CDR2, and a CDR3 that are the same. In some aspects, the VL2 and the VL3 each comprise a CDR1, a CDR2, and a CDR3 that are different.

[6250] In some aspects, the VL1 and the VL2 each comprise an amino acid sequence, wherein the amino acid sequence comprised in VL1 and the amino acid sequence comprised in VL2 are the same. In some aspects, the VL1 and the VL2 each comprise an amino acid sequence, wherein the amino acid sequence comprised in VL1 and the amino acid sequence comprised in VL2 are different. In some aspects, the VL1 and the VL3 each comprise an amino acid sequence, wherein the amino acid sequence comprised in VL1 and the amino acid sequence comprised in VL3 are the same. In some aspects, the VL1 and the VL3 each comprise an amino acid sequence, wherein the amino acid sequence comprised in VL1 and the amino acid sequence comprised in VL3 are different. In some aspects, the VL2 and the VL3 each comprise an amino acid sequence, wherein the amino acid sequence comprised in VL2 and the amino acid sequence comprised in VL3 are the same. In some aspects, the VL2 and the VL3 each comprise an amino acid sequence, wherein the amino acid sequence comprised in VL2 and the amino acid sequence comprised in VL3 are different.

[6251] In some aspects, the TAA is selected from the group consisting of 5′-nucleotidase, 5T4, A2AR, activin receptor-like kinase 1, adenocarcinoma antigen, ADRB3, AFP, AKAP-4, ALK, alpha-fetoprotein, androgenreceptor, angiopoietin 2, AOC3, APRIL, ATPDase, AXL, B7-4, B7DC, B7H1, B7H2, B7H3, B7H4, B7H5, B7H6, B7H7, B7RP1, BAFF, BAFFR, BCMA, bcr-abl, BlyS, BORIS, BST2, BTK, BTLA, C3, C5, C5a, C5a receptor, CA-125, CAIX, CanAg (a glycoform of MUC1), CCL11, CCL15, CCL17, CCL19, CCL2, CCL20, CCL21, CCL25, CCL3, CCL4, CCL5, CCL7, CCL8, CCR2, CCR3, CCR4, CCR5, CD11, CD11a, CD123, CD125, CD133, CD134, CD137, CD137L, CD147, CD15, CD154, CD160, CD16A, CD171, CD179a, CD18, CD184, CD19, CD2, CD20, CD200, CD22, CD221, CD23, CD24, CD242, CD25, CD27, CD272, CD276, CD278, CD279, CD28, CD3, CD30, CD300LF, CD319, CD33, CD37, CD38, CD39, CD38, CD4, CD40, CD40L, CD41, CD44v6, CD45, CD47, CD49B, CD5, CD51, CD52, CD54, CD56, CD6, CD62L, CD7, CD70, CD72, CD74, CD79a, CD79b, CD80, CD86, CD97, CEA, CEACAM5, claudin 18 isoform 2, CLDN6, CLEC12A, CLEC9, CLEC91, CLL-1, cMet, coagulation factor III, CRTH2, CS1, CSF-1, CSFIR, CSF-2, CSF-3, CTGF, CTLA4, CXCL1, CXCL12, CXCL13, CXCL2, CXCL4, CXCR3, CXORF61, CyclinB1, CYP1B1, dendritic cell-associated lectin 2, DLL3, DLL4, DNGR-1, DR5, E7, E-cadherin, EGFL7, EGFR, EGFRVIII, ELF2M, EMR2, endoglin, ENTPD1, EpCAM, EphA2, EPHA3, ephrin receptor A3, EphrinB2, episialin, ERBB2 (Her2/neu), ERBB3, ERG (TMPRSS2-ETS fusion gene), ETV6-AML, FAP, FCAR, FCER1, FCER1A, FCER2, FCRL5, FGF 23, FGFR, FGFR2, fibronectin extra domain-B, FLAP, FLT3, folate hydrolase, folate receptor 1, folate receptor alpha, folate receptor beta, FOLH1, Fos-relatedantigen1, Frizzled receptor, Fucosyl GM1, GD2, GD3, gelatinase B, Gi24, GITR, GITRL, GloboH, Glutamate carboxypeptidase II, glypican 3, GM3, GP100, GPC1, GPC2, GPC3, gplOO, GPNMB, GPR20, GPR5, GPRC5D, growth differentiation factor 8, GUCY2C, HAVCR1, HER1, HER2, HER3, HGF, HGFR, HHLA2, histone complex, HLA-DR, HMGB1, HMWMAA, HPVE6, hTERT, human telomerase reverse transcriptase, HVEM, ICAM-1, ICOS, ICOSL, IDO, IFNa, IgE, IGF-1, IGF1R, IGF-2, IGF-I receptor, IGLL1, IL1, IL10, IL12, IL13, IL13Ra2, IL-13Ra2, IL13Ra1, IL15, IL17, IL-17A, IL-17AF, IL-17F, IL17Rb, IL18, IL1B, IL1F10, IL-1a, IL-1B, IL2, IL-20, IL22, IL23, IL-23A, IL25, IL2Rbeta, IL-3 receptor, IL-31 receptor A, IL33, IL35, IL4, IL4Ra, IL5, ILSR, IL6, IL7, IL7Ra, IL8, IL9, IL9R, IL1A, IL-llRa, integrin α4, integrin α4 β7, integrin α5β1, integrin αIIbβ3, integrin αvβ3, integrin β7, interleukin 36 receptor IL1RAP, interleukin 36 receptor IL1RL2, intestinal carboxy lesterase, ITGB4, ITK, KIR, KIR2D, KIT, LAG3, LAGE-1a, LAIR1, LAMP1, LCK, legumain, leptin. LewisY, LILRA2, LIV-1, LMP2, LOXL2, LPFS2, LRRC15, LY6K, LY75, LYPD3, MAD-CT-1, MAD-CT-2, MAGEA1, MAGE-A1, MCAM, MCP-1, MelanA/MART1, mesothelin, MHC classII, MIF, ML-IAP, MS4A1, MST1R (RON), MUC1, MUC-1, MUC16, MUC-16, MUC5AC, muthsp70)-2, MYCN, NA17, NCA-90) granulocyte antigen, NCAM, NCR3LG1, nectin-4, NGNA ganglioside, NKG2A, NKG2D, NKp46, Notch 1, Notch receptor, NRP1, NTPDase-1, NY-BR-1, NY-ESO-1, o-acetyl-GD2, OR51E2, OX40), OX40L, OY-TES1, p53, p53mutant, PANX3, PAP, PAX3, PAX5, PCDC1, PCDP1, PCTA-1/Galectin8, PD-1, PDGFRA, PDGFR-beta, PD-L1, PD-L2, phosphate-sodium co-transporter, phosphatidylserine, PLAC1, polysialic acid, PROM1, prostase, prostein, PRSS21, PSCA, PSMA, PTK7, RAGE-1, RANKL. Ras mutant, rhIL1O, RhoC, root plate-specific spondin 3, ROR1, ROR2, RTN4, RU1, RU2, S152, sarcoma translocation breakpoints, SART3, scatter factor receptor kinase, SDC1, SIRPalpha, SISP1, SLAMF7, SLC, sLe, SLITRK6, spermprotein17, SPG64, sphingosine-1-phosphate, SSEA-4, SSX2, ST2, STEAP1, STEAP2, surviving and telomerase, Syk kinase, T14, TACI, TAG72, TARP, T-cell receptor, TCRβ, TDO, TEM1/CD248, TEM7R, tenascin C, TGFBETA, TGF-β1, TGF-β2, TGS5, the extracellular portion of the APRIL protein, Tie2, TIGIT, TIM3, TLR, TLR2, TLR4, TLR5, TLR9, TMEF1, TnAg, TNF, TNFa, TNFR superfamily member 4, TNFRSF7, Tp55, TRAC, TRAIL-R1, TRAIL-R2, TRAP, TREM1, TROP2, TRP-2, TSHR, TSLP, TSLPR, tumor antigen CTAA16.88, TWEAK, tyrosinase, TYRPI glycoprotein 75, UPK2, VAP-1, VEGF, VEGFA, VEGFR-1, VEGFR2, vimentin, VISTA, Vstm3, WT1, WUCAM, and XAGE1.

[6252] In some aspects, the antigen binding polypeptide complexes provided herein comprise a VL1 comprising a light chain complementarity determining region 1 (LCDR1), LCDR2, and/or LCDR3 of an antibody selected from the group consisting of losatuxizumab vedotin, utomilumab, urelumab, oleclumab, naptumomab estafenatox, ascrinvacumab, pintumomab, tacatuzumab tetraxetan, nesvacumab, vanucizumab, timolumab, vapaliximab, vepalimomab, enapotamab vedotin, ianalumab, belimumab, tabalumab, tibulizumab, belantamab mafodotin, teclistamab, teclistamab, detumomab, nacolomab tafenatox, eculizumab, lendalizumab, pexelizumab, pozelimab, ravulizumab, tesidolumab, vilobelimab, abagovomab, igovomab, oregovomab, sofituzumab vedotin, cantuzumab mertansine, cantuzuma bravtansine, girentuximab, altumomab pentetate, arcitumomab, besilesomab, bertilimumab, plozalizumab, mogamulizumab, leronlimab, PRO140, rovelizumab, rovelizumab, talacotuzumab, benralizumab, tavolimab, vonlerolizumab, gavilimomab, ziralimumab, fanolesomab, ipilimumab, ruplizumab, toralizumab, dapirolizumab pegol, toralizumab, dapirolizumab pegol, ruplizumab, blinatumomab, inebilizumab, loncastuximab tesirine, SGN-CD19A, tafasitamab, taplitumomab paptox, XMAB-5574, Budoprutug, Obexelimab, duvortuxizumab, englumafusp alfa, Emfizatamab, zeripatamig, siplizumab, blontuvetmab, FBTA05, ibritumomab tiuxetan, obinutuzumab, ocaratuzumab, ocrelizumab, ofatumumab, rituximab, tositumomab, ublituximab, veltuzumab, divozilimab, eramkafusp alfa, ripertamab, zuberitamab, glofitamab, nofetumomab merpentan, samalizumab, imvotamab, odronextamab, plamotamab, bectumomab, inotuzumab ozogamicin, moxetumomab pasudotox, pinatuzumab vedotin, gomiliximab, lumiliximab, inolimomab, inolimomab, daclizumab, camidanluma btesirine, basiliximab, varlilumab, omburtamab, enoblituzumab, vopratelimab, lulizumabpegol, TGN1412, muromonab-CD3, otelixizumab, teplizumab, visilizumab, epcoritamab, epcoritamab, brentuximab vedotin, iratumumab, azintuxizumab vedotin, gemtuzumab ozogamicin, lintuzumab, vadastuximab talirine, naratuximab emtansine, otlertuzumab, lilotomab satetraxetan, tetulomab, daratumumab, isatuximab, foralumab, mosunetuzumab, mosunetuzumab, cedelizumab, ibalizumab, keliximab, priliximab, tregalizumab, zanolimumab, bleselumab, iscalimab, lucatumumab, ravagalimab, selicrelumab, teneliximab, vanalimab, abciximab, bivatuzumab, iomab-B, telimomab aritox, zolimomab aritox, abituzumab, intetumumab, alemtuzumab, tamtuvetmab, lorvotuzumab mertansine, itolizumab, cusatuzumab, vorsetuzumab mafodotin, milatuzumab, iladatuzumab vedotin, polatuzumab vedotin, galiximab, cibisatamab, zolbetuximab, naxitamab, tisotumab vedotin, olendalizumab, pamrevlumab, lacnotuzumab, cabiralizumab, emactuzumab, axatilimab, gimsilumab, lenzilumab, namilumab, tremelimumab, ulocuplumab, tepoditamab, rovalpituzumab tesirine, tarlatamab, demcizumab, navicixizumab, drozitumab, parsatuzumab, depatuxizumab mafodotin, modotuximab, carotuximab, adecatumumab, adecatumumab, oportuzumab monatox, solitomab, tucotuzumab celmoleukin, edrecolomab, catumaxomab, ifabotuzumab, fibatuzumab, zalutumumab, panitumumab, cetuximab, futuximab, imgatuzumab, laprituximab emtansine, matuzumab, necitumumab, nimotuzumab, tomuzotuximab, amivantamab, amivantamab, epitumomab cituxetan, sontuzumab, duligotuzumab, elgemtumab, lumretuzumab, patritumab, seribantumab, zenocutuzumab, sibrotuzumab, burosumab, aprutumab ixadotin, radretumab, pasotuxizumab, farletuzumab, mirvetuximab soravtansine, vantictumab, TRBS07, 3F8, dinutuximab, dinutuximab beta, ecromeximab, mitumomab, andecaliximab, capromab, codrituzumab, glembatumumab vedotin, talquetamab, talquetamab, trevogrumab, indusatumab vedotin, ficlatuzumab, rilotumumab, zatuximab, pentuzimab, pentuzimab, margetuximab, timigutuzumab, trastuzumab, trastuzumab duocarmazine, trastuzumab emtansine, gancotamab, pertuzumab, ertumaxomab, emibetuzumab, telisotuzumab, telisotuzumab vedotin, derlotuximab biotin, apolizumab, onartuzumab, bersanlimab, enlimomabpegol, rontalizumab, sifalimumab, talizumab, ganitumab, istiratumab, robatumumab, teprotumumab, figitumumab, ganitumab, istiratumab, robatumumab, teprotumumab, cixutumumab, dalotuzumab, xentuzumab, dusigitumab, canakinumab, ustekinumab, ustekinumab, ustekinumab, briakinumab, briakinumab, abrezekimab, lebrikizumab, romilkimab, TNX-650, tralokinumab, anrukinzumab, brodalumab, ixekizumab, netakimab, perakizumab, secukinumab, vunakizumab, afasevikumab, afasevikumab, bimekizumab, bimekizumab, remtolumab, bermekimab, lutikizumab, lutikizumab, gevokizumab, cergutuzumab amunaleukin, fletikumab, fezakinumab, brazikumab, guselkumab, mirikizumab, tildrakizumab, risankizumab, flotetuzumab, nemolizumab, pascolizumab, dupilumab, mepolizumab, reslizumab, clazakizumab, elsilimomab, olokizumab, sarilumab, siltuximab, sirukumab, vobarilizumab, tocilizumab, SA237, satralizumab, enokizumab, prezalizumab, natalizumab, abrilumab, abrilumab, vedolizumab, volociximab, tadocizumab, etaracizumab, etrolizumab, spesolimab, vatelizumab, erlizumab, lirilumab, relatlimab, cBR96-doxorubicinimmunoconjugate, odulimomab, efalizumab, ladiratuzumab vedotin, simtuzumab, samrotamab vedotin, aselizumab, lupartumab amadotin, imalumab, carlumab, imaprelimab, amatuximab, amatuximab, anetumab ravtansine, narnatumab, clivatuzumab tetraxetan, pemtumomab, gatipotuzumab, ensituximab, lemalesomab, sulesomab, enfortumab vedotin, racotumomab, monalizumab, brontictuzumab, tarextumab, vesencumab, oxelumab, gilvetmab, tislelizumab, dostarlimab, BCD-100, nivolumab, PDR001, pembrolizumab, pidilizumab, retifanlimab, spartalizumab, sintilimab, cemiplimab, olaratumab, tovetumab, rinucumab, atezolizumab, avelumab, durvalumab, lifastuzumab vedotin, bavituximab, acapatamab, capromab, rosopatamab, nezastomig, pasotuxizumab, pelgifatamab, voxalatamab, cofetuzumab pelidotin, denosumab, rosmantuzumab, cirmtuzumab, atinumab, indatuximab ravtansine, elotuzumab, sirtratumab vedotin, sonepcizumab, vandortuzumab vedotin, minretumomab, satumomab pendetide, maslimomab, ontuxizumab, tenatumomab, fresolimumab, metelimumab, lerdelimumab, tezepelumab, etigilimab, tiragotumab, placulumab, prezalumab, infliximab, nerelimomab, ozoralizumab, adalimumab, afelimomab, certolizumab pegol, golimumab, mapatumumab, conatumumab, lexatumumab, tigatuzumab, sacituzumab govitecan, votumumab, pogalizumab, letolizumab, pankomab, anatumomab mafenatox, enavatuzumab, flanvotumab, brolucizumab, ranibizumab, varisacumab, bevacizumab, faricimab, icrucumab, alacizumab pegol, ramucirumab, pritumumab, and onvatilimab.

[6253] In some aspects, the antigen binding polypeptide complexes provided herein comprise a VL2 comprising a light chain complementarity determining region 1 (LCDR1), LCDR2, and/or LCDR3 of an antibody selected from the group consisting of losatuxizumab vedotin, utomilumab, urelumab, oleclumab, naptumomab estafenatox, ascrinvacumab, pintumomab, tacatuzumab tetraxetan, nesvacumab, vanucizumab, timolumab, vapaliximab, vepalimomab, enapotamab vedotin, ianalumab, belimumab, tabalumab, tibulizumab, belantamab mafodotin, teclistamab, teclistamab, detumomab, nacolomab tafenatox, eculizumab, lendalizumab, pexelizumab, pozelimab, ravulizumab, tesidolumab, vilobclimab, abagovomab, igovomab, oregovomab, sofituzumab vedotin, cantuzumab mertansine, cantuzuma bravtansine, girentuximab, altumomab pentetate, arcitumomab, besilesomab, bertilimumab, plozalizumab, mogamulizumab, leronlimab, PRO140, rovelizumab, rovelizumab, talacotuzumab, benralizumab, tavolimab, vonlerolizumab, gavilimomab, ziralimumab, fanolesomab, ipilimumab, ruplizumab, toralizumab, dapirolizumab pegol, toralizumab, dapirolizumab pegol, ruplizumab, blinatumomab, inebilizumab, loncastuximab tesirine, SGN-CD19A, tafasitamab, taplitumomab paptox, XMAB-5574, Budoprutug, Obexelimab, duvortuxizumab, englumafusp alfa, Emfizatamab, zeripatamig, siplizumab, blontuvetmab, FBTA05, ibritumomab tiuxetan, obinutuzumab, ocaratuzumab, ocrelizumab, ofatumumab, rituximab, tositumomab, ublituximab, veltuzumab, divozilimab, eramkafusp alfa, ripertamab, zuberitamab, glofitamab, nofetumomab merpentan, samalizumab, imvotamab, odronextamab, plamotamab, bectumomab, inotuzumab ozogamicin, moxetumomab pasudotox, pinatuzumab vedotin, gomiliximab, lumiliximab, inolimomab, inolimomab, daclizumab, camidanluma btesirine, basiliximab, varlilumab, omburtamab, enoblituzumab, vopratelimab, lulizumabpegol, TGN1412, muromonab-CD3, otelixizumab, teplizumab, visilizumab, epcoritamab, epcoritamab, brentuximab vedotin, iratumumab, azintuxizumab vedotin, gemtuzumab ozogamicin, lintuzumab, vadastuximab talirine, naratuximab emtansine, otlertuzumab, lilotomab satetraxetan, tetulomab, daratumumab, isatuximab, foralumab, mosunetuzumab, mosunetuzumab, cedelizumab, ibalizumab, keliximab, priliximab, tregalizumab, zanolimumab, bleselumab, iscalimab, lucatumumab, ravagalimab, selicrelumab, teneliximab, vanalimab, abciximab, bivatuzumab, iomab-B, telimomab aritox, zolimomab aritox, abituzumab, intetumumab, alemtuzumab, tamtuvetmab, lorvotuzumab mertansine, itolizumab, cusatuzumab, vorsetuzumab mafodotin, milatuzumab, iladatuzumab vedotin, polatuzumab vedotin, galiximab, cibisatamab, zolbetuximab, naxitamab, tisotumab vedotin, olendalizumab, pamrevlumab, lacnotuzumab, cabiralizumab, emactuzumab, axatilimab, gimsilumab, lenzilumab, namilumab, tremelimumab, ulocuplumab, tepoditamab, rovalpituzumab tesirine, tarlatamab, demcizumab, navicixizumab, drozitumab, parsatuzumab, depatuxizumab mafodotin, modotuximab, carotuximab, adecatumumab, adecatumumab, oportuzumab monatox, solitomab, tucotuzumab celmoleukin, edrecolomab, catumaxomab, ifabotuzumab, fibatuzumab, zalutumumab, panitumumab, cetuximab, futuximab, imgatuzumab, laprituximab emtansine, matuzumab, necitumumab, nimotuzumab, tomuzotuximab, amivantamab, amivantamab, epitumomab cituxetan, sontuzumab, duligotuzumab, elgemtumab, lumretuzumab, patritumab, seribantumab, zenocutuzumab, sibrotuzumab, burosumab, aprutumab ixadotin, radretumab, pasotuxizumab, farletuzumab, mirvetuximab soravtansine, vantictumab, TRBS07, 3F8, dinutuximab, dinutuximab beta, ecromeximab, mitumomab, andecaliximab, capromab, codrituzumab, glembatumumab vedotin, talquetamab, talquetamab, trevogrumab, indusatumab vedotin, ficlatuzumab, rilotumumab, zatuximab, pentuzimab, pentuzimab, margetuximab, timigutuzumab, trastuzumab, trastuzumab duocarmazine, trastuzumab emtansine, gancotamab, pertuzumab, ertumaxomab, emibetuzumab, telisotuzumab, telisotuzumab vedotin, derlotuximab biotin, apolizumab, onartuzumab, bersanlimab, enlimomabpegol, rontalizumab, sifalimumab, talizumab, ganitumab, istiratumab, robatumumab, teprotumumab, figitumumab, ganitumab, istiratumab, robatumumab, teprotumumab, cixutumumab, dalotuzumab, xentuzumab, dusigitumab, canakinumab, ustekinumab, ustekinumab, ustekinumab, briakinumab, briakinumab, abrezekimab, lebrikizumab, romilkimab, TNX-650, tralokinumab, anrukinzumab, brodalumab, ixekizumab, netakimab, perakizumab, secukinumab, vunakizumab, afasevikumab, afasevikumab, bimekizumab, bimekizumab, remtolumab, bermekimab, lutikizumab, lutikizumab, gevokizumab, cergutuzumab amunaleukin, fletikumab, fezakinumab, brazikumab, guselkumab, mirikizumab, tildrakizumab, risankizumab, flotetuzumab, nemolizumab, pascolizumab, dupilumab, mepolizumab, reslizumab, clazakizumab, elsilimomab, olokizumab, sarilumab, siltuximab, sirukumab, vobarilizumab, tocilizumab, SA237, satralizumab, enokizumab, prezalizumab, natalizumab, abrilumab, abrilumab, vedolizumab, volociximab, tadocizumab, etaracizumab, etrolizumab, spesolimab, vatelizumab, erlizumab, lirilumab, relatlimab, cBR96-doxorubicinimmunoconjugate, odulimomab, efalizumab, ladiratuzumab vedotin, simtuzumab, samrotamab vedotin, aselizumab, lupartumab amadotin, imalumab, carlumab, imaprelimab, amatuximab, amatuximab, anetumab ravtansine, narnatumab, clivatuzumab tetraxetan, pemtumomab, gatipotuzumab, ensituximab, lemalesomab, sulesomab, enfortumab vedotin, racotumomab, monalizumab, brontictuzumab, tarextumab, vesencumab, oxelumab, gilvetmab, tislelizumab, dostarlimab, BCD-100, nivolumab, PDR001, pembrolizumab, pidilizumab, retifanlimab, spartalizumab, sintilimab, cemiplimab, olaratumab, tovetumab, rinucumab, atezolizumab, avelumab, durvalumab, lifastuzumab vedotin, bavituximab, acapatamab, capromab, rosopatamab, nezastomig, pasotuxizumab, pelgifatamab, voxalatamab, cofetuzumab pelidotin, denosumab, rosmantuzumab, cirmtuzumab, atinumab, indatuximab ravtansine, elotuzumab, sirtratumab vedotin, sonepcizumab, vandortuzumab vedotin, minretumomab, satumomab pendetide, maslimomab, ontuxizumab, tenatumomab, fresolimumab, metelimumab, lerdelimumab, tezepelumab, etigilimab, tiragotumab, placulumab, prezalumab, infliximab, nerelimomab, ozoralizumab, adalimumab, afelimomab, certolizumab pegol, golimumab, mapatumumab, conatumumab, lexatumumab, tigatuzumab, sacituzumab govitecan, votumumab, pogalizumab, letolizumab, pankomab, anatumomab mafenatox, enavatuzumab, flanvotumab, brolucizumab, ranibizumab, varisacumab, bevacizumab, faricimab, icrucumab, alacizumab pegol, ramucirumab, pritumumab, and onvatilimab.

[6254] In some aspects, the antigen binding polypeptide complexes provided herein comprise a VL3 comprising a light chain complementarity determining region 1 (LCDR1), LCDR2, and/or LCDR3 of an antibody selected from the group consisting of losatuxizumab vedotin, utomilumab, urelumab, oleclumab, naptumomab estafenatox, ascrinvacumab, pintumomab, tacatuzumab tetraxetan, nesvacumab, vanucizumab, timolumab, vapaliximab, vepalimomab, enapotamab vedotin, ianalumab, belimumab, tabalumab, tibulizumab, belantamab mafodotin, teclistamab, teclistamab, detumomab, nacolomab tafenatox, eculizumab, lendalizumab, pexelizumab, pozelimab, ravulizumab, tesidolumab, vilobelimab, abagovomab, igovomab, oregovomab, sofituzumab vedotin, cantuzumab mertansine, cantuzuma bravtansine, girentuximab, altumomab pentetate, arcitumomab, besilesomab, bertilimumab, plozalizumab, mogamulizumab, leronlimab, PRO140, rovelizumab, rovelizumab, talacotuzumab, benralizumab, tavolimab, vonlerolizumab, gavilimomab, ziralimumab, fanolesomab, ipilimumab, ruplizumab, toralizumab, dapirolizumab pegol, toralizumab, dapirolizumab pegol, ruplizumab, blinatumomab, inebilizumab, loncastuximab tesirine, SGN-CD19A, tafasitamab, taplitumomab paptox, XMAB-5574, Budoprutug, Obexelimab, duvortuxizumab, englumafusp alfa, Emfizatamab, zeripatamig, siplizumab, blontuvetmab, FBTA05, ibritumomab tiuxetan, obinutuzumab, ocaratuzumab, ocrelizumab, ofatumumab, rituximab, tositumomab, ublituximab, veltuzumab, divozilimab, eramkafusp alfa, ripertamab, zuberitamab, glofitamab, nofetumomab merpentan, samalizumab, imvotamab, odronextamab, plamotamab, bectumomab, inotuzumab ozogamicin, moxetumomab pasudotox, pinatuzumab vedotin, gomiliximab, lumiliximab, inolimomab, inolimomab, daclizumab, camidanluma btesirine, basiliximab, varlilumab, omburtamab, enoblituzumab, vopratelimab, lulizumabpegol, TGN1412, muromonab-CD3, otelixizumab, teplizumab, visilizumab, epcoritamab, epcoritamab, brentuximab vedotin, iratumumab, azintuxizumab vedotin, gemtuzumab ozogamicin, lintuzumab, vadastuximab talirine, naratuximab emtansine, otlertuzumab, lilotomab satetraxetan, tetulomab, daratumumab, isatuximab, foralumab, mosunetuzumab, mosunetuzumab, cedelizumab, ibalizumab, keliximab, priliximab, tregalizumab, zanolimumab, bleselumab, iscalimab, lucatumumab, ravagalimab, selicrelumab, teneliximab, vanalimab, abciximab, bivatuzumab, iomab-B, telimomab aritox, zolimomab aritox, abituzumab, intetumumab, alemtuzumab, tamtuvetmab, lorvotuzumab mertansine, itolizumab, cusatuzumab, vorsetuzumab mafodotin, milatuzumab, iladatuzumab vedotin, polatuzumab vedotin, galiximab, cibisatamab, zolbetuximab, naxitamab, tisotumab vedotin, olendalizumab, pamrevlumab, lacnotuzumab, cabiralizumab, emactuzumab, axatilimab, gimsilumab, lenzilumab, namilumab, tremelimumab, ulocuplumab, tepoditamab, rovalpituzumab tesirine, tarlatamab, demcizumab, navicixizumab, drozitumab, parsatuzumab, depatuxizumab mafodotin, modotuximab, carotuximab, adecatumumab, adecatumumab, oportuzumab monatox, solitomab, tucotuzumab celmoleukin, edrecolomab, catumaxomab, ifabotuzumab, fibatuzumab, zalutumumab, panitumumab, cetuximab, futuximab, imgatuzumab, laprituximab emtansine, matuzumab, necitumumab, nimotuzumab, tomuzotuximab, amivantamab, amivantamab, epitumomab cituxetan, sontuzumab, duligotuzumab, elgemtumab, lumretuzumab, patritumab, seribantumab, zenocutuzumab, sibrotuzumab, burosumab, aprutumab ixadotin, radretumab, pasotuxizumab, farletuzumab, mirvetuximab soravtansine, vantictumab, TRBS07, 3F8, dinutuximab, dinutuximab beta, ecromeximab, mitumomab, andecaliximab, capromab, codrituzumab, glembatumumab vedotin, talquetamab, talquetamab, trevogrumab, indusatumab vedotin, ficlatuzumab, rilotumumab, zatuximab, pentuzimab, pentuzimab, margetuximab, timigutuzumab, trastuzumab, trastuzumab duocarmazine, trastuzumab emtansine, gancotamab, pertuzumab, ertumaxomab, emibetuzumab, telisotuzumab, telisotuzumab vedotin, derlotuximab biotin, apolizumab, onartuzumab, bersanlimab, enlimomabpegol, rontalizumab, sifalimumab, talizumab, ganitumab, istiratumab, robatumumab, teprotumumab, figitumumab, ganitumab, istiratumab, robatumumab, teprotumumab, cixutumumab, dalotuzumab, xentuzumab, dusigitumab, canakinumab, ustekinumab, ustekinumab, ustekinumab, briakinumab, briakinumab, abrezekimab, lebrikizumab, romilkimab, TNX-650, tralokinumab, anrukinzumab, brodalumab, ixekizumab, netakimab, perakizumab, secukinumab, vunakizumab, afasevikumab, afasevikumab, bimekizumab, bimekizumab, remtolumab, bermekimab, lutikizumab, lutikizumab, gevokizumab, cergutuzumab amunaleukin, fletikumab, fezakinumab, brazikumab, guselkumab, mirikizumab, tildrakizumab, risankizumab, flotetuzumab, nemolizumab, pascolizumab, dupilumab, mepolizumab, reslizumab, clazakizumab, elsilimomab, olokizumab, sarilumab, siltuximab, sirukumab, vobarilizumab, tocilizumab, SA237, satralizumab, enokizumab, prezalizumab, natalizumab, abrilumab, abrilumab, vedolizumab, volociximab, tadocizumab, etaracizumab, etrolizumab, spesolimab, vatelizumab, erlizumab, lirilumab, relatlimab, cBR96-doxorubicinimmunoconjugate, odulimomab, efalizumab, ladiratuzumab vedotin, simtuzumab, samrotamab vedotin, aselizumab, lupartumab amadotin, imalumab, carlumab, imaprelimab, amatuximab, amatuximab, anetumab ravtansine, narnatumab, clivatuzumab tetraxetan, pemtumomab, gatipotuzumab, ensituximab, lemalesomab, sulesomab, enfortumab vedotin, racotumomab, monalizumab, brontictuzumab, tarextumab, vesencumab, oxelumab, gilvetmab, tislelizumab, dostarlimab, BCD-100, nivolumab, PDR001, pembrolizumab, pidilizumab, retifanlimab, spartalizumab, sintilimab, cemiplimab, olaratumab, tovetumab, rinucumab, atezolizumab, avelumab, durvalumab, lifastuzumab vedotin, bavituximab, acapatamab, capromab, rosopatamab, nezastomig, pasotuxizumab, pelgifatamab, voxalatamab, cofetuzumab pelidotin, denosumab, rosmantuzumab, cirmtuzumab, atinumab, indatuximab ravtansine, elotuzumab, sirtratumab vedotin, sonepcizumab, vandortuzumab vedotin, minretumomab, satumomab pendetide, maslimomab, ontuxizumab, tenatumomab, fresolimumab, metelimumab, lerdelimumab, tezepelumab, etigilimab, tiragotumab, placulumab, prezalumab, infliximab, nerelimomab, ozoralizumab, adalimumab, afelimomab, certolizumab pegol, golimumab, mapatumumab, conatumumab, lexatumumab, tigatuzumab, sacituzumab govitecan, votumumab, pogalizumab, letolizumab, pankomab, anatumomab mafenatox, enavatuzumab, flanvotumab, brolucizumab, ranibizumab, varisacumab, bevacizumab, faricimab, icrucumab, alacizumab pegol, ramucirumab, pritumumab, and onvatilimab.

[6255] In some aspects, the antigen binding polypeptide complexes provided herein comprise a VH1 comprising a heavy chain complementarity determining region 1 (HCDR1), HCDR2, and/or HCDR3 of an antibody selected from the group consisting of losatuxizumab vedotin, utomilumab, urelumab, oleclumab, naptumomab estafenatox, ascrinvacumab, pintumomab, tacatuzumab tetraxetan, nesvacumab, vanucizumab, timolumab, vapaliximab, vepalimomab, enapotamab vedotin, ianalumab, belimumab, tabalumab, tibulizumab, belantamab mafodotin, teclistamab, teclistamab, detumomab, nacolomab tafenatox, eculizumab, lendalizumab, pexelizumab, pozelimab, ravulizumab, tesidolumab, vilobelimab, abagovomab, igovomab, oregovomab, sofituzumab vedotin, cantuzumab mertansine, cantuzuma bravtansine, girentuximab, altumomab pentetate, arcitumomab, besilesomab, bertilimumab, plozalizumab, mogamulizumab, leronlimab, PRO140, rovelizumab, rovelizumab, talacotuzumab, benralizumab, tavolimab, vonlerolizumab, gavilimomab, ziralimumab, fanolesomab, ipilimumab, ruplizumab, toralizumab, dapirolizumab pegol, toralizumab, dapirolizumab pegol, ruplizumab, blinatumomab, inebilizumab, loncastuximab tesirine, SGN-CD19A, tafasitamab, taplitumomab paptox, XMAB-5574, Budoprutug, Obexelimab, duvortuxizumab, englumafusp alfa, Emfizatamab, zeripatamig, siplizumab, blontuvetmab, FBTA05, ibritumomab tiuxetan, obinutuzumab, ocaratuzumab, ocrelizumab, ofatumumab, rituximab, tositumomab, ublituximab, veltuzumab, divozilimab, eramkafusp alfa, ripertamab, zuberitamab, glofitamab, nofetumomab merpentan, samalizumab, imvotamab, odronextamab, plamotamab, bectumomab, inotuzumab ozogamicin, moxetumomab pasudotox, pinatuzumab vedotin, gomiliximab, lumiliximab, inolimomab, inolimomab, daclizumab, camidanluma btesirine, basiliximab, varlilumab, omburtamab, enoblituzumab, vopratelimab, lulizumabpegol, TGN1412, muromonab-CD3, otelixizumab, teplizumab, visilizumab, epcoritamab, epcoritamab, brentuximab vedotin, iratumumab, azintuxizumab vedotin, gemtuzumab ozogamicin, lintuzumab, vadastuximab talirine, naratuximab emtansine, otlertuzumab, lilotomab satetraxetan, tetulomab, daratumumab, isatuximab, foralumab, mosunctuzumab, mosunetuzumab, cedelizumab, ibalizumab, keliximab, priliximab, tregalizumab, zanolimumab, bleselumab, iscalimab, lucatumumab, ravagalimab, selicrelumab, teneliximab, vanalimab, abciximab, bivatuzumab, iomab-B, telimomab aritox, zolimomab aritox, abituzumab, intetumumab, alemtuzumab, tamtuvetmab, lorvotuzumab mertansine, itolizumab, cusatuzumab, vorsetuzumab mafodotin, milatuzumab, iladatuzumab vedotin, polatuzumab vedotin, galiximab, cibisatamab, zolbetuximab, naxitamab, tisotumab vedotin, olendalizumab, pamrevlumab, lacnotuzumab, cabiralizumab, emactuzumab, axatilimab, gimsilumab, lenzilumab, namilumab, tremelimumab, ulocuplumab, tepoditamab, rovalpituzumab tesirine, tarlatamab, demcizumab, navicixizumab, drozitumab, parsatuzumab, depatuxizumab mafodotin, modotuximab, carotuximab, adecatumumab, adecatumumab, oportuzumab monatox, solitomab, tucotuzumab celmoleukin, edrecolomab, catumaxomab, ifabotuzumab, fibatuzumab, zalutumumab, panitumumab, cetuximab, futuximab, imgatuzumab, laprituximab emtansine, matuzumab, necitumumab, nimotuzumab, tomuzotuximab, amivantamab, amivantamab, epitumomab cituxetan, sontuzumab, duligotuzumab, elgemtumab, lumretuzumab, patritumab, seribantumab, zenocutuzumab, sibrotuzumab, burosumab, aprutumab ixadotin, radretumab, pasotuxizumab, farletuzumab, mirvetuximab soravtansine, vantictumab, TRBS07, 3F8, dinutuximab, dinutuximab beta, ecromeximab, mitumomab, andecaliximab, capromab, codrituzumab, glembatumumab vedotin, talquetamab, talquetamab, trevogrumab, indusatumab vedotin, ficlatuzumab, rilotumumab, zatuximab, pentuzimab, pentuzimab, margetuximab, timigutuzumab, trastuzumab, trastuzumab duocarmazine, trastuzumab emtansine, gancotamab, pertuzumab, ertumaxomab, emibetuzumab, telisotuzumab, telisotuzumab vedotin, derlotuximab biotin, apolizumab, onartuzumab, bersanlimab, enlimomabpegol, rontalizumab, sifalimumab, talizumab, ganitumab, istiratumab, robatumumab, teprotumumab, figitumumab, ganitumab, istiratumab, robatumumab, teprotumumab, cixutumumab, dalotuzumab, xentuzumab, dusigitumab, canakinumab, ustekinumab, ustekinumab, ustekinumab, briakinumab, briakinumab, abrezekimab, lebrikizumab, romilkimab, TNX-650, tralokinumab, anrukinzumab, brodalumab, ixekizumab, netakimab, perakizumab, secukinumab, vunakizumab, afasevikumab, afasevikumab, bimekizumab, bimekizumab, remtolumab, bermekimab, lutikizumab, lutikizumab, gevokizumab, cergutuzumab amunaleukin, fletikumab, fezakinumab, brazikumab, guselkumab, mirikizumab, tildrakizumab, risankizumab, flotetuzumab, nemolizumab, pascolizumab, dupilumab, mepolizumab, reslizumab, clazakizumab, elsilimomab, olokizumab, sarilumab, siltuximab, sirukumab, vobarilizumab, tocilizumab, SA237, satralizumab, enokizumab, prezalizumab, natalizumab, abrilumab, abrilumab, vedolizumab, volociximab, tadocizumab, etaracizumab, etrolizumab, spesolimab, vatelizumab, erlizumab, lirilumab, relatlimab, cBR96-doxorubicinimmunoconjugate, odulimomab, efalizumab, ladiratuzumab vedotin, simtuzumab, samrotamab vedotin, aselizumab, lupartumab amadotin, imalumab, carlumab, imaprelimab, amatuximab, amatuximab, anetumab ravtansine, narnatumab, clivatuzumab tetraxetan, pemtumomab, gatipotuzumab, ensituximab, lemalesomab, sulesomab, enfortumab vedotin, racotumomab, monalizumab, brontictuzumab, tarextumab, vesencumab, oxelumab, gilvetmab, tislelizumab, dostarlimab, BCD-100, nivolumab, PDR001, pembrolizumab, pidilizumab, retifanlimab, spartalizumab, sintilimab, cemiplimab, olaratumab, tovetumab, rinucumab, atezolizumab, avelumab, durvalumab, lifastuzumab vedotin, bavituximab, acapatamab, capromab, rosopatamab, nezastomig, pasotuxizumab, pelgifatamab, voxalatamab, cofetuzumab pelidotin, denosumab, rosmantuzumab, cirmtuzumab, atinumab, indatuximab ravtansine, elotuzumab, sirtratumab vedotin, sonepcizumab, vandortuzumab vedotin, minretumomab, satumomab pendetide, maslimomab, ontuxizumab, tenatumomab, fresolimumab, metelimumab, lerdelimumab, tezepelumab, etigilimab, tiragotumab, placulumab, prezalumab, infliximab, nerelimomab, ozoralizumab, adalimumab, afelimomab, certolizumab pegol, golimumab, mapatumumab, conatumumab, lexatumumab, tigatuzumab, sacituzumab govitecan, votumumab, pogalizumab, letolizumab, pankomab, anatumomab mafenatox, enavatuzumab, flanvotumab, brolucizumab, ranibizumab, varisacumab, bevacizumab, faricimab, icrucumab, alacizumab pegol, ramucirumab, pritumumab, and onvatilimab.

[6256] In some aspects, the antigen binding polypeptide complexes provided herein comprise a VH2 comprising a heavy chain complementarity determining region 1 (HCDR1), HCDR2, and/or HCDR3 of an antibody selected from the group consisting of losatuxizumab vedotin, utomilumab, urelumab, oleclumab, naptumomab estafenatox, ascrinvacumab, pintumomab, tacatuzumab tetraxetan, nesvacumab, vanucizumab, timolumab, vapaliximab, vepalimomab, enapotamab vedotin, ianalumab, belimumab, tabalumab, tibulizumab, belantamab mafodotin, teclistamab, teclistamab, detumomab, nacolomab tafenatox, eculizumab, lendalizumab, pexelizumab, pozelimab, ravulizumab, tesidolumab, vilobelimab, abagovomab, igovomab, oregovomab, sofituzumab vedotin, cantuzumab mertansine, cantuzuma bravtansine, girentuximab, altumomab pentetate, arcitumomab, besilesomab, bertilimumab, plozalizumab, mogamulizumab, leronlimab, PRO140, rovelizumab, rovelizumab, talacotuzumab, benralizumab, tavolimab, vonlerolizumab, gavilimomab, ziralimumab, fanolesomab, ipilimumab, ruplizumab, toralizumab, dapirolizumab pegol, toralizumab, dapirolizumab pegol, ruplizumab, blinatumomab, inebilizumab, loncastuximab tesirine, SGN-CD19A, tafasitamab, taplitumomab paptox, XMAB-5574, Budoprutug, Obexelimab, duvortuxizumab, englumafusp alfa, Emfizatamab, zeripatamig, siplizumab, blontuvetmab, FBTA05, ibritumomab tiuxetan, obinutuzumab, ocaratuzumab, ocrelizumab, ofatumumab, rituximab, tositumomab, ublituximab, veltuzumab, divozilimab, eramkafusp alfa, ripertamab, zuberitamab, glofitamab, nofetumomab merpentan, samalizumab, imvotamab, odronextamab, plamotamab, bectumomab, inotuzumab ozogamicin, moxetumomab pasudotox, pinatuzumab vedotin, gomiliximab, lumiliximab, inolimomab, inolimomab, daclizumab, camidanluma btesirine, basiliximab, varlilumab, omburtamab, enoblituzumab, vopratelimab, lulizumabpegol, TGN1412, muromonab-CD3, otelixizumab, teplizumab, visilizumab, epcoritamab, epcoritamab, brentuximab vedotin, iratumumab, azintuxizumab vedotin, gemtuzumab ozogamicin, lintuzumab, vadastuximab talirine, naratuximab emtansine, otlertuzumab, lilotomab satetraxetan, tetulomab, daratumumab, isatuximab, foralumab, mosunetuzumab, mosunetuzumab, cedelizumab, ibalizumab, keliximab, priliximab, tregalizumab, zanolimumab, bleselumab, iscalimab, lucatumumab, ravagalimab, selicrelumab, teneliximab, vanalimab, abciximab, bivatuzumab, iomab-B, telimomab aritox, zolimomab aritox, abituzumab, intetumumab, alemtuzumab, tamtuvetmab, lorvotuzumab mertansine, itolizumab, cusatuzumab, vorsctuzumab mafodotin, milatuzumab, iladatuzumab vedotin, polatuzumab vedotin, galiximab, cibisatamab, zolbctuximab, naxitamab, tisotumab vedotin, olendalizumab, pamrevlumab, lacnotuzumab, cabiralizumab, emactuzumab, axatilimab, gimsilumab, lenzilumab, namilumab, tremelimumab, ulocuplumab, tepoditamab, rovalpituzumab tesirine, tarlatamab, demcizumab, navicixizumab, drozitumab, parsatuzumab, depatuxizumab mafodotin, modotuximab, carotuximab, adecatumumab, adecatumumab, oportuzumab monatox, solitomab, tucotuzumab celmoleukin, edrecolomab, catumaxomab, ifabotuzumab, fibatuzumab, zalutumumab, panitumumab, cetuximab, futuximab, imgatuzumab, laprituximab emtansine, matuzumab, necitumumab, nimotuzumab, tomuzotuximab, amivantamab, amivantamab, epitumomab cituxetan, sontuzumab, duligotuzumab, elgemtumab, lumretuzumab, patritumab, scribantumab, zenocutuzumab, sibrotuzumab, burosumab, aprutumab ixadotin, radretumab, pasotuxizumab, farletuzumab, mirvetuximab soravtansine, vantictumab, TRBS07, 3F8, dinutuximab, dinutuximab beta, ecromeximab, mitumomab, andecaliximab, capromab, codrituzumab, glembatumumab vedotin, talquetamab, talquetamab, trevogrumab, indusatumab vedotin, ficlatuzumab, rilotumumab, zatuximab, pentuzimab, pentuzimab, margetuximab, timigutuzumab, trastuzumab, trastuzumab duocarmazine, trastuzumab emtansine, gancotamab, pertuzumab, ertumaxomab, emibetuzumab, telisotuzumab, telisotuzumab vedotin, derlotuximab biotin, apolizumab, onartuzumab, bersanlimab, enlimomabpegol, rontalizumab, sifalimumab, talizumab, ganitumab, istiratumab, robatumumab, teprotumumab, figitumumab, ganitumab, istiratumab, robatumumab, teprotumumab, cixutumumab, dalotuzumab, xentuzumab, dusigitumab, canakinumab, ustekinumab, ustekinumab, ustekinumab, briakinumab, briakinumab, abrezekimab, lebrikizumab, romilkimab, TNX-650, tralokinumab, anrukinzumab, brodalumab, ixekizumab, netakimab, perakizumab, secukinumab, vunakizumab, afasevikumab, afasevikumab, bimekizumab, bimekizumab, remtolumab, bermckimab, lutikizumab, lutikizumab, gevokizumab, cergutuzumab amunaleukin, fletikumab, fezakinumab, brazikumab, guselkumab, mirikizumab, tildrakizumab, risankizumab, flotetuzumab, nemolizumab, pascolizumab, dupilumab, mepolizumab, reslizumab, clazakizumab, elsilimomab, olokizumab, sarilumab, siltuximab, sirukumab, vobarilizumab, tocilizumab, SA237, satralizumab, enokizumab, prezalizumab, natalizumab, abrilumab, abrilumab, vedolizumab, volociximab, tadocizumab, etaracizumab, etrolizumab, spesolimab, vatelizumab, crlizumab, lirilumab, relatlimab, cBR96-doxorubicinimmunoconjugate, odulimomab, efalizumab, ladiratuzumab vedotin, simtuzumab, samrotamab vedotin, aselizumab, lupartumab amadotin, imalumab, carlumab, imaprelimab, amatuximab, amatuximab, anetumab ravtansine, narnatumab, clivatuzumab tetraxetan, pemtumomab, gatipotuzumab, ensituximab, lemalesomab, sulesomab, enfortumab vedotin, racotumomab, monalizumab, brontictuzumab, tarextumab, vesencumab, oxelumab, gilvetmab, tislelizumab, dostarlimab, BCD-100, nivolumab, PDR001, pembrolizumab, pidilizumab, retifanlimab, spartalizumab, sintilimab, cemiplimab, olaratumab, tovetumab, rinucumab, atezolizumab, avelumab, durvalumab, lifastuzumab vedotin, bavituximab, acapatamab, capromab, rosopatamab, nezastomig, pasotuxizumab, pelgifatamab, voxalatamab, cofetuzumab pelidotin, denosumab, rosmantuzumab, cirmtuzumab, atinumab, indatuximab ravtansine, elotuzumab, sirtratumab vedotin, sonepcizumab, vandortuzumab vedotin, minretumomab, satumomab pendetide, maslimomab, ontuxizumab, tenatumomab, fresolimumab, metelimumab, lerdelimumab, tezepelumab, etigilimab, tiragotumab, placulumab, prezalumab, infliximab, nerelimomab, ozoralizumab, adalimumab, afelimomab, certolizumab pegol, golimumab, mapatumumab, conatumumab, lexatumumab, tigatuzumab, sacituzumab govitecan, votumumab, pogalizumab, letolizumab, pankomab, anatumomab mafenatox, enavatuzumab, flanvotumab, brolucizumab, ranibizumab, varisacumab, bevacizumab, faricimab, icrucumab, alacizumab pegol, ramucirumab, pritumumab, and onvatilimab.

[6257] In some aspects, the antigen binding polypeptide complexes provided herein comprise a VH3 comprising a heavy chain complementarity determining region 1 (HCDR1), HCDR2, and/or HCDR3 of an antibody selected from the group consisting of losatuxizumab vedotin, utomilumab, urelumab, oleclumab, naptumomab estafenatox, ascrinvacumab, pintumomab, tacatuzumab tetraxetan, nesvacumab, vanucizumab, timolumab, vapaliximab, vepalimomab, enapotamab vedotin, ianalumab, belimumab, tabalumab, tibulizumab, belantamab mafodotin, teclistamab, teclistamab, detumomab, nacolomab tafenatox, eculizumab, lendalizumab, pexelizumab, pozelimab, ravulizumab, tesidolumab, vilobelimab, abagovomab, igovomab, oregovomab, sofituzumab vedotin, cantuzumab mertansine, cantuzuma bravtansine, girentuximab, altumomab pentetate, arcitumomab, besilesomab, bertilimumab, plozalizumab, mogamulizumab, leronlimab, PRO140, rovelizumab, rovelizumab, talacotuzumab, benralizumab, tavolimab, vonlerolizumab, gavilimomab, ziralimumab, fanolesomab, ipilimumab, ruplizumab, toralizumab, dapirolizumab pegol, toralizumab, dapirolizumab pegol, ruplizumab, blinatumomab, inebilizumab, loncastuximab tesirine, SGN-CD19A, tafasitamab, taplitumomab paptox, XMAB-5574, Budoprutug, Obexelimab, duvortuxizumab, englumafusp alfa, Emfizatamab, zeripatamig, siplizumab, blontuvetmab, FBTA05, ibritumomab tiuxetan, obinutuzumab, ocaratuzumab, ocrelizumab, ofatumumab, rituximab, tositumomab, ublituximab, veltuzumab, divozilimab, eramkafusp alfa, ripertamab, zuberitamab, glofitamab, nofetumomab merpentan, samalizumab, imvotamab, odronextamab, plamotamab, bectumomab, inotuzumab ozogamicin, moxetumomab pasudotox, pinatuzumab vedotin, gomiliximab, lumiliximab, inolimomab, inolimomab, daclizumab, camidanluma btesirine, basiliximab, varlilumab, omburtamab, enoblituzumab, vopratelimab, lulizumabpegol, TGN1412, muromonab-CD3, otelixizumab, teplizumab, visilizumab, epcoritamab, epcoritamab, brentuximab vedotin, iratumumab, azintuxizumab vedotin, gemtuzumab ozogamicin, lintuzumab, vadastuximab talirine, naratuximab emtansine, otlertuzumab, lilotomab satetraxetan, tetulomab, daratumumab, isatuximab, foralumab, mosunetuzumab, mosunetuzumab, cedelizumab, ibalizumab, keliximab, priliximab, tregalizumab, zanolimumab, bleselumab, iscalimab, lucatumumab, ravagalimab, selicrelumab, teneliximab, vanalimab, abciximab, bivatuzumab, iomab-B, telimomab aritox, zolimomab aritox, abituzumab, intetumumab, alemtuzumab, tamtuvetmab, lorvotuzumab mertansine, itolizumab, cusatuzumab, vorsetuzumab mafodotin, milatuzumab, iladatuzumab vedotin, polatuzumab vedotin, galiximab, cibisatamab, zolbetuximab, naxitamab, tisotumab vedotin, olendalizumab, pamrevlumab, lacnotuzumab, cabiralizumab, emactuzumab, axatilimab, gimsilumab, lenzilumab, namilumab, tremelimumab, ulocuplumab, tepoditamab, rovalpituzumab tesirine, tarlatamab, demcizumab, navicixizumab, drozitumab, parsatuzumab, depatuxizumab mafodotin, modotuximab, carotuximab, adecatumumab, adecatumumab, oportuzumab monatox, solitomab, tucotuzumab celmoleukin, edrecolomab, catumaxomab, ifabotuzumab, fibatuzumab, zalutumumab, panitumumab, cetuximab, futuximab, imgatuzumab, laprituximab emtansine, matuzumab, necitumumab, nimotuzumab, tomuzotuximab, amivantamab, amivantamab, epitumomab cituxetan, sontuzumab, duligotuzumab, elgemtumab, lumretuzumab, patritumab, seribantumab, zenocutuzumab, sibrotuzumab, burosumab, aprutumab ixadotin, radretumab, pasotuxizumab, farletuzumab, mirvetuximab soravtansine, vantictumab, TRBS07, 3F8, dinutuximab, dinutuximab beta, ecromeximab, mitumomab, andecaliximab, capromab, codrituzumab, glembatumumab vedotin, talquetamab, talquetamab, trevogrumab, indusatumab vedotin, ficlatuzumab, rilotumumab, zatuximab, pentuzimab, pentuzimab, margetuximab, timigutuzumab, trastuzumab, trastuzumab duocarmazine, trastuzumab emtansine, gancotamab, pertuzumab, ertumaxomab, emibetuzumab, telisotuzumab, telisotuzumab vedotin, derlotuximab biotin, apolizumab, onartuzumab, bersanlimab, enlimomabpegol, rontalizumab, sifalimumab, talizumab, ganitumab, istiratumab, robatumumab, teprotumumab, figitumumab, ganitumab, istiratumab, robatumumab, teprotumumab, cixutumumab, dalotuzumab, xentuzumab, dusigitumab, canakinumab, ustekinumab, ustekinumab, ustekinumab, briakinumab, briakinumab, abrezekimab, lebrikizumab, romilkimab, TNX-650, tralokinumab, anrukinzumab, brodalumab, ixekizumab, netakimab, perakizumab, secukinumab, vunakizumab, afasevikumab, afasevikumab, bimekizumab, bimekizumab, remtolumab, bermckimab, lutikizumab, lutikizumab, gevokizumab, cergutuzumab amunaleukin, fletikumab, fezakinumab, brazikumab, guselkumab, mirikizumab, tildrakizumab, risankizumab, flotetuzumab, nemolizumab, pascolizumab, dupilumab, mepolizumab, reslizumab, clazakizumab, elsilimomab, olokizumab, sarilumab, siltuximab, sirukumab, vobarilizumab, tocilizumab, SA237, satralizumab, enokizumab, prezalizumab, natalizumab, abrilumab, abrilumab, vedolizumab, volociximab, tadocizumab, etaracizumab, etrolizumab, spesolimab, vatelizumab, crlizumab, lirilumab, relatlimab, cBR96-doxorubicinimmunoconjugate, odulimomab, efalizumab, ladiratuzumab vedotin, simtuzumab, samrotamab vedotin, aselizumab, lupartumab amadotin, imalumab, carlumab, imaprelimab, amatuximab, amatuximab, anctumab ravtansine, narnatumab, clivatuzumab tetraxetan, pemtumomab, gatipotuzumab, ensituximab, lemalesomab, sulesomab, enfortumab vedotin, racotumomab, monalizumab, brontictuzumab, tarextumab, vesencumab, oxelumab, gilvetmab, tislelizumab, dostarlimab, BCD-100, nivolumab, PDR001, pembrolizumab, pidilizumab, retifanlimab, spartalizumab, sintilimab, cemiplimab, olaratumab, tovetumab, rinucumab, atezolizumab, avelumab, durvalumab, lifastuzumab vedotin, bavituximab, acapatamab, capromab, rosopatamab, nezastomig, pasotuxizumab, pelgifatamab, voxalatamab, cofetuzumab pelidotin, denosumab, rosmantuzumab, cirmtuzumab, atinumab, indatuximab ravtansine, elotuzumab, sirtratumab vedotin, sonepcizumab, vandortuzumab vedotin, minretumomab, satumomab pendetide, maslimomab, ontuxizumab, tenatumomab, fresolimumab, metelimumab, lerdelimumab, tezepelumab, etigilimab, tiragotumab, placulumab, prezalumab, infliximab, nerelimomab, ozoralizumab, adalimumab, afelimomab, certolizumab pegol, golimumab, mapatumumab, conatumumab, lexatumumab, tigatuzumab, sacituzumab govitecan, votumumab, pogalizumab, letolizumab, pankomab, anatumomab mafenatox, enavatuzumab, flanvotumab, brolucizumab, ranibizumab, varisacumab, bevacizumab, faricimab, icrucumab, alacizumab pegol, ramucirumab, pritumumab, and onvatilimab.

[6258] In some aspects, the antigen binding polypeptide complexes provided herein comprise a VL1 comprising a VL of an antibody selected from the group consisting of losatuxizumab vedotin, utomilumab, urelumab, oleclumab, naptumomab estafenatox, ascrinvacumab, pintumomab, tacatuzumab tetraxetan, nesvacumab, vanucizumab, timolumab, vapaliximab, vepalimomab, enapotamab vedotin, ianalumab, belimumab, tabalumab, tibulizumab, belantamab mafodotin, teclistamab, teclistamab, detumomab, nacolomab tafenatox, eculizumab, lendalizumab, pexelizumab, pozelimab, ravulizumab, tesidolumab, vilobelimab, abagovomab, igovomab, oregovomab, sofituzumab vedotin, cantuzumab mertansine, cantuzuma bravtansine, girentuximab, altumomab pentetate, arcitumomab, besilesomab, bertilimumab, plozalizumab, mogamulizumab, leronlimab, PRO140, rovelizumab, rovelizumab, talacotuzumab, benralizumab, tavolimab, vonlerolizumab, gavilimomab, ziralimumab, fanolesomab, ipilimumab, ruplizumab, toralizumab, dapirolizumab pegol, toralizumab, dapirolizumab pegol, ruplizumab, blinatumomab, inebilizumab, loncastuximab tesirine, SGN-CD19A, tafasitamab, taplitumomab paptox, XMAB-5574, Budoprutug, Obexelimab, duvortuxizumab, englumafusp alfa, Emfizatamab, zeripatamig, siplizumab, blontuvetmab, FBTA05, ibritumomab tiuxetan, obinutuzumab, ocaratuzumab, ocrelizumab, ofatumumab, rituximab, tositumomab, ublituximab, veltuzumab, divozilimab, eramkafusp alfa, ripertamab, zuberitamab, glofitamab, nofetumomab merpentan, samalizumab, imvotamab, odronextamab, plamotamab, bectumomab, inotuzumab ozogamicin, moxetumomab pasudotox, pinatuzumab vedotin, gomiliximab, lumiliximab, inolimomab, inolimomab, daclizumab, camidanluma btesirine, basiliximab, varlilumab, omburtamab, enoblituzumab, vopratelimab, lulizumabpegol, TGN1412, muromonab-CD3, otelixizumab, teplizumab, visilizumab, epcoritamab, epcoritamab, brentuximab vedotin, iratumumab, azintuxizumab vedotin, gemtuzumab ozogamicin, lintuzumab, vadastuximab talirine, naratuximab emtansine, otlertuzumab, lilotomab satetraxetan, tetulomab, daratumumab, isatuximab, foralumab, mosunetuzumab, mosunetuzumab, cedelizumab, ibalizumab, keliximab, priliximab, tregalizumab, zanolimumab, bleselumab, iscalimab, lucatumumab, ravagalimab, selicrelumab, teneliximab, vanalimab, abciximab, bivatuzumab, iomab-B, telimomab aritox, zolimomab aritox, abituzumab, intetumumab, alemtuzumab, tamtuvetmab, lorvotuzumab mertansine, itolizumab, cusatuzumab, vorsetuzumab mafodotin, milatuzumab, iladatuzumab vedotin, polatuzumab vedotin, galiximab, cibisatamab, zolbetuximab, naxitamab, tisotumab vedotin, olendalizumab, pamrevlumab, lacnotuzumab, cabiralizumab, emactuzumab, axatilimab, gimsilumab, lenzilumab, namilumab, tremelimumab, ulocuplumab, tepoditamab, rovalpituzumab tesirine, tarlatamab, demcizumab, navicixizumab, drozitumab, parsatuzumab, depatuxizumab mafodotin, modotuximab, carotuximab, adecatumumab, adecatumumab, oportuzumab monatox, solitomab, tucotuzumab celmoleukin, edrecolomab, catumaxomab, ifabotuzumab, fibatuzumab, zalutumumab, panitumumab, cetuximab, futuximab, imgatuzumab, laprituximab emtansine, matuzumab, necitumumab, nimotuzumab, tomuzotuximab, amivantamab, amivantamab, epitumomab cituxetan, sontuzumab, duligotuzumab, elgemtumab, lumretuzumab, patritumab, seribantumab, zenocutuzumab, sibrotuzumab, burosumab, aprutumab ixadotin, radretumab, pasotuxizumab, farletuzumab, mirvetuximab soravtansine, vantictumab, TRBS07, 3F8, dinutuximab, dinutuximab beta, ecromeximab, mitumomab, andecaliximab, capromab, codrituzumab, glembatumumab vedotin, talquetamab, talquetamab, trevogrumab, indusatumab vedotin, ficlatuzumab, rilotumumab, zatuximab, pentuzimab, pentuzimab, margetuximab, timigutuzumab, trastuzumab, trastuzumab duocarmazine, trastuzumab emtansine, gancotamab, pertuzumab, ertumaxomab, emibetuzumab, telisotuzumab, telisotuzumab vedotin, derlotuximab biotin, apolizumab, onartuzumab, bersanlimab, enlimomabpegol, rontalizumab, sifalimumab, talizumab, ganitumab, istiratumab, robatumumab, teprotumumab, figitumumab, ganitumab, istiratumab, robatumumab, teprotumumab, cixutumumab, dalotuzumab, xentuzumab, dusigitumab, canakinumab, ustekinumab, ustekinumab, ustekinumab, briakinumab, briakinumab, abrezekimab, lebrikizumab, romilkimab, TNX-650, tralokinumab, anrukinzumab, brodalumab, ixekizumab, netakimab, perakizumab, secukinumab, vunakizumab, afasevikumab, afasevikumab, bimekizumab, bimekizumab, remtolumab, bermekimab, lutikizumab, lutikizumab, gevokizumab, cergutuzumab amunaleukin, fletikumab, fezakinumab, brazikumab, guselkumab, mirikizumab, tildrakizumab, risankizumab, flotetuzumab, nemolizumab, pascolizumab, dupilumab, mepolizumab, reslizumab, clazakizumab, elsilimomab, olokizumab, sarilumab, siltuximab, sirukumab, vobarilizumab, tocilizumab, SA237, satralizumab, enokizumab, prezalizumab, natalizumab, abrilumab, abrilumab, vedolizumab, volociximab, tadocizumab, etaracizumab, etrolizumab, spesolimab, vatelizumab, erlizumab, lirilumab, relatlimab, cBR96-doxorubicinimmunoconjugate, odulimomab, efalizumab, ladiratuzumab vedotin, simtuzumab, samrotamab vedotin, aselizumab, lupartumab amadotin, imalumab, carlumab, imaprelimab, amatuximab, amatuximab, anetumab ravtansine, narnatumab, clivatuzumab tetraxetan, pemtumomab, gatipotuzumab, ensituximab, lemalesomab, sulesomab, enfortumab vedotin, racotumomab, monalizumab, brontictuzumab, tarextumab, vesencumab, oxelumab, gilvetmab, tislelizumab, dostarlimab, BCD-100, nivolumab, PDR001, pembrolizumab, pidilizumab, retifanlimab, spartalizumab, sintilimab, cemiplimab, olaratumab, tovetumab, rinucumab, atezolizumab, avelumab, durvalumab, lifastuzumab vedotin, bavituximab, acapatamab, capromab, rosopatamab, nezastomig, pasotuxizumab, pelgifatamab, voxalatamab, cofetuzumab pelidotin, denosumab, rosmantuzumab, cirmtuzumab, atinumab, indatuximab ravtansine, elotuzumab, sirtratumab vedotin, sonepcizumab, vandortuzumab vedotin, minretumomab, satumomab pendetide, maslimomab, ontuxizumab, tenatumomab, fresolimumab, metelimumab, lerdelimumab, tezepelumab, etigilimab, tiragotumab, placulumab, prezalumab, infliximab, nerelimomab, ozoralizumab, adalimumab, afelimomab, certolizumab pegol, golimumab, mapatumumab, conatumumab, lexatumumab, tigatuzumab, sacituzumab govitecan, votumumab, pogalizumab, letolizumab, pankomab, anatumomab mafenatox, enavatuzumab, flanvotumab, brolucizumab, ranibizumab, varisacumab, bevacizumab, faricimab, icrucumab, alacizumab pegol, ramucirumab, pritumumab, and onvatilimab.

[6259] In some aspects, the antigen binding polypeptide complexes provided herein comprise a VL2 comprising a VL of an antibody selected from the group consisting of losatuxizumab vedotin, utomilumab, urelumab, oleclumab, naptumomab estafenatox, ascrinvacumab, pintumomab, tacatuzumab tetraxetan, nesvacumab, vanucizumab, timolumab, vapaliximab, vepalimomab, enapotamab vedotin, ianalumab, belimumab, tabalumab, tibulizumab, belantamab mafodotin, teclistamab, teclistamab, detumomab, nacolomab tafenatox, eculizumab, lendalizumab, pexelizumab, pozelimab, ravulizumab, tesidolumab, vilobelimab, abagovomab, igovomab, oregovomab, sofituzumab vedotin, cantuzumab mertansine, cantuzuma bravtansine, girentuximab, altumomab pentetate, arcitumomab, besilesomab, bertilimumab, plozalizumab, mogamulizumab, leronlimab, PRO140, rovelizumab, rovelizumab, talacotuzumab, benralizumab, tavolimab, vonlerolizumab, gavilimomab, ziralimumab, fanolesomab, ipilimumab, ruplizumab, toralizumab, dapirolizumab pegol, toralizumab, dapirolizumab pegol, ruplizumab, blinatumomab, inebilizumab, loncastuximab tesirine, SGN-CD19A, tafasitamab, taplitumomab paptox, XMAB-5574, Budoprutug, Obexelimab, duvortuxizumab, englumafusp alfa, Emfizatamab, zcripatamig, siplizumab, blontuvetmab, FBTA05, ibritumomab tiuxetan, obinutuzumab, ocaratuzumab, ocrelizumab, ofatumumab, rituximab, tositumomab, ublituximab, veltuzumab, divozilimab, eramkafusp alfa, ripertamab, zuberitamab, glofitamab, nofetumomab merpentan, samalizumab, imvotamab, odronextamab, plamotamab, bectumomab, inotuzumab ozogamicin, moxetumomab pasudotox, pinatuzumab vedotin, gomiliximab, lumiliximab, inolimomab, inolimomab, daclizumab, camidanluma btesirine, basiliximab, varlilumab, omburtamab, enoblituzumab, vopratelimab, lulizumabpegol, TGN1412, muromonab-CD3, otelixizumab, teplizumab, visilizumab, epcoritamab, epcoritamab, brentuximab vedotin, iratumumab, azintuxizumab vedotin, gemtuzumab ozogamicin, lintuzumab, vadastuximab talirine, naratuximab emtansine, otlertuzumab, lilotomab satetraxetan, tetulomab, daratumumab, isatuximab, foralumab, mosunetuzumab, mosunetuzumab, cedelizumab, ibalizumab, keliximab, priliximab, tregalizumab, zanolimumab, bleselumab, iscalimab, lucatumumab, ravagalimab, selicrelumab, teneliximab, vanalimab, abciximab, bivatuzumab, iomab-B, telimomab aritox, zolimomab aritox, abituzumab, intetumumab, alemtuzumab, tamtuvetmab, lorvotuzumab mertansine, itolizumab, cusatuzumab, vorsetuzumab mafodotin, milatuzumab, iladatuzumab vedotin, polatuzumab vedotin, galiximab, cibisatamab, zolbetuximab, naxitamab, tisotumab vedotin, olendalizumab, pamrevlumab, lacnotuzumab, cabiralizumab, emactuzumab, axatilimab, gimsilumab, lenzilumab, namilumab, tremelimumab, ulocuplumab, tepoditamab, rovalpituzumab tesirine, tarlatamab, demcizumab, navicixizumab, drozitumab, parsatuzumab, depatuxizumab mafodotin, modotuximab, carotuximab, adecatumumab, adecatumumab, oportuzumab monatox, solitomab, tucotuzumab celmoleukin, edrecolomab, catumaxomab, ifabotuzumab, fibatuzumab, zalutumumab, panitumumab, cetuximab, futuximab, imgatuzumab, laprituximab emtansine, matuzumab, necitumumab, nimotuzumab, tomuzotuximab, amivantamab, amivantamab, cpitumomab cituxetan, sontuzumab, duligotuzumab, elgemtumab, lumretuzumab, patritumab, scribantumab, zenocutuzumab, sibrotuzumab, burosumab, aprutumab ixadotin, radretumab, pasotuxizumab, farletuzumab, mirvetuximab soravtansine, vantictumab, TRBS07, 3F8, dinutuximab, dinutuximab beta, ecromeximab, mitumomab, andecaliximab, capromab, codrituzumab, glembatumumab vedotin, talquetamab, talquetamab, trevogrumab, indusatumab vedotin, ficlatuzumab, rilotumumab, zatuximab, pentuzimab, pentuzimab, margetuximab, timigutuzumab, trastuzumab, trastuzumab duocarmazine, trastuzumab emtansine, gancotamab, pertuzumab, ertumaxomab, emibetuzumab, telisotuzumab, telisotuzumab vedotin, derlotuximab biotin, apolizumab, onartuzumab, bersanlimab, enlimomabpegol, rontalizumab, sifalimumab, talizumab, ganitumab, istiratumab, robatumumab, teprotumumab, figitumumab, ganitumab, istiratumab, robatumumab, teprotumumab, cixutumumab, dalotuzumab, xentuzumab, dusigitumab, canakinumab, ustekinumab, ustekinumab, ustekinumab, briakinumab, briakinumab, abrezekimab, lebrikizumab, romilkimab, TNX-650, tralokinumab, anrukinzumab, brodalumab, ixekizumab, netakimab, perakizumab, secukinumab, vunakizumab, afasevikumab, afasevikumab, bimekizumab, bimekizumab, remtolumab, bermekimab, lutikizumab, lutikizumab, gevokizumab, cergutuzumab amunaleukin, fletikumab, fezakinumab, brazikumab, guselkumab, mirikizumab, tildrakizumab, risankizumab, flotetuzumab, nemolizumab, pascolizumab, dupilumab, mepolizumab, reslizumab, clazakizumab, elsilimomab, olokizumab, sarilumab, siltuximab, sirukumab, vobarilizumab, tocilizumab, SA237, satralizumab, enokizumab, prezalizumab, natalizumab, abrilumab, abrilumab, vedolizumab, volociximab, tadocizumab, etaracizumab, etrolizumab, spesolimab, vatelizumab, erlizumab, lirilumab, relatlimab, cBR96-doxorubicinimmunoconjugate, odulimomab, efalizumab, ladiratuzumab vedotin, simtuzumab, samrotamab vedotin, aselizumab, lupartumab amadotin, imalumab, carlumab, imaprelimab, amatuximab, amatuximab, anetumab ravtansine, narnatumab, clivatuzumab tetraxetan, pemtumomab, gatipotuzumab, ensituximab, lemalesomab, sulesomab, enfortumab vedotin, racotumomab, monalizumab, brontictuzumab, tarextumab, vesencumab, oxelumab, gilvetmab, tislelizumab, dostarlimab, BCD-100, nivolumab, PDR001, pembrolizumab, pidilizumab, retifanlimab, spartalizumab, sintilimab, cemiplimab, olaratumab, tovetumab, rinucumab, atezolizumab, avelumab, durvalumab, lifastuzumab vedotin, bavituximab, acapatamab, capromab, rosopatamab, nezastomig, pasotuxizumab, pelgifatamab, voxalatamab, cofetuzumab pelidotin, denosumab, rosmantuzumab, cirmtuzumab, atinumab, indatuximab ravtansine, elotuzumab, sirtratumab vedotin, sonepcizumab, vandortuzumab vedotin, minretumomab, satumomab pendetide, maslimomab, ontuxizumab, tenatumomab, fresolimumab, metelimumab, lerdelimumab, tezepelumab, etigilimab, tiragotumab, placulumab, prezalumab, infliximab, nerelimomab, ozoralizumab, adalimumab, afelimomab, certolizumab pegol, golimumab, mapatumumab, conatumumab, lexatumumab, tigatuzumab, sacituzumab govitecan, votumumab, pogalizumab, letolizumab, pankomab, anatumomab mafenatox, enavatuzumab, flanvotumab, brolucizumab, ranibizumab, varisacumab, bevacizumab, faricimab, icrucumab, alacizumab pegol, ramucirumab, pritumumab, and onvatilimab.

[6260] In some aspects, the antigen binding polypeptide complexes provided herein comprise a VL3 comprising a VL of an antibody selected from the group consisting of losatuxizumab vedotin, utomilumab, urelumab, oleclumab, naptumomab estafenatox, ascrinvacumab, pintumomab, tacatuzumab tetraxetan, nesvacumab, vanucizumab, timolumab, vapaliximab, vepalimomab, enapotamab vedotin, ianalumab, belimumab, tabalumab, tibulizumab, belantamab mafodotin, teclistamab, teclistamab, detumomab, nacolomab tafenatox, eculizumab, lendalizumab, pexelizumab, pozelimab, ravulizumab, tesidolumab, vilobelimab, abagovomab, igovomab, oregovomab, sofituzumab vedotin, cantuzumab mertansine, cantuzuma bravtansine, girentuximab, altumomab pentetate, arcitumomab, besilesomab, bertilimumab, plozalizumab, mogamulizumab, leronlimab, PRO140, rovelizumab, rovelizumab, talacotuzumab, benralizumab, tavolimab, vonlerolizumab, gavilimomab, ziralimumab, fanolesomab, ipilimumab, ruplizumab, toralizumab, dapirolizumab pegol, toralizumab, dapirolizumab pegol, ruplizumab, blinatumomab, inebilizumab, loncastuximab tesirine, SGN-CD19A, tafasitamab, taplitumomab paptox, XMAB-5574, Budoprutug, Obexelimab, duvortuxizumab, englumafusp alfa, Emfizatamab, zeripatamig, siplizumab, blontuvetmab, FBTA05, ibritumomab tiuxetan, obinutuzumab, ocaratuzumab, ocrelizumab, ofatumumab, rituximab, tositumomab, ublituximab, veltuzumab, divozilimab, eramkafusp alfa, ripertamab, zuberitamab, glofitamab, nofetumomab merpentan, samalizumab, imvotamab, odronextamab, plamotamab, bectumomab, inotuzumab ozogamicin, moxetumomab pasudotox, pinatuzumab vedotin, gomiliximab, lumiliximab, inolimomab, inolimomab, daclizumab, camidanluma btesirine, basiliximab, varlilumab, omburtamab, enoblituzumab, vopratelimab, lulizumabpegol, TGN1412, muromonab-CD3, otelixizumab, teplizumab, visilizumab, epcoritamab, epcoritamab, brentuximab vedotin, iratumumab, azintuxizumab vedotin, gemtuzumab ozogamicin, lintuzumab, vadastuximab talirine, naratuximab emtansine, otlertuzumab, lilotomab satetraxetan, tetulomab, daratumumab, isatuximab, foralumab, mosunetuzumab, mosunetuzumab, cedelizumab, ibalizumab, keliximab, priliximab, tregalizumab, zanolimumab, bleselumab, iscalimab, lucatumumab, ravagalimab, selicrelumab, teneliximab, vanalimab, abciximab, bivatuzumab, iomab-B, telimomab aritox, zolimomab aritox, abituzumab, intetumumab, alemtuzumab, tamtuvetmab, lorvotuzumab mertansine, itolizumab, cusatuzumab, vorsetuzumab mafodotin, milatuzumab, iladatuzumab vedotin, polatuzumab vedotin, galiximab, cibisatamab, zolbetuximab, naxitamab, tisotumab vedotin, olendalizumab, pamrevlumab, lacnotuzumab, cabiralizumab, emactuzumab, axatilimab, gimsilumab, lenzilumab, namilumab, tremelimumab, ulocuplumab, tepoditamab, rovalpituzumab tesirine, tarlatamab, demcizumab, navicixizumab, drozitumab, parsatuzumab, depatuxizumab mafodotin, modotuximab, carotuximab, adecatumumab, adecatumumab, oportuzumab monatox, solitomab, tucotuzumab celmoleukin, edrecolomab, catumaxomab, ifabotuzumab, fibatuzumab, zalutumumab, panitumumab, cetuximab, futuximab, imgatuzumab, laprituximab emtansine, matuzumab, necitumumab, nimotuzumab, tomuzotuximab, amivantamab, amivantamab, epitumomab cituxetan, sontuzumab, duligotuzumab, elgemtumab, lumretuzumab, patritumab, seribantumab, zenocutuzumab, sibrotuzumab, burosumab, aprutumab ixadotin, radretumab, pasotuxizumab, farletuzumab, mirvetuximab soravtansine, vantictumab, TRBS07, 3F8, dinutuximab, dinutuximab beta, ecromeximab, mitumomab, andecaliximab, capromab, codrituzumab, glembatumumab vedotin, talquetamab, talquetamab, trevogrumab, indusatumab vedotin, ficlatuzumab, rilotumumab, zatuximab, pentuzimab, pentuzimab, margetuximab, timigutuzumab, trastuzumab, trastuzumab duocarmazine, trastuzumab emtansine, gancotamab, pertuzumab, ertumaxomab, emibetuzumab, telisotuzumab, telisotuzumab vedotin, derlotuximab biotin, apolizumab, onartuzumab, bersanlimab, enlimomabpegol, rontalizumab, sifalimumab, talizumab, ganitumab, istiratumab, robatumumab, teprotumumab, figitumumab, ganitumab, istiratumab, robatumumab, teprotumumab, cixutumumab, dalotuzumab, xentuzumab, dusigitumab, canakinumab, ustekinumab, ustekinumab, ustekinumab, briakinumab, briakinumab, abrezekimab, lebrikizumab, romilkimab, TNX-650, tralokinumab, anrukinzumab, brodalumab, ixekizumab, netakimab, perakizumab, secukinumab, vunakizumab, afasevikumab, afasevikumab, bimekizumab, bimekizumab, remtolumab, bermckimab, lutikizumab, lutikizumab, gevokizumab, cergutuzumab amunaleukin, fletikumab, fezakinumab, brazikumab, guselkumab, mirikizumab, tildrakizumab, risankizumab, flotetuzumab, nemolizumab, pascolizumab, dupilumab, mepolizumab, reslizumab, clazakizumab, elsilimomab, olokizumab, sarilumab, siltuximab, sirukumab, vobarilizumab, tocilizumab, SA237, satralizumab, enokizumab, prezalizumab, natalizumab, abrilumab, abrilumab, vedolizumab, volociximab, tadocizumab, etaracizumab, etrolizumab, spesolimab, vatelizumab, erlizumab, lirilumab, relatlimab, cBR96-doxorubicinimmunoconjugate, odulimomab, efalizumab, ladiratuzumab vedotin, simtuzumab, samrotamab vedotin, asclizumab, lupartumab amadotin, imalumab, carlumab, imaprelimab, amatuximab, amatuximab, anetumab ravtansine, narnatumab, clivatuzumab tetraxetan, pemtumomab, gatipotuzumab, ensituximab, lemalesomab, sulcsomab, enfortumab vedotin, racotumomab, monalizumab, brontictuzumab, tarextumab, vesencumab, oxelumab, gilvetmab, tislelizumab, dostarlimab, BCD-100, nivolumab, PDR001, pembrolizumab, pidilizumab, retifanlimab, spartalizumab, sintilimab, cemiplimab, olaratumab, tovetumab, rinucumab, atezolizumab, avelumab, durvalumab, lifastuzumab vedotin, bavituximab, acapatamab, capromab, rosopatamab, nezastomig, pasotuxizumab, pelgifatamab, voxalatamab, cofetuzumab pelidotin, denosumab, rosmantuzumab, cirmtuzumab, atinumab, indatuximab ravtansine, elotuzumab, sirtratumab vedotin, sonepcizumab, vandortuzumab vedotin, minretumomab, satumomab pendetide, maslimomab, ontuxizumab, tenatumomab, fresolimumab, metelimumab, lerdelimumab, tezepelumab, etigilimab, tiragotumab, placulumab, prezalumab, infliximab, nerelimomab, ozoralizumab, adalimumab, afelimomab, certolizumab pegol, golimumab, mapatumumab, conatumumab, lexatumumab, tigatuzumab, sacituzumab govitecan, votumumab, pogalizumab, letolizumab, pankomab, anatumomab mafenatox, enavatuzumab, flanvotumab, brolucizumab, ranibizumab, varisacumab, bevacizumab, faricimab, icrucumab, alacizumab pegol, ramucirumab, pritumumab, and onvatilimab.

[6261] In some aspects, the antigen binding polypeptide complexes provided herein comprise a VH1 comprising a VH of an antibody selected from the group consisting of losatuxizumab vedotin, utomilumab, urelumab, oleclumab, naptumomab estafenatox, ascrinvacumab, pintumomab, tacatuzumab tetraxetan, nesvacumab, vanucizumab, timolumab, vapaliximab, vepalimomab, enapotamab vedotin, ianalumab, belimumab, tabalumab, tibulizumab, belantamab mafodotin, teclistamab, teclistamab, detumomab, nacolomab tafenatox, eculizumab, lendalizumab, pexelizumab, pozclimab, ravulizumab, tesidolumab, vilobelimab, abagovomab, igovomab, oregovomab, sofituzumab vedotin, cantuzumab mertansine, cantuzuma bravtansine, girentuximab, altumomab pentetate, arcitumomab, besilesomab, bertilimumab, plozalizumab, mogamulizumab, leronlimab, PRO140, rovelizumab, rovelizumab, talacotuzumab, benralizumab, tavolimab, vonlerolizumab, gavilimomab, ziralimumab, fanolesomab, ipilimumab, ruplizumab, toralizumab, dapirolizumab pegol, toralizumab, dapirolizumab pegol, ruplizumab, blinatumomab, inebilizumab, loncastuximab tesirine, SGN-CD19A, tafasitamab, taplitumomab paptox, XMAB-5574, Budoprutug, Obexelimab, duvortuxizumab, englumafusp alfa, Emfizatamab, zeripatamig, siplizumab, blontuvetmab, FBTA05, ibritumomab tiuxetan, obinutuzumab, ocaratuzumab, ocrelizumab, ofatumumab, rituximab, tositumomab, ublituximab, veltuzumab, divozilimab, eramkafusp alfa, ripertamab, zuberitamab, glofitamab, nofetumomab merpentan, samalizumab, imvotamab, odronextamab, plamotamab, bectumomab, inotuzumab ozogamicin, moxetumomab pasudotox, pinatuzumab vedotin, gomiliximab, lumiliximab, inolimomab, inolimomab, daclizumab, camidanluma btesirine, basiliximab, varlilumab, omburtamab, enoblituzumab, vopratelimab, lulizumabpegol, TGN1412, muromonab-CD3, otelixizumab, teplizumab, visilizumab, epcoritamab, epcoritamab, brentuximab vedotin, iratumumab, azintuxizumab vedotin, gemtuzumab ozogamicin, lintuzumab, vadastuximab talirine, naratuximab emtansine, otlertuzumab, lilotomab satetraxetan, tetulomab, daratumumab, isatuximab, foralumab, mosunetuzumab, mosunetuzumab, cedelizumab, ibalizumab, keliximab, priliximab, tregalizumab, zanolimumab, bleselumab, iscalimab, lucatumumab, ravagalimab, selicrelumab, teneliximab, vanalimab, abciximab, bivatuzumab, iomab-B, telimomab aritox, zolimomab aritox, abituzumab, intetumumab, alemtuzumab, tamtuvetmab, lorvotuzumab mertansine, itolizumab, cusatuzumab, vorsetuzumab mafodotin, milatuzumab, iladatuzumab vedotin, polatuzumab vedotin, galiximab, cibisatamab, zolbetuximab, naxitamab, tisotumab vedotin, olendalizumab, pamrevlumab, lacnotuzumab, cabiralizumab, emactuzumab, axatilimab, gimsilumab, lenzilumab, namilumab, tremelimumab, ulocuplumab, tepoditamab, rovalpituzumab tesirine, tarlatamab, demcizumab, navicixizumab, drozitumab, parsatuzumab, depatuxizumab mafodotin, modotuximab, carotuximab, adecatumumab, adecatumumab, oportuzumab monatox, solitomab, tucotuzumab celmoleukin, edrecolomab, catumaxomab, ifabotuzumab, fibatuzumab, zalutumumab, panitumumab, cetuximab, futuximab, imgatuzumab, laprituximab emtansine, matuzumab, necitumumab, nimotuzumab, tomuzotuximab, amivantamab, amivantamab, epitumomab cituxetan, sontuzumab, duligotuzumab, elgemtumab, lumretuzumab, patritumab, seribantumab, zenocutuzumab, sibrotuzumab, burosumab, aprutumab ixadotin, radretumab, pasotuxizumab, farletuzumab, mirvetuximab soravtansine, vantictumab, TRBS07, 3F8, dinutuximab, dinutuximab beta, ecromeximab, mitumomab, andecaliximab, capromab, codrituzumab, glembatumumab vedotin, talquetamab, talquetamab, trevogrumab, indusatumab vedotin, ficlatuzumab, rilotumumab, zatuximab, pentuzimab, pentuzimab, margetuximab, timigutuzumab, trastuzumab, trastuzumab duocarmazine, trastuzumab emtansine, gancotamab, pertuzumab, ertumaxomab, emibetuzumab, telisotuzumab, telisotuzumab vedotin, derlotuximab biotin, apolizumab, onartuzumab, bersanlimab, enlimomabpegol, rontalizumab, sifalimumab, talizumab, ganitumab, istiratumab, robatumumab, teprotumumab, figitumumab, ganitumab, istiratumab, robatumumab, teprotumumab, cixutumumab, dalotuzumab, xentuzumab, dusigitumab, canakinumab, ustekinumab, ustekinumab, ustekinumab, briakinumab, briakinumab, abrezekimab, lebrikizumab, romilkimab, TNX-650, tralokinumab, anrukinzumab, brodalumab, ixekizumab, netakimab, perakizumab, secukinumab, vunakizumab, afasevikumab, afasevikumab, bimekizumab, bimekizumab, remtolumab, bermckimab, lutikizumab, lutikizumab, gevokizumab, cergutuzumab amunaleukin, fletikumab, fezakinumab, brazikumab, guselkumab, mirikizumab, tildrakizumab, risankizumab, flotetuzumab, nemolizumab, pascolizumab, dupilumab, mepolizumab, reslizumab, clazakizumab, elsilimomab, olokizumab, sarilumab, siltuximab, sirukumab, vobarilizumab, tocilizumab, SA237, satralizumab, enokizumab, prezalizumab, natalizumab, abrilumab, abrilumab, vedolizumab, volociximab, tadocizumab, etaracizumab, etrolizumab, spesolimab, vatelizumab, erlizumab, lirilumab, relatlimab, cBR96-doxorubicinimmunoconjugate, odulimomab, efalizumab, ladiratuzumab vedotin, simtuzumab, samrotamab vedotin, asclizumab, lupartumab amadotin, imalumab, carlumab, imaprelimab, amatuximab, amatuximab, anetumab ravtansine, narnatumab, clivatuzumab tetraxetan, pemtumomab, gatipotuzumab, ensituximab, lemalesomab, sulesomab, enfortumab vedotin, racotumomab, monalizumab, brontictuzumab, tarextumab, vesencumab, oxelumab, gilvetmab, tislelizumab, dostarlimab, BCD-100, nivolumab, PDR001, pembrolizumab, pidilizumab, retifanlimab, spartalizumab, sintilimab, cemiplimab, olaratumab, tovetumab, rinucumab, atezolizumab, avelumab, durvalumab, lifastuzumab vedotin, bavituximab, acapatamab, capromab, rosopatamab, nezastomig, pasotuxizumab, pelgifatamab, voxalatamab, cofetuzumab pelidotin, denosumab, rosmantuzumab, cirmtuzumab, atinumab, indatuximab ravtansine, elotuzumab, sirtratumab vedotin, sonepcizumab, vandortuzumab vedotin, minretumomab, satumomab pendetide, maslimomab, ontuxizumab, tenatumomab, fresolimumab, metelimumab, lerdelimumab, tezepelumab, etigilimab, tiragotumab, placulumab, prezalumab, infliximab, nerelimomab, ozoralizumab, adalimumab, afelimomab, certolizumab pegol, golimumab, mapatumumab, conatumumab, lexatumumab, tigatuzumab, sacituzumab govitecan, votumumab, pogalizumab, letolizumab, pankomab, anatumomab mafenatox, enavatuzumab, flanvotumab, brolucizumab, ranibizumab, varisacumab, bevacizumab, faricimab, icrucumab, alacizumab pegol, ramucirumab, pritumumab, and onvatilimab.

[6262] In some aspects, the antigen binding polypeptide complexes provided herein comprise a VH2 comprising a VH of an antibody selected from the group consisting of losatuxizumab vedotin, utomilumab, urelumab, oleclumab, naptumomab estafenatox, ascrinvacumab, pintumomab, tacatuzumab tetraxetan, nesvacumab, vanucizumab, timolumab, vapaliximab, vepalimomab, enapotamab vedotin, ianalumab, bclimumab, tabalumab, tibulizumab, belantamab mafodotin, teclistamab, teclistamab, detumomab, nacolomab tafenatox, eculizumab, lendalizumab, pexelizumab, pozclimab, ravulizumab, tesidolumab, vilobelimab, abagovomab, igovomab, oregovomab, sofituzumab vedotin, cantuzumab mertansine, cantuzuma bravtansine, girentuximab, altumomab pentetate, arcitumomab, besilesomab, bertilimumab, plozalizumab, mogamulizumab, leronlimab, PRO140, rovelizumab, rovelizumab, talacotuzumab, benralizumab, tavolimab, vonlerolizumab, gavilimomab, ziralimumab, fanolesomab, ipilimumab, ruplizumab, toralizumab, dapirolizumab pegol, toralizumab, dapirolizumab pegol, ruplizumab, blinatumomab, inebilizumab, loncastuximab tesirine, SGN-CD19A, tafasitamab, taplitumomab paptox, XMAB-5574, Budoprutug, Obexelimab, duvortuxizumab, englumafusp alfa, Emfizatamab, zeripatamig, siplizumab, blontuvetmab, FBTA05, ibritumomab tiuxetan, obinutuzumab, ocaratuzumab, ocrelizumab, ofatumumab, rituximab, tositumomab, ublituximab, veltuzumab, divozilimab, eramkafusp alfa, ripertamab, zubcritamab, glofitamab, nofetumomab merpentan, samalizumab, imvotamab, odronextamab, plamotamab, bectumomab, inotuzumab ozogamicin, moxetumomab pasudotox, pinatuzumab vedotin, gomiliximab, lumiliximab, inolimomab, inolimomab, daclizumab, camidanluma btesirine, basiliximab, varlilumab, omburtamab, enoblituzumab, vopratelimab, lulizumabpegol, TGN1412, muromonab-CD3, otelixizumab, teplizumab, visilizumab, epcoritamab, epcoritamab, brentuximab vedotin, iratumumab, azintuxizumab vedotin, gemtuzumab ozogamicin, lintuzumab, vadastuximab talirine, naratuximab emtansine, otlertuzumab, lilotomab satetraxetan, tetulomab, daratumumab, isatuximab, foralumab, mosunetuzumab, mosunetuzumab, cedelizumab, ibalizumab, keliximab, priliximab, tregalizumab, zanolimumab, bleselumab, iscalimab, lucatumumab, ravagalimab, selicrelumab, teneliximab, vanalimab, abciximab, bivatuzumab, iomab-B, telimomab aritox, zolimomab aritox, abituzumab, intetumumab, alemtuzumab, tamtuvetmab, lorvotuzumab mertansine, itolizumab, cusatuzumab, vorsetuzumab mafodotin, milatuzumab, iladatuzumab vedotin, polatuzumab vedotin, galiximab, cibisatamab, zolbetuximab, naxitamab, tisotumab vedotin, olendalizumab, pamrevlumab, lacnotuzumab, cabiralizumab, emactuzumab, axatilimab, gimsilumab, lenzilumab, namilumab, tremelimumab, ulocuplumab, tepoditamab, rovalpituzumab tesirine, tarlatamab, demcizumab, navicixizumab, drozitumab, parsatuzumab, depatuxizumab mafodotin, modotuximab, carotuximab, adecatumumab, adecatumumab, oportuzumab monatox, solitomab, tucotuzumab celmoleukin, edrecolomab, catumaxomab, ifabotuzumab, fibatuzumab, zalutumumab, panitumumab, cetuximab, futuximab, imgatuzumab, laprituximab emtansine, matuzumab, necitumumab, nimotuzumab, tomuzotuximab, amivantamab, amivantamab, epitumomab cituxetan, sontuzumab, duligotuzumab, elgemtumab, lumretuzumab, patritumab, seribantumab, zenocutuzumab, sibrotuzumab, burosumab, aprutumab ixadotin, radretumab, pasotuxizumab, farletuzumab, mirvetuximab soravtansine, vantictumab, TRBS07, 3F8, dinutuximab, dinutuximab beta, ecromeximab, mitumomab, andecaliximab, capromab, codrituzumab, glembatumumab vedotin, talquetamab, talquetamab, trevogrumab, indusatumab vedotin, ficlatuzumab, rilotumumab, zatuximab, pentuzimab, pentuzimab, margetuximab, timigutuzumab, trastuzumab, trastuzumab duocarmazine, trastuzumab emtansine, gancotamab, pertuzumab, ertumaxomab, emibetuzumab, telisotuzumab, telisotuzumab vedotin, derlotuximab biotin, apolizumab, onartuzumab, bersanlimab, enlimomabpegol, rontalizumab, sifalimumab, talizumab, ganitumab, istiratumab, robatumumab, teprotumumab, figitumumab, ganitumab, istiratumab, robatumumab, teprotumumab, cixutumumab, dalotuzumab, xentuzumab, dusigitumab, canakinumab, ustekinumab, ustekinumab, ustekinumab, briakinumab, briakinumab, abrezekimab, lebrikizumab, romilkimab, TNX-650, tralokinumab, anrukinzumab, brodalumab, ixekizumab, netakimab, perakizumab, secukinumab, vunakizumab, afasevikumab, afasevikumab, bimekizumab, bimekizumab, remtolumab, bermekimab, lutikizumab, lutikizumab, gevokizumab, cergutuzumab amunaleukin, fletikumab, fezakinumab, brazikumab, guselkumab, mirikizumab, tildrakizumab, risankizumab, flotetuzumab, nemolizumab, pascolizumab, dupilumab, mepolizumab, reslizumab, clazakizumab, elsilimomab, olokizumab, sarilumab, siltuximab, sirukumab, vobarilizumab, tocilizumab, SA237, satralizumab, enokizumab, prezalizumab, natalizumab, abrilumab, abrilumab, vedolizumab, volociximab, tadocizumab, etaracizumab, etrolizumab, spesolimab, vatelizumab, erlizumab, lirilumab, relatlimab, cBR96-doxorubicinimmunoconjugate, odulimomab, efalizumab, ladiratuzumab vedotin, simtuzumab, samrotamab vedotin, aselizumab, lupartumab amadotin, imalumab, carlumab, imaprelimab, amatuximab, amatuximab, anetumab ravtansine, narnatumab, clivatuzumab tetraxetan, pemtumomab, gatipotuzumab, ensituximab, lemalesomab, sulesomab, enfortumab vedotin, racotumomab, monalizumab, brontictuzumab, tarextumab, vesencumab, oxelumab, gilvetmab, tislelizumab, dostarlimab, BCD-100, nivolumab, PDR001, pembrolizumab, pidilizumab, retifanlimab, spartalizumab, sintilimab, cemiplimab, olaratumab, tovetumab, rinucumab, atezolizumab, avelumab, durvalumab, lifastuzumab vedotin, bavituximab, acapatamab, capromab, rosopatamab, nezastomig, pasotuxizumab, pelgifatamab, voxalatamab, cofetuzumab pelidotin, denosumab, rosmantuzumab, cirmtuzumab, atinumab, indatuximab ravtansine, elotuzumab, sirtratumab vedotin, sonepcizumab, vandortuzumab vedotin, minretumomab, satumomab pendetide, maslimomab, ontuxizumab, tenatumomab, fresolimumab, metelimumab, lerdelimumab, tezepelumab, etigilimab, tiragotumab, placulumab, prezalumab, infliximab, nerelimomab, ozoralizumab, adalimumab, afelimomab, certolizumab pegol, golimumab, mapatumumab, conatumumab, lexatumumab, tigatuzumab, sacituzumab govitecan, votumumab, pogalizumab, letolizumab, pankomab, anatumomab mafenatox, enavatuzumab, flanvotumab, brolucizumab, ranibizumab, varisacumab, bevacizumab, faricimab, icrucumab, alacizumab pegol, ramucirumab, pritumumab, and onvatilimab.

[6263] In some aspects, the antigen binding polypeptide complexes provided herein comprise a VH3 comprising a VH of an antibody selected from the group consisting of losatuxizumab vedotin, utomilumab, urelumab, oleclumab, naptumomab estafenatox, ascrinvacumab, pintumomab, tacatuzumab tetraxetan, nesvacumab, vanucizumab, timolumab, vapaliximab, vepalimomab, enapotamab vedotin, ianalumab, belimumab, tabalumab, tibulizumab, belantamab mafodotin, teclistamab, teclistamab, detumomab, nacolomab tafenatox, eculizumab, lendalizumab, pexelizumab, pozelimab, ravulizumab, tesidolumab, vilobelimab, abagovomab, igovomab, oregovomab, sofituzumab vedotin, cantuzumab mertansine, cantuzuma bravtansine, girentuximab, altumomab pentetate, arcitumomab, besilesomab, bertilimumab, plozalizumab, mogamulizumab, leronlimab, PRO140, rovelizumab, rovelizumab, talacotuzumab, benralizumab, tavolimab, vonlerolizumab, gavilimomab, ziralimumab, fanolesomab, ipilimumab, ruplizumab, toralizumab, dapirolizumab pegol, toralizumab, dapirolizumab pegol, ruplizumab, blinatumomab, inebilizumab, loncastuximab tesirine, SGN-CD19A, tafasitamab, taplitumomab paptox, XMAB-5574, Budoprutug, Obexelimab, duvortuxizumab, englumafusp alfa, Emfizatamab, zeripatamig, siplizumab, blontuvetmab, FBTA05, ibritumomab tiuxetan, obinutuzumab, ocaratuzumab, ocrelizumab, ofatumumab, rituximab, tositumomab, ublituximab, veltuzumab, divozilimab, eramkafusp alfa, ripertamab, zuberitamab, glofitamab, nofetumomab merpentan, samalizumab, imvotamab, odronextamab, plamotamab, bectumomab, inotuzumab ozogamicin, moxetumomab pasudotox, pinatuzumab vedotin, gomiliximab, lumiliximab, inolimomab, inolimomab, daclizumab, camidanluma btesirine, basiliximab, varlilumab, omburtamab, enoblituzumab, vopratelimab, lulizumabpegol, TGN1412, muromonab-CD3, otelixizumab, teplizumab, visilizumab, epcoritamab, epcoritamab, brentuximab vedotin, iratumumab, azintuxizumab vedotin, gemtuzumab ozogamicin, lintuzumab, vadastuximab talirine, naratuximab emtansine, otlertuzumab, lilotomab satetraxetan, tetulomab, daratumumab, isatuximab, foralumab, mosunctuzumab, mosunetuzumab, cedelizumab, ibalizumab, keliximab, priliximab, tregalizumab, zanolimumab, bleselumab, iscalimab, lucatumumab, ravagalimab, selicrelumab, teneliximab, vanalimab, abciximab, bivatuzumab, iomab-B, telimomab aritox, zolimomab aritox, abituzumab, intetumumab, alemtuzumab, tamtuvetmab, lorvotuzumab mertansine, itolizumab, cusatuzumab, vorsetuzumab mafodotin, milatuzumab, iladatuzumab vedotin, polatuzumab vedotin, galiximab, cibisatamab, zolbetuximab, naxitamab, tisotumab vedotin, olendalizumab, pamrevlumab, lacnotuzumab, cabiralizumab, emactuzumab, axatilimab, gimsilumab, lenzilumab, namilumab, tremelimumab, ulocuplumab, tepoditamab, rovalpituzumab tesirine, tarlatamab, demcizumab, navicixizumab, drozitumab, parsatuzumab, depatuxizumab mafodotin, modotuximab, carotuximab, adecatumumab, adecatumumab, oportuzumab monatox, solitomab, tucotuzumab celmoleukin, edrecolomab, catumaxomab, ifabotuzumab, fibatuzumab, zalutumumab, panitumumab, cetuximab, futuximab, imgatuzumab, laprituximab emtansine, matuzumab, necitumumab, nimotuzumab, tomuzotuximab, amivantamab, amivantamab, epitumomab cituxetan, sontuzumab, duligotuzumab, elgemtumab, lumretuzumab, patritumab, scribantumab, zenocutuzumab, sibrotuzumab, burosumab, aprutumab ixadotin, radretumab, pasotuxizumab, farletuzumab, mirvetuximab soravtansine, vantictumab, TRBS07, 3F8, dinutuximab, dinutuximab beta, ecromeximab, mitumomab, andecaliximab, capromab, codrituzumab, glembatumumab vedotin, talquetamab, talquetamab, trevogrumab, indusatumab vedotin, ficlatuzumab, rilotumumab, zatuximab, pentuzimab, pentuzimab, margetuximab, timigutuzumab, trastuzumab, trastuzumab duocarmazine, trastuzumab emtansine, gancotamab, pertuzumab, ertumaxomab, emibetuzumab, telisotuzumab, telisotuzumab vedotin, derlotuximab biotin, apolizumab, onartuzumab, bersanlimab, enlimomabpegol, rontalizumab, sifalimumab, talizumab, ganitumab, istiratumab, robatumumab, teprotumumab, figitumumab, ganitumab, istiratumab, robatumumab, teprotumumab, cixutumumab, dalotuzumab, xentuzumab, dusigitumab, canakinumab, ustekinumab, ustekinumab, ustekinumab, briakinumab, briakinumab, abrezekimab, lebrikizumab, romilkimab, TNX-650, tralokinumab, anrukinzumab, brodalumab, ixekizumab, netakimab, perakizumab, secukinumab, vunakizumab, afasevikumab, afasevikumab, bimekizumab, bimekizumab, remtolumab, bermekimab, lutikizumab, lutikizumab, gevokizumab, cergutuzumab amunaleukin, fletikumab, fezakinumab, brazikumab, guselkumab, mirikizumab, tildrakizumab, risankizumab, flotetuzumab, nemolizumab, pascolizumab, dupilumab, mepolizumab, reslizumab, clazakizumab, elsilimomab, olokizumab, sarilumab, siltuximab, sirukumab, vobarilizumab, tocilizumab, SA237, satralizumab, enokizumab, prezalizumab, natalizumab, abrilumab, abrilumab, vedolizumab, volociximab, tadocizumab, etaracizumab, etrolizumab, spesolimab, vatelizumab, erlizumab, lirilumab, relatlimab, cBR96-doxorubicinimmunoconjugate, odulimomab, efalizumab, ladiratuzumab vedotin, simtuzumab, samrotamab vedotin, aselizumab, lupartumab amadotin, imalumab, carlumab, imaprelimab, amatuximab, amatuximab, anetumab ravtansine, narnatumab, clivatuzumab tetraxetan, pemtumomab, gatipotuzumab, ensituximab, lemalesomab, sulesomab, enfortumab vedotin, racotumomab, monalizumab, brontictuzumab, tarextumab, vesencumab, oxelumab, gilvetmab, tislelizumab, dostarlimab, BCD-100, nivolumab, PDR001, pembrolizumab, pidilizumab, retifanlimab, spartalizumab, sintilimab, cemiplimab, olaratumab, tovetumab, rinucumab, atezolizumab, avelumab, durvalumab, lifastuzumab vedotin, bavituximab, acapatamab, capromab, rosopatamab, nezastomig, pasotuxizumab, pelgifatamab, voxalatamab, cofetuzumab pelidotin, denosumab, rosmantuzumab, cirmtuzumab, atinumab, indatuximab ravtansine, elotuzumab, sirtratumab vedotin, sonepcizumab, vandortuzumab vedotin, minretumomab, satumomab pendetide, maslimomab, ontuxizumab, tenatumomab, fresolimumab, metelimumab, lerdelimumab, tezepelumab, etigilimab, tiragotumab, placulumab, prezalumab, infliximab, nerelimomab, ozoralizumab, adalimumab, afelimomab, certolizumab pegol, golimumab, mapatumumab, conatumumab, lexatumumab, tigatuzumab, sacituzumab govitecan, votumumab, pogalizumab, letolizumab, pankomab, anatumomab mafenatox, enavatuzumab, flanvotumab, brolucizumab, ranibizumab, varisacumab, bevacizumab, faricimab, icrucumab, alacizumab pegol, ramucirumab, pritumumab, and onvatilimab.

[6264] In some aspects, the antigen binding polypeptide complexes provided herein comprise a VL1 comprising (i) a complementarity determining region (CDR) 1 having an amino acid sequence that is at least 65%, at least 70%, at least 75%, at least 80%, at least 85%, at least 90%, at least 95%, at least 99%, or 100% identical to any one of SEQ ID NOs: 1096, 1103, 1110, 1120, 1127, 1134, 1141, 1148, 1155, 1162, 1169, 1174, 1181, 1188, 1199, 1211, 1221, 1228, 1235, 1247, 1254, 1261, 1266, 1271, 1278, 1285, 1292, 1299, 1306, 1313, 1319, 1326, 1339, 1352, 1359, 1366, 1373, 1382, 1394, 1401, 1408, 1414, 1421, 1428, 1441, 1448, 1455, 1461, 1468, 1475, 1488, 1495, 1508, 1519, 1526, 1531, 1538, 1544, 1556, 1568, 1574, 1581, 1594, 1601, 1608, 1615, 1622, 1629, 1636, 1643, 1650, 1657, 1672, 1679, 1689, 1697, 1708, 1715, 1718, 1723, 1727, 1738, 1743, 1752, 1761, 1763, 1769, 1776, and 1786; (ii) a CDR2 having an amino acid sequence that is at least 65%, at least 70%, at least 75%, at least 80%, at least 85%, at least 90%, at least 95%, at least 99%, or 100% identical to any one of SEQ ID NOs: 1200, 1212, 1680, 1690, 1698, 1709, 1728, 1739, 1744, 1753, 1770, and 1777; or at least 65%, at least 70%, at least 75%, at least 80%, at least 85%, at least 90%, at least 95%, at least 99%, or 100% identical to any one of amino acid sequences AAS, APS, AT, ATS, DAS, DDG, DDS, DT, DTS, DVS, EAS, FTS, GAF, GAN, GAS, GAT, GIS, GKN, GNS, HTS, KVS, LAS, LGS, LVS, NAK, NTN, QMS, RMS, RTS, SAS, TTS, WAS, YAS, YAT, YGS, YRS, and YTS; and (iii) a CDR3 having an amino acid sequence that is at least 65%, at least 70%, at least 75%, at least 80%, at least 85%, at least 90%, at least 95%, at least 99%, or 100% identical to any one of SEQ ID NOs: 1097, 1104, 1111, 1121, 1128, 1135, 1142, 1149, 1156, 1163, 1170, 1175, 1182, 1189, 1195, 1201, 1207, 1213, 1222, 1229, 1236, 2009, 1248, 1255, 1262, 1267, 1272, 1279, 1286, 1293, 1300, 1307, 1320, 1327, 1333, 1340, 1346, 1353, 1360, 1367, 1374, 1383, 1389, 1395, 1402, 1409, 1415, 1422, 1429, 1435, 1442, 1449, 1456, 1462, 1469, 1476, 1482, 1489, 1496, 1502, 1509, 1513, 1520, 1532, 1539, 1545, 1557, 1562, 1569, 1575, 1582, 1588, 1595, 1602, 1609, 1616, 1623, 1630, 1637, 1644, 1651, 1658, 1663, 1673, 1681, 1691, 1699, 1710, 1729, 1735, 1745, 1751, 1754, 1778, 1787, and 1976.

[6265] In some aspects, the antigen binding polypeptide complexes provided herein comprise a VL2 comprising (i) a complementarity determining region (CDR) 1 having an amino acid sequence that is at least 65%, at least 70%, at least 75%, at least 80%, at least 85%, at least 90%, at least 95%, at least 99%, or 100% identical to any one of SEQ ID NOs: 1096, 1103, 1110, 1120, 1127, 1134, 1141, 1148, 1155, 1162, 1169, 1174, 1181, 1188, 1199, 1211, 1221, 1228, 1235, 1247, 1254, 1261, 1266, 1271, 1278, 1285, 1292, 1299, 1306, 1313, 1319, 1326, 1339, 1352, 1359, 1366, 1373, 1382, 1394, 1401, 1408, 1414, 1421, 1428, 1441, 1448, 1455, 1461, 1468, 1475, 1488, 1495, 1508, 1519, 1526, 1531, 1538, 1544, 1556, 1568, 1574, 1581, 1594, 1601, 1608, 1615, 1622, 1629, 1636, 1643, 1650, 1657, 1672, 1679, 1689, 1697, 1708, 1715, 1718, 1723, 1727, 1738, 1743, 1752, 1761, 1763, 1769, 1776, and 1786; (ii) a CDR2 having an amino acid sequence that is at least 65%, at least 70%, at least 75%, at least 80%, at least 85%, at least 90%, at least 95%, at least 99%, or 100% identical to any one of SEQ ID NOs: 1200, 1212, 1680, 1690, 1698, 1709, 1728, 1739, 1744, 1753, 1770, and 1777; or at least 65%, at least 70%, at least 75%, at least 80%, at least 85%, at least 90%, at least 95%, at least 99%, or 100% identical to any one of amino acid sequences AAS, APS, AT, ATS, DAS, DDG, DDS, DT, DTS, DVS, EAS, FTS, GAF, GAN, GAS, GAT, GIS, GKN, GNS, HTS, KVS, LAS, LGS, LVS, NAK, NTN, QMS, RMS, RTS, SAS, TTS, WAS, YAS, YAT, YGS, YRS, and YTS; and (iii) a CDR3 having an amino acid sequence that is at least 65%, at least 70%, at least 75%, at least 80%, at least 85%, at least 90%, at least 95%, at least 99%, or 100% identical to any one of SEQ ID NOs: 1097, 1104, 1111, 1121, 1128, 1135, 1142, 1149, 1156, 1163, 1170, 1175, 1182, 1189, 1195, 1201, 1207, 1213, 1222, 1229, 1236, 2009, 1248, 1255, 1262, 1267, 1272, 1279, 1286, 1293, 1300, 1307, 1320, 1327, 1333, 1340, 1346, 1353, 1360, 1367, 1374, 1383, 1389, 1395, 1402, 1409, 1415, 1422, 1429, 1435, 1442, 1449, 1456, 1462, 1469, 1476, 1482, 1489, 1496, 1502, 1509, 1513, 1520, 1532, 1539, 1545, 1557, 1562, 1569, 1575, 1582, 1588, 1595, 1602, 1609, 1616, 1623, 1630, 1637, 1644, 1651, 1658, 1663, 1673, 1681, 1691, 1699, 1710, 1729, 1735, 1745, 1751, 1754, 1778, 1787, and 1976.

[6266] In some aspects, the antigen binding polypeptide complexes provided herein comprise a VL3 comprising (i) a complementarity determining region (CDR) 1 having an amino acid sequence that is at least 65%, at least 70%, at least 75%, at least 80%, at least 85%, at least 90%, at least 95%, at least 99%, or 100% identical to any one of SEQ ID NOs: 1096, 1103, 1110, 1120, 1127, 1134, 1141, 1148, 1155, 1162, 1169, 1174, 1181, 1188, 1199, 1211, 1221, 1228, 1235, 1247, 1254, 1261, 1266, 1271, 1278, 1285, 1292, 1299, 1306, 1313, 1319, 1326, 1339, 1352, 1359, 1366, 1373, 1382, 1394, 1401, 1408, 1414, 1421, 1428, 1441, 1448, 1455, 1461, 1468, 1475, 1488, 1495, 1508, 1519, 1526, 1531, 1538, 1544, 1556, 1568, 1574, 1581, 1594, 1601, 1608, 1615, 1622, 1629, 1636, 1643, 1650, 1657, 1672, 1679, 1689, 1697, 1708, 1715, 1718, 1723, 1727, 1738, 1743, 1752, 1761, 1763, 1769, 1776, and 1786; (ii) a CDR2 having an amino acid sequence that is at least 65%, at least 70%, at least 75%, at least 80%, at least 85%, at least 90%, at least 95%, at least 99%, or 100% identical to any one of SEQ ID NOs: 1200, 1212, 1680, 1690, 1698, 1709, 1728, 1739, 1744, 1753, 1770, and 1777; or at least 65%, at least 70%, at least 75%, at least 80%, at least 85%, at least 90%, at least 95%, at least 99%, or 100% identical to any one of amino acid sequences AAS, APS, AT, ATS, DAS, DDG, DDS, DT, DTS, DVS, EAS, FTS, GAF, GAN, GAS, GAT, GIS, GKN, GNS, HTS, KVS, LAS, LGS, LVS, NAK, NTN, QMS, RMS, RTS, SAS, TTS, WAS, YAS, YAT, YGS, YRS, and YTS; and (iii) a CDR3 having an amino acid sequence that is at least 65%, at least 70%, at least 75%, at least 80%, at least 85%, at least 90%, at least 95%, at least 99%, or 100% identical to any one of SEQ ID NOs: 1097, 1104, 1111, 1121, 1128, 1135, 1142, 1149, 1156, 1163, 1170, 1175, 1182, 1189, 1195, 1201, 1207, 1213, 1222, 1229, 1236, 2009, 1248, 1255, 1262, 1267, 1272, 1279, 1286, 1293, 1300, 1307, 1320, 1327, 1333, 1340, 1346, 1353, 1360, 1367, 1374, 1383, 1389, 1395, 1402, 1409, 1415, 1422, 1429, 1435, 1442, 1449, 1456, 1462, 1469, 1476, 1482, 1489, 1496, 1502, 1509, 1513, 1520, 1532, 1539, 1545, 1557, 1562, 1569, 1575, 1582, 1588, 1595, 1602, 1609, 1616, 1623, 1630, 1637, 1644, 1651, 1658, 1663, 1673, 1681, 1691, 1699, 1710, 1729, 1735, 1745, 1751, 1754, 1778, 1787, and 1976.

[6267] In some aspects, the antigen binding polypeptide complexes provided herein comprise a VH1 comprising (i) a complementarity determining region (CDR) 1 having an amino acid sequence that is at least 65%, at least 70%, at least 75%, at least 80%, at least 85%, at least 90%, at least 95%, at least 99%, or 100% identical to any one of SEQ ID NOs: 1099, 1106, 1113, 1117, 1123, 1130, 1137, 1144, 1151, 1158, 1165, 1177, 1184, 1191, 1203, 1215, 1224, 1231, 1238, 1243, 1250, 1257, 1264, 1274, 1281, 1288, 1295, 1302, 1309, 1315, 1322, 1329, 1335, 1342, 1348, 1355, 1362, 1369, 1376, 1385, 1397, 1404, 1417, 1424, 1431, 1437, 1444, 1451, 1458, 1464, 1471, 1478, 1484, 1491, 1498, 1504, 1511, 1515, 1522, 1534, 1547, 1552, 1564, 1577, 1584, 1590, 1597, 1604, 1611, 1618, 1625, 1632, 1639, 1646, 1653, 1660, 1665, 1675, 1683, 1693, 1701, 1705, 1716, 1719, 1731, 1736, 1747, 1756, 1772, 1780, and 1789; (ii) a CDR2 having an amino acid sequence that is at least 65%, at least 70%, at least 75%, at least 80%, at least 85%, at least 90%, at least 95%, at least 99%, or 100% identical to any one of SEQ ID NOs: 1100, 1107, 1114, 1118, 1124, 1131, 1138, 1145, 1152, 1159, 1166, 1178, 1185, 1192, 1204, 1216, 1225, 1232, 1239, 1244, 1251, 1258, 1275, 1282, 1289, 1296, 1303, 1310, 1316, 1323, 1330, 1336, 1343, 1349, 1356, 1363, 1370, 1377, 1386, 1391, 1398, 1405, 1411, 1418, 1425, 1432, 1438, 1445, 1452, 1465, 1472, 1479, 1485, 1492, 1499, 1505, 1516, 1523, 1528, 1535, 1541, 1548, 1553, 1559, 1565, 1571, 1578, 1585, 1591, 1598, 1605, 1612, 1619, 1626, 1633, 1640, 1647, 1654, 1666, 1676, 1684, 1687, 1694, 1702, 1706, 1712, 1717, 1720, 1725, 1732, 1737, 1741, 1748, 1757, 1767, 1773, 1781, and 1790; and (iii) a CDR3 having an amino acid sequence that is at least 65%, at least 70%, at least 75%, at least 80%, at least 85%, at least 90%, at least 95%, at least 99%, or 100% identical to any one of SEQ ID NOs: 1101, 1108, 1115, 1125, 1132, 1139, 1146, 1153, 1160, 1167, 1172, 1179, 1186, 1193, 1197, 1205, 1209, 1217, 1226, 1233, 1240, 1245, 1252, 1259, 1269, 1276, 1283, 1290, 1297, 1304, 1311, 1317, 1324, 1331, 1337, 1344, 1350, 1357, 1364, 1371, 1378, 1387, 1392, 1399, 1406, 1412, 1419, 1426, 1433, 1439, 1446, 1453, 1459, 1466, 1473, 1480, 1486, 1493, 1500, 1506, 1517, 1524, 1529, 1536, 1542, 1549, 1554, 1560, 1566, 1572, 1579, 1586, 1592, 1599, 1606, 1613, 1620, 1627, 1634, 1641, 1648, 1655, 1661, 1667, 1670, 1677, 1685, 1688, 1695, 1703, 1707, 1713, 1733, 1749, 1758, 1762, 1774, 1782, 1791, and 1975.

[6268] In some aspects, the antigen binding polypeptide complexes provided herein comprise a VH2 comprising (i) a complementarity determining region (CDR) 1 having an amino acid sequence that is at least 65%, at least 70%, at least 75%, at least 80%, at least 85%, at least 90%, at least 95%, at least 99%, or 100% identical to any one of SEQ ID NOs: 1099, 1106, 1113, 1117, 1123, 1130, 1137, 1144, 1151, 1158, 1165, 1177, 1184, 1191, 1203, 1215, 1224, 1231, 1238, 1243, 1250, 1257, 1264, 1274, 1281, 1288, 1295, 1302, 1309, 1315, 1322, 1329, 1335, 1342, 1348, 1355, 1362, 1369, 1376, 1385, 1397, 1404, 1417, 1424, 1431, 1437, 1444, 1451, 1458, 1464, 1471, 1478, 1484, 1491, 1498, 1504, 1511, 1515, 1522, 1534, 1547, 1552, 1564, 1577, 1584, 1590, 1597, 1604, 1611, 1618, 1625, 1632, 1639, 1646, 1653, 1660, 1665, 1675, 1683, 1693, 1701, 1705, 1716, 1719, 1731, 1736, 1747, 1756, 1772, 1780, and 1789; (ii) a CDR2 having an amino acid sequence that is at least 65%, at least 70%, at least 75%, at least 80%, at least 85%, at least 90%, at least 95%, at least 99%, or 100% identical to any one of SEQ ID NOs: 1100, 1107, 1114, 1118, 1124, 1131, 1138, 1145, 1152, 1159, 1166, 1178, 1185, 1192, 1204, 1216, 1225, 1232, 1239, 1244, 1251, 1258, 1275, 1282, 1289, 1296, 1303, 1310, 1316, 1323, 1330, 1336, 1343, 1349, 1356, 1363, 1370, 1377, 1386, 1391, 1398, 1405, 1411, 1418, 1425, 1432, 1438, 1445, 1452, 1465, 1472, 1479, 1485, 1492, 1499, 1505, 1516, 1523, 1528, 1535, 1541, 1548, 1553, 1559, 1565, 1571, 1578, 1585, 1591, 1598, 1605, 1612, 1619, 1626, 1633, 1640, 1647, 1654, 1666, 1676, 1684, 1687, 1694, 1702, 1706, 1712, 1717, 1720, 1725, 1732, 1737, 1741, 1748, 1757, 1767, 1773, 1781, and 1790; and (iii) a CDR3 having an amino acid sequence that is at least 65%, at least 70%, at least 75%, at least 80%, at least 85%, at least 90%, at least 95%, at least 99%, or 100% identical to any one of SEQ ID NOs: 1101, 1108, 1115, 1125, 1132, 1139, 1146, 1153, 1160, 1167, 1172, 1179, 1186, 1193, 1197, 1205, 1209, 1217, 1226, 1233, 1240, 1245, 1252, 1259, 1269, 1276, 1283, 1290, 1297, 1304, 1311, 1317, 1324, 1331, 1337, 1344, 1350, 1357, 1364, 1371, 1378, 1387, 1392, 1399, 1406, 1412, 1419, 1426, 1433, 1439, 1446, 1453, 1459, 1466, 1473, 1480, 1486, 1493, 1500, 1506, 1517, 1524, 1529, 1536, 1542, 1549, 1554, 1560, 1566, 1572, 1579, 1586, 1592, 1599, 1606, 1613, 1620, 1627, 1634, 1641, 1648, 1655, 1661, 1667, 1670, 1677, 1685, 1688, 1695, 1703, 1707, 1713, 1733, 1749, 1758, 1762, 1774, 1782, 1791, and 1975.

[6269] In some aspects, the antigen binding polypeptide complexes provided herein comprise a VH3 comprising (i) a complementarity determining region (CDR) 1 having an amino acid sequence that is at least 65%, at least 70%, at least 75%, at least 80%, at least 85%, at least 90%, at least 95%, at least 99%, or 100% identical to any one of SEQ ID NOs: 1099, 1106, 1113, 1117, 1123, 1130, 1137, 1144, 1151, 1158, 1165, 1177, 1184, 1191, 1203, 1215, 1224, 1231, 1238, 1243, 1250, 1257, 1264, 1274, 1281, 1288, 1295, 1302, 1309, 1315, 1322, 1329, 1335, 1342, 1348, 1355, 1362, 1369, 1376, 1385, 1397, 1404, 1417, 1424, 1431, 1437, 1444, 1451, 1458, 1464, 1471, 1478, 1484, 1491, 1498, 1504, 1511, 1515, 1522, 1534, 1547, 1552, 1564, 1577, 1584, 1590, 1597, 1604, 1611, 1618, 1625, 1632, 1639, 1646, 1653, 1660, 1665, 1675, 1683, 1693, 1701, 1705, 1716, 1719, 1731, 1736, 1747, 1756, 1772, 1780, and 1789; (ii) a CDR2 having an amino acid sequence that is at least 65%, at least 70%, at least 75%, at least 80%, at least 85%, at least 90%, at least 95%, at least 99%, or 100% identical to any one of SEQ ID NOs: 1100, 1107, 1114, 1118, 1124, 1131, 1138, 1145, 1152, 1159, 1166, 1178, 1185, 1192, 1204, 1216, 1225, 1232, 1239, 1244, 1251, 1258, 1275, 1282, 1289, 1296, 1303, 1310, 1316, 1323, 1330, 1336, 1343, 1349, 1356, 1363, 1370, 1377, 1386, 1391, 1398, 1405, 1411, 1418, 1425, 1432, 1438, 1445, 1452, 1465, 1472, 1479, 1485, 1492, 1499, 1505, 1516, 1523, 1528, 1535, 1541, 1548, 1553, 1559, 1565, 1571, 1578, 1585, 1591, 1598, 1605, 1612, 1619, 1626, 1633, 1640, 1647, 1654, 1666, 1676, 1684, 1687, 1694, 1702, 1706, 1712, 1717, 1720, 1725, 1732, 1737, 1741, 1748, 1757, 1767, 1773, 1781, and 1790; and (iii) a CDR3 having an amino acid sequence that is at least 65%, at least 70%, at least 75%, at least 80%, at least 85%, at least 90%, at least 95%, at least 99%, or 100% identical to any one of SEQ ID NOs: 1101, 1108, 1115, 1125, 1132, 1139, 1146, 1153, 1160, 1167, 1172, 1179, 1186, 1193, 1197, 1205, 1209, 1217, 1226, 1233, 1240, 1245, 1252, 1259, 1269, 1276, 1283, 1290, 1297, 1304, 1311, 1317, 1324, 1331, 1337, 1344, 1350, 1357, 1364, 1371, 1378, 1387, 1392, 1399, 1406, 1412, 1419, 1426, 1433, 1439, 1446, 1453, 1459, 1466, 1473, 1480, 1486, 1493, 1500, 1506, 1517, 1524, 1529, 1536, 1542, 1549, 1554, 1560, 1566, 1572, 1579, 1586, 1592, 1599, 1606, 1613, 1620, 1627, 1634, 1641, 1648, 1655, 1661, 1667, 1670, 1677, 1685, 1688, 1695, 1703, 1707, 1713, 1733, 1749, 1758, 1762, 1774, 1782, 1791, and 1975.

[6270] In some aspects, the antigen binding polypeptide complexes provided herein comprise a VL1 comprising an amino acid sequence that is at least 65%, at least 70%, at least 75%, at least 80%, at least 85%, at least 90%, at least 95%, at least 99%, or 100% identical to any one of SEQ ID NOs: 1098, 1105, 1112, 1122, 1129, 1136, 1143, 1150, 1157, 1164, 1171, 1176, 1183, 1190, 1196, 1202, 1208, 1214, 1219, 1223, 1230, 1237, 1242, 1249, 1256, 1263, 1268, 1273, 1280, 1287, 1294, 1301, 1308, 1314, 1321, 1328, 1334, 1341, 1347, 1354, 1361, 1368, 1375, 1380, 1384, 1390, 1396, 1403, 1410, 1416, 1423, 1430, 1436, 1443, 1450, 1457, 1463, 1470, 1477, 1483, 1490, 1497, 1503, 1510, 1514, 1521, 1527, 1533, 1540, 1546, 1551, 1558, 1563, 1570, 1576, 1583, 1589, 1596, 1603, 1610, 1617, 1624, 1631, 1638, 1645, 1652, 1659, 1664, 1669, 1674, 1682, 1692, 1700, 1711, 1721, 1724, 1730, 1740, 1746, 1755, 1764, 1766, 1771, 1779, 1784, and 1788.

[6271] In some aspects, the antigen binding polypeptide complexes provided herein comprise a VL2 comprising an amino acid sequence that is at least 65%, at least 70%, at least 75%, at least 80%, at least 85%, at least 90%, at least 95%, at least 99%, or 100% identical to any one of SEQ ID NOs: 1098, 1105, 1112, 1122, 1129, 1136, 1143, 1150, 1157, 1164, 1171, 1176, 1183, 1190, 1196, 1202, 1208, 1214, 1219, 1223, 1230, 1237, 1242, 1249, 1256, 1263, 1268, 1273, 1280, 1287, 1294, 1301, 1308, 1314, 1321, 1328, 1334, 1341, 1347, 1354, 1361, 1368, 1375, 1380, 1384, 1390, 1396, 1403, 1410, 1416, 1423, 1430, 1436, 1443, 1450, 1457, 1463, 1470, 1477, 1483, 1490, 1497, 1503, 1510, 1514, 1521, 1527, 1533, 1540, 1546, 1551, 1558, 1563, 1570, 1576, 1583, 1589, 1596, 1603, 1610, 1617, 1624, 1631, 1638, 1645, 1652, 1659, 1664, 1669, 1674, 1682, 1692, 1700, 1711, 1721, 1724, 1730, 1740, 1746, 1755, 1764, 1766, 1771, 1779, 1784, and 1788.

[6272] In some aspects, the antigen binding polypeptide complexes provided herein comprise a VL3 comprising an amino acid sequence that is at least 65%, at least 70%, at least 75%, at least 80%, at least 85%, at least 90%, at least 95%, at least 99%, or 100% identical to any one of SEQ ID NOs: 1098, 1105, 1112, 1122, 1129, 1136, 1143, 1150, 1157, 1164, 1171, 1176, 1183, 1190, 1196, 1202, 1208, 1214, 1219, 1223, 1230, 1237, 1242, 1249, 1256, 1263, 1268, 1273, 1280, 1287, 1294, 1301, 1308, 1314, 1321, 1328, 1334, 1341, 1347, 1354, 1361, 1368, 1375, 1380, 1384, 1390, 1396, 1403, 1410, 1416, 1423, 1430, 1436, 1443, 1450, 1457, 1463, 1470, 1477, 1483, 1490, 1497, 1503, 1510, 1514, 1521, 1527, 1533, 1540, 1546, 1551, 1558, 1563, 1570, 1576, 1583, 1589, 1596, 1603, 1610, 1617, 1624, 1631, 1638, 1645, 1652, 1659, 1664, 1669, 1674, 1682, 1692, 1700, 1711, 1721, 1724, 1730, 1740, 1746, 1755, 1764, 1766, 1771, 1779, 1784, and 1788.

[6273] In some aspects, the antigen binding polypeptide complexes provided herein comprise a VH1 comprising an amino acid sequence that is at least 65%, at least 70%, at least 75%, at least 80%, at least 85%, at least 90%, at least 95%, at least 99%, or 100% identical to any one of SEQ ID NOs: 1102, 1109, 1116, 1119, 1126, 1133, 1140, 1147, 1154, 1161, 1168, 1173, 1180, 1187, 1194, 1198, 1206, 1210, 1218, 1220, 1227, 1234, 1241, 1246, 1253, 1260, 1265, 1270, 1277, 1284, 1291, 1298, 1305, 1312, 1318, 1325, 1332, 1338, 1345, 1351, 1358, 1365, 1372, 1379, 1381, 1388, 1393, 1400, 1407, 1413, 1420, 1427, 1434, 1440, 1447, 1454, 1460, 1467, 1474, 1481, 1487, 1494, 1501, 1507, 1512, 1518, 1525, 1530, 1537, 1543, 1550, 1555, 1561, 1567, 1573, 1580, 1587, 1593, 1600, 1607, 1614, 1621, 1628, 1635, 1642, 1649, 1656, 1662, 1668, 1671, 1678, 1686, 1696, 1704, 1714, 1722, 1726, 1734, 1742, 1750, 1759, 1760, 1765, 1768, 1775, 1783, 1785, and 1792.

[6274] In some aspects, the antigen binding polypeptide complexes provided herein comprise a VH2 comprising an amino acid sequence that is at least 65%, at least 70%, at least 75%, at least 80%, at least 85%, at least 90%, at least 95%, at least 99%, or 100% identical to any one of SEQ ID NOs: 1102, 1109, 1116, 1119, 1126, 1133, 1140, 1147, 1154, 1161, 1168, 1173, 1180, 1187, 1194, 1198, 1206, 1210, 1218, 1220, 1227, 1234, 1241, 1246, 1253, 1260, 1265, 1270, 1277, 1284, 1291, 1298, 1305, 1312, 1318, 1325, 1332, 1338, 1345, 1351, 1358, 1365, 1372, 1379, 1381, 1388, 1393, 1400, 1407, 1413, 1420, 1427, 1434, 1440, 1447, 1454, 1460, 1467, 1474, 1481, 1487, 1494, 1501, 1507, 1512, 1518, 1525, 1530, 1537, 1543, 1550, 1555, 1561, 1567, 1573, 1580, 1587, 1593, 1600, 1607, 1614, 1621, 1628, 1635, 1642, 1649, 1656, 1662, 1668, 1671, 1678, 1686, 1696, 1704, 1714, 1722, 1726, 1734, 1742, 1750, 1759, 1760, 1765, 1768, 1775, 1783, 1785, and 1792.

[6275] In some aspects, the antigen binding polypeptide complexes provided herein comprise a VH3 comprising an amino acid sequence that is at least 65%, at least 70%, at least 75%, at least 80%, at least 85%, at least 90%, at least 95%, at least 99%, or 100% identical to any one of SEQ ID NOs: 1102, 1109, 1116, 1119, 1126, 1133, 1140, 1147, 1154, 1161, 1168, 1173, 1180, 1187, 1194, 1198, 1206, 1210, 1218, 1220, 1227, 1234, 1241, 1246, 1253, 1260, 1265, 1270, 1277, 1284, 1291, 1298, 1305, 1312, 1318, 1325, 1332, 1338, 1345, 1351, 1358, 1365, 1372, 1379, 1381, 1388, 1393, 1400, 1407, 1413, 1420, 1427, 1434, 1440, 1447, 1454, 1460, 1467, 1474, 1481, 1487, 1494, 1501, 1507, 1512, 1518, 1525, 1530, 1537, 1543, 1550, 1555, 1561, 1567, 1573, 1580, 1587, 1593, 1600, 1607, 1614, 1621, 1628, 1635, 1642, 1649, 1656, 1662, 1668, 1671, 1678, 1686, 1696, 1704, 1714, 1722, 1726, 1734, 1742, 1750, 1759, 1760, 1765, 1768, 1775, 1783, 1785, and 1792.

[6276] In some aspects, the infectious disease antigen that is not a sarbecovirus antigen is:
[6277] (i) a viral antigen elected from the group consisting of an influenza virus (A, B, C) antigen (e.g., influenza virus envelope proteins, for example, influenza virus neuraminidase (NA, N1, N2, N3, N4, N5, N6, N7, N8, N9, N10, N11), influenza virus hemagglutinin (H1, H2, H3, H4, H5, H6, H7, H8, H9, H10, H11, H12, H13, H14, H15, H16, H17, H18) (e.g., H1N1, H3N2, H5N1, H7N9, H9N2), Yamagata virus antigen, Victoria virus antigen, influenza virus structural proteins (e.g., M1, M2, capsid protein), influenza virus functional proteins (e.g., ribonucleoprotein (NP), primary interferon antagonist (NS1), nuclear export protein (NEP)) influenza virus accessory proteins (e.g., PB2, PB1, or PA), for example, anti-HA, anti-NA, anti-H1, anti-H3, anti-H5, anti-H7, anti-H9, anti-N1, anti-N2, anti-N9, anti-H1N1, anti-H3N2, anti-H5N1, anti-H7N9, anti-H9N2, anti-A protein, anti-B protein, anti-stem, anti-M1, anti-M2, anti-capsid, anti-NP, anti-NS1, anti-NEP, anti-PB1, anti-PB2, and anti-PA); a swine influenza virus antigen (e.g., swine flu hemagglutinin, swine flu neuraminidase); a classical swine fever (CSF) (hog colera) virus antigen; an equine influenza virus antigen (e.g., equine influenza virus typeA/Miami 63 neuraminidase, equine influenza virus type A/Kentucky 81 neuraminidase, equine influenza virus type A/Alaska 91 neuraminidase); parainfluenza viruses (e.g., bovine parainfluenza virus, bovine parainfluenza virus type 3 fusion protein, bovine parainfluenza virus type 3 hemagglutinin neuraminidase); a (human) respiratory syncytial virus (RSV)-viral antigen (e.g., RSV F glycoprotein, RSV G glycoprotein, F protein of respiratory syncytial virus, RSV fusion glycoprotein); a herpes simplex virus (HSV) antigen (e.g., herpes simplex virus glycoproteins gB, gC, gD, and gE, herpes simplex virus type 2 glycoprotein gB); a Dengue virus antigen (e.g., core protein, matrix protein, glycoprotein E of Dengue virus, or other protein of Dengue virus); a measles virus antigen (e.g., hemagglutinin); a poliovirus 1 antigen (e.g., poliovirus 1 proteins (VP1)), a HIV-1 antigen and HIV-2 antigen (e.g., HIV envelope proteins (e.g., envelope glycoproteins of HIV 1, HIV envelope glycoprotein (Env), HIV envelope glycoprotein gp160, HIV envelope surface glycoprotein gp120, HIV transmembrane envelope protein gp41), HIV structural proteins (e.g., p17, p24, p7, p55), HIV functional proteins (e.g., p66, HIV-1 protease (PR), p31), HIV accessory proteins (e.g., Nef, Tat, Rev, Vif, Vpr, Vpu)); a hepatitis virus (HAV, HBV, HCV, HDV, HEV) antigen (e.g., hepatitis B virus antigen (e.g., surface antigen, core protein), hepatitis C virus antigen (e.g., glycoprotein E1E2)); a rabies virus (Rabies lyssavirus) antigen (e.g., rabies virus glycoprotein, e.g., G glycoprotein); a pseudorabies virus antigen (e.g., pseudorabies virus g50 (gpD), pseudorabies virus II (gpB), pseudorabies virus III (gpC), pseudorabies virus glycoprotein H, pseudorabies virus glycoprotein E); a papillomavirus (HPV) antigen; an Epstein-Barr virus (EBV) (Gamma herpes virus 4) antigen; a Herpes simplex virus (HSV, HSV-1, HSV-2) antigen (e.g., human herpes virus 8, equine herpes virus antigen (e.g., type 1 glycoprotein B, type 1 glycoprotein D)); a Herpes zoster antigen; a Cytomegalovirus antigen (e.g., cytomegalovirus glycoprotein B); a Zika virus antigen; a Transmissible gastroenteritis virus (TGEV) antigen (e.g., glycoprotein 195, matrix protein); a rotavirus antigen (e.g., swine rotavirus glycoprotein 38); a parvovirus antigen (e.g., swine parvovirus capsid protein); a filoviruses (e.g., Marburg and Ebola) antigen; a bovine viral diarrhea virus antigen (e.g., glycoprotein 55); a Newcastle disease virus antigen (hemagglutinin, neuraminidase); an orthopoxvirus antigen; a coxsackievirus antigen and aphthovirus (foot and mouth disease virus) antigen; a yellow fever virus antigen; a Chikunga virus antigen; a Nipah virus antigen; an African swine fever virus antigen; a rhinotracheitis virus antigen (e.g., infectious bovine rhinotracheitis virus glycoprotein E, glycoprotein G); a laryngotracheitis virus antigen (e.g., infectious laryngotracheitis virus glycoprotein G or glycoprotein I); a La Crosse virus antigen (e.g., La Crosse virus glycoprotein); a neonatal calf diarrhoea virus antigen; a Venezuelan equine encephalomyelitis virus antigen; a punta toro virus antigen; a murine leukemia virus antigen; a mouse mammary tumor virus antigen; a bovine respiratory syncytial virus antigen (e.g., bovine respiratory syncytial virus attachment protein (BRSV G), bovine respiratory syncytial virus fusion protein (BRSV F), bovine respiratory syncytial virus nucleocapsid protein (BRSVN)); a bovine E viral diarrhoea virus antigen (e.g., glycoprotein 48 and glycoprotein 53); a metapneumovirus (HMPV) antigen; and an Ebola virus antigen (e.g., ebolavirus glycoprotein, e.g., Zaire ebolavirus glycoprotein); or
[6278] (ii) a bacterial or parasite antigen selected from the group consisting of a Plasmodium (e.g., Plasmodium falciparum, Plasmodium vivax, Plasmodium malariae, Plasmodium ovale, Plasmodium knowlesi) antigen, a Streptococcus (e.g., Streptococcus pneumoniae, Streptococcus pyogenes, Streptococcus agalactiae, Streptococcus mutans, Streptococcus viridans, Streptococcus anginosus, Streptococcus intermedius, Streptococcus constellatus) antigen (e.g., 24M epitope), a Neisseria gonorrhoeae antigen (e.g., gonococcal pilin), a Corynebacterium antigen (e.g., Corynebacterium diphtheria (diptheria toxin), Corynebacterium ulcerans, Corynebacterium pseudotuberculosis), Mycobacterium tuberculosis antigens, Brachyspira hyodysenteriae (Serpulina hydodysenteriae) antigen (e.g., Serpulina hydodysenteriae protective antigen), a Chlamydia antigen (e.g., Chlamydia trachomatis) (e.g., MOMP and PorB), a Mycoplasma sp. (e.g., Mycoplasma genitalium, Mycoplasma hyopneumoniae, Mycoplasma pneumonia) antigen, a Staphylococcus (e.g., Staphylococcus aureus, coagulase-negative staphylococci (CoNS), Staphylococcus aureus alpha toxin, Staphylococcus aureus bi-component leucocidin) antigen, a Klebsiella sp. antigen, an Escherichia coli antigen (e.g., E. coli shiga toxin type-2, E. coli shiga toxin type-1), a Bacillus sp. (e.g., Bacillus anthracis, e.g., Bacillus anthracis anthrax) antigen, a Pseudomonas aeruginosa antigen (e.g., Pseudomonas aeruginosa type III secretion system), an Enterococcus sp. antigen, an Enterobacter sp. antigen, a Proteus sp. antigen, an Actinobacter sp. antigen, a Mycobacterium avium (Mycobacterium avium complex (MAC)) antigen, a Salmonella bacteria antigen, a Clostridium difficile antigen, a Toxoplasma (e.g., Toxoplasma gondii) antigen, a Histoplasma antigen, a Candida antigen, a Coccidioides antigen, a Cryptococcus antigen, a Cryptosporidium antigen, and a Cystoisospora (e.g., Cystoisospora belli) antigen, and another antigen (e.g., endotoxins, lymphotoxins (e.g., lymphotoxin alpha LTA), phosphatidylserine, Hsp90, CCR5, lipoteichoic acid, clumping factor A).

[6279] In some aspects, the antigen binding polypeptide complexes provided herein comprise a VL1 comprising a light chain complementarity determining region 1 (LCDR1), LCDR2, and/or LCDR3 of an antibody selected from the group consisting of libivirumab, rmab, rivabazumab pegol, setoxaximab, suvizumab, suvratoxumab, sevirumab, pritoxaximab, porgaviximab, REGN-EB3, obiltoxaximab, gedivumab, foravirumab, larcaviximab, motavizumab, palivizumab, rafivirumab, regavirumab, tuvirumab, cosfroviximab, felvizumab, atidortoxumab, edobacomab, nebacumab, pateclizumab, raxibacumab, urtoxazumab, tosatoxumab, berlimatoxumab, CR6261, diridavumab, firivumab, lesofavumab, navivumab, exbivirumab, lenvervimab, bavituximab, bezlotoxumab, efungumab, leronlimab, nirsevimab, pagibaximab, panobacumab, tefibazumab, ansuvimab, atoltivimab, maftivimab, and odesivimab.

[6280] In some aspects, the antigen binding polypeptide complexes provided herein comprise a VL2 comprising a light chain complementarity determining region 1 (LCDR1), LCDR2, and/or LCDR3 of an antibody selected from the group consisting of libivirumab, rmab, rivabazumab pegol, setoxaximab, suvizumab, suvratoxumab, sevirumab, pritoxaximab, porgaviximab, REGN-EB3, obiltoxaximab, gedivumab, foravirumab, larcaviximab, motavizumab, palivizumab, rafivirumab, regavirumab, tuvirumab, cosfroviximab, felvizumab, atidortoxumab, edobacomab, nebacumab, pateclizumab, raxibacumab, urtoxazumab, tosatoxumab, berlimatoxumab, CR6261, diridavumab, firivumab, lesofavumab, navivumab, exbivirumab, lenvervimab, bavituximab, bezlotoxumab, efungumab, leronlimab, nirsevimab, pagibaximab, panobacumab, tefibazumab, ansuvimab, atoltivimab, maftivimab, and odesivimab.

[6281] In some aspects, the antigen binding polypeptide complexes provided herein comprise a VL3 comprising a light chain complementarity determining region 1 (LCDR1), LCDR2, and/or LCDR3 of an antibody selected from the group consisting of libivirumab, rmab, rivabazumab pegol, setoxaximab, suvizumab, suvratoxumab, sevirumab, pritoxaximab, porgaviximab, REGN-EB3, obiltoxaximab, gedivumab, foravirumab, larcaviximab, motavizumab, palivizumab, rafivirumab, regavirumab, tuvirumab, cosfroviximab, felvizumab, atidortoxumab, edobacomab, nebacumab, pateclizumab, raxibacumab, urtoxazumab, tosatoxumab, berlimatoxumab, CR6261, diridavumab, firivumab, lesofavumab, navivumab, exbivirumab, lenvervimab, bavituximab, bezlotoxumab, efungumab, leronlimab, nirsevimab, pagibaximab, panobacumab, tefibazumab, ansuvimab, atoltivimab, maftivimab, and odesivimab.

[6282] In some aspects, the antigen binding polypeptide complexes provided herein comprise a VH1 comprising a heavy chain complementarity determining region 1 (HCDR1), HCDR2, and/or HCDR3 of an antibody selected from the group consisting of libivirumab, rmab, rivabazumab pegol, setoxaximab, suvizumab, suvratoxumab, sevirumab, pritoxaximab, porgaviximab, REGN-EB3, obiltoxaximab, gedivumab, foravirumab, larcaviximab, motavizumab, palivizumab, rafivirumab, regavirumab, tuvirumab, cosfroviximab, felvizumab, atidortoxumab, edobacomab, nebacumab, pateclizumab, raxibacumab, urtoxazumab, tosatoxumab, berlimatoxumab, CR6261, diridavumab, firivumab, lesofavumab, navivumab, exbivirumab, lenvervimab, bavituximab, bezlotoxumab, efungumab, leronlimab, nirsevimab, pagibaximab, panobacumab, tefibazumab, ansuvimab, atoltivimab, maftivimab, and odesivimab.

[6283] In some aspects, the antigen binding polypeptide complexes provided herein comprise a VH2 comprising a heavy chain complementarity determining region 1 (HCDR1), HCDR2, and/or HCDR3 of an antibody selected from the group consisting of libivirumab, rmab, rivabazumab pegol, setoxaximab, suvizumab, suvratoxumab, sevirumab, pritoxaximab, porgaviximab, REGN-EB3, obiltoxaximab, gedivumab, foravirumab, larcaviximab, motavizumab, palivizumab, rafivirumab, regavirumab, tuvirumab, cosfroviximab, felvizumab, atidortoxumab, edobacomab, nebacumab, pateclizumab, raxibacumab, urtoxazumab, tosatoxumab, berlimatoxumab, CR6261, diridavumab, firivumab, lesofavumab, navivumab, exbivirumab, lenvervimab, bavituximab, bezlotoxumab, efungumab, leronlimab, nirsevimab, pagibaximab, panobacumab, tefibazumab, ansuvimab, atoltivimab, maftivimab, and odesivimab.

[6284] In some aspects, the antigen binding polypeptide complexes provided herein comprise a VH3 comprising a heavy chain complementarity determining region 1 (HCDR1), HCDR2, and/or HCDR3 of an antibody selected from the group consisting of libivirumab, rmab, rivabazumab pegol, setoxaximab, suvizumab, suvratoxumab, sevirumab, pritoxaximab, porgaviximab, REGN-EB3, obiltoxaximab, gedivumab, foravirumab, larcaviximab, motavizumab, palivizumab, rafivirumab, regavirumab, tuvirumab, cosfroviximab, felvizumab, atidortoxumab, edobacomab, nebacumab, pateclizumab, raxibacumab, urtoxazumab, tosatoxumab, berlimatoxumab, CR6261, diridavumab, firivumab, lesofavumab, navivumab, exbivirumab, lenvervimab, bavituximab, bezlotoxumab, efungumab, leronlimab, nirsevimab, pagibaximab, panobacumab, tefibazumab, ansuvimab, atoltivimab, maftivimab, and odesivimab.

[6285] In some aspects, the antigen binding polypeptide complexes provided herein comprise a VL1 comprising a VL of an antibody selected from the group consisting of libivirumab, rmab, rivabazumab pegol, setoxaximab, suvizumab, suvratoxumab, sevirumab, pritoxaximab, porgaviximab, REGN-EB3, obiltoxaximab, gedivumab, foravirumab, larcaviximab, motavizumab, palivizumab, rafivirumab, regavirumab, tuvirumab, cosfroviximab, felvizumab, atidortoxumab, edobacomab, nebacumab, pateclizumab, raxibacumab, urtoxazumab, tosatoxumab, berlimatoxumab, CR6261, diridavumab, firivumab, lesofavumab, navivumab, exbivirumab, lenvervimab, bavituximab, bezlotoxumab, efungumab, leronlimab, nirsevimab, pagibaximab, panobacumab, tefibazumab, ansuvimab, atoltivimab, maftivimab, and odesivimab.

[6286] In some aspects, the antigen binding polypeptide complexes provided herein comprise a VL2 comprising a VL of an antibody selected from the group consisting of libivirumab, rmab, rivabazumab pegol, setoxaximab, suvizumab, suvratoxumab, sevirumab, pritoxaximab, porgaviximab, REGN-EB3, obiltoxaximab, gedivumab, foravirumab, larcaviximab, motavizumab, palivizumab, rafivirumab, regavirumab, tuvirumab, cosfroviximab, felvizumab, atidortoxumab, edobacomab, nebacumab, pateclizumab, raxibacumab, urtoxazumab, tosatoxumab, berlimatoxumab, CR6261, diridavumab, firivumab, lesofavumab, navivumab, exbivirumab, lenvervimab, bavituximab, bezlotoxumab, efungumab, leronlimab, nirsevimab, pagibaximab, panobacumab, tefibazumab, ansuvimab, atoltivimab, maftivimab, and odesivimab.

[6287] In some aspects, the antigen binding polypeptide complexes provided herein comprise a VL3 comprising a VL of an antibody selected from the group consisting of libivirumab, rmab, rivabazumab pegol, setoxaximab, suvizumab, suvratoxumab, sevirumab, pritoxaximab, porgaviximab, REGN-EB3, obiltoxaximab, gedivumab, foravirumab, larcaviximab, motavizumab, palivizumab, rafivirumab, regavirumab, tuvirumab, cosfroviximab, felvizumab, atidortoxumab, edobacomab, nebacumab, pateclizumab, raxibacumab, urtoxazumab, tosatoxumab, berlimatoxumab, CR6261, diridavumab, firivumab, lesofavumab, navivumab, exbivirumab, lenvervimab, bavituximab, bezlotoxumab, efungumab, leronlimab, nirsevimab, pagibaximab, panobacumab, tefibazumab, ansuvimab, atoltivimab, maftivimab, and odesivimab.

[6288] In some aspects, the antigen binding polypeptide complexes provided herein comprise a VH1 comprising a VH of an antibody selected from the group consisting of libivirumab, rmab, rivabazumab pegol, setoxaximab, suvizumab, suvratoxumab, sevirumab, pritoxaximab, porgaviximab, REGN-EB3, obiltoxaximab, gedivumab, foravirumab, larcaviximab, motavizumab, palivizumab, rafivirumab, regavirumab, tuvirumab, cosfroviximab, felvizumab, atidortoxumab, edobacomab, nebacumab, pateclizumab, raxibacumab, urtoxazumab, tosatoxumab, berlimatoxumab, CR6261, diridavumab, firivumab, lesofavumab, navivumab, exbivirumab, lenvervimab, bavituximab, bezlotoxumab, efungumab, leronlimab, nirsevimab, pagibaximab, panobacumab, tefibazumab, ansuvimab, atoltivimab, maftivimab, and odesivimab.

[6289] In some aspects, the antigen binding polypeptide complexes provided herein comprise a VH2 comprising a VH of an antibody selected from the group consisting of libivirumab, rmab, rivabazumab pegol, setoxaximab, suvizumab, suvratoxumab, sevirumab, pritoxaximab, porgaviximab, REGN-EB3, obiltoxaximab, gedivumab, foravirumab, larcaviximab, motavizumab, palivizumab, rafivirumab, regavirumab, tuvirumab, cosfroviximab, felvizumab, atidortoxumab, edobacomab, nebacumab, pateclizumab, raxibacumab, urtoxazumab, tosatoxumab, berlimatoxumab, CR6261, diridavumab, firivumab, lesofavumab, navivumab, exbivirumab, lenvervimab, bavituximab, bezlotoxumab, efungumab, leronlimab, nirsevimab, pagibaximab, panobacumab, tefibazumab, ansuvimab, atoltivimab, maftivimab, and odesivimab.

[6290] In some aspects, the antigen binding polypeptide complexes provided herein comprise a VH3 comprising a VH of an antibody selected from the group consisting of libivirumab, rmab, rivabazumab pegol, setoxaximab, suvizumab, suvratoxumab, sevirumab, pritoxaximab, porgaviximab, REGN-EB3, obiltoxaximab, gedivumab, foravirumab, larcaviximab, motavizumab, palivizumab, rafivirumab, regavirumab, tuvirumab, cosfroviximab, felvizumab, atidortoxumab, edobacomab, nebacumab, pateclizumab, raxibacumab, urtoxazumab, tosatoxumab, berlimatoxumab, CR6261, diridavumab, firivumab, lesofavumab, navivumab, exbivirumab, lenvervimab, bavituximab, bezlotoxumab, efungumab, leronlimab, nirsevimab, pagibaximab, panobacumab, tefibazumab, ansuvimab, atoltivimab, maftivimab, and odesivimab.

[6291] In some aspects, the antigen binding polypeptide complexes provided herein comprise a VL1 comprising (i) a complementarity determining region (CDR) 1 having an amino acid sequence that is at least 65%, at least 70%, at least 75%, at least 80%, at least 85%, at least 90%, at least 95%, at least 99%, or 100% identical to any one of SEQ ID NOs: 1428, 1793, 1798, 1810, 1817, 1824, 1977, 1985, 1993 and 2001; (ii) a CDR2 having an amino acid sequence that is at least 65%, at least 70%, at least 75%, at least 80%, at least 85%, at least 90%, at least 95%, at least 99%, or 100% identical to any one of SEQ ID NOs: 1978, 1986, 1994, and 2002; or at least 65%, at least 70%, at least 75%, at least 80%, at least 85%, at least 90%, at least 95%, at least 99%, or 100% identical to any one of amino acid sequences YTS, DTS, GAS, and AAS; and (iii) a CDR3 having an amino acid sequence that is at least 65%, at least 70%, at least 75%, at least 80%, at least 85%, at least 90%, at least 95%, at least 99%, or 100% identical to any one of SEQ ID NOs: 1229, 1799, 1805, 1811, 1818, 1825, 1979, 1987, 1995, and 2003.

[6292] In some aspects, the antigen binding polypeptide complexes provided herein comprise a VL2 comprising (i) a complementarity determining region (CDR) 1 having an amino acid sequence that is at least 65%, at least 70%, at least 75%, at least 80%, at least 85%, at least 90%, at least 95%, at least 99%, or 100% identical to any one of SEQ ID NOs: 1428, 1793, 1798, 1810, 1817, 1824, 1977, 1985, 1993 and 2001; (ii) a CDR2 having an amino acid sequence that is at least 65%, at least 70%, at least 75%, at least 80%, at least 85%, at least 90%, at least 95%, at least 99%, or 100% identical to any one of SEQ ID NOs: 1978, 1986, 1994, and 2002; or at least 65%, at least 70%, at least 75%, at least 80%, at least 85%, at least 90%, at least 95%, at least 99%, or 100% identical to any one of amino acid sequences YTS, DTS, GAS, and AAS; and (iii) a CDR3 having an amino acid sequence that is at least 65%, at least 70%, at least 75%, at least 80%, at least 85%, at least 90%, at least 95%, at least 99%, or 100% identical to any one of SEQ ID NOs: 1229, 1799, 1805, 1811, 1818, 1825, 1979, 1987, 1995, and 2003.

[6293] In some aspects, the antigen binding polypeptide complexes provided herein comprise a VL3 comprising (i) a complementarity determining region (CDR) 1 having an amino acid sequence that is at least 65%, at least 70%, at least 75%, at least 80%, at least 85%, at least 90%, at least 95%, at least 99%, or 100% identical to any one of SEQ ID NOs: 1428, 1793, 1798, 1810, 1817, 1824, 1977, 1985, 1993 and 2001; (ii) a CDR2 having an amino acid sequence that is at least 65%, at least 70%, at least 75%, at least 80%, at least 85%, at least 90%, at least 95%, at least 99%, or 100% identical to any one of SEQ ID NOS: 1978, 1986, 1994, and 2002; or at least 65%, at least 70%, at least 75%, at least 80%, at least 85%, at least 90%, at least 95%, at least 99%, or 100% identical to any one of amino acid sequences YTS, DTS, GAS, and AAS; and (iii) a CDR3 having an amino acid sequence that is at least 65%, at least 70%, at least 75%, at least 80%, at least 85%, at least 90%, at least 95%, at least 99%, or 100% identical to any one of SEQ ID NOs: 1229, 1799, 1805, 1811, 1818, 1825, 1979, 1987, 1995, and 2003.

[6294] In some aspects, the antigen binding polypeptide complexes provided herein comprise a VH1 comprising (i) a complementarity determining region (CDR) 1 having an amino acid sequence that is at least 65%, at least 70%, at least 75%, at least 80%, at least 85%, at least 90%, at least 95%, at least 99%, or 100% identical to any one of SEQ ID NOs: 1577, 1795, 1801, 1813, 1820, 1827, 1981, 1989, 1997, and 2005; (ii) a CDR2 having an amino acid sequence that is at least 65%, at least 70%, at least 75%, at least 80%, at least 85%, at least 90%, at least 95%, at least 99%, or 100% identical to any one of SEQ ID NOs: 1159, 1802, 1807, 1814, 1821, 1828, 1982, 1990, 1998, and 2006; and (iii) a CDR3 having an amino acid sequence that is at least 65%, at least 70%, at least 75%, at least 80%, at least 85%, at least 90%, at least 95%, at least 99%, or 100% identical to any one of SEQ ID NOs: 1796, 1803, 1808, 1815, 1822, 1829, 1983, 1991, 1999, and 2007.

[6295] In some aspects, the antigen binding polypeptide complexes provided herein comprise a VH2 comprising (i) a complementarity determining region (CDR) 1 having an amino acid sequence that is at least 65%, at least 70%, at least 75%, at least 80%, at least 85%, at least 90%, at least 95%, at least 99%, or 100% identical to any one of SEQ ID NOs: 1577, 1795, 1801, 1813, 1820, 1827, 1981, 1989, 1997, and 2005; (ii) a CDR2 having an amino acid sequence that is at least 65%, at least 70%, at least 75%, at least 80%, at least 85%, at least 90%, at least 95%, at least 99%, or 100% identical to any one of SEQ ID NOs: 1159, 1802, 1807, 1814, 1821, 1828, 1982, 1990, 1998, and 2006; and (iii) a CDR3 having an amino acid sequence that is at least 65%, at least 70%, at least 75%, at least 80%, at least 85%, at least 90%, at least 95%, at least 99%, or 100% identical to any one of SEQ ID NOs: 1796, 1803, 1808, 1815, 1822, 1829, 1983, 1991, 1999, and 2007.

[6296] In some aspects, the antigen binding polypeptide complexes provided herein comprise a VH3 comprising (i) a complementarity determining region (CDR) 1 having an amino acid sequence that is at least 65%, at least 70%, at least 75%, at least 80%, at least 85%, at least 90%, at least 95%, at least 99%, or 100% identical to any one of SEQ ID NOs: 1577, 1795, 1801, 1813, 1820, 1827, 1981, 1989, 1997, and 2005; (ii) a CDR2 having an amino acid sequence that is at least 65%, at least 70%, at least 75%, at least 80%, at least 85%, at least 90%, at least 95%, at least 99%, or 100% identical to any one of SEQ ID NOs: 1159, 1802, 1807, 1814, 1821, 1828, 1982, 1990, 1998, and 2006; and (iii) a CDR3 having an amino acid sequence that is at least 65%, at least 70%, at least 75%, at least 80%, at least 85%, at least 90%, at least 95%, at least 99%, or 100% identical to any one of SEQ ID NOs: 1796, 1803, 1808, 1815, 1822, 1829, 1983, 1991, 1999, and 2007.

[6297] In some aspects, the antigen binding polypeptide complexes provided herein comprise a VL1 comprising an amino acid sequence that is at least 65%, at least 70%, at least 75%, at least 80%, at least 85%, at least 90%, at least 95%, at least 99%, or 100% identical to any one of SEQ ID NOs: 1794, 1800, 1806, 1812, 1819, 1826, 1980, 1988, 1996, and 2004.

[6298] In some aspects, the antigen binding polypeptide complexes provided herein comprise a VL2 comprising an amino acid sequence that is at least 65%, at least 70%, at least 75%, at least 80%, at least 85%, at least 90%, at least 95%, at least 99%, or 100% identical to any one of SEQ ID NOs: 1794, 1800, 1806, 1812, 1819, 1826, 1980, 1988, 1996, and 2004.

[6299] In some aspects, the antigen binding polypeptide complexes provided herein comprise a VL3 comprising an amino acid sequence that is at least 65%, at least 70%, at least 75%, at least 80%, at least 85%, at least 90%, at least 95%, at least 99%, or 100% identical to any one of SEQ ID NOs: 1794, 1800, 1806, 1812, 1819, 1826, 1980, 1988, 1996, and 2004.

[6300] In some aspects, the antigen binding polypeptide complexes provided herein comprise a VH1 comprising an amino acid sequence that is at least 65%, at least 70%, at least 75%, at least 80%, at least 85%, at least 90%, at least 95%, at least 99%, or 100% identical to any one of SEQ ID NOs 1797, 1804, 1809, 1816, 1823, 1830, 1984, 1992, 2000, and 2008.

[6301] In some aspects, the antigen binding polypeptide complexes provided herein comprise a VH2 comprising an amino acid sequence that is at least 65%, at least 70%, at least 75%, at least 80%, at least 85%, at least 90%, at least 95%, at least 99%, or 100% identical to any one of SEQ ID NOs 1797, 1804, 1809, 1816, 1823, 1830, 1984, 1992, 2000, and 2008.

[6302] In some aspects, the antigen binding polypeptide complexes provided herein comprise a VH3 comprising an amino acid sequence that is at least 65%, at least 70%, at least 75%, at least 80%, at least 85%, at least 90%, at least 95%, at least 99%, or 100% identical to any one of SEQ ID NOs 1797, 1804, 1809, 1816, 1823, 1830, 1984, 1992, 2000, and 2008.

[6303] In some aspects, the other-pathology antigen is selected from the group consisting of Amyloid beta, β-amyloid, PCSK9, IFN-α/β receptor. Rhesus factor, nerve growth factor (NGF), DPP4, fibrin II beta chain, ACVR2B, serum amyloid A protein SOST, FGF 23, VWF, tissue factor pathway inhibitor (TFPI), 1-40 and 1-42, selectin P, glucagon receptor (GCGR), amyloid P component, GDF-8, CXCL10 IP-10, repulsive guidance molecule A RGMA, IFN-γ, activated F9/F10, calcitonin gene-related peptide (CGRP), angiopoietin 3, IFN receptor, IFN-γ, calcitonin, β-amyloid 1-40 and 1-42, tau protein, dabigatran, cardiac myosin, selectin P, Complement factor D (CFD), kallikrein, GDF-8, IGHE, tissue factor pathway inhibitor (TFPI), GMCSF receptor α-chain, amyloid, IgE Fc region, MASP-2, oxLDL, GMCSF, NOGO-A, Alpha-synuclein, NGF, myelin-associated glycoprotein, RHD (gene) (RHD), sclerostin, FCGRT, sclerostin SOST, mucosal addressin cell adhesion molecule, myostatin, RSVFR, complement component 1s C1s, C5, and IL31.

[6304] In some aspects, the antigen binding polypeptide complexes provided herein comprise a VL1 comprising a light chain complementarity determining region 1 (LCDR1), LCDR2, and/or LCDR3 of an antibody selected from the group consisting of aducanumab, alirocumab, frovocimab, lodelcizumab, bococizumab, evolocumab, ralpancizumab, anifrolumab, atorolimumab, bapineuzumab, bedinvetmab, begelomab, biciromab, bimagrumab, birtamimab, blosozumab, burosumab, caplacizumab, concizumab, crenezumab, crizanlizumab, crotedumab, dezamizumab, domagrozumab, donanemab, eldelumab, elezanumab, emapalumab, emicizumab, eptinezumab, erenumab, evinacumab, faralimomab, fasinumab, fontolizumab, fremanezumab, frunevetmab, fulranumab, galcanezumab, gantenerumab, gosuranemab, idarucizumab, imciromab, inclacumab, lampalizumab, lanadelumab, landogrozumab, lecanemab, ligelizumab, marstacimab, mavrilimumab, morolimumab, NEOD001, omalizumab, oMS721, orticumab, otilimab, ozanezumab, ponezumab, prasinezumab, quilizumab, ranevetmab, refanezumab, roledumab, romosozumab, rozanolixizumab, setrusumab, SHP647, solanezumab, stamulumab, suptavumab, sutimlimab, tanezumab, crovalimab, and lokivetmab.

[6305] In some aspects, the antigen binding polypeptide complexes provided herein comprise a VL2 comprising a light chain complementarity determining region 1 (LCDR1), LCDR2, and/or LCDR3 of an antibody selected from the group consisting of aducanumab, alirocumab, frovocimab, lodelcizumab, bococizumab, evolocumab, ralpancizumab, anifrolumab, atorolimumab, bapineuzumab, bedinvetmab, begelomab, biciromab, bimagrumab, birtamimab, blosozumab, burosumab, caplacizumab, concizumab, crenezumab, crizanlizumab, crotedumab, dezamizumab, domagrozumab, donanemab, eldelumab, elezanumab, emapalumab, emicizumab, eptinezumab, erenumab, evinacumab, faralimomab, fasinumab, fontolizumab, fremanezumab, frunevetmab, fulranumab, galcanezumab, gantenerumab, gosuranemab, idarucizumab, imciromab, inclacumab, lampalizumab, lanadelumab, landogrozumab, lecanemab, ligelizumab, marstacimab, mavrilimumab, morolimumab, NEOD001, omalizumab, oMS721, orticumab, otilimab, ozanezumab, ponezumab, prasinezumab, quilizumab, ranevetmab, refanezumab, roledumab, romosozumab, rozanolixizumab, setrusumab, SHP647, solanezumab, stamulumab, suptavumab, sutimlimab, tanezumab, crovalimab, and lokivetmab.

[6306] In some aspects, the antigen binding polypeptide complexes provided herein comprise a VL3 comprising a light chain complementarity determining region 1 (LCDR1), LCDR2, and/or LCDR3 of an antibody selected from the group consisting of aducanumab, alirocumab, frovocimab, lodelcizumab, bococizumab, evolocumab, ralpancizumab, anifrolumab, atorolimumab, bapineuzumab, bedinvetmab, begelomab, biciromab, bimagrumab, birtamimab, blosozumab, burosumab, caplacizumab, concizumab, crenezumab, crizanlizumab, crotedumab, dezamizumab, domagrozumab, donanemab, eldelumab, clezanumab, emapalumab, emicizumab, eptinezumab, erenumab, evinacumab, faralimomab, fasinumab, fontolizumab, fremanezumab, frunevetmab, fulranumab, galcanczumab, gantenerumab, gosuranemab, idarucizumab, imciromab, inclacumab, lampalizumab, lanadelumab, landogrozumab, lecanemab, ligelizumab, marstacimab, mavrilimumab, morolimumab, NEOD001, omalizumab, oMS721, orticumab, otilimab, ozanezumab, ponezumab, prasinezumab, quilizumab, ranevetmab, refanezumab, roledumab, romosozumab, rozanolixizumab, setrusumab, SHP647, solanezumab, stamulumab, suptavumab, sutimlimab, tanezumab, crovalimab, and lokivetmab.

[6307] In some aspects, the antigen binding polypeptide complexes provided herein comprise a VH1 comprising a heavy chain complementarity determining region 1 (HCDR1), HCDR2, and/or HCDR3 of an antibody selected from the group consisting of aducanumab, alirocumab, frovocimab, lodelcizumab, bococizumab, evolocumab, ralpancizumab, anifrolumab, atorolimumab, bapineuzumab, bedinvetmab, begelomab, biciromab, bimagrumab, birtamimab, blosozumab, burosumab, caplacizumab, concizumab, crenezumab, crizanlizumab, crotedumab, dezamizumab, domagrozumab, donanemab, eldelumab, elezanumab, emapalumab, emicizumab, eptinezumab, erenumab, evinacumab, faralimomab, fasinumab, fontolizumab, fremanezumab, frunevetmab, fulranumab, galcanezumab, gantenerumab, gosuranemab, idarucizumab, imciromab, inclacumab, lampalizumab, lanadelumab, landogrozumab, lecanemab, ligelizumab, marstacimab, mavrilimumab, morolimumab, NEOD001, omalizumab, oMS721, orticumab, otilimab, ozanezumab, ponezumab, prasinezumab, quilizumab, ranevetmab, refanezumab, roledumab, romosozumab, rozanolixizumab, setrusumab, SHP647, solanezumab, stamulumab, suptavumab, sutimlimab, tanezumab, crovalimab, and lokivetmab.

[6308] In some aspects, the antigen binding polypeptide complexes provided herein comprise a VH2 comprising a heavy chain complementarity determining region 1 (HCDR1), HCDR2, and/or HCDR3 of an antibody selected from the group consisting of aducanumab, alirocumab, frovocimab, lodelcizumab, bococizumab, evolocumab, ralpancizumab, anifrolumab, atorolimumab, bapineuzumab, bedinvetmab, begelomab, biciromab, bimagrumab, birtamimab, blosozumab, burosumab, caplacizumab, concizumab, crenezumab, crizanlizumab, crotedumab, dezamizumab, domagrozumab, donanemab, eldelumab, elezanumab, emapalumab, emicizumab, eptinezumab, erenumab, evinacumab, faralimomab, fasinumab, fontolizumab, fremanezumab, frunevetmab, fulranumab, galcanezumab, gantenerumab, gosuranemab, idarucizumab, imciromab, inclacumab, lampalizumab, lanadelumab, landogrozumab, lecanemab, ligelizumab, marstacimab, mavrilimumab, morolimumab, NEOD001, omalizumab, oMS721, orticumab, otilimab, ozanezumab, ponezumab, prasinezumab, quilizumab, ranevetmab, refanezumab, roledumab, romosozumab, rozanolixizumab, setrusumab, SHP647, solanezumab, stamulumab, suptavumab, sutimlimab, tanezumab, crovalimab, and lokivetmab.

[6309] In some aspects, the antigen binding polypeptide complexes provided herein comprise a VH3 comprising a heavy chain complementarity determining region 1 (HCDR1), HCDR2, and/or HCDR3 of an antibody selected from the group consisting of aducanumab, alirocumab, frovocimab, lodelcizumab, bococizumab, evolocumab, ralpancizumab, anifrolumab, atorolimumab, bapineuzumab, bedinvetmab, begelomab, biciromab, bimagrumab, birtamimab, blosozumab, burosumab, caplacizumab, concizumab, crenezumab, crizanlizumab, crotedumab, dezamizumab, domagrozumab, donanemab, eldelumab, cleanumab, emapalumab, emicizumab, eptinezumab, erenumab, evinacumab, faralimomab, fasinumab, fontolizumab, fremanezumab, frunevetmab, fulranumab, galcanezumab, gantenerumab, gosuranemab, idarucizumab, imciromab, inclacumab, lampalizumab, lanadelumab, landogrozumab, lecanemab, ligelizumab, marstacimab, mavrilimumab, morolimumab, NEOD001, omalizumab, oMS721, orticumab, otilimab, ozanezumab, ponezumab, prasinezumab, quilizumab, ranevetmab, refanezumab, roledumab, romosozumab, rozanolixizumab, setrusumab, SHP647, solanezumab, stamulumab, suptavumab, sutimlimab, tanezumab, crovalimab, and lokivetmab.

[6310] In some aspects, the antigen binding polypeptide complexes provided herein comprise a VL1 comprising a VL of an antibody selected from the group consisting of aducanumab, alirocumab, frovocimab, lodelcizumab, bococizumab, evolocumab, ralpancizumab, anifrolumab, atorolimumab, bapineuzumab, bedinvetmab, begelomab, biciromab, bimagrumab, birtamimab, blosozumab, burosumab, caplacizumab, concizumab, crenezumab, crizanlizumab, crotedumab, dezamizumab, domagrozumab, donanemab, eldelumab, elezanumab, emapalumab, emicizumab, eptinezumab, erenumab, evinacumab, faralimomab, fasinumab, fontolizumab, fremanezumab, frunevetmab, fulranumab, galcanezumab, gantenerumab, gosuranemab, idarucizumab, imciromab, inclacumab, lampalizumab, lanadelumab, landogrozumab, lecanemab, ligelizumab, marstacimab, mavrilimumab, morolimumab, NEOD001, omalizumab, oMS721, orticumab, otilimab, ozanezumab, ponezumab, prasinezumab, quilizumab, ranevetmab, refanezumab, roledumab, romosozumab, rozanolixizumab, setrusumab, SHP647, solanezumab, stamulumab, suptavumab, sutimlimab, tanezumab, crovalimab, and lokivetmab.

[6311] In some aspects, the antigen binding polypeptide complexes provided herein comprise a VL2 comprising a VL of an antibody selected from the group consisting of aducanumab, alirocumab, frovocimab, lodelcizumab, bococizumab, evolocumab, ralpancizumab, anifrolumab, atorolimumab, bapineuzumab, bedinvetmab, begelomab, biciromab, bimagrumab, birtamimab, blosozumab, burosumab, caplacizumab, concizumab, crenezumab, crizanlizumab, crotedumab, dezamizumab, domagrozumab, donanemab, eldelumab, elezanumab, emapalumab, emicizumab, eptinezumab, erenumab, evinacumab, faralimomab, fasinumab, fontolizumab, fremanezumab, frunevetmab, fulranumab, galcanezumab, gantenerumab, gosuranemab, idarucizumab, imciromab, inclacumab, lampalizumab, lanadelumab, landogrozumab, lecanemab, ligelizumab, marstacimab, mavrilimumab, morolimumab, NEOD001, omalizumab, oMS721, orticumab, otilimab, ozanezumab, ponezumab, prasinezumab, quilizumab, ranevetmab, refanezumab, roledumab, romosozumab, rozanolixizumab, setrusumab, SHP647, solanezumab, stamulumab, suptavumab, sutimlimab, tanezumab, crovalimab, and lokivetmab.

[6312] In some aspects, the antigen binding polypeptide complexes provided herein comprise a VL3 comprising a VL of an antibody selected from the group consisting of aducanumab, alirocumab, frovocimab, lodelcizumab, bococizumab, evolocumab, ralpancizumab, anifrolumab, atorolimumab, bapincuzumab, bedinvetmab, begelomab, biciromab, bimagrumab, birtamimab, blosozumab, burosumab, caplacizumab, concizumab, crenezumab, crizanlizumab, crotedumab, dezamizumab, domagrozumab, donanemab, eldelumab, elezanumab, emapalumab, emicizumab, eptinezumab, erenumab, evinacumab, faralimomab, fasinumab, fontolizumab, fremanezumab, frunevetmab, fulranumab, galcanezumab, gantenerumab, gosuranemab, idarucizumab, imciromab, inclacumab, lampalizumab, lanadelumab, landogrozumab, lecanemab, ligelizumab, marstacimab, mavrilimumab, morolimumab, NEOD001, omalizumab, oMS721, orticumab, otilimab, ozanezumab, ponezumab, prasinezumab, quilizumab, ranevetmab, refanezumab, roledumab, romosozumab, rozanolixizumab, sctrusumab, SHP647, solanezumab, stamulumab, suptavumab, sutimlimab, tanezumab, crovalimab, and lokivetmab.

[6313] In some aspects, the antigen binding polypeptide complexes provided herein comprise a VH1 comprising a VH of an antibody selected from the group consisting of aducanumab, alirocumab, frovocimab, lodelcizumab, bococizumab, evolocumab, ralpancizumab, anifrolumab, atorolimumab, bapineuzumab, bedinvetmab, begelomab, biciromab, bimagrumab, birtamimab, blosozumab, burosumab, caplacizumab, concizumab, crenezumab, crizanlizumab, crotedumab, dezamizumab, domagrozumab, donanemab, eldelumab, elezanumab, emapalumab, emicizumab, eptinezumab, erenumab, evinacumab, faralimomab, fasinumab, fontolizumab, fremanezumab, frunevetmab, fulranumab, galcanezumab, gantenerumab, gosuranemab, idarucizumab, imciromab, inclacumab, lampalizumab, lanadelumab, landogrozumab, lecanemab, ligelizumab, marstacimab, mavrilimumab, morolimumab, NEOD001, omalizumab, oMS721, orticumab, otilimab, ozanezumab, ponezumab, prasinezumab, quilizumab, ranevetmab, refanezumab, roledumab, romosozumab, rozanolixizumab, sctrusumab, SHP647, solanezumab, stamulumab, suptavumab, sutimlimab, tanezumab, crovalimab, and lokivetmab.

[6314] In some aspects, the antigen binding polypeptide complexes provided herein comprise a VH2 comprising a VH of an antibody selected from the group consisting of aducanumab, alirocumab, frovocimab, lodelcizumab, bococizumab, evolocumab, ralpancizumab, anifrolumab, atorolimumab, bapineuzumab, bedinvetmab, begelomab, biciromab, bimagrumab, birtamimab, blosozumab, burosumab, caplacizumab, concizumab, crenezumab, crizanlizumab, crotedumab, dezamizumab, domagrozumab, donanemab, eldelumab, elezanumab, emapalumab, emicizumab, eptinezumab, erenumab, evinacumab, faralimomab, fasinumab, fontolizumab, fremanezumab, frunevetmab, fulranumab, galcanezumab, gantenerumab, gosuranemab, idarucizumab, imciromab, inclacumab, lampalizumab, lanadelumab, landogrozumab, lecanemab, ligelizumab, marstacimab, mavrilimumab, morolimumab, NEOD001, omalizumab, oMS721, orticumab, otilimab, ozanezumab, ponezumab, prasinezumab, quilizumab, ranevetmab, refanezumab, roledumab, romosozumab, rozanolixizumab, setrusumab, SHP647, solanezumab, stamulumab, suptavumab, sutimlimab, tanezumab, crovalimab, and lokivetmab.

[6315] In some aspects, the antigen binding polypeptide complexes provided herein comprise a VH3 comprising a VH of an antibody selected from the group consisting of aducanumab, alirocumab, frovocimab, lodelcizumab, bococizumab, evolocumab, ralpancizumab, anifrolumab, atorolimumab, bapineuzumab, bedinvetmab, begelomab, biciromab, bimagrumab, birtamimab, blosozumab, burosumab, caplacizumab, concizumab, crenezumab, crizanlizumab, crotedumab, dezamizumab, domagrozumab, donanemab, eldelumab, elezanumab, emapalumab, emicizumab, eptinezumab, erenumab, evinacumab, faralimomab, fasinumab, fontolizumab, fremanezumab, frunevetmab, fulranumab, galcanezumab, gantenerumab, gosuranemab, idarucizumab, imciromab, inclacumab, lampalizumab, lanadelumab, landogrozumab, lecanemab, ligelizumab, marstacimab, mavrilimumab, morolimumab, NEOD001, omalizumab, oMS721, orticumab, otilimab, ozanezumab, ponezumab, prasinezumab, quilizumab, ranevetmab, refanezumab, roledumab, romosozumab, rozanolixizumab, setrusumab, SHP647, solanezumab, stamulumab, suptavumab, sutimlimab, tanezumab, crovalimab, and lokivetmab.

[6316] In some aspects, the antigen binding polypeptide complexes provided herein comprise a VL1 comprising (i) a complementarity determining region (CDR) 1 having an amino acid sequence that is at least 65%, at least 70%, at least 75%, at least 80%, at least 85%, at least 90%, at least 95%, at least 99%, or 100% identical to any one of SEQ ID NOs: 1120, 1228, 1359, 1519, 1831, 1838, 1845, 1852, 1859, 1866, 1872, 1878, 1885, 1891, 1898, 1905, 1911, 1917, 1924, 1931, 1938, 1945, and 1963; (ii) a CDR2 having an amino acid sequence that is at least 65%, at least 70%, at least 75%, at least 80%, at least 85%, at least 90%, at least 95%, at least 99%, or 100% identical to any one of amino acid sequences AAS, AVS, DAS, DNN, EDN, EVS, GAS, GNG, KAS, KVS, LVS, NTD, STS, WAS, and YTS; and (iii) a CDR3 having an amino acid sequence that is at least 65%, at least 70%, at least 75%, at least 80%, at least 85%, at least 90%, at least 95%, at least 99%, or 100% identical to any one of SEQ ID NOs: 1360, 1832, 1839, 1846, 1853, 1860, 1867, 1873, 1879, 1886, 1892, 1899, 1906, 1912, 1918, 1925, 1932, 1939, 1946, 1951, 1957, 1964, and 1970.

[6317] In some aspects, the antigen binding polypeptide complexes provided herein comprise a VL2 comprising (i) a complementarity determining region (CDR) 1 having an amino acid sequence that is at least 65%, at least 70%, at least 75%, at least 80%, at least 85%, at least 90%, at least 95%, at least 99%, or 100% identical to any one of SEQ ID NOs: 1120, 1228, 1359, 1519, 1831, 1838, 1845, 1852, 1859, 1866, 1872, 1878, 1885, 1891, 1898, 1905, 1911, 1917, 1924, 1931, 1938, 1945, and 1963; (ii) a CDR2 having an amino acid sequence that is at least 65%, at least 70%, at least 75%, at least 80%, at least 85%, at least 90%, at least 95%, at least 99%, or 100% identical to any one of amino acid sequences AAS, AVS, DAS, DNN, EDN, EVS, GAS, GNG, KAS, KVS, LVS, NTD, STS, WAS, and YTS; and (iii) a CDR3 having an amino acid sequence that is at least 65%, at least 70%, at least 75%, at least 80%, at least 85%, at least 90%, at least 95%, at least 99%, or 100% identical to any one of SEQ ID NOs: 1360, 1832, 1839, 1846, 1853, 1860, 1867, 1873, 1879, 1886, 1892, 1899, 1906, 1912, 1918, 1925, 1932, 1939, 1946, 1951, 1957, 1964, and 1970.

[6318] In some aspects, the antigen binding polypeptide complexes provided herein comprise a VL3 comprising (i) a complementarity determining region (CDR) 1 having an amino acid sequence that is at least 65%, at least 70%, at least 75%, at least 80%, at least 85%, at least 90%, at least 95%, at least 99%, or 100% identical to any one of SEQ ID NOs: 1120, 1228, 1359, 1519, 1831, 1838, 1845, 1852, 1859, 1866, 1872, 1878, 1885, 1891, 1898, 1905, 1911, 1917, 1924, 1931, 1938, 1945, and 1963; (ii) a CDR2 having an amino acid sequence that is at least 65%, at least 70%, at least 75%, at least 80%, at least 85%, at least 90%, at least 95%, at least 99%, or 100% identical to any one of amino acid sequences AAS, AVS, DAS, DNN, EDN, EVS, GAS, GNG, KAS, KVS, LVS, NTD, STS, WAS, and YTS; and (iii) a CDR3 having an amino acid sequence that is at least 65%, at least 70%, at least 75%, at least 80%, at least 85%, at least 90%, at least 95%, at least 99%, or 100% identical to any one of SEQ ID NOs: 1360, 1832, 1839, 1846, 1853, 1860, 1867, 1873, 1879, 1886, 1892, 1899, 1906, 1912, 1918, 1925, 1932, 1939, 1946, 1951, 1957, 1964, and 1970.

[6319] In some aspects, the antigen binding polypeptide complexes provided herein comprise a VH1 comprising (i) a complementarity determining region (CDR) 1 having an amino acid sequence that is at least 65%, at least 70%, at least 75%, at least 80%, at least 85%, at least 90%, at least 95%, at least 99%, or 100% identical to any one of SEQ ID NOs: 1309, 1362, 1437, 1552, 1618, 1639, 1834, 1841, 1848, 1855, 1862, 1881, 1894, 1901, 1920, 1927, 1934, 1941, 1953, 1959, and 1966; (ii) a CDR2 having an amino acid sequence that is at least 65%, at least 70%, at least 75%, at least 80%, at least 85%, at least 90%, at least 95%, at least 99%, or 100% identical to any one of SEQ ID NOs: 1363, 1835, 1842, 1849, 1856, 1863, 1869, 1875, 1882, 1888, 1895, 1902, 1908, 1914, 1921, 1928, 1935, 1942, 1948, 1954, 1960, 1967, and 1972; and (iii) a CDR3 having an amino acid sequence that is at least 65%, at least 70%, at least 75%, at least 80%, at least 85%, at least 90%, at least 95%, at least 99%, or 100% identical to any one of SEQ ID NOs: 1364, 1836, 1843, 1850, 1857, 1864, 1870, 1876, 1883, 1889, 1896, 1903, 1909, 1915, 1922, 1929, 1936, 1943, 1949, 1955, 1961, 1968, and 1973.

[6320] In some aspects, the antigen binding polypeptide complexes provided herein comprise a VH2 comprising (i) a complementarity determining region (CDR) 1 having an amino acid sequence that is at least 65%, at least 70%, at least 75%, at least 80%, at least 85%, at least 90%, at least 95%, at least 99%, or 100% identical to any one of SEQ ID NOs: 1309, 1362, 1437, 1552, 1618, 1639, 1834, 1841, 1848, 1855, 1862, 1881, 1894, 1901, 1920, 1927, 1934, 1941, 1953, 1959, and 1966; (ii) a CDR2 having an amino acid sequence that is at least 65%, at least 70%, at least 75%, at least 80%, at least 85%, at least 90%, at least 95%, at least 99%, or 100% identical to any one of SEQ ID NOs: 1363, 1835, 1842, 1849, 1856, 1863, 1869, 1875, 1882, 1888, 1895, 1902, 1908, 1914, 1921, 1928, 1935, 1942, 1948, 1954, 1960, 1967, and 1972; and (iii) a CDR3 having an amino acid sequence that is at least 65%, at least 70%, at least 75%, at least 80%, at least 85%, at least 90%, at least 95%, at least 99%, or 100% identical to any one of SEQ ID NOs: 1364, 1836, 1843, 1850, 1857, 1864, 1870, 1876, 1883, 1889, 1896, 1903, 1909, 1915, 1922, 1929, 1936, 1943, 1949, 1955, 1961, 1968, and 1973.

[6321] In some aspects, the antigen binding polypeptide complexes provided herein comprise a VH3 comprising (i) a complementarity determining region (CDR) 1 having an amino acid sequence that is at least 65%, at least 70%, at least 75%, at least 80%, at least 85%, at least 90%, at least 95%, at least 99%, or 100% identical to any one of SEQ ID NOs: 1309, 1362, 1437, 1552, 1618, 1639, 1834, 1841, 1848, 1855, 1862, 1881, 1894, 1901, 1920, 1927, 1934, 1941, 1953, 1959, and 1966; (ii) a CDR2 having an amino acid sequence that is at least 65%, at least 70%, at least 75%, at least 80%, at least 85%, at least 90%, at least 95%, at least 99%, or 100% identical to any one of SEQ ID NOs: 1363, 1835, 1842, 1849, 1856, 1863, 1869, 1875, 1882, 1888, 1895, 1902, 1908, 1914, 1921, 1928, 1935, 1942, 1948, 1954, 1960, 1967, and 1972; and (iii) a CDR3 having an amino acid sequence that is at least 65%, at least 70%, at least 75%, at least 80%, at least 85%, at least 90%, at least 95%, at least 99%, or 100% identical to any one of SEQ ID NOs: 1364, 1836, 1843, 1850, 1857, 1864, 1870, 1876, 1883, 1889, 1896, 1903, 1909, 1915, 1922, 1929, 1936, 1943, 1949, 1955, 1961, 1968, and 1973.

[6322] In some aspects, the antigen binding polypeptide complexes provided herein comprise a VL1 comprising an amino acid sequence that is at least 65%, at least 70%, at least 75%, at least 80%, at least 85%, at least 90%, at least 95%, at least 99%, or 100% identical to any one of SEQ ID NOs: 1361, 1833, 1840, 1847, 1854, 1861, 1868, 1874, 1880, 1887, 1893, 1900, 1907, 1913, 1919, 1926, 1933, 1940, 1947, 1952, 1958, 1965, and 1971.

[6323] In some aspects, the antigen binding polypeptide complexes provided herein comprise a VL2 comprising an amino acid sequence that is at least 65%, at least 70%, at least 75%, at least 80%, at least 85%, at least 90%, at least 95%, at least 99%, or 100% identical to any one of SEQ ID NOs: 1361, 1833, 1840, 1847, 1854, 1861, 1868, 1874, 1880, 1887, 1893, 1900, 1907, 1913, 1919, 1926, 1933, 1940, 1947, 1952, 1958, 1965, and 1971.

[6324] In some aspects, the antigen binding polypeptide complexes provided herein comprise a VL3 comprising an amino acid sequence that is at least 65%, at least 70%, at least 75%, at least 80%, at least 85%, at least 90%, at least 95%, at least 99%, or 100% identical to any one of SEQ ID NOs: 1361, 1833, 1840, 1847, 1854, 1861, 1868, 1874, 1880, 1887, 1893, 1900, 1907, 1913, 1919, 1926, 1933, 1940, 1947, 1952, 1958, 1965, and 1971.

[6325] In some aspects, the antigen binding polypeptide complexes provided herein comprise a VH1 comprising an amino acid sequence that is at least 65%, at least 70%, at least 75%, at least 80%, at least 85%, at least 90%, at least 95%, at least 99%, or 100% identical to any one of SEQ ID NOs: 1365, 1837, 1844, 1851, 1858, 1865, 1871, 1877, 1884, 1890, 1897, 1904, 1910, 1916, 1923, 1930, 1937, 1944, 1950, 1956, 1962, 1969, and 1974.

[6326] In some aspects, the antigen binding polypeptide complexes provided herein comprise a VH2 comprising an amino acid sequence that is at least 65%, at least 70%, at least 75%, at least 80%, at least 85%, at least 90%, at least 95%, at least 99%, or 100% identical to any one of SEQ ID NOs: 1365, 1837, 1844, 1851, 1858, 1865, 1871, 1877, 1884, 1890, 1897, 1904, 1910, 1916, 1923, 1930, 1937, 1944, 1950, 1956, 1962, 1969, and 1974.

[6327] In some aspects, the antigen binding polypeptide complexes provided herein comprise a VH3 comprising an amino acid sequence that is at least 65%, at least 70%, at least 75%, at least 80%, at least 85%, at least 90%, at least 95%, at least 99%, or 100% identical to any one of SEQ ID NOs: 1365, 1837, 1844, 1851, 1858, 1865, 1871, 1877, 1884, 1890, 1897, 1904, 1910, 1916, 1923, 1930, 1937, 1944, 1950, 1956, 1962, 1969, and 1974.

[6328] In some aspects, one or both of the antigen binding polypeptides comprised in the antigen binding polypeptide complexes disclosed herein, comprise one or more CL, as indicated in the formulas representing the antigen binding polypeptide complexes disclosed herein. In some aspects, the CL comprises an amino acid sequence at least 65%, at least 70%, at least 75%, at least 80%, at least 85%, at least 90%, at least 95%, at least 99%, or 100% identical to any one of SEQ ID NOs: 374, 637, or 1092-1095.

[6329] In some aspects, one or both of the antigen binding polypeptides comprised in the antigen binding polypeptide complexes disclosed herein, comprise one or more CH1, as indicated in the formulas representing the antigen binding polypeptide complexes disclosed herein. In some aspects, the CH1 comprises an amino acid sequence at least 65%, at least 70%, at least 75%, at least 80%, at least 85%, at least 90%, at least 95%, at least 99%, or 100% identical to any one of SEQ ID NOs: 375, 634, 1070, 1071, or 1086-1091.

[6330] In some aspects, one or both of the antigen binding polypeptides comprised in the antigen binding polypeptide complexes provided herein further comprise an Fc region. In some aspects, one or both of the antigen binding polypeptides comprised in the antigen binding polypeptide complexes provided herein further comprise an Fc region at the carboxy-terminus. In some aspects, the Fc region comprises an immunoglobulin heavy chain constant region 2 (CH2) and/or an immunoglobulin heavy chain constant region 3 (CH3). In some aspects, the Fc region further comprises an immunoglobulin hinge (i.e., a hinge region). In some aspects, the hinge region is interposed between a CH1 and a CH2 (i.e., a hinge region is localized between the carboxy terminal residue of a CH1 and the N-terminal residue of a CH2). In some aspects, the hinge region comprises an amino acid sequence at least 65%, at least 70%, at least 75%, at least 80%, at least 85%, at least 90%, at least 95%, at least 99%, or 100% identical to any one of SEQ ID NOs: 635, 636, 1072, 1073, or 1074. In some aspects, the Fc region comprises a CH2 and a CH3. In some aspects, the CH2 comprises an amino acid sequence that is at least 65%, at least 70%, at least 75%, at least 80%, at least 85%, at least 90%, at least 95%, at least 99%, or 100% identical to any one of SEQ ID NOs: 1075-1078. In some aspects, the CH3 comprises an amino acid sequence that is at least 65%, at least 70%, at least 75%, at least 80%, at least 85%, at least 90%, at least 95%, at least 99%, or 100% identical to any one of SEQ ID NOs: 1079-1085. In some aspects, the Fc region comprises an amino acid sequence that is at least 65%, at least 70%, at least 75%, at least 80%, at least 85%, at least 90%, at least 95%, at least 99%, or 100% identical to any one of SEQ ID NOs: 376-380.

[6331] In some aspects, the Fc region comprises one or more amino acid substitutions. In some aspects, the one or more amino acid substitutions comprise one or more half-life extension amino acid substitutions. In some aspects, the one or more half-life extension amino acid substitutions comprise one or more of amino acid substitutions M428L, N434A, N434S, L234F, L235E, P331S, M252Y, S254T, or T256E, or equivalent thereof, based on the EU numbering scheme. In some aspects, the one or more half-life extension amino acid substitutions comprise a LA (M428L and N434A, or equivalent thereof, based on the EU numbering scheme) amino acid substitution. In some aspects, the one or more half-life extension amino acid substitutions comprise a LS (M428L and N434S, or equivalent thereof, based on the EU numbering scheme) amino acid substitution. In some aspects, the one or more half-life extension amino acid substitutions comprise L234F and L235E, or equivalent thereof (based on the EU numbering scheme) amino acid substitutions. In some aspects, the one or more half-life extension amino acid substitutions comprise a TM (L234F, L235E, and P331S, or equivalent thereof, based on the EU numbering scheme) amino acid substitution. In some aspects, the one or more half-life extension amino acid substitutions comprise a YTE (M252Y, S254T, and T256E, or equivalent thereof, based on the EU numbering scheme) amino acid substitution.

[6332] In some aspects, the Fc region comprises at least one knob-into-hole modification. In some aspects, the antigen binding polypeptides complexes disclosed herein are IgG1 or IgG4 antibodies or antigen binding fragments thereof. In some aspects, the knob-into-hole modification comprises one or more of knob substitutions of S354C and T366W, or equivalent thereof, and/or one or more of hole substitutions of Y349C, T366S, L368A, Y407V, or equivalent thereof, or a combination thereof, based on the EU numbering scheme. In some aspects, the Fc region comprises a knob-into-hole modification comprising knob substitutions of S354C and T366W, or equivalent thereof, and/or hole substitutions of Y349C, T366S, L368A, and Y407V, or equivalent thereof, and/or a half-life extension amino acid substitution comprising: a LA (M428L and N434A, or equivalent thereof, based on the EU numbering scheme) amino acid substitution, a LS (M428L and N434S, or equivalent thereof, based on the EU numbering scheme) amino acid substitution, L234F and L235E, or equivalent thereof (based on the EU numbering scheme) amino acid substitutions, a TM (L234F, L235E, and P331S, or equivalent thereof, based on the EU numbering scheme) amino acid substitution, a YTE (M252Y, S254T, and T256E, or equivalent thereof, based on the EU numbering scheme) amino acid substitution, or any combination thereof.

[6333] In some aspects, the Fc region comprises knob substitutions of S354C and T366W, or equivalent thereof, and a half-life extension amino acid substitution comprising: a LA (M428L and N434A, or equivalent thereof, based on the EU numbering scheme) amino acid substitution, a LS (M428L and N434S, or equivalent thereof, based on the EU numbering scheme) amino acid substitution, L234F and L235E, or equivalent thereof (based on the EU numbering scheme) amino acid substitutions, a TM (L234F, L235E, and P331S, or equivalent thereof, based on the EU numbering scheme) amino acid substitution, a YTE (M252Y, S254T, and T256E, or equivalent thereof, based on the EU numbering scheme) amino acid substitution, or any combination thereof.

[6334] In some aspects, the Fc region comprises hole substitutions of Y349C, T366S, L368A, and Y407V, or equivalent thereof, and a half-life extension amino acid substitution comprising: a LA (M428L and N434A, or equivalent thereof, based on the EU numbering scheme) amino acid substitution, a LS (M428L and N434S, or equivalent thereof, based on the EU numbering scheme) amino acid substitution. L234F and L235E, or equivalent thereof (based on the EU numbering scheme) amino acid substitutions, a TM (L234F, L235E, and P331S, or equivalent thereof, based on the EU numbering scheme) amino acid substitution, a YTE (M252Y, S254T, and T256E, or equivalent thereof, based on the EU numbering scheme) amino acid substitution, or any combination thereof.

[6335] In some aspects, one or both of the antigen binding polypeptides comprised in the antigen binding polypeptide complexes disclosed herein comprise one or more Fc effector function knockout mutation. In some aspects, one or both of the antigen binding polypeptides comprised in the antigen binding polypeptide complexes disclosed herein are IgG1 or IgG4 antibodies or antigen binding fragments thereof. In some aspects, the Fc effector function knockout mutation is L234A, L235A, P239A, or equivalent thereof, or a combination thereof, based on the EU numbering scheme.

[6336] In some aspects, one or both of the antigen binding polypeptides comprised in the antigen binding polypeptide complexes disclosed herein comprise a mutation at a glycosylation site. In some aspects, the mutation at a glycosylation site is a mutation at an N-glycosylation site. In some aspects, one or both of the antigen binding polypeptides comprised in the antigen binding polypeptide complexes disclosed herein comprise a VH comprising a mutation at a glycosylation site. In some aspects, the mutation at a glycosylation site is a mutation at an N-glycosylation site. In some aspects, the mutation at an N-glycosylation site is at amino acid N62, or equivalent thereof, of the VH region or equivalent thereof. In some aspects, the mutation at an N-glycosylation site at amino acid N62 is N62Q or N62S, or equivalent thereof.

[6337] In some aspects, one or both of the antigen binding polypeptides comprised in the antigen binding polypeptide complexes disclosed herein, comprise one or more optional linkers. The one or more optional linkers are indicated herein as Ln, wherein n is an integer, and the integer next to each L indicates each L comprised in the antigen binding polypeptides comprised in the antigen binding polypeptide complexes disclosed herein. For example, if an antigen binding polypeptide comprised in the antigen binding polypeptide complexes disclosed herein comprises two linkers, the first linker from N-terminus to C-terminus is herein indicated as L1, and the second linker from N-terminus to C-terminus is herein indicated as L2. If an antigen binding polypeptide complex disclosed herein comprises a first antigen binding polypeptide comprising two linkers, indicated herein as L1 and L2, as explained above, the linkers comprised in the second antigen binding polypeptide are indicated with the following integer, in this example, the first linker from N-terminus to C-terminus of the second antigen binding polypeptide is herein indicated as L3, the second linker from N-terminus to C-terminus of the second antigen binding polypeptide is herein indicated as L3. In some aspects, any one of the optional linkers each independently have a length of from 0 amino acids to about 50 amino acids. In some aspects, any one of the optional linkers each independently have a length of from 5 amino acids to about 40 amino acids.

[6338] In some aspects, any one of the optional linkers are non-immunogenic. In some aspects, any one of the optional linkers do not contain a consensus T cell epitope.

[6339] In some aspects, any of Ln comprises an amino acid sequence of G or A, or an amino acid sequence at least 65%, at least 70%, at least 75%, at least 80%, at least 85%, at least 90%, at least 95%, at least 99%, or 100% identical to amino acid sequence GSS or ASG, or an amino acid sequence at least 65%, at least 70%, at least 75%, at least 80%, at least 85%, at least 90%, at least 95%, at least 99%, or 100% identical to any one of SEQ ID NOs: 333-373 and 967-971. In some aspects. Ln comprises an amino acid sequence at least 65%, at least 70%, at least 75%, at least 80%, at least 85%, at least 90%, at least 95%, at least 99%, or 100% identical to any one of SEQ ID NOs: 333-345 and 967-971. In some aspects, the first polypeptide comprises a structure represented by VL1-CL-VL2-VH2-VH1-CH1, VL1-L1-CL-L2-VL2-L3-VH2-L4-VH1-L5-CH1, VL1-CL-L1-VL2-L2-VH2-L3-VH1-CH1, VL1-CL-VL2-VH2-VH1-CH1-CH2-CH3, VL1-L1-CL-L2-VL2-L3-VH2-L4-VH1-L5-CH1-CH2-CH3, or VL1-CL-L1-VL2-L2-VH2-L3- VH1-CH1-CH2-CH3, and the second polypeptide comprises a structure represented by VL3-CL-VL4-VH4-VH3-CH1, VL3-L6-CL-L7-VL4-L8-VH4-L9-VH3-L10-CH1, VL3-CL-L4-VL4-L5-VH4-L6-VH3-CH1, VL3-CL-VL4-VH4-VH3-CH1-CH2-CH3, VL3-L6-CL-L7-VL4-L8-VH4-L9-VH3-L10-CH1-CH2-CH3, or VL3-CL-L4-VL4-L5-VH4-L6-VH3-CH1-CH2-CH3,
[6340] wherein:
[6341] (a)
[6342] (i)
[6343] VL1 comprises a light chain complementarity determining region 1 (LCDR1), LCDR2, and/or LCDR3 of an antibody selected from the group consisting of losatuxizumab vedotin, utomilumab, urelumab, oleclumab, naptumomab estafenatox, ascrinvacumab, pintumomab, tacatuzumab tetraxetan, nesvacumab, vanucizumab, timolumab, vapaliximab, vepalimomab, enapotamab vedotin, ianalumab, belimumab, tabalumab, tibulizumab, belantamab mafodotin, teclistamab, teclistamab, detumomab, nacolomab tafenatox, eculizumab, lendalizumab, pexelizumab, pozelimab, ravulizumab, tesidolumab, vilobelimab, abagovomab, igovomab, oregovomab, sofituzumab vedotin, cantuzumab mertansine, cantuzuma bravtansine, girentuximab, altumomab pentetate, arcitumomab, besilesomab, bertilimumab, plozalizumab, mogamulizumab, leronlimab, PRO140, rovelizumab, rovelizumab, talacotuzumab, benralizumab, tavolimab, vonlerolizumab, gavilimomab, ziralimumab, fanolesomab, ipilimumab, ruplizumab, toralizumab, dapirolizumab pegol, toralizumab, dapirolizumab pegol, ruplizumab, blinatumomab, inebilizumab, loncastuximab tesirine, SGN-CD19A, tafasitamab, taplitumomab paptox, XMAB-5574, Budoprutug, Obexclimab, duvortuxizumab, englumafusp alfa, Emfizatamab, zeripatamig, siplizumab, blontuvetmab, FBTA05, ibritumomab tiuxetan, obinutuzumab, ocaratuzumab, ocrelizumab, ofatumumab, rituximab, tositumomab, ublituximab, veltuzumab, divozilimab, eramkafusp alfa, ripertamab, zuberitamab, glofitamab, nofetumomab merpentan, samalizumab, imvotamab, odronextamab, plamotamab, bectumomab, inotuzumab ozogamicin, moxetumomab pasudotox, pinatuzumab vedotin, gomiliximab, lumiliximab, inolimomab, inolimomab, daclizumab, camidanluma btesirine, basiliximab, varlilumab, omburtamab, enoblituzumab, vopratelimab, lulizumabpegol, TGN1412, muromonab-CD3, otelixizumab, teplizumab, visilizumab, epcoritamab, epcoritamab, brentuximab vedotin, iratumumab, azintuxizumab vedotin, gemtuzumab ozogamicin, lintuzumab, vadastuximab talirine, naratuximab emtansine, otlertuzumab, lilotomab satetraxetan, tetulomab, daratumumab, isatuximab, foralumab, mosunetuzumab, mosunetuzumab, cedelizumab, ibalizumab, keliximab, priliximab, tregalizumab, zanolimumab, bleselumab, iscalimab, lucatumumab, ravagalimab, selicrelumab, teneliximab, vanalimab, abciximab, bivatuzumab, iomab-B, telimomab aritox, zolimomab aritox, abituzumab, intetumumab, alemtuzumab, tamtuvetmab, lorvotuzumab mertansine, itolizumab, cusatuzumab, vorsetuzumab mafodotin, milatuzumab, iladatuzumab vedotin, polatuzumab vedotin, galiximab, cibisatamab, zolbetuximab, naxitamab, tisotumab vedotin, olendalizumab, pamrevlumab, lacnotuzumab, cabiralizumab, emactuzumab, axatilimab, gimsilumab, lenzilumab, namilumab, tremelimumab, ulocuplumab, tepoditamab, rovalpituzumab tesirine, tarlatamab, demcizumab, navicixizumab, drozitumab, parsatuzumab, depatuxizumab mafodotin, modotuximab, carotuximab, adecatumumab, adecatumumab, oportuzumab monatox, solitomab, tucotuzumab celmoleukin, edrecolomab, catumaxomab, ifabotuzumab, fibatuzumab, zalutumumab, panitumumab, cetuximab, futuximab, imgatuzumab, laprituximab emtansine, matuzumab, necitumumab, nimotuzumab, tomuzotuximab, amivantamab, amivantamab, epitumomab cituxetan, sontuzumab, duligotuzumab, elgemtumab, lumretuzumab, patritumab, seribantumab, zenocutuzumab, sibrotuzumab, burosumab, aprutumab ixadotin, radretumab, pasotuxizumab, farletuzumab, mirvetuximab soravtansine, vantictumab, TRBS07, 3F8, dinutuximab, dinutuximab beta, ecromeximab, mitumomab, andecaliximab, capromab, codrituzumab, glembatumumab vedotin, talquetamab, talquetamab, trevogrumab, indusatumab vedotin, ficlatuzumab, rilotumumab, zatuximab, pentuzimab, pentuzimab, margetuximab, timigutuzumab, trastuzumab, trastuzumab duocarmazine, trastuzumab emtansine, gancotamab, pertuzumab, ertumaxomab, emibetuzumab, telisotuzumab, telisotuzumab vedotin, derlotuximab biotin, apolizumab, onartuzumab, bersanlimab, enlimomabpegol, rontalizumab, sifalimumab, talizumab, ganitumab, istiratumab, robatumumab, teprotumumab, figitumumab, ganitumab, istiratumab, robatumumab, teprotumumab, cixutumumab, dalotuzumab, xentuzumab, dusigitumab, canakinumab, ustekinumab, ustekinumab, ustekinumab, briakinumab, briakinumab, abrezekimab, lebrikizumab, romilkimab, TNX-650, tralokinumab, anrukinzumab, brodalumab, ixekizumab, netakimab, perakizumab, secukinumab, vunakizumab, afasevikumab, afasevikumab, bimekizumab, bimekizumab, remtolumab, bermekimab, lutikizumab, lutikizumab, gevokizumab, cergutuzumab amunaleukin, fletikumab, fezakinumab, brazikumab, guselkumab, mirikizumab, tildrakizumab, risankizumab, flotetuzumab, nemolizumab, pascolizumab, dupilumab, mepolizumab, reslizumab, clazakizumab, elsilimomab, olokizumab, sarilumab, siltuximab, sirukumab, vobarilizumab, tocilizumab, SA237, satralizumab, enokizumab, prezalizumab, natalizumab, abrilumab, abrilumab, vedolizumab, volociximab, tadocizumab, etaracizumab, etrolizumab, spesolimab, vatelizumab, erlizumab, lirilumab, relatlimab, cBR96-doxorubicinimmunoconjugate, odulimomab, efalizumab, ladiratuzumab vedotin, simtuzumab, samrotamab vedotin, aselizumab, lupartumab amadotin, imalumab, carlumab, imaprelimab, amatuximab, amatuximab, anetumab ravtansine, narnatumab, clivatuzumab tetraxetan, pemtumomab, gatipotuzumab, ensituximab, lemalesomab, sulesomab, enfortumab vedotin, racotumomab, monalizumab, brontictuzumab, tarextumab, vesencumab, oxelumab, gilvetmab, tislelizumab, dostarlimab, BCD-100, nivolumab, PDR001, pembrolizumab, pidilizumab, retifanlimab, spartalizumab, sintilimab, cemiplimab, olaratumab, tovetumab, rinucumab, atezolizumab, avelumab, durvalumab, lifastuzumab vedotin, bavituximab, acapatamab, capromab, rosopatamab, nezastomig, pasotuxizumab, pelgifatamab, voxalatamab, cofetuzumab pelidotin, denosumab, rosmantuzumab, cirmtuzumab, atinumab, indatuximab ravtansine, elotuzumab, sirtratumab vedotin, sonepcizumab, vandortuzumab vedotin, minretumomab, satumomab pendetide, maslimomab, ontuxizumab, tenatumomab, fresolimumab, metelimumab, lerdelimumab, tezepelumab, etigilimab, tiragotumab, placulumab, prezalumab, infliximab, nerelimomab, ozoralizumab, adalimumab, afelimomab, certolizumab pegol, golimumab, mapatumumab, conatumumab, lexatumumab, tigatuzumab, sacituzumab govitecan, votumumab, pogalizumab, letolizumab, pankomab, anatumomab mafenatox, enavatuzumab, flanvotumab, brolucizumab, ranibizumab, varisacumab, bevacizumab, faricimab, icrucumab, alacizumab pegol, ramucirumab, pritumumab, and onvatilimab;
[6344] VL2 comprises a light chain complementarity determining region 1 (LCDR1), LCDR2, and/or LCDR3 of an antibody selected from the group consisting of losatuxizumab vedotin, utomilumab, urelumab, oleclumab, naptumomab estafenatox, ascrinvacumab, pintumomab, tacatuzumab tetraxetan, nesvacumab, vanucizumab, timolumab, vapaliximab, vepalimomab, enapotamab vedotin, ianalumab, belimumab, tabalumab, tibulizumab, belantamab mafodotin, teclistamab, teclistamab, detumomab, nacolomab tafenatox, eculizumab, lendalizumab, pexelizumab, pozelimab, ravulizumab, tesidolumab, vilobelimab, abagovomab, igovomab, oregovomab, sofituzumab vedotin, cantuzumab mertansine, cantuzuma bravtansine, girentuximab, altumomab pentetate, arcitumomab, besilesomab, bertilimumab, plozalizumab, mogamulizumab, leronlimab, PRO140, rovelizumab, rovelizumab, talacotuzumab, benralizumab, tavolimab, vonlerolizumab, gavilimomab, ziralimumab, fanolesomab, ipilimumab, ruplizumab, toralizumab, dapirolizumab pegol, toralizumab, dapirolizumab pegol, ruplizumab, blinatumomab, inebilizumab, loncastuximab tesirine, SGN-CD19A, tafasitamab, taplitumomab paptox, XMAB-5574, Budoprutug, Obexelimab, duvortuxizumab, englumafusp alfa, Emfizatamab, zeripatamig, siplizumab, blontuvetmab, FBTA05, ibritumomab tiuxetan, obinutuzumab, ocaratuzumab, ocrelizumab, ofatumumab, rituximab, tositumomab, ublituximab, veltuzumab, divozilimab, eramkafusp alfa, ripertamab, zuberitamab, glofitamab, nofetumomab merpentan, samalizumab, imvotamab, odronextamab, plamotamab, bectumomab, inotuzumab ozogamicin, moxetumomab pasudotox, pinatuzumab vedotin, gomiliximab, lumiliximab, inolimomab, inolimomab, daclizumab, camidanluma btesirine, basiliximab, varlilumab, omburtamab, enoblituzumab, vopratelimab, lulizumabpegol, TGN1412, muromonab-CD3, otelixizumab, teplizumab, visilizumab, epcoritamab, epcoritamab, brentuximab vedotin, iratumumab, azintuxizumab vedotin, gemtuzumab ozogamicin, lintuzumab, vadastuximab talirine, naratuximab emtansine, otlertuzumab, lilotomab satetraxetan, tetulomab, daratumumab, isatuximab, foralumab, mosunetuzumab, mosunetuzumab, cedelizumab, ibalizumab, keliximab, priliximab, tregalizumab, zanolimumab, bleselumab, iscalimab, lucatumumab, ravagalimab, selicrelumab, teneliximab, vanalimab, abciximab, bivatuzumab, iomab-B, telimomab aritox, zolimomab aritox, abituzumab, intetumumab, alemtuzumab, tamtuvetmab, lorvotuzumab mertansine, itolizumab, cusatuzumab, vorsetuzumab mafodotin, milatuzumab, iladatuzumab vedotin, polatuzumab vedotin, galiximab, cibisatamab, zolbetuximab, naxitamab, tisotumab vedotin, olendalizumab, pamrevlumab, lacnotuzumab, cabiralizumab, emactuzumab, axatilimab, gimsilumab, lenzilumab, namilumab, tremelimumab, ulocuplumab, tepoditamab, rovalpituzumab tesirine, tarlatamab, demcizumab, navicixizumab, drozitumab, parsatuzumab, depatuxizumab mafodotin, modotuximab, carotuximab, adecatumumab, adecatumumab, oportuzumab monatox, solitomab, tucotuzumab celmoleukin, edrecolomab, catumaxomab, ifabotuzumab, fibatuzumab, zalutumumab, panitumumab, cetuximab, futuximab, imgatuzumab, laprituximab emtansine, matuzumab, necitumumab, nimotuzumab, tomuzotuximab, amivantamab, amivantamab, epitumomab cituxetan, sontuzumab, duligotuzumab, elgemtumab, lumretuzumab, patritumab, seribantumab, zenocutuzumab, sibrotuzumab, burosumab, aprutumab ixadotin, radretumab, pasotuxizumab, farletuzumab, mirvetuximab soravtansine, vantictumab, TRBS07, 3F8, dinutuximab, dinutuximab beta, ecromeximab, mitumomab, andecaliximab, capromab, codrituzumab, glembatumumab vedotin, talquetamab, talquetamab, trevogrumab, indusatumab vedotin, ficlatuzumab, rilotumumab, zatuximab, pentuzimab, pentuzimab, margetuximab, timigutuzumab, trastuzumab, trastuzumab duocarmazine, trastuzumab emtansine, gancotamab, pertuzumab, ertumaxomab, emibctuzumab, telisotuzumab, telisotuzumab vedotin, derlotuximab biotin, apolizumab, onartuzumab, bersanlimab, enlimomabpegol, rontalizumab, sifalimumab, talizumab, ganitumab, istiratumab, robatumumab, teprotumumab, figitumumab, ganitumab, istiratumab, robatumumab, teprotumumab, cixutumumab, dalotuzumab, xentuzumab, dusigitumab, canakinumab, ustekinumab, ustekinumab, ustekinumab, briakinumab, briakinumab, abrezekimab, lebrikizumab, romilkimab, TNX-650, tralokinumab, anrukinzumab, brodalumab, ixekizumab, netakimab, perakizumab, secukinumab, vunakizumab, afasevikumab, afasevikumab, bimekizumab, bimekizumab, remtolumab, bermekimab, lutikizumab, lutikizumab, gevokizumab, cergutuzumab amunaleukin, fletikumab, fezakinumab, brazikumab, guselkumab, mirikizumab, tildrakizumab, risankizumab, flotetuzumab, nemolizumab, pascolizumab, dupilumab, mepolizumab, reslizumab, clazakizumab, elsilimomab, olokizumab, sarilumab, siltuximab, sirukumab, vobarilizumab, tocilizumab, SA237, satralizumab, enokizumab, prezalizumab, natalizumab, abrilumab, abrilumab, vedolizumab, volociximab, tadocizumab, etaracizumab, etrolizumab, spesolimab, vatelizumab, erlizumab, lirilumab, relatlimab, cBR96-doxorubicinimmunoconjugate, odulimomab, efalizumab, ladiratuzumab vedotin, simtuzumab, samrotamab vedotin, aselizumab, lupartumab amadotin, imalumab, carlumab, imaprelimab, amatuximab, amatuximab, anetumab ravtansine, narnatumab, clivatuzumab tetraxetan, pemtumomab, gatipotuzumab, ensituximab, lemalesomab, sulesomab, enfortumab vedotin, racotumomab, monalizumab, brontictuzumab, tarextumab, vesencumab, oxelumab, gilvetmab, tislelizumab, dostarlimab, BCD-100, nivolumab, PDR001, pembrolizumab, pidilizumab, retifanlimab, spartalizumab, sintilimab, cemiplimab, olaratumab, tovetumab, rinucumab, atezolizumab, avelumab, durvalumab, lifastuzumab vedotin, bavituximab, acapatamab, capromab, rosopatamab, nezastomig, pasotuxizumab, pelgifatamab, voxalatamab, cofetuzumab pelidotin, denosumab, rosmantuzumab, cirmtuzumab, atinumab, indatuximab ravtansine, elotuzumab, sirtratumab vedotin, sonepcizumab, vandortuzumab vedotin, minretumomab, satumomab pendetide, maslimomab, ontuxizumab, tenatumomab, fresolimumab, metelimumab, lerdelimumab, tezepelumab, etigilimab, tiragotumab, placulumab, prezalumab, infliximab, nerelimomab, ozoralizumab, adalimumab, afelimomab, certolizumab pegol, golimumab, mapatumumab, conatumumab, lexatumumab, tigatuzumab, sacituzumab govitecan, votumumab, pogalizumab, letolizumab, pankomab, anatumomab mafenatox, enavatuzumab, flanvotumab, brolucizumab, ranibizumab, varisacumab, bevacizumab, faricimab, icrucumab, alacizumab pegol, ramucirumab, pritumumab, and onvatilimab;
[6345] VL3 comprises a light chain complementarity determining region 1 (LCDR1), LCDR2, and/or LCDR3 of an antibody selected from the group consisting of losatuxizumab vedotin, utomilumab, urelumab, oleclumab, naptumomab estafenatox, ascrinvacumab, pintumomab, tacatuzumab tetraxetan, nesvacumab, vanucizumab, timolumab, vapaliximab, vepalimomab, enapotamab vedotin, ianalumab, belimumab, tabalumab, tibulizumab, belantamab mafodotin, teclistamab, teclistamab, detumomab, nacolomab tafenatox, eculizumab, lendalizumab, pexelizumab, pozelimab, ravulizumab, tesidolumab, vilobelimab, abagovomab, igovomab, oregovomab, sofituzumab vedotin, cantuzumab mertansine, cantuzuma bravtansine, girentuximab, altumomab pentetate, arcitumomab, besilesomab, bertilimumab, plozalizumab, mogamulizumab, leronlimab, PRO140, rovelizumab, rovelizumab, talacotuzumab, benralizumab, tavolimab, vonlerolizumab, gavilimomab, ziralimumab, fanolesomab, ipilimumab, ruplizumab, toralizumab, dapirolizumab pegol, toralizumab, dapirolizumab pegol, ruplizumab, blinatumomab, inebilizumab, loncastuximab tesirine, SGN-CD19A, tafasitamab, taplitumomab paptox, XMAB-5574, Budoprutug, Obexelimab, duvortuxizumab, englumafusp alfa, Emfizatamab, zeripatamig, siplizumab, blontuvetmab, FBTA05, ibritumomab tiuxetan, obinutuzumab, ocaratuzumab, ocrelizumab, ofatumumab, rituximab, tositumomab, ublituximab, veltuzumab, divozilimab, eramkafusp alfa, ripertamab, zuberitamab, glofitamab, nofetumomab merpentan, samalizumab, imvotamab, odronextamab, plamotamab, bectumomab, inotuzumab ozogamicin, moxetumomab pasudotox, pinatuzumab vedotin, gomiliximab, lumiliximab, inolimomab, inolimomab, daclizumab, camidanluma btesirine, basiliximab, varlilumab, omburtamab, enoblituzumab, vopratelimab, lulizumabpegol, TGN1412, muromonab-CD3, otelixizumab, teplizumab, visilizumab, epcoritamab, epcoritamab, brentuximab vedotin, iratumumab, azintuxizumab vedotin, gemtuzumab ozogamicin, lintuzumab, vadastuximab talirine, naratuximab emtansine, otlertuzumab, lilotomab satetraxetan, tetulomab, daratumumab, isatuximab, foralumab, mosunetuzumab, mosunetuzumab, cedelizumab, ibalizumab, keliximab, priliximab, tregalizumab, zanolimumab, bleselumab, iscalimab, lucatumumab, ravagalimab, selicrelumab, teneliximab, vanalimab, abciximab, bivatuzumab, iomab-B, telimomab aritox, zolimomab aritox, abituzumab, intetumumab, alemtuzumab, tamtuvetmab, lorvotuzumab mertansine, itolizumab, cusatuzumab, vorsetuzumab mafodotin, milatuzumab, iladatuzumab vedotin, polatuzumab vedotin, galiximab, cibisatamab, zolbetuximab, naxitamab, tisotumab vedotin, olendalizumab, pamrevlumab, lacnotuzumab, cabiralizumab, emactuzumab, axatilimab, gimsilumab, lenzilumab, namilumab, tremelimumab, ulocuplumab, tepoditamab, rovalpituzumab tesirine, tarlatamab, demcizumab, navicixizumab, drozitumab, parsatuzumab, depatuxizumab mafodotin, modotuximab, carotuximab, adecatumumab, adecatumumab, oportuzumab monatox, solitomab, tucotuzumab celmoleukin, edrecolomab, catumaxomab, ifabotuzumab, fibatuzumab, zalutumumab, panitumumab, cetuximab, futuximab, imgatuzumab, laprituximab emtansine, matuzumab, necitumumab, nimotuzumab, tomuzotuximab, amivantamab, amivantamab, epitumomab cituxetan, sontuzumab, duligotuzumab, elgemtumab, lumretuzumab, patritumab, seribantumab, zenocutuzumab, sibrotuzumab, burosumab, aprutumab ixadotin, radretumab, pasotuxizumab, farletuzumab, mirvetuximab soravtansine, vantictumab, TRBS07, 3F8, dinutuximab, dinutuximab beta, ecromeximab, mitumomab, andecaliximab, capromab, codrituzumab, glembatumumab vedotin, talquetamab, talquetamab, trevogrumab, indusatumab vedotin, ficlatuzumab, rilotumumab, zatuximab, pentuzimab, pentuzimab, margetuximab, timigutuzumab, trastuzumab, trastuzumab duocarmazine, trastuzumab emtansine, gancotamab, pertuzumab, ertumaxomab, emibetuzumab, telisotuzumab, telisotuzumab vedotin, derlotuximab biotin, apolizumab, onartuzumab, bersanlimab, enlimomabpegol, rontalizumab, sifalimumab, talizumab, ganitumab, istiratumab, robatumumab, teprotumumab, figitumumab, ganitumab, istiratumab, robatumumab, teprotumumab, cixutumumab, dalotuzumab, xentuzumab, dusigitumab, canakinumab, ustekinumab, ustekinumab, ustekinumab, briakinumab, briakinumab, abrezekimab, lebrikizumab, romilkimab, TNX-650, tralokinumab, anrukinzumab, brodalumab, ixekizumab, netakimab, perakizumab, secukinumab, vunakizumab, afasevikumab, afasevikumab, bimekizumab, bimekizumab, remtolumab, bermckimab, lutikizumab, lutikizumab, gevokizumab, cergutuzumab amunaleukin, fletikumab, fezakinumab, brazikumab, guselkumab, mirikizumab, tildrakizumab, risankizumab, flotetuzumab, nemolizumab, pascolizumab, dupilumab, mepolizumab, reslizumab, clazakizumab, elsilimomab, olokizumab, sarilumab, siltuximab, sirukumab, vobarilizumab, tocilizumab, SA237, satralizumab, enokizumab, prezalizumab, natalizumab, abrilumab, abrilumab, vedolizumab, volociximab, tadocizumab, etaracizumab, etrolizumab, spesolimab, vatelizumab, erlizumab, lirilumab, relatlimab, cBR96-doxorubicinimmunoconjugate, odulimomab, efalizumab, ladiratuzumab vedotin, simtuzumab, samrotamab vedotin, asclizumab, lupartumab amadotin, imalumab, carlumab, imaprelimab, amatuximab, amatuximab, anetumab ravtansine, narnatumab, clivatuzumab tetraxetan, pemtumomab, gatipotuzumab, ensituximab, lemalesomab, sulesomab, enfortumab vedotin, racotumomab, monalizumab, brontictuzumab, tarextumab, vesencumab, oxelumab, gilvetmab, tislelizumab, dostarlimab, BCD-100, nivolumab, PDR001, pembrolizumab, pidilizumab, retifanlimab, spartalizumab, sintilimab, cemiplimab, olaratumab, tovetumab, rinucumab, atezolizumab, avelumab, durvalumab, lifastuzumab vedotin, bavituximab, acapatamab, capromab, rosopatamab, nezastomig, pasotuxizumab, pelgifatamab, voxalatamab, cofetuzumab pelidotin, denosumab, rosmantuzumab, cirmtuzumab, atinumab, indatuximab ravtansine, elotuzumab, sirtratumab vedotin, sonepcizumab, vandortuzumab vedotin, minretumomab, satumomab pendetide, maslimomab, ontuxizumab, tenatumomab, fresolimumab, metelimumab, lerdelimumab, tezepelumab, etigilimab, tiragotumab, placulumab, prezalumab, infliximab, nerelimomab, ozoralizumab, adalimumab, afelimomab, certolizumab pegol, golimumab, mapatumumab, conatumumab, lexatumumab, tigatuzumab, sacituzumab govitecan, votumumab, pogalizumab, letolizumab, pankomab, anatumomab mafenatox, enavatuzumab, flanvotumab, brolucizumab, ranibizumab, varisacumab, bevacizumab, faricimab, icrucumab, alacizumab pegol, ramucirumab, pritumumab, and onvatilimab;
[6346] VL4 comprises a light chain complementarity determining region 1 (LCDR1), LCDR2, and/or LCDR3 of an antibody selected from the group consisting of losatuxizumab vedotin, utomilumab, urelumab, oleclumab, naptumomab estafenatox, ascrinvacumab, pintumomab, tacatuzumab tetraxetan, nesvacumab, vanucizumab, timolumab, vapaliximab, vepalimomab, enapotamab vedotin, ianalumab, belimumab, tabalumab, tibulizumab, belantamab mafodotin, teclistamab, teclistamab, detumomab, nacolomab tafenatox, eculizumab, lendalizumab, pexelizumab, pozelimab, ravulizumab, tesidolumab, vilobelimab, abagovomab, igovomab, oregovomab, sofituzumab vedotin, cantuzumab mertansine, cantuzuma bravtansine, girentuximab, altumomab pentetate, arcitumomab, besilesomab, bertilimumab, plozalizumab, mogamulizumab, leronlimab, PRO140, rovelizumab, rovelizumab, talacotuzumab, benralizumab, tavolimab, vonlerolizumab, gavilimomab, ziralimumab, fanolesomab, ipilimumab, ruplizumab, toralizumab, dapirolizumab pegol, toralizumab, dapirolizumab pegol, ruplizumab, blinatumomab, inebilizumab, loncastuximab tesirine, SGN-CD19A, tafasitamab, taplitumomab paptox, XMAB-5574, Budoprutug, Obexelimab, duvortuxizumab, englumafusp alfa, Emfizatamab, zeripatamig, siplizumab, blontuvetmab, FBTA05, ibritumomab tiuxetan, obinutuzumab, ocaratuzumab, ocrelizumab, ofatumumab, rituximab, tositumomab, ublituximab, veltuzumab, divozilimab, eramkafusp alfa, ripertamab, zuberitamab, glofitamab, nofetumomab merpentan, samalizumab, imvotamab, odronextamab, plamotamab, bectumomab, inotuzumab ozogamicin, moxetumomab pasudotox, pinatuzumab vedotin, gomiliximab, lumiliximab, inolimomab, inolimomab, daclizumab, camidanluma btesirine, basiliximab, varlilumab, omburtamab, enoblituzumab, vopratelimab, lulizumabpegol, TGN1412, muromonab-CD3, otelixizumab, teplizumab, visilizumab, epcoritamab, epcoritamab, brentuximab vedotin, iratumumab, azintuxizumab vedotin, gemtuzumab ozogamicin, lintuzumab, vadastuximab talirine, naratuximab emtansine, otlertuzumab, lilotomab satetraxetan, tetulomab, daratumumab, isatuximab, foralumab, mosunetuzumab, mosunetuzumab, cedelizumab, ibalizumab, keliximab, priliximab, tregalizumab, zanolimumab, bleselumab, iscalimab, lucatumumab, ravagalimab, selicrelumab, teneliximab, vanalimab, abciximab, bivatuzumab, iomab-B, telimomab aritox, zolimomab aritox, abituzumab, intetumumab, alemtuzumab, tamtuvetmab, lorvotuzumab mertansine, itolizumab, cusatuzumab, vorsctuzumab mafodotin, milatuzumab, iladatuzumab vedotin, polatuzumab vedotin, galiximab, cibisatamab, zolbetuximab, naxitamab, tisotumab vedotin, olendalizumab, pamrevlumab, lacnotuzumab, cabiralizumab, emactuzumab, axatilimab, gimsilumab, lenzilumab, namilumab, tremelimumab, ulocuplumab, tepoditamab, rovalpituzumab tesirine, tarlatamab, demcizumab, navicixizumab, drozitumab, parsatuzumab, depatuxizumab mafodotin, modotuximab, carotuximab, adecatumumab, adecatumumab, oportuzumab monatox, solitomab, tucotuzumab celmoleukin, edrecolomab, catumaxomab, ifabotuzumab, fibatuzumab, zalutumumab, panitumumab, cetuximab, futuximab, imgatuzumab, laprituximab emtansine, matuzumab, necitumumab, nimotuzumab, tomuzotuximab, amivantamab, amivantamab, epitumomab cituxetan, sontuzumab, duligotuzumab, elgemtumab, lumretuzumab, patritumab, seribantumab, zenocutuzumab, sibrotuzumab, burosumab, aprutumab ixadotin, radretumab, pasotuxizumab, farletuzumab, mirvetuximab soravtansine, vantictumab, TRBS07, 3F8, dinutuximab, dinutuximab beta, ecromeximab, mitumomab, andecaliximab, capromab, codrituzumab, glembatumumab vedotin, talquetamab, talquetamab, trevogrumab, indusatumab vedotin, ficlatuzumab, rilotumumab, zatuximab, pentuzimab, pentuzimab, margetuximab, timigutuzumab, trastuzumab, trastuzumab duocarmazine, trastuzumab emtansine, gancotamab, pertuzumab, ertumaxomab, emibetuzumab, telisotuzumab, telisotuzumab vedotin, derlotuximab biotin, apolizumab, onartuzumab, bersanlimab, enlimomabpegol, rontalizumab, sifalimumab, talizumab, ganitumab, istiratumab, robatumumab, teprotumumab, figitumumab, ganitumab, istiratumab, robatumumab, teprotumumab, cixutumumab, dalotuzumab, xentuzumab, dusigitumab, canakinumab, ustekinumab, ustekinumab, ustekinumab, briakinumab, briakinumab, abrezekimab, lebrikizumab, romilkimab, TNX-650, tralokinumab, anrukinzumab, brodalumab, ixekizumab, netakimab, perakizumab, secukinumab, vunakizumab, afasevikumab, afasevikumab, bimekizumab, bimekizumab, remtolumab, bermekimab, lutikizumab, lutikizumab, gevokizumab, cergutuzumab amunaleukin, fletikumab, fezakinumab, brazikumab, guselkumab, mirikizumab, tildrakizumab, risankizumab, flotetuzumab, nemolizumab, pascolizumab, dupilumab, mepolizumab, reslizumab, clazakizumab, elsilimomab, olokizumab, sarilumab, siltuximab, sirukumab, vobarilizumab, tocilizumab, SA237, satralizumab, enokizumab, prezalizumab, natalizumab, abrilumab, abrilumab, vedolizumab, volociximab, tadocizumab, etaracizumab, etrolizumab, spesolimab, vatelizumab, erlizumab, lirilumab, relatlimab, cBR96-doxorubicinimmunoconjugate, odulimomab, efalizumab, ladiratuzumab vedotin, simtuzumab, samrotamab vedotin, aselizumab, lupartumab amadotin, imalumab, carlumab, imaprelimab, amatuximab, amatuximab, anetumab ravtansine, narnatumab, clivatuzumab tetraxetan, pemtumomab, gatipotuzumab, ensituximab, lemalesomab, sulesomab, enfortumab vedotin, racotumomab, monalizumab, brontictuzumab, tarextumab, vesencumab, oxelumab, gilvetmab, tislelizumab, dostarlimab, BCD-100, nivolumab, PDR001, pembrolizumab, pidilizumab, retifanlimab, spartalizumab, sintilimab, cemiplimab, olaratumab, tovetumab, rinucumab, atezolizumab, avelumab, durvalumab, lifastuzumab vedotin, bavituximab, acapatamab, capromab, rosopatamab, nezastomig, pasotuxizumab, pelgifatamab, voxalatamab, cofetuzumab pelidotin, denosumab, rosmantuzumab, cirmtuzumab, atinumab, indatuximab ravtansine, elotuzumab, sirtratumab vedotin, sonepcizumab, vandortuzumab vedotin, minretumomab, satumomab pendetide, maslimomab, ontuxizumab, tenatumomab, fresolimumab, metelimumab, lerdelimumab, tezepelumab, etigilimab, tiragotumab, placulumab, prezalumab, infliximab, nerelimomab, ozoralizumab, adalimumab, afelimomab, certolizumab pegol, golimumab, mapatumumab, conatumumab, lexatumumab, tigatuzumab, sacituzumab govitecan, votumumab, pogalizumab, letolizumab, pankomab, anatumomab mafenatox, enavatuzumab, flanvotumab, brolucizumab, ranibizumab, varisacumab, bevacizumab, faricimab, icrucumab, alacizumab pegol, ramucirumab, pritumumab, and onvatilimab;
[6347] VH1 comprises a heavy chain complementarity determining region 1 (HCDR1), HCDR2, and/or HCDR3 of an antibody selected from the group consisting of losatuxizumab vedotin, utomilumab, urelumab, oleclumab, naptumomab estafenatox, ascrinvacumab, pintumomab, tacatuzumab tetraxetan, nesvacumab, vanucizumab, timolumab, vapaliximab, vepalimomab, enapotamab vedotin, ianalumab, belimumab, tabalumab, tibulizumab, belantamab mafodotin, teclistamab, teclistamab, detumomab, nacolomab tafenatox, eculizumab, lendalizumab, pexelizumab, pozelimab, ravulizumab, tesidolumab, vilobelimab, abagovomab, igovomab, oregovomab, sofituzumab vedotin, cantuzumab mertansine, cantuzuma bravtansine, girentuximab, altumomab pentetate, arcitumomab, besilesomab, bertilimumab, plozalizumab, mogamulizumab, leronlimab, PRO140, rovelizumab, rovelizumab, talacotuzumab, benralizumab, tavolimab, vonlerolizumab, gavilimomab, ziralimumab, fanolesomab, ipilimumab, ruplizumab, toralizumab, dapirolizumab pegol, toralizumab, dapirolizumab pegol, ruplizumab, blinatumomab, inebilizumab, loncastuximab tesirine, SGN-CD19A, tafasitamab, taplitumomab paptox, XMAB-5574, Budoprutug, Obexelimab, duvortuxizumab, englumafusp alfa, Emfizatamab, zeripatamig, siplizumab, blontuvetmab, FBTA05, ibritumomab tiuxetan, obinutuzumab, ocaratuzumab, ocrelizumab, ofatumumab, rituximab, tositumomab, ublituximab, veltuzumab, divozilimab, eramkafusp alfa, ripertamab, zuberitamab, glofitamab, nofetumomab merpentan, samalizumab, imvotamab, odronextamab, plamotamab, bectumomab, inotuzumab ozogamicin, moxetumomab pasudotox, pinatuzumab vedotin, gomiliximab, lumiliximab, inolimomab, inolimomab, daclizumab, camidanluma btesirine, basiliximab, varlilumab, omburtamab, enoblituzumab, vopratelimab, lulizumabpegol, TGN1412, muromonab-CD3, otelixizumab, teplizumab, visilizumab, epcoritamab, epcoritamab, brentuximab vedotin, iratumumab, azintuxizumab vedotin, gemtuzumab ozogamicin, lintuzumab, vadastuximab talirine, naratuximab emtansine, otlertuzumab, lilotomab satetraxetan, tetulomab, daratumumab, isatuximab, foralumab, mosunetuzumab, mosunetuzumab, cedelizumab, ibalizumab, keliximab, priliximab, tregalizumab, zanolimumab, bleselumab, iscalimab, lucatumumab, ravagalimab, selicrelumab, teneliximab, vanalimab, abciximab, bivatuzumab, iomab-B, telimomab aritox, zolimomab aritox, abituzumab, intetumumab, alemtuzumab, tamtuvetmab, lorvotuzumab mertansine, itolizumab, cusatuzumab, vorsetuzumab mafodotin, milatuzumab, iladatuzumab vedotin, polatuzumab vedotin, galiximab, cibisatamab, zolbetuximab, naxitamab, tisotumab vedotin, olendalizumab, pamrevlumab, lacnotuzumab, cabiralizumab, emactuzumab, axatilimab, gimsilumab, lenzilumab, namilumab, tremelimumab, ulocuplumab, tepoditamab, rovalpituzumab tesirine, tarlatamab, demcizumab, navicixizumab, drozitumab, parsatuzumab, depatuxizumab mafodotin, modotuximab, carotuximab, adecatumumab, adecatumumab, oportuzumab monatox, solitomab, tucotuzumab celmoleukin, edrecolomab, catumaxomab, ifabotuzumab, fibatuzumab, zalutumumab, panitumumab, cetuximab, futuximab, imgatuzumab, laprituximab emtansine, matuzumab, necitumumab, nimotuzumab, tomuzotuximab, amivantamab, amivantamab, epitumomab cituxetan, sontuzumab, duligotuzumab, elgemtumab, lumretuzumab, patritumab, seribantumab, zenocutuzumab, sibrotuzumab, burosumab, aprutumab ixadotin, radretumab, pasotuxizumab, farletuzumab, mirvetuximab soravtansine, vantictumab, TRBS07, 3F8, dinutuximab, dinutuximab beta, ecromeximab, mitumomab, andecaliximab, capromab, codrituzumab, glembatumumab vedotin, talquetamab, talquetamab, trevogrumab, indusatumab vedotin, ficlatuzumab, rilotumumab, zatuximab, pentuzimab, pentuzimab, margetuximab, timigutuzumab, trastuzumab, trastuzumab duocarmazine, trastuzumab emtansine, gancotamab, pertuzumab, ertumaxomab, emibetuzumab, telisotuzumab, telisotuzumab vedotin, derlotuximab biotin, apolizumab, onartuzumab, bersanlimab, enlimomabpegol, rontalizumab, sifalimumab, talizumab, ganitumab, istiratumab, robatumumab, teprotumumab, figitumumab, ganitumab, istiratumab, robatumumab, teprotumumab, cixutumumab, dalotuzumab, xentuzumab, dusigitumab, canakinumab, ustekinumab, ustekinumab, ustekinumab, briakinumab, briakinumab, abrezekimab, lebrikizumab, romilkimab, TNX-650, tralokinumab, anrukinzumab, brodalumab, ixekizumab, netakimab, perakizumab, secukinumab, vunakizumab, afasevikumab, afasevikumab, bimekizumab, bimekizumab, remtolumab, bermekimab, lutikizumab, lutikizumab, gevokizumab, cergutuzumab amunaleukin, fletikumab, fezakinumab, brazikumab, guselkumab, mirikizumab, tildrakizumab, risankizumab, flotetuzumab, nemolizumab, pascolizumab, dupilumab, mepolizumab, reslizumab, clazakizumab, elsilimomab, olokizumab, sarilumab, siltuximab, sirukumab, vobarilizumab, tocilizumab, SA237, satralizumab, enokizumab, prezalizumab, natalizumab, abrilumab, abrilumab, vedolizumab, volociximab, tadocizumab, etaracizumab, etrolizumab, spesolimab, vatelizumab, erlizumab, lirilumab, relatlimab, cBR96-doxorubicinimmunoconjugate, odulimomab, efalizumab, ladiratuzumab vedotin, simtuzumab, samrotamab vedotin, aselizumab, lupartumab amadotin, imalumab, carlumab, imaprelimab, amatuximab, amatuximab, anetumab ravtansine, narnatumab, clivatuzumab tetraxetan, pemtumomab, gatipotuzumab, ensituximab, lemalesomab, sulesomab, enfortumab vedotin, racotumomab, monalizumab, brontictuzumab, tarextumab, vesencumab, oxelumab, gilvetmab, tislelizumab, dostarlimab, BCD-100, nivolumab, PDR001, pembrolizumab, pidilizumab, retifanlimab, spartalizumab, sintilimab, cemiplimab, olaratumab, tovetumab, rinucumab, atezolizumab, avelumab, durvalumab, lifastuzumab vedotin, bavituximab, acapatamab, capromab, rosopatamab, nezastomig, pasotuxizumab, pelgifatamab, voxalatamab, cofetuzumab pelidotin, denosumab, rosmantuzumab, cirmtuzumab, atinumab, indatuximab ravtansine, elotuzumab, sirtratumab vedotin, sonepcizumab, vandortuzumab vedotin, minretumomab, satumomab pendetide, maslimomab, ontuxizumab, tenatumomab, fresolimumab, metelimumab, lerdelimumab, tezepelumab, etigilimab, tiragotumab, placulumab, prezalumab, infliximab, nerelimomab, ozoralizumab, adalimumab, afelimomab, certolizumab pegol, golimumab, mapatumumab, conatumumab, lexatumumab, tigatuzumab, sacituzumab govitecan, votumumab, pogalizumab, letolizumab, pankomab, anatumomab mafenatox, enavatuzumab, flanvotumab, brolucizumab, ranibizumab, varisacumab, bevacizumab, faricimab, icrucumab, alacizumab pegol, ramucirumab, pritumumab, and onvatilimab;
[6348] VH2 comprises a heavy chain complementarity determining region 1 (HCDR1), HCDR2, and/or HCDR3 of an antibody selected from the group consisting of losatuxizumab vedotin, utomilumab, urelumab, oleclumab, naptumomab estafenatox, ascrinvacumab, pintumomab, tacatuzumab tetraxetan, nesvacumab, vanucizumab, timolumab, vapaliximab, vepalimomab, enapotamab vedotin, ianalumab, belimumab, tabalumab, tibulizumab, belantamab mafodotin, teclistamab, teclistamab, detumomab, nacolomab tafenatox, eculizumab, lendalizumab, pexelizumab, pozelimab, ravulizumab, tesidolumab, vilobelimab, abagovomab, igovomab, oregovomab, sofituzumab vedotin, cantuzumab mertansine, cantuzuma bravtansine, girentuximab, altumomab pentetate, arcitumomab, besilesomab, bertilimumab, plozalizumab, mogamulizumab, leronlimab, PRO140, rovelizumab, rovelizumab, talacotuzumab, benralizumab, tavolimab, vonlerolizumab, gavilimomab, ziralimumab, fanolesomab, ipilimumab, ruplizumab, toralizumab, dapirolizumab pegol, toralizumab, dapirolizumab pegol, ruplizumab, blinatumomab, inebilizumab, loncastuximab tesirine, SGN-CD19A, tafasitamab, taplitumomab paptox, XMAB-5574, Budoprutug, Obexelimab, duvortuxizumab, englumafusp alfa, Emfizatamab, zeripatamig, siplizumab, blontuvetmab, FBTA05, ibritumomab tiuxetan, obinutuzumab, ocaratuzumab, ocrelizumab, ofatumumab, rituximab, tositumomab, ublituximab, veltuzumab, divozilimab, eramkafusp alfa, ripertamab, zuberitamab, glofitamab, nofetumomab merpentan, samalizumab, imvotamab, odronextamab, plamotamab, bectumomab, inotuzumab ozogamicin, moxetumomab pasudotox, pinatuzumab vedotin, gomiliximab, lumiliximab, inolimomab, inolimomab, daclizumab, camidanluma btesirine, basiliximab, varlilumab, omburtamab, enoblituzumab, vopratelimab, lulizumabpegol, TGN1412, muromonab-CD3, otelixizumab, teplizumab, visilizumab, epcoritamab, epcoritamab, brentuximab vedotin, iratumumab, azintuxizumab vedotin, gemtuzumab ozogamicin, lintuzumab, vadastuximab talirine, naratuximab emtansine, otlertuzumab, lilotomab satetraxetan, tetulomab, daratumumab, isatuximab, foralumab, mosunetuzumab, mosunetuzumab, cedelizumab, ibalizumab, keliximab, priliximab, tregalizumab, zanolimumab, bleselumab, iscalimab, lucatumumab, ravagalimab, selicrelumab, teneliximab, vanalimab, abciximab, bivatuzumab, iomab-B, telimomab aritox, zolimomab aritox, abituzumab, intetumumab, alemtuzumab, tamtuvetmab, lorvotuzumab mertansine, itolizumab, cusatuzumab, vorsetuzumab mafodotin, milatuzumab, iladatuzumab vedotin, polatuzumab vedotin, galiximab, cibisatamab, zolbetuximab, naxitamab, tisotumab vedotin, olendalizumab, pamrevlumab, lacnotuzumab, cabiralizumab, emactuzumab, axatilimab, gimsilumab, lenzilumab, namilumab, tremelimumab, ulocuplumab, tepoditamab, rovalpituzumab tesirine, tarlatamab, demcizumab, navicixizumab, drozitumab, parsatuzumab, depatuxizumab mafodotin, modotuximab, carotuximab, adecatumumab, adecatumumab, oportuzumab monatox, solitomab, tucotuzumab celmoleukin, edrecolomab, catumaxomab, ifabotuzumab, fibatuzumab, zalutumumab, panitumumab, cetuximab, futuximab, imgatuzumab, laprituximab emtansine, matuzumab, necitumumab, nimotuzumab, tomuzotuximab, amivantamab, amivantamab, epitumomab cituxetan, sontuzumab, duligotuzumab, elgemtumab, lumretuzumab, patritumab, scribantumab, zenocutuzumab, sibrotuzumab, burosumab, aprutumab ixadotin, radretumab, pasotuxizumab, farletuzumab, mirvetuximab soravtansine, vantictumab, TRBS07, 3F8, dinutuximab, dinutuximab beta, ecromeximab, mitumomab, andecaliximab, capromab, codrituzumab, glembatumumab vedotin, talquetamab, talquetamab, trevogrumab, indusatumab vedotin, ficlatuzumab, rilotumumab, zatuximab, pentuzimab, pentuzimab, margetuximab, timigutuzumab, trastuzumab, trastuzumab duocarmazine, trastuzumab emtansine, gancotamab, pertuzumab, ertumaxomab, emibetuzumab, telisotuzumab, telisotuzumab vedotin, derlotuximab biotin, apolizumab, onartuzumab, bersanlimab, enlimomabpegol, rontalizumab, sifalimumab, talizumab, ganitumab, istiratumab, robatumumab, teprotumumab, figitumumab, ganitumab, istiratumab, robatumumab, teprotumumab, cixutumumab, dalotuzumab, xentuzumab, dusigitumab, canakinumab, ustekinumab, ustekinumab, ustekinumab, briakinumab, briakinumab, abrezckimab, lebrikizumab, romilkimab, TNX-650, tralokinumab, anrukinzumab, brodalumab, ixekizumab, netakimab, perakizumab, secukinumab, vunakizumab, afasevikumab, afasevikumab, bimekizumab, bimekizumab, remtolumab, bermckimab, lutikizumab, lutikizumab, gevokizumab, cergutuzumab amunaleukin, fletikumab, fezakinumab, brazikumab, guselkumab, mirikizumab, tildrakizumab, risankizumab, flotetuzumab, nemolizumab, pascolizumab, dupilumab, mepolizumab, reslizumab, clazakizumab, elsilimomab, olokizumab, sarilumab, siltuximab, sirukumab, vobarilizumab, tocilizumab, SA237, satralizumab, enokizumab, prezalizumab, natalizumab, abrilumab, abrilumab, vedolizumab, volociximab, tadocizumab, etaracizumab, etrolizumab, spesolimab, vatelizumab, erlizumab, lirilumab, relatlimab, cBR96-doxorubicinimmunoconjugate, odulimomab, efalizumab, ladiratuzumab vedotin, simtuzumab, samrotamab vedotin, aselizumab, lupartumab amadotin, imalumab, carlumab, imaprelimab, amatuximab, amatuximab, anetumab ravtansine, narnatumab, clivatuzumab tetraxetan, pemtumomab, gatipotuzumab, ensituximab, lemalesomab, sulesomab, enfortumab vedotin, racotumomab, monalizumab, brontictuzumab, tarextumab, vesencumab, oxelumab, gilvetmab, tislelizumab, dostarlimab, BCD-100, nivolumab, PDR001, pembrolizumab, pidilizumab, retifanlimab, spartalizumab, sintilimab, cemiplimab, olaratumab, tovetumab, rinucumab, atezolizumab, avelumab, durvalumab, lifastuzumab vedotin, bavituximab, acapatamab, capromab, rosopatamab, nezastomig, pasotuxizumab, pelgifatamab, voxalatamab, cofetuzumab pelidotin, denosumab, rosmantuzumab, cirmtuzumab, atinumab, indatuximab ravtansine, elotuzumab, sirtratumab vedotin, sonepcizumab, vandortuzumab vedotin, minretumomab, satumomab pendetide, maslimomab, ontuxizumab, tenatumomab, fresolimumab, metelimumab, lerdelimumab, tezepelumab, etigilimab, tiragotumab, placulumab, prezalumab, infliximab, nerelimomab, ozoralizumab, adalimumab, afelimomab, certolizumab pegol, golimumab, mapatumumab, conatumumab, lexatumumab, tigatuzumab, sacituzumab govitecan, votumumab, pogalizumab, letolizumab, pankomab, anatumomab mafenatox, enavatuzumab, flanvotumab, brolucizumab, ranibizumab, varisacumab, bevacizumab, faricimab, icrucumab, alacizumab pegol, ramucirumab, pritumumab, and onvatilimab;
[6349] VH3 comprises a heavy chain complementarity determining region 1 (HCDR1), HCDR2, and/or HCDR3 of an antibody selected from the group consisting of losatuxizumab vedotin, utomilumab, urelumab, oleclumab, naptumomab estafenatox, ascrinvacumab, pintumomab, tacatuzumab tetraxetan, nesvacumab, vanucizumab, timolumab, vapaliximab, vepalimomab, enapotamab vedotin, ianalumab, belimumab, tabalumab, tibulizumab, belantamab mafodotin, teclistamab, teclistamab, detumomab, nacolomab tafenatox, eculizumab, lendalizumab, pexelizumab, pozelimab, ravulizumab, tesidolumab, vilobelimab, abagovomab, igovomab, oregovomab, sofituzumab vedotin, cantuzumab mertansine, cantuzuma bravtansine, girentuximab, altumomab pentetate, arcitumomab, besilesomab, bertilimumab, plozalizumab, mogamulizumab, leronlimab, PRO140, rovelizumab, rovelizumab, talacotuzumab, benralizumab, tavolimab, vonlerolizumab, gavilimomab, ziralimumab, fanolesomab, ipilimumab, ruplizumab, toralizumab, dapirolizumab pegol, toralizumab, dapirolizumab pegol, ruplizumab, blinatumomab, inebilizumab, loncastuximab tesirine, SGN-CD19A, tafasitamab, taplitumomab paptox, XMAB-5574, Budoprutug, Obexelimab, duvortuxizumab, englumafusp alfa, Emfizatamab, zeripatamig, siplizumab, blontuvetmab, FBTA05, ibritumomab tiuxetan, obinutuzumab, ocaratuzumab, ocrelizumab, ofatumumab, rituximab, tositumomab, ublituximab, veltuzumab, divozilimab, eramkafusp alfa, ripertamab, zuberitamab, glofitamab, nofetumomab merpentan, samalizumab, imvotamab, odronextamab, plamotamab, bectumomab, inotuzumab ozogamicin, moxetumomab pasudotox, pinatuzumab vedotin, gomiliximab, lumiliximab, inolimomab, inolimomab, daclizumab, camidanluma btesirine, basiliximab, varlilumab, omburtamab, enoblituzumab, vopratelimab, lulizumabpegol, TGN1412, muromonab-CD3, otelixizumab, teplizumab, visilizumab, epcoritamab, epcoritamab, brentuximab vedotin, iratumumab, azintuxizumab vedotin, gemtuzumab ozogamicin, lintuzumab, vadastuximab talirine, naratuximab emtansine, otlertuzumab, lilotomab satetraxetan, tetulomab, daratumumab, isatuximab, foralumab, mosunetuzumab, mosunetuzumab, cedelizumab, ibalizumab, keliximab, priliximab, tregalizumab, zanolimumab, bleselumab, iscalimab, lucatumumab, ravagalimab, selicrelumab, teneliximab, vanalimab, abciximab, bivatuzumab, iomab-B, telimomab aritox, zolimomab aritox, abituzumab, intetumumab, alemtuzumab, tamtuvetmab, lorvotuzumab mertansine, itolizumab, cusatuzumab, vorsetuzumab mafodotin, milatuzumab, iladatuzumab vedotin, polatuzumab vedotin, galiximab, cibisatamab, zolbctuximab, naxitamab, tisotumab vedotin, olendalizumab, pamrevlumab, lacnotuzumab, cabiralizumab, emactuzumab, axatilimab, gimsilumab, lenzilumab, namilumab, tremelimumab, ulocuplumab, tepoditamab, rovalpituzumab tesirine, tarlatamab, demcizumab, navicixizumab, drozitumab, parsatuzumab, depatuxizumab mafodotin, modotuximab, carotuximab, adecatumumab, adecatumumab, oportuzumab monatox, solitomab, tucotuzumab celmoleukin, edrecolomab, catumaxomab, ifabotuzumab, fibatuzumab, zalutumumab, panitumumab, cetuximab, futuximab, imgatuzumab, laprituximab emtansine, matuzumab, necitumumab, nimotuzumab, tomuzotuximab, amivantamab, amivantamab, epitumomab cituxetan, sontuzumab, duligotuzumab, elgemtumab, lumretuzumab, patritumab, seribantumab, zenocutuzumab, sibrotuzumab, burosumab, aprutumab ixadotin, radretumab, pasotuxizumab, farletuzumab, mirvetuximab soravtansine, vantictumab, TRBS07, 3F8, dinutuximab, dinutuximab beta, ecromeximab, mitumomab, andecaliximab, capromab, codrituzumab, glembatumumab vedotin, talquetamab, talquetamab, trevogrumab, indusatumab vedotin, ficlatuzumab, rilotumumab, zatuximab, pentuzimab, pentuzimab, margetuximab, timigutuzumab, trastuzumab, trastuzumab duocarmazine, trastuzumab emtansine, gancotamab, pertuzumab, ertumaxomab, emibetuzumab, telisotuzumab, telisotuzumab vedotin, derlotuximab biotin, apolizumab, onartuzumab, bersanlimab, enlimomabpegol, rontalizumab, sifalimumab, talizumab, ganitumab, istiratumab, robatumumab, teprotumumab, figitumumab, ganitumab, istiratumab, robatumumab, teprotumumab, cixutumumab, dalotuzumab, xentuzumab, dusigitumab, canakinumab, ustekinumab, ustekinumab, ustekinumab, briakinumab, briakinumab, abrezekimab, lebrikizumab, romilkimab, TNX-650, tralokinumab, anrukinzumab, brodalumab, ixekizumab, netakimab, perakizumab, secukinumab, vunakizumab, afasevikumab, afasevikumab, bimekizumab, bimekizumab, remtolumab, bermekimab, lutikizumab, lutikizumab, gevokizumab, cergutuzumab amunaleukin, fletikumab, fezakinumab, brazikumab, guselkumab, mirikizumab, tildrakizumab, risankizumab, flotetuzumab, nemolizumab, pascolizumab, dupilumab, mepolizumab, reslizumab, clazakizumab, elsilimomab, olokizumab, sarilumab, siltuximab, sirukumab, vobarilizumab, tocilizumab, SA237, satralizumab, enokizumab, prezalizumab, natalizumab, abrilumab, abrilumab, vedolizumab, volociximab, tadocizumab, etaracizumab, etrolizumab, spesolimab, vatelizumab, erlizumab, lirilumab, relatlimab, cBR96-doxorubicinimmunoconjugate, odulimomab, efalizumab, ladiratuzumab vedotin, simtuzumab, samrotamab vedotin, aselizumab, lupartumab amadotin, imalumab, carlumab, imaprelimab, amatuximab, amatuximab, anetumab ravtansine, narnatumab, clivatuzumab tetraxetan, pemtumomab, gatipotuzumab, ensituximab, lemalesomab, sulesomab, enfortumab vedotin, racotumomab, monalizumab, brontictuzumab, tarextumab, vesencumab, oxelumab, gilvetmab, tislelizumab, dostarlimab, BCD-100, nivolumab, PDR001, pembrolizumab, pidilizumab, retifanlimab, spartalizumab, sintilimab, cemiplimab, olaratumab, tovetumab, rinucumab, atezolizumab, avelumab, durvalumab, lifastuzumab vedotin, bavituximab, acapatamab, capromab, rosopatamab, nezastomig, pasotuxizumab, pelgifatamab, voxalatamab, cofetuzumab pelidotin, denosumab, rosmantuzumab, cirmtuzumab, atinumab, indatuximab ravtansine, elotuzumab, sirtratumab vedotin, sonepcizumab, vandortuzumab vedotin, minretumomab, satumomab pendetide, maslimomab, ontuxizumab, tenatumomab, fresolimumab, metelimumab, lerdelimumab, tezepelumab, etigilimab, tiragotumab, placulumab, prezalumab, infliximab, nerelimomab, ozoralizumab, adalimumab, afelimomab, certolizumab pegol, golimumab, mapatumumab, conatumumab, lexatumumab, tigatuzumab, sacituzumab govitecan, votumumab, pogalizumab, letolizumab, pankomab, anatumomab mafenatox, enavatuzumab, flanvotumab, brolucizumab, ranibizumab, varisacumab, bevacizumab, faricimab, icrucumab, alacizumab pegol, ramucirumab, pritumumab, and onvatilimab; and/or
[6350] VH4 comprises a heavy chain complementarity determining region 1 (HCDR1), HCDR2, and/or HCDR3 of an antibody selected from the group consisting of losatuxizumab vedotin, utomilumab, urelumab, oleclumab, naptumomab estafenatox, ascrinvacumab, pintumomab, tacatuzumab tetraxetan, nesvacumab, vanucizumab, timolumab, vapaliximab, vepalimomab, enapotamab vedotin, ianalumab, belimumab, tabalumab, tibulizumab, belantamab mafodotin, teclistamab, teclistamab, detumomab, nacolomab tafenatox, eculizumab, lendalizumab, pexelizumab, pozelimab, ravulizumab, tesidolumab, vilobelimab, abagovomab, igovomab, oregovomab, sofituzumab vedotin, cantuzumab mertansine, cantuzuma bravtansine, girentuximab, altumomab pentetate, arcitumomab, besilesomab, bertilimumab, plozalizumab, mogamulizumab, leronlimab, PRO140, rovelizumab, rovelizumab, talacotuzumab, benralizumab, tavolimab, vonlerolizumab, gavilimomab, ziralimumab, fanolesomab, ipilimumab, ruplizumab, toralizumab, dapirolizumab pegol, toralizumab, dapirolizumab pegol, ruplizumab, blinatumomab, inebilizumab, loncastuximab tesirine, SGN-CD19A, tafasitamab, taplitumomab paptox, XMAB-5574, Budoprutug, Obexelimab, duvortuxizumab, englumafusp alfa, Emfizatamab, zeripatamig, siplizumab, blontuvetmab, FBTA05, ibritumomab tiuxetan, obinutuzumab, ocaratuzumab, ocrelizumab, ofatumumab, rituximab, tositumomab, ublituximab, veltuzumab, divozilimab, eramkafusp alfa, ripertamab, zuberitamab, glofitamab, nofetumomab merpentan, samalizumab, imvotamab, odronextamab, plamotamab, bectumomab, inotuzumab ozogamicin, moxetumomab pasudotox, pinatuzumab vedotin, gomiliximab, lumiliximab, inolimomab, inolimomab, daclizumab, camidanluma btesirine, basiliximab, varlilumab, omburtamab, enoblituzumab, vopratelimab, lulizumabpegol, TGN1412, muromonab-CD3, otelixizumab, teplizumab, visilizumab, epcoritamab, epcoritamab, brentuximab vedotin, iratumumab, azintuxizumab vedotin, gemtuzumab ozogamicin, lintuzumab, vadastuximab talirine, naratuximab emtansine, otlertuzumab, lilotomab satetraxetan, tetulomab, daratumumab, isatuximab, foralumab, mosunctuzumab, mosunetuzumab, cedelizumab, ibalizumab, keliximab, priliximab, tregalizumab, zanolimumab, bleselumab, iscalimab, lucatumumab, ravagalimab, selicrelumab, teneliximab, vanalimab, abciximab, bivatuzumab, iomab-B, telimomab aritox, zolimomab aritox, abituzumab, intetumumab, alemtuzumab, tamtuvetmab, lorvotuzumab mertansine, itolizumab, cusatuzumab, vorsetuzumab mafodotin, milatuzumab, iladatuzumab vedotin, polatuzumab vedotin, galiximab, cibisatamab, zolbetuximab, naxitamab, tisotumab vedotin, olendalizumab, pamrevlumab, lacnotuzumab, cabiralizumab, emactuzumab, axatilimab, gimsilumab, lenzilumab, namilumab, tremelimumab, ulocuplumab, tepoditamab, rovalpituzumab tesirine, tarlatamab, demcizumab, navicixizumab, drozitumab, parsatuzumab, depatuxizumab mafodotin, modotuximab, carotuximab, adecatumumab, adecatumumab, oportuzumab monatox, solitomab, tucotuzumab celmoleukin, edrecolomab, catumaxomab, ifabotuzumab, fibatuzumab, zalutumumab, panitumumab, cetuximab, futuximab, imgatuzumab, laprituximab emtansine, matuzumab, necitumumab, nimotuzumab, tomuzotuximab, amivantamab, amivantamab, epitumomab cituxetan, sontuzumab, duligotuzumab, elgemtumab, lumretuzumab, patritumab, seribantumab, zenocutuzumab, sibrotuzumab, burosumab, aprutumab ixadotin, radretumab, pasotuxizumab, farletuzumab, mirvetuximab soravtansine, vantictumab, TRBS07, 3F8, dinutuximab, dinutuximab beta, ecromeximab, mitumomab, andecaliximab, capromab, codrituzumab, glembatumumab vedotin, talquetamab, talquetamab, trevogrumab, indusatumab vedotin, ficlatuzumab, rilotumumab, zatuximab, pentuzimab, pentuzimab, margetuximab, timigutuzumab, trastuzumab, trastuzumab duocarmazine, trastuzumab emtansine, gancotamab, pertuzumab, ertumaxomab, emibetuzumab, telisotuzumab, telisotuzumab vedotin, derlotuximab biotin, apolizumab, onartuzumab, bersanlimab, enlimomabpegol, rontalizumab, sifalimumab, talizumab, ganitumab, istiratumab, robatumumab, teprotumumab, figitumumab, ganitumab, istiratumab, robatumumab, teprotumumab, cixutumumab, dalotuzumab, xentuzumab, dusigitumab, canakinumab, ustekinumab, ustekinumab, ustekinumab, briakinumab, briakinumab, abrezekimab, lebrikizumab, romilkimab, TNX-650, tralokinumab, anrukinzumab, brodalumab, ixekizumab, netakimab, perakizumab, secukinumab, vunakizumab, afasevikumab, afasevikumab, bimekizumab, bimekizumab, remtolumab, bermekimab, lutikizumab, lutikizumab, gevokizumab, cergutuzumab amunaleukin, fletikumab, fezakinumab, brazikumab, guselkumab, mirikizumab, tildrakizumab, risankizumab, flotetuzumab, nemolizumab, pascolizumab, dupilumab, mepolizumab, reslizumab, clazakizumab, elsilimomab, olokizumab, sarilumab, siltuximab, sirukumab, vobarilizumab, tocilizumab, SA237, satralizumab, enokizumab, prezalizumab, natalizumab, abrilumab, abrilumab, vedolizumab, volociximab, tadocizumab, etaracizumab, etrolizumab, spesolimab, vatelizumab, erlizumab, lirilumab, relatlimab, cBR96-doxorubicinimmunoconjugate, odulimomab, efalizumab, ladiratuzumab vedotin, simtuzumab, samrotamab vedotin, aselizumab, lupartumab amadotin, imalumab, carlumab, imaprelimab, amatuximab, amatuximab, anetumab ravtansine, narnatumab, clivatuzumab tetraxetan, pemtumomab, gatipotuzumab, ensituximab, lemalesomab, sulesomab, enfortumab vedotin, racotumomab, monalizumab, brontictuzumab, tarextumab, vesencumab, oxelumab, gilvetmab, tislelizumab, dostarlimab, BCD-100, nivolumab, PDR001, pembrolizumab, pidilizumab, retifanlimab, spartalizumab, sintilimab, cemiplimab, olaratumab, tovetumab, rinucumab, atezolizumab, avelumab, durvalumab, lifastuzumab vedotin, bavituximab, acapatamab, capromab, rosopatamab, nezastomig, pasotuxizumab, pelgifatamab, voxalatamab, cofetuzumab pelidotin, denosumab, rosmantuzumab, cirmtuzumab, atinumab, indatuximab ravtansine, elotuzumab, sirtratumab vedotin, sonepcizumab, vandortuzumab vedotin, minretumomab, satumomab pendetide, maslimomab, ontuxizumab, tenatumomab, fresolimumab, metelimumab, lerdelimumab, tezepelumab, etigilimab, tiragotumab, placulumab, prezalumab, infliximab, nerelimomab, ozoralizumab, adalimumab, afelimomab, certolizumab pegol, golimumab, mapatumumab, conatumumab, lexatumumab, tigatuzumab, sacituzumab govitecan, votumumab, pogalizumab, letolizumab, pankomab, anatumomab mafenatox, enavatuzumab, flanvotumab, brolucizumab, ranibizumab, varisacumab, bevacizumab, faricimab, icrucumab, alacizumab pegol, ramucirumab, pritumumab, and onvatilimab; or
[6351] (ii)
[6352] VL1 comprises a VL of an antibody selected from the group consisting of losatuxizumab vedotin, utomilumab, urelumab, oleclumab, naptumomab estafenatox, ascrinvacumab, pintumomab, tacatuzumab tetraxetan, nesvacumab, vanucizumab, timolumab, vapaliximab, vepalimomab, enapotamab vedotin, ianalumab, belimumab, tabalumab, tibulizumab, belantamab mafodotin, teclistamab, teclistamab, detumomab, nacolomab tafenatox, eculizumab, lendalizumab, pexelizumab, pozelimab, ravulizumab, tesidolumab, vilobelimab, abagovomab, igovomab, oregovomab, sofituzumab vedotin, cantuzumab mertansine, cantuzuma bravtansine, girentuximab, altumomab pentetate, arcitumomab, besilesomab, bertilimumab, plozalizumab, mogamulizumab, leronlimab, PRO140, rovelizumab, rovelizumab, talacotuzumab, benralizumab, tavolimab, vonlerolizumab, gavilimomab, ziralimumab, fanolesomab, ipilimumab, ruplizumab, toralizumab, dapirolizumab pegol, toralizumab, dapirolizumab pegol, ruplizumab, blinatumomab, inebilizumab, loncastuximab tesirine, SGN-CD19A, tafasitamab, taplitumomab paptox, XMAB-5574, Budoprutug, Obexelimab, duvortuxizumab, englumafusp alfa, Emfizatamab, zeripatamig, siplizumab, blontuvetmab, FBTA05, ibritumomab tiuxetan, obinutuzumab, ocaratuzumab, ocrelizumab, ofatumumab, rituximab, tositumomab, ublituximab, veltuzumab, divozilimab, eramkafusp alfa, ripertamab, zuberitamab, glofitamab, nofetumomab merpentan, samalizumab, imvotamab, odronextamab, plamotamab, bectumomab, inotuzumab ozogamicin, moxetumomab pasudotox, pinatuzumab vedotin, gomiliximab, lumiliximab, inolimomab, inolimomab, daclizumab, camidanluma btesirine, basiliximab, varlilumab, omburtamab, enoblituzumab, vopratelimab, lulizumabpegol, TGN1412, muromonab-CD3, otelixizumab, teplizumab, visilizumab, epcoritamab, epcoritamab, brentuximab vedotin, iratumumab, azintuxizumab vedotin, gemtuzumab ozogamicin, lintuzumab, vadastuximab talirine, naratuximab emtansine, otlertuzumab, lilotomab satetraxetan, tetulomab, daratumumab, isatuximab, foralumab, mosunctuzumab, mosunetuzumab, cedelizumab, ibalizumab, keliximab, priliximab, tregalizumab, zanolimumab, bleselumab, iscalimab, lucatumumab, ravagalimab, selicrelumab, teneliximab, vanalimab, abciximab, bivatuzumab, iomab-B, telimomab aritox, zolimomab aritox, abituzumab, intetumumab, alemtuzumab, tamtuvetmab, lorvotuzumab mertansine, itolizumab, cusatuzumab, vorsetuzumab mafodotin, milatuzumab, iladatuzumab vedotin, polatuzumab vedotin, galiximab, cibisatamab, zolbctuximab, naxitamab, tisotumab vedotin, olendalizumab, pamrevlumab, lacnotuzumab, cabiralizumab, emactuzumab, axatilimab, gimsilumab, lenzilumab, namilumab, tremelimumab, ulocuplumab, tepoditamab, rovalpituzumab tesirine, tarlatamab, demcizumab, navicixizumab, drozitumab, parsatuzumab, depatuxizumab mafodotin, modotuximab, carotuximab, adecatumumab, adecatumumab, oportuzumab monatox, solitomab, tucotuzumab celmoleukin, edrecolomab, catumaxomab, ifabotuzumab, fibatuzumab, zalutumumab, panitumumab, cetuximab, futuximab, imgatuzumab, laprituximab emtansine, matuzumab, necitumumab, nimotuzumab, tomuzotuximab, amivantamab, amivantamab, epitumomab cituxetan, sontuzumab, duligotuzumab, elgemtumab, lumretuzumab, patritumab, scribantumab, zenocutuzumab, sibrotuzumab, burosumab, aprutumab ixadotin, radretumab, pasotuxizumab, farletuzumab, mirvetuximab soravtansine, vantictumab, TRBS07, 3F8, dinutuximab, dinutuximab beta, ecromeximab, mitumomab, andecaliximab, capromab, codrituzumab, glembatumumab vedotin, talquetamab, talquetamab, trevogrumab, indusatumab vedotin, ficlatuzumab, rilotumumab, zatuximab, pentuzimab, pentuzimab, margetuximab, timigutuzumab, trastuzumab, trastuzumab duocarmazine, trastuzumab emtansine, gancotamab, pertuzumab, ertumaxomab, emibetuzumab, telisotuzumab, telisotuzumab vedotin, derlotuximab biotin, apolizumab, onartuzumab, bersanlimab, enlimomabpegol, rontalizumab, sifalimumab, talizumab, ganitumab, istiratumab, robatumumab, teprotumumab, figitumumab, ganitumab, istiratumab, robatumumab, teprotumumab, cixutumumab, dalotuzumab, xentuzumab, dusigitumab, canakinumab, ustekinumab, ustekinumab, ustekinumab, briakinumab, briakinumab, abrezekimab, lebrikizumab, romilkimab, TNX-650, tralokinumab, anrukinzumab, brodalumab, ixekizumab, netakimab, perakizumab, secukinumab, vunakizumab, afasevikumab, afasevikumab, bimekizumab, bimekizumab, remtolumab, bermekimab, lutikizumab, lutikizumab, gevokizumab, cergutuzumab amunaleukin, fletikumab, fezakinumab, brazikumab, guselkumab, mirikizumab, tildrakizumab, risankizumab, flotetuzumab, nemolizumab, pascolizumab, dupilumab, mepolizumab, reslizumab, clazakizumab, elsilimomab, olokizumab, sarilumab, siltuximab, sirukumab, vobarilizumab, tocilizumab, SA237, satralizumab, enokizumab, prezalizumab, natalizumab, abrilumab, abrilumab, vedolizumab, volociximab, tadocizumab, etaracizumab, etrolizumab, spesolimab, vatelizumab, erlizumab, lirilumab, relatlimab, cBR96-doxorubicinimmunoconjugate, odulimomab, efalizumab, ladiratuzumab vedotin, simtuzumab, samrotamab vedotin, aselizumab, lupartumab amadotin, imalumab, carlumab, imaprelimab, amatuximab, amatuximab, anetumab ravtansine, narnatumab, clivatuzumab tetraxetan, pemtumomab, gatipotuzumab, ensituximab, lemalesomab, sulesomab, enfortumab vedotin, racotumomab, monalizumab, brontictuzumab, tarextumab, vesencumab, oxelumab, gilvetmab, tislelizumab, dostarlimab, BCD-100, nivolumab, PDR001, pembrolizumab, pidilizumab, retifanlimab, spartalizumab, sintilimab, cemiplimab, olaratumab, tovetumab, rinucumab, atezolizumab, avelumab, durvalumab, lifastuzumab vedotin, bavituximab, acapatamab, capromab, rosopatamab, nezastomig, pasotuxizumab, pelgifatamab, voxalatamab, cofetuzumab pelidotin, denosumab, rosmantuzumab, cirmtuzumab, atinumab, indatuximab ravtansine, elotuzumab, sirtratumab vedotin, sonepcizumab, vandortuzumab vedotin, minretumomab, satumomab pendetide, maslimomab, ontuxizumab, tenatumomab, fresolimumab, metelimumab, lerdelimumab, tezepelumab, etigilimab, tiragotumab, placulumab, prezalumab, infliximab, nerelimomab, ozoralizumab, adalimumab, afelimomab, certolizumab pegol, golimumab, mapatumumab, conatumumab, lexatumumab, tigatuzumab, sacituzumab govitecan, votumumab, pogalizumab, letolizumab, pankomab, anatumomab mafenatox, enavatuzumab, flanvotumab, brolucizumab, ranibizumab, varisacumab, bevacizumab, faricimab, icrucumab, alacizumab pegol, ramucirumab, pritumumab, and onvatilimab;
[6353] VL2 comprises a VL of an antibody selected from the group consisting of losatuxizumab vedotin, utomilumab, urelumab, oleclumab, naptumomab estafenatox, ascrinvacumab, pintumomab, tacatuzumab tetraxetan, nesvacumab, vanucizumab, timolumab, vapaliximab, vepalimomab, enapotamab vedotin, ianalumab, belimumab, tabalumab, tibulizumab, belantamab mafodotin, teclistamab, teclistamab, detumomab, nacolomab tafenatox, eculizumab, lendalizumab, pexelizumab, pozelimab, ravulizumab, tesidolumab, vilobelimab, abagovomab, igovomab, oregovomab, sofituzumab vedotin, cantuzumab mertansine, cantuzuma bravtansine, girentuximab, altumomab pentetate, arcitumomab, besilesomab, bertilimumab, plozalizumab, mogamulizumab, leronlimab, PRO140, rovelizumab, rovelizumab, talacotuzumab, benralizumab, tavolimab, vonlerolizumab, gavilimomab, ziralimumab, fanolesomab, ipilimumab, ruplizumab, toralizumab, dapirolizumab pegol, toralizumab, dapirolizumab pegol, ruplizumab, blinatumomab, inebilizumab, loncastuximab tesirine, SGN-CD19A, tafasitamab, taplitumomab paptox, XMAB-5574, Budoprutug, Obexelimab, duvortuxizumab, englumafusp alfa, Emfizatamab, zeripatamig, siplizumab, blontuvetmab, FBTA05, ibritumomab tiuxetan, obinutuzumab, ocaratuzumab, ocrelizumab, ofatumumab, rituximab, tositumomab, ublituximab, veltuzumab, divozilimab, eramkafusp alfa, ripertamab, zuberitamab, glofitamab, nofetumomab merpentan, samalizumab, imvotamab, odronextamab, plamotamab, bectumomab, inotuzumab ozogamicin, moxetumomab pasudotox, pinatuzumab vedotin, gomiliximab, lumiliximab, inolimomab, inolimomab, daclizumab, camidanluma btesirine, basiliximab, varlilumab, omburtamab, enoblituzumab, vopratelimab, lulizumabpegol, TGN1412, muromonab-CD3, otelixizumab, teplizumab, visilizumab, epcoritamab, epcoritamab, brentuximab vedotin, iratumumab, azintuxizumab vedotin, gemtuzumab ozogamicin, lintuzumab, vadastuximab talirine, naratuximab emtansine, otlertuzumab, lilotomab satetraxetan, tetulomab, daratumumab, isatuximab, foralumab, mosunetuzumab, mosunetuzumab, cedelizumab, ibalizumab, keliximab, priliximab, tregalizumab, zanolimumab, bleselumab, iscalimab, lucatumumab, ravagalimab, selicrelumab, teneliximab, vanalimab, abciximab, bivatuzumab, iomab-B, telimomab aritox, zolimomab aritox, abituzumab, intetumumab, alemtuzumab, tamtuvetmab, lorvotuzumab mertansine, itolizumab, cusatuzumab, vorsetuzumab mafodotin, milatuzumab, iladatuzumab vedotin, polatuzumab vedotin, galiximab, cibisatamab, zolbetuximab, naxitamab, tisotumab vedotin, olendalizumab, pamrevlumab, lacnotuzumab, cabiralizumab, emactuzumab, axatilimab, gimsilumab, lenzilumab, namilumab, tremelimumab, ulocuplumab, tepoditamab, rovalpituzumab tesirine, tarlatamab, demcizumab, navicixizumab, drozitumab, parsatuzumab, depatuxizumab mafodotin, modotuximab, carotuximab, adecatumumab, adecatumumab, oportuzumab monatox, solitomab, tucotuzumab celmoleukin, edrecolomab, catumaxomab, ifabotuzumab, fibatuzumab, zalutumumab, panitumumab, cetuximab, futuximab, imgatuzumab, laprituximab emtansine, matuzumab, necitumumab, nimotuzumab, tomuzotuximab, amivantamab, amivantamab, epitumomab cituxetan, sontuzumab, duligotuzumab, elgemtumab, lumretuzumab, patritumab, seribantumab, zenocutuzumab, sibrotuzumab, burosumab, aprutumab ixadotin, radretumab, pasotuxizumab, farletuzumab, mirvetuximab soravtansine, vantictumab, TRBS07, 3F8, dinutuximab, dinutuximab beta, ecromeximab, mitumomab, andecaliximab, capromab, codrituzumab, glembatumumab vedotin, talquetamab, talquetamab, trevogrumab, indusatumab vedotin, ficlatuzumab, rilotumumab, zatuximab, pentuzimab, pentuzimab, margetuximab, timigutuzumab, trastuzumab, trastuzumab duocarmazine, trastuzumab emtansine, gancotamab, pertuzumab, ertumaxomab, emibetuzumab, telisotuzumab, telisotuzumab vedotin, derlotuximab biotin, apolizumab, onartuzumab, bersanlimab, enlimomabpegol, rontalizumab, sifalimumab, talizumab, ganitumab, istiratumab, robatumumab, teprotumumab, figitumumab, ganitumab, istiratumab, robatumumab, teprotumumab, cixutumumab, dalotuzumab, xentuzumab, dusigitumab, canakinumab, ustekinumab, ustekinumab, ustekinumab, briakinumab, briakinumab, abrezekimab, lebrikizumab, romilkimab, TNX-650, tralokinumab, anrukinzumab, brodalumab, ixekizumab, netakimab, perakizumab, secukinumab, vunakizumab, afasevikumab, afasevikumab, bimekizumab, bimekizumab, remtolumab, bermckimab, lutikizumab, lutikizumab, gevokizumab, cergutuzumab amunaleukin, fletikumab, fezakinumab, brazikumab, guselkumab, mirikizumab, tildrakizumab, risankizumab, flotetuzumab, nemolizumab, pascolizumab, dupilumab, mepolizumab, reslizumab, clazakizumab, elsilimomab, olokizumab, sarilumab, siltuximab, sirukumab, vobarilizumab, tocilizumab, SA237, satralizumab, enokizumab, prezalizumab, natalizumab, abrilumab, abrilumab, vedolizumab, volociximab, tadocizumab, etaracizumab, etrolizumab, spesolimab, vatelizumab, erlizumab, lirilumab, relatlimab, cBR96-doxorubicinimmunoconjugate, odulimomab, efalizumab, ladiratuzumab vedotin, simtuzumab, samrotamab vedotin, asclizumab, lupartumab amadotin, imalumab, carlumab, imaprelimab, amatuximab, amatuximab, anetumab ravtansine, narnatumab, clivatuzumab tetraxetan, pemtumomab, gatipotuzumab, ensituximab, lemalesomab, sulesomab, enfortumab vedotin, racotumomab, monalizumab, brontictuzumab, tarextumab, vesencumab, oxelumab, gilvetmab, tislelizumab, dostarlimab, BCD-100, nivolumab, PDR001, pembrolizumab, pidilizumab, retifanlimab, spartalizumab, sintilimab, cemiplimab, olaratumab, tovetumab, rinucumab, atezolizumab, avelumab, durvalumab, lifastuzumab vedotin, bavituximab, acapatamab, capromab, rosopatamab, nezastomig, pasotuxizumab, pelgifatamab, voxalatamab, cofetuzumab pelidotin, denosumab, rosmantuzumab, cirmtuzumab, atinumab, indatuximab ravtansine, elotuzumab, sirtratumab vedotin, sonepcizumab, vandortuzumab vedotin, minretumomab, satumomab pendetide, maslimomab, ontuxizumab, tenatumomab, fresolimumab, metelimumab, lerdelimumab, tezepelumab, etigilimab, tiragotumab, placulumab, prezalumab, infliximab, nerelimomab, ozoralizumab, adalimumab, afelimomab, certolizumab pegol, golimumab, mapatumumab, conatumumab, lexatumumab, tigatuzumab, sacituzumab govitecan, votumumab, pogalizumab, letolizumab, pankomab, anatumomab mafenatox, enavatuzumab, flanvotumab, brolucizumab, ranibizumab, varisacumab, bevacizumab, faricimab, icrucumab, alacizumab pegol, ramucirumab, pritumumab, and onvatilimab;
[6354] VL3 comprises a VL of an antibody selected from the group consisting of losatuxizumab vedotin, utomilumab, urelumab, oleclumab, naptumomab estafenatox, ascrinvacumab, pintumomab, tacatuzumab tetraxetan, nesvacumab, vanucizumab, timolumab, vapaliximab, vepalimomab, enapotamab vedotin, ianalumab, belimumab, tabalumab, tibulizumab, belantamab mafodotin, teclistamab, teclistamab, detumomab, nacolomab tafenatox, eculizumab, lendalizumab, pexelizumab, pozelimab, ravulizumab, tesidolumab, vilobelimab, abagovomab, igovomab, oregovomab, sofituzumab vedotin, cantuzumab mertansine, cantuzuma bravtansine, girentuximab, altumomab pentetate, arcitumomab, besilesomab, bertilimumab, plozalizumab, mogamulizumab, leronlimab, PRO140, rovelizumab, rovelizumab, talacotuzumab, benralizumab, tavolimab, vonlerolizumab, gavilimomab, ziralimumab, fanolesomab, ipilimumab, ruplizumab, toralizumab, dapirolizumab pegol, toralizumab, dapirolizumab pegol, ruplizumab, blinatumomab, inebilizumab, loncastuximab tesirine, SGN-CD19A, tafasitamab, taplitumomab paptox, XMAB-5574, Budoprutug, Obexelimab, duvortuxizumab, englumafusp alfa, Emfizatamab, zcripatamig, siplizumab, blontuvetmab, FBTA05, ibritumomab tiuxetan, obinutuzumab, ocaratuzumab, ocrelizumab, ofatumumab, rituximab, tositumomab, ublituximab, veltuzumab, divozilimab, eramkafusp alfa, ripertamab, zuberitamab, glofitamab, nofetumomab merpentan, samalizumab, imvotamab, odronextamab, plamotamab, bectumomab, inotuzumab ozogamicin, moxetumomab pasudotox, pinatuzumab vedotin, gomiliximab, lumiliximab, inolimomab, inolimomab, daclizumab, camidanluma btesirine, basiliximab, varlilumab, omburtamab, enoblituzumab, vopratelimab, lulizumabpegol, TGN1412, muromonab-CD3, otelixizumab, teplizumab, visilizumab, epcoritamab, epcoritamab, brentuximab vedotin, iratumumab, azintuxizumab vedotin, gemtuzumab ozogamicin, lintuzumab, vadastuximab talirine, naratuximab emtansine, otlertuzumab, lilotomab satetraxetan, tetulomab, daratumumab, isatuximab, foralumab, mosunetuzumab, mosunetuzumab, cedelizumab, ibalizumab, keliximab, priliximab, tregalizumab, zanolimumab, bleselumab, iscalimab, lucatumumab, ravagalimab, selicrelumab, teneliximab, vanalimab, abciximab, bivatuzumab, iomab-B, telimomab aritox, zolimomab aritox, abituzumab, intetumumab, alemtuzumab, tamtuvetmab, lorvotuzumab mertansine, itolizumab, cusatuzumab, vorsetuzumab mafodotin, milatuzumab, iladatuzumab vedotin, polatuzumab vedotin, galiximab, cibisatamab, zolbctuximab, naxitamab, tisotumab vedotin, olendalizumab, pamrevlumab, lacnotuzumab, cabiralizumab, emactuzumab, axatilimab, gimsilumab, lenzilumab, namilumab, tremelimumab, ulocuplumab, tepoditamab, rovalpituzumab tesirine, tarlatamab, demcizumab, navicixizumab, drozitumab, parsatuzumab, depatuxizumab mafodotin, modotuximab, carotuximab, adecatumumab, adecatumumab, oportuzumab monatox, solitomab, tucotuzumab celmoleukin, edrecolomab, catumaxomab, ifabotuzumab, fibatuzumab, zalutumumab, panitumumab, cetuximab, futuximab, imgatuzumab, laprituximab emtansine, matuzumab, necitumumab, nimotuzumab, tomuzotuximab, amivantamab, amivantamab, epitumomab cituxetan, sontuzumab, duligotuzumab, elgemtumab, lumretuzumab, patritumab, seribantumab, zenocutuzumab, sibrotuzumab, burosumab, aprutumab ixadotin, radretumab, pasotuxizumab, farletuzumab, mirvetuximab soravtansine, vantictumab, TRBS07, 3F8, dinutuximab, dinutuximab beta, ecromeximab, mitumomab, andecaliximab, capromab, codrituzumab, glembatumumab vedotin, talquetamab, talquetamab, trevogrumab, indusatumab vedotin, ficlatuzumab, rilotumumab, zatuximab, pentuzimab, pentuzimab, margetuximab, timigutuzumab, trastuzumab, trastuzumab duocarmazine, trastuzumab emtansine, gancotamab, pertuzumab, ertumaxomab, emibetuzumab, telisotuzumab, telisotuzumab vedotin, derlotuximab biotin, apolizumab, onartuzumab, bersanlimab, enlimomabpegol, rontalizumab, sifalimumab, talizumab, ganitumab, istiratumab, robatumumab, teprotumumab, figitumumab, ganitumab, istiratumab, robatumumab, teprotumumab, cixutumumab, dalotuzumab, xentuzumab, dusigitumab, canakinumab, ustekinumab, ustekinumab, ustekinumab, briakinumab, briakinumab, abrezekimab, lebrikizumab, romilkimab, TNX-650, tralokinumab, anrukinzumab, brodalumab, ixekizumab, netakimab, perakizumab, secukinumab, vunakizumab, afasevikumab, afasevikumab, bimekizumab, bimekizumab, remtolumab, bermekimab, lutikizumab, lutikizumab, gevokizumab, cergutuzumab amunaleukin, fletikumab, fezakinumab, brazikumab, guselkumab, mirikizumab, tildrakizumab, risankizumab, flotetuzumab, nemolizumab, pascolizumab, dupilumab, mepolizumab, reslizumab, clazakizumab, elsilimomab, olokizumab, sarilumab, siltuximab, sirukumab, vobarilizumab, tocilizumab, SA237, satralizumab, enokizumab, prezalizumab, natalizumab, abrilumab, abrilumab, vedolizumab, volociximab, tadocizumab, etaracizumab, etrolizumab, spesolimab, vatelizumab, erlizumab, lirilumab, relatlimab, cBR96-doxorubicinimmunoconjugate, odulimomab, efalizumab, ladiratuzumab vedotin, simtuzumab, samrotamab vedotin, asclizumab, lupartumab amadotin, imalumab, carlumab, imaprelimab, amatuximab, amatuximab, anetumab ravtansine, narnatumab, clivatuzumab tetraxetan, pemtumomab, gatipotuzumab, ensituximab, lemalesomab, sulesomab, enfortumab vedotin, racotumomab, monalizumab, brontictuzumab, tarextumab, vesencumab, oxelumab, gilvetmab, tislelizumab, dostarlimab, BCD-100, nivolumab, PDR001, pembrolizumab, pidilizumab, retifanlimab, spartalizumab, sintilimab, cemiplimab, olaratumab, tovetumab, rinucumab, atezolizumab, avelumab, durvalumab, lifastuzumab vedotin, bavituximab, acapatamab, capromab, rosopatamab, nezastomig, pasotuxizumab, pelgifatamab, voxalatamab, cofetuzumab pelidotin, denosumab, rosmantuzumab, cirmtuzumab, atinumab, indatuximab ravtansine, elotuzumab, sirtratumab vedotin, sonepcizumab, vandortuzumab vedotin, minretumomab, satumomab pendetide, maslimomab, ontuxizumab, tenatumomab, fresolimumab, metelimumab, lerdelimumab, tezepelumab, etigilimab, tiragotumab, placulumab, prezalumab, infliximab, nerelimomab, ozoralizumab, adalimumab, afelimomab, certolizumab pegol, golimumab, mapatumumab, conatumumab, lexatumumab, tigatuzumab, sacituzumab govitecan, votumumab, pogalizumab, letolizumab, pankomab, anatumomab mafenatox, enavatuzumab, flanvotumab, brolucizumab, ranibizumab, varisacumab, bevacizumab, faricimab, icrucumab, alacizumab pegol, ramucirumab, pritumumab, and onvatilimab;
[6355] VL4 comprises a VL of an antibody selected from the group consisting of losatuxizumab vedotin, utomilumab, urelumab, oleclumab, naptumomab estafenatox, ascrinvacumab, pintumomab, tacatuzumab tetraxetan, nesvacumab, vanucizumab, timolumab, vapaliximab, vepalimomab, enapotamab vedotin, ianalumab, belimumab, tabalumab, tibulizumab, belantamab mafodotin, teclistamab, teclistamab, detumomab, nacolomab tafenatox, eculizumab, lendalizumab, pexelizumab, pozelimab, ravulizumab, tesidolumab, vilobelimab, abagovomab, igovomab, oregovomab, sofituzumab vedotin, cantuzumab mertansine, cantuzuma bravtansine, girentuximab, altumomab pentetate, arcitumomab, besilesomab, bertilimumab, plozalizumab, mogamulizumab, leronlimab, PRO140, rovelizumab, rovelizumab, talacotuzumab, benralizumab, tavolimab, vonlerolizumab, gavilimomab, ziralimumab, fanolesomab, ipilimumab, ruplizumab, toralizumab, dapirolizumab pegol, toralizumab, dapirolizumab pegol, ruplizumab, blinatumomab, inebilizumab, loncastuximab tesirine, SGN-CD19A, tafasitamab, taplitumomab paptox, XMAB-5574, Budoprutug, Obexelimab, duvortuxizumab, englumafusp alfa, Emfizatamab, zeripatamig, siplizumab, blontuvetmab, FBTA05, ibritumomab tiuxetan, obinutuzumab, ocaratuzumab, ocrelizumab, ofatumumab, rituximab, tositumomab, ublituximab, veltuzumab, divozilimab, eramkafusp alfa, ripertamab, zuberitamab, glofitamab, nofetumomab merpentan, samalizumab, imvotamab, odronextamab, plamotamab, bectumomab, inotuzumab ozogamicin, moxetumomab pasudotox, pinatuzumab vedotin, gomiliximab, lumiliximab, inolimomab, inolimomab, daclizumab, camidanluma btesirine, basiliximab, varlilumab, omburtamab, enoblituzumab, vopratelimab, lulizumabpegol, TGN1412, muromonab-CD3, otelixizumab, teplizumab, visilizumab, epcoritamab, epcoritamab, brentuximab vedotin, iratumumab, azintuxizumab vedotin, gemtuzumab ozogamicin, lintuzumab, vadastuximab talirine, naratuximab emtansine, otlertuzumab, lilotomab satetraxetan, tetulomab, daratumumab, isatuximab, foralumab, mosunctuzumab, mosunetuzumab, cedelizumab, ibalizumab, keliximab, priliximab, tregalizumab, zanolimumab, bleselumab, iscalimab, lucatumumab, ravagalimab, selicrelumab, teneliximab, vanalimab, abciximab, bivatuzumab, iomab-B, telimomab aritox, zolimomab aritox, abituzumab, intetumumab, alemtuzumab, tamtuvetmab, lorvotuzumab mertansine, itolizumab, cusatuzumab, vorsetuzumab mafodotin, milatuzumab, iladatuzumab vedotin, polatuzumab vedotin, galiximab, cibisatamab, zolbetuximab, naxitamab, tisotumab vedotin, olendalizumab, pamrevlumab, lacnotuzumab, cabiralizumab, emactuzumab, axatilimab, gimsilumab, lenzilumab, namilumab, tremelimumab, ulocuplumab, tepoditamab, rovalpituzumab tesirine, tarlatamab, demcizumab, navicixizumab, drozitumab, parsatuzumab, depatuxizumab mafodotin, modotuximab, carotuximab, adecatumumab, adecatumumab, oportuzumab monatox, solitomab, tucotuzumab celmoleukin, edrecolomab, catumaxomab, ifabotuzumab, fibatuzumab, zalutumumab, panitumumab, cetuximab, futuximab, imgatuzumab, laprituximab emtansine, matuzumab, necitumumab, nimotuzumab, tomuzotuximab, amivantamab, amivantamab, epitumomab cituxetan, sontuzumab, duligotuzumab, elgemtumab, lumretuzumab, patritumab, seribantumab, zenocutuzumab, sibrotuzumab, burosumab, aprutumab ixadotin, radretumab, pasotuxizumab, farletuzumab, mirvetuximab soravtansine, vantictumab, TRBS07, 3F8, dinutuximab, dinutuximab beta, ecromeximab, mitumomab, andecaliximab, capromab, codrituzumab, glembatumumab vedotin, talquetamab, talquetamab, trevogrumab, indusatumab vedotin, ficlatuzumab, rilotumumab, zatuximab, pentuzimab, pentuzimab, margetuximab, timigutuzumab, trastuzumab, trastuzumab duocarmazine, trastuzumab emtansine, gancotamab, pertuzumab, ertumaxomab, emibetuzumab, telisotuzumab, telisotuzumab vedotin, derlotuximab biotin, apolizumab, onartuzumab, bersanlimab, enlimomabpegol, rontalizumab, sifalimumab, talizumab, ganitumab, istiratumab, robatumumab, teprotumumab, figitumumab, ganitumab, istiratumab, robatumumab, teprotumumab, cixutumumab, dalotuzumab, xentuzumab, dusigitumab, canakinumab, ustekinumab, ustekinumab, ustekinumab, briakinumab, briakinumab, abrezekimab, lebrikizumab, romilkimab, TNX-650, tralokinumab, anrukinzumab, brodalumab, ixekizumab, netakimab, perakizumab, secukinumab, vunakizumab, afasevikumab, afasevikumab, bimekizumab, bimekizumab, remtolumab, bermekimab, lutikizumab, lutikizumab, gevokizumab, cergutuzumab amunaleukin, fletikumab, fezakinumab, brazikumab, guselkumab, mirikizumab, tildrakizumab, risankizumab, flotetuzumab, nemolizumab, pascolizumab, dupilumab, mepolizumab, reslizumab, clazakizumab, elsilimomab, olokizumab, sarilumab, siltuximab, sirukumab, vobarilizumab, tocilizumab, SA237, satralizumab, enokizumab, prezalizumab, natalizumab, abrilumab, abrilumab, vedolizumab, volociximab, tadocizumab, etaracizumab, etrolizumab, spesolimab, vatelizumab, erlizumab, lirilumab, relatlimab, cBR96-doxorubicinimmunoconjugate, odulimomab, efalizumab, ladiratuzumab vedotin, simtuzumab, samrotamab vedotin, aselizumab, lupartumab amadotin, imalumab, carlumab, imaprelimab, amatuximab, amatuximab, anetumab ravtansine, narnatumab, clivatuzumab tetraxetan, pemtumomab, gatipotuzumab, ensituximab, lemalesomab, sulesomab, enfortumab vedotin, racotumomab, monalizumab, brontictuzumab, tarextumab, vesencumab, oxelumab, gilvetmab, tislelizumab, dostarlimab, BCD-100, nivolumab, PDR001, pembrolizumab, pidilizumab, retifanlimab, spartalizumab, sintilimab, cemiplimab, olaratumab, tovetumab, rinucumab, atezolizumab, avelumab, durvalumab, lifastuzumab vedotin, bavituximab, acapatamab, capromab, rosopatamab, nezastomig, pasotuxizumab, pelgifatamab, voxalatamab, cofetuzumab pelidotin, denosumab, rosmantuzumab, cirmtuzumab, atinumab, indatuximab ravtansine, elotuzumab, sirtratumab vedotin, sonepcizumab, vandortuzumab vedotin, minretumomab, satumomab pendetide, maslimomab, ontuxizumab, tenatumomab, fresolimumab, metelimumab, lerdelimumab, tezepelumab, etigilimab, tiragotumab, placulumab, prezalumab, infliximab, nerelimomab, ozoralizumab, adalimumab, afelimomab, certolizumab pegol, golimumab, mapatumumab, conatumumab, lexatumumab, tigatuzumab, sacituzumab govitecan, votumumab, pogalizumab, letolizumab, pankomab, anatumomab mafenatox, enavatuzumab, flanvotumab, brolucizumab, ranibizumab, varisacumab, bevacizumab, faricimab, icrucumab, alacizumab pegol, ramucirumab, pritumumab, and onvatilimab;
[6356] VH1 comprises a VH of an antibody selected from the group consisting of losatuxizumab vedotin, utomilumab, urelumab, oleclumab, naptumomab estafenatox, ascrinvacumab, pintumomab, tacatuzumab tetraxetan, nesvacumab, vanucizumab, timolumab, vapaliximab, vepalimomab, enapotamab vedotin, ianalumab, belimumab, tabalumab, tibulizumab, belantamab mafodotin, teclistamab, teclistamab, detumomab, nacolomab tafenatox, eculizumab, lendalizumab, pexelizumab, pozelimab, ravulizumab, tesidolumab, vilobelimab, abagovomab, igovomab, oregovomab, sofituzumab vedotin, cantuzumab mertansine, cantuzuma bravtansine, girentuximab, altumomab pentetate, arcitumomab, besilesomab, bertilimumab, plozalizumab, mogamulizumab, leronlimab, PRO140, rovelizumab, rovelizumab, talacotuzumab, benralizumab, tavolimab, vonlerolizumab, gavilimomab, ziralimumab, fanolesomab, ipilimumab, ruplizumab, toralizumab, dapirolizumab pegol, toralizumab, dapirolizumab pegol, ruplizumab, blinatumomab, inebilizumab, loncastuximab tesirine, SGN-CD19A, tafasitamab, taplitumomab paptox, XMAB-5574, Budoprutug, Obexelimab, duvortuxizumab, englumafusp alfa, Emfizatamab, zeripatamig, siplizumab, blontuvetmab, FBTA05, ibritumomab tiuxetan, obinutuzumab, ocaratuzumab, ocrelizumab, ofatumumab, rituximab, tositumomab, ublituximab, veltuzumab, divozilimab, eramkafusp alfa, ripertamab, zuberitamab, glofitamab, nofetumomab merpentan, samalizumab, imvotamab, odronextamab, plamotamab, bectumomab, inotuzumab ozogamicin, moxetumomab pasudotox, pinatuzumab vedotin, gomiliximab, lumiliximab, inolimomab, inolimomab, daclizumab, camidanluma btesirine, basiliximab, varlilumab, omburtamab, enoblituzumab, vopratelimab, lulizumabpegol, TGN1412, muromonab-CD3, otelixizumab, teplizumab, visilizumab, epcoritamab, epcoritamab, brentuximab vedotin, iratumumab, azintuxizumab vedotin, gemtuzumab ozogamicin, lintuzumab, vadastuximab talirine, naratuximab emtansine, otlertuzumab, lilotomab satetraxetan, tetulomab, daratumumab, isatuximab, foralumab, mosunctuzumab, mosunetuzumab, cedelizumab, ibalizumab, keliximab, priliximab, tregalizumab, zanolimumab, bleselumab, iscalimab, lucatumumab, ravagalimab, selicrelumab, teneliximab, vanalimab, abciximab, bivatuzumab, iomab-B, telimomab aritox, zolimomab aritox, abituzumab, intetumumab, alemtuzumab, tamtuvetmab, lorvotuzumab mertansine, itolizumab, cusatuzumab, vorsetuzumab mafodotin, milatuzumab, iladatuzumab vedotin, polatuzumab vedotin, galiximab, cibisatamab, zolbctuximab, naxitamab, tisotumab vedotin, olendalizumab, pamrevlumab, lacnotuzumab, cabiralizumab, emactuzumab, axatilimab, gimsilumab, lenzilumab, namilumab, tremelimumab, ulocuplumab, tepoditamab, rovalpituzumab tesirine, tarlatamab, demcizumab, navicixizumab, drozitumab, parsatuzumab, depatuxizumab mafodotin, modotuximab, carotuximab, adecatumumab, adecatumumab, oportuzumab monatox, solitomab, tucotuzumab celmoleukin, edrecolomab, catumaxomab, ifabotuzumab, fibatuzumab, zalutumumab, panitumumab, cetuximab, futuximab, imgatuzumab, laprituximab emtansine, matuzumab, necitumumab, nimotuzumab, tomuzotuximab, amivantamab, amivantamab, epitumomab cituxetan, sontuzumab, duligotuzumab, elgemtumab, lumretuzumab, patritumab, scribantumab, zenocutuzumab, sibrotuzumab, burosumab, aprutumab ixadotin, radretumab, pasotuxizumab, farletuzumab, mirvetuximab soravtansine, vantictumab, TRBS07, 3F8, dinutuximab, dinutuximab beta, ecromeximab, mitumomab, andecaliximab, capromab, codrituzumab, glembatumumab vedotin, talquetamab, talquetamab, trevogrumab, indusatumab vedotin, ficlatuzumab, rilotumumab, zatuximab, pentuzimab, pentuzimab, margetuximab, timigutuzumab, trastuzumab, trastuzumab duocarmazine, trastuzumab emtansine, gancotamab, pertuzumab, ertumaxomab, emibetuzumab, telisotuzumab, telisotuzumab vedotin, derlotuximab biotin, apolizumab, onartuzumab, bersanlimab, enlimomabpegol, rontalizumab, sifalimumab, talizumab, ganitumab, istiratumab, robatumumab, teprotumumab, figitumumab, ganitumab, istiratumab, robatumumab, teprotumumab, cixutumumab, dalotuzumab, xentuzumab, dusigitumab, canakinumab, ustekinumab, ustekinumab, ustekinumab, briakinumab, briakinumab, abrezekimab, lebrikizumab, romilkimab, TNX-650, tralokinumab, anrukinzumab, brodalumab, ixekizumab, netakimab, perakizumab, secukinumab, vunakizumab, afasevikumab, afasevikumab, bimekizumab, bimekizumab, remtolumab, bermekimab, lutikizumab, lutikizumab, gevokizumab, cergutuzumab amunaleukin, fletikumab, fezakinumab, brazikumab, guselkumab, mirikizumab, tildrakizumab, risankizumab, flotetuzumab, nemolizumab, pascolizumab, dupilumab, mepolizumab, reslizumab, clazakizumab, elsilimomab, olokizumab, sarilumab, siltuximab, sirukumab, vobarilizumab, tocilizumab, SA237, satralizumab, enokizumab, prezalizumab, natalizumab, abrilumab, abrilumab, vedolizumab, volociximab, tadocizumab, etaracizumab, etrolizumab, spesolimab, vatelizumab, erlizumab, lirilumab, relatlimab, cBR96-doxorubicinimmunoconjugate, odulimomab, efalizumab, ladiratuzumab vedotin, simtuzumab, samrotamab vedotin, aselizumab, lupartumab amadotin, imalumab, carlumab, imaprelimab, amatuximab, amatuximab, anetumab ravtansine, narnatumab, clivatuzumab tetraxetan, pemtumomab, gatipotuzumab, ensituximab, lemalesomab, sulesomab, enfortumab vedotin, racotumomab, monalizumab, brontictuzumab, tarextumab, vesencumab, oxelumab, gilvetmab, tislelizumab, dostarlimab, BCD-100, nivolumab, PDR001, pembrolizumab, pidilizumab, retifanlimab, spartalizumab, sintilimab, cemiplimab, olaratumab, tovetumab, rinucumab, atezolizumab, avelumab, durvalumab, lifastuzumab vedotin, bavituximab, acapatamab, capromab, rosopatamab, nezastomig, pasotuxizumab, pelgifatamab, voxalatamab, cofetuzumab pelidotin, denosumab, rosmantuzumab, cirmtuzumab, atinumab, indatuximab ravtansine, elotuzumab, sirtratumab vedotin, sonepcizumab, vandortuzumab vedotin, minretumomab, satumomab pendetide, maslimomab, ontuxizumab, tenatumomab, fresolimumab, metelimumab, lerdelimumab, tezepelumab, etigilimab, tiragotumab, placulumab, prezalumab, infliximab, nerelimomab, ozoralizumab, adalimumab, afelimomab, certolizumab pegol, golimumab, mapatumumab, conatumumab, lexatumumab, tigatuzumab, sacituzumab govitecan, votumumab, pogalizumab, letolizumab, pankomab, anatumomab mafenatox, enavatuzumab, flanvotumab, brolucizumab, ranibizumab, varisacumab, bevacizumab, faricimab, icrucumab, alacizumab pegol, ramucirumab, pritumumab, and onvatilimab;
[6357] VH2 comprises a VH of an antibody selected from the group consisting of losatuxizumab vedotin, utomilumab, urelumab, oleclumab, naptumomab estafenatox, ascrinvacumab, pintumomab, tacatuzumab tetraxetan, nesvacumab, vanucizumab, timolumab, vapaliximab, vepalimomab, enapotamab vedotin, ianalumab, belimumab, tabalumab, tibulizumab, belantamab mafodotin, teclistamab, teclistamab, detumomab, nacolomab tafenatox, eculizumab, lendalizumab, pexelizumab, pozelimab, ravulizumab, tesidolumab, vilobelimab, abagovomab, igovomab, oregovomab, sofituzumab vedotin, cantuzumab mertansine, cantuzuma bravtansine, girentuximab, altumomab pentetate, arcitumomab, besilesomab, bertilimumab, plozalizumab, mogamulizumab, leronlimab, PRO140, rovelizumab, rovelizumab, talacotuzumab, benralizumab, tavolimab, vonlerolizumab, gavilimomab, ziralimumab, fanolesomab, ipilimumab, ruplizumab, toralizumab, dapirolizumab pegol, toralizumab, dapirolizumab pegol, ruplizumab, blinatumomab, inebilizumab, loncastuximab tesirine, SGN-CD19A, tafasitamab, taplitumomab paptox, XMAB-5574, Budoprutug, Obexelimab, duvortuxizumab, englumafusp alfa, Emfizatamab, zeripatamig, siplizumab, blontuvetmab, FBTA05, ibritumomab tiuxetan, obinutuzumab, ocaratuzumab, ocrelizumab, ofatumumab, rituximab, tositumomab, ublituximab, veltuzumab, divozilimab, eramkafusp alfa, ripertamab, zuberitamab, glofitamab, nofetumomab merpentan, samalizumab, imvotamab, odronextamab, plamotamab, bectumomab, inotuzumab ozogamicin, moxetumomab pasudotox, pinatuzumab vedotin, gomiliximab, lumiliximab, inolimomab, inolimomab, daclizumab, camidanluma btesirine, basiliximab, varlilumab, omburtamab, enoblituzumab, vopratelimab, lulizumabpegol, TGN1412, muromonab-CD3, otelixizumab, teplizumab, visilizumab, epcoritamab, epcoritamab, brentuximab vedotin, iratumumab, azintuxizumab vedotin, gemtuzumab ozogamicin, lintuzumab, vadastuximab talirine, naratuximab emtansine, otlertuzumab, lilotomab satetraxetan, tetulomab, daratumumab, isatuximab, foralumab, mosunetuzumab, mosunetuzumab, cedelizumab, ibalizumab, keliximab, priliximab, tregalizumab, zanolimumab, bleselumab, iscalimab, lucatumumab, ravagalimab, selicrelumab, teneliximab, vanalimab, abciximab, bivatuzumab, iomab-B, telimomab aritox, zolimomab aritox, abituzumab, intetumumab, alemtuzumab, tamtuvetmab, lorvotuzumab mertansine, itolizumab, cusatuzumab, vorsetuzumab mafodotin, milatuzumab, iladatuzumab vedotin, polatuzumab vedotin, galiximab, cibisatamab, zolbetuximab, naxitamab, tisotumab vedotin, olendalizumab, pamrevlumab, lacnotuzumab, cabiralizumab, emactuzumab, axatilimab, gimsilumab, lenzilumab, namilumab, tremelimumab, ulocuplumab, tepoditamab, rovalpituzumab tesirine, tarlatamab, demcizumab, navicixizumab, drozitumab, parsatuzumab, depatuxizumab mafodotin, modotuximab, carotuximab, adecatumumab, adecatumumab, oportuzumab monatox, solitomab, tucotuzumab celmoleukin, edrecolomab, catumaxomab, ifabotuzumab, fibatuzumab, zalutumumab, panitumumab, cetuximab, futuximab, imgatuzumab, laprituximab emtansine, matuzumab, necitumumab, nimotuzumab, tomuzotuximab, amivantamab, amivantamab, epitumomab cituxetan, sontuzumab, duligotuzumab, elgemtumab, lumretuzumab, patritumab, seribantumab, zenocutuzumab, sibrotuzumab, burosumab, aprutumab ixadotin, radretumab, pasotuxizumab, farletuzumab, mirvetuximab soravtansine, vantictumab, TRBS07, 3F8, dinutuximab, dinutuximab beta, ecromeximab, mitumomab, andecaliximab, capromab, codrituzumab, glembatumumab vedotin, talquetamab, talquetamab, trevogrumab, indusatumab vedotin, ficlatuzumab, rilotumumab, zatuximab, pentuzimab, pentuzimab, margetuximab, timigutuzumab, trastuzumab, trastuzumab duocarmazine, trastuzumab emtansine, gancotamab, pertuzumab, ertumaxomab, emibetuzumab, telisotuzumab, telisotuzumab vedotin, derlotuximab biotin, apolizumab, onartuzumab, bersanlimab, enlimomabpegol, rontalizumab, sifalimumab, talizumab, ganitumab, istiratumab, robatumumab, teprotumumab, figitumumab, ganitumab, istiratumab, robatumumab, teprotumumab, cixutumumab, dalotuzumab, xentuzumab, dusigitumab, canakinumab, ustekinumab, ustekinumab, ustekinumab, briakinumab, briakinumab, abrezekimab, lebrikizumab, romilkimab, TNX-650, tralokinumab, anrukinzumab, brodalumab, ixekizumab, netakimab, perakizumab, secukinumab, vunakizumab, afasevikumab, afasevikumab, bimekizumab, bimekizumab, remtolumab, bermckimab, lutikizumab, lutikizumab, gevokizumab, cergutuzumab amunaleukin, fletikumab, fezakinumab, brazikumab, guselkumab, mirikizumab, tildrakizumab, risankizumab, flotetuzumab, nemolizumab, pascolizumab, dupilumab, mepolizumab, reslizumab, clazakizumab, elsilimomab, olokizumab, sarilumab, siltuximab, sirukumab, vobarilizumab, tocilizumab, SA237, satralizumab, enokizumab, prezalizumab, natalizumab, abrilumab, abrilumab, vedolizumab, volociximab, tadocizumab, etaracizumab, etrolizumab, spesolimab, vatelizumab, erlizumab, lirilumab, relatlimab, cBR96-doxorubicinimmunoconjugate, odulimomab, efalizumab, ladiratuzumab vedotin, simtuzumab, samrotamab vedotin, asclizumab, lupartumab amadotin, imalumab, carlumab, imaprelimab, amatuximab, amatuximab, anetumab ravtansine, narnatumab, clivatuzumab tetraxetan, pemtumomab, gatipotuzumab, ensituximab, lemalesomab, sulcsomab, enfortumab vedotin, racotumomab, monalizumab, brontictuzumab, tarextumab, vesencumab, oxelumab, gilvetmab, tislelizumab, dostarlimab, BCD-100, nivolumab, PDR001, pembrolizumab, pidilizumab, retifanlimab, spartalizumab, sintilimab, cemiplimab, olaratumab, tovetumab, rinucumab, atezolizumab, avelumab, durvalumab, lifastuzumab vedotin, bavituximab, acapatamab, capromab, rosopatamab, nezastomig, pasotuxizumab, pelgifatamab, voxalatamab, cofetuzumab pelidotin, denosumab, rosmantuzumab, cirmtuzumab, atinumab, indatuximab ravtansine, elotuzumab, sirtratumab vedotin, sonepcizumab, vandortuzumab vedotin, minretumomab, satumomab pendetide, maslimomab, ontuxizumab, tenatumomab, fresolimumab, metelimumab, lerdelimumab, tezepelumab, etigilimab, tiragotumab, placulumab, prezalumab, infliximab, nerelimomab, ozoralizumab, adalimumab, afelimomab, certolizumab pegol, golimumab, mapatumumab, conatumumab, lexatumumab, tigatuzumab, sacituzumab govitecan, votumumab, pogalizumab, letolizumab, pankomab, anatumomab mafenatox, enavatuzumab, flanvotumab, brolucizumab, ranibizumab, varisacumab, bevacizumab, faricimab, icrucumab, alacizumab pegol, ramucirumab, pritumumab, and onvatilimab;
[6358] VH3 comprises a VH of an antibody selected from the group consisting of losatuxizumab vedotin, utomilumab, urelumab, oleclumab, naptumomab estafenatox, ascrinvacumab, pintumomab, tacatuzumab tetraxetan, nesvacumab, vanucizumab, timolumab, vapaliximab, vepalimomab, enapotamab vedotin, ianalumab, belimumab, tabalumab, tibulizumab, belantamab mafodotin, teclistamab, teclistamab, detumomab, nacolomab tafenatox, eculizumab, lendalizumab, pexelizumab, pozelimab, ravulizumab, tesidolumab, vilobelimab, abagovomab, igovomab, oregovomab, sofituzumab vedotin, cantuzumab mertansine, cantuzuma bravtansine, girentuximab, altumomab pentetate, arcitumomab, besilesomab, bertilimumab, plozalizumab, mogamulizumab, leronlimab, PRO140, rovelizumab, rovelizumab, talacotuzumab, benralizumab, tavolimab, vonlerolizumab, gavilimomab, ziralimumab, fanolesomab, ipilimumab, ruplizumab, toralizumab, dapirolizumab pegol, toralizumab, dapirolizumab pegol, ruplizumab, blinatumomab, inebilizumab, loncastuximab tesirine, SGN-CD19A, tafasitamab, taplitumomab paptox, XMAB-5574, Budoprutug, Obexelimab, duvortuxizumab, englumafusp alfa, Emfizatamab, zcripatamig, siplizumab, blontuvetmab, FBTA05, ibritumomab tiuxetan, obinutuzumab, ocaratuzumab, ocrelizumab, ofatumumab, rituximab, tositumomab, ublituximab, veltuzumab, divozilimab, eramkafusp alfa, ripertamab, zuberitamab, glofitamab, nofetumomab merpentan, samalizumab, imvotamab, odronextamab, plamotamab, bectumomab, inotuzumab ozogamicin, moxetumomab pasudotox, pinatuzumab vedotin, gomiliximab, lumiliximab, inolimomab, inolimomab, daclizumab, camidanluma btesirine, basiliximab, varlilumab, omburtamab, enoblituzumab, vopratelimab, lulizumabpegol, TGN1412, muromonab-CD3, otelixizumab, teplizumab, visilizumab, epcoritamab, epcoritamab, brentuximab vedotin, iratumumab, azintuxizumab vedotin, gemtuzumab ozogamicin, lintuzumab, vadastuximab talirine, naratuximab emtansine, otlertuzumab, lilotomab satetraxetan, tetulomab, daratumumab, isatuximab, foralumab, mosunetuzumab, mosunetuzumab, cedelizumab, ibalizumab, keliximab, priliximab, tregalizumab, zanolimumab, bleselumab, iscalimab, lucatumumab, ravagalimab, selicrelumab, teneliximab, vanalimab, abciximab, bivatuzumab, iomab-B, telimomab aritox, zolimomab aritox, abituzumab, intetumumab, alemtuzumab, tamtuvetmab, lorvotuzumab mertansine, itolizumab, cusatuzumab, vorsetuzumab mafodotin, milatuzumab, iladatuzumab vedotin, polatuzumab vedotin, galiximab, cibisatamab, zolbctuximab, naxitamab, tisotumab vedotin, olendalizumab, pamrevlumab, lacnotuzumab, cabiralizumab, emactuzumab, axatilimab, gimsilumab, lenzilumab, namilumab, tremelimumab, ulocuplumab, tepoditamab, rovalpituzumab tesirine, tarlatamab, demcizumab, navicixizumab, drozitumab, parsatuzumab, depatuxizumab mafodotin, modotuximab, carotuximab, adecatumumab, adecatumumab, oportuzumab monatox, solitomab, tucotuzumab celmoleukin, edrecolomab, catumaxomab, ifabotuzumab, fibatuzumab, zalutumumab, panitumumab, cetuximab, futuximab, imgatuzumab, laprituximab emtansine, matuzumab, necitumumab, nimotuzumab, tomuzotuximab, amivantamab, amivantamab, epitumomab cituxetan, sontuzumab, duligotuzumab, elgemtumab, lumretuzumab, patritumab, seribantumab, zenocutuzumab, sibrotuzumab, burosumab, aprutumab ixadotin, radretumab, pasotuxizumab, farletuzumab, mirvetuximab soravtansine, vantictumab, TRBS07, 3F8, dinutuximab, dinutuximab beta, ecromeximab, mitumomab, andecaliximab, capromab, codrituzumab, glembatumumab vedotin, talquetamab, talquetamab, trevogrumab, indusatumab vedotin, ficlatuzumab, rilotumumab, zatuximab, pentuzimab, pentuzimab, margetuximab, timigutuzumab, trastuzumab, trastuzumab duocarmazine, trastuzumab emtansine, gancotamab, pertuzumab, ertumaxomab, emibetuzumab, telisotuzumab, telisotuzumab vedotin, derlotuximab biotin, apolizumab, onartuzumab, bersanlimab, enlimomabpegol, rontalizumab, sifalimumab, talizumab, ganitumab, istiratumab, robatumumab, teprotumumab, figitumumab, ganitumab, istiratumab, robatumumab, teprotumumab, cixutumumab, dalotuzumab, xentuzumab, dusigitumab, canakinumab, ustekinumab, ustekinumab, ustekinumab, briakinumab, briakinumab, abrezekimab, lebrikizumab, romilkimab, TNX-650, tralokinumab, anrukinzumab, brodalumab, ixekizumab, netakimab, perakizumab, secukinumab, vunakizumab, afasevikumab, afasevikumab, bimekizumab, bimekizumab, remtolumab, bermckimab, lutikizumab, lutikizumab, gevokizumab, cergutuzumab amunaleukin, fletikumab, fezakinumab, brazikumab, guselkumab, mirikizumab, tildrakizumab, risankizumab, flotetuzumab, nemolizumab, pascolizumab, dupilumab, mepolizumab, reslizumab, clazakizumab, elsilimomab, olokizumab, sarilumab, siltuximab, sirukumab, vobarilizumab, tocilizumab, SA237, satralizumab, enokizumab, prezalizumab, natalizumab, abrilumab, abrilumab, vedolizumab, volociximab, tadocizumab, etaracizumab, etrolizumab, spesolimab, vatelizumab, crlizumab, lirilumab, relatlimab, cBR96-doxorubicinimmunoconjugate, odulimomab, efalizumab, ladiratuzumab vedotin, simtuzumab, samrotamab vedotin, aselizumab, lupartumab amadotin, imalumab, carlumab, imaprelimab, amatuximab, amatuximab, anctumab ravtansine, narnatumab, clivatuzumab tetraxetan, pemtumomab, gatipotuzumab, ensituximab, lemalesomab, sulesomab, enfortumab vedotin, racotumomab, monalizumab, brontictuzumab, tarextumab, vesencumab, oxelumab, gilvetmab, tislelizumab, dostarlimab, BCD-100, nivolumab, PDR001, pembrolizumab, pidilizumab, retifanlimab, spartalizumab, sintilimab, cemiplimab, olaratumab, tovetumab, rinucumab, atezolizumab, avelumab, durvalumab, lifastuzumab vedotin, bavituximab, acapatamab, capromab, rosopatamab, nezastomig, pasotuxizumab, pelgifatamab, voxalatamab, cofetuzumab pelidotin, denosumab, rosmantuzumab, cirmtuzumab, atinumab, indatuximab ravtansine, elotuzumab, sirtratumab vedotin, sonepcizumab, vandortuzumab vedotin, minretumomab, satumomab pendetide, maslimomab, ontuxizumab, tenatumomab, fresolimumab, metelimumab, lerdelimumab, tezepelumab, etigilimab, tiragotumab, placulumab, prezalumab, infliximab, nerelimomab, ozoralizumab, adalimumab, afelimomab, certolizumab pegol, golimumab, mapatumumab, conatumumab, lexatumumab, tigatuzumab, sacituzumab govitecan, votumumab, pogalizumab, letolizumab, pankomab, anatumomab mafenatox, enavatuzumab, flanvotumab, brolucizumab, ranibizumab, varisacumab, bevacizumab, faricimab, icrucumab, alacizumab pegol, ramucirumab, pritumumab, and onvatilimab; and/or
[6359] VH4 comprises a VH of an antibody selected from the group consisting of losatuxizumab vedotin, utomilumab, urelumab, oleclumab, naptumomab estafenatox, ascrinvacumab, pintumomab, tacatuzumab tetraxetan, nesvacumab, vanucizumab, timolumab, vapaliximab, vepalimomab, enapotamab vedotin, ianalumab, belimumab, tabalumab, tibulizumab, belantamab mafodotin, teclistamab, teclistamab, detumomab, nacolomab tafenatox, eculizumab, lendalizumab, pexelizumab, pozelimab, ravulizumab, tesidolumab, vilobelimab, abagovomab, igovomab, oregovomab, sofituzumab vedotin, cantuzumab mertansine, cantuzuma bravtansine, girentuximab, altumomab pentetate, arcitumomab, besilesomab, bertilimumab, plozalizumab, mogamulizumab, leronlimab, PRO140, rovelizumab, rovelizumab, talacotuzumab, benralizumab, tavolimab, vonlerolizumab, gavilimomab, ziralimumab, fanolesomab, ipilimumab, ruplizumab, toralizumab, dapirolizumab pegol, toralizumab, dapirolizumab pegol, ruplizumab, blinatumomab, inebilizumab, loncastuximab tesirine, SGN-CD19A, tafasitamab, taplitumomab paptox, XMAB-5574, Budoprutug, Obexelimab, duvortuxizumab, englumafusp alfa, Emfizatamab, zeripatamig, siplizumab, blontuvetmab, FBTA05, ibritumomab tiuxetan, obinutuzumab, ocaratuzumab, ocrelizumab, ofatumumab, rituximab, tositumomab, ublituximab, veltuzumab, divozilimab, eramkafusp alfa, ripertamab, zuberitamab, glofitamab, nofetumomab merpentan, samalizumab, imvotamab, odronextamab, plamotamab, bectumomab, inotuzumab ozogamicin, moxetumomab pasudotox, pinatuzumab vedotin, gomiliximab, lumiliximab, inolimomab, inolimomab, daclizumab, camidanluma btesirine, basiliximab, varlilumab, omburtamab, enoblituzumab, vopratelimab, lulizumabpegol, TGN1412, muromonab-CD3, otelixizumab, teplizumab, visilizumab, epcoritamab, epcoritamab, brentuximab vedotin, iratumumab, azintuxizumab vedotin, gemtuzumab ozogamicin, lintuzumab, vadastuximab talirine, naratuximab emtansine, otlertuzumab, lilotomab satetraxetan, tetulomab, daratumumab, isatuximab, foralumab, mosunctuzumab, mosunetuzumab, cedelizumab, ibalizumab, keliximab, priliximab, tregalizumab, zanolimumab, bleselumab, iscalimab, lucatumumab, ravagalimab, selicrelumab, teneliximab, vanalimab, abciximab, bivatuzumab, iomab-B, telimomab aritox, zolimomab aritox, abituzumab, intetumumab, alemtuzumab, tamtuvetmab, lorvotuzumab mertansine, itolizumab, cusatuzumab, vorsetuzumab mafodotin, milatuzumab, iladatuzumab vedotin, polatuzumab vedotin, galiximab, cibisatamab, zolbetuximab, naxitamab, tisotumab vedotin, olendalizumab, pamrevlumab, lacnotuzumab, cabiralizumab, emactuzumab, axatilimab, gimsilumab, lenzilumab, namilumab, tremelimumab, ulocuplumab, tepoditamab, rovalpituzumab tesirine, tarlatamab, demcizumab, navicixizumab, drozitumab, parsatuzumab, depatuxizumab mafodotin, modotuximab, carotuximab, adecatumumab, adecatumumab, oportuzumab monatox, solitomab, tucotuzumab celmoleukin, edrecolomab, catumaxomab, ifabotuzumab, fibatuzumab, zalutumumab, panitumumab, cetuximab, futuximab, imgatuzumab, laprituximab emtansine, matuzumab, necitumumab, nimotuzumab, tomuzotuximab, amivantamab, amivantamab, epitumomab cituxetan, sontuzumab, duligotuzumab, elgemtumab, lumretuzumab, patritumab, seribantumab, zenocutuzumab, sibrotuzumab, burosumab, aprutumab ixadotin, radretumab, pasotuxizumab, farletuzumab, mirvetuximab soravtansine, vantictumab, TRBS07, 3F8, dinutuximab, dinutuximab beta, ecromeximab, mitumomab, andecaliximab, capromab, codrituzumab, glembatumumab vedotin, talquetamab, talquetamab, trevogrumab, indusatumab vedotin, ficlatuzumab, rilotumumab, zatuximab, pentuzimab, pentuzimab, margetuximab, timigutuzumab, trastuzumab, trastuzumab duocarmazine, trastuzumab emtansine, gancotamab, pertuzumab, ertumaxomab, emibetuzumab, telisotuzumab, telisotuzumab vedotin, derlotuximab biotin, apolizumab, onartuzumab, bersanlimab, enlimomabpegol, rontalizumab, sifalimumab, talizumab, ganitumab, istiratumab, robatumumab, teprotumumab, figitumumab, ganitumab, istiratumab, robatumumab, teprotumumab, cixutumumab, dalotuzumab, xentuzumab, dusigitumab, canakinumab, ustekinumab, ustekinumab, ustekinumab, briakinumab, briakinumab, abrezekimab, lebrikizumab, romilkimab, TNX-650, tralokinumab, anrukinzumab, brodalumab, ixekizumab, netakimab, perakizumab, secukinumab, vunakizumab, afasevikumab, afasevikumab, bimekizumab, bimekizumab, remtolumab, bermekimab, lutikizumab, lutikizumab, gevokizumab, cergutuzumab amunaleukin, fletikumab, fezakinumab, brazikumab, guselkumab, mirikizumab, tildrakizumab, risankizumab, flotetuzumab, nemolizumab, pascolizumab, dupilumab, mepolizumab, reslizumab, clazakizumab, elsilimomab, olokizumab, sarilumab, siltuximab, sirukumab, vobarilizumab, tocilizumab, SA237, satralizumab, enokizumab, prezalizumab, natalizumab, abrilumab, abrilumab, vedolizumab, volociximab, tadocizumab, etaracizumab, etrolizumab, spesolimab, vatelizumab, erlizumab, lirilumab, relatlimab, cBR96-doxorubicinimmunoconjugate, odulimomab, efalizumab, ladiratuzumab vedotin, simtuzumab, samrotamab vedotin, aselizumab, lupartumab amadotin, imalumab, carlumab, imaprelimab, amatuximab, amatuximab, anetumab ravtansine, narnatumab, clivatuzumab tetraxetan, pemtumomab, gatipotuzumab, ensituximab, lemalesomab, sulesomab, enfortumab vedotin, racotumomab, monalizumab, brontictuzumab, tarextumab, vesencumab, oxelumab, gilvetmab, tislelizumab, dostarlimab, BCD-100, nivolumab, PDR001, pembrolizumab, pidilizumab, retifanlimab, spartalizumab, sintilimab, cemiplimab, olaratumab, tovetumab, rinucumab, atezolizumab, avelumab, durvalumab, lifastuzumab vedotin, bavituximab, acapatamab, capromab, rosopatamab, nezastomig, pasotuxizumab, pelgifatamab, voxalatamab, cofetuzumab pelidotin, denosumab, rosmantuzumab, cirmtuzumab, atinumab, indatuximab ravtansine, elotuzumab, sirtratumab vedotin, sonepcizumab, vandortuzumab vedotin, minretumomab, satumomab pendetide, maslimomab, ontuxizumab, tenatumomab, fresolimumab, metelimumab, lerdelimumab, tezepelumab, etigilimab, tiragotumab, placulumab, prezalumab, infliximab, nerelimomab, ozoralizumab, adalimumab, afelimomab, certolizumab pegol, golimumab, mapatumumab, conatumumab, lexatumumab, tigatuzumab, sacituzumab govitecan, votumumab, pogalizumab, letolizumab, pankomab, anatumomab mafenatox, enavatuzumab, flanvotumab, brolucizumab, ranibizumab, varisacumab, bevacizumab, faricimab, icrucumab, alacizumab pegol, ramucirumab, pritumumab, and onvatilimab; or
[6360] (iii)
[6361] VL1 comprises (i) a complementarity determining region (CDR) 1 having an amino acid sequence that is at least 65%, at least 70%, at least 75%, at least 80%, at least 85%, at least 90%, at least 95%, at least 99%, or 100% identical to any one of SEQ ID NOs: 1096, 1103, 1110, 1120, 1127, 1134, 1141, 1148, 1155, 1162, 1169, 1174, 1181, 1188, 1199, 1211, 1221, 1228, 1235, 1247, 1254, 1261, 1266, 1271, 1278, 1285, 1292, 1299, 1306, 1313, 1319, 1326, 1339, 1352, 1359, 1366, 1373, 1382, 1394, 1401, 1408, 1414, 1421, 1428, 1441, 1448, 1455, 1461, 1468, 1475, 1488, 1495, 1508, 1519, 1526, 1531, 1538, 1544, 1556, 1568, 1574, 1581, 1594, 1601, 1608, 1615, 1622, 1629, 1636, 1643, 1650, 1657, 1672, 1679, 1689, 1697, 1708, 1715, 1718, 1723, 1727, 1738, 1743, 1752, 1761, 1763, 1769, 1776, and 1786; (ii) a CDR2 having an amino acid sequence that is at least 65%, at least 70%, at least 75%, at least 80%, at least 85%, at least 90%, at least 95%, at least 99%, or 100% identical to any one of SEQ ID NOs: 1200, 1212, 1680, 1690, 1698, 1709, 1728, 1739, 1744, 1753, 1770, and 1777; or at least 65%, at least 70%, at least 75%, at least 80%, at least 85%, at least 90%, at least 95%, at least 99%, or 100% identical to any one of amino acid sequences AAS, APS, AT, ATS, DAS, DDG, DDS, DT, DTS, DVS, EAS, FTS, GAF, GAN, GAS, GAT, GIS, GKN, GNS, HTS, KVS, LAS, LGS, LVS, NAK, NTN, QMS, RMS, RTS, SAS, TTS, WAS, YAS, YAT, YGS, YRS, and YTS; and (iii) a CDR3 having an amino acid sequence that is at least 65%, at least 70%, at least 75%, at least 80%, at least 85%, at least 90%, at least 95%, at least 99%, or 100% identical to any one of SEQ ID NOs: 1097, 1104, 1111, 1121, 1128, 1135, 1142, 1149, 1156, 1163, 1170, 1175, 1182, 1189, 1195, 1201, 1207, 1213, 1222, 1229, 1236, 2009, 1248, 1255, 1262, 1267, 1272, 1279, 1286, 1293, 1300, 1307, 1320, 1327, 1333, 1340, 1346, 1353, 1360, 1367, 1374, 1383, 1389, 1395, 1402, 1409, 1415, 1422, 1429, 1435, 1442, 1449, 1456, 1462, 1469, 1476, 1482, 1489, 1496, 1502, 1509, 1513, 1520, 1532, 1539, 1545, 1557, 1562, 1569, 1575, 1582, 1588, 1595, 1602, 1609, 1616, 1623, 1630, 1637, 1644, 1651, 1658, 1663, 1673, 1681, 1691, 1699, 1710, 1729, 1735, 1745, 1751, 1754, 1778, 1787, and 1976;
[6362] VL2 comprises (i) a complementarity determining region (CDR) 1 having an amino acid sequence that is at least 65%, at least 70%, at least 75%, at least 80%, at least 85%, at least 90%, at least 95%, at least 99%, or 100% identical to any one of SEQ ID NOs: 1096, 1103, 1110, 1120, 1127, 1134, 1141, 1148, 1155, 1162, 1169, 1174, 1181, 1188, 1199, 1211, 1221, 1228, 1235, 1247, 1254, 1261, 1266, 1271, 1278, 1285, 1292, 1299, 1306, 1313, 1319, 1326, 1339, 1352, 1359, 1366, 1373, 1382, 1394, 1401, 1408, 1414, 1421, 1428, 1441, 1448, 1455, 1461, 1468, 1475, 1488, 1495, 1508, 1519, 1526, 1531, 1538, 1544, 1556, 1568, 1574, 1581, 1594, 1601, 1608, 1615, 1622, 1629, 1636, 1643, 1650, 1657, 1672, 1679, 1689, 1697, 1708, 1715, 1718, 1723, 1727, 1738, 1743, 1752, 1761, 1763, 1769, 1776, and 1786; (ii) a CDR2 having an amino acid sequence that is at least 65%, at least 70%, at least 75%, at least 80%, at least 85%, at least 90%, at least 95%, at least 99%, or 100% identical to any one of SEQ ID NOs: 1200, 1212, 1680, 1690, 1698, 1709, 1728, 1739, 1744, 1753, 1770, and 1777; or at least 65%, at least 70%, at least 75%, at least 80%, at least 85%, at least 90%, at least 95%, at least 99%, or 100% identical to any one of amino acid sequences AAS, APS, AT, ATS, DAS, DDG, DDS, DT, DTS, DVS, EAS, FTS, GAF, GAN, GAS, GAT, GIS, GKN, GNS, HTS, KVS, LAS, LGS, LVS, NAK, NTN, QMS, RMS, RTS, SAS, TTS, WAS, YAS, YAT, YGS, YRS, and YTS; and (iii) a CDR3 having an amino acid sequence that is at least 65%, at least 70%, at least 75%, at least 80%, at least 85%, at least 90%, at least 95%, at least 99%, or 100% identical to any one of SEQ ID NOs: 1097, 1104, 1111, 1121, 1128, 1135, 1142, 1149, 1156, 1163, 1170, 1175, 1182, 1189, 1195, 1201, 1207, 1213, 1222, 1229, 1236, 2009, 1248, 1255, 1262, 1267, 1272, 1279, 1286, 1293, 1300, 1307, 1320, 1327, 1333, 1340, 1346, 1353, 1360, 1367, 1374, 1383, 1389, 1395, 1402, 1409, 1415, 1422, 1429, 1435, 1442, 1449, 1456, 1462, 1469, 1476, 1482, 1489, 1496, 1502, 1509, 1513, 1520, 1532, 1539, 1545, 1557, 1562, 1569, 1575, 1582, 1588, 1595, 1602, 1609, 1616, 1623, 1630, 1637, 1644, 1651, 1658, 1663, 1673, 1681, 1691, 1699, 1710, 1729, 1735, 1745, 1751, 1754, 1778, 1787, and 1976;
[6363] VL3 comprises (i) a complementarity determining region (CDR) 1 having an amino acid sequence that is at least 65%, at least 70%, at least 75%, at least 80%, at least 85%, at least 90%, at least 95%, at least 99%, or 100% identical to any one of SEQ ID NOs: 1096, 1103, 1110, 1120, 1127, 1134, 1141, 1148, 1155, 1162, 1169, 1174, 1181, 1188, 1199, 1211, 1221, 1228, 1235, 1247, 1254, 1261, 1266, 1271, 1278, 1285, 1292, 1299, 1306, 1313, 1319, 1326, 1339, 1352, 1359, 1366, 1373, 1382, 1394, 1401, 1408, 1414, 1421, 1428, 1441, 1448, 1455, 1461, 1468, 1475, 1488, 1495, 1508, 1519, 1526, 1531, 1538, 1544, 1556, 1568, 1574, 1581, 1594, 1601, 1608, 1615, 1622, 1629, 1636, 1643, 1650, 1657, 1672, 1679, 1689, 1697, 1708, 1715, 1718, 1723, 1727, 1738, 1743, 1752, 1761, 1763, 1769, 1776, and 1786; (ii) a CDR2 having an amino acid sequence that is at least 65%, at least 70%, at least 75%, at least 80%, at least 85%, at least 90%, at least 95%, at least 99%, or 100% identical to any one of SEQ ID NOs: 1200, 1212, 1680, 1690, 1698, 1709, 1728, 1739, 1744, 1753, 1770, and 1777; or at least 65%, at least 70%, at least 75%, at least 80%, at least 85%, at least 90%, at least 95%, at least 99%, or 100% identical to any one of amino acid sequences AAS, APS, AT, ATS, DAS, DDG, DDS, DT, DTS, DVS, EAS, FTS, GAF, GAN, GAS, GAT, GIS, GKN, GNS, HTS, KVS, LAS, LGS, LVS, NAK, NTN, QMS, RMS, RTS, SAS, TTS, WAS, YAS, YAT, YGS, YRS, and YTS; and (iii) a CDR3 having an amino acid sequence that is at least 65%, at least 70%, at least 75%, at least 80%, at least 85%, at least 90%, at least 95%, at least 99%, or 100% identical to any one of SEQ ID NOs: 1097, 1104, 1111, 1121, 1128, 1135, 1142, 1149, 1156, 1163, 1170, 1175, 1182, 1189, 1195, 1201, 1207, 1213, 1222, 1229, 1236, 2009, 1248, 1255, 1262, 1267, 1272, 1279, 1286, 1293, 1300, 1307, 1320, 1327, 1333, 1340, 1346, 1353, 1360, 1367, 1374, 1383, 1389, 1395, 1402, 1409, 1415, 1422, 1429, 1435, 1442, 1449, 1456, 1462, 1469, 1476, 1482, 1489, 1496, 1502, 1509, 1513, 1520, 1532, 1539, 1545, 1557, 1562, 1569, 1575, 1582, 1588, 1595, 1602, 1609, 1616, 1623, 1630, 1637, 1644, 1651, 1658, 1663, 1673, 1681, 1691, 1699, 1710, 1729, 1735, 1745, 1751, 1754, 1778, 1787, and 1976;
[6364] VL4 comprises (i) a complementarity determining region (CDR) 1 having an amino acid sequence that is at least 65%, at least 70%, at least 75%, at least 80%, at least 85%, at least 90%, at least 95%, at least 99%, or 100% identical to any one of SEQ ID NOs: 1096, 1103, 1110, 1120, 1127, 1134, 1141, 1148, 1155, 1162, 1169, 1174, 1181, 1188, 1199, 1211, 1221, 1228, 1235, 1247, 1254, 1261, 1266, 1271, 1278, 1285, 1292, 1299, 1306, 1313, 1319, 1326, 1339, 1352, 1359, 1366, 1373, 1382, 1394, 1401, 1408, 1414, 1421, 1428, 1441, 1448, 1455, 1461, 1468, 1475, 1488, 1495, 1508, 1519, 1526, 1531, 1538, 1544, 1556, 1568, 1574, 1581, 1594, 1601, 1608, 1615, 1622, 1629, 1636, 1643, 1650, 1657, 1672, 1679, 1689, 1697, 1708, 1715, 1718, 1723, 1727, 1738, 1743, 1752, 1761, 1763, 1769, 1776, and 1786; (ii) a CDR2 having an amino acid sequence that is at least 65%, at least 70%, at least 75%, at least 80%, at least 85%, at least 90%, at least 95%, at least 99%, or 100% identical to any one of SEQ ID NOs: 1200, 1212, 1680, 1690, 1698, 1709, 1728, 1739, 1744, 1753, 1770, and 1777; or at least 65%, at least 70%, at least 75%, at least 80%, at least 85%, at least 90%, at least 95%, at least 99%, or 100% identical to any one of amino acid sequences AAS, APS, AT, ATS, DAS, DDG, DDS, DT, DTS, DVS, EAS, FTS, GAF, GAN, GAS, GAT, GIS, GKN, GNS, HTS, KVS, LAS, LGS, LVS, NAK, NTN, QMS, RMS, RTS, SAS, TTS, WAS, YAS, YAT, YGS, YRS, and YTS; and (iii) a CDR3 having an amino acid sequence that is at least 65%, at least 70%, at least 75%, at least 80%, at least 85%, at least 90%, at least 95%, at least 99%, or 100% identical to any one of SEQ ID NOs: 1097, 1104, 1111, 1121, 1128, 1135, 1142, 1149, 1156, 1163, 1170, 1175, 1182, 1189, 1195, 1201, 1207, 1213, 1222, 1229, 1236, 2009, 1248, 1255, 1262, 1267, 1272, 1279, 1286, 1293, 1300, 1307, 1320, 1327, 1333, 1340, 1346, 1353, 1360, 1367, 1374, 1383, 1389, 1395, 1402, 1409, 1415, 1422, 1429, 1435, 1442, 1449, 1456, 1462, 1469, 1476, 1482, 1489, 1496, 1502, 1509, 1513, 1520, 1532, 1539, 1545, 1557, 1562, 1569, 1575, 1582, 1588, 1595, 1602, 1609, 1616, 1623, 1630, 1637, 1644, 1651, 1658, 1663, 1673, 1681, 1691, 1699, 1710, 1729, 1735, 1745, 1751, 1754, 1778, 1787, and 1976;
[6365] VH1 comprises (i) a complementarity determining region (CDR) 1 having an amino acid sequence that is at least 65%, at least 70%, at least 75%, at least 80%, at least 85%, at least 90%, at least 95%, at least 99%, or 100% identical to any one of SEQ ID NOs: 1099, 1106, 1113, 1117, 1123, 1130, 1137, 1144, 1151, 1158, 1165, 1177, 1184, 1191, 1203, 1215, 1224, 1231, 1238, 1243, 1250, 1257, 1264, 1274, 1281, 1288, 1295, 1302, 1309, 1315, 1322, 1329, 1335, 1342, 1348, 1355, 1362, 1369, 1376, 1385, 1397, 1404, 1417, 1424, 1431, 1437, 1444, 1451, 1458, 1464, 1471, 1478, 1484, 1491, 1498, 1504, 1511, 1515, 1522, 1534, 1547, 1552, 1564, 1577, 1584, 1590, 1597, 1604, 1611, 1618, 1625, 1632, 1639, 1646, 1653, 1660, 1665, 1675, 1683, 1693, 1701, 1705, 1716, 1719, 1731, 1736, 1747, 1756, 1772, 1780, and 1789; (ii) a CDR2 having an amino acid sequence that is at least 65%, at least 70%, at least 75%, at least 80%, at least 85%, at least 90%, at least 95%, at least 99%, or 100% identical to any one of SEQ ID NOs: 1100, 1107, 1114, 1118, 1124, 1131, 1138, 1145, 1152, 1159, 1166, 1178, 1185, 1192, 1204, 1216, 1225, 1232, 1239, 1244, 1251, 1258, 1275, 1282, 1289, 1296, 1303, 1310, 1316, 1323, 1330, 1336, 1343, 1349, 1356, 1363, 1370, 1377, 1386, 1391, 1398, 1405, 1411, 1418, 1425, 1432, 1438, 1445, 1452, 1465, 1472, 1479, 1485, 1492, 1499, 1505, 1516, 1523, 1528, 1535, 1541, 1548, 1553, 1559, 1565, 1571, 1578, 1585, 1591, 1598, 1605, 1612, 1619, 1626, 1633, 1640, 1647, 1654, 1666, 1676, 1684, 1687, 1694, 1702, 1706, 1712, 1717, 1720, 1725, 1732, 1737, 1741, 1748, 1757, 1767, 1773, 1781, and 1790; and (iii) a CDR3 having an amino acid sequence that is at least 65%, at least 70%, at least 75%, at least 80%, at least 85%, at least 90%, at least 95%, at least 99%, or 100% identical to any one of SEQ ID NOs: 1101, 1108, 1115, 1125, 1132, 1139, 1146, 1153, 1160, 1167, 1172, 1179, 1186, 1193, 1197, 1205, 1209, 1217, 1226, 1233, 1240, 1245, 1252, 1259, 1269, 1276, 1283, 1290, 1297, 1304, 1311, 1317, 1324, 1331, 1337, 1344, 1350, 1357, 1364, 1371, 1378, 1387, 1392, 1399, 1406, 1412, 1419, 1426, 1433, 1439, 1446, 1453, 1459, 1466, 1473, 1480, 1486, 1493, 1500, 1506, 1517, 1524, 1529, 1536, 1542, 1549, 1554, 1560, 1566, 1572, 1579, 1586, 1592, 1599, 1606, 1613, 1620, 1627, 1634, 1641, 1648, 1655, 1661, 1667, 1670, 1677, 1685, 1688, 1695, 1703, 1707, 1713, 1733, 1749, 1758, 1762, 1774, 1782, 1791, and 1975;
[6366] VH2 comprises (i) a complementarity determining region (CDR) 1 having an amino acid sequence that is at least 65%, at least 70%, at least 75%, at least 80%, at least 85%, at least 90%, at least 95%, at least 99%, or 100% identical to any one of SEQ ID NOs: 1099, 1106, 1113, 1117, 1123, 1130, 1137, 1144, 1151, 1158, 1165, 1177, 1184, 1191, 1203, 1215, 1224, 1231, 1238, 1243, 1250, 1257, 1264, 1274, 1281, 1288, 1295, 1302, 1309, 1315, 1322, 1329, 1335, 1342, 1348, 1355, 1362, 1369, 1376, 1385, 1397, 1404, 1417, 1424, 1431, 1437, 1444, 1451, 1458, 1464, 1471, 1478, 1484, 1491, 1498, 1504, 1511, 1515, 1522, 1534, 1547, 1552, 1564, 1577, 1584, 1590, 1597, 1604, 1611, 1618, 1625, 1632, 1639, 1646, 1653, 1660, 1665, 1675, 1683, 1693, 1701, 1705, 1716, 1719, 1731, 1736, 1747, 1756, 1772, 1780, and 1789; (ii) a CDR2 having an amino acid sequence that is at least 65%, at least 70%, at least 75%, at least 80%, at least 85%, at least 90%, at least 95%, at least 99%, or 100% identical to any one of SEQ ID NOs: 1100, 1107, 1114, 1118, 1124, 1131, 1138, 1145, 1152, 1159, 1166, 1178, 1185, 1192, 1204, 1216, 1225, 1232, 1239, 1244, 1251, 1258, 1275, 1282, 1289, 1296, 1303, 1310, 1316, 1323, 1330, 1336, 1343, 1349, 1356, 1363, 1370, 1377, 1386, 1391, 1398, 1405, 1411, 1418, 1425, 1432, 1438, 1445, 1452, 1465, 1472, 1479, 1485, 1492, 1499, 1505, 1516, 1523, 1528, 1535, 1541, 1548, 1553, 1559, 1565, 1571, 1578, 1585, 1591, 1598, 1605, 1612, 1619, 1626, 1633, 1640, 1647, 1654, 1666, 1676, 1684, 1687, 1694, 1702, 1706, 1712, 1717, 1720, 1725, 1732, 1737, 1741, 1748, 1757, 1767, 1773, 1781, and 1790; and (iii) a CDR3 having an amino acid sequence that is at least 65%, at least 70%, at least 75%, at least 80%, at least 85%, at least 90%, at least 95%, at least 99%, or 100% identical to any one of SEQ ID NOs: 1101, 1108, 1115, 1125, 1132, 1139, 1146, 1153, 1160, 1167, 1172, 1179, 1186, 1193, 1197, 1205, 1209, 1217, 1226, 1233, 1240, 1245, 1252, 1259, 1269, 1276, 1283, 1290, 1297, 1304, 1311, 1317, 1324, 1331, 1337, 1344, 1350, 1357, 1364, 1371, 1378, 1387, 1392, 1399, 1406, 1412, 1419, 1426, 1433, 1439, 1446, 1453, 1459, 1466, 1473, 1480, 1486, 1493, 1500, 1506, 1517, 1524, 1529, 1536, 1542, 1549, 1554, 1560, 1566, 1572, 1579, 1586, 1592, 1599, 1606, 1613, 1620, 1627, 1634, 1641, 1648, 1655, 1661, 1667, 1670, 1677, 1685, 1688, 1695, 1703, 1707, 1713, 1733, 1749, 1758, 1762, 1774, 1782, 1791, and 1975;
[6367] VH3 comprises (i) a complementarity determining region (CDR) 1 having an amino acid sequence that is at least 65%, at least 70%, at least 75%, at least 80%, at least 85%, at least 90%, at least 95%, at least 99%, or 100% identical to any one of SEQ ID NOs: 1099, 1106, 1113, 1117, 1123, 1130, 1137, 1144, 1151, 1158, 1165, 1177, 1184, 1191, 1203, 1215, 1224, 1231, 1238, 1243, 1250, 1257, 1264, 1274, 1281, 1288, 1295, 1302, 1309, 1315, 1322, 1329, 1335, 1342, 1348, 1355, 1362, 1369, 1376, 1385, 1397, 1404, 1417, 1424, 1431, 1437, 1444, 1451, 1458, 1464, 1471, 1478, 1484, 1491, 1498, 1504, 1511, 1515, 1522, 1534, 1547, 1552, 1564, 1577, 1584, 1590, 1597, 1604, 1611, 1618, 1625, 1632, 1639, 1646, 1653, 1660, 1665, 1675, 1683, 1693, 1701, 1705, 1716, 1719, 1731, 1736, 1747, 1756, 1772, 1780, and 1789; (ii) a CDR2 having an amino acid sequence that is at least 65%, at least 70%, at least 75%, at least 80%, at least 85%, at least 90%, at least 95%, at least 99%, or 100% identical to any one of SEQ ID NOs: 1100, 1107, 1114, 1118, 1124, 1131, 1138, 1145, 1152, 1159, 1166, 1178, 1185, 1192, 1204, 1216, 1225, 1232, 1239, 1244, 1251, 1258, 1275, 1282, 1289, 1296, 1303, 1310, 1316, 1323, 1330, 1336, 1343, 1349, 1356, 1363, 1370, 1377, 1386, 1391, 1398, 1405, 1411, 1418, 1425, 1432, 1438, 1445, 1452, 1465, 1472, 1479, 1485, 1492, 1499, 1505, 1516, 1523, 1528, 1535, 1541, 1548, 1553, 1559, 1565, 1571, 1578, 1585, 1591, 1598, 1605, 1612, 1619, 1626, 1633, 1640, 1647, 1654, 1666, 1676, 1684, 1687, 1694, 1702, 1706, 1712, 1717, 1720, 1725, 1732, 1737, 1741, 1748, 1757, 1767, 1773, 1781, and 1790; and (iii) a CDR3 having an amino acid sequence that is at least 65%, at least 70%, at least 75%, at least 80%, at least 85%, at least 90%, at least 95%, at least 99%, or 100% identical to any one of SEQ ID NOs: 1101, 1108, 1115, 1125, 1132, 1139, 1146, 1153, 1160, 1167, 1172, 1179, 1186, 1193, 1197, 1205, 1209, 1217, 1226, 1233, 1240, 1245, 1252, 1259, 1269, 1276, 1283, 1290, 1297, 1304, 1311, 1317, 1324, 1331, 1337, 1344, 1350, 1357, 1364, 1371, 1378, 1387, 1392, 1399, 1406, 1412, 1419, 1426, 1433, 1439, 1446, 1453, 1459, 1466, 1473, 1480, 1486, 1493, 1500, 1506, 1517, 1524, 1529, 1536, 1542, 1549, 1554, 1560, 1566, 1572, 1579, 1586, 1592, 1599, 1606, 1613, 1620, 1627, 1634, 1641, 1648, 1655, 1661, 1667, 1670, 1677, 1685, 1688, 1695, 1703, 1707, 1713, 1733, 1749, 1758, 1762, 1774, 1782, 1791, and 1975; and/or
[6368] VH4 comprises (i) a complementarity determining region (CDR) 1 having an amino acid sequence that is at least 65%, at least 70%, at least 75%, at least 80%, at least 85%, at least 90%, at least 95%, at least 99%, or 100% identical to any one of SEQ ID NOs: 1099, 1106, 1113, 1117, 1123, 1130, 1137, 1144, 1151, 1158, 1165, 1177, 1184, 1191, 1203, 1215, 1224, 1231, 1238, 1243, 1250, 1257, 1264, 1274, 1281, 1288, 1295, 1302, 1309, 1315, 1322, 1329, 1335, 1342, 1348, 1355, 1362, 1369, 1376, 1385, 1397, 1404, 1417, 1424, 1431, 1437, 1444, 1451, 1458, 1464, 1471, 1478, 1484, 1491, 1498, 1504, 1511, 1515, 1522, 1534, 1547, 1552, 1564, 1577, 1584, 1590, 1597, 1604, 1611, 1618, 1625, 1632, 1639, 1646, 1653, 1660, 1665, 1675, 1683, 1693, 1701, 1705, 1716, 1719, 1731, 1736, 1747, 1756, 1772, 1780, and 1789; (ii) a CDR2 having an amino acid sequence that is at least 65%, at least 70%, at least 75%, at least 80%, at least 85%, at least 90%, at least 95%, at least 99%, or 100% identical to any one of SEQ ID NOs: 1100, 1107, 1114, 1118, 1124, 1131, 1138, 1145, 1152, 1159, 1166, 1178, 1185, 1192, 1204, 1216, 1225, 1232, 1239, 1244, 1251, 1258, 1275, 1282, 1289, 1296, 1303, 1310, 1316, 1323, 1330, 1336, 1343, 1349, 1356, 1363, 1370, 1377, 1386, 1391, 1398, 1405, 1411, 1418, 1425, 1432, 1438, 1445, 1452, 1465, 1472, 1479, 1485, 1492, 1499, 1505, 1516, 1523, 1528, 1535, 1541, 1548, 1553, 1559, 1565, 1571, 1578, 1585, 1591, 1598, 1605, 1612, 1619, 1626, 1633, 1640, 1647, 1654, 1666, 1676, 1684, 1687, 1694, 1702, 1706, 1712, 1717, 1720, 1725, 1732, 1737, 1741, 1748, 1757, 1767, 1773, 1781, and 1790; and (iii) a CDR3 having an amino acid sequence that is at least 65%, at least 70%, at least 75%, at least 80%, at least 85%, at least 90%, at least 95%, at least 99%, or 100% identical to any one of SEQ ID NOs: 1101, 1108, 1115, 1125, 1132, 1139, 1146, 1153, 1160, 1167, 1172, 1179, 1186, 1193, 1197, 1205, 1209, 1217, 1226, 1233, 1240, 1245, 1252, 1259, 1269, 1276, 1283, 1290, 1297, 1304, 1311, 1317, 1324, 1331, 1337, 1344, 1350, 1357, 1364, 1371, 1378, 1387, 1392, 1399, 1406, 1412, 1419, 1426, 1433, 1439, 1446, 1453, 1459, 1466, 1473, 1480, 1486, 1493, 1500, 1506, 1517, 1524, 1529, 1536, 1542, 1549, 1554, 1560, 1566, 1572, 1579, 1586, 1592, 1599, 1606, 1613, 1620, 1627, 1634, 1641, 1648, 1655, 1661, 1667, 1670, 1677, 1685, 1688, 1695, 1703, 1707, 1713, 1733, 1749, 1758, 1762, 1774, 1782, 1791, and 1975; or
[6369] (iv)
[6370] VL1 comprises an amino acid sequence that is at least 65%, at least 70%, at least 75%, at least 80%, at least 85%, at least 90%, at least 95%, at least 99%, or 100% identical to any one of SEQ ID NOs: 1098, 1105, 1112, 1122, 1129, 1136, 1143, 1150, 1157, 1164, 1171, 1176, 1183, 1190, 1196, 1202, 1208, 1214, 1219, 1223, 1230, 1237, 1242, 1249, 1256, 1263, 1268, 1273, 1280, 1287, 1294, 1301, 1308, 1314, 1321, 1328, 1334, 1341, 1347, 1354, 1361, 1368, 1375, 1380, 1384, 1390, 1396, 1403, 1410, 1416, 1423, 1430, 1436, 1443, 1450, 1457, 1463, 1470, 1477, 1483, 1490, 1497, 1503, 1510, 1514, 1521, 1527, 1533, 1540, 1546, 1551, 1558, 1563, 1570, 1576, 1583, 1589, 1596, 1603, 1610, 1617, 1624, 1631, 1638, 1645, 1652, 1659, 1664, 1669, 1674, 1682, 1692, 1700, 1711, 1721, 1724, 1730, 1740, 1746, 1755, 1764, 1766, 1771, 1779, 1784, and 1788;
[6371] VL2 comprises an amino acid sequence that is at least 65%, at least 70%, at least 75%, at least 80%, at least 85%, at least 90%, at least 95%, at least 99%, or 100% identical to any one of SEQ ID NOs: 1098, 1105, 1112, 1122, 1129, 1136, 1143, 1150, 1157, 1164, 1171, 1176, 1183, 1190, 1196, 1202, 1208, 1214, 1219, 1223, 1230, 1237, 1242, 1249, 1256, 1263, 1268, 1273, 1280, 1287, 1294, 1301, 1308, 1314, 1321, 1328, 1334, 1341, 1347, 1354, 1361, 1368, 1375, 1380, 1384, 1390, 1396, 1403, 1410, 1416, 1423, 1430, 1436, 1443, 1450, 1457, 1463, 1470, 1477, 1483, 1490, 1497, 1503, 1510, 1514, 1521, 1527, 1533, 1540, 1546, 1551, 1558, 1563, 1570, 1576, 1583, 1589, 1596, 1603, 1610, 1617, 1624, 1631, 1638, 1645, 1652, 1659, 1664, 1669, 1674, 1682, 1692, 1700, 1711, 1721, 1724, 1730, 1740, 1746, 1755, 1764, 1766, 1771, 1779, 1784, and 1788;
[6372] VL3 comprises an amino acid sequence that is at least 65%, at least 70%, at least 75%, at least 80%, at least 85%, at least 90%, at least 95%, at least 99%, or 100% identical to any one of SEQ ID NOs: 1098, 1105, 1112, 1122, 1129, 1136, 1143, 1150, 1157, 1164, 1171, 1176, 1183, 1190, 1196, 1202, 1208, 1214, 1219, 1223, 1230, 1237, 1242, 1249, 1256, 1263, 1268, 1273, 1280, 1287, 1294, 1301, 1308, 1314, 1321, 1328, 1334, 1341, 1347, 1354, 1361, 1368, 1375, 1380, 1384, 1390, 1396, 1403, 1410, 1416, 1423, 1430, 1436, 1443, 1450, 1457, 1463, 1470, 1477, 1483, 1490, 1497, 1503, 1510, 1514, 1521, 1527, 1533, 1540, 1546, 1551, 1558, 1563, 1570, 1576, 1583, 1589, 1596, 1603, 1610, 1617, 1624, 1631, 1638, 1645, 1652, 1659, 1664, 1669, 1674, 1682, 1692, 1700, 1711, 1721, 1724, 1730, 1740, 1746, 1755, 1764, 1766, 1771, 1779, 1784, and 1788;
[6373] VL4 comprises an amino acid sequence that is at least 65%, at least 70%, at least 75%, at least 80%, at least 85%, at least 90%, at least 95%, at least 99%, or 100% identical to any one of SEQ ID NOs: 1098, 1105, 1112, 1122, 1129, 1136, 1143, 1150, 1157, 1164, 1171, 1176, 1183, 1190, 1196, 1202, 1208, 1214, 1219, 1223, 1230, 1237, 1242, 1249, 1256, 1263, 1268, 1273, 1280, 1287, 1294, 1301, 1308, 1314, 1321, 1328, 1334, 1341, 1347, 1354, 1361, 1368, 1375, 1380, 1384, 1390, 1396, 1403, 1410, 1416, 1423, 1430, 1436, 1443, 1450, 1457, 1463, 1470, 1477, 1483, 1490, 1497, 1503, 1510, 1514, 1521, 1527, 1533, 1540, 1546, 1551, 1558, 1563, 1570, 1576, 1583, 1589, 1596, 1603, 1610, 1617, 1624, 1631, 1638, 1645, 1652, 1659, 1664, 1669, 1674, 1682, 1692, 1700, 1711, 1721, 1724, 1730, 1740, 1746, 1755, 1764, 1766, 1771, 1779, 1784, and 1788;
[6374] VH1 comprises an amino acid sequence that is at least 65%, at least 70%, at least 75%, at least 80%, at least 85%, at least 90%, at least 95%, at least 99%, or 100% identical to any one of SEQ ID NOs: 1102, 1109, 1116, 1119, 1126, 1133, 1140, 1147, 1154, 1161, 1168, 1173, 1180, 1187, 1194, 1198, 1206, 1210, 1218, 1220, 1227, 1234, 1241, 1246, 1253, 1260, 1265, 1270, 1277, 1284, 1291, 1298, 1305, 1312, 1318, 1325, 1332, 1338, 1345, 1351, 1358, 1365, 1372, 1379, 1381, 1388, 1393, 1400, 1407, 1413, 1420, 1427, 1434, 1440, 1447, 1454, 1460, 1467, 1474, 1481, 1487, 1494, 1501, 1507, 1512, 1518, 1525, 1530, 1537, 1543, 1550, 1555, 1561, 1567, 1573, 1580, 1587, 1593, 1600, 1607, 1614, 1621, 1628, 1635, 1642, 1649, 1656, 1662, 1668, 1671, 1678, 1686, 1696, 1704, 1714, 1722, 1726, 1734, 1742, 1750, 1759, 1760, 1765, 1768, 1775, 1783, 1785, and 1792;
[6375] VH2 comprises an amino acid sequence that is at least 65%, at least 70%, at least 75%, at least 80%, at least 85%, at least 90%, at least 95%, at least 99%, or 100% identical to any one of SEQ ID NOs: 1102, 1109, 1116, 1119, 1126, 1133, 1140, 1147, 1154, 1161, 1168, 1173, 1180, 1187, 1194, 1198, 1206, 1210, 1218, 1220, 1227, 1234, 1241, 1246, 1253, 1260, 1265, 1270, 1277, 1284, 1291, 1298, 1305, 1312, 1318, 1325, 1332, 1338, 1345, 1351, 1358, 1365, 1372, 1379, 1381, 1388, 1393, 1400, 1407, 1413, 1420, 1427, 1434, 1440, 1447, 1454, 1460, 1467, 1474, 1481, 1487, 1494, 1501, 1507, 1512, 1518, 1525, 1530, 1537, 1543, 1550, 1555, 1561, 1567, 1573, 1580, 1587, 1593, 1600, 1607, 1614, 1621, 1628, 1635, 1642, 1649, 1656, 1662, 1668, 1671, 1678, 1686, 1696, 1704, 1714, 1722, 1726, 1734, 1742, 1750, 1759, 1760, 1765, 1768, 1775, 1783, 1785, and 1792;
[6376] VH3 comprises an amino acid sequence that is at least 65%, at least 70%, at least 75%, at least 80%, at least 85%, at least 90%, at least 95%, at least 99%, or 100% identical to any one of SEQ ID NOs: 1102, 1109, 1116, 1119, 1126, 1133, 1140, 1147, 1154, 1161, 1168, 1173, 1180, 1187, 1194, 1198, 1206, 1210, 1218, 1220, 1227, 1234, 1241, 1246, 1253, 1260, 1265, 1270, 1277, 1284, 1291, 1298, 1305, 1312, 1318, 1325, 1332, 1338, 1345, 1351, 1358, 1365, 1372, 1379, 1381, 1388, 1393, 1400, 1407, 1413, 1420, 1427, 1434, 1440, 1447, 1454, 1460, 1467, 1474, 1481, 1487, 1494, 1501, 1507, 1512, 1518, 1525, 1530, 1537, 1543, 1550, 1555, 1561, 1567, 1573, 1580, 1587, 1593, 1600, 1607, 1614, 1621, 1628, 1635, 1642, 1649, 1656, 1662, 1668, 1671, 1678, 1686, 1696, 1704, 1714, 1722, 1726, 1734, 1742, 1750, 1759, 1760, 1765, 1768, 1775, 1783, 1785, and 1792; and/or
[6377] VH4 comprises an amino acid sequence that is at least 65%, at least 70%, at least 75%, at least 80%, at least 85%, at least 90%, at least 95%, at least 99%, or 100% identical to any one of SEQ ID NOs: 1102, 1109, 1116, 1119, 1126, 1133, 1140, 1147, 1154, 1161, 1168, 1173, 1180, 1187, 1194, 1198, 1206, 1210, 1218, 1220, 1227, 1234, 1241, 1246, 1253, 1260, 1265, 1270, 1277, 1284, 1291, 1298, 1305, 1312, 1318, 1325, 1332, 1338, 1345, 1351, 1358, 1365, 1372, 1379, 1381, 1388, 1393, 1400, 1407, 1413, 1420, 1427, 1434, 1440, 1447, 1454, 1460, 1467, 1474, 1481, 1487, 1494, 1501, 1507, 1512, 1518, 1525, 1530, 1537, 1543, 1550, 1555, 1561, 1567, 1573, 1580, 1587, 1593, 1600, 1607, 1614, 1621, 1628, 1635, 1642, 1649, 1656, 1662, 1668, 1671, 1678, 1686, 1696, 1704, 1714, 1722, 1726, 1734, 1742, 1750, 1759, 1760, 1765, 1768, 1775, 1783, 1785, and 1792; or
[6378] (b)
[6379] (i)
[6380] VL1 comprises a light chain complementarity determining region 1 (LCDR1), LCDR2, and/or LCDR3 of an antibody selected from the group consisting of libivirumab, rmab, rivabazumab pegol, setoxaximab, suvizumab, suvratoxumab, sevirumab, pritoxaximab, porgaviximab, REGN-EB3, obiltoxaximab, gedivumab, foravirumab, larcaviximab, motavizumab, palivizumab, rafivirumab, regavirumab, tuvirumab, cosfroviximab, felvizumab, atidortoxumab, edobacomab, nebacumab, pateclizumab, raxibacumab, urtoxazumab, tosatoxumab, berlimatoxumab, CR6261, diridavumab, firivumab, lesofavumab, navivumab, exbivirumab, lenvervimab, bavituximab, bezlotoxumab, efungumab, leronlimab, nirsevimab, pagibaximab, panobacumab, tefibazumab, ansuvimab, atoltivimab, maftivimab, and odesivimab;
[6381] VL2 comprises a light chain complementarity determining region 1 (LCDR1), LCDR2, and/or LCDR3 of an antibody selected from the group consisting of libivirumab, rmab, rivabazumab pegol, setoxaximab, suvizumab, suvratoxumab, sevirumab, pritoxaximab, porgaviximab, REGN-EB3, obiltoxaximab, gedivumab, foravirumab, larcaviximab, motavizumab, palivizumab, rafivirumab, regavirumab, tuvirumab, cosfroviximab, felvizumab, atidortoxumab, edobacomab, nebacumab, pateclizumab, raxibacumab, urtoxazumab, tosatoxumab, berlimatoxumab, CR6261, diridavumab, firivumab, lesofavumab, navivumab, exbivirumab, lenvervimab, bavituximab, bezlotoxumab, efungumab, leronlimab, nirsevimab, pagibaximab, panobacumab, tefibazumab, ansuvimab, atoltivimab, maftivimab, and odesivimab;
[6382] VL3 comprises a light chain complementarity determining region 1 (LCDR1), LCDR2, and/or LCDR3 of an antibody selected from the group consisting of libivirumab, rmab, rivabazumab pegol, setoxaximab, suvizumab, suvratoxumab, sevirumab, pritoxaximab, porgaviximab, REGN-EB3, obiltoxaximab, gedivumab, foravirumab, larcaviximab, motavizumab, palivizumab, rafivirumab, regavirumab, tuvirumab, cosfroviximab, felvizumab, atidortoxumab, edobacomab, nebacumab, pateclizumab, raxibacumab, urtoxazumab, tosatoxumab, berlimatoxumab, CR6261, diridavumab, firivumab, lesofavumab, navivumab, exbivirumab, lenvervimab, bavituximab, bezlotoxumab, efungumab, leronlimab, nirsevimab, pagibaximab, panobacumab, tefibazumab, ansuvimab, atoltivimab, maftivimab, and odesivimab;
[6383] VL4 comprises a light chain complementarity determining region 1 (LCDR1), LCDR2, and/or LCDR3 of an antibody selected from the group consisting of libivirumab, rmab, rivabazumab pegol, setoxaximab, suvizumab, suvratoxumab, sevirumab, pritoxaximab, porgaviximab, REGN-EB3, obiltoxaximab, gedivumab, foravirumab, larcaviximab, motavizumab, palivizumab, rafivirumab, regavirumab, tuvirumab, cosfroviximab, felvizumab, atidortoxumab, edobacomab, nebacumab, pateclizumab, raxibacumab, urtoxazumab, tosatoxumab, berlimatoxumab, CR6261, diridavumab, firivumab, lesofavumab, navivumab, exbivirumab, lenvervimab, bavituximab, bezlotoxumab, efungumab, leronlimab, nirsevimab, pagibaximab, panobacumab, tefibazumab, ansuvimab, atoltivimab, maftivimab, and odesivimab;
[6384] VH1 comprises a heavy chain complementarity determining region 1 (HCDR1), HCDR2, and/or HCDR3 of an antibody selected from the group consisting of libivirumab, rmab, rivabazumab pegol, setoxaximab, suvizumab, suvratoxumab, sevirumab, pritoxaximab, porgaviximab, REGN-EB3, obiltoxaximab, gedivumab, foravirumab, larcaviximab, motavizumab, palivizumab, rafivirumab, regavirumab, tuvirumab, cosfroviximab, felvizumab, atidortoxumab, edobacomab, nebacumab, pateclizumab, raxibacumab, urtoxazumab, tosatoxumab, berlimatoxumab, CR6261, diridavumab, firivumab, lesofavumab, navivumab, exbivirumab, lenvervimab, bavituximab, bezlotoxumab, efungumab, leronlimab, nirsevimab, pagibaximab, panobacumab, tefibazumab, ansuvimab, atoltivimab, maftivimab, and odesivimab;
[6385] VH2 comprises a heavy chain complementarity determining region 1 (HCDR1), HCDR2, and/or HCDR3 of an antibody selected from the group consisting of libivirumab, rmab, rivabazumab pegol, setoxaximab, suvizumab, suvratoxumab, sevirumab, pritoxaximab, porgaviximab, REGN-EB3, obiltoxaximab, gedivumab, foravirumab, larcaviximab, motavizumab, palivizumab, rafivirumab, regavirumab, tuvirumab, cosfroviximab, felvizumab, atidortoxumab, edobacomab, nebacumab, pateclizumab, raxibacumab, urtoxazumab, tosatoxumab, berlimatoxumab, CR6261, diridavumab, firivumab, lesofavumab, navivumab, exbivirumab, lenvervimab, bavituximab, bezlotoxumab, efungumab, leronlimab, nirsevimab, pagibaximab, panobacumab, tefibazumab, ansuvimab, atoltivimab, maftivimab, and odesivimab;
[6386] VH3 comprises a heavy chain complementarity determining region 1 (HCDR1), HCDR2, and/or HCDR3 of an antibody selected from the group consisting of libivirumab, rmab, rivabazumab pegol, setoxaximab, suvizumab, suvratoxumab, sevirumab, pritoxaximab, porgaviximab, REGN-EB3, obiltoxaximab, gedivumab, foravirumab, larcaviximab, motavizumab, palivizumab, rafivirumab, regavirumab, tuvirumab, cosfroviximab, felvizumab, atidortoxumab, edobacomab, nebacumab, pateclizumab, raxibacumab, urtoxazumab, tosatoxumab, berlimatoxumab, CR6261, diridavumab, firivumab, lesofavumab, navivumab, exbivirumab, lenvervimab, bavituximab, bezlotoxumab, efungumab, leronlimab, nirsevimab, pagibaximab, panobacumab, tefibazumab, ansuvimab, atoltivimab, maftivimab, and odesivimab; and/or
[6387] VH4 comprises a heavy chain complementarity determining region 1 (HCDR1), HCDR2, and/or HCDR3 of an antibody selected from the group consisting of libivirumab, rmab, rivabazumab pegol, setoxaximab, suvizumab, suvratoxumab, sevirumab, pritoxaximab, porgaviximab, REGN-EB3, obiltoxaximab, gedivumab, foravirumab, larcaviximab, motavizumab, palivizumab, rafivirumab, regavirumab, tuvirumab, cosfroviximab, felvizumab, atidortoxumab, edobacomab, nebacumab, pateclizumab, raxibacumab, urtoxazumab, tosatoxumab, berlimatoxumab, CR6261, diridavumab, firivumab, lesofavumab, navivumab, exbivirumab, lenvervimab, bavituximab, bezlotoxumab, efungumab, leronlimab, nirsevimab, pagibaximab, panobacumab, tefibazumab, ansuvimab, atoltivimab, maftivimab, and odesivimab; or
[6388] (ii)
[6389] VL1 comprises a VL of an antibody selected from the group consisting of libivirumab, rmab, rivabazumab pegol, setoxaximab, suvizumab, suvratoxumab, sevirumab, pritoxaximab, porgaviximab, REGN-EB3, obiltoxaximab, gedivumab, foravirumab, larcaviximab, motavizumab, palivizumab, rafivirumab, regavirumab, tuvirumab, cosfroviximab, felvizumab, atidortoxumab, edobacomab, nebacumab, pateclizumab, raxibacumab, urtoxazumab, tosatoxumab, berlimatoxumab, CR6261, diridavumab, firivumab, lesofavumab, navivumab, exbivirumab, lenvervimab, bavituximab, bezlotoxumab, efungumab, leronlimab, nirsevimab, pagibaximab, panobacumab, tefibazumab, ansuvimab, atoltivimab, maftivimab, and odesivimab;
[6390] VL2 comprises a VL of an antibody selected from the group consisting of libivirumab, rmab, rivabazumab pegol, setoxaximab, suvizumab, suvratoxumab, sevirumab, pritoxaximab, porgaviximab, REGN-EB3, obiltoxaximab, gedivumab, foravirumab, larcaviximab, motavizumab, palivizumab, rafivirumab, regavirumab, tuvirumab, cosfroviximab, felvizumab, atidortoxumab, edobacomab, nebacumab, pateclizumab, raxibacumab, urtoxazumab, tosatoxumab, berlimatoxumab, CR6261, diridavumab, firivumab, lesofavumab, navivumab, exbivirumab, lenvervimab, bavituximab, bezlotoxumab, efungumab, leronlimab, nirsevimab, pagibaximab, panobacumab, tefibazumab, ansuvimab, atoltivimab, maftivimab, and odesivimab;
[6391] VL3 comprises a VL of an antibody selected from the group consisting of libivirumab, rmab, rivabazumab pegol, setoxaximab, suvizumab, suvratoxumab, sevirumab, pritoxaximab, porgaviximab, REGN-EB3, obiltoxaximab, gedivumab, foravirumab, larcaviximab, motavizumab, palivizumab, rafivirumab, regavirumab, tuvirumab, cosfroviximab, felvizumab, atidortoxumab, edobacomab, nebacumab, pateclizumab, raxibacumab, urtoxazumab, tosatoxumab, berlimatoxumab, CR6261, diridavumab, firivumab, lesofavumab, navivumab, exbivirumab, lenvervimab, bavituximab, bezlotoxumab, efungumab, leronlimab, nirsevimab, pagibaximab, panobacumab, tefibazumab, ansuvimab, atoltivimab, maftivimab, and odesivimab;
[6392] VL4 comprises a VL of an antibody selected from the group consisting of libivirumab, rmab, rivabazumab pegol, setoxaximab, suvizumab, suvratoxumab, sevirumab, pritoxaximab, porgaviximab, REGN-EB3, obiltoxaximab, gedivumab, foravirumab, larcaviximab, motavizumab, palivizumab, rafivirumab, regavirumab, tuvirumab, cosfroviximab, felvizumab, atidortoxumab, edobacomab, nebacumab, pateclizumab, raxibacumab, urtoxazumab, tosatoxumab, berlimatoxumab, CR6261, diridavumab, firivumab, lesofavumab, navivumab, exbivirumab, lenvervimab, bavituximab, bezlotoxumab, efungumab, leronlimab, nirsevimab, pagibaximab, panobacumab, tefibazumab, ansuvimab, atoltivimab, maftivimab, and odesivimab;
[6393] VH1 comprises a VH of an antibody selected from the group consisting of libivirumab, rmab, rivabazumab pegol, setoxaximab, suvizumab, suvratoxumab, sevirumab, pritoxaximab, porgaviximab, REGN-EB3, obiltoxaximab, gedivumab, foravirumab, larcaviximab, motavizumab, palivizumab, rafivirumab, regavirumab, tuvirumab, cosfroviximab, felvizumab, atidortoxumab, edobacomab, nebacumab, pateclizumab, raxibacumab, urtoxazumab, tosatoxumab, berlimatoxumab, CR6261, diridavumab, firivumab, lesofavumab, navivumab, exbivirumab, lenvervimab, bavituximab, bezlotoxumab, efungumab, leronlimab, nirsevimab, pagibaximab, panobacumab, tefibazumab, ansuvimab, atoltivimab, maftivimab, and odesivimab;
[6394] VH2 comprises a VH of an antibody selected from the group consisting of libivirumab, rmab, rivabazumab pegol, setoxaximab, suvizumab, suvratoxumab, sevirumab, pritoxaximab, porgaviximab, REGN-EB3, obiltoxaximab, gedivumab, foravirumab, larcaviximab, motavizumab, palivizumab, rafivirumab, regavirumab, tuvirumab, cosfroviximab, felvizumab, atidortoxumab, edobacomab, nebacumab, pateclizumab, raxibacumab, urtoxazumab, tosatoxumab, berlimatoxumab, CR6261, diridavumab, firivumab, lesofavumab, navivumab, exbivirumab, lenvervimab, bavituximab, bezlotoxumab, efungumab, leronlimab, nirsevimab, pagibaximab, panobacumab, tefibazumab, ansuvimab, atoltivimab, maftivimab, and odesivimab;
[6395] VH3 comprises a VH of an antibody selected from the group consisting of libivirumab, rmab, rivabazumab pegol, setoxaximab, suvizumab, suvratoxumab, sevirumab, pritoxaximab, porgaviximab, REGN-EB3, obiltoxaximab, gedivumab, foravirumab, larcaviximab, motavizumab, palivizumab, rafivirumab, regavirumab, tuvirumab, cosfroviximab, felvizumab, atidortoxumab, edobacomab, nebacumab, pateclizumab, raxibacumab, urtoxazumab, tosatoxumab, berlimatoxumab, CR6261, diridavumab, firivumab, lesofavumab, navivumab, exbivirumab, lenvervimab, bavituximab, bezlotoxumab, efungumab, leronlimab, nirsevimab, pagibaximab, panobacumab, tefibazumab, ansuvimab, atoltivimab, maftivimab, and odesivimab; and/or
[6396] VH4 comprises a VH of an antibody selected from the group consisting of libivirumab, rmab, rivabazumab pegol, setoxaximab, suvizumab, suvratoxumab, sevirumab, pritoxaximab, porgaviximab, REGN-EB3, obiltoxaximab, gedivumab, foravirumab, larcaviximab, motavizumab, palivizumab, rafivirumab, regavirumab, tuvirumab, cosfroviximab, felvizumab, atidortoxumab, edobacomab, nebacumab, pateclizumab, raxibacumab, urtoxazumab, tosatoxumab, berlimatoxumab, CR6261, diridavumab, firivumab, lesofavumab, navivumab, exbivirumab, lenvervimab, bavituximab, bezlotoxumab, efungumab, leronlimab, nirsevimab, pagibaximab, panobacumab, tefibazumab, ansuvimab, atoltivimab, maftivimab, and odesivimab; or
[6397] (iii)
[6398] VL1 comprises (i) a complementarity determining region (CDR) 1 having an amino acid sequence that is at least 65%, at least 70%, at least 75%, at least 80%, at least 85%, at least 90%, at least 95%, at least 99%, or 100% identical to any one of SEQ ID NOs: 1428, 1793, 1798, 1810, 1817, 1824, 1977, 1985, 1993 and 2001; (ii) a CDR2 having an amino acid sequence that is at least 65%, at least 70%, at least 75%, at least 80%, at least 85%, at least 90%, at least 95%, at least 99%, or 100% identical to any one of SEQ ID NOs: 1978, 1986, 1994, and 2002; or at least 65%, at least 70%, at least 75%, at least 80%, at least 85%, at least 90%, at least 95%, at least 99%, or 100% identical to any one of amino acid sequences YTS, DTS, GAS, and AAS; and (iii) a CDR3 having an amino acid sequence that is at least 65%, at least 70%, at least 75%, at least 80%, at least 85%, at least 90%, at least 95%, at least 99%, or 100% identical to any one of SEQ ID NOs: 1229, 1799, 1805, 1811, 1818, 1825, 1979, 1987, 1995, and 2003;
[6399] VL2 comprises (i) a complementarity determining region (CDR) 1 having an amino acid sequence that is at least 65%, at least 70%, at least 75%, at least 80%, at least 85%, at least 90%, at least 95%, at least 99%, or 100% identical to any one of SEQ ID NOs: 1428, 1793, 1798, 1810, 1817, 1824, 1977, 1985, 1993 and 2001; (ii) a CDR2 having an amino acid sequence that is at least 65%, at least 70%, at least 75%, at least 80%, at least 85%, at least 90%, at least 95%, at least 99%, or 100% identical to any one of SEQ ID NOs: 1978, 1986, 1994, and 2002; or at least 65%, at least 70%, at least 75%, at least 80%, at least 85%, at least 90%, at least 95%, at least 99%, or 100% identical to any one of amino acid sequences YTS, DTS, GAS, and AAS; and (iii) a CDR3 having an amino acid sequence that is at least 65%, at least 70%, at least 75%, at least 80%, at least 85%, at least 90%, at least 95%, at least 99%, or 100% identical to any one of SEQ ID NOs: 1229, 1799, 1805, 1811, 1818, 1825, 1979, 1987, 1995, and 2003;
[6400] VL3 comprises (i) a complementarity determining region (CDR) 1 having an amino acid sequence that is at least 65%, at least 70%, at least 75%, at least 80%, at least 85%, at least 90%, at least 95%, at least 99%, or 100% identical to any one of SEQ ID NOs: 1428, 1793, 1798, 1810, 1817, 1824, 1977, 1985, 1993 and 2001; (ii) a CDR2 having an amino acid sequence that is at least 65%, at least 70%, at least 75%, at least 80%, at least 85%, at least 90%, at least 95%, at least 99%, or 100% identical to any one of SEQ ID NOs: 1978, 1986, 1994, and 2002; or at least 65%, at least 70%, at least 75%, at least 80%, at least 85%, at least 90%, at least 95%, at least 99%, or 100% identical to any one of amino acid sequences YTS, DTS, GAS, and AAS; and (iii) a CDR3 having an amino acid sequence that is at least 65%, at least 70%, at least 75%, at least 80%, at least 85%, at least 90%, at least 95%, at least 99%, or 100% identical to any one of SEQ ID NOs: 1229, 1799, 1805, 1811, 1818, 1825, 1979, 1987, 1995, and 2003;
[6401] VL4 comprises (i) a complementarity determining region (CDR) 1 having an amino acid sequence that is at least 65%, at least 70%, at least 75%, at least 80%, at least 85%, at least 90%, at least 95%, at least 99%, or 100% identical to any one of SEQ ID NOs: 1428, 1793, 1798, 1810, 1817, 1824, 1977, 1985, 1993 and 2001; (ii) a CDR2 having an amino acid sequence that is at least 65%, at least 70%, at least 75%, at least 80%, at least 85%, at least 90%, at least 95%, at least 99%, or 100% identical to any one of SEQ ID NOs: 1978, 1986, 1994, and 2002; or at least 65%, at least 70%, at least 75%, at least 80%, at least 85%, at least 90%, at least 95%, at least 99%, or 100% identical to any one of amino acid sequences YTS, DTS, GAS, and AAS; and (iii) a CDR3 having an amino acid sequence that is at least 65%, at least 70%, at least 75%, at least 80%, at least 85%, at least 90%, at least 95%, at least 99%, or 100% identical to any one of SEQ ID NOs: 1229, 1799, 1805, 1811, 1818, 1825, 1979, 1987, 1995, and 2003;
[6402] VH1 comprises (i) a complementarity determining region (CDR) 1 having an amino acid sequence that is at least 65%, at least 70%, at least 75%, at least 80%, at least 85%, at least 90%, at least 95%, at least 99%, or 100% identical to any one of SEQ ID NOs: 1577, 1795, 1801, 1813, 1820, 1827, 1981, 1989, 1997, and 2005; (ii) a CDR2 having an amino acid sequence that is at least 65%, at least 70%, at least 75%, at least 80%, at least 85%, at least 90%, at least 95%, at least 99%, or 100% identical to any one of SEQ ID NOs: 1159, 1802, 1807, 1814, 1821, 1828, 1982, 1990, 1998, and 2006; and (iii) a CDR3 having an amino acid sequence that is at least 65%, at least 70%, at least 75%, at least 80%, at least 85%, at least 90%, at least 95%, at least 99%, or 100% identical to any one of SEQ ID NOs: 1796, 1803, 1808, 1815, 1822, 1829, 1983, 1991, 1999, and 2007;
[6403] VH2 comprises (i) a complementarity determining region (CDR) 1 having an amino acid sequence that is at least 65%, at least 70%, at least 75%, at least 80%, at least 85%, at least 90%, at least 95%, at least 99%, or 100% identical to any one of SEQ ID NOs: 1577, 1795, 1801, 1813, 1820, 1827, 1981, 1989, 1997, and 2005; (ii) a CDR2 having an amino acid sequence that is at least 65%, at least 70%, at least 75%, at least 80%, at least 85%, at least 90%, at least 95%, at least 99%, or 100% identical to any one of SEQ ID NOs: 1159, 1802, 1807, 1814, 1821, 1828, 1982, 1990, 1998, and 2006; and (iii) a CDR3 having an amino acid sequence that is at least 65%, at least 70%, at least 75%, at least 80%, at least 85%, at least 90%, at least 95%, at least 99%, or 100% identical to any one of SEQ ID NOs: 1796, 1803, 1808, 1815, 1822, 1829, 1983, 1991, 1999, and 2007;
[6404] VH3 comprises (i) a complementarity determining region (CDR) 1 having an amino acid sequence that is at least 65%, at least 70%, at least 75%, at least 80%, at least 85%, at least 90%, at least 95%, at least 99%, or 100% identical to any one of SEQ ID NOs: 1577, 1795, 1801, 1813, 1820, 1827, 1981, 1989, 1997, and 2005; (ii) a CDR2 having an amino acid sequence that is at least 65%, at least 70%, at least 75%, at least 80%, at least 85%, at least 90%, at least 95%, at least 99%, or 100% identical to any one of SEQ ID NOs: 1159, 1802, 1807, 1814, 1821, 1828, 1982, 1990, 1998, and 2006; and (iii) a CDR3 having an amino acid sequence that is at least 65%, at least 70%, at least 75%, at least 80%, at least 85%, at least 90%, at least 95%, at least 99%, or 100% identical to any one of SEQ ID NOs: 1796, 1803, 1808, 1815, 1822, 1829, 1983, 1991, 1999, and 2007; and/or
[6405] VH4 comprises (i) a complementarity determining region (CDR) 1 having an amino acid sequence that is at least 65%, at least 70%, at least 75%, at least 80%, at least 85%, at least 90%, at least 95%, at least 99%, or 100% identical to any one of SEQ ID NOs: 1577, 1795, 1801, 1813, 1820, 1827, 1981, 1989, 1997, and 2005; (ii) a CDR2 having an amino acid sequence that is at least 65%, at least 70%, at least 75%, at least 80%, at least 85%, at least 90%, at least 95%, at least 99%, or 100% identical to any one of SEQ ID NOs: 1159, 1802, 1807, 1814, 1821, 1828, 1982, 1990, 1998, and 2006; and (iii) a CDR3 having an amino acid sequence that is at least 65%, at least 70%, at least 75%, at least 80%, at least 85%, at least 90%, at least 95%, at least 99%, or 100% identical to any one of SEQ ID NOs: 1796, 1803, 1808, 1815, 1822, 1829, 1983, 1991, 1999, and 2007; or
[6406] (iv)
[6407] VL1 comprises an amino acid sequence that is at least 65%, at least 70%, at least 75%, at least 80%, at least 85%, at least 90%, at least 95%, at least 99%, or 100% identical to any one of SEQ ID NOs: 1794, 1800, 1806, 1812, 1819, 1826, 1980, 1988, 1996, and 2004;
[6408] VL2 comprises an amino acid sequence that is at least 65%, at least 70%, at least 75%, at least 80%, at least 85%, at least 90%, at least 95%, at least 99%, or 100% identical to any one of SEQ ID NOs: 1794, 1800, 1806, 1812, 1819, 1826, 1980, 1988, 1996, and 2004;
[6409] VL3 comprises an amino acid sequence that is at least 65%, at least 70%, at least 75%, at least 80%, at least 85%, at least 90%, at least 95%, at least 99%, or 100% identical to any one of SEQ ID NOs: 1794, 1800, 1806, 1812, 1819, 1826, 1980, 1988, 1996, and 2004;
[6410] VL4 comprises an amino acid sequence that is at least 65%, at least 70%, at least 75%, at least 80%, at least 85%, at least 90%, at least 95%, at least 99%, or 100% identical to any one of SEQ ID NOs: 1794, 1800, 1806, 1812, 1819, 1826, 1980, 1988, 1996, and 2004;
[6411] VH1 comprises an amino acid sequence that is at least 65%, at least 70%, at least 75%, at least 80%, at least 85%, at least 90%, at least 95%, at least 99%, or 100% identical to any one of SEQ ID NOS 1797, 1804, 1809, 1816, 1823, 1830, 1984, 1992, 2000, and 2008;
[6412] VH2 comprises an amino acid sequence that is at least 65%, at least 70%, at least 75%, at least 80%, at least 85%, at least 90%, at least 95%, at least 99%, or 100% identical to any one of SEQ ID NOS 1797, 1804, 1809, 1816, 1823, 1830, 1984, 1992, 2000, and 2008;
[6413] VH3 comprises an amino acid sequence that is at least 65%, at least 70%, at least 75%, at least 80%, at least 85%, at least 90%, at least 95%, at least 99%, or 100% identical to any one of SEQ ID NOS 1797, 1804, 1809, 1816, 1823, 1830, 1984, 1992, 2000, and 2008; and/or
[6414] VH4 comprises an amino acid sequence that is at least 65%, at least 70%, at least 75%, at least 80%, at least 85%, at least 90%, at least 95%, at least 99%, or 100% identical to any one of SEQ ID NOs 1797, 1804, 1809, 1816, 1823, 1830, 1984, 1992, 2000, and 2008; or
[6415] (c)
[6416] (i)
[6417] VL1 comprises a light chain complementarity determining region 1 (LCDR1), LCDR2, and/or LCDR3 of an antibody selected from the group consisting of aducanumab, alirocumab, frovocimab, lodelcizumab, bococizumab, evolocumab, ralpancizumab, anifrolumab, atorolimumab, bapineuzumab, bedinvetmab, begelomab, biciromab, bimagrumab, birtamimab, blosozumab, burosumab, caplacizumab, concizumab, crenezumab, crizanlizumab, crotedumab, dezamizumab, domagrozumab, donanemab, eldelumab, elezanumab, emapalumab, emicizumab, eptinezumab, erenumab, evinacumab, faralimomab, fasinumab, fontolizumab, fremanezumab, frunevetmab, fulranumab, galcanezumab, gantenerumab, gosuranemab, idarucizumab, imciromab, inclacumab, lampalizumab, lanadelumab, landogrozumab, lecanemab, ligelizumab, marstacimab, mavrilimumab, morolimumab, NEOD001, omalizumab, oMS721, orticumab, otilimab, ozanezumab, ponezumab, prasinezumab, quilizumab, ranevetmab, refanezumab, roledumab, romosozumab, rozanolixizumab, setrusumab, SHP647, solanezumab, stamulumab, suptavumab, sutimlimab, tanezumab, crovalimab, and lokivetmab;
[6418] VL2 comprises a light chain complementarity determining region 1 (LCDR1), LCDR2, and/or LCDR3 of an antibody selected from the group consisting of aducanumab, alirocumab, frovocimab, lodelcizumab, bococizumab, evolocumab, ralpancizumab, anifrolumab, atorolimumab, bapineuzumab, bedinvetmab, begelomab, biciromab, bimagrumab, birtamimab, blosozumab, burosumab, caplacizumab, concizumab, crenezumab, crizanlizumab, crotedumab, dezamizumab, domagrozumab, donanemab, eldelumab, elezanumab, emapalumab, emicizumab, eptinezumab, erenumab, evinacumab, faralimomab, fasinumab, fontolizumab, fremanezumab, frunevetmab, fulranumab, galcanezumab, gantenerumab, gosuranemab, idarucizumab, imciromab, inclacumab, lampalizumab, lanadelumab, landogrozumab, lecanemab, ligelizumab, marstacimab, mavrilimumab, morolimumab, NEOD001, omalizumab, oMS721, orticumab, otilimab, ozanezumab, ponezumab, prasinezumab, quilizumab, ranevetmab, refanezumab, roledumab, romosozumab, rozanolixizumab, setrusumab, SHP647, solanezumab, stamulumab, suptavumab, sutimlimab, tanezumab, crovalimab, and lokivetmab;
[6419] VL3 comprises a light chain complementarity determining region 1 (LCDR1), LCDR2, and/or LCDR3 of an antibody selected from the group consisting of aducanumab, alirocumab, frovocimab, lodelcizumab, bococizumab, evolocumab, ralpancizumab, anifrolumab, atorolimumab, bapineuzumab, bedinvetmab, begelomab, biciromab, bimagrumab, birtamimab, blosozumab, burosumab, caplacizumab, concizumab, crenezumab, crizanlizumab, crotedumab, dezamizumab, domagrozumab, donanemab, eldelumab, elezanumab, emapalumab, emicizumab, eptinezumab, erenumab, evinacumab, faralimomab, fasinumab, fontolizumab, fremanezumab, frunevetmab, fulranumab, galcanezumab, gantenerumab, gosuranemab, idarucizumab, imciromab, inclacumab, lampalizumab, lanadelumab, landogrozumab, lecanemab, ligelizumab, marstacimab, mavrilimumab, morolimumab, NEOD001, omalizumab, oMS721, orticumab, otilimab, ozanezumab, ponezumab, prasinezumab, quilizumab, ranevetmab, refanezumab, roledumab, romosozumab, rozanolixizumab, setrusumab, SHP647, solanezumab, stamulumab, suptavumab, sutimlimab, tanezumab, crovalimab, and lokivetmab;
[6420] VL4 comprises a light chain complementarity determining region 1 (LCDR1), LCDR2, and/or LCDR3 of an antibody selected from the group consisting of aducanumab, alirocumab, frovocimab, lodelcizumab, bococizumab, evolocumab, ralpancizumab, anifrolumab, atorolimumab, bapineuzumab, bedinvetmab, begelomab, biciromab, bimagrumab, birtamimab, blosozumab, burosumab, caplacizumab, concizumab, crenezumab, crizanlizumab, crotedumab, dezamizumab, domagrozumab, donanemab, eldelumab, elezanumab, emapalumab, emicizumab, eptinezumab, erenumab, evinacumab, faralimomab, fasinumab, fontolizumab, fremanezumab, frunevetmab, fulranumab, galcanezumab, gantenerumab, gosuranemab, idarucizumab, imciromab, inclacumab, lampalizumab, lanadelumab, landogrozumab, lecanemab, ligelizumab, marstacimab, mavrilimumab, morolimumab, NEOD001, omalizumab, oMS721, orticumab, otilimab, ozanezumab, ponezumab, prasinezumab, quilizumab, ranevetmab, refanezumab, roledumab, romosozumab, rozanolixizumab, setrusumab, SHP647, solanezumab, stamulumab, suptavumab, sutimlimab, tanezumab, crovalimab, and lokivetmab;
[6421] VH1 comprises a heavy chain complementarity determining region 1 (HCDR1), HCDR2, and/or HCDR3 of an antibody selected from the group consisting of aducanumab, alirocumab, frovocimab, lodelcizumab, bococizumab, evolocumab, ralpancizumab, anifrolumab, atorolimumab, bapineuzumab, bedinvetmab, begelomab, biciromab, bimagrumab, birtamimab, blosozumab, burosumab, caplacizumab, concizumab, crenezumab, crizanlizumab, crotedumab, dezamizumab, domagrozumab, donanemab, eldelumab, elezanumab, emapalumab, emicizumab, eptinezumab, erenumab, evinacumab, faralimomab, fasinumab, fontolizumab, fremanezumab, frunevetmab, fulranumab, galcanezumab, gantenerumab, gosuranemab, idarucizumab, imciromab, inclacumab, lampalizumab, lanadelumab, landogrozumab, lecanemab, ligelizumab, marstacimab, mavrilimumab, morolimumab, NEOD001, omalizumab, oMS721, orticumab, otilimab, ozanezumab, ponezumab, prasinezumab, quilizumab, ranevetmab, refanezumab, roledumab, romosozumab, rozanolixizumab, setrusumab, SHP647, solanezumab, stamulumab, suptavumab, sutimlimab, tanezumab, crovalimab, and lokivetmab;
[6422] VH2 comprises a heavy chain complementarity determining region 1 (HCDR1), HCDR2, and/or HCDR3 of an antibody selected from the group consisting of aducanumab, alirocumab, frovocimab, lodelcizumab, bococizumab, evolocumab, ralpancizumab, anifrolumab, atorolimumab, bapineuzumab, bedinvetmab, begelomab, biciromab, bimagrumab, birtamimab, blosozumab, burosumab, caplacizumab, concizumab, crenezumab, crizanlizumab, crotedumab, dezamizumab, domagrozumab, donanemab, eldelumab, elezanumab, emapalumab, emicizumab, eptinezumab, erenumab, evinacumab, faralimomab, fasinumab, fontolizumab, fremanezumab, frunevetmab, fulranumab, galcanezumab, gantenerumab, gosuranemab, idarucizumab, imciromab, inclacumab, lampalizumab, lanadelumab, landogrozumab, lecanemab, ligelizumab, marstacimab, mavrilimumab, morolimumab, NEOD001, omalizumab, oMS721, orticumab, otilimab, ozanezumab, ponezumab, prasinezumab, quilizumab, ranevetmab, refanezumab, roledumab, romosozumab, rozanolixizumab, sctrusumab, SHP647, solanezumab, stamulumab, suptavumab, sutimlimab, tanezumab, crovalimab, and lokivetmab;
[6423] VH3 comprises a heavy chain complementarity determining region 1 (HCDR1), HCDR2, and/or HCDR3 of an antibody selected from the group consisting of aducanumab, alirocumab, frovocimab, lodelcizumab, bococizumab, evolocumab, ralpancizumab, anifrolumab, atorolimumab, bapineuzumab, bedinvetmab, begelomab, biciromab, bimagrumab, birtamimab, blosozumab, burosumab, caplacizumab, concizumab, crenezumab, crizanlizumab, crotedumab, dezamizumab, domagrozumab, donanemab, eldelumab, elezanumab, emapalumab, emicizumab, eptinezumab, erenumab, evinacumab, faralimomab, fasinumab, fontolizumab, fremanezumab, frunevetmab, fulranumab, galcanezumab, gantenerumab, gosuranemab, idarucizumab, imciromab, inclacumab, lampalizumab, lanadelumab, landogrozumab, lecanemab, ligelizumab, marstacimab, mavrilimumab, morolimumab, NEOD001, omalizumab, oMS721, orticumab, otilimab, ozanezumab, ponezumab, prasinezumab, quilizumab, ranevetmab, refanezumab, roledumab, romosozumab, rozanolixizumab, setrusumab, SHP647, solanezumab, stamulumab, suptavumab, sutimlimab, tanezumab, crovalimab, and lokivetmab; and/or
[6424] VH4 comprises a heavy chain complementarity determining region 1 (HCDR1), HCDR2, and/or HCDR3 of an antibody selected from the group consisting of aducanumab, alirocumab, frovocimab, lodelcizumab, bococizumab, evolocumab, ralpancizumab, anifrolumab, atorolimumab, bapincuzumab, bedinvetmab, begelomab, biciromab, bimagrumab, birtamimab, blosozumab, burosumab, caplacizumab, concizumab, crenezumab, crizanlizumab, crotedumab, dezamizumab, domagrozumab, donanemab, eldelumab, elezanumab, emapalumab, emicizumab, eptinezumab, erenumab, evinacumab, faralimomab, fasinumab, fontolizumab, fremanezumab, frunevetmab, fulranumab, galcanezumab, gantenerumab, gosuranemab, idarucizumab, imciromab, inclacumab, lampalizumab, lanadelumab, landogrozumab, lecanemab, ligelizumab, marstacimab, mavrilimumab, morolimumab, NEOD001, omalizumab, oMS721, orticumab, otilimab, ozanezumab, ponezumab, prasinezumab, quilizumab, ranevetmab, refanezumab, roledumab, romosozumab, rozanolixizumab, sctrusumab, SHP647, solanczumab, stamulumab, suptavumab, sutimlimab, tanezumab, crovalimab, and lokivetmab; or
[6425] (ii)
[6426] VL1 comprises a VL of an antibody selected from the group consisting of aducanumab, alirocumab, frovocimab, lodelcizumab, bococizumab, evolocumab, ralpancizumab, anifrolumab, atorolimumab, bapineuzumab, bedinvetmab, begelomab, biciromab, bimagrumab, birtamimab, blosozumab, burosumab, caplacizumab, concizumab, crenezumab, crizanlizumab, crotedumab, dezamizumab, domagrozumab, donanemab, eldelumab, elezanumab, emapalumab, emicizumab, eptinezumab, erenumab, evinacumab, faralimomab, fasinumab, fontolizumab, fremanezumab, frunevetmab, fulranumab, galcanezumab, gantenerumab, gosuranemab, idarucizumab, imciromab, inclacumab, lampalizumab, lanadelumab, landogrozumab, lecanemab, ligelizumab, marstacimab, mavrilimumab, morolimumab, NEOD001, omalizumab, oMS721, orticumab, otilimab, ozanezumab, ponezumab, prasinezumab, quilizumab, ranevetmab, refanezumab, roledumab, romosozumab, rozanolixizumab, setrusumab, SHP647, solanezumab, stamulumab, suptavumab, sutimlimab, tanezumab, crovalimab, and lokivetmab;
[6427] VL2 comprises a VL of an antibody selected from the group consisting of aducanumab, alirocumab, frovocimab, lodelcizumab, bococizumab, evolocumab, ralpancizumab, anifrolumab, atorolimumab, bapineuzumab, bedinvetmab, begelomab, biciromab, bimagrumab, birtamimab, blosozumab, burosumab, caplacizumab, concizumab, crenezumab, crizanlizumab, crotedumab, dezamizumab, domagrozumab, donanemab, eldelumab, elezanumab, emapalumab, emicizumab, eptinezumab, erenumab, evinacumab, faralimomab, fasinumab, fontolizumab, fremanezumab, frunevetmab, fulranumab, galcanezumab, gantenerumab, gosuranemab, idarucizumab, imciromab, inclacumab, lampalizumab, lanadelumab, landogrozumab, lecanemab, ligelizumab, marstacimab, mavrilimumab, morolimumab, NEOD001, omalizumab, oMS721, orticumab, otilimab, ozanezumab, ponezumab, prasinezumab, quilizumab, ranevetmab, refanezumab, roledumab, romosozumab, rozanolixizumab, setrusumab, SHP647, solanezumab, stamulumab, suptavumab, sutimlimab, tanezumab, crovalimab, and lokivetmab;
[6428] VL3 comprises a VL of an antibody selected from the group consisting of aducanumab, alirocumab, frovocimab, lodelcizumab, bococizumab, evolocumab, ralpancizumab, anifrolumab, atorolimumab, bapineuzumab, bedinvetmab, begelomab, biciromab, bimagrumab, birtamimab, blosozumab, burosumab, caplacizumab, concizumab, crenezumab, crizanlizumab, crotedumab, dezamizumab, domagrozumab, donanemab, eldelumab, elezanumab, emapalumab, emicizumab, eptinezumab, erenumab, evinacumab, faralimomab, fasinumab, fontolizumab, fremanezumab, frunevetmab, fulranumab, galcanezumab, gantenerumab, gosuranemab, idarucizumab, imciromab, inclacumab, lampalizumab, lanadelumab, landogrozumab, lecanemab, ligelizumab, marstacimab, mavrilimumab, morolimumab, NEOD001, omalizumab, oMS721, orticumab, otilimab, ozanezumab, ponezumab, prasinezumab, quilizumab, ranevetmab, refanezumab, roledumab, romosozumab, rozanolixizumab, setrusumab, SHP647, solanezumab, stamulumab, suptavumab, sutimlimab, tanezumab, crovalimab, and lokivetmab;
[6429] VL4 comprises a VL of an antibody selected from the group consisting of aducanumab, alirocumab, frovocimab, lodelcizumab, bococizumab, evolocumab, ralpancizumab, anifrolumab, atorolimumab, bapineuzumab, bedinvetmab, begelomab, biciromab, bimagrumab, birtamimab, blosozumab, burosumab, caplacizumab, concizumab, crenezumab, crizanlizumab, crotedumab, dezamizumab, domagrozumab, donanemab, eldelumab, elezanumab, emapalumab, emicizumab, eptinezumab, erenumab, evinacumab, faralimomab, fasinumab, fontolizumab, fremanezumab, frunevetmab, fulranumab, galcanezumab, gantenerumab, gosuranemab, idarucizumab, imciromab, inclacumab, lampalizumab, lanadelumab, landogrozumab, lecanemab, ligelizumab, marstacimab, mavrilimumab, morolimumab, NEOD001, omalizumab, oMS721, orticumab, otilimab, ozanezumab, ponezumab, prasinezumab, quilizumab, ranevetmab, refanezumab, roledumab, romosozumab, rozanolixizumab, setrusumab, SHP647, solanezumab, stamulumab, suptavumab, sutimlimab, tanezumab, crovalimab, and lokivetmab;
[6430] VH1 comprises a VH of an antibody selected from the group consisting of aducanumab, alirocumab, frovocimab, lodelcizumab, bococizumab, evolocumab, ralpancizumab, anifrolumab, atorolimumab, bapincuzumab, bedinvetmab, begelomab, biciromab, bimagrumab, birtamimab, blosozumab, burosumab, caplacizumab, concizumab, crenezumab, crizanlizumab, crotedumab, dezamizumab, domagrozumab, donanemab, eldelumab, elezanumab, emapalumab, emicizumab, eptinezumab, erenumab, evinacumab, faralimomab, fasinumab, fontolizumab, fremanezumab, frunevetmab, fulranumab, galcanezumab, gantenerumab, gosuranemab, idarucizumab, imciromab, inclacumab, lampalizumab, lanadelumab, landogrozumab, lecanemab, ligelizumab, marstacimab, mavrilimumab, morolimumab, NEOD001, omalizumab, oMS721, orticumab, otilimab, ozanezumab, ponezumab, prasinezumab, quilizumab, ranevetmab, refanezumab, roledumab, romosozumab, rozanolixizumab, sctrusumab, SHP647, solanezumab, stamulumab, suptavumab, sutimlimab, tanezumab, crovalimab, and lokivetmab;
[6431] VH2 comprises a VH of an antibody selected from the group consisting of aducanumab, alirocumab, frovocimab, lodelcizumab, bococizumab, evolocumab, ralpancizumab, anifrolumab, atorolimumab, bapineuzumab, bedinvetmab, begelomab, biciromab, bimagrumab, birtamimab, blosozumab, burosumab, caplacizumab, concizumab, crenezumab, crizanlizumab, crotedumab, dezamizumab, domagrozumab, donanemab, eldelumab, elezanumab, emapalumab, emicizumab, eptinezumab, erenumab, evinacumab, faralimomab, fasinumab, fontolizumab, fremanezumab, frunevetmab, fulranumab, galcanezumab, gantenerumab, gosuranemab, idarucizumab, imciromab, inclacumab, lampalizumab, lanadelumab, landogrozumab, lecanemab, ligelizumab, marstacimab, mavrilimumab, morolimumab, NEOD001, omalizumab, oMS721, orticumab, otilimab, ozanezumab, ponezumab, prasinezumab, quilizumab, ranevetmab, refanezumab, roledumab, romosozumab, rozanolixizumab, setrusumab, SHP647, solanezumab, stamulumab, suptavumab, sutimlimab, tanezumab, crovalimab, and lokivetmab;
[6432] VH3 comprises a VH of an antibody selected from the group consisting of aducanumab, alirocumab, frovocimab, lodelcizumab, bococizumab, evolocumab, ralpancizumab, anifrolumab, atorolimumab, bapineuzumab, bedinvetmab, begelomab, biciromab, bimagrumab, birtamimab, blosozumab, burosumab, caplacizumab, concizumab, crenezumab, crizanlizumab, crotedumab, dezamizumab, domagrozumab, donanemab, eldelumab, elezanumab, emapalumab, emicizumab, eptinezumab, erenumab, evinacumab, faralimomab, fasinumab, fontolizumab, fremanezumab, frunevetmab, fulranumab, galcanezumab, gantenerumab, gosuranemab, idarucizumab, imciromab, inclacumab, lampalizumab, lanadelumab, landogrozumab, lecanemab, ligelizumab, marstacimab, mavrilimumab, morolimumab, NEOD001, omalizumab, oMS721, orticumab, otilimab, ozanezumab, ponezumab, prasinezumab, quilizumab, ranevetmab, refanezumab, roledumab, romosozumab, rozanolixizumab, setrusumab, SHP647, solanezumab, stamulumab, suptavumab, sutimlimab, tanezumab, crovalimab, and lokivetmab; and/or
[6433] VH4 comprises a VH of an antibody selected from the group consisting of aducanumab, alirocumab, frovocimab, lodelcizumab, bococizumab, evolocumab, ralpancizumab, anifrolumab, atorolimumab, bapineuzumab, bedinvetmab, begelomab, biciromab, bimagrumab, birtamimab, blosozumab, burosumab, caplacizumab, concizumab, crenezumab, crizanlizumab, crotedumab, dezamizumab, domagrozumab, donanemab, eldelumab, elezanumab, emapalumab, emicizumab, eptinezumab, erenumab, evinacumab, faralimomab, fasinumab, fontolizumab, fremanezumab, frunevetmab, fulranumab, galcanezumab, gantenerumab, gosuranemab, idarucizumab, imciromab, inclacumab, lampalizumab, lanadelumab, landogrozumab, lecanemab, ligelizumab, marstacimab, mavrilimumab, morolimumab, NEOD001, omalizumab, oMS721, orticumab, otilimab, ozanezumab, ponezumab, prasinezumab, quilizumab, ranevetmab, refanezumab, roledumab, romosozumab, rozanolixizumab, sctrusumab, SHP647, solanezumab, stamulumab, suptavumab, sutimlimab, tanezumab, crovalimab, and lokivetmab; or
[6434] (iii)
[6435] VL1 comprises (i) a complementarity determining region (CDR) 1 having an amino acid sequence that is at least 65%, at least 70%, at least 75%, at least 80%, at least 85%, at least 90%, at least 95%, at least 99%, or 100% identical to any one of SEQ ID NOs: 1120, 1228, 1359, 1519, 1831, 1838, 1845, 1852, 1859, 1866, 1872, 1878, 1885, 1891, 1898, 1905, 1911, 1917, 1924, 1931, 1938, 1945, and 1963; (ii) a CDR2 having an amino acid sequence that is at least 65%, at least 70%, at least 75%, at least 80%, at least 85%, at least 90%, at least 95%, at least 99%, or 100% identical to any one of amino acid sequences AAS, AVS, DAS, DNN, EDN, EVS, GAS, GNG, KAS, KVS, LVS, NTD, STS, WAS, and YTS; and (iii) a CDR3 having an amino acid sequence that is at least 65%, at least 70%, at least 75%, at least 80%, at least 85%, at least 90%, at least 95%, at least 99%, or 100% identical to any one of SEQ ID NOs: 1360, 1832, 1839, 1846, 1853, 1860, 1867, 1873, 1879, 1886, 1892, 1899, 1906, 1912, 1918, 1925, 1932, 1939, 1946, 1951, 1957, 1964, and 1970;
[6436] VL2 comprises (i) a complementarity determining region (CDR) 1 having an amino acid sequence that is at least 65%, at least 70%, at least 75%, at least 80%, at least 85%, at least 90%, at least 95%, at least 99%, or 100% identical to any one of SEQ ID NOs: 1120, 1228, 1359, 1519, 1831, 1838, 1845, 1852, 1859, 1866, 1872, 1878, 1885, 1891, 1898, 1905, 1911, 1917, 1924, 1931, 1938, 1945, and 1963; (ii) a CDR2 having an amino acid sequence that is at least 65%, at least 70%, at least 75%, at least 80%, at least 85%, at least 90%, at least 95%, at least 99%, or 100% identical to any one of amino acid sequences AAS, AVS, DAS, DNN, EDN, EVS, GAS, GNG, KAS, KVS, LVS, NTD, STS, WAS, and YTS; and (iii) a CDR3 having an amino acid sequence that is at least 65%, at least 70%, at least 75%, at least 80%, at least 85%, at least 90%, at least 95%, at least 99%, or 100% identical to any one of SEQ ID NOs: 1360, 1832, 1839, 1846, 1853, 1860, 1867, 1873, 1879, 1886, 1892, 1899, 1906, 1912, 1918, 1925, 1932, 1939, 1946, 1951, 1957, 1964, and 1970;
[6437] VL3 comprises (i) a complementarity determining region (CDR) 1 having an amino acid sequence that is at least 65%, at least 70%, at least 75%, at least 80%, at least 85%, at least 90%, at least 95%, at least 99%, or 100% identical to any one of SEQ ID NOs: 1120, 1228, 1359, 1519, 1831, 1838, 1845, 1852, 1859, 1866, 1872, 1878, 1885, 1891, 1898, 1905, 1911, 1917, 1924, 1931, 1938, 1945, and 1963; (ii) a CDR2 having an amino acid sequence that is at least 65%, at least 70%, at least 75%, at least 80%, at least 85%, at least 90%, at least 95%, at least 99%, or 100% identical to any one of amino acid sequences AAS, AVS, DAS, DNN, EDN, EVS, GAS, GNG, KAS, KVS, LVS, NTD, STS, WAS, and YTS; and (iii) a CDR3 having an amino acid sequence that is at least 65%, at least 70%, at least 75%, at least 80%, at least 85%, at least 90%, at least 95%, at least 99%, or 100% identical to any one of SEQ ID NOs: 1360, 1832, 1839, 1846, 1853, 1860, 1867, 1873, 1879, 1886, 1892, 1899, 1906, 1912, 1918, 1925, 1932, 1939, 1946, 1951, 1957, 1964, and 1970;
[6438] VL4 comprises (i) a complementarity determining region (CDR) 1 having an amino acid sequence that is at least 65%, at least 70%, at least 75%, at least 80%, at least 85%, at least 90%, at least 95%, at least 99%, or 100% identical to any one of SEQ ID NOs: 1120, 1228, 1359, 1519, 1831, 1838, 1845, 1852, 1859, 1866, 1872, 1878, 1885, 1891, 1898, 1905, 1911, 1917, 1924, 1931, 1938, 1945, and 1963; (ii) a CDR2 having an amino acid sequence that is at least 65%, at least 70%, at least 75%, at least 80%, at least 85%, at least 90%, at least 95%, at least 99%, or 100% identical to any one of amino acid sequences AAS, AVS, DAS, DNN, EDN, EVS, GAS, GNG, KAS, KVS, LVS, NTD, STS, WAS, and YTS; and (iii) a CDR3 having an amino acid sequence that is at least 65%, at least 70%, at least 75%, at least 80%, at least 85%, at least 90%, at least 95%, at least 99%, or 100% identical to any one of SEQ ID NOs: 1360, 1832, 1839, 1846, 1853, 1860, 1867, 1873, 1879, 1886, 1892, 1899, 1906, 1912, 1918, 1925, 1932, 1939, 1946, 1951, 1957, 1964, and 1970;
[6439] VH1 comprises (i) a complementarity determining region (CDR) 1 having an amino acid sequence that is at least 65%, at least 70%, at least 75%, at least 80%, at least 85%, at least 90%, at least 95%, at least 99%, or 100% identical to any one of SEQ ID NOs: 1309, 1362, 1437, 1552, 1618, 1639, 1834, 1841, 1848, 1855, 1862, 1881, 1894, 1901, 1920, 1927, 1934, 1941, 1953, 1959, and 1966; (ii) a CDR2 having an amino acid sequence that is at least 65%, at least 70%, at least 75%, at least 80%, at least 85%, at least 90%, at least 95%, at least 99%, or 100% identical to any one of SEQ ID NOs: 1363, 1835, 1842, 1849, 1856, 1863, 1869, 1875, 1882, 1888, 1895, 1902, 1908, 1914, 1921, 1928, 1935, 1942, 1948, 1954, 1960, 1967, and 1972; and (iii) a CDR3 having an amino acid sequence that is at least 65%, at least 70%, at least 75%, at least 80%, at least 85%, at least 90%, at least 95%, at least 99%, or 100% identical to any one of SEQ ID NOs: 1364, 1836, 1843, 1850, 1857, 1864, 1870, 1876, 1883, 1889, 1896, 1903, 1909, 1915, 1922, 1929, 1936, 1943, 1949, 1955, 1961, 1968, and 1973;
[6440] VH2 comprises (i) a complementarity determining region (CDR) 1 having an amino acid sequence that is at least 65%, at least 70%, at least 75%, at least 80%, at least 85%, at least 90%, at least 95%, at least 99%, or 100% identical to any one of SEQ ID NOs: 1309, 1362, 1437, 1552, 1618, 1639, 1834, 1841, 1848, 1855, 1862, 1881, 1894, 1901, 1920, 1927, 1934, 1941, 1953, 1959, and 1966; (ii) a CDR2 having an amino acid sequence that is at least 65%, at least 70%, at least 75%, at least 80%, at least 85%, at least 90%, at least 95%, at least 99%, or 100% identical to any one of SEQ ID NOs: 1363, 1835, 1842, 1849, 1856, 1863, 1869, 1875, 1882, 1888, 1895, 1902, 1908, 1914, 1921, 1928, 1935, 1942, 1948, 1954, 1960, 1967, and 1972; and (iii) a CDR3 having an amino acid sequence that is at least 65%, at least 70%, at least 75%, at least 80%, at least 85%, at least 90%, at least 95%, at least 99%, or 100% identical to any one of SEQ ID NOs: 1364, 1836, 1843, 1850, 1857, 1864, 1870, 1876, 1883, 1889, 1896, 1903, 1909, 1915, 1922, 1929, 1936, 1943, 1949, 1955, 1961, 1968, and 1973;
[6441] VH3 comprises (i) a complementarity determining region (CDR) 1 having an amino acid sequence that is at least 65%, at least 70%, at least 75%, at least 80%, at least 85%, at least 90%, at least 95%, at least 99%, or 100% identical to any one of SEQ ID NOs: 1309, 1362, 1437, 1552, 1618, 1639, 1834, 1841, 1848, 1855, 1862, 1881, 1894, 1901, 1920, 1927, 1934, 1941, 1953, 1959, and 1966; (ii) a CDR2 having an amino acid sequence that is at least 65%, at least 70%, at least 75%, at least 80%, at least 85%, at least 90%, at least 95%, at least 99%, or 100% identical to any one of SEQ ID NOs: 1363, 1835, 1842, 1849, 1856, 1863, 1869, 1875, 1882, 1888, 1895, 1902, 1908, 1914, 1921, 1928, 1935, 1942, 1948, 1954, 1960, 1967, and 1972; and (iii) a CDR3 having an amino acid sequence that is at least 65%, at least 70%, at least 75%, at least 80%, at least 85%, at least 90%, at least 95%, at least 99%, or 100% identical to any one of SEQ ID NOs: 1364, 1836, 1843, 1850, 1857, 1864, 1870, 1876, 1883, 1889, 1896, 1903, 1909, 1915, 1922, 1929, 1936, 1943, 1949, 1955, 1961, 1968, and 1973; and/or
[6442] VH4 comprises (i) a complementarity determining region (CDR) 1 having an amino acid sequence that is at least 65%, at least 70%, at least 75%, at least 80%, at least 85%, at least 90%, at least 95%, at least 99%, or 100% identical to any one of SEQ ID NOs: 1309, 1362, 1437, 1552, 1618, 1639, 1834, 1841, 1848, 1855, 1862, 1881, 1894, 1901, 1920, 1927, 1934, 1941, 1953, 1959, and 1966; (ii) a CDR2 having an amino acid sequence that is at least 65%, at least 70%, at least 75%, at least 80%, at least 85%, at least 90%, at least 95%, at least 99%, or 100% identical to any one of SEQ ID NOs: 1363, 1835, 1842, 1849, 1856, 1863, 1869, 1875, 1882, 1888, 1895, 1902, 1908, 1914, 1921, 1928, 1935, 1942, 1948, 1954, 1960, 1967, and 1972; and (iii) a CDR3 having an amino acid sequence that is at least 65%, at least 70%, at least 75%, at least 80%, at least 85%, at least 90%, at least 95%, at least 99%, or 100% identical to any one of SEQ ID NOs: 1364, 1836, 1843, 1850, 1857, 1864, 1870, 1876, 1883, 1889, 1896, 1903, 1909, 1915, 1922, 1929, 1936, 1943, 1949, 1955, 1961, 1968, and 1973; or
[6443] (iv)
[6444] VL1 comprises an amino acid sequence that is at least 65%, at least 70%, at least 75%, at least 80%, at least 85%, at least 90%, at least 95%, at least 99%, or 100% identical to any one of SEQ ID NOs: 1361, 1833, 1840, 1847, 1854, 1861, 1868, 1874, 1880, 1887, 1893, 1900, 1907, 1913, 1919, 1926, 1933, 1940, 1947, 1952, 1958, 1965, and 1971;
[6445] VL2 comprises an amino acid sequence that is at least 65%, at least 70%, at least 75%, at least 80%, at least 85%, at least 90%, at least 95%, at least 99%, or 100% identical to any one of SEQ ID NOs: 1361, 1833, 1840, 1847, 1854, 1861, 1868, 1874, 1880, 1887, 1893, 1900, 1907, 1913, 1919, 1926, 1933, 1940, 1947, 1952, 1958, 1965, and 1971;
[6446] VL3 comprises an amino acid sequence that is at least 65%, at least 70%, at least 75%, at least 80%, at least 85%, at least 90%, at least 95%, at least 99%, or 100% identical to any one of SEQ ID NOs: 1361, 1833, 1840, 1847, 1854, 1861, 1868, 1874, 1880, 1887, 1893, 1900, 1907, 1913, 1919, 1926, 1933, 1940, 1947, 1952, 1958, 1965, and 1971;
[6447] VL4 comprises an amino acid sequence that is at least 65%, at least 70%, at least 75%, at least 80%, at least 85%, at least 90%, at least 95%, at least 99%, or 100% identical to any one of SEQ ID NOS: 1361, 1833, 1840, 1847, 1854, 1861, 1868, 1874, 1880, 1887, 1893, 1900, 1907, 1913, 1919, 1926, 1933, 1940, 1947, 1952, 1958, 1965, and 1971;
[6448] VH1 comprises an amino acid sequence that is at least 65%, at least 70%, at least 75%, at least 80%, at least 85%, at least 90%, at least 95%, at least 99%, or 100% identical to any one of SEQ ID NOs: 1365, 1837, 1844, 1851, 1858, 1865, 1871, 1877, 1884, 1890, 1897, 1904, 1910, 1916, 1923, 1930, 1937, 1944, 1950, 1956, 1962, 1969, and 1974;
[6449] VH2 comprises an amino acid sequence that is at least 65%, at least 70%, at least 75%, at least 80%, at least 85%, at least 90%, at least 95%, at least 99%, or 100% identical to any one of SEQ ID NOs: 1365, 1837, 1844, 1851, 1858, 1865, 1871, 1877, 1884, 1890, 1897, 1904, 1910, 1916, 1923, 1930, 1937, 1944, 1950, 1956, 1962, 1969, and 1974;
[6450] VH3 comprises an amino acid sequence that is at least 65%, at least 70%, at least 75%, at least 80%, at least 85%, at least 90%, at least 95%, at least 99%, or 100% identical to any one of SEQ ID NOS: 1365, 1837, 1844, 1851, 1858, 1865, 1871, 1877, 1884, 1890, 1897, 1904, 1910, 1916, 1923, 1930, 1937, 1944, 1950, 1956, 1962, 1969, and 1974; and/or
[6451] VH4 comprises an amino acid sequence that is at least 65%, at least 70%, at least 75%, at least 80%, at least 85%, at least 90%, at least 95%, at least 99%, or 100% identical to any one of SEQ ID NOs: 1365, 1837, 1844, 1851, 1858, 1865, 1871, 1877, 1884, 1890, 1897, 1904, 1910, 1916, 1923, 1930, 1937, 1944, 1950, 1956, 1962, 1969, and 1974.

[6452] In some aspects, one or both of the antigen binding polypeptides comprised in the antigen binding polypeptide complexes disclosed herein, comprise one or more CL, as indicated in the formulas representing the antigen binding polypeptide complexes disclosed herein. In some aspects, the CL comprises an amino acid sequence at least 65%, at least 70%, at least 75%, at least 80%, at least 85%, at least 90%, at least 95%, at least 99%, or 100% identical to any one of SEQ ID NOs: 374, 637, or 1092-1095.

[6453] In some aspects, one or both of the antigen binding polypeptides comprised in the antigen binding polypeptide complexes disclosed herein, comprise one or more CH1, as indicated in the formulas representing the antigen binding polypeptide complexes disclosed herein. In some aspects, the CH1 comprises an amino acid sequence at least 65%, at least 70%, at least 75%, at least 80%, at least 85%, at least 90%, at least 95%, at least 99%, or 100% identical to any one of SEQ ID NOs: 375, 634, 1070, 1071, or 1086-1091.

[6454] In some aspects, one or both of the antigen binding polypeptides comprised in the antigen binding polypeptide complexes provided herein further comprise an Fc region. In some aspects, one or both of the antigen binding polypeptides comprised in the antigen binding polypeptide complexes provided herein further comprise an Fc region at the carboxy-terminus. In some aspects, the Fc region comprises an immunoglobulin heavy chain constant region 2 (CH2) and/or an immunoglobulin heavy chain constant region 3 (CH3). In some aspects, the Fc region further comprises an immunoglobulin hinge (i.e., a hinge region). In some aspects, the hinge region is interposed between a CH1 and a CH2 (i.e., a hinge region is localized between the carboxy terminal residue of a CH1 and the N-terminal residue of a CH2). In some aspects, the hinge region comprises an amino acid sequence at least 65%, at least 70%, at least 75%, at least 80%, at least 85%, at least 90%, at least 95%, at least 99%, or 100% identical to any one of SEQ ID NOS: 635, 636, 1072, 1073, or 1074. In some aspects, the Fc region comprises a CH2 and a CH3. In some aspects, the CH2 comprises an amino acid sequence that is at least 65%, at least 70%, at least 75%, at least 80%, at least 85%, at least 90%, at least 95%, at least 99%, or 100% identical to any one of SEQ ID NOS: 1075-1078. In some aspects, the CH3 comprises an amino acid sequence that is at least 65%, at least 70%, at least 75%, at least 80%, at least 85%, at least 90%, at least 95%, at least 99%, or 100% identical to any one of SEQ ID NOs: 1079-1085. In some aspects, the Fc region comprises an amino acid sequence that is at least 65%, at least 70%, at least 75%, at least 80%, at least 85%, at least 90%, at least 95%, at least 99%, or 100% identical to any one of SEQ ID NOs: 376-380.

[6455] In some aspects, the Fc region comprises one or more amino acid substitutions. In some aspects, the one or more amino acid substitutions comprise one or more half-life extension amino acid substitutions. In some aspects, the one or more half-life extension amino acid substitutions comprise one or more of amino acid substitutions M428L, N434A, N434S, L234F, L235E, P331S, M252Y, S254T, or T256E, or equivalent thereof, based on the EU numbering scheme. In some aspects, the one or more half-life extension amino acid substitutions comprise a LA (M428L and N434A, or equivalent thereof, based on the EU numbering scheme) amino acid substitution. In some aspects, the one or more half-life extension amino acid substitutions comprise a LS (M428L and N434S, or equivalent thereof, based on the EU numbering scheme) amino acid substitution. In some aspects, the one or more half-life extension amino acid substitutions comprise L234F and L235E, or equivalent thereof (based on the EU numbering scheme) amino acid substitutions. In some aspects, the one or more half-life extension amino acid substitutions comprise a TM (L234F, L235E, and P331S, or equivalent thereof, based on the EU numbering scheme) amino acid substitution. In some aspects, the one or more half-life extension amino acid substitutions comprise a YTE (M252Y, S254T, and T256E, or equivalent thereof, based on the EU numbering scheme) amino acid substitution.

[6456] In some aspects, the Fc region comprises at least one knob-into-hole modification. In some aspects, the antigen binding polypeptides complexes disclosed herein are IgG1 or IgG4 antibodies or antigen binding fragments thereof. In some aspects, the knob-into-hole modification comprises one or more of knob substitutions of S354C and T366W, or equivalent thereof, and/or one or more of hole substitutions of Y349C, T366S, L368A, Y407V, or equivalent thereof, or a combination thereof, based on the EU numbering scheme. In some aspects, the Fc region comprises a knob-into-hole modification comprising knob substitutions of S354C and T366W, or equivalent thereof, and/or hole substitutions of Y349C, T366S, L368A, and Y407V, or equivalent thereof, and/or a half-life extension amino acid substitution comprising: a LA (M428L and N434A, or equivalent thereof, based on the EU numbering scheme) amino acid substitution, a LS (M428L and N434S, or equivalent thereof, based on the EU numbering scheme) amino acid substitution, L234F and L235E, or equivalent thereof (based on the EU numbering scheme) amino acid substitutions, a TM (L234F, L235E, and P331S, or equivalent thereof, based on the EU numbering scheme) amino acid substitution, a YTE (M252Y, S254T, and T256E, or equivalent thereof, based on the EU numbering scheme) amino acid substitution, or any combination thereof.

[6457] In some aspects, the Fc region comprises knob substitutions of S354C and T366W, or equivalent thereof, and a half-life extension amino acid substitution comprising: a LA (M428L and N434A, or equivalent thereof, based on the EU numbering scheme) amino acid substitution, a LS (M428L and N434S, or equivalent thereof, based on the EU numbering scheme) amino acid substitution, L234F and L235E, or equivalent thereof (based on the EU numbering scheme) amino acid substitutions, a TM (L234F, L235E, and P331S, or equivalent thereof, based on the EU numbering scheme) amino acid substitution, a YTE (M252Y, S254T, and T256E, or equivalent thereof, based on the EU numbering scheme) amino acid substitution, or any combination thereof.

[6458] In some aspects, the Fc region comprises hole substitutions of Y349C, T366S, L368A, and Y407V, or equivalent thereof, and a half-life extension amino acid substitution comprising: a LA (M428L and N434A, or equivalent thereof, based on the EU numbering scheme) amino acid substitution, a LS (M428L and N434S, or equivalent thereof, based on the EU numbering scheme) amino acid substitution. L234F and L235E, or equivalent thereof (based on the EU numbering scheme) amino acid substitutions, a TM (L234F, L235E, and P331S, or equivalent thereof, based on the EU numbering scheme) amino acid substitution, a YTE (M252Y, S254T, and T256E, or equivalent thereof, based on the EU numbering scheme) amino acid substitution, or any combination thereof.

[6459] In some aspects, one or both of the antigen binding polypeptides comprised in the antigen binding polypeptide complexes disclosed herein comprise one or more Fc effector function knockout mutation. In some aspects, one or both of the antigen binding polypeptides comprised in the antigen binding polypeptide complexes disclosed herein are IgG1 or IgG4 antibodies or antigen binding fragments thereof. In some aspects, the Fc effector function knockout mutation is L234A, L235A, P239A, or equivalent thereof, or a combination thereof, based on the EU numbering scheme.

[6460] In some aspects, one or both of the antigen binding polypeptides comprised in the antigen binding polypeptide complexes disclosed herein comprise a mutation at a glycosylation site. In some aspects, the mutation at a glycosylation site is a mutation at an N-glycosylation site. In some aspects, one or both of the antigen binding polypeptides comprised in the antigen binding polypeptide complexes disclosed herein comprise a VH comprising a mutation at a glycosylation site. In some aspects, the mutation at a glycosylation site is a mutation at an N-glycosylation site. In some aspects, the mutation at an N-glycosylation site is at amino acid N62, or equivalent thereof, of the VH region or equivalent thereof. In some aspects, the mutation at an N-glycosylation site at amino acid N62 is N62Q or N62S, or equivalent thereof.

[6461] In some aspects, one or both of the antigen binding polypeptides comprised in the antigen binding polypeptide complexes disclosed herein, comprise one or more optional linkers. The one or more optional linkers are indicated herein as Ln, wherein n is an integer, and the integer next to each L indicates each L comprised in the antigen binding polypeptides comprised in the antigen binding polypeptide complexes disclosed herein. For example, if an antigen binding polypeptide comprised in the antigen binding polypeptide complexes disclosed herein comprises two linkers, the first linker from N-terminus to C-terminus is herein indicated as L1, and the second linker from N-terminus to C-terminus is herein indicated as L2. If an antigen binding polypeptide complex disclosed herein comprises a first antigen binding polypeptide comprising two linkers, indicated herein as L1 and L2, as explained above, the linkers comprised in the second antigen binding polypeptide are indicated with the following integer, in this example, the first linker from N-terminus to C-terminus of the second antigen binding polypeptide is herein indicated as L3, the second linker from N-terminus to C-terminus of the second antigen binding polypeptide is herein indicated as L3. In some aspects, any one of the optional linkers each independently have a length of from 0 amino acids to about 50 amino acids. In some aspects, any one of the optional linkers each independently have a length of from 5 amino acids to about 40 amino acids.

[6462] In some aspects, any one of the optional linkers are non-immunogenic. In some aspects, any one of the optional linkers do not contain a consensus T cell epitope.

[6463] In some aspects, any of Ln comprises an amino acid sequence of G or A, or an amino acid sequence at least 65%, at least 70%, at least 75%, at least 80%, at least 85%, at least 90%, at least 95%, at least 99%, or 100% identical to amino acid sequence GSS or ASG, or an amino acid sequence at least 65%, at least 70%, at least 75%, at least 80%, at least 85%, at least 90%, at least 95%, at least 99%, or 100% identical to any one of SEQ ID NOs: 333-373 and 967-971. In some aspects. Ln comprises an amino acid sequence at least 65%, at least 70%, at least 75%, at least 80%, at least 85%, at least 90%, at least 95%, at least 99%, or 100% identical to any one of SEQ ID NOs: 333-345 and 967-971.

[6464] In some aspects, the first polypeptide comprises a structure represented by VL1-VH1-VL2-CL-VH2-CH1, VL1-L1-VH1-L2-VL2-L3-CL-L4-VH2-L5-CH1, VL1-VH1-VL2-CL-VH2-CH1-CH2-CH3, or VL1-L1-VH1-L2-VL2-L3-CL-L4-VH2-L5-CH1-CH2-CH3 and the second polypeptide comprises a structure represented by VL3-VH3-VL4-CL-VH4-CH1, VL3-L6-VH3-L7-VL4-L8-CL-L9-VH4-L10-CH1, VL3-VH3-VL4-CL-VH4-CH1-CH2-CH3, or VL3-L6-VH3-L7-VL4-L8-CL-L9-VH4-L10-CH1-CH2-CH3,
[6465] wherein:
[6466] (a)
[6467] (i)
[6468] VL1 comprises a light chain complementarity determining region 1 (LCDR1), LCDR2, and/or LCDR3 of an antibody selected from the group consisting of losatuxizumab vedotin, utomilumab, urelumab, oleclumab, naptumomab estafenatox, ascrinvacumab, pintumomab, tacatuzumab tetraxetan, nesvacumab, vanucizumab, timolumab, vapaliximab, vepalimomab, enapotamab vedotin, ianalumab, belimumab, tabalumab, tibulizumab, belantamab mafodotin, teclistamab, teclistamab, detumomab, nacolomab tafenatox, eculizumab, lendalizumab, pexelizumab, pozelimab, ravulizumab, tesidolumab, vilobelimab, abagovomab, igovomab, oregovomab, sofituzumab vedotin, cantuzumab mertansine, cantuzuma bravtansine, girentuximab, altumomab pentetate, arcitumomab, besilesomab, bertilimumab, plozalizumab, mogamulizumab, leronlimab, PRO140, rovelizumab, rovelizumab, talacotuzumab, benralizumab, tavolimab, vonlerolizumab, gavilimomab, ziralimumab, fanolesomab, ipilimumab, ruplizumab, toralizumab, dapirolizumab pegol, toralizumab, dapirolizumab pegol, ruplizumab, blinatumomab, inebilizumab, loncastuximab tesirine, SGN-CD19A, tafasitamab, taplitumomab paptox, XMAB-5574, Budoprutug, Obexelimab, duvortuxizumab, englumafusp alfa, Emfizatamab, zeripatamig, siplizumab, blontuvetmab, FBTA05, ibritumomab tiuxetan, obinutuzumab, ocaratuzumab, ocrelizumab, ofatumumab, rituximab, tositumomab, ublituximab, veltuzumab, divozilimab, eramkafusp alfa, ripertamab, zuberitamab, glofitamab, nofetumomab merpentan, samalizumab, imvotamab, odronextamab, plamotamab, bectumomab, inotuzumab ozogamicin, moxetumomab pasudotox, pinatuzumab vedotin, gomiliximab, lumiliximab, inolimomab, inolimomab, daclizumab, camidanluma btesirine, basiliximab, varlilumab, omburtamab, enoblituzumab, vopratelimab, lulizumabpegol, TGN1412, muromonab-CD3, otelixizumab, teplizumab, visilizumab, epcoritamab, epcoritamab, brentuximab vedotin, iratumumab, azintuxizumab vedotin, gemtuzumab ozogamicin, lintuzumab, vadastuximab talirine, naratuximab emtansine, otlertuzumab, lilotomab satetraxetan, tetulomab, daratumumab, isatuximab, foralumab, mosunetuzumab, mosunetuzumab, cedelizumab, ibalizumab, keliximab, priliximab, tregalizumab, zanolimumab, bleselumab, iscalimab, lucatumumab, ravagalimab, selicrelumab, teneliximab, vanalimab, abciximab, bivatuzumab, iomab-B, telimomab aritox, zolimomab aritox, abituzumab, intetumumab, alemtuzumab, tamtuvetmab, lorvotuzumab mertansine, itolizumab, cusatuzumab, vorsetuzumab mafodotin, milatuzumab, iladatuzumab vedotin, polatuzumab vedotin, galiximab, cibisatamab, zolbetuximab, naxitamab, tisotumab vedotin, olendalizumab, pamrevlumab, lacnotuzumab, cabiralizumab, emactuzumab, axatilimab, gimsilumab, lenzilumab, namilumab, tremelimumab, ulocuplumab, tepoditamab, rovalpituzumab tesirine, tarlatamab, demcizumab, navicixizumab, drozitumab, parsatuzumab, depatuxizumab mafodotin, modotuximab, carotuximab, adecatumumab, adecatumumab, oportuzumab monatox, solitomab, tucotuzumab celmoleukin, edrecolomab, catumaxomab, ifabotuzumab, fibatuzumab, zalutumumab, panitumumab, cetuximab, futuximab, imgatuzumab, laprituximab emtansine, matuzumab, necitumumab, nimotuzumab, tomuzotuximab, amivantamab, amivantamab, epitumomab cituxetan, sontuzumab, duligotuzumab, elgemtumab, lumretuzumab, patritumab, seribantumab, zenocutuzumab, sibrotuzumab, burosumab, aprutumab ixadotin, radretumab, pasotuxizumab, farletuzumab, mirvetuximab soravtansine, vantictumab, TRBS07, 3F8, dinutuximab, dinutuximab beta, ecromeximab, mitumomab, andecaliximab, capromab, codrituzumab, glembatumumab vedotin, talquetamab, talquetamab, trevogrumab, indusatumab vedotin, ficlatuzumab, rilotumumab, zatuximab, pentuzimab, pentuzimab, margetuximab, timigutuzumab, trastuzumab, trastuzumab duocarmazine, trastuzumab emtansine, gancotamab, pertuzumab, ertumaxomab, emibetuzumab, telisotuzumab, telisotuzumab vedotin, derlotuximab biotin, apolizumab, onartuzumab, bersanlimab, enlimomabpegol, rontalizumab, sifalimumab, talizumab, ganitumab, istiratumab, robatumumab, teprotumumab, figitumumab, ganitumab, istiratumab, robatumumab, teprotumumab, cixutumumab, dalotuzumab, xentuzumab, dusigitumab, canakinumab, ustekinumab, ustekinumab, ustekinumab, briakinumab, briakinumab, abrezekimab, lebrikizumab, romilkimab, TNX-650, tralokinumab, anrukinzumab, brodalumab, ixekizumab, netakimab, perakizumab, secukinumab, vunakizumab, afasevikumab, afasevikumab, bimekizumab, bimekizumab, remtolumab, bermekimab, lutikizumab, lutikizumab, gevokizumab, cergutuzumab amunaleukin, fletikumab, fezakinumab, brazikumab, guselkumab, mirikizumab, tildrakizumab, risankizumab, flotetuzumab, nemolizumab, pascolizumab, dupilumab, mepolizumab, reslizumab, clazakizumab, elsilimomab, olokizumab, sarilumab, siltuximab, sirukumab, vobarilizumab, tocilizumab, SA237, satralizumab, enokizumab, prezalizumab, natalizumab, abrilumab, abrilumab, vedolizumab, volociximab, tadocizumab, etaracizumab, etrolizumab, spesolimab, vatelizumab, erlizumab, lirilumab, relatlimab, cBR96-doxorubicinimmunoconjugate, odulimomab, efalizumab, ladiratuzumab vedotin, simtuzumab, samrotamab vedotin, aselizumab, lupartumab amadotin, imalumab, carlumab, imaprelimab, amatuximab, amatuximab, anetumab ravtansine, narnatumab, clivatuzumab tetraxetan, pemtumomab, gatipotuzumab, ensituximab, lemalesomab, sulesomab, enfortumab vedotin, racotumomab, monalizumab, brontictuzumab, tarextumab, vesencumab, oxelumab, gilvetmab, tislelizumab, dostarlimab, BCD-100, nivolumab, PDR001, pembrolizumab, pidilizumab, retifanlimab, spartalizumab, sintilimab, cemiplimab, olaratumab, tovetumab, rinucumab, atezolizumab, avelumab, durvalumab, lifastuzumab vedotin, bavituximab, acapatamab, capromab, rosopatamab, nezastomig, pasotuxizumab, pelgifatamab, voxalatamab, cofetuzumab pelidotin, denosumab, rosmantuzumab, cirmtuzumab, atinumab, indatuximab ravtansine, elotuzumab, sirtratumab vedotin, sonepcizumab, vandortuzumab vedotin, minretumomab, satumomab pendetide, maslimomab, ontuxizumab, tenatumomab, fresolimumab, metelimumab, lerdelimumab, tezepelumab, etigilimab, tiragotumab, placulumab, prezalumab, infliximab, nerelimomab, ozoralizumab, adalimumab, afelimomab, certolizumab pegol, golimumab, mapatumumab, conatumumab, lexatumumab, tigatuzumab, sacituzumab govitecan, votumumab, pogalizumab, letolizumab, pankomab, anatumomab mafenatox, enavatuzumab, flanvotumab, brolucizumab, ranibizumab, varisacumab, bevacizumab, faricimab, icrucumab, alacizumab pegol, ramucirumab, pritumumab, and onvatilimab;
[6469] VL2 comprises a light chain complementarity determining region 1 (LCDR1), LCDR2, and/or LCDR3 of an antibody selected from the group consisting of losatuxizumab vedotin, utomilumab, urelumab, oleclumab, naptumomab estafenatox, ascrinvacumab, pintumomab, tacatuzumab tetraxetan, nesvacumab, vanucizumab, timolumab, vapaliximab, vepalimomab, enapotamab vedotin, ianalumab, belimumab, tabalumab, tibulizumab, belantamab mafodotin, teclistamab, teclistamab, detumomab, nacolomab tafenatox, eculizumab, lendalizumab, pexelizumab, pozelimab, ravulizumab, tesidolumab, vilobelimab, abagovomab, igovomab, oregovomab, sofituzumab vedotin, cantuzumab mertansine, cantuzuma bravtansine, girentuximab, altumomab pentetate, arcitumomab, besilesomab, bertilimumab, plozalizumab, mogamulizumab, leronlimab, PRO140, rovelizumab, rovelizumab, talacotuzumab, benralizumab, tavolimab, vonlerolizumab, gavilimomab, ziralimumab, fanolesomab, ipilimumab, ruplizumab, toralizumab, dapirolizumab pegol, toralizumab, dapirolizumab pegol, ruplizumab, blinatumomab, inebilizumab, loncastuximab tesirine, SGN-CD19A, tafasitamab, taplitumomab paptox, XMAB-5574, Budoprutug, Obexelimab, duvortuxizumab, englumafusp alfa, Emfizatamab, zeripatamig, siplizumab, blontuvetmab, FBTA05, ibritumomab tiuxetan, obinutuzumab, ocaratuzumab, ocrelizumab, ofatumumab, rituximab, tositumomab, ublituximab, veltuzumab, divozilimab, eramkafusp alfa, ripertamab, zuberitamab, glofitamab, nofetumomab merpentan, samalizumab, imvotamab, odronextamab, plamotamab, bectumomab, inotuzumab ozogamicin, moxetumomab pasudotox, pinatuzumab vedotin, gomiliximab, lumiliximab, inolimomab, inolimomab, daclizumab, camidanluma btesirine, basiliximab, varlilumab, omburtamab, enoblituzumab, vopratelimab, lulizumabpegol, TGN1412, muromonab-CD3, otelixizumab, teplizumab, visilizumab, epcoritamab, epcoritamab, brentuximab vedotin, iratumumab, azintuxizumab vedotin, gemtuzumab ozogamicin, lintuzumab, vadastuximab talirine, naratuximab emtansine, otlertuzumab, lilotomab satetraxetan, tetulomab, daratumumab, isatuximab, foralumab, mosunetuzumab, mosunetuzumab, cedelizumab, ibalizumab, keliximab, priliximab, tregalizumab, zanolimumab, bleselumab, iscalimab, lucatumumab, ravagalimab, selicrelumab, teneliximab, vanalimab, abciximab, bivatuzumab, iomab-B, telimomab aritox, zolimomab aritox, abituzumab, intetumumab, alemtuzumab, tamtuvetmab, lorvotuzumab mertansine, itolizumab, cusatuzumab, vorsetuzumab mafodotin, milatuzumab, iladatuzumab vedotin, polatuzumab vedotin, galiximab, cibisatamab, zolbetuximab, naxitamab, tisotumab vedotin, olendalizumab, pamrevlumab, lacnotuzumab, cabiralizumab, emactuzumab, axatilimab, gimsilumab, lenzilumab, namilumab, tremelimumab, ulocuplumab, tepoditamab, rovalpituzumab tesirine, tarlatamab, demcizumab, navicixizumab, drozitumab, parsatuzumab, depatuxizumab mafodotin, modotuximab, carotuximab, adecatumumab, adecatumumab, oportuzumab monatox, solitomab, tucotuzumab celmoleukin, edrecolomab, catumaxomab, ifabotuzumab, fibatuzumab, zalutumumab, panitumumab, cetuximab, futuximab, imgatuzumab, laprituximab emtansine, matuzumab, necitumumab, nimotuzumab, tomuzotuximab, amivantamab, amivantamab, epitumomab cituxetan, sontuzumab, duligotuzumab, elgemtumab, lumretuzumab, patritumab, scribantumab, zenocutuzumab, sibrotuzumab, burosumab, aprutumab ixadotin, radretumab, pasotuxizumab, farletuzumab, mirvetuximab soravtansine, vantictumab, TRBS07, 3F8, dinutuximab, dinutuximab beta, ecromeximab, mitumomab, andecaliximab, capromab, codrituzumab, glembatumumab vedotin, talquetamab, talquetamab, trevogrumab, indusatumab vedotin, ficlatuzumab, rilotumumab, zatuximab, pentuzimab, pentuzimab, margetuximab, timigutuzumab, trastuzumab, trastuzumab duocarmazine, trastuzumab emtansine, gancotamab, pertuzumab, ertumaxomab, emibetuzumab, telisotuzumab, telisotuzumab vedotin, derlotuximab biotin, apolizumab, onartuzumab, bersanlimab, enlimomabpegol, rontalizumab, sifalimumab, talizumab, ganitumab, istiratumab, robatumumab, teprotumumab, figitumumab, ganitumab, istiratumab, robatumumab, teprotumumab, cixutumumab, dalotuzumab, xentuzumab, dusigitumab, canakinumab, ustekinumab, ustekinumab, ustekinumab, briakinumab, briakinumab, abrezckimab, lebrikizumab, romilkimab, TNX-650, tralokinumab, anrukinzumab, brodalumab, ixekizumab, netakimab, perakizumab, secukinumab, vunakizumab, afasevikumab, afasevikumab, bimekizumab, bimekizumab, remtolumab, bermckimab, lutikizumab, lutikizumab, gevokizumab, cergutuzumab amunaleukin, fletikumab, fezakinumab, brazikumab, guselkumab, mirikizumab, tildrakizumab, risankizumab, flotetuzumab, nemolizumab, pascolizumab, dupilumab, mepolizumab, reslizumab, clazakizumab, elsilimomab, olokizumab, sarilumab, siltuximab, sirukumab, vobarilizumab, tocilizumab, SA237, satralizumab, enokizumab, prezalizumab, natalizumab, abrilumab, abrilumab, vedolizumab, volociximab, tadocizumab, etaracizumab, etrolizumab, spesolimab, vatelizumab, erlizumab, lirilumab, relatlimab, cBR96-doxorubicinimmunoconjugate, odulimomab, efalizumab, ladiratuzumab vedotin, simtuzumab, samrotamab vedotin, aselizumab, lupartumab amadotin, imalumab, carlumab, imaprelimab, amatuximab, amatuximab, anetumab ravtansine, narnatumab, clivatuzumab tetraxetan, pemtumomab, gatipotuzumab, ensituximab, lemalesomab, sulesomab, enfortumab vedotin, racotumomab, monalizumab, brontictuzumab, tarextumab, vesencumab, oxelumab, gilvetmab, tislelizumab, dostarlimab, BCD-100, nivolumab, PDR001, pembrolizumab, pidilizumab, retifanlimab, spartalizumab, sintilimab, cemiplimab, olaratumab, tovetumab, rinucumab, atezolizumab, avelumab, durvalumab, lifastuzumab vedotin, bavituximab, acapatamab, capromab, rosopatamab, nezastomig, pasotuxizumab, pelgifatamab, voxalatamab, cofetuzumab pelidotin, denosumab, rosmantuzumab, cirmtuzumab, atinumab, indatuximab ravtansine, elotuzumab, sirtratumab vedotin, sonepcizumab, vandortuzumab vedotin, minretumomab, satumomab pendetide, maslimomab, ontuxizumab, tenatumomab, fresolimumab, metelimumab, lerdelimumab, tezepelumab, etigilimab, tiragotumab, placulumab, prezalumab, infliximab, nerelimomab, ozoralizumab, adalimumab, afelimomab, certolizumab pegol, golimumab, mapatumumab, conatumumab, lexatumumab, tigatuzumab, sacituzumab govitecan, votumumab, pogalizumab, letolizumab, pankomab, anatumomab mafenatox, enavatuzumab, flanvotumab, brolucizumab, ranibizumab, varisacumab, bevacizumab, faricimab, icrucumab, alacizumab pegol, ramucirumab, pritumumab, and onvatilimab;
[6470] VL3 comprises a light chain complementarity determining region 1 (LCDR1), LCDR2, and/or LCDR3 of an antibody selected from the group consisting of losatuxizumab vedotin, utomilumab, urelumab, oleclumab, naptumomab estafenatox, ascrinvacumab, pintumomab, tacatuzumab tetraxetan, nesvacumab, vanucizumab, timolumab, vapaliximab, vepalimomab, enapotamab vedotin, ianalumab, belimumab, tabalumab, tibulizumab, belantamab mafodotin, teclistamab, teclistamab, detumomab, nacolomab tafenatox, eculizumab, lendalizumab, pexelizumab, pozelimab, ravulizumab, tesidolumab, vilobelimab, abagovomab, igovomab, oregovomab, sofituzumab vedotin, cantuzumab mertansine, cantuzuma bravtansine, girentuximab, altumomab pentetate, arcitumomab, besilesomab, bertilimumab, plozalizumab, mogamulizumab, leronlimab, PRO140, rovelizumab, rovelizumab, talacotuzumab, benralizumab, tavolimab, vonlerolizumab, gavilimomab, ziralimumab, fanolesomab, ipilimumab, ruplizumab, toralizumab, dapirolizumab pegol, toralizumab, dapirolizumab pegol, ruplizumab, blinatumomab, inebilizumab, loncastuximab tesirine, SGN-CD19A, tafasitamab, taplitumomab paptox, XMAB-5574, Budoprutug, Obexelimab, duvortuxizumab, englumafusp alfa, Emfizatamab, zeripatamig, siplizumab, blontuvetmab, FBTA05, ibritumomab tiuxetan, obinutuzumab, ocaratuzumab, ocrelizumab, ofatumumab, rituximab, tositumomab, ublituximab, veltuzumab, divozilimab, eramkafusp alfa, ripertamab, zuberitamab, glofitamab, nofetumomab merpentan, samalizumab, imvotamab, odronextamab, plamotamab, bectumomab, inotuzumab ozogamicin, moxetumomab pasudotox, pinatuzumab vedotin, gomiliximab, lumiliximab, inolimomab, inolimomab, daclizumab, camidanluma btesirine, basiliximab, varlilumab, omburtamab, enoblituzumab, vopratelimab, lulizumabpegol, TGN1412, muromonab-CD3, otelixizumab, teplizumab, visilizumab, epcoritamab, epcoritamab, brentuximab vedotin, iratumumab, azintuxizumab vedotin, gemtuzumab ozogamicin, lintuzumab, vadastuximab talirine, naratuximab emtansine, otlertuzumab, lilotomab satetraxetan, tetulomab, daratumumab, isatuximab, foralumab, mosunetuzumab, mosunetuzumab, cedelizumab, ibalizumab, keliximab, priliximab, tregalizumab, zanolimumab, bleselumab, iscalimab, lucatumumab, ravagalimab, selicrelumab, teneliximab, vanalimab, abciximab, bivatuzumab, iomab-B, telimomab aritox, zolimomab aritox, abituzumab, intetumumab, alemtuzumab, tamtuvetmab, lorvotuzumab mertansine, itolizumab, cusatuzumab, vorsetuzumab mafodotin, milatuzumab, iladatuzumab vedotin, polatuzumab vedotin, galiximab, cibisatamab, zolbctuximab, naxitamab, tisotumab vedotin, olendalizumab, pamrevlumab, lacnotuzumab, cabiralizumab, emactuzumab, axatilimab, gimsilumab, lenzilumab, namilumab, tremelimumab, ulocuplumab, tepoditamab, rovalpituzumab tesirine, tarlatamab, demcizumab, navicixizumab, drozitumab, parsatuzumab, depatuxizumab mafodotin, modotuximab, carotuximab, adecatumumab, adecatumumab, oportuzumab monatox, solitomab, tucotuzumab celmoleukin, edrecolomab, catumaxomab, ifabotuzumab, fibatuzumab, zalutumumab, panitumumab, cetuximab, futuximab, imgatuzumab, laprituximab emtansine, matuzumab, necitumumab, nimotuzumab, tomuzotuximab, amivantamab, amivantamab, epitumomab cituxetan, sontuzumab, duligotuzumab, elgemtumab, lumretuzumab, patritumab, seribantumab, zenocutuzumab, sibrotuzumab, burosumab, aprutumab ixadotin, radretumab, pasotuxizumab, farletuzumab, mirvetuximab soravtansine, vantictumab, TRBS07, 3F8, dinutuximab, dinutuximab beta, ecromeximab, mitumomab, andecaliximab, capromab, codrituzumab, glembatumumab vedotin, talquetamab, talquetamab, trevogrumab, indusatumab vedotin, ficlatuzumab, rilotumumab, zatuximab, pentuzimab, pentuzimab, margetuximab, timigutuzumab, trastuzumab, trastuzumab duocarmazine, trastuzumab emtansine, gancotamab, pertuzumab, ertumaxomab, emibetuzumab, telisotuzumab, telisotuzumab vedotin, derlotuximab biotin, apolizumab, onartuzumab, bersanlimab, enlimomabpegol, rontalizumab, sifalimumab, talizumab, ganitumab, istiratumab, robatumumab, teprotumumab, figitumumab, ganitumab, istiratumab, robatumumab, teprotumumab, cixutumumab, dalotuzumab, xentuzumab, dusigitumab, canakinumab, ustekinumab, ustekinumab, ustekinumab, briakinumab, briakinumab, abrezekimab, lebrikizumab, romilkimab, TNX-650, tralokinumab, anrukinzumab, brodalumab, ixekizumab, netakimab, perakizumab, secukinumab, vunakizumab, afasevikumab, afasevikumab, bimekizumab, bimekizumab, remtolumab, bermekimab, lutikizumab, lutikizumab, gevokizumab, cergutuzumab amunaleukin, fletikumab, fezakinumab, brazikumab, guselkumab, mirikizumab, tildrakizumab, risankizumab, flotetuzumab, nemolizumab, pascolizumab, dupilumab, mepolizumab, reslizumab, clazakizumab, elsilimomab, olokizumab, sarilumab, siltuximab, sirukumab, vobarilizumab, tocilizumab, SA237, satralizumab, enokizumab, prezalizumab, natalizumab, abrilumab, abrilumab, vedolizumab, volociximab, tadocizumab, etaracizumab, etrolizumab, spesolimab, vatelizumab, erlizumab, lirilumab, relatlimab, cBR96-doxorubicinimmunoconjugate, odulimomab, efalizumab, ladiratuzumab vedotin, simtuzumab, samrotamab vedotin, aselizumab, lupartumab amadotin, imalumab, carlumab, imaprelimab, amatuximab, amatuximab, anetumab ravtansine, narnatumab, clivatuzumab tetraxetan, pemtumomab, gatipotuzumab, ensituximab, lemalesomab, sulesomab, enfortumab vedotin, racotumomab, monalizumab, brontictuzumab, tarextumab, vesencumab, oxelumab, gilvetmab, tislelizumab, dostarlimab, BCD-100, nivolumab, PDR001, pembrolizumab, pidilizumab, retifanlimab, spartalizumab, sintilimab, cemiplimab, olaratumab, tovetumab, rinucumab, atezolizumab, avelumab, durvalumab, lifastuzumab vedotin, bavituximab, acapatamab, capromab, rosopatamab, nezastomig, pasotuxizumab, pelgifatamab, voxalatamab, cofetuzumab pelidotin, denosumab, rosmantuzumab, cirmtuzumab, atinumab, indatuximab ravtansine, elotuzumab, sirtratumab vedotin, sonepcizumab, vandortuzumab vedotin, minretumomab, satumomab pendetide, maslimomab, ontuxizumab, tenatumomab, fresolimumab, metelimumab, lerdelimumab, tezepelumab, etigilimab, tiragotumab, placulumab, prezalumab, infliximab, nerelimomab, ozoralizumab, adalimumab, afelimomab, certolizumab pegol, golimumab, mapatumumab, conatumumab, lexatumumab, tigatuzumab, sacituzumab govitecan, votumumab, pogalizumab, letolizumab, pankomab, anatumomab mafenatox, enavatuzumab, flanvotumab, brolucizumab, ranibizumab, varisacumab, bevacizumab, faricimab, icrucumab, alacizumab pegol, ramucirumab, pritumumab, and onvatilimab;
[6471] VL4 comprises a light chain complementarity determining region 1 (LCDR1), LCDR2, and/or LCDR3 of an antibody selected from the group consisting of losatuxizumab vedotin, utomilumab, urelumab, oleclumab, naptumomab estafenatox, ascrinvacumab, pintumomab, tacatuzumab tetraxetan, nesvacumab, vanucizumab, timolumab, vapaliximab, vepalimomab, enapotamab vedotin, ianalumab, belimumab, tabalumab, tibulizumab, belantamab mafodotin, teclistamab, teclistamab, detumomab, nacolomab tafenatox, eculizumab, lendalizumab, pexelizumab, pozelimab, ravulizumab, tesidolumab, vilobelimab, abagovomab, igovomab, oregovomab, sofituzumab vedotin, cantuzumab mertansine, cantuzuma bravtansine, girentuximab, altumomab pentetate, arcitumomab, besilesomab, bertilimumab, plozalizumab, mogamulizumab, leronlimab, PRO140, rovelizumab, rovelizumab, talacotuzumab, benralizumab, tavolimab, vonlerolizumab, gavilimomab, ziralimumab, fanolesomab, ipilimumab, ruplizumab, toralizumab, dapirolizumab pegol, toralizumab, dapirolizumab pegol, ruplizumab, blinatumomab, inebilizumab, loncastuximab tesirine, SGN-CD19A, tafasitamab, taplitumomab paptox, XMAB-5574, Budoprutug, Obexelimab, duvortuxizumab, englumafusp alfa, Emfizatamab, zeripatamig, siplizumab, blontuvetmab, FBTA05, ibritumomab tiuxetan, obinutuzumab, ocaratuzumab, ocrelizumab, ofatumumab, rituximab, tositumomab, ublituximab, veltuzumab, divozilimab, eramkafusp alfa, ripertamab, zuberitamab, glofitamab, nofetumomab merpentan, samalizumab, imvotamab, odronextamab, plamotamab, bectumomab, inotuzumab ozogamicin, moxetumomab pasudotox, pinatuzumab vedotin, gomiliximab, lumiliximab, inolimomab, inolimomab, daclizumab, camidanluma btesirine, basiliximab, varlilumab, omburtamab, enoblituzumab, vopratelimab, lulizumabpegol, TGN1412, muromonab-CD3, otelixizumab, teplizumab, visilizumab, epcoritamab, epcoritamab, brentuximab vedotin, iratumumab, azintuxizumab vedotin, gemtuzumab ozogamicin, lintuzumab, vadastuximab talirine, naratuximab emtansine, otlertuzumab, lilotomab satetraxetan, tetulomab, daratumumab, isatuximab, foralumab, mosunctuzumab, mosunetuzumab, cedelizumab, ibalizumab, keliximab, priliximab, tregalizumab, zanolimumab, bleselumab, iscalimab, lucatumumab, ravagalimab, selicrelumab, teneliximab, vanalimab, abciximab, bivatuzumab, iomab-B, telimomab aritox, zolimomab aritox, abituzumab, intetumumab, alemtuzumab, tamtuvetmab, lorvotuzumab mertansine, itolizumab, cusatuzumab, vorsetuzumab mafodotin, milatuzumab, iladatuzumab vedotin, polatuzumab vedotin, galiximab, cibisatamab, zolbetuximab, naxitamab, tisotumab vedotin, olendalizumab, pamrevlumab, lacnotuzumab, cabiralizumab, emactuzumab, axatilimab, gimsilumab, lenzilumab, namilumab, tremelimumab, ulocuplumab, tepoditamab, rovalpituzumab tesirine, tarlatamab, demcizumab, navicixizumab, drozitumab, parsatuzumab, depatuxizumab mafodotin, modotuximab, carotuximab, adecatumumab, adecatumumab, oportuzumab monatox, solitomab, tucotuzumab celmoleukin, edrecolomab, catumaxomab, ifabotuzumab, fibatuzumab, zalutumumab, panitumumab, cetuximab, futuximab, imgatuzumab, laprituximab emtansine, matuzumab, necitumumab, nimotuzumab, tomuzotuximab, amivantamab, amivantamab, epitumomab cituxetan, sontuzumab, duligotuzumab, elgemtumab, lumretuzumab, patritumab, seribantumab, zenocutuzumab, sibrotuzumab, burosumab, aprutumab ixadotin, radretumab, pasotuxizumab, farletuzumab, mirvetuximab soravtansine, vantictumab, TRBS07, 3F8, dinutuximab, dinutuximab beta, ecromeximab, mitumomab, andecaliximab, capromab, codrituzumab, glembatumumab vedotin, talquetamab, talquetamab, trevogrumab, indusatumab vedotin, ficlatuzumab, rilotumumab, zatuximab, pentuzimab, pentuzimab, margetuximab, timigutuzumab, trastuzumab, trastuzumab duocarmazine, trastuzumab emtansine, gancotamab, pertuzumab, ertumaxomab, emibetuzumab, telisotuzumab, telisotuzumab vedotin, derlotuximab biotin, apolizumab, onartuzumab, bersanlimab, enlimomabpegol, rontalizumab, sifalimumab, talizumab, ganitumab, istiratumab, robatumumab, teprotumumab, figitumumab, ganitumab, istiratumab, robatumumab, teprotumumab, cixutumumab, dalotuzumab, xentuzumab, dusigitumab, canakinumab, ustekinumab, ustekinumab, ustekinumab, briakinumab, briakinumab, abrezekimab, lebrikizumab, romilkimab, TNX-650, tralokinumab, anrukinzumab, brodalumab, ixekizumab, netakimab, perakizumab, secukinumab, vunakizumab, afasevikumab, afasevikumab, bimekizumab, bimekizumab, remtolumab, bermekimab, lutikizumab, lutikizumab, gevokizumab, cergutuzumab amunaleukin, fletikumab, fezakinumab, brazikumab, guselkumab, mirikizumab, tildrakizumab, risankizumab, flotetuzumab, nemolizumab, pascolizumab, dupilumab, mepolizumab, reslizumab, clazakizumab, elsilimomab, olokizumab, sarilumab, siltuximab, sirukumab, vobarilizumab, tocilizumab, SA237, satralizumab, enokizumab, prezalizumab, natalizumab, abrilumab, abrilumab, vedolizumab, volociximab, tadocizumab, etaracizumab, etrolizumab, spesolimab, vatelizumab, erlizumab, lirilumab, relatlimab, cBR96-doxorubicinimmunoconjugate, odulimomab, efalizumab, ladiratuzumab vedotin, simtuzumab, samrotamab vedotin, aselizumab, lupartumab amadotin, imalumab, carlumab, imaprelimab, amatuximab, amatuximab, anetumab ravtansine, narnatumab, clivatuzumab tetraxetan, pemtumomab, gatipotuzumab, ensituximab, lemalesomab, sulesomab, enfortumab vedotin, racotumomab, monalizumab, brontictuzumab, tarextumab, vesencumab, oxelumab, gilvetmab, tislelizumab, dostarlimab, BCD-100, nivolumab, PDR001, pembrolizumab, pidilizumab, retifanlimab, spartalizumab, sintilimab, cemiplimab, olaratumab, tovetumab, rinucumab, atezolizumab, avelumab, durvalumab, lifastuzumab vedotin, bavituximab, acapatamab, capromab, rosopatamab, nezastomig, pasotuxizumab, pelgifatamab, voxalatamab, cofetuzumab pelidotin, denosumab, rosmantuzumab, cirmtuzumab, atinumab, indatuximab ravtansine, elotuzumab, sirtratumab vedotin, sonepcizumab, vandortuzumab vedotin, minretumomab, satumomab pendetide, maslimomab, ontuxizumab, tenatumomab, fresolimumab, metelimumab, lerdelimumab, tezepelumab, etigilimab, tiragotumab, placulumab, prezalumab, infliximab, nerelimomab, ozoralizumab, adalimumab, afelimomab, certolizumab pegol, golimumab, mapatumumab, conatumumab, lexatumumab, tigatuzumab, sacituzumab govitecan, votumumab, pogalizumab, letolizumab, pankomab, anatumomab mafenatox, enavatuzumab, flanvotumab, brolucizumab, ranibizumab, varisacumab, bevacizumab, faricimab, icrucumab, alacizumab pegol, ramucirumab, pritumumab, and onvatilimab;
[6472] VH1 comprises a heavy chain complementarity determining region 1 (HCDR1), HCDR2, and/or HCDR3 of an antibody selected from the group consisting of losatuxizumab vedotin, utomilumab, urelumab, oleclumab, naptumomab estafenatox, ascrinvacumab, pintumomab, tacatuzumab tetraxetan, nesvacumab, vanucizumab, timolumab, vapaliximab, vepalimomab, enapotamab vedotin, ianalumab, belimumab, tabalumab, tibulizumab, belantamab mafodotin, teclistamab, teclistamab, detumomab, nacolomab tafenatox, eculizumab, lendalizumab, pexelizumab, pozelimab, ravulizumab, tesidolumab, vilobelimab, abagovomab, igovomab, oregovomab, sofituzumab vedotin, cantuzumab mertansine, cantuzuma bravtansine, girentuximab, altumomab pentetate, arcitumomab, besilesomab, bertilimumab, plozalizumab, mogamulizumab, leronlimab, PRO140, rovelizumab, rovelizumab, talacotuzumab, benralizumab, tavolimab, vonlerolizumab, gavilimomab, ziralimumab, fanolesomab, ipilimumab, ruplizumab, toralizumab, dapirolizumab pegol, toralizumab, dapirolizumab pegol, ruplizumab, blinatumomab, inebilizumab, loncastuximab tesirine, SGN-CD19A, tafasitamab, taplitumomab paptox, XMAB-5574, Budoprutug, Obexelimab, duvortuxizumab, englumafusp alfa, Emfizatamab, zeripatamig, siplizumab, blontuvetmab, FBTA05, ibritumomab tiuxetan, obinutuzumab, ocaratuzumab, ocrelizumab, ofatumumab, rituximab, tositumomab, ublituximab, veltuzumab, divozilimab, eramkafusp alfa, ripertamab, zuberitamab, glofitamab, nofetumomab merpentan, samalizumab, imvotamab, odronextamab, plamotamab, bectumomab, inotuzumab ozogamicin, moxetumomab pasudotox, pinatuzumab vedotin, gomiliximab, lumiliximab, inolimomab, inolimomab, daclizumab, camidanluma btesirine, basiliximab, varlilumab, omburtamab, enoblituzumab, vopratelimab, lulizumabpegol, TGN1412, muromonab-CD3, otelixizumab, teplizumab, visilizumab, epcoritamab, epcoritamab, brentuximab vedotin, iratumumab, azintuxizumab vedotin, gemtuzumab ozogamicin, lintuzumab, vadastuximab talirine, naratuximab emtansine, otlertuzumab, lilotomab satetraxetan, tetulomab, daratumumab, isatuximab, foralumab, mosunetuzumab, mosunetuzumab, cedelizumab, ibalizumab, keliximab, priliximab, tregalizumab, zanolimumab, bleselumab, iscalimab, lucatumumab, ravagalimab, selicrelumab, teneliximab, vanalimab, abciximab, bivatuzumab, iomab-B, telimomab aritox, zolimomab aritox, abituzumab, intetumumab, alemtuzumab, tamtuvetmab, lorvotuzumab mertansine, itolizumab, cusatuzumab, vorsetuzumab mafodotin, milatuzumab, iladatuzumab vedotin, polatuzumab vedotin, galiximab, cibisatamab, zolbctuximab, naxitamab, tisotumab vedotin, olendalizumab, pamrevlumab, lacnotuzumab, cabiralizumab, emactuzumab, axatilimab, gimsilumab, lenzilumab, namilumab, tremelimumab, ulocuplumab, tepoditamab, rovalpituzumab tesirine, tarlatamab, demcizumab, navicixizumab, drozitumab, parsatuzumab, depatuxizumab mafodotin, modotuximab, carotuximab, adecatumumab, adecatumumab, oportuzumab monatox, solitomab, tucotuzumab celmoleukin, edrecolomab, catumaxomab, ifabotuzumab, fibatuzumab, zalutumumab, panitumumab, cetuximab, futuximab, imgatuzumab, laprituximab emtansine, matuzumab, necitumumab, nimotuzumab, tomuzotuximab, amivantamab, amivantamab, epitumomab cituxetan, sontuzumab, duligotuzumab, elgemtumab, lumretuzumab, patritumab, seribantumab, zenocutuzumab, sibrotuzumab, burosumab, aprutumab ixadotin, radretumab, pasotuxizumab, farletuzumab, mirvetuximab soravtansine, vantictumab, TRBS07, 3F8, dinutuximab, dinutuximab beta, ecromeximab, mitumomab, andecaliximab, capromab, codrituzumab, glembatumumab vedotin, talquetamab, talquetamab, trevogrumab, indusatumab vedotin, ficlatuzumab, rilotumumab, zatuximab, pentuzimab, pentuzimab, margetuximab, timigutuzumab, trastuzumab, trastuzumab duocarmazine, trastuzumab emtansine, gancotamab, pertuzumab, ertumaxomab, emibetuzumab, telisotuzumab, telisotuzumab vedotin, derlotuximab biotin, apolizumab, onartuzumab, bersanlimab, enlimomabpegol, rontalizumab, sifalimumab, talizumab, ganitumab, istiratumab, robatumumab, teprotumumab, figitumumab, ganitumab, istiratumab, robatumumab, teprotumumab, cixutumumab, dalotuzumab, xentuzumab, dusigitumab, canakinumab, ustekinumab, ustekinumab, ustekinumab, briakinumab, briakinumab, abrezekimab, lebrikizumab, romilkimab, TNX-650, tralokinumab, anrukinzumab, brodalumab, ixekizumab, netakimab, perakizumab, secukinumab, vunakizumab, afasevikumab, afasevikumab, bimekizumab, bimekizumab, remtolumab, bermekimab, lutikizumab, lutikizumab, gevokizumab, cergutuzumab amunaleukin, fletikumab, fezakinumab, brazikumab, guselkumab, mirikizumab, tildrakizumab, risankizumab, flotetuzumab, nemolizumab, pascolizumab, dupilumab, mepolizumab, reslizumab, clazakizumab, elsilimomab, olokizumab, sarilumab, siltuximab, sirukumab, vobarilizumab, tocilizumab, SA237, satralizumab, enokizumab, prezalizumab, natalizumab, abrilumab, abrilumab, vedolizumab, volociximab, tadocizumab, etaracizumab, etrolizumab, spesolimab, vatelizumab, erlizumab, lirilumab, relatlimab, cBR96-doxorubicinimmunoconjugate, odulimomab, efalizumab, ladiratuzumab vedotin, simtuzumab, samrotamab vedotin, aselizumab, lupartumab amadotin, imalumab, carlumab, imaprelimab, amatuximab, amatuximab, anetumab ravtansine, narnatumab, clivatuzumab tetraxetan, pemtumomab, gatipotuzumab, ensituximab, lemalesomab, sulesomab, enfortumab vedotin, racotumomab, monalizumab, brontictuzumab, tarextumab, vesencumab, oxelumab, gilvetmab, tislelizumab, dostarlimab, BCD-100, nivolumab, PDR001, pembrolizumab, pidilizumab, retifanlimab, spartalizumab, sintilimab, cemiplimab, olaratumab, tovetumab, rinucumab, atezolizumab, avelumab, durvalumab, lifastuzumab vedotin, bavituximab, acapatamab, capromab, rosopatamab, nezastomig, pasotuxizumab, pelgifatamab, voxalatamab, cofetuzumab pelidotin, denosumab, rosmantuzumab, cirmtuzumab, atinumab, indatuximab ravtansine, elotuzumab, sirtratumab vedotin, sonepcizumab, vandortuzumab vedotin, minretumomab, satumomab pendetide, maslimomab, ontuxizumab, tenatumomab, fresolimumab, metelimumab, lerdelimumab, tezepelumab, etigilimab, tiragotumab, placulumab, prezalumab, infliximab, nerelimomab, ozoralizumab, adalimumab, afelimomab, certolizumab pegol, golimumab, mapatumumab, conatumumab, lexatumumab, tigatuzumab, sacituzumab govitecan, votumumab, pogalizumab, letolizumab, pankomab, anatumomab mafenatox, enavatuzumab, flanvotumab, brolucizumab, ranibizumab, varisacumab, bevacizumab, faricimab, icrucumab, alacizumab pegol, ramucirumab, pritumumab, and onvatilimab;
[6473] VH2 comprises a heavy chain complementarity determining region 1 (HCDR1), HCDR2, and/or HCDR3 of an antibody selected from the group consisting of losatuxizumab vedotin, utomilumab, urelumab, oleclumab, naptumomab estafenatox, ascrinvacumab, pintumomab, tacatuzumab tetraxetan, nesvacumab, vanucizumab, timolumab, vapaliximab, vepalimomab, enapotamab vedotin, ianalumab, belimumab, tabalumab, tibulizumab, belantamab mafodotin, teclistamab, teclistamab, detumomab, nacolomab tafenatox, eculizumab, lendalizumab, pexelizumab, pozelimab, ravulizumab, tesidolumab, vilobelimab, abagovomab, igovomab, oregovomab, sofituzumab vedotin, cantuzumab mertansine, cantuzuma bravtansine, girentuximab, altumomab pentetate, arcitumomab, besilesomab, bertilimumab, plozalizumab, mogamulizumab, leronlimab, PRO140, rovelizumab, rovelizumab, talacotuzumab, benralizumab, tavolimab, vonlerolizumab, gavilimomab, ziralimumab, fanolesomab, ipilimumab, ruplizumab, toralizumab, dapirolizumab pegol, toralizumab, dapirolizumab pegol, ruplizumab, blinatumomab, inebilizumab, loncastuximab tesirine, SGN-CD19A, tafasitamab, taplitumomab paptox, XMAB-5574, Budoprutug, Obexclimab, duvortuxizumab, englumafusp alfa, Emfizatamab, zeripatamig, siplizumab, blontuvetmab, FBTA05, ibritumomab tiuxetan, obinutuzumab, ocaratuzumab, ocrelizumab, ofatumumab, rituximab, tositumomab, ublituximab, veltuzumab, divozilimab, eramkafusp alfa, ripertamab, zuberitamab, glofitamab, nofetumomab merpentan, samalizumab, imvotamab, odronextamab, plamotamab, bectumomab, inotuzumab ozogamicin, moxetumomab pasudotox, pinatuzumab vedotin, gomiliximab, lumiliximab, inolimomab, inolimomab, daclizumab, camidanluma btesirine, basiliximab, varlilumab, omburtamab, enoblituzumab, vopratelimab, lulizumabpegol, TGN1412, muromonab-CD3, otelixizumab, teplizumab, visilizumab, epcoritamab, epcoritamab, brentuximab vedotin, iratumumab, azintuxizumab vedotin, gemtuzumab ozogamicin, lintuzumab, vadastuximab talirine, naratuximab emtansine, otlertuzumab, lilotomab satetraxetan, tetulomab, daratumumab, isatuximab, foralumab, mosunetuzumab, mosunetuzumab, cedelizumab, ibalizumab, keliximab, priliximab, tregalizumab, zanolimumab, bleselumab, iscalimab, lucatumumab, ravagalimab, selicrelumab, teneliximab, vanalimab, abciximab, bivatuzumab, iomab-B, telimomab aritox, zolimomab aritox, abituzumab, intetumumab, alemtuzumab, tamtuvetmab, lorvotuzumab mertansine, itolizumab, cusatuzumab, vorsetuzumab mafodotin, milatuzumab, iladatuzumab vedotin, polatuzumab vedotin, galiximab, cibisatamab, zolbetuximab, naxitamab, tisotumab vedotin, olendalizumab, pamrevlumab, lacnotuzumab, cabiralizumab, emactuzumab, axatilimab, gimsilumab, lenzilumab, namilumab, tremelimumab, ulocuplumab, tepoditamab, rovalpituzumab tesirine, tarlatamab, demcizumab, navicixizumab, drozitumab, parsatuzumab, depatuxizumab mafodotin, modotuximab, carotuximab, adecatumumab, adecatumumab, oportuzumab monatox, solitomab, tucotuzumab celmoleukin, edrecolomab, catumaxomab, ifabotuzumab, fibatuzumab, zalutumumab, panitumumab, cetuximab, futuximab, imgatuzumab, laprituximab emtansine, matuzumab, necitumumab, nimotuzumab, tomuzotuximab, amivantamab, amivantamab, epitumomab cituxetan, sontuzumab, duligotuzumab, elgemtumab, lumretuzumab, patritumab, scribantumab, zenocutuzumab, sibrotuzumab, burosumab, aprutumab ixadotin, radretumab, pasotuxizumab, farletuzumab, mirvetuximab soravtansine, vantictumab, TRBS07, 3F8, dinutuximab, dinutuximab beta, ecromeximab, mitumomab, andecaliximab, capromab, codrituzumab, glembatumumab vedotin, talquetamab, talquetamab, trevogrumab, indusatumab vedotin, ficlatuzumab, rilotumumab, zatuximab, pentuzimab, pentuzimab, margetuximab, timigutuzumab, trastuzumab, trastuzumab duocarmazine, trastuzumab emtansine, gancotamab, pertuzumab, ertumaxomab, emibetuzumab, telisotuzumab, telisotuzumab vedotin, derlotuximab biotin, apolizumab, onartuzumab, bersanlimab, enlimomabpegol, rontalizumab, sifalimumab, talizumab, ganitumab, istiratumab, robatumumab, teprotumumab, figitumumab, ganitumab, istiratumab, robatumumab, teprotumumab, cixutumumab, dalotuzumab, xentuzumab, dusigitumab, canakinumab, ustekinumab, ustekinumab, ustekinumab, briakinumab, briakinumab, abrezekimab, lebrikizumab, romilkimab, TNX-650, tralokinumab, anrukinzumab, brodalumab, ixekizumab, netakimab, perakizumab, secukinumab, vunakizumab, afasevikumab, afasevikumab, bimekizumab, bimekizumab, remtolumab, bermekimab, lutikizumab, lutikizumab, gevokizumab, cergutuzumab amunaleukin, fletikumab, fezakinumab, brazikumab, guselkumab, mirikizumab, tildrakizumab, risankizumab, flotetuzumab, nemolizumab, pascolizumab, dupilumab, mepolizumab, reslizumab, clazakizumab, elsilimomab, olokizumab, sarilumab, siltuximab, sirukumab, vobarilizumab, tocilizumab, SA237, satralizumab, enokizumab, prezalizumab, natalizumab, abrilumab, abrilumab, vedolizumab, volociximab, tadocizumab, etaracizumab, etrolizumab, spesolimab, vatelizumab, erlizumab, lirilumab, relatlimab, cBR96-doxorubicinimmunoconjugate, odulimomab, efalizumab, ladiratuzumab vedotin, simtuzumab, samrotamab vedotin, aselizumab, lupartumab amadotin, imalumab, carlumab, imaprelimab, amatuximab, amatuximab, anetumab ravtansine, narnatumab, clivatuzumab tetraxetan, pemtumomab, gatipotuzumab, ensituximab, lemalesomab, sulesomab, enfortumab vedotin, racotumomab, monalizumab, brontictuzumab, tarextumab, vesencumab, oxelumab, gilvetmab, tislelizumab, dostarlimab, BCD-100, nivolumab, PDR001, pembrolizumab, pidilizumab, retifanlimab, spartalizumab, sintilimab, cemiplimab, olaratumab, tovetumab, rinucumab, atezolizumab, avelumab, durvalumab, lifastuzumab vedotin, bavituximab, acapatamab, capromab, rosopatamab, nezastomig, pasotuxizumab, pelgifatamab, voxalatamab, cofetuzumab pelidotin, denosumab, rosmantuzumab, cirmtuzumab, atinumab, indatuximab ravtansine, elotuzumab, sirtratumab vedotin, sonepcizumab, vandortuzumab vedotin, minretumomab, satumomab pendetide, maslimomab, ontuxizumab, tenatumomab, fresolimumab, metelimumab, lerdelimumab, tezepelumab, etigilimab, tiragotumab, placulumab, prezalumab, infliximab, nerelimomab, ozoralizumab, adalimumab, afelimomab, certolizumab pegol, golimumab, mapatumumab, conatumumab, lexatumumab, tigatuzumab, sacituzumab govitecan, votumumab, pogalizumab, letolizumab, pankomab, anatumomab mafenatox, enavatuzumab, flanvotumab, brolucizumab, ranibizumab, varisacumab, bevacizumab, faricimab, icrucumab, alacizumab pegol, ramucirumab, pritumumab, and onvatilimab;
[6474] VH3 comprises a heavy chain complementarity determining region 1 (HCDR1), HCDR2, and/or HCDR3 of an antibody selected from the group consisting of losatuxizumab vedotin, utomilumab, urelumab, oleclumab, naptumomab estafenatox, ascrinvacumab, pintumomab, tacatuzumab tetraxetan, nesvacumab, vanucizumab, timolumab, vapaliximab, vepalimomab, enapotamab vedotin, ianalumab, belimumab, tabalumab, tibulizumab, belantamab mafodotin, teclistamab, teclistamab, detumomab, nacolomab tafenatox, eculizumab, lendalizumab, pexelizumab, pozelimab, ravulizumab, tesidolumab, vilobelimab, abagovomab, igovomab, oregovomab, sofituzumab vedotin, cantuzumab mertansine, cantuzuma bravtansine, girentuximab, altumomab pentetate, arcitumomab, besilesomab, bertilimumab, plozalizumab, mogamulizumab, leronlimab, PRO140, rovelizumab, rovelizumab, talacotuzumab, benralizumab, tavolimab, vonlerolizumab, gavilimomab, ziralimumab, fanolesomab, ipilimumab, ruplizumab, toralizumab, dapirolizumab pegol, toralizumab, dapirolizumab pegol, ruplizumab, blinatumomab, inebilizumab, loncastuximab tesirine, SGN-CD19A, tafasitamab, taplitumomab paptox, XMAB-5574, Budoprutug, Obexelimab, duvortuxizumab, englumafusp alfa, Emfizatamab, zeripatamig, siplizumab, blontuvetmab, FBTA05, ibritumomab tiuxetan, obinutuzumab, ocaratuzumab, ocrelizumab, ofatumumab, rituximab, tositumomab, ublituximab, veltuzumab, divozilimab, eramkafusp alfa, ripertamab, zuberitamab, glofitamab, nofetumomab merpentan, samalizumab, imvotamab, odronextamab, plamotamab, bectumomab, inotuzumab ozogamicin, moxetumomab pasudotox, pinatuzumab vedotin, gomiliximab, lumiliximab, inolimomab, inolimomab, daclizumab, camidanluma btesirine, basiliximab, varlilumab, omburtamab, enoblituzumab, vopratelimab, lulizumabpegol, TGN1412, muromonab-CD3, otelixizumab, teplizumab, visilizumab, epcoritamab, epcoritamab, brentuximab vedotin, iratumumab, azintuxizumab vedotin, gemtuzumab ozogamicin, lintuzumab, vadastuximab talirine, naratuximab emtansine, otlertuzumab, lilotomab satetraxetan, tetulomab, daratumumab, isatuximab, foralumab, mosunctuzumab, mosunetuzumab, cedelizumab, ibalizumab, keliximab, priliximab, tregalizumab, zanolimumab, bleselumab, iscalimab, lucatumumab, ravagalimab, selicrelumab, teneliximab, vanalimab, abciximab, bivatuzumab, iomab-B, telimomab aritox, zolimomab aritox, abituzumab, intetumumab, alemtuzumab, tamtuvetmab, lorvotuzumab mertansine, itolizumab, cusatuzumab, vorsetuzumab mafodotin, milatuzumab, iladatuzumab vedotin, polatuzumab vedotin, galiximab, cibisatamab, zolbetuximab, naxitamab, tisotumab vedotin, olendalizumab, pamrevlumab, lacnotuzumab, cabiralizumab, emactuzumab, axatilimab, gimsilumab, lenzilumab, namilumab, tremelimumab, ulocuplumab, tepoditamab, rovalpituzumab tesirine, tarlatamab, demcizumab, navicixizumab, drozitumab, parsatuzumab, depatuxizumab mafodotin, modotuximab, carotuximab, adecatumumab, adecatumumab, oportuzumab monatox, solitomab, tucotuzumab celmoleukin, edrecolomab, catumaxomab, ifabotuzumab, fibatuzumab, zalutumumab, panitumumab, cetuximab, futuximab, imgatuzumab, laprituximab emtansine, matuzumab, necitumumab, nimotuzumab, tomuzotuximab, amivantamab, amivantamab, epitumomab cituxetan, sontuzumab, duligotuzumab, elgemtumab, lumretuzumab, patritumab, scribantumab, zenocutuzumab, sibrotuzumab, burosumab, aprutumab ixadotin, radretumab, pasotuxizumab, farletuzumab, mirvetuximab soravtansine, vantictumab, TRBS07, 3F8, dinutuximab, dinutuximab beta, ecromeximab, mitumomab, andecaliximab, capromab, codrituzumab, glembatumumab vedotin, talquetamab, talquetamab, trevogrumab, indusatumab vedotin, ficlatuzumab, rilotumumab, zatuximab, pentuzimab, pentuzimab, margetuximab, timigutuzumab, trastuzumab, trastuzumab duocarmazine, trastuzumab emtansine, gancotamab, pertuzumab, ertumaxomab, emibetuzumab, telisotuzumab, telisotuzumab vedotin, derlotuximab biotin, apolizumab, onartuzumab, bersanlimab, enlimomabpegol, rontalizumab, sifalimumab, talizumab, ganitumab, istiratumab, robatumumab, teprotumumab, figitumumab, ganitumab, istiratumab, robatumumab, teprotumumab, cixutumumab, dalotuzumab, xentuzumab, dusigitumab, canakinumab, ustekinumab, ustekinumab, ustekinumab, briakinumab, briakinumab, abrezekimab, lebrikizumab, romilkimab, TNX-650, tralokinumab, anrukinzumab, brodalumab, ixekizumab, netakimab, perakizumab, secukinumab, vunakizumab, afasevikumab, afasevikumab, bimekizumab, bimekizumab, remtolumab, bermckimab, lutikizumab, lutikizumab, gevokizumab, cergutuzumab amunaleukin, fletikumab, fezakinumab, brazikumab, gusclkumab, mirikizumab, tildrakizumab, risankizumab, flotetuzumab, nemolizumab, pascolizumab, dupilumab, mepolizumab, reslizumab, clazakizumab, elsilimomab, olokizumab, sarilumab, siltuximab, sirukumab, vobarilizumab, tocilizumab, SA237, satralizumab, enokizumab, prezalizumab, natalizumab, abrilumab, abrilumab, vedolizumab, volociximab, tadocizumab, etaracizumab, etrolizumab, spesolimab, vatelizumab, erlizumab, lirilumab, relatlimab, cBR96-doxorubicinimmunoconjugate, odulimomab, efalizumab, ladiratuzumab vedotin, simtuzumab, samrotamab vedotin, aselizumab, lupartumab amadotin, imalumab, carlumab, imaprelimab, amatuximab, amatuximab, anetumab ravtansine, narnatumab, clivatuzumab tetraxetan, pemtumomab, gatipotuzumab, ensituximab, lemalesomab, sulesomab, enfortumab vedotin, racotumomab, monalizumab, brontictuzumab, tarextumab, vesencumab, oxelumab, gilvetmab, tislelizumab, dostarlimab, BCD-100, nivolumab, PDR001, pembrolizumab, pidilizumab, retifanlimab, spartalizumab, sintilimab, cemiplimab, olaratumab, tovetumab, rinucumab, atezolizumab, avelumab, durvalumab, lifastuzumab vedotin, bavituximab, acapatamab, capromab, rosopatamab, nezastomig, pasotuxizumab, pelgifatamab, voxalatamab, cofetuzumab pelidotin, denosumab, rosmantuzumab, cirmtuzumab, atinumab, indatuximab ravtansine, elotuzumab, sirtratumab vedotin, sonepcizumab, vandortuzumab vedotin, minretumomab, satumomab pendetide, maslimomab, ontuxizumab, tenatumomab, fresolimumab, metelimumab, lerdelimumab, tezepelumab, etigilimab, tiragotumab, placulumab, prezalumab, infliximab, nerelimomab, ozoralizumab, adalimumab, afelimomab, certolizumab pegol, golimumab, mapatumumab, conatumumab, lexatumumab, tigatuzumab, sacituzumab govitecan, votumumab, pogalizumab, letolizumab, pankomab, anatumomab mafenatox, enavatuzumab, flanvotumab, brolucizumab, ranibizumab, varisacumab, bevacizumab, faricimab, icrucumab, alacizumab pegol, ramucirumab, pritumumab, and onvatilimab; and/or
[6475] VH4 comprises a heavy chain complementarity determining region 1 (HCDR1), HCDR2, and/or HCDR3 of an antibody selected from the group consisting of losatuxizumab vedotin, utomilumab, urelumab, oleclumab, naptumomab estafenatox, ascrinvacumab, pintumomab, tacatuzumab tetraxetan, nesvacumab, vanucizumab, timolumab, vapaliximab, vepalimomab, enapotamab vedotin, ianalumab, belimumab, tabalumab, tibulizumab, belantamab mafodotin, teclistamab, teclistamab, detumomab, nacolomab tafenatox, eculizumab, lendalizumab, pexelizumab, pozelimab, ravulizumab, tesidolumab, vilobelimab, abagovomab, igovomab, oregovomab, sofituzumab vedotin, cantuzumab mertansine, cantuzuma bravtansine, girentuximab, altumomab pentetate, arcitumomab, besilesomab, bertilimumab, plozalizumab, mogamulizumab, leronlimab, PRO140, rovelizumab, rovelizumab, talacotuzumab, benralizumab, tavolimab, vonlerolizumab, gavilimomab, ziralimumab, fanolesomab, ipilimumab, ruplizumab, toralizumab, dapirolizumab pegol, toralizumab, dapirolizumab pegol, ruplizumab, blinatumomab, inebilizumab, loncastuximab tesirine, SGN-CD19A, tafasitamab, taplitumomab paptox, XMAB-5574, Budoprutug, Obexclimab, duvortuxizumab, englumafusp alfa, Emfizatamab, zeripatamig, siplizumab, blontuvetmab, FBTA05, ibritumomab tiuxetan, obinutuzumab, ocaratuzumab, ocrelizumab, ofatumumab, rituximab, tositumomab, ublituximab, veltuzumab, divozilimab, eramkafusp alfa, ripertamab, zubcritamab, glofitamab, nofetumomab merpentan, samalizumab, imvotamab, odronextamab, plamotamab, bectumomab, inotuzumab ozogamicin, moxetumomab pasudotox, pinatuzumab vedotin, gomiliximab, lumiliximab, inolimomab, inolimomab, daclizumab, camidanluma btesirine, basiliximab, varlilumab, omburtamab, enoblituzumab, vopratelimab, lulizumabpegol, TGN1412, muromonab-CD3, otelixizumab, teplizumab, visilizumab, epcoritamab, epcoritamab, brentuximab vedotin, iratumumab, azintuxizumab vedotin, gemtuzumab ozogamicin, lintuzumab, vadastuximab talirine, naratuximab emtansine, otlertuzumab, lilotomab satetraxetan, tetulomab, daratumumab, isatuximab, foralumab, mosunctuzumab, mosunetuzumab, cedelizumab, ibalizumab, keliximab, priliximab, tregalizumab, zanolimumab, bleselumab, iscalimab, lucatumumab, ravagalimab, selicrelumab, teneliximab, vanalimab, abciximab, bivatuzumab, iomab-B, telimomab aritox, zolimomab aritox, abituzumab, intetumumab, alemtuzumab, tamtuvetmab, lorvotuzumab mertansine, itolizumab, cusatuzumab, vorsetuzumab mafodotin, milatuzumab, iladatuzumab vedotin, polatuzumab vedotin, galiximab, cibisatamab, zolbetuximab, naxitamab, tisotumab vedotin, olendalizumab, pamrevlumab, lacnotuzumab, cabiralizumab, emactuzumab, axatilimab, gimsilumab, lenzilumab, namilumab, tremelimumab, ulocuplumab, tepoditamab, rovalpituzumab tesirine, tarlatamab, demcizumab, navicixizumab, drozitumab, parsatuzumab, depatuxizumab mafodotin, modotuximab, carotuximab, adecatumumab, adecatumumab, oportuzumab monatox, solitomab, tucotuzumab celmoleukin, edrecolomab, catumaxomab, ifabotuzumab, fibatuzumab, zalutumumab, panitumumab, cetuximab, futuximab, imgatuzumab, laprituximab emtansine, matuzumab, necitumumab, nimotuzumab, tomuzotuximab, amivantamab, amivantamab, epitumomab cituxetan, sontuzumab, duligotuzumab, elgemtumab, lumretuzumab, patritumab, seribantumab, zenocutuzumab, sibrotuzumab, burosumab, aprutumab ixadotin, radretumab, pasotuxizumab, farletuzumab, mirvetuximab soravtansine, vantictumab, TRBS07, 3F8, dinutuximab, dinutuximab beta, ecromeximab, mitumomab, andecaliximab, capromab, codrituzumab, glembatumumab vedotin, talquetamab, talquetamab, trevogrumab, indusatumab vedotin, ficlatuzumab, rilotumumab, zatuximab, pentuzimab, pentuzimab, margetuximab, timigutuzumab, trastuzumab, trastuzumab duocarmazine, trastuzumab emtansine, gancotamab, pertuzumab, ertumaxomab, emibctuzumab, telisotuzumab, telisotuzumab vedotin, derlotuximab biotin, apolizumab, onartuzumab, bersanlimab, enlimomabpegol, rontalizumab, sifalimumab, talizumab, ganitumab, istiratumab, robatumumab, teprotumumab, figitumumab, ganitumab, istiratumab, robatumumab, teprotumumab, cixutumumab, dalotuzumab, xentuzumab, dusigitumab, canakinumab, ustekinumab, ustekinumab, ustekinumab, briakinumab, briakinumab, abrezekimab, lebrikizumab, romilkimab, TNX-650, tralokinumab, anrukinzumab, brodalumab, ixekizumab, netakimab, perakizumab, secukinumab, vunakizumab, afasevikumab, afasevikumab, bimekizumab, bimekizumab, remtolumab, bermekimab, lutikizumab, lutikizumab, gevokizumab, cergutuzumab amunaleukin, fletikumab, fezakinumab, brazikumab, guselkumab, mirikizumab, tildrakizumab, risankizumab, flotetuzumab, nemolizumab, pascolizumab, dupilumab, mepolizumab, reslizumab, clazakizumab, elsilimomab, olokizumab, sarilumab, siltuximab, sirukumab, vobarilizumab, tocilizumab, SA237, satralizumab, enokizumab, prezalizumab, natalizumab, abrilumab, abrilumab, vedolizumab, volociximab, tadocizumab, etaracizumab, etrolizumab, spesolimab, vatelizumab, erlizumab, lirilumab, relatlimab, cBR96-doxorubicinimmunoconjugate, odulimomab, efalizumab, ladiratuzumab vedotin, simtuzumab, samrotamab vedotin, asclizumab, lupartumab amadotin, imalumab, carlumab, imaprelimab, amatuximab, amatuximab, anctumab ravtansine, narnatumab, clivatuzumab tetraxetan, pemtumomab, gatipotuzumab, ensituximab, lemalesomab, sulesomab, enfortumab vedotin, racotumomab, monalizumab, brontictuzumab, tarextumab, vesencumab, oxelumab, gilvetmab, tislelizumab, dostarlimab, BCD-100, nivolumab, PDR001, pembrolizumab, pidilizumab, retifanlimab, spartalizumab, sintilimab, cemiplimab, olaratumab, tovetumab, rinucumab, atezolizumab, avelumab, durvalumab, lifastuzumab vedotin, bavituximab, acapatamab, capromab, rosopatamab, nezastomig, pasotuxizumab, pelgifatamab, voxalatamab, cofetuzumab pelidotin, denosumab, rosmantuzumab, cirmtuzumab, atinumab, indatuximab ravtansine, elotuzumab, sirtratumab vedotin, sonepcizumab, vandortuzumab vedotin, minretumomab, satumomab pendetide, maslimomab, ontuxizumab, tenatumomab, fresolimumab, metelimumab, lerdelimumab, tezepelumab, etigilimab, tiragotumab, placulumab, prezalumab, infliximab, nerelimomab, ozoralizumab, adalimumab, afelimomab, certolizumab pegol, golimumab, mapatumumab, conatumumab, lexatumumab, tigatuzumab, sacituzumab govitecan, votumumab, pogalizumab, letolizumab, pankomab, anatumomab mafenatox, enavatuzumab, flanvotumab, brolucizumab, ranibizumab, varisacumab, bevacizumab, faricimab, icrucumab, alacizumab pegol, ramucirumab, pritumumab, and onvatilimab; or
[6476] (ii)
[6477] VL1 comprises a VL of an antibody selected from the group consisting of losatuxizumab vedotin, utomilumab, urelumab, oleclumab, naptumomab estafenatox, ascrinvacumab, pintumomab, tacatuzumab tetraxetan, nesvacumab, vanucizumab, timolumab, vapaliximab, vepalimomab, enapotamab vedotin, ianalumab, belimumab, tabalumab, tibulizumab, belantamab mafodotin, teclistamab, teclistamab, detumomab, nacolomab tafenatox, eculizumab, lendalizumab, pexelizumab, pozelimab, ravulizumab, tesidolumab, vilobelimab, abagovomab, igovomab, oregovomab, sofituzumab vedotin, cantuzumab mertansine, cantuzuma bravtansine, girentuximab, altumomab pentetate, arcitumomab, besilesomab, bertilimumab, plozalizumab, mogamulizumab, leronlimab, PRO140, rovelizumab, rovelizumab, talacotuzumab, benralizumab, tavolimab, vonlerolizumab, gavilimomab, ziralimumab, fanolesomab, ipilimumab, ruplizumab, toralizumab, dapirolizumab pegol, toralizumab, dapirolizumab pegol, ruplizumab, blinatumomab, inebilizumab, loncastuximab tesirine, SGN-CD19A, tafasitamab, taplitumomab paptox, XMAB-5574, Budoprutug, Obexelimab, duvortuxizumab, englumafusp alfa, Emfizatamab, zeripatamig, siplizumab, blontuvetmab, FBTA05, ibritumomab tiuxetan, obinutuzumab, ocaratuzumab, ocrelizumab, ofatumumab, rituximab, tositumomab, ublituximab, veltuzumab, divozilimab, eramkafusp alfa, ripertamab, zuberitamab, glofitamab, nofetumomab merpentan, samalizumab, imvotamab, odronextamab, plamotamab, bectumomab, inotuzumab ozogamicin, moxetumomab pasudotox, pinatuzumab vedotin, gomiliximab, lumiliximab, inolimomab, inolimomab, daclizumab, camidanluma btesirine, basiliximab, varlilumab, omburtamab, enoblituzumab, vopratelimab, lulizumabpegol, TGN1412, muromonab-CD3, otelixizumab, teplizumab, visilizumab, epcoritamab, epcoritamab, brentuximab vedotin, iratumumab, azintuxizumab vedotin, gemtuzumab ozogamicin, lintuzumab, vadastuximab talirine, naratuximab emtansine, otlertuzumab, lilotomab satetraxetan, tetulomab, daratumumab, isatuximab, foralumab, mosunetuzumab, mosunetuzumab, cedelizumab, ibalizumab, keliximab, priliximab, tregalizumab, zanolimumab, bleselumab, iscalimab, lucatumumab, ravagalimab, selicrelumab, teneliximab, vanalimab, abciximab, bivatuzumab, iomab-B, telimomab aritox, zolimomab aritox, abituzumab, intetumumab, alemtuzumab, tamtuvetmab, lorvotuzumab mertansine, itolizumab, cusatuzumab, vorsetuzumab mafodotin, milatuzumab, iladatuzumab vedotin, polatuzumab vedotin, galiximab, cibisatamab, zolbetuximab, naxitamab, tisotumab vedotin, olendalizumab, pamrevlumab, lacnotuzumab, cabiralizumab, emactuzumab, axatilimab, gimsilumab, lenzilumab, namilumab, tremelimumab, ulocuplumab, tepoditamab, rovalpituzumab tesirine, tarlatamab, demcizumab, navicixizumab, drozitumab, parsatuzumab, depatuxizumab mafodotin, modotuximab, carotuximab, adecatumumab, adecatumumab, oportuzumab monatox, solitomab, tucotuzumab celmoleukin, edrecolomab, catumaxomab, ifabotuzumab, fibatuzumab, zalutumumab, panitumumab, cetuximab, futuximab, imgatuzumab, laprituximab emtansine, matuzumab, necitumumab, nimotuzumab, tomuzotuximab, amivantamab, amivantamab, epitumomab cituxetan, sontuzumab, duligotuzumab, elgemtumab, lumretuzumab, patritumab, seribantumab, zenocutuzumab, sibrotuzumab, burosumab, aprutumab ixadotin, radretumab, pasotuxizumab, farletuzumab, mirvetuximab soravtansine, vantictumab, TRBS07, 3F8, dinutuximab, dinutuximab beta, ecromeximab, mitumomab, andecaliximab, capromab, codrituzumab, glembatumumab vedotin, talquetamab, talquetamab, trevogrumab, indusatumab vedotin, ficlatuzumab, rilotumumab, zatuximab, pentuzimab, pentuzimab, margetuximab, timigutuzumab, trastuzumab, trastuzumab duocarmazine, trastuzumab emtansine, gancotamab, pertuzumab, ertumaxomab, emibetuzumab, telisotuzumab, telisotuzumab vedotin, derlotuximab biotin, apolizumab, onartuzumab, bersanlimab, enlimomabpegol, rontalizumab, sifalimumab, talizumab, ganitumab, istiratumab, robatumumab, teprotumumab, figitumumab, ganitumab, istiratumab, robatumumab, teprotumumab, cixutumumab, dalotuzumab, xentuzumab, dusigitumab, canakinumab, ustekinumab, ustekinumab, ustekinumab, briakinumab, briakinumab, abrezekimab, lebrikizumab, romilkimab, TNX-650, tralokinumab, anrukinzumab, brodalumab, ixekizumab, netakimab, perakizumab, secukinumab, vunakizumab, afasevikumab, afasevikumab, bimekizumab, bimekizumab, remtolumab, bermekimab, lutikizumab, lutikizumab, gevokizumab, cergutuzumab amunaleukin, fletikumab, fezakinumab, brazikumab, guselkumab, mirikizumab, tildrakizumab, risankizumab, flotetuzumab, nemolizumab, pascolizumab, dupilumab, mepolizumab, reslizumab, clazakizumab, elsilimomab, olokizumab, sarilumab, siltuximab, sirukumab, vobarilizumab, tocilizumab, SA237, satralizumab, enokizumab, prezalizumab, natalizumab, abrilumab, abrilumab, vedolizumab, volociximab, tadocizumab, etaracizumab, etrolizumab, spesolimab, vatelizumab, erlizumab, lirilumab, relatlimab, cBR96-doxorubicinimmunoconjugate, odulimomab, efalizumab, ladiratuzumab vedotin, simtuzumab, samrotamab vedotin, aselizumab, lupartumab amadotin, imalumab, carlumab, imaprelimab, amatuximab, amatuximab, anetumab ravtansine, narnatumab, clivatuzumab tetraxetan, pemtumomab, gatipotuzumab, ensituximab, lemalesomab, sulesomab, enfortumab vedotin, racotumomab, monalizumab, brontictuzumab, tarextumab, vesencumab, oxelumab, gilvetmab, tislelizumab, dostarlimab, BCD-100, nivolumab, PDR001, pembrolizumab, pidilizumab, retifanlimab, spartalizumab, sintilimab, cemiplimab, olaratumab, tovetumab, rinucumab, atezolizumab, avelumab, durvalumab, lifastuzumab vedotin, bavituximab, acapatamab, capromab, rosopatamab, nezastomig, pasotuxizumab, pelgifatamab, voxalatamab, cofetuzumab pelidotin, denosumab, rosmantuzumab, cirmtuzumab, atinumab, indatuximab ravtansine, elotuzumab, sirtratumab vedotin, sonepcizumab, vandortuzumab vedotin, minretumomab, satumomab pendetide, maslimomab, ontuxizumab, tenatumomab, fresolimumab, metelimumab, lerdelimumab, tezepelumab, etigilimab, tiragotumab, placulumab, prezalumab, infliximab, nerelimomab, ozoralizumab, adalimumab, afelimomab, certolizumab pegol, golimumab, mapatumumab, conatumumab, lexatumumab, tigatuzumab, sacituzumab govitecan, votumumab, pogalizumab, letolizumab, pankomab, anatumomab mafenatox, enavatuzumab, flanvotumab, brolucizumab, ranibizumab, varisacumab, bevacizumab, faricimab, icrucumab, alacizumab pegol, ramucirumab, pritumumab, and onvatilimab;
[6478] VL2 comprises a VL of an antibody selected from the group consisting of losatuxizumab vedotin, utomilumab, urelumab, oleclumab, naptumomab estafenatox, ascrinvacumab, pintumomab, tacatuzumab tetraxetan, nesvacumab, vanucizumab, timolumab, vapaliximab, vepalimomab, enapotamab vedotin, ianalumab, belimumab, tabalumab, tibulizumab, belantamab mafodotin, teclistamab, teclistamab, detumomab, nacolomab tafenatox, eculizumab, lendalizumab, pexelizumab, pozelimab, ravulizumab, tesidolumab, vilobelimab, abagovomab, igovomab, oregovomab, sofituzumab vedotin, cantuzumab mertansine, cantuzuma bravtansine, girentuximab, altumomab pentetate, arcitumomab, besilesomab, bertilimumab, plozalizumab, mogamulizumab, leronlimab, PRO140, rovelizumab, rovelizumab, talacotuzumab, benralizumab, tavolimab, vonlerolizumab, gavilimomab, ziralimumab, fanolesomab, ipilimumab, ruplizumab, toralizumab, dapirolizumab pegol, toralizumab, dapirolizumab pegol, ruplizumab, blinatumomab, inebilizumab, loncastuximab tesirine, SGN-CD19A, tafasitamab, taplitumomab paptox, XMAB-5574, Budoprutug, Obexelimab, duvortuxizumab, englumafusp alfa, Emfizatamab, zeripatamig, siplizumab, blontuvetmab, FBTA05, ibritumomab tiuxetan, obinutuzumab, ocaratuzumab, ocrelizumab, ofatumumab, rituximab, tositumomab, ublituximab, veltuzumab, divozilimab, eramkafusp alfa, ripertamab, zuberitamab, glofitamab, nofetumomab merpentan, samalizumab, imvotamab, odronextamab, plamotamab, bectumomab, inotuzumab ozogamicin, moxetumomab pasudotox, pinatuzumab vedotin, gomiliximab, lumiliximab, inolimomab, inolimomab, daclizumab, camidanluma btesirine, basiliximab, varlilumab, omburtamab, enoblituzumab, vopratelimab, lulizumabpegol, TGN1412, muromonab-CD3, otelixizumab, teplizumab, visilizumab, epcoritamab, epcoritamab, brentuximab vedotin, iratumumab, azintuxizumab vedotin, gemtuzumab ozogamicin, lintuzumab, vadastuximab talirine, naratuximab emtansine, otlertuzumab, lilotomab satetraxetan, tetulomab, daratumumab, isatuximab, foralumab, mosunetuzumab, mosunetuzumab, cedelizumab, ibalizumab, keliximab, priliximab, tregalizumab, zanolimumab, bleselumab, iscalimab, lucatumumab, ravagalimab, selicrelumab, teneliximab, vanalimab, abciximab, bivatuzumab, iomab-B, telimomab aritox, zolimomab aritox, abituzumab, intetumumab, alemtuzumab, tamtuvetmab, lorvotuzumab mertansine, itolizumab, cusatuzumab, vorsetuzumab mafodotin, milatuzumab, iladatuzumab vedotin, polatuzumab vedotin, galiximab, cibisatamab, zolbetuximab, naxitamab, tisotumab vedotin, olendalizumab, pamrevlumab, lacnotuzumab, cabiralizumab, emactuzumab, axatilimab, gimsilumab, lenzilumab, namilumab, tremelimumab, ulocuplumab, tepoditamab, rovalpituzumab tesirine, tarlatamab, demcizumab, navicixizumab, drozitumab, parsatuzumab, depatuxizumab mafodotin, modotuximab, carotuximab, adecatumumab, adecatumumab, oportuzumab monatox, solitomab, tucotuzumab celmoleukin, edrecolomab, catumaxomab, ifabotuzumab, fibatuzumab, zalutumumab, panitumumab, cetuximab, futuximab, imgatuzumab, laprituximab emtansine, matuzumab, necitumumab, nimotuzumab, tomuzotuximab, amivantamab, amivantamab, epitumomab cituxetan, sontuzumab, duligotuzumab, elgemtumab, lumretuzumab, patritumab, seribantumab, zenocutuzumab, sibrotuzumab, burosumab, aprutumab ixadotin, radretumab, pasotuxizumab, farletuzumab, mirvetuximab soravtansine, vantictumab, TRBS07, 3F8, dinutuximab, dinutuximab beta, ecromeximab, mitumomab, andecaliximab, capromab, codrituzumab, glembatumumab vedotin, talquetamab, talquetamab, trevogrumab, indusatumab vedotin, ficlatuzumab, rilotumumab, zatuximab, pentuzimab, pentuzimab, margetuximab, timigutuzumab, trastuzumab, trastuzumab duocarmazine, trastuzumab emtansine, gancotamab, pertuzumab, ertumaxomab, emibetuzumab, telisotuzumab, telisotuzumab vedotin, derlotuximab biotin, apolizumab, onartuzumab, bersanlimab, enlimomabpegol, rontalizumab, sifalimumab, talizumab, ganitumab, istiratumab, robatumumab, teprotumumab, figitumumab, ganitumab, istiratumab, robatumumab, teprotumumab, cixutumumab, dalotuzumab, xentuzumab, dusigitumab, canakinumab, ustekinumab, ustekinumab, ustekinumab, briakinumab, briakinumab, abrezekimab, lebrikizumab, romilkimab, TNX-650, tralokinumab, anrukinzumab, brodalumab, ixekizumab, netakimab, perakizumab, secukinumab, vunakizumab, afasevikumab, afasevikumab, bimekizumab, bimekizumab, remtolumab, bermekimab, lutikizumab, lutikizumab, gevokizumab, cergutuzumab amunaleukin, fletikumab, fczakinumab, brazikumab, guselkumab, mirikizumab, tildrakizumab, risankizumab, flotetuzumab, nemolizumab, pascolizumab, dupilumab, mepolizumab, reslizumab, clazakizumab, elsilimomab, olokizumab, sarilumab, siltuximab, sirukumab, vobarilizumab, tocilizumab, SA237, satralizumab, enokizumab, prezalizumab, natalizumab, abrilumab, abrilumab, vedolizumab, volociximab, tadocizumab, etaracizumab, etrolizumab, spesolimab, vatelizumab, crlizumab, lirilumab, relatlimab, cBR96-doxorubicinimmunoconjugate, odulimomab, efalizumab, ladiratuzumab vedotin, simtuzumab, samrotamab vedotin, aselizumab, lupartumab amadotin, imalumab, carlumab, imaprelimab, amatuximab, amatuximab, anctumab ravtansine, narnatumab, clivatuzumab tetraxetan, pemtumomab, gatipotuzumab, ensituximab, lemalesomab, sulesomab, enfortumab vedotin, racotumomab, monalizumab, brontictuzumab, tarextumab, vesencumab, oxelumab, gilvetmab, tislelizumab, dostarlimab, BCD-100, nivolumab, PDR001, pembrolizumab, pidilizumab, retifanlimab, spartalizumab, sintilimab, cemiplimab, olaratumab, tovetumab, rinucumab, atezolizumab, avelumab, durvalumab, lifastuzumab vedotin, bavituximab, acapatamab, capromab, rosopatamab, nezastomig, pasotuxizumab, pelgifatamab, voxalatamab, cofetuzumab pelidotin, denosumab, rosmantuzumab, cirmtuzumab, atinumab, indatuximab ravtansine, elotuzumab, sirtratumab vedotin, sonepcizumab, vandortuzumab vedotin, minretumomab, satumomab pendetide, maslimomab, ontuxizumab, tenatumomab, fresolimumab, metelimumab, lerdelimumab, tezepelumab, etigilimab, tiragotumab, placulumab, prezalumab, infliximab, nerelimomab, ozoralizumab, adalimumab, afelimomab, certolizumab pegol, golimumab, mapatumumab, conatumumab, lexatumumab, tigatuzumab, sacituzumab govitecan, votumumab, pogalizumab, letolizumab, pankomab, anatumomab mafenatox, enavatuzumab, flanvotumab, brolucizumab, ranibizumab, varisacumab, bevacizumab, faricimab, icrucumab, alacizumab pegol, ramucirumab, pritumumab, and onvatilimab;
[6479] VL3 comprises a VL of an antibody selected from the group consisting of losatuxizumab vedotin, utomilumab, urelumab, oleclumab, naptumomab estafenatox, ascrinvacumab, pintumomab, tacatuzumab tetraxetan, nesvacumab, vanucizumab, timolumab, vapaliximab, vepalimomab, enapotamab vedotin, ianalumab, belimumab, tabalumab, tibulizumab, belantamab mafodotin, teclistamab, teclistamab, detumomab, nacolomab tafenatox, eculizumab, lendalizumab, pexelizumab, pozelimab, ravulizumab, tesidolumab, vilobelimab, abagovomab, igovomab, oregovomab, sofituzumab vedotin, cantuzumab mertansine, cantuzuma bravtansine, girentuximab, altumomab pentetate, arcitumomab, besilesomab, bertilimumab, plozalizumab, mogamulizumab, leronlimab, PRO140, rovelizumab, rovelizumab, talacotuzumab, benralizumab, tavolimab, vonlerolizumab, gavilimomab, ziralimumab, fanolesomab, ipilimumab, ruplizumab, toralizumab, dapirolizumab pegol, toralizumab, dapirolizumab pegol, ruplizumab, blinatumomab, inebilizumab, loncastuximab tesirine, SGN-CD19A, tafasitamab, taplitumomab paptox, XMAB-5574, Budoprutug, Obexelimab, duvortuxizumab, englumafusp alfa, Emfizatamab, zeripatamig, siplizumab, blontuvetmab, FBTA05, ibritumomab tiuxetan, obinutuzumab, ocaratuzumab, ocrelizumab, ofatumumab, rituximab, tositumomab, ublituximab, veltuzumab, divozilimab, eramkafusp alfa, ripertamab, zuberitamab, glofitamab, nofetumomab merpentan, samalizumab, imvotamab, odronextamab, plamotamab, bectumomab, inotuzumab ozogamicin, moxetumomab pasudotox, pinatuzumab vedotin, gomiliximab, lumiliximab, inolimomab, inolimomab, daclizumab, camidanluma btesirine, basiliximab, varlilumab, omburtamab, enoblituzumab, vopratelimab, lulizumabpegol, TGN1412, muromonab-CD3, otelixizumab, teplizumab, visilizumab, epcoritamab, epcoritamab, brentuximab vedotin, iratumumab, azintuxizumab vedotin, gemtuzumab ozogamicin, lintuzumab, vadastuximab talirine, naratuximab emtansine, otlertuzumab, lilotomab satetraxetan, tetulomab, daratumumab, isatuximab, foralumab, mosunctuzumab, mosunetuzumab, cedelizumab, ibalizumab, keliximab, priliximab, tregalizumab, zanolimumab, bleselumab, iscalimab, lucatumumab, ravagalimab, selicrelumab, teneliximab, vanalimab, abciximab, bivatuzumab, iomab-B, telimomab aritox, zolimomab aritox, abituzumab, intetumumab, alemtuzumab, tamtuvetmab, lorvotuzumab mertansine, itolizumab, cusatuzumab, vorsetuzumab mafodotin, milatuzumab, iladatuzumab vedotin, polatuzumab vedotin, galiximab, cibisatamab, zolbetuximab, naxitamab, tisotumab vedotin, olendalizumab, pamrevlumab, lacnotuzumab, cabiralizumab, emactuzumab, axatilimab, gimsilumab, lenzilumab, namilumab, tremelimumab, ulocuplumab, tepoditamab, rovalpituzumab tesirine, tarlatamab, demcizumab, navicixizumab, drozitumab, parsatuzumab, depatuxizumab mafodotin, modotuximab, carotuximab, adecatumumab, adecatumumab, oportuzumab monatox, solitomab, tucotuzumab celmoleukin, edrecolomab, catumaxomab, ifabotuzumab, fibatuzumab, zalutumumab, panitumumab, cetuximab, futuximab, imgatuzumab, laprituximab emtansine, matuzumab, necitumumab, nimotuzumab, tomuzotuximab, amivantamab, amivantamab, epitumomab cituxetan, sontuzumab, duligotuzumab, elgemtumab, lumretuzumab, patritumab, seribantumab, zenocutuzumab, sibrotuzumab, burosumab, aprutumab ixadotin, radretumab, pasotuxizumab, farletuzumab, mirvetuximab soravtansine, vantictumab, TRBS07, 3F8, dinutuximab, dinutuximab beta, ecromeximab, mitumomab, andecaliximab, capromab, codrituzumab, glembatumumab vedotin, talquetamab, talquetamab, trevogrumab, indusatumab vedotin, ficlatuzumab, rilotumumab, zatuximab, pentuzimab, pentuzimab, margetuximab, timigutuzumab, trastuzumab, trastuzumab duocarmazine, trastuzumab emtansine, gancotamab, pertuzumab, ertumaxomab, emibctuzumab, telisotuzumab, telisotuzumab vedotin, derlotuximab biotin, apolizumab, onartuzumab, bersanlimab, enlimomabpegol, rontalizumab, sifalimumab, talizumab, ganitumab, istiratumab, robatumumab, teprotumumab, figitumumab, ganitumab, istiratumab, robatumumab, teprotumumab, cixutumumab, dalotuzumab, xentuzumab, dusigitumab, canakinumab, ustekinumab, ustekinumab, ustekinumab, briakinumab, briakinumab, abrezekimab, lebrikizumab, romilkimab, TNX-650, tralokinumab, anrukinzumab, brodalumab, ixekizumab, netakimab, perakizumab, secukinumab, vunakizumab, afasevikumab, afasevikumab, bimekizumab, bimekizumab, remtolumab, bermekimab, lutikizumab, lutikizumab, gevokizumab, cergutuzumab amunaleukin, fletikumab, fezakinumab, brazikumab, guselkumab, mirikizumab, tildrakizumab, risankizumab, flotetuzumab, nemolizumab, pascolizumab, dupilumab, mepolizumab, reslizumab, clazakizumab, elsilimomab, olokizumab, sarilumab, siltuximab, sirukumab, vobarilizumab, tocilizumab, SA237, satralizumab, enokizumab, prezalizumab, natalizumab, abrilumab, abrilumab, vedolizumab, volociximab, tadocizumab, etaracizumab, etrolizumab, spesolimab, vatelizumab, erlizumab, lirilumab, relatlimab, cBR96-doxorubicinimmunoconjugate, odulimomab, efalizumab, ladiratuzumab vedotin, simtuzumab, samrotamab vedotin, asclizumab, lupartumab amadotin, imalumab, carlumab, imaprelimab, amatuximab, amatuximab, anetumab ravtansine, narnatumab, clivatuzumab tetraxetan, pemtumomab, gatipotuzumab, ensituximab, lemalesomab, sulesomab, enfortumab vedotin, racotumomab, monalizumab, brontictuzumab, tarextumab, vesencumab, oxelumab, gilvetmab, tislelizumab, dostarlimab, BCD-100, nivolumab, PDR001, pembrolizumab, pidilizumab, retifanlimab, spartalizumab, sintilimab, cemiplimab, olaratumab, tovetumab, rinucumab, atezolizumab, avelumab, durvalumab, lifastuzumab vedotin, bavituximab, acapatamab, capromab, rosopatamab, nezastomig, pasotuxizumab, pelgifatamab, voxalatamab, cofetuzumab pelidotin, denosumab, rosmantuzumab, cirmtuzumab, atinumab, indatuximab ravtansine, elotuzumab, sirtratumab vedotin, sonepcizumab, vandortuzumab vedotin, minretumomab, satumomab pendetide, maslimomab, ontuxizumab, tenatumomab, fresolimumab, metelimumab, lerdelimumab, tezepelumab, etigilimab, tiragotumab, placulumab, prezalumab, infliximab, nerelimomab, ozoralizumab, adalimumab, afelimomab, certolizumab pegol, golimumab, mapatumumab, conatumumab, lexatumumab, tigatuzumab, sacituzumab govitecan, votumumab, pogalizumab, letolizumab, pankomab, anatumomab mafenatox, enavatuzumab, flanvotumab, brolucizumab, ranibizumab, varisacumab, bevacizumab, faricimab, icrucumab, alacizumab pegol, ramucirumab, pritumumab, and onvatilimab;
[6480] VL4 comprises a VL of an antibody selected from the group consisting of losatuxizumab vedotin, utomilumab, urelumab, oleclumab, naptumomab estafenatox, ascrinvacumab, pintumomab, tacatuzumab tetraxetan, nesvacumab, vanucizumab, timolumab, vapaliximab, vepalimomab, enapotamab vedotin, ianalumab, belimumab, tabalumab, tibulizumab, belantamab mafodotin, teclistamab, teclistamab, detumomab, nacolomab tafenatox, eculizumab, lendalizumab, pexelizumab, pozclimab, ravulizumab, tesidolumab, vilobelimab, abagovomab, igovomab, oregovomab, sofituzumab vedotin, cantuzumab mertansine, cantuzuma bravtansine, girentuximab, altumomab pentetate, arcitumomab, besilesomab, bertilimumab, plozalizumab, mogamulizumab, leronlimab, PRO140, rovelizumab, rovelizumab, talacotuzumab, benralizumab, tavolimab, vonlerolizumab, gavilimomab, ziralimumab, fanolesomab, ipilimumab, ruplizumab, toralizumab, dapirolizumab pegol, toralizumab, dapirolizumab pegol, ruplizumab, blinatumomab, inebilizumab, loncastuximab tesirine, SGN-CD19A, tafasitamab, taplitumomab paptox, XMAB-5574, Budoprutug, Obexelimab, duvortuxizumab, englumafusp alfa, Emfizatamab, zeripatamig, siplizumab, blontuvetmab, FBTA05, ibritumomab tiuxetan, obinutuzumab, ocaratuzumab, ocrelizumab, ofatumumab, rituximab, tositumomab, ublituximab, veltuzumab, divozilimab, eramkafusp alfa, ripertamab, zubcritamab, glofitamab, nofetumomab merpentan, samalizumab, imvotamab, odronextamab, plamotamab, bectumomab, inotuzumab ozogamicin, moxetumomab pasudotox, pinatuzumab vedotin, gomiliximab, lumiliximab, inolimomab, inolimomab, daclizumab, camidanluma btesirine, basiliximab, varlilumab, omburtamab, enoblituzumab, vopratelimab, lulizumabpegol, TGN1412, muromonab-CD3, otelixizumab, teplizumab, visilizumab, epcoritamab, epcoritamab, brentuximab vedotin, iratumumab, azintuxizumab vedotin, gemtuzumab ozogamicin, lintuzumab, vadastuximab talirine, naratuximab emtansine, otlertuzumab, lilotomab satetraxetan, tetulomab, daratumumab, isatuximab, foralumab, mosunctuzumab, mosunetuzumab, cedelizumab, ibalizumab, keliximab, priliximab, tregalizumab, zanolimumab, bleselumab, iscalimab, lucatumumab, ravagalimab, selicrelumab, teneliximab, vanalimab, abciximab, bivatuzumab, iomab-B, telimomab aritox, zolimomab aritox, abituzumab, intetumumab, alemtuzumab, tamtuvetmab, lorvotuzumab mertansine, itolizumab, cusatuzumab, vorsetuzumab mafodotin, milatuzumab, iladatuzumab vedotin, polatuzumab vedotin, galiximab, cibisatamab, zolbetuximab, naxitamab, tisotumab vedotin, olendalizumab, pamrevlumab, lacnotuzumab, cabiralizumab, emactuzumab, axatilimab, gimsilumab, lenzilumab, namilumab, tremelimumab, ulocuplumab, tepoditamab, rovalpituzumab tesirine, tarlatamab, demcizumab, navicixizumab, drozitumab, parsatuzumab, depatuxizumab mafodotin, modotuximab, carotuximab, adecatumumab, adecatumumab, oportuzumab monatox, solitomab, tucotuzumab celmoleukin, edrecolomab, catumaxomab, ifabotuzumab, fibatuzumab, zalutumumab, panitumumab, cetuximab, futuximab, imgatuzumab, laprituximab emtansine, matuzumab, necitumumab, nimotuzumab, tomuzotuximab, amivantamab, amivantamab, epitumomab cituxetan, sontuzumab, duligotuzumab, elgemtumab, lumretuzumab, patritumab, seribantumab, zenocutuzumab, sibrotuzumab, burosumab, aprutumab ixadotin, radretumab, pasotuxizumab, farletuzumab, mirvetuximab soravtansine, vantictumab, TRBS07, 3F8, dinutuximab, dinutuximab beta, ecromeximab, mitumomab, andecaliximab, capromab, codrituzumab, glembatumumab vedotin, talquetamab, talquetamab, trevogrumab, indusatumab vedotin, ficlatuzumab, rilotumumab, zatuximab, pentuzimab, pentuzimab, margetuximab, timigutuzumab, trastuzumab, trastuzumab duocarmazine, trastuzumab emtansine, gancotamab, pertuzumab, ertumaxomab, emibctuzumab, telisotuzumab, telisotuzumab vedotin, derlotuximab biotin, apolizumab, onartuzumab, bersanlimab, enlimomabpegol, rontalizumab, sifalimumab, talizumab, ganitumab, istiratumab, robatumumab, teprotumumab, figitumumab, ganitumab, istiratumab, robatumumab, teprotumumab, cixutumumab, dalotuzumab, xentuzumab, dusigitumab, canakinumab, ustekinumab, ustekinumab, ustekinumab, briakinumab, briakinumab, abrezekimab, lebrikizumab, romilkimab, TNX-650, tralokinumab, anrukinzumab, brodalumab, ixekizumab, netakimab, perakizumab, secukinumab, vunakizumab, afasevikumab, afasevikumab, bimekizumab, bimekizumab, remtolumab, bermekimab, lutikizumab, lutikizumab, gevokizumab, cergutuzumab amunaleukin, fletikumab, fezakinumab, brazikumab, guselkumab, mirikizumab, tildrakizumab, risankizumab, flotetuzumab, nemolizumab, pascolizumab, dupilumab, mepolizumab, reslizumab, clazakizumab, elsilimomab, olokizumab, sarilumab, siltuximab, sirukumab, vobarilizumab, tocilizumab, SA237, satralizumab, enokizumab, prezalizumab, natalizumab, abrilumab, abrilumab, vedolizumab, volociximab, tadocizumab, etaracizumab, etrolizumab, spesolimab, vatelizumab, erlizumab, lirilumab, relatlimab, cBR96-doxorubicinimmunoconjugate, odulimomab, efalizumab, ladiratuzumab vedotin, simtuzumab, samrotamab vedotin, asclizumab, lupartumab amadotin, imalumab, carlumab, imaprelimab, amatuximab, amatuximab, anctumab ravtansine, narnatumab, clivatuzumab tetraxetan, pemtumomab, gatipotuzumab, ensituximab, lemalesomab, sulesomab, enfortumab vedotin, racotumomab, monalizumab, brontictuzumab, tarextumab, vesencumab, oxelumab, gilvetmab, tislelizumab, dostarlimab, BCD-100, nivolumab, PDR001, pembrolizumab, pidilizumab, retifanlimab, spartalizumab, sintilimab, cemiplimab, olaratumab, tovetumab, rinucumab, atezolizumab, avelumab, durvalumab, lifastuzumab vedotin, bavituximab, acapatamab, capromab, rosopatamab, nezastomig, pasotuxizumab, pelgifatamab, voxalatamab, cofetuzumab pelidotin, denosumab, rosmantuzumab, cirmtuzumab, atinumab, indatuximab ravtansine, elotuzumab, sirtratumab vedotin, sonepcizumab, vandortuzumab vedotin, minretumomab, satumomab pendetide, maslimomab, ontuxizumab, tenatumomab, fresolimumab, metelimumab, lerdelimumab, tezepelumab, etigilimab, tiragotumab, placulumab, prezalumab, infliximab, nerelimomab, ozoralizumab, adalimumab, afelimomab, certolizumab pegol, golimumab, mapatumumab, conatumumab, lexatumumab, tigatuzumab, sacituzumab govitecan, votumumab, pogalizumab, letolizumab, pankomab, anatumomab mafenatox, enavatuzumab, flanvotumab, brolucizumab, ranibizumab, varisacumab, bevacizumab, faricimab, icrucumab, alacizumab pegol, ramucirumab, pritumumab, and onvatilimab;
[6481] VH1 comprises a VH of an antibody selected from the group consisting of losatuxizumab vedotin, utomilumab, urelumab, oleclumab, naptumomab estafenatox, ascrinvacumab, pintumomab, tacatuzumab tetraxetan, nesvacumab, vanucizumab, timolumab, vapaliximab, vepalimomab, enapotamab vedotin, ianalumab, belimumab, tabalumab, tibulizumab, belantamab mafodotin, teclistamab, teclistamab, detumomab, nacolomab tafenatox, eculizumab, lendalizumab, pexelizumab, pozelimab, ravulizumab, tesidolumab, vilobelimab, abagovomab, igovomab, oregovomab, sofituzumab vedotin, cantuzumab mertansine, cantuzuma bravtansine, girentuximab, altumomab pentetate, arcitumomab, besilesomab, bertilimumab, plozalizumab, mogamulizumab, leronlimab, PRO140, rovelizumab, rovelizumab, talacotuzumab, benralizumab, tavolimab, vonlerolizumab, gavilimomab, ziralimumab, fanolesomab, ipilimumab, ruplizumab, toralizumab, dapirolizumab pegol, toralizumab, dapirolizumab pegol, ruplizumab, blinatumomab, inebilizumab, loncastuximab tesirine, SGN-CD19A, tafasitamab, taplitumomab paptox, XMAB-5574, Budoprutug, Obexelimab, duvortuxizumab, englumafusp alfa, Emfizatamab, zeripatamig, siplizumab, blontuvetmab, FBTA05, ibritumomab tiuxetan, obinutuzumab, ocaratuzumab, ocrelizumab, ofatumumab, rituximab, tositumomab, ublituximab, veltuzumab, divozilimab, eramkafusp alfa, ripertamab, zuberitamab, glofitamab, nofetumomab merpentan, samalizumab, imvotamab, odronextamab, plamotamab, bectumomab, inotuzumab ozogamicin, moxetumomab pasudotox, pinatuzumab vedotin, gomiliximab, lumiliximab, inolimomab, inolimomab, daclizumab, camidanluma btesirine, basiliximab, varlilumab, omburtamab, enoblituzumab, vopratelimab, lulizumabpegol, TGN1412, muromonab-CD3, otelixizumab, teplizumab, visilizumab, epcoritamab, epcoritamab, brentuximab vedotin, iratumumab, azintuxizumab vedotin, gemtuzumab ozogamicin, lintuzumab, vadastuximab talirine, naratuximab emtansine, otlertuzumab, lilotomab satetraxetan, tetulomab, daratumumab, isatuximab, foralumab, mosunctuzumab, mosunetuzumab, cedelizumab, ibalizumab, keliximab, priliximab, tregalizumab, zanolimumab, bleselumab, iscalimab, lucatumumab, ravagalimab, selicrelumab, teneliximab, vanalimab, abciximab, bivatuzumab, iomab-B, telimomab aritox, zolimomab aritox, abituzumab, intetumumab, alemtuzumab, tamtuvetmab, lorvotuzumab mertansine, itolizumab, cusatuzumab, vorsetuzumab mafodotin, milatuzumab, iladatuzumab vedotin, polatuzumab vedotin, galiximab, cibisatamab, zolbetuximab, naxitamab, tisotumab vedotin, olendalizumab, pamrevlumab, lacnotuzumab, cabiralizumab, emactuzumab, axatilimab, gimsilumab, lenzilumab, namilumab, tremelimumab, ulocuplumab, tepoditamab, rovalpituzumab tesirine, tarlatamab, demcizumab, navicixizumab, drozitumab, parsatuzumab, depatuxizumab mafodotin, modotuximab, carotuximab, adecatumumab, adecatumumab, oportuzumab monatox, solitomab, tucotuzumab celmoleukin, edrecolomab, catumaxomab, ifabotuzumab, fibatuzumab, zalutumumab, panitumumab, cetuximab, futuximab, imgatuzumab, laprituximab emtansine, matuzumab, necitumumab, nimotuzumab, tomuzotuximab, amivantamab, amivantamab, epitumomab cituxetan, sontuzumab, duligotuzumab, elgemtumab, lumretuzumab, patritumab, scribantumab, zenocutuzumab, sibrotuzumab, burosumab, aprutumab ixadotin, radretumab, pasotuxizumab, farletuzumab, mirvetuximab soravtansine, vantictumab, TRBS07, 3F8, dinutuximab, dinutuximab beta, ecromeximab, mitumomab, andecaliximab, capromab, codrituzumab, glembatumumab vedotin, talquetamab, talquetamab, trevogrumab, indusatumab vedotin, ficlatuzumab, rilotumumab, zatuximab, pentuzimab, pentuzimab, margetuximab, timigutuzumab, trastuzumab, trastuzumab duocarmazine, trastuzumab emtansine, gancotamab, pertuzumab, ertumaxomab, emibetuzumab, telisotuzumab, telisotuzumab vedotin, derlotuximab biotin, apolizumab, onartuzumab, bersanlimab, enlimomabpegol, rontalizumab, sifalimumab, talizumab, ganitumab, istiratumab, robatumumab, teprotumumab, figitumumab, ganitumab, istiratumab, robatumumab, teprotumumab, cixutumumab, dalotuzumab, xentuzumab, dusigitumab, canakinumab, ustekinumab, ustekinumab, ustekinumab, briakinumab, briakinumab, abrezekimab, lebrikizumab, romilkimab, TNX-650, tralokinumab, anrukinzumab, brodalumab, ixekizumab, netakimab, perakizumab, secukinumab, vunakizumab, afasevikumab, afasevikumab, bimekizumab, bimekizumab, remtolumab, bermekimab, lutikizumab, lutikizumab, gevokizumab, cergutuzumab amunaleukin, fletikumab, fezakinumab, brazikumab, guselkumab, mirikizumab, tildrakizumab, risankizumab, flotetuzumab, nemolizumab, pascolizumab, dupilumab, mepolizumab, reslizumab, clazakizumab, elsilimomab, olokizumab, sarilumab, siltuximab, sirukumab, vobarilizumab, tocilizumab, SA237, satralizumab, enokizumab, prezalizumab, natalizumab, abrilumab, abrilumab, vedolizumab, volociximab, tadocizumab, etaracizumab, etrolizumab, spesolimab, vatelizumab, erlizumab, lirilumab, relatlimab, cBR96-doxorubicinimmunoconjugate, odulimomab, efalizumab, ladiratuzumab vedotin, simtuzumab, samrotamab vedotin, aselizumab, lupartumab amadotin, imalumab, carlumab, imaprelimab, amatuximab, amatuximab, anetumab ravtansine, narnatumab, clivatuzumab tetraxetan, pemtumomab, gatipotuzumab, ensituximab, lemalesomab, sulesomab, enfortumab vedotin, racotumomab, monalizumab, brontictuzumab, tarextumab, vesencumab, oxelumab, gilvetmab, tislelizumab, dostarlimab, BCD-100, nivolumab, PDR001, pembrolizumab, pidilizumab, retifanlimab, spartalizumab, sintilimab, cemiplimab, olaratumab, tovetumab, rinucumab, atezolizumab, avelumab, durvalumab, lifastuzumab vedotin, bavituximab, acapatamab, capromab, rosopatamab, nezastomig, pasotuxizumab, pelgifatamab, voxalatamab, cofetuzumab pelidotin, denosumab, rosmantuzumab, cirmtuzumab, atinumab, indatuximab ravtansine, elotuzumab, sirtratumab vedotin, sonepcizumab, vandortuzumab vedotin, minretumomab, satumomab pendetide, maslimomab, ontuxizumab, tenatumomab, fresolimumab, metelimumab, lerdelimumab, tezepelumab, etigilimab, tiragotumab, placulumab, prezalumab, infliximab, nerelimomab, ozoralizumab, adalimumab, afelimomab, certolizumab pegol, golimumab, mapatumumab, conatumumab, lexatumumab, tigatuzumab, sacituzumab govitecan, votumumab, pogalizumab, letolizumab, pankomab, anatumomab mafenatox, enavatuzumab, flanvotumab, brolucizumab, ranibizumab, varisacumab, bevacizumab, faricimab, icrucumab, alacizumab pegol, ramucirumab, pritumumab, and onvatilimab;
[6482] VH2 comprises a VH of an antibody selected from the group consisting of losatuxizumab vedotin, utomilumab, urelumab, oleclumab, naptumomab estafenatox, ascrinvacumab, pintumomab, tacatuzumab tetraxetan, nesvacumab, vanucizumab, timolumab, vapaliximab, vepalimomab, enapotamab vedotin, ianalumab, belimumab, tabalumab, tibulizumab, belantamab mafodotin, teclistamab, teclistamab, detumomab, nacolomab tafenatox, eculizumab, lendalizumab, pexelizumab, pozelimab, ravulizumab, tesidolumab, vilobelimab, abagovomab, igovomab, oregovomab, sofituzumab vedotin, cantuzumab mertansine, cantuzuma bravtansine, girentuximab, altumomab pentetate, arcitumomab, besilesomab, bertilimumab, plozalizumab, mogamulizumab, leronlimab, PRO140, rovelizumab, rovelizumab, talacotuzumab, benralizumab, tavolimab, vonlerolizumab, gavilimomab, ziralimumab, fanolesomab, ipilimumab, ruplizumab, toralizumab, dapirolizumab pegol, toralizumab, dapirolizumab pegol, ruplizumab, blinatumomab, inebilizumab, loncastuximab tesirine, SGN-CD19A, tafasitamab, taplitumomab paptox, XMAB-5574, Budoprutug, Obexelimab, duvortuxizumab, englumafusp alfa, Emfizatamab, zeripatamig, siplizumab, blontuvetmab, FBTA05, ibritumomab tiuxetan, obinutuzumab, ocaratuzumab, ocrelizumab, ofatumumab, rituximab, tositumomab, ublituximab, veltuzumab, divozilimab, eramkafusp alfa, ripertamab, zuberitamab, glofitamab, nofetumomab merpentan, samalizumab, imvotamab, odronextamab, plamotamab, bectumomab, inotuzumab ozogamicin, moxetumomab pasudotox, pinatuzumab vedotin, gomiliximab, lumiliximab, inolimomab, inolimomab, daclizumab, camidanluma btesirine, basiliximab, varlilumab, omburtamab, enoblituzumab, vopratelimab, lulizumabpegol, TGN1412, muromonab-CD3, otelixizumab, teplizumab, visilizumab, epcoritamab, epcoritamab, brentuximab vedotin, iratumumab, azintuxizumab vedotin, gemtuzumab ozogamicin, lintuzumab, vadastuximab talirine, naratuximab emtansine, otlertuzumab, lilotomab satetraxetan, tetulomab, daratumumab, isatuximab, foralumab, mosunetuzumab, mosunetuzumab, cedelizumab, ibalizumab, keliximab, priliximab, tregalizumab, zanolimumab, bleselumab, iscalimab, lucatumumab, ravagalimab, selicrelumab, teneliximab, vanalimab, abciximab, bivatuzumab, iomab-B, telimomab aritox, zolimomab aritox, abituzumab, intetumumab, alemtuzumab, tamtuvetmab, lorvotuzumab mertansine, itolizumab, cusatuzumab, vorsetuzumab mafodotin, milatuzumab, iladatuzumab vedotin, polatuzumab vedotin, galiximab, cibisatamab, zolbetuximab, naxitamab, tisotumab vedotin, olendalizumab, pamrevlumab, lacnotuzumab, cabiralizumab, emactuzumab, axatilimab, gimsilumab, lenzilumab, namilumab, tremelimumab, ulocuplumab, tepoditamab, rovalpituzumab tesirine, tarlatamab, demcizumab, navicixizumab, drozitumab, parsatuzumab, depatuxizumab mafodotin, modotuximab, carotuximab, adecatumumab, adecatumumab, oportuzumab monatox, solitomab, tucotuzumab celmoleukin, edrecolomab, catumaxomab, ifabotuzumab, fibatuzumab, zalutumumab, panitumumab, cetuximab, futuximab, imgatuzumab, laprituximab emtansine, matuzumab, necitumumab, nimotuzumab, tomuzotuximab, amivantamab, amivantamab, epitumomab cituxetan, sontuzumab, duligotuzumab, elgemtumab, lumretuzumab, patritumab, scribantumab, zenocutuzumab, sibrotuzumab, burosumab, aprutumab ixadotin, radretumab, pasotuxizumab, farletuzumab, mirvetuximab soravtansine, vantictumab, TRBS07, 3F8, dinutuximab, dinutuximab beta, ecromeximab, mitumomab, andecaliximab, capromab, codrituzumab, glembatumumab vedotin, talquetamab, talquetamab, trevogrumab, indusatumab vedotin, ficlatuzumab, rilotumumab, zatuximab, pentuzimab, pentuzimab, margetuximab, timigutuzumab, trastuzumab, trastuzumab duocarmazine, trastuzumab emtansine, gancotamab, pertuzumab, ertumaxomab, emibetuzumab, telisotuzumab, telisotuzumab vedotin, derlotuximab biotin, apolizumab, onartuzumab, bersanlimab, enlimomabpegol, rontalizumab, sifalimumab, talizumab, ganitumab, istiratumab, robatumumab, teprotumumab, figitumumab, ganitumab, istiratumab, robatumumab, teprotumumab, cixutumumab, dalotuzumab, xentuzumab, dusigitumab, canakinumab, ustekinumab, ustekinumab, ustekinumab, briakinumab, briakinumab, abrezekimab, lebrikizumab, romilkimab, TNX-650, tralokinumab, anrukinzumab, brodalumab, ixekizumab, netakimab, perakizumab, secukinumab, vunakizumab, afasevikumab, afasevikumab, bimekizumab, bimekizumab, remtolumab, bermekimab, lutikizumab, lutikizumab, gevokizumab, cergutuzumab amunaleukin, fletikumab, fezakinumab, brazikumab, gusclkumab, mirikizumab, tildrakizumab, risankizumab, flotetuzumab, nemolizumab, pascolizumab, dupilumab, mepolizumab, reslizumab, clazakizumab, elsilimomab, olokizumab, sarilumab, siltuximab, sirukumab, vobarilizumab, tocilizumab, SA237, satralizumab, enokizumab, prezalizumab, natalizumab, abrilumab, abrilumab, vedolizumab, volociximab, tadocizumab, etaracizumab, etrolizumab, spesolimab, vatelizumab, erlizumab, lirilumab, relatlimab, cBR96-doxorubicinimmunoconjugate, odulimomab, efalizumab, ladiratuzumab vedotin, simtuzumab, samrotamab vedotin, asclizumab, lupartumab amadotin, imalumab, carlumab, imaprelimab, amatuximab, amatuximab, anetumab ravtansine, narnatumab, clivatuzumab tetraxetan, pemtumomab, gatipotuzumab, ensituximab, lemalesomab, sulesomab, enfortumab vedotin, racotumomab, monalizumab, brontictuzumab, tarextumab, vesencumab, oxelumab, gilvetmab, tislelizumab, dostarlimab, BCD-100, nivolumab, PDR001, pembrolizumab, pidilizumab, retifanlimab, spartalizumab, sintilimab, cemiplimab, olaratumab, tovetumab, rinucumab, atezolizumab, avelumab, durvalumab, lifastuzumab vedotin, bavituximab, acapatamab, capromab, rosopatamab, nezastomig, pasotuxizumab, pelgifatamab, voxalatamab, cofetuzumab pelidotin, denosumab, rosmantuzumab, cirmtuzumab, atinumab, indatuximab ravtansine, elotuzumab, sirtratumab vedotin, sonepcizumab, vandortuzumab vedotin, minretumomab, satumomab pendetide, maslimomab, ontuxizumab, tenatumomab, fresolimumab, metelimumab, lerdelimumab, tezepelumab, etigilimab, tiragotumab, placulumab, prezalumab, infliximab, nerelimomab, ozoralizumab, adalimumab, afelimomab, certolizumab pegol, golimumab, mapatumumab, conatumumab, lexatumumab, tigatuzumab, sacituzumab govitecan, votumumab, pogalizumab, letolizumab, pankomab, anatumomab mafenatox, enavatuzumab, flanvotumab, brolucizumab, ranibizumab, varisacumab, bevacizumab, faricimab, icrucumab, alacizumab pegol, ramucirumab, pritumumab, and onvatilimab;
[6483] VH3 comprises a VH of an antibody selected from the group consisting of losatuxizumab vedotin, utomilumab, urelumab, oleclumab, naptumomab estafenatox, ascrinvacumab, pintumomab, tacatuzumab tetraxetan, nesvacumab, vanucizumab, timolumab, vapaliximab, vepalimomab, enapotamab vedotin, ianalumab, belimumab, tabalumab, tibulizumab, belantamab mafodotin, teclistamab, teclistamab, detumomab, nacolomab tafenatox, eculizumab, lendalizumab, pexclizumab, pozelimab, ravulizumab, tesidolumab, vilobelimab, abagovomab, igovomab, oregovomab, sofituzumab vedotin, cantuzumab mertansine, cantuzuma bravtansine, girentuximab, altumomab pentetate, arcitumomab, besilesomab, bertilimumab, plozalizumab, mogamulizumab, leronlimab, PRO140, rovelizumab, rovelizumab, talacotuzumab, benralizumab, tavolimab, vonlerolizumab, gavilimomab, ziralimumab, fanolesomab, ipilimumab, ruplizumab, toralizumab, dapirolizumab pegol, toralizumab, dapirolizumab pegol, ruplizumab, blinatumomab, inebilizumab, loncastuximab tesirine, SGN-CD19A, tafasitamab, taplitumomab paptox, XMAB-5574, Budoprutug, Obexelimab, duvortuxizumab, englumafusp alfa, Emfizatamab, zeripatamig, siplizumab, blontuvetmab, FBTA05, ibritumomab tiuxetan, obinutuzumab, ocaratuzumab, ocrelizumab, ofatumumab, rituximab, tositumomab, ublituximab, veltuzumab, divozilimab, eramkafusp alfa, ripertamab, zuberitamab, glofitamab, nofetumomab merpentan, samalizumab, imvotamab, odronextamab, plamotamab, bectumomab, inotuzumab ozogamicin, moxetumomab pasudotox, pinatuzumab vedotin, gomiliximab, lumiliximab, inolimomab, inolimomab, daclizumab, camidanluma btesirine, basiliximab, varlilumab, omburtamab, enoblituzumab, vopratelimab, lulizumabpegol, TGN1412, muromonab-CD3, otelixizumab, teplizumab, visilizumab, epcoritamab, epcoritamab, brentuximab vedotin, iratumumab, azintuxizumab vedotin, gemtuzumab ozogamicin, lintuzumab, vadastuximab talirine, naratuximab emtansine, otlertuzumab, lilotomab satetraxetan, tetulomab, daratumumab, isatuximab, foralumab, mosunctuzumab, mosunetuzumab, cedelizumab, ibalizumab, keliximab, priliximab, tregalizumab, zanolimumab, bleselumab, iscalimab, lucatumumab, ravagalimab, selicrelumab, teneliximab, vanalimab, abciximab, bivatuzumab, iomab-B, telimomab aritox, zolimomab aritox, abituzumab, intetumumab, alemtuzumab, tamtuvetmab, lorvotuzumab mertansine, itolizumab, cusatuzumab, vorsetuzumab mafodotin, milatuzumab, iladatuzumab vedotin, polatuzumab vedotin, galiximab, cibisatamab, zolbetuximab, naxitamab, tisotumab vedotin, olendalizumab, pamrevlumab, lacnotuzumab, cabiralizumab, emactuzumab, axatilimab, gimsilumab, lenzilumab, namilumab, tremelimumab, ulocuplumab, tepoditamab, rovalpituzumab tesirine, tarlatamab, demcizumab, navicixizumab, drozitumab, parsatuzumab, depatuxizumab mafodotin, modotuximab, carotuximab, adecatumumab, adecatumumab, oportuzumab monatox, solitomab, tucotuzumab celmoleukin, edrecolomab, catumaxomab, ifabotuzumab, fibatuzumab, zalutumumab, panitumumab, cetuximab, futuximab, imgatuzumab, laprituximab emtansine, matuzumab, necitumumab, nimotuzumab, tomuzotuximab, amivantamab, amivantamab, epitumomab cituxetan, sontuzumab, duligotuzumab, elgemtumab, lumretuzumab, patritumab, scribantumab, zenocutuzumab, sibrotuzumab, burosumab, aprutumab ixadotin, radretumab, pasotuxizumab, farletuzumab, mirvetuximab soravtansine, vantictumab, TRBS07, 3F8, dinutuximab, dinutuximab beta, ecromeximab, mitumomab, andecaliximab, capromab, codrituzumab, glembatumumab vedotin, talquetamab, talquetamab, trevogrumab, indusatumab vedotin, ficlatuzumab, rilotumumab, zatuximab, pentuzimab, pentuzimab, margetuximab, timigutuzumab, trastuzumab, trastuzumab duocarmazine, trastuzumab emtansine, gancotamab, pertuzumab, ertumaxomab, emibetuzumab, telisotuzumab, telisotuzumab vedotin, derlotuximab biotin, apolizumab, onartuzumab, bersanlimab, enlimomabpegol, rontalizumab, sifalimumab, talizumab, ganitumab, istiratumab, robatumumab, teprotumumab, figitumumab, ganitumab, istiratumab, robatumumab, teprotumumab, cixutumumab, dalotuzumab, xentuzumab, dusigitumab, canakinumab, ustekinumab, ustekinumab, ustekinumab, briakinumab, briakinumab, abrezekimab, lebrikizumab, romilkimab, TNX-650, tralokinumab, anrukinzumab, brodalumab, ixekizumab, netakimab, perakizumab, secukinumab, vunakizumab, afasevikumab, afasevikumab, bimekizumab, bimekizumab, remtolumab, bermckimab, lutikizumab, lutikizumab, gevokizumab, cergutuzumab amunaleukin, fletikumab, fezakinumab, brazikumab, gusclkumab, mirikizumab, tildrakizumab, risankizumab, flotetuzumab, nemolizumab, pascolizumab, dupilumab, mepolizumab, reslizumab, clazakizumab, elsilimomab, olokizumab, sarilumab, siltuximab, sirukumab, vobarilizumab, tocilizumab, SA237, satralizumab, enokizumab, prezalizumab, natalizumab, abrilumab, abrilumab, vedolizumab, volociximab, tadocizumab, etaracizumab, etrolizumab, spesolimab, vatelizumab, erlizumab, lirilumab, relatlimab, cBR96-doxorubicinimmunoconjugate, odulimomab, efalizumab, ladiratuzumab vedotin, simtuzumab, samrotamab vedotin, aselizumab, lupartumab amadotin, imalumab, carlumab, imaprelimab, amatuximab, amatuximab, anetumab ravtansine, narnatumab, clivatuzumab tetraxetan, pemtumomab, gatipotuzumab, ensituximab, lemalesomab, sulesomab, enfortumab vedotin, racotumomab, monalizumab, brontictuzumab, tarextumab, vesencumab, oxelumab, gilvetmab, tislelizumab, dostarlimab, BCD-100, nivolumab, PDR001, pembrolizumab, pidilizumab, retifanlimab, spartalizumab, sintilimab, cemiplimab, olaratumab, tovetumab, rinucumab, atezolizumab, avelumab, durvalumab, lifastuzumab vedotin, bavituximab, acapatamab, capromab, rosopatamab, nezastomig, pasotuxizumab, pelgifatamab, voxalatamab, cofetuzumab pelidotin, denosumab, rosmantuzumab, cirmtuzumab, atinumab, indatuximab ravtansine, elotuzumab, sirtratumab vedotin, sonepcizumab, vandortuzumab vedotin, minretumomab, satumomab pendetide, maslimomab, ontuxizumab, tenatumomab, fresolimumab, metelimumab, lerdelimumab, tezepelumab, etigilimab, tiragotumab, placulumab, prezalumab, infliximab, nerelimomab, ozoralizumab, adalimumab, afelimomab, certolizumab pegol, golimumab, mapatumumab, conatumumab, lexatumumab, tigatuzumab, sacituzumab govitecan, votumumab, pogalizumab, letolizumab, pankomab, anatumomab mafenatox, enavatuzumab, flanvotumab, brolucizumab, ranibizumab, varisacumab, bevacizumab, faricimab, icrucumab, alacizumab pegol, ramucirumab, pritumumab, and onvatilimab; and/or
[6484] VH4 comprises a VH of an antibody selected from the group consisting of losatuxizumab vedotin, utomilumab, urelumab, oleclumab, naptumomab estafenatox, ascrinvacumab, pintumomab, tacatuzumab tetraxetan, nesvacumab, vanucizumab, timolumab, vapaliximab, vepalimomab, enapotamab vedotin, ianalumab, belimumab, tabalumab, tibulizumab, belantamab mafodotin, teclistamab, teclistamab, detumomab, nacolomab tafenatox, eculizumab, lendalizumab, pexelizumab, pozelimab, ravulizumab, tesidolumab, vilobelimab, abagovomab, igovomab, oregovomab, sofituzumab vedotin, cantuzumab mertansine, cantuzuma bravtansine, girentuximab, altumomab pentetate, arcitumomab, besilesomab, bertilimumab, plozalizumab, mogamulizumab, leronlimab, PRO140, rovelizumab, rovelizumab, talacotuzumab, benralizumab, tavolimab, vonlerolizumab, gavilimomab, ziralimumab, fanolesomab, ipilimumab, ruplizumab, toralizumab, dapirolizumab pegol, toralizumab, dapirolizumab pegol, ruplizumab, blinatumomab, inebilizumab, loncastuximab tesirine, SGN-CD19A, tafasitamab, taplitumomab paptox, XMAB-5574, Budoprutug, Obexelimab, duvortuxizumab, englumafusp alfa, Emfizatamab, zcripatamig, siplizumab, blontuvetmab, FBTA05, ibritumomab tiuxetan, obinutuzumab, ocaratuzumab, ocrelizumab, ofatumumab, rituximab, tositumomab, ublituximab, veltuzumab, divozilimab, eramkafusp alfa, ripertamab, zuberitamab, glofitamab, nofetumomab merpentan, samalizumab, imvotamab, odronextamab, plamotamab, bectumomab, inotuzumab ozogamicin, moxetumomab pasudotox, pinatuzumab vedotin, gomiliximab, lumiliximab, inolimomab, inolimomab, daclizumab, camidanluma btesirine, basiliximab, varlilumab, omburtamab, enoblituzumab, vopratelimab, lulizumabpegol, TGN1412, muromonab-CD3, otelixizumab, teplizumab, visilizumab, epcoritamab, epcoritamab, brentuximab vedotin, iratumumab, azintuxizumab vedotin, gemtuzumab ozogamicin, lintuzumab, vadastuximab talirine, naratuximab emtansine, otlertuzumab, lilotomab satetraxetan, tetulomab, daratumumab, isatuximab, foralumab, mosunctuzumab, mosunetuzumab, cedelizumab, ibalizumab, keliximab, priliximab, tregalizumab, zanolimumab, bleselumab, iscalimab, lucatumumab, ravagalimab, selicrelumab, teneliximab, vanalimab, abciximab, bivatuzumab, iomab-B, telimomab aritox, zolimomab aritox, abituzumab, intetumumab, alemtuzumab, tamtuvetmab, lorvotuzumab mertansine, itolizumab, cusatuzumab, vorsetuzumab mafodotin, milatuzumab, iladatuzumab vedotin, polatuzumab vedotin, galiximab, cibisatamab, zolbetuximab, naxitamab, tisotumab vedotin, olendalizumab, pamrevlumab, lacnotuzumab, cabiralizumab, emactuzumab, axatilimab, gimsilumab, lenzilumab, namilumab, tremelimumab, ulocuplumab, tepoditamab, rovalpituzumab tesirine, tarlatamab, demcizumab, navicixizumab, drozitumab, parsatuzumab, depatuxizumab mafodotin, modotuximab, carotuximab, adecatumumab, adecatumumab, oportuzumab monatox, solitomab, tucotuzumab celmoleukin, edrecolomab, catumaxomab, ifabotuzumab, fibatuzumab, zalutumumab, panitumumab, cetuximab, futuximab, imgatuzumab, laprituximab emtansine, matuzumab, necitumumab, nimotuzumab, tomuzotuximab, amivantamab, amivantamab, epitumomab cituxetan, sontuzumab, duligotuzumab, elgemtumab, lumretuzumab, patritumab, seribantumab, zenocutuzumab, sibrotuzumab, burosumab, aprutumab ixadotin, radretumab, pasotuxizumab, farletuzumab, mirvetuximab soravtansine, vantictumab, TRBS07, 3F8, dinutuximab, dinutuximab beta, ecromeximab, mitumomab, andecaliximab, capromab, codrituzumab, glembatumumab vedotin, talquetamab, talquetamab, trevogrumab, indusatumab vedotin, ficlatuzumab, rilotumumab, zatuximab, pentuzimab, pentuzimab, margetuximab, timigutuzumab, trastuzumab, trastuzumab duocarmazine, trastuzumab emtansine, gancotamab, pertuzumab, crtumaxomab, emibetuzumab, telisotuzumab, telisotuzumab vedotin, derlotuximab biotin, apolizumab, onartuzumab, bersanlimab, enlimomabpegol, rontalizumab, sifalimumab, talizumab, ganitumab, istiratumab, robatumumab, teprotumumab, figitumumab, ganitumab, istiratumab, robatumumab, teprotumumab, cixutumumab, dalotuzumab, xentuzumab, dusigitumab, canakinumab, ustekinumab, ustekinumab, ustekinumab, briakinumab, briakinumab, abrezekimab, lebrikizumab, romilkimab, TNX-650, tralokinumab, anrukinzumab, brodalumab, ixekizumab, netakimab, perakizumab, secukinumab, vunakizumab, afasevikumab, afasevikumab, bimekizumab, bimekizumab, remtolumab, bermekimab, lutikizumab, lutikizumab, gevokizumab, cergutuzumab amunaleukin, fletikumab, fezakinumab, brazikumab, guselkumab, mirikizumab, tildrakizumab, risankizumab, flotetuzumab, nemolizumab, pascolizumab, dupilumab, mepolizumab, reslizumab, clazakizumab, elsilimomab, olokizumab, sarilumab, siltuximab, sirukumab, vobarilizumab, tocilizumab, SA237, satralizumab, enokizumab, prezalizumab, natalizumab, abrilumab, abrilumab, vedolizumab, volociximab, tadocizumab, etaracizumab, etrolizumab, spesolimab, vatelizumab, erlizumab, lirilumab, relatlimab, cBR96-doxorubicinimmunoconjugate, odulimomab, efalizumab, ladiratuzumab vedotin, simtuzumab, samrotamab vedotin, aselizumab, lupartumab amadotin, imalumab, carlumab, imaprelimab, amatuximab, amatuximab, anctumab ravtansine, narnatumab, clivatuzumab tetraxetan, pemtumomab, gatipotuzumab, ensituximab, lemalesomab, sulesomab, enfortumab vedotin, racotumomab, monalizumab, brontictuzumab, tarextumab, vesencumab, oxelumab, gilvetmab, tislelizumab, dostarlimab, BCD-100, nivolumab, PDR001, pembrolizumab, pidilizumab, retifanlimab, spartalizumab, sintilimab, cemiplimab, olaratumab, tovetumab, rinucumab, atezolizumab, avelumab, durvalumab, lifastuzumab vedotin, bavituximab, acapatamab, capromab, rosopatamab, nezastomig, pasotuxizumab, pelgifatamab, voxalatamab, cofetuzumab pelidotin, denosumab, rosmantuzumab, cirmtuzumab, atinumab, indatuximab ravtansinc, elotuzumab, sirtratumab vedotin, sonepcizumab, vandortuzumab vedotin, minretumomab, satumomab pendetide, maslimomab, ontuxizumab, tenatumomab, fresolimumab, metelimumab, lerdelimumab, tezepelumab, etigilimab, tiragotumab, placulumab, prezalumab, infliximab, nerelimomab, ozoralizumab, adalimumab, afelimomab, certolizumab pegol, golimumab, mapatumumab, conatumumab, lexatumumab, tigatuzumab, sacituzumab govitecan, votumumab, pogalizumab, letolizumab, pankomab, anatumomab mafenatox, enavatuzumab, flanvotumab, brolucizumab, ranibizumab, varisacumab, bevacizumab, faricimab, icrucumab, alacizumab pegol, ramucirumab, pritumumab, and onvatilimab; or
[6485] (iii)
[6486] VL1 comprises (i) a complementarity determining region (CDR) 1 having an amino acid sequence that is at least 65%, at least 70%, at least 75%, at least 80%, at least 85%, at least 90%, at least 95%, at least 99%, or 100% identical to any one of SEQ ID NOs: 1096, 1103, 1110, 1120, 1127, 1134, 1141, 1148, 1155, 1162, 1169, 1174, 1181, 1188, 1199, 1211, 1221, 1228, 1235, 1247, 1254, 1261, 1266, 1271, 1278, 1285, 1292, 1299, 1306, 1313, 1319, 1326, 1339, 1352, 1359, 1366, 1373, 1382, 1394, 1401, 1408, 1414, 1421, 1428, 1441, 1448, 1455, 1461, 1468, 1475, 1488, 1495, 1508, 1519, 1526, 1531, 1538, 1544, 1556, 1568, 1574, 1581, 1594, 1601, 1608, 1615, 1622, 1629, 1636, 1643, 1650, 1657, 1672, 1679, 1689, 1697, 1708, 1715, 1718, 1723, 1727, 1738, 1743, 1752, 1761, 1763, 1769, 1776, and 1786; (ii) a CDR2 having an amino acid sequence that is at least 65%, at least 70%, at least 75%, at least 80%, at least 85%, at least 90%, at least 95%, at least 99%, or 100% identical to any one of SEQ ID NOs: 1200, 1212, 1680, 1690, 1698, 1709, 1728, 1739, 1744, 1753, 1770, and 1777; or at least 65%, at least 70%, at least 75%, at least 80%, at least 85%, at least 90%, at least 95%, at least 99%, or 100% identical to any one of amino acid sequences AAS, APS, AT, ATS, DAS, DDG, DDS, DT, DTS, DVS, EAS, FTS, GAF, GAN, GAS, GAT, GIS, GKN, GNS, HTS, KVS, LAS, LGS, LVS, NAK, NTN, QMS, RMS, RTS, SAS, TTS, WAS, YAS, YAT, YGS, YRS, and YTS; and (iii) a CDR3 having an amino acid sequence that is at least 65%, at least 70%, at least 75%, at least 80%, at least 85%, at least 90%, at least 95%, at least 99%, or 100% identical to any one of SEQ ID NOs: 1097, 1104, 1111, 1121, 1128, 1135, 1142, 1149, 1156, 1163, 1170, 1175, 1182, 1189, 1195, 1201, 1207, 1213, 1222, 1229, 1236, 2009, 1248, 1255, 1262, 1267, 1272, 1279, 1286, 1293, 1300, 1307, 1320, 1327, 1333, 1340, 1346, 1353, 1360, 1367, 1374, 1383, 1389, 1395, 1402, 1409, 1415, 1422, 1429, 1435, 1442, 1449, 1456, 1462, 1469, 1476, 1482, 1489, 1496, 1502, 1509, 1513, 1520, 1532, 1539, 1545, 1557, 1562, 1569, 1575, 1582, 1588, 1595, 1602, 1609, 1616, 1623, 1630, 1637, 1644, 1651, 1658, 1663, 1673, 1681, 1691, 1699, 1710, 1729, 1735, 1745, 1751, 1754, 1778, 1787, and 1976;
[6487] VL2 comprises (i) a complementarity determining region (CDR) 1 having an amino acid sequence that is at least 65%, at least 70%, at least 75%, at least 80%, at least 85%, at least 90%, at least 95%, at least 99%, or 100% identical to any one of SEQ ID NOs: 1096, 1103, 1110, 1120, 1127, 1134, 1141, 1148, 1155, 1162, 1169, 1174, 1181, 1188, 1199, 1211, 1221, 1228, 1235, 1247, 1254, 1261, 1266, 1271, 1278, 1285, 1292, 1299, 1306, 1313, 1319, 1326, 1339, 1352, 1359, 1366, 1373, 1382, 1394, 1401, 1408, 1414, 1421, 1428, 1441, 1448, 1455, 1461, 1468, 1475, 1488, 1495, 1508, 1519, 1526, 1531, 1538, 1544, 1556, 1568, 1574, 1581, 1594, 1601, 1608, 1615, 1622, 1629, 1636, 1643, 1650, 1657, 1672, 1679, 1689, 1697, 1708, 1715, 1718, 1723, 1727, 1738, 1743, 1752, 1761, 1763, 1769, 1776, and 1786; (ii) a CDR2 having an amino acid sequence that is at least 65%, at least 70%, at least 75%, at least 80%, at least 85%, at least 90%, at least 95%, at least 99%, or 100% identical to any one of SEQ ID NOs: 1200, 1212, 1680, 1690, 1698, 1709, 1728, 1739, 1744, 1753, 1770, and 1777; or at least 65%, at least 70%, at least 75%, at least 80%, at least 85%, at least 90%, at least 95%, at least 99%, or 100% identical to any one of amino acid sequences AAS, APS, AT, ATS, DAS, DDG, DDS, DT, DTS, DVS, EAS, FTS, GAF, GAN, GAS, GAT, GIS, GKN, GNS, HTS, KVS, LAS, LGS, LVS, NAK, NTN, QMS, RMS, RTS, SAS, TTS, WAS, YAS, YAT, YGS, YRS, and YTS; and (iii) a CDR3 having an amino acid sequence that is at least 65%, at least 70%, at least 75%, at least 80%, at least 85%, at least 90%, at least 95%, at least 99%, or 100% identical to any one of SEQ ID NOs: 1097, 1104, 1111, 1121, 1128, 1135, 1142, 1149, 1156, 1163, 1170, 1175, 1182, 1189, 1195, 1201, 1207, 1213, 1222, 1229, 1236, 2009, 1248, 1255, 1262, 1267, 1272, 1279, 1286, 1293, 1300, 1307, 1320, 1327, 1333, 1340, 1346, 1353, 1360, 1367, 1374, 1383, 1389, 1395, 1402, 1409, 1415, 1422, 1429, 1435, 1442, 1449, 1456, 1462, 1469, 1476, 1482, 1489, 1496, 1502, 1509, 1513, 1520, 1532, 1539, 1545, 1557, 1562, 1569, 1575, 1582, 1588, 1595, 1602, 1609, 1616, 1623, 1630, 1637, 1644, 1651, 1658, 1663, 1673, 1681, 1691, 1699, 1710, 1729, 1735, 1745, 1751, 1754, 1778, 1787, and 1976;
[6488] VL3 comprises (i) a complementarity determining region (CDR) 1 having an amino acid sequence that is at least 65%, at least 70%, at least 75%, at least 80%, at least 85%, at least 90%, at least 95%, at least 99%, or 100% identical to any one of SEQ ID NOs: 1096, 1103, 1110, 1120, 1127, 1134, 1141, 1148, 1155, 1162, 1169, 1174, 1181, 1188, 1199, 1211, 1221, 1228, 1235, 1247, 1254, 1261, 1266, 1271, 1278, 1285, 1292, 1299, 1306, 1313, 1319, 1326, 1339, 1352, 1359, 1366, 1373, 1382, 1394, 1401, 1408, 1414, 1421, 1428, 1441, 1448, 1455, 1461, 1468, 1475, 1488, 1495, 1508, 1519, 1526, 1531, 1538, 1544, 1556, 1568, 1574, 1581, 1594, 1601, 1608, 1615, 1622, 1629, 1636, 1643, 1650, 1657, 1672, 1679, 1689, 1697, 1708, 1715, 1718, 1723, 1727, 1738, 1743, 1752, 1761, 1763, 1769, 1776, and 1786; (ii) a CDR2 having an amino acid sequence that is at least 65%, at least 70%, at least 75%, at least 80%, at least 85%, at least 90%, at least 95%, at least 99%, or 100% identical to any one of SEQ ID NOs: 1200, 1212, 1680, 1690, 1698, 1709, 1728, 1739, 1744, 1753, 1770, and 1777; or at least 65%, at least 70%, at least 75%, at least 80%, at least 85%, at least 90%, at least 95%, at least 99%, or 100% identical to any one of amino acid sequences AAS, APS, AT, ATS, DAS, DDG, DDS, DT, DTS, DVS, EAS, FTS, GAF, GAN, GAS, GAT, GIS, GKN, GNS, HTS, KVS, LAS, LGS, LVS, NAK, NTN, QMS, RMS, RTS, SAS, TTS, WAS, YAS, YAT, YGS, YRS, and YTS; and (iii) a CDR3 having an amino acid sequence that is at least 65%, at least 70%, at least 75%, at least 80%, at least 85%, at least 90%, at least 95%, at least 99%, or 100% identical to any one of SEQ ID NOs: 1097, 1104, 1111, 1121, 1128, 1135, 1142, 1149, 1156, 1163, 1170, 1175, 1182, 1189, 1195, 1201, 1207, 1213, 1222, 1229, 1236, 2009, 1248, 1255, 1262, 1267, 1272, 1279, 1286, 1293, 1300, 1307, 1320, 1327, 1333, 1340, 1346, 1353, 1360, 1367, 1374, 1383, 1389, 1395, 1402, 1409, 1415, 1422, 1429, 1435, 1442, 1449, 1456, 1462, 1469, 1476, 1482, 1489, 1496, 1502, 1509, 1513, 1520, 1532, 1539, 1545, 1557, 1562, 1569, 1575, 1582, 1588, 1595, 1602, 1609, 1616, 1623, 1630, 1637, 1644, 1651, 1658, 1663, 1673, 1681, 1691, 1699, 1710, 1729, 1735, 1745, 1751, 1754, 1778, 1787, and 1976;
[6489] VL4 comprises (i) a complementarity determining region (CDR) 1 having an amino acid sequence that is at least 65%, at least 70%, at least 75%, at least 80%, at least 85%, at least 90%, at least 95%, at least 99%, or 100% identical to any one of SEQ ID NOs: 1096, 1103, 1110, 1120, 1127, 1134, 1141, 1148, 1155, 1162, 1169, 1174, 1181, 1188, 1199, 1211, 1221, 1228, 1235, 1247, 1254, 1261, 1266, 1271, 1278, 1285, 1292, 1299, 1306, 1313, 1319, 1326, 1339, 1352, 1359, 1366, 1373, 1382, 1394, 1401, 1408, 1414, 1421, 1428, 1441, 1448, 1455, 1461, 1468, 1475, 1488, 1495, 1508, 1519, 1526, 1531, 1538, 1544, 1556, 1568, 1574, 1581, 1594, 1601, 1608, 1615, 1622, 1629, 1636, 1643, 1650, 1657, 1672, 1679, 1689, 1697, 1708, 1715, 1718, 1723, 1727, 1738, 1743, 1752, 1761, 1763, 1769, 1776, and 1786; (ii) a CDR2 having an amino acid sequence that is at least 65%, at least 70%, at least 75%, at least 80%, at least 85%, at least 90%, at least 95%, at least 99%, or 100% identical to any one of SEQ ID NOs: 1200, 1212, 1680, 1690, 1698, 1709, 1728, 1739, 1744, 1753, 1770, and 1777; or at least 65%, at least 70%, at least 75%, at least 80%, at least 85%, at least 90%, at least 95%, at least 99%, or 100% identical to any one of amino acid sequences AAS, APS, AT, ATS, DAS, DDG, DDS, DT, DTS, DVS, EAS, FTS, GAF, GAN, GAS, GAT, GIS, GKN, GNS, HTS, KVS, LAS, LGS, LVS, NAK, NTN, QMS, RMS, RTS, SAS, TTS, WAS, YAS, YAT, YGS, YRS, and YTS; and (iii) a CDR3 having an amino acid sequence that is at least 65%, at least 70%, at least 75%, at least 80%, at least 85%, at least 90%, at least 95%, at least 99%, or 100% identical to any one of SEQ ID NOs: 1097, 1104, 1111, 1121, 1128, 1135, 1142, 1149, 1156, 1163, 1170, 1175, 1182, 1189, 1195, 1201, 1207, 1213, 1222, 1229, 1236, 2009, 1248, 1255, 1262, 1267, 1272, 1279, 1286, 1293, 1300, 1307, 1320, 1327, 1333, 1340, 1346, 1353, 1360, 1367, 1374, 1383, 1389, 1395, 1402, 1409, 1415, 1422, 1429, 1435, 1442, 1449, 1456, 1462, 1469, 1476, 1482, 1489, 1496, 1502, 1509, 1513, 1520, 1532, 1539, 1545, 1557, 1562, 1569, 1575, 1582, 1588, 1595, 1602, 1609, 1616, 1623, 1630, 1637, 1644, 1651, 1658, 1663, 1673, 1681, 1691, 1699, 1710, 1729, 1735, 1745, 1751, 1754, 1778, 1787, and 1976;
[6490] VH1 comprises (i) a complementarity determining region (CDR) 1 having an amino acid sequence that is at least 65%, at least 70%, at least 75%, at least 80%, at least 85%, at least 90%, at least 95%, at least 99%, or 100% identical to any one of SEQ ID NOs: 1099, 1106, 1113, 1117, 1123, 1130, 1137, 1144, 1151, 1158, 1165, 1177, 1184, 1191, 1203, 1215, 1224, 1231, 1238, 1243, 1250, 1257, 1264, 1274, 1281, 1288, 1295, 1302, 1309, 1315, 1322, 1329, 1335, 1342, 1348, 1355, 1362, 1369, 1376, 1385, 1397, 1404, 1417, 1424, 1431, 1437, 1444, 1451, 1458, 1464, 1471, 1478, 1484, 1491, 1498, 1504, 1511, 1515, 1522, 1534, 1547, 1552, 1564, 1577, 1584, 1590, 1597, 1604, 1611, 1618, 1625, 1632, 1639, 1646, 1653, 1660, 1665, 1675, 1683, 1693, 1701, 1705, 1716, 1719, 1731, 1736, 1747, 1756, 1772, 1780, and 1789; (ii) a CDR2 having an amino acid sequence that is at least 65%, at least 70%, at least 75%, at least 80%, at least 85%, at least 90%, at least 95%, at least 99%, or 100% identical to any one of SEQ ID NOs: 1100, 1107, 1114, 1118, 1124, 1131, 1138, 1145, 1152, 1159, 1166, 1178, 1185, 1192, 1204, 1216, 1225, 1232, 1239, 1244, 1251, 1258, 1275, 1282, 1289, 1296, 1303, 1310, 1316, 1323, 1330, 1336, 1343, 1349, 1356, 1363, 1370, 1377, 1386, 1391, 1398, 1405, 1411, 1418, 1425, 1432, 1438, 1445, 1452, 1465, 1472, 1479, 1485, 1492, 1499, 1505, 1516, 1523, 1528, 1535, 1541, 1548, 1553, 1559, 1565, 1571, 1578, 1585, 1591, 1598, 1605, 1612, 1619, 1626, 1633, 1640, 1647, 1654, 1666, 1676, 1684, 1687, 1694, 1702, 1706, 1712, 1717, 1720, 1725, 1732, 1737, 1741, 1748, 1757, 1767, 1773, 1781, and 1790; and (iii) a CDR3 having an amino acid sequence that is at least 65%, at least 70%, at least 75%, at least 80%, at least 85%, at least 90%, at least 95%, at least 99%, or 100% identical to any one of SEQ ID NOs: 1101, 1108, 1115, 1125, 1132, 1139, 1146, 1153, 1160, 1167, 1172, 1179, 1186, 1193, 1197, 1205, 1209, 1217, 1226, 1233, 1240, 1245, 1252, 1259, 1269, 1276, 1283, 1290, 1297, 1304, 1311, 1317, 1324, 1331, 1337, 1344, 1350, 1357, 1364, 1371, 1378, 1387, 1392, 1399, 1406, 1412, 1419, 1426, 1433, 1439, 1446, 1453, 1459, 1466, 1473, 1480, 1486, 1493, 1500, 1506, 1517, 1524, 1529, 1536, 1542, 1549, 1554, 1560, 1566, 1572, 1579, 1586, 1592, 1599, 1606, 1613, 1620, 1627, 1634, 1641, 1648, 1655, 1661, 1667, 1670, 1677, 1685, 1688, 1695, 1703, 1707, 1713, 1733, 1749, 1758, 1762, 1774, 1782, 1791, and 1975;
[6491] VH2 comprises (i) a complementarity determining region (CDR) 1 having an amino acid sequence that is at least 65%, at least 70%, at least 75%, at least 80%, at least 85%, at least 90%, at least 95%, at least 99%, or 100% identical to any one of SEQ ID NOs: 1099, 1106, 1113, 1117, 1123, 1130, 1137, 1144, 1151, 1158, 1165, 1177, 1184, 1191, 1203, 1215, 1224, 1231, 1238, 1243, 1250, 1257, 1264, 1274, 1281, 1288, 1295, 1302, 1309, 1315, 1322, 1329, 1335, 1342, 1348, 1355, 1362, 1369, 1376, 1385, 1397, 1404, 1417, 1424, 1431, 1437, 1444, 1451, 1458, 1464, 1471, 1478, 1484, 1491, 1498, 1504, 1511, 1515, 1522, 1534, 1547, 1552, 1564, 1577, 1584, 1590, 1597, 1604, 1611, 1618, 1625, 1632, 1639, 1646, 1653, 1660, 1665, 1675, 1683, 1693, 1701, 1705, 1716, 1719, 1731, 1736, 1747, 1756, 1772, 1780, and 1789; (ii) a CDR2 having an amino acid sequence that is at least 65%, at least 70%, at least 75%, at least 80%, at least 85%, at least 90%, at least 95%, at least 99%, or 100% identical to any one of SEQ ID NOs: 1100, 1107, 1114, 1118, 1124, 1131, 1138, 1145, 1152, 1159, 1166, 1178, 1185, 1192, 1204, 1216, 1225, 1232, 1239, 1244, 1251, 1258, 1275, 1282, 1289, 1296, 1303, 1310, 1316, 1323, 1330, 1336, 1343, 1349, 1356, 1363, 1370, 1377, 1386, 1391, 1398, 1405, 1411, 1418, 1425, 1432, 1438, 1445, 1452, 1465, 1472, 1479, 1485, 1492, 1499, 1505, 1516, 1523, 1528, 1535, 1541, 1548, 1553, 1559, 1565, 1571, 1578, 1585, 1591, 1598, 1605, 1612, 1619, 1626, 1633, 1640, 1647, 1654, 1666, 1676, 1684, 1687, 1694, 1702, 1706, 1712, 1717, 1720, 1725, 1732, 1737, 1741, 1748, 1757, 1767, 1773, 1781, and 1790; and (iii) a CDR3 having an amino acid sequence that is at least 65%, at least 70%, at least 75%, at least 80%, at least 85%, at least 90%, at least 95%, at least 99%, or 100% identical to any one of SEQ ID NOs: 1101, 1108, 1115, 1125, 1132, 1139, 1146, 1153, 1160, 1167, 1172, 1179, 1186, 1193, 1197, 1205, 1209, 1217, 1226, 1233, 1240, 1245, 1252, 1259, 1269, 1276, 1283, 1290, 1297, 1304, 1311, 1317, 1324, 1331, 1337, 1344, 1350, 1357, 1364, 1371, 1378, 1387, 1392, 1399, 1406, 1412, 1419, 1426, 1433, 1439, 1446, 1453, 1459, 1466, 1473, 1480, 1486, 1493, 1500, 1506, 1517, 1524, 1529, 1536, 1542, 1549, 1554, 1560, 1566, 1572, 1579, 1586, 1592, 1599, 1606, 1613, 1620, 1627, 1634, 1641, 1648, 1655, 1661, 1667, 1670, 1677, 1685, 1688, 1695, 1703, 1707, 1713, 1733, 1749, 1758, 1762, 1774, 1782, 1791, and 1975;
[6492] VH3 comprises (i) a complementarity determining region (CDR) 1 having an amino acid sequence that is at least 65%, at least 70%, at least 75%, at least 80%, at least 85%, at least 90%, at least 95%, at least 99%, or 100% identical to any one of SEQ ID NOs: 1099, 1106, 1113, 1117, 1123, 1130, 1137, 1144, 1151, 1158, 1165, 1177, 1184, 1191, 1203, 1215, 1224, 1231, 1238, 1243, 1250, 1257, 1264, 1274, 1281, 1288, 1295, 1302, 1309, 1315, 1322, 1329, 1335, 1342, 1348, 1355, 1362, 1369, 1376, 1385, 1397, 1404, 1417, 1424, 1431, 1437, 1444, 1451, 1458, 1464, 1471, 1478, 1484, 1491, 1498, 1504, 1511, 1515, 1522, 1534, 1547, 1552, 1564, 1577, 1584, 1590, 1597, 1604, 1611, 1618, 1625, 1632, 1639, 1646, 1653, 1660, 1665, 1675, 1683, 1693, 1701, 1705, 1716, 1719, 1731, 1736, 1747, 1756, 1772, 1780, and 1789; (ii) a CDR2 having an amino acid sequence that is at least 65%, at least 70%, at least 75%, at least 80%, at least 85%, at least 90%, at least 95%, at least 99%, or 100% identical to any one of SEQ ID NOs: 1100, 1107, 1114, 1118, 1124, 1131, 1138, 1145, 1152, 1159, 1166, 1178, 1185, 1192, 1204, 1216, 1225, 1232, 1239, 1244, 1251, 1258, 1275, 1282, 1289, 1296, 1303, 1310, 1316, 1323, 1330, 1336, 1343, 1349, 1356, 1363, 1370, 1377, 1386, 1391, 1398, 1405, 1411, 1418, 1425, 1432, 1438, 1445, 1452, 1465, 1472, 1479, 1485, 1492, 1499, 1505, 1516, 1523, 1528, 1535, 1541, 1548, 1553, 1559, 1565, 1571, 1578, 1585, 1591, 1598, 1605, 1612, 1619, 1626, 1633, 1640, 1647, 1654, 1666, 1676, 1684, 1687, 1694, 1702, 1706, 1712, 1717, 1720, 1725, 1732, 1737, 1741, 1748, 1757, 1767, 1773, 1781, and 1790; and (iii) a CDR3 having an amino acid sequence that is at least 65%, at least 70%, at least 75%, at least 80%, at least 85%, at least 90%, at least 95%, at least 99%, or 100% identical to any one of SEQ ID NOs: 1101, 1108, 1115, 1125, 1132, 1139, 1146, 1153, 1160, 1167, 1172, 1179, 1186, 1193, 1197, 1205, 1209, 1217, 1226, 1233, 1240, 1245, 1252, 1259, 1269, 1276, 1283, 1290, 1297, 1304, 1311, 1317, 1324, 1331, 1337, 1344, 1350, 1357, 1364, 1371, 1378, 1387, 1392, 1399, 1406, 1412, 1419, 1426, 1433, 1439, 1446, 1453, 1459, 1466, 1473, 1480, 1486, 1493, 1500, 1506, 1517, 1524, 1529, 1536, 1542, 1549, 1554, 1560, 1566, 1572, 1579, 1586, 1592, 1599, 1606, 1613, 1620, 1627, 1634, 1641, 1648, 1655, 1661, 1667, 1670, 1677, 1685, 1688, 1695, 1703, 1707, 1713, 1733, 1749, 1758, 1762, 1774, 1782, 1791, and 1975; and/or
[6493] VH4 comprises (i) a complementarity determining region (CDR) 1 having an amino acid sequence that is at least 65%, at least 70%, at least 75%, at least 80%, at least 85%, at least 90%, at least 95%, at least 99%, or 100% identical to any one of SEQ ID NOs: 1099, 1106, 1113, 1117, 1123, 1130, 1137, 1144, 1151, 1158, 1165, 1177, 1184, 1191, 1203, 1215, 1224, 1231, 1238, 1243, 1250, 1257, 1264, 1274, 1281, 1288, 1295, 1302, 1309, 1315, 1322, 1329, 1335, 1342, 1348, 1355, 1362, 1369, 1376, 1385, 1397, 1404, 1417, 1424, 1431, 1437, 1444, 1451, 1458, 1464, 1471, 1478, 1484, 1491, 1498, 1504, 1511, 1515, 1522, 1534, 1547, 1552, 1564, 1577, 1584, 1590, 1597, 1604, 1611, 1618, 1625, 1632, 1639, 1646, 1653, 1660, 1665, 1675, 1683, 1693, 1701, 1705, 1716, 1719, 1731, 1736, 1747, 1756, 1772, 1780, and 1789; (ii) a CDR2 having an amino acid sequence that is at least 65%, at least 70%, at least 75%, at least 80%, at least 85%, at least 90%, at least 95%, at least 99%, or 100% identical to any one of SEQ ID NOs: 1100, 1107, 1114, 1118, 1124, 1131, 1138, 1145, 1152, 1159, 1166, 1178, 1185, 1192, 1204, 1216, 1225, 1232, 1239, 1244, 1251, 1258, 1275, 1282, 1289, 1296, 1303, 1310, 1316, 1323, 1330, 1336, 1343, 1349, 1356, 1363, 1370, 1377, 1386, 1391, 1398, 1405, 1411, 1418, 1425, 1432, 1438, 1445, 1452, 1465, 1472, 1479, 1485, 1492, 1499, 1505, 1516, 1523, 1528, 1535, 1541, 1548, 1553, 1559, 1565, 1571, 1578, 1585, 1591, 1598, 1605, 1612, 1619, 1626, 1633, 1640, 1647, 1654, 1666, 1676, 1684, 1687, 1694, 1702, 1706, 1712, 1717, 1720, 1725, 1732, 1737, 1741, 1748, 1757, 1767, 1773, 1781, and 1790; and (iii) a CDR3 having an amino acid sequence that is at least 65%, at least 70%, at least 75%, at least 80%, at least 85%, at least 90%, at least 95%, at least 99%, or 100% identical to any one of SEQ ID NOs: 1101, 1108, 1115, 1125, 1132, 1139, 1146, 1153, 1160, 1167, 1172, 1179, 1186, 1193, 1197, 1205, 1209, 1217, 1226, 1233, 1240, 1245, 1252, 1259, 1269, 1276, 1283, 1290, 1297, 1304, 1311, 1317, 1324, 1331, 1337, 1344, 1350, 1357, 1364, 1371, 1378, 1387, 1392, 1399, 1406, 1412, 1419, 1426, 1433, 1439, 1446, 1453, 1459, 1466, 1473, 1480, 1486, 1493, 1500, 1506, 1517, 1524, 1529, 1536, 1542, 1549, 1554, 1560, 1566, 1572, 1579, 1586, 1592, 1599, 1606, 1613, 1620, 1627, 1634, 1641, 1648, 1655, 1661, 1667, 1670, 1677, 1685, 1688, 1695, 1703, 1707, 1713, 1733, 1749, 1758, 1762, 1774, 1782, 1791, and 1975; or
[6494] (iv)
[6495] VL1 comprises an amino acid sequence that is at least 65%, at least 70%, at least 75%, at least 80%, at least 85%, at least 90%, at least 95%, at least 99%, or 100% identical to any one of SEQ ID NOs: 1098, 1105, 1112, 1122, 1129, 1136, 1143, 1150, 1157, 1164, 1171, 1176, 1183, 1190, 1196, 1202, 1208, 1214, 1219, 1223, 1230, 1237, 1242, 1249, 1256, 1263, 1268, 1273, 1280, 1287, 1294, 1301, 1308, 1314, 1321, 1328, 1334, 1341, 1347, 1354, 1361, 1368, 1375, 1380, 1384, 1390, 1396, 1403, 1410, 1416, 1423, 1430, 1436, 1443, 1450, 1457, 1463, 1470, 1477, 1483, 1490, 1497, 1503, 1510, 1514, 1521, 1527, 1533, 1540, 1546, 1551, 1558, 1563, 1570, 1576, 1583, 1589, 1596, 1603, 1610, 1617, 1624, 1631, 1638, 1645, 1652, 1659, 1664, 1669, 1674, 1682, 1692, 1700, 1711, 1721, 1724, 1730, 1740, 1746, 1755, 1764, 1766, 1771, 1779, 1784, and 1788;
[6496] VL2 comprises an amino acid sequence that is at least 65%, at least 70%, at least 75%, at least 80%, at least 85%, at least 90%, at least 95%, at least 99%, or 100% identical to any one of SEQ ID NOs: 1098, 1105, 1112, 1122, 1129, 1136, 1143, 1150, 1157, 1164, 1171, 1176, 1183, 1190, 1196, 1202, 1208, 1214, 1219, 1223, 1230, 1237, 1242, 1249, 1256, 1263, 1268, 1273, 1280, 1287, 1294, 1301, 1308, 1314, 1321, 1328, 1334, 1341, 1347, 1354, 1361, 1368, 1375, 1380, 1384, 1390, 1396, 1403, 1410, 1416, 1423, 1430, 1436, 1443, 1450, 1457, 1463, 1470, 1477, 1483, 1490, 1497, 1503, 1510, 1514, 1521, 1527, 1533, 1540, 1546, 1551, 1558, 1563, 1570, 1576, 1583, 1589, 1596, 1603, 1610, 1617, 1624, 1631, 1638, 1645, 1652, 1659, 1664, 1669, 1674, 1682, 1692, 1700, 1711, 1721, 1724, 1730, 1740, 1746, 1755, 1764, 1766, 1771, 1779, 1784, and 1788;
[6497] VL3 comprises an amino acid sequence that is at least 65%, at least 70%, at least 75%, at least 80%, at least 85%, at least 90%, at least 95%, at least 99%, or 100% identical to any one of SEQ ID NOs: 1098, 1105, 1112, 1122, 1129, 1136, 1143, 1150, 1157, 1164, 1171, 1176, 1183, 1190, 1196, 1202, 1208, 1214, 1219, 1223, 1230, 1237, 1242, 1249, 1256, 1263, 1268, 1273, 1280, 1287, 1294, 1301, 1308, 1314, 1321, 1328, 1334, 1341, 1347, 1354, 1361, 1368, 1375, 1380, 1384, 1390, 1396, 1403, 1410, 1416, 1423, 1430, 1436, 1443, 1450, 1457, 1463, 1470, 1477, 1483, 1490, 1497, 1503, 1510, 1514, 1521, 1527, 1533, 1540, 1546, 1551, 1558, 1563, 1570, 1576, 1583, 1589, 1596, 1603, 1610, 1617, 1624, 1631, 1638, 1645, 1652, 1659, 1664, 1669, 1674, 1682, 1692, 1700, 1711, 1721, 1724, 1730, 1740, 1746, 1755, 1764, 1766, 1771, 1779, 1784, and 1788;
[6498] VL4 comprises an amino acid sequence that is at least 65%, at least 70%, at least 75%, at least 80%, at least 85%, at least 90%, at least 95%, at least 99%, or 100% identical to any one of SEQ ID NOs: 1098, 1105, 1112, 1122, 1129, 1136, 1143, 1150, 1157, 1164, 1171, 1176, 1183, 1190, 1196, 1202, 1208, 1214, 1219, 1223, 1230, 1237, 1242, 1249, 1256, 1263, 1268, 1273, 1280, 1287, 1294, 1301, 1308, 1314, 1321, 1328, 1334, 1341, 1347, 1354, 1361, 1368, 1375, 1380, 1384, 1390, 1396, 1403, 1410, 1416, 1423, 1430, 1436, 1443, 1450, 1457, 1463, 1470, 1477, 1483, 1490, 1497, 1503, 1510, 1514, 1521, 1527, 1533, 1540, 1546, 1551, 1558, 1563, 1570, 1576, 1583, 1589, 1596, 1603, 1610, 1617, 1624, 1631, 1638, 1645, 1652, 1659, 1664, 1669, 1674, 1682, 1692, 1700, 1711, 1721, 1724, 1730, 1740, 1746, 1755, 1764, 1766, 1771, 1779, 1784, and 1788;
[6499] VH1 comprises an amino acid sequence that is at least 65%, at least 70%, at least 75%, at least 80%, at least 85%, at least 90%, at least 95%, at least 99%, or 100% identical to any one of SEQ ID NOs: 1102, 1109, 1116, 1119, 1126, 1133, 1140, 1147, 1154, 1161, 1168, 1173, 1180, 1187, 1194, 1198, 1206, 1210, 1218, 1220, 1227, 1234, 1241, 1246, 1253, 1260, 1265, 1270, 1277, 1284, 1291, 1298, 1305, 1312, 1318, 1325, 1332, 1338, 1345, 1351, 1358, 1365, 1372, 1379, 1381, 1388, 1393, 1400, 1407, 1413, 1420, 1427, 1434, 1440, 1447, 1454, 1460, 1467, 1474, 1481, 1487, 1494, 1501, 1507, 1512, 1518, 1525, 1530, 1537, 1543, 1550, 1555, 1561, 1567, 1573, 1580, 1587, 1593, 1600, 1607, 1614, 1621, 1628, 1635, 1642, 1649, 1656, 1662, 1668, 1671, 1678, 1686, 1696, 1704, 1714, 1722, 1726, 1734, 1742, 1750, 1759, 1760, 1765, 1768, 1775, 1783, 1785, and 1792;
[6500] VH2 comprises an amino acid sequence that is at least 65%, at least 70%, at least 75%, at least 80%, at least 85%, at least 90%, at least 95%, at least 99%, or 100% identical to any one of SEQ ID NOs: 1102, 1109, 1116, 1119, 1126, 1133, 1140, 1147, 1154, 1161, 1168, 1173, 1180, 1187, 1194, 1198, 1206, 1210, 1218, 1220, 1227, 1234, 1241, 1246, 1253, 1260, 1265, 1270, 1277, 1284, 1291, 1298, 1305, 1312, 1318, 1325, 1332, 1338, 1345, 1351, 1358, 1365, 1372, 1379, 1381, 1388, 1393, 1400, 1407, 1413, 1420, 1427, 1434, 1440, 1447, 1454, 1460, 1467, 1474, 1481, 1487, 1494, 1501, 1507, 1512, 1518, 1525, 1530, 1537, 1543, 1550, 1555, 1561, 1567, 1573, 1580, 1587, 1593, 1600, 1607, 1614, 1621, 1628, 1635, 1642, 1649, 1656, 1662, 1668, 1671, 1678, 1686, 1696, 1704, 1714, 1722, 1726, 1734, 1742, 1750, 1759, 1760, 1765, 1768, 1775, 1783, 1785, and 1792;
[6501] VH3 comprises an amino acid sequence that is at least 65%, at least 70%, at least 75%, at least 80%, at least 85%, at least 90%, at least 95%, at least 99%, or 100% identical to any one of SEQ ID NOs: 1102, 1109, 1116, 1119, 1126, 1133, 1140, 1147, 1154, 1161, 1168, 1173, 1180, 1187, 1194, 1198, 1206, 1210, 1218, 1220, 1227, 1234, 1241, 1246, 1253, 1260, 1265, 1270, 1277, 1284, 1291, 1298, 1305, 1312, 1318, 1325, 1332, 1338, 1345, 1351, 1358, 1365, 1372, 1379, 1381, 1388, 1393, 1400, 1407, 1413, 1420, 1427, 1434, 1440, 1447, 1454, 1460, 1467, 1474, 1481, 1487, 1494, 1501, 1507, 1512, 1518, 1525, 1530, 1537, 1543, 1550, 1555, 1561, 1567, 1573, 1580, 1587, 1593, 1600, 1607, 1614, 1621, 1628, 1635, 1642, 1649, 1656, 1662, 1668, 1671, 1678, 1686, 1696, 1704, 1714, 1722, 1726, 1734, 1742, 1750, 1759, 1760, 1765, 1768, 1775, 1783, 1785, and 1792; and/or
[6502] VH4 comprises an amino acid sequence that is at least 65%, at least 70%, at least 75%, at least 80%, at least 85%, at least 90%, at least 95%, at least 99%, or 100% identical to any one of SEQ ID NOs: 1102, 1109, 1116, 1119, 1126, 1133, 1140, 1147, 1154, 1161, 1168, 1173, 1180, 1187, 1194, 1198, 1206, 1210, 1218, 1220, 1227, 1234, 1241, 1246, 1253, 1260, 1265, 1270, 1277, 1284, 1291, 1298, 1305, 1312, 1318, 1325, 1332, 1338, 1345, 1351, 1358, 1365, 1372, 1379, 1381, 1388, 1393, 1400, 1407, 1413, 1420, 1427, 1434, 1440, 1447, 1454, 1460, 1467, 1474, 1481, 1487, 1494, 1501, 1507, 1512, 1518, 1525, 1530, 1537, 1543, 1550, 1555, 1561, 1567, 1573, 1580, 1587, 1593, 1600, 1607, 1614, 1621, 1628, 1635, 1642, 1649, 1656, 1662, 1668, 1671, 1678, 1686, 1696, 1704, 1714, 1722, 1726, 1734, 1742, 1750, 1759, 1760, 1765, 1768, 1775, 1783, 1785, and 1792; or
[6503] (b)
[6504] (i)
[6505] VL1 comprises a light chain complementarity determining region 1 (LCDR1), LCDR2, and/or LCDR3 of an antibody selected from the group consisting of libivirumab, rmab, rivabazumab pegol, setoxaximab, suvizumab, suvratoxumab, sevirumab, pritoxaximab, porgaviximab, REGN-EB3, obiltoxaximab, gedivumab, foravirumab, larcaviximab, motavizumab, palivizumab, rafivirumab, regavirumab, tuvirumab, cosfroviximab, felvizumab, atidortoxumab, edobacomab, nebacumab, pateclizumab, raxibacumab, urtoxazumab, tosatoxumab, berlimatoxumab, CR6261, diridavumab, firivumab, lesofavumab, navivumab, exbivirumab, lenvervimab, bavituximab, bezlotoxumab, efungumab, leronlimab, nirsevimab, pagibaximab, panobacumab, tefibazumab, ansuvimab, atoltivimab, maftivimab, and odesivimab;
[6506] VL2 comprises a light chain complementarity determining region 1 (LCDR1), LCDR2, and/or LCDR3 of an antibody selected from the group consisting of libivirumab, rmab, rivabazumab pegol, setoxaximab, suvizumab, suvratoxumab, sevirumab, pritoxaximab, porgaviximab, REGN-EB3, obiltoxaximab, gedivumab, foravirumab, larcaviximab, motavizumab, palivizumab, rafivirumab, regavirumab, tuvirumab, cosfroviximab, felvizumab, atidortoxumab, edobacomab, nebacumab, pateclizumab, raxibacumab, urtoxazumab, tosatoxumab, berlimatoxumab, CR6261, diridavumab, firivumab, lesofavumab, navivumab, exbivirumab, lenvervimab, bavituximab, bezlotoxumab, efungumab, leronlimab, nirsevimab, pagibaximab, panobacumab, tefibazumab, ansuvimab, atoltivimab, maftivimab, and odesivimab;
[6507] VL3 comprises a light chain complementarity determining region 1 (LCDR1), LCDR2, and/or LCDR3 of an antibody selected from the group consisting of libivirumab, rmab, rivabazumab pegol, setoxaximab, suvizumab, suvratoxumab, sevirumab, pritoxaximab, porgaviximab, REGN-EB3, obiltoxaximab, gedivumab, foravirumab, larcaviximab, motavizumab, palivizumab, rafivirumab, regavirumab, tuvirumab, cosfroviximab, felvizumab, atidortoxumab, edobacomab, nebacumab, pateclizumab, raxibacumab, urtoxazumab, tosatoxumab, berlimatoxumab, CR6261, diridavumab, firivumab, lesofavumab, navivumab, exbivirumab, lenvervimab, bavituximab, bezlotoxumab, efungumab, leronlimab, nirsevimab, pagibaximab, panobacumab, tefibazumab, ansuvimab, atoltivimab, maftivimab, and odesivimab;
[6508] VL4 comprises a light chain complementarity determining region 1 (LCDR1), LCDR2, and/or LCDR3 of an antibody selected from the group consisting of libivirumab, rmab, rivabazumab pegol, setoxaximab, suvizumab, suvratoxumab, sevirumab, pritoxaximab, porgaviximab, REGN-EB3, obiltoxaximab, gedivumab, foravirumab, larcaviximab, motavizumab, palivizumab, rafivirumab, regavirumab, tuvirumab, cosfroviximab, felvizumab, atidortoxumab, edobacomab, nebacumab, pateclizumab, raxibacumab, urtoxazumab, tosatoxumab, berlimatoxumab, CR6261, diridavumab, firivumab, lesofavumab, navivumab, exbivirumab, lenvervimab, bavituximab, bezlotoxumab, efungumab, leronlimab, nirsevimab, pagibaximab, panobacumab, tefibazumab, ansuvimab, atoltivimab, maftivimab, and odesivimab;
[6509] VH1 comprises a heavy chain complementarity determining region 1 (HCDR1), HCDR2, and/or HCDR3 of an antibody selected from the group consisting of libivirumab, rmab, rivabazumab pegol, setoxaximab, suvizumab, suvratoxumab, sevirumab, pritoxaximab, porgaviximab, REGN-EB3, obiltoxaximab, gedivumab, foravirumab, larcaviximab, motavizumab, palivizumab, rafivirumab, regavirumab, tuvirumab, cosfroviximab, felvizumab, atidortoxumab, edobacomab, nebacumab, pateclizumab, raxibacumab, urtoxazumab, tosatoxumab, berlimatoxumab, CR6261, diridavumab, firivumab, lesofavumab, navivumab, exbivirumab, lenvervimab, bavituximab, bezlotoxumab, efungumab, leronlimab, nirsevimab, pagibaximab, panobacumab, tefibazumab, ansuvimab, atoltivimab, maftivimab, and odesivimab;
[6510] VH2 comprises a heavy chain complementarity determining region 1 (HCDR1), HCDR2, and/or HCDR3 of an antibody selected from the group consisting of libivirumab, rmab, rivabazumab pegol, setoxaximab, suvizumab, suvratoxumab, sevirumab, pritoxaximab, porgaviximab, REGN-EB3, obiltoxaximab, gedivumab, foravirumab, larcaviximab, motavizumab, palivizumab, rafivirumab, regavirumab, tuvirumab, cosfroviximab, felvizumab, atidortoxumab, edobacomab, nebacumab, pateclizumab, raxibacumab, urtoxazumab, tosatoxumab, berlimatoxumab, CR6261, diridavumab, firivumab, lesofavumab, navivumab, exbivirumab, lenvervimab, bavituximab, bezlotoxumab, efungumab, leronlimab, nirsevimab, pagibaximab, panobacumab, tefibazumab, ansuvimab, atoltivimab, maftivimab, and odesivimab;
[6511] VH3 comprises a heavy chain complementarity determining region 1 (HCDR1), HCDR2, and/or HCDR3 of an antibody selected from the group consisting of libivirumab, rmab, rivabazumab pegol, setoxaximab, suvizumab, suvratoxumab, sevirumab, pritoxaximab, porgaviximab, REGN-EB3, obiltoxaximab, gedivumab, foravirumab, larcaviximab, motavizumab, palivizumab, rafivirumab, regavirumab, tuvirumab, cosfroviximab, felvizumab, atidortoxumab, edobacomab, nebacumab, pateclizumab, raxibacumab, urtoxazumab, tosatoxumab, berlimatoxumab, CR6261, diridavumab, firivumab, lesofavumab, navivumab, exbivirumab, lenvervimab, bavituximab, bezlotoxumab, efungumab, leronlimab, nirsevimab, pagibaximab, panobacumab, tefibazumab, ansuvimab, atoltivimab, maftivimab, and odesivimab; and/or
[6512] VH4 comprises a heavy chain complementarity determining region 1 (HCDR1), HCDR2, and/or HCDR3 of an antibody selected from the group consisting of libivirumab, rmab, rivabazumab pegol, setoxaximab, suvizumab, suvratoxumab, sevirumab, pritoxaximab, porgaviximab, REGN-EB3, obiltoxaximab, gedivumab, foravirumab, larcaviximab, motavizumab, palivizumab, rafivirumab, regavirumab, tuvirumab, cosfroviximab, felvizumab, atidortoxumab, edobacomab, nebacumab, pateclizumab, raxibacumab, urtoxazumab, tosatoxumab, berlimatoxumab, CR6261, diridavumab, firivumab, lesofavumab, navivumab, exbivirumab, lenvervimab, bavituximab, bezlotoxumab, efungumab, leronlimab, nirsevimab, pagibaximab, panobacumab, tefibazumab, ansuvimab, atoltivimab, maftivimab, and odesivimab; or
[6513] (ii)
[6514] VL1 comprises a VL of an antibody selected from the group consisting of libivirumab, rmab, rivabazumab pegol, setoxaximab, suvizumab, suvratoxumab, sevirumab, pritoxaximab, porgaviximab, REGN-EB3, obiltoxaximab, gedivumab, foravirumab, larcaviximab, motavizumab, palivizumab, rafivirumab, regavirumab, tuvirumab, cosfroviximab, felvizumab, atidortoxumab, edobacomab, nebacumab, pateclizumab, raxibacumab, urtoxazumab, tosatoxumab, berlimatoxumab, CR6261, diridavumab, firivumab, lesofavumab, navivumab, exbivirumab, lenvervimab, bavituximab, bezlotoxumab, efungumab, leronlimab, nirsevimab, pagibaximab, panobacumab, tefibazumab, ansuvimab, atoltivimab, maftivimab, and odesivimab;
[6515] VL2 comprises a VL of an antibody selected from the group consisting of libivirumab, rmab, rivabazumab pegol, setoxaximab, suvizumab, suvratoxumab, sevirumab, pritoxaximab, porgaviximab, REGN-EB3, obiltoxaximab, gedivumab, foravirumab, larcaviximab, motavizumab, palivizumab, rafivirumab, regavirumab, tuvirumab, cosfroviximab, felvizumab, atidortoxumab, edobacomab, nebacumab, pateclizumab, raxibacumab, urtoxazumab, tosatoxumab, berlimatoxumab, CR6261, diridavumab, firivumab, lesofavumab, navivumab, exbivirumab, lenvervimab, bavituximab, bezlotoxumab, efungumab, leronlimab, nirsevimab, pagibaximab, panobacumab, tefibazumab, ansuvimab, atoltivimab, maftivimab, and odesivimab;
[6516] VL3 comprises a VL of an antibody selected from the group consisting of libivirumab, rmab, rivabazumab pegol, setoxaximab, suvizumab, suvratoxumab, sevirumab, pritoxaximab, porgaviximab, REGN-EB3, obiltoxaximab, gedivumab, foravirumab, larcaviximab, motavizumab, palivizumab, rafivirumab, regavirumab, tuvirumab, cosfroviximab, felvizumab, atidortoxumab, edobacomab, nebacumab, pateclizumab, raxibacumab, urtoxazumab, tosatoxumab, berlimatoxumab, CR6261, diridavumab, firivumab, lesofavumab, navivumab, exbivirumab, lenvervimab, bavituximab, bezlotoxumab, efungumab, leronlimab, nirsevimab, pagibaximab, panobacumab, tefibazumab, ansuvimab, atoltivimab, maftivimab, and odesivimab;
[6517] VL4 comprises a VL of an antibody selected from the group consisting of libivirumab, rmab, rivabazumab pegol, setoxaximab, suvizumab, suvratoxumab, sevirumab, pritoxaximab, porgaviximab, REGN-EB3, obiltoxaximab, gedivumab, foravirumab, larcaviximab, motavizumab, palivizumab, rafivirumab, regavirumab, tuvirumab, cosfroviximab, felvizumab, atidortoxumab, edobacomab, nebacumab, pateclizumab, raxibacumab, urtoxazumab, tosatoxumab, berlimatoxumab, CR6261, diridavumab, firivumab, lesofavumab, navivumab, exbivirumab, lenvervimab, bavituximab, bezlotoxumab, efungumab, leronlimab, nirsevimab, pagibaximab, panobacumab, tefibazumab, ansuvimab, atoltivimab, maftivimab, and odesivimab;
[6518] VH1 comprises a VH of an antibody selected from the group consisting of libivirumab, rmab, rivabazumab pegol, setoxaximab, suvizumab, suvratoxumab, sevirumab, pritoxaximab, porgaviximab, REGN-EB3, obiltoxaximab, gedivumab, foravirumab, larcaviximab, motavizumab, palivizumab, rafivirumab, regavirumab, tuvirumab, cosfroviximab, felvizumab, atidortoxumab, edobacomab, nebacumab, pateclizumab, raxibacumab, urtoxazumab, tosatoxumab, berlimatoxumab, CR6261, diridavumab, firivumab, lesofavumab, navivumab, exbivirumab, lenvervimab, bavituximab, bezlotoxumab, efungumab, leronlimab, nirsevimab, pagibaximab, panobacumab, tefibazumab, ansuvimab, atoltivimab, maftivimab, and odesivimab;
[6519] VH2 comprises a VH of an antibody selected from the group consisting of libivirumab, rmab, rivabazumab pegol, setoxaximab, suvizumab, suvratoxumab, sevirumab, pritoxaximab, porgaviximab, REGN-EB3, obiltoxaximab, gedivumab, foravirumab, larcaviximab, motavizumab, palivizumab, rafivirumab, regavirumab, tuvirumab, cosfroviximab, felvizumab, atidortoxumab, edobacomab, nebacumab, pateclizumab, raxibacumab, urtoxazumab, tosatoxumab, berlimatoxumab, CR6261, diridavumab, firivumab, lesofavumab, navivumab, exbivirumab, lenvervimab, bavituximab, bezlotoxumab, efungumab, leronlimab, nirsevimab, pagibaximab, panobacumab, tefibazumab, ansuvimab, atoltivimab, maftivimab, and odesivimab;
[6520] VH3 comprises a VH of an antibody selected from the group consisting of libivirumab, rmab, rivabazumab pegol, setoxaximab, suvizumab, suvratoxumab, sevirumab, pritoxaximab, porgaviximab, REGN-EB3, obiltoxaximab, gedivumab, foravirumab, larcaviximab, motavizumab, palivizumab, rafivirumab, regavirumab, tuvirumab, cosfroviximab, felvizumab, atidortoxumab, edobacomab, nebacumab, pateclizumab, raxibacumab, urtoxazumab, tosatoxumab, berlimatoxumab, CR6261, diridavumab, firivumab, lesofavumab, navivumab, exbivirumab, lenvervimab, bavituximab, bezlotoxumab, efungumab, leronlimab, nirsevimab, pagibaximab, panobacumab, tefibazumab, ansuvimab, atoltivimab, maftivimab, and odesivimab; and/or
[6521] VH4 comprises a VH of an antibody selected from the group consisting of libivirumab, rmab, rivabazumab pegol, setoxaximab, suvizumab, suvratoxumab, sevirumab, pritoxaximab, porgaviximab, REGN-EB3, obiltoxaximab, gedivumab, foravirumab, larcaviximab, motavizumab, palivizumab, rafivirumab, regavirumab, tuvirumab, cosfroviximab, felvizumab, atidortoxumab, edobacomab, nebacumab, pateclizumab, raxibacumab, urtoxazumab, tosatoxumab, berlimatoxumab, CR6261, diridavumab, firivumab, lesofavumab, navivumab, exbivirumab, lenvervimab, bavituximab, bezlotoxumab, efungumab, leronlimab, nirsevimab, pagibaximab, panobacumab, tefibazumab, ansuvimab, atoltivimab, maftivimab, and odesivimab; or
[6522] (iii)
[6523] VL1 comprises (i) a complementarity determining region (CDR) 1 having an amino acid sequence that is at least 65%, at least 70%, at least 75%, at least 80%, at least 85%, at least 90%, at least 95%, at least 99%, or 100% identical to any one of SEQ ID NOs: 1428, 1793, 1798, 1810, 1817, 1824, 1977, 1985, 1993 and 2001; (ii) a CDR2 having an amino acid sequence that is at least 65%, at least 70%, at least 75%, at least 80%, at least 85%, at least 90%, at least 95%, at least 99%, or 100% identical to any one of SEQ ID NOs: 1978, 1986, 1994, and 2002; or at least 65%, at least 70%, at least 75%, at least 80%, at least 85%, at least 90%, at least 95%, at least 99%, or 100% identical to any one of amino acid sequences YTS, DTS, GAS, and AAS; and (iii) a CDR3 having an amino acid sequence that is at least 65%, at least 70%, at least 75%, at least 80%, at least 85%, at least 90%, at least 95%, at least 99%, or 100% identical to any one of SEQ ID NOs: 1229, 1799, 1805, 1811, 1818, 1825, 1979, 1987, 1995, and 2003;
[6524] VL2 comprises (i) a complementarity determining region (CDR) 1 having an amino acid sequence that is at least 65%, at least 70%, at least 75%, at least 80%, at least 85%, at least 90%, at least 95%, at least 99%, or 100% identical to any one of SEQ ID NOs: 1428, 1793, 1798, 1810, 1817, 1824, 1977, 1985, 1993 and 2001; (ii) a CDR2 having an amino acid sequence that is at least 65%, at least 70%, at least 75%, at least 80%, at least 85%, at least 90%, at least 95%, at least 99%, or 100% identical to any one of SEQ ID NOs: 1978, 1986, 1994, and 2002; or at least 65%, at least 70%, at least 75%, at least 80%, at least 85%, at least 90%, at least 95%, at least 99%, or 100% identical to any one of amino acid sequences YTS, DTS, GAS, and AAS; and (iii) a CDR3 having an amino acid sequence that is at least 65%, at least 70%, at least 75%, at least 80%, at least 85%, at least 90%, at least 95%, at least 99%, or 100% identical to any one of SEQ ID NOs: 1229, 1799, 1805, 1811, 1818, 1825, 1979, 1987, 1995, and 2003;
[6525] VL3 comprises (i) a complementarity determining region (CDR) 1 having an amino acid sequence that is at least 65%, at least 70%, at least 75%, at least 80%, at least 85%, at least 90%, at least 95%, at least 99%, or 100% identical to any one of SEQ ID NOs: 1428, 1793, 1798, 1810, 1817, 1824, 1977, 1985, 1993 and 2001; (ii) a CDR2 having an amino acid sequence that is at least 65%, at least 70%, at least 75%, at least 80%, at least 85%, at least 90%, at least 95%, at least 99%, or 100% identical to any one of SEQ ID NOs: 1978, 1986, 1994, and 2002; or at least 65%, at least 70%, at least 75%, at least 80%, at least 85%, at least 90%, at least 95%, at least 99%, or 100% identical to any one of amino acid sequences YTS, DTS, GAS, and AAS; and (iii) a CDR3 having an amino acid sequence that is at least 65%, at least 70%, at least 75%, at least 80%, at least 85%, at least 90%, at least 95%, at least 99%, or 100% identical to any one of SEQ ID NOs: 1229, 1799, 1805, 1811, 1818, 1825, 1979, 1987, 1995, and 2003;
[6526] VL4 comprises (i) a complementarity determining region (CDR) 1 having an amino acid sequence that is at least 65%, at least 70%, at least 75%, at least 80%, at least 85%, at least 90%, at least 95%, at least 99%, or 100% identical to any one of SEQ ID NOs: 1428, 1793, 1798, 1810, 1817, 1824, 1977, 1985, 1993 and 2001; (ii) a CDR2 having an amino acid sequence that is at least 65%, at least 70%, at least 75%, at least 80%, at least 85%, at least 90%, at least 95%, at least 99%, or 100% identical to any one of SEQ ID NOs: 1978, 1986, 1994, and 2002; or at least 65%, at least 70%, at least 75%, at least 80%, at least 85%, at least 90%, at least 95%, at least 99%, or 100% identical to any one of amino acid sequences YTS, DTS, GAS, and AAS; and (iii) a CDR3 having an amino acid sequence that is at least 65%, at least 70%, at least 75%, at least 80%, at least 85%, at least 90%, at least 95%, at least 99%, or 100% identical to any one of SEQ ID NOs: 1229, 1799, 1805, 1811, 1818, 1825, 1979, 1987, 1995, and 2003;
[6527] VH1 comprises (i) a complementarity determining region (CDR) 1 having an amino acid sequence that is at least 65%, at least 70%, at least 75%, at least 80%, at least 85%, at least 90%, at least 95%, at least 99%, or 100% identical to any one of SEQ ID NOs: 1577, 1795, 1801, 1813, 1820, 1827, 1981, 1989, 1997, and 2005; (ii) a CDR2 having an amino acid sequence that is at least 65%, at least 70%, at least 75%, at least 80%, at least 85%, at least 90%, at least 95%, at least 99%, or 100% identical to any one of SEQ ID NOs: 1159, 1802, 1807, 1814, 1821, 1828, 1982, 1990, 1998, and 2006; and (iii) a CDR3 having an amino acid sequence that is at least 65%, at least 70%, at least 75%, at least 80%, at least 85%, at least 90%, at least 95%, at least 99%, or 100% identical to any one of SEQ ID NOs: 1796, 1803, 1808, 1815, 1822, 1829, 1983, 1991, 1999, and 2007;
[6528] VH2 comprises (i) a complementarity determining region (CDR) 1 having an amino acid sequence that is at least 65%, at least 70%, at least 75%, at least 80%, at least 85%, at least 90%, at least 95%, at least 99%, or 100% identical to any one of SEQ ID NOs: 1577, 1795, 1801, 1813, 1820, 1827, 1981, 1989, 1997, and 2005; (ii) a CDR2 having an amino acid sequence that is at least 65%, at least 70%, at least 75%, at least 80%, at least 85%, at least 90%, at least 95%, at least 99%, or 100% identical to any one of SEQ ID NOs: 1159, 1802, 1807, 1814, 1821, 1828, 1982, 1990, 1998, and 2006; and (iii) a CDR3 having an amino acid sequence that is at least 65%, at least 70%, at least 75%, at least 80%, at least 85%, at least 90%, at least 95%, at least 99%, or 100% identical to any one of SEQ ID NOs: 1796, 1803, 1808, 1815, 1822, 1829, 1983, 1991, 1999, and 2007;
[6529] VH3 comprises (i) a complementarity determining region (CDR) 1 having an amino acid sequence that is at least 65%, at least 70%, at least 75%, at least 80%, at least 85%, at least 90%, at least 95%, at least 99%, or 100% identical to any one of SEQ ID NOs: 1577, 1795, 1801, 1813, 1820, 1827, 1981, 1989, 1997, and 2005; (ii) a CDR2 having an amino acid sequence that is at least 65%, at least 70%, at least 75%, at least 80%, at least 85%, at least 90%, at least 95%, at least 99%, or 100% identical to any one of SEQ ID NOs: 1159, 1802, 1807, 1814, 1821, 1828, 1982, 1990, 1998, and 2006; and (iii) a CDR3 having an amino acid sequence that is at least 65%, at least 70%, at least 75%, at least 80%, at least 85%, at least 90%, at least 95%, at least 99%, or 100% identical to any one of SEQ ID NOs: 1796, 1803, 1808, 1815, 1822, 1829, 1983, 1991, 1999, and 2007; and/or
[6530] VH4 comprises (i) a complementarity determining region (CDR) 1 having an amino acid sequence that is at least 65%, at least 70%, at least 75%, at least 80%, at least 85%, at least 90%, at least 95%, at least 99%, or 100% identical to any one of SEQ ID NOs: 1577, 1795, 1801, 1813, 1820, 1827, 1981, 1989, 1997, and 2005; (ii) a CDR2 having an amino acid sequence that is at least 65%, at least 70%, at least 75%, at least 80%, at least 85%, at least 90%, at least 95%, at least 99%, or 100% identical to any one of SEQ ID NOs: 1159, 1802, 1807, 1814, 1821, 1828, 1982, 1990, 1998, and 2006; and (iii) a CDR3 having an amino acid sequence that is at least 65%, at least 70%, at least 75%, at least 80%, at least 85%, at least 90%, at least 95%, at least 99%, or 100% identical to any one of SEQ ID NOs: 1796, 1803, 1808, 1815, 1822, 1829, 1983, 1991, 1999, and 2007; or
[6531] (iv)
[6532] VL1 comprises an amino acid sequence that is at least 65%, at least 70%, at least 75%, at least 80%, at least 85%, at least 90%, at least 95%, at least 99%, or 100% identical to any one of SEQ ID NOS: 1794, 1800, 1806, 1812, 1819, 1826, 1980, 1988, 1996, and 2004;
[6533] VL2 comprises an amino acid sequence that is at least 65%, at least 70%, at least 75%, at least 80%, at least 85%, at least 90%, at least 95%, at least 99%, or 100% identical to any one of SEQ ID NOs: 1794, 1800, 1806, 1812, 1819, 1826, 1980, 1988, 1996, and 2004;
[6534] VL3 comprises an amino acid sequence that is at least 65%, at least 70%, at least 75%, at least 80%, at least 85%, at least 90%, at least 95%, at least 99%, or 100% identical to any one of SEQ ID NOs: 1794, 1800, 1806, 1812, 1819, 1826, 1980, 1988, 1996, and 2004;
[6535] VL4 comprises an amino acid sequence that is at least 65%, at least 70%, at least 75%, at least 80%, at least 85%, at least 90%, at least 95%, at least 99%, or 100% identical to any one of SEQ ID NOs: 1794, 1800, 1806, 1812, 1819, 1826, 1980, 1988, 1996, and 2004;
[6536] VH1 comprises an amino acid sequence that is at least 65%, at least 70%, at least 75%, at least 80%, at least 85%, at least 90%, at least 95%, at least 99%, or 100% identical to any one of SEQ ID NOs 1797, 1804, 1809, 1816, 1823, 1830, 1984, 1992, 2000, and 2008;
[6537] VH2 comprises an amino acid sequence that is at least 65%, at least 70%, at least 75%, at least 80%, at least 85%, at least 90%, at least 95%, at least 99%, or 100% identical to any one of SEQ ID NOS 1797, 1804, 1809, 1816, 1823, 1830, 1984, 1992, 2000, and 2008;
[6538] VH3 comprises an amino acid sequence that is at least 65%, at least 70%, at least 75%, at least 80%, at least 85%, at least 90%, at least 95%, at least 99%, or 100% identical to any one of SEQ ID NOS 1797, 1804, 1809, 1816, 1823, 1830, 1984, 1992, 2000, and 2008; and/or
[6539] VH4 comprises an amino acid sequence that is at least 65%, at least 70%, at least 75%, at least 80%, at least 85%, at least 90%, at least 95%, at least 99%, or 100% identical to any one of SEQ ID NOS 1797, 1804, 1809, 1816, 1823, 1830, 1984, 1992, 2000, and 2008; or
[6540] (c)
[6541] (i)
[6542] VL1 comprises a light chain complementarity determining region 1 (LCDR1), LCDR2, and/or LCDR3 of an antibody selected from the group consisting of aducanumab, alirocumab, frovocimab, lodelcizumab, bococizumab, evolocumab, ralpancizumab, anifrolumab, atorolimumab, bapineuzumab, bedinvetmab, begelomab, biciromab, bimagrumab, birtamimab, blosozumab, burosumab, caplacizumab, concizumab, crenezumab, crizanlizumab, crotedumab, dezamizumab, domagrozumab, donanemab, eldelumab, elezanumab, emapalumab, emicizumab, eptinezumab, erenumab, evinacumab, faralimomab, fasinumab, fontolizumab, fremanezumab, frunevetmab, fulranumab, galcanezumab, gantenerumab, gosuranemab, idarucizumab, imciromab, inclacumab, lampalizumab, lanadelumab, landogrozumab, lecanemab, ligelizumab, marstacimab, mavrilimumab, morolimumab, NEOD001, omalizumab, oMS721, orticumab, otilimab, ozanezumab, ponezumab, prasinezumab, quilizumab, ranevetmab, refanezumab, roledumab, romosozumab, rozanolixizumab, setrusumab, SHP647, solanezumab, stamulumab, suptavumab, sutimlimab, tanezumab, crovalimab, and lokivetmab;
[6543] VL2 comprises a light chain complementarity determining region 1 (LCDR1), LCDR2, and/or LCDR3 of an antibody selected from the group consisting of aducanumab, alirocumab, frovocimab, lodelcizumab, bococizumab, evolocumab, ralpancizumab, anifrolumab, atorolimumab, bapineuzumab, bedinvetmab, begelomab, biciromab, bimagrumab, birtamimab, blosozumab, burosumab, caplacizumab, concizumab, crenezumab, crizanlizumab, crotedumab, devamizumab, domagrozumab, donanemab, eldelumab, elezanumab, emapalumab, emicizumab, eptinezumab, erenumab, evinacumab, faralimomab, fasinumab, fontolizumab, fremanezumab, frunevetmab, fulranumab, galcanezumab, gantenerumab, gosuranemab, idarucizumab, imciromab, inclacumab, lampalizumab, lanadelumab, landogrozumab, lecanemab, ligelizumab, marstacimab, mavrilimumab, morolimumab, NEOD001, omalizumab, oMS721, orticumab, otilimab, ozanezumab, ponezumab, prasinezumab, quilizumab, ranevetmab, refanezumab, roledumab, romosozumab, rozanolixizumab, setrusumab, SHP647, solanezumab, stamulumab, suptavumab, sutimlimab, tanezumab, crovalimab, and lokivetmab;
[6544] VL3 comprises a light chain complementarity determining region 1 (LCDR1), LCDR2, and/or LCDR3 of an antibody selected from the group consisting of aducanumab, alirocumab, frovocimab, lodelcizumab, bococizumab, evolocumab, ralpancizumab, anifrolumab, atorolimumab, bapineuzumab, bedinvetmab, begelomab, biciromab, bimagrumab, birtamimab, blosozumab, burosumab, caplacizumab, concizumab, crenezumab, crizanlizumab, crotedumab, dezamizumab, domagrozumab, donanemab, eldelumab, elezanumab, emapalumab, emicizumab, eptinezumab, erenumab, evinacumab, faralimomab, fasinumab, fontolizumab, fremanezumab, frunevetmab, fulranumab, galcanezumab, gantenerumab, gosuranemab, idarucizumab, imciromab, inclacumab, lampalizumab, lanadelumab, landogrozumab, lecanemab, ligelizumab, marstacimab, mavrilimumab, morolimumab, NEOD001, omalizumab, oMS721, orticumab, otilimab, ozanezumab, ponezumab, prasinezumab, quilizumab, ranevetmab, refanezumab, roledumab, romosozumab, rozanolixizumab, setrusumab, SHP647, solanezumab, stamulumab, suptavumab, sutimlimab, tanezumab, crovalimab, and lokivetmab;
[6545] VL4 comprises a light chain complementarity determining region 1 (LCDR1), LCDR2, and/or LCDR3 of an antibody selected from the group consisting of aducanumab, alirocumab, frovocimab, lodelcizumab, bococizumab, evolocumab, ralpancizumab, anifrolumab, atorolimumab, bapincuzumab, bedinvetmab, begelomab, biciromab, bimagrumab, birtamimab, blosozumab, burosumab, caplacizumab, concizumab, crenezumab, crizanlizumab, crotedumab, dezamizumab, domagrozumab, donanemab, eldelumab, elezanumab, emapalumab, emicizumab, eptinezumab, erenumab, evinacumab, faralimomab, fasinumab, fontolizumab, fremanezumab, frunevetmab, fulranumab, galcanezumab, gantenerumab, gosuranemab, idarucizumab, imciromab, inclacumab, lampalizumab, lanadelumab, landogrozumab, lecanemab, ligelizumab, marstacimab, mavrilimumab, morolimumab, NEOD001, omalizumab, oMS721, orticumab, otilimab, ozanezumab, ponezumab, prasinezumab, quilizumab, ranevetmab, refanezumab, roledumab, romosozumab, rozanolixizumab, setrusumab, SHP647, solanezumab, stamulumab, suptavumab, sutimlimab, tanezumab, crovalimab, and lokivetmab;
[6546] VH1 comprises a heavy chain complementarity determining region 1 (HCDR1), HCDR2, and/or HCDR3 of an antibody selected from the group consisting of aducanumab, alirocumab, frovocimab, lodelcizumab, bococizumab, evolocumab, ralpancizumab, anifrolumab, atorolimumab, bapineuzumab, bedinvetmab, begelomab, biciromab, bimagrumab, birtamimab, blosozumab, burosumab, caplacizumab, concizumab, crenezumab, crizanlizumab, crotedumab, dezamizumab, domagrozumab, donanemab, eldelumab, elezanumab, emapalumab, emicizumab, eptinezumab, erenumab, evinacumab, faralimomab, fasinumab, fontolizumab, fremanezumab, frunevetmab, fulranumab, galcanezumab, gantenerumab, gosuranemab, idarucizumab, imciromab, inclacumab, lampalizumab, lanadelumab, landogrozumab, lecanemab, ligelizumab, marstacimab, mavrilimumab, morolimumab, NEOD001, omalizumab, oMS721, orticumab, otilimab, ozanezumab, ponezumab, prasinezumab, quilizumab, ranevetmab, refanezumab, roledumab, romosozumab, rozanolixizumab, setrusumab, SHP647, solanezumab, stamulumab, suptavumab, sutimlimab, tanezumab, crovalimab, and lokivetmab;
[6547] VH2 comprises a heavy chain complementarity determining region 1 (HCDR1), HCDR2, and/or HCDR3 of an antibody selected from the group consisting of aducanumab, alirocumab, frovocimab, lodelcizumab, bococizumab, evolocumab, ralpancizumab, anifrolumab, atorolimumab, bapincuzumab, bedinvetmab, begelomab, biciromab, bimagrumab, birtamimab, blosozumab, burosumab, caplacizumab, concizumab, crenezumab, crizanlizumab, crotedumab, devamizumab, domagrozumab, donanemab, eldelumab, elezanumab, emapalumab, emicizumab, eptinezumab, erenumab, evinacumab, faralimomab, fasinumab, fontolizumab, fremanezumab, frunevetmab, fulranumab, galcanezumab, gantenerumab, gosuranemab, idarucizumab, imciromab, inclacumab, lampalizumab, lanadelumab, landogrozumab, lecanemab, ligelizumab, marstacimab, mavrilimumab, morolimumab, NEOD001, omalizumab, oMS721, orticumab, otilimab, ozanezumab, ponezumab, prasinezumab, quilizumab, ranevetmab, refanezumab, roledumab, romosozumab, rozanolixizumab, setrusumab, SHP647, solanezumab, stamulumab, suptavumab, sutimlimab, tanezumab, crovalimab, and lokivetmab;
[6548] VH3 comprises a heavy chain complementarity determining region 1 (HCDR1), HCDR2, and/or HCDR3 of an antibody selected from the group consisting of aducanumab, alirocumab, frovocimab, lodelcizumab, bococizumab, evolocumab, ralpancizumab, anifrolumab, atorolimumab, bapineuzumab, bedinvetmab, begelomab, biciromab, bimagrumab, birtamimab, blosozumab, burosumab, caplacizumab, concizumab, crenezumab, crizanlizumab, crotedumab, dezamizumab, domagrozumab, donanemab, eldelumab, elezanumab, emapalumab, emicizumab, eptinezumab, erenumab, evinacumab, faralimomab, fasinumab, fontolizumab, fremanezumab, frunevetmab, fulranumab, galcanezumab, gantenerumab, gosuranemab, idarucizumab, imciromab, inclacumab, lampalizumab, lanadelumab, landogrozumab, lecanemab, ligelizumab, marstacimab, mavrilimumab, morolimumab, NEOD001, omalizumab, oMS721, orticumab, otilimab, ozanezumab, ponezumab, prasinezumab, quilizumab, ranevetmab, refanezumab, roledumab, romosozumab, rozanolixizumab, setrusumab, SHP647, solanezumab, stamulumab, suptavumab, sutimlimab, tanezumab, crovalimab, and lokivetmab; and/or
[6549] VH4 comprises a heavy chain complementarity determining region 1 (HCDR1), HCDR2, and/or HCDR3 of an antibody selected from the group consisting of aducanumab, alirocumab, frovocimab, lodelcizumab, bococizumab, evolocumab, ralpancizumab, anifrolumab, atorolimumab, bapineuzumab, bedinvetmab, begelomab, biciromab, bimagrumab, birtamimab, blosozumab, burosumab, caplacizumab, concizumab, crenezumab, crizanlizumab, crotedumab, dezamizumab, domagrozumab, donanemab, eldelumab, clezanumab, emapalumab, emicizumab, eptinezumab, erenumab, evinacumab, faralimomab, fasinumab, fontolizumab, fremanezumab, frunevetmab, fulranumab, galcanezumab, gantenerumab, gosuranemab, idarucizumab, imciromab, inclacumab, lampalizumab, lanadelumab, landogrozumab, lecanemab, ligelizumab, marstacimab, mavrilimumab, morolimumab, NEOD001, omalizumab, oMS721, orticumab, otilimab, ozanezumab, ponezumab, prasinezumab, quilizumab, ranevetmab, refanezumab, roledumab, romosozumab, rozanolixizumab, setrusumab, SHP647, solanezumab, stamulumab, suptavumab, sutimlimab, tanezumab, crovalimab, and lokivetmab; or
[6550] (ii)
[6551] VL1 comprises a VL of an antibody selected from the group consisting of aducanumab, alirocumab, frovocimab, lodelcizumab, bococizumab, evolocumab, ralpancizumab, anifrolumab, atorolimumab, bapineuzumab, bedinvetmab, begelomab, biciromab, bimagrumab, birtamimab, blosozumab, burosumab, caplacizumab, concizumab, crenezumab, crizanlizumab, crotedumab, dezamizumab, domagrozumab, donanemab, eldelumab, elezanumab, emapalumab, emicizumab, eptinezumab, erenumab, evinacumab, faralimomab, fasinumab, fontolizumab, fremanezumab, frunevetmab, fulranumab, galcanezumab, gantenerumab, gosuranemab, idarucizumab, imciromab, inclacumab, lampalizumab, lanadelumab, landogrozumab, lecanemab, ligelizumab, marstacimab, mavrilimumab, morolimumab, NEOD001, omalizumab, oMS721, orticumab, otilimab, ozanezumab, ponezumab, prasinezumab, quilizumab, ranevetmab, refanezumab, roledumab, romosozumab, rozanolixizumab, setrusumab, SHP647, solanezumab, stamulumab, suptavumab, sutimlimab, tanezumab, crovalimab, and lokivetmab;
[6552] VL2 comprises a VL of an antibody selected from the group consisting of aducanumab, alirocumab, frovocimab, lodelcizumab, bococizumab, evolocumab, ralpancizumab, anifrolumab, atorolimumab, bapineuzumab, bedinvetmab, begelomab, biciromab, bimagrumab, birtamimab, blosozumab, burosumab, caplacizumab, concizumab, crenezumab, crizanlizumab, crotedumab, dezamizumab, domagrozumab, donanemab, eldelumab, elezanumab, emapalumab, emicizumab, eptinezumab, erenumab, evinacumab, faralimomab, fasinumab, fontolizumab, fremanezumab, frunevetmab, fulranumab, galcanezumab, gantenerumab, gosuranemab, idarucizumab, imciromab, inclacumab, lampalizumab, lanadelumab, landogrozumab, lecanemab, ligelizumab, marstacimab, mavrilimumab, morolimumab, NEOD001, omalizumab, oMS721, orticumab, otilimab, ozanezumab, ponezumab, prasinezumab, quilizumab, ranevetmab, refanezumab, roledumab, romosozumab, rozanolixizumab, setrusumab, SHP647, solanezumab, stamulumab, suptavumab, sutimlimab, tanezumab, crovalimab, and lokivetmab;
[6553] VL3 comprises a VL of an antibody selected from the group consisting of aducanumab, alirocumab, frovocimab, lodelcizumab, bococizumab, evolocumab, ralpancizumab, anifrolumab, atorolimumab, bapineuzumab, bedinvetmab, begelomab, biciromab, bimagrumab, birtamimab, blosozumab, burosumab, caplacizumab, concizumab, crenezumab, crizanlizumab, crotedumab, dezamizumab, domagrozumab, donanemab, eldelumab, elezanumab, emapalumab, emicizumab, eptinezumab, erenumab, evinacumab, faralimomab, fasinumab, fontolizumab, fremanezumab, frunevetmab, fulranumab, galcanezumab, gantenerumab, gosuranemab, idarucizumab, imciromab, inclacumab, lampalizumab, lanadelumab, landogrozumab, lecanemab, ligelizumab, marstacimab, mavrilimumab, morolimumab, NEOD001, omalizumab, oMS721, orticumab, otilimab, ozanezumab, ponezumab, prasinezumab, quilizumab, ranevetmab, refanezumab, roledumab, romosozumab, rozanolixizumab, setrusumab, SHP647, solanezumab, stamulumab, suptavumab, sutimlimab, tanezumab, crovalimab, and lokivetmab;
[6554] VL4 comprises a VL of an antibody selected from the group consisting of aducanumab, alirocumab, frovocimab, lodelcizumab, bococizumab, evolocumab, ralpancizumab, anifrolumab, atorolimumab, bapineuzumab, bedinvetmab, begelomab, biciromab, bimagrumab, birtamimab, blosozumab, burosumab, caplacizumab, concizumab, crenezumab, crizanlizumab, crotedumab, dezamizumab, domagrozumab, donanemab, eldelumab, elezanumab, emapalumab, emicizumab, eptinezumab, erenumab, evinacumab, faralimomab, fasinumab, fontolizumab, fremanezumab, frunevetmab, fulranumab, galcanezumab, gantenerumab, gosuranemab, idarucizumab, imciromab, inclacumab, lampalizumab, lanadelumab, landogrozumab, lecanemab, ligelizumab, marstacimab, mavrilimumab, morolimumab, NEOD001, omalizumab, oMS721, orticumab, otilimab, ozanezumab, ponezumab, prasinezumab, quilizumab, ranevetmab, refanezumab, roledumab, romosozumab, rozanolixizumab, sctrusumab, SHP647, solanezumab, stamulumab, suptavumab, sutimlimab, tanezumab, crovalimab, and lokivetmab;
[6555] VH1 comprises a VH of an antibody selected from the group consisting of aducanumab, alirocumab, frovocimab, lodelcizumab, bococizumab, evolocumab, ralpancizumab, anifrolumab, atorolimumab, bapineuzumab, bedinvetmab, begelomab, biciromab, bimagrumab, birtamimab, blosozumab, burosumab, caplacizumab, concizumab, crenezumab, crizanlizumab, crotedumab, dezamizumab, domagrozumab, donanemab, eldelumab, elezanumab, emapalumab, emicizumab, eptinezumab, erenumab, evinacumab, faralimomab, fasinumab, fontolizumab, fremanezumab, frunevetmab, fulranumab, galcanezumab, gantenerumab, gosuranemab, idarucizumab, imciromab, inclacumab, lampalizumab, lanadelumab, landogrozumab, lecanemab, ligelizumab, marstacimab, mavrilimumab, morolimumab, NEOD001, omalizumab, oMS721, orticumab, otilimab, ozanezumab, ponezumab, prasinezumab, quilizumab, ranevetmab, refanezumab, roledumab, romosozumab, rozanolixizumab, setrusumab, SHP647, solanezumab, stamulumab, suptavumab, sutimlimab, tanezumab, crovalimab, and lokivetmab;
[6556] VH2 comprises a VH of an antibody selected from the group consisting of aducanumab, alirocumab, frovocimab, lodelcizumab, bococizumab, evolocumab, ralpancizumab, anifrolumab, atorolimumab, bapineuzumab, bedinvetmab, begelomab, biciromab, bimagrumab, birtamimab, blosozumab, burosumab, caplacizumab, concizumab, crenezumab, crizanlizumab, crotedumab, dezamizumab, domagrozumab, donanemab, eldelumab, elezanumab, emapalumab, emicizumab, eptinezumab, erenumab, evinacumab, faralimomab, fasinumab, fontolizumab, fremanezumab, frunevetmab, fulranumab, galcanezumab, gantenerumab, gosuranemab, idarucizumab, imciromab, inclacumab, lampalizumab, lanadelumab, landogrozumab, lecanemab, ligelizumab, marstacimab, mavrilimumab, morolimumab, NEOD001, omalizumab, oMS721, orticumab, otilimab, ozanezumab, ponezumab, prasinezumab, quilizumab, ranevetmab, refanezumab, roledumab, romosozumab, rozanolixizumab, setrusumab, SHP647, solanezumab, stamulumab, suptavumab, sutimlimab, tanezumab, crovalimab, and lokivetmab;
[6557] VH3 comprises a VH of an antibody selected from the group consisting of aducanumab, alirocumab, frovocimab, lodelcizumab, bococizumab, evolocumab, ralpancizumab, anifrolumab, atorolimumab, bapineuzumab, bedinvetmab, begelomab, biciromab, bimagrumab, birtamimab, blosozumab, burosumab, caplacizumab, concizumab, crenezumab, crizanlizumab, crotedumab, dezamizumab, domagrozumab, donanemab, eldelumab, elezanumab, emapalumab, emicizumab, eptinezumab, erenumab, evinacumab, faralimomab, fasinumab, fontolizumab, fremanezumab, frunevetmab, fulranumab, galcanezumab, gantenerumab, gosuranemab, idarucizumab, imciromab, inclacumab, lampalizumab, lanadelumab, landogrozumab, lecanemab, ligelizumab, marstacimab, mavrilimumab, morolimumab, NEOD001, omalizumab, oMS721, orticumab, otilimab, ozanezumab, ponezumab, prasinezumab, quilizumab, ranevetmab, refanezumab, roledumab, romosozumab, rozanolixizumab, setrusumab, SHP647, solanezumab, stamulumab, suptavumab, sutimlimab, tanezumab, crovalimab, and lokivetmab; and/or
[6558] VH4 comprises a VH of an antibody selected from the group consisting of aducanumab, alirocumab, frovocimab, lodelcizumab, bococizumab, evolocumab, ralpancizumab, anifrolumab, atorolimumab, bapineuzumab, bedinvetmab, begelomab, biciromab, bimagrumab, birtamimab, blosozumab, burosumab, caplacizumab, concizumab, crenezumab, crizanlizumab, crotedumab, dezamizumab, domagrozumab, donanemab, eldelumab, elezanumab, emapalumab, emicizumab, eptinezumab, erenumab, evinacumab, faralimomab, fasinumab, fontolizumab, fremanezumab, frunevetmab, fulranumab, galcanezumab, gantenerumab, gosuranemab, idarucizumab, imciromab, inclacumab, lampalizumab, lanadelumab, landogrozumab, lecanemab, ligelizumab, marstacimab, mavrilimumab, morolimumab, NEOD001, omalizumab, oMS721, orticumab, otilimab, ozanezumab, ponezumab, prasinezumab, quilizumab, ranevetmab, refanezumab, roledumab, romosozumab, rozanolixizumab, setrusumab, SHP647, solanezumab, stamulumab, suptavumab, sutimlimab, tanezumab, crovalimab, and lokivetmab; or
[6559] (iii)
[6560] VL1 comprises (i) a complementarity determining region (CDR) 1 having an amino acid sequence that is at least 65%, at least 70%, at least 75%, at least 80%, at least 85%, at least 90%, at least 95%, at least 99%, or 100% identical to any one of SEQ ID NOs: 1120, 1228, 1359, 1519, 1831, 1838, 1845, 1852, 1859, 1866, 1872, 1878, 1885, 1891, 1898, 1905, 1911, 1917, 1924, 1931, 1938, 1945, and 1963; (ii) a CDR2 having an amino acid sequence that is at least 65%, at least 70%, at least 75%, at least 80%, at least 85%, at least 90%, at least 95%, at least 99%, or 100% identical to any one of amino acid sequences AAS, AVS, DAS, DNN, EDN, EVS, GAS, GNG, KAS, KVS, LVS, NTD, STS, WAS, and YTS; and (iii) a CDR3 having an amino acid sequence that is at least 65%, at least 70%, at least 75%, at least 80%, at least 85%, at least 90%, at least 95%, at least 99%, or 100% identical to any one of SEQ ID NOs: 1360, 1832, 1839, 1846, 1853, 1860, 1867, 1873, 1879, 1886, 1892, 1899, 1906, 1912, 1918, 1925, 1932, 1939, 1946, 1951, 1957, 1964, and 1970;
[6561] VL2 comprises (i) a complementarity determining region (CDR) 1 having an amino acid sequence that is at least 65%, at least 70%, at least 75%, at least 80%, at least 85%, at least 90%, at least 95%, at least 99%, or 100% identical to any one of SEQ ID NOs: 1120, 1228, 1359, 1519, 1831, 1838, 1845, 1852, 1859, 1866, 1872, 1878, 1885, 1891, 1898, 1905, 1911, 1917, 1924, 1931, 1938, 1945, and 1963; (ii) a CDR2 having an amino acid sequence that is at least 65%, at least 70%, at least 75%, at least 80%, at least 85%, at least 90%, at least 95%, at least 99%, or 100% identical to any one of amino acid sequences AAS, AVS, DAS, DNN, EDN, EVS, GAS, GNG, KAS, KVS, LVS, NTD, STS, WAS, and YTS; and (iii) a CDR3 having an amino acid sequence that is at least 65%, at least 70%, at least 75%, at least 80%, at least 85%, at least 90%, at least 95%, at least 99%, or 100% identical to any one of SEQ ID NOs: 1360, 1832, 1839, 1846, 1853, 1860, 1867, 1873, 1879, 1886, 1892, 1899, 1906, 1912, 1918, 1925, 1932, 1939, 1946, 1951, 1957, 1964, and 1970;
[6562] VL3 comprises (i) a complementarity determining region (CDR) 1 having an amino acid sequence that is at least 65%, at least 70%, at least 75%, at least 80%, at least 85%, at least 90%, at least 95%, at least 99%, or 100% identical to any one of SEQ ID NOs: 1120, 1228, 1359, 1519, 1831, 1838, 1845, 1852, 1859, 1866, 1872, 1878, 1885, 1891, 1898, 1905, 1911, 1917, 1924, 1931, 1938, 1945, and 1963; (ii) a CDR2 having an amino acid sequence that is at least 65%, at least 70%, at least 75%, at least 80%, at least 85%, at least 90%, at least 95%, at least 99%, or 100% identical to any one of amino acid sequences AAS, AVS, DAS, DNN, EDN, EVS, GAS, GNG, KAS, KVS, LVS, NTD, STS, WAS, and YTS; and (iii) a CDR3 having an amino acid sequence that is at least 65%, at least 70%, at least 75%, at least 80%, at least 85%, at least 90%, at least 95%, at least 99%, or 100% identical to any one of SEQ ID NOs: 1360, 1832, 1839, 1846, 1853, 1860, 1867, 1873, 1879, 1886, 1892, 1899, 1906, 1912, 1918, 1925, 1932, 1939, 1946, 1951, 1957, 1964, and 1970;
[6563] VL4 comprises (i) a complementarity determining region (CDR) 1 having an amino acid sequence that is at least 65%, at least 70%, at least 75%, at least 80%, at least 85%, at least 90%, at least 95%, at least 99%, or 100% identical to any one of SEQ ID NOs: 1120, 1228, 1359, 1519, 1831, 1838, 1845, 1852, 1859, 1866, 1872, 1878, 1885, 1891, 1898, 1905, 1911, 1917, 1924, 1931, 1938, 1945, and 1963; (ii) a CDR2 having an amino acid sequence that is at least 65%, at least 70%, at least 75%, at least 80%, at least 85%, at least 90%, at least 95%, at least 99%, or 100% identical to any one of amino acid sequences AAS, AVS, DAS, DNN, EDN, EVS, GAS, GNG, KAS, KVS, LVS, NTD, STS, WAS, and YTS; and (iii) a CDR3 having an amino acid sequence that is at least 65%, at least 70%, at least 75%, at least 80%, at least 85%, at least 90%, at least 95%, at least 99%, or 100% identical to any one of SEQ ID NOs: 1360, 1832, 1839, 1846, 1853, 1860, 1867, 1873, 1879, 1886, 1892, 1899, 1906, 1912, 1918, 1925, 1932, 1939, 1946, 1951, 1957, 1964, and 1970;
[6564] VH1 comprises (i) a complementarity determining region (CDR) 1 having an amino acid sequence that is at least 65%, at least 70%, at least 75%, at least 80%, at least 85%, at least 90%, at least 95%, at least 99%, or 100% identical to any one of SEQ ID NOs: 1309, 1362, 1437, 1552, 1618, 1639, 1834, 1841, 1848, 1855, 1862, 1881, 1894, 1901, 1920, 1927, 1934, 1941, 1953, 1959, and 1966; (ii) a CDR2 having an amino acid sequence that is at least 65%, at least 70%, at least 75%, at least 80%, at least 85%, at least 90%, at least 95%, at least 99%, or 100% identical to any one of SEQ ID NOs: 1363, 1835, 1842, 1849, 1856, 1863, 1869, 1875, 1882, 1888, 1895, 1902, 1908, 1914, 1921, 1928, 1935, 1942, 1948, 1954, 1960, 1967, and 1972; and (iii) a CDR3 having an amino acid sequence that is at least 65%, at least 70%, at least 75%, at least 80%, at least 85%, at least 90%, at least 95%, at least 99%, or 100% identical to any one of SEQ ID NOs: 1364, 1836, 1843, 1850, 1857, 1864, 1870, 1876, 1883, 1889, 1896, 1903, 1909, 1915, 1922, 1929, 1936, 1943, 1949, 1955, 1961, 1968, and 1973;
[6565] VH2 comprises (i) a complementarity determining region (CDR) 1 having an amino acid sequence that is at least 65%, at least 70%, at least 75%, at least 80%, at least 85%, at least 90%, at least 95%, at least 99%, or 100% identical to any one of SEQ ID NOs: 1309, 1362, 1437, 1552, 1618, 1639, 1834, 1841, 1848, 1855, 1862, 1881, 1894, 1901, 1920, 1927, 1934, 1941, 1953, 1959, and 1966; (ii) a CDR2 having an amino acid sequence that is at least 65%, at least 70%, at least 75%, at least 80%, at least 85%, at least 90%, at least 95%, at least 99%, or 100% identical to any one of SEQ ID NOs: 1363, 1835, 1842, 1849, 1856, 1863, 1869, 1875, 1882, 1888, 1895, 1902, 1908, 1914, 1921, 1928, 1935, 1942, 1948, 1954, 1960, 1967, and 1972; and (iii) a CDR3 having an amino acid sequence that is at least 65%, at least 70%, at least 75%, at least 80%, at least 85%, at least 90%, at least 95%, at least 99%, or 100% identical to any one of SEQ ID NOs: 1364, 1836, 1843, 1850, 1857, 1864, 1870, 1876, 1883, 1889, 1896, 1903, 1909, 1915, 1922, 1929, 1936, 1943, 1949, 1955, 1961, 1968, and 1973;
[6566] VH3 comprises (i) a complementarity determining region (CDR) 1 having an amino acid sequence that is at least 65%, at least 70%, at least 75%, at least 80%, at least 85%, at least 90%, at least 95%, at least 99%, or 100% identical to any one of SEQ ID NOs: 1309, 1362, 1437, 1552, 1618, 1639, 1834, 1841, 1848, 1855, 1862, 1881, 1894, 1901, 1920, 1927, 1934, 1941, 1953, 1959, and 1966; (ii) a CDR2 having an amino acid sequence that is at least 65%, at least 70%, at least 75%, at least 80%, at least 85%, at least 90%, at least 95%, at least 99%, or 100% identical to any one of SEQ ID NOs: 1363, 1835, 1842, 1849, 1856, 1863, 1869, 1875, 1882, 1888, 1895, 1902, 1908, 1914, 1921, 1928, 1935, 1942, 1948, 1954, 1960, 1967, and 1972; and (iii) a CDR3 having an amino acid sequence that is at least 65%, at least 70%, at least 75%, at least 80%, at least 85%, at least 90%, at least 95%, at least 99%, or 100% identical to any one of SEQ ID NOs: 1364, 1836, 1843, 1850, 1857, 1864, 1870, 1876, 1883, 1889, 1896, 1903, 1909, 1915, 1922, 1929, 1936, 1943, 1949, 1955, 1961, 1968, and 1973; and/or
[6567] VH4 comprises (i) a complementarity determining region (CDR) 1 having an amino acid sequence that is at least 65%, at least 70%, at least 75%, at least 80%, at least 85%, at least 90%, at least 95%, at least 99%, or 100% identical to any one of SEQ ID NOs: 1309, 1362, 1437, 1552, 1618, 1639, 1834, 1841, 1848, 1855, 1862, 1881, 1894, 1901, 1920, 1927, 1934, 1941, 1953, 1959, and 1966; (ii) a CDR2 having an amino acid sequence that is at least 65%, at least 70%, at least 75%, at least 80%, at least 85%, at least 90%, at least 95%, at least 99%, or 100% identical to any one of SEQ ID NOs: 1363, 1835, 1842, 1849, 1856, 1863, 1869, 1875, 1882, 1888, 1895, 1902, 1908, 1914, 1921, 1928, 1935, 1942, 1948, 1954, 1960, 1967, and 1972; and (iii) a CDR3 having an amino acid sequence that is at least 65%, at least 70%, at least 75%, at least 80%, at least 85%, at least 90%, at least 95%, at least 99%, or 100% identical to any one of SEQ ID NOs: 1364, 1836, 1843, 1850, 1857, 1864, 1870, 1876, 1883, 1889, 1896, 1903, 1909, 1915, 1922, 1929, 1936, 1943, 1949, 1955, 1961, 1968, and 1973; or
[6568] (iv)
[6569] VL1 comprises an amino acid sequence that is at least 65%, at least 70%, at least 75%, at least 80%, at least 85%, at least 90%, at least 95%, at least 99%, or 100% identical to any one of SEQ ID NOs: 1361, 1833, 1840, 1847, 1854, 1861, 1868, 1874, 1880, 1887, 1893, 1900, 1907, 1913, 1919, 1926, 1933, 1940, 1947, 1952, 1958, 1965, and 1971;
[6570] VL2 comprises an amino acid sequence that is at least 65%, at least 70%, at least 75%, at least 80%, at least 85%, at least 90%, at least 95%, at least 99%, or 100% identical to any one of SEQ ID NOs: 1361, 1833, 1840, 1847, 1854, 1861, 1868, 1874, 1880, 1887, 1893, 1900, 1907, 1913, 1919, 1926, 1933, 1940, 1947, 1952, 1958, 1965, and 1971;
[6571] VL3 comprises an amino acid sequence that is at least 65%, at least 70%, at least 75%, at least 80%, at least 85%, at least 90%, at least 95%, at least 99%, or 100% identical to any one of SEQ ID NOs: 1361, 1833, 1840, 1847, 1854, 1861, 1868, 1874, 1880, 1887, 1893, 1900, 1907, 1913, 1919, 1926, 1933, 1940, 1947, 1952, 1958, 1965, and 1971;
[6572] VL4 comprises an amino acid sequence that is at least 65%, at least 70%, at least 75%, at least 80%, at least 85%, at least 90%, at least 95%, at least 99%, or 100% identical to any one of SEQ ID NOs: 1361, 1833, 1840, 1847, 1854, 1861, 1868, 1874, 1880, 1887, 1893, 1900, 1907, 1913, 1919, 1926, 1933, 1940, 1947, 1952, 1958, 1965, and 1971;
[6573] VH1 comprises an amino acid sequence that is at least 65%, at least 70%, at least 75%, at least 80%, at least 85%, at least 90%, at least 95%, at least 99%, or 100% identical to any one of SEQ ID NOS: 1365, 1837, 1844, 1851, 1858, 1865, 1871, 1877, 1884, 1890, 1897, 1904, 1910, 1916, 1923, 1930, 1937, 1944, 1950, 1956, 1962, 1969, and 1974;
[6574] VH2 comprises an amino acid sequence that is at least 65%, at least 70%, at least 75%, at least 80%, at least 85%, at least 90%, at least 95%, at least 99%, or 100% identical to any one of SEQ ID NOs: 1365, 1837, 1844, 1851, 1858, 1865, 1871, 1877, 1884, 1890, 1897, 1904, 1910, 1916, 1923, 1930, 1937, 1944, 1950, 1956, 1962, 1969, and 1974;
[6575] VH3 comprises an amino acid sequence that is at least 65%, at least 70%, at least 75%, at least 80%, at least 85%, at least 90%, at least 95%, at least 99%, or 100% identical to any one of SEQ ID NOs: 1365, 1837, 1844, 1851, 1858, 1865, 1871, 1877, 1884, 1890, 1897, 1904, 1910, 1916, 1923, 1930, 1937, 1944, 1950, 1956, 1962, 1969, and 1974; and/or
[6576] VH4 comprises an amino acid sequence that is at least 65%, at least 70%, at least 75%, at least 80%, at least 85%, at least 90%, at least 95%, at least 99%, or 100% identical to any one of SEQ ID NOs: 1365, 1837, 1844, 1851, 1858, 1865, 1871, 1877, 1884, 1890, 1897, 1904, 1910, 1916, 1923, 1930, 1937, 1944, 1950, 1956, 1962, 1969, and 1974.

[6577] In some aspects, one or both of the antigen binding polypeptides comprised in the antigen binding polypeptide complexes disclosed herein, comprise one or more CL, as indicated in the formulas representing the antigen binding polypeptide complexes disclosed herein. In some aspects, the CL comprises an amino acid sequence at least 65%, at least 70%, at least 75%, at least 80%, at least 85%, at least 90%, at least 95%, at least 99%, or 100% identical to any one of SEQ ID NOs: 374, 637, or 1092-1095.

[6578] In some aspects, one or both of the antigen binding polypeptides comprised in the antigen binding polypeptide complexes disclosed herein, comprise one or more CH1, as indicated in the formulas representing the antigen binding polypeptide complexes disclosed herein. In some aspects, the CH1 comprises an amino acid sequence at least 65%, at least 70%, at least 75%, at least 80%, at least 85%, at least 90%, at least 95%, at least 99%, or 100% identical to any one of SEQ ID NOs: 375, 634, 1070, 1071, or 1086-1091.

[6579] In some aspects, one or both of the antigen binding polypeptides comprised in the antigen binding polypeptide complexes provided herein further comprise an Fc region. In some aspects, one or both of the antigen binding polypeptides comprised in the antigen binding polypeptide complexes provided herein further comprise an Fc region at the carboxy-terminus. In some aspects, the Fc region comprises an immunoglobulin heavy chain constant region 2 (CH2) and/or an immunoglobulin heavy chain constant region 3 (CH3). In some aspects, the Fc region further comprises an immunoglobulin hinge (i.e., a hinge region). In some aspects, the hinge region is interposed between a CH1 and a CH2 (i.e., a hinge region is localized between the carboxy terminal residue of a CH1 and the N-terminal residue of a CH2). In some aspects, the hinge region comprises an amino acid sequence at least 65%, at least 70%, at least 75%, at least 80%, at least 85%, at least 90%, at least 95%, at least 99%, or 100% identical to any one of SEQ ID NOs: 635.636, 1072, 1073, or 1074. In some aspects, the Fc region comprises a CH2 and a CH3. In some aspects, the CH2 comprises an amino acid sequence that is at least 65%, at least 70%, at least 75%, at least 80%, at least 85%, at least 90%, at least 95%, at least 99%, or 100% identical to any one of SEQ ID NOS: 1075-1078. In some aspects, the CH3 comprises an amino acid sequence that is at least 65%, at least 70%, at least 75%, at least 80%, at least 85%, at least 90%, at least 95%, at least 99%, or 100% identical to any one of SEQ ID NOs: 1079-1085. In some aspects, the Fc region comprises an amino acid sequence that is at least 65%, at least 70%, at least 75%, at least 80%, at least 85%, at least 90%, at least 95%, at least 99%, or 100% identical to any one of SEQ ID NOs: 376-380.

[6580] In some aspects, the Fc region comprises one or more amino acid substitutions. In some aspects, the one or more amino acid substitutions comprise one or more half-life extension amino acid substitutions. In some aspects, the one or more half-life extension amino acid substitutions comprise one or more of amino acid substitutions M428L, N434A, N434S, L234F, L235E, P331S, M252Y, S254T, or T256E, or equivalent thereof, based on the EU numbering scheme. In some aspects, the one or more half-life extension amino acid substitutions comprise a LA (M428L and N434A, or equivalent thereof, based on the EU numbering scheme) amino acid substitution. In some aspects, the one or more half-life extension amino acid substitutions comprise a LS (M428L and N434S, or equivalent thereof, based on the EU numbering scheme) amino acid substitution. In some aspects, the one or more half-life extension amino acid substitutions comprise L234F and L235E, or equivalent thereof (based on the EU numbering scheme) amino acid substitutions. In some aspects, the one or more half-life extension amino acid substitutions comprise a TM (L234F, L235E, and P331S, or equivalent thereof, based on the EU numbering scheme) amino acid substitution. In some aspects, the one or more half-life extension amino acid substitutions comprise a YTE (M252Y, S254T, and T256E, or equivalent thereof, based on the EU numbering scheme) amino acid substitution.

[6581] In some aspects, the Fc region comprises at least one knob-into-hole modification. In some aspects, the antigen binding polypeptides complexes disclosed herein are IgG1 or IgG4 antibodies or antigen binding fragments thereof. In some aspects, the knob-into-hole modification comprises one or more of knob substitutions of S354C and T366W, or equivalent thereof, and/or one or more of hole substitutions of Y349C, T366S, L368A, Y407V, or equivalent thereof, or a combination thereof, based on the EU numbering scheme. In some aspects, the Fc region comprises a knob-into-hole modification comprising knob substitutions of S354C and T366W, or equivalent thereof, and/or hole substitutions of Y349C, T366S, L368A, and Y407V, or equivalent thereof, and/or a half-life extension amino acid substitution comprising: a LA (M428L and N434A, or equivalent thereof, based on the EU numbering scheme) amino acid substitution, a LS (M428L and N434S, or equivalent thereof, based on the EU numbering scheme) amino acid substitution, L234F and L235E, or equivalent thereof (based on the EU numbering scheme) amino acid substitutions, a TM (L234F, L235E, and P331S, or equivalent thereof, based on the EU numbering scheme) amino acid substitution, a YTE (M252Y, S254T, and T256E, or equivalent thereof, based on the EU numbering scheme) amino acid substitution, or any combination thereof.

[6582] In some aspects, the Fc region comprises knob substitutions of S354C and T366W, or equivalent thereof, and a half-life extension amino acid substitution comprising: a LA (M428L and N434A, or equivalent thereof, based on the EU numbering scheme) amino acid substitution, a LS (M428L and N434S, or equivalent thereof, based on the EU numbering scheme) amino acid substitution, L234F and L235E, or equivalent thereof (based on the EU numbering scheme) amino acid substitutions, a TM (L234F, L235E, and P331S, or equivalent thereof, based on the EU numbering scheme) amino acid substitution, a YTE (M252Y, S254T, and T256E, or equivalent thereof, based on the EU numbering scheme) amino acid substitution, or any combination thereof.

[6583] In some aspects, the Fc region comprises hole substitutions of Y349C, T366S, L368A, and Y407V, or equivalent thereof, and a half-life extension amino acid substitution comprising: a LA (M428L and N434A, or equivalent thereof, based on the EU numbering scheme) amino acid substitution, a LS (M428L and N434S, or equivalent thereof, based on the EU numbering scheme) amino acid substitution. L234F and L235E, or equivalent thereof (based on the EU numbering scheme) amino acid substitutions, a TM (L234F, L235E, and P331S, or equivalent thereof, based on the EU numbering scheme) amino acid substitution, a YTE (M252Y, S254T, and T256E, or equivalent thereof, based on the EU numbering scheme) amino acid substitution, or any combination thereof.

[6584] In some aspects, one or both of the antigen binding polypeptides comprised in the antigen binding polypeptide complexes disclosed herein comprise one or more Fc effector function knockout mutation. In some aspects, one or both of the antigen binding polypeptides comprised in the antigen binding polypeptide complexes disclosed herein are IgG1 or IgG4 antibodies or antigen binding fragments thereof. In some aspects, the Fc effector function knockout mutation is L234A, L235A, P239A, or equivalent thereof, or a combination thereof, based on the EU numbering scheme.

[6585] In some aspects, one or both of the antigen binding polypeptides comprised in the antigen binding polypeptide complexes disclosed herein comprise a mutation at a glycosylation site. In some aspects, the mutation at a glycosylation site is a mutation at an N-glycosylation site. In some aspects, one or both of the antigen binding polypeptides comprised in the antigen binding polypeptide complexes disclosed herein comprise a VH comprising a mutation at a glycosylation site. In some aspects, the mutation at a glycosylation site is a mutation at an N-glycosylation site. In some aspects, the mutation at an N-glycosylation site is at amino acid N62, or equivalent thereof, of the VH region or equivalent thereof. In some aspects, the mutation at an N-glycosylation site at amino acid N62 is N62Q or N62S, or equivalent thereof.

[6586] In some aspects, one or both of the antigen binding polypeptides comprised in the antigen binding polypeptide complexes disclosed herein, comprise one or more optional linkers. The one or more optional linkers are indicated herein as Ln, wherein n is an integer, and the integer next to each L indicates each L comprised in the antigen binding polypeptides comprised in the antigen binding polypeptide complexes disclosed herein. For example, if an antigen binding polypeptide comprised in the antigen binding polypeptide complexes disclosed herein comprises two linkers, the first linker from N-terminus to C-terminus is herein indicated as L1, and the second linker from N-terminus to C-terminus is herein indicated as L2. If an antigen binding polypeptide complex disclosed herein comprises a first antigen binding polypeptide comprising two linkers, indicated herein as L1 and L2, as explained above, the linkers comprised in the second antigen binding polypeptide are indicated with the following integer, in this example, the first linker from N-terminus to C-terminus of the second antigen binding polypeptide is herein indicated as L3, the second linker from N-terminus to C-terminus of the second antigen binding polypeptide is herein indicated as L3. In some aspects, any one of the optional linkers each independently have a length of from 0 amino acids to about 50 amino acids. In some aspects, any one of the optional linkers each independently have a length of from 5 amino acids to about 40 amino acids.

[6587] In some aspects, any one of the optional linkers are non-immunogenic. In some aspects, any one of the optional linkers do not contain a consensus T cell epitope.

[6588] In some aspects, any of Ln comprises an amino acid sequence of G or A, or an amino acid sequence at least 65%, at least 70%, at least 75%, at least 80%, at least 85%, at least 90%, at least 95%, at least 99%, or 100% identical to amino acid sequence GSS or ASG, or an amino acid sequence at least 65%, at least 70%, at least 75%, at least 80%, at least 85%, at least 90%, at least 95%, at least 99%, or 100% identical to any one of SEQ ID NOs: 333-373 and 967-971. In some aspects. Ln comprises an amino acid sequence at least 65%, at least 70%, at least 75%, at least 80%, at least 85%, at least 90%, at least 95%, at least 99%, or 100% identical to any one of SEQ ID NOs: 333-345 and 967-971.

[6589] In some aspects, the first polypeptide comprises a structure represented by VL1-CL-VH1-CH1-VL2-VH2, VL1-L1-CL-L2-VH1-L3-CH1-L4-VL2-L5-VH2, VL1-CL-VH1-CH1-VL2-VH2-CH2-CH3, or VL1-L1-CL-L2-VH1-L3-CH1-L4-VL2-L5-VH2-CH2-CH3 and the second polypeptide comprises a structure represented by VL3-CL-VH3-CH1-VL4-VH4, VL3-L6-CL-L7-VH3-L8-CH1-L9-VL4-L10-VH4, VL3-CL-VH3-CH1-VL4-VH4-CH2-CH3, or VL3-L6-CL-L7-VH3-L8-CH1-L9-VL4-L10-VH4-CH2-CH3,
[6590] wherein:
[6591] (a)
[6592] (i)
[6593] VL1 comprises a light chain complementarity determining region 1 (LCDR1), LCDR2, and/or LCDR3 of an antibody selected from the group consisting of losatuxizumab vedotin, utomilumab, urelumab, oleclumab, naptumomab estafenatox, ascrinvacumab, pintumomab, tacatuzumab tetraxetan, nesvacumab, vanucizumab, timolumab, vapaliximab, vepalimomab, enapotamab vedotin, ianalumab, belimumab, tabalumab, tibulizumab, belantamab mafodotin, teclistamab, teclistamab, detumomab, nacolomab tafenatox, eculizumab, lendalizumab, pexelizumab, pozelimab, ravulizumab, tesidolumab, vilobelimab, abagovomab, igovomab, oregovomab, sofituzumab vedotin, cantuzumab mertansine, cantuzuma bravtansine, girentuximab, altumomab pentetate, arcitumomab, besilesomab, bertilimumab, plozalizumab, mogamulizumab, leronlimab, PRO140, rovelizumab, rovelizumab, talacotuzumab, benralizumab, tavolimab, vonlerolizumab, gavilimomab, ziralimumab, fanolesomab, ipilimumab, ruplizumab, toralizumab, dapirolizumab pegol, toralizumab, dapirolizumab pegol, ruplizumab, blinatumomab, inebilizumab, loncastuximab tesirine, SGN-CD19A, tafasitamab, taplitumomab paptox, XMAB-5574, Budoprutug, Obexelimab, duvortuxizumab, englumafusp alfa, Emfizatamab, zeripatamig, siplizumab, blontuvetmab, FBTA05, ibritumomab tiuxetan, obinutuzumab, ocaratuzumab, ocrelizumab, ofatumumab, rituximab, tositumomab, ublituximab, veltuzumab, divozilimab, eramkafusp alfa, ripertamab, zuberitamab, glofitamab, nofetumomab merpentan, samalizumab, imvotamab, odronextamab, plamotamab, bectumomab, inotuzumab ozogamicin, moxetumomab pasudotox, pinatuzumab vedotin, gomiliximab, lumiliximab, inolimomab, inolimomab, daclizumab, camidanluma btesirine, basiliximab, varlilumab, omburtamab, enoblituzumab, vopratelimab, lulizumabpegol, TGN1412, muromonab-CD3, otelixizumab, teplizumab, visilizumab, epcoritamab, epcoritamab, brentuximab vedotin, iratumumab, azintuxizumab vedotin, gemtuzumab ozogamicin, lintuzumab, vadastuximab talirine, naratuximab emtansine, otlertuzumab, lilotomab satetraxetan, tetulomab, daratumumab, isatuximab, foralumab, mosunetuzumab, mosunetuzumab, cedelizumab, ibalizumab, keliximab, priliximab, tregalizumab, zanolimumab, bleselumab, iscalimab, lucatumumab, ravagalimab, selicrelumab, teneliximab, vanalimab, abciximab, bivatuzumab, iomab-B, telimomab aritox, zolimomab aritox, abituzumab, intetumumab, alemtuzumab, tamtuvetmab, lorvotuzumab mertansine, itolizumab, cusatuzumab, vorsetuzumab mafodotin, milatuzumab, iladatuzumab vedotin, polatuzumab vedotin, galiximab, cibisatamab, zolbetuximab, naxitamab, tisotumab vedotin, olendalizumab, pamrevlumab, lacnotuzumab, cabiralizumab, emactuzumab, axatilimab, gimsilumab, lenzilumab, namilumab, tremelimumab, ulocuplumab, tepoditamab, rovalpituzumab tesirine, tarlatamab, demcizumab, navicixizumab, drozitumab, parsatuzumab, depatuxizumab mafodotin, modotuximab, carotuximab, adecatumumab, adecatumumab, oportuzumab monatox, solitomab, tucotuzumab celmoleukin, edrecolomab, catumaxomab, ifabotuzumab, fibatuzumab, zalutumumab, panitumumab, cetuximab, futuximab, imgatuzumab, laprituximab emtansine, matuzumab, necitumumab, nimotuzumab, tomuzotuximab, amivantamab, amivantamab, epitumomab cituxetan, sontuzumab, duligotuzumab, elgemtumab, lumretuzumab, patritumab, seribantumab, zenocutuzumab, sibrotuzumab, burosumab, aprutumab ixadotin, radretumab, pasotuxizumab, farletuzumab, mirvetuximab soravtansine, vantictumab, TRBS07, 3F8, dinutuximab, dinutuximab beta, ecromeximab, mitumomab, andecaliximab, capromab, codrituzumab, glembatumumab vedotin, talquetamab, talquetamab, trevogrumab, indusatumab vedotin, ficlatuzumab, rilotumumab, zatuximab, pentuzimab, pentuzimab, margetuximab, timigutuzumab, trastuzumab, trastuzumab duocarmazine, trastuzumab emtansine, gancotamab, pertuzumab, ertumaxomab, emibetuzumab, telisotuzumab, telisotuzumab vedotin, derlotuximab biotin, apolizumab, onartuzumab, bersanlimab, enlimomabpegol, rontalizumab, sifalimumab, talizumab, ganitumab, istiratumab, robatumumab, teprotumumab, figitumumab, ganitumab, istiratumab, robatumumab, teprotumumab, cixutumumab, dalotuzumab, xentuzumab, dusigitumab, canakinumab, ustekinumab, ustekinumab, ustekinumab, briakinumab, briakinumab, abrezekimab, lebrikizumab, romilkimab, TNX-650, tralokinumab, anrukinzumab, brodalumab, ixekizumab, netakimab, perakizumab, secukinumab, vunakizumab, afasevikumab, afasevikumab, bimekizumab, bimekizumab, remtolumab, bermekimab, lutikizumab, lutikizumab, gevokizumab, cergutuzumab amunaleukin, fletikumab, fezakinumab, brazikumab, guselkumab, mirikizumab, tildrakizumab, risankizumab, flotetuzumab, nemolizumab, pascolizumab, dupilumab, mepolizumab, reslizumab, clazakizumab, elsilimomab, olokizumab, sarilumab, siltuximab, sirukumab, vobarilizumab, tocilizumab, SA237, satralizumab, enokizumab, prezalizumab, natalizumab, abrilumab, abrilumab, vedolizumab, volociximab, tadocizumab, etaracizumab, etrolizumab, spesolimab, vatelizumab, erlizumab, lirilumab, relatlimab, cBR96-doxorubicinimmunoconjugate, odulimomab, efalizumab, ladiratuzumab vedotin, simtuzumab, samrotamab vedotin, aselizumab, lupartumab amadotin, imalumab, carlumab, imaprelimab, amatuximab, amatuximab, anetumab ravtansine, narnatumab, clivatuzumab tetraxetan, pemtumomab, gatipotuzumab, ensituximab, lemalesomab, sulesomab, enfortumab vedotin, racotumomab, monalizumab, brontictuzumab, tarextumab, vesencumab, oxelumab, gilvetmab, tislelizumab, dostarlimab, BCD-100, nivolumab, PDR001, pembrolizumab, pidilizumab, retifanlimab, spartalizumab, sintilimab, cemiplimab, olaratumab, tovetumab, rinucumab, atezolizumab, avelumab, durvalumab, lifastuzumab vedotin, bavituximab, acapatamab, capromab, rosopatamab, nezastomig, pasotuxizumab, pelgifatamab, voxalatamab, cofetuzumab pelidotin, denosumab, rosmantuzumab, cirmtuzumab, atinumab, indatuximab ravtansine, elotuzumab, sirtratumab vedotin, sonepcizumab, vandortuzumab vedotin, minretumomab, satumomab pendetide, maslimomab, ontuxizumab, tenatumomab, fresolimumab, metelimumab, lerdelimumab, tezepelumab, etigilimab, tiragotumab, placulumab, prezalumab, infliximab, nerelimomab, ozoralizumab, adalimumab, afelimomab, certolizumab pegol, golimumab, mapatumumab, conatumumab, lexatumumab, tigatuzumab, sacituzumab govitecan, votumumab, pogalizumab, letolizumab, pankomab, anatumomab mafenatox, enavatuzumab, flanvotumab, brolucizumab, ranibizumab, varisacumab, bevacizumab, faricimab, icrucumab, alacizumab pegol, ramucirumab, pritumumab, and onvatilimab;
[6594] VL2 comprises a light chain complementarity determining region 1 (LCDR1), LCDR2, and/or LCDR3 of an antibody selected from the group consisting of losatuxizumab vedotin, utomilumab, urelumab, oleclumab, naptumomab estafenatox, ascrinvacumab, pintumomab, tacatuzumab tetraxetan, nesvacumab, vanucizumab, timolumab, vapaliximab, vepalimomab, enapotamab vedotin, ianalumab, belimumab, tabalumab, tibulizumab, belantamab mafodotin, teclistamab, teclistamab, detumomab, nacolomab tafenatox, eculizumab, lendalizumab, pexelizumab, pozelimab, ravulizumab, tesidolumab, vilobelimab, abagovomab, igovomab, oregovomab, sofituzumab vedotin, cantuzumab mertansine, cantuzuma bravtansine, girentuximab, altumomab pentetate, arcitumomab, besilesomab, bertilimumab, plozalizumab, mogamulizumab, leronlimab, PRO140, rovelizumab, rovelizumab, talacotuzumab, benralizumab, tavolimab, vonlerolizumab, gavilimomab, ziralimumab, fanolesomab, ipilimumab, ruplizumab, toralizumab, dapirolizumab pegol, toralizumab, dapirolizumab pegol, ruplizumab, blinatumomab, inebilizumab, loncastuximab tesirine, SGN-CD19A, tafasitamab, taplitumomab paptox, XMAB-5574, Budoprutug, Obexclimab, duvortuxizumab, englumafusp alfa, Emfizatamab, zeripatamig, siplizumab, blontuvetmab, FBTA05, ibritumomab tiuxetan, obinutuzumab, ocaratuzumab, ocrelizumab, ofatumumab, rituximab, tositumomab, ublituximab, veltuzumab, divozilimab, eramkafusp alfa, ripertamab, zuberitamab, glofitamab, nofetumomab merpentan, samalizumab, imvotamab, odronextamab, plamotamab, bectumomab, inotuzumab ozogamicin, moxetumomab pasudotox, pinatuzumab vedotin, gomiliximab, lumiliximab, inolimomab, inolimomab, daclizumab, camidanluma btesirine, basiliximab, varlilumab, omburtamab, enoblituzumab, vopratelimab, lulizumabpegol, TGN1412, muromonab-CD3, otelixizumab, teplizumab, visilizumab, epcoritamab, epcoritamab, brentuximab vedotin, iratumumab, azintuxizumab vedotin, gemtuzumab ozogamicin, lintuzumab, vadastuximab talirine, naratuximab emtansine, otlertuzumab, lilotomab satetraxetan, tetulomab, daratumumab, isatuximab, foralumab, mosunetuzumab, mosunetuzumab, cedelizumab, ibalizumab, keliximab, priliximab, tregalizumab, zanolimumab, bleselumab, iscalimab, lucatumumab, ravagalimab, selicrelumab, teneliximab, vanalimab, abciximab, bivatuzumab, iomab-B, telimomab aritox, zolimomab aritox, abituzumab, intetumumab, alemtuzumab, tamtuvetmab, lorvotuzumab mertansine, itolizumab, cusatuzumab, vorsetuzumab mafodotin, milatuzumab, iladatuzumab vedotin, polatuzumab vedotin, galiximab, cibisatamab, zolbetuximab, naxitamab, tisotumab vedotin, olendalizumab, pamrevlumab, lacnotuzumab, cabiralizumab, emactuzumab, axatilimab, gimsilumab, lenzilumab, namilumab, tremelimumab, ulocuplumab, tepoditamab, rovalpituzumab tesirine, tarlatamab, demcizumab, navicixizumab, drozitumab, parsatuzumab, depatuxizumab mafodotin, modotuximab, carotuximab, adecatumumab, adecatumumab, oportuzumab monatox, solitomab, tucotuzumab celmoleukin, edrecolomab, catumaxomab, ifabotuzumab, fibatuzumab, zalutumumab, panitumumab, cetuximab, futuximab, imgatuzumab, laprituximab emtansine, matuzumab, necitumumab, nimotuzumab, tomuzotuximab, amivantamab, amivantamab, epitumomab cituxetan, sontuzumab, duligotuzumab, elgemtumab, lumretuzumab, patritumab, seribantumab, zenocutuzumab, sibrotuzumab, burosumab, aprutumab ixadotin, radretumab, pasotuxizumab, farletuzumab, mirvetuximab soravtansine, vantictumab, TRBS07, 3F8, dinutuximab, dinutuximab beta, ecromeximab, mitumomab, andecaliximab, capromab, codrituzumab, glembatumumab vedotin, talquetamab, talquetamab, trevogrumab, indusatumab vedotin, ficlatuzumab, rilotumumab, zatuximab, pentuzimab, pentuzimab, margetuximab, timigutuzumab, trastuzumab, trastuzumab duocarmazine, trastuzumab emtansine, gancotamab, pertuzumab, ertumaxomab, emibetuzumab, telisotuzumab, telisotuzumab vedotin, derlotuximab biotin, apolizumab, onartuzumab, bersanlimab, enlimomabpegol, rontalizumab, sifalimumab, talizumab, ganitumab, istiratumab, robatumumab, teprotumumab, figitumumab, ganitumab, istiratumab, robatumumab, teprotumumab, cixutumumab, dalotuzumab, xentuzumab, dusigitumab, canakinumab, ustekinumab, ustekinumab, ustekinumab, briakinumab, briakinumab, abrezekimab, lebrikizumab, romilkimab, TNX-650, tralokinumab, anrukinzumab, brodalumab, ixekizumab, netakimab, perakizumab, secukinumab, vunakizumab, afasevikumab, afasevikumab, bimekizumab, bimekizumab, remtolumab, bermekimab, lutikizumab, lutikizumab, gevokizumab, cergutuzumab amunaleukin, fletikumab, fezakinumab, brazikumab, guselkumab, mirikizumab, tildrakizumab, risankizumab, flotetuzumab, nemolizumab, pascolizumab, dupilumab, mepolizumab, reslizumab, clazakizumab, elsilimomab, olokizumab, sarilumab, siltuximab, sirukumab, vobarilizumab, tocilizumab, SA237, satralizumab, enokizumab, prezalizumab, natalizumab, abrilumab, abrilumab, vedolizumab, volociximab, tadocizumab, etaracizumab, etrolizumab, spesolimab, vatelizumab, erlizumab, lirilumab, relatlimab, cBR96-doxorubicinimmunoconjugate, odulimomab, efalizumab, ladiratuzumab vedotin, simtuzumab, samrotamab vedotin, aselizumab, lupartumab amadotin, imalumab, carlumab, imaprelimab, amatuximab, amatuximab, anetumab ravtansine, narnatumab, clivatuzumab tetraxetan, pemtumomab, gatipotuzumab, ensituximab, lemalesomab, sulesomab, enfortumab vedotin, racotumomab, monalizumab, brontictuzumab, tarextumab, vesencumab, oxelumab, gilvetmab, tislelizumab, dostarlimab, BCD-100, nivolumab, PDR001, pembrolizumab, pidilizumab, retifanlimab, spartalizumab, sintilimab, cemiplimab, olaratumab, tovetumab, rinucumab, atezolizumab, avelumab, durvalumab, lifastuzumab vedotin, bavituximab, acapatamab, capromab, rosopatamab, nezastomig, pasotuxizumab, pelgifatamab, voxalatamab, cofetuzumab pelidotin, denosumab, rosmantuzumab, cirmtuzumab, atinumab, indatuximab ravtansine, elotuzumab, sirtratumab vedotin, sonepcizumab, vandortuzumab vedotin, minretumomab, satumomab pendetide, maslimomab, ontuxizumab, tenatumomab, fresolimumab, metelimumab, lerdelimumab, tezepelumab, etigilimab, tiragotumab, placulumab, prezalumab, infliximab, nerelimomab, ozoralizumab, adalimumab, afelimomab, certolizumab pegol, golimumab, mapatumumab, conatumumab, lexatumumab, tigatuzumab, sacituzumab govitecan, votumumab, pogalizumab, letolizumab, pankomab, anatumomab mafenatox, enavatuzumab, flanvotumab, brolucizumab, ranibizumab, varisacumab, bevacizumab, faricimab, icrucumab, alacizumab pegol, ramucirumab, pritumumab, and onvatilimab;
[6595] VL3 comprises a light chain complementarity determining region 1 (LCDR1), LCDR2, and/or LCDR3 of an antibody selected from the group consisting of losatuxizumab vedotin, utomilumab, urelumab, oleclumab, naptumomab estafenatox, ascrinvacumab, pintumomab, tacatuzumab tetraxetan, nesvacumab, vanucizumab, timolumab, vapaliximab, vepalimomab, enapotamab vedotin, ianalumab, belimumab, tabalumab, tibulizumab, belantamab mafodotin, teclistamab, teclistamab, detumomab, nacolomab tafenatox, eculizumab, lendalizumab, pexelizumab, pozelimab, ravulizumab, tesidolumab, vilobelimab, abagovomab, igovomab, oregovomab, sofituzumab vedotin, cantuzumab mertansine, cantuzuma bravtansine, girentuximab, altumomab pentetate, arcitumomab, besilesomab, bertilimumab, plozalizumab, mogamulizumab, leronlimab, PRO140, rovelizumab, rovelizumab, talacotuzumab, benralizumab, tavolimab, vonlerolizumab, gavilimomab, ziralimumab, fanolesomab, ipilimumab, ruplizumab, toralizumab, dapirolizumab pegol, toralizumab, dapirolizumab pegol, ruplizumab, blinatumomab, inebilizumab, loncastuximab tesirine, SGN-CD19A, tafasitamab, taplitumomab paptox, XMAB-5574, Budoprutug, Obexelimab, duvortuxizumab, englumafusp alfa, Emfizatamab, zeripatamig, siplizumab, blontuvetmab, FBTA05, ibritumomab tiuxetan, obinutuzumab, ocaratuzumab, ocrelizumab, ofatumumab, rituximab, tositumomab, ublituximab, veltuzumab, divozilimab, eramkafusp alfa, ripertamab, zuberitamab, glofitamab, nofetumomab merpentan, samalizumab, imvotamab, odronextamab, plamotamab, bectumomab, inotuzumab ozogamicin, moxetumomab pasudotox, pinatuzumab vedotin, gomiliximab, lumiliximab, inolimomab, inolimomab, daclizumab, camidanluma btesirine, basiliximab, varlilumab, omburtamab, enoblituzumab, vopratelimab, lulizumabpegol, TGN1412, muromonab-CD3, otelixizumab, teplizumab, visilizumab, epcoritamab, epcoritamab, brentuximab vedotin, iratumumab, azintuxizumab vedotin, gemtuzumab ozogamicin, lintuzumab, vadastuximab talirine, naratuximab emtansine, otlertuzumab, lilotomab satetraxetan, tetulomab, daratumumab, isatuximab, foralumab, mosunetuzumab, mosunetuzumab, cedelizumab, ibalizumab, keliximab, priliximab, tregalizumab, zanolimumab, bleselumab, iscalimab, lucatumumab, ravagalimab, selicrelumab, teneliximab, vanalimab, abciximab, bivatuzumab, iomab-B, telimomab aritox, zolimomab aritox, abituzumab, intetumumab, alemtuzumab, tamtuvetmab, lorvotuzumab mertansine, itolizumab, cusatuzumab, vorsetuzumab mafodotin, milatuzumab, iladatuzumab vedotin, polatuzumab vedotin, galiximab, cibisatamab, zolbetuximab, naxitamab, tisotumab vedotin, olendalizumab, pamrevlumab, lacnotuzumab, cabiralizumab, emactuzumab, axatilimab, gimsilumab, lenzilumab, namilumab, tremelimumab, ulocuplumab, tepoditamab, rovalpituzumab tesirine, tarlatamab, demcizumab, navicixizumab, drozitumab, parsatuzumab, depatuxizumab mafodotin, modotuximab, carotuximab, adecatumumab, adecatumumab, oportuzumab monatox, solitomab, tucotuzumab celmoleukin, edrecolomab, catumaxomab, ifabotuzumab, fibatuzumab, zalutumumab, panitumumab, cetuximab, futuximab, imgatuzumab, laprituximab emtansine, matuzumab, necitumumab, nimotuzumab, tomuzotuximab, amivantamab, amivantamab, epitumomab cituxetan, sontuzumab, duligotuzumab, elgemtumab, lumretuzumab, patritumab, seribantumab, zenocutuzumab, sibrotuzumab, burosumab, aprutumab ixadotin, radretumab, pasotuxizumab, farletuzumab, mirvetuximab soravtansine, vantictumab, TRBS07, 3F8, dinutuximab, dinutuximab beta, ecromeximab, mitumomab, andecaliximab, capromab, codrituzumab, glembatumumab vedotin, talquetamab, talquetamab, trevogrumab, indusatumab vedotin, ficlatuzumab, rilotumumab, zatuximab, pentuzimab, pentuzimab, margetuximab, timigutuzumab, trastuzumab, trastuzumab duocarmazine, trastuzumab emtansine, gancotamab, pertuzumab, ertumaxomab, emibctuzumab, telisotuzumab, telisotuzumab vedotin, derlotuximab biotin, apolizumab, onartuzumab, bersanlimab, enlimomabpegol, rontalizumab, sifalimumab, talizumab, ganitumab, istiratumab, robatumumab, teprotumumab, figitumumab, ganitumab, istiratumab, robatumumab, teprotumumab, cixutumumab, dalotuzumab, xentuzumab, dusigitumab, canakinumab, ustekinumab, ustekinumab, ustekinumab, briakinumab, briakinumab, abrezekimab, lebrikizumab, romilkimab, TNX-650, tralokinumab, anrukinzumab, brodalumab, ixekizumab, netakimab, perakizumab, secukinumab, vunakizumab, afasevikumab, afasevikumab, bimekizumab, bimekizumab, remtolumab, bermekimab, lutikizumab, lutikizumab, gevokizumab, cergutuzumab amunaleukin, fletikumab, fezakinumab, brazikumab, guselkumab, mirikizumab, tildrakizumab, risankizumab, flotetuzumab, nemolizumab, pascolizumab, dupilumab, mepolizumab, reslizumab, clazakizumab, elsilimomab, olokizumab, sarilumab, siltuximab, sirukumab, vobarilizumab, tocilizumab, SA237, satralizumab, enokizumab, prezalizumab, natalizumab, abrilumab, abrilumab, vedolizumab, volociximab, tadocizumab, etaracizumab, etrolizumab, spesolimab, vatelizumab, erlizumab, lirilumab, relatlimab, cBR96-doxorubicinimmunoconjugate, odulimomab, efalizumab, ladiratuzumab vedotin, simtuzumab, samrotamab vedotin, aselizumab, lupartumab amadotin, imalumab, carlumab, imaprelimab, amatuximab, amatuximab, anetumab ravtansine, narnatumab, clivatuzumab tetraxetan, pemtumomab, gatipotuzumab, ensituximab, lemalesomab, sulesomab, enfortumab vedotin, racotumomab, monalizumab, brontictuzumab, tarextumab, vesencumab, oxelumab, gilvetmab, tislelizumab, dostarlimab, BCD-100, nivolumab, PDR001, pembrolizumab, pidilizumab, retifanlimab, spartalizumab, sintilimab, cemiplimab, olaratumab, tovetumab, rinucumab, atezolizumab, avelumab, durvalumab, lifastuzumab vedotin, bavituximab, acapatamab, capromab, rosopatamab, nezastomig, pasotuxizumab, pelgifatamab, voxalatamab, cofetuzumab pelidotin, denosumab, rosmantuzumab, cirmtuzumab, atinumab, indatuximab ravtansine, elotuzumab, sirtratumab vedotin, sonepcizumab, vandortuzumab vedotin, minretumomab, satumomab pendetide, maslimomab, ontuxizumab, tenatumomab, fresolimumab, metelimumab, lerdelimumab, tezepelumab, etigilimab, tiragotumab, placulumab, prezalumab, infliximab, nerelimomab, ozoralizumab, adalimumab, afelimomab, certolizumab pegol, golimumab, mapatumumab, conatumumab, lexatumumab, tigatuzumab, sacituzumab govitecan, votumumab, pogalizumab, letolizumab, pankomab, anatumomab mafenatox, enavatuzumab, flanvotumab, brolucizumab, ranibizumab, varisacumab, bevacizumab, faricimab, icrucumab, alacizumab pegol, ramucirumab, pritumumab, and onvatilimab;
[6596] VL4 comprises a light chain complementarity determining region 1 (LCDR1), LCDR2, and/or LCDR3 of an antibody selected from the group consisting of losatuxizumab vedotin, utomilumab, urelumab, oleclumab, naptumomab estafenatox, ascrinvacumab, pintumomab, tacatuzumab tetraxetan, nesvacumab, vanucizumab, timolumab, vapaliximab, vepalimomab, enapotamab vedotin, ianalumab, belimumab, tabalumab, tibulizumab, belantamab mafodotin, teclistamab, teclistamab, detumomab, nacolomab tafenatox, eculizumab, lendalizumab, pexelizumab, pozelimab, ravulizumab, tesidolumab, vilobelimab, abagovomab, igovomab, oregovomab, sofituzumab vedotin, cantuzumab mertansine, cantuzuma bravtansine, girentuximab, altumomab pentetate, arcitumomab, besilesomab, bertilimumab, plozalizumab, mogamulizumab, leronlimab, PRO140, rovelizumab, rovelizumab, talacotuzumab, benralizumab, tavolimab, vonlerolizumab, gavilimomab, ziralimumab, fanolesomab, ipilimumab, ruplizumab, toralizumab, dapirolizumab pegol, toralizumab, dapirolizumab pegol, ruplizumab, blinatumomab, inebilizumab, loncastuximab tesirine, SGN-CD19A, tafasitamab, taplitumomab paptox, XMAB-5574, Budoprutug, Obexelimab, duvortuxizumab, englumafusp alfa, Emfizatamab, zeripatamig, siplizumab, blontuvetmab, FBTA05, ibritumomab tiuxetan, obinutuzumab, ocaratuzumab, ocrelizumab, ofatumumab, rituximab, tositumomab, ublituximab, veltuzumab, divozilimab, eramkafusp alfa, ripertamab, zuberitamab, glofitamab, nofetumomab merpentan, samalizumab, imvotamab, odronextamab, plamotamab, bectumomab, inotuzumab ozogamicin, moxetumomab pasudotox, pinatuzumab vedotin, gomiliximab, lumiliximab, inolimomab, inolimomab, daclizumab, camidanluma btesirine, basiliximab, varlilumab, omburtamab, enoblituzumab, vopratelimab, lulizumabpegol, TGN1412, muromonab-CD3, otelixizumab, teplizumab, visilizumab, epcoritamab, epcoritamab, brentuximab vedotin, iratumumab, azintuxizumab vedotin, gemtuzumab ozogamicin, lintuzumab, vadastuximab talirine, naratuximab emtansine, otlertuzumab, lilotomab satetraxetan, tetulomab, daratumumab, isatuximab, foralumab, mosunetuzumab, mosunetuzumab, cedelizumab, ibalizumab, keliximab, priliximab, tregalizumab, zanolimumab, bleselumab, iscalimab, lucatumumab, ravagalimab, selicrelumab, teneliximab, vanalimab, abciximab, bivatuzumab, iomab-B, telimomab aritox, zolimomab aritox, abituzumab, intetumumab, alemtuzumab, tamtuvetmab, lorvotuzumab mertansine, itolizumab, cusatuzumab, vorsetuzumab mafodotin, milatuzumab, iladatuzumab vedotin, polatuzumab vedotin, galiximab, cibisatamab, zolbetuximab, naxitamab, tisotumab vedotin, olendalizumab, pamrevlumab, lacnotuzumab, cabiralizumab, emactuzumab, axatilimab, gimsilumab, lenzilumab, namilumab, tremelimumab, ulocuplumab, tepoditamab, rovalpituzumab tesirine, tarlatamab, demcizumab, navicixizumab, drozitumab, parsatuzumab, depatuxizumab mafodotin, modotuximab, carotuximab, adecatumumab, adecatumumab, oportuzumab monatox, solitomab, tucotuzumab celmoleukin, edrecolomab, catumaxomab, ifabotuzumab, fibatuzumab, zalutumumab, panitumumab, cetuximab, futuximab, imgatuzumab, laprituximab emtansine, matuzumab, necitumumab, nimotuzumab, tomuzotuximab, amivantamab, amivantamab, epitumomab cituxetan, sontuzumab, duligotuzumab, elgemtumab, lumretuzumab, patritumab, seribantumab, zenocutuzumab, sibrotuzumab, burosumab, aprutumab ixadotin, radretumab, pasotuxizumab, farletuzumab, mirvetuximab soravtansine, vantictumab, TRBS07, 3F8, dinutuximab, dinutuximab beta, ecromeximab, mitumomab, andecaliximab, capromab, codrituzumab, glembatumumab vedotin, talquetamab, talquetamab, trevogrumab, indusatumab vedotin, ficlatuzumab, rilotumumab, zatuximab, pentuzimab, pentuzimab, margetuximab, timigutuzumab, trastuzumab, trastuzumab duocarmazine, trastuzumab emtansine, gancotamab, pertuzumab, ertumaxomab, emibetuzumab, telisotuzumab, telisotuzumab vedotin, derlotuximab biotin, apolizumab, onartuzumab, bersanlimab, enlimomabpegol, rontalizumab, sifalimumab, talizumab, ganitumab, istiratumab, robatumumab, teprotumumab, figitumumab, ganitumab, istiratumab, robatumumab, teprotumumab, cixutumumab, dalotuzumab, xentuzumab, dusigitumab, canakinumab, ustekinumab, ustekinumab, ustekinumab, briakinumab, briakinumab, abrezekimab, lebrikizumab, romilkimab, TNX-650, tralokinumab, anrukinzumab, brodalumab, ixekizumab, netakimab, perakizumab, secukinumab, vunakizumab, afasevikumab, afasevikumab, bimekizumab, bimekizumab, remtolumab, bermckimab, lutikizumab, lutikizumab, gevokizumab, cergutuzumab amunaleukin, fletikumab, fezakinumab, brazikumab, guselkumab, mirikizumab, tildrakizumab, risankizumab, flotetuzumab, nemolizumab, pascolizumab, dupilumab, mepolizumab, reslizumab, clazakizumab, elsilimomab, olokizumab, sarilumab, siltuximab, sirukumab, vobarilizumab, tocilizumab, SA237, satralizumab, enokizumab, prezalizumab, natalizumab, abrilumab, abrilumab, vedolizumab, volociximab, tadocizumab, etaracizumab, etrolizumab, spesolimab, vatelizumab, erlizumab, lirilumab, relatlimab, cBR96-doxorubicinimmunoconjugate, odulimomab, efalizumab, ladiratuzumab vedotin, simtuzumab, samrotamab vedotin, asclizumab, lupartumab amadotin, imalumab, carlumab, imaprelimab, amatuximab, amatuximab, anetumab ravtansine, narnatumab, clivatuzumab tetraxetan, pemtumomab, gatipotuzumab, ensituximab, lemalesomab, sulesomab, enfortumab vedotin, racotumomab, monalizumab, brontictuzumab, tarextumab, vesencumab, oxelumab, gilvetmab, tislelizumab, dostarlimab, BCD-100, nivolumab, PDR001, pembrolizumab, pidilizumab, retifanlimab, spartalizumab, sintilimab, cemiplimab, olaratumab, tovetumab, rinucumab, atezolizumab, avelumab, durvalumab, lifastuzumab vedotin, bavituximab, acapatamab, capromab, rosopatamab, nezastomig, pasotuxizumab, pelgifatamab, voxalatamab, cofetuzumab pelidotin, denosumab, rosmantuzumab, cirmtuzumab, atinumab, indatuximab ravtansine, elotuzumab, sirtratumab vedotin, sonepcizumab, vandortuzumab vedotin, minretumomab, satumomab pendetide, maslimomab, ontuxizumab, tenatumomab, fresolimumab, metelimumab, lerdelimumab, tezepelumab, etigilimab, tiragotumab, placulumab, prezalumab, infliximab, nerelimomab, ozoralizumab, adalimumab, afelimomab, certolizumab pegol, golimumab, mapatumumab, conatumumab, lexatumumab, tigatuzumab, sacituzumab govitecan, votumumab, pogalizumab, letolizumab, pankomab, anatumomab mafenatox, enavatuzumab, flanvotumab, brolucizumab, ranibizumab, varisacumab, bevacizumab, faricimab, icrucumab, alacizumab pegol, ramucirumab, pritumumab, and onvatilimab;
[6597] VH1 comprises a heavy chain complementarity determining region 1 (HCDR1), HCDR2, and/or HCDR3 of an antibody selected from the group consisting of losatuxizumab vedotin, utomilumab, urelumab, oleclumab, naptumomab estafenatox, ascrinvacumab, pintumomab, tacatuzumab tetraxetan, nesvacumab, vanucizumab, timolumab, vapaliximab, vepalimomab, enapotamab vedotin, ianalumab, belimumab, tabalumab, tibulizumab, belantamab mafodotin, teclistamab, teclistamab, detumomab, nacolomab tafenatox, eculizumab, lendalizumab, pexelizumab, pozelimab, ravulizumab, tesidolumab, vilobelimab, abagovomab, igovomab, oregovomab, sofituzumab vedotin, cantuzumab mertansine, cantuzuma bravtansine, girentuximab, altumomab pentetate, arcitumomab, besilesomab, bertilimumab, plozalizumab, mogamulizumab, leronlimab, PRO140, rovelizumab, rovelizumab, talacotuzumab, benralizumab, tavolimab, vonlerolizumab, gavilimomab, ziralimumab, fanolesomab, ipilimumab, ruplizumab, toralizumab, dapirolizumab pegol, toralizumab, dapirolizumab pegol, ruplizumab, blinatumomab, inebilizumab, loncastuximab tesirine, SGN-CD19A, tafasitamab, taplitumomab paptox, XMAB-5574, Budoprutug, Obexelimab, duvortuxizumab, englumafusp alfa, Emfizatamab, zeripatamig, siplizumab, blontuvetmab, FBTA05, ibritumomab tiuxetan, obinutuzumab, ocaratuzumab, ocrelizumab, ofatumumab, rituximab, tositumomab, ublituximab, veltuzumab, divozilimab, eramkafusp alfa, ripertamab, zuberitamab, glofitamab, nofetumomab merpentan, samalizumab, imvotamab, odronextamab, plamotamab, bectumomab, inotuzumab ozogamicin, moxetumomab pasudotox, pinatuzumab vedotin, gomiliximab, lumiliximab, inolimomab, inolimomab, daclizumab, camidanluma btesirine, basiliximab, varlilumab, omburtamab, enoblituzumab, vopratelimab, lulizumabpegol, TGN1412, muromonab-CD3, otelixizumab, teplizumab, visilizumab, epcoritamab, epcoritamab, brentuximab vedotin, iratumumab, azintuxizumab vedotin, gemtuzumab ozogamicin, lintuzumab, vadastuximab talirine, naratuximab emtansine, otlertuzumab, lilotomab satetraxetan, tetulomab, daratumumab, isatuximab, foralumab, mosunetuzumab, mosunetuzumab, cedelizumab, ibalizumab, keliximab, priliximab, tregalizumab, zanolimumab, bleselumab, iscalimab, lucatumumab, ravagalimab, selicrelumab, teneliximab, vanalimab, abciximab, bivatuzumab, iomab-B, telimomab aritox, zolimomab aritox, abituzumab, intetumumab, alemtuzumab, tamtuvetmab, lorvotuzumab mertansine, itolizumab, cusatuzumab, vorsctuzumab mafodotin, milatuzumab, iladatuzumab vedotin, polatuzumab vedotin, galiximab, cibisatamab, zolbetuximab, naxitamab, tisotumab vedotin, olendalizumab, pamrevlumab, lacnotuzumab, cabiralizumab, emactuzumab, axatilimab, gimsilumab, lenzilumab, namilumab, tremelimumab, ulocuplumab, tepoditamab, rovalpituzumab tesirine, tarlatamab, demcizumab, navicixizumab, drozitumab, parsatuzumab, depatuxizumab mafodotin, modotuximab, carotuximab, adecatumumab, adecatumumab, oportuzumab monatox, solitomab, tucotuzumab celmoleukin, edrecolomab, catumaxomab, ifabotuzumab, fibatuzumab, zalutumumab, panitumumab, cetuximab, futuximab, imgatuzumab, laprituximab emtansine, matuzumab, necitumumab, nimotuzumab, tomuzotuximab, amivantamab, amivantamab, epitumomab cituxetan, sontuzumab, duligotuzumab, elgemtumab, lumretuzumab, patritumab, seribantumab, zenocutuzumab, sibrotuzumab, burosumab, aprutumab ixadotin, radretumab, pasotuxizumab, farletuzumab, mirvetuximab soravtansine, vantictumab, TRBS07, 3F8, dinutuximab, dinutuximab beta, ecromeximab, mitumomab, andecaliximab, capromab, codrituzumab, glembatumumab vedotin, talquetamab, talquetamab, trevogrumab, indusatumab vedotin, ficlatuzumab, rilotumumab, zatuximab, pentuzimab, pentuzimab, margetuximab, timigutuzumab, trastuzumab, trastuzumab duocarmazine, trastuzumab emtansine, gancotamab, pertuzumab, ertumaxomab, emibetuzumab, telisotuzumab, telisotuzumab vedotin, derlotuximab biotin, apolizumab, onartuzumab, bersanlimab, enlimomabpegol, rontalizumab, sifalimumab, talizumab, ganitumab, istiratumab, robatumumab, teprotumumab, figitumumab, ganitumab, istiratumab, robatumumab, teprotumumab, cixutumumab, dalotuzumab, xentuzumab, dusigitumab, canakinumab, ustekinumab, ustekinumab, ustekinumab, briakinumab, briakinumab, abrezekimab, lebrikizumab, romilkimab, TNX-650, tralokinumab, anrukinzumab, brodalumab, ixekizumab, netakimab, perakizumab, secukinumab, vunakizumab, afasevikumab, afasevikumab, bimekizumab, bimekizumab, remtolumab, bermekimab, lutikizumab, lutikizumab, gevokizumab, cergutuzumab amunaleukin, fletikumab, fezakinumab, brazikumab, guselkumab, mirikizumab, tildrakizumab, risankizumab, flotetuzumab, nemolizumab, pascolizumab, dupilumab, mepolizumab, reslizumab, clazakizumab, elsilimomab, olokizumab, sarilumab, siltuximab, sirukumab, vobarilizumab, tocilizumab, SA237, satralizumab, enokizumab, prezalizumab, natalizumab, abrilumab, abrilumab, vedolizumab, volociximab, tadocizumab, etaracizumab, etrolizumab, spesolimab, vatelizumab, erlizumab, lirilumab, relatlimab, cBR96-doxorubicinimmunoconjugate, odulimomab, efalizumab, ladiratuzumab vedotin, simtuzumab, samrotamab vedotin, aselizumab, lupartumab amadotin, imalumab, carlumab, imaprelimab, amatuximab, amatuximab, anetumab ravtansine, narnatumab, clivatuzumab tetraxetan, pemtumomab, gatipotuzumab, ensituximab, lemalesomab, sulesomab, enfortumab vedotin, racotumomab, monalizumab, brontictuzumab, tarextumab, vesencumab, oxelumab, gilvetmab, tislelizumab, dostarlimab, BCD-100, nivolumab, PDR001, pembrolizumab, pidilizumab, retifanlimab, spartalizumab, sintilimab, cemiplimab, olaratumab, tovetumab, rinucumab, atezolizumab, avelumab, durvalumab, lifastuzumab vedotin, bavituximab, acapatamab, capromab, rosopatamab, nezastomig, pasotuxizumab, pelgifatamab, voxalatamab, cofetuzumab pelidotin, denosumab, rosmantuzumab, cirmtuzumab, atinumab, indatuximab ravtansine, elotuzumab, sirtratumab vedotin, sonepcizumab, vandortuzumab vedotin, minretumomab, satumomab pendetide, maslimomab, ontuxizumab, tenatumomab, fresolimumab, metelimumab, lerdelimumab, tezepelumab, etigilimab, tiragotumab, placulumab, prezalumab, infliximab, nerelimomab, ozoralizumab, adalimumab, afelimomab, certolizumab pegol, golimumab, mapatumumab, conatumumab, lexatumumab, tigatuzumab, sacituzumab govitecan, votumumab, pogalizumab, letolizumab, pankomab, anatumomab mafenatox, enavatuzumab, flanvotumab, brolucizumab, ranibizumab, varisacumab, bevacizumab, faricimab, icrucumab, alacizumab pegol, ramucirumab, pritumumab, and onvatilimab;
[6598] VH2 comprises a heavy chain complementarity determining region 1 (HCDR1), HCDR2, and/or HCDR3 of an antibody selected from the group consisting of losatuxizumab vedotin, utomilumab, urelumab, oleclumab, naptumomab estafenatox, ascrinvacumab, pintumomab, tacatuzumab tetraxetan, nesvacumab, vanucizumab, timolumab, vapaliximab, vepalimomab, enapotamab vedotin, ianalumab, belimumab, tabalumab, tibulizumab, belantamab mafodotin, teclistamab, teclistamab, detumomab, nacolomab tafenatox, eculizumab, lendalizumab, pexelizumab, pozelimab, ravulizumab, tesidolumab, vilobelimab, abagovomab, igovomab, oregovomab, sofituzumab vedotin, cantuzumab mertansine, cantuzuma bravtansine, girentuximab, altumomab pentetate, arcitumomab, besilesomab, bertilimumab, plozalizumab, mogamulizumab, leronlimab, PRO140, rovelizumab, rovelizumab, talacotuzumab, benralizumab, tavolimab, vonlerolizumab, gavilimomab, ziralimumab, fanolesomab, ipilimumab, ruplizumab, toralizumab, dapirolizumab pegol, toralizumab, dapirolizumab pegol, ruplizumab, blinatumomab, inebilizumab, loncastuximab tesirine, SGN-CD19A, tafasitamab, taplitumomab paptox, XMAB-5574, Budoprutug, Obexelimab, duvortuxizumab, englumafusp alfa, Emfizatamab, zeripatamig, siplizumab, blontuvetmab, FBTA05, ibritumomab tiuxetan, obinutuzumab, ocaratuzumab, ocrelizumab, ofatumumab, rituximab, tositumomab, ublituximab, veltuzumab, divozilimab, eramkafusp alfa, ripertamab, zuberitamab, glofitamab, nofetumomab merpentan, samalizumab, imvotamab, odronextamab, plamotamab, bectumomab, inotuzumab ozogamicin, moxetumomab pasudotox, pinatuzumab vedotin, gomiliximab, lumiliximab, inolimomab, inolimomab, daclizumab, camidanluma btesirine, basiliximab, varlilumab, omburtamab, enoblituzumab, vopratelimab, lulizumabpegol, TGN1412, muromonab-CD3, otelixizumab, teplizumab, visilizumab, epcoritamab, epcoritamab, brentuximab vedotin, iratumumab, azintuxizumab vedotin, gemtuzumab ozogamicin, lintuzumab, vadastuximab talirine, naratuximab emtansine, otlertuzumab, lilotomab satetraxetan, tetulomab, daratumumab, isatuximab, foralumab, mosunetuzumab, mosunetuzumab, cedelizumab, ibalizumab, keliximab, priliximab, tregalizumab, zanolimumab, bleselumab, iscalimab, lucatumumab, ravagalimab, selicrelumab, teneliximab, vanalimab, abciximab, bivatuzumab, iomab-B, telimomab aritox, zolimomab aritox, abituzumab, intetumumab, alemtuzumab, tamtuvetmab, lorvotuzumab mertansine, itolizumab, cusatuzumab, vorsetuzumab mafodotin, milatuzumab, iladatuzumab vedotin, polatuzumab vedotin, galiximab, cibisatamab, zolbetuximab, naxitamab, tisotumab vedotin, olendalizumab, pamrevlumab, lacnotuzumab, cabiralizumab, emactuzumab, axatilimab, gimsilumab, lenzilumab, namilumab, tremelimumab, ulocuplumab, tepoditamab, rovalpituzumab tesirine, tarlatamab, demcizumab, navicixizumab, drozitumab, parsatuzumab, depatuxizumab mafodotin, modotuximab, carotuximab, adecatumumab, adecatumumab, oportuzumab monatox, solitomab, tucotuzumab celmoleukin, edrecolomab, catumaxomab, ifabotuzumab, fibatuzumab, zalutumumab, panitumumab, cetuximab, futuximab, imgatuzumab, laprituximab emtansine, matuzumab, necitumumab, nimotuzumab, tomuzotuximab, amivantamab, amivantamab, epitumomab cituxetan, sontuzumab, duligotuzumab, elgemtumab, lumretuzumab, patritumab, seribantumab, zenocutuzumab, sibrotuzumab, burosumab, aprutumab ixadotin, radretumab, pasotuxizumab, farletuzumab, mirvetuximab soravtansine, vantictumab, TRBS07, 3F8, dinutuximab, dinutuximab beta, ecromeximab, mitumomab, andecaliximab, capromab, codrituzumab, glembatumumab vedotin, talquetamab, talquetamab, trevogrumab, indusatumab vedotin, ficlatuzumab, rilotumumab, zatuximab, pentuzimab, pentuzimab, margetuximab, timigutuzumab, trastuzumab, trastuzumab duocarmazine, trastuzumab emtansine, gancotamab, pertuzumab, ertumaxomab, emibetuzumab, telisotuzumab, telisotuzumab vedotin, derlotuximab biotin, apolizumab, onartuzumab, bersanlimab, enlimomabpegol, rontalizumab, sifalimumab, talizumab, ganitumab, istiratumab, robatumumab, teprotumumab, figitumumab, ganitumab, istiratumab, robatumumab, teprotumumab, cixutumumab, dalotuzumab, xentuzumab, dusigitumab, canakinumab, ustekinumab, ustekinumab, ustekinumab, briakinumab, briakinumab, abrezekimab, lebrikizumab, romilkimab, TNX-650, tralokinumab, anrukinzumab, brodalumab, ixekizumab, netakimab, perakizumab, secukinumab, vunakizumab, afasevikumab, afasevikumab, bimekizumab, bimekizumab, remtolumab, bermekimab, lutikizumab, lutikizumab, gevokizumab, cergutuzumab amunaleukin, fletikumab, fezakinumab, brazikumab, guselkumab, mirikizumab, tildrakizumab, risankizumab, flotetuzumab, nemolizumab, pascolizumab, dupilumab, mepolizumab, reslizumab, clazakizumab, elsilimomab, olokizumab, sarilumab, siltuximab, sirukumab, vobarilizumab, tocilizumab, SA237, satralizumab, enokizumab, prezalizumab, natalizumab, abrilumab, abrilumab, vedolizumab, volociximab, tadocizumab, etaracizumab, etrolizumab, spesolimab, vatelizumab, erlizumab, lirilumab, relatlimab, cBR96-doxorubicinimmunoconjugate, odulimomab, efalizumab, ladiratuzumab vedotin, simtuzumab, samrotamab vedotin, aselizumab, lupartumab amadotin, imalumab, carlumab, imaprelimab, amatuximab, amatuximab, anetumab ravtansine, narnatumab, clivatuzumab tetraxetan, pemtumomab, gatipotuzumab, ensituximab, lemalesomab, sulesomab, enfortumab vedotin, racotumomab, monalizumab, brontictuzumab, tarextumab, vesencumab, oxelumab, gilvetmab, tislelizumab, dostarlimab, BCD-100, nivolumab, PDR001, pembrolizumab, pidilizumab, retifanlimab, spartalizumab, sintilimab, cemiplimab, olaratumab, tovetumab, rinucumab, atezolizumab, avelumab, durvalumab, lifastuzumab vedotin, bavituximab, acapatamab, capromab, rosopatamab, nezastomig, pasotuxizumab, pelgifatamab, voxalatamab, cofetuzumab pelidotin, denosumab, rosmantuzumab, cirmtuzumab, atinumab, indatuximab ravtansine, elotuzumab, sirtratumab vedotin, sonepcizumab, vandortuzumab vedotin, minretumomab, satumomab pendetide, maslimomab, ontuxizumab, tenatumomab, fresolimumab, metelimumab, lerdelimumab, tezepelumab, etigilimab, tiragotumab, placulumab, prezalumab, infliximab, nerelimomab, ozoralizumab, adalimumab, afelimomab, certolizumab pegol, golimumab, mapatumumab, conatumumab, lexatumumab, tigatuzumab, sacituzumab govitecan, votumumab, pogalizumab, letolizumab, pankomab, anatumomab mafenatox, enavatuzumab, flanvotumab, brolucizumab, ranibizumab, varisacumab, bevacizumab, faricimab, icrucumab, alacizumab pegol, ramucirumab, pritumumab, and onvatilimab;
[6599] VH3 comprises a heavy chain complementarity determining region 1 (HCDR1), HCDR2, and/or HCDR3 of an antibody selected from the group consisting of losatuxizumab vedotin, utomilumab, urelumab, oleclumab, naptumomab estafenatox, ascrinvacumab, pintumomab, tacatuzumab tetraxetan, nesvacumab, vanucizumab, timolumab, vapaliximab, vepalimomab, enapotamab vedotin, ianalumab, belimumab, tabalumab, tibulizumab, belantamab mafodotin, teclistamab, teclistamab, detumomab, nacolomab tafenatox, eculizumab, lendalizumab, pexelizumab, pozelimab, ravulizumab, tesidolumab, vilobelimab, abagovomab, igovomab, oregovomab, sofituzumab vedotin, cantuzumab mertansine, cantuzuma bravtansine, girentuximab, altumomab pentetate, arcitumomab, besilesomab, bertilimumab, plozalizumab, mogamulizumab, leronlimab, PRO140, rovelizumab, rovelizumab, talacotuzumab, benralizumab, tavolimab, vonlerolizumab, gavilimomab, ziralimumab, fanolesomab, ipilimumab, ruplizumab, toralizumab, dapirolizumab pegol, toralizumab, dapirolizumab pegol, ruplizumab, blinatumomab, inebilizumab, loncastuximab tesirine, SGN-CD19A, tafasitamab, taplitumomab paptox, XMAB-5574, Budoprutug, Obexelimab, duvortuxizumab, englumafusp alfa, Emfizatamab, zeripatamig, siplizumab, blontuvetmab, FBTA05, ibritumomab tiuxetan, obinutuzumab, ocaratuzumab, ocrelizumab, ofatumumab, rituximab, tositumomab, ublituximab, veltuzumab, divozilimab, eramkafusp alfa, ripertamab, zuberitamab, glofitamab, nofetumomab merpentan, samalizumab, imvotamab, odronextamab, plamotamab, bectumomab, inotuzumab ozogamicin, moxetumomab pasudotox, pinatuzumab vedotin, gomiliximab, lumiliximab, inolimomab, inolimomab, daclizumab, camidanluma btesirine, basiliximab, varlilumab, omburtamab, enoblituzumab, vopratelimab, lulizumabpegol, TGN1412, muromonab-CD3, otelixizumab, teplizumab, visilizumab, epcoritamab, epcoritamab, brentuximab vedotin, iratumumab, azintuxizumab vedotin, gemtuzumab ozogamicin, lintuzumab, vadastuximab talirine, naratuximab emtansine, otlertuzumab, lilotomab satetraxetan, tetulomab, daratumumab, isatuximab, foralumab, mosunetuzumab, mosunetuzumab, cedelizumab, ibalizumab, keliximab, priliximab, tregalizumab, zanolimumab, bleselumab, iscalimab, lucatumumab, ravagalimab, selicrelumab, teneliximab, vanalimab, abciximab, bivatuzumab, iomab-B, telimomab aritox, zolimomab aritox, abituzumab, intetumumab, alemtuzumab, tamtuvetmab, lorvotuzumab mertansine, itolizumab, cusatuzumab, vorsetuzumab mafodotin, milatuzumab, iladatuzumab vedotin, polatuzumab vedotin, galiximab, cibisatamab, zolbetuximab, naxitamab, tisotumab vedotin, olendalizumab, pamrevlumab, lacnotuzumab, cabiralizumab, emactuzumab, axatilimab, gimsilumab, lenzilumab, namilumab, tremelimumab, ulocuplumab, tepoditamab, rovalpituzumab tesirine, tarlatamab, demcizumab, navicixizumab, drozitumab, parsatuzumab, depatuxizumab mafodotin, modotuximab, carotuximab, adecatumumab, adecatumumab, oportuzumab monatox, solitomab, tucotuzumab celmoleukin, edrecolomab, catumaxomab, ifabotuzumab, fibatuzumab, zalutumumab, panitumumab, cetuximab, futuximab, imgatuzumab, laprituximab emtansine, matuzumab, necitumumab, nimotuzumab, tomuzotuximab, amivantamab, amivantamab, epitumomab cituxetan, sontuzumab, duligotuzumab, elgemtumab, lumretuzumab, patritumab, scribantumab, zenocutuzumab, sibrotuzumab, burosumab, aprutumab ixadotin, radretumab, pasotuxizumab, farletuzumab, mirvetuximab soravtansine, vantictumab, TRBS07, 3F8, dinutuximab, dinutuximab beta, ecromeximab, mitumomab, andecaliximab, capromab, codrituzumab, glembatumumab vedotin, talquetamab, talquetamab, trevogrumab, indusatumab vedotin, ficlatuzumab, rilotumumab, zatuximab, pentuzimab, pentuzimab, margetuximab, timigutuzumab, trastuzumab, trastuzumab duocarmazine, trastuzumab emtansine, gancotamab, pertuzumab, ertumaxomab, emibetuzumab, telisotuzumab, telisotuzumab vedotin, derlotuximab biotin, apolizumab, onartuzumab, bersanlimab, enlimomabpegol, rontalizumab, sifalimumab, talizumab, ganitumab, istiratumab, robatumumab, teprotumumab, figitumumab, ganitumab, istiratumab, robatumumab, teprotumumab, cixutumumab, dalotuzumab, xentuzumab, dusigitumab, canakinumab, ustekinumab, ustekinumab, ustekinumab, briakinumab, briakinumab, abrezckimab, lebrikizumab, romilkimab, TNX-650, tralokinumab, anrukinzumab, brodalumab, ixekizumab, netakimab, perakizumab, secukinumab, vunakizumab, afasevikumab, afasevikumab, bimekizumab, bimekizumab, remtolumab, bermckimab, lutikizumab, lutikizumab, gevokizumab, cergutuzumab amunaleukin, fletikumab, fezakinumab, brazikumab, guselkumab, mirikizumab, tildrakizumab, risankizumab, flotetuzumab, nemolizumab, pascolizumab, dupilumab, mepolizumab, reslizumab, clazakizumab, elsilimomab, olokizumab, sarilumab, siltuximab, sirukumab, vobarilizumab, tocilizumab, SA237, satralizumab, enokizumab, prezalizumab, natalizumab, abrilumab, abrilumab, vedolizumab, volociximab, tadocizumab, etaracizumab, etrolizumab, spesolimab, vatelizumab, erlizumab, lirilumab, relatlimab, cBR96-doxorubicinimmunoconjugate, odulimomab, efalizumab, ladiratuzumab vedotin, simtuzumab, samrotamab vedotin, asclizumab, lupartumab amadotin, imalumab, carlumab, imaprelimab, amatuximab, amatuximab, anetumab ravtansine, narnatumab, clivatuzumab tetraxetan, pemtumomab, gatipotuzumab, ensituximab, lemalesomab, sulesomab, enfortumab vedotin, racotumomab, monalizumab, brontictuzumab, tarextumab, vesencumab, oxelumab, gilvetmab, tislelizumab, dostarlimab, BCD-100, nivolumab, PDR001, pembrolizumab, pidilizumab, retifanlimab, spartalizumab, sintilimab, cemiplimab, olaratumab, tovetumab, rinucumab, atezolizumab, avelumab, durvalumab, lifastuzumab vedotin, bavituximab, acapatamab, capromab, rosopatamab, nezastomig, pasotuxizumab, pelgifatamab, voxalatamab, cofetuzumab pelidotin, denosumab, rosmantuzumab, cirmtuzumab, atinumab, indatuximab ravtansine, elotuzumab, sirtratumab vedotin, sonepcizumab, vandortuzumab vedotin, minretumomab, satumomab pendetide, maslimomab, ontuxizumab, tenatumomab, fresolimumab, metelimumab, lerdelimumab, tezepelumab, etigilimab, tiragotumab, placulumab, prezalumab, infliximab, nerelimomab, ozoralizumab, adalimumab, afelimomab, certolizumab pegol, golimumab, mapatumumab, conatumumab, lexatumumab, tigatuzumab, sacituzumab govitecan, votumumab, pogalizumab, letolizumab, pankomab, anatumomab mafenatox, enavatuzumab, flanvotumab, brolucizumab, ranibizumab, varisacumab, bevacizumab, faricimab, icrucumab, alacizumab pegol, ramucirumab, pritumumab, and onvatilimab; and/or
[6600] VH4 comprises a heavy chain complementarity determining region 1 (HCDR1), HCDR2, and/or HCDR3 of an antibody selected from the group consisting of losatuxizumab vedotin, utomilumab, urelumab, oleclumab, naptumomab estafenatox, ascrinvacumab, pintumomab, tacatuzumab tetraxetan, nesvacumab, vanucizumab, timolumab, vapaliximab, vepalimomab, enapotamab vedotin, ianalumab, belimumab, tabalumab, tibulizumab, belantamab mafodotin, teclistamab, teclistamab, detumomab, nacolomab tafenatox, eculizumab, lendalizumab, pexelizumab, pozelimab, ravulizumab, tesidolumab, vilobelimab, abagovomab, igovomab, oregovomab, sofituzumab vedotin, cantuzumab mertansine, cantuzuma bravtansine, girentuximab, altumomab pentetate, arcitumomab, besilesomab, bertilimumab, plozalizumab, mogamulizumab, leronlimab, PRO140, rovelizumab, rovelizumab, talacotuzumab, benralizumab, tavolimab, vonlerolizumab, gavilimomab, ziralimumab, fanolesomab, ipilimumab, ruplizumab, toralizumab, dapirolizumab pegol, toralizumab, dapirolizumab pegol, ruplizumab, blinatumomab, inebilizumab, loncastuximab tesirine, SGN-CD19A, tafasitamab, taplitumomab paptox, XMAB-5574, Budoprutug, Obexelimab, duvortuxizumab, englumafusp alfa, Emfizatamab, zeripatamig, siplizumab, blontuvetmab, FBTA05, ibritumomab tiuxetan, obinutuzumab, ocaratuzumab, ocrelizumab, ofatumumab, rituximab, tositumomab, ublituximab, veltuzumab, divozilimab, eramkafusp alfa, ripertamab, zuberitamab, glofitamab, nofetumomab merpentan, samalizumab, imvotamab, odronextamab, plamotamab, bectumomab, inotuzumab ozogamicin, moxetumomab pasudotox, pinatuzumab vedotin, gomiliximab, lumiliximab, inolimomab, inolimomab, daclizumab, camidanluma btesirine, basiliximab, varlilumab, omburtamab, enoblituzumab, vopratelimab, lulizumabpegol, TGN1412, muromonab-CD3, otelixizumab, teplizumab, visilizumab, epcoritamab, epcoritamab, brentuximab vedotin, iratumumab, azintuxizumab vedotin, gemtuzumab ozogamicin, lintuzumab, vadastuximab talirine, naratuximab emtansine, otlertuzumab, lilotomab satetraxetan, tetulomab, daratumumab, isatuximab, foralumab, mosunetuzumab, mosunetuzumab, cedelizumab, ibalizumab, keliximab, priliximab, tregalizumab, zanolimumab, bleselumab, iscalimab, lucatumumab, ravagalimab, selicrelumab, teneliximab, vanalimab, abciximab, bivatuzumab, iomab-B, telimomab aritox, zolimomab aritox, abituzumab, intetumumab, alemtuzumab, tamtuvetmab, lorvotuzumab mertansine, itolizumab, cusatuzumab, vorsetuzumab mafodotin, milatuzumab, iladatuzumab vedotin, polatuzumab vedotin, galiximab, cibisatamab, zolbctuximab, naxitamab, tisotumab vedotin, olendalizumab, pamrevlumab, lacnotuzumab, cabiralizumab, emactuzumab, axatilimab, gimsilumab, lenzilumab, namilumab, tremelimumab, ulocuplumab, tepoditamab, rovalpituzumab tesirine, tarlatamab, demcizumab, navicixizumab, drozitumab, parsatuzumab, depatuxizumab mafodotin, modotuximab, carotuximab, adecatumumab, adecatumumab, oportuzumab monatox, solitomab, tucotuzumab celmoleukin, edrecolomab, catumaxomab, ifabotuzumab, fibatuzumab, zalutumumab, panitumumab, cetuximab, futuximab, imgatuzumab, laprituximab emtansine, matuzumab, necitumumab, nimotuzumab, tomuzotuximab, amivantamab, amivantamab, epitumomab cituxetan, sontuzumab, duligotuzumab, elgemtumab, lumretuzumab, patritumab, seribantumab, zenocutuzumab, sibrotuzumab, burosumab, aprutumab ixadotin, radretumab, pasotuxizumab, farletuzumab, mirvetuximab soravtansine, vantictumab, TRBS07, 3F8, dinutuximab, dinutuximab beta, ecromeximab, mitumomab, andecaliximab, capromab, codrituzumab, glembatumumab vedotin, talquetamab, talquetamab, trevogrumab, indusatumab vedotin, ficlatuzumab, rilotumumab, zatuximab, pentuzimab, pentuzimab, margetuximab, timigutuzumab, trastuzumab, trastuzumab duocarmazine, trastuzumab emtansine, gancotamab, pertuzumab, ertumaxomab, emibetuzumab, telisotuzumab, telisotuzumab vedotin, derlotuximab biotin, apolizumab, onartuzumab, bersanlimab, enlimomabpegol, rontalizumab, sifalimumab, talizumab, ganitumab, istiratumab, robatumumab, teprotumumab, figitumumab, ganitumab, istiratumab, robatumumab, teprotumumab, cixutumumab, dalotuzumab, xentuzumab, dusigitumab, canakinumab, ustekinumab, ustekinumab, ustekinumab, briakinumab, briakinumab, abrezekimab, lebrikizumab, romilkimab, TNX-650, tralokinumab, anrukinzumab, brodalumab, ixekizumab, netakimab, perakizumab, secukinumab, vunakizumab, afasevikumab, afasevikumab, bimekizumab, bimekizumab, remtolumab, bermekimab, lutikizumab, lutikizumab, gevokizumab, cergutuzumab amunaleukin, fletikumab, fezakinumab, brazikumab, guselkumab, mirikizumab, tildrakizumab, risankizumab, flotetuzumab, nemolizumab, pascolizumab, dupilumab, mepolizumab, reslizumab, clazakizumab, elsilimomab, olokizumab, sarilumab, siltuximab, sirukumab, vobarilizumab, tocilizumab, SA237, satralizumab, enokizumab, prezalizumab, natalizumab, abrilumab, abrilumab, vedolizumab, volociximab, tadocizumab, etaracizumab, etrolizumab, spesolimab, vatelizumab, erlizumab, lirilumab, relatlimab, cBR96-doxorubicinimmunoconjugate, odulimomab, efalizumab, ladiratuzumab vedotin, simtuzumab, samrotamab vedotin, aselizumab, lupartumab amadotin, imalumab, carlumab, imaprelimab, amatuximab, amatuximab, anetumab ravtansine, narnatumab, clivatuzumab tetraxetan, pemtumomab, gatipotuzumab, ensituximab, lemalesomab, sulesomab, enfortumab vedotin, racotumomab, monalizumab, brontictuzumab, tarextumab, vesencumab, oxelumab, gilvetmab, tislelizumab, dostarlimab, BCD-100, nivolumab, PDR001, pembrolizumab, pidilizumab, retifanlimab, spartalizumab, sintilimab, cemiplimab, olaratumab, tovetumab, rinucumab, atezolizumab, avelumab, durvalumab, lifastuzumab vedotin, bavituximab, acapatamab, capromab, rosopatamab, nezastomig, pasotuxizumab, pelgifatamab, voxalatamab, cofetuzumab pelidotin, denosumab, rosmantuzumab, cirmtuzumab, atinumab, indatuximab ravtansine, elotuzumab, sirtratumab vedotin, sonepcizumab, vandortuzumab vedotin, minretumomab, satumomab pendetide, maslimomab, ontuxizumab, tenatumomab, fresolimumab, metelimumab, lerdelimumab, tezepelumab, etigilimab, tiragotumab, placulumab, prezalumab, infliximab, nerelimomab, ozoralizumab, adalimumab, afelimomab, certolizumab pegol, golimumab, mapatumumab, conatumumab, lexatumumab, tigatuzumab, sacituzumab govitecan, votumumab, pogalizumab, letolizumab, pankomab, anatumomab mafenatox, enavatuzumab, flanvotumab, brolucizumab, ranibizumab, varisacumab, bevacizumab, faricimab, icrucumab, alacizumab pegol, ramucirumab, pritumumab, and onvatilimab; or
[6601] (ii)
[6602] VL1 comprises a VL of an antibody selected from the group consisting of losatuxizumab vedotin, utomilumab, urelumab, oleclumab, naptumomab estafenatox, ascrinvacumab, pintumomab, tacatuzumab tetraxetan, nesvacumab, vanucizumab, timolumab, vapaliximab, vepalimomab, enapotamab vedotin, ianalumab, belimumab, tabalumab, tibulizumab, belantamab mafodotin, teclistamab, teclistamab, detumomab, nacolomab tafenatox, eculizumab, lendalizumab, pexelizumab, pozelimab, ravulizumab, tesidolumab, vilobelimab, abagovomab, igovomab, oregovomab, sofituzumab vedotin, cantuzumab mertansine, cantuzuma bravtansine, girentuximab, altumomab pentetate, arcitumomab, besilesomab, bertilimumab, plozalizumab, mogamulizumab, leronlimab, PRO140, rovelizumab, rovelizumab, talacotuzumab, benralizumab, tavolimab, vonlerolizumab, gavilimomab, ziralimumab, fanolesomab, ipilimumab, ruplizumab, toralizumab, dapirolizumab pegol, toralizumab, dapirolizumab pegol, ruplizumab, blinatumomab, inebilizumab, loncastuximab tesirine, SGN-CD19A, tafasitamab, taplitumomab paptox, XMAB-5574, Budoprutug, Obexelimab, duvortuxizumab, englumafusp alfa, Emfizatamab, zeripatamig, siplizumab, blontuvetmab, FBTA05, ibritumomab tiuxetan, obinutuzumab, ocaratuzumab, ocrelizumab, ofatumumab, rituximab, tositumomab, ublituximab, veltuzumab, divozilimab, eramkafusp alfa, ripertamab, zuberitamab, glofitamab, nofetumomab merpentan, samalizumab, imvotamab, odronextamab, plamotamab, bectumomab, inotuzumab ozogamicin, moxetumomab pasudotox, pinatuzumab vedotin, gomiliximab, lumiliximab, inolimomab, inolimomab, daclizumab, camidanluma btesirine, basiliximab, varlilumab, omburtamab, enoblituzumab, vopratelimab, lulizumabpegol, TGN1412, muromonab-CD3, otelixizumab, teplizumab, visilizumab, epcoritamab, epcoritamab, brentuximab vedotin, iratumumab, azintuxizumab vedotin, gemtuzumab ozogamicin, lintuzumab, vadastuximab talirine, naratuximab emtansine, otlertuzumab, lilotomab satetraxetan, tetulomab, daratumumab, isatuximab, foralumab, mosunetuzumab, mosunetuzumab, cedelizumab, ibalizumab, keliximab, priliximab, tregalizumab, zanolimumab, bleselumab, iscalimab, lucatumumab, ravagalimab, selicrelumab, teneliximab, vanalimab, abciximab, bivatuzumab, iomab-B, telimomab aritox, zolimomab aritox, abituzumab, intetumumab, alemtuzumab, tamtuvetmab, lorvotuzumab mertansine, itolizumab, cusatuzumab, vorsetuzumab mafodotin, milatuzumab, iladatuzumab vedotin, polatuzumab vedotin, galiximab, cibisatamab, zolbetuximab, naxitamab, tisotumab vedotin, olendalizumab, pamrevlumab, lacnotuzumab, cabiralizumab, emactuzumab, axatilimab, gimsilumab, lenzilumab, namilumab, tremelimumab, ulocuplumab, tepoditamab, rovalpituzumab tesirine, tarlatamab, demcizumab, navicixizumab, drozitumab, parsatuzumab, depatuxizumab mafodotin, modotuximab, carotuximab, adecatumumab, adecatumumab, oportuzumab monatox, solitomab, tucotuzumab celmoleukin, edrecolomab, catumaxomab, ifabotuzumab, fibatuzumab, zalutumumab, panitumumab, cetuximab, futuximab, imgatuzumab, laprituximab emtansine, matuzumab, necitumumab, nimotuzumab, tomuzotuximab, amivantamab, amivantamab, epitumomab cituxetan, sontuzumab, duligotuzumab, elgemtumab, lumretuzumab, patritumab, seribantumab, zenocutuzumab, sibrotuzumab, burosumab, aprutumab ixadotin, radretumab, pasotuxizumab, farletuzumab, mirvetuximab soravtansine, vantictumab, TRBS07, 3F8, dinutuximab, dinutuximab beta, ecromeximab, mitumomab, andecaliximab, capromab, codrituzumab, glembatumumab vedotin, talquetamab, talquetamab, trevogrumab, indusatumab vedotin, ficlatuzumab, rilotumumab, zatuximab, pentuzimab, pentuzimab, margetuximab, timigutuzumab, trastuzumab, trastuzumab duocarmazine, trastuzumab emtansine, gancotamab, pertuzumab, ertumaxomab, emibetuzumab, telisotuzumab, telisotuzumab vedotin, derlotuximab biotin, apolizumab, onartuzumab, bersanlimab, enlimomabpegol, rontalizumab, sifalimumab, talizumab, ganitumab, istiratumab, robatumumab, teprotumumab, figitumumab, ganitumab, istiratumab, robatumumab, teprotumumab, cixutumumab, dalotuzumab, xentuzumab, dusigitumab, canakinumab, ustekinumab, ustekinumab, ustekinumab, briakinumab, briakinumab, abrezekimab, lebrikizumab, romilkimab, TNX-650, tralokinumab, anrukinzumab, brodalumab, ixekizumab, netakimab, perakizumab, secukinumab, vunakizumab, afasevikumab, afasevikumab, bimekizumab, bimekizumab, remtolumab, bermekimab, lutikizumab, lutikizumab, gevokizumab, cergutuzumab amunaleukin, fletikumab, fezakinumab, brazikumab, guselkumab, mirikizumab, tildrakizumab, risankizumab, flotetuzumab, nemolizumab, pascolizumab, dupilumab, mepolizumab, reslizumab, clazakizumab, elsilimomab, olokizumab, sarilumab, siltuximab, sirukumab, vobarilizumab, tocilizumab, SA237, satralizumab, enokizumab, prezalizumab, natalizumab, abrilumab, abrilumab, vedolizumab, volociximab, tadocizumab, etaracizumab, etrolizumab, spesolimab, vatelizumab, erlizumab, lirilumab, relatlimab, cBR96-doxorubicinimmunoconjugate, odulimomab, efalizumab, ladiratuzumab vedotin, simtuzumab, samrotamab vedotin, aselizumab, lupartumab amadotin, imalumab, carlumab, imaprelimab, amatuximab, amatuximab, anetumab ravtansine, narnatumab, clivatuzumab tetraxetan, pemtumomab, gatipotuzumab, ensituximab, lemalesomab, sulesomab, enfortumab vedotin, racotumomab, monalizumab, brontictuzumab, tarextumab, vesencumab, oxelumab, gilvetmab, tislelizumab, dostarlimab, BCD-100, nivolumab, PDR001, pembrolizumab, pidilizumab, retifanlimab, spartalizumab, sintilimab, cemiplimab, olaratumab, tovetumab, rinucumab, atezolizumab, avelumab, durvalumab, lifastuzumab vedotin, bavituximab, acapatamab, capromab, rosopatamab, nezastomig, pasotuxizumab, pelgifatamab, voxalatamab, cofetuzumab pelidotin, denosumab, rosmantuzumab, cirmtuzumab, atinumab, indatuximab ravtansine, elotuzumab, sirtratumab vedotin, sonepcizumab, vandortuzumab vedotin, minretumomab, satumomab pendetide, maslimomab, ontuxizumab, tenatumomab, fresolimumab, metelimumab, lerdelimumab, tezepelumab, etigilimab, tiragotumab, placulumab, prezalumab, infliximab, nerelimomab, ozoralizumab, adalimumab, afelimomab, certolizumab pegol, golimumab, mapatumumab, conatumumab, lexatumumab, tigatuzumab, sacituzumab govitecan, votumumab, pogalizumab, letolizumab, pankomab, anatumomab mafenatox, enavatuzumab, flanvotumab, brolucizumab, ranibizumab, varisacumab, bevacizumab, faricimab, icrucumab, alacizumab pegol, ramucirumab, pritumumab, and onvatilimab;
[6603] VL2 comprises a VL of an antibody selected from the group consisting of losatuxizumab vedotin, utomilumab, urelumab, oleclumab, naptumomab estafenatox, ascrinvacumab, pintumomab, tacatuzumab tetraxetan, nesvacumab, vanucizumab, timolumab, vapaliximab, vepalimomab, enapotamab vedotin, ianalumab, belimumab, tabalumab, tibulizumab, belantamab mafodotin, teclistamab, teclistamab, detumomab, nacolomab tafenatox, eculizumab, lendalizumab, pexelizumab, pozelimab, ravulizumab, tesidolumab, vilobelimab, abagovomab, igovomab, oregovomab, sofituzumab vedotin, cantuzumab mertansine, cantuzuma bravtansine, girentuximab, altumomab pentetate, arcitumomab, besilesomab, bertilimumab, plozalizumab, mogamulizumab, leronlimab, PRO140, rovelizumab, rovelizumab, talacotuzumab, benralizumab, tavolimab, vonlerolizumab, gavilimomab, ziralimumab, fanolesomab, ipilimumab, ruplizumab, toralizumab, dapirolizumab pegol, toralizumab, dapirolizumab pegol, ruplizumab, blinatumomab, inebilizumab, loncastuximab tesirine, SGN-CD19A, tafasitamab, taplitumomab paptox, XMAB-5574, Budoprutug, Obexelimab, duvortuxizumab, englumafusp alfa, Emfizatamab, zeripatamig, siplizumab, blontuvetmab, FBTA05, ibritumomab tiuxetan, obinutuzumab, ocaratuzumab, ocrelizumab, ofatumumab, rituximab, tositumomab, ublituximab, veltuzumab, divozilimab, eramkafusp alfa, ripertamab, zuberitamab, glofitamab, nofetumomab merpentan, samalizumab, imvotamab, odronextamab, plamotamab, bectumomab, inotuzumab ozogamicin, moxetumomab pasudotox, pinatuzumab vedotin, gomiliximab, lumiliximab, inolimomab, inolimomab, daclizumab, camidanluma btesirine, basiliximab, varlilumab, omburtamab, enoblituzumab, vopratelimab, lulizumabpegol, TGN1412, muromonab-CD3, otelixizumab, teplizumab, visilizumab, epcoritamab, epcoritamab, brentuximab vedotin, iratumumab, azintuxizumab vedotin, gemtuzumab ozogamicin, lintuzumab, vadastuximab talirine, naratuximab emtansine, otlertuzumab, lilotomab satetraxetan, tetulomab, daratumumab, isatuximab, foralumab, mosunctuzumab, mosunetuzumab, cedelizumab, ibalizumab, keliximab, priliximab, tregalizumab, zanolimumab, bleselumab, iscalimab, lucatumumab, ravagalimab, selicrelumab, teneliximab, vanalimab, abciximab, bivatuzumab, iomab-B, telimomab aritox, zolimomab aritox, abituzumab, intetumumab, alemtuzumab, tamtuvetmab, lorvotuzumab mertansine, itolizumab, cusatuzumab, vorsetuzumab mafodotin, milatuzumab, iladatuzumab vedotin, polatuzumab vedotin, galiximab, cibisatamab, zolbctuximab, naxitamab, tisotumab vedotin, olendalizumab, pamrevlumab, lacnotuzumab, cabiralizumab, emactuzumab, axatilimab, gimsilumab, lenzilumab, namilumab, tremelimumab, ulocuplumab, tepoditamab, rovalpituzumab tesirine, tarlatamab, demcizumab, navicixizumab, drozitumab, parsatuzumab, depatuxizumab mafodotin, modotuximab, carotuximab, adecatumumab, adecatumumab, oportuzumab monatox, solitomab, tucotuzumab celmoleukin, edrecolomab, catumaxomab, ifabotuzumab, fibatuzumab, zalutumumab, panitumumab, cetuximab, futuximab, imgatuzumab, laprituximab emtansine, matuzumab, necitumumab, nimotuzumab, tomuzotuximab, amivantamab, amivantamab, epitumomab cituxetan, sontuzumab, duligotuzumab, elgemtumab, lumretuzumab, patritumab, scribantumab, zenocutuzumab, sibrotuzumab, burosumab, aprutumab ixadotin, radretumab, pasotuxizumab, farletuzumab, mirvetuximab soravtansine, vantictumab, TRBS07, 3F8, dinutuximab, dinutuximab beta, ecromeximab, mitumomab, andecaliximab, capromab, codrituzumab, glembatumumab vedotin, talquetamab, talquetamab, trevogrumab, indusatumab vedotin, ficlatuzumab, rilotumumab, zatuximab, pentuzimab, pentuzimab, margetuximab, timigutuzumab, trastuzumab, trastuzumab duocarmazine, trastuzumab emtansine, gancotamab, pertuzumab, ertumaxomab, emibetuzumab, telisotuzumab, telisotuzumab vedotin, derlotuximab biotin, apolizumab, onartuzumab, bersanlimab, enlimomabpegol, rontalizumab, sifalimumab, talizumab, ganitumab, istiratumab, robatumumab, teprotumumab, figitumumab, ganitumab, istiratumab, robatumumab, teprotumumab, cixutumumab, dalotuzumab, xentuzumab, dusigitumab, canakinumab, ustekinumab, ustekinumab, ustekinumab, briakinumab, briakinumab, abrezekimab, lebrikizumab, romilkimab, TNX-650, tralokinumab, anrukinzumab, brodalumab, ixekizumab, netakimab, perakizumab, secukinumab, vunakizumab, afasevikumab, afasevikumab, bimekizumab, bimekizumab, remtolumab, bermekimab, lutikizumab, lutikizumab, gevokizumab, cergutuzumab amunaleukin, fletikumab, fezakinumab, brazikumab, guselkumab, mirikizumab, tildrakizumab, risankizumab, flotetuzumab, nemolizumab, pascolizumab, dupilumab, mepolizumab, reslizumab, clazakizumab, elsilimomab, olokizumab, sarilumab, siltuximab, sirukumab, vobarilizumab, tocilizumab, SA237, satralizumab, enokizumab, prezalizumab, natalizumab, abrilumab, abrilumab, vedolizumab, volociximab, tadocizumab, etaracizumab, etrolizumab, spesolimab, vatelizumab, erlizumab, lirilumab, relatlimab, cBR96-doxorubicinimmunoconjugate, odulimomab, efalizumab, ladiratuzumab vedotin, simtuzumab, samrotamab vedotin, aselizumab, lupartumab amadotin, imalumab, carlumab, imaprelimab, amatuximab, amatuximab, anetumab ravtansine, narnatumab, clivatuzumab tetraxetan, pemtumomab, gatipotuzumab, ensituximab, lemalesomab, sulesomab, enfortumab vedotin, racotumomab, monalizumab, brontictuzumab, tarextumab, vesencumab, oxelumab, gilvetmab, tislelizumab, dostarlimab, BCD-100, nivolumab, PDR001, pembrolizumab, pidilizumab, retifanlimab, spartalizumab, sintilimab, cemiplimab, olaratumab, tovetumab, rinucumab, atezolizumab, avelumab, durvalumab, lifastuzumab vedotin, bavituximab, acapatamab, capromab, rosopatamab, nezastomig, pasotuxizumab, pelgifatamab, voxalatamab, cofetuzumab pelidotin, denosumab, rosmantuzumab, cirmtuzumab, atinumab, indatuximab ravtansine, elotuzumab, sirtratumab vedotin, sonepcizumab, vandortuzumab vedotin, minretumomab, satumomab pendetide, maslimomab, ontuxizumab, tenatumomab, fresolimumab, metelimumab, lerdelimumab, tezepelumab, etigilimab, tiragotumab, placulumab, prezalumab, infliximab, nerelimomab, ozoralizumab, adalimumab, afelimomab, certolizumab pegol, golimumab, mapatumumab, conatumumab, lexatumumab, tigatuzumab, sacituzumab govitecan, votumumab, pogalizumab, letolizumab, pankomab, anatumomab mafenatox, enavatuzumab, flanvotumab, brolucizumab, ranibizumab, varisacumab, bevacizumab, faricimab, icrucumab, alacizumab pegol, ramucirumab, pritumumab, and onvatilimab;
[6604] VL3 comprises a VL of an antibody selected from the group consisting of losatuxizumab vedotin, utomilumab, urelumab, oleclumab, naptumomab estafenatox, ascrinvacumab, pintumomab, tacatuzumab tetraxetan, nesvacumab, vanucizumab, timolumab, vapaliximab, vepalimomab, enapotamab vedotin, ianalumab, belimumab, tabalumab, tibulizumab, belantamab mafodotin, teclistamab, teclistamab, detumomab, nacolomab tafenatox, eculizumab, lendalizumab, pexelizumab, pozelimab, ravulizumab, tesidolumab, vilobelimab, abagovomab, igovomab, oregovomab, sofituzumab vedotin, cantuzumab mertansine, cantuzuma bravtansine, girentuximab, altumomab pentetate, arcitumomab, besilesomab, bertilimumab, plozalizumab, mogamulizumab, leronlimab, PRO140, rovelizumab, rovelizumab, talacotuzumab, benralizumab, tavolimab, vonlerolizumab, gavilimomab, ziralimumab, fanolesomab, ipilimumab, ruplizumab, toralizumab, dapirolizumab pegol, toralizumab, dapirolizumab pegol, ruplizumab, blinatumomab, inebilizumab, loncastuximab tesirine, SGN-CD19A, tafasitamab, taplitumomab paptox, XMAB-5574, Budoprutug, Obexelimab, duvortuxizumab, englumafusp alfa, Emfizatamab, zeripatamig, siplizumab, blontuvetmab, FBTA05, ibritumomab tiuxetan, obinutuzumab, ocaratuzumab, ocrelizumab, ofatumumab, rituximab, tositumomab, ublituximab, veltuzumab, divozilimab, eramkafusp alfa, ripertamab, zuberitamab, glofitamab, nofetumomab merpentan, samalizumab, imvotamab, odronextamab, plamotamab, bectumomab, inotuzumab ozogamicin, moxetumomab pasudotox, pinatuzumab vedotin, gomiliximab, lumiliximab, inolimomab, inolimomab, daclizumab, camidanluma btesirine, basiliximab, varlilumab, omburtamab, enoblituzumab, vopratelimab, lulizumabpegol, TGN1412, muromonab-CD3, otelixizumab, teplizumab, visilizumab, epcoritamab, epcoritamab, brentuximab vedotin, iratumumab, azintuxizumab vedotin, gemtuzumab ozogamicin, lintuzumab, vadastuximab talirine, naratuximab emtansine, otlertuzumab, lilotomab satetraxetan, tetulomab, daratumumab, isatuximab, foralumab, mosunetuzumab, mosunetuzumab, cedelizumab, ibalizumab, keliximab, priliximab, tregalizumab, zanolimumab, bleselumab, iscalimab, lucatumumab, ravagalimab, selicrelumab, teneliximab, vanalimab, abciximab, bivatuzumab, iomab-B, telimomab aritox, zolimomab aritox, abituzumab, intetumumab, alemtuzumab, tamtuvetmab, lorvotuzumab mertansine, itolizumab, cusatuzumab, vorsetuzumab mafodotin, milatuzumab, iladatuzumab vedotin, polatuzumab vedotin, galiximab, cibisatamab, zolbetuximab, naxitamab, tisotumab vedotin, olendalizumab, pamrevlumab, lacnotuzumab, cabiralizumab, emactuzumab, axatilimab, gimsilumab, lenzilumab, namilumab, tremelimumab, ulocuplumab, tepoditamab, rovalpituzumab tesirine, tarlatamab, demcizumab, navicixizumab, drozitumab, parsatuzumab, depatuxizumab mafodotin, modotuximab, carotuximab, adecatumumab, adecatumumab, oportuzumab monatox, solitomab, tucotuzumab celmoleukin, edrecolomab, catumaxomab, ifabotuzumab, fibatuzumab, zalutumumab, panitumumab, cetuximab, futuximab, imgatuzumab, laprituximab emtansine, matuzumab, necitumumab, nimotuzumab, tomuzotuximab, amivantamab, amivantamab, epitumomab cituxetan, sontuzumab, duligotuzumab, elgemtumab, lumretuzumab, patritumab, seribantumab, zenocutuzumab, sibrotuzumab, burosumab, aprutumab ixadotin, radretumab, pasotuxizumab, farletuzumab, mirvetuximab soravtansine, vantictumab, TRBS07, 3F8, dinutuximab, dinutuximab beta, ecromeximab, mitumomab, andecaliximab, capromab, codrituzumab, glembatumumab vedotin, talquetamab, talquetamab, trevogrumab, indusatumab vedotin, ficlatuzumab, rilotumumab, zatuximab, pentuzimab, pentuzimab, margetuximab, timigutuzumab, trastuzumab, trastuzumab duocarmazine, trastuzumab emtansine, gancotamab, pertuzumab, ertumaxomab, emibetuzumab, telisotuzumab, telisotuzumab vedotin, derlotuximab biotin, apolizumab, onartuzumab, bersanlimab, enlimomabpegol, rontalizumab, sifalimumab, talizumab, ganitumab, istiratumab, robatumumab, teprotumumab, figitumumab, ganitumab, istiratumab, robatumumab, teprotumumab, cixutumumab, dalotuzumab, xentuzumab, dusigitumab, canakinumab, ustekinumab, ustekinumab, ustekinumab, briakinumab, briakinumab, abrezekimab, lebrikizumab, romilkimab, TNX-650, tralokinumab, anrukinzumab, brodalumab, ixekizumab, netakimab, perakizumab, secukinumab, vunakizumab, afasevikumab, afasevikumab, bimekizumab, bimekizumab, remtolumab, bermckimab, lutikizumab, lutikizumab, gevokizumab, cergutuzumab amunaleukin, fletikumab, fezakinumab, brazikumab, guselkumab, mirikizumab, tildrakizumab, risankizumab, flotetuzumab, nemolizumab, pascolizumab, dupilumab, mepolizumab, reslizumab, clazakizumab, elsilimomab, olokizumab, sarilumab, siltuximab, sirukumab, vobarilizumab, tocilizumab, SA237, satralizumab, enokizumab, prezalizumab, natalizumab, abrilumab, abrilumab, vedolizumab, volociximab, tadocizumab, etaracizumab, etrolizumab, spesolimab, vatelizumab, erlizumab, lirilumab, relatlimab, cBR96-doxorubicinimmunoconjugate, odulimomab, efalizumab, ladiratuzumab vedotin, simtuzumab, samrotamab vedotin, asclizumab, lupartumab amadotin, imalumab, carlumab, imaprelimab, amatuximab, amatuximab, anetumab ravtansine, narnatumab, clivatuzumab tetraxetan, pemtumomab, gatipotuzumab, ensituximab, lemalesomab, sulcsomab, enfortumab vedotin, racotumomab, monalizumab, brontictuzumab, tarextumab, vesencumab, oxelumab, gilvetmab, tislelizumab, dostarlimab, BCD-100, nivolumab, PDR001, pembrolizumab, pidilizumab, retifanlimab, spartalizumab, sintilimab, cemiplimab, olaratumab, tovetumab, rinucumab, atezolizumab, avelumab, durvalumab, lifastuzumab vedotin, bavituximab, acapatamab, capromab, rosopatamab, nezastomig, pasotuxizumab, pelgifatamab, voxalatamab, cofetuzumab pelidotin, denosumab, rosmantuzumab, cirmtuzumab, atinumab, indatuximab ravtansine, elotuzumab, sirtratumab vedotin, sonepcizumab, vandortuzumab vedotin, minretumomab, satumomab pendetide, maslimomab, ontuxizumab, tenatumomab, fresolimumab, metelimumab, lerdelimumab, tezepelumab, etigilimab, tiragotumab, placulumab, prezalumab, infliximab, nerelimomab, ozoralizumab, adalimumab, afelimomab, certolizumab pegol, golimumab, mapatumumab, conatumumab, lexatumumab, tigatuzumab, sacituzumab govitecan, votumumab, pogalizumab, letolizumab, pankomab, anatumomab mafenatox, enavatuzumab, flanvotumab, brolucizumab, ranibizumab, varisacumab, bevacizumab, faricimab, icrucumab, alacizumab pegol, ramucirumab, pritumumab, and onvatilimab;
[6605] VL4 comprises a VL of an antibody selected from the group consisting of losatuxizumab vedotin, utomilumab, urelumab, oleclumab, naptumomab estafenatox, ascrinvacumab, pintumomab, tacatuzumab tetraxetan, nesvacumab, vanucizumab, timolumab, vapaliximab, vepalimomab, enapotamab vedotin, ianalumab, belimumab, tabalumab, tibulizumab, belantamab mafodotin, teclistamab, teclistamab, detumomab, nacolomab tafenatox, eculizumab, lendalizumab, pexelizumab, pozelimab, ravulizumab, tesidolumab, vilobelimab, abagovomab, igovomab, oregovomab, sofituzumab vedotin, cantuzumab mertansine, cantuzuma bravtansine, girentuximab, altumomab pentetate, arcitumomab, besilesomab, bertilimumab, plozalizumab, mogamulizumab, leronlimab, PRO140, rovelizumab, rovelizumab, talacotuzumab, benralizumab, tavolimab, vonlerolizumab, gavilimomab, ziralimumab, fanolesomab, ipilimumab, ruplizumab, toralizumab, dapirolizumab pegol, toralizumab, dapirolizumab pegol, ruplizumab, blinatumomab, inebilizumab, loncastuximab tesirine, SGN-CD19A, tafasitamab, taplitumomab paptox, XMAB-5574, Budoprutug, Obexelimab, duvortuxizumab, englumafusp alfa, Emfizatamab, zcripatamig, siplizumab, blontuvetmab, FBTA05, ibritumomab tiuxetan, obinutuzumab, ocaratuzumab, ocrelizumab, ofatumumab, rituximab, tositumomab, ublituximab, veltuzumab, divozilimab, eramkafusp alfa, ripertamab, zuberitamab, glofitamab, nofetumomab merpentan, samalizumab, imvotamab, odronextamab, plamotamab, bectumomab, inotuzumab ozogamicin, moxetumomab pasudotox, pinatuzumab vedotin, gomiliximab, lumiliximab, inolimomab, inolimomab, daclizumab, camidanluma btesirine, basiliximab, varlilumab, omburtamab, enoblituzumab, vopratelimab, lulizumabpegol, TGN1412, muromonab-CD3, otelixizumab, teplizumab, visilizumab, epcoritamab, epcoritamab, brentuximab vedotin, iratumumab, azintuxizumab vedotin, gemtuzumab ozogamicin, lintuzumab, vadastuximab talirine, naratuximab emtansine, otlertuzumab, lilotomab satetraxetan, tetulomab, daratumumab, isatuximab, foralumab, mosunetuzumab, mosunetuzumab, cedelizumab, ibalizumab, keliximab, priliximab, tregalizumab, zanolimumab, bleselumab, iscalimab, lucatumumab, ravagalimab, selicrelumab, teneliximab, vanalimab, abciximab, bivatuzumab, iomab-B, telimomab aritox, zolimomab aritox, abituzumab, intetumumab, alemtuzumab, tamtuvetmab, lorvotuzumab mertansine, itolizumab, cusatuzumab, vorsetuzumab mafodotin, milatuzumab, iladatuzumab vedotin, polatuzumab vedotin, galiximab, cibisatamab, zolbctuximab, naxitamab, tisotumab vedotin, olendalizumab, pamrevlumab, lacnotuzumab, cabiralizumab, emactuzumab, axatilimab, gimsilumab, lenzilumab, namilumab, tremelimumab, ulocuplumab, tepoditamab, rovalpituzumab tesirine, tarlatamab, demcizumab, navicixizumab, drozitumab, parsatuzumab, depatuxizumab mafodotin, modotuximab, carotuximab, adecatumumab, adecatumumab, oportuzumab monatox, solitomab, tucotuzumab celmoleukin, edrecolomab, catumaxomab, ifabotuzumab, fibatuzumab, zalutumumab, panitumumab, cetuximab, futuximab, imgatuzumab, laprituximab emtansine, matuzumab, necitumumab, nimotuzumab, tomuzotuximab, amivantamab, amivantamab, epitumomab cituxetan, sontuzumab, duligotuzumab, elgemtumab, lumretuzumab, patritumab, seribantumab, zenocutuzumab, sibrotuzumab, burosumab, aprutumab ixadotin, radretumab, pasotuxizumab, farletuzumab, mirvetuximab soravtansine, vantictumab, TRBS07, 3F8, dinutuximab, dinutuximab beta, ecromeximab, mitumomab, andecaliximab, capromab, codrituzumab, glembatumumab vedotin, talquetamab, talquetamab, trevogrumab, indusatumab vedotin, ficlatuzumab, rilotumumab, zatuximab, pentuzimab, pentuzimab, margetuximab, timigutuzumab, trastuzumab, trastuzumab duocarmazine, trastuzumab emtansine, gancotamab, pertuzumab, ertumaxomab, emibetuzumab, telisotuzumab, telisotuzumab vedotin, derlotuximab biotin, apolizumab, onartuzumab, bersanlimab, enlimomabpegol, rontalizumab, sifalimumab, talizumab, ganitumab, istiratumab, robatumumab, teprotumumab, figitumumab, ganitumab, istiratumab, robatumumab, teprotumumab, cixutumumab, dalotuzumab, xentuzumab, dusigitumab, canakinumab, ustekinumab, ustekinumab, ustekinumab, briakinumab, briakinumab, abrezekimab, lebrikizumab, romilkimab, TNX-650, tralokinumab, anrukinzumab, brodalumab, ixekizumab, netakimab, perakizumab, secukinumab, vunakizumab, afasevikumab, afasevikumab, bimekizumab, bimekizumab, remtolumab, bermckimab, lutikizumab, lutikizumab, gevokizumab, cergutuzumab amunaleukin, fletikumab, fezakinumab, brazikumab, guselkumab, mirikizumab, tildrakizumab, risankizumab, flotetuzumab, nemolizumab, pascolizumab, dupilumab, mepolizumab, reslizumab, clazakizumab, elsilimomab, olokizumab, sarilumab, siltuximab, sirukumab, vobarilizumab, tocilizumab, SA237, satralizumab, enokizumab, prezalizumab, natalizumab, abrilumab, abrilumab, vedolizumab, volociximab, tadocizumab, etaracizumab, etrolizumab, spesolimab, vatelizumab, crlizumab, lirilumab, relatlimab, cBR96-doxorubicinimmunoconjugate, odulimomab, efalizumab, ladiratuzumab vedotin, simtuzumab, samrotamab vedotin, aselizumab, lupartumab amadotin, imalumab, carlumab, imaprelimab, amatuximab, amatuximab, anctumab ravtansine, narnatumab, clivatuzumab tetraxetan, pemtumomab, gatipotuzumab, ensituximab, lemalesomab, sulesomab, enfortumab vedotin, racotumomab, monalizumab, brontictuzumab, tarextumab, vesencumab, oxelumab, gilvetmab, tislelizumab, dostarlimab, BCD-100, nivolumab, PDR001, pembrolizumab, pidilizumab, retifanlimab, spartalizumab, sintilimab, cemiplimab, olaratumab, tovetumab, rinucumab, atezolizumab, avelumab, durvalumab, lifastuzumab vedotin, bavituximab, acapatamab, capromab, rosopatamab, nezastomig, pasotuxizumab, pelgifatamab, voxalatamab, cofetuzumab pelidotin, denosumab, rosmantuzumab, cirmtuzumab, atinumab, indatuximab ravtansine, elotuzumab, sirtratumab vedotin, sonepcizumab, vandortuzumab vedotin, minretumomab, satumomab pendetide, maslimomab, ontuxizumab, tenatumomab, fresolimumab, metelimumab, lerdelimumab, tezepelumab, etigilimab, tiragotumab, placulumab, prezalumab, infliximab, nerelimomab, ozoralizumab, adalimumab, afelimomab, certolizumab pegol, golimumab, mapatumumab, conatumumab, lexatumumab, tigatuzumab, sacituzumab govitecan, votumumab, pogalizumab, letolizumab, pankomab, anatumomab mafenatox, enavatuzumab, flanvotumab, brolucizumab, ranibizumab, varisacumab, bevacizumab, faricimab, icrucumab, alacizumab pegol, ramucirumab, pritumumab, and onvatilimab;
[6606] VH1 comprises a VH of an antibody selected from the group consisting of losatuxizumab vedotin, utomilumab, urelumab, oleclumab, naptumomab estafenatox, ascrinvacumab, pintumomab, tacatuzumab tetraxetan, nesvacumab, vanucizumab, timolumab, vapaliximab, vepalimomab, enapotamab vedotin, ianalumab, bclimumab, tabalumab, tibulizumab, belantamab mafodotin, teclistamab, teclistamab, detumomab, nacolomab tafenatox, eculizumab, lendalizumab, pexelizumab, pozelimab, ravulizumab, tesidolumab, vilobelimab, abagovomab, igovomab, oregovomab, sofituzumab vedotin, cantuzumab mertansine, cantuzuma bravtansine, girentuximab, altumomab pentetate, arcitumomab, besilesomab, bertilimumab, plozalizumab, mogamulizumab, leronlimab, PRO140, rovelizumab, rovelizumab, talacotuzumab, benralizumab, tavolimab, vonlerolizumab, gavilimomab, ziralimumab, fanolesomab, ipilimumab, ruplizumab, toralizumab, dapirolizumab pegol, toralizumab, dapirolizumab pegol, ruplizumab, blinatumomab, inebilizumab, loncastuximab tesirine, SGN-CD19A, tafasitamab, taplitumomab paptox, XMAB-5574, Budoprutug, Obexelimab, duvortuxizumab, englumafusp alfa, Emfizatamab, zeripatamig, siplizumab, blontuvetmab, FBTA05, ibritumomab tiuxetan, obinutuzumab, ocaratuzumab, ocrelizumab, ofatumumab, rituximab, tositumomab, ublituximab, veltuzumab, divozilimab, eramkafusp alfa, ripertamab, zuberitamab, glofitamab, nofetumomab merpentan, samalizumab, imvotamab, odronextamab, plamotamab, bectumomab, inotuzumab ozogamicin, moxetumomab pasudotox, pinatuzumab vedotin, gomiliximab, lumiliximab, inolimomab, inolimomab, daclizumab, camidanluma btesirine, basiliximab, varlilumab, omburtamab, enoblituzumab, vopratelimab, lulizumabpegol, TGN1412, muromonab-CD3, otelixizumab, teplizumab, visilizumab, epcoritamab, epcoritamab, brentuximab vedotin, iratumumab, azintuxizumab vedotin, gemtuzumab ozogamicin, lintuzumab, vadastuximab talirine, naratuximab emtansine, otlertuzumab, lilotomab satetraxetan, tetulomab, daratumumab, isatuximab, foralumab, mosunctuzumab, mosunetuzumab, cedelizumab, ibalizumab, keliximab, priliximab, tregalizumab, zanolimumab, bleselumab, iscalimab, lucatumumab, ravagalimab, selicrelumab, teneliximab, vanalimab, abciximab, bivatuzumab, iomab-B, telimomab aritox, zolimomab aritox, abituzumab, intetumumab, alemtuzumab, tamtuvetmab, lorvotuzumab mertansine, itolizumab, cusatuzumab, vorsetuzumab mafodotin, milatuzumab, iladatuzumab vedotin, polatuzumab vedotin, galiximab, cibisatamab, zolbetuximab, naxitamab, tisotumab vedotin, olendalizumab, pamrevlumab, lacnotuzumab, cabiralizumab, emactuzumab, axatilimab, gimsilumab, lenzilumab, namilumab, tremelimumab, ulocuplumab, tepoditamab, rovalpituzumab tesirine, tarlatamab, demcizumab, navicixizumab, drozitumab, parsatuzumab, depatuxizumab mafodotin, modotuximab, carotuximab, adecatumumab, adecatumumab, oportuzumab monatox, solitomab, tucotuzumab celmoleukin, edrecolomab, catumaxomab, ifabotuzumab, fibatuzumab, zalutumumab, panitumumab, cetuximab, futuximab, imgatuzumab, laprituximab emtansine, matuzumab, necitumumab, nimotuzumab, tomuzotuximab, amivantamab, amivantamab, epitumomab cituxetan, sontuzumab, duligotuzumab, elgemtumab, lumretuzumab, patritumab, seribantumab, zenocutuzumab, sibrotuzumab, burosumab, aprutumab ixadotin, radretumab, pasotuxizumab, farletuzumab, mirvetuximab soravtansine, vantictumab, TRBS07, 3F8, dinutuximab, dinutuximab beta, ecromeximab, mitumomab, andecaliximab, capromab, codrituzumab, glembatumumab vedotin, talquetamab, talquetamab, trevogrumab, indusatumab vedotin, ficlatuzumab, rilotumumab, zatuximab, pentuzimab, pentuzimab, margetuximab, timigutuzumab, trastuzumab, trastuzumab duocarmazine, trastuzumab emtansine, gancotamab, pertuzumab, ertumaxomab, emibetuzumab, telisotuzumab, telisotuzumab vedotin, derlotuximab biotin, apolizumab, onartuzumab, bersanlimab, enlimomabpegol, rontalizumab, sifalimumab, talizumab, ganitumab, istiratumab, robatumumab, teprotumumab, figitumumab, ganitumab, istiratumab, robatumumab, teprotumumab, cixutumumab, dalotuzumab, xentuzumab, dusigitumab, canakinumab, ustekinumab, ustekinumab, ustekinumab, briakinumab, briakinumab, abrezekimab, lebrikizumab, romilkimab, TNX-650, tralokinumab, anrukinzumab, brodalumab, ixekizumab, netakimab, perakizumab, secukinumab, vunakizumab, afasevikumab, afasevikumab, bimekizumab, bimekizumab, remtolumab, bermekimab, lutikizumab, lutikizumab, gevokizumab, cergutuzumab amunaleukin, fletikumab, fezakinumab, brazikumab, guselkumab, mirikizumab, tildrakizumab, risankizumab, flotetuzumab, nemolizumab, pascolizumab, dupilumab, mepolizumab, reslizumab, clazakizumab, elsilimomab, olokizumab, sarilumab, siltuximab, sirukumab, vobarilizumab, tocilizumab, SA237, satralizumab, enokizumab, prezalizumab, natalizumab, abrilumab, abrilumab, vedolizumab, volociximab, tadocizumab, etaracizumab, etrolizumab, spesolimab, vatelizumab, erlizumab, lirilumab, relatlimab, cBR96-doxorubicinimmunoconjugate, odulimomab, efalizumab, ladiratuzumab vedotin, simtuzumab, samrotamab vedotin, aselizumab, lupartumab amadotin, imalumab, carlumab, imaprelimab, amatuximab, amatuximab, anetumab ravtansine, narnatumab, clivatuzumab tetraxetan, pemtumomab, gatipotuzumab, ensituximab, lemalesomab, sulesomab, enfortumab vedotin, racotumomab, monalizumab, brontictuzumab, tarextumab, vesencumab, oxelumab, gilvetmab, tislelizumab, dostarlimab, BCD-100, nivolumab, PDR001, pembrolizumab, pidilizumab, retifanlimab, spartalizumab, sintilimab, cemiplimab, olaratumab, tovetumab, rinucumab, atezolizumab, avelumab, durvalumab, lifastuzumab vedotin, bavituximab, acapatamab, capromab, rosopatamab, nezastomig, pasotuxizumab, pelgifatamab, voxalatamab, cofetuzumab pelidotin, denosumab, rosmantuzumab, cirmtuzumab, atinumab, indatuximab ravtansine, elotuzumab, sirtratumab vedotin, sonepcizumab, vandortuzumab vedotin, minretumomab, satumomab pendetide, maslimomab, ontuxizumab, tenatumomab, fresolimumab, metelimumab, lerdelimumab, tezepelumab, etigilimab, tiragotumab, placulumab, prezalumab, infliximab, nerelimomab, ozoralizumab, adalimumab, afelimomab, certolizumab pegol, golimumab, mapatumumab, conatumumab, lexatumumab, tigatuzumab, sacituzumab govitecan, votumumab, pogalizumab, letolizumab, pankomab, anatumomab mafenatox, enavatuzumab, flanvotumab, brolucizumab, ranibizumab, varisacumab, bevacizumab, faricimab, icrucumab, alacizumab pegol, ramucirumab, pritumumab, and onvatilimab;
[6607] VH2 comprises a VH of an antibody selected from the group consisting of losatuxizumab vedotin, utomilumab, urelumab, oleclumab, naptumomab estafenatox, ascrinvacumab, pintumomab, tacatuzumab tetraxetan, nesvacumab, vanucizumab, timolumab, vapaliximab, vepalimomab, enapotamab vedotin, ianalumab, belimumab, tabalumab, tibulizumab, belantamab mafodotin, teclistamab, teclistamab, detumomab, nacolomab tafenatox, eculizumab, lendalizumab, pexelizumab, pozelimab, ravulizumab, tesidolumab, vilobelimab, abagovomab, igovomab, oregovomab, sofituzumab vedotin, cantuzumab mertansine, cantuzuma bravtansine, girentuximab, altumomab pentetate, arcitumomab, besilesomab, bertilimumab, plozalizumab, mogamulizumab, leronlimab, PRO140, rovelizumab, rovelizumab, talacotuzumab, benralizumab, tavolimab, vonlerolizumab, gavilimomab, ziralimumab, fanolesomab, ipilimumab, ruplizumab, toralizumab, dapirolizumab pegol, toralizumab, dapirolizumab pegol, ruplizumab, blinatumomab, inebilizumab, loncastuximab tesirine, SGN-CD19A, tafasitamab, taplitumomab paptox, XMAB-5574, Budoprutug, Obexelimab, duvortuxizumab, englumafusp alfa, Emfizatamab, zeripatamig, siplizumab, blontuvetmab, FBTA05, ibritumomab tiuxetan, obinutuzumab, ocaratuzumab, ocrelizumab, ofatumumab, rituximab, tositumomab, ublituximab, veltuzumab, divozilimab, eramkafusp alfa, ripertamab, zuberitamab, glofitamab, nofetumomab merpentan, samalizumab, imvotamab, odronextamab, plamotamab, bectumomab, inotuzumab ozogamicin, moxetumomab pasudotox, pinatuzumab vedotin, gomiliximab, lumiliximab, inolimomab, inolimomab, daclizumab, camidanluma btesirine, basiliximab, varlilumab, omburtamab, enoblituzumab, vopratelimab, lulizumabpegol, TGN1412, muromonab-CD3, otelixizumab, teplizumab, visilizumab, epcoritamab, epcoritamab, brentuximab vedotin, iratumumab, azintuxizumab vedotin, gemtuzumab ozogamicin, lintuzumab, vadastuximab talirine, naratuximab emtansine, otlertuzumab, lilotomab satetraxetan, tetulomab, daratumumab, isatuximab, foralumab, mosunctuzumab, mosunetuzumab, cedelizumab, ibalizumab, keliximab, priliximab, tregalizumab, zanolimumab, bleselumab, iscalimab, lucatumumab, ravagalimab, selicrelumab, teneliximab, vanalimab, abciximab, bivatuzumab, iomab-B, telimomab aritox, zolimomab aritox, abituzumab, intetumumab, alemtuzumab, tamtuvetmab, lorvotuzumab mertansine, itolizumab, cusatuzumab, vorsetuzumab mafodotin, milatuzumab, iladatuzumab vedotin, polatuzumab vedotin, galiximab, cibisatamab, zolbctuximab, naxitamab, tisotumab vedotin, olendalizumab, pamrevlumab, lacnotuzumab, cabiralizumab, emactuzumab, axatilimab, gimsilumab, lenzilumab, namilumab, tremelimumab, ulocuplumab, tepoditamab, rovalpituzumab tesirine, tarlatamab, demcizumab, navicixizumab, drozitumab, parsatuzumab, depatuxizumab mafodotin, modotuximab, carotuximab, adecatumumab, adecatumumab, oportuzumab monatox, solitomab, tucotuzumab celmoleukin, edrecolomab, catumaxomab, ifabotuzumab, fibatuzumab, zalutumumab, panitumumab, cetuximab, futuximab, imgatuzumab, laprituximab emtansine, matuzumab, necitumumab, nimotuzumab, tomuzotuximab, amivantamab, amivantamab, epitumomab cituxetan, sontuzumab, duligotuzumab, elgemtumab, lumretuzumab, patritumab, scribantumab, zenocutuzumab, sibrotuzumab, burosumab, aprutumab ixadotin, radretumab, pasotuxizumab, farletuzumab, mirvetuximab soravtansine, vantictumab, TRBS07, 3F8, dinutuximab, dinutuximab beta, ecromeximab, mitumomab, andecaliximab, capromab, codrituzumab, glembatumumab vedotin, talquetamab, talquetamab, trevogrumab, indusatumab vedotin, ficlatuzumab, rilotumumab, zatuximab, pentuzimab, pentuzimab, margetuximab, timigutuzumab, trastuzumab, trastuzumab duocarmazine, trastuzumab emtansine, gancotamab, pertuzumab, ertumaxomab, emibetuzumab, telisotuzumab, telisotuzumab vedotin, derlotuximab biotin, apolizumab, onartuzumab, bersanlimab, enlimomabpegol, rontalizumab, sifalimumab, talizumab, ganitumab, istiratumab, robatumumab, teprotumumab, figitumumab, ganitumab, istiratumab, robatumumab, teprotumumab, cixutumumab, dalotuzumab, xentuzumab, dusigitumab, canakinumab, ustekinumab, ustekinumab, ustekinumab, briakinumab, briakinumab, abrezekimab, lebrikizumab, romilkimab, TNX-650, tralokinumab, anrukinzumab, brodalumab, ixekizumab, netakimab, perakizumab, secukinumab, vunakizumab, afasevikumab, afasevikumab, bimekizumab, bimekizumab, remtolumab, bermekimab, lutikizumab, lutikizumab, gevokizumab, cergutuzumab amunaleukin, fletikumab, fezakinumab, brazikumab, guselkumab, mirikizumab, tildrakizumab, risankizumab, flotetuzumab, nemolizumab, pascolizumab, dupilumab, mepolizumab, reslizumab, clazakizumab, elsilimomab, olokizumab, sarilumab, siltuximab, sirukumab, vobarilizumab, tocilizumab, SA237, satralizumab, enokizumab, prezalizumab, natalizumab, abrilumab, abrilumab, vedolizumab, volociximab, tadocizumab, etaracizumab, etrolizumab, spesolimab, vatelizumab, erlizumab, lirilumab, relatlimab, cBR96-doxorubicinimmunoconjugate, odulimomab, efalizumab, ladiratuzumab vedotin, simtuzumab, samrotamab vedotin, aselizumab, lupartumab amadotin, imalumab, carlumab, imaprelimab, amatuximab, amatuximab, anetumab ravtansine, narnatumab, clivatuzumab tetraxetan, pemtumomab, gatipotuzumab, ensituximab, lemalesomab, sulesomab, enfortumab vedotin, racotumomab, monalizumab, brontictuzumab, tarextumab, vesencumab, oxelumab, gilvetmab, tislelizumab, dostarlimab, BCD-100, nivolumab, PDR001, pembrolizumab, pidilizumab, retifanlimab, spartalizumab, sintilimab, cemiplimab, olaratumab, tovetumab, rinucumab, atezolizumab, avelumab, durvalumab, lifastuzumab vedotin, bavituximab, acapatamab, capromab, rosopatamab, nezastomig, pasotuxizumab, pelgifatamab, voxalatamab, cofetuzumab pelidotin, denosumab, rosmantuzumab, cirmtuzumab, atinumab, indatuximab ravtansine, elotuzumab, sirtratumab vedotin, sonepcizumab, vandortuzumab vedotin, minretumomab, satumomab pendetide, maslimomab, ontuxizumab, tenatumomab, fresolimumab, metelimumab, lerdelimumab, tezepelumab, etigilimab, tiragotumab, placulumab, prezalumab, infliximab, nerelimomab, ozoralizumab, adalimumab, afelimomab, certolizumab pegol, golimumab, mapatumumab, conatumumab, lexatumumab, tigatuzumab, sacituzumab govitecan, votumumab, pogalizumab, letolizumab, pankomab, anatumomab mafenatox, enavatuzumab, flanvotumab, brolucizumab, ranibizumab, varisacumab, bevacizumab, faricimab, icrucumab, alacizumab pegol, ramucirumab, pritumumab, and onvatilimab;
[6608] VH3 comprises a VH of an antibody selected from the group consisting of losatuxizumab vedotin, utomilumab, urelumab, oleclumab, naptumomab estafenatox, ascrinvacumab, pintumomab, tacatuzumab tetraxetan, nesvacumab, vanucizumab, timolumab, vapaliximab, vepalimomab, enapotamab vedotin, ianalumab, belimumab, tabalumab, tibulizumab, belantamab mafodotin, teclistamab, teclistamab, detumomab, nacolomab tafenatox, eculizumab, lendalizumab, pexelizumab, pozelimab, ravulizumab, tesidolumab, vilobelimab, abagovomab, igovomab, oregovomab, sofituzumab vedotin, cantuzumab mertansine, cantuzuma bravtansine, girentuximab, altumomab pentetate, arcitumomab, besilesomab, bertilimumab, plozalizumab, mogamulizumab, leronlimab, PRO140, rovelizumab, rovelizumab, talacotuzumab, benralizumab, tavolimab, vonlerolizumab, gavilimomab, ziralimumab, fanolesomab, ipilimumab, ruplizumab, toralizumab, dapirolizumab pegol, toralizumab, dapirolizumab pegol, ruplizumab, blinatumomab, inebilizumab, loncastuximab tesirine, SGN-CD19A, tafasitamab, taplitumomab paptox, XMAB-5574, Budoprutug, Obexelimab, duvortuxizumab, englumafusp alfa, Emfizatamab, zeripatamig, siplizumab, blontuvetmab, FBTA05, ibritumomab tiuxetan, obinutuzumab, ocaratuzumab, ocrelizumab, ofatumumab, rituximab, tositumomab, ublituximab, veltuzumab, divozilimab, eramkafusp alfa, ripertamab, zuberitamab, glofitamab, nofetumomab merpentan, samalizumab, imvotamab, odronextamab, plamotamab, bectumomab, inotuzumab ozogamicin, moxetumomab pasudotox, pinatuzumab vedotin, gomiliximab, lumiliximab, inolimomab, inolimomab, daclizumab, camidanluma btesirine, basiliximab, varlilumab, omburtamab, enoblituzumab, vopratelimab, lulizumabpegol, TGN1412, muromonab-CD3, otelixizumab, teplizumab, visilizumab, epcoritamab, epcoritamab, brentuximab vedotin, iratumumab, azintuxizumab vedotin, gemtuzumab ozogamicin, lintuzumab, vadastuximab talirine, naratuximab emtansine, otlertuzumab, lilotomab satetraxetan, tetulomab, daratumumab, isatuximab, foralumab, mosunetuzumab, mosunetuzumab, cedelizumab, ibalizumab, keliximab, priliximab, tregalizumab, zanolimumab, bleselumab, iscalimab, lucatumumab, ravagalimab, selicrelumab, teneliximab, vanalimab, abciximab, bivatuzumab, iomab-B, telimomab aritox, zolimomab aritox, abituzumab, intetumumab, alemtuzumab, tamtuvetmab, lorvotuzumab mertansine, itolizumab, cusatuzumab, vorsetuzumab mafodotin, milatuzumab, iladatuzumab vedotin, polatuzumab vedotin, galiximab, cibisatamab, zolbetuximab, naxitamab, tisotumab vedotin, olendalizumab, pamrevlumab, lacnotuzumab, cabiralizumab, emactuzumab, axatilimab, gimsilumab, lenzilumab, namilumab, tremelimumab, ulocuplumab, tepoditamab, rovalpituzumab tesirine, tarlatamab, demcizumab, navicixizumab, drozitumab, parsatuzumab, depatuxizumab mafodotin, modotuximab, carotuximab, adecatumumab, adecatumumab, oportuzumab monatox, solitomab, tucotuzumab celmoleukin, edrecolomab, catumaxomab, ifabotuzumab, fibatuzumab, zalutumumab, panitumumab, cetuximab, futuximab, imgatuzumab, laprituximab emtansine, matuzumab, necitumumab, nimotuzumab, tomuzotuximab, amivantamab, amivantamab, epitumomab cituxetan, sontuzumab, duligotuzumab, elgemtumab, lumretuzumab, patritumab, seribantumab, zenocutuzumab, sibrotuzumab, burosumab, aprutumab ixadotin, radretumab, pasotuxizumab, farletuzumab, mirvetuximab soravtansine, vantictumab, TRBS07, 3F8, dinutuximab, dinutuximab beta, ecromeximab, mitumomab, andecaliximab, capromab, codrituzumab, glembatumumab vedotin, talquetamab, talquetamab, trevogrumab, indusatumab vedotin, ficlatuzumab, rilotumumab, zatuximab, pentuzimab, pentuzimab, margetuximab, timigutuzumab, trastuzumab, trastuzumab duocarmazine, trastuzumab emtansine, gancotamab, pertuzumab, ertumaxomab, emibetuzumab, telisotuzumab, telisotuzumab vedotin, derlotuximab biotin, apolizumab, onartuzumab, bersanlimab, enlimomabpegol, rontalizumab, sifalimumab, talizumab, ganitumab, istiratumab, robatumumab, teprotumumab, figitumumab, ganitumab, istiratumab, robatumumab, teprotumumab, cixutumumab, dalotuzumab, xentuzumab, dusigitumab, canakinumab, ustekinumab, ustekinumab, ustekinumab, briakinumab, briakinumab, abrezekimab, lebrikizumab, romilkimab, TNX-650, tralokinumab, anrukinzumab, brodalumab, ixekizumab, netakimab, perakizumab, secukinumab, vunakizumab, afasevikumab, afasevikumab, bimekizumab, bimekizumab, remtolumab, bermckimab, lutikizumab, lutikizumab, gevokizumab, cergutuzumab amunaleukin, fletikumab, fezakinumab, brazikumab, guselkumab, mirikizumab, tildrakizumab, risankizumab, flotetuzumab, nemolizumab, pascolizumab, dupilumab, mepolizumab, reslizumab, clazakizumab, elsilimomab, olokizumab, sarilumab, siltuximab, sirukumab, vobarilizumab, tocilizumab, SA237, satralizumab, enokizumab, prezalizumab, natalizumab, abrilumab, abrilumab, vedolizumab, volociximab, tadocizumab, etaracizumab, etrolizumab, spesolimab, vatelizumab, erlizumab, lirilumab, relatlimab, cBR96-doxorubicinimmunoconjugate, odulimomab, efalizumab, ladiratuzumab vedotin, simtuzumab, samrotamab vedotin, asclizumab, lupartumab amadotin, imalumab, carlumab, imaprelimab, amatuximab, amatuximab, anetumab ravtansine, narnatumab, clivatuzumab tetraxetan, pemtumomab, gatipotuzumab, ensituximab, lemalesomab, sulcsomab, enfortumab vedotin, racotumomab, monalizumab, brontictuzumab, tarextumab, vesencumab, oxelumab, gilvetmab, tislelizumab, dostarlimab, BCD-100, nivolumab, PDR001, pembrolizumab, pidilizumab, retifanlimab, spartalizumab, sintilimab, cemiplimab, olaratumab, tovetumab, rinucumab, atezolizumab, avelumab, durvalumab, lifastuzumab vedotin, bavituximab, acapatamab, capromab, rosopatamab, nezastomig, pasotuxizumab, pelgifatamab, voxalatamab, cofetuzumab pelidotin, denosumab, rosmantuzumab, cirmtuzumab, atinumab, indatuximab ravtansine, elotuzumab, sirtratumab vedotin, sonepcizumab, vandortuzumab vedotin, minretumomab, satumomab pendetide, maslimomab, ontuxizumab, tenatumomab, fresolimumab, metelimumab, lerdelimumab, tezepelumab, etigilimab, tiragotumab, placulumab, prezalumab, infliximab, nerelimomab, ozoralizumab, adalimumab, afelimomab, certolizumab pegol, golimumab, mapatumumab, conatumumab, lexatumumab, tigatuzumab, sacituzumab govitecan, votumumab, pogalizumab, letolizumab, pankomab, anatumomab mafenatox, enavatuzumab, flanvotumab, brolucizumab, ranibizumab, varisacumab, bevacizumab, faricimab, icrucumab, alacizumab pegol, ramucirumab, pritumumab, and onvatilimab; and/or
[6609] VH4 comprises a VH of an antibody selected from the group consisting of losatuxizumab vedotin, utomilumab, urelumab, oleclumab, naptumomab estafenatox, ascrinvacumab, pintumomab, tacatuzumab tetraxetan, nesvacumab, vanucizumab, timolumab, vapaliximab, vepalimomab, enapotamab vedotin, ianalumab, belimumab, tabalumab, tibulizumab, belantamab mafodotin, teclistamab, teclistamab, detumomab, nacolomab tafenatox, eculizumab, lendalizumab, pexelizumab, pozelimab, ravulizumab, tesidolumab, vilobelimab, abagovomab, igovomab, oregovomab, sofituzumab vedotin, cantuzumab mertansine, cantuzuma bravtansine, girentuximab, altumomab pentetate, arcitumomab, besilesomab, bertilimumab, plozalizumab, mogamulizumab, leronlimab, PRO140, rovelizumab, rovelizumab, talacotuzumab, benralizumab, tavolimab, vonlerolizumab, gavilimomab, ziralimumab, fanolesomab, ipilimumab, ruplizumab, toralizumab, dapirolizumab pegol, toralizumab, dapirolizumab pegol, ruplizumab, blinatumomab, inebilizumab, loncastuximab tesirine, SGN-CD19A, tafasitamab, taplitumomab paptox, XMAB-5574, Budoprutug, Obexelimab, duvortuxizumab, englumafusp alfa, Emfizatamab, zcripatamig, siplizumab, blontuvetmab, FBTA05, ibritumomab tiuxetan, obinutuzumab, ocaratuzumab, ocrelizumab, ofatumumab, rituximab, tositumomab, ublituximab, veltuzumab, divozilimab, eramkafusp alfa, ripertamab, zuberitamab, glofitamab, nofetumomab merpentan, samalizumab, imvotamab, odronextamab, plamotamab, bectumomab, inotuzumab ozogamicin, moxetumomab pasudotox, pinatuzumab vedotin, gomiliximab, lumiliximab, inolimomab, inolimomab, daclizumab, camidanluma btesirine, basiliximab, varlilumab, omburtamab, enoblituzumab, vopratelimab, lulizumabpegol, TGN1412, muromonab-CD3, otelixizumab, teplizumab, visilizumab, epcoritamab, epcoritamab, brentuximab vedotin, iratumumab, azintuxizumab vedotin, gemtuzumab ozogamicin, lintuzumab, vadastuximab talirine, naratuximab emtansine, otlertuzumab, lilotomab satetraxetan, tetulomab, daratumumab, isatuximab, foralumab, mosunetuzumab, mosunetuzumab, cedelizumab, ibalizumab, keliximab, priliximab, tregalizumab, zanolimumab, bleselumab, iscalimab, lucatumumab, ravagalimab, selicrelumab, teneliximab, vanalimab, abciximab, bivatuzumab, iomab-B, telimomab aritox, zolimomab aritox, abituzumab, intetumumab, alemtuzumab, tamtuvetmab, lorvotuzumab mertansine, itolizumab, cusatuzumab, vorsetuzumab mafodotin, milatuzumab, iladatuzumab vedotin, polatuzumab vedotin, galiximab, cibisatamab, zolbctuximab, naxitamab, tisotumab vedotin, olendalizumab, pamrevlumab, lacnotuzumab, cabiralizumab, emactuzumab, axatilimab, gimsilumab, lenzilumab, namilumab, tremelimumab, ulocuplumab, tepoditamab, rovalpituzumab tesirine, tarlatamab, demcizumab, navicixizumab, drozitumab, parsatuzumab, depatuxizumab mafodotin, modotuximab, carotuximab, adecatumumab, adecatumumab, oportuzumab monatox, solitomab, tucotuzumab celmoleukin, edrecolomab, catumaxomab, ifabotuzumab, fibatuzumab, zalutumumab, panitumumab, cetuximab, futuximab, imgatuzumab, laprituximab emtansine, matuzumab, necitumumab, nimotuzumab, tomuzotuximab, amivantamab, amivantamab, epitumomab cituxetan, sontuzumab, duligotuzumab, elgemtumab, lumretuzumab, patritumab, seribantumab, zenocutuzumab, sibrotuzumab, burosumab, aprutumab ixadotin, radretumab, pasotuxizumab, farletuzumab, mirvetuximab soravtansine, vantictumab, TRBS07, 3F8, dinutuximab, dinutuximab beta, ecromeximab, mitumomab, andecaliximab, capromab, codrituzumab, glembatumumab vedotin, talquetamab, talquetamab, trevogrumab, indusatumab vedotin, ficlatuzumab, rilotumumab, zatuximab, pentuzimab, pentuzimab, margetuximab, timigutuzumab, trastuzumab, trastuzumab duocarmazine, trastuzumab emtansine, gancotamab, pertuzumab, ertumaxomab, emibetuzumab, telisotuzumab, telisotuzumab vedotin, derlotuximab biotin, apolizumab, onartuzumab, bersanlimab, enlimomabpegol, rontalizumab, sifalimumab, talizumab, ganitumab, istiratumab, robatumumab, teprotumumab, figitumumab, ganitumab, istiratumab, robatumumab, teprotumumab, cixutumumab, dalotuzumab, xentuzumab, dusigitumab, canakinumab, ustekinumab, ustekinumab, ustekinumab, briakinumab, briakinumab, abrezekimab, lebrikizumab, romilkimab, TNX-650, tralokinumab, anrukinzumab, brodalumab, ixekizumab, netakimab, perakizumab, secukinumab, vunakizumab, afasevikumab, afasevikumab, bimekizumab, bimekizumab, remtolumab, bermckimab, lutikizumab, lutikizumab, gevokizumab, cergutuzumab amunaleukin, fletikumab, fezakinumab, brazikumab, guselkumab, mirikizumab, tildrakizumab, risankizumab, flotetuzumab, nemolizumab, pascolizumab, dupilumab, mepolizumab, reslizumab, clazakizumab, elsilimomab, olokizumab, sarilumab, siltuximab, sirukumab, vobarilizumab, tocilizumab, SA237, satralizumab, enokizumab, prezalizumab, natalizumab, abrilumab, abrilumab, vedolizumab, volociximab, tadocizumab, etaracizumab, etrolizumab, spesolimab, vatelizumab, crlizumab, lirilumab, relatlimab, cBR96-doxorubicinimmunoconjugate, odulimomab, efalizumab, ladiratuzumab vedotin, simtuzumab, samrotamab vedotin, aselizumab, lupartumab amadotin, imalumab, carlumab, imaprelimab, amatuximab, amatuximab, anctumab ravtansine, narnatumab, clivatuzumab tetraxetan, pemtumomab, gatipotuzumab, ensituximab, lemalesomab, sulesomab, enfortumab vedotin, racotumomab, monalizumab, brontictuzumab, tarextumab, vesencumab, oxelumab, gilvetmab, tislelizumab, dostarlimab, BCD-100, nivolumab, PDR001, pembrolizumab, pidilizumab, retifanlimab, spartalizumab, sintilimab, cemiplimab, olaratumab, tovetumab, rinucumab, atezolizumab, avelumab, durvalumab, lifastuzumab vedotin, bavituximab, acapatamab, capromab, rosopatamab, nezastomig, pasotuxizumab, pelgifatamab, voxalatamab, cofetuzumab pelidotin, denosumab, rosmantuzumab, cirmtuzumab, atinumab, indatuximab ravtansine, elotuzumab, sirtratumab vedotin, sonepcizumab, vandortuzumab vedotin, minretumomab, satumomab pendetide, maslimomab, ontuxizumab, tenatumomab, fresolimumab, metelimumab, lerdelimumab, tezepelumab, etigilimab, tiragotumab, placulumab, prezalumab, infliximab, nerelimomab, ozoralizumab, adalimumab, afelimomab, certolizumab pegol, golimumab, mapatumumab, conatumumab, lexatumumab, tigatuzumab, sacituzumab govitecan, votumumab, pogalizumab, letolizumab, pankomab, anatumomab mafenatox, enavatuzumab, flanvotumab, brolucizumab, ranibizumab, varisacumab, bevacizumab, faricimab, icrucumab, alacizumab pegol, ramucirumab, pritumumab, and onvatilimab; or
[6610] (iii)
[6611] VL1 comprises (i) a complementarity determining region (CDR) 1 having an amino acid sequence that is at least 65%, at least 70%, at least 75%, at least 80%, at least 85%, at least 90%, at least 95%, at least 99%, or 100% identical to any one of SEQ ID NOs: 1096, 1103, 1110, 1120, 1127, 1134, 1141, 1148, 1155, 1162, 1169, 1174, 1181, 1188, 1199, 1211, 1221, 1228, 1235, 1247, 1254, 1261, 1266, 1271, 1278, 1285, 1292, 1299, 1306, 1313, 1319, 1326, 1339, 1352, 1359, 1366, 1373, 1382, 1394, 1401, 1408, 1414, 1421, 1428, 1441, 1448, 1455, 1461, 1468, 1475, 1488, 1495, 1508, 1519, 1526, 1531, 1538, 1544, 1556, 1568, 1574, 1581, 1594, 1601, 1608, 1615, 1622, 1629, 1636, 1643, 1650, 1657, 1672, 1679, 1689, 1697, 1708, 1715, 1718, 1723, 1727, 1738, 1743, 1752, 1761, 1763, 1769, 1776, and 1786; (ii) a CDR2 having an amino acid sequence that is at least 65%, at least 70%, at least 75%, at least 80%, at least 85%, at least 90%, at least 95%, at least 99%, or 100% identical to any one of SEQ ID NOs: 1200, 1212, 1680, 1690, 1698, 1709, 1728, 1739, 1744, 1753, 1770, and 1777; or at least 65%, at least 70%, at least 75%, at least 80%, at least 85%, at least 90%, at least 95%, at least 99%, or 100% identical to any one of amino acid sequences AAS, APS, AT, ATS, DAS, DDG, DDS, DT, DTS, DVS, EAS, FTS, GAF, GAN, GAS, GAT, GIS, GKN, GNS, HTS, KVS, LAS, LGS, LVS, NAK, NTN, QMS, RMS, RTS, SAS, TTS, WAS, YAS, YAT, YGS, YRS, and YTS; and (iii) a CDR3 having an amino acid sequence that is at least 65%, at least 70%, at least 75%, at least 80%, at least 85%, at least 90%, at least 95%, at least 99%, or 100% identical to any one of SEQ ID NOs: 1097, 1104, 1111, 1121, 1128, 1135, 1142, 1149, 1156, 1163, 1170, 1175, 1182, 1189, 1195, 1201, 1207, 1213, 1222, 1229, 1236, 2009, 1248, 1255, 1262, 1267, 1272, 1279, 1286, 1293, 1300, 1307, 1320, 1327, 1333, 1340, 1346, 1353, 1360, 1367, 1374, 1383, 1389, 1395, 1402, 1409, 1415, 1422, 1429, 1435, 1442, 1449, 1456, 1462, 1469, 1476, 1482, 1489, 1496, 1502, 1509, 1513, 1520, 1532, 1539, 1545, 1557, 1562, 1569, 1575, 1582, 1588, 1595, 1602, 1609, 1616, 1623, 1630, 1637, 1644, 1651, 1658, 1663, 1673, 1681, 1691, 1699, 1710, 1729, 1735, 1745, 1751, 1754, 1778, 1787, and 1976;
[6612] VL2 comprises (i) a complementarity determining region (CDR) 1 having an amino acid sequence that is at least 65%, at least 70%, at least 75%, at least 80%, at least 85%, at least 90%, at least 95%, at least 99%, or 100% identical to any one of SEQ ID NOs: 1096, 1103, 1110, 1120, 1127, 1134, 1141, 1148, 1155, 1162, 1169, 1174, 1181, 1188, 1199, 1211, 1221, 1228, 1235, 1247, 1254, 1261, 1266, 1271, 1278, 1285, 1292, 1299, 1306, 1313, 1319, 1326, 1339, 1352, 1359, 1366, 1373, 1382, 1394, 1401, 1408, 1414, 1421, 1428, 1441, 1448, 1455, 1461, 1468, 1475, 1488, 1495, 1508, 1519, 1526, 1531, 1538, 1544, 1556, 1568, 1574, 1581, 1594, 1601, 1608, 1615, 1622, 1629, 1636, 1643, 1650, 1657, 1672, 1679, 1689, 1697, 1708, 1715, 1718, 1723, 1727, 1738, 1743, 1752, 1761, 1763, 1769, 1776, and 1786; (ii) a CDR2 having an amino acid sequence that is at least 65%, at least 70%, at least 75%, at least 80%, at least 85%, at least 90%, at least 95%, at least 99%, or 100% identical to any one of SEQ ID NOs: 1200, 1212, 1680, 1690, 1698, 1709, 1728, 1739, 1744, 1753, 1770, and 1777; or at least 65%, at least 70%, at least 75%, at least 80%, at least 85%, at least 90%, at least 95%, at least 99%, or 100% identical to any one of amino acid sequences AAS, APS, AT, ATS, DAS, DDG, DDS, DT, DTS, DVS, EAS, FTS, GAF, GAN, GAS, GAT, GIS, GKN, GNS, HTS, KVS, LAS, LGS, LVS, NAK, NTN, QMS, RMS, RTS, SAS, TTS, WAS, YAS, YAT, YGS, YRS, and YTS; and (iii) a CDR3 having an amino acid sequence that is at least 65%, at least 70%, at least 75%, at least 80%, at least 85%, at least 90%, at least 95%, at least 99%, or 100% identical to any one of SEQ ID NOs: 1097, 1104, 1111, 1121, 1128, 1135, 1142, 1149, 1156, 1163, 1170, 1175, 1182, 1189, 1195, 1201, 1207, 1213, 1222, 1229, 1236, 2009, 1248, 1255, 1262, 1267, 1272, 1279, 1286, 1293, 1300, 1307, 1320, 1327, 1333, 1340, 1346, 1353, 1360, 1367, 1374, 1383, 1389, 1395, 1402, 1409, 1415, 1422, 1429, 1435, 1442, 1449, 1456, 1462, 1469, 1476, 1482, 1489, 1496, 1502, 1509, 1513, 1520, 1532, 1539, 1545, 1557, 1562, 1569, 1575, 1582, 1588, 1595, 1602, 1609, 1616, 1623, 1630, 1637, 1644, 1651, 1658, 1663, 1673, 1681, 1691, 1699, 1710, 1729, 1735, 1745, 1751, 1754, 1778, 1787, and 1976;
[6613] VL3 comprises (i) a complementarity determining region (CDR) 1 having an amino acid sequence that is at least 65%, at least 70%, at least 75%, at least 80%, at least 85%, at least 90%, at least 95%, at least 99%, or 100% identical to any one of SEQ ID NOs: 1096, 1103, 1110, 1120, 1127, 1134, 1141, 1148, 1155, 1162, 1169, 1174, 1181, 1188, 1199, 1211, 1221, 1228, 1235, 1247, 1254, 1261, 1266, 1271, 1278, 1285, 1292, 1299, 1306, 1313, 1319, 1326, 1339, 1352, 1359, 1366, 1373, 1382, 1394, 1401, 1408, 1414, 1421, 1428, 1441, 1448, 1455, 1461, 1468, 1475, 1488, 1495, 1508, 1519, 1526, 1531, 1538, 1544, 1556, 1568, 1574, 1581, 1594, 1601, 1608, 1615, 1622, 1629, 1636, 1643, 1650, 1657, 1672, 1679, 1689, 1697, 1708, 1715, 1718, 1723, 1727, 1738, 1743, 1752, 1761, 1763, 1769, 1776, and 1786; (ii) a CDR2 having an amino acid sequence that is at least 65%, at least 70%, at least 75%, at least 80%, at least 85%, at least 90%, at least 95%, at least 99%, or 100% identical to any one of SEQ ID NOs: 1200, 1212, 1680, 1690, 1698, 1709, 1728, 1739, 1744, 1753, 1770, and 1777; or at least 65%, at least 70%, at least 75%, at least 80%, at least 85%, at least 90%, at least 95%, at least 99%, or 100% identical to any one of amino acid sequences AAS, APS, AT, ATS, DAS, DDG, DDS, DT, DTS, DVS, EAS, FTS, GAF, GAN, GAS, GAT, GIS, GKN, GNS, HTS, KVS, LAS, LGS, LVS, NAK, NTN, QMS, RMS, RTS, SAS, TTS, WAS, YAS, YAT, YGS, YRS, and YTS; and (iii) a CDR3 having an amino acid sequence that is at least 65%, at least 70%, at least 75%, at least 80%, at least 85%, at least 90%, at least 95%, at least 99%, or 100% identical to any one of SEQ ID NOs: 1097, 1104, 1111, 1121, 1128, 1135, 1142, 1149, 1156, 1163, 1170, 1175, 1182, 1189, 1195, 1201, 1207, 1213, 1222, 1229, 1236, 2009, 1248, 1255, 1262, 1267, 1272, 1279, 1286, 1293, 1300, 1307, 1320, 1327, 1333, 1340, 1346, 1353, 1360, 1367, 1374, 1383, 1389, 1395, 1402, 1409, 1415, 1422, 1429, 1435, 1442, 1449, 1456, 1462, 1469, 1476, 1482, 1489, 1496, 1502, 1509, 1513, 1520, 1532, 1539, 1545, 1557, 1562, 1569, 1575, 1582, 1588, 1595, 1602, 1609, 1616, 1623, 1630, 1637, 1644, 1651, 1658, 1663, 1673, 1681, 1691, 1699, 1710, 1729, 1735, 1745, 1751, 1754, 1778, 1787, and 1976;
[6614] VL4 comprises (i) a complementarity determining region (CDR) 1 having an amino acid sequence that is at least 65%, at least 70%, at least 75%, at least 80%, at least 85%, at least 90%, at least 95%, at least 99%, or 100% identical to any one of SEQ ID NOs: 1096, 1103, 1110, 1120, 1127, 1134, 1141, 1148, 1155, 1162, 1169, 1174, 1181, 1188, 1199, 1211, 1221, 1228, 1235, 1247, 1254, 1261, 1266, 1271, 1278, 1285, 1292, 1299, 1306, 1313, 1319, 1326, 1339, 1352, 1359, 1366, 1373, 1382, 1394, 1401, 1408, 1414, 1421, 1428, 1441, 1448, 1455, 1461, 1468, 1475, 1488, 1495, 1508, 1519, 1526, 1531, 1538, 1544, 1556, 1568, 1574, 1581, 1594, 1601, 1608, 1615, 1622, 1629, 1636, 1643, 1650, 1657, 1672, 1679, 1689, 1697, 1708, 1715, 1718, 1723, 1727, 1738, 1743, 1752, 1761, 1763, 1769, 1776, and 1786; (ii) a CDR2 having an amino acid sequence that is at least 65%, at least 70%, at least 75%, at least 80%, at least 85%, at least 90%, at least 95%, at least 99%, or 100% identical to any one of SEQ ID NOs: 1200, 1212, 1680, 1690, 1698, 1709, 1728, 1739, 1744, 1753, 1770, and 1777; or at least 65%, at least 70%, at least 75%, at least 80%, at least 85%, at least 90%, at least 95%, at least 99%, or 100% identical to any one of amino acid sequences AAS, APS, AT, ATS, DAS, DDG, DDS, DT, DTS, DVS, EAS, FTS, GAF, GAN, GAS, GAT, GIS, GKN, GNS, HTS, KVS, LAS, LGS, LVS, NAK, NTN, QMS, RMS, RTS, SAS, TTS, WAS, YAS, YAT, YGS, YRS, and YTS; and (iii) a CDR3 having an amino acid sequence that is at least 65%, at least 70%, at least 75%, at least 80%, at least 85%, at least 90%, at least 95%, at least 99%, or 100% identical to any one of SEQ ID NOs: 1097, 1104, 1111, 1121, 1128, 1135, 1142, 1149, 1156, 1163, 1170, 1175, 1182, 1189, 1195, 1201, 1207, 1213, 1222, 1229, 1236, 2009, 1248, 1255, 1262, 1267, 1272, 1279, 1286, 1293, 1300, 1307, 1320, 1327, 1333, 1340, 1346, 1353, 1360, 1367, 1374, 1383, 1389, 1395, 1402, 1409, 1415, 1422, 1429, 1435, 1442, 1449, 1456, 1462, 1469, 1476, 1482, 1489, 1496, 1502, 1509, 1513, 1520, 1532, 1539, 1545, 1557, 1562, 1569, 1575, 1582, 1588, 1595, 1602, 1609, 1616, 1623, 1630, 1637, 1644, 1651, 1658, 1663, 1673, 1681, 1691, 1699, 1710, 1729, 1735, 1745, 1751, 1754, 1778, 1787, and 1976;
[6615] VH1 comprises (i) a complementarity determining region (CDR) 1 having an amino acid sequence that is at least 65%, at least 70%, at least 75%, at least 80%, at least 85%, at least 90%, at least 95%, at least 99%, or 100% identical to any one of SEQ ID NOs: 1099, 1106, 1113, 1117, 1123, 1130, 1137, 1144, 1151, 1158, 1165, 1177, 1184, 1191, 1203, 1215, 1224, 1231, 1238, 1243, 1250, 1257, 1264, 1274, 1281, 1288, 1295, 1302, 1309, 1315, 1322, 1329, 1335, 1342, 1348, 1355, 1362, 1369, 1376, 1385, 1397, 1404, 1417, 1424, 1431, 1437, 1444, 1451, 1458, 1464, 1471, 1478, 1484, 1491, 1498, 1504, 1511, 1515, 1522, 1534, 1547, 1552, 1564, 1577, 1584, 1590, 1597, 1604, 1611, 1618, 1625, 1632, 1639, 1646, 1653, 1660, 1665, 1675, 1683, 1693, 1701, 1705, 1716, 1719, 1731, 1736, 1747, 1756, 1772, 1780, and 1789; (ii) a CDR2 having an amino acid sequence that is at least 65%, at least 70%, at least 75%, at least 80%, at least 85%, at least 90%, at least 95%, at least 99%, or 100% identical to any one of SEQ ID NOs: 1100, 1107, 1114, 1118, 1124, 1131, 1138, 1145, 1152, 1159, 1166, 1178, 1185, 1192, 1204, 1216, 1225, 1232, 1239, 1244, 1251, 1258, 1275, 1282, 1289, 1296, 1303, 1310, 1316, 1323, 1330, 1336, 1343, 1349, 1356, 1363, 1370, 1377, 1386, 1391, 1398, 1405, 1411, 1418, 1425, 1432, 1438, 1445, 1452, 1465, 1472, 1479, 1485, 1492, 1499, 1505, 1516, 1523, 1528, 1535, 1541, 1548, 1553, 1559, 1565, 1571, 1578, 1585, 1591, 1598, 1605, 1612, 1619, 1626, 1633, 1640, 1647, 1654, 1666, 1676, 1684, 1687, 1694, 1702, 1706, 1712, 1717, 1720, 1725, 1732, 1737, 1741, 1748, 1757, 1767, 1773, 1781, and 1790; and (iii) a CDR3 having an amino acid sequence that is at least 65%, at least 70%, at least 75%, at least 80%, at least 85%, at least 90%, at least 95%, at least 99%, or 100% identical to any one of SEQ ID NOs: 1101, 1108, 1115, 1125, 1132, 1139, 1146, 1153, 1160, 1167, 1172, 1179, 1186, 1193, 1197, 1205, 1209, 1217, 1226, 1233, 1240, 1245, 1252, 1259, 1269, 1276, 1283, 1290, 1297, 1304, 1311, 1317, 1324, 1331, 1337, 1344, 1350, 1357, 1364, 1371, 1378, 1387, 1392, 1399, 1406, 1412, 1419, 1426, 1433, 1439, 1446, 1453, 1459, 1466, 1473, 1480, 1486, 1493, 1500, 1506, 1517, 1524, 1529, 1536, 1542, 1549, 1554, 1560, 1566, 1572, 1579, 1586, 1592, 1599, 1606, 1613, 1620, 1627, 1634, 1641, 1648, 1655, 1661, 1667, 1670, 1677, 1685, 1688, 1695, 1703, 1707, 1713, 1733, 1749, 1758, 1762, 1774, 1782, 1791, and 1975;
[6616] VH2 comprises (i) a complementarity determining region (CDR) 1 having an amino acid sequence that is at least 65%, at least 70%, at least 75%, at least 80%, at least 85%, at least 90%, at least 95%, at least 99%, or 100% identical to any one of SEQ ID NOs: 1099, 1106, 1113, 1117, 1123, 1130, 1137, 1144, 1151, 1158, 1165, 1177, 1184, 1191, 1203, 1215, 1224, 1231, 1238, 1243, 1250, 1257, 1264, 1274, 1281, 1288, 1295, 1302, 1309, 1315, 1322, 1329, 1335, 1342, 1348, 1355, 1362, 1369, 1376, 1385, 1397, 1404, 1417, 1424, 1431, 1437, 1444, 1451, 1458, 1464, 1471, 1478, 1484, 1491, 1498, 1504, 1511, 1515, 1522, 1534, 1547, 1552, 1564, 1577, 1584, 1590, 1597, 1604, 1611, 1618, 1625, 1632, 1639, 1646, 1653, 1660, 1665, 1675, 1683, 1693, 1701, 1705, 1716, 1719, 1731, 1736, 1747, 1756, 1772, 1780, and 1789; (ii) a CDR2 having an amino acid sequence that is at least 65%, at least 70%, at least 75%, at least 80%, at least 85%, at least 90%, at least 95%, at least 99%, or 100% identical to any one of SEQ ID NOs: 1100, 1107, 1114, 1118, 1124, 1131, 1138, 1145, 1152, 1159, 1166, 1178, 1185, 1192, 1204, 1216, 1225, 1232, 1239, 1244, 1251, 1258, 1275, 1282, 1289, 1296, 1303, 1310, 1316, 1323, 1330, 1336, 1343, 1349, 1356, 1363, 1370, 1377, 1386, 1391, 1398, 1405, 1411, 1418, 1425, 1432, 1438, 1445, 1452, 1465, 1472, 1479, 1485, 1492, 1499, 1505, 1516, 1523, 1528, 1535, 1541, 1548, 1553, 1559, 1565, 1571, 1578, 1585, 1591, 1598, 1605, 1612, 1619, 1626, 1633, 1640, 1647, 1654, 1666, 1676, 1684, 1687, 1694, 1702, 1706, 1712, 1717, 1720, 1725, 1732, 1737, 1741, 1748, 1757, 1767, 1773, 1781, and 1790; and (iii) a CDR3 having an amino acid sequence that is at least 65%, at least 70%, at least 75%, at least 80%, at least 85%, at least 90%, at least 95%, at least 99%, or 100% identical to any one of SEQ ID NOs: 1101, 1108, 1115, 1125, 1132, 1139, 1146, 1153, 1160, 1167, 1172, 1179, 1186, 1193, 1197, 1205, 1209, 1217, 1226, 1233, 1240, 1245, 1252, 1259, 1269, 1276, 1283, 1290, 1297, 1304, 1311, 1317, 1324, 1331, 1337, 1344, 1350, 1357, 1364, 1371, 1378, 1387, 1392, 1399, 1406, 1412, 1419, 1426, 1433, 1439, 1446, 1453, 1459, 1466, 1473, 1480, 1486, 1493, 1500, 1506, 1517, 1524, 1529, 1536, 1542, 1549, 1554, 1560, 1566, 1572, 1579, 1586, 1592, 1599, 1606, 1613, 1620, 1627, 1634, 1641, 1648, 1655, 1661, 1667, 1670, 1677, 1685, 1688, 1695, 1703, 1707, 1713, 1733, 1749, 1758, 1762, 1774, 1782, 1791, and 1975;
[6617] VH3 comprises (i) a complementarity determining region (CDR) 1 having an amino acid sequence that is at least 65%, at least 70%, at least 75%, at least 80%, at least 85%, at least 90%, at least 95%, at least 99%, or 100% identical to any one of SEQ ID NOs: 1099, 1106, 1113, 1117, 1123, 1130, 1137, 1144, 1151, 1158, 1165, 1177, 1184, 1191, 1203, 1215, 1224, 1231, 1238, 1243, 1250, 1257, 1264, 1274, 1281, 1288, 1295, 1302, 1309, 1315, 1322, 1329, 1335, 1342, 1348, 1355, 1362, 1369, 1376, 1385, 1397, 1404, 1417, 1424, 1431, 1437, 1444, 1451, 1458, 1464, 1471, 1478, 1484, 1491, 1498, 1504, 1511, 1515, 1522, 1534, 1547, 1552, 1564, 1577, 1584, 1590, 1597, 1604, 1611, 1618, 1625, 1632, 1639, 1646, 1653, 1660, 1665, 1675, 1683, 1693, 1701, 1705, 1716, 1719, 1731, 1736, 1747, 1756, 1772, 1780, and 1789; (ii) a CDR2 having an amino acid sequence that is at least 65%, at least 70%, at least 75%, at least 80%, at least 85%, at least 90%, at least 95%, at least 99%, or 100% identical to any one of SEQ ID NOs: 1100, 1107, 1114, 1118, 1124, 1131, 1138, 1145, 1152, 1159, 1166, 1178, 1185, 1192, 1204, 1216, 1225, 1232, 1239, 1244, 1251, 1258, 1275, 1282, 1289, 1296, 1303, 1310, 1316, 1323, 1330, 1336, 1343, 1349, 1356, 1363, 1370, 1377, 1386, 1391, 1398, 1405, 1411, 1418, 1425, 1432, 1438, 1445, 1452, 1465, 1472, 1479, 1485, 1492, 1499, 1505, 1516, 1523, 1528, 1535, 1541, 1548, 1553, 1559, 1565, 1571, 1578, 1585, 1591, 1598, 1605, 1612, 1619, 1626, 1633, 1640, 1647, 1654, 1666, 1676, 1684, 1687, 1694, 1702, 1706, 1712, 1717, 1720, 1725, 1732, 1737, 1741, 1748, 1757, 1767, 1773, 1781, and 1790; and (iii) a CDR3 having an amino acid sequence that is at least 65%, at least 70%, at least 75%, at least 80%, at least 85%, at least 90%, at least 95%, at least 99%, or 100% identical to any one of SEQ ID NOs: 1101, 1108, 1115, 1125, 1132, 1139, 1146, 1153, 1160, 1167, 1172, 1179, 1186, 1193, 1197, 1205, 1209, 1217, 1226, 1233, 1240, 1245, 1252, 1259, 1269, 1276, 1283, 1290, 1297, 1304, 1311, 1317, 1324, 1331, 1337, 1344, 1350, 1357, 1364, 1371, 1378, 1387, 1392, 1399, 1406, 1412, 1419, 1426, 1433, 1439, 1446, 1453, 1459, 1466, 1473, 1480, 1486, 1493, 1500, 1506, 1517, 1524, 1529, 1536, 1542, 1549, 1554, 1560, 1566, 1572, 1579, 1586, 1592, 1599, 1606, 1613, 1620, 1627, 1634, 1641, 1648, 1655, 1661, 1667, 1670, 1677, 1685, 1688, 1695, 1703, 1707, 1713, 1733, 1749, 1758, 1762, 1774, 1782, 1791, and 1975; and/or
[6618] VH4 comprises (i) a complementarity determining region (CDR) 1 having an amino acid sequence that is at least 65%, at least 70%, at least 75%, at least 80%, at least 85%, at least 90%, at least 95%, at least 99%, or 100% identical to any one of SEQ ID NOs: 1099, 1106, 1113, 1117, 1123, 1130, 1137, 1144, 1151, 1158, 1165, 1177, 1184, 1191, 1203, 1215, 1224, 1231, 1238, 1243, 1250, 1257, 1264, 1274, 1281, 1288, 1295, 1302, 1309, 1315, 1322, 1329, 1335, 1342, 1348, 1355, 1362, 1369, 1376, 1385, 1397, 1404, 1417, 1424, 1431, 1437, 1444, 1451, 1458, 1464, 1471, 1478, 1484, 1491, 1498, 1504, 1511, 1515, 1522, 1534, 1547, 1552, 1564, 1577, 1584, 1590, 1597, 1604, 1611, 1618, 1625, 1632, 1639, 1646, 1653, 1660, 1665, 1675, 1683, 1693, 1701, 1705, 1716, 1719, 1731, 1736, 1747, 1756, 1772, 1780, and 1789; (ii) a CDR2 having an amino acid sequence that is at least 65%, at least 70%, at least 75%, at least 80%, at least 85%, at least 90%, at least 95%, at least 99%, or 100% identical to any one of SEQ ID NOs: 1100, 1107, 1114, 1118, 1124, 1131, 1138, 1145, 1152, 1159, 1166, 1178, 1185, 1192, 1204, 1216, 1225, 1232, 1239, 1244, 1251, 1258, 1275, 1282, 1289, 1296, 1303, 1310, 1316, 1323, 1330, 1336, 1343, 1349, 1356, 1363, 1370, 1377, 1386, 1391, 1398, 1405, 1411, 1418, 1425, 1432, 1438, 1445, 1452, 1465, 1472, 1479, 1485, 1492, 1499, 1505, 1516, 1523, 1528, 1535, 1541, 1548, 1553, 1559, 1565, 1571, 1578, 1585, 1591, 1598, 1605, 1612, 1619, 1626, 1633, 1640, 1647, 1654, 1666, 1676, 1684, 1687, 1694, 1702, 1706, 1712, 1717, 1720, 1725, 1732, 1737, 1741, 1748, 1757, 1767, 1773, 1781, and 1790; and (iii) a CDR3 having an amino acid sequence that is at least 65%, at least 70%, at least 75%, at least 80%, at least 85%, at least 90%, at least 95%, at least 99%, or 100% identical to any one of SEQ ID NOs: 1101, 1108, 1115, 1125, 1132, 1139, 1146, 1153, 1160, 1167, 1172, 1179, 1186, 1193, 1197, 1205, 1209, 1217, 1226, 1233, 1240, 1245, 1252, 1259, 1269, 1276, 1283, 1290, 1297, 1304, 1311, 1317, 1324, 1331, 1337, 1344, 1350, 1357, 1364, 1371, 1378, 1387, 1392, 1399, 1406, 1412, 1419, 1426, 1433, 1439, 1446, 1453, 1459, 1466, 1473, 1480, 1486, 1493, 1500, 1506, 1517, 1524, 1529, 1536, 1542, 1549, 1554, 1560, 1566, 1572, 1579, 1586, 1592, 1599, 1606, 1613, 1620, 1627, 1634, 1641, 1648, 1655, 1661, 1667, 1670, 1677, 1685, 1688, 1695, 1703, 1707, 1713, 1733, 1749, 1758, 1762, 1774, 1782, 1791, and 1975; or
[6619] (iv)
[6620] VL1 comprises an amino acid sequence that is at least 65%, at least 70%, at least 75%, at least 80%, at least 85%, at least 90%, at least 95%, at least 99%, or 100% identical to any one of SEQ ID NOs: 1098, 1105, 1112, 1122, 1129, 1136, 1143, 1150, 1157, 1164, 1171, 1176, 1183, 1190, 1196, 1202, 1208, 1214, 1219, 1223, 1230, 1237, 1242, 1249, 1256, 1263, 1268, 1273, 1280, 1287, 1294, 1301, 1308, 1314, 1321, 1328, 1334, 1341, 1347, 1354, 1361, 1368, 1375, 1380, 1384, 1390, 1396, 1403, 1410, 1416, 1423, 1430, 1436, 1443, 1450, 1457, 1463, 1470, 1477, 1483, 1490, 1497, 1503, 1510, 1514, 1521, 1527, 1533, 1540, 1546, 1551, 1558, 1563, 1570, 1576, 1583, 1589, 1596, 1603, 1610, 1617, 1624, 1631, 1638, 1645, 1652, 1659, 1664, 1669, 1674, 1682, 1692, 1700, 1711, 1721, 1724, 1730, 1740, 1746, 1755, 1764, 1766, 1771, 1779, 1784, and 1788;
[6621] VL2 comprises an amino acid sequence that is at least 65%, at least 70%, at least 75%, at least 80%, at least 85%, at least 90%, at least 95%, at least 99%, or 100% identical to any one of SEQ ID NOs: 1098, 1105, 1112, 1122, 1129, 1136, 1143, 1150, 1157, 1164, 1171, 1176, 1183, 1190, 1196, 1202, 1208, 1214, 1219, 1223, 1230, 1237, 1242, 1249, 1256, 1263, 1268, 1273, 1280, 1287, 1294, 1301, 1308, 1314, 1321, 1328, 1334, 1341, 1347, 1354, 1361, 1368, 1375, 1380, 1384, 1390, 1396, 1403, 1410, 1416, 1423, 1430, 1436, 1443, 1450, 1457, 1463, 1470, 1477, 1483, 1490, 1497, 1503, 1510, 1514, 1521, 1527, 1533, 1540, 1546, 1551, 1558, 1563, 1570, 1576, 1583, 1589, 1596, 1603, 1610, 1617, 1624, 1631, 1638, 1645, 1652, 1659, 1664, 1669, 1674, 1682, 1692, 1700, 1711, 1721, 1724, 1730, 1740, 1746, 1755, 1764, 1766, 1771, 1779, 1784, and 1788;
[6622] VL3 comprises an amino acid sequence that is at least 65%, at least 70%, at least 75%, at least 80%, at least 85%, at least 90%, at least 95%, at least 99%, or 100% identical to any one of SEQ ID NOs: 1098, 1105, 1112, 1122, 1129, 1136, 1143, 1150, 1157, 1164, 1171, 1176, 1183, 1190, 1196, 1202, 1208, 1214, 1219, 1223, 1230, 1237, 1242, 1249, 1256, 1263, 1268, 1273, 1280, 1287, 1294, 1301, 1308, 1314, 1321, 1328, 1334, 1341, 1347, 1354, 1361, 1368, 1375, 1380, 1384, 1390, 1396, 1403, 1410, 1416, 1423, 1430, 1436, 1443, 1450, 1457, 1463, 1470, 1477, 1483, 1490, 1497, 1503, 1510, 1514, 1521, 1527, 1533, 1540, 1546, 1551, 1558, 1563, 1570, 1576, 1583, 1589, 1596, 1603, 1610, 1617, 1624, 1631, 1638, 1645, 1652, 1659, 1664, 1669, 1674, 1682, 1692, 1700, 1711, 1721, 1724, 1730, 1740, 1746, 1755, 1764, 1766, 1771, 1779, 1784, and 1788;
[6623] VL4 comprises an amino acid sequence that is at least 65%, at least 70%, at least 75%, at least 80%, at least 85%, at least 90%, at least 95%, at least 99%, or 100% identical to any one of SEQ ID NOs: 1098, 1105, 1112, 1122, 1129, 1136, 1143, 1150, 1157, 1164, 1171, 1176, 1183, 1190, 1196, 1202, 1208, 1214, 1219, 1223, 1230, 1237, 1242, 1249, 1256, 1263, 1268, 1273, 1280, 1287, 1294, 1301, 1308, 1314, 1321, 1328, 1334, 1341, 1347, 1354, 1361, 1368, 1375, 1380, 1384, 1390, 1396, 1403, 1410, 1416, 1423, 1430, 1436, 1443, 1450, 1457, 1463, 1470, 1477, 1483, 1490, 1497, 1503, 1510, 1514, 1521, 1527, 1533, 1540, 1546, 1551, 1558, 1563, 1570, 1576, 1583, 1589, 1596, 1603, 1610, 1617, 1624, 1631, 1638, 1645, 1652, 1659, 1664, 1669, 1674, 1682, 1692, 1700, 1711, 1721, 1724, 1730, 1740, 1746, 1755, 1764, 1766, 1771, 1779, 1784, and 1788;
[6624] VH1 comprises an amino acid sequence that is at least 65%, at least 70%, at least 75%, at least 80%, at least 85%, at least 90%, at least 95%, at least 99%, or 100% identical to any one of SEQ ID NOs: 1102, 1109, 1116, 1119, 1126, 1133, 1140, 1147, 1154, 1161, 1168, 1173, 1180, 1187, 1194, 1198, 1206, 1210, 1218, 1220, 1227, 1234, 1241, 1246, 1253, 1260, 1265, 1270, 1277, 1284, 1291, 1298, 1305, 1312, 1318, 1325, 1332, 1338, 1345, 1351, 1358, 1365, 1372, 1379, 1381, 1388, 1393, 1400, 1407, 1413, 1420, 1427, 1434, 1440, 1447, 1454, 1460, 1467, 1474, 1481, 1487, 1494, 1501, 1507, 1512, 1518, 1525, 1530, 1537, 1543, 1550, 1555, 1561, 1567, 1573, 1580, 1587, 1593, 1600, 1607, 1614, 1621, 1628, 1635, 1642, 1649, 1656, 1662, 1668, 1671, 1678, 1686, 1696, 1704, 1714, 1722, 1726, 1734, 1742, 1750, 1759, 1760, 1765, 1768, 1775, 1783, 1785, and 1792;
[6625] VH2 comprises an amino acid sequence that is at least 65%, at least 70%, at least 75%, at least 80%, at least 85%, at least 90%, at least 95%, at least 99%, or 100% identical to any one of SEQ ID NOs: 1102, 1109, 1116, 1119, 1126, 1133, 1140, 1147, 1154, 1161, 1168, 1173, 1180, 1187, 1194, 1198, 1206, 1210, 1218, 1220, 1227, 1234, 1241, 1246, 1253, 1260, 1265, 1270, 1277, 1284, 1291, 1298, 1305, 1312, 1318, 1325, 1332, 1338, 1345, 1351, 1358, 1365, 1372, 1379, 1381, 1388, 1393, 1400, 1407, 1413, 1420, 1427, 1434, 1440, 1447, 1454, 1460, 1467, 1474, 1481, 1487, 1494, 1501, 1507, 1512, 1518, 1525, 1530, 1537, 1543, 1550, 1555, 1561, 1567, 1573, 1580, 1587, 1593, 1600, 1607, 1614, 1621, 1628, 1635, 1642, 1649, 1656, 1662, 1668, 1671, 1678, 1686, 1696, 1704, 1714, 1722, 1726, 1734, 1742, 1750, 1759, 1760, 1765, 1768, 1775, 1783, 1785, and 1792;
[6626] VH3 comprises an amino acid sequence that is at least 65%, at least 70%, at least 75%, at least 80%, at least 85%, at least 90%, at least 95%, at least 99%, or 100% identical to any one of SEQ ID NOs: 1102, 1109, 1116, 1119, 1126, 1133, 1140, 1147, 1154, 1161, 1168, 1173, 1180, 1187, 1194, 1198, 1206, 1210, 1218, 1220, 1227, 1234, 1241, 1246, 1253, 1260, 1265, 1270, 1277, 1284, 1291, 1298, 1305, 1312, 1318, 1325, 1332, 1338, 1345, 1351, 1358, 1365, 1372, 1379, 1381, 1388, 1393, 1400, 1407, 1413, 1420, 1427, 1434, 1440, 1447, 1454, 1460, 1467, 1474, 1481, 1487, 1494, 1501, 1507, 1512, 1518, 1525, 1530, 1537, 1543, 1550, 1555, 1561, 1567, 1573, 1580, 1587, 1593, 1600, 1607, 1614, 1621, 1628, 1635, 1642, 1649, 1656, 1662, 1668, 1671, 1678, 1686, 1696, 1704, 1714, 1722, 1726, 1734, 1742, 1750, 1759, 1760, 1765, 1768, 1775, 1783, 1785, and 1792; and/or
[6627] VH4 comprises an amino acid sequence that is at least 65%, at least 70%, at least 75%, at least 80%, at least 85%, at least 90%, at least 95%, at least 99%, or 100% identical to any one of SEQ ID NOs: 1102, 1109, 1116, 1119, 1126, 1133, 1140, 1147, 1154, 1161, 1168, 1173, 1180, 1187, 1194, 1198, 1206, 1210, 1218, 1220, 1227, 1234, 1241, 1246, 1253, 1260, 1265, 1270, 1277, 1284, 1291, 1298, 1305, 1312, 1318, 1325, 1332, 1338, 1345, 1351, 1358, 1365, 1372, 1379, 1381, 1388, 1393, 1400, 1407, 1413, 1420, 1427, 1434, 1440, 1447, 1454, 1460, 1467, 1474, 1481, 1487, 1494, 1501, 1507, 1512, 1518, 1525, 1530, 1537, 1543, 1550, 1555, 1561, 1567, 1573, 1580, 1587, 1593, 1600, 1607, 1614, 1621, 1628, 1635, 1642, 1649, 1656, 1662, 1668, 1671, 1678, 1686, 1696, 1704, 1714, 1722, 1726, 1734, 1742, 1750, 1759, 1760, 1765, 1768, 1775, 1783, 1785, and 1792; or
[6628] (b)
[6629] (i)
[6630] VL1 comprises a light chain complementarity determining region 1 (LCDR1), LCDR2, and/or LCDR3 of an antibody selected from the group consisting of libivirumab, rmab, rivabazumab pegol, setoxaximab, suvizumab, suvratoxumab, sevirumab, pritoxaximab, porgaviximab, REGN-EB3, obiltoxaximab, gedivumab, foravirumab, larcaviximab, motavizumab, palivizumab, rafivirumab, regavirumab, tuvirumab, cosfroviximab, felvizumab, atidortoxumab, edobacomab, nebacumab, pateclizumab, raxibacumab, urtoxazumab, tosatoxumab, berlimatoxumab, CR6261, diridavumab, firivumab, lesofavumab, navivumab, exbivirumab, lenvervimab, bavituximab, bezlotoxumab, efungumab, leronlimab, nirsevimab, pagibaximab, panobacumab, tefibazumab, ansuvimab, atoltivimab, maftivimab, and odesivimab;
[6631] VL2 comprises a light chain complementarity determining region 1 (LCDR1), LCDR2, and/or LCDR3 of an antibody selected from the group consisting of libivirumab, rmab, rivabazumab pegol, setoxaximab, suvizumab, suvratoxumab, sevirumab, pritoxaximab, porgaviximab, REGN-EB3, obiltoxaximab, gedivumab, foravirumab, larcaviximab, motavizumab, palivizumab, rafivirumab, regavirumab, tuvirumab, cosfroviximab, felvizumab, atidortoxumab, edobacomab, nebacumab, pateclizumab, raxibacumab, urtoxazumab, tosatoxumab, berlimatoxumab, CR6261, diridavumab, firivumab, lesofavumab, navivumab, exbivirumab, lenvervimab, bavituximab, bezlotoxumab, efungumab, leronlimab, nirsevimab, pagibaximab, panobacumab, tefibazumab, ansuvimab, atoltivimab, maftivimab, and odesivimab;
[6632] VL3 comprises a light chain complementarity determining region 1 (LCDR1), LCDR2, and/or LCDR3 of an antibody selected from the group consisting of libivirumab, rmab, rivabazumab pegol, setoxaximab, suvizumab, suvratoxumab, sevirumab, pritoxaximab, porgaviximab, REGN-EB3, obiltoxaximab, gedivumab, foravirumab, larcaviximab, motavizumab, palivizumab, rafivirumab, regavirumab, tuvirumab, cosfroviximab, felvizumab, atidortoxumab, edobacomab, nebacumab, pateclizumab, raxibacumab, urtoxazumab, tosatoxumab, berlimatoxumab, CR6261, diridavumab, firivumab, lesofavumab, navivumab, exbivirumab, lenvervimab, bavituximab, bezlotoxumab, efungumab, leronlimab, nirsevimab, pagibaximab, panobacumab, tefibazumab, ansuvimab, atoltivimab, maftivimab, and odesivimab;
[6633] VL4 comprises a light chain complementarity determining region 1 (LCDR1), LCDR2, and/or LCDR3 of an antibody selected from the group consisting of libivirumab, rmab, rivabazumab pegol, setoxaximab, suvizumab, suvratoxumab, sevirumab, pritoxaximab, porgaviximab, REGN-EB3, obiltoxaximab, gedivumab, foravirumab, larcaviximab, motavizumab, palivizumab, rafivirumab, regavirumab, tuvirumab, cosfroviximab, felvizumab, atidortoxumab, edobacomab, nebacumab, pateclizumab, raxibacumab, urtoxazumab, tosatoxumab, berlimatoxumab, CR6261, diridavumab, firivumab, lesofavumab, navivumab, exbivirumab, lenvervimab, bavituximab, bezlotoxumab, efungumab, leronlimab, nirsevimab, pagibaximab, panobacumab, tefibazumab, ansuvimab, atoltivimab, maftivimab, and odesivimab;
[6634] VH1 comprises a heavy chain complementarity determining region 1 (HCDR1), HCDR2, and/or HCDR3 of an antibody selected from the group consisting of libivirumab, rmab, rivabazumab pegol, setoxaximab, suvizumab, suvratoxumab, sevirumab, pritoxaximab, porgaviximab, REGN-EB3, obiltoxaximab, gedivumab, foravirumab, larcaviximab, motavizumab, palivizumab, rafivirumab, regavirumab, tuvirumab, cosfroviximab, felvizumab, atidortoxumab, edobacomab, nebacumab, pateclizumab, raxibacumab, urtoxazumab, tosatoxumab, berlimatoxumab, CR6261, diridavumab, firivumab, lesofavumab, navivumab, exbivirumab, lenvervimab, bavituximab, bezlotoxumab, efungumab, leronlimab, nirsevimab, pagibaximab, panobacumab, tefibazumab, ansuvimab, atoltivimab, maftivimab, and odesivimab;
[6635] VH2 comprises a heavy chain complementarity determining region 1 (HCDR1), HCDR2, and/or HCDR3 of an antibody selected from the group consisting of libivirumab, rmab, rivabazumab pegol, setoxaximab, suvizumab, suvratoxumab, sevirumab, pritoxaximab, porgaviximab, REGN-EB3, obiltoxaximab, gedivumab, foravirumab, larcaviximab, motavizumab, palivizumab, rafivirumab, regavirumab, tuvirumab, cosfroviximab, felvizumab, atidortoxumab, edobacomab, nebacumab, pateclizumab, raxibacumab, urtoxazumab, tosatoxumab, berlimatoxumab, CR6261, diridavumab, firivumab, lesofavumab, navivumab, exbivirumab, lenvervimab, bavituximab, bezlotoxumab, efungumab, leronlimab, nirsevimab, pagibaximab, panobacumab, tefibazumab, ansuvimab, atoltivimab, maftivimab, and odesivimab;
[6636] VH3 comprises a heavy chain complementarity determining region 1 (HCDR1), HCDR2, and/or HCDR3 of an antibody selected from the group consisting of libivirumab, rmab, rivabazumab pegol, setoxaximab, suvizumab, suvratoxumab, sevirumab, pritoxaximab, porgaviximab, REGN-EB3, obiltoxaximab, gedivumab, foravirumab, larcaviximab, motavizumab, palivizumab, rafivirumab, regavirumab, tuvirumab, cosfroviximab, felvizumab, atidortoxumab, edobacomab, nebacumab, pateclizumab, raxibacumab, urtoxazumab, tosatoxumab, berlimatoxumab, CR6261, diridavumab, firivumab, lesofavumab, navivumab, exbivirumab, lenvervimab, bavituximab, bezlotoxumab, efungumab, leronlimab, nirsevimab, pagibaximab, panobacumab, tefibazumab, ansuvimab, atoltivimab, maftivimab, and odesivimab; and/or
[6637] VH4 comprises a heavy chain complementarity determining region 1 (HCDR1), HCDR2, and/or HCDR3 of an antibody selected from the group consisting of libivirumab, rmab, rivabazumab pegol, setoxaximab, suvizumab, suvratoxumab, sevirumab, pritoxaximab, porgaviximab, REGN-EB3, obiltoxaximab, gedivumab, foravirumab, larcaviximab, motavizumab, palivizumab, rafivirumab, regavirumab, tuvirumab, cosfroviximab, felvizumab, atidortoxumab, edobacomab, nebacumab, pateclizumab, raxibacumab, urtoxazumab, tosatoxumab, berlimatoxumab, CR6261, diridavumab, firivumab, lesofavumab, navivumab, exbivirumab, lenvervimab, bavituximab, bezlotoxumab, efungumab, leronlimab, nirsevimab, pagibaximab, panobacumab, tefibazumab, ansuvimab, atoltivimab, maftivimab, and odesivimab; or
[6638] (ii)
[6639] VL1 comprises a VL of an antibody selected from the group consisting of libivirumab, rmab, rivabazumab pegol, setoxaximab, suvizumab, suvratoxumab, sevirumab, pritoxaximab, porgaviximab, REGN-EB3, obiltoxaximab, gedivumab, foravirumab, larcaviximab, motavizumab, palivizumab, rafivirumab, regavirumab, tuvirumab, cosfroviximab, felvizumab, atidortoxumab, edobacomab, nebacumab, pateclizumab, raxibacumab, urtoxazumab, tosatoxumab, berlimatoxumab, CR6261, diridavumab, firivumab, lesofavumab, navivumab, exbivirumab, lenvervimab, bavituximab, bezlotoxumab, efungumab, leronlimab, nirsevimab, pagibaximab, panobacumab, tefibazumab, ansuvimab, atoltivimab, maftivimab, and odesivimab;
[6640] VL2 comprises a VL of an antibody selected from the group consisting of libivirumab, rmab, rivabazumab pegol, setoxaximab, suvizumab, suvratoxumab, sevirumab, pritoxaximab, porgaviximab, REGN-EB3, obiltoxaximab, gedivumab, foravirumab, larcaviximab, motavizumab, palivizumab, rafivirumab, regavirumab, tuvirumab, cosfroviximab, felvizumab, atidortoxumab, edobacomab, nebacumab, pateclizumab, raxibacumab, urtoxazumab, tosatoxumab, berlimatoxumab, CR6261, diridavumab, firivumab, lesofavumab, navivumab, exbivirumab, lenvervimab, bavituximab, bezlotoxumab, efungumab, leronlimab, nirsevimab, pagibaximab, panobacumab, tefibazumab, ansuvimab, atoltivimab, maftivimab, and odesivimab;
[6641] VL3 comprises a VL of an antibody selected from the group consisting of libivirumab, rmab, rivabazumab pegol, setoxaximab, suvizumab, suvratoxumab, sevirumab, pritoxaximab, porgaviximab, REGN-EB3, obiltoxaximab, gedivumab, foravirumab, larcaviximab, motavizumab, palivizumab, rafivirumab, regavirumab, tuvirumab, cosfroviximab, felvizumab, atidortoxumab, edobacomab, nebacumab, pateclizumab, raxibacumab, urtoxazumab, tosatoxumab, berlimatoxumab, CR6261, diridavumab, firivumab, lesofavumab, navivumab, exbivirumab, lenvervimab, bavituximab, bezlotoxumab, efungumab, leronlimab, nirsevimab, pagibaximab, panobacumab, tefibazumab, ansuvimab, atoltivimab, maftivimab, and odesivimab;
[6642] VL4 comprises a VL of an antibody selected from the group consisting of libivirumab, rmab, rivabazumab pegol, setoxaximab, suvizumab, suvratoxumab, sevirumab, pritoxaximab, porgaviximab, REGN-EB3, obiltoxaximab, gedivumab, foravirumab, larcaviximab, motavizumab, palivizumab, rafivirumab, regavirumab, tuvirumab, cosfroviximab, felvizumab, atidortoxumab, edobacomab, nebacumab, pateclizumab, raxibacumab, urtoxazumab, tosatoxumab, berlimatoxumab, CR6261, diridavumab, firivumab, lesofavumab, navivumab, exbivirumab, lenvervimab, bavituximab, bezlotoxumab, efungumab, leronlimab, nirsevimab, pagibaximab, panobacumab, tefibazumab, ansuvimab, atoltivimab, maftivimab, and odesivimab;
[6643] VH1 comprises a VH of an antibody selected from the group consisting of libivirumab, rmab, rivabazumab pegol, setoxaximab, suvizumab, suvratoxumab, sevirumab, pritoxaximab, porgaviximab, REGN-EB3, obiltoxaximab, gedivumab, foravirumab, larcaviximab, motavizumab, palivizumab, rafivirumab, regavirumab, tuvirumab, cosfroviximab, felvizumab, atidortoxumab, edobacomab, nebacumab, pateclizumab, raxibacumab, urtoxazumab, tosatoxumab, berlimatoxumab, CR6261, diridavumab, firivumab, lesofavumab, navivumab, exbivirumab, lenvervimab, bavituximab, bezlotoxumab, efungumab, leronlimab, nirsevimab, pagibaximab, panobacumab, tefibazumab, ansuvimab, atoltivimab, maftivimab, and odesivimab;
[6644] VH2 comprises a VH of an antibody selected from the group consisting of libivirumab, rmab, rivabazumab pegol, setoxaximab, suvizumab, suvratoxumab, sevirumab, pritoxaximab, porgaviximab, REGN-EB3, obiltoxaximab, gedivumab, foravirumab, larcaviximab, motavizumab, palivizumab, rafivirumab, regavirumab, tuvirumab, cosfroviximab, felvizumab, atidortoxumab, edobacomab, nebacumab, pateclizumab, raxibacumab, urtoxazumab, tosatoxumab, berlimatoxumab, CR6261, diridavumab, firivumab, lesofavumab, navivumab, exbivirumab, lenvervimab, bavituximab, bezlotoxumab, efungumab, leronlimab, nirsevimab, pagibaximab, panobacumab, tefibazumab, ansuvimab, atoltivimab, maftivimab, and odesivimab;
[6645] VH3 comprises a VH of an antibody selected from the group consisting of libivirumab, rmab, rivabazumab pegol, setoxaximab, suvizumab, suvratoxumab, sevirumab, pritoxaximab, porgaviximab, REGN-EB3, obiltoxaximab, gedivumab, foravirumab, larcaviximab, motavizumab, palivizumab, rafivirumab, regavirumab, tuvirumab, cosfroviximab, felvizumab, atidortoxumab, edobacomab, nebacumab, pateclizumab, raxibacumab, urtoxazumab, tosatoxumab, berlimatoxumab, CR6261, diridavumab, firivumab, lesofavumab, navivumab, exbivirumab, lenvervimab, bavituximab, bezlotoxumab, efungumab, leronlimab, nirsevimab, pagibaximab, panobacumab, tefibazumab, ansuvimab, atoltivimab, maftivimab, and odesivimab; and/or
[6646] VH4 comprises a VH of an antibody selected from the group consisting of libivirumab, rmab, rivabazumab pegol, setoxaximab, suvizumab, suvratoxumab, sevirumab, pritoxaximab, porgaviximab, REGN-EB3, obiltoxaximab, gedivumab, foravirumab, larcaviximab, motavizumab, palivizumab, rafivirumab, regavirumab, tuvirumab, cosfroviximab, felvizumab, atidortoxumab, edobacomab, nebacumab, pateclizumab, raxibacumab, urtoxazumab, tosatoxumab, berlimatoxumab, CR6261, diridavumab, firivumab, lesofavumab, navivumab, exbivirumab, lenvervimab, bavituximab, bezlotoxumab, efungumab, leronlimab, nirsevimab, pagibaximab, panobacumab, tefibazumab, ansuvimab, atoltivimab, maftivimab, and odesivimab; or
[6647] (iii)
[6648] VL1 comprises (i) a complementarity determining region (CDR) 1 having an amino acid sequence that is at least 65%, at least 70%, at least 75%, at least 80%, at least 85%, at least 90%, at least 95%, at least 99%, or 100% identical to any one of SEQ ID NOs: 1428, 1793, 1798, 1810, 1817, 1824, 1977, 1985, 1993 and 2001; (ii) a CDR2 having an amino acid sequence that is at least 65%, at least 70%, at least 75%, at least 80%, at least 85%, at least 90%, at least 95%, at least 99%, or 100% identical to any one of SEQ ID NOs: 1978, 1986, 1994, and 2002; or at least 65%, at least 70%, at least 75%, at least 80%, at least 85%, at least 90%, at least 95%, at least 99%, or 100% identical to any one of amino acid sequences YTS, DTS, GAS, and AAS; and (iii) a CDR3 having an amino acid sequence that is at least 65%, at least 70%, at least 75%, at least 80%, at least 85%, at least 90%, at least 95%, at least 99%, or 100% identical to any one of SEQ ID NOs: 1229, 1799, 1805, 1811, 1818, 1825, 1979, 1987, 1995, and 2003;
[6649] VL2 comprises (i) a complementarity determining region (CDR) 1 having an amino acid sequence that is at least 65%, at least 70%, at least 75%, at least 80%, at least 85%, at least 90%, at least 95%, at least 99%, or 100% identical to any one of SEQ ID NOs: 1428, 1793, 1798, 1810, 1817, 1824, 1977, 1985, 1993 and 2001; (ii) a CDR2 having an amino acid sequence that is at least 65%, at least 70%, at least 75%, at least 80%, at least 85%, at least 90%, at least 95%, at least 99%, or 100% identical to any one of SEQ ID NOs: 1978, 1986, 1994, and 2002; or at least 65%, at least 70%, at least 75%, at least 80%, at least 85%, at least 90%, at least 95%, at least 99%, or 100% identical to any one of amino acid sequences YTS, DTS, GAS, and AAS; and (iii) a CDR3 having an amino acid sequence that is at least 65%, at least 70%, at least 75%, at least 80%, at least 85%, at least 90%, at least 95%, at least 99%, or 100% identical to any one of SEQ ID NOs: 1229, 1799, 1805, 1811, 1818, 1825, 1979, 1987, 1995, and 2003;
[6650] VL3 comprises (i) a complementarity determining region (CDR) 1 having an amino acid sequence that is at least 65%, at least 70%, at least 75%, at least 80%, at least 85%, at least 90%, at least 95%, at least 99%, or 100% identical to any one of SEQ ID NOs: 1428, 1793, 1798, 1810, 1817, 1824, 1977, 1985, 1993 and 2001; (ii) a CDR2 having an amino acid sequence that is at least 65%, at least 70%, at least 75%, at least 80%, at least 85%, at least 90%, at least 95%, at least 99%, or 100% identical to any one of SEQ ID NOs: 1978, 1986, 1994, and 2002; or at least 65%, at least 70%, at least 75%, at least 80%, at least 85%, at least 90%, at least 95%, at least 99%, or 100% identical to any one of amino acid sequences YTS, DTS, GAS, and AAS; and (iii) a CDR3 having an amino acid sequence that is at least 65%, at least 70%, at least 75%, at least 80%, at least 85%, at least 90%, at least 95%, at least 99%, or 100% identical to any one of SEQ ID NOs: 1229, 1799, 1805, 1811, 1818, 1825, 1979, 1987, 1995, and 2003;
[6651] VL4 comprises (i) a complementarity determining region (CDR) 1 having an amino acid sequence that is at least 65%, at least 70%, at least 75%, at least 80%, at least 85%, at least 90%, at least 95%, at least 99%, or 100% identical to any one of SEQ ID NOs: 1428, 1793, 1798, 1810, 1817, 1824, 1977, 1985, 1993 and 2001; (ii) a CDR2 having an amino acid sequence that is at least 65%, at least 70%, at least 75%, at least 80%, at least 85%, at least 90%, at least 95%, at least 99%, or 100% identical to any one of SEQ ID NOs: 1978, 1986, 1994, and 2002; or at least 65%, at least 70%, at least 75%, at least 80%, at least 85%, at least 90%, at least 95%, at least 99%, or 100% identical to any one of amino acid sequences YTS, DTS, GAS, and AAS; and (iii) a CDR3 having an amino acid sequence that is at least 65%, at least 70%, at least 75%, at least 80%, at least 85%, at least 90%, at least 95%, at least 99%, or 100% identical to any one of SEQ ID NOs: 1229, 1799, 1805, 1811, 1818, 1825, 1979, 1987, 1995, and 2003;
[6652] VH1 comprises (i) a complementarity determining region (CDR) 1 having an amino acid sequence that is at least 65%, at least 70%, at least 75%, at least 80%, at least 85%, at least 90%, at least 95%, at least 99%, or 100% identical to any one of SEQ ID NOs: 1577, 1795, 1801, 1813, 1820, 1827, 1981, 1989, 1997, and 2005; (ii) a CDR2 having an amino acid sequence that is at least 65%, at least 70%, at least 75%, at least 80%, at least 85%, at least 90%, at least 95%, at least 99%, or 100% identical to any one of SEQ ID NOs: 1159, 1802, 1807, 1814, 1821, 1828, 1982, 1990, 1998, and 2006; and (iii) a CDR3 having an amino acid sequence that is at least 65%, at least 70%, at least 75%, at least 80%, at least 85%, at least 90%, at least 95%, at least 99%, or 100% identical to any one of SEQ ID NOs: 1796, 1803, 1808, 1815, 1822, 1829, 1983, 1991, 1999, and 2007;
[6653] VH2 comprises (i) a complementarity determining region (CDR) 1 having an amino acid sequence that is at least 65%, at least 70%, at least 75%, at least 80%, at least 85%, at least 90%, at least 95%, at least 99%, or 100% identical to any one of SEQ ID NOs: 1577, 1795, 1801, 1813, 1820, 1827, 1981, 1989, 1997, and 2005; (ii) a CDR2 having an amino acid sequence that is at least 65%, at least 70%, at least 75%, at least 80%, at least 85%, at least 90%, at least 95%, at least 99%, or 100% identical to any one of SEQ ID NOs: 1159, 1802, 1807, 1814, 1821, 1828, 1982, 1990, 1998, and 2006; and (iii) a CDR3 having an amino acid sequence that is at least 65%, at least 70%, at least 75%, at least 80%, at least 85%, at least 90%, at least 95%, at least 99%, or 100% identical to any one of SEQ ID NOs: 1796, 1803, 1808, 1815, 1822, 1829, 1983, 1991, 1999, and 2007;
[6654] VH3 comprises (i) a complementarity determining region (CDR) 1 having an amino acid sequence that is at least 65%, at least 70%, at least 75%, at least 80%, at least 85%, at least 90%, at least 95%, at least 99%, or 100% identical to any one of SEQ ID NOs: 1577, 1795, 1801, 1813, 1820, 1827, 1981, 1989, 1997, and 2005; (ii) a CDR2 having an amino acid sequence that is at least 65%, at least 70%, at least 75%, at least 80%, at least 85%, at least 90%, at least 95%, at least 99%, or 100% identical to any one of SEQ ID NOs: 1159, 1802, 1807, 1814, 1821, 1828, 1982, 1990, 1998, and 2006; and (iii) a CDR3 having an amino acid sequence that is at least 65%, at least 70%, at least 75%, at least 80%, at least 85%, at least 90%, at least 95%, at least 99%, or 100% identical to any one of SEQ ID NOs: 1796, 1803, 1808, 1815, 1822, 1829, 1983, 1991, 1999, and 2007; and/or
[6655] VH4 comprises (i) a complementarity determining region (CDR) 1 having an amino acid sequence that is at least 65%, at least 70%, at least 75%, at least 80%, at least 85%, at least 90%, at least 95%, at least 99%, or 100% identical to any one of SEQ ID NOs: 1577, 1795, 1801, 1813, 1820, 1827, 1981, 1989, 1997, and 2005; (ii) a CDR2 having an amino acid sequence that is at least 65%, at least 70%, at least 75%, at least 80%, at least 85%, at least 90%, at least 95%, at least 99%, or 100% identical to any one of SEQ ID NOs: 1159, 1802, 1807, 1814, 1821, 1828, 1982, 1990, 1998, and 2006; and (iii) a CDR3 having an amino acid sequence that is at least 65%, at least 70%, at least 75%, at least 80%, at least 85%, at least 90%, at least 95%, at least 99%, or 100% identical to any one of SEQ ID NOs: 1796, 1803, 1808, 1815, 1822, 1829, 1983, 1991, 1999, and 2007; or
[6656] (iv)
[6657] VL1 comprises an amino acid sequence that is at least 65%, at least 70%, at least 75%, at least 80%, at least 85%, at least 90%, at least 95%, at least 99%, or 100% identical to any one of SEQ ID NOs: 1794, 1800, 1806, 1812, 1819, 1826, 1980, 1988, 1996, and 2004;
[6658] VL2 comprises an amino acid sequence that is at least 65%, at least 70%, at least 75%, at least 80%, at least 85%, at least 90%, at least 95%, at least 99%, or 100% identical to any one of SEQ ID NOS: 1794, 1800, 1806, 1812, 1819, 1826, 1980, 1988, 1996, and 2004;
[6659] VL3 comprises an amino acid sequence that is at least 65%, at least 70%, at least 75%, at least 80%, at least 85%, at least 90%, at least 95%, at least 99%, or 100% identical to any one of SEQ ID NOs: 1794, 1800, 1806, 1812, 1819, 1826, 1980, 1988, 1996, and 2004;
[6660] VL4 comprises an amino acid sequence that is at least 65%, at least 70%, at least 75%, at least 80%, at least 85%, at least 90%, at least 95%, at least 99%, or 100% identical to any one of SEQ ID NOS: 1794, 1800, 1806, 1812, 1819, 1826, 1980, 1988, 1996, and 2004;
[6661] VH1 comprises an amino acid sequence that is at least 65%, at least 70%, at least 75%, at least 80%, at least 85%, at least 90%, at least 95%, at least 99%, or 100% identical to any one of SEQ ID NOS 1797, 1804, 1809, 1816, 1823, 1830, 1984, 1992, 2000, and 2008;
[6662] VH2 comprises an amino acid sequence that is at least 65%, at least 70%, at least 75%, at least 80%, at least 85%, at least 90%, at least 95%, at least 99%, or 100% identical to any one of SEQ ID NOs 1797, 1804, 1809, 1816, 1823, 1830, 1984, 1992, 2000, and 2008;
[6663] VH3 comprises an amino acid sequence that is at least 65%, at least 70%, at least 75%, at least 80%, at least 85%, at least 90%, at least 95%, at least 99%, or 100% identical to any one of SEQ ID NOS 1797, 1804, 1809, 1816, 1823, 1830, 1984, 1992, 2000, and 2008; and/or
[6664] VH4 comprises an amino acid sequence that is at least 65%, at least 70%, at least 75%, at least 80%, at least 85%, at least 90%, at least 95%, at least 99%, or 100% identical to any one of SEQ ID NOS 1797, 1804, 1809, 1816, 1823, 1830, 1984, 1992, 2000, and 2008; or
[6665] (c)
[6666] (i)
[6667] VL1 comprises a light chain complementarity determining region 1 (LCDR1), LCDR2, and/or LCDR3 of an antibody selected from the group consisting of aducanumab, alirocumab, frovocimab, lodelcizumab, bococizumab, evolocumab, ralpancizumab, anifrolumab, atorolimumab, bapincuzumab, bedinvetmab, begelomab, biciromab, bimagrumab, birtamimab, blosozumab, burosumab, caplacizumab, concizumab, crenezumab, crizanlizumab, crotedumab, dezamizumab, domagrozumab, donanemab, eldelumab, elezanumab, emapalumab, emicizumab, eptinezumab, erenumab, evinacumab, faralimomab, fasinumab, fontolizumab, fremanezumab, frunevetmab, fulranumab, galcanezumab, gantenerumab, gosuranemab, idarucizumab, imciromab, inclacumab, lampalizumab, lanadelumab, landogrozumab, lecanemab, ligelizumab, marstacimab, mavrilimumab, morolimumab, NEOD001, omalizumab, oMS721, orticumab, otilimab, ozanezumab, ponezumab, prasinezumab, quilizumab, ranevetmab, refanezumab, roledumab, romosozumab, rozanolixizumab, setrusumab, SHP647, solanezumab, stamulumab, suptavumab, sutimlimab, tanezumab, crovalimab, and lokivetmab;
[6668] VL2 comprises a light chain complementarity determining region 1 (LCDR1), LCDR2, and/or LCDR3 of an antibody selected from the group consisting of aducanumab, alirocumab, frovocimab, lodelcizumab, bococizumab, evolocumab, ralpancizumab, anifrolumab, atorolimumab, bapineuzumab, bedinvetmab, begelomab, biciromab, bimagrumab, birtamimab, blosozumab, burosumab, caplacizumab, concizumab, crenezumab, crizanlizumab, crotedumab, dezamizumab, domagrozumab, donanemab, eldelumab, elezanumab, emapalumab, emicizumab, eptinezumab, erenumab, evinacumab, faralimomab, fasinumab, fontolizumab, fremanezumab, frunevetmab, fulranumab, galcanezumab, gantenerumab, gosuranemab, idarucizumab, imciromab, inclacumab, lampalizumab, lanadelumab, landogrozumab, lecanemab, ligelizumab, marstacimab, mavrilimumab, morolimumab, NEOD001, omalizumab, oMS721, orticumab, otilimab, ozanezumab, ponezumab, prasinezumab, quilizumab, ranevetmab, refanezumab, roledumab, romosozumab, rozanolixizumab, setrusumab, SHP647, solanezumab, stamulumab, suptavumab, sutimlimab, tanezumab, crovalimab, and lokivetmab;
[6669] VL3 comprises a light chain complementarity determining region 1 (LCDR1), LCDR2, and/or LCDR3 of an antibody selected from the group consisting of aducanumab, alirocumab, frovocimab, lodelcizumab, bococizumab, evolocumab, ralpancizumab, anifrolumab, atorolimumab, bapineuzumab, bedinvetmab, begelomab, biciromab, bimagrumab, birtamimab, blosozumab, burosumab, caplacizumab, concizumab, crenezumab, crizanlizumab, crotedumab, dezamizumab, domagrozumab, donanemab, eldelumab, elezanumab, emapalumab, emicizumab, eptinezumab, erenumab, evinacumab, faralimomab, fasinumab, fontolizumab, fremanezumab, frunevetmab, fulranumab, galcanezumab, gantenerumab, gosuranemab, idarucizumab, imciromab, inclacumab, lampalizumab, lanadelumab, landogrozumab, lecanemab, ligelizumab, marstacimab, mavrilimumab, morolimumab, NEOD001, omalizumab, oMS721, orticumab, otilimab, ozanezumab, ponezumab, prasinezumab, quilizumab, ranevetmab, refanezumab, roledumab, romosozumab, rozanolixizumab, setrusumab, SHP647, solanezumab, stamulumab, suptavumab, sutimlimab, tanezumab, crovalimab, and lokivetmab;
[6670] VL4 comprises a light chain complementarity determining region 1 (LCDR1), LCDR2, and/or LCDR3 of an antibody selected from the group consisting of aducanumab, alirocumab, frovocimab, lodelcizumab, bococizumab, evolocumab, ralpancizumab, anifrolumab, atorolimumab, bapincuzumab, bedinvetmab, begelomab, biciromab, bimagrumab, birtamimab, blosozumab, burosumab, caplacizumab, concizumab, crenezumab, crizanlizumab, crotedumab, dezamizumab, domagrozumab, donanemab, eldelumab, elezanumab, emapalumab, emicizumab, eptinezumab, erenumab, evinacumab, faralimomab, fasinumab, fontolizumab, fremanezumab, frunevetmab, fulranumab, galcanezumab, gantenerumab, gosuranemab, idarucizumab, imciromab, inclacumab, lampalizumab, lanadelumab, landogrozumab, lecanemab, ligelizumab, marstacimab, mavrilimumab, morolimumab, NEOD001, omalizumab, oMS721, orticumab, otilimab, ozanezumab, ponezumab, prasinezumab, quilizumab, ranevetmab, refanezumab, roledumab, romosozumab, rozanolixizumab, setrusumab, SHP647, solanezumab, stamulumab, suptavumab, sutimlimab, tanezumab, crovalimab, and lokivetmab;
[6671] VH1 comprises a heavy chain complementarity determining region 1 (HCDR1), HCDR2, and/or HCDR3 of an antibody selected from the group consisting of aducanumab, alirocumab, frovocimab, lodelcizumab, bococizumab, evolocumab, ralpancizumab, anifrolumab, atorolimumab, bapincuzumab, bedinvetmab, begelomab, biciromab, bimagrumab, birtamimab, blosozumab, burosumab, caplacizumab, concizumab, crenezumab, crizanlizumab, crotedumab, dezamizumab, domagrozumab, donanemab, eldelumab, elezanumab, emapalumab, emicizumab, eptinezumab, erenumab, evinacumab, faralimomab, fasinumab, fontolizumab, fremanezumab, frunevetmab, fulranumab, galcanezumab, gantenerumab, gosuranemab, idarucizumab, imciromab, inclacumab, lampalizumab, lanadelumab, landogrozumab, lecanemab, ligelizumab, marstacimab, mavrilimumab, morolimumab, NEOD00) 1, omalizumab, oMS721, orticumab, otilimab, ozanezumab, ponezumab, prasinezumab, quilizumab, ranevetmab, refanezumab, roledumab, romosozumab, rozanolixizumab, sctrusumab, SHP647, solanezumab, stamulumab, suptavumab, sutimlimab, tanezumab, crovalimab, and lokivetmab;
[6672] VH2 comprises a heavy chain complementarity determining region 1 (HCDR1), HCDR2, and/or HCDR3 of an antibody selected from the group consisting of aducanumab, alirocumab, frovocimab, lodelcizumab, bococizumab, evolocumab, ralpancizumab, anifrolumab, atorolimumab, bapineuzumab, bedinvetmab, begelomab, biciromab, bimagrumab, birtamimab, blosozumab, burosumab, caplacizumab, concizumab, crenezumab, crizanlizumab, crotedumab, dezamizumab, domagrozumab, donanemab, eldelumab, elezanumab, emapalumab, emicizumab, eptinezumab, erenumab, evinacumab, faralimomab, fasinumab, fontolizumab, fremanezumab, frunevetmab, fulranumab, galcanezumab, gantenerumab, gosuranemab, idarucizumab, imciromab, inclacumab, lampalizumab, lanadelumab, landogrozumab, lecanemab, ligelizumab, marstacimab, mavrilimumab, morolimumab, NEOD001, omalizumab, oMS721, orticumab, otilimab, ozanezumab, ponezumab, prasinezumab, quilizumab, ranevetmab, refanezumab, roledumab, romosozumab, rozanolixizumab, setrusumab, SHP647, solanezumab, stamulumab, suptavumab, sutimlimab, tanezumab, crovalimab, and lokivetmab;
[6673] VH3 comprises a heavy chain complementarity determining region 1 (HCDR1), HCDR2, and/or HCDR3 of an antibody selected from the group consisting of aducanumab, alirocumab, frovocimab, lodelcizumab, bococizumab, evolocumab, ralpancizumab, anifrolumab, atorolimumab, bapincuzumab, bedinvetmab, begelomab, biciromab, bimagrumab, birtamimab, blosozumab, burosumab, caplacizumab, concizumab, crenezumab, crizanlizumab, crotedumab, dezamizumab, domagrozumab, donanemab, eldelumab, elezanumab, emapalumab, emicizumab, eptinezumab, erenumab, evinacumab, faralimomab, fasinumab, fontolizumab, fremanezumab, frunevetmab, fulranumab, galcanezumab, gantenerumab, gosuranemab, idarucizumab, imciromab, inclacumab, lampalizumab, lanadelumab, landogrozumab, lecanemab, ligelizumab, marstacimab, mavrilimumab, morolimumab, NEOD001, omalizumab, oMS721, orticumab, otilimab, ozanezumab, ponezumab, prasinezumab, quilizumab, ranevetmab, refanezumab, roledumab, romosozumab, rozanolixizumab, sctrusumab, SHP647, solanezumab, stamulumab, suptavumab, sutimlimab, tanezumab, crovalimab, and lokivetmab; and/or
[6674] VH4 comprises a heavy chain complementarity determining region 1 (HCDR1), HCDR2, and/or HCDR3 of an antibody selected from the group consisting of aducanumab, alirocumab, frovocimab, lodelcizumab, bococizumab, evolocumab, ralpancizumab, anifrolumab, atorolimumab, bapineuzumab, bedinvetmab, begelomab, biciromab, bimagrumab, birtamimab, blosozumab, burosumab, caplacizumab, concizumab, crenezumab, crizanlizumab, crotedumab, dezamizumab, domagrozumab, donanemab, eldelumab, elezanumab, emapalumab, emicizumab, eptinezumab, erenumab, evinacumab, faralimomab, fasinumab, fontolizumab, fremanezumab, frunevetmab, fulranumab, galcanezumab, gantenerumab, gosuranemab, idarucizumab, imciromab, inclacumab, lampalizumab, lanadelumab, landogrozumab, lecanemab, ligelizumab, marstacimab, mavrilimumab, morolimumab, NEOD001, omalizumab, oMS721, orticumab, otilimab, ozanezumab, ponezumab, prasinezumab, quilizumab, ranevetmab, refanezumab, roledumab, romosozumab, rozanolixizumab, setrusumab, SHP647, solanezumab, stamulumab, suptavumab, sutimlimab, tanezumab, crovalimab, and lokivetmab; or
[6675] (ii)
[6676] VL1 comprises a VL of an antibody selected from the group consisting of aducanumab, alirocumab, frovocimab, lodelcizumab, bococizumab, evolocumab, ralpancizumab, anifrolumab, atorolimumab, bapineuzumab, bedinvetmab, begelomab, biciromab, bimagrumab, birtamimab, blosozumab, burosumab, caplacizumab, concizumab, crenezumab, crizanlizumab, crotedumab, dezamizumab, domagrozumab, donanemab, eldelumab, elezanumab, emapalumab, emicizumab, eptinezumab, erenumab, evinacumab, faralimomab, fasinumab, fontolizumab, fremanezumab, frunevetmab, fulranumab, galcanezumab, gantenerumab, gosuranemab, idarucizumab, imciromab, inclacumab, lampalizumab, lanadelumab, landogrozumab, lecanemab, ligelizumab, marstacimab, mavrilimumab, morolimumab, NEOD001, omalizumab, oMS721, orticumab, otilimab, ozanezumab, ponezumab, prasinezumab, quilizumab, ranevetmab, refanezumab, roledumab, romosozumab, rozanolixizumab, setrusumab, SHP647, solanezumab, stamulumab, suptavumab, sutimlimab, tanezumab, crovalimab, and lokivetmab;
[6677] VL2 comprises a VL of an antibody selected from the group consisting of aducanumab, alirocumab, frovocimab, lodelcizumab, bococizumab, evolocumab, ralpancizumab, anifrolumab, atorolimumab, bapineuzumab, bedinvetmab, begelomab, biciromab, bimagrumab, birtamimab, blosozumab, burosumab, caplacizumab, concizumab, crenezumab, crizanlizumab, crotedumab, dezamizumab, domagrozumab, donanemab, eldelumab, elezanumab, emapalumab, emicizumab, eptinezumab, erenumab, evinacumab, faralimomab, fasinumab, fontolizumab, fremanezumab, frunevetmab, fulranumab, galcanezumab, gantenerumab, gosuranemab, idarucizumab, imciromab, inclacumab, lampalizumab, lanadelumab, landogrozumab, lecanemab, ligelizumab, marstacimab, mavrilimumab, morolimumab, NEOD001, omalizumab, oMS721, orticumab, otilimab, ozanezumab, ponezumab, prasinezumab, quilizumab, ranevetmab, refanezumab, roledumab, romosozumab, rozanolixizumab, setrusumab, SHP647, solanezumab, stamulumab, suptavumab, sutimlimab, tanezumab, crovalimab, and lokivetmab;
[6678] VL3 comprises a VL of an antibody selected from the group consisting of aducanumab, alirocumab, frovocimab, lodelcizumab, bococizumab, evolocumab, ralpancizumab, anifrolumab, atorolimumab, bapineuzumab, bedinvetmab, begelomab, biciromab, bimagrumab, birtamimab, blosozumab, burosumab, caplacizumab, concizumab, crenezumab, crizanlizumab, crotedumab, dezamizumab, domagrozumab, donanemab, eldelumab, elezanumab, emapalumab, emicizumab, eptinezumab, erenumab, evinacumab, faralimomab, fasinumab, fontolizumab, fremanezumab, frunevetmab, fulranumab, galcanezumab, gantenerumab, gosuranemab, idarucizumab, imciromab, inclacumab, lampalizumab, lanadelumab, landogrozumab, lecanemab, ligelizumab, marstacimab, mavrilimumab, morolimumab, NEOD001, omalizumab, oMS721, orticumab, otilimab, ozanezumab, ponezumab, prasinezumab, quilizumab, ranevetmab, refanezumab, roledumab, romosozumab, rozanolixizumab, setrusumab, SHP647, solanczumab, stamulumab, suptavumab, sutimlimab, tanezumab, crovalimab, and lokivetmab;
[6679] VL4 comprises a VL of an antibody selected from the group consisting of aducanumab, alirocumab, frovocimab, lodelcizumab, bococizumab, evolocumab, ralpancizumab, anifrolumab, atorolimumab, bapineuzumab, bedinvetmab, begelomab, biciromab, bimagrumab, birtamimab, blosozumab, burosumab, caplacizumab, concizumab, crenezumab, crizanlizumab, crotedumab, dezamizumab, domagrozumab, donanemab, eldelumab, elezanumab, emapalumab, emicizumab, eptinezumab, erenumab, evinacumab, faralimomab, fasinumab, fontolizumab, fremanezumab, frunevetmab, fulranumab, galcanezumab, gantenerumab, gosuranemab, idarucizumab, imciromab, inclacumab, lampalizumab, lanadelumab, landogrozumab, lecanemab, ligelizumab, marstacimab, mavrilimumab, morolimumab, NEOD001, omalizumab, oMS721, orticumab, otilimab, ozanezumab, ponezumab, prasinezumab, quilizumab, ranevetmab, refanezumab, roledumab, romosozumab, rozanolixizumab, setrusumab, SHP647, solanezumab, stamulumab, suptavumab, sutimlimab, tanezumab, crovalimab, and lokivetmab;
[6680] VH1 comprises a VH of an antibody selected from the group consisting of aducanumab, alirocumab, frovocimab, lodelcizumab, bococizumab, evolocumab, ralpancizumab, anifrolumab, atorolimumab, bapineuzumab, bedinvetmab, begelomab, biciromab, bimagrumab, birtamimab, blosozumab, burosumab, caplacizumab, concizumab, crenezumab, crizanlizumab, crotedumab, dezamizumab, domagrozumab, donanemab, eldelumab, elezanumab, emapalumab, emicizumab, eptinezumab, erenumab, evinacumab, faralimomab, fasinumab, fontolizumab, fremanezumab, frunevetmab, fulranumab, galcanezumab, gantenerumab, gosuranemab, idarucizumab, imciromab, inclacumab, lampalizumab, lanadelumab, landogrozumab, lecanemab, ligelizumab, marstacimab, mavrilimumab, morolimumab, NEOD001, omalizumab, oMS721, orticumab, otilimab, ozanezumab, ponezumab, prasinezumab, quilizumab, ranevetmab, refanezumab, roledumab, romosozumab, rozanolixizumab, setrusumab, SHP647, solanezumab, stamulumab, suptavumab, sutimlimab, tanezumab, crovalimab, and lokivetmab;
[6681] VH2 comprises a VH of an antibody selected from the group consisting of aducanumab, alirocumab, frovocimab, lodelcizumab, bococizumab, evolocumab, ralpancizumab, anifrolumab, atorolimumab, bapineuzumab, bedinvetmab, begelomab, biciromab, bimagrumab, birtamimab, blosozumab, burosumab, caplacizumab, concizumab, crenezumab, crizanlizumab, crotedumab, dezamizumab, domagrozumab, donanemab, eldelumab, elezanumab, emapalumab, emicizumab, eptinezumab, erenumab, evinacumab, faralimomab, fasinumab, fontolizumab, fremanezumab, frunevetmab, fulranumab, galcanezumab, gantenerumab, gosuranemab, idarucizumab, imciromab, inclacumab, lampalizumab, lanadelumab, landogrozumab, lecanemab, ligelizumab, marstacimab, mavrilimumab, morolimumab, NEOD001, omalizumab, oMS721, orticumab, otilimab, ozanezumab, ponezumab, prasinezumab, quilizumab, ranevetmab, refanezumab, roledumab, romosozumab, rozanolixizumab, setrusumab, SHP647, solanezumab, stamulumab, suptavumab, sutimlimab, tanezumab, crovalimab, and lokivetmab;
[6682] VH3 comprises a VH of an antibody selected from the group consisting of aducanumab, alirocumab, frovocimab, lodelcizumab, bococizumab, evolocumab, ralpancizumab, anifrolumab, atorolimumab, bapineuzumab, bedinvetmab, begelomab, biciromab, bimagrumab, birtamimab, blosozumab, burosumab, caplacizumab, concizumab, crenezumab, crizanlizumab, crotedumab, dezamizumab, domagrozumab, donanemab, eldelumab, elezanumab, emapalumab, emicizumab, eptinezumab, erenumab, evinacumab, faralimomab, fasinumab, fontolizumab, fremanezumab, frunevetmab, fulranumab, galcanezumab, gantenerumab, gosuranemab, idarucizumab, imciromab, inclacumab, lampalizumab, lanadelumab, landogrozumab, lecanemab, ligelizumab, marstacimab, mavrilimumab, morolimumab, NEOD001, omalizumab, oMS721, orticumab, otilimab, ozanezumab, ponezumab, prasinezumab, quilizumab, ranevetmab, refanezumab, roledumab, romosozumab, rozanolixizumab, sctrusumab, SHP647, solanezumab, stamulumab, suptavumab, sutimlimab, tanezumab, crovalimab, and lokivetmab; and/or
[6683] VH4 comprises a VH of an antibody selected from the group consisting of aducanumab, alirocumab, frovocimab, lodelcizumab, bococizumab, evolocumab, ralpancizumab, anifrolumab, atorolimumab, bapineuzumab, bedinvetmab, begelomab, biciromab, bimagrumab, birtamimab, blosozumab, burosumab, caplacizumab, concizumab, crenezumab, crizanlizumab, crotedumab, dezamizumab, domagrozumab, donanemab, eldelumab, elezanumab, emapalumab, emicizumab, eptinezumab, erenumab, evinacumab, faralimomab, fasinumab, fontolizumab, fremanezumab, frunevetmab, fulranumab, galcanezumab, gantenerumab, gosuranemab, idarucizumab, imciromab, inclacumab, lampalizumab, lanadelumab, landogrozumab, lecanemab, ligelizumab, marstacimab, mavrilimumab, morolimumab, NEOD001, omalizumab, oMS721, orticumab, otilimab, ozanezumab, ponezumab, prasinezumab, quilizumab, ranevetmab, refanezumab, roledumab, romosozumab, rozanolixizumab, setrusumab, SHP647, solanezumab, stamulumab, suptavumab, sutimlimab, tanezumab, crovalimab, and lokivetmab; or
[6684] (iii)
[6685] VL1 comprises (i) a complementarity determining region (CDR) 1 having an amino acid sequence that is at least 65%, at least 70%, at least 75%, at least 80%, at least 85%, at least 90%, at least 95%, at least 99%, or 100% identical to any one of SEQ ID NOs: 1120, 1228, 1359, 1519, 1831, 1838, 1845, 1852, 1859, 1866, 1872, 1878, 1885, 1891, 1898, 1905, 1911, 1917, 1924, 1931, 1938, 1945, and 1963; (ii) a CDR2 having an amino acid sequence that is at least 65%, at least 70%, at least 75%, at least 80%, at least 85%, at least 90%, at least 95%, at least 99%, or 100% identical to any one of amino acid sequences AAS, AVS, DAS, DNN, EDN, EVS, GAS, GNG, KAS, KVS, LVS, NTD, STS, WAS, and YTS; and (iii) a CDR3 having an amino acid sequence that is at least 65%, at least 70%, at least 75%, at least 80%, at least 85%, at least 90%, at least 95%, at least 99%, or 100% identical to any one of SEQ ID NOs: 1360, 1832, 1839, 1846, 1853, 1860, 1867, 1873, 1879, 1886, 1892, 1899, 1906, 1912, 1918, 1925, 1932, 1939, 1946, 1951, 1957, 1964, and 1970;
[6686] VL2 comprises (i) a complementarity determining region (CDR) 1 having an amino acid sequence that is at least 65%, at least 70%, at least 75%, at least 80%, at least 85%, at least 90%, at least 95%, at least 99%, or 100% identical to any one of SEQ ID NOs: 1120, 1228, 1359, 1519, 1831, 1838, 1845, 1852, 1859, 1866, 1872, 1878, 1885, 1891, 1898, 1905, 1911, 1917, 1924, 1931, 1938, 1945, and 1963; (ii) a CDR2 having an amino acid sequence that is at least 65%, at least 70%, at least 75%, at least 80%, at least 85%, at least 90%, at least 95%, at least 99%, or 100% identical to any one of amino acid sequences AAS, AVS, DAS, DNN, EDN, EVS, GAS, GNG, KAS, KVS, LVS, NTD, STS, WAS, and YTS; and (iii) a CDR3 having an amino acid sequence that is at least 65%, at least 70%, at least 75%, at least 80%, at least 85%, at least 90%, at least 95%, at least 99%, or 100% identical to any one of SEQ ID NOs: 1360, 1832, 1839, 1846, 1853, 1860, 1867, 1873, 1879, 1886, 1892, 1899, 1906, 1912, 1918, 1925, 1932, 1939, 1946, 1951, 1957, 1964, and 1970;
[6687] VL3 comprises (i) a complementarity determining region (CDR) 1 having an amino acid sequence that is at least 65%, at least 70%, at least 75%, at least 80%, at least 85%, at least 90%, at least 95%, at least 99%, or 100% identical to any one of SEQ ID NOs: 1120, 1228, 1359, 1519, 1831, 1838, 1845, 1852, 1859, 1866, 1872, 1878, 1885, 1891, 1898, 1905, 1911, 1917, 1924, 1931, 1938, 1945, and 1963; (ii) a CDR2 having an amino acid sequence that is at least 65%, at least 70%, at least 75%, at least 80%, at least 85%, at least 90%, at least 95%, at least 99%, or 100% identical to any one of amino acid sequences AAS, AVS, DAS, DNN, EDN, EVS, GAS, GNG, KAS, KVS, LVS, NTD, STS, WAS, and YTS; and (iii) a CDR3 having an amino acid sequence that is at least 65%, at least 70%, at least 75%, at least 80%, at least 85%, at least 90%, at least 95%, at least 99%, or 100% identical to any one of SEQ ID NOs: 1360, 1832, 1839, 1846, 1853, 1860, 1867, 1873, 1879, 1886, 1892, 1899, 1906, 1912, 1918, 1925, 1932, 1939, 1946, 1951, 1957, 1964, and 1970;
[6688] VL4 comprises (i) a complementarity determining region (CDR) 1 having an amino acid sequence that is at least 65%, at least 70%, at least 75%, at least 80%, at least 85%, at least 90%, at least 95%, at least 99%, or 100% identical to any one of SEQ ID NOs: 1120, 1228, 1359, 1519, 1831, 1838, 1845, 1852, 1859, 1866, 1872, 1878, 1885, 1891, 1898, 1905, 1911, 1917, 1924, 1931, 1938, 1945, and 1963; (ii) a CDR2 having an amino acid sequence that is at least 65%, at least 70%, at least 75%, at least 80%, at least 85%, at least 90%, at least 95%, at least 99%, or 100% identical to any one of amino acid sequences AAS, AVS, DAS, DNN, EDN, EVS, GAS, GNG, KAS, KVS, LVS, NTD, STS, WAS, and YTS; and (iii) a CDR3 having an amino acid sequence that is at least 65%, at least 70%, at least 75%, at least 80%, at least 85%, at least 90%, at least 95%, at least 99%, or 100% identical to any one of SEQ ID NOs: 1360, 1832, 1839, 1846, 1853, 1860, 1867, 1873, 1879, 1886, 1892, 1899, 1906, 1912, 1918, 1925, 1932, 1939, 1946, 1951, 1957, 1964, and 1970;
[6689] VH1 comprises (i) a complementarity determining region (CDR) 1 having an amino acid sequence that is at least 65%, at least 70%, at least 75%, at least 80%, at least 85%, at least 90%, at least 95%, at least 99%, or 100% identical to any one of SEQ ID NOs: 1309, 1362, 1437, 1552, 1618, 1639, 1834, 1841, 1848, 1855, 1862, 1881, 1894, 1901, 1920, 1927, 1934, 1941, 1953, 1959, and 1966; (ii) a CDR2 having an amino acid sequence that is at least 65%, at least 70%, at least 75%, at least 80%, at least 85%, at least 90%, at least 95%, at least 99%, or 100% identical to any one of SEQ ID NOs: 1363, 1835, 1842, 1849, 1856, 1863, 1869, 1875, 1882, 1888, 1895, 1902, 1908, 1914, 1921, 1928, 1935, 1942, 1948, 1954, 1960, 1967, and 1972; and (iii) a CDR3 having an amino acid sequence that is at least 65%, at least 70%, at least 75%, at least 80%, at least 85%, at least 90%, at least 95%, at least 99%, or 100% identical to any one of SEQ ID NOs: 1364, 1836, 1843, 1850, 1857, 1864, 1870, 1876, 1883, 1889, 1896, 1903, 1909, 1915, 1922, 1929, 1936, 1943, 1949, 1955, 1961, 1968, and 1973;
[6690] VH2 comprises (i) a complementarity determining region (CDR) 1 having an amino acid sequence that is at least 65%, at least 70%, at least 75%, at least 80%, at least 85%, at least 90%, at least 95%, at least 99%, or 100% identical to any one of SEQ ID NOs: 1309, 1362, 1437, 1552, 1618, 1639, 1834, 1841, 1848, 1855, 1862, 1881, 1894, 1901, 1920, 1927, 1934, 1941, 1953, 1959, and 1966; (ii) a CDR2 having an amino acid sequence that is at least 65%, at least 70%, at least 75%, at least 80%, at least 85%, at least 90%, at least 95%, at least 99%, or 100% identical to any one of SEQ ID NOs: 1363, 1835, 1842, 1849, 1856, 1863, 1869, 1875, 1882, 1888, 1895, 1902, 1908, 1914, 1921, 1928, 1935, 1942, 1948, 1954, 1960, 1967, and 1972; and (iii) a CDR3 having an amino acid sequence that is at least 65%, at least 70%, at least 75%, at least 80%, at least 85%, at least 90%, at least 95%, at least 99%, or 100% identical to any one of SEQ ID NOs: 1364, 1836, 1843, 1850, 1857, 1864, 1870, 1876, 1883, 1889, 1896, 1903, 1909, 1915, 1922, 1929, 1936, 1943, 1949, 1955, 1961, 1968, and 1973;
[6691] VH3 comprises (i) a complementarity determining region (CDR) 1 having an amino acid sequence that is at least 65%, at least 70%, at least 75%, at least 80%, at least 85%, at least 90%, at least 95%, at least 99%, or 100% identical to any one of SEQ ID NOs: 1309, 1362, 1437, 1552, 1618, 1639, 1834, 1841, 1848, 1855, 1862, 1881, 1894, 1901, 1920, 1927, 1934, 1941, 1953, 1959, and 1966; (ii) a CDR2 having an amino acid sequence that is at least 65%, at least 70%, at least 75%, at least 80%, at least 85%, at least 90%, at least 95%, at least 99%, or 100% identical to any one of SEQ ID NOs: 1363, 1835, 1842, 1849, 1856, 1863, 1869, 1875, 1882, 1888, 1895, 1902, 1908, 1914, 1921, 1928, 1935, 1942, 1948, 1954, 1960, 1967, and 1972; and (iii) a CDR3 having an amino acid sequence that is at least 65%, at least 70%, at least 75%, at least 80%, at least 85%, at least 90%, at least 95%, at least 99%, or 100% identical to any one of SEQ ID NOs: 1364, 1836, 1843, 1850, 1857, 1864, 1870, 1876, 1883, 1889, 1896, 1903, 1909, 1915, 1922, 1929, 1936, 1943, 1949, 1955, 1961, 1968, and 1973; and/or
[6692] VH4 comprises (i) a complementarity determining region (CDR) 1 having an amino acid sequence that is at least 65%, at least 70%, at least 75%, at least 80%, at least 85%, at least 90%, at least 95%, at least 99%, or 100% identical to any one of SEQ ID NOs: 1309, 1362, 1437, 1552, 1618, 1639, 1834, 1841, 1848, 1855, 1862, 1881, 1894, 1901, 1920, 1927, 1934, 1941, 1953, 1959, and 1966; (ii) a CDR2 having an amino acid sequence that is at least 65%, at least 70%, at least 75%, at least 80%, at least 85%, at least 90%, at least 95%, at least 99%, or 100% identical to any one of SEQ ID NOs: 1363, 1835, 1842, 1849, 1856, 1863, 1869, 1875, 1882, 1888, 1895, 1902, 1908, 1914, 1921, 1928, 1935, 1942, 1948, 1954, 1960, 1967, and 1972; and (iii) a CDR3 having an amino acid sequence that is at least 65%, at least 70%, at least 75%, at least 80%, at least 85%, at least 90%, at least 95%, at least 99%, or 100% identical to any one of SEQ ID NOs: 1364, 1836, 1843, 1850, 1857, 1864, 1870, 1876, 1883, 1889, 1896, 1903, 1909, 1915, 1922, 1929, 1936, 1943, 1949, 1955, 1961, 1968, and 1973; or
[6693] (iv)
[6694] VL1 comprises an amino acid sequence that is at least 65%, at least 70%, at least 75%, at least 80%, at least 85%, at least 90%, at least 95%, at least 99%, or 100% identical to any one of SEQ ID NOs: 1361, 1833, 1840, 1847, 1854, 1861, 1868, 1874, 1880, 1887, 1893, 1900, 1907, 1913, 1919, 1926, 1933, 1940, 1947, 1952, 1958, 1965, and 1971;
[6695] VL2 comprises an amino acid sequence that is at least 65%, at least 70%, at least 75%, at least 80%, at least 85%, at least 90%, at least 95%, at least 99%, or 100% identical to any one of SEQ ID NOs: 1361, 1833, 1840, 1847, 1854, 1861, 1868, 1874, 1880, 1887, 1893, 1900, 1907, 1913, 1919, 1926, 1933, 1940, 1947, 1952, 1958, 1965, and 1971;
[6696] VL3 comprises an amino acid sequence that is at least 65%, at least 70%, at least 75%, at least 80%, at least 85%, at least 90%, at least 95%, at least 99%, or 100% identical to any one of SEQ ID NOs: 1361, 1833, 1840, 1847, 1854, 1861, 1868, 1874, 1880, 1887, 1893, 1900, 1907, 1913, 1919, 1926, 1933, 1940, 1947, 1952, 1958, 1965, and 1971;
[6697] VL4 comprises an amino acid sequence that is at least 65%, at least 70%, at least 75%, at least 80%, at least 85%, at least 90%, at least 95%, at least 99%, or 100% identical to any one of SEQ ID NOs: 1361, 1833, 1840, 1847, 1854, 1861, 1868, 1874, 1880, 1887, 1893, 1900, 1907, 1913, 1919, 1926, 1933, 1940, 1947, 1952, 1958, 1965, and 1971;
[6698] VH1 comprises an amino acid sequence that is at least 65%, at least 70%, at least 75%, at least 80%, at least 85%, at least 90%, at least 95%, at least 99%, or 100% identical to any one of SEQ ID NOs: 1365, 1837, 1844, 1851, 1858, 1865, 1871, 1877, 1884, 1890, 1897, 1904, 1910, 1916, 1923, 1930, 1937, 1944, 1950, 1956, 1962, 1969, and 1974;
[6699] VH2 comprises an amino acid sequence that is at least 65%, at least 70%, at least 75%, at least 80%, at least 85%, at least 90%, at least 95%, at least 99%, or 100% identical to any one of SEQ ID NOs: 1365, 1837, 1844, 1851, 1858, 1865, 1871, 1877, 1884, 1890, 1897, 1904, 1910, 1916, 1923, 1930, 1937, 1944, 1950, 1956, 1962, 1969, and 1974;
[6700] VH3 comprises an amino acid sequence that is at least 65%, at least 70%, at least 75%, at least 80%, at least 85%, at least 90%, at least 95%, at least 99%, or 100% identical to any one of SEQ ID NOs: 1365, 1837, 1844, 1851, 1858, 1865, 1871, 1877, 1884, 1890, 1897, 1904, 1910, 1916, 1923, 1930, 1937, 1944, 1950, 1956, 1962, 1969, and 1974; and/or
[6701] VH4 comprises an amino acid sequence that is at least 65%, at least 70%, at least 75%, at least 80%, at least 85%, at least 90%, at least 95%, at least 99%, or 100% identical to any one of SEQ ID NOS: 1365, 1837, 1844, 1851, 1858, 1865, 1871, 1877, 1884, 1890, 1897, 1904, 1910, 1916, 1923, 1930, 1937, 1944, 1950, 1956, 1962, 1969, and 1974.

[6702] In some aspects, one or both of the antigen binding polypeptides comprised in the antigen binding polypeptide complexes disclosed herein, comprise one or more CL, as indicated in the formulas representing the antigen binding polypeptide complexes disclosed herein. In some aspects, the CL comprises an amino acid sequence at least 65%, at least 70%, at least 75%, at least 80%, at least 85%, at least 90%, at least 95%, at least 99%, or 100% identical to any one of SEQ ID NOs: 374, 637, or 1092-1095.

[6703] In some aspects, one or both of the antigen binding polypeptides comprised in the antigen binding polypeptide complexes disclosed herein, comprise one or more CH1, as indicated in the formulas representing the antigen binding polypeptide complexes disclosed herein. In some aspects, the CH1 comprises an amino acid sequence at least 65%, at least 70%, at least 75%, at least 80%, at least 85%, at least 90%, at least 95%, at least 99%, or 100% identical to any one of SEQ ID NOs: 375, 634, 1070, 1071, or 1086-1091.

[6704] In some aspects, one or both of the antigen binding polypeptides comprised in the antigen binding polypeptide complexes provided herein further comprise an Fc region. In some aspects, one or both of the antigen binding polypeptides comprised in the antigen binding polypeptide complexes provided herein further comprise an Fc region at the carboxy-terminus. In some aspects, the Fc region comprises an immunoglobulin heavy chain constant region 2 (CH2) and/or an immunoglobulin heavy chain constant region 3 (CH3). In some aspects, the Fc region further comprises an immunoglobulin hinge (i.e., a hinge region). In some aspects, the hinge region is interposed between a CH1 and a CH2 (i.e., a hinge region is localized between the carboxy terminal residue of a CH1 and the N-terminal residue of a CH2). In some aspects, the hinge region comprises an amino acid sequence at least 65%, at least 70%, at least 75%, at least 80%, at least 85%, at least 90%, at least 95%, at least 99%, or 100% identical to any one of SEQ ID NOS: 635, 636, 1072, 1073, or 1074. In some aspects, the Fc region comprises a CH2 and a CH3. In some aspects, the CH2 comprises an amino acid sequence that is at least 65%, at least 70%, at least 75%, at least 80%, at least 85%, at least 90%, at least 95%, at least 99%, or 100% identical to any one of SEQ ID NOS: 1075-1078. In some aspects, the CH3 comprises an amino acid sequence that is at least 65%, at least 70%, at least 75%, at least 80%, at least 85%, at least 90%, at least 95%, at least 99%, or 100% identical to any one of SEQ ID NOs: 1079-1085. In some aspects, the Fc region comprises an amino acid sequence that is at least 65%, at least 70%, at least 75%, at least 80%, at least 85%, at least 90%, at least 95%, at least 99%, or 100% identical to any one of SEQ ID NOs: 376-380.

[6705] In some aspects, the Fc region comprises one or more amino acid substitutions. In some aspects, the one or more amino acid substitutions comprise one or more half-life extension amino acid substitutions. In some aspects, the one or more half-life extension amino acid substitutions comprise one or more of amino acid substitutions M428L, N434A, N434S, L234F, L235E, P331S, M252Y, S254T, or T256E, or equivalent thereof, based on the EU numbering scheme. In some aspects, the one or more half-life extension amino acid substitutions comprise a LA (M428L and N434A, or equivalent thereof, based on the EU numbering scheme) amino acid substitution. In some aspects, the one or more half-life extension amino acid substitutions comprise a LS (M428L and N434S, or equivalent thereof, based on the EU numbering scheme) amino acid substitution. In some aspects, the one or more half-life extension amino acid substitutions comprise L234F and L235E, or equivalent thereof (based on the EU numbering scheme) amino acid substitutions. In some aspects, the one or more half-life extension amino acid substitutions comprise a TM (L234F, L235E, and P331S, or equivalent thereof, based on the EU numbering scheme) amino acid substitution. In some aspects, the one or more half-life extension amino acid substitutions comprise a YTE (M252Y, S254T, and T256E, or equivalent thereof, based on the EU numbering scheme) amino acid substitution.

[6706] In some aspects, the Fc region comprises at least one knob-into-hole modification. In some aspects, the antigen binding polypeptides complexes disclosed herein are IgG1 or IgG4 antibodies or antigen binding fragments thereof. In some aspects, the knob-into-hole modification comprises one or more of knob substitutions of S354C and T366W, or equivalent thereof, and/or one or more of hole substitutions of Y349C, T366S, L368A, Y407V, or equivalent thereof, or a combination thereof, based on the EU numbering scheme. In some aspects, the Fc region comprises a knob-into-hole modification comprising knob substitutions of S354C and T366W, or equivalent thereof, and/or hole substitutions of Y349C, T366S, L368A, and Y407V, or equivalent thereof, and/or a half-life extension amino acid substitution comprising: a LA (M428L and N434A, or equivalent thereof, based on the EU numbering scheme) amino acid substitution, a LS (M428L and N434S, or equivalent thereof, based on the EU numbering scheme) amino acid substitution, L234F and L235E, or equivalent thereof (based on the EU numbering scheme) amino acid substitutions, a TM (L234F, L235E, and P331S, or equivalent thereof, based on the EU numbering scheme) amino acid substitution, a YTE (M252Y, S254T, and T256E, or equivalent thereof, based on the EU numbering scheme) amino acid substitution, or any combination thereof.

[6707] In some aspects, the Fc region comprises knob substitutions of S354C and T366W, or equivalent thereof, and a half-life extension amino acid substitution comprising: a LA (M428L and N434A, or equivalent thereof, based on the EU numbering scheme) amino acid substitution, a LS (M428L and N434S, or equivalent thereof, based on the EU numbering scheme) amino acid substitution, L234F and L235E, or equivalent thereof (based on the EU numbering scheme) amino acid substitutions, a TM (L234F, L235E, and P331S, or equivalent thereof, based on the EU numbering scheme) amino acid substitution, a YTE (M252Y, S254T, and T256E, or equivalent thereof, based on the EU numbering scheme) amino acid substitution, or any combination thereof.

[6708] In some aspects, the Fc region comprises hole substitutions of Y349C, T366S, L368A, and Y407V, or equivalent thereof, and a half-life extension amino acid substitution comprising: a LA (M428L and N434A, or equivalent thereof, based on the EU numbering scheme) amino acid substitution, a LS (M428L and N434S, or equivalent thereof, based on the EU numbering scheme) amino acid substitution. L234F and L235E, or equivalent thereof (based on the EU numbering scheme) amino acid substitutions, a TM (L234F, L235E, and P331S, or equivalent thereof, based on the EU numbering scheme) amino acid substitution, a YTE (M252Y, S254T, and T256E, or equivalent thereof, based on the EU numbering scheme) amino acid substitution, or any combination thereof.

[6709] In some aspects, one or both of the antigen binding polypeptides comprised in the antigen binding polypeptide complexes disclosed herein comprise one or more Fc effector function knockout mutation. In some aspects, one or both of the antigen binding polypeptides comprised in the antigen binding polypeptide complexes disclosed herein are IgG1 or IgG4 antibodies or antigen binding fragments thereof. In some aspects, the Fc effector function knockout mutation is L234A, L235A, P239A, or equivalent thereof, or a combination thereof, based on the EU numbering scheme.

[6710] In some aspects, one or both of the antigen binding polypeptides comprised in the antigen binding polypeptide complexes disclosed herein comprise a mutation at a glycosylation site. In some aspects, the mutation at a glycosylation site is a mutation at an N-glycosylation site. In some aspects, one or both of the antigen binding polypeptides comprised in the antigen binding polypeptide complexes disclosed herein comprise a VH comprising a mutation at a glycosylation site. In some aspects, the mutation at a glycosylation site is a mutation at an N-glycosylation site. In some aspects, the mutation at an N-glycosylation site is at amino acid N62, or equivalent thereof, of the VH region or equivalent thereof. In some aspects, the mutation at an N-glycosylation site at amino acid N62 is N62Q or N62S, or equivalent thereof.

[6711] In some aspects, one or both of the antigen binding polypeptides comprised in the antigen binding polypeptide complexes disclosed herein, comprise one or more optional linkers. The one or more optional linkers are indicated herein as Ln, wherein n is an integer, and the integer next to each L indicates each L comprised in the antigen binding polypeptides comprised in the antigen binding polypeptide complexes disclosed herein. For example, if an antigen binding polypeptide comprised in the antigen binding polypeptide complexes disclosed herein comprises two linkers, the first linker from N-terminus to C-terminus is herein indicated as L1, and the second linker from N-terminus to C-terminus is herein indicated as L2. If an antigen binding polypeptide complex disclosed herein comprises a first antigen binding polypeptide comprising two linkers, indicated herein as L1 and L2, as explained above, the linkers comprised in the second antigen binding polypeptide are indicated with the following integer, in this example, the first linker from N-terminus to C-terminus of the second antigen binding polypeptide is herein indicated as L3, the second linker from N-terminus to C-terminus of the second antigen binding polypeptide is herein indicated as L3. In some aspects, any one of the optional linkers each independently have a length of from 0 amino acids to about 50 amino acids. In some aspects, any one of the optional linkers each independently have a length of from 5 amino acids to about 40 amino acids.

[6712] In some aspects, any one of the optional linkers are non-immunogenic. In some aspects, any one of the optional linkers do not contain a consensus T cell epitope.

[6713] In some aspects, any of Ln comprises an amino acid sequence of G or A, or an amino acid sequence at least 65%, at least 70%, at least 75%, at least 80%, at least 85%, at least 90%, at least 95%, at least 99%, or 100% identical to amino acid sequence GSS or ASG, or an amino acid sequence at least 65%, at least 70%, at least 75%, at least 80%, at least 85%, at least 90%, at least 95%, at least 99%, or 100% identical to any one of SEQ ID NOs: 333-373 and 967-971. In some aspects. Ln comprises an amino acid sequence at least 65%, at least 70%, at least 75%, at least 80%, at least 85%, at least 90%, at least 95%, at least 99%, or 100% identical to any one of SEQ ID NOs: 333-345 and 967-971.

[6714] In some aspects, the first polypeptide comprises a structure represented by VL1-VL2-VH2-VH1-CL-CH1, VL1-L1-VL2-L2-VH2-L3-VH1-L4-CL-L5-CH1, VL1-VL2-VH2-VH1-CL-CH1-CH2-CH3, or VL1-L1-VL2-L2-VH2-L3-VH1-L4-CL-L5-CH1-CH2-CH3 and the second polypeptide comprises a structure represented by VL3-VL4-VH4-VH3-CL-CH1, VL3-L6-VL4-L7-VH4-L8-VH3-L9-CL-L10-CH1, VL3-VL4-VH4-VH3-CL-CH1-CH2-CH3, or VL3-L6-VL4-L7-VH4-L8-VH3-L9-CL-L10-CH1-CH2-CH3,
[6715] wherein:
[6716] (a)
[6717] (i)
[6718] VL1 comprises a light chain complementarity determining region 1 (LCDR1), LCDR2, and/or LCDR3 of an antibody selected from the group consisting of losatuxizumab vedotin, utomilumab, urelumab, oleclumab, naptumomab estafenatox, ascrinvacumab, pintumomab, tacatuzumab tetraxetan, nesvacumab, vanucizumab, timolumab, vapaliximab, vepalimomab, enapotamab vedotin, ianalumab, belimumab, tabalumab, tibulizumab, belantamab mafodotin, teclistamab, teclistamab, detumomab, nacolomab tafenatox, eculizumab, lendalizumab, pexelizumab, pozelimab, ravulizumab, tesidolumab, vilobelimab, abagovomab, igovomab, oregovomab, sofituzumab vedotin, cantuzumab mertansine, cantuzuma bravtansine, girentuximab, altumomab pentetate, arcitumomab, besilesomab, bertilimumab, plozalizumab, mogamulizumab, leronlimab, PRO140, rovelizumab, rovelizumab, talacotuzumab, benralizumab, tavolimab, vonlerolizumab, gavilimomab, ziralimumab, fanolesomab, ipilimumab, ruplizumab, toralizumab, dapirolizumab pegol, toralizumab, dapirolizumab pegol, ruplizumab, blinatumomab, inebilizumab, loncastuximab tesirine, SGN-CD19A, tafasitamab, taplitumomab paptox, XMAB-5574, Budoprutug, Obexelimab, duvortuxizumab, englumafusp alfa, Emfizatamab, zeripatamig, siplizumab, blontuvetmab, FBTA05, ibritumomab tiuxetan, obinutuzumab, ocaratuzumab, ocrelizumab, ofatumumab, rituximab, tositumomab, ublituximab, veltuzumab, divozilimab, eramkafusp alfa, ripertamab, zuberitamab, glofitamab, nofetumomab merpentan, samalizumab, imvotamab, odronextamab, plamotamab, bectumomab, inotuzumab ozogamicin, moxetumomab pasudotox, pinatuzumab vedotin, gomiliximab, lumiliximab, inolimomab, inolimomab, daclizumab, camidanluma btesirine, basiliximab, varlilumab, omburtamab, enoblituzumab, vopratelimab, lulizumabpegol, TGN1412, muromonab-CD3, otelixizumab, teplizumab, visilizumab, epcoritamab, epcoritamab, brentuximab vedotin, iratumumab, azintuxizumab vedotin, gemtuzumab ozogamicin, lintuzumab, vadastuximab talirine, naratuximab emtansine, otlertuzumab, lilotomab satetraxetan, tetulomab, daratumumab, isatuximab, foralumab, mosunetuzumab, mosunetuzumab, cedelizumab, ibalizumab, keliximab, priliximab, tregalizumab, zanolimumab, bleselumab, iscalimab, lucatumumab, ravagalimab, selicrelumab, teneliximab, vanalimab, abciximab, bivatuzumab, iomab-B, telimomab aritox, zolimomab aritox, abituzumab, intetumumab, alemtuzumab, tamtuvetmab, lorvotuzumab mertansine, itolizumab, cusatuzumab, vorsetuzumab mafodotin, milatuzumab, iladatuzumab vedotin, polatuzumab vedotin, galiximab, cibisatamab, zolbetuximab, naxitamab, tisotumab vedotin, olendalizumab, pamrevlumab, lacnotuzumab, cabiralizumab, emactuzumab, axatilimab, gimsilumab, lenzilumab, namilumab, tremelimumab, ulocuplumab, tepoditamab, rovalpituzumab tesirine, tarlatamab, demcizumab, navicixizumab, drozitumab, parsatuzumab, depatuxizumab mafodotin, modotuximab, carotuximab, adecatumumab, adecatumumab, oportuzumab monatox, solitomab, tucotuzumab celmoleukin, edrecolomab, catumaxomab, ifabotuzumab, fibatuzumab, zalutumumab, panitumumab, cetuximab, futuximab, imgatuzumab, laprituximab emtansine, matuzumab, necitumumab, nimotuzumab, tomuzotuximab, amivantamab, amivantamab, epitumomab cituxetan, sontuzumab, duligotuzumab, elgemtumab, lumretuzumab, patritumab, seribantumab, zenocutuzumab, sibrotuzumab, burosumab, aprutumab ixadotin, radretumab, pasotuxizumab, farletuzumab, mirvetuximab soravtansine, vantictumab, TRBS07, 3F8, dinutuximab, dinutuximab beta, ecromeximab, mitumomab, andecaliximab, capromab, codrituzumab, glembatumumab vedotin, talquetamab, talquetamab, trevogrumab, indusatumab vedotin, ficlatuzumab, rilotumumab, zatuximab, pentuzimab, pentuzimab, margetuximab, timigutuzumab, trastuzumab, trastuzumab duocarmazine, trastuzumab emtansine, gancotamab, pertuzumab, crtumaxomab, emibetuzumab, telisotuzumab, telisotuzumab vedotin, derlotuximab biotin, apolizumab, onartuzumab, bersanlimab, enlimomabpegol, rontalizumab, sifalimumab, talizumab, ganitumab, istiratumab, robatumumab, teprotumumab, figitumumab, ganitumab, istiratumab, robatumumab, teprotumumab, cixutumumab, dalotuzumab, xentuzumab, dusigitumab, canakinumab, ustekinumab, ustekinumab, ustekinumab, briakinumab, briakinumab, abrezekimab, lebrikizumab, romilkimab, TNX-650, tralokinumab, anrukinzumab, brodalumab, ixekizumab, netakimab, perakizumab, secukinumab, vunakizumab, afasevikumab, afasevikumab, bimekizumab, bimekizumab, remtolumab, bermekimab, lutikizumab, lutikizumab, gevokizumab, cergutuzumab amunaleukin, fletikumab, fezakinumab, brazikumab, guselkumab, mirikizumab, tildrakizumab, risankizumab, flotetuzumab, nemolizumab, pascolizumab, dupilumab, mepolizumab, reslizumab, clazakizumab, elsilimomab, olokizumab, sarilumab, siltuximab, sirukumab, vobarilizumab, tocilizumab, SA237, satralizumab, enokizumab, prezalizumab, natalizumab, abrilumab, abrilumab, vedolizumab, volociximab, tadocizumab, etaracizumab, etrolizumab, spesolimab, vatelizumab, erlizumab, lirilumab, relatlimab, cBR96-doxorubicinimmunoconjugate, odulimomab, efalizumab, ladiratuzumab vedotin, simtuzumab, samrotamab vedotin, aselizumab, lupartumab amadotin, imalumab, carlumab, imaprelimab, amatuximab, amatuximab, anctumab ravtansine, narnatumab, clivatuzumab tetraxetan, pemtumomab, gatipotuzumab, ensituximab, lemalesomab, sulesomab, enfortumab vedotin, racotumomab, monalizumab, brontictuzumab, tarextumab, vesencumab, oxelumab, gilvetmab, tislelizumab, dostarlimab, BCD-100, nivolumab, PDR001, pembrolizumab, pidilizumab, retifanlimab, spartalizumab, sintilimab, cemiplimab, olaratumab, tovetumab, rinucumab, atezolizumab, avelumab, durvalumab, lifastuzumab vedotin, bavituximab, acapatamab, capromab, rosopatamab, nezastomig, pasotuxizumab, pelgifatamab, voxalatamab, cofetuzumab pelidotin, denosumab, rosmantuzumab, cirmtuzumab, atinumab, indatuximab ravtansinc, elotuzumab, sirtratumab vedotin, sonepcizumab, vandortuzumab vedotin, minretumomab, satumomab pendetide, maslimomab, ontuxizumab, tenatumomab, fresolimumab, metelimumab, lerdelimumab, tezepelumab, etigilimab, tiragotumab, placulumab, prezalumab, infliximab, nerelimomab, ozoralizumab, adalimumab, afelimomab, certolizumab pegol, golimumab, mapatumumab, conatumumab, lexatumumab, tigatuzumab, sacituzumab govitecan, votumumab, pogalizumab, letolizumab, pankomab, anatumomab mafenatox, enavatuzumab, flanvotumab, brolucizumab, ranibizumab, varisacumab, bevacizumab, faricimab, icrucumab, alacizumab pegol, ramucirumab, pritumumab, and onvatilimab;
[6719] VL2 comprises a light chain complementarity determining region 1 (LCDR1), LCDR2, and/or LCDR3 of an antibody selected from the group consisting of losatuxizumab vedotin, utomilumab, urelumab, oleclumab, naptumomab estafenatox, ascrinvacumab, pintumomab, tacatuzumab tetraxetan, nesvacumab, vanucizumab, timolumab, vapaliximab, vepalimomab, enapotamab vedotin, ianalumab, belimumab, tabalumab, tibulizumab, belantamab mafodotin, teclistamab, teclistamab, detumomab, nacolomab tafenatox, eculizumab, lendalizumab, pexelizumab, pozelimab, ravulizumab, tesidolumab, vilobelimab, abagovomab, igovomab, oregovomab, sofituzumab vedotin, cantuzumab mertansine, cantuzuma bravtansine, girentuximab, altumomab pentetate, arcitumomab, besilesomab, bertilimumab, plozalizumab, mogamulizumab, leronlimab, PRO140, rovelizumab, rovelizumab, talacotuzumab, benralizumab, tavolimab, vonlerolizumab, gavilimomab, ziralimumab, fanolesomab, ipilimumab, ruplizumab, toralizumab, dapirolizumab pegol, toralizumab, dapirolizumab pegol, ruplizumab, blinatumomab, inebilizumab, loncastuximab tesirine, SGN-CD19A, tafasitamab, taplitumomab paptox, XMAB-5574, Budoprutug, Obexelimab, duvortuxizumab, englumafusp alfa, Emfizatamab, zeripatamig, siplizumab, blontuvetmab, FBTA05, ibritumomab tiuxetan, obinutuzumab, ocaratuzumab, ocrelizumab, ofatumumab, rituximab, tositumomab, ublituximab, veltuzumab, divozilimab, eramkafusp alfa, ripertamab, zuberitamab, glofitamab, nofetumomab merpentan, samalizumab, imvotamab, odronextamab, plamotamab, bectumomab, inotuzumab ozogamicin, moxetumomab pasudotox, pinatuzumab vedotin, gomiliximab, lumiliximab, inolimomab, inolimomab, daclizumab, camidanluma btesirine, basiliximab, varlilumab, omburtamab, enoblituzumab, vopratelimab, lulizumabpegol, TGN1412, muromonab-CD3, otelixizumab, teplizumab, visilizumab, epcoritamab, epcoritamab, brentuximab vedotin, iratumumab, azintuxizumab vedotin, gemtuzumab ozogamicin, lintuzumab, vadastuximab talirine, naratuximab emtansine, otlertuzumab, lilotomab satetraxetan, tetulomab, daratumumab, isatuximab, foralumab, mosunctuzumab, mosunetuzumab, cedelizumab, ibalizumab, keliximab, priliximab, tregalizumab, zanolimumab, bleselumab, iscalimab, lucatumumab, ravagalimab, selicrelumab, teneliximab, vanalimab, abciximab, bivatuzumab, iomab-B, telimomab aritox, zolimomab aritox, abituzumab, intetumumab, alemtuzumab, tamtuvetmab, lorvotuzumab mertansine, itolizumab, cusatuzumab, vorsetuzumab mafodotin, milatuzumab, iladatuzumab vedotin, polatuzumab vedotin, galiximab, cibisatamab, zolbetuximab, naxitamab, tisotumab vedotin, olendalizumab, pamrevlumab, lacnotuzumab, cabiralizumab, emactuzumab, axatilimab, gimsilumab, lenzilumab, namilumab, tremelimumab, ulocuplumab, tepoditamab, rovalpituzumab tesirine, tarlatamab, demcizumab, navicixizumab, drozitumab, parsatuzumab, depatuxizumab mafodotin, modotuximab, carotuximab, adecatumumab, adecatumumab, oportuzumab monatox, solitomab, tucotuzumab celmoleukin, edrecolomab, catumaxomab, ifabotuzumab, fibatuzumab, zalutumumab, panitumumab, cetuximab, futuximab, imgatuzumab, laprituximab emtansine, matuzumab, necitumumab, nimotuzumab, tomuzotuximab, amivantamab, amivantamab, epitumomab cituxetan, sontuzumab, duligotuzumab, elgemtumab, lumretuzumab, patritumab, scribantumab, zenocutuzumab, sibrotuzumab, burosumab, aprutumab ixadotin, radretumab, pasotuxizumab, farletuzumab, mirvetuximab soravtansine, vantictumab, TRBS07, 3F8, dinutuximab, dinutuximab beta, ecromeximab, mitumomab, andecaliximab, capromab, codrituzumab, glembatumumab vedotin, talquetamab, talquetamab, trevogrumab, indusatumab vedotin, ficlatuzumab, rilotumumab, zatuximab, pentuzimab, pentuzimab, margetuximab, timigutuzumab, trastuzumab, trastuzumab duocarmazine, trastuzumab emtansine, gancotamab, pertuzumab, ertumaxomab, emibetuzumab, telisotuzumab, telisotuzumab vedotin, derlotuximab biotin, apolizumab, onartuzumab, bersanlimab, enlimomabpegol, rontalizumab, sifalimumab, talizumab, ganitumab, istiratumab, robatumumab, teprotumumab, figitumumab, ganitumab, istiratumab, robatumumab, teprotumumab, cixutumumab, dalotuzumab, xentuzumab, dusigitumab, canakinumab, ustekinumab, ustekinumab, ustekinumab, briakinumab, briakinumab, abrezekimab, lebrikizumab, romilkimab, TNX-650, tralokinumab, anrukinzumab, brodalumab, ixekizumab, netakimab, perakizumab, secukinumab, vunakizumab, afasevikumab, afasevikumab, bimekizumab, bimekizumab, remtolumab, bermekimab, lutikizumab, lutikizumab, gevokizumab, cergutuzumab amunaleukin, fletikumab, fezakinumab, brazikumab, guselkumab, mirikizumab, tildrakizumab, risankizumab, flotetuzumab, nemolizumab, pascolizumab, dupilumab, mepolizumab, reslizumab, clazakizumab, elsilimomab, olokizumab, sarilumab, siltuximab, sirukumab, vobarilizumab, tocilizumab, SA237, satralizumab, enokizumab, prezalizumab, natalizumab, abrilumab, abrilumab, vedolizumab, volociximab, tadocizumab, etaracizumab, etrolizumab, spesolimab, vatelizumab, erlizumab, lirilumab, relatlimab, cBR96-doxorubicinimmunoconjugate, odulimomab, efalizumab, ladiratuzumab vedotin, simtuzumab, samrotamab vedotin, aselizumab, lupartumab amadotin, imalumab, carlumab, imaprelimab, amatuximab, amatuximab, anetumab ravtansine, narnatumab, clivatuzumab tetraxetan, pemtumomab, gatipotuzumab, ensituximab, lemalesomab, sulesomab, enfortumab vedotin, racotumomab, monalizumab, brontictuzumab, tarextumab, vesencumab, oxelumab, gilvetmab, tislelizumab, dostarlimab, BCD-100, nivolumab, PDR001, pembrolizumab, pidilizumab, retifanlimab, spartalizumab, sintilimab, cemiplimab, olaratumab, tovetumab, rinucumab, atezolizumab, avelumab, durvalumab, lifastuzumab vedotin, bavituximab, acapatamab, capromab, rosopatamab, nezastomig, pasotuxizumab, pelgifatamab, voxalatamab, cofetuzumab pelidotin, denosumab, rosmantuzumab, cirmtuzumab, atinumab, indatuximab ravtansine, elotuzumab, sirtratumab vedotin, sonepcizumab, vandortuzumab vedotin, minretumomab, satumomab pendetide, maslimomab, ontuxizumab, tenatumomab, fresolimumab, metelimumab, lerdelimumab, tezepelumab, etigilimab, tiragotumab, placulumab, prezalumab, infliximab, nerelimomab, ozoralizumab, adalimumab, afelimomab, certolizumab pegol, golimumab, mapatumumab, conatumumab, lexatumumab, tigatuzumab, sacituzumab govitecan, votumumab, pogalizumab, letolizumab, pankomab, anatumomab mafenatox, enavatuzumab, flanvotumab, brolucizumab, ranibizumab, varisacumab, bevacizumab, faricimab, icrucumab, alacizumab pegol, ramucirumab, pritumumab, and onvatilimab;
[6720] VL3 comprises a light chain complementarity determining region 1 (LCDR1), LCDR2, and/or LCDR3 of an antibody selected from the group consisting of losatuxizumab vedotin, utomilumab, urelumab, oleclumab, naptumomab estafenatox, ascrinvacumab, pintumomab, tacatuzumab tetraxetan, nesvacumab, vanucizumab, timolumab, vapaliximab, vepalimomab, enapotamab vedotin, ianalumab, belimumab, tabalumab, tibulizumab, belantamab mafodotin, teclistamab, teclistamab, detumomab, nacolomab tafenatox, eculizumab, lendalizumab, pexelizumab, pozelimab, ravulizumab, tesidolumab, vilobelimab, abagovomab, igovomab, oregovomab, sofituzumab vedotin, cantuzumab mertansine, cantuzuma bravtansine, girentuximab, altumomab pentetate, arcitumomab, besilesomab, bertilimumab, plozalizumab, mogamulizumab, leronlimab, PRO140, rovelizumab, rovelizumab, talacotuzumab, benralizumab, tavolimab, vonlerolizumab, gavilimomab, ziralimumab, fanolesomab, ipilimumab, ruplizumab, toralizumab, dapirolizumab pegol, toralizumab, dapirolizumab pegol, ruplizumab, blinatumomab, inebilizumab, loncastuximab tesirine, SGN-CD19A, tafasitamab, taplitumomab paptox, XMAB-5574, Budoprutug, Obexclimab, duvortuxizumab, englumafusp alfa, Emfizatamab, zeripatamig, siplizumab, blontuvetmab, FBTA05, ibritumomab tiuxetan, obinutuzumab, ocaratuzumab, ocrelizumab, ofatumumab, rituximab, tositumomab, ublituximab, veltuzumab, divozilimab, eramkafusp alfa, ripertamab, zuberitamab, glofitamab, nofetumomab merpentan, samalizumab, imvotamab, odronextamab, plamotamab, bectumomab, inotuzumab ozogamicin, moxetumomab pasudotox, pinatuzumab vedotin, gomiliximab, lumiliximab, inolimomab, inolimomab, daclizumab, camidanluma btesirine, basiliximab, varlilumab, omburtamab, enoblituzumab, vopratelimab, lulizumabpegol, TGN1412, muromonab-CD3, otelixizumab, teplizumab, visilizumab, epcoritamab, epcoritamab, brentuximab vedotin, iratumumab, azintuxizumab vedotin, gemtuzumab ozogamicin, lintuzumab, vadastuximab talirine, naratuximab emtansine, otlertuzumab, lilotomab satetraxetan, tetulomab, daratumumab, isatuximab, foralumab, mosunetuzumab, mosunetuzumab, cedelizumab, ibalizumab, keliximab, priliximab, tregalizumab, zanolimumab, bleselumab, iscalimab, lucatumumab, ravagalimab, selicrelumab, teneliximab, vanalimab, abciximab, bivatuzumab, iomab-B, telimomab aritox, zolimomab aritox, abituzumab, intetumumab, alemtuzumab, tamtuvetmab, lorvotuzumab mertansine, itolizumab, cusatuzumab, vorsetuzumab mafodotin, milatuzumab, iladatuzumab vedotin, polatuzumab vedotin, galiximab, cibisatamab, zolbetuximab, naxitamab, tisotumab vedotin, olendalizumab, pamrevlumab, lacnotuzumab, cabiralizumab, emactuzumab, axatilimab, gimsilumab, lenzilumab, namilumab, tremelimumab, ulocuplumab, tepoditamab, rovalpituzumab tesirine, tarlatamab, demcizumab, navicixizumab, drozitumab, parsatuzumab, depatuxizumab mafodotin, modotuximab, carotuximab, adecatumumab, adecatumumab, oportuzumab monatox, solitomab, tucotuzumab celmoleukin, edrecolomab, catumaxomab, ifabotuzumab, fibatuzumab, zalutumumab, panitumumab, cetuximab, futuximab, imgatuzumab, laprituximab emtansine, matuzumab, necitumumab, nimotuzumab, tomuzotuximab, amivantamab, amivantamab, epitumomab cituxetan, sontuzumab, duligotuzumab, elgemtumab, lumretuzumab, patritumab, seribantumab, zenocutuzumab, sibrotuzumab, burosumab, aprutumab ixadotin, radretumab, pasotuxizumab, farletuzumab, mirvetuximab soravtansine, vantictumab, TRBS07, 3F8, dinutuximab, dinutuximab beta, ecromeximab, mitumomab, andecaliximab, capromab, codrituzumab, glembatumumab vedotin, talquetamab, talquetamab, trevogrumab, indusatumab vedotin, ficlatuzumab, rilotumumab, zatuximab, pentuzimab, pentuzimab, margetuximab, timigutuzumab, trastuzumab, trastuzumab duocarmazine, trastuzumab emtansine, gancotamab, pertuzumab, ertumaxomab, emibetuzumab, telisotuzumab, telisotuzumab vedotin, derlotuximab biotin, apolizumab, onartuzumab, bersanlimab, enlimomabpegol, rontalizumab, sifalimumab, talizumab, ganitumab, istiratumab, robatumumab, teprotumumab, figitumumab, ganitumab, istiratumab, robatumumab, teprotumumab, cixutumumab, dalotuzumab, xentuzumab, dusigitumab, canakinumab, ustekinumab, ustekinumab, ustekinumab, briakinumab, briakinumab, abrezekimab, lebrikizumab, romilkimab, TNX-650, tralokinumab, anrukinzumab, brodalumab, ixekizumab, netakimab, perakizumab, secukinumab, vunakizumab, afasevikumab, afasevikumab, bimekizumab, bimekizumab, remtolumab, bermekimab, lutikizumab, lutikizumab, gevokizumab, cergutuzumab amunaleukin, fletikumab, fezakinumab, brazikumab, guselkumab, mirikizumab, tildrakizumab, risankizumab, flotetuzumab, nemolizumab, pascolizumab, dupilumab, mepolizumab, reslizumab, clazakizumab, elsilimomab, olokizumab, sarilumab, siltuximab, sirukumab, vobarilizumab, tocilizumab, SA237, satralizumab, enokizumab, prezalizumab, natalizumab, abrilumab, abrilumab, vedolizumab, volociximab, tadocizumab, etaracizumab, etrolizumab, spesolimab, vatelizumab, erlizumab, lirilumab, relatlimab, cBR96-doxorubicinimmunoconjugate, odulimomab, efalizumab, ladiratuzumab vedotin, simtuzumab, samrotamab vedotin, aselizumab, lupartumab amadotin, imalumab, carlumab, imaprelimab, amatuximab, amatuximab, anetumab ravtansine, narnatumab, clivatuzumab tetraxetan, pemtumomab, gatipotuzumab, ensituximab, lemalesomab, sulesomab, enfortumab vedotin, racotumomab, monalizumab, brontictuzumab, tarextumab, vesencumab, oxelumab, gilvetmab, tislelizumab, dostarlimab, BCD-100, nivolumab, PDR001, pembrolizumab, pidilizumab, retifanlimab, spartalizumab, sintilimab, cemiplimab, olaratumab, tovetumab, rinucumab, atezolizumab, avelumab, durvalumab, lifastuzumab vedotin, bavituximab, acapatamab, capromab, rosopatamab, nezastomig, pasotuxizumab, pelgifatamab, voxalatamab, cofetuzumab pelidotin, denosumab, rosmantuzumab, cirmtuzumab, atinumab, indatuximab ravtansine, elotuzumab, sirtratumab vedotin, sonepcizumab, vandortuzumab vedotin, minretumomab, satumomab pendetide, maslimomab, ontuxizumab, tenatumomab, fresolimumab, metelimumab, lerdelimumab, tezepelumab, etigilimab, tiragotumab, placulumab, prezalumab, infliximab, nerelimomab, ozoralizumab, adalimumab, afelimomab, certolizumab pegol, golimumab, mapatumumab, conatumumab, lexatumumab, tigatuzumab, sacituzumab govitecan, votumumab, pogalizumab, letolizumab, pankomab, anatumomab mafenatox, enavatuzumab, flanvotumab, brolucizumab, ranibizumab, varisacumab, bevacizumab, faricimab, icrucumab, alacizumab pegol, ramucirumab, pritumumab, and onvatilimab;
[6721] VL4 comprises a light chain complementarity determining region 1 (LCDR1), LCDR2, and/or LCDR3 of an antibody selected from the group consisting of losatuxizumab vedotin, utomilumab, urelumab, oleclumab, naptumomab estafenatox, ascrinvacumab, pintumomab, tacatuzumab tetraxetan, nesvacumab, vanucizumab, timolumab, vapaliximab, vepalimomab, enapotamab vedotin, ianalumab, belimumab, tabalumab, tibulizumab, belantamab mafodotin, teclistamab, teclistamab, detumomab, nacolomab tafenatox, eculizumab, lendalizumab, pexelizumab, pozelimab, ravulizumab, tesidolumab, vilobelimab, abagovomab, igovomab, oregovomab, sofituzumab vedotin, cantuzumab mertansine, cantuzuma bravtansine, girentuximab, altumomab pentetate, arcitumomab, besilesomab, bertilimumab, plozalizumab, mogamulizumab, leronlimab, PRO140, rovelizumab, rovelizumab, talacotuzumab, benralizumab, tavolimab, vonlerolizumab, gavilimomab, ziralimumab, fanolesomab, ipilimumab, ruplizumab, toralizumab, dapirolizumab pegol, toralizumab, dapirolizumab pegol, ruplizumab, blinatumomab, inebilizumab, loncastuximab tesirine, SGN-CD19A, tafasitamab, taplitumomab paptox, XMAB-5574, Budoprutug, Obexelimab, duvortuxizumab, englumafusp alfa, Emfizatamab, zeripatamig, siplizumab, blontuvetmab, FBTA05, ibritumomab tiuxetan, obinutuzumab, ocaratuzumab, ocrelizumab, ofatumumab, rituximab, tositumomab, ublituximab, veltuzumab, divozilimab, eramkafusp alfa, ripertamab, zuberitamab, glofitamab, nofetumomab merpentan, samalizumab, imvotamab, odronextamab, plamotamab, bectumomab, inotuzumab ozogamicin, moxetumomab pasudotox, pinatuzumab vedotin, gomiliximab, lumiliximab, inolimomab, inolimomab, daclizumab, camidanluma btesirine, basiliximab, varlilumab, omburtamab, enoblituzumab, vopratelimab, lulizumabpegol, TGN1412, muromonab-CD3, otelixizumab, teplizumab, visilizumab, epcoritamab, epcoritamab, brentuximab vedotin, iratumumab, azintuxizumab vedotin, gemtuzumab ozogamicin, lintuzumab, vadastuximab talirine, naratuximab emtansine, otlertuzumab, lilotomab satetraxetan, tetulomab, daratumumab, isatuximab, foralumab, mosunetuzumab, mosunetuzumab, cedelizumab, ibalizumab, keliximab, priliximab, tregalizumab, zanolimumab, bleselumab, iscalimab, lucatumumab, ravagalimab, selicrelumab, teneliximab, vanalimab, abciximab, bivatuzumab, iomab-B, telimomab aritox, zolimomab aritox, abituzumab, intetumumab, alemtuzumab, tamtuvetmab, lorvotuzumab mertansine, itolizumab, cusatuzumab, vorsetuzumab mafodotin, milatuzumab, iladatuzumab vedotin, polatuzumab vedotin, galiximab, cibisatamab, zolbetuximab, naxitamab, tisotumab vedotin, olendalizumab, pamrevlumab, lacnotuzumab, cabiralizumab, emactuzumab, axatilimab, gimsilumab, lenzilumab, namilumab, tremelimumab, ulocuplumab, tepoditamab, rovalpituzumab tesirine, tarlatamab, demcizumab, navicixizumab, drozitumab, parsatuzumab, depatuxizumab mafodotin, modotuximab, carotuximab, adecatumumab, adecatumumab, oportuzumab monatox, solitomab, tucotuzumab celmoleukin, edrecolomab, catumaxomab, ifabotuzumab, fibatuzumab, zalutumumab, panitumumab, cetuximab, futuximab, imgatuzumab, laprituximab emtansine, matuzumab, necitumumab, nimotuzumab, tomuzotuximab, amivantamab, amivantamab, epitumomab cituxetan, sontuzumab, duligotuzumab, elgemtumab, lumretuzumab, patritumab, seribantumab, zenocutuzumab, sibrotuzumab, burosumab, aprutumab ixadotin, radretumab, pasotuxizumab, farletuzumab, mirvetuximab soravtansine, vantictumab, TRBS07, 3F8, dinutuximab, dinutuximab beta, ecromeximab, mitumomab, andecaliximab, capromab, codrituzumab, glembatumumab vedotin, talquetamab, talquetamab, trevogrumab, indusatumab vedotin, ficlatuzumab, rilotumumab, zatuximab, pentuzimab, pentuzimab, margetuximab, timigutuzumab, trastuzumab, trastuzumab duocarmazine, trastuzumab emtansine, gancotamab, pertuzumab, ertumaxomab, emibctuzumab, telisotuzumab, telisotuzumab vedotin, derlotuximab biotin, apolizumab, onartuzumab, bersanlimab, enlimomabpegol, rontalizumab, sifalimumab, talizumab, ganitumab, istiratumab, robatumumab, teprotumumab, figitumumab, ganitumab, istiratumab, robatumumab, teprotumumab, cixutumumab, dalotuzumab, xentuzumab, dusigitumab, canakinumab, ustekinumab, ustekinumab, ustekinumab, briakinumab, briakinumab, abrezekimab, lebrikizumab, romilkimab, TNX-650, tralokinumab, anrukinzumab, brodalumab, ixekizumab, netakimab, perakizumab, secukinumab, vunakizumab, afasevikumab, afasevikumab, bimekizumab, bimekizumab, remtolumab, bermekimab, lutikizumab, lutikizumab, gevokizumab, cergutuzumab amunaleukin, fletikumab, fezakinumab, brazikumab, guselkumab, mirikizumab, tildrakizumab, risankizumab, flotetuzumab, nemolizumab, pascolizumab, dupilumab, mepolizumab, reslizumab, clazakizumab, elsilimomab, olokizumab, sarilumab, siltuximab, sirukumab, vobarilizumab, tocilizumab, SA237, satralizumab, enokizumab, prezalizumab, natalizumab, abrilumab, abrilumab, vedolizumab, volociximab, tadocizumab, etaracizumab, etrolizumab, spesolimab, vatelizumab, erlizumab, lirilumab, relatlimab, cBR96-doxorubicinimmunoconjugate, odulimomab, efalizumab, ladiratuzumab vedotin, simtuzumab, samrotamab vedotin, aselizumab, lupartumab amadotin, imalumab, carlumab, imaprelimab, amatuximab, amatuximab, anetumab ravtansine, narnatumab, clivatuzumab tetraxetan, pemtumomab, gatipotuzumab, ensituximab, lemalesomab, sulesomab, enfortumab vedotin, racotumomab, monalizumab, brontictuzumab, tarextumab, vesencumab, oxelumab, gilvetmab, tislelizumab, dostarlimab, BCD-100, nivolumab, PDR001, pembrolizumab, pidilizumab, retifanlimab, spartalizumab, sintilimab, cemiplimab, olaratumab, tovetumab, rinucumab, atezolizumab, avelumab, durvalumab, lifastuzumab vedotin, bavituximab, acapatamab, capromab, rosopatamab, nezastomig, pasotuxizumab, pelgifatamab, voxalatamab, cofetuzumab pelidotin, denosumab, rosmantuzumab, cirmtuzumab, atinumab, indatuximab ravtansine, elotuzumab, sirtratumab vedotin, sonepcizumab, vandortuzumab vedotin, minretumomab, satumomab pendetide, maslimomab, ontuxizumab, tenatumomab, fresolimumab, metelimumab, lerdelimumab, tezepelumab, etigilimab, tiragotumab, placulumab, prezalumab, infliximab, nerelimomab, ozoralizumab, adalimumab, afelimomab, certolizumab pegol, golimumab, mapatumumab, conatumumab, lexatumumab, tigatuzumab, sacituzumab govitecan, votumumab, pogalizumab, letolizumab, pankomab, anatumomab mafenatox, enavatuzumab, flanvotumab, brolucizumab, ranibizumab, varisacumab, bevacizumab, faricimab, icrucumab, alacizumab pegol, ramucirumab, pritumumab, and onvatilimab;
[6722] VH1 comprises a heavy chain complementarity determining region 1 (HCDR1), HCDR2, and/or HCDR3 of an antibody selected from the group consisting of losatuxizumab vedotin, utomilumab, urelumab, oleclumab, naptumomab estafenatox, ascrinvacumab, pintumomab, tacatuzumab tetraxetan, nesvacumab, vanucizumab, timolumab, vapaliximab, vepalimomab, enapotamab vedotin, ianalumab, belimumab, tabalumab, tibulizumab, belantamab mafodotin, teclistamab, teclistamab, detumomab, nacolomab tafenatox, eculizumab, lendalizumab, pexelizumab, pozelimab, ravulizumab, tesidolumab, vilobelimab, abagovomab, igovomab, oregovomab, sofituzumab vedotin, cantuzumab mertansine, cantuzuma bravtansine, girentuximab, altumomab pentetate, arcitumomab, besilesomab, bertilimumab, plozalizumab, mogamulizumab, leronlimab, PRO140, rovelizumab, rovelizumab, talacotuzumab, benralizumab, tavolimab, vonlerolizumab, gavilimomab, ziralimumab, fanolesomab, ipilimumab, ruplizumab, toralizumab, dapirolizumab pegol, toralizumab, dapirolizumab pegol, ruplizumab, blinatumomab, inebilizumab, loncastuximab tesirine, SGN-CD19A, tafasitamab, taplitumomab paptox, XMAB-5574, Budoprutug, Obexelimab, duvortuxizumab, englumafusp alfa, Emfizatamab, zeripatamig, siplizumab, blontuvetmab, FBTA05, ibritumomab tiuxetan, obinutuzumab, ocaratuzumab, ocrelizumab, ofatumumab, rituximab, tositumomab, ublituximab, veltuzumab, divozilimab, eramkafusp alfa, ripertamab, zuberitamab, glofitamab, nofetumomab merpentan, samalizumab, imvotamab, odronextamab, plamotamab, bectumomab, inotuzumab ozogamicin, moxetumomab pasudotox, pinatuzumab vedotin, gomiliximab, lumiliximab, inolimomab, inolimomab, daclizumab, camidanluma btesirine, basiliximab, varlilumab, omburtamab, enoblituzumab, vopratelimab, lulizumabpegol, TGN1412, muromonab-CD3, otelixizumab, teplizumab, visilizumab, epcoritamab, epcoritamab, brentuximab vedotin, iratumumab, azintuxizumab vedotin, gemtuzumab ozogamicin, lintuzumab, vadastuximab talirine, naratuximab emtansine, otlertuzumab, lilotomab satetraxetan, tetulomab, daratumumab, isatuximab, foralumab, mosunetuzumab, mosunetuzumab, cedelizumab, ibalizumab, keliximab, priliximab, tregalizumab, zanolimumab, bleselumab, iscalimab, lucatumumab, ravagalimab, selicrelumab, teneliximab, vanalimab, abciximab, bivatuzumab, iomab-B, telimomab aritox, zolimomab aritox, abituzumab, intetumumab, alemtuzumab, tamtuvetmab, lorvotuzumab mertansine, itolizumab, cusatuzumab, vorsetuzumab mafodotin, milatuzumab, iladatuzumab vedotin, polatuzumab vedotin, galiximab, cibisatamab, zolbetuximab, naxitamab, tisotumab vedotin, olendalizumab, pamrevlumab, lacnotuzumab, cabiralizumab, emactuzumab, axatilimab, gimsilumab, lenzilumab, namilumab, tremelimumab, ulocuplumab, tepoditamab, rovalpituzumab tesirine, tarlatamab, demcizumab, navicixizumab, drozitumab, parsatuzumab, depatuxizumab mafodotin, modotuximab, carotuximab, adecatumumab, adecatumumab, oportuzumab monatox, solitomab, tucotuzumab celmoleukin, edrecolomab, catumaxomab, ifabotuzumab, fibatuzumab, zalutumumab, panitumumab, cetuximab, futuximab, imgatuzumab, laprituximab emtansine, matuzumab, necitumumab, nimotuzumab, tomuzotuximab, amivantamab, amivantamab, epitumomab cituxetan, sontuzumab, duligotuzumab, elgemtumab, lumretuzumab, patritumab, seribantumab, zenocutuzumab, sibrotuzumab, burosumab, aprutumab ixadotin, radretumab, pasotuxizumab, farletuzumab, mirvetuximab soravtansine, vantictumab, TRBS07, 3F8, dinutuximab, dinutuximab beta, ecromeximab, mitumomab, andecaliximab, capromab, codrituzumab, glembatumumab vedotin, talquetamab, talquetamab, trevogrumab, indusatumab vedotin, ficlatuzumab, rilotumumab, zatuximab, pentuzimab, pentuzimab, margetuximab, timigutuzumab, trastuzumab, trastuzumab duocarmazine, trastuzumab emtansine, gancotamab, pertuzumab, ertumaxomab, emibetuzumab, telisotuzumab, telisotuzumab vedotin, derlotuximab biotin, apolizumab, onartuzumab, bersanlimab, enlimomabpegol, rontalizumab, sifalimumab, talizumab, ganitumab, istiratumab, robatumumab, teprotumumab, figitumumab, ganitumab, istiratumab, robatumumab, teprotumumab, cixutumumab, dalotuzumab, xentuzumab, dusigitumab, canakinumab, ustekinumab, ustekinumab, ustekinumab, briakinumab, briakinumab, abrezekimab, lebrikizumab, romilkimab, TNX-650, tralokinumab, anrukinzumab, brodalumab, ixekizumab, netakimab, perakizumab, secukinumab, vunakizumab, afasevikumab, afasevikumab, bimekizumab, bimekizumab, remtolumab, bermckimab, lutikizumab, lutikizumab, gevokizumab, cergutuzumab amunaleukin, fletikumab, fezakinumab, brazikumab, guselkumab, mirikizumab, tildrakizumab, risankizumab, flotetuzumab, nemolizumab, pascolizumab, dupilumab, mepolizumab, reslizumab, clazakizumab, elsilimomab, olokizumab, sarilumab, siltuximab, sirukumab, vobarilizumab, tocilizumab, SA237, satralizumab, enokizumab, prezalizumab, natalizumab, abrilumab, abrilumab, vedolizumab, volociximab, tadocizumab, etaracizumab, etrolizumab, spesolimab, vatelizumab, crlizumab, lirilumab, relatlimab, cBR96-doxorubicinimmunoconjugate, odulimomab, efalizumab, ladiratuzumab vedotin, simtuzumab, samrotamab vedotin, asclizumab, lupartumab amadotin, imalumab, carlumab, imaprelimab, amatuximab, amatuximab, anetumab ravtansine, narnatumab, clivatuzumab tetraxetan, pemtumomab, gatipotuzumab, ensituximab, lemalesomab, sulesomab, enfortumab vedotin, racotumomab, monalizumab, brontictuzumab, tarextumab, vesencumab, oxelumab, gilvetmab, tislelizumab, dostarlimab, BCD-100, nivolumab, PDR001, pembrolizumab, pidilizumab, retifanlimab, spartalizumab, sintilimab, cemiplimab, olaratumab, tovetumab, rinucumab, atezolizumab, avelumab, durvalumab, lifastuzumab vedotin, bavituximab, acapatamab, capromab, rosopatamab, nezastomig, pasotuxizumab, pelgifatamab, voxalatamab, cofetuzumab pelidotin, denosumab, rosmantuzumab, cirmtuzumab, atinumab, indatuximab ravtansine, elotuzumab, sirtratumab vedotin, sonepcizumab, vandortuzumab vedotin, minretumomab, satumomab pendetide, maslimomab, ontuxizumab, tenatumomab, fresolimumab, metelimumab, lerdelimumab, tezepelumab, etigilimab, tiragotumab, placulumab, prezalumab, infliximab, nerelimomab, ozoralizumab, adalimumab, afelimomab, certolizumab pegol, golimumab, mapatumumab, conatumumab, lexatumumab, tigatuzumab, sacituzumab govitecan, votumumab, pogalizumab, letolizumab, pankomab, anatumomab mafenatox, enavatuzumab, flanvotumab, brolucizumab, ranibizumab, varisacumab, bevacizumab, faricimab, icrucumab, alacizumab pegol, ramucirumab, pritumumab, and onvatilimab;
[6723] VH2 comprises a heavy chain complementarity determining region 1 (HCDR1), HCDR2, and/or HCDR3 of an antibody selected from the group consisting of losatuxizumab vedotin, utomilumab, urelumab, oleclumab, naptumomab estafenatox, ascrinvacumab, pintumomab, tacatuzumab tetraxetan, nesvacumab, vanucizumab, timolumab, vapaliximab, vepalimomab, enapotamab vedotin, ianalumab, belimumab, tabalumab, tibulizumab, belantamab mafodotin, teclistamab, teclistamab, detumomab, nacolomab tafenatox, eculizumab, lendalizumab, pexelizumab, pozelimab, ravulizumab, tesidolumab, vilobelimab, abagovomab, igovomab, oregovomab, sofituzumab vedotin, cantuzumab mertansine, cantuzuma bravtansine, girentuximab, altumomab pentetate, arcitumomab, besilesomab, bertilimumab, plozalizumab, mogamulizumab, leronlimab, PRO140, rovelizumab, rovelizumab, talacotuzumab, benralizumab, tavolimab, vonlerolizumab, gavilimomab, ziralimumab, fanolesomab, ipilimumab, ruplizumab, toralizumab, dapirolizumab pegol, toralizumab, dapirolizumab pegol, ruplizumab, blinatumomab, inebilizumab, loncastuximab tesirine, SGN-CD19A, tafasitamab, taplitumomab paptox, XMAB-5574, Budoprutug, Obexelimab, duvortuxizumab, englumafusp alfa, Emfizatamab, zeripatamig, siplizumab, blontuvetmab, FBTA05, ibritumomab tiuxetan, obinutuzumab, ocaratuzumab, ocrelizumab, ofatumumab, rituximab, tositumomab, ublituximab, veltuzumab, divozilimab, eramkafusp alfa, ripertamab, zuberitamab, glofitamab, nofetumomab merpentan, samalizumab, imvotamab, odronextamab, plamotamab, bectumomab, inotuzumab ozogamicin, moxetumomab pasudotox, pinatuzumab vedotin, gomiliximab, lumiliximab, inolimomab, inolimomab, daclizumab, camidanluma btesirine, basiliximab, varlilumab, omburtamab, enoblituzumab, vopratelimab, lulizumabpegol, TGN1412, muromonab-CD3, otelixizumab, teplizumab, visilizumab, epcoritamab, epcoritamab, brentuximab vedotin, iratumumab, azintuxizumab vedotin, gemtuzumab ozogamicin, lintuzumab, vadastuximab talirine, naratuximab emtansine, otlertuzumab, lilotomab satetraxetan, tetulomab, daratumumab, isatuximab, foralumab, mosunetuzumab, mosunetuzumab, cedelizumab, ibalizumab, keliximab, priliximab, tregalizumab, zanolimumab, bleselumab, iscalimab, lucatumumab, ravagalimab, selicrelumab, teneliximab, vanalimab, abciximab, bivatuzumab, iomab-B, telimomab aritox, zolimomab aritox, abituzumab, intetumumab, alemtuzumab, tamtuvetmab, lorvotuzumab mertansine, itolizumab, cusatuzumab, vorsctuzumab mafodotin, milatuzumab, iladatuzumab vedotin, polatuzumab vedotin, galiximab, cibisatamab, zolbetuximab, naxitamab, tisotumab vedotin, olendalizumab, pamrevlumab, lacnotuzumab, cabiralizumab, emactuzumab, axatilimab, gimsilumab, lenzilumab, namilumab, tremelimumab, ulocuplumab, tepoditamab, rovalpituzumab tesirine, tarlatamab, demcizumab, navicixizumab, drozitumab, parsatuzumab, depatuxizumab mafodotin, modotuximab, carotuximab, adecatumumab, adecatumumab, oportuzumab monatox, solitomab, tucotuzumab celmoleukin, edrecolomab, catumaxomab, ifabotuzumab, fibatuzumab, zalutumumab, panitumumab, cetuximab, futuximab, imgatuzumab, laprituximab emtansine, matuzumab, necitumumab, nimotuzumab, tomuzotuximab, amivantamab, amivantamab, epitumomab cituxetan, sontuzumab, duligotuzumab, elgemtumab, lumretuzumab, patritumab, seribantumab, zenocutuzumab, sibrotuzumab, burosumab, aprutumab ixadotin, radretumab, pasotuxizumab, farletuzumab, mirvetuximab soravtansine, vantictumab, TRBS07, 3F8, dinutuximab, dinutuximab beta, ecromeximab, mitumomab, andecaliximab, capromab, codrituzumab, glembatumumab vedotin, talquetamab, talquetamab, trevogrumab, indusatumab vedotin, ficlatuzumab, rilotumumab, zatuximab, pentuzimab, pentuzimab, margetuximab, timigutuzumab, trastuzumab, trastuzumab duocarmazine, trastuzumab emtansine, gancotamab, pertuzumab, ertumaxomab, emibetuzumab, telisotuzumab, telisotuzumab vedotin, derlotuximab biotin, apolizumab, onartuzumab, bersanlimab, enlimomabpegol, rontalizumab, sifalimumab, talizumab, ganitumab, istiratumab, robatumumab, teprotumumab, figitumumab, ganitumab, istiratumab, robatumumab, teprotumumab, cixutumumab, dalotuzumab, xentuzumab, dusigitumab, canakinumab, ustekinumab, ustekinumab, ustekinumab, briakinumab, briakinumab, abrezekimab, lebrikizumab, romilkimab, TNX-650, tralokinumab, anrukinzumab, brodalumab, ixekizumab, netakimab, perakizumab, secukinumab, vunakizumab, afasevikumab, afasevikumab, bimekizumab, bimekizumab, remtolumab, bermekimab, lutikizumab, lutikizumab, gevokizumab, cergutuzumab amunaleukin, fletikumab, fezakinumab, brazikumab, guselkumab, mirikizumab, tildrakizumab, risankizumab, flotetuzumab, nemolizumab, pascolizumab, dupilumab, mepolizumab, reslizumab, clazakizumab, elsilimomab, olokizumab, sarilumab, siltuximab, sirukumab, vobarilizumab, tocilizumab, SA237, satralizumab, enokizumab, prezalizumab, natalizumab, abrilumab, abrilumab, vedolizumab, volociximab, tadocizumab, etaracizumab, etrolizumab, spesolimab, vatelizumab, erlizumab, lirilumab, relatlimab, cBR96-doxorubicinimmunoconjugate, odulimomab, efalizumab, ladiratuzumab vedotin, simtuzumab, samrotamab vedotin, aselizumab, lupartumab amadotin, imalumab, carlumab, imaprelimab, amatuximab, amatuximab, anetumab ravtansine, narnatumab, clivatuzumab tetraxetan, pemtumomab, gatipotuzumab, ensituximab, lemalesomab, sulesomab, enfortumab vedotin, racotumomab, monalizumab, brontictuzumab, tarextumab, vesencumab, oxelumab, gilvetmab, tislelizumab, dostarlimab, BCD-100, nivolumab, PDR001, pembrolizumab, pidilizumab, retifanlimab, spartalizumab, sintilimab, cemiplimab, olaratumab, tovetumab, rinucumab, atezolizumab, avelumab, durvalumab, lifastuzumab vedotin, bavituximab, acapatamab, capromab, rosopatamab, nezastomig, pasotuxizumab, pelgifatamab, voxalatamab, cofetuzumab pelidotin, denosumab, rosmantuzumab, cirmtuzumab, atinumab, indatuximab ravtansine, elotuzumab, sirtratumab vedotin, sonepcizumab, vandortuzumab vedotin, minretumomab, satumomab pendetide, maslimomab, ontuxizumab, tenatumomab, fresolimumab, metelimumab, lerdelimumab, tezepelumab, etigilimab, tiragotumab, placulumab, prezalumab, infliximab, nerelimomab, ozoralizumab, adalimumab, afelimomab, certolizumab pegol, golimumab, mapatumumab, conatumumab, lexatumumab, tigatuzumab, sacituzumab govitecan, votumumab, pogalizumab, letolizumab, pankomab, anatumomab mafenatox, enavatuzumab, flanvotumab, brolucizumab, ranibizumab, varisacumab, bevacizumab, faricimab, icrucumab, alacizumab pegol, ramucirumab, pritumumab, and onvatilimab;
[6724] VH3 comprises a heavy chain complementarity determining region 1 (HCDR1), HCDR2, and/or HCDR3 of an antibody selected from the group consisting of losatuxizumab vedotin, utomilumab, urelumab, oleclumab, naptumomab estafenatox, ascrinvacumab, pintumomab, tacatuzumab tetraxetan, nesvacumab, vanucizumab, timolumab, vapaliximab, vepalimomab, enapotamab vedotin, ianalumab, belimumab, tabalumab, tibulizumab, belantamab mafodotin, teclistamab, teclistamab, detumomab, nacolomab tafenatox, eculizumab, lendalizumab, pexelizumab, pozelimab, ravulizumab, tesidolumab, vilobelimab, abagovomab, igovomab, oregovomab, sofituzumab vedotin, cantuzumab mertansine, cantuzuma bravtansine, girentuximab, altumomab pentetate, arcitumomab, besilesomab, bertilimumab, plozalizumab, mogamulizumab, leronlimab, PRO140, rovelizumab, rovelizumab, talacotuzumab, benralizumab, tavolimab, vonlerolizumab, gavilimomab, ziralimumab, fanolesomab, ipilimumab, ruplizumab, toralizumab, dapirolizumab pegol, toralizumab, dapirolizumab pegol, ruplizumab, blinatumomab, inebilizumab, loncastuximab tesirine, SGN-CD19A, tafasitamab, taplitumomab paptox, XMAB-5574, Budoprutug, Obexelimab, duvortuxizumab, englumafusp alfa, Emfizatamab, zeripatamig, siplizumab, blontuvetmab, FBTA05, ibritumomab tiuxetan, obinutuzumab, ocaratuzumab, ocrelizumab, ofatumumab, rituximab, tositumomab, ublituximab, veltuzumab, divozilimab, eramkafusp alfa, ripertamab, zuberitamab, glofitamab, nofetumomab merpentan, samalizumab, imvotamab, odronextamab, plamotamab, bectumomab, inotuzumab ozogamicin, moxetumomab pasudotox, pinatuzumab vedotin, gomiliximab, lumiliximab, inolimomab, inolimomab, daclizumab, camidanluma btesirine, basiliximab, varlilumab, omburtamab, enoblituzumab, vopratelimab, lulizumabpegol, TGN1412, muromonab-CD3, otelixizumab, teplizumab, visilizumab, epcoritamab, epcoritamab, brentuximab vedotin, iratumumab, azintuxizumab vedotin, gemtuzumab ozogamicin, lintuzumab, vadastuximab talirine, naratuximab emtansine, otlertuzumab, lilotomab satetraxetan, tetulomab, daratumumab, isatuximab, foralumab, mosunetuzumab, mosunetuzumab, cedelizumab, ibalizumab, keliximab, priliximab, tregalizumab, zanolimumab, bleselumab, iscalimab, lucatumumab, ravagalimab, selicrelumab, teneliximab, vanalimab, abciximab, bivatuzumab, iomab-B, telimomab aritox, zolimomab aritox, abituzumab, intetumumab, alemtuzumab, tamtuvetmab, lorvotuzumab mertansine, itolizumab, cusatuzumab, vorsetuzumab mafodotin, milatuzumab, iladatuzumab vedotin, polatuzumab vedotin, galiximab, cibisatamab, zolbetuximab, naxitamab, tisotumab vedotin, olendalizumab, pamrevlumab, lacnotuzumab, cabiralizumab, emactuzumab, axatilimab, gimsilumab, lenzilumab, namilumab, tremelimumab, ulocuplumab, tepoditamab, rovalpituzumab tesirine, tarlatamab, demcizumab, navicixizumab, drozitumab, parsatuzumab, depatuxizumab mafodotin, modotuximab, carotuximab, adecatumumab, adecatumumab, oportuzumab monatox, solitomab, tucotuzumab celmoleukin, edrecolomab, catumaxomab, ifabotuzumab, fibatuzumab, zalutumumab, panitumumab, cetuximab, futuximab, imgatuzumab, laprituximab emtansine, matuzumab, necitumumab, nimotuzumab, tomuzotuximab, amivantamab, amivantamab, epitumomab cituxetan, sontuzumab, duligotuzumab, elgemtumab, lumretuzumab, patritumab, seribantumab, zenocutuzumab, sibrotuzumab, burosumab, aprutumab ixadotin, radretumab, pasotuxizumab, farletuzumab, mirvetuximab soravtansine, vantictumab, TRBS07, 3F8, dinutuximab, dinutuximab beta, ecromeximab, mitumomab, andecaliximab, capromab, codrituzumab, glembatumumab vedotin, talquetamab, talquetamab, trevogrumab, indusatumab vedotin, ficlatuzumab, rilotumumab, zatuximab, pentuzimab, pentuzimab, margetuximab, timigutuzumab, trastuzumab, trastuzumab duocarmazine, trastuzumab emtansine, gancotamab, pertuzumab, ertumaxomab, emibetuzumab, telisotuzumab, telisotuzumab vedotin, derlotuximab biotin, apolizumab, onartuzumab, bersanlimab, enlimomabpegol, rontalizumab, sifalimumab, talizumab, ganitumab, istiratumab, robatumumab, teprotumumab, figitumumab, ganitumab, istiratumab, robatumumab, teprotumumab, cixutumumab, dalotuzumab, xentuzumab, dusigitumab, canakinumab, ustekinumab, ustekinumab, ustekinumab, briakinumab, briakinumab, abrezekimab, lebrikizumab, romilkimab, TNX-650, tralokinumab, anrukinzumab, brodalumab, ixekizumab, netakimab, perakizumab, secukinumab, vunakizumab, afasevikumab, afasevikumab, bimekizumab, bimekizumab, remtolumab, bermekimab, lutikizumab, lutikizumab, gevokizumab, cergutuzumab amunaleukin, fletikumab, fezakinumab, brazikumab, guselkumab, mirikizumab, tildrakizumab, risankizumab, flotetuzumab, nemolizumab, pascolizumab, dupilumab, mepolizumab, reslizumab, clazakizumab, elsilimomab, olokizumab, sarilumab, siltuximab, sirukumab, vobarilizumab, tocilizumab, SA237, satralizumab, enokizumab, prezalizumab, natalizumab, abrilumab, abrilumab, vedolizumab, volociximab, tadocizumab, etaracizumab, etrolizumab, spesolimab, vatelizumab, erlizumab, lirilumab, relatlimab, cBR96-doxorubicinimmunoconjugate, odulimomab, efalizumab, ladiratuzumab vedotin, simtuzumab, samrotamab vedotin, aselizumab, lupartumab amadotin, imalumab, carlumab, imaprelimab, amatuximab, amatuximab, anetumab ravtansine, narnatumab, clivatuzumab tetraxetan, pemtumomab, gatipotuzumab, ensituximab, lemalesomab, sulesomab, enfortumab vedotin, racotumomab, monalizumab, brontictuzumab, tarextumab, vesencumab, oxelumab, gilvetmab, tislelizumab, dostarlimab, BCD-100, nivolumab, PDR001, pembrolizumab, pidilizumab, retifanlimab, spartalizumab, sintilimab, cemiplimab, olaratumab, tovetumab, rinucumab, atezolizumab, avelumab, durvalumab, lifastuzumab vedotin, bavituximab, acapatamab, capromab, rosopatamab, nezastomig, pasotuxizumab, pelgifatamab, voxalatamab, cofetuzumab pelidotin, denosumab, rosmantuzumab, cirmtuzumab, atinumab, indatuximab ravtansine, elotuzumab, sirtratumab vedotin, sonepcizumab, vandortuzumab vedotin, minretumomab, satumomab pendetide, maslimomab, ontuxizumab, tenatumomab, fresolimumab, metelimumab, lerdelimumab, tezepelumab, etigilimab, tiragotumab, placulumab, prezalumab, infliximab, nerelimomab, ozoralizumab, adalimumab, afelimomab, certolizumab pegol, golimumab, mapatumumab, conatumumab, lexatumumab, tigatuzumab, sacituzumab govitecan, votumumab, pogalizumab, letolizumab, pankomab, anatumomab mafenatox, enavatuzumab, flanvotumab, brolucizumab, ranibizumab, varisacumab, bevacizumab, faricimab, icrucumab, alacizumab pegol, ramucirumab, pritumumab, and onvatilimab; and/or
[6725] VH4 comprises a heavy chain complementarity determining region 1 (HCDR1), HCDR2, and/or HCDR3 of an antibody selected from the group consisting of losatuxizumab vedotin, utomilumab, urelumab, oleclumab, naptumomab estafenatox, ascrinvacumab, pintumomab, tacatuzumab tetraxetan, nesvacumab, vanucizumab, timolumab, vapaliximab, vepalimomab, enapotamab vedotin, ianalumab, belimumab, tabalumab, tibulizumab, belantamab mafodotin, teclistamab, teclistamab, detumomab, nacolomab tafenatox, eculizumab, lendalizumab, pexelizumab, pozelimab, ravulizumab, tesidolumab, vilobelimab, abagovomab, igovomab, oregovomab, sofituzumab vedotin, cantuzumab mertansine, cantuzuma bravtansine, girentuximab, altumomab pentetate, arcitumomab, besilesomab, bertilimumab, plozalizumab, mogamulizumab, leronlimab, PRO140, rovelizumab, rovelizumab, talacotuzumab, benralizumab, tavolimab, vonlerolizumab, gavilimomab, ziralimumab, fanolesomab, ipilimumab, ruplizumab, toralizumab, dapirolizumab pegol, toralizumab, dapirolizumab pegol, ruplizumab, blinatumomab, inebilizumab, loncastuximab tesirine, SGN-CD19A, tafasitamab, taplitumomab paptox, XMAB-5574, Budoprutug, Obexelimab, duvortuxizumab, englumafusp alfa, Emfizatamab, zeripatamig, siplizumab, blontuvetmab, FBTA05, ibritumomab tiuxetan, obinutuzumab, ocaratuzumab, ocrelizumab, ofatumumab, rituximab, tositumomab, ublituximab, veltuzumab, divozilimab, eramkafusp alfa, ripertamab, zuberitamab, glofitamab, nofetumomab merpentan, samalizumab, imvotamab, odronextamab, plamotamab, bectumomab, inotuzumab ozogamicin, moxetumomab pasudotox, pinatuzumab vedotin, gomiliximab, lumiliximab, inolimomab, inolimomab, daclizumab, camidanluma btesirine, basiliximab, varlilumab, omburtamab, enoblituzumab, vopratelimab, lulizumabpegol, TGN1412, muromonab-CD3, otelixizumab, teplizumab, visilizumab, epcoritamab, epcoritamab, brentuximab vedotin, iratumumab, azintuxizumab vedotin, gemtuzumab ozogamicin, lintuzumab, vadastuximab talirine, naratuximab emtansine, otlertuzumab, lilotomab satetraxetan, tetulomab, daratumumab, isatuximab, foralumab, mosunetuzumab, mosunetuzumab, cedelizumab, ibalizumab, keliximab, priliximab, tregalizumab, zanolimumab, bleselumab, iscalimab, lucatumumab, ravagalimab, selicrelumab, teneliximab, vanalimab, abciximab, bivatuzumab, iomab-B, telimomab aritox, zolimomab aritox, abituzumab, intetumumab, alemtuzumab, tamtuvetmab, lorvotuzumab mertansine, itolizumab, cusatuzumab, vorsetuzumab mafodotin, milatuzumab, iladatuzumab vedotin, polatuzumab vedotin, galiximab, cibisatamab, zolbetuximab, naxitamab, tisotumab vedotin, olendalizumab, pamrevlumab, lacnotuzumab, cabiralizumab, emactuzumab, axatilimab, gimsilumab, lenzilumab, namilumab, tremelimumab, ulocuplumab, tepoditamab, rovalpituzumab tesirine, tarlatamab, demcizumab, navicixizumab, drozitumab, parsatuzumab, depatuxizumab mafodotin, modotuximab, carotuximab, adecatumumab, adecatumumab, oportuzumab monatox, solitomab, tucotuzumab celmoleukin, edrecolomab, catumaxomab, ifabotuzumab, fibatuzumab, zalutumumab, panitumumab, cetuximab, futuximab, imgatuzumab, laprituximab emtansine, matuzumab, necitumumab, nimotuzumab, tomuzotuximab, amivantamab, amivantamab, epitumomab cituxetan, sontuzumab, duligotuzumab, elgemtumab, lumretuzumab, patritumab, scribantumab, zenocutuzumab, sibrotuzumab, burosumab, aprutumab ixadotin, radretumab, pasotuxizumab, farletuzumab, mirvetuximab soravtansine, vantictumab, TRBS07, 3F8, dinutuximab, dinutuximab beta, ecromeximab, mitumomab, andecaliximab, capromab, codrituzumab, glembatumumab vedotin, talquetamab, talquetamab, trevogrumab, indusatumab vedotin, ficlatuzumab, rilotumumab, zatuximab, pentuzimab, pentuzimab, margetuximab, timigutuzumab, trastuzumab, trastuzumab duocarmazine, trastuzumab emtansine, gancotamab, pertuzumab, ertumaxomab, emibetuzumab, telisotuzumab, telisotuzumab vedotin, derlotuximab biotin, apolizumab, onartuzumab, bersanlimab, enlimomabpegol, rontalizumab, sifalimumab, talizumab, ganitumab, istiratumab, robatumumab, teprotumumab, figitumumab, ganitumab, istiratumab, robatumumab, teprotumumab, cixutumumab, dalotuzumab, xentuzumab, dusigitumab, canakinumab, ustekinumab, ustekinumab, ustekinumab, briakinumab, briakinumab, abrezckimab, lebrikizumab, romilkimab, TNX-650, tralokinumab, anrukinzumab, brodalumab, ixekizumab, netakimab, perakizumab, secukinumab, vunakizumab, afasevikumab, afasevikumab, bimekizumab, bimekizumab, remtolumab, bermckimab, lutikizumab, lutikizumab, gevokizumab, cergutuzumab amunaleukin, fletikumab, fezakinumab, brazikumab, guselkumab, mirikizumab, tildrakizumab, risankizumab, flotetuzumab, nemolizumab, pascolizumab, dupilumab, mepolizumab, reslizumab, clazakizumab, elsilimomab, olokizumab, sarilumab, siltuximab, sirukumab, vobarilizumab, tocilizumab, SA237, satralizumab, enokizumab, prezalizumab, natalizumab, abrilumab, abrilumab, vedolizumab, volociximab, tadocizumab, etaracizumab, etrolizumab, spesolimab, vatelizumab, erlizumab, lirilumab, relatlimab, cBR96-doxorubicinimmunoconjugate, odulimomab, efalizumab, ladiratuzumab vedotin, simtuzumab, samrotamab vedotin, aselizumab, lupartumab amadotin, imalumab, carlumab, imaprelimab, amatuximab, amatuximab, anetumab ravtansine, narnatumab, clivatuzumab tetraxetan, pemtumomab, gatipotuzumab, ensituximab, lemalesomab, sulesomab, enfortumab vedotin, racotumomab, monalizumab, brontictuzumab, tarextumab, vesencumab, oxelumab, gilvetmab, tislelizumab, dostarlimab, BCD-100, nivolumab, PDR001, pembrolizumab, pidilizumab, retifanlimab, spartalizumab, sintilimab, cemiplimab, olaratumab, tovetumab, rinucumab, atezolizumab, avelumab, durvalumab, lifastuzumab vedotin, bavituximab, acapatamab, capromab, rosopatamab, nezastomig, pasotuxizumab, pelgifatamab, voxalatamab, cofetuzumab pelidotin, denosumab, rosmantuzumab, cirmtuzumab, atinumab, indatuximab ravtansine, elotuzumab, sirtratumab vedotin, sonepcizumab, vandortuzumab vedotin, minretumomab, satumomab pendetide, maslimomab, ontuxizumab, tenatumomab, fresolimumab, metelimumab, lerdelimumab, tezepelumab, etigilimab, tiragotumab, placulumab, prezalumab, infliximab, nerelimomab, ozoralizumab, adalimumab, afelimomab, certolizumab pegol, golimumab, mapatumumab, conatumumab, lexatumumab, tigatuzumab, sacituzumab govitecan, votumumab, pogalizumab, letolizumab, pankomab, anatumomab mafenatox, enavatuzumab, flanvotumab, brolucizumab, ranibizumab, varisacumab, bevacizumab, faricimab, icrucumab, alacizumab pegol, ramucirumab, pritumumab, and onvatilimab; or
[6726] (ii)
[6727] VL1 comprises a VL of an antibody selected from the group consisting of losatuxizumab vedotin, utomilumab, urelumab, oleclumab, naptumomab estafenatox, ascrinvacumab, pintumomab, tacatuzumab tetraxetan, nesvacumab, vanucizumab, timolumab, vapaliximab, vepalimomab, enapotamab vedotin, ianalumab, belimumab, tabalumab, tibulizumab, belantamab mafodotin, teclistamab, teclistamab, detumomab, nacolomab tafenatox, eculizumab, lendalizumab, pexelizumab, pozelimab, ravulizumab, tesidolumab, vilobelimab, abagovomab, igovomab, oregovomab, sofituzumab vedotin, cantuzumab mertansine, cantuzuma bravtansine, girentuximab, altumomab pentetate, arcitumomab, besilesomab, bertilimumab, plozalizumab, mogamulizumab, leronlimab, PRO140, rovelizumab, rovelizumab, talacotuzumab, benralizumab, tavolimab, vonlerolizumab, gavilimomab, ziralimumab, fanolesomab, ipilimumab, ruplizumab, toralizumab, dapirolizumab pegol, toralizumab, dapirolizumab pegol, ruplizumab, blinatumomab, inebilizumab, loncastuximab tesirine, SGN-CD19A, tafasitamab, taplitumomab paptox, XMAB-5574, Budoprutug, Obexelimab, duvortuxizumab, englumafusp alfa, Emfizatamab, zeripatamig, siplizumab, blontuvetmab, FBTA05, ibritumomab tiuxetan, obinutuzumab, ocaratuzumab, ocrelizumab, ofatumumab, rituximab, tositumomab, ublituximab, veltuzumab, divozilimab, eramkafusp alfa, ripertamab, zuberitamab, glofitamab, nofetumomab merpentan, samalizumab, imvotamab, odronextamab, plamotamab, bectumomab, inotuzumab ozogamicin, moxetumomab pasudotox, pinatuzumab vedotin, gomiliximab, lumiliximab, inolimomab, inolimomab, daclizumab, camidanluma btesirine, basiliximab, varlilumab, omburtamab, enoblituzumab, vopratelimab, lulizumabpegol, TGN1412, muromonab-CD3, otelixizumab, teplizumab, visilizumab, epcoritamab, epcoritamab, brentuximab vedotin, iratumumab, azintuxizumab vedotin, gemtuzumab ozogamicin, lintuzumab, vadastuximab talirine, naratuximab emtansine, otlertuzumab, lilotomab satetraxetan, tetulomab, daratumumab, isatuximab, foralumab, mosunetuzumab, mosunetuzumab, cedelizumab, ibalizumab, keliximab, priliximab, tregalizumab, zanolimumab, bleselumab, iscalimab, lucatumumab, ravagalimab, selicrelumab, teneliximab, vanalimab, abciximab, bivatuzumab, iomab-B, telimomab aritox, zolimomab aritox, abituzumab, intetumumab, alemtuzumab, tamtuvetmab, lorvotuzumab mertansine, itolizumab, cusatuzumab, vorsetuzumab mafodotin, milatuzumab, iladatuzumab vedotin, polatuzumab vedotin, galiximab, cibisatamab, zolbctuximab, naxitamab, tisotumab vedotin, olendalizumab, pamrevlumab, lacnotuzumab, cabiralizumab, emactuzumab, axatilimab, gimsilumab, lenzilumab, namilumab, tremelimumab, ulocuplumab, tepoditamab, rovalpituzumab tesirine, tarlatamab, demcizumab, navicixizumab, drozitumab, parsatuzumab, depatuxizumab mafodotin, modotuximab, carotuximab, adecatumumab, adecatumumab, oportuzumab monatox, solitomab, tucotuzumab celmoleukin, edrecolomab, catumaxomab, ifabotuzumab, fibatuzumab, zalutumumab, panitumumab, cetuximab, futuximab, imgatuzumab, laprituximab emtansine, matuzumab, necitumumab, nimotuzumab, tomuzotuximab, amivantamab, amivantamab, epitumomab cituxetan, sontuzumab, duligotuzumab, elgemtumab, lumretuzumab, patritumab, seribantumab, zenocutuzumab, sibrotuzumab, burosumab, aprutumab ixadotin, radretumab, pasotuxizumab, farletuzumab, mirvetuximab soravtansine, vantictumab, TRBS07, 3F8, dinutuximab, dinutuximab beta, ecromeximab, mitumomab, andecaliximab, capromab, codrituzumab, glembatumumab vedotin, talquetamab, talquetamab, trevogrumab, indusatumab vedotin, ficlatuzumab, rilotumumab, zatuximab, pentuzimab, pentuzimab, margetuximab, timigutuzumab, trastuzumab, trastuzumab duocarmazine, trastuzumab emtansine, gancotamab, pertuzumab, ertumaxomab, emibetuzumab, telisotuzumab, telisotuzumab vedotin, derlotuximab biotin, apolizumab, onartuzumab, bersanlimab, enlimomabpegol, rontalizumab, sifalimumab, talizumab, ganitumab, istiratumab, robatumumab, teprotumumab, figitumumab, ganitumab, istiratumab, robatumumab, teprotumumab, cixutumumab, dalotuzumab, xentuzumab, dusigitumab, canakinumab, ustekinumab, ustekinumab, ustekinumab, briakinumab, briakinumab, abrezekimab, lebrikizumab, romilkimab, TNX-650, tralokinumab, anrukinzumab, brodalumab, ixekizumab, netakimab, perakizumab, secukinumab, vunakizumab, afasevikumab, afasevikumab, bimekizumab, bimekizumab, remtolumab, bermekimab, lutikizumab, lutikizumab, gevokizumab, cergutuzumab amunaleukin, fletikumab, fezakinumab, brazikumab, guselkumab, mirikizumab, tildrakizumab, risankizumab, flotetuzumab, nemolizumab, pascolizumab, dupilumab, mepolizumab, reslizumab, clazakizumab, elsilimomab, olokizumab, sarilumab, siltuximab, sirukumab, vobarilizumab, tocilizumab, SA237, satralizumab, enokizumab, prezalizumab, natalizumab, abrilumab, abrilumab, vedolizumab, volociximab, tadocizumab, etaracizumab, etrolizumab, spesolimab, vatelizumab, erlizumab, lirilumab, relatlimab, cBR96-doxorubicinimmunoconjugate, odulimomab, efalizumab, ladiratuzumab vedotin, simtuzumab, samrotamab vedotin, aselizumab, lupartumab amadotin, imalumab, carlumab, imaprelimab, amatuximab, amatuximab, anetumab ravtansine, narnatumab, clivatuzumab tetraxetan, pemtumomab, gatipotuzumab, ensituximab, lemalesomab, sulesomab, enfortumab vedotin, racotumomab, monalizumab, brontictuzumab, tarextumab, vesencumab, oxelumab, gilvetmab, tislelizumab, dostarlimab, BCD-100, nivolumab, PDR001, pembrolizumab, pidilizumab, retifanlimab, spartalizumab, sintilimab, cemiplimab, olaratumab, tovetumab, rinucumab, atezolizumab, avelumab, durvalumab, lifastuzumab vedotin, bavituximab, acapatamab, capromab, rosopatamab, nezastomig, pasotuxizumab, pelgifatamab, voxalatamab, cofetuzumab pelidotin, denosumab, rosmantuzumab, cirmtuzumab, atinumab, indatuximab ravtansine, elotuzumab, sirtratumab vedotin, sonepcizumab, vandortuzumab vedotin, minretumomab, satumomab pendetide, maslimomab, ontuxizumab, tenatumomab, fresolimumab, metelimumab, lerdelimumab, tezepelumab, etigilimab, tiragotumab, placulumab, prezalumab, infliximab, nerelimomab, ozoralizumab, adalimumab, afelimomab, certolizumab pegol, golimumab, mapatumumab, conatumumab, lexatumumab, tigatuzumab, sacituzumab govitecan, votumumab, pogalizumab, letolizumab, pankomab, anatumomab mafenatox, enavatuzumab, flanvotumab, brolucizumab, ranibizumab, varisacumab, bevacizumab, faricimab, icrucumab, alacizumab pegol, ramucirumab, pritumumab, and onvatilimab;
[6728] VL2 comprises a VL of an antibody selected from the group consisting of losatuxizumab vedotin, utomilumab, urelumab, oleclumab, naptumomab estafenatox, ascrinvacumab, pintumomab, tacatuzumab tetraxetan, nesvacumab, vanucizumab, timolumab, vapaliximab, vepalimomab, enapotamab vedotin, ianalumab, belimumab, tabalumab, tibulizumab, belantamab mafodotin, teclistamab, teclistamab, detumomab, nacolomab tafenatox, eculizumab, lendalizumab, pexelizumab, pozelimab, ravulizumab, tesidolumab, vilobelimab, abagovomab, igovomab, oregovomab, sofituzumab vedotin, cantuzumab mertansine, cantuzuma bravtansine, girentuximab, altumomab pentetate, arcitumomab, besilesomab, bertilimumab, plozalizumab, mogamulizumab, leronlimab, PRO140, rovelizumab, rovelizumab, talacotuzumab, benralizumab, tavolimab, vonlerolizumab, gavilimomab, ziralimumab, fanolesomab, ipilimumab, ruplizumab, toralizumab, dapirolizumab pegol, toralizumab, dapirolizumab pegol, ruplizumab, blinatumomab, inebilizumab, loncastuximab tesirine, SGN-CD19A, tafasitamab, taplitumomab paptox, XMAB-5574, Budoprutug, Obexelimab, duvortuxizumab, englumafusp alfa, Emfizatamab, zeripatamig, siplizumab, blontuvetmab, FBTA05, ibritumomab tiuxetan, obinutuzumab, ocaratuzumab, ocrelizumab, ofatumumab, rituximab, tositumomab, ublituximab, veltuzumab, divozilimab, eramkafusp alfa, ripertamab, zuberitamab, glofitamab, nofetumomab merpentan, samalizumab, imvotamab, odronextamab, plamotamab, bectumomab, inotuzumab ozogamicin, moxetumomab pasudotox, pinatuzumab vedotin, gomiliximab, lumiliximab, inolimomab, inolimomab, daclizumab, camidanluma btesirine, basiliximab, varlilumab, omburtamab, enoblituzumab, vopratelimab, lulizumabpegol, TGN1412, muromonab-CD3, otelixizumab, teplizumab, visilizumab, epcoritamab, epcoritamab, brentuximab vedotin, iratumumab, azintuxizumab vedotin, gemtuzumab ozogamicin, lintuzumab, vadastuximab talirine, naratuximab emtansine, otlertuzumab, lilotomab satetraxetan, tetulomab, daratumumab, isatuximab, foralumab, mosunetuzumab, mosunetuzumab, cedelizumab, ibalizumab, keliximab, priliximab, tregalizumab, zanolimumab, bleselumab, iscalimab, lucatumumab, ravagalimab, selicrelumab, teneliximab, vanalimab, abciximab, bivatuzumab, iomab-B, telimomab aritox, zolimomab aritox, abituzumab, intetumumab, alemtuzumab, tamtuvetmab, lorvotuzumab mertansine, itolizumab, cusatuzumab, vorsetuzumab mafodotin, milatuzumab, iladatuzumab vedotin, polatuzumab vedotin, galiximab, cibisatamab, zolbetuximab, naxitamab, tisotumab vedotin, olendalizumab, pamrevlumab, lacnotuzumab, cabiralizumab, emactuzumab, axatilimab, gimsilumab, lenzilumab, namilumab, tremelimumab, ulocuplumab, tepoditamab, rovalpituzumab tesirine, tarlatamab, demcizumab, navicixizumab, drozitumab, parsatuzumab, depatuxizumab mafodotin, modotuximab, carotuximab, adecatumumab, adecatumumab, oportuzumab monatox, solitomab, tucotuzumab celmoleukin, edrecolomab, catumaxomab, ifabotuzumab, fibatuzumab, zalutumumab, panitumumab, cetuximab, futuximab, imgatuzumab, laprituximab emtansine, matuzumab, necitumumab, nimotuzumab, tomuzotuximab, amivantamab, amivantamab, epitumomab cituxetan, sontuzumab, duligotuzumab, elgemtumab, lumretuzumab, patritumab, seribantumab, zenocutuzumab, sibrotuzumab, burosumab, aprutumab ixadotin, radretumab, pasotuxizumab, farletuzumab, mirvetuximab soravtansine, vantictumab, TRBS07, 3F8, dinutuximab, dinutuximab beta, ecromeximab, mitumomab, andecaliximab, capromab, codrituzumab, glembatumumab vedotin, talquetamab, talquetamab, trevogrumab, indusatumab vedotin, ficlatuzumab, rilotumumab, zatuximab, pentuzimab, pentuzimab, margetuximab, timigutuzumab, trastuzumab, trastuzumab duocarmazine, trastuzumab emtansine, gancotamab, pertuzumab, ertumaxomab, emibetuzumab, telisotuzumab, telisotuzumab vedotin, derlotuximab biotin, apolizumab, onartuzumab, bersanlimab, enlimomabpegol, rontalizumab, sifalimumab, talizumab, ganitumab, istiratumab, robatumumab, teprotumumab, figitumumab, ganitumab, istiratumab, robatumumab, teprotumumab, cixutumumab, dalotuzumab, xentuzumab, dusigitumab, canakinumab, ustekinumab, ustekinumab, ustekinumab, briakinumab, briakinumab, abrezekimab, lebrikizumab, romilkimab, TNX-650, tralokinumab, anrukinzumab, brodalumab, ixekizumab, netakimab, perakizumab, secukinumab, vunakizumab, afasevikumab, afasevikumab, bimekizumab, bimekizumab, remtolumab, bermekimab, lutikizumab, lutikizumab, gevokizumab, cergutuzumab amunaleukin, fletikumab, fezakinumab, brazikumab, guselkumab, mirikizumab, tildrakizumab, risankizumab, flotetuzumab, nemolizumab, pascolizumab, dupilumab, mepolizumab, reslizumab, clazakizumab, elsilimomab, olokizumab, sarilumab, siltuximab, sirukumab, vobarilizumab, tocilizumab, SA237, satralizumab, enokizumab, prezalizumab, natalizumab, abrilumab, abrilumab, vedolizumab, volociximab, tadocizumab, etaracizumab, etrolizumab, spesolimab, vatelizumab, erlizumab, lirilumab, relatlimab, cBR96-doxorubicinimmunoconjugate, odulimomab, efalizumab, ladiratuzumab vedotin, simtuzumab, samrotamab vedotin, aselizumab, lupartumab amadotin, imalumab, carlumab, imaprelimab, amatuximab, amatuximab, anetumab ravtansine, narnatumab, clivatuzumab tetraxetan, pemtumomab, gatipotuzumab, ensituximab, lemalesomab, sulesomab, enfortumab vedotin, racotumomab, monalizumab, brontictuzumab, tarextumab, vesencumab, oxelumab, gilvetmab, tislelizumab, dostarlimab, BCD-100, nivolumab, PDR001, pembrolizumab, pidilizumab, retifanlimab, spartalizumab, sintilimab, cemiplimab, olaratumab, tovetumab, rinucumab, atezolizumab, avelumab, durvalumab, lifastuzumab vedotin, bavituximab, acapatamab, capromab, rosopatamab, nezastomig, pasotuxizumab, pelgifatamab, voxalatamab, cofetuzumab pelidotin, denosumab, rosmantuzumab, cirmtuzumab, atinumab, indatuximab ravtansine, elotuzumab, sirtratumab vedotin, sonepcizumab, vandortuzumab vedotin, minretumomab, satumomab pendetide, maslimomab, ontuxizumab, tenatumomab, fresolimumab, metelimumab, lerdelimumab, tezepelumab, etigilimab, tiragotumab, placulumab, prezalumab, infliximab, nerelimomab, ozoralizumab, adalimumab, afelimomab, certolizumab pegol, golimumab, mapatumumab, conatumumab, lexatumumab, tigatuzumab, sacituzumab govitecan, votumumab, pogalizumab, letolizumab, pankomab, anatumomab mafenatox, enavatuzumab, flanvotumab, brolucizumab, ranibizumab, varisacumab, bevacizumab, faricimab, icrucumab, alacizumab pegol, ramucirumab, pritumumab, and onvatilimab;
[6729] VL3 comprises a VL of an antibody selected from the group consisting of losatuxizumab vedotin, utomilumab, urelumab, oleclumab, naptumomab estafenatox, ascrinvacumab, pintumomab, tacatuzumab tetraxetan, nesvacumab, vanucizumab, timolumab, vapaliximab, vepalimomab, enapotamab vedotin, ianalumab, belimumab, tabalumab, tibulizumab, belantamab mafodotin, teclistamab, teclistamab, detumomab, nacolomab tafenatox, eculizumab, lendalizumab, pexelizumab, pozelimab, ravulizumab, tesidolumab, vilobelimab, abagovomab, igovomab, oregovomab, sofituzumab vedotin, cantuzumab mertansine, cantuzuma bravtansine, girentuximab, altumomab pentetate, arcitumomab, besilesomab, bertilimumab, plozalizumab, mogamulizumab, leronlimab, PRO140, rovelizumab, rovelizumab, talacotuzumab, benralizumab, tavolimab, vonlerolizumab, gavilimomab, ziralimumab, fanolesomab, ipilimumab, ruplizumab, toralizumab, dapirolizumab pegol, toralizumab, dapirolizumab pegol, ruplizumab, blinatumomab, inebilizumab, loncastuximab tesirine, SGN-CD19A, tafasitamab, taplitumomab paptox, XMAB-5574, Budoprutug, Obexelimab, duvortuxizumab, englumafusp alfa, Emfizatamab, zeripatamig, siplizumab, blontuvetmab, FBTA05, ibritumomab tiuxetan, obinutuzumab, ocaratuzumab, ocrelizumab, ofatumumab, rituximab, tositumomab, ublituximab, veltuzumab, divozilimab, eramkafusp alfa, ripertamab, zuberitamab, glofitamab, nofetumomab merpentan, samalizumab, imvotamab, odronextamab, plamotamab, bectumomab, inotuzumab ozogamicin, moxetumomab pasudotox, pinatuzumab vedotin, gomiliximab, lumiliximab, inolimomab, inolimomab, daclizumab, camidanluma btesirine, basiliximab, varlilumab, omburtamab, enoblituzumab, vopratelimab, lulizumabpegol, TGN1412, muromonab-CD3, otelixizumab, teplizumab, visilizumab, epcoritamab, epcoritamab, brentuximab vedotin, iratumumab, azintuxizumab vedotin, gemtuzumab ozogamicin, lintuzumab, vadastuximab talirine, naratuximab emtansine, otlertuzumab, lilotomab satetraxetan, tetulomab, daratumumab, isatuximab, foralumab, mosunetuzumab, mosunetuzumab, cedelizumab, ibalizumab, keliximab, priliximab, tregalizumab, zanolimumab, bleselumab, iscalimab, lucatumumab, ravagalimab, selicrelumab, teneliximab, vanalimab, abciximab, bivatuzumab, iomab-B, telimomab aritox, zolimomab aritox, abituzumab, intetumumab, alemtuzumab, tamtuvetmab, lorvotuzumab mertansine, itolizumab, cusatuzumab, vorsetuzumab mafodotin, milatuzumab, iladatuzumab vedotin, polatuzumab vedotin, galiximab, cibisatamab, zolbetuximab, naxitamab, tisotumab vedotin, olendalizumab, pamrevlumab, lacnotuzumab, cabiralizumab, emactuzumab, axatilimab, gimsilumab, lenzilumab, namilumab, tremelimumab, ulocuplumab, tepoditamab, rovalpituzumab tesirine, tarlatamab, demcizumab, navicixizumab, drozitumab, parsatuzumab, depatuxizumab mafodotin, modotuximab, carotuximab, adecatumumab, adecatumumab, oportuzumab monatox, solitomab, tucotuzumab celmoleukin, edrecolomab, catumaxomab, ifabotuzumab, fibatuzumab, zalutumumab, panitumumab, cetuximab, futuximab, imgatuzumab, laprituximab emtansine, matuzumab, necitumumab, nimotuzumab, tomuzotuximab, amivantamab, amivantamab, epitumomab cituxetan, sontuzumab, duligotuzumab, elgemtumab, lumretuzumab, patritumab, scribantumab, zenocutuzumab, sibrotuzumab, burosumab, aprutumab ixadotin, radretumab, pasotuxizumab, farletuzumab, mirvetuximab soravtansine, vantictumab, TRBS07, 3F8, dinutuximab, dinutuximab beta, ecromeximab, mitumomab, andecaliximab, capromab, codrituzumab, glembatumumab vedotin, talquetamab, talquetamab, trevogrumab, indusatumab vedotin, ficlatuzumab, rilotumumab, zatuximab, pentuzimab, pentuzimab, margetuximab, timigutuzumab, trastuzumab, trastuzumab duocarmazine, trastuzumab emtansine, gancotamab, pertuzumab, ertumaxomab, emibetuzumab, telisotuzumab, telisotuzumab vedotin, derlotuximab biotin, apolizumab, onartuzumab, bersanlimab, enlimomabpegol, rontalizumab, sifalimumab, talizumab, ganitumab, istiratumab, robatumumab, teprotumumab, figitumumab, ganitumab, istiratumab, robatumumab, teprotumumab, cixutumumab, dalotuzumab, xentuzumab, dusigitumab, canakinumab, ustekinumab, ustekinumab, ustekinumab, briakinumab, briakinumab, abrezekimab, lebrikizumab, romilkimab, TNX-650, tralokinumab, anrukinzumab, brodalumab, ixekizumab, netakimab, perakizumab, secukinumab, vunakizumab, afasevikumab, afasevikumab, bimekizumab, bimekizumab, remtolumab, bermekimab, lutikizumab, lutikizumab, gevokizumab, cergutuzumab amunaleukin, fletikumab, fezakinumab, brazikumab, guselkumab, mirikizumab, tildrakizumab, risankizumab, flotetuzumab, nemolizumab, pascolizumab, dupilumab, mepolizumab, reslizumab, clazakizumab, elsilimomab, olokizumab, sarilumab, siltuximab, sirukumab, vobarilizumab, tocilizumab, SA237, satralizumab, enokizumab, prezalizumab, natalizumab, abrilumab, abrilumab, vedolizumab, volociximab, tadocizumab, etaracizumab, etrolizumab, spesolimab, vatelizumab, erlizumab, lirilumab, relatlimab, cBR96-doxorubicinimmunoconjugate, odulimomab, efalizumab, ladiratuzumab vedotin, simtuzumab, samrotamab vedotin, aselizumab, lupartumab amadotin, imalumab, carlumab, imaprelimab, amatuximab, amatuximab, anetumab ravtansine, narnatumab, clivatuzumab tetraxetan, pemtumomab, gatipotuzumab, ensituximab, lemalesomab, sulesomab, enfortumab vedotin, racotumomab, monalizumab, brontictuzumab, tarextumab, vesencumab, oxelumab, gilvetmab, tislelizumab, dostarlimab, BCD-100, nivolumab, PDR001, pembrolizumab, pidilizumab, retifanlimab, spartalizumab, sintilimab, cemiplimab, olaratumab, tovetumab, rinucumab, atezolizumab, avelumab, durvalumab, lifastuzumab vedotin, bavituximab, acapatamab, capromab, rosopatamab, nezastomig, pasotuxizumab, pelgifatamab, voxalatamab, cofetuzumab pelidotin, denosumab, rosmantuzumab, cirmtuzumab, atinumab, indatuximab ravtansine, elotuzumab, sirtratumab vedotin, sonepcizumab, vandortuzumab vedotin, minretumomab, satumomab pendetide, maslimomab, ontuxizumab, tenatumomab, fresolimumab, metelimumab, lerdelimumab, tezepelumab, etigilimab, tiragotumab, placulumab, prezalumab, infliximab, nerelimomab, ozoralizumab, adalimumab, afelimomab, certolizumab pegol, golimumab, mapatumumab, conatumumab, lexatumumab, tigatuzumab, sacituzumab govitecan, votumumab, pogalizumab, letolizumab, pankomab, anatumomab mafenatox, enavatuzumab, flanvotumab, brolucizumab, ranibizumab, varisacumab, bevacizumab, faricimab, icrucumab, alacizumab pegol, ramucirumab, pritumumab, and onvatilimab;
[6730] VL4 comprises a VL of an antibody selected from the group consisting of losatuxizumab vedotin, utomilumab, urelumab, oleclumab, naptumomab estafenatox, ascrinvacumab, pintumomab, tacatuzumab tetraxetan, nesvacumab, vanucizumab, timolumab, vapaliximab, vepalimomab, enapotamab vedotin, ianalumab, belimumab, tabalumab, tibulizumab, belantamab mafodotin, teclistamab, teclistamab, detumomab, nacolomab tafenatox, eculizumab, lendalizumab, pexelizumab, pozelimab, ravulizumab, tesidolumab, vilobelimab, abagovomab, igovomab, oregovomab, sofituzumab vedotin, cantuzumab mertansine, cantuzuma bravtansine, girentuximab, altumomab pentetate, arcitumomab, besilesomab, bertilimumab, plozalizumab, mogamulizumab, leronlimab, PRO140, rovelizumab, rovelizumab, talacotuzumab, benralizumab, tavolimab, vonlerolizumab, gavilimomab, ziralimumab, fanolesomab, ipilimumab, ruplizumab, toralizumab, dapirolizumab pegol, toralizumab, dapirolizumab pegol, ruplizumab, blinatumomab, inebilizumab, loncastuximab tesirine, SGN-CD19A, tafasitamab, taplitumomab paptox, XMAB-5574, Budoprutug, Obexelimab, duvortuxizumab, englumafusp alfa, Emfizatamab, zeripatamig, siplizumab, blontuvetmab, FBTA05, ibritumomab tiuxetan, obinutuzumab, ocaratuzumab, ocrelizumab, ofatumumab, rituximab, tositumomab, ublituximab, veltuzumab, divozilimab, eramkafusp alfa, ripertamab, zuberitamab, glofitamab, nofetumomab merpentan, samalizumab, imvotamab, odronextamab, plamotamab, bectumomab, inotuzumab ozogamicin, moxetumomab pasudotox, pinatuzumab vedotin, gomiliximab, lumiliximab, inolimomab, inolimomab, daclizumab, camidanluma btesirine, basiliximab, varlilumab, omburtamab, enoblituzumab, vopratelimab, lulizumabpegol, TGN1412, muromonab-CD3, otelixizumab, teplizumab, visilizumab, epcoritamab, epcoritamab, brentuximab vedotin, iratumumab, azintuxizumab vedotin, gemtuzumab ozogamicin, lintuzumab, vadastuximab talirine, naratuximab emtansine, otlertuzumab, lilotomab satetraxetan, tetulomab, daratumumab, isatuximab, foralumab, mosunetuzumab, mosunetuzumab, cedelizumab, ibalizumab, keliximab, priliximab, tregalizumab, zanolimumab, bleselumab, iscalimab, lucatumumab, ravagalimab, selicrelumab, teneliximab, vanalimab, abciximab, bivatuzumab, iomab-B, telimomab aritox, zolimomab aritox, abituzumab, intetumumab, alemtuzumab, tamtuvetmab, lorvotuzumab mertansine, itolizumab, cusatuzumab, vorsetuzumab mafodotin, milatuzumab, iladatuzumab vedotin, polatuzumab vedotin, galiximab, cibisatamab, zolbetuximab, naxitamab, tisotumab vedotin, olendalizumab, pamrevlumab, lacnotuzumab, cabiralizumab, emactuzumab, axatilimab, gimsilumab, lenzilumab, namilumab, tremelimumab, ulocuplumab, tepoditamab, rovalpituzumab tesirine, tarlatamab, demcizumab, navicixizumab, drozitumab, parsatuzumab, depatuxizumab mafodotin, modotuximab, carotuximab, adecatumumab, adecatumumab, oportuzumab monatox, solitomab, tucotuzumab celmoleukin, edrecolomab, catumaxomab, ifabotuzumab, fibatuzumab, zalutumumab, panitumumab, cetuximab, futuximab, imgatuzumab, laprituximab emtansine, matuzumab, necitumumab, nimotuzumab, tomuzotuximab, amivantamab, amivantamab, epitumomab cituxetan, sontuzumab, duligotuzumab, elgemtumab, lumretuzumab, patritumab, seribantumab, zenocutuzumab, sibrotuzumab, burosumab, aprutumab ixadotin, radretumab, pasotuxizumab, farletuzumab, mirvetuximab soravtansine, vantictumab, TRBS07, 3F8, dinutuximab, dinutuximab beta, ecromeximab, mitumomab, andecaliximab, capromab, codrituzumab, glembatumumab vedotin, talquetamab, talquetamab, trevogrumab, indusatumab vedotin, ficlatuzumab, rilotumumab, zatuximab, pentuzimab, pentuzimab, margetuximab, timigutuzumab, trastuzumab, trastuzumab duocarmazine, trastuzumab emtansine, gancotamab, pertuzumab, ertumaxomab, emibetuzumab, telisotuzumab, telisotuzumab vedotin, derlotuximab biotin, apolizumab, onartuzumab, bersanlimab, enlimomabpegol, rontalizumab, sifalimumab, talizumab, ganitumab, istiratumab, robatumumab, teprotumumab, figitumumab, ganitumab, istiratumab, robatumumab, teprotumumab, cixutumumab, dalotuzumab, xentuzumab, dusigitumab, canakinumab, ustekinumab, ustekinumab, ustekinumab, briakinumab, briakinumab, abrezekimab, lebrikizumab, romilkimab, TNX-650, tralokinumab, anrukinzumab, brodalumab, ixekizumab, netakimab, perakizumab, secukinumab, vunakizumab, afasevikumab, afasevikumab, bimekizumab, bimekizumab, remtolumab, bermekimab, lutikizumab, lutikizumab, gevokizumab, cergutuzumab amunaleukin, fletikumab, fezakinumab, brazikumab, guselkumab, mirikizumab, tildrakizumab, risankizumab, flotetuzumab, nemolizumab, pascolizumab, dupilumab, mepolizumab, reslizumab, clazakizumab, elsilimomab, olokizumab, sarilumab, siltuximab, sirukumab, vobarilizumab, tocilizumab, SA237, satralizumab, enokizumab, prezalizumab, natalizumab, abrilumab, abrilumab, vedolizumab, volociximab, tadocizumab, etaracizumab, etrolizumab, spesolimab, vatelizumab, erlizumab, lirilumab, relatlimab, cBR96-doxorubicinimmunoconjugate, odulimomab, efalizumab, ladiratuzumab vedotin, simtuzumab, samrotamab vedotin, aselizumab, lupartumab amadotin, imalumab, carlumab, imaprelimab, amatuximab, amatuximab, anetumab ravtansine, narnatumab, clivatuzumab tetraxetan, pemtumomab, gatipotuzumab, ensituximab, lemalesomab, sulesomab, enfortumab vedotin, racotumomab, monalizumab, brontictuzumab, tarextumab, vesencumab, oxelumab, gilvetmab, tislelizumab, dostarlimab, BCD-100, nivolumab, PDR001, pembrolizumab, pidilizumab, retifanlimab, spartalizumab, sintilimab, cemiplimab, olaratumab, tovetumab, rinucumab, atezolizumab, avelumab, durvalumab, lifastuzumab vedotin, bavituximab, acapatamab, capromab, rosopatamab, nezastomig, pasotuxizumab, pelgifatamab, voxalatamab, cofetuzumab pelidotin, denosumab, rosmantuzumab, cirmtuzumab, atinumab, indatuximab ravtansine, elotuzumab, sirtratumab vedotin, sonepcizumab, vandortuzumab vedotin, minretumomab, satumomab pendetide, maslimomab, ontuxizumab, tenatumomab, fresolimumab, metelimumab, lerdelimumab, tezepelumab, etigilimab, tiragotumab, placulumab, prezalumab, infliximab, nerelimomab, ozoralizumab, adalimumab, afelimomab, certolizumab pegol, golimumab, mapatumumab, conatumumab, lexatumumab, tigatuzumab, sacituzumab govitecan, votumumab, pogalizumab, letolizumab, pankomab, anatumomab mafenatox, enavatuzumab, flanvotumab, brolucizumab, ranibizumab, varisacumab, bevacizumab, faricimab, icrucumab, alacizumab pegol, ramucirumab, pritumumab, and onvatilimab;
[6731] VH1 comprises a VH of an antibody selected from the group consisting of losatuxizumab vedotin, utomilumab, urelumab, oleclumab, naptumomab estafenatox, ascrinvacumab, pintumomab, tacatuzumab tetraxetan, nesvacumab, vanucizumab, timolumab, vapaliximab, vepalimomab, enapotamab vedotin, ianalumab, belimumab, tabalumab, tibulizumab, belantamab mafodotin, teclistamab, teclistamab, detumomab, nacolomab tafenatox, eculizumab, lendalizumab, pexelizumab, pozelimab, ravulizumab, tesidolumab, vilobelimab, abagovomab, igovomab, oregovomab, sofituzumab vedotin, cantuzumab mertansine, cantuzuma bravtansine, girentuximab, altumomab pentetate, arcitumomab, besilesomab, bertilimumab, plozalizumab, mogamulizumab, leronlimab, PRO140, rovelizumab, rovelizumab, talacotuzumab, benralizumab, tavolimab, vonlerolizumab, gavilimomab, ziralimumab, fanolesomab, ipilimumab, ruplizumab, toralizumab, dapirolizumab pegol, toralizumab, dapirolizumab pegol, ruplizumab, blinatumomab, inebilizumab, loncastuximab tesirine, SGN-CD19A, tafasitamab, taplitumomab paptox, XMAB-5574, Budoprutug, Obexelimab, duvortuxizumab, englumafusp alfa, Emfizatamab, zeripatamig, siplizumab, blontuvetmab, FBTA05, ibritumomab tiuxetan, obinutuzumab, ocaratuzumab, ocrelizumab, ofatumumab, rituximab, tositumomab, ublituximab, veltuzumab, divozilimab, eramkafusp alfa, ripertamab, zuberitamab, glofitamab, nofetumomab merpentan, samalizumab, imvotamab, odronextamab, plamotamab, bectumomab, inotuzumab ozogamicin, moxetumomab pasudotox, pinatuzumab vedotin, gomiliximab, lumiliximab, inolimomab, inolimomab, daclizumab, camidanluma btesirine, basiliximab, varlilumab, omburtamab, enoblituzumab, vopratelimab, lulizumabpegol, TGN1412, muromonab-CD3, otelixizumab, teplizumab, visilizumab, epcoritamab, epcoritamab, brentuximab vedotin, iratumumab, azintuxizumab vedotin, gemtuzumab ozogamicin, lintuzumab, vadastuximab talirine, naratuximab emtansine, otlertuzumab, lilotomab satetraxetan, tetulomab, daratumumab, isatuximab, foralumab, mosunetuzumab, mosunetuzumab, cedelizumab, ibalizumab, keliximab, priliximab, tregalizumab, zanolimumab, bleselumab, iscalimab, lucatumumab, ravagalimab, selicrelumab, teneliximab, vanalimab, abciximab, bivatuzumab, iomab-B, telimomab aritox, zolimomab aritox, abituzumab, intetumumab, alemtuzumab, tamtuvetmab, lorvotuzumab mertansine, itolizumab, cusatuzumab, vorsetuzumab mafodotin, milatuzumab, iladatuzumab vedotin, polatuzumab vedotin, galiximab, cibisatamab, zolbetuximab, naxitamab, tisotumab vedotin, olendalizumab, pamrevlumab, lacnotuzumab, cabiralizumab, emactuzumab, axatilimab, gimsilumab, lenzilumab, namilumab, tremelimumab, ulocuplumab, tepoditamab, rovalpituzumab tesirine, tarlatamab, demcizumab, navicixizumab, drozitumab, parsatuzumab, depatuxizumab mafodotin, modotuximab, carotuximab, adecatumumab, adecatumumab, oportuzumab monatox, solitomab, tucotuzumab celmoleukin, edrecolomab, catumaxomab, ifabotuzumab, fibatuzumab, zalutumumab, panitumumab, cetuximab, futuximab, imgatuzumab, laprituximab emtansine, matuzumab, necitumumab, nimotuzumab, tomuzotuximab, amivantamab, amivantamab, epitumomab cituxetan, sontuzumab, duligotuzumab, elgemtumab, lumretuzumab, patritumab, seribantumab, zenocutuzumab, sibrotuzumab, burosumab, aprutumab ixadotin, radretumab, pasotuxizumab, farletuzumab, mirvetuximab soravtansine, vantictumab, TRBS07, 3F8, dinutuximab, dinutuximab beta, ecromeximab, mitumomab, andecaliximab, capromab, codrituzumab, glembatumumab vedotin, talquetamab, talquetamab, trevogrumab, indusatumab vedotin, ficlatuzumab, rilotumumab, zatuximab, pentuzimab, pentuzimab, margetuximab, timigutuzumab, trastuzumab, trastuzumab duocarmazine, trastuzumab emtansine, gancotamab, pertuzumab, ertumaxomab, emibetuzumab, telisotuzumab, telisotuzumab vedotin, derlotuximab biotin, apolizumab, onartuzumab, bersanlimab, enlimomabpegol, rontalizumab, sifalimumab, talizumab, ganitumab, istiratumab, robatumumab, teprotumumab, figitumumab, ganitumab, istiratumab, robatumumab, teprotumumab, cixutumumab, dalotuzumab, xentuzumab, dusigitumab, canakinumab, ustekinumab, ustekinumab, ustekinumab, briakinumab, briakinumab, abrezekimab, lebrikizumab, romilkimab, TNX-650, tralokinumab, anrukinzumab, brodalumab, ixekizumab, netakimab, perakizumab, secukinumab, vunakizumab, afasevikumab, afasevikumab, bimekizumab, bimekizumab, remtolumab, bermekimab, lutikizumab, lutikizumab, gevokizumab, cergutuzumab amunaleukin, fletikumab, fezakinumab, brazikumab, guselkumab, mirikizumab, tildrakizumab, risankizumab, flotetuzumab, nemolizumab, pascolizumab, dupilumab, mepolizumab, reslizumab, clazakizumab, elsilimomab, olokizumab, sarilumab, siltuximab, sirukumab, vobarilizumab, tocilizumab, SA237, satralizumab, enokizumab, prezalizumab, natalizumab, abrilumab, abrilumab, vedolizumab, volociximab, tadocizumab, etaracizumab, etrolizumab, spesolimab, vatelizumab, erlizumab, lirilumab, relatlimab, cBR96-doxorubicinimmunoconjugate, odulimomab, efalizumab, ladiratuzumab vedotin, simtuzumab, samrotamab vedotin, aselizumab, lupartumab amadotin, imalumab, carlumab, imaprelimab, amatuximab, amatuximab, anetumab ravtansine, narnatumab, clivatuzumab tetraxetan, pemtumomab, gatipotuzumab, ensituximab, lemalesomab, sulesomab, enfortumab vedotin, racotumomab, monalizumab, brontictuzumab, tarextumab, vesencumab, oxelumab, gilvetmab, tislelizumab, dostarlimab, BCD-100, nivolumab, PDR001, pembrolizumab, pidilizumab, retifanlimab, spartalizumab, sintilimab, cemiplimab, olaratumab, tovetumab, rinucumab, atezolizumab, avelumab, durvalumab, lifastuzumab vedotin, bavituximab, acapatamab, capromab, rosopatamab, nezastomig, pasotuxizumab, pelgifatamab, voxalatamab, cofetuzumab pelidotin, denosumab, rosmantuzumab, cirmtuzumab, atinumab, indatuximab ravtansine, elotuzumab, sirtratumab vedotin, sonepcizumab, vandortuzumab vedotin, minretumomab, satumomab pendetide, maslimomab, ontuxizumab, tenatumomab, fresolimumab, metelimumab, lerdelimumab, tezepelumab, etigilimab, tiragotumab, placulumab, prezalumab, infliximab, nerelimomab, ozoralizumab, adalimumab, afelimomab, certolizumab pegol, golimumab, mapatumumab, conatumumab, lexatumumab, tigatuzumab, sacituzumab govitecan, votumumab, pogalizumab, letolizumab, pankomab, anatumomab mafenatox, enavatuzumab, flanvotumab, brolucizumab, ranibizumab, varisacumab, bevacizumab, faricimab, icrucumab, alacizumab pegol, ramucirumab, pritumumab, and onvatilimab;
[6732] VH2 comprises a VH of an antibody selected from the group consisting of losatuxizumab vedotin, utomilumab, urelumab, oleclumab, naptumomab estafenatox, ascrinvacumab, pintumomab, tacatuzumab tetraxetan, nesvacumab, vanucizumab, timolumab, vapaliximab, vepalimomab, enapotamab vedotin, ianalumab, belimumab, tabalumab, tibulizumab, belantamab mafodotin, teclistamab, teclistamab, detumomab, nacolomab tafenatox, eculizumab, lendalizumab, pexelizumab, pozelimab, ravulizumab, tesidolumab, vilobelimab, abagovomab, igovomab, oregovomab, sofituzumab vedotin, cantuzumab mertansine, cantuzuma bravtansine, girentuximab, altumomab pentetate, arcitumomab, besilesomab, bertilimumab, plozalizumab, mogamulizumab, leronlimab, PRO140, rovelizumab, rovelizumab, talacotuzumab, benralizumab, tavolimab, vonlerolizumab, gavilimomab, ziralimumab, fanolesomab, ipilimumab, ruplizumab, toralizumab, dapirolizumab pegol, toralizumab, dapirolizumab pegol, ruplizumab, blinatumomab, inebilizumab, loncastuximab tesirine, SGN-CD19A, tafasitamab, taplitumomab paptox, XMAB-5574, Budoprutug, Obexelimab, duvortuxizumab, englumafusp alfa, Emfizatamab, zeripatamig, siplizumab, blontuvetmab, FBTA05, ibritumomab tiuxetan, obinutuzumab, ocaratuzumab, ocrelizumab, ofatumumab, rituximab, tositumomab, ublituximab, veltuzumab, divozilimab, eramkafusp alfa, ripertamab, zuberitamab, glofitamab, nofetumomab merpentan, samalizumab, imvotamab, odronextamab, plamotamab, bectumomab, inotuzumab ozogamicin, moxetumomab pasudotox, pinatuzumab vedotin, gomiliximab, lumiliximab, inolimomab, inolimomab, daclizumab, camidanluma btesirine, basiliximab, varlilumab, omburtamab, enoblituzumab, vopratelimab, lulizumabpegol, TGN1412, muromonab-CD3, otelixizumab, teplizumab, visilizumab, epcoritamab, epcoritamab, brentuximab vedotin, iratumumab, azintuxizumab vedotin, gemtuzumab ozogamicin, lintuzumab, vadastuximab talirine, naratuximab emtansine, otlertuzumab, lilotomab satetraxetan, tetulomab, daratumumab, isatuximab, foralumab, mosunetuzumab, mosunetuzumab, cedelizumab, ibalizumab, keliximab, priliximab, tregalizumab, zanolimumab, bleselumab, iscalimab, lucatumumab, ravagalimab, selicrelumab, teneliximab, vanalimab, abciximab, bivatuzumab, iomab-B, telimomab aritox, zolimomab aritox, abituzumab, intetumumab, alemtuzumab, tamtuvetmab, lorvotuzumab mertansine, itolizumab, cusatuzumab, vorsetuzumab mafodotin, milatuzumab, iladatuzumab vedotin, polatuzumab vedotin, galiximab, cibisatamab, zolbetuximab, naxitamab, tisotumab vedotin, olendalizumab, pamrevlumab, lacnotuzumab, cabiralizumab, emactuzumab, axatilimab, gimsilumab, lenzilumab, namilumab, tremelimumab, ulocuplumab, tepoditamab, rovalpituzumab tesirine, tarlatamab, demcizumab, navicixizumab, drozitumab, parsatuzumab, depatuxizumab mafodotin, modotuximab, carotuximab, adecatumumab, adecatumumab, oportuzumab monatox, solitomab, tucotuzumab celmoleukin, edrecolomab, catumaxomab, ifabotuzumab, fibatuzumab, zalutumumab, panitumumab, cetuximab, futuximab, imgatuzumab, laprituximab emtansine, matuzumab, necitumumab, nimotuzumab, tomuzotuximab, amivantamab, amivantamab, epitumomab cituxetan, sontuzumab, duligotuzumab, elgemtumab, lumretuzumab, patritumab, seribantumab, zenocutuzumab, sibrotuzumab, burosumab, aprutumab ixadotin, radretumab, pasotuxizumab, farletuzumab, mirvetuximab soravtansine, vantictumab, TRBS07, 3F8, dinutuximab, dinutuximab beta, ecromeximab, mitumomab, andecaliximab, capromab, codrituzumab, glembatumumab vedotin, talquetamab, talquetamab, trevogrumab, indusatumab vedotin, ficlatuzumab, rilotumumab, zatuximab, pentuzimab, pentuzimab, margetuximab, timigutuzumab, trastuzumab, trastuzumab duocarmazine, trastuzumab emtansine, gancotamab, pertuzumab, ertumaxomab, emibetuzumab, telisotuzumab, telisotuzumab vedotin, derlotuximab biotin, apolizumab, onartuzumab, bersanlimab, enlimomabpegol, rontalizumab, sifalimumab, talizumab, ganitumab, istiratumab, robatumumab, teprotumumab, figitumumab, ganitumab, istiratumab, robatumumab, teprotumumab, cixutumumab, dalotuzumab, xentuzumab, dusigitumab, canakinumab, ustekinumab, ustekinumab, ustekinumab, briakinumab, briakinumab, abrezekimab, lebrikizumab, romilkimab, TNX-650, tralokinumab, anrukinzumab, brodalumab, ixekizumab, netakimab, perakizumab, secukinumab, vunakizumab, afasevikumab, afasevikumab, bimekizumab, bimekizumab, remtolumab, bermekimab, lutikizumab, lutikizumab, gevokizumab, cergutuzumab amunaleukin, fletikumab, fezakinumab, brazikumab, guselkumab, mirikizumab, tildrakizumab, risankizumab, flotetuzumab, nemolizumab, pascolizumab, dupilumab, mepolizumab, reslizumab, clazakizumab, elsilimomab, olokizumab, sarilumab, siltuximab, sirukumab, vobarilizumab, tocilizumab, SA237, satralizumab, enokizumab, prezalizumab, natalizumab, abrilumab, abrilumab, vedolizumab, volociximab, tadocizumab, etaracizumab, etrolizumab, spesolimab, vatelizumab, erlizumab, lirilumab, relatlimab, cBR96-doxorubicinimmunoconjugate, odulimomab, efalizumab, ladiratuzumab vedotin, simtuzumab, samrotamab vedotin, aselizumab, lupartumab amadotin, imalumab, carlumab, imaprelimab, amatuximab, amatuximab, anetumab ravtansine, narnatumab, clivatuzumab tetraxetan, pemtumomab, gatipotuzumab, ensituximab, lemalesomab, sulesomab, enfortumab vedotin, racotumomab, monalizumab, brontictuzumab, tarextumab, vesencumab, oxelumab, gilvetmab, tislelizumab, dostarlimab, BCD-100, nivolumab, PDR001, pembrolizumab, pidilizumab, retifanlimab, spartalizumab, sintilimab, cemiplimab, olaratumab, tovetumab, rinucumab, atezolizumab, avelumab, durvalumab, lifastuzumab vedotin, bavituximab, acapatamab, capromab, rosopatamab, nezastomig, pasotuxizumab, pelgifatamab, voxalatamab, cofetuzumab pelidotin, denosumab, rosmantuzumab, cirmtuzumab, atinumab, indatuximab ravtansine, elotuzumab, sirtratumab vedotin, sonepcizumab, vandortuzumab vedotin, minretumomab, satumomab pendetide, maslimomab, ontuxizumab, tenatumomab, fresolimumab, metelimumab, lerdelimumab, tezepelumab, etigilimab, tiragotumab, placulumab, prezalumab, infliximab, nerelimomab, ozoralizumab, adalimumab, afelimomab, certolizumab pegol, golimumab, mapatumumab, conatumumab, lexatumumab, tigatuzumab, sacituzumab govitecan, votumumab, pogalizumab, letolizumab, pankomab, anatumomab mafenatox, enavatuzumab, flanvotumab, brolucizumab, ranibizumab, varisacumab, bevacizumab, faricimab, icrucumab, alacizumab pegol, ramucirumab, pritumumab, and onvatilimab;
[6733] VH3 comprises a VH of an antibody selected from the group consisting of losatuxizumab vedotin, utomilumab, urelumab, oleclumab, naptumomab estafenatox, ascrinvacumab, pintumomab, tacatuzumab tetraxetan, nesvacumab, vanucizumab, timolumab, vapaliximab, vepalimomab, enapotamab vedotin, ianalumab, belimumab, tabalumab, tibulizumab, belantamab mafodotin, teclistamab, teclistamab, detumomab, nacolomab tafenatox, eculizumab, lendalizumab, pexelizumab, pozelimab, ravulizumab, tesidolumab, vilobelimab, abagovomab, igovomab, oregovomab, sofituzumab vedotin, cantuzumab mertansine, cantuzuma bravtansine, girentuximab, altumomab pentetate, arcitumomab, besilesomab, bertilimumab, plozalizumab, mogamulizumab, leronlimab, PRO140, rovelizumab, rovelizumab, talacotuzumab, benralizumab, tavolimab, vonlerolizumab, gavilimomab, ziralimumab, fanolesomab, ipilimumab, ruplizumab, toralizumab, dapirolizumab pegol, toralizumab, dapirolizumab pegol, ruplizumab, blinatumomab, inebilizumab, loncastuximab tesirine, SGN-CD19A, tafasitamab, taplitumomab paptox, XMAB-5574, Budoprutug, Obexelimab, duvortuxizumab, englumafusp alfa, Emfizatamab, zeripatamig, siplizumab, blontuvetmab, FBTA05, ibritumomab tiuxetan, obinutuzumab, ocaratuzumab, ocrelizumab, ofatumumab, rituximab, tositumomab, ublituximab, veltuzumab, divozilimab, eramkafusp alfa, ripertamab, zuberitamab, glofitamab, nofetumomab merpentan, samalizumab, imvotamab, odronextamab, plamotamab, bectumomab, inotuzumab ozogamicin, moxetumomab pasudotox, pinatuzumab vedotin, gomiliximab, lumiliximab, inolimomab, inolimomab, daclizumab, camidanluma btesirine, basiliximab, varlilumab, omburtamab, enoblituzumab, vopratelimab, lulizumabpegol, TGN1412, muromonab-CD3, otelixizumab, teplizumab, visilizumab, epcoritamab, epcoritamab, brentuximab vedotin, iratumumab, azintuxizumab vedotin, gemtuzumab ozogamicin, lintuzumab, vadastuximab talirine, naratuximab emtansine, otlertuzumab, lilotomab satetraxetan, tetulomab, daratumumab, isatuximab, foralumab, mosunetuzumab, mosunetuzumab, cedelizumab, ibalizumab, keliximab, priliximab, tregalizumab, zanolimumab, bleselumab, iscalimab, lucatumumab, ravagalimab, selicrelumab, teneliximab, vanalimab, abciximab, bivatuzumab, iomab-B, telimomab aritox, zolimomab aritox, abituzumab, intetumumab, alemtuzumab, tamtuvetmab, lorvotuzumab mertansine, itolizumab, cusatuzumab, vorsetuzumab mafodotin, milatuzumab, iladatuzumab vedotin, polatuzumab vedotin, galiximab, cibisatamab, zolbetuximab, naxitamab, tisotumab vedotin, olendalizumab, pamrevlumab, lacnotuzumab, cabiralizumab, emactuzumab, axatilimab, gimsilumab, lenzilumab, namilumab, tremelimumab, ulocuplumab, tepoditamab, rovalpituzumab tesirine, tarlatamab, demcizumab, navicixizumab, drozitumab, parsatuzumab, depatuxizumab mafodotin, modotuximab, carotuximab, adecatumumab, adecatumumab, oportuzumab monatox, solitomab, tucotuzumab celmoleukin, edrecolomab, catumaxomab, ifabotuzumab, fibatuzumab, zalutumumab, panitumumab, cetuximab, futuximab, imgatuzumab, laprituximab emtansine, matuzumab, necitumumab, nimotuzumab, tomuzotuximab, amivantamab, amivantamab, epitumomab cituxetan, sontuzumab, duligotuzumab, elgemtumab, lumretuzumab, patritumab, seribantumab, zenocutuzumab, sibrotuzumab, burosumab, aprutumab ixadotin, radretumab, pasotuxizumab, farletuzumab, mirvetuximab soravtansine, vantictumab, TRBS07, 3F8, dinutuximab, dinutuximab beta, ecromeximab, mitumomab, andecaliximab, capromab, codrituzumab, glembatumumab vedotin, talquetamab, talquetamab, trevogrumab, indusatumab vedotin, ficlatuzumab, rilotumumab, zatuximab, pentuzimab, pentuzimab, margetuximab, timigutuzumab, trastuzumab, trastuzumab duocarmazine, trastuzumab emtansine, gancotamab, pertuzumab, ertumaxomab, emibetuzumab, telisotuzumab, telisotuzumab vedotin, derlotuximab biotin, apolizumab, onartuzumab, bersanlimab, enlimomabpegol, rontalizumab, sifalimumab, talizumab, ganitumab, istiratumab, robatumumab, teprotumumab, figitumumab, ganitumab, istiratumab, robatumumab, teprotumumab, cixutumumab, dalotuzumab, xentuzumab, dusigitumab, canakinumab, ustekinumab, ustekinumab, ustekinumab, briakinumab, briakinumab, abrezekimab, lebrikizumab, romilkimab, TNX-650, tralokinumab, anrukinzumab, brodalumab, ixekizumab, netakimab, perakizumab, secukinumab, vunakizumab, afasevikumab, afasevikumab, bimekizumab, bimekizumab, remtolumab, bermekimab, lutikizumab, lutikizumab, gevokizumab, cergutuzumab amunaleukin, fletikumab, fezakinumab, brazikumab, guselkumab, mirikizumab, tildrakizumab, risankizumab, flotetuzumab, nemolizumab, pascolizumab, dupilumab, mepolizumab, reslizumab, clazakizumab, elsilimomab, olokizumab, sarilumab, siltuximab, sirukumab, vobarilizumab, tocilizumab, SA237, satralizumab, enokizumab, prezalizumab, natalizumab, abrilumab, abrilumab, vedolizumab, volociximab, tadocizumab, etaracizumab, etrolizumab, spesolimab, vatelizumab, erlizumab, lirilumab, relatlimab, cBR96-doxorubicinimmunoconjugate, odulimomab, efalizumab, ladiratuzumab vedotin, simtuzumab, samrotamab vedotin, aselizumab, lupartumab amadotin, imalumab, carlumab, imaprelimab, amatuximab, amatuximab, anetumab ravtansine, narnatumab, clivatuzumab tetraxetan, pemtumomab, gatipotuzumab, ensituximab, lemalesomab, sulesomab, enfortumab vedotin, racotumomab, monalizumab, brontictuzumab, tarextumab, vesencumab, oxelumab, gilvetmab, tislelizumab, dostarlimab, BCD-100, nivolumab, PDR001, pembrolizumab, pidilizumab, retifanlimab, spartalizumab, sintilimab, cemiplimab, olaratumab, tovetumab, rinucumab, atezolizumab, avelumab, durvalumab, lifastuzumab vedotin, bavituximab, acapatamab, capromab, rosopatamab, nezastomig, pasotuxizumab, pelgifatamab, voxalatamab, cofetuzumab pelidotin, denosumab, rosmantuzumab, cirmtuzumab, atinumab, indatuximab ravtansine, elotuzumab, sirtratumab vedotin, sonepcizumab, vandortuzumab vedotin, minretumomab, satumomab pendetide, maslimomab, ontuxizumab, tenatumomab, fresolimumab, metelimumab, lerdelimumab, tezepelumab, etigilimab, tiragotumab, placulumab, prezalumab, infliximab, nerelimomab, ozoralizumab, adalimumab, afelimomab, certolizumab pegol, golimumab, mapatumumab, conatumumab, lexatumumab, tigatuzumab, sacituzumab govitecan, votumumab, pogalizumab, letolizumab, pankomab, anatumomab mafenatox, enavatuzumab, flanvotumab, brolucizumab, ranibizumab, varisacumab, bevacizumab, faricimab, icrucumab, alacizumab pegol, ramucirumab, pritumumab, and onvatilimab; and/or
[6734] VH4 comprises a VH of an antibody selected from the group consisting of losatuxizumab vedotin, utomilumab, urelumab, oleclumab, naptumomab estafenatox, ascrinvacumab, pintumomab, tacatuzumab tetraxetan, nesvacumab, vanucizumab, timolumab, vapaliximab, vepalimomab, enapotamab vedotin, ianalumab, belimumab, tabalumab, tibulizumab, belantamab mafodotin, teclistamab, teclistamab, detumomab, nacolomab tafenatox, eculizumab, lendalizumab, pexelizumab, pozelimab, ravulizumab, tesidolumab, vilobelimab, abagovomab, igovomab, oregovomab, sofituzumab vedotin, cantuzumab mertansine, cantuzuma bravtansine, girentuximab, altumomab pentetate, arcitumomab, besilesomab, bertilimumab, plozalizumab, mogamulizumab, leronlimab, PRO140, rovelizumab, rovelizumab, talacotuzumab, benralizumab, tavolimab, vonlerolizumab, gavilimomab, ziralimumab, fanolesomab, ipilimumab, ruplizumab, toralizumab, dapirolizumab pegol, toralizumab, dapirolizumab pegol, ruplizumab, blinatumomab, inebilizumab, loncastuximab tesirine, SGN-CD19A, tafasitamab, taplitumomab paptox, XMAB-5574, Budoprutug, Obexelimab, duvortuxizumab, englumafusp alfa, Emfizatamab, zeripatamig, siplizumab, blontuvetmab, FBTA05, ibritumomab tiuxetan, obinutuzumab, ocaratuzumab, ocrelizumab, ofatumumab, rituximab, tositumomab, ublituximab, veltuzumab, divozilimab, eramkafusp alfa, ripertamab, zuberitamab, glofitamab, nofetumomab merpentan, samalizumab, imvotamab, odronextamab, plamotamab, bectumomab, inotuzumab ozogamicin, moxetumomab pasudotox, pinatuzumab vedotin, gomiliximab, lumiliximab, inolimomab, inolimomab, daclizumab, camidanluma btesirine, basiliximab, varlilumab, omburtamab, enoblituzumab, vopratelimab, lulizumabpegol, TGN1412, muromonab-CD3, otelixizumab, teplizumab, visilizumab, epcoritamab, epcoritamab, brentuximab vedotin, iratumumab, azintuxizumab vedotin, gemtuzumab ozogamicin, lintuzumab, vadastuximab talirine, naratuximab emtansine, otlertuzumab, lilotomab satetraxetan, tetulomab, daratumumab, isatuximab, foralumab, mosunetuzumab, mosunetuzumab, cedelizumab, ibalizumab, keliximab, priliximab, tregalizumab, zanolimumab, bleselumab, iscalimab, lucatumumab, ravagalimab, selicrelumab, teneliximab, vanalimab, abciximab, bivatuzumab, iomab-B, telimomab aritox, zolimomab aritox, abituzumab, intetumumab, alemtuzumab, tamtuvetmab, lorvotuzumab mertansine, itolizumab, cusatuzumab, vorsetuzumab mafodotin, milatuzumab, iladatuzumab vedotin, polatuzumab vedotin, galiximab, cibisatamab, zolbetuximab, naxitamab, tisotumab vedotin, olendalizumab, pamrevlumab, lacnotuzumab, cabiralizumab, emactuzumab, axatilimab, gimsilumab, lenzilumab, namilumab, tremelimumab, ulocuplumab, tepoditamab, rovalpituzumab tesirine, tarlatamab, demcizumab, navicixizumab, drozitumab, parsatuzumab, depatuxizumab mafodotin, modotuximab, carotuximab, adecatumumab, adecatumumab, oportuzumab monatox, solitomab, tucotuzumab celmoleukin, edrecolomab, catumaxomab, ifabotuzumab, fibatuzumab, zalutumumab, panitumumab, cetuximab, futuximab, imgatuzumab, laprituximab emtansine, matuzumab, necitumumab, nimotuzumab, tomuzotuximab, amivantamab, amivantamab, epitumomab cituxetan, sontuzumab, duligotuzumab, elgemtumab, lumretuzumab, patritumab, seribantumab, zenocutuzumab, sibrotuzumab, burosumab, aprutumab ixadotin, radretumab, pasotuxizumab, farletuzumab, mirvetuximab soravtansine, vantictumab, TRBS07, 3F8, dinutuximab, dinutuximab beta, ecromeximab, mitumomab, andecaliximab, capromab, codrituzumab, glembatumumab vedotin, talquetamab, talquetamab, trevogrumab, indusatumab vedotin, ficlatuzumab, rilotumumab, zatuximab, pentuzimab, pentuzimab, margetuximab, timigutuzumab, trastuzumab, trastuzumab duocarmazine, trastuzumab emtansine, gancotamab, pertuzumab, ertumaxomab, emibetuzumab, telisotuzumab, telisotuzumab vedotin, derlotuximab biotin, apolizumab, onartuzumab, bersanlimab, enlimomabpegol, rontalizumab, sifalimumab, talizumab, ganitumab, istiratumab, robatumumab, teprotumumab, figitumumab, ganitumab, istiratumab, robatumumab, teprotumumab, cixutumumab, dalotuzumab, xentuzumab, dusigitumab, canakinumab, ustekinumab, ustekinumab, ustekinumab, briakinumab, briakinumab, abrezekimab, lebrikizumab, romilkimab, TNX-650, tralokinumab, anrukinzumab, brodalumab, ixekizumab, netakimab, perakizumab, secukinumab, vunakizumab, afasevikumab, afasevikumab, bimekizumab, bimekizumab, remtolumab, bermekimab, lutikizumab, lutikizumab, gevokizumab, cergutuzumab amunaleukin, fletikumab, fezakinumab, brazikumab, guselkumab, mirikizumab, tildrakizumab, risankizumab, flotetuzumab, nemolizumab, pascolizumab, dupilumab, mepolizumab, reslizumab, clazakizumab, elsilimomab, olokizumab, sarilumab, siltuximab, sirukumab, vobarilizumab, tocilizumab, SA237, satralizumab, enokizumab, prezalizumab, natalizumab, abrilumab, abrilumab, vedolizumab, volociximab, tadocizumab, etaracizumab, etrolizumab, spesolimab, vatelizumab, erlizumab, lirilumab, relatlimab, cBR96-doxorubicinimmunoconjugate, odulimomab, efalizumab, ladiratuzumab vedotin, simtuzumab, samrotamab vedotin, aselizumab, lupartumab amadotin, imalumab, carlumab, imaprelimab, amatuximab, amatuximab, anetumab ravtansine, narnatumab, clivatuzumab tetraxetan, pemtumomab, gatipotuzumab, ensituximab, lemalesomab, sulesomab, enfortumab vedotin, racotumomab, monalizumab, brontictuzumab, tarextumab, vesencumab, oxelumab, gilvetmab, tislelizumab, dostarlimab, BCD-100, nivolumab, PDR001, pembrolizumab, pidilizumab, retifanlimab, spartalizumab, sintilimab, cemiplimab, olaratumab, tovetumab, rinucumab, atezolizumab, avelumab, durvalumab, lifastuzumab vedotin, bavituximab, acapatamab, capromab, rosopatamab, nezastomig, pasotuxizumab, pelgifatamab, voxalatamab, cofetuzumab pelidotin, denosumab, rosmantuzumab, cirmtuzumab, atinumab, indatuximab ravtansine, elotuzumab, sirtratumab vedotin, sonepcizumab, vandortuzumab vedotin, minretumomab, satumomab pendetide, maslimomab, ontuxizumab, tenatumomab, fresolimumab, metelimumab, lerdelimumab, tezepelumab, etigilimab, tiragotumab, placulumab, prezalumab, infliximab, nerelimomab, ozoralizumab, adalimumab, afelimomab, certolizumab pegol, golimumab, mapatumumab, conatumumab, lexatumumab, tigatuzumab, sacituzumab govitecan, votumumab, pogalizumab, letolizumab, pankomab, anatumomab mafenatox, enavatuzumab, flanvotumab, brolucizumab, ranibizumab, varisacumab, bevacizumab, faricimab, icrucumab, alacizumab pegol, ramucirumab, pritumumab, and onvatilimab; or
[6735] (iii)
[6736] VL1 comprises (i) a complementarity determining region (CDR) 1 having an amino acid sequence that is at least 65%, at least 70%, at least 75%, at least 80%, at least 85%, at least 90%, at least 95%, at least 99%, or 100% identical to any one of SEQ ID NOs: 1096, 1103, 1110, 1120, 1127, 1134, 1141, 1148, 1155, 1162, 1169, 1174, 1181, 1188, 1199, 1211, 1221, 1228, 1235, 1247, 1254, 1261, 1266, 1271, 1278, 1285, 1292, 1299, 1306, 1313, 1319, 1326, 1339, 1352, 1359, 1366, 1373, 1382, 1394, 1401, 1408, 1414, 1421, 1428, 1441, 1448, 1455, 1461, 1468, 1475, 1488, 1495, 1508, 1519, 1526, 1531, 1538, 1544, 1556, 1568, 1574, 1581, 1594, 1601, 1608, 1615, 1622, 1629, 1636, 1643, 1650, 1657, 1672, 1679, 1689, 1697, 1708, 1715, 1718, 1723, 1727, 1738, 1743, 1752, 1761, 1763, 1769, 1776, and 1786; (ii) a CDR2 having an amino acid sequence that is at least 65%, at least 70%, at least 75%, at least 80%, at least 85%, at least 90%, at least 95%, at least 99%, or 100% identical to any one of SEQ ID NOs: 1200, 1212, 1680, 1690, 1698, 1709, 1728, 1739, 1744, 1753, 1770, and 1777; or at least 65%, at least 70%, at least 75%, at least 80%, at least 85%, at least 90%, at least 95%, at least 99%, or 100% identical to any one of amino acid sequences AAS, APS, AT, ATS, DAS, DDG, DDS, DT, DTS, DVS, EAS, FTS, GAF, GAN, GAS, GAT, GIS, GKN, GNS, HTS, KVS, LAS, LGS, LVS, NAK, NTN, QMS, RMS, RTS, SAS, TTS, WAS, YAS, YAT, YGS, YRS, and YTS; and (iii) a CDR3 having an amino acid sequence that is at least 65%, at least 70%, at least 75%, at least 80%, at least 85%, at least 90%, at least 95%, at least 99%, or 100% identical to any one of SEQ ID NOs: 1097, 1104, 1111, 1121, 1128, 1135, 1142, 1149, 1156, 1163, 1170, 1175, 1182, 1189, 1195, 1201, 1207, 1213, 1222, 1229, 1236, 2009, 1248, 1255, 1262, 1267, 1272, 1279, 1286, 1293, 1300, 1307, 1320, 1327, 1333, 1340, 1346, 1353, 1360, 1367, 1374, 1383, 1389, 1395, 1402, 1409, 1415, 1422, 1429, 1435, 1442, 1449, 1456, 1462, 1469, 1476, 1482, 1489, 1496, 1502, 1509, 1513, 1520, 1532, 1539, 1545, 1557, 1562, 1569, 1575, 1582, 1588, 1595, 1602, 1609, 1616, 1623, 1630, 1637, 1644, 1651, 1658, 1663, 1673, 1681, 1691, 1699, 1710, 1729, 1735, 1745, 1751, 1754, 1778, 1787, and 1976;
[6737] VL2 comprises (i) a complementarity determining region (CDR) 1 having an amino acid sequence that is at least 65%, at least 70%, at least 75%, at least 80%, at least 85%, at least 90%, at least 95%, at least 99%, or 100% identical to any one of SEQ ID NOs: 1096, 1103, 1110, 1120, 1127, 1134, 1141, 1148, 1155, 1162, 1169, 1174, 1181, 1188, 1199, 1211, 1221, 1228, 1235, 1247, 1254, 1261, 1266, 1271, 1278, 1285, 1292, 1299, 1306, 1313, 1319, 1326, 1339, 1352, 1359, 1366, 1373, 1382, 1394, 1401, 1408, 1414, 1421, 1428, 1441, 1448, 1455, 1461, 1468, 1475, 1488, 1495, 1508, 1519, 1526, 1531, 1538, 1544, 1556, 1568, 1574, 1581, 1594, 1601, 1608, 1615, 1622, 1629, 1636, 1643, 1650, 1657, 1672, 1679, 1689, 1697, 1708, 1715, 1718, 1723, 1727, 1738, 1743, 1752, 1761, 1763, 1769, 1776, and 1786; (ii) a CDR2 having an amino acid sequence that is at least 65%, at least 70%, at least 75%, at least 80%, at least 85%, at least 90%, at least 95%, at least 99%, or 100% identical to any one of SEQ ID NOs: 1200, 1212, 1680, 1690, 1698, 1709, 1728, 1739, 1744, 1753, 1770, and 1777; or at least 65%, at least 70%, at least 75%, at least 80%, at least 85%, at least 90%, at least 95%, at least 99%, or 100% identical to any one of amino acid sequences AAS, APS, AT, ATS, DAS, DDG, DDS, DT, DTS, DVS, EAS, FTS, GAF, GAN, GAS, GAT, GIS, GKN, GNS, HTS, KVS, LAS, LGS, LVS, NAK, NTN, QMS, RMS, RTS, SAS, TTS, WAS, YAS, YAT, YGS, YRS, and YTS; and (iii) a CDR3 having an amino acid sequence that is at least 65%, at least 70%, at least 75%, at least 80%, at least 85%, at least 90%, at least 95%, at least 99%, or 100% identical to any one of SEQ ID NOs: 1097, 1104, 1111, 1121, 1128, 1135, 1142, 1149, 1156, 1163, 1170, 1175, 1182, 1189, 1195, 1201, 1207, 1213, 1222, 1229, 1236, 2009, 1248, 1255, 1262, 1267, 1272, 1279, 1286, 1293, 1300, 1307, 1320, 1327, 1333, 1340, 1346, 1353, 1360, 1367, 1374, 1383, 1389, 1395, 1402, 1409, 1415, 1422, 1429, 1435, 1442, 1449, 1456, 1462, 1469, 1476, 1482, 1489, 1496, 1502, 1509, 1513, 1520, 1532, 1539, 1545, 1557, 1562, 1569, 1575, 1582, 1588, 1595, 1602, 1609, 1616, 1623, 1630, 1637, 1644, 1651, 1658, 1663, 1673, 1681, 1691, 1699, 1710, 1729, 1735, 1745, 1751, 1754, 1778, 1787, and 1976;
[6738] VL3 comprises (i) a complementarity determining region (CDR) 1 having an amino acid sequence that is at least 65%, at least 70%, at least 75%, at least 80%, at least 85%, at least 90%, at least 95%, at least 99%, or 100% identical to any one of SEQ ID NOs: 1096, 1103, 1110, 1120, 1127, 1134, 1141, 1148, 1155, 1162, 1169, 1174, 1181, 1188, 1199, 1211, 1221, 1228, 1235, 1247, 1254, 1261, 1266, 1271, 1278, 1285, 1292, 1299, 1306, 1313, 1319, 1326, 1339, 1352, 1359, 1366, 1373, 1382, 1394, 1401, 1408, 1414, 1421, 1428, 1441, 1448, 1455, 1461, 1468, 1475, 1488, 1495, 1508, 1519, 1526, 1531, 1538, 1544, 1556, 1568, 1574, 1581, 1594, 1601, 1608, 1615, 1622, 1629, 1636, 1643, 1650, 1657, 1672, 1679, 1689, 1697, 1708, 1715, 1718, 1723, 1727, 1738, 1743, 1752, 1761, 1763, 1769, 1776, and 1786; (ii) a CDR2 having an amino acid sequence that is at least 65%, at least 70%, at least 75%, at least 80%, at least 85%, at least 90%, at least 95%, at least 99%, or 100% identical to any one of SEQ ID NOs: 1200, 1212, 1680, 1690, 1698, 1709, 1728, 1739, 1744, 1753, 1770, and 1777; or at least 65%, at least 70%, at least 75%, at least 80%, at least 85%, at least 90%, at least 95%, at least 99%, or 100% identical to any one of amino acid sequences AAS, APS, AT, ATS, DAS, DDG, DDS, DT, DTS, DVS, EAS, FTS, GAF, GAN, GAS, GAT, GIS, GKN, GNS, HTS, KVS, LAS, LGS, LVS, NAK, NTN, QMS, RMS, RTS, SAS, TTS, WAS, YAS, YAT, YGS, YRS, and YTS; and (iii) a CDR3 having an amino acid sequence that is at least 65%, at least 70%, at least 75%, at least 80%, at least 85%, at least 90%, at least 95%, at least 99%, or 100% identical to any one of SEQ ID NOs: 1097, 1104, 1111, 1121, 1128, 1135, 1142, 1149, 1156, 1163, 1170, 1175, 1182, 1189, 1195, 1201, 1207, 1213, 1222, 1229, 1236, 2009, 1248, 1255, 1262, 1267, 1272, 1279, 1286, 1293, 1300, 1307, 1320, 1327, 1333, 1340, 1346, 1353, 1360, 1367, 1374, 1383, 1389, 1395, 1402, 1409, 1415, 1422, 1429, 1435, 1442, 1449, 1456, 1462, 1469, 1476, 1482, 1489, 1496, 1502, 1509, 1513, 1520, 1532, 1539, 1545, 1557, 1562, 1569, 1575, 1582, 1588, 1595, 1602, 1609, 1616, 1623, 1630, 1637, 1644, 1651, 1658, 1663, 1673, 1681, 1691, 1699, 1710, 1729, 1735, 1745, 1751, 1754, 1778, 1787, and 1976;
[6739] VL4 comprises (i) a complementarity determining region (CDR) 1 having an amino acid sequence that is at least 65%, at least 70%, at least 75%, at least 80%, at least 85%, at least 90%, at least 95%, at least 99%, or 100% identical to any one of SEQ ID NOs: 1096, 1103, 1110, 1120, 1127, 1134, 1141, 1148, 1155, 1162, 1169, 1174, 1181, 1188, 1199, 1211, 1221, 1228, 1235, 1247, 1254, 1261, 1266, 1271, 1278, 1285, 1292, 1299, 1306, 1313, 1319, 1326, 1339, 1352, 1359, 1366, 1373, 1382, 1394, 1401, 1408, 1414, 1421, 1428, 1441, 1448, 1455, 1461, 1468, 1475, 1488, 1495, 1508, 1519, 1526, 1531, 1538, 1544, 1556, 1568, 1574, 1581, 1594, 1601, 1608, 1615, 1622, 1629, 1636, 1643, 1650, 1657, 1672, 1679, 1689, 1697, 1708, 1715, 1718, 1723, 1727, 1738, 1743, 1752, 1761, 1763, 1769, 1776, and 1786; (ii) a CDR2 having an amino acid sequence that is at least 65%, at least 70%, at least 75%, at least 80%, at least 85%, at least 90%, at least 95%, at least 99%, or 100% identical to any one of SEQ ID NOs: 1200, 1212, 1680, 1690, 1698, 1709, 1728, 1739, 1744, 1753, 1770, and 1777; or at least 65%, at least 70%, at least 75%, at least 80%, at least 85%, at least 90%, at least 95%, at least 99%, or 100% identical to any one of amino acid sequences AAS, APS, AT, ATS, DAS, DDG, DDS, DT, DTS, DVS, EAS, FTS, GAF, GAN, GAS, GAT, GIS, GKN, GNS, HTS, KVS, LAS, LGS, LVS, NAK, NTN, QMS, RMS, RTS, SAS, TTS, WAS, YAS, YAT, YGS, YRS, and YTS; and (iii) a CDR3 having an amino acid sequence that is at least 65%, at least 70%, at least 75%, at least 80%, at least 85%, at least 90%, at least 95%, at least 99%, or 100% identical to any one of SEQ ID NOs: 1097, 1104, 1111, 1121, 1128, 1135, 1142, 1149, 1156, 1163, 1170, 1175, 1182, 1189, 1195, 1201, 1207, 1213, 1222, 1229, 1236, 2009, 1248, 1255, 1262, 1267, 1272, 1279, 1286, 1293, 1300, 1307, 1320, 1327, 1333, 1340, 1346, 1353, 1360, 1367, 1374, 1383, 1389, 1395, 1402, 1409, 1415, 1422, 1429, 1435, 1442, 1449, 1456, 1462, 1469, 1476, 1482, 1489, 1496, 1502, 1509, 1513, 1520, 1532, 1539, 1545, 1557, 1562, 1569, 1575, 1582, 1588, 1595, 1602, 1609, 1616, 1623, 1630, 1637, 1644, 1651, 1658, 1663, 1673, 1681, 1691, 1699, 1710, 1729, 1735, 1745, 1751, 1754, 1778, 1787, and 1976;
[6740] VH1 comprises (i) a complementarity determining region (CDR) 1 having an amino acid sequence that is at least 65%, at least 70%, at least 75%, at least 80%, at least 85%, at least 90%, at least 95%, at least 99%, or 100% identical to any one of SEQ ID NOs: 1099, 1106, 1113, 1117, 1123, 1130, 1137, 1144, 1151, 1158, 1165, 1177, 1184, 1191, 1203, 1215, 1224, 1231, 1238, 1243, 1250, 1257, 1264, 1274, 1281, 1288, 1295, 1302, 1309, 1315, 1322, 1329, 1335, 1342, 1348, 1355, 1362, 1369, 1376, 1385, 1397, 1404, 1417, 1424, 1431, 1437, 1444, 1451, 1458, 1464, 1471, 1478, 1484, 1491, 1498, 1504, 1511, 1515, 1522, 1534, 1547, 1552, 1564, 1577, 1584, 1590, 1597, 1604, 1611, 1618, 1625, 1632, 1639, 1646, 1653, 1660, 1665, 1675, 1683, 1693, 1701, 1705, 1716, 1719, 1731, 1736, 1747, 1756, 1772, 1780, and 1789; (ii) a CDR2 having an amino acid sequence that is at least 65%, at least 70%, at least 75%, at least 80%, at least 85%, at least 90%, at least 95%, at least 99%, or 100% identical to any one of SEQ ID NOs: 1100, 1107, 1114, 1118, 1124, 1131, 1138, 1145, 1152, 1159, 1166, 1178, 1185, 1192, 1204, 1216, 1225, 1232, 1239, 1244, 1251, 1258, 1275, 1282, 1289, 1296, 1303, 1310, 1316, 1323, 1330, 1336, 1343, 1349, 1356, 1363, 1370, 1377, 1386, 1391, 1398, 1405, 1411, 1418, 1425, 1432, 1438, 1445, 1452, 1465, 1472, 1479, 1485, 1492, 1499, 1505, 1516, 1523, 1528, 1535, 1541, 1548, 1553, 1559, 1565, 1571, 1578, 1585, 1591, 1598, 1605, 1612, 1619, 1626, 1633, 1640, 1647, 1654, 1666, 1676, 1684, 1687, 1694, 1702, 1706, 1712, 1717, 1720, 1725, 1732, 1737, 1741, 1748, 1757, 1767, 1773, 1781, and 1790; and (iii) a CDR3 having an amino acid sequence that is at least 65%, at least 70%, at least 75%, at least 80%, at least 85%, at least 90%, at least 95%, at least 99%, or 100% identical to any one of SEQ ID NOs: 1101, 1108, 1115, 1125, 1132, 1139, 1146, 1153, 1160, 1167, 1172, 1179, 1186, 1193, 1197, 1205, 1209, 1217, 1226, 1233, 1240, 1245, 1252, 1259, 1269, 1276, 1283, 1290, 1297, 1304, 1311, 1317, 1324, 1331, 1337, 1344, 1350, 1357, 1364, 1371, 1378, 1387, 1392, 1399, 1406, 1412, 1419, 1426, 1433, 1439, 1446, 1453, 1459, 1466, 1473, 1480, 1486, 1493, 1500, 1506, 1517, 1524, 1529, 1536, 1542, 1549, 1554, 1560, 1566, 1572, 1579, 1586, 1592, 1599, 1606, 1613, 1620, 1627, 1634, 1641, 1648, 1655, 1661, 1667, 1670, 1677, 1685, 1688, 1695, 1703, 1707, 1713, 1733, 1749, 1758, 1762, 1774, 1782, 1791, and 1975;
[6741] VH2 comprises (i) a complementarity determining region (CDR) 1 having an amino acid sequence that is at least 65%, at least 70%, at least 75%, at least 80%, at least 85%, at least 90%, at least 95%, at least 99%, or 100% identical to any one of SEQ ID NOs: 1099, 1106, 1113, 1117, 1123, 1130, 1137, 1144, 1151, 1158, 1165, 1177, 1184, 1191, 1203, 1215, 1224, 1231, 1238, 1243, 1250, 1257, 1264, 1274, 1281, 1288, 1295, 1302, 1309, 1315, 1322, 1329, 1335, 1342, 1348, 1355, 1362, 1369, 1376, 1385, 1397, 1404, 1417, 1424, 1431, 1437, 1444, 1451, 1458, 1464, 1471, 1478, 1484, 1491, 1498, 1504, 1511, 1515, 1522, 1534, 1547, 1552, 1564, 1577, 1584, 1590, 1597, 1604, 1611, 1618, 1625, 1632, 1639, 1646, 1653, 1660, 1665, 1675, 1683, 1693, 1701, 1705, 1716, 1719, 1731, 1736, 1747, 1756, 1772, 1780, and 1789; (ii) a CDR2 having an amino acid sequence that is at least 65%, at least 70%, at least 75%, at least 80%, at least 85%, at least 90%, at least 95%, at least 99%, or 100% identical to any one of SEQ ID NOs: 1100, 1107, 1114, 1118, 1124, 1131, 1138, 1145, 1152, 1159, 1166, 1178, 1185, 1192, 1204, 1216, 1225, 1232, 1239, 1244, 1251, 1258, 1275, 1282, 1289, 1296, 1303, 1310, 1316, 1323, 1330, 1336, 1343, 1349, 1356, 1363, 1370, 1377, 1386, 1391, 1398, 1405, 1411, 1418, 1425, 1432, 1438, 1445, 1452, 1465, 1472, 1479, 1485, 1492, 1499, 1505, 1516, 1523, 1528, 1535, 1541, 1548, 1553, 1559, 1565, 1571, 1578, 1585, 1591, 1598, 1605, 1612, 1619, 1626, 1633, 1640, 1647, 1654, 1666, 1676, 1684, 1687, 1694, 1702, 1706, 1712, 1717, 1720, 1725, 1732, 1737, 1741, 1748, 1757, 1767, 1773, 1781, and 1790; and (iii) a CDR3 having an amino acid sequence that is at least 65%, at least 70%, at least 75%, at least 80%, at least 85%, at least 90%, at least 95%, at least 99%, or 100% identical to any one of SEQ ID NOs: 1101, 1108, 1115, 1125, 1132, 1139, 1146, 1153, 1160, 1167, 1172, 1179, 1186, 1193, 1197, 1205, 1209, 1217, 1226, 1233, 1240, 1245, 1252, 1259, 1269, 1276, 1283, 1290, 1297, 1304, 1311, 1317, 1324, 1331, 1337, 1344, 1350, 1357, 1364, 1371, 1378, 1387, 1392, 1399, 1406, 1412, 1419, 1426, 1433, 1439, 1446, 1453, 1459, 1466, 1473, 1480, 1486, 1493, 1500, 1506, 1517, 1524, 1529, 1536, 1542, 1549, 1554, 1560, 1566, 1572, 1579, 1586, 1592, 1599, 1606, 1613, 1620, 1627, 1634, 1641, 1648, 1655, 1661, 1667, 1670, 1677, 1685, 1688, 1695, 1703, 1707, 1713, 1733, 1749, 1758, 1762, 1774, 1782, 1791, and 1975;
[6742] VH3 comprises (i) a complementarity determining region (CDR) 1 having an amino acid sequence that is at least 65%, at least 70%, at least 75%, at least 80%, at least 85%, at least 90%, at least 95%, at least 99%, or 100% identical to any one of SEQ ID NOs: 1099, 1106, 1113, 1117, 1123, 1130, 1137, 1144, 1151, 1158, 1165, 1177, 1184, 1191, 1203, 1215, 1224, 1231, 1238, 1243, 1250, 1257, 1264, 1274, 1281, 1288, 1295, 1302, 1309, 1315, 1322, 1329, 1335, 1342, 1348, 1355, 1362, 1369, 1376, 1385, 1397, 1404, 1417, 1424, 1431, 1437, 1444, 1451, 1458, 1464, 1471, 1478, 1484, 1491, 1498, 1504, 1511, 1515, 1522, 1534, 1547, 1552, 1564, 1577, 1584, 1590, 1597, 1604, 1611, 1618, 1625, 1632, 1639, 1646, 1653, 1660, 1665, 1675, 1683, 1693, 1701, 1705, 1716, 1719, 1731, 1736, 1747, 1756, 1772, 1780, and 1789; (ii) a CDR2 having an amino acid sequence that is at least 65%, at least 70%, at least 75%, at least 80%, at least 85%, at least 90%, at least 95%, at least 99%, or 100% identical to any one of SEQ ID NOs: 1100, 1107, 1114, 1118, 1124, 1131, 1138, 1145, 1152, 1159, 1166, 1178, 1185, 1192, 1204, 1216, 1225, 1232, 1239, 1244, 1251, 1258, 1275, 1282, 1289, 1296, 1303, 1310, 1316, 1323, 1330, 1336, 1343, 1349, 1356, 1363, 1370, 1377, 1386, 1391, 1398, 1405, 1411, 1418, 1425, 1432, 1438, 1445, 1452, 1465, 1472, 1479, 1485, 1492, 1499, 1505, 1516, 1523, 1528, 1535, 1541, 1548, 1553, 1559, 1565, 1571, 1578, 1585, 1591, 1598, 1605, 1612, 1619, 1626, 1633, 1640, 1647, 1654, 1666, 1676, 1684, 1687, 1694, 1702, 1706, 1712, 1717, 1720, 1725, 1732, 1737, 1741, 1748, 1757, 1767, 1773, 1781, and 1790; and (iii) a CDR3 having an amino acid sequence that is at least 65%, at least 70%, at least 75%, at least 80%, at least 85%, at least 90%, at least 95%, at least 99%, or 100% identical to any one of SEQ ID NOs: 1101, 1108, 1115, 1125, 1132, 1139, 1146, 1153, 1160, 1167, 1172, 1179, 1186, 1193, 1197, 1205, 1209, 1217, 1226, 1233, 1240, 1245, 1252, 1259, 1269, 1276, 1283, 1290, 1297, 1304, 1311, 1317, 1324, 1331, 1337, 1344, 1350, 1357, 1364, 1371, 1378, 1387, 1392, 1399, 1406, 1412, 1419, 1426, 1433, 1439, 1446, 1453, 1459, 1466, 1473, 1480, 1486, 1493, 1500, 1506, 1517, 1524, 1529, 1536, 1542, 1549, 1554, 1560, 1566, 1572, 1579, 1586, 1592, 1599, 1606, 1613, 1620, 1627, 1634, 1641, 1648, 1655, 1661, 1667, 1670, 1677, 1685, 1688, 1695, 1703, 1707, 1713, 1733, 1749, 1758, 1762, 1774, 1782, 1791, and 1975; and/or
[6743] VH4 comprises (i) a complementarity determining region (CDR) 1 having an amino acid sequence that is at least 65%, at least 70%, at least 75%, at least 80%, at least 85%, at least 90%, at least 95%, at least 99%, or 100% identical to any one of SEQ ID NOs: 1099, 1106, 1113, 1117, 1123, 1130, 1137, 1144, 1151, 1158, 1165, 1177, 1184, 1191, 1203, 1215, 1224, 1231, 1238, 1243, 1250, 1257, 1264, 1274, 1281, 1288, 1295, 1302, 1309, 1315, 1322, 1329, 1335, 1342, 1348, 1355, 1362, 1369, 1376, 1385, 1397, 1404, 1417, 1424, 1431, 1437, 1444, 1451, 1458, 1464, 1471, 1478, 1484, 1491, 1498, 1504, 1511, 1515, 1522, 1534, 1547, 1552, 1564, 1577, 1584, 1590, 1597, 1604, 1611, 1618, 1625, 1632, 1639, 1646, 1653, 1660, 1665, 1675, 1683, 1693, 1701, 1705, 1716, 1719, 1731, 1736, 1747, 1756, 1772, 1780, and 1789; (ii) a CDR2 having an amino acid sequence that is at least 65%, at least 70%, at least 75%, at least 80%, at least 85%, at least 90%, at least 95%, at least 99%, or 100% identical to any one of SEQ ID NOs: 1100, 1107, 1114, 1118, 1124, 1131, 1138, 1145, 1152, 1159, 1166, 1178, 1185, 1192, 1204, 1216, 1225, 1232, 1239, 1244, 1251, 1258, 1275, 1282, 1289, 1296, 1303, 1310, 1316, 1323, 1330, 1336, 1343, 1349, 1356, 1363, 1370, 1377, 1386, 1391, 1398, 1405, 1411, 1418, 1425, 1432, 1438, 1445, 1452, 1465, 1472, 1479, 1485, 1492, 1499, 1505, 1516, 1523, 1528, 1535, 1541, 1548, 1553, 1559, 1565, 1571, 1578, 1585, 1591, 1598, 1605, 1612, 1619, 1626, 1633, 1640, 1647, 1654, 1666, 1676, 1684, 1687, 1694, 1702, 1706, 1712, 1717, 1720, 1725, 1732, 1737, 1741, 1748, 1757, 1767, 1773, 1781, and 1790; and (iii) a CDR3 having an amino acid sequence that is at least 65%, at least 70%, at least 75%, at least 80%, at least 85%, at least 90%, at least 95%, at least 99%, or 100% identical to any one of SEQ ID NOs: 1101, 1108, 1115, 1125, 1132, 1139, 1146, 1153, 1160, 1167, 1172, 1179, 1186, 1193, 1197, 1205, 1209, 1217, 1226, 1233, 1240, 1245, 1252, 1259, 1269, 1276, 1283, 1290, 1297, 1304, 1311, 1317, 1324, 1331, 1337, 1344, 1350, 1357, 1364, 1371, 1378, 1387, 1392, 1399, 1406, 1412, 1419, 1426, 1433, 1439, 1446, 1453, 1459, 1466, 1473, 1480, 1486, 1493, 1500, 1506, 1517, 1524, 1529, 1536, 1542, 1549, 1554, 1560, 1566, 1572, 1579, 1586, 1592, 1599, 1606, 1613, 1620, 1627, 1634, 1641, 1648, 1655, 1661, 1667, 1670, 1677, 1685, 1688, 1695, 1703, 1707, 1713, 1733, 1749, 1758, 1762, 1774, 1782, 1791, and 1975; or
[6744] (iv)
[6745] VL1 comprises an amino acid sequence that is at least 65%, at least 70%, at least 75%, at least 80%, at least 85%, at least 90%, at least 95%, at least 99%, or 100% identical to any one of SEQ ID NOs: 1098, 1105, 1112, 1122, 1129, 1136, 1143, 1150, 1157, 1164, 1171, 1176, 1183, 1190, 1196, 1202, 1208, 1214, 1219, 1223, 1230, 1237, 1242, 1249, 1256, 1263, 1268, 1273, 1280, 1287, 1294, 1301, 1308, 1314, 1321, 1328, 1334, 1341, 1347, 1354, 1361, 1368, 1375, 1380, 1384, 1390, 1396, 1403, 1410, 1416, 1423, 1430, 1436, 1443, 1450, 1457, 1463, 1470, 1477, 1483, 1490, 1497, 1503, 1510, 1514, 1521, 1527, 1533, 1540, 1546, 1551, 1558, 1563, 1570, 1576, 1583, 1589, 1596, 1603, 1610, 1617, 1624, 1631, 1638, 1645, 1652, 1659, 1664, 1669, 1674, 1682, 1692, 1700, 1711, 1721, 1724, 1730, 1740, 1746, 1755, 1764, 1766, 1771, 1779, 1784, and 1788;
[6746] VL2 comprises an amino acid sequence that is at least 65%, at least 70%, at least 75%, at least 80%, at least 85%, at least 90%, at least 95%, at least 99%, or 100% identical to any one of SEQ ID NOs: 1098, 1105, 1112, 1122, 1129, 1136, 1143, 1150, 1157, 1164, 1171, 1176, 1183, 1190, 1196, 1202, 1208, 1214, 1219, 1223, 1230, 1237, 1242, 1249, 1256, 1263, 1268, 1273, 1280, 1287, 1294, 1301, 1308, 1314, 1321, 1328, 1334, 1341, 1347, 1354, 1361, 1368, 1375, 1380, 1384, 1390, 1396, 1403, 1410, 1416, 1423, 1430, 1436, 1443, 1450, 1457, 1463, 1470, 1477, 1483, 1490, 1497, 1503, 1510, 1514, 1521, 1527, 1533, 1540, 1546, 1551, 1558, 1563, 1570, 1576, 1583, 1589, 1596, 1603, 1610, 1617, 1624, 1631, 1638, 1645, 1652, 1659, 1664, 1669, 1674, 1682, 1692, 1700, 1711, 1721, 1724, 1730, 1740, 1746, 1755, 1764, 1766, 1771, 1779, 1784, and 1788;
[6747] VL3 comprises an amino acid sequence that is at least 65%, at least 70%, at least 75%, at least 80%, at least 85%, at least 90%, at least 95%, at least 99%, or 100% identical to any one of SEQ ID NOs: 1098, 1105, 1112, 1122, 1129, 1136, 1143, 1150, 1157, 1164, 1171, 1176, 1183, 1190, 1196, 1202, 1208, 1214, 1219, 1223, 1230, 1237, 1242, 1249, 1256, 1263, 1268, 1273, 1280, 1287, 1294, 1301, 1308, 1314, 1321, 1328, 1334, 1341, 1347, 1354, 1361, 1368, 1375, 1380, 1384, 1390, 1396, 1403, 1410, 1416, 1423, 1430, 1436, 1443, 1450, 1457, 1463, 1470, 1477, 1483, 1490, 1497, 1503, 1510, 1514, 1521, 1527, 1533, 1540, 1546, 1551, 1558, 1563, 1570, 1576, 1583, 1589, 1596, 1603, 1610, 1617, 1624, 1631, 1638, 1645, 1652, 1659, 1664, 1669, 1674, 1682, 1692, 1700, 1711, 1721, 1724, 1730, 1740, 1746, 1755, 1764, 1766, 1771, 1779, 1784, and 1788;
[6748] VL4 comprises an amino acid sequence that is at least 65%, at least 70%, at least 75%, at least 80%, at least 85%, at least 90%, at least 95%, at least 99%, or 100% identical to any one of SEQ ID NOs: 1098, 1105, 1112, 1122, 1129, 1136, 1143, 1150, 1157, 1164, 1171, 1176, 1183, 1190, 1196, 1202, 1208, 1214, 1219, 1223, 1230, 1237, 1242, 1249, 1256, 1263, 1268, 1273, 1280, 1287, 1294, 1301, 1308, 1314, 1321, 1328, 1334, 1341, 1347, 1354, 1361, 1368, 1375, 1380, 1384, 1390, 1396, 1403, 1410, 1416, 1423, 1430, 1436, 1443, 1450, 1457, 1463, 1470, 1477, 1483, 1490, 1497, 1503, 1510, 1514, 1521, 1527, 1533, 1540, 1546, 1551, 1558, 1563, 1570, 1576, 1583, 1589, 1596, 1603, 1610, 1617, 1624, 1631, 1638, 1645, 1652, 1659, 1664, 1669, 1674, 1682, 1692, 1700, 1711, 1721, 1724, 1730, 1740, 1746, 1755, 1764, 1766, 1771, 1779, 1784, and 1788;
[6749] VH1 comprises an amino acid sequence that is at least 65%, at least 70%, at least 75%, at least 80%, at least 85%, at least 90%, at least 95%, at least 99%, or 100% identical to any one of SEQ ID NOs: 1102, 1109, 1116, 1119, 1126, 1133, 1140, 1147, 1154, 1161, 1168, 1173, 1180, 1187, 1194, 1198, 1206, 1210, 1218, 1220, 1227, 1234, 1241, 1246, 1253, 1260, 1265, 1270, 1277, 1284, 1291, 1298, 1305, 1312, 1318, 1325, 1332, 1338, 1345, 1351, 1358, 1365, 1372, 1379, 1381, 1388, 1393, 1400, 1407, 1413, 1420, 1427, 1434, 1440, 1447, 1454, 1460, 1467, 1474, 1481, 1487, 1494, 1501, 1507, 1512, 1518, 1525, 1530, 1537, 1543, 1550, 1555, 1561, 1567, 1573, 1580, 1587, 1593, 1600, 1607, 1614, 1621, 1628, 1635, 1642, 1649, 1656, 1662, 1668, 1671, 1678, 1686, 1696, 1704, 1714, 1722, 1726, 1734, 1742, 1750, 1759, 1760, 1765, 1768, 1775, 1783, 1785, and 1792;
[6750] VH2 comprises an amino acid sequence that is at least 65%, at least 70%, at least 75%, at least 80%, at least 85%, at least 90%, at least 95%, at least 99%, or 100% identical to any one of SEQ ID NOs: 1102, 1109, 1116, 1119, 1126, 1133, 1140, 1147, 1154, 1161, 1168, 1173, 1180, 1187, 1194, 1198, 1206, 1210, 1218, 1220, 1227, 1234, 1241, 1246, 1253, 1260, 1265, 1270, 1277, 1284, 1291, 1298, 1305, 1312, 1318, 1325, 1332, 1338, 1345, 1351, 1358, 1365, 1372, 1379, 1381, 1388, 1393, 1400, 1407, 1413, 1420, 1427, 1434, 1440, 1447, 1454, 1460, 1467, 1474, 1481, 1487, 1494, 1501, 1507, 1512, 1518, 1525, 1530, 1537, 1543, 1550, 1555, 1561, 1567, 1573, 1580, 1587, 1593, 1600, 1607, 1614, 1621, 1628, 1635, 1642, 1649, 1656, 1662, 1668, 1671, 1678, 1686, 1696, 1704, 1714, 1722, 1726, 1734, 1742, 1750, 1759, 1760, 1765, 1768, 1775, 1783, 1785, and 1792;
[6751] VH3 comprises an amino acid sequence that is at least 65%, at least 70%, at least 75%, at least 80%, at least 85%, at least 90%, at least 95%, at least 99%, or 100% identical to any one of SEQ ID NOs: 1102, 1109, 1116, 1119, 1126, 1133, 1140, 1147, 1154, 1161, 1168, 1173, 1180, 1187, 1194, 1198, 1206, 1210, 1218, 1220, 1227, 1234, 1241, 1246, 1253, 1260, 1265, 1270, 1277, 1284, 1291, 1298, 1305, 1312, 1318, 1325, 1332, 1338, 1345, 1351, 1358, 1365, 1372, 1379, 1381, 1388, 1393, 1400, 1407, 1413, 1420, 1427, 1434, 1440, 1447, 1454, 1460, 1467, 1474, 1481, 1487, 1494, 1501, 1507, 1512, 1518, 1525, 1530, 1537, 1543, 1550, 1555, 1561, 1567, 1573, 1580, 1587, 1593, 1600, 1607, 1614, 1621, 1628, 1635, 1642, 1649, 1656, 1662, 1668, 1671, 1678, 1686, 1696, 1704, 1714, 1722, 1726, 1734, 1742, 1750, 1759, 1760, 1765, 1768, 1775, 1783, 1785, and 1792; and/or
[6752] VH4 comprises an amino acid sequence that is at least 65%, at least 70%, at least 75%, at least 80%, at least 85%, at least 90%, at least 95%, at least 99%, or 100% identical to any one of SEQ ID NOs: 1102, 1109, 1116, 1119, 1126, 1133, 1140, 1147, 1154, 1161, 1168, 1173, 1180, 1187, 1194, 1198, 1206, 1210, 1218, 1220, 1227, 1234, 1241, 1246, 1253, 1260, 1265, 1270, 1277, 1284, 1291, 1298, 1305, 1312, 1318, 1325, 1332, 1338, 1345, 1351, 1358, 1365, 1372, 1379, 1381, 1388, 1393, 1400, 1407, 1413, 1420, 1427, 1434, 1440, 1447, 1454, 1460, 1467, 1474, 1481, 1487, 1494, 1501, 1507, 1512, 1518, 1525, 1530, 1537, 1543, 1550, 1555, 1561, 1567, 1573, 1580, 1587, 1593, 1600, 1607, 1614, 1621, 1628, 1635, 1642, 1649, 1656, 1662, 1668, 1671, 1678, 1686, 1696, 1704, 1714, 1722, 1726, 1734, 1742, 1750, 1759, 1760, 1765, 1768, 1775, 1783, 1785, and 1792; or
[6753] (b)
[6754] (i)
[6755] VL1 comprises a light chain complementarity determining region 1 (LCDR1), LCDR2, and/or LCDR3 of an antibody selected from the group consisting of libivirumab, rmab, rivabazumab pegol, setoxaximab, suvizumab, suvratoxumab, sevirumab, pritoxaximab, porgaviximab, REGN-EB3, obiltoxaximab, gedivumab, foravirumab, larcaviximab, motavizumab, palivizumab, rafivirumab, regavirumab, tuvirumab, cosfroviximab, felvizumab, atidortoxumab, edobacomab, nebacumab, pateclizumab, raxibacumab, urtoxazumab, tosatoxumab, berlimatoxumab, CR6261, diridavumab, firivumab, lesofavumab, navivumab, exbivirumab, lenvervimab, bavituximab, bezlotoxumab, efungumab, leronlimab, nirsevimab, pagibaximab, panobacumab, tefibazumab, ansuvimab, atoltivimab, maftivimab, and odesivimab;
[6756] VL2 comprises a light chain complementarity determining region 1 (LCDR1), LCDR2, and/or LCDR3 of an antibody selected from the group consisting of libivirumab, rmab, rivabazumab pegol, setoxaximab, suvizumab, suvratoxumab, sevirumab, pritoxaximab, porgaviximab, REGN-EB3, obiltoxaximab, gedivumab, foravirumab, larcaviximab, motavizumab, palivizumab, rafivirumab, regavirumab, tuvirumab, cosfroviximab, felvizumab, atidortoxumab, edobacomab, nebacumab, pateclizumab, raxibacumab, urtoxazumab, tosatoxumab, berlimatoxumab, CR6261, diridavumab, firivumab, lesofavumab, navivumab, exbivirumab, lenvervimab, bavituximab, bezlotoxumab, efungumab, leronlimab, nirsevimab, pagibaximab, panobacumab, tefibazumab, ansuvimab, atoltivimab, maftivimab, and odesivimab;
[6757] VL3 comprises a light chain complementarity determining region 1 (LCDR1), LCDR2, and/or LCDR3 of an antibody selected from the group consisting of libivirumab, rmab, rivabazumab pegol, setoxaximab, suvizumab, suvratoxumab, sevirumab, pritoxaximab, porgaviximab, REGN-EB3, obiltoxaximab, gedivumab, foravirumab, larcaviximab, motavizumab, palivizumab, rafivirumab, regavirumab, tuvirumab, cosfroviximab, felvizumab, atidortoxumab, edobacomab, nebacumab, pateclizumab, raxibacumab, urtoxazumab, tosatoxumab, berlimatoxumab, CR6261, diridavumab, firivumab, lesofavumab, navivumab, exbivirumab, lenvervimab, bavituximab, bezlotoxumab, efungumab, leronlimab, nirsevimab, pagibaximab, panobacumab, tefibazumab, ansuvimab, atoltivimab, maftivimab, and odesivimab;
[6758] VL4 comprises a light chain complementarity determining region 1 (LCDR1), LCDR2, and/or LCDR3 of an antibody selected from the group consisting of libivirumab, rmab, rivabazumab pegol, setoxaximab, suvizumab, suvratoxumab, sevirumab, pritoxaximab, porgaviximab, REGN-EB3, obiltoxaximab, gedivumab, foravirumab, larcaviximab, motavizumab, palivizumab, rafivirumab, regavirumab, tuvirumab, cosfroviximab, felvizumab, atidortoxumab, edobacomab, nebacumab, pateclizumab, raxibacumab, urtoxazumab, tosatoxumab, berlimatoxumab, CR6261, diridavumab, firivumab, lesofavumab, navivumab, exbivirumab, lenvervimab, bavituximab, bezlotoxumab, efungumab, leronlimab, nirsevimab, pagibaximab, panobacumab, tefibazumab, ansuvimab, atoltivimab, maftivimab, and odesivimab;
[6759] VH1 comprises a heavy chain complementarity determining region 1 (HCDR1), HCDR2, and/or HCDR3 of an antibody selected from the group consisting of libivirumab, rmab, rivabazumab pegol, setoxaximab, suvizumab, suvratoxumab, sevirumab, pritoxaximab, porgaviximab, REGN-EB3, obiltoxaximab, gedivumab, foravirumab, larcaviximab, motavizumab, palivizumab, rafivirumab, regavirumab, tuvirumab, cosfroviximab, felvizumab, atidortoxumab, edobacomab, nebacumab, pateclizumab, raxibacumab, urtoxazumab, tosatoxumab, berlimatoxumab, CR6261, diridavumab, firivumab, lesofavumab, navivumab, exbivirumab, lenvervimab, bavituximab, bezlotoxumab, efungumab, leronlimab, nirsevimab, pagibaximab, panobacumab, tefibazumab, ansuvimab, atoltivimab, maftivimab, and odesivimab;
[6760] VH2 comprises a heavy chain complementarity determining region 1 (HCDR1), HCDR2, and/or HCDR3 of an antibody selected from the group consisting of libivirumab, rmab, rivabazumab pegol, setoxaximab, suvizumab, suvratoxumab, sevirumab, pritoxaximab, porgaviximab, REGN-EB3, obiltoxaximab, gedivumab, foravirumab, larcaviximab, motavizumab, palivizumab, rafivirumab, regavirumab, tuvirumab, cosfroviximab, felvizumab, atidortoxumab, edobacomab, nebacumab, pateclizumab, raxibacumab, urtoxazumab, tosatoxumab, berlimatoxumab, CR6261, diridavumab, firivumab, lesofavumab, navivumab, exbivirumab, lenvervimab, bavituximab, bezlotoxumab, efungumab, leronlimab, nirsevimab, pagibaximab, panobacumab, tefibazumab, ansuvimab, atoltivimab, maftivimab, and odesivimab;
[6761] VH3 comprises a heavy chain complementarity determining region 1 (HCDR1), HCDR2, and/or HCDR3 of an antibody selected from the group consisting of libivirumab, rmab, rivabazumab pegol, setoxaximab, suvizumab, suvratoxumab, sevirumab, pritoxaximab, porgaviximab, REGN-EB3, obiltoxaximab, gedivumab, foravirumab, larcaviximab, motavizumab, palivizumab, rafivirumab, regavirumab, tuvirumab, cosfroviximab, felvizumab, atidortoxumab, edobacomab, nebacumab, pateclizumab, raxibacumab, urtoxazumab, tosatoxumab, berlimatoxumab, CR6261, diridavumab, firivumab, lesofavumab, navivumab, exbivirumab, lenvervimab, bavituximab, bezlotoxumab, efungumab, leronlimab, nirsevimab, pagibaximab, panobacumab, tefibazumab, ansuvimab, atoltivimab, maftivimab, and odesivimab; and/or
[6762] VH4 comprises a heavy chain complementarity determining region 1 (HCDR1), HCDR2, and/or HCDR3 of an antibody selected from the group consisting of libivirumab, rmab, rivabazumab pegol, setoxaximab, suvizumab, suvratoxumab, sevirumab, pritoxaximab, porgaviximab, REGN-EB3, obiltoxaximab, gedivumab, foravirumab, larcaviximab, motavizumab, palivizumab, rafivirumab, regavirumab, tuvirumab, cosfroviximab, felvizumab, atidortoxumab, edobacomab, nebacumab, pateclizumab, raxibacumab, urtoxazumab, tosatoxumab, berlimatoxumab, CR6261, diridavumab, firivumab, lesofavumab, navivumab, exbivirumab, lenvervimab, bavituximab, bezlotoxumab, efungumab, leronlimab, nirsevimab, pagibaximab, panobacumab, tefibazumab, ansuvimab, atoltivimab, maftivimab, and odesivimab; or
[6763] (ii)
[6764] VL1 comprises a VL of an antibody selected from the group consisting of libivirumab, rmab, rivabazumab pegol, setoxaximab, suvizumab, suvratoxumab, sevirumab, pritoxaximab, porgaviximab, REGN-EB3, obiltoxaximab, gedivumab, foravirumab, larcaviximab, motavizumab, palivizumab, rafivirumab, regavirumab, tuvirumab, cosfroviximab, felvizumab, atidortoxumab, edobacomab, nebacumab, pateclizumab, raxibacumab, urtoxazumab, tosatoxumab, berlimatoxumab, CR6261, diridavumab, firivumab, lesofavumab, navivumab, exbivirumab, lenvervimab, bavituximab, bezlotoxumab, efungumab, leronlimab, nirsevimab, pagibaximab, panobacumab, tefibazumab, ansuvimab, atoltivimab, maftivimab, and odesivimab;
[6765] VL2 comprises a VL of an antibody selected from the group consisting of libivirumab, rmab, rivabazumab pegol, setoxaximab, suvizumab, suvratoxumab, sevirumab, pritoxaximab, porgaviximab, REGN-EB3, obiltoxaximab, gedivumab, foravirumab, larcaviximab, motavizumab, palivizumab, rafivirumab, regavirumab, tuvirumab, cosfroviximab, felvizumab, atidortoxumab, edobacomab, nebacumab, pateclizumab, raxibacumab, urtoxazumab, tosatoxumab, berlimatoxumab, CR6261, diridavumab, firivumab, lesofavumab, navivumab, exbivirumab, lenvervimab, bavituximab, bezlotoxumab, efungumab, leronlimab, nirsevimab, pagibaximab, panobacumab, tefibazumab, ansuvimab, atoltivimab, maftivimab, and odesivimab;
[6766] VL3 comprises a VL of an antibody selected from the group consisting of libivirumab, rmab, rivabazumab pegol, setoxaximab, suvizumab, suvratoxumab, sevirumab, pritoxaximab, porgaviximab, REGN-EB3, obiltoxaximab, gedivumab, foravirumab, larcaviximab, motavizumab, palivizumab, rafivirumab, regavirumab, tuvirumab, cosfroviximab, felvizumab, atidortoxumab, edobacomab, nebacumab, pateclizumab, raxibacumab, urtoxazumab, tosatoxumab, berlimatoxumab, CR6261, diridavumab, firivumab, lesofavumab, navivumab, exbivirumab, lenvervimab, bavituximab, bezlotoxumab, efungumab, leronlimab, nirsevimab, pagibaximab, panobacumab, tefibazumab, ansuvimab, atoltivimab, maftivimab, and odesivimab;
[6767] VL4 comprises a VL of an antibody selected from the group consisting of libivirumab, rmab, rivabazumab pegol, setoxaximab, suvizumab, suvratoxumab, sevirumab, pritoxaximab, porgaviximab, REGN-EB3, obiltoxaximab, gedivumab, foravirumab, larcaviximab, motavizumab, palivizumab, rafivirumab, regavirumab, tuvirumab, cosfroviximab, felvizumab, atidortoxumab, edobacomab, nebacumab, pateclizumab, raxibacumab, urtoxazumab, tosatoxumab, berlimatoxumab, CR6261, diridavumab, firivumab, lesofavumab, navivumab, exbivirumab, lenvervimab, bavituximab, bezlotoxumab, efungumab, leronlimab, nirsevimab, pagibaximab, panobacumab, tefibazumab, ansuvimab, atoltivimab, maftivimab, and odesivimab;
[6768] VH1 comprises a VH of an antibody selected from the group consisting of libivirumab, rmab, rivabazumab pegol, setoxaximab, suvizumab, suvratoxumab, sevirumab, pritoxaximab, porgaviximab, REGN-EB3, obiltoxaximab, gedivumab, foravirumab, larcaviximab, motavizumab, palivizumab, rafivirumab, regavirumab, tuvirumab, cosfroviximab, felvizumab, atidortoxumab, edobacomab, nebacumab, pateclizumab, raxibacumab, urtoxazumab, tosatoxumab, berlimatoxumab, CR6261, diridavumab, firivumab, lesofavumab, navivumab, exbivirumab, lenvervimab, bavituximab, bezlotoxumab, efungumab, leronlimab, nirsevimab, pagibaximab, panobacumab, tefibazumab, ansuvimab, atoltivimab, maftivimab, and odesivimab;
[6769] VH2 comprises a VH of an antibody selected from the group consisting of libivirumab, rmab, rivabazumab pegol, setoxaximab, suvizumab, suvratoxumab, sevirumab, pritoxaximab, porgaviximab, REGN-EB3, obiltoxaximab, gedivumab, foravirumab, larcaviximab, motavizumab, palivizumab, rafivirumab, regavirumab, tuvirumab, cosfroviximab, felvizumab, atidortoxumab, edobacomab, nebacumab, pateclizumab, raxibacumab, urtoxazumab, tosatoxumab, berlimatoxumab, CR6261, diridavumab, firivumab, lesofavumab, navivumab, exbivirumab, lenvervimab, bavituximab, bezlotoxumab, efungumab, leronlimab, nirsevimab, pagibaximab, panobacumab, tefibazumab, ansuvimab, atoltivimab, maftivimab, and odesivimab;
[6770] VH3 comprises a VH of an antibody selected from the group consisting of libivirumab, rmab, rivabazumab pegol, setoxaximab, suvizumab, suvratoxumab, sevirumab, pritoxaximab, porgaviximab, REGN-EB3, obiltoxaximab, gedivumab, foravirumab, larcaviximab, motavizumab, palivizumab, rafivirumab, regavirumab, tuvirumab, cosfroviximab, felvizumab, atidortoxumab, edobacomab, nebacumab, pateclizumab, raxibacumab, urtoxazumab, tosatoxumab, berlimatoxumab, CR6261, diridavumab, firivumab, lesofavumab, navivumab, exbivirumab, lenvervimab, bavituximab, bezlotoxumab, efungumab, leronlimab, nirsevimab, pagibaximab, panobacumab, tefibazumab, ansuvimab, atoltivimab, maftivimab, and odesivimab; and/or
[6771] VH4 comprises a VH of an antibody selected from the group consisting of libivirumab, rmab, rivabazumab pegol, setoxaximab, suvizumab, suvratoxumab, sevirumab, pritoxaximab, porgaviximab, REGN-EB3, obiltoxaximab, gedivumab, foravirumab, larcaviximab, motavizumab, palivizumab, rafivirumab, regavirumab, tuvirumab, cosfroviximab, felvizumab, atidortoxumab, edobacomab, nebacumab, pateclizumab, raxibacumab, urtoxazumab, tosatoxumab, berlimatoxumab, CR6261, diridavumab, firivumab, lesofavumab, navivumab, exbivirumab, lenvervimab, bavituximab, bezlotoxumab, efungumab, leronlimab, nirsevimab, pagibaximab, panobacumab, tefibazumab, ansuvimab, atoltivimab, maftivimab, and odesivimab; or
[6772] (iii)
[6773] VL1 comprises (i) a complementarity determining region (CDR) 1 having an amino acid sequence that is at least 65%, at least 70%, at least 75%, at least 80%, at least 85%, at least 90%, at least 95%, at least 99%, or 100% identical to any one of SEQ ID NOs: 1428, 1793, 1798, 1810, 1817, 1824, 1977, 1985, 1993 and 2001; (ii) a CDR2 having an amino acid sequence that is at least 65%, at least 70%, at least 75%, at least 80%, at least 85%, at least 90%, at least 95%, at least 99%, or 100% identical to any one of SEQ ID NOs: 1978, 1986, 1994, and 2002; or at least 65%, at least 70%, at least 75%, at least 80%, at least 85%, at least 90%, at least 95%, at least 99%, or 100% identical to any one of amino acid sequences YTS, DTS, GAS, and AAS; and (iii) a CDR3 having an amino acid sequence that is at least 65%, at least 70%, at least 75%, at least 80%, at least 85%, at least 90%, at least 95%, at least 99%, or 100% identical to any one of SEQ ID NOs: 1229, 1799, 1805, 1811, 1818, 1825, 1979, 1987, 1995, and 2003;
[6774] VL2 comprises (i) a complementarity determining region (CDR) 1 having an amino acid sequence that is at least 65%, at least 70%, at least 75%, at least 80%, at least 85%, at least 90%, at least 95%, at least 99%, or 100% identical to any one of SEQ ID NOs: 1428, 1793, 1798, 1810, 1817, 1824, 1977, 1985, 1993 and 2001; (ii) a CDR2 having an amino acid sequence that is at least 65%, at least 70%, at least 75%, at least 80%, at least 85%, at least 90%, at least 95%, at least 99%, or 100% identical to any one of SEQ ID NOs: 1978, 1986, 1994, and 2002; or at least 65%, at least 70%, at least 75%, at least 80%, at least 85%, at least 90%, at least 95%, at least 99%, or 100% identical to any one of amino acid sequences YTS, DTS, GAS, and AAS; and (iii) a CDR3 having an amino acid sequence that is at least 65%, at least 70%, at least 75%, at least 80%, at least 85%, at least 90%, at least 95%, at least 99%, or 100% identical to any one of SEQ ID NOs: 1229, 1799, 1805, 1811, 1818, 1825, 1979, 1987, 1995, and 2003;
[6775] VL3 comprises (i) a complementarity determining region (CDR) 1 having an amino acid sequence that is at least 65%, at least 70%, at least 75%, at least 80%, at least 85%, at least 90%, at least 95%, at least 99%, or 100% identical to any one of SEQ ID NOs: 1428, 1793, 1798, 1810, 1817, 1824, 1977, 1985, 1993 and 2001; (ii) a CDR2 having an amino acid sequence that is at least 65%, at least 70%, at least 75%, at least 80%, at least 85%, at least 90%, at least 95%, at least 99%, or 100% identical to any one of SEQ ID NOs: 1978, 1986, 1994, and 2002; or at least 65%, at least 70%, at least 75%, at least 80%, at least 85%, at least 90%, at least 95%, at least 99%, or 100% identical to any one of amino acid sequences YTS, DTS, GAS, and AAS; and (iii) a CDR3 having an amino acid sequence that is at least 65%, at least 70%, at least 75%, at least 80%, at least 85%, at least 90%, at least 95%, at least 99%, or 100% identical to any one of SEQ ID NOs: 1229, 1799, 1805, 1811, 1818, 1825, 1979, 1987, 1995, and 2003;
[6776] VL4 comprises (i) a complementarity determining region (CDR) 1 having an amino acid sequence that is at least 65%, at least 70%, at least 75%, at least 80%, at least 85%, at least 90%, at least 95%, at least 99%, or 100% identical to any one of SEQ ID NOs: 1428, 1793, 1798, 1810, 1817, 1824, 1977, 1985, 1993 and 2001; (ii) a CDR2 having an amino acid sequence that is at least 65%, at least 70%, at least 75%, at least 80%, at least 85%, at least 90%, at least 95%, at least 99%, or 100% identical to any one of SEQ ID NOs: 1978, 1986, 1994, and 2002; or at least 65%, at least 70%, at least 75%, at least 80%, at least 85%, at least 90%, at least 95%, at least 99%, or 100% identical to any one of amino acid sequences YTS, DTS, GAS, and AAS; and (iii) a CDR3 having an amino acid sequence that is at least 65%, at least 70%, at least 75%, at least 80%, at least 85%, at least 90%, at least 95%, at least 99%, or 100% identical to any one of SEQ ID NOs: 1229, 1799, 1805, 1811, 1818, 1825, 1979, 1987, 1995, and 2003;
[6777] VH1 comprises (i) a complementarity determining region (CDR) 1 having an amino acid sequence that is at least 65%, at least 70%, at least 75%, at least 80%, at least 85%, at least 90%, at least 95%, at least 99%, or 100% identical to any one of SEQ ID NOs: 1577, 1795, 1801, 1813, 1820, 1827, 1981, 1989, 1997, and 2005; (ii) a CDR2 having an amino acid sequence that is at least 65%, at least 70%, at least 75%, at least 80%, at least 85%, at least 90%, at least 95%, at least 99%, or 100% identical to any one of SEQ ID NOs: 1159, 1802, 1807, 1814, 1821, 1828, 1982, 1990, 1998, and 2006; and (iii) a CDR3 having an amino acid sequence that is at least 65%, at least 70%, at least 75%, at least 80%, at least 85%, at least 90%, at least 95%, at least 99%, or 100% identical to any one of SEQ ID NOs: 1796, 1803, 1808, 1815, 1822, 1829, 1983, 1991, 1999, and 2007;
[6778] VH2 comprises (i) a complementarity determining region (CDR) 1 having an amino acid sequence that is at least 65%, at least 70%, at least 75%, at least 80%, at least 85%, at least 90%, at least 95%, at least 99%, or 100% identical to any one of SEQ ID NOs: 1577, 1795, 1801, 1813, 1820, 1827, 1981, 1989, 1997, and 2005; (ii) a CDR2 having an amino acid sequence that is at least 65%, at least 70%, at least 75%, at least 80%, at least 85%, at least 90%, at least 95%, at least 99%, or 100% identical to any one of SEQ ID NOs: 1159, 1802, 1807, 1814, 1821, 1828, 1982, 1990, 1998, and 2006; and (iii) a CDR3 having an amino acid sequence that is at least 65%, at least 70%, at least 75%, at least 80%, at least 85%, at least 90%, at least 95%, at least 99%, or 100% identical to any one of SEQ ID NOs: 1796, 1803, 1808, 1815, 1822, 1829, 1983, 1991, 1999, and 2007;
[6779] VH3 comprises (i) a complementarity determining region (CDR) 1 having an amino acid sequence that is at least 65%, at least 70%, at least 75%, at least 80%, at least 85%, at least 90%, at least 95%, at least 99%, or 100% identical to any one of SEQ ID NOs: 1577, 1795, 1801, 1813, 1820, 1827, 1981, 1989, 1997, and 2005; (ii) a CDR2 having an amino acid sequence that is at least 65%, at least 70%, at least 75%, at least 80%, at least 85%, at least 90%, at least 95%, at least 99%, or 100% identical to any one of SEQ ID NOs: 1159, 1802, 1807, 1814, 1821, 1828, 1982, 1990, 1998, and 2006; and (iii) a CDR3 having an amino acid sequence that is at least 65%, at least 70%, at least 75%, at least 80%, at least 85%, at least 90%, at least 95%, at least 99%, or 100% identical to any one of SEQ ID NOs: 1796, 1803, 1808, 1815, 1822, 1829, 1983, 1991, 1999, and 2007; and/or
[6780] VH4 comprises (i) a complementarity determining region (CDR) 1 having an amino acid sequence that is at least 65%, at least 70%, at least 75%, at least 80%, at least 85%, at least 90%, at least 95%, at least 99%, or 100% identical to any one of SEQ ID NOs: 1577, 1795, 1801, 1813, 1820, 1827, 1981, 1989, 1997, and 2005; (ii) a CDR2 having an amino acid sequence that is at least 65%, at least 70%, at least 75%, at least 80%, at least 85%, at least 90%, at least 95%, at least 99%, or 100% identical to any one of SEQ ID NOs: 1159, 1802, 1807, 1814, 1821, 1828, 1982, 1990, 1998, and 2006; and (iii) a CDR3 having an amino acid sequence that is at least 65%, at least 70%, at least 75%, at least 80%, at least 85%, at least 90%, at least 95%, at least 99%, or 100% identical to any one of SEQ ID NOs: 1796, 1803, 1808, 1815, 1822, 1829, 1983, 1991, 1999, and 2007; or
[6781] (iv)
[6782] VL1 comprises an amino acid sequence that is at least 65%, at least 70%, at least 75%, at least 80%, at least 85%, at least 90%, at least 95%, at least 99%, or 100% identical to any one of SEQ ID NOs: 1794, 1800, 1806, 1812, 1819, 1826, 1980, 1988, 1996, and 2004;
[6783] VL2 comprises an amino acid sequence that is at least 65%, at least 70%, at least 75%, at least 80%, at least 85%, at least 90%, at least 95%, at least 99%, or 100% identical to any one of SEQ ID NOs: 1794, 1800, 1806, 1812, 1819, 1826, 1980, 1988, 1996, and 2004;
[6784] VL3 comprises an amino acid sequence that is at least 65%, at least 70%, at least 75%, at least 80%, at least 85%, at least 90%, at least 95%, at least 99%, or 100% identical to any one of SEQ ID NOs: 1794, 1800, 1806, 1812, 1819, 1826, 1980, 1988, 1996, and 2004;
[6785] VL4 comprises an amino acid sequence that is at least 65%, at least 70%, at least 75%, at least 80%, at least 85%, at least 90%, at least 95%, at least 99%, or 100% identical to any one of SEQ ID NOs: 1794, 1800, 1806, 1812, 1819, 1826, 1980, 1988, 1996, and 2004;
[6786] VH1 comprises an amino acid sequence that is at least 65%, at least 70%, at least 75%, at least 80%, at least 85%, at least 90%, at least 95%, at least 99%, or 100% identical to any one of SEQ ID NOS 1797, 1804, 1809, 1816, 1823, 1830, 1984, 1992, 2000, and 2008;
[6787] VH2 comprises an amino acid sequence that is at least 65%, at least 70%, at least 75%, at least 80%, at least 85%, at least 90%, at least 95%, at least 99%, or 100% identical to any one of SEQ ID NOS 1797, 1804, 1809, 1816, 1823, 1830, 1984, 1992, 2000, and 2008;
[6788] VH3 comprises an amino acid sequence that is at least 65%, at least 70%, at least 75%, at least 80%, at least 85%, at least 90%, at least 95%, at least 99%, or 100% identical to any one of SEQ ID NOS 1797, 1804, 1809, 1816, 1823, 1830, 1984, 1992, 2000, and 2008; and/or
[6789] VH4 comprises an amino acid sequence that is at least 65%, at least 70%, at least 75%, at least 80%, at least 85%, at least 90%, at least 95%, at least 99%, or 100% identical to any one of SEQ ID NOs 1797, 1804, 1809, 1816, 1823, 1830, 1984, 1992, 2000, and 2008; or
[6790] (c)
[6791] (i)
[6792] VL1 comprises a light chain complementarity determining region 1 (LCDR1), LCDR2, and/or LCDR3 of an antibody selected from the group consisting of aducanumab, alirocumab, frovocimab, lodelcizumab, bococizumab, evolocumab, ralpancizumab, anifrolumab, atorolimumab, bapineuzumab, bedinvetmab, begelomab, biciromab, bimagrumab, birtamimab, blosozumab, burosumab, caplacizumab, concizumab, crenezumab, crizanlizumab, crotedumab, dezamizumab, domagrozumab, donanemab, eldelumab, elezanumab, emapalumab, emicizumab, eptinezumab, erenumab, evinacumab, faralimomab, fasinumab, fontolizumab, fremanezumab, frunevetmab, fulranumab, galcanezumab, gantenerumab, gosuranemab, idarucizumab, imciromab, inclacumab, lampalizumab, lanadelumab, landogrozumab, lecanemab, ligelizumab, marstacimab, mavrilimumab, morolimumab, NEOD001, omalizumab, oMS721, orticumab, otilimab, ozanezumab, ponezumab, prasinezumab, quilizumab, ranevetmab, refanezumab, roledumab, romosozumab, rozanolixizumab, setrusumab, SHP647, solanezumab, stamulumab, suptavumab, sutimlimab, tanezumab, crovalimab, and lokivetmab;
[6793] VL2 comprises a light chain complementarity determining region 1 (LCDR1), LCDR2, and/or LCDR3 of an antibody selected from the group consisting of aducanumab, alirocumab, frovocimab, lodelcizumab, bococizumab, evolocumab, ralpancizumab, anifrolumab, atorolimumab, bapineuzumab, bedinvetmab, begelomab, biciromab, bimagrumab, birtamimab, blosozumab, burosumab, caplacizumab, concizumab, crenezumab, crizanlizumab, crotedumab, dezamizumab, domagrozumab, donanemab, eldelumab, elezanumab, emapalumab, emicizumab, eptinezumab, erenumab, evinacumab, faralimomab, fasinumab, fontolizumab, fremanezumab, frunevetmab, fulranumab, galcanezumab, gantenerumab, gosuranemab, idarucizumab, imciromab, inclacumab, lampalizumab, lanadelumab, landogrozumab, lecanemab, ligelizumab, marstacimab, mavrilimumab, morolimumab, NEOD001, omalizumab, oMS721, orticumab, otilimab, ozanezumab, ponezumab, prasinezumab, quilizumab, ranevetmab, refanezumab, roledumab, romosozumab, rozanolixizumab, setrusumab, SHP647, solanezumab, stamulumab, suptavumab, sutimlimab, tanezumab, crovalimab, and lokivetmab;
[6794] VL3 comprises a light chain complementarity determining region 1 (LCDR1), LCDR2, and/or LCDR3 of an antibody selected from the group consisting of aducanumab, alirocumab, frovocimab, lodelcizumab, bococizumab, evolocumab, ralpancizumab, anifrolumab, atorolimumab, bapineuzumab, bedinvetmab, begelomab, biciromab, bimagrumab, birtamimab, blosozumab, burosumab, caplacizumab, concizumab, crenezumab, crizanlizumab, crotedumab, dezamizumab, domagrozumab, donanemab, eldelumab, elezanumab, emapalumab, emicizumab, eptinezumab, erenumab, evinacumab, faralimomab, fasinumab, fontolizumab, fremanezumab, frunevetmab, fulranumab, galcanezumab, gantenerumab, gosuranemab, idarucizumab, imciromab, inclacumab, lampalizumab, lanadelumab, landogrozumab, lecanemab, ligelizumab, marstacimab, mavrilimumab, morolimumab, NEOD001, omalizumab, oMS721, orticumab, otilimab, ozanezumab, ponezumab, prasinezumab, quilizumab, ranevetmab, refanezumab, roledumab, romosozumab, rozanolixizumab, setrusumab, SHP647, solanezumab, stamulumab, suptavumab, sutimlimab, tanezumab, crovalimab, and lokivetmab;
[6795] VL4 comprises a light chain complementarity determining region 1 (LCDR1), LCDR2, and/or LCDR3 of an antibody selected from the group consisting of aducanumab, alirocumab, frovocimab, lodelcizumab, bococizumab, evolocumab, ralpancizumab, anifrolumab, atorolimumab, bapineuzumab, bedinvetmab, begelomab, biciromab, bimagrumab, birtamimab, blosozumab, burosumab, caplacizumab, concizumab, crenezumab, crizanlizumab, crotedumab, devamizumab, domagrozumab, donanemab, eldelumab, elezanumab, emapalumab, emicizumab, eptinezumab, erenumab, evinacumab, faralimomab, fasinumab, fontolizumab, fremanezumab, frunevetmab, fulranumab, galcanezumab, gantenerumab, gosuranemab, idarucizumab, imciromab, inclacumab, lampalizumab, lanadelumab, landogrozumab, lecanemab, ligelizumab, marstacimab, mavrilimumab, morolimumab, NEOD001, omalizumab, oMS721, orticumab, otilimab, ozanezumab, ponezumab, prasinezumab, quilizumab, ranevetmab, refanezumab, roledumab, romosozumab, rozanolixizumab, setrusumab, SHP647, solanezumab, stamulumab, suptavumab, sutimlimab, tanezumab, crovalimab, and lokivetmab;
[6796] VH1 comprises a heavy chain complementarity determining region 1 (HCDR1), HCDR2, and/or HCDR3 of an antibody selected from the group consisting of aducanumab, alirocumab, frovocimab, lodelcizumab, bococizumab, evolocumab, ralpancizumab, anifrolumab, atorolimumab, bapineuzumab, bedinvetmab, begelomab, biciromab, bimagrumab, birtamimab, blosozumab, burosumab, caplacizumab, concizumab, crenezumab, crizanlizumab, crotedumab, dezamizumab, domagrozumab, donanemab, eldelumab, elezanumab, emapalumab, emicizumab, eptinezumab, erenumab, evinacumab, faralimomab, fasinumab, fontolizumab, fremanezumab, frunevetmab, fulranumab, galcanezumab, gantenerumab, gosuranemab, idarucizumab, imciromab, inclacumab, lampalizumab, lanadelumab, landogrozumab, lecanemab, ligelizumab, marstacimab, mavrilimumab, morolimumab, NEOD001, omalizumab, oMS721, orticumab, otilimab, ozanezumab, ponezumab, prasinezumab, quilizumab, ranevetmab, refanezumab, roledumab, romosozumab, rozanolixizumab, setrusumab, SHP647, solanezumab, stamulumab, suptavumab, sutimlimab, tanezumab, crovalimab, and lokivetmab;
[6797] VH2 comprises a heavy chain complementarity determining region 1 (HCDR1), HCDR2, and/or HCDR3 of an antibody selected from the group consisting of aducanumab, alirocumab, frovocimab, lodelcizumab, bococizumab, evolocumab, ralpancizumab, anifrolumab, atorolimumab, bapineuzumab, bedinvetmab, begelomab, biciromab, bimagrumab, birtamimab, blosozumab, burosumab, caplacizumab, concizumab, crenezumab, crizanlizumab, crotedumab, dezamizumab, domagrozumab, donanemab, eldelumab, elezanumab, emapalumab, emicizumab, eptinezumab, erenumab, evinacumab, faralimomab, fasinumab, fontolizumab, fremanezumab, frunevetmab, fulranumab, galcanezumab, gantenerumab, gosuranemab, idarucizumab, imciromab, inclacumab, lampalizumab, lanadelumab, landogrozumab, lecanemab, ligelizumab, marstacimab, mavrilimumab, morolimumab, NEOD001, omalizumab, oMS721, orticumab, otilimab, ozanezumab, ponezumab, prasinezumab, quilizumab, ranevetmab, refanezumab, roledumab, romosozumab, rozanolixizumab, setrusumab, SHP647, solanezumab, stamulumab, suptavumab, sutimlimab, tanezumab, crovalimab, and lokivetmab;
[6798] VH3 comprises a heavy chain complementarity determining region 1 (HCDR1), HCDR2, and/or HCDR3 of an antibody selected from the group consisting of aducanumab, alirocumab, frovocimab, lodelcizumab, bococizumab, evolocumab, ralpancizumab, anifrolumab, atorolimumab, bapineuzumab, bedinvetmab, begelomab, biciromab, bimagrumab, birtamimab, blosozumab, burosumab, caplacizumab, concizumab, crenezumab, crizanlizumab, crotedumab, dezamizumab, domagrozumab, donanemab, eldelumab, elezanumab, emapalumab, emicizumab, eptinezumab, erenumab, evinacumab, faralimomab, fasinumab, fontolizumab, fremanezumab, frunevetmab, fulranumab, galcanezumab, gantenerumab, gosuranemab, idarucizumab, imciromab, inclacumab, lampalizumab, lanadelumab, landogrozumab, lecanemab, ligelizumab, marstacimab, mavrilimumab, morolimumab, NEOD001, omalizumab, oMS721, orticumab, otilimab, ozanezumab, ponezumab, prasinezumab, quilizumab, ranevetmab, refanezumab, roledumab, romosozumab, rozanolixizumab, setrusumab, SHP647, solanezumab, stamulumab, suptavumab, sutimlimab, tanezumab, crovalimab, and lokivetmab; and/or
[6799] VH4 comprises a heavy chain complementarity determining region 1 (HCDR1), HCDR2, and/or HCDR3 of an antibody selected from the group consisting of aducanumab, alirocumab, frovocimab, lodelcizumab, bococizumab, evolocumab, ralpancizumab, anifrolumab, atorolimumab, bapineuzumab, bedinvetmab, begelomab, biciromab, bimagrumab, birtamimab, blosozumab, burosumab, caplacizumab, concizumab, crenezumab, crizanlizumab, crotedumab, dezamizumab, domagrozumab, donanemab, eldelumab, elezanumab, emapalumab, emicizumab, eptinezumab, erenumab, evinacumab, faralimomab, fasinumab, fontolizumab, fremanezumab, frunevetmab, fulranumab, galcanezumab, gantenerumab, gosuranemab, idarucizumab, imciromab, inclacumab, lampalizumab, lanadelumab, landogrozumab, lecanemab, ligelizumab, marstacimab, mavrilimumab, morolimumab, NEOD001, omalizumab, oMS721, orticumab, otilimab, ozanezumab, ponezumab, prasinezumab, quilizumab, ranevetmab, refanezumab, roledumab, romosozumab, rozanolixizumab, setrusumab, SHP647, solanezumab, stamulumab, suptavumab, sutimlimab, tanezumab, crovalimab, and lokivetmab; or
[6800] (ii)
[6801] VL1 comprises a VL of an antibody selected from the group consisting of aducanumab, alirocumab, frovocimab, lodelcizumab, bococizumab, evolocumab, ralpancizumab, anifrolumab, atorolimumab, bapineuzumab, bedinvetmab, begelomab, biciromab, bimagrumab, birtamimab, blosozumab, burosumab, caplacizumab, concizumab, crenezumab, crizanlizumab, crotedumab, dezamizumab, domagrozumab, donanemab, eldelumab, elezanumab, emapalumab, emicizumab, eptinezumab, erenumab, evinacumab, faralimomab, fasinumab, fontolizumab, fremanezumab, frunevetmab, fulranumab, galcanezumab, gantenerumab, gosuranemab, idarucizumab, imciromab, inclacumab, lampalizumab, lanadelumab, landogrozumab, lecanemab, ligelizumab, marstacimab, mavrilimumab, morolimumab, NEOD001, omalizumab, oMS721, orticumab, otilimab, ozanezumab, ponezumab, prasinezumab, quilizumab, ranevetmab, refanezumab, roledumab, romosozumab, rozanolixizumab, setrusumab, SHP647, solanezumab, stamulumab, suptavumab, sutimlimab, tanezumab, crovalimab, and lokivetmab;
[6802] VL2 comprises a VL of an antibody selected from the group consisting of aducanumab, alirocumab, frovocimab, lodelcizumab, bococizumab, evolocumab, ralpancizumab, anifrolumab, atorolimumab, bapineuzumab, bedinvetmab, begelomab, biciromab, bimagrumab, birtamimab, blosozumab, burosumab, caplacizumab, concizumab, crenezumab, crizanlizumab, crotedumab, dezamizumab, domagrozumab, donanemab, eldelumab, elezanumab, emapalumab, emicizumab, eptinezumab, erenumab, evinacumab, faralimomab, fasinumab, fontolizumab, fremanezumab, frunevetmab, fulranumab, galcanezumab, gantenerumab, gosuranemab, idarucizumab, imciromab, inclacumab, lampalizumab, lanadelumab, landogrozumab, lecanemab, ligelizumab, marstacimab, mavrilimumab, morolimumab, NEOD001, omalizumab, oMS721, orticumab, otilimab, ozanezumab, ponezumab, prasinezumab, quilizumab, ranevetmab, refanezumab, roledumab, romosozumab, rozanolixizumab, setrusumab, SHP647, solanezumab, stamulumab, suptavumab, sutimlimab, tanezumab, crovalimab, and lokivetmab;
[6803] VL3 comprises a VL of an antibody selected from the group consisting of aducanumab, alirocumab, frovocimab, lodelcizumab, bococizumab, evolocumab, ralpancizumab, anifrolumab, atorolimumab, bapineuzumab, bedinvetmab, begelomab, biciromab, bimagrumab, birtamimab, blosozumab, burosumab, caplacizumab, concizumab, crenezumab, crizanlizumab, crotedumab, dezamizumab, domagrozumab, donanemab, eldelumab, elezanumab, emapalumab, emicizumab, eptinezumab, erenumab, evinacumab, faralimomab, fasinumab, fontolizumab, fremanezumab, frunevetmab, fulranumab, galcanezumab, gantenerumab, gosuranemab, idarucizumab, imciromab, inclacumab, lampalizumab, lanadelumab, landogrozumab, lecanemab, ligelizumab, marstacimab, mavrilimumab, morolimumab, NEOD001, omalizumab, oMS721, orticumab, otilimab, ozanezumab, ponezumab, prasinezumab, quilizumab, ranevetmab, refanezumab, roledumab, romosozumab, rozanolixizumab, setrusumab, SHP647, solanezumab, stamulumab, suptavumab, sutimlimab, tanezumab, crovalimab, and lokivetmab;
[6804] VL4 comprises a VL of an antibody selected from the group consisting of aducanumab, alirocumab, frovocimab, lodelcizumab, bococizumab, evolocumab, ralpancizumab, anifrolumab, atorolimumab, bapineuzumab, bedinvetmab, begelomab, biciromab, bimagrumab, birtamimab, blosozumab, burosumab, caplacizumab, concizumab, crenezumab, crizanlizumab, crotedumab, dezamizumab, domagrozumab, donanemab, eldelumab, elezanumab, emapalumab, emicizumab, eptinezumab, erenumab, evinacumab, faralimomab, fasinumab, fontolizumab, fremanezumab, frunevetmab, fulranumab, galcanezumab, gantenerumab, gosuranemab, idarucizumab, imciromab, inclacumab, lampalizumab, lanadelumab, landogrozumab, lecanemab, ligelizumab, marstacimab, mavrilimumab, morolimumab, NEOD001, omalizumab, oMS721, orticumab, otilimab, ozanezumab, ponezumab, prasinezumab, quilizumab, ranevetmab, refanezumab, roledumab, romosozumab, rozanolixizumab, setrusumab, SHP647, solanezumab, stamulumab, suptavumab, sutimlimab, tanezumab, crovalimab, and lokivetmab;
[6805] VH1 comprises a VH of an antibody selected from the group consisting of aducanumab, alirocumab, frovocimab, lodelcizumab, bococizumab, evolocumab, ralpancizumab, anifrolumab, atorolimumab, bapineuzumab, bedinvetmab, begelomab, biciromab, bimagrumab, birtamimab, blosozumab, burosumab, caplacizumab, concizumab, crenezumab, crizanlizumab, crotedumab, dezamizumab, domagrozumab, donanemab, eldelumab, elezanumab, emapalumab, emicizumab, eptinezumab, erenumab, evinacumab, faralimomab, fasinumab, fontolizumab, fremanezumab, frunevetmab, fulranumab, galcanezumab, gantenerumab, gosuranemab, idarucizumab, imciromab, inclacumab, lampalizumab, lanadelumab, landogrozumab, lecanemab, ligelizumab, marstacimab, mavrilimumab, morolimumab, NEOD001, omalizumab, oMS721, orticumab, otilimab, ozanezumab, ponezumab, prasinezumab, quilizumab, ranevetmab, refanezumab, roledumab, romosozumab, rozanolixizumab, setrusumab, SHP647, solanezumab, stamulumab, suptavumab, sutimlimab, tanezumab, crovalimab, and lokivetmab;
[6806] VH2 comprises a VH of an antibody selected from the group consisting of aducanumab, alirocumab, frovocimab, lodelcizumab, bococizumab, evolocumab, ralpancizumab, anifrolumab, atorolimumab, bapineuzumab, bedinvetmab, begelomab, biciromab, bimagrumab, birtamimab, blosozumab, burosumab, caplacizumab, concizumab, crenezumab, crizanlizumab, crotedumab, dezamizumab, domagrozumab, donanemab, eldelumab, elezanumab, emapalumab, emicizumab, eptinezumab, erenumab, evinacumab, faralimomab, fasinumab, fontolizumab, fremanezumab, frunevetmab, fulranumab, galcanezumab, gantenerumab, gosuranemab, idarucizumab, imciromab, inclacumab, lampalizumab, lanadelumab, landogrozumab, lecanemab, ligelizumab, marstacimab, mavrilimumab, morolimumab, NEOD001, omalizumab, oMS721, orticumab, otilimab, ozanezumab, ponezumab, prasinezumab, quilizumab, ranevetmab, refanezumab, roledumab, romosozumab, rozanolixizumab, setrusumab, SHP647, solanezumab, stamulumab, suptavumab, sutimlimab, tanezumab, crovalimab, and lokivetmab;
[6807] VH3 comprises a VH of an antibody selected from the group consisting of aducanumab, alirocumab, frovocimab, lodelcizumab, bococizumab, evolocumab, ralpancizumab, anifrolumab, atorolimumab, bapineuzumab, bedinvetmab, begelomab, biciromab, bimagrumab, birtamimab, blosozumab, burosumab, caplacizumab, concizumab, crenezumab, crizanlizumab, crotedumab, dezamizumab, domagrozumab, donanemab, eldelumab, elezanumab, emapalumab, emicizumab, eptinezumab, erenumab, evinacumab, faralimomab, fasinumab, fontolizumab, fremanezumab, frunevetmab, fulranumab, galcanezumab, gantenerumab, gosuranemab, idarucizumab, imciromab, inclacumab, lampalizumab, lanadelumab, landogrozumab, lecanemab, ligelizumab, marstacimab, mavrilimumab, morolimumab, NEOD001, omalizumab, oMS721, orticumab, otilimab, ozanezumab, ponezumab, prasinezumab, quilizumab, ranevetmab, refanezumab, roledumab, romosozumab, rozanolixizumab, setrusumab, SHP647, solanezumab, stamulumab, suptavumab, sutimlimab, tanezumab, crovalimab, and lokivetmab; and/or
[6808] VH4 comprises a VH of an antibody selected from the group consisting of aducanumab, alirocumab, frovocimab, lodelcizumab, bococizumab, evolocumab, ralpancizumab, anifrolumab, atorolimumab, bapineuzumab, bedinvetmab, begelomab, biciromab, bimagrumab, birtamimab, blosozumab, burosumab, caplacizumab, concizumab, crenezumab, crizanlizumab, crotedumab, dezamizumab, domagrozumab, donanemab, eldelumab, elezanumab, emapalumab, emicizumab, eptinezumab, erenumab, evinacumab, faralimomab, fasinumab, fontolizumab, fremanezumab, frunevetmab, fulranumab, galcanezumab, gantenerumab, gosuranemab, idarucizumab, imciromab, inclacumab, lampalizumab, lanadelumab, landogrozumab, lecanemab, ligelizumab, marstacimab, mavrilimumab, morolimumab, NEOD001, omalizumab, oMS721, orticumab, otilimab, ozanezumab, ponezumab, prasinezumab, quilizumab, ranevetmab, refanezumab, roledumab, romosozumab, rozanolixizumab, setrusumab, SHP647, solanezumab, stamulumab, suptavumab, sutimlimab, tanezumab, crovalimab, and lokivetmab; or
[6809] (iii)
[6810] VL1 comprises (i) a complementarity determining region (CDR) 1 having an amino acid sequence that is at least 65%, at least 70%, at least 75%, at least 80%, at least 85%, at least 90%, at least 95%, at least 99%, or 100% identical to any one of SEQ ID NOs: 1120, 1228, 1359, 1519, 1831, 1838, 1845, 1852, 1859, 1866, 1872, 1878, 1885, 1891, 1898, 1905, 1911, 1917, 1924, 1931, 1938, 1945, and 1963; (ii) a CDR2 having an amino acid sequence that is at least 65%, at least 70%, at least 75%, at least 80%, at least 85%, at least 90%, at least 95%, at least 99%, or 100% identical to any one of amino acid sequences AAS, AVS, DAS, DNN, EDN, EVS, GAS, GNG, KAS, KVS, LVS, NTD, STS, WAS, and YTS; and (iii) a CDR3 having an amino acid sequence that is at least 65%, at least 70%, at least 75%, at least 80%, at least 85%, at least 90%, at least 95%, at least 99%, or 100% identical to any one of SEQ ID NOs: 1360, 1832, 1839, 1846, 1853, 1860, 1867, 1873, 1879, 1886, 1892, 1899, 1906, 1912, 1918, 1925, 1932, 1939, 1946, 1951, 1957, 1964, and 1970;
[6811] VL2 comprises (i) a complementarity determining region (CDR) 1 having an amino acid sequence that is at least 65%, at least 70%, at least 75%, at least 80%, at least 85%, at least 90%, at least 95%, at least 99%, or 100% identical to any one of SEQ ID NOs: 1120, 1228, 1359, 1519, 1831, 1838, 1845, 1852, 1859, 1866, 1872, 1878, 1885, 1891, 1898, 1905, 1911, 1917, 1924, 1931, 1938, 1945, and 1963; (ii) a CDR2 having an amino acid sequence that is at least 65%, at least 70%, at least 75%, at least 80%, at least 85%, at least 90%, at least 95%, at least 99%, or 100% identical to any one of amino acid sequences AAS, AVS, DAS, DNN, EDN, EVS, GAS, GNG, KAS, KVS, LVS, NTD, STS, WAS, and YTS; and (iii) a CDR3 having an amino acid sequence that is at least 65%, at least 70%, at least 75%, at least 80%, at least 85%, at least 90%, at least 95%, at least 99%, or 100% identical to any one of SEQ ID NOs: 1360, 1832, 1839, 1846, 1853, 1860, 1867, 1873, 1879, 1886, 1892, 1899, 1906, 1912, 1918, 1925, 1932, 1939, 1946, 1951, 1957, 1964, and 1970;
[6812] VL3 comprises (i) a complementarity determining region (CDR) 1 having an amino acid sequence that is at least 65%, at least 70%, at least 75%, at least 80%, at least 85%, at least 90%, at least 95%, at least 99%, or 100% identical to any one of SEQ ID NOs: 1120, 1228, 1359, 1519, 1831, 1838, 1845, 1852, 1859, 1866, 1872, 1878, 1885, 1891, 1898, 1905, 1911, 1917, 1924, 1931, 1938, 1945, and 1963; (ii) a CDR2 having an amino acid sequence that is at least 65%, at least 70%, at least 75%, at least 80%, at least 85%, at least 90%, at least 95%, at least 99%, or 100% identical to any one of amino acid sequences AAS, AVS, DAS, DNN, EDN, EVS, GAS, GNG, KAS, KVS, LVS, NTD, STS, WAS, and YTS; and (iii) a CDR3 having an amino acid sequence that is at least 65%, at least 70%, at least 75%, at least 80%, at least 85%, at least 90%, at least 95%, at least 99%, or 100% identical to any one of SEQ ID NOs: 1360, 1832, 1839, 1846, 1853, 1860, 1867, 1873, 1879, 1886, 1892, 1899, 1906, 1912, 1918, 1925, 1932, 1939, 1946, 1951, 1957, 1964, and 1970;
[6813] VL4 comprises (i) a complementarity determining region (CDR) 1 having an amino acid sequence that is at least 65%, at least 70%, at least 75%, at least 80%, at least 85%, at least 90%, at least 95%, at least 99%, or 100% identical to any one of SEQ ID NOs: 1120, 1228, 1359, 1519, 1831, 1838, 1845, 1852, 1859, 1866, 1872, 1878, 1885, 1891, 1898, 1905, 1911, 1917, 1924, 1931, 1938, 1945, and 1963; (ii) a CDR2 having an amino acid sequence that is at least 65%, at least 70%, at least 75%, at least 80%, at least 85%, at least 90%, at least 95%, at least 99%, or 100% identical to any one of amino acid sequences AAS, AVS, DAS, DNN, EDN, EVS, GAS, GNG, KAS, KVS, LVS, NTD, STS, WAS, and YTS; and (iii) a CDR3 having an amino acid sequence that is at least 65%, at least 70%, at least 75%, at least 80%, at least 85%, at least 90%, at least 95%, at least 99%, or 100% identical to any one of SEQ ID NOs: 1360, 1832, 1839, 1846, 1853, 1860, 1867, 1873, 1879, 1886, 1892, 1899, 1906, 1912, 1918, 1925, 1932, 1939, 1946, 1951, 1957, 1964, and 1970;
[6814] VH1 comprises (i) a complementarity determining region (CDR) 1 having an amino acid sequence that is at least 65%, at least 70%, at least 75%, at least 80%, at least 85%, at least 90%, at least 95%, at least 99%, or 100% identical to any one of SEQ ID NOs: 1309, 1362, 1437, 1552, 1618, 1639, 1834, 1841, 1848, 1855, 1862, 1881, 1894, 1901, 1920, 1927, 1934, 1941, 1953, 1959, and 1966; (ii) a CDR2 having an amino acid sequence that is at least 65%, at least 70%, at least 75%, at least 80%, at least 85%, at least 90%, at least 95%, at least 99%, or 100% identical to any one of SEQ ID NOs: 1363, 1835, 1842, 1849, 1856, 1863, 1869, 1875, 1882, 1888, 1895, 1902, 1908, 1914, 1921, 1928, 1935, 1942, 1948, 1954, 1960, 1967, and 1972; and (iii) a CDR3 having an amino acid sequence that is at least 65%, at least 70%, at least 75%, at least 80%, at least 85%, at least 90%, at least 95%, at least 99%, or 100% identical to any one of SEQ ID NOs: 1364, 1836, 1843, 1850, 1857, 1864, 1870, 1876, 1883, 1889, 1896, 1903, 1909, 1915, 1922, 1929, 1936, 1943, 1949, 1955, 1961, 1968, and 1973;
[6815] VH2 comprises (i) a complementarity determining region (CDR) 1 having an amino acid sequence that is at least 65%, at least 70%, at least 75%, at least 80%, at least 85%, at least 90%, at least 95%, at least 99%, or 100% identical to any one of SEQ ID NOs: 1309, 1362, 1437, 1552, 1618, 1639, 1834, 1841, 1848, 1855, 1862, 1881, 1894, 1901, 1920, 1927, 1934, 1941, 1953, 1959, and 1966; (ii) a CDR2 having an amino acid sequence that is at least 65%, at least 70%, at least 75%, at least 80%, at least 85%, at least 90%, at least 95%, at least 99%, or 100% identical to any one of SEQ ID NOs: 1363, 1835, 1842, 1849, 1856, 1863, 1869, 1875, 1882, 1888, 1895, 1902, 1908, 1914, 1921, 1928, 1935, 1942, 1948, 1954, 1960, 1967, and 1972; and (iii) a CDR3 having an amino acid sequence that is at least 65%, at least 70%, at least 75%, at least 80%, at least 85%, at least 90%, at least 95%, at least 99%, or 100% identical to any one of SEQ ID NOs: 1364, 1836, 1843, 1850, 1857, 1864, 1870, 1876, 1883, 1889, 1896, 1903, 1909, 1915, 1922, 1929, 1936, 1943, 1949, 1955, 1961, 1968, and 1973;
[6816] VH3 comprises (i) a complementarity determining region (CDR) 1 having an amino acid sequence that is at least 65%, at least 70%, at least 75%, at least 80%, at least 85%, at least 90%, at least 95%, at least 99%, or 100% identical to any one of SEQ ID NOs: 1309, 1362, 1437, 1552, 1618, 1639, 1834, 1841, 1848, 1855, 1862, 1881, 1894, 1901, 1920, 1927, 1934, 1941, 1953, 1959, and 1966; (ii) a CDR2 having an amino acid sequence that is at least 65%, at least 70%, at least 75%, at least 80%, at least 85%, at least 90%, at least 95%, at least 99%, or 100% identical to any one of SEQ ID NOs: 1363, 1835, 1842, 1849, 1856, 1863, 1869, 1875, 1882, 1888, 1895, 1902, 1908, 1914, 1921, 1928, 1935, 1942, 1948, 1954, 1960, 1967, and 1972; and (iii) a CDR3 having an amino acid sequence that is at least 65%, at least 70%, at least 75%, at least 80%, at least 85%, at least 90%, at least 95%, at least 99%, or 100% identical to any one of SEQ ID NOs: 1364, 1836, 1843, 1850, 1857, 1864, 1870, 1876, 1883, 1889, 1896, 1903, 1909, 1915, 1922, 1929, 1936, 1943, 1949, 1955, 1961, 1968, and 1973; and/or
[6817] VH4 comprises (i) a complementarity determining region (CDR) 1 having an amino acid sequence that is at least 65%, at least 70%, at least 75%, at least 80%, at least 85%, at least 90%, at least 95%, at least 99%, or 100% identical to any one of SEQ ID NOs: 1309, 1362, 1437, 1552, 1618, 1639, 1834, 1841, 1848, 1855, 1862, 1881, 1894, 1901, 1920, 1927, 1934, 1941, 1953, 1959, and 1966; (ii) a CDR2 having an amino acid sequence that is at least 65%, at least 70%, at least 75%, at least 80%, at least 85%, at least 90%, at least 95%, at least 99%, or 100% identical to any one of SEQ ID NOs: 1363, 1835, 1842, 1849, 1856, 1863, 1869, 1875, 1882, 1888, 1895, 1902, 1908, 1914, 1921, 1928, 1935, 1942, 1948, 1954, 1960, 1967, and 1972; and (iii) a CDR3 having an amino acid sequence that is at least 65%, at least 70%, at least 75%, at least 80%, at least 85%, at least 90%, at least 95%, at least 99%, or 100% identical to any one of SEQ ID NOs: 1364, 1836, 1843, 1850, 1857, 1864, 1870, 1876, 1883, 1889, 1896, 1903, 1909, 1915, 1922, 1929, 1936, 1943, 1949, 1955, 1961, 1968, and 1973; or
[6818] (iv)
[6819] VL1 comprises an amino acid sequence that is at least 65%, at least 70%, at least 75%, at least 80%, at least 85%, at least 90%, at least 95%, at least 99%, or 100% identical to any one of SEQ ID NOs: 1361, 1833, 1840, 1847, 1854, 1861, 1868, 1874, 1880, 1887, 1893, 1900, 1907, 1913, 1919, 1926, 1933, 1940, 1947, 1952, 1958, 1965, and 1971;
[6820] VL2 comprises an amino acid sequence that is at least 65%, at least 70%, at least 75%, at least 80%, at least 85%, at least 90%, at least 95%, at least 99%, or 100% identical to any one of SEQ ID NOs: 1361, 1833, 1840, 1847, 1854, 1861, 1868, 1874, 1880, 1887, 1893, 1900, 1907, 1913, 1919, 1926, 1933, 1940, 1947, 1952, 1958, 1965, and 1971;
[6821] VL3 comprises an amino acid sequence that is at least 65%, at least 70%, at least 75%, at least 80%, at least 85%, at least 90%, at least 95%, at least 99%, or 100% identical to any one of SEQ ID NOs: 1361, 1833, 1840, 1847, 1854, 1861, 1868, 1874, 1880, 1887, 1893, 1900, 1907, 1913, 1919, 1926, 1933, 1940, 1947, 1952, 1958, 1965, and 1971;
[6822] VL4 comprises an amino acid sequence that is at least 65%, at least 70%, at least 75%, at least 80%, at least 85%, at least 90%, at least 95%, at least 99%, or 100% identical to any one of SEQ ID NOs: 1361, 1833, 1840, 1847, 1854, 1861, 1868, 1874, 1880, 1887, 1893, 1900, 1907, 1913, 1919, 1926, 1933, 1940, 1947, 1952, 1958, 1965, and 1971;
[6823] VH1 comprises an amino acid sequence that is at least 65%, at least 70%, at least 75%, at least 80%, at least 85%, at least 90%, at least 95%, at least 99%, or 100% identical to any one of SEQ ID NOs: 1365, 1837, 1844, 1851, 1858, 1865, 1871, 1877, 1884, 1890, 1897, 1904, 1910, 1916, 1923, 1930, 1937, 1944, 1950, 1956, 1962, 1969, and 1974;
[6824] VH2 comprises an amino acid sequence that is at least 65%, at least 70%, at least 75%, at least 80%, at least 85%, at least 90%, at least 95%, at least 99%, or 100% identical to any one of SEQ ID NOs: 1365, 1837, 1844, 1851, 1858, 1865, 1871, 1877, 1884, 1890, 1897, 1904, 1910, 1916, 1923, 1930, 1937, 1944, 1950, 1956, 1962, 1969, and 1974;
[6825] VH3 comprises an amino acid sequence that is at least 65%, at least 70%, at least 75%, at least 80%, at least 85%, at least 90%, at least 95%, at least 99%, or 100% identical to any one of SEQ ID NOs: 1365, 1837, 1844, 1851, 1858, 1865, 1871, 1877, 1884, 1890, 1897, 1904, 1910, 1916, 1923, 1930, 1937, 1944, 1950, 1956, 1962, 1969, and 1974; and/or
[6826] VH4 comprises an amino acid sequence that is at least 65%, at least 70%, at least 75%, at least 80%, at least 85%, at least 90%, at least 95%, at least 99%, or 100% identical to any one of SEQ ID NOs: 1365, 1837, 1844, 1851, 1858, 1865, 1871, 1877, 1884, 1890, 1897, 1904, 1910, 1916, 1923, 1930, 1937, 1944, 1950, 1956, 1962, 1969, and 1974.

[6827] In some aspects, one or both of the antigen binding polypeptides comprised in the antigen binding polypeptide complexes disclosed herein, comprise one or more CL, as indicated in the formulas representing the antigen binding polypeptide complexes disclosed herein. In some aspects, the CL comprises an amino acid sequence at least 65%, at least 70%, at least 75%, at least 80%, at least 85%, at least 90%, at least 95%, at least 99%, or 100% identical to any one of SEQ ID NOs: 374, 637, or 1092-1095.

[6828] In some aspects, one or both of the antigen binding polypeptides comprised in the antigen binding polypeptide complexes disclosed herein, comprise one or more CH1, as indicated in the formulas representing the antigen binding polypeptide complexes disclosed herein. In some aspects, the CH1 comprises an amino acid sequence at least 65%, at least 70%, at least 75%, at least 80%, at least 85%, at least 90%, at least 95%, at least 99%, or 100% identical to any one of SEQ ID NOs: 375, 634, 1070, 1071, or 1086-1091.

[6829] In some aspects, one or both of the antigen binding polypeptides comprised in the antigen binding polypeptide complexes provided herein further comprise an Fc region. In some aspects, one or both of the antigen binding polypeptides comprised in the antigen binding polypeptide complexes provided herein further comprise an Fc region at the carboxy-terminus. In some aspects, the Fc region comprises an immunoglobulin heavy chain constant region 2 (CH2) and/or an immunoglobulin heavy chain constant region 3 (CH3). In some aspects, the Fc region further comprises an immunoglobulin hinge (i.e., a hinge region). In some aspects, the hinge region is interposed between a CH1 and a CH2 (i.e., a hinge region is localized between the carboxy terminal residue of a CH1 and the N-terminal residue of a CH2). In some aspects, the hinge region comprises an amino acid sequence at least 65%, at least 70%, at least 75%, at least 80%, at least 85%, at least 90%, at least 95%, at least 99%, or 100% identical to any one of SEQ ID NOs: 635, 636, 1072, 1073, or 1074. In some aspects, the Fc region comprises a CH2 and a CH3. In some aspects, the CH2 comprises an amino acid sequence that is at least 65%, at least 70%, at least 75%, at least 80%, at least 85%, at least 90%, at least 95%, at least 99%, or 100% identical to any one of SEQ ID NOs: 1075-1078. In some aspects, the CH3 comprises an amino acid sequence that is at least 65%, at least 70%, at least 75%, at least 80%, at least 85%, at least 90%, at least 95%, at least 99%, or 100% identical to any one of SEQ ID NOs: 1079-1085. In some aspects, the Fc region comprises an amino acid sequence that is at least 65%, at least 70%, at least 75%, at least 80%, at least 85%, at least 90%, at least 95%, at least 99%, or 100% identical to any one of SEQ ID NOs: 376-380.

[6830] In some aspects, the Fc region comprises one or more amino acid substitutions. In some aspects, the one or more amino acid substitutions comprise one or more half-life extension amino acid substitutions. In some aspects, the one or more half-life extension amino acid substitutions comprise one or more of amino acid substitutions M428L, N434A, N434S, L234F, L235E, P331S, M252Y, S254T, or T256E, or equivalent thereof, based on the EU numbering scheme. In some aspects, the one or more half-life extension amino acid substitutions comprise a LA (M428L and N434A, or equivalent thereof, based on the EU numbering scheme) amino acid substitution. In some aspects, the one or more half-life extension amino acid substitutions comprise a LS (M428L and N434S, or equivalent thereof, based on the EU numbering scheme) amino acid substitution. In some aspects, the one or more half-life extension amino acid substitutions comprise L234F and L235E, or equivalent thereof (based on the EU numbering scheme) amino acid substitutions. In some aspects, the one or more half-life extension amino acid substitutions comprise a TM (L234F, L235E, and P331S, or equivalent thereof, based on the EU numbering scheme) amino acid substitution. In some aspects, the one or more half-life extension amino acid substitutions comprise a YTE (M252Y, S254T, and T256E, or equivalent thereof, based on the EU numbering scheme) amino acid substitution.

[6831] In some aspects, the Fc region comprises at least one knob-into-hole modification. In some aspects, the antigen binding polypeptides complexes disclosed herein are IgG1 or IgG4 antibodies or antigen binding fragments thereof. In some aspects, the knob-into-hole modification comprises one or more of knob substitutions of S354C and T366W, or equivalent thereof, and/or one or more of hole substitutions of Y349C, T366S, L368A, Y407V, or equivalent thereof, or a combination thereof, based on the EU numbering scheme. In some aspects, the Fc region comprises a knob-into-hole modification comprising knob substitutions of S354C and T366W, or equivalent thereof, and/or hole substitutions of Y349C, T366S, L368A, and Y407V, or equivalent thereof, and/or a half-life extension amino acid substitution comprising: a LA (M428L and N434A, or equivalent thereof, based on the EU numbering scheme) amino acid substitution, a LS (M428L and N434S, or equivalent thereof, based on the EU numbering scheme) amino acid substitution. L234F and L235E, or equivalent thereof (based on the EU numbering scheme) amino acid substitutions, a TM (L234F, L235E, and P331S, or equivalent thereof, based on the EU numbering scheme) amino acid substitution, a YTE (M252Y, S254T, and T256E, or equivalent thereof, based on the EU numbering scheme) amino acid substitution, or any combination thereof.

[6832] In some aspects, the Fc region comprises knob substitutions of S354C and T366W, or equivalent thereof, and a half-life extension amino acid substitution comprising: a LA (M428L and N434A, or equivalent thereof, based on the EU numbering scheme) amino acid substitution, a LS (M428L and N434S, or equivalent thereof, based on the EU numbering scheme) amino acid substitution. L234F and L235E, or equivalent thereof (based on the EU numbering scheme) amino acid substitutions, a TM (L234F, L235E, and P331S, or equivalent thereof, based on the EU numbering scheme) amino acid substitution, a YTE (M252Y, S254T, and T256E, or equivalent thereof, based on the EU numbering scheme) amino acid substitution, or any combination thereof.

[6833] In some aspects, the Fc region comprises hole substitutions of Y349C, T366S, L368A, and Y407V, or equivalent thereof, and a half-life extension amino acid substitution comprising: a LA (M428L and N434A, or equivalent thereof, based on the EU numbering scheme) amino acid substitution, a LS (M428L and N434S, or equivalent thereof, based on the EU numbering scheme) amino acid substitution. L234F and L235E, or equivalent thereof (based on the EU numbering scheme) amino acid substitutions, a TM (L234F, L235E, and P331S, or equivalent thereof, based on the EU numbering scheme) amino acid substitution, a YTE (M252Y, S254T, and T256E, or equivalent thereof, based on the EU numbering scheme) amino acid substitution, or any combination thereof.

[6834] In some aspects, one or both of the antigen binding polypeptides comprised in the antigen binding polypeptide complexes disclosed herein comprise one or more Fc effector function knockout mutation. In some aspects, one or both of the antigen binding polypeptides comprised in the antigen binding polypeptide complexes disclosed herein are IgG1 or IgG4 antibodies or antigen binding fragments thereof. In some aspects, the Fc effector function knockout mutation is L234A, L235A, P239A, or equivalent thereof, or a combination thereof, based on the EU numbering scheme.

[6835] In some aspects, one or both of the antigen binding polypeptides comprised in the antigen binding polypeptide complexes disclosed herein comprise a mutation at a glycosylation site. In some aspects, the mutation at a glycosylation site is a mutation at an N-glycosylation site. In some aspects, one or both of the antigen binding polypeptides comprised in the antigen binding polypeptide complexes disclosed herein comprise a VH comprising a mutation at a glycosylation site. In some aspects, the mutation at a glycosylation site is a mutation at an N-glycosylation site. In some aspects, the mutation at an N-glycosylation site is at amino acid N62, or equivalent thereof, of the VH region or equivalent thereof. In some aspects, the mutation at an N-glycosylation site at amino acid N62 is N62Q or N62S, or equivalent thereof.

[6836] In some aspects, one or both of the antigen binding polypeptides comprised in the antigen binding polypeptide complexes disclosed herein, comprise one or more optional linkers. The one or more optional linkers are indicated herein as Ln, wherein n is an integer, and the integer next to each L indicates each L comprised in the antigen binding polypeptides comprised in the antigen binding polypeptide complexes disclosed herein. For example, if an antigen binding polypeptide comprised in the antigen binding polypeptide complexes disclosed herein comprises two linkers, the first linker from N-terminus to C-terminus is herein indicated as L1, and the second linker from N-terminus to C-terminus is herein indicated as L2. If an antigen binding polypeptide complex disclosed herein comprises a first antigen binding polypeptide comprising two linkers, indicated herein as L1 and L2, as explained above, the linkers comprised in the second antigen binding polypeptide are indicated with the following integer, in this example, the first linker from N-terminus to C-terminus of the second antigen binding polypeptide is herein indicated as L3, the second linker from N-terminus to C-terminus of the second antigen binding polypeptide is herein indicated as L3. In some aspects, any one of the optional linkers each independently have a length of from 0 amino acids to about 50 amino acids. In some aspects, any one of the optional linkers each independently have a length of from 5 amino acids to about 40 amino acids.

[6837] In some aspects, any one of the optional linkers are non-immunogenic. In some aspects, any one of the optional linkers do not contain a consensus T cell epitope.

[6838] In some aspects, any of Ln comprises an amino acid sequence of G or A, or an amino acid sequence at least 65%, at least 70%, at least 75%, at least 80%, at least 85%, at least 90%, at least 95%, at least 99%, or 100% identical to amino acid sequence GSS or ASG, or an amino acid sequence at least 65%, at least 70%, at least 75%, at least 80%, at least 85%, at least 90%, at least 95%, at least 99%, or 100% identical to any one of SEQ ID NOs: 333-373 and 967-971. In some aspects. Ln comprises an amino acid sequence at least 65%, at least 70%, at least 75%, at least 80%, at least 85%, at least 90%, at least 95%, at least 99%, or 100% identical to any one of SEQ ID NOs: 333-345 and 967-971.

[6839] In some aspects, the first polypeptide comprises a structure represented by VL1-VH1-VL2-CL-VH2-CH1, VL1-L1-VH1-L2-VL2-L3-CL-L4-VH2-L5-CH1, VL1-VH1-VL2-CL-VH2-CH1-CH2-CH3, or VL1-L1-VH1-L2-VL2-L3-CL-L4-VH2-L5-CH1-CH2-CH3 and the second polypeptide comprises a structure represented by VL3-CL-VH3-CH1-VL4-VH4, VL3-L6-CL-L7-VH3-L8-CH1-L9-VL4-L10-VH4, VL3-CL-VH3-CH1-VL4-VH4-CH2-CH3, or VL3-L6-CL-L7-VH3-L8-CH1-L9-VL4-L10-VH4-CH2-CH3,
[6840] wherein:
[6841] (a)
[6842] (i)
[6843] VL1 comprises a light chain complementarity determining region 1 (LCDR1), LCDR2, and/or LCDR3 of an antibody selected from the group consisting of losatuxizumab vedotin, utomilumab, urelumab, oleclumab, naptumomab estafenatox, ascrinvacumab, pintumomab, tacatuzumab tetraxetan, nesvacumab, vanucizumab, timolumab, vapaliximab, vepalimomab, enapotamab vedotin, ianalumab, belimumab, tabalumab, tibulizumab, belantamab mafodotin, teclistamab, teclistamab, detumomab, nacolomab tafenatox, eculizumab, lendalizumab, pexelizumab, pozelimab, ravulizumab, tesidolumab, vilobelimab, abagovomab, igovomab, oregovomab, sofituzumab vedotin, cantuzumab mertansine, cantuzuma bravtansine, girentuximab, altumomab pentetate, arcitumomab, besilesomab, bertilimumab, plozalizumab, mogamulizumab, leronlimab, PRO140, rovelizumab, rovelizumab, talacotuzumab, benralizumab, tavolimab, vonlerolizumab, gavilimomab, ziralimumab, fanolesomab, ipilimumab, ruplizumab, toralizumab, dapirolizumab pegol, toralizumab, dapirolizumab pegol, ruplizumab, blinatumomab, inebilizumab, loncastuximab tesirine, SGN-CD19A, tafasitamab, taplitumomab paptox, XMAB-5574, Budoprutug, Obexelimab, duvortuxizumab, englumafusp alfa, Emfizatamab, zeripatamig, siplizumab, blontuvetmab, FBTA05, ibritumomab tiuxetan, obinutuzumab, ocaratuzumab, ocrelizumab, ofatumumab, rituximab, tositumomab, ublituximab, veltuzumab, divozilimab, eramkafusp alfa, ripertamab, zuberitamab, glofitamab, nofetumomab merpentan, samalizumab, imvotamab, odronextamab, plamotamab, bectumomab, inotuzumab ozogamicin, moxetumomab pasudotox, pinatuzumab vedotin, gomiliximab, lumiliximab, inolimomab, inolimomab, daclizumab, camidanluma btesirine, basiliximab, varlilumab, omburtamab, enoblituzumab, vopratelimab, lulizumabpegol, TGN1412, muromonab-CD3, otelixizumab, teplizumab, visilizumab, epcoritamab, epcoritamab, brentuximab vedotin, iratumumab, azintuxizumab vedotin, gemtuzumab ozogamicin, lintuzumab, vadastuximab talirine, naratuximab emtansine, otlertuzumab, lilotomab satetraxetan, tetulomab, daratumumab, isatuximab, foralumab, mosunetuzumab, mosunetuzumab, cedelizumab, ibalizumab, keliximab, priliximab, tregalizumab, zanolimumab, bleselumab, iscalimab, lucatumumab, ravagalimab, selicrelumab, teneliximab, vanalimab, abciximab, bivatuzumab, iomab-B, telimomab aritox, zolimomab aritox, abituzumab, intetumumab, alemtuzumab, tamtuvetmab, lorvotuzumab mertansine, itolizumab, cusatuzumab, vorsetuzumab mafodotin, milatuzumab, iladatuzumab vedotin, polatuzumab vedotin, galiximab, cibisatamab, zolbetuximab, naxitamab, tisotumab vedotin, olendalizumab, pamrevlumab, lacnotuzumab, cabiralizumab, emactuzumab, axatilimab, gimsilumab, lenzilumab, namilumab, tremelimumab, ulocuplumab, tepoditamab, rovalpituzumab tesirine, tarlatamab, demcizumab, navicixizumab, drozitumab, parsatuzumab, depatuxizumab mafodotin, modotuximab, carotuximab, adecatumumab, adecatumumab, oportuzumab monatox, solitomab, tucotuzumab celmoleukin, edrecolomab, catumaxomab, ifabotuzumab, fibatuzumab, zalutumumab, panitumumab, cetuximab, futuximab, imgatuzumab, laprituximab emtansine, matuzumab, necitumumab, nimotuzumab, tomuzotuximab, amivantamab, amivantamab, epitumomab cituxetan, sontuzumab, duligotuzumab, elgemtumab, lumretuzumab, patritumab, seribantumab, zenocutuzumab, sibrotuzumab, burosumab, aprutumab ixadotin, radretumab, pasotuxizumab, farletuzumab, mirvetuximab soravtansine, vantictumab, TRBS07, 3F8, dinutuximab, dinutuximab beta, ecromeximab, mitumomab, andecaliximab, capromab, codrituzumab, glembatumumab vedotin, talquetamab, talquetamab, trevogrumab, indusatumab vedotin, ficlatuzumab, rilotumumab, zatuximab, pentuzimab, pentuzimab, margetuximab, timigutuzumab, trastuzumab, trastuzumab duocarmazine, trastuzumab emtansine, gancotamab, pertuzumab, ertumaxomab, emibetuzumab, telisotuzumab, telisotuzumab vedotin, derlotuximab biotin, apolizumab, onartuzumab, bersanlimab, enlimomabpegol, rontalizumab, sifalimumab, talizumab, ganitumab, istiratumab, robatumumab, teprotumumab, figitumumab, ganitumab, istiratumab, robatumumab, teprotumumab, cixutumumab, dalotuzumab, xentuzumab, dusigitumab, canakinumab, ustekinumab, ustekinumab, ustekinumab, briakinumab, briakinumab, abrezekimab, lebrikizumab, romilkimab, TNX-650, tralokinumab, anrukinzumab, brodalumab, ixekizumab, netakimab, perakizumab, secukinumab, vunakizumab, afascvikumab, afascvikumab, bimekizumab, bimekizumab, remtolumab, bermekimab, lutikizumab, lutikizumab, gevokizumab, cergutuzumab amunaleukin, fletikumab, fezakinumab, brazikumab, guselkumab, mirikizumab, tildrakizumab, risankizumab, flotetuzumab, nemolizumab, pascolizumab, dupilumab, mepolizumab, reslizumab, clazakizumab, elsilimomab, olokizumab, sarilumab, siltuximab, sirukumab, vobarilizumab, tocilizumab, SA237, satralizumab, enokizumab, prezalizumab, natalizumab, abrilumab, abrilumab, vedolizumab, volociximab, tadocizumab, etaracizumab, etrolizumab, spesolimab, vatelizumab, erlizumab, lirilumab, relatlimab, cBR96-doxorubicinimmunoconjugate, odulimomab, efalizumab, ladiratuzumab vedotin, simtuzumab, samrotamab vedotin, aselizumab, lupartumab amadotin, imalumab, carlumab, imaprelimab, amatuximab, amatuximab, anetumab ravtansine, narnatumab, clivatuzumab tetraxetan, pemtumomab, gatipotuzumab, ensituximab, lemalesomab, sulesomab, enfortumab vedotin, racotumomab, monalizumab, brontictuzumab, tarextumab, vesencumab, oxelumab, gilvetmab, tislelizumab, dostarlimab, BCD-100, nivolumab, PDR001, pembrolizumab, pidilizumab, retifanlimab, spartalizumab, sintilimab, cemiplimab, olaratumab, tovetumab, rinucumab, atezolizumab, avelumab, durvalumab, lifastuzumab vedotin, bavituximab, acapatamab, capromab, rosopatamab, nezastomig, pasotuxizumab, pelgifatamab, voxalatamab, cofetuzumab pelidotin, denosumab, rosmantuzumab, cirmtuzumab, atinumab, indatuximab ravtansine, elotuzumab, sirtratumab vedotin, sonepcizumab, vandortuzumab vedotin, minretumomab, satumomab pendetide, maslimomab, ontuxizumab, tenatumomab, fresolimumab, metelimumab, lerdelimumab, tezepelumab, etigilimab, tiragotumab, placulumab, prezalumab, infliximab, nerelimomab, ozoralizumab, adalimumab, afelimomab, certolizumab pegol, golimumab, mapatumumab, conatumumab, lexatumumab, tigatuzumab, sacituzumab govitecan, votumumab, pogalizumab, letolizumab, pankomab, anatumomab mafenatox, enavatuzumab, flanvotumab, brolucizumab, ranibizumab, varisacumab, bevacizumab, faricimab, icrucumab, alacizumab pegol, ramucirumab, pritumumab, and onvatilimab;
[6844] VL2 comprises a light chain complementarity determining region 1 (LCDR1), LCDR2, and/or LCDR3 of an antibody selected from the group consisting of losatuxizumab vedotin, utomilumab, urelumab, oleclumab, naptumomab estafenatox, ascrinvacumab, pintumomab, tacatuzumab tetraxetan, nesvacumab, vanucizumab, timolumab, vapaliximab, vepalimomab, enapotamab vedotin, ianalumab, belimumab, tabalumab, tibulizumab, belantamab mafodotin, teclistamab, teclistamab, detumomab, nacolomab tafenatox, eculizumab, lendalizumab, pexelizumab, pozelimab, ravulizumab, tesidolumab, vilobelimab, abagovomab, igovomab, oregovomab, sofituzumab vedotin, cantuzumab mertansine, cantuzuma bravtansine, girentuximab, altumomab pentetate, arcitumomab, besilesomab, bertilimumab, plozalizumab, mogamulizumab, leronlimab, PRO140, rovelizumab, rovelizumab, talacotuzumab, benralizumab, tavolimab, vonlerolizumab, gavilimomab, ziralimumab, fanolesomab, ipilimumab, ruplizumab, toralizumab, dapirolizumab pegol, toralizumab, dapirolizumab pegol, ruplizumab, blinatumomab, inebilizumab, loncastuximab tesirine, SGN-CD19A, tafasitamab, taplitumomab paptox, XMAB-5574, Budoprutug, Obexelimab, duvortuxizumab, englumafusp alfa, Emfizatamab, zeripatamig, siplizumab, blontuvetmab, FBTA05, ibritumomab tiuxetan, obinutuzumab, ocaratuzumab, ocrelizumab, ofatumumab, rituximab, tositumomab, ublituximab, veltuzumab, divozilimab, eramkafusp alfa, ripertamab, zuberitamab, glofitamab, nofetumomab merpentan, samalizumab, imvotamab, odronextamab, plamotamab, bectumomab, inotuzumab ozogamicin, moxetumomab pasudotox, pinatuzumab vedotin, gomiliximab, lumiliximab, inolimomab, inolimomab, daclizumab, camidanluma btesirine, basiliximab, varlilumab, omburtamab, enoblituzumab, vopratelimab, lulizumabpegol, TGN1412, muromonab-CD3, otelixizumab, teplizumab, visilizumab, epcoritamab, epcoritamab, brentuximab vedotin, iratumumab, azintuxizumab vedotin, gemtuzumab ozogamicin, lintuzumab, vadastuximab talirine, naratuximab emtansine, otlertuzumab, lilotomab satetraxetan, tetulomab, daratumumab, isatuximab, foralumab, mosunetuzumab, mosunetuzumab, cedelizumab, ibalizumab, keliximab, priliximab, tregalizumab, zanolimumab, bleselumab, iscalimab, lucatumumab, ravagalimab, selicrelumab, teneliximab, vanalimab, abciximab, bivatuzumab, iomab-B, telimomab aritox, zolimomab aritox, abituzumab, intetumumab, alemtuzumab, tamtuvetmab, lorvotuzumab mertansine, itolizumab, cusatuzumab, vorsetuzumab mafodotin, milatuzumab, iladatuzumab vedotin, polatuzumab vedotin, galiximab, cibisatamab, zolbetuximab, naxitamab, tisotumab vedotin, olendalizumab, pamrevlumab, lacnotuzumab, cabiralizumab, emactuzumab, axatilimab, gimsilumab, lenzilumab, namilumab, tremelimumab, ulocuplumab, tepoditamab, rovalpituzumab tesirine, tarlatamab, demcizumab, navicixizumab, drozitumab, parsatuzumab, depatuxizumab mafodotin, modotuximab, carotuximab, adecatumumab, adecatumumab, oportuzumab monatox, solitomab, tucotuzumab celmoleukin, edrecolomab, catumaxomab, ifabotuzumab, fibatuzumab, zalutumumab, panitumumab, cetuximab, futuximab, imgatuzumab, laprituximab emtansine, matuzumab, necitumumab, nimotuzumab, tomuzotuximab, amivantamab, amivantamab, epitumomab cituxetan, sontuzumab, duligotuzumab, elgemtumab, lumretuzumab, patritumab, seribantumab, zenocutuzumab, sibrotuzumab, burosumab, aprutumab ixadotin, radretumab, pasotuxizumab, farletuzumab, mirvetuximab soravtansine, vantictumab, TRBS07, 3F8, dinutuximab, dinutuximab beta, ecromeximab, mitumomab, andecaliximab, capromab, codrituzumab, glembatumumab vedotin, talquetamab, talquetamab, trevogrumab, indusatumab vedotin, ficlatuzumab, rilotumumab, zatuximab, pentuzimab, pentuzimab, margetuximab, timigutuzumab, trastuzumab, trastuzumab duocarmazine, trastuzumab emtansine, gancotamab, pertuzumab, ertumaxomab, emibetuzumab, telisotuzumab, telisotuzumab vedotin, derlotuximab biotin, apolizumab, onartuzumab, bersanlimab, enlimomabpegol, rontalizumab, sifalimumab, talizumab, ganitumab, istiratumab, robatumumab, teprotumumab, figitumumab, ganitumab, istiratumab, robatumumab, teprotumumab, cixutumumab, dalotuzumab, xentuzumab, dusigitumab, canakinumab, ustekinumab, ustekinumab, ustekinumab, briakinumab, briakinumab, abrezekimab, lebrikizumab, romilkimab, TNX-650, tralokinumab, anrukinzumab, brodalumab, ixekizumab, netakimab, perakizumab, secukinumab, vunakizumab, afasevikumab, afasevikumab, bimekizumab, bimekizumab, remtolumab, bermekimab, lutikizumab, lutikizumab, gevokizumab, cergutuzumab amunaleukin, fletikumab, fezakinumab, brazikumab, guselkumab, mirikizumab, tildrakizumab, risankizumab, flotetuzumab, nemolizumab, pascolizumab, dupilumab, mepolizumab, reslizumab, clazakizumab, elsilimomab, olokizumab, sarilumab, siltuximab, sirukumab, vobarilizumab, tocilizumab, SA237, satralizumab, enokizumab, prezalizumab, natalizumab, abrilumab, abrilumab, vedolizumab, volociximab, tadocizumab, etaracizumab, etrolizumab, spesolimab, vatelizumab, erlizumab, lirilumab, relatlimab, cBR96-doxorubicinimmunoconjugate, odulimomab, efalizumab, ladiratuzumab vedotin, simtuzumab, samrotamab vedotin, aselizumab, lupartumab amadotin, imalumab, carlumab, imaprelimab, amatuximab, amatuximab, anetumab ravtansine, narnatumab, clivatuzumab tetraxetan, pemtumomab, gatipotuzumab, ensituximab, lemalesomab, sulesomab, enfortumab vedotin, racotumomab, monalizumab, brontictuzumab, tarextumab, vesencumab, oxelumab, gilvetmab, tislelizumab, dostarlimab, BCD-100, nivolumab, PDR001, pembrolizumab, pidilizumab, retifanlimab, spartalizumab, sintilimab, cemiplimab, olaratumab, tovetumab, rinucumab, atezolizumab, avelumab, durvalumab, lifastuzumab vedotin, bavituximab, acapatamab, capromab, rosopatamab, nezastomig, pasotuxizumab, pelgifatamab, voxalatamab, cofetuzumab pelidotin, denosumab, rosmantuzumab, cirmtuzumab, atinumab, indatuximab ravtansine, elotuzumab, sirtratumab vedotin, sonepcizumab, vandortuzumab vedotin, minretumomab, satumomab pendetide, maslimomab, ontuxizumab, tenatumomab, fresolimumab, metelimumab, lerdelimumab, tezepelumab, etigilimab, tiragotumab, placulumab, prezalumab, infliximab, nerelimomab, ozoralizumab, adalimumab, afelimomab, certolizumab pegol, golimumab, mapatumumab, conatumumab, lexatumumab, tigatuzumab, sacituzumab govitecan, votumumab, pogalizumab, letolizumab, pankomab, anatumomab mafenatox, enavatuzumab, flanvotumab, brolucizumab, ranibizumab, varisacumab, bevacizumab, faricimab, icrucumab, alacizumab pegol, ramucirumab, pritumumab, and onvatilimab;
[6845] VL3 comprises a light chain complementarity determining region 1 (LCDR1), LCDR2, and/or LCDR3 of an antibody selected from the group consisting of losatuxizumab vedotin, utomilumab, urelumab, oleclumab, naptumomab estafenatox, ascrinvacumab, pintumomab, tacatuzumab tetraxetan, nesvacumab, vanucizumab, timolumab, vapaliximab, vepalimomab, enapotamab vedotin, ianalumab, belimumab, tabalumab, tibulizumab, belantamab mafodotin, teclistamab, teclistamab, detumomab, nacolomab tafenatox, eculizumab, lendalizumab, pexelizumab, pozelimab, ravulizumab, tesidolumab, vilobelimab, abagovomab, igovomab, oregovomab, sofituzumab vedotin, cantuzumab mertansine, cantuzuma bravtansine, girentuximab, altumomab pentetate, arcitumomab, besilesomab, bertilimumab, plozalizumab, mogamulizumab, leronlimab, PRO140, rovelizumab, rovelizumab, talacotuzumab, benralizumab, tavolimab, vonlerolizumab, gavilimomab, ziralimumab, fanolesomab, ipilimumab, ruplizumab, toralizumab, dapirolizumab pegol, toralizumab, dapirolizumab pegol, ruplizumab, blinatumomab, inebilizumab, loncastuximab tesirine, SGN-CD19A, tafasitamab, taplitumomab paptox, XMAB-5574, Budoprutug, Obexelimab, duvortuxizumab, englumafusp alfa, Emfizatamab, zeripatamig, siplizumab, blontuvetmab, FBTA05, ibritumomab tiuxetan, obinutuzumab, ocaratuzumab, ocrelizumab, ofatumumab, rituximab, tositumomab, ublituximab, veltuzumab, divozilimab, eramkafusp alfa, ripertamab, zuberitamab, glofitamab, nofetumomab merpentan, samalizumab, imvotamab, odronextamab, plamotamab, bectumomab, inotuzumab ozogamicin, moxetumomab pasudotox, pinatuzumab vedotin, gomiliximab, lumiliximab, inolimomab, inolimomab, daclizumab, camidanluma btesirine, basiliximab, varlilumab, omburtamab, enoblituzumab, vopratelimab, lulizumabpegol, TGN1412, muromonab-CD3, otelixizumab, teplizumab, visilizumab, epcoritamab, epcoritamab, brentuximab vedotin, iratumumab, azintuxizumab vedotin, gemtuzumab ozogamicin, lintuzumab, vadastuximab talirine, naratuximab emtansine, otlertuzumab, lilotomab satetraxetan, tetulomab, daratumumab, isatuximab, foralumab, mosunetuzumab, mosunetuzumab, cedelizumab, ibalizumab, keliximab, priliximab, tregalizumab, zanolimumab, bleselumab, iscalimab, lucatumumab, ravagalimab, selicrelumab, teneliximab, vanalimab, abciximab, bivatuzumab, iomab-B, telimomab aritox, zolimomab aritox, abituzumab, intetumumab, alemtuzumab, tamtuvetmab, lorvotuzumab mertansine, itolizumab, cusatuzumab, vorsetuzumab mafodotin, milatuzumab, iladatuzumab vedotin, polatuzumab vedotin, galiximab, cibisatamab, zolbetuximab, naxitamab, tisotumab vedotin, olendalizumab, pamrevlumab, lacnotuzumab, cabiralizumab, emactuzumab, axatilimab, gimsilumab, lenzilumab, namilumab, tremelimumab, ulocuplumab, tepoditamab, rovalpituzumab tesirine, tarlatamab, demcizumab, navicixizumab, drozitumab, parsatuzumab, depatuxizumab mafodotin, modotuximab, carotuximab, adecatumumab, adecatumumab, oportuzumab monatox, solitomab, tucotuzumab celmoleukin, edrecolomab, catumaxomab, ifabotuzumab, fibatuzumab, zalutumumab, panitumumab, cetuximab, futuximab, imgatuzumab, laprituximab emtansine, matuzumab, necitumumab, nimotuzumab, tomuzotuximab, amivantamab, amivantamab, epitumomab cituxetan, sontuzumab, duligotuzumab, elgemtumab, lumretuzumab, patritumab, seribantumab, zenocutuzumab, sibrotuzumab, burosumab, aprutumab ixadotin, radretumab, pasotuxizumab, farletuzumab, mirvetuximab soravtansine, vantictumab, TRBS07, 3F8, dinutuximab, dinutuximab beta, ecromeximab, mitumomab, andecaliximab, capromab, codrituzumab, glembatumumab vedotin, talquetamab, talquetamab, trevogrumab, indusatumab vedotin, ficlatuzumab, rilotumumab, zatuximab, pentuzimab, pentuzimab, margetuximab, timigutuzumab, trastuzumab, trastuzumab duocarmazine, trastuzumab emtansine, gancotamab, pertuzumab, ertumaxomab, emibetuzumab, telisotuzumab, telisotuzumab vedotin, derlotuximab biotin, apolizumab, onartuzumab, bersanlimab, enlimomabpegol, rontalizumab, sifalimumab, talizumab, ganitumab, istiratumab, robatumumab, teprotumumab, figitumumab, ganitumab, istiratumab, robatumumab, teprotumumab, cixutumumab, dalotuzumab, xentuzumab, dusigitumab, canakinumab, ustekinumab, ustekinumab, ustekinumab, briakinumab, briakinumab, abrezekimab, lebrikizumab, romilkimab, TNX-650, tralokinumab, anrukinzumab, brodalumab, ixekizumab, netakimab, perakizumab, secukinumab, vunakizumab, afasevikumab, afasevikumab, bimekizumab, bimekizumab, remtolumab, bermekimab, lutikizumab, lutikizumab, gevokizumab, cergutuzumab amunaleukin, fletikumab, fezakinumab, brazikumab, guselkumab, mirikizumab, tildrakizumab, risankizumab, flotetuzumab, nemolizumab, pascolizumab, dupilumab, mepolizumab, reslizumab, clazakizumab, elsilimomab, olokizumab, sarilumab, siltuximab, sirukumab, vobarilizumab, tocilizumab, SA237, satralizumab, enokizumab, prezalizumab, natalizumab, abrilumab, abrilumab, vedolizumab, volociximab, tadocizumab, etaracizumab, etrolizumab, spesolimab, vatelizumab, erlizumab, lirilumab, relatlimab, cBR96-doxorubicinimmunoconjugate, odulimomab, efalizumab, ladiratuzumab vedotin, simtuzumab, samrotamab vedotin, aselizumab, lupartumab amadotin, imalumab, carlumab, imaprelimab, amatuximab, amatuximab, anetumab ravtansine, narnatumab, clivatuzumab tetraxetan, pemtumomab, gatipotuzumab, ensituximab, lemalesomab, sulesomab, enfortumab vedotin, racotumomab, monalizumab, brontictuzumab, tarextumab, vesencumab, oxelumab, gilvetmab, tislelizumab, dostarlimab, BCD-100, nivolumab, PDR001, pembrolizumab, pidilizumab, retifanlimab, spartalizumab, sintilimab, cemiplimab, olaratumab, tovetumab, rinucumab, atezolizumab, avelumab, durvalumab, lifastuzumab vedotin, bavituximab, acapatamab, capromab, rosopatamab, nezastomig, pasotuxizumab, pelgifatamab, voxalatamab, cofetuzumab pelidotin, denosumab, rosmantuzumab, cirmtuzumab, atinumab, indatuximab ravtansine, elotuzumab, sirtratumab vedotin, sonepcizumab, vandortuzumab vedotin, minretumomab, satumomab pendetide, maslimomab, ontuxizumab, tenatumomab, fresolimumab, metelimumab, lerdelimumab, tezepelumab, etigilimab, tiragotumab, placulumab, prezalumab, infliximab, nerelimomab, ozoralizumab, adalimumab, afelimomab, certolizumab pegol, golimumab, mapatumumab, conatumumab, lexatumumab, tigatuzumab, sacituzumab govitecan, votumumab, pogalizumab, letolizumab, pankomab, anatumomab mafenatox, enavatuzumab, flanvotumab, brolucizumab, ranibizumab, varisacumab, bevacizumab, faricimab, icrucumab, alacizumab pegol, ramucirumab, pritumumab, and onvatilimab;
[6846] VL4 comprises a light chain complementarity determining region 1 (LCDR1), LCDR2, and/or LCDR3 of an antibody selected from the group consisting of losatuxizumab vedotin, utomilumab, urelumab, oleclumab, naptumomab estafenatox, ascrinvacumab, pintumomab, tacatuzumab tetraxetan, nesvacumab, vanucizumab, timolumab, vapaliximab, vepalimomab, enapotamab vedotin, ianalumab, belimumab, tabalumab, tibulizumab, belantamab mafodotin, teclistamab, teclistamab, detumomab, nacolomab tafenatox, eculizumab, lendalizumab, pexelizumab, pozelimab, ravulizumab, tesidolumab, vilobelimab, abagovomab, igovomab, oregovomab, sofituzumab vedotin, cantuzumab mertansine, cantuzuma bravtansine, girentuximab, altumomab pentetate, arcitumomab, besilesomab, bertilimumab, plozalizumab, mogamulizumab, leronlimab, PRO140, rovelizumab, rovelizumab, talacotuzumab, benralizumab, tavolimab, vonlerolizumab, gavilimomab, ziralimumab, fanolesomab, ipilimumab, ruplizumab, toralizumab, dapirolizumab pegol, toralizumab, dapirolizumab pegol, ruplizumab, blinatumomab, inebilizumab, loncastuximab tesirine, SGN-CD19A, tafasitamab, taplitumomab paptox, XMAB-5574, Budoprutug, Obexelimab, duvortuxizumab, englumafusp alfa, Emfizatamab, zeripatamig, siplizumab, blontuvetmab, FBTA05, ibritumomab tiuxetan, obinutuzumab, ocaratuzumab, ocrelizumab, ofatumumab, rituximab, tositumomab, ublituximab, veltuzumab, divozilimab, eramkafusp alfa, ripertamab, zuberitamab, glofitamab, nofetumomab merpentan, samalizumab, imvotamab, odronextamab, plamotamab, bectumomab, inotuzumab ozogamicin, moxetumomab pasudotox, pinatuzumab vedotin, gomiliximab, lumiliximab, inolimomab, inolimomab, daclizumab, camidanluma btesirine, basiliximab, varlilumab, omburtamab, enoblituzumab, vopratelimab, lulizumabpegol, TGN1412, muromonab-CD3, otelixizumab, teplizumab, visilizumab, epcoritamab, epcoritamab, brentuximab vedotin, iratumumab, azintuxizumab vedotin, gemtuzumab ozogamicin, lintuzumab, vadastuximab talirine, naratuximab emtansine, otlertuzumab, lilotomab satetraxetan, tetulomab, daratumumab, isatuximab, foralumab, mosunetuzumab, mosunetuzumab, cedelizumab, ibalizumab, keliximab, priliximab, tregalizumab, zanolimumab, bleselumab, iscalimab, lucatumumab, ravagalimab, selicrelumab, teneliximab, vanalimab, abciximab, bivatuzumab, iomab-B, telimomab aritox, zolimomab aritox, abituzumab, intetumumab, alemtuzumab, tamtuvetmab, lorvotuzumab mertansine, itolizumab, cusatuzumab, vorsetuzumab mafodotin, milatuzumab, iladatuzumab vedotin, polatuzumab vedotin, galiximab, cibisatamab, zolbetuximab, naxitamab, tisotumab vedotin, olendalizumab, pamrevlumab, lacnotuzumab, cabiralizumab, emactuzumab, axatilimab, gimsilumab, lenzilumab, namilumab, tremelimumab, ulocuplumab, tepoditamab, rovalpituzumab tesirine, tarlatamab, demcizumab, navicixizumab, drozitumab, parsatuzumab, depatuxizumab mafodotin, modotuximab, carotuximab, adecatumumab, adecatumumab, oportuzumab monatox, solitomab, tucotuzumab celmoleukin, edrecolomab, catumaxomab, ifabotuzumab, fibatuzumab, zalutumumab, panitumumab, cetuximab, futuximab, imgatuzumab, laprituximab emtansine, matuzumab, necitumumab, nimotuzumab, tomuzotuximab, amivantamab, amivantamab, epitumomab cituxetan, sontuzumab, duligotuzumab, elgemtumab, lumretuzumab, patritumab, seribantumab, zenocutuzumab, sibrotuzumab, burosumab, aprutumab ixadotin, radretumab, pasotuxizumab, farletuzumab, mirvetuximab soravtansine, vantictumab, TRBS07, 3F8, dinutuximab, dinutuximab beta, ecromeximab, mitumomab, andecaliximab, capromab, codrituzumab, glembatumumab vedotin, talquetamab, talquetamab, trevogrumab, indusatumab vedotin, ficlatuzumab, rilotumumab, zatuximab, pentuzimab, pentuzimab, margetuximab, timigutuzumab, trastuzumab, trastuzumab duocarmazine, trastuzumab emtansine, gancotamab, pertuzumab, ertumaxomab, emibetuzumab, telisotuzumab, telisotuzumab vedotin, derlotuximab biotin, apolizumab, onartuzumab, bersanlimab, enlimomabpegol, rontalizumab, sifalimumab, talizumab, ganitumab, istiratumab, robatumumab, teprotumumab, figitumumab, ganitumab, istiratumab, robatumumab, teprotumumab, cixutumumab, dalotuzumab, xentuzumab, dusigitumab, canakinumab, ustekinumab, ustekinumab, ustekinumab, briakinumab, briakinumab, abrezekimab, lebrikizumab, romilkimab, TNX-650, tralokinumab, anrukinzumab, brodalumab, ixekizumab, netakimab, perakizumab, secukinumab, vunakizumab, afasevikumab, afasevikumab, bimekizumab, bimekizumab, remtolumab, bermekimab, lutikizumab, lutikizumab, gevokizumab, cergutuzumab amunaleukin, fletikumab, fezakinumab, brazikumab, guselkumab, mirikizumab, tildrakizumab, risankizumab, flotetuzumab, nemolizumab, pascolizumab, dupilumab, mepolizumab, reslizumab, clazakizumab, elsilimomab, olokizumab, sarilumab, siltuximab, sirukumab, vobarilizumab, tocilizumab, SA237, satralizumab, enokizumab, prezalizumab, natalizumab, abrilumab, abrilumab, vedolizumab, volociximab, tadocizumab, etaracizumab, etrolizumab, spesolimab, vatelizumab, erlizumab, lirilumab, relatlimab, cBR96-doxorubicinimmunoconjugate, odulimomab, efalizumab, ladiratuzumab vedotin, simtuzumab, samrotamab vedotin, aselizumab, lupartumab amadotin, imalumab, carlumab, imaprelimab, amatuximab, amatuximab, anetumab ravtansine, narnatumab, clivatuzumab tetraxetan, pemtumomab, gatipotuzumab, ensituximab, lemalesomab, sulesomab, enfortumab vedotin, racotumomab, monalizumab, brontictuzumab, tarextumab, vesencumab, oxelumab, gilvetmab, tislelizumab, dostarlimab, BCD-100, nivolumab, PDR001, pembrolizumab, pidilizumab, retifanlimab, spartalizumab, sintilimab, cemiplimab, olaratumab, tovetumab, rinucumab, atezolizumab, avelumab, durvalumab, lifastuzumab vedotin, bavituximab, acapatamab, capromab, rosopatamab, nezastomig, pasotuxizumab, pelgifatamab, voxalatamab, cofetuzumab pelidotin, denosumab, rosmantuzumab, cirmtuzumab, atinumab, indatuximab ravtansine, elotuzumab, sirtratumab vedotin, sonepcizumab, vandortuzumab vedotin, minretumomab, satumomab pendetide, maslimomab, ontuxizumab, tenatumomab, fresolimumab, metelimumab, lerdelimumab, tezepelumab, etigilimab, tiragotumab, placulumab, prezalumab, infliximab, nerelimomab, ozoralizumab, adalimumab, afelimomab, certolizumab pegol, golimumab, mapatumumab, conatumumab, lexatumumab, tigatuzumab, sacituzumab govitecan, votumumab, pogalizumab, letolizumab, pankomab, anatumomab mafenatox, enavatuzumab, flanvotumab, brolucizumab, ranibizumab, varisacumab, bevacizumab, faricimab, icrucumab, alacizumab pegol, ramucirumab, pritumumab, and onvatilimab;
[6847] VH1 comprises a heavy chain complementarity determining region 1 (HCDR1), HCDR2, and/or HCDR3 of an antibody selected from the group consisting of losatuxizumab vedotin, utomilumab, urelumab, oleclumab, naptumomab estafenatox, ascrinvacumab, pintumomab, tacatuzumab tetraxetan, nesvacumab, vanucizumab, timolumab, vapaliximab, vepalimomab, enapotamab vedotin, ianalumab, belimumab, tabalumab, tibulizumab, belantamab mafodotin, teclistamab, teclistamab, detumomab, nacolomab tafenatox, eculizumab, lendalizumab, pexelizumab, pozelimab, ravulizumab, tesidolumab, vilobelimab, abagovomab, igovomab, oregovomab, sofituzumab vedotin, cantuzumab mertansine, cantuzuma bravtansine, girentuximab, altumomab pentetate, arcitumomab, besilesomab, bertilimumab, plozalizumab, mogamulizumab, leronlimab, PRO140, rovelizumab, rovelizumab, talacotuzumab, benralizumab, tavolimab, vonlerolizumab, gavilimomab, ziralimumab, fanolesomab, ipilimumab, ruplizumab, toralizumab, dapirolizumab pegol, toralizumab, dapirolizumab pegol, ruplizumab, blinatumomab, inebilizumab, loncastuximab tesirine, SGN-CD19A, tafasitamab, taplitumomab paptox, XMAB-5574, Budoprutug, Obexelimab, duvortuxizumab, englumafusp alfa, Emfizatamab, zeripatamig, siplizumab, blontuvetmab, FBTA05, ibritumomab tiuxetan, obinutuzumab, ocaratuzumab, ocrelizumab, ofatumumab, rituximab, tositumomab, ublituximab, veltuzumab, divozilimab, eramkafusp alfa, ripertamab, zuberitamab, glofitamab, nofetumomab merpentan, samalizumab, imvotamab, odronextamab, plamotamab, bectumomab, inotuzumab ozogamicin, moxetumomab pasudotox, pinatuzumab vedotin, gomiliximab, lumiliximab, inolimomab, inolimomab, daclizumab, camidanluma btesirine, basiliximab, varlilumab, omburtamab, enoblituzumab, vopratelimab, lulizumabpegol, TGN1412, muromonab-CD3, otelixizumab, teplizumab, visilizumab, epcoritamab, epcoritamab, brentuximab vedotin, iratumumab, azintuxizumab vedotin, gemtuzumab ozogamicin, lintuzumab, vadastuximab talirine, naratuximab emtansine, otlertuzumab, lilotomab satetraxetan, tetulomab, daratumumab, isatuximab, foralumab, mosunetuzumab, mosunetuzumab, cedelizumab, ibalizumab, keliximab, priliximab, tregalizumab, zanolimumab, bleselumab, iscalimab, lucatumumab, ravagalimab, selicrelumab, teneliximab, vanalimab, abciximab, bivatuzumab, iomab-B, telimomab aritox, zolimomab aritox, abituzumab, intetumumab, alemtuzumab, tamtuvetmab, lorvotuzumab mertansine, itolizumab, cusatuzumab, vorsetuzumab mafodotin, milatuzumab, iladatuzumab vedotin, polatuzumab vedotin, galiximab, cibisatamab, zolbetuximab, naxitamab, tisotumab vedotin, olendalizumab, pamrevlumab, lacnotuzumab, cabiralizumab, emactuzumab, axatilimab, gimsilumab, lenzilumab, namilumab, tremelimumab, ulocuplumab, tepoditamab, rovalpituzumab tesirine, tarlatamab, demcizumab, navicixizumab, drozitumab, parsatuzumab, depatuxizumab mafodotin, modotuximab, carotuximab, adecatumumab, adecatumumab, oportuzumab monatox, solitomab, tucotuzumab celmoleukin, edrecolomab, catumaxomab, ifabotuzumab, fibatuzumab, zalutumumab, panitumumab, cetuximab, futuximab, imgatuzumab, laprituximab emtansine, matuzumab, necitumumab, nimotuzumab, tomuzotuximab, amivantamab, amivantamab, epitumomab cituxetan, sontuzumab, duligotuzumab, elgemtumab, lumretuzumab, patritumab, seribantumab, zenocutuzumab, sibrotuzumab, burosumab, aprutumab ixadotin, radretumab, pasotuxizumab, farletuzumab, mirvetuximab soravtansine, vantictumab, TRBS07, 3F8, dinutuximab, dinutuximab beta, ecromeximab, mitumomab, andecaliximab, capromab, codrituzumab, glembatumumab vedotin, talquetamab, talquetamab, trevogrumab, indusatumab vedotin, ficlatuzumab, rilotumumab, zatuximab, pentuzimab, pentuzimab, margetuximab, timigutuzumab, trastuzumab, trastuzumab duocarmazine, trastuzumab emtansine, gancotamab, pertuzumab, ertumaxomab, emibetuzumab, telisotuzumab, telisotuzumab vedotin, derlotuximab biotin, apolizumab, onartuzumab, bersanlimab, enlimomabpegol, rontalizumab, sifalimumab, talizumab, ganitumab, istiratumab, robatumumab, teprotumumab, figitumumab, ganitumab, istiratumab, robatumumab, teprotumumab, cixutumumab, dalotuzumab, xentuzumab, dusigitumab, canakinumab, ustekinumab, ustekinumab, ustekinumab, briakinumab, briakinumab, abrezekimab, lebrikizumab, romilkimab, TNX-650, tralokinumab, anrukinzumab, brodalumab, ixekizumab, netakimab, perakizumab, secukinumab, vunakizumab, afasevikumab, afasevikumab, bimekizumab, bimekizumab, remtolumab, bermekimab, lutikizumab, lutikizumab, gevokizumab, cergutuzumab amunaleukin, fletikumab, fezakinumab, brazikumab, guselkumab, mirikizumab, tildrakizumab, risankizumab, flotetuzumab, nemolizumab, pascolizumab, dupilumab, mepolizumab, reslizumab, clazakizumab, elsilimomab, olokizumab, sarilumab, siltuximab, sirukumab, vobarilizumab, tocilizumab, SA237, satralizumab, enokizumab, prezalizumab, natalizumab, abrilumab, abrilumab, vedolizumab, volociximab, tadocizumab, etaracizumab, etrolizumab, spesolimab, vatelizumab, erlizumab, lirilumab, relatlimab, cBR96-doxorubicinimmunoconjugate, odulimomab, efalizumab, ladiratuzumab vedotin, simtuzumab, samrotamab vedotin, aselizumab, lupartumab amadotin, imalumab, carlumab, imaprelimab, amatuximab, amatuximab, anetumab ravtansine, narnatumab, clivatuzumab tetraxetan, pemtumomab, gatipotuzumab, ensituximab, lemalesomab, sulesomab, enfortumab vedotin, racotumomab, monalizumab, brontictuzumab, tarextumab, vesencumab, oxelumab, gilvetmab, tislelizumab, dostarlimab, BCD-100, nivolumab, PDR001, pembrolizumab, pidilizumab, retifanlimab, spartalizumab, sintilimab, cemiplimab, olaratumab, tovetumab, rinucumab, atezolizumab, avelumab, durvalumab, lifastuzumab vedotin, bavituximab, acapatamab, capromab, rosopatamab, nezastomig, pasotuxizumab, pelgifatamab, voxalatamab, cofetuzumab pelidotin, denosumab, rosmantuzumab, cirmtuzumab, atinumab, indatuximab ravtansine, elotuzumab, sirtratumab vedotin, sonepcizumab, vandortuzumab vedotin, minretumomab, satumomab pendetide, maslimomab, ontuxizumab, tenatumomab, fresolimumab, metelimumab, lerdelimumab, tezepelumab, etigilimab, tiragotumab, placulumab, prezalumab, infliximab, nerelimomab, ozoralizumab, adalimumab, afelimomab, certolizumab pegol, golimumab, mapatumumab, conatumumab, lexatumumab, tigatuzumab, sacituzumab govitecan, votumumab, pogalizumab, letolizumab, pankomab, anatumomab mafenatox, enavatuzumab, flanvotumab, brolucizumab, ranibizumab, varisacumab, bevacizumab, faricimab, icrucumab, alacizumab pegol, ramucirumab, pritumumab, and onvatilimab;
[6848] VH2 comprises a heavy chain complementarity determining region 1 (HCDR1), HCDR2, and/or HCDR3 of an antibody selected from the group consisting of losatuxizumab vedotin, utomilumab, urelumab, oleclumab, naptumomab estafenatox, ascrinvacumab, pintumomab, tacatuzumab tetraxetan, nesvacumab, vanucizumab, timolumab, vapaliximab, vepalimomab, enapotamab vedotin, ianalumab, belimumab, tabalumab, tibulizumab, belantamab mafodotin, teclistamab, teclistamab, detumomab, nacolomab tafenatox, eculizumab, lendalizumab, pexelizumab, pozelimab, ravulizumab, tesidolumab, vilobelimab, abagovomab, igovomab, oregovomab, sofituzumab vedotin, cantuzumab mertansine, cantuzuma bravtansine, girentuximab, altumomab pentetate, arcitumomab, besilesomab, bertilimumab, plozalizumab, mogamulizumab, leronlimab, PRO140, rovelizumab, rovelizumab, talacotuzumab, benralizumab, tavolimab, vonlerolizumab, gavilimomab, ziralimumab, fanolesomab, ipilimumab, ruplizumab, toralizumab, dapirolizumab pegol, toralizumab, dapirolizumab pegol, ruplizumab, blinatumomab, inebilizumab, loncastuximab tesirine, SGN-CD19A, tafasitamab, taplitumomab paptox, XMAB-5574, Budoprutug, Obexelimab, duvortuxizumab, englumafusp alfa, Emfizatamab, zeripatamig, siplizumab, blontuvetmab, FBTA05, ibritumomab tiuxetan, obinutuzumab, ocaratuzumab, ocrelizumab, ofatumumab, rituximab, tositumomab, ublituximab, veltuzumab, divozilimab, eramkafusp alfa, ripertamab, zuberitamab, glofitamab, nofetumomab merpentan, samalizumab, imvotamab, odronextamab, plamotamab, bectumomab, inotuzumab ozogamicin, moxetumomab pasudotox, pinatuzumab vedotin, gomiliximab, lumiliximab, inolimomab, inolimomab, daclizumab, camidanluma btesirine, basiliximab, varlilumab, omburtamab, enoblituzumab, vopratelimab, lulizumabpegol, TGN1412, muromonab-CD3, otelixizumab, teplizumab, visilizumab, epcoritamab, epcoritamab, brentuximab vedotin, iratumumab, azintuxizumab vedotin, gemtuzumab ozogamicin, lintuzumab, vadastuximab talirine, naratuximab emtansine, otlertuzumab, lilotomab satetraxetan, tetulomab, daratumumab, isatuximab, foralumab, mosunetuzumab, mosunetuzumab, cedelizumab, ibalizumab, keliximab, priliximab, tregalizumab, zanolimumab, bleselumab, iscalimab, lucatumumab, ravagalimab, selicrelumab, teneliximab, vanalimab, abciximab, bivatuzumab, iomab-B, telimomab aritox, zolimomab aritox, abituzumab, intetumumab, alemtuzumab, tamtuvetmab, lorvotuzumab mertansine, itolizumab, cusatuzumab, vorsetuzumab mafodotin, milatuzumab, iladatuzumab vedotin, polatuzumab vedotin, galiximab, cibisatamab, zolbetuximab, naxitamab, tisotumab vedotin, olendalizumab, pamrevlumab, lacnotuzumab, cabiralizumab, emactuzumab, axatilimab, gimsilumab, lenzilumab, namilumab, tremelimumab, ulocuplumab, tepoditamab, rovalpituzumab tesirine, tarlatamab, demcizumab, navicixizumab, drozitumab, parsatuzumab, depatuxizumab mafodotin, modotuximab, carotuximab, adecatumumab, adecatumumab, oportuzumab monatox, solitomab, tucotuzumab celmoleukin, edrecolomab, catumaxomab, ifabotuzumab, fibatuzumab, zalutumumab, panitumumab, cetuximab, futuximab, imgatuzumab, laprituximab emtansine, matuzumab, necitumumab, nimotuzumab, tomuzotuximab, amivantamab, amivantamab, epitumomab cituxetan, sontuzumab, duligotuzumab, elgemtumab, lumretuzumab, patritumab, seribantumab, zenocutuzumab, sibrotuzumab, burosumab, aprutumab ixadotin, radretumab, pasotuxizumab, farletuzumab, mirvetuximab soravtansine, vantictumab, TRBS07, 3F8, dinutuximab, dinutuximab beta, ecromeximab, mitumomab, andecaliximab, capromab, codrituzumab, glembatumumab vedotin, talquetamab, talquetamab, trevogrumab, indusatumab vedotin, ficlatuzumab, rilotumumab, zatuximab, pentuzimab, pentuzimab, margetuximab, timigutuzumab, trastuzumab, trastuzumab duocarmazine, trastuzumab emtansine, gancotamab, pertuzumab, ertumaxomab, emibetuzumab, telisotuzumab, telisotuzumab vedotin, derlotuximab biotin, apolizumab, onartuzumab, bersanlimab, enlimomabpegol, rontalizumab, sifalimumab, talizumab, ganitumab, istiratumab, robatumumab, teprotumumab, figitumumab, ganitumab, istiratumab, robatumumab, teprotumumab, cixutumumab, dalotuzumab, xentuzumab, dusigitumab, canakinumab, ustekinumab, ustekinumab, ustekinumab, briakinumab, briakinumab, abrezekimab, lebrikizumab, romilkimab, TNX-650, tralokinumab, anrukinzumab, brodalumab, ixekizumab, netakimab, perakizumab, secukinumab, vunakizumab, afasevikumab, afasevikumab, bimekizumab, bimekizumab, remtolumab, bermekimab, lutikizumab, lutikizumab, gevokizumab, cergutuzumab amunaleukin, fletikumab, fezakinumab, brazikumab, guselkumab, mirikizumab, tildrakizumab, risankizumab, flotetuzumab, nemolizumab, pascolizumab, dupilumab, mepolizumab, reslizumab, clazakizumab, elsilimomab, olokizumab, sarilumab, siltuximab, sirukumab, vobarilizumab, tocilizumab, SA237, satralizumab, enokizumab, prezalizumab, natalizumab, abrilumab, abrilumab, vedolizumab, volociximab, tadocizumab, etaracizumab, etrolizumab, spesolimab, vatelizumab, erlizumab, lirilumab, relatlimab, cBR96-doxorubicinimmunoconjugate, odulimomab, efalizumab, ladiratuzumab vedotin, simtuzumab, samrotamab vedotin, aselizumab, lupartumab amadotin, imalumab, carlumab, imaprelimab, amatuximab, amatuximab, anetumab ravtansine, narnatumab, clivatuzumab tetraxetan, pemtumomab, gatipotuzumab, ensituximab, lemalesomab, sulesomab, enfortumab vedotin, racotumomab, monalizumab, brontictuzumab, tarextumab, vesencumab, oxelumab, gilvetmab, tislelizumab, dostarlimab, BCD-100, nivolumab, PDR001, pembrolizumab, pidilizumab, retifanlimab, spartalizumab, sintilimab, cemiplimab, olaratumab, tovetumab, rinucumab, atezolizumab, avelumab, durvalumab, lifastuzumab vedotin, bavituximab, acapatamab, capromab, rosopatamab, nezastomig, pasotuxizumab, pelgifatamab, voxalatamab, cofetuzumab pelidotin, denosumab, rosmantuzumab, cirmtuzumab, atinumab, indatuximab ravtansine, elotuzumab, sirtratumab vedotin, sonepcizumab, vandortuzumab vedotin, minretumomab, satumomab pendetide, maslimomab, ontuxizumab, tenatumomab, fresolimumab, metelimumab, lerdelimumab, tezepelumab, etigilimab, tiragotumab, placulumab, prezalumab, infliximab, nerelimomab, ozoralizumab, adalimumab, afelimomab, certolizumab pegol, golimumab, mapatumumab, conatumumab, lexatumumab, tigatuzumab, sacituzumab govitecan, votumumab, pogalizumab, letolizumab, pankomab, anatumomab mafenatox, enavatuzumab, flanvotumab, brolucizumab, ranibizumab, varisacumab, bevacizumab, faricimab, icrucumab, alacizumab pegol, ramucirumab, pritumumab, and onvatilimab;
[6849] VH3 comprises a heavy chain complementarity determining region 1 (HCDR1), HCDR2, and/or HCDR3 of an antibody selected from the group consisting of losatuxizumab vedotin, utomilumab, urelumab, oleclumab, naptumomab estafenatox, ascrinvacumab, pintumomab, tacatuzumab tetraxetan, nesvacumab, vanucizumab, timolumab, vapaliximab, vepalimomab, enapotamab vedotin, ianalumab, belimumab, tabalumab, tibulizumab, belantamab mafodotin, teclistamab, teclistamab, detumomab, nacolomab tafenatox, eculizumab, lendalizumab, pexelizumab, pozelimab, ravulizumab, tesidolumab, vilobelimab, abagovomab, igovomab, oregovomab, sofituzumab vedotin, cantuzumab mertansine, cantuzuma bravtansine, girentuximab, altumomab pentetate, arcitumomab, besilesomab, bertilimumab, plozalizumab, mogamulizumab, leronlimab, PRO140, rovelizumab, rovelizumab, talacotuzumab, benralizumab, tavolimab, vonlerolizumab, gavilimomab, ziralimumab, fanolesomab, ipilimumab, ruplizumab, toralizumab, dapirolizumab pegol, toralizumab, dapirolizumab pegol, ruplizumab, blinatumomab, inebilizumab, loncastuximab tesirine, SGN-CD19A, tafasitamab, taplitumomab paptox, XMAB-5574, Budoprutug, Obexelimab, duvortuxizumab, englumafusp alfa, Emfizatamab, zeripatamig, siplizumab, blontuvetmab, FBTA05, ibritumomab tiuxetan, obinutuzumab, ocaratuzumab, ocrelizumab, ofatumumab, rituximab, tositumomab, ublituximab, veltuzumab, divozilimab, eramkafusp alfa, ripertamab, zuberitamab, glofitamab, nofetumomab merpentan, samalizumab, imvotamab, odronextamab, plamotamab, bectumomab, inotuzumab ozogamicin, moxetumomab pasudotox, pinatuzumab vedotin, gomiliximab, lumiliximab, inolimomab, inolimomab, daclizumab, camidanluma btesirine, basiliximab, varlilumab, omburtamab, enoblituzumab, vopratelimab, lulizumabpegol, TGN1412, muromonab-CD3, otelixizumab, teplizumab, visilizumab, epcoritamab, epcoritamab, brentuximab vedotin, iratumumab, azintuxizumab vedotin, gemtuzumab ozogamicin, lintuzumab, vadastuximab talirine, naratuximab emtansine, otlertuzumab, lilotomab satetraxetan, tetulomab, daratumumab, isatuximab, foralumab, mosunetuzumab, mosunetuzumab, cedelizumab, ibalizumab, keliximab, priliximab, tregalizumab, zanolimumab, bleselumab, iscalimab, lucatumumab, ravagalimab, selicrelumab, teneliximab, vanalimab, abciximab, bivatuzumab, iomab-B, telimomab aritox, zolimomab aritox, abituzumab, intetumumab, alemtuzumab, tamtuvetmab, lorvotuzumab mertansine, itolizumab, cusatuzumab, vorsetuzumab mafodotin, milatuzumab, iladatuzumab vedotin, polatuzumab vedotin, galiximab, cibisatamab, zolbetuximab, naxitamab, tisotumab vedotin, olendalizumab, pamrevlumab, lacnotuzumab, cabiralizumab, emactuzumab, axatilimab, gimsilumab, lenzilumab, namilumab, tremelimumab, ulocuplumab, tepoditamab, rovalpituzumab tesirine, tarlatamab, demcizumab, navicixizumab, drozitumab, parsatuzumab, depatuxizumab mafodotin, modotuximab, carotuximab, adecatumumab, adecatumumab, oportuzumab monatox, solitomab, tucotuzumab celmoleukin, edrecolomab, catumaxomab, ifabotuzumab, fibatuzumab, zalutumumab, panitumumab, cetuximab, futuximab, imgatuzumab, laprituximab emtansine, matuzumab, necitumumab, nimotuzumab, tomuzotuximab, amivantamab, amivantamab, epitumomab cituxetan, sontuzumab, duligotuzumab, elgemtumab, lumretuzumab, patritumab, seribantumab, zenocutuzumab, sibrotuzumab, burosumab, aprutumab ixadotin, radretumab, pasotuxizumab, farletuzumab, mirvetuximab soravtansine, vantictumab, TRBS07, 3F8, dinutuximab, dinutuximab beta, ecromeximab, mitumomab, andecaliximab, capromab, codrituzumab, glembatumumab vedotin, talquetamab, talquetamab, trevogrumab, indusatumab vedotin, ficlatuzumab, rilotumumab, zatuximab, pentuzimab, pentuzimab, margetuximab, timigutuzumab, trastuzumab, trastuzumab duocarmazine, trastuzumab emtansine, gancotamab, pertuzumab, ertumaxomab, emibetuzumab, telisotuzumab, telisotuzumab vedotin, derlotuximab biotin, apolizumab, onartuzumab, bersanlimab, enlimomabpegol, rontalizumab, sifalimumab, talizumab, ganitumab, istiratumab, robatumumab, teprotumumab, figitumumab, ganitumab, istiratumab, robatumumab, teprotumumab, cixutumumab, dalotuzumab, xentuzumab, dusigitumab, canakinumab, ustekinumab, ustekinumab, ustekinumab, briakinumab, briakinumab, abrezekimab, lebrikizumab, romilkimab, TNX-650, tralokinumab, anrukinzumab, brodalumab, ixekizumab, netakimab, perakizumab, secukinumab, vunakizumab, afasevikumab, afasevikumab, bimekizumab, bimekizumab, remtolumab, bermekimab, lutikizumab, lutikizumab, gevokizumab, cergutuzumab amunaleukin, fletikumab, fezakinumab, brazikumab, guselkumab, mirikizumab, tildrakizumab, risankizumab, flotetuzumab, nemolizumab, pascolizumab, dupilumab, mepolizumab, reslizumab, clazakizumab, elsilimomab, olokizumab, sarilumab, siltuximab, sirukumab, vobarilizumab, tocilizumab, SA237, satralizumab, enokizumab, prezalizumab, natalizumab, abrilumab, abrilumab, vedolizumab, volociximab, tadocizumab, etaracizumab, etrolizumab, spesolimab, vatelizumab, erlizumab, lirilumab, relatlimab, cBR96-doxorubicinimmunoconjugate, odulimomab, efalizumab, ladiratuzumab vedotin, simtuzumab, samrotamab vedotin, aselizumab, lupartumab amadotin, imalumab, carlumab, imaprelimab, amatuximab, amatuximab, anetumab ravtansine, narnatumab, clivatuzumab tetraxetan, pemtumomab, gatipotuzumab, ensituximab, lemalesomab, sulesomab, enfortumab vedotin, racotumomab, monalizumab, brontictuzumab, tarextumab, vesencumab, oxelumab, gilvetmab, tislelizumab, dostarlimab, BCD-100, nivolumab, PDR001, pembrolizumab, pidilizumab, retifanlimab, spartalizumab, sintilimab, cemiplimab, olaratumab, tovetumab, rinucumab, atezolizumab, avelumab, durvalumab, lifastuzumab vedotin, bavituximab, acapatamab, capromab, rosopatamab, nezastomig, pasotuxizumab, pelgifatamab, voxalatamab, cofetuzumab pelidotin, denosumab, rosmantuzumab, cirmtuzumab, atinumab, indatuximab ravtansine, elotuzumab, sirtratumab vedotin, sonepcizumab, vandortuzumab vedotin, minretumomab, satumomab pendetide, maslimomab, ontuxizumab, tenatumomab, fresolimumab, metelimumab, lerdelimumab, tezepelumab, etigilimab, tiragotumab, placulumab, prezalumab, infliximab, nerelimomab, ozoralizumab, adalimumab, afelimomab, certolizumab pegol, golimumab, mapatumumab, conatumumab, lexatumumab, tigatuzumab, sacituzumab govitecan, votumumab, pogalizumab, letolizumab, pankomab, anatumomab mafenatox, enavatuzumab, flanvotumab, brolucizumab, ranibizumab, varisacumab, bevacizumab, faricimab, icrucumab, alacizumab pegol, ramucirumab, pritumumab, and onvatilimab; and/or
[6850] VH4 comprises a heavy chain complementarity determining region 1 (HCDR1), HCDR2, and/or HCDR3 of an antibody selected from the group consisting of losatuxizumab vedotin, utomilumab, urelumab, oleclumab, naptumomab estafenatox, ascrinvacumab, pintumomab, tacatuzumab tetraxetan, nesvacumab, vanucizumab, timolumab, vapaliximab, vepalimomab, enapotamab vedotin, ianalumab, belimumab, tabalumab, tibulizumab, belantamab mafodotin, teclistamab, teclistamab, detumomab, nacolomab tafenatox, eculizumab, lendalizumab, pexelizumab, pozelimab, ravulizumab, tesidolumab, vilobelimab, abagovomab, igovomab, oregovomab, sofituzumab vedotin, cantuzumab mertansine, cantuzuma bravtansine, girentuximab, altumomab pentetate, arcitumomab, besilesomab, bertilimumab, plozalizumab, mogamulizumab, leronlimab, PRO140, rovelizumab, rovelizumab, talacotuzumab, benralizumab, tavolimab, vonlerolizumab, gavilimomab, ziralimumab, fanolesomab, ipilimumab, ruplizumab, toralizumab, dapirolizumab pegol, toralizumab, dapirolizumab pegol, ruplizumab, blinatumomab, inebilizumab, loncastuximab tesirine, SGN-CD19A, tafasitamab, taplitumomab paptox, XMAB-5574, Budoprutug, Obexclimab, duvortuxizumab, englumafusp alfa, Emfizatamab, zeripatamig, siplizumab, blontuvetmab, FBTA05, ibritumomab tiuxetan, obinutuzumab, ocaratuzumab, ocrelizumab, ofatumumab, rituximab, tositumomab, ublituximab, veltuzumab, divozilimab, eramkafusp alfa, ripertamab, zuberitamab, glofitamab, nofetumomab merpentan, samalizumab, imvotamab, odronextamab, plamotamab, bectumomab, inotuzumab ozogamicin, moxetumomab pasudotox, pinatuzumab vedotin, gomiliximab, lumiliximab, inolimomab, inolimomab, daclizumab, camidanluma btesirine, basiliximab, varlilumab, omburtamab, enoblituzumab, vopratelimab, lulizumabpegol, TGN1412, muromonab-CD3, otelixizumab, teplizumab, visilizumab, epcoritamab, epcoritamab, brentuximab vedotin, iratumumab, azintuxizumab vedotin, gemtuzumab ozogamicin, lintuzumab, vadastuximab talirine, naratuximab emtansine, otlertuzumab, lilotomab satetraxetan, tetulomab, daratumumab, isatuximab, foralumab, mosunetuzumab, mosunetuzumab, cedelizumab, ibalizumab, keliximab, priliximab, tregalizumab, zanolimumab, bleselumab, iscalimab, lucatumumab, ravagalimab, selicrelumab, teneliximab, vanalimab, abciximab, bivatuzumab, iomab-B, telimomab aritox, zolimomab aritox, abituzumab, intetumumab, alemtuzumab, tamtuvetmab, lorvotuzumab mertansine, itolizumab, cusatuzumab, vorsetuzumab mafodotin, milatuzumab, iladatuzumab vedotin, polatuzumab vedotin, galiximab, cibisatamab, zolbetuximab, naxitamab, tisotumab vedotin, olendalizumab, pamrevlumab, lacnotuzumab, cabiralizumab, emactuzumab, axatilimab, gimsilumab, lenzilumab, namilumab, tremelimumab, ulocuplumab, tepoditamab, rovalpituzumab tesirine, tarlatamab, demcizumab, navicixizumab, drozitumab, parsatuzumab, depatuxizumab mafodotin, modotuximab, carotuximab, adecatumumab, adecatumumab, oportuzumab monatox, solitomab, tucotuzumab celmoleukin, edrecolomab, catumaxomab, ifabotuzumab, fibatuzumab, zalutumumab, panitumumab, cetuximab, futuximab, imgatuzumab, laprituximab emtansine, matuzumab, necitumumab, nimotuzumab, tomuzotuximab, amivantamab, amivantamab, epitumomab cituxetan, sontuzumab, duligotuzumab, elgemtumab, lumretuzumab, patritumab, seribantumab, zenocutuzumab, sibrotuzumab, burosumab, aprutumab ixadotin, radretumab, pasotuxizumab, farletuzumab, mirvetuximab soravtansine, vantictumab, TRBS07, 3F8, dinutuximab, dinutuximab beta, ecromeximab, mitumomab, andecaliximab, capromab, codrituzumab, glembatumumab vedotin, talquetamab, talquetamab, trevogrumab, indusatumab vedotin, ficlatuzumab, rilotumumab, zatuximab, pentuzimab, pentuzimab, margetuximab, timigutuzumab, trastuzumab, trastuzumab duocarmazine, trastuzumab emtansine, gancotamab, pertuzumab, ertumaxomab, emibetuzumab, telisotuzumab, telisotuzumab vedotin, derlotuximab biotin, apolizumab, onartuzumab, bersanlimab, enlimomabpegol, rontalizumab, sifalimumab, talizumab, ganitumab, istiratumab, robatumumab, teprotumumab, figitumumab, ganitumab, istiratumab, robatumumab, teprotumumab, cixutumumab, dalotuzumab, xentuzumab, dusigitumab, canakinumab, ustekinumab, ustekinumab, ustekinumab, briakinumab, briakinumab, abrezekimab, lebrikizumab, romilkimab, TNX-650, tralokinumab, anrukinzumab, brodalumab, ixekizumab, netakimab, perakizumab, secukinumab, vunakizumab, afasevikumab, afasevikumab, bimekizumab, bimekizumab, remtolumab, bermekimab, lutikizumab, lutikizumab, gevokizumab, cergutuzumab amunaleukin, fletikumab, fezakinumab, brazikumab, guselkumab, mirikizumab, tildrakizumab, risankizumab, flotetuzumab, nemolizumab, pascolizumab, dupilumab, mepolizumab, reslizumab, clazakizumab, elsilimomab, olokizumab, sarilumab, siltuximab, sirukumab, vobarilizumab, tocilizumab, SA237, satralizumab, enokizumab, prezalizumab, natalizumab, abrilumab, abrilumab, vedolizumab, volociximab, tadocizumab, etaracizumab, etrolizumab, spesolimab, vatelizumab, erlizumab, lirilumab, relatlimab, cBR96-doxorubicinimmunoconjugate, odulimomab, efalizumab, ladiratuzumab vedotin, simtuzumab, samrotamab vedotin, aselizumab, lupartumab amadotin, imalumab, carlumab, imaprelimab, amatuximab, amatuximab, anetumab ravtansine, narnatumab, clivatuzumab tetraxetan, pemtumomab, gatipotuzumab, ensituximab, lemalesomab, sulesomab, enfortumab vedotin, racotumomab, monalizumab, brontictuzumab, tarextumab, vesencumab, oxelumab, gilvetmab, tislelizumab, dostarlimab, BCD-100, nivolumab, PDR001, pembrolizumab, pidilizumab, retifanlimab, spartalizumab, sintilimab, cemiplimab, olaratumab, tovetumab, rinucumab, atezolizumab, avelumab, durvalumab, lifastuzumab vedotin, bavituximab, acapatamab, capromab, rosopatamab, nezastomig, pasotuxizumab, pelgifatamab, voxalatamab, cofetuzumab pelidotin, denosumab, rosmantuzumab, cirmtuzumab, atinumab, indatuximab ravtansine, elotuzumab, sirtratumab vedotin, sonepcizumab, vandortuzumab vedotin, minretumomab, satumomab pendetide, maslimomab, ontuxizumab, tenatumomab, fresolimumab, metelimumab, lerdelimumab, tezepelumab, etigilimab, tiragotumab, placulumab, prezalumab, infliximab, nerelimomab, ozoralizumab, adalimumab, afelimomab, certolizumab pegol, golimumab, mapatumumab, conatumumab, lexatumumab, tigatuzumab, sacituzumab govitecan, votumumab, pogalizumab, letolizumab, pankomab, anatumomab mafenatox, enavatuzumab, flanvotumab, brolucizumab, ranibizumab, varisacumab, bevacizumab, faricimab, icrucumab, alacizumab pegol, ramucirumab, pritumumab, and onvatilimab; or
[6851] (ii)
[6852] VL1 comprises a VL of an antibody selected from the group consisting of losatuxizumab vedotin, utomilumab, urelumab, oleclumab, naptumomab estafenatox, ascrinvacumab, pintumomab, tacatuzumab tetraxetan, nesvacumab, vanucizumab, timolumab, vapaliximab, vepalimomab, enapotamab vedotin, ianalumab, belimumab, tabalumab, tibulizumab, belantamab mafodotin, teclistamab, teclistamab, detumomab, nacolomab tafenatox, eculizumab, lendalizumab, pexelizumab, pozelimab, ravulizumab, tesidolumab, vilobelimab, abagovomab, igovomab, oregovomab, sofituzumab vedotin, cantuzumab mertansine, cantuzuma bravtansine, girentuximab, altumomab pentetate, arcitumomab, besilesomab, bertilimumab, plozalizumab, mogamulizumab, leronlimab, PRO140, rovelizumab, rovelizumab, talacotuzumab, benralizumab, tavolimab, vonlerolizumab, gavilimomab, ziralimumab, fanolesomab, ipilimumab, ruplizumab, toralizumab, dapirolizumab pegol, toralizumab, dapirolizumab pegol, ruplizumab, blinatumomab, inebilizumab, loncastuximab tesirine, SGN-CD19A, tafasitamab, taplitumomab paptox, XMAB-5574, Budoprutug, Obexelimab, duvortuxizumab, englumafusp alfa, Emfizatamab, zeripatamig, siplizumab, blontuvetmab, FBTA05, ibritumomab tiuxetan, obinutuzumab, ocaratuzumab, ocrelizumab, ofatumumab, rituximab, tositumomab, ublituximab, veltuzumab, divozilimab, eramkafusp alfa, ripertamab, zuberitamab, glofitamab, nofetumomab merpentan, samalizumab, imvotamab, odronextamab, plamotamab, bectumomab, inotuzumab ozogamicin, moxetumomab pasudotox, pinatuzumab vedotin, gomiliximab, lumiliximab, inolimomab, inolimomab, daclizumab, camidanluma btesirine, basiliximab, varlilumab, omburtamab, enoblituzumab, vopratelimab, lulizumabpegol, TGN1412, muromonab-CD3, otelixizumab, teplizumab, visilizumab, epcoritamab, epcoritamab, brentuximab vedotin, iratumumab, azintuxizumab vedotin, gemtuzumab ozogamicin, lintuzumab, vadastuximab talirine, naratuximab emtansine, otlertuzumab, lilotomab satetraxetan, tetulomab, daratumumab, isatuximab, foralumab, mosunetuzumab, mosunetuzumab, cedelizumab, ibalizumab, keliximab, priliximab, tregalizumab, zanolimumab, bleselumab, iscalimab, lucatumumab, ravagalimab, selicrelumab, teneliximab, vanalimab, abciximab, bivatuzumab, iomab-B, telimomab aritox, zolimomab aritox, abituzumab, intetumumab, alemtuzumab, tamtuvetmab, lorvotuzumab mertansine, itolizumab, cusatuzumab, vorsetuzumab mafodotin, milatuzumab, iladatuzumab vedotin, polatuzumab vedotin, galiximab, cibisatamab, zolbetuximab, naxitamab, tisotumab vedotin, olendalizumab, pamrevlumab, lacnotuzumab, cabiralizumab, emactuzumab, axatilimab, gimsilumab, lenzilumab, namilumab, tremelimumab, ulocuplumab, tepoditamab, rovalpituzumab tesirine, tarlatamab, demcizumab, navicixizumab, drozitumab, parsatuzumab, depatuxizumab mafodotin, modotuximab, carotuximab, adecatumumab, adecatumumab, oportuzumab monatox, solitomab, tucotuzumab celmoleukin, edrecolomab, catumaxomab, ifabotuzumab, fibatuzumab, zalutumumab, panitumumab, cetuximab, futuximab, imgatuzumab, laprituximab emtansine, matuzumab, necitumumab, nimotuzumab, tomuzotuximab, amivantamab, amivantamab, epitumomab cituxetan, sontuzumab, duligotuzumab, elgemtumab, lumretuzumab, patritumab, seribantumab, zenocutuzumab, sibrotuzumab, burosumab, aprutumab ixadotin, radretumab, pasotuxizumab, farletuzumab, mirvetuximab soravtansine, vantictumab, TRBS07, 3F8, dinutuximab, dinutuximab beta, ecromeximab, mitumomab, andecaliximab, capromab, codrituzumab, glembatumumab vedotin, talquetamab, talquetamab, trevogrumab, indusatumab vedotin, ficlatuzumab, rilotumumab, zatuximab, pentuzimab, pentuzimab, margetuximab, timigutuzumab, trastuzumab, trastuzumab duocarmazine, trastuzumab emtansine, gancotamab, pertuzumab, ertumaxomab, emibetuzumab, telisotuzumab, telisotuzumab vedotin, derlotuximab biotin, apolizumab, onartuzumab, bersanlimab, enlimomabpegol, rontalizumab, sifalimumab, talizumab, ganitumab, istiratumab, robatumumab, teprotumumab, figitumumab, ganitumab, istiratumab, robatumumab, teprotumumab, cixutumumab, dalotuzumab, xentuzumab, dusigitumab, canakinumab, ustekinumab, ustekinumab, ustekinumab, briakinumab, briakinumab, abrezekimab, lebrikizumab, romilkimab, TNX-650, tralokinumab, anrukinzumab, brodalumab, ixekizumab, netakimab, perakizumab, secukinumab, vunakizumab, afasevikumab, afascvikumab, bimekizumab, bimekizumab, remtolumab, bermekimab, lutikizumab, lutikizumab, gevokizumab, cergutuzumab amunaleukin, fletikumab, fezakinumab, brazikumab, guselkumab, mirikizumab, tildrakizumab, risankizumab, flotetuzumab, nemolizumab, pascolizumab, dupilumab, mepolizumab, reslizumab, clazakizumab, elsilimomab, olokizumab, sarilumab, siltuximab, sirukumab, vobarilizumab, tocilizumab, SA237, satralizumab, enokizumab, prezalizumab, natalizumab, abrilumab, abrilumab, vedolizumab, volociximab, tadocizumab, etaracizumab, etrolizumab, spesolimab, vatelizumab, erlizumab, lirilumab, relatlimab, cBR96-doxorubicinimmunoconjugate, odulimomab, efalizumab, ladiratuzumab vedotin, simtuzumab, samrotamab vedotin, aselizumab, lupartumab amadotin, imalumab, carlumab, imaprelimab, amatuximab, amatuximab, anetumab ravtansine, narnatumab, clivatuzumab tetraxetan, pemtumomab, gatipotuzumab, ensituximab, lemalesomab, sulesomab, enfortumab vedotin, racotumomab, monalizumab, brontictuzumab, tarextumab, vesencumab, oxelumab, gilvetmab, tislelizumab, dostarlimab, BCD-100, nivolumab, PDR001, pembrolizumab, pidilizumab, retifanlimab, spartalizumab, sintilimab, cemiplimab, olaratumab, tovetumab, rinucumab, atezolizumab, avelumab, durvalumab, lifastuzumab vedotin, bavituximab, acapatamab, capromab, rosopatamab, nezastomig, pasotuxizumab, pelgifatamab, voxalatamab, cofetuzumab pelidotin, denosumab, rosmantuzumab, cirmtuzumab, atinumab, indatuximab ravtansine, elotuzumab, sirtratumab vedotin, sonepcizumab, vandortuzumab vedotin, minretumomab, satumomab pendetide, maslimomab, ontuxizumab, tenatumomab, fresolimumab, metelimumab, lerdelimumab, tezepelumab, etigilimab, tiragotumab, placulumab, prezalumab, infliximab, nerelimomab, ozoralizumab, adalimumab, afelimomab, certolizumab pegol, golimumab, mapatumumab, conatumumab, lexatumumab, tigatuzumab, sacituzumab govitecan, votumumab, pogalizumab, letolizumab, pankomab, anatumomab mafenatox, enavatuzumab, flanvotumab, brolucizumab, ranibizumab, varisacumab, bevacizumab, faricimab, icrucumab, alacizumab pegol, ramucirumab, pritumumab, and onvatilimab;
[6853] VL2 comprises a VL of an antibody selected from the group consisting of losatuxizumab vedotin, utomilumab, urelumab, oleclumab, naptumomab estafenatox, ascrinvacumab, pintumomab, tacatuzumab tetraxetan, nesvacumab, vanucizumab, timolumab, vapaliximab, vepalimomab, enapotamab vedotin, ianalumab, belimumab, tabalumab, tibulizumab, belantamab mafodotin, teclistamab, teclistamab, detumomab, nacolomab tafenatox, eculizumab, lendalizumab, pexelizumab, pozelimab, ravulizumab, tesidolumab, vilobelimab, abagovomab, igovomab, oregovomab, sofituzumab vedotin, cantuzumab mertansine, cantuzuma bravtansine, girentuximab, altumomab pentetate, arcitumomab, besilesomab, bertilimumab, plozalizumab, mogamulizumab, leronlimab, PRO140, rovelizumab, rovelizumab, talacotuzumab, benralizumab, tavolimab, vonlerolizumab, gavilimomab, ziralimumab, fanolesomab, ipilimumab, ruplizumab, toralizumab, dapirolizumab pegol, toralizumab, dapirolizumab pegol, ruplizumab, blinatumomab, inebilizumab, loncastuximab tesirine, SGN-CD19A, tafasitamab, taplitumomab paptox, XMAB-5574, Budoprutug, Obexelimab, duvortuxizumab, englumafusp alfa, Emfizatamab, zeripatamig, siplizumab, blontuvetmab, FBTA05, ibritumomab tiuxetan, obinutuzumab, ocaratuzumab, ocrelizumab, ofatumumab, rituximab, tositumomab, ublituximab, veltuzumab, divozilimab, eramkafusp alfa, ripertamab, zuberitamab, glofitamab, nofetumomab merpentan, samalizumab, imvotamab, odronextamab, plamotamab, bectumomab, inotuzumab ozogamicin, moxetumomab pasudotox, pinatuzumab vedotin, gomiliximab, lumiliximab, inolimomab, inolimomab, daclizumab, camidanluma btesirine, basiliximab, varlilumab, omburtamab, enoblituzumab, vopratelimab, lulizumabpegol, TGN1412, muromonab-CD3, otelixizumab, teplizumab, visilizumab, epcoritamab, epcoritamab, brentuximab vedotin, iratumumab, azintuxizumab vedotin, gemtuzumab ozogamicin, lintuzumab, vadastuximab talirine, naratuximab emtansine, otlertuzumab, lilotomab satetraxetan, tetulomab, daratumumab, isatuximab, foralumab, mosunetuzumab, mosunetuzumab, cedelizumab, ibalizumab, keliximab, priliximab, tregalizumab, zanolimumab, bleselumab, iscalimab, lucatumumab, ravagalimab, selicrelumab, teneliximab, vanalimab, abciximab, bivatuzumab, iomab-B, telimomab aritox, zolimomab aritox, abituzumab, intetumumab, alemtuzumab, tamtuvetmab, lorvotuzumab mertansine, itolizumab, cusatuzumab, vorsetuzumab mafodotin, milatuzumab, iladatuzumab vedotin, polatuzumab vedotin, galiximab, cibisatamab, zolbetuximab, naxitamab, tisotumab vedotin, olendalizumab, pamrevlumab, lacnotuzumab, cabiralizumab, emactuzumab, axatilimab, gimsilumab, lenzilumab, namilumab, tremelimumab, ulocuplumab, tepoditamab, rovalpituzumab tesirine, tarlatamab, demcizumab, navicixizumab, drozitumab, parsatuzumab, depatuxizumab mafodotin, modotuximab, carotuximab, adecatumumab, adecatumumab, oportuzumab monatox, solitomab, tucotuzumab celmoleukin, edrecolomab, catumaxomab, ifabotuzumab, fibatuzumab, zalutumumab, panitumumab, cetuximab, futuximab, imgatuzumab, laprituximab emtansine, matuzumab, necitumumab, nimotuzumab, tomuzotuximab, amivantamab, amivantamab, epitumomab cituxetan, sontuzumab, duligotuzumab, elgemtumab, lumretuzumab, patritumab, seribantumab, zenocutuzumab, sibrotuzumab, burosumab, aprutumab ixadotin, radretumab, pasotuxizumab, farletuzumab, mirvetuximab soravtansine, vantictumab, TRBS07, 3F8, dinutuximab, dinutuximab beta, ecromeximab, mitumomab, andecaliximab, capromab, codrituzumab, glembatumumab vedotin, talquetamab, talquetamab, trevogrumab, indusatumab vedotin, ficlatuzumab, rilotumumab, zatuximab, pentuzimab, pentuzimab, margetuximab, timigutuzumab, trastuzumab, trastuzumab duocarmazine, trastuzumab emtansine, gancotamab, pertuzumab, ertumaxomab, emibetuzumab, telisotuzumab, telisotuzumab vedotin, derlotuximab biotin, apolizumab, onartuzumab, bersanlimab, enlimomabpegol, rontalizumab, sifalimumab, talizumab, ganitumab, istiratumab, robatumumab, teprotumumab, figitumumab, ganitumab, istiratumab, robatumumab, teprotumumab, cixutumumab, dalotuzumab, xentuzumab, dusigitumab, canakinumab, ustekinumab, ustekinumab, ustekinumab, briakinumab, briakinumab, abrezekimab, lebrikizumab, romilkimab, TNX-650, tralokinumab, anrukinzumab, brodalumab, ixekizumab, netakimab, perakizumab, secukinumab, vunakizumab, afasevikumab, afasevikumab, bimekizumab, bimekizumab, remtolumab, bermekimab, lutikizumab, lutikizumab, gevokizumab, cergutuzumab amunaleukin, fletikumab, fezakinumab, brazikumab, guselkumab, mirikizumab, tildrakizumab, risankizumab, flotetuzumab, nemolizumab, pascolizumab, dupilumab, mepolizumab, reslizumab, clazakizumab, elsilimomab, olokizumab, sarilumab, siltuximab, sirukumab, vobarilizumab, tocilizumab, SA237, satralizumab, enokizumab, prezalizumab, natalizumab, abrilumab, abrilumab, vedolizumab, volociximab, tadocizumab, etaracizumab, etrolizumab, spesolimab, vatelizumab, erlizumab, lirilumab, relatlimab, cBR96-doxorubicinimmunoconjugate, odulimomab, efalizumab, ladiratuzumab vedotin, simtuzumab, samrotamab vedotin, aselizumab, lupartumab amadotin, imalumab, carlumab, imaprelimab, amatuximab, amatuximab, anetumab ravtansine, narnatumab, clivatuzumab tetraxetan, pemtumomab, gatipotuzumab, ensituximab, lemalesomab, sulesomab, enfortumab vedotin, racotumomab, monalizumab, brontictuzumab, tarextumab, vesencumab, oxelumab, gilvetmab, tislelizumab, dostarlimab, BCD-100, nivolumab, PDR001, pembrolizumab, pidilizumab, retifanlimab, spartalizumab, sintilimab, cemiplimab, olaratumab, tovetumab, rinucumab, atezolizumab, avelumab, durvalumab, lifastuzumab vedotin, bavituximab, acapatamab, capromab, rosopatamab, nezastomig, pasotuxizumab, pelgifatamab, voxalatamab, cofetuzumab pelidotin, denosumab, rosmantuzumab, cirmtuzumab, atinumab, indatuximab ravtansine, elotuzumab, sirtratumab vedotin, sonepcizumab, vandortuzumab vedotin, minretumomab, satumomab pendetide, maslimomab, ontuxizumab, tenatumomab, fresolimumab, metelimumab, lerdelimumab, tezepelumab, etigilimab, tiragotumab, placulumab, prezalumab, infliximab, nerelimomab, ozoralizumab, adalimumab, afelimomab, certolizumab pegol, golimumab, mapatumumab, conatumumab, lexatumumab, tigatuzumab, sacituzumab govitecan, votumumab, pogalizumab, letolizumab, pankomab, anatumomab mafenatox, enavatuzumab, flanvotumab, brolucizumab, ranibizumab, varisacumab, bevacizumab, faricimab, icrucumab, alacizumab pegol, ramucirumab, pritumumab, and onvatilimab;
[6854] VL3 comprises a VL of an antibody selected from the group consisting of losatuxizumab vedotin, utomilumab, urelumab, oleclumab, naptumomab estafenatox, ascrinvacumab, pintumomab, tacatuzumab tetraxetan, nesvacumab, vanucizumab, timolumab, vapaliximab, vepalimomab, enapotamab vedotin, ianalumab, belimumab, tabalumab, tibulizumab, belantamab mafodotin, teclistamab, teclistamab, detumomab, nacolomab tafenatox, eculizumab, lendalizumab, pexelizumab, pozelimab, ravulizumab, tesidolumab, vilobelimab, abagovomab, igovomab, oregovomab, sofituzumab vedotin, cantuzumab mertansine, cantuzuma bravtansine, girentuximab, altumomab pentetate, arcitumomab, besilesomab, bertilimumab, plozalizumab, mogamulizumab, leronlimab, PRO140, rovelizumab, rovelizumab, talacotuzumab, benralizumab, tavolimab, vonlerolizumab, gavilimomab, ziralimumab, fanolesomab, ipilimumab, ruplizumab, toralizumab, dapirolizumab pegol, toralizumab, dapirolizumab pegol, ruplizumab, blinatumomab, inebilizumab, loncastuximab tesirine, SGN-CD19A, tafasitamab, taplitumomab paptox, XMAB-5574, Budoprutug, Obexelimab, duvortuxizumab, englumafusp alfa, Emfizatamab, zeripatamig, siplizumab, blontuvetmab, FBTA05, ibritumomab tiuxetan, obinutuzumab, ocaratuzumab, ocrelizumab, ofatumumab, rituximab, tositumomab, ublituximab, veltuzumab, divozilimab, eramkafusp alfa, ripertamab, zuberitamab, glofitamab, nofetumomab merpentan, samalizumab, imvotamab, odronextamab, plamotamab, bectumomab, inotuzumab ozogamicin, moxetumomab pasudotox, pinatuzumab vedotin, gomiliximab, lumiliximab, inolimomab, inolimomab, daclizumab, camidanluma btesirine, basiliximab, varlilumab, omburtamab, enoblituzumab, vopratelimab, lulizumabpegol, TGN1412, muromonab-CD3, otelixizumab, teplizumab, visilizumab, epcoritamab, epcoritamab, brentuximab vedotin, iratumumab, azintuxizumab vedotin, gemtuzumab ozogamicin, lintuzumab, vadastuximab talirine, naratuximab emtansine, otlertuzumab, lilotomab satetraxetan, tetulomab, daratumumab, isatuximab, foralumab, mosunetuzumab, mosunetuzumab, cedelizumab, ibalizumab, keliximab, priliximab, tregalizumab, zanolimumab, bleselumab, iscalimab, lucatumumab, ravagalimab, selicrelumab, teneliximab, vanalimab, abciximab, bivatuzumab, iomab-B, telimomab aritox, zolimomab aritox, abituzumab, intetumumab, alemtuzumab, tamtuvetmab, lorvotuzumab mertansine, itolizumab, cusatuzumab, vorsetuzumab mafodotin, milatuzumab, iladatuzumab vedotin, polatuzumab vedotin, galiximab, cibisatamab, zolbetuximab, naxitamab, tisotumab vedotin, olendalizumab, pamrevlumab, lacnotuzumab, cabiralizumab, emactuzumab, axatilimab, gimsilumab, lenzilumab, namilumab, tremelimumab, ulocuplumab, tepoditamab, rovalpituzumab tesirine, tarlatamab, demcizumab, navicixizumab, drozitumab, parsatuzumab, depatuxizumab mafodotin, modotuximab, carotuximab, adecatumumab, adecatumumab, oportuzumab monatox, solitomab, tucotuzumab celmoleukin, edrecolomab, catumaxomab, ifabotuzumab, fibatuzumab, zalutumumab, panitumumab, cetuximab, futuximab, imgatuzumab, laprituximab emtansine, matuzumab, necitumumab, nimotuzumab, tomuzotuximab, amivantamab, amivantamab, epitumomab cituxetan, sontuzumab, duligotuzumab, elgemtumab, lumretuzumab, patritumab, seribantumab, zenocutuzumab, sibrotuzumab, burosumab, aprutumab ixadotin, radretumab, pasotuxizumab, farletuzumab, mirvetuximab soravtansine, vantictumab, TRBS07, 3F8, dinutuximab, dinutuximab beta, ecromeximab, mitumomab, andecaliximab, capromab, codrituzumab, glembatumumab vedotin, talquetamab, talquetamab, trevogrumab, indusatumab vedotin, ficlatuzumab, rilotumumab, zatuximab, pentuzimab, pentuzimab, margetuximab, timigutuzumab, trastuzumab, trastuzumab duocarmazine, trastuzumab emtansine, gancotamab, pertuzumab, ertumaxomab, emibetuzumab, telisotuzumab, telisotuzumab vedotin, derlotuximab biotin, apolizumab, onartuzumab, bersanlimab, enlimomabpegol, rontalizumab, sifalimumab, talizumab, ganitumab, istiratumab, robatumumab, teprotumumab, figitumumab, ganitumab, istiratumab, robatumumab, teprotumumab, cixutumumab, dalotuzumab, xentuzumab, dusigitumab, canakinumab, ustekinumab, ustekinumab, ustekinumab, briakinumab, briakinumab, abrezekimab, lebrikizumab, romilkimab, TNX-650, tralokinumab, anrukinzumab, brodalumab, ixekizumab, netakimab, perakizumab, secukinumab, vunakizumab, afasevikumab, afascvikumab, bimekizumab, bimekizumab, remtolumab, bermekimab, lutikizumab, lutikizumab, gevokizumab, cergutuzumab amunaleukin, fletikumab, fezakinumab, brazikumab, guselkumab, mirikizumab, tildrakizumab, risankizumab, flotetuzumab, nemolizumab, pascolizumab, dupilumab, mepolizumab, reslizumab, clazakizumab, elsilimomab, olokizumab, sarilumab, siltuximab, sirukumab, vobarilizumab, tocilizumab, SA237, satralizumab, enokizumab, prezalizumab, natalizumab, abrilumab, abrilumab, vedolizumab, volociximab, tadocizumab, etaracizumab, etrolizumab, spesolimab, vatelizumab, erlizumab, lirilumab, relatlimab, cBR96-doxorubicinimmunoconjugate, odulimomab, efalizumab, ladiratuzumab vedotin, simtuzumab, samrotamab vedotin, aselizumab, lupartumab amadotin, imalumab, carlumab, imaprelimab, amatuximab, amatuximab, anetumab ravtansine, narnatumab, clivatuzumab tetraxetan, pemtumomab, gatipotuzumab, ensituximab, lemalesomab, sulesomab, enfortumab vedotin, racotumomab, monalizumab, brontictuzumab, tarextumab, vesencumab, oxelumab, gilvetmab, tislelizumab, dostarlimab, BCD-100, nivolumab, PDR001, pembrolizumab, pidilizumab, retifanlimab, spartalizumab, sintilimab, cemiplimab, olaratumab, tovetumab, rinucumab, atezolizumab, avelumab, durvalumab, lifastuzumab vedotin, bavituximab, acapatamab, capromab, rosopatamab, nezastomig, pasotuxizumab, pelgifatamab, voxalatamab, cofetuzumab pelidotin, denosumab, rosmantuzumab, cirmtuzumab, atinumab, indatuximab ravtansine, elotuzumab, sirtratumab vedotin, sonepcizumab, vandortuzumab vedotin, minretumomab, satumomab pendetide, maslimomab, ontuxizumab, tenatumomab, fresolimumab, metelimumab, lerdelimumab, tezepelumab, etigilimab, tiragotumab, placulumab, prezalumab, infliximab, nerelimomab, ozoralizumab, adalimumab, afelimomab, certolizumab pegol, golimumab, mapatumumab, conatumumab, lexatumumab, tigatuzumab, sacituzumab govitecan, votumumab, pogalizumab, letolizumab, pankomab, anatumomab mafenatox, enavatuzumab, flanvotumab, brolucizumab, ranibizumab, varisacumab, bevacizumab, faricimab, icrucumab, alacizumab pegol, ramucirumab, pritumumab, and onvatilimab;
[6855] VL4 comprises a VL of an antibody selected from the group consisting of losatuxizumab vedotin, utomilumab, urelumab, oleclumab, naptumomab estafenatox, ascrinvacumab, pintumomab, tacatuzumab tetraxetan, nesvacumab, vanucizumab, timolumab, vapaliximab, vepalimomab, enapotamab vedotin, ianalumab, belimumab, tabalumab, tibulizumab, belantamab mafodotin, teclistamab, teclistamab, detumomab, nacolomab tafenatox, eculizumab, lendalizumab, pexelizumab, pozelimab, ravulizumab, tesidolumab, vilobelimab, abagovomab, igovomab, oregovomab, sofituzumab vedotin, cantuzumab mertansine, cantuzuma bravtansine, girentuximab, altumomab pentetate, arcitumomab, besilesomab, bertilimumab, plozalizumab, mogamulizumab, leronlimab, PRO140, rovelizumab, rovelizumab, talacotuzumab, benralizumab, tavolimab, vonlerolizumab, gavilimomab, ziralimumab, fanolesomab, ipilimumab, ruplizumab, toralizumab, dapirolizumab pegol, toralizumab, dapirolizumab pegol, ruplizumab, blinatumomab, inebilizumab, loncastuximab tesirine, SGN-CD19A, tafasitamab, taplitumomab paptox, XMAB-5574, Budoprutug, Obexelimab, duvortuxizumab, englumafusp alfa, Emfizatamab, zeripatamig, siplizumab, blontuvetmab, FBTA05, ibritumomab tiuxetan, obinutuzumab, ocaratuzumab, ocrelizumab, ofatumumab, rituximab, tositumomab, ublituximab, veltuzumab, divozilimab, eramkafusp alfa, ripertamab, zuberitamab, glofitamab, nofetumomab merpentan, samalizumab, imvotamab, odronextamab, plamotamab, bectumomab, inotuzumab ozogamicin, moxetumomab pasudotox, pinatuzumab vedotin, gomiliximab, lumiliximab, inolimomab, inolimomab, daclizumab, camidanluma btesirine, basiliximab, varlilumab, omburtamab, enoblituzumab, vopratelimab, lulizumabpegol, TGN1412, muromonab-CD3, otelixizumab, teplizumab, visilizumab, epcoritamab, epcoritamab, brentuximab vedotin, iratumumab, azintuxizumab vedotin, gemtuzumab ozogamicin, lintuzumab, vadastuximab talirine, naratuximab emtansine, otlertuzumab, lilotomab satetraxetan, tetulomab, daratumumab, isatuximab, foralumab, mosunetuzumab, mosunetuzumab, cedelizumab, ibalizumab, keliximab, priliximab, tregalizumab, zanolimumab, bleselumab, iscalimab, lucatumumab, ravagalimab, selicrelumab, teneliximab, vanalimab, abciximab, bivatuzumab, iomab-B, telimomab aritox, zolimomab aritox, abituzumab, intetumumab, alemtuzumab, tamtuvetmab, lorvotuzumab mertansine, itolizumab, cusatuzumab, vorsetuzumab mafodotin, milatuzumab, iladatuzumab vedotin, polatuzumab vedotin, galiximab, cibisatamab, zolbetuximab, naxitamab, tisotumab vedotin, olendalizumab, pamrevlumab, lacnotuzumab, cabiralizumab, emactuzumab, axatilimab, gimsilumab, lenzilumab, namilumab, tremelimumab, ulocuplumab, tepoditamab, rovalpituzumab tesirine, tarlatamab, demcizumab, navicixizumab, drozitumab, parsatuzumab, depatuxizumab mafodotin, modotuximab, carotuximab, adecatumumab, adecatumumab, oportuzumab monatox, solitomab, tucotuzumab celmoleukin, edrecolomab, catumaxomab, ifabotuzumab, fibatuzumab, zalutumumab, panitumumab, cetuximab, futuximab, imgatuzumab, laprituximab emtansine, matuzumab, necitumumab, nimotuzumab, tomuzotuximab, amivantamab, amivantamab, epitumomab cituxetan, sontuzumab, duligotuzumab, elgemtumab, lumretuzumab, patritumab, seribantumab, zenocutuzumab, sibrotuzumab, burosumab, aprutumab ixadotin, radretumab, pasotuxizumab, farletuzumab, mirvetuximab soravtansine, vantictumab, TRBS07, 3F8, dinutuximab, dinutuximab beta, ecromeximab, mitumomab, andecaliximab, capromab, codrituzumab, glembatumumab vedotin, talquetamab, talquetamab, trevogrumab, indusatumab vedotin, ficlatuzumab, rilotumumab, zatuximab, pentuzimab, pentuzimab, margetuximab, timigutuzumab, trastuzumab, trastuzumab duocarmazine, trastuzumab emtansine, gancotamab, pertuzumab, ertumaxomab, emibetuzumab, telisotuzumab, telisotuzumab vedotin, derlotuximab biotin, apolizumab, onartuzumab, bersanlimab, enlimomabpegol, rontalizumab, sifalimumab, talizumab, ganitumab, istiratumab, robatumumab, teprotumumab, figitumumab, ganitumab, istiratumab, robatumumab, teprotumumab, cixutumumab, dalotuzumab, xentuzumab, dusigitumab, canakinumab, ustekinumab, ustekinumab, ustekinumab, briakinumab, briakinumab, abrezekimab, lebrikizumab, romilkimab, TNX-650, tralokinumab, anrukinzumab, brodalumab, ixekizumab, netakimab, perakizumab, secukinumab, vunakizumab, afasevikumab, afasevikumab, bimekizumab, bimekizumab, remtolumab, bermekimab, lutikizumab, lutikizumab, gevokizumab, cergutuzumab amunaleukin, fletikumab, fezakinumab, brazikumab, guselkumab, mirikizumab, tildrakizumab, risankizumab, flotetuzumab, nemolizumab, pascolizumab, dupilumab, mepolizumab, reslizumab, clazakizumab, elsilimomab, olokizumab, sarilumab, siltuximab, sirukumab, vobarilizumab, tocilizumab, SA237, satralizumab, enokizumab, prezalizumab, natalizumab, abrilumab, abrilumab, vedolizumab, volociximab, tadocizumab, etaracizumab, etrolizumab, spesolimab, vatelizumab, erlizumab, lirilumab, relatlimab, cBR96-doxorubicinimmunoconjugate, odulimomab, efalizumab, ladiratuzumab vedotin, simtuzumab, samrotamab vedotin, aselizumab, lupartumab amadotin, imalumab, carlumab, imaprelimab, amatuximab, amatuximab, anetumab ravtansine, narnatumab, clivatuzumab tetraxetan, pemtumomab, gatipotuzumab, ensituximab, lemalesomab, sulesomab, enfortumab vedotin, racotumomab, monalizumab, brontictuzumab, tarextumab, vesencumab, oxelumab, gilvetmab, tislelizumab, dostarlimab, BCD-100, nivolumab, PDR001, pembrolizumab, pidilizumab, retifanlimab, spartalizumab, sintilimab, cemiplimab, olaratumab, tovetumab, rinucumab, atezolizumab, avelumab, durvalumab, lifastuzumab vedotin, bavituximab, acapatamab, capromab, rosopatamab, nezastomig, pasotuxizumab, pelgifatamab, voxalatamab, cofetuzumab pelidotin, denosumab, rosmantuzumab, cirmtuzumab, atinumab, indatuximab ravtansine, elotuzumab, sirtratumab vedotin, sonepcizumab, vandortuzumab vedotin, minretumomab, satumomab pendetide, maslimomab, ontuxizumab, tenatumomab, fresolimumab, metelimumab, lerdelimumab, tezepelumab, etigilimab, tiragotumab, placulumab, prezalumab, infliximab, nerelimomab, ozoralizumab, adalimumab, afelimomab, certolizumab pegol, golimumab, mapatumumab, conatumumab, lexatumumab, tigatuzumab, sacituzumab govitecan, votumumab, pogalizumab, letolizumab, pankomab, anatumomab mafenatox, enavatuzumab, flanvotumab, brolucizumab, ranibizumab, varisacumab, bevacizumab, faricimab, icrucumab, alacizumab pegol, ramucirumab, pritumumab, and onvatilimab;
[6856] VH1 comprises a VH of an antibody selected from the group consisting of losatuxizumab vedotin, utomilumab, urelumab, oleclumab, naptumomab estafenatox, ascrinvacumab, pintumomab, tacatuzumab tetraxetan, nesvacumab, vanucizumab, timolumab, vapaliximab, vepalimomab, enapotamab vedotin, ianalumab, belimumab, tabalumab, tibulizumab, belantamab mafodotin, teclistamab, teclistamab, detumomab, nacolomab tafenatox, eculizumab, lendalizumab, pexelizumab, pozelimab, ravulizumab, tesidolumab, vilobelimab, abagovomab, igovomab, oregovomab, sofituzumab vedotin, cantuzumab mertansine, cantuzuma bravtansine, girentuximab, altumomab pentetate, arcitumomab, besilesomab, bertilimumab, plozalizumab, mogamulizumab, leronlimab, PRO140, rovelizumab, rovelizumab, talacotuzumab, benralizumab, tavolimab, vonlerolizumab, gavilimomab, ziralimumab, fanolesomab, ipilimumab, ruplizumab, toralizumab, dapirolizumab pegol, toralizumab, dapirolizumab pegol, ruplizumab, blinatumomab, inebilizumab, loncastuximab tesirine, SGN-CD19A, tafasitamab, taplitumomab paptox, XMAB-5574, Budoprutug, Obexelimab, duvortuxizumab, englumafusp alfa, Emfizatamab, zeripatamig, siplizumab, blontuvetmab, FBTA05, ibritumomab tiuxetan, obinutuzumab, ocaratuzumab, ocrelizumab, ofatumumab, rituximab, tositumomab, ublituximab, veltuzumab, divozilimab, eramkafusp alfa, ripertamab, zuberitamab, glofitamab, nofetumomab merpentan, samalizumab, imvotamab, odronextamab, plamotamab, bectumomab, inotuzumab ozogamicin, moxetumomab pasudotox, pinatuzumab vedotin, gomiliximab, lumiliximab, inolimomab, inolimomab, daclizumab, camidanluma btesirine, basiliximab, varlilumab, omburtamab, enoblituzumab, vopratelimab, lulizumabpegol, TGN1412, muromonab-CD3, otelixizumab, teplizumab, visilizumab, epcoritamab, epcoritamab, brentuximab vedotin, iratumumab, azintuxizumab vedotin, gemtuzumab ozogamicin, lintuzumab, vadastuximab talirine, naratuximab emtansine, otlertuzumab, lilotomab satetraxetan, tetulomab, daratumumab, isatuximab, foralumab, mosunetuzumab, mosunetuzumab, cedelizumab, ibalizumab, keliximab, priliximab, tregalizumab, zanolimumab, bleselumab, iscalimab, lucatumumab, ravagalimab, selicrelumab, teneliximab, vanalimab, abciximab, bivatuzumab, iomab-B, telimomab aritox, zolimomab aritox, abituzumab, intetumumab, alemtuzumab, tamtuvetmab, lorvotuzumab mertansine, itolizumab, cusatuzumab, vorsetuzumab mafodotin, milatuzumab, iladatuzumab vedotin, polatuzumab vedotin, galiximab, cibisatamab, zolbetuximab, naxitamab, tisotumab vedotin, olendalizumab, pamrevlumab, lacnotuzumab, cabiralizumab, emactuzumab, axatilimab, gimsilumab, lenzilumab, namilumab, tremelimumab, ulocuplumab, tepoditamab, rovalpituzumab tesirine, tarlatamab, demcizumab, navicixizumab, drozitumab, parsatuzumab, depatuxizumab mafodotin, modotuximab, carotuximab, adecatumumab, adecatumumab, oportuzumab monatox, solitomab, tucotuzumab celmoleukin, edrecolomab, catumaxomab, ifabotuzumab, fibatuzumab, zalutumumab, panitumumab, cetuximab, futuximab, imgatuzumab, laprituximab emtansine, matuzumab, necitumumab, nimotuzumab, tomuzotuximab, amivantamab, amivantamab, epitumomab cituxetan, sontuzumab, duligotuzumab, elgemtumab, lumretuzumab, patritumab, seribantumab, zenocutuzumab, sibrotuzumab, burosumab, aprutumab ixadotin, radretumab, pasotuxizumab, farletuzumab, mirvetuximab soravtansine, vantictumab, TRBS07, 3F8, dinutuximab, dinutuximab beta, ecromeximab, mitumomab, andecaliximab, capromab, codrituzumab, glembatumumab vedotin, talquetamab, talquetamab, trevogrumab, indusatumab vedotin, ficlatuzumab, rilotumumab, zatuximab, pentuzimab, pentuzimab, margetuximab, timigutuzumab, trastuzumab, trastuzumab duocarmazine, trastuzumab emtansine, gancotamab, pertuzumab, ertumaxomab, emibetuzumab, telisotuzumab, telisotuzumab vedotin, derlotuximab biotin, apolizumab, onartuzumab, bersanlimab, enlimomabpegol, rontalizumab, sifalimumab, talizumab, ganitumab, istiratumab, robatumumab, teprotumumab, figitumumab, ganitumab, istiratumab, robatumumab, teprotumumab, cixutumumab, dalotuzumab, xentuzumab, dusigitumab, canakinumab, ustekinumab, ustekinumab, ustekinumab, briakinumab, briakinumab, abrezekimab, lebrikizumab, romilkimab, TNX-650, tralokinumab, anrukinzumab, brodalumab, ixekizumab, netakimab, perakizumab, secukinumab, vunakizumab, afasevikumab, afasevikumab, bimekizumab, bimekizumab, remtolumab, bermekimab, lutikizumab, lutikizumab, gevokizumab, cergutuzumab amunaleukin, fletikumab, fezakinumab, brazikumab, guselkumab, mirikizumab, tildrakizumab, risankizumab, flotetuzumab, nemolizumab, pascolizumab, dupilumab, mepolizumab, reslizumab, clazakizumab, elsilimomab, olokizumab, sarilumab, siltuximab, sirukumab, vobarilizumab, tocilizumab, SA237, satralizumab, enokizumab, prezalizumab, natalizumab, abrilumab, abrilumab, vedolizumab, volociximab, tadocizumab, etaracizumab, etrolizumab, spesolimab, vatelizumab, erlizumab, lirilumab, relatlimab, cBR96-doxorubicinimmunoconjugate, odulimomab, efalizumab, ladiratuzumab vedotin, simtuzumab, samrotamab vedotin, aselizumab, lupartumab amadotin, imalumab, carlumab, imaprelimab, amatuximab, amatuximab, anetumab ravtansine, narnatumab, clivatuzumab tetraxetan, pemtumomab, gatipotuzumab, ensituximab, lemalesomab, sulesomab, enfortumab vedotin, racotumomab, monalizumab, brontictuzumab, tarextumab, vesencumab, oxelumab, gilvetmab, tislelizumab, dostarlimab, BCD-100, nivolumab, PDR001, pembrolizumab, pidilizumab, retifanlimab, spartalizumab, sintilimab, cemiplimab, olaratumab, tovetumab, rinucumab, atezolizumab, avelumab, durvalumab, lifastuzumab vedotin, bavituximab, acapatamab, capromab, rosopatamab, nezastomig, pasotuxizumab, pelgifatamab, voxalatamab, cofetuzumab pelidotin, denosumab, rosmantuzumab, cirmtuzumab, atinumab, indatuximab ravtansine, elotuzumab, sirtratumab vedotin, sonepcizumab, vandortuzumab vedotin, minretumomab, satumomab pendetide, maslimomab, ontuxizumab, tenatumomab, fresolimumab, metelimumab, lerdelimumab, tezepelumab, etigilimab, tiragotumab, placulumab, prezalumab, infliximab, nerelimomab, ozoralizumab, adalimumab, afelimomab, certolizumab pegol, golimumab, mapatumumab, conatumumab, lexatumumab, tigatuzumab, sacituzumab govitecan, votumumab, pogalizumab, letolizumab, pankomab, anatumomab mafenatox, enavatuzumab, flanvotumab, brolucizumab, ranibizumab, varisacumab, bevacizumab, faricimab, icrucumab, alacizumab pegol, ramucirumab, pritumumab, and onvatilimab;
[6857] VH2 comprises a VH of an antibody selected from the group consisting of losatuxizumab vedotin, utomilumab, urelumab, oleclumab, naptumomab estafenatox, ascrinvacumab, pintumomab, tacatuzumab tetraxetan, nesvacumab, vanucizumab, timolumab, vapaliximab, vepalimomab, enapotamab vedotin, ianalumab, belimumab, tabalumab, tibulizumab, belantamab mafodotin, teclistamab, teclistamab, detumomab, nacolomab tafenatox, eculizumab, lendalizumab, pexelizumab, pozelimab, ravulizumab, tesidolumab, vilobelimab, abagovomab, igovomab, oregovomab, sofituzumab vedotin, cantuzumab mertansine, cantuzuma bravtansine, girentuximab, altumomab pentetate, arcitumomab, besilesomab, bertilimumab, plozalizumab, mogamulizumab, leronlimab, PRO140, rovelizumab, rovelizumab, talacotuzumab, benralizumab, tavolimab, vonlerolizumab, gavilimomab, ziralimumab, fanolesomab, ipilimumab, ruplizumab, toralizumab, dapirolizumab pegol, toralizumab, dapirolizumab pegol, ruplizumab, blinatumomab, inebilizumab, loncastuximab tesirine, SGN-CD19A, tafasitamab, taplitumomab paptox, XMAB-5574, Budoprutug, Obexclimab, duvortuxizumab, englumafusp alfa, Emfizatamab, zeripatamig, siplizumab, blontuvetmab, FBTA05, ibritumomab tiuxetan, obinutuzumab, ocaratuzumab, ocrelizumab, ofatumumab, rituximab, tositumomab, ublituximab, veltuzumab, divozilimab, eramkafusp alfa, ripertamab, zuberitamab, glofitamab, nofetumomab merpentan, samalizumab, imvotamab, odronextamab, plamotamab, bectumomab, inotuzumab ozogamicin, moxetumomab pasudotox, pinatuzumab vedotin, gomiliximab, lumiliximab, inolimomab, inolimomab, daclizumab, camidanluma btesirine, basiliximab, varlilumab, omburtamab, enoblituzumab, vopratelimab, lulizumabpegol, TGN1412, muromonab-CD3, otelixizumab, teplizumab, visilizumab, epcoritamab, epcoritamab, brentuximab vedotin, iratumumab, azintuxizumab vedotin, gemtuzumab ozogamicin, lintuzumab, vadastuximab talirine, naratuximab emtansine, otlertuzumab, lilotomab satetraxetan, tetulomab, daratumumab, isatuximab, foralumab, mosunetuzumab, mosunetuzumab, cedelizumab, ibalizumab, keliximab, priliximab, tregalizumab, zanolimumab, bleselumab, iscalimab, lucatumumab, ravagalimab, selicrelumab, teneliximab, vanalimab, abciximab, bivatuzumab, iomab-B, telimomab aritox, zolimomab aritox, abituzumab, intetumumab, alemtuzumab, tamtuvetmab, lorvotuzumab mertansine, itolizumab, cusatuzumab, vorsetuzumab mafodotin, milatuzumab, iladatuzumab vedotin, polatuzumab vedotin, galiximab, cibisatamab, zolbetuximab, naxitamab, tisotumab vedotin, olendalizumab, pamrevlumab, lacnotuzumab, cabiralizumab, emactuzumab, axatilimab, gimsilumab, lenzilumab, namilumab, tremelimumab, ulocuplumab, tepoditamab, rovalpituzumab tesirine, tarlatamab, demcizumab, navicixizumab, drozitumab, parsatuzumab, depatuxizumab mafodotin, modotuximab, carotuximab, adecatumumab, adecatumumab, oportuzumab monatox, solitomab, tucotuzumab celmoleukin, edrecolomab, catumaxomab, ifabotuzumab, fibatuzumab, zalutumumab, panitumumab, cetuximab, futuximab, imgatuzumab, laprituximab emtansine, matuzumab, necitumumab, nimotuzumab, tomuzotuximab, amivantamab, amivantamab, epitumomab cituxetan, sontuzumab, duligotuzumab, elgemtumab, lumretuzumab, patritumab, seribantumab, zenocutuzumab, sibrotuzumab, burosumab, aprutumab ixadotin, radretumab, pasotuxizumab, farletuzumab, mirvetuximab soravtansine, vantictumab, TRBS07, 3F8, dinutuximab, dinutuximab beta, ecromeximab, mitumomab, andecaliximab, capromab, codrituzumab, glembatumumab vedotin, talquetamab, talquetamab, trevogrumab, indusatumab vedotin, ficlatuzumab, rilotumumab, zatuximab, pentuzimab, pentuzimab, margetuximab, timigutuzumab, trastuzumab, trastuzumab duocarmazine, trastuzumab emtansine, gancotamab, pertuzumab, ertumaxomab, emibetuzumab, telisotuzumab, telisotuzumab vedotin, derlotuximab biotin, apolizumab, onartuzumab, bersanlimab, enlimomabpegol, rontalizumab, sifalimumab, talizumab, ganitumab, istiratumab, robatumumab, teprotumumab, figitumumab, ganitumab, istiratumab, robatumumab, teprotumumab, cixutumumab, dalotuzumab, xentuzumab, dusigitumab, canakinumab, ustekinumab, ustekinumab, ustekinumab, briakinumab, briakinumab, abrezekimab, lebrikizumab, romilkimab, TNX-650, tralokinumab, anrukinzumab, brodalumab, ixekizumab, netakimab, perakizumab, secukinumab, vunakizumab, afasevikumab, afasevikumab, bimekizumab, bimekizumab, remtolumab, bermekimab, lutikizumab, lutikizumab, gevokizumab, cergutuzumab amunaleukin, fletikumab, fezakinumab, brazikumab, guselkumab, mirikizumab, tildrakizumab, risankizumab, flotetuzumab, nemolizumab, pascolizumab, dupilumab, mepolizumab, reslizumab, clazakizumab, elsilimomab, olokizumab, sarilumab, siltuximab, sirukumab, vobarilizumab, tocilizumab, SA237, satralizumab, enokizumab, prezalizumab, natalizumab, abrilumab, abrilumab, vedolizumab, volociximab, tadocizumab, etaracizumab, etrolizumab, spesolimab, vatelizumab, erlizumab, lirilumab, relatlimab, cBR96-doxorubicinimmunoconjugate, odulimomab, efalizumab, ladiratuzumab vedotin, simtuzumab, samrotamab vedotin, aselizumab, lupartumab amadotin, imalumab, carlumab, imaprelimab, amatuximab, amatuximab, anetumab ravtansine, narnatumab, clivatuzumab tetraxetan, pemtumomab, gatipotuzumab, ensituximab, lemalesomab, sulesomab, enfortumab vedotin, racotumomab, monalizumab, brontictuzumab, tarextumab, vesencumab, oxelumab, gilvetmab, tislelizumab, dostarlimab, BCD-100, nivolumab, PDR001, pembrolizumab, pidilizumab, retifanlimab, spartalizumab, sintilimab, cemiplimab, olaratumab, tovetumab, rinucumab, atezolizumab, avelumab, durvalumab, lifastuzumab vedotin, bavituximab, acapatamab, capromab, rosopatamab, nezastomig, pasotuxizumab, pelgifatamab, voxalatamab, cofetuzumab pelidotin, denosumab, rosmantuzumab, cirmtuzumab, atinumab, indatuximab ravtansine, elotuzumab, sirtratumab vedotin, sonepcizumab, vandortuzumab vedotin, minretumomab, satumomab pendetide, maslimomab, ontuxizumab, tenatumomab, fresolimumab, metelimumab, lerdelimumab, tezepelumab, etigilimab, tiragotumab, placulumab, prezalumab, infliximab, nerelimomab, ozoralizumab, adalimumab, afelimomab, certolizumab pegol, golimumab, mapatumumab, conatumumab, lexatumumab, tigatuzumab, sacituzumab govitecan, votumumab, pogalizumab, letolizumab, pankomab, anatumomab mafenatox, enavatuzumab, flanvotumab, brolucizumab, ranibizumab, varisacumab, bevacizumab, faricimab, icrucumab, alacizumab pegol, ramucirumab, pritumumab, and onvatilimab;
[6858] VH3 comprises a VH of an antibody selected from the group consisting of losatuxizumab vedotin, utomilumab, urelumab, oleclumab, naptumomab estafenatox, ascrinvacumab, pintumomab, tacatuzumab tetraxetan, nesvacumab, vanucizumab, timolumab, vapaliximab, vepalimomab, enapotamab vedotin, ianalumab, belimumab, tabalumab, tibulizumab, belantamab mafodotin, teclistamab, teclistamab, detumomab, nacolomab tafenatox, eculizumab, lendalizumab, pexelizumab, pozelimab, ravulizumab, tesidolumab, vilobelimab, abagovomab, igovomab, oregovomab, sofituzumab vedotin, cantuzumab mertansine, cantuzuma bravtansine, girentuximab, altumomab pentetate, arcitumomab, besilesomab, bertilimumab, plozalizumab, mogamulizumab, leronlimab, PRO140, rovelizumab, rovelizumab, talacotuzumab, benralizumab, tavolimab, vonlerolizumab, gavilimomab, ziralimumab, fanolesomab, ipilimumab, ruplizumab, toralizumab, dapirolizumab pegol, toralizumab, dapirolizumab pegol, ruplizumab, blinatumomab, inebilizumab, loncastuximab tesirine, SGN-CD19A, tafasitamab, taplitumomab paptox, XMAB-5574, Budoprutug, Obexelimab, duvortuxizumab, englumafusp alfa, Emfizatamab, zeripatamig, siplizumab, blontuvetmab, FBTA05, ibritumomab tiuxetan, obinutuzumab, ocaratuzumab, ocrelizumab, ofatumumab, rituximab, tositumomab, ublituximab, veltuzumab, divozilimab, eramkafusp alfa, ripertamab, zuberitamab, glofitamab, nofetumomab merpentan, samalizumab, imvotamab, odronextamab, plamotamab, bectumomab, inotuzumab ozogamicin, moxetumomab pasudotox, pinatuzumab vedotin, gomiliximab, lumiliximab, inolimomab, inolimomab, daclizumab, camidanluma btesirine, basiliximab, varlilumab, omburtamab, enoblituzumab, vopratelimab, lulizumabpegol, TGN1412, muromonab-CD3, otelixizumab, teplizumab, visilizumab, epcoritamab, epcoritamab, brentuximab vedotin, iratumumab, azintuxizumab vedotin, gemtuzumab ozogamicin, lintuzumab, vadastuximab talirine, naratuximab emtansine, otlertuzumab, lilotomab satetraxetan, tetulomab, daratumumab, isatuximab, foralumab, mosunetuzumab, mosunetuzumab, cedelizumab, ibalizumab, keliximab, priliximab, tregalizumab, zanolimumab, bleselumab, iscalimab, lucatumumab, ravagalimab, selicrelumab, teneliximab, vanalimab, abciximab, bivatuzumab, iomab-B, telimomab aritox, zolimomab aritox, abituzumab, intetumumab, alemtuzumab, tamtuvetmab, lorvotuzumab mertansine, itolizumab, cusatuzumab, vorsetuzumab mafodotin, milatuzumab, iladatuzumab vedotin, polatuzumab vedotin, galiximab, cibisatamab, zolbetuximab, naxitamab, tisotumab vedotin, olendalizumab, pamrevlumab, lacnotuzumab, cabiralizumab, emactuzumab, axatilimab, gimsilumab, lenzilumab, namilumab, tremelimumab, ulocuplumab, tepoditamab, rovalpituzumab tesirine, tarlatamab, demcizumab, navicixizumab, drozitumab, parsatuzumab, depatuxizumab mafodotin, modotuximab, carotuximab, adecatumumab, adecatumumab, oportuzumab monatox, solitomab, tucotuzumab celmoleukin, edrecolomab, catumaxomab, ifabotuzumab, fibatuzumab, zalutumumab, panitumumab, cetuximab, futuximab, imgatuzumab, laprituximab emtansine, matuzumab, necitumumab, nimotuzumab, tomuzotuximab, amivantamab, amivantamab, epitumomab cituxetan, sontuzumab, duligotuzumab, elgemtumab, lumretuzumab, patritumab, seribantumab, zenocutuzumab, sibrotuzumab, burosumab, aprutumab ixadotin, radretumab, pasotuxizumab, farletuzumab, mirvetuximab soravtansine, vantictumab, TRBS07, 3F8, dinutuximab, dinutuximab beta, ecromeximab, mitumomab, andecaliximab, capromab, codrituzumab, glembatumumab vedotin, talquetamab, talquetamab, trevogrumab, indusatumab vedotin, ficlatuzumab, rilotumumab, zatuximab, pentuzimab, pentuzimab, margetuximab, timigutuzumab, trastuzumab, trastuzumab duocarmazine, trastuzumab emtansine, gancotamab, pertuzumab, ertumaxomab, emibetuzumab, telisotuzumab, telisotuzumab vedotin, derlotuximab biotin, apolizumab, onartuzumab, bersanlimab, enlimomabpegol, rontalizumab, sifalimumab, talizumab, ganitumab, istiratumab, robatumumab, teprotumumab, figitumumab, ganitumab, istiratumab, robatumumab, teprotumumab, cixutumumab, dalotuzumab, xentuzumab, dusigitumab, canakinumab, ustekinumab, ustekinumab, ustekinumab, briakinumab, briakinumab, abrezekimab, lebrikizumab, romilkimab, TNX-650, tralokinumab, anrukinzumab, brodalumab, ixekizumab, netakimab, perakizumab, secukinumab, vunakizumab, afasevikumab, afasevikumab, bimekizumab, bimekizumab, remtolumab, bermekimab, lutikizumab, lutikizumab, gevokizumab, cergutuzumab amunaleukin, fletikumab, fezakinumab, brazikumab, guselkumab, mirikizumab, tildrakizumab, risankizumab, flotetuzumab, nemolizumab, pascolizumab, dupilumab, mepolizumab, reslizumab, clazakizumab, elsilimomab, olokizumab, sarilumab, siltuximab, sirukumab, vobarilizumab, tocilizumab, SA237, satralizumab, enokizumab, prezalizumab, natalizumab, abrilumab, abrilumab, vedolizumab, volociximab, tadocizumab, etaracizumab, etrolizumab, spesolimab, vatelizumab, erlizumab, lirilumab, relatlimab, cBR96-doxorubicinimmunoconjugate, odulimomab, efalizumab, ladiratuzumab vedotin, simtuzumab, samrotamab vedotin, aselizumab, lupartumab amadotin, imalumab, carlumab, imaprelimab, amatuximab, amatuximab, anetumab ravtansine, narnatumab, clivatuzumab tetraxetan, pemtumomab, gatipotuzumab, ensituximab, lemalesomab, sulesomab, enfortumab vedotin, racotumomab, monalizumab, brontictuzumab, tarextumab, vesencumab, oxelumab, gilvetmab, tislelizumab, dostarlimab, BCD-100, nivolumab, PDR001, pembrolizumab, pidilizumab, retifanlimab, spartalizumab, sintilimab, cemiplimab, olaratumab, tovetumab, rinucumab, atezolizumab, avelumab, durvalumab, lifastuzumab vedotin, bavituximab, acapatamab, capromab, rosopatamab, nezastomig, pasotuxizumab, pelgifatamab, voxalatamab, cofetuzumab pelidotin, denosumab, rosmantuzumab, cirmtuzumab, atinumab, indatuximab ravtansine, elotuzumab, sirtratumab vedotin, sonepcizumab, vandortuzumab vedotin, minretumomab, satumomab pendetide, maslimomab, ontuxizumab, tenatumomab, fresolimumab, metelimumab, lerdelimumab, tezepelumab, etigilimab, tiragotumab, placulumab, prezalumab, infliximab, nerelimomab, ozoralizumab, adalimumab, afelimomab, certolizumab pegol, golimumab, mapatumumab, conatumumab, lexatumumab, tigatuzumab, sacituzumab govitecan, votumumab, pogalizumab, letolizumab, pankomab, anatumomab mafenatox, enavatuzumab, flanvotumab, brolucizumab, ranibizumab, varisacumab, bevacizumab, faricimab, icrucumab, alacizumab pegol, ramucirumab, pritumumab, and onvatilimab; and/or
[6859] VH4 comprises a VH of an antibody selected from the group consisting of losatuxizumab vedotin, utomilumab, urelumab, oleclumab, naptumomab estafenatox, ascrinvacumab, pintumomab, tacatuzumab tetraxetan, nesvacumab, vanucizumab, timolumab, vapaliximab, vepalimomab, enapotamab vedotin, ianalumab, belimumab, tabalumab, tibulizumab, belantamab mafodotin, teclistamab, teclistamab, detumomab, nacolomab tafenatox, eculizumab, lendalizumab, pexelizumab, pozelimab, ravulizumab, tesidolumab, vilobelimab, abagovomab, igovomab, oregovomab, sofituzumab vedotin, cantuzumab mertansine, cantuzuma bravtansine, girentuximab, altumomab pentetate, arcitumomab, besilesomab, bertilimumab, plozalizumab, mogamulizumab, leronlimab, PRO140, rovelizumab, rovelizumab, talacotuzumab, benralizumab, tavolimab, vonlerolizumab, gavilimomab, ziralimumab, fanolesomab, ipilimumab, ruplizumab, toralizumab, dapirolizumab pegol, toralizumab, dapirolizumab pegol, ruplizumab, blinatumomab, inebilizumab, loncastuximab tesirine, SGN-CD19A, tafasitamab, taplitumomab paptox, XMAB-5574, Budoprutug, Obexelimab, duvortuxizumab, englumafusp alfa, Emfizatamab, zeripatamig, siplizumab, blontuvetmab, FBTA05, ibritumomab tiuxetan, obinutuzumab, ocaratuzumab, ocrelizumab, ofatumumab, rituximab, tositumomab, ublituximab, veltuzumab, divozilimab, eramkafusp alfa, ripertamab, zuberitamab, glofitamab, nofetumomab merpentan, samalizumab, imvotamab, odronextamab, plamotamab, bectumomab, inotuzumab ozogamicin, moxetumomab pasudotox, pinatuzumab vedotin, gomiliximab, lumiliximab, inolimomab, inolimomab, daclizumab, camidanluma btesirine, basiliximab, varlilumab, omburtamab, enoblituzumab, vopratelimab, lulizumabpegol, TGN1412, muromonab-CD3, otelixizumab, teplizumab, visilizumab, epcoritamab, epcoritamab, brentuximab vedotin, iratumumab, azintuxizumab vedotin, gemtuzumab ozogamicin, lintuzumab, vadastuximab talirine, naratuximab emtansine, otlertuzumab, lilotomab satetraxetan, tetulomab, daratumumab, isatuximab, foralumab, mosunetuzumab, mosunetuzumab, cedelizumab, ibalizumab, keliximab, priliximab, tregalizumab, zanolimumab, bleselumab, iscalimab, lucatumumab, ravagalimab, selicrelumab, teneliximab, vanalimab, abciximab, bivatuzumab, iomab-B, telimomab aritox, zolimomab aritox, abituzumab, intetumumab, alemtuzumab, tamtuvetmab, lorvotuzumab mertansine, itolizumab, cusatuzumab, vorsetuzumab mafodotin, milatuzumab, iladatuzumab vedotin, polatuzumab vedotin, galiximab, cibisatamab, zolbetuximab, naxitamab, tisotumab vedotin, olendalizumab, pamrevlumab, lacnotuzumab, cabiralizumab, emactuzumab, axatilimab, gimsilumab, lenzilumab, namilumab, tremelimumab, ulocuplumab, tepoditamab, rovalpituzumab tesirine, tarlatamab, demcizumab, navicixizumab, drozitumab, parsatuzumab, depatuxizumab mafodotin, modotuximab, carotuximab, adecatumumab, adecatumumab, oportuzumab monatox, solitomab, tucotuzumab celmoleukin, edrecolomab, catumaxomab, ifabotuzumab, fibatuzumab, zalutumumab, panitumumab, cetuximab, futuximab, imgatuzumab, laprituximab emtansine, matuzumab, necitumumab, nimotuzumab, tomuzotuximab, amivantamab, amivantamab, epitumomab cituxetan, sontuzumab, duligotuzumab, elgemtumab, lumretuzumab, patritumab, seribantumab, zenocutuzumab, sibrotuzumab, burosumab, aprutumab ixadotin, radretumab, pasotuxizumab, farletuzumab, mirvetuximab soravtansine, vantictumab, TRBS07, 3F8, dinutuximab, dinutuximab beta, ecromeximab, mitumomab, andecaliximab, capromab, codrituzumab, glembatumumab vedotin, talquetamab, talquetamab, trevogrumab, indusatumab vedotin, ficlatuzumab, rilotumumab, zatuximab, pentuzimab, pentuzimab, margetuximab, timigutuzumab, trastuzumab, trastuzumab duocarmazine, trastuzumab emtansine, gancotamab, pertuzumab, ertumaxomab, emibetuzumab, telisotuzumab, telisotuzumab vedotin, derlotuximab biotin, apolizumab, onartuzumab, bersanlimab, enlimomabpegol, rontalizumab, sifalimumab, talizumab, ganitumab, istiratumab, robatumumab, teprotumumab, figitumumab, ganitumab, istiratumab, robatumumab, teprotumumab, cixutumumab, dalotuzumab, xentuzumab, dusigitumab, canakinumab, ustekinumab, ustekinumab, ustekinumab, briakinumab, briakinumab, abrezekimab, lebrikizumab, romilkimab, TNX-650, tralokinumab, anrukinzumab, brodalumab, ixekizumab, netakimab, perakizumab, secukinumab, vunakizumab, afasevikumab, afasevikumab, bimekizumab, bimekizumab, remtolumab, bermekimab, lutikizumab, lutikizumab, gevokizumab, cergutuzumab amunaleukin, fletikumab, fezakinumab, brazikumab, guselkumab, mirikizumab, tildrakizumab, risankizumab, flotetuzumab, nemolizumab, pascolizumab, dupilumab, mepolizumab, reslizumab, clazakizumab, elsilimomab, olokizumab, sarilumab, siltuximab, sirukumab, vobarilizumab, tocilizumab, SA237, satralizumab, enokizumab, prezalizumab, natalizumab, abrilumab, abrilumab, vedolizumab, volociximab, tadocizumab, etaracizumab, etrolizumab, spesolimab, vatelizumab, erlizumab, lirilumab, relatlimab, cBR96-doxorubicinimmunoconjugate, odulimomab, efalizumab, ladiratuzumab vedotin, simtuzumab, samrotamab vedotin, aselizumab, lupartumab amadotin, imalumab, carlumab, imaprelimab, amatuximab, amatuximab, anetumab ravtansine, narnatumab, clivatuzumab tetraxetan, pemtumomab, gatipotuzumab, ensituximab, lemalesomab, sulesomab, enfortumab vedotin, racotumomab, monalizumab, brontictuzumab, tarextumab, vesencumab, oxelumab, gilvetmab, tislelizumab, dostarlimab, BCD-100, nivolumab, PDR001, pembrolizumab, pidilizumab, retifanlimab, spartalizumab, sintilimab, cemiplimab, olaratumab, tovetumab, rinucumab, atezolizumab, avelumab, durvalumab, lifastuzumab vedotin, bavituximab, acapatamab, capromab, rosopatamab, nezastomig, pasotuxizumab, pelgifatamab, voxalatamab, cofetuzumab pelidotin, denosumab, rosmantuzumab, cirmtuzumab, atinumab, indatuximab ravtansine, elotuzumab, sirtratumab vedotin, sonepcizumab, vandortuzumab vedotin, minretumomab, satumomab pendetide, maslimomab, ontuxizumab, tenatumomab, fresolimumab, metelimumab, lerdelimumab, tezepelumab, etigilimab, tiragotumab, placulumab, prezalumab, infliximab, nerelimomab, ozoralizumab, adalimumab, afelimomab, certolizumab pegol, golimumab, mapatumumab, conatumumab, lexatumumab, tigatuzumab, sacituzumab govitecan, votumumab, pogalizumab, letolizumab, pankomab, anatumomab mafenatox, enavatuzumab, flanvotumab, brolucizumab, ranibizumab, varisacumab, bevacizumab, faricimab, icrucumab, alacizumab pegol, ramucirumab, pritumumab, and onvatilimab; or
[6860] (iii)
[6861] VL1 comprises (i) a complementarity determining region (CDR) 1 having an amino acid sequence that is at least 65%, at least 70%, at least 75%, at least 80%, at least 85%, at least 90%, at least 95%, at least 99%, or 100% identical to any one of SEQ ID NOs: 1096, 1103, 1110, 1120, 1127, 1134, 1141, 1148, 1155, 1162, 1169, 1174, 1181, 1188, 1199, 1211, 1221, 1228, 1235, 1247, 1254, 1261, 1266, 1271, 1278, 1285, 1292, 1299, 1306, 1313, 1319, 1326, 1339, 1352, 1359, 1366, 1373, 1382, 1394, 1401, 1408, 1414, 1421, 1428, 1441, 1448, 1455, 1461, 1468, 1475, 1488, 1495, 1508, 1519, 1526, 1531, 1538, 1544, 1556, 1568, 1574, 1581, 1594, 1601, 1608, 1615, 1622, 1629, 1636, 1643, 1650, 1657, 1672, 1679, 1689, 1697, 1708, 1715, 1718, 1723, 1727, 1738, 1743, 1752, 1761, 1763, 1769, 1776, and 1786; (ii) a CDR2 having an amino acid sequence that is at least 65%, at least 70%, at least 75%, at least 80%, at least 85%, at least 90%, at least 95%, at least 99%, or 100% identical to any one of SEQ ID NOs: 1200, 1212, 1680, 1690, 1698, 1709, 1728, 1739, 1744, 1753, 1770, and 1777; or at least 65%, at least 70%, at least 75%, at least 80%, at least 85%, at least 90%, at least 95%, at least 99%, or 100% identical to any one of amino acid sequences AAS, APS, AT, ATS, DAS, DDG, DDS, DT, DTS, DVS, EAS, FTS, GAF, GAN, GAS, GAT, GIS, GKN, GNS, HTS, KVS, LAS, LGS, LVS, NAK, NTN, QMS, RMS, RTS, SAS, TTS, WAS, YAS, YAT, YGS, YRS, and YTS; and (iii) a CDR3 having an amino acid sequence that is at least 65%, at least 70%, at least 75%, at least 80%, at least 85%, at least 90%, at least 95%, at least 99%, or 100% identical to any one of SEQ ID NOs: 1097, 1104, 1111, 1121, 1128, 1135, 1142, 1149, 1156, 1163, 1170, 1175, 1182, 1189, 1195, 1201, 1207, 1213, 1222, 1229, 1236, 2009, 1248, 1255, 1262, 1267, 1272, 1279, 1286, 1293, 1300, 1307, 1320, 1327, 1333, 1340, 1346, 1353, 1360, 1367, 1374, 1383, 1389, 1395, 1402, 1409, 1415, 1422, 1429, 1435, 1442, 1449, 1456, 1462, 1469, 1476, 1482, 1489, 1496, 1502, 1509, 1513, 1520, 1532, 1539, 1545, 1557, 1562, 1569, 1575, 1582, 1588, 1595, 1602, 1609, 1616, 1623, 1630, 1637, 1644, 1651, 1658, 1663, 1673, 1681, 1691, 1699, 1710, 1729, 1735, 1745, 1751, 1754, 1778, 1787, and 1976;
[6862] VL2 comprises (i) a complementarity determining region (CDR) 1 having an amino acid sequence that is at least 65%, at least 70%, at least 75%, at least 80%, at least 85%, at least 90%, at least 95%, at least 99%, or 100% identical to any one of SEQ ID NOs: 1096, 1103, 1110, 1120, 1127, 1134, 1141, 1148, 1155, 1162, 1169, 1174, 1181, 1188, 1199, 1211, 1221, 1228, 1235, 1247, 1254, 1261, 1266, 1271, 1278, 1285, 1292, 1299, 1306, 1313, 1319, 1326, 1339, 1352, 1359, 1366, 1373, 1382, 1394, 1401, 1408, 1414, 1421, 1428, 1441, 1448, 1455, 1461, 1468, 1475, 1488, 1495, 1508, 1519, 1526, 1531, 1538, 1544, 1556, 1568, 1574, 1581, 1594, 1601, 1608, 1615, 1622, 1629, 1636, 1643, 1650, 1657, 1672, 1679, 1689, 1697, 1708, 1715, 1718, 1723, 1727, 1738, 1743, 1752, 1761, 1763, 1769, 1776, and 1786; (ii) a CDR2 having an amino acid sequence that is at least 65%, at least 70%, at least 75%, at least 80%, at least 85%, at least 90%, at least 95%, at least 99%, or 100% identical to any one of SEQ ID NOs: 1200, 1212, 1680, 1690, 1698, 1709, 1728, 1739, 1744, 1753, 1770, and 1777; or at least 65%, at least 70%, at least 75%, at least 80%, at least 85%, at least 90%, at least 95%, at least 99%, or 100% identical to any one of amino acid sequences AAS, APS, AT, ATS, DAS, DDG, DDS, DT, DTS, DVS, EAS, FTS, GAF, GAN, GAS, GAT, GIS, GKN, GNS, HTS, KVS, LAS, LGS, LVS, NAK, NTN, QMS, RMS, RTS, SAS, TTS, WAS, YAS, YAT, YGS, YRS, and YTS; and (iii) a CDR3 having an amino acid sequence that is at least 65%, at least 70%, at least 75%, at least 80%, at least 85%, at least 90%, at least 95%, at least 99%, or 100% identical to any one of SEQ ID NOs: 1097, 1104, 1111, 1121, 1128, 1135, 1142, 1149, 1156, 1163, 1170, 1175, 1182, 1189, 1195, 1201, 1207, 1213, 1222, 1229, 1236, 2009, 1248, 1255, 1262, 1267, 1272, 1279, 1286, 1293, 1300, 1307, 1320, 1327, 1333, 1340, 1346, 1353, 1360, 1367, 1374, 1383, 1389, 1395, 1402, 1409, 1415, 1422, 1429, 1435, 1442, 1449, 1456, 1462, 1469, 1476, 1482, 1489, 1496, 1502, 1509, 1513, 1520, 1532, 1539, 1545, 1557, 1562, 1569, 1575, 1582, 1588, 1595, 1602, 1609, 1616, 1623, 1630, 1637, 1644, 1651, 1658, 1663, 1673, 1681, 1691, 1699, 1710, 1729, 1735, 1745, 1751, 1754, 1778, 1787, and 1976;
[6863] VL3 comprises (i) a complementarity determining region (CDR) 1 having an amino acid sequence that is at least 65%, at least 70%, at least 75%, at least 80%, at least 85%, at least 90%, at least 95%, at least 99%, or 100% identical to any one of SEQ ID NOs: 1096, 1103, 1110, 1120, 1127, 1134, 1141, 1148, 1155, 1162, 1169, 1174, 1181, 1188, 1199, 1211, 1221, 1228, 1235, 1247, 1254, 1261, 1266, 1271, 1278, 1285, 1292, 1299, 1306, 1313, 1319, 1326, 1339, 1352, 1359, 1366, 1373, 1382, 1394, 1401, 1408, 1414, 1421, 1428, 1441, 1448, 1455, 1461, 1468, 1475, 1488, 1495, 1508, 1519, 1526, 1531, 1538, 1544, 1556, 1568, 1574, 1581, 1594, 1601, 1608, 1615, 1622, 1629, 1636, 1643, 1650, 1657, 1672, 1679, 1689, 1697, 1708, 1715, 1718, 1723, 1727, 1738, 1743, 1752, 1761, 1763, 1769, 1776, and 1786; (ii) a CDR2 having an amino acid sequence that is at least 65%, at least 70%, at least 75%, at least 80%, at least 85%, at least 90%, at least 95%, at least 99%, or 100% identical to any one of SEQ ID NOs: 1200, 1212, 1680, 1690, 1698, 1709, 1728, 1739, 1744, 1753, 1770, and 1777; or at least 65%, at least 70%, at least 75%, at least 80%, at least 85%, at least 90%, at least 95%, at least 99%, or 100% identical to any one of amino acid sequences AAS, APS, AT, ATS, DAS, DDG, DDS, DT, DTS, DVS, EAS, FTS, GAF, GAN, GAS, GAT, GIS, GKN, GNS, HTS, KVS, LAS, LGS, LVS, NAK, NTN, QMS, RMS, RTS, SAS, TTS, WAS, YAS, YAT, YGS, YRS, and YTS; and (iii) a CDR3 having an amino acid sequence that is at least 65%, at least 70%, at least 75%, at least 80%, at least 85%, at least 90%, at least 95%, at least 99%, or 100% identical to any one of SEQ ID NOs: 1097, 1104, 1111, 1121, 1128, 1135, 1142, 1149, 1156, 1163, 1170, 1175, 1182, 1189, 1195, 1201, 1207, 1213, 1222, 1229, 1236, 2009, 1248, 1255, 1262, 1267, 1272, 1279, 1286, 1293, 1300, 1307, 1320, 1327, 1333, 1340, 1346, 1353, 1360, 1367, 1374, 1383, 1389, 1395, 1402, 1409, 1415, 1422, 1429, 1435, 1442, 1449, 1456, 1462, 1469, 1476, 1482, 1489, 1496, 1502, 1509, 1513, 1520, 1532, 1539, 1545, 1557, 1562, 1569, 1575, 1582, 1588, 1595, 1602, 1609, 1616, 1623, 1630, 1637, 1644, 1651, 1658, 1663, 1673, 1681, 1691, 1699, 1710, 1729, 1735, 1745, 1751, 1754, 1778, 1787, and 1976;
[6864] VL4 comprises (i) a complementarity determining region (CDR) 1 having an amino acid sequence that is at least 65%, at least 70%, at least 75%, at least 80%, at least 85%, at least 90%, at least 95%, at least 99%, or 100% identical to any one of SEQ ID NOs: 1096, 1103, 1110, 1120, 1127, 1134, 1141, 1148, 1155, 1162, 1169, 1174, 1181, 1188, 1199, 1211, 1221, 1228, 1235, 1247, 1254, 1261, 1266, 1271, 1278, 1285, 1292, 1299, 1306, 1313, 1319, 1326, 1339, 1352, 1359, 1366, 1373, 1382, 1394, 1401, 1408, 1414, 1421, 1428, 1441, 1448, 1455, 1461, 1468, 1475, 1488, 1495, 1508, 1519, 1526, 1531, 1538, 1544, 1556, 1568, 1574, 1581, 1594, 1601, 1608, 1615, 1622, 1629, 1636, 1643, 1650, 1657, 1672, 1679, 1689, 1697, 1708, 1715, 1718, 1723, 1727, 1738, 1743, 1752, 1761, 1763, 1769, 1776, and 1786; (ii) a CDR2 having an amino acid sequence that is at least 65%, at least 70%, at least 75%, at least 80%, at least 85%, at least 90%, at least 95%, at least 99%, or 100% identical to any one of SEQ ID NOs: 1200, 1212, 1680, 1690, 1698, 1709, 1728, 1739, 1744, 1753, 1770, and 1777; or at least 65%, at least 70%, at least 75%, at least 80%, at least 85%, at least 90%, at least 95%, at least 99%, or 100% identical to any one of amino acid sequences AAS, APS, AT, ATS, DAS, DDG, DDS, DT, DTS, DVS, EAS, FTS, GAF, GAN, GAS, GAT, GIS, GKN, GNS, HTS, KVS, LAS, LGS, LVS, NAK, NTN, QMS, RMS, RTS, SAS, TTS, WAS, YAS, YAT, YGS, YRS, and YTS; and (iii) a CDR3 having an amino acid sequence that is at least 65%, at least 70%, at least 75%, at least 80%, at least 85%, at least 90%, at least 95%, at least 99%, or 100% identical to any one of SEQ ID NOs: 1097, 1104, 1111, 1121, 1128, 1135, 1142, 1149, 1156, 1163, 1170, 1175, 1182, 1189, 1195, 1201, 1207, 1213, 1222, 1229, 1236, 2009, 1248, 1255, 1262, 1267, 1272, 1279, 1286, 1293, 1300, 1307, 1320, 1327, 1333, 1340, 1346, 1353, 1360, 1367, 1374, 1383, 1389, 1395, 1402, 1409, 1415, 1422, 1429, 1435, 1442, 1449, 1456, 1462, 1469, 1476, 1482, 1489, 1496, 1502, 1509, 1513, 1520, 1532, 1539, 1545, 1557, 1562, 1569, 1575, 1582, 1588, 1595, 1602, 1609, 1616, 1623, 1630, 1637, 1644, 1651, 1658, 1663, 1673, 1681, 1691, 1699, 1710, 1729, 1735, 1745, 1751, 1754, 1778, 1787, and 1976;
[6865] VH1 comprises (i) a complementarity determining region (CDR) 1 having an amino acid sequence that is at least 65%, at least 70%, at least 75%, at least 80%, at least 85%, at least 90%, at least 95%, at least 99%, or 100% identical to any one of SEQ ID NOs: 1099, 1106, 1113, 1117, 1123, 1130, 1137, 1144, 1151, 1158, 1165, 1177, 1184, 1191, 1203, 1215, 1224, 1231, 1238, 1243, 1250, 1257, 1264, 1274, 1281, 1288, 1295, 1302, 1309, 1315, 1322, 1329, 1335, 1342, 1348, 1355, 1362, 1369, 1376, 1385, 1397, 1404, 1417, 1424, 1431, 1437, 1444, 1451, 1458, 1464, 1471, 1478, 1484, 1491, 1498, 1504, 1511, 1515, 1522, 1534, 1547, 1552, 1564, 1577, 1584, 1590, 1597, 1604, 1611, 1618, 1625, 1632, 1639, 1646, 1653, 1660, 1665, 1675, 1683, 1693, 1701, 1705, 1716, 1719, 1731, 1736, 1747, 1756, 1772, 1780, and 1789; (ii) a CDR2 having an amino acid sequence that is at least 65%, at least 70%, at least 75%, at least 80%, at least 85%, at least 90%, at least 95%, at least 99%, or 100% identical to any one of SEQ ID NOs: 1100, 1107, 1114, 1118, 1124, 1131, 1138, 1145, 1152, 1159, 1166, 1178, 1185, 1192, 1204, 1216, 1225, 1232, 1239, 1244, 1251, 1258, 1275, 1282, 1289, 1296, 1303, 1310, 1316, 1323, 1330, 1336, 1343, 1349, 1356, 1363, 1370, 1377, 1386, 1391, 1398, 1405, 1411, 1418, 1425, 1432, 1438, 1445, 1452, 1465, 1472, 1479, 1485, 1492, 1499, 1505, 1516, 1523, 1528, 1535, 1541, 1548, 1553, 1559, 1565, 1571, 1578, 1585, 1591, 1598, 1605, 1612, 1619, 1626, 1633, 1640, 1647, 1654, 1666, 1676, 1684, 1687, 1694, 1702, 1706, 1712, 1717, 1720, 1725, 1732, 1737, 1741, 1748, 1757, 1767, 1773, 1781, and 1790; and (iii) a CDR3 having an amino acid sequence that is at least 65%, at least 70%, at least 75%, at least 80%, at least 85%, at least 90%, at least 95%, at least 99%, or 100% identical to any one of SEQ ID NOs: 1101, 1108, 1115, 1125, 1132, 1139, 1146, 1153, 1160, 1167, 1172, 1179, 1186, 1193, 1197, 1205, 1209, 1217, 1226, 1233, 1240, 1245, 1252, 1259, 1269, 1276, 1283, 1290, 1297, 1304, 1311, 1317, 1324, 1331, 1337, 1344, 1350, 1357, 1364, 1371, 1378, 1387, 1392, 1399, 1406, 1412, 1419, 1426, 1433, 1439, 1446, 1453, 1459, 1466, 1473, 1480, 1486, 1493, 1500, 1506, 1517, 1524, 1529, 1536, 1542, 1549, 1554, 1560, 1566, 1572, 1579, 1586, 1592, 1599, 1606, 1613, 1620, 1627, 1634, 1641, 1648, 1655, 1661, 1667, 1670, 1677, 1685, 1688, 1695, 1703, 1707, 1713, 1733, 1749, 1758, 1762, 1774, 1782, 1791, and 1975;
[6866] VH2 comprises (i) a complementarity determining region (CDR) 1 having an amino acid sequence that is at least 65%, at least 70%, at least 75%, at least 80%, at least 85%, at least 90%, at least 95%, at least 99%, or 100% identical to any one of SEQ ID NOs: 1099, 1106, 1113, 1117, 1123, 1130, 1137, 1144, 1151, 1158, 1165, 1177, 1184, 1191, 1203, 1215, 1224, 1231, 1238, 1243, 1250, 1257, 1264, 1274, 1281, 1288, 1295, 1302, 1309, 1315, 1322, 1329, 1335, 1342, 1348, 1355, 1362, 1369, 1376, 1385, 1397, 1404, 1417, 1424, 1431, 1437, 1444, 1451, 1458, 1464, 1471, 1478, 1484, 1491, 1498, 1504, 1511, 1515, 1522, 1534, 1547, 1552, 1564, 1577, 1584, 1590, 1597, 1604, 1611, 1618, 1625, 1632, 1639, 1646, 1653, 1660, 1665, 1675, 1683, 1693, 1701, 1705, 1716, 1719, 1731, 1736, 1747, 1756, 1772, 1780, and 1789; (ii) a CDR2 having an amino acid sequence that is at least 65%, at least 70%, at least 75%, at least 80%, at least 85%, at least 90%, at least 95%, at least 99%, or 100% identical to any one of SEQ ID NOs: 1100, 1107, 1114, 1118, 1124, 1131, 1138, 1145, 1152, 1159, 1166, 1178, 1185, 1192, 1204, 1216, 1225, 1232, 1239, 1244, 1251, 1258, 1275, 1282, 1289, 1296, 1303, 1310, 1316, 1323, 1330, 1336, 1343, 1349, 1356, 1363, 1370, 1377, 1386, 1391, 1398, 1405, 1411, 1418, 1425, 1432, 1438, 1445, 1452, 1465, 1472, 1479, 1485, 1492, 1499, 1505, 1516, 1523, 1528, 1535, 1541, 1548, 1553, 1559, 1565, 1571, 1578, 1585, 1591, 1598, 1605, 1612, 1619, 1626, 1633, 1640, 1647, 1654, 1666, 1676, 1684, 1687, 1694, 1702, 1706, 1712, 1717, 1720, 1725, 1732, 1737, 1741, 1748, 1757, 1767, 1773, 1781, and 1790; and (iii) a CDR3 having an amino acid sequence that is at least 65%, at least 70%, at least 75%, at least 80%, at least 85%, at least 90%, at least 95%, at least 99%, or 100% identical to any one of SEQ ID NOs: 1101, 1108, 1115, 1125, 1132, 1139, 1146, 1153, 1160, 1167, 1172, 1179, 1186, 1193, 1197, 1205, 1209, 1217, 1226, 1233, 1240, 1245, 1252, 1259, 1269, 1276, 1283, 1290, 1297, 1304, 1311, 1317, 1324, 1331, 1337, 1344, 1350, 1357, 1364, 1371, 1378, 1387, 1392, 1399, 1406, 1412, 1419, 1426, 1433, 1439, 1446, 1453, 1459, 1466, 1473, 1480, 1486, 1493, 1500, 1506, 1517, 1524, 1529, 1536, 1542, 1549, 1554, 1560, 1566, 1572, 1579, 1586, 1592, 1599, 1606, 1613, 1620, 1627, 1634, 1641, 1648, 1655, 1661, 1667, 1670, 1677, 1685, 1688, 1695, 1703, 1707, 1713, 1733, 1749, 1758, 1762, 1774, 1782, 1791, and 1975;
[6867] VH3 comprises (i) a complementarity determining region (CDR) 1 having an amino acid sequence that is at least 65%, at least 70%, at least 75%, at least 80%, at least 85%, at least 90%, at least 95%, at least 99%, or 100% identical to any one of SEQ ID NOs: 1099, 1106, 1113, 1117, 1123, 1130, 1137, 1144, 1151, 1158, 1165, 1177, 1184, 1191, 1203, 1215, 1224, 1231, 1238, 1243, 1250, 1257, 1264, 1274, 1281, 1288, 1295, 1302, 1309, 1315, 1322, 1329, 1335, 1342, 1348, 1355, 1362, 1369, 1376, 1385, 1397, 1404, 1417, 1424, 1431, 1437, 1444, 1451, 1458, 1464, 1471, 1478, 1484, 1491, 1498, 1504, 1511, 1515, 1522, 1534, 1547, 1552, 1564, 1577, 1584, 1590, 1597, 1604, 1611, 1618, 1625, 1632, 1639, 1646, 1653, 1660, 1665, 1675, 1683, 1693, 1701, 1705, 1716, 1719, 1731, 1736, 1747, 1756, 1772, 1780, and 1789; (ii) a CDR2 having an amino acid sequence that is at least 65%, at least 70%, at least 75%, at least 80%, at least 85%, at least 90%, at least 95%, at least 99%, or 100% identical to any one of SEQ ID NOs: 1100, 1107, 1114, 1118, 1124, 1131, 1138, 1145, 1152, 1159, 1166, 1178, 1185, 1192, 1204, 1216, 1225, 1232, 1239, 1244, 1251, 1258, 1275, 1282, 1289, 1296, 1303, 1310, 1316, 1323, 1330, 1336, 1343, 1349, 1356, 1363, 1370, 1377, 1386, 1391, 1398, 1405, 1411, 1418, 1425, 1432, 1438, 1445, 1452, 1465, 1472, 1479, 1485, 1492, 1499, 1505, 1516, 1523, 1528, 1535, 1541, 1548, 1553, 1559, 1565, 1571, 1578, 1585, 1591, 1598, 1605, 1612, 1619, 1626, 1633, 1640, 1647, 1654, 1666, 1676, 1684, 1687, 1694, 1702, 1706, 1712, 1717, 1720, 1725, 1732, 1737, 1741, 1748, 1757, 1767, 1773, 1781, and 1790; and (iii) a CDR3 having an amino acid sequence that is at least 65%, at least 70%, at least 75%, at least 80%, at least 85%, at least 90%, at least 95%, at least 99%, or 100% identical to any one of SEQ ID NOs: 1101, 1108, 1115, 1125, 1132, 1139, 1146, 1153, 1160, 1167, 1172, 1179, 1186, 1193, 1197, 1205, 1209, 1217, 1226, 1233, 1240, 1245, 1252, 1259, 1269, 1276, 1283, 1290, 1297, 1304, 1311, 1317, 1324, 1331, 1337, 1344, 1350, 1357, 1364, 1371, 1378, 1387, 1392, 1399, 1406, 1412, 1419, 1426, 1433, 1439, 1446, 1453, 1459, 1466, 1473, 1480, 1486, 1493, 1500, 1506, 1517, 1524, 1529, 1536, 1542, 1549, 1554, 1560, 1566, 1572, 1579, 1586, 1592, 1599, 1606, 1613, 1620, 1627, 1634, 1641, 1648, 1655, 1661, 1667, 1670, 1677, 1685, 1688, 1695, 1703, 1707, 1713, 1733, 1749, 1758, 1762, 1774, 1782, 1791, and 1975; and/or
[6868] VH4 comprises (i) a complementarity determining region (CDR) 1 having an amino acid sequence that is at least 65%, at least 70%, at least 75%, at least 80%, at least 85%, at least 90%, at least 95%, at least 99%, or 100% identical to any one of SEQ ID NOs: 1099, 1106, 1113, 1117, 1123, 1130, 1137, 1144, 1151, 1158, 1165, 1177, 1184, 1191, 1203, 1215, 1224, 1231, 1238, 1243, 1250, 1257, 1264, 1274, 1281, 1288, 1295, 1302, 1309, 1315, 1322, 1329, 1335, 1342, 1348, 1355, 1362, 1369, 1376, 1385, 1397, 1404, 1417, 1424, 1431, 1437, 1444, 1451, 1458, 1464, 1471, 1478, 1484, 1491, 1498, 1504, 1511, 1515, 1522, 1534, 1547, 1552, 1564, 1577, 1584, 1590, 1597, 1604, 1611, 1618, 1625, 1632, 1639, 1646, 1653, 1660, 1665, 1675, 1683, 1693, 1701, 1705, 1716, 1719, 1731, 1736, 1747, 1756, 1772, 1780, and 1789; (ii) a CDR2 having an amino acid sequence that is at least 65%, at least 70%, at least 75%, at least 80%, at least 85%, at least 90%, at least 95%, at least 99%, or 100% identical to any one of SEQ ID NOs: 1100, 1107, 1114, 1118, 1124, 1131, 1138, 1145, 1152, 1159, 1166, 1178, 1185, 1192, 1204, 1216, 1225, 1232, 1239, 1244, 1251, 1258, 1275, 1282, 1289, 1296, 1303, 1310, 1316, 1323, 1330, 1336, 1343, 1349, 1356, 1363, 1370, 1377, 1386, 1391, 1398, 1405, 1411, 1418, 1425, 1432, 1438, 1445, 1452, 1465, 1472, 1479, 1485, 1492, 1499, 1505, 1516, 1523, 1528, 1535, 1541, 1548, 1553, 1559, 1565, 1571, 1578, 1585, 1591, 1598, 1605, 1612, 1619, 1626, 1633, 1640, 1647, 1654, 1666, 1676, 1684, 1687, 1694, 1702, 1706, 1712, 1717, 1720, 1725, 1732, 1737, 1741, 1748, 1757, 1767, 1773, 1781, and 1790; and (iii) a CDR3 having an amino acid sequence that is at least 65%, at least 70%, at least 75%, at least 80%, at least 85%, at least 90%, at least 95%, at least 99%, or 100% identical to any one of SEQ ID NOs: 1101, 1108, 1115, 1125, 1132, 1139, 1146, 1153, 1160, 1167, 1172, 1179, 1186, 1193, 1197, 1205, 1209, 1217, 1226, 1233, 1240, 1245, 1252, 1259, 1269, 1276, 1283, 1290, 1297, 1304, 1311, 1317, 1324, 1331, 1337, 1344, 1350, 1357, 1364, 1371, 1378, 1387, 1392, 1399, 1406, 1412, 1419, 1426, 1433, 1439, 1446, 1453, 1459, 1466, 1473, 1480, 1486, 1493, 1500, 1506, 1517, 1524, 1529, 1536, 1542, 1549, 1554, 1560, 1566, 1572, 1579, 1586, 1592, 1599, 1606, 1613, 1620, 1627, 1634, 1641, 1648, 1655, 1661, 1667, 1670, 1677, 1685, 1688, 1695, 1703, 1707, 1713, 1733, 1749, 1758, 1762, 1774, 1782, 1791, and 1975; or
[6869] (iv)
[6870] VL1 comprises an amino acid sequence that is at least 65%, at least 70%, at least 75%, at least 80%, at least 85%, at least 90%, at least 95%, at least 99%, or 100% identical to any one of SEQ ID NOs: 1098, 1105, 1112, 1122, 1129, 1136, 1143, 1150, 1157, 1164, 1171, 1176, 1183, 1190, 1196, 1202, 1208, 1214, 1219, 1223, 1230, 1237, 1242, 1249, 1256, 1263, 1268, 1273, 1280, 1287, 1294, 1301, 1308, 1314, 1321, 1328, 1334, 1341, 1347, 1354, 1361, 1368, 1375, 1380, 1384, 1390, 1396, 1403, 1410, 1416, 1423, 1430, 1436, 1443, 1450, 1457, 1463, 1470, 1477, 1483, 1490, 1497, 1503, 1510, 1514, 1521, 1527, 1533, 1540, 1546, 1551, 1558, 1563, 1570, 1576, 1583, 1589, 1596, 1603, 1610, 1617, 1624, 1631, 1638, 1645, 1652, 1659, 1664, 1669, 1674, 1682, 1692, 1700, 1711, 1721, 1724, 1730, 1740, 1746, 1755, 1764, 1766, 1771, 1779, 1784, and 1788;
[6871] VL2 comprises an amino acid sequence that is at least 65%, at least 70%, at least 75%, at least 80%, at least 85%, at least 90%, at least 95%, at least 99%, or 100% identical to any one of SEQ ID NOs: 1098, 1105, 1112, 1122, 1129, 1136, 1143, 1150, 1157, 1164, 1171, 1176, 1183, 1190, 1196, 1202, 1208, 1214, 1219, 1223, 1230, 1237, 1242, 1249, 1256, 1263, 1268, 1273, 1280, 1287, 1294, 1301, 1308, 1314, 1321, 1328, 1334, 1341, 1347, 1354, 1361, 1368, 1375, 1380, 1384, 1390, 1396, 1403, 1410, 1416, 1423, 1430, 1436, 1443, 1450, 1457, 1463, 1470, 1477, 1483, 1490, 1497, 1503, 1510, 1514, 1521, 1527, 1533, 1540, 1546, 1551, 1558, 1563, 1570, 1576, 1583, 1589, 1596, 1603, 1610, 1617, 1624, 1631, 1638, 1645, 1652, 1659, 1664, 1669, 1674, 1682, 1692, 1700, 1711, 1721, 1724, 1730, 1740, 1746, 1755, 1764, 1766, 1771, 1779, 1784, and 1788;
[6872] VL3 comprises an amino acid sequence that is at least 65%, at least 70%, at least 75%, at least 80%, at least 85%, at least 90%, at least 95%, at least 99%, or 100% identical to any one of SEQ ID NOs: 1098, 1105, 1112, 1122, 1129, 1136, 1143, 1150, 1157, 1164, 1171, 1176, 1183, 1190, 1196, 1202, 1208, 1214, 1219, 1223, 1230, 1237, 1242, 1249, 1256, 1263, 1268, 1273, 1280, 1287, 1294, 1301, 1308, 1314, 1321, 1328, 1334, 1341, 1347, 1354, 1361, 1368, 1375, 1380, 1384, 1390, 1396, 1403, 1410, 1416, 1423, 1430, 1436, 1443, 1450, 1457, 1463, 1470, 1477, 1483, 1490, 1497, 1503, 1510, 1514, 1521, 1527, 1533, 1540, 1546, 1551, 1558, 1563, 1570, 1576, 1583, 1589, 1596, 1603, 1610, 1617, 1624, 1631, 1638, 1645, 1652, 1659, 1664, 1669, 1674, 1682, 1692, 1700, 1711, 1721, 1724, 1730, 1740, 1746, 1755, 1764, 1766, 1771, 1779, 1784, and 1788;
[6873] VL4 comprises an amino acid sequence that is at least 65%, at least 70%, at least 75%, at least 80%, at least 85%, at least 90%, at least 95%, at least 99%, or 100% identical to any one of SEQ ID NOs: 1098, 1105, 1112, 1122, 1129, 1136, 1143, 1150, 1157, 1164, 1171, 1176, 1183, 1190, 1196, 1202, 1208, 1214, 1219, 1223, 1230, 1237, 1242, 1249, 1256, 1263, 1268, 1273, 1280, 1287, 1294, 1301, 1308, 1314, 1321, 1328, 1334, 1341, 1347, 1354, 1361, 1368, 1375, 1380, 1384, 1390, 1396, 1403, 1410, 1416, 1423, 1430, 1436, 1443, 1450, 1457, 1463, 1470, 1477, 1483, 1490, 1497, 1503, 1510, 1514, 1521, 1527, 1533, 1540, 1546, 1551, 1558, 1563, 1570, 1576, 1583, 1589, 1596, 1603, 1610, 1617, 1624, 1631, 1638, 1645, 1652, 1659, 1664, 1669, 1674, 1682, 1692, 1700, 1711, 1721, 1724, 1730, 1740, 1746, 1755, 1764, 1766, 1771, 1779, 1784, and 1788;
[6874] VH1 comprises an amino acid sequence that is at least 65%, at least 70%, at least 75%, at least 80%, at least 85%, at least 90%, at least 95%, at least 99%, or 100% identical to any one of SEQ ID NOs: 1102, 1109, 1116, 1119, 1126, 1133, 1140, 1147, 1154, 1161, 1168, 1173, 1180, 1187, 1194, 1198, 1206, 1210, 1218, 1220, 1227, 1234, 1241, 1246, 1253, 1260, 1265, 1270, 1277, 1284, 1291, 1298, 1305, 1312, 1318, 1325, 1332, 1338, 1345, 1351, 1358, 1365, 1372, 1379, 1381, 1388, 1393, 1400, 1407, 1413, 1420, 1427, 1434, 1440, 1447, 1454, 1460, 1467, 1474, 1481, 1487, 1494, 1501, 1507, 1512, 1518, 1525, 1530, 1537, 1543, 1550, 1555, 1561, 1567, 1573, 1580, 1587, 1593, 1600, 1607, 1614, 1621, 1628, 1635, 1642, 1649, 1656, 1662, 1668, 1671, 1678, 1686, 1696, 1704, 1714, 1722, 1726, 1734, 1742, 1750, 1759, 1760, 1765, 1768, 1775, 1783, 1785, and 1792;
[6875] VH2 comprises an amino acid sequence that is at least 65%, at least 70%, at least 75%, at least 80%, at least 85%, at least 90%, at least 95%, at least 99%, or 100% identical to any one of SEQ ID NOs: 1102, 1109, 1116, 1119, 1126, 1133, 1140, 1147, 1154, 1161, 1168, 1173, 1180, 1187, 1194, 1198, 1206, 1210, 1218, 1220, 1227, 1234, 1241, 1246, 1253, 1260, 1265, 1270, 1277, 1284, 1291, 1298, 1305, 1312, 1318, 1325, 1332, 1338, 1345, 1351, 1358, 1365, 1372, 1379, 1381, 1388, 1393, 1400, 1407, 1413, 1420, 1427, 1434, 1440, 1447, 1454, 1460, 1467, 1474, 1481, 1487, 1494, 1501, 1507, 1512, 1518, 1525, 1530, 1537, 1543, 1550, 1555, 1561, 1567, 1573, 1580, 1587, 1593, 1600, 1607, 1614, 1621, 1628, 1635, 1642, 1649, 1656, 1662, 1668, 1671, 1678, 1686, 1696, 1704, 1714, 1722, 1726, 1734, 1742, 1750, 1759, 1760, 1765, 1768, 1775, 1783, 1785, and 1792;
[6876] VH3 comprises an amino acid sequence that is at least 65%, at least 70%, at least 75%, at least 80%, at least 85%, at least 90%, at least 95%, at least 99%, or 100% identical to any one of SEQ ID NOs: 1102, 1109, 1116, 1119, 1126, 1133, 1140, 1147, 1154, 1161, 1168, 1173, 1180, 1187, 1194, 1198, 1206, 1210, 1218, 1220, 1227, 1234, 1241, 1246, 1253, 1260, 1265, 1270, 1277, 1284, 1291, 1298, 1305, 1312, 1318, 1325, 1332, 1338, 1345, 1351, 1358, 1365, 1372, 1379, 1381, 1388, 1393, 1400, 1407, 1413, 1420, 1427, 1434, 1440, 1447, 1454, 1460, 1467, 1474, 1481, 1487, 1494, 1501, 1507, 1512, 1518, 1525, 1530, 1537, 1543, 1550, 1555, 1561, 1567, 1573, 1580, 1587, 1593, 1600, 1607, 1614, 1621, 1628, 1635, 1642, 1649, 1656, 1662, 1668, 1671, 1678, 1686, 1696, 1704, 1714, 1722, 1726, 1734, 1742, 1750, 1759, 1760, 1765, 1768, 1775, 1783, 1785, and 1792; and/or
[6877] VH4 comprises an amino acid sequence that is at least 65%, at least 70%, at least 75%, at least 80%, at least 85%, at least 90%, at least 95%, at least 99%, or 100% identical to any one of SEQ ID NOs: 1102, 1109, 1116, 1119, 1126, 1133, 1140, 1147, 1154, 1161, 1168, 1173, 1180, 1187, 1194, 1198, 1206, 1210, 1218, 1220, 1227, 1234, 1241, 1246, 1253, 1260, 1265, 1270, 1277, 1284, 1291, 1298, 1305, 1312, 1318, 1325, 1332, 1338, 1345, 1351, 1358, 1365, 1372, 1379, 1381, 1388, 1393, 1400, 1407, 1413, 1420, 1427, 1434, 1440, 1447, 1454, 1460, 1467, 1474, 1481, 1487, 1494, 1501, 1507, 1512, 1518, 1525, 1530, 1537, 1543, 1550, 1555, 1561, 1567, 1573, 1580, 1587, 1593, 1600, 1607, 1614, 1621, 1628, 1635, 1642, 1649, 1656, 1662, 1668, 1671, 1678, 1686, 1696, 1704, 1714, 1722, 1726, 1734, 1742, 1750, 1759, 1760, 1765, 1768, 1775, 1783, 1785, and 1792; or
[6878] (b)
[6879] (i)
[6880] VL1 comprises a light chain complementarity determining region 1 (LCDR1), LCDR2, and/or LCDR3 of an antibody selected from the group consisting of libivirumab, rmab, rivabazumab pegol, setoxaximab, suvizumab, suvratoxumab, sevirumab, pritoxaximab, porgaviximab, REGN-EB3, obiltoxaximab, gedivumab, foravirumab, larcaviximab, motavizumab, palivizumab, rafivirumab, regavirumab, tuvirumab, cosfroviximab, felvizumab, atidortoxumab, edobacomab, nebacumab, pateclizumab, raxibacumab, urtoxazumab, tosatoxumab, berlimatoxumab, CR6261, diridavumab, firivumab, lesofavumab, navivumab, exbivirumab, lenvervimab, bavituximab, bezlotoxumab, efungumab, leronlimab, nirsevimab, pagibaximab, panobacumab, tefibazumab, ansuvimab, atoltivimab, maftivimab, and odesivimab;
[6881] VL2 comprises a light chain complementarity determining region 1 (LCDR1), LCDR2, and/or LCDR3 of an antibody selected from the group consisting of libivirumab, rmab, rivabazumab pegol, setoxaximab, suvizumab, suvratoxumab, sevirumab, pritoxaximab, porgaviximab, REGN-EB3, obiltoxaximab, gedivumab, foravirumab, larcaviximab, motavizumab, palivizumab, rafivirumab, regavirumab, tuvirumab, cosfroviximab, felvizumab, atidortoxumab, edobacomab, nebacumab, pateclizumab, raxibacumab, urtoxazumab, tosatoxumab, berlimatoxumab, CR6261, diridavumab, firivumab, lesofavumab, navivumab, exbivirumab, lenvervimab, bavituximab, bezlotoxumab, efungumab, leronlimab, nirsevimab, pagibaximab, panobacumab, tefibazumab, ansuvimab, atoltivimab, maftivimab, and odesivimab;
[6882] VL3 comprises a light chain complementarity determining region 1 (LCDR1), LCDR2, and/or LCDR3 of an antibody selected from the group consisting of libivirumab, rmab, rivabazumab pegol, setoxaximab, suvizumab, suvratoxumab, sevirumab, pritoxaximab, porgaviximab, REGN-EB3, obiltoxaximab, gedivumab, foravirumab, larcaviximab, motavizumab, palivizumab, rafivirumab, regavirumab, tuvirumab, cosfroviximab, felvizumab, atidortoxumab, edobacomab, nebacumab, pateclizumab, raxibacumab, urtoxazumab, tosatoxumab, berlimatoxumab, CR6261, diridavumab, firivumab, lesofavumab, navivumab, exbivirumab, lenvervimab, bavituximab, bezlotoxumab, efungumab, leronlimab, nirsevimab, pagibaximab, panobacumab, tefibazumab, ansuvimab, atoltivimab, maftivimab, and odesivimab;
[6883] VL4 comprises a light chain complementarity determining region 1 (LCDR1), LCDR2, and/or LCDR3 of an antibody selected from the group consisting of libivirumab, rmab, rivabazumab pegol, setoxaximab, suvizumab, suvratoxumab, sevirumab, pritoxaximab, porgaviximab, REGN-EB3, obiltoxaximab, gedivumab, foravirumab, larcaviximab, motavizumab, palivizumab, rafivirumab, regavirumab, tuvirumab, cosfroviximab, felvizumab, atidortoxumab, edobacomab, nebacumab, pateclizumab, raxibacumab, urtoxazumab, tosatoxumab, berlimatoxumab, CR6261, diridavumab, firivumab, lesofavumab, navivumab, exbivirumab, lenvervimab, bavituximab, bezlotoxumab, efungumab, leronlimab, nirsevimab, pagibaximab, panobacumab, tefibazumab, ansuvimab, atoltivimab, maftivimab, and odesivimab;
[6884] VH1 comprises a heavy chain complementarity determining region 1 (HCDR1), HCDR2, and/or HCDR3 of an antibody selected from the group consisting of libivirumab, rmab, rivabazumab pegol, setoxaximab, suvizumab, suvratoxumab, sevirumab, pritoxaximab, porgaviximab, REGN-EB3, obiltoxaximab, gedivumab, foravirumab, larcaviximab, motavizumab, palivizumab, rafivirumab, regavirumab, tuvirumab, cosfroviximab, felvizumab, atidortoxumab, edobacomab, nebacumab, pateclizumab, raxibacumab, urtoxazumab, tosatoxumab, berlimatoxumab, CR6261, diridavumab, firivumab, lesofavumab, navivumab, exbivirumab, lenvervimab, bavituximab, bezlotoxumab, efungumab, leronlimab, nirsevimab, pagibaximab, panobacumab, tefibazumab, ansuvimab, atoltivimab, maftivimab, and odesivimab;
[6885] VH2 comprises a heavy chain complementarity determining region 1 (HCDR1), HCDR2, and/or HCDR3 of an antibody selected from the group consisting of libivirumab, rmab, rivabazumab pegol, setoxaximab, suvizumab, suvratoxumab, sevirumab, pritoxaximab, porgaviximab, REGN-EB3, obiltoxaximab, gedivumab, foravirumab, larcaviximab, motavizumab, palivizumab, rafivirumab, regavirumab, tuvirumab, cosfroviximab, felvizumab, atidortoxumab, edobacomab, nebacumab, pateclizumab, raxibacumab, urtoxazumab, tosatoxumab, berlimatoxumab, CR6261, diridavumab, firivumab, lesofavumab, navivumab, exbivirumab, lenvervimab, bavituximab, bezlotoxumab, efungumab, leronlimab, nirsevimab, pagibaximab, panobacumab, tefibazumab, ansuvimab, atoltivimab, maftivimab, and odesivimab;
[6886] VH3 comprises a heavy chain complementarity determining region 1 (HCDR1), HCDR2, and/or HCDR3 of an antibody selected from the group consisting of libivirumab, rmab, rivabazumab pegol, setoxaximab, suvizumab, suvratoxumab, sevirumab, pritoxaximab, porgaviximab, REGN-EB3, obiltoxaximab, gedivumab, foravirumab, larcaviximab, motavizumab, palivizumab, rafivirumab, regavirumab, tuvirumab, cosfroviximab, felvizumab, atidortoxumab, edobacomab, nebacumab, pateclizumab, raxibacumab, urtoxazumab, tosatoxumab, berlimatoxumab, CR6261, diridavumab, firivumab, lesofavumab, navivumab, exbivirumab, lenvervimab, bavituximab, bezlotoxumab, efungumab, leronlimab, nirsevimab, pagibaximab, panobacumab, tefibazumab, ansuvimab, atoltivimab, maftivimab, and odesivimab; and/or
[6887] VH4 comprises a heavy chain complementarity determining region 1 (HCDR1), HCDR2, and/or HCDR3 of an antibody selected from the group consisting of libivirumab, rmab, rivabazumab pegol, setoxaximab, suvizumab, suvratoxumab, sevirumab, pritoxaximab, porgaviximab, REGN-EB3, obiltoxaximab, gedivumab, foravirumab, larcaviximab, motavizumab, palivizumab, rafivirumab, regavirumab, tuvirumab, cosfroviximab, felvizumab, atidortoxumab, edobacomab, nebacumab, pateclizumab, raxibacumab, urtoxazumab, tosatoxumab, berlimatoxumab, CR6261, diridavumab, firivumab, lesofavumab, navivumab, exbivirumab, lenvervimab, bavituximab, bezlotoxumab, efungumab, leronlimab, nirsevimab, pagibaximab, panobacumab, tefibazumab, ansuvimab, atoltivimab, maftivimab, and odesivimab; or
[6888] (ii)
[6889] VL1 comprises a VL of an antibody selected from the group consisting of libivirumab, rmab, rivabazumab pegol, setoxaximab, suvizumab, suvratoxumab, sevirumab, pritoxaximab, porgaviximab, REGN-EB3, obiltoxaximab, gedivumab, foravirumab, larcaviximab, motavizumab, palivizumab, rafivirumab, regavirumab, tuvirumab, cosfroviximab, felvizumab, atidortoxumab, edobacomab, nebacumab, pateclizumab, raxibacumab, urtoxazumab, tosatoxumab, berlimatoxumab, CR6261, diridavumab, firivumab, lesofavumab, navivumab, exbivirumab, lenvervimab, bavituximab, bezlotoxumab, efungumab, leronlimab, nirsevimab, pagibaximab, panobacumab, tefibazumab, ansuvimab, atoltivimab, maftivimab, and odesivimab;
[6890] VL2 comprises a VL of an antibody selected from the group consisting of libivirumab, rmab, rivabazumab pegol, setoxaximab, suvizumab, suvratoxumab, sevirumab, pritoxaximab, porgaviximab, REGN-EB3, obiltoxaximab, gedivumab, foravirumab, larcaviximab, motavizumab, palivizumab, rafivirumab, regavirumab, tuvirumab, cosfroviximab, felvizumab, atidortoxumab, edobacomab, nebacumab, pateclizumab, raxibacumab, urtoxazumab, tosatoxumab, berlimatoxumab, CR6261, diridavumab, firivumab, lesofavumab, navivumab, exbivirumab, lenvervimab, bavituximab, bezlotoxumab, efungumab, leronlimab, nirsevimab, pagibaximab, panobacumab, tefibazumab, ansuvimab, atoltivimab, maftivimab, and odesivimab;
[6891] VL3 comprises a VL of an antibody selected from the group consisting of libivirumab, rmab, rivabazumab pegol, setoxaximab, suvizumab, suvratoxumab, sevirumab, pritoxaximab, porgaviximab, REGN-EB3, obiltoxaximab, gedivumab, foravirumab, larcaviximab, motavizumab, palivizumab, rafivirumab, regavirumab, tuvirumab, cosfroviximab, felvizumab, atidortoxumab, edobacomab, nebacumab, pateclizumab, raxibacumab, urtoxazumab, tosatoxumab, berlimatoxumab, CR6261, diridavumab, firivumab, lesofavumab, navivumab, exbivirumab, lenvervimab, bavituximab, bezlotoxumab, efungumab, leronlimab, nirsevimab, pagibaximab, panobacumab, tefibazumab, ansuvimab, atoltivimab, maftivimab, and odesivimab;
[6892] VL4 comprises a VL of an antibody selected from the group consisting of libivirumab, rmab, rivabazumab pegol, setoxaximab, suvizumab, suvratoxumab, sevirumab, pritoxaximab, porgaviximab, REGN-EB3, obiltoxaximab, gedivumab, foravirumab, larcaviximab, motavizumab, palivizumab, rafivirumab, regavirumab, tuvirumab, cosfroviximab, felvizumab, atidortoxumab, edobacomab, nebacumab, pateclizumab, raxibacumab, urtoxazumab, tosatoxumab, berlimatoxumab, CR6261, diridavumab, firivumab, lesofavumab, navivumab, exbivirumab, lenvervimab, bavituximab, bezlotoxumab, efungumab, leronlimab, nirsevimab, pagibaximab, panobacumab, tefibazumab, ansuvimab, atoltivimab, maftivimab, and odesivimab;
[6893] VH1 comprises a VH of an antibody selected from the group consisting of libivirumab, rmab, rivabazumab pegol, setoxaximab, suvizumab, suvratoxumab, sevirumab, pritoxaximab, porgaviximab, REGN-EB3, obiltoxaximab, gedivumab, foravirumab, larcaviximab, motavizumab, palivizumab, rafivirumab, regavirumab, tuvirumab, cosfroviximab, felvizumab, atidortoxumab, edobacomab, nebacumab, pateclizumab, raxibacumab, urtoxazumab, tosatoxumab, berlimatoxumab, CR6261, diridavumab, firivumab, lesofavumab, navivumab, exbivirumab, lenvervimab, bavituximab, bezlotoxumab, efungumab, leronlimab, nirsevimab, pagibaximab, panobacumab, tefibazumab, ansuvimab, atoltivimab, maftivimab, and odesivimab;
[6894] VH2 comprises a VH of an antibody selected from the group consisting of libivirumab, rmab, rivabazumab pegol, setoxaximab, suvizumab, suvratoxumab, sevirumab, pritoxaximab, porgaviximab, REGN-EB3, obiltoxaximab, gedivumab, foravirumab, larcaviximab, motavizumab, palivizumab, rafivirumab, regavirumab, tuvirumab, cosfroviximab, felvizumab, atidortoxumab, edobacomab, nebacumab, pateclizumab, raxibacumab, urtoxazumab, tosatoxumab, berlimatoxumab, CR6261, diridavumab, firivumab, lesofavumab, navivumab, exbivirumab, lenvervimab, bavituximab, bezlotoxumab, efungumab, leronlimab, nirsevimab, pagibaximab, panobacumab, tefibazumab, ansuvimab, atoltivimab, maftivimab, and odesivimab;
[6895] VH3 comprises a VH of an antibody selected from the group consisting of libivirumab, rmab, rivabazumab pegol, setoxaximab, suvizumab, suvratoxumab, sevirumab, pritoxaximab, porgaviximab, REGN-EB3, obiltoxaximab, gedivumab, foravirumab, larcaviximab, motavizumab, palivizumab, rafivirumab, regavirumab, tuvirumab, cosfroviximab, felvizumab, atidortoxumab, edobacomab, nebacumab, pateclizumab, raxibacumab, urtoxazumab, tosatoxumab, berlimatoxumab, CR6261, diridavumab, firivumab, lesofavumab, navivumab, exbivirumab, lenvervimab, bavituximab, bezlotoxumab, efungumab, leronlimab, nirsevimab, pagibaximab, panobacumab, tefibazumab, ansuvimab, atoltivimab, maftivimab, and odesivimab; and/or
[6896] VH4 comprises a VH of an antibody selected from the group consisting of libivirumab, rmab, rivabazumab pegol, setoxaximab, suvizumab, suvratoxumab, sevirumab, pritoxaximab, porgaviximab, REGN-EB3, obiltoxaximab, gedivumab, foravirumab, larcaviximab, motavizumab, palivizumab, rafivirumab, regavirumab, tuvirumab, cosfroviximab, felvizumab, atidortoxumab, edobacomab, nebacumab, pateclizumab, raxibacumab, urtoxazumab, tosatoxumab, berlimatoxumab, CR6261, diridavumab, firivumab, lesofavumab, navivumab, exbivirumab, lenvervimab, bavituximab, bezlotoxumab, efungumab, leronlimab, nirsevimab, pagibaximab, panobacumab, tefibazumab, ansuvimab, atoltivimab, maftivimab, and odesivimab; or
[6897] (iii)
[6898] VL1 comprises (i) a complementarity determining region (CDR) 1 having an amino acid sequence that is at least 65%, at least 70%, at least 75%, at least 80%, at least 85%, at least 90%, at least 95%, at least 99%, or 100% identical to any one of SEQ ID NOs: 1428, 1793, 1798, 1810, 1817, 1824, 1977, 1985, 1993 and 2001; (ii) a CDR2 having an amino acid sequence that is at least 65%, at least 70%, at least 75%, at least 80%, at least 85%, at least 90%, at least 95%, at least 99%, or 100% identical to any one of SEQ ID NOs: 1978, 1986, 1994, and 2002; or at least 65%, at least 70%, at least 75%, at least 80%, at least 85%, at least 90%, at least 95%, at least 99%, or 100% identical to any one of amino acid sequences YTS, DTS, GAS, and AAS; and (iii) a CDR3 having an amino acid sequence that is at least 65%, at least 70%, at least 75%, at least 80%, at least 85%, at least 90%, at least 95%, at least 99%, or 100% identical to any one of SEQ ID NOs: 1229, 1799, 1805, 1811, 1818, 1825, 1979, 1987, 1995, and 2003;
[6899] VL2 comprises (i) a complementarity determining region (CDR) 1 having an amino acid sequence that is at least 65%, at least 70%, at least 75%, at least 80%, at least 85%, at least 90%, at least 95%, at least 99%, or 100% identical to any one of SEQ ID NOs: 1428, 1793, 1798, 1810, 1817, 1824, 1977, 1985, 1993 and 2001; (ii) a CDR2 having an amino acid sequence that is at least 65%, at least 70%, at least 75%, at least 80%, at least 85%, at least 90%, at least 95%, at least 99%, or 100% identical to any one of SEQ ID NOs: 1978, 1986, 1994, and 2002; or at least 65%, at least 70%, at least 75%, at least 80%, at least 85%, at least 90%, at least 95%, at least 99%, or 100% identical to any one of amino acid sequences YTS, DTS, GAS, and AAS; and (iii) a CDR3 having an amino acid sequence that is at least 65%, at least 70%, at least 75%, at least 80%, at least 85%, at least 90%, at least 95%, at least 99%, or 100% identical to any one of SEQ ID NOs: 1229, 1799, 1805, 1811, 1818, 1825, 1979, 1987, 1995, and 2003;
[6900] VL3 comprises (i) a complementarity determining region (CDR) 1 having an amino acid sequence that is at least 65%, at least 70%, at least 75%, at least 80%, at least 85%, at least 90%, at least 95%, at least 99%, or 100% identical to any one of SEQ ID NOs: 1428, 1793, 1798, 1810, 1817, 1824, 1977, 1985, 1993 and 2001; (ii) a CDR2 having an amino acid sequence that is at least 65%, at least 70%, at least 75%, at least 80%, at least 85%, at least 90%, at least 95%, at least 99%, or 100% identical to any one of SEQ ID NOs: 1978, 1986, 1994, and 2002; or at least 65%, at least 70%, at least 75%, at least 80%, at least 85%, at least 90%, at least 95%, at least 99%, or 100% identical to any one of amino acid sequences YTS, DTS, GAS, and AAS; and (iii) a CDR3 having an amino acid sequence that is at least 65%, at least 70%, at least 75%, at least 80%, at least 85%, at least 90%, at least 95%, at least 99%, or 100% identical to any one of SEQ ID NOs: 1229, 1799, 1805, 1811, 1818, 1825, 1979, 1987, 1995, and 2003;
[6901] VL4 comprises (i) a complementarity determining region (CDR) 1 having an amino acid sequence that is at least 65%, at least 70%, at least 75%, at least 80%, at least 85%, at least 90%, at least 95%, at least 99%, or 100% identical to any one of SEQ ID NOs: 1428, 1793, 1798, 1810, 1817, 1824, 1977, 1985, 1993 and 2001; (ii) a CDR2 having an amino acid sequence that is at least 65%, at least 70%, at least 75%, at least 80%, at least 85%, at least 90%, at least 95%, at least 99%, or 100% identical to any one of SEQ ID NOs: 1978, 1986, 1994, and 2002; or at least 65%, at least 70%, at least 75%, at least 80%, at least 85%, at least 90%, at least 95%, at least 99%, or 100% identical to any one of amino acid sequences YTS, DTS, GAS, and AAS; and (iii) a CDR3 having an amino acid sequence that is at least 65%, at least 70%, at least 75%, at least 80%, at least 85%, at least 90%, at least 95%, at least 99%, or 100% identical to any one of SEQ ID NOs: 1229, 1799, 1805, 1811, 1818, 1825, 1979, 1987, 1995, and 2003;
[6902] VH1 comprises (i) a complementarity determining region (CDR) 1 having an amino acid sequence that is at least 65%, at least 70%, at least 75%, at least 80%, at least 85%, at least 90%, at least 95%, at least 99%, or 100% identical to any one of SEQ ID NOs: 1577, 1795, 1801, 1813, 1820, 1827, 1981, 1989, 1997, and 2005; (ii) a CDR2 having an amino acid sequence that is at least 65%, at least 70%, at least 75%, at least 80%, at least 85%, at least 90%, at least 95%, at least 99%, or 100% identical to any one of SEQ ID NOs: 1159, 1802, 1807, 1814, 1821, 1828, 1982, 1990, 1998, and 2006; and (iii) a CDR3 having an amino acid sequence that is at least 65%, at least 70%, at least 75%, at least 80%, at least 85%, at least 90%, at least 95%, at least 99%, or 100% identical to any one of SEQ ID NOs: 1796, 1803, 1808, 1815, 1822, 1829, 1983, 1991, 1999, and 2007;
[6903] VH2 comprises (i) a complementarity determining region (CDR) 1 having an amino acid sequence that is at least 65%, at least 70%, at least 75%, at least 80%, at least 85%, at least 90%, at least 95%, at least 99%, or 100% identical to any one of SEQ ID NOs: 1577, 1795, 1801, 1813, 1820, 1827, 1981, 1989, 1997, and 2005; (ii) a CDR2 having an amino acid sequence that is at least 65%, at least 70%, at least 75%, at least 80%, at least 85%, at least 90%, at least 95%, at least 99%, or 100% identical to any one of SEQ ID NOs: 1159, 1802, 1807, 1814, 1821, 1828, 1982, 1990, 1998, and 2006; and (iii) a CDR3 having an amino acid sequence that is at least 65%, at least 70%, at least 75%, at least 80%, at least 85%, at least 90%, at least 95%, at least 99%, or 100% identical to any one of SEQ ID NOs: 1796, 1803, 1808, 1815, 1822, 1829, 1983, 1991, 1999, and 2007;
[6904] VH3 comprises (i) a complementarity determining region (CDR) 1 having an amino acid sequence that is at least 65%, at least 70%, at least 75%, at least 80%, at least 85%, at least 90%, at least 95%, at least 99%, or 100% identical to any one of SEQ ID NOs: 1577, 1795, 1801, 1813, 1820, 1827, 1981, 1989, 1997, and 2005; (ii) a CDR2 having an amino acid sequence that is at least 65%, at least 70%, at least 75%, at least 80%, at least 85%, at least 90%, at least 95%, at least 99%, or 100% identical to any one of SEQ ID NOs: 1159, 1802, 1807, 1814, 1821, 1828, 1982, 1990, 1998, and 2006; and (iii) a CDR3 having an amino acid sequence that is at least 65%, at least 70%, at least 75%, at least 80%, at least 85%, at least 90%, at least 95%, at least 99%, or 100% identical to any one of SEQ ID NOs: 1796, 1803, 1808, 1815, 1822, 1829, 1983, 1991, 1999, and 2007; and/or
[6905] VH4 comprises (i) a complementarity determining region (CDR) 1 having an amino acid sequence that is at least 65%, at least 70%, at least 75%, at least 80%, at least 85%, at least 90%, at least 95%, at least 99%, or 100% identical to any one of SEQ ID NOs: 1577, 1795, 1801, 1813, 1820, 1827, 1981, 1989, 1997, and 2005; (ii) a CDR2 having an amino acid sequence that is at least 65%, at least 70%, at least 75%, at least 80%, at least 85%, at least 90%, at least 95%, at least 99%, or 100% identical to any one of SEQ ID NOs: 1159, 1802, 1807, 1814, 1821, 1828, 1982, 1990, 1998, and 2006; and (iii) a CDR3 having an amino acid sequence that is at least 65%, at least 70%, at least 75%, at least 80%, at least 85%, at least 90%, at least 95%, at least 99%, or 100% identical to any one of SEQ ID NOs: 1796, 1803, 1808, 1815, 1822, 1829, 1983, 1991, 1999, and 2007; or
[6906] (iv)
[6907] VL1 comprises an amino acid sequence that is at least 65%, at least 70%, at least 75%, at least 80%, at least 85%, at least 90%, at least 95%, at least 99%, or 100% identical to any one of SEQ ID NOs: 1794, 1800, 1806, 1812, 1819, 1826, 1980, 1988, 1996, and 2004;
[6908] VL2 comprises an amino acid sequence that is at least 65%, at least 70%, at least 75%, at least 80%, at least 85%, at least 90%, at least 95%, at least 99%, or 100% identical to any one of SEQ ID NOs: 1794, 1800, 1806, 1812, 1819, 1826, 1980, 1988, 1996, and 2004;
[6909] VL3 comprises an amino acid sequence that is at least 65%, at least 70%, at least 75%, at least 80%, at least 85%, at least 90%, at least 95%, at least 99%, or 100% identical to any one of SEQ ID NOs: 1794, 1800, 1806, 1812, 1819, 1826, 1980, 1988, 1996, and 2004;
[6910] VL4 comprises an amino acid sequence that is at least 65%, at least 70%, at least 75%, at least 80%, at least 85%, at least 90%, at least 95%, at least 99%, or 100% identical to any one of SEQ ID NOs: 1794, 1800, 1806, 1812, 1819, 1826, 1980, 1988, 1996, and 2004;
[6911] VH1 comprises an amino acid sequence that is at least 65%, at least 70%, at least 75%, at least 80%, at least 85%, at least 90%, at least 95%, at least 99%, or 100% identical to any one of SEQ ID NOS 1797, 1804, 1809, 1816, 1823, 1830, 1984, 1992, 2000, and 2008;
[6912] VH2 comprises an amino acid sequence that is at least 65%, at least 70%, at least 75%, at least 80%, at least 85%, at least 90%, at least 95%, at least 99%, or 100% identical to any one of SEQ ID NOS 1797, 1804, 1809, 1816, 1823, 1830, 1984, 1992, 2000, and 2008;
[6913] VH3 comprises an amino acid sequence that is at least 65%, at least 70%, at least 75%, at least 80%, at least 85%, at least 90%, at least 95%, at least 99%, or 100% identical to any one of SEQ ID NOS 1797, 1804, 1809, 1816, 1823, 1830, 1984, 1992, 2000, and 2008; and/or
[6914] VH4 comprises an amino acid sequence that is at least 65%, at least 70%, at least 75%, at least 80%, at least 85%, at least 90%, at least 95%, at least 99%, or 100% identical to any one of SEQ ID NOS 1797, 1804, 1809, 1816, 1823, 1830, 1984, 1992, 2000, and 2008; or
[6915] (c)
[6916] (i)
[6917] VL1 comprises a light chain complementarity determining region 1 (LCDR1), LCDR2, and/or LCDR3 of an antibody selected from the group consisting of aducanumab, alirocumab, frovocimab, lodelcizumab, bococizumab, evolocumab, ralpancizumab, anifrolumab, atorolimumab, bapineuzumab, bedinvetmab, begelomab, biciromab, bimagrumab, birtamimab, blosozumab, burosumab, caplacizumab, concizumab, crenezumab, crizanlizumab, crotedumab, dezamizumab, domagrozumab, donanemab, eldelumab, elezanumab, emapalumab, emicizumab, eptinezumab, erenumab, evinacumab, faralimomab, fasinumab, fontolizumab, fremanezumab, frunevetmab, fulranumab, galcanezumab, gantenerumab, gosuranemab, idarucizumab, imciromab, inclacumab, lampalizumab, lanadelumab, landogrozumab, lecanemab, ligelizumab, marstacimab, mavrilimumab, morolimumab, NEOD001, omalizumab, oMS721, orticumab, otilimab, ozanezumab, ponezumab, prasinezumab, quilizumab, ranevetmab, refanezumab, roledumab, romosozumab, rozanolixizumab, setrusumab, SHP647, solanezumab, stamulumab, suptavumab, sutimlimab, tanezumab, crovalimab, and lokivetmab;
[6918] VL2 comprises a light chain complementarity determining region 1 (LCDR1), LCDR2, and/or LCDR3 of an antibody selected from the group consisting of aducanumab, alirocumab, frovocimab, lodelcizumab, bococizumab, evolocumab, ralpancizumab, anifrolumab, atorolimumab, bapineuzumab, bedinvetmab, begelomab, biciromab, bimagrumab, birtamimab, blosozumab, burosumab, caplacizumab, concizumab, crenezumab, crizanlizumab, crotedumab, dezamizumab, domagrozumab, donanemab, eldelumab, elezanumab, emapalumab, emicizumab, eptinezumab, erenumab, evinacumab, faralimomab, fasinumab, fontolizumab, fremanezumab, frunevetmab, fulranumab, galcanezumab, gantenerumab, gosuranemab, idarucizumab, imciromab, inclacumab, lampalizumab, lanadelumab, landogrozumab, lecanemab, ligelizumab, marstacimab, mavrilimumab, morolimumab, NEOD001, omalizumab, oMS721, orticumab, otilimab, ozanezumab, ponezumab, prasinezumab, quilizumab, ranevetmab, refanezumab, roledumab, romosozumab, rozanolixizumab, setrusumab, SHP647, solanezumab, stamulumab, suptavumab, sutimlimab, tanezumab, crovalimab, and lokivetmab;
[6919] VL3 comprises a light chain complementarity determining region 1 (LCDR1), LCDR2, and/or LCDR3 of an antibody selected from the group consisting of aducanumab, alirocumab, frovocimab, lodelcizumab, bococizumab, evolocumab, ralpancizumab, anifrolumab, atorolimumab, bapineuzumab, bedinvetmab, begelomab, biciromab, bimagrumab, birtamimab, blosozumab, burosumab, caplacizumab, concizumab, crenezumab, crizanlizumab, crotedumab, dezamizumab, domagrozumab, donanemab, eldelumab, elezanumab, emapalumab, emicizumab, eptinezumab, erenumab, evinacumab, faralimomab, fasinumab, fontolizumab, fremanezumab, frunevetmab, fulranumab, galcanezumab, gantenerumab, gosuranemab, idarucizumab, imciromab, inclacumab, lampalizumab, lanadelumab, landogrozumab, lecanemab, ligelizumab, marstacimab, mavrilimumab, morolimumab, NEOD001, omalizumab, oMS721, orticumab, otilimab, ozanezumab, ponezumab, prasinezumab, quilizumab, ranevetmab, refanezumab, roledumab, romosozumab, rozanolixizumab, setrusumab, SHP647, solanezumab, stamulumab, suptavumab, sutimlimab, tanezumab, crovalimab, and lokivetmab;
[6920] VL4 comprises a light chain complementarity determining region 1 (LCDR1), LCDR2, and/or LCDR3 of an antibody selected from the group consisting of aducanumab, alirocumab, frovocimab, lodelcizumab, bococizumab, evolocumab, ralpancizumab, anifrolumab, atorolimumab, bapineuzumab, bedinvetmab, begelomab, biciromab, bimagrumab, birtamimab, blosozumab, burosumab, caplacizumab, concizumab, crenezumab, crizanlizumab, crotedumab, dezamizumab, domagrozumab, donanemab, eldelumab, elezanumab, emapalumab, emicizumab, eptinezumab, erenumab, evinacumab, faralimomab, fasinumab, fontolizumab, fremanezumab, frunevetmab, fulranumab, galcanezumab, gantenerumab, gosuranemab, idarucizumab, imciromab, inclacumab, lampalizumab, lanadelumab, landogrozumab, lecanemab, ligelizumab, marstacimab, mavrilimumab, morolimumab, NEOD001, omalizumab, oMS721, orticumab, otilimab, ozanezumab, ponezumab, prasinezumab, quilizumab, ranevetmab, refanezumab, roledumab, romosozumab, rozanolixizumab, setrusumab, SHP647, solanezumab, stamulumab, suptavumab, sutimlimab, tanezumab, crovalimab, and lokivetmab;
[6921] VH1 comprises a heavy chain complementarity determining region 1 (HCDR1), HCDR2, and/or HCDR3 of an antibody selected from the group consisting of aducanumab, alirocumab, frovocimab, lodelcizumab, bococizumab, evolocumab, ralpancizumab, anifrolumab, atorolimumab, bapineuzumab, bedinvetmab, begelomab, biciromab, bimagrumab, birtamimab, blosozumab, burosumab, caplacizumab, concizumab, crenezumab, crizanlizumab, crotedumab, dezamizumab, domagrozumab, donanemab, eldelumab, elezanumab, emapalumab, emicizumab, eptinezumab, erenumab, evinacumab, faralimomab, fasinumab, fontolizumab, fremanezumab, frunevetmab, fulranumab, galcanezumab, gantenerumab, gosuranemab, idarucizumab, imciromab, inclacumab, lampalizumab, lanadelumab, landogrozumab, lecanemab, ligelizumab, marstacimab, mavrilimumab, morolimumab, NEOD001, omalizumab, oMS721, orticumab, otilimab, ozanezumab, ponezumab, prasinezumab, quilizumab, ranevetmab, refanezumab, roledumab, romosozumab, rozanolixizumab, setrusumab, SHP647, solanezumab, stamulumab, suptavumab, sutimlimab, tanezumab, crovalimab, and lokivetmab;
[6922] VH2 comprises a heavy chain complementarity determining region 1 (HCDR1), HCDR2, and/or HCDR3 of an antibody selected from the group consisting of aducanumab, alirocumab, frovocimab, lodelcizumab, bococizumab, evolocumab, ralpancizumab, anifrolumab, atorolimumab, bapineuzumab, bedinvetmab, begelomab, biciromab, bimagrumab, birtamimab, blosozumab, burosumab, caplacizumab, concizumab, crenezumab, crizanlizumab, crotedumab, dezamizumab, domagrozumab, donanemab, eldelumab, elezanumab, emapalumab, emicizumab, eptinezumab, erenumab, evinacumab, faralimomab, fasinumab, fontolizumab, fremanezumab, frunevetmab, fulranumab, galcanezumab, gantenerumab, gosuranemab, idarucizumab, imciromab, inclacumab, lampalizumab, lanadelumab, landogrozumab, lecanemab, ligelizumab, marstacimab, mavrilimumab, morolimumab, NEOD001, omalizumab, oMS721, orticumab, otilimab, ozanezumab, ponezumab, prasinezumab, quilizumab, ranevetmab, refanezumab, roledumab, romosozumab, rozanolixizumab, setrusumab, SHP647, solanezumab, stamulumab, suptavumab, sutimlimab, tanezumab, crovalimab, and lokivetmab;
[6923] VH3 comprises a heavy chain complementarity determining region 1 (HCDR1), HCDR2, and/or HCDR3 of an antibody selected from the group consisting of aducanumab, alirocumab, frovocimab, lodelcizumab, bococizumab, evolocumab, ralpancizumab, anifrolumab, atorolimumab, bapineuzumab, bedinvetmab, begelomab, biciromab, bimagrumab, birtamimab, blosozumab, burosumab, caplacizumab, concizumab, crenezumab, crizanlizumab, crotedumab, dezamizumab, domagrozumab, donanemab, eldelumab, elezanumab, emapalumab, emicizumab, eptinezumab, erenumab, evinacumab, faralimomab, fasinumab, fontolizumab, fremanezumab, frunevetmab, fulranumab, galcanezumab, gantenerumab, gosuranemab, idarucizumab, imciromab, inclacumab, lampalizumab, lanadelumab, landogrozumab, lecanemab, ligelizumab, marstacimab, mavrilimumab, morolimumab, NEOD001, omalizumab, oMS721, orticumab, otilimab, ozanezumab, ponezumab, prasinezumab, quilizumab, ranevetmab, refanezumab, roledumab, romosozumab, rozanolixizumab, setrusumab, SHP647, solanezumab, stamulumab, suptavumab, sutimlimab, tanezumab, crovalimab, and lokivetmab; and/or
[6924] VH4 comprises a heavy chain complementarity determining region 1 (HCDR1), HCDR2, and/or HCDR3 of an antibody selected from the group consisting of aducanumab, alirocumab, frovocimab, lodelcizumab, bococizumab, evolocumab, ralpancizumab, anifrolumab, atorolimumab, bapineuzumab, bedinvetmab, begelomab, biciromab, bimagrumab, birtamimab, blosozumab, burosumab, caplacizumab, concizumab, crenezumab, crizanlizumab, crotedumab, dezamizumab, domagrozumab, donanemab, eldelumab, elezanumab, emapalumab, emicizumab, eptinezumab, erenumab, evinacumab, faralimomab, fasinumab, fontolizumab, fremanezumab, frunevetmab, fulranumab, galcanezumab, gantenerumab, gosuranemab, idarucizumab, imciromab, inclacumab, lampalizumab, lanadelumab, landogrozumab, lecanemab, ligelizumab, marstacimab, mavrilimumab, morolimumab, NEOD001, omalizumab, oMS721, orticumab, otilimab, ozanezumab, ponezumab, prasinezumab, quilizumab, ranevetmab, refanezumab, roledumab, romosozumab, rozanolixizumab, setrusumab, SHP647, solanezumab, stamulumab, suptavumab, sutimlimab, tanezumab, crovalimab, and lokivetmab; or
[6925] (ii)
[6926] VL1 comprises a VL of an antibody selected from the group consisting of aducanumab, alirocumab, frovocimab, lodelcizumab, bococizumab, evolocumab, ralpancizumab, anifrolumab, atorolimumab, bapineuzumab, bedinvetmab, begelomab, biciromab, bimagrumab, birtamimab, blosozumab, burosumab, caplacizumab, concizumab, crenezumab, crizanlizumab, crotedumab, dezamizumab, domagrozumab, donanemab, eldelumab, elezanumab, emapalumab, emicizumab, eptinezumab, erenumab, evinacumab, faralimomab, fasinumab, fontolizumab, fremanezumab, frunevetmab, fulranumab, galcanezumab, gantenerumab, gosuranemab, idarucizumab, imciromab, inclacumab, lampalizumab, lanadelumab, landogrozumab, lecanemab, ligelizumab, marstacimab, mavrilimumab, morolimumab, NEOD001, omalizumab, oMS721, orticumab, otilimab, ozanezumab, ponezumab, prasinezumab, quilizumab, ranevetmab, refanezumab, roledumab, romosozumab, rozanolixizumab, setrusumab, SHP647, solanezumab, stamulumab, suptavumab, sutimlimab, tanezumab, crovalimab, and lokivetmab;
[6927] VL2 comprises a VL of an antibody selected from the group consisting of aducanumab, alirocumab, frovocimab, lodelcizumab, bococizumab, evolocumab, ralpancizumab, anifrolumab, atorolimumab, bapineuzumab, bedinvetmab, begelomab, biciromab, bimagrumab, birtamimab, blosozumab, burosumab, caplacizumab, concizumab, crenezumab, crizanlizumab, crotedumab, dezamizumab, domagrozumab, donanemab, eldelumab, elezanumab, emapalumab, emicizumab, eptinezumab, erenumab, evinacumab, faralimomab, fasinumab, fontolizumab, fremanezumab, frunevetmab, fulranumab, galcanezumab, gantenerumab, gosuranemab, idarucizumab, imciromab, inclacumab, lampalizumab, lanadelumab, landogrozumab, lecanemab, ligelizumab, marstacimab, mavrilimumab, morolimumab, NEOD001, omalizumab, oMS721, orticumab, otilimab, ozanezumab, ponezumab, prasinezumab, quilizumab, ranevetmab, refanezumab, roledumab, romosozumab, rozanolixizumab, setrusumab, SHP647, solanezumab, stamulumab, suptavumab, sutimlimab, tanezumab, crovalimab, and lokivetmab;
[6928] VL3 comprises a VL of an antibody selected from the group consisting of aducanumab, alirocumab, frovocimab, lodelcizumab, bococizumab, evolocumab, ralpancizumab, anifrolumab, atorolimumab, bapineuzumab, bedinvetmab, begelomab, biciromab, bimagrumab, birtamimab, blosozumab, burosumab, caplacizumab, concizumab, crenezumab, crizanlizumab, crotedumab, dezamizumab, domagrozumab, donanemab, eldelumab, elezanumab, emapalumab, emicizumab, eptinezumab, erenumab, evinacumab, faralimomab, fasinumab, fontolizumab, fremanezumab, frunevetmab, fulranumab, galcanezumab, gantenerumab, gosuranemab, idarucizumab, imciromab, inclacumab, lampalizumab, lanadelumab, landogrozumab, lecanemab, ligelizumab, marstacimab, mavrilimumab, morolimumab, NEOD001, omalizumab, oMS721, orticumab, otilimab, ozanezumab, ponezumab, prasinezumab, quilizumab, ranevetmab, refanezumab, roledumab, romosozumab, rozanolixizumab, setrusumab, SHP647, solanezumab, stamulumab, suptavumab, sutimlimab, tanezumab, crovalimab, and lokivetmab;
[6929] VL4 comprises a VL of an antibody selected from the group consisting of aducanumab, alirocumab, frovocimab, lodelcizumab, bococizumab, evolocumab, ralpancizumab, anifrolumab, atorolimumab, bapineuzumab, bedinvetmab, begelomab, biciromab, bimagrumab, birtamimab, blosozumab, burosumab, caplacizumab, concizumab, crenezumab, crizanlizumab, crotedumab, dezamizumab, domagrozumab, donanemab, eldelumab, elezanumab, emapalumab, emicizumab, eptinezumab, erenumab, evinacumab, faralimomab, fasinumab, fontolizumab, fremanezumab, frunevetmab, fulranumab, galcanezumab, gantenerumab, gosuranemab, idarucizumab, imciromab, inclacumab, lampalizumab, lanadelumab, landogrozumab, lecanemab, ligelizumab, marstacimab, mavrilimumab, morolimumab, NEOD001, omalizumab, oMS721, orticumab, otilimab, ozanezumab, ponezumab, prasinezumab, quilizumab, ranevetmab, refanezumab, roledumab, romosozumab, rozanolixizumab, setrusumab, SHP647, solanezumab, stamulumab, suptavumab, sutimlimab, tanezumab, crovalimab, and lokivetmab;
[6930] VH1 comprises a VH of an antibody selected from the group consisting of aducanumab, alirocumab, frovocimab, lodelcizumab, bococizumab, evolocumab, ralpancizumab, anifrolumab, atorolimumab, bapineuzumab, bedinvetmab, begelomab, biciromab, bimagrumab, birtamimab, blosozumab, burosumab, caplacizumab, concizumab, crenezumab, crizanlizumab, crotedumab, dezamizumab, domagrozumab, donanemab, eldelumab, elezanumab, emapalumab, emicizumab, eptinezumab, erenumab, evinacumab, faralimomab, fasinumab, fontolizumab, fremanezumab, frunevetmab, fulranumab, galcanezumab, gantenerumab, gosuranemab, idarucizumab, imciromab, inclacumab, lampalizumab, lanadelumab, landogrozumab, lecanemab, ligelizumab, marstacimab, mavrilimumab, morolimumab, NEOD001, omalizumab, oMS721, orticumab, otilimab, ozanezumab, ponezumab, prasinezumab, quilizumab, ranevetmab, refanezumab, roledumab, romosozumab, rozanolixizumab, setrusumab, SHP647, solanezumab, stamulumab, suptavumab, sutimlimab, tanezumab, crovalimab, and lokivetmab;
[6931] VH2 comprises a VH of an antibody selected from the group consisting of aducanumab, alirocumab, frovocimab, lodelcizumab, bococizumab, evolocumab, ralpancizumab, anifrolumab, atorolimumab, bapineuzumab, bedinvetmab, begelomab, biciromab, bimagrumab, birtamimab, blosozumab, burosumab, caplacizumab, concizumab, crenezumab, crizanlizumab, crotedumab, dezamizumab, domagrozumab, donanemab, eldelumab, elezanumab, emapalumab, emicizumab, eptinezumab, erenumab, evinacumab, faralimomab, fasinumab, fontolizumab, fremanezumab, frunevetmab, fulranumab, galcanezumab, gantenerumab, gosuranemab, idarucizumab, imciromab, inclacumab, lampalizumab, lanadelumab, landogrozumab, lecanemab, ligelizumab, marstacimab, mavrilimumab, morolimumab, NEOD001, omalizumab, oMS721, orticumab, otilimab, ozanezumab, ponezumab, prasinezumab, quilizumab, ranevetmab, refanezumab, roledumab, romosozumab, rozanolixizumab, setrusumab, SHP647, solanezumab, stamulumab, suptavumab, sutimlimab, tanezumab, crovalimab, and lokivetmab;
[6932] VH3 comprises a VH of an antibody selected from the group consisting of aducanumab, alirocumab, frovocimab, lodelcizumab, bococizumab, evolocumab, ralpancizumab, anifrolumab, atorolimumab, bapineuzumab, bedinvetmab, begelomab, biciromab, bimagrumab, birtamimab, blosozumab, burosumab, caplacizumab, concizumab, crenezumab, crizanlizumab, crotedumab, dezamizumab, domagrozumab, donanemab, eldelumab, elezanumab, emapalumab, emicizumab, eptinezumab, erenumab, evinacumab, faralimomab, fasinumab, fontolizumab, fremanezumab, frunevetmab, fulranumab, galcanezumab, gantenerumab, gosuranemab, idarucizumab, imciromab, inclacumab, lampalizumab, lanadelumab, landogrozumab, lecanemab, ligelizumab, marstacimab, mavrilimumab, morolimumab, NEOD001, omalizumab, oMS721, orticumab, otilimab, ozanezumab, ponezumab, prasinezumab, quilizumab, ranevetmab, refanezumab, roledumab, romosozumab, rozanolixizumab, setrusumab, SHP647, solanezumab, stamulumab, suptavumab, sutimlimab, tanezumab, crovalimab, and lokivetmab; and/or
[6933] VH4 comprises a VH of an antibody selected from the group consisting of aducanumab, alirocumab, frovocimab, lodelcizumab, bococizumab, evolocumab, ralpancizumab, anifrolumab, atorolimumab, bapineuzumab, bedinvetmab, begelomab, biciromab, bimagrumab, birtamimab, blosozumab, burosumab, caplacizumab, concizumab, crenezumab, crizanlizumab, crotedumab, dezamizumab, domagrozumab, donanemab, eldelumab, elezanumab, emapalumab, emicizumab, eptinezumab, erenumab, evinacumab, faralimomab, fasinumab, fontolizumab, fremanezumab, frunevetmab, fulranumab, galcanezumab, gantenerumab, gosuranemab, idarucizumab, imciromab, inclacumab, lampalizumab, lanadelumab, landogrozumab, lecanemab, ligelizumab, marstacimab, mavrilimumab, morolimumab, NEOD001, omalizumab, oMS721, orticumab, otilimab, ozanezumab, ponezumab, prasinezumab, quilizumab, ranevetmab, refanezumab, roledumab, romosozumab, rozanolixizumab, setrusumab, SHP647, solanezumab, stamulumab, suptavumab, sutimlimab, tanezumab, crovalimab, and lokivetmab; or
[6934] (iii)
[6935] VL1 comprises (i) a complementarity determining region (CDR) 1 having an amino acid sequence that is at least 65%, at least 70%, at least 75%, at least 80%, at least 85%, at least 90%, at least 95%, at least 99%, or 100% identical to any one of SEQ ID NOs: 1120, 1228, 1359, 1519, 1831, 1838, 1845, 1852, 1859, 1866, 1872, 1878, 1885, 1891, 1898, 1905, 1911, 1917, 1924, 1931, 1938, 1945, and 1963; (ii) a CDR2 having an amino acid sequence that is at least 65%, at least 70%, at least 75%, at least 80%, at least 85%, at least 90%, at least 95%, at least 99%, or 100% identical to any one of amino acid sequences AAS, AVS, DAS, DNN, EDN, EVS, GAS, GNG, KAS, KVS, LVS, NTD, STS, WAS, and YTS; and (iii) a CDR3 having an amino acid sequence that is at least 65%, at least 70%, at least 75%, at least 80%, at least 85%, at least 90%, at least 95%, at least 99%, or 100% identical to any one of SEQ ID NOs: 1360, 1832, 1839, 1846, 1853, 1860, 1867, 1873, 1879, 1886, 1892, 1899, 1906, 1912, 1918, 1925, 1932, 1939, 1946, 1951, 1957, 1964, and 1970;
[6936] VL2 comprises (i) a complementarity determining region (CDR) 1 having an amino acid sequence that is at least 65%, at least 70%, at least 75%, at least 80%, at least 85%, at least 90%, at least 95%, at least 99%, or 100% identical to any one of SEQ ID NOs: 1120, 1228, 1359, 1519, 1831, 1838, 1845, 1852, 1859, 1866, 1872, 1878, 1885, 1891, 1898, 1905, 1911, 1917, 1924, 1931, 1938, 1945, and 1963; (ii) a CDR2 having an amino acid sequence that is at least 65%, at least 70%, at least 75%, at least 80%, at least 85%, at least 90%, at least 95%, at least 99%, or 100% identical to any one of amino acid sequences AAS, AVS, DAS, DNN, EDN, EVS, GAS, GNG, KAS, KVS, LVS, NTD, STS, WAS, and YTS; and (iii) a CDR3 having an amino acid sequence that is at least 65%, at least 70%, at least 75%, at least 80%, at least 85%, at least 90%, at least 95%, at least 99%, or 100% identical to any one of SEQ ID NOs: 1360, 1832, 1839, 1846, 1853, 1860, 1867, 1873, 1879, 1886, 1892, 1899, 1906, 1912, 1918, 1925, 1932, 1939, 1946, 1951, 1957, 1964, and 1970;
[6937] VL3 comprises (i) a complementarity determining region (CDR) 1 having an amino acid sequence that is at least 65%, at least 70%, at least 75%, at least 80%, at least 85%, at least 90%, at least 95%, at least 99%, or 100% identical to any one of SEQ ID NOs: 1120, 1228, 1359, 1519, 1831, 1838, 1845, 1852, 1859, 1866, 1872, 1878, 1885, 1891, 1898, 1905, 1911, 1917, 1924, 1931, 1938, 1945, and 1963; (ii) a CDR2 having an amino acid sequence that is at least 65%, at least 70%, at least 75%, at least 80%, at least 85%, at least 90%, at least 95%, at least 99%, or 100% identical to any one of amino acid sequences AAS, AVS, DAS, DNN, EDN, EVS, GAS, GNG, KAS, KVS, LVS, NTD, STS, WAS, and YTS; and (iii) a CDR3 having an amino acid sequence that is at least 65%, at least 70%, at least 75%, at least 80%, at least 85%, at least 90%, at least 95%, at least 99%, or 100% identical to any one of SEQ ID NOs: 1360, 1832, 1839, 1846, 1853, 1860, 1867, 1873, 1879, 1886, 1892, 1899, 1906, 1912, 1918, 1925, 1932, 1939, 1946, 1951, 1957, 1964, and 1970;
[6938] VL4 comprises (i) a complementarity determining region (CDR) 1 having an amino acid sequence that is at least 65%, at least 70%, at least 75%, at least 80%, at least 85%, at least 90%, at least 95%, at least 99%, or 100% identical to any one of SEQ ID NOs: 1120, 1228, 1359, 1519, 1831, 1838, 1845, 1852, 1859, 1866, 1872, 1878, 1885, 1891, 1898, 1905, 1911, 1917, 1924, 1931, 1938, 1945, and 1963; (ii) a CDR2 having an amino acid sequence that is at least 65%, at least 70%, at least 75%, at least 80%, at least 85%, at least 90%, at least 95%, at least 99%, or 100% identical to any one of amino acid sequences AAS, AVS, DAS, DNN, EDN, EVS, GAS, GNG, KAS, KVS, LVS, NTD, STS, WAS, and YTS; and (iii) a CDR3 having an amino acid sequence that is at least 65%, at least 70%, at least 75%, at least 80%, at least 85%, at least 90%, at least 95%, at least 99%, or 100% identical to any one of SEQ ID NOs: 1360, 1832, 1839, 1846, 1853, 1860, 1867, 1873, 1879, 1886, 1892, 1899, 1906, 1912, 1918, 1925, 1932, 1939, 1946, 1951, 1957, 1964, and 1970;
[6939] VH1 comprises (i) a complementarity determining region (CDR) 1 having an amino acid sequence that is at least 65%, at least 70%, at least 75%, at least 80%, at least 85%, at least 90%, at least 95%, at least 99%, or 100% identical to any one of SEQ ID NOs: 1309, 1362, 1437, 1552, 1618, 1639, 1834, 1841, 1848, 1855, 1862, 1881, 1894, 1901, 1920, 1927, 1934, 1941, 1953, 1959, and 1966; (ii) a CDR2 having an amino acid sequence that is at least 65%, at least 70%, at least 75%, at least 80%, at least 85%, at least 90%, at least 95%, at least 99%, or 100% identical to any one of SEQ ID NOs: 1363, 1835, 1842, 1849, 1856, 1863, 1869, 1875, 1882, 1888, 1895, 1902, 1908, 1914, 1921, 1928, 1935, 1942, 1948, 1954, 1960, 1967, and 1972; and (iii) a CDR3 having an amino acid sequence that is at least 65%, at least 70%, at least 75%, at least 80%, at least 85%, at least 90%, at least 95%, at least 99%, or 100% identical to any one of SEQ ID NOs: 1364, 1836, 1843, 1850, 1857, 1864, 1870, 1876, 1883, 1889, 1896, 1903, 1909, 1915, 1922, 1929, 1936, 1943, 1949, 1955, 1961, 1968, and 1973;
[6940] VH2 comprises (i) a complementarity determining region (CDR) 1 having an amino acid sequence that is at least 65%, at least 70%, at least 75%, at least 80%, at least 85%, at least 90%, at least 95%, at least 99%, or 100% identical to any one of SEQ ID NOs: 1309, 1362, 1437, 1552, 1618, 1639, 1834, 1841, 1848, 1855, 1862, 1881, 1894, 1901, 1920, 1927, 1934, 1941, 1953, 1959, and 1966; (ii) a CDR2 having an amino acid sequence that is at least 65%, at least 70%, at least 75%, at least 80%, at least 85%, at least 90%, at least 95%, at least 99%, or 100% identical to any one of SEQ ID NOs: 1363, 1835, 1842, 1849, 1856, 1863, 1869, 1875, 1882, 1888, 1895, 1902, 1908, 1914, 1921, 1928, 1935, 1942, 1948, 1954, 1960, 1967, and 1972; and (iii) a CDR3 having an amino acid sequence that is at least 65%, at least 70%, at least 75%, at least 80%, at least 85%, at least 90%, at least 95%, at least 99%, or 100% identical to any one of SEQ ID NOs: 1364, 1836, 1843, 1850, 1857, 1864, 1870, 1876, 1883, 1889, 1896, 1903, 1909, 1915, 1922, 1929, 1936, 1943, 1949, 1955, 1961, 1968, and 1973;
[6941] VH3 comprises (i) a complementarity determining region (CDR) 1 having an amino acid sequence that is at least 65%, at least 70%, at least 75%, at least 80%, at least 85%, at least 90%, at least 95%, at least 99%, or 100% identical to any one of SEQ ID NOs: 1309, 1362, 1437, 1552, 1618, 1639, 1834, 1841, 1848, 1855, 1862, 1881, 1894, 1901, 1920, 1927, 1934, 1941, 1953, 1959, and 1966; (ii) a CDR2 having an amino acid sequence that is at least 65%, at least 70%, at least 75%, at least 80%, at least 85%, at least 90%, at least 95%, at least 99%, or 100% identical to any one of SEQ ID NOs: 1363, 1835, 1842, 1849, 1856, 1863, 1869, 1875, 1882, 1888, 1895, 1902, 1908, 1914, 1921, 1928, 1935, 1942, 1948, 1954, 1960, 1967, and 1972; and (iii) a CDR3 having an amino acid sequence that is at least 65%, at least 70%, at least 75%, at least 80%, at least 85%, at least 90%, at least 95%, at least 99%, or 100% identical to any one of SEQ ID NOs: 1364, 1836, 1843, 1850, 1857, 1864, 1870, 1876, 1883, 1889, 1896, 1903, 1909, 1915, 1922, 1929, 1936, 1943, 1949, 1955, 1961, 1968, and 1973; and/or
[6942] VH4 comprises (i) a complementarity determining region (CDR) 1 having an amino acid sequence that is at least 65%, at least 70%, at least 75%, at least 80%, at least 85%, at least 90%, at least 95%, at least 99%, or 100% identical to any one of SEQ ID NOs: 1309, 1362, 1437, 1552, 1618, 1639, 1834, 1841, 1848, 1855, 1862, 1881, 1894, 1901, 1920, 1927, 1934, 1941, 1953, 1959, and 1966; (ii) a CDR2 having an amino acid sequence that is at least 65%, at least 70%, at least 75%, at least 80%, at least 85%, at least 90%, at least 95%, at least 99%, or 100% identical to any one of SEQ ID NOs: 1363, 1835, 1842, 1849, 1856, 1863, 1869, 1875, 1882, 1888, 1895, 1902, 1908, 1914, 1921, 1928, 1935, 1942, 1948, 1954, 1960, 1967, and 1972; and (iii) a CDR3 having an amino acid sequence that is at least 65%, at least 70%, at least 75%, at least 80%, at least 85%, at least 90%, at least 95%, at least 99%, or 100% identical to any one of SEQ ID NOs: 1364, 1836, 1843, 1850, 1857, 1864, 1870, 1876, 1883, 1889, 1896, 1903, 1909, 1915, 1922, 1929, 1936, 1943, 1949, 1955, 1961, 1968, and 1973; or
[6943] (iv)
[6944] VL1 comprises an amino acid sequence that is at least 65%, at least 70%, at least 75%, at least 80%, at least 85%, at least 90%, at least 95%, at least 99%, or 100% identical to any one of SEQ ID NOs: 1361, 1833, 1840, 1847, 1854, 1861, 1868, 1874, 1880, 1887, 1893, 1900, 1907, 1913, 1919, 1926, 1933, 1940, 1947, 1952, 1958, 1965, and 1971;
[6945] VL2 comprises an amino acid sequence that is at least 65%, at least 70%, at least 75%, at least 80%, at least 85%, at least 90%, at least 95%, at least 99%, or 100% identical to any one of SEQ ID NOs: 1361, 1833, 1840, 1847, 1854, 1861, 1868, 1874, 1880, 1887, 1893, 1900, 1907, 1913, 1919, 1926, 1933, 1940, 1947, 1952, 1958, 1965, and 1971;
[6946] VL3 comprises an amino acid sequence that is at least 65%, at least 70%, at least 75%, at least 80%, at least 85%, at least 90%, at least 95%, at least 99%, or 100% identical to any one of SEQ ID NOs: 1361, 1833, 1840, 1847, 1854, 1861, 1868, 1874, 1880, 1887, 1893, 1900, 1907, 1913, 1919, 1926, 1933, 1940, 1947, 1952, 1958, 1965, and 1971;
[6947] VL4 comprises an amino acid sequence that is at least 65%, at least 70%, at least 75%, at least 80%, at least 85%, at least 90%, at least 95%, at least 99%, or 100% identical to any one of SEQ ID NOs: 1361, 1833, 1840, 1847, 1854, 1861, 1868, 1874, 1880, 1887, 1893, 1900, 1907, 1913, 1919, 1926, 1933, 1940, 1947, 1952, 1958, 1965, and 1971;
[6948] VH1 comprises an amino acid sequence that is at least 65%, at least 70%, at least 75%, at least 80%, at least 85%, at least 90%, at least 95%, at least 99%, or 100% identical to any one of SEQ ID NOs: 1365, 1837, 1844, 1851, 1858, 1865, 1871, 1877, 1884, 1890, 1897, 1904, 1910, 1916, 1923, 1930, 1937, 1944, 1950, 1956, 1962, 1969, and 1974;
[6949] VH2 comprises an amino acid sequence that is at least 65%, at least 70%, at least 75%, at least 80%, at least 85%, at least 90%, at least 95%, at least 99%, or 100% identical to any one of SEQ ID NOs: 1365, 1837, 1844, 1851, 1858, 1865, 1871, 1877, 1884, 1890, 1897, 1904, 1910, 1916, 1923, 1930, 1937, 1944, 1950, 1956, 1962, 1969, and 1974;
[6950] VH3 comprises an amino acid sequence that is at least 65%, at least 70%, at least 75%, at least 80%, at least 85%, at least 90%, at least 95%, at least 99%, or 100% identical to any one of SEQ ID NOs: 1365, 1837, 1844, 1851, 1858, 1865, 1871, 1877, 1884, 1890, 1897, 1904, 1910, 1916, 1923, 1930, 1937, 1944, 1950, 1956, 1962, 1969, and 1974; and/or
[6951] VH4 comprises an amino acid sequence that is at least 65%, at least 70%, at least 75%, at least 80%, at least 85%, at least 90%, at least 95%, at least 99%, or 100% identical to any one of SEQ ID NOs: 1365, 1837, 1844, 1851, 1858, 1865, 1871, 1877, 1884, 1890, 1897, 1904, 1910, 1916, 1923, 1930, 1937, 1944, 1950, 1956, 1962, 1969, and 1974.

[6952] In some aspects, one or both of the antigen binding polypeptides comprised in the antigen binding polypeptide complexes disclosed herein, comprise one or more CL, as indicated in the formulas representing the antigen binding polypeptide complexes disclosed herein. In some aspects, the CL comprises an amino acid sequence at least 65%, at least 70%, at least 75%, at least 80%, at least 85%, at least 90%, at least 95%, at least 99%, or 100% identical to any one of SEQ ID NOs: 374, 637, or 1092-1095.

[6953] In some aspects, one or both of the antigen binding polypeptides comprised in the antigen binding polypeptide complexes disclosed herein, comprise one or more CH1, as indicated in the formulas representing the antigen binding polypeptide complexes disclosed herein. In some aspects, the CH1 comprises an amino acid sequence at least 65%, at least 70%, at least 75%, at least 80%, at least 85%, at least 90%, at least 95%, at least 99%, or 100% identical to any one of SEQ ID NOs: 375, 634, 1070, 1071, or 1086-1091.

[6954] In some aspects, one or both of the antigen binding polypeptides comprised in the antigen binding polypeptide complexes provided herein further comprise an Fc region. In some aspects, one or both of the antigen binding polypeptides comprised in the antigen binding polypeptide complexes provided herein further comprise an Fc region at the carboxy-terminus. In some aspects, the Fc region comprises an immunoglobulin heavy chain constant region 2 (CH2) and/or an immunoglobulin heavy chain constant region 3 (CH3). In some aspects, the Fc region further comprises an immunoglobulin hinge (i.e., a hinge region). In some aspects, the hinge region is interposed between a CH1 and a CH2 (i.e., a hinge region is localized between the carboxy terminal residue of a CH1 and the N-terminal residue of a CH2). In some aspects, the hinge region comprises an amino acid sequence at least 65%, at least 70%, at least 75%, at least 80%, at least 85%, at least 90%, at least 95%, at least 99%, or 100% identical to any one of SEQ ID NOs: 635, 636, 1072, 1073, or 1074. In some aspects, the Fc region comprises a CH2 and a CH3. In some aspects, the CH2 comprises an amino acid sequence that is at least 65%, at least 70%, at least 75%, at least 80%, at least 85%, at least 90%, at least 95%, at least 99%, or 100% identical to any one of SEQ ID NOs: 1075-1078. In some aspects, the CH3 comprises an amino acid sequence that is at least 65%, at least 70%, at least 75%, at least 80%, at least 85%, at least 90%, at least 95%, at least 99%, or 100% identical to any one of SEQ ID NOs: 1079-1085. In some aspects, the Fc region comprises an amino acid sequence that is at least 65%, at least 70%, at least 75%, at least 80%, at least 85%, at least 90%, at least 95%, at least 99%, or 100% identical to any one of SEQ ID NOs: 376-380.

[6955] In some aspects, the Fc region comprises one or more amino acid substitutions. In some aspects, the one or more amino acid substitutions comprise one or more half-life extension amino acid substitutions. In some aspects, the one or more half-life extension amino acid substitutions comprise one or more of amino acid substitutions M428L, N434A, N434S, L234F, L235E, P331S, M252Y, S254T, or T256E, or equivalent thereof, based on the EU numbering scheme. In some aspects, the one or more half-life extension amino acid substitutions comprise a LA (M428L and N434A, or equivalent thereof, based on the EU numbering scheme) amino acid substitution. In some aspects, the one or more half-life extension amino acid substitutions comprise a LS (M428L and N434S, or equivalent thereof, based on the EU numbering scheme) amino acid substitution. In some aspects, the one or more half-life extension amino acid substitutions comprise L234F and L235E, or equivalent thereof (based on the EU numbering scheme) amino acid substitutions. In some aspects, the one or more half-life extension amino acid substitutions comprise a TM (L234F, L235E, and P331S, or equivalent thereof, based on the EU numbering scheme) amino acid substitution. In some aspects, the one or more half-life extension amino acid substitutions comprise a YTE (M252Y, S254T, and T256E, or equivalent thereof, based on the EU numbering scheme) amino acid substitution.

[6956] In some aspects, the Fc region comprises at least one knob-into-hole modification. In some aspects, the antigen binding polypeptides complexes disclosed herein are IgG1 or IgG4 antibodies or antigen binding fragments thereof. In some aspects, the knob-into-hole modification comprises one or more of knob substitutions of S354C and T366W, or equivalent thereof, and/or one or more of hole substitutions of Y349C, T366S, L368A, Y407V, or equivalent thereof, or a combination thereof, based on the EU numbering scheme. In some aspects, the Fc region comprises a knob-into-hole modification comprising knob substitutions of S354C and T366W, or equivalent thereof, and/or hole substitutions of Y349C, T366S, L368A, and Y407V, or equivalent thereof, and/or a half-life extension amino acid substitution comprising: a LA (M428L and N434A, or equivalent thereof, based on the EU numbering scheme) amino acid substitution, a LS (M428L and N434S, or equivalent thereof, based on the EU numbering scheme) amino acid substitution. L234F and L235E, or equivalent thereof (based on the EU numbering scheme) amino acid substitutions, a TM (L234F, L235E, and P331S, or equivalent thereof, based on the EU numbering scheme) amino acid substitution, a YTE (M252Y, S254T, and T256E, or equivalent thereof, based on the EU numbering scheme) amino acid substitution, or any combination thereof.

[6957] In some aspects, the Fc region comprises knob substitutions of S354C and T366W, or equivalent thereof, and a half-life extension amino acid substitution comprising: a LA (M428L and N434A, or equivalent thereof, based on the EU numbering scheme) amino acid substitution, a LS (M428L and N434S, or equivalent thereof, based on the EU numbering scheme) amino acid substitution. L234F and L235E, or equivalent thereof (based on the EU numbering scheme) amino acid substitutions, a TM (L234F, L235E, and P331S, or equivalent thereof, based on the EU numbering scheme) amino acid substitution, a YTE (M252Y, S254T, and T256E, or equivalent thereof, based on the EU numbering scheme) amino acid substitution, or any combination thereof.

[6958] In some aspects, the Fc region comprises hole substitutions of Y349C, T366S, L368A, and Y407V, or equivalent thereof, and a half-life extension amino acid substitution comprising: a LA (M428L and N434A, or equivalent thereof, based on the EU numbering scheme) amino acid substitution, a LS (M428L and N434S, or equivalent thereof, based on the EU numbering scheme) amino acid substitution. L234F and L235E, or equivalent thereof (based on the EU numbering scheme) amino acid substitutions, a TM (L234F, L235E, and P331S, or equivalent thereof, based on the EU numbering scheme) amino acid substitution, a YTE (M252Y, S254T, and T256E, or equivalent thereof, based on the EU numbering scheme) amino acid substitution, or any combination thereof.

[6959] In some aspects, one or both of the antigen binding polypeptides comprised in the antigen binding polypeptide complexes disclosed herein comprise one or more Fc effector function knockout mutation. In some aspects, one or both of the antigen binding polypeptides comprised in the antigen binding polypeptide complexes disclosed herein are IgG1 or IgG4 antibodies or antigen binding fragments thereof. In some aspects, the Fc effector function knockout mutation is L234A, L235A, P239A, or equivalent thereof, or a combination thereof, based on the EU numbering scheme.

[6960] In some aspects, one or both of the antigen binding polypeptides comprised in the antigen binding polypeptide complexes disclosed herein comprise a mutation at a glycosylation site. In some aspects, the mutation at a glycosylation site is a mutation at an N-glycosylation site. In some aspects, one or both of the antigen binding polypeptides comprised in the antigen binding polypeptide complexes disclosed herein comprise a VH comprising a mutation at a glycosylation site. In some aspects, the mutation at a glycosylation site is a mutation at an N-glycosylation site. In some aspects, the mutation at an N-glycosylation site is at amino acid N62, or equivalent thereof, of the VH region or equivalent thereof. In some aspects, the mutation at an N-glycosylation site at amino acid N62 is N62Q or N62S, or equivalent thereof.

[6961] In some aspects, one or both of the antigen binding polypeptides comprised in the antigen binding polypeptide complexes disclosed herein, comprise one or more optional linkers. The one or more optional linkers are indicated herein as Ln, wherein n is an integer, and the integer next to each L indicates each L comprised in the antigen binding polypeptides comprised in the antigen binding polypeptide complexes disclosed herein. For example, if an antigen binding polypeptide comprised in the antigen binding polypeptide complexes disclosed herein comprises two linkers, the first linker from N-terminus to C-terminus is herein indicated as L1, and the second linker from N-terminus to C-terminus is herein indicated as L2. If an antigen binding polypeptide complex disclosed herein comprises a first antigen binding polypeptide comprising two linkers, indicated herein as L1 and L2, as explained above, the linkers comprised in the second antigen binding polypeptide are indicated with the following integer, in this example, the first linker from N-terminus to C-terminus of the second antigen binding polypeptide is herein indicated as L3, the second linker from N-terminus to C-terminus of the second antigen binding polypeptide is herein indicated as L3. In some aspects, any one of the optional linkers each independently have a length of from 0 amino acids to about 50 amino acids. In some aspects, any one of the optional linkers each independently have a length of from 5 amino acids to about 40 amino acids.

[6962] In some aspects, any one of the optional linkers are non-immunogenic. In some aspects, any one of the optional linkers do not contain a consensus T cell epitope.

[6963] In some aspects, any of Ln comprises an amino acid sequence of G or A, or an amino acid sequence at least 65%, at least 70%, at least 75%, at least 80%, at least 85%, at least 90%, at least 95%, at least 99%, or 100% identical to amino acid sequence GSS or ASG, or an amino acid sequence at least 65%, at least 70%, at least 75%, at least 80%, at least 85%, at least 90%, at least 95%, at least 99%, or 100% identical to any one of SEQ ID NOs: 333-373 and 967-971. In some aspects. Ln comprises an amino acid sequence at least 65%, at least 70%, at least 75%, at least 80%, at least 85%, at least 90%, at least 95%, at least 99%, or 100% identical to any one of SEQ ID NOs: 333-345 and 967-971.

[6964] In some aspects, the first polypeptide comprises a structure represented by VL1-CL-VH1-CH1-VL2-VH2, VL1-L1-CL-L2-VH1-L3-CH1-L4-VL2-L5-VH2, VL1-CL-VH1-CH1-VL2-VH2-CH2-CH3, or VL1-L1-CL-L2-VH1-L3-CH1-L4-VL2-L5-VH2-CH2-CH3 and the second polypeptide comprises a structure represented by VL3-VH3-VL4-CL-VH4-CH1, VL3-L6-VH3-L7-VL4-L8-CL-L9-VH4-L10-CH1, VL3-VH3-VL4-CL-VH4-CH1-CH2-CH3, or VL3-L6-VH3-L7-VL4-L8-CL-L9-VH4-L10-CH1-CH2-CH3,
[6965] wherein:
[6966] (a)
[6967] (i)
[6968] VL1 comprises a light chain complementarity determining region 1 (LCDR1), LCDR2, and/or LCDR3 of an antibody selected from the group consisting of losatuxizumab vedotin, utomilumab, urelumab, oleclumab, naptumomab estafenatox, ascrinvacumab, pintumomab, tacatuzumab tetraxetan, nesvacumab, vanucizumab, timolumab, vapaliximab, vepalimomab, enapotamab vedotin, ianalumab, belimumab, tabalumab, tibulizumab, belantamab mafodotin, teclistamab, teclistamab, detumomab, nacolomab tafenatox, eculizumab, lendalizumab, pexelizumab, pozelimab, ravulizumab, tesidolumab, vilobelimab, abagovomab, igovomab, oregovomab, sofituzumab vedotin, cantuzumab mertansine, cantuzuma bravtansine, girentuximab, altumomab pentetate, arcitumomab, besilesomab, bertilimumab, plozalizumab, mogamulizumab, leronlimab, PRO140, rovelizumab, rovelizumab, talacotuzumab, benralizumab, tavolimab, vonlerolizumab, gavilimomab, ziralimumab, fanolesomab, ipilimumab, ruplizumab, toralizumab, dapirolizumab pegol, toralizumab, dapirolizumab pegol, ruplizumab, blinatumomab, inebilizumab, loncastuximab tesirine, SGN-CD19A, tafasitamab, taplitumomab paptox, XMAB-5574, Budoprutug, Obexelimab, duvortuxizumab, englumafusp alfa, Emfizatamab, zeripatamig, siplizumab, blontuvetmab, FBTA05, ibritumomab tiuxetan, obinutuzumab, ocaratuzumab, ocrelizumab, ofatumumab, rituximab, tositumomab, ublituximab, veltuzumab, divozilimab, eramkafusp alfa, ripertamab, zuberitamab, glofitamab, nofetumomab merpentan, samalizumab, imvotamab, odronextamab, plamotamab, bectumomab, inotuzumab ozogamicin, moxetumomab pasudotox, pinatuzumab vedotin, gomiliximab, lumiliximab, inolimomab, inolimomab, daclizumab, camidanluma btesirine, basiliximab, varlilumab, omburtamab, enoblituzumab, vopratelimab, lulizumabpegol, TGN1412, muromonab-CD3, otelixizumab, teplizumab, visilizumab, epcoritamab, epcoritamab, brentuximab vedotin, iratumumab, azintuxizumab vedotin, gemtuzumab ozogamicin, lintuzumab, vadastuximab talirine, naratuximab emtansine, otlertuzumab, lilotomab satetraxetan, tetulomab, daratumumab, isatuximab, foralumab, mosunetuzumab, mosunetuzumab, cedelizumab, ibalizumab, keliximab, priliximab, tregalizumab, zanolimumab, bleselumab, iscalimab, lucatumumab, ravagalimab, selicrelumab, teneliximab, vanalimab, abciximab, bivatuzumab, iomab-B, telimomab aritox, zolimomab aritox, abituzumab, intetumumab, alemtuzumab, tamtuvetmab, lorvotuzumab mertansine, itolizumab, cusatuzumab, vorsetuzumab mafodotin, milatuzumab, iladatuzumab vedotin, polatuzumab vedotin, galiximab, cibisatamab, zolbetuximab, naxitamab, tisotumab vedotin, olendalizumab, pamrevlumab, lacnotuzumab, cabiralizumab, emactuzumab, axatilimab, gimsilumab, lenzilumab, namilumab, tremelimumab, ulocuplumab, tepoditamab, rovalpituzumab tesirine, tarlatamab, demcizumab, navicixizumab, drozitumab, parsatuzumab, depatuxizumab mafodotin, modotuximab, carotuximab, adecatumumab, adecatumumab, oportuzumab monatox, solitomab, tucotuzumab celmoleukin, edrecolomab, catumaxomab, ifabotuzumab, fibatuzumab, zalutumumab, panitumumab, cetuximab, futuximab, imgatuzumab, laprituximab emtansine, matuzumab, necitumumab, nimotuzumab, tomuzotuximab, amivantamab, amivantamab, epitumomab cituxetan, sontuzumab, duligotuzumab, elgemtumab, lumretuzumab, patritumab, seribantumab, zenocutuzumab, sibrotuzumab, burosumab, aprutumab ixadotin, radretumab, pasotuxizumab, farletuzumab, mirvetuximab soravtansine, vantictumab, TRBS07, 3F8, dinutuximab, dinutuximab beta, ecromeximab, mitumomab, andecaliximab, capromab, codrituzumab, glembatumumab vedotin, talquetamab, talquetamab, trevogrumab, indusatumab vedotin, ficlatuzumab, rilotumumab, zatuximab, pentuzimab, pentuzimab, margetuximab, timigutuzumab, trastuzumab, trastuzumab duocarmazine, trastuzumab emtansine, gancotamab, pertuzumab, ertumaxomab, emibetuzumab, telisotuzumab, telisotuzumab vedotin, derlotuximab biotin, apolizumab, onartuzumab, bersanlimab, enlimomabpegol, rontalizumab, sifalimumab, talizumab, ganitumab, istiratumab, robatumumab, teprotumumab, figitumumab, ganitumab, istiratumab, robatumumab, teprotumumab, cixutumumab, dalotuzumab, xentuzumab, dusigitumab, canakinumab, ustekinumab, ustekinumab, ustekinumab, briakinumab, briakinumab, abrezekimab, lebrikizumab, romilkimab, TNX-650, tralokinumab, anrukinzumab, brodalumab, ixekizumab, netakimab, perakizumab, secukinumab, vunakizumab, afasevikumab, afasevikumab, bimekizumab, bimekizumab, remtolumab, bermekimab, lutikizumab, lutikizumab, gevokizumab, cergutuzumab amunaleukin, fletikumab, fezakinumab, brazikumab, guselkumab, mirikizumab, tildrakizumab, risankizumab, flotetuzumab, nemolizumab, pascolizumab, dupilumab, mepolizumab, reslizumab, clazakizumab, elsilimomab, olokizumab, sarilumab, siltuximab, sirukumab, vobarilizumab, tocilizumab, SA237, satralizumab, enokizumab, prezalizumab, natalizumab, abrilumab, abrilumab, vedolizumab, volociximab, tadocizumab, etaracizumab, etrolizumab, spesolimab, vatelizumab, erlizumab, lirilumab, relatlimab, cBR96-doxorubicinimmunoconjugate, odulimomab, efalizumab, ladiratuzumab vedotin, simtuzumab, samrotamab vedotin, aselizumab, lupartumab amadotin, imalumab, carlumab, imaprelimab, amatuximab, amatuximab, anetumab ravtansine, narnatumab, clivatuzumab tetraxetan, pemtumomab, gatipotuzumab, ensituximab, lemalesomab, sulesomab, enfortumab vedotin, racotumomab, monalizumab, brontictuzumab, tarextumab, vesencumab, oxelumab, gilvetmab, tislelizumab, dostarlimab, BCD-100, nivolumab, PDR001, pembrolizumab, pidilizumab, retifanlimab, spartalizumab, sintilimab, cemiplimab, olaratumab, tovetumab, rinucumab, atezolizumab, avelumab, durvalumab, lifastuzumab vedotin, bavituximab, acapatamab, capromab, rosopatamab, nezastomig, pasotuxizumab, pelgifatamab, voxalatamab, cofetuzumab pelidotin, denosumab, rosmantuzumab, cirmtuzumab, atinumab, indatuximab ravtansine, elotuzumab, sirtratumab vedotin, sonepcizumab, vandortuzumab vedotin, minretumomab, satumomab pendetide, maslimomab, ontuxizumab, tenatumomab, fresolimumab, metelimumab, lerdelimumab, tezepelumab, etigilimab, tiragotumab, placulumab, prezalumab, infliximab, nerelimomab, ozoralizumab, adalimumab, afelimomab, certolizumab pegol, golimumab, mapatumumab, conatumumab, lexatumumab, tigatuzumab, sacituzumab govitecan, votumumab, pogalizumab, letolizumab, pankomab, anatumomab mafenatox, enavatuzumab, flanvotumab, brolucizumab, ranibizumab, varisacumab, bevacizumab, faricimab, icrucumab, alacizumab pegol, ramucirumab, pritumumab, and onvatilimab;
[6969] VL2 comprises a light chain complementarity determining region 1 (LCDR1), LCDR2, and/or LCDR3 of an antibody selected from the group consisting of losatuxizumab vedotin, utomilumab, urelumab, oleclumab, naptumomab estafenatox, ascrinvacumab, pintumomab, tacatuzumab tetraxetan, nesvacumab, vanucizumab, timolumab, vapaliximab, vepalimomab, enapotamab vedotin, ianalumab, belimumab, tabalumab, tibulizumab, belantamab mafodotin, teclistamab, teclistamab, detumomab, nacolomab tafenatox, eculizumab, lendalizumab, pexelizumab, pozelimab, ravulizumab, tesidolumab, vilobelimab, abagovomab, igovomab, oregovomab, sofituzumab vedotin, cantuzumab mertansine, cantuzuma bravtansine, girentuximab, altumomab pentetate, arcitumomab, besilesomab, bertilimumab, plozalizumab, mogamulizumab, leronlimab, PRO140, rovelizumab, rovelizumab, talacotuzumab, benralizumab, tavolimab, vonlerolizumab, gavilimomab, ziralimumab, fanolesomab, ipilimumab, ruplizumab, toralizumab, dapirolizumab pegol, toralizumab, dapirolizumab pegol, ruplizumab, blinatumomab, inebilizumab, loncastuximab tesirine, SGN-CD19A, tafasitamab, taplitumomab paptox, XMAB-5574, Budoprutug, Obexelimab, duvortuxizumab, englumafusp alfa, Emfizatamab, zeripatamig, siplizumab, blontuvetmab, FBTA05, ibritumomab tiuxetan, obinutuzumab, ocaratuzumab, ocrelizumab, ofatumumab, rituximab, tositumomab, ublituximab, veltuzumab, divozilimab, eramkafusp alfa, ripertamab, zuberitamab, glofitamab, nofetumomab merpentan, samalizumab, imvotamab, odronextamab, plamotamab, bectumomab, inotuzumab ozogamicin, moxetumomab pasudotox, pinatuzumab vedotin, gomiliximab, lumiliximab, inolimomab, inolimomab, daclizumab, camidanluma btesirine, basiliximab, varlilumab, omburtamab, enoblituzumab, vopratelimab, lulizumabpegol, TGN1412, muromonab-CD3, otelixizumab, teplizumab, visilizumab, epcoritamab, epcoritamab, brentuximab vedotin, iratumumab, azintuxizumab vedotin, gemtuzumab ozogamicin, lintuzumab, vadastuximab talirine, naratuximab emtansine, otlertuzumab, lilotomab satetraxetan, tetulomab, daratumumab, isatuximab, foralumab, mosunetuzumab, mosunetuzumab, cedelizumab, ibalizumab, keliximab, priliximab, tregalizumab, zanolimumab, bleselumab, iscalimab, lucatumumab, ravagalimab, selicrelumab, teneliximab, vanalimab, abciximab, bivatuzumab, iomab-B, telimomab aritox, zolimomab aritox, abituzumab, intetumumab, alemtuzumab, tamtuvetmab, lorvotuzumab mertansine, itolizumab, cusatuzumab, vorsetuzumab mafodotin, milatuzumab, iladatuzumab vedotin, polatuzumab vedotin, galiximab, cibisatamab, zolbetuximab, naxitamab, tisotumab vedotin, olendalizumab, pamrevlumab, lacnotuzumab, cabiralizumab, emactuzumab, axatilimab, gimsilumab, lenzilumab, namilumab, tremelimumab, ulocuplumab, tepoditamab, rovalpituzumab tesirine, tarlatamab, demcizumab, navicixizumab, drozitumab, parsatuzumab, depatuxizumab mafodotin, modotuximab, carotuximab, adecatumumab, adecatumumab, oportuzumab monatox, solitomab, tucotuzumab celmoleukin, edrecolomab, catumaxomab, ifabotuzumab, fibatuzumab, zalutumumab, panitumumab, cetuximab, futuximab, imgatuzumab, laprituximab emtansine, matuzumab, necitumumab, nimotuzumab, tomuzotuximab, amivantamab, amivantamab, epitumomab cituxetan, sontuzumab, duligotuzumab, elgemtumab, lumretuzumab, patritumab, seribantumab, zenocutuzumab, sibrotuzumab, burosumab, aprutumab ixadotin, radretumab, pasotuxizumab, farletuzumab, mirvetuximab soravtansine, vantictumab, TRBS07, 3F8, dinutuximab, dinutuximab beta, ecromeximab, mitumomab, andecaliximab, capromab, codrituzumab, glembatumumab vedotin, talquetamab, talquetamab, trevogrumab, indusatumab vedotin, ficlatuzumab, rilotumumab, zatuximab, pentuzimab, pentuzimab, margetuximab, timigutuzumab, trastuzumab, trastuzumab duocarmazine, trastuzumab emtansine, gancotamab, pertuzumab, ertumaxomab, emibetuzumab, telisotuzumab, telisotuzumab vedotin, derlotuximab biotin, apolizumab, onartuzumab, bersanlimab, enlimomabpegol, rontalizumab, sifalimumab, talizumab, ganitumab, istiratumab, robatumumab, teprotumumab, figitumumab, ganitumab, istiratumab, robatumumab, teprotumumab, cixutumumab, dalotuzumab, xentuzumab, dusigitumab, canakinumab, ustekinumab, ustekinumab, ustekinumab, briakinumab, briakinumab, abrezekimab, lebrikizumab, romilkimab, TNX-650, tralokinumab, anrukinzumab, brodalumab, ixekizumab, netakimab, perakizumab, secukinumab, vunakizumab, afasevikumab, afasevikumab, bimekizumab, bimekizumab, remtolumab, bermekimab, lutikizumab, lutikizumab, gevokizumab, cergutuzumab amunaleukin, fletikumab, fezakinumab, brazikumab, guselkumab, mirikizumab, tildrakizumab, risankizumab, flotetuzumab, nemolizumab, pascolizumab, dupilumab, mepolizumab, reslizumab, clazakizumab, elsilimomab, olokizumab, sarilumab, siltuximab, sirukumab, vobarilizumab, tocilizumab, SA237, satralizumab, enokizumab, prezalizumab, natalizumab, abrilumab, abrilumab, vedolizumab, volociximab, tadocizumab, etaracizumab, etrolizumab, spesolimab, vatelizumab, erlizumab, lirilumab, relatlimab, cBR96-doxorubicinimmunoconjugate, odulimomab, efalizumab, ladiratuzumab vedotin, simtuzumab, samrotamab vedotin, aselizumab, lupartumab amadotin, imalumab, carlumab, imaprelimab, amatuximab, amatuximab, anetumab ravtansine, narnatumab, clivatuzumab tetraxetan, pemtumomab, gatipotuzumab, ensituximab, lemalesomab, sulesomab, enfortumab vedotin, racotumomab, monalizumab, brontictuzumab, tarextumab, vesencumab, oxelumab, gilvetmab, tislelizumab, dostarlimab, BCD-100, nivolumab, PDR001, pembrolizumab, pidilizumab, retifanlimab, spartalizumab, sintilimab, cemiplimab, olaratumab, tovetumab, rinucumab, atezolizumab, avelumab, durvalumab, lifastuzumab vedotin, bavituximab, acapatamab, capromab, rosopatamab, nezastomig, pasotuxizumab, pelgifatamab, voxalatamab, cofetuzumab pelidotin, denosumab, rosmantuzumab, cirmtuzumab, atinumab, indatuximab ravtansine, elotuzumab, sirtratumab vedotin, sonepcizumab, vandortuzumab vedotin, minretumomab, satumomab pendetide, maslimomab, ontuxizumab, tenatumomab, fresolimumab, metelimumab, lerdelimumab, tezepelumab, etigilimab, tiragotumab, placulumab, prezalumab, infliximab, nerelimomab, ozoralizumab, adalimumab, afelimomab, certolizumab pegol, golimumab, mapatumumab, conatumumab, lexatumumab, tigatuzumab, sacituzumab govitecan, votumumab, pogalizumab, letolizumab, pankomab, anatumomab mafenatox, enavatuzumab, flanvotumab, brolucizumab, ranibizumab, varisacumab, bevacizumab, faricimab, icrucumab, alacizumab pegol, ramucirumab, pritumumab, and onvatilimab;
[6970] VL3 comprises a light chain complementarity determining region 1 (LCDR1), LCDR2, and/or LCDR3 of an antibody selected from the group consisting of losatuxizumab vedotin, utomilumab, urelumab, oleclumab, naptumomab estafenatox, ascrinvacumab, pintumomab, tacatuzumab tetraxetan, nesvacumab, vanucizumab, timolumab, vapaliximab, vepalimomab, enapotamab vedotin, ianalumab, belimumab, tabalumab, tibulizumab, belantamab mafodotin, teclistamab, teclistamab, detumomab, nacolomab tafenatox, eculizumab, lendalizumab, pexelizumab, pozelimab, ravulizumab, tesidolumab, vilobelimab, abagovomab, igovomab, oregovomab, sofituzumab vedotin, cantuzumab mertansine, cantuzuma bravtansine, girentuximab, altumomab pentetate, arcitumomab, besilesomab, bertilimumab, plozalizumab, mogamulizumab, leronlimab, PRO140, rovelizumab, rovelizumab, talacotuzumab, benralizumab, tavolimab, vonlerolizumab, gavilimomab, ziralimumab, fanolesomab, ipilimumab, ruplizumab, toralizumab, dapirolizumab pegol, toralizumab, dapirolizumab pegol, ruplizumab, blinatumomab, inebilizumab, loncastuximab tesirine, SGN-CD19A, tafasitamab, taplitumomab paptox, XMAB-5574, Budoprutug, Obexelimab, duvortuxizumab, englumafusp alfa, Emfizatamab, zeripatamig, siplizumab, blontuvetmab, FBTA05, ibritumomab tiuxetan, obinutuzumab, ocaratuzumab, ocrelizumab, ofatumumab, rituximab, tositumomab, ublituximab, veltuzumab, divozilimab, eramkafusp alfa, ripertamab, zuberitamab, glofitamab, nofetumomab merpentan, samalizumab, imvotamab, odronextamab, plamotamab, bectumomab, inotuzumab ozogamicin, moxetumomab pasudotox, pinatuzumab vedotin, gomiliximab, lumiliximab, inolimomab, inolimomab, daclizumab, camidanluma btesirine, basiliximab, varlilumab, omburtamab, enoblituzumab, vopratelimab, lulizumabpegol, TGN1412, muromonab-CD3, otelixizumab, teplizumab, visilizumab, epcoritamab, epcoritamab, brentuximab vedotin, iratumumab, azintuxizumab vedotin, gemtuzumab ozogamicin, lintuzumab, vadastuximab talirine, naratuximab emtansine, otlertuzumab, lilotomab satetraxetan, tetulomab, daratumumab, isatuximab, foralumab, mosunetuzumab, mosunetuzumab, cedelizumab, ibalizumab, keliximab, priliximab, tregalizumab, zanolimumab, bleselumab, iscalimab, lucatumumab, ravagalimab, selicrelumab, teneliximab, vanalimab, abciximab, bivatuzumab, iomab-B, telimomab aritox, zolimomab aritox, abituzumab, intetumumab, alemtuzumab, tamtuvetmab, lorvotuzumab mertansine, itolizumab, cusatuzumab, vorsetuzumab mafodotin, milatuzumab, iladatuzumab vedotin, polatuzumab vedotin, galiximab, cibisatamab, zolbetuximab, naxitamab, tisotumab vedotin, olendalizumab, pamrevlumab, lacnotuzumab, cabiralizumab, emactuzumab, axatilimab, gimsilumab, lenzilumab, namilumab, tremelimumab, ulocuplumab, tepoditamab, rovalpituzumab tesirine, tarlatamab, demcizumab, navicixizumab, drozitumab, parsatuzumab, depatuxizumab mafodotin, modotuximab, carotuximab, adecatumumab, adecatumumab, oportuzumab monatox, solitomab, tucotuzumab celmoleukin, edrecolomab, catumaxomab, ifabotuzumab, fibatuzumab, zalutumumab, panitumumab, cetuximab, futuximab, imgatuzumab, laprituximab emtansine, matuzumab, necitumumab, nimotuzumab, tomuzotuximab, amivantamab, amivantamab, epitumomab cituxetan, sontuzumab, duligotuzumab, elgemtumab, lumretuzumab, patritumab, seribantumab, zenocutuzumab, sibrotuzumab, burosumab, aprutumab ixadotin, radretumab, pasotuxizumab, farletuzumab, mirvetuximab soravtansine, vantictumab, TRBS07, 3F8, dinutuximab, dinutuximab beta, ecromeximab, mitumomab, andecaliximab, capromab, codrituzumab, glembatumumab vedotin, talquetamab, talquetamab, trevogrumab, indusatumab vedotin, ficlatuzumab, rilotumumab, zatuximab, pentuzimab, pentuzimab, margetuximab, timigutuzumab, trastuzumab, trastuzumab duocarmazine, trastuzumab emtansine, gancotamab, pertuzumab, ertumaxomab, emibetuzumab, telisotuzumab, telisotuzumab vedotin, derlotuximab biotin, apolizumab, onartuzumab, bersanlimab, enlimomabpegol, rontalizumab, sifalimumab, talizumab, ganitumab, istiratumab, robatumumab, teprotumumab, figitumumab, ganitumab, istiratumab, robatumumab, teprotumumab, cixutumumab, dalotuzumab, xentuzumab, dusigitumab, canakinumab, ustekinumab, ustekinumab, ustekinumab, briakinumab, briakinumab, abrezekimab, lebrikizumab, romilkimab, TNX-650, tralokinumab, anrukinzumab, brodalumab, ixekizumab, netakimab, perakizumab, secukinumab, vunakizumab, afasevikumab, afasevikumab, bimekizumab, bimekizumab, remtolumab, bermekimab, lutikizumab, lutikizumab, gevokizumab, cergutuzumab amunaleukin, fletikumab, fezakinumab, brazikumab, guselkumab, mirikizumab, tildrakizumab, risankizumab, flotetuzumab, nemolizumab, pascolizumab, dupilumab, mepolizumab, reslizumab, clazakizumab, elsilimomab, olokizumab, sarilumab, siltuximab, sirukumab, vobarilizumab, tocilizumab, SA237, satralizumab, enokizumab, prezalizumab, natalizumab, abrilumab, abrilumab, vedolizumab, volociximab, tadocizumab, etaracizumab, etrolizumab, spesolimab, vatelizumab, erlizumab, lirilumab, relatlimab, cBR96-doxorubicinimmunoconjugate, odulimomab, efalizumab, ladiratuzumab vedotin, simtuzumab, samrotamab vedotin, aselizumab, lupartumab amadotin, imalumab, carlumab, imaprelimab, amatuximab, amatuximab, anetumab ravtansine, narnatumab, clivatuzumab tetraxetan, pemtumomab, gatipotuzumab, ensituximab, lemalesomab, sulesomab, enfortumab vedotin, racotumomab, monalizumab, brontictuzumab, tarextumab, vesencumab, oxelumab, gilvetmab, tislelizumab, dostarlimab, BCD-100, nivolumab, PDR001, pembrolizumab, pidilizumab, retifanlimab, spartalizumab, sintilimab, cemiplimab, olaratumab, tovetumab, rinucumab, atezolizumab, avelumab, durvalumab, lifastuzumab vedotin, bavituximab, acapatamab, capromab, rosopatamab, nezastomig, pasotuxizumab, pelgifatamab, voxalatamab, cofetuzumab pelidotin, denosumab, rosmantuzumab, cirmtuzumab, atinumab, indatuximab ravtansine, elotuzumab, sirtratumab vedotin, sonepcizumab, vandortuzumab vedotin, minretumomab, satumomab pendetide, maslimomab, ontuxizumab, tenatumomab, fresolimumab, metelimumab, lerdelimumab, tezepelumab, etigilimab, tiragotumab, placulumab, prezalumab, infliximab, nerelimomab, ozoralizumab, adalimumab, afelimomab, certolizumab pegol, golimumab, mapatumumab, conatumumab, lexatumumab, tigatuzumab, sacituzumab govitecan, votumumab, pogalizumab, letolizumab, pankomab, anatumomab mafenatox, enavatuzumab, flanvotumab, brolucizumab, ranibizumab, varisacumab, bevacizumab, faricimab, icrucumab, alacizumab pegol, ramucirumab, pritumumab, and onvatilimab;
[6971] VL4 comprises a light chain complementarity determining region 1 (LCDR1), LCDR2, and/or LCDR3 of an antibody selected from the group consisting of losatuxizumab vedotin, utomilumab, urelumab, oleclumab, naptumomab estafenatox, ascrinvacumab, pintumomab, tacatuzumab tetraxetan, nesvacumab, vanucizumab, timolumab, vapaliximab, vepalimomab, enapotamab vedotin, ianalumab, belimumab, tabalumab, tibulizumab, belantamab mafodotin, teclistamab, teclistamab, detumomab, nacolomab tafenatox, eculizumab, lendalizumab, pexelizumab, pozelimab, ravulizumab, tesidolumab, vilobelimab, abagovomab, igovomab, oregovomab, sofituzumab vedotin, cantuzumab mertansine, cantuzuma bravtansine, girentuximab, altumomab pentetate, arcitumomab, besilesomab, bertilimumab, plozalizumab, mogamulizumab, leronlimab, PRO140, rovelizumab, rovelizumab, talacotuzumab, benralizumab, tavolimab, vonlerolizumab, gavilimomab, ziralimumab, fanolesomab, ipilimumab, ruplizumab, toralizumab, dapirolizumab pegol, toralizumab, dapirolizumab pegol, ruplizumab, blinatumomab, inebilizumab, loncastuximab tesirine, SGN-CD19A, tafasitamab, taplitumomab paptox, XMAB-5574, Budoprutug, Obexclimab, duvortuxizumab, englumafusp alfa, Emfizatamab, zeripatamig, siplizumab, blontuvetmab, FBTA05, ibritumomab tiuxetan, obinutuzumab, ocaratuzumab, ocrelizumab, ofatumumab, rituximab, tositumomab, ublituximab, veltuzumab, divozilimab, eramkafusp alfa, ripertamab, zuberitamab, glofitamab, nofetumomab merpentan, samalizumab, imvotamab, odronextamab, plamotamab, bectumomab, inotuzumab ozogamicin, moxetumomab pasudotox, pinatuzumab vedotin, gomiliximab, lumiliximab, inolimomab, inolimomab, daclizumab, camidanluma btesirine, basiliximab, varlilumab, omburtamab, enoblituzumab, vopratelimab, lulizumabpegol, TGN1412, muromonab-CD3, otelixizumab, teplizumab, visilizumab, epcoritamab, epcoritamab, brentuximab vedotin, iratumumab, azintuxizumab vedotin, gemtuzumab ozogamicin, lintuzumab, vadastuximab talirine, naratuximab emtansine, otlertuzumab, lilotomab satetraxetan, tetulomab, daratumumab, isatuximab, foralumab, mosunetuzumab, mosunetuzumab, cedelizumab, ibalizumab, keliximab, priliximab, tregalizumab, zanolimumab, bleselumab, iscalimab, lucatumumab, ravagalimab, selicrelumab, teneliximab, vanalimab, abciximab, bivatuzumab, iomab-B, telimomab aritox, zolimomab aritox, abituzumab, intetumumab, alemtuzumab, tamtuvetmab, lorvotuzumab mertansine, itolizumab, cusatuzumab, vorsetuzumab mafodotin, milatuzumab, iladatuzumab vedotin, polatuzumab vedotin, galiximab, cibisatamab, zolbetuximab, naxitamab, tisotumab vedotin, olendalizumab, pamrevlumab, lacnotuzumab, cabiralizumab, emactuzumab, axatilimab, gimsilumab, lenzilumab, namilumab, tremelimumab, ulocuplumab, tepoditamab, rovalpituzumab tesirine, tarlatamab, demcizumab, navicixizumab, drozitumab, parsatuzumab, depatuxizumab mafodotin, modotuximab, carotuximab, adecatumumab, adecatumumab, oportuzumab monatox, solitomab, tucotuzumab celmoleukin, edrecolomab, catumaxomab, ifabotuzumab, fibatuzumab, zalutumumab, panitumumab, cetuximab, futuximab, imgatuzumab, laprituximab emtansine, matuzumab, necitumumab, nimotuzumab, tomuzotuximab, amivantamab, amivantamab, epitumomab cituxetan, sontuzumab, duligotuzumab, elgemtumab, lumretuzumab, patritumab, seribantumab, zenocutuzumab, sibrotuzumab, burosumab, aprutumab ixadotin, radretumab, pasotuxizumab, farletuzumab, mirvetuximab soravtansine, vantictumab, TRBS07, 3F8, dinutuximab, dinutuximab beta, ecromeximab, mitumomab, andecaliximab, capromab, codrituzumab, glembatumumab vedotin, talquetamab, talquetamab, trevogrumab, indusatumab vedotin, ficlatuzumab, rilotumumab, zatuximab, pentuzimab, pentuzimab, margetuximab, timigutuzumab, trastuzumab, trastuzumab duocarmazine, trastuzumab emtansine, gancotamab, pertuzumab, ertumaxomab, emibetuzumab, telisotuzumab, telisotuzumab vedotin, derlotuximab biotin, apolizumab, onartuzumab, bersanlimab, enlimomabpegol, rontalizumab, sifalimumab, talizumab, ganitumab, istiratumab, robatumumab, teprotumumab, figitumumab, ganitumab, istiratumab, robatumumab, teprotumumab, cixutumumab, dalotuzumab, xentuzumab, dusigitumab, canakinumab, ustekinumab, ustekinumab, ustekinumab, briakinumab, briakinumab, abrezekimab, lebrikizumab, romilkimab, TNX-650, tralokinumab, anrukinzumab, brodalumab, ixekizumab, netakimab, perakizumab, secukinumab, vunakizumab, afasevikumab, afasevikumab, bimekizumab, bimekizumab, remtolumab, bermekimab, lutikizumab, lutikizumab, gevokizumab, cergutuzumab amunaleukin, fletikumab, fezakinumab, brazikumab, guselkumab, mirikizumab, tildrakizumab, risankizumab, flotetuzumab, nemolizumab, pascolizumab, dupilumab, mepolizumab, reslizumab, clazakizumab, elsilimomab, olokizumab, sarilumab, siltuximab, sirukumab, vobarilizumab, tocilizumab, SA237, satralizumab, enokizumab, prezalizumab, natalizumab, abrilumab, abrilumab, vedolizumab, volociximab, tadocizumab, etaracizumab, etrolizumab, spesolimab, vatelizumab, erlizumab, lirilumab, relatlimab, cBR96-doxorubicinimmunoconjugate, odulimomab, efalizumab, ladiratuzumab vedotin, simtuzumab, samrotamab vedotin, aselizumab, lupartumab amadotin, imalumab, carlumab, imaprelimab, amatuximab, amatuximab, anetumab ravtansine, narnatumab, clivatuzumab tetraxetan, pemtumomab, gatipotuzumab, ensituximab, lemalesomab, sulesomab, enfortumab vedotin, racotumomab, monalizumab, brontictuzumab, tarextumab, vesencumab, oxelumab, gilvetmab, tislelizumab, dostarlimab, BCD-100, nivolumab, PDR001, pembrolizumab, pidilizumab, retifanlimab, spartalizumab, sintilimab, cemiplimab, olaratumab, tovetumab, rinucumab, atezolizumab, avelumab, durvalumab, lifastuzumab vedotin, bavituximab, acapatamab, capromab, rosopatamab, nezastomig, pasotuxizumab, pelgifatamab, voxalatamab, cofetuzumab pelidotin, denosumab, rosmantuzumab, cirmtuzumab, atinumab, indatuximab ravtansine, elotuzumab, sirtratumab vedotin, sonepcizumab, vandortuzumab vedotin, minretumomab, satumomab pendetide, maslimomab, ontuxizumab, tenatumomab, fresolimumab, metelimumab, lerdelimumab, tezepelumab, etigilimab, tiragotumab, placulumab, prezalumab, infliximab, nerelimomab, ozoralizumab, adalimumab, afelimomab, certolizumab pegol, golimumab, mapatumumab, conatumumab, lexatumumab, tigatuzumab, sacituzumab govitecan, votumumab, pogalizumab, letolizumab, pankomab, anatumomab mafenatox, enavatuzumab, flanvotumab, brolucizumab, ranibizumab, varisacumab, bevacizumab, faricimab, icrucumab, alacizumab pegol, ramucirumab, pritumumab, and onvatilimab;
[6972] VH1 comprises a heavy chain complementarity determining region 1 (HCDR1), HCDR2, and/or HCDR3 of an antibody selected from the group consisting of losatuxizumab vedotin, utomilumab, urelumab, oleclumab, naptumomab estafenatox, ascrinvacumab, pintumomab, tacatuzumab tetraxetan, nesvacumab, vanucizumab, timolumab, vapaliximab, vepalimomab, enapotamab vedotin, ianalumab, belimumab, tabalumab, tibulizumab, belantamab mafodotin, teclistamab, teclistamab, detumomab, nacolomab tafenatox, eculizumab, lendalizumab, pexelizumab, pozelimab, ravulizumab, tesidolumab, vilobelimab, abagovomab, igovomab, oregovomab, sofituzumab vedotin, cantuzumab mertansine, cantuzuma bravtansine, girentuximab, altumomab pentetate, arcitumomab, besilesomab, bertilimumab, plozalizumab, mogamulizumab, leronlimab, PRO140, rovelizumab, rovelizumab, talacotuzumab, benralizumab, tavolimab, vonlerolizumab, gavilimomab, ziralimumab, fanolesomab, ipilimumab, ruplizumab, toralizumab, dapirolizumab pegol, toralizumab, dapirolizumab pegol, ruplizumab, blinatumomab, inebilizumab, loncastuximab tesirine, SGN-CD19A, tafasitamab, taplitumomab paptox, XMAB-5574, Budoprutug, Obexelimab, duvortuxizumab, englumafusp alfa, Emfizatamab, zeripatamig, siplizumab, blontuvetmab, FBTA05, ibritumomab tiuxetan, obinutuzumab, ocaratuzumab, ocrelizumab, ofatumumab, rituximab, tositumomab, ublituximab, veltuzumab, divozilimab, eramkafusp alfa, ripertamab, zuberitamab, glofitamab, nofetumomab merpentan, samalizumab, imvotamab, odronextamab, plamotamab, bectumomab, inotuzumab ozogamicin, moxetumomab pasudotox, pinatuzumab vedotin, gomiliximab, lumiliximab, inolimomab, inolimomab, daclizumab, camidanluma btesirine, basiliximab, varlilumab, omburtamab, enoblituzumab, vopratelimab, lulizumabpegol, TGN1412, muromonab-CD3, otelixizumab, teplizumab, visilizumab, epcoritamab, epcoritamab, brentuximab vedotin, iratumumab, azintuxizumab vedotin, gemtuzumab ozogamicin, lintuzumab, vadastuximab talirine, naratuximab emtansine, otlertuzumab, lilotomab satetraxetan, tetulomab, daratumumab, isatuximab, foralumab, mosunetuzumab, mosunetuzumab, cedelizumab, ibalizumab, keliximab, priliximab, tregalizumab, zanolimumab, bleselumab, iscalimab, lucatumumab, ravagalimab, selicrelumab, teneliximab, vanalimab, abciximab, bivatuzumab, iomab-B, telimomab aritox, zolimomab aritox, abituzumab, intetumumab, alemtuzumab, tamtuvetmab, lorvotuzumab mertansine, itolizumab, cusatuzumab, vorsetuzumab mafodotin, milatuzumab, iladatuzumab vedotin, polatuzumab vedotin, galiximab, cibisatamab, zolbetuximab, naxitamab, tisotumab vedotin, olendalizumab, pamrevlumab, lacnotuzumab, cabiralizumab, emactuzumab, axatilimab, gimsilumab, lenzilumab, namilumab, tremelimumab, ulocuplumab, tepoditamab, rovalpituzumab tesirine, tarlatamab, demcizumab, navicixizumab, drozitumab, parsatuzumab, depatuxizumab mafodotin, modotuximab, carotuximab, adecatumumab, adecatumumab, oportuzumab monatox, solitomab, tucotuzumab celmoleukin, edrecolomab, catumaxomab, ifabotuzumab, fibatuzumab, zalutumumab, panitumumab, cetuximab, futuximab, imgatuzumab, laprituximab emtansine, matuzumab, necitumumab, nimotuzumab, tomuzotuximab, amivantamab, amivantamab, epitumomab cituxetan, sontuzumab, duligotuzumab, elgemtumab, lumretuzumab, patritumab, seribantumab, zenocutuzumab, sibrotuzumab, burosumab, aprutumab ixadotin, radretumab, pasotuxizumab, farletuzumab, mirvetuximab soravtansine, vantictumab, TRBS07, 3F8, dinutuximab, dinutuximab beta, ecromeximab, mitumomab, andecaliximab, capromab, codrituzumab, glembatumumab vedotin, talquetamab, talquetamab, trevogrumab, indusatumab vedotin, ficlatuzumab, rilotumumab, zatuximab, pentuzimab, pentuzimab, margetuximab, timigutuzumab, trastuzumab, trastuzumab duocarmazine, trastuzumab emtansine, gancotamab, pertuzumab, ertumaxomab, emibetuzumab, telisotuzumab, telisotuzumab vedotin, derlotuximab biotin, apolizumab, onartuzumab, bersanlimab, enlimomabpegol, rontalizumab, sifalimumab, talizumab, ganitumab, istiratumab, robatumumab, teprotumumab, figitumumab, ganitumab, istiratumab, robatumumab, teprotumumab, cixutumumab, dalotuzumab, xentuzumab, dusigitumab, canakinumab, ustekinumab, ustekinumab, ustekinumab, briakinumab, briakinumab, abrezekimab, lebrikizumab, romilkimab, TNX-650, tralokinumab, anrukinzumab, brodalumab, ixekizumab, netakimab, perakizumab, secukinumab, vunakizumab, afasevikumab, afascvikumab, bimekizumab, bimekizumab, remtolumab, bermekimab, lutikizumab, lutikizumab, gevokizumab, cergutuzumab amunaleukin, fletikumab, fezakinumab, brazikumab, guselkumab, mirikizumab, tildrakizumab, risankizumab, flotetuzumab, nemolizumab, pascolizumab, dupilumab, mepolizumab, reslizumab, clazakizumab, elsilimomab, olokizumab, sarilumab, siltuximab, sirukumab, vobarilizumab, tocilizumab, SA237, satralizumab, enokizumab, prezalizumab, natalizumab, abrilumab, abrilumab, vedolizumab, volociximab, tadocizumab, etaracizumab, etrolizumab, spesolimab, vatelizumab, erlizumab, lirilumab, relatlimab, cBR96-doxorubicinimmunoconjugate, odulimomab, efalizumab, ladiratuzumab vedotin, simtuzumab, samrotamab vedotin, aselizumab, lupartumab amadotin, imalumab, carlumab, imaprelimab, amatuximab, amatuximab, anetumab ravtansine, narnatumab, clivatuzumab tetraxetan, pemtumomab, gatipotuzumab, ensituximab, lemalesomab, sulesomab, enfortumab vedotin, racotumomab, monalizumab, brontictuzumab, tarextumab, vesencumab, oxelumab, gilvetmab, tislelizumab, dostarlimab, BCD-100, nivolumab, PDR001, pembrolizumab, pidilizumab, retifanlimab, spartalizumab, sintilimab, cemiplimab, olaratumab, tovetumab, rinucumab, atezolizumab, avelumab, durvalumab, lifastuzumab vedotin, bavituximab, acapatamab, capromab, rosopatamab, nezastomig, pasotuxizumab, pelgifatamab, voxalatamab, cofetuzumab pelidotin, denosumab, rosmantuzumab, cirmtuzumab, atinumab, indatuximab ravtansine, elotuzumab, sirtratumab vedotin, sonepcizumab, vandortuzumab vedotin, minretumomab, satumomab pendetide, maslimomab, ontuxizumab, tenatumomab, fresolimumab, metelimumab, lerdelimumab, tezepelumab, etigilimab, tiragotumab, placulumab, prezalumab, infliximab, nerelimomab, ozoralizumab, adalimumab, afelimomab, certolizumab pegol, golimumab, mapatumumab, conatumumab, lexatumumab, tigatuzumab, sacituzumab govitecan, votumumab, pogalizumab, letolizumab, pankomab, anatumomab mafenatox, enavatuzumab, flanvotumab, brolucizumab, ranibizumab, varisacumab, bevacizumab, faricimab, icrucumab, alacizumab pegol, ramucirumab, pritumumab, and onvatilimab;
[6973] VH2 comprises a heavy chain complementarity determining region 1 (HCDR1), HCDR2, and/or HCDR3 of an antibody selected from the group consisting of losatuxizumab vedotin, utomilumab, urelumab, oleclumab, naptumomab estafenatox, ascrinvacumab, pintumomab, tacatuzumab tetraxetan, nesvacumab, vanucizumab, timolumab, vapaliximab, vepalimomab, enapotamab vedotin, ianalumab, belimumab, tabalumab, tibulizumab, belantamab mafodotin, teclistamab, teclistamab, detumomab, nacolomab tafenatox, eculizumab, lendalizumab, pexelizumab, pozelimab, ravulizumab, tesidolumab, vilobelimab, abagovomab, igovomab, oregovomab, sofituzumab vedotin, cantuzumab mertansine, cantuzuma bravtansine, girentuximab, altumomab pentetate, arcitumomab, besilesomab, bertilimumab, plozalizumab, mogamulizumab, leronlimab, PRO140, rovelizumab, rovelizumab, talacotuzumab, benralizumab, tavolimab, vonlerolizumab, gavilimomab, ziralimumab, fanolesomab ipilimumab, ruplizumab, toralizumab, dapirolizumab pegol, toralizumab, dapirolizumab pegol, ruplizumab, blinatumomab, inebilizumab, loncastuximab tesirine, SGN-CD19A, tafasitamab, taplitumomab paptox, XMAB-5574, Budoprutug, Obexelimab, duvortuxizumab, englumafusp alfa, Emfizatamab, zeripatamig, siplizumab, blontuvetmab, FBTA05, ibritumomab tiuxetan, obinutuzumab, ocaratuzumab, ocrelizumab, ofatumumab, rituximab, tositumomab, ublituximab, veltuzumab, divozilimab, eramkafusp alfa, ripertamab, zuberitamab, glofitamab, nofetumomab merpentan, samalizumab, imvotamab, odronextamab, plamotamab, bectumomab, inotuzumab ozogamicin, moxetumomab pasudotox, pinatuzumab vedotin, gomiliximab, lumiliximab, inolimomab, inolimomab, daclizumab, camidanluma btesirine, basiliximab, varlilumab, omburtamab, enoblituzumab, vopratelimab, lulizumabpegol, TGN1412, muromonab-CD3, otelixizumab, teplizumab, visilizumab, epcoritamab, epcoritamab, brentuximab vedotin, iratumumab, azintuxizumab vedotin, gemtuzumab ozogamicin, lintuzumab, vadastuximab talirine, naratuximab emtansine, otlertuzumab, lilotomab satetraxetan, tetulomab, daratumumab, isatuximab, foralumab, mosunetuzumab, mosunetuzumab, cedelizumab, ibalizumab, keliximab, priliximab, tregalizumab, zanolimumab, bleselumab, iscalimab, lucatumumab, ravagalimab, selicrelumab, teneliximab, vanalimab, abciximab, bivatuzumab, iomab-B, telimomab aritox, zolimomab aritox, abituzumab, intetumumab, alemtuzumab, tamtuvetmab, lorvotuzumab mertansine, itolizumab, cusatuzumab, vorsetuzumab mafodotin, milatuzumab, iladatuzumab vedotin, polatuzumab vedotin, galiximab, cibisatamab, zolbetuximab, naxitamab, tisotumab vedotin, olendalizumab, pamrevlumab, lacnotuzumab, cabiralizumab, emactuzumab, axatilimab, gimsilumab, lenzilumab, namilumab, tremelimumab, ulocuplumab, tepoditamab, rovalpituzumab tesirine, tarlatamab, demcizumab, navicixizumab, drozitumab, parsatuzumab, depatuxizumab mafodotin, modotuximab, carotuximab, adecatumumab, adecatumumab, oportuzumab monatox, solitomab, tucotuzumab celmoleukin, edrecolomab, catumaxomab, ifabotuzumab, fibatuzumab, zalutumumab, panitumumab, cetuximab, futuximab, imgatuzumab, laprituximab emtansine, matuzumab, necitumumab, nimotuzumab, tomuzotuximab, amivantamab, amivantamab, epitumomab cituxetan, sontuzumab, duligotuzumab, elgemtumab, lumretuzumab, patritumab, seribantumab, zenocutuzumab, sibrotuzumab, burosumab, aprutumab ixadotin, radretumab, pasotuxizumab, farletuzumab, mirvetuximab soravtansine, vantictumab, TRBS07, 3F8, dinutuximab, dinutuximab beta, ecromeximab, mitumomab, andecaliximab, capromab, codrituzumab, glembatumumab vedotin, talquetamab, talquetamab, trevogrumab, indusatumab vedotin, ficlatuzumab, rilotumumab, zatuximab, pentuzimab, pentuzimab, margetuximab, timigutuzumab, trastuzumab, trastuzumab duocarmazine, trastuzumab emtansine, gancotamab, pertuzumab, ertumaxomab, emibetuzumab, telisotuzumab, telisotuzumab vedotin, derlotuximab biotin, apolizumab, onartuzumab, bersanlimab, enlimomabpegol, rontalizumab, sifalimumab, talizumab, ganitumab, istiratumab, robatumumab, teprotumumab, figitumumab, ganitumab, istiratumab, robatumumab, teprotumumab, cixutumumab, dalotuzumab, xentuzumab, dusigitumab, canakinumab, ustekinumab, ustekinumab, ustekinumab, briakinumab, briakinumab, abrezekimab, lebrikizumab, romilkimab, TNX-650, tralokinumab, anrukinzumab, brodalumab, ixekizumab, netakimab, perakizumab, secukinumab, vunakizumab, afasevikumab, afasevikumab, bimekizumab, bimekizumab, remtolumab, bermekimab, lutikizumab, lutikizumab, gevokizumab, cergutuzumab amunaleukin, fletikumab, fezakinumab, brazikumab, guselkumab, mirikizumab, tildrakizumab, risankizumab, flotetuzumab, nemolizumab, pascolizumab, dupilumab, mepolizumab, reslizumab, clazakizumab, elsilimomab, olokizumab, sarilumab, siltuximab, sirukumab, vobarilizumab, tocilizumab, SA237, satralizumab, enokizumab, prezalizumab, natalizumab, abrilumab, abrilumab, vedolizumab, volociximab, tadocizumab, etaracizumab, etrolizumab, spesolimab, vatelizumab, erlizumab, lirilumab, relatlimab, cBR96-doxorubicinimmunoconjugate, odulimomab, efalizumab, ladiratuzumab vedotin, simtuzumab, samrotamab vedotin, aselizumab, lupartumab amadotin, imalumab, carlumab, imaprelimab, amatuximab, amatuximab, anetumab ravtansine, narnatumab, clivatuzumab tetraxetan, pemtumomab, gatipotuzumab, ensituximab, lemalesomab, sulesomab, enfortumab vedotin, racotumomab, monalizumab, brontictuzumab, tarextumab, vesencumab, oxelumab, gilvetmab, tislelizumab, dostarlimab, BCD-100, nivolumab, PDR001, pembrolizumab, pidilizumab, retifanlimab, spartalizumab, sintilimab, cemiplimab, olaratumab, tovetumab, rinucumab, atezolizumab, avelumab, durvalumab, lifastuzumab vedotin, bavituximab, acapatamab, capromab, rosopatamab, nezastomig, pasotuxizumab, pelgifatamab, voxalatamab, cofetuzumab pelidotin, denosumab, rosmantuzumab, cirmtuzumab, atinumab, indatuximab ravtansine, elotuzumab, sirtratumab vedotin, sonepcizumab, vandortuzumab vedotin, minretumomab, satumomab pendetide, maslimomab, ontuxizumab, tenatumomab, fresolimumab, metelimumab, lerdelimumab, tezepelumab, etigilimab, tiragotumab, placulumab, prezalumab, infliximab, nerelimomab, ozoralizumab, adalimumab, afelimomab, certolizumab pegol, golimumab, mapatumumab, conatumumab, lexatumumab, tigatuzumab, sacituzumab govitecan, votumumab, pogalizumab, letolizumab, pankomab, anatumomab mafenatox, enavatuzumab, flanvotumab, brolucizumab, ranibizumab, varisacumab, bevacizumab, faricimab, icrucumab, alacizumab pegol, ramucirumab, pritumumab, and onvatilimab;
[6974] VH3 comprises a heavy chain complementarity determining region 1 (HCDR1), HCDR2, and/or HCDR3 of an antibody selected from the group consisting of losatuxizumab vedotin, utomilumab, urelumab, oleclumab, naptumomab estafenatox, ascrinvacumab, pintumomab, tacatuzumab tetraxetan, nesvacumab, vanucizumab, timolumab, vapaliximab, vepalimomab, enapotamab vedotin, ianalumab, belimumab, tabalumab, tibulizumab, belantamab mafodotin, teclistamab, teclistamab, detumomab, nacolomab tafenatox, eculizumab, lendalizumab, pexelizumab, pozelimab, ravulizumab, tesidolumab, vilobelimab, abagovomab, igovomab, oregovomab, sofituzumab vedotin, cantuzumab mertansine, cantuzuma bravtansine, girentuximab, altumomab pentetate, arcitumomab, besilesomab, bertilimumab, plozalizumab, mogamulizumab, leronlimab, PRO140, rovelizumab, rovelizumab, talacotuzumab, benralizumab, tavolimab, vonlerolizumab, gavilimomab, ziralimumab, fanolesomab, ipilimumab, ruplizumab, toralizumab, dapirolizumab pegol, toralizumab, dapirolizumab pegol, ruplizumab, blinatumomab, inebilizumab, loncastuximab tesirine, SGN-CD19A, tafasitamab, taplitumomab paptox, XMAB-5574, Budoprutug, Obexclimab, duvortuxizumab, englumafusp alfa, Emfizatamab, zeripatamig, siplizumab, blontuvetmab, FBTA05, ibritumomab tiuxetan, obinutuzumab, ocaratuzumab, ocrelizumab, ofatumumab, rituximab, tositumomab, ublituximab, veltuzumab, divozilimab, eramkafusp alfa, ripertamab, zuberitamab, glofitamab, nofetumomab merpentan, samalizumab, imvotamab, odronextamab, plamotamab, bectumomab, inotuzumab ozogamicin, moxetumomab pasudotox, pinatuzumab vedotin, gomiliximab, lumiliximab, inolimomab, inolimomab, daclizumab, camidanluma btesirine, basiliximab, varlilumab, omburtamab, enoblituzumab, vopratelimab, lulizumabpegol, TGN1412, muromonab-CD3, otelixizumab, teplizumab, visilizumab, epcoritamab, epcoritamab, brentuximab vedotin, iratumumab, azintuxizumab vedotin, gemtuzumab ozogamicin, lintuzumab, vadastuximab talirine, naratuximab emtansine, otlertuzumab, lilotomab satetraxetan, tetulomab, daratumumab, isatuximab, foralumab, mosunetuzumab, mosunetuzumab, cedelizumab, ibalizumab, keliximab, priliximab, tregalizumab, zanolimumab, bleselumab, iscalimab, lucatumumab, ravagalimab, selicrelumab, teneliximab, vanalimab, abciximab, bivatuzumab, iomab-B, telimomab aritox, zolimomab aritox, abituzumab, intetumumab, alemtuzumab, tamtuvetmab, lorvotuzumab mertansine, itolizumab, cusatuzumab, vorsetuzumab mafodotin, milatuzumab, iladatuzumab vedotin, polatuzumab vedotin, galiximab, cibisatamab, zolbetuximab, naxitamab, tisotumab vedotin, olendalizumab, pamrevlumab, lacnotuzumab, cabiralizumab, emactuzumab, axatilimab, gimsilumab, lenzilumab, namilumab, tremelimumab, ulocuplumab, tepoditamab, rovalpituzumab tesirine, tarlatamab, demcizumab, navicixizumab, drozitumab, parsatuzumab, depatuxizumab mafodotin, modotuximab, carotuximab, adecatumumab, adecatumumab, oportuzumab monatox, solitomab, tucotuzumab celmoleukin, edrecolomab, catumaxomab, ifabotuzumab, fibatuzumab, zalutumumab, panitumumab, cetuximab, futuximab, imgatuzumab, laprituximab emtansine, matuzumab, necitumumab, nimotuzumab, tomuzotuximab, amivantamab, amivantamab, epitumomab cituxetan, sontuzumab, duligotuzumab, elgemtumab, lumretuzumab, patritumab, seribantumab, zenocutuzumab, sibrotuzumab, burosumab, aprutumab ixadotin, radretumab, pasotuxizumab, farletuzumab, mirvetuximab soravtansine, vantictumab, TRBS07, 3F8, dinutuximab, dinutuximab beta, ecromeximab, mitumomab, andecaliximab, capromab, codrituzumab, glembatumumab vedotin, talquetamab, talquetamab, trevogrumab, indusatumab vedotin, ficlatuzumab, rilotumumab, zatuximab, pentuzimab, pentuzimab, margetuximab, timigutuzumab, trastuzumab, trastuzumab duocarmazine, trastuzumab emtansine, gancotamab, pertuzumab, ertumaxomab, emibetuzumab, telisotuzumab, telisotuzumab vedotin, derlotuximab biotin, apolizumab, onartuzumab, bersanlimab, enlimomabpegol, rontalizumab, sifalimumab, talizumab, ganitumab, istiratumab, robatumumab, teprotumumab, figitumumab, ganitumab, istiratumab, robatumumab, teprotumumab, cixutumumab, dalotuzumab, xentuzumab, dusigitumab, canakinumab, ustekinumab, ustekinumab, ustekinumab, briakinumab, briakinumab, abrezekimab, lebrikizumab, romilkimab, TNX-650, tralokinumab, anrukinzumab, brodalumab, ixekizumab, netakimab, perakizumab, secukinumab, vunakizumab, afasevikumab, afasevikumab, bimekizumab, bimekizumab, remtolumab, bermekimab, lutikizumab, lutikizumab, gevokizumab, cergutuzumab amunaleukin, fletikumab, fezakinumab, brazikumab, guselkumab, mirikizumab, tildrakizumab, risankizumab, flotetuzumab, nemolizumab, pascolizumab, dupilumab, mepolizumab, reslizumab, clazakizumab, elsilimomab, olokizumab, sarilumab, siltuximab, sirukumab, vobarilizumab, tocilizumab, SA237, satralizumab, enokizumab, prezalizumab, natalizumab, abrilumab, abrilumab, vedolizumab, volociximab, tadocizumab, etaracizumab, etrolizumab, spesolimab, vatelizumab, erlizumab, lirilumab, relatlimab, cBR96-doxorubicinimmunoconjugate, odulimomab, efalizumab, ladiratuzumab vedotin, simtuzumab, samrotamab vedotin, aselizumab, lupartumab amadotin, imalumab, carlumab, imaprelimab, amatuximab, amatuximab, anetumab ravtansine, narnatumab, clivatuzumab tetraxetan, pemtumomab, gatipotuzumab, ensituximab, lemalesomab, sulesomab, enfortumab vedotin, racotumomab, monalizumab, brontictuzumab, tarextumab, vesencumab, oxelumab, gilvetmab, tislelizumab, dostarlimab, BCD-100, nivolumab, PDR001, pembrolizumab, pidilizumab, retifanlimab, spartalizumab, sintilimab, cemiplimab, olaratumab, tovetumab, rinucumab, atezolizumab, avelumab, durvalumab, lifastuzumab vedotin, bavituximab, acapatamab, capromab, rosopatamab, nezastomig, pasotuxizumab, pelgifatamab, voxalatamab, cofetuzumab pelidotin, denosumab, rosmantuzumab, cirmtuzumab, atinumab, indatuximab ravtansine, elotuzumab, sirtratumab vedotin, sonepcizumab, vandortuzumab vedotin, minretumomab, satumomab pendetide, maslimomab, ontuxizumab, tenatumomab, fresolimumab, metelimumab, lerdelimumab, tezepelumab, etigilimab, tiragotumab, placulumab, prezalumab, infliximab, nerelimomab, ozoralizumab, adalimumab, afelimomab, certolizumab pegol, golimumab, mapatumumab, conatumumab, lexatumumab, tigatuzumab, sacituzumab govitecan, votumumab, pogalizumab, letolizumab, pankomab, anatumomab mafenatox, enavatuzumab, flanvotumab, brolucizumab, ranibizumab, varisacumab, bevacizumab, faricimab, icrucumab, alacizumab pegol, ramucirumab, pritumumab, and onvatilimab; and/or
[6975] VH4 comprises a heavy chain complementarity determining region 1 (HCDR1), HCDR2, and/or HCDR3 of an antibody selected from the group consisting of losatuxizumab vedotin, utomilumab, urelumab, oleclumab, naptumomab estafenatox, ascrinvacumab, pintumomab, tacatuzumab tetraxetan, nesvacumab, vanucizumab, timolumab, vapaliximab, vepalimomab, enapotamab vedotin, ianalumab, belimumab, tabalumab, tibulizumab, belantamab mafodotin, teclistamab, teclistamab, detumomab, nacolomab tafenatox, eculizumab, lendalizumab, pexelizumab, pozelimab, ravulizumab, tesidolumab, vilobelimab, abagovomab, igovomab, oregovomab, sofituzumab vedotin, cantuzumab mertansine, cantuzuma bravtansine, girentuximab, altumomab pentetate, arcitumomab, besilesomab, bertilimumab, plozalizumab, mogamulizumab, leronlimab, PRO140, rovelizumab, rovelizumab, talacotuzumab, benralizumab, tavolimab, vonlerolizumab, gavilimomab, ziralimumab, fanolesomab, ipilimumab, ruplizumab, toralizumab, dapirolizumab pegol, toralizumab, dapirolizumab pegol, ruplizumab, blinatumomab, inebilizumab, loncastuximab tesirine, SGN-CD19A, tafasitamab, taplitumomab paptox, XMAB-5574, Budoprutug, Obexelimab, duvortuxizumab, englumafusp alfa, Emfizatamab, zeripatamig, siplizumab, blontuvetmab, FBTA05, ibritumomab tiuxetan, obinutuzumab, ocaratuzumab, ocrelizumab, ofatumumab, rituximab, tositumomab, ublituximab, veltuzumab, divozilimab, eramkafusp alfa, ripertamab, zuberitamab, glofitamab, nofetumomab merpentan, samalizumab, imvotamab, odronextamab, plamotamab, bectumomab, inotuzumab ozogamicin, moxetumomab pasudotox, pinatuzumab vedotin, gomiliximab, lumiliximab, inolimomab, inolimomab, daclizumab, camidanluma btesirine, basiliximab, varlilumab, omburtamab, enoblituzumab, vopratelimab, lulizumabpegol, TGN1412, muromonab-CD3, otelixizumab, teplizumab, visilizumab, epcoritamab, epcoritamab, brentuximab vedotin, iratumumab, azintuxizumab vedotin, gemtuzumab ozogamicin, lintuzumab, vadastuximab talirine, naratuximab emtansine, otlertuzumab, lilotomab satetraxetan, tetulomab, daratumumab, isatuximab, foralumab, mosunetuzumab, mosunetuzumab, cedelizumab, ibalizumab, keliximab, priliximab, tregalizumab, zanolimumab, bleselumab, iscalimab, lucatumumab, ravagalimab, selicrelumab, teneliximab, vanalimab, abciximab, bivatuzumab, iomab-B, telimomab aritox, zolimomab aritox, abituzumab, intetumumab, alemtuzumab, tamtuvetmab, lorvotuzumab mertansine, itolizumab, cusatuzumab, vorsetuzumab mafodotin, milatuzumab, iladatuzumab vedotin, polatuzumab vedotin, galiximab, cibisatamab, zolbetuximab, naxitamab, tisotumab vedotin, olendalizumab, pamrevlumab, lacnotuzumab, cabiralizumab, emactuzumab, axatilimab, gimsilumab, lenzilumab, namilumab, tremelimumab, ulocuplumab, tepoditamab, rovalpituzumab tesirine, tarlatamab, demcizumab, navicixizumab, drozitumab, parsatuzumab, depatuxizumab mafodotin, modotuximab, carotuximab, adecatumumab, adecatumumab, oportuzumab monatox, solitomab, tucotuzumab celmoleukin, edrecolomab, catumaxomab, ifabotuzumab, fibatuzumab, zalutumumab, panitumumab, cetuximab, futuximab, imgatuzumab, laprituximab emtansine, matuzumab, necitumumab, nimotuzumab, tomuzotuximab, amivantamab, amivantamab, epitumomab cituxetan, sontuzumab, duligotuzumab, elgemtumab, lumretuzumab, patritumab, seribantumab, zenocutuzumab, sibrotuzumab, burosumab, aprutumab ixadotin, radretumab, pasotuxizumab, farletuzumab, mirvetuximab soravtansine, vantictumab, TRBS07, 3F8, dinutuximab, dinutuximab beta, ecromeximab, mitumomab, andecaliximab, capromab, codrituzumab, glembatumumab vedotin, talquetamab, talquetamab, trevogrumab, indusatumab vedotin, ficlatuzumab, rilotumumab, zatuximab, pentuzimab, pentuzimab, margetuximab, timigutuzumab, trastuzumab, trastuzumab duocarmazine, trastuzumab emtansine, gancotamab, pertuzumab, ertumaxomab, emibetuzumab, telisotuzumab, telisotuzumab vedotin, derlotuximab biotin, apolizumab, onartuzumab, bersanlimab, enlimomabpegol, rontalizumab, sifalimumab, talizumab, ganitumab, istiratumab, robatumumab, teprotumumab, figitumumab, ganitumab, istiratumab, robatumumab, teprotumumab, cixutumumab, dalotuzumab, xentuzumab, dusigitumab, canakinumab, ustekinumab, ustekinumab, ustekinumab, briakinumab, briakinumab, abrezekimab, lebrikizumab, romilkimab, TNX-650, tralokinumab, anrukinzumab, brodalumab, ixekizumab, netakimab, perakizumab, secukinumab, vunakizumab, afasevikumab, afasevikumab, bimekizumab, bimekizumab, remtolumab, bermekimab, lutikizumab, lutikizumab, gevokizumab, cergutuzumab amunaleukin, fletikumab, fezakinumab, brazikumab, guselkumab, mirikizumab, tildrakizumab, risankizumab, flotetuzumab, nemolizumab, pascolizumab, dupilumab, mepolizumab, reslizumab, clazakizumab, elsilimomab, olokizumab, sarilumab, siltuximab, sirukumab, vobarilizumab, tocilizumab, SA237, satralizumab, enokizumab, prezalizumab, natalizumab, abrilumab, abrilumab, vedolizumab, volociximab, tadocizumab, etaracizumab, etrolizumab, spesolimab, vatelizumab, erlizumab, lirilumab, relatlimab, cBR96-doxorubicinimmunoconjugate, odulimomab, efalizumab, ladiratuzumab vedotin, simtuzumab, samrotamab vedotin, aselizumab, lupartumab amadotin, imalumab, carlumab, imaprelimab, amatuximab, amatuximab, anetumab ravtansine, narnatumab, clivatuzumab tetraxetan, pemtumomab, gatipotuzumab, ensituximab, lemalesomab, sulesomab, enfortumab vedotin, racotumomab, monalizumab, brontictuzumab, tarextumab, vesencumab, oxelumab, gilvetmab, tislelizumab, dostarlimab, BCD-100, nivolumab, PDR001, pembrolizumab, pidilizumab, retifanlimab, spartalizumab, sintilimab, cemiplimab, olaratumab, tovetumab, rinucumab, atezolizumab, avelumab, durvalumab, lifastuzumab vedotin, bavituximab, acapatamab, capromab, rosopatamab, nezastomig, pasotuxizumab, pelgifatamab, voxalatamab, cofetuzumab pelidotin, denosumab, rosmantuzumab, cirmtuzumab, atinumab, indatuximab ravtansine, elotuzumab, sirtratumab vedotin, sonepcizumab, vandortuzumab vedotin, minretumomab, satumomab pendetide, maslimomab, ontuxizumab, tenatumomab, fresolimumab, metelimumab, lerdelimumab, tezepelumab, etigilimab, tiragotumab, placulumab, prezalumab, infliximab, nerelimomab, ozoralizumab, adalimumab, afelimomab, certolizumab pegol, golimumab, mapatumumab, conatumumab, lexatumumab, tigatuzumab, sacituzumab govitecan, votumumab, pogalizumab, letolizumab, pankomab, anatumomab mafenatox, enavatuzumab, flanvotumab, brolucizumab, ranibizumab, varisacumab, bevacizumab, faricimab, icrucumab, alacizumab pegol, ramucirumab, pritumumab, and onvatilimab; or
[6976] (ii)
[6977] VL1 comprises a VL of an antibody selected from the group consisting of losatuxizumab vedotin, utomilumab, urelumab, oleclumab, naptumomab estafenatox, ascrinvacumab, pintumomab, tacatuzumab tetraxetan, nesvacumab, vanucizumab, timolumab, vapaliximab, vepalimomab, enapotamab vedotin, ianalumab, belimumab, tabalumab, tibulizumab, belantamab mafodotin, teclistamab, teclistamab, detumomab, nacolomab tafenatox, eculizumab, lendalizumab, pexelizumab, pozelimab, ravulizumab, tesidolumab, vilobelimab, abagovomab, igovomab, oregovomab, sofituzumab vedotin, cantuzumab mertansine, cantuzuma bravtansine, girentuximab, altumomab pentetate, arcitumomab, besilesomab, bertilimumab, plozalizumab, mogamulizumab, leronlimab, PRO140, rovelizumab, rovelizumab, talacotuzumab, benralizumab, tavolimab, vonlerolizumab, gavilimomab, ziralimumab, fanolesomab, ipilimumab, ruplizumab, toralizumab, dapirolizumab pegol, toralizumab, dapirolizumab pegol, ruplizumab, blinatumomab, inebilizumab, loncastuximab tesirine, SGN-CD19A, tafasitamab, taplitumomab paptox, XMAB-5574, Budoprutug, Obexelimab, duvortuxizumab, englumafusp alfa, Emfizatamab, zeripatamig, siplizumab, blontuvetmab, FBTA05, ibritumomab tiuxetan, obinutuzumab, ocaratuzumab, ocrelizumab, ofatumumab, rituximab, tositumomab, ublituximab, veltuzumab, divozilimab, eramkafusp alfa, ripertamab, zuberitamab, glofitamab, nofetumomab merpentan, samalizumab, imvotamab, odronextamab, plamotamab, bectumomab, inotuzumab ozogamicin, moxetumomab pasudotox, pinatuzumab vedotin, gomiliximab, lumiliximab, inolimomab, inolimomab, daclizumab, camidanluma btesirine, basiliximab, varlilumab, omburtamab, enoblituzumab, vopratelimab, lulizumabpegol, TGN1412, muromonab-CD3, otelixizumab, teplizumab, visilizumab, epcoritamab, epcoritamab, brentuximab vedotin, iratumumab, azintuxizumab vedotin, gemtuzumab ozogamicin, lintuzumab, vadastuximab talirine, naratuximab emtansine, otlertuzumab, lilotomab satetraxetan, tetulomab, daratumumab, isatuximab, foralumab, mosunetuzumab, mosunetuzumab, cedelizumab, ibalizumab, keliximab, priliximab, tregalizumab, zanolimumab, bleselumab, iscalimab, lucatumumab, ravagalimab, selicrelumab, teneliximab, vanalimab, abciximab, bivatuzumab, iomab-B, telimomab aritox, zolimomab aritox, abituzumab, intetumumab, alemtuzumab, tamtuvetmab, lorvotuzumab mertansine, itolizumab, cusatuzumab, vorsetuzumab mafodotin, milatuzumab, iladatuzumab vedotin, polatuzumab vedotin, galiximab, cibisatamab, zolbetuximab, naxitamab, tisotumab vedotin, olendalizumab, pamrevlumab, lacnotuzumab, cabiralizumab, emactuzumab, axatilimab, gimsilumab, lenzilumab, namilumab, tremelimumab, ulocuplumab, tepoditamab, rovalpituzumab tesirine, tarlatamab, demcizumab, navicixizumab, drozitumab, parsatuzumab, depatuxizumab mafodotin, modotuximab, carotuximab, adecatumumab, adecatumumab, oportuzumab monatox, solitomab, tucotuzumab celmoleukin, edrecolomab, catumaxomab, ifabotuzumab, fibatuzumab, zalutumumab, panitumumab, cetuximab, futuximab, imgatuzumab, laprituximab emtansine, matuzumab, necitumumab, nimotuzumab, tomuzotuximab, amivantamab, amivantamab, epitumomab cituxetan, sontuzumab, duligotuzumab, elgemtumab, lumretuzumab, patritumab, seribantumab, zenocutuzumab, sibrotuzumab, burosumab, aprutumab ixadotin, radretumab, pasotuxizumab, farletuzumab, mirvetuximab soravtansine, vantictumab, TRBS07, 3F8, dinutuximab, dinutuximab beta, ecromeximab, mitumomab, andecaliximab, capromab, codrituzumab, glembatumumab vedotin, talquetamab, talquetamab, trevogrumab, indusatumab vedotin, ficlatuzumab, rilotumumab, zatuximab, pentuzimab, pentuzimab, margetuximab, timigutuzumab, trastuzumab, trastuzumab duocarmazine, trastuzumab emtansine, gancotamab, pertuzumab, ertumaxomab, emibetuzumab, telisotuzumab, telisotuzumab vedotin, derlotuximab biotin, apolizumab, onartuzumab, bersanlimab, enlimomabpegol, rontalizumab, sifalimumab, talizumab, ganitumab, istiratumab, robatumumab, teprotumumab, figitumumab, ganitumab, istiratumab, robatumumab, teprotumumab, cixutumumab, dalotuzumab, xentuzumab, dusigitumab, canakinumab, ustekinumab, ustekinumab, ustekinumab, briakinumab, briakinumab, abrezekimab, lebrikizumab, romilkimab, TNX-650, tralokinumab, anrukinzumab, brodalumab, ixekizumab, netakimab, perakizumab, secukinumab, vunakizumab, afasevikumab, afasevikumab, bimekizumab, bimekizumab, remtolumab, bermekimab, lutikizumab, lutikizumab, gevokizumab, cergutuzumab amunaleukin, fletikumab, fezakinumab, brazikumab, guselkumab, mirikizumab, tildrakizumab, risankizumab, flotetuzumab, nemolizumab, pascolizumab, dupilumab, mepolizumab, reslizumab, clazakizumab, elsilimomab, olokizumab, sarilumab, siltuximab, sirukumab, vobarilizumab, tocilizumab, SA237, satralizumab, enokizumab, prezalizumab, natalizumab, abrilumab, abrilumab, vedolizumab, volociximab, tadocizumab, etaracizumab, etrolizumab, spesolimab, vatelizumab, erlizumab, lirilumab, relatlimab, cBR96-doxorubicinimmunoconjugate, odulimomab, efalizumab, ladiratuzumab vedotin, simtuzumab, samrotamab vedotin, aselizumab, lupartumab amadotin, imalumab, carlumab, imaprelimab, amatuximab, amatuximab, anetumab ravtansine, narnatumab, clivatuzumab tetraxetan, pemtumomab, gatipotuzumab, ensituximab, lemalesomab, sulesomab, enfortumab vedotin, racotumomab, monalizumab, brontictuzumab, tarextumab, vesencumab, oxelumab, gilvetmab, tislelizumab, dostarlimab, BCD-100, nivolumab, PDR001, pembrolizumab, pidilizumab, retifanlimab, spartalizumab, sintilimab, cemiplimab, olaratumab, tovetumab, rinucumab, atezolizumab, avelumab, durvalumab, lifastuzumab vedotin, bavituximab, acapatamab, capromab, rosopatamab, nezastomig, pasotuxizumab, pelgifatamab, voxalatamab, cofetuzumab pelidotin, denosumab, rosmantuzumab, cirmtuzumab, atinumab, indatuximab ravtansine, elotuzumab, sirtratumab vedotin, sonepcizumab, vandortuzumab vedotin, minretumomab, satumomab pendetide, maslimomab, ontuxizumab, tenatumomab, fresolimumab, metelimumab, lerdelimumab, tezepelumab, etigilimab, tiragotumab, placulumab, prezalumab, infliximab, nerelimomab, ozoralizumab, adalimumab, afelimomab, certolizumab pegol, golimumab, mapatumumab, conatumumab, lexatumumab, tigatuzumab, sacituzumab govitecan, votumumab, pogalizumab, letolizumab, pankomab, anatumomab mafenatox, enavatuzumab, flanvotumab, brolucizumab, ranibizumab, varisacumab, bevacizumab, faricimab, icrucumab, alacizumab pegol, ramucirumab, pritumumab, and onvatilimab;
[6978] VL2 comprises a VL of an antibody selected from the group consisting of losatuxizumab vedotin, utomilumab, urelumab, oleclumab, naptumomab estafenatox, ascrinvacumab, pintumomab, tacatuzumab tetraxetan, nesvacumab, vanucizumab, timolumab, vapaliximab, vepalimomab, enapotamab vedotin, ianalumab, belimumab, tabalumab, tibulizumab, belantamab mafodotin, teclistamab, teclistamab, detumomab, nacolomab tafenatox, eculizumab, lendalizumab, pexelizumab, pozelimab, ravulizumab, tesidolumab, vilobelimab, abagovomab, igovomab, oregovomab, sofituzumab vedotin, cantuzumab mertansine, cantuzuma bravtansine, girentuximab, altumomab pentetate, arcitumomab, besilesomab, bertilimumab, plozalizumab, mogamulizumab, leronlimab, PRO140, rovelizumab, rovelizumab, talacotuzumab, benralizumab, tavolimab, vonlerolizumab, gavilimomab, ziralimumab, fanolesomab, ipilimumab, ruplizumab, toralizumab, dapirolizumab pegol, toralizumab, dapirolizumab pegol, ruplizumab, blinatumomab, inebilizumab, loncastuximab tesirine, SGN-CD19A, tafasitamab, taplitumomab paptox, XMAB-5574, Budoprutug, Obexelimab, duvortuxizumab, englumafusp alfa, Emfizatamab, zeripatamig, siplizumab, blontuvetmab, FBTA05, ibritumomab tiuxetan, obinutuzumab, ocaratuzumab, ocrelizumab, ofatumumab, rituximab, tositumomab, ublituximab, veltuzumab, divozilimab, eramkafusp alfa, ripertamab, zuberitamab, glofitamab, nofetumomab merpentan, samalizumab, imvotamab, odronextamab, plamotamab, bectumomab, inotuzumab ozogamicin, moxetumomab pasudotox, pinatuzumab vedotin, gomiliximab, lumiliximab, inolimomab, inolimomab, daclizumab, camidanluma btesirine, basiliximab, varlilumab, omburtamab, enoblituzumab, vopratelimab, lulizumabpegol, TGN1412, muromonab-CD3, otelixizumab, teplizumab, visilizumab, epcoritamab, epcoritamab, brentuximab vedotin, iratumumab, azintuxizumab vedotin, gemtuzumab ozogamicin, lintuzumab, vadastuximab talirine, naratuximab emtansine, otlertuzumab, lilotomab satetraxetan, tetulomab, daratumumab, isatuximab, foralumab, mosunetuzumab, mosunetuzumab, cedelizumab, ibalizumab, keliximab, priliximab, tregalizumab, zanolimumab, bleselumab, iscalimab, lucatumumab, ravagalimab, selicrelumab, teneliximab, vanalimab, abciximab, bivatuzumab, iomab-B, telimomab aritox, zolimomab aritox, abituzumab, intetumumab, alemtuzumab, tamtuvetmab, lorvotuzumab mertansine, itolizumab, cusatuzumab, vorsetuzumab mafodotin, milatuzumab, iladatuzumab vedotin, polatuzumab vedotin, galiximab, cibisatamab, zolbetuximab, naxitamab, tisotumab vedotin, olendalizumab, pamrevlumab, lacnotuzumab, cabiralizumab, emactuzumab, axatilimab, gimsilumab, lenzilumab, namilumab, tremelimumab, ulocuplumab, tepoditamab, rovalpituzumab tesirine, tarlatamab, demcizumab, navicixizumab, drozitumab, parsatuzumab, depatuxizumab mafodotin, modotuximab, carotuximab, adecatumumab, adecatumumab, oportuzumab monatox, solitomab, tucotuzumab celmoleukin, edrecolomab, catumaxomab, ifabotuzumab, fibatuzumab, zalutumumab, panitumumab, cetuximab, futuximab, imgatuzumab, laprituximab emtansine, matuzumab, necitumumab, nimotuzumab, tomuzotuximab, amivantamab, amivantamab, epitumomab cituxetan, sontuzumab, duligotuzumab, elgemtumab, lumretuzumab, patritumab, seribantumab, zenocutuzumab, sibrotuzumab, burosumab, aprutumab ixadotin, radretumab, pasotuxizumab, farletuzumab, mirvetuximab soravtansine, vantictumab, TRBS07, 3F8, dinutuximab, dinutuximab beta, ecromeximab, mitumomab, andecaliximab, capromab, codrituzumab, glembatumumab vedotin, talquetamab, talquetamab, trevogrumab, indusatumab vedotin, ficlatuzumab, rilotumumab, zatuximab, pentuzimab, pentuzimab, margetuximab, timigutuzumab, trastuzumab, trastuzumab duocarmazine, trastuzumab emtansine, gancotamab, pertuzumab, ertumaxomab, emibetuzumab, telisotuzumab, telisotuzumab vedotin, derlotuximab biotin, apolizumab, onartuzumab, bersanlimab, enlimomabpegol, rontalizumab, sifalimumab, talizumab, ganitumab, istiratumab, robatumumab, teprotumumab, figitumumab, ganitumab, istiratumab, robatumumab, teprotumumab, cixutumumab, dalotuzumab, xentuzumab, dusigitumab, canakinumab, ustekinumab, ustekinumab, ustekinumab, briakinumab, briakinumab, abrezekimab, lebrikizumab, romilkimab, TNX-650, tralokinumab, anrukinzumab, brodalumab, ixekizumab, netakimab, perakizumab, secukinumab, vunakizumab, afascvikumab, afascvikumab, bimekizumab, bimekizumab, remtolumab, bermekimab, lutikizumab, lutikizumab, gevokizumab, cergutuzumab amunaleukin, fletikumab, fezakinumab, brazikumab, guselkumab, mirikizumab, tildrakizumab, risankizumab, flotetuzumab, nemolizumab, pascolizumab, dupilumab, mepolizumab, reslizumab, clazakizumab, elsilimomab, olokizumab, sarilumab, siltuximab, sirukumab, vobarilizumab, tocilizumab, SA237, satralizumab, enokizumab, prezalizumab, natalizumab, abrilumab, abrilumab, vedolizumab, volociximab, tadocizumab, etaracizumab, etrolizumab, spesolimab, vatelizumab, erlizumab, lirilumab, relatlimab, cBR96-doxorubicinimmunoconjugate, odulimomab, efalizumab, ladiratuzumab vedotin, simtuzumab, samrotamab vedotin, aselizumab, lupartumab amadotin, imalumab, carlumab, imaprelimab, amatuximab, amatuximab, anetumab ravtansine, narnatumab, clivatuzumab tetraxetan, pemtumomab, gatipotuzumab, ensituximab, lemalesomab, sulesomab, enfortumab vedotin, racotumomab, monalizumab, brontictuzumab, tarextumab, vesencumab, oxelumab, gilvetmab, tislelizumab, dostarlimab, BCD-100, nivolumab, PDR001, pembrolizumab, pidilizumab, retifanlimab, spartalizumab, sintilimab, cemiplimab, olaratumab, tovetumab, rinucumab, atezolizumab, avelumab, durvalumab, lifastuzumab vedotin, bavituximab, acapatamab, capromab, rosopatamab, nezastomig, pasotuxizumab, pelgifatamab, voxalatamab, cofetuzumab pelidotin, denosumab, rosmantuzumab, cirmtuzumab, atinumab, indatuximab ravtansine, elotuzumab, sirtratumab vedotin, sonepcizumab, vandortuzumab vedotin, minretumomab, satumomab pendetide, maslimomab, ontuxizumab, tenatumomab, fresolimumab, metelimumab, lerdelimumab, tezepelumab, etigilimab, tiragotumab, placulumab, prezalumab, infliximab, nerelimomab, ozoralizumab, adalimumab, afelimomab, certolizumab pegol, golimumab, mapatumumab, conatumumab, lexatumumab, tigatuzumab, sacituzumab govitecan, votumumab, pogalizumab, letolizumab, pankomab, anatumomab mafenatox, enavatuzumab, flanvotumab, brolucizumab, ranibizumab, varisacumab, bevacizumab, faricimab, icrucumab, alacizumab pegol, ramucirumab, pritumumab, and onvatilimab;
[6979] VL3 comprises a VL of an antibody selected from the group consisting of losatuxizumab vedotin, utomilumab, urelumab, oleclumab, naptumomab estafenatox, ascrinvacumab, pintumomab, tacatuzumab tetraxetan, nesvacumab, vanucizumab, timolumab, vapaliximab, vepalimomab, enapotamab vedotin, ianalumab, belimumab, tabalumab, tibulizumab, belantamab mafodotin, teclistamab, teclistamab, detumomab, nacolomab tafenatox, eculizumab, lendalizumab, pexelizumab, pozelimab, ravulizumab, tesidolumab, vilobelimab, abagovomab, igovomab, oregovomab, sofituzumab vedotin, cantuzumab mertansine, cantuzuma bravtansine, girentuximab, altumomab pentetate, arcitumomab, besilesomab, bertilimumab, plozalizumab, mogamulizumab, leronlimab, PRO140, rovelizumab, rovelizumab, talacotuzumab, benralizumab, tavolimab, vonlerolizumab, gavilimomab, ziralimumab, fanolesomab, ipilimumab, ruplizumab, toralizumab, dapirolizumab pegol, toralizumab, dapirolizumab pegol, ruplizumab, blinatumomab, inebilizumab, loncastuximab tesirine, SGN-CD19A, tafasitamab, taplitumomab paptox, XMAB-5574, Budoprutug, Obexelimab, duvortuxizumab, englumafusp alfa, Emfizatamab, zeripatamig, siplizumab, blontuvetmab, FBTA05, ibritumomab tiuxetan, obinutuzumab, ocaratuzumab, ocrelizumab, ofatumumab, rituximab, tositumomab, ublituximab, veltuzumab, divozilimab, eramkafusp alfa, ripertamab, zuberitamab, glofitamab, nofetumomab merpentan, samalizumab, imvotamab, odronextamab, plamotamab, bectumomab, inotuzumab ozogamicin, moxetumomab pasudotox, pinatuzumab vedotin, gomiliximab, lumiliximab, inolimomab, inolimomab, daclizumab, camidanluma btesirine, basiliximab, varlilumab, omburtamab, enoblituzumab, vopratelimab, lulizumabpegol, TGN1412, muromonab-CD3, otelixizumab, teplizumab, visilizumab, epcoritamab, epcoritamab, brentuximab vedotin, iratumumab, azintuxizumab vedotin, gemtuzumab ozogamicin, lintuzumab, vadastuximab talirine, naratuximab emtansine, otlertuzumab, lilotomab satetraxetan, tetulomab, daratumumab, isatuximab, foralumab, mosunetuzumab, mosunetuzumab, cedelizumab, ibalizumab, keliximab, priliximab, tregalizumab, zanolimumab, bleselumab, iscalimab, lucatumumab, ravagalimab, selicrelumab, teneliximab, vanalimab, abciximab, bivatuzumab, iomab-B, telimomab aritox, zolimomab aritox, abituzumab, intetumumab, alemtuzumab, tamtuvetmab, lorvotuzumab mertansine, itolizumab, cusatuzumab, vorsetuzumab mafodotin, milatuzumab, iladatuzumab vedotin, polatuzumab vedotin, galiximab, cibisatamab, zolbetuximab, naxitamab, tisotumab vedotin, olendalizumab, pamrevlumab, lacnotuzumab, cabiralizumab, emactuzumab, axatilimab, gimsilumab, lenzilumab, namilumab, tremelimumab, ulocuplumab, tepoditamab, rovalpituzumab tesirine, tarlatamab, demcizumab, navicixizumab, drozitumab, parsatuzumab, depatuxizumab mafodotin, modotuximab, carotuximab, adecatumumab, adecatumumab, oportuzumab monatox, solitomab, tucotuzumab celmoleukin, edrecolomab, catumaxomab, ifabotuzumab, fibatuzumab, zalutumumab, panitumumab, cetuximab, futuximab, imgatuzumab, laprituximab emtansine, matuzumab, necitumumab, nimotuzumab, tomuzotuximab, amivantamab, amivantamab, epitumomab cituxetan, sontuzumab, duligotuzumab, elgemtumab, lumretuzumab, patritumab, seribantumab, zenocutuzumab, sibrotuzumab, burosumab, aprutumab ixadotin, radretumab, pasotuxizumab, farletuzumab, mirvetuximab soravtansine, vantictumab, TRBS07, 3F8, dinutuximab, dinutuximab beta, ecromeximab, mitumomab, andecaliximab, capromab, codrituzumab, glembatumumab vedotin, talquetamab, talquetamab, trevogrumab, indusatumab vedotin, ficlatuzumab, rilotumumab, zatuximab, pentuzimab, pentuzimab, margetuximab, timigutuzumab, trastuzumab, trastuzumab duocarmazine, trastuzumab emtansine, gancotamab, pertuzumab, ertumaxomab, emibetuzumab, telisotuzumab, telisotuzumab vedotin, derlotuximab biotin, apolizumab, onartuzumab, bersanlimab, enlimomabpegol, rontalizumab, sifalimumab, talizumab, ganitumab, istiratumab, robatumumab, teprotumumab, figitumumab, ganitumab, istiratumab, robatumumab, teprotumumab, cixutumumab, dalotuzumab, xentuzumab, dusigitumab, canakinumab, ustekinumab, ustekinumab, ustekinumab, briakinumab, briakinumab, abrezekimab, lebrikizumab, romilkimab, TNX-650, tralokinumab, anrukinzumab, brodalumab, ixekizumab, netakimab, perakizumab, secukinumab, vunakizumab, afasevikumab, afascvikumab, bimekizumab, bimekizumab, remtolumab, bermekimab, lutikizumab, lutikizumab, gevokizumab, cergutuzumab amunaleukin, fletikumab, fezakinumab, brazikumab, guselkumab, mirikizumab, tildrakizumab, risankizumab, flotetuzumab, nemolizumab, pascolizumab, dupilumab, mepolizumab, reslizumab, clazakizumab, elsilimomab, olokizumab, sarilumab, siltuximab, sirukumab, vobarilizumab, tocilizumab, SA237, satralizumab, enokizumab, prezalizumab, natalizumab, abrilumab, abrilumab, vedolizumab, volociximab, tadocizumab, etaracizumab, etrolizumab, spesolimab, vatelizumab, erlizumab, lirilumab, relatlimab, cBR96-doxorubicinimmunoconjugate, odulimomab, efalizumab, ladiratuzumab vedotin, simtuzumab, samrotamab vedotin, aselizumab, lupartumab amadotin, imalumab, carlumab, imaprelimab, amatuximab, amatuximab, anetumab ravtansine, narnatumab, clivatuzumab tetraxetan, pemtumomab, gatipotuzumab, ensituximab, lemalesomab, sulesomab, enfortumab vedotin, racotumomab, monalizumab, brontictuzumab, tarextumab, vesencumab, oxelumab, gilvetmab, tislelizumab, dostarlimab, BCD-100, nivolumab, PDR001, pembrolizumab, pidilizumab, retifanlimab, spartalizumab, sintilimab, cemiplimab, olaratumab, tovetumab, rinucumab, atezolizumab, avelumab, durvalumab, lifastuzumab vedotin, bavituximab, acapatamab, capromab, rosopatamab, nezastomig, pasotuxizumab, pelgifatamab, voxalatamab, cofetuzumab pelidotin, denosumab, rosmantuzumab, cirmtuzumab, atinumab, indatuximab ravtansine, elotuzumab, sirtratumab vedotin, sonepcizumab, vandortuzumab vedotin, minretumomab, satumomab pendetide, maslimomab, ontuxizumab, tenatumomab, fresolimumab, metelimumab, lerdelimumab, tezepelumab, etigilimab, tiragotumab, placulumab, prezalumab, infliximab, nerelimomab, ozoralizumab, adalimumab, afelimomab, certolizumab pegol, golimumab, mapatumumab, conatumumab, lexatumumab, tigatuzumab, sacituzumab govitecan, votumumab, pogalizumab, letolizumab, pankomab, anatumomab mafenatox, enavatuzumab, flanvotumab, brolucizumab, ranibizumab, varisacumab, bevacizumab, faricimab, icrucumab, alacizumab pegol, ramucirumab, pritumumab, and onvatilimab;
[6980] VL4 comprises a VL of an antibody selected from the group consisting of losatuxizumab vedotin, utomilumab, urelumab, oleclumab, naptumomab estafenatox, ascrinvacumab, pintumomab, tacatuzumab tetraxetan, nesvacumab, vanucizumab, timolumab, vapaliximab, vepalimomab, enapotamab vedotin, ianalumab, belimumab, tabalumab, tibulizumab, belantamab mafodotin, teclistamab, teclistamab, detumomab, nacolomab tafenatox, eculizumab, lendalizumab, pexelizumab, pozelimab, ravulizumab, tesidolumab, vilobelimab, abagovomab, igovomab, oregovomab, sofituzumab vedotin, cantuzumab mertansine, cantuzuma bravtansine, girentuximab, altumomab pentetate, arcitumomab, besilesomab, bertilimumab, plozalizumab, mogamulizumab, leronlimab, PRO140, rovelizumab, rovelizumab, talacotuzumab, benralizumab, tavolimab, vonlerolizumab, gavilimomab, ziralimumab, fanolesomab, ipilimumab, ruplizumab, toralizumab, dapirolizumab pegol, toralizumab, dapirolizumab pegol, ruplizumab, blinatumomab, inebilizumab, loncastuximab tesirine, SGN-CD19A, tafasitamab, taplitumomab paptox, XMAB-5574, Budoprutug, Obexelimab, duvortuxizumab, englumafusp alfa, Emfizatamab, zeripatamig, siplizumab, blontuvetmab, FBTA05, ibritumomab tiuxetan, obinutuzumab, ocaratuzumab, ocrelizumab, ofatumumab, rituximab, tositumomab, ublituximab, veltuzumab, divozilimab, eramkafusp alfa, ripertamab, zuberitamab, glofitamab, nofetumomab merpentan, samalizumab, imvotamab, odronextamab, plamotamab, bectumomab, inotuzumab ozogamicin, moxetumomab pasudotox, pinatuzumab vedotin, gomiliximab, lumiliximab, inolimomab, inolimomab, daclizumab, camidanluma btesirine, basiliximab, varlilumab, omburtamab, enoblituzumab, vopratelimab, lulizumabpegol, TGN1412, muromonab-CD3, otelixizumab, teplizumab, visilizumab, epcoritamab, epcoritamab, brentuximab vedotin, iratumumab, azintuxizumab vedotin, gemtuzumab ozogamicin, lintuzumab, vadastuximab talirine, naratuximab emtansine, otlertuzumab, lilotomab satetraxetan, tetulomab, daratumumab, isatuximab, foralumab, mosunetuzumab, mosunetuzumab, cedelizumab, ibalizumab, keliximab, priliximab, tregalizumab, zanolimumab, bleselumab, iscalimab, lucatumumab, ravagalimab, selicrelumab, teneliximab, vanalimab, abciximab, bivatuzumab, iomab-B, telimomab aritox, zolimomab aritox, abituzumab, intetumumab, alemtuzumab, tamtuvetmab, lorvotuzumab mertansine, itolizumab, cusatuzumab, vorsetuzumab mafodotin, milatuzumab, iladatuzumab vedotin, polatuzumab vedotin, galiximab, cibisatamab, zolbetuximab, naxitamab, tisotumab vedotin, olendalizumab, pamrevlumab, lacnotuzumab, cabiralizumab, emactuzumab, axatilimab, gimsilumab, lenzilumab, namilumab, tremelimumab, ulocuplumab, tepoditamab, rovalpituzumab tesirine, tarlatamab, demcizumab, navicixizumab, drozitumab, parsatuzumab, depatuxizumab mafodotin, modotuximab, carotuximab, adecatumumab, adecatumumab, oportuzumab monatox, solitomab, tucotuzumab celmoleukin, edrecolomab, catumaxomab, ifabotuzumab, fibatuzumab, zalutumumab, panitumumab, cetuximab, futuximab, imgatuzumab, laprituximab emtansine, matuzumab, necitumumab, nimotuzumab, tomuzotuximab, amivantamab, amivantamab, epitumomab cituxetan, sontuzumab, duligotuzumab, elgemtumab, lumretuzumab, patritumab, seribantumab, zenocutuzumab, sibrotuzumab, burosumab, aprutumab ixadotin, radretumab, pasotuxizumab, farletuzumab, mirvetuximab soravtansine, vantictumab, TRBS07, 3F8, dinutuximab, dinutuximab beta, ecromeximab, mitumomab, andecaliximab, capromab, codrituzumab, glembatumumab vedotin, talquetamab, talquetamab, trevogrumab, indusatumab vedotin, ficlatuzumab, rilotumumab, zatuximab, pentuzimab, pentuzimab, margetuximab, timigutuzumab, trastuzumab, trastuzumab duocarmazine, trastuzumab emtansine, gancotamab, pertuzumab, ertumaxomab, emibetuzumab, telisotuzumab, telisotuzumab vedotin, derlotuximab biotin, apolizumab, onartuzumab, bersanlimab, enlimomabpegol, rontalizumab, sifalimumab, talizumab, ganitumab, istiratumab, robatumumab, teprotumumab, figitumumab, ganitumab, istiratumab, robatumumab, teprotumumab, cixutumumab, dalotuzumab, xentuzumab, dusigitumab, canakinumab, ustekinumab, ustekinumab, ustekinumab, briakinumab, briakinumab, abrezekimab, lebrikizumab, romilkimab, TNX-650, tralokinumab, anrukinzumab, brodalumab, ixekizumab, netakimab, perakizumab, secukinumab, vunakizumab, afasevikumab, afascvikumab, bimekizumab, bimekizumab, remtolumab, bermekimab, lutikizumab, lutikizumab, gevokizumab, cergutuzumab amunaleukin, fletikumab, fezakinumab, brazikumab, guselkumab, mirikizumab, tildrakizumab, risankizumab, flotetuzumab, nemolizumab, pascolizumab, dupilumab, mepolizumab, reslizumab, clazakizumab, elsilimomab, olokizumab, sarilumab, siltuximab, sirukumab, vobarilizumab, tocilizumab, SA237, satralizumab, enokizumab, prezalizumab, natalizumab, abrilumab, abrilumab, vedolizumab, volociximab, tadocizumab, etaracizumab, etrolizumab, spesolimab, vatelizumab, erlizumab, lirilumab, relatlimab, cBR96-doxorubicinimmunoconjugate, odulimomab, efalizumab, ladiratuzumab vedotin, simtuzumab, samrotamab vedotin, aselizumab, lupartumab amadotin, imalumab, carlumab, imaprelimab, amatuximab, amatuximab, anetumab ravtansine, narnatumab, clivatuzumab tetraxetan, pemtumomab, gatipotuzumab, ensituximab, lemalesomab, sulesomab, enfortumab vedotin, racotumomab, monalizumab, brontictuzumab, tarextumab, vesencumab, oxelumab, gilvetmab, tislelizumab, dostarlimab, BCD-100, nivolumab, PDR001, pembrolizumab, pidilizumab, retifanlimab, spartalizumab, sintilimab, cemiplimab, olaratumab, tovetumab, rinucumab, atezolizumab, avelumab, durvalumab, lifastuzumab vedotin, bavituximab, acapatamab, capromab, rosopatamab, nezastomig, pasotuxizumab, pelgifatamab, voxalatamab, cofetuzumab pelidotin, denosumab, rosmantuzumab, cirmtuzumab, atinumab, indatuximab ravtansine, elotuzumab, sirtratumab vedotin, sonepcizumab, vandortuzumab vedotin, minretumomab, satumomab pendetide, maslimomab, ontuxizumab, tenatumomab, fresolimumab, metelimumab, lerdelimumab, tezepelumab, etigilimab, tiragotumab, placulumab, prezalumab, infliximab, nerelimomab, ozoralizumab, adalimumab, afelimomab, certolizumab pegol, golimumab, mapatumumab, conatumumab, lexatumumab, tigatuzumab, sacituzumab govitecan, votumumab, pogalizumab, letolizumab, pankomab, anatumomab mafenatox, enavatuzumab, flanvotumab, brolucizumab, ranibizumab, varisacumab, bevacizumab, faricimab, icrucumab, alacizumab pegol, ramucirumab, pritumumab, and onvatilimab;
[6981] VH1 comprises a VH of an antibody selected from the group consisting of losatuxizumab vedotin, utomilumab, urelumab, oleclumab, naptumomab estafenatox, ascrinvacumab, pintumomab, tacatuzumab tetraxetan, nesvacumab, vanucizumab, timolumab, vapaliximab, vepalimomab, enapotamab vedotin, ianalumab, belimumab, tabalumab, tibulizumab, belantamab mafodotin, teclistamab, teclistamab, detumomab, nacolomab tafenatox, eculizumab, lendalizumab, pexelizumab, pozelimab, ravulizumab, tesidolumab, vilobelimab, abagovomab, igovomab, oregovomab, sofituzumab vedotin, cantuzumab mertansine, cantuzuma bravtansine, girentuximab, altumomab pentetate, arcitumomab, besilesomab, bertilimumab, plozalizumab, mogamulizumab, leronlimab, PRO140, rovelizumab, rovelizumab, talacotuzumab, benralizumab, tavolimab, vonlerolizumab, gavilimomab, ziralimumab, fanolesomab, ipilimumab, ruplizumab, toralizumab, dapirolizumab pegol, toralizumab, dapirolizumab pegol, ruplizumab, blinatumomab, inebilizumab, loncastuximab tesirine, SGN-CD19A, tafasitamab, taplitumomab paptox, XMAB-5574, Budoprutug, Obexelimab, duvortuxizumab, englumafusp alfa, Emfizatamab, zeripatamig, siplizumab, blontuvetmab, FBTA05, ibritumomab tiuxetan, obinutuzumab, ocaratuzumab, ocrelizumab, ofatumumab, rituximab, tositumomab, ublituximab, veltuzumab, divozilimab, eramkafusp alfa, ripertamab, zuberitamab, glofitamab, nofetumomab merpentan, samalizumab, imvotamab, odronextamab, plamotamab, bectumomab, inotuzumab ozogamicin, moxetumomab pasudotox, pinatuzumab vedotin, gomiliximab, lumiliximab, inolimomab, inolimomab, daclizumab, camidanluma btesirine, basiliximab, varlilumab, omburtamab, enoblituzumab, vopratelimab, lulizumabpegol, TGN1412, muromonab-CD3, otelixizumab, teplizumab, visilizumab, epcoritamab, epcoritamab, brentuximab vedotin, iratumumab, azintuxizumab vedotin, gemtuzumab ozogamicin, lintuzumab, vadastuximab talirine, naratuximab emtansine, otlertuzumab, lilotomab satetraxetan, tetulomab, daratumumab, isatuximab, foralumab, mosunetuzumab, mosunetuzumab, cedelizumab, ibalizumab, keliximab, priliximab, tregalizumab, zanolimumab, bleselumab, iscalimab, lucatumumab, ravagalimab, selicrelumab, teneliximab, vanalimab, abciximab, bivatuzumab, iomab-B, telimomab aritox, zolimomab aritox, abituzumab, intetumumab, alemtuzumab, tamtuvetmab, lorvotuzumab mertansine, itolizumab, cusatuzumab, vorsetuzumab mafodotin, milatuzumab, iladatuzumab vedotin, polatuzumab vedotin, galiximab, cibisatamab, zolbetuximab, naxitamab, tisotumab vedotin, olendalizumab, pamrevlumab, lacnotuzumab, cabiralizumab, emactuzumab, axatilimab, gimsilumab, lenzilumab, namilumab, tremelimumab, ulocuplumab, tepoditamab, rovalpituzumab tesirine, tarlatamab, demcizumab, navicixizumab, drozitumab, parsatuzumab, depatuxizumab mafodotin, modotuximab, carotuximab, adecatumumab, adecatumumab, oportuzumab monatox, solitomab, tucotuzumab celmoleukin, edrecolomab, catumaxomab, ifabotuzumab, fibatuzumab, zalutumumab, panitumumab, cetuximab, futuximab, imgatuzumab, laprituximab emtansine, matuzumab, necitumumab, nimotuzumab, tomuzotuximab, amivantamab, amivantamab, epitumomab cituxetan, sontuzumab, duligotuzumab, elgemtumab, lumretuzumab, patritumab, seribantumab, zenocutuzumab, sibrotuzumab, burosumab, aprutumab ixadotin, radretumab, pasotuxizumab, farletuzumab, mirvetuximab soravtansine, vantictumab, TRBS07, 3F8, dinutuximab, dinutuximab beta, ecromeximab, mitumomab, andecaliximab, capromab, codrituzumab, glembatumumab vedotin, talquetamab, talquetamab, trevogrumab, indusatumab vedotin, ficlatuzumab, rilotumumab, zatuximab, pentuzimab, pentuzimab, margetuximab, timigutuzumab, trastuzumab, trastuzumab duocarmazine, trastuzumab emtansine, gancotamab, pertuzumab, ertumaxomab, emibetuzumab, telisotuzumab, telisotuzumab vedotin, derlotuximab biotin, apolizumab, onartuzumab, bersanlimab, enlimomabpegol, rontalizumab, sifalimumab, talizumab, ganitumab, istiratumab, robatumumab, teprotumumab, figitumumab, ganitumab, istiratumab, robatumumab, teprotumumab, cixutumumab, dalotuzumab, xentuzumab, dusigitumab, canakinumab, ustekinumab, ustekinumab, ustekinumab, briakinumab, briakinumab, abrezekimab, lebrikizumab, romilkimab, TNX-650, tralokinumab, anrukinzumab, brodalumab, ixekizumab, netakimab, perakizumab, secukinumab, vunakizumab, afasevikumab, afasevikumab, bimekizumab, bimekizumab, remtolumab, bermekimab, lutikizumab, lutikizumab, gevokizumab, cergutuzumab amunaleukin, fletikumab, fezakinumab, brazikumab, guselkumab, mirikizumab, tildrakizumab, risankizumab, flotetuzumab, nemolizumab, pascolizumab, dupilumab, mepolizumab, reslizumab, clazakizumab, elsilimomab, olokizumab, sarilumab, siltuximab, sirukumab, vobarilizumab, tocilizumab, SA237, satralizumab, enokizumab, prezalizumab, natalizumab, abrilumab, abrilumab, vedolizumab, volociximab, tadocizumab, etaracizumab, etrolizumab, spesolimab, vatelizumab, erlizumab, lirilumab, relatlimab, cBR96-doxorubicinimmunoconjugate, odulimomab, efalizumab, ladiratuzumab vedotin, simtuzumab, samrotamab vedotin, aselizumab, lupartumab amadotin, imalumab, carlumab, imaprelimab, amatuximab, amatuximab, anetumab ravtansine, narnatumab, clivatuzumab tetraxetan, pemtumomab, gatipotuzumab, ensituximab, lemalesomab, sulesomab, enfortumab vedotin, racotumomab, monalizumab, brontictuzumab, tarextumab, vesencumab, oxelumab, gilvetmab, tislelizumab, dostarlimab, BCD-100, nivolumab, PDR001, pembrolizumab, pidilizumab, retifanlimab, spartalizumab, sintilimab, cemiplimab, olaratumab, tovetumab, rinucumab, atezolizumab, avelumab, durvalumab, lifastuzumab vedotin, bavituximab, acapatamab, capromab, rosopatamab, nezastomig, pasotuxizumab, pelgifatamab, voxalatamab, cofetuzumab pelidotin, denosumab, rosmantuzumab, cirmtuzumab, atinumab, indatuximab ravtansine, elotuzumab, sirtratumab vedotin, sonepcizumab, vandortuzumab vedotin, minretumomab, satumomab pendetide, maslimomab, ontuxizumab, tenatumomab, fresolimumab, metelimumab, lerdelimumab, tezepelumab, etigilimab, tiragotumab, placulumab, prezalumab, infliximab, nerelimomab, ozoralizumab, adalimumab, afelimomab, certolizumab pegol, golimumab, mapatumumab, conatumumab, lexatumumab, tigatuzumab, sacituzumab govitecan, votumumab, pogalizumab, letolizumab, pankomab, anatumomab mafenatox, enavatuzumab, flanvotumab, brolucizumab, ranibizumab, varisacumab, bevacizumab, faricimab, icrucumab, alacizumab pegol, ramucirumab, pritumumab, and onvatilimab;
[6982] VH2 comprises a VH of an antibody selected from the group consisting of losatuxizumab vedotin, utomilumab, urelumab, oleclumab, naptumomab estafenatox, ascrinvacumab, pintumomab, tacatuzumab tetraxetan, nesvacumab, vanucizumab, timolumab, vapaliximab, vepalimomab, enapotamab vedotin, ianalumab, belimumab, tabalumab, tibulizumab, belantamab mafodotin, teclistamab, teclistamab, detumomab, nacolomab tafenatox, eculizumab, lendalizumab, pexelizumab, pozelimab, ravulizumab, tesidolumab, vilobelimab, abagovomab, igovomab, oregovomab, sofituzumab vedotin, cantuzumab mertansine, cantuzuma bravtansine, girentuximab, altumomab pentetate, arcitumomab, besilesomab, bertilimumab, plozalizumab, mogamulizumab, leronlimab, PRO140, rovelizumab, rovelizumab, talacotuzumab, benralizumab, tavolimab, vonlerolizumab, gavilimomab, ziralimumab, fanolesomab, ipilimumab, ruplizumab, toralizumab, dapirolizumab pegol, toralizumab, dapirolizumab pegol, ruplizumab, blinatumomab, inebilizumab, loncastuximab tesirine, SGN-CD19A, tafasitamab, taplitumomab paptox, XMAB-5574, Budoprutug, Obexelimab, duvortuxizumab, englumafusp alfa, Emfizatamab, zeripatamig, siplizumab, blontuvetmab, FBTA05, ibritumomab tiuxetan, obinutuzumab, ocaratuzumab, ocrelizumab, ofatumumab, rituximab, tositumomab, ublituximab, veltuzumab, divozilimab, eramkafusp alfa, ripertamab, zuberitamab, glofitamab, nofetumomab merpentan, samalizumab, imvotamab, odronextamab, plamotamab, bectumomab, inotuzumab ozogamicin, moxetumomab pasudotox, pinatuzumab vedotin, gomiliximab, lumiliximab, inolimomab, inolimomab, daclizumab, camidanluma btesirine, basiliximab, varlilumab, omburtamab, enoblituzumab, vopratelimab, lulizumabpegol, TGN1412, muromonab-CD3, otelixizumab, teplizumab, visilizumab, epcoritamab, epcoritamab, brentuximab vedotin, iratumumab, azintuxizumab vedotin, gemtuzumab ozogamicin, lintuzumab, vadastuximab talirine, naratuximab emtansine, otlertuzumab, lilotomab satetraxetan, tetulomab, daratumumab, isatuximab, foralumab, mosunetuzumab, mosunetuzumab, cedelizumab, ibalizumab, keliximab, priliximab, tregalizumab, zanolimumab, bleselumab, iscalimab, lucatumumab, ravagalimab, selicrelumab, teneliximab, vanalimab, abciximab, bivatuzumab, iomab-B, telimomab aritox, zolimomab aritox, abituzumab, intetumumab, alemtuzumab, tamtuvetmab, lorvotuzumab mertansine, itolizumab, cusatuzumab, vorsetuzumab mafodotin, milatuzumab, iladatuzumab vedotin, polatuzumab vedotin, galiximab, cibisatamab, zolbetuximab, naxitamab, tisotumab vedotin, olendalizumab, pamrevlumab, lacnotuzumab, cabiralizumab, emactuzumab, axatilimab, gimsilumab, lenzilumab, namilumab, tremelimumab, ulocuplumab, tepoditamab, rovalpituzumab tesirine, tarlatamab, demcizumab, navicixizumab, drozitumab, parsatuzumab, depatuxizumab mafodotin, modotuximab, carotuximab, adecatumumab, adecatumumab, oportuzumab monatox, solitomab, tucotuzumab celmoleukin, edrecolomab, catumaxomab, ifabotuzumab, fibatuzumab, zalutumumab, panitumumab, cetuximab, futuximab, imgatuzumab, laprituximab emtansine, matuzumab, necitumumab, nimotuzumab, tomuzotuximab, amivantamab, amivantamab, epitumomab cituxetan, sontuzumab, duligotuzumab, elgemtumab, lumretuzumab, patritumab, seribantumab, zenocutuzumab, sibrotuzumab, burosumab, aprutumab ixadotin, radretumab, pasotuxizumab, farletuzumab, mirvetuximab soravtansine, vantictumab, TRBS07, 3F8, dinutuximab, dinutuximab beta, ecromeximab, mitumomab, andecaliximab, capromab, codrituzumab, glembatumumab vedotin, talquetamab, talquetamab, trevogrumab, indusatumab vedotin, ficlatuzumab, rilotumumab, zatuximab, pentuzimab, pentuzimab, margetuximab, timigutuzumab, trastuzumab, trastuzumab duocarmazine, trastuzumab emtansine, gancotamab, pertuzumab, ertumaxomab, emibetuzumab, telisotuzumab, telisotuzumab vedotin, derlotuximab biotin, apolizumab, onartuzumab, bersanlimab, enlimomabpegol, rontalizumab, sifalimumab, talizumab, ganitumab, istiratumab, robatumumab, teprotumumab, figitumumab, ganitumab, istiratumab, robatumumab, teprotumumab, cixutumumab, dalotuzumab, xentuzumab, dusigitumab, canakinumab, ustekinumab, ustekinumab, ustekinumab, briakinumab, briakinumab, abrezekimab, lebrikizumab, romilkimab, TNX-650, tralokinumab, anrukinzumab, brodalumab, ixekizumab, netakimab, perakizumab, secukinumab, vunakizumab, afasevikumab, afasevikumab, bimekizumab, bimekizumab, remtolumab, bermekimab, lutikizumab, lutikizumab, gevokizumab, cergutuzumab amunaleukin, fletikumab, fezakinumab, brazikumab, guselkumab, mirikizumab, tildrakizumab, risankizumab, flotetuzumab, nemolizumab, pascolizumab, dupilumab, mepolizumab, reslizumab, clazakizumab, elsilimomab, olokizumab, sarilumab, siltuximab, sirukumab, vobarilizumab, tocilizumab, SA237, satralizumab, enokizumab, prezalizumab, natalizumab, abrilumab, abrilumab, vedolizumab, volociximab, tadocizumab, etaracizumab, etrolizumab, spesolimab, vatelizumab, erlizumab, lirilumab, relatlimab, cBR96-doxorubicinimmunoconjugate, odulimomab, efalizumab, ladiratuzumab vedotin, simtuzumab, samrotamab vedotin, aselizumab, lupartumab amadotin, imalumab, carlumab, imaprelimab, amatuximab, amatuximab, anetumab ravtansine, narnatumab, clivatuzumab tetraxetan, pemtumomab, gatipotuzumab, ensituximab, lemalesomab, sulesomab, enfortumab vedotin, racotumomab, monalizumab, brontictuzumab, tarextumab, vesencumab, oxelumab, gilvetmab, tislelizumab, dostarlimab, BCD-100, nivolumab, PDR001, pembrolizumab, pidilizumab, retifanlimab, spartalizumab, sintilimab, cemiplimab, olaratumab, tovetumab, rinucumab, atezolizumab, avelumab, durvalumab, lifastuzumab vedotin, bavituximab, acapatamab, capromab, rosopatamab, nezastomig, pasotuxizumab, pelgifatamab, voxalatamab, cofetuzumab pelidotin, denosumab, rosmantuzumab, cirmtuzumab, atinumab, indatuximab ravtansine, elotuzumab, sirtratumab vedotin, sonepcizumab, vandortuzumab vedotin, minretumomab, satumomab pendetide, maslimomab, ontuxizumab, tenatumomab, fresolimumab, metelimumab, lerdelimumab, tezepelumab, etigilimab, tiragotumab, placulumab, prezalumab, infliximab, nerelimomab, ozoralizumab, adalimumab, afelimomab, certolizumab pegol, golimumab, mapatumumab, conatumumab, lexatumumab, tigatuzumab, sacituzumab govitecan, votumumab, pogalizumab, letolizumab, pankomab, anatumomab mafenatox, enavatuzumab, flanvotumab, brolucizumab, ranibizumab, varisacumab, bevacizumab, faricimab, icrucumab, alacizumab pegol, ramucirumab, pritumumab, and onvatilimab;
[6983] VH3 comprises a VH of an antibody selected from the group consisting of losatuxizumab vedotin, utomilumab, urelumab, oleclumab, naptumomab estafenatox, ascrinvacumab, pintumomab, tacatuzumab tetraxetan, nesvacumab, vanucizumab, timolumab, vapaliximab, vepalimomab, enapotamab vedotin, ianalumab, belimumab, tabalumab, tibulizumab, belantamab mafodotin, teclistamab, teclistamab, detumomab, nacolomab tafenatox, eculizumab, lendalizumab, pexelizumab, pozelimab, ravulizumab, tesidolumab, vilobelimab, abagovomab, igovomab, oregovomab, sofituzumab vedotin, cantuzumab mertansine, cantuzuma bravtansine, girentuximab, altumomab pentetate, arcitumomab, besilesomab, bertilimumab, plozalizumab, mogamulizumab, leronlimab, PRO140, rovelizumab, rovelizumab, talacotuzumab, benralizumab, tavolimab, vonlerolizumab, gavilimomab, ziralimumab, fanolesomab, ipilimumab, ruplizumab, toralizumab, dapirolizumab pegol, toralizumab, dapirolizumab pegol, ruplizumab, blinatumomab, inebilizumab, loncastuximab tesirine, SGN-CD19A, tafasitamab, taplitumomab paptox, XMAB-5574, Budoprutug, Obexelimab, duvortuxizumab, englumafusp alfa, Emfizatamab, zeripatamig, siplizumab, blontuvetmab, FBTA05, ibritumomab tiuxetan, obinutuzumab, ocaratuzumab, ocrelizumab, ofatumumab, rituximab, tositumomab, ublituximab, veltuzumab, divozilimab, eramkafusp alfa, ripertamab, zuberitamab, glofitamab, nofetumomab merpentan, samalizumab, imvotamab, odronextamab, plamotamab, bectumomab, inotuzumab ozogamicin, moxetumomab pasudotox, pinatuzumab vedotin, gomiliximab, lumiliximab, inolimomab, inolimomab, daclizumab, camidanluma btesirine, basiliximab, varlilumab, omburtamab, enoblituzumab, vopratelimab, lulizumabpegol, TGN1412, muromonab-CD3, otelixizumab, teplizumab, visilizumab, epcoritamab, epcoritamab, brentuximab vedotin, iratumumab, azintuxizumab vedotin, gemtuzumab ozogamicin, lintuzumab, vadastuximab talirine, naratuximab emtansine, otlertuzumab, lilotomab satetraxetan, tetulomab, daratumumab, isatuximab, foralumab, mosunetuzumab, mosunetuzumab, cedelizumab, ibalizumab, keliximab, priliximab, tregalizumab, zanolimumab, bleselumab, iscalimab, lucatumumab, ravagalimab, selicrelumab, teneliximab, vanalimab, abciximab, bivatuzumab, iomab-B, telimomab aritox, zolimomab aritox, abituzumab, intetumumab, alemtuzumab, tamtuvetmab, lorvotuzumab mertansine, itolizumab, cusatuzumab, vorsetuzumab mafodotin, milatuzumab, iladatuzumab vedotin, polatuzumab vedotin, galiximab, cibisatamab, zolbetuximab, naxitamab, tisotumab vedotin, olendalizumab, pamrevlumab, lacnotuzumab, cabiralizumab, emactuzumab, axatilimab, gimsilumab, lenzilumab, namilumab, tremelimumab, ulocuplumab, tepoditamab, rovalpituzumab tesirine, tarlatamab, demcizumab, navicixizumab, drozitumab, parsatuzumab, depatuxizumab mafodotin, modotuximab, carotuximab, adecatumumab, adecatumumab, oportuzumab monatox, solitomab, tucotuzumab celmoleukin, edrecolomab, catumaxomab, ifabotuzumab, fibatuzumab, zalutumumab, panitumumab, cetuximab, futuximab, imgatuzumab, laprituximab emtansine, matuzumab, necitumumab, nimotuzumab, tomuzotuximab, amivantamab, amivantamab, epitumomab cituxetan, sontuzumab, duligotuzumab, elgemtumab, lumretuzumab, patritumab, seribantumab, zenocutuzumab, sibrotuzumab, burosumab, aprutumab ixadotin, radretumab, pasotuxizumab, farletuzumab, mirvetuximab soravtansine, vantictumab, TRBS07, 3F8, dinutuximab, dinutuximab beta, ecromeximab, mitumomab, andecaliximab, capromab, codrituzumab, glembatumumab vedotin, talquetamab, talquetamab, trevogrumab, indusatumab vedotin, ficlatuzumab, rilotumumab, zatuximab, pentuzimab, pentuzimab, margetuximab, timigutuzumab, trastuzumab, trastuzumab duocarmazine, trastuzumab emtansine, gancotamab, pertuzumab, ertumaxomab, emibetuzumab, telisotuzumab, telisotuzumab vedotin, derlotuximab biotin, apolizumab, onartuzumab, bersanlimab, enlimomabpegol, rontalizumab, sifalimumab, talizumab, ganitumab, istiratumab, robatumumab, teprotumumab, figitumumab, ganitumab, istiratumab, robatumumab, teprotumumab, cixutumumab, dalotuzumab, xentuzumab, dusigitumab, canakinumab, ustekinumab, ustekinumab, ustekinumab, briakinumab, briakinumab, abrezekimab, lebrikizumab, romilkimab, TNX-650, tralokinumab, anrukinzumab, brodalumab, ixekizumab, netakimab, perakizumab, secukinumab, vunakizumab, afasevikumab, afasevikumab, bimekizumab, bimekizumab, remtolumab, bermekimab, lutikizumab, lutikizumab, gevokizumab, cergutuzumab amunaleukin, fletikumab, fezakinumab, brazikumab, guselkumab, mirikizumab, tildrakizumab, risankizumab, flotetuzumab, nemolizumab, pascolizumab, dupilumab, mepolizumab, reslizumab, clazakizumab, elsilimomab, olokizumab, sarilumab, siltuximab, sirukumab, vobarilizumab, tocilizumab, SA237, satralizumab, enokizumab, prezalizumab, natalizumab, abrilumab, abrilumab, vedolizumab, volociximab, tadocizumab, etaracizumab, etrolizumab, spesolimab, vatelizumab, erlizumab, lirilumab, relatlimab, cBR96-doxorubicinimmunoconjugate, odulimomab, efalizumab, ladiratuzumab vedotin, simtuzumab, samrotamab vedotin, aselizumab, lupartumab amadotin, imalumab, carlumab, imaprelimab, amatuximab, amatuximab, anetumab ravtansine, narnatumab, clivatuzumab tetraxetan, pemtumomab, gatipotuzumab, ensituximab, lemalesomab, sulesomab, enfortumab vedotin, racotumomab, monalizumab, brontictuzumab, tarextumab, vesencumab, oxelumab, gilvetmab, tislelizumab, dostarlimab, BCD-100, nivolumab, PDR001, pembrolizumab, pidilizumab, retifanlimab, spartalizumab, sintilimab, cemiplimab, olaratumab, tovetumab, rinucumab, atezolizumab, avelumab, durvalumab, lifastuzumab vedotin, bavituximab, acapatamab, capromab, rosopatamab, nezastomig, pasotuxizumab, pelgifatamab, voxalatamab, cofetuzumab pelidotin, denosumab, rosmantuzumab, cirmtuzumab, atinumab, indatuximab ravtansine, elotuzumab, sirtratumab vedotin, sonepcizumab, vandortuzumab vedotin, minretumomab, satumomab pendetide, maslimomab, ontuxizumab, tenatumomab, fresolimumab, metelimumab, lerdelimumab, tezepelumab, etigilimab, tiragotumab, placulumab, prezalumab, infliximab, nerelimomab, ozoralizumab, adalimumab, afelimomab, certolizumab pegol, golimumab, mapatumumab, conatumumab, lexatumumab, tigatuzumab, sacituzumab govitecan, votumumab, pogalizumab, letolizumab, pankomab, anatumomab mafenatox, enavatuzumab, flanvotumab, brolucizumab, ranibizumab, varisacumab, bevacizumab, faricimab, icrucumab, alacizumab pegol, ramucirumab, pritumumab, and onvatilimab; and/or
[6984] VH4 comprises a VH of an antibody selected from the group consisting of losatuxizumab vedotin, utomilumab, urelumab, oleclumab, naptumomab estafenatox, ascrinvacumab, pintumomab, tacatuzumab tetraxetan, nesvacumab, vanucizumab, timolumab, vapaliximab, vepalimomab, enapotamab vedotin, ianalumab, belimumab, tabalumab, tibulizumab, belantamab mafodotin, teclistamab, teclistamab, detumomab, nacolomab tafenatox, eculizumab, lendalizumab, pexelizumab, pozelimab, ravulizumab, tesidolumab, vilobelimab, abagovomab, igovomab, oregovomab, sofituzumab vedotin, cantuzumab mertansine, cantuzuma bravtansine, girentuximab, altumomab pentetate, arcitumomab, besilesomab, bertilimumab, plozalizumab, mogamulizumab, leronlimab, PRO140, rovelizumab, rovelizumab, talacotuzumab, benralizumab, tavolimab, vonlerolizumab, gavilimomab, ziralimumab, fanolesomab, ipilimumab, ruplizumab, toralizumab, dapirolizumab pegol, toralizumab, dapirolizumab pegol, ruplizumab, blinatumomab, inebilizumab, loncastuximab tesirine, SGN-CD19A, tafasitamab, taplitumomab paptox, XMAB-5574, Budoprutug, Obexelimab, duvortuxizumab, englumafusp alfa, Emfizatamab, zeripatamig, siplizumab, blontuvetmab, FBTA05, ibritumomab tiuxetan, obinutuzumab, ocaratuzumab, ocrelizumab, ofatumumab, rituximab, tositumomab, ublituximab, veltuzumab, divozilimab, eramkafusp alfa, ripertamab, zuberitamab, glofitamab, nofetumomab merpentan, samalizumab, imvotamab, odronextamab, plamotamab, bectumomab, inotuzumab ozogamicin, moxetumomab pasudotox, pinatuzumab vedotin, gomiliximab, lumiliximab, inolimomab, inolimomab, daclizumab, camidanluma btesirine, basiliximab, varlilumab, omburtamab, enoblituzumab, vopratelimab, lulizumabpegol, TGN1412, muromonab-CD3, otelixizumab, teplizumab, visilizumab, epcoritamab, epcoritamab, brentuximab vedotin, iratumumab, azintuxizumab vedotin, gemtuzumab ozogamicin, lintuzumab, vadastuximab talirine, naratuximab emtansine, otlertuzumab, lilotomab satetraxetan, tetulomab, daratumumab, isatuximab, foralumab, mosunetuzumab, mosunetuzumab, cedelizumab, ibalizumab, keliximab, priliximab, tregalizumab, zanolimumab, bleselumab, iscalimab, lucatumumab, ravagalimab, selicrelumab, teneliximab, vanalimab, abciximab, bivatuzumab, iomab-B, telimomab aritox, zolimomab aritox, abituzumab, intetumumab, alemtuzumab, tamtuvetmab, lorvotuzumab mertansine, itolizumab, cusatuzumab, vorsetuzumab mafodotin, milatuzumab, iladatuzumab vedotin, polatuzumab vedotin, galiximab, cibisatamab, zolbetuximab, naxitamab, tisotumab vedotin, olendalizumab, pamrevlumab, lacnotuzumab, cabiralizumab, emactuzumab, axatilimab, gimsilumab, lenzilumab, namilumab, tremelimumab, ulocuplumab, tepoditamab, rovalpituzumab tesirine, tarlatamab, demcizumab, navicixizumab, drozitumab, parsatuzumab, depatuxizumab mafodotin, modotuximab, carotuximab, adecatumumab, adecatumumab, oportuzumab monatox, solitomab, tucotuzumab celmoleukin, edrecolomab, catumaxomab, ifabotuzumab, fibatuzumab, zalutumumab, panitumumab, cetuximab, futuximab, imgatuzumab, laprituximab emtansine, matuzumab, necitumumab, nimotuzumab, tomuzotuximab, amivantamab, amivantamab, epitumomab cituxetan, sontuzumab, duligotuzumab, elgemtumab, lumretuzumab, patritumab, seribantumab, zenocutuzumab, sibrotuzumab, burosumab, aprutumab ixadotin, radretumab, pasotuxizumab, farletuzumab, mirvetuximab soravtansine, vantictumab, TRBS07, 3F8, dinutuximab, dinutuximab beta, ecromeximab, mitumomab, andecaliximab, capromab, codrituzumab, glembatumumab vedotin, talquetamab, talquetamab, trevogrumab, indusatumab vedotin, ficlatuzumab, rilotumumab, zatuximab, pentuzimab, pentuzimab, margetuximab, timigutuzumab, trastuzumab, trastuzumab duocarmazine, trastuzumab emtansine, gancotamab, pertuzumab, ertumaxomab, emibetuzumab, telisotuzumab, telisotuzumab vedotin, derlotuximab biotin, apolizumab, onartuzumab, bersanlimab, enlimomabpegol, rontalizumab, sifalimumab, talizumab, ganitumab, istiratumab, robatumumab, teprotumumab, figitumumab, ganitumab, istiratumab, robatumumab, teprotumumab, cixutumumab, dalotuzumab, xentuzumab, dusigitumab, canakinumab, ustekinumab, ustekinumab, ustekinumab, briakinumab, briakinumab, abrezekimab, lebrikizumab, romilkimab, TNX-650, tralokinumab, anrukinzumab, brodalumab, ixekizumab, netakimab, perakizumab, secukinumab, vunakizumab, afasevikumab, afasevikumab, bimekizumab, bimekizumab, remtolumab, bermekimab, lutikizumab, lutikizumab, gevokizumab, cergutuzumab amunaleukin, fletikumab, fezakinumab, brazikumab, guselkumab, mirikizumab, tildrakizumab, risankizumab, flotetuzumab, nemolizumab, pascolizumab, dupilumab, mepolizumab, reslizumab, clazakizumab, elsilimomab, olokizumab, sarilumab, siltuximab, sirukumab, vobarilizumab, tocilizumab, SA237, satralizumab, enokizumab, prezalizumab, natalizumab, abrilumab, abrilumab, vedolizumab, volociximab, tadocizumab, etaracizumab, etrolizumab, spesolimab, vatelizumab, erlizumab, lirilumab, relatlimab, cBR96-doxorubicinimmunoconjugate, odulimomab, efalizumab, ladiratuzumab vedotin, simtuzumab, samrotamab vedotin, aselizumab, lupartumab amadotin, imalumab, carlumab, imaprelimab, amatuximab, amatuximab, anetumab ravtansine, narnatumab, clivatuzumab tetraxetan, pemtumomab, gatipotuzumab, ensituximab, lemalesomab, sulesomab, enfortumab vedotin, racotumomab, monalizumab, brontictuzumab, tarextumab, vesencumab, oxelumab, gilvetmab, tislelizumab, dostarlimab, BCD-100, nivolumab, PDR001, pembrolizumab, pidilizumab, retifanlimab, spartalizumab, sintilimab, cemiplimab, olaratumab, tovetumab, rinucumab, atezolizumab, avelumab, durvalumab, lifastuzumab vedotin, bavituximab, acapatamab, capromab, rosopatamab, nezastomig, pasotuxizumab, pelgifatamab, voxalatamab, cofetuzumab pelidotin, denosumab, rosmantuzumab, cirmtuzumab, atinumab, indatuximab ravtansine, elotuzumab, sirtratumab vedotin, sonepcizumab, vandortuzumab vedotin, minretumomab, satumomab pendetide, maslimomab, ontuxizumab, tenatumomab, fresolimumab, metelimumab, lerdelimumab, tezepelumab, etigilimab, tiragotumab, placulumab, prezalumab, infliximab, nerelimomab, ozoralizumab, adalimumab, afelimomab, certolizumab pegol, golimumab, mapatumumab, conatumumab, lexatumumab, tigatuzumab, sacituzumab govitecan, votumumab, pogalizumab, letolizumab, pankomab, anatumomab mafenatox, enavatuzumab, flanvotumab, brolucizumab, ranibizumab, varisacumab, bevacizumab, faricimab, icrucumab, alacizumab pegol, ramucirumab, pritumumab, and onvatilimab; or
[6985] (iii)
[6986] VL1 comprises (i) a complementarity determining region (CDR) 1 having an amino acid sequence that is at least 65%, at least 70%, at least 75%, at least 80%, at least 85%, at least 90%, at least 95%, at least 99%, or 100% identical to any one of SEQ ID NOs: 1096, 1103, 1110, 1120, 1127, 1134, 1141, 1148, 1155, 1162, 1169, 1174, 1181, 1188, 1199, 1211, 1221, 1228, 1235, 1247, 1254, 1261, 1266, 1271, 1278, 1285, 1292, 1299, 1306, 1313, 1319, 1326, 1339, 1352, 1359, 1366, 1373, 1382, 1394, 1401, 1408, 1414, 1421, 1428, 1441, 1448, 1455, 1461, 1468, 1475, 1488, 1495, 1508, 1519, 1526, 1531, 1538, 1544, 1556, 1568, 1574, 1581, 1594, 1601, 1608, 1615, 1622, 1629, 1636, 1643, 1650, 1657, 1672, 1679, 1689, 1697, 1708, 1715, 1718, 1723, 1727, 1738, 1743, 1752, 1761, 1763, 1769, 1776, and 1786; (ii) a CDR2 having an amino acid sequence that is at least 65%, at least 70%, at least 75%, at least 80%, at least 85%, at least 90%, at least 95%, at least 99%, or 100% identical to any one of SEQ ID NOs: 1200, 1212, 1680, 1690, 1698, 1709, 1728, 1739, 1744, 1753, 1770, and 1777; or at least 65%, at least 70%, at least 75%, at least 80%, at least 85%, at least 90%, at least 95%, at least 99%, or 100% identical to any one of amino acid sequences AAS, APS, AT, ATS, DAS, DDG, DDS, DT, DTS, DVS, EAS, FTS, GAF, GAN, GAS, GAT, GIS, GKN, GNS, HTS, KVS, LAS, LGS, LVS, NAK, NTN, QMS, RMS, RTS, SAS, TTS, WAS, YAS, YAT, YGS, YRS, and YTS; and (iii) a CDR3 having an amino acid sequence that is at least 65%, at least 70%, at least 75%, at least 80%, at least 85%, at least 90%, at least 95%, at least 99%, or 100% identical to any one of SEQ ID NOs: 1097, 1104, 1111, 1121, 1128, 1135, 1142, 1149, 1156, 1163, 1170, 1175, 1182, 1189, 1195, 1201, 1207, 1213, 1222, 1229, 1236, 2009, 1248, 1255, 1262, 1267, 1272, 1279, 1286, 1293, 1300, 1307, 1320, 1327, 1333, 1340, 1346, 1353, 1360, 1367, 1374, 1383, 1389, 1395, 1402, 1409, 1415, 1422, 1429, 1435, 1442, 1449, 1456, 1462, 1469, 1476, 1482, 1489, 1496, 1502, 1509, 1513, 1520, 1532, 1539, 1545, 1557, 1562, 1569, 1575, 1582, 1588, 1595, 1602, 1609, 1616, 1623, 1630, 1637, 1644, 1651, 1658, 1663, 1673, 1681, 1691, 1699, 1710, 1729, 1735, 1745, 1751, 1754, 1778, 1787, and 1976;
[6987] VL2 comprises (i) a complementarity determining region (CDR) 1 having an amino acid sequence that is at least 65%, at least 70%, at least 75%, at least 80%, at least 85%, at least 90%, at least 95%, at least 99%, or 100% identical to any one of SEQ ID NOs: 1096, 1103, 1110, 1120, 1127, 1134, 1141, 1148, 1155, 1162, 1169, 1174, 1181, 1188, 1199, 1211, 1221, 1228, 1235, 1247, 1254, 1261, 1266, 1271, 1278, 1285, 1292, 1299, 1306, 1313, 1319, 1326, 1339, 1352, 1359, 1366, 1373, 1382, 1394, 1401, 1408, 1414, 1421, 1428, 1441, 1448, 1455, 1461, 1468, 1475, 1488, 1495, 1508, 1519, 1526, 1531, 1538, 1544, 1556, 1568, 1574, 1581, 1594, 1601, 1608, 1615, 1622, 1629, 1636, 1643, 1650, 1657, 1672, 1679, 1689, 1697, 1708, 1715, 1718, 1723, 1727, 1738, 1743, 1752, 1761, 1763, 1769, 1776, and 1786; (ii) a CDR2 having an amino acid sequence that is at least 65%, at least 70%, at least 75%, at least 80%, at least 85%, at least 90%, at least 95%, at least 99%, or 100% identical to any one of SEQ ID NOs: 1200, 1212, 1680, 1690, 1698, 1709, 1728, 1739, 1744, 1753, 1770, and 1777; or at least 65%, at least 70%, at least 75%, at least 80%, at least 85%, at least 90%, at least 95%, at least 99%, or 100% identical to any one of amino acid sequences AAS, APS, AT, ATS, DAS, DDG, DDS, DT, DTS, DVS, EAS, FTS, GAF, GAN, GAS, GAT, GIS, GKN, GNS, HTS, KVS, LAS, LGS, LVS, NAK, NTN, QMS, RMS, RTS, SAS, TTS, WAS, YAS, YAT, YGS, YRS, and YTS; and (iii) a CDR3 having an amino acid sequence that is at least 65%, at least 70%, at least 75%, at least 80%, at least 85%, at least 90%, at least 95%, at least 99%, or 100% identical to any one of SEQ ID NOs: 1097, 1104, 1111, 1121, 1128, 1135, 1142, 1149, 1156, 1163, 1170, 1175, 1182, 1189, 1195, 1201, 1207, 1213, 1222, 1229, 1236, 2009, 1248, 1255, 1262, 1267, 1272, 1279, 1286, 1293, 1300, 1307, 1320, 1327, 1333, 1340, 1346, 1353, 1360, 1367, 1374, 1383, 1389, 1395, 1402, 1409, 1415, 1422, 1429, 1435, 1442, 1449, 1456, 1462, 1469, 1476, 1482, 1489, 1496, 1502, 1509, 1513, 1520, 1532, 1539, 1545, 1557, 1562, 1569, 1575, 1582, 1588, 1595, 1602, 1609, 1616, 1623, 1630, 1637, 1644, 1651, 1658, 1663, 1673, 1681, 1691, 1699, 1710, 1729, 1735, 1745, 1751, 1754, 1778, 1787, and 1976;
[6988] VL3 comprises (i) a complementarity determining region (CDR) 1 having an amino acid sequence that is at least 65%, at least 70%, at least 75%, at least 80%, at least 85%, at least 90%, at least 95%, at least 99%, or 100% identical to any one of SEQ ID NOs: 1096, 1103, 1110, 1120, 1127, 1134, 1141, 1148, 1155, 1162, 1169, 1174, 1181, 1188, 1199, 1211, 1221, 1228, 1235, 1247, 1254, 1261, 1266, 1271, 1278, 1285, 1292, 1299, 1306, 1313, 1319, 1326, 1339, 1352, 1359, 1366, 1373, 1382, 1394, 1401, 1408, 1414, 1421, 1428, 1441, 1448, 1455, 1461, 1468, 1475, 1488, 1495, 1508, 1519, 1526, 1531, 1538, 1544, 1556, 1568, 1574, 1581, 1594, 1601, 1608, 1615, 1622, 1629, 1636, 1643, 1650, 1657, 1672, 1679, 1689, 1697, 1708, 1715, 1718, 1723, 1727, 1738, 1743, 1752, 1761, 1763, 1769, 1776, and 1786; (ii) a CDR2 having an amino acid sequence that is at least 65%, at least 70%, at least 75%, at least 80%, at least 85%, at least 90%, at least 95%, at least 99%, or 100% identical to any one of SEQ ID NOs: 1200, 1212, 1680, 1690, 1698, 1709, 1728, 1739, 1744, 1753, 1770, and 1777; or at least 65%, at least 70%, at least 75%, at least 80%, at least 85%, at least 90%, at least 95%, at least 99%, or 100% identical to any one of amino acid sequences AAS, APS, AT, ATS, DAS, DDG, DDS, DT, DTS, DVS, EAS, FTS, GAF, GAN, GAS, GAT, GIS, GKN, GNS, HTS, KVS, LAS, LGS, LVS, NAK, NTN, QMS, RMS, RTS, SAS, TTS, WAS, YAS, YAT, YGS, YRS, and YTS; and (iii) a CDR3 having an amino acid sequence that is at least 65%, at least 70%, at least 75%, at least 80%, at least 85%, at least 90%, at least 95%, at least 99%, or 100% identical to any one of SEQ ID NOs: 1097, 1104, 1111, 1121, 1128, 1135, 1142, 1149, 1156, 1163, 1170, 1175, 1182, 1189, 1195, 1201, 1207, 1213, 1222, 1229, 1236, 2009, 1248, 1255, 1262, 1267, 1272, 1279, 1286, 1293, 1300, 1307, 1320, 1327, 1333, 1340, 1346, 1353, 1360, 1367, 1374, 1383, 1389, 1395, 1402, 1409, 1415, 1422, 1429, 1435, 1442, 1449, 1456, 1462, 1469, 1476, 1482, 1489, 1496, 1502, 1509, 1513, 1520, 1532, 1539, 1545, 1557, 1562, 1569, 1575, 1582, 1588, 1595, 1602, 1609, 1616, 1623, 1630, 1637, 1644, 1651, 1658, 1663, 1673, 1681, 1691, 1699, 1710, 1729, 1735, 1745, 1751, 1754, 1778, 1787, and 1976;
[6989] VL4 comprises (i) a complementarity determining region (CDR) 1 having an amino acid sequence that is at least 65%, at least 70%, at least 75%, at least 80%, at least 85%, at least 90%, at least 95%, at least 99%, or 100% identical to any one of SEQ ID NOs: 1096, 1103, 1110, 1120, 1127, 1134, 1141, 1148, 1155, 1162, 1169, 1174, 1181, 1188, 1199, 1211, 1221, 1228, 1235, 1247, 1254, 1261, 1266, 1271, 1278, 1285, 1292, 1299, 1306, 1313, 1319, 1326, 1339, 1352, 1359, 1366, 1373, 1382, 1394, 1401, 1408, 1414, 1421, 1428, 1441, 1448, 1455, 1461, 1468, 1475, 1488, 1495, 1508, 1519, 1526, 1531, 1538, 1544, 1556, 1568, 1574, 1581, 1594, 1601, 1608, 1615, 1622, 1629, 1636, 1643, 1650, 1657, 1672, 1679, 1689, 1697, 1708, 1715, 1718, 1723, 1727, 1738, 1743, 1752, 1761, 1763, 1769, 1776, and 1786; (ii) a CDR2 having an amino acid sequence that is at least 65%, at least 70%, at least 75%, at least 80%, at least 85%, at least 90%, at least 95%, at least 99%, or 100% identical to any one of SEQ ID NOs: 1200, 1212, 1680, 1690, 1698, 1709, 1728, 1739, 1744, 1753, 1770, and 1777; or at least 65%, at least 70%, at least 75%, at least 80%, at least 85%, at least 90%, at least 95%, at least 99%, or 100% identical to any one of amino acid sequences AAS, APS, AT, ATS, DAS, DDG, DDS, DT, DTS, DVS, EAS, FTS, GAF, GAN, GAS, GAT, GIS, GKN, GNS, HTS, KVS, LAS, LGS, LVS, NAK, NTN, QMS, RMS, RTS, SAS, TTS, WAS, YAS, YAT, YGS, YRS, and YTS; and (iii) a CDR3 having an amino acid sequence that is at least 65%, at least 70%, at least 75%, at least 80%, at least 85%, at least 90%, at least 95%, at least 99%, or 100% identical to any one of SEQ ID NOs: 1097, 1104, 1111, 1121, 1128, 1135, 1142, 1149, 1156, 1163, 1170, 1175, 1182, 1189, 1195, 1201, 1207, 1213, 1222, 1229, 1236, 2009, 1248, 1255, 1262, 1267, 1272, 1279, 1286, 1293, 1300, 1307, 1320, 1327, 1333, 1340, 1346, 1353, 1360, 1367, 1374, 1383, 1389, 1395, 1402, 1409, 1415, 1422, 1429, 1435, 1442, 1449, 1456, 1462, 1469, 1476, 1482, 1489, 1496, 1502, 1509, 1513, 1520, 1532, 1539, 1545, 1557, 1562, 1569, 1575, 1582, 1588, 1595, 1602, 1609, 1616, 1623, 1630, 1637, 1644, 1651, 1658, 1663, 1673, 1681, 1691, 1699, 1710, 1729, 1735, 1745, 1751, 1754, 1778, 1787, and 1976;
[6990] VH1 comprises (i) a complementarity determining region (CDR) 1 having an amino acid sequence that is at least 65%, at least 70%, at least 75%, at least 80%, at least 85%, at least 90%, at least 95%, at least 99%, or 100% identical to any one of SEQ ID NOs: 1099, 1106, 1113, 1117, 1123, 1130, 1137, 1144, 1151, 1158, 1165, 1177, 1184, 1191, 1203, 1215, 1224, 1231, 1238, 1243, 1250, 1257, 1264, 1274, 1281, 1288, 1295, 1302, 1309, 1315, 1322, 1329, 1335, 1342, 1348, 1355, 1362, 1369, 1376, 1385, 1397, 1404, 1417, 1424, 1431, 1437, 1444, 1451, 1458, 1464, 1471, 1478, 1484, 1491, 1498, 1504, 1511, 1515, 1522, 1534, 1547, 1552, 1564, 1577, 1584, 1590, 1597, 1604, 1611, 1618, 1625, 1632, 1639, 1646, 1653, 1660, 1665, 1675, 1683, 1693, 1701, 1705, 1716, 1719, 1731, 1736, 1747, 1756, 1772, 1780, and 1789; (ii) a CDR2 having an amino acid sequence that is at least 65%, at least 70%, at least 75%, at least 80%, at least 85%, at least 90%, at least 95%, at least 99%, or 100% identical to any one of SEQ ID NOs: 1100, 1107, 1114, 1118, 1124, 1131, 1138, 1145, 1152, 1159, 1166, 1178, 1185, 1192, 1204, 1216, 1225, 1232, 1239, 1244, 1251, 1258, 1275, 1282, 1289, 1296, 1303, 1310, 1316, 1323, 1330, 1336, 1343, 1349, 1356, 1363, 1370, 1377, 1386, 1391, 1398, 1405, 1411, 1418, 1425, 1432, 1438, 1445, 1452, 1465, 1472, 1479, 1485, 1492, 1499, 1505, 1516, 1523, 1528, 1535, 1541, 1548, 1553, 1559, 1565, 1571, 1578, 1585, 1591, 1598, 1605, 1612, 1619, 1626, 1633, 1640, 1647, 1654, 1666, 1676, 1684, 1687, 1694, 1702, 1706, 1712, 1717, 1720, 1725, 1732, 1737, 1741, 1748, 1757, 1767, 1773, 1781, and 1790; and (iii) a CDR3 having an amino acid sequence that is at least 65%, at least 70%, at least 75%, at least 80%, at least 85%, at least 90%, at least 95%, at least 99%, or 100% identical to any one of SEQ ID NOs: 1101, 1108, 1115, 1125, 1132, 1139, 1146, 1153, 1160, 1167, 1172, 1179, 1186, 1193, 1197, 1205, 1209, 1217, 1226, 1233, 1240, 1245, 1252, 1259, 1269, 1276, 1283, 1290, 1297, 1304, 1311, 1317, 1324, 1331, 1337, 1344, 1350, 1357, 1364, 1371, 1378, 1387, 1392, 1399, 1406, 1412, 1419, 1426, 1433, 1439, 1446, 1453, 1459, 1466, 1473, 1480, 1486, 1493, 1500, 1506, 1517, 1524, 1529, 1536, 1542, 1549, 1554, 1560, 1566, 1572, 1579, 1586, 1592, 1599, 1606, 1613, 1620, 1627, 1634, 1641, 1648, 1655, 1661, 1667, 1670, 1677, 1685, 1688, 1695, 1703, 1707, 1713, 1733, 1749, 1758, 1762, 1774, 1782, 1791, and 1975;
[6991] VH2 comprises (i) a complementarity determining region (CDR) 1 having an amino acid sequence that is at least 65%, at least 70%, at least 75%, at least 80%, at least 85%, at least 90%, at least 95%, at least 99%, or 100% identical to any one of SEQ ID NOs: 1099, 1106, 1113, 1117, 1123, 1130, 1137, 1144, 1151, 1158, 1165, 1177, 1184, 1191, 1203, 1215, 1224, 1231, 1238, 1243, 1250, 1257, 1264, 1274, 1281, 1288, 1295, 1302, 1309, 1315, 1322, 1329, 1335, 1342, 1348, 1355, 1362, 1369, 1376, 1385, 1397, 1404, 1417, 1424, 1431, 1437, 1444, 1451, 1458, 1464, 1471, 1478, 1484, 1491, 1498, 1504, 1511, 1515, 1522, 1534, 1547, 1552, 1564, 1577, 1584, 1590, 1597, 1604, 1611, 1618, 1625, 1632, 1639, 1646, 1653, 1660, 1665, 1675, 1683, 1693, 1701, 1705, 1716, 1719, 1731, 1736, 1747, 1756, 1772, 1780, and 1789; (ii) a CDR2 having an amino acid sequence that is at least 65%, at least 70%, at least 75%, at least 80%, at least 85%, at least 90%, at least 95%, at least 99%, or 100% identical to any one of SEQ ID NOs: 1100, 1107, 1114, 1118, 1124, 1131, 1138, 1145, 1152, 1159, 1166, 1178, 1185, 1192, 1204, 1216, 1225, 1232, 1239, 1244, 1251, 1258, 1275, 1282, 1289, 1296, 1303, 1310, 1316, 1323, 1330, 1336, 1343, 1349, 1356, 1363, 1370, 1377, 1386, 1391, 1398, 1405, 1411, 1418, 1425, 1432, 1438, 1445, 1452, 1465, 1472, 1479, 1485, 1492, 1499, 1505, 1516, 1523, 1528, 1535, 1541, 1548, 1553, 1559, 1565, 1571, 1578, 1585, 1591, 1598, 1605, 1612, 1619, 1626, 1633, 1640, 1647, 1654, 1666, 1676, 1684, 1687, 1694, 1702, 1706, 1712, 1717, 1720, 1725, 1732, 1737, 1741, 1748, 1757, 1767, 1773, 1781, and 1790; and (iii) a CDR3 having an amino acid sequence that is at least 65%, at least 70%, at least 75%, at least 80%, at least 85%, at least 90%, at least 95%, at least 99%, or 100% identical to any one of SEQ ID NOs: 1101, 1108, 1115, 1125, 1132, 1139, 1146, 1153, 1160, 1167, 1172, 1179, 1186, 1193, 1197, 1205, 1209, 1217, 1226, 1233, 1240, 1245, 1252, 1259, 1269, 1276, 1283, 1290, 1297, 1304, 1311, 1317, 1324, 1331, 1337, 1344, 1350, 1357, 1364, 1371, 1378, 1387, 1392, 1399, 1406, 1412, 1419, 1426, 1433, 1439, 1446, 1453, 1459, 1466, 1473, 1480, 1486, 1493, 1500, 1506, 1517, 1524, 1529, 1536, 1542, 1549, 1554, 1560, 1566, 1572, 1579, 1586, 1592, 1599, 1606, 1613, 1620, 1627, 1634, 1641, 1648, 1655, 1661, 1667, 1670, 1677, 1685, 1688, 1695, 1703, 1707, 1713, 1733, 1749, 1758, 1762, 1774, 1782, 1791, and 1975;
[6992] VH3 comprises (i) a complementarity determining region (CDR) 1 having an amino acid sequence that is at least 65%, at least 70%, at least 75%, at least 80%, at least 85%, at least 90%, at least 95%, at least 99%, or 100% identical to any one of SEQ ID NOs: 1099, 1106, 1113, 1117, 1123, 1130, 1137, 1144, 1151, 1158, 1165, 1177, 1184, 1191, 1203, 1215, 1224, 1231, 1238, 1243, 1250, 1257, 1264, 1274, 1281, 1288, 1295, 1302, 1309, 1315, 1322, 1329, 1335, 1342, 1348, 1355, 1362, 1369, 1376, 1385, 1397, 1404, 1417, 1424, 1431, 1437, 1444, 1451, 1458, 1464, 1471, 1478, 1484, 1491, 1498, 1504, 1511, 1515, 1522, 1534, 1547, 1552, 1564, 1577, 1584, 1590, 1597, 1604, 1611, 1618, 1625, 1632, 1639, 1646, 1653, 1660, 1665, 1675, 1683, 1693, 1701, 1705, 1716, 1719, 1731, 1736, 1747, 1756, 1772, 1780, and 1789; (ii) a CDR2 having an amino acid sequence that is at least 65%, at least 70%, at least 75%, at least 80%, at least 85%, at least 90%, at least 95%, at least 99%, or 100% identical to any one of SEQ ID NOs: 1100, 1107, 1114, 1118, 1124, 1131, 1138, 1145, 1152, 1159, 1166, 1178, 1185, 1192, 1204, 1216, 1225, 1232, 1239, 1244, 1251, 1258, 1275, 1282, 1289, 1296, 1303, 1310, 1316, 1323, 1330, 1336, 1343, 1349, 1356, 1363, 1370, 1377, 1386, 1391, 1398, 1405, 1411, 1418, 1425, 1432, 1438, 1445, 1452, 1465, 1472, 1479, 1485, 1492, 1499, 1505, 1516, 1523, 1528, 1535, 1541, 1548, 1553, 1559, 1565, 1571, 1578, 1585, 1591, 1598, 1605, 1612, 1619, 1626, 1633, 1640, 1647, 1654, 1666, 1676, 1684, 1687, 1694, 1702, 1706, 1712, 1717, 1720, 1725, 1732, 1737, 1741, 1748, 1757, 1767, 1773, 1781, and 1790; and (iii) a CDR3 having an amino acid sequence that is at least 65%, at least 70%, at least 75%, at least 80%, at least 85%, at least 90%, at least 95%, at least 99%, or 100% identical to any one of SEQ ID NOs: 1101, 1108, 1115, 1125, 1132, 1139, 1146, 1153, 1160, 1167, 1172, 1179, 1186, 1193, 1197, 1205, 1209, 1217, 1226, 1233, 1240, 1245, 1252, 1259, 1269, 1276, 1283, 1290, 1297, 1304, 1311, 1317, 1324, 1331, 1337, 1344, 1350, 1357, 1364, 1371, 1378, 1387, 1392, 1399, 1406, 1412, 1419, 1426, 1433, 1439, 1446, 1453, 1459, 1466, 1473, 1480, 1486, 1493, 1500, 1506, 1517, 1524, 1529, 1536, 1542, 1549, 1554, 1560, 1566, 1572, 1579, 1586, 1592, 1599, 1606, 1613, 1620, 1627, 1634, 1641, 1648, 1655, 1661, 1667, 1670, 1677, 1685, 1688, 1695, 1703, 1707, 1713, 1733, 1749, 1758, 1762, 1774, 1782, 1791, and 1975; and/or
[6993] VH4 comprises (i) a complementarity determining region (CDR) 1 having an amino acid sequence that is at least 65%, at least 70%, at least 75%, at least 80%, at least 85%, at least 90%, at least 95%, at least 99%, or 100% identical to any one of SEQ ID NOs: 1099, 1106, 1113, 1117, 1123, 1130, 1137, 1144, 1151, 1158, 1165, 1177, 1184, 1191, 1203, 1215, 1224, 1231, 1238, 1243, 1250, 1257, 1264, 1274, 1281, 1288, 1295, 1302, 1309, 1315, 1322, 1329, 1335, 1342, 1348, 1355, 1362, 1369, 1376, 1385, 1397, 1404, 1417, 1424, 1431, 1437, 1444, 1451, 1458, 1464, 1471, 1478, 1484, 1491, 1498, 1504, 1511, 1515, 1522, 1534, 1547, 1552, 1564, 1577, 1584, 1590, 1597, 1604, 1611, 1618, 1625, 1632, 1639, 1646, 1653, 1660, 1665, 1675, 1683, 1693, 1701, 1705, 1716, 1719, 1731, 1736, 1747, 1756, 1772, 1780, and 1789; (ii) a CDR2 having an amino acid sequence that is at least 65%, at least 70%, at least 75%, at least 80%, at least 85%, at least 90%, at least 95%, at least 99%, or 100% identical to any one of SEQ ID NOs: 1100, 1107, 1114, 1118, 1124, 1131, 1138, 1145, 1152, 1159, 1166, 1178, 1185, 1192, 1204, 1216, 1225, 1232, 1239, 1244, 1251, 1258, 1275, 1282, 1289, 1296, 1303, 1310, 1316, 1323, 1330, 1336, 1343, 1349, 1356, 1363, 1370, 1377, 1386, 1391, 1398, 1405, 1411, 1418, 1425, 1432, 1438, 1445, 1452, 1465, 1472, 1479, 1485, 1492, 1499, 1505, 1516, 1523, 1528, 1535, 1541, 1548, 1553, 1559, 1565, 1571, 1578, 1585, 1591, 1598, 1605, 1612, 1619, 1626, 1633, 1640, 1647, 1654, 1666, 1676, 1684, 1687, 1694, 1702, 1706, 1712, 1717, 1720, 1725, 1732, 1737, 1741, 1748, 1757, 1767, 1773, 1781, and 1790; and (iii) a CDR3 having an amino acid sequence that is at least 65%, at least 70%, at least 75%, at least 80%, at least 85%, at least 90%, at least 95%, at least 99%, or 100% identical to any one of SEQ ID NOs: 1101, 1108, 1115, 1125, 1132, 1139, 1146, 1153, 1160, 1167, 1172, 1179, 1186, 1193, 1197, 1205, 1209, 1217, 1226, 1233, 1240, 1245, 1252, 1259, 1269, 1276, 1283, 1290, 1297, 1304, 1311, 1317, 1324, 1331, 1337, 1344, 1350, 1357, 1364, 1371, 1378, 1387, 1392, 1399, 1406, 1412, 1419, 1426, 1433, 1439, 1446, 1453, 1459, 1466, 1473, 1480, 1486, 1493, 1500, 1506, 1517, 1524, 1529, 1536, 1542, 1549, 1554, 1560, 1566, 1572, 1579, 1586, 1592, 1599, 1606, 1613, 1620, 1627, 1634, 1641, 1648, 1655, 1661, 1667, 1670, 1677, 1685, 1688, 1695, 1703, 1707, 1713, 1733, 1749, 1758, 1762, 1774, 1782, 1791, and 1975; or
[6994] (iv)
[6995] VL1 comprises an amino acid sequence that is at least 65%, at least 70%, at least 75%, at least 80%, at least 85%, at least 90%, at least 95%, at least 99%, or 100% identical to any one of SEQ ID NOs: 1098, 1105, 1112, 1122, 1129, 1136, 1143, 1150, 1157, 1164, 1171, 1176, 1183, 1190, 1196, 1202, 1208, 1214, 1219, 1223, 1230, 1237, 1242, 1249, 1256, 1263, 1268, 1273, 1280, 1287, 1294, 1301, 1308, 1314, 1321, 1328, 1334, 1341, 1347, 1354, 1361, 1368, 1375, 1380, 1384, 1390, 1396, 1403, 1410, 1416, 1423, 1430, 1436, 1443, 1450, 1457, 1463, 1470, 1477, 1483, 1490, 1497, 1503, 1510, 1514, 1521, 1527, 1533, 1540, 1546, 1551, 1558, 1563, 1570, 1576, 1583, 1589, 1596, 1603, 1610, 1617, 1624, 1631, 1638, 1645, 1652, 1659, 1664, 1669, 1674, 1682, 1692, 1700, 1711, 1721, 1724, 1730, 1740, 1746, 1755, 1764, 1766, 1771, 1779, 1784, and 1788;
[6996] VL2 comprises an amino acid sequence that is at least 65%, at least 70%, at least 75%, at least 80%, at least 85%, at least 90%, at least 95%, at least 99%, or 100% identical to any one of SEQ ID NOs: 1098, 1105, 1112, 1122, 1129, 1136, 1143, 1150, 1157, 1164, 1171, 1176, 1183, 1190, 1196, 1202, 1208, 1214, 1219, 1223, 1230, 1237, 1242, 1249, 1256, 1263, 1268, 1273, 1280, 1287, 1294, 1301, 1308, 1314, 1321, 1328, 1334, 1341, 1347, 1354, 1361, 1368, 1375, 1380, 1384, 1390, 1396, 1403, 1410, 1416, 1423, 1430, 1436, 1443, 1450, 1457, 1463, 1470, 1477, 1483, 1490, 1497, 1503, 1510, 1514, 1521, 1527, 1533, 1540, 1546, 1551, 1558, 1563, 1570, 1576, 1583, 1589, 1596, 1603, 1610, 1617, 1624, 1631, 1638, 1645, 1652, 1659, 1664, 1669, 1674, 1682, 1692, 1700, 1711, 1721, 1724, 1730, 1740, 1746, 1755, 1764, 1766, 1771, 1779, 1784, and 1788;
[6997] VL3 comprises an amino acid sequence that is at least 65%, at least 70%, at least 75%, at least 80%, at least 85%, at least 90%, at least 95%, at least 99%, or 100% identical to any one of SEQ ID NOs: 1098, 1105, 1112, 1122, 1129, 1136, 1143, 1150, 1157, 1164, 1171, 1176, 1183, 1190, 1196, 1202, 1208, 1214, 1219, 1223, 1230, 1237, 1242, 1249, 1256, 1263, 1268, 1273, 1280, 1287, 1294, 1301, 1308, 1314, 1321, 1328, 1334, 1341, 1347, 1354, 1361, 1368, 1375, 1380, 1384, 1390, 1396, 1403, 1410, 1416, 1423, 1430, 1436, 1443, 1450, 1457, 1463, 1470, 1477, 1483, 1490, 1497, 1503, 1510, 1514, 1521, 1527, 1533, 1540, 1546, 1551, 1558, 1563, 1570, 1576, 1583, 1589, 1596, 1603, 1610, 1617, 1624, 1631, 1638, 1645, 1652, 1659, 1664, 1669, 1674, 1682, 1692, 1700, 1711, 1721, 1724, 1730, 1740, 1746, 1755, 1764, 1766, 1771, 1779, 1784, and 1788;
[6998] VL4 comprises an amino acid sequence that is at least 65%, at least 70%, at least 75%, at least 80%, at least 85%, at least 90%, at least 95%, at least 99%, or 100% identical to any one of SEQ ID NOs: 1098, 1105, 1112, 1122, 1129, 1136, 1143, 1150, 1157, 1164, 1171, 1176, 1183, 1190, 1196, 1202, 1208, 1214, 1219, 1223, 1230, 1237, 1242, 1249, 1256, 1263, 1268, 1273, 1280, 1287, 1294, 1301, 1308, 1314, 1321, 1328, 1334, 1341, 1347, 1354, 1361, 1368, 1375, 1380, 1384, 1390, 1396, 1403, 1410, 1416, 1423, 1430, 1436, 1443, 1450, 1457, 1463, 1470, 1477, 1483, 1490, 1497, 1503, 1510, 1514, 1521, 1527, 1533, 1540, 1546, 1551, 1558, 1563, 1570, 1576, 1583, 1589, 1596, 1603, 1610, 1617, 1624, 1631, 1638, 1645, 1652, 1659, 1664, 1669, 1674, 1682, 1692, 1700, 1711, 1721, 1724, 1730, 1740, 1746, 1755, 1764, 1766, 1771, 1779, 1784, and 1788;
[6999] VH1 comprises an amino acid sequence that is at least 65%, at least 70%, at least 75%, at least 80%, at least 85%, at least 90%, at least 95%, at least 99%, or 100% identical to any one of SEQ ID NOs: 1102, 1109, 1116, 1119, 1126, 1133, 1140, 1147, 1154, 1161, 1168, 1173, 1180, 1187, 1194, 1198, 1206, 1210, 1218, 1220, 1227, 1234, 1241, 1246, 1253, 1260, 1265, 1270, 1277, 1284, 1291, 1298, 1305, 1312, 1318, 1325, 1332, 1338, 1345, 1351, 1358, 1365, 1372, 1379, 1381, 1388, 1393, 1400, 1407, 1413, 1420, 1427, 1434, 1440, 1447, 1454, 1460, 1467, 1474, 1481, 1487, 1494, 1501, 1507, 1512, 1518, 1525, 1530, 1537, 1543, 1550, 1555, 1561, 1567, 1573, 1580, 1587, 1593, 1600, 1607, 1614, 1621, 1628, 1635, 1642, 1649, 1656, 1662, 1668, 1671, 1678, 1686, 1696, 1704, 1714, 1722, 1726, 1734, 1742, 1750, 1759, 1760, 1765, 1768, 1775, 1783, 1785, and 1792;
[7000] VH2 comprises an amino acid sequence that is at least 65%, at least 70%, at least 75%, at least 80%, at least 85%, at least 90%, at least 95%, at least 99%, or 100% identical to any one of SEQ ID NOs: 1102, 1109, 1116, 1119, 1126, 1133, 1140, 1147, 1154, 1161, 1168, 1173, 1180, 1187, 1194, 1198, 1206, 1210, 1218, 1220, 1227, 1234, 1241, 1246, 1253, 1260, 1265, 1270, 1277, 1284, 1291, 1298, 1305, 1312, 1318, 1325, 1332, 1338, 1345, 1351, 1358, 1365, 1372, 1379, 1381, 1388, 1393, 1400, 1407, 1413, 1420, 1427, 1434, 1440, 1447, 1454, 1460, 1467, 1474, 1481, 1487, 1494, 1501, 1507, 1512, 1518, 1525, 1530, 1537, 1543, 1550, 1555, 1561, 1567, 1573, 1580, 1587, 1593, 1600, 1607, 1614, 1621, 1628, 1635, 1642, 1649, 1656, 1662, 1668, 1671, 1678, 1686, 1696, 1704, 1714, 1722, 1726, 1734, 1742, 1750, 1759, 1760, 1765, 1768, 1775, 1783, 1785, and 1792;
[7001] VH3 comprises an amino acid sequence that is at least 65%, at least 70%, at least 75%, at least 80%, at least 85%, at least 90%, at least 95%, at least 99%, or 100% identical to any one of SEQ ID NOs: 1102, 1109, 1116, 1119, 1126, 1133, 1140, 1147, 1154, 1161, 1168, 1173, 1180, 1187, 1194, 1198, 1206, 1210, 1218, 1220, 1227, 1234, 1241, 1246, 1253, 1260, 1265, 1270, 1277, 1284, 1291, 1298, 1305, 1312, 1318, 1325, 1332, 1338, 1345, 1351, 1358, 1365, 1372, 1379, 1381, 1388, 1393, 1400, 1407, 1413, 1420, 1427, 1434, 1440, 1447, 1454, 1460, 1467, 1474, 1481, 1487, 1494, 1501, 1507, 1512, 1518, 1525, 1530, 1537, 1543, 1550, 1555, 1561, 1567, 1573, 1580, 1587, 1593, 1600, 1607, 1614, 1621, 1628, 1635, 1642, 1649, 1656, 1662, 1668, 1671, 1678, 1686, 1696, 1704, 1714, 1722, 1726, 1734, 1742, 1750, 1759, 1760, 1765, 1768, 1775, 1783, 1785, and 1792; and/or
[7002] VH4 comprises an amino acid sequence that is at least 65%, at least 70%, at least 75%, at least 80%, at least 85%, at least 90%, at least 95%, at least 99%, or 100% identical to any one of SEQ ID NOs: 1102, 1109, 1116, 1119, 1126, 1133, 1140, 1147, 1154, 1161, 1168, 1173, 1180, 1187, 1194, 1198, 1206, 1210, 1218, 1220, 1227, 1234, 1241, 1246, 1253, 1260, 1265, 1270, 1277, 1284, 1291, 1298, 1305, 1312, 1318, 1325, 1332, 1338, 1345, 1351, 1358, 1365, 1372, 1379, 1381, 1388, 1393, 1400, 1407, 1413, 1420, 1427, 1434, 1440, 1447, 1454, 1460, 1467, 1474, 1481, 1487, 1494, 1501, 1507, 1512, 1518, 1525, 1530, 1537, 1543, 1550, 1555, 1561, 1567, 1573, 1580, 1587, 1593, 1600, 1607, 1614, 1621, 1628, 1635, 1642, 1649, 1656, 1662, 1668, 1671, 1678, 1686, 1696, 1704, 1714, 1722, 1726, 1734, 1742, 1750, 1759, 1760, 1765, 1768, 1775, 1783, 1785, and 1792; or
[7003] (b)
[7004] (i)
[7005] VL1 comprises a light chain complementarity determining region 1 (LCDR1), LCDR2, and/or LCDR3 of an antibody selected from the group consisting of libivirumab, rmab, rivabazumab pegol, setoxaximab, suvizumab, suvratoxumab, sevirumab, pritoxaximab, porgaviximab, REGN-EB3, obiltoxaximab, gedivumab, foravirumab, larcaviximab, motavizumab, palivizumab, rafivirumab, regavirumab, tuvirumab, cosfroviximab, felvizumab, atidortoxumab, edobacomab, nebacumab, pateclizumab, raxibacumab, urtoxazumab, tosatoxumab, berlimatoxumab, CR6261, diridavumab, firivumab, lesofavumab, navivumab, exbivirumab, lenvervimab, bavituximab, bezlotoxumab, efungumab, leronlimab, nirsevimab, pagibaximab, panobacumab, tefibazumab, ansuvimab, atoltivimab, maftivimab, and odesivimab;
[7006] VL2 comprises a light chain complementarity determining region 1 (LCDR1), LCDR2, and/or LCDR3 of an antibody selected from the group consisting of libivirumab, rmab, rivabazumab pegol, setoxaximab, suvizumab, suvratoxumab, sevirumab, pritoxaximab, porgaviximab, REGN-EB3, obiltoxaximab, gedivumab, foravirumab, larcaviximab, motavizumab, palivizumab, rafivirumab, regavirumab, tuvirumab, cosfroviximab, felvizumab, atidortoxumab, edobacomab, nebacumab, pateclizumab, raxibacumab, urtoxazumab, tosatoxumab, berlimatoxumab, CR6261, diridavumab, firivumab, lesofavumab, navivumab, exbivirumab, lenvervimab, bavituximab, bezlotoxumab, efungumab, leronlimab, nirsevimab, pagibaximab, panobacumab, tefibazumab, ansuvimab, atoltivimab, maftivimab, and odesivimab;
[7007] VL3 comprises a light chain complementarity determining region 1 (LCDR1), LCDR2, and/or LCDR3 of an antibody selected from the group consisting of libivirumab, rmab, rivabazumab pegol, setoxaximab, suvizumab, suvratoxumab, sevirumab, pritoxaximab, porgaviximab, REGN-EB3, obiltoxaximab, gedivumab, foravirumab, larcaviximab, motavizumab, palivizumab, rafivirumab, regavirumab, tuvirumab, cosfroviximab, felvizumab, atidortoxumab, edobacomab, nebacumab, pateclizumab, raxibacumab, urtoxazumab, tosatoxumab, berlimatoxumab, CR6261, diridavumab, firivumab, lesofavumab, navivumab, exbivirumab, lenvervimab, bavituximab, bezlotoxumab, efungumab, leronlimab, nirsevimab, pagibaximab, panobacumab, tefibazumab, ansuvimab, atoltivimab, maftivimab, and odesivimab;
[7008] VL4 comprises a light chain complementarity determining region 1 (LCDR1), LCDR2, and/or LCDR3 of an antibody selected from the group consisting of libivirumab, rmab, rivabazumab pegol, setoxaximab, suvizumab, suvratoxumab, sevirumab, pritoxaximab, porgaviximab, REGN-EB3, obiltoxaximab, gedivumab, foravirumab, larcaviximab, motavizumab, palivizumab, rafivirumab, regavirumab, tuvirumab, cosfroviximab, felvizumab, atidortoxumab, edobacomab, nebacumab, pateclizumab, raxibacumab, urtoxazumab, tosatoxumab, berlimatoxumab, CR6261, diridavumab, firivumab, lesofavumab, navivumab, exbivirumab, lenvervimab, bavituximab, bezlotoxumab, efungumab, leronlimab, nirsevimab, pagibaximab, panobacumab, tefibazumab, ansuvimab, atoltivimab, maftivimab, and odesivimab;
[7009] VH1 comprises a heavy chain complementarity determining region 1 (HCDR1), HCDR2, and/or HCDR3 of an antibody selected from the group consisting of libivirumab, rmab, rivabazumab pegol, setoxaximab, suvizumab, suvratoxumab, sevirumab, pritoxaximab, porgaviximab, REGN-EB3, obiltoxaximab, gedivumab, foravirumab, larcaviximab, motavizumab, palivizumab, rafivirumab, regavirumab, tuvirumab, cosfroviximab, felvizumab, atidortoxumab, edobacomab, nebacumab, pateclizumab, raxibacumab, urtoxazumab, tosatoxumab, berlimatoxumab, CR6261, diridavumab, firivumab, lesofavumab, navivumab, exbivirumab, lenvervimab, bavituximab, bezlotoxumab, efungumab, leronlimab, nirsevimab, pagibaximab, panobacumab, tefibazumab, ansuvimab, atoltivimab, maftivimab, and odesivimab;
[7010] VH2 comprises a heavy chain complementarity determining region 1 (HCDR1), HCDR2, and/or HCDR3 of an antibody selected from the group consisting of libivirumab, rmab, rivabazumab pegol, setoxaximab, suvizumab, suvratoxumab, sevirumab, pritoxaximab, porgaviximab, REGN-EB3, obiltoxaximab, gedivumab, foravirumab, larcaviximab, motavizumab, palivizumab, rafivirumab, regavirumab, tuvirumab, cosfroviximab, felvizumab, atidortoxumab, edobacomab, nebacumab, pateclizumab, raxibacumab, urtoxazumab, tosatoxumab, berlimatoxumab, CR6261, diridavumab, firivumab, lesofavumab, navivumab, exbivirumab, lenvervimab, bavituximab, bezlotoxumab, efungumab, leronlimab, nirsevimab, pagibaximab, panobacumab, tefibazumab, ansuvimab, atoltivimab, maftivimab, and odesivimab;
[7011] VH3 comprises a heavy chain complementarity determining region 1 (HCDR1), HCDR2, and/or HCDR3 of an antibody selected from the group consisting of libivirumab, rmab, rivabazumab pegol, setoxaximab, suvizumab, suvratoxumab, sevirumab, pritoxaximab, porgaviximab, REGN-EB3, obiltoxaximab, gedivumab, foravirumab, larcaviximab, motavizumab, palivizumab, rafivirumab, regavirumab, tuvirumab, cosfroviximab, felvizumab, atidortoxumab, edobacomab, nebacumab, pateclizumab, raxibacumab, urtoxazumab, tosatoxumab, berlimatoxumab, CR6261, diridavumab, firivumab, lesofavumab, navivumab, exbivirumab, lenvervimab, bavituximab, bezlotoxumab, efungumab, leronlimab, nirsevimab, pagibaximab, panobacumab, tefibazumab, ansuvimab, atoltivimab, maftivimab, and odesivimab; and/or
[7012] VH4 comprises a heavy chain complementarity determining region 1 (HCDR1), HCDR2, and/or HCDR3 of an antibody selected from the group consisting of libivirumab, rmab, rivabazumab pegol, setoxaximab, suvizumab, suvratoxumab, sevirumab, pritoxaximab, porgaviximab, REGN-EB3, obiltoxaximab, gedivumab, foravirumab, larcaviximab, motavizumab, palivizumab, rafivirumab, regavirumab, tuvirumab, cosfroviximab, felvizumab, atidortoxumab, edobacomab, nebacumab, pateclizumab, raxibacumab, urtoxazumab, tosatoxumab, berlimatoxumab, CR6261, diridavumab, firivumab, lesofavumab, navivumab, exbivirumab, lenvervimab, bavituximab, bezlotoxumab, efungumab, leronlimab, nirsevimab, pagibaximab, panobacumab, tefibazumab, ansuvimab, atoltivimab, maftivimab, and odesivimab; or
[7013] (ii)
[7014] VL1 comprises a VL of an antibody selected from the group consisting of libivirumab, rmab, rivabazumab pegol, setoxaximab, suvizumab, suvratoxumab, sevirumab, pritoxaximab, porgaviximab, REGN-EB3, obiltoxaximab, gedivumab, foravirumab, larcaviximab, motavizumab, palivizumab, rafivirumab, regavirumab, tuvirumab, cosfroviximab, felvizumab, atidortoxumab, edobacomab, nebacumab, pateclizumab, raxibacumab, urtoxazumab, tosatoxumab, berlimatoxumab, CR6261, diridavumab, firivumab, lesofavumab, navivumab, exbivirumab, lenvervimab, bavituximab, bezlotoxumab, efungumab, leronlimab, nirsevimab, pagibaximab, panobacumab, tefibazumab, ansuvimab, atoltivimab, maftivimab, and odesivimab;
[7015] VL2 comprises a VL of an antibody selected from the group consisting of libivirumab, rmab, rivabazumab pegol, setoxaximab, suvizumab, suvratoxumab, sevirumab, pritoxaximab, porgaviximab, REGN-EB3, obiltoxaximab, gedivumab, foravirumab, larcaviximab, motavizumab, palivizumab, rafivirumab, regavirumab, tuvirumab, cosfroviximab, felvizumab, atidortoxumab, edobacomab, nebacumab, pateclizumab, raxibacumab, urtoxazumab, tosatoxumab, berlimatoxumab, CR6261, diridavumab, firivumab, lesofavumab, navivumab, exbivirumab, lenvervimab, bavituximab, bezlotoxumab, efungumab, leronlimab, nirsevimab, pagibaximab, panobacumab, tefibazumab, ansuvimab, atoltivimab, maftivimab, and odesivimab;
[7016] VL3 comprises a VL of an antibody selected from the group consisting of libivirumab, rmab, rivabazumab pegol, setoxaximab, suvizumab, suvratoxumab, sevirumab, pritoxaximab, porgaviximab, REGN-EB3, obiltoxaximab, gedivumab, foravirumab, larcaviximab, motavizumab, palivizumab, rafivirumab, regavirumab, tuvirumab, cosfroviximab, felvizumab, atidortoxumab, edobacomab, nebacumab, pateclizumab, raxibacumab, urtoxazumab, tosatoxumab, berlimatoxumab, CR6261, diridavumab, firivumab, lesofavumab, navivumab, exbivirumab, lenvervimab, bavituximab, bezlotoxumab, efungumab, leronlimab, nirsevimab, pagibaximab, panobacumab, tefibazumab, ansuvimab, atoltivimab, maftivimab, and odesivimab;
[7017] VL4 comprises a VL of an antibody selected from the group consisting of libivirumab, rmab, rivabazumab pegol, setoxaximab, suvizumab, suvratoxumab, sevirumab, pritoxaximab, porgaviximab, REGN-EB3, obiltoxaximab, gedivumab, foravirumab, larcaviximab, motavizumab, palivizumab, rafivirumab, regavirumab, tuvirumab, cosfroviximab, felvizumab, atidortoxumab, edobacomab, nebacumab, pateclizumab, raxibacumab, urtoxazumab, tosatoxumab, berlimatoxumab, CR6261, diridavumab, firivumab, lesofavumab, navivumab, exbivirumab, lenvervimab, bavituximab, bezlotoxumab, efungumab, leronlimab, nirsevimab, pagibaximab, panobacumab, tefibazumab, ansuvimab, atoltivimab, maftivimab, and odesivimab;
[7018] VH1 comprises a VH of an antibody selected from the group consisting of libivirumab, rmab, rivabazumab pegol, setoxaximab, suvizumab, suvratoxumab, sevirumab, pritoxaximab, porgaviximab, REGN-EB3, obiltoxaximab, gedivumab, foravirumab, larcaviximab, motavizumab, palivizumab, rafivirumab, regavirumab, tuvirumab, cosfroviximab, felvizumab, atidortoxumab, edobacomab, nebacumab, pateclizumab, raxibacumab, urtoxazumab, tosatoxumab, berlimatoxumab, CR6261, diridavumab, firivumab, lesofavumab, navivumab, exbivirumab, lenvervimab, bavituximab, bezlotoxumab, efungumab, leronlimab, nirsevimab, pagibaximab, panobacumab, tefibazumab, ansuvimab, atoltivimab, maftivimab, and odesivimab;
[7019] VH2 comprises a VH of an antibody selected from the group consisting of libivirumab, rmab, rivabazumab pegol, setoxaximab, suvizumab, suvratoxumab, sevirumab, pritoxaximab, porgaviximab, REGN-EB3, obiltoxaximab, gedivumab, foravirumab, larcaviximab, motavizumab, palivizumab, rafivirumab, regavirumab, tuvirumab, cosfroviximab, felvizumab, atidortoxumab, edobacomab, nebacumab, pateclizumab, raxibacumab, urtoxazumab, tosatoxumab, berlimatoxumab, CR6261, diridavumab, firivumab, lesofavumab, navivumab, exbivirumab, lenvervimab, bavituximab, bezlotoxumab, efungumab, leronlimab, nirsevimab, pagibaximab, panobacumab, tefibazumab, ansuvimab, atoltivimab, maftivimab, and odesivimab;
[7020] VH3 comprises a VH of an antibody selected from the group consisting of libivirumab, rmab, rivabazumab pegol, setoxaximab, suvizumab, suvratoxumab, sevirumab, pritoxaximab, porgaviximab, REGN-EB3, obiltoxaximab, gedivumab, foravirumab, larcaviximab, motavizumab, palivizumab, rafivirumab, regavirumab, tuvirumab, cosfroviximab, felvizumab, atidortoxumab, edobacomab, nebacumab, pateclizumab, raxibacumab, urtoxazumab, tosatoxumab, berlimatoxumab, CR6261, diridavumab, firivumab, lesofavumab, navivumab, exbivirumab, lenvervimab, bavituximab, bezlotoxumab, efungumab, leronlimab, nirsevimab, pagibaximab, panobacumab, tefibazumab, ansuvimab, atoltivimab, maftivimab, and odesivimab; and/or
[7021] VH4 comprises a VH of an antibody selected from the group consisting of libivirumab, rmab, rivabazumab pegol, setoxaximab, suvizumab, suvratoxumab, sevirumab, pritoxaximab, porgaviximab, REGN-EB3, obiltoxaximab, gedivumab, foravirumab, larcaviximab, motavizumab, palivizumab, rafivirumab, regavirumab, tuvirumab, cosfroviximab, felvizumab, atidortoxumab, edobacomab, nebacumab, pateclizumab, raxibacumab, urtoxazumab, tosatoxumab, berlimatoxumab, CR6261, diridavumab, firivumab, lesofavumab, navivumab, exbivirumab, lenvervimab, bavituximab, bezlotoxumab, efungumab, leronlimab, nirsevimab, pagibaximab, panobacumab, tefibazumab, ansuvimab, atoltivimab, maftivimab, and odesivimab; or
[7022] (iii)
[7023] VL1 comprises (i) a complementarity determining region (CDR) 1 having an amino acid sequence that is at least 65%, at least 70%, at least 75%, at least 80%, at least 85%, at least 90%, at least 95%, at least 99%, or 100% identical to any one of SEQ ID NOs: 1428, 1793, 1798, 1810, 1817, 1824, 1977, 1985, 1993 and 2001; (ii) a CDR2 having an amino acid sequence that is at least 65%, at least 70%, at least 75%, at least 80%, at least 85%, at least 90%, at least 95%, at least 99%, or 100% identical to any one of SEQ ID NOs: 1978, 1986, 1994, and 2002; or at least 65%, at least 70%, at least 75%, at least 80%, at least 85%, at least 90%, at least 95%, at least 99%, or 100% identical to any one of amino acid sequences YTS, DTS, GAS, and AAS; and (iii) a CDR3 having an amino acid sequence that is at least 65%, at least 70%, at least 75%, at least 80%, at least 85%, at least 90%, at least 95%, at least 99%, or 100% identical to any one of SEQ ID NOs: 1229, 1799, 1805, 1811, 1818, 1825, 1979, 1987, 1995, and 2003;
[7024] VL2 comprises (i) a complementarity determining region (CDR) 1 having an amino acid sequence that is at least 65%, at least 70%, at least 75%, at least 80%, at least 85%, at least 90%, at least 95%, at least 99%, or 100% identical to any one of SEQ ID NOs: 1428, 1793, 1798, 1810, 1817, 1824, 1977, 1985, 1993 and 2001; (ii) a CDR2 having an amino acid sequence that is at least 65%, at least 70%, at least 75%, at least 80%, at least 85%, at least 90%, at least 95%, at least 99%, or 100% identical to any one of SEQ ID NOs: 1978, 1986, 1994, and 2002; or at least 65%, at least 70%, at least 75%, at least 80%, at least 85%, at least 90%, at least 95%, at least 99%, or 100% identical to any one of amino acid sequences YTS, DTS, GAS, and AAS; and (iii) a CDR3 having an amino acid sequence that is at least 65%, at least 70%, at least 75%, at least 80%, at least 85%, at least 90%, at least 95%, at least 99%, or 100% identical to any one of SEQ ID NOs: 1229, 1799, 1805, 1811, 1818, 1825, 1979, 1987, 1995, and 2003;
[7025] VL3 comprises (i) a complementarity determining region (CDR) 1 having an amino acid sequence that is at least 65%, at least 70%, at least 75%, at least 80%, at least 85%, at least 90%, at least 95%, at least 99%, or 100% identical to any one of SEQ ID NOs: 1428, 1793, 1798, 1810, 1817, 1824, 1977, 1985, 1993 and 2001; (ii) a CDR2 having an amino acid sequence that is at least 65%, at least 70%, at least 75%, at least 80%, at least 85%, at least 90%, at least 95%, at least 99%, or 100% identical to any one of SEQ ID NOs: 1978, 1986, 1994, and 2002; or at least 65%, at least 70%, at least 75%, at least 80%, at least 85%, at least 90%, at least 95%, at least 99%, or 100% identical to any one of amino acid sequences YTS, DTS, GAS, and AAS; and (iii) a CDR3 having an amino acid sequence that is at least 65%, at least 70%, at least 75%, at least 80%, at least 85%, at least 90%, at least 95%, at least 99%, or 100% identical to any one of SEQ ID NOs: 1229, 1799, 1805, 1811, 1818, 1825, 1979, 1987, 1995, and 2003;
[7026] VL4 comprises (i) a complementarity determining region (CDR) 1 having an amino acid sequence that is at least 65%, at least 70%, at least 75%, at least 80%, at least 85%, at least 90%, at least 95%, at least 99%, or 100% identical to any one of SEQ ID NOs: 1428, 1793, 1798, 1810, 1817, 1824, 1977, 1985, 1993 and 2001; (ii) a CDR2 having an amino acid sequence that is at least 65%, at least 70%, at least 75%, at least 80%, at least 85%, at least 90%, at least 95%, at least 99%, or 100% identical to any one of SEQ ID NOs: 1978, 1986, 1994, and 2002; or at least 65%, at least 70%, at least 75%, at least 80%, at least 85%, at least 90%, at least 95%, at least 99%, or 100% identical to any one of amino acid sequences YTS, DTS, GAS, and AAS; and (iii) a CDR3 having an amino acid sequence that is at least 65%, at least 70%, at least 75%, at least 80%, at least 85%, at least 90%, at least 95%, at least 99%, or 100% identical to any one of SEQ ID NOs: 1229, 1799, 1805, 1811, 1818, 1825, 1979, 1987, 1995, and 2003;
[7027] VH1 comprises (i) a complementarity determining region (CDR) 1 having an amino acid sequence that is at least 65%, at least 70%, at least 75%, at least 80%, at least 85%, at least 90%, at least 95%, at least 99%, or 100% identical to any one of SEQ ID NOs: 1577, 1795, 1801, 1813, 1820, 1827, 1981, 1989, 1997, and 2005; (ii) a CDR2 having an amino acid sequence that is at least 65%, at least 70%, at least 75%, at least 80%, at least 85%, at least 90%, at least 95%, at least 99%, or 100% identical to any one of SEQ ID NOs: 1159, 1802, 1807, 1814, 1821, 1828, 1982, 1990, 1998, and 2006; and (iii) a CDR3 having an amino acid sequence that is at least 65%, at least 70%, at least 75%, at least 80%, at least 85%, at least 90%, at least 95%, at least 99%, or 100% identical to any one of SEQ ID NOs: 1796, 1803, 1808, 1815, 1822, 1829, 1983, 1991, 1999, and 2007;
[7028] VH2 comprises (i) a complementarity determining region (CDR) 1 having an amino acid sequence that is at least 65%, at least 70%, at least 75%, at least 80%, at least 85%, at least 90%, at least 95%, at least 99%, or 100% identical to any one of SEQ ID NOs: 1577, 1795, 1801, 1813, 1820, 1827, 1981, 1989, 1997, and 2005; (ii) a CDR2 having an amino acid sequence that is at least 65%, at least 70%, at least 75%, at least 80%, at least 85%, at least 90%, at least 95%, at least 99%, or 100% identical to any one of SEQ ID NOs: 1159, 1802, 1807, 1814, 1821, 1828, 1982, 1990, 1998, and 2006; and (iii) a CDR3 having an amino acid sequence that is at least 65%, at least 70%, at least 75%, at least 80%, at least 85%, at least 90%, at least 95%, at least 99%, or 100% identical to any one of SEQ ID NOs: 1796, 1803, 1808, 1815, 1822, 1829, 1983, 1991, 1999, and 2007;
[7029] VH3 comprises (i) a complementarity determining region (CDR) 1 having an amino acid sequence that is at least 65%, at least 70%, at least 75%, at least 80%, at least 85%, at least 90%, at least 95%, at least 99%, or 100% identical to any one of SEQ ID NOs: 1577, 1795, 1801, 1813, 1820, 1827, 1981, 1989, 1997, and 2005; (ii) a CDR2 having an amino acid sequence that is at least 65%, at least 70%, at least 75%, at least 80%, at least 85%, at least 90%, at least 95%, at least 99%, or 100% identical to any one of SEQ ID NOs: 1159, 1802, 1807, 1814, 1821, 1828, 1982, 1990, 1998, and 2006; and (iii) a CDR3 having an amino acid sequence that is at least 65%, at least 70%, at least 75%, at least 80%, at least 85%, at least 90%, at least 95%, at least 99%, or 100% identical to any one of SEQ ID NOs: 1796, 1803, 1808, 1815, 1822, 1829, 1983, 1991, 1999, and 2007; and/or
[7030] VH4 comprises (i) a complementarity determining region (CDR) 1 having an amino acid sequence that is at least 65%, at least 70%, at least 75%, at least 80%, at least 85%, at least 90%, at least 95%, at least 99%, or 100% identical to any one of SEQ ID NOs: 1577, 1795, 1801, 1813, 1820, 1827, 1981, 1989, 1997, and 2005; (ii) a CDR2 having an amino acid sequence that is at least 65%, at least 70%, at least 75%, at least 80%, at least 85%, at least 90%, at least 95%, at least 99%, or 100% identical to any one of SEQ ID NOs: 1159, 1802, 1807, 1814, 1821, 1828, 1982, 1990, 1998, and 2006; and (iii) a CDR3 having an amino acid sequence that is at least 65%, at least 70%, at least 75%, at least 80%, at least 85%, at least 90%, at least 95%, at least 99%, or 100% identical to any one of SEQ ID NOs: 1796, 1803, 1808, 1815, 1822, 1829, 1983, 1991, 1999, and 2007; or
[7031] (iv)
[7032] VL1 comprises an amino acid sequence that is at least 65%, at least 70%, at least 75%, at least 80%, at least 85%, at least 90%, at least 95%, at least 99%, or 100% identical to any one of SEQ ID NOs: 1794, 1800, 1806, 1812, 1819, 1826, 1980, 1988, 1996, and 2004;
[7033] VL2 comprises an amino acid sequence that is at least 65%, at least 70%, at least 75%, at least 80%, at least 85%, at least 90%, at least 95%, at least 99%, or 100% identical to any one of SEQ ID NOs: 1794, 1800, 1806, 1812, 1819, 1826, 1980, 1988, 1996, and 2004;
[7034] VL3 comprises an amino acid sequence that is at least 65%, at least 70%, at least 75%, at least 80%, at least 85%, at least 90%, at least 95%, at least 99%, or 100% identical to any one of SEQ ID NOs: 1794, 1800, 1806, 1812, 1819, 1826, 1980, 1988, 1996, and 2004;
[7035] VL4 comprises an amino acid sequence that is at least 65%, at least 70%, at least 75%, at least 80%, at least 85%, at least 90%, at least 95%, at least 99%, or 100% identical to any one of SEQ ID NOs: 1794, 1800, 1806, 1812, 1819, 1826, 1980, 1988, 1996, and 2004;
[7036] VH1 comprises an amino acid sequence that is at least 65%, at least 70%, at least 75%, at least 80%, at least 85%, at least 90%, at least 95%, at least 99%, or 100% identical to any one of SEQ ID NOS 1797, 1804, 1809, 1816, 1823, 1830, 1984, 1992, 2000, and 2008;
[7037] VH2 comprises an amino acid sequence that is at least 65%, at least 70%, at least 75%, at least 80%, at least 85%, at least 90%, at least 95%, at least 99%, or 100% identical to any one of SEQ ID NOS 1797, 1804, 1809, 1816, 1823, 1830, 1984, 1992, 2000, and 2008;
[7038] VH3 comprises an amino acid sequence that is at least 65%, at least 70%, at least 75%, at least 80%, at least 85%, at least 90%, at least 95%, at least 99%, or 100% identical to any one of SEQ ID NOS 1797, 1804, 1809, 1816, 1823, 1830, 1984, 1992, 2000, and 2008; and/or
[7039] VH4 comprises an amino acid sequence that is at least 65%, at least 70%, at least 75%, at least 80%, at least 85%, at least 90%, at least 95%, at least 99%, or 100% identical to any one of SEQ ID NOS 1797, 1804, 1809, 1816, 1823, 1830, 1984, 1992, 2000, and 2008; or
[7040] (c)
[7041] (i)
[7042] VL1 comprises a light chain complementarity determining region 1 (LCDR1), LCDR2, and/or LCDR3 of an antibody selected from the group consisting of aducanumab, alirocumab, frovocimab, lodelcizumab, bococizumab, evolocumab, ralpancizumab, anifrolumab, atorolimumab, bapineuzumab, bedinvetmab, begelomab, biciromab, bimagrumab, birtamimab, blosozumab, burosumab, caplacizumab, concizumab, crenezumab, crizanlizumab, crotedumab, dezamizumab, domagrozumab, donanemab, eldelumab, elezanumab, emapalumab, emicizumab, eptinezumab, erenumab, evinacumab, faralimomab, fasinumab, fontolizumab, fremanezumab, frunevetmab, fulranumab, galcanezumab, gantenerumab, gosuranemab, idarucizumab, imciromab, inclacumab, lampalizumab, lanadelumab, landogrozumab, lecanemab, ligelizumab, marstacimab, mavrilimumab, morolimumab, NEOD001, omalizumab, oMS721, orticumab, otilimab, ozanezumab, ponezumab, prasinezumab, quilizumab, ranevetmab, refanezumab, roledumab, romosozumab, rozanolixizumab, setrusumab, SHP647, solanezumab, stamulumab, suptavumab, sutimlimab, tanezumab, crovalimab, and lokivetmab;
[7043] VL2 comprises a light chain complementarity determining region 1 (LCDR1), LCDR2, and/or LCDR3 of an antibody selected from the group consisting of aducanumab, alirocumab, frovocimab, lodelcizumab, bococizumab, evolocumab, ralpancizumab, anifrolumab, atorolimumab, bapineuzumab, bedinvetmab, begelomab, biciromab, bimagrumab, birtamimab, blosozumab, burosumab, caplacizumab, concizumab, crenezumab, crizanlizumab, crotedumab, dezamizumab, domagrozumab, donanemab, eldelumab, elezanumab, emapalumab, emicizumab, eptinezumab, erenumab, evinacumab, faralimomab, fasinumab, fontolizumab, fremanezumab, frunevetmab, fulranumab, galcanezumab, gantenerumab, gosuranemab, idarucizumab, imciromab, inclacumab, lampalizumab, lanadelumab, landogrozumab, lecanemab, ligelizumab, marstacimab, mavrilimumab, morolimumab, NEOD001, omalizumab, oMS721, orticumab, otilimab, ozanezumab, ponezumab, prasinezumab, quilizumab, ranevetmab, refanezumab, roledumab, romosozumab, rozanolixizumab, setrusumab, SHP647, solanezumab, stamulumab, suptavumab, sutimlimab, tanezumab, crovalimab, and lokivetmab;
[7044] VL3 comprises a light chain complementarity determining region 1 (LCDR1), LCDR2, and/or LCDR3 of an antibody selected from the group consisting of aducanumab, alirocumab, frovocimab, lodelcizumab, bococizumab, evolocumab, ralpancizumab, anifrolumab, atorolimumab, bapineuzumab, bedinvetmab, begelomab, biciromab, bimagrumab, birtamimab, blosozumab, burosumab, caplacizumab, concizumab, crenezumab, crizanlizumab, crotedumab, dezamizumab, domagrozumab, donanemab, eldelumab, elezanumab, emapalumab, emicizumab, eptinezumab, erenumab, evinacumab, faralimomab, fasinumab, fontolizumab, fremanezumab, frunevetmab, fulranumab, galcanezumab, gantenerumab, gosuranemab, idarucizumab, imciromab, inclacumab, lampalizumab, lanadelumab, landogrozumab, lecanemab, ligelizumab, marstacimab, mavrilimumab, morolimumab, NEOD001, omalizumab, oMS721, orticumab, otilimab, ozanezumab, ponezumab, prasinezumab, quilizumab, ranevetmab, refanezumab, roledumab, romosozumab, rozanolixizumab, setrusumab, SHP647, solanezumab, stamulumab, suptavumab, sutimlimab, tanezumab, crovalimab, and lokivetmab;
[7045] VL4 comprises a light chain complementarity determining region 1 (LCDR1), LCDR2, and/or LCDR3 of an antibody selected from the group consisting of aducanumab, alirocumab, frovocimab, lodelcizumab, bococizumab, evolocumab, ralpancizumab, anifrolumab, atorolimumab, bapineuzumab, bedinvetmab, begelomab, biciromab, bimagrumab, birtamimab, blosozumab, burosumab, caplacizumab, concizumab, crenezumab, crizanlizumab, crotedumab, dezamizumab, domagrozumab, donanemab, eldelumab, elezanumab, emapalumab, emicizumab, eptinezumab, erenumab, evinacumab, faralimomab, fasinumab, fontolizumab, fremanezumab, frunevetmab, fulranumab, galcanezumab, gantenerumab, gosuranemab, idarucizumab, imciromab, inclacumab, lampalizumab, lanadelumab, landogrozumab, lecanemab, ligelizumab, marstacimab, mavrilimumab, morolimumab, NEOD001, omalizumab, oMS721, orticumab, otilimab, ozanezumab, ponezumab, prasinezumab, quilizumab, ranevetmab, refanezumab, roledumab, romosozumab, rozanolixizumab, setrusumab, SHP647, solanezumab, stamulumab, suptavumab, sutimlimab, tanezumab, crovalimab, and lokivetmab;
[7046] VH1 comprises a heavy chain complementarity determining region 1 (HCDR1), HCDR2, and/or HCDR3 of an antibody selected from the group consisting of aducanumab, alirocumab, frovocimab, lodelcizumab, bococizumab, evolocumab, ralpancizumab, anifrolumab, atorolimumab, bapineuzumab, bedinvetmab, begelomab, biciromab, bimagrumab, birtamimab, blosozumab, burosumab, caplacizumab, concizumab, crenezumab, crizanlizumab, crotedumab, dezamizumab, domagrozumab, donanemab, eldelumab, elezanumab, emapalumab, emicizumab, eptinezumab, erenumab, evinacumab, faralimomab, fasinumab, fontolizumab, fremanezumab, frunevetmab, fulranumab, galcanezumab, gantenerumab, gosuranemab, idarucizumab, imciromab, inclacumab, lampalizumab, lanadelumab, landogrozumab, lecanemab, ligelizumab, marstacimab, mavrilimumab, morolimumab, NEOD001, omalizumab, oMS721, orticumab, otilimab, ozanezumab, ponezumab, prasinezumab, quilizumab, ranevetmab, refanezumab, roledumab, romosozumab, rozanolixizumab, setrusumab, SHP647, solanezumab, stamulumab, suptavumab, sutimlimab, tanezumab, crovalimab, and lokivetmab;
[7047] VH2 comprises a heavy chain complementarity determining region 1 (HCDR1), HCDR2, and/or HCDR3 of an antibody selected from the group consisting of aducanumab, alirocumab, frovocimab, lodelcizumab, bococizumab, evolocumab, ralpancizumab, anifrolumab, atorolimumab, bapineuzumab, bedinvetmab, begelomab, biciromab, bimagrumab, birtamimab, blosozumab, burosumab, caplacizumab, concizumab, crenezumab, crizanlizumab, crotedumab, dezamizumab, domagrozumab, donanemab, eldelumab, elezanumab, emapalumab, emicizumab, eptinezumab, erenumab, evinacumab, faralimomab, fasinumab, fontolizumab, fremanezumab, frunevetmab, fulranumab, galcanezumab, gantenerumab, gosuranemab, idarucizumab, imciromab, inclacumab, lampalizumab, lanadelumab, landogrozumab, lecanemab, ligelizumab, marstacimab, mavrilimumab, morolimumab, NEOD001, omalizumab, oMS721, orticumab, otilimab, ozanezumab, ponezumab, prasinezumab, quilizumab, ranevetmab, refanezumab, roledumab, romosozumab, rozanolixizumab, setrusumab, SHP647, solanezumab, stamulumab, suptavumab, sutimlimab, tanezumab, crovalimab, and lokivetmab;
[7048] VH3 comprises a heavy chain complementarity determining region 1 (HCDR1), HCDR2, and/or HCDR3 of an antibody selected from the group consisting of aducanumab, alirocumab, frovocimab, lodelcizumab, bococizumab, evolocumab, ralpancizumab, anifrolumab, atorolimumab, bapineuzumab, bedinvetmab, begelomab, biciromab, bimagrumab, birtamimab, blosozumab, burosumab, caplacizumab, concizumab, crenezumab, crizanlizumab, crotedumab, dezamizumab, domagrozumab, donanemab, eldelumab, elezanumab, emapalumab, emicizumab, eptinezumab, erenumab, evinacumab, faralimomab, fasinumab, fontolizumab, fremanezumab, frunevetmab, fulranumab, galcanezumab, gantenerumab, gosuranemab, idarucizumab, imciromab, inclacumab, lampalizumab, lanadelumab, landogrozumab, lecanemab, ligelizumab, marstacimab, mavrilimumab, morolimumab, NEOD001, omalizumab, oMS721, orticumab, otilimab, ozanezumab, ponezumab, prasinezumab, quilizumab, ranevetmab, refanezumab, roledumab, romosozumab, rozanolixizumab, setrusumab, SHP647, solanezumab, stamulumab, suptavumab, sutimlimab, tanezumab, crovalimab, and lokivetmab; and/or
[7049] VH4 comprises a heavy chain complementarity determining region 1 (HCDR1), HCDR2, and/or HCDR3 of an antibody selected from the group consisting of aducanumab, alirocumab, frovocimab, lodelcizumab, bococizumab, evolocumab, ralpancizumab, anifrolumab, atorolimumab, bapineuzumab, bedinvetmab, begelomab, biciromab, bimagrumab, birtamimab, blosozumab, burosumab, caplacizumab, concizumab, crenezumab, crizanlizumab, crotedumab, dezamizumab, domagrozumab, donanemab, eldelumab, elezanumab, emapalumab, emicizumab, eptinezumab, erenumab, evinacumab, faralimomab, fasinumab, fontolizumab, fremanezumab, frunevetmab, fulranumab, galcanezumab, gantenerumab, gosuranemab, idarucizumab, imciromab, inclacumab, lampalizumab, lanadelumab, landogrozumab, lecanemab, ligelizumab, marstacimab, mavrilimumab, morolimumab, NEOD001, omalizumab, oMS721, orticumab, otilimab, ozanezumab, ponezumab, prasinezumab, quilizumab, ranevetmab, refanezumab, roledumab, romosozumab, rozanolixizumab, setrusumab, SHP647, solanezumab, stamulumab, suptavumab, sutimlimab, tanezumab, crovalimab, and lokivetmab; or
[7050] (ii)
[7051] VL1 comprises a VL of an antibody selected from the group consisting of aducanumab, alirocumab, frovocimab, lodelcizumab, bococizumab, evolocumab, ralpancizumab, anifrolumab, atorolimumab, bapineuzumab, bedinvetmab, begelomab, biciromab, bimagrumab, birtamimab, blosozumab, burosumab, caplacizumab, concizumab, crenezumab, crizanlizumab, crotedumab, dezamizumab, domagrozumab, donanemab, eldelumab, elezanumab, emapalumab, emicizumab, eptinezumab, erenumab, evinacumab, faralimomab, fasinumab, fontolizumab, fremanezumab, frunevetmab, fulranumab, galcanezumab, gantenerumab, gosuranemab, idarucizumab, imciromab, inclacumab, lampalizumab, lanadelumab, landogrozumab, lecanemab, ligelizumab, marstacimab, mavrilimumab, morolimumab, NEOD001, omalizumab, oMS721, orticumab, otilimab, ozanezumab, ponezumab, prasinezumab, quilizumab, ranevetmab, refanezumab, roledumab, romosozumab, rozanolixizumab, setrusumab, SHP647, solanezumab, stamulumab, suptavumab, sutimlimab, tanezumab, crovalimab, and lokivetmab;
[7052] VL2 comprises a VL of an antibody selected from the group consisting of aducanumab, alirocumab, frovocimab, lodelcizumab, bococizumab, evolocumab, ralpancizumab, anifrolumab, atorolimumab, bapineuzumab, bedinvetmab, begelomab, biciromab, bimagrumab, birtamimab, blosozumab, burosumab, caplacizumab, concizumab, crenezumab, crizanlizumab, crotedumab, dezamizumab, domagrozumab, donanemab, eldelumab, elezanumab, emapalumab, emicizumab, eptinezumab, erenumab, evinacumab, faralimomab, fasinumab, fontolizumab, fremanezumab, frunevetmab, fulranumab, galcanezumab, gantenerumab, gosuranemab, idarucizumab, imciromab, inclacumab, lampalizumab, lanadelumab, landogrozumab, lecanemab, ligelizumab, marstacimab, mavrilimumab, morolimumab, NEOD001, omalizumab, oMS721, orticumab, otilimab, ozanezumab, ponezumab, prasinezumab, quilizumab, ranevetmab, refanezumab, roledumab, romosozumab, rozanolixizumab, setrusumab, SHP647, solanezumab, stamulumab, suptavumab, sutimlimab, tanezumab, crovalimab, and lokivetmab;
[7053] VL3 comprises a VL of an antibody selected from the group consisting of aducanumab, alirocumab, frovocimab, lodelcizumab, bococizumab, evolocumab, ralpancizumab, anifrolumab, atorolimumab, bapineuzumab, bedinvetmab, begelomab, biciromab, bimagrumab, birtamimab, blosozumab, burosumab, caplacizumab, concizumab, crenezumab, crizanlizumab, crotedumab, dezamizumab, domagrozumab, donanemab, eldelumab, elezanumab, emapalumab, emicizumab, eptinezumab, erenumab, evinacumab, faralimomab, fasinumab, fontolizumab, fremanezumab, frunevetmab, fulranumab, galcanezumab, gantenerumab, gosuranemab, idarucizumab, imciromab, inclacumab, lampalizumab, lanadelumab, landogrozumab, lecanemab, ligelizumab, marstacimab, mavrilimumab, morolimumab, NEOD001, omalizumab, oMS721, orticumab, otilimab, ozanezumab, ponezumab, prasinezumab, quilizumab, ranevetmab, refanezumab, roledumab, romosozumab, rozanolixizumab, setrusumab, SHP647, solanezumab, stamulumab, suptavumab, sutimlimab, tanezumab, crovalimab, and lokivetmab;
[7054] VL4 comprises a VL of an antibody selected from the group consisting of aducanumab, alirocumab, frovocimab, lodelcizumab, bococizumab, evolocumab, ralpancizumab, anifrolumab, atorolimumab, bapineuzumab, bedinvetmab, begelomab, biciromab, bimagrumab, birtamimab, blosozumab, burosumab, caplacizumab, concizumab, crenezumab, crizanlizumab, crotedumab, dezamizumab, domagrozumab, donanemab, eldelumab, elezanumab, emapalumab, emicizumab, eptinezumab, erenumab, evinacumab, faralimomab, fasinumab, fontolizumab, fremanezumab, frunevetmab, fulranumab, galcanezumab, gantenerumab, gosuranemab, idarucizumab, imciromab, inclacumab, lampalizumab, lanadelumab, landogrozumab, lecanemab, ligelizumab, marstacimab, mavrilimumab, morolimumab, NEOD001, omalizumab, oMS721, orticumab, otilimab, ozanezumab, ponezumab, prasinezumab, quilizumab, ranevetmab, refanezumab, roledumab, romosozumab, rozanolixizumab, setrusumab, SHP647, solanezumab, stamulumab, suptavumab, sutimlimab, tanezumab, crovalimab, and lokivetmab;
[7055] VH1 comprises a VH of an antibody selected from the group consisting of aducanumab, alirocumab, frovocimab, lodelcizumab, bococizumab, evolocumab, ralpancizumab, anifrolumab, atorolimumab, bapineuzumab, bedinvetmab, begelomab, biciromab, bimagrumab, birtamimab, blosozumab, burosumab, caplacizumab, concizumab, crenezumab, crizanlizumab, crotedumab, dezamizumab, domagrozumab, donanemab, eldelumab, elezanumab, emapalumab, emicizumab, eptinezumab, erenumab, evinacumab, faralimomab, fasinumab, fontolizumab, fremanezumab, frunevetmab, fulranumab, galcanezumab, gantenerumab, gosuranemab, idarucizumab, imciromab, inclacumab, lampalizumab, lanadelumab, landogrozumab, lecanemab, ligelizumab, marstacimab, mavrilimumab, morolimumab, NEOD001, omalizumab, oMS721, orticumab, otilimab, ozanezumab, ponezumab, prasinezumab, quilizumab, ranevetmab, refanezumab, roledumab, romosozumab, rozanolixizumab, setrusumab, SHP647, solanezumab, stamulumab, suptavumab, sutimlimab, tanezumab, crovalimab, and lokivetmab;
[7056] VH2 comprises a VH of an antibody selected from the group consisting of aducanumab, alirocumab, frovocimab, lodelcizumab, bococizumab, evolocumab, ralpancizumab, anifrolumab, atorolimumab, bapineuzumab, bedinvetmab, begelomab, biciromab, bimagrumab, birtamimab, blosozumab, burosumab, caplacizumab, concizumab, crenezumab, crizanlizumab, crotedumab, dezamizumab, domagrozumab, donanemab, eldelumab, elezanumab, emapalumab, emicizumab, eptinezumab, erenumab, evinacumab, faralimomab, fasinumab, fontolizumab, fremanezumab, frunevetmab, fulranumab, galcanezumab, gantenerumab, gosuranemab, idarucizumab, imciromab, inclacumab, lampalizumab, lanadelumab, landogrozumab, lecanemab, ligelizumab, marstacimab, mavrilimumab, morolimumab, NEOD001, omalizumab, oMS721, orticumab, otilimab, ozanezumab, ponezumab, prasinezumab, quilizumab, ranevetmab, refanezumab, roledumab, romosozumab, rozanolixizumab, setrusumab, SHP647, solanezumab, stamulumab, suptavumab, sutimlimab, tanezumab, crovalimab, and lokivetmab;
[7057] VH3 comprises a VH of an antibody selected from the group consisting of aducanumab, alirocumab, frovocimab, lodelcizumab, bococizumab, evolocumab, ralpancizumab, anifrolumab, atorolimumab, bapineuzumab, bedinvetmab, begelomab, biciromab, bimagrumab, birtamimab, blosozumab, burosumab, caplacizumab, concizumab, crenezumab, crizanlizumab, crotedumab, dezamizumab, domagrozumab, donanemab, eldelumab, elezanumab, emapalumab, emicizumab, eptinezumab, erenumab, evinacumab, faralimomab, fasinumab, fontolizumab, fremanezumab, frunevetmab, fulranumab, galcanezumab, gantenerumab, gosuranemab, idarucizumab, imciromab, inclacumab, lampalizumab, lanadelumab, landogrozumab, lecanemab, ligelizumab, marstacimab, mavrilimumab, morolimumab, NEOD001, omalizumab, oMS721, orticumab, otilimab, ozanezumab, ponezumab, prasinezumab, quilizumab, ranevetmab, refanezumab, roledumab, romosozumab, rozanolixizumab, setrusumab, SHP647, solanezumab, stamulumab, suptavumab, sutimlimab, tanezumab, crovalimab, and lokivetmab; and/or VH4 comprises a VH of an antibody selected from the group consisting of aducanumab, alirocumab, frovocimab, lodelcizumab, bococizumab, evolocumab, ralpancizumab, anifrolumab, atorolimumab, bapineuzumab, bedinvetmab, begelomab, biciromab, bimagrumab, birtamimab, blosozumab, burosumab, caplacizumab, concizumab, crenezumab, crizanlizumab, crotedumab, dezamizumab, domagrozumab, donanemab, eldelumab, elezanumab, emapalumab, emicizumab, eptinezumab, erenumab, evinacumab, faralimomab, fasinumab, fontolizumab, fremanezumab, frunevetmab, fulranumab, galcanezumab, gantenerumab, gosuranemab, idarucizumab, imciromab, inclacumab, lampalizumab, lanadelumab, landogrozumab, lecanemab, ligelizumab, marstacimab, mavrilimumab, morolimumab, NEOD001, omalizumab, oMS721, orticumab, otilimab, ozanezumab, ponezumab, prasinezumab, quilizumab, ranevetmab, refanezumab, roledumab, romosozumab, rozanolixizumab, setrusumab, SHP647, solanezumab, stamulumab, suptavumab, sutimlimab, tanezumab, crovalimab, and lokivetmab; or
[7058] (iii)
[7059] VL1 comprises (i) a complementarity determining region (CDR) 1 having an amino acid sequence that is at least 65%, at least 70%, at least 75%, at least 80%, at least 85%, at least 90%, at least 95%, at least 99%, or 100% identical to any one of SEQ ID NOs: 1120, 1228, 1359, 1519, 1831, 1838, 1845, 1852, 1859, 1866, 1872, 1878, 1885, 1891, 1898, 1905, 1911, 1917, 1924, 1931, 1938, 1945, and 1963; (ii) a CDR2 having an amino acid sequence that is at least 65%, at least 70%, at least 75%, at least 80%, at least 85%, at least 90%, at least 95%, at least 99%, or 100% identical to any one of amino acid sequences AAS, AVS, DAS, DNN, EDN, EVS, GAS, GNG, KAS, KVS, LVS, NTD, STS, WAS, and YTS; and (iii) a CDR3 having an amino acid sequence that is at least 65%, at least 70%, at least 75%, at least 80%, at least 85%, at least 90%, at least 95%, at least 99%, or 100% identical to any one of SEQ ID NOs: 1360, 1832, 1839, 1846, 1853, 1860, 1867, 1873, 1879, 1886, 1892, 1899, 1906, 1912, 1918, 1925, 1932, 1939, 1946, 1951, 1957, 1964, and 1970;
[7060] VL2 comprises (i) a complementarity determining region (CDR) 1 having an amino acid sequence that is at least 65%, at least 70%, at least 75%, at least 80%, at least 85%, at least 90%, at least 95%, at least 99%, or 100% identical to any one of SEQ ID NOs: 1120, 1228, 1359, 1519, 1831, 1838, 1845, 1852, 1859, 1866, 1872, 1878, 1885, 1891, 1898, 1905, 1911, 1917, 1924, 1931, 1938, 1945, and 1963; (ii) a CDR2 having an amino acid sequence that is at least 65%, at least 70%, at least 75%, at least 80%, at least 85%, at least 90%, at least 95%, at least 99%, or 100% identical to any one of amino acid sequences AAS, AVS, DAS, DNN, EDN, EVS, GAS, GNG, KAS, KVS, LVS, NTD, STS, WAS, and YTS; and (iii) a CDR3 having an amino acid sequence that is at least 65%, at least 70%, at least 75%, at least 80%, at least 85%, at least 90%, at least 95%, at least 99%, or 100% identical to any one of SEQ ID NOs: 1360, 1832, 1839, 1846, 1853, 1860, 1867, 1873, 1879, 1886, 1892, 1899, 1906, 1912, 1918, 1925, 1932, 1939, 1946, 1951, 1957, 1964, and 1970;
[7061] VL3 comprises (i) a complementarity determining region (CDR) 1 having an amino acid sequence that is at least 65%, at least 70%, at least 75%, at least 80%, at least 85%, at least 90%, at least 95%, at least 99%, or 100% identical to any one of SEQ ID NOs: 1120, 1228, 1359, 1519, 1831, 1838, 1845, 1852, 1859, 1866, 1872, 1878, 1885, 1891, 1898, 1905, 1911, 1917, 1924, 1931, 1938, 1945, and 1963; (ii) a CDR2 having an amino acid sequence that is at least 65%, at least 70%, at least 75%, at least 80%, at least 85%, at least 90%, at least 95%, at least 99%, or 100% identical to any one of amino acid sequences AAS, AVS, DAS, DNN, EDN, EVS, GAS, GNG, KAS, KVS, LVS, NTD, STS, WAS, and YTS; and (iii) a CDR3 having an amino acid sequence that is at least 65%, at least 70%, at least 75%, at least 80%, at least 85%, at least 90%, at least 95%, at least 99%, or 100% identical to any one of SEQ ID NOs: 1360, 1832, 1839, 1846, 1853, 1860, 1867, 1873, 1879, 1886, 1892, 1899, 1906, 1912, 1918, 1925, 1932, 1939, 1946, 1951, 1957, 1964, and 1970;
[7062] VL4 comprises (i) a complementarity determining region (CDR) 1 having an amino acid sequence that is at least 65%, at least 70%, at least 75%, at least 80%, at least 85%, at least 90%, at least 95%, at least 99%, or 100% identical to any one of SEQ ID NOs: 1120, 1228, 1359, 1519, 1831, 1838, 1845, 1852, 1859, 1866, 1872, 1878, 1885, 1891, 1898, 1905, 1911, 1917, 1924, 1931, 1938, 1945, and 1963; (ii) a CDR2 having an amino acid sequence that is at least 65%, at least 70%, at least 75%, at least 80%, at least 85%, at least 90%, at least 95%, at least 99%, or 100% identical to any one of amino acid sequences AAS, AVS, DAS, DNN, EDN, EVS, GAS, GNG, KAS, KVS, LVS, NTD, STS, WAS, and YTS; and (iii) a CDR3 having an amino acid sequence that is at least 65%, at least 70%, at least 75%, at least 80%, at least 85%, at least 90%, at least 95%, at least 99%, or 100% identical to any one of SEQ ID NOs: 1360, 1832, 1839, 1846, 1853, 1860, 1867, 1873, 1879, 1886, 1892, 1899, 1906, 1912, 1918, 1925, 1932, 1939, 1946, 1951, 1957, 1964, and 1970;
[7063] VH1 comprises (i) a complementarity determining region (CDR) 1 having an amino acid sequence that is at least 65%, at least 70%, at least 75%, at least 80%, at least 85%, at least 90%, at least 95%, at least 99%, or 100% identical to any one of SEQ ID NOs: 1309, 1362, 1437, 1552, 1618, 1639, 1834, 1841, 1848, 1855, 1862, 1881, 1894, 1901, 1920, 1927, 1934, 1941, 1953, 1959, and 1966; (ii) a CDR2 having an amino acid sequence that is at least 65%, at least 70%, at least 75%, at least 80%, at least 85%, at least 90%, at least 95%, at least 99%, or 100% identical to any one of SEQ ID NOs: 1363, 1835, 1842, 1849, 1856, 1863, 1869, 1875, 1882, 1888, 1895, 1902, 1908, 1914, 1921, 1928, 1935, 1942, 1948, 1954, 1960, 1967, and 1972; and (iii) a CDR3 having an amino acid sequence that is at least 65%, at least 70%, at least 75%, at least 80%, at least 85%, at least 90%, at least 95%, at least 99%, or 100% identical to any one of SEQ ID NOs: 1364, 1836, 1843, 1850, 1857, 1864, 1870, 1876, 1883, 1889, 1896, 1903, 1909, 1915, 1922, 1929, 1936, 1943, 1949, 1955, 1961, 1968, and 1973;
[7064] VH2 comprises (i) a complementarity determining region (CDR) 1 having an amino acid sequence that is at least 65%, at least 70%, at least 75%, at least 80%, at least 85%, at least 90%, at least 95%, at least 99%, or 100% identical to any one of SEQ ID NOs: 1309, 1362, 1437, 1552, 1618, 1639, 1834, 1841, 1848, 1855, 1862, 1881, 1894, 1901, 1920, 1927, 1934, 1941, 1953, 1959, and 1966; (ii) a CDR2 having an amino acid sequence that is at least 65%, at least 70%, at least 75%, at least 80%, at least 85%, at least 90%, at least 95%, at least 99%, or 100% identical to any one of SEQ ID NOs: 1363, 1835, 1842, 1849, 1856, 1863, 1869, 1875, 1882, 1888, 1895, 1902, 1908, 1914, 1921, 1928, 1935, 1942, 1948, 1954, 1960, 1967, and 1972; and (iii) a CDR3 having an amino acid sequence that is at least 65%, at least 70%, at least 75%, at least 80%, at least 85%, at least 90%, at least 95%, at least 99%, or 100% identical to any one of SEQ ID NOs: 1364, 1836, 1843, 1850, 1857, 1864, 1870, 1876, 1883, 1889, 1896, 1903, 1909, 1915, 1922, 1929, 1936, 1943, 1949, 1955, 1961, 1968, and 1973;
[7065] VH3 comprises (i) a complementarity determining region (CDR) 1 having an amino acid sequence that is at least 65%, at least 70%, at least 75%, at least 80%, at least 85%, at least 90%, at least 95%, at least 99%, or 100% identical to any one of SEQ ID NOs: 1309, 1362, 1437, 1552, 1618, 1639, 1834, 1841, 1848, 1855, 1862, 1881, 1894, 1901, 1920, 1927, 1934, 1941, 1953, 1959, and 1966; (ii) a CDR2 having an amino acid sequence that is at least 65%, at least 70%, at least 75%, at least 80%, at least 85%, at least 90%, at least 95%, at least 99%, or 100% identical to any one of SEQ ID NOs: 1363, 1835, 1842, 1849, 1856, 1863, 1869, 1875, 1882, 1888, 1895, 1902, 1908, 1914, 1921, 1928, 1935, 1942, 1948, 1954, 1960, 1967, and 1972; and (iii) a CDR3 having an amino acid sequence that is at least 65%, at least 70%, at least 75%, at least 80%, at least 85%, at least 90%, at least 95%, at least 99%, or 100% identical to any one of SEQ ID NOs: 1364, 1836, 1843, 1850, 1857, 1864, 1870, 1876, 1883, 1889, 1896, 1903, 1909, 1915, 1922, 1929, 1936, 1943, 1949, 1955, 1961, 1968, and 1973; and/or
[7066] VH4 comprises (i) a complementarity determining region (CDR) 1 having an amino acid sequence that is at least 65%, at least 70%, at least 75%, at least 80%, at least 85%, at least 90%, at least 95%, at least 99%, or 100% identical to any one of SEQ ID NOs: 1309, 1362, 1437, 1552, 1618, 1639, 1834, 1841, 1848, 1855, 1862, 1881, 1894, 1901, 1920, 1927, 1934, 1941, 1953, 1959, and 1966; (ii) a CDR2 having an amino acid sequence that is at least 65%, at least 70%, at least 75%, at least 80%, at least 85%, at least 90%, at least 95%, at least 99%, or 100% identical to any one of SEQ ID NOs: 1363, 1835, 1842, 1849, 1856, 1863, 1869, 1875, 1882, 1888, 1895, 1902, 1908, 1914, 1921, 1928, 1935, 1942, 1948, 1954, 1960, 1967, and 1972; and (iii) a CDR3 having an amino acid sequence that is at least 65%, at least 70%, at least 75%, at least 80%, at least 85%, at least 90%, at least 95%, at least 99%, or 100% identical to any one of SEQ ID NOs: 1364, 1836, 1843, 1850, 1857, 1864, 1870, 1876, 1883, 1889, 1896, 1903, 1909, 1915, 1922, 1929, 1936, 1943, 1949, 1955, 1961, 1968, and 1973; or
[7067] (iv)
[7068] VL1 comprises an amino acid sequence that is at least 65%, at least 70%, at least 75%, at least 80%, at least 85%, at least 90%, at least 95%, at least 99%, or 100% identical to any one of SEQ ID NOs: 1361, 1833, 1840, 1847, 1854, 1861, 1868, 1874, 1880, 1887, 1893, 1900, 1907, 1913, 1919, 1926, 1933, 1940, 1947, 1952, 1958, 1965, and 1971;
[7069] VL2 comprises an amino acid sequence that is at least 65%, at least 70%, at least 75%, at least 80%, at least 85%, at least 90%, at least 95%, at least 99%, or 100% identical to any one of SEQ ID NOs: 1361, 1833, 1840, 1847, 1854, 1861, 1868, 1874, 1880, 1887, 1893, 1900, 1907, 1913, 1919, 1926, 1933, 1940, 1947, 1952, 1958, 1965, and 1971;
[7070] VL3 comprises an amino acid sequence that is at least 65%, at least 70%, at least 75%, at least 80%, at least 85%, at least 90%, at least 95%, at least 99%, or 100% identical to any one of SEQ ID NOs: 1361, 1833, 1840, 1847, 1854, 1861, 1868, 1874, 1880, 1887, 1893, 1900, 1907, 1913, 1919, 1926, 1933, 1940, 1947, 1952, 1958, 1965, and 1971;
[7071] VL4 comprises an amino acid sequence that is at least 65%, at least 70%, at least 75%, at least 80%, at least 85%, at least 90%, at least 95%, at least 99%, or 100% identical to any one of SEQ ID NOs: 1361, 1833, 1840, 1847, 1854, 1861, 1868, 1874, 1880, 1887, 1893, 1900, 1907, 1913, 1919, 1926, 1933, 1940, 1947, 1952, 1958, 1965, and 1971;
[7072] VH1 comprises an amino acid sequence that is at least 65%, at least 70%, at least 75%, at least 80%, at least 85%, at least 90%, at least 95%, at least 99%, or 100% identical to any one of SEQ ID NOs: 1365, 1837, 1844, 1851, 1858, 1865, 1871, 1877, 1884, 1890, 1897, 1904, 1910, 1916, 1923, 1930, 1937, 1944, 1950, 1956, 1962, 1969, and 1974;
[7073] VH2 comprises an amino acid sequence that is at least 65%, at least 70%, at least 75%, at least 80%, at least 85%, at least 90%, at least 95%, at least 99%, or 100% identical to any one of SEQ ID NOs: 1365, 1837, 1844, 1851, 1858, 1865, 1871, 1877, 1884, 1890, 1897, 1904, 1910, 1916, 1923, 1930, 1937, 1944, 1950, 1956, 1962, 1969, and 1974;
[7074] VH3 comprises an amino acid sequence that is at least 65%, at least 70%, at least 75%, at least 80%, at least 85%, at least 90%, at least 95%, at least 99%, or 100% identical to any one of SEQ ID NOs: 1365, 1837, 1844, 1851, 1858, 1865, 1871, 1877, 1884, 1890, 1897, 1904, 1910, 1916, 1923, 1930, 1937, 1944, 1950, 1956, 1962, 1969, and 1974; and/or
[7075] VH4 comprises an amino acid sequence that is at least 65%, at least 70%, at least 75%, at least 80%, at least 85%, at least 90%, at least 95%, at least 99%, or 100% identical to any one of SEQ ID NOs: 1365, 1837, 1844, 1851, 1858, 1865, 1871, 1877, 1884, 1890, 1897, 1904, 1910, 1916, 1923, 1930, 1937, 1944, 1950, 1956, 1962, 1969, and 1974.

[7076] In some aspects, one or both of the antigen binding polypeptides comprised in the antigen binding polypeptide complexes disclosed herein, comprise one or more CL, as indicated in the formulas representing the antigen binding polypeptide complexes disclosed herein. In some aspects, the CL comprises an amino acid sequence at least 65%, at least 70%, at least 75%, at least 80%, at least 85%, at least 90%, at least 95%, at least 99%, or 100% identical to any one of SEQ ID NOs: 374, 637, or 1092-1095.

[7077] In some aspects, one or both of the antigen binding polypeptides comprised in the antigen binding polypeptide complexes disclosed herein, comprise one or more CH1, as indicated in the formulas representing the antigen binding polypeptide complexes disclosed herein. In some aspects, the CH1 comprises an amino acid sequence at least 65%, at least 70%, at least 75%, at least 80%, at least 85%, at least 90%, at least 95%, at least 99%, or 100% identical to any one of SEQ ID NOs: 375, 634, 1070, 1071, or 1086-1091.

[7078] In some aspects, one or both of the antigen binding polypeptides comprised in the antigen binding polypeptide complexes provided herein further comprise an Fc region. In some aspects, one or both of the antigen binding polypeptides comprised in the antigen binding polypeptide complexes provided herein further comprise an Fc region at the carboxy-terminus. In some aspects, the Fc region comprises an immunoglobulin heavy chain constant region 2 (CH2) and/or an immunoglobulin heavy chain constant region 3 (CH3). In some aspects, the Fc region further comprises an immunoglobulin hinge (i.e., a hinge region). In some aspects, the hinge region is interposed between a CH1 and a CH2 (i.e., a hinge region is localized between the carboxy terminal residue of a CH1 and the N-terminal residue of a CH2). In some aspects, the hinge region comprises an amino acid sequence at least 65%, at least 70%, at least 75%, at least 80%, at least 85%, at least 90%, at least 95%, at least 99%, or 100% identical to any one of SEQ ID NOs: 635, 636, 1072, 1073, or 1074. In some aspects, the Fc region comprises a CH2 and a CH3. In some aspects, the CH2 comprises an amino acid sequence that is at least 65%, at least 70%, at least 75%, at least 80%, at least 85%, at least 90%, at least 95%, at least 99%, or 100% identical to any one of SEQ ID NOs: 1075-1078. In some aspects, the CH3 comprises an amino acid sequence that is at least 65%, at least 70%, at least 75%, at least 80%, at least 85%, at least 90%, at least 95%, at least 99%, or 100% identical to any one of SEQ ID NOs: 1079-1085. In some aspects, the Fc region comprises an amino acid sequence that is at least 65%, at least 70%, at least 75%, at least 80%, at least 85%, at least 90%, at least 95%, at least 99%, or 100% identical to any one of SEQ ID NOs: 376-380.

[7079] In some aspects, the Fc region comprises one or more amino acid substitutions. In some aspects, the one or more amino acid substitutions comprise one or more half-life extension amino acid substitutions. In some aspects, the one or more half-life extension amino acid substitutions comprise one or more of amino acid substitutions M428L, N434A, N434S, L234F, L235E, P331S, M252Y, S254T, or T256E, or equivalent thereof, based on the EU numbering scheme. In some aspects, the one or more half-life extension amino acid substitutions comprise a LA (M428L and N434A, or equivalent thereof, based on the EU numbering scheme) amino acid substitution. In some aspects, the one or more half-life extension amino acid substitutions comprise a LS (M428L and N434S, or equivalent thereof, based on the EU numbering scheme) amino acid substitution. In some aspects, the one or more half-life extension amino acid substitutions comprise L234F and L235E, or equivalent thereof (based on the EU numbering scheme) amino acid substitutions. In some aspects, the one or more half-life extension amino acid substitutions comprise a TM (L234F, L235E, and P331S, or equivalent thereof, based on the EU numbering scheme) amino acid substitution. In some aspects, the one or more half-life extension amino acid substitutions comprise a YTE (M252Y, S254T, and T256E, or equivalent thereof, based on the EU numbering scheme) amino acid substitution.

[7080] In some aspects, the Fc region comprises at least one knob-into-hole modification. In some aspects, the antigen binding polypeptides complexes disclosed herein are IgG1 or IgG4 antibodies or antigen binding fragments thereof. In some aspects, the knob-into-hole modification comprises one or more of knob substitutions of S354C and T366W, or equivalent thereof, and/or one or more of hole substitutions of Y349C, T366S, L368A, Y407V, or equivalent thereof, or a combination thereof, based on the EU numbering scheme. In some aspects, the Fc region comprises a knob-into-hole modification comprising knob substitutions of S354C and T366W, or equivalent thereof, and/or hole substitutions of Y349C, T366S, L368A, and Y407V, or equivalent thereof, and/or a half-life extension amino acid substitution comprising: a LA (M428L and N434A, or equivalent thereof, based on the EU numbering scheme) amino acid substitution, a LS (M428L and N434S, or equivalent thereof, based on the EU numbering scheme) amino acid substitution. L234F and L235E, or equivalent thereof (based on the EU numbering scheme) amino acid substitutions, a TM (L234F, L235E, and P331S, or equivalent thereof, based on the EU numbering scheme) amino acid substitution, a YTE (M252Y, S254T, and T256E, or equivalent thereof, based on the EU numbering scheme) amino acid substitution, or any combination thereof.

[7081] In some aspects, the Fc region comprises knob substitutions of S354C and T366W, or equivalent thereof, and a half-life extension amino acid substitution comprising: a LA (M428L and N434A, or equivalent thereof, based on the EU numbering scheme) amino acid substitution, a LS (M428L and N434S, or equivalent thereof, based on the EU numbering scheme) amino acid substitution. L234F and L235E, or equivalent thereof (based on the EU numbering scheme) amino acid substitutions, a TM (L234F, L235E, and P331S, or equivalent thereof, based on the EU numbering scheme) amino acid substitution, a YTE (M252Y, S254T, and T256E, or equivalent thereof, based on the EU numbering scheme) amino acid substitution, or any combination thereof.

[7082] In some aspects, the Fc region comprises hole substitutions of Y349C, T366S, L368A, and Y407V, or equivalent thereof, and a half-life extension amino acid substitution comprising: a LA (M428L and N434A, or equivalent thereof, based on the EU numbering scheme) amino acid substitution, a LS (M428L and N434S, or equivalent thereof, based on the EU numbering scheme) amino acid substitution. L234F and L235E, or equivalent thereof (based on the EU numbering scheme) amino acid substitutions, a TM (L234F, L235E, and P331S, or equivalent thereof, based on the EU numbering scheme) amino acid substitution, a YTE (M252Y, S254T, and T256E, or equivalent thereof, based on the EU numbering scheme) amino acid substitution, or any combination thereof.

[7083] In some aspects, one or both of the antigen binding polypeptides comprised in the antigen binding polypeptide complexes disclosed herein comprise one or more Fc effector function knockout mutation. In some aspects, one or both of the antigen binding polypeptides comprised in the antigen binding polypeptide complexes disclosed herein are IgG1 or IgG4 antibodies or antigen binding fragments thereof. In some aspects, the Fc effector function knockout mutation is L234A, L235A, P239A, or equivalent thereof, or a combination thereof, based on the EU numbering scheme.

[7084] In some aspects, one or both of the antigen binding polypeptides comprised in the antigen binding polypeptide complexes disclosed herein comprise a mutation at a glycosylation site. In some aspects, the mutation at a glycosylation site is a mutation at an N-glycosylation site. In some aspects, one or both of the antigen binding polypeptides comprised in the antigen binding polypeptide complexes disclosed herein comprise a VH comprising a mutation at a glycosylation site. In some aspects, the mutation at a glycosylation site is a mutation at an N-glycosylation site. In some aspects, the mutation at an N-glycosylation site is at amino acid N62, or equivalent thereof, of the VH region or equivalent thereof. In some aspects, the mutation at an N-glycosylation site at amino acid N62 is N62Q or N62S, or equivalent thereof.

[7085] In some aspects, one or both of the antigen binding polypeptides comprised in the antigen binding polypeptide complexes disclosed herein, comprise one or more optional linkers. The one or more optional linkers are indicated herein as Ln, wherein n is an integer, and the integer next to each L indicates each L comprised in the antigen binding polypeptides comprised in the antigen binding polypeptide complexes disclosed herein. For example, if an antigen binding polypeptide comprised in the antigen binding polypeptide complexes disclosed herein comprises two linkers, the first linker from N-terminus to C-terminus is herein indicated as L1, and the second linker from N-terminus to C-terminus is herein indicated as L2. If an antigen binding polypeptide complex disclosed herein comprises a first antigen binding polypeptide comprising two linkers, indicated herein as L1 and L2, as explained above, the linkers comprised in the second antigen binding polypeptide are indicated with the following integer, in this example, the first linker from N-terminus to C-terminus of the second antigen binding polypeptide is herein indicated as L3, the second linker from N-terminus to C-terminus of the second antigen binding polypeptide is herein indicated as L3. In some aspects, any one of the optional linkers each independently have a length of from 0 amino acids to about 50 amino acids. In some aspects, any one of the optional linkers each independently have a length of from 5 amino acids to about 40 amino acids.

[7086] In some aspects, any one of the optional linkers are non-immunogenic. In some aspects, any one of the optional linkers do not contain a consensus T cell epitope.

[7087] In some aspects, any of Ln comprises an amino acid sequence of G or A, or an amino acid sequence at least 65%, at least 70%, at least 75%, at least 80%, at least 85%, at least 90%, at least 95%, at least 99%, or 100% identical to amino acid sequence GSS or ASG, or an amino acid sequence at least 65%, at least 70%, at least 75%, at least 80%, at least 85%, at least 90%, at least 95%, at least 99%, or 100% identical to any one of SEQ ID NOs: 333-373 and 967-971. In some aspects. Ln comprises an amino acid sequence at least 65%, at least 70%, at least 75%, at least 80%, at least 85%, at least 90%, at least 95%, at least 99%, or 100% identical to any one of SEQ ID NOs: 333-345 and 967-971.

[7088] In some aspects, the first polypeptide comprises a structure represented by VL1-VL2-CH1; VL1-L1-VL2-L2-CH1; VL1-VL2-CH1-CH2-CH3; or VL1-L1-VL2-L2-CH1-CH2-CH3 and the second polypeptide comprises a structure represented by VH1-VH2-CL; VH1-L3-VH2-L4-CL; VH1-VH2-CL-CH2-CH3; or VH1-L3-VH2-L4-CL-CH2-CH3,
[7089] wherein:
[7090] (a)
[7091] (i)
[7092] VL1 comprises a light chain complementarity determining region 1 (LCDR1), LCDR2, and/or LCDR3 of an antibody selected from the group consisting of losatuxizumab vedotin, utomilumab, urelumab, oleclumab, naptumomab estafenatox, ascrinvacumab, pintumomab, tacatuzumab tetraxetan, nesvacumab, vanucizumab, timolumab, vapaliximab, vepalimomab, enapotamab vedotin, ianalumab, belimumab, tabalumab, tibulizumab, belantamab mafodotin, teclistamab, teclistamab, detumomab, nacolomab tafenatox, eculizumab, lendalizumab, pexelizumab, pozelimab, ravulizumab, tesidolumab, vilobelimab, abagovomab, igovomab, oregovomab, sofituzumab vedotin, cantuzumab mertansine, cantuzuma bravtansine, girentuximab, altumomab pentetate, arcitumomab, besilesomab, bertilimumab, plozalizumab, mogamulizumab, leronlimab, PRO140, rovelizumab, rovelizumab, talacotuzumab, benralizumab, tavolimab, vonlerolizumab, gavilimomab, ziralimumab, fanolesomab, ipilimumab, ruplizumab, toralizumab, dapirolizumab pegol, toralizumab, dapirolizumab pegol, ruplizumab, blinatumomab, inebilizumab, loncastuximab tesirine, SGN-CD19A, tafasitamab, taplitumomab paptox, XMAB-5574, Budoprutug, Obexelimab, duvortuxizumab, englumafusp alfa, Emfizatamab, zeripatamig, siplizumab, blontuvetmab, FBTA05, ibritumomab tiuxetan, obinutuzumab, ocaratuzumab, ocrelizumab, ofatumumab, rituximab, tositumomab, ublituximab, veltuzumab, divozilimab, eramkafusp alfa, ripertamab, zuberitamab, glofitamab, nofetumomab merpentan, samalizumab, imvotamab, odronextamab, plamotamab, bectumomab, inotuzumab ozogamicin, moxetumomab pasudotox, pinatuzumab vedotin, gomiliximab, lumiliximab, inolimomab, inolimomab, daclizumab, camidanluma btesirine, basiliximab, varlilumab, omburtamab, enoblituzumab, vopratelimab, lulizumabpegol, TGN1412, muromonab-CD3, otelixizumab, teplizumab, visilizumab, epcoritamab, epcoritamab, brentuximab vedotin, iratumumab, azintuxizumab vedotin, gemtuzumab ozogamicin, lintuzumab, vadastuximab talirine, naratuximab emtansine, otlertuzumab, lilotomab satetraxetan, tetulomab, daratumumab, isatuximab, foralumab, mosunetuzumab, mosunetuzumab, cedelizumab, ibalizumab, keliximab, priliximab, tregalizumab, zanolimumab, bleselumab, iscalimab, lucatumumab, ravagalimab, selicrelumab, teneliximab, vanalimab, abciximab, bivatuzumab, iomab-B, telimomab aritox, zolimomab aritox, abituzumab, intetumumab, alemtuzumab, tamtuvetmab, lorvotuzumab mertansine, itolizumab, cusatuzumab, vorsetuzumab mafodotin, milatuzumab, iladatuzumab vedotin, polatuzumab vedotin, galiximab, cibisatamab, zolbetuximab, naxitamab, tisotumab vedotin, olendalizumab, pamrevlumab, lacnotuzumab, cabiralizumab, emactuzumab, axatilimab, gimsilumab, lenzilumab, namilumab, tremelimumab, ulocuplumab, tepoditamab, rovalpituzumab tesirine, tarlatamab, demcizumab, navicixizumab, drozitumab, parsatuzumab, depatuxizumab mafodotin, modotuximab, carotuximab, adecatumumab, adecatumumab, oportuzumab monatox, solitomab, tucotuzumab celmoleukin, edrecolomab, catumaxomab, ifabotuzumab, fibatuzumab, zalutumumab, panitumumab, cetuximab, futuximab, imgatuzumab, laprituximab emtansine, matuzumab, necitumumab, nimotuzumab, tomuzotuximab, amivantamab, amivantamab, epitumomab cituxetan, sontuzumab, duligotuzumab, elgemtumab, lumretuzumab, patritumab, seribantumab, zenocutuzumab, sibrotuzumab, burosumab, aprutumab ixadotin, radretumab, pasotuxizumab, farletuzumab, mirvetuximab soravtansine, vantictumab, TRBS07, 3F8, dinutuximab, dinutuximab beta, ecromeximab, mitumomab, andecaliximab, capromab, codrituzumab, glembatumumab vedotin, talquetamab, talquetamab, trevogrumab, indusatumab vedotin, ficlatuzumab, rilotumumab, zatuximab, pentuzimab, pentuzimab, margetuximab, timigutuzumab, trastuzumab, trastuzumab duocarmazine, trastuzumab emtansine, gancotamab, pertuzumab, ertumaxomab, emibetuzumab, telisotuzumab, telisotuzumab vedotin, derlotuximab biotin, apolizumab, onartuzumab, bersanlimab, enlimomabpegol, rontalizumab, sifalimumab, talizumab, ganitumab, istiratumab, robatumumab, teprotumumab, figitumumab, ganitumab, istiratumab, robatumumab, teprotumumab, cixutumumab, dalotuzumab, xentuzumab, dusigitumab, canakinumab, ustekinumab, ustekinumab, ustekinumab, briakinumab, briakinumab, abrezekimab, lebrikizumab, romilkimab, TNX-650, tralokinumab, anrukinzumab, brodalumab, ixekizumab, netakimab, perakizumab, secukinumab, vunakizumab, afasevikumab, afasevikumab, bimekizumab, bimekizumab, remtolumab, bermekimab, lutikizumab, lutikizumab, gevokizumab, cergutuzumab amunaleukin, fletikumab, fezakinumab, brazikumab, guselkumab, mirikizumab, tildrakizumab, risankizumab, flotetuzumab, nemolizumab, pascolizumab, dupilumab, mepolizumab, reslizumab, clazakizumab, elsilimomab, olokizumab, sarilumab, siltuximab, sirukumab, vobarilizumab, tocilizumab, SA237, satralizumab, enokizumab, prezalizumab, natalizumab, abrilumab, abrilumab, vedolizumab, volociximab, tadocizumab, etaracizumab, etrolizumab, spesolimab, vatelizumab, erlizumab, lirilumab, relatlimab, cBR96-doxorubicinimmunoconjugate, odulimomab, efalizumab, ladiratuzumab vedotin, simtuzumab, samrotamab vedotin, aselizumab, lupartumab amadotin, imalumab, carlumab, imaprelimab, amatuximab, amatuximab, anetumab ravtansine, narnatumab, clivatuzumab tetraxetan, pemtumomab, gatipotuzumab, ensituximab, lemalesomab, sulesomab, enfortumab vedotin, racotumomab, monalizumab, brontictuzumab, tarextumab, vesencumab, oxelumab, gilvetmab, tislelizumab, dostarlimab, BCD-100, nivolumab, PDR001, pembrolizumab, pidilizumab, retifanlimab, spartalizumab, sintilimab, cemiplimab, olaratumab, tovetumab, rinucumab, atezolizumab, avelumab, durvalumab, lifastuzumab vedotin, bavituximab, acapatamab, capromab, rosopatamab, nezastomig, pasotuxizumab, pelgifatamab, voxalatamab, cofetuzumab pelidotin, denosumab, rosmantuzumab, cirmtuzumab, atinumab, indatuximab ravtansine, elotuzumab, sirtratumab vedotin, sonepcizumab, vandortuzumab vedotin, minretumomab, satumomab pendetide, maslimomab, ontuxizumab, tenatumomab, fresolimumab, metelimumab, lerdelimumab, tezepelumab, etigilimab, tiragotumab, placulumab, prezalumab, infliximab, nerelimomab, ozoralizumab, adalimumab, afelimomab, certolizumab pegol, golimumab, mapatumumab, conatumumab, lexatumumab, tigatuzumab, sacituzumab govitecan, votumumab, pogalizumab, letolizumab, pankomab, anatumomab mafenatox, enavatuzumab, flanvotumab, brolucizumab, ranibizumab, varisacumab, bevacizumab, faricimab, icrucumab, alacizumab pegol, ramucirumab, pritumumab, and onvatilimab;
[7093] VL2 comprises a light chain complementarity determining region 1 (LCDR1), LCDR2, and/or LCDR3 of an antibody selected from the group consisting of losatuxizumab vedotin, utomilumab, urelumab, oleclumab, naptumomab estafenatox, ascrinvacumab, pintumomab, tacatuzumab tetraxetan, nesvacumab, vanucizumab, timolumab, vapaliximab, vepalimomab, enapotamab vedotin, ianalumab, belimumab, tabalumab, tibulizumab, belantamab mafodotin, teclistamab, teclistamab, detumomab, nacolomab tafenatox, eculizumab, lendalizumab, pexelizumab, pozelimab, ravulizumab, tesidolumab, vilobelimab, abagovomab, igovomab, oregovomab, sofituzumab vedotin, cantuzumab mertansine, cantuzuma bravtansine, girentuximab, altumomab pentetate, arcitumomab, besilesomab, bertilimumab, plozalizumab, mogamulizumab, leronlimab, PRO140, rovelizumab, rovelizumab, talacotuzumab, benralizumab, tavolimab, vonlerolizumab, gavilimomab, ziralimumab, fanolesomab, ipilimumab, ruplizumab, toralizumab, dapirolizumab pegol, toralizumab, dapirolizumab pegol, ruplizumab, blinatumomab, inebilizumab, loncastuximab tesirine, SGN-CD19A, tafasitamab, taplitumomab paptox, XMAB-5574, Budoprutug, Obexelimab, duvortuxizumab, englumafusp alfa, Emfizatamab, zeripatamig, siplizumab, blontuvetmab, FBTA05, ibritumomab tiuxetan, obinutuzumab, ocaratuzumab, ocrelizumab, ofatumumab, rituximab, tositumomab, ublituximab, veltuzumab, divozilimab, eramkafusp alfa, ripertamab, zuberitamab, glofitamab, nofetumomab merpentan, samalizumab, imvotamab, odronextamab, plamotamab, bectumomab, inotuzumab ozogamicin, moxetumomab pasudotox, pinatuzumab vedotin, gomiliximab, lumiliximab, inolimomab, inolimomab, daclizumab, camidanluma btesirine, basiliximab, varlilumab, omburtamab, enoblituzumab, vopratelimab, lulizumabpegol, TGN1412, muromonab-CD3, otelixizumab, teplizumab, visilizumab, epcoritamab, epcoritamab, brentuximab vedotin, iratumumab, azintuxizumab vedotin, gemtuzumab ozogamicin, lintuzumab, vadastuximab talirine, naratuximab emtansine, otlertuzumab, lilotomab satetraxetan, tetulomab, daratumumab, isatuximab, foralumab, mosunetuzumab, mosunetuzumab, cedelizumab, ibalizumab, keliximab, priliximab, tregalizumab, zanolimumab, bleselumab, iscalimab, lucatumumab, ravagalimab, selicrelumab, teneliximab, vanalimab, abciximab, bivatuzumab, iomab-B, telimomab aritox, zolimomab aritox, abituzumab, intetumumab, alemtuzumab, tamtuvetmab, lorvotuzumab mertansine, itolizumab, cusatuzumab, vorsetuzumab mafodotin, milatuzumab, iladatuzumab vedotin, polatuzumab vedotin, galiximab, cibisatamab, zolbetuximab, naxitamab, tisotumab vedotin, olendalizumab, pamrevlumab, lacnotuzumab, cabiralizumab, emactuzumab, axatilimab, gimsilumab, lenzilumab, namilumab, tremelimumab, ulocuplumab, tepoditamab, rovalpituzumab tesirine, tarlatamab, demcizumab, navicixizumab, drozitumab, parsatuzumab, depatuxizumab mafodotin, modotuximab, carotuximab, adecatumumab, adecatumumab, oportuzumab monatox, solitomab, tucotuzumab celmoleukin, edrecolomab, catumaxomab, ifabotuzumab, fibatuzumab, zalutumumab, panitumumab, cetuximab, futuximab, imgatuzumab, laprituximab emtansine, matuzumab, necitumumab, nimotuzumab, tomuzotuximab, amivantamab, amivantamab, epitumomab cituxetan, sontuzumab, duligotuzumab, elgemtumab, lumretuzumab, patritumab, seribantumab, zenocutuzumab, sibrotuzumab, burosumab, aprutumab ixadotin, radretumab, pasotuxizumab, farletuzumab, mirvetuximab soravtansine, vantictumab, TRBS07, 3F8, dinutuximab, dinutuximab beta, ecromeximab, mitumomab, andecaliximab, capromab, codrituzumab, glembatumumab vedotin, talquetamab, talquetamab, trevogrumab, indusatumab vedotin, ficlatuzumab, rilotumumab, zatuximab, pentuzimab, pentuzimab, margetuximab, timigutuzumab, trastuzumab, trastuzumab duocarmazine, trastuzumab emtansine, gancotamab, pertuzumab, ertumaxomab, emibetuzumab, telisotuzumab, telisotuzumab vedotin, derlotuximab biotin, apolizumab, onartuzumab, bersanlimab, enlimomabpegol, rontalizumab, sifalimumab, talizumab, ganitumab, istiratumab, robatumumab, teprotumumab, figitumumab, ganitumab, istiratumab, robatumumab, teprotumumab, cixutumumab, dalotuzumab, xentuzumab, dusigitumab, canakinumab, ustekinumab, ustekinumab, ustekinumab, briakinumab, briakinumab, abrezekimab, lebrikizumab, romilkimab, TNX-650, tralokinumab, anrukinzumab, brodalumab, ixekizumab, netakimab, perakizumab, secukinumab, vunakizumab, afasevikumab, afasevikumab, bimekizumab, bimekizumab, remtolumab, bermekimab, lutikizumab, lutikizumab, gevokizumab, cergutuzumab amunaleukin, fletikumab, fezakinumab, brazikumab, guselkumab, mirikizumab, tildrakizumab, risankizumab, flotetuzumab, nemolizumab, pascolizumab, dupilumab, mepolizumab, reslizumab, clazakizumab, elsilimomab, olokizumab, sarilumab, siltuximab, sirukumab, vobarilizumab, tocilizumab, SA237, satralizumab, enokizumab, prezalizumab, natalizumab, abrilumab, abrilumab, vedolizumab, volociximab, tadocizumab, etaracizumab, etrolizumab, spesolimab, vatelizumab, erlizumab, lirilumab, relatlimab, cBR96-doxorubicinimmunoconjugate, odulimomab, efalizumab, ladiratuzumab vedotin, simtuzumab, samrotamab vedotin, aselizumab, lupartumab amadotin, imalumab, carlumab, imaprelimab, amatuximab, amatuximab, anetumab ravtansine, narnatumab, clivatuzumab tetraxetan, pemtumomab, gatipotuzumab, ensituximab, lemalesomab, sulesomab, enfortumab vedotin, racotumomab, monalizumab, brontictuzumab, tarextumab, vesencumab, oxelumab, gilvetmab, tislelizumab, dostarlimab, BCD-100, nivolumab, PDR001, pembrolizumab, pidilizumab, retifanlimab, spartalizumab, sintilimab, cemiplimab, olaratumab, tovetumab, rinucumab, atezolizumab, avelumab, durvalumab, lifastuzumab vedotin, bavituximab, acapatamab, capromab, rosopatamab, nezastomig, pasotuxizumab, pelgifatamab, voxalatamab, cofetuzumab pelidotin, denosumab, rosmantuzumab, cirmtuzumab, atinumab, indatuximab ravtansine, elotuzumab, sirtratumab vedotin, sonepcizumab, vandortuzumab vedotin, minretumomab, satumomab pendetide, maslimomab, ontuxizumab, tenatumomab, fresolimumab, metelimumab, lerdelimumab, tezepelumab, etigilimab, tiragotumab, placulumab, prezalumab, infliximab, nerelimomab, ozoralizumab, adalimumab, afelimomab, certolizumab pegol, golimumab, mapatumumab, conatumumab, lexatumumab, tigatuzumab, sacituzumab govitecan, votumumab, pogalizumab, letolizumab, pankomab, anatumomab mafenatox, enavatuzumab, flanvotumab, brolucizumab, ranibizumab, varisacumab, bevacizumab, faricimab, icrucumab, alacizumab pegol, ramucirumab, pritumumab, and onvatilimab;
[7094] VH1 comprises a heavy chain complementarity determining region 1 (HCDR1), HCDR2, and/or HCDR3 of an antibody selected from the group consisting of losatuxizumab vedotin, utomilumab, urelumab, oleclumab, naptumomab estafenatox, ascrinvacumab, pintumomab, tacatuzumab tetraxetan, nesvacumab, vanucizumab, timolumab, vapaliximab, vepalimomab, enapotamab vedotin, ianalumab, belimumab, tabalumab, tibulizumab, belantamab mafodotin, teclistamab, teclistamab, detumomab, nacolomab tafenatox, eculizumab, lendalizumab, pexelizumab, pozelimab, ravulizumab, tesidolumab, vilobelimab, abagovomab, igovomab, oregovomab, sofituzumab vedotin, cantuzumab mertansine, cantuzuma bravtansine, girentuximab, altumomab pentetate, arcitumomab, besilesomab, bertilimumab, plozalizumab, mogamulizumab, leronlimab, PRO140, rovelizumab, rovelizumab, talacotuzumab, benralizumab, tavolimab, vonlerolizumab, gavilimomab, ziralimumab, fanolesomab, ipilimumab, ruplizumab, toralizumab, dapirolizumab pegol, toralizumab, dapirolizumab pegol, ruplizumab, blinatumomab, inebilizumab, loncastuximab tesirine, SGN-CD19A, tafasitamab, taplitumomab paptox, XMAB-5574, Budoprutug, Obexelimab, duvortuxizumab, englumafusp alfa, Emfizatamab, zeripatamig, siplizumab, blontuvetmab, FBTA05, ibritumomab tiuxetan, obinutuzumab, ocaratuzumab, ocrelizumab, ofatumumab, rituximab, tositumomab, ublituximab, veltuzumab, divozilimab, eramkafusp alfa, ripertamab, zuberitamab, glofitamab, nofetumomab merpentan, samalizumab, imvotamab, odronextamab, plamotamab, bectumomab, inotuzumab ozogamicin, moxetumomab pasudotox, pinatuzumab vedotin, gomiliximab, lumiliximab, inolimomab, inolimomab, daclizumab, camidanluma btesirine, basiliximab, varlilumab, omburtamab, enoblituzumab, vopratelimab, lulizumabpegol, TGN1412, muromonab-CD3, otelixizumab, teplizumab, visilizumab, epcoritamab, epcoritamab, brentuximab vedotin, iratumumab, azintuxizumab vedotin, gemtuzumab ozogamicin, lintuzumab, vadastuximab talirine, naratuximab emtansine, otlertuzumab, lilotomab satetraxetan, tetulomab, daratumumab, isatuximab, foralumab, mosunetuzumab, mosunetuzumab, cedelizumab, ibalizumab, keliximab, priliximab, tregalizumab, zanolimumab, bleselumab, iscalimab, lucatumumab, ravagalimab, selicrelumab, teneliximab, vanalimab, abciximab, bivatuzumab, iomab-B, telimomab aritox, zolimomab aritox, abituzumab, intetumumab, alemtuzumab, tamtuvetmab, lorvotuzumab mertansine, itolizumab, cusatuzumab, vorsetuzumab mafodotin, milatuzumab, iladatuzumab vedotin, polatuzumab vedotin, galiximab, cibisatamab, zolbetuximab, naxitamab, tisotumab vedotin, olendalizumab, pamrevlumab, lacnotuzumab, cabiralizumab, emactuzumab, axatilimab, gimsilumab, lenzilumab, namilumab, tremelimumab, ulocuplumab, tepoditamab, rovalpituzumab tesirine, tarlatamab, demcizumab, navicixizumab, drozitumab, parsatuzumab, depatuxizumab mafodotin, modotuximab, carotuximab, adecatumumab, adecatumumab, oportuzumab monatox, solitomab, tucotuzumab celmoleukin, edrecolomab, catumaxomab, ifabotuzumab, fibatuzumab, zalutumumab, panitumumab, cetuximab, futuximab, imgatuzumab, laprituximab emtansine, matuzumab, necitumumab, nimotuzumab, tomuzotuximab, amivantamab, amivantamab, epitumomab cituxetan, sontuzumab, duligotuzumab, elgemtumab, lumretuzumab, patritumab, seribantumab, zenocutuzumab, sibrotuzumab, burosumab, aprutumab ixadotin, radretumab, pasotuxizumab, farletuzumab, mirvetuximab soravtansine, vantictumab, TRBS07, 3F8, dinutuximab, dinutuximab beta, ecromeximab, mitumomab, andecaliximab, capromab, codrituzumab, glembatumumab vedotin, talquetamab, talquetamab, trevogrumab, indusatumab vedotin, ficlatuzumab, rilotumumab, zatuximab, pentuzimab, pentuzimab, margetuximab, timigutuzumab, trastuzumab, trastuzumab duocarmazine, trastuzumab emtansine, gancotamab, pertuzumab, ertumaxomab, emibetuzumab, telisotuzumab, telisotuzumab vedotin, derlotuximab biotin, apolizumab, onartuzumab, bersanlimab, enlimomabpegol, rontalizumab, sifalimumab, talizumab, ganitumab, istiratumab, robatumumab, teprotumumab, figitumumab, ganitumab, istiratumab, robatumumab, teprotumumab, cixutumumab, dalotuzumab, xentuzumab, dusigitumab, canakinumab, ustekinumab, ustekinumab, ustekinumab, briakinumab, briakinumab, abrezekimab, lebrikizumab, romilkimab, TNX-650, tralokinumab, anrukinzumab, brodalumab, ixekizumab, netakimab, perakizumab, secukinumab, vunakizumab, afascvikumab, afascvikumab, bimekizumab, bimekizumab, remtolumab, bermekimab, lutikizumab, lutikizumab, gevokizumab, cergutuzumab amunaleukin, fletikumab, fezakinumab, brazikumab, guselkumab, mirikizumab, tildrakizumab, risankizumab, flotetuzumab, nemolizumab, pascolizumab, dupilumab, mepolizumab, reslizumab, clazakizumab, elsilimomab, olokizumab, sarilumab, siltuximab, sirukumab, vobarilizumab, tocilizumab, SA237, satralizumab, enokizumab, prezalizumab, natalizumab, abrilumab, abrilumab, vedolizumab, volociximab, tadocizumab, etaracizumab, etrolizumab, spesolimab, vatelizumab, erlizumab, lirilumab, relatlimab, cBR96-doxorubicinimmunoconjugate, odulimomab, efalizumab, ladiratuzumab vedotin, simtuzumab, samrotamab vedotin, aselizumab, lupartumab amadotin, imalumab, carlumab, imaprelimab, amatuximab, amatuximab, anetumab ravtansine, narnatumab, clivatuzumab tetraxetan, pemtumomab, gatipotuzumab, ensituximab, lemalesomab, sulesomab, enfortumab vedotin, racotumomab, monalizumab, brontictuzumab, tarextumab, vesencumab, oxelumab, gilvetmab, tislelizumab, dostarlimab, BCD-100, nivolumab, PDR001, pembrolizumab, pidilizumab, retifanlimab, spartalizumab, sintilimab, cemiplimab, olaratumab, tovetumab, rinucumab, atezolizumab, avelumab, durvalumab, lifastuzumab vedotin, bavituximab, acapatamab, capromab, rosopatamab, nezastomig, pasotuxizumab, pelgifatamab, voxalatamab, cofetuzumab pelidotin, denosumab, rosmantuzumab, cirmtuzumab, atinumab, indatuximab ravtansine, elotuzumab, sirtratumab vedotin, sonepcizumab, vandortuzumab vedotin, minretumomab, satumomab pendetide, maslimomab, ontuxizumab, tenatumomab, fresolimumab, metelimumab, lerdelimumab, tezepelumab, etigilimab, tiragotumab, placulumab, prezalumab, infliximab, nerelimomab, ozoralizumab, adalimumab, afelimomab, certolizumab pegol, golimumab, mapatumumab, conatumumab, lexatumumab, tigatuzumab, sacituzumab govitecan, votumumab, pogalizumab, letolizumab, pankomab, anatumomab mafenatox, enavatuzumab, flanvotumab, brolucizumab, ranibizumab, varisacumab, bevacizumab, faricimab, icrucumab, alacizumab pegol, ramucirumab, pritumumab, and onvatilimab; and/or
[7095] VH2 comprises a heavy chain complementarity determining region 1 (HCDR1), HCDR2, and/or HCDR3 of an antibody selected from the group consisting of losatuxizumab vedotin, utomilumab, urelumab, oleclumab, naptumomab estafenatox, ascrinvacumab, pintumomab, tacatuzumab tetraxetan, nesvacumab, vanucizumab, timolumab, vapaliximab, vepalimomab, enapotamab vedotin, ianalumab, belimumab, tabalumab, tibulizumab, belantamab mafodotin, teclistamab, teclistamab, detumomab, nacolomab tafenatox, eculizumab, lendalizumab, pexelizumab, pozelimab, ravulizumab, tesidolumab, vilobelimab, abagovomab, igovomab, oregovomab, sofituzumab vedotin, cantuzumab mertansine, cantuzuma bravtansine, girentuximab, altumomab pentetate, arcitumomab, besilesomab, bertilimumab, plozalizumab, mogamulizumab, leronlimab, PRO140, rovelizumab, rovelizumab, talacotuzumab, benralizumab, tavolimab, vonlerolizumab, gavilimomab, ziralimumab, fanolesomab, ipilimumab, ruplizumab, toralizumab, dapirolizumab pegol, toralizumab, dapirolizumab pegol, ruplizumab, blinatumomab, inebilizumab, loncastuximab tesirine, SGN-CD19A, tafasitamab, taplitumomab paptox, XMAB-5574, Budoprutug, Obexelimab, duvortuxizumab, englumafusp alfa, Emfizatamab, zeripatamig, siplizumab, blontuvetmab, FBTA05, ibritumomab tiuxetan, obinutuzumab, ocaratuzumab, ocrelizumab, ofatumumab, rituximab, tositumomab, ublituximab, veltuzumab, divozilimab, eramkafusp alfa, ripertamab, zuberitamab, glofitamab, nofetumomab merpentan, samalizumab, imvotamab, odronextamab, plamotamab, bectumomab, inotuzumab ozogamicin, moxetumomab pasudotox, pinatuzumab vedotin, gomiliximab, lumiliximab, inolimomab, inolimomab, daclizumab, camidanluma btesirine, basiliximab, varlilumab, omburtamab, enoblituzumab, vopratelimab, lulizumabpegol, TGN1412, muromonab-CD3, otelixizumab, teplizumab, visilizumab, epcoritamab, epcoritamab, brentuximab vedotin, iratumumab, azintuxizumab vedotin, gemtuzumab ozogamicin, lintuzumab, vadastuximab talirine, naratuximab emtansine, otlertuzumab, lilotomab satetraxetan, tetulomab, daratumumab, isatuximab, foralumab, mosunetuzumab, mosunetuzumab, cedelizumab, ibalizumab, keliximab, priliximab, tregalizumab, zanolimumab, bleselumab, iscalimab, lucatumumab, ravagalimab, selicrelumab, teneliximab, vanalimab, abciximab, bivatuzumab, iomab-B, telimomab aritox, zolimomab aritox, abituzumab, intetumumab, alemtuzumab, tamtuvetmab, lorvotuzumab mertansine, itolizumab, cusatuzumab, vorsetuzumab mafodotin, milatuzumab, iladatuzumab vedotin, polatuzumab vedotin, galiximab, cibisatamab, zolbetuximab, naxitamab, tisotumab vedotin, olendalizumab, pamrevlumab, lacnotuzumab, cabiralizumab, emactuzumab, axatilimab, gimsilumab, lenzilumab, namilumab, tremelimumab, ulocuplumab, tepoditamab, rovalpituzumab tesirine, tarlatamab, demcizumab, navicixizumab, drozitumab, parsatuzumab, depatuxizumab mafodotin, modotuximab, carotuximab, adecatumumab, adecatumumab, oportuzumab monatox, solitomab, tucotuzumab celmoleukin, edrecolomab, catumaxomab, ifabotuzumab, fibatuzumab, zalutumumab, panitumumab, cetuximab, futuximab, imgatuzumab, laprituximab emtansine, matuzumab, necitumumab, nimotuzumab, tomuzotuximab, amivantamab, amivantamab, epitumomab cituxetan, sontuzumab, duligotuzumab, elgemtumab, lumretuzumab, patritumab, seribantumab, zenocutuzumab, sibrotuzumab, burosumab, aprutumab ixadotin, radretumab, pasotuxizumab, farletuzumab, mirvetuximab soravtansine, vantictumab, TRBS07, 3F8, dinutuximab, dinutuximab beta, ecromeximab, mitumomab, andecaliximab, capromab, codrituzumab, glembatumumab vedotin, talquetamab, talquetamab, trevogrumab, indusatumab vedotin, ficlatuzumab, rilotumumab, zatuximab, pentuzimab, pentuzimab, margetuximab, timigutuzumab, trastuzumab, trastuzumab duocarmazine, trastuzumab emtansine, gancotamab, pertuzumab, ertumaxomab, emibetuzumab, telisotuzumab, telisotuzumab vedotin, derlotuximab biotin, apolizumab, onartuzumab, bersanlimab, enlimomabpegol, rontalizumab, sifalimumab, talizumab, ganitumab, istiratumab, robatumumab, teprotumumab, figitumumab, ganitumab, istiratumab, robatumumab, teprotumumab, cixutumumab, dalotuzumab, xentuzumab, dusigitumab, canakinumab, ustekinumab, ustekinumab, ustekinumab, briakinumab, briakinumab, abrezekimab, lebrikizumab, romilkimab, TNX-650, tralokinumab, anrukinzumab, brodalumab, ixekizumab, netakimab, perakizumab, secukinumab, vunakizumab, afasevikumab, afasevikumab, bimekizumab, bimekizumab, remtolumab, bermekimab, lutikizumab, lutikizumab, gevokizumab, cergutuzumab amunaleukin, fletikumab, fezakinumab, brazikumab, guselkumab, mirikizumab, tildrakizumab, risankizumab, flotetuzumab, nemolizumab, pascolizumab, dupilumab, mepolizumab, reslizumab, clazakizumab, elsilimomab, olokizumab, sarilumab, siltuximab, sirukumab, vobarilizumab, tocilizumab, SA237, satralizumab, enokizumab, prezalizumab, natalizumab, abrilumab, abrilumab, vedolizumab, volociximab, tadocizumab, etaracizumab, etrolizumab, spesolimab, vatelizumab, erlizumab, lirilumab, relatlimab, cBR96-doxorubicinimmunoconjugate, odulimomab, efalizumab, ladiratuzumab vedotin, simtuzumab, samrotamab vedotin, aselizumab, lupartumab amadotin, imalumab, carlumab, imaprelimab, amatuximab, amatuximab, anetumab ravtansine, narnatumab, clivatuzumab tetraxetan, pemtumomab, gatipotuzumab, ensituximab, lemalesomab, sulesomab, enfortumab vedotin, racotumomab, monalizumab, brontictuzumab, tarextumab, vesencumab, oxelumab, gilvetmab, tislelizumab, dostarlimab, BCD-100, nivolumab, PDR001, pembrolizumab, pidilizumab, retifanlimab, spartalizumab, sintilimab, cemiplimab, olaratumab, tovetumab, rinucumab, atezolizumab, avelumab, durvalumab, lifastuzumab vedotin, bavituximab, acapatamab, capromab, rosopatamab, nezastomig, pasotuxizumab, pelgifatamab, voxalatamab, cofetuzumab pelidotin, denosumab, rosmantuzumab, cirmtuzumab, atinumab, indatuximab ravtansine, elotuzumab, sirtratumab vedotin, sonepcizumab, vandortuzumab vedotin, minretumomab, satumomab pendetide, maslimomab, ontuxizumab, tenatumomab, fresolimumab, metelimumab, lerdelimumab, tezepelumab, etigilimab, tiragotumab, placulumab, prezalumab, infliximab, nerelimomab, ozoralizumab, adalimumab, afelimomab, certolizumab pegol, golimumab, mapatumumab, conatumumab, lexatumumab, tigatuzumab, sacituzumab govitecan, votumumab, pogalizumab, letolizumab, pankomab, anatumomab mafenatox, enavatuzumab, flanvotumab, brolucizumab, ranibizumab, varisacumab, bevacizumab, faricimab, icrucumab, alacizumab pegol, ramucirumab, pritumumab, and onvatilimab; or
[7096] (ii)
[7097] VL1 comprises a VL of an antibody selected from the group consisting of losatuxizumab vedotin, utomilumab, urelumab, oleclumab, naptumomab estafenatox, ascrinvacumab, pintumomab, tacatuzumab tetraxetan, nesvacumab, vanucizumab, timolumab, vapaliximab, vepalimomab, enapotamab vedotin, ianalumab, belimumab, tabalumab, tibulizumab, belantamab mafodotin, teclistamab, teclistamab, detumomab, nacolomab tafenatox, eculizumab, lendalizumab, pexelizumab, pozelimab, ravulizumab, tesidolumab, vilobelimab, abagovomab, igovomab, oregovomab, sofituzumab vedotin, cantuzumab mertansine, cantuzuma bravtansine, girentuximab, altumomab pentetate, arcitumomab, besilesomab, bertilimumab, plozalizumab, mogamulizumab, leronlimab, PRO140, rovelizumab, rovelizumab, talacotuzumab, benralizumab, tavolimab, vonlerolizumab, gavilimomab, ziralimumab, fanolesomab, ipilimumab, ruplizumab, toralizumab, dapirolizumab pegol, toralizumab, dapirolizumab pegol, ruplizumab, blinatumomab, inebilizumab, loncastuximab tesirine, SGN-CD19A, tafasitamab, taplitumomab paptox, XMAB-5574, Budoprutug, Obexelimab, duvortuxizumab, englumafusp alfa, Emfizatamab, zeripatamig, siplizumab, blontuvetmab, FBTA05, ibritumomab tiuxetan, obinutuzumab, ocaratuzumab, ocrelizumab, ofatumumab, rituximab, tositumomab, ublituximab, veltuzumab, divozilimab, eramkafusp alfa, ripertamab, zuberitamab, glofitamab, nofetumomab merpentan, samalizumab, imvotamab, odronextamab, plamotamab, bectumomab, inotuzumab ozogamicin, moxetumomab pasudotox, pinatuzumab vedotin, gomiliximab, lumiliximab, inolimomab, inolimomab, daclizumab, camidanluma btesirine, basiliximab, varlilumab, omburtamab, enoblituzumab, vopratelimab, lulizumabpegol, TGN1412, muromonab-CD3, otelixizumab, teplizumab, visilizumab, epcoritamab, epcoritamab, brentuximab vedotin, iratumumab, azintuxizumab vedotin, gemtuzumab ozogamicin, lintuzumab, vadastuximab talirine, naratuximab emtansine, otlertuzumab, lilotomab satetraxetan, tetulomab, daratumumab, isatuximab, foralumab, mosunetuzumab, mosunetuzumab, cedelizumab, ibalizumab, keliximab, priliximab, tregalizumab, zanolimumab, bleselumab, iscalimab, lucatumumab, ravagalimab, selicrelumab, teneliximab, vanalimab, abciximab, bivatuzumab, iomab-B, telimomab aritox, zolimomab aritox, abituzumab, intetumumab, alemtuzumab, tamtuvetmab, lorvotuzumab mertansine, itolizumab, cusatuzumab, vorsetuzumab mafodotin, milatuzumab, iladatuzumab vedotin, polatuzumab vedotin, galiximab, cibisatamab, zolbetuximab, naxitamab, tisotumab vedotin, olendalizumab, pamrevlumab, lacnotuzumab, cabiralizumab, emactuzumab, axatilimab, gimsilumab, lenzilumab, namilumab, tremelimumab, ulocuplumab, tepoditamab, rovalpituzumab tesirine, tarlatamab, demcizumab, navicixizumab, drozitumab, parsatuzumab, depatuxizumab mafodotin, modotuximab, carotuximab, adecatumumab, adecatumumab, oportuzumab monatox, solitomab, tucotuzumab celmoleukin, edrecolomab, catumaxomab, ifabotuzumab, fibatuzumab, zalutumumab, panitumumab, cetuximab, futuximab, imgatuzumab, laprituximab emtansine, matuzumab, necitumumab, nimotuzumab, tomuzotuximab, amivantamab, amivantamab, epitumomab cituxetan, sontuzumab, duligotuzumab, elgemtumab, lumretuzumab, patritumab, seribantumab, zenocutuzumab, sibrotuzumab, burosumab, aprutumab ixadotin, radretumab, pasotuxizumab, farletuzumab, mirvetuximab soravtansine, vantictumab, TRBS07, 3F8, dinutuximab, dinutuximab beta, ecromeximab, mitumomab, andecaliximab, capromab, codrituzumab, glembatumumab vedotin, talquetamab, talquetamab, trevogrumab, indusatumab vedotin, ficlatuzumab, rilotumumab, zatuximab, pentuzimab, pentuzimab, margetuximab, timigutuzumab, trastuzumab, trastuzumab duocarmazine, trastuzumab emtansine, gancotamab, pertuzumab, ertumaxomab, emibetuzumab, telisotuzumab, telisotuzumab vedotin, derlotuximab biotin, apolizumab, onartuzumab, bersanlimab, enlimomabpegol, rontalizumab, sifalimumab, talizumab, ganitumab, istiratumab, robatumumab, teprotumumab, figitumumab, ganitumab, istiratumab, robatumumab, teprotumumab, cixutumumab, dalotuzumab, xentuzumab, dusigitumab, canakinumab, ustekinumab, ustekinumab, ustekinumab, briakinumab, briakinumab, abrezekimab, lebrikizumab, romilkimab, TNX-650, tralokinumab, anrukinzumab, brodalumab, ixekizumab, netakimab, perakizumab, secukinumab, vunakizumab, afasevikumab, afasevikumab, bimekizumab, bimekizumab, remtolumab, bermekimab, lutikizumab, lutikizumab, gevokizumab, cergutuzumab amunaleukin, fletikumab, fezakinumab, brazikumab, guselkumab, mirikizumab, tildrakizumab, risankizumab, flotetuzumab, nemolizumab, pascolizumab, dupilumab, mepolizumab, reslizumab, clazakizumab, elsilimomab, olokizumab, sarilumab, siltuximab, sirukumab, vobarilizumab, tocilizumab, SA237, satralizumab, enokizumab, prezalizumab, natalizumab, abrilumab, abrilumab, vedolizumab, volociximab, tadocizumab, etaracizumab, etrolizumab, spesolimab, vatelizumab, erlizumab, lirilumab, relatlimab, cBR96-doxorubicinimmunoconjugate, odulimomab, efalizumab, ladiratuzumab vedotin, simtuzumab, samrotamab vedotin, aselizumab, lupartumab amadotin, imalumab, carlumab, imaprelimab, amatuximab, amatuximab, anetumab ravtansine, narnatumab, clivatuzumab tetraxetan, pemtumomab, gatipotuzumab, ensituximab, lemalesomab, sulesomab, enfortumab vedotin, racotumomab, monalizumab, brontictuzumab, tarextumab, vesencumab, oxelumab, gilvetmab, tislelizumab, dostarlimab, BCD-100, nivolumab, PDR001, pembrolizumab, pidilizumab, retifanlimab, spartalizumab, sintilimab, cemiplimab, olaratumab, tovetumab, rinucumab, atezolizumab, avelumab, durvalumab, lifastuzumab vedotin, bavituximab, acapatamab, capromab, rosopatamab, nezastomig, pasotuxizumab, pelgifatamab, voxalatamab, cofetuzumab pelidotin, denosumab, rosmantuzumab, cirmtuzumab, atinumab, indatuximab ravtansine, elotuzumab, sirtratumab vedotin, sonepcizumab, vandortuzumab vedotin, minretumomab, satumomab pendetide, maslimomab, ontuxizumab, tenatumomab, fresolimumab, metelimumab, lerdelimumab, tezepelumab, etigilimab, tiragotumab, placulumab, prezalumab, infliximab, nerelimomab, ozoralizumab, adalimumab, afelimomab, certolizumab pegol, golimumab, mapatumumab, conatumumab, lexatumumab, tigatuzumab, sacituzumab govitecan, votumumab, pogalizumab, letolizumab, pankomab, anatumomab mafenatox, enavatuzumab, flanvotumab, brolucizumab, ranibizumab, varisacumab, bevacizumab, faricimab, icrucumab, alacizumab pegol, ramucirumab, pritumumab, and onvatilimab;
[7098] VL2 comprises a VL of an antibody selected from the group consisting of losatuxizumab vedotin, utomilumab, urelumab, oleclumab, naptumomab estafenatox, ascrinvacumab, pintumomab, tacatuzumab tetraxetan, nesvacumab, vanucizumab, timolumab, vapaliximab, vepalimomab, enapotamab vedotin, ianalumab, belimumab, tabalumab, tibulizumab, belantamab mafodotin, teclistamab, teclistamab, detumomab, nacolomab tafenatox, eculizumab, lendalizumab, pexelizumab, pozelimab, ravulizumab, tesidolumab, vilobelimab, abagovomab, igovomab, oregovomab, sofituzumab vedotin, cantuzumab mertansine, cantuzuma bravtansine, girentuximab, altumomab pentetate, arcitumomab, besilesomab, bertilimumab, plozalizumab, mogamulizumab, leronlimab, PRO140, rovelizumab, rovelizumab, talacotuzumab, benralizumab, tavolimab, vonlerolizumab, gavilimomab, ziralimumab, fanolesomab, ipilimumab, ruplizumab, toralizumab, dapirolizumab pegol, toralizumab, dapirolizumab pegol, ruplizumab, blinatumomab, inebilizumab, loncastuximab tesirine, SGN-CD19A, tafasitamab, taplitumomab paptox, XMAB-5574, Budoprutug, Obexelimab, duvortuxizumab, englumafusp alfa, Emfizatamab, zeripatamig, siplizumab, blontuvetmab, FBTA05, ibritumomab tiuxetan, obinutuzumab, ocaratuzumab, ocrelizumab, ofatumumab, rituximab, tositumomab, ublituximab, veltuzumab, divozilimab, eramkafusp alfa, ripertamab, zuberitamab, glofitamab, nofetumomab merpentan, samalizumab, imvotamab, odronextamab, plamotamab, bectumomab, inotuzumab ozogamicin, moxetumomab pasudotox, pinatuzumab vedotin, gomiliximab, lumiliximab, inolimomab, inolimomab, daclizumab, camidanluma btesirine, basiliximab, varlilumab, omburtamab, enoblituzumab, vopratelimab, lulizumabpegol, TGN1412, muromonab-CD3, otelixizumab, teplizumab, visilizumab, epcoritamab, epcoritamab, brentuximab vedotin, iratumumab, azintuxizumab vedotin, gemtuzumab ozogamicin, lintuzumab, vadastuximab talirine, naratuximab emtansine, otlertuzumab, lilotomab satetraxetan, tetulomab, daratumumab, isatuximab, foralumab, mosunetuzumab, mosunetuzumab, cedelizumab, ibalizumab, keliximab, priliximab, tregalizumab, zanolimumab, bleselumab, iscalimab, lucatumumab, ravagalimab, selicrelumab, teneliximab, vanalimab, abciximab, bivatuzumab, iomab-B, telimomab aritox, zolimomab aritox, abituzumab, intetumumab, alemtuzumab, tamtuvetmab, lorvotuzumab mertansine, itolizumab, cusatuzumab, vorsetuzumab mafodotin, milatuzumab, iladatuzumab vedotin, polatuzumab vedotin, galiximab, cibisatamab, zolbetuximab, naxitamab, tisotumab vedotin, olendalizumab, pamrevlumab, lacnotuzumab, cabiralizumab, emactuzumab, axatilimab, gimsilumab, lenzilumab, namilumab, tremelimumab, ulocuplumab, tepoditamab, rovalpituzumab tesirine, tarlatamab, demcizumab, navicixizumab, drozitumab, parsatuzumab, depatuxizumab mafodotin, modotuximab, carotuximab, adecatumumab, adecatumumab, oportuzumab monatox, solitomab, tucotuzumab celmoleukin, edrecolomab, catumaxomab, ifabotuzumab, fibatuzumab, zalutumumab, panitumumab, cetuximab, futuximab, imgatuzumab, laprituximab emtansine, matuzumab, necitumumab, nimotuzumab, tomuzotuximab, amivantamab, amivantamab, epitumomab cituxetan, sontuzumab, duligotuzumab, elgemtumab, lumretuzumab, patritumab, seribantumab, zenocutuzumab, sibrotuzumab, burosumab, aprutumab ixadotin, radretumab, pasotuxizumab, farletuzumab, mirvetuximab soravtansine, vantictumab, TRBS07, 3F8, dinutuximab, dinutuximab beta, ecromeximab, mitumomab, andecaliximab, capromab, codrituzumab, glembatumumab vedotin, talquetamab, talquetamab, trevogrumab, indusatumab vedotin, ficlatuzumab, rilotumumab, zatuximab, pentuzimab, pentuzimab, margetuximab, timigutuzumab, trastuzumab, trastuzumab duocarmazine, trastuzumab emtansine, gancotamab, pertuzumab, ertumaxomab, emibetuzumab, telisotuzumab, telisotuzumab vedotin, derlotuximab biotin, apolizumab, onartuzumab, bersanlimab, enlimomabpegol, rontalizumab, sifalimumab, talizumab, ganitumab, istiratumab, robatumumab, teprotumumab, figitumumab, ganitumab, istiratumab, robatumumab, teprotumumab, cixutumumab, dalotuzumab, xentuzumab, dusigitumab, canakinumab, ustekinumab, ustekinumab, ustekinumab, briakinumab, briakinumab, abrezekimab, lebrikizumab, romilkimab, TNX-650, tralokinumab, anrukinzumab, brodalumab, ixekizumab, netakimab, perakizumab, secukinumab, vunakizumab, afasevikumab, afasevikumab, bimekizumab, bimekizumab, remtolumab, bermekimab, lutikizumab, lutikizumab, gevokizumab, cergutuzumab amunaleukin, fletikumab, fezakinumab, brazikumab, guselkumab, mirikizumab, tildrakizumab, risankizumab, flotetuzumab, nemolizumab, pascolizumab, dupilumab, mepolizumab, reslizumab, clazakizumab, elsilimomab, olokizumab, sarilumab, siltuximab, sirukumab, vobarilizumab, tocilizumab, SA237, satralizumab, enokizumab, prezalizumab, natalizumab, abrilumab, abrilumab, vedolizumab, volociximab, tadocizumab, etaracizumab, etrolizumab, spesolimab, vatelizumab, erlizumab, lirilumab, relatlimab, cBR96-doxorubicinimmunoconjugate, odulimomab, efalizumab, ladiratuzumab vedotin, simtuzumab, samrotamab vedotin, aselizumab, lupartumab amadotin, imalumab, carlumab, imaprelimab, amatuximab, amatuximab, anetumab ravtansine, narnatumab, clivatuzumab tetraxetan, pemtumomab, gatipotuzumab, ensituximab, lemalesomab, sulesomab, enfortumab vedotin, racotumomab, monalizumab, brontictuzumab, tarextumab, vesencumab, oxelumab, gilvetmab, tislelizumab, dostarlimab, BCD-100, nivolumab, PDR001, pembrolizumab, pidilizumab, retifanlimab, spartalizumab, sintilimab, cemiplimab, olaratumab, tovetumab, rinucumab, atezolizumab, avelumab, durvalumab, lifastuzumab vedotin, bavituximab, acapatamab, capromab, rosopatamab, nezastomig, pasotuxizumab, pelgifatamab, voxalatamab, cofetuzumab pelidotin, denosumab, rosmantuzumab, cirmtuzumab, atinumab, indatuximab ravtansine, elotuzumab, sirtratumab vedotin, sonepcizumab, vandortuzumab vedotin, minretumomab, satumomab pendetide, maslimomab, ontuxizumab, tenatumomab, fresolimumab, metelimumab, lerdelimumab, tezepelumab, etigilimab, tiragotumab, placulumab, prezalumab, infliximab, nerelimomab, ozoralizumab, adalimumab, afelimomab, certolizumab pegol, golimumab, mapatumumab, conatumumab, lexatumumab, tigatuzumab, sacituzumab govitecan, votumumab, pogalizumab, letolizumab, pankomab, anatumomab mafenatox, enavatuzumab, flanvotumab, brolucizumab, ranibizumab, varisacumab, bevacizumab, faricimab, icrucumab, alacizumab pegol, ramucirumab, pritumumab, and onvatilimab;
[7099] VH1 comprises a VH of an antibody selected from the group consisting of losatuxizumab vedotin, utomilumab, urelumab, oleclumab, naptumomab estafenatox, ascrinvacumab, pintumomab, tacatuzumab tetraxetan, nesvacumab, vanucizumab, timolumab, vapaliximab, vepalimomab, enapotamab vedotin, ianalumab, belimumab, tabalumab, tibulizumab, belantamab mafodotin, teclistamab, teclistamab, detumomab, nacolomab tafenatox, eculizumab, lendalizumab, pexelizumab, pozelimab, ravulizumab, tesidolumab, vilobelimab, abagovomab, igovomab, oregovomab, sofituzumab vedotin, cantuzumab mertansine, cantuzuma bravtansine, girentuximab, altumomab pentetate, arcitumomab, besilesomab, bertilimumab, plozalizumab, mogamulizumab, leronlimab, PRO140, rovelizumab, rovelizumab, talacotuzumab, benralizumab, tavolimab, vonlerolizumab, gavilimomab, ziralimumab, fanolesomab, ipilimumab, ruplizumab, toralizumab, dapirolizumab pegol, toralizumab, dapirolizumab pegol, ruplizumab, blinatumomab, inebilizumab, loncastuximab tesirine, SGN-CD19A, tafasitamab, taplitumomab paptox, XMAB-5574, Budoprutug, Obexelimab, duvortuxizumab, englumafusp alfa, Emfizatamab, zeripatamig, siplizumab, blontuvetmab, FBTA05, ibritumomab tiuxetan, obinutuzumab, ocaratuzumab, ocrelizumab, ofatumumab, rituximab, tositumomab, ublituximab, veltuzumab, divozilimab, eramkafusp alfa, ripertamab, zuberitamab, glofitamab, nofetumomab merpentan, samalizumab, imvotamab, odronextamab, plamotamab, bectumomab, inotuzumab ozogamicin, moxetumomab pasudotox, pinatuzumab vedotin, gomiliximab, lumiliximab, inolimomab, inolimomab, daclizumab, camidanluma btesirine, basiliximab, varlilumab, omburtamab, enoblituzumab, vopratelimab, lulizumabpegol, TGN1412, muromonab-CD3, otelixizumab, teplizumab, visilizumab, epcoritamab, epcoritamab, brentuximab vedotin, iratumumab, azintuxizumab vedotin, gemtuzumab ozogamicin, lintuzumab, vadastuximab talirine, naratuximab emtansine, otlertuzumab, lilotomab satetraxetan, tetulomab, daratumumab, isatuximab, foralumab, mosunetuzumab, mosunetuzumab, cedelizumab, ibalizumab, keliximab, priliximab, tregalizumab, zanolimumab, bleselumab, iscalimab, lucatumumab, ravagalimab, selicrelumab, teneliximab, vanalimab, abciximab, bivatuzumab, iomab-B, telimomab aritox, zolimomab aritox, abituzumab, intetumumab, alemtuzumab, tamtuvetmab, lorvotuzumab mertansine, itolizumab, cusatuzumab, vorsetuzumab mafodotin, milatuzumab, iladatuzumab vedotin, polatuzumab vedotin, galiximab, cibisatamab, zolbetuximab, naxitamab, tisotumab vedotin, olendalizumab, pamrevlumab, lacnotuzumab, cabiralizumab, emactuzumab, axatilimab, gimsilumab, lenzilumab, namilumab, tremelimumab, ulocuplumab, tepoditamab, rovalpituzumab tesirine, tarlatamab, demcizumab, navicixizumab, drozitumab, parsatuzumab, depatuxizumab mafodotin, modotuximab, carotuximab, adecatumumab, adecatumumab, oportuzumab monatox, solitomab, tucotuzumab celmoleukin, edrecolomab, catumaxomab, ifabotuzumab, fibatuzumab, zalutumumab, panitumumab, cetuximab, futuximab, imgatuzumab, laprituximab emtansine, matuzumab, necitumumab, nimotuzumab, tomuzotuximab, amivantamab, amivantamab, epitumomab cituxetan, sontuzumab, duligotuzumab, elgemtumab, lumretuzumab, patritumab, seribantumab, zenocutuzumab, sibrotuzumab, burosumab, aprutumab ixadotin, radretumab, pasotuxizumab, farletuzumab, mirvetuximab soravtansine, vantictumab, TRBS07, 3F8, dinutuximab, dinutuximab beta, ecromeximab, mitumomab, andecaliximab, capromab, codrituzumab, glembatumumab vedotin, talquetamab, talquetamab, trevogrumab, indusatumab vedotin, ficlatuzumab, rilotumumab, zatuximab, pentuzimab, pentuzimab, margetuximab, timigutuzumab, trastuzumab, trastuzumab duocarmazine, trastuzumab emtansine, gancotamab, pertuzumab, ertumaxomab, emibetuzumab, telisotuzumab, telisotuzumab vedotin, derlotuximab biotin, apolizumab, onartuzumab, bersanlimab, enlimomabpegol, rontalizumab, sifalimumab, talizumab, ganitumab, istiratumab, robatumumab, teprotumumab, figitumumab, ganitumab, istiratumab, robatumumab, teprotumumab, cixutumumab, dalotuzumab, xentuzumab, dusigitumab, canakinumab, ustekinumab, ustekinumab, ustekinumab, briakinumab, briakinumab, abrezekimab, lebrikizumab, romilkimab, TNX-650, tralokinumab, anrukinzumab, brodalumab, ixekizumab, netakimab, perakizumab, secukinumab, vunakizumab, afasevikumab, afasevikumab, bimekizumab, bimekizumab, remtolumab, bermekimab, lutikizumab, lutikizumab, gevokizumab, cergutuzumab amunaleukin, fletikumab, fezakinumab, brazikumab, guselkumab, mirikizumab, tildrakizumab, risankizumab, flotetuzumab, nemolizumab, pascolizumab, dupilumab, mepolizumab, reslizumab, clazakizumab, elsilimomab, olokizumab, sarilumab, siltuximab, sirukumab, vobarilizumab, tocilizumab, SA237, satralizumab, enokizumab, prezalizumab, natalizumab, abrilumab, abrilumab, vedolizumab, volociximab, tadocizumab, etaracizumab, etrolizumab, spesolimab, vatelizumab, erlizumab, lirilumab, relatlimab, cBR96-doxorubicinimmunoconjugate, odulimomab, efalizumab, ladiratuzumab vedotin, simtuzumab, samrotamab vedotin, aselizumab, lupartumab amadotin, imalumab, carlumab, imaprelimab, amatuximab, amatuximab, anetumab ravtansine, narnatumab, clivatuzumab tetraxetan, pemtumomab, gatipotuzumab, ensituximab, lemalesomab, sulesomab, enfortumab vedotin, racotumomab, monalizumab, brontictuzumab, tarextumab, vesencumab, oxelumab, gilvetmab, tislelizumab, dostarlimab, BCD-100, nivolumab, PDR001, pembrolizumab, pidilizumab, retifanlimab, spartalizumab, sintilimab, cemiplimab, olaratumab, tovetumab, rinucumab, atezolizumab, avelumab, durvalumab, lifastuzumab vedotin, bavituximab, acapatamab, capromab, rosopatamab, nezastomig, pasotuxizumab, pelgifatamab, voxalatamab, cofetuzumab pelidotin, denosumab, rosmantuzumab, cirmtuzumab, atinumab, indatuximab ravtansine, elotuzumab, sirtratumab vedotin, sonepcizumab, vandortuzumab vedotin, minretumomab, satumomab pendetide, maslimomab, ontuxizumab, tenatumomab, fresolimumab, metelimumab, lerdelimumab, tezepelumab, etigilimab, tiragotumab, placulumab, prezalumab, infliximab, nerelimomab, ozoralizumab, adalimumab, afelimomab, certolizumab pegol, golimumab, mapatumumab, conatumumab, lexatumumab, tigatuzumab, sacituzumab govitecan, votumumab, pogalizumab, letolizumab, pankomab, anatumomab mafenatox, enavatuzumab, flanvotumab, brolucizumab, ranibizumab, varisacumab, bevacizumab, faricimab, icrucumab, alacizumab pegol, ramucirumab, pritumumab, and onvatilimab; and/or
[7100] VH2 comprises a VH of an antibody selected from the group consisting of losatuxizumab vedotin, utomilumab, urelumab, oleclumab, naptumomab estafenatox, ascrinvacumab, pintumomab, tacatuzumab tetraxetan, nesvacumab, vanucizumab, timolumab, vapaliximab, vepalimomab, enapotamab vedotin, ianalumab, belimumab, tabalumab, tibulizumab, belantamab mafodotin, teclistamab, teclistamab, detumomab, nacolomab tafenatox, eculizumab, lendalizumab, pexelizumab, pozelimab, ravulizumab, tesidolumab, vilobelimab, abagovomab, igovomab, oregovomab, sofituzumab vedotin, cantuzumab mertansine, cantuzuma bravtansine, girentuximab, altumomab pentetate, arcitumomab, besilesomab, bertilimumab, plozalizumab, mogamulizumab, leronlimab, PRO140, rovelizumab, rovelizumab, talacotuzumab, benralizumab, tavolimab, vonlerolizumab, gavilimomab, ziralimumab, fanolesomab, ipilimumab, ruplizumab, toralizumab, dapirolizumab pegol, toralizumab, dapirolizumab pegol, ruplizumab, blinatumomab, inebilizumab, loncastuximab tesirine, SGN-CD19A, tafasitamab, taplitumomab paptox, XMAB-5574, Budoprutug, Obexelimab, duvortuxizumab, englumafusp alfa, Emfizatamab, zeripatamig, siplizumab, blontuvetmab, FBTA05, ibritumomab tiuxetan, obinutuzumab, ocaratuzumab, ocrelizumab, ofatumumab, rituximab, tositumomab, ublituximab, veltuzumab, divozilimab, eramkafusp alfa, ripertamab, zuberitamab, glofitamab, nofetumomab merpentan, samalizumab, imvotamab, odronextamab, plamotamab, bectumomab, inotuzumab ozogamicin, moxetumomab pasudotox, pinatuzumab vedotin, gomiliximab, lumiliximab, inolimomab, inolimomab, daclizumab, camidanluma btesirine, basiliximab, varlilumab, omburtamab, enoblituzumab, vopratelimab, lulizumabpegol, TGN1412, muromonab-CD3, otelixizumab, teplizumab, visilizumab, epcoritamab, epcoritamab, brentuximab vedotin, iratumumab, azintuxizumab vedotin, gemtuzumab ozogamicin, lintuzumab, vadastuximab talirine, naratuximab emtansine, otlertuzumab, lilotomab satetraxetan, tetulomab, daratumumab, isatuximab, foralumab, mosunetuzumab, mosunetuzumab, cedelizumab, ibalizumab, keliximab, priliximab, tregalizumab, zanolimumab, bleselumab, iscalimab, lucatumumab, ravagalimab, selicrelumab, teneliximab, vanalimab, abciximab, bivatuzumab, iomab-B, telimomab aritox, zolimomab aritox, abituzumab, intetumumab, alemtuzumab, tamtuvetmab, lorvotuzumab mertansine, itolizumab, cusatuzumab, vorsetuzumab mafodotin, milatuzumab, iladatuzumab vedotin, polatuzumab vedotin, galiximab, cibisatamab, zolbetuximab, naxitamab, tisotumab vedotin, olendalizumab, pamrevlumab, lacnotuzumab, cabiralizumab, emactuzumab, axatilimab, gimsilumab, lenzilumab, namilumab, tremelimumab, ulocuplumab, tepoditamab, rovalpituzumab tesirine, tarlatamab, demcizumab, navicixizumab, drozitumab, parsatuzumab, depatuxizumab mafodotin, modotuximab, carotuximab, adecatumumab, adecatumumab, oportuzumab monatox, solitomab, tucotuzumab celmoleukin, edrecolomab, catumaxomab, ifabotuzumab, fibatuzumab, zalutumumab, panitumumab, cetuximab, futuximab, imgatuzumab, laprituximab emtansine, matuzumab, necitumumab, nimotuzumab, tomuzotuximab, amivantamab, amivantamab, epitumomab cituxetan, sontuzumab, duligotuzumab, elgemtumab, lumretuzumab, patritumab, seribantumab, zenocutuzumab, sibrotuzumab, burosumab, aprutumab ixadotin, radretumab, pasotuxizumab, farletuzumab, mirvetuximab soravtansine, vantictumab, TRBS07, 3F8, dinutuximab, dinutuximab beta, ecromeximab, mitumomab, andecaliximab, capromab, codrituzumab, glembatumumab vedotin, talquetamab, talquetamab, trevogrumab, indusatumab vedotin, ficlatuzumab, rilotumumab, zatuximab, pentuzimab, pentuzimab, margetuximab, timigutuzumab, trastuzumab, trastuzumab duocarmazine, trastuzumab emtansine, gancotamab, pertuzumab, ertumaxomab, emibetuzumab, telisotuzumab, telisotuzumab vedotin, derlotuximab biotin, apolizumab, onartuzumab, bersanlimab, enlimomabpegol, rontalizumab, sifalimumab, talizumab, ganitumab, istiratumab, robatumumab, teprotumumab, figitumumab, ganitumab, istiratumab, robatumumab, teprotumumab, cixutumumab, dalotuzumab, xentuzumab, dusigitumab, canakinumab, ustekinumab, ustekinumab, ustekinumab, briakinumab, briakinumab, abrezekimab, lebrikizumab, romilkimab, TNX-650, tralokinumab, anrukinzumab, brodalumab, ixekizumab, netakimab, perakizumab, secukinumab, vunakizumab, afasevikumab, afasevikumab, bimekizumab, bimekizumab, remtolumab, bermekimab, lutikizumab, lutikizumab, gevokizumab, cergutuzumab amunaleukin, fletikumab, fezakinumab, brazikumab, guselkumab, mirikizumab, tildrakizumab, risankizumab, flotetuzumab, nemolizumab, pascolizumab, dupilumab, mepolizumab, reslizumab, clazakizumab, elsilimomab, olokizumab, sarilumab, siltuximab, sirukumab, vobarilizumab, tocilizumab, SA237, satralizumab, enokizumab, prezalizumab, natalizumab, abrilumab, abrilumab, vedolizumab, volociximab, tadocizumab, etaracizumab, etrolizumab, spesolimab, vatelizumab, erlizumab, lirilumab, relatlimab, cBR96-doxorubicinimmunoconjugate, odulimomab, efalizumab, ladiratuzumab vedotin, simtuzumab, samrotamab vedotin, aselizumab, lupartumab amadotin, imalumab, carlumab, imaprelimab, amatuximab, amatuximab, anetumab ravtansine, narnatumab, clivatuzumab tetraxetan, pemtumomab, gatipotuzumab, ensituximab, lemalesomab, sulesomab, enfortumab vedotin, racotumomab, monalizumab, brontictuzumab, tarextumab, vesencumab, oxelumab, gilvetmab, tislelizumab, dostarlimab, BCD-100, nivolumab, PDR001, pembrolizumab, pidilizumab, retifanlimab, spartalizumab, sintilimab, cemiplimab, olaratumab, tovetumab, rinucumab, atezolizumab, avelumab, durvalumab, lifastuzumab vedotin, bavituximab, acapatamab, capromab, rosopatamab, nezastomig, pasotuxizumab, pelgifatamab, voxalatamab, cofetuzumab pelidotin, denosumab, rosmantuzumab, cirmtuzumab, atinumab, indatuximab ravtansine, elotuzumab, sirtratumab vedotin, sonepcizumab, vandortuzumab vedotin, minretumomab, satumomab pendetide, maslimomab, ontuxizumab, tenatumomab, fresolimumab, metelimumab, lerdelimumab, tezepelumab, etigilimab, tiragotumab, placulumab, prezalumab, infliximab, nerelimomab, ozoralizumab, adalimumab, afelimomab, certolizumab pegol, golimumab, mapatumumab, conatumumab, lexatumumab, tigatuzumab, sacituzumab govitecan, votumumab, pogalizumab, letolizumab, pankomab, anatumomab mafenatox, enavatuzumab, flanvotumab, brolucizumab, ranibizumab, varisacumab, bevacizumab, faricimab, icrucumab, alacizumab pegol, ramucirumab, pritumumab, and onvatilimab; or
[7101] (iii)
[7102] VL1 comprises (i) a complementarity determining region (CDR) 1 having an amino acid sequence that is at least 65%, at least 70%, at least 75%, at least 80%, at least 85%, at least 90%, at least 95%, at least 99%, or 100% identical to any one of SEQ ID NOs: 1096, 1103, 1110, 1120, 1127, 1134, 1141, 1148, 1155, 1162, 1169, 1174, 1181, 1188, 1199, 1211, 1221, 1228, 1235, 1247, 1254, 1261, 1266, 1271, 1278, 1285, 1292, 1299, 1306, 1313, 1319, 1326, 1339, 1352, 1359, 1366, 1373, 1382, 1394, 1401, 1408, 1414, 1421, 1428, 1441, 1448, 1455, 1461, 1468, 1475, 1488, 1495, 1508, 1519, 1526, 1531, 1538, 1544, 1556, 1568, 1574, 1581, 1594, 1601, 1608, 1615, 1622, 1629, 1636, 1643, 1650, 1657, 1672, 1679, 1689, 1697, 1708, 1715, 1718, 1723, 1727, 1738, 1743, 1752, 1761, 1763, 1769, 1776, and 1786; (ii) a CDR2 having an amino acid sequence that is at least 65%, at least 70%, at least 75%, at least 80%, at least 85%, at least 90%, at least 95%, at least 99%, or 100% identical to any one of SEQ ID NOs: 1200, 1212, 1680, 1690, 1698, 1709, 1728, 1739, 1744, 1753, 1770, and 1777; or at least 65%, at least 70%, at least 75%, at least 80%, at least 85%, at least 90%, at least 95%, at least 99%, or 100% identical to any one of amino acid sequences AAS, APS, AT, ATS, DAS, DDG, DDS, DT, DTS, DVS, EAS, FTS, GAF, GAN, GAS, GAT, GIS, GKN, GNS, HTS, KVS, LAS, LGS, LVS, NAK, NTN, QMS, RMS, RTS, SAS, TTS, WAS, YAS, YAT, YGS, YRS, and YTS; and (iii) a CDR3 having an amino acid sequence that is at least 65%, at least 70%, at least 75%, at least 80%, at least 85%, at least 90%, at least 95%, at least 99%, or 100% identical to any one of SEQ ID NOs: 1097, 1104, 1111, 1121, 1128, 1135, 1142, 1149, 1156, 1163, 1170, 1175, 1182, 1189, 1195, 1201, 1207, 1213, 1222, 1229, 1236, 2009, 1248, 1255, 1262, 1267, 1272, 1279, 1286, 1293, 1300, 1307, 1320, 1327, 1333, 1340, 1346, 1353, 1360, 1367, 1374, 1383, 1389, 1395, 1402, 1409, 1415, 1422, 1429, 1435, 1442, 1449, 1456, 1462, 1469, 1476, 1482, 1489, 1496, 1502, 1509, 1513, 1520, 1532, 1539, 1545, 1557, 1562, 1569, 1575, 1582, 1588, 1595, 1602, 1609, 1616, 1623, 1630, 1637, 1644, 1651, 1658, 1663, 1673, 1681, 1691, 1699, 1710, 1729, 1735, 1745, 1751, 1754, 1778, 1787, and 1976;
[7103] VL2 comprises (i) a complementarity determining region (CDR) 1 having an amino acid sequence that is at least 65%, at least 70%, at least 75%, at least 80%, at least 85%, at least 90%, at least 95%, at least 99%, or 100% identical to any one of SEQ ID NOs: 1096, 1103, 1110, 1120, 1127, 1134, 1141, 1148, 1155, 1162, 1169, 1174, 1181, 1188, 1199, 1211, 1221, 1228, 1235, 1247, 1254, 1261, 1266, 1271, 1278, 1285, 1292, 1299, 1306, 1313, 1319, 1326, 1339, 1352, 1359, 1366, 1373, 1382, 1394, 1401, 1408, 1414, 1421, 1428, 1441, 1448, 1455, 1461, 1468, 1475, 1488, 1495, 1508, 1519, 1526, 1531, 1538, 1544, 1556, 1568, 1574, 1581, 1594, 1601, 1608, 1615, 1622, 1629, 1636, 1643, 1650, 1657, 1672, 1679, 1689, 1697, 1708, 1715, 1718, 1723, 1727, 1738, 1743, 1752, 1761, 1763, 1769, 1776, and 1786; (ii) a CDR2 having an amino acid sequence that is at least 65%, at least 70%, at least 75%, at least 80%, at least 85%, at least 90%, at least 95%, at least 99%, or 100% identical to any one of SEQ ID NOs: 1200, 1212, 1680, 1690, 1698, 1709, 1728, 1739, 1744, 1753, 1770, and 1777; or at least 65%, at least 70%, at least 75%, at least 80%, at least 85%, at least 90%, at least 95%, at least 99%, or 100% identical to any one of amino acid sequences AAS, APS, AT, ATS, DAS, DDG, DDS, DT, DTS, DVS, EAS, FTS, GAF, GAN, GAS, GAT, GIS, GKN, GNS, HTS, KVS, LAS, LGS, LVS, NAK, NTN, QMS, RMS, RTS, SAS, TTS, WAS, YAS, YAT, YGS, YRS, and YTS; and (iii) a CDR3 having an amino acid sequence that is at least 65%, at least 70%, at least 75%, at least 80%, at least 85%, at least 90%, at least 95%, at least 99%, or 100% identical to any one of SEQ ID NOs: 1097, 1104, 1111, 1121, 1128, 1135, 1142, 1149, 1156, 1163, 1170, 1175, 1182, 1189, 1195, 1201, 1207, 1213, 1222, 1229, 1236, 2009, 1248, 1255, 1262, 1267, 1272, 1279, 1286, 1293, 1300, 1307, 1320, 1327, 1333, 1340, 1346, 1353, 1360, 1367, 1374, 1383, 1389, 1395, 1402, 1409, 1415, 1422, 1429, 1435, 1442, 1449, 1456, 1462, 1469, 1476, 1482, 1489, 1496, 1502, 1509, 1513, 1520, 1532, 1539, 1545, 1557, 1562, 1569, 1575, 1582, 1588, 1595, 1602, 1609, 1616, 1623, 1630, 1637, 1644, 1651, 1658, 1663, 1673, 1681, 1691, 1699, 1710, 1729, 1735, 1745, 1751, 1754, 1778, 1787, and 1976;
[7104] VH1 comprises (i) a complementarity determining region (CDR) 1 having an amino acid sequence that is at least 65%, at least 70%, at least 75%, at least 80%, at least 85%, at least 90%, at least 95%, at least 99%, or 100% identical to any one of SEQ ID NOs: 1099, 1106, 1113, 1117, 1123, 1130, 1137, 1144, 1151, 1158, 1165, 1177, 1184, 1191, 1203, 1215, 1224, 1231, 1238, 1243, 1250, 1257, 1264, 1274, 1281, 1288, 1295, 1302, 1309, 1315, 1322, 1329, 1335, 1342, 1348, 1355, 1362, 1369, 1376, 1385, 1397, 1404, 1417, 1424, 1431, 1437, 1444, 1451, 1458, 1464, 1471, 1478, 1484, 1491, 1498, 1504, 1511, 1515, 1522, 1534, 1547, 1552, 1564, 1577, 1584, 1590, 1597, 1604, 1611, 1618, 1625, 1632, 1639, 1646, 1653, 1660, 1665, 1675, 1683, 1693, 1701, 1705, 1716, 1719, 1731, 1736, 1747, 1756, 1772, 1780, and 1789; (ii) a CDR2 having an amino acid sequence that is at least 65%, at least 70%, at least 75%, at least 80%, at least 85%, at least 90%, at least 95%, at least 99%, or 100% identical to any one of SEQ ID NOs: 1100, 1107, 1114, 1118, 1124, 1131, 1138, 1145, 1152, 1159, 1166, 1178, 1185, 1192, 1204, 1216, 1225, 1232, 1239, 1244, 1251, 1258, 1275, 1282, 1289, 1296, 1303, 1310, 1316, 1323, 1330, 1336, 1343, 1349, 1356, 1363, 1370, 1377, 1386, 1391, 1398, 1405, 1411, 1418, 1425, 1432, 1438, 1445, 1452, 1465, 1472, 1479, 1485, 1492, 1499, 1505, 1516, 1523, 1528, 1535, 1541, 1548, 1553, 1559, 1565, 1571, 1578, 1585, 1591, 1598, 1605, 1612, 1619, 1626, 1633, 1640, 1647, 1654, 1666, 1676, 1684, 1687, 1694, 1702, 1706, 1712, 1717, 1720, 1725, 1732, 1737, 1741, 1748, 1757, 1767, 1773, 1781, and 1790; and (iii) a CDR3 having an amino acid sequence that is at least 65%, at least 70%, at least 75%, at least 80%, at least 85%, at least 90%, at least 95%, at least 99%, or 100% identical to any one of SEQ ID NOs: 1101, 1108, 1115, 1125, 1132, 1139, 1146, 1153, 1160, 1167, 1172, 1179, 1186, 1193, 1197, 1205, 1209, 1217, 1226, 1233, 1240, 1245, 1252, 1259, 1269, 1276, 1283, 1290, 1297, 1304, 1311, 1317, 1324, 1331, 1337, 1344, 1350, 1357, 1364, 1371, 1378, 1387, 1392, 1399, 1406, 1412, 1419, 1426, 1433, 1439, 1446, 1453, 1459, 1466, 1473, 1480, 1486, 1493, 1500, 1506, 1517, 1524, 1529, 1536, 1542, 1549, 1554, 1560, 1566, 1572, 1579, 1586, 1592, 1599, 1606, 1613, 1620, 1627, 1634, 1641, 1648, 1655, 1661, 1667, 1670, 1677, 1685, 1688, 1695, 1703, 1707, 1713, 1733, 1749, 1758, 1762, 1774, 1782, 1791, and 1975; and/or
[7105] VH2 comprises (i) a complementarity determining region (CDR) 1 having an amino acid sequence that is at least 65%, at least 70%, at least 75%, at least 80%, at least 85%, at least 90%, at least 95%, at least 99%, or 100% identical to any one of SEQ ID NOs: 1099, 1106, 1113, 1117, 1123, 1130, 1137, 1144, 1151, 1158, 1165, 1177, 1184, 1191, 1203, 1215, 1224, 1231, 1238, 1243, 1250, 1257, 1264, 1274, 1281, 1288, 1295, 1302, 1309, 1315, 1322, 1329, 1335, 1342, 1348, 1355, 1362, 1369, 1376, 1385, 1397, 1404, 1417, 1424, 1431, 1437, 1444, 1451, 1458, 1464, 1471, 1478, 1484, 1491, 1498, 1504, 1511, 1515, 1522, 1534, 1547, 1552, 1564, 1577, 1584, 1590, 1597, 1604, 1611, 1618, 1625, 1632, 1639, 1646, 1653, 1660, 1665, 1675, 1683, 1693, 1701, 1705, 1716, 1719, 1731, 1736, 1747, 1756, 1772, 1780, and 1789; (ii) a CDR2 having an amino acid sequence that is at least 65%, at least 70%, at least 75%, at least 80%, at least 85%, at least 90%, at least 95%, at least 99%, or 100% identical to any one of SEQ ID NOs: 1100, 1107, 1114, 1118, 1124, 1131, 1138, 1145, 1152, 1159, 1166, 1178, 1185, 1192, 1204, 1216, 1225, 1232, 1239, 1244, 1251, 1258, 1275, 1282, 1289, 1296, 1303, 1310, 1316, 1323, 1330, 1336, 1343, 1349, 1356, 1363, 1370, 1377, 1386, 1391, 1398, 1405, 1411, 1418, 1425, 1432, 1438, 1445, 1452, 1465, 1472, 1479, 1485, 1492, 1499, 1505, 1516, 1523, 1528, 1535, 1541, 1548, 1553, 1559, 1565, 1571, 1578, 1585, 1591, 1598, 1605, 1612, 1619, 1626, 1633, 1640, 1647, 1654, 1666, 1676, 1684, 1687, 1694, 1702, 1706, 1712, 1717, 1720, 1725, 1732, 1737, 1741, 1748, 1757, 1767, 1773, 1781, and 1790; and (iii) a CDR3 having an amino acid sequence that is at least 65%, at least 70%, at least 75%, at least 80%, at least 85%, at least 90%, at least 95%, at least 99%, or 100% identical to any one of SEQ ID NOs: 1101, 1108, 1115, 1125, 1132, 1139, 1146, 1153, 1160, 1167, 1172, 1179, 1186, 1193, 1197, 1205, 1209, 1217, 1226, 1233, 1240, 1245, 1252, 1259, 1269, 1276, 1283, 1290, 1297, 1304, 1311, 1317, 1324, 1331, 1337, 1344, 1350, 1357, 1364, 1371, 1378, 1387, 1392, 1399, 1406, 1412, 1419, 1426, 1433, 1439, 1446, 1453, 1459, 1466, 1473, 1480, 1486, 1493, 1500, 1506, 1517, 1524, 1529, 1536, 1542, 1549, 1554, 1560, 1566, 1572, 1579, 1586, 1592, 1599, 1606, 1613, 1620, 1627, 1634, 1641, 1648, 1655, 1661, 1667, 1670, 1677, 1685, 1688, 1695, 1703, 1707, 1713, 1733, 1749, 1758, 1762, 1774, 1782, 1791, and 1975; or
[7106] (iv)
[7107] VL1 comprises an amino acid sequence that is at least 65%, at least 70%, at least 75%, at least 80%, at least 85%, at least 90%, at least 95%, at least 99%, or 100% identical to any one of SEQ ID NOs: 1098, 1105, 1112, 1122, 1129, 1136, 1143, 1150, 1157, 1164, 1171, 1176, 1183, 1190, 1196, 1202, 1208, 1214, 1219, 1223, 1230, 1237, 1242, 1249, 1256, 1263, 1268, 1273, 1280, 1287, 1294, 1301, 1308, 1314, 1321, 1328, 1334, 1341, 1347, 1354, 1361, 1368, 1375, 1380, 1384, 1390, 1396, 1403, 1410, 1416, 1423, 1430, 1436, 1443, 1450, 1457, 1463, 1470, 1477, 1483, 1490, 1497, 1503, 1510, 1514, 1521, 1527, 1533, 1540, 1546, 1551, 1558, 1563, 1570, 1576, 1583, 1589, 1596, 1603, 1610, 1617, 1624, 1631, 1638, 1645, 1652, 1659, 1664, 1669, 1674, 1682, 1692, 1700, 1711, 1721, 1724, 1730, 1740, 1746, 1755, 1764, 1766, 1771, 1779, 1784, and 1788;
[7108] VL2 comprises an amino acid sequence that is at least 65%, at least 70%, at least 75%, at least 80%, at least 85%, at least 90%, at least 95%, at least 99%, or 100% identical to any one of SEQ ID NOs: 1098, 1105, 1112, 1122, 1129, 1136, 1143, 1150, 1157, 1164, 1171, 1176, 1183, 1190, 1196, 1202, 1208, 1214, 1219, 1223, 1230, 1237, 1242, 1249, 1256, 1263, 1268, 1273, 1280, 1287, 1294, 1301, 1308, 1314, 1321, 1328, 1334, 1341, 1347, 1354, 1361, 1368, 1375, 1380, 1384, 1390, 1396, 1403, 1410, 1416, 1423, 1430, 1436, 1443, 1450, 1457, 1463, 1470, 1477, 1483, 1490, 1497, 1503, 1510, 1514, 1521, 1527, 1533, 1540, 1546, 1551, 1558, 1563, 1570, 1576, 1583, 1589, 1596, 1603, 1610, 1617, 1624, 1631, 1638, 1645, 1652, 1659, 1664, 1669, 1674, 1682, 1692, 1700, 1711, 1721, 1724, 1730, 1740, 1746, 1755, 1764, 1766, 1771, 1779, 1784, and 1788;
[7109] VH1 comprises an amino acid sequence that is at least 65%, at least 70%, at least 75%, at least 80%, at least 85%, at least 90%, at least 95%, at least 99%, or 100% identical to any one of SEQ ID NOs: 1102, 1109, 1116, 1119, 1126, 1133, 1140, 1147, 1154, 1161, 1168, 1173, 1180, 1187, 1194, 1198, 1206, 1210, 1218, 1220, 1227, 1234, 1241, 1246, 1253, 1260, 1265, 1270, 1277, 1284, 1291, 1298, 1305, 1312, 1318, 1325, 1332, 1338, 1345, 1351, 1358, 1365, 1372, 1379, 1381, 1388, 1393, 1400, 1407, 1413, 1420, 1427, 1434, 1440, 1447, 1454, 1460, 1467, 1474, 1481, 1487, 1494, 1501, 1507, 1512, 1518, 1525, 1530, 1537, 1543, 1550, 1555, 1561, 1567, 1573, 1580, 1587, 1593, 1600, 1607, 1614, 1621, 1628, 1635, 1642, 1649, 1656, 1662, 1668, 1671, 1678, 1686, 1696, 1704, 1714, 1722, 1726, 1734, 1742, 1750, 1759, 1760, 1765, 1768, 1775, 1783, 1785, and 1792; and/or
[7110] VH2 comprises an amino acid sequence that is at least 65%, at least 70%, at least 75%, at least 80%, at least 85%, at least 90%, at least 95%, at least 99%, or 100% identical to any one of SEQ ID NOs: 1102, 1109, 1116, 1119, 1126, 1133, 1140, 1147, 1154, 1161, 1168, 1173, 1180, 1187, 1194, 1198, 1206, 1210, 1218, 1220, 1227, 1234, 1241, 1246, 1253, 1260, 1265, 1270, 1277, 1284, 1291, 1298, 1305, 1312, 1318, 1325, 1332, 1338, 1345, 1351, 1358, 1365, 1372, 1379, 1381, 1388, 1393, 1400, 1407, 1413, 1420, 1427, 1434, 1440, 1447, 1454, 1460, 1467, 1474, 1481, 1487, 1494, 1501, 1507, 1512, 1518, 1525, 1530, 1537, 1543, 1550, 1555, 1561, 1567, 1573, 1580, 1587, 1593, 1600, 1607, 1614, 1621, 1628, 1635, 1642, 1649, 1656, 1662, 1668, 1671, 1678, 1686, 1696, 1704, 1714, 1722, 1726, 1734, 1742, 1750, 1759, 1760, 1765, 1768, 1775, 1783, 1785, and 1792; or
[7111] (b)
[7112] (i)
[7113] VL1 comprises a light chain complementarity determining region 1 (LCDR1), LCDR2, and/or LCDR3 of an antibody selected from the group consisting of libivirumab, rmab, rivabazumab pegol, setoxaximab, suvizumab, suvratoxumab, sevirumab, pritoxaximab, porgaviximab, REGN-EB3, obiltoxaximab, gedivumab, foravirumab, larcaviximab, motavizumab, palivizumab, rafivirumab, regavirumab, tuvirumab, cosfroviximab, felvizumab, atidortoxumab, edobacomab, nebacumab, pateclizumab, raxibacumab, urtoxazumab, tosatoxumab, berlimatoxumab, CR6261, diridavumab, firivumab, lesofavumab, navivumab, exbivirumab, lenvervimab, bavituximab, bezlotoxumab, efungumab, leronlimab, nirsevimab, pagibaximab, panobacumab, tefibazumab, ansuvimab, atoltivimab, maftivimab, and odesivimab;
[7114] VL2 comprises a light chain complementarity determining region 1 (LCDR1), LCDR2, and/or LCDR3 of an antibody selected from the group consisting of libivirumab, rmab, rivabazumab pegol, setoxaximab, suvizumab, suvratoxumab, sevirumab, pritoxaximab, porgaviximab, REGN-EB3, obiltoxaximab, gedivumab, foravirumab, larcaviximab, motavizumab, palivizumab, rafivirumab, regavirumab, tuvirumab, cosfroviximab, felvizumab, atidortoxumab, edobacomab, nebacumab, pateclizumab, raxibacumab, urtoxazumab, tosatoxumab, berlimatoxumab, CR6261, diridavumab, firivumab, lesofavumab, navivumab, exbivirumab, lenvervimab, bavituximab, bezlotoxumab, efungumab, leronlimab, nirsevimab, pagibaximab, panobacumab, tefibazumab, ansuvimab, atoltivimab, maftivimab, and odesivimab;
[7115] VH1 comprises a heavy chain complementarity determining region 1 (HCDR1), HCDR2, and/or HCDR3 of an antibody selected from the group consisting of libivirumab, rmab, rivabazumab pegol, setoxaximab, suvizumab, suvratoxumab, sevirumab, pritoxaximab, porgaviximab, REGN-EB3, obiltoxaximab, gedivumab, foravirumab, larcaviximab, motavizumab, palivizumab, rafivirumab, regavirumab, tuvirumab, cosfroviximab, felvizumab, atidortoxumab, edobacomab, nebacumab, pateclizumab, raxibacumab, urtoxazumab, tosatoxumab, berlimatoxumab, CR6261, diridavumab, firivumab, lesofavumab, navivumab, exbivirumab, lenvervimab, bavituximab, bezlotoxumab, efungumab, leronlimab, nirsevimab, pagibaximab, panobacumab, tefibazumab, ansuvimab, atoltivimab, maftivimab, and odesivimab; and/or
[7116] VH2 comprises a heavy chain complementarity determining region 1 (HCDR1), HCDR2, and/or HCDR3 of an antibody selected from the group consisting of libivirumab, rmab, rivabazumab pegol, setoxaximab, suvizumab, suvratoxumab, sevirumab, pritoxaximab, porgaviximab, REGN-EB3, obiltoxaximab, gedivumab, foravirumab, larcaviximab, motavizumab, palivizumab, rafivirumab, regavirumab, tuvirumab, cosfroviximab, felvizumab, atidortoxumab, edobacomab, nebacumab, pateclizumab, raxibacumab, urtoxazumab, tosatoxumab, berlimatoxumab, CR6261, diridavumab, firivumab, lesofavumab, navivumab, exbivirumab, lenvervimab, bavituximab, bezlotoxumab, efungumab, leronlimab, nirsevimab, pagibaximab, panobacumab, tefibazumab, ansuvimab, atoltivimab, maftivimab, and odesivimab; or
[7117] (ii)
[7118] VL1 comprises a VL of an antibody selected from the group consisting of libivirumab, rmab, rivabazumab pegol, setoxaximab, suvizumab, suvratoxumab, sevirumab, pritoxaximab, porgaviximab, REGN-EB3, obiltoxaximab, gedivumab, foravirumab, larcaviximab, motavizumab, palivizumab, rafivirumab, regavirumab, tuvirumab, cosfroviximab, felvizumab, atidortoxumab, edobacomab, nebacumab, pateclizumab, raxibacumab, urtoxazumab, tosatoxumab, berlimatoxumab, CR6261, diridavumab, firivumab, lesofavumab, navivumab, exbivirumab, lenvervimab, bavituximab, bezlotoxumab, efungumab, leronlimab, nirsevimab, pagibaximab, panobacumab, tefibazumab, ansuvimab, atoltivimab, maftivimab, and odesivimab;
[7119] VL2 comprises a VL of an antibody selected from the group consisting of libivirumab, rmab, rivabazumab pegol, setoxaximab, suvizumab, suvratoxumab, sevirumab, pritoxaximab, porgaviximab, REGN-EB3, obiltoxaximab, gedivumab, foravirumab, larcaviximab, motavizumab, palivizumab, rafivirumab, regavirumab, tuvirumab, cosfroviximab, felvizumab, atidortoxumab, edobacomab, nebacumab, pateclizumab, raxibacumab, urtoxazumab, tosatoxumab, berlimatoxumab, CR6261, diridavumab, firivumab, lesofavumab, navivumab, exbivirumab, lenvervimab, bavituximab, bezlotoxumab, efungumab, leronlimab, nirsevimab, pagibaximab, panobacumab, tefibazumab, ansuvimab, atoltivimab, maftivimab, and odesivimab;
[7120] VH1 comprises a VH of an antibody selected from the group consisting of libivirumab, rmab, rivabazumab pegol, setoxaximab, suvizumab, suvratoxumab, sevirumab, pritoxaximab, porgaviximab, REGN-EB3, obiltoxaximab, gedivumab, foravirumab, larcaviximab, motavizumab, palivizumab, rafivirumab, regavirumab, tuvirumab, cosfroviximab, felvizumab, atidortoxumab, edobacomab, nebacumab, pateclizumab, raxibacumab, urtoxazumab, tosatoxumab, berlimatoxumab, CR6261, diridavumab, firivumab, lesofavumab, navivumab, exbivirumab, lenvervimab, bavituximab, bezlotoxumab, efungumab, leronlimab, nirsevimab, pagibaximab, panobacumab, tefibazumab, ansuvimab, atoltivimab, maftivimab, and odesivimab; and/or
[7121] VH2 comprises a VH of an antibody selected from the group consisting of libivirumab, rmab, rivabazumab pegol, setoxaximab, suvizumab, suvratoxumab, sevirumab, pritoxaximab, porgaviximab, REGN-EB3, obiltoxaximab, gedivumab, foravirumab, larcaviximab, motavizumab, palivizumab, rafivirumab, regavirumab, tuvirumab, cosfroviximab, felvizumab, atidortoxumab, edobacomab, nebacumab, pateclizumab, raxibacumab, urtoxazumab, tosatoxumab, berlimatoxumab, CR6261, diridavumab, firivumab, lesofavumab, navivumab, exbivirumab, lenvervimab, bavituximab, bezlotoxumab, efungumab, leronlimab, nirsevimab, pagibaximab, panobacumab, tefibazumab, ansuvimab, atoltivimab, maftivimab, and odesivimab; or
[7122] (iii)
[7123] VL1 comprises (i) a complementarity determining region (CDR) 1 having an amino acid sequence that is at least 65%, at least 70%, at least 75%, at least 80%, at least 85%, at least 90%, at least 95%, at least 99%, or 100% identical to any one of SEQ ID NOs: 1428, 1793, 1798, 1810, 1817, 1824, 1977, 1985, 1993 and 2001; (ii) a CDR2 having an amino acid sequence that is at least 65%, at least 70%, at least 75%, at least 80%, at least 85%, at least 90%, at least 95%, at least 99%, or 100% identical to any one of SEQ ID NOs: 1978, 1986, 1994, and 2002; or at least 65%, at least 70%, at least 75%, at least 80%, at least 85%, at least 90%, at least 95%, at least 99%, or 100% identical to any one of amino acid sequences YTS, DTS, GAS, and AAS; and (iii) a CDR3 having an amino acid sequence that is at least 65%, at least 70%, at least 75%, at least 80%, at least 85%, at least 90%, at least 95%, at least 99%, or 100% identical to any one of SEQ ID NOs: 1229, 1799, 1805, 1811, 1818, 1825, 1979, 1987, 1995, and 2003;
[7124] VL2 comprises (i) a complementarity determining region (CDR) 1 having an amino acid sequence that is at least 65%, at least 70%, at least 75%, at least 80%, at least 85%, at least 90%, at least 95%, at least 99%, or 100% identical to any one of SEQ ID NOs: 1428, 1793, 1798, 1810, 1817, 1824, 1977, 1985, 1993 and 2001; (ii) a CDR2 having an amino acid sequence that is at least 65%, at least 70%, at least 75%, at least 80%, at least 85%, at least 90%, at least 95%, at least 99%, or 100% identical to any one of SEQ ID NOs: 1978, 1986, 1994, and 2002; or at least 65%, at least 70%, at least 75%, at least 80%, at least 85%, at least 90%, at least 95%, at least 99%, or 100% identical to any one of amino acid sequences YTS, DTS, GAS, and AAS; and (iii) a CDR3 having an amino acid sequence that is at least 65%, at least 70%, at least 75%, at least 80%, at least 85%, at least 90%, at least 95%, at least 99%, or 100% identical to any one of SEQ ID NOs: 1229, 1799, 1805, 1811, 1818, 1825, 1979, 1987, 1995, and 2003;
[7125] VH1 comprises (i) a complementarity determining region (CDR) 1 having an amino acid sequence that is at least 65%, at least 70%, at least 75%, at least 80%, at least 85%, at least 90%, at least 95%, at least 99%, or 100% identical to any one of SEQ ID NOs: 1577, 1795, 1801, 1813, 1820, 1827, 1981, 1989, 1997, and 2005; (ii) a CDR2 having an amino acid sequence that is at least 65%, at least 70%, at least 75%, at least 80%, at least 85%, at least 90%, at least 95%, at least 99%, or 100% identical to any one of SEQ ID NOs: 1159, 1802, 1807, 1814, 1821, 1828, 1982, 1990, 1998, and 2006; and (iii) a CDR3 having an amino acid sequence that is at least 65%, at least 70%, at least 75%, at least 80%, at least 85%, at least 90%, at least 95%, at least 99%, or 100% identical to any one of SEQ ID NOs: 1796, 1803, 1808, 1815, 1822, 1829, 1983, 1991, 1999, and 2007; and/or
[7126] VH2 comprises (i) a complementarity determining region (CDR) 1 having an amino acid sequence that is at least 65%, at least 70%, at least 75%, at least 80%, at least 85%, at least 90%, at least 95%, at least 99%, or 100% identical to any one of SEQ ID NOs: 1577, 1795, 1801, 1813, 1820, 1827, 1981, 1989, 1997, and 2005; (ii) a CDR2 having an amino acid sequence that is at least 65%, at least 70%, at least 75%, at least 80%, at least 85%, at least 90%, at least 95%, at least 99%, or 100% identical to any one of SEQ ID NOs: 1159, 1802, 1807, 1814, 1821, 1828, 1982, 1990, 1998, and 2006; and (iii) a CDR3 having an amino acid sequence that is at least 65%, at least 70%, at least 75%, at least 80%, at least 85%, at least 90%, at least 95%, at least 99%, or 100% identical to any one of SEQ ID NOs: 1796, 1803, 1808, 1815, 1822, 1829, 1983, 1991, 1999, and 2007; or
[7127] (iv)
[7128] VL1 comprises an amino acid sequence that is at least 65%, at least 70%, at least 75%, at least 80%, at least 85%, at least 90%, at least 95%, at least 99%, or 100% identical to any one of SEQ ID NOs: 1794, 1800, 1806, 1812, 1819, 1826, 1980, 1988, 1996, and 2004;
[7129] VL2 comprises an amino acid sequence that is at least 65%, at least 70%, at least 75%, at least 80%, at least 85%, at least 90%, at least 95%, at least 99%, or 100% identical to any one of SEQ ID NOs: 1794, 1800, 1806, 1812, 1819, 1826, 1980, 1988, 1996, and 2004;
[7130] VH1 comprises an amino acid sequence that is at least 65%, at least 70%, at least 75%, at least 80%, at least 85%, at least 90%, at least 95%, at least 99%, or 100% identical to any one of SEQ ID NOS 1797, 1804, 1809, 1816, 1823, 1830, 1984, 1992, 2000, and 2008; and/or
[7131] VH2 comprises an amino acid sequence that is at least 65%, at least 70%, at least 75%, at least 80%, at least 85%, at least 90%, at least 95%, at least 99%, or 100% identical to any one of SEQ ID NOS 1797, 1804, 1809, 1816, 1823, 1830, 1984, 1992, 2000, and 2008; or
[7132] (c)
[7133] (i)
[7134] VL1 comprises a light chain complementarity determining region 1 (LCDR1), LCDR2, and/or LCDR3 of an antibody selected from the group consisting of aducanumab, alirocumab, frovocimab, lodelcizumab, bococizumab, evolocumab, ralpancizumab, anifrolumab, atorolimumab, bapineuzumab, bedinvetmab, begelomab, biciromab, bimagrumab, birtamimab, blosozumab, burosumab, caplacizumab, concizumab, crenezumab, crizanlizumab, crotedumab, dezamizumab, domagrozumab, donanemab, eldelumab, elezanumab, emapalumab, emicizumab, eptinezumab, erenumab, evinacumab, faralimomab, fasinumab, fontolizumab, fremanezumab, frunevetmab, fulranumab, galcanezumab, gantenerumab, gosuranemab, idarucizumab, imciromab, inclacumab, lampalizumab, lanadelumab, landogrozumab, lecanemab, ligelizumab, marstacimab, mavrilimumab, morolimumab, NEOD001, omalizumab, oMS721, orticumab, otilimab, ozanezumab, ponezumab, prasinezumab, quilizumab, ranevetmab, refanezumab, roledumab, romosozumab, rozanolixizumab, setrusumab, SHP647, solanezumab, stamulumab, suptavumab, sutimlimab, tanezumab, crovalimab, and lokivetmab;
[7135] VL2 comprises a light chain complementarity determining region 1 (LCDR1), LCDR2, and/or LCDR3 of an antibody selected from the group consisting of aducanumab, alirocumab, frovocimab, lodelcizumab, bococizumab, evolocumab, ralpancizumab, anifrolumab, atorolimumab, bapineuzumab, bedinvetmab, begelomab, biciromab, bimagrumab, birtamimab, blosozumab, burosumab, caplacizumab, concizumab, crenezumab, crizanlizumab, crotedumab, dezamizumab, domagrozumab, donanemab, eldelumab, elezanumab, emapalumab, emicizumab, eptinezumab, erenumab, evinacumab, faralimomab, fasinumab, fontolizumab, fremanezumab, frunevetmab, fulranumab, galcanezumab, gantenerumab, gosuranemab, idarucizumab, imciromab, inclacumab, lampalizumab, lanadelumab, landogrozumab, lecanemab, ligelizumab, marstacimab, mavrilimumab, morolimumab, NEOD001, omalizumab, oMS721, orticumab, otilimab, ozanezumab, ponezumab, prasinezumab, quilizumab, ranevetmab, refanezumab, roledumab, romosozumab, rozanolixizumab, setrusumab, SHP647, solanezumab, stamulumab, suptavumab, sutimlimab, tanezumab, crovalimab, and lokivetmab;
[7136] VH1 comprises a heavy chain complementarity determining region 1 (HCDR1), HCDR2, and/or HCDR3 of an antibody selected from the group consisting of aducanumab, alirocumab, frovocimab, lodelcizumab, bococizumab, evolocumab, ralpancizumab, anifrolumab, atorolimumab, bapineuzumab, bedinvetmab, begelomab, biciromab, bimagrumab, birtamimab, blosozumab, burosumab, caplacizumab, concizumab, crenezumab, crizanlizumab, crotedumab, dezamizumab, domagrozumab, donanemab, eldelumab, elezanumab, emapalumab, emicizumab, eptinezumab, erenumab, evinacumab, faralimomab, fasinumab, fontolizumab, fremanezumab, frunevetmab, fulranumab, galcanezumab, gantenerumab, gosuranemab, idarucizumab, imciromab, inclacumab, lampalizumab, lanadelumab, landogrozumab, lecanemab, ligelizumab, marstacimab, mavrilimumab, morolimumab, NEOD001, omalizumab, oMS721, orticumab, otilimab, ozanezumab, ponezumab, prasinezumab, quilizumab, ranevetmab, refanezumab, roledumab, romosozumab, rozanolixizumab, setrusumab, SHP647, solanezumab, stamulumab, suptavumab, sutimlimab, tanezumab, crovalimab, and lokivetmab; and/or
[7137] VH2 comprises a heavy chain complementarity determining region 1 (HCDR1), HCDR2, and/or HCDR3 of an antibody selected from the group consisting of aducanumab, alirocumab, frovocimab, lodelcizumab, bococizumab, evolocumab, ralpancizumab, anifrolumab, atorolimumab, bapineuzumab, bedinvetmab, begelomab, biciromab, bimagrumab, birtamimab, blosozumab, burosumab, caplacizumab, concizumab, crenezumab, crizanlizumab, crotedumab, dezamizumab, domagrozumab, donanemab, eldelumab, elezanumab, emapalumab, emicizumab, eptinezumab, erenumab, evinacumab, faralimomab, fasinumab, fontolizumab, fremanezumab, frunevetmab, fulranumab, galcanezumab, gantenerumab, gosuranemab, idarucizumab, imciromab, inclacumab, lampalizumab, lanadelumab, landogrozumab, lecanemab, ligelizumab, marstacimab, mavrilimumab, morolimumab, NEOD001, omalizumab, oMS721, orticumab, otilimab, ozanezumab, ponezumab, prasinezumab, quilizumab, ranevetmab, refanezumab, roledumab, romosozumab, rozanolixizumab, setrusumab, SHP647, solanezumab, stamulumab, suptavumab, sutimlimab, tanezumab, crovalimab, and lokivetmab; or
[7138] (ii)
[7139] VL1 comprises a VL of an antibody selected from the group consisting of aducanumab, alirocumab, frovocimab, lodelcizumab, bococizumab, evolocumab, ralpancizumab, anifrolumab, atorolimumab, bapineuzumab, bedinvetmab, begelomab, biciromab, bimagrumab, birtamimab, blosozumab, burosumab, caplacizumab, concizumab, crenezumab, crizanlizumab, crotedumab, dezamizumab, domagrozumab, donanemab, eldelumab, elezanumab, emapalumab, emicizumab, eptinezumab, erenumab, evinacumab, faralimomab, fasinumab, fontolizumab, fremanezumab, frunevetmab, fulranumab, galcanezumab, gantenerumab, gosuranemab, idarucizumab, imciromab, inclacumab, lampalizumab, lanadelumab, landogrozumab, lecanemab, ligelizumab, marstacimab, mavrilimumab, morolimumab, NEOD001, omalizumab, oMS721, orticumab, otilimab, ozanezumab, ponezumab, prasinezumab, quilizumab, ranevetmab, refanezumab, roledumab, romosozumab, rozanolixizumab, setrusumab, SHP647, solanezumab, stamulumab, suptavumab, sutimlimab, tanezumab, crovalimab, and lokivetmab;
[7140] VL2 comprises a VL of an antibody selected from the group consisting of aducanumab, alirocumab, frovocimab, lodelcizumab, bococizumab, evolocumab, ralpancizumab, anifrolumab, atorolimumab, bapineuzumab, bedinvetmab, begelomab, biciromab, bimagrumab, birtamimab, blosozumab, burosumab, caplacizumab, concizumab, crenezumab, crizanlizumab, crotedumab, dezamizumab, domagrozumab, donanemab, eldelumab, elezanumab, emapalumab, emicizumab, eptinezumab, erenumab, evinacumab, faralimomab, fasinumab, fontolizumab, fremanezumab, frunevetmab, fulranumab, galcanezumab, gantenerumab, gosuranemab, idarucizumab, imciromab, inclacumab, lampalizumab, lanadelumab, landogrozumab, lecanemab, ligelizumab, marstacimab, mavrilimumab, morolimumab, NEOD001, omalizumab, oMS721, orticumab, otilimab, ozanezumab, ponezumab, prasinezumab, quilizumab, ranevetmab, refanezumab, roledumab, romosozumab, rozanolixizumab, setrusumab, SHP647, solanezumab, stamulumab, suptavumab, sutimlimab, tanezumab, crovalimab, and lokivetmab;
[7141] VH1 comprises a VH of an antibody selected from the group consisting of aducanumab, alirocumab, frovocimab, lodelcizumab, bococizumab, evolocumab, ralpancizumab, anifrolumab, atorolimumab, bapineuzumab, bedinvetmab, begelomab, biciromab, bimagrumab, birtamimab, blosozumab, burosumab, caplacizumab, concizumab, crenezumab, crizanlizumab, crotedumab, dezamizumab, domagrozumab, donanemab, eldelumab, elezanumab, emapalumab, emicizumab, eptinezumab, erenumab, evinacumab, faralimomab, fasinumab, fontolizumab, fremanezumab, frunevetmab, fulranumab, galcanezumab, gantenerumab, gosuranemab, idarucizumab, imciromab, inclacumab, lampalizumab, lanadelumab, landogrozumab, lecanemab, ligelizumab, marstacimab, mavrilimumab, morolimumab, NEOD001, omalizumab, oMS721, orticumab, otilimab, ozanezumab, ponezumab, prasinezumab, quilizumab, ranevetmab, refanezumab, roledumab, romosozumab, rozanolixizumab, setrusumab, SHP647, solanezumab, stamulumab, suptavumab, sutimlimab, tanezumab, crovalimab, and lokivetmab; and/or VH2 comprises a VH of an antibody selected from the group consisting of aducanumab, alirocumab, frovocimab, lodelcizumab, bococizumab, evolocumab, ralpancizumab, anifrolumab, atorolimumab, bapineuzumab, bedinvetmab, begelomab, biciromab, bimagrumab, birtamimab, blosozumab, burosumab, caplacizumab, concizumab, crenezumab, crizanlizumab, crotedumab, dezamizumab, domagrozumab, donanemab, eldelumab, elezanumab, emapalumab, emicizumab, eptinezumab, erenumab, evinacumab, faralimomab, fasinumab, fontolizumab, fremanezumab, frunevetmab, fulranumab, galcanezumab, gantenerumab, gosuranemab, idarucizumab, imciromab, inclacumab, lampalizumab, lanadelumab, landogrozumab, lecanemab, ligelizumab, marstacimab, mavrilimumab, morolimumab, NEOD001, omalizumab, oMS721, orticumab, otilimab, ozanezumab, ponezumab, prasinezumab, quilizumab, ranevetmab, refanezumab, roledumab, romosozumab, rozanolixizumab, setrusumab, SHP647, solanezumab, stamulumab, suptavumab, sutimlimab, tanezumab, crovalimab, and lokivetmab; or
[7142] (iii)
[7143] VL1 comprises (i) a complementarity determining region (CDR) 1 having an amino acid sequence that is at least 65%, at least 70%, at least 75%, at least 80%, at least 85%, at least 90%, at least 95%, at least 99%, or 100% identical to any one of SEQ ID NOs: 1120, 1228, 1359, 1519, 1831, 1838, 1845, 1852, 1859, 1866, 1872, 1878, 1885, 1891, 1898, 1905, 1911, 1917, 1924, 1931, 1938, 1945, and 1963; (ii) a CDR2 having an amino acid sequence that is at least 65%, at least 70%, at least 75%, at least 80%, at least 85%, at least 90%, at least 95%, at least 99%, or 100% identical to any one of amino acid sequences AAS, AVS, DAS, DNN, EDN, EVS, GAS, GNG, KAS, KVS, LVS, NTD, STS, WAS, and YTS; and (iii) a CDR3 having an amino acid sequence that is at least 65%, at least 70%, at least 75%, at least 80%, at least 85%, at least 90%, at least 95%, at least 99%, or 100% identical to any one of SEQ ID NOs: 1360, 1832, 1839, 1846, 1853, 1860, 1867, 1873, 1879, 1886, 1892, 1899, 1906, 1912, 1918, 1925, 1932, 1939, 1946, 1951, 1957, 1964, and 1970;
[7144] VL2 comprises (i) a complementarity determining region (CDR) 1 having an amino acid sequence that is at least 65%, at least 70%, at least 75%, at least 80%, at least 85%, at least 90%, at least 95%, at least 99%, or 100% identical to any one of SEQ ID NOs: 1120, 1228, 1359, 1519, 1831, 1838, 1845, 1852, 1859, 1866, 1872, 1878, 1885, 1891, 1898, 1905, 1911, 1917, 1924, 1931, 1938, 1945, and 1963; (ii) a CDR2 having an amino acid sequence that is at least 65%, at least 70%, at least 75%, at least 80%, at least 85%, at least 90%, at least 95%, at least 99%, or 100% identical to any one of amino acid sequences AAS, AVS, DAS, DNN, EDN, EVS, GAS, GNG, KAS, KVS, LVS, NTD, STS, WAS, and YTS; and (iii) a CDR3 having an amino acid sequence that is at least 65%, at least 70%, at least 75%, at least 80%, at least 85%, at least 90%, at least 95%, at least 99%, or 100% identical to any one of SEQ ID NOs: 1360, 1832, 1839, 1846, 1853, 1860, 1867, 1873, 1879, 1886, 1892, 1899, 1906, 1912, 1918, 1925, 1932, 1939, 1946, 1951, 1957, 1964, and 1970;
[7145] VH1 comprises (i) a complementarity determining region (CDR) 1 having an amino acid sequence that is at least 65%, at least 70%, at least 75%, at least 80%, at least 85%, at least 90%, at least 95%, at least 99%, or 100% identical to any one of SEQ ID NOs: 1309, 1362, 1437, 1552, 1618, 1639, 1834, 1841, 1848, 1855, 1862, 1881, 1894, 1901, 1920, 1927, 1934, 1941, 1953, 1959, and 1966; (ii) a CDR2 having an amino acid sequence that is at least 65%, at least 70%, at least 75%, at least 80%, at least 85%, at least 90%, at least 95%, at least 99%, or 100% identical to any one of SEQ ID NOs: 1363, 1835, 1842, 1849, 1856, 1863, 1869, 1875, 1882, 1888, 1895, 1902, 1908, 1914, 1921, 1928, 1935, 1942, 1948, 1954, 1960, 1967, and 1972; and (iii) a CDR3 having an amino acid sequence that is at least 65%, at least 70%, at least 75%, at least 80%, at least 85%, at least 90%, at least 95%, at least 99%, or 100% identical to any one of SEQ ID NOs: 1364, 1836, 1843, 1850, 1857, 1864, 1870, 1876, 1883, 1889, 1896, 1903, 1909, 1915, 1922, 1929, 1936, 1943, 1949, 1955, 1961, 1968, and 1973; and/or
[7146] VH2 comprises (i) a complementarity determining region (CDR) 1 having an amino acid sequence that is at least 65%, at least 70%, at least 75%, at least 80%, at least 85%, at least 90%, at least 95%, at least 99%, or 100% identical to any one of SEQ ID NOs: 1309, 1362, 1437, 1552, 1618, 1639, 1834, 1841, 1848, 1855, 1862, 1881, 1894, 1901, 1920, 1927, 1934, 1941, 1953, 1959, and 1966; (ii) a CDR2 having an amino acid sequence that is at least 65%, at least 70%, at least 75%, at least 80%, at least 85%, at least 90%, at least 95%, at least 99%, or 100% identical to any one of SEQ ID NOs: 1363, 1835, 1842, 1849, 1856, 1863, 1869, 1875, 1882, 1888, 1895, 1902, 1908, 1914, 1921, 1928, 1935, 1942, 1948, 1954, 1960, 1967, and 1972; and (iii) a CDR3 having an amino acid sequence that is at least 65%, at least 70%, at least 75%, at least 80%, at least 85%, at least 90%, at least 95%, at least 99%, or 100% identical to any one of SEQ ID NOs: 1364, 1836, 1843, 1850, 1857, 1864, 1870, 1876, 1883, 1889, 1896, 1903, 1909, 1915, 1922, 1929, 1936, 1943, 1949, 1955, 1961, 1968, and 1973; or
[7147] (iv)
[7148] VL1 comprises an amino acid sequence that is at least 65%, at least 70%, at least 75%, at least 80%, at least 85%, at least 90%, at least 95%, at least 99%, or 100% identical to any one of SEQ ID NOs: 1361, 1833, 1840, 1847, 1854, 1861, 1868, 1874, 1880, 1887, 1893, 1900, 1907, 1913, 1919, 1926, 1933, 1940, 1947, 1952, 1958, 1965, and 1971;
[7149] VL2 comprises an amino acid sequence that is at least 65%, at least 70%, at least 75%, at least 80%, at least 85%, at least 90%, at least 95%, at least 99%, or 100% identical to any one of SEQ ID NOs: 1361, 1833, 1840, 1847, 1854, 1861, 1868, 1874, 1880, 1887, 1893, 1900, 1907, 1913, 1919, 1926, 1933, 1940, 1947, 1952, 1958, 1965, and 1971;
[7150] VH1 comprises an amino acid sequence that is at least 65%, at least 70%, at least 75%, at least 80%, at least 85%, at least 90%, at least 95%, at least 99%, or 100% identical to any one of SEQ ID NOs: 1365, 1837, 1844, 1851, 1858, 1865, 1871, 1877, 1884, 1890, 1897, 1904, 1910, 1916, 1923, 1930, 1937, 1944, 1950, 1956, 1962, 1969, and 1974; and/or
[7151] VH2 comprises an amino acid sequence that is at least 65%, at least 70%, at least 75%, at least 80%, at least 85%, at least 90%, at least 95%, at least 99%, or 100% identical to any one of SEQ ID NOs: 1365, 1837, 1844, 1851, 1858, 1865, 1871, 1877, 1884, 1890, 1897, 1904, 1910, 1916, 1923, 1930, 1937, 1944, 1950, 1956, 1962, 1969, and 1974.

[7152] In some aspects, one or both of the antigen binding polypeptides comprised in the antigen binding polypeptide complexes disclosed herein, comprise one or more CL, as indicated in the formulas representing the antigen binding polypeptide complexes disclosed herein. In some aspects, the CL comprises an amino acid sequence at least 65%, at least 70%, at least 75%, at least 80%, at least 85%, at least 90%, at least 95%, at least 99%, or 100% identical to any one of SEQ ID NOs: 374, 637, or 1092-1095.

[7153] In some aspects, one or both of the antigen binding polypeptides comprised in the antigen binding polypeptide complexes disclosed herein, comprise one or more CH1, as indicated in the formulas representing the antigen binding polypeptide complexes disclosed herein. In some aspects, the CH1 comprises an amino acid sequence at least 65%, at least 70%, at least 75%, at least 80%, at least 85%, at least 90%, at least 95%, at least 99%, or 100% identical to any one of SEQ ID NOs: 375, 634, 1070, 1071, or 1086-1091.

[7154] In some aspects, one or both of the antigen binding polypeptides comprised in the antigen binding polypeptide complexes provided herein further comprise an Fc region. In some aspects, one or both of the antigen binding polypeptides comprised in the antigen binding polypeptide complexes provided herein further comprise an Fc region at the carboxy-terminus. In some aspects, the Fc region comprises an immunoglobulin heavy chain constant region 2 (CH2) and/or an immunoglobulin heavy chain constant region 3 (CH3). In some aspects, the Fc region further comprises an immunoglobulin hinge (i.e., a hinge region). In some aspects, the hinge region is interposed between a CH1 and a CH2 (i.e., a hinge region is localized between the carboxy terminal residue of a CH1 and the N-terminal residue of a CH2). In some aspects, the hinge region comprises an amino acid sequence at least 65%, at least 70%, at least 75%, at least 80%, at least 85%, at least 90%, at least 95%, at least 99%, or 100% identical to any one of SEQ ID NOs: 635, 636, 1072, 1073, or 1074. In some aspects, the Fc region comprises a CH2 and a CH3. In some aspects, the CH2 comprises an amino acid sequence that is at least 65%, at least 70%, at least 75%, at least 80%, at least 85%, at least 90%, at least 95%, at least 99%, or 100% identical to any one of SEQ ID NOs: 1075-1078. In some aspects, the CH3 comprises an amino acid sequence that is at least 65%, at least 70%, at least 75%, at least 80%, at least 85%, at least 90%, at least 95%, at least 99%, or 100% identical to any one of SEQ ID NOs: 1079-1085. In some aspects, the Fc region comprises an amino acid sequence that is at least 65%, at least 70%, at least 75%, at least 80%, at least 85%, at least 90%, at least 95%, at least 99%, or 100% identical to any one of SEQ ID NOs: 376-380.

[7155] In some aspects, the Fc region comprises one or more amino acid substitutions. In some aspects, the one or more amino acid substitutions comprise one or more half-life extension amino acid substitutions. In some aspects, the one or more half-life extension amino acid substitutions comprise one or more of amino acid substitutions M428L, N434A, N434S, L234F, L235E, P331S, M252Y, S254T, or T256E, or equivalent thereof, based on the EU numbering scheme. In some aspects, the one or more half-life extension amino acid substitutions comprise a LA (M428L and N434A, or equivalent thereof, based on the EU numbering scheme) amino acid substitution. In some aspects, the one or more half-life extension amino acid substitutions comprise a LS (M428L and N434S, or equivalent thereof, based on the EU numbering scheme) amino acid substitution. In some aspects, the one or more half-life extension amino acid substitutions comprise L234F and L235E, or equivalent thereof (based on the EU numbering scheme) amino acid substitutions. In some aspects, the one or more half-life extension amino acid substitutions comprise a TM (L234F, L235E, and P331S, or equivalent thereof, based on the EU numbering scheme) amino acid substitution. In some aspects, the one or more half-life extension amino acid substitutions comprise a YTE (M252Y, S254T, and T256E, or equivalent thereof, based on the EU numbering scheme) amino acid substitution.

[7156] In some aspects, the Fc region comprises at least one knob-into-hole modification. In some aspects, the antigen binding polypeptides complexes disclosed herein are IgG1 or IgG4 antibodies or antigen binding fragments thereof. In some aspects, the knob-into-hole modification comprises one or more of knob substitutions of S354C and T366W, or equivalent thereof, and/or one or more of hole substitutions of Y349C, T366S, L368A, Y407V, or equivalent thereof, or a combination thereof, based on the EU numbering scheme. In some aspects, the Fc region comprises a knob-into-hole modification comprising knob substitutions of S354C and T366W, or equivalent thereof, and/or hole substitutions of Y349C, T366S, L368A, and Y407V, or equivalent thereof, and/or a half-life extension amino acid substitution comprising: a LA (M428L and N434A, or equivalent thereof, based on the EU numbering scheme) amino acid substitution, a LS (M428L and N434S, or equivalent thereof, based on the EU numbering scheme) amino acid substitution. L234F and L235E, or equivalent thereof (based on the EU numbering scheme) amino acid substitutions, a TM (L234F, L235E, and P331S, or equivalent thereof, based on the EU numbering scheme) amino acid substitution, a YTE (M252Y, S254T, and T256E, or equivalent thereof, based on the EU numbering scheme) amino acid substitution, or any combination thereof.

[7157] In some aspects, the Fc region comprises knob substitutions of S354C and T366W, or equivalent thereof, and a half-life extension amino acid substitution comprising: a LA (M428L and N434A, or equivalent thereof, based on the EU numbering scheme) amino acid substitution, a LS (M428L and N434S, or equivalent thereof, based on the EU numbering scheme) amino acid substitution. L234F and L235E, or equivalent thereof (based on the EU numbering scheme) amino acid substitutions, a TM (L234F, L235E, and P331S, or equivalent thereof, based on the EU numbering scheme) amino acid substitution, a YTE (M252Y, S254T, and T256E, or equivalent thereof, based on the EU numbering scheme) amino acid substitution, or any combination thereof.

[7158] In some aspects, the Fc region comprises hole substitutions of Y349C, T366S, L368A, and Y407V, or equivalent thereof, and a half-life extension amino acid substitution comprising: a LA (M428L and N434A, or equivalent thereof, based on the EU numbering scheme) amino acid substitution, a LS (M428L and N434S, or equivalent thereof, based on the EU numbering scheme) amino acid substitution. L234F and L235E, or equivalent thereof (based on the EU numbering scheme) amino acid substitutions, a TM (L234F, L235E, and P331S, or equivalent thereof, based on the EU numbering scheme) amino acid substitution, a YTE (M252Y, S254T, and T256E, or equivalent thereof, based on the EU numbering scheme) amino acid substitution, or any combination thereof.

[7159] In some aspects, one or both of the antigen binding polypeptides comprised in the antigen binding polypeptide complexes disclosed herein comprise one or more Fc effector function knockout mutation. In some aspects, one or both of the antigen binding polypeptides comprised in the antigen binding polypeptide complexes disclosed herein are IgG1 or IgG4 antibodies or antigen binding fragments thereof. In some aspects, the Fc effector function knockout mutation is L234A, L235A, P239A, or equivalent thereof, or a combination thereof, based on the EU numbering scheme.

[7160] In some aspects, one or both of the antigen binding polypeptides comprised in the antigen binding polypeptide complexes disclosed herein comprise a mutation at a glycosylation site. In some aspects, the mutation at a glycosylation site is a mutation at an N-glycosylation site. In some aspects, one or both of the antigen binding polypeptides comprised in the antigen binding polypeptide complexes disclosed herein comprise a VH comprising a mutation at a glycosylation site. In some aspects, the mutation at a glycosylation site is a mutation at an N-glycosylation site. In some aspects, the mutation at an N-glycosylation site is at amino acid N62, or equivalent thereof, of the VH region or equivalent thereof. In some aspects, the mutation at an N-glycosylation site at amino acid N62 is N62Q or N62S, or equivalent thereof.

[7161] In some aspects, one or both of the antigen binding polypeptides comprised in the antigen binding polypeptide complexes disclosed herein, comprise one or more optional linkers. The one or more optional linkers are indicated herein as Ln, wherein n is an integer, and the integer next to each L indicates each L comprised in the antigen binding polypeptides comprised in the antigen binding polypeptide complexes disclosed herein. For example, if an antigen binding polypeptide comprised in the antigen binding polypeptide complexes disclosed herein comprises two linkers, the first linker from N-terminus to C-terminus is herein indicated as L1, and the second linker from N-terminus to C-terminus is herein indicated as L2. If an antigen binding polypeptide complex disclosed herein comprises a first antigen binding polypeptide comprising two linkers, indicated herein as L1 and L2, as explained above, the linkers comprised in the second antigen binding polypeptide are indicated with the following integer, in this example, the first linker from N-terminus to C-terminus of the second antigen binding polypeptide is herein indicated as L3, the second linker from N-terminus to C-terminus of the second antigen binding polypeptide is herein indicated as L3. In some aspects, any one of the optional linkers each independently have a length of from 0 amino acids to about 50 amino acids. In some aspects, any one of the optional linkers each independently have a length of from 5 amino acids to about 40 amino acids.

[7162] In some aspects, any one of the optional linkers are non-immunogenic. In some aspects, any one of the optional linkers do not contain a consensus T cell epitope.

[7163] In some aspects, any of Ln comprises an amino acid sequence of G or A, or an amino acid sequence at least 65%, at least 70%, at least 75%, at least 80%, at least 85%, at least 90%, at least 95%, at least 99%, or 100% identical to amino acid sequence GSS or ASG, or an amino acid sequence at least 65%, at least 70%, at least 75%, at least 80%, at least 85%, at least 90%, at least 95%, at least 99%, or 100% identical to any one of SEQ ID NOs: 333-373 and 967-971. In some aspects. Ln comprises an amino acid sequence at least 65%, at least 70%, at least 75%, at least 80%, at least 85%, at least 90%, at least 95%, at least 99%, or 100% identical to any one of SEQ ID NOs: 333-345 and 967-971.

[7164] In some aspects, the first polypeptide comprises a structure represented by VL1-VL2-VL3-CH1; VL1-L1-VL2-L2-VL3-L3-CH1; VL1-VL2-VL3-CH1-CH2-CH3; or VL1-L1-VL2-L2-VL3-L3-CH1-CH2-CH3 and the second polypeptide comprises a structure represented by VH1-VH2-VH3-CL; VH1-L4-VH2-L5-VH3-L6-CL; or VH1-L4-VH2-L5-VH3-L6-CL-CH2-CH3,
[7165] wherein:
[7166] (a)
[7167] (i)
[7168] VL1 comprises a light chain complementarity determining region 1 (LCDR1), LCDR2, and/or LCDR3 of an antibody selected from the group consisting of losatuxizumab vedotin, utomilumab, urelumab, oleclumab, naptumomab estafenatox, ascrinvacumab, pintumomab, tacatuzumab tetraxetan, nesvacumab, vanucizumab, timolumab, vapaliximab, vepalimomab, enapotamab vedotin, ianalumab, belimumab, tabalumab, tibulizumab, belantamab mafodotin, teclistamab, teclistamab, detumomab, nacolomab tafenatox, eculizumab, lendalizumab, pexelizumab, pozelimab, ravulizumab, tesidolumab, vilobelimab, abagovomab, igovomab, oregovomab, sofituzumab vedotin, cantuzumab mertansine, cantuzuma bravtansine, girentuximab, altumomab pentetate, arcitumomab, besilesomab, bertilimumab, plozalizumab, mogamulizumab, leronlimab, PRO140, rovelizumab, rovelizumab, talacotuzumab, benralizumab, tavolimab, vonlerolizumab, gavilimomab, ziralimumab, fanolesomab, ipilimumab, ruplizumab, toralizumab, dapirolizumab pegol, toralizumab, dapirolizumab pegol, ruplizumab, blinatumomab, inebilizumab, loncastuximab tesirine, SGN-CD19A, tafasitamab, taplitumomab paptox, XMAB-5574, Budoprutug, Obexelimab, duvortuxizumab, englumafusp alfa, Emfizatamab, zeripatamig, siplizumab, blontuvetmab, FBTA05, ibritumomab tiuxetan, obinutuzumab, ocaratuzumab, ocrelizumab, ofatumumab, rituximab, tositumomab, ublituximab, veltuzumab, divozilimab, eramkafusp alfa, ripertamab, zuberitamab, glofitamab, nofetumomab merpentan, samalizumab, imvotamab, odronextamab, plamotamab, bectumomab, inotuzumab ozogamicin, moxetumomab pasudotox, pinatuzumab vedotin, gomiliximab, lumiliximab, inolimomab, inolimomab, daclizumab, camidanluma btesirine, basiliximab, varlilumab, omburtamab, enoblituzumab, vopratelimab, lulizumabpegol, TGN1412, muromonab-CD3, otelixizumab, teplizumab, visilizumab, epcoritamab, epcoritamab, brentuximab vedotin, iratumumab, azintuxizumab vedotin, gemtuzumab ozogamicin, lintuzumab, vadastuximab talirine, naratuximab emtansine, otlertuzumab, lilotomab satetraxetan, tetulomab, daratumumab, isatuximab, foralumab, mosunetuzumab, mosunetuzumab, cedelizumab, ibalizumab, keliximab, priliximab, tregalizumab, zanolimumab, bleselumab, iscalimab, lucatumumab, ravagalimab, selicrelumab, teneliximab, vanalimab, abciximab, bivatuzumab, iomab-B, telimomab aritox, zolimomab aritox, abituzumab, intetumumab, alemtuzumab, tamtuvetmab, lorvotuzumab mertansine, itolizumab, cusatuzumab, vorsetuzumab mafodotin, milatuzumab, iladatuzumab vedotin, polatuzumab vedotin, galiximab, cibisatamab, zolbetuximab, naxitamab, tisotumab vedotin, olendalizumab, pamrevlumab, lacnotuzumab, cabiralizumab, emactuzumab, axatilimab, gimsilumab, lenzilumab, namilumab, tremelimumab, ulocuplumab, tepoditamab, rovalpituzumab tesirine, tarlatamab, demcizumab, navicixizumab, drozitumab, parsatuzumab, depatuxizumab mafodotin, modotuximab, carotuximab, adecatumumab, adecatumumab, oportuzumab monatox, solitomab, tucotuzumab celmoleukin, edrecolomab, catumaxomab, ifabotuzumab, fibatuzumab, zalutumumab, panitumumab, cetuximab, futuximab, imgatuzumab, laprituximab emtansine, matuzumab, necitumumab, nimotuzumab, tomuzotuximab, amivantamab, amivantamab, epitumomab cituxetan, sontuzumab, duligotuzumab, elgemtumab, lumretuzumab, patritumab, seribantumab, zenocutuzumab, sibrotuzumab, burosumab, aprutumab ixadotin, radretumab, pasotuxizumab, farletuzumab, mirvetuximab soravtansine, vantictumab, TRBS07, 3F8, dinutuximab, dinutuximab beta, ecromeximab, mitumomab, andecaliximab, capromab, codrituzumab, glembatumumab vedotin, talquetamab, talquetamab, trevogrumab, indusatumab vedotin, ficlatuzumab, rilotumumab, zatuximab, pentuzimab, pentuzimab, margetuximab, timigutuzumab, trastuzumab, trastuzumab duocarmazine, trastuzumab emtansine, gancotamab, pertuzumab, ertumaxomab, emibetuzumab, telisotuzumab, telisotuzumab vedotin, derlotuximab biotin, apolizumab, onartuzumab, bersanlimab, enlimomabpegol, rontalizumab, sifalimumab, talizumab, ganitumab, istiratumab, robatumumab, teprotumumab, figitumumab, ganitumab, istiratumab, robatumumab, teprotumumab, cixutumumab, dalotuzumab, xentuzumab, dusigitumab, canakinumab, ustekinumab, ustekinumab, ustekinumab, briakinumab, briakinumab, abrezekimab, lebrikizumab, romilkimab, TNX-650, tralokinumab, anrukinzumab, brodalumab, ixekizumab, netakimab, perakizumab, secukinumab, vunakizumab, afasevikumab, afasevikumab, bimekizumab, bimekizumab, remtolumab, bermekimab, lutikizumab, lutikizumab, gevokizumab, cergutuzumab amunaleukin, fletikumab, fezakinumab, brazikumab, guselkumab, mirikizumab, tildrakizumab, risankizumab, flotetuzumab, nemolizumab, pascolizumab, dupilumab, mepolizumab, reslizumab, clazakizumab, elsilimomab, olokizumab, sarilumab, siltuximab, sirukumab, vobarilizumab, tocilizumab, SA237, satralizumab, enokizumab, prezalizumab, natalizumab, abrilumab, abrilumab, vedolizumab, volociximab, tadocizumab, etaracizumab, etrolizumab, spesolimab, vatelizumab, erlizumab, lirilumab, relatlimab, cBR96-doxorubicinimmunoconjugate, odulimomab, efalizumab, ladiratuzumab vedotin, simtuzumab, samrotamab vedotin, aselizumab, lupartumab amadotin, imalumab, carlumab, imaprelimab, amatuximab, amatuximab, anetumab ravtansine, narnatumab, clivatuzumab tetraxetan, pemtumomab, gatipotuzumab, ensituximab, lemalesomab, sulesomab, enfortumab vedotin, racotumomab, monalizumab, brontictuzumab, tarextumab, vesencumab, oxelumab, gilvetmab, tislelizumab, dostarlimab, BCD-100, nivolumab, PDR001, pembrolizumab, pidilizumab, retifanlimab, spartalizumab, sintilimab, cemiplimab, olaratumab, tovetumab, rinucumab, atezolizumab, avelumab, durvalumab, lifastuzumab vedotin, bavituximab, acapatamab, capromab, rosopatamab, nezastomig, pasotuxizumab, pelgifatamab, voxalatamab, cofetuzumab pelidotin, denosumab, rosmantuzumab, cirmtuzumab, atinumab, indatuximab ravtansine, elotuzumab, sirtratumab vedotin, sonepcizumab, vandortuzumab vedotin, minretumomab, satumomab pendetide, maslimomab, ontuxizumab, tenatumomab, fresolimumab, metelimumab, lerdelimumab, tezepelumab, etigilimab, tiragotumab, placulumab, prezalumab, infliximab, nerelimomab, ozoralizumab, adalimumab, afelimomab, certolizumab pegol, golimumab, mapatumumab, conatumumab, lexatumumab, tigatuzumab, sacituzumab govitecan, votumumab, pogalizumab, letolizumab, pankomab, anatumomab mafenatox, enavatuzumab, flanvotumab, brolucizumab, ranibizumab, varisacumab, bevacizumab, faricimab, icrucumab, alacizumab pegol, ramucirumab, pritumumab, and onvatilimab;
[7169] VL2 comprises a light chain complementarity determining region 1 (LCDR1), LCDR2, and/or LCDR3 of an antibody selected from the group consisting of losatuxizumab vedotin, utomilumab, urelumab, oleclumab, naptumomab estafenatox, ascrinvacumab, pintumomab, tacatuzumab tetraxetan, nesvacumab, vanucizumab, timolumab, vapaliximab, vepalimomab, enapotamab vedotin, ianalumab, belimumab, tabalumab, tibulizumab, belantamab mafodotin, teclistamab, teclistamab, detumomab, nacolomab tafenatox, eculizumab, lendalizumab, pexelizumab, pozelimab, ravulizumab, tesidolumab, vilobelimab, abagovomab, igovomab, oregovomab, sofituzumab vedotin, cantuzumab mertansine, cantuzuma bravtansine, girentuximab, altumomab pentetate, arcitumomab, besilesomab, bertilimumab, plozalizumab, mogamulizumab, leronlimab, PRO140, rovelizumab, rovelizumab, talacotuzumab, benralizumab, tavolimab, vonlerolizumab, gavilimomab, ziralimumab, fanolesomab, ipilimumab, ruplizumab, toralizumab, dapirolizumab pegol, toralizumab, dapirolizumab pegol, ruplizumab, blinatumomab, inebilizumab, loncastuximab tesirine, SGN-CD19A, tafasitamab, taplitumomab paptox, XMAB-5574, Budoprutug, Obexelimab, duvortuxizumab, englumafusp alfa, Emfizatamab, zeripatamig, siplizumab, blontuvetmab, FBTA05, ibritumomab tiuxetan, obinutuzumab, ocaratuzumab, ocrelizumab, ofatumumab, rituximab, tositumomab, ublituximab, veltuzumab, divozilimab, eramkafusp alfa, ripertamab, zuberitamab, glofitamab, nofetumomab merpentan, samalizumab, imvotamab, odronextamab, plamotamab, bectumomab, inotuzumab ozogamicin, moxetumomab pasudotox, pinatuzumab vedotin, gomiliximab, lumiliximab, inolimomab, inolimomab, daclizumab, camidanluma btesirine, basiliximab, varlilumab, omburtamab, enoblituzumab, vopratelimab, lulizumabpegol, TGN1412, muromonab-CD3, otelixizumab, teplizumab, visilizumab, epcoritamab, epcoritamab, brentuximab vedotin, iratumumab, azintuxizumab vedotin, gemtuzumab ozogamicin, lintuzumab, vadastuximab talirine, naratuximab emtansine, otlertuzumab, lilotomab satetraxetan, tetulomab, daratumumab, isatuximab, foralumab, mosunetuzumab, mosunetuzumab, cedelizumab, ibalizumab, keliximab, priliximab, tregalizumab, zanolimumab, bleselumab, iscalimab, lucatumumab, ravagalimab, selicrelumab, teneliximab, vanalimab, abciximab, bivatuzumab, iomab-B, telimomab aritox, zolimomab aritox, abituzumab, intetumumab, alemtuzumab, tamtuvetmab, lorvotuzumab mertansine, itolizumab, cusatuzumab, vorsetuzumab mafodotin, milatuzumab, iladatuzumab vedotin, polatuzumab vedotin, galiximab, cibisatamab, zolbetuximab, naxitamab, tisotumab vedotin, olendalizumab, pamrevlumab, lacnotuzumab, cabiralizumab, emactuzumab, axatilimab, gimsilumab, lenzilumab, namilumab, tremelimumab, ulocuplumab, tepoditamab, rovalpituzumab tesirine, tarlatamab, demcizumab, navicixizumab, drozitumab, parsatuzumab, depatuxizumab mafodotin, modotuximab, carotuximab, adecatumumab, adecatumumab, oportuzumab monatox, solitomab, tucotuzumab celmoleukin, edrecolomab, catumaxomab, ifabotuzumab, fibatuzumab, zalutumumab, panitumumab, cetuximab, futuximab, imgatuzumab, laprituximab emtansine, matuzumab, necitumumab, nimotuzumab, tomuzotuximab, amivantamab, amivantamab, epitumomab cituxetan, sontuzumab, duligotuzumab, elgemtumab, lumretuzumab, patritumab, seribantumab, zenocutuzumab, sibrotuzumab, burosumab, aprutumab ixadotin, radretumab, pasotuxizumab, farletuzumab, mirvetuximab soravtansine, vantictumab, TRBS07, 3F8, dinutuximab, dinutuximab beta, ecromeximab, mitumomab, andecaliximab, capromab, codrituzumab, glembatumumab vedotin, talquetamab, talquetamab, trevogrumab, indusatumab vedotin, ficlatuzumab, rilotumumab, zatuximab, pentuzimab, pentuzimab, margetuximab, timigutuzumab, trastuzumab, trastuzumab duocarmazine, trastuzumab emtansine, gancotamab, pertuzumab, ertumaxomab, emibetuzumab, telisotuzumab, telisotuzumab vedotin, derlotuximab biotin, apolizumab, onartuzumab, bersanlimab, enlimomabpegol, rontalizumab, sifalimumab, talizumab, ganitumab, istiratumab, robatumumab, teprotumumab, figitumumab, ganitumab, istiratumab, robatumumab, teprotumumab, cixutumumab, dalotuzumab, xentuzumab, dusigitumab, canakinumab, ustekinumab, ustekinumab, ustekinumab, briakinumab, briakinumab, abrezekimab, lebrikizumab, romilkimab, TNX-650, tralokinumab, anrukinzumab, brodalumab, ixekizumab, netakimab, perakizumab, secukinumab, vunakizumab, afasevikumab, afasevikumab, bimekizumab, bimekizumab, remtolumab, bermekimab, lutikizumab, lutikizumab, gevokizumab, cergutuzumab amunaleukin, fletikumab, fezakinumab, brazikumab, guselkumab, mirikizumab, tildrakizumab, risankizumab, flotetuzumab, nemolizumab, pascolizumab, dupilumab, mepolizumab, reslizumab, clazakizumab, elsilimomab, olokizumab, sarilumab, siltuximab, sirukumab, vobarilizumab, tocilizumab, SA237, satralizumab, enokizumab, prezalizumab, natalizumab, abrilumab, abrilumab, vedolizumab, volociximab, tadocizumab, etaracizumab, etrolizumab, spesolimab, vatelizumab, erlizumab, lirilumab, relatlimab, cBR96-doxorubicinimmunoconjugate, odulimomab, efalizumab, ladiratuzumab vedotin, simtuzumab, samrotamab vedotin, aselizumab, lupartumab amadotin, imalumab, carlumab, imaprelimab, amatuximab, amatuximab, anetumab ravtansine, narnatumab, clivatuzumab tetraxetan, pemtumomab, gatipotuzumab, ensituximab, lemalesomab, sulesomab, enfortumab vedotin, racotumomab, monalizumab, brontictuzumab, tarextumab, vesencumab, oxelumab, gilvetmab, tislelizumab, dostarlimab, BCD-100, nivolumab, PDR001, pembrolizumab, pidilizumab, retifanlimab, spartalizumab, sintilimab, cemiplimab, olaratumab, tovetumab, rinucumab, atezolizumab, avelumab, durvalumab, lifastuzumab vedotin, bavituximab, acapatamab, capromab, rosopatamab, nezastomig, pasotuxizumab, pelgifatamab, voxalatamab, cofetuzumab pelidotin, denosumab, rosmantuzumab, cirmtuzumab, atinumab, indatuximab ravtansine, elotuzumab, sirtratumab vedotin, sonepcizumab, vandortuzumab vedotin, minretumomab, satumomab pendetide, maslimomab, ontuxizumab, tenatumomab, fresolimumab, metelimumab, lerdelimumab, tezepelumab, etigilimab, tiragotumab, placulumab, prezalumab, infliximab, nerelimomab, ozoralizumab, adalimumab, afelimomab, certolizumab pegol, golimumab, mapatumumab, conatumumab, lexatumumab, tigatuzumab, sacituzumab govitecan, votumumab, pogalizumab, letolizumab, pankomab, anatumomab mafenatox, enavatuzumab, flanvotumab, brolucizumab, ranibizumab, varisacumab, bevacizumab, faricimab, icrucumab, alacizumab pegol, ramucirumab, pritumumab, and onvatilimab;
[7170] VL3 comprises a light chain complementarity determining region 1 (LCDR1), LCDR2, and/or LCDR3 of an antibody selected from the group consisting of losatuxizumab vedotin, utomilumab, urelumab, oleclumab, naptumomab estafenatox, ascrinvacumab, pintumomab, tacatuzumab tetraxetan, nesvacumab, vanucizumab, timolumab, vapaliximab, vepalimomab, enapotamab vedotin, ianalumab, belimumab, tabalumab, tibulizumab, belantamab mafodotin, teclistamab, teclistamab, detumomab, nacolomab tafenatox, eculizumab, lendalizumab, pexelizumab, pozelimab, ravulizumab, tesidolumab, vilobelimab, abagovomab, igovomab, oregovomab, sofituzumab vedotin, cantuzumab mertansine, cantuzuma bravtansine, girentuximab, altumomab pentetate, arcitumomab, besilesomab, bertilimumab, plozalizumab, mogamulizumab, leronlimab, PRO140, rovelizumab, rovelizumab, talacotuzumab, benralizumab, tavolimab, vonlerolizumab, gavilimomab, ziralimumab, fanolesomab, ipilimumab, ruplizumab, toralizumab, dapirolizumab pegol, toralizumab, dapirolizumab pegol, ruplizumab, blinatumomab, inebilizumab, loncastuximab tesirine, SGN-CD19A, tafasitamab, taplitumomab paptox, XMAB-5574, Budoprutug, Obexelimab, duvortuxizumab, englumafusp alfa, Emfizatamab, zeripatamig, siplizumab, blontuvetmab, FBTA05, ibritumomab tiuxetan, obinutuzumab, ocaratuzumab, ocrelizumab, ofatumumab, rituximab, tositumomab, ublituximab, veltuzumab, divozilimab, eramkafusp alfa, ripertamab, zuberitamab, glofitamab, nofetumomab merpentan, samalizumab, imvotamab, odronextamab, plamotamab, bectumomab, inotuzumab ozogamicin, moxetumomab pasudotox, pinatuzumab vedotin, gomiliximab, lumiliximab, inolimomab, inolimomab, daclizumab, camidanluma btesirine, basiliximab, varlilumab, omburtamab, enoblituzumab, vopratelimab, lulizumabpegol, TGN1412, muromonab-CD3, otelixizumab, teplizumab, visilizumab, epcoritamab, epcoritamab, brentuximab vedotin, iratumumab, azintuxizumab vedotin, gemtuzumab ozogamicin, lintuzumab, vadastuximab talirine, naratuximab emtansine, otlertuzumab, lilotomab satetraxetan, tetulomab, daratumumab, isatuximab, foralumab, mosunetuzumab, mosunetuzumab, cedelizumab, ibalizumab, keliximab, priliximab, tregalizumab, zanolimumab, bleselumab, iscalimab, lucatumumab, ravagalimab, selicrelumab, teneliximab, vanalimab, abciximab, bivatuzumab, iomab-B, telimomab aritox, zolimomab aritox, abituzumab, intetumumab, alemtuzumab, tamtuvetmab, lorvotuzumab mertansine, itolizumab, cusatuzumab, vorsetuzumab mafodotin, milatuzumab, iladatuzumab vedotin, polatuzumab vedotin, galiximab, cibisatamab, zolbetuximab, naxitamab, tisotumab vedotin, olendalizumab, pamrevlumab, lacnotuzumab, cabiralizumab, emactuzumab, axatilimab, gimsilumab, lenzilumab, namilumab, tremelimumab, ulocuplumab, tepoditamab, rovalpituzumab tesirine, tarlatamab, demcizumab, navicixizumab, drozitumab, parsatuzumab, depatuxizumab mafodotin, modotuximab, carotuximab, adecatumumab, adecatumumab, oportuzumab monatox, solitomab, tucotuzumab celmoleukin, edrecolomab, catumaxomab, ifabotuzumab, fibatuzumab, zalutumumab, panitumumab, cetuximab, futuximab, imgatuzumab, laprituximab emtansine, matuzumab, necitumumab, nimotuzumab, tomuzotuximab, amivantamab, amivantamab, epitumomab cituxetan, sontuzumab, duligotuzumab, elgemtumab, lumretuzumab, patritumab, seribantumab, zenocutuzumab, sibrotuzumab, burosumab, aprutumab ixadotin, radretumab, pasotuxizumab, farletuzumab, mirvetuximab soravtansine, vantictumab, TRBS07, 3F8, dinutuximab, dinutuximab beta, ecromeximab, mitumomab, andecaliximab, capromab, codrituzumab, glembatumumab vedotin, talquetamab, talquetamab, trevogrumab, indusatumab vedotin, ficlatuzumab, rilotumumab, zatuximab, pentuzimab, pentuzimab, margetuximab, timigutuzumab, trastuzumab, trastuzumab duocarmazine, trastuzumab emtansine, gancotamab, pertuzumab, ertumaxomab, emibetuzumab, telisotuzumab, telisotuzumab vedotin, derlotuximab biotin, apolizumab, onartuzumab, bersanlimab, enlimomabpegol, rontalizumab, sifalimumab, talizumab, ganitumab, istiratumab, robatumumab, teprotumumab, figitumumab, ganitumab, istiratumab, robatumumab, teprotumumab, cixutumumab, dalotuzumab, xentuzumab, dusigitumab, canakinumab, ustekinumab, ustekinumab, ustekinumab, briakinumab, briakinumab, abrezekimab, lebrikizumab, romilkimab, TNX-650, tralokinumab, anrukinzumab, brodalumab, ixekizumab, netakimab, perakizumab, secukinumab, vunakizumab, afasevikumab, afasevikumab, bimekizumab, bimekizumab, remtolumab, bermekimab, lutikizumab, lutikizumab, gevokizumab, cergutuzumab amunaleukin, fletikumab, fezakinumab, brazikumab, guselkumab, mirikizumab, tildrakizumab, risankizumab, flotetuzumab, nemolizumab, pascolizumab, dupilumab, mepolizumab, reslizumab, clazakizumab, elsilimomab, olokizumab, sarilumab, siltuximab, sirukumab, vobarilizumab, tocilizumab, SA237, satralizumab, enokizumab, prezalizumab, natalizumab, abrilumab, abrilumab, vedolizumab, volociximab, tadocizumab, etaracizumab, etrolizumab, spesolimab, vatelizumab, erlizumab, lirilumab, relatlimab, cBR96-doxorubicinimmunoconjugate, odulimomab, efalizumab, ladiratuzumab vedotin, simtuzumab, samrotamab vedotin, aselizumab, lupartumab amadotin, imalumab, carlumab, imaprelimab, amatuximab, amatuximab, anetumab ravtansine, narnatumab, clivatuzumab tetraxetan, pemtumomab, gatipotuzumab, ensituximab, lemalesomab, sulesomab, enfortumab vedotin, racotumomab, monalizumab, brontictuzumab, tarextumab, vesencumab, oxelumab, gilvetmab, tislelizumab, dostarlimab, BCD-100, nivolumab, PDR001, pembrolizumab, pidilizumab, retifanlimab, spartalizumab, sintilimab, cemiplimab, olaratumab, tovetumab, rinucumab, atezolizumab, avelumab, durvalumab, lifastuzumab vedotin, bavituximab, acapatamab, capromab, rosopatamab, nezastomig, pasotuxizumab, pelgifatamab, voxalatamab, cofetuzumab pelidotin, denosumab, rosmantuzumab, cirmtuzumab, atinumab, indatuximab ravtansine, elotuzumab, sirtratumab vedotin, sonepcizumab, vandortuzumab vedotin, minretumomab, satumomab pendetide, maslimomab, ontuxizumab, tenatumomab, fresolimumab, metelimumab, lerdelimumab, tezepelumab, etigilimab, tiragotumab, placulumab, prezalumab, infliximab, nerelimomab, ozoralizumab, adalimumab, afelimomab, certolizumab pegol, golimumab, mapatumumab, conatumumab, lexatumumab, tigatuzumab, sacituzumab govitecan, votumumab, pogalizumab, letolizumab, pankomab, anatumomab mafenatox, enavatuzumab, flanvotumab, brolucizumab, ranibizumab, varisacumab, bevacizumab, faricimab, icrucumab, alacizumab pegol, ramucirumab, pritumumab, and onvatilimab;
[7171] VH1 comprises a heavy chain complementarity determining region 1 (HCDR1), HCDR2, and/or HCDR3 of an antibody selected from the group consisting of losatuxizumab vedotin, utomilumab, urelumab, oleclumab, naptumomab estafenatox, ascrinvacumab, pintumomab, tacatuzumab tetraxetan, nesvacumab, vanucizumab, timolumab, vapaliximab, vepalimomab, enapotamab vedotin, ianalumab, belimumab, tabalumab, tibulizumab, belantamab mafodotin, teclistamab, teclistamab, detumomab, nacolomab tafenatox, eculizumab, lendalizumab, pexelizumab, pozelimab, ravulizumab, tesidolumab, vilobelimab, abagovomab, igovomab, oregovomab, sofituzumab vedotin, cantuzumab mertansine, cantuzuma bravtansine, girentuximab, altumomab pentetate, arcitumomab, besilesomab, bertilimumab, plozalizumab, mogamulizumab, leronlimab, PRO140, rovelizumab, rovelizumab, talacotuzumab, benralizumab, tavolimab, vonlerolizumab, gavilimomab, ziralimumab, fanolesomab, ipilimumab, ruplizumab, toralizumab, dapirolizumab pegol, toralizumab, dapirolizumab pegol, ruplizumab, blinatumomab, inebilizumab, loncastuximab tesirine, SGN-CD19A, tafasitamab, taplitumomab paptox, XMAB-5574, Budoprutug, Obexelimab, duvortuxizumab, englumafusp alfa, Emfizatamab, zeripatamig, siplizumab, blontuvetmab, FBTA05, ibritumomab tiuxetan, obinutuzumab, ocaratuzumab, ocrelizumab, ofatumumab, rituximab, tositumomab, ublituximab, veltuzumab, divozilimab, eramkafusp alfa, ripertamab, zuberitamab, glofitamab, nofetumomab merpentan, samalizumab, imvotamab, odronextamab, plamotamab, bectumomab, inotuzumab ozogamicin, moxetumomab pasudotox, pinatuzumab vedotin, gomiliximab, lumiliximab, inolimomab, inolimomab, daclizumab, camidanluma btesirine, basiliximab, varlilumab, omburtamab, enoblituzumab, vopratelimab, lulizumabpegol, TGN1412, muromonab-CD3, otelixizumab, teplizumab, visilizumab, epcoritamab, epcoritamab, brentuximab vedotin, iratumumab, azintuxizumab vedotin, gemtuzumab ozogamicin, lintuzumab, vadastuximab talirine, naratuximab emtansine, otlertuzumab, lilotomab satetraxetan, tetulomab, daratumumab, isatuximab, foralumab, mosunetuzumab, mosunetuzumab, cedelizumab, ibalizumab, keliximab, priliximab, tregalizumab, zanolimumab, bleselumab, iscalimab, lucatumumab, ravagalimab, selicrelumab, teneliximab, vanalimab, abciximab, bivatuzumab, iomab-B, telimomab aritox, zolimomab aritox, abituzumab, intetumumab, alemtuzumab, tamtuvetmab, lorvotuzumab mertansine, itolizumab, cusatuzumab, vorsetuzumab mafodotin, milatuzumab, iladatuzumab vedotin, polatuzumab vedotin, galiximab, cibisatamab, zolbetuximab, naxitamab, tisotumab vedotin, olendalizumab, pamrevlumab, lacnotuzumab, cabiralizumab, emactuzumab, axatilimab, gimsilumab, lenzilumab, namilumab, tremelimumab, ulocuplumab, tepoditamab, rovalpituzumab tesirine, tarlatamab, demcizumab, navicixizumab, drozitumab, parsatuzumab, depatuxizumab mafodotin, modotuximab, carotuximab, adecatumumab, adecatumumab, oportuzumab monatox, solitomab, tucotuzumab celmoleukin, edrecolomab, catumaxomab, ifabotuzumab, fibatuzumab, zalutumumab, panitumumab, cetuximab, futuximab, imgatuzumab, laprituximab emtansine, matuzumab, necitumumab, nimotuzumab, tomuzotuximab, amivantamab, amivantamab, epitumomab cituxetan, sontuzumab, duligotuzumab, elgemtumab, lumretuzumab, patritumab, seribantumab, zenocutuzumab, sibrotuzumab, burosumab, aprutumab ixadotin, radretumab, pasotuxizumab, farletuzumab, mirvetuximab soravtansine, vantictumab, TRBS07, 3F8, dinutuximab, dinutuximab beta, ecromeximab, mitumomab, andecaliximab, capromab, codrituzumab, glembatumumab vedotin, talquetamab, talquetamab, trevogrumab, indusatumab vedotin, ficlatuzumab, rilotumumab, zatuximab, pentuzimab, pentuzimab, margetuximab, timigutuzumab, trastuzumab, trastuzumab duocarmazine, trastuzumab emtansine, gancotamab, pertuzumab, ertumaxomab, emibetuzumab, telisotuzumab, telisotuzumab vedotin, derlotuximab biotin, apolizumab, onartuzumab, bersanlimab, enlimomabpegol, rontalizumab, sifalimumab, talizumab, ganitumab, istiratumab, robatumumab, teprotumumab, figitumumab, ganitumab, istiratumab, robatumumab, teprotumumab, cixutumumab, dalotuzumab, xentuzumab, dusigitumab, canakinumab, ustekinumab, ustekinumab, ustekinumab, briakinumab, briakinumab, abrezekimab, lebrikizumab, romilkimab, TNX-650, tralokinumab, anrukinzumab, brodalumab, ixekizumab, netakimab, perakizumab, secukinumab, vunakizumab, afasevikumab, afasevikumab, bimekizumab, bimekizumab, remtolumab, bermekimab, lutikizumab, lutikizumab, gevokizumab, cergutuzumab amunaleukin, fletikumab, fezakinumab, brazikumab, guselkumab, mirikizumab, tildrakizumab, risankizumab, flotetuzumab, nemolizumab, pascolizumab, dupilumab, mepolizumab, reslizumab, clazakizumab, elsilimomab, olokizumab, sarilumab, siltuximab, sirukumab, vobarilizumab, tocilizumab, SA237, satralizumab, enokizumab, prezalizumab, natalizumab, abrilumab, abrilumab, vedolizumab, volociximab, tadocizumab, etaracizumab, etrolizumab, spesolimab, vatelizumab, erlizumab, lirilumab, relatlimab, cBR96-doxorubicinimmunoconjugate, odulimomab, efalizumab, ladiratuzumab vedotin, simtuzumab, samrotamab vedotin, aselizumab, lupartumab amadotin, imalumab, carlumab, imaprelimab, amatuximab, amatuximab, anetumab ravtansine, narnatumab, clivatuzumab tetraxetan, pemtumomab, gatipotuzumab, ensituximab, lemalesomab, sulesomab, enfortumab vedotin, racotumomab, monalizumab, brontictuzumab, tarextumab, vesencumab, oxelumab, gilvetmab, tislelizumab, dostarlimab, BCD-100, nivolumab, PDR001, pembrolizumab, pidilizumab, retifanlimab, spartalizumab, sintilimab, cemiplimab, olaratumab, tovetumab, rinucumab, atezolizumab, avelumab, durvalumab, lifastuzumab vedotin, bavituximab, acapatamab, capromab, rosopatamab, nezastomig, pasotuxizumab, pelgifatamab, voxalatamab, cofetuzumab pelidotin, denosumab, rosmantuzumab, cirmtuzumab, atinumab, indatuximab ravtansine, elotuzumab, sirtratumab vedotin, sonepcizumab, vandortuzumab vedotin, minretumomab, satumomab pendetide, maslimomab, ontuxizumab, tenatumomab, fresolimumab, metelimumab, lerdelimumab, tezepelumab, etigilimab, tiragotumab, placulumab, prezalumab, infliximab, nerelimomab, ozoralizumab, adalimumab, afelimomab, certolizumab pegol, golimumab, mapatumumab, conatumumab, lexatumumab, tigatuzumab, sacituzumab govitecan, votumumab, pogalizumab, letolizumab, pankomab, anatumomab mafenatox, enavatuzumab, flanvotumab, brolucizumab, ranibizumab, varisacumab, bevacizumab, faricimab, icrucumab, alacizumab pegol, ramucirumab, pritumumab, and onvatilimab;
[7172] VH2 comprises a heavy chain complementarity determining region 1 (HCDR1), HCDR2, and/or HCDR3 of an antibody selected from the group consisting of losatuxizumab vedotin, utomilumab, urelumab, oleclumab, naptumomab estafenatox, ascrinvacumab, pintumomab, tacatuzumab tetraxetan, nesvacumab, vanucizumab, timolumab, vapaliximab, vepalimomab, enapotamab vedotin, ianalumab, belimumab, tabalumab, tibulizumab, belantamab mafodotin, teclistamab, teclistamab, detumomab, nacolomab tafenatox, eculizumab, lendalizumab, pexelizumab, pozelimab, ravulizumab, tesidolumab, vilobelimab, abagovomab, igovomab, oregovomab, sofituzumab vedotin, cantuzumab mertansine, cantuzuma bravtansine, girentuximab, altumomab pentetate, arcitumomab, besilesomab, bertilimumab, plozalizumab, mogamulizumab, leronlimab, PRO140, rovelizumab, rovelizumab, talacotuzumab, benralizumab, tavolimab, vonlerolizumab, gavilimomab, ziralimumab, fanolesomab, ipilimumab, ruplizumab, toralizumab, dapirolizumab pegol, toralizumab, dapirolizumab pegol, ruplizumab, blinatumomab, inebilizumab, loncastuximab tesirine, SGN-CD19A, tafasitamab, taplitumomab paptox, XMAB-5574, Budoprutug, Obexelimab, duvortuxizumab, englumafusp alfa, Emfizatamab, zeripatamig, siplizumab, blontuvetmab, FBTA05, ibritumomab tiuxetan, obinutuzumab, ocaratuzumab, ocrelizumab, ofatumumab, rituximab, tositumomab, ublituximab, veltuzumab, divozilimab, eramkafusp alfa, ripertamab, zuberitamab, glofitamab, nofetumomab merpentan, samalizumab, imvotamab, odronextamab, plamotamab, bectumomab, inotuzumab ozogamicin, moxetumomab pasudotox, pinatuzumab vedotin, gomiliximab, lumiliximab, inolimomab, inolimomab, daclizumab, camidanluma btesirine, basiliximab, varlilumab, omburtamab, enoblituzumab, vopratelimab, lulizumabpegol, TGN1412, muromonab-CD3, otelixizumab, teplizumab, visilizumab, epcoritamab, epcoritamab, brentuximab vedotin, iratumumab, azintuxizumab vedotin, gemtuzumab ozogamicin, lintuzumab, vadastuximab talirine, naratuximab emtansine, otlertuzumab, lilotomab satetraxetan, tetulomab, daratumumab, isatuximab, foralumab, mosunetuzumab, mosunetuzumab, cedelizumab, ibalizumab, keliximab, priliximab, tregalizumab, zanolimumab, bleselumab, iscalimab, lucatumumab, ravagalimab, selicrelumab, teneliximab, vanalimab, abciximab, bivatuzumab, iomab-B, telimomab aritox, zolimomab aritox, abituzumab, intetumumab, alemtuzumab, tamtuvetmab, lorvotuzumab mertansine, itolizumab, cusatuzumab, vorsetuzumab mafodotin, milatuzumab, iladatuzumab vedotin, polatuzumab vedotin, galiximab, cibisatamab, zolbetuximab, naxitamab, tisotumab vedotin, olendalizumab, pamrevlumab, lacnotuzumab, cabiralizumab, emactuzumab, axatilimab, gimsilumab, lenzilumab, namilumab, tremelimumab, ulocuplumab, tepoditamab, rovalpituzumab tesirine, tarlatamab, demcizumab, navicixizumab, drozitumab, parsatuzumab, depatuxizumab mafodotin, modotuximab, carotuximab, adecatumumab, adecatumumab, oportuzumab monatox, solitomab, tucotuzumab celmoleukin, edrecolomab, catumaxomab, ifabotuzumab, fibatuzumab, zalutumumab, panitumumab, cetuximab, futuximab, imgatuzumab, laprituximab emtansine, matuzumab, necitumumab, nimotuzumab, tomuzotuximab, amivantamab, amivantamab, epitumomab cituxetan, sontuzumab, duligotuzumab, elgemtumab, lumretuzumab, patritumab, seribantumab, zenocutuzumab, sibrotuzumab, burosumab, aprutumab ixadotin, radretumab, pasotuxizumab, farletuzumab, mirvetuximab soravtansine, vantictumab, TRBS07, 3F8, dinutuximab, dinutuximab beta, ecromeximab, mitumomab, andecaliximab, capromab, codrituzumab, glembatumumab vedotin, talquetamab, talquetamab, trevogrumab, indusatumab vedotin, ficlatuzumab, rilotumumab, zatuximab, pentuzimab, pentuzimab, margetuximab, timigutuzumab, trastuzumab, trastuzumab duocarmazine, trastuzumab emtansine, gancotamab, pertuzumab, ertumaxomab, emibetuzumab, telisotuzumab, telisotuzumab vedotin, derlotuximab biotin, apolizumab, onartuzumab, bersanlimab, enlimomabpegol, rontalizumab, sifalimumab, talizumab, ganitumab, istiratumab, robatumumab, teprotumumab, figitumumab, ganitumab, istiratumab, robatumumab, teprotumumab, cixutumumab, dalotuzumab, xentuzumab, dusigitumab, canakinumab, ustekinumab, ustekinumab, ustekinumab, briakinumab, briakinumab, abrezekimab, lebrikizumab, romilkimab, TNX-650, tralokinumab, anrukinzumab, brodalumab, ixekizumab, netakimab, perakizumab, secukinumab, vunakizumab, afascvikumab, afascvikumab, bimekizumab, bimekizumab, remtolumab, bermekimab, lutikizumab, lutikizumab, gevokizumab, cergutuzumab amunaleukin, fletikumab, fezakinumab, brazikumab, guselkumab, mirikizumab, tildrakizumab, risankizumab, flotetuzumab, nemolizumab, pascolizumab, dupilumab, mepolizumab, reslizumab, clazakizumab, elsilimomab, olokizumab, sarilumab, siltuximab, sirukumab, vobarilizumab, tocilizumab, SA237, satralizumab, enokizumab, prezalizumab, natalizumab, abrilumab, abrilumab, vedolizumab, volociximab, tadocizumab, etaracizumab, etrolizumab, spesolimab, vatelizumab, erlizumab, lirilumab, relatlimab, cBR96-doxorubicinimmunoconjugate, odulimomab, efalizumab, ladiratuzumab vedotin, simtuzumab, samrotamab vedotin, aselizumab, lupartumab amadotin, imalumab, carlumab, imaprelimab, amatuximab, amatuximab, anetumab ravtansine, narnatumab, clivatuzumab tetraxetan, pemtumomab, gatipotuzumab, ensituximab, lemalesomab, sulesomab, enfortumab vedotin, racotumomab, monalizumab, brontictuzumab, tarextumab, vesencumab, oxelumab, gilvetmab, tislelizumab, dostarlimab, BCD-100, nivolumab, PDR001, pembrolizumab, pidilizumab, retifanlimab, spartalizumab, sintilimab, cemiplimab, olaratumab, tovetumab, rinucumab, atezolizumab, avelumab, durvalumab, lifastuzumab vedotin, bavituximab, acapatamab, capromab, rosopatamab, nezastomig, pasotuxizumab, pelgifatamab, voxalatamab, cofetuzumab pelidotin, denosumab, rosmantuzumab, cirmtuzumab, atinumab, indatuximab ravtansine, elotuzumab, sirtratumab vedotin, sonepcizumab, vandortuzumab vedotin, minretumomab, satumomab pendetide, maslimomab, ontuxizumab, tenatumomab, fresolimumab, metelimumab, lerdelimumab, tezepelumab, etigilimab, tiragotumab, placulumab, prezalumab, infliximab, nerelimomab, ozoralizumab, adalimumab, afelimomab, certolizumab pegol, golimumab, mapatumumab, conatumumab, lexatumumab, tigatuzumab, sacituzumab govitecan, votumumab, pogalizumab, letolizumab, pankomab, anatumomab mafenatox, enavatuzumab, flanvotumab, brolucizumab, ranibizumab, varisacumab, bevacizumab, faricimab, icrucumab, alacizumab pegol, ramucirumab, pritumumab, and onvatilimab; and/or
[7173] VH3 comprises a heavy chain complementarity determining region 1 (HCDR1), HCDR2, and/or HCDR3 of an antibody selected from the group consisting of losatuxizumab vedotin, utomilumab, urelumab, oleclumab, naptumomab estafenatox, ascrinvacumab, pintumomab, tacatuzumab tetraxetan, nesvacumab, vanucizumab, timolumab, vapaliximab, vepalimomab, enapotamab vedotin, ianalumab, belimumab, tabalumab, tibulizumab, belantamab mafodotin, teclistamab, teclistamab, detumomab, nacolomab tafenatox, eculizumab, lendalizumab, pexelizumab, pozelimab, ravulizumab, tesidolumab, vilobelimab, abagovomab, igovomab, oregovomab, sofituzumab vedotin, cantuzumab mertansine, cantuzuma bravtansine, girentuximab, altumomab pentetate, arcitumomab, besilesomab, bertilimumab, plozalizumab, mogamulizumab, leronlimab, PRO140, rovelizumab, rovelizumab, talacotuzumab, benralizumab, tavolimab, vonlerolizumab, gavilimomab, ziralimumab, fanolesomab, ipilimumab, ruplizumab, toralizumab, dapirolizumab pegol, toralizumab, dapirolizumab pegol, ruplizumab, blinatumomab, inebilizumab, loncastuximab tesirine, SGN-CD19A, tafasitamab, taplitumomab paptox, XMAB-5574, Budoprutug, Obexelimab, duvortuxizumab, englumafusp alfa, Emfizatamab, zeripatamig, siplizumab, blontuvetmab, FBTA05, ibritumomab tiuxetan, obinutuzumab, ocaratuzumab, ocrelizumab, ofatumumab, rituximab, tositumomab, ublituximab, veltuzumab, divozilimab, eramkafusp alfa, ripertamab, zuberitamab, glofitamab, nofetumomab merpentan, samalizumab, imvotamab, odronextamab, plamotamab, bectumomab, inotuzumab ozogamicin, moxetumomab pasudotox, pinatuzumab vedotin, gomiliximab, lumiliximab, inolimomab, inolimomab, daclizumab, camidanluma btesirine, basiliximab, varlilumab, omburtamab, enoblituzumab, vopratelimab, lulizumabpegol, TGN1412, muromonab-CD3, otelixizumab, teplizumab, visilizumab, epcoritamab, epcoritamab, brentuximab vedotin, iratumumab, azintuxizumab vedotin, gemtuzumab ozogamicin, lintuzumab, vadastuximab talirine, naratuximab emtansine, otlertuzumab, lilotomab satetraxetan, tetulomab, daratumumab, isatuximab, foralumab, mosunetuzumab, mosunetuzumab, cedelizumab, ibalizumab, keliximab, priliximab, tregalizumab, zanolimumab, bleselumab, iscalimab, lucatumumab, ravagalimab, selicrelumab, teneliximab, vanalimab, abciximab, bivatuzumab, iomab-B, telimomab aritox, zolimomab aritox, abituzumab, intetumumab, alemtuzumab, tamtuvetmab, lorvotuzumab mertansine, itolizumab, cusatuzumab, vorsetuzumab mafodotin, milatuzumab, iladatuzumab vedotin, polatuzumab vedotin, galiximab, cibisatamab, zolbetuximab, naxitamab, tisotumab vedotin, olendalizumab, pamrevlumab, lacnotuzumab, cabiralizumab, emactuzumab, axatilimab, gimsilumab, lenzilumab, namilumab, tremelimumab, ulocuplumab, tepoditamab, rovalpituzumab tesirine, tarlatamab, demcizumab, navicixizumab, drozitumab, parsatuzumab, depatuxizumab mafodotin, modotuximab, carotuximab, adecatumumab, adecatumumab, oportuzumab monatox, solitomab, tucotuzumab celmoleukin, edrecolomab, catumaxomab, ifabotuzumab, fibatuzumab, zalutumumab, panitumumab, cetuximab, futuximab, imgatuzumab, laprituximab emtansine, matuzumab, necitumumab, nimotuzumab, tomuzotuximab, amivantamab, amivantamab, epitumomab cituxetan, sontuzumab, duligotuzumab, elgemtumab, lumretuzumab, patritumab, seribantumab, zenocutuzumab, sibrotuzumab, burosumab, aprutumab ixadotin, radretumab, pasotuxizumab, farletuzumab, mirvetuximab soravtansine, vantictumab, TRBS07, 3F8, dinutuximab, dinutuximab beta, ecromeximab, mitumomab, andecaliximab, capromab, codrituzumab, glembatumumab vedotin, talquetamab, talquetamab, trevogrumab, indusatumab vedotin, ficlatuzumab, rilotumumab, zatuximab, pentuzimab, pentuzimab, margetuximab, timigutuzumab, trastuzumab, trastuzumab duocarmazine, trastuzumab emtansine, gancotamab, pertuzumab, ertumaxomab, emibetuzumab, telisotuzumab, telisotuzumab vedotin, derlotuximab biotin, apolizumab, onartuzumab, bersanlimab, enlimomabpegol, rontalizumab, sifalimumab, talizumab, ganitumab, istiratumab, robatumumab, teprotumumab, figitumumab, ganitumab, istiratumab, robatumumab, teprotumumab, cixutumumab, dalotuzumab, xentuzumab, dusigitumab, canakinumab, ustekinumab, ustekinumab, ustekinumab, briakinumab, briakinumab, abrezekimab, lebrikizumab, romilkimab, TNX-650, tralokinumab, anrukinzumab, brodalumab, ixekizumab, netakimab, perakizumab, secukinumab, vunakizumab, afasevikumab, afasevikumab, bimekizumab, bimekizumab, remtolumab, bermekimab, lutikizumab, lutikizumab, gevokizumab, cergutuzumab amunaleukin, fletikumab, fezakinumab, brazikumab, guselkumab, mirikizumab, tildrakizumab, risankizumab, flotetuzumab, nemolizumab, pascolizumab, dupilumab, mepolizumab, reslizumab, clazakizumab, elsilimomab, olokizumab, sarilumab, siltuximab, sirukumab, vobarilizumab, tocilizumab, SA237, satralizumab, enokizumab, prezalizumab, natalizumab, abrilumab, abrilumab, vedolizumab, volociximab, tadocizumab, etaracizumab, etrolizumab, spesolimab, vatelizumab, erlizumab, lirilumab, relatlimab, cBR96-doxorubicinimmunoconjugate, odulimomab, efalizumab, ladiratuzumab vedotin, simtuzumab, samrotamab vedotin, aselizumab, lupartumab amadotin, imalumab, carlumab, imaprelimab, amatuximab, amatuximab, anetumab ravtansine, narnatumab, clivatuzumab tetraxetan, pemtumomab, gatipotuzumab, ensituximab, lemalesomab, sulesomab, enfortumab vedotin, racotumomab, monalizumab, brontictuzumab, tarextumab, vesencumab, oxelumab, gilvetmab, tislelizumab, dostarlimab, BCD-100, nivolumab, PDR001, pembrolizumab, pidilizumab, retifanlimab, spartalizumab, sintilimab, cemiplimab, olaratumab, tovetumab, rinucumab, atezolizumab, avelumab, durvalumab, lifastuzumab vedotin, bavituximab, acapatamab, capromab, rosopatamab, nezastomig, pasotuxizumab, pelgifatamab, voxalatamab, cofetuzumab pelidotin, denosumab, rosmantuzumab, cirmtuzumab, atinumab, indatuximab ravtansine, elotuzumab, sirtratumab vedotin, sonepcizumab, vandortuzumab vedotin, minretumomab, satumomab pendetide, maslimomab, ontuxizumab, tenatumomab, fresolimumab, metelimumab, lerdelimumab, tezepelumab, etigilimab, tiragotumab, placulumab, prezalumab, infliximab, nerelimomab, ozoralizumab, adalimumab, afelimomab, certolizumab pegol, golimumab, mapatumumab, conatumumab, lexatumumab, tigatuzumab, sacituzumab govitecan, votumumab, pogalizumab, letolizumab, pankomab, anatumomab mafenatox, enavatuzumab, flanvotumab, brolucizumab, ranibizumab, varisacumab, bevacizumab, faricimab, icrucumab, alacizumab pegol, ramucirumab, pritumumab, and onvatilimab; or
[7174] (ii)
[7175] VL1 comprises a VL of an antibody selected from the group consisting of losatuxizumab vedotin, utomilumab, urelumab, oleclumab, naptumomab estafenatox, ascrinvacumab, pintumomab, tacatuzumab tetraxetan, nesvacumab, vanucizumab, timolumab, vapaliximab, vepalimomab, enapotamab vedotin, ianalumab, belimumab, tabalumab, tibulizumab, belantamab mafodotin, teclistamab, teclistamab, detumomab, nacolomab tafenatox, eculizumab, lendalizumab, pexelizumab, pozelimab, ravulizumab, tesidolumab, vilobelimab, abagovomab, igovomab, oregovomab, sofituzumab vedotin, cantuzumab mertansine, cantuzuma bravtansine, girentuximab, altumomab pentetate, arcitumomab, besilesomab, bertilimumab, plozalizumab, mogamulizumab, leronlimab, PRO140, rovelizumab, rovelizumab, talacotuzumab, benralizumab, tavolimab, vonlerolizumab, gavilimomab, ziralimumab, fanolesomab, ipilimumab, ruplizumab, toralizumab, dapirolizumab pegol, toralizumab, dapirolizumab pegol, ruplizumab, blinatumomab, inebilizumab, loncastuximab tesirine, SGN-CD19A, tafasitamab, taplitumomab paptox, XMAB-5574, Budoprutug, Obexelimab, duvortuxizumab, englumafusp alfa, Emfizatamab, zeripatamig, siplizumab, blontuvetmab, FBTA05, ibritumomab tiuxetan, obinutuzumab, ocaratuzumab, ocrelizumab, ofatumumab, rituximab, tositumomab, ublituximab, veltuzumab, divozilimab, eramkafusp alfa, ripertamab, zuberitamab, glofitamab, nofetumomab merpentan, samalizumab, imvotamab, odronextamab, plamotamab, bectumomab, inotuzumab ozogamicin, moxetumomab pasudotox, pinatuzumab vedotin, gomiliximab, lumiliximab, inolimomab, inolimomab, daclizumab, camidanluma btesirine, basiliximab, varlilumab, omburtamab, enoblituzumab, vopratelimab, lulizumabpegol, TGN1412, muromonab-CD3, otelixizumab, teplizumab, visilizumab, epcoritamab, epcoritamab, brentuximab vedotin, iratumumab, azintuxizumab vedotin, gemtuzumab ozogamicin, lintuzumab, vadastuximab talirine, naratuximab emtansine, otlertuzumab, lilotomab satetraxetan, tetulomab, daratumumab, isatuximab, foralumab, mosunetuzumab, mosunetuzumab, cedelizumab, ibalizumab, keliximab, priliximab, tregalizumab, zanolimumab, bleselumab, iscalimab, lucatumumab, ravagalimab, selicrelumab, teneliximab, vanalimab, abciximab, bivatuzumab, iomab-B, telimomab aritox, zolimomab aritox, abituzumab, intetumumab, alemtuzumab, tamtuvetmab, lorvotuzumab mertansine, itolizumab, cusatuzumab, vorsetuzumab mafodotin, milatuzumab, iladatuzumab vedotin, polatuzumab vedotin, galiximab, cibisatamab, zolbetuximab, naxitamab, tisotumab vedotin, olendalizumab, pamrevlumab, lacnotuzumab, cabiralizumab, emactuzumab, axatilimab, gimsilumab, lenzilumab, namilumab, tremelimumab, ulocuplumab, tepoditamab, rovalpituzumab tesirine, tarlatamab, demcizumab, navicixizumab, drozitumab, parsatuzumab, depatuxizumab mafodotin, modotuximab, carotuximab, adecatumumab, adecatumumab, oportuzumab monatox, solitomab, tucotuzumab celmoleukin, edrecolomab, catumaxomab, ifabotuzumab, fibatuzumab, zalutumumab, panitumumab, cetuximab, futuximab, imgatuzumab, laprituximab emtansine, matuzumab, necitumumab, nimotuzumab, tomuzotuximab, amivantamab, amivantamab, epitumomab cituxetan, sontuzumab, duligotuzumab, elgemtumab, lumretuzumab, patritumab, seribantumab, zenocutuzumab, sibrotuzumab, burosumab, aprutumab ixadotin, radretumab, pasotuxizumab, farletuzumab, mirvetuximab soravtansine, vantictumab, TRBS07, 3F8, dinutuximab, dinutuximab beta, ecromeximab, mitumomab, andecaliximab, capromab, codrituzumab, glembatumumab vedotin, talquetamab, talquetamab, trevogrumab, indusatumab vedotin, ficlatuzumab, rilotumumab, zatuximab, pentuzimab, pentuzimab, margetuximab, timigutuzumab, trastuzumab, trastuzumab duocarmazine, trastuzumab emtansine, gancotamab, pertuzumab, ertumaxomab, emibetuzumab, telisotuzumab, telisotuzumab vedotin, derlotuximab biotin, apolizumab, onartuzumab, bersanlimab, enlimomabpegol, rontalizumab, sifalimumab, talizumab, ganitumab, istiratumab, robatumumab, teprotumumab, figitumumab, ganitumab, istiratumab, robatumumab, teprotumumab, cixutumumab, dalotuzumab, xentuzumab, dusigitumab, canakinumab, ustekinumab, ustekinumab, ustekinumab, briakinumab, briakinumab, abrezekimab, lebrikizumab, romilkimab, TNX-650, tralokinumab, anrukinzumab, brodalumab, ixekizumab, netakimab, perakizumab, secukinumab, vunakizumab, afasevikumab, afasevikumab, bimekizumab, bimekizumab, remtolumab, bermekimab, lutikizumab, lutikizumab, gevokizumab, cergutuzumab amunaleukin, fletikumab, fezakinumab, brazikumab, guselkumab, mirikizumab, tildrakizumab, risankizumab, flotetuzumab, nemolizumab, pascolizumab, dupilumab, mepolizumab, reslizumab, clazakizumab, elsilimomab, olokizumab, sarilumab, siltuximab, sirukumab, vobarilizumab, tocilizumab, SA237, satralizumab, enokizumab, prezalizumab, natalizumab, abrilumab, abrilumab, vedolizumab, volociximab, tadocizumab, etaracizumab, etrolizumab, spesolimab, vatelizumab, erlizumab, lirilumab, relatlimab, cBR96-doxorubicinimmunoconjugate, odulimomab, efalizumab, ladiratuzumab vedotin, simtuzumab, samrotamab vedotin, aselizumab, lupartumab amadotin, imalumab, carlumab, imaprelimab, amatuximab, amatuximab, anetumab ravtansine, narnatumab, clivatuzumab tetraxetan, pemtumomab, gatipotuzumab, ensituximab, lemalesomab, sulesomab, enfortumab vedotin, racotumomab, monalizumab, brontictuzumab, tarextumab, vesencumab, oxelumab, gilvetmab, tislelizumab, dostarlimab, BCD-100, nivolumab, PDR001, pembrolizumab, pidilizumab, retifanlimab, spartalizumab, sintilimab, cemiplimab, olaratumab, tovetumab, rinucumab, atezolizumab, avelumab, durvalumab, lifastuzumab vedotin, bavituximab, acapatamab, capromab, rosopatamab, nezastomig, pasotuxizumab, pelgifatamab, voxalatamab, cofetuzumab pelidotin, denosumab, rosmantuzumab, cirmtuzumab, atinumab, indatuximab ravtansine, elotuzumab, sirtratumab vedotin, sonepcizumab, vandortuzumab vedotin, minretumomab, satumomab pendetide, maslimomab, ontuxizumab, tenatumomab, fresolimumab, metelimumab, lerdelimumab, tezepelumab, etigilimab, tiragotumab, placulumab, prezalumab, infliximab, nerelimomab, ozoralizumab, adalimumab, afelimomab, certolizumab pegol, golimumab, mapatumumab, conatumumab, lexatumumab, tigatuzumab, sacituzumab govitecan, votumumab, pogalizumab, letolizumab, pankomab, anatumomab mafenatox, enavatuzumab, flanvotumab, brolucizumab, ranibizumab, varisacumab, bevacizumab, faricimab, icrucumab, alacizumab pegol, ramucirumab, pritumumab, and onvatilimab;
[7176] VL2 comprises a VL of an antibody selected from the group consisting of losatuxizumab vedotin, utomilumab, urelumab, oleclumab, naptumomab estafenatox, ascrinvacumab, pintumomab, tacatuzumab tetraxetan, nesvacumab, vanucizumab, timolumab, vapaliximab, vepalimomab, enapotamab vedotin, ianalumab, belimumab, tabalumab, tibulizumab, belantamab mafodotin, teclistamab, teclistamab, detumomab, nacolomab tafenatox, eculizumab, lendalizumab, pexelizumab, pozelimab, ravulizumab, tesidolumab, vilobelimab, abagovomab, igovomab, oregovomab, sofituzumab vedotin, cantuzumab mertansine, cantuzuma bravtansine, girentuximab, altumomab pentetate, arcitumomab, besilesomab, bertilimumab, plozalizumab, mogamulizumab, leronlimab, PRO140, rovelizumab, rovelizumab, talacotuzumab, benralizumab, tavolimab, vonlerolizumab, gavilimomab, ziralimumab, fanolesomab, ipilimumab, ruplizumab, toralizumab, dapirolizumab pegol, toralizumab, dapirolizumab pegol, ruplizumab, blinatumomab, inebilizumab, loncastuximab tesirine, SGN-CD19A, tafasitamab, taplitumomab paptox, XMAB-5574, Budoprutug, Obexelimab, duvortuxizumab, englumafusp alfa, Emfizatamab, zeripatamig, siplizumab, blontuvetmab, FBTA05, ibritumomab tiuxetan, obinutuzumab, ocaratuzumab, ocrelizumab, ofatumumab, rituximab, tositumomab, ublituximab, veltuzumab, divozilimab, eramkafusp alfa, ripertamab, zuberitamab, glofitamab, nofetumomab merpentan, samalizumab, imvotamab, odronextamab, plamotamab, bectumomab, inotuzumab ozogamicin, moxetumomab pasudotox, pinatuzumab vedotin, gomiliximab, lumiliximab, inolimomab, inolimomab, daclizumab, camidanluma btesirine, basiliximab, varlilumab, omburtamab, enoblituzumab, vopratelimab, lulizumabpegol, TGN1412, muromonab-CD3, otelixizumab, teplizumab, visilizumab, epcoritamab, epcoritamab, brentuximab vedotin, iratumumab, azintuxizumab vedotin, gemtuzumab ozogamicin, lintuzumab, vadastuximab talirine, naratuximab emtansine, otlertuzumab, lilotomab satetraxetan, tetulomab, daratumumab, isatuximab, foralumab, mosunetuzumab, mosunetuzumab, cedelizumab, ibalizumab, keliximab, priliximab, tregalizumab, zanolimumab, bleselumab, iscalimab, lucatumumab, ravagalimab, selicrelumab, teneliximab, vanalimab, abciximab, bivatuzumab, iomab-B, telimomab aritox, zolimomab aritox, abituzumab, intetumumab, alemtuzumab, tamtuvetmab, lorvotuzumab mertansine, itolizumab, cusatuzumab, vorsetuzumab mafodotin, milatuzumab, iladatuzumab vedotin, polatuzumab vedotin, galiximab, cibisatamab, zolbetuximab, naxitamab, tisotumab vedotin, olendalizumab, pamrevlumab, lacnotuzumab, cabiralizumab, emactuzumab, axatilimab, gimsilumab, lenzilumab, namilumab, tremelimumab, ulocuplumab, tepoditamab, rovalpituzumab tesirine, tarlatamab, demcizumab, navicixizumab, drozitumab, parsatuzumab, depatuxizumab mafodotin, modotuximab, carotuximab, adecatumumab, adecatumumab, oportuzumab monatox, solitomab, tucotuzumab celmoleukin, edrecolomab, catumaxomab, ifabotuzumab, fibatuzumab, zalutumumab, panitumumab, cetuximab, futuximab, imgatuzumab, laprituximab emtansine, matuzumab, necitumumab, nimotuzumab, tomuzotuximab, amivantamab, amivantamab, epitumomab cituxetan, sontuzumab, duligotuzumab, elgemtumab, lumretuzumab, patritumab, seribantumab, zenocutuzumab, sibrotuzumab, burosumab, aprutumab ixadotin, radretumab, pasotuxizumab, farletuzumab, mirvetuximab soravtansine, vantictumab, TRBS07, 3F8, dinutuximab, dinutuximab beta, ecromeximab, mitumomab, andecaliximab, capromab, codrituzumab, glembatumumab vedotin, talquetamab, talquetamab, trevogrumab, indusatumab vedotin, ficlatuzumab, rilotumumab, zatuximab, pentuzimab, pentuzimab, margetuximab, timigutuzumab, trastuzumab, trastuzumab duocarmazine, trastuzumab emtansine, gancotamab, pertuzumab, ertumaxomab, emibetuzumab, telisotuzumab, telisotuzumab vedotin, derlotuximab biotin, apolizumab, onartuzumab, bersanlimab, enlimomabpegol, rontalizumab, sifalimumab, talizumab, ganitumab, istiratumab, robatumumab, teprotumumab, figitumumab, ganitumab, istiratumab, robatumumab, teprotumumab, cixutumumab, dalotuzumab, xentuzumab, dusigitumab, canakinumab, ustekinumab, ustekinumab, ustekinumab, briakinumab, briakinumab, abrezekimab, lebrikizumab, romilkimab, TNX-650, tralokinumab, anrukinzumab, brodalumab, ixekizumab, netakimab, perakizumab, secukinumab, vunakizumab, afasevikumab, afascvikumab, bimekizumab, bimekizumab, remtolumab, bermekimab, lutikizumab, lutikizumab, gevokizumab, cergutuzumab amunaleukin, fletikumab, fezakinumab, brazikumab, guselkumab, mirikizumab, tildrakizumab, risankizumab, flotetuzumab, nemolizumab, pascolizumab, dupilumab, mepolizumab, reslizumab, clazakizumab, elsilimomab, olokizumab, sarilumab, siltuximab, sirukumab, vobarilizumab, tocilizumab, SA237, satralizumab, enokizumab, prezalizumab, natalizumab, abrilumab, abrilumab, vedolizumab, volociximab, tadocizumab, etaracizumab, etrolizumab, spesolimab, vatelizumab, erlizumab, lirilumab, relatlimab, cBR96-doxorubicinimmunoconjugate, odulimomab, efalizumab, ladiratuzumab vedotin, simtuzumab, samrotamab vedotin, aselizumab, lupartumab amadotin, imalumab, carlumab, imaprelimab, amatuximab, amatuximab, anetumab ravtansine, narnatumab, clivatuzumab tetraxetan, pemtumomab, gatipotuzumab, ensituximab, lemalesomab, sulesomab, enfortumab vedotin, racotumomab, monalizumab, brontictuzumab, tarextumab, vesencumab, oxelumab, gilvetmab, tislelizumab, dostarlimab, BCD-100, nivolumab, PDR001, pembrolizumab, pidilizumab, retifanlimab, spartalizumab, sintilimab, cemiplimab, olaratumab, tovetumab, rinucumab, atezolizumab, avelumab, durvalumab, lifastuzumab vedotin, bavituximab, acapatamab, capromab, rosopatamab, nezastomig, pasotuxizumab, pelgifatamab, voxalatamab, cofetuzumab pelidotin, denosumab, rosmantuzumab, cirmtuzumab, atinumab, indatuximab ravtansine, elotuzumab, sirtratumab vedotin, sonepcizumab, vandortuzumab vedotin, minretumomab, satumomab pendetide, maslimomab, ontuxizumab, tenatumomab, fresolimumab, metelimumab, lerdelimumab, tezepelumab, etigilimab, tiragotumab, placulumab, prezalumab, infliximab, nerelimomab, ozoralizumab, adalimumab, afelimomab, certolizumab pegol, golimumab, mapatumumab, conatumumab, lexatumumab, tigatuzumab, sacituzumab govitecan, votumumab, pogalizumab, letolizumab, pankomab, anatumomab mafenatox, enavatuzumab, flanvotumab, brolucizumab, ranibizumab, varisacumab, bevacizumab, faricimab, icrucumab, alacizumab pegol, ramucirumab, pritumumab, and onvatilimab;
[7177] VL3 comprises a VL of an antibody selected from the group consisting of losatuxizumab vedotin, utomilumab, urelumab, oleclumab, naptumomab estafenatox, ascrinvacumab, pintumomab, tacatuzumab tetraxetan, nesvacumab, vanucizumab, timolumab, vapaliximab, vepalimomab, enapotamab vedotin, ianalumab, belimumab, tabalumab, tibulizumab, belantamab mafodotin, teclistamab, teclistamab, detumomab, nacolomab tafenatox, eculizumab, lendalizumab, pexelizumab, pozelimab, ravulizumab, tesidolumab, vilobelimab, abagovomab, igovomab, oregovomab, sofituzumab vedotin, cantuzumab mertansine, cantuzuma bravtansine, girentuximab, altumomab pentetate, arcitumomab, besilesomab, bertilimumab, plozalizumab, mogamulizumab, leronlimab, PRO140, rovelizumab, rovelizumab, talacotuzumab, benralizumab, tavolimab, vonlerolizumab, gavilimomab, ziralimumab, fanolesomab, ipilimumab, ruplizumab, toralizumab, dapirolizumab pegol, toralizumab, dapirolizumab pegol, ruplizumab, blinatumomab, inebilizumab, loncastuximab tesirine, SGN-CD19A, tafasitamab, taplitumomab paptox, XMAB-5574, Budoprutug, Obexelimab, duvortuxizumab, englumafusp alfa, Emfizatamab, zeripatamig, siplizumab, blontuvetmab, FBTA05, ibritumomab tiuxetan, obinutuzumab, ocaratuzumab, ocrelizumab, ofatumumab, rituximab, tositumomab, ublituximab, veltuzumab, divozilimab, eramkafusp alfa, ripertamab, zuberitamab, glofitamab, nofetumomab merpentan, samalizumab, imvotamab, odronextamab, plamotamab, bectumomab, inotuzumab ozogamicin, moxetumomab pasudotox, pinatuzumab vedotin, gomiliximab, lumiliximab, inolimomab, inolimomab, daclizumab, camidanluma btesirine, basiliximab, varlilumab, omburtamab, enoblituzumab, vopratelimab, lulizumabpegol, TGN1412, muromonab-CD3, otelixizumab, teplizumab, visilizumab, epcoritamab, epcoritamab, brentuximab vedotin, iratumumab, azintuxizumab vedotin, gemtuzumab ozogamicin, lintuzumab, vadastuximab talirine, naratuximab emtansine, otlertuzumab, lilotomab satetraxetan, tetulomab, daratumumab, isatuximab, foralumab, mosunetuzumab, mosunetuzumab, cedelizumab, ibalizumab, keliximab, priliximab, tregalizumab, zanolimumab, bleselumab, iscalimab, lucatumumab, ravagalimab, selicrelumab, teneliximab, vanalimab, abciximab, bivatuzumab, iomab-B, telimomab aritox, zolimomab aritox, abituzumab, intetumumab, alemtuzumab, tamtuvetmab, lorvotuzumab mertansine, itolizumab, cusatuzumab, vorsetuzumab mafodotin, milatuzumab, iladatuzumab vedotin, polatuzumab vedotin, galiximab, cibisatamab, zolbetuximab, naxitamab, tisotumab vedotin, olendalizumab, pamrevlumab, lacnotuzumab, cabiralizumab, emactuzumab, axatilimab, gimsilumab, lenzilumab, namilumab, tremelimumab, ulocuplumab, tepoditamab, rovalpituzumab tesirine, tarlatamab, demcizumab, navicixizumab, drozitumab, parsatuzumab, depatuxizumab mafodotin, modotuximab, carotuximab, adecatumumab, adecatumumab, oportuzumab monatox, solitomab, tucotuzumab celmoleukin, edrecolomab, catumaxomab, ifabotuzumab, fibatuzumab, zalutumumab, panitumumab, cetuximab, futuximab, imgatuzumab, laprituximab emtansine, matuzumab, necitumumab, nimotuzumab, tomuzotuximab, amivantamab, amivantamab, epitumomab cituxetan, sontuzumab, duligotuzumab, elgemtumab, lumretuzumab, patritumab, seribantumab, zenocutuzumab, sibrotuzumab, burosumab, aprutumab ixadotin, radretumab, pasotuxizumab, farletuzumab, mirvetuximab soravtansine, vantictumab, TRBS07, 3F8, dinutuximab, dinutuximab beta, ecromeximab, mitumomab, andecaliximab, capromab, codrituzumab, glembatumumab vedotin, talquetamab, talquetamab, trevogrumab, indusatumab vedotin, ficlatuzumab, rilotumumab, zatuximab, pentuzimab, pentuzimab, margetuximab, timigutuzumab, trastuzumab, trastuzumab duocarmazine, trastuzumab emtansine, gancotamab, pertuzumab, ertumaxomab, emibetuzumab, telisotuzumab, telisotuzumab vedotin, derlotuximab biotin, apolizumab, onartuzumab, bersanlimab, enlimomabpegol, rontalizumab, sifalimumab, talizumab, ganitumab, istiratumab, robatumumab, teprotumumab, figitumumab, ganitumab, istiratumab, robatumumab, teprotumumab, cixutumumab, dalotuzumab, xentuzumab, dusigitumab, canakinumab, ustekinumab, ustekinumab, ustekinumab, briakinumab, briakinumab, abrezekimab, lebrikizumab, romilkimab, TNX-650, tralokinumab, anrukinzumab, brodalumab, ixekizumab, netakimab, perakizumab, secukinumab, vunakizumab, afasevikumab, afasevikumab, bimekizumab, bimekizumab, remtolumab, bermekimab, lutikizumab, lutikizumab, gevokizumab, cergutuzumab amunaleukin, fletikumab, fezakinumab, brazikumab, guselkumab, mirikizumab, tildrakizumab, risankizumab, flotetuzumab, nemolizumab, pascolizumab, dupilumab, mepolizumab, reslizumab, clazakizumab, elsilimomab, olokizumab, sarilumab, siltuximab, sirukumab, vobarilizumab, tocilizumab, SA237, satralizumab, enokizumab, prezalizumab, natalizumab, abrilumab, abrilumab, vedolizumab, volociximab, tadocizumab, etaracizumab, etrolizumab, spesolimab, vatelizumab, erlizumab, lirilumab, relatlimab, cBR96-doxorubicinimmunoconjugate, odulimomab, efalizumab, ladiratuzumab vedotin, simtuzumab, samrotamab vedotin, aselizumab, lupartumab amadotin, imalumab, carlumab, imaprelimab, amatuximab, amatuximab, anetumab ravtansine, narnatumab, clivatuzumab tetraxetan, pemtumomab, gatipotuzumab, ensituximab, lemalesomab, sulesomab, enfortumab vedotin, racotumomab, monalizumab, brontictuzumab, tarextumab, vesencumab, oxelumab, gilvetmab, tislelizumab, dostarlimab, BCD-100, nivolumab, PDR001, pembrolizumab, pidilizumab, retifanlimab, spartalizumab, sintilimab, cemiplimab, olaratumab, tovetumab, rinucumab, atezolizumab, avelumab, durvalumab, lifastuzumab vedotin, bavituximab, acapatamab, capromab, rosopatamab, nezastomig, pasotuxizumab, pelgifatamab, voxalatamab, cofetuzumab pelidotin, denosumab, rosmantuzumab, cirmtuzumab, atinumab, indatuximab ravtansine, elotuzumab, sirtratumab vedotin, sonepcizumab, vandortuzumab vedotin, minretumomab, satumomab pendetide, maslimomab, ontuxizumab, tenatumomab, fresolimumab, metelimumab, lerdelimumab, tezepelumab, etigilimab, tiragotumab, placulumab, prezalumab, infliximab, nerelimomab, ozoralizumab, adalimumab, afelimomab, certolizumab pegol, golimumab, mapatumumab, conatumumab, lexatumumab, tigatuzumab, sacituzumab govitecan, votumumab, pogalizumab, letolizumab, pankomab, anatumomab mafenatox, enavatuzumab, flanvotumab, brolucizumab, ranibizumab, varisacumab, bevacizumab, faricimab, icrucumab, alacizumab pegol, ramucirumab, pritumumab, and onvatilimab;
[7178] VH1 comprises a VH of an antibody selected from the group consisting of losatuxizumab vedotin, utomilumab, urelumab, oleclumab, naptumomab estafenatox, ascrinvacumab, pintumomab, tacatuzumab tetraxetan, nesvacumab, vanucizumab, timolumab, vapaliximab, vepalimomab, enapotamab vedotin, ianalumab, belimumab, tabalumab, tibulizumab, belantamab mafodotin, teclistamab, teclistamab, detumomab, nacolomab tafenatox, eculizumab, lendalizumab, pexelizumab, pozelimab, ravulizumab, tesidolumab, vilobelimab, abagovomab, igovomab, oregovomab, sofituzumab vedotin, cantuzumab mertansine, cantuzuma bravtansine, girentuximab, altumomab pentetate, arcitumomab, besilesomab, bertilimumab, plozalizumab, mogamulizumab, leronlimab, PRO140, rovelizumab, rovelizumab, talacotuzumab, benralizumab, tavolimab, vonlerolizumab, gavilimomab, ziralimumab, fanolesomab, ipilimumab, ruplizumab, toralizumab, dapirolizumab pegol, toralizumab, dapirolizumab pegol, ruplizumab, blinatumomab, inebilizumab, loncastuximab tesirine, SGN-CD19A, tafasitamab, taplitumomab paptox, XMAB-5574, Budoprutug, Obexelimab, duvortuxizumab, englumafusp alfa, Emfizatamab, zeripatamig, siplizumab, blontuvetmab, FBTA05, ibritumomab tiuxetan, obinutuzumab, ocaratuzumab, ocrelizumab, ofatumumab, rituximab, tositumomab, ublituximab, veltuzumab, divozilimab, eramkafusp alfa, ripertamab, zuberitamab, glofitamab, nofetumomab merpentan, samalizumab, imvotamab, odronextamab, plamotamab, bectumomab, inotuzumab ozogamicin, moxetumomab pasudotox, pinatuzumab vedotin, gomiliximab, lumiliximab, inolimomab, inolimomab, daclizumab, camidanluma btesirine, basiliximab, varlilumab, omburtamab, enoblituzumab, vopratelimab, lulizumabpegol, TGN1412, muromonab-CD3, otelixizumab, teplizumab, visilizumab, epcoritamab, epcoritamab, brentuximab vedotin, iratumumab, azintuxizumab vedotin, gemtuzumab ozogamicin, lintuzumab, vadastuximab talirine, naratuximab emtansine, otlertuzumab, lilotomab satetraxetan, tetulomab, daratumumab, isatuximab, foralumab, mosunetuzumab, mosunetuzumab, cedelizumab, ibalizumab, keliximab, priliximab, tregalizumab, zanolimumab, bleselumab, iscalimab, lucatumumab, ravagalimab, selicrelumab, teneliximab, vanalimab, abciximab, bivatuzumab, iomab-B, telimomab aritox, zolimomab aritox, abituzumab, intetumumab, alemtuzumab, tamtuvetmab, lorvotuzumab mertansine, itolizumab, cusatuzumab, vorsetuzumab mafodotin, milatuzumab, iladatuzumab vedotin, polatuzumab vedotin, galiximab, cibisatamab, zolbetuximab, naxitamab, tisotumab vedotin, olendalizumab, pamrevlumab, lacnotuzumab, cabiralizumab, emactuzumab, axatilimab, gimsilumab, lenzilumab, namilumab, tremelimumab, ulocuplumab, tepoditamab, rovalpituzumab tesirine, tarlatamab, demcizumab, navicixizumab, drozitumab, parsatuzumab, depatuxizumab mafodotin, modotuximab, carotuximab, adecatumumab, adecatumumab, oportuzumab monatox, solitomab, tucotuzumab celmoleukin, edrecolomab, catumaxomab, ifabotuzumab, fibatuzumab, zalutumumab, panitumumab, cetuximab, futuximab, imgatuzumab, laprituximab emtansine, matuzumab, necitumumab, nimotuzumab, tomuzotuximab, amivantamab, amivantamab, epitumomab cituxetan, sontuzumab, duligotuzumab, elgemtumab, lumretuzumab, patritumab, seribantumab, zenocutuzumab, sibrotuzumab, burosumab, aprutumab ixadotin, radretumab, pasotuxizumab, farletuzumab, mirvetuximab soravtansine, vantictumab, TRBS07, 3F8, dinutuximab, dinutuximab beta, ecromeximab, mitumomab, andecaliximab, capromab, codrituzumab, glembatumumab vedotin, talquetamab, talquetamab, trevogrumab, indusatumab vedotin, ficlatuzumab, rilotumumab, zatuximab, pentuzimab, pentuzimab, margetuximab, timigutuzumab, trastuzumab, trastuzumab duocarmazine, trastuzumab emtansine, gancotamab, pertuzumab, ertumaxomab, emibetuzumab, telisotuzumab, telisotuzumab vedotin, derlotuximab biotin, apolizumab, onartuzumab, bersanlimab, enlimomabpegol, rontalizumab, sifalimumab, talizumab, ganitumab, istiratumab, robatumumab, teprotumumab, figitumumab, ganitumab, istiratumab, robatumumab, teprotumumab, cixutumumab, dalotuzumab, xentuzumab, dusigitumab, canakinumab, ustekinumab, ustekinumab, ustekinumab, briakinumab, briakinumab, abrezekimab, lebrikizumab, romilkimab, TNX-650, tralokinumab, anrukinzumab, brodalumab, ixekizumab, netakimab, perakizumab, secukinumab, vunakizumab, afasevikumab, afasevikumab, bimekizumab, bimekizumab, remtolumab, bermekimab, lutikizumab, lutikizumab, gevokizumab, cergutuzumab amunaleukin, fletikumab, fezakinumab, brazikumab, guselkumab, mirikizumab, tildrakizumab, risankizumab, flotetuzumab, nemolizumab, pascolizumab, dupilumab, mepolizumab, reslizumab, clazakizumab, elsilimomab, olokizumab, sarilumab, siltuximab, sirukumab, vobarilizumab, tocilizumab, SA237, satralizumab, enokizumab, prezalizumab, natalizumab, abrilumab, abrilumab, vedolizumab, volociximab, tadocizumab, etaracizumab, etrolizumab, spesolimab, vatelizumab, erlizumab, lirilumab, relatlimab, cBR96-doxorubicinimmunoconjugate, odulimomab, efalizumab, ladiratuzumab vedotin, simtuzumab, samrotamab vedotin, aselizumab, lupartumab amadotin, imalumab, carlumab, imaprelimab, amatuximab, amatuximab, anetumab ravtansine, narnatumab, clivatuzumab tetraxetan, pemtumomab, gatipotuzumab, ensituximab, lemalesomab, sulesomab, enfortumab vedotin, racotumomab, monalizumab, brontictuzumab, tarextumab, vesencumab, oxelumab, gilvetmab, tislelizumab, dostarlimab, BCD-100, nivolumab, PDR001, pembrolizumab, pidilizumab, retifanlimab, spartalizumab, sintilimab, cemiplimab, olaratumab, tovetumab, rinucumab, atezolizumab, avelumab, durvalumab, lifastuzumab vedotin, bavituximab, acapatamab, capromab, rosopatamab, nezastomig, pasotuxizumab, pelgifatamab, voxalatamab, cofetuzumab pelidotin, denosumab, rosmantuzumab, cirmtuzumab, atinumab, indatuximab ravtansine, elotuzumab, sirtratumab vedotin, sonepcizumab, vandortuzumab vedotin, minretumomab, satumomab pendetide, maslimomab, ontuxizumab, tenatumomab, fresolimumab, metelimumab, lerdelimumab, tezepelumab, etigilimab, tiragotumab, placulumab, prezalumab, infliximab, nerelimomab, ozoralizumab, adalimumab, afelimomab, certolizumab pegol, golimumab, mapatumumab, conatumumab, lexatumumab, tigatuzumab, sacituzumab govitecan, votumumab, pogalizumab, letolizumab, pankomab, anatumomab mafenatox, enavatuzumab, flanvotumab, brolucizumab, ranibizumab, varisacumab, bevacizumab, faricimab, icrucumab, alacizumab pegol, ramucirumab, pritumumab, and onvatilimab;
[7179] VH2 comprises a VH of an antibody selected from the group consisting of losatuxizumab vedotin, utomilumab, urelumab, oleclumab, naptumomab estafenatox, ascrinvacumab, pintumomab, tacatuzumab tetraxetan, nesvacumab, vanucizumab, timolumab, vapaliximab, vepalimomab, enapotamab vedotin, ianalumab, belimumab, tabalumab, tibulizumab, belantamab mafodotin, teclistamab, teclistamab, detumomab, nacolomab tafenatox, eculizumab, lendalizumab, pexelizumab, pozelimab, ravulizumab, tesidolumab, vilobelimab, abagovomab, igovomab, oregovomab, sofituzumab vedotin, cantuzumab mertansine, cantuzuma bravtansine, girentuximab, altumomab pentetate, arcitumomab, besilesomab, bertilimumab, plozalizumab, mogamulizumab, leronlimab, PRO140, rovelizumab, rovelizumab, talacotuzumab, benralizumab, tavolimab, vonlerolizumab, gavilimomab, ziralimumab, fanolesomab, ipilimumab, ruplizumab, toralizumab, dapirolizumab pegol, toralizumab, dapirolizumab pegol, ruplizumab, blinatumomab, inebilizumab, loncastuximab tesirine, SGN-CD19A, tafasitamab, taplitumomab paptox, XMAB-5574, Budoprutug, Obexelimab, duvortuxizumab, englumafusp alfa, Emfizatamab, zeripatamig, siplizumab, blontuvetmab, FBTA05, ibritumomab tiuxetan, obinutuzumab, ocaratuzumab, ocrelizumab, ofatumumab, rituximab, tositumomab, ublituximab, veltuzumab, divozilimab, eramkafusp alfa, ripertamab, zuberitamab, glofitamab, nofetumomab merpentan, samalizumab, imvotamab, odronextamab, plamotamab, bectumomab, inotuzumab ozogamicin, moxetumomab pasudotox, pinatuzumab vedotin, gomiliximab, lumiliximab, inolimomab, inolimomab, daclizumab, camidanluma btesirine, basiliximab, varlilumab, omburtamab, enoblituzumab, vopratelimab, lulizumabpegol, TGN1412, muromonab-CD3, otelixizumab, teplizumab, visilizumab, epcoritamab, epcoritamab, brentuximab vedotin, iratumumab, azintuxizumab vedotin, gemtuzumab ozogamicin, lintuzumab, vadastuximab talirine, naratuximab emtansine, otlertuzumab, lilotomab satetraxetan, tetulomab, daratumumab, isatuximab, foralumab, mosunetuzumab, mosunetuzumab, cedelizumab, ibalizumab, keliximab, priliximab, tregalizumab, zanolimumab, bleselumab, iscalimab, lucatumumab, ravagalimab, selicrelumab, teneliximab, vanalimab, abciximab, bivatuzumab, iomab-B, telimomab aritox, zolimomab aritox, abituzumab, intetumumab, alemtuzumab, tamtuvetmab, lorvotuzumab mertansine, itolizumab, cusatuzumab, vorsetuzumab mafodotin, milatuzumab, iladatuzumab vedotin, polatuzumab vedotin, galiximab, cibisatamab, zolbetuximab, naxitamab, tisotumab vedotin, olendalizumab, pamrevlumab, lacnotuzumab, cabiralizumab, emactuzumab, axatilimab, gimsilumab, lenzilumab, namilumab, tremelimumab, ulocuplumab, tepoditamab, rovalpituzumab tesirine, tarlatamab, demcizumab, navicixizumab, drozitumab, parsatuzumab, depatuxizumab mafodotin, modotuximab, carotuximab, adecatumumab, adecatumumab, oportuzumab monatox, solitomab, tucotuzumab celmoleukin, edrecolomab, catumaxomab, ifabotuzumab, fibatuzumab, zalutumumab, panitumumab, cetuximab, futuximab, imgatuzumab, laprituximab emtansine, matuzumab, necitumumab, nimotuzumab, tomuzotuximab, amivantamab, amivantamab, epitumomab cituxetan, sontuzumab, duligotuzumab, elgemtumab, lumretuzumab, patritumab, seribantumab, zenocutuzumab, sibrotuzumab, burosumab, aprutumab ixadotin, radretumab, pasotuxizumab, farletuzumab, mirvetuximab soravtansine, vantictumab, TRBS07, 3F8, dinutuximab, dinutuximab beta, ecromeximab, mitumomab, andecaliximab, capromab, codrituzumab, glembatumumab vedotin, talquetamab, talquetamab, trevogrumab, indusatumab vedotin, ficlatuzumab, rilotumumab, zatuximab, pentuzimab, pentuzimab, margetuximab, timigutuzumab, trastuzumab, trastuzumab duocarmazine, trastuzumab emtansine, gancotamab, pertuzumab, ertumaxomab, emibetuzumab, telisotuzumab, telisotuzumab vedotin, derlotuximab biotin, apolizumab, onartuzumab, bersanlimab, enlimomabpegol, rontalizumab, sifalimumab, talizumab, ganitumab, istiratumab, robatumumab, teprotumumab, figitumumab, ganitumab, istiratumab, robatumumab, teprotumumab, cixutumumab, dalotuzumab, xentuzumab, dusigitumab, canakinumab, ustekinumab, ustekinumab, ustekinumab, briakinumab, briakinumab, abrezekimab, lebrikizumab, romilkimab, TNX-650, tralokinumab, anrukinzumab, brodalumab, ixekizumab, netakimab, perakizumab, secukinumab, vunakizumab, afasevikumab, afasevikumab, bimekizumab, bimekizumab, remtolumab, bermekimab, lutikizumab, lutikizumab, gevokizumab, cergutuzumab amunaleukin, fletikumab, fezakinumab, brazikumab, guselkumab, mirikizumab, tildrakizumab, risankizumab, flotetuzumab, nemolizumab, pascolizumab, dupilumab, mepolizumab, reslizumab, clazakizumab, elsilimomab, olokizumab, sarilumab, siltuximab, sirukumab, vobarilizumab, tocilizumab, SA237, satralizumab, enokizumab, prezalizumab, natalizumab, abrilumab, abrilumab, vedolizumab, volociximab, tadocizumab, etaracizumab, etrolizumab, spesolimab, vatelizumab, erlizumab, lirilumab, relatlimab, cBR96-doxorubicinimmunoconjugate, odulimomab, efalizumab, ladiratuzumab vedotin, simtuzumab, samrotamab vedotin, aselizumab, lupartumab amadotin, imalumab, carlumab, imaprelimab, amatuximab, amatuximab, anetumab ravtansine, narnatumab, clivatuzumab tetraxetan, pemtumomab, gatipotuzumab, ensituximab, lemalesomab, sulesomab, enfortumab vedotin, racotumomab, monalizumab, brontictuzumab, tarextumab, vesencumab, oxelumab, gilvetmab, tislelizumab, dostarlimab, BCD-100, nivolumab, PDR001, pembrolizumab, pidilizumab, retifanlimab, spartalizumab, sintilimab, cemiplimab, olaratumab, tovetumab, rinucumab, atezolizumab, avelumab, durvalumab, lifastuzumab vedotin, bavituximab, acapatamab, capromab, rosopatamab, nezastomig, pasotuxizumab, pelgifatamab, voxalatamab, cofetuzumab pelidotin, denosumab, rosmantuzumab, cirmtuzumab, atinumab, indatuximab ravtansine, elotuzumab, sirtratumab vedotin, sonepcizumab, vandortuzumab vedotin, minretumomab, satumomab pendetide, maslimomab, ontuxizumab, tenatumomab, fresolimumab, metelimumab, lerdelimumab, tezepelumab, etigilimab, tiragotumab, placulumab, prezalumab, infliximab, nerelimomab, ozoralizumab, adalimumab, afelimomab, certolizumab pegol, golimumab, mapatumumab, conatumumab, lexatumumab, tigatuzumab, sacituzumab govitecan, votumumab, pogalizumab, letolizumab, pankomab, anatumomab mafenatox, enavatuzumab, flanvotumab, brolucizumab, ranibizumab, varisacumab, bevacizumab, faricimab, icrucumab, alacizumab pegol, ramucirumab, pritumumab, and onvatilimab; and/or
[7180] VH3 comprises a VH of an antibody selected from the group consisting of losatuxizumab vedotin, utomilumab, urelumab, oleclumab, naptumomab estafenatox, ascrinvacumab, pintumomab, tacatuzumab tetraxetan, nesvacumab, vanucizumab, timolumab, vapaliximab, vepalimomab, enapotamab vedotin, ianalumab, belimumab, tabalumab, tibulizumab, belantamab mafodotin, teclistamab, teclistamab, detumomab, nacolomab tafenatox, eculizumab, lendalizumab, pexelizumab, pozelimab, ravulizumab, tesidolumab, vilobelimab, abagovomab, igovomab, oregovomab, sofituzumab vedotin, cantuzumab mertansine, cantuzuma bravtansine, girentuximab, altumomab pentetate, arcitumomab, besilesomab, bertilimumab, plozalizumab, mogamulizumab, leronlimab, PRO140, rovelizumab, rovelizumab, talacotuzumab, benralizumab, tavolimab, vonlerolizumab, gavilimomab, ziralimumab, fanolesomab, ipilimumab, ruplizumab, toralizumab, dapirolizumab pegol, toralizumab, dapirolizumab pegol, ruplizumab, blinatumomab, inebilizumab, loncastuximab tesirine, SGN-CD19A, tafasitamab, taplitumomab paptox, XMAB-5574, Budoprutug, Obexelimab, duvortuxizumab, englumafusp alfa, Emfizatamab, zeripatamig, siplizumab, blontuvetmab, FBTA05, ibritumomab tiuxetan, obinutuzumab, ocaratuzumab, ocrelizumab, ofatumumab, rituximab, tositumomab, ublituximab, veltuzumab, divozilimab, eramkafusp alfa, ripertamab, zuberitamab, glofitamab, nofetumomab merpentan, samalizumab, imvotamab, odronextamab, plamotamab, bectumomab, inotuzumab ozogamicin, moxetumomab pasudotox, pinatuzumab vedotin, gomiliximab, lumiliximab, inolimomab, inolimomab, daclizumab, camidanluma btesirine, basiliximab, varlilumab, omburtamab, enoblituzumab, vopratelimab, lulizumabpegol, TGN1412, muromonab-CD3, otelixizumab, teplizumab, visilizumab, epcoritamab, epcoritamab, brentuximab vedotin, iratumumab, azintuxizumab vedotin, gemtuzumab ozogamicin, lintuzumab, vadastuximab talirine, naratuximab emtansine, otlertuzumab, lilotomab satetraxetan, tetulomab, daratumumab, isatuximab, foralumab, mosunetuzumab, mosunetuzumab, cedelizumab, ibalizumab, keliximab, priliximab, tregalizumab, zanolimumab, bleselumab, iscalimab, lucatumumab, ravagalimab, selicrelumab, teneliximab, vanalimab, abciximab, bivatuzumab, iomab-B, telimomab aritox, zolimomab aritox, abituzumab, intetumumab, alemtuzumab, tamtuvetmab, lorvotuzumab mertansine, itolizumab, cusatuzumab, vorsetuzumab mafodotin, milatuzumab, iladatuzumab vedotin, polatuzumab vedotin, galiximab, cibisatamab, zolbetuximab, naxitamab, tisotumab vedotin, olendalizumab, pamrevlumab, lacnotuzumab, cabiralizumab, emactuzumab, axatilimab, gimsilumab, lenzilumab, namilumab, tremelimumab, ulocuplumab, tepoditamab, rovalpituzumab tesirine, tarlatamab, demcizumab, navicixizumab, drozitumab, parsatuzumab, depatuxizumab mafodotin, modotuximab, carotuximab, adecatumumab, adecatumumab, oportuzumab monatox, solitomab, tucotuzumab celmoleukin, edrecolomab, catumaxomab, ifabotuzumab, fibatuzumab, zalutumumab, panitumumab, cetuximab, futuximab, imgatuzumab, laprituximab emtansine, matuzumab, necitumumab, nimotuzumab, tomuzotuximab, amivantamab, amivantamab, epitumomab cituxetan, sontuzumab, duligotuzumab, elgemtumab, lumretuzumab, patritumab, seribantumab, zenocutuzumab, sibrotuzumab, burosumab, aprutumab ixadotin, radretumab, pasotuxizumab, farletuzumab, mirvetuximab soravtansine, vantictumab, TRBS07, 3F8, dinutuximab, dinutuximab beta, ecromeximab, mitumomab, andecaliximab, capromab, codrituzumab, glembatumumab vedotin, talquetamab, talquetamab, trevogrumab, indusatumab vedotin, ficlatuzumab, rilotumumab, zatuximab, pentuzimab, pentuzimab, margetuximab, timigutuzumab, trastuzumab, trastuzumab duocarmazine, trastuzumab emtansine, gancotamab, pertuzumab, ertumaxomab, emibetuzumab, telisotuzumab, telisotuzumab vedotin, derlotuximab biotin, apolizumab, onartuzumab, bersanlimab, enlimomabpegol, rontalizumab, sifalimumab, talizumab, ganitumab, istiratumab, robatumumab, teprotumumab, figitumumab, ganitumab, istiratumab, robatumumab, teprotumumab, cixutumumab, dalotuzumab, xentuzumab, dusigitumab, canakinumab, ustekinumab, ustekinumab, ustekinumab, briakinumab, briakinumab, abrezekimab, lebrikizumab, romilkimab, TNX-650, tralokinumab, anrukinzumab, brodalumab, ixekizumab, netakimab, perakizumab, secukinumab, vunakizumab, afasevikumab, afascvikumab, bimekizumab, bimekizumab, remtolumab, bermekimab, lutikizumab, lutikizumab, gevokizumab, cergutuzumab amunaleukin, fletikumab, fezakinumab, brazikumab, guselkumab, mirikizumab, tildrakizumab, risankizumab, flotetuzumab, nemolizumab, pascolizumab, dupilumab, mepolizumab, reslizumab, clazakizumab, elsilimomab, olokizumab, sarilumab, siltuximab, sirukumab, vobarilizumab, tocilizumab, SA237, satralizumab, enokizumab, prezalizumab, natalizumab, abrilumab, abrilumab, vedolizumab, volociximab, tadocizumab, etaracizumab, etrolizumab, spesolimab, vatelizumab, erlizumab, lirilumab, relatlimab, cBR96-doxorubicinimmunoconjugate, odulimomab, efalizumab, ladiratuzumab vedotin, simtuzumab, samrotamab vedotin, aselizumab, lupartumab amadotin, imalumab, carlumab, imaprelimab, amatuximab, amatuximab, anetumab ravtansine, narnatumab, clivatuzumab tetraxetan, pemtumomab, gatipotuzumab, ensituximab, lemalesomab, sulesomab, enfortumab vedotin, racotumomab, monalizumab, brontictuzumab, tarextumab, vesencumab, oxelumab, gilvetmab, tislelizumab, dostarlimab, BCD-100, nivolumab, PDR001, pembrolizumab, pidilizumab, retifanlimab, spartalizumab, sintilimab, cemiplimab, olaratumab, tovetumab, rinucumab, atezolizumab, avelumab, durvalumab, lifastuzumab vedotin, bavituximab, acapatamab, capromab, rosopatamab, nezastomig, pasotuxizumab, pelgifatamab, voxalatamab, cofetuzumab pelidotin, denosumab, rosmantuzumab, cirmtuzumab, atinumab, indatuximab ravtansine, elotuzumab, sirtratumab vedotin, sonepcizumab, vandortuzumab vedotin, minretumomab, satumomab pendetide, maslimomab, ontuxizumab, tenatumomab, fresolimumab, metelimumab, lerdelimumab, tezepelumab, etigilimab, tiragotumab, placulumab, prezalumab, infliximab, nerelimomab, ozoralizumab, adalimumab, afelimomab, certolizumab pegol, golimumab, mapatumumab, conatumumab, lexatumumab, tigatuzumab, sacituzumab govitecan, votumumab, pogalizumab, letolizumab, pankomab, anatumomab mafenatox, enavatuzumab, flanvotumab, brolucizumab, ranibizumab, varisacumab, bevacizumab, faricimab, icrucumab, alacizumab pegol, ramucirumab, pritumumab, and onvatilimab; or
[7181] (iii)
[7182] VL1 comprises (i) a complementarity determining region (CDR) 1 having an amino acid sequence that is at least 65%, at least 70%, at least 75%, at least 80%, at least 85%, at least 90%, at least 95%, at least 99%, or 100% identical to any one of SEQ ID NOs: 1096, 1103, 1110, 1120, 1127, 1134, 1141, 1148, 1155, 1162, 1169, 1174, 1181, 1188, 1199, 1211, 1221, 1228, 1235, 1247, 1254, 1261, 1266, 1271, 1278, 1285, 1292, 1299, 1306, 1313, 1319, 1326, 1339, 1352, 1359, 1366, 1373, 1382, 1394, 1401, 1408, 1414, 1421, 1428, 1441, 1448, 1455, 1461, 1468, 1475, 1488, 1495, 1508, 1519, 1526, 1531, 1538, 1544, 1556, 1568, 1574, 1581, 1594, 1601, 1608, 1615, 1622, 1629, 1636, 1643, 1650, 1657, 1672, 1679, 1689, 1697, 1708, 1715, 1718, 1723, 1727, 1738, 1743, 1752, 1761, 1763, 1769, 1776, and 1786; (ii) a CDR2 having an amino acid sequence that is at least 65%, at least 70%, at least 75%, at least 80%, at least 85%, at least 90%, at least 95%, at least 99%, or 100% identical to any one of SEQ ID NOs: 1200, 1212, 1680, 1690, 1698, 1709, 1728, 1739, 1744, 1753, 1770, and 1777; or at least 65%, at least 70%, at least 75%, at least 80%, at least 85%, at least 90%, at least 95%, at least 99%, or 100% identical to any one of amino acid sequences AAS, APS, AT, ATS, DAS, DDG, DDS, DT, DTS, DVS, EAS, FTS, GAF, GAN, GAS, GAT, GIS, GKN, GNS, HTS, KVS, LAS, LGS, LVS, NAK, NTN, QMS, RMS, RTS, SAS, TTS, WAS, YAS, YAT, YGS, YRS, and YTS; and (iii) a CDR3 having an amino acid sequence that is at least 65%, at least 70%, at least 75%, at least 80%, at least 85%, at least 90%, at least 95%, at least 99%, or 100% identical to any one of SEQ ID NOs: 1097, 1104, 1111, 1121, 1128, 1135, 1142, 1149, 1156, 1163, 1170, 1175, 1182, 1189, 1195, 1201, 1207, 1213, 1222, 1229, 1236, 2009, 1248, 1255, 1262, 1267, 1272, 1279, 1286, 1293, 1300, 1307, 1320, 1327, 1333, 1340, 1346, 1353, 1360, 1367, 1374, 1383, 1389, 1395, 1402, 1409, 1415, 1422, 1429, 1435, 1442, 1449, 1456, 1462, 1469, 1476, 1482, 1489, 1496, 1502, 1509, 1513, 1520, 1532, 1539, 1545, 1557, 1562, 1569, 1575, 1582, 1588, 1595, 1602, 1609, 1616, 1623, 1630, 1637, 1644, 1651, 1658, 1663, 1673, 1681, 1691, 1699, 1710, 1729, 1735, 1745, 1751, 1754, 1778, 1787, and 1976;
[7183] VL2 comprises (i) a complementarity determining region (CDR) 1 having an amino acid sequence that is at least 65%, at least 70%, at least 75%, at least 80%, at least 85%, at least 90%, at least 95%, at least 99%, or 100% identical to any one of SEQ ID NOs: 1096, 1103, 1110, 1120, 1127, 1134, 1141, 1148, 1155, 1162, 1169, 1174, 1181, 1188, 1199, 1211, 1221, 1228, 1235, 1247, 1254, 1261, 1266, 1271, 1278, 1285, 1292, 1299, 1306, 1313, 1319, 1326, 1339, 1352, 1359, 1366, 1373, 1382, 1394, 1401, 1408, 1414, 1421, 1428, 1441, 1448, 1455, 1461, 1468, 1475, 1488, 1495, 1508, 1519, 1526, 1531, 1538, 1544, 1556, 1568, 1574, 1581, 1594, 1601, 1608, 1615, 1622, 1629, 1636, 1643, 1650, 1657, 1672, 1679, 1689, 1697, 1708, 1715, 1718, 1723, 1727, 1738, 1743, 1752, 1761, 1763, 1769, 1776, and 1786; (ii) a CDR2 having an amino acid sequence that is at least 65%, at least 70%, at least 75%, at least 80%, at least 85%, at least 90%, at least 95%, at least 99%, or 100% identical to any one of SEQ ID NOs: 1200, 1212, 1680, 1690, 1698, 1709, 1728, 1739, 1744, 1753, 1770, and 1777; or at least 65%, at least 70%, at least 75%, at least 80%, at least 85%, at least 90%, at least 95%, at least 99%, or 100% identical to any one of amino acid sequences AAS, APS, AT, ATS, DAS, DDG, DDS, DT, DTS, DVS, EAS, FTS, GAF, GAN, GAS, GAT, GIS, GKN, GNS, HTS, KVS, LAS, LGS, LVS, NAK, NTN, QMS, RMS, RTS, SAS, TTS, WAS, YAS, YAT, YGS, YRS, and YTS; and (iii) a CDR3 having an amino acid sequence that is at least 65%, at least 70%, at least 75%, at least 80%, at least 85%, at least 90%, at least 95%, at least 99%, or 100% identical to any one of SEQ ID NOs: 1097, 1104, 1111, 1121, 1128, 1135, 1142, 1149, 1156, 1163, 1170, 1175, 1182, 1189, 1195, 1201, 1207, 1213, 1222, 1229, 1236, 2009, 1248, 1255, 1262, 1267, 1272, 1279, 1286, 1293, 1300, 1307, 1320, 1327, 1333, 1340, 1346, 1353, 1360, 1367, 1374, 1383, 1389, 1395, 1402, 1409, 1415, 1422, 1429, 1435, 1442, 1449, 1456, 1462, 1469, 1476, 1482, 1489, 1496, 1502, 1509, 1513, 1520, 1532, 1539, 1545, 1557, 1562, 1569, 1575, 1582, 1588, 1595, 1602, 1609, 1616, 1623, 1630, 1637, 1644, 1651, 1658, 1663, 1673, 1681, 1691, 1699, 1710, 1729, 1735, 1745, 1751, 1754, 1778, 1787, and 1976;
[7184] VL3 comprises (i) a complementarity determining region (CDR) 1 having an amino acid sequence that is at least 65%, at least 70%, at least 75%, at least 80%, at least 85%, at least 90%, at least 95%, at least 99%, or 100% identical to any one of SEQ ID NOs: 1096, 1103, 1110, 1120, 1127, 1134, 1141, 1148, 1155, 1162, 1169, 1174, 1181, 1188, 1199, 1211, 1221, 1228, 1235, 1247, 1254, 1261, 1266, 1271, 1278, 1285, 1292, 1299, 1306, 1313, 1319, 1326, 1339, 1352, 1359, 1366, 1373, 1382, 1394, 1401, 1408, 1414, 1421, 1428, 1441, 1448, 1455, 1461, 1468, 1475, 1488, 1495, 1508, 1519, 1526, 1531, 1538, 1544, 1556, 1568, 1574, 1581, 1594, 1601, 1608, 1615, 1622, 1629, 1636, 1643, 1650, 1657, 1672, 1679, 1689, 1697, 1708, 1715, 1718, 1723, 1727, 1738, 1743, 1752, 1761, 1763, 1769, 1776, and 1786; (ii) a CDR2 having an amino acid sequence that is at least 65%, at least 70%, at least 75%, at least 80%, at least 85%, at least 90%, at least 95%, at least 99%, or 100% identical to any one of SEQ ID NOs: 1200, 1212, 1680, 1690, 1698, 1709, 1728, 1739, 1744, 1753, 1770, and 1777; or at least 65%, at least 70%, at least 75%, at least 80%, at least 85%, at least 90%, at least 95%, at least 99%, or 100% identical to any one of amino acid sequences AAS, APS, AT, ATS, DAS, DDG, DDS, DT, DTS, DVS, EAS, FTS, GAF, GAN, GAS, GAT, GIS, GKN, GNS, HTS, KVS, LAS, LGS, LVS, NAK, NTN, QMS, RMS, RTS, SAS, TTS, WAS, YAS, YAT, YGS, YRS, and YTS; and (iii) a CDR3 having an amino acid sequence that is at least 65%, at least 70%, at least 75%, at least 80%, at least 85%, at least 90%, at least 95%, at least 99%, or 100% identical to any one of SEQ ID NOs: 1097, 1104, 1111, 1121, 1128, 1135, 1142, 1149, 1156, 1163, 1170, 1175, 1182, 1189, 1195, 1201, 1207, 1213, 1222, 1229, 1236, 2009, 1248, 1255, 1262, 1267, 1272, 1279, 1286, 1293, 1300, 1307, 1320, 1327, 1333, 1340, 1346, 1353, 1360, 1367, 1374, 1383, 1389, 1395, 1402, 1409, 1415, 1422, 1429, 1435, 1442, 1449, 1456, 1462, 1469, 1476, 1482, 1489, 1496, 1502, 1509, 1513, 1520, 1532, 1539, 1545, 1557, 1562, 1569, 1575, 1582, 1588, 1595, 1602, 1609, 1616, 1623, 1630, 1637, 1644, 1651, 1658, 1663, 1673, 1681, 1691, 1699, 1710, 1729, 1735, 1745, 1751, 1754, 1778, 1787, and 1976;
[7185] VH1 comprises (i) a complementarity determining region (CDR) 1 having an amino acid sequence that is at least 65%, at least 70%, at least 75%, at least 80%, at least 85%, at least 90%, at least 95%, at least 99%, or 100% identical to any one of SEQ ID NOs: 1099, 1106, 1113, 1117, 1123, 1130, 1137, 1144, 1151, 1158, 1165, 1177, 1184, 1191, 1203, 1215, 1224, 1231, 1238, 1243, 1250, 1257, 1264, 1274, 1281, 1288, 1295, 1302, 1309, 1315, 1322, 1329, 1335, 1342, 1348, 1355, 1362, 1369, 1376, 1385, 1397, 1404, 1417, 1424, 1431, 1437, 1444, 1451, 1458, 1464, 1471, 1478, 1484, 1491, 1498, 1504, 1511, 1515, 1522, 1534, 1547, 1552, 1564, 1577, 1584, 1590, 1597, 1604, 1611, 1618, 1625, 1632, 1639, 1646, 1653, 1660, 1665, 1675, 1683, 1693, 1701, 1705, 1716, 1719, 1731, 1736, 1747, 1756, 1772, 1780, and 1789; (ii) a CDR2 having an amino acid sequence that is at least 65%, at least 70%, at least 75%, at least 80%, at least 85%, at least 90%, at least 95%, at least 99%, or 100% identical to any one of SEQ ID NOs: 1100, 1107, 1114, 1118, 1124, 1131, 1138, 1145, 1152, 1159, 1166, 1178, 1185, 1192, 1204, 1216, 1225, 1232, 1239, 1244, 1251, 1258, 1275, 1282, 1289, 1296, 1303, 1310, 1316, 1323, 1330, 1336, 1343, 1349, 1356, 1363, 1370, 1377, 1386, 1391, 1398, 1405, 1411, 1418, 1425, 1432, 1438, 1445, 1452, 1465, 1472, 1479, 1485, 1492, 1499, 1505, 1516, 1523, 1528, 1535, 1541, 1548, 1553, 1559, 1565, 1571, 1578, 1585, 1591, 1598, 1605, 1612, 1619, 1626, 1633, 1640, 1647, 1654, 1666, 1676, 1684, 1687, 1694, 1702, 1706, 1712, 1717, 1720, 1725, 1732, 1737, 1741, 1748, 1757, 1767, 1773, 1781, and 1790; and (iii) a CDR3 having an amino acid sequence that is at least 65%, at least 70%, at least 75%, at least 80%, at least 85%, at least 90%, at least 95%, at least 99%, or 100% identical to any one of SEQ ID NOs: 1101, 1108, 1115, 1125, 1132, 1139, 1146, 1153, 1160, 1167, 1172, 1179, 1186, 1193, 1197, 1205, 1209, 1217, 1226, 1233, 1240, 1245, 1252, 1259, 1269, 1276, 1283, 1290, 1297, 1304, 1311, 1317, 1324, 1331, 1337, 1344, 1350, 1357, 1364, 1371, 1378, 1387, 1392, 1399, 1406, 1412, 1419, 1426, 1433, 1439, 1446, 1453, 1459, 1466, 1473, 1480, 1486, 1493, 1500, 1506, 1517, 1524, 1529, 1536, 1542, 1549, 1554, 1560, 1566, 1572, 1579, 1586, 1592, 1599, 1606, 1613, 1620, 1627, 1634, 1641, 1648, 1655, 1661, 1667, 1670, 1677, 1685, 1688, 1695, 1703, 1707, 1713, 1733, 1749, 1758, 1762, 1774, 1782, 1791, and 1975;
[7186] VH2 comprises (i) a complementarity determining region (CDR) 1 having an amino acid sequence that is at least 65%, at least 70%, at least 75%, at least 80%, at least 85%, at least 90%, at least 95%, at least 99%, or 100% identical to any one of SEQ ID NOs: 1099, 1106, 1113, 1117, 1123, 1130, 1137, 1144, 1151, 1158, 1165, 1177, 1184, 1191, 1203, 1215, 1224, 1231, 1238, 1243, 1250, 1257, 1264, 1274, 1281, 1288, 1295, 1302, 1309, 1315, 1322, 1329, 1335, 1342, 1348, 1355, 1362, 1369, 1376, 1385, 1397, 1404, 1417, 1424, 1431, 1437, 1444, 1451, 1458, 1464, 1471, 1478, 1484, 1491, 1498, 1504, 1511, 1515, 1522, 1534, 1547, 1552, 1564, 1577, 1584, 1590, 1597, 1604, 1611, 1618, 1625, 1632, 1639, 1646, 1653, 1660, 1665, 1675, 1683, 1693, 1701, 1705, 1716, 1719, 1731, 1736, 1747, 1756, 1772, 1780, and 1789; (ii) a CDR2 having an amino acid sequence that is at least 65%, at least 70%, at least 75%, at least 80%, at least 85%, at least 90%, at least 95%, at least 99%, or 100% identical to any one of SEQ ID NOs: 1100, 1107, 1114, 1118, 1124, 1131, 1138, 1145, 1152, 1159, 1166, 1178, 1185, 1192, 1204, 1216, 1225, 1232, 1239, 1244, 1251, 1258, 1275, 1282, 1289, 1296, 1303, 1310, 1316, 1323, 1330, 1336, 1343, 1349, 1356, 1363, 1370, 1377, 1386, 1391, 1398, 1405, 1411, 1418, 1425, 1432, 1438, 1445, 1452, 1465, 1472, 1479, 1485, 1492, 1499, 1505, 1516, 1523, 1528, 1535, 1541, 1548, 1553, 1559, 1565, 1571, 1578, 1585, 1591, 1598, 1605, 1612, 1619, 1626, 1633, 1640, 1647, 1654, 1666, 1676, 1684, 1687, 1694, 1702, 1706, 1712, 1717, 1720, 1725, 1732, 1737, 1741, 1748, 1757, 1767, 1773, 1781, and 1790; and (iii) a CDR3 having an amino acid sequence that is at least 65%, at least 70%, at least 75%, at least 80%, at least 85%, at least 90%, at least 95%, at least 99%, or 100% identical to any one of SEQ ID NOs: 1101, 1108, 1115, 1125, 1132, 1139, 1146, 1153, 1160, 1167, 1172, 1179, 1186, 1193, 1197, 1205, 1209, 1217, 1226, 1233, 1240, 1245, 1252, 1259, 1269, 1276, 1283, 1290, 1297, 1304, 1311, 1317, 1324, 1331, 1337, 1344, 1350, 1357, 1364, 1371, 1378, 1387, 1392, 1399, 1406, 1412, 1419, 1426, 1433, 1439, 1446, 1453, 1459, 1466, 1473, 1480, 1486, 1493, 1500, 1506, 1517, 1524, 1529, 1536, 1542, 1549, 1554, 1560, 1566, 1572, 1579, 1586, 1592, 1599, 1606, 1613, 1620, 1627, 1634, 1641, 1648, 1655, 1661, 1667, 1670, 1677, 1685, 1688, 1695, 1703, 1707, 1713, 1733, 1749, 1758, 1762, 1774, 1782, 1791, and 1975; and/or
[7187] VH3 comprises (i) a complementarity determining region (CDR) 1 having an amino acid sequence that is at least 65%, at least 70%, at least 75%, at least 80%, at least 85%, at least 90%, at least 95%, at least 99%, or 100% identical to any one of SEQ ID NOs: 1099, 1106, 1113, 1117, 1123, 1130, 1137, 1144, 1151, 1158, 1165, 1177, 1184, 1191, 1203, 1215, 1224, 1231, 1238, 1243, 1250, 1257, 1264, 1274, 1281, 1288, 1295, 1302, 1309, 1315, 1322, 1329, 1335, 1342, 1348, 1355, 1362, 1369, 1376, 1385, 1397, 1404, 1417, 1424, 1431, 1437, 1444, 1451, 1458, 1464, 1471, 1478, 1484, 1491, 1498, 1504, 1511, 1515, 1522, 1534, 1547, 1552, 1564, 1577, 1584, 1590, 1597, 1604, 1611, 1618, 1625, 1632, 1639, 1646, 1653, 1660, 1665, 1675, 1683, 1693, 1701, 1705, 1716, 1719, 1731, 1736, 1747, 1756, 1772, 1780, and 1789; (ii) a CDR2 having an amino acid sequence that is at least 65%, at least 70%, at least 75%, at least 80%, at least 85%, at least 90%, at least 95%, at least 99%, or 100% identical to any one of SEQ ID NOs: 1100, 1107, 1114, 1118, 1124, 1131, 1138, 1145, 1152, 1159, 1166, 1178, 1185, 1192, 1204, 1216, 1225, 1232, 1239, 1244, 1251, 1258, 1275, 1282, 1289, 1296, 1303, 1310, 1316, 1323, 1330, 1336, 1343, 1349, 1356, 1363, 1370, 1377, 1386, 1391, 1398, 1405, 1411, 1418, 1425, 1432, 1438, 1445, 1452, 1465, 1472, 1479, 1485, 1492, 1499, 1505, 1516, 1523, 1528, 1535, 1541, 1548, 1553, 1559, 1565, 1571, 1578, 1585, 1591, 1598, 1605, 1612, 1619, 1626, 1633, 1640, 1647, 1654, 1666, 1676, 1684, 1687, 1694, 1702, 1706, 1712, 1717, 1720, 1725, 1732, 1737, 1741, 1748, 1757, 1767, 1773, 1781, and 1790; and (iii) a CDR3 having an amino acid sequence that is at least 65%, at least 70%, at least 75%, at least 80%, at least 85%, at least 90%, at least 95%, at least 99%, or 100% identical to any one of SEQ ID NOs: 1101, 1108, 1115, 1125, 1132, 1139, 1146, 1153, 1160, 1167, 1172, 1179, 1186, 1193, 1197, 1205, 1209, 1217, 1226, 1233, 1240, 1245, 1252, 1259, 1269, 1276, 1283, 1290, 1297, 1304, 1311, 1317, 1324, 1331, 1337, 1344, 1350, 1357, 1364, 1371, 1378, 1387, 1392, 1399, 1406, 1412, 1419, 1426, 1433, 1439, 1446, 1453, 1459, 1466, 1473, 1480, 1486, 1493, 1500, 1506, 1517, 1524, 1529, 1536, 1542, 1549, 1554, 1560, 1566, 1572, 1579, 1586, 1592, 1599, 1606, 1613, 1620, 1627, 1634, 1641, 1648, 1655, 1661, 1667, 1670, 1677, 1685, 1688, 1695, 1703, 1707, 1713, 1733, 1749, 1758, 1762, 1774, 1782, 1791, and 1975; or
[7188] (iv)
[7189] VL1 comprises an amino acid sequence that is at least 65%, at least 70%, at least 75%, at least 80%, at least 85%, at least 90%, at least 95%, at least 99%, or 100% identical to any one of SEQ ID NOs: 1098, 1105, 1112, 1122, 1129, 1136, 1143, 1150, 1157, 1164, 1171, 1176, 1183, 1190, 1196, 1202, 1208, 1214, 1219, 1223, 1230, 1237, 1242, 1249, 1256, 1263, 1268, 1273, 1280, 1287, 1294, 1301, 1308, 1314, 1321, 1328, 1334, 1341, 1347, 1354, 1361, 1368, 1375, 1380, 1384, 1390, 1396, 1403, 1410, 1416, 1423, 1430, 1436, 1443, 1450, 1457, 1463, 1470, 1477, 1483, 1490, 1497, 1503, 1510, 1514, 1521, 1527, 1533, 1540, 1546, 1551, 1558, 1563, 1570, 1576, 1583, 1589, 1596, 1603, 1610, 1617, 1624, 1631, 1638, 1645, 1652, 1659, 1664, 1669, 1674, 1682, 1692, 1700, 1711, 1721, 1724, 1730, 1740, 1746, 1755, 1764, 1766, 1771, 1779, 1784, and 1788;
[7190] VL2 comprises an amino acid sequence that is at least 65%, at least 70%, at least 75%, at least 80%, at least 85%, at least 90%, at least 95%, at least 99%, or 100% identical to any one of SEQ ID NOs: 1098, 1105, 1112, 1122, 1129, 1136, 1143, 1150, 1157, 1164, 1171, 1176, 1183, 1190, 1196, 1202, 1208, 1214, 1219, 1223, 1230, 1237, 1242, 1249, 1256, 1263, 1268, 1273, 1280, 1287, 1294, 1301, 1308, 1314, 1321, 1328, 1334, 1341, 1347, 1354, 1361, 1368, 1375, 1380, 1384, 1390, 1396, 1403, 1410, 1416, 1423, 1430, 1436, 1443, 1450, 1457, 1463, 1470, 1477, 1483, 1490, 1497, 1503, 1510, 1514, 1521, 1527, 1533, 1540, 1546, 1551, 1558, 1563, 1570, 1576, 1583, 1589, 1596, 1603, 1610, 1617, 1624, 1631, 1638, 1645, 1652, 1659, 1664, 1669, 1674, 1682, 1692, 1700, 1711, 1721, 1724, 1730, 1740, 1746, 1755, 1764, 1766, 1771, 1779, 1784, and 1788;
[7191] VL3 comprises an amino acid sequence that is at least 65%, at least 70%, at least 75%, at least 80%, at least 85%, at least 90%, at least 95%, at least 99%, or 100% identical to any one of SEQ ID NOs: 1098, 1105, 1112, 1122, 1129, 1136, 1143, 1150, 1157, 1164, 1171, 1176, 1183, 1190, 1196, 1202, 1208, 1214, 1219, 1223, 1230, 1237, 1242, 1249, 1256, 1263, 1268, 1273, 1280, 1287, 1294, 1301, 1308, 1314, 1321, 1328, 1334, 1341, 1347, 1354, 1361, 1368, 1375, 1380, 1384, 1390, 1396, 1403, 1410, 1416, 1423, 1430, 1436, 1443, 1450, 1457, 1463, 1470, 1477, 1483, 1490, 1497, 1503, 1510, 1514, 1521, 1527, 1533, 1540, 1546, 1551, 1558, 1563, 1570, 1576, 1583, 1589, 1596, 1603, 1610, 1617, 1624, 1631, 1638, 1645, 1652, 1659, 1664, 1669, 1674, 1682, 1692, 1700, 1711, 1721, 1724, 1730, 1740, 1746, 1755, 1764, 1766, 1771, 1779, 1784, and 1788;
[7192] VH1 comprises an amino acid sequence that is at least 65%, at least 70%, at least 75%, at least 80%, at least 85%, at least 90%, at least 95%, at least 99%, or 100% identical to any one of SEQ ID NOs: 1102, 1109, 1116, 1119, 1126, 1133, 1140, 1147, 1154, 1161, 1168, 1173, 1180, 1187, 1194, 1198, 1206, 1210, 1218, 1220, 1227, 1234, 1241, 1246, 1253, 1260, 1265, 1270, 1277, 1284, 1291, 1298, 1305, 1312, 1318, 1325, 1332, 1338, 1345, 1351, 1358, 1365, 1372, 1379, 1381, 1388, 1393, 1400, 1407, 1413, 1420, 1427, 1434, 1440, 1447, 1454, 1460, 1467, 1474, 1481, 1487, 1494, 1501, 1507, 1512, 1518, 1525, 1530, 1537, 1543, 1550, 1555, 1561, 1567, 1573, 1580, 1587, 1593, 1600, 1607, 1614, 1621, 1628, 1635, 1642, 1649, 1656, 1662, 1668, 1671, 1678, 1686, 1696, 1704, 1714, 1722, 1726, 1734, 1742, 1750, 1759, 1760, 1765, 1768, 1775, 1783, 1785, and 1792;
[7193] VH2 comprises an amino acid sequence that is at least 65%, at least 70%, at least 75%, at least 80%, at least 85%, at least 90%, at least 95%, at least 99%, or 100% identical to any one of SEQ ID NOs: 1102, 1109, 1116, 1119, 1126, 1133, 1140, 1147, 1154, 1161, 1168, 1173, 1180, 1187, 1194, 1198, 1206, 1210, 1218, 1220, 1227, 1234, 1241, 1246, 1253, 1260, 1265, 1270, 1277, 1284, 1291, 1298, 1305, 1312, 1318, 1325, 1332, 1338, 1345, 1351, 1358, 1365, 1372, 1379, 1381, 1388, 1393, 1400, 1407, 1413, 1420, 1427, 1434, 1440, 1447, 1454, 1460, 1467, 1474, 1481, 1487, 1494, 1501, 1507, 1512, 1518, 1525, 1530, 1537, 1543, 1550, 1555, 1561, 1567, 1573, 1580, 1587, 1593, 1600, 1607, 1614, 1621, 1628, 1635, 1642, 1649, 1656, 1662, 1668, 1671, 1678, 1686, 1696, 1704, 1714, 1722, 1726, 1734, 1742, 1750, 1759, 1760, 1765, 1768, 1775, 1783, 1785, and 1792; and/or
[7194] VH3 comprises an amino acid sequence that is at least 65%, at least 70%, at least 75%, at least 80%, at least 85%, at least 90%, at least 95%, at least 99%, or 100% identical to any one of SEQ ID NOs: 1102, 1109, 1116, 1119, 1126, 1133, 1140, 1147, 1154, 1161, 1168, 1173, 1180, 1187, 1194, 1198, 1206, 1210, 1218, 1220, 1227, 1234, 1241, 1246, 1253, 1260, 1265, 1270, 1277, 1284, 1291, 1298, 1305, 1312, 1318, 1325, 1332, 1338, 1345, 1351, 1358, 1365, 1372, 1379, 1381, 1388, 1393, 1400, 1407, 1413, 1420, 1427, 1434, 1440, 1447, 1454, 1460, 1467, 1474, 1481, 1487, 1494, 1501, 1507, 1512, 1518, 1525, 1530, 1537, 1543, 1550, 1555, 1561, 1567, 1573, 1580, 1587, 1593, 1600, 1607, 1614, 1621, 1628, 1635, 1642, 1649, 1656, 1662, 1668, 1671, 1678, 1686, 1696, 1704, 1714, 1722, 1726, 1734, 1742, 1750, 1759, 1760, 1765, 1768, 1775, 1783, 1785, and 1792; or
[7195] (b)
[7196] (i)
[7197] VL1 comprises a light chain complementarity determining region 1 (LCDR1), LCDR2, and/or LCDR3 of an antibody selected from the group consisting of libivirumab, rmab, rivabazumab pegol, setoxaximab, suvizumab, suvratoxumab, sevirumab, pritoxaximab, porgaviximab, REGN-EB3, obiltoxaximab, gedivumab, foravirumab, larcaviximab, motavizumab, palivizumab, rafivirumab, regavirumab, tuvirumab, cosfroviximab, felvizumab, atidortoxumab, edobacomab, nebacumab, pateclizumab, raxibacumab, urtoxazumab, tosatoxumab, berlimatoxumab, CR6261, diridavumab, firivumab, lesofavumab, navivumab, exbivirumab, lenvervimab, bavituximab, bezlotoxumab, efungumab, leronlimab, nirsevimab, pagibaximab, panobacumab, tefibazumab, ansuvimab, atoltivimab, maftivimab, and odesivimab;
[7198] VL2 comprises a light chain complementarity determining region 1 (LCDR1), LCDR2, and/or LCDR3 of an antibody selected from the group consisting of libivirumab, rmab, rivabazumab pegol, setoxaximab, suvizumab, suvratoxumab, sevirumab, pritoxaximab, porgaviximab, REGN-EB3, obiltoxaximab, gedivumab, foravirumab, larcaviximab, motavizumab, palivizumab, rafivirumab, regavirumab, tuvirumab, cosfroviximab, felvizumab, atidortoxumab, edobacomab, nebacumab, pateclizumab, raxibacumab, urtoxazumab, tosatoxumab, berlimatoxumab, CR6261, diridavumab, firivumab, lesofavumab, navivumab, exbivirumab, lenvervimab, bavituximab, bezlotoxumab, efungumab, leronlimab, nirsevimab, pagibaximab, panobacumab, tefibazumab, ansuvimab, atoltivimab, maftivimab, and odesivimab;
[7199] VL3 comprises a light chain complementarity determining region 1 (LCDR1), LCDR2, and/or LCDR3 of an antibody selected from the group consisting of libivirumab, rmab, rivabazumab pegol, setoxaximab, suvizumab, suvratoxumab, sevirumab, pritoxaximab, porgaviximab, REGN-EB3, obiltoxaximab, gedivumab, foravirumab, larcaviximab, motavizumab, palivizumab, rafivirumab, regavirumab, tuvirumab, cosfroviximab, felvizumab, atidortoxumab, edobacomab, nebacumab, pateclizumab, raxibacumab, urtoxazumab, tosatoxumab, berlimatoxumab, CR6261, diridavumab, firivumab, lesofavumab, navivumab, exbivirumab, lenvervimab, bavituximab, bezlotoxumab, efungumab, leronlimab, nirsevimab, pagibaximab, panobacumab, tefibazumab, ansuvimab, atoltivimab, maftivimab, and odesivimab;
[7200] VH1 comprises a heavy chain complementarity determining region 1 (HCDR1), HCDR2, and/or HCDR3 of an antibody selected from the group consisting of libivirumab, rmab, rivabazumab pegol, setoxaximab, suvizumab, suvratoxumab, sevirumab, pritoxaximab, porgaviximab, REGN-EB3, obiltoxaximab, gedivumab, foravirumab, larcaviximab, motavizumab, palivizumab, rafivirumab, regavirumab, tuvirumab, cosfroviximab, felvizumab, atidortoxumab, edobacomab, nebacumab, pateclizumab, raxibacumab, urtoxazumab, tosatoxumab, berlimatoxumab, CR6261, diridavumab, firivumab, lesofavumab, navivumab, exbivirumab, lenvervimab, bavituximab, bezlotoxumab, efungumab, leronlimab, nirsevimab, pagibaximab, panobacumab, tefibazumab, ansuvimab, atoltivimab, maftivimab, and odesivimab;
[7201] VH2 comprises a heavy chain complementarity determining region 1 (HCDR1), HCDR2, and/or HCDR3 of an antibody selected from the group consisting of libivirumab, rmab, rivabazumab pegol, setoxaximab, suvizumab, suvratoxumab, sevirumab, pritoxaximab, porgaviximab, REGN-EB3, obiltoxaximab, gedivumab, foravirumab, larcaviximab, motavizumab, palivizumab, rafivirumab, regavirumab, tuvirumab, cosfroviximab, felvizumab, atidortoxumab, edobacomab, nebacumab, pateclizumab, raxibacumab, urtoxazumab, tosatoxumab, berlimatoxumab, CR6261, diridavumab, firivumab, lesofavumab, navivumab, exbivirumab, lenvervimab, bavituximab, bezlotoxumab, efungumab, leronlimab, nirsevimab, pagibaximab, panobacumab, tefibazumab, ansuvimab, atoltivimab, maftivimab, and odesivimab; and/or
[7202] VH3 comprises a heavy chain complementarity determining region 1 (HCDR1), HCDR2, and/or HCDR3 of an antibody selected from the group consisting of libivirumab, rmab, rivabazumab pegol, setoxaximab, suvizumab, suvratoxumab, sevirumab, pritoxaximab, porgaviximab, REGN-EB3, obiltoxaximab, gedivumab, foravirumab, larcaviximab, motavizumab, palivizumab, rafivirumab, regavirumab, tuvirumab, cosfroviximab, felvizumab, atidortoxumab, edobacomab, nebacumab, pateclizumab, raxibacumab, urtoxazumab, tosatoxumab, berlimatoxumab, CR6261, diridavumab, firivumab, lesofavumab, navivumab, exbivirumab, lenvervimab, bavituximab, bezlotoxumab, efungumab, leronlimab, nirsevimab, pagibaximab, panobacumab, tefibazumab, ansuvimab, atoltivimab, maftivimab, and odesivimab; or
[7203] (ii)
[7204] VL1 comprises a VL of an antibody selected from the group consisting of libivirumab, rmab, rivabazumab pegol, setoxaximab, suvizumab, suvratoxumab, sevirumab, pritoxaximab, porgaviximab, REGN-EB3, obiltoxaximab, gedivumab, foravirumab, larcaviximab, motavizumab, palivizumab, rafivirumab, regavirumab, tuvirumab, cosfroviximab, felvizumab, atidortoxumab, edobacomab, nebacumab, pateclizumab, raxibacumab, urtoxazumab, tosatoxumab, berlimatoxumab, CR6261, diridavumab, firivumab, lesofavumab, navivumab, exbivirumab, lenvervimab, bavituximab, bezlotoxumab, efungumab, leronlimab, nirsevimab, pagibaximab, panobacumab, tefibazumab, ansuvimab, atoltivimab, maftivimab, and odesivimab;
[7205] VL2 comprises a VL of an antibody selected from the group consisting of libivirumab, rmab, rivabazumab pegol, setoxaximab, suvizumab, suvratoxumab, sevirumab, pritoxaximab, porgaviximab, REGN-EB3, obiltoxaximab, gedivumab, foravirumab, larcaviximab, motavizumab, palivizumab, rafivirumab, regavirumab, tuvirumab, cosfroviximab, felvizumab, atidortoxumab, edobacomab, nebacumab, pateclizumab, raxibacumab, urtoxazumab, tosatoxumab, berlimatoxumab, CR6261, diridavumab, firivumab, lesofavumab, navivumab, exbivirumab, lenvervimab, bavituximab, bezlotoxumab, efungumab, leronlimab, nirsevimab, pagibaximab, panobacumab, tefibazumab, ansuvimab, atoltivimab, maftivimab, and odesivimab;
[7206] VL3 comprises a VL of an antibody selected from the group consisting of libivirumab, rmab, rivabazumab pegol, setoxaximab, suvizumab, suvratoxumab, sevirumab, pritoxaximab, porgaviximab, REGN-EB3, obiltoxaximab, gedivumab, foravirumab, larcaviximab, motavizumab, palivizumab, rafivirumab, regavirumab, tuvirumab, cosfroviximab, felvizumab, atidortoxumab, edobacomab, nebacumab, pateclizumab, raxibacumab, urtoxazumab, tosatoxumab, berlimatoxumab, CR6261, diridavumab, firivumab, lesofavumab, navivumab, exbivirumab, lenvervimab, bavituximab, bezlotoxumab, efungumab, leronlimab, nirsevimab, pagibaximab, panobacumab, tefibazumab, ansuvimab, atoltivimab, maftivimab, and odesivimab;
[7207] VH1 comprises a VH of an antibody selected from the group consisting of libivirumab, rmab, rivabazumab pegol, setoxaximab, suvizumab, suvratoxumab, sevirumab, pritoxaximab, porgaviximab, REGN-EB3, obiltoxaximab, gedivumab, foravirumab, larcaviximab, motavizumab, palivizumab, rafivirumab, regavirumab, tuvirumab, cosfroviximab, felvizumab, atidortoxumab, edobacomab, nebacumab, pateclizumab, raxibacumab, urtoxazumab, tosatoxumab, berlimatoxumab, CR6261, diridavumab, firivumab, lesofavumab, navivumab, exbivirumab, lenvervimab, bavituximab, bezlotoxumab, efungumab, leronlimab, nirsevimab, pagibaximab, panobacumab, tefibazumab, ansuvimab, atoltivimab, maftivimab, and odesivimab;
[7208] VH2 comprises a VH of an antibody selected from the group consisting of libivirumab, rmab, rivabazumab pegol, setoxaximab, suvizumab, suvratoxumab, sevirumab, pritoxaximab, porgaviximab, REGN-EB3, obiltoxaximab, gedivumab, foravirumab, larcaviximab, motavizumab, palivizumab, rafivirumab, regavirumab, tuvirumab, cosfroviximab, felvizumab, atidortoxumab, edobacomab, nebacumab, pateclizumab, raxibacumab, urtoxazumab, tosatoxumab, berlimatoxumab, CR6261, diridavumab, firivumab, lesofavumab, navivumab, exbivirumab, lenvervimab, bavituximab, bezlotoxumab, efungumab, leronlimab, nirsevimab, pagibaximab, panobacumab, tefibazumab, ansuvimab, atoltivimab, maftivimab, and odesivimab; and/or
[7209] VH3 comprises a VH of an antibody selected from the group consisting of libivirumab, rmab, rivabazumab pegol, setoxaximab, suvizumab, suvratoxumab, sevirumab, pritoxaximab, porgaviximab, REGN-EB3, obiltoxaximab, gedivumab, foravirumab, larcaviximab, motavizumab, palivizumab, rafivirumab, regavirumab, tuvirumab, cosfroviximab, felvizumab, atidortoxumab, edobacomab, nebacumab, pateclizumab, raxibacumab, urtoxazumab, tosatoxumab, berlimatoxumab, CR6261, diridavumab, firivumab, lesofavumab, navivumab, exbivirumab, lenvervimab, bavituximab, bezlotoxumab, efungumab, leronlimab, nirsevimab, pagibaximab, panobacumab, tefibazumab, ansuvimab, atoltivimab, maftivimab, and odesivimab; or
[7210] (iii)
[7211] VL1 comprises (i) a complementarity determining region (CDR) 1 having an amino acid sequence that is at least 65%, at least 70%, at least 75%, at least 80%, at least 85%, at least 90%, at least 95%, at least 99%, or 100% identical to any one of SEQ ID NOs: 1428, 1793, 1798, 1810, 1817, 1824, 1977, 1985, 1993 and 2001; (ii) a CDR2 having an amino acid sequence that is at least 65%, at least 70%, at least 75%, at least 80%, at least 85%, at least 90%, at least 95%, at least 99%, or 100% identical to any one of SEQ ID NOs: 1978, 1986, 1994, and 2002; or at least 65%, at least 70%, at least 75%, at least 80%, at least 85%, at least 90%, at least 95%, at least 99%, or 100% identical to any one of amino acid sequences YTS, DTS, GAS, and AAS; and (iii) a CDR3 having an amino acid sequence that is at least 65%, at least 70%, at least 75%, at least 80%, at least 85%, at least 90%, at least 95%, at least 99%, or 100% identical to any one of SEQ ID NOs: 1229, 1799, 1805, 1811, 1818, 1825, 1979, 1987, 1995, and 2003;
[7212] VL2 comprises (i) a complementarity determining region (CDR) 1 having an amino acid sequence that is at least 65%, at least 70%, at least 75%, at least 80%, at least 85%, at least 90%, at least 95%, at least 99%, or 100% identical to any one of SEQ ID NOs: 1428, 1793, 1798, 1810, 1817, 1824, 1977, 1985, 1993 and 2001; (ii) a CDR2 having an amino acid sequence that is at least 65%, at least 70%, at least 75%, at least 80%, at least 85%, at least 90%, at least 95%, at least 99%, or 100% identical to any one of SEQ ID NOs: 1978, 1986, 1994, and 2002; or at least 65%, at least 70%, at least 75%, at least 80%, at least 85%, at least 90%, at least 95%, at least 99%, or 100% identical to any one of amino acid sequences YTS, DTS, GAS, and AAS; and (iii) a CDR3 having an amino acid sequence that is at least 65%, at least 70%, at least 75%, at least 80%, at least 85%, at least 90%, at least 95%, at least 99%, or 100% identical to any one of SEQ ID NOs: 1229, 1799, 1805, 1811, 1818, 1825, 1979, 1987, 1995, and 2003;
[7213] VL3 comprises (i) a complementarity determining region (CDR) 1 having an amino acid sequence that is at least 65%, at least 70%, at least 75%, at least 80%, at least 85%, at least 90%, at least 95%, at least 99%, or 100% identical to any one of SEQ ID NOs: 1428, 1793, 1798, 1810, 1817, 1824, 1977, 1985, 1993 and 2001; (ii) a CDR2 having an amino acid sequence that is at least 65%, at least 70%, at least 75%, at least 80%, at least 85%, at least 90%, at least 95%, at least 99%, or 100% identical to any one of SEQ ID NOs: 1978, 1986, 1994, and 2002; or at least 65%, at least 70%, at least 75%, at least 80%, at least 85%, at least 90%, at least 95%, at least 99%, or 100% identical to any one of amino acid sequences YTS, DTS, GAS, and AAS; and (iii) a CDR3 having an amino acid sequence that is at least 65%, at least 70%, at least 75%, at least 80%, at least 85%, at least 90%, at least 95%, at least 99%, or 100% identical to any one of SEQ ID NOs: 1229, 1799, 1805, 1811, 1818, 1825, 1979, 1987, 1995, and 2003;
[7214] VH1 comprises (i) a complementarity determining region (CDR) 1 having an amino acid sequence that is at least 65%, at least 70%, at least 75%, at least 80%, at least 85%, at least 90%, at least 95%, at least 99%, or 100% identical to any one of SEQ ID NOs: 1577, 1795, 1801, 1813, 1820, 1827, 1981, 1989, 1997, and 2005; (ii) a CDR2 having an amino acid sequence that is at least 65%, at least 70%, at least 75%, at least 80%, at least 85%, at least 90%, at least 95%, at least 99%, or 100% identical to any one of SEQ ID NOs: 1159, 1802, 1807, 1814, 1821, 1828, 1982, 1990, 1998, and 2006; and (iii) a CDR3 having an amino acid sequence that is at least 65%, at least 70%, at least 75%, at least 80%, at least 85%, at least 90%, at least 95%, at least 99%, or 100% identical to any one of SEQ ID NOs: 1796, 1803, 1808, 1815, 1822, 1829, 1983, 1991, 1999, and 2007;
[7215] VH2 comprises (i) a complementarity determining region (CDR) 1 having an amino acid sequence that is at least 65%, at least 70%, at least 75%, at least 80%, at least 85%, at least 90%, at least 95%, at least 99%, or 100% identical to any one of SEQ ID NOs: 1577, 1795, 1801, 1813, 1820, 1827, 1981, 1989, 1997, and 2005; (ii) a CDR2 having an amino acid sequence that is at least 65%, at least 70%, at least 75%, at least 80%, at least 85%, at least 90%, at least 95%, at least 99%, or 100% identical to any one of SEQ ID NOs: 1159, 1802, 1807, 1814, 1821, 1828, 1982, 1990, 1998, and 2006; and (iii) a CDR3 having an amino acid sequence that is at least 65%, at least 70%, at least 75%, at least 80%, at least 85%, at least 90%, at least 95%, at least 99%, or 100% identical to any one of SEQ ID NOs: 1796, 1803, 1808, 1815, 1822, 1829, 1983, 1991, 1999, and 2007; and/or
[7216] VH3 comprises (i) a complementarity determining region (CDR) 1 having an amino acid sequence that is at least 65%, at least 70%, at least 75%, at least 80%, at least 85%, at least 90%, at least 95%, at least 99%, or 100% identical to any one of SEQ ID NOs: 1577, 1795, 1801, 1813, 1820, 1827, 1981, 1989, 1997, and 2005; (ii) a CDR2 having an amino acid sequence that is at least 65%, at least 70%, at least 75%, at least 80%, at least 85%, at least 90%, at least 95%, at least 99%, or 100% identical to any one of SEQ ID NOs: 1159, 1802, 1807, 1814, 1821, 1828, 1982, 1990, 1998, and 2006; and (iii) a CDR3 having an amino acid sequence that is at least 65%, at least 70%, at least 75%, at least 80%, at least 85%, at least 90%, at least 95%, at least 99%, or 100% identical to any one of SEQ ID NOs: 1796, 1803, 1808, 1815, 1822, 1829, 1983, 1991, 1999, and 2007; or
[7217] (iv)
[7218] VL1 comprises an amino acid sequence that is at least 65%, at least 70%, at least 75%, at least 80%, at least 85%, at least 90%, at least 95%, at least 99%, or 100% identical to any one of SEQ ID NOs: 1794, 1800, 1806, 1812, 1819, 1826, 1980, 1988, 1996, and 2004;
[7219] VL2 comprises an amino acid sequence that is at least 65%, at least 70%, at least 75%, at least 80%, at least 85%, at least 90%, at least 95%, at least 99%, or 100% identical to any one of SEQ ID NOs: 1794, 1800, 1806, 1812, 1819, 1826, 1980, 1988, 1996, and 2004;
[7220] VL3 comprises an amino acid sequence that is at least 65%, at least 70%, at least 75%, at least 80%, at least 85%, at least 90%, at least 95%, at least 99%, or 100% identical to any one of SEQ ID NOs: 1794, 1800, 1806, 1812, 1819, 1826, 1980, 1988, 1996, and 2004;
[7221] VH1 comprises an amino acid sequence that is at least 65%, at least 70%, at least 75%, at least 80%, at least 85%, at least 90%, at least 95%, at least 99%, or 100% identical to any one of SEQ ID NOS 1797, 1804, 1809, 1816, 1823, 1830, 1984, 1992, 2000, and 2008;
[7222] VH2 comprises an amino acid sequence that is at least 65%, at least 70%, at least 75%, at least 80%, at least 85%, at least 90%, at least 95%, at least 99%, or 100% identical to any one of SEQ ID NOS 1797, 1804, 1809, 1816, 1823, 1830, 1984, 1992, 2000, and 2008; and/or
[7223] VH3 comprises an amino acid sequence that is at least 65%, at least 70%, at least 75%, at least 80%, at least 85%, at least 90%, at least 95%, at least 99%, or 100% identical to any one of SEQ ID NOS 1797, 1804, 1809, 1816, 1823, 1830, 1984, 1992, 2000, and 2008; or
[7224] (c)
[7225] (i)
[7226] VL1 comprises a light chain complementarity determining region 1 (LCDR1), LCDR2, and/or LCDR3 of an antibody selected from the group consisting of aducanumab, alirocumab, frovocimab, lodelcizumab, bococizumab, evolocumab, ralpancizumab, anifrolumab, atorolimumab, bapineuzumab, bedinvetmab, begelomab, biciromab, bimagrumab, birtamimab, blosozumab, burosumab, caplacizumab, concizumab, crenezumab, crizanlizumab, crotedumab, dezamizumab, domagrozumab, donanemab, eldelumab, elezanumab, emapalumab, emicizumab, eptinezumab, erenumab, evinacumab, faralimomab, fasinumab, fontolizumab, fremanezumab, frunevetmab, fulranumab, galcanezumab, gantenerumab, gosuranemab, idarucizumab, imciromab, inclacumab, lampalizumab, lanadelumab, landogrozumab, lecanemab, ligelizumab, marstacimab, mavrilimumab, morolimumab, NEOD001, omalizumab, oMS721, orticumab, otilimab, ozanezumab, ponezumab, prasinezumab, quilizumab, ranevetmab, refanezumab, roledumab, romosozumab, rozanolixizumab, setrusumab, SHP647, solanezumab, stamulumab, suptavumab, sutimlimab, tanezumab, crovalimab, and lokivetmab;
[7227] VL2 comprises a light chain complementarity determining region 1 (LCDR1), LCDR2, and/or LCDR3 of an antibody selected from the group consisting of aducanumab, alirocumab, frovocimab, lodelcizumab, bococizumab, evolocumab, ralpancizumab, anifrolumab, atorolimumab, bapineuzumab, bedinvetmab, begelomab, biciromab, bimagrumab, birtamimab, blosozumab, burosumab, caplacizumab, concizumab, crenezumab, crizanlizumab, crotedumab, dezamizumab, domagrozumab, donanemab, eldelumab, elezanumab, emapalumab, emicizumab, eptinezumab, erenumab, evinacumab, faralimomab, fasinumab, fontolizumab, fremanezumab, frunevetmab, fulranumab, galcanezumab, gantenerumab, gosuranemab, idarucizumab, imciromab, inclacumab, lampalizumab, lanadelumab, landogrozumab, lecanemab, ligelizumab, marstacimab, mavrilimumab, morolimumab, NEOD001, omalizumab, oMS721, orticumab, otilimab, ozanezumab, ponezumab, prasinezumab, quilizumab, ranevetmab, refanezumab, roledumab, romosozumab, rozanolixizumab, setrusumab, SHP647, solanezumab, stamulumab, suptavumab, sutimlimab, tanezumab, crovalimab, and lokivetmab;
[7228] VL3 comprises a light chain complementarity determining region 1 (LCDR1), LCDR2, and/or LCDR3 of an antibody selected from the group consisting of aducanumab, alirocumab, frovocimab, lodelcizumab, bococizumab, evolocumab, ralpancizumab, anifrolumab, atorolimumab, bapineuzumab, bedinvetmab, begelomab, biciromab, bimagrumab, birtamimab, blosozumab, burosumab, caplacizumab, concizumab, crenezumab, crizanlizumab, crotedumab, dezamizumab, domagrozumab, donanemab, eldelumab, elezanumab, emapalumab, emicizumab, eptinezumab, erenumab, evinacumab, faralimomab, fasinumab, fontolizumab, fremanezumab, frunevetmab, fulranumab, galcanezumab, gantenerumab, gosuranemab, idarucizumab, imciromab, inclacumab, lampalizumab, lanadelumab, landogrozumab, lecanemab, ligelizumab, marstacimab, mavrilimumab, morolimumab, NEOD001, omalizumab, oMS721, orticumab, otilimab, ozanezumab, ponezumab, prasinezumab, quilizumab, ranevetmab, refanezumab, roledumab, romosozumab, rozanolixizumab, setrusumab, SHP647, solanezumab, stamulumab, suptavumab, sutimlimab, tanezumab, crovalimab, and lokivetmab;
[7229] VH1 comprises a heavy chain complementarity determining region 1 (HCDR1), HCDR2, and/or HCDR3 of an antibody selected from the group consisting of aducanumab, alirocumab, frovocimab, lodelcizumab, bococizumab, evolocumab, ralpancizumab, anifrolumab, atorolimumab, bapineuzumab, bedinvetmab, begelomab, biciromab, bimagrumab, birtamimab, blosozumab, burosumab, caplacizumab, concizumab, crenezumab, crizanlizumab, crotedumab, dezamizumab, domagrozumab, donanemab, eldelumab, elezanumab, emapalumab, emicizumab, eptinezumab, erenumab, evinacumab, faralimomab, fasinumab, fontolizumab, fremanezumab, frunevetmab, fulranumab, galcanezumab, gantenerumab, gosuranemab, idarucizumab, imciromab, inclacumab, lampalizumab, lanadelumab, landogrozumab, lecanemab, ligelizumab, marstacimab, mavrilimumab, morolimumab, NEOD001, omalizumab, oMS721, orticumab, otilimab, ozanezumab, ponezumab, prasinezumab, quilizumab, ranevetmab, refanezumab, roledumab, romosozumab, rozanolixizumab, setrusumab, SHP647, solanezumab, stamulumab, suptavumab, sutimlimab, tanezumab, crovalimab, and lokivetmab;
[7230] VH2 comprises a heavy chain complementarity determining region 1 (HCDR1), HCDR2, and/or HCDR3 of an antibody selected from the group consisting of aducanumab, alirocumab, frovocimab, lodelcizumab, bococizumab, evolocumab, ralpancizumab, anifrolumab, atorolimumab, bapineuzumab, bedinvetmab, begelomab, biciromab, bimagrumab, birtamimab, blosozumab, burosumab, caplacizumab, concizumab, crenezumab, crizanlizumab, crotedumab, dezamizumab, domagrozumab, donanemab, eldelumab, elezanumab, emapalumab, emicizumab, eptinezumab, erenumab, evinacumab, faralimomab, fasinumab, fontolizumab, fremanezumab, frunevetmab, fulranumab, galcanezumab, gantenerumab, gosuranemab, idarucizumab, imciromab, inclacumab, lampalizumab, lanadelumab, landogrozumab, lecanemab, ligelizumab, marstacimab, mavrilimumab, morolimumab, NEOD001, omalizumab, oMS721, orticumab, otilimab, ozanezumab, ponezumab, prasinezumab, quilizumab, ranevetmab, refanezumab, roledumab, romosozumab, rozanolixizumab, setrusumab, SHP647, solanezumab, stamulumab, suptavumab, sutimlimab, tanezumab, crovalimab, and lokivetmab; and/or
[7231] VH3 comprises a heavy chain complementarity determining region 1 (HCDR1), HCDR2, and/or HCDR3 of an antibody selected from the group consisting of aducanumab, alirocumab, frovocimab, lodelcizumab, bococizumab, evolocumab, ralpancizumab, anifrolumab, atorolimumab, bapineuzumab, bedinvetmab, begelomab, biciromab, bimagrumab, birtamimab, blosozumab, burosumab, caplacizumab, concizumab, crenezumab, crizanlizumab, crotedumab, dezamizumab, domagrozumab, donanemab, eldelumab, elezanumab, emapalumab, emicizumab, eptinezumab, erenumab, evinacumab, faralimomab, fasinumab, fontolizumab, fremanezumab, frunevetmab, fulranumab, galcanezumab, gantenerumab, gosuranemab, idarucizumab, imciromab, inclacumab, lampalizumab, lanadelumab, landogrozumab, lecanemab, ligelizumab, marstacimab, mavrilimumab, morolimumab, NEOD001, omalizumab, oMS721, orticumab, otilimab, ozanezumab, ponezumab, prasinezumab, quilizumab, ranevetmab, refanezumab, roledumab, romosozumab, rozanolixizumab, setrusumab, SHP647, solanezumab, stamulumab, suptavumab, sutimlimab, tanezumab, crovalimab, and lokivetmab; or
[7232] (ii)
[7233] VL1 comprises a VL of an antibody selected from the group consisting of aducanumab, alirocumab, frovocimab, lodelcizumab, bococizumab, evolocumab, ralpancizumab, anifrolumab, atorolimumab, bapineuzumab, bedinvetmab, begelomab, biciromab, bimagrumab, birtamimab, blosozumab, burosumab, caplacizumab, concizumab, crenezumab, crizanlizumab, crotedumab, dezamizumab, domagrozumab, donanemab, eldelumab, elezanumab, emapalumab, emicizumab, eptinezumab, erenumab, evinacumab, faralimomab, fasinumab, fontolizumab, fremanezumab, frunevetmab, fulranumab, galcanezumab, gantenerumab, gosuranemab, idarucizumab, imciromab, inclacumab, lampalizumab, lanadelumab, landogrozumab, lecanemab, ligelizumab, marstacimab, mavrilimumab, morolimumab, NEOD001, omalizumab, oMS721, orticumab, otilimab, ozanezumab, ponezumab, prasinezumab, quilizumab, ranevetmab, refanezumab, roledumab, romosozumab, rozanolixizumab, setrusumab, SHP647, solanezumab, stamulumab, suptavumab, sutimlimab, tanezumab, crovalimab, and lokivetmab;
[7234] VL2 comprises a VL of an antibody selected from the group consisting of aducanumab, alirocumab, frovocimab, lodelcizumab, bococizumab, evolocumab, ralpancizumab, anifrolumab, atorolimumab, bapineuzumab, bedinvetmab, begelomab, biciromab, bimagrumab, birtamimab, blosozumab, burosumab, caplacizumab, concizumab, crenezumab, crizanlizumab, crotedumab, dezamizumab, domagrozumab, donanemab, eldelumab, elezanumab, emapalumab, emicizumab, eptinezumab, erenumab, evinacumab, faralimomab, fasinumab, fontolizumab, fremanezumab, frunevetmab, fulranumab, galcanezumab, gantenerumab, gosuranemab, idarucizumab, imciromab, inclacumab, lampalizumab, lanadelumab, landogrozumab, lecanemab, ligelizumab, marstacimab, mavrilimumab, morolimumab, NEOD001, omalizumab, oMS721, orticumab, otilimab, ozanezumab, ponezumab, prasinezumab, quilizumab, ranevetmab, refanezumab, roledumab, romosozumab, rozanolixizumab, setrusumab, SHP647, solanezumab, stamulumab, suptavumab, sutimlimab, tanezumab, crovalimab, and lokivetmab;
[7235] VL3 comprises a VL of an antibody selected from the group consisting of aducanumab, alirocumab, frovocimab, lodelcizumab, bococizumab, evolocumab, ralpancizumab, anifrolumab, atorolimumab, bapineuzumab, bedinvetmab, begelomab, biciromab, bimagrumab, birtamimab, blosozumab, burosumab, caplacizumab, concizumab, crenezumab, crizanlizumab, crotedumab, dezamizumab, domagrozumab, donanemab, eldelumab, elezanumab, emapalumab, emicizumab, eptinezumab, erenumab, evinacumab, faralimomab, fasinumab, fontolizumab, fremanezumab, frunevetmab, fulranumab, galcanezumab, gantenerumab, gosuranemab, idarucizumab, imciromab, inclacumab, lampalizumab, lanadelumab, landogrozumab, lecanemab, ligelizumab, marstacimab, mavrilimumab, morolimumab, NEOD001, omalizumab, oMS721, orticumab, otilimab, ozanezumab, ponezumab, prasinezumab, quilizumab, ranevetmab, refanezumab, roledumab, romosozumab, rozanolixizumab, setrusumab, SHP647, solanezumab, stamulumab, suptavumab, sutimlimab, tanezumab, crovalimab, and lokivetmab;
[7236] VH1 comprises a VH of an antibody selected from the group consisting of aducanumab, alirocumab, frovocimab, lodelcizumab, bococizumab, evolocumab, ralpancizumab, anifrolumab, atorolimumab, bapineuzumab, bedinvetmab, begelomab, biciromab, bimagrumab, birtamimab, blosozumab, burosumab, caplacizumab, concizumab, crenezumab, crizanlizumab, crotedumab, dezamizumab, domagrozumab, donanemab, eldelumab, elezanumab, emapalumab, emicizumab, eptinezumab, erenumab, evinacumab, faralimomab, fasinumab, fontolizumab, fremanezumab, frunevetmab, fulranumab, galcanezumab, gantenerumab, gosuranemab, idarucizumab, imciromab, inclacumab, lampalizumab, lanadelumab, landogrozumab, lecanemab, ligelizumab, marstacimab, mavrilimumab, morolimumab, NEOD001, omalizumab, oMS721, orticumab, otilimab, ozanezumab, ponezumab, prasinezumab, quilizumab, ranevetmab, refanezumab, roledumab, romosozumab, rozanolixizumab, setrusumab, SHP647, solanezumab, stamulumab, suptavumab, sutimlimab, tanezumab, crovalimab, and lokivetmab;
[7237] VH2 comprises a VH of an antibody selected from the group consisting of aducanumab, alirocumab, frovocimab, lodelcizumab, bococizumab, evolocumab, ralpancizumab, anifrolumab, atorolimumab, bapineuzumab, bedinvetmab, begelomab, biciromab, bimagrumab, birtamimab, blosozumab, burosumab, caplacizumab, concizumab, crenezumab, crizanlizumab, crotedumab, dezamizumab, domagrozumab, donanemab, eldelumab, elezanumab, emapalumab, emicizumab, eptinezumab, erenumab, evinacumab, faralimomab, fasinumab, fontolizumab, fremanezumab, frunevetmab, fulranumab, galcanezumab, gantenerumab, gosuranemab, idarucizumab, imciromab, inclacumab, lampalizumab, lanadelumab, landogrozumab, lecanemab, ligelizumab, marstacimab, mavrilimumab, morolimumab, NEOD001, omalizumab, oMS721, orticumab, otilimab, ozanezumab, ponezumab, prasinezumab, quilizumab, ranevetmab, refanezumab, roledumab, romosozumab, rozanolixizumab, setrusumab, SHP647, solanezumab, stamulumab, suptavumab, sutimlimab, tanezumab, crovalimab, and lokivetmab; and/or
[7238] VH3 comprises a VH of an antibody selected from the group consisting of aducanumab, alirocumab, frovocimab, lodelcizumab, bococizumab, evolocumab, ralpancizumab, anifrolumab, atorolimumab, bapineuzumab, bedinvetmab, begelomab, biciromab, bimagrumab, birtamimab, blosozumab, burosumab, caplacizumab, concizumab, crenezumab, crizanlizumab, crotedumab, dezamizumab, domagrozumab, donanemab, eldelumab, elezanumab, emapalumab, emicizumab, eptinezumab, erenumab, evinacumab, faralimomab, fasinumab, fontolizumab, fremanezumab, frunevetmab, fulranumab, galcanezumab, gantenerumab, gosuranemab, idarucizumab, imciromab, inclacumab, lampalizumab, lanadelumab, landogrozumab, lecanemab, ligelizumab, marstacimab, mavrilimumab, morolimumab, NEOD001, omalizumab, oMS721, orticumab, otilimab, ozanezumab, ponezumab, prasinezumab, quilizumab, ranevetmab, refanezumab, roledumab, romosozumab, rozanolixizumab, setrusumab, SHP647, solanezumab, stamulumab, suptavumab, sutimlimab, tanezumab, crovalimab, and lokivetmab; or
[7239] (iii)
[7240] VL1 comprises (i) a complementarity determining region (CDR) 1 having an amino acid sequence that is at least 65%, at least 70%, at least 75%, at least 80%, at least 85%, at least 90%, at least 95%, at least 99%, or 100% identical to any one of SEQ ID NOs: 1120, 1228, 1359, 1519, 1831, 1838, 1845, 1852, 1859, 1866, 1872, 1878, 1885, 1891, 1898, 1905, 1911, 1917, 1924, 1931, 1938, 1945, and 1963; (ii) a CDR2 having an amino acid sequence that is at least 65%, at least 70%, at least 75%, at least 80%, at least 85%, at least 90%, at least 95%, at least 99%, or 100% identical to any one of amino acid sequences AAS, AVS, DAS, DNN, EDN, EVS, GAS, GNG, KAS, KVS, LVS, NTD, STS, WAS, and YTS; and (iii) a CDR3 having an amino acid sequence that is at least 65%, at least 70%, at least 75%, at least 80%, at least 85%, at least 90%, at least 95%, at least 99%, or 100% identical to any one of SEQ ID NOs: 1360, 1832, 1839, 1846, 1853, 1860, 1867, 1873, 1879, 1886, 1892, 1899, 1906, 1912, 1918, 1925, 1932, 1939, 1946, 1951, 1957, 1964, and 1970;
[7241] VL2 comprises (i) a complementarity determining region (CDR) 1 having an amino acid sequence that is at least 65%, at least 70%, at least 75%, at least 80%, at least 85%, at least 90%, at least 95%, at least 99%, or 100% identical to any one of SEQ ID NOs: 1120, 1228, 1359, 1519, 1831, 1838, 1845, 1852, 1859, 1866, 1872, 1878, 1885, 1891, 1898, 1905, 1911, 1917, 1924, 1931, 1938, 1945, and 1963; (ii) a CDR2 having an amino acid sequence that is at least 65%, at least 70%, at least 75%, at least 80%, at least 85%, at least 90%, at least 95%, at least 99%, or 100% identical to any one of amino acid sequences AAS, AVS, DAS, DNN, EDN, EVS, GAS, GNG, KAS, KVS, LVS, NTD, STS, WAS, and YTS; and (iii) a CDR3 having an amino acid sequence that is at least 65%, at least 70%, at least 75%, at least 80%, at least 85%, at least 90%, at least 95%, at least 99%, or 100% identical to any one of SEQ ID NOs: 1360, 1832, 1839, 1846, 1853, 1860, 1867, 1873, 1879, 1886, 1892, 1899, 1906, 1912, 1918, 1925, 1932, 1939, 1946, 1951, 1957, 1964, and 1970;
[7242] VL3 comprises (i) a complementarity determining region (CDR) 1 having an amino acid sequence that is at least 65%, at least 70%, at least 75%, at least 80%, at least 85%, at least 90%, at least 95%, at least 99%, or 100% identical to any one of SEQ ID NOs: 1120, 1228, 1359, 1519, 1831, 1838, 1845, 1852, 1859, 1866, 1872, 1878, 1885, 1891, 1898, 1905, 1911, 1917, 1924, 1931, 1938, 1945, and 1963; (ii) a CDR2 having an amino acid sequence that is at least 65%, at least 70%, at least 75%, at least 80%, at least 85%, at least 90%, at least 95%, at least 99%, or 100% identical to any one of amino acid sequences AAS, AVS, DAS, DNN, EDN, EVS, GAS, GNG, KAS, KVS, LVS, NTD, STS, WAS, and YTS; and (iii) a CDR3 having an amino acid sequence that is at least 65%, at least 70%, at least 75%, at least 80%, at least 85%, at least 90%, at least 95%, at least 99%, or 100% identical to any one of SEQ ID NOs: 1360, 1832, 1839, 1846, 1853, 1860, 1867, 1873, 1879, 1886, 1892, 1899, 1906, 1912, 1918, 1925, 1932, 1939, 1946, 1951, 1957, 1964, and 1970;
[7243] VH1 comprises (i) a complementarity determining region (CDR) 1 having an amino acid sequence that is at least 65%, at least 70%, at least 75%, at least 80%, at least 85%, at least 90%, at least 95%, at least 99%, or 100% identical to any one of SEQ ID NOs: 1309, 1362, 1437, 1552, 1618, 1639, 1834, 1841, 1848, 1855, 1862, 1881, 1894, 1901, 1920, 1927, 1934, 1941, 1953, 1959, and 1966; (ii) a CDR2 having an amino acid sequence that is at least 65%, at least 70%, at least 75%, at least 80%, at least 85%, at least 90%, at least 95%, at least 99%, or 100% identical to any one of SEQ ID NOs: 1363, 1835, 1842, 1849, 1856, 1863, 1869, 1875, 1882, 1888, 1895, 1902, 1908, 1914, 1921, 1928, 1935, 1942, 1948, 1954, 1960, 1967, and 1972; and (iii) a CDR3 having an amino acid sequence that is at least 65%, at least 70%, at least 75%, at least 80%, at least 85%, at least 90%, at least 95%, at least 99%, or 100% identical to any one of SEQ ID NOs: 1364, 1836, 1843, 1850, 1857, 1864, 1870, 1876, 1883, 1889, 1896, 1903, 1909, 1915, 1922, 1929, 1936, 1943, 1949, 1955, 1961, 1968, and 1973;
[7244] VH2 comprises (i) a complementarity determining region (CDR) 1 having an amino acid sequence that is at least 65%, at least 70%, at least 75%, at least 80%, at least 85%, at least 90%, at least 95%, at least 99%, or 100% identical to any one of SEQ ID NOs: 1309, 1362, 1437, 1552, 1618, 1639, 1834, 1841, 1848, 1855, 1862, 1881, 1894, 1901, 1920, 1927, 1934, 1941, 1953, 1959, and 1966; (ii) a CDR2 having an amino acid sequence that is at least 65%, at least 70%, at least 75%, at least 80%, at least 85%, at least 90%, at least 95%, at least 99%, or 100% identical to any one of SEQ ID NOs: 1363, 1835, 1842, 1849, 1856, 1863, 1869, 1875, 1882, 1888, 1895, 1902, 1908, 1914, 1921, 1928, 1935, 1942, 1948, 1954, 1960, 1967, and 1972; and (iii) a CDR3 having an amino acid sequence that is at least 65%, at least 70%, at least 75%, at least 80%, at least 85%, at least 90%, at least 95%, at least 99%, or 100% identical to any one of SEQ ID NOs: 1364, 1836, 1843, 1850, 1857, 1864, 1870, 1876, 1883, 1889, 1896, 1903, 1909, 1915, 1922, 1929, 1936, 1943, 1949, 1955, 1961, 1968, and 1973; and/or
[7245] VH3 comprises (i) a complementarity determining region (CDR) 1 having an amino acid sequence that is at least 65%, at least 70%, at least 75%, at least 80%, at least 85%, at least 90%, at least 95%, at least 99%, or 100% identical to any one of SEQ ID NOs: 1309, 1362, 1437, 1552, 1618, 1639, 1834, 1841, 1848, 1855, 1862, 1881, 1894, 1901, 1920, 1927, 1934, 1941, 1953, 1959, and 1966; (ii) a CDR2 having an amino acid sequence that is at least 65%, at least 70%, at least 75%, at least 80%, at least 85%, at least 90%, at least 95%, at least 99%, or 100% identical to any one of SEQ ID NOs: 1363, 1835, 1842, 1849, 1856, 1863, 1869, 1875, 1882, 1888, 1895, 1902, 1908, 1914, 1921, 1928, 1935, 1942, 1948, 1954, 1960, 1967, and 1972; and (iii) a CDR3 having an amino acid sequence that is at least 65%, at least 70%, at least 75%, at least 80%, at least 85%, at least 90%, at least 95%, at least 99%, or 100% identical to any one of SEQ ID NOs: 1364, 1836, 1843, 1850, 1857, 1864, 1870, 1876, 1883, 1889, 1896, 1903, 1909, 1915, 1922, 1929, 1936, 1943, 1949, 1955, 1961, 1968, and 1973; or
[7246] (iv)
[7247] VL1 comprises an amino acid sequence that is at least 65%, at least 70%, at least 75%, at least 80%, at least 85%, at least 90%, at least 95%, at least 99%, or 100% identical to any one of SEQ ID NOs: 1361, 1833, 1840, 1847, 1854, 1861, 1868, 1874, 1880, 1887, 1893, 1900, 1907, 1913, 1919, 1926, 1933, 1940, 1947, 1952, 1958, 1965, and 1971;
[7248] VL2 comprises an amino acid sequence that is at least 65%, at least 70%, at least 75%, at least 80%, at least 85%, at least 90%, at least 95%, at least 99%, or 100% identical to any one of SEQ ID NOs: 1361, 1833, 1840, 1847, 1854, 1861, 1868, 1874, 1880, 1887, 1893, 1900, 1907, 1913, 1919, 1926, 1933, 1940, 1947, 1952, 1958, 1965, and 1971;
[7249] VL3 comprises an amino acid sequence that is at least 65%, at least 70%, at least 75%, at least 80%, at least 85%, at least 90%, at least 95%, at least 99%, or 100% identical to any one of SEQ ID NOs: 1361, 1833, 1840, 1847, 1854, 1861, 1868, 1874, 1880, 1887, 1893, 1900, 1907, 1913, 1919, 1926, 1933, 1940, 1947, 1952, 1958, 1965, and 1971;
[7250] VH1 comprises an amino acid sequence that is at least 65%, at least 70%, at least 75%, at least 80%, at least 85%, at least 90%, at least 95%, at least 99%, or 100% identical to any one of SEQ ID NOs: 1365, 1837, 1844, 1851, 1858, 1865, 1871, 1877, 1884, 1890, 1897, 1904, 1910, 1916, 1923, 1930, 1937, 1944, 1950, 1956, 1962, 1969, and 1974;
[7251] VH2 comprises an amino acid sequence that is at least 65%, at least 70%, at least 75%, at least 80%, at least 85%, at least 90%, at least 95%, at least 99%, or 100% identical to any one of SEQ ID NOs: 1365, 1837, 1844, 1851, 1858, 1865, 1871, 1877, 1884, 1890, 1897, 1904, 1910, 1916, 1923, 1930, 1937, 1944, 1950, 1956, 1962, 1969, and 1974; and/or
[7252] VH3 comprises an amino acid sequence that is at least 65%, at least 70%, at least 75%, at least 80%, at least 85%, at least 90%, at least 95%, at least 99%, or 100% identical to any one of SEQ ID NOs: 1365, 1837, 1844, 1851, 1858, 1865, 1871, 1877, 1884, 1890, 1897, 1904, 1910, 1916, 1923, 1930, 1937, 1944, 1950, 1956, 1962, 1969, and 1974.

[7253] In some aspects, one or both of the antigen binding polypeptides comprised in the antigen binding polypeptide complexes disclosed herein, comprise one or more CL, as indicated in the formulas representing the antigen binding polypeptide complexes disclosed herein. In some aspects, the CL comprises an amino acid sequence at least 65%, at least 70%, at least 75%, at least 80%, at least 85%, at least 90%, at least 95%, at least 99%, or 100% identical to any one of SEQ ID NOs: 374, 637, or 1092-1095.

[7254] In some aspects, one or both of the antigen binding polypeptides comprised in the antigen binding polypeptide complexes disclosed herein, comprise one or more CH1, as indicated in the formulas representing the antigen binding polypeptide complexes disclosed herein. In some aspects, the CH1 comprises an amino acid sequence at least 65%, at least 70%, at least 75%, at least 80%, at least 85%, at least 90%, at least 95%, at least 99%, or 100% identical to any one of SEQ ID NOs: 375, 634, 1070, 1071, or 1086-1091.

[7255] In some aspects, one or both of the antigen binding polypeptides comprised in the antigen binding polypeptide complexes provided herein further comprise an Fc region. In some aspects, one or both of the antigen binding polypeptides comprised in the antigen binding polypeptide complexes provided herein further comprise an Fc region at the carboxy-terminus. In some aspects, the Fc region comprises an immunoglobulin heavy chain constant region 2 (CH2) and/or an immunoglobulin heavy chain constant region 3 (CH3). In some aspects, the Fc region further comprises an immunoglobulin hinge (i.e., a hinge region). In some aspects, the hinge region is interposed between a CH1 and a CH2 (i.e., a hinge region is localized between the carboxy terminal residue of a CH1 and the N-terminal residue of a CH2). In some aspects, the hinge region comprises an amino acid sequence at least 65%, at least 70%, at least 75%, at least 80%, at least 85%, at least 90%, at least 95%, at least 99%, or 100% identical to any one of SEQ ID NOs: 635, 636, 1072, 1073, or 1074. In some aspects, the Fc region comprises a CH2 and a CH3. In some aspects, the CH2 comprises an amino acid sequence that is at least 65%, at least 70%, at least 75%, at least 80%, at least 85%, at least 90%, at least 95%, at least 99%, or 100% identical to any one of SEQ ID NOs: 1075-1078. In some aspects, the CH3 comprises an amino acid sequence that is at least 65%, at least 70%, at least 75%, at least 80%, at least 85%, at least 90%, at least 95%, at least 99%, or 100% identical to any one of SEQ ID NOs: 1079-1085. In some aspects, the Fc region comprises an amino acid sequence that is at least 65%, at least 70%, at least 75%, at least 80%, at least 85%, at least 90%, at least 95%, at least 99%, or 100% identical to any one of SEQ ID NOs: 376-380.

[7256] In some aspects, the Fc region comprises one or more amino acid substitutions. In some aspects, the one or more amino acid substitutions comprise one or more half-life extension amino acid substitutions. In some aspects, the one or more half-life extension amino acid substitutions comprise one or more of amino acid substitutions M428L, N434A, N434S, L234F, L235E, P331S, M252Y, S254T, or T256E, or equivalent thereof, based on the EU numbering scheme. In some aspects, the one or more half-life extension amino acid substitutions comprise a LA (M428L and N434A, or equivalent thereof, based on the EU numbering scheme) amino acid substitution. In some aspects, the one or more half-life extension amino acid substitutions comprise a LS (M428L and N434S, or equivalent thereof, based on the EU numbering scheme) amino acid substitution. In some aspects, the one or more half-life extension amino acid substitutions comprise L234F and L235E, or equivalent thereof (based on the EU numbering scheme) amino acid substitutions. In some aspects, the one or more half-life extension amino acid substitutions comprise a TM (L234F, L235E, and P331S, or equivalent thereof, based on the EU numbering scheme) amino acid substitution. In some aspects, the one or more half-life extension amino acid substitutions comprise a YTE (M252Y, S254T, and T256E, or equivalent thereof, based on the EU numbering scheme) amino acid substitution.

[7257] In some aspects, the Fc region comprises at least one knob-into-hole modification. In some aspects, the antigen binding polypeptides complexes disclosed herein are IgG1 or IgG4 antibodies or antigen binding fragments thereof. In some aspects, the knob-into-hole modification comprises one or more of knob substitutions of S354C and T366W, or equivalent thereof, and/or one or more of hole substitutions of Y349C, T366S, L368A, Y407V, or equivalent thereof, or a combination thereof, based on the EU numbering scheme. In some aspects, the Fc region comprises a knob-into-hole modification comprising knob substitutions of S354C and T366W, or equivalent thereof, and/or hole substitutions of Y349C, T366S, L368A, and Y407V, or equivalent thereof, and/or a half-life extension amino acid substitution comprising: a LA (M428L and N434A, or equivalent thereof, based on the EU numbering scheme) amino acid substitution, a LS (M428L and N434S, or equivalent thereof, based on the EU numbering scheme) amino acid substitution. L234F and L235E, or equivalent thereof (based on the EU numbering scheme) amino acid substitutions, a TM (L234F, L235E, and P331S, or equivalent thereof, based on the EU numbering scheme) amino acid substitution, a YTE (M252Y, S254T, and T256E, or equivalent thereof, based on the EU numbering scheme) amino acid substitution, or any combination thereof.

[7258] In some aspects, the Fc region comprises knob substitutions of S354C and T366W, or equivalent thereof, and a half-life extension amino acid substitution comprising: a LA (M428L and N434A, or equivalent thereof, based on the EU numbering scheme) amino acid substitution, a LS (M428L and N434S, or equivalent thereof, based on the EU numbering scheme) amino acid substitution, L234F and L235E, or equivalent thereof (based on the EU numbering scheme) amino acid substitutions, a TM (L234F, L235E, and P331S, or equivalent thereof, based on the EU numbering scheme) amino acid substitution, a YTE (M252Y, S254T, and T256E, or equivalent thereof, based on the EU numbering scheme) amino acid substitution, or any combination thereof.

[7259] In some aspects, the Fc region comprises hole substitutions of Y349C, T366S, L368A, and Y407V, or equivalent thereof, and a half-life extension amino acid substitution comprising: a LA (M428L and N434A, or equivalent thereof, based on the EU numbering scheme) amino acid substitution, a LS (M428L and N434S, or equivalent thereof, based on the EU numbering scheme) amino acid substitution. L234F and L235E, or equivalent thereof (based on the EU numbering scheme) amino acid substitutions, a TM (L234F, L235E, and P331S, or equivalent thereof, based on the EU numbering scheme) amino acid substitution, a YTE (M252Y, S254T, and T256E, or equivalent thereof, based on the EU numbering scheme) amino acid substitution, or any combination thereof.

[7260] In some aspects, one or both of the antigen binding polypeptides comprised in the antigen binding polypeptide complexes disclosed herein comprise one or more Fc effector function knockout mutation. In some aspects, one or both of the antigen binding polypeptides comprised in the antigen binding polypeptide complexes disclosed herein are IgG1 or IgG4 antibodies or antigen binding fragments thereof. In some aspects, the Fc effector function knockout mutation is L234A, L235A, P239A, or equivalent thereof, or a combination thereof, based on the EU numbering scheme.

[7261] In some aspects, one or both of the antigen binding polypeptides comprised in the antigen binding polypeptide complexes disclosed herein comprise a mutation at a glycosylation site. In some aspects, the mutation at a glycosylation site is a mutation at an N-glycosylation site. In some aspects, one or both of the antigen binding polypeptides comprised in the antigen binding polypeptide complexes disclosed herein comprise a VH comprising a mutation at a glycosylation site. In some aspects, the mutation at a glycosylation site is a mutation at an N-glycosylation site. In some aspects, the mutation at an N-glycosylation site is at amino acid N62, or equivalent thereof, of the VH region or equivalent thereof. In some aspects, the mutation at an N-glycosylation site at amino acid N62 is N62Q or N62S, or equivalent thereof.

[7262] In some aspects, one or both of the antigen binding polypeptides comprised in the antigen binding polypeptide complexes disclosed herein, comprise one or more optional linkers. The one or more optional linkers are indicated herein as Ln, wherein n is an integer, and the integer next to each L indicates each L comprised in the antigen binding polypeptides comprised in the antigen binding polypeptide complexes disclosed herein. For example, if an antigen binding polypeptide comprised in the antigen binding polypeptide complexes disclosed herein comprises two linkers, the first linker from N-terminus to C-terminus is herein indicated as L1, and the second linker from N-terminus to C-terminus is herein indicated as L2. If an antigen binding polypeptide complex disclosed herein comprises a first antigen binding polypeptide comprising two linkers, indicated herein as L1 and L2, as explained above, the linkers comprised in the second antigen binding polypeptide are indicated with the following integer, in this example, the first linker from N-terminus to C-terminus of the second antigen binding polypeptide is herein indicated as L3, the second linker from N-terminus to C-terminus of the second antigen binding polypeptide is herein indicated as L3. In some aspects, any one of the optional linkers each independently have a length of from 0 amino acids to about 50 amino acids. In some aspects, any one of the optional linkers each independently have a length of from 5 amino acids to about 40 amino acids.

[7263] In some aspects, any one of the optional linkers are non-immunogenic. In some aspects, any one of the optional linkers do not contain a consensus T cell epitope.

[7264] In some aspects, any of Ln comprises an amino acid sequence of G or A, or an amino acid sequence at least 65%, at least 70%, at least 75%, at least 80%, at least 85%, at least 90%, at least 95%, at least 99%, or 100% identical to amino acid sequence GSS or ASG, or an amino acid sequence at least 65%, at least 70%, at least 75%, at least 80%, at least 85%, at least 90%, at least 95%, at least 99%, or 100% identical to any one of SEQ ID NOs: 333-373 and 967-971. In some aspects. Ln comprises an amino acid sequence at least 65%, at least 70%, at least 75%, at least 80%, at least 85%, at least 90%, at least 95%, at least 99%, or 100% identical to any one of SEQ ID NOs: 333-345 and 967-971.

[7265] In some aspects, the first polypeptide comprises a structure represented by VL1-VH1-CL, VL1-L1-VH1-L2-CL; VL1-VH1-CL-CH2-CH3; VL1-L1-VH1-L2-CL-CH2-CH3 and the second polypeptide comprises a structure represented by VL2-VH2-CH1; VL2-L3-VH2-L4-CH1; VL2-VH2-CH1-CH2-CH3; VL2-L3-VH2-L4-CH1-CH2-CH3,
[7266] wherein:
[7267] (a)
[7268] (i)
[7269] VL1 comprises a light chain complementarity determining region 1 (LCDR1), LCDR2, and/or LCDR3 of an antibody selected from the group consisting of losatuxizumab vedotin, utomilumab, urelumab, oleclumab, naptumomab estafenatox, ascrinvacumab, pintumomab, tacatuzumab tetraxetan, nesvacumab, vanucizumab, timolumab, vapaliximab, vepalimomab, enapotamab vedotin, ianalumab, belimumab, tabalumab, tibulizumab, belantamab mafodotin, teclistamab, teclistamab, detumomab, nacolomab tafenatox, eculizumab, lendalizumab, pexelizumab, pozelimab, ravulizumab, tesidolumab, vilobelimab, abagovomab, igovomab, oregovomab, sofituzumab vedotin, cantuzumab mertansine, cantuzuma bravtansine, girentuximab, altumomab pentetate, arcitumomab, besilesomab, bertilimumab, plozalizumab, mogamulizumab, leronlimab, PRO140, rovelizumab, rovelizumab, talacotuzumab, benralizumab, tavolimab, vonlerolizumab, gavilimomab, ziralimumab, fanolesomab, ipilimumab, ruplizumab, toralizumab, dapirolizumab pegol, toralizumab, dapirolizumab pegol, ruplizumab, blinatumomab, inebilizumab, loncastuximab tesirine, SGN-CD19A, tafasitamab, taplitumomab paptox, XMAB-5574, Budoprutug, Obexelimab, duvortuxizumab, englumafusp alfa, Emfizatamab, zeripatamig, siplizumab, blontuvetmab, FBTA05, ibritumomab tiuxetan, obinutuzumab, ocaratuzumab, ocrelizumab, ofatumumab, rituximab, tositumomab, ublituximab, veltuzumab, divozilimab, eramkafusp alfa, ripertamab, zuberitamab, glofitamab, nofetumomab merpentan, samalizumab, imvotamab, odronextamab, plamotamab, bectumomab, inotuzumab ozogamicin, moxetumomab pasudotox, pinatuzumab vedotin, gomiliximab, lumiliximab, inolimomab, inolimomab, daclizumab, camidanluma btesirine, basiliximab, varlilumab, omburtamab, enoblituzumab, vopratelimab, lulizumabpegol, TGN1412, muromonab-CD3, otelixizumab, teplizumab, visilizumab, epcoritamab, epcoritamab, brentuximab vedotin, iratumumab, azintuxizumab vedotin, gemtuzumab ozogamicin, lintuzumab, vadastuximab talirine, naratuximab emtansine, otlertuzumab, lilotomab satetraxetan, tetulomab, daratumumab, isatuximab, foralumab, mosunetuzumab, mosunetuzumab, cedelizumab, ibalizumab, keliximab, priliximab, tregalizumab, zanolimumab, bleselumab, iscalimab, lucatumumab, ravagalimab, selicrelumab, teneliximab, vanalimab, abciximab, bivatuzumab, iomab-B, telimomab aritox, zolimomab aritox, abituzumab, intetumumab, alemtuzumab, tamtuvetmab, lorvotuzumab mertansine, itolizumab, cusatuzumab, vorsetuzumab mafodotin, milatuzumab, iladatuzumab vedotin, polatuzumab vedotin, galiximab, cibisatamab, zolbetuximab, naxitamab, tisotumab vedotin, olendalizumab, pamrevlumab, lacnotuzumab, cabiralizumab, emactuzumab, axatilimab, gimsilumab, lenzilumab, namilumab, tremelimumab, ulocuplumab, tepoditamab, rovalpituzumab tesirine, tarlatamab, demcizumab, navicixizumab, drozitumab, parsatuzumab, depatuxizumab mafodotin, modotuximab, carotuximab, adecatumumab, adecatumumab, oportuzumab monatox, solitomab, tucotuzumab celmoleukin, edrecolomab, catumaxomab, ifabotuzumab, fibatuzumab, zalutumumab, panitumumab, cetuximab, futuximab, imgatuzumab, laprituximab emtansine, matuzumab, necitumumab, nimotuzumab, tomuzotuximab, amivantamab, amivantamab, epitumomab cituxetan, sontuzumab, duligotuzumab, elgemtumab, lumretuzumab, patritumab, seribantumab, zenocutuzumab, sibrotuzumab, burosumab, aprutumab ixadotin, radretumab, pasotuxizumab, farletuzumab, mirvetuximab soravtansine, vantictumab, TRBS07, 3F8, dinutuximab, dinutuximab beta, ecromeximab, mitumomab, andecaliximab, capromab, codrituzumab, glembatumumab vedotin, talquetamab, talquetamab, trevogrumab, indusatumab vedotin, ficlatuzumab, rilotumumab, zatuximab, pentuzimab, pentuzimab, margetuximab, timigutuzumab, trastuzumab, trastuzumab duocarmazine, trastuzumab emtansine, gancotamab, pertuzumab, ertumaxomab, emibetuzumab, telisotuzumab, telisotuzumab vedotin, derlotuximab biotin, apolizumab, onartuzumab, bersanlimab, enlimomabpegol, rontalizumab, sifalimumab, talizumab, ganitumab, istiratumab, robatumumab, teprotumumab, figitumumab, ganitumab, istiratumab, robatumumab, teprotumumab, cixutumumab, dalotuzumab, xentuzumab, dusigitumab, canakinumab, ustekinumab, ustekinumab, ustekinumab, briakinumab, briakinumab, abrezekimab, lebrikizumab, romilkimab, TNX-650, tralokinumab, anrukinzumab, brodalumab, ixekizumab, netakimab, perakizumab, secukinumab, vunakizumab, afasevikumab, afasevikumab, bimekizumab, bimekizumab, remtolumab, bermekimab, lutikizumab, lutikizumab, gevokizumab, cergutuzumab amunaleukin, fletikumab, fezakinumab, brazikumab, guselkumab, mirikizumab, tildrakizumab, risankizumab, flotetuzumab, nemolizumab, pascolizumab, dupilumab, mepolizumab, reslizumab, clazakizumab, elsilimomab, olokizumab, sarilumab, siltuximab, sirukumab, vobarilizumab, tocilizumab, SA237, satralizumab, enokizumab, prezalizumab, natalizumab, abrilumab, abrilumab, vedolizumab, volociximab, tadocizumab, etaracizumab, etrolizumab, spesolimab, vatelizumab, erlizumab, lirilumab, relatlimab, cBR96-doxorubicinimmunoconjugate, odulimomab, efalizumab, ladiratuzumab vedotin, simtuzumab, samrotamab vedotin, aselizumab, lupartumab amadotin, imalumab, carlumab, imaprelimab, amatuximab, amatuximab, anetumab ravtansine, narnatumab, clivatuzumab tetraxetan, pemtumomab, gatipotuzumab, ensituximab, lemalesomab, sulesomab, enfortumab vedotin, racotumomab, monalizumab, brontictuzumab, tarextumab, vesencumab, oxelumab, gilvetmab, tislelizumab, dostarlimab, BCD-100, nivolumab, PDR001, pembrolizumab, pidilizumab, retifanlimab, spartalizumab, sintilimab, cemiplimab, olaratumab, tovetumab, rinucumab, atezolizumab, avelumab, durvalumab, lifastuzumab vedotin, bavituximab, acapatamab, capromab, rosopatamab, nezastomig, pasotuxizumab, pelgifatamab, voxalatamab, cofetuzumab pelidotin, denosumab, rosmantuzumab, cirmtuzumab, atinumab, indatuximab ravtansine, elotuzumab, sirtratumab vedotin, sonepcizumab, vandortuzumab vedotin, minretumomab, satumomab pendetide, maslimomab, ontuxizumab, tenatumomab, fresolimumab, metelimumab, lerdelimumab, tezepelumab, etigilimab, tiragotumab, placulumab, prezalumab, infliximab, nerelimomab, ozoralizumab, adalimumab, afelimomab, certolizumab pegol, golimumab, mapatumumab, conatumumab, lexatumumab, tigatuzumab, sacituzumab govitecan, votumumab, pogalizumab, letolizumab, pankomab, anatumomab mafenatox, enavatuzumab, flanvotumab, brolucizumab, ranibizumab, varisacumab, bevacizumab, faricimab, icrucumab, alacizumab pegol, ramucirumab, pritumumab, and onvatilimab;
[7270] VL2 comprises a light chain complementarity determining region 1 (LCDR1), LCDR2, and/or LCDR3 of an antibody selected from the group consisting of losatuxizumab vedotin, utomilumab, urelumab, oleclumab, naptumomab estafenatox, ascrinvacumab, pintumomab, tacatuzumab tetraxetan, nesvacumab, vanucizumab, timolumab, vapaliximab, vepalimomab, enapotamab vedotin, ianalumab, belimumab, tabalumab, tibulizumab, belantamab mafodotin, teclistamab, teclistamab, detumomab, nacolomab tafenatox, eculizumab, lendalizumab, pexelizumab, pozelimab, ravulizumab, tesidolumab, vilobelimab, abagovomab, igovomab, oregovomab, sofituzumab vedotin, cantuzumab mertansine, cantuzuma bravtansine, girentuximab, altumomab pentetate, arcitumomab, besilesomab, bertilimumab, plozalizumab, mogamulizumab, leronlimab, PRO140, rovelizumab, rovelizumab, talacotuzumab, benralizumab, tavolimab, vonlerolizumab, gavilimomab, ziralimumab, fanolesomab, ipilimumab, ruplizumab, toralizumab, dapirolizumab pegol, toralizumab, dapirolizumab pegol, ruplizumab, blinatumomab, inebilizumab, loncastuximab tesirine, SGN-CD19A, tafasitamab, taplitumomab paptox, XMAB-5574, Budoprutug, Obexelimab, duvortuxizumab, englumafusp alfa, Emfizatamab, zeripatamig, siplizumab, blontuvetmab, FBTA05, ibritumomab tiuxetan, obinutuzumab, ocaratuzumab, ocrelizumab, ofatumumab, rituximab, tositumomab, ublituximab, veltuzumab, divozilimab, eramkafusp alfa, ripertamab, zuberitamab, glofitamab, nofetumomab merpentan, samalizumab, imvotamab, odronextamab, plamotamab, bectumomab, inotuzumab ozogamicin, moxetumomab pasudotox, pinatuzumab vedotin, gomiliximab, lumiliximab, inolimomab, inolimomab, daclizumab, camidanluma btesirine, basiliximab, varlilumab, omburtamab, enoblituzumab, vopratelimab, lulizumabpegol, TGN1412, muromonab-CD3, otelixizumab, teplizumab, visilizumab, epcoritamab, epcoritamab, brentuximab vedotin, iratumumab, azintuxizumab vedotin, gemtuzumab ozogamicin, lintuzumab, vadastuximab talirine, naratuximab emtansine, otlertuzumab, lilotomab satetraxetan, tetulomab, daratumumab, isatuximab, foralumab, mosunetuzumab, mosunetuzumab, cedelizumab, ibalizumab, keliximab, priliximab, tregalizumab, zanolimumab, bleselumab, iscalimab, lucatumumab, ravagalimab, selicrelumab, teneliximab, vanalimab, abciximab, bivatuzumab, iomab-B, telimomab aritox, zolimomab aritox, abituzumab, intetumumab, alemtuzumab, tamtuvetmab, lorvotuzumab mertansine, itolizumab, cusatuzumab, vorsetuzumab mafodotin, milatuzumab, iladatuzumab vedotin, polatuzumab vedotin, galiximab, cibisatamab, zolbetuximab, naxitamab, tisotumab vedotin, olendalizumab, pamrevlumab, lacnotuzumab, cabiralizumab, emactuzumab, axatilimab, gimsilumab, lenzilumab, namilumab, tremelimumab, ulocuplumab, tepoditamab, rovalpituzumab tesirine, tarlatamab, demcizumab, navicixizumab, drozitumab, parsatuzumab, depatuxizumab mafodotin, modotuximab, carotuximab, adecatumumab, adecatumumab, oportuzumab monatox, solitomab, tucotuzumab celmoleukin, edrecolomab, catumaxomab, ifabotuzumab, fibatuzumab, zalutumumab, panitumumab, cetuximab, futuximab, imgatuzumab, laprituximab emtansine, matuzumab, necitumumab, nimotuzumab, tomuzotuximab, amivantamab, amivantamab, epitumomab cituxetan, sontuzumab, duligotuzumab, elgemtumab, lumretuzumab, patritumab, seribantumab, zenocutuzumab, sibrotuzumab, burosumab, aprutumab ixadotin, radretumab, pasotuxizumab, farletuzumab, mirvetuximab soravtansine, vantictumab, TRBS07, 3F8, dinutuximab, dinutuximab beta, ecromeximab, mitumomab, andecaliximab, capromab, codrituzumab, glembatumumab vedotin, talquetamab, talquetamab, trevogrumab, indusatumab vedotin, ficlatuzumab, rilotumumab, zatuximab, pentuzimab, pentuzimab, margetuximab, timigutuzumab, trastuzumab, trastuzumab duocarmazine, trastuzumab emtansine, gancotamab, pertuzumab, ertumaxomab, emibetuzumab, telisotuzumab, telisotuzumab vedotin, derlotuximab biotin, apolizumab, onartuzumab, bersanlimab, enlimomabpegol, rontalizumab, sifalimumab, talizumab, ganitumab, istiratumab, robatumumab, teprotumumab, figitumumab, ganitumab, istiratumab, robatumumab, teprotumumab, cixutumumab, dalotuzumab, xentuzumab, dusigitumab, canakinumab, ustekinumab, ustekinumab, ustekinumab, briakinumab, briakinumab, abrezekimab, lebrikizumab, romilkimab, TNX-650, tralokinumab, anrukinzumab, brodalumab, ixekizumab, netakimab, perakizumab, secukinumab, vunakizumab, afasevikumab, afasevikumab, bimekizumab, bimekizumab, remtolumab, bermekimab, lutikizumab, lutikizumab, gevokizumab, cergutuzumab amunaleukin, fletikumab, fezakinumab, brazikumab, guselkumab, mirikizumab, tildrakizumab, risankizumab, flotetuzumab, nemolizumab, pascolizumab, dupilumab, mepolizumab, reslizumab, clazakizumab, elsilimomab, olokizumab, sarilumab, siltuximab, sirukumab, vobarilizumab, tocilizumab, SA237, satralizumab, enokizumab, prezalizumab, natalizumab, abrilumab, abrilumab, vedolizumab, volociximab, tadocizumab, etaracizumab, etrolizumab, spesolimab, vatelizumab, erlizumab, lirilumab, relatlimab, cBR96-doxorubicinimmunoconjugate, odulimomab, efalizumab, ladiratuzumab vedotin, simtuzumab, samrotamab vedotin, aselizumab, lupartumab amadotin, imalumab, carlumab, imaprelimab, amatuximab, amatuximab, anetumab ravtansine, narnatumab, clivatuzumab tetraxetan, pemtumomab, gatipotuzumab, ensituximab, lemalesomab, sulesomab, enfortumab vedotin, racotumomab, monalizumab, brontictuzumab, tarextumab, vesencumab, oxelumab, gilvetmab, tislelizumab, dostarlimab, BCD-100, nivolumab, PDR001, pembrolizumab, pidilizumab, retifanlimab, spartalizumab, sintilimab, cemiplimab, olaratumab, tovetumab, rinucumab, atezolizumab, avelumab, durvalumab, lifastuzumab vedotin, bavituximab, acapatamab, capromab, rosopatamab, nezastomig, pasotuxizumab, pelgifatamab, voxalatamab, cofetuzumab pelidotin, denosumab, rosmantuzumab, cirmtuzumab, atinumab, indatuximab ravtansine, elotuzumab, sirtratumab vedotin, sonepcizumab, vandortuzumab vedotin, minretumomab, satumomab pendetide, maslimomab, ontuxizumab, tenatumomab, fresolimumab, metelimumab, lerdelimumab, tezepelumab, etigilimab, tiragotumab, placulumab, prezalumab, infliximab, nerelimomab, ozoralizumab, adalimumab, afelimomab, certolizumab pegol, golimumab, mapatumumab, conatumumab, lexatumumab, tigatuzumab, sacituzumab govitecan, votumumab, pogalizumab, letolizumab, pankomab, anatumomab mafenatox, enavatuzumab, flanvotumab, brolucizumab, ranibizumab, varisacumab, bevacizumab, faricimab, icrucumab, alacizumab pegol, ramucirumab, pritumumab, and onvatilimab;
[7271] VH1 comprises a heavy chain complementarity determining region 1 (HCDR1), HCDR2, and/or HCDR3 of an antibody selected from the group consisting of losatuxizumab vedotin, utomilumab, urelumab, oleclumab, naptumomab estafenatox, ascrinvacumab, pintumomab, tacatuzumab tetraxetan, nesvacumab, vanucizumab, timolumab, vapaliximab, vepalimomab, enapotamab vedotin, ianalumab, belimumab, tabalumab, tibulizumab, belantamab mafodotin, teclistamab, teclistamab, detumomab, nacolomab tafenatox, eculizumab, lendalizumab, pexelizumab, pozelimab, ravulizumab, tesidolumab, vilobelimab, abagovomab, igovomab, oregovomab, sofituzumab vedotin, cantuzumab mertansine, cantuzuma bravtansine, girentuximab, altumomab pentetate, arcitumomab, besilesomab, bertilimumab, plozalizumab, mogamulizumab, leronlimab, PRO140, rovelizumab, rovelizumab, talacotuzumab, benralizumab, tavolimab, vonlerolizumab, gavilimomab, ziralimumab, fanolesomab, ipilimumab, ruplizumab, toralizumab, dapirolizumab pegol, toralizumab, dapirolizumab pegol, ruplizumab, blinatumomab, inebilizumab, loncastuximab tesirine, SGN-CD19A, tafasitamab, taplitumomab paptox, XMAB-5574, Budoprutug, Obexelimab, duvortuxizumab, englumafusp alfa, Emfizatamab, zeripatamig, siplizumab, blontuvetmab, FBTA05, ibritumomab tiuxetan, obinutuzumab, ocaratuzumab, ocrelizumab, ofatumumab, rituximab, tositumomab, ublituximab, veltuzumab, divozilimab, eramkafusp alfa, ripertamab, zuberitamab, glofitamab, nofetumomab merpentan, samalizumab, imvotamab, odronextamab, plamotamab, bectumomab, inotuzumab ozogamicin, moxetumomab pasudotox, pinatuzumab vedotin, gomiliximab, lumiliximab, inolimomab, inolimomab, daclizumab, camidanluma btesirine, basiliximab, varlilumab, omburtamab, enoblituzumab, vopratelimab, lulizumabpegol, TGN1412, muromonab-CD3, otelixizumab, teplizumab, visilizumab, epcoritamab, epcoritamab, brentuximab vedotin, iratumumab, azintuxizumab vedotin, gemtuzumab ozogamicin, lintuzumab, vadastuximab talirine, naratuximab emtansine, otlertuzumab, lilotomab satetraxetan, tetulomab, daratumumab, isatuximab, foralumab, mosunetuzumab, mosunetuzumab, cedelizumab, ibalizumab, keliximab, priliximab, tregalizumab, zanolimumab, bleselumab, iscalimab, lucatumumab, ravagalimab, selicrelumab, teneliximab, vanalimab, abciximab, bivatuzumab, iomab-B, telimomab aritox, zolimomab aritox, abituzumab, intetumumab, alemtuzumab, tamtuvetmab, lorvotuzumab mertansine, itolizumab, cusatuzumab, vorsetuzumab mafodotin, milatuzumab, iladatuzumab vedotin, polatuzumab vedotin, galiximab, cibisatamab, zolbetuximab, naxitamab, tisotumab vedotin, olendalizumab, pamrevlumab, lacnotuzumab, cabiralizumab, emactuzumab, axatilimab, gimsilumab, lenzilumab, namilumab, tremelimumab, ulocuplumab, tepoditamab, rovalpituzumab tesirine, tarlatamab, demcizumab, navicixizumab, drozitumab, parsatuzumab, depatuxizumab mafodotin, modotuximab, carotuximab, adecatumumab, adecatumumab, oportuzumab monatox, solitomab, tucotuzumab celmoleukin, edrecolomab, catumaxomab, ifabotuzumab, fibatuzumab, zalutumumab, panitumumab, cetuximab, futuximab, imgatuzumab, laprituximab emtansine, matuzumab, necitumumab, nimotuzumab, tomuzotuximab, amivantamab, amivantamab, epitumomab cituxetan, sontuzumab, duligotuzumab, elgemtumab, lumretuzumab, patritumab, seribantumab, zenocutuzumab, sibrotuzumab, burosumab, aprutumab ixadotin, radretumab, pasotuxizumab, farletuzumab, mirvetuximab soravtansine, vantictumab, TRBS07, 3F8, dinutuximab, dinutuximab beta, ecromeximab, mitumomab, andecaliximab, capromab, codrituzumab, glembatumumab vedotin, talquetamab, talquetamab, trevogrumab, indusatumab vedotin, ficlatuzumab, rilotumumab, zatuximab, pentuzimab, pentuzimab, margetuximab, timigutuzumab, trastuzumab, trastuzumab duocarmazine, trastuzumab emtansine, gancotamab, pertuzumab, ertumaxomab, emibetuzumab, telisotuzumab, telisotuzumab vedotin, derlotuximab biotin, apolizumab, onartuzumab, bersanlimab, enlimomabpegol, rontalizumab, sifalimumab, talizumab, ganitumab, istiratumab, robatumumab, teprotumumab, figitumumab, ganitumab, istiratumab, robatumumab, teprotumumab, cixutumumab, dalotuzumab, xentuzumab, dusigitumab, canakinumab, ustekinumab, ustekinumab, ustekinumab, briakinumab, briakinumab, abrezekimab, lebrikizumab, romilkimab, TNX-650, tralokinumab, anrukinzumab, brodalumab, ixekizumab, netakimab, perakizumab, secukinumab, vunakizumab, afasevikumab, afasevikumab, bimekizumab, bimekizumab, remtolumab, bermekimab, lutikizumab, lutikizumab, gevokizumab, cergutuzumab amunaleukin, fletikumab, fezakinumab, brazikumab, guselkumab, mirikizumab, tildrakizumab, risankizumab, flotetuzumab, nemolizumab, pascolizumab, dupilumab, mepolizumab, reslizumab, clazakizumab, elsilimomab, olokizumab, sarilumab, siltuximab, sirukumab, vobarilizumab, tocilizumab, SA237, satralizumab, enokizumab, prezalizumab, natalizumab, abrilumab, abrilumab, vedolizumab, volociximab, tadocizumab, etaracizumab, etrolizumab, spesolimab, vatelizumab, erlizumab, lirilumab, relatlimab, cBR96-doxorubicinimmunoconjugate, odulimomab, efalizumab, ladiratuzumab vedotin, simtuzumab, samrotamab vedotin, aselizumab, lupartumab amadotin, imalumab, carlumab, imaprelimab, amatuximab, amatuximab, anetumab ravtansine, narnatumab, clivatuzumab tetraxetan, pemtumomab, gatipotuzumab, ensituximab, lemalesomab, sulesomab, enfortumab vedotin, racotumomab, monalizumab, brontictuzumab, tarextumab, vesencumab, oxelumab, gilvetmab, tislelizumab, dostarlimab, BCD-100, nivolumab, PDR001, pembrolizumab, pidilizumab, retifanlimab, spartalizumab, sintilimab, cemiplimab, olaratumab, tovetumab, rinucumab, atezolizumab, avelumab, durvalumab, lifastuzumab vedotin, bavituximab, acapatamab, capromab, rosopatamab, nezastomig, pasotuxizumab, pelgifatamab, voxalatamab, cofetuzumab pelidotin, denosumab, rosmantuzumab, cirmtuzumab, atinumab, indatuximab ravtansine, elotuzumab, sirtratumab vedotin, sonepcizumab, vandortuzumab vedotin, minretumomab, satumomab pendetide, maslimomab, ontuxizumab, tenatumomab, fresolimumab, metelimumab, lerdelimumab, tezepelumab, etigilimab, tiragotumab, placulumab, prezalumab, infliximab, nerelimomab, ozoralizumab, adalimumab, afelimomab, certolizumab pegol, golimumab, mapatumumab, conatumumab, lexatumumab, tigatuzumab, sacituzumab govitecan, votumumab, pogalizumab, letolizumab, pankomab, anatumomab mafenatox, enavatuzumab, flanvotumab, brolucizumab, ranibizumab, varisacumab, bevacizumab, faricimab, icrucumab, alacizumab pegol, ramucirumab, pritumumab, and onvatilimab; and/or
[7272] VH2 comprises a heavy chain complementarity determining region 1 (HCDR1), HCDR2, and/or HCDR3 of an antibody selected from the group consisting of losatuxizumab vedotin, utomilumab, urelumab, oleclumab, naptumomab estafenatox, ascrinvacumab, pintumomab, tacatuzumab tetraxetan, nesvacumab, vanucizumab, timolumab, vapaliximab, vepalimomab, enapotamab vedotin, ianalumab, belimumab, tabalumab, tibulizumab, belantamab mafodotin, teclistamab, teclistamab, detumomab, nacolomab tafenatox, eculizumab, lendalizumab, pexelizumab, pozelimab, ravulizumab, tesidolumab, vilobelimab, abagovomab, igovomab, oregovomab, sofituzumab vedotin, cantuzumab mertansine, cantuzuma bravtansine, girentuximab, altumomab pentetate, arcitumomab, besilesomab, bertilimumab, plozalizumab, mogamulizumab, leronlimab, PRO140, rovelizumab, rovelizumab, talacotuzumab, benralizumab, tavolimab, vonlerolizumab, gavilimomab, ziralimumab, fanolesomab, ipilimumab, ruplizumab, toralizumab, dapirolizumab pegol, toralizumab, dapirolizumab pegol, ruplizumab, blinatumomab, inebilizumab, loncastuximab tesirine, SGN-CD19A, tafasitamab, taplitumomab paptox, XMAB-5574, Budoprutug, Obexelimab, duvortuxizumab, englumafusp alfa, Emfizatamab, zeripatamig, siplizumab, blontuvetmab, FBTA05, ibritumomab tiuxetan, obinutuzumab, ocaratuzumab, ocrelizumab, ofatumumab, rituximab, tositumomab, ublituximab, veltuzumab, divozilimab, eramkafusp alfa, ripertamab, zuberitamab, glofitamab, nofetumomab merpentan, samalizumab, imvotamab, odronextamab, plamotamab, bectumomab, inotuzumab ozogamicin, moxetumomab pasudotox, pinatuzumab vedotin, gomiliximab, lumiliximab, inolimomab, inolimomab, daclizumab, camidanluma btesirine, basiliximab, varlilumab, omburtamab, enoblituzumab, vopratelimab, lulizumabpegol, TGN1412, muromonab-CD3, otelixizumab, teplizumab, visilizumab, epcoritamab, epcoritamab, brentuximab vedotin, iratumumab, azintuxizumab vedotin, gemtuzumab ozogamicin, lintuzumab, vadastuximab talirine, naratuximab emtansine, otlertuzumab, lilotomab satetraxetan, tetulomab, daratumumab, isatuximab, foralumab, mosunetuzumab, mosunetuzumab, cedelizumab, ibalizumab, keliximab, priliximab, tregalizumab, zanolimumab, bleselumab, iscalimab, lucatumumab, ravagalimab, selicrelumab, teneliximab, vanalimab, abciximab, bivatuzumab, iomab-B, telimomab aritox, zolimomab aritox, abituzumab, intetumumab, alemtuzumab, tamtuvetmab, lorvotuzumab mertansine, itolizumab, cusatuzumab, vorsetuzumab mafodotin, milatuzumab, iladatuzumab vedotin, polatuzumab vedotin, galiximab, cibisatamab, zolbetuximab, naxitamab, tisotumab vedotin, olendalizumab, pamrevlumab, lacnotuzumab, cabiralizumab, emactuzumab, axatilimab, gimsilumab, lenzilumab, namilumab, tremelimumab, ulocuplumab, tepoditamab, rovalpituzumab tesirine, tarlatamab, demcizumab, navicixizumab, drozitumab, parsatuzumab, depatuxizumab mafodotin, modotuximab, carotuximab, adecatumumab, adecatumumab, oportuzumab monatox, solitomab, tucotuzumab celmoleukin, edrecolomab, catumaxomab, ifabotuzumab, fibatuzumab, zalutumumab, panitumumab, cetuximab, futuximab, imgatuzumab, laprituximab emtansine, matuzumab, necitumumab, nimotuzumab, tomuzotuximab, amivantamab, amivantamab, epitumomab cituxetan, sontuzumab, duligotuzumab, elgemtumab, lumretuzumab, patritumab, seribantumab, zenocutuzumab, sibrotuzumab, burosumab, aprutumab ixadotin, radretumab, pasotuxizumab, farletuzumab, mirvetuximab soravtansine, vantictumab, TRBS07, 3F8, dinutuximab, dinutuximab beta, ecromeximab, mitumomab, andecaliximab, capromab, codrituzumab, glembatumumab vedotin, talquetamab, talquetamab, trevogrumab, indusatumab vedotin, ficlatuzumab, rilotumumab, zatuximab, pentuzimab, pentuzimab, margetuximab, timigutuzumab, trastuzumab, trastuzumab duocarmazine, trastuzumab emtansine, gancotamab, pertuzumab, ertumaxomab, emibetuzumab, telisotuzumab, telisotuzumab vedotin, derlotuximab biotin, apolizumab, onartuzumab, bersanlimab, enlimomabpegol, rontalizumab, sifalimumab, talizumab, ganitumab, istiratumab, robatumumab, teprotumumab, figitumumab, ganitumab, istiratumab, robatumumab, teprotumumab, cixutumumab, dalotuzumab, xentuzumab, dusigitumab, canakinumab, ustekinumab, ustekinumab, ustekinumab, briakinumab, briakinumab, abrezekimab, lebrikizumab, romilkimab, TNX-650, tralokinumab, anrukinzumab, brodalumab, ixekizumab, netakimab, perakizumab, secukinumab, vunakizumab, afasevikumab, afasevikumab, bimekizumab, bimekizumab, remtolumab, bermekimab, lutikizumab, lutikizumab, gevokizumab, cergutuzumab amunaleukin, fletikumab, fezakinumab, brazikumab, guselkumab, mirikizumab, tildrakizumab, risankizumab, flotetuzumab, nemolizumab, pascolizumab, dupilumab, mepolizumab, reslizumab, clazakizumab, elsilimomab, olokizumab, sarilumab, siltuximab, sirukumab, vobarilizumab, tocilizumab, SA237, satralizumab, enokizumab, prezalizumab, natalizumab, abrilumab, abrilumab, vedolizumab, volociximab, tadocizumab, etaracizumab, etrolizumab, spesolimab, vatelizumab, erlizumab, lirilumab, relatlimab, cBR96-doxorubicinimmunoconjugate, odulimomab, efalizumab, ladiratuzumab vedotin, simtuzumab, samrotamab vedotin, aselizumab, lupartumab amadotin, imalumab, carlumab, imaprelimab, amatuximab, amatuximab, anetumab ravtansine, narnatumab, clivatuzumab tetraxetan, pemtumomab, gatipotuzumab, ensituximab, lemalesomab, sulesomab, enfortumab vedotin, racotumomab, monalizumab, brontictuzumab, tarextumab, vesencumab, oxelumab, gilvetmab, tislelizumab, dostarlimab, BCD-100, nivolumab, PDR001, pembrolizumab, pidilizumab, retifanlimab, spartalizumab, sintilimab, cemiplimab, olaratumab, tovetumab, rinucumab, atezolizumab, avelumab, durvalumab, lifastuzumab vedotin, bavituximab, acapatamab, capromab, rosopatamab, nezastomig, pasotuxizumab, pelgifatamab, voxalatamab, cofetuzumab pelidotin, denosumab, rosmantuzumab, cirmtuzumab, atinumab, indatuximab ravtansine, elotuzumab, sirtratumab vedotin, sonepcizumab, vandortuzumab vedotin, minretumomab, satumomab pendetide, maslimomab, ontuxizumab, tenatumomab, fresolimumab, metelimumab, lerdelimumab, tezepelumab, etigilimab, tiragotumab, placulumab, prezalumab, infliximab, nerelimomab, ozoralizumab, adalimumab, afelimomab, certolizumab pegol, golimumab, mapatumumab, conatumumab, lexatumumab, tigatuzumab, sacituzumab govitecan, votumumab, pogalizumab, letolizumab, pankomab, anatumomab mafenatox, enavatuzumab, flanvotumab, brolucizumab, ranibizumab, varisacumab, bevacizumab, faricimab, icrucumab, alacizumab pegol, ramucirumab, pritumumab, and onvatilimab; or
[7273] (ii)
[7274] VL1 comprises a VL of an antibody selected from the group consisting of losatuxizumab vedotin, utomilumab, urelumab, oleclumab, naptumomab estafenatox, ascrinvacumab, pintumomab, tacatuzumab tetraxetan, nesvacumab, vanucizumab, timolumab, vapaliximab, vepalimomab, enapotamab vedotin, ianalumab, belimumab, tabalumab, tibulizumab, belantamab mafodotin, teclistamab, teclistamab, detumomab, nacolomab tafenatox, eculizumab, lendalizumab, pexelizumab, pozelimab, ravulizumab, tesidolumab, vilobelimab, abagovomab, igovomab, oregovomab, sofituzumab vedotin, cantuzumab mertansine, cantuzuma bravtansine, girentuximab, altumomab pentetate, arcitumomab, besilesomab, bertilimumab, plozalizumab, mogamulizumab, leronlimab, PRO140, rovelizumab, rovelizumab, talacotuzumab, benralizumab, tavolimab, vonlerolizumab, gavilimomab, ziralimumab, fanolesomab, ipilimumab, ruplizumab, toralizumab, dapirolizumab pegol, toralizumab, dapirolizumab pegol, ruplizumab, blinatumomab, inebilizumab, loncastuximab tesirine, SGN-CD19A, tafasitamab, taplitumomab paptox, XMAB-5574, Budoprutug, Obexelimab, duvortuxizumab, englumafusp alfa, Emfizatamab, zeripatamig, siplizumab, blontuvetmab, FBTA05, ibritumomab tiuxetan, obinutuzumab, ocaratuzumab, ocrelizumab, ofatumumab, rituximab, tositumomab, ublituximab, veltuzumab, divozilimab, eramkafusp alfa, ripertamab, zuberitamab, glofitamab, nofetumomab merpentan, samalizumab, imvotamab, odronextamab, plamotamab, bectumomab, inotuzumab ozogamicin, moxetumomab pasudotox, pinatuzumab vedotin, gomiliximab, lumiliximab, inolimomab, inolimomab, daclizumab, camidanluma btesirine, basiliximab, varlilumab, omburtamab, enoblituzumab, vopratelimab, lulizumabpegol, TGN1412, muromonab-CD3, otelixizumab, teplizumab, visilizumab, epcoritamab, epcoritamab, brentuximab vedotin, iratumumab, azintuxizumab vedotin, gemtuzumab ozogamicin, lintuzumab, vadastuximab talirine, naratuximab emtansine, otlertuzumab, lilotomab satetraxetan, tetulomab, daratumumab, isatuximab, foralumab, mosunetuzumab, mosunetuzumab, cedelizumab, ibalizumab, keliximab, priliximab, tregalizumab, zanolimumab, bleselumab, iscalimab, lucatumumab, ravagalimab, selicrelumab, teneliximab, vanalimab, abciximab, bivatuzumab, iomab-B, telimomab aritox, zolimomab aritox, abituzumab, intetumumab, alemtuzumab, tamtuvetmab, lorvotuzumab mertansine, itolizumab, cusatuzumab, vorsetuzumab mafodotin, milatuzumab, iladatuzumab vedotin, polatuzumab vedotin, galiximab, cibisatamab, zolbetuximab, naxitamab, tisotumab vedotin, olendalizumab, pamrevlumab, lacnotuzumab, cabiralizumab, emactuzumab, axatilimab, gimsilumab, lenzilumab, namilumab, tremelimumab, ulocuplumab, tepoditamab, rovalpituzumab tesirine, tarlatamab, demcizumab, navicixizumab, drozitumab, parsatuzumab, depatuxizumab mafodotin, modotuximab, carotuximab, adecatumumab, adecatumumab, oportuzumab monatox, solitomab, tucotuzumab celmoleukin, edrecolomab, catumaxomab, ifabotuzumab, fibatuzumab, zalutumumab, panitumumab, cetuximab, futuximab, imgatuzumab, laprituximab emtansine, matuzumab, necitumumab, nimotuzumab, tomuzotuximab, amivantamab, amivantamab, epitumomab cituxetan, sontuzumab, duligotuzumab, elgemtumab, lumretuzumab, patritumab, seribantumab, zenocutuzumab, sibrotuzumab, burosumab, aprutumab ixadotin, radretumab, pasotuxizumab, farletuzumab, mirvetuximab soravtansine, vantictumab, TRBS07, 3F8, dinutuximab, dinutuximab beta, ecromeximab, mitumomab, andecaliximab, capromab, codrituzumab, glembatumumab vedotin, talquetamab, talquetamab, trevogrumab, indusatumab vedotin, ficlatuzumab, rilotumumab, zatuximab, pentuzimab, pentuzimab, margetuximab, timigutuzumab, trastuzumab, trastuzumab duocarmazine, trastuzumab emtansine, gancotamab, pertuzumab, ertumaxomab, emibetuzumab, telisotuzumab, telisotuzumab vedotin, derlotuximab biotin, apolizumab, onartuzumab, bersanlimab, enlimomabpegol, rontalizumab, sifalimumab, talizumab, ganitumab, istiratumab, robatumumab, teprotumumab, figitumumab, ganitumab, istiratumab, robatumumab, teprotumumab, cixutumumab, dalotuzumab, xentuzumab, dusigitumab, canakinumab, ustekinumab, ustekinumab, ustekinumab, briakinumab, briakinumab, abrezekimab, lebrikizumab, romilkimab, TNX-650, tralokinumab, anrukinzumab, brodalumab, ixekizumab, netakimab, perakizumab, secukinumab, vunakizumab, afascvikumab, afascvikumab, bimekizumab, bimekizumab, remtolumab, bermekimab, lutikizumab, lutikizumab, gevokizumab, cergutuzumab amunaleukin, fletikumab, fezakinumab, brazikumab, guselkumab, mirikizumab, tildrakizumab, risankizumab, flotetuzumab, nemolizumab, pascolizumab, dupilumab, mepolizumab, reslizumab, clazakizumab, elsilimomab, olokizumab, sarilumab, siltuximab, sirukumab, vobarilizumab, tocilizumab, SA237, satralizumab, enokizumab, prezalizumab, natalizumab, abrilumab, abrilumab, vedolizumab, volociximab, tadocizumab, etaracizumab, etrolizumab, spesolimab, vatelizumab, erlizumab, lirilumab, relatlimab, cBR96-doxorubicinimmunoconjugate, odulimomab, efalizumab, ladiratuzumab vedotin, simtuzumab, samrotamab vedotin, aselizumab, lupartumab amadotin, imalumab, carlumab, imaprelimab, amatuximab, amatuximab, anetumab ravtansine, narnatumab, clivatuzumab tetraxetan, pemtumomab, gatipotuzumab, ensituximab, lemalesomab, sulesomab, enfortumab vedotin, racotumomab, monalizumab, brontictuzumab, tarextumab, vesencumab, oxelumab, gilvetmab, tislelizumab, dostarlimab, BCD-100, nivolumab, PDR001, pembrolizumab, pidilizumab, retifanlimab, spartalizumab, sintilimab, cemiplimab, olaratumab, tovetumab, rinucumab, atezolizumab, avelumab, durvalumab, lifastuzumab vedotin, bavituximab, acapatamab, capromab, rosopatamab, nezastomig, pasotuxizumab, pelgifatamab, voxalatamab, cofetuzumab pelidotin, denosumab, rosmantuzumab, cirmtuzumab, atinumab, indatuximab ravtansine, elotuzumab, sirtratumab vedotin, sonepcizumab, vandortuzumab vedotin, minretumomab, satumomab pendetide, maslimomab, ontuxizumab, tenatumomab, fresolimumab, metelimumab, lerdelimumab, tezepelumab, etigilimab, tiragotumab, placulumab, prezalumab, infliximab, nerelimomab, ozoralizumab, adalimumab, afelimomab, certolizumab pegol, golimumab, mapatumumab, conatumumab, lexatumumab, tigatuzumab, sacituzumab govitecan, votumumab, pogalizumab, letolizumab, pankomab, anatumomab mafenatox, enavatuzumab, flanvotumab, brolucizumab, ranibizumab, varisacumab, bevacizumab, faricimab, icrucumab, alacizumab pegol, ramucirumab, pritumumab, and onvatilimab;
[7275] VL2 comprises a VL of an antibody selected from the group consisting of losatuxizumab vedotin, utomilumab, urelumab, oleclumab, naptumomab estafenatox, ascrinvacumab, pintumomab, tacatuzumab tetraxetan, nesvacumab, vanucizumab, timolumab, vapaliximab, vepalimomab, enapotamab vedotin, ianalumab, belimumab, tabalumab, tibulizumab, belantamab mafodotin, teclistamab, teclistamab, detumomab, nacolomab tafenatox, eculizumab, lendalizumab, pexelizumab, pozelimab, ravulizumab, tesidolumab, vilobelimab, abagovomab, igovomab, oregovomab, sofituzumab vedotin, cantuzumab mertansine, cantuzuma bravtansine, girentuximab, altumomab pentetate, arcitumomab, besilesomab, bertilimumab, plozalizumab, mogamulizumab, leronlimab, PRO140, rovelizumab, rovelizumab, talacotuzumab, benralizumab, tavolimab, vonlerolizumab, gavilimomab, ziralimumab, fanolesomab, ipilimumab, ruplizumab, toralizumab, dapirolizumab pegol, toralizumab, dapirolizumab pegol, ruplizumab, blinatumomab, inebilizumab, loncastuximab tesirine, SGN-CD19A, tafasitamab, taplitumomab paptox, XMAB-5574, Budoprutug, Obexelimab, duvortuxizumab, englumafusp alfa, Emfizatamab, zeripatamig, siplizumab, blontuvetmab, FBTA05, ibritumomab tiuxetan, obinutuzumab, ocaratuzumab, ocrelizumab, ofatumumab, rituximab, tositumomab, ublituximab, veltuzumab, divozilimab, eramkafusp alfa, ripertamab, zuberitamab, glofitamab, nofetumomab merpentan, samalizumab, imvotamab, odronextamab, plamotamab, bectumomab, inotuzumab ozogamicin, moxetumomab pasudotox, pinatuzumab vedotin, gomiliximab, lumiliximab, inolimomab, inolimomab, daclizumab, camidanluma btesirine, basiliximab, varlilumab, omburtamab, enoblituzumab, vopratelimab, lulizumabpegol, TGN1412, muromonab-CD3, otelixizumab, teplizumab, visilizumab, epcoritamab, epcoritamab, brentuximab vedotin, iratumumab, azintuxizumab vedotin, gemtuzumab ozogamicin, lintuzumab, vadastuximab talirine, naratuximab emtansine, otlertuzumab, lilotomab satetraxetan, tetulomab, daratumumab, isatuximab, foralumab, mosunetuzumab, mosunetuzumab, cedelizumab, ibalizumab, keliximab, priliximab, tregalizumab, zanolimumab, bleselumab, iscalimab, lucatumumab, ravagalimab, selicrelumab, teneliximab, vanalimab, abciximab, bivatuzumab, iomab-B, telimomab aritox, zolimomab aritox, abituzumab, intetumumab, alemtuzumab, tamtuvetmab, lorvotuzumab mertansine, itolizumab, cusatuzumab, vorsetuzumab mafodotin, milatuzumab, iladatuzumab vedotin, polatuzumab vedotin, galiximab, cibisatamab, zolbetuximab, naxitamab, tisotumab vedotin, olendalizumab, pamrevlumab, lacnotuzumab, cabiralizumab, emactuzumab, axatilimab, gimsilumab, lenzilumab, namilumab, tremelimumab, ulocuplumab, tepoditamab, rovalpituzumab tesirine, tarlatamab, demcizumab, navicixizumab, drozitumab, parsatuzumab, depatuxizumab mafodotin, modotuximab, carotuximab, adecatumumab, adecatumumab, oportuzumab monatox, solitomab, tucotuzumab celmoleukin, edrecolomab, catumaxomab, ifabotuzumab, fibatuzumab, zalutumumab, panitumumab, cetuximab, futuximab, imgatuzumab, laprituximab emtansine, matuzumab, necitumumab, nimotuzumab, tomuzotuximab, amivantamab, amivantamab, epitumomab cituxetan, sontuzumab, duligotuzumab, elgemtumab, lumretuzumab, patritumab, seribantumab, zenocutuzumab, sibrotuzumab, burosumab, aprutumab ixadotin, radretumab, pasotuxizumab, farletuzumab, mirvetuximab soravtansine, vantictumab, TRBS07, 3F8, dinutuximab, dinutuximab beta, ecromeximab, mitumomab, andecaliximab, capromab, codrituzumab, glembatumumab vedotin, talquetamab, talquetamab, trevogrumab, indusatumab vedotin, ficlatuzumab, rilotumumab, zatuximab, pentuzimab, pentuzimab, margetuximab, timigutuzumab, trastuzumab, trastuzumab duocarmazine, trastuzumab emtansine, gancotamab, pertuzumab, ertumaxomab, emibetuzumab, telisotuzumab, telisotuzumab vedotin, derlotuximab biotin, apolizumab, onartuzumab, bersanlimab, enlimomabpegol, rontalizumab, sifalimumab, talizumab, ganitumab, istiratumab, robatumumab, teprotumumab, figitumumab, ganitumab, istiratumab, robatumumab, teprotumumab, cixutumumab, dalotuzumab, xentuzumab, dusigitumab, canakinumab, ustekinumab, ustekinumab, ustekinumab, briakinumab, briakinumab, abrezekimab, lebrikizumab, romilkimab, TNX-650, tralokinumab, anrukinzumab, brodalumab, ixekizumab, netakimab, perakizumab, secukinumab, vunakizumab, afasevikumab, afasevikumab, bimekizumab, bimekizumab, remtolumab, bermekimab, lutikizumab, lutikizumab, gevokizumab, cergutuzumab amunaleukin, fletikumab, fezakinumab, brazikumab, guselkumab, mirikizumab, tildrakizumab, risankizumab, flotetuzumab, nemolizumab, pascolizumab, dupilumab, mepolizumab, reslizumab, clazakizumab, elsilimomab, olokizumab, sarilumab, siltuximab, sirukumab, vobarilizumab, tocilizumab, SA237, satralizumab, enokizumab, prezalizumab, natalizumab, abrilumab, abrilumab, vedolizumab, volociximab, tadocizumab, etaracizumab, etrolizumab, spesolimab, vatelizumab, erlizumab, lirilumab, relatlimab, cBR96-doxorubicinimmunoconjugate, odulimomab, efalizumab, ladiratuzumab vedotin, simtuzumab, samrotamab vedotin, aselizumab, lupartumab amadotin, imalumab, carlumab, imaprelimab, amatuximab, amatuximab, anetumab ravtansine, narnatumab, clivatuzumab tetraxetan, pemtumomab, gatipotuzumab, ensituximab, lemalesomab, sulesomab, enfortumab vedotin, racotumomab, monalizumab, brontictuzumab, tarextumab, vesencumab, oxelumab, gilvetmab, tislelizumab, dostarlimab, BCD-100, nivolumab, PDR001, pembrolizumab, pidilizumab, retifanlimab, spartalizumab, sintilimab, cemiplimab, olaratumab, tovetumab, rinucumab, atezolizumab, avelumab, durvalumab, lifastuzumab vedotin, bavituximab, acapatamab, capromab, rosopatamab, nezastomig, pasotuxizumab, pelgifatamab, voxalatamab, cofetuzumab pelidotin, denosumab, rosmantuzumab, cirmtuzumab, atinumab, indatuximab ravtansine, elotuzumab, sirtratumab vedotin, sonepcizumab, vandortuzumab vedotin, minretumomab, satumomab pendetide, maslimomab, ontuxizumab, tenatumomab, fresolimumab, metelimumab, lerdelimumab, tezepelumab, etigilimab, tiragotumab, placulumab, prezalumab, infliximab, nerelimomab, ozoralizumab, adalimumab, afelimomab, certolizumab pegol, golimumab, mapatumumab, conatumumab, lexatumumab, tigatuzumab, sacituzumab govitecan, votumumab, pogalizumab, letolizumab, pankomab, anatumomab mafenatox, enavatuzumab, flanvotumab, brolucizumab, ranibizumab, varisacumab, bevacizumab, faricimab, icrucumab, alacizumab pegol, ramucirumab, pritumumab, and onvatilimab;
[7276] VH1 comprises a VH of an antibody selected from the group consisting of losatuxizumab vedotin, utomilumab, urelumab, oleclumab, naptumomab estafenatox, ascrinvacumab, pintumomab, tacatuzumab tetraxetan, nesvacumab, vanucizumab, timolumab, vapaliximab, vepalimomab, enapotamab vedotin, ianalumab, belimumab, tabalumab, tibulizumab, belantamab mafodotin, teclistamab, teclistamab, detumomab, nacolomab tafenatox, eculizumab, lendalizumab, pexelizumab, pozelimab, ravulizumab, tesidolumab, vilobelimab, abagovomab, igovomab, oregovomab, sofituzumab vedotin, cantuzumab mertansine, cantuzuma bravtansine, girentuximab, altumomab pentetate, arcitumomab, besilesomab, bertilimumab, plozalizumab, mogamulizumab, leronlimab, PRO140, rovelizumab, rovelizumab, talacotuzumab, benralizumab, tavolimab, vonlerolizumab, gavilimomab, ziralimumab, fanolesomab, ipilimumab, ruplizumab, toralizumab, dapirolizumab pegol, toralizumab, dapirolizumab pegol, ruplizumab, blinatumomab, inebilizumab, loncastuximab tesirine, SGN-CD19A, tafasitamab, taplitumomab paptox, XMAB-5574, Budoprutug, Obexelimab, duvortuxizumab, englumafusp alfa, Emfizatamab, zeripatamig, siplizumab, blontuvetmab, FBTA05, ibritumomab tiuxetan, obinutuzumab, ocaratuzumab, ocrelizumab, ofatumumab, rituximab, tositumomab, ublituximab, veltuzumab, divozilimab, eramkafusp alfa, ripertamab, zuberitamab, glofitamab, nofetumomab merpentan, samalizumab, imvotamab, odronextamab, plamotamab, bectumomab, inotuzumab ozogamicin, moxetumomab pasudotox, pinatuzumab vedotin, gomiliximab, lumiliximab, inolimomab, inolimomab, daclizumab, camidanluma btesirine, basiliximab, varlilumab, omburtamab, enoblituzumab, vopratelimab, lulizumabpegol, TGN1412, muromonab-CD3, otelixizumab, teplizumab, visilizumab, epcoritamab, epcoritamab, brentuximab vedotin, iratumumab, azintuxizumab vedotin, gemtuzumab ozogamicin, lintuzumab, vadastuximab talirine, naratuximab emtansine, otlertuzumab, lilotomab satetraxetan, tetulomab, daratumumab, isatuximab, foralumab, mosunetuzumab, mosunetuzumab, cedelizumab, ibalizumab, keliximab, priliximab, tregalizumab, zanolimumab, bleselumab, iscalimab, lucatumumab, ravagalimab, selicrelumab, teneliximab, vanalimab, abciximab, bivatuzumab, iomab-B, telimomab aritox, zolimomab aritox, abituzumab, intetumumab, alemtuzumab, tamtuvetmab, lorvotuzumab mertansine, itolizumab, cusatuzumab, vorsetuzumab mafodotin, milatuzumab, iladatuzumab vedotin, polatuzumab vedotin, galiximab, cibisatamab, zolbetuximab, naxitamab, tisotumab vedotin, olendalizumab, pamrevlumab, lacnotuzumab, cabiralizumab, emactuzumab, axatilimab, gimsilumab, lenzilumab, namilumab, tremelimumab, ulocuplumab, tepoditamab, rovalpituzumab tesirine, tarlatamab, demcizumab, navicixizumab, drozitumab, parsatuzumab, depatuxizumab mafodotin, modotuximab, carotuximab, adecatumumab, adecatumumab, oportuzumab monatox, solitomab, tucotuzumab celmoleukin, edrecolomab, catumaxomab, ifabotuzumab, fibatuzumab, zalutumumab, panitumumab, cetuximab, futuximab, imgatuzumab, laprituximab emtansine, matuzumab, necitumumab, nimotuzumab, tomuzotuximab, amivantamab, amivantamab, epitumomab cituxetan, sontuzumab, duligotuzumab, elgemtumab, lumretuzumab, patritumab, seribantumab, zenocutuzumab, sibrotuzumab, burosumab, aprutumab ixadotin, radretumab, pasotuxizumab, farletuzumab, mirvetuximab soravtansine, vantictumab, TRBS07, 3F8, dinutuximab, dinutuximab beta, ecromeximab, mitumomab, andecaliximab, capromab, codrituzumab, glembatumumab vedotin, talquetamab, talquetamab, trevogrumab, indusatumab vedotin, ficlatuzumab, rilotumumab, zatuximab, pentuzimab, pentuzimab, margetuximab, timigutuzumab, trastuzumab, trastuzumab duocarmazine, trastuzumab emtansine, gancotamab, pertuzumab, ertumaxomab, emibetuzumab, telisotuzumab, telisotuzumab vedotin, derlotuximab biotin, apolizumab, onartuzumab, bersanlimab, enlimomabpegol, rontalizumab, sifalimumab, talizumab, ganitumab, istiratumab, robatumumab, teprotumumab, figitumumab, ganitumab, istiratumab, robatumumab, teprotumumab, cixutumumab, dalotuzumab, xentuzumab, dusigitumab, canakinumab, ustekinumab, ustekinumab, ustekinumab, briakinumab, briakinumab, abrezekimab, lebrikizumab, romilkimab, TNX-650, tralokinumab, anrukinzumab, brodalumab, ixekizumab, netakimab, perakizumab, secukinumab, vunakizumab, afasevikumab, afascvikumab, bimekizumab, bimekizumab, remtolumab, bermekimab, lutikizumab, lutikizumab, gevokizumab, cergutuzumab amunaleukin, fletikumab, fezakinumab, brazikumab, guselkumab, mirikizumab, tildrakizumab, risankizumab, flotetuzumab, nemolizumab, pascolizumab, dupilumab, mepolizumab, reslizumab, clazakizumab, elsilimomab, olokizumab, sarilumab, siltuximab, sirukumab, vobarilizumab, tocilizumab, SA237, satralizumab, enokizumab, prezalizumab, natalizumab, abrilumab, abrilumab, vedolizumab, volociximab, tadocizumab, etaracizumab, etrolizumab, spesolimab, vatelizumab, erlizumab, lirilumab, relatlimab, cBR96-doxorubicinimmunoconjugate, odulimomab, efalizumab, ladiratuzumab vedotin, simtuzumab, samrotamab vedotin, aselizumab, lupartumab amadotin, imalumab, carlumab, imaprelimab, amatuximab, amatuximab, anetumab ravtansine, narnatumab, clivatuzumab tetraxetan, pemtumomab, gatipotuzumab, ensituximab, lemalesomab, sulesomab, enfortumab vedotin, racotumomab, monalizumab, brontictuzumab, tarextumab, vesencumab, oxelumab, gilvetmab, tislelizumab, dostarlimab, BCD-100, nivolumab, PDR001, pembrolizumab, pidilizumab, retifanlimab, spartalizumab, sintilimab, cemiplimab, olaratumab, tovetumab, rinucumab, atezolizumab, avelumab, durvalumab, lifastuzumab vedotin, bavituximab, acapatamab, capromab, rosopatamab, nezastomig, pasotuxizumab, pelgifatamab, voxalatamab, cofetuzumab pelidotin, denosumab, rosmantuzumab, cirmtuzumab, atinumab, indatuximab ravtansine, elotuzumab, sirtratumab vedotin, sonepcizumab, vandortuzumab vedotin, minretumomab, satumomab pendetide, maslimomab, ontuxizumab, tenatumomab, fresolimumab, metelimumab, lerdelimumab, tezepelumab, etigilimab, tiragotumab, placulumab, prezalumab, infliximab, nerelimomab, ozoralizumab, adalimumab, afelimomab, certolizumab pegol, golimumab, mapatumumab, conatumumab, lexatumumab, tigatuzumab, sacituzumab govitecan, votumumab, pogalizumab, letolizumab, pankomab, anatumomab mafenatox, enavatuzumab, flanvotumab, brolucizumab, ranibizumab, varisacumab, bevacizumab, faricimab, icrucumab, alacizumab pegol, ramucirumab, pritumumab, and onvatilimab; and/or
[7277] VH2 comprises a VH of an antibody selected from the group consisting of losatuxizumab vedotin, utomilumab, urelumab, oleclumab, naptumomab estafenatox, ascrinvacumab, pintumomab, tacatuzumab tetraxetan, nesvacumab, vanucizumab, timolumab, vapaliximab, vepalimomab, enapotamab vedotin, ianalumab, belimumab, tabalumab, tibulizumab, belantamab mafodotin, teclistamab, teclistamab, detumomab, nacolomab tafenatox, eculizumab, lendalizumab, pexelizumab, pozelimab, ravulizumab, tesidolumab, vilobelimab, abagovomab, igovomab, oregovomab, sofituzumab vedotin, cantuzumab mertansine, cantuzuma bravtansine, girentuximab, altumomab pentetate, arcitumomab, besilesomab, bertilimumab, plozalizumab, mogamulizumab, leronlimab, PRO140, rovelizumab, rovelizumab, talacotuzumab, benralizumab, tavolimab, vonlerolizumab, gavilimomab, ziralimumab, fanolesomab, ipilimumab, ruplizumab, toralizumab, dapirolizumab pegol, toralizumab, dapirolizumab pegol, ruplizumab, blinatumomab, inebilizumab, loncastuximab tesirine, SGN-CD19A, tafasitamab, taplitumomab paptox, XMAB-5574, Budoprutug, Obexelimab, duvortuxizumab, englumafusp alfa, Emfizatamab, zeripatamig, siplizumab, blontuvetmab, FBTA05, ibritumomab tiuxetan, obinutuzumab, ocaratuzumab, ocrelizumab, ofatumumab, rituximab, tositumomab, ublituximab, veltuzumab, divozilimab, eramkafusp alfa, ripertamab, zuberitamab, glofitamab, nofetumomab merpentan, samalizumab, imvotamab, odronextamab, plamotamab, bectumomab, inotuzumab ozogamicin, moxetumomab pasudotox, pinatuzumab vedotin, gomiliximab, lumiliximab, inolimomab, inolimomab, daclizumab, camidanluma btesirine, basiliximab, varlilumab, omburtamab, enoblituzumab, vopratelimab, lulizumabpegol, TGN1412, muromonab-CD3, otelixizumab, teplizumab, visilizumab, epcoritamab, epcoritamab, brentuximab vedotin, iratumumab, azintuxizumab vedotin, gemtuzumab ozogamicin, lintuzumab, vadastuximab talirine, naratuximab emtansine, otlertuzumab, lilotomab satetraxetan, tetulomab, daratumumab, isatuximab, foralumab, mosunetuzumab, mosunetuzumab, cedelizumab, ibalizumab, keliximab, priliximab, tregalizumab, zanolimumab, bleselumab, iscalimab, lucatumumab, ravagalimab, selicrelumab, teneliximab, vanalimab, abciximab, bivatuzumab, iomab-B, telimomab aritox, zolimomab aritox, abituzumab, intetumumab, alemtuzumab, tamtuvetmab, lorvotuzumab mertansine, itolizumab, cusatuzumab, vorsetuzumab mafodotin, milatuzumab, iladatuzumab vedotin, polatuzumab vedotin, galiximab, cibisatamab, zolbetuximab, naxitamab, tisotumab vedotin, olendalizumab, pamrevlumab, lacnotuzumab, cabiralizumab, emactuzumab, axatilimab, gimsilumab, lenzilumab, namilumab, tremelimumab, ulocuplumab, tepoditamab, rovalpituzumab tesirine, tarlatamab, demcizumab, navicixizumab, drozitumab, parsatuzumab, depatuxizumab mafodotin, modotuximab, carotuximab, adecatumumab, adecatumumab, oportuzumab monatox, solitomab, tucotuzumab celmoleukin, edrecolomab, catumaxomab, ifabotuzumab, fibatuzumab, zalutumumab, panitumumab, cetuximab, futuximab, imgatuzumab, laprituximab emtansine, matuzumab, necitumumab, nimotuzumab, tomuzotuximab, amivantamab, amivantamab, epitumomab cituxetan, sontuzumab, duligotuzumab, elgemtumab, lumretuzumab, patritumab, seribantumab, zenocutuzumab, sibrotuzumab, burosumab, aprutumab ixadotin, radretumab, pasotuxizumab, farletuzumab, mirvetuximab soravtansine, vantictumab, TRBS07, 3F8, dinutuximab, dinutuximab beta, ecromeximab, mitumomab, andecaliximab, capromab, codrituzumab, glembatumumab vedotin, talquetamab, talquetamab, trevogrumab, indusatumab vedotin, ficlatuzumab, rilotumumab, zatuximab, pentuzimab, pentuzimab, margetuximab, timigutuzumab, trastuzumab, trastuzumab duocarmazine, trastuzumab emtansine, gancotamab, pertuzumab, ertumaxomab, emibetuzumab, telisotuzumab, telisotuzumab vedotin, derlotuximab biotin, apolizumab, onartuzumab, bersanlimab, enlimomabpegol, rontalizumab, sifalimumab, talizumab, ganitumab, istiratumab, robatumumab, teprotumumab, figitumumab, ganitumab, istiratumab, robatumumab, teprotumumab, cixutumumab, dalotuzumab, xentuzumab, dusigitumab, canakinumab, ustekinumab, ustekinumab, ustekinumab, briakinumab, briakinumab, abrezekimab, lebrikizumab, romilkimab, TNX-650, tralokinumab, anrukinzumab, brodalumab, ixekizumab, netakimab, perakizumab, secukinumab, vunakizumab, afasevikumab, afasevikumab, bimekizumab, bimekizumab, remtolumab, bermekimab, lutikizumab, lutikizumab, gevokizumab, cergutuzumab amunaleukin, fletikumab, fezakinumab, brazikumab, guselkumab, mirikizumab, tildrakizumab, risankizumab, flotetuzumab, nemolizumab, pascolizumab, dupilumab, mepolizumab, reslizumab, clazakizumab, elsilimomab, olokizumab, sarilumab, siltuximab, sirukumab, vobarilizumab, tocilizumab, SA237, satralizumab, enokizumab, prezalizumab, natalizumab, abrilumab, abrilumab, vedolizumab, volociximab, tadocizumab, etaracizumab, etrolizumab, spesolimab, vatelizumab, erlizumab, lirilumab, relatlimab, cBR96-doxorubicinimmunoconjugate, odulimomab, efalizumab, ladiratuzumab vedotin, simtuzumab, samrotamab vedotin, aselizumab, lupartumab amadotin, imalumab, carlumab, imaprelimab, amatuximab, amatuximab, anetumab ravtansine, narnatumab, clivatuzumab tetraxetan, pemtumomab, gatipotuzumab, ensituximab, lemalesomab, sulesomab, enfortumab vedotin, racotumomab, monalizumab, brontictuzumab, tarextumab, vesencumab, oxelumab, gilvetmab, tislelizumab, dostarlimab, BCD-100, nivolumab, PDR001, pembrolizumab, pidilizumab, retifanlimab, spartalizumab, sintilimab, cemiplimab, olaratumab, tovetumab, rinucumab, atezolizumab, avelumab, durvalumab, lifastuzumab vedotin, bavituximab, acapatamab, capromab, rosopatamab, nezastomig, pasotuxizumab, pelgifatamab, voxalatamab, cofetuzumab pelidotin, denosumab, rosmantuzumab, cirmtuzumab, atinumab, indatuximab ravtansine, elotuzumab, sirtratumab vedotin, sonepcizumab, vandortuzumab vedotin, minretumomab, satumomab pendetide, maslimomab, ontuxizumab, tenatumomab, fresolimumab, metelimumab, lerdelimumab, tezepelumab, etigilimab, tiragotumab, placulumab, prezalumab, infliximab, nerelimomab, ozoralizumab, adalimumab, afelimomab, certolizumab pegol, golimumab, mapatumumab, conatumumab, lexatumumab, tigatuzumab, sacituzumab govitecan, votumumab, pogalizumab, letolizumab, pankomab, anatumomab mafenatox, enavatuzumab, flanvotumab, brolucizumab, ranibizumab, varisacumab, bevacizumab, faricimab, icrucumab, alacizumab pegol, ramucirumab, pritumumab, and onvatilimab; or
[7278] (iii)
[7279] VL1 comprises (i) a complementarity determining region (CDR) 1 having an amino acid sequence that is at least 65%, at least 70%, at least 75%, at least 80%, at least 85%, at least 90%, at least 95%, at least 99%, or 100% identical to any one of SEQ ID NOs: 1096, 1103, 1110, 1120, 1127, 1134, 1141, 1148, 1155, 1162, 1169, 1174, 1181, 1188, 1199, 1211, 1221, 1228, 1235, 1247, 1254, 1261, 1266, 1271, 1278, 1285, 1292, 1299, 1306, 1313, 1319, 1326, 1339, 1352, 1359, 1366, 1373, 1382, 1394, 1401, 1408, 1414, 1421, 1428, 1441, 1448, 1455, 1461, 1468, 1475, 1488, 1495, 1508, 1519, 1526, 1531, 1538, 1544, 1556, 1568, 1574, 1581, 1594, 1601, 1608, 1615, 1622, 1629, 1636, 1643, 1650, 1657, 1672, 1679, 1689, 1697, 1708, 1715, 1718, 1723, 1727, 1738, 1743, 1752, 1761, 1763, 1769, 1776, and 1786; (ii) a CDR2 having an amino acid sequence that is at least 65%, at least 70%, at least 75%, at least 80%, at least 85%, at least 90%, at least 95%, at least 99%, or 100% identical to any one of SEQ ID NOs: 1200, 1212, 1680, 1690, 1698, 1709, 1728, 1739, 1744, 1753, 1770, and 1777; or at least 65%, at least 70%, at least 75%, at least 80%, at least 85%, at least 90%, at least 95%, at least 99%, or 100% identical to any one of amino acid sequences AAS, APS, AT, ATS, DAS, DDG, DDS, DT, DTS, DVS, EAS, FTS, GAF, GAN, GAS, GAT, GIS, GKN, GNS, HTS, KVS, LAS, LGS, LVS, NAK, NTN, QMS, RMS, RTS, SAS, TTS, WAS, YAS, YAT, YGS, YRS, and YTS; and (iii) a CDR3 having an amino acid sequence that is at least 65%, at least 70%, at least 75%, at least 80%, at least 85%, at least 90%, at least 95%, at least 99%, or 100% identical to any one of SEQ ID NOs: 1097, 1104, 1111, 1121, 1128, 1135, 1142, 1149, 1156, 1163, 1170, 1175, 1182, 1189, 1195, 1201, 1207, 1213, 1222, 1229, 1236, 2009, 1248, 1255, 1262, 1267, 1272, 1279, 1286, 1293, 1300, 1307, 1320, 1327, 1333, 1340, 1346, 1353, 1360, 1367, 1374, 1383, 1389, 1395, 1402, 1409, 1415, 1422, 1429, 1435, 1442, 1449, 1456, 1462, 1469, 1476, 1482, 1489, 1496, 1502, 1509, 1513, 1520, 1532, 1539, 1545, 1557, 1562, 1569, 1575, 1582, 1588, 1595, 1602, 1609, 1616, 1623, 1630, 1637, 1644, 1651, 1658, 1663, 1673, 1681, 1691, 1699, 1710, 1729, 1735, 1745, 1751, 1754, 1778, 1787, and 1976;
[7280] VL2 comprises (i) a complementarity determining region (CDR) 1 having an amino acid sequence that is at least 65%, at least 70%, at least 75%, at least 80%, at least 85%, at least 90%, at least 95%, at least 99%, or 100% identical to any one of SEQ ID NOs: 1096, 1103, 1110, 1120, 1127, 1134, 1141, 1148, 1155, 1162, 1169, 1174, 1181, 1188, 1199, 1211, 1221, 1228, 1235, 1247, 1254, 1261, 1266, 1271, 1278, 1285, 1292, 1299, 1306, 1313, 1319, 1326, 1339, 1352, 1359, 1366, 1373, 1382, 1394, 1401, 1408, 1414, 1421, 1428, 1441, 1448, 1455, 1461, 1468, 1475, 1488, 1495, 1508, 1519, 1526, 1531, 1538, 1544, 1556, 1568, 1574, 1581, 1594, 1601, 1608, 1615, 1622, 1629, 1636, 1643, 1650, 1657, 1672, 1679, 1689, 1697, 1708, 1715, 1718, 1723, 1727, 1738, 1743, 1752, 1761, 1763, 1769, 1776, and 1786; (ii) a CDR2 having an amino acid sequence that is at least 65%, at least 70%, at least 75%, at least 80%, at least 85%, at least 90%, at least 95%, at least 99%, or 100% identical to any one of SEQ ID NOs: 1200, 1212, 1680, 1690, 1698, 1709, 1728, 1739, 1744, 1753, 1770, and 1777; or at least 65%, at least 70%, at least 75%, at least 80%, at least 85%, at least 90%, at least 95%, at least 99%, or 100% identical to any one of amino acid sequences AAS, APS, AT, ATS, DAS, DDG, DDS, DT, DTS, DVS, EAS, FTS, GAF, GAN, GAS, GAT, GIS, GKN, GNS, HTS, KVS, LAS, LGS, LVS, NAK, NTN, QMS, RMS, RTS, SAS, TTS, WAS, YAS, YAT, YGS, YRS, and YTS; and (iii) a CDR3 having an amino acid sequence that is at least 65%, at least 70%, at least 75%, at least 80%, at least 85%, at least 90%, at least 95%, at least 99%, or 100% identical to any one of SEQ ID NOs: 1097, 1104, 1111, 1121, 1128, 1135, 1142, 1149, 1156, 1163, 1170, 1175, 1182, 1189, 1195, 1201, 1207, 1213, 1222, 1229, 1236, 2009, 1248, 1255, 1262, 1267, 1272, 1279, 1286, 1293, 1300, 1307, 1320, 1327, 1333, 1340, 1346, 1353, 1360, 1367, 1374, 1383, 1389, 1395, 1402, 1409, 1415, 1422, 1429, 1435, 1442, 1449, 1456, 1462, 1469, 1476, 1482, 1489, 1496, 1502, 1509, 1513, 1520, 1532, 1539, 1545, 1557, 1562, 1569, 1575, 1582, 1588, 1595, 1602, 1609, 1616, 1623, 1630, 1637, 1644, 1651, 1658, 1663, 1673, 1681, 1691, 1699, 1710, 1729, 1735, 1745, 1751, 1754, 1778, 1787, and 1976;
[7281] VH1 comprises (i) a complementarity determining region (CDR) 1 having an amino acid sequence that is at least 65%, at least 70%, at least 75%, at least 80%, at least 85%, at least 90%, at least 95%, at least 99%, or 100% identical to any one of SEQ ID NOs: 1099, 1106, 1113, 1117, 1123, 1130, 1137, 1144, 1151, 1158, 1165, 1177, 1184, 1191, 1203, 1215, 1224, 1231, 1238, 1243, 1250, 1257, 1264, 1274, 1281, 1288, 1295, 1302, 1309, 1315, 1322, 1329, 1335, 1342, 1348, 1355, 1362, 1369, 1376, 1385, 1397, 1404, 1417, 1424, 1431, 1437, 1444, 1451, 1458, 1464, 1471, 1478, 1484, 1491, 1498, 1504, 1511, 1515, 1522, 1534, 1547, 1552, 1564, 1577, 1584, 1590, 1597, 1604, 1611, 1618, 1625, 1632, 1639, 1646, 1653, 1660, 1665, 1675, 1683, 1693, 1701, 1705, 1716, 1719, 1731, 1736, 1747, 1756, 1772, 1780, and 1789; (ii) a CDR2 having an amino acid sequence that is at least 65%, at least 70%, at least 75%, at least 80%, at least 85%, at least 90%, at least 95%, at least 99%, or 100% identical to any one of SEQ ID NOs: 1100, 1107, 1114, 1118, 1124, 1131, 1138, 1145, 1152, 1159, 1166, 1178, 1185, 1192, 1204, 1216, 1225, 1232, 1239, 1244, 1251, 1258, 1275, 1282, 1289, 1296, 1303, 1310, 1316, 1323, 1330, 1336, 1343, 1349, 1356, 1363, 1370, 1377, 1386, 1391, 1398, 1405, 1411, 1418, 1425, 1432, 1438, 1445, 1452, 1465, 1472, 1479, 1485, 1492, 1499, 1505, 1516, 1523, 1528, 1535, 1541, 1548, 1553, 1559, 1565, 1571, 1578, 1585, 1591, 1598, 1605, 1612, 1619, 1626, 1633, 1640, 1647, 1654, 1666, 1676, 1684, 1687, 1694, 1702, 1706, 1712, 1717, 1720, 1725, 1732, 1737, 1741, 1748, 1757, 1767, 1773, 1781, and 1790; and (iii) a CDR3 having an amino acid sequence that is at least 65%, at least 70%, at least 75%, at least 80%, at least 85%, at least 90%, at least 95%, at least 99%, or 100% identical to any one of SEQ ID NOs: 1101, 1108, 1115, 1125, 1132, 1139, 1146, 1153, 1160, 1167, 1172, 1179, 1186, 1193, 1197, 1205, 1209, 1217, 1226, 1233, 1240, 1245, 1252, 1259, 1269, 1276, 1283, 1290, 1297, 1304, 1311, 1317, 1324, 1331, 1337, 1344, 1350, 1357, 1364, 1371, 1378, 1387, 1392, 1399, 1406, 1412, 1419, 1426, 1433, 1439, 1446, 1453, 1459, 1466, 1473, 1480, 1486, 1493, 1500, 1506, 1517, 1524, 1529, 1536, 1542, 1549, 1554, 1560, 1566, 1572, 1579, 1586, 1592, 1599, 1606, 1613, 1620, 1627, 1634, 1641, 1648, 1655, 1661, 1667, 1670, 1677, 1685, 1688, 1695, 1703, 1707, 1713, 1733, 1749, 1758, 1762, 1774, 1782, 1791, and 1975; and/or
[7282] VH2 comprises (i) a complementarity determining region (CDR) 1 having an amino acid sequence that is at least 65%, at least 70%, at least 75%, at least 80%, at least 85%, at least 90%, at least 95%, at least 99%, or 100% identical to any one of SEQ ID NOs: 1099, 1106, 1113, 1117, 1123, 1130, 1137, 1144, 1151, 1158, 1165, 1177, 1184, 1191, 1203, 1215, 1224, 1231, 1238, 1243, 1250, 1257, 1264, 1274, 1281, 1288, 1295, 1302, 1309, 1315, 1322, 1329, 1335, 1342, 1348, 1355, 1362, 1369, 1376, 1385, 1397, 1404, 1417, 1424, 1431, 1437, 1444, 1451, 1458, 1464, 1471, 1478, 1484, 1491, 1498, 1504, 1511, 1515, 1522, 1534, 1547, 1552, 1564, 1577, 1584, 1590, 1597, 1604, 1611, 1618, 1625, 1632, 1639, 1646, 1653, 1660, 1665, 1675, 1683, 1693, 1701, 1705, 1716, 1719, 1731, 1736, 1747, 1756, 1772, 1780, and 1789; (ii) a CDR2 having an amino acid sequence that is at least 65%, at least 70%, at least 75%, at least 80%, at least 85%, at least 90%, at least 95%, at least 99%, or 100% identical to any one of SEQ ID NOs: 1100, 1107, 1114, 1118, 1124, 1131, 1138, 1145, 1152, 1159, 1166, 1178, 1185, 1192, 1204, 1216, 1225, 1232, 1239, 1244, 1251, 1258, 1275, 1282, 1289, 1296, 1303, 1310, 1316, 1323, 1330, 1336, 1343, 1349, 1356, 1363, 1370, 1377, 1386, 1391, 1398, 1405, 1411, 1418, 1425, 1432, 1438, 1445, 1452, 1465, 1472, 1479, 1485, 1492, 1499, 1505, 1516, 1523, 1528, 1535, 1541, 1548, 1553, 1559, 1565, 1571, 1578, 1585, 1591, 1598, 1605, 1612, 1619, 1626, 1633, 1640, 1647, 1654, 1666, 1676, 1684, 1687, 1694, 1702, 1706, 1712, 1717, 1720, 1725, 1732, 1737, 1741, 1748, 1757, 1767, 1773, 1781, and 1790; and (iii) a CDR3 having an amino acid sequence that is at least 65%, at least 70%, at least 75%, at least 80%, at least 85%, at least 90%, at least 95%, at least 99%, or 100% identical to any one of SEQ ID NOs: 1101, 1108, 1115, 1125, 1132, 1139, 1146, 1153, 1160, 1167, 1172, 1179, 1186, 1193, 1197, 1205, 1209, 1217, 1226, 1233, 1240, 1245, 1252, 1259, 1269, 1276, 1283, 1290, 1297, 1304, 1311, 1317, 1324, 1331, 1337, 1344, 1350, 1357, 1364, 1371, 1378, 1387, 1392, 1399, 1406, 1412, 1419, 1426, 1433, 1439, 1446, 1453, 1459, 1466, 1473, 1480, 1486, 1493, 1500, 1506, 1517, 1524, 1529, 1536, 1542, 1549, 1554, 1560, 1566, 1572, 1579, 1586, 1592, 1599, 1606, 1613, 1620, 1627, 1634, 1641, 1648, 1655, 1661, 1667, 1670, 1677, 1685, 1688, 1695, 1703, 1707, 1713, 1733, 1749, 1758, 1762, 1774, 1782, 1791, and 1975; or
[7283] (iv)
[7284] VL1 comprises an amino acid sequence that is at least 65%, at least 70%, at least 75%, at least 80%, at least 85%, at least 90%, at least 95%, at least 99%, or 100% identical to any one of SEQ ID NOs: 1098, 1105, 1112, 1122, 1129, 1136, 1143, 1150, 1157, 1164, 1171, 1176, 1183, 1190, 1196, 1202, 1208, 1214, 1219, 1223, 1230, 1237, 1242, 1249, 1256, 1263, 1268, 1273, 1280, 1287, 1294, 1301, 1308, 1314, 1321, 1328, 1334, 1341, 1347, 1354, 1361, 1368, 1375, 1380, 1384, 1390, 1396, 1403, 1410, 1416, 1423, 1430, 1436, 1443, 1450, 1457, 1463, 1470, 1477, 1483, 1490, 1497, 1503, 1510, 1514, 1521, 1527, 1533, 1540, 1546, 1551, 1558, 1563, 1570, 1576, 1583, 1589, 1596, 1603, 1610, 1617, 1624, 1631, 1638, 1645, 1652, 1659, 1664, 1669, 1674, 1682, 1692, 1700, 1711, 1721, 1724, 1730, 1740, 1746, 1755, 1764, 1766, 1771, 1779, 1784, and 1788;
[7285] VL2 comprises an amino acid sequence that is at least 65%, at least 70%, at least 75%, at least 80%, at least 85%, at least 90%, at least 95%, at least 99%, or 100% identical to any one of SEQ ID NOs: 1098, 1105, 1112, 1122, 1129, 1136, 1143, 1150, 1157, 1164, 1171, 1176, 1183, 1190, 1196, 1202, 1208, 1214, 1219, 1223, 1230, 1237, 1242, 1249, 1256, 1263, 1268, 1273, 1280, 1287, 1294, 1301, 1308, 1314, 1321, 1328, 1334, 1341, 1347, 1354, 1361, 1368, 1375, 1380, 1384, 1390, 1396, 1403, 1410, 1416, 1423, 1430, 1436, 1443, 1450, 1457, 1463, 1470, 1477, 1483, 1490, 1497, 1503, 1510, 1514, 1521, 1527, 1533, 1540, 1546, 1551, 1558, 1563, 1570, 1576, 1583, 1589, 1596, 1603, 1610, 1617, 1624, 1631, 1638, 1645, 1652, 1659, 1664, 1669, 1674, 1682, 1692, 1700, 1711, 1721, 1724, 1730, 1740, 1746, 1755, 1764, 1766, 1771, 1779, 1784, and 1788;
[7286] VH1 comprises an amino acid sequence that is at least 65%, at least 70%, at least 75%, at least 80%, at least 85%, at least 90%, at least 95%, at least 99%, or 100% identical to any one of SEQ ID NOs: 1102, 1109, 1116, 1119, 1126, 1133, 1140, 1147, 1154, 1161, 1168, 1173, 1180, 1187, 1194, 1198, 1206, 1210, 1218, 1220, 1227, 1234, 1241, 1246, 1253, 1260, 1265, 1270, 1277, 1284, 1291, 1298, 1305, 1312, 1318, 1325, 1332, 1338, 1345, 1351, 1358, 1365, 1372, 1379, 1381, 1388, 1393, 1400, 1407, 1413, 1420, 1427, 1434, 1440, 1447, 1454, 1460, 1467, 1474, 1481, 1487, 1494, 1501, 1507, 1512, 1518, 1525, 1530, 1537, 1543, 1550, 1555, 1561, 1567, 1573, 1580, 1587, 1593, 1600, 1607, 1614, 1621, 1628, 1635, 1642, 1649, 1656, 1662, 1668, 1671, 1678, 1686, 1696, 1704, 1714, 1722, 1726, 1734, 1742, 1750, 1759, 1760, 1765, 1768, 1775, 1783, 1785, and 1792; and/or
[7287] VH2 comprises an amino acid sequence that is at least 65%, at least 70%, at least 75%, at least 80%, at least 85%, at least 90%, at least 95%, at least 99%, or 100% identical to any one of SEQ ID NOs: 1102, 1109, 1116, 1119, 1126, 1133, 1140, 1147, 1154, 1161, 1168, 1173, 1180, 1187, 1194, 1198, 1206, 1210, 1218, 1220, 1227, 1234, 1241, 1246, 1253, 1260, 1265, 1270, 1277, 1284, 1291, 1298, 1305, 1312, 1318, 1325, 1332, 1338, 1345, 1351, 1358, 1365, 1372, 1379, 1381, 1388, 1393, 1400, 1407, 1413, 1420, 1427, 1434, 1440, 1447, 1454, 1460, 1467, 1474, 1481, 1487, 1494, 1501, 1507, 1512, 1518, 1525, 1530, 1537, 1543, 1550, 1555, 1561, 1567, 1573, 1580, 1587, 1593, 1600, 1607, 1614, 1621, 1628, 1635, 1642, 1649, 1656, 1662, 1668, 1671, 1678, 1686, 1696, 1704, 1714, 1722, 1726, 1734, 1742, 1750, 1759, 1760, 1765, 1768, 1775, 1783, 1785, and 1792; or
[7288] (b)
[7289] (i)
[7290] VL1 comprises a light chain complementarity determining region 1 (LCDR1), LCDR2, and/or LCDR3 of an antibody selected from the group consisting of libivirumab, rmab, rivabazumab pegol, setoxaximab, suvizumab, suvratoxumab, sevirumab, pritoxaximab, porgaviximab, REGN-EB3, obiltoxaximab, gedivumab, foravirumab, larcaviximab, motavizumab, palivizumab, rafivirumab, regavirumab, tuvirumab, cosfroviximab, felvizumab, atidortoxumab, edobacomab, nebacumab, pateclizumab, raxibacumab, urtoxazumab, tosatoxumab, berlimatoxumab, CR6261, diridavumab, firivumab, lesofavumab, navivumab, exbivirumab, lenvervimab, bavituximab, bezlotoxumab, efungumab, leronlimab, nirsevimab, pagibaximab, panobacumab, tefibazumab, ansuvimab, atoltivimab, maftivimab, and odesivimab;
[7291] VL2 comprises a light chain complementarity determining region 1 (LCDR1), LCDR2, and/or LCDR3 of an antibody selected from the group consisting of libivirumab, rmab, rivabazumab pegol, setoxaximab, suvizumab, suvratoxumab, sevirumab, pritoxaximab, porgaviximab, REGN-EB3, obiltoxaximab, gedivumab, foravirumab, larcaviximab, motavizumab, palivizumab, rafivirumab, regavirumab, tuvirumab, cosfroviximab, felvizumab, atidortoxumab, edobacomab, nebacumab, pateclizumab, raxibacumab, urtoxazumab, tosatoxumab, berlimatoxumab, CR6261, diridavumab, firivumab, lesofavumab, navivumab, exbivirumab, lenvervimab, bavituximab, bezlotoxumab, efungumab, leronlimab, nirsevimab, pagibaximab, panobacumab, tefibazumab, ansuvimab, atoltivimab, maftivimab, and odesivimab;
[7292] VH1 comprises a heavy chain complementarity determining region 1 (HCDR1), HCDR2, and/or HCDR3 of an antibody selected from the group consisting of libivirumab, rmab, rivabazumab pegol, setoxaximab, suvizumab, suvratoxumab, sevirumab, pritoxaximab, porgaviximab, REGN-EB3, obiltoxaximab, gedivumab, foravirumab, larcaviximab, motavizumab, palivizumab, rafivirumab, regavirumab, tuvirumab, cosfroviximab, felvizumab, atidortoxumab, edobacomab, nebacumab, pateclizumab, raxibacumab, urtoxazumab, tosatoxumab, berlimatoxumab, CR6261, diridavumab, firivumab, lesofavumab, navivumab, exbivirumab, lenvervimab, bavituximab, bezlotoxumab, efungumab, leronlimab, nirsevimab, pagibaximab, panobacumab, tefibazumab, ansuvimab, atoltivimab, maftivimab, and odesivimab; and/or
[7293] VH2 comprises a heavy chain complementarity determining region 1 (HCDR1), HCDR2, and/or HCDR3 of an antibody selected from the group consisting of libivirumab, rmab, rivabazumab pegol, setoxaximab, suvizumab, suvratoxumab, sevirumab, pritoxaximab, porgaviximab, REGN-EB3, obiltoxaximab, gedivumab, foravirumab, larcaviximab, motavizumab, palivizumab, rafivirumab, regavirumab, tuvirumab, cosfroviximab, felvizumab, atidortoxumab, edobacomab, nebacumab, pateclizumab, raxibacumab, urtoxazumab, tosatoxumab, berlimatoxumab, CR6261, diridavumab, firivumab, lesofavumab, navivumab, exbivirumab, lenvervimab, bavituximab, bezlotoxumab, efungumab, leronlimab, nirsevimab, pagibaximab, panobacumab, tefibazumab, ansuvimab, atoltivimab, maftivimab, and odesivimab; or
[7294] (ii)
[7295] VL1 comprises a VL of an antibody selected from the group consisting of libivirumab, rmab, rivabazumab pegol, setoxaximab, suvizumab, suvratoxumab, sevirumab, pritoxaximab, porgaviximab, REGN-EB3, obiltoxaximab, gedivumab, foravirumab, larcaviximab, motavizumab, palivizumab, rafivirumab, regavirumab, tuvirumab, cosfroviximab, felvizumab, atidortoxumab, edobacomab, nebacumab, pateclizumab, raxibacumab, urtoxazumab, tosatoxumab, berlimatoxumab, CR6261, diridavumab, firivumab, lesofavumab, navivumab, exbivirumab, lenvervimab, bavituximab, bezlotoxumab, efungumab, leronlimab, nirsevimab, pagibaximab, panobacumab, tefibazumab, ansuvimab, atoltivimab, maftivimab, and odesivimab;
[7296] VL2 comprises a VL of an antibody selected from the group consisting of libivirumab, rmab, rivabazumab pegol, setoxaximab, suvizumab, suvratoxumab, sevirumab, pritoxaximab, porgaviximab, REGN-EB3, obiltoxaximab, gedivumab, foravirumab, larcaviximab, motavizumab, palivizumab, rafivirumab, regavirumab, tuvirumab, cosfroviximab, felvizumab, atidortoxumab, edobacomab, nebacumab, pateclizumab, raxibacumab, urtoxazumab, tosatoxumab, berlimatoxumab, CR6261, diridavumab, firivumab, lesofavumab, navivumab, exbivirumab, lenvervimab, bavituximab, bezlotoxumab, efungumab, leronlimab, nirsevimab, pagibaximab, panobacumab, tefibazumab, ansuvimab, atoltivimab, maftivimab, and odesivimab;
[7297] VH1 comprises a VH of an antibody selected from the group consisting of libivirumab, rmab, rivabazumab pegol, setoxaximab, suvizumab, suvratoxumab, sevirumab, pritoxaximab, porgaviximab, REGN-EB3, obiltoxaximab, gedivumab, foravirumab, larcaviximab, motavizumab, palivizumab, rafivirumab, regavirumab, tuvirumab, cosfroviximab, felvizumab, atidortoxumab, edobacomab, nebacumab, pateclizumab, raxibacumab, urtoxazumab, tosatoxumab, berlimatoxumab, CR6261, diridavumab, firivumab, lesofavumab, navivumab, exbivirumab, lenvervimab, bavituximab, bezlotoxumab, efungumab, leronlimab, nirsevimab, pagibaximab, panobacumab, tefibazumab, ansuvimab, atoltivimab, maftivimab, and odesivimab; and/or
[7298] VH2 comprises a VH of an antibody selected from the group consisting of libivirumab, rmab, rivabazumab pegol, setoxaximab, suvizumab, suvratoxumab, sevirumab, pritoxaximab, porgaviximab, REGN-EB3, obiltoxaximab, gedivumab, foravirumab, larcaviximab, motavizumab, palivizumab, rafivirumab, regavirumab, tuvirumab, cosfroviximab, felvizumab, atidortoxumab, edobacomab, nebacumab, pateclizumab, raxibacumab, urtoxazumab, tosatoxumab, berlimatoxumab, CR6261, diridavumab, firivumab, lesofavumab, navivumab, exbivirumab, lenvervimab, bavituximab, bezlotoxumab, efungumab, leronlimab, nirsevimab, pagibaximab, panobacumab, tefibazumab, ansuvimab, atoltivimab, maftivimab, and odesivimab; or
[7299] (iii)
[7300] VL1 comprises (i) a complementarity determining region (CDR) 1 having an amino acid sequence that is at least 65%, at least 70%, at least 75%, at least 80%, at least 85%, at least 90%, at least 95%, at least 99%, or 100% identical to any one of SEQ ID NOs: 1428, 1793, 1798, 1810, 1817, 1824, 1977, 1985, 1993 and 2001; (ii) a CDR2 having an amino acid sequence that is at least 65%, at least 70%, at least 75%, at least 80%, at least 85%, at least 90%, at least 95%, at least 99%, or 100% identical to any one of SEQ ID NOs: 1978, 1986, 1994, and 2002; or at least 65%, at least 70%, at least 75%, at least 80%, at least 85%, at least 90%, at least 95%, at least 99%, or 100% identical to any one of amino acid sequences YTS, DTS, GAS, and AAS; and (iii) a CDR3 having an amino acid sequence that is at least 65%, at least 70%, at least 75%, at least 80%, at least 85%, at least 90%, at least 95%, at least 99%, or 100% identical to any one of SEQ ID NOs: 1229, 1799, 1805, 1811, 1818, 1825, 1979, 1987, 1995, and 2003;
[7301] VL2 comprises (i) a complementarity determining region (CDR) 1 having an amino acid sequence that is at least 65%, at least 70%, at least 75%, at least 80%, at least 85%, at least 90%, at least 95%, at least 99%, or 100% identical to any one of SEQ ID NOs: 1428, 1793, 1798, 1810, 1817, 1824, 1977, 1985, 1993 and 2001; (ii) a CDR2 having an amino acid sequence that is at least 65%, at least 70%, at least 75%, at least 80%, at least 85%, at least 90%, at least 95%, at least 99%, or 100% identical to any one of SEQ ID NOs: 1978, 1986, 1994, and 2002; or at least 65%, at least 70%, at least 75%, at least 80%, at least 85%, at least 90%, at least 95%, at least 99%, or 100% identical to any one of amino acid sequences YTS, DTS, GAS, and AAS; and (iii) a CDR3 having an amino acid sequence that is at least 65%, at least 70%, at least 75%, at least 80%, at least 85%, at least 90%, at least 95%, at least 99%, or 100% identical to any one of SEQ ID NOs: 1229, 1799, 1805, 1811, 1818, 1825, 1979, 1987, 1995, and 2003;
[7302] VH1 comprises (i) a complementarity determining region (CDR) 1 having an amino acid sequence that is at least 65%, at least 70%, at least 75%, at least 80%, at least 85%, at least 90%, at least 95%, at least 99%, or 100% identical to any one of SEQ ID NOs: 1577, 1795, 1801, 1813, 1820, 1827, 1981, 1989, 1997, and 2005; (ii) a CDR2 having an amino acid sequence that is at least 65%, at least 70%, at least 75%, at least 80%, at least 85%, at least 90%, at least 95%, at least 99%, or 100% identical to any one of SEQ ID NOs: 1159, 1802, 1807, 1814, 1821, 1828, 1982, 1990, 1998, and 2006; and (iii) a CDR3 having an amino acid sequence that is at least 65%, at least 70%, at least 75%, at least 80%, at least 85%, at least 90%, at least 95%, at least 99%, or 100% identical to any one of SEQ ID NOs: 1796, 1803, 1808, 1815, 1822, 1829, 1983, 1991, 1999, and 2007; and/or
[7303] VH2 comprises (i) a complementarity determining region (CDR) 1 having an amino acid sequence that is at least 65%, at least 70%, at least 75%, at least 80%, at least 85%, at least 90%, at least 95%, at least 99%, or 100% identical to any one of SEQ ID NOs: 1577, 1795, 1801, 1813, 1820, 1827, 1981, 1989, 1997, and 2005; (ii) a CDR2 having an amino acid sequence that is at least 65%, at least 70%, at least 75%, at least 80%, at least 85%, at least 90%, at least 95%, at least 99%, or 100% identical to any one of SEQ ID NOs: 1159, 1802, 1807, 1814, 1821, 1828, 1982, 1990, 1998, and 2006; and (iii) a CDR3 having an amino acid sequence that is at least 65%, at least 70%, at least 75%, at least 80%, at least 85%, at least 90%, at least 95%, at least 99%, or 100% identical to any one of SEQ ID NOs: 1796, 1803, 1808, 1815, 1822, 1829, 1983, 1991, 1999, and 2007; or
[7304] (iv)
[7305] VL1 comprises an amino acid sequence that is at least 65%, at least 70%, at least 75%, at least 80%, at least 85%, at least 90%, at least 95%, at least 99%, or 100% identical to any one of SEQ ID NOs: 1794, 1800, 1806, 1812, 1819, 1826, 1980, 1988, 1996, and 2004;
[7306] VL2 comprises an amino acid sequence that is at least 65%, at least 70%, at least 75%, at least 80%, at least 85%, at least 90%, at least 95%, at least 99%, or 100% identical to any one of SEQ ID NOs: 1794, 1800, 1806, 1812, 1819, 1826, 1980, 1988, 1996, and 2004;
[7307] VH1 comprises an amino acid sequence that is at least 65%, at least 70%, at least 75%, at least 80%, at least 85%, at least 90%, at least 95%, at least 99%, or 100% identical to any one of SEQ ID NOS 1797, 1804, 1809, 1816, 1823, 1830, 1984, 1992, 2000, and 2008; and/or
[7308] VH2 comprises an amino acid sequence that is at least 65%, at least 70%, at least 75%, at least 80%, at least 85%, at least 90%, at least 95%, at least 99%, or 100% identical to any one of SEQ ID NOs 1797, 1804, 1809, 1816, 1823, 1830, 1984, 1992, 2000, and 2008; or
[7309] (c)
[7310] (i)
[7311] VL1 comprises a light chain complementarity determining region 1 (LCDR1), LCDR2, and/or LCDR3 of an antibody selected from the group consisting of aducanumab, alirocumab, frovocimab, lodelcizumab, bococizumab, evolocumab, ralpancizumab, anifrolumab, atorolimumab, bapineuzumab, bedinvetmab, begelomab, biciromab, bimagrumab, birtamimab, blosozumab, burosumab, caplacizumab, concizumab, crenezumab, crizanlizumab, crotedumab, dezamizumab, domagrozumab, donanemab, eldelumab, elezanumab, emapalumab, emicizumab, eptinezumab, erenumab, evinacumab, faralimomab, fasinumab, fontolizumab, fremanezumab, frunevetmab, fulranumab, galcanezumab, gantenerumab, gosuranemab, idarucizumab, imciromab, inclacumab, lampalizumab, lanadelumab, landogrozumab, lecanemab, ligelizumab, marstacimab, mavrilimumab, morolimumab, NEOD001, omalizumab, oMS721, orticumab, otilimab, ozanezumab, ponezumab, prasinezumab, quilizumab, ranevetmab, refanezumab, roledumab, romosozumab, rozanolixizumab, setrusumab, SHP647, solanezumab, stamulumab, suptavumab, sutimlimab, tanezumab, crovalimab, and lokivetmab;
[7312] VL2 comprises a light chain complementarity determining region 1 (LCDR1), LCDR2, and/or LCDR3 of an antibody selected from the group consisting of aducanumab, alirocumab, frovocimab, lodelcizumab, bococizumab, evolocumab, ralpancizumab, anifrolumab, atorolimumab, bapineuzumab, bedinvetmab, begelomab, biciromab, bimagrumab, birtamimab, blosozumab, burosumab, caplacizumab, concizumab, crenezumab, crizanlizumab, crotedumab, dezamizumab, domagrozumab, donanemab, eldelumab, elezanumab, emapalumab, emicizumab, eptinezumab, erenumab, evinacumab, faralimomab, fasinumab, fontolizumab, fremanezumab, frunevetmab, fulranumab, galcanezumab, gantenerumab, gosuranemab, idarucizumab, imciromab, inclacumab, lampalizumab, lanadelumab, landogrozumab, lecanemab, ligelizumab, marstacimab, mavrilimumab, morolimumab, NEOD00) 1, omalizumab, oMS721, orticumab, otilimab, ozanezumab, ponezumab, prasinezumab, quilizumab, ranevetmab, refanezumab, roledumab, romosozumab, rozanolixizumab, setrusumab, SHP647, solanezumab, stamulumab, suptavumab, sutimlimab, tanezumab, crovalimab, and lokivetmab;
[7313] VH1 comprises a heavy chain complementarity determining region 1 (HCDR1), HCDR2, and/or HCDR3 of an antibody selected from the group consisting of aducanumab, alirocumab, frovocimab, lodelcizumab, bococizumab, evolocumab, ralpancizumab, anifrolumab, atorolimumab, bapineuzumab, bedinvetmab, begelomab, biciromab, bimagrumab, birtamimab, blosozumab, burosumab, caplacizumab, concizumab, crenezumab, crizanlizumab, crotedumab, dezamizumab, domagrozumab, donanemab, eldelumab, elezanumab, emapalumab, emicizumab, eptinezumab, erenumab, evinacumab, faralimomab, fasinumab, fontolizumab, fremanezumab, frunevetmab, fulranumab, galcanezumab, gantenerumab, gosuranemab, idarucizumab, imciromab, inclacumab, lampalizumab, lanadelumab, landogrozumab, lecanemab, ligelizumab, marstacimab, mavrilimumab, morolimumab, NEOD001, omalizumab, oMS721, orticumab, otilimab, ozanezumab, ponezumab, prasinezumab, quilizumab, ranevetmab, refanezumab, roledumab, romosozumab, rozanolixizumab, setrusumab, SHP647, solanezumab, stamulumab, suptavumab, sutimlimab, tanezumab, crovalimab, and lokivetmab; and/or
[7314] VH2 comprises a heavy chain complementarity determining region 1 (HCDR1), HCDR2, and/or HCDR3 of an antibody selected from the group consisting of aducanumab, alirocumab, frovocimab, lodelcizumab, bococizumab, evolocumab, ralpancizumab, anifrolumab, atorolimumab, bapineuzumab, bedinvetmab, begelomab, biciromab, bimagrumab, birtamimab, blosozumab, burosumab, caplacizumab, concizumab, crenezumab, crizanlizumab, crotedumab, dezamizumab, domagrozumab, donanemab, eldelumab, elezanumab, emapalumab, emicizumab, eptinezumab, erenumab, evinacumab, faralimomab, fasinumab, fontolizumab, fremanezumab, frunevetmab, fulranumab, galcanezumab, gantenerumab, gosuranemab, idarucizumab, imciromab, inclacumab, lampalizumab, lanadelumab, landogrozumab, lecanemab, ligelizumab, marstacimab, mavrilimumab, morolimumab, NEOD001, omalizumab, oMS721, orticumab, otilimab, ozanezumab, ponezumab, prasinezumab, quilizumab, ranevetmab, refanezumab, roledumab, romosozumab, rozanolixizumab, setrusumab, SHP647, solanezumab, stamulumab, suptavumab, sutimlimab, tanezumab, crovalimab, and lokivetmab; or
[7315] (ii)
[7316] VL1 comprises a VL of an antibody selected from the group consisting of aducanumab, alirocumab, frovocimab, lodelcizumab, bococizumab, evolocumab, ralpancizumab, anifrolumab, atorolimumab, bapineuzumab, bedinvetmab, begelomab, biciromab, bimagrumab, birtamimab, blosozumab, burosumab, caplacizumab, concizumab, crenezumab, crizanlizumab, crotedumab, dezamizumab, domagrozumab, donanemab, eldelumab, elezanumab, emapalumab, emicizumab, eptinezumab, erenumab, evinacumab, faralimomab, fasinumab, fontolizumab, fremanezumab, frunevetmab, fulranumab, galcanezumab, gantenerumab, gosuranemab, idarucizumab, imciromab, inclacumab, lampalizumab, lanadelumab, landogrozumab, lecanemab, ligelizumab, marstacimab, mavrilimumab, morolimumab, NEOD001, omalizumab, oMS721, orticumab, otilimab, ozanezumab, ponezumab, prasinezumab, quilizumab, ranevetmab, refanezumab, roledumab, romosozumab, rozanolixizumab, setrusumab, SHP647, solanezumab, stamulumab, suptavumab, sutimlimab, tanezumab, crovalimab, and lokivetmab;
[7317] VL2 comprises a VL of an antibody selected from the group consisting of aducanumab, alirocumab, frovocimab, lodelcizumab, bococizumab, evolocumab, ralpancizumab, anifrolumab, atorolimumab, bapineuzumab, bedinvetmab, begelomab, biciromab, bimagrumab, birtamimab, blosozumab, burosumab, caplacizumab, concizumab, crenezumab, crizanlizumab, crotedumab, dezamizumab, domagrozumab, donanemab, eldelumab, elezanumab, emapalumab, emicizumab, eptinezumab, erenumab, evinacumab, faralimomab, fasinumab, fontolizumab, fremanezumab, frunevetmab, fulranumab, galcanezumab, gantenerumab, gosuranemab, idarucizumab, imciromab, inclacumab, lampalizumab, lanadelumab, landogrozumab, lecanemab, ligelizumab, marstacimab, mavrilimumab, morolimumab, NEOD001, omalizumab, oMS721, orticumab, otilimab, ozanezumab, ponezumab, prasinezumab, quilizumab, ranevetmab, refanezumab, roledumab, romosozumab, rozanolixizumab, setrusumab, SHP647, solanezumab, stamulumab, suptavumab, sutimlimab, tanezumab, crovalimab, and lokivetmab;
[7318] VH1 comprises a VH of an antibody selected from the group consisting of aducanumab, alirocumab, frovocimab, lodelcizumab, bococizumab, evolocumab, ralpancizumab, anifrolumab, atorolimumab, bapineuzumab, bedinvetmab, begelomab, biciromab, bimagrumab, birtamimab, blosozumab, burosumab, caplacizumab, concizumab, crenezumab, crizanlizumab, crotedumab, dezamizumab, domagrozumab, donanemab, eldelumab, elezanumab, emapalumab, emicizumab, eptinezumab, erenumab, evinacumab, faralimomab, fasinumab, fontolizumab, fremanezumab, frunevetmab, fulranumab, galcanezumab, gantenerumab, gosuranemab, idarucizumab, imciromab, inclacumab, lampalizumab, lanadelumab, landogrozumab, lecanemab, ligelizumab, marstacimab, mavrilimumab, morolimumab, NEOD001, omalizumab, oMS721, orticumab, otilimab, ozanezumab, ponezumab, prasinezumab, quilizumab, ranevetmab, refanezumab, roledumab, romosozumab, rozanolixizumab, setrusumab, SHP647, solanezumab, stamulumab, suptavumab, sutimlimab, tanezumab, crovalimab, and lokivetmab; and/or VH2 comprises a VH of an antibody selected from the group consisting of aducanumab, alirocumab, frovocimab, lodelcizumab, bococizumab, evolocumab, ralpancizumab, anifrolumab, atorolimumab, bapineuzumab, bedinvetmab, begelomab, biciromab, bimagrumab, birtamimab, blosozumab, burosumab, caplacizumab, concizumab, crenezumab, crizanlizumab, crotedumab, dezamizumab, domagrozumab, donanemab, eldelumab, elezanumab, emapalumab, emicizumab, eptinezumab, erenumab, evinacumab, faralimomab, fasinumab, fontolizumab, fremanezumab, frunevetmab, fulranumab, galcanezumab, gantenerumab, gosuranemab, idarucizumab, imciromab, inclacumab, lampalizumab, lanadelumab, landogrozumab, lecanemab, ligelizumab, marstacimab, mavrilimumab, morolimumab, NEOD001, omalizumab, oMS721, orticumab, otilimab, ozanezumab, ponezumab, prasinezumab, quilizumab, ranevetmab, refanezumab, roledumab, romosozumab, rozanolixizumab, setrusumab, SHP647, solanezumab, stamulumab, suptavumab, sutimlimab, tanezumab, crovalimab, and lokivetmab; or
[7319] (iii)
[7320] VL1 comprises (i) a complementarity determining region (CDR) 1 having an amino acid sequence that is at least 65%, at least 70%, at least 75%, at least 80%, at least 85%, at least 90%, at least 95%, at least 99%, or 100% identical to any one of SEQ ID NOs: 1120, 1228, 1359, 1519, 1831, 1838, 1845, 1852, 1859, 1866, 1872, 1878, 1885, 1891, 1898, 1905, 1911, 1917, 1924, 1931, 1938, 1945, and 1963; (ii) a CDR2 having an amino acid sequence that is at least 65%, at least 70%, at least 75%, at least 80%, at least 85%, at least 90%, at least 95%, at least 99%, or 100% identical to any one of amino acid sequences AAS, AVS, DAS, DNN, EDN, EVS, GAS, GNG, KAS, KVS, LVS, NTD, STS, WAS, and YTS; and (iii) a CDR3 having an amino acid sequence that is at least 65%, at least 70%, at least 75%, at least 80%, at least 85%, at least 90%, at least 95%, at least 99%, or 100% identical to any one of SEQ ID NOs: 1360, 1832, 1839, 1846, 1853, 1860, 1867, 1873, 1879, 1886, 1892, 1899, 1906, 1912, 1918, 1925, 1932, 1939, 1946, 1951, 1957, 1964, and 1970;
[7321] VL2 comprises (i) a complementarity determining region (CDR) 1 having an amino acid sequence that is at least 65%, at least 70%, at least 75%, at least 80%, at least 85%, at least 90%, at least 95%, at least 99%, or 100% identical to any one of SEQ ID NOs: 1120, 1228, 1359, 1519, 1831, 1838, 1845, 1852, 1859, 1866, 1872, 1878, 1885, 1891, 1898, 1905, 1911, 1917, 1924, 1931, 1938, 1945, and 1963; (ii) a CDR2 having an amino acid sequence that is at least 65%, at least 70%, at least 75%, at least 80%, at least 85%, at least 90%, at least 95%, at least 99%, or 100% identical to any one of amino acid sequences AAS, AVS, DAS, DNN, EDN, EVS, GAS, GNG, KAS, KVS, LVS, NTD, STS, WAS, and YTS; and (iii) a CDR3 having an amino acid sequence that is at least 65%, at least 70%, at least 75%, at least 80%, at least 85%, at least 90%, at least 95%, at least 99%, or 100% identical to any one of SEQ ID NOs: 1360, 1832, 1839, 1846, 1853, 1860, 1867, 1873, 1879, 1886, 1892, 1899, 1906, 1912, 1918, 1925, 1932, 1939, 1946, 1951, 1957, 1964, and 1970;
[7322] VH1 comprises (i) a complementarity determining region (CDR) 1 having an amino acid sequence that is at least 65%, at least 70%, at least 75%, at least 80%, at least 85%, at least 90%, at least 95%, at least 99%, or 100% identical to any one of SEQ ID NOs: 1309, 1362, 1437, 1552, 1618, 1639, 1834, 1841, 1848, 1855, 1862, 1881, 1894, 1901, 1920, 1927, 1934, 1941, 1953, 1959, and 1966; (ii) a CDR2 having an amino acid sequence that is at least 65%, at least 70%, at least 75%, at least 80%, at least 85%, at least 90%, at least 95%, at least 99%, or 100% identical to any one of SEQ ID NOs: 1363, 1835, 1842, 1849, 1856, 1863, 1869, 1875, 1882, 1888, 1895, 1902, 1908, 1914, 1921, 1928, 1935, 1942, 1948, 1954, 1960, 1967, and 1972; and (iii) a CDR3 having an amino acid sequence that is at least 65%, at least 70%, at least 75%, at least 80%, at least 85%, at least 90%, at least 95%, at least 99%, or 100% identical to any one of SEQ ID NOs: 1364, 1836, 1843, 1850, 1857, 1864, 1870, 1876, 1883, 1889, 1896, 1903, 1909, 1915, 1922, 1929, 1936, 1943, 1949, 1955, 1961, 1968, and 1973; and/or
[7323] VH2 comprises (i) a complementarity determining region (CDR) 1 having an amino acid sequence that is at least 65%, at least 70%, at least 75%, at least 80%, at least 85%, at least 90%, at least 95%, at least 99%, or 100% identical to any one of SEQ ID NOs: 1309, 1362, 1437, 1552, 1618, 1639, 1834, 1841, 1848, 1855, 1862, 1881, 1894, 1901, 1920, 1927, 1934, 1941, 1953, 1959, and 1966; (ii) a CDR2 having an amino acid sequence that is at least 65%, at least 70%, at least 75%, at least 80%, at least 85%, at least 90%, at least 95%, at least 99%, or 100% identical to any one of SEQ ID NOs: 1363, 1835, 1842, 1849, 1856, 1863, 1869, 1875, 1882, 1888, 1895, 1902, 1908, 1914, 1921, 1928, 1935, 1942, 1948, 1954, 1960, 1967, and 1972; and (iii) a CDR3 having an amino acid sequence that is at least 65%, at least 70%, at least 75%, at least 80%, at least 85%, at least 90%, at least 95%, at least 99%, or 100% identical to any one of SEQ ID NOs: 1364, 1836, 1843, 1850, 1857, 1864, 1870, 1876, 1883, 1889, 1896, 1903, 1909, 1915, 1922, 1929, 1936, 1943, 1949, 1955, 1961, 1968, and 1973; or
[7324] (iv)
[7325] VL1 comprises an amino acid sequence that is at least 65%, at least 70%, at least 75%, at least 80%, at least 85%, at least 90%, at least 95%, at least 99%, or 100% identical to any one of SEQ ID NOs: 1361, 1833, 1840, 1847, 1854, 1861, 1868, 1874, 1880, 1887, 1893, 1900, 1907, 1913, 1919, 1926, 1933, 1940, 1947, 1952, 1958, 1965, and 1971;
[7326] VL2 comprises an amino acid sequence that is at least 65%, at least 70%, at least 75%, at least 80%, at least 85%, at least 90%, at least 95%, at least 99%, or 100% identical to any one of SEQ ID NOs: 1361, 1833, 1840, 1847, 1854, 1861, 1868, 1874, 1880, 1887, 1893, 1900, 1907, 1913, 1919, 1926, 1933, 1940, 1947, 1952, 1958, 1965, and 1971;
[7327] VH1 comprises an amino acid sequence that is at least 65%, at least 70%, at least 75%, at least 80%, at least 85%, at least 90%, at least 95%, at least 99%, or 100% identical to any one of SEQ ID NOs: 1365, 1837, 1844, 1851, 1858, 1865, 1871, 1877, 1884, 1890, 1897, 1904, 1910, 1916, 1923, 1930, 1937, 1944, 1950, 1956, 1962, 1969, and 1974; and/or
[7328] VH2 comprises an amino acid sequence that is at least 65%, at least 70%, at least 75%, at least 80%, at least 85%, at least 90%, at least 95%, at least 99%, or 100% identical to any one of SEQ ID NOs: 1365, 1837, 1844, 1851, 1858, 1865, 1871, 1877, 1884, 1890, 1897, 1904, 1910, 1916, 1923, 1930, 1937, 1944, 1950, 1956, 1962, 1969, and 1974.

[7329] In some aspects, one or both of the antigen binding polypeptides comprised in the antigen binding polypeptide complexes disclosed herein, comprise one or more CL, as indicated in the formulas representing the antigen binding polypeptide complexes disclosed herein. In some aspects, the CL comprises an amino acid sequence at least 65%, at least 70%, at least 75%, at least 80%, at least 85%, at least 90%, at least 95%, at least 99%, or 100% identical to any one of SEQ ID NOs: 374, 637, or 1092-1095.

[7330] In some aspects, one or both of the antigen binding polypeptides comprised in the antigen binding polypeptide complexes disclosed herein, comprise one or more CH1, as indicated in the formulas representing the antigen binding polypeptide complexes disclosed herein. In some aspects, the CH1 comprises an amino acid sequence at least 65%, at least 70%, at least 75%, at least 80%, at least 85%, at least 90%, at least 95%, at least 99%, or 100% identical to any one of SEQ ID NOs: 375, 634, 1070, 1071, or 1086-1091.

[7331] In some aspects, one or both of the antigen binding polypeptides comprised in the antigen binding polypeptide complexes provided herein further comprise an Fc region. In some aspects, one or both of the antigen binding polypeptides comprised in the antigen binding polypeptide complexes provided herein further comprise an Fc region at the carboxy-terminus. In some aspects, the Fc region comprises an immunoglobulin heavy chain constant region 2 (CH2) and/or an immunoglobulin heavy chain constant region 3 (CH3). In some aspects, the Fc region further comprises an immunoglobulin hinge (i.e., a hinge region). In some aspects, the hinge region is interposed between a CH1 and a CH2 (i.e., a hinge region is localized between the carboxy terminal residue of a CH1 and the N-terminal residue of a CH2). In some aspects, the hinge region comprises an amino acid sequence at least 65%, at least 70%, at least 75%, at least 80%, at least 85%, at least 90%, at least 95%, at least 99%, or 100% identical to any one of SEQ ID NOs: 635.636, 1072, 1073, or 1074. In some aspects, the Fc region comprises a CH2 and a CH3. In some aspects, the CH2 comprises an amino acid sequence that is at least 65%, at least 70%, at least 75%, at least 80%, at least 85%, at least 90%, at least 95%, at least 99%, or 100% identical to any one of SEQ ID NOs: 1075-1078. In some aspects, the CH3 comprises an amino acid sequence that is at least 65%, at least 70%, at least 75%, at least 80%, at least 85%, at least 90%, at least 95%, at least 99%, or 100% identical to any one of SEQ ID NOs: 1079-1085. In some aspects, the Fc region comprises an amino acid sequence that is at least 65%, at least 70%, at least 75%, at least 80%, at least 85%, at least 90%, at least 95%, at least 99%, or 100% identical to any one of SEQ ID NOs: 376-380.

[7332] In some aspects, the Fc region comprises one or more amino acid substitutions. In some aspects, the one or more amino acid substitutions comprise one or more half-life extension amino acid substitutions. In some aspects, the one or more half-life extension amino acid substitutions comprise one or more of amino acid substitutions M428L, N434A, N434S, L234F, L235E, P331S, M252Y, S254T, or T256E, or equivalent thereof, based on the EU numbering scheme. In some aspects, the one or more half-life extension amino acid substitutions comprise a LA (M428L and N434A, or equivalent thereof, based on the EU numbering scheme) amino acid substitution. In some aspects, the one or more half-life extension amino acid substitutions comprise a LS (M428L and N434S, or equivalent thereof, based on the EU numbering scheme) amino acid substitution. In some aspects, the one or more half-life extension amino acid substitutions comprise L234F and L235E, or equivalent thereof (based on the EU numbering scheme) amino acid substitutions. In some aspects, the one or more half-life extension amino acid substitutions comprise a TM (L234F, L235E, and P331S, or equivalent thereof, based on the EU numbering scheme) amino acid substitution. In some aspects, the one or more half-life extension amino acid substitutions comprise a YTE (M252Y, S254T, and T256E, or equivalent thereof, based on the EU numbering scheme) amino acid substitution.

[7333] In some aspects, the Fc region comprises at least one knob-into-hole modification. In some aspects, the antigen binding polypeptides complexes disclosed herein are IgG1 or IgG4 antibodies or antigen binding fragments thereof. In some aspects, the knob-into-hole modification comprises one or more of knob substitutions of S354C and T366W, or equivalent thereof, and/or one or more of hole substitutions of Y349C, T366S, L368A, Y407V, or equivalent thereof, or a combination thereof, based on the EU numbering scheme. In some aspects, the Fc region comprises a knob-into-hole modification comprising knob substitutions of S354C and T366W, or equivalent thereof, and/or hole substitutions of Y349C, T366S, L368A, and Y407V, or equivalent thereof, and/or a half-life extension amino acid substitution comprising: a LA (M428L and N434A, or equivalent thereof, based on the EU numbering scheme) amino acid substitution, a LS (M428L and N434S, or equivalent thereof, based on the EU numbering scheme) amino acid substitution. L234F and L235E, or equivalent thereof (based on the EU numbering scheme) amino acid substitutions, a TM (L234F, L235E, and P331S, or equivalent thereof, based on the EU numbering scheme) amino acid substitution, a YTE (M252Y, S254T, and T256E, or equivalent thereof, based on the EU numbering scheme) amino acid substitution, or any combination thereof.

[7334] In some aspects, the Fc region comprises knob substitutions of S354C and T366W, or equivalent thereof, and a half-life extension amino acid substitution comprising: a LA (M428L and N434A, or equivalent thereof, based on the EU numbering scheme) amino acid substitution, a LS (M428L and N434S, or equivalent thereof, based on the EU numbering scheme) amino acid substitution. L234F and L235E, or equivalent thereof (based on the EU numbering scheme) amino acid substitutions, a TM (L234F, L235E, and P331S, or equivalent thereof, based on the EU numbering scheme) amino acid substitution, a YTE (M252Y, S254T, and T256E, or equivalent thereof, based on the EU numbering scheme) amino acid substitution, or any combination thereof.

[7335] In some aspects, the Fc region comprises hole substitutions of Y349C, T366S, L368A, and Y407V, or equivalent thereof, and a half-life extension amino acid substitution comprising: a LA (M428L and N434A, or equivalent thereof, based on the EU numbering scheme) amino acid substitution, a LS (M428L and N434S, or equivalent thereof, based on the EU numbering scheme) amino acid substitution. L234F and L235E, or equivalent thereof (based on the EU numbering scheme) amino acid substitutions, a TM (L234F, L235E, and P331S, or equivalent thereof, based on the EU numbering scheme) amino acid substitution, a YTE (M252Y, S254T, and T256E, or equivalent thereof, based on the EU numbering scheme) amino acid substitution, or any combination thereof.

[7336] In some aspects, one or both of the antigen binding polypeptides comprised in the antigen binding polypeptide complexes disclosed herein comprise one or more Fc effector function knockout mutation. In some aspects, one or both of the antigen binding polypeptides comprised in the antigen binding polypeptide complexes disclosed herein are IgG1 or IgG4 antibodies or antigen binding fragments thereof. In some aspects, the Fc effector function knockout mutation is L234A, L235A, P239A, or equivalent thereof, or a combination thereof, based on the EU numbering scheme.

[7337] In some aspects, one or both of the antigen binding polypeptides comprised in the antigen binding polypeptide complexes disclosed herein comprise a mutation at a glycosylation site. In some aspects, the mutation at a glycosylation site is a mutation at an N-glycosylation site. In some aspects, one or both of the antigen binding polypeptides comprised in the antigen binding polypeptide complexes disclosed herein comprise a VH comprising a mutation at a glycosylation site. In some aspects, the mutation at a glycosylation site is a mutation at an N-glycosylation site. In some aspects, the mutation at an N-glycosylation site is at amino acid N62, or equivalent thereof, of the VH region or equivalent thereof. In some aspects, the mutation at an N-glycosylation site at amino acid N62 is N62Q or N62S, or equivalent thereof.

[7338] In some aspects, one or both of the antigen binding polypeptides comprised in the antigen binding polypeptide complexes disclosed herein, comprise one or more optional linkers. The one or more optional linkers are indicated herein as Ln, wherein n is an integer, and the integer next to each L indicates each L comprised in the antigen binding polypeptides comprised in the antigen binding polypeptide complexes disclosed herein. For example, if an antigen binding polypeptide comprised in the antigen binding polypeptide complexes disclosed herein comprises two linkers, the first linker from N-terminus to C-terminus is herein indicated as L1, and the second linker from N-terminus to C-terminus is herein indicated as L2. If an antigen binding polypeptide complex disclosed herein comprises a first antigen binding polypeptide comprising two linkers, indicated herein as L1 and L2, as explained above, the linkers comprised in the second antigen binding polypeptide are indicated with the following integer, in this example, the first linker from N-terminus to C-terminus of the second antigen binding polypeptide is herein indicated as L3, the second linker from N-terminus to C-terminus of the second antigen binding polypeptide is herein indicated as L3. In some aspects, any one of the optional linkers each independently have a length of from 0 amino acids to about 50 amino acids. In some aspects, any one of the optional linkers each independently have a length of from 5 amino acids to about 40 amino acids.

[7339] In some aspects, any one of the optional linkers are non-immunogenic. In some aspects, any one of the optional linkers do not contain a consensus T cell epitope.

[7340] In some aspects, any of Ln comprises an amino acid sequence of G or A, or an amino acid sequence at least 65%, at least 70%, at least 75%, at least 80%, at least 85%, at least 90%, at least 95%, at least 99%, or 100% identical to amino acid sequence GSS or ASG, or an amino acid sequence at least 65%, at least 70%, at least 75%, at least 80%, at least 85%, at least 90%, at least 95%, at least 99%, or 100% identical to any one of SEQ ID NOs: 333-373 and 967-971. In some aspects. Ln comprises an amino acid sequence at least 65%, at least 70%, at least 75%, at least 80%, at least 85%, at least 90%, at least 95%, at least 99%, or 100% identical to any one of SEQ ID NOs: 333-345 and 967-971.

[7341] In some aspects, an antigen binding polypeptide complex provided herein comprises a first polypeptide, and a second polypeptide; wherein the first polypeptide has a structure represented by:
[7342] VL1-L1-VL2-L2-VH2-L3-VH1-L4-Fc;
[7343] VL1-L1-VH2-L2-VL2-L3-VH1-L4-Fc;
[7344] VH1-L1-VH2-L2-VL2-L3-VL1-L4-Fc; or
[7345] VH1-L1-VL2-L2-VH2-L3-VL1-L4-Fc;
   and wherein the second polypeptide has a structure represented by:
[7346] VL3-L5-VL4-L6-VH4-L7-VH3-L8-Fc;
[7347] VL3-L5-VH4-L6-VL4-L7-VH3-L8-Fc;
[7348] VH3-L5-VH4-L6-VL4-L7-VL3-L8-Fc; or
[7349] VH3-L5-VL4-L6-VH4-L7-VL3-L8-Fc;
[7350] wherein:
[7351] VL1 is a first immunoglobulin light chain variable region that specifically binds to (i) a tumor-associated antigen (TAA), (ii) an infectious disease antigen that is not a sarbecovirus antigen, or (iii) an other-pathology antigen;
[7352] VL2 is a second immunoglobulin light chain variable region that specifically binds to (i) a tumor-associated antigen (TAA), (ii) an infectious disease antigen that is not a sarbecovirus antigen, or (iii) an other-pathology antigen;
[7353] VL3 is a third immunoglobulin light chain variable region that specifically binds to (i) a tumor-associated antigen (TAA), (ii) an infectious disease antigen that is not a sarbecovirus antigen, or (iii) an other-pathology antigen;
[7354] VL4 is a fourth immunoglobulin light chain variable region that specifically binds to (i) a tumor-associated antigen (TAA), (ii) an infectious disease antigen that is not a sarbecovirus antigen, or (iii) an other-pathology antigen;
[7355] VH1 is a first immunoglobulin heavy chain variable region that specifically binds to (i) a tumor-associated antigen (TAA), (ii) an infectious disease antigen that is not a sarbecovirus antigen, or (iii) an other-pathology antigen;
[7356] VH2 is a second immunoglobulin heavy chain variable region that specifically binds to (i) a tumor-associated antigen (TAA), (ii) an infectious disease antigen that is not a sarbecovirus antigen, or (iii) an other-pathology antigen;
[7357] VH3 is a third immunoglobulin heavy chain variable region that specifically binds to (i) a tumor-associated antigen (TAA), (ii) an infectious disease antigen that is not a sarbecovirus antigen, or (iii) an other-pathology antigen;
[7358] VH4 is a fourth immunoglobulin heavy chain variable region that specifically binds to (i) a tumor-associated antigen (TAA), (ii) an infectious disease antigen that is not a sarbecovirus antigen, or (iii) an other-pathology antigen;
[7359] L1-L8 are optional amino acid linkers; and
[7360] Fc is an immunoglobulin fragment crystallizable region comprising an immunoglobulin heavy chain constant region 2 (CH2), an immunoglobulin heavy chain constant region 3 (CH3), and optionally, an immunoglobulin hinge.

[7361] In some aspects, an antigen binding polypeptide complex provided herein comprises a first polypeptide, and a second polypeptide; wherein the first polypeptide has a structure represented by:
[7362] VL1-L1-VL2-L2-VH2-L3-VH1-L4-CH1-L5-CL-L6-Fc;
[7363] VL1-L1-VH2-L2-VL2-L3-VH1-L4-CH1-L5-CL-L6-Fc;
[7364] VH1-L1-VH2-L2-VL2-L3-VL1-L4-CH1-L5-CL-L6-Fc;
[7365] VH1-L1-VL2-L2-VH2-L3-VL1-L4-CH1-L5-CL-L6-Fc;
[7366] VL1-L1-VL2-L2-VH2-L3-VH1-L4-CL-L5-CH1-L6-Fc;
[7367] VL1-L1-VH2-L2-VL2-L3-VH1-L4-CL-L5-CH1-L6-Fc;
[7368] VH1-L1-VH2-L2-VL2-L3-VL1-L4-CL-L5-CH1-L6-Fc; or
[7369] VH1-L1-VL2-L2-VH2-L3-VL1-L4-CL-L5-CH1-L6-Fc;
   and wherein the second polypeptide has a structure represented by:
[7370] VL3-L7-VL4-L8-VH4-L9-VH3-L10-CH1-L11-CL-L12-Fc;
[7371] VL3-L7-VH4-L8-VL4-L9-VH3-L10-CH1-L11-CL-L12-Fc;
[7372] VH3-L7-VH4-L8-VL4-L9-VL3-L10-CH1-L11-CL-L12-Fc;
[7373] VH3-L7-VL4-L8-VH4-L9-VL3-L10-CH1-L11-CL-L12-Fc;
[7374] VL3-L7-VL4-L8-VH4-L9-VH3-L10-CL-L11-CH1-L12-Fc;
[7375] VL3-L7-VH4-L8-VL4-L9-VH3-L10-CL-L11-CH1-L12-Fc;
[7376] VH3-L7-VH4-L8-VL4-L9-VL3-L10-CL-L11-CH1-L12-Fc; or
[7377] VH3-L7-VL4-L8-VH4-L9-VL3-L10-CL-L11-CH1-L12-Fc;
[7378] wherein:
[7379] VL1 is a first immunoglobulin light chain variable region that specifically binds to a (i) a tumor-associated antigen (TAA), (ii) an infectious disease antigen that is not a sarbecovirus antigen, or (iii) an other-pathology antigen;
[7380] VL2 is a second immunoglobulin light chain variable region that specifically binds to (i) a tumor-associated antigen (TAA), (ii) an infectious disease antigen that is not a sarbecovirus antigen, or (iii) an other-pathology antigen;
[7381] VL3 is a third immunoglobulin light chain variable region that specifically binds to (i) a tumor-associated antigen (TAA), (ii) an infectious disease antigen that is not a sarbecovirus antigen, or (iii) an other-pathology antigen;
[7382] VL4 is a fourth immunoglobulin light chain variable region that specifically binds to (i) a tumor-associated antigen (TAA), (ii) an infectious disease antigen that is not a sarbecovirus antigen, or (iii) an other-pathology antigen;
[7383] VH1 is a first immunoglobulin heavy chain variable region that specifically binds to (i) a tumor-associated antigen (TAA), (ii) an infectious disease antigen that is not a sarbecovirus antigen, or (iii) an other-pathology antigen;
[7384] VH2 is a second immunoglobulin heavy chain variable region that specifically binds to (i) a tumor-associated antigen (TAA), (ii) an infectious disease antigen that is not a sarbecovirus antigen, or (iii) an other-pathology antigen;
[7385] VH3 is a third immunoglobulin heavy chain variable region that specifically binds to (i) a tumor-associated antigen (TAA), (ii) an infectious disease antigen that is not a sarbecovirus antigen, or (iii) an other-pathology antigen;
[7386] VH4 is a fourth immunoglobulin heavy chain variable region that specifically binds to (i) a tumor-associated antigen (TAA), (ii) an infectious disease antigen that is not a sarbecovirus antigen, or (iii) an other-pathology antigen;
[7387] L1-L12 are optional amino acid linkers;
[7388] CH1 is an immunoglobulin heavy chain constant region 1;
[7389] CL is an immunoglobulin light chain constant region; and
[7390] Fc is an immunoglobulin fragment crystallizable region comprising an immunoglobulin heavy chain constant region 2 (CH2), an immunoglobulin heavy chain constant region 3 (CH3), and optionally, an immunoglobulin hinge.

[7391] In any aspect shown herein as a structure from amino terminus to carboxy terminus, and with binding pairs selected from VL and/or VH or other structural regions such as CH2, CH3, when shown without a specific linker such as L1, L2, etc., such linkers are optionally present in such structures between each designated subsequence

[7392] In some aspects, the TAA is selected from the group consisting of 5′-nucleotidase, 5T4, A2AR, activin receptor-like kinase 1, adenocarcinoma antigen, ADRB3, AFP, AKAP-4, ALK, alpha-fetoprotein, androgenreceptor, angiopoietin 2, AOC3, APRIL, ATPDase, AXL, B7-4, B7DC, B7H1, B7H2, B7H3, B7H4, B7H5, B7H6, B7H7, B7RP1, BAFF, BAFFR, BCMA, bcr-abl, BlyS, BORIS, BST2, BTK, BTLA, C3, C5, C5a, C5a receptor, CA-125, CAIX, CanAg (a glycoform of MUC1), CCL11, CCL15, CCL17, CCL19, CCL2, CCL20, CCL21, CCL25, CCL3, CCL4, CCL5, CCL7, CCL8, CCR2, CCR3, CCR4, CCR5, CD11, CD11a, CD123, CD125, CD133, CD134, CD137, CD137L, CD147, CD15, CD154, CD160, CD16A, CD171, CD179a, CD18, CD184, CD19, CD2, CD20, CD200, CD22, CD221, CD23, CD24, CD242, CD25, CD27, CD272, CD276, CD278, CD279, CD28, CD3, CD30, CD300LF, CD319, CD33, CD37, CD38, CD39, CD38, CD4, CD40, CD40L, CD41, CD44v6, CD45, CD47, CD49B, CD5, CD51, CD52, CD54, CD56, CD6, CD62L, CD7, CD70, CD72, CD74, CD79a, CD79b, CD80, CD86, CD97, CEA, CEACAM5, claudin 18 isoform 2, CLDN6, CLEC12A, CLEC9, CLEC91, CLL-1, cMet, coagulation factor III, CRTH2, CS1, CSF-1, CSFIR, CSF-2, CSF-3, CTGF, CTLA4, CXCL1, CXCL12, CXCL13, CXCL2, CXCL4, CXCR3, CXORF61, CyclinB1, CYP1B1, dendritic cell-associated lectin 2, DLL3, DLL4, DNGR-1, DR5, E7, E-cadherin, EGFL7, EGFR, EGFRVIII, ELF2M, EMR2, endoglin, ENTPD1, EpCAM, EphA2, EPHA3, ephrin receptor A3, EphrinB2, episialin, ERBB2 (Her2/neu), ERBB3, ERG (TMPRSS2-ETS fusion gene), ETV6-AML, FAP, FCAR, FCER1, FCER1A, FCER2, FCRL5, FGF 23, FGFR, FGFR2, fibronectin extra domain-B, FLAP, FLT3, folate hydrolase, folate receptor 1, folate receptor alpha, folate receptor beta, FOLH1, Fos-relatedantigen1, Frizzled receptor, Fucosyl GM1, GD2, GD3, gelatinase B, Gi24, GITR, GITRL, GloboH, Glutamate carboxypeptidase II, glypican 3, GM3, GP100, GPC1, GPC2, GPC3, gplOO, GPNMB, GPR20, GPR5, GPRC5D, growth differentiation factor 8, GUCY2C, HAVCR1, HER1, HER2, HER3, HGF, HGFR, HHLA2, histone complex, HLA-DR, HMGB1, HMWMAA, HPVE6, hTERT, human telomerase reverse transcriptase, HVEM, ICAM-1, ICOS, ICOSL, IDO, IFNa, IgE, IGF-1, IGF1R, IGF-2, IGF-I receptor, IGLL1, IL1, IL10, IL12, IL13, IL13Ra2, IL-13Ra2, IL13Ra1, IL15, IL17, IL-17A, IL-17AF, IL-17F, IL17Rb, IL18, IL1B, IL1F10, IL-1a, IL-1B, IL2, IL-20, IL22, IL23, IL-23A, IL25, IL2Rbeta, IL-3 receptor, IL-31 receptor A, IL33, IL35, IL4, IL4Ra, IL5, ILSR, IL6, IL7, IL7Ra, IL8, IL9, IL9R, IL1A, IL-llRa, integrin α4, integrin α4 β7, integrin α5β1, integrin αIIbβ3, integrin αvβ3, integrin β7, interleukin 36 receptor IL1RAP, interleukin 36 receptor IL1RL2, intestinal carboxylesterase, ITGB4, ITK, KIR, KIR2D, KIT, LAG3, LAGE-1a, LAIR1, LAMP1, LCK, legumain, leptin, LewisY, LILRA2, LIV-1, LMP2, LOXL2, LPFS2, LRRC15, LY6K, LY75, LYPD3, MAD-CT-1, MAD-CT-2, MAGEA1, MAGE-A1, MCAM, MCP-1, MelanA/MART1, mesothelin, MHC classII, MIF, ML-IAP, MS4A1, MST1R (RON), MUC1, MUC-1, MUC16, MUC-16, MUC5AC, muthsp70-2, MYCN, NA17, NCA-90) granulocyte antigen, NCAM, NCR3LG1, nectin-4, NGNA ganglioside, NKG2A, NKG2D, NKp46, Notch 1, Notch receptor, NRP1, NTPDase-1, NY-BR-1, NY-ESO-1, o-acetyl-GD2, OR51E2, OX40, OX40L, OY-TES1, p53, p53mutant, PANX3, PAP, PAX3, PAX5, PCDC1, PCDP1, PCTA-1/Galectin8, PD-1, PDGFRA, PDGFR-beta, PD-L1, PD-L2, phosphate-sodium co-transporter, phosphatidylserine, PLAC1, polysialicacid, PROM1, prostase, prostein, PRSS21, PSCA, PSMA, PTK7, RAGE-1, RANKL, Ras mutant, rhIL1O, RhoC, root plate-specific spondin 3, ROR1, ROR2, RTN4, RU1, RU2, S152, sarcoma translocation breakpoints, SART3, scatter factor receptor kinase, SDC1, SIRPalpha, SISP1, SLAMF7, SLC, sLe, SLITRK6, spermprotein17, SPG64, sphingosine-1-phosphate, SSEA-4, SSX2, ST2, STEAP1, STEAP2, surviving and telomerase, Syk kinase, T14, TACI, TAG72, TARP, T-cell receptor, TCRβ, TDO, TEM1/CD248, TEM7R, tenascin C, TGFBETA, TGF-β1, TGF-β2, TGS5, the extracellular portion of the APRIL protein, Tie2, TIGIT, TIM3, TLR, TLR2, TLR4, TLR5, TLR9, TMEF1, TnAg, TNF, TNFa, TNFR superfamily member 4, TNFRSF7, Tp55, TRAC, TRAIL-R1, TRAIL-R2, TRAP, TREM1, TROP2, TRP-2, TSHR, TSLP, TSLPR, tumor antigen CTAA16.88, TWEAK, tyrosinase, TYRP1 glycoprotein 75, UPK2, VAP-1, VEGF, VEGFA, VEGFR-1, VEGFR2, vimentin, VISTA, Vstm3, WT1, WUCAM, and XAGE1.

[7393] In some aspects, the VL1 comprises a light chain complementarity determining region 1 (LCDR1), LCDR2, and/or LCDR3 of an antibody selected from the group consisting of losatuxizumab vedotin, utomilumab, urelumab, oleclumab, naptumomab estafenatox, ascrinvacumab, pintumomab, tacatuzumab tetraxetan, nesvacumab, vanucizumab, timolumab, vapaliximab, vepalimomab, enapotamab vedotin, ianalumab, belimumab, tabalumab, tibulizumab, belantamab mafodotin, teclistamab, teclistamab, detumomab, nacolomab tafenatox, eculizumab, lendalizumab, pexelizumab, pozelimab, ravulizumab, tesidolumab, vilobelimab, abagovomab, igovomab, oregovomab, sofituzumab vedotin, cantuzumab mertansine, cantuzuma bravtansine, girentuximab, altumomab pentetate, arcitumomab, besilesomab, bertilimumab, plozalizumab, mogamulizumab, leronlimab, PRO140, rovelizumab, rovelizumab, talacotuzumab, benralizumab, tavolimab, vonlerolizumab, gavilimomab, ziralimumab, fanolesomab, ipilimumab, ruplizumab, toralizumab, dapirolizumab pegol, toralizumab, dapirolizumab pegol, ruplizumab, blinatumomab, inebilizumab, loncastuximab tesirine, SGN-CD19A, tafasitamab, taplitumomab paptox, XMAB-5574, Budoprutug, Obexelimab, duvortuxizumab, englumafusp alfa, Emfizatamab, zeripatamig, siplizumab, blontuvetmab, FBTA05, ibritumomab tiuxetan, obinutuzumab, ocaratuzumab, ocrelizumab, ofatumumab, rituximab, tositumomab, ublituximab, veltuzumab, divozilimab, eramkafusp alfa, ripertamab, zuberitamab, glofitamab, nofetumomab merpentan, samalizumab, imvotamab, odronextamab, plamotamab, bectumomab, inotuzumab ozogamicin, moxetumomab pasudotox, pinatuzumab vedotin, gomiliximab, lumiliximab, inolimomab, inolimomab, daclizumab, camidanluma btesirine, basiliximab, varlilumab, omburtamab, enoblituzumab, vopratelimab, lulizumabpegol, TGN1412, muromonab-CD3, otelixizumab, teplizumab, visilizumab, epcoritamab, epcoritamab, brentuximab vedotin, iratumumab, azintuxizumab vedotin, gemtuzumab ozogamicin, lintuzumab, vadastuximab talirine, naratuximab emtansine, otlertuzumab, lilotomab satetraxetan, tetulomab, daratumumab, isatuximab, foralumab, mosunetuzumab, mosunetuzumab, cedelizumab, ibalizumab, keliximab, priliximab, tregalizumab, zanolimumab, bleselumab, iscalimab, lucatumumab, ravagalimab, selicrelumab, teneliximab, vanalimab, abciximab, bivatuzumab, iomab-B, telimomab aritox, zolimomab aritox, abituzumab, intetumumab, alemtuzumab, tamtuvetmab, lorvotuzumab mertansine, itolizumab, cusatuzumab, vorsetuzumab mafodotin, milatuzumab, iladatuzumab vedotin, polatuzumab vedotin, galiximab, cibisatamab, zolbetuximab, naxitamab, tisotumab vedotin, olendalizumab, pamrevlumab, lacnotuzumab, cabiralizumab, emactuzumab, axatilimab, gimsilumab, lenzilumab, namilumab, tremelimumab, ulocuplumab, tepoditamab, rovalpituzumab tesirine, tarlatamab, demcizumab, navicixizumab, drozitumab, parsatuzumab, depatuxizumab mafodotin, modotuximab, carotuximab, adecatumumab, adecatumumab, oportuzumab monatox, solitomab, tucotuzumab celmoleukin, edrecolomab, catumaxomab, ifabotuzumab, fibatuzumab, zalutumumab, panitumumab, cetuximab, futuximab, imgatuzumab, laprituximab emtansine, matuzumab, necitumumab, nimotuzumab, tomuzotuximab, amivantamab, amivantamab, epitumomab cituxetan, sontuzumab, duligotuzumab, elgemtumab, lumretuzumab, patritumab, seribantumab, zenocutuzumab, sibrotuzumab, burosumab, aprutumab ixadotin, radretumab, pasotuxizumab, farletuzumab, mirvetuximab soravtansine, vantictumab, TRBS07, 3F8, dinutuximab, dinutuximab beta, ecromeximab, mitumomab, andecaliximab, capromab, codrituzumab, glembatumumab vedotin, talquetamab, talquetamab, trevogrumab, indusatumab vedotin, ficlatuzumab, rilotumumab, zatuximab, pentuzimab, pentuzimab, margetuximab, timigutuzumab, trastuzumab, trastuzumab duocarmazine, trastuzumab emtansine, gancotamab, pertuzumab, ertumaxomab, emibetuzumab, telisotuzumab, telisotuzumab vedotin, derlotuximab biotin, apolizumab, onartuzumab, bersanlimab, enlimomabpegol, rontalizumab, sifalimumab, talizumab, ganitumab, istiratumab, robatumumab, teprotumumab, figitumumab, ganitumab, istiratumab, robatumumab, teprotumumab, cixutumumab, dalotuzumab, xentuzumab, dusigitumab, canakinumab, ustekinumab, ustekinumab, ustekinumab, briakinumab, briakinumab, abrezekimab, lebrikizumab, romilkimab, TNX-650, tralokinumab, anrukinzumab, brodalumab, ixekizumab, netakimab, perakizumab, secukinumab, vunakizumab, afascvikumab, afascvikumab, bimekizumab, bimekizumab, remtolumab, bermekimab, lutikizumab, lutikizumab, gevokizumab, cergutuzumab amunaleukin, fletikumab, fezakinumab, brazikumab, guselkumab, mirikizumab, tildrakizumab, risankizumab, flotetuzumab, nemolizumab, pascolizumab, dupilumab, mepolizumab, reslizumab, clazakizumab, elsilimomab, olokizumab, sarilumab, siltuximab, sirukumab, vobarilizumab, tocilizumab, SA237, satralizumab, enokizumab, prezalizumab, natalizumab, abrilumab, abrilumab, vedolizumab, volociximab, tadocizumab, etaracizumab, etrolizumab, spesolimab, vatelizumab, erlizumab, lirilumab, relatlimab, cBR96-doxorubicinimmunoconjugate, odulimomab, efalizumab, ladiratuzumab vedotin, simtuzumab, samrotamab vedotin, aselizumab, lupartumab amadotin, imalumab, carlumab, imaprelimab, amatuximab, amatuximab, anetumab ravtansine, narnatumab, clivatuzumab tetraxetan, pemtumomab, gatipotuzumab, ensituximab, lemalesomab, sulesomab, enfortumab vedotin, racotumomab, monalizumab, brontictuzumab, tarextumab, vesencumab, oxelumab, gilvetmab, tislelizumab, dostarlimab, BCD-100, nivolumab, PDR001, pembrolizumab, pidilizumab, retifanlimab, spartalizumab, sintilimab, cemiplimab, olaratumab, tovetumab, rinucumab, atezolizumab, avelumab, durvalumab, lifastuzumab vedotin, bavituximab, acapatamab, capromab, rosopatamab, nezastomig, pasotuxizumab, pelgifatamab, voxalatamab, cofetuzumab pelidotin, denosumab, rosmantuzumab, cirmtuzumab, atinumab, indatuximab ravtansine, elotuzumab, sirtratumab vedotin, sonepcizumab, vandortuzumab vedotin, minretumomab, satumomab pendetide, maslimomab, ontuxizumab, tenatumomab, fresolimumab, metelimumab, lerdelimumab, tezepelumab, etigilimab, tiragotumab, placulumab, prezalumab, infliximab, nerelimomab, ozoralizumab, adalimumab, afelimomab, certolizumab pegol, golimumab, mapatumumab, conatumumab, lexatumumab, tigatuzumab, sacituzumab govitecan, votumumab, pogalizumab, letolizumab, pankomab, anatumomab mafenatox, enavatuzumab, flanvotumab, brolucizumab, ranibizumab, varisacumab, bevacizumab, faricimab, icrucumab, alacizumab pegol, ramucirumab, pritumumab, and onvatilimab.

[7394] In some aspects, the VL2 comprises a light chain complementarity determining region 1 (LCDR1), LCDR2, and/or LCDR3 of an antibody selected from the group consisting of losatuxizumab vedotin, utomilumab, urelumab, oleclumab, naptumomab estafenatox, ascrinvacumab, pintumomab, tacatuzumab tetraxetan, nesvacumab, vanucizumab, timolumab, vapaliximab, vepalimomab, enapotamab vedotin, ianalumab, belimumab, tabalumab, tibulizumab, belantamab mafodotin, teclistamab, teclistamab, detumomab, nacolomab tafenatox, eculizumab, lendalizumab, pexelizumab, pozelimab, ravulizumab, tesidolumab, vilobelimab, abagovomab, igovomab, oregovomab, sofituzumab vedotin, cantuzumab mertansine, cantuzuma bravtansine, girentuximab, altumomab pentetate, arcitumomab, besilesomab, bertilimumab, plozalizumab, mogamulizumab, leronlimab, PRO140, rovelizumab, rovelizumab, talacotuzumab, benralizumab, tavolimab, vonlerolizumab, gavilimomab, ziralimumab, fanolesomab, ipilimumab, ruplizumab, toralizumab, dapirolizumab pegol, toralizumab, dapirolizumab pegol, ruplizumab, blinatumomab, inebilizumab, loncastuximab tesirine, SGN-CD19A, tafasitamab, taplitumomab paptox, XMAB-5574, Budoprutug, Obexelimab, duvortuxizumab, englumafusp alfa, Emfizatamab, zeripatamig, siplizumab, blontuvetmab, FBTA05, ibritumomab tiuxetan, obinutuzumab, ocaratuzumab, ocrelizumab, ofatumumab, rituximab, tositumomab, ublituximab, veltuzumab, divozilimab, eramkafusp alfa, ripertamab, zuberitamab, glofitamab, nofetumomab merpentan, samalizumab, imvotamab, odronextamab, plamotamab, bectumomab, inotuzumab ozogamicin, moxetumomab pasudotox, pinatuzumab vedotin, gomiliximab, lumiliximab, inolimomab, inolimomab, daclizumab, camidanluma btesirine, basiliximab, varlilumab, omburtamab, enoblituzumab, vopratelimab, lulizumabpegol, TGN1412, muromonab-CD3, otelixizumab, teplizumab, visilizumab, epcoritamab, epcoritamab, brentuximab vedotin, iratumumab, azintuxizumab vedotin, gemtuzumab ozogamicin, lintuzumab, vadastuximab talirine, naratuximab emtansine, otlertuzumab, lilotomab satetraxetan, tetulomab, daratumumab, isatuximab, foralumab, mosunetuzumab, mosunetuzumab, cedelizumab, ibalizumab, keliximab, priliximab, tregalizumab, zanolimumab, bleselumab, iscalimab, lucatumumab, ravagalimab, selicrelumab, teneliximab, vanalimab, abciximab, bivatuzumab, iomab-B, telimomab aritox, zolimomab aritox, abituzumab, intetumumab, alemtuzumab, tamtuvetmab, lorvotuzumab mertansine, itolizumab, cusatuzumab, vorsetuzumab mafodotin, milatuzumab, iladatuzumab vedotin, polatuzumab vedotin, galiximab, cibisatamab, zolbetuximab, naxitamab, tisotumab vedotin, olendalizumab, pamrevlumab, lacnotuzumab, cabiralizumab, emactuzumab, axatilimab, gimsilumab, lenzilumab, namilumab, tremelimumab, ulocuplumab, tepoditamab, rovalpituzumab tesirine, tarlatamab, demcizumab, navicixizumab, drozitumab, parsatuzumab, depatuxizumab mafodotin, modotuximab, carotuximab, adecatumumab, adecatumumab, oportuzumab monatox, solitomab, tucotuzumab celmoleukin, edrecolomab, catumaxomab, ifabotuzumab, fibatuzumab, zalutumumab, panitumumab, cetuximab, futuximab, imgatuzumab, laprituximab emtansine, matuzumab, necitumumab, nimotuzumab, tomuzotuximab, amivantamab, amivantamab, epitumomab cituxetan, sontuzumab, duligotuzumab, elgemtumab, lumretuzumab, patritumab, seribantumab, zenocutuzumab, sibrotuzumab, burosumab, aprutumab ixadotin, radretumab, pasotuxizumab, farletuzumab, mirvetuximab soravtansine, vantictumab, TRBS07, 3F8, dinutuximab, dinutuximab beta, ecromeximab, mitumomab, andecaliximab, capromab, codrituzumab, glembatumumab vedotin, talquetamab, talquetamab, trevogrumab, indusatumab vedotin, ficlatuzumab, rilotumumab, zatuximab, pentuzimab, pentuzimab, margetuximab, timigutuzumab, trastuzumab, trastuzumab duocarmazine, trastuzumab emtansine, gancotamab, pertuzumab, ertumaxomab, emibetuzumab, telisotuzumab, telisotuzumab vedotin, derlotuximab biotin, apolizumab, onartuzumab, bersanlimab, enlimomabpegol, rontalizumab, sifalimumab, talizumab, ganitumab, istiratumab, robatumumab, teprotumumab, figitumumab, ganitumab, istiratumab, robatumumab, teprotumumab, cixutumumab, dalotuzumab, xentuzumab, dusigitumab, canakinumab, ustekinumab, ustekinumab, ustekinumab, briakinumab, briakinumab, abrezekimab, lebrikizumab, romilkimab, TNX-650, tralokinumab, anrukinzumab, brodalumab, ixekizumab, netakimab, perakizumab, secukinumab, vunakizumab, afasevikumab, afasevikumab, bimekizumab, bimekizumab, remtolumab, bermekimab, lutikizumab, lutikizumab, gevokizumab, cergutuzumab amunaleukin, fletikumab, fezakinumab, brazikumab, guselkumab, mirikizumab, tildrakizumab, risankizumab, flotetuzumab, nemolizumab, pascolizumab, dupilumab, mepolizumab, reslizumab, clazakizumab, elsilimomab, olokizumab, sarilumab, siltuximab, sirukumab, vobarilizumab, tocilizumab, SA237, satralizumab, enokizumab, prezalizumab, natalizumab, abrilumab, abrilumab, vedolizumab, volociximab, tadocizumab, etaracizumab, etrolizumab, spesolimab, vatelizumab, erlizumab, lirilumab, relatlimab, cBR96-doxorubicinimmunoconjugate, odulimomab, efalizumab, ladiratuzumab vedotin, simtuzumab, samrotamab vedotin, aselizumab, lupartumab amadotin, imalumab, carlumab, imaprelimab, amatuximab, amatuximab, anetumab ravtansine, narnatumab, clivatuzumab tetraxetan, pemtumomab, gatipotuzumab, ensituximab, lemalesomab, sulesomab, enfortumab vedotin, racotumomab, monalizumab, brontictuzumab, tarextumab, vesencumab, oxelumab, gilvetmab, tislelizumab, dostarlimab, BCD-100, nivolumab, PDR001, pembrolizumab, pidilizumab, retifanlimab, spartalizumab, sintilimab, cemiplimab, olaratumab, tovetumab, rinucumab, atezolizumab, avelumab, durvalumab, lifastuzumab vedotin, bavituximab, acapatamab, capromab, rosopatamab, nezastomig, pasotuxizumab, pelgifatamab, voxalatamab, cofetuzumab pelidotin, denosumab, rosmantuzumab, cirmtuzumab, atinumab, indatuximab ravtansine, elotuzumab, sirtratumab vedotin, sonepcizumab, vandortuzumab vedotin, minretumomab, satumomab pendetide, maslimomab, ontuxizumab, tenatumomab, fresolimumab, metelimumab, lerdelimumab, tezepelumab, etigilimab, tiragotumab, placulumab, prezalumab, infliximab, nerelimomab, ozoralizumab, adalimumab, afelimomab, certolizumab pegol, golimumab, mapatumumab, conatumumab, lexatumumab, tigatuzumab, sacituzumab govitecan, votumumab, pogalizumab, letolizumab, pankomab, anatumomab mafenatox, enavatuzumab, flanvotumab, brolucizumab, ranibizumab, varisacumab, bevacizumab, faricimab, icrucumab, alacizumab pegol, ramucirumab, pritumumab, and onvatilimab.

[7395] In some aspects, the VL3 comprises a light chain complementarity determining region 1 (LCDR1), LCDR2, and/or LCDR3 of an antibody selected from the group consisting of losatuxizumab vedotin, utomilumab, urelumab, oleclumab, naptumomab estafenatox, ascrinvacumab, pintumomab, tacatuzumab tetraxetan, nesvacumab, vanucizumab, timolumab, vapaliximab, vepalimomab, enapotamab vedotin, ianalumab, belimumab, tabalumab, tibulizumab, belantamab mafodotin, teclistamab, teclistamab, detumomab, nacolomab tafenatox, eculizumab, lendalizumab, pexelizumab, pozelimab, ravulizumab, tesidolumab, vilobelimab, abagovomab, igovomab, oregovomab, sofituzumab vedotin, cantuzumab mertansine, cantuzuma bravtansine, girentuximab, altumomab pentetate, arcitumomab, besilesomab, bertilimumab, plozalizumab, mogamulizumab, leronlimab, PRO140, rovelizumab, rovelizumab, talacotuzumab, benralizumab, tavolimab, vonlerolizumab, gavilimomab, ziralimumab, fanolesomab, ipilimumab, ruplizumab, toralizumab, dapirolizumab pegol, toralizumab, dapirolizumab pegol, ruplizumab, blinatumomab, inebilizumab, loncastuximab tesirine, SGN-CD19A, tafasitamab, taplitumomab paptox, XMAB-5574, Budoprutug, Obexelimab, duvortuxizumab, englumafusp alfa, Emfizatamab, zeripatamig, siplizumab, blontuvetmab, FBTA05, ibritumomab tiuxetan, obinutuzumab, ocaratuzumab, ocrelizumab, ofatumumab, rituximab, tositumomab, ublituximab, veltuzumab, divozilimab, eramkafusp alfa, ripertamab, zuberitamab, glofitamab, nofetumomab merpentan, samalizumab, imvotamab, odronextamab, plamotamab, bectumomab, inotuzumab ozogamicin, moxetumomab pasudotox, pinatuzumab vedotin, gomiliximab, lumiliximab, inolimomab, inolimomab, daclizumab, camidanluma btesirine, basiliximab, varlilumab, omburtamab, enoblituzumab, vopratelimab, lulizumabpegol, TGN1412, muromonab-CD3, otelixizumab, teplizumab, visilizumab, epcoritamab, epcoritamab, brentuximab vedotin, iratumumab, azintuxizumab vedotin, gemtuzumab ozogamicin, lintuzumab, vadastuximab talirine, naratuximab emtansine, otlertuzumab, lilotomab satetraxetan, tetulomab, daratumumab, isatuximab, foralumab, mosunetuzumab, mosunetuzumab, cedelizumab, ibalizumab, keliximab, priliximab, tregalizumab, zanolimumab, bleselumab, iscalimab, lucatumumab, ravagalimab, selicrelumab, teneliximab, vanalimab, abciximab, bivatuzumab, iomab-B, telimomab aritox, zolimomab aritox, abituzumab, intetumumab, alemtuzumab, tamtuvetmab, lorvotuzumab mertansine, itolizumab, cusatuzumab, vorsetuzumab mafodotin, milatuzumab, iladatuzumab vedotin, polatuzumab vedotin, galiximab, cibisatamab, zolbetuximab, naxitamab, tisotumab vedotin, olendalizumab, pamrevlumab, lacnotuzumab, cabiralizumab, emactuzumab, axatilimab, gimsilumab, lenzilumab, namilumab, tremelimumab, ulocuplumab, tepoditamab, rovalpituzumab tesirine, tarlatamab, demcizumab, navicixizumab, drozitumab, parsatuzumab, depatuxizumab mafodotin, modotuximab, carotuximab, adecatumumab, adecatumumab, oportuzumab monatox, solitomab, tucotuzumab celmoleukin, edrecolomab, catumaxomab, ifabotuzumab, fibatuzumab, zalutumumab, panitumumab, cetuximab, futuximab, imgatuzumab, laprituximab emtansine, matuzumab, necitumumab, nimotuzumab, tomuzotuximab, amivantamab, amivantamab, epitumomab cituxetan, sontuzumab, duligotuzumab, elgemtumab, lumretuzumab, patritumab, seribantumab, zenocutuzumab, sibrotuzumab, burosumab, aprutumab ixadotin, radretumab, pasotuxizumab, farletuzumab, mirvetuximab soravtansine, vantictumab, TRBS07, 3F8, dinutuximab, dinutuximab beta, ecromeximab, mitumomab, andecaliximab, capromab, codrituzumab, glembatumumab vedotin, talquetamab, talquetamab, trevogrumab, indusatumab vedotin, ficlatuzumab, rilotumumab, zatuximab, pentuzimab, pentuzimab, margetuximab, timigutuzumab, trastuzumab, trastuzumab duocarmazine, trastuzumab emtansine, gancotamab, pertuzumab, ertumaxomab, emibetuzumab, telisotuzumab, telisotuzumab vedotin, derlotuximab biotin, apolizumab, onartuzumab, bersanlimab, enlimomabpegol, rontalizumab, sifalimumab, talizumab, ganitumab, istiratumab, robatumumab, teprotumumab, figitumumab, ganitumab, istiratumab, robatumumab, teprotumumab, cixutumumab, dalotuzumab, xentuzumab, dusigitumab, canakinumab, ustekinumab, ustekinumab, ustekinumab, briakinumab, briakinumab, abrezekimab, lebrikizumab, romilkimab, TNX-650, tralokinumab, anrukinzumab, brodalumab, ixekizumab, netakimab, perakizumab, secukinumab, vunakizumab, afasevikumab, afasevikumab, bimekizumab, bimekizumab, remtolumab, bermekimab, lutikizumab, lutikizumab, gevokizumab, cergutuzumab amunaleukin, fletikumab, fezakinumab, brazikumab, guselkumab, mirikizumab, tildrakizumab, risankizumab, flotetuzumab, nemolizumab, pascolizumab, dupilumab, mepolizumab, reslizumab, clazakizumab, elsilimomab, olokizumab, sarilumab, siltuximab, sirukumab, vobarilizumab, tocilizumab, SA237, satralizumab, enokizumab, prezalizumab, natalizumab, abrilumab, abrilumab, vedolizumab, volociximab, tadocizumab, etaracizumab, etrolizumab, spesolimab, vatelizumab, erlizumab, lirilumab, relatlimab, cBR96-doxorubicinimmunoconjugate, odulimomab, efalizumab, ladiratuzumab vedotin, simtuzumab, samrotamab vedotin, aselizumab, lupartumab amadotin, imalumab, carlumab, imaprelimab, amatuximab, amatuximab, anetumab ravtansine, narnatumab, clivatuzumab tetraxetan, pemtumomab, gatipotuzumab, ensituximab, lemalesomab, sulesomab, enfortumab vedotin, racotumomab, monalizumab, brontictuzumab, tarextumab, vesencumab, oxelumab, gilvetmab, tislelizumab, dostarlimab, BCD-100, nivolumab, PDR001, pembrolizumab, pidilizumab, retifanlimab, spartalizumab, sintilimab, cemiplimab, olaratumab, tovetumab, rinucumab, atezolizumab, avelumab, durvalumab, lifastuzumab vedotin, bavituximab, acapatamab, capromab, rosopatamab, nezastomig, pasotuxizumab, pelgifatamab, voxalatamab, cofetuzumab pelidotin, denosumab, rosmantuzumab, cirmtuzumab, atinumab, indatuximab ravtansine, elotuzumab, sirtratumab vedotin, sonepcizumab, vandortuzumab vedotin, minretumomab, satumomab pendetide, maslimomab, ontuxizumab, tenatumomab, fresolimumab, metelimumab, lerdelimumab, tezepelumab, etigilimab, tiragotumab, placulumab, prezalumab, infliximab, nerelimomab, ozoralizumab, adalimumab, afelimomab, certolizumab pegol, golimumab, mapatumumab, conatumumab, lexatumumab, tigatuzumab, sacituzumab govitecan, votumumab, pogalizumab, letolizumab, pankomab, anatumomab mafenatox, enavatuzumab, flanvotumab, brolucizumab, ranibizumab, varisacumab, bevacizumab, faricimab, icrucumab, alacizumab pegol, ramucirumab, pritumumab, and onvatilimab.

[7396] In some aspects, the VL4 comprises a light chain complementarity determining region 1 (LCDR1), LCDR2, and/or LCDR3 of an antibody selected from the group consisting of losatuxizumab vedotin, utomilumab, urelumab, oleclumab, naptumomab estafenatox, ascrinvacumab, pintumomab, tacatuzumab tetraxetan, nesvacumab, vanucizumab, timolumab, vapaliximab, vepalimomab, enapotamab vedotin, ianalumab, belimumab, tabalumab, tibulizumab, belantamab mafodotin, teclistamab, teclistamab, detumomab, nacolomab tafenatox, eculizumab, lendalizumab, pexelizumab, pozelimab, ravulizumab, tesidolumab, vilobelimab, abagovomab, igovomab, oregovomab, sofituzumab vedotin, cantuzumab mertansine, cantuzuma bravtansine, girentuximab, altumomab pentetate, arcitumomab, besilesomab, bertilimumab, plozalizumab, mogamulizumab, leronlimab, PRO140, rovelizumab, rovelizumab, talacotuzumab, benralizumab, tavolimab, vonlerolizumab, gavilimomab, ziralimumab, fanolesomab, ipilimumab, ruplizumab, toralizumab, dapirolizumab pegol, toralizumab, dapirolizumab pegol, ruplizumab, blinatumomab, inebilizumab, loncastuximab tesirine, SGN-CD19A, tafasitamab, taplitumomab paptox, XMAB-5574, Budoprutug, Obexelimab, duvortuxizumab, englumafusp alfa, Emfizatamab, zeripatamig, siplizumab, blontuvetmab, FBTA05, ibritumomab tiuxetan, obinutuzumab, ocaratuzumab, ocrelizumab, ofatumumab, rituximab, tositumomab, ublituximab, veltuzumab, divozilimab, eramkafusp alfa, ripertamab, zuberitamab, glofitamab, nofetumomab merpentan, samalizumab, imvotamab, odronextamab, plamotamab, bectumomab, inotuzumab ozogamicin, moxetumomab pasudotox, pinatuzumab vedotin, gomiliximab, lumiliximab, inolimomab, inolimomab, daclizumab, camidanluma btesirine, basiliximab, varlilumab, omburtamab, enoblituzumab, vopratelimab, lulizumabpegol, TGN1412, muromonab-CD3, otelixizumab, teplizumab, visilizumab, epcoritamab, epcoritamab, brentuximab vedotin, iratumumab, azintuxizumab vedotin, gemtuzumab ozogamicin, lintuzumab, vadastuximab talirine, naratuximab emtansine, otlertuzumab, lilotomab satetraxetan, tetulomab, daratumumab, isatuximab, foralumab, mosunetuzumab, mosunetuzumab, cedelizumab, ibalizumab, keliximab, priliximab, tregalizumab, zanolimumab, bleselumab, iscalimab, lucatumumab, ravagalimab, selicrelumab, teneliximab, vanalimab, abciximab, bivatuzumab, iomab-B, telimomab aritox, zolimomab aritox, abituzumab, intetumumab, alemtuzumab, tamtuvetmab, lorvotuzumab mertansine, itolizumab, cusatuzumab, vorsetuzumab mafodotin, milatuzumab, iladatuzumab vedotin, polatuzumab vedotin, galiximab, cibisatamab, zolbetuximab, naxitamab, tisotumab vedotin, olendalizumab, pamrevlumab, lacnotuzumab, cabiralizumab, emactuzumab, axatilimab, gimsilumab, lenzilumab, namilumab, tremelimumab, ulocuplumab, tepoditamab, rovalpituzumab tesirine, tarlatamab, demcizumab, navicixizumab, drozitumab, parsatuzumab, depatuxizumab mafodotin, modotuximab, carotuximab, adecatumumab, adecatumumab, oportuzumab monatox, solitomab, tucotuzumab celmoleukin, edrecolomab, catumaxomab, ifabotuzumab, fibatuzumab, zalutumumab, panitumumab, cetuximab, futuximab, imgatuzumab, laprituximab emtansine, matuzumab, necitumumab, nimotuzumab, tomuzotuximab, amivantamab, amivantamab, epitumomab cituxetan, sontuzumab, duligotuzumab, elgemtumab, lumretuzumab, patritumab, seribantumab, zenocutuzumab, sibrotuzumab, burosumab, aprutumab ixadotin, radretumab, pasotuxizumab, farletuzumab, mirvetuximab soravtansine, vantictumab, TRBS07, 3F8, dinutuximab, dinutuximab beta, ecromeximab, mitumomab, andecaliximab, capromab, codrituzumab, glembatumumab vedotin, talquetamab, talquetamab, trevogrumab, indusatumab vedotin, ficlatuzumab, rilotumumab, zatuximab, pentuzimab, pentuzimab, margetuximab, timigutuzumab, trastuzumab, trastuzumab duocarmazine, trastuzumab emtansine, gancotamab, pertuzumab, ertumaxomab, emibetuzumab, telisotuzumab, telisotuzumab vedotin, derlotuximab biotin, apolizumab, onartuzumab, bersanlimab, enlimomabpegol, rontalizumab, sifalimumab, talizumab, ganitumab, istiratumab, robatumumab, teprotumumab, figitumumab, ganitumab, istiratumab, robatumumab, teprotumumab, cixutumumab, dalotuzumab, xentuzumab, dusigitumab, canakinumab, ustekinumab, ustekinumab, ustekinumab, briakinumab, briakinumab, abrezekimab, lebrikizumab, romilkimab, TNX-650, tralokinumab, anrukinzumab, brodalumab, ixekizumab, netakimab, perakizumab, secukinumab, vunakizumab, afasevikumab, afasevikumab, bimekizumab, bimekizumab, remtolumab, bermekimab, lutikizumab, lutikizumab, gevokizumab, cergutuzumab amunaleukin, fletikumab, fezakinumab, brazikumab, guselkumab, mirikizumab, tildrakizumab, risankizumab, flotetuzumab, nemolizumab, pascolizumab, dupilumab, mepolizumab, reslizumab, clazakizumab, elsilimomab, olokizumab, sarilumab, siltuximab, sirukumab, vobarilizumab, tocilizumab, SA237, satralizumab, enokizumab, prezalizumab, natalizumab, abrilumab, abrilumab, vedolizumab, volociximab, tadocizumab, etaracizumab, etrolizumab, spesolimab, vatelizumab, erlizumab, lirilumab, relatlimab, cBR96-doxorubicinimmunoconjugate, odulimomab, efalizumab, ladiratuzumab vedotin, simtuzumab, samrotamab vedotin, aselizumab, lupartumab amadotin, imalumab, carlumab, imaprelimab, amatuximab, amatuximab, anetumab ravtansine, narnatumab, clivatuzumab tetraxetan, pemtumomab, gatipotuzumab, ensituximab, lemalesomab, sulesomab, enfortumab vedotin, racotumomab, monalizumab, brontictuzumab, tarextumab, vesencumab, oxelumab, gilvetmab, tislelizumab, dostarlimab, BCD-100, nivolumab, PDR001, pembrolizumab, pidilizumab, retifanlimab, spartalizumab, sintilimab, cemiplimab, olaratumab, tovetumab, rinucumab, atezolizumab, avelumab, durvalumab, lifastuzumab vedotin, bavituximab, acapatamab, capromab, rosopatamab, nezastomig, pasotuxizumab, pelgifatamab, voxalatamab, cofetuzumab pelidotin, denosumab, rosmantuzumab, cirmtuzumab, atinumab, indatuximab ravtansine, elotuzumab, sirtratumab vedotin, sonepcizumab, vandortuzumab vedotin, minretumomab, satumomab pendetide, maslimomab, ontuxizumab, tenatumomab, fresolimumab, metelimumab, lerdelimumab, tezepelumab, etigilimab, tiragotumab, placulumab, prezalumab, infliximab, nerelimomab, ozoralizumab, adalimumab, afelimomab, certolizumab pegol, golimumab, mapatumumab, conatumumab, lexatumumab, tigatuzumab, sacituzumab govitecan, votumumab, pogalizumab, letolizumab, pankomab, anatumomab mafenatox, enavatuzumab, flanvotumab, brolucizumab, ranibizumab, varisacumab, bevacizumab, faricimab, icrucumab, alacizumab pegol, ramucirumab, pritumumab, and onvatilimab.

[7397] In some aspects, the VH1 comprises a heavy chain complementarity determining region 1 (HCDR1), HCDR2, and/or HCDR3 of an antibody selected from the group consisting of losatuxizumab vedotin, utomilumab, urelumab, oleclumab, naptumomab estafenatox, ascrinvacumab, pintumomab, tacatuzumab tetraxetan, nesvacumab, vanucizumab, timolumab, vapaliximab, vepalimomab, enapotamab vedotin, ianalumab, belimumab, tabalumab, tibulizumab, belantamab mafodotin, teclistamab, teclistamab, detumomab, nacolomab tafenatox, eculizumab, lendalizumab, pexelizumab, pozelimab, ravulizumab, tesidolumab, vilobelimab, abagovomab, igovomab, oregovomab, sofituzumab vedotin, cantuzumab mertansine, cantuzuma bravtansine, girentuximab, altumomab pentetate, arcitumomab, besilesomab, bertilimumab, plozalizumab, mogamulizumab, leronlimab, PRO140, rovelizumab, rovelizumab, talacotuzumab, benralizumab, tavolimab, vonlerolizumab, gavilimomab, ziralimumab, fanolesomab, ipilimumab, ruplizumab, toralizumab, dapirolizumab pegol, toralizumab, dapirolizumab pegol, ruplizumab, blinatumomab, inebilizumab, loncastuximab tesirine, SGN-CD19A, tafasitamab, taplitumomab paptox, XMAB-5574, Budoprutug, Obexelimab, duvortuxizumab, englumafusp alfa, Emfizatamab, zeripatamig, siplizumab, blontuvetmab, FBTA05, ibritumomab tiuxetan, obinutuzumab, ocaratuzumab, ocrelizumab, ofatumumab, rituximab, tositumomab, ublituximab, veltuzumab, divozilimab, eramkafusp alfa, ripertamab, zuberitamab, glofitamab, nofetumomab merpentan, samalizumab, imvotamab, odronextamab, plamotamab, bectumomab, inotuzumab ozogamicin, moxetumomab pasudotox, pinatuzumab vedotin, gomiliximab, lumiliximab, inolimomab, inolimomab, daclizumab, camidanluma btesirine, basiliximab, varlilumab, omburtamab, enoblituzumab, vopratelimab, lulizumabpegol, TGN1412, muromonab-CD3, otelixizumab, teplizumab, visilizumab, epcoritamab, epcoritamab, brentuximab vedotin, iratumumab, azintuxizumab vedotin, gemtuzumab ozogamicin, lintuzumab, vadastuximab talirine, naratuximab emtansine, otlertuzumab, lilotomab satetraxetan, tetulomab, daratumumab, isatuximab, foralumab, mosunetuzumab, mosunetuzumab, cedelizumab, ibalizumab, keliximab, priliximab, tregalizumab, zanolimumab, bleselumab, iscalimab, lucatumumab, ravagalimab, selicrelumab, teneliximab, vanalimab, abciximab, bivatuzumab, iomab-B, telimomab aritox, zolimomab aritox, abituzumab, intetumumab, alemtuzumab, tamtuvetmab, lorvotuzumab mertansine, itolizumab, cusatuzumab, vorsetuzumab mafodotin, milatuzumab, iladatuzumab vedotin, polatuzumab vedotin, galiximab, cibisatamab, zolbetuximab, naxitamab, tisotumab vedotin, olendalizumab, pamrevlumab, lacnotuzumab, cabiralizumab, emactuzumab, axatilimab, gimsilumab, lenzilumab, namilumab, tremelimumab, ulocuplumab, tepoditamab, rovalpituzumab tesirine, tarlatamab, demcizumab, navicixizumab, drozitumab, parsatuzumab, depatuxizumab mafodotin, modotuximab, carotuximab, adecatumumab, adecatumumab, oportuzumab monatox, solitomab, tucotuzumab celmoleukin, edrecolomab, catumaxomab, ifabotuzumab, fibatuzumab, zalutumumab, panitumumab, cetuximab, futuximab, imgatuzumab, laprituximab emtansine, matuzumab, necitumumab, nimotuzumab, tomuzotuximab, amivantamab, amivantamab, epitumomab cituxetan, sontuzumab, duligotuzumab, elgemtumab, lumretuzumab, patritumab, seribantumab, zenocutuzumab, sibrotuzumab, burosumab, aprutumab ixadotin, radretumab, pasotuxizumab, farletuzumab, mirvetuximab soravtansine, vantictumab, TRBS07, 3F8, dinutuximab, dinutuximab beta, ecromeximab, mitumomab, andecaliximab, capromab, codrituzumab, glembatumumab vedotin, talquetamab, talquetamab, trevogrumab, indusatumab vedotin, ficlatuzumab, rilotumumab, zatuximab, pentuzimab, pentuzimab, margetuximab, timigutuzumab, trastuzumab, trastuzumab duocarmazine, trastuzumab emtansine, gancotamab, pertuzumab, ertumaxomab, emibetuzumab, telisotuzumab, telisotuzumab vedotin, derlotuximab biotin, apolizumab, onartuzumab, bersanlimab, enlimomabpegol, rontalizumab, sifalimumab, talizumab, ganitumab, istiratumab, robatumumab, teprotumumab, figitumumab, ganitumab, istiratumab, robatumumab, teprotumumab, cixutumumab, dalotuzumab, xentuzumab, dusigitumab, canakinumab, ustekinumab, ustekinumab, ustekinumab, briakinumab, briakinumab, abrezekimab, lebrikizumab, romilkimab, TNX-650, tralokinumab, anrukinzumab, brodalumab, ixekizumab, netakimab, perakizumab, secukinumab, vunakizumab, afasevikumab, afasevikumab, bimekizumab, bimekizumab, remtolumab, bermekimab, lutikizumab, lutikizumab, gevokizumab, cergutuzumab amunaleukin, fletikumab, fezakinumab, brazikumab, guselkumab, mirikizumab, tildrakizumab, risankizumab, flotetuzumab, nemolizumab, pascolizumab, dupilumab, mepolizumab, reslizumab, clazakizumab, elsilimomab, olokizumab, sarilumab, siltuximab, sirukumab, vobarilizumab, tocilizumab, SA237, satralizumab, enokizumab, prezalizumab, natalizumab, abrilumab, abrilumab, vedolizumab, volociximab, tadocizumab, etaracizumab, etrolizumab, spesolimab, vatelizumab, erlizumab, lirilumab, relatlimab, cBR96-doxorubicinimmunoconjugate, odulimomab, efalizumab, ladiratuzumab vedotin, simtuzumab, samrotamab vedotin, aselizumab, lupartumab amadotin, imalumab, carlumab, imaprelimab, amatuximab, amatuximab, anetumab ravtansine, narnatumab, clivatuzumab tetraxetan, pemtumomab, gatipotuzumab, ensituximab, lemalesomab, sulesomab, enfortumab vedotin, racotumomab, monalizumab, brontictuzumab, tarextumab, vesencumab, oxelumab, gilvetmab, tislelizumab, dostarlimab, BCD-100, nivolumab, PDR001, pembrolizumab, pidilizumab, retifanlimab, spartalizumab, sintilimab, cemiplimab, olaratumab, tovetumab, rinucumab, atezolizumab, avelumab, durvalumab, lifastuzumab vedotin, bavituximab, acapatamab, capromab, rosopatamab, nezastomig, pasotuxizumab, pelgifatamab, voxalatamab, cofetuzumab pelidotin, denosumab, rosmantuzumab, cirmtuzumab, atinumab, indatuximab ravtansine, elotuzumab, sirtratumab vedotin, sonepcizumab, vandortuzumab vedotin, minretumomab, satumomab pendetide, maslimomab, ontuxizumab, tenatumomab, fresolimumab, metelimumab, lerdelimumab, tezepelumab, etigilimab, tiragotumab, placulumab, prezalumab, infliximab, nerelimomab, ozoralizumab, adalimumab, afelimomab, certolizumab pegol, golimumab, mapatumumab, conatumumab, lexatumumab, tigatuzumab, sacituzumab govitecan, votumumab, pogalizumab, letolizumab, pankomab, anatumomab mafenatox, enavatuzumab, flanvotumab, brolucizumab, ranibizumab, varisacumab, bevacizumab, faricimab, icrucumab, alacizumab pegol, ramucirumab, pritumumab, and onvatilimab.

[7398] In some aspects, the VH2 comprises a heavy chain complementarity determining region 1 (HCDR1), HCDR2, and/or HCDR3 of an antibody selected from the group consisting of losatuxizumab vedotin, utomilumab, urelumab, oleclumab, naptumomab estafenatox, ascrinvacumab, pintumomab, tacatuzumab tetraxetan, nesvacumab, vanucizumab, timolumab, vapaliximab, vepalimomab, enapotamab vedotin, ianalumab, belimumab, tabalumab, tibulizumab, belantamab mafodotin, teclistamab, teclistamab, detumomab, nacolomab tafenatox, eculizumab, lendalizumab, pexelizumab, pozelimab, ravulizumab, tesidolumab, vilobelimab, abagovomab, igovomab, oregovomab, sofituzumab vedotin, cantuzumab mertansine, cantuzuma bravtansine, girentuximab, altumomab pentetate, arcitumomab, besilesomab, bertilimumab, plozalizumab, mogamulizumab, leronlimab, PRO140, rovelizumab, rovelizumab, talacotuzumab, benralizumab, tavolimab, vonlerolizumab, gavilimomab, ziralimumab, fanolesomab, ipilimumab, ruplizumab, toralizumab, dapirolizumab pegol, toralizumab, dapirolizumab pegol, ruplizumab, blinatumomab, inebilizumab, loncastuximab tesirine, SGN-CD19A, tafasitamab, taplitumomab paptox, XMAB-5574, Budoprutug, Obexelimab, duvortuxizumab, englumafusp alfa, Emfizatamab, zeripatamig, siplizumab, blontuvetmab, FBTA05, ibritumomab tiuxetan, obinutuzumab, ocaratuzumab, ocrelizumab, ofatumumab, rituximab, tositumomab, ublituximab, veltuzumab, divozilimab, eramkafusp alfa, ripertamab, zuberitamab, glofitamab, nofetumomab merpentan, samalizumab, imvotamab, odronextamab, plamotamab, bectumomab, inotuzumab ozogamicin, moxetumomab pasudotox, pinatuzumab vedotin, gomiliximab, lumiliximab, inolimomab, inolimomab, daclizumab, camidanluma btesirine, basiliximab, varlilumab, omburtamab, enoblituzumab, vopratelimab, lulizumabpegol, TGN1412, muromonab-CD3, otelixizumab, teplizumab, visilizumab, epcoritamab, epcoritamab, brentuximab vedotin, iratumumab, azintuxizumab vedotin, gemtuzumab ozogamicin, lintuzumab, vadastuximab talirine, naratuximab emtansine, otlertuzumab, lilotomab satetraxetan, tetulomab, daratumumab, isatuximab, foralumab, mosunetuzumab, mosunetuzumab, cedelizumab, ibalizumab, keliximab, priliximab, tregalizumab, zanolimumab, bleselumab, iscalimab, lucatumumab, ravagalimab, selicrelumab, teneliximab, vanalimab, abciximab, bivatuzumab, iomab-B, telimomab aritox, zolimomab aritox, abituzumab, intetumumab, alemtuzumab, tamtuvetmab, lorvotuzumab mertansine, itolizumab, cusatuzumab, vorsetuzumab mafodotin, milatuzumab, iladatuzumab vedotin, polatuzumab vedotin, galiximab, cibisatamab, zolbetuximab, naxitamab, tisotumab vedotin, olendalizumab, pamrevlumab, lacnotuzumab, cabiralizumab, emactuzumab, axatilimab, gimsilumab, lenzilumab, namilumab, tremelimumab, ulocuplumab, tepoditamab, rovalpituzumab tesirine, tarlatamab, demcizumab, navicixizumab, drozitumab, parsatuzumab, depatuxizumab mafodotin, modotuximab, carotuximab, adecatumumab, adecatumumab, oportuzumab monatox, solitomab, tucotuzumab celmoleukin, edrecolomab, catumaxomab, ifabotuzumab, fibatuzumab, zalutumumab, panitumumab, cetuximab, futuximab, imgatuzumab, laprituximab emtansine, matuzumab, necitumumab, nimotuzumab, tomuzotuximab, amivantamab, amivantamab, epitumomab cituxetan, sontuzumab, duligotuzumab, elgemtumab, lumretuzumab, patritumab, seribantumab, zenocutuzumab, sibrotuzumab, burosumab, aprutumab ixadotin, radretumab, pasotuxizumab, farletuzumab, mirvetuximab soravtansine, vantictumab, TRBS07, 3F8, dinutuximab, dinutuximab beta, ecromeximab, mitumomab, andecaliximab, capromab, codrituzumab, glembatumumab vedotin, talquetamab, talquetamab, trevogrumab, indusatumab vedotin, ficlatuzumab, rilotumumab, zatuximab, pentuzimab, pentuzimab, margetuximab, timigutuzumab, trastuzumab, trastuzumab duocarmazine, trastuzumab emtansine, gancotamab, pertuzumab, ertumaxomab, emibetuzumab, telisotuzumab, telisotuzumab vedotin, derlotuximab biotin, apolizumab, onartuzumab, bersanlimab, enlimomabpegol, rontalizumab, sifalimumab, talizumab, ganitumab, istiratumab, robatumumab, teprotumumab, figitumumab, ganitumab, istiratumab, robatumumab, teprotumumab, cixutumumab, dalotuzumab, xentuzumab, dusigitumab, canakinumab, ustekinumab, ustekinumab, ustekinumab, briakinumab, briakinumab, abrezekimab, lebrikizumab, romilkimab, TNX-650, tralokinumab, anrukinzumab, brodalumab, ixekizumab, netakimab, perakizumab, secukinumab, vunakizumab, afasevikumab, afasevikumab, bimekizumab, bimekizumab, remtolumab, bermekimab, lutikizumab, lutikizumab, gevokizumab, cergutuzumab amunaleukin, fletikumab, fezakinumab, brazikumab, guselkumab, mirikizumab, tildrakizumab, risankizumab, flotetuzumab, nemolizumab, pascolizumab, dupilumab, mepolizumab, reslizumab, clazakizumab, elsilimomab, olokizumab, sarilumab, siltuximab, sirukumab, vobarilizumab, tocilizumab, SA237, satralizumab, enokizumab, prezalizumab, natalizumab, abrilumab, abrilumab, vedolizumab, volociximab, tadocizumab, etaracizumab, etrolizumab, spesolimab, vatelizumab, erlizumab, lirilumab, relatlimab, cBR96-doxorubicinimmunoconjugate, odulimomab, efalizumab, ladiratuzumab vedotin, simtuzumab, samrotamab vedotin, aselizumab, lupartumab amadotin, imalumab, carlumab, imaprelimab, amatuximab, amatuximab, anetumab ravtansine, narnatumab, clivatuzumab tetraxetan, pemtumomab, gatipotuzumab, ensituximab, lemalesomab, sulesomab, enfortumab vedotin, racotumomab, monalizumab, brontictuzumab, tarextumab, vesencumab, oxelumab, gilvetmab, tislelizumab, dostarlimab, BCD-100, nivolumab, PDR001, pembrolizumab, pidilizumab, retifanlimab, spartalizumab, sintilimab, cemiplimab, olaratumab, tovetumab, rinucumab, atezolizumab, avelumab, durvalumab, lifastuzumab vedotin, bavituximab, acapatamab, capromab, rosopatamab, nezastomig, pasotuxizumab, pelgifatamab, voxalatamab, cofetuzumab pelidotin, denosumab, rosmantuzumab, cirmtuzumab, atinumab, indatuximab ravtansine, elotuzumab, sirtratumab vedotin, sonepcizumab, vandortuzumab vedotin, minretumomab, satumomab pendetide, maslimomab, ontuxizumab, tenatumomab, fresolimumab, metelimumab, lerdelimumab, tezepelumab, etigilimab, tiragotumab, placulumab, prezalumab, infliximab, nerelimomab, ozoralizumab, adalimumab, afelimomab, certolizumab pegol, golimumab, mapatumumab, conatumumab, lexatumumab, tigatuzumab, sacituzumab govitecan, votumumab, pogalizumab, letolizumab, pankomab, anatumomab mafenatox, enavatuzumab, flanvotumab, brolucizumab, ranibizumab, varisacumab, bevacizumab, faricimab, icrucumab, alacizumab pegol, ramucirumab, pritumumab, and onvatilimab.

[7399] In some aspects, the VH3 comprises a heavy chain complementarity determining region 1 (HCDR1), HCDR2, and/or HCDR3 of an antibody selected from the group consisting of losatuxizumab vedotin, utomilumab, urelumab, oleclumab, naptumomab estafenatox, ascrinvacumab, pintumomab, tacatuzumab tetraxetan, nesvacumab, vanucizumab, timolumab, vapaliximab, vepalimomab, enapotamab vedotin, ianalumab, belimumab, tabalumab, tibulizumab, belantamab mafodotin, teclistamab, teclistamab, detumomab, nacolomab tafenatox, eculizumab, lendalizumab, pexelizumab, pozelimab, ravulizumab, tesidolumab, vilobelimab, abagovomab, igovomab, oregovomab, sofituzumab vedotin, cantuzumab mertansine, cantuzuma bravtansine, girentuximab, altumomab pentetate, arcitumomab, besilesomab, bertilimumab, plozalizumab, mogamulizumab, leronlimab, PRO140, rovelizumab, rovelizumab, talacotuzumab, benralizumab, tavolimab, vonlerolizumab, gavilimomab, ziralimumab, fanolesomab, ipilimumab, ruplizumab, toralizumab, dapirolizumab pegol, toralizumab, dapirolizumab pegol, ruplizumab, blinatumomab, inebilizumab, loncastuximab tesirine, SGN-CD19A, tafasitamab, taplitumomab paptox, XMAB-5574, Budoprutug, Obexelimab, duvortuxizumab, englumafusp alfa, Emfizatamab, zeripatamig, siplizumab, blontuvetmab, FBTA05, ibritumomab tiuxetan, obinutuzumab, ocaratuzumab, ocrelizumab, ofatumumab, rituximab, tositumomab, ublituximab, veltuzumab, divozilimab, eramkafusp alfa, ripertamab, zuberitamab, glofitamab, nofetumomab merpentan, samalizumab, imvotamab, odronextamab, plamotamab, bectumomab, inotuzumab ozogamicin, moxetumomab pasudotox, pinatuzumab vedotin, gomiliximab, lumiliximab, inolimomab, inolimomab, daclizumab, camidanluma btesirine, basiliximab, varlilumab, omburtamab, enoblituzumab, vopratelimab, lulizumabpegol, TGN1412, muromonab-CD3, otelixizumab, teplizumab, visilizumab, epcoritamab, epcoritamab, brentuximab vedotin, iratumumab, azintuxizumab vedotin, gemtuzumab ozogamicin, lintuzumab, vadastuximab talirine, naratuximab emtansine, otlertuzumab, lilotomab satetraxetan, tetulomab, daratumumab, isatuximab, foralumab, mosunetuzumab, mosunetuzumab, cedelizumab, ibalizumab, keliximab, priliximab, tregalizumab, zanolimumab, bleselumab, iscalimab, lucatumumab, ravagalimab, selicrelumab, teneliximab, vanalimab, abciximab, bivatuzumab, iomab-B, telimomab aritox, zolimomab aritox, abituzumab, intetumumab, alemtuzumab, tamtuvetmab, lorvotuzumab mertansine, itolizumab, cusatuzumab, vorsetuzumab mafodotin, milatuzumab, iladatuzumab vedotin, polatuzumab vedotin, galiximab, cibisatamab, zolbetuximab, naxitamab, tisotumab vedotin, olendalizumab, pamrevlumab, lacnotuzumab, cabiralizumab, emactuzumab, axatilimab, gimsilumab, lenzilumab, namilumab, tremelimumab, ulocuplumab, tepoditamab, rovalpituzumab tesirine, tarlatamab, demcizumab, navicixizumab, drozitumab, parsatuzumab, depatuxizumab mafodotin, modotuximab, carotuximab, adecatumumab, adecatumumab, oportuzumab monatox, solitomab, tucotuzumab celmoleukin, edrecolomab, catumaxomab, ifabotuzumab, fibatuzumab, zalutumumab, panitumumab, cetuximab, futuximab, imgatuzumab, laprituximab emtansine, matuzumab, necitumumab, nimotuzumab, tomuzotuximab, amivantamab, amivantamab, epitumomab cituxetan, sontuzumab, duligotuzumab, elgemtumab, lumretuzumab, patritumab, seribantumab, zenocutuzumab, sibrotuzumab, burosumab, aprutumab ixadotin, radretumab, pasotuxizumab, farletuzumab, mirvetuximab soravtansine, vantictumab, TRBS07, 3F8, dinutuximab, dinutuximab beta, ecromeximab, mitumomab, andecaliximab, capromab, codrituzumab, glembatumumab vedotin, talquetamab, talquetamab, trevogrumab, indusatumab vedotin, ficlatuzumab, rilotumumab, zatuximab, pentuzimab, pentuzimab, margetuximab, timigutuzumab, trastuzumab, trastuzumab duocarmazine, trastuzumab emtansine, gancotamab, pertuzumab, ertumaxomab, emibetuzumab, telisotuzumab, telisotuzumab vedotin, derlotuximab biotin, apolizumab, onartuzumab, bersanlimab, enlimomabpegol, rontalizumab, sifalimumab, talizumab, ganitumab, istiratumab, robatumumab, teprotumumab, figitumumab, ganitumab, istiratumab, robatumumab, teprotumumab, cixutumumab, dalotuzumab, xentuzumab, dusigitumab, canakinumab, ustekinumab, ustekinumab, ustekinumab, briakinumab, briakinumab, abrezekimab, lebrikizumab, romilkimab, TNX-650, tralokinumab, anrukinzumab, brodalumab, ixekizumab, netakimab, perakizumab, secukinumab, vunakizumab, afasevikumab, afasevikumab, bimekizumab, bimekizumab, remtolumab, bermekimab, lutikizumab, lutikizumab, gevokizumab, cergutuzumab amunaleukin, fletikumab, fezakinumab, brazikumab, guselkumab, mirikizumab, tildrakizumab, risankizumab, flotetuzumab, nemolizumab, pascolizumab, dupilumab, mepolizumab, reslizumab, clazakizumab, elsilimomab, olokizumab, sarilumab, siltuximab, sirukumab, vobarilizumab, tocilizumab, SA237, satralizumab, enokizumab, prezalizumab, natalizumab, abrilumab, abrilumab, vedolizumab, volociximab, tadocizumab, etaracizumab, etrolizumab, spesolimab, vatelizumab, erlizumab, lirilumab, relatlimab, cBR96-doxorubicinimmunoconjugate, odulimomab, efalizumab, ladiratuzumab vedotin, simtuzumab, samrotamab vedotin, aselizumab, lupartumab amadotin, imalumab, carlumab, imaprelimab, amatuximab, amatuximab, anetumab ravtansine, narnatumab, clivatuzumab tetraxetan, pemtumomab, gatipotuzumab, ensituximab, lemalesomab, sulesomab, enfortumab vedotin, racotumomab, monalizumab, brontictuzumab, tarextumab, vesencumab, oxelumab, gilvetmab, tislelizumab, dostarlimab, BCD-100, nivolumab, PDR001, pembrolizumab, pidilizumab, retifanlimab, spartalizumab, sintilimab, cemiplimab, olaratumab, tovetumab, rinucumab, atezolizumab, avelumab, durvalumab, lifastuzumab vedotin, bavituximab, acapatamab, capromab, rosopatamab, nezastomig, pasotuxizumab, pelgifatamab, voxalatamab, cofetuzumab pelidotin, denosumab, rosmantuzumab, cirmtuzumab, atinumab, indatuximab ravtansine, elotuzumab, sirtratumab vedotin, sonepcizumab, vandortuzumab vedotin, minretumomab, satumomab pendetide, maslimomab, ontuxizumab, tenatumomab, fresolimumab, metelimumab, lerdelimumab, tezepelumab, etigilimab, tiragotumab, placulumab, prezalumab, infliximab, nerelimomab, ozoralizumab, adalimumab, afelimomab, certolizumab pegol, golimumab, mapatumumab, conatumumab, lexatumumab, tigatuzumab, sacituzumab govitecan, votumumab, pogalizumab, letolizumab, pankomab, anatumomab mafenatox, enavatuzumab, flanvotumab, brolucizumab, ranibizumab, varisacumab, bevacizumab, faricimab, icrucumab, alacizumab pegol, ramucirumab, pritumumab, and onvatilimab.

[7400] In some aspects, the VH4 comprises a heavy chain complementarity determining region 1 (HCDR1), HCDR2, and/or HCDR3 of an antibody selected from the group consisting of losatuxizumab vedotin, utomilumab, urelumab, oleclumab, naptumomab estafenatox, ascrinvacumab, pintumomab, tacatuzumab tetraxetan, nesvacumab, vanucizumab, timolumab, vapaliximab, vepalimomab, enapotamab vedotin, ianalumab, belimumab, tabalumab, tibulizumab, belantamab mafodotin, teclistamab, teclistamab, detumomab, nacolomab tafenatox, eculizumab, lendalizumab, pexelizumab, pozelimab, ravulizumab, tesidolumab, vilobelimab, abagovomab, igovomab, oregovomab, sofituzumab vedotin, cantuzumab mertansine, cantuzuma bravtansine, girentuximab, altumomab pentetate, arcitumomab, besilesomab, bertilimumab, plozalizumab, mogamulizumab, leronlimab, PRO140, rovelizumab, rovelizumab, talacotuzumab, benralizumab, tavolimab, vonlerolizumab, gavilimomab, ziralimumab, fanolesomab, ipilimumab, ruplizumab, toralizumab, dapirolizumab pegol, toralizumab, dapirolizumab pegol, ruplizumab, blinatumomab, inebilizumab, loncastuximab tesirine, SGN-CD19A, tafasitamab, taplitumomab paptox, XMAB-5574, Budoprutug, Obexelimab, duvortuxizumab, englumafusp alfa, Emfizatamab, zeripatamig, siplizumab, blontuvetmab, FBTA05, ibritumomab tiuxetan, obinutuzumab, ocaratuzumab, ocrelizumab, ofatumumab, rituximab, tositumomab, ublituximab, veltuzumab, divozilimab, eramkafusp alfa, ripertamab, zuberitamab, glofitamab, nofetumomab merpentan, samalizumab, imvotamab, odronextamab, plamotamab, bectumomab, inotuzumab ozogamicin, moxetumomab pasudotox, pinatuzumab vedotin, gomiliximab, lumiliximab, inolimomab, inolimomab, daclizumab, camidanluma btesirine, basiliximab, varlilumab, omburtamab, enoblituzumab, vopratelimab, lulizumabpegol, TGN1412, muromonab-CD3, otelixizumab, teplizumab, visilizumab, epcoritamab, epcoritamab, brentuximab vedotin, iratumumab, azintuxizumab vedotin, gemtuzumab ozogamicin, lintuzumab, vadastuximab talirine, naratuximab emtansine, otlertuzumab, lilotomab satetraxetan, tetulomab, daratumumab, isatuximab, foralumab, mosunetuzumab, mosunetuzumab, cedelizumab, ibalizumab, keliximab, priliximab, tregalizumab, zanolimumab, bleselumab, iscalimab, lucatumumab, ravagalimab, selicrelumab, teneliximab, vanalimab, abciximab, bivatuzumab, iomab-B, telimomab aritox, zolimomab aritox, abituzumab, intetumumab, alemtuzumab, tamtuvetmab, lorvotuzumab mertansine, itolizumab, cusatuzumab, vorsetuzumab mafodotin, milatuzumab, iladatuzumab vedotin, polatuzumab vedotin, galiximab, cibisatamab, zolbetuximab, naxitamab, tisotumab vedotin, olendalizumab, pamrevlumab, lacnotuzumab, cabiralizumab, emactuzumab, axatilimab, gimsilumab, lenzilumab, namilumab, tremelimumab, ulocuplumab, tepoditamab, rovalpituzumab tesirine, tarlatamab, demcizumab, navicixizumab, drozitumab, parsatuzumab, depatuxizumab mafodotin, modotuximab, carotuximab, adecatumumab, adecatumumab, oportuzumab monatox, solitomab, tucotuzumab celmoleukin, edrecolomab, catumaxomab, ifabotuzumab, fibatuzumab, zalutumumab, panitumumab, cetuximab, futuximab, imgatuzumab, laprituximab emtansine, matuzumab, necitumumab, nimotuzumab, tomuzotuximab, amivantamab, amivantamab, epitumomab cituxetan, sontuzumab, duligotuzumab, elgemtumab, lumretuzumab, patritumab, seribantumab, zenocutuzumab, sibrotuzumab, burosumab, aprutumab ixadotin, radretumab, pasotuxizumab, farletuzumab, mirvetuximab soravtansine, vantictumab, TRBS07, 3F8, dinutuximab, dinutuximab beta, ecromeximab, mitumomab, andecaliximab, capromab, codrituzumab, glembatumumab vedotin, talquetamab, talquetamab, trevogrumab, indusatumab vedotin, ficlatuzumab, rilotumumab, zatuximab, pentuzimab, pentuzimab, margetuximab, timigutuzumab, trastuzumab, trastuzumab duocarmazine, trastuzumab emtansine, gancotamab, pertuzumab, ertumaxomab, emibetuzumab, telisotuzumab, telisotuzumab vedotin, derlotuximab biotin, apolizumab, onartuzumab, bersanlimab, enlimomabpegol, rontalizumab, sifalimumab, talizumab, ganitumab, istiratumab, robatumumab, teprotumumab, figitumumab, ganitumab, istiratumab, robatumumab, teprotumumab, cixutumumab, dalotuzumab, xentuzumab, dusigitumab, canakinumab, ustekinumab, ustekinumab, ustekinumab, briakinumab, briakinumab, abrezekimab, lebrikizumab, romilkimab, TNX-650, tralokinumab, anrukinzumab, brodalumab, ixekizumab, netakimab, perakizumab, secukinumab, vunakizumab, afasevikumab, afasevikumab, bimekizumab, bimekizumab, remtolumab, bermekimab, lutikizumab, lutikizumab, gevokizumab, cergutuzumab amunaleukin, fletikumab, fezakinumab, brazikumab, guselkumab, mirikizumab, tildrakizumab, risankizumab, flotetuzumab, nemolizumab, pascolizumab, dupilumab, mepolizumab, reslizumab, clazakizumab, elsilimomab, olokizumab, sarilumab, siltuximab, sirukumab, vobarilizumab, tocilizumab, SA237, satralizumab, enokizumab, prezalizumab, natalizumab, abrilumab, abrilumab, vedolizumab, volociximab, tadocizumab, etaracizumab, etrolizumab, spesolimab, vatelizumab, erlizumab, lirilumab, relatlimab, cBR96-doxorubicinimmunoconjugate, odulimomab, efalizumab, ladiratuzumab vedotin, simtuzumab, samrotamab vedotin, aselizumab, lupartumab amadotin, imalumab, carlumab, imaprelimab, amatuximab, amatuximab, anetumab ravtansine, narnatumab, clivatuzumab tetraxetan, pemtumomab, gatipotuzumab, ensituximab, lemalesomab, sulesomab, enfortumab vedotin, racotumomab, monalizumab, brontictuzumab, tarextumab, vesencumab, oxelumab, gilvetmab, tislelizumab, dostarlimab, BCD-100, nivolumab, PDR001, pembrolizumab, pidilizumab, retifanlimab, spartalizumab, sintilimab, cemiplimab, olaratumab, tovetumab, rinucumab, atezolizumab, avelumab, durvalumab, lifastuzumab vedotin, bavituximab, acapatamab, capromab, rosopatamab, nezastomig, pasotuxizumab, pelgifatamab, voxalatamab, cofetuzumab pelidotin, denosumab, rosmantuzumab, cirmtuzumab, atinumab, indatuximab ravtansine, elotuzumab, sirtratumab vedotin, sonepcizumab, vandortuzumab vedotin, minretumomab, satumomab pendetide, maslimomab, ontuxizumab, tenatumomab, fresolimumab, metelimumab, lerdelimumab, tezepelumab, etigilimab, tiragotumab, placulumab, prezalumab, infliximab, nerelimomab, ozoralizumab, adalimumab, afelimomab, certolizumab pegol, golimumab, mapatumumab, conatumumab, lexatumumab, tigatuzumab, sacituzumab govitecan, votumumab, pogalizumab, letolizumab, pankomab, anatumomab mafenatox, enavatuzumab, flanvotumab, brolucizumab, ranibizumab, varisacumab, bevacizumab, faricimab, icrucumab, alacizumab pegol, ramucirumab, pritumumab, and onvatilimab.

[7401] In some aspects, the VL1 comprises a VL of an antibody selected from the group consisting of losatuxizumab vedotin, utomilumab, urelumab, oleclumab, naptumomab estafenatox, ascrinvacumab, pintumomab, tacatuzumab tetraxetan, nesvacumab, vanucizumab, timolumab, vapaliximab, vepalimomab, enapotamab vedotin, ianalumab, belimumab, tabalumab, tibulizumab, belantamab mafodotin, teclistamab, teclistamab, detumomab, nacolomab tafenatox, eculizumab, lendalizumab, pexelizumab, pozelimab, ravulizumab, tesidolumab, vilobelimab, abagovomab, igovomab, oregovomab, sofituzumab vedotin, cantuzumab mertansine, cantuzuma bravtansine, girentuximab, altumomab pentetate, arcitumomab, besilesomab, bertilimumab, plozalizumab, mogamulizumab, leronlimab, PRO140, rovelizumab, rovelizumab, talacotuzumab, benralizumab, tavolimab, vonlerolizumab, gavilimomab, ziralimumab, fanolesomab, ipilimumab, ruplizumab, toralizumab, dapirolizumab pegol, toralizumab, dapirolizumab pegol, ruplizumab, blinatumomab, inebilizumab, loncastuximab tesirine, SGN-CD19A, tafasitamab, taplitumomab paptox, XMAB-5574, Budoprutug, Obexelimab, duvortuxizumab, englumafusp alfa, Emfizatamab, zeripatamig, siplizumab, blontuvetmab, FBTA05, ibritumomab tiuxetan, obinutuzumab, ocaratuzumab, ocrelizumab, ofatumumab, rituximab, tositumomab, ublituximab, veltuzumab, divozilimab, eramkafusp alfa, ripertamab, zuberitamab, glofitamab, nofetumomab merpentan, samalizumab, imvotamab, odronextamab, plamotamab, bectumomab, inotuzumab ozogamicin, moxetumomab pasudotox, pinatuzumab vedotin, gomiliximab, lumiliximab, inolimomab, inolimomab, daclizumab, camidanluma btesirine, basiliximab, varlilumab, omburtamab, enoblituzumab, vopratelimab, lulizumabpegol, TGN1412, muromonab-CD3, otelixizumab, teplizumab, visilizumab, epcoritamab, epcoritamab, brentuximab vedotin, iratumumab, azintuxizumab vedotin, gemtuzumab ozogamicin, lintuzumab, vadastuximab talirine, naratuximab emtansine, otlertuzumab, lilotomab satetraxetan, tetulomab, daratumumab, isatuximab, foralumab, mosunetuzumab, mosunetuzumab, cedelizumab, ibalizumab, keliximab, priliximab, tregalizumab, zanolimumab, bleselumab, iscalimab, lucatumumab, ravagalimab, selicrelumab, teneliximab, vanalimab, abciximab, bivatuzumab, iomab-B, telimomab aritox, zolimomab aritox, abituzumab, intetumumab, alemtuzumab, tamtuvetmab, lorvotuzumab mertansine, itolizumab, cusatuzumab, vorsetuzumab mafodotin, milatuzumab, iladatuzumab vedotin, polatuzumab vedotin, galiximab, cibisatamab, zolbetuximab, naxitamab, tisotumab vedotin, olendalizumab, pamrevlumab, lacnotuzumab, cabiralizumab, emactuzumab, axatilimab, gimsilumab, lenzilumab, namilumab, tremelimumab, ulocuplumab, tepoditamab, rovalpituzumab tesirine, tarlatamab, demcizumab, navicixizumab, drozitumab, parsatuzumab, depatuxizumab mafodotin, modotuximab, carotuximab, adecatumumab, adecatumumab, oportuzumab monatox, solitomab, tucotuzumab celmoleukin, edrecolomab, catumaxomab, ifabotuzumab, fibatuzumab, zalutumumab, panitumumab, cetuximab, futuximab, imgatuzumab, laprituximab emtansine, matuzumab, necitumumab, nimotuzumab, tomuzotuximab, amivantamab, amivantamab, epitumomab cituxetan, sontuzumab, duligotuzumab, elgemtumab, lumretuzumab, patritumab, seribantumab, zenocutuzumab, sibrotuzumab, burosumab, aprutumab ixadotin, radretumab, pasotuxizumab, farletuzumab, mirvetuximab soravtansine, vantictumab, TRBS07, 3F8, dinutuximab, dinutuximab beta, ecromeximab, mitumomab, andecaliximab, capromab, codrituzumab, glembatumumab vedotin, talquetamab, talquetamab, trevogrumab, indusatumab vedotin, ficlatuzumab, rilotumumab, zatuximab, pentuzimab, pentuzimab, margetuximab, timigutuzumab, trastuzumab, trastuzumab duocarmazine, trastuzumab emtansine, gancotamab, pertuzumab, ertumaxomab, emibetuzumab, telisotuzumab, telisotuzumab vedotin, derlotuximab biotin, apolizumab, onartuzumab, bersanlimab, enlimomabpegol, rontalizumab, sifalimumab, talizumab, ganitumab, istiratumab, robatumumab, teprotumumab, figitumumab, ganitumab, istiratumab, robatumumab, teprotumumab, cixutumumab, dalotuzumab, xentuzumab, dusigitumab, canakinumab, ustekinumab, ustekinumab, ustekinumab, briakinumab, briakinumab, abrezekimab, lebrikizumab, romilkimab, TNX-650, tralokinumab, anrukinzumab, brodalumab, ixekizumab, netakimab, perakizumab, secukinumab, vunakizumab, afasevikumab, afasevikumab, bimekizumab, bimekizumab, remtolumab, bermekimab, lutikizumab, lutikizumab, gevokizumab, cergutuzumab amunaleukin, fletikumab, fezakinumab, brazikumab, guselkumab, mirikizumab, tildrakizumab, risankizumab, flotetuzumab, nemolizumab, pascolizumab, dupilumab, mepolizumab, reslizumab, clazakizumab, elsilimomab, olokizumab, sarilumab, siltuximab, sirukumab, vobarilizumab, tocilizumab, SA237, satralizumab, enokizumab, prezalizumab, natalizumab, abrilumab, abrilumab, vedolizumab, volociximab, tadocizumab, etaracizumab, etrolizumab, spesolimab, vatelizumab, erlizumab, lirilumab, relatlimab, cBR96-doxorubicinimmunoconjugate, odulimomab, efalizumab, ladiratuzumab vedotin, simtuzumab, samrotamab vedotin, aselizumab, lupartumab amadotin, imalumab, carlumab, imaprelimab, amatuximab, amatuximab, anetumab ravtansine, narnatumab, clivatuzumab tetraxetan, pemtumomab, gatipotuzumab, ensituximab, lemalesomab, sulesomab, enfortumab vedotin, racotumomab, monalizumab, brontictuzumab, tarextumab, vesencumab, oxelumab, gilvetmab, tislelizumab, dostarlimab, BCD-100, nivolumab, PDR001, pembrolizumab, pidilizumab, retifanlimab, spartalizumab, sintilimab, cemiplimab, olaratumab, tovetumab, rinucumab, atezolizumab, avelumab, durvalumab, lifastuzumab vedotin, bavituximab, acapatamab, capromab, rosopatamab, nezastomig, pasotuxizumab, pelgifatamab, voxalatamab, cofetuzumab pelidotin, denosumab, rosmantuzumab, cirmtuzumab, atinumab, indatuximab ravtansine, elotuzumab, sirtratumab vedotin, sonepcizumab, vandortuzumab vedotin, minretumomab, satumomab pendetide, maslimomab, ontuxizumab, tenatumomab, fresolimumab, metelimumab, lerdelimumab, tezepelumab, etigilimab, tiragotumab, placulumab, prezalumab, infliximab, nerelimomab, ozoralizumab, adalimumab, afelimomab, certolizumab pegol, golimumab, mapatumumab, conatumumab, lexatumumab, tigatuzumab, sacituzumab govitecan, votumumab, pogalizumab, letolizumab, pankomab, anatumomab mafenatox, enavatuzumab, flanvotumab, brolucizumab, ranibizumab, varisacumab, bevacizumab, faricimab, icrucumab, alacizumab pegol, ramucirumab, pritumumab, and onvatilimab.

[7402] In some aspects, the VL2 comprises a VL of an antibody selected from the group consisting of losatuxizumab vedotin, utomilumab, urelumab, oleclumab, naptumomab estafenatox, ascrinvacumab, pintumomab, tacatuzumab tetraxetan, nesvacumab, vanucizumab, timolumab, vapaliximab, vepalimomab, enapotamab vedotin, ianalumab, belimumab, tabalumab, tibulizumab, belantamab mafodotin, teclistamab, teclistamab, detumomab, nacolomab tafenatox, eculizumab, lendalizumab, pexelizumab, pozelimab, ravulizumab, tesidolumab, vilobelimab, abagovomab, igovomab, oregovomab, sofituzumab vedotin, cantuzumab mertansine, cantuzuma bravtansine, girentuximab, altumomab pentetate, arcitumomab, besilesomab, bertilimumab, plozalizumab, mogamulizumab, leronlimab, PRO140, rovelizumab, rovelizumab, talacotuzumab, benralizumab, tavolimab, vonlerolizumab, gavilimomab, ziralimumab, fanolesomab, ipilimumab, ruplizumab, toralizumab, dapirolizumab pegol, toralizumab, dapirolizumab pegol, ruplizumab, blinatumomab, inebilizumab, loncastuximab tesirine, SGN-CD19A, tafasitamab, taplitumomab paptox, XMAB-5574, Budoprutug, Obexelimab, duvortuxizumab, englumafusp alfa, Emfizatamab, zeripatamig, siplizumab, blontuvetmab, FBTA05, ibritumomab tiuxetan, obinutuzumab, ocaratuzumab, ocrelizumab, ofatumumab, rituximab, tositumomab, ublituximab, veltuzumab, divozilimab, eramkafusp alfa, ripertamab, zuberitamab, glofitamab, nofetumomab merpentan, samalizumab, imvotamab, odronextamab, plamotamab, bectumomab, inotuzumab ozogamicin, moxetumomab pasudotox, pinatuzumab vedotin, gomiliximab, lumiliximab, inolimomab, inolimomab, daclizumab, camidanluma btesirine, basiliximab, varlilumab, omburtamab, enoblituzumab, vopratelimab, lulizumabpegol, TGN1412, muromonab-CD3, otelixizumab, teplizumab, visilizumab, epcoritamab, epcoritamab, brentuximab vedotin, iratumumab, azintuxizumab vedotin, gemtuzumab ozogamicin, lintuzumab, vadastuximab talirine, naratuximab emtansine, otlertuzumab, lilotomab satetraxetan, tetulomab, daratumumab, isatuximab, foralumab, mosunetuzumab, mosunetuzumab, cedelizumab, ibalizumab, keliximab, priliximab, tregalizumab, zanolimumab, bleselumab, iscalimab, lucatumumab, ravagalimab, selicrelumab, teneliximab, vanalimab, abciximab, bivatuzumab, iomab-B, telimomab aritox, zolimomab aritox, abituzumab, intetumumab, alemtuzumab, tamtuvetmab, lorvotuzumab mertansine, itolizumab, cusatuzumab, vorsetuzumab mafodotin, milatuzumab, iladatuzumab vedotin, polatuzumab vedotin, galiximab, cibisatamab, zolbetuximab, naxitamab, tisotumab vedotin, olendalizumab, pamrevlumab, lacnotuzumab, cabiralizumab, emactuzumab, axatilimab, gimsilumab, lenzilumab, namilumab, tremelimumab, ulocuplumab, tepoditamab, rovalpituzumab tesirine, tarlatamab, demcizumab, navicixizumab, drozitumab, parsatuzumab, depatuxizumab mafodotin, modotuximab, carotuximab, adecatumumab, adecatumumab, oportuzumab monatox, solitomab, tucotuzumab celmoleukin, edrecolomab, catumaxomab, ifabotuzumab, fibatuzumab, zalutumumab, panitumumab, cetuximab, futuximab, imgatuzumab, laprituximab emtansine, matuzumab, necitumumab, nimotuzumab, tomuzotuximab, amivantamab, amivantamab, epitumomab cituxetan, sontuzumab, duligotuzumab, elgemtumab, lumretuzumab, patritumab, seribantumab, zenocutuzumab, sibrotuzumab, burosumab, aprutumab ixadotin, radretumab, pasotuxizumab, farletuzumab, mirvetuximab soravtansine, vantictumab, TRBS07, 3F8, dinutuximab, dinutuximab beta, ecromeximab, mitumomab, andecaliximab, capromab, codrituzumab, glembatumumab vedotin, talquetamab, talquetamab, trevogrumab, indusatumab vedotin, ficlatuzumab, rilotumumab, zatuximab, pentuzimab, pentuzimab, margetuximab, timigutuzumab, trastuzumab, trastuzumab duocarmazine, trastuzumab emtansine, gancotamab, pertuzumab, ertumaxomab, emibetuzumab, telisotuzumab, telisotuzumab vedotin, derlotuximab biotin, apolizumab, onartuzumab, bersanlimab, enlimomabpegol, rontalizumab, sifalimumab, talizumab, ganitumab, istiratumab, robatumumab, teprotumumab, figitumumab, ganitumab, istiratumab, robatumumab, teprotumumab, cixutumumab, dalotuzumab, xentuzumab, dusigitumab, canakinumab, ustekinumab, ustekinumab, ustekinumab, briakinumab, briakinumab, abrezekimab, lebrikizumab, romilkimab, TNX-650, tralokinumab, anrukinzumab, brodalumab, ixekizumab, netakimab, perakizumab, secukinumab, vunakizumab, afasevikumab, afascvikumab, bimekizumab, bimekizumab, remtolumab, bermekimab, lutikizumab, lutikizumab, gevokizumab, cergutuzumab amunaleukin, fletikumab, fezakinumab, brazikumab, guselkumab, mirikizumab, tildrakizumab, risankizumab, flotetuzumab, nemolizumab, pascolizumab, dupilumab, mepolizumab, reslizumab, clazakizumab, elsilimomab, olokizumab, sarilumab, siltuximab, sirukumab, vobarilizumab, tocilizumab, SA237, satralizumab, enokizumab, prezalizumab, natalizumab, abrilumab, abrilumab, vedolizumab, volociximab, tadocizumab, etaracizumab, etrolizumab, spesolimab, vatelizumab, erlizumab, lirilumab, relatlimab, cBR96-doxorubicinimmunoconjugate, odulimomab, efalizumab, ladiratuzumab vedotin, simtuzumab, samrotamab vedotin, aselizumab, lupartumab amadotin, imalumab, carlumab, imaprelimab, amatuximab, amatuximab, anetumab ravtansine, narnatumab, clivatuzumab tetraxetan, pemtumomab, gatipotuzumab, ensituximab, lemalesomab, sulesomab, enfortumab vedotin, racotumomab, monalizumab, brontictuzumab, tarextumab, vesencumab, oxelumab, gilvetmab, tislelizumab, dostarlimab, BCD-100, nivolumab, PDR001, pembrolizumab, pidilizumab, retifanlimab, spartalizumab, sintilimab, cemiplimab, olaratumab, tovetumab, rinucumab, atezolizumab, avelumab, durvalumab, lifastuzumab vedotin, bavituximab, acapatamab, capromab, rosopatamab, nezastomig, pasotuxizumab, pelgifatamab, voxalatamab, cofetuzumab pelidotin, denosumab, rosmantuzumab, cirmtuzumab, atinumab, indatuximab ravtansine, elotuzumab, sirtratumab vedotin, sonepcizumab, vandortuzumab vedotin, minretumomab, satumomab pendetide, maslimomab, ontuxizumab, tenatumomab, fresolimumab, metelimumab, lerdelimumab, tezepelumab, etigilimab, tiragotumab, placulumab, prezalumab, infliximab, nerelimomab, ozoralizumab, adalimumab, afelimomab, certolizumab pegol, golimumab, mapatumumab, conatumumab, lexatumumab, tigatuzumab, sacituzumab govitecan, votumumab, pogalizumab, letolizumab, pankomab, anatumomab mafenatox, enavatuzumab, flanvotumab, brolucizumab, ranibizumab, varisacumab, bevacizumab, faricimab, icrucumab, alacizumab pegol, ramucirumab, pritumumab, and onvatilimab.

[7403] In some aspects, the VL3 comprises a VL of an antibody selected from the group consisting of losatuxizumab vedotin, utomilumab, urelumab, oleclumab, naptumomab estafenatox, ascrinvacumab, pintumomab, tacatuzumab tetraxetan, nesvacumab, vanucizumab, timolumab, vapaliximab, vepalimomab, enapotamab vedotin, ianalumab, belimumab, tabalumab, tibulizumab, belantamab mafodotin, teclistamab, teclistamab, detumomab, nacolomab tafenatox, eculizumab, lendalizumab, pexelizumab, pozelimab, ravulizumab, tesidolumab, vilobelimab, abagovomab, igovomab, oregovomab, sofituzumab vedotin, cantuzumab mertansine, cantuzuma bravtansine, girentuximab, altumomab pentetate, arcitumomab, besilesomab, bertilimumab, plozalizumab, mogamulizumab, leronlimab, PRO140, rovelizumab, rovelizumab, talacotuzumab, benralizumab, tavolimab, vonlerolizumab, gavilimomab, ziralimumab, fanolesomab, ipilimumab, ruplizumab, toralizumab, dapirolizumab pegol, toralizumab, dapirolizumab pegol, ruplizumab, blinatumomab, inebilizumab, loncastuximab tesirine, SGN-CD19A, tafasitamab, taplitumomab paptox, XMAB-5574, Budoprutug, Obexelimab, duvortuxizumab, englumafusp alfa, Emfizatamab, zeripatamig, siplizumab, blontuvetmab, FBTA05, ibritumomab tiuxetan, obinutuzumab, ocaratuzumab, ocrelizumab, ofatumumab, rituximab, tositumomab, ublituximab, veltuzumab, divozilimab, eramkafusp alfa, ripertamab, zuberitamab, glofitamab, nofetumomab merpentan, samalizumab, imvotamab, odronextamab, plamotamab, bectumomab, inotuzumab ozogamicin, moxetumomab pasudotox, pinatuzumab vedotin, gomiliximab, lumiliximab, inolimomab, inolimomab, daclizumab, camidanluma btesirine, basiliximab, varlilumab, omburtamab, enoblituzumab, vopratelimab, lulizumabpegol, TGN1412, muromonab-CD3, otelixizumab, teplizumab, visilizumab, epcoritamab, epcoritamab, brentuximab vedotin, iratumumab, azintuxizumab vedotin, gemtuzumab ozogamicin, lintuzumab, vadastuximab talirine, naratuximab emtansine, otlertuzumab, lilotomab satetraxetan, tetulomab, daratumumab, isatuximab, foralumab, mosunetuzumab, mosunetuzumab, cedelizumab, ibalizumab, keliximab, priliximab, tregalizumab, zanolimumab, bleselumab, iscalimab, lucatumumab, ravagalimab, selicrelumab, teneliximab, vanalimab, abciximab, bivatuzumab, iomab-B, telimomab aritox, zolimomab aritox, abituzumab, intetumumab, alemtuzumab, tamtuvetmab, lorvotuzumab mertansine, itolizumab, cusatuzumab, vorsetuzumab mafodotin, milatuzumab, iladatuzumab vedotin, polatuzumab vedotin, galiximab, cibisatamab, zolbetuximab, naxitamab, tisotumab vedotin, olendalizumab, pamrevlumab, lacnotuzumab, cabiralizumab, emactuzumab, axatilimab, gimsilumab, lenzilumab, namilumab, tremelimumab, ulocuplumab, tepoditamab, rovalpituzumab tesirine, tarlatamab, demcizumab, navicixizumab, drozitumab, parsatuzumab, depatuxizumab mafodotin, modotuximab, carotuximab, adecatumumab, adecatumumab, oportuzumab monatox, solitomab, tucotuzumab celmoleukin, edrecolomab, catumaxomab, ifabotuzumab, fibatuzumab, zalutumumab, panitumumab, cetuximab, futuximab, imgatuzumab, laprituximab emtansine, matuzumab, necitumumab, nimotuzumab, tomuzotuximab, amivantamab, amivantamab, epitumomab cituxetan, sontuzumab, duligotuzumab, elgemtumab, lumretuzumab, patritumab, seribantumab, zenocutuzumab, sibrotuzumab, burosumab, aprutumab ixadotin, radretumab, pasotuxizumab, farletuzumab, mirvetuximab soravtansine, vantictumab, TRBS07, 3F8, dinutuximab, dinutuximab beta, ecromeximab, mitumomab, andecaliximab, capromab, codrituzumab, glembatumumab vedotin, talquetamab, talquetamab, trevogrumab, indusatumab vedotin, ficlatuzumab, rilotumumab, zatuximab, pentuzimab, pentuzimab, margetuximab, timigutuzumab, trastuzumab, trastuzumab duocarmazine, trastuzumab emtansine, gancotamab, pertuzumab, ertumaxomab, emibetuzumab, telisotuzumab, telisotuzumab vedotin, derlotuximab biotin, apolizumab, onartuzumab, bersanlimab, enlimomabpegol, rontalizumab, sifalimumab, talizumab, ganitumab, istiratumab, robatumumab, teprotumumab, figitumumab, ganitumab, istiratumab, robatumumab, teprotumumab, cixutumumab, dalotuzumab, xentuzumab, dusigitumab, canakinumab, ustekinumab, ustekinumab, ustekinumab, briakinumab, briakinumab, abrezekimab, lebrikizumab, romilkimab, TNX-650, tralokinumab, anrukinzumab, brodalumab, ixekizumab, netakimab, perakizumab, secukinumab, vunakizumab, afascvikumab, afasevikumab, bimekizumab, bimekizumab, remtolumab, bermekimab, lutikizumab, lutikizumab, gevokizumab, cergutuzumab amunaleukin, fletikumab, fezakinumab, brazikumab, guselkumab, mirikizumab, tildrakizumab, risankizumab, flotetuzumab, nemolizumab, pascolizumab, dupilumab, mepolizumab, reslizumab, clazakizumab, elsilimomab, olokizumab, sarilumab, siltuximab, sirukumab, vobarilizumab, tocilizumab, SA237, satralizumab, enokizumab, prezalizumab, natalizumab, abrilumab, abrilumab, vedolizumab, volociximab, tadocizumab, etaracizumab, etrolizumab, spesolimab, vatelizumab, erlizumab, lirilumab, relatlimab, cBR96-doxorubicinimmunoconjugate, odulimomab, efalizumab, ladiratuzumab vedotin, simtuzumab, samrotamab vedotin, aselizumab, lupartumab amadotin, imalumab, carlumab, imaprelimab, amatuximab, amatuximab, anetumab ravtansine, narnatumab, clivatuzumab tetraxetan, pemtumomab, gatipotuzumab, ensituximab, lemalesomab, sulesomab, enfortumab vedotin, racotumomab, monalizumab, brontictuzumab, tarextumab, vesencumab, oxelumab, gilvetmab, tislelizumab, dostarlimab, BCD-100, nivolumab, PDR001, pembrolizumab, pidilizumab, retifanlimab, spartalizumab, sintilimab, cemiplimab, olaratumab, tovetumab, rinucumab, atezolizumab, avelumab, durvalumab, lifastuzumab vedotin, bavituximab, acapatamab, capromab, rosopatamab, nezastomig, pasotuxizumab, pelgifatamab, voxalatamab, cofetuzumab pelidotin, denosumab, rosmantuzumab, cirmtuzumab, atinumab, indatuximab ravtansine, elotuzumab, sirtratumab vedotin, sonepcizumab, vandortuzumab vedotin, minretumomab, satumomab pendetide, maslimomab, ontuxizumab, tenatumomab, fresolimumab, metelimumab, lerdelimumab, tezepelumab, etigilimab, tiragotumab, placulumab, prezalumab, infliximab, nerelimomab, ozoralizumab, adalimumab, afelimomab, certolizumab pegol, golimumab, mapatumumab, conatumumab, lexatumumab, tigatuzumab, sacituzumab govitecan, votumumab, pogalizumab, letolizumab, pankomab, anatumomab mafenatox, enavatuzumab, flanvotumab, brolucizumab, ranibizumab, varisacumab, bevacizumab, faricimab, icrucumab, alacizumab pegol, ramucirumab, pritumumab, and onvatilimab.

[7404] In some aspects, the VL4 comprises a VL of an antibody selected from the group consisting of losatuxizumab vedotin, utomilumab, urelumab, oleclumab, naptumomab estafenatox, ascrinvacumab, pintumomab, tacatuzumab tetraxetan, nesvacumab, vanucizumab, timolumab, vapaliximab, vepalimomab, enapotamab vedotin, ianalumab, belimumab, tabalumab, tibulizumab, belantamab mafodotin, teclistamab, teclistamab, detumomab, nacolomab tafenatox, eculizumab, lendalizumab, pexelizumab, pozelimab, ravulizumab, tesidolumab, vilobelimab, abagovomab, igovomab, oregovomab, sofituzumab vedotin, cantuzumab mertansine, cantuzuma bravtansine, girentuximab, altumomab pentetate, arcitumomab, besilesomab, bertilimumab, plozalizumab, mogamulizumab, leronlimab, PRO140, rovelizumab, rovelizumab, talacotuzumab, benralizumab, tavolimab, vonlerolizumab, gavilimomab, ziralimumab, fanolesomab, ipilimumab, ruplizumab, toralizumab, dapirolizumab pegol, toralizumab, dapirolizumab pegol, ruplizumab, blinatumomab, inebilizumab, loncastuximab tesirine, SGN-CD19A, tafasitamab, taplitumomab paptox, XMAB-5574, Budoprutug, Obexelimab, duvortuxizumab, englumafusp alfa, Emfizatamab, zeripatamig, siplizumab, blontuvetmab, FBTA05, ibritumomab tiuxetan, obinutuzumab, ocaratuzumab, ocrelizumab, ofatumumab, rituximab, tositumomab, ublituximab, veltuzumab, divozilimab, eramkafusp alfa, ripertamab, zuberitamab, glofitamab, nofetumomab merpentan, samalizumab, imvotamab, odronextamab, plamotamab, bectumomab, inotuzumab ozogamicin, moxetumomab pasudotox, pinatuzumab vedotin, gomiliximab, lumiliximab, inolimomab, inolimomab, daclizumab, camidanluma btesirine, basiliximab, varlilumab, omburtamab, enoblituzumab, vopratelimab, lulizumabpegol, TGN1412, muromonab-CD3, otelixizumab, teplizumab, visilizumab, epcoritamab, epcoritamab, brentuximab vedotin, iratumumab, azintuxizumab vedotin, gemtuzumab ozogamicin, lintuzumab, vadastuximab talirine, naratuximab emtansine, otlertuzumab, lilotomab satetraxetan, tetulomab, daratumumab, isatuximab, foralumab, mosunetuzumab, mosunetuzumab, cedelizumab, ibalizumab, keliximab, priliximab, tregalizumab, zanolimumab, bleselumab, iscalimab, lucatumumab, ravagalimab, selicrelumab, teneliximab, vanalimab, abciximab, bivatuzumab, iomab-B, telimomab aritox, zolimomab aritox, abituzumab, intetumumab, alemtuzumab, tamtuvetmab, lorvotuzumab mertansine, itolizumab, cusatuzumab, vorsetuzumab mafodotin, milatuzumab, iladatuzumab vedotin, polatuzumab vedotin, galiximab, cibisatamab, zolbetuximab, naxitamab, tisotumab vedotin, olendalizumab, pamrevlumab, lacnotuzumab, cabiralizumab, emactuzumab, axatilimab, gimsilumab, lenzilumab, namilumab, tremelimumab, ulocuplumab, tepoditamab, rovalpituzumab tesirine, tarlatamab, demcizumab, navicixizumab, drozitumab, parsatuzumab, depatuxizumab mafodotin, modotuximab, carotuximab, adecatumumab, adecatumumab, oportuzumab monatox, solitomab, tucotuzumab celmoleukin, edrecolomab, catumaxomab, ifabotuzumab, fibatuzumab, zalutumumab, panitumumab, cetuximab, futuximab, imgatuzumab, laprituximab emtansine, matuzumab, necitumumab, nimotuzumab, tomuzotuximab, amivantamab, amivantamab, epitumomab cituxetan, sontuzumab, duligotuzumab, elgemtumab, lumretuzumab, patritumab, seribantumab, zenocutuzumab, sibrotuzumab, burosumab, aprutumab ixadotin, radretumab, pasotuxizumab, farletuzumab, mirvetuximab soravtansine, vantictumab, TRBS07, 3F8, dinutuximab, dinutuximab beta, ecromeximab, mitumomab, andecaliximab, capromab, codrituzumab, glembatumumab vedotin, talquetamab, talquetamab, trevogrumab, indusatumab vedotin, ficlatuzumab, rilotumumab, zatuximab, pentuzimab, pentuzimab, margetuximab, timigutuzumab, trastuzumab, trastuzumab duocarmazine, trastuzumab emtansine, gancotamab, pertuzumab, ertumaxomab, emibetuzumab, telisotuzumab, telisotuzumab vedotin, derlotuximab biotin, apolizumab, onartuzumab, bersanlimab, enlimomabpegol, rontalizumab, sifalimumab, talizumab, ganitumab, istiratumab, robatumumab, teprotumumab, figitumumab, ganitumab, istiratumab, robatumumab, teprotumumab, cixutumumab, dalotuzumab, xentuzumab, dusigitumab, canakinumab, ustekinumab, ustekinumab, ustekinumab, briakinumab, briakinumab, abrezekimab, lebrikizumab, romilkimab, TNX-650, tralokinumab, anrukinzumab, brodalumab, ixekizumab, netakimab, perakizumab, secukinumab, vunakizumab, afasevikumab, afasevikumab, bimekizumab, bimekizumab, remtolumab, bermekimab, lutikizumab, lutikizumab, gevokizumab, cergutuzumab amunaleukin, fletikumab, fezakinumab, brazikumab, guselkumab, mirikizumab, tildrakizumab, risankizumab, flotetuzumab, nemolizumab, pascolizumab, dupilumab, mepolizumab, reslizumab, clazakizumab, elsilimomab, olokizumab, sarilumab, siltuximab, sirukumab, vobarilizumab, tocilizumab, SA237, satralizumab, enokizumab, prezalizumab, natalizumab, abrilumab, abrilumab, vedolizumab, volociximab, tadocizumab, etaracizumab, etrolizumab, spesolimab, vatelizumab, erlizumab, lirilumab, relatlimab, cBR96-doxorubicinimmunoconjugate, odulimomab, efalizumab, ladiratuzumab vedotin, simtuzumab, samrotamab vedotin, aselizumab, lupartumab amadotin, imalumab, carlumab, imaprelimab, amatuximab, amatuximab, anetumab ravtansine, narnatumab, clivatuzumab tetraxetan, pemtumomab, gatipotuzumab, ensituximab, lemalesomab, sulesomab, enfortumab vedotin, racotumomab, monalizumab, brontictuzumab, tarextumab, vesencumab, oxelumab, gilvetmab, tislelizumab, dostarlimab, BCD-100, nivolumab, PDR001, pembrolizumab, pidilizumab, retifanlimab, spartalizumab, sintilimab, cemiplimab, olaratumab, tovetumab, rinucumab, atezolizumab, avelumab, durvalumab, lifastuzumab vedotin, bavituximab, acapatamab, capromab, rosopatamab, nezastomig, pasotuxizumab, pelgifatamab, voxalatamab, cofetuzumab pelidotin, denosumab, rosmantuzumab, cirmtuzumab, atinumab, indatuximab ravtansine, elotuzumab, sirtratumab vedotin, sonepcizumab, vandortuzumab vedotin, minretumomab, satumomab pendetide, maslimomab, ontuxizumab, tenatumomab, fresolimumab, metelimumab, lerdelimumab, tezepelumab, etigilimab, tiragotumab, placulumab, prezalumab, infliximab, nerelimomab, ozoralizumab, adalimumab, afelimomab, certolizumab pegol, golimumab, mapatumumab, conatumumab, lexatumumab, tigatuzumab, sacituzumab govitecan, votumumab, pogalizumab, letolizumab, pankomab, anatumomab mafenatox, enavatuzumab, flanvotumab, brolucizumab, ranibizumab, varisacumab, bevacizumab, faricimab, icrucumab, alacizumab pegol, ramucirumab, pritumumab, and onvatilimab.

[7405] In some aspects, the VH1 comprises a VH of an antibody selected from the group consisting of losatuxizumab vedotin, utomilumab, urelumab, oleclumab, naptumomab estafenatox, ascrinvacumab, pintumomab, tacatuzumab tetraxetan, nesvacumab, vanucizumab, timolumab, vapaliximab, vepalimomab, enapotamab vedotin, ianalumab, belimumab, tabalumab, tibulizumab, belantamab mafodotin, teclistamab, teclistamab, detumomab, nacolomab tafenatox, eculizumab, lendalizumab, pexelizumab, pozelimab, ravulizumab, tesidolumab, vilobelimab, abagovomab, igovomab, oregovomab, sofituzumab vedotin, cantuzumab mertansine, cantuzuma bravtansine, girentuximab, altumomab pentetate, arcitumomab, besilesomab, bertilimumab, plozalizumab, mogamulizumab, leronlimab, PRO140, rovelizumab, rovelizumab, talacotuzumab, benralizumab, tavolimab, vonlerolizumab, gavilimomab, ziralimumab, fanolesomab, ipilimumab, ruplizumab, toralizumab, dapirolizumab pegol, toralizumab, dapirolizumab pegol, ruplizumab, blinatumomab, inebilizumab, loncastuximab tesirine, SGN-CD19A, tafasitamab, taplitumomab paptox, XMAB-5574, Budoprutug, Obexelimab, duvortuxizumab, englumafusp alfa, Emfizatamab, zeripatamig, siplizumab, blontuvetmab, FBTA05, ibritumomab tiuxetan, obinutuzumab, ocaratuzumab, ocrelizumab, ofatumumab, rituximab, tositumomab, ublituximab, veltuzumab, divozilimab, eramkafusp alfa, ripertamab, zuberitamab, glofitamab, nofetumomab merpentan, samalizumab, imvotamab, odronextamab, plamotamab, bectumomab, inotuzumab ozogamicin, moxetumomab pasudotox, pinatuzumab vedotin, gomiliximab, lumiliximab, inolimomab, inolimomab, daclizumab, camidanluma btesirine, basiliximab, varlilumab, omburtamab, enoblituzumab, vopratelimab, lulizumabpegol, TGN1412, muromonab-CD3, otelixizumab, teplizumab, visilizumab, epcoritamab, epcoritamab, brentuximab vedotin, iratumumab, azintuxizumab vedotin, gemtuzumab ozogamicin, lintuzumab, vadastuximab talirine, naratuximab emtansine, otlertuzumab, lilotomab satetraxetan, tetulomab, daratumumab, isatuximab, foralumab, mosunetuzumab, mosunetuzumab, cedelizumab, ibalizumab, keliximab, priliximab, tregalizumab, zanolimumab, bleselumab, iscalimab, lucatumumab, ravagalimab, selicrelumab, teneliximab, vanalimab, abciximab, bivatuzumab, iomab-B, telimomab aritox, zolimomab aritox, abituzumab, intetumumab, alemtuzumab, tamtuvetmab, lorvotuzumab mertansine, itolizumab, cusatuzumab, vorsetuzumab mafodotin, milatuzumab, iladatuzumab vedotin, polatuzumab vedotin, galiximab, cibisatamab, zolbetuximab, naxitamab, tisotumab vedotin, olendalizumab, pamrevlumab, lacnotuzumab, cabiralizumab, emactuzumab, axatilimab, gimsilumab, lenzilumab, namilumab, tremelimumab, ulocuplumab, tepoditamab, rovalpituzumab tesirine, tarlatamab, demcizumab, navicixizumab, drozitumab, parsatuzumab, depatuxizumab mafodotin, modotuximab, carotuximab, adecatumumab, adecatumumab, oportuzumab monatox, solitomab, tucotuzumab celmoleukin, edrecolomab, catumaxomab, ifabotuzumab, fibatuzumab, zalutumumab, panitumumab, cetuximab, futuximab, imgatuzumab, laprituximab emtansine, matuzumab, necitumumab, nimotuzumab, tomuzotuximab, amivantamab, amivantamab, epitumomab cituxetan, sontuzumab, duligotuzumab, elgemtumab, lumretuzumab, patritumab, seribantumab, zenocutuzumab, sibrotuzumab, burosumab, aprutumab ixadotin, radretumab, pasotuxizumab, farletuzumab, mirvetuximab soravtansine, vantictumab, TRBS07, 3F8, dinutuximab, dinutuximab beta, ecromeximab, mitumomab, andecaliximab, capromab, codrituzumab, glembatumumab vedotin, talquetamab, talquetamab, trevogrumab, indusatumab vedotin, ficlatuzumab, rilotumumab, zatuximab, pentuzimab, pentuzimab, margetuximab, timigutuzumab, trastuzumab, trastuzumab duocarmazine, trastuzumab emtansine, gancotamab, pertuzumab, ertumaxomab, emibetuzumab, telisotuzumab, telisotuzumab vedotin, derlotuximab biotin, apolizumab, onartuzumab, bersanlimab, enlimomabpegol, rontalizumab, sifalimumab, talizumab, ganitumab, istiratumab, robatumumab, teprotumumab, figitumumab, ganitumab, istiratumab, robatumumab, teprotumumab, cixutumumab, dalotuzumab, xentuzumab, dusigitumab, canakinumab, ustekinumab, ustekinumab, ustekinumab, briakinumab, briakinumab, abrezekimab, lebrikizumab, romilkimab, TNX-650, tralokinumab, anrukinzumab, brodalumab, ixekizumab, netakimab, perakizumab, secukinumab, vunakizumab, afasevikumab, afasevikumab, bimekizumab, bimekizumab, remtolumab, bermekimab, lutikizumab, lutikizumab, gevokizumab, cergutuzumab amunaleukin, fletikumab, fezakinumab, brazikumab, guselkumab, mirikizumab, tildrakizumab, risankizumab, flotetuzumab, nemolizumab, pascolizumab, dupilumab, mepolizumab, reslizumab, clazakizumab, elsilimomab, olokizumab, sarilumab, siltuximab, sirukumab, vobarilizumab, tocilizumab, SA237, satralizumab, enokizumab, prezalizumab, natalizumab, abrilumab, abrilumab, vedolizumab, volociximab, tadocizumab, etaracizumab, etrolizumab, spesolimab, vatelizumab, erlizumab, lirilumab, relatlimab, cBR96-doxorubicinimmunoconjugate, odulimomab, efalizumab, ladiratuzumab vedotin, simtuzumab, samrotamab vedotin, aselizumab, lupartumab amadotin, imalumab, carlumab, imaprelimab, amatuximab, amatuximab, anetumab ravtansine, narnatumab, clivatuzumab tetraxetan, pemtumomab, gatipotuzumab, ensituximab, lemalesomab, sulesomab, enfortumab vedotin, racotumomab, monalizumab, brontictuzumab, tarextumab, vesencumab, oxelumab, gilvetmab, tislelizumab, dostarlimab, BCD-100, nivolumab, PDR001, pembrolizumab, pidilizumab, retifanlimab, spartalizumab, sintilimab, cemiplimab, olaratumab, tovetumab, rinucumab, atezolizumab, avelumab, durvalumab, lifastuzumab vedotin, bavituximab, acapatamab, capromab, rosopatamab, nezastomig, pasotuxizumab, pelgifatamab, voxalatamab, cofetuzumab pelidotin, denosumab, rosmantuzumab, cirmtuzumab, atinumab, indatuximab ravtansine, elotuzumab, sirtratumab vedotin, sonepcizumab, vandortuzumab vedotin, minretumomab, satumomab pendetide, maslimomab, ontuxizumab, tenatumomab, fresolimumab, metelimumab, lerdelimumab, tezepelumab, etigilimab, tiragotumab, placulumab, prezalumab, infliximab, nerelimomab, ozoralizumab, adalimumab, afelimomab, certolizumab pegol, golimumab, mapatumumab, conatumumab, lexatumumab, tigatuzumab, sacituzumab govitecan, votumumab, pogalizumab, letolizumab, pankomab, anatumomab mafenatox, enavatuzumab, flanvotumab, brolucizumab, ranibizumab, varisacumab, bevacizumab, faricimab, icrucumab, alacizumab pegol, ramucirumab, pritumumab, and onvatilimab.

[7406] In some aspects, the VH2 comprises a VH of an antibody selected from the group consisting of losatuxizumab vedotin, utomilumab, urelumab, oleclumab, naptumomab estafenatox, ascrinvacumab, pintumomab, tacatuzumab tetraxetan, nesvacumab, vanucizumab, timolumab, vapaliximab, vepalimomab, enapotamab vedotin, ianalumab, belimumab, tabalumab, tibulizumab, belantamab mafodotin, teclistamab, teclistamab, detumomab, nacolomab tafenatox, eculizumab, lendalizumab, pexelizumab, pozelimab, ravulizumab, tesidolumab, vilobelimab, abagovomab, igovomab, oregovomab, sofituzumab vedotin, cantuzumab mertansine, cantuzuma bravtansine, girentuximab, altumomab pentetate, arcitumomab, besilesomab, bertilimumab, plozalizumab, mogamulizumab, leronlimab, PRO140, rovelizumab, rovelizumab, talacotuzumab, benralizumab, tavolimab, vonlerolizumab, gavilimomab, ziralimumab, fanolesomab, ipilimumab, ruplizumab, toralizumab, dapirolizumab pegol, toralizumab, dapirolizumab pegol, ruplizumab, blinatumomab, inebilizumab, loncastuximab tesirine, SGN-CD19A, tafasitamab, taplitumomab paptox, XMAB-5574, Budoprutug, Obexelimab, duvortuxizumab, englumafusp alfa, Emfizatamab, zeripatamig, siplizumab, blontuvetmab, FBTA05, ibritumomab tiuxetan, obinutuzumab, ocaratuzumab, ocrelizumab, ofatumumab, rituximab, tositumomab, ublituximab, veltuzumab, divozilimab, eramkafusp alfa, ripertamab, zuberitamab, glofitamab, nofetumomab merpentan, samalizumab, imvotamab, odronextamab, plamotamab, bectumomab, inotuzumab ozogamicin, moxetumomab pasudotox, pinatuzumab vedotin, gomiliximab, lumiliximab, inolimomab, inolimomab, daclizumab, camidanluma btesirine, basiliximab, varlilumab, omburtamab, enoblituzumab, vopratelimab, lulizumabpegol, TGN1412, muromonab-CD3, otelixizumab, teplizumab, visilizumab, epcoritamab, epcoritamab, brentuximab vedotin, iratumumab, azintuxizumab vedotin, gemtuzumab ozogamicin, lintuzumab, vadastuximab talirine, naratuximab emtansine, otlertuzumab, lilotomab satetraxetan, tetulomab, daratumumab, isatuximab, foralumab, mosunetuzumab, mosunetuzumab, cedelizumab, ibalizumab, keliximab, priliximab, tregalizumab, zanolimumab, bleselumab, iscalimab, lucatumumab, ravagalimab, selicrelumab, teneliximab, vanalimab, abciximab, bivatuzumab, iomab-B, telimomab aritox, zolimomab aritox, abituzumab, intetumumab, alemtuzumab, tamtuvetmab, lorvotuzumab mertansine, itolizumab, cusatuzumab, vorsetuzumab mafodotin, milatuzumab, iladatuzumab vedotin, polatuzumab vedotin, galiximab, cibisatamab, zolbetuximab, naxitamab, tisotumab vedotin, olendalizumab, pamrevlumab, lacnotuzumab, cabiralizumab, emactuzumab, axatilimab, gimsilumab, lenzilumab, namilumab, tremelimumab, ulocuplumab, tepoditamab, rovalpituzumab tesirine, tarlatamab, demcizumab, navicixizumab, drozitumab, parsatuzumab, depatuxizumab mafodotin, modotuximab, carotuximab, adecatumumab, adecatumumab, oportuzumab monatox, solitomab, tucotuzumab celmoleukin, edrecolomab, catumaxomab, ifabotuzumab, fibatuzumab, zalutumumab, panitumumab, cetuximab, futuximab, imgatuzumab, laprituximab emtansine, matuzumab, necitumumab, nimotuzumab, tomuzotuximab, amivantamab, amivantamab, epitumomab cituxetan, sontuzumab, duligotuzumab, elgemtumab, lumretuzumab, patritumab, seribantumab, zenocutuzumab, sibrotuzumab, burosumab, aprutumab ixadotin, radretumab, pasotuxizumab, farletuzumab, mirvetuximab soravtansine, vantictumab, TRBS07, 3F8, dinutuximab, dinutuximab beta, ecromeximab, mitumomab, andecaliximab, capromab, codrituzumab, glembatumumab vedotin, talquetamab, talquetamab, trevogrumab, indusatumab vedotin, ficlatuzumab, rilotumumab, zatuximab, pentuzimab, pentuzimab, margetuximab, timigutuzumab, trastuzumab, trastuzumab duocarmazine, trastuzumab emtansine, gancotamab, pertuzumab, ertumaxomab, emibetuzumab, telisotuzumab, telisotuzumab vedotin, derlotuximab biotin, apolizumab, onartuzumab, bersanlimab, enlimomabpegol, rontalizumab, sifalimumab, talizumab, ganitumab, istiratumab, robatumumab, teprotumumab, figitumumab, ganitumab, istiratumab, robatumumab, teprotumumab, cixutumumab, dalotuzumab, xentuzumab, dusigitumab, canakinumab, ustekinumab, ustekinumab, ustekinumab, briakinumab, briakinumab, abrezekimab, lebrikizumab, romilkimab, TNX-650, tralokinumab, anrukinzumab, brodalumab, ixekizumab, netakimab, perakizumab, secukinumab, vunakizumab, afasevikumab, afasevikumab, bimekizumab, bimekizumab, remtolumab, bermekimab, lutikizumab, lutikizumab, gevokizumab, cergutuzumab amunaleukin, fletikumab, fezakinumab, brazikumab, guselkumab, mirikizumab, tildrakizumab, risankizumab, flotetuzumab, nemolizumab, pascolizumab, dupilumab, mepolizumab, reslizumab, clazakizumab, elsilimomab, olokizumab, sarilumab, siltuximab, sirukumab, vobarilizumab, tocilizumab, SA237, satralizumab, enokizumab, prezalizumab, natalizumab, abrilumab, abrilumab, vedolizumab, volociximab, tadocizumab, etaracizumab, etrolizumab, spesolimab, vatelizumab, erlizumab, lirilumab, relatlimab, cBR96-doxorubicinimmunoconjugate, odulimomab, efalizumab, ladiratuzumab vedotin, simtuzumab, samrotamab vedotin, aselizumab, lupartumab amadotin, imalumab, carlumab, imaprelimab, amatuximab, amatuximab, anetumab ravtansine, narnatumab, clivatuzumab tetraxetan, pemtumomab, gatipotuzumab, ensituximab, lemalesomab, sulesomab, enfortumab vedotin, racotumomab, monalizumab, brontictuzumab, tarextumab, vesencumab, oxelumab, gilvetmab, tislelizumab, dostarlimab, BCD-100, nivolumab, PDR001, pembrolizumab, pidilizumab, retifanlimab, spartalizumab, sintilimab, cemiplimab, olaratumab, tovetumab, rinucumab, atezolizumab, avelumab, durvalumab, lifastuzumab vedotin, bavituximab, acapatamab, capromab, rosopatamab, nezastomig, pasotuxizumab, pelgifatamab, voxalatamab, cofetuzumab pelidotin, denosumab, rosmantuzumab, cirmtuzumab, atinumab, indatuximab ravtansine, elotuzumab, sirtratumab vedotin, sonepcizumab, vandortuzumab vedotin, minretumomab, satumomab pendetide, maslimomab, ontuxizumab, tenatumomab, fresolimumab, metelimumab, lerdelimumab, tezepelumab, etigilimab, tiragotumab, placulumab, prezalumab, infliximab, nerelimomab, ozoralizumab, adalimumab, afelimomab, certolizumab pegol, golimumab, mapatumumab, conatumumab, lexatumumab, tigatuzumab, sacituzumab govitecan, votumumab, pogalizumab, letolizumab, pankomab, anatumomab mafenatox, enavatuzumab, flanvotumab, brolucizumab, ranibizumab, varisacumab, bevacizumab, faricimab, icrucumab, alacizumab pegol, ramucirumab, pritumumab, and onvatilimab.

[7407] In some aspects, the VH3 comprises a VH of an antibody selected from the group consisting of losatuxizumab vedotin, utomilumab, urelumab, oleclumab, naptumomab estafenatox, ascrinvacumab, pintumomab, tacatuzumab tetraxetan, nesvacumab, vanucizumab, timolumab, vapaliximab, vepalimomab, enapotamab vedotin, ianalumab, belimumab, tabalumab, tibulizumab, belantamab mafodotin, teclistamab, teclistamab, detumomab, nacolomab tafenatox, eculizumab, lendalizumab, pexelizumab, pozelimab, ravulizumab, tesidolumab, vilobelimab, abagovomab, igovomab, oregovomab, sofituzumab vedotin, cantuzumab mertansine, cantuzuma bravtansine, girentuximab, altumomab pentetate, arcitumomab, besilesomab, bertilimumab, plozalizumab, mogamulizumab, leronlimab, PRO140, rovelizumab, rovelizumab, talacotuzumab, benralizumab, tavolimab, vonlerolizumab, gavilimomab, ziralimumab, fanolesomab, ipilimumab, ruplizumab, toralizumab, dapirolizumab pegol, toralizumab, dapirolizumab pegol, ruplizumab, blinatumomab, inebilizumab, loncastuximab tesirine, SGN-CD19A, tafasitamab, taplitumomab paptox, XMAB-5574, Budoprutug, Obexelimab, duvortuxizumab, englumafusp alfa, Emfizatamab, zeripatamig, siplizumab, blontuvetmab, FBTA05, ibritumomab tiuxetan, obinutuzumab, ocaratuzumab, ocrelizumab, ofatumumab, rituximab, tositumomab, ublituximab, veltuzumab, divozilimab, eramkafusp alfa, ripertamab, zuberitamab, glofitamab, nofetumomab merpentan, samalizumab, imvotamab, odronextamab, plamotamab, bectumomab, inotuzumab ozogamicin, moxetumomab pasudotox, pinatuzumab vedotin, gomiliximab, lumiliximab, inolimomab, inolimomab, daclizumab, camidanluma btesirine, basiliximab, varlilumab, omburtamab, enoblituzumab, vopratelimab, lulizumabpegol, TGN1412, muromonab-CD3, otelixizumab, teplizumab, visilizumab, epcoritamab, epcoritamab, brentuximab vedotin, iratumumab, azintuxizumab vedotin, gemtuzumab ozogamicin, lintuzumab, vadastuximab talirine, naratuximab emtansine, otlertuzumab, lilotomab satetraxetan, tetulomab, daratumumab, isatuximab, foralumab, mosunetuzumab, mosunetuzumab, cedelizumab, ibalizumab, keliximab, priliximab, tregalizumab, zanolimumab, bleselumab, iscalimab, lucatumumab, ravagalimab, selicrelumab, teneliximab, vanalimab, abciximab, bivatuzumab, iomab-B, telimomab aritox, zolimomab aritox, abituzumab, intetumumab, alemtuzumab, tamtuvetmab, lorvotuzumab mertansine, itolizumab, cusatuzumab, vorsetuzumab mafodotin, milatuzumab, iladatuzumab vedotin, polatuzumab vedotin, galiximab, cibisatamab, zolbetuximab, naxitamab, tisotumab vedotin, olendalizumab, pamrevlumab, lacnotuzumab, cabiralizumab, emactuzumab, axatilimab, gimsilumab, lenzilumab, namilumab, tremelimumab, ulocuplumab, tepoditamab, rovalpituzumab tesirine, tarlatamab, demcizumab, navicixizumab, drozitumab, parsatuzumab, depatuxizumab mafodotin, modotuximab, carotuximab, adecatumumab, adecatumumab, oportuzumab monatox, solitomab, tucotuzumab celmoleukin, edrecolomab, catumaxomab, ifabotuzumab, fibatuzumab, zalutumumab, panitumumab, cetuximab, futuximab, imgatuzumab, laprituximab emtansine, matuzumab, necitumumab, nimotuzumab, tomuzotuximab, amivantamab, amivantamab, epitumomab cituxetan, sontuzumab, duligotuzumab, elgemtumab, lumretuzumab, patritumab, seribantumab, zenocutuzumab, sibrotuzumab, burosumab, aprutumab ixadotin, radretumab, pasotuxizumab, farletuzumab, mirvetuximab soravtansine, vantictumab, TRBS07, 3F8, dinutuximab, dinutuximab beta, ecromeximab, mitumomab, andecaliximab, capromab, codrituzumab, glembatumumab vedotin, talquetamab, talquetamab, trevogrumab, indusatumab vedotin, ficlatuzumab, rilotumumab, zatuximab, pentuzimab, pentuzimab, margetuximab, timigutuzumab, trastuzumab, trastuzumab duocarmazine, trastuzumab emtansine, gancotamab, pertuzumab, ertumaxomab, emibetuzumab, telisotuzumab, telisotuzumab vedotin, derlotuximab biotin, apolizumab, onartuzumab, bersanlimab, enlimomabpegol, rontalizumab, sifalimumab, talizumab, ganitumab, istiratumab, robatumumab, teprotumumab, figitumumab, ganitumab, istiratumab, robatumumab, teprotumumab, cixutumumab, dalotuzumab, xentuzumab, dusigitumab, canakinumab, ustekinumab, ustekinumab, ustekinumab, briakinumab, briakinumab, abrezekimab, lebrikizumab, romilkimab, TNX-650, tralokinumab, anrukinzumab, brodalumab, ixekizumab, netakimab, perakizumab, secukinumab, vunakizumab, afasevikumab, afascvikumab, bimekizumab, bimekizumab, remtolumab, bermekimab, lutikizumab, lutikizumab, gevokizumab, cergutuzumab amunaleukin, fletikumab, fezakinumab, brazikumab, guselkumab, mirikizumab, tildrakizumab, risankizumab, flotetuzumab, nemolizumab, pascolizumab, dupilumab, mepolizumab, reslizumab, clazakizumab, elsilimomab, olokizumab, sarilumab, siltuximab, sirukumab, vobarilizumab, tocilizumab, SA237, satralizumab, enokizumab, prezalizumab, natalizumab, abrilumab, abrilumab, vedolizumab, volociximab, tadocizumab, etaracizumab, etrolizumab, spesolimab, vatelizumab, erlizumab, lirilumab, relatlimab, cBR96-doxorubicinimmunoconjugate, odulimomab, efalizumab, ladiratuzumab vedotin, simtuzumab, samrotamab vedotin, aselizumab, lupartumab amadotin, imalumab, carlumab, imaprelimab, amatuximab, amatuximab, anetumab ravtansine, narnatumab, clivatuzumab tetraxetan, pemtumomab, gatipotuzumab, ensituximab, lemalesomab, sulesomab, enfortumab vedotin, racotumomab, monalizumab, brontictuzumab, tarextumab, vesencumab, oxelumab, gilvetmab, tislelizumab, dostarlimab, BCD-100, nivolumab, PDR001, pembrolizumab, pidilizumab, retifanlimab, spartalizumab, sintilimab, cemiplimab, olaratumab, tovetumab, rinucumab, atezolizumab, avelumab, durvalumab, lifastuzumab vedotin, bavituximab, acapatamab, capromab, rosopatamab, nezastomig, pasotuxizumab, pelgifatamab, voxalatamab, cofetuzumab pelidotin, denosumab, rosmantuzumab, cirmtuzumab, atinumab, indatuximab ravtansine, elotuzumab, sirtratumab vedotin, sonepcizumab, vandortuzumab vedotin, minretumomab, satumomab pendetide, maslimomab, ontuxizumab, tenatumomab, fresolimumab, metelimumab, lerdelimumab, tezepelumab, etigilimab, tiragotumab, placulumab, prezalumab, infliximab, nerelimomab, ozoralizumab, adalimumab, afelimomab, certolizumab pegol, golimumab, mapatumumab, conatumumab, lexatumumab, tigatuzumab, sacituzumab govitecan, votumumab, pogalizumab, letolizumab, pankomab, anatumomab mafenatox, enavatuzumab, flanvotumab, brolucizumab, ranibizumab, varisacumab, bevacizumab, faricimab, icrucumab, alacizumab pegol, ramucirumab, pritumumab, and onvatilimab.

[7408] In some aspects, the VH4 comprises a VH of an antibody selected from the group consisting of losatuxizumab vedotin, utomilumab, urelumab, oleclumab, naptumomab estafenatox, ascrinvacumab, pintumomab, tacatuzumab tetraxetan, nesvacumab, vanucizumab, timolumab, vapaliximab, vepalimomab, enapotamab vedotin, ianalumab, belimumab, tabalumab, tibulizumab, belantamab mafodotin, teclistamab, teclistamab, detumomab, nacolomab tafenatox, eculizumab, lendalizumab, pexelizumab, pozelimab, ravulizumab, tesidolumab, vilobelimab, abagovomab, igovomab, oregovomab, sofituzumab vedotin, cantuzumab mertansine, cantuzuma bravtansine, girentuximab, altumomab pentetate, arcitumomab, besilesomab, bertilimumab, plozalizumab, mogamulizumab, leronlimab, PRO140, rovelizumab, rovelizumab, talacotuzumab, benralizumab, tavolimab, vonlerolizumab, gavilimomab, ziralimumab, fanolesomab, ipilimumab, ruplizumab, toralizumab, dapirolizumab pegol, toralizumab, dapirolizumab pegol, ruplizumab, blinatumomab, inebilizumab, loncastuximab tesirine, SGN-CD19A, tafasitamab, taplitumomab paptox, XMAB-5574, Budoprutug, Obexelimab, duvortuxizumab, englumafusp alfa, Emfizatamab, zeripatamig, siplizumab, blontuvetmab, FBTA05, ibritumomab tiuxetan, obinutuzumab, ocaratuzumab, ocrelizumab, ofatumumab, rituximab, tositumomab, ublituximab, veltuzumab, divozilimab, eramkafusp alfa, ripertamab, zuberitamab, glofitamab, nofetumomab merpentan, samalizumab, imvotamab, odronextamab, plamotamab, bectumomab, inotuzumab ozogamicin, moxetumomab pasudotox, pinatuzumab vedotin, gomiliximab, lumiliximab, inolimomab, inolimomab, daclizumab, camidanluma btesirine, basiliximab, varlilumab, omburtamab, enoblituzumab, vopratelimab, lulizumabpegol, TGN1412, muromonab-CD3, otelixizumab, teplizumab, visilizumab, epcoritamab, epcoritamab, brentuximab vedotin, iratumumab, azintuxizumab vedotin, gemtuzumab ozogamicin, lintuzumab, vadastuximab talirine, naratuximab emtansine, otlertuzumab, lilotomab satetraxetan, tetulomab, daratumumab, isatuximab, foralumab, mosunetuzumab, mosunetuzumab, cedelizumab, ibalizumab, keliximab, priliximab, tregalizumab, zanolimumab, bleselumab, iscalimab, lucatumumab, ravagalimab, selicrelumab, teneliximab, vanalimab, abciximab, bivatuzumab, iomab-B, telimomab aritox, zolimomab aritox, abituzumab, intetumumab, alemtuzumab, tamtuvetmab, lorvotuzumab mertansine, itolizumab, cusatuzumab, vorsetuzumab mafodotin, milatuzumab, iladatuzumab vedotin, polatuzumab vedotin, galiximab, cibisatamab, zolbetuximab, naxitamab, tisotumab vedotin, olendalizumab, pamrevlumab, lacnotuzumab, cabiralizumab, emactuzumab, axatilimab, gimsilumab, lenzilumab, namilumab, tremelimumab, ulocuplumab, tepoditamab, rovalpituzumab tesirine, tarlatamab, demcizumab, navicixizumab, drozitumab, parsatuzumab, depatuxizumab mafodotin, modotuximab, carotuximab, adecatumumab, adecatumumab, oportuzumab monatox, solitomab, tucotuzumab celmoleukin, edrecolomab, catumaxomab, ifabotuzumab, fibatuzumab, zalutumumab, panitumumab, cetuximab, futuximab, imgatuzumab, laprituximab emtansine, matuzumab, necitumumab, nimotuzumab, tomuzotuximab, amivantamab, amivantamab, epitumomab cituxetan, sontuzumab, duligotuzumab, elgemtumab, lumretuzumab, patritumab, seribantumab, zenocutuzumab, sibrotuzumab, burosumab, aprutumab ixadotin, radretumab, pasotuxizumab, farletuzumab, mirvetuximab soravtansine, vantictumab, TRBS07, 3F8, dinutuximab, dinutuximab beta, ecromeximab, mitumomab, andecaliximab, capromab, codrituzumab, glembatumumab vedotin, talquetamab, talquetamab, trevogrumab, indusatumab vedotin, ficlatuzumab, rilotumumab, zatuximab, pentuzimab, pentuzimab, margetuximab, timigutuzumab, trastuzumab, trastuzumab duocarmazine, trastuzumab emtansine, gancotamab, pertuzumab, ertumaxomab, emibetuzumab, telisotuzumab, telisotuzumab vedotin, derlotuximab biotin, apolizumab, onartuzumab, bersanlimab, enlimomabpegol, rontalizumab, sifalimumab, talizumab, ganitumab, istiratumab, robatumumab, teprotumumab, figitumumab, ganitumab, istiratumab, robatumumab, teprotumumab, cixutumumab, dalotuzumab, xentuzumab, dusigitumab, canakinumab, ustekinumab, ustekinumab, ustekinumab, briakinumab, briakinumab, abrezekimab, lebrikizumab, romilkimab, TNX-650, tralokinumab, anrukinzumab, brodalumab, ixekizumab, netakimab, perakizumab, secukinumab, vunakizumab, afasevikumab, afasevikumab, bimekizumab, bimekizumab, remtolumab, bermekimab, lutikizumab, lutikizumab, gevokizumab, cergutuzumab amunaleukin, fletikumab, fezakinumab, brazikumab, guselkumab, mirikizumab, tildrakizumab, risankizumab, flotetuzumab, nemolizumab, pascolizumab, dupilumab, mepolizumab, reslizumab, clazakizumab, elsilimomab, olokizumab, sarilumab, siltuximab, sirukumab, vobarilizumab, tocilizumab, SA237, satralizumab, enokizumab, prezalizumab, natalizumab, abrilumab, abrilumab, vedolizumab, volociximab, tadocizumab, etaracizumab, etrolizumab, spesolimab, vatelizumab, erlizumab, lirilumab, relatlimab, cBR96-doxorubicinimmunoconjugate, odulimomab, efalizumab, ladiratuzumab vedotin, simtuzumab, samrotamab vedotin, aselizumab, lupartumab amadotin, imalumab, carlumab, imaprelimab, amatuximab, amatuximab, anetumab ravtansine, narnatumab, clivatuzumab tetraxetan, pemtumomab, gatipotuzumab, ensituximab, lemalesomab, sulesomab, enfortumab vedotin, racotumomab, monalizumab, brontictuzumab, tarextumab, vesencumab, oxelumab, gilvetmab, tislelizumab, dostarlimab, BCD-100, nivolumab, PDR001, pembrolizumab, pidilizumab, retifanlimab, spartalizumab, sintilimab, cemiplimab, olaratumab, tovetumab, rinucumab, atezolizumab, avelumab, durvalumab, lifastuzumab vedotin, bavituximab, acapatamab, capromab, rosopatamab, nezastomig, pasotuxizumab, pelgifatamab, voxalatamab, cofetuzumab pelidotin, denosumab, rosmantuzumab, cirmtuzumab, atinumab, indatuximab ravtansine, elotuzumab, sirtratumab vedotin, sonepcizumab, vandortuzumab vedotin, minretumomab, satumomab pendetide, maslimomab, ontuxizumab, tenatumomab, fresolimumab, metelimumab, lerdelimumab, tezepelumab, etigilimab, tiragotumab, placulumab, prezalumab, infliximab, nerelimomab, ozoralizumab, adalimumab, afelimomab, certolizumab pegol, golimumab, mapatumumab, conatumumab, lexatumumab, tigatuzumab, sacituzumab govitecan, votumumab, pogalizumab, letolizumab, pankomab, anatumomab mafenatox, enavatuzumab, flanvotumab, brolucizumab, ranibizumab, varisacumab, bevacizumab, faricimab, icrucumab, alacizumab pegol, ramucirumab, pritumumab, and onvatilimab.

[7409] In some aspects, the VL1 comprises (i) a complementarity determining region (CDR) 1 having an amino acid sequence that is at least 65%, at least 70%, at least 75%, at least 80%, at least 85%, at least 90%, at least 95%, at least 99%, or 100% identical to any one of SEQ ID NOs: 1096, 1103, 1110, 1120, 1127, 1134, 1141, 1148, 1155, 1162, 1169, 1174, 1181, 1188, 1199, 1211, 1221, 1228, 1235, 1247, 1254, 1261, 1266, 1271, 1278, 1285, 1292, 1299, 1306, 1313, 1319, 1326, 1339, 1352, 1359, 1366, 1373, 1382, 1394, 1401, 1408, 1414, 1421, 1428, 1441, 1448, 1455, 1461, 1468, 1475, 1488, 1495, 1508, 1519, 1526, 1531, 1538, 1544, 1556, 1568, 1574, 1581, 1594, 1601, 1608, 1615, 1622, 1629, 1636, 1643, 1650, 1657, 1672, 1679, 1689, 1697, 1708, 1715, 1718, 1723, 1727, 1738, 1743, 1752, 1761, 1763, 1769, 1776, and 1786; (ii) a CDR2 having an amino acid sequence that is at least 65%, at least 70%, at least 75%, at least 80%, at least 85%, at least 90%, at least 95%, at least 99%, or 100% identical to any one of SEQ ID NOs: 1200, 1212, 1680, 1690, 1698, 1709, 1728, 1739, 1744, 1753, 1770, and 1777; or at least 65%, at least 70%, at least 75%, at least 80%, at least 85%, at least 90%, at least 95%, at least 99%, or 100% identical to any one of amino acid sequences AAS, APS, AT, ATS, DAS, DDG, DDS, DT, DTS, DVS, EAS, FTS, GAF, GAN, GAS, GAT, GIS, GKN, GNS, HTS, KVS, LAS, LGS, LVS, NAK, NTN, QMS, RMS, RTS, SAS, TTS, WAS, YAS, YAT, YGS, YRS, and YTS; and (iii) a CDR3 having an amino acid sequence that is at least 65%, at least 70%, at least 75%, at least 80%, at least 85%, at least 90%, at least 95%, at least 99%, or 100% identical to any one of SEQ ID NOs: 1097, 1104, 1111, 1121, 1128, 1135, 1142, 1149, 1156, 1163, 1170, 1175, 1182, 1189, 1195, 1201, 1207, 1213, 1222, 1229, 1236, 2009, 1248, 1255, 1262, 1267, 1272, 1279, 1286, 1293, 1300, 1307, 1320, 1327, 1333, 1340, 1346, 1353, 1360, 1367, 1374, 1383, 1389, 1395, 1402, 1409, 1415, 1422, 1429, 1435, 1442, 1449, 1456, 1462, 1469, 1476, 1482, 1489, 1496, 1502, 1509, 1513, 1520, 1532, 1539, 1545, 1557, 1562, 1569, 1575, 1582, 1588, 1595, 1602, 1609, 1616, 1623, 1630, 1637, 1644, 1651, 1658, 1663, 1673, 1681, 1691, 1699, 1710, 1729, 1735, 1745, 1751, 1754, 1778, 1787, and 1976.

[7410] In some aspects, the VL2 comprises (i) a complementarity determining region (CDR) 1 having an amino acid sequence that is at least 65%, at least 70%, at least 75%, at least 80%, at least 85%, at least 90%, at least 95%, at least 99%, or 100% identical to any one of SEQ ID NOs: 1096, 1103, 1110, 1120, 1127, 1134, 1141, 1148, 1155, 1162, 1169, 1174, 1181, 1188, 1199, 1211, 1221, 1228, 1235, 1247, 1254, 1261, 1266, 1271, 1278, 1285, 1292, 1299, 1306, 1313, 1319, 1326, 1339, 1352, 1359, 1366, 1373, 1382, 1394, 1401, 1408, 1414, 1421, 1428, 1441, 1448, 1455, 1461, 1468, 1475, 1488, 1495, 1508, 1519, 1526, 1531, 1538, 1544, 1556, 1568, 1574, 1581, 1594, 1601, 1608, 1615, 1622, 1629, 1636, 1643, 1650, 1657, 1672, 1679, 1689, 1697, 1708, 1715, 1718, 1723, 1727, 1738, 1743, 1752, 1761, 1763, 1769, 1776, and 1786; (ii) a CDR2 having an amino acid sequence that is at least 65%, at least 70%, at least 75%, at least 80%, at least 85%, at least 90%, at least 95%, at least 99%, or 100% identical to any one of SEQ ID NOs: 1200, 1212, 1680, 1690, 1698, 1709, 1728, 1739, 1744, 1753, 1770, and 1777; or at least 65%, at least 70%, at least 75%, at least 80%, at least 85%, at least 90%, at least 95%, at least 99%, or 100% identical to any one of amino acid sequences AAS, APS, AT, ATS, DAS, DDG, DDS, DT, DTS, DVS, EAS, FTS, GAF, GAN, GAS, GAT, GIS, GKN, GNS, HTS, KVS, LAS, LGS, LVS, NAK, NTN, QMS, RMS, RTS, SAS, TTS, WAS, YAS, YAT, YGS, YRS, and YTS; and (iii) a CDR3 having an amino acid sequence that is at least 65%, at least 70%, at least 75%, at least 80%, at least 85%, at least 90%, at least 95%, at least 99%, or 100% identical to any one of SEQ ID NOs: 1097, 1104, 1111, 1121, 1128, 1135, 1142, 1149, 1156, 1163, 1170, 1175, 1182, 1189, 1195, 1201, 1207, 1213, 1222, 1229, 1236, 2009, 1248, 1255, 1262, 1267, 1272, 1279, 1286, 1293, 1300, 1307, 1320, 1327, 1333, 1340, 1346, 1353, 1360, 1367, 1374, 1383, 1389, 1395, 1402, 1409, 1415, 1422, 1429, 1435, 1442, 1449, 1456, 1462, 1469, 1476, 1482, 1489, 1496, 1502, 1509, 1513, 1520, 1532, 1539, 1545, 1557, 1562, 1569, 1575, 1582, 1588, 1595, 1602, 1609, 1616, 1623, 1630, 1637, 1644, 1651, 1658, 1663, 1673, 1681, 1691, 1699, 1710, 1729, 1735, 1745, 1751, 1754, 1778, 1787, and 1976.

[7411] In some aspects, the VL3 comprises (i) a complementarity determining region (CDR) 1 having an amino acid sequence that is at least 65%, at least 70%, at least 75%, at least 80%, at least 85%, at least 90%, at least 95%, at least 99%, or 100% identical to any one of SEQ ID NOs: 1096, 1103, 1110, 1120, 1127, 1134, 1141, 1148, 1155, 1162, 1169, 1174, 1181, 1188, 1199, 1211, 1221, 1228, 1235, 1247, 1254, 1261, 1266, 1271, 1278, 1285, 1292, 1299, 1306, 1313, 1319, 1326, 1339, 1352, 1359, 1366, 1373, 1382, 1394, 1401, 1408, 1414, 1421, 1428, 1441, 1448, 1455, 1461, 1468, 1475, 1488, 1495, 1508, 1519, 1526, 1531, 1538, 1544, 1556, 1568, 1574, 1581, 1594, 1601, 1608, 1615, 1622, 1629, 1636, 1643, 1650, 1657, 1672, 1679, 1689, 1697, 1708, 1715, 1718, 1723, 1727, 1738, 1743, 1752, 1761, 1763, 1769, 1776, and 1786; (ii) a CDR2 having an amino acid sequence that is at least 65%, at least 70%, at least 75%, at least 80%, at least 85%, at least 90%, at least 95%, at least 99%, or 100% identical to any one of SEQ ID NOs: 1200, 1212, 1680, 1690, 1698, 1709, 1728, 1739, 1744, 1753, 1770, and 1777; or at least 65%, at least 70%, at least 75%, at least 80%, at least 85%, at least 90%, at least 95%, at least 99%, or 100% identical to any one of amino acid sequences AAS, APS, AT, ATS, DAS, DDG, DDS, DT, DTS, DVS, EAS, FTS, GAF, GAN, GAS, GAT, GIS, GKN, GNS, HTS, KVS, LAS, LGS, LVS, NAK, NTN, QMS, RMS, RTS, SAS, TTS, WAS, YAS, YAT, YGS, YRS, and YTS; and (iii) a CDR3 having an amino acid sequence that is at least 65%, at least 70%, at least 75%, at least 80%, at least 85%, at least 90%, at least 95%, at least 99%, or 100% identical to any one of SEQ ID NOs: 1097, 1104, 1111, 1121, 1128, 1135, 1142, 1149, 1156, 1163, 1170, 1175, 1182, 1189, 1195, 1201, 1207, 1213, 1222, 1229, 1236, 2009, 1248, 1255, 1262, 1267, 1272, 1279, 1286, 1293, 1300, 1307, 1320, 1327, 1333, 1340, 1346, 1353, 1360, 1367, 1374, 1383, 1389, 1395, 1402, 1409, 1415, 1422, 1429, 1435, 1442, 1449, 1456, 1462, 1469, 1476, 1482, 1489, 1496, 1502, 1509, 1513, 1520, 1532, 1539, 1545, 1557, 1562, 1569, 1575, 1582, 1588, 1595, 1602, 1609, 1616, 1623, 1630, 1637, 1644, 1651, 1658, 1663, 1673, 1681, 1691, 1699, 1710, 1729, 1735, 1745, 1751, 1754, 1778, 1787, and 1976.

[7412] In some aspects, the VL4 comprises (i) a complementarity determining region (CDR) 1 having an amino acid sequence that is at least 65%, at least 70%, at least 75%, at least 80%, at least 85%, at least 90%, at least 95%, at least 99%, or 100% identical to any one of SEQ ID NOs: 1096, 1103, 1110, 1120, 1127, 1134, 1141, 1148, 1155, 1162, 1169, 1174, 1181, 1188, 1199, 1211, 1221, 1228, 1235, 1247, 1254, 1261, 1266, 1271, 1278, 1285, 1292, 1299, 1306, 1313, 1319, 1326, 1339, 1352, 1359, 1366, 1373, 1382, 1394, 1401, 1408, 1414, 1421, 1428, 1441, 1448, 1455, 1461, 1468, 1475, 1488, 1495, 1508, 1519, 1526, 1531, 1538, 1544, 1556, 1568, 1574, 1581, 1594, 1601, 1608, 1615, 1622, 1629, 1636, 1643, 1650, 1657, 1672, 1679, 1689, 1697, 1708, 1715, 1718, 1723, 1727, 1738, 1743, 1752, 1761, 1763, 1769, 1776, and 1786; (ii) a CDR2 having an amino acid sequence that is at least 65%, at least 70%, at least 75%, at least 80%, at least 85%, at least 90%, at least 95%, at least 99%, or 100% identical to any one of SEQ ID NOs: 1200, 1212, 1680, 1690, 1698, 1709, 1728, 1739, 1744, 1753, 1770, and 1777; or at least 65%, at least 70%, at least 75%, at least 80%, at least 85%, at least 90%, at least 95%, at least 99%, or 100% identical to any one of amino acid sequences AAS, APS, AT, ATS, DAS, DDG, DDS, DT, DTS, DVS, EAS, FTS, GAF, GAN, GAS, GAT, GIS, GKN, GNS, HTS, KVS, LAS, LGS, LVS, NAK, NTN, QMS, RMS, RTS, SAS, TTS, WAS, YAS, YAT, YGS, YRS, and YTS; and (iii) a CDR3 having an amino acid sequence that is at least 65%, at least 70%, at least 75%, at least 80%, at least 85%, at least 90%, at least 95%, at least 99%, or 100% identical to any one of SEQ ID NOs: 1097, 1104, 1111, 1121, 1128, 1135, 1142, 1149, 1156, 1163, 1170, 1175, 1182, 1189, 1195, 1201, 1207, 1213, 1222, 1229, 1236, 2009, 1248, 1255, 1262, 1267, 1272, 1279, 1286, 1293, 1300, 1307, 1320, 1327, 1333, 1340, 1346, 1353, 1360, 1367, 1374, 1383, 1389, 1395, 1402, 1409, 1415, 1422, 1429, 1435, 1442, 1449, 1456, 1462, 1469, 1476, 1482, 1489, 1496, 1502, 1509, 1513, 1520, 1532, 1539, 1545, 1557, 1562, 1569, 1575, 1582, 1588, 1595, 1602, 1609, 1616, 1623, 1630, 1637, 1644, 1651, 1658, 1663, 1673, 1681, 1691, 1699, 1710, 1729, 1735, 1745, 1751, 1754, 1778, 1787, and 1976.

[7413] In some aspects, the VH1 comprises (i) a complementarity determining region (CDR) 1 having an amino acid sequence that is at least 65%, at least 70%, at least 75%, at least 80%, at least 85%, at least 90%, at least 95%, at least 99%, or 100% identical to any one of SEQ ID NOs: 1099, 1106, 1113, 1117, 1123, 1130, 1137, 1144, 1151, 1158, 1165, 1177, 1184, 1191, 1203, 1215, 1224, 1231, 1238, 1243, 1250, 1257, 1264, 1274, 1281, 1288, 1295, 1302, 1309, 1315, 1322, 1329, 1335, 1342, 1348, 1355, 1362, 1369, 1376, 1385, 1397, 1404, 1417, 1424, 1431, 1437, 1444, 1451, 1458, 1464, 1471, 1478, 1484, 1491, 1498, 1504, 1511, 1515, 1522, 1534, 1547, 1552, 1564, 1577, 1584, 1590, 1597, 1604, 1611, 1618, 1625, 1632, 1639, 1646, 1653, 1660, 1665, 1675, 1683, 1693, 1701, 1705, 1716, 1719, 1731, 1736, 1747, 1756, 1772, 1780, and 1789; (ii) a CDR2 having an amino acid sequence that is at least 65%, at least 70%, at least 75%, at least 80%, at least 85%, at least 90%, at least 95%, at least 99%, or 100% identical to any one of SEQ ID NOs: 1100, 1107, 1114, 1118, 1124, 1131, 1138, 1145, 1152, 1159, 1166, 1178, 1185, 1192, 1204, 1216, 1225, 1232, 1239, 1244, 1251, 1258, 1275, 1282, 1289, 1296, 1303, 1310, 1316, 1323, 1330, 1336, 1343, 1349, 1356, 1363, 1370, 1377, 1386, 1391, 1398, 1405, 1411, 1418, 1425, 1432, 1438, 1445, 1452, 1465, 1472, 1479, 1485, 1492, 1499, 1505, 1516, 1523, 1528, 1535, 1541, 1548, 1553, 1559, 1565, 1571, 1578, 1585, 1591, 1598, 1605, 1612, 1619, 1626, 1633, 1640, 1647, 1654, 1666, 1676, 1684, 1687, 1694, 1702, 1706, 1712, 1717, 1720, 1725, 1732, 1737, 1741, 1748, 1757, 1767, 1773, 1781, and 1790; and (iii) a CDR3 having an amino acid sequence that is at least 65%, at least 70%, at least 75%, at least 80%, at least 85%, at least 90%, at least 95%, at least 99%, or 100% identical to any one of SEQ ID NOs: 1101, 1108, 1115, 1125, 1132, 1139, 1146, 1153, 1160, 1167, 1172, 1179, 1186, 1193, 1197, 1205, 1209, 1217, 1226, 1233, 1240, 1245, 1252, 1259, 1269, 1276, 1283, 1290, 1297, 1304, 1311, 1317, 1324, 1331, 1337, 1344, 1350, 1357, 1364, 1371, 1378, 1387, 1392, 1399, 1406, 1412, 1419, 1426, 1433, 1439, 1446, 1453, 1459, 1466, 1473, 1480, 1486, 1493, 1500, 1506, 1517, 1524, 1529, 1536, 1542, 1549, 1554, 1560, 1566, 1572, 1579, 1586, 1592, 1599, 1606, 1613, 1620, 1627, 1634, 1641, 1648, 1655, 1661, 1667, 1670, 1677, 1685, 1688, 1695, 1703, 1707, 1713, 1733, 1749, 1758, 1762, 1774, 1782, 1791, and 1975.

[7414] In some aspects, the VH2 comprises (i) a complementarity determining region (CDR) 1 having an amino acid sequence that is at least 65%, at least 70%, at least 75%, at least 80%, at least 85%, at least 90%, at least 95%, at least 99%, or 100% identical to any one of SEQ ID NOs: 1099, 1106, 1113, 1117, 1123, 1130, 1137, 1144, 1151, 1158, 1165, 1177, 1184, 1191, 1203, 1215, 1224, 1231, 1238, 1243, 1250, 1257, 1264, 1274, 1281, 1288, 1295, 1302, 1309, 1315, 1322, 1329, 1335, 1342, 1348, 1355, 1362, 1369, 1376, 1385, 1397, 1404, 1417, 1424, 1431, 1437, 1444, 1451, 1458, 1464, 1471, 1478, 1484, 1491, 1498, 1504, 1511, 1515, 1522, 1534, 1547, 1552, 1564, 1577, 1584, 1590, 1597, 1604, 1611, 1618, 1625, 1632, 1639, 1646, 1653, 1660, 1665, 1675, 1683, 1693, 1701, 1705, 1716, 1719, 1731, 1736, 1747, 1756, 1772, 1780, and 1789; (ii) a CDR2 having an amino acid sequence that is at least 65%, at least 70%, at least 75%, at least 80%, at least 85%, at least 90%, at least 95%, at least 99%, or 100% identical to any one of SEQ ID NOs: 1100, 1107, 1114, 1118, 1124, 1131, 1138, 1145, 1152, 1159, 1166, 1178, 1185, 1192, 1204, 1216, 1225, 1232, 1239, 1244, 1251, 1258, 1275, 1282, 1289, 1296, 1303, 1310, 1316, 1323, 1330, 1336, 1343, 1349, 1356, 1363, 1370, 1377, 1386, 1391, 1398, 1405, 1411, 1418, 1425, 1432, 1438, 1445, 1452, 1465, 1472, 1479, 1485, 1492, 1499, 1505, 1516, 1523, 1528, 1535, 1541, 1548, 1553, 1559, 1565, 1571, 1578, 1585, 1591, 1598, 1605, 1612, 1619, 1626, 1633, 1640, 1647, 1654, 1666, 1676, 1684, 1687, 1694, 1702, 1706, 1712, 1717, 1720, 1725, 1732, 1737, 1741, 1748, 1757, 1767, 1773, 1781, and 1790; and (iii) a CDR3 having an amino acid sequence that is at least 65%, at least 70%, at least 75%, at least 80%, at least 85%, at least 90%, at least 95%, at least 99%, or 100% identical to any one of SEQ ID NOs: 1101, 1108, 1115, 1125, 1132, 1139, 1146, 1153, 1160, 1167, 1172, 1179, 1186, 1193, 1197, 1205, 1209, 1217, 1226, 1233, 1240, 1245, 1252, 1259, 1269, 1276, 1283, 1290, 1297, 1304, 1311, 1317, 1324, 1331, 1337, 1344, 1350, 1357, 1364, 1371, 1378, 1387, 1392, 1399, 1406, 1412, 1419, 1426, 1433, 1439, 1446, 1453, 1459, 1466, 1473, 1480, 1486, 1493, 1500, 1506, 1517, 1524, 1529, 1536, 1542, 1549, 1554, 1560, 1566, 1572, 1579, 1586, 1592, 1599, 1606, 1613, 1620, 1627, 1634, 1641, 1648, 1655, 1661, 1667, 1670, 1677, 1685, 1688, 1695, 1703, 1707, 1713, 1733, 1749, 1758, 1762, 1774, 1782, 1791, and 1975.

[7415] In some aspects, the VH3 comprises (i) a complementarity determining region (CDR) 1 having an amino acid sequence that is at least 65%, at least 70%, at least 75%, at least 80%, at least 85%, at least 90%, at least 95%, at least 99%, or 100% identical to any one of SEQ ID NOs: 1099, 1106, 1113, 1117, 1123, 1130, 1137, 1144, 1151, 1158, 1165, 1177, 1184, 1191, 1203, 1215, 1224, 1231, 1238, 1243, 1250, 1257, 1264, 1274, 1281, 1288, 1295, 1302, 1309, 1315, 1322, 1329, 1335, 1342, 1348, 1355, 1362, 1369, 1376, 1385, 1397, 1404, 1417, 1424, 1431, 1437, 1444, 1451, 1458, 1464, 1471, 1478, 1484, 1491, 1498, 1504, 1511, 1515, 1522, 1534, 1547, 1552, 1564, 1577, 1584, 1590, 1597, 1604, 1611, 1618, 1625, 1632, 1639, 1646, 1653, 1660, 1665, 1675, 1683, 1693, 1701, 1705, 1716, 1719, 1731, 1736, 1747, 1756, 1772, 1780, and 1789; (ii) a CDR2 having an amino acid sequence that is at least 65%, at least 70%, at least 75%, at least 80%, at least 85%, at least 90%, at least 95%, at least 99%, or 100% identical to any one of SEQ ID NOs: 1100, 1107, 1114, 1118, 1124, 1131, 1138, 1145, 1152, 1159, 1166, 1178, 1185, 1192, 1204, 1216, 1225, 1232, 1239, 1244, 1251, 1258, 1275, 1282, 1289, 1296, 1303, 1310, 1316, 1323, 1330, 1336, 1343, 1349, 1356, 1363, 1370, 1377, 1386, 1391, 1398, 1405, 1411, 1418, 1425, 1432, 1438, 1445, 1452, 1465, 1472, 1479, 1485, 1492, 1499, 1505, 1516, 1523, 1528, 1535, 1541, 1548, 1553, 1559, 1565, 1571, 1578, 1585, 1591, 1598, 1605, 1612, 1619, 1626, 1633, 1640, 1647, 1654, 1666, 1676, 1684, 1687, 1694, 1702, 1706, 1712, 1717, 1720, 1725, 1732, 1737, 1741, 1748, 1757, 1767, 1773, 1781, and 1790; and (iii) a CDR3 having an amino acid sequence that is at least 65%, at least 70%, at least 75%, at least 80%, at least 85%, at least 90%, at least 95%, at least 99%, or 100% identical to any one of SEQ ID NOs: 1101, 1108, 1115, 1125, 1132, 1139, 1146, 1153, 1160, 1167, 1172, 1179, 1186, 1193, 1197, 1205, 1209, 1217, 1226, 1233, 1240, 1245, 1252, 1259, 1269, 1276, 1283, 1290, 1297, 1304, 1311, 1317, 1324, 1331, 1337, 1344, 1350, 1357, 1364, 1371, 1378, 1387, 1392, 1399, 1406, 1412, 1419, 1426, 1433, 1439, 1446, 1453, 1459, 1466, 1473, 1480, 1486, 1493, 1500, 1506, 1517, 1524, 1529, 1536, 1542, 1549, 1554, 1560, 1566, 1572, 1579, 1586, 1592, 1599, 1606, 1613, 1620, 1627, 1634, 1641, 1648, 1655, 1661, 1667, 1670, 1677, 1685, 1688, 1695, 1703, 1707, 1713, 1733, 1749, 1758, 1762, 1774, 1782, 1791, and 1975.

[7416] In some aspects, the VH4 comprises (i) a complementarity determining region (CDR) 1 having an amino acid sequence that is at least 65%, at least 70%, at least 75%, at least 80%, at least 85%, at least 90%, at least 95%, at least 99%, or 100% identical to any one of SEQ ID NOs: 1099, 1106, 1113, 1117, 1123, 1130, 1137, 1144, 1151, 1158, 1165, 1177, 1184, 1191, 1203, 1215, 1224, 1231, 1238, 1243, 1250, 1257, 1264, 1274, 1281, 1288, 1295, 1302, 1309, 1315, 1322, 1329, 1335, 1342, 1348, 1355, 1362, 1369, 1376, 1385, 1397, 1404, 1417, 1424, 1431, 1437, 1444, 1451, 1458, 1464, 1471, 1478, 1484, 1491, 1498, 1504, 1511, 1515, 1522, 1534, 1547, 1552, 1564, 1577, 1584, 1590, 1597, 1604, 1611, 1618, 1625, 1632, 1639, 1646, 1653, 1660, 1665, 1675, 1683, 1693, 1701, 1705, 1716, 1719, 1731, 1736, 1747, 1756, 1772, 1780, and 1789; (ii) a CDR2 having an amino acid sequence that is at least 65%, at least 70%, at least 75%, at least 80%, at least 85%, at least 90%, at least 95%, at least 99%, or 100% identical to any one of SEQ ID NOs: 1100, 1107, 1114, 1118, 1124, 1131, 1138, 1145, 1152, 1159, 1166, 1178, 1185, 1192, 1204, 1216, 1225, 1232, 1239, 1244, 1251, 1258, 1275, 1282, 1289, 1296, 1303, 1310, 1316, 1323, 1330, 1336, 1343, 1349, 1356, 1363, 1370, 1377, 1386, 1391, 1398, 1405, 1411, 1418, 1425, 1432, 1438, 1445, 1452, 1465, 1472, 1479, 1485, 1492, 1499, 1505, 1516, 1523, 1528, 1535, 1541, 1548, 1553, 1559, 1565, 1571, 1578, 1585, 1591, 1598, 1605, 1612, 1619, 1626, 1633, 1640, 1647, 1654, 1666, 1676, 1684, 1687, 1694, 1702, 1706, 1712, 1717, 1720, 1725, 1732, 1737, 1741, 1748, 1757, 1767, 1773, 1781, and 1790; and (iii) a CDR3 having an amino acid sequence that is at least 65%, at least 70%, at least 75%, at least 80%, at least 85%, at least 90%, at least 95%, at least 99%, or 100% identical to any one of SEQ ID NOs: 1101, 1108, 1115, 1125, 1132, 1139, 1146, 1153, 1160, 1167, 1172, 1179, 1186, 1193, 1197, 1205, 1209, 1217, 1226, 1233, 1240, 1245, 1252, 1259, 1269, 1276, 1283, 1290, 1297, 1304, 1311, 1317, 1324, 1331, 1337, 1344, 1350, 1357, 1364, 1371, 1378, 1387, 1392, 1399, 1406, 1412, 1419, 1426, 1433, 1439, 1446, 1453, 1459, 1466, 1473, 1480, 1486, 1493, 1500, 1506, 1517, 1524, 1529, 1536, 1542, 1549, 1554, 1560, 1566, 1572, 1579, 1586, 1592, 1599, 1606, 1613, 1620, 1627, 1634, 1641, 1648, 1655, 1661, 1667, 1670, 1677, 1685, 1688, 1695, 1703, 1707, 1713, 1733, 1749, 1758, 1762, 1774, 1782, 1791, and 1975.

[7417] In some aspects, the VL1 comprises an amino acid sequence that is at least 65%, at least 70%, at least 75%, at least 80%, at least 85%, at least 90%, at least 95%, at least 99%, or 100% identical to any one of SEQ ID NOs: 1098, 1105, 1112, 1122, 1129, 1136, 1143, 1150, 1157, 1164, 1171, 1176, 1183, 1190, 1196, 1202, 1208, 1214, 1219, 1223, 1230, 1237, 1242, 1249, 1256, 1263, 1268, 1273, 1280, 1287, 1294, 1301, 1308, 1314, 1321, 1328, 1334, 1341, 1347, 1354, 1361, 1368, 1375, 1380, 1384, 1390, 1396, 1403, 1410, 1416, 1423, 1430, 1436, 1443, 1450, 1457, 1463, 1470, 1477, 1483, 1490, 1497, 1503, 1510, 1514, 1521, 1527, 1533, 1540, 1546, 1551, 1558, 1563, 1570, 1576, 1583, 1589, 1596, 1603, 1610, 1617, 1624, 1631, 1638, 1645, 1652, 1659, 1664, 1669, 1674, 1682, 1692, 1700, 1711, 1721, 1724, 1730, 1740, 1746, 1755, 1764, 1766, 1771, 1779, 1784, and 1788.

[7418] In some aspects, the VL2 comprises an amino acid sequence that is at least 65%, at least 70%, at least 75%, at least 80%, at least 85%, at least 90%, at least 95%, at least 99%, or 100% identical to any one of SEQ ID NOs: 1098, 1105, 1112, 1122, 1129, 1136, 1143, 1150, 1157, 1164, 1171, 1176, 1183, 1190, 1196, 1202, 1208, 1214, 1219, 1223, 1230, 1237, 1242, 1249, 1256, 1263, 1268, 1273, 1280, 1287, 1294, 1301, 1308, 1314, 1321, 1328, 1334, 1341, 1347, 1354, 1361, 1368, 1375, 1380, 1384, 1390, 1396, 1403, 1410, 1416, 1423, 1430, 1436, 1443, 1450, 1457, 1463, 1470, 1477, 1483, 1490, 1497, 1503, 1510, 1514, 1521, 1527, 1533, 1540, 1546, 1551, 1558, 1563, 1570, 1576, 1583, 1589, 1596, 1603, 1610, 1617, 1624, 1631, 1638, 1645, 1652, 1659, 1664, 1669, 1674, 1682, 1692, 1700, 1711, 1721, 1724, 1730, 1740, 1746, 1755, 1764, 1766, 1771, 1779, 1784, and 1788.

[7419] In some aspects, the VL3 comprises an amino acid sequence that is at least 65%, at least 70%, at least 75%, at least 80%, at least 85%, at least 90%, at least 95%, at least 99%, or 100% identical to any one of SEQ ID NOs: 1098, 1105, 1112, 1122, 1129, 1136, 1143, 1150, 1157, 1164, 1171, 1176, 1183, 1190, 1196, 1202, 1208, 1214, 1219, 1223, 1230, 1237, 1242, 1249, 1256, 1263, 1268, 1273, 1280, 1287, 1294, 1301, 1308, 1314, 1321, 1328, 1334, 1341, 1347, 1354, 1361, 1368, 1375, 1380, 1384, 1390, 1396, 1403, 1410, 1416, 1423, 1430, 1436, 1443, 1450, 1457, 1463, 1470, 1477, 1483, 1490, 1497, 1503, 1510, 1514, 1521, 1527, 1533, 1540, 1546, 1551, 1558, 1563, 1570, 1576, 1583, 1589, 1596, 1603, 1610, 1617, 1624, 1631, 1638, 1645, 1652, 1659, 1664, 1669, 1674, 1682, 1692, 1700, 1711, 1721, 1724, 1730, 1740, 1746, 1755, 1764, 1766, 1771, 1779, 1784, and 1788.

[7420] In some aspects, the VL4 comprises an amino acid sequence that is at least 65%, at least 70%, at least 75%, at least 80%, at least 85%, at least 90%, at least 95%, at least 99%, or 100% identical to any one of SEQ ID NOs: 1098, 1105, 1112, 1122, 1129, 1136, 1143, 1150, 1157, 1164, 1171, 1176, 1183, 1190, 1196, 1202, 1208, 1214, 1219, 1223, 1230, 1237, 1242, 1249, 1256, 1263, 1268, 1273, 1280, 1287, 1294, 1301, 1308, 1314, 1321, 1328, 1334, 1341, 1347, 1354, 1361, 1368, 1375, 1380, 1384, 1390, 1396, 1403, 1410, 1416, 1423, 1430, 1436, 1443, 1450, 1457, 1463, 1470, 1477, 1483, 1490, 1497, 1503, 1510, 1514, 1521, 1527, 1533, 1540, 1546, 1551, 1558, 1563, 1570, 1576, 1583, 1589, 1596, 1603, 1610, 1617, 1624, 1631, 1638, 1645, 1652, 1659, 1664, 1669, 1674, 1682, 1692, 1700, 1711, 1721, 1724, 1730, 1740, 1746, 1755, 1764, 1766, 1771, 1779, 1784, and 1788.

[7421] In some aspects, the VH1 comprises an amino acid sequence that is at least 65%, at least 70%, at least 75%, at least 80%, at least 85%, at least 90%, at least 95%, at least 99%, or 100% identical to any one of SEQ ID NOs: 1102, 1109, 1116, 1119, 1126, 1133, 1140, 1147, 1154, 1161, 1168, 1173, 1180, 1187, 1194, 1198, 1206, 1210, 1218, 1220, 1227, 1234, 1241, 1246, 1253, 1260, 1265, 1270, 1277, 1284, 1291, 1298, 1305, 1312, 1318, 1325, 1332, 1338, 1345, 1351, 1358, 1365, 1372, 1379, 1381, 1388, 1393, 1400, 1407, 1413, 1420, 1427, 1434, 1440, 1447, 1454, 1460, 1467, 1474, 1481, 1487, 1494, 1501, 1507, 1512, 1518, 1525, 1530, 1537, 1543, 1550, 1555, 1561, 1567, 1573, 1580, 1587, 1593, 1600, 1607, 1614, 1621, 1628, 1635, 1642, 1649, 1656, 1662, 1668, 1671, 1678, 1686, 1696, 1704, 1714, 1722, 1726, 1734, 1742, 1750, 1759, 1760, 1765, 1768, 1775, 1783, 1785, and 1792.

[7422] In some aspects, the VH2 comprises an amino acid sequence that is at least 65%, at least 70%, at least 75%, at least 80%, at least 85%, at least 90%, at least 95%, at least 99%, or 100% identical to any one of SEQ ID NOs: 1102, 1109, 1116, 1119, 1126, 1133, 1140, 1147, 1154, 1161, 1168, 1173, 1180, 1187, 1194, 1198, 1206, 1210, 1218, 1220, 1227, 1234, 1241, 1246, 1253, 1260, 1265, 1270, 1277, 1284, 1291, 1298, 1305, 1312, 1318, 1325, 1332, 1338, 1345, 1351, 1358, 1365, 1372, 1379, 1381, 1388, 1393, 1400, 1407, 1413, 1420, 1427, 1434, 1440, 1447, 1454, 1460, 1467, 1474, 1481, 1487, 1494, 1501, 1507, 1512, 1518, 1525, 1530, 1537, 1543, 1550, 1555, 1561, 1567, 1573, 1580, 1587, 1593, 1600, 1607, 1614, 1621, 1628, 1635, 1642, 1649, 1656, 1662, 1668, 1671, 1678, 1686, 1696, 1704, 1714, 1722, 1726, 1734, 1742, 1750, 1759, 1760, 1765, 1768, 1775, 1783, 1785, and 1792.

[7423] In some aspects, the VH3 comprises an amino acid sequence that is at least 65%, at least 70%, at least 75%, at least 80%, at least 85%, at least 90%, at least 95%, at least 99%, or 100% identical to any one of SEQ ID NOs: 1102, 1109, 1116, 1119, 1126, 1133, 1140, 1147, 1154, 1161, 1168, 1173, 1180, 1187, 1194, 1198, 1206, 1210, 1218, 1220, 1227, 1234, 1241, 1246, 1253, 1260, 1265, 1270, 1277, 1284, 1291, 1298, 1305, 1312, 1318, 1325, 1332, 1338, 1345, 1351, 1358, 1365, 1372, 1379, 1381, 1388, 1393, 1400, 1407, 1413, 1420, 1427, 1434, 1440, 1447, 1454, 1460, 1467, 1474, 1481, 1487, 1494, 1501, 1507, 1512, 1518, 1525, 1530, 1537, 1543, 1550, 1555, 1561, 1567, 1573, 1580, 1587, 1593, 1600, 1607, 1614, 1621, 1628, 1635, 1642, 1649, 1656, 1662, 1668, 1671, 1678, 1686, 1696, 1704, 1714, 1722, 1726, 1734, 1742, 1750, 1759, 1760, 1765, 1768, 1775, 1783, 1785, and 1792.

[7424] In some aspects, the VH4 comprises an amino acid sequence that is at least 65%, at least 70%, at least 75%, at least 80%, at least 85%, at least 90%, at least 95%, at least 99%, or 100% identical to any one of SEQ ID NOs: 1102, 1109, 1116, 1119, 1126, 1133, 1140, 1147, 1154, 1161, 1168, 1173, 1180, 1187, 1194, 1198, 1206, 1210, 1218, 1220, 1227, 1234, 1241, 1246, 1253, 1260, 1265, 1270, 1277, 1284, 1291, 1298, 1305, 1312, 1318, 1325, 1332, 1338, 1345, 1351, 1358, 1365, 1372, 1379, 1381, 1388, 1393, 1400, 1407, 1413, 1420, 1427, 1434, 1440, 1447, 1454, 1460, 1467, 1474, 1481, 1487, 1494, 1501, 1507, 1512, 1518, 1525, 1530, 1537, 1543, 1550, 1555, 1561, 1567, 1573, 1580, 1587, 1593, 1600, 1607, 1614, 1621, 1628, 1635, 1642, 1649, 1656, 1662, 1668, 1671, 1678, 1686, 1696, 1704, 1714, 1722, 1726, 1734, 1742, 1750, 1759, 1760, 1765, 1768, 1775, 1783, 1785, and 1792.

[7425] In some aspects, the infectious disease antigen that is not a sarbecovirus antigen is:
[7426] (i) a viral antigen elected from the group consisting of an influenza virus (A, B, C) antigen (e.g., influenza virus envelope proteins, for example, influenza virus neuraminidase (NA, N1, N2, N3, N4, N5, N6, N7, N8, N9, N10, N11), influenza virus hemagglutinin (H1, H2, H3, H4, H5, H6, H7, H8, H9, H10, H11, H12, H13, H14, H15, H16, H17, H18) (e.g., H1N1, H3N2, H5N1, H7N9, H9N2), Yamagata virus antigen, Victoria virus antigen, influenza virus structural proteins (e.g., M1, M2, capsid protein), influenza virus functional proteins (e.g., ribonucleoprotein (NP), primary interferon antagonist (NS1), nuclear export protein (NEP)) influenza virus accessory proteins (e.g., PB2, PB1, or PA), for example, anti-HA, anti-NA, anti-H1, anti-H3, anti-H5, anti-H7, anti-H9, anti-N1, anti-N2, anti-N9, anti-H1N1, anti-H3N2, anti-H5N1, anti-H7N9, anti-H9N2, anti-A protein, anti-B protein, anti-stem, anti-M1, anti-M2, anti-capsid, anti-NP, anti-NS1, anti-NEP, anti-PB1, anti-PB2, and anti-PA); a swine influenza virus antigen (e.g., swine flu hemagglutinin, swine flu neuraminidase); a classical swine fever (CSF) (hog colera) virus antigen; an equine influenza virus antigen (e.g., equine influenza virus typeA/Miami 63 neuraminidase, equine influenza virus type A/Kentucky 81 neuraminidase, equine influenza virus type A/Alaska 91 neuraminidase); parainfluenza viruses (e.g., bovine parainfluenza virus, bovine parainfluenza virus type 3 fusion protein, bovine parainfluenza virus type 3 hemagglutinin neuraminidase); a (human) respiratory syncytial virus (RSV)-viral antigen (e.g., RSV F glycoprotein, RSV G glycoprotein. F protein of respiratory syncytial virus, RSV fusion glycoprotein); a herpes simplex virus (HSV) antigen (e.g., herpes simplex virus glycoproteins gB, gC, gD, and gE, herpes simplex virus type 2 glycoprotein gB); a Dengue virus antigen (e.g., core protein, matrix protein, glycoprotein E of Dengue virus, or other protein of Dengue virus); a measles virus antigen (e.g., hemagglutinin); a poliovirus 1 antigen (e.g., poliovirus 1 proteins (VP1)), a HIV-1 antigen and HIV-2 antigen (e.g., HIV envelope proteins (e.g., envelope glycoproteins of HIV 1, HIV envelope glycoprotein (Env), HIV envelope glycoprotein gp160, HIV envelope surface glycoprotein gp120, HIV transmembrane envelope protein gp41), HIV structural proteins (e.g., p17, p24, p7, p55), HIV functional proteins (e.g., p66, HIV-1 protease (PR), p31), HIV accessory proteins (e.g., Nef, Tat, Rev, Vif, Vpr, Vpu)); a hepatitis virus (HAV, HBV, HCV, HDV, HEV) antigen (e.g., hepatitis B virus antigen (e.g., surface antigen, core protein), hepatitis C virus antigen (e.g., glycoprotein E1E2)); a rabies virus (Rabies lyssavirus) antigen (e.g., rabies virus glycoprotein, e.g., G glycoprotein); a pseudorabies virus antigen (e.g., pseudorabies virus g50 (gpD), pseudorabies virus II (gpB), pseudorabies virus III (gpC), pseudorabies virus glycoprotein H, pseudorabies virus glycoprotein E); a papillomavirus (HPV) antigen; an Epstein-Barr virus (EBV) (Gamma herpes virus 4) antigen; a Herpes simplex virus (HSV, HSV-1, HSV-2) antigen (e.g., human herpes virus 8, equine herpes virus antigen (e.g., type 1 glycoprotein B, type 1 glycoprotein D)); a Herpes zoster antigen; a Cytomegalovirus antigen (e.g., cytomegalovirus glycoprotein B); a Zika virus antigen; a Transmissible gastroenteritis virus (TGEV) antigen (e.g., glycoprotein 195, matrix protein); a rotavirus antigen (e.g., swine rotavirus glycoprotein 38); a parvovirus antigen (e.g., swine parvovirus capsid protein); a filoviruses (e.g., Marburg and Ebola) antigen; a bovine viral diarrhea virus antigen (e.g., glycoprotein 55); a Newcastle disease virus antigen (hemagglutinin, neuraminidase); an orthopoxvirus antigen; a coxsackievirus antigen and aphthovirus (foot and mouth disease virus) antigen; a yellow fever virus antigen; a Chikunga virus antigen; a Nipah virus antigen; an African swine fever virus antigen; a rhinotracheitis virus antigen (e.g., infectious bovine rhinotracheitis virus glycoprotein E, glycoprotein G); a laryngotracheitis virus antigen (e.g., infectious laryngotracheitis virus glycoprotein G or glycoprotein I); a La Crosse virus antigen (e.g., La Crosse virus glycoprotein); a neonatal calf diarrhoea virus antigen; a Venezuelan equine encephalomyelitis virus antigen; a punta toro virus antigen; a murine leukemia virus antigen; a mouse mammary tumor virus antigen; a bovine respiratory syncytial virus antigen (e.g., bovine respiratory syncytial virus attachment protein (BRSV G), bovine respiratory syncytial virus fusion protein (BRSV F), bovine respiratory syncytial virus nucleocapsid protein (BRSVN)); a bovine E viral diarrhoea virus antigen (e.g., glycoprotein 48 and glycoprotein 53); a metapneumovirus (HMPV) antigen; and an Ebola virus antigen (e.g., ebolavirus glycoprotein, e.g., Zaire ebolavirus glycoprotein); or
[7427] (ii) a bacterial or parasite antigen selected from the group consisting of a Plasmodium (e.g., Plasmodium falciparum, Plasmodium vivax, Plasmodium malariae, Plasmodium ovale, Plasmodium knowlesi) antigen, a Streptococcus (e.g., Streptococcus pneumoniae, Streptococcus pyogenes, Streptococcus agalactiae, Streptococcus mutans, Streptococcus viridans, Streptococcus anginosus, Streptococcus intermedius, Streptococcus constellatus) antigen (e.g., 24M epitope), a Neisseria gonorrhoeae antigen (e.g., gonococcal pilin), a Corynebacterium antigen (e.g., Corynebacterium diphtheria (diptheria toxin), Corynebacterium ulcerans, Corynebacterium pseudotuberculosis), Mycobacterium tuberculosis antigens. Brachyspira hyodysenteriae (Serpulina hydodysenteriae) antigen (e.g., Serpulina hydodysenteriae protective antigen), a Chlamydia antigen (e.g., Chlamydia trachomatis) (e.g., MOMP and PorB), a Mycoplasma sp. (e.g., Mycoplasma genitalium, Mycoplasma hyopneumoniae, Mycoplasma pneumonia) antigen, a Staphylococcus (e.g., Staphylococcus aureus, coagulase-negative staphylococci (CoNS), Staphylococcus aureus alpha toxin, Staphylococcus aureus bi-component leucocidin) antigen, a Klebsiella sp. antigen, an Escherichia coli antigen (e.g., E. coli shiga toxin type-2. E. coli shiga toxin type-1), a Bacillus sp. (e.g., Bacillus anthracis, e.g., Bacillus anthracis anthrax) antigen, a Pseudomonas aeruginosa antigen (e.g., Pseudomonas aeruginosa type III secretion system), an Enterococcus sp. antigen, an Enterobacter sp. antigen, a Proteus sp. antigen, an Actinobacter sp. antigen, a Mycobacterium avium (Mycobacterium avium complex (MAC)) antigen, a Salmonella bacteria antigen, a Clostridium difficile antigen, a Toxoplasma (e.g., Toxoplasma gondii) antigen, a Histoplasma antigen, a Candida antigen, a Coccidioides antigen, a Cryptococcus antigen, a Cryptosporidium antigen, and a Cystoisospora (e.g., Cystoisospora belli) antigen, and another antigen (e.g., endotoxins, lymphotoxins (e.g., lymphotoxin alpha LTA), phosphatidylserine. Hsp90), CCR5, lipoteichoic acid, clumping factor A).

[7428] In some aspects, the VL1 comprises a light chain complementarity determining region 1 (LCDR1), LCDR2, and/or LCDR3 of an antibody selected from the group consisting of libivirumab, rmab, rivabazumab pegol, setoxaximab, suvizumab, suvratoxumab, sevirumab, pritoxaximab, porgaviximab, REGN-EB3, obiltoxaximab, gedivumab, foravirumab, larcaviximab, motavizumab, palivizumab, rafivirumab, regavirumab, tuvirumab, cosfroviximab, felvizumab, atidortoxumab, edobacomab, nebacumab, pateclizumab, raxibacumab, urtoxazumab, tosatoxumab, berlimatoxumab, CR6261, diridavumab, firivumab, lesofavumab, navivumab, exbivirumab, lenvervimab, bavituximab, bezlotoxumab, efungumab, leronlimab, nirsevimab, pagibaximab, panobacumab, tefibazumab, ansuvimab, atoltivimab, maftivimab, and odesivimab.

[7429] In some aspects, the VL2 comprises a light chain complementarity determining region 1 (LCDR1), LCDR2, and/or LCDR3 of an antibody selected from the group consisting of libivirumab, rmab, rivabazumab pegol, setoxaximab, suvizumab, suvratoxumab, sevirumab, pritoxaximab, porgaviximab, REGN-EB3, obiltoxaximab, gedivumab, foravirumab, larcaviximab, motavizumab, palivizumab, rafivirumab, regavirumab, tuvirumab, cosfroviximab, felvizumab, atidortoxumab, edobacomab, nebacumab, pateclizumab, raxibacumab, urtoxazumab, tosatoxumab, berlimatoxumab, CR6261, diridavumab, firivumab, lesofavumab, navivumab, exbivirumab, lenvervimab, bavituximab, bezlotoxumab, efungumab, leronlimab, nirsevimab, pagibaximab, panobacumab, tefibazumab, ansuvimab, atoltivimab, maftivimab, and odesivimab.

[7430] In some aspects, the VL3 comprises a light chain complementarity determining region 1 (LCDR1), LCDR2, and/or LCDR3 of an antibody selected from the group consisting of libivirumab, rmab, rivabazumab pegol, setoxaximab, suvizumab, suvratoxumab, sevirumab, pritoxaximab, porgaviximab, REGN-EB3, obiltoxaximab, gedivumab, foravirumab, larcaviximab, motavizumab, palivizumab, rafivirumab, regavirumab, tuvirumab, cosfroviximab, felvizumab, atidortoxumab, edobacomab, nebacumab, pateclizumab, raxibacumab, urtoxazumab, tosatoxumab, berlimatoxumab, CR6261, diridavumab, firivumab, lesofavumab, navivumab, exbivirumab, lenvervimab, bavituximab, bezlotoxumab, efungumab, leronlimab, nirsevimab, pagibaximab, panobacumab, tefibazumab, ansuvimab, atoltivimab, maftivimab, and odesivimab.

[7431] In some aspects, the VL4 comprises a light chain complementarity determining region 1 (LCDR1), LCDR2, and/or LCDR3 of an antibody selected from the group consisting of libivirumab, rmab, rivabazumab pegol, setoxaximab, suvizumab, suvratoxumab, sevirumab, pritoxaximab, porgaviximab, REGN-EB3, obiltoxaximab, gedivumab, foravirumab, larcaviximab, motavizumab, palivizumab, rafivirumab, regavirumab, tuvirumab, cosfroviximab, felvizumab, atidortoxumab, edobacomab, nebacumab, pateclizumab, raxibacumab, urtoxazumab, tosatoxumab, berlimatoxumab, CR6261, diridavumab, firivumab, lesofavumab, navivumab, exbivirumab, lenvervimab, bavituximab, bezlotoxumab, efungumab, leronlimab, nirsevimab, pagibaximab, panobacumab, tefibazumab, ansuvimab, atoltivimab, maftivimab, and odesivimab.

[7432] In some aspects, the VH1 comprises a heavy chain complementarity determining region 1 (HCDR1), HCDR2, and/or HCDR3 of an antibody selected from the group consisting of libivirumab, rmab, rivabazumab pegol, setoxaximab, suvizumab, suvratoxumab, sevirumab, pritoxaximab, porgaviximab, REGN-EB3, obiltoxaximab, gedivumab, foravirumab, larcaviximab, motavizumab, palivizumab, rafivirumab, regavirumab, tuvirumab, cosfroviximab, felvizumab, atidortoxumab, edobacomab, nebacumab, pateclizumab, raxibacumab, urtoxazumab, tosatoxumab, berlimatoxumab, CR6261, diridavumab, firivumab, lesofavumab, navivumab, exbivirumab, lenvervimab, bavituximab, bezlotoxumab, efungumab, leronlimab, nirsevimab, pagibaximab, panobacumab, tefibazumab, ansuvimab, atoltivimab, maftivimab, and odesivimab.

[7433] In some aspects, the VH2 comprises a heavy chain complementarity determining region 1 (HCDR1), HCDR2, and/or HCDR3 of an antibody selected from the group consisting of libivirumab, rmab, rivabazumab pegol, setoxaximab, suvizumab, suvratoxumab, sevirumab, pritoxaximab, porgaviximab, REGN-EB3, obiltoxaximab, gedivumab, foravirumab, larcaviximab, motavizumab, palivizumab, rafivirumab, regavirumab, tuvirumab, cosfroviximab, felvizumab, atidortoxumab, edobacomab, nebacumab, pateclizumab, raxibacumab, urtoxazumab, tosatoxumab, berlimatoxumab, CR6261, diridavumab, firivumab, lesofavumab, navivumab, exbivirumab, lenvervimab, bavituximab, bezlotoxumab, efungumab, leronlimab, nirsevimab, pagibaximab, panobacumab, tefibazumab, ansuvimab, atoltivimab, maftivimab, and odesivimab.

[7434] In some aspects, the VH3 comprises a heavy chain complementarity determining region 1 (HCDR1), HCDR2, and/or HCDR3 of an antibody selected from the group consisting of libivirumab, rmab, rivabazumab pegol, setoxaximab, suvizumab, suvratoxumab, sevirumab, pritoxaximab, porgaviximab, REGN-EB3, obiltoxaximab, gedivumab, foravirumab, larcaviximab, motavizumab, palivizumab, rafivirumab, regavirumab, tuvirumab, cosfroviximab, felvizumab, atidortoxumab, edobacomab, nebacumab, pateclizumab, raxibacumab, urtoxazumab, tosatoxumab, berlimatoxumab, CR6261, diridavumab, firivumab, lesofavumab, navivumab, exbivirumab, lenvervimab, bavituximab, bezlotoxumab, efungumab, leronlimab, nirsevimab, pagibaximab, panobacumab, tefibazumab, ansuvimab, atoltivimab, maftivimab, and odesivimab.

[7435] In some aspects, the VH4 comprises a heavy chain complementarity determining region 1 (HCDR1), HCDR2, and/or HCDR3 of an antibody selected from the group consisting of libivirumab, rmab, rivabazumab pegol, setoxaximab, suvizumab, suvratoxumab, sevirumab, pritoxaximab, porgaviximab, REGN-EB3, obiltoxaximab, gedivumab, foravirumab, larcaviximab, motavizumab, palivizumab, rafivirumab, regavirumab, tuvirumab, cosfroviximab, felvizumab, atidortoxumab, edobacomab, nebacumab, pateclizumab, raxibacumab, urtoxazumab, tosatoxumab, berlimatoxumab, CR6261, diridavumab, firivumab, lesofavumab, navivumab, exbivirumab, lenvervimab, bavituximab, bezlotoxumab, efungumab, leronlimab, nirsevimab, pagibaximab, panobacumab, tefibazumab, ansuvimab, atoltivimab, maftivimab, and odesivimab.

[7436] In some aspects, the VL1 comprises a VL of an antibody selected from the group consisting of libivirumab, rmab, rivabazumab pegol, setoxaximab, suvizumab, suvratoxumab, sevirumab, pritoxaximab, porgaviximab, REGN-EB3, obiltoxaximab, gedivumab, foravirumab, larcaviximab, motavizumab, palivizumab, rafivirumab, regavirumab, tuvirumab, cosfroviximab, felvizumab, atidortoxumab, edobacomab, nebacumab, pateclizumab, raxibacumab, urtoxazumab, tosatoxumab, berlimatoxumab, CR6261, diridavumab, firivumab, lesofavumab, navivumab, exbivirumab, lenvervimab, bavituximab, bezlotoxumab, efungumab, leronlimab, nirsevimab, pagibaximab, panobacumab, tefibazumab, ansuvimab, atoltivimab, maftivimab, and odesivimab.

[7437] In some aspects, the VL2 comprises a VL of an antibody selected from the group consisting of libivirumab, rmab, rivabazumab pegol, setoxaximab, suvizumab, suvratoxumab, sevirumab, pritoxaximab, porgaviximab, REGN-EB3, obiltoxaximab, gedivumab, foravirumab, larcaviximab, motavizumab, palivizumab, rafivirumab, regavirumab, tuvirumab, cosfroviximab, felvizumab, atidortoxumab, edobacomab, nebacumab, pateclizumab, raxibacumab, urtoxazumab, tosatoxumab, berlimatoxumab, CR6261, diridavumab, firivumab, lesofavumab, navivumab, exbivirumab, lenvervimab, bavituximab, bezlotoxumab, efungumab, leronlimab, nirsevimab, pagibaximab, panobacumab, tefibazumab, ansuvimab, atoltivimab, maftivimab, and odesivimab.

[7438] In some aspects, the VL3 comprises a VL of an antibody selected from the group consisting of libivirumab, rmab, rivabazumab pegol, setoxaximab, suvizumab, suvratoxumab, sevirumab, pritoxaximab, porgaviximab, REGN-EB3, obiltoxaximab, gedivumab, foravirumab, larcaviximab, motavizumab, palivizumab, rafivirumab, regavirumab, tuvirumab, cosfroviximab, felvizumab, atidortoxumab, edobacomab, nebacumab, pateclizumab, raxibacumab, urtoxazumab, tosatoxumab, berlimatoxumab, CR6261, diridavumab, firivumab, lesofavumab, navivumab, exbivirumab, lenvervimab, bavituximab, bezlotoxumab, efungumab, leronlimab, nirsevimab, pagibaximab, panobacumab, tefibazumab, ansuvimab, atoltivimab, maftivimab, and odesivimab.

[7439] In some aspects, the VL4 comprises a VL of an antibody selected from the group consisting of libivirumab, rmab, rivabazumab pegol, setoxaximab, suvizumab, suvratoxumab, sevirumab, pritoxaximab, porgaviximab, REGN-EB3, obiltoxaximab, gedivumab, foravirumab, larcaviximab, motavizumab, palivizumab, rafivirumab, regavirumab, tuvirumab, cosfroviximab, felvizumab, atidortoxumab, edobacomab, nebacumab, pateclizumab, raxibacumab, urtoxazumab, tosatoxumab, berlimatoxumab, CR6261, diridavumab, firivumab, lesofavumab, navivumab, exbivirumab, lenvervimab, bavituximab, bezlotoxumab, efungumab, leronlimab, nirsevimab, pagibaximab, panobacumab, tefibazumab, ansuvimab, atoltivimab, maftivimab, and odesivimab.

[7440] In some aspects, the VH1 comprises a VH of an antibody selected from the group consisting of libivirumab, rmab, rivabazumab pegol, setoxaximab, suvizumab, suvratoxumab, sevirumab, pritoxaximab, porgaviximab, REGN-EB3, obiltoxaximab, gedivumab, foravirumab, larcaviximab, motavizumab, palivizumab, rafivirumab, regavirumab, tuvirumab, cosfroviximab, felvizumab, atidortoxumab, edobacomab, nebacumab, pateclizumab, raxibacumab, urtoxazumab, tosatoxumab, berlimatoxumab, CR6261, diridavumab, firivumab, lesofavumab, navivumab, exbivirumab, lenvervimab, bavituximab, bezlotoxumab, efungumab, leronlimab, nirsevimab, pagibaximab, panobacumab, tefibazumab, ansuvimab, atoltivimab, maftivimab, and odesivimab.

[7441] In some aspects, the VH2 comprises a VH of an antibody selected from the group consisting of libivirumab, rmab, rivabazumab pegol, setoxaximab, suvizumab, suvratoxumab, sevirumab, pritoxaximab, porgaviximab, REGN-EB3, obiltoxaximab, gedivumab, foravirumab, larcaviximab, motavizumab, palivizumab, rafivirumab, regavirumab, tuvirumab, cosfroviximab, felvizumab, atidortoxumab, edobacomab, nebacumab, pateclizumab, raxibacumab, urtoxazumab, tosatoxumab, berlimatoxumab, CR6261, diridavumab, firivumab, lesofavumab, navivumab, exbivirumab, lenvervimab, bavituximab, bezlotoxumab, efungumab, leronlimab, nirsevimab, pagibaximab, panobacumab, tefibazumab, ansuvimab, atoltivimab, maftivimab, and odesivimab.

[7442] In some aspects, the VH3 comprises a VH of an antibody selected from the group consisting of libivirumab, rmab, rivabazumab pegol, setoxaximab, suvizumab, suvratoxumab, sevirumab, pritoxaximab, porgaviximab, REGN-EB3, obiltoxaximab, gedivumab, foravirumab, larcaviximab, motavizumab, palivizumab, rafivirumab, regavirumab, tuvirumab, cosfroviximab, felvizumab, atidortoxumab, edobacomab, nebacumab, pateclizumab, raxibacumab, urtoxazumab, tosatoxumab, berlimatoxumab, CR6261, diridavumab, firivumab, lesofavumab, navivumab, exbivirumab, lenvervimab, bavituximab, bezlotoxumab, efungumab, leronlimab, nirsevimab, pagibaximab, panobacumab, tefibazumab, ansuvimab, atoltivimab, maftivimab, and odesivimab.

[7443] In some aspects, the VH4 comprises a VH of an antibody selected from the group consisting of libivirumab, rmab, rivabazumab pegol, setoxaximab, suvizumab, suvratoxumab, sevirumab, pritoxaximab, porgaviximab, REGN-EB3, obiltoxaximab, gedivumab, foravirumab, larcaviximab, motavizumab, palivizumab, rafivirumab, regavirumab, tuvirumab, cosfroviximab, felvizumab, atidortoxumab, edobacomab, nebacumab, pateclizumab, raxibacumab, urtoxazumab, tosatoxumab, berlimatoxumab, CR6261, diridavumab, firivumab, lesofavumab, navivumab, exbivirumab, lenvervimab, bavituximab, bezlotoxumab, efungumab, leronlimab, nirsevimab, pagibaximab, panobacumab, tefibazumab, ansuvimab, atoltivimab, maftivimab, and odesivimab.

[7444] In some aspects, the VL1 comprises (i) a complementarity determining region (CDR) 1 having an amino acid sequence that is at least 65%, at least 70%, at least 75%, at least 80%, at least 85%, at least 90%, at least 95%, at least 99%, or 100% identical to any one of SEQ ID NOs: 1428, 1793, 1798, 1810, 1817, 1824, 1977, 1985, 1993 and 2001; (ii) a CDR2 having an amino acid sequence that is at least 65%, at least 70%, at least 75%, at least 80%, at least 85%, at least 90%, at least 95%, at least 99%, or 100% identical to any one of SEQ ID NOs: 1978, 1986, 1994, and 2002; or at least 65%, at least 70%, at least 75%, at least 80%, at least 85%, at least 90%, at least 95%, at least 99%, or 100% identical to any one of amino acid sequences YTS, DTS, GAS, and AAS; and (iii) a CDR3 having an amino acid sequence that is at least 65%, at least 70%, at least 75%, at least 80%, at least 85%, at least 90%, at least 95%, at least 99%, or 100% identical to any one of SEQ ID NOs: 1229, 1799, 1805, 1811, 1818, 1825, 1979, 1987, 1995, and 2003.

[7445] In some aspects, the VL2 comprises (i) a complementarity determining region (CDR) 1 having an amino acid sequence that is at least 65%, at least 70%, at least 75%, at least 80%, at least 85%, at least 90%, at least 95%, at least 99%, or 100% identical to any one of SEQ ID NOs: 1428, 1793, 1798, 1810, 1817, 1824, 1977, 1985, 1993 and 2001; (ii) a CDR2 having an amino acid sequence that is at least 65%, at least 70%, at least 75%, at least 80%, at least 85%, at least 90%, at least 95%, at least 99%, or 100% identical to any one of SEQ ID NOs: 1978, 1986, 1994, and 2002; or at least 65%, at least 70%, at least 75%, at least 80%, at least 85%, at least 90%, at least 95%, at least 99%, or 100% identical to any one of amino acid sequences YTS, DTS, GAS, and AAS; and (iii) a CDR3 having an amino acid sequence that is at least 65%, at least 70%, at least 75%, at least 80%, at least 85%, at least 90%, at least 95%, at least 99%, or 100% identical to any one of SEQ ID NOs: 1229, 1799, 1805, 1811, 1818, 1825, 1979, 1987, 1995, and 2003.

[7446] In some aspects, the VL3 comprises (i) a complementarity determining region (CDR) 1 having an amino acid sequence that is at least 65%, at least 70%, at least 75%, at least 80%, at least 85%, at least 90%, at least 95%, at least 99%, or 100% identical to any one of SEQ ID NOs: 1428, 1793, 1798, 1810, 1817, 1824, 1977, 1985, 1993 and 2001; (ii) a CDR2 having an amino acid sequence that is at least 65%, at least 70%, at least 75%, at least 80%, at least 85%, at least 90%, at least 95%, at least 99%, or 100% identical to any one of SEQ ID NOs: 1978, 1986, 1994, and 2002; or at least 65%, at least 70%, at least 75%, at least 80%, at least 85%, at least 90%, at least 95%, at least 99%, or 100% identical to any one of amino acid sequences YTS, DTS, GAS, and AAS; and (iii) a CDR3 having an amino acid sequence that is at least 65%, at least 70%, at least 75%, at least 80%, at least 85%, at least 90%, at least 95%, at least 99%, or 100% identical to any one of SEQ ID NOs: 1229, 1799, 1805, 1811, 1818, 1825, 1979, 1987, 1995, and 2003.

[7447] In some aspects, the VL4 comprises (i) a complementarity determining region (CDR) 1 having an amino acid sequence that is at least 65%, at least 70%, at least 75%, at least 80%, at least 85%, at least 90%, at least 95%, at least 99%, or 100% identical to any one of SEQ ID NOs: 1428, 1793, 1798, 1810, 1817, 1824, 1977, 1985, 1993 and 2001; (ii) a CDR2 having an amino acid sequence that is at least 65%, at least 70%, at least 75%, at least 80%, at least 85%, at least 90%, at least 95%, at least 99%, or 100% identical to any one of SEQ ID NOs: 1978, 1986, 1994, and 2002; or at least 65%, at least 70%, at least 75%, at least 80%, at least 85%, at least 90%, at least 95%, at least 99%, or 100% identical to any one of amino acid sequences YTS, DTS, GAS, and AAS; and (iii) a CDR3 having an amino acid sequence that is at least 65%, at least 70%, at least 75%, at least 80%, at least 85%, at least 90%, at least 95%, at least 99%, or 100% identical to any one of SEQ ID NOs: 1229, 1799, 1805, 1811, 1818, 1825, 1979, 1987, 1995, and 2003.

[7448] In some aspects, the VH1 comprises (i) a complementarity determining region (CDR) 1 having an amino acid sequence that is at least 65%, at least 70%, at least 75%, at least 80%, at least 85%, at least 90%, at least 95%, at least 99%, or 100% identical to any one of SEQ ID NOs: 1577, 1795, 1801, 1813, 1820, 1827, 1981, 1989, 1997, and 2005; (ii) a CDR2 having an amino acid sequence that is at least 65%, at least 70%, at least 75%, at least 80%, at least 85%, at least 90%, at least 95%, at least 99%, or 100% identical to any one of SEQ ID NOs: 1159, 1802, 1807, 1814, 1821, 1828, 1982, 1990, 1998, and 2006; and (iii) a CDR3 having an amino acid sequence that is at least 65%, at least 70%, at least 75%, at least 80%, at least 85%, at least 90%, at least 95%, at least 99%, or 100% identical to any one of SEQ ID NOs: 1796, 1803, 1808, 1815, 1822, 1829, 1983, 1991, 1999, and 2007.

[7449] In some aspects, the VH2 comprises (i) a complementarity determining region (CDR) 1 having an amino acid sequence that is at least 65%, at least 70%, at least 75%, at least 80%, at least 85%, at least 90%, at least 95%, at least 99%, or 100% identical to any one of SEQ ID NOs: 1577, 1795, 1801, 1813, 1820, 1827, 1981, 1989, 1997, and 2005; (ii) a CDR2 having an amino acid sequence that is at least 65%, at least 70%, at least 75%, at least 80%, at least 85%, at least 90%, at least 95%, at least 99%, or 100% identical to any one of SEQ ID NOs: 1159, 1802, 1807, 1814, 1821, 1828, 1982, 1990, 1998, and 2006; and (iii) a CDR3 having an amino acid sequence that is at least 65%, at least 70%, at least 75%, at least 80%, at least 85%, at least 90%, at least 95%, at least 99%, or 100% identical to any one of SEQ ID NOs: 1796, 1803, 1808, 1815, 1822, 1829, 1983, 1991, 1999, and 2007.

[7450] In some aspects, the VH3 comprises (i) a complementarity determining region (CDR) 1 having an amino acid sequence that is at least 65%, at least 70%, at least 75%, at least 80%, at least 85%, at least 90%, at least 95%, at least 99%, or 100% identical to any one of SEQ ID NOs: 1577, 1795, 1801, 1813, 1820, 1827, 1981, 1989, 1997, and 2005; (ii) a CDR2 having an amino acid sequence that is at least 65%, at least 70%, at least 75%, at least 80%, at least 85%, at least 90%, at least 95%, at least 99%, or 100% identical to any one of SEQ ID NOs: 1159, 1802, 1807, 1814, 1821, 1828, 1982, 1990, 1998, and 2006; and (iii) a CDR3 having an amino acid sequence that is at least 65%, at least 70%, at least 75%, at least 80%, at least 85%, at least 90%, at least 95%, at least 99%, or 100% identical to any one of SEQ ID NOs: 1796, 1803, 1808, 1815, 1822, 1829, 1983, 1991, 1999, and 2007.

[7451] In some aspects, the VH4 comprises (i) a complementarity determining region (CDR) 1 having an amino acid sequence that is at least 65%, at least 70%, at least 75%, at least 80%, at least 85%, at least 90%, at least 95%, at least 99%, or 100% identical to any one of SEQ ID NOs: 1577, 1795, 1801, 1813, 1820, 1827, 1981, 1989, 1997, and 2005; (ii) a CDR2 having an amino acid sequence that is at least 65%, at least 70%, at least 75%, at least 80%, at least 85%, at least 90%, at least 95%, at least 99%, or 100% identical to any one of SEQ ID NOs: 1159, 1802, 1807, 1814, 1821, 1828, 1982, 1990, 1998, and 2006; and (iii) a CDR3 having an amino acid sequence that is at least 65%, at least 70%, at least 75%, at least 80%, at least 85%, at least 90%, at least 95%, at least 99%, or 100% identical to any one of SEQ ID NOs: 1796, 1803, 1808, 1815, 1822, 1829, 1983, 1991, 1999, and 2007.

[7452] In some aspects, the VL1 comprises an amino acid sequence that is at least 65%, at least 70%, at least 75%, at least 80%, at least 85%, at least 90%, at least 95%, at least 99%, or 100% identical to any one of SEQ ID NOs: 1794, 1800, 1806, 1812, 1819, 1826, 1980, 1988, 1996, and 2004.

[7453] In some aspects, the VL2 comprises an amino acid sequence that is at least 65%, at least 70%, at least 75%, at least 80%, at least 85%, at least 90%, at least 95%, at least 99%, or 100% identical to any one of SEQ ID NOs: 1794, 1800, 1806, 1812, 1819, 1826, 1980, 1988, 1996, and 2004.

[7454] In some aspects, the VL3 comprises an amino acid sequence that is at least 65%, at least 70%, at least 75%, at least 80%, at least 85%, at least 90%, at least 95%, at least 99%, or 100% identical to any one of SEQ ID NOs: 1794, 1800, 1806, 1812, 1819, 1826, 1980, 1988, 1996, and 2004.

[7455] In some aspects, the VL4 comprises an amino acid sequence that is at least 65%, at least 70%, at least 75%, at least 80%, at least 85%, at least 90%, at least 95%, at least 99%, or 100% identical to any one of SEQ ID NOs: 1794, 1800, 1806, 1812, 1819, 1826, 1980, 1988, 1996, and 2004.

[7456] In some aspects, the VH1 comprises an amino acid sequence that is at least 65%, at least 70%, at least 75%, at least 80%, at least 85%, at least 90%, at least 95%, at least 99%, or 100% identical to any one of SEQ ID NOs 1797, 1804, 1809, 1816, 1823, 1830, 1984, 1992, 2000, and 2008.

[7457] In some aspects, the VH2 comprises an amino acid sequence that is at least 65%, at least 70%, at least 75%, at least 80%, at least 85%, at least 90%, at least 95%, at least 99%, or 100% identical to any one of SEQ ID NOs 1797, 1804, 1809, 1816, 1823, 1830, 1984, 1992, 2000, and 2008.

[7458] In some aspects, the VH3 comprises an amino acid sequence that is at least 65%, at least 70%, at least 75%, at least 80%, at least 85%, at least 90%, at least 95%, at least 99%, or 100% identical to any one of SEQ ID NOs 1797, 1804, 1809, 1816, 1823, 1830, 1984, 1992, 2000, and 2008.

[7459] In some aspects, the VH4 comprises an amino acid sequence that is at least 65%, at least 70%, at least 75%, at least 80%, at least 85%, at least 90%, at least 95%, at least 99%, or 100% identical to any one of SEQ ID NOs 1797, 1804, 1809, 1816, 1823, 1830, 1984, 1992, 2000, and 2008.

[7460] In some aspects, the other-pathology antigen is selected from the group consisting of Amyloid beta, β-amyloid, PCSK9), IFN-α/β receptor, Rhesus factor, nerve growth factor (NGF), DPP4, fibrin II beta chain, ACVR2B, serum amyloid A protein SOST, FGF 23, VWF, tissue factor pathway inhibitor (TFPI), 1-40) and 1-42, selectin P, glucagon receptor (GCGR), amyloid P component, GDF-8, CXCL10) IP-10, repulsive guidance molecule A RGMA, IFN-γ, activated F9/F10, calcitonin gene-related peptide (CGRP), angiopoietin 3, IFN receptor, IFN-γ, calcitonin, β-amyloid 1-40) and 1-42, tau protein, dabigatran, cardiac myosin, selectin P, Complement factor D (CFD), kallikrein, GDF-8, IGHE, tissue factor pathway inhibitor (TFPI), GMCSF receptor α-chain, amyloid, IgE Fc region, MASP-2, oxLDL, GMCSF, NOGO-A. Alpha-synuclein, NGF, myelin-associated glycoprotein, RHD (gene) (RHD), sclerostin, FCGRT, sclerostin SOST, mucosal addressin cell adhesion molecule, myostatin, RSVFR, complement component 1s C1s, C5, and IL31.

[7461] In some aspects, the VL1 comprises a light chain complementarity determining region 1 (LCDR1), LCDR2, and/or LCDR3 of an antibody selected from the group consisting of aducanumab, alirocumab, frovocimab, lodelcizumab, bococizumab, evolocumab, ralpancizumab, anifrolumab, atorolimumab, bapineuzumab, bedinvetmab, begelomab, biciromab, bimagrumab, birtamimab, blosozumab, burosumab, caplacizumab, concizumab, crenezumab, crizanlizumab, crotedumab, dezamizumab, domagrozumab, donanemab, eldelumab, elezanumab, emapalumab, emicizumab, eptinezumab, erenumab, evinacumab, faralimomab, fasinumab, fontolizumab, fremanezumab, frunevetmab, fulranumab, galcanezumab, gantenerumab, gosuranemab, idarucizumab, imciromab, inclacumab, lampalizumab, lanadelumab, landogrozumab, lecanemab, ligelizumab, marstacimab, mavrilimumab, morolimumab, NEOD001, omalizumab, oMS721, orticumab, otilimab, ozanezumab, ponezumab, prasinezumab, quilizumab, ranevetmab, refanezumab, roledumab, romosozumab, rozanolixizumab, setrusumab, SHP647, solanezumab, stamulumab, suptavumab, sutimlimab, tanezumab, crovalimab, and lokivetmab.

[7462] In some aspects, the VL2 comprises a light chain complementarity determining region 1 (LCDR1), LCDR2, and/or LCDR3 of an antibody selected from the group consisting of aducanumab, alirocumab, frovocimab, lodelcizumab, bococizumab, evolocumab, ralpancizumab, anifrolumab, atorolimumab, bapineuzumab, bedinvetmab, begelomab, biciromab, bimagrumab, birtamimab, blosozumab, burosumab, caplacizumab, concizumab, crenezumab, crizanlizumab, crotedumab, dezamizumab, domagrozumab, donanemab, eldelumab, elezanumab, emapalumab, emicizumab, eptinezumab, erenumab, evinacumab, faralimomab, fasinumab, fontolizumab, fremanezumab, frunevetmab, fulranumab, galcanezumab, gantenerumab, gosuranemab, idarucizumab, imciromab, inclacumab, lampalizumab, lanadelumab, landogrozumab, lecanemab, ligelizumab, marstacimab, mavrilimumab, morolimumab, NEOD001, omalizumab, oMS721, orticumab, otilimab, ozanezumab, ponezumab, prasinezumab, quilizumab, ranevetmab, refanezumab, roledumab, romosozumab, rozanolixizumab, setrusumab, SHP647, solanezumab, stamulumab, suptavumab, sutimlimab, tanezumab, crovalimab, and lokivetmab.

[7463] In some aspects, the VL3 comprises a light chain complementarity determining region 1 (LCDR1), LCDR2, and/or LCDR3 of an antibody selected from the group consisting of aducanumab, alirocumab, frovocimab, lodelcizumab, bococizumab, evolocumab, ralpancizumab, anifrolumab, atorolimumab, bapineuzumab, bedinvetmab, begelomab, biciromab, bimagrumab, birtamimab, blosozumab, burosumab, caplacizumab, concizumab, crenezumab, crizanlizumab, crotedumab, dezamizumab, domagrozumab, donanemab, eldelumab, elezanumab, emapalumab, emicizumab, eptinezumab, erenumab, evinacumab, faralimomab, fasinumab, fontolizumab, fremanezumab, frunevetmab, fulranumab, galcanezumab, gantenerumab, gosuranemab, idarucizumab, imciromab, inclacumab, lampalizumab, lanadelumab, landogrozumab, lecanemab, ligelizumab, marstacimab, mavrilimumab, morolimumab, NEOD001, omalizumab, oMS721, orticumab, otilimab, ozanezumab, ponezumab, prasinezumab, quilizumab, ranevetmab, refanezumab, roledumab, romosozumab, rozanolixizumab, setrusumab, SHP647, solanezumab, stamulumab, suptavumab, sutimlimab, tanezumab, crovalimab, and lokivetmab.

[7464] In some aspects, the VL4 comprises a light chain complementarity determining region 1 (LCDR1), LCDR2, and/or LCDR3 of an antibody selected from the group consisting of aducanumab, alirocumab, frovocimab, lodelcizumab, bococizumab, evolocumab, ralpancizumab, anifrolumab, atorolimumab, bapineuzumab, bedinvetmab, begelomab, biciromab, bimagrumab, birtamimab, blosozumab, burosumab, caplacizumab, concizumab, crenezumab, crizanlizumab, crotedumab, dezamizumab, domagrozumab, donanemab, eldelumab, elezanumab, emapalumab, emicizumab, eptinezumab, erenumab, evinacumab, faralimomab, fasinumab, fontolizumab, fremanezumab, frunevetmab, fulranumab, galcanezumab, gantenerumab, gosuranemab, idarucizumab, imciromab, inclacumab, lampalizumab, lanadelumab, landogrozumab, lecanemab, ligelizumab, marstacimab, mavrilimumab, morolimumab, NEOD001, omalizumab, oMS721, orticumab, otilimab, ozanezumab, ponezumab, prasinezumab, quilizumab, ranevetmab, refanezumab, roledumab, romosozumab, rozanolixizumab, setrusumab, SHP647, solanezumab, stamulumab, suptavumab, sutimlimab, tanezumab, crovalimab, and lokivetmab.

[7465] In some aspects, the VH1 comprises a heavy chain complementarity determining region 1 (HCDR1), HCDR2, and/or HCDR3 of an antibody selected from the group consisting of aducanumab, alirocumab, frovocimab, lodelcizumab, bococizumab, evolocumab, ralpancizumab, anifrolumab, atorolimumab, bapineuzumab, bedinvetmab, begelomab, biciromab, bimagrumab, birtamimab, blosozumab, burosumab, caplacizumab, concizumab, crenezumab, crizanlizumab, crotedumab, dezamizumab, domagrozumab, donanemab, eldelumab, elezanumab, emapalumab, emicizumab, eptinezumab, erenumab, evinacumab, faralimomab, fasinumab, fontolizumab, fremanezumab, frunevetmab, fulranumab, galcanezumab, gantenerumab, gosuranemab, idarucizumab, imciromab, inclacumab, lampalizumab, lanadelumab, landogrozumab, lecanemab, ligelizumab, marstacimab, mavrilimumab, morolimumab, NEOD001, omalizumab, oMS721, orticumab, otilimab, ozanezumab, ponezumab, prasinezumab, quilizumab, ranevetmab, refanezumab, roledumab, romosozumab, rozanolixizumab, setrusumab, SHP647, solanezumab, stamulumab, suptavumab, sutimlimab, tanezumab, crovalimab, and lokivetmab.

[7466] In some aspects, the VH2 comprises a heavy chain complementarity determining region 1 (HCDR1), HCDR2, and/or HCDR3 of an antibody selected from the group consisting of aducanumab, alirocumab, frovocimab, lodelcizumab, bococizumab, evolocumab, ralpancizumab, anifrolumab, atorolimumab, bapineuzumab, bedinvetmab, begelomab, biciromab, bimagrumab, birtamimab, blosozumab, burosumab, caplacizumab, concizumab, crenezumab, crizanlizumab, crotedumab, dezamizumab, domagrozumab, donanemab, eldelumab, elezanumab, emapalumab, emicizumab, eptinezumab, erenumab, evinacumab, faralimomab, fasinumab, fontolizumab, fremanezumab, frunevetmab, fulranumab, galcanezumab, gantenerumab, gosuranemab, idarucizumab, imciromab, inclacumab, lampalizumab, lanadelumab, landogrozumab, lecanemab, ligelizumab, marstacimab, mavrilimumab, morolimumab, NEOD001, omalizumab, oMS721, orticumab, otilimab, ozanezumab, ponezumab, prasinezumab, quilizumab, ranevetmab, refanezumab, roledumab, romosozumab, rozanolixizumab, setrusumab, SHP647, solanezumab, stamulumab, suptavumab, sutimlimab, tanezumab, crovalimab, and lokivetmab.

[7467] In some aspects, the VH3 comprises a heavy chain complementarity determining region 1 (HCDR1), HCDR2, and/or HCDR3 of an antibody selected from the group consisting of aducanumab, alirocumab, frovocimab, lodelcizumab, bococizumab, evolocumab, ralpancizumab, anifrolumab, atorolimumab, bapineuzumab, bedinvetmab, begelomab, biciromab, bimagrumab, birtamimab, blosozumab, burosumab, caplacizumab, concizumab, crenezumab, crizanlizumab, crotedumab, dezamizumab, domagrozumab, donanemab, eldelumab, elezanumab, emapalumab, emicizumab, eptinezumab, erenumab, evinacumab, faralimomab, fasinumab, fontolizumab, fremanezumab, frunevetmab, fulranumab, galcanezumab, gantenerumab, gosuranemab, idarucizumab, imciromab, inclacumab, lampalizumab, lanadelumab, landogrozumab, lecanemab, ligelizumab, marstacimab, mavrilimumab, morolimumab, NEOD001, omalizumab, oMS721, orticumab, otilimab, ozanezumab, ponezumab, prasinezumab, quilizumab, ranevetmab, refanezumab, roledumab, romosozumab, rozanolixizumab, setrusumab, SHP647, solanezumab, stamulumab, suptavumab, sutimlimab, tanezumab, crovalimab, and lokivetmab.

[7468] In some aspects, the VH4 comprises a heavy chain complementarity determining region 1 (HCDR1), HCDR2, and/or HCDR3 of an antibody selected from the group consisting of aducanumab, alirocumab, frovocimab, lodelcizumab, bococizumab, evolocumab, ralpancizumab, anifrolumab, atorolimumab, bapineuzumab, bedinvetmab, begelomab, biciromab, bimagrumab, birtamimab, blosozumab, burosumab, caplacizumab, concizumab, crenezumab, crizanlizumab, crotedumab, dezamizumab, domagrozumab, donanemab, eldelumab, elezanumab, emapalumab, emicizumab, eptinezumab, erenumab, evinacumab, faralimomab, fasinumab, fontolizumab, fremanezumab, frunevetmab, fulranumab, galcanezumab, gantenerumab, gosuranemab, idarucizumab, imciromab, inclacumab, lampalizumab, lanadelumab, landogrozumab, lecanemab, ligelizumab, marstacimab, mavrilimumab, morolimumab, NEOD001, omalizumab, oMS721, orticumab, otilimab, ozanezumab, ponezumab, prasinezumab, quilizumab, ranevetmab, refanezumab, roledumab, romosozumab, rozanolixizumab, setrusumab, SHP647, solanezumab, stamulumab, suptavumab, sutimlimab, tanezumab, crovalimab, and lokivetmab.

[7469] In some aspects, the VL1 comprises a VL of an antibody selected from the group consisting of aducanumab, alirocumab, frovocimab, lodelcizumab, bococizumab, evolocumab, ralpancizumab, anifrolumab, atorolimumab, bapineuzumab, bedinvetmab, begelomab, biciromab, bimagrumab, birtamimab, blosozumab, burosumab, caplacizumab, concizumab, crenezumab, crizanlizumab, crotedumab, dezamizumab, domagrozumab, donanemab, eldelumab, elezanumab, emapalumab, emicizumab, eptinezumab, erenumab, evinacumab, faralimomab, fasinumab, fontolizumab, fremanezumab, frunevetmab, fulranumab, galcanezumab, gantenerumab, gosuranemab, idarucizumab, imciromab, inclacumab, lampalizumab, lanadelumab, landogrozumab, lecanemab, ligelizumab, marstacimab, mavrilimumab, morolimumab, NEOD001, omalizumab, oMS721, orticumab, otilimab, ozanezumab, ponezumab, prasinezumab, quilizumab, ranevetmab, refanezumab, roledumab, romosozumab, rozanolixizumab, setrusumab, SHP647, solanezumab, stamulumab, suptavumab, sutimlimab, tanezumab, crovalimab, and lokivetmab.

[7470] In some aspects, the VL2 comprises a VL of an antibody selected from the group consisting of aducanumab, alirocumab, frovocimab, lodelcizumab, bococizumab, evolocumab, ralpancizumab, anifrolumab, atorolimumab, bapineuzumab, bedinvetmab, begelomab, biciromab, bimagrumab, birtamimab, blosozumab, burosumab, caplacizumab, concizumab, crenezumab, crizanlizumab, crotedumab, dezamizumab, domagrozumab, donanemab, eldelumab, elezanumab, emapalumab, emicizumab, eptinezumab, erenumab, evinacumab, faralimomab, fasinumab, fontolizumab, fremanezumab, frunevetmab, fulranumab, galcanezumab, gantenerumab, gosuranemab, idarucizumab, imciromab, inclacumab, lampalizumab, lanadelumab, landogrozumab, lecanemab, ligelizumab, marstacimab, mavrilimumab, morolimumab, NEOD001, omalizumab, oMS721, orticumab, otilimab, ozanezumab, ponezumab, prasinezumab, quilizumab, ranevetmab, refanezumab, roledumab, romosozumab, rozanolixizumab, setrusumab, SHP647, solanezumab, stamulumab, suptavumab, sutimlimab, tanezumab, crovalimab, and lokivetmab.

[7471] In some aspects, the VL3 comprises a VL of an antibody selected from the group consisting of aducanumab, alirocumab, frovocimab, lodelcizumab, bococizumab, evolocumab, ralpancizumab, anifrolumab, atorolimumab, bapineuzumab, bedinvetmab, begelomab, biciromab, bimagrumab, birtamimab, blosozumab, burosumab, caplacizumab, concizumab, crenezumab, crizanlizumab, crotedumab, dezamizumab, domagrozumab, donanemab, eldelumab, elezanumab, emapalumab, emicizumab, eptinezumab, erenumab, evinacumab, faralimomab, fasinumab, fontolizumab, fremanezumab, frunevetmab, fulranumab, galcanezumab, gantenerumab, gosuranemab, idarucizumab, imciromab, inclacumab, lampalizumab, lanadelumab, landogrozumab, lecanemab, ligelizumab, marstacimab, mavrilimumab, morolimumab, NEOD001, omalizumab, oMS721, orticumab, otilimab, ozanezumab, ponezumab, prasinezumab, quilizumab, ranevetmab, refanezumab, roledumab, romosozumab, rozanolixizumab, setrusumab, SHP647, solanezumab, stamulumab, suptavumab, sutimlimab, tanezumab, crovalimab, and lokivetmab.

[7472] In some aspects, the VL4 comprises a VL of an antibody selected from the group consisting of aducanumab, alirocumab, frovocimab, lodelcizumab, bococizumab, evolocumab, ralpancizumab, anifrolumab, atorolimumab, bapineuzumab, bedinvetmab, begelomab, biciromab, bimagrumab, birtamimab, blosozumab, burosumab, caplacizumab, concizumab, crenezumab, crizanlizumab, crotedumab, dezamizumab, domagrozumab, donanemab, eldelumab, elezanumab, emapalumab, emicizumab, eptinezumab, erenumab, evinacumab, faralimomab, fasinumab, fontolizumab, fremanezumab, frunevetmab, fulranumab, galcanezumab, gantenerumab, gosuranemab, idarucizumab, imciromab, inclacumab, lampalizumab, lanadelumab, landogrozumab, lecanemab, ligelizumab, marstacimab, mavrilimumab, morolimumab, NEOD001, omalizumab, oMS721, orticumab, otilimab, ozanezumab, ponezumab, prasinezumab, quilizumab, ranevetmab, refanezumab, roledumab, romosozumab, rozanolixizumab, setrusumab, SHP647, solanezumab, stamulumab, suptavumab, sutimlimab, tanezumab, crovalimab, and lokivetmab.

[7473] In some aspects, the VH1 comprises a VH of an antibody selected from the group consisting of aducanumab, alirocumab, frovocimab, lodelcizumab, bococizumab, evolocumab, ralpancizumab, anifrolumab, atorolimumab, bapineuzumab, bedinvetmab, begelomab, biciromab, bimagrumab, birtamimab, blosozumab, burosumab, caplacizumab, concizumab, crenezumab, crizanlizumab, crotedumab, dezamizumab, domagrozumab, donanemab, eldelumab, elezanumab, emapalumab, emicizumab, eptinezumab, erenumab, evinacumab, faralimomab, fasinumab, fontolizumab, fremanezumab, frunevetmab, fulranumab, galcanezumab, gantenerumab, gosuranemab, idarucizumab, imciromab, inclacumab, lampalizumab, lanadelumab, landogrozumab, lecanemab, ligelizumab, marstacimab, mavrilimumab, morolimumab, NEOD001, omalizumab, oMS721, orticumab, otilimab, ozanezumab, ponezumab, prasinezumab, quilizumab, ranevetmab, refanezumab, roledumab, romosozumab, rozanolixizumab, setrusumab, SHP647, solanezumab, stamulumab, suptavumab, sutimlimab, tanezumab, crovalimab, and lokivetmab.

[7474] In some aspects, the VH2 comprises a VH of an antibody selected from the group consisting of aducanumab, alirocumab, frovocimab, lodelcizumab, bococizumab, evolocumab, ralpancizumab, anifrolumab, atorolimumab, bapineuzumab, bedinvetmab, begelomab, biciromab, bimagrumab, birtamimab, blosozumab, burosumab, caplacizumab, concizumab, crenezumab, crizanlizumab, crotedumab, dezamizumab, domagrozumab, donanemab, eldelumab, elezanumab, emapalumab, emicizumab, eptinezumab, erenumab, evinacumab, faralimomab, fasinumab, fontolizumab, fremanezumab, frunevetmab, fulranumab, galcanezumab, gantenerumab, gosuranemab, idarucizumab, imciromab, inclacumab, lampalizumab, lanadelumab, landogrozumab, lecanemab, ligelizumab, marstacimab, mavrilimumab, morolimumab, NEOD001, omalizumab, oMS721, orticumab, otilimab, ozanezumab, ponezumab, prasinezumab, quilizumab, ranevetmab, refanezumab, roledumab, romosozumab, rozanolixizumab, setrusumab, SHP647, solanezumab, stamulumab, suptavumab, sutimlimab, tanezumab, crovalimab, and lokivetmab.

[7475] In some aspects, the VH3 comprises a VH of an antibody selected from the group consisting of aducanumab, alirocumab, frovocimab, lodelcizumab, bococizumab, evolocumab, ralpancizumab, anifrolumab, atorolimumab, bapineuzumab, bedinvetmab, begelomab, biciromab, bimagrumab, birtamimab, blosozumab, burosumab, caplacizumab, concizumab, crenezumab, crizanlizumab, crotedumab, dezamizumab, domagrozumab, donanemab, eldelumab, elezanumab, emapalumab, emicizumab, eptinezumab, erenumab, evinacumab, faralimomab, fasinumab, fontolizumab, fremanezumab, frunevetmab, fulranumab, galcanezumab, gantenerumab, gosuranemab, idarucizumab, imciromab, inclacumab, lampalizumab, lanadelumab, landogrozumab, lecanemab, ligelizumab, marstacimab, mavrilimumab, morolimumab, NEOD001, omalizumab, oMS721, orticumab, otilimab, ozanezumab, ponezumab, prasinezumab, quilizumab, ranevetmab, refanezumab, roledumab, romosozumab, rozanolixizumab, setrusumab, SHP647, solanezumab, stamulumab, suptavumab, sutimlimab, tanezumab, crovalimab, and lokivetmab.

[7476] In some aspects, the VH4 comprises a VH of an antibody selected from the group consisting of aducanumab, alirocumab, frovocimab, lodelcizumab, bococizumab, evolocumab, ralpancizumab, anifrolumab, atorolimumab, bapineuzumab, bedinvetmab, begelomab, biciromab, bimagrumab, birtamimab, blosozumab, burosumab, caplacizumab, concizumab, crenezumab, crizanlizumab, crotedumab, dezamizumab, domagrozumab, donanemab, eldelumab, elezanumab, emapalumab, emicizumab, eptinezumab, erenumab, evinacumab, faralimomab, fasinumab, fontolizumab, fremanezumab, frunevetmab, fulranumab, galcanezumab, gantenerumab, gosuranemab, idarucizumab, imciromab, inclacumab, lampalizumab, lanadelumab, landogrozumab, lecanemab, ligelizumab, marstacimab, mavrilimumab, morolimumab, NEOD001, omalizumab, oMS721, orticumab, otilimab, ozanezumab, ponezumab, prasinezumab, quilizumab, ranevetmab, refanezumab, roledumab, romosozumab, rozanolixizumab, setrusumab, SHP647, solanezumab, stamulumab, suptavumab, sutimlimab, tanezumab, crovalimab, and lokivetmab.

[7477] In some aspects, the VL1 comprises (i) a complementarity determining region (CDR) 1 having an amino acid sequence that is at least 65%, at least 70%, at least 75%, at least 80%, at least 85%, at least 90%, at least 95%, at least 99%, or 100% identical to any one of SEQ ID NOs: 1120, 1228, 1359, 1519, 1831, 1838, 1845, 1852, 1859, 1866, 1872, 1878, 1885, 1891, 1898, 1905, 1911, 1917, 1924, 1931, 1938, 1945, and 1963; (ii) a CDR2 having an amino acid sequence that is at least 65%, at least 70%, at least 75%, at least 80%, at least 85%, at least 90%, at least 95%, at least 99%, or 100% identical to any one of amino acid sequences AAS, AVS, DAS, DNN, EDN, EVS, GAS, GNG, KAS, KVS, LVS, NTD, STS, WAS, and YTS; and (iii) a CDR3 having an amino acid sequence that is at least 65%, at least 70%, at least 75%, at least 80%, at least 85%, at least 90%, at least 95%, at least 99%, or 100% identical to any one of SEQ ID NOs: 1360, 1832, 1839, 1846, 1853, 1860, 1867, 1873, 1879, 1886, 1892, 1899, 1906, 1912, 1918, 1925, 1932, 1939, 1946, 1951, 1957, 1964, and 1970.

[7478] In some aspects, the VL2 comprises (i) a complementarity determining region (CDR) 1 having an amino acid sequence that is at least 65%, at least 70%, at least 75%, at least 80%, at least 85%, at least 90%, at least 95%, at least 99%, or 100% identical to any one of SEQ ID NOs: 1120, 1228, 1359, 1519, 1831, 1838, 1845, 1852, 1859, 1866, 1872, 1878, 1885, 1891, 1898, 1905, 1911, 1917, 1924, 1931, 1938, 1945, and 1963; (ii) a CDR2 having an amino acid sequence that is at least 65%, at least 70%, at least 75%, at least 80%, at least 85%, at least 90%, at least 95%, at least 99%, or 100% identical to any one of amino acid sequences AAS, AVS, DAS, DNN, EDN, EVS, GAS, GNG, KAS, KVS, LVS, NTD, STS, WAS, and YTS; and (iii) a CDR3 having an amino acid sequence that is at least 65%, at least 70%, at least 75%, at least 80%, at least 85%, at least 90%, at least 95%, at least 99%, or 100% identical to any one of SEQ ID NOs: 1360, 1832, 1839, 1846, 1853, 1860, 1867, 1873, 1879, 1886, 1892, 1899, 1906, 1912, 1918, 1925, 1932, 1939, 1946, 1951, 1957, 1964, and 1970.

[7479] In some aspects, the VL3 comprises (i) a complementarity determining region (CDR) 1 having an amino acid sequence that is at least 65%, at least 70%, at least 75%, at least 80%, at least 85%, at least 90%, at least 95%, at least 99%, or 100% identical to any one of SEQ ID NOs: 1120, 1228, 1359, 1519, 1831, 1838, 1845, 1852, 1859, 1866, 1872, 1878, 1885, 1891, 1898, 1905, 1911, 1917, 1924, 1931, 1938, 1945, and 1963; (ii) a CDR2 having an amino acid sequence that is at least 65%, at least 70%, at least 75%, at least 80%, at least 85%, at least 90%, at least 95%, at least 99%, or 100% identical to any one of amino acid sequences AAS, AVS, DAS, DNN, EDN, EVS, GAS, GNG, KAS, KVS, LVS, NTD, STS, WAS, and YTS; and (iii) a CDR3 having an amino acid sequence that is at least 65%, at least 70%, at least 75%, at least 80%, at least 85%, at least 90%, at least 95%, at least 99%, or 100% identical to any one of SEQ ID NOs: 1360, 1832, 1839, 1846, 1853, 1860, 1867, 1873, 1879, 1886, 1892, 1899, 1906, 1912, 1918, 1925, 1932, 1939, 1946, 1951, 1957, 1964, and 1970.

[7480] In some aspects, the VL4 comprises (i) a complementarity determining region (CDR) 1 having an amino acid sequence that is at least 65%, at least 70%, at least 75%, at least 80%, at least 85%, at least 90%, at least 95%, at least 99%, or 100% identical to any one of SEQ ID NOs: 1120, 1228, 1359, 1519, 1831, 1838, 1845, 1852, 1859, 1866, 1872, 1878, 1885, 1891, 1898, 1905, 1911, 1917, 1924, 1931, 1938, 1945, and 1963; (ii) a CDR2 having an amino acid sequence that is at least 65%, at least 70%, at least 75%, at least 80%, at least 85%, at least 90%, at least 95%, at least 99%, or 100% identical to any one of amino acid sequences AAS, AVS, DAS, DNN, EDN, EVS, GAS, GNG, KAS, KVS, LVS, NTD, STS, WAS, and YTS; and (iii) a CDR3 having an amino acid sequence that is at least 65%, at least 70%, at least 75%, at least 80%, at least 85%, at least 90%, at least 95%, at least 99%, or 100% identical to any one of SEQ ID NOs: 1360, 1832, 1839, 1846, 1853, 1860, 1867, 1873, 1879, 1886, 1892, 1899, 1906, 1912, 1918, 1925, 1932, 1939, 1946, 1951, 1957, 1964, and 1970.

[7481] In some aspects, the VH1 comprises (i) a complementarity determining region (CDR) 1 having an amino acid sequence that is at least 65%, at least 70%, at least 75%, at least 80%, at least 85%, at least 90%, at least 95%, at least 99%, or 100% identical to any one of SEQ ID NOs: 1309, 1362, 1437, 1552, 1618, 1639, 1834, 1841, 1848, 1855, 1862, 1881, 1894, 1901, 1920, 1927, 1934, 1941, 1953, 1959, and 1966; (ii) a CDR2 having an amino acid sequence that is at least 65%, at least 70%, at least 75%, at least 80%, at least 85%, at least 90%, at least 95%, at least 99%, or 100% identical to any one of SEQ ID NOs: 1363, 1835, 1842, 1849, 1856, 1863, 1869, 1875, 1882, 1888, 1895, 1902, 1908, 1914, 1921, 1928, 1935, 1942, 1948, 1954, 1960, 1967, and 1972; and (iii) a CDR3 having an amino acid sequence that is at least 65%, at least 70%, at least 75%, at least 80%, at least 85%, at least 90%, at least 95%, at least 99%, or 100% identical to any one of SEQ ID NOs: 1364, 1836, 1843, 1850, 1857, 1864, 1870, 1876, 1883, 1889, 1896, 1903, 1909, 1915, 1922, 1929, 1936, 1943, 1949, 1955, 1961, 1968, and 1973.

[7482] In some aspects, the VH2 comprises (i) a complementarity determining region (CDR) 1 having an amino acid sequence that is at least 65%, at least 70%, at least 75%, at least 80%, at least 85%, at least 90%, at least 95%, at least 99%, or 100% identical to any one of SEQ ID NOs: 1309, 1362, 1437, 1552, 1618, 1639, 1834, 1841, 1848, 1855, 1862, 1881, 1894, 1901, 1920, 1927, 1934, 1941, 1953, 1959, and 1966; (ii) a CDR2 having an amino acid sequence that is at least 65%, at least 70%, at least 75%, at least 80%, at least 85%, at least 90%, at least 95%, at least 99%, or 100% identical to any one of SEQ ID NOs: 1363, 1835, 1842, 1849, 1856, 1863, 1869, 1875, 1882, 1888, 1895, 1902, 1908, 1914, 1921, 1928, 1935, 1942, 1948, 1954, 1960, 1967, and 1972; and (iii) a CDR3 having an amino acid sequence that is at least 65%, at least 70%, at least 75%, at least 80%, at least 85%, at least 90%, at least 95%, at least 99%, or 100% identical to any one of SEQ ID NOs: 1364, 1836, 1843, 1850, 1857, 1864, 1870, 1876, 1883, 1889, 1896, 1903, 1909, 1915, 1922, 1929, 1936, 1943, 1949, 1955, 1961, 1968, and 1973.

[7483] In some aspects, the VH3 comprises (i) a complementarity determining region (CDR) 1 having an amino acid sequence that is at least 65%, at least 70%, at least 75%, at least 80%, at least 85%, at least 90%, at least 95%, at least 99%, or 100% identical to any one of SEQ ID NOs: 1309, 1362, 1437, 1552, 1618, 1639, 1834, 1841, 1848, 1855, 1862, 1881, 1894, 1901, 1920, 1927, 1934, 1941, 1953, 1959, and 1966; (ii) a CDR2 having an amino acid sequence that is at least 65%, at least 70%, at least 75%, at least 80%, at least 85%, at least 90%, at least 95%, at least 99%, or 100% identical to any one of SEQ ID NOs: 1363, 1835, 1842, 1849, 1856, 1863, 1869, 1875, 1882, 1888, 1895, 1902, 1908, 1914, 1921, 1928, 1935, 1942, 1948, 1954, 1960, 1967, and 1972; and (iii) a CDR3 having an amino acid sequence that is at least 65%, at least 70%, at least 75%, at least 80%, at least 85%, at least 90%, at least 95%, at least 99%, or 100% identical to any one of SEQ ID NOs: 1364, 1836, 1843, 1850, 1857, 1864, 1870, 1876, 1883, 1889, 1896, 1903, 1909, 1915, 1922, 1929, 1936, 1943, 1949, 1955, 1961, 1968, and 1973.

[7484] In some aspects, the VH4 comprises (i) a complementarity determining region (CDR) 1 having an amino acid sequence that is at least 65%, at least 70%, at least 75%, at least 80%, at least 85%, at least 90%, at least 95%, at least 99%, or 100% identical to any one of SEQ ID NOs: 1309, 1362, 1437, 1552, 1618, 1639, 1834, 1841, 1848, 1855, 1862, 1881, 1894, 1901, 1920, 1927, 1934, 1941, 1953, 1959, and 1966; (ii) a CDR2 having an amino acid sequence that is at least 65%, at least 70%, at least 75%, at least 80%, at least 85%, at least 90%, at least 95%, at least 99%, or 100% identical to any one of SEQ ID NOs: 1363, 1835, 1842, 1849, 1856, 1863, 1869, 1875, 1882, 1888, 1895, 1902, 1908, 1914, 1921, 1928, 1935, 1942, 1948, 1954, 1960, 1967, and 1972; and (iii) a CDR3 having an amino acid sequence that is at least 65%, at least 70%, at least 75%, at least 80%, at least 85%, at least 90%, at least 95%, at least 99%, or 100% identical to any one of SEQ ID NOs: 1364, 1836, 1843, 1850, 1857, 1864, 1870, 1876, 1883, 1889, 1896, 1903, 1909, 1915, 1922, 1929, 1936, 1943, 1949, 1955, 1961, 1968, and 1973.

[7485] In some aspects, the VL1 comprises an amino acid sequence that is at least 65%, at least 70%, at least 75%, at least 80%, at least 85%, at least 90%, at least 95%, at least 99%, or 100% identical to any one of SEQ ID NOs: 1361, 1833, 1840, 1847, 1854, 1861, 1868, 1874, 1880, 1887, 1893, 1900, 1907, 1913, 1919, 1926, 1933, 1940, 1947, 1952, 1958, 1965, and 1971.

[7486] In some aspects, the VL2 comprises an amino acid sequence that is at least 65%, at least 70%, at least 75%, at least 80%, at least 85%, at least 90%, at least 95%, at least 99%, or 100% identical to any one of SEQ ID NOs: 1361, 1833, 1840, 1847, 1854, 1861, 1868, 1874, 1880, 1887, 1893, 1900, 1907, 1913, 1919, 1926, 1933, 1940, 1947, 1952, 1958, 1965, and 1971.

[7487] In some aspects, the VL3 comprises an amino acid sequence that is at least 65%, at least 70%, at least 75%, at least 80%, at least 85%, at least 90%, at least 95%, at least 99%, or 100% identical to any one of SEQ ID NOs: 1361, 1833, 1840, 1847, 1854, 1861, 1868, 1874, 1880, 1887, 1893, 1900, 1907, 1913, 1919, 1926, 1933, 1940, 1947, 1952, 1958, 1965, and 1971.

[7488] In some aspects, the VL4 comprises an amino acid sequence that is at least 65%, at least 70%, at least 75%, at least 80%, at least 85%, at least 90%, at least 95%, at least 99%, or 100% identical to any one of SEQ ID NOs: 1361, 1833, 1840, 1847, 1854, 1861, 1868, 1874, 1880, 1887, 1893, 1900, 1907, 1913, 1919, 1926, 1933, 1940, 1947, 1952, 1958, 1965, and 1971.

[7489] In some aspects, the VH1 comprises an amino acid sequence that is at least 65%, at least 70%, at least 75%, at least 80%, at least 85%, at least 90%, at least 95%, at least 99%, or 100% identical to any one of SEQ ID NOs: 1365, 1837, 1844, 1851, 1858, 1865, 1871, 1877, 1884, 1890, 1897, 1904, 1910, 1916, 1923, 1930, 1937, 1944, 1950, 1956, 1962, 1969, and 1974.

[7490] In some aspects, the VH2 comprises an amino acid sequence that is at least 65%, at least 70%, at least 75%, at least 80%, at least 85%, at least 90%, at least 95%, at least 99%, or 100% identical to any one of SEQ ID NOs: 1365, 1837, 1844, 1851, 1858, 1865, 1871, 1877, 1884, 1890, 1897, 1904, 1910, 1916, 1923, 1930, 1937, 1944, 1950, 1956, 1962, 1969, and 1974.

[7491] In some aspects, the VH3 comprises an amino acid sequence that is at least 65%, at least 70%, at least 75%, at least 80%, at least 85%, at least 90%, at least 95%, at least 99%, or 100% identical to any one of SEQ ID NOs: 1365, 1837, 1844, 1851, 1858, 1865, 1871, 1877, 1884, 1890, 1897, 1904, 1910, 1916, 1923, 1930, 1937, 1944, 1950, 1956, 1962, 1969, and 1974.

[7492] In some aspects, the VH4 comprises an amino acid sequence that is at least 65%, at least 70%, at least 75%, at least 80%, at least 85%, at least 90%, at least 95%, at least 99%, or 100% identical to any one of SEQ ID NOs: 1365, 1837, 1844, 1851, 1858, 1865, 1871, 1877, 1884, 1890, 1897, 1904, 1910, 1916, 1923, 1930, 1937, 1944, 1950, 1956, 1962, 1969, and 1974.

[7493] In some aspects, one or both of the antigen binding polypeptides comprised in the antigen binding polypeptide complexes disclosed herein, comprise one or more CL, as indicated in the formulas representing the antigen binding polypeptide complexes disclosed herein. In some aspects, the CL comprises an amino acid sequence at least 65%, at least 70%, at least 75%, at least 80%, at least 85%, at least 90%, at least 95%, at least 99%, or 100% identical to any one of SEQ ID NOs: 374, 637, or 1092-1095.

[7494] In some aspects, one or both of the antigen binding polypeptides comprised in the antigen binding polypeptide complexes disclosed herein, comprise one or more CH1, as indicated in the formulas representing the antigen binding polypeptide complexes disclosed herein. In some aspects, the CH1 comprises an amino acid sequence at least 65%, at least 70%, at least 75%, at least 80%, at least 85%, at least 90%, at least 95%, at least 99%, or 100% identical to any one of SEQ ID NOs: 375, 634, 1070, 1071, or 1086-1091.

[7495] In some aspects, one or both of the antigen binding polypeptides comprised in the antigen binding polypeptide complexes provided herein further comprise an Fc region. In some aspects, one or both of the antigen binding polypeptides comprised in the antigen binding polypeptide complexes provided herein further comprise an Fc region at the carboxy-terminus. In some aspects, the Fc region comprises an immunoglobulin heavy chain constant region 2 (CH2) and/or an immunoglobulin heavy chain constant region 3 (CH3). In some aspects, the Fc region further comprises an immunoglobulin hinge (i.e., a hinge region). In some aspects, the hinge region is interposed between a CH1 and a CH2 (i.e., a hinge region is localized between the carboxy terminal residue of a CH1 and the N-terminal residue of a CH2). In some aspects, the hinge region comprises an amino acid sequence at least 65%, at least 70%, at least 75%, at least 80%, at least 85%, at least 90%, at least 95%, at least 99%, or 100% identical to any one of SEQ ID NOs: 635, 636, 1072, 1073, or 1074. In some aspects, the Fc region comprises a CH2 and a CH3. In some aspects, the CH2 comprises an amino acid sequence that is at least 65%, at least 70%, at least 75%, at least 80%, at least 85%, at least 90%, at least 95%, at least 99%, or 100% identical to any one of SEQ ID NOs: 1075-1078. In some aspects, the CH3 comprises an amino acid sequence that is at least 65%, at least 70%, at least 75%, at least 80%, at least 85%, at least 90%, at least 95%, at least 99%, or 100% identical to any one of SEQ ID NOs: 1079-1085. In some aspects, the Fc region comprises an amino acid sequence that is at least 65%, at least 70%, at least 75%, at least 80%, at least 85%, at least 90%, at least 95%, at least 99%, or 100% identical to any one of SEQ ID NOs: 376-380.

[7496] In some aspects, the Fc region comprises one or more amino acid substitutions. In some aspects, the one or more amino acid substitutions comprise one or more half-life extension amino acid substitutions. In some aspects, the one or more half-life extension amino acid substitutions comprise one or more of amino acid substitutions M428L, N434A, N434S, L234F, L235E, P331S, M252Y, S254T, or T256E, or equivalent thereof, based on the EU numbering scheme. In some aspects, the one or more half-life extension amino acid substitutions comprise a LA (M428L and N434A, or equivalent thereof, based on the EU numbering scheme) amino acid substitution. In some aspects, the one or more half-life extension amino acid substitutions comprise a LS (M428L and N434S, or equivalent thereof, based on the EU numbering scheme) amino acid substitution. In some aspects, the one or more half-life extension amino acid substitutions comprise L234F and L235E, or equivalent thereof (based on the EU numbering scheme) amino acid substitutions. In some aspects, the one or more half-life extension amino acid substitutions comprise a TM (L234F, L235E, and P331S, or equivalent thereof, based on the EU numbering scheme) amino acid substitution. In some aspects, the one or more half-life extension amino acid substitutions comprise a YTE (M252Y, S254T, and T256E, or equivalent thereof, based on the EU numbering scheme) amino acid substitution.

[7497] In some aspects, the Fc region comprises at least one knob-into-hole modification. In some aspects, the antigen binding polypeptides complexes disclosed herein are IgG1 or IgG4 antibodies or antigen binding fragments thereof. In some aspects, the knob-into-hole modification comprises one or more of knob substitutions of S354C and T366W, or equivalent thereof, and/or one or more of hole substitutions of Y349C, T366S, L368A, Y407V, or equivalent thereof, or a combination thereof, based on the EU numbering scheme. In some aspects, the Fc region comprises a knob-into-hole modification comprising knob substitutions of S354C and T366W, or equivalent thereof, and/or hole substitutions of Y349C, T366S, L368A, and Y407V, or equivalent thereof, and/or a half-life extension amino acid substitution comprising: a LA (M428L and N434A, or equivalent thereof, based on the EU numbering scheme) amino acid substitution, a LS (M428L and N434S, or equivalent thereof, based on the EU numbering scheme) amino acid substitution. L234F and L235E, or equivalent thereof (based on the EU numbering scheme) amino acid substitutions, a TM (L234F, L235E, and P331S, or equivalent thereof, based on the EU numbering scheme) amino acid substitution, a YTE (M252Y, S254T, and T256E, or equivalent thereof, based on the EU numbering scheme) amino acid substitution, or any combination thereof.

[7498] In some aspects, the Fc region comprises knob substitutions of S354C and T366W, or equivalent thereof, and a half-life extension amino acid substitution comprising: a LA (M428L and N434A, or equivalent thereof, based on the EU numbering scheme) amino acid substitution, a LS (M428L and N434S, or equivalent thereof, based on the EU numbering scheme) amino acid substitution. L234F and L235E, or equivalent thereof (based on the EU numbering scheme) amino acid substitutions, a TM (L234F, L235E, and P331S, or equivalent thereof, based on the EU numbering scheme) amino acid substitution, a YTE (M252Y, S254T, and T256E, or equivalent thereof, based on the EU numbering scheme) amino acid substitution, or any combination thereof.

[7499] In some aspects, the Fc region comprises hole substitutions of Y349C, T366S, L368A, and Y407V, or equivalent thereof, and a half-life extension amino acid substitution comprising: a LA (M428L and N434A, or equivalent thereof, based on the EU numbering scheme) amino acid substitution, a LS (M428L and N434S, or equivalent thereof, based on the EU numbering scheme) amino acid substitution. L234F and L235E, or equivalent thereof (based on the EU numbering scheme) amino acid substitutions, a TM (L234F, L235E, and P331S, or equivalent thereof, based on the EU numbering scheme) amino acid substitution, a YTE (M252Y, S254T, and T256E, or equivalent thereof, based on the EU numbering scheme) amino acid substitution, or any combination thereof.

[7500] In some aspects, one or both of the antigen binding polypeptides comprised in the antigen binding polypeptide complexes disclosed herein comprise one or more Fc effector function knockout mutation. In some aspects, one or both of the antigen binding polypeptides comprised in the antigen binding polypeptide complexes disclosed herein are IgG1 or IgG4 antibodies or antigen binding fragments thereof. In some aspects, the Fc effector function knockout mutation is L234A, L235A, P239A, or equivalent thereof, or a combination thereof, based on the EU numbering scheme.

[7501] In some aspects, one or both of the antigen binding polypeptides comprised in the antigen binding polypeptide complexes disclosed herein comprise a mutation at a glycosylation site. In some aspects, the mutation at a glycosylation site is a mutation at an N-glycosylation site. In some aspects, one or both of the antigen binding polypeptides comprised in the antigen binding polypeptide complexes disclosed herein comprise a VH comprising a mutation at a glycosylation site. In some aspects, the mutation at a glycosylation site is a mutation at an N-glycosylation site. In some aspects, the mutation at an N-glycosylation site is at amino acid N62, or equivalent thereof, of the VH region or equivalent thereof. In some aspects, the mutation at an N-glycosylation site at amino acid N62 is N62Q or N62S, or equivalent thereof.

[7502] In some aspects, one or both of the antigen binding polypeptides comprised in the antigen binding polypeptide complexes disclosed herein, comprise one or more optional linkers. The one or more optional linkers are indicated herein as Ln, wherein n is an integer, and the integer next to each L indicates each L comprised in the antigen binding polypeptides comprised in the antigen binding polypeptide complexes disclosed herein. For example, if an antigen binding polypeptide comprised in the antigen binding polypeptide complexes disclosed herein comprises two linkers, the first linker from N-terminus to C-terminus is herein indicated as L1, and the second linker from N-terminus to C-terminus is herein indicated as L2. If an antigen binding polypeptide complex disclosed herein comprises a first antigen binding polypeptide comprising two linkers, indicated herein as L1 and L2, as explained above, the linkers comprised in the second antigen binding polypeptide are indicated with the following integer, in this example, the first linker from N-terminus to C-terminus of the second antigen binding polypeptide is herein indicated as L3, the second linker from N-terminus to C-terminus of the second antigen binding polypeptide is herein indicated as L3. In some aspects, any one of the optional linkers each independently have a length of from 0 amino acids to about 50 amino acids. In some aspects, any one of the optional linkers each independently have a length of from 5 amino acids to about 40 amino acids.

[7503] In some aspects, any one of the optional linkers are non-immunogenic. In some aspects, any one of the optional linkers do not contain a consensus T cell epitope.

[7504] In some aspects, any of Ln comprises an amino acid sequence of G or A, or an amino acid sequence at least 65%, at least 70%, at least 75%, at least 80%, at least 85%, at least 90%, at least 95%, at least 99%, or 100% identical to amino acid sequence GSS or ASG, or an amino acid sequence at least 65%, at least 70%, at least 75%, at least 80%, at least 85%, at least 90%, at least 95%, at least 99%, or 100% identical to any one of SEQ ID NOs: 333-373 and 967-971. In some aspects. Ln comprises an amino acid sequence at least 65%, at least 70%, at least 75%, at least 80%, at least 85%, at least 90%, at least 95%, at least 99%, or 100% identical to any one of SEQ ID NOs: 333-345 and 967-971.

[7505] In some aspects, an antigen binding polypeptide complex provided herein comprises two antigen binding polypeptides wherein at least one antigen binding polypeptide has a structure represented by:
[7506] VL1-L1-VL2-L2-VH2-L3-VH1-L4-Fc-L5-Fc;
[7507] VL1-L1-VH2-L2-VL2-L3-VH1-L4-Fc-L5-Fc;
[7508] VH1-L1-VH2-L2-VL2-L3-VL1-L4-Fc-L5-Fc; or
[7509] VH1-L1-VL2-L2-VH2-L3-VL1-L4-Fc-L5-Fc;
[7510] wherein:
[7511] VL1 is a first immunoglobulin light chain variable region that specifically binds to (i) a tumor-associated antigen (TAA), (ii) an infectious disease antigen that is not a sarbecovirus antigen, or (iii) an other-pathology antigen;
[7512] VL2 is a second immunoglobulin light chain variable region that specifically binds to (i) a tumor-associated antigen (TAA), (ii) an infectious disease antigen that is not a sarbecovirus antigen, or (iii) an other-pathology antigen;
[7513] VH1 is a first immunoglobulin heavy chain variable region that specifically binds to (i) a tumor-associated antigen (TAA), (ii) an infectious disease antigen that is not a sarbecovirus antigen, or (iii) an other-pathology antigen;
[7514] VH2 is a second immunoglobulin heavy chain variable region that specifically binds to (i) a tumor-associated antigen (TAA), (ii) an infectious disease antigen that is not a sarbecovirus antigen, or (iii) an other-pathology antigen;
[7515] L1-L5 are optional amino acid linkers; and
[7516] Fc is an immunoglobulin fragment crystallizable region comprising an immunoglobulin heavy chain constant region 2 (CH2), an immunoglobulin heavy chain constant region 3 (CH3), and optionally, an immunoglobulin hinge.

[7517] In any aspect shown herein as a structure from amino terminus to carboxy terminus, and with binding pairs selected from VL and/or VH or other structural regions such as CH2, CH3, when shown without a specific linker such as L1, L2, etc., such linkers are optionally present in such structures between each designated subsequence VL, VH, etc.

[7518] In some aspects, the TAA is selected from the group consisting of 5′-nucleotidase, 5T4, A2AR, activin receptor-like kinase 1, adenocarcinoma antigen, ADRB3, AFP, AKAP-4, ALK, alpha-fetoprotein, androgenreceptor, angiopoietin 2, AOC3, APRIL, ATPDase, AXL, B7-4, B7DC, B7H1, B7H2, B7H3, B7H4, B7H5, B7H6, B7H7, B7RP1, BAFF, BAFFR, BCMA, bcr-abl, BlyS, BORIS, BST2, BTK, BTLA, C3, C5, C5a, C5a receptor, CA-125, CAIX, CanAg (a glycoform of MUC1), CCL11, CCL15, CCL17, CCL19, CCL2, CCL20, CCL21, CCL25, CCL3, CCL4, CCL5, CCL7, CCL8, CCR2, CCR3, CCR4, CCR5, CD11, CD11a, CD123, CD125, CD133, CD134, CD137, CD137L, CD147, CD15, CD154, CD160, CD16A, CD171, CD179a, CD18, CD184, CD19, CD2, CD20, CD200, CD22, CD221, CD23, CD24, CD242, CD25, CD27, CD272, CD276, CD278, CD279, CD28, CD3, CD30, CD300LF, CD319, CD33, CD37, CD38, CD39, CD38, CD4, CD40, CD40L, CD41, CD4+v6, CD45, CD47, CD49B, CD5, CD51, CD52, CD54, CD56, CD6, CD62L, CD7, CD70, CD72, CD74, CD79a, CD79b, CD80, CD86, CD97, CEA, CEACAM5, claudin 18 isoform 2, CLDN6, CLEC12A, CLEC9, CLEC91, CLL-1, cMet, coagulation factor III, CRTH2, CS1, CSF-1, CSFIR, CSF-2, CSF-3, CTGF, CTLA4, CXCL1, CXCL12, CXCL13, CXCL2, CXCL4, CXCR3, CXORF61, CyclinB1, CYP1B1, dendritic cell-associated lectin 2, DLL3, DLL4, DNGR-1, DR5, E7, E-cadherin, EGFL7, EGFR, EGFRVIII, ELF2M, EMR2, endoglin, ENTPD1, EpCAM, EphA2, EPHA3, ephrin receptor A3, EphrinB2, episialin, ERBB2 (Her2/neu), ERBB3, ERG (TMPRSS2-ETS fusion gene), ETV6-AML, FAP, FCAR, FCER1, FCER1A, FCER2, FCRL5, FGF 23, FGFR, FGFR2, fibronectin extra domain-B, FLAP, FLT3, folate hydrolase, folate receptor 1, folate receptor alpha, folate receptor beta, FOLH1, Fos-relatedantigen1, Frizzled receptor, Fucosyl GM1, GD2, GD3, gelatinase B, Gi24, GITR, GITRL, GloboH, Glutamate carboxypeptidase II, glypican 3, GM3, GP100, GPC1, GPC2, GPC3, gplOO, GPNMB, GPR20, GPR5, GPRC5D, growth differentiation factor 8, GUCY2C, HAVCR1, HER1, HER2, HER3, HGF, HGFR, HHLA2, histone complex, HLA-DR, HMGB1, HMWMAA, HPVE6, hTERT, human telomerase reverse transcriptase, HVEM, ICAM-1, ICOS, ICOSL, IDO, IFNa, IgE, IGF-1, IGF1R, IGF-2, IGF-I receptor, IGLL1, IL1, IL10, IL12, IL13, IL13Ra2, IL-13Ra2, IL13Ra1, IL15, IL17, IL-17A, IL-17AF, IL-17F, IL17Rb, IL18, IL1B, IL1F10, IL-1a, IL-1B, IL2, IL-20, IL22, IL23, IL-23A, IL25, IL2Rbeta, IL-3 receptor, IL-31 receptor A, IL33, IL35, IL4, IL4Ra, IL5, IL5R, IL6, IL7, IL7Ra, IL8, IL9, IL9R, IL1A, IL-llRa, integrin α4, integrin α4 β7, integrin α5β1, integrin αIIbβ3, integrin αvβ3, integrin β7, interleukin 36 receptor IL1RAP, interleukin 36 receptor IL1RL2, intestinal carboxy lesterase, ITGB4, ITK, KIR, KIR2D, KIT, LAG3, LAGE-1a, LAIR1, LAMP1, LCK, legumain, leptin. LewisY, LILRA2, LIV-1, LMP2, LOXL2, LPFS2, LRRC15, LY6K, LY75, LYPD3, MAD-CT-1, MAD-CT-2, MAGEA1, MAGE-A1, MCAM, MCP-1, MelanA/MART1, mesothelin, MHC classII, MIF, ML-IAP, MS4A1, MST1R (RON), MUC1, MUC-1, MUC16, MUC-16, MUC5AC, muthsp70-2, MYCN, NA17, NCA-90 granulocyte antigen, NCAM, NCR3LG1, nectin-4, NGNA ganglioside, NKG2A, NKG2D, NKp46, Notch 1, Notch receptor, NRP1, NTPDase-1, NY-BR-1, NY-ESO-1, o-acetyl-GD2, OR51E2, OX40, OX40L, OY-TES1, p53, p53mutant, PANX3, PAP, PAX3, PAX5, PCDC1, PCDP1, PCTA-1/Galectin8, PD-1, PDGFRA, PDGFR-beta, PD-L1, PD-L2, phosphate-sodium co-transporter, phosphatidylserine, PLAC1, polysialicacid, PROM1, prostase, prostein, PRSS21, PSCA, PSMA, PTK7, RAGE-1, RANKL, Ras mutant, rhIL1O, RhoC, root plate-specific spondin 3, ROR1, ROR2, RTN4, RU1, RU2, S152, sarcoma translocation breakpoints, SART3, scatter factor receptor kinase, SDC1, SIRPalpha, SISP1, SLAMF7, SLC, sLe, SLITRK6, spermprotein17, SPG64, sphingosine-1-phosphate, SSEA-4, SSX2, ST2, STEAP1, STEAP2, surviving and telomerase, Syk kinase, T14, TACI, TAG72, TARP, T-cell receptor, TCRβ, TDO, TEM1/CD248, TEM7R, tenascin C, TGFBETA, TGF-β1, TGF-β2, TGS5, the extracellular portion of the APRIL protein. Tie2, TIGIT, TIM3, TLR, TLR2, TLR4, TLR5, TLR9, TMEF1, TnAg, TNF, TNFa, TNFR superfamily member 4, TNFRSF7, Tp55, TRAC, TRAIL-R1, TRAIL-R2, TRAP, TREM1, TROP2, TRP-2, TSHR, TSLP, TSLPR, tumor antigen CTAA16.88, TWEAK, tyrosinase, TYRP1 glycoprotein 75, UPK2, VAP-1, VEGF, VEGFA, VEGFR-1, VEGFR2, vimentin, VISTA, Vstm3, WT1, WUCAM, and XAGE1.

[7519] In some aspects, the VL1 comprises a light chain complementarity determining region 1 (LCDR1), LCDR2, and/or LCDR3 of an antibody selected from the group consisting of losatuxizumab vedotin, utomilumab, urelumab, oleclumab, naptumomab estafenatox, ascrinvacumab, pintumomab, tacatuzumab tetraxetan, nesvacumab, vanucizumab, timolumab, vapaliximab, vepalimomab, enapotamab vedotin, ianalumab, belimumab, tabalumab, tibulizumab, belantamab mafodotin, teclistamab, teclistamab, detumomab, nacolomab tafenatox, eculizumab, lendalizumab, pexelizumab, pozelimab, ravulizumab, tesidolumab, vilobelimab, abagovomab, igovomab, oregovomab, sofituzumab vedotin, cantuzumab mertansine, cantuzuma bravtansine, girentuximab, altumomab pentetate, arcitumomab, besilesomab, bertilimumab, plozalizumab, mogamulizumab, leronlimab, PRO140, rovelizumab, rovelizumab, talacotuzumab, benralizumab, tavolimab, vonlerolizumab, gavilimomab, ziralimumab, fanolesomab, ipilimumab, ruplizumab, toralizumab, dapirolizumab pegol, toralizumab, dapirolizumab pegol, ruplizumab, blinatumomab, inebilizumab, loncastuximab tesirine, SGN-CD19A, tafasitamab, taplitumomab paptox, XMAB-5574, Budoprutug, Obexelimab, duvortuxizumab, englumafusp alfa, Emfizatamab, zeripatamig, siplizumab, blontuvetmab, FBTA05, ibritumomab tiuxetan, obinutuzumab, ocaratuzumab, ocrelizumab, ofatumumab, rituximab, tositumomab, ublituximab, veltuzumab, divozilimab, eramkafusp alfa, ripertamab, zuberitamab, glofitamab, nofetumomab merpentan, samalizumab, imvotamab, odronextamab, plamotamab, bectumomab, inotuzumab ozogamicin, moxetumomab pasudotox, pinatuzumab vedotin, gomiliximab, lumiliximab, inolimomab, inolimomab, daclizumab, camidanluma btesirine, basiliximab, varlilumab, omburtamab, enoblituzumab, vopratelimab, lulizumabpegol, TGN1412, muromonab-CD3, otelixizumab, teplizumab, visilizumab, epcoritamab, epcoritamab, brentuximab vedotin, iratumumab, azintuxizumab vedotin, gemtuzumab ozogamicin, lintuzumab, vadastuximab talirine, naratuximab emtansine, otlertuzumab, lilotomab satetraxetan, tetulomab, daratumumab, isatuximab, foralumab, mosunetuzumab, mosunetuzumab, cedelizumab, ibalizumab, keliximab, priliximab, tregalizumab, zanolimumab, bleselumab, iscalimab, lucatumumab, ravagalimab, selicrelumab, teneliximab, vanalimab, abciximab, bivatuzumab, iomab-B, telimomab aritox, zolimomab aritox, abituzumab, intetumumab, alemtuzumab, tamtuvetmab, lorvotuzumab mertansine, itolizumab, cusatuzumab, vorsetuzumab mafodotin, milatuzumab, iladatuzumab vedotin, polatuzumab vedotin, galiximab, cibisatamab, zolbetuximab, naxitamab, tisotumab vedotin, olendalizumab, pamrevlumab, lacnotuzumab, cabiralizumab, emactuzumab, axatilimab, gimsilumab, lenzilumab, namilumab, tremelimumab, ulocuplumab, tepoditamab, rovalpituzumab tesirine, tarlatamab, demcizumab, navicixizumab, drozitumab, parsatuzumab, depatuxizumab mafodotin, modotuximab, carotuximab, adecatumumab, adecatumumab, oportuzumab monatox, solitomab, tucotuzumab celmoleukin, edrecolomab, catumaxomab, ifabotuzumab, fibatuzumab, zalutumumab, panitumumab, cetuximab, futuximab, imgatuzumab, laprituximab emtansine, matuzumab, necitumumab, nimotuzumab, tomuzotuximab, amivantamab, amivantamab, epitumomab cituxetan, sontuzumab, duligotuzumab, elgemtumab, lumretuzumab, patritumab, seribantumab, zenocutuzumab, sibrotuzumab, burosumab, aprutumab ixadotin, radretumab, pasotuxizumab, farletuzumab, mirvetuximab soravtansine, vantictumab, TRBS07, 3F8, dinutuximab, dinutuximab beta, ecromeximab, mitumomab, andecaliximab, capromab, codrituzumab, glembatumumab vedotin, talquetamab, talquetamab, trevogrumab, indusatumab vedotin, ficlatuzumab, rilotumumab, zatuximab, pentuzimab, pentuzimab, margetuximab, timigutuzumab, trastuzumab, trastuzumab duocarmazine, trastuzumab emtansine, gancotamab, pertuzumab, ertumaxomab, emibetuzumab, telisotuzumab, telisotuzumab vedotin, derlotuximab biotin, apolizumab, onartuzumab, bersanlimab, enlimomabpegol, rontalizumab, sifalimumab, talizumab, ganitumab, istiratumab, robatumumab, teprotumumab, figitumumab, ganitumab, istiratumab, robatumumab, teprotumumab, cixutumumab, dalotuzumab, xentuzumab, dusigitumab, canakinumab, ustekinumab, ustekinumab, ustekinumab, briakinumab, briakinumab, abrezekimab, lebrikizumab, romilkimab, TNX-650, tralokinumab, anrukinzumab, brodalumab, ixekizumab, netakimab, perakizumab, secukinumab, vunakizumab, afasevikumab, afasevikumab, bimekizumab, bimekizumab, remtolumab, bermekimab, lutikizumab, lutikizumab, gevokizumab, cergutuzumab amunaleukin, fletikumab, fezakinumab, brazikumab, guselkumab, mirikizumab, tildrakizumab, risankizumab, flotetuzumab, nemolizumab, pascolizumab, dupilumab, mepolizumab, reslizumab, clazakizumab, elsilimomab, olokizumab, sarilumab, siltuximab, sirukumab, vobarilizumab, tocilizumab, SA237, satralizumab, enokizumab, prezalizumab, natalizumab, abrilumab, abrilumab, vedolizumab, volociximab, tadocizumab, etaracizumab, etrolizumab, spesolimab, vatelizumab, erlizumab, lirilumab, relatlimab, cBR96-doxorubicinimmunoconjugate, odulimomab, efalizumab, ladiratuzumab vedotin, simtuzumab, samrotamab vedotin, aselizumab, lupartumab amadotin, imalumab, carlumab, imaprelimab, amatuximab, amatuximab, anetumab ravtansine, narnatumab, clivatuzumab tetraxetan, pemtumomab, gatipotuzumab, ensituximab, lemalesomab, sulesomab, enfortumab vedotin, racotumomab, monalizumab, brontictuzumab, tarextumab, vesencumab, oxelumab, gilvetmab, tislelizumab, dostarlimab, BCD-100, nivolumab, PDR001, pembrolizumab, pidilizumab, retifanlimab, spartalizumab, sintilimab, cemiplimab, olaratumab, tovetumab, rinucumab, atezolizumab, avelumab, durvalumab, lifastuzumab vedotin, bavituximab, acapatamab, capromab, rosopatamab, nezastomig, pasotuxizumab, pelgifatamab, voxalatamab, cofetuzumab pelidotin, denosumab, rosmantuzumab, cirmtuzumab, atinumab, indatuximab ravtansine, elotuzumab, sirtratumab vedotin, sonepcizumab, vandortuzumab vedotin, minretumomab, satumomab pendetide, maslimomab, ontuxizumab, tenatumomab, fresolimumab, metelimumab, lerdelimumab, tezepelumab, etigilimab, tiragotumab, placulumab, prezalumab, infliximab, nerelimomab, ozoralizumab, adalimumab, afelimomab, certolizumab pegol, golimumab, mapatumumab, conatumumab, lexatumumab, tigatuzumab, sacituzumab govitecan, votumumab, pogalizumab, letolizumab, pankomab, anatumomab mafenatox, enavatuzumab, flanvotumab, brolucizumab, ranibizumab, varisacumab, bevacizumab, faricimab, icrucumab, alacizumab pegol, ramucirumab, pritumumab, and onvatilimab.

[7520] In some aspects, the VL2 comprises a light chain complementarity determining region 1 (LCDR1), LCDR2, and/or LCDR3 of an antibody selected from the group consisting of losatuxizumab vedotin, utomilumab, urelumab, oleclumab, naptumomab estafenatox, ascrinvacumab, pintumomab, tacatuzumab tetraxetan, nesvacumab, vanucizumab, timolumab, vapaliximab, vepalimomab, enapotamab vedotin, ianalumab, belimumab, tabalumab, tibulizumab, belantamab mafodotin, teclistamab, teclistamab, detumomab, nacolomab tafenatox, eculizumab, lendalizumab, pexelizumab, pozelimab, ravulizumab, tesidolumab, vilobelimab, abagovomab, igovomab, oregovomab, sofituzumab vedotin, cantuzumab mertansine, cantuzuma bravtansine, girentuximab, altumomab pentetate, arcitumomab, besilesomab, bertilimumab, plozalizumab, mogamulizumab, leronlimab, PRO140, rovelizumab, rovelizumab, talacotuzumab, benralizumab, tavolimab, vonlerolizumab, gavilimomab, ziralimumab, fanolesomab, ipilimumab, ruplizumab, toralizumab, dapirolizumab pegol, toralizumab, dapirolizumab pegol, ruplizumab, blinatumomab, inebilizumab, loncastuximab tesirine, SGN-CD19A, tafasitamab, taplitumomab paptox, XMAB-5574, Budoprutug, Obexelimab, duvortuxizumab, englumafusp alfa, Emfizatamab, zeripatamig, siplizumab, blontuvetmab, FBTA05, ibritumomab tiuxetan, obinutuzumab, ocaratuzumab, ocrelizumab, ofatumumab, rituximab, tositumomab, ublituximab, veltuzumab, divozilimab, eramkafusp alfa, ripertamab, zuberitamab, glofitamab, nofetumomab merpentan, samalizumab, imvotamab, odronextamab, plamotamab, bectumomab, inotuzumab ozogamicin, moxetumomab pasudotox, pinatuzumab vedotin, gomiliximab, lumiliximab, inolimomab, inolimomab, daclizumab, camidanluma btesirine, basiliximab, varlilumab, omburtamab, enoblituzumab, vopratelimab, lulizumabpegol, TGN1412, muromonab-CD3, otelixizumab, teplizumab, visilizumab, epcoritamab, epcoritamab, brentuximab vedotin, iratumumab, azintuxizumab vedotin, gemtuzumab ozogamicin, lintuzumab, vadastuximab talirine, naratuximab emtansine, otlertuzumab, lilotomab satetraxetan, tetulomab, daratumumab, isatuximab, foralumab, mosunetuzumab, mosunetuzumab, cedelizumab, ibalizumab, keliximab, priliximab, tregalizumab, zanolimumab, bleselumab, iscalimab, lucatumumab, ravagalimab, selicrelumab, teneliximab, vanalimab, abciximab, bivatuzumab, iomab-B, telimomab aritox, zolimomab aritox, abituzumab, intetumumab, alemtuzumab, tamtuvetmab, lorvotuzumab mertansine, itolizumab, cusatuzumab, vorsetuzumab mafodotin, milatuzumab, iladatuzumab vedotin, polatuzumab vedotin, galiximab, cibisatamab, zolbetuximab, naxitamab, tisotumab vedotin, olendalizumab, pamrevlumab, lacnotuzumab, cabiralizumab, emactuzumab, axatilimab, gimsilumab, lenzilumab, namilumab, tremelimumab, ulocuplumab, tepoditamab, rovalpituzumab tesirine, tarlatamab, demcizumab, navicixizumab, drozitumab, parsatuzumab, depatuxizumab mafodotin, modotuximab, carotuximab, adecatumumab, adecatumumab, oportuzumab monatox, solitomab, tucotuzumab celmoleukin, edrecolomab, catumaxomab, ifabotuzumab, fibatuzumab, zalutumumab, panitumumab, cetuximab, futuximab, imgatuzumab, laprituximab emtansine, matuzumab, necitumumab, nimotuzumab, tomuzotuximab, amivantamab, amivantamab, epitumomab cituxetan, sontuzumab, duligotuzumab, elgemtumab, lumretuzumab, patritumab, seribantumab, zenocutuzumab, sibrotuzumab, burosumab, aprutumab ixadotin, radretumab, pasotuxizumab, farletuzumab, mirvetuximab soravtansine, vantictumab, TRBS07, 3F8, dinutuximab, dinutuximab beta, ecromeximab, mitumomab, andecaliximab, capromab, codrituzumab, glembatumumab vedotin, talquetamab, talquetamab, trevogrumab, indusatumab vedotin, ficlatuzumab, rilotumumab, zatuximab, pentuzimab, pentuzimab, margetuximab, timigutuzumab, trastuzumab, trastuzumab duocarmazine, trastuzumab emtansine, gancotamab, pertuzumab, ertumaxomab, emibetuzumab, telisotuzumab, telisotuzumab vedotin, derlotuximab biotin, apolizumab, onartuzumab, bersanlimab, enlimomabpegol, rontalizumab, sifalimumab, talizumab, ganitumab, istiratumab, robatumumab, teprotumumab, figitumumab, ganitumab, istiratumab, robatumumab, teprotumumab, cixutumumab, dalotuzumab, xentuzumab, dusigitumab, canakinumab, ustekinumab, ustekinumab, ustekinumab, briakinumab, briakinumab, abrezekimab, lebrikizumab, romilkimab, TNX-650, tralokinumab, anrukinzumab, brodalumab, ixekizumab, netakimab, perakizumab, secukinumab, vunakizumab, afasevikumab, afasevikumab, bimekizumab, bimekizumab, remtolumab, bermekimab, lutikizumab, lutikizumab, gevokizumab, cergutuzumab amunaleukin, fletikumab, fezakinumab, brazikumab, guselkumab, mirikizumab, tildrakizumab, risankizumab, flotetuzumab, nemolizumab, pascolizumab, dupilumab, mepolizumab, reslizumab, clazakizumab, elsilimomab, olokizumab, sarilumab, siltuximab, sirukumab, vobarilizumab, tocilizumab, SA237, satralizumab, enokizumab, prezalizumab, natalizumab, abrilumab, abrilumab, vedolizumab, volociximab, tadocizumab, etaracizumab, etrolizumab, spesolimab, vatelizumab, erlizumab, lirilumab, relatlimab, cBR96-doxorubicinimmunoconjugate, odulimomab, efalizumab, ladiratuzumab vedotin, simtuzumab, samrotamab vedotin, aselizumab, lupartumab amadotin, imalumab, carlumab, imaprelimab, amatuximab, amatuximab, anetumab ravtansine, narnatumab, clivatuzumab tetraxetan, pemtumomab, gatipotuzumab, ensituximab, lemalesomab, sulesomab, enfortumab vedotin, racotumomab, monalizumab, brontictuzumab, tarextumab, vesencumab, oxelumab, gilvetmab, tislelizumab, dostarlimab, BCD-100, nivolumab, PDR001, pembrolizumab, pidilizumab, retifanlimab, spartalizumab, sintilimab, cemiplimab, olaratumab, tovetumab, rinucumab, atezolizumab, avelumab, durvalumab, lifastuzumab vedotin, bavituximab, acapatamab, capromab, rosopatamab, nezastomig, pasotuxizumab, pelgifatamab, voxalatamab, cofetuzumab pelidotin, denosumab, rosmantuzumab, cirmtuzumab, atinumab, indatuximab ravtansine, elotuzumab, sirtratumab vedotin, sonepcizumab, vandortuzumab vedotin, minretumomab, satumomab pendetide, maslimomab, ontuxizumab, tenatumomab, fresolimumab, metelimumab, lerdelimumab, tezepelumab, etigilimab, tiragotumab, placulumab, prezalumab, infliximab, nerelimomab, ozoralizumab, adalimumab, afelimomab, certolizumab pegol, golimumab, mapatumumab, conatumumab, lexatumumab, tigatuzumab, sacituzumab govitecan, votumumab, pogalizumab, letolizumab, pankomab, anatumomab mafenatox, enavatuzumab, flanvotumab, brolucizumab, ranibizumab, varisacumab, bevacizumab, faricimab, icrucumab, alacizumab pegol, ramucirumab, pritumumab, and onvatilimab.

[7521] In some aspects, the VH1 comprises a heavy chain complementarity determining region 1 (HCDR1), HCDR2, and/or HCDR3 of an antibody selected from the group consisting of losatuxizumab vedotin, utomilumab, urelumab, oleclumab, naptumomab estafenatox, ascrinvacumab, pintumomab, tacatuzumab tetraxetan, nesvacumab, vanucizumab, timolumab, vapaliximab, vepalimomab, enapotamab vedotin, ianalumab, belimumab, tabalumab, tibulizumab, belantamab mafodotin, teclistamab, teclistamab, detumomab, nacolomab tafenatox, eculizumab, lendalizumab, pexelizumab, pozelimab, ravulizumab, tesidolumab, vilobelimab, abagovomab, igovomab, oregovomab, sofituzumab vedotin, cantuzumab mertansine, cantuzuma bravtansine, girentuximab, altumomab pentetate, arcitumomab, besilesomab, bertilimumab, plozalizumab, mogamulizumab, leronlimab, PRO140, rovelizumab, rovelizumab, talacotuzumab, benralizumab, tavolimab, vonlerolizumab, gavilimomab, ziralimumab, fanolesomab, ipilimumab, ruplizumab, toralizumab, dapirolizumab pegol, toralizumab, dapirolizumab pegol, ruplizumab, blinatumomab, inebilizumab, loncastuximab tesirine, SGN-CD19A, tafasitamab, taplitumomab paptox, XMAB-5574, Budoprutug, Obexelimab, duvortuxizumab, englumafusp alfa, Emfizatamab, zeripatamig, siplizumab, blontuvetmab, FBTA05, ibritumomab tiuxetan, obinutuzumab, ocaratuzumab, ocrelizumab, ofatumumab, rituximab, tositumomab, ublituximab, veltuzumab, divozilimab, eramkafusp alfa, ripertamab, zuberitamab, glofitamab, nofetumomab merpentan, samalizumab, imvotamab, odronextamab, plamotamab, bectumomab, inotuzumab ozogamicin, moxetumomab pasudotox, pinatuzumab vedotin, gomiliximab, lumiliximab, inolimomab, inolimomab, daclizumab, camidanluma btesirine, basiliximab, varlilumab, omburtamab, enoblituzumab, vopratelimab, lulizumabpegol, TGN1412, muromonab-CD3, otelixizumab, teplizumab, visilizumab, epcoritamab, epcoritamab, brentuximab vedotin, iratumumab, azintuxizumab vedotin, gemtuzumab ozogamicin, lintuzumab, vadastuximab talirine, naratuximab emtansine, otlertuzumab, lilotomab satetraxetan, tetulomab, daratumumab, isatuximab, foralumab, mosunetuzumab, mosunetuzumab, cedelizumab, ibalizumab, keliximab, priliximab, tregalizumab, zanolimumab, bleselumab, iscalimab, lucatumumab, ravagalimab, selicrelumab, teneliximab, vanalimab, abciximab, bivatuzumab, iomab-B, telimomab aritox, zolimomab aritox, abituzumab, intetumumab, alemtuzumab, tamtuvetmab, lorvotuzumab mertansine, itolizumab, cusatuzumab, vorsetuzumab mafodotin, milatuzumab, iladatuzumab vedotin, polatuzumab vedotin, galiximab, cibisatamab, zolbetuximab, naxitamab, tisotumab vedotin, olendalizumab, pamrevlumab, lacnotuzumab, cabiralizumab, emactuzumab, axatilimab, gimsilumab, lenzilumab, namilumab, tremelimumab, ulocuplumab, tepoditamab, rovalpituzumab tesirine, tarlatamab, demcizumab, navicixizumab, drozitumab, parsatuzumab, depatuxizumab mafodotin, modotuximab, carotuximab, adecatumumab, adecatumumab, oportuzumab monatox, solitomab, tucotuzumab celmoleukin, edrecolomab, catumaxomab, ifabotuzumab, fibatuzumab, zalutumumab, panitumumab, cetuximab, futuximab, imgatuzumab, laprituximab emtansine, matuzumab, necitumumab, nimotuzumab, tomuzotuximab, amivantamab, amivantamab, epitumomab cituxetan, sontuzumab, duligotuzumab, elgemtumab, lumretuzumab, patritumab, seribantumab, zenocutuzumab, sibrotuzumab, burosumab, aprutumab ixadotin, radretumab, pasotuxizumab, farletuzumab, mirvetuximab soravtansine, vantictumab, TRBS07, 3F8, dinutuximab, dinutuximab beta, ecromeximab, mitumomab, andecaliximab, capromab, codrituzumab, glembatumumab vedotin, talquetamab, talquetamab, trevogrumab, indusatumab vedotin, ficlatuzumab, rilotumumab, zatuximab, pentuzimab, pentuzimab, margetuximab, timigutuzumab, trastuzumab, trastuzumab duocarmazine, trastuzumab emtansine, gancotamab, pertuzumab, ertumaxomab, emibetuzumab, telisotuzumab, telisotuzumab vedotin, derlotuximab biotin, apolizumab, onartuzumab, bersanlimab, enlimomabpegol, rontalizumab, sifalimumab, talizumab, ganitumab, istiratumab, robatumumab, teprotumumab, figitumumab, ganitumab, istiratumab, robatumumab, teprotumumab, cixutumumab, dalotuzumab, xentuzumab, dusigitumab, canakinumab, ustekinumab, ustekinumab, ustekinumab, briakinumab, briakinumab, abrezekimab, lebrikizumab, romilkimab, TNX-650, tralokinumab, anrukinzumab, brodalumab, ixekizumab, netakimab, perakizumab, secukinumab, vunakizumab, afasevikumab, afasevikumab, bimekizumab, bimekizumab, remtolumab, bermekimab, lutikizumab, lutikizumab, gevokizumab, cergutuzumab amunaleukin, fletikumab, fezakinumab, brazikumab, guselkumab, mirikizumab, tildrakizumab, risankizumab, flotetuzumab, nemolizumab, pascolizumab, dupilumab, mepolizumab, reslizumab, clazakizumab, elsilimomab, olokizumab, sarilumab, siltuximab, sirukumab, vobarilizumab, tocilizumab, SA237, satralizumab, enokizumab, prezalizumab, natalizumab, abrilumab, abrilumab, vedolizumab, volociximab, tadocizumab, etaracizumab, etrolizumab, spesolimab, vatelizumab, erlizumab, lirilumab, relatlimab, cBR96-doxorubicinimmunoconjugate, odulimomab, efalizumab, ladiratuzumab vedotin, simtuzumab, samrotamab vedotin, aselizumab, lupartumab amadotin, imalumab, carlumab, imaprelimab, amatuximab, amatuximab, anetumab ravtansine, narnatumab, clivatuzumab tetraxetan, pemtumomab, gatipotuzumab, ensituximab, lemalesomab, sulesomab, enfortumab vedotin, racotumomab, monalizumab, brontictuzumab, tarextumab, vesencumab, oxelumab, gilvetmab, tislelizumab, dostarlimab, BCD-100, nivolumab, PDR001, pembrolizumab, pidilizumab, retifanlimab, spartalizumab, sintilimab, cemiplimab, olaratumab, tovetumab, rinucumab, atezolizumab, avelumab, durvalumab, lifastuzumab vedotin, bavituximab, acapatamab, capromab, rosopatamab, nezastomig, pasotuxizumab, pelgifatamab, voxalatamab, cofetuzumab pelidotin, denosumab, rosmantuzumab, cirmtuzumab, atinumab, indatuximab ravtansine, elotuzumab, sirtratumab vedotin, sonepcizumab, vandortuzumab vedotin, minretumomab, satumomab pendetide, maslimomab, ontuxizumab, tenatumomab, fresolimumab, metelimumab, lerdelimumab, tezepelumab, etigilimab, tiragotumab, placulumab, prezalumab, infliximab, nerelimomab, ozoralizumab, adalimumab, afelimomab, certolizumab pegol, golimumab, mapatumumab, conatumumab, lexatumumab, tigatuzumab, sacituzumab govitecan, votumumab, pogalizumab, letolizumab, pankomab, anatumomab mafenatox, enavatuzumab, flanvotumab, brolucizumab, ranibizumab, varisacumab, bevacizumab, faricimab, icrucumab, alacizumab pegol, ramucirumab, pritumumab, and onvatilimab.

[7522] In some aspects, the VH2 comprises a heavy chain complementarity determining region 1 (HCDR1), HCDR2, and/or HCDR3 of an antibody selected from the group consisting of losatuxizumab vedotin, utomilumab, urelumab, oleclumab, naptumomab estafenatox, ascrinvacumab, pintumomab, tacatuzumab tetraxetan, nesvacumab, vanucizumab, timolumab, vapaliximab, vepalimomab, enapotamab vedotin, ianalumab, belimumab, tabalumab, tibulizumab, belantamab mafodotin, teclistamab, teclistamab, detumomab, nacolomab tafenatox, eculizumab, lendalizumab, pexelizumab, pozelimab, ravulizumab, tesidolumab, vilobelimab, abagovomab, igovomab, oregovomab, sofituzumab vedotin, cantuzumab mertansine, cantuzuma bravtansine, girentuximab, altumomab pentetate, arcitumomab, besilesomab, bertilimumab, plozalizumab, mogamulizumab, leronlimab, PRO140, rovelizumab, rovelizumab, talacotuzumab, benralizumab, tavolimab, vonlerolizumab, gavilimomab, ziralimumab, fanolesomab, ipilimumab, ruplizumab, toralizumab, dapirolizumab pegol, toralizumab, dapirolizumab pegol, ruplizumab, blinatumomab, inebilizumab, loncastuximab tesirine, SGN-CD19A, tafasitamab, taplitumomab paptox, XMAB-5574, Budoprutug, Obexelimab, duvortuxizumab, englumafusp alfa, Emfizatamab, zeripatamig, siplizumab, blontuvetmab, FBTA05, ibritumomab tiuxetan, obinutuzumab, ocaratuzumab, ocrelizumab, ofatumumab, rituximab, tositumomab, ublituximab, veltuzumab, divozilimab, eramkafusp alfa, ripertamab, zuberitamab, glofitamab, nofetumomab merpentan, samalizumab, imvotamab, odronextamab, plamotamab, bectumomab, inotuzumab ozogamicin, moxetumomab pasudotox, pinatuzumab vedotin, gomiliximab, lumiliximab, inolimomab, inolimomab, daclizumab, camidanluma btesirine, basiliximab, varlilumab, omburtamab, enoblituzumab, vopratelimab, lulizumabpegol, TGN1412, muromonab-CD3, otelixizumab, teplizumab, visilizumab, epcoritamab, epcoritamab, brentuximab vedotin, iratumumab, azintuxizumab vedotin, gemtuzumab ozogamicin, lintuzumab, vadastuximab talirine, naratuximab emtansine, otlertuzumab, lilotomab satetraxetan, tetulomab, daratumumab, isatuximab, foralumab, mosunetuzumab, mosunetuzumab, cedelizumab, ibalizumab, keliximab, priliximab, tregalizumab, zanolimumab, bleselumab, iscalimab, lucatumumab, ravagalimab, selicrelumab, teneliximab, vanalimab, abciximab, bivatuzumab, iomab-B, telimomab aritox, zolimomab aritox, abituzumab, intetumumab, alemtuzumab, tamtuvetmab, lorvotuzumab mertansine, itolizumab, cusatuzumab, vorsetuzumab mafodotin, milatuzumab, iladatuzumab vedotin, polatuzumab vedotin, galiximab, cibisatamab, zolbetuximab, naxitamab, tisotumab vedotin, olendalizumab, pamrevlumab, lacnotuzumab, cabiralizumab, emactuzumab, axatilimab, gimsilumab, lenzilumab, namilumab, tremelimumab, ulocuplumab, tepoditamab, rovalpituzumab tesirine, tarlatamab, demcizumab, navicixizumab, drozitumab, parsatuzumab, depatuxizumab mafodotin, modotuximab, carotuximab, adecatumumab, adecatumumab, oportuzumab monatox, solitomab, tucotuzumab celmoleukin, edrecolomab, catumaxomab, ifabotuzumab, fibatuzumab, zalutumumab, panitumumab, cetuximab, futuximab, imgatuzumab, laprituximab emtansine, matuzumab, necitumumab, nimotuzumab, tomuzotuximab, amivantamab, amivantamab, epitumomab cituxetan, sontuzumab, duligotuzumab, elgemtumab, lumretuzumab, patritumab, seribantumab, zenocutuzumab, sibrotuzumab, burosumab, aprutumab ixadotin, radretumab, pasotuxizumab, farletuzumab, mirvetuximab soravtansine, vantictumab, TRBS07, 3F8, dinutuximab, dinutuximab beta, ecromeximab, mitumomab, andecaliximab, capromab, codrituzumab, glembatumumab vedotin, talquetamab, talquetamab, trevogrumab, indusatumab vedotin, ficlatuzumab, rilotumumab, zatuximab, pentuzimab, pentuzimab, margetuximab, timigutuzumab, trastuzumab, trastuzumab duocarmazine, trastuzumab emtansine, gancotamab, pertuzumab, ertumaxomab, emibetuzumab, telisotuzumab, telisotuzumab vedotin, derlotuximab biotin, apolizumab, onartuzumab, bersanlimab, enlimomabpegol, rontalizumab, sifalimumab, talizumab, ganitumab, istiratumab, robatumumab, teprotumumab, figitumumab, ganitumab, istiratumab, robatumumab, teprotumumab, cixutumumab, dalotuzumab, xentuzumab, dusigitumab, canakinumab, ustekinumab, ustekinumab, ustekinumab, briakinumab, briakinumab, abrezekimab, lebrikizumab, romilkimab, TNX-650, tralokinumab, anrukinzumab, brodalumab, ixekizumab, netakimab, perakizumab, secukinumab, vunakizumab, afasevikumab, afasevikumab, bimekizumab, bimekizumab, remtolumab, bermekimab, lutikizumab, lutikizumab, gevokizumab, cergutuzumab amunaleukin, fletikumab, fezakinumab, brazikumab, guselkumab, mirikizumab, tildrakizumab, risankizumab, flotetuzumab, nemolizumab, pascolizumab, dupilumab, mepolizumab, reslizumab, clazakizumab, elsilimomab, olokizumab, sarilumab, siltuximab, sirukumab, vobarilizumab, tocilizumab, SA237, satralizumab, enokizumab, prezalizumab, natalizumab, abrilumab, abrilumab, vedolizumab, volociximab, tadocizumab, etaracizumab, etrolizumab, spesolimab, vatelizumab, erlizumab, lirilumab, relatlimab, cBR96-doxorubicinimmunoconjugate, odulimomab, efalizumab, ladiratuzumab vedotin, simtuzumab, samrotamab vedotin, aselizumab, lupartumab amadotin, imalumab, carlumab, imaprelimab, amatuximab, amatuximab, anetumab ravtansine, narnatumab, clivatuzumab tetraxetan, pemtumomab, gatipotuzumab, ensituximab, lemalesomab, sulesomab, enfortumab vedotin, racotumomab, monalizumab, brontictuzumab, tarextumab, vesencumab, oxelumab, gilvetmab, tislelizumab, dostarlimab, BCD-100, nivolumab, PDR001, pembrolizumab, pidilizumab, retifanlimab, spartalizumab, sintilimab, cemiplimab, olaratumab, tovetumab, rinucumab, atezolizumab, avelumab, durvalumab, lifastuzumab vedotin, bavituximab, acapatamab, capromab, rosopatamab, nezastomig, pasotuxizumab, pelgifatamab, voxalatamab, cofetuzumab pelidotin, denosumab, rosmantuzumab, cirmtuzumab, atinumab, indatuximab ravtansine, elotuzumab, sirtratumab vedotin, sonepcizumab, vandortuzumab vedotin, minretumomab, satumomab pendetide, maslimomab, ontuxizumab, tenatumomab, fresolimumab, metelimumab, lerdelimumab, tezepelumab, etigilimab, tiragotumab, placulumab, prezalumab, infliximab, nerelimomab, ozoralizumab, adalimumab, afelimomab, certolizumab pegol, golimumab, mapatumumab, conatumumab, lexatumumab, tigatuzumab, sacituzumab govitecan, votumumab, pogalizumab, letolizumab, pankomab, anatumomab mafenatox, enavatuzumab, flanvotumab, brolucizumab, ranibizumab, varisacumab, bevacizumab, faricimab, icrucumab, alacizumab pegol, ramucirumab, pritumumab, and onvatilimab.

[7523] In some aspects, the VL1 comprises a VL of an antibody selected from the group consisting of losatuxizumab vedotin, utomilumab, urelumab, oleclumab, naptumomab estafenatox, ascrinvacumab, pintumomab, tacatuzumab tetraxetan, nesvacumab, vanucizumab, timolumab, vapaliximab, vepalimomab, enapotamab vedotin, ianalumab, belimumab, tabalumab, tibulizumab, belantamab mafodotin, teclistamab, teclistamab, detumomab, nacolomab tafenatox, eculizumab, lendalizumab, pexelizumab, pozelimab, ravulizumab, tesidolumab, vilobelimab, abagovomab, igovomab, oregovomab, sofituzumab vedotin, cantuzumab mertansine, cantuzuma bravtansine, girentuximab, altumomab pentetate, arcitumomab, besilesomab, bertilimumab, plozalizumab, mogamulizumab, leronlimab, PRO140, rovelizumab, rovelizumab, talacotuzumab, benralizumab, tavolimab, vonlerolizumab, gavilimomab, ziralimumab, fanolesomab, ipilimumab, ruplizumab, toralizumab, dapirolizumab pegol, toralizumab, dapirolizumab pegol, ruplizumab, blinatumomab, inebilizumab, loncastuximab tesirine, SGN-CD19A, tafasitamab, taplitumomab paptox, XMAB-5574, Budoprutug, Obexelimab, duvortuxizumab, englumafusp alfa, Emfizatamab, zeripatamig, siplizumab, blontuvetmab, FBTA05, ibritumomab tiuxetan, obinutuzumab, ocaratuzumab, ocrelizumab, ofatumumab, rituximab, tositumomab, ublituximab, veltuzumab, divozilimab, eramkafusp alfa, ripertamab, zuberitamab, glofitamab, nofetumomab merpentan, samalizumab, imvotamab, odronextamab, plamotamab, bectumomab, inotuzumab ozogamicin, moxetumomab pasudotox, pinatuzumab vedotin, gomiliximab, lumiliximab, inolimomab, inolimomab, daclizumab, camidanluma btesirine, basiliximab, varlilumab, omburtamab, enoblituzumab, vopratelimab, lulizumabpegol, TGN1412, muromonab-CD3, otelixizumab, teplizumab, visilizumab, epcoritamab, epcoritamab, brentuximab vedotin, iratumumab, azintuxizumab vedotin, gemtuzumab ozogamicin, lintuzumab, vadastuximab talirine, naratuximab emtansine, otlertuzumab, lilotomab satetraxetan, tetulomab, daratumumab, isatuximab, foralumab, mosunetuzumab, mosunetuzumab, cedelizumab, ibalizumab, keliximab, priliximab, tregalizumab, zanolimumab, bleselumab, iscalimab, lucatumumab, ravagalimab, selicrelumab, teneliximab, vanalimab, abciximab, bivatuzumab, iomab-B, telimomab aritox, zolimomab aritox, abituzumab, intetumumab, alemtuzumab, tamtuvetmab, lorvotuzumab mertansine, itolizumab, cusatuzumab, vorsetuzumab mafodotin, milatuzumab, iladatuzumab vedotin, polatuzumab vedotin, galiximab, cibisatamab, zolbetuximab, naxitamab, tisotumab vedotin, olendalizumab, pamrevlumab, lacnotuzumab, cabiralizumab, emactuzumab, axatilimab, gimsilumab, lenzilumab, namilumab, tremelimumab, ulocuplumab, tepoditamab, rovalpituzumab tesirine, tarlatamab, demcizumab, navicixizumab, drozitumab, parsatuzumab, depatuxizumab mafodotin, modotuximab, carotuximab, adecatumumab, adecatumumab, oportuzumab monatox, solitomab, tucotuzumab celmoleukin, edrecolomab, catumaxomab, ifabotuzumab, fibatuzumab, zalutumumab, panitumumab, cetuximab, futuximab, imgatuzumab, laprituximab emtansine, matuzumab, necitumumab, nimotuzumab, tomuzotuximab, amivantamab, amivantamab, epitumomab cituxetan, sontuzumab, duligotuzumab, elgemtumab, lumretuzumab, patritumab, seribantumab, zenocutuzumab, sibrotuzumab, burosumab, aprutumab ixadotin, radretumab, pasotuxizumab, farletuzumab, mirvetuximab soravtansine, vantictumab, TRBS07, 3F8, dinutuximab, dinutuximab beta, ecromeximab, mitumomab, andecaliximab, capromab, codrituzumab, glembatumumab vedotin, talquetamab, talquetamab, trevogrumab, indusatumab vedotin, ficlatuzumab, rilotumumab, zatuximab, pentuzimab, pentuzimab, margetuximab, timigutuzumab, trastuzumab, trastuzumab duocarmazine, trastuzumab emtansine, gancotamab, pertuzumab, ertumaxomab, emibetuzumab, telisotuzumab, telisotuzumab vedotin, derlotuximab biotin, apolizumab, onartuzumab, bersanlimab, enlimomabpegol, rontalizumab, sifalimumab, talizumab, ganitumab, istiratumab, robatumumab, teprotumumab, figitumumab, ganitumab, istiratumab, robatumumab, teprotumumab, cixutumumab, dalotuzumab, xentuzumab, dusigitumab, canakinumab, ustekinumab, ustekinumab, ustekinumab, briakinumab, briakinumab, abrezekimab, lebrikizumab, romilkimab, TNX-650, tralokinumab, anrukinzumab, brodalumab, ixekizumab, netakimab, perakizumab, secukinumab, vunakizumab, afasevikumab, afasevikumab, bimekizumab, bimekizumab, remtolumab, bermekimab, lutikizumab, lutikizumab, gevokizumab, cergutuzumab amunaleukin, fletikumab, fezakinumab, brazikumab, guselkumab, mirikizumab, tildrakizumab, risankizumab, flotetuzumab, nemolizumab, pascolizumab, dupilumab, mepolizumab, reslizumab, clazakizumab, elsilimomab, olokizumab, sarilumab, siltuximab, sirukumab, vobarilizumab, tocilizumab, SA237, satralizumab, enokizumab, prezalizumab, natalizumab, abrilumab, abrilumab, vedolizumab, volociximab, tadocizumab, etaracizumab, etrolizumab, spesolimab, vatelizumab, erlizumab, lirilumab, relatlimab, cBR96-doxorubicinimmunoconjugate, odulimomab, efalizumab, ladiratuzumab vedotin, simtuzumab, samrotamab vedotin, aselizumab, lupartumab amadotin, imalumab, carlumab, imaprelimab, amatuximab, amatuximab, anetumab ravtansine, narnatumab, clivatuzumab tetraxetan, pemtumomab, gatipotuzumab, ensituximab, lemalesomab, sulesomab, enfortumab vedotin, racotumomab, monalizumab, brontictuzumab, tarextumab, vesencumab, oxelumab, gilvetmab, tislelizumab, dostarlimab, BCD-100, nivolumab, PDR001, pembrolizumab, pidilizumab, retifanlimab, spartalizumab, sintilimab, cemiplimab, olaratumab, tovetumab, rinucumab, atezolizumab, avelumab, durvalumab, lifastuzumab vedotin, bavituximab, acapatamab, capromab, rosopatamab, nezastomig, pasotuxizumab, pelgifatamab, voxalatamab, cofetuzumab pelidotin, denosumab, rosmantuzumab, cirmtuzumab, atinumab, indatuximab ravtansine, elotuzumab, sirtratumab vedotin, sonepcizumab, vandortuzumab vedotin, minretumomab, satumomab pendetide, maslimomab, ontuxizumab, tenatumomab, fresolimumab, metelimumab, lerdelimumab, tezepelumab, etigilimab, tiragotumab, placulumab, prezalumab, infliximab, nerelimomab, ozoralizumab, adalimumab, afelimomab, certolizumab pegol, golimumab, mapatumumab, conatumumab, lexatumumab, tigatuzumab, sacituzumab govitecan, votumumab, pogalizumab, letolizumab, pankomab, anatumomab mafenatox, enavatuzumab, flanvotumab, brolucizumab, ranibizumab, varisacumab, bevacizumab, faricimab, icrucumab, alacizumab pegol, ramucirumab, pritumumab, and onvatilimab.

[7524] In some aspects, the VL2 comprises a VL of an antibody selected from the group consisting of losatuxizumab vedotin, utomilumab, urelumab, oleclumab, naptumomab estafenatox, ascrinvacumab, pintumomab, tacatuzumab tetraxetan, nesvacumab, vanucizumab, timolumab, vapaliximab, vepalimomab, enapotamab vedotin, ianalumab, belimumab, tabalumab, tibulizumab, belantamab mafodotin, teclistamab, teclistamab, detumomab, nacolomab tafenatox, eculizumab, lendalizumab, pexelizumab, pozelimab, ravulizumab, tesidolumab, vilobelimab, abagovomab, igovomab, oregovomab, sofituzumab vedotin, cantuzumab mertansine, cantuzuma bravtansine, girentuximab, altumomab pentetate, arcitumomab, besilesomab, bertilimumab, plozalizumab, mogamulizumab, leronlimab, PRO140, rovelizumab, rovelizumab, talacotuzumab, benralizumab, tavolimab, vonlerolizumab, gavilimomab, ziralimumab, fanolesomab, ipilimumab, ruplizumab, toralizumab, dapirolizumab pegol, toralizumab, dapirolizumab pegol, ruplizumab, blinatumomab, inebilizumab, loncastuximab tesirine, SGN-CD19A, tafasitamab, taplitumomab paptox, XMAB-5574, Budoprutug, Obexelimab, duvortuxizumab, englumafusp alfa, Emfizatamab, zeripatamig, siplizumab, blontuvetmab, FBTA05, ibritumomab tiuxetan, obinutuzumab, ocaratuzumab, ocrelizumab, ofatumumab, rituximab, tositumomab, ublituximab, veltuzumab, divozilimab, eramkafusp alfa, ripertamab, zuberitamab, glofitamab, nofetumomab merpentan, samalizumab, imvotamab, odronextamab, plamotamab, bectumomab, inotuzumab ozogamicin, moxetumomab pasudotox, pinatuzumab vedotin, gomiliximab, lumiliximab, inolimomab, inolimomab, daclizumab, camidanluma btesirine, basiliximab, varlilumab, omburtamab, enoblituzumab, vopratelimab, lulizumabpegol, TGN1412, muromonab-CD3, otelixizumab, teplizumab, visilizumab, epcoritamab, epcoritamab, brentuximab vedotin, iratumumab, azintuxizumab vedotin, gemtuzumab ozogamicin, lintuzumab, vadastuximab talirine, naratuximab emtansine, otlertuzumab, lilotomab satetraxetan, tetulomab, daratumumab, isatuximab, foralumab, mosunetuzumab, mosunetuzumab, cedelizumab, ibalizumab, keliximab, priliximab, tregalizumab, zanolimumab, bleselumab, iscalimab, lucatumumab, ravagalimab, selicrelumab, teneliximab, vanalimab, abciximab, bivatuzumab, iomab-B, telimomab aritox, zolimomab aritox, abituzumab, intetumumab, alemtuzumab, tamtuvetmab, lorvotuzumab mertansine, itolizumab, cusatuzumab, vorsetuzumab mafodotin, milatuzumab, iladatuzumab vedotin, polatuzumab vedotin, galiximab, cibisatamab, zolbetuximab, naxitamab, tisotumab vedotin, olendalizumab, pamrevlumab, lacnotuzumab, cabiralizumab, emactuzumab, axatilimab, gimsilumab, lenzilumab, namilumab, tremelimumab, ulocuplumab, tepoditamab, rovalpituzumab tesirine, tarlatamab, demcizumab, navicixizumab, drozitumab, parsatuzumab, depatuxizumab mafodotin, modotuximab, carotuximab, adecatumumab, adecatumumab, oportuzumab monatox, solitomab, tucotuzumab celmoleukin, edrecolomab, catumaxomab, ifabotuzumab, fibatuzumab, zalutumumab, panitumumab, cetuximab, futuximab, imgatuzumab, laprituximab emtansine, matuzumab, necitumumab, nimotuzumab, tomuzotuximab, amivantamab, amivantamab, epitumomab cituxetan, sontuzumab, duligotuzumab, elgemtumab, lumretuzumab, patritumab, seribantumab, zenocutuzumab, sibrotuzumab, burosumab, aprutumab ixadotin, radretumab, pasotuxizumab, farletuzumab, mirvetuximab soravtansine, vantictumab, TRBS07, 3F8, dinutuximab, dinutuximab beta, ecromeximab, mitumomab, andecaliximab, capromab, codrituzumab, glembatumumab vedotin, talquetamab, talquetamab, trevogrumab, indusatumab vedotin, ficlatuzumab, rilotumumab, zatuximab, pentuzimab, pentuzimab, margetuximab, timigutuzumab, trastuzumab, trastuzumab duocarmazine, trastuzumab emtansine, gancotamab, pertuzumab, ertumaxomab, emibetuzumab, telisotuzumab, telisotuzumab vedotin, derlotuximab biotin, apolizumab, onartuzumab, bersanlimab, enlimomabpegol, rontalizumab, sifalimumab, talizumab, ganitumab, istiratumab, robatumumab, teprotumumab, figitumumab, ganitumab, istiratumab, robatumumab, teprotumumab, cixutumumab, dalotuzumab, xentuzumab, dusigitumab, canakinumab, ustekinumab, ustekinumab, ustekinumab, briakinumab, briakinumab, abrezekimab, lebrikizumab, romilkimab, TNX-650, tralokinumab, anrukinzumab, brodalumab, ixekizumab, netakimab, perakizumab, secukinumab, vunakizumab, afasevikumab, afasevikumab, bimekizumab, bimekizumab, remtolumab, bermekimab, lutikizumab, lutikizumab, gevokizumab, cergutuzumab amunaleukin, fletikumab, fezakinumab, brazikumab, guselkumab, mirikizumab, tildrakizumab, risankizumab, flotetuzumab, nemolizumab, pascolizumab, dupilumab, mepolizumab, reslizumab, clazakizumab, elsilimomab, olokizumab, sarilumab, siltuximab, sirukumab, vobarilizumab, tocilizumab, SA237, satralizumab, enokizumab, prezalizumab, natalizumab, abrilumab, abrilumab, vedolizumab, volociximab, tadocizumab, etaracizumab, etrolizumab, spesolimab, vatelizumab, erlizumab, lirilumab, relatlimab, cBR96-doxorubicinimmunoconjugate, odulimomab, efalizumab, ladiratuzumab vedotin, simtuzumab, samrotamab vedotin, aselizumab, lupartumab amadotin, imalumab, carlumab, imaprelimab, amatuximab, amatuximab, anetumab ravtansine, narnatumab, clivatuzumab tetraxetan, pemtumomab, gatipotuzumab, ensituximab, lemalesomab, sulesomab, enfortumab vedotin, racotumomab, monalizumab, brontictuzumab, tarextumab, vesencumab, oxelumab, gilvetmab, tislelizumab, dostarlimab, BCD-100, nivolumab, PDR001, pembrolizumab, pidilizumab, retifanlimab, spartalizumab, sintilimab, cemiplimab, olaratumab, tovetumab, rinucumab, atezolizumab, avelumab, durvalumab, lifastuzumab vedotin, bavituximab, acapatamab, capromab, rosopatamab, nezastomig, pasotuxizumab, pelgifatamab, voxalatamab, cofetuzumab pelidotin, denosumab, rosmantuzumab, cirmtuzumab, atinumab, indatuximab ravtansine, elotuzumab, sirtratumab vedotin, sonepcizumab, vandortuzumab vedotin, minretumomab, satumomab pendetide, maslimomab, ontuxizumab, tenatumomab, fresolimumab, metelimumab, lerdelimumab, tezepelumab, etigilimab, tiragotumab, placulumab, prezalumab, infliximab, nerelimomab, ozoralizumab, adalimumab, afelimomab, certolizumab pegol, golimumab, mapatumumab, conatumumab, lexatumumab, tigatuzumab, sacituzumab govitecan, votumumab, pogalizumab, letolizumab, pankomab, anatumomab mafenatox, enavatuzumab, flanvotumab, brolucizumab, ranibizumab, varisacumab, bevacizumab, faricimab, icrucumab, alacizumab pegol, ramucirumab, pritumumab, and onvatilimab.

[7525] In some aspects, the VH1 comprises a VH of an antibody selected from the group consisting of losatuxizumab vedotin, utomilumab, urelumab, oleclumab, naptumomab estafenatox, ascrinvacumab, pintumomab, tacatuzumab tetraxetan, nesvacumab, vanucizumab, timolumab, vapaliximab, vepalimomab, enapotamab vedotin, ianalumab, belimumab, tabalumab, tibulizumab, belantamab mafodotin, teclistamab, teclistamab, detumomab, nacolomab tafenatox, eculizumab, lendalizumab, pexelizumab, pozelimab, ravulizumab, tesidolumab, vilobelimab, abagovomab, igovomab, oregovomab, sofituzumab vedotin, cantuzumab mertansine, cantuzuma bravtansine, girentuximab, altumomab pentetate, arcitumomab, besilesomab, bertilimumab, plozalizumab, mogamulizumab, leronlimab, PRO140, rovelizumab, rovelizumab, talacotuzumab, benralizumab, tavolimab, vonlerolizumab, gavilimomab, ziralimumab, fanolesomab, ipilimumab, ruplizumab, toralizumab, dapirolizumab pegol, toralizumab, dapirolizumab pegol, ruplizumab, blinatumomab, inebilizumab, loncastuximab tesirine, SGN-CD19A, tafasitamab, taplitumomab paptox, XMAB-5574, Budoprutug, Obexelimab, duvortuxizumab, englumafusp alfa, Emfizatamab, zeripatamig, siplizumab, blontuvetmab, FBTA05, ibritumomab tiuxetan, obinutuzumab, ocaratuzumab, ocrelizumab, ofatumumab, rituximab, tositumomab, ublituximab, veltuzumab, divozilimab, eramkafusp alfa, ripertamab, zuberitamab, glofitamab, nofetumomab merpentan, samalizumab, imvotamab, odronextamab, plamotamab, bectumomab, inotuzumab ozogamicin, moxetumomab pasudotox, pinatuzumab vedotin, gomiliximab, lumiliximab, inolimomab, inolimomab, daclizumab, camidanluma btesirine, basiliximab, varlilumab, omburtamab, enoblituzumab, vopratelimab, lulizumabpegol, TGN1412, muromonab-CD3, otelixizumab, teplizumab, visilizumab, epcoritamab, epcoritamab, brentuximab vedotin, iratumumab, azintuxizumab vedotin, gemtuzumab ozogamicin, lintuzumab, vadastuximab talirine, naratuximab emtansine, otlertuzumab, lilotomab satetraxetan, tetulomab, daratumumab, isatuximab, foralumab, mosunetuzumab, mosunetuzumab, cedelizumab, ibalizumab, keliximab, priliximab, tregalizumab, zanolimumab, bleselumab, iscalimab, lucatumumab, ravagalimab, selicrelumab, teneliximab, vanalimab, abciximab, bivatuzumab, iomab-B, telimomab aritox, zolimomab aritox, abituzumab, intetumumab, alemtuzumab, tamtuvetmab, lorvotuzumab mertansine, itolizumab, cusatuzumab, vorsetuzumab mafodotin, milatuzumab, iladatuzumab vedotin, polatuzumab vedotin, galiximab, cibisatamab, zolbetuximab, naxitamab, tisotumab vedotin, olendalizumab, pamrevlumab, lacnotuzumab, cabiralizumab, emactuzumab, axatilimab, gimsilumab, lenzilumab, namilumab, tremelimumab, ulocuplumab, tepoditamab, rovalpituzumab tesirine, tarlatamab, demcizumab, navicixizumab, drozitumab, parsatuzumab, depatuxizumab mafodotin, modotuximab, carotuximab, adecatumumab, adecatumumab, oportuzumab monatox, solitomab, tucotuzumab celmoleukin, edrecolomab, catumaxomab, ifabotuzumab, fibatuzumab, zalutumumab, panitumumab, cetuximab, futuximab, imgatuzumab, laprituximab emtansine, matuzumab, necitumumab, nimotuzumab, tomuzotuximab, amivantamab, amivantamab, epitumomab cituxetan, sontuzumab, duligotuzumab, elgemtumab, lumretuzumab, patritumab, seribantumab, zenocutuzumab, sibrotuzumab, burosumab, aprutumab ixadotin, radretumab, pasotuxizumab, farletuzumab, mirvetuximab soravtansine, vantictumab, TRBS07, 3F8, dinutuximab, dinutuximab beta, ecromeximab, mitumomab, andecaliximab, capromab, codrituzumab, glembatumumab vedotin, talquetamab, talquetamab, trevogrumab, indusatumab vedotin, ficlatuzumab, rilotumumab, zatuximab, pentuzimab, pentuzimab, margetuximab, timigutuzumab, trastuzumab, trastuzumab duocarmazine, trastuzumab emtansine, gancotamab, pertuzumab, ertumaxomab, emibetuzumab, telisotuzumab, telisotuzumab vedotin, derlotuximab biotin, apolizumab, onartuzumab, bersanlimab, enlimomabpegol, rontalizumab, sifalimumab, talizumab, ganitumab, istiratumab, robatumumab, teprotumumab, figitumumab, ganitumab, istiratumab, robatumumab, teprotumumab, cixutumumab, dalotuzumab, xentuzumab, dusigitumab, canakinumab, ustekinumab, ustekinumab, ustekinumab, briakinumab, briakinumab, abrezekimab, lebrikizumab, romilkimab, TNX-650, tralokinumab, anrukinzumab, brodalumab, ixekizumab, netakimab, perakizumab, secukinumab, vunakizumab, afasevikumab, afasevikumab, bimekizumab, bimekizumab, remtolumab, bermekimab, lutikizumab, lutikizumab, gevokizumab, cergutuzumab amunaleukin, fletikumab, fezakinumab, brazikumab, guselkumab, mirikizumab, tildrakizumab, risankizumab, flotetuzumab, nemolizumab, pascolizumab, dupilumab, mepolizumab, reslizumab, clazakizumab, elsilimomab, olokizumab, sarilumab, siltuximab, sirukumab, vobarilizumab, tocilizumab, SA237, satralizumab, enokizumab, prezalizumab, natalizumab, abrilumab, abrilumab, vedolizumab, volociximab, tadocizumab, etaracizumab, etrolizumab, spesolimab, vatelizumab, erlizumab, lirilumab, relatlimab, cBR96-doxorubicinimmunoconjugate, odulimomab, efalizumab, ladiratuzumab vedotin, simtuzumab, samrotamab vedotin, aselizumab, lupartumab amadotin, imalumab, carlumab, imaprelimab, amatuximab, amatuximab, anetumab ravtansine, narnatumab, clivatuzumab tetraxetan, pemtumomab, gatipotuzumab, ensituximab, lemalesomab, sulesomab, enfortumab vedotin, racotumomab, monalizumab, brontictuzumab, tarextumab, vesencumab, oxelumab, gilvetmab, tislelizumab, dostarlimab, BCD-100, nivolumab, PDR001, pembrolizumab, pidilizumab, retifanlimab, spartalizumab, sintilimab, cemiplimab, olaratumab, tovetumab, rinucumab, atezolizumab, avelumab, durvalumab, lifastuzumab vedotin, bavituximab, acapatamab, capromab, rosopatamab, nezastomig, pasotuxizumab, pelgifatamab, voxalatamab, cofetuzumab pelidotin, denosumab, rosmantuzumab, cirmtuzumab, atinumab, indatuximab ravtansine, elotuzumab, sirtratumab vedotin, sonepcizumab, vandortuzumab vedotin, minretumomab, satumomab pendetide, maslimomab, ontuxizumab, tenatumomab, fresolimumab, metelimumab, lerdelimumab, tezepelumab, etigilimab, tiragotumab, placulumab, prezalumab, infliximab, nerelimomab, ozoralizumab, adalimumab, afelimomab, certolizumab pegol, golimumab, mapatumumab, conatumumab, lexatumumab, tigatuzumab, sacituzumab govitecan, votumumab, pogalizumab, letolizumab, pankomab, anatumomab mafenatox, enavatuzumab, flanvotumab, brolucizumab, ranibizumab, varisacumab, bevacizumab, faricimab, icrucumab, alacizumab pegol, ramucirumab, pritumumab, and onvatilimab.

[7526] In some aspects, the VH2 comprises a VH of an antibody selected from the group consisting of losatuxizumab vedotin, utomilumab, urelumab, oleclumab, naptumomab estafenatox, ascrinvacumab, pintumomab, tacatuzumab tetraxetan, nesvacumab, vanucizumab, timolumab, vapaliximab, vepalimomab, enapotamab vedotin, ianalumab, belimumab, tabalumab, tibulizumab, belantamab mafodotin, teclistamab, teclistamab, detumomab, nacolomab tafenatox, eculizumab, lendalizumab, pexelizumab, pozelimab, ravulizumab, tesidolumab, vilobelimab, abagovomab, igovomab, oregovomab, sofituzumab vedotin, cantuzumab mertansine, cantuzuma bravtansine, girentuximab, altumomab pentetate, arcitumomab, besilesomab, bertilimumab, plozalizumab, mogamulizumab, leronlimab, PRO140, rovelizumab, rovelizumab, talacotuzumab, benralizumab, tavolimab, vonlerolizumab, gavilimomab, ziralimumab, fanolesomab, ipilimumab, ruplizumab, toralizumab, dapirolizumab pegol, toralizumab, dapirolizumab pegol, ruplizumab, blinatumomab, inebilizumab, loncastuximab tesirine, SGN-CD19A, tafasitamab, taplitumomab paptox, XMAB-5574, Budoprutug, Obexelimab, duvortuxizumab, englumafusp alfa, Emfizatamab, zeripatamig, siplizumab, blontuvetmab, FBTA05, ibritumomab tiuxetan, obinutuzumab, ocaratuzumab, ocrelizumab, ofatumumab, rituximab, tositumomab, ublituximab, veltuzumab, divozilimab, eramkafusp alfa, ripertamab, zuberitamab, glofitamab, nofetumomab merpentan, samalizumab, imvotamab, odronextamab, plamotamab, bectumomab, inotuzumab ozogamicin, moxetumomab pasudotox, pinatuzumab vedotin, gomiliximab, lumiliximab, inolimomab, inolimomab, daclizumab, camidanluma btesirine, basiliximab, varlilumab, omburtamab, enoblituzumab, vopratelimab, lulizumabpegol, TGN1412, muromonab-CD3, otelixizumab, teplizumab, visilizumab, epcoritamab, epcoritamab, brentuximab vedotin, iratumumab, azintuxizumab vedotin, gemtuzumab ozogamicin, lintuzumab, vadastuximab talirine, naratuximab emtansine, otlertuzumab, lilotomab satetraxetan, tetulomab, daratumumab, isatuximab, foralumab, mosunetuzumab, mosunetuzumab, cedelizumab, ibalizumab, keliximab, priliximab, tregalizumab, zanolimumab, bleselumab, iscalimab, lucatumumab, ravagalimab, selicrelumab, teneliximab, vanalimab, abciximab, bivatuzumab, iomab-B, telimomab aritox, zolimomab aritox, abituzumab, intetumumab, alemtuzumab, tamtuvetmab, lorvotuzumab mertansine, itolizumab, cusatuzumab, vorsetuzumab mafodotin, milatuzumab, iladatuzumab vedotin, polatuzumab vedotin, galiximab, cibisatamab, zolbetuximab, naxitamab, tisotumab vedotin, olendalizumab, pamrevlumab, lacnotuzumab, cabiralizumab, emactuzumab, axatilimab, gimsilumab, lenzilumab, namilumab, tremelimumab, ulocuplumab, tepoditamab, rovalpituzumab tesirine, tarlatamab, demcizumab, navicixizumab, drozitumab, parsatuzumab, depatuxizumab mafodotin, modotuximab, carotuximab, adecatumumab, adecatumumab, oportuzumab monatox, solitomab, tucotuzumab celmoleukin, edrecolomab, catumaxomab, ifabotuzumab, fibatuzumab, zalutumumab, panitumumab, cetuximab, futuximab, imgatuzumab, laprituximab emtansine, matuzumab, necitumumab, nimotuzumab, tomuzotuximab, amivantamab, amivantamab, epitumomab cituxetan, sontuzumab, duligotuzumab, elgemtumab, lumretuzumab, patritumab, seribantumab, zenocutuzumab, sibrotuzumab, burosumab, aprutumab ixadotin, radretumab, pasotuxizumab, farletuzumab, mirvetuximab soravtansine, vantictumab, TRBS07, 3F8, dinutuximab, dinutuximab beta, ecromeximab, mitumomab, andecaliximab, capromab, codrituzumab, glembatumumab vedotin, talquetamab, talquetamab, trevogrumab, indusatumab vedotin, ficlatuzumab, rilotumumab, zatuximab, pentuzimab, pentuzimab, margetuximab, timigutuzumab, trastuzumab, trastuzumab duocarmazine, trastuzumab emtansine, gancotamab, pertuzumab, ertumaxomab, emibetuzumab, telisotuzumab, telisotuzumab vedotin, derlotuximab biotin, apolizumab, onartuzumab, bersanlimab, enlimomabpegol, rontalizumab, sifalimumab, talizumab, ganitumab, istiratumab, robatumumab, teprotumumab, figitumumab, ganitumab, istiratumab, robatumumab, teprotumumab, cixutumumab, dalotuzumab, xentuzumab, dusigitumab, canakinumab, ustekinumab, ustekinumab, ustekinumab, briakinumab, briakinumab, abrezekimab, lebrikizumab, romilkimab, TNX-650, tralokinumab, anrukinzumab, brodalumab, ixekizumab, netakimab, perakizumab, secukinumab, vunakizumab, afasevikumab, afasevikumab, bimekizumab, bimekizumab, remtolumab, bermekimab, lutikizumab, lutikizumab, gevokizumab, cergutuzumab amunaleukin, fletikumab, fezakinumab, brazikumab, guselkumab, mirikizumab, tildrakizumab, risankizumab, flotetuzumab, nemolizumab, pascolizumab, dupilumab, mepolizumab, reslizumab, clazakizumab, elsilimomab, olokizumab, sarilumab, siltuximab, sirukumab, vobarilizumab, tocilizumab, SA237, satralizumab, enokizumab, prezalizumab, natalizumab, abrilumab, abrilumab, vedolizumab, volociximab, tadocizumab, etaracizumab, etrolizumab, spesolimab, vatelizumab, erlizumab, lirilumab, relatlimab, cBR96-doxorubicinimmunoconjugate, odulimomab, efalizumab, ladiratuzumab vedotin, simtuzumab, samrotamab vedotin, aselizumab, lupartumab amadotin, imalumab, carlumab, imaprelimab, amatuximab, amatuximab, anetumab ravtansine, narnatumab, clivatuzumab tetraxetan, pemtumomab, gatipotuzumab, ensituximab, lemalesomab, sulesomab, enfortumab vedotin, racotumomab, monalizumab, brontictuzumab, tarextumab, vesencumab, oxelumab, gilvetmab, tislelizumab, dostarlimab, BCD-100, nivolumab, PDR001, pembrolizumab, pidilizumab, retifanlimab, spartalizumab, sintilimab, cemiplimab, olaratumab, tovetumab, rinucumab, atezolizumab, avelumab, durvalumab, lifastuzumab vedotin, bavituximab, acapatamab, capromab, rosopatamab, nezastomig, pasotuxizumab, pelgifatamab, voxalatamab, cofetuzumab pelidotin, denosumab, rosmantuzumab, cirmtuzumab, atinumab, indatuximab ravtansine, elotuzumab, sirtratumab vedotin, sonepcizumab, vandortuzumab vedotin, minretumomab, satumomab pendetide, maslimomab, ontuxizumab, tenatumomab, fresolimumab, metelimumab, lerdelimumab, tezepelumab, etigilimab, tiragotumab, placulumab, prezalumab, infliximab, nerelimomab, ozoralizumab, adalimumab, afelimomab, certolizumab pegol, golimumab, mapatumumab, conatumumab, lexatumumab, tigatuzumab, sacituzumab govitecan, votumumab, pogalizumab, letolizumab, pankomab, anatumomab mafenatox, enavatuzumab, flanvotumab, brolucizumab, ranibizumab, varisacumab, bevacizumab, faricimab, icrucumab, alacizumab pegol, ramucirumab, pritumumab, and onvatilimab.

[7527] In some aspects, the VL1 comprises (i) a complementarity determining region (CDR) 1 having an amino acid sequence that is at least 65%, at least 70%, at least 75%, at least 80%, at least 85%, at least 90%, at least 95%, at least 99%, or 100% identical to any one of SEQ ID NOs: 1096, 1103, 1110, 1120, 1127, 1134, 1141, 1148, 1155, 1162, 1169, 1174, 1181, 1188, 1199, 1211, 1221, 1228, 1235, 1247, 1254, 1261, 1266, 1271, 1278, 1285, 1292, 1299, 1306, 1313, 1319, 1326, 1339, 1352, 1359, 1366, 1373, 1382, 1394, 1401, 1408, 1414, 1421, 1428, 1441, 1448, 1455, 1461, 1468, 1475, 1488, 1495, 1508, 1519, 1526, 1531, 1538, 1544, 1556, 1568, 1574, 1581, 1594, 1601, 1608, 1615, 1622, 1629, 1636, 1643, 1650, 1657, 1672, 1679, 1689, 1697, 1708, 1715, 1718, 1723, 1727, 1738, 1743, 1752, 1761, 1763, 1769, 1776, and 1786; (ii) a CDR2 having an amino acid sequence that is at least 65%, at least 70%, at least 75%, at least 80%, at least 85%, at least 90%, at least 95%, at least 99%, or 100% identical to any one of SEQ ID NOs: 1200, 1212, 1680, 1690, 1698, 1709, 1728, 1739, 1744, 1753, 1770, and 1777; or at least 65%, at least 70%, at least 75%, at least 80%, at least 85%, at least 90%, at least 95%, at least 99%, or 100% identical to any one of amino acid sequences AAS, APS, AT, ATS, DAS, DDG, DDS, DT, DTS, DVS, EAS, FTS, GAF, GAN, GAS, GAT, GIS, GKN, GNS, HTS, KVS, LAS, LGS, LVS, NAK, NTN, QMS, RMS, RTS, SAS, TTS, WAS, YAS, YAT, YGS, YRS, and YTS; and (iii) a CDR3 having an amino acid sequence that is at least 65%, at least 70%, at least 75%, at least 80%, at least 85%, at least 90%, at least 95%, at least 99%, or 100% identical to any one of SEQ ID NOs: 1097, 1104, 1111, 1121, 1128, 1135, 1142, 1149, 1156, 1163, 1170, 1175, 1182, 1189, 1195, 1201, 1207, 1213, 1222, 1229, 1236, 2009, 1248, 1255, 1262, 1267, 1272, 1279, 1286, 1293, 1300, 1307, 1320, 1327, 1333, 1340, 1346, 1353, 1360, 1367, 1374, 1383, 1389, 1395, 1402, 1409, 1415, 1422, 1429, 1435, 1442, 1449, 1456, 1462, 1469, 1476, 1482, 1489, 1496, 1502, 1509, 1513, 1520, 1532, 1539, 1545, 1557, 1562, 1569, 1575, 1582, 1588, 1595, 1602, 1609, 1616, 1623, 1630, 1637, 1644, 1651, 1658, 1663, 1673, 1681, 1691, 1699, 1710, 1729, 1735, 1745, 1751, 1754, 1778, 1787, and 1976.

[7528] In some aspects, the VL2 comprises (i) a complementarity determining region (CDR) 1 having an amino acid sequence that is at least 65%, at least 70%, at least 75%, at least 80%, at least 85%, at least 90%, at least 95%, at least 99%, or 100% identical to any one of SEQ ID NOs: 1096, 1103, 1110, 1120, 1127, 1134, 1141, 1148, 1155, 1162, 1169, 1174, 1181, 1188, 1199, 1211, 1221, 1228, 1235, 1247, 1254, 1261, 1266, 1271, 1278, 1285, 1292, 1299, 1306, 1313, 1319, 1326, 1339, 1352, 1359, 1366, 1373, 1382, 1394, 1401, 1408, 1414, 1421, 1428, 1441, 1448, 1455, 1461, 1468, 1475, 1488, 1495, 1508, 1519, 1526, 1531, 1538, 1544, 1556, 1568, 1574, 1581, 1594, 1601, 1608, 1615, 1622, 1629, 1636, 1643, 1650, 1657, 1672, 1679, 1689, 1697, 1708, 1715, 1718, 1723, 1727, 1738, 1743, 1752, 1761, 1763, 1769, 1776, and 1786; (ii) a CDR2 having an amino acid sequence that is at least 65%, at least 70%, at least 75%, at least 80%, at least 85%, at least 90%, at least 95%, at least 99%, or 100% identical to any one of SEQ ID NOs: 1200, 1212, 1680, 1690, 1698, 1709, 1728, 1739, 1744, 1753, 1770, and 1777; or at least 65%, at least 70%, at least 75%, at least 80%, at least 85%, at least 90%, at least 95%, at least 99%, or 100% identical to any one of amino acid sequences AAS, APS, AT, ATS, DAS, DDG, DDS, DT, DTS, DVS, EAS, FTS, GAF, GAN, GAS, GAT, GIS, GKN, GNS, HTS, KVS, LAS, LGS, LVS, NAK, NTN, QMS, RMS, RTS, SAS, TTS, WAS, YAS, YAT, YGS, YRS, and YTS; and (iii) a CDR3 having an amino acid sequence that is at least 65%, at least 70%, at least 75%, at least 80%, at least 85%, at least 90%, at least 95%, at least 99%, or 100% identical to any one of SEQ ID NOs: 1097, 1104, 1111, 1121, 1128, 1135, 1142, 1149, 1156, 1163, 1170, 1175, 1182, 1189, 1195, 1201, 1207, 1213, 1222, 1229, 1236, 2009, 1248, 1255, 1262, 1267, 1272, 1279, 1286, 1293, 1300, 1307, 1320, 1327, 1333, 1340, 1346, 1353, 1360, 1367, 1374, 1383, 1389, 1395, 1402, 1409, 1415, 1422, 1429, 1435, 1442, 1449, 1456, 1462, 1469, 1476, 1482, 1489, 1496, 1502, 1509, 1513, 1520, 1532, 1539, 1545, 1557, 1562, 1569, 1575, 1582, 1588, 1595, 1602, 1609, 1616, 1623, 1630, 1637, 1644, 1651, 1658, 1663, 1673, 1681, 1691, 1699, 1710, 1729, 1735, 1745, 1751, 1754, 1778, 1787, and 1976.

[7529] In some aspects, the VH1 comprises (i) a complementarity determining region (CDR) 1 having an amino acid sequence that is at least 65%, at least 70%, at least 75%, at least 80%, at least 85%, at least 90%, at least 95%, at least 99%, or 100% identical to any one of SEQ ID NOs: 1099, 1106, 1113, 1117, 1123, 1130, 1137, 1144, 1151, 1158, 1165, 1177, 1184, 1191, 1203, 1215, 1224, 1231, 1238, 1243, 1250, 1257, 1264, 1274, 1281, 1288, 1295, 1302, 1309, 1315, 1322, 1329, 1335, 1342, 1348, 1355, 1362, 1369, 1376, 1385, 1397, 1404, 1417, 1424, 1431, 1437, 1444, 1451, 1458, 1464, 1471, 1478, 1484, 1491, 1498, 1504, 1511, 1515, 1522, 1534, 1547, 1552, 1564, 1577, 1584, 1590, 1597, 1604, 1611, 1618, 1625, 1632, 1639, 1646, 1653, 1660, 1665, 1675, 1683, 1693, 1701, 1705, 1716, 1719, 1731, 1736, 1747, 1756, 1772, 1780, and 1789; (ii) a CDR2 having an amino acid sequence that is at least 65%, at least 70%, at least 75%, at least 80%, at least 85%, at least 90%, at least 95%, at least 99%, or 100% identical to any one of SEQ ID NOs: 1100, 1107, 1114, 1118, 1124, 1131, 1138, 1145, 1152, 1159, 1166, 1178, 1185, 1192, 1204, 1216, 1225, 1232, 1239, 1244, 1251, 1258, 1275, 1282, 1289, 1296, 1303, 1310, 1316, 1323, 1330, 1336, 1343, 1349, 1356, 1363, 1370, 1377, 1386, 1391, 1398, 1405, 1411, 1418, 1425, 1432, 1438, 1445, 1452, 1465, 1472, 1479, 1485, 1492, 1499, 1505, 1516, 1523, 1528, 1535, 1541, 1548, 1553, 1559, 1565, 1571, 1578, 1585, 1591, 1598, 1605, 1612, 1619, 1626, 1633, 1640, 1647, 1654, 1666, 1676, 1684, 1687, 1694, 1702, 1706, 1712, 1717, 1720, 1725, 1732, 1737, 1741, 1748, 1757, 1767, 1773, 1781, and 1790; and (iii) a CDR3 having an amino acid sequence that is at least 65%, at least 70%, at least 75%, at least 80%, at least 85%, at least 90%, at least 95%, at least 99%, or 100% identical to any one of SEQ ID NOs: 1101, 1108, 1115, 1125, 1132, 1139, 1146, 1153, 1160, 1167, 1172, 1179, 1186, 1193, 1197, 1205, 1209, 1217, 1226, 1233, 1240, 1245, 1252, 1259, 1269, 1276, 1283, 1290, 1297, 1304, 1311, 1317, 1324, 1331, 1337, 1344, 1350, 1357, 1364, 1371, 1378, 1387, 1392, 1399, 1406, 1412, 1419, 1426, 1433, 1439, 1446, 1453, 1459, 1466, 1473, 1480, 1486, 1493, 1500, 1506, 1517, 1524, 1529, 1536, 1542, 1549, 1554, 1560, 1566, 1572, 1579, 1586, 1592, 1599, 1606, 1613, 1620, 1627, 1634, 1641, 1648, 1655, 1661, 1667, 1670, 1677, 1685, 1688, 1695, 1703, 1707, 1713, 1733, 1749, 1758, 1762, 1774, 1782, 1791, and 1975.

[7530] In some aspects, the VH2 comprises (i) a complementarity determining region (CDR) 1 having an amino acid sequence that is at least 65%, at least 70%, at least 75%, at least 80%, at least 85%, at least 90%, at least 95%, at least 99%, or 100% identical to any one of SEQ ID NOs: 1099, 1106, 1113, 1117, 1123, 1130, 1137, 1144, 1151, 1158, 1165, 1177, 1184, 1191, 1203, 1215, 1224, 1231, 1238, 1243, 1250, 1257, 1264, 1274, 1281, 1288, 1295, 1302, 1309, 1315, 1322, 1329, 1335, 1342, 1348, 1355, 1362, 1369, 1376, 1385, 1397, 1404, 1417, 1424, 1431, 1437, 1444, 1451, 1458, 1464, 1471, 1478, 1484, 1491, 1498, 1504, 1511, 1515, 1522, 1534, 1547, 1552, 1564, 1577, 1584, 1590, 1597, 1604, 1611, 1618, 1625, 1632, 1639, 1646, 1653, 1660, 1665, 1675, 1683, 1693, 1701, 1705, 1716, 1719, 1731, 1736, 1747, 1756, 1772, 1780, and 1789; (ii) a CDR2 having an amino acid sequence that is at least 65%, at least 70%, at least 75%, at least 80%, at least 85%, at least 90%, at least 95%, at least 99%, or 100% identical to any one of SEQ ID NOs: 1100, 1107, 1114, 1118, 1124, 1131, 1138, 1145, 1152, 1159, 1166, 1178, 1185, 1192, 1204, 1216, 1225, 1232, 1239, 1244, 1251, 1258, 1275, 1282, 1289, 1296, 1303, 1310, 1316, 1323, 1330, 1336, 1343, 1349, 1356, 1363, 1370, 1377, 1386, 1391, 1398, 1405, 1411, 1418, 1425, 1432, 1438, 1445, 1452, 1465, 1472, 1479, 1485, 1492, 1499, 1505, 1516, 1523, 1528, 1535, 1541, 1548, 1553, 1559, 1565, 1571, 1578, 1585, 1591, 1598, 1605, 1612, 1619, 1626, 1633, 1640, 1647, 1654, 1666, 1676, 1684, 1687, 1694, 1702, 1706, 1712, 1717, 1720, 1725, 1732, 1737, 1741, 1748, 1757, 1767, 1773, 1781, and 1790; and (iii) a CDR3 having an amino acid sequence that is at least 65%, at least 70%, at least 75%, at least 80%, at least 85%, at least 90%, at least 95%, at least 99%, or 100% identical to any one of SEQ ID NOs: 1101, 1108, 1115, 1125, 1132, 1139, 1146, 1153, 1160, 1167, 1172, 1179, 1186, 1193, 1197, 1205, 1209, 1217, 1226, 1233, 1240, 1245, 1252, 1259, 1269, 1276, 1283, 1290, 1297, 1304, 1311, 1317, 1324, 1331, 1337, 1344, 1350, 1357, 1364, 1371, 1378, 1387, 1392, 1399, 1406, 1412, 1419, 1426, 1433, 1439, 1446, 1453, 1459, 1466, 1473, 1480, 1486, 1493, 1500, 1506, 1517, 1524, 1529, 1536, 1542, 1549, 1554, 1560, 1566, 1572, 1579, 1586, 1592, 1599, 1606, 1613, 1620, 1627, 1634, 1641, 1648, 1655, 1661, 1667, 1670, 1677, 1685, 1688, 1695, 1703, 1707, 1713, 1733, 1749, 1758, 1762, 1774, 1782, 1791, and 1975.

[7531] In some aspects, the VL1 comprises an amino acid sequence that is at least 65%, at least 70%, at least 75%, at least 80%, at least 85%, at least 90%, at least 95%, at least 99%, or 100% identical to any one of SEQ ID NOs: 1098, 1105, 1112, 1122, 1129, 1136, 1143, 1150, 1157, 1164, 1171, 1176, 1183, 1190, 1196, 1202, 1208, 1214, 1219, 1223, 1230, 1237, 1242, 1249, 1256, 1263, 1268, 1273, 1280, 1287, 1294, 1301, 1308, 1314, 1321, 1328, 1334, 1341, 1347, 1354, 1361, 1368, 1375, 1380, 1384, 1390, 1396, 1403, 1410, 1416, 1423, 1430, 1436, 1443, 1450, 1457, 1463, 1470, 1477, 1483, 1490, 1497, 1503, 1510, 1514, 1521, 1527, 1533, 1540, 1546, 1551, 1558, 1563, 1570, 1576, 1583, 1589, 1596, 1603, 1610, 1617, 1624, 1631, 1638, 1645, 1652, 1659, 1664, 1669, 1674, 1682, 1692, 1700, 1711, 1721, 1724, 1730, 1740, 1746, 1755, 1764, 1766, 1771, 1779, 1784, and 1788.

[7532] In some aspects, the VL2 comprises an amino acid sequence that is at least 65%, at least 70%, at least 75%, at least 80%, at least 85%, at least 90%, at least 95%, at least 99%, or 100% identical to any one of SEQ ID NOs: 1098, 1105, 1112, 1122, 1129, 1136, 1143, 1150, 1157, 1164, 1171, 1176, 1183, 1190, 1196, 1202, 1208, 1214, 1219, 1223, 1230, 1237, 1242, 1249, 1256, 1263, 1268, 1273, 1280, 1287, 1294, 1301, 1308, 1314, 1321, 1328, 1334, 1341, 1347, 1354, 1361, 1368, 1375, 1380, 1384, 1390, 1396, 1403, 1410, 1416, 1423, 1430, 1436, 1443, 1450, 1457, 1463, 1470, 1477, 1483, 1490, 1497, 1503, 1510, 1514, 1521, 1527, 1533, 1540, 1546, 1551, 1558, 1563, 1570, 1576, 1583, 1589, 1596, 1603, 1610, 1617, 1624, 1631, 1638, 1645, 1652, 1659, 1664, 1669, 1674, 1682, 1692, 1700, 1711, 1721, 1724, 1730, 1740, 1746, 1755, 1764, 1766, 1771, 1779, 1784, and 1788.

[7533] In some aspects, the VH1 comprises an amino acid sequence that is at least 65%, at least 70%, at least 75%, at least 80%, at least 85%, at least 90%, at least 95%, at least 99%, or 100% identical to any one of SEQ ID NOs: 1102, 1109, 1116, 1119, 1126, 1133, 1140, 1147, 1154, 1161, 1168, 1173, 1180, 1187, 1194, 1198, 1206, 1210, 1218, 1220, 1227, 1234, 1241, 1246, 1253, 1260, 1265, 1270, 1277, 1284, 1291, 1298, 1305, 1312, 1318, 1325, 1332, 1338, 1345, 1351, 1358, 1365, 1372, 1379, 1381, 1388, 1393, 1400, 1407, 1413, 1420, 1427, 1434, 1440, 1447, 1454, 1460, 1467, 1474, 1481, 1487, 1494, 1501, 1507, 1512, 1518, 1525, 1530, 1537, 1543, 1550, 1555, 1561, 1567, 1573, 1580, 1587, 1593, 1600, 1607, 1614, 1621, 1628, 1635, 1642, 1649, 1656, 1662, 1668, 1671, 1678, 1686, 1696, 1704, 1714, 1722, 1726, 1734, 1742, 1750, 1759, 1760, 1765, 1768, 1775, 1783, 1785, and 1792.

[7534] In some aspects, the VH2 comprises an amino acid sequence that is at least 65%, at least 70%, at least 75%, at least 80%, at least 85%, at least 90%, at least 95%, at least 99%, or 100% identical to any one of SEQ ID NOs: 1102, 1109, 1116, 1119, 1126, 1133, 1140, 1147, 1154, 1161, 1168, 1173, 1180, 1187, 1194, 1198, 1206, 1210, 1218, 1220, 1227, 1234, 1241, 1246, 1253, 1260, 1265, 1270, 1277, 1284, 1291, 1298, 1305, 1312, 1318, 1325, 1332, 1338, 1345, 1351, 1358, 1365, 1372, 1379, 1381, 1388, 1393, 1400, 1407, 1413, 1420, 1427, 1434, 1440, 1447, 1454, 1460, 1467, 1474, 1481, 1487, 1494, 1501, 1507, 1512, 1518, 1525, 1530, 1537, 1543, 1550, 1555, 1561, 1567, 1573, 1580, 1587, 1593, 1600, 1607, 1614, 1621, 1628, 1635, 1642, 1649, 1656, 1662, 1668, 1671, 1678, 1686, 1696, 1704, 1714, 1722, 1726, 1734, 1742, 1750, 1759, 1760, 1765, 1768, 1775, 1783, 1785, and 1792.

[7535] In some aspects, the infectious disease antigen that is not a sarbecovirus antigen is:
[7536] (i) a viral antigen elected from the group consisting of an influenza virus (A, B, C) antigen (e.g., influenza virus envelope proteins, for example, influenza virus neuraminidase (NA, N1, N2, N3, N4, N5, N6, N7, N8, N9, N10, N11), influenza virus hemagglutinin (H1, H2, H3, H4, H5, H6, H7, H8, H9, H10, H11, H12, H13, H14, H15, H16, H17, H18) (e.g., H1N1, H3N2, H5N1, H7N9, H9N2), Yamagata virus antigen, Victoria virus antigen, influenza virus structural proteins (e.g., M1, M2, capsid protein), influenza virus functional proteins (e.g., ribonucleoprotein (NP), primary interferon antagonist (NS1), nuclear export protein (NEP)) influenza virus accessory proteins (e.g., PB2, PB1, or PA), for example, anti-HA, anti-NA, anti-H1, anti-H3, anti-H5, anti-H7, anti-H9, anti-N1, anti-N2, anti-N9, anti-H1N1, anti-H3N2, anti-H5N1, anti-H7N9, anti-H9N2, anti-A protein, anti-B protein, anti-stem, anti-M1, anti-M2, anti-capsid, anti-NP, anti-NS1, anti-NEP, anti-PB1, anti-PB2, and anti-PA); a swine influenza virus antigen (e.g., swine flu hemagglutinin, swine flu neuraminidase); a classical swine fever (CSF) (hog colera) virus antigen; an equine influenza virus antigen (e.g., equine influenza virus typeA/Miami 63 neuraminidase, equine influenza virus type A/Kentucky 81 neuraminidase, equine influenza virus type A/Alaska 91 neuraminidase); parainfluenza viruses (e.g., bovine parainfluenza virus, bovine parainfluenza virus type 3 fusion protein, bovine parainfluenza virus type 3 hemagglutinin neuraminidase); a (human) respiratory syncytial virus (RSV)-viral antigen (e.g., RSV F glycoprotein, RSV G glycoprotein. F protein of respiratory syncytial virus, RSV fusion glycoprotein); a herpes simplex virus (HSV) antigen (e.g., herpes simplex virus glycoproteins gB, gC, gD, and gE, herpes simplex virus type 2 glycoprotein gB); a Dengue virus antigen (e.g., core protein, matrix protein, glycoprotein E of Dengue virus, or other protein of Dengue virus); a measles virus antigen (e.g., hemagglutinin); a poliovirus 1 antigen (e.g., poliovirus 1 proteins (VP1)), a HIV-1 antigen and HIV-2 antigen (e.g., HIV envelope proteins (e.g., envelope glycoproteins of HIV 1, HIV envelope glycoprotein (Env), HIV envelope glycoprotein gp160, HIV envelope surface glycoprotein gp120, HIV transmembrane envelope protein gp41), HIV structural proteins (e.g., p17, p24, p7, p55), HIV functional proteins (e.g., p66, HIV-1 protease (PR), p31), HIV accessory proteins (e.g., Nef, Tat, Rev, Vif, Vpr, Vpu)); a hepatitis virus (HAV, HBV, HCV, HDV, HEV) antigen (e.g., hepatitis B virus antigen (e.g., surface antigen, core protein), hepatitis C virus antigen (e.g., glycoprotein E1E2)); a rabies virus (Rabies lyssavirus) antigen (e.g., rabies virus glycoprotein, e.g., G glycoprotein); a pseudorabies virus antigen (e.g., pseudorabies virus g50) (gpD), pseudorabies virus II (gpB), pseudorabies virus III (gpC), pseudorabies virus glycoprotein H, pseudorabies virus glycoprotein E); a papillomavirus (HPV) antigen; an Epstein-Barr virus (EBV) (Gamma herpes virus 4) antigen; a Herpes simplex virus (HSV, HSV-1, HSV-2) antigen (e.g., human herpes virus 8, equine herpes virus antigen (e.g., type 1 glycoprotein B, type 1 glycoprotein D)); a Herpes zoster antigen; a Cytomegalovirus antigen (e.g., cytomegalovirus glycoprotein B); a Zika virus antigen; a Transmissible gastroenteritis virus (TGEV) antigen (e.g., glycoprotein 195, matrix protein); a rotavirus antigen (e.g., swine rotavirus glycoprotein 38); a parvovirus antigen (e.g., swine parvovirus capsid protein); a filoviruses (e.g., Marburg and Ebola) antigen; a bovine viral diarrhea virus antigen (e.g., glycoprotein 55); a Newcastle disease virus antigen (hemagglutinin, neuraminidase); an orthopoxvirus antigen; a coxsackievirus antigen and aphthovirus (foot and mouth disease virus) antigen; a yellow fever virus antigen; a Chikunga virus antigen; a Nipah virus antigen; an African swine fever virus antigen; a rhinotracheitis virus antigen (e.g., infectious bovine rhinotracheitis virus glycoprotein E, glycoprotein G); a laryngotracheitis virus antigen (e.g., infectious laryngotracheitis virus glycoprotein G or glycoprotein I); a La Crosse virus antigen (e.g., La Crosse virus glycoprotein); a neonatal calf diarrhoea virus antigen; a Venezuelan equine encephalomyelitis virus antigen; a punta toro virus antigen; a murine leukemia virus antigen; a mouse mammary tumor virus antigen; a bovine respiratory syncytial virus antigen (e.g., bovine respiratory syncytial virus attachment protein (BRSV G), bovine respiratory syncytial virus fusion protein (BRSV F), bovine respiratory syncytial virus nucleocapsid protein (BRSVN)); a bovine E viral diarrhoea virus antigen (e.g., glycoprotein 48 and glycoprotein 53); a metapneumovirus (HMPV) antigen; and an Ebola virus antigen (e.g., ebolavirus glycoprotein, e.g., Zaire ebolavirus glycoprotein); or
[7537] (ii) a bacterial or parasite antigen selected from the group consisting of a Plasmodium (e.g., Plasmodium falciparum, Plasmodium vivax, Plasmodium malariae, Plasmodium ovale, Plasmodium knowlesi) antigen, a Streptococcus (e.g., Streptococcus pneumoniae, Streptococcus pyogenes, Streptococcus agalactiae, Streptococcus mutans, Streptococcus viridans, Streptococcus anginosus, Streptococcus intermedius, Streptococcus constellatus) antigen (e.g., 24M epitope), a Neisseria gonorrhoeae antigen (e.g., gonococcal pilin), a Corynebacterium antigen (e.g., Corynebacterium diphtheria (diptheria toxin), Corynebacterium ulcerans, Corynebacterium pseudotuberculosis), Mycobacterium tuberculosis antigens. Brachyspira hyodysenteriae (Serpulina hydodysenteriae) antigen (e.g., Serpulina hydodysenteriae protective antigen), a Chlamydia antigen (e.g., Chlamydia trachomatis) (e.g., MOMP and PorB), a Mycoplasma sp. (e.g., Mycoplasma genitalium, Mycoplasma hyopneumoniae, Mycoplasma pneumonia) antigen, a Staphylococcus (e.g., Staphylococcus aureus, coagulase-negative staphylococci (CoNS), Staphylococcus aureus alpha toxin, Staphylococcus aureus bi-component leucocidin) antigen, a Klebsiella sp. antigen, an Escherichia coli antigen (e.g., E. coli shiga toxin type-2. E. coli shiga toxin type-1), a Bacillus sp. (e.g., Bacillus anthracis, e.g., Bacillus anthracis anthrax) antigen, a Pseudomonas aeruginosa antigen (e.g., Pseudomonas aeruginosa type III secretion system), an Enterococcus sp. antigen, an Enterobacter sp. antigen, a Proteus sp. antigen, an Actinobacter sp. antigen, a Mycobacterium avium (Mycobacterium avium complex (MAC)) antigen, a Salmonella bacteria antigen, a Clostridium difficile antigen, a Toxoplasma (e.g., Toxoplasma gondii) antigen, a Histoplasma antigen, a Candida antigen, a Coccidioides antigen, a Cryptococcus antigen, a Cryptosporidium antigen, and a Cystoisospora (e.g., Cystoisospora belli) antigen, and another antigen (e.g., endotoxins, lymphotoxins (e.g., lymphotoxin alpha LTA), phosphatidylserine. Hsp90, CCR5, lipoteichoic acid, clumping factor A).

[7538] In some aspects, the VL1 comprises a light chain complementarity determining region 1 (LCDR1), LCDR2, and/or LCDR3 of an antibody selected from the group consisting of libivirumab, rmab, rivabazumab pegol, setoxaximab, suvizumab, suvratoxumab, sevirumab, pritoxaximab, porgaviximab, REGN-EB3, obiltoxaximab, gedivumab, foravirumab, larcaviximab, motavizumab, palivizumab, rafivirumab, regavirumab, tuvirumab, cosfroviximab, felvizumab, atidortoxumab, edobacomab, nebacumab, pateclizumab, raxibacumab, urtoxazumab, tosatoxumab, berlimatoxumab, CR6261, diridavumab, firivumab, lesofavumab, navivumab, exbivirumab, lenvervimab, bavituximab, bezlotoxumab, efungumab, leronlimab, nirsevimab, pagibaximab, panobacumab, tefibazumab, ansuvimab, atoltivimab, maftivimab, and odesivimab.

[7539] In some aspects, the VL2 comprises a light chain complementarity determining region 1 (LCDR1), LCDR2, and/or LCDR3 of an antibody selected from the group consisting of libivirumab, rmab, rivabazumab pegol, setoxaximab, suvizumab, suvratoxumab, sevirumab, pritoxaximab, porgaviximab, REGN-EB3, obiltoxaximab, gedivumab, foravirumab, larcaviximab, motavizumab, palivizumab, rafivirumab, regavirumab, tuvirumab, cosfroviximab, felvizumab, atidortoxumab, edobacomab, nebacumab, pateclizumab, raxibacumab, urtoxazumab, tosatoxumab, berlimatoxumab, CR6261, diridavumab, firivumab, lesofavumab, navivumab, exbivirumab, lenvervimab, bavituximab, bezlotoxumab, efungumab, leronlimab, nirsevimab, pagibaximab, panobacumab, tefibazumab, ansuvimab, atoltivimab, maftivimab, and odesivimab.

[7540] In some aspects, the VH1 comprises a heavy chain complementarity determining region 1 (HCDR1), HCDR2, and/or HCDR3 of an antibody selected from the group consisting of libivirumab, rmab, rivabazumab pegol, setoxaximab, suvizumab, suvratoxumab, sevirumab, pritoxaximab, porgaviximab, REGN-EB3, obiltoxaximab, gedivumab, foravirumab, larcaviximab, motavizumab, palivizumab, rafivirumab, regavirumab, tuvirumab, cosfroviximab, felvizumab, atidortoxumab, edobacomab, nebacumab, pateclizumab, raxibacumab, urtoxazumab, tosatoxumab, berlimatoxumab, CR6261, diridavumab, firivumab, lesofavumab, navivumab, exbivirumab, lenvervimab, bavituximab, bezlotoxumab, efungumab, leronlimab, nirsevimab, pagibaximab, panobacumab, tefibazumab, ansuvimab, atoltivimab, maftivimab, and odesivimab.

[7541] In some aspects, the VH2 comprises a heavy chain complementarity determining region 1 (HCDR1), HCDR2, and/or HCDR3 of an antibody selected from the group consisting of libivirumab, rmab, rivabazumab pegol, setoxaximab, suvizumab, suvratoxumab, sevirumab, pritoxaximab, porgaviximab, REGN-EB3, obiltoxaximab, gedivumab, foravirumab, larcaviximab, motavizumab, palivizumab, rafivirumab, regavirumab, tuvirumab, cosfroviximab, felvizumab, atidortoxumab, edobacomab, nebacumab, pateclizumab, raxibacumab, urtoxazumab, tosatoxumab, berlimatoxumab, CR6261, diridavumab, firivumab, lesofavumab, navivumab, exbivirumab, lenvervimab, bavituximab, bezlotoxumab, efungumab, leronlimab, nirsevimab, pagibaximab, panobacumab, tefibazumab, ansuvimab, atoltivimab, maftivimab, and odesivimab.

[7542] In some aspects, the VL1 comprises a VL of an antibody selected from the group consisting of libivirumab, rmab, rivabazumab pegol, setoxaximab, suvizumab, suvratoxumab, sevirumab, pritoxaximab, porgaviximab, REGN-EB3, obiltoxaximab, gedivumab, foravirumab, larcaviximab, motavizumab, palivizumab, rafivirumab, regavirumab, tuvirumab, cosfroviximab, felvizumab, atidortoxumab, edobacomab, nebacumab, pateclizumab, raxibacumab, urtoxazumab, tosatoxumab, berlimatoxumab, CR6261, diridavumab, firivumab, lesofavumab, navivumab, exbivirumab, lenvervimab, bavituximab, bezlotoxumab, efungumab, leronlimab, nirsevimab, pagibaximab, panobacumab, tefibazumab, ansuvimab, atoltivimab, maftivimab, and odesivimab.

[7543] In some aspects, the VL2 comprises a VL of an antibody selected from the group consisting of libivirumab, rmab, rivabazumab pegol, setoxaximab, suvizumab, suvratoxumab, sevirumab, pritoxaximab, porgaviximab, REGN-EB3, obiltoxaximab, gedivumab, foravirumab, larcaviximab, motavizumab, palivizumab, rafivirumab, regavirumab, tuvirumab, cosfroviximab, felvizumab, atidortoxumab, edobacomab, nebacumab, pateclizumab, raxibacumab, urtoxazumab, tosatoxumab, berlimatoxumab, CR6261, diridavumab, firivumab, lesofavumab, navivumab, exbivirumab, lenvervimab, bavituximab, bezlotoxumab, efungumab, leronlimab, nirsevimab, pagibaximab, panobacumab, tefibazumab, ansuvimab, atoltivimab, maftivimab, and odesivimab.

[7544] In some aspects, the VH1 comprises a VH of an antibody selected from the group consisting of libivirumab, rmab, rivabazumab pegol, setoxaximab, suvizumab, suvratoxumab, sevirumab, pritoxaximab, porgaviximab, REGN-EB3, obiltoxaximab, gedivumab, foravirumab, larcaviximab, motavizumab, palivizumab, rafivirumab, regavirumab, tuvirumab, cosfroviximab, felvizumab, atidortoxumab, edobacomab, nebacumab, pateclizumab, raxibacumab, urtoxazumab, tosatoxumab, berlimatoxumab, CR6261, diridavumab, firivumab, lesofavumab, navivumab, exbivirumab, lenvervimab, bavituximab, bezlotoxumab, efungumab, leronlimab, nirsevimab, pagibaximab, panobacumab, tefibazumab, ansuvimab, atoltivimab, maftivimab, and odesivimab.

[7545] In some aspects, the VH2 comprises a VH of an antibody selected from the group consisting of libivirumab, rmab, rivabazumab pegol, setoxaximab, suvizumab, suvratoxumab, sevirumab, pritoxaximab, porgaviximab, REGN-EB3, obiltoxaximab, gedivumab, foravirumab, larcaviximab, motavizumab, palivizumab, rafivirumab, regavirumab, tuvirumab, cosfroviximab, felvizumab, atidortoxumab, edobacomab, nebacumab, pateclizumab, raxibacumab, urtoxazumab, tosatoxumab, berlimatoxumab, CR6261, diridavumab, firivumab, lesofavumab, navivumab, exbivirumab, lenvervimab, bavituximab, bezlotoxumab, efungumab, leronlimab, nirsevimab, pagibaximab, panobacumab, tefibazumab, ansuvimab, atoltivimab, maftivimab, and odesivimab.

[7546] In some aspects, the VL1 comprises (i) a complementarity determining region (CDR) 1 having an amino acid sequence that is at least 65%, at least 70%, at least 75%, at least 80%, at least 85%, at least 90%, at least 95%, at least 99%, or 100% identical to any one of SEQ ID NOs: 1428, 1793, 1798, 1810, 1817, 1824, 1977, 1985, 1993 and 2001; (ii) a CDR2 having an amino acid sequence that is at least 65%, at least 70%, at least 75%, at least 80%, at least 85%, at least 90%, at least 95%, at least 99%, or 100% identical to any one of SEQ ID NOs: 1978, 1986, 1994, and 2002; or at least 65%, at least 70%, at least 75%, at least 80%, at least 85%, at least 90%, at least 95%, at least 99%, or 100% identical to any one of amino acid sequences YTS, DTS, GAS, and AAS; and (iii) a CDR3 having an amino acid sequence that is at least 65%, at least 70%, at least 75%, at least 80%, at least 85%, at least 90%, at least 95%, at least 99%, or 100% identical to any one of SEQ ID NOs: 1229, 1799, 1805, 1811, 1818, 1825, 1979, 1987, 1995, and 2003.

[7547] In some aspects, the VL2 comprises (i) a complementarity determining region (CDR) 1 having an amino acid sequence that is at least 65%, at least 70%, at least 75%, at least 80%, at least 85%, at least 90%, at least 95%, at least 99%, or 100% identical to any one of SEQ ID NOs: 1428, 1793, 1798, 1810, 1817, 1824, 1977, 1985, 1993 and 2001; (ii) a CDR2 having an amino acid sequence that is at least 65%, at least 70%, at least 75%, at least 80%, at least 85%, at least 90%, at least 95%, at least 99%, or 100% identical to any one of SEQ ID NOs: 1978, 1986, 1994, and 2002; or at least 65%, at least 70%, at least 75%, at least 80%, at least 85%, at least 90%, at least 95%, at least 99%, or 100% identical to any one of amino acid sequences YTS, DTS, GAS, and AAS; and (iii) a CDR3 having an amino acid sequence that is at least 65%, at least 70%, at least 75%, at least 80%, at least 85%, at least 90%, at least 95%, at least 99%, or 100% identical to any one of SEQ ID NOs: 1229, 1799, 1805, 1811, 1818, 1825, 1979, 1987, 1995, and 2003.

[7548] In some aspects, the VH1 comprises (i) a complementarity determining region (CDR) 1 having an amino acid sequence that is at least 65%, at least 70%, at least 75%, at least 80%, at least 85%, at least 90%, at least 95%, at least 99%, or 100% identical to any one of SEQ ID NOs: 1577, 1795, 1801, 1813, 1820, 1827, 1981, 1989, 1997, and 2005; (ii) a CDR2 having an amino acid sequence that is at least 65%, at least 70%, at least 75%, at least 80%, at least 85%, at least 90%, at least 95%, at least 99%, or 100% identical to any one of SEQ ID NOs: 1159, 1802, 1807, 1814, 1821, 1828, 1982, 1990, 1998, and 2006; and (iii) a CDR3 having an amino acid sequence that is at least 65%, at least 70%, at least 75%, at least 80%, at least 85%, at least 90%, at least 95%, at least 99%, or 100% identical to any one of SEQ ID NOs: 1796, 1803, 1808, 1815, 1822, 1829, 1983, 1991, 1999, and 2007.

[7549] In some aspects, the VH2 comprises (i) a complementarity determining region (CDR) 1 having an amino acid sequence that is at least 65%, at least 70%, at least 75%, at least 80%, at least 85%, at least 90%, at least 95%, at least 99%, or 100% identical to any one of SEQ ID NOs: 1577, 1795, 1801, 1813, 1820, 1827, 1981, 1989, 1997, and 2005; (ii) a CDR2 having an amino acid sequence that is at least 65%, at least 70%, at least 75%, at least 80%, at least 85%, at least 90%, at least 95%, at least 99%, or 100% identical to any one of SEQ ID NOs: 1159, 1802, 1807, 1814, 1821, 1828, 1982, 1990, 1998, and 2006; and (iii) a CDR3 having an amino acid sequence that is at least 65%, at least 70%, at least 75%, at least 80%, at least 85%, at least 90%, at least 95%, at least 99%, or 100% identical to any one of SEQ ID NOs: 1796, 1803, 1808, 1815, 1822, 1829, 1983, 1991, 1999, and 2007.

[7550] In some aspects, the VL1 comprises an amino acid sequence that is at least 65%, at least 70%, at least 75%, at least 80%, at least 85%, at least 90%, at least 95%, at least 99%, or 100% identical to any one of SEQ ID NOs: 1794, 1800, 1806, 1812, 1819, 1826, 1980, 1988, 1996, and 2004.

[7551] In some aspects, the VL2 comprises an amino acid sequence that is at least 65%, at least 70%, at least 75%, at least 80%, at least 85%, at least 90%, at least 95%, at least 99%, or 100% identical to any one of SEQ ID NOs: 1794, 1800, 1806, 1812, 1819, 1826, 1980, 1988, 1996, and 2004.

[7552] In some aspects, the VH1 comprises an amino acid sequence that is at least 65%, at least 70%, at least 75%, at least 80%, at least 85%, at least 90%, at least 95%, at least 99%, or 100% identical to any one of SEQ ID NOs 1797, 1804, 1809, 1816, 1823, 1830, 1984, 1992, 2000, and 2008.

[7553] In some aspects, the VH2 comprises an amino acid sequence that is at least 65%, at least 70%, at least 75%, at least 80%, at least 85%, at least 90%, at least 95%, at least 99%, or 100% identical to any one of SEQ ID NOs 1797, 1804, 1809, 1816, 1823, 1830, 1984, 1992, 2000, and 2008.

[7554] In some aspects, the other-pathology antigen is selected from the group consisting of Amyloid beta, β-amyloid, PCSK9, IFN-α/β receptor, Rhesus factor, nerve growth factor (NGF), DPP4, fibrin II beta chain, ACVR2B, scrum amyloid A protein SOST, FGF 23, VWF, tissue factor pathway inhibitor (TFPI), 1-40 and 1-42, selectin P, glucagon receptor (GCGR), amyloid P component, GDF-8, CXCL10 IP-10, repulsive guidance molecule A RGMA, IFN-γ, activated F9/F10, calcitonin gene-related peptide (CGRP), angiopoietin 3, IFN receptor, IFN-γ, calcitonin, β-amyloid 1-40 and 1-42, tau protein, dabigatran, cardiac myosin, selectin P, Complement factor D (CFD), kallikrein, GDF-8, IGHE, tissue factor pathway inhibitor (TFPI), GMCSF receptor α-chain, amyloid, IgE Fc region, MASP-2, oxLDL, GMCSF, NOGO-A, Alpha-synuclein, NGF, myelin-associated glycoprotein, RHD (gene) (RHD), sclerostin, FCGRT, sclerostin SOST, mucosal addressin cell adhesion molecule, myostatin, RSVFR, complement component 1s C1s, C5, and IL31.

[7555] In some aspects, the VL1 comprises a light chain complementarity determining region 1 (LCDR1), LCDR2, and/or LCDR3 of an antibody selected from the group consisting of aducanumab, alirocumab, frovocimab, lodelcizumab, bococizumab, evolocumab, ralpancizumab, anifrolumab, atorolimumab, bapineuzumab, bedinvetmab, begelomab, biciromab, bimagrumab, birtamimab, blosozumab, burosumab, caplacizumab, concizumab, crenezumab, crizanlizumab, crotedumab, dezamizumab, domagrozumab, donanemab, eldelumab, elezanumab, emapalumab, emicizumab, eptinezumab, erenumab, evinacumab, faralimomab, fasinumab, fontolizumab, fremanezumab, frunevetmab, fulranumab, galcanezumab, gantenerumab, gosuranemab, idarucizumab, imciromab, inclacumab, lampalizumab, lanadelumab, landogrozumab, lecanemab, ligelizumab, marstacimab, mavrilimumab, morolimumab, NEOD001, omalizumab, oMS721, orticumab, otilimab, ozanezumab, ponezumab, prasinezumab, quilizumab, ranevetmab, refanezumab, roledumab, romosozumab, rozanolixizumab, setrusumab, SHP647, solanezumab, stamulumab, suptavumab, sutimlimab, tanezumab, crovalimab, and lokivetmab.

[7556] In some aspects, the VL2 comprises a light chain complementarity determining region 1 (LCDR1), LCDR2, and/or LCDR3 of an antibody selected from the group consisting of aducanumab, alirocumab, frovocimab, lodelcizumab, bococizumab, evolocumab, ralpancizumab, anifrolumab, atorolimumab, bapineuzumab, bedinvetmab, begelomab, biciromab, bimagrumab, birtamimab, blosozumab, burosumab, caplacizumab, concizumab, crenezumab, crizanlizumab, crotedumab, dezamizumab, domagrozumab, donanemab, eldelumab, elezanumab, emapalumab, emicizumab, eptinezumab, erenumab, evinacumab, faralimomab, fasinumab, fontolizumab, fremanezumab, frunevetmab, fulranumab, galcanezumab, gantenerumab, gosuranemab, idarucizumab, imciromab, inclacumab, lampalizumab, lanadelumab, landogrozumab, lecanemab, ligelizumab, marstacimab, mavrilimumab, morolimumab, NEOD001, omalizumab, oMS721, orticumab, otilimab, ozanezumab, ponezumab, prasinezumab, quilizumab, ranevetmab, refanezumab, roledumab, romosozumab, rozanolixizumab, setrusumab, SHP647, solanezumab, stamulumab, suptavumab, sutimlimab, tanezumab, crovalimab, and lokivetmab.

[7557] In some aspects, the VH1 comprises a heavy chain complementarity determining region 1 (HCDR1), HCDR2, and/or HCDR3 of an antibody selected from the group consisting of aducanumab, alirocumab, frovocimab, lodelcizumab, bococizumab, evolocumab, ralpancizumab, anifrolumab, atorolimumab, bapineuzumab, bedinvetmab, begelomab, biciromab, bimagrumab, birtamimab, blosozumab, burosumab, caplacizumab, concizumab, crenezumab, crizanlizumab, crotedumab, dezamizumab, domagrozumab, donanemab, eldelumab, elezanumab, emapalumab, emicizumab, eptinezumab, erenumab, evinacumab, faralimomab, fasinumab, fontolizumab, fremanezumab, frunevetmab, fulranumab, galcanezumab, gantenerumab, gosuranemab, idarucizumab, imciromab, inclacumab, lampalizumab, lanadelumab, landogrozumab, lecanemab, ligelizumab, marstacimab, mavrilimumab, morolimumab, NEOD001, omalizumab, oMS721, orticumab, otilimab, ozanezumab, ponezumab, prasinezumab, quilizumab, ranevetmab, refanezumab, roledumab, romosozumab, rozanolixizumab, setrusumab, SHP647, solanezumab, stamulumab, suptavumab, sutimlimab, tanezumab, crovalimab, and lokivetmab.

[7558] In some aspects, the VH2 comprises a heavy chain complementarity determining region 1 (HCDR1), HCDR2, and/or HCDR3 of an antibody selected from the group consisting of aducanumab, alirocumab, frovocimab, lodelcizumab, bococizumab, evolocumab, ralpancizumab, anifrolumab, atorolimumab, bapineuzumab, bedinvetmab, begelomab, biciromab, bimagrumab, birtamimab, blosozumab, burosumab, caplacizumab, concizumab, crenezumab, crizanlizumab, crotedumab, dezamizumab, domagrozumab, donanemab, eldelumab, elezanumab, emapalumab, emicizumab, eptinezumab, erenumab, evinacumab, faralimomab, fasinumab, fontolizumab, fremanezumab, frunevetmab, fulranumab, galcanezumab, gantenerumab, gosuranemab, idarucizumab, imciromab, inclacumab, lampalizumab, lanadelumab, landogrozumab, lecanemab, ligelizumab, marstacimab, mavrilimumab, morolimumab, NEOD001, omalizumab, oMS721, orticumab, otilimab, ozanezumab, ponezumab, prasinezumab, quilizumab, ranevetmab, refanezumab, roledumab, romosozumab, rozanolixizumab, setrusumab, SHP647, solanezumab, stamulumab, suptavumab, sutimlimab, tanezumab, crovalimab, and lokivetmab.

[7559] In some aspects, the VL1 comprises a VL of an antibody selected from the group consisting of aducanumab, alirocumab, frovocimab, lodelcizumab, bococizumab, evolocumab, ralpancizumab, anifrolumab, atorolimumab, bapineuzumab, bedinvetmab, begelomab, biciromab, bimagrumab, birtamimab, blosozumab, burosumab, caplacizumab, concizumab, crenezumab, crizanlizumab, crotedumab, dezamizumab, domagrozumab, donanemab, eldelumab, elezanumab, emapalumab, emicizumab, eptinezumab, erenumab, evinacumab, faralimomab, fasinumab, fontolizumab, fremanezumab, frunevetmab, fulranumab, galcanezumab, gantenerumab, gosuranemab, idarucizumab, imciromab, inclacumab, lampalizumab, lanadelumab, landogrozumab, lecanemab, ligelizumab, marstacimab, mavrilimumab, morolimumab, NEOD001, omalizumab, oMS721, orticumab, otilimab, ozanezumab, ponezumab, prasinezumab, quilizumab, ranevetmab, refanezumab, roledumab, romosozumab, rozanolixizumab, setrusumab, SHP647, solanezumab, stamulumab, suptavumab, sutimlimab, tanezumab, crovalimab, and lokivetmab.

[7560] In some aspects, the VL2 comprises a VL of an antibody selected from the group consisting of aducanumab, alirocumab, frovocimab, lodelcizumab, bococizumab, evolocumab, ralpancizumab, anifrolumab, atorolimumab, bapineuzumab, bedinvetmab, begelomab, biciromab, bimagrumab, birtamimab, blosozumab, burosumab, caplacizumab, concizumab, crenezumab, crizanlizumab, crotedumab, dezamizumab, domagrozumab, donanemab, eldelumab, elezanumab, emapalumab, emicizumab, eptinezumab, erenumab, evinacumab, faralimomab, fasinumab, fontolizumab, fremanezumab, frunevetmab, fulranumab, galcanezumab, gantenerumab, gosuranemab, idarucizumab, imciromab, inclacumab, lampalizumab, lanadelumab, landogrozumab, lecanemab, ligelizumab, marstacimab, mavrilimumab, morolimumab, NEOD001, omalizumab, oMS721, orticumab, otilimab, ozanezumab, ponezumab, prasinezumab, quilizumab, ranevetmab, refanezumab, roledumab, romosozumab, rozanolixizumab, setrusumab, SHP647, solanezumab, stamulumab, suptavumab, sutimlimab, tanezumab, crovalimab, and lokivetmab.

[7561] In some aspects, the VH1 comprises a VH of an antibody selected from the group consisting of aducanumab, alirocumab, frovocimab, lodelcizumab, bococizumab, evolocumab, ralpancizumab, anifrolumab, atorolimumab, bapineuzumab, bedinvetmab, begelomab, biciromab, bimagrumab, birtamimab, blosozumab, burosumab, caplacizumab, concizumab, crenezumab, crizanlizumab, crotedumab, dezamizumab, domagrozumab, donanemab, eldelumab, elezanumab, emapalumab, emicizumab, eptinezumab, erenumab, evinacumab, faralimomab, fasinumab, fontolizumab, fremanezumab, frunevetmab, fulranumab, galcanezumab, gantenerumab, gosuranemab, idarucizumab, imciromab, inclacumab, lampalizumab, lanadelumab, landogrozumab, lecanemab, ligelizumab, marstacimab, mavrilimumab, morolimumab, NEOD001, omalizumab, oMS721, orticumab, otilimab, ozanezumab, ponezumab, prasinezumab, quilizumab, ranevetmab, refanezumab, roledumab, romosozumab, rozanolixizumab, setrusumab, SHP647, solanezumab, stamulumab, suptavumab, sutimlimab, tanezumab, crovalimab, and lokivetmab.

[7562] In some aspects, the VH2 comprises a VH of an antibody selected from the group consisting of aducanumab, alirocumab, frovocimab, lodelcizumab, bococizumab, evolocumab, ralpancizumab, anifrolumab, atorolimumab, bapineuzumab, bedinvetmab, begelomab, biciromab, bimagrumab, birtamimab, blosozumab, burosumab, caplacizumab, concizumab, crenezumab, crizanlizumab, crotedumab, dezamizumab, domagrozumab, donanemab, eldelumab, elezanumab, emapalumab, emicizumab, eptinezumab, erenumab, evinacumab, faralimomab, fasinumab, fontolizumab, fremanezumab, frunevetmab, fulranumab, galcanezumab, gantenerumab, gosuranemab, idarucizumab, imciromab, inclacumab, lampalizumab, lanadelumab, landogrozumab, lecanemab, ligelizumab, marstacimab, mavrilimumab, morolimumab, NEOD001, omalizumab, oMS721, orticumab, otilimab, ozanezumab, ponezumab, prasinezumab, quilizumab, ranevetmab, refanezumab, roledumab, romosozumab, rozanolixizumab, setrusumab, SHP647, solanezumab, stamulumab, suptavumab, sutimlimab, tanezumab, crovalimab, and lokivetmab.

[7563] In some aspects, the VL1 comprises (i) a complementarity determining region (CDR) 1 having an amino acid sequence that is at least 65%, at least 70%, at least 75%, at least 80%, at least 85%, at least 90%, at least 95%, at least 99%, or 100% identical to any one of SEQ ID NOs: 1120, 1228, 1359, 1519, 1831, 1838, 1845, 1852, 1859, 1866, 1872, 1878, 1885, 1891, 1898, 1905, 1911, 1917, 1924, 1931, 1938, 1945, and 1963; (ii) a CDR2 having an amino acid sequence that is at least 65%, at least 70%, at least 75%, at least 80%, at least 85%, at least 90%, at least 95%, at least 99%, or 100% identical to any one of amino acid sequences AAS, AVS, DAS, DNN, EDN, EVS, GAS, GNG, KAS, KVS, LVS, NTD, STS, WAS, and YTS; and (iii) a CDR3 having an amino acid sequence that is at least 65%, at least 70%, at least 75%, at least 80%, at least 85%, at least 90%, at least 95%, at least 99%, or 100% identical to any one of SEQ ID NOs: 1360, 1832, 1839, 1846, 1853, 1860, 1867, 1873, 1879, 1886, 1892, 1899, 1906, 1912, 1918, 1925, 1932, 1939, 1946, 1951, 1957, 1964, and 1970.

[7564] In some aspects, the VL2 comprises (i) a complementarity determining region (CDR) 1 having an amino acid sequence that is at least 65%, at least 70%, at least 75%, at least 80%, at least 85%, at least 90%, at least 95%, at least 99%, or 100% identical to any one of SEQ ID NOs: 1120, 1228, 1359, 1519, 1831, 1838, 1845, 1852, 1859, 1866, 1872, 1878, 1885, 1891, 1898, 1905, 1911, 1917, 1924, 1931, 1938, 1945, and 1963; (ii) a CDR2 having an amino acid sequence that is at least 65%, at least 70%, at least 75%, at least 80%, at least 85%, at least 90%, at least 95%, at least 99%, or 100% identical to any one of amino acid sequences AAS, AVS, DAS, DNN, EDN, EVS, GAS, GNG, KAS, KVS, LVS, NTD, STS, WAS, and YTS; and (iii) a CDR3 having an amino acid sequence that is at least 65%, at least 70%, at least 75%, at least 80%, at least 85%, at least 90%, at least 95%, at least 99%, or 100% identical to any one of SEQ ID NOs: 1360, 1832, 1839, 1846, 1853, 1860, 1867, 1873, 1879, 1886, 1892, 1899, 1906, 1912, 1918, 1925, 1932, 1939, 1946, 1951, 1957, 1964, and 1970.

[7565] In some aspects, the VH1 comprises (i) a complementarity determining region (CDR) 1 having an amino acid sequence that is at least 65%, at least 70%, at least 75%, at least 80%, at least 85%, at least 90%, at least 95%, at least 99%, or 100% identical to any one of SEQ ID NOs: 1309, 1362, 1437, 1552, 1618, 1639, 1834, 1841, 1848, 1855, 1862, 1881, 1894, 1901, 1920, 1927, 1934, 1941, 1953, 1959, and 1966; (ii) a CDR2 having an amino acid sequence that is at least 65%, at least 70%, at least 75%, at least 80%, at least 85%, at least 90%, at least 95%, at least 99%, or 100% identical to any one of SEQ ID NOs: 1363, 1835, 1842, 1849, 1856, 1863, 1869, 1875, 1882, 1888, 1895, 1902, 1908, 1914, 1921, 1928, 1935, 1942, 1948, 1954, 1960, 1967, and 1972; and (iii) a CDR3 having an amino acid sequence that is at least 65%, at least 70%, at least 75%, at least 80%, at least 85%, at least 90%, at least 95%, at least 99%, or 100% identical to any one of SEQ ID NOs: 1364, 1836, 1843, 1850, 1857, 1864, 1870, 1876, 1883, 1889, 1896, 1903, 1909, 1915, 1922, 1929, 1936, 1943, 1949, 1955, 1961, 1968, and 1973.

[7566] In some aspects, the VH2 comprises (i) a complementarity determining region (CDR) 1 having an amino acid sequence that is at least 65%, at least 70%, at least 75%, at least 80%, at least 85%, at least 90%, at least 95%, at least 99%, or 100% identical to any one of SEQ ID NOs: 1309, 1362, 1437, 1552, 1618, 1639, 1834, 1841, 1848, 1855, 1862, 1881, 1894, 1901, 1920, 1927, 1934, 1941, 1953, 1959, and 1966; (ii) a CDR2 having an amino acid sequence that is at least 65%, at least 70%, at least 75%, at least 80%, at least 85%, at least 90%, at least 95%, at least 99%, or 100% identical to any one of SEQ ID NOs: 1363, 1835, 1842, 1849, 1856, 1863, 1869, 1875, 1882, 1888, 1895, 1902, 1908, 1914, 1921, 1928, 1935, 1942, 1948, 1954, 1960, 1967, and 1972; and (iii) a CDR3 having an amino acid sequence that is at least 65%, at least 70%, at least 75%, at least 80%, at least 85%, at least 90%, at least 95%, at least 99%, or 100% identical to any one of SEQ ID NOs: 1364, 1836, 1843, 1850, 1857, 1864, 1870, 1876, 1883, 1889, 1896, 1903, 1909, 1915, 1922, 1929, 1936, 1943, 1949, 1955, 1961, 1968, and 1973.

[7567] In some aspects, the VL1 comprises an amino acid sequence that is at least 65%, at least 70%, at least 75%, at least 80%, at least 85%, at least 90%, at least 95%, at least 99%, or 100% identical to any one of SEQ ID NOs: 1361, 1833, 1840, 1847, 1854, 1861, 1868, 1874, 1880, 1887, 1893, 1900, 1907, 1913, 1919, 1926, 1933, 1940, 1947, 1952, 1958, 1965, and 1971.

[7568] In some aspects, the VL2 comprises an amino acid sequence that is at least 65%, at least 70%, at least 75%, at least 80%, at least 85%, at least 90%, at least 95%, at least 99%, or 100% identical to any one of SEQ ID NOs: 1361, 1833, 1840, 1847, 1854, 1861, 1868, 1874, 1880, 1887, 1893, 1900, 1907, 1913, 1919, 1926, 1933, 1940, 1947, 1952, 1958, 1965, and 1971.

[7569] In some aspects, the VH1 comprises an amino acid sequence that is at least 65%, at least 70%, at least 75%, at least 80%, at least 85%, at least 90%, at least 95%, at least 99%, or 100% identical to any one of SEQ ID NOs: 1365, 1837, 1844, 1851, 1858, 1865, 1871, 1877, 1884, 1890, 1897, 1904, 1910, 1916, 1923, 1930, 1937, 1944, 1950, 1956, 1962, 1969, and 1974.

[7570] In some aspects, the VH2 comprises an amino acid sequence that is at least 65%, at least 70%, at least 75%, at least 80%, at least 85%, at least 90%, at least 95%, at least 99%, or 100% identical to any one of SEQ ID NOs: 1365, 1837, 1844, 1851, 1858, 1865, 1871, 1877, 1884, 1890, 1897, 1904, 1910, 1916, 1923, 1930, 1937, 1944, 1950, 1956, 1962, 1969, and 1974.

[7571] In some aspects, one or both of the antigen binding polypeptides comprised in the antigen binding polypeptide complexes provided herein further comprise an Fc region. In some aspects, one or both of the antigen binding polypeptides comprised in the antigen binding polypeptide complexes provided herein further comprise an Fc region at the carboxy-terminus. In some aspects, the Fc region comprises an immunoglobulin heavy chain constant region 2 (CH2) and/or an immunoglobulin heavy chain constant region 3 (CH3). In some aspects, the Fc region further comprises an immunoglobulin hinge (i.e., a hinge region). In some aspects, the hinge region is interposed between a CH1 and a CH2 (i.e., a hinge region is localized between the carboxy terminal residue of a CH1 and the N-terminal residue of a CH2). In some aspects, the hinge region comprises an amino acid sequence at least 65%, at least 70%, at least 75%, at least 80%, at least 85%, at least 90%, at least 95%, at least 99%, or 100% identical to any one of SEQ ID NOs: 635, 636, 1072, 1073, or 1074. In some aspects, the Fc region comprises a CH2 and a CH3. In some aspects, the CH2 comprises an amino acid sequence that is at least 65%, at least 70%, at least 75%, at least 80%, at least 85%, at least 90%, at least 95%, at least 99%, or 100% identical to any one of SEQ ID NOs: 1075-1078. In some aspects, the CH3 comprises an amino acid sequence that is at least 65%, at least 70%, at least 75%, at least 80%, at least 85%, at least 90%, at least 95%, at least 99%, or 100% identical to any one of SEQ ID NOs: 1079-1085. In some aspects, the Fc region comprises an amino acid sequence that is at least 65%, at least 70%, at least 75%, at least 80%, at least 85%, at least 90%, at least 95%, at least 99%, or 100% identical to any one of SEQ ID NOs: 376-380.

[7572] In some aspects, the Fc region comprises one or more amino acid substitutions. In some aspects, the one or more amino acid substitutions comprise one or more half-life extension amino acid substitutions. In some aspects, the one or more half-life extension amino acid substitutions comprise one or more of amino acid substitutions M428L, N434A, N434S, L234F, L235E, P331S, M252Y, S254T, or T256E, or equivalent thereof, based on the EU numbering scheme. In some aspects, the one or more half-life extension amino acid substitutions comprise a LA (M428L and N434A, or equivalent thereof, based on the EU numbering scheme) amino acid substitution. In some aspects, the one or more half-life extension amino acid substitutions comprise a LS (M428L and N434S, or equivalent thereof, based on the EU numbering scheme) amino acid substitution. In some aspects, the one or more half-life extension amino acid substitutions comprise L234F and L235E, or equivalent thereof (based on the EU numbering scheme) amino acid substitutions. In some aspects, the one or more half-life extension amino acid substitutions comprise a TM (L234F, L235E, and P331S, or equivalent thereof, based on the EU numbering scheme) amino acid substitution. In some aspects, the one or more half-life extension amino acid substitutions comprise a YTE (M252Y, S254T, and T256E, or equivalent thereof, based on the EU numbering scheme) amino acid substitution.

[7573] In some aspects, the Fc region comprises at least one knob-into-hole modification. In some aspects, the antigen binding polypeptides complexes disclosed herein are IgG1 or IgG4 antibodies or antigen binding fragments thereof. In some aspects, the knob-into-hole modification comprises one or more of knob substitutions of S354C and T366W, or equivalent thereof, and/or one or more of hole substitutions of Y349C, T366S, L368A, Y407V, or equivalent thereof, or a combination thereof, based on the EU numbering scheme. In some aspects, the Fc region comprises a knob-into-hole modification comprising knob substitutions of S354C and T366W, or equivalent thereof, and/or hole substitutions of Y349C, T366S, L368A, and Y407V, or equivalent thereof, and/or a half-life extension amino acid substitution comprising: a LA (M428L and N434A, or equivalent thereof, based on the EU numbering scheme) amino acid substitution, a LS (M428L and N434S, or equivalent thereof, based on the EU numbering scheme) amino acid substitution. L234F and L235E, or equivalent thereof (based on the EU numbering scheme) amino acid substitutions, a TM (L234F, L235E, and P331S, or equivalent thereof, based on the EU numbering scheme) amino acid substitution, a YTE (M252Y, S254T, and T256E, or equivalent thereof, based on the EU numbering scheme) amino acid substitution, or any combination thereof.

[7574] In some aspects, the Fc region comprises knob substitutions of S354C and T366W, or equivalent thereof, and a half-life extension amino acid substitution comprising: a LA (M428L and N434A, or equivalent thereof, based on the EU numbering scheme) amino acid substitution, a LS (M428L and N434S, or equivalent thereof, based on the EU numbering scheme) amino acid substitution. L234F and L235E, or equivalent thereof (based on the EU numbering scheme) amino acid substitutions, a TM (L234F, L235E, and P331S, or equivalent thereof, based on the EU numbering scheme) amino acid substitution, a YTE (M252Y, S254T, and T256E, or equivalent thereof, based on the EU numbering scheme) amino acid substitution, or any combination thereof.

[7575] In some aspects, the Fc region comprises hole substitutions of Y349C, T366S, L368A, and Y407V, or equivalent thereof, and a half-life extension amino acid substitution comprising: a LA (M428L and N434A, or equivalent thereof, based on the EU numbering scheme) amino acid substitution, a LS (M428L and N434S, or equivalent thereof, based on the EU numbering scheme) amino acid substitution. L234F and L235E, or equivalent thereof (based on the EU numbering scheme) amino acid substitutions, a TM (L234F, L235E, and P331S, or equivalent thereof, based on the EU numbering scheme) amino acid substitution, a YTE (M252Y, S254T, and T256E, or equivalent thereof, based on the EU numbering scheme) amino acid substitution, or any combination thereof.

[7576] In some aspects, one or both of the antigen binding polypeptides comprised in the antigen binding polypeptide complexes disclosed herein comprise one or more Fc effector function knockout mutation. In some aspects, one or both of the antigen binding polypeptides comprised in the antigen binding polypeptide complexes disclosed herein are IgG1 or IgG4 antibodies or antigen binding fragments thereof. In some aspects, the Fc effector function knockout mutation is L234A, L235A, P239A, or equivalent thereof, or a combination thereof, based on the EU numbering scheme.

[7577] In some aspects, one or both of the antigen binding polypeptides comprised in the antigen binding polypeptide complexes disclosed herein comprise a mutation at a glycosylation site. In some aspects, the mutation at a glycosylation site is a mutation at an N-glycosylation site. In some aspects, one or both of the antigen binding polypeptides comprised in the antigen binding polypeptide complexes disclosed herein comprise a VH comprising a mutation at a glycosylation site. In some aspects, the mutation at a glycosylation site is a mutation at an N-glycosylation site. In some aspects, the mutation at an N-glycosylation site is at amino acid N62, or equivalent thereof, of the VH region or equivalent thereof. In some aspects, the mutation at an N-glycosylation site at amino acid N62 is N62Q or N62S, or equivalent thereof.

[7578] In some aspects, one or both of the antigen binding polypeptides comprised in the antigen binding polypeptide complexes disclosed herein, comprise one or more optional linkers. The one or more optional linkers are indicated herein as Ln, wherein n is an integer, and the integer next to each L indicates each L comprised in the antigen binding polypeptides comprised in the antigen binding polypeptide complexes disclosed herein. For example, if an antigen binding polypeptide comprised in the antigen binding polypeptide complexes disclosed herein comprises two linkers, the first linker from N-terminus to C-terminus is herein indicated as L1, and the second linker from N-terminus to C-terminus is herein indicated as L2. If an antigen binding polypeptide complex disclosed herein comprises a first antigen binding polypeptide comprising two linkers, indicated herein as L1 and L2, as explained above, the linkers comprised in the second antigen binding polypeptide are indicated with the following integer, in this example, the first linker from N-terminus to C-terminus of the second antigen binding polypeptide is herein indicated as L3, the second linker from N-terminus to C-terminus of the second antigen binding polypeptide is herein indicated as L3. In some aspects, any one of the optional linkers each independently have a length of from 0 amino acids to about 50 amino acids. In some aspects, any one of the optional linkers each independently have a length of from 5 amino acids to about 40 amino acids.

[7579] In some aspects, any one of the optional linkers are non-immunogenic. In some aspects, any one of the optional linkers do not contain a consensus T cell epitope.

[7580] In some aspects, any of Ln comprises an amino acid sequence of G or A, or an amino acid sequence at least 65%, at least 70%, at least 75%, at least 80%, at least 85%, at least 90%, at least 95%, at least 99%, or 100% identical to amino acid sequence GSS or ASG, or an amino acid sequence at least 65%, at least 70%, at least 75%, at least 80%, at least 85%, at least 90%, at least 95%, at least 99%, or 100% identical to any one of SEQ ID NOs: 333-373 and 967-971. In some aspects. Ln comprises an amino acid sequence at least 65%, at least 70%, at least 75%, at least 80%, at least 85%, at least 90%, at least 95%, at least 99%, or 100% identical to any one of SEQ ID NOs: 333-345 and 967-971.

[7581] In some aspects, the antigen binding polypeptide is selected from any one of the more specific aspects provided herein for an antigen binding polypeptide in an antigen binding polypeptide complex having no more than three polypeptide chains.

[7582] In some aspects, the antigen binding polypeptide further comprises one or more immunoglobulin heavy chain constant region 1 (CH1) and/or one or more immunoglobulin light chain constant region (CL) between any one of the variable regions and/or optional amino acid linkers (e.g., between VL1 and L1, between L1 and VH1, between VH1 and L2, between L2 and VL1, between L1 and VL2, between VL2 and L2, between L2 and VH2, between VH2 and L3, between L3 and VH1, between VL1 and L1, between L1 and VH2, between VH2 and L2, between. L2 and VL2, between VL2 and L3, between L3 and VH1, between VH1 and L4, between L4 and VH2, between VH2 and L5, between L5 and VL2, between VL2 and L6, between L6 and VL1, between VH1 and L4, between L4 and VL2, between L4 and VL2, between VL2 and L5, between L5 and VH2, between VH2 and L6, or between L6 and VL1).

[7583] In some aspects, the antigen binding polypeptide is selected from any one of the more specific aspects provided herein for an antigen binding polypeptide in an antigen binding polypeptide complex having no more than three polypeptide chains, and further comprises one or more immunoglobulin heavy chain constant region 1 (CH1) and/or one or more immunoglobulin light chain constant region (CL) between any one of the variable regions and/or optional amino acid linkers (e.g., between VL1 and L1, between L1 and VH1, between VH1 and L2, between L2 and VL1, between L1 and VL2, between VL2 and L2, between L2 and VH2, between VH2 and L3, between L3 and VH1, between VL1 and L1, between L1 and VH2, between VH2 and L2, between. L2 and VL2, between VL2 and L3, between L3 and VH1, between VH1 and L4, between L4 and VH2, between VH2 and L5, between L5 and VL2, between VL2 and L6, between L6 and VL1, between VH1 and L4, between L4 and VL2, between L4 and VL2, between VL2 and L5, between L5 and VH2, between VH2 and L6, or between L6 and VL1).

[7584] In some aspects, one or both of the antigen binding polypeptides comprised in the antigen binding polypeptide complexes disclosed herein, comprise one or more CL, as indicated in the formulas representing the antigen binding polypeptide complexes disclosed herein. In some aspects, the CL comprises an amino acid sequence at least 65%, at least 70%, at least 75%, at least 80%, at least 85%, at least 90%, at least 95%, at least 99%, or 100% identical to any one of SEQ ID NOs: 374, 637, or 1092-1095.

[7585] In some aspects, one or both of the antigen binding polypeptides comprised in the antigen binding polypeptide complexes disclosed herein, comprise one or more CH1, as indicated in the formulas representing the antigen binding polypeptide complexes disclosed herein. In some aspects, the CH1 comprises an amino acid sequence at least 65%, at least 70%, at least 75%, at least 80%, at least 85%, at least 90%, at least 95%, at least 99%, or 100% identical to any one of SEQ ID NOs: 375, 634, 1070, 1071, or 1086-1091.

[7586] In some aspects, one or both of the antigen binding polypeptides comprised in the antigen binding polypeptide complexes provided herein further comprise an Fc region. In some aspects, one or both of the antigen binding polypeptides comprised in the antigen binding polypeptide complexes provided herein further comprise an Fc region at the carboxy-terminus. In some aspects, the Fc region comprises an immunoglobulin heavy chain constant region 2 (CH2) and/or an immunoglobulin heavy chain constant region 3 (CH3). In some aspects, the Fc region further comprises an immunoglobulin hinge (i.e., a hinge region). In some aspects, the hinge region is interposed between a CH1 and a CH2 (i.e., a hinge region is localized between the carboxy terminal residue of a CH1 and the N-terminal residue of a CH2). In some aspects, the hinge region comprises an amino acid sequence at least 65%, at least 70%, at least 75%, at least 80%, at least 85%, at least 90%, at least 95%, at least 99%, or 100% identical to any one of SEQ ID NOs: 635.636, 1072, 1073, or 1074. In some aspects, the Fc region comprises a CH2 and a CH3. In some aspects, the CH2 comprises an amino acid sequence that is at least 65%, at least 70%, at least 75%, at least 80%, at least 85%, at least 90%, at least 95%, at least 99%, or 100% identical to any one of SEQ ID NOs: 1075-1078. In some aspects, the CH3 comprises an amino acid sequence that is at least 65%, at least 70%, at least 75%, at least 80%, at least 85%, at least 90%, at least 95%, at least 99%, or 100% identical to any one of SEQ ID NOs: 1079-1085. In some aspects, the Fc region comprises an amino acid sequence that is at least 65%, at least 70%, at least 75%, at least 80%, at least 85%, at least 90%, at least 95%, at least 99%, or 100% identical to any one of SEQ ID NOs: 376-380.

[7587] In some aspects, the Fc region comprises one or more amino acid substitutions. In some aspects, the one or more amino acid substitutions comprise one or more half-life extension amino acid substitutions. In some aspects, the one or more half-life extension amino acid substitutions comprise one or more of amino acid substitutions M428L, N434A, N434S, L234F, L235E, P331S, M252Y, S254T, or T256E, or equivalent thereof, based on the EU numbering scheme. In some aspects, the one or more half-life extension amino acid substitutions comprise a LA (M428L and N434A, or equivalent thereof, based on the EU numbering scheme) amino acid substitution. In some aspects, the one or more half-life extension amino acid substitutions comprise a LS (M428L and N434S, or equivalent thereof, based on the EU numbering scheme) amino acid substitution. In some aspects, the one or more half-life extension amino acid substitutions comprise L234F and L235E, or equivalent thereof (based on the EU numbering scheme) amino acid substitutions. In some aspects, the one or more half-life extension amino acid substitutions comprise a TM (L234F, L235E, and P331S, or equivalent thereof, based on the EU numbering scheme) amino acid substitution. In some aspects, the one or more half-life extension amino acid substitutions comprise a YTE (M252Y, S254T, and T256E, or equivalent thereof, based on the EU numbering scheme) amino acid substitution.

[7588] In some aspects, the Fc region comprises at least one knob-into-hole modification. In some aspects, the antigen binding polypeptides complexes disclosed herein are IgG1 or IgG4 antibodies or antigen binding fragments thereof. In some aspects, the knob-into-hole modification comprises one or more of knob substitutions of S354C and T366W, or equivalent thereof, and/or one or more of hole substitutions of Y349C, T366S, L368A, Y407V, or equivalent thereof, or a combination thereof, based on the EU numbering scheme. In some aspects, the Fc region comprises a knob-into-hole modification comprising knob substitutions of S354C and T366W, or equivalent thereof, and/or hole substitutions of Y349C, T366S, L368A, and Y407V, or equivalent thereof, and/or a half-life extension amino acid substitution comprising: a LA (M428L and N434A, or equivalent thereof, based on the EU numbering scheme) amino acid substitution, a LS (M428L and N434S, or equivalent thereof, based on the EU numbering scheme) amino acid substitution. L234F and L235E, or equivalent thereof (based on the EU numbering scheme) amino acid substitutions, a TM (L234F, L235E, and P331S, or equivalent thereof, based on the EU numbering scheme) amino acid substitution, a YTE (M252Y, S254T, and T256E, or equivalent thereof, based on the EU numbering scheme) amino acid substitution, or any combination thereof.

[7589] In some aspects, the Fc region comprises knob substitutions of S354C and T366W, or equivalent thereof, and a half-life extension amino acid substitution comprising: a LA (M428L and N434A, or equivalent thereof, based on the EU numbering scheme) amino acid substitution, a LS (M428L and N434S, or equivalent thereof, based on the EU numbering scheme) amino acid substitution. L234F and L235E, or equivalent thereof (based on the EU numbering scheme) amino acid substitutions, a TM (L234F, L235E, and P331S, or equivalent thereof, based on the EU numbering scheme) amino acid substitution, a YTE (M252Y, S254T, and T256E, or equivalent thereof, based on the EU numbering scheme) amino acid substitution, or any combination thereof.

[7590] In some aspects, the Fc region comprises hole substitutions of Y349C, T366S, L368A, and Y407V, or equivalent thereof, and a half-life extension amino acid substitution comprising: a LA (M428L and N434A, or equivalent thereof, based on the EU numbering scheme) amino acid substitution, a LS (M428L and N434S, or equivalent thereof, based on the EU numbering scheme) amino acid substitution. L234F and L235E, or equivalent thereof (based on the EU numbering scheme) amino acid substitutions, a TM (L234F, L235E, and P331S, or equivalent thereof, based on the EU numbering scheme) amino acid substitution, a YTE (M252Y, S254T, and T256E, or equivalent thereof, based on the EU numbering scheme) amino acid substitution, or any combination thereof.

[7591] In some aspects, one or both of the antigen binding polypeptides comprised in the antigen binding polypeptide complexes disclosed herein comprise one or more Fc effector function knockout mutation. In some aspects, one or both of the antigen binding polypeptides comprised in the antigen binding polypeptide complexes disclosed herein are IgG1 or IgG4 antibodies or antigen binding fragments thereof. In some aspects, the Fc effector function knockout mutation is L234A, L235A, P239A, or equivalent thereof, or a combination thereof, based on the EU numbering scheme.

[7592] In some aspects, one or both of the antigen binding polypeptides comprised in the antigen binding polypeptide complexes disclosed herein comprise a mutation at a glycosylation site. In some aspects, the mutation at a glycosylation site is a mutation at an N-glycosylation site. In some aspects, one or both of the antigen binding polypeptides comprised in the antigen binding polypeptide complexes disclosed herein comprise a VH comprising a mutation at a glycosylation site. In some aspects, the mutation at a glycosylation site is a mutation at an N-glycosylation site. In some aspects, the mutation at an N-glycosylation site is at amino acid N62, or equivalent thereof, of the VH region or equivalent thereof. In some aspects, the mutation at an N-glycosylation site at amino acid N62 is N62Q or N62S, or equivalent thereof.

[7593] In some aspects, one or both of the antigen binding polypeptides comprised in the antigen binding polypeptide complexes disclosed herein, comprise one or more optional linkers. The one or more optional linkers are indicated herein as Ln, wherein n is an integer, and the integer next to each L indicates each L comprised in the antigen binding polypeptides comprised in the antigen binding polypeptide complexes disclosed herein. For example, if an antigen binding polypeptide comprised in the antigen binding polypeptide complexes disclosed herein comprises two linkers, the first linker from N-terminus to C-terminus is herein indicated as L1, and the second linker from N-terminus to C-terminus is herein indicated as L2. If an antigen binding polypeptide complex disclosed herein comprises a first antigen binding polypeptide comprising two linkers, indicated herein as L1 and L2, as explained above, the linkers comprised in the second antigen binding polypeptide are indicated with the following integer, in this example, the first linker from N-terminus to C-terminus of the second antigen binding polypeptide is herein indicated as L3, the second linker from N-terminus to C-terminus of the second antigen binding polypeptide is herein indicated as L3. In some aspects, any one of the optional linkers each independently have a length of from 0 amino acids to about 50 amino acids. In some aspects, any one of the optional linkers each independently have a length of from 5 amino acids to about 40 amino acids.

[7594] In some aspects, any one of the optional linkers are non-immunogenic. In some aspects, any one of the optional linkers do not contain a consensus T cell epitope.

[7595] In some aspects, any of Ln comprises an amino acid sequence of G or A, or an amino acid sequence at least 65%, at least 70%, at least 75%, at least 80%, at least 85%, at least 90%, at least 95%, at least 99%, or 100% identical to amino acid sequence GSS or ASG, or an amino acid sequence at least 65%, at least 70%, at least 75%, at least 80%, at least 85%, at least 90%, at least 95%, at least 99%, or 100% identical to any one of SEQ ID NOs: 333-373 or 967-971. In some aspects. Ln comprises an amino acid sequence at least 65%, at least 70%, at least 75%, at least 80%, at least 85%, at least 90%, at least 95%, at least 99%, or 100% identical to any one of SEQ ID NOs: 333-345 or 967-971.

[7596] In some aspects, the first polypeptide and the second polypeptide comprise a same amino acid sequence.

[7597] In some aspects, the first polypeptide and the second polypeptide comprise a different amino acid sequence.

[7598] In some aspects, the first polypeptide and the second polypeptide are encoded by the same nucleotide sequence.

[7599] In some aspects, the first polypeptide and the second polypeptide are encoded by a different nucleotide sequence.

[7600] In some aspects, the antigen binding polypeptides or the antigen binding polypeptide complexes disclosed herein, comprise one or more optional linkers. The one or more optional linkers are indicated herein as Ln, wherein n is an integer, and the integer next to each L indicates each L comprised in the antigen binding polypeptides or the antigen binding polypeptide complexes disclosed herein. For example, if an antigen binding polypeptide disclosed herein comprises two linkers, the first linker from N-terminus to C-terminus is herein indicated as L1, and the second linker from N-terminus to C-terminus is herein indicated as L2. If an antigen binding polypeptide complex disclosed herein comprises a first antigen binding polypeptide comprising two linkers, indicated herein as L1 and L2, as explained above, the linkers comprised in the second antigen binding polypeptide are indicated with the following integer, in this example, the first linker from N-terminus to C-terminus of the second antigen binding polypeptide is herein indicated as L3, the second linker from N-terminus to C-terminus of the second antigen binding polypeptide is herein indicated as L3.

[7601] In some aspects, any one of the optional linkers each independently have a length of from 0 amino acids to about 50 amino acids. In some aspects, any one of the optional linkers each independently have a length of from 5 amino acids to about 40 amino acids.

[7602] In some aspects, any one of the optional linkers are non-immunogenic. In some aspects, any one of the optional linkers do not contain a consensus T cell epitope.

[7603] In some aspects, any of Ln comprises an amino acid sequence of G or A, or an amino acid sequence at least 65%, at least 70%, at least 75%, at least 80%, at least 85%, at least 90%, at least 95%, at least 99%, or 100% identical to amino acid sequence GSS or ASG, or an amino acid sequence at least 65%, at least 70%, at least 75%, at least 80%, at least 85%, at least 90%, at least 95%, at least 99%, or 100% identical to any one of SEQ ID NOs: 333-373 or 967-971. In some aspects. Ln comprises an amino acid sequence at least 65%, at least 70%, at least 75%, at least 80%, at least 85%, at least 90%, at least 95%, at least 99%, or 100% identical to any one of SEQ ID NOs: 333-345 or 967-971.

[7604] In some aspects, the antigen binding polypeptides or the antigen binding polypeptide complexes disclosed herein, comprise one or more CL, as indicated in the formulas representing the antigen binding polypeptides or the antigen binding polypeptide complexes disclosed herein. In some aspects, the CL comprises an amino acid sequence at least 65%, at least 70%, at least 75%, at least 80%, at least 85%, at least 90%, at least 95%, at least 99%, or 100% identical to any one of SEQ ID NOs: 374, 637, or 1092-1095.

[7605] In some aspects, the antigen binding polypeptides or the antigen binding polypeptide complexes disclosed herein, comprise one or more CH1, as indicated in the formulas representing the antigen binding polypeptides or the antigen binding polypeptide complexes disclosed herein. In some aspects, the CH1 comprises an amino acid sequence at least 65%, at least 70%, at least 75%, at least 80%, at least 85%, at least 90%, at least 95%, at least 99%, or 100% identical to any one of SEQ ID NOs: 375, 634, 1070, 1071, or 1086-1091.

[7606] In some aspects, the antigen binding polypeptides or the antigen binding polypeptide complexes disclosed herein, comprise one or more hinge regions, wherein a hinge region is interposed between a CH1 and a CH2 (i.e., a hinge region is localized between the carboxy terminal residue of a CH1 and the N-terminal residue of a CH2). In some aspects, the hinge region comprises an amino acid sequence at least 65%, at least 70%, at least 75%, at least 80%, at least 85%, at least 90%, at least 95%, at least 99%, or 100% identical to any one of SEQ ID NOs: 635, 636, 1072, 1073, or 1074.

[7607] In some aspects, the antigen binding polypeptides or the antigen binding polypeptide complexes disclosed herein, comprise one or more Fc region. In some aspects, the Fc region is at the carboxy-terminus of the antigen binding polypeptides disclosed herein. In some aspects, the Fc region is at the carboxy-terminus of at least one of the antigen binding polypeptides comprised in the antigen binding polypeptide complexes disclosed herein. In some aspects, the Fc region comprises at least one knob-into-hole modification or Fc effector function knockout mutation. In some aspects, the Fc region comprises at least one knob-into-hole modification or Fc effector function knockout mutation. In some aspects, the Fc region comprises an immunoglobulin heavy chain constant region 2 (CH2) and/or an immunoglobulin heavy chain constant region 3 (CH3), as indicated in the formulas representing the antigen binding polypeptides or the antigen binding polypeptide complexes disclosed herein. In some aspects, the Fc region further comprises an immunoglobulin hinge (i.e., a hinge region). In some aspects, the hinge region comprises an amino acid sequence at least 65%, at least 70%, at least 75%, at least 80%, at least 85%, at least 90%, at least 95%, at least 99%, or 100% identical to any one of SEQ ID NOs: 635, 636, 1072, 1073, or 1074. In some aspects, the Fc region comprises one or more half-life extension amino acid substitutions. In some aspects, the one or more half-life extension amino acid substitutions comprise one or more of amino acid substitutions M428L, N434A, N434S, L234F, L235E, P331S, M252Y, S254T, or T256E, or equivalent thereof, based on the EU numbering scheme. In some aspects, the one or more half-life extension amino acid substitutions comprise one or more of the following amino acid substitutions:
[7608] M428L and N434A (LA), or equivalent thereof;
[7609] M428L and N434S (LS), or equivalent thereof;
[7610] L234F and L235E, or equivalent thereof;
[7611] L234F, L235E, and P331S (TM), or equivalent thereof; and/or
[7612] M252Y, S254T, and T256E (YTE), or equivalent thereof;
[7613] based on the EU numbering scheme.

[7614] In some aspects, the Fc region comprises a CH2 and a CH3. In some aspects, the CH2 comprises an amino acid sequence that is at least 65%, at least 70%, at least 75%, at least 80%, at least 85%, at least 90%, at least 95%, at least 99%, or 100% identical to any one of SEQ ID NOs: 1075-1078. In some aspects, the CH3 comprises an amino acid sequence that is at least 65%, at least 70%, at least 75%, at least 80%, at least 85%, at least 90%, at least 95%, at least 99%, or 100% identical to any one of SEQ ID NOs: 1079-1085. In some aspects, the Fc region comprises an amino acid sequence at least 65%, at least 70%, at least 75%, at least 80%, at least 85%, at least 90%, at least 95%, at least 99%, or 100% identical to any one of SEQ ID NOs: 376-380.

[7615] In some aspects, the Fc region comprises at least one knob-into-hole modification or Fc effector function knockout mutation. In some aspects, the antigen binding polypeptide or the antigen binding polypeptide complex disclosed herein is an IgG1 or IgG4 antibody or antigen binding fragment thereof and the knob-into-hole modification comprises:
[7616] (i) knob substitutions of S354C and T366W, or equivalent thereof;
[7617] (ii) hole substitutions Y349C, T366S, L368A and Y407V, or equivalent thereof;
[7618] (iii) a combination thereof;
[7619] based on the EU numbering scheme.

[7620] In some aspects, the knob-into-hole modification comprises one or more of knob substitutions of S354C and T366W, or equivalent thereof, and/or one or more of hole substitutions of Y349C, T366S, L368A, Y407V, or equivalent thereof; or a combination thereof, based on the EU numbering scheme. In some aspects, the Fc region comprises a knob-into-hole modification comprising knob substitutions of S354C and T366W, or equivalent thereof, and/or hole substitutions of Y349C, T366S, L368A and Y407V, or equivalent thereof, and/or a half-life extension amino acid substitution comprising: a LA (M428L and N434A, or equivalent thereof, based on the EU numbering scheme) amino acid substitution, a LS (M428L and N434S, or equivalent thereof, based on the EU numbering scheme) amino acid substitution. L234F and L235E, or equivalent thereof (based on the EU numbering scheme) amino acid substitutions, a TM (L234F, L235E, and P331S, or equivalent thereof, based on the EU numbering scheme) amino acid substitution, a YTE (M252Y, S254T, and T256E, or equivalent thereof, based on the EU numbering scheme) amino acid substitution, or any combination thereof.

[7621] In some aspects, the Fc region comprises knob substitutions of S354C and T366W, or equivalent thereof, and a half-life extension amino acid substitution comprising: a LA (M428L and N434A, or equivalent thereof, based on the EU numbering scheme) amino acid substitution, a LS (M428L and N434S, or equivalent thereof, based on the EU numbering scheme) amino acid substitution. L234F and L235E, or equivalent thereof (based on the EU numbering scheme) amino acid substitutions, a TM (L234F, L235E, and P331S, or equivalent thereof, based on the EU numbering scheme) amino acid substitution, a YTE (M252Y, S254T, and T256E, or equivalent thereof, based on the EU numbering scheme) amino acid substitution, or any combination thereof.

[7622] In some aspects, the Fc region comprises hole substitutions of Y349C, T366S, L368A and Y407V, or equivalent thereof, and a half-life extension amino acid substitution comprising: a LA (M428L and N434A, or equivalent thereof, based on the EU numbering scheme) amino acid substitution, a LS (M428L and N434S, or equivalent thereof, based on the EU numbering scheme) amino acid substitution. L234F and L235E, or equivalent thereof (based on the EU numbering scheme) amino acid substitutions, a TM (L234F, L235E, and P331S, or equivalent thereof, based on the EU numbering scheme) amino acid substitution, a YTE (M252Y, S254T, and T256E, or equivalent thereof, based on the EU numbering scheme) amino acid substitution, or any combination thereof.

[7623] In some aspects, the antigen binding polypeptide or the antigen binding polypeptide complex disclosed herein is an IgG1 or IgG4 antibody or antigen binding fragment thereof and the Fc effector function knockout mutation is L234A, L235A, P239A, or equivalent thereof, or a combination thereof, based on the EU numbering scheme.

[7624] In some aspects, an antigen binding polypeptide or antigen binding polypeptide complex disclosed herein comprises a VL comprising a CDR1, a CDR2, and a CDR3 of any one of SEQ ID NOs: 1098, 1105, 1112, 1122, 1129, 1136, 1143, 1150, 1157, 1164, 1171, 1176, 1183, 1190, 1196, 1202, 1208, 1214, 1219, 1223, 1230, 1237, 1242, 1249, 1256, 1263, 1268, 1273, 1280, 1287, 1294, 1301, 1308, 1314, 1321, 1328, 1334, 1341, 1347, 1354, 1361, 1368, 1375, 1380, 1384, 1390, 1396, 1403, 1410, 1416, 1423, 1430, 1436, 1443, 1450, 1457, 1463, 1470, 1477, 1483, 1490, 1497, 1503, 1510, 1514, 1521, 1527, 1533, 1540, 1546, 1551, 1558, 1563, 1570, 1576, 1583, 1589, 1596, 1603, 1610, 1617, 1624, 1631, 1638, 1645, 1652, 1659, 1664, 1669, 1674, 1682, 1692, 1700, 1711, 1721, 1724, 1730, 1740, 1746, 1755, 1764, 1766, 1771, 1779, 1784, 1788, 1794, 1800, 1806, 1812, 1819, 1826, 1833, 1840, 1847, 1854, 1861, 1868, 1874, 1880, 1887, 1893, 1900, 1907, 1913, 1919, 1926, 1933, 1940, 1947, 1952, 1958, 1965, 1971, 1980, 1988, 1996, and 2004.

[7625] In some aspects, an antigen binding polypeptide or antigen binding polypeptide complex disclosed herein comprises a VH comprising a CDR1, a CDR2, and a CDR3 of any one of SEQ ID NOs: 1102, 1109, 1116, 1119, 1126, 1133, 1140, 1147, 1154, 1161, 1168, 1173, 1180, 1187, 1194, 1198, 1206, 1210, 1218, 1220, 1227, 1234, 1241, 1246, 1253, 1260, 1265, 1270, 1277, 1284, 1291, 1298, 1305, 1312, 1318, 1325, 1332, 1338, 1345, 1351, 1358, 1365, 1372, 1379, 1381, 1388, 1393, 1400, 1407, 1413, 1420, 1427, 1434, 1440, 1447, 1454, 1460, 1467, 1474, 1481, 1487, 1494, 1501, 1507, 1512, 1518, 1525, 1530, 1537, 1543, 1550, 1555, 1561, 1567, 1573, 1580, 1587, 1593, 1600, 1607, 1614, 1621, 1628, 1635, 1642, 1649, 1656, 1662, 1668, 1671, 1678, 1686, 1696, 1704, 1714, 1722, 1726, 1734, 1742, 1750, 1759, 1760, 1765, 1768, 1775, 1783, 1785, 1792, 1797, 1804, 1809, 1816, 1823, 1830, 1837, 1844, 1851, 1858, 1865, 1871, 1877, 1884, 1890, 1897, 1904, 1910, 1916, 1923, 1930, 1937, 1944, 1950, 1956, 1962, 1969, 1974, 1984, 1992, 2000, and 2008.

[7626] In some aspects, an antigen binding polypeptide or antigen binding polypeptide complex disclosed herein comprises LCDR1 of any one of SEQ ID NOs: 1096, 1103, 1110, 1120, 1127, 1134, 1141, 1148, 1155, 1162, 1169, 1174, 1181, 1188, 1199, 1211, 1221, 1228, 1235, 1247, 1254, 1261, 1266, 1271, 1278, 1285, 1292, 1299, 1306, 1313, 1319, 1326, 1339, 1352, 1359, 1366, 1373, 1382, 1394, 1401, 1408, 1414, 1421, 1428, 1441, 1448, 1455, 1461, 1468, 1475, 1488, 1495, 1508, 1519, 1526, 1531, 1538, 1544, 1556, 1568, 1574, 1581, 1594, 1601, 1608, 1615, 1622, 1629, 1636, 1643, 1650, 1657, 1672, 1679, 1689, 1697, 1708, 1715, 1718, 1723, 1727, 1738, 1743, 1752, 1761, 1763, 1769, 1776, 1786, 1793, 1798, 1810, 1817, 1824, 1831, 1838, 1845, 1852, 1859, 1866, 1872, 1878, 1885, 1891, 1898, 1905, 1911, 1917, 1924, 1931, 1938, 1945, 1963, 1977, 1985, 1993, and 2001.

[7627] In some aspects, an antigen binding polypeptide or antigen binding polypeptide complex disclosed herein comprises LCDR2 of any one of SEQ ID NOs: 1200, 1212, 1680, 1690, 1698, 1709, 1728, 1739, 1744, 1753, 1770, 1777, 1978, 1986, 1994, and 2002; or any one of amino acid sequences AAS, APS, AT, ATS, AVS, DAS, DDG, DDS, DNN, DT, DTS, DVS, EAS, EDN, EVS, FTS, GAF, GAN, GAS, GAT, GIS, GKN, GNG, GNS, HTS, KAS, KVS, LAS, LGS, LVS, NAK, NTD, NTN, QMS, RMS, RTS, SAS, STS, TTS, WAS, YAS, YAT, YGS, YRS, and YTS.

[7628] In some aspects, an antigen binding polypeptide or antigen binding polypeptide complex disclosed herein comprises LCDR3 of any one of SEQ ID NOs: 1097, 1104, 1111, 1121, 1128, 1135, 1142, 1149, 1156, 1163, 1170, 1175, 1182, 1189, 1195, 1201, 1207, 1213, 1222, 1229, 1236, 2009, 1248, 1255, 1262, 1267, 1272, 1279, 1286, 1293, 1300, 1307, 1320, 1327, 1333, 1340, 1346, 1353, 1360, 1367, 1374, 1383, 1389, 1395, 1402, 1409, 1415, 1422, 1429, 1435, 1442, 1449, 1456, 1462, 1469, 1476, 1482, 1489, 1496, 1502, 1509, 1513, 1520, 1532, 1539, 1545, 1557, 1562, 1569, 1575, 1582, 1588, 1595, 1602, 1609, 1616, 1623, 1630, 1637, 1644, 1651, 1658, 1663, 1673, 1681, 1691, 1699, 1710, 1729, 1735, 1745, 1751, 1754, 1778, 1787, 1799, 1805, 1811, 1818, 1825, 1832, 1839, 1846, 1853, 1860, 1867, 1873, 1879, 1886, 1892, 1899, 1906, 1912, 1918, 1925, 1932, 1939, 1946, 1951, 1957, 1964, 1970, 1976, 1979, 1987, 1995, and 2003.

[7629] In some aspects, an antigen binding polypeptide or antigen binding polypeptide complex disclosed herein comprises HCDR1 of any one of SEQ ID NOs: 1099, 1106, 1113, 1117, 1123, 1130, 1137, 1144, 1151, 1158, 1165, 1177, 1184, 1191, 1203, 1215, 1224, 1231, 1238, 1243, 1250, 1257, 1264, 1274, 1281, 1288, 1295, 1302, 1309, 1315, 1322, 1329, 1335, 1342, 1348, 1355, 1362, 1369, 1376, 1385, 1397, 1404, 1417, 1424, 1431, 1437, 1444, 1451, 1458, 1464, 1471, 1478, 1484, 1491, 1498, 1504, 1511, 1515, 1522, 1534, 1547, 1552, 1564, 1577, 1584, 1590, 1597, 1604, 1611, 1618, 1625, 1632, 1639, 1646, 1653, 1660, 1665, 1675, 1683, 1693, 1701, 1705, 1716, 1719, 1731, 1736, 1747, 1756, 1772, 1780, 1789, 1795, 1801, 1813, 1820, 1827, 1834, 1841, 1848, 1855, 1862, 1881, 1894, 1901, 1920, 1927, 1934, 1941, 1953, 1959, 1966, 1981, 1989, 1997, and 2005.

[7630] In some aspects, an antigen binding polypeptide or antigen binding polypeptide complex disclosed herein comprises HCDR2 of any one of SEQ ID NOs: 1100, 1107, 1114, 1118, 1124, 1131, 1138, 1145, 1152, 1159, 1166, 1178, 1185, 1192, 1204, 1216, 1225, 1232, 1239, 1244, 1251, 1258, 1275, 1282, 1289, 1296, 1303, 1310, 1316, 1323, 1330, 1336, 1343, 1349, 1356, 1363, 1370, 1377, 1386, 1391, 1398, 1405, 1411, 1418, 1425, 1432, 1438, 1445, 1452, 1465, 1472, 1479, 1485, 1492, 1499, 1505, 1516, 1523, 1528, 1535, 1541, 1548, 1553, 1559, 1565, 1571, 1578, 1585, 1591, 1598, 1605, 1612, 1619, 1626, 1633, 1640, 1647, 1654, 1666, 1676, 1684, 1687, 1694, 1702, 1706, 1712, 1717, 1720, 1725, 1732, 1737, 1741, 1748, 1757, 1767, 1773, 1781, 1790, 1802, 1807, 1814, 1821, 1828, 1835, 1842, 1849, 1856, 1863, 1869, 1875, 1882, 1888, 1895, 1902, 1908, 1914, 1921, 1928, 1935, 1942, 1948, 1954, 1960, 1967, 1972, 1982, 1990, 1998, and 2006.

[7631] In some aspects, an antigen binding polypeptide or antigen binding polypeptide complex disclosed herein comprises HCDR3 of any one of SEQ ID NOs: 1101, 1108, 1115, 1125, 1132, 1139, 1146, 1153, 1160, 1167, 1172, 1179, 1186, 1193, 1197, 1205, 1209, 1217, 1226, 1233, 1240, 1245, 1252, 1259, 1269, 1276, 1283, 1290, 1297, 1304, 1311, 1317, 1324, 1331, 1337, 1344, 1350, 1357, 1364, 1371, 1378, 1387, 1392, 1399, 1406, 1412, 1419, 1426, 1433, 1439, 1446, 1453, 1459, 1466, 1473, 1480, 1486, 1493, 1500, 1506, 1517, 1524, 1529, 1536, 1542, 1549, 1554, 1560, 1566, 1572, 1579, 1586, 1592, 1599, 1606, 1613, 1620, 1627, 1634, 1641, 1648, 1655, 1661, 1667, 1670, 1677, 1685, 1688, 1695, 1703, 1707, 1713, 1733, 1749, 1758, 1762, 1774, 1782, 1791, 1796, 1803, 1808, 1815, 1822, 1829, 1836, 1843, 1850, 1857, 1864, 1870, 1876, 1883, 1889, 1896, 1903, 1909, 1915, 1922, 1929, 1936, 1943, 1949, 1955, 1961, 1968, 1973, 1975, 1983, 1991, 1999, and 2007.

[7632] In some aspects, an antigen binding polypeptide or antigen binding polypeptide complex disclosed herein comprises a VL of any one of SEQ ID NOs: 1098, 1105, 1112, 1122, 1129, 1136, 1143, 1150, 1157, 1164, 1171, 1176, 1183, 1190, 1196, 1202, 1208, 1214, 1219, 1223, 1230, 1237, 1242, 1249, 1256, 1263, 1268, 1273, 1280, 1287, 1294, 1301, 1308, 1314, 1321, 1328, 1334, 1341, 1347, 1354, 1361, 1368, 1375, 1380, 1384, 1390, 1396, 1403, 1410, 1416, 1423, 1430, 1436, 1443, 1450, 1457, 1463, 1470, 1477, 1483, 1490, 1497, 1503, 1510, 1514, 1521, 1527, 1533, 1540, 1546, 1551, 1558, 1563, 1570, 1576, 1583, 1589, 1596, 1603, 1610, 1617, 1624, 1631, 1638, 1645, 1652, 1659, 1664, 1669, 1674, 1682, 1692, 1700, 1711, 1721, 1724, 1730, 1740, 1746, 1755, 1764, 1766, 1771, 1779, 1784, 1788, 1794, 1800, 1806, 1812, 1819, 1826, 1833, 1840, 1847, 1854, 1861, 1868, 1874, 1880, 1887, 1893, 1900, 1907, 1913, 1919, 1926, 1933, 1940, 1947, 1952, 1958, 1965, 1971, 1980, 1988, 1996, and 2004.

[7633] In some aspects, an antigen binding polypeptide or antigen binding polypeptide complex disclosed herein comprises a VH of any one of SEQ ID NOs: 1102, 1109, 1116, 1119, 1126, 1133, 1140, 1147, 1154, 1161, 1168, 1173, 1180, 1187, 1194, 1198, 1206, 1210, 1218, 1220, 1227, 1234, 1241, 1246, 1253, 1260, 1265, 1270, 1277, 1284, 1291, 1298, 1305, 1312, 1318, 1325, 1332, 1338, 1345, 1351, 1358, 1365, 1372, 1379, 1381, 1388, 1393, 1400, 1407, 1413, 1420, 1427, 1434, 1440, 1447, 1454, 1460, 1467, 1474, 1481, 1487, 1494, 1501, 1507, 1512, 1518, 1525, 1530, 1537, 1543, 1550, 1555, 1561, 1567, 1573, 1580, 1587, 1593, 1600, 1607, 1614, 1621, 1628, 1635, 1642, 1649, 1656, 1662, 1668, 1671, 1678, 1686, 1696, 1704, 1714, 1722, 1726, 1734, 1742, 1750, 1759, 1760, 1765, 1768, 1775, 1783, 1785, 1792, 1797, 1804, 1809, 1816, 1823, 1830, 1837, 1844, 1851, 1858, 1865, 1871, 1877, 1884, 1890, 1897, 1904, 1910, 1916, 1923, 1930, 1937, 1944, 1950, 1956, 1962, 1969, 1974, 1984, 1992, 2000, and 2008.

[7634] In some aspects, an antigen binding polypeptide or antigen binding polypeptide complex disclosed herein comprise a detectable label. In some aspects, the detectable label is a radioactive label, chemiluminescent label, fluorescent label, enzyme, peptide tag, or a combination thereof. In some aspects, the peptide tag is a polyhistidine tag consisting of from about four to about 10 histidine residues. In some aspects, the poly histidine tag consists of about eight histidine residues.

[7635] In some aspects, an antigen binding polypeptide or antigen binding polypeptide complex disclosed herein is conjugated to an agent as an antibody-drug conjugate (ADC). In some aspects, the agent is a cytotoxic agent, immunomodulating agent, imaging agent, or therapeutic protein, or a combination thereof.

[7636] In some aspects, an antigen binding polypeptide or antigen binding polypeptide complex disclosed herein specifically binds to the (i) tumor-associated antigen (TAA), (ii) infectious disease antigen that is not a sarbecovirus antigen, or (iii) other-pathology antigen with an equilibrium dissociation constant (K_{D}) of from about 10 μM to about 1 pM.

[7637] In some aspects, an antigen binding polypeptide complex disclosed herein is bispecific, trispecific or tetraspecific and has greater binding affinity to the (i) tumor-associated antigen (TAA), (ii) infectious disease antigen that is not a sarbecovirus antigen, or (iii) other-pathology antigen than a monospecific antigen binding polypeptide complex that specifically binds to one of the same antigens as the bispecific, trispecific or tetraspecific antigen binding polypeptide complex.

[7638] In some aspects, an antigen binding polypeptide complex disclosed herein is bispecific, trispecific or tetraspecific and has greater binding affinity to the (i) tumor-associated antigen (TAA), (ii) infectious disease antigen that is not a sarbecovirus antigen, or (iii) other-pathology antigen than a mixture of monospecific antigen binding polypeptide complexes that specifically bind to the same antigens as the bispecific, trispecific or tetraspecific antigen binding polypeptide complex.

[7639] In some aspects, the antigen binding polypeptides and polypeptide complexes disclosed herein have broad reactivity against a viral antigen selected from the group consisting of influenza virus neuraminidase, influenza virus hemagglutinin, human respiratory syncytial virus (RSV)-viral proteins, RSV F glycoprotein, RSV G glycoprotein, herpes simplex virus (HSV) viral proteins, herpes simplex virus glycoproteins gB, gC, gD, and gE, chlamydia MOMP and PorB antigens, core protein, matrix protein or other protein of Dengue virus, measles virus hemagglutinin, herpes simplex virus type 2 glycoprotein gB, poliovirus 1 VP1, envelope glycoproteins of HIV 1, hepatitis B surface antigen, diptheria toxin. streptococcus 24M epitope, gonococcal pilin, pseudorabies virus g50) (gpD), pseudorabies virus II (gpB), pseudorabies virus III (gpC), pseudorabies virus glycoprotein H, pseudorabies virus glycoprotein E, transmissible gastroenteritis glycoprotein 195, transmissible gastroenteritis matrix protein, swine rotavirus glycoprotein 38, swine parvovirus capsid protein. Serpulina hydodysenteriae protective antigen, bovine viral diarrhea glycoprotein 55. Newcastle disease virus hemagglutinin-neuraminidase, swine flu hemagglutinin, swine flu neuraminidase, foot and mouth disease virus, hog colera virus, swine influenza virus. African swine fever virus, Mycoplasma hyopneumoniae, infectious bovine rhinotracheitis virus, infectious bovine rhinotracheitis virus glycoprotein E, glycoprotein G, infectious laryngotracheitis virus, infectious laryngotracheitis virus glycoprotein G or glycoprotein I, a glycoprotein of La Crosse virus, neonatal calf diarrhoea virus. Venezuelan equine encephalomyelitis virus, punta toro virus, murine leukemia virus, mouse mammary tumor virus, hepatitis B virus core protein and hepatitis B virus surface antigen or a fragment or derivative thereof, antigen of equine influenza virus or equine herpes virus, including equine influenza virus type A/Alaska 91 neuraminidase, equine influenza virus typeA/Miami 63 neuraminidase, equine influenza virus type A/Kentucky 81 neuraminidase equine herpes virus type 1 glycoprotein B, and equine herpes virus type 1 glycoprotein D, antigen of bovine respiratory syncytial virus or bovine parainfluenza virus, bovine respiratory syncytial virus attachment protein (BRSV G), bovine respiratory syncytial virus fusion protein (BRSV F), bovine respiratory syncytial virus nucleocapsid protein (BRSVN), bovine parainfluenza virus type 3 fusion protein, bovine parainfluenza virus type 3 hemagglutinin neuraminidase, bovine E viral diarrhoea virus glycoprotein 48 and glycoprotein 53, glycoprotein E of Dengue virus, and glycoprotein E1E2 of human hepatitis C virus.

[7640] In some aspects, the antigen binding polypeptides and polypeptide complexes disclosed herein bind to at least one epitope on at least one antigen selected from the group consisting of influenza virus neuraminidase, influenza virus hemagglutinin, human respiratory syncytial virus (RSV)-viral proteins, RSV F glycoprotein, RSV G glycoprotein, herpes simplex virus (HSV) viral proteins, herpes simplex virus glycoproteins gB, gC, gD, and gE, chlamydia MOMP and PorB antigens, core protein, matrix protein or other protein of Dengue virus, measles virus hemagglutinin, herpes simplex virus type 2 glycoprotein gB, poliovirus 1 VP1, envelope glycoproteins of HIV 1, hepatitis B surface antigen, diptheria toxin, streptococcus 24M epitope, gonococcal pilin, pseudorabies virus g50) (gpD), pseudorabies virus II (gpB), pseudorabies virus III (gpC), pseudorabies virus glycoprotein H, pseudorabies virus glycoprotein E, transmissible gastroenteritis glycoprotein 195, transmissible gastroenteritis matrix protein, swine rotavirus glycoprotein 38, swine parvovirus capsid protein. Serpulina hydodysenteriae protective antigen, bovine viral diarrhea glycoprotein 55. Newcastle disease virus hemagglutinin-neuraminidase, swine flu hemagglutinin, swine flu neuraminidase, foot and mouth disease virus, hog colera virus, swine influenza virus. African swine fever virus, Mycoplasma hyopneumoniae, infectious bovine rhinotracheitis virus, infectious bovine rhinotracheitis virus glycoprotein E, glycoprotein G, infectious laryngotracheitis virus, infectious laryngotracheitis virus glycoprotein G or glycoprotein I, a glycoprotein of La Crosse virus, neonatal calf diarrhoea virus. Venezuelan equine encephalomyelitis virus, punta toro virus, murine leukemia virus, mouse mammary tumor virus, hepatitis B virus core protein and hepatitis B virus surface antigen or a fragment or derivative thereof, antigen of equine influenza virus or equine herpes virus, including equine influenza virus type A/Alaska 91 neuraminidase, equine influenza virus typeA/Miami 63 neuraminidase, equine influenza virus type A/Kentucky 81 neuraminidase equine herpes virus type 1 glycoprotein B, and equine herpes virus type 1 glycoprotein D, antigen of bovine respiratory syncytial virus or bovine parainfluenza virus, bovine respiratory syncytial virus attachment protein (BRSV G), bovine respiratory syncytial virus fusion protein (BRSV F), bovine respiratory syncytial virus nucleocapsid protein (BRSVN), bovine parainfluenza virus type 3 fusion protein, bovine parainfluenza virus type 3 hemagglutinin neuraminidase, bovine E viral diarrhoea virus glycoprotein 48 and glycoprotein 53, glycoprotein E of Dengue virus, and glycoprotein E1E2 of human hepatitis C virus.

[7641] In some aspects, the antigen binding polypeptides and polypeptide complexes disclosed herein specifically bind to at least one epitope on at least one antigen selected from the group consisting of A2AR, APRIL, ATPDase, BAFF, BAFFR, BCMA. BlyS, BTK, BTLA, B7DC, B7H1, B7H2, B7H3, B7H4, B7H5, B7H6, B7H7, B7RP1, B7-4, C3, C5, CCL2, CCL3, CCL4, CCL5, CCL7, CCL8, CCL11, CCL15, CCL17, CCL19, CCL20, CCL21, CCL25 CCR3, CCR4, CD3, CD16A, CD19, CD20, CD24, CD27, CD28, CD30, CD38, CD39, CD40, CD40L, CD47, CD52, CD70, CD80, CD86, CD123, CD133, CD137, CD137L, CD160, CD272, CEACAM5, CLEC9, CLEC91, CRTH2, CSF-1, CSF-2, CSF-3, CXCL1, CXCL2, CXCL4, CXCL12, CXCL13, CXCR3, cMet, CTLA4, DLL3, DLL4, DNGR-1, E-cadherin, EGFR, ENTPD1, EpCAM, FCER1, FCER1A, FCER2, FGFR, FLAP, FOLH1, Gi24, GITR, GITRL, GPR5, GP100, GPRC5D, HER2, HER3, ICOSL, ICOS, HHLA2, HMGB1, HVEM, IDO, IFNa, IgE, IGF1R, IL2Rbeta, IL1, IL1A, IL1B, IL1F10, IL2, IL4, IL4Ra, IL5, ILSR, IL6, IL7, IL7Ra, IL8, IL9, IL9R, IL10, rhIL1O, IL12, IL13, IL13Ra1, IL13Ra2, IL15, IL17, IL17Rb, IL18, IL22, IL23, IL25, IL7, IL33, IL35, ITGB4, ITK, KIR, LAG3, LAMP1, leptin, LPFS2, MHC class II, MUC-1, MUC-16, NCR3LG1, NKG2D, NKp46, NTPDase-1, OX40, OX40L, PD-1, PD-L1, PD-L2, PROM1, S152, SIRPalpha, SISP1, SLC, SPG64, ST2, STEAP1, STEAP2, Syk kinase, STEAP1, TROP2, TACI, TDO, TGFBETA, T14, TIGIT, TIM3, TLR, TLR2, TLR4, TLR5, TLR9, TMEF1, TNFa, TNFRSF7, Tp55, TREM1, TSLP, TSLPR, TWEAK, VEGF, VISTA, Vstm3, and WUCAM.

[7642] In some aspects, the antigen binding polypeptides or the antigen binding polypeptide complexes disclosed herein comprise a VH comprising a mutation at an N-glycosylation site. In some aspects, the mutation at an N-glycosylation site is at amino acid N62 of the VH region or equivalent thereof. In some aspects, the mutation at an N-glycosylation site at amino acid N62 is N62Q or N62S, or equivalent thereof.

[7643] In some aspects, the antigen binding polypeptides or the antigen binding polypeptide complexes disclosed herein have an isoelectric point (pI) of from about 7 to about 9.

[7644] In some aspects, provided herein are antibodies or antigen binding fragments thereof comprising the antigen binding polypeptides or antigen binding polypeptide complexes disclosed herein. In some aspects, an antibody or antigen binding fragment thereof comprising the antigen binding polypeptides or antigen binding polypeptide complexes disclosed herein is IgG, IgM, IgE, IgA or IgD. In some aspects, the IgG is IgG1, IgG2, IgG3 or IgG4. In some aspects, an antibody or antigen binding fragment thereof comprising the antigen binding polypeptides or antigen binding polypeptide complexes disclosed herein is a Fab, scFab, Fab′, F(ab′)₂, Fv or scFv. In some aspects, an antibody or antigen binding fragment thereof comprising the antigen binding polypeptides or antigen binding polypeptide complexes disclosed herein is human or humanized.

[7645] In some aspects, provided herein are polynucleotides encoding the antigen binding polypeptides or antigen binding polypeptide complexes disclosed herein, or the antibodies or antigen binding fragments thereof comprising the antigen binding polypeptides or antigen binding polypeptide complexes disclosed herein.

[7646] In some aspects, provided herein are vectors comprising the polynucleotides disclosed herein. In some aspects, provided herein are host cells comprising the vectors disclosed herein.

[7647] In some aspects, provided herein are mRNAs encoding the antigen binding polypeptides, antigen binding polypeptide complexes, or the antibodies or antigen binding fragments thereof provided herein. In some aspects, the mRNAs provided herein comprise a 5′-cap and/or a poly(A) tail.

[7648] In some aspects, provided herein are lipid nanoparticles (LNP) comprising the mRNAs provided herein.

[7649] In some aspects, provided herein are chimeric antigen receptor (CAR) comprising the antigen binding polypeptide, antigen binding polypeptide complexes, or antibodies or antigen binding fragments thereof disclosed herein. In some aspects, provided herein are immune cells comprising the CARs disclosed herein.

[7650] In some aspects, provided herein are pharmaceutical compositions comprising the antigen binding polypeptides, the antigen binding polypeptide complexes, the antibodies or antigen binding fragments thereof, the polynucleotides, the vectors, the host cells, the mRNAs, the LNPs, the CARs, the immune cells disclosed herein, or any combination thereof. In some aspects, the pharmaceutical compositions disclosed herein further comprise a pharmaceutically acceptable carrier, an additional pharmaceutical agent, or a combination thereof.

[7651] In some aspects, provided herein are kits comprising the antigen binding polypeptides, the antigen binding polypeptide complexes, the antibodies or antigen binding fragments thereof, the polynucleotides, the vectors, the host cells, the mRNAs, the LNPs, the CARs, the immune cells, the pharmaceutical compositions disclosed herein, or any combination thereof.

[7652] In some aspects, provided herein are methods of preventing or treating (i) a cancer or a tumor, (ii) an infectious disease that is not a sarbecovirus infectious disease, or (iii) a pathology other than a cancer or a tumor or an infectious disease that is not a sarbecovirus infectious disease, comprising administering to the subject a therapeutically effective amount of the antigen binding polypeptides or antigen binding polypeptide complexes, the antibodies or antigen binding fragments thereof, the polynucleotides, the vectors, the host cells, the mRNAs, the LNPs, the CARs, the immune cells, or the pharmaceutical compositions disclosed herein, or any combination thereof.

[7653] In some aspects, provided herein are methods of diagnosing a subject as having or as being suspected of having (i) a cancer or a tumor, (ii) an infectious disease that is not a sarbecovirus infectious disease, or (iii) a pathology other than a cancer or a tumor or an infectious disease that is not a sarbecovirus infectious disease, comprising (a) contacting a sample obtained from the subject with the antigen binding polypeptides or antigen binding polypeptide complexes or the antibodies or antigen binding fragments thereof disclosed herein; (b) detecting the presence or absence of a complex which contains the polypeptide or a fragment thereof, polypeptide complex or a fragment thereof, or antibody or antigen binding a fragment thereof and (i) a tumor-associated antigen (TAA) or fragment thereof, (ii) an infectious disease antigen that is not a sarbecovirus antigen or fragment thereof, or (iii) an other-pathology antigen or fragment thereof; and (c) diagnosing the subject as having or as being suspected of having (i) a cancer or a tumor, (ii) an infectious disease that is not a sarbecovirus infectious disease, or (iii) a pathology other than a cancer or a tumor or an infectious disease that is not a sarbecovirus infectious disease when the presence of the complex is detected.

[7654] In some aspects, provided herein are methods of diagnosing a subject as not having or as not being suspected of having (i) a cancer or a tumor, (ii) an infectious disease that is not a sarbecovirus infectious disease, or (iii) a pathology other than a cancer or a tumor or an infectious disease that is not a sarbecovirus infectious disease, comprising (a) contacting a sample obtained from the subject with the antigen binding polypeptides or antigen binding polypeptide complexes or the antibodies or antigen binding fragments thereof disclosed herein; (b) detecting the presence or absence of a complex which contains the polypeptide or a fragment thereof, polypeptide complex or a fragment thereof, or antibody or antigen bindinga fragment thereof and (i) a tumor-associated antigen (TAA) or fragment thereof, (ii) an infectious disease antigen that is not a sarbecovirus antigen or fragment thereof, or (iii) an other-pathology antigen or fragment thereof; and (c) diagnosing the subject as not having or as not being suspected of having (i) a cancer or a tumor, (ii) an infectious disease that is not a sarbecovirus infectious disease, or (iii) a pathology other than a cancer or a tumor or an infectious disease that is not a sarbecovirus infectious disease when the presence of the complex is not detected.

[7655] In some aspects, the samples use in the methods provided herein are a nasal swab, tissue sample, saliva, plasma or blood. In some aspects, the methods provided herein comprise detecting the presence or absence of the virus complex comprises an enzyme linked immunosorbent assay (ELISA), immunospot assay, lateral flow assay, flow cytometry, immunohistochemistry or western blot.

[7656] In some aspects, provided herein are antibodies or an antigen binding fragments thereof, wherein the antibody or antigen binding fragment thereof binds to (i) a tumor-associated antigen (TAA), (ii) an infectious disease antigen that is not a sarbecovirus antigen, or (iii) an other-pathology antigen, and wherein the antibodies or an antigen binding fragments thereof comprise: (a) one or more immunoglobulin light chain constant domain (CL) and (b) one or more immunoglobulin heavy chain 1 constant domain (CH1); and wherein the antibodies or an antigen binding fragments thereof (i) have an isoelectric point (pI), and after administered to a subject has (ii) a higher peak serum levels, and (iii) a reduced clearance levels, as compared to a same antibody or antigen binding fragment thereof not comprising one or more immunoglobulin light chain constant domain (CL) and (b) one or more immunoglobulin heavy chain 1 constant domain (CH1).

[7657] It is to be understood that “a same antibody not comprising a CL and a CH1” refers to an antibody (or antigen binding fragment thereof) having a same amino acid sequence as the reference antibody (or antigen binding fragment thereof) exception made for the CL and the CH1 being absent from the “same antibody not comprising a CL and a CH1.” For example, a reference antibody (or antigen binding fragment thereof) (antibody R, or antigen binding fragment thereof) may comprise an amino acid sequence represented by the formula VL1-CL-VL2-VH2-VH1-CH1, “a same antibody not comprising a CL and a CH1” (antibody R′, or antigen binding fragment thereof) it is to be understood as comprising an amino acid sequence that is represented by the formula VL1-VL2-VH2-VH1, wherein the VL1, the VL2, the VH1, and the VH1 in the antibody R (or antigen binding fragment thereof) comprise an amino acid sequence identical to the amino acid sequence comprised in the VL1, the VL2, the VH1, and the VH1 comprised in the antibody R′ (or antigen binding fragment thereof).

[7658] In some aspects, an antibody or an antigen binding fragment thereof disclosed herein is an IgG, IgM, IgE, IgA or an IgD antibody or an antigen binding fragment thereof. In some aspects, an antibody or an antigen binding fragment thereof disclosed herein is IgG1, IgG2, IgG3 or IgG4. In some aspects, an antibody or an antigen binding fragment thereof disclosed herein is a Fab, scFab, Fab′, F(ab′)₂, Fv or scFv. In some aspects, an antibody or an antigen binding fragment thereof disclosed herein is human or humanized. In some aspects, an antibody or an antigen binding fragment thereof disclosed herein has an isoelectric point (pI) of from about 7 to about 9). In some aspects, an antibody or an antigen binding fragment thereof disclosed herein binds to the (i) tumor-associated antigen (TAA), (ii) infectious disease antigen that is not a sarbecovirus antigen, or (iii) other-pathology antigen with an equilibrium dissociation constant (K_{D})) of from about 10 μM to about 1 pM.

[7659] In some aspects, an antibody or an antigen binding fragment thereof disclosed herein is bispecific, trispecific or tetraspecific and has greater binding affinity to the (i) tumor-associated antigen (TAA), (ii) infectious disease antigen that is not a sarbecovirus antigen, or (iii) other-pathology antigen than a monospecific antibody or an antigen binding fragment thereof that specifically binds to one of the same antigens as the bispecific, trispecific or tetraspecific antibody or an antigen binding fragment thereof. In some aspects, an antibody or an antigen binding fragment thereof disclosed herein is bispecific, trispecific or tetraspecific and has greater binding affinity to the (i) tumor-associated antigen (TAA), (ii) infectious disease antigen that is not a sarbecovirus antigen, or (iii) other-pathology antigen than a mixture of monospecific antibodies or an antigen binding fragments thereof that specifically binds to one of the same antigens as the bispecific, trispecific or tetraspecific antibody or an antigen binding fragment thereof.

[7660] In some aspects, an antibody or an antigen binding fragment thereof disclosed herein comprises one or more variable heavy chain regions (VH) and at least one of the one or more VH has a mutation at an N-glycosylation site. In some aspects, the mutation is at amino acid N62 of the VH region or equivalent thereof. In some aspects, the N62 mutation is N62Q or N62S, or equivalent thereof.

[7661] In some aspects, an antibody or an antigen binding fragment thereof disclosed herein comprises at least one variable heavy chain region (VH) and/or at least one variable light chain region (VL).

[7662] In some aspects, an antibody or an antigen binding fragment thereof disclosed herein comprises:
[7663] (a)
[7664] (i)
[7665] a VL comprising a light chain complementarity determining region 1 (LCDR1), LCDR2, and/or LCDR3 of an antibody selected from the group consisting of losatuxizumab vedotin, utomilumab, urelumab, oleclumab, naptumomab estafenatox, ascrinvacumab, pintumomab, tacatuzumab tetraxetan, nesvacumab, vanucizumab, timolumab, vapaliximab, vepalimomab, enapotamab vedotin, ianalumab, belimumab, tabalumab, tibulizumab, belantamab mafodotin, teclistamab, teclistamab, detumomab, nacolomab tafenatox, eculizumab, lendalizumab, pexelizumab, pozelimab, ravulizumab, tesidolumab, vilobelimab, abagovomab, igovomab, oregovomab, sofituzumab vedotin, cantuzumab mertansine, cantuzuma bravtansine, girentuximab, altumomab pentetate, arcitumomab, besilesomab, bertilimumab, plozalizumab, mogamulizumab, leronlimab, PRO140, rovelizumab, rovelizumab, talacotuzumab, benralizumab, tavolimab, vonlerolizumab, gavilimomab, ziralimumab, fanolesomab, ipilimumab, ruplizumab, toralizumab, dapirolizumab pegol, toralizumab, dapirolizumab pegol, ruplizumab, blinatumomab, inebilizumab, loncastuximab tesirine, SGN-CD19A, tafasitamab, taplitumomab paptox, XMAB-5574, Budoprutug, Obexelimab, duvortuxizumab, englumafusp alfa, Emfizatamab, zeripatamig, siplizumab, blontuvetmab, FBTA05, ibritumomab tiuxetan, obinutuzumab, ocaratuzumab, ocrelizumab, ofatumumab, rituximab, tositumomab, ublituximab, veltuzumab, divozilimab, eramkafusp alfa, ripertamab, zuberitamab, glofitamab, nofetumomab merpentan, samalizumab, imvotamab, odronextamab, plamotamab, bectumomab, inotuzumab ozogamicin, moxetumomab pasudotox, pinatuzumab vedotin, gomiliximab, lumiliximab, inolimomab, inolimomab, daclizumab, camidanluma btesirine, basiliximab, varlilumab, omburtamab, enoblituzumab, vopratelimab, lulizumabpegol, TGN1412, muromonab-CD3, otelixizumab, teplizumab, visilizumab, epcoritamab, epcoritamab, brentuximab vedotin, iratumumab, azintuxizumab vedotin, gemtuzumab ozogamicin, lintuzumab, vadastuximab talirine, naratuximab emtansine, otlertuzumab, lilotomab satetraxetan, tetulomab, daratumumab, isatuximab, foralumab, mosunetuzumab, mosunetuzumab, cedelizumab, ibalizumab, keliximab, priliximab, tregalizumab, zanolimumab, bleselumab, iscalimab, lucatumumab, ravagalimab, selicrelumab, teneliximab, vanalimab, abciximab, bivatuzumab, iomab-B, telimomab aritox, zolimomab aritox, abituzumab, intetumumab, alemtuzumab, tamtuvetmab, lorvotuzumab mertansine, itolizumab, cusatuzumab, vorsetuzumab mafodotin, milatuzumab, iladatuzumab vedotin, polatuzumab vedotin, galiximab, cibisatamab, zolbetuximab, naxitamab, tisotumab vedotin, olendalizumab, pamrevlumab, lacnotuzumab, cabiralizumab, emactuzumab, axatilimab, gimsilumab, lenzilumab, namilumab, tremelimumab, ulocuplumab, tepoditamab, rovalpituzumab tesirine, tarlatamab, demcizumab, navicixizumab, drozitumab, parsatuzumab, depatuxizumab mafodotin, modotuximab, carotuximab, adecatumumab, adecatumumab, oportuzumab monatox, solitomab, tucotuzumab celmoleukin, edrecolomab, catumaxomab, ifabotuzumab, fibatuzumab, zalutumumab, panitumumab, cetuximab, futuximab, imgatuzumab, laprituximab emtansine, matuzumab, necitumumab, nimotuzumab, tomuzotuximab, amivantamab, amivantamab, epitumomab cituxetan, sontuzumab, duligotuzumab, elgemtumab, lumretuzumab, patritumab, seribantumab, zenocutuzumab, sibrotuzumab, burosumab, aprutumab ixadotin, radretumab, pasotuxizumab, farletuzumab, mirvetuximab soravtansine, vantictumab, TRBS07, 3F8, dinutuximab, dinutuximab beta, ecromeximab, mitumomab, andecaliximab, capromab, codrituzumab, glembatumumab vedotin, talquetamab, talquetamab, trevogrumab, indusatumab vedotin, ficlatuzumab, rilotumumab, zatuximab, pentuzimab, pentuzimab, margetuximab, timigutuzumab, trastuzumab, trastuzumab duocarmazine, trastuzumab emtansine, gancotamab, pertuzumab, ertumaxomab, emibetuzumab, telisotuzumab, telisotuzumab vedotin, derlotuximab biotin, apolizumab, onartuzumab, bersanlimab, enlimomabpegol, rontalizumab, sifalimumab, talizumab, ganitumab, istiratumab, robatumumab, teprotumumab, figitumumab, ganitumab, istiratumab, robatumumab, teprotumumab, cixutumumab, dalotuzumab, xentuzumab, dusigitumab, canakinumab, ustekinumab, ustekinumab, ustekinumab, briakinumab, briakinumab, abrezekimab, lebrikizumab, romilkimab, TNX-650, tralokinumab, anrukinzumab, brodalumab, ixekizumab, netakimab, perakizumab, secukinumab, vunakizumab, afasevikumab, afasevikumab, bimekizumab, bimekizumab, remtolumab, bermekimab, lutikizumab, lutikizumab, gevokizumab, cergutuzumab amunaleukin, fletikumab, fezakinumab, brazikumab, guselkumab, mirikizumab, tildrakizumab, risankizumab, flotetuzumab, nemolizumab, pascolizumab, dupilumab, mepolizumab, reslizumab, clazakizumab, elsilimomab, olokizumab, sarilumab, siltuximab, sirukumab, vobarilizumab, tocilizumab, SA237, satralizumab, enokizumab, prezalizumab, natalizumab, abrilumab, abrilumab, vedolizumab, volociximab, tadocizumab, etaracizumab, etrolizumab, spesolimab, vatelizumab, erlizumab, lirilumab, relatlimab, cBR96-doxorubicinimmunoconjugate, odulimomab, efalizumab, ladiratuzumab vedotin, simtuzumab, samrotamab vedotin, aselizumab, lupartumab amadotin, imalumab, carlumab, imaprelimab, amatuximab, amatuximab, anetumab ravtansine, narnatumab, clivatuzumab tetraxetan, pemtumomab, gatipotuzumab, ensituximab, lemalesomab, sulesomab, enfortumab vedotin, racotumomab, monalizumab, brontictuzumab, tarextumab, vesencumab, oxelumab, gilvetmab, tislelizumab, dostarlimab, BCD-100, nivolumab, PDR001, pembrolizumab, pidilizumab, retifanlimab, spartalizumab, sintilimab, cemiplimab, olaratumab, tovetumab, rinucumab, atezolizumab, avelumab, durvalumab, lifastuzumab vedotin, bavituximab, acapatamab, capromab, rosopatamab, nezastomig, pasotuxizumab, pelgifatamab, voxalatamab, cofetuzumab pelidotin, denosumab, rosmantuzumab, cirmtuzumab, atinumab, indatuximab ravtansine, elotuzumab, sirtratumab vedotin, sonepcizumab, vandortuzumab vedotin, minretumomab, satumomab pendetide, maslimomab, ontuxizumab, tenatumomab, fresolimumab, metelimumab, lerdelimumab, tezepelumab, etigilimab, tiragotumab, placulumab, prezalumab, infliximab, nerelimomab, ozoralizumab, adalimumab, afelimomab, certolizumab pegol, golimumab, mapatumumab, conatumumab, lexatumumab, tigatuzumab, sacituzumab govitecan, votumumab, pogalizumab, letolizumab, pankomab, anatumomab mafenatox, enavatuzumab, flanvotumab, brolucizumab, ranibizumab, varisacumab, bevacizumab, faricimab, icrucumab, alacizumab pegol, ramucirumab, pritumumab, and onvatilimab; and/or
[7666] a VH comprising a heavy chain complementarity determining region 1 (HCDR1), HCDR2, and/or HCDR3 of an antibody selected from the group consisting of losatuxizumab vedotin, utomilumab, urelumab, oleclumab, naptumomab estafenatox, ascrinvacumab, pintumomab, tacatuzumab tetraxetan, nesvacumab, vanucizumab, timolumab, vapaliximab, vepalimomab, enapotamab vedotin, ianalumab, belimumab, tabalumab, tibulizumab, belantamab mafodotin, teclistamab, teclistamab, detumomab, nacolomab tafenatox, eculizumab, lendalizumab, pexelizumab, pozelimab, ravulizumab, tesidolumab, vilobelimab, abagovomab, igovomab, oregovomab, sofituzumab vedotin, cantuzumab mertansine, cantuzuma bravtansine, girentuximab, altumomab pentetate, arcitumomab, besilesomab, bertilimumab, plozalizumab, mogamulizumab, leronlimab, PRO140, rovelizumab, rovelizumab, talacotuzumab, benralizumab, tavolimab, vonlerolizumab, gavilimomab, ziralimumab, fanolesomab, ipilimumab, ruplizumab, toralizumab, dapirolizumab pegol, toralizumab, dapirolizumab pegol, ruplizumab, blinatumomab, inebilizumab, loncastuximab tesirine, SGN-CD19A, tafasitamab, taplitumomab paptox, XMAB-5574, Budoprutug, Obexelimab, duvortuxizumab, englumafusp alfa, Emfizatamab, zeripatamig, siplizumab, blontuvetmab, FBTA05, ibritumomab tiuxetan, obinutuzumab, ocaratuzumab, ocrelizumab, ofatumumab, rituximab, tositumomab, ublituximab, veltuzumab, divozilimab, eramkafusp alfa, ripertamab, zuberitamab, glofitamab, nofetumomab merpentan, samalizumab, imvotamab, odronextamab, plamotamab, bectumomab, inotuzumab ozogamicin, moxetumomab pasudotox, pinatuzumab vedotin, gomiliximab, lumiliximab, inolimomab, inolimomab, daclizumab, camidanluma btesirine, basiliximab, varlilumab, omburtamab, enoblituzumab, vopratelimab, lulizumabpegol, TGN1412, muromonab-CD3, otelixizumab, teplizumab, visilizumab, epcoritamab, epcoritamab, brentuximab vedotin, iratumumab, azintuxizumab vedotin, gemtuzumab ozogamicin, lintuzumab, vadastuximab talirine, naratuximab emtansine, otlertuzumab, lilotomab satetraxetan, tetulomab, daratumumab, isatuximab, foralumab, mosunetuzumab, mosunetuzumab, cedelizumab, ibalizumab, keliximab, priliximab, tregalizumab, zanolimumab, bleselumab, iscalimab, lucatumumab, ravagalimab, selicrelumab, teneliximab, vanalimab, abciximab, bivatuzumab, iomab-B, telimomab aritox, zolimomab aritox, abituzumab, intetumumab, alemtuzumab, tamtuvetmab, lorvotuzumab mertansine, itolizumab, cusatuzumab, vorsetuzumab mafodotin, milatuzumab, iladatuzumab vedotin, polatuzumab vedotin, galiximab, cibisatamab, zolbetuximab, naxitamab, tisotumab vedotin, olendalizumab, pamrevlumab, lacnotuzumab, cabiralizumab, emactuzumab, axatilimab, gimsilumab, lenzilumab, namilumab, tremelimumab, ulocuplumab, tepoditamab, rovalpituzumab tesirine, tarlatamab, demcizumab, navicixizumab, drozitumab, parsatuzumab, depatuxizumab mafodotin, modotuximab, carotuximab, adecatumumab, adecatumumab, oportuzumab monatox, solitomab, tucotuzumab celmoleukin, edrecolomab, catumaxomab, ifabotuzumab, fibatuzumab, zalutumumab, panitumumab, cetuximab, futuximab, imgatuzumab, laprituximab emtansine, matuzumab, necitumumab, nimotuzumab, tomuzotuximab, amivantamab, amivantamab, epitumomab cituxetan, sontuzumab, duligotuzumab, elgemtumab, lumretuzumab, patritumab, seribantumab, zenocutuzumab, sibrotuzumab, burosumab, aprutumab ixadotin, radretumab, pasotuxizumab, farletuzumab, mirvetuximab soravtansine, vantictumab, TRBS07, 3F8, dinutuximab, dinutuximab beta, ecromeximab, mitumomab, andecaliximab, capromab, codrituzumab, glembatumumab vedotin, talquetamab, talquetamab, trevogrumab, indusatumab vedotin, ficlatuzumab, rilotumumab, zatuximab, pentuzimab, pentuzimab, margetuximab, timigutuzumab, trastuzumab, trastuzumab duocarmazine, trastuzumab emtansine, gancotamab, pertuzumab, ertumaxomab, emibetuzumab, telisotuzumab, telisotuzumab vedotin, derlotuximab biotin, apolizumab, onartuzumab, bersanlimab, enlimomabpegol, rontalizumab, sifalimumab, talizumab, ganitumab, istiratumab, robatumumab, teprotumumab, figitumumab, ganitumab, istiratumab, robatumumab, teprotumumab, cixutumumab, dalotuzumab, xentuzumab, dusigitumab, canakinumab, ustekinumab, ustekinumab, ustekinumab, briakinumab, briakinumab, abrezekimab, lebrikizumab, romilkimab, TNX-650, tralokinumab, anrukinzumab, brodalumab, ixekizumab, netakimab, perakizumab, secukinumab, vunakizumab, afasevikumab, afasevikumab, bimekizumab, bimekizumab, remtolumab, bermekimab, lutikizumab, lutikizumab, gevokizumab, cergutuzumab amunaleukin, fletikumab, fezakinumab, brazikumab, guselkumab, mirikizumab, tildrakizumab, risankizumab, flotetuzumab, nemolizumab, pascolizumab, dupilumab, mepolizumab, reslizumab, clazakizumab, elsilimomab, olokizumab, sarilumab, siltuximab, sirukumab, vobarilizumab, tocilizumab, SA237, satralizumab, enokizumab, prezalizumab, natalizumab, abrilumab, abrilumab, vedolizumab, volociximab, tadocizumab, etaracizumab, etrolizumab, spesolimab, vatelizumab, erlizumab, lirilumab, relatlimab, cBR96-doxorubicinimmunoconjugate, odulimomab, efalizumab, ladiratuzumab vedotin, simtuzumab, samrotamab vedotin, aselizumab, lupartumab amadotin, imalumab, carlumab, imaprelimab, amatuximab, amatuximab, anetumab ravtansine, narnatumab, clivatuzumab tetraxetan, pemtumomab, gatipotuzumab, ensituximab, lemalesomab, sulesomab, enfortumab vedotin, racotumomab, monalizumab, brontictuzumab, tarextumab, vesencumab, oxelumab, gilvetmab, tislelizumab, dostarlimab, BCD-100, nivolumab, PDR001, pembrolizumab, pidilizumab, retifanlimab, spartalizumab, sintilimab, cemiplimab, olaratumab, tovetumab, rinucumab, atezolizumab, avelumab, durvalumab, lifastuzumab vedotin, bavituximab, acapatamab, capromab, rosopatamab, nezastomig, pasotuxizumab, pelgifatamab, voxalatamab, cofetuzumab pelidotin, denosumab, rosmantuzumab, cirmtuzumab, atinumab, indatuximab ravtansine, elotuzumab, sirtratumab vedotin, sonepcizumab, vandortuzumab vedotin, minretumomab, satumomab pendetide, maslimomab, ontuxizumab, tenatumomab, fresolimumab, metelimumab, lerdelimumab, tezepelumab, etigilimab, tiragotumab, placulumab, prezalumab, infliximab, nerelimomab, ozoralizumab, adalimumab, afelimomab, certolizumab pegol, golimumab, mapatumumab, conatumumab, lexatumumab, tigatuzumab, sacituzumab govitecan, votumumab, pogalizumab, letolizumab, pankomab, anatumomab mafenatox, enavatuzumab, flanvotumab, brolucizumab, ranibizumab, varisacumab, bevacizumab, faricimab, icrucumab, alacizumab pegol, ramucirumab, pritumumab, and onvatilimab; or
[7667] (ii)
[7668] VL comprising a VL of an antibody selected from the group consisting of losatuxizumab vedotin, utomilumab, urelumab, oleclumab, naptumomab estafenatox, ascrinvacumab, pintumomab, tacatuzumab tetraxetan, nesvacumab, vanucizumab, timolumab, vapaliximab, vepalimomab, enapotamab vedotin, ianalumab, belimumab, tabalumab, tibulizumab, belantamab mafodotin, teclistamab, teclistamab, detumomab, nacolomab tafenatox, eculizumab, lendalizumab, pexelizumab, pozelimab, ravulizumab, tesidolumab, vilobelimab, abagovomab, igovomab, oregovomab, sofituzumab vedotin, cantuzumab mertansine, cantuzuma bravtansine, girentuximab, altumomab pentetate, arcitumomab, besilesomab, bertilimumab, plozalizumab, mogamulizumab, leronlimab, PRO140, rovelizumab, rovelizumab, talacotuzumab, benralizumab, tavolimab, vonlerolizumab, gavilimomab, ziralimumab, fanolesomab, ipilimumab, ruplizumab, toralizumab, dapirolizumab pegol, toralizumab, dapirolizumab pegol, ruplizumab, blinatumomab, inebilizumab, loncastuximab tesirine, SGN-CD19A, tafasitamab, taplitumomab paptox, XMAB-5574, Budoprutug, Obexelimab, duvortuxizumab, englumafusp alfa, Emfizatamab, zeripatamig, siplizumab, blontuvetmab, FBTA05, ibritumomab tiuxetan, obinutuzumab, ocaratuzumab, ocrelizumab, ofatumumab, rituximab, tositumomab, ublituximab, veltuzumab, divozilimab, eramkafusp alfa, ripertamab, zuberitamab, glofitamab, nofetumomab merpentan, samalizumab, imvotamab, odronextamab, plamotamab, bectumomab, inotuzumab ozogamicin, moxetumomab pasudotox, pinatuzumab vedotin, gomiliximab, lumiliximab, inolimomab, inolimomab, daclizumab, camidanluma btesirine, basiliximab, varlilumab, omburtamab, enoblituzumab, vopratelimab, lulizumabpegol, TGN1412, muromonab-CD3, otelixizumab, teplizumab, visilizumab, epcoritamab, epcoritamab, brentuximab vedotin, iratumumab, azintuxizumab vedotin, gemtuzumab ozogamicin, lintuzumab, vadastuximab talirine, naratuximab emtansine, otlertuzumab, lilotomab satetraxetan, tetulomab, daratumumab, isatuximab, foralumab, mosunetuzumab, mosunetuzumab, cedelizumab, ibalizumab, keliximab, priliximab, tregalizumab, zanolimumab, bleselumab, iscalimab, lucatumumab, ravagalimab, selicrelumab, teneliximab, vanalimab, abciximab, bivatuzumab, iomab-B, telimomab aritox, zolimomab aritox, abituzumab, intetumumab, alemtuzumab, tamtuvetmab, lorvotuzumab mertansine, itolizumab, cusatuzumab, vorsetuzumab mafodotin, milatuzumab, iladatuzumab vedotin, polatuzumab vedotin, galiximab, cibisatamab, zolbetuximab, naxitamab, tisotumab vedotin, olendalizumab, pamrevlumab, lacnotuzumab, cabiralizumab, emactuzumab, axatilimab, gimsilumab, lenzilumab, namilumab, tremelimumab, ulocuplumab, tepoditamab, rovalpituzumab tesirine, tarlatamab, demcizumab, navicixizumab, drozitumab, parsatuzumab, depatuxizumab mafodotin, modotuximab, carotuximab, adecatumumab, adecatumumab, oportuzumab monatox, solitomab, tucotuzumab celmoleukin, edrecolomab, catumaxomab, ifabotuzumab, fibatuzumab, zalutumumab, panitumumab, cetuximab, futuximab, imgatuzumab, laprituximab emtansine, matuzumab, necitumumab, nimotuzumab, tomuzotuximab, amivantamab, amivantamab, epitumomab cituxetan, sontuzumab, duligotuzumab, elgemtumab, lumretuzumab, patritumab, seribantumab, zenocutuzumab, sibrotuzumab, burosumab, aprutumab ixadotin, radretumab, pasotuxizumab, farletuzumab, mirvetuximab soravtansine, vantictumab, TRBS07, 3F8, dinutuximab, dinutuximab beta, ecromeximab, mitumomab, andecaliximab, capromab, codrituzumab, glembatumumab vedotin, talquetamab, talquetamab, trevogrumab, indusatumab vedotin, ficlatuzumab, rilotumumab, zatuximab, pentuzimab, pentuzimab, margetuximab, timigutuzumab, trastuzumab, trastuzumab duocarmazine, trastuzumab emtansine, gancotamab, pertuzumab, ertumaxomab, emibetuzumab, telisotuzumab, telisotuzumab vedotin, derlotuximab biotin, apolizumab, onartuzumab, bersanlimab, enlimomabpegol, rontalizumab, sifalimumab, talizumab, ganitumab, istiratumab, robatumumab, teprotumumab, figitumumab, ganitumab, istiratumab, robatumumab, teprotumumab, cixutumumab, dalotuzumab, xentuzumab, dusigitumab, canakinumab, ustekinumab, ustekinumab, ustekinumab, briakinumab, briakinumab, abrezekimab, lebrikizumab, romilkimab, TNX-650, tralokinumab, anrukinzumab, brodalumab, ixekizumab, netakimab, perakizumab, secukinumab, vunakizumab, afasevikumab, afasevikumab, bimekizumab, bimekizumab, remtolumab, bermekimab, lutikizumab, lutikizumab, gevokizumab, cergutuzumab amunaleukin, fletikumab, fezakinumab, brazikumab, guselkumab, mirikizumab, tildrakizumab, risankizumab, flotetuzumab, nemolizumab, pascolizumab, dupilumab, mepolizumab, reslizumab, clazakizumab, elsilimomab, olokizumab, sarilumab, siltuximab, sirukumab, vobarilizumab, tocilizumab, SA237, satralizumab, enokizumab, prezalizumab, natalizumab, abrilumab, abrilumab, vedolizumab, volociximab, tadocizumab, etaracizumab, etrolizumab, spesolimab, vatelizumab, erlizumab, lirilumab, relatlimab, cBR96-doxorubicinimmunoconjugate, odulimomab, efalizumab, ladiratuzumab vedotin, simtuzumab, samrotamab vedotin, aselizumab, lupartumab amadotin, imalumab, carlumab, imaprelimab, amatuximab, amatuximab, anetumab ravtansine, narnatumab, clivatuzumab tetraxetan, pemtumomab, gatipotuzumab, ensituximab, lemalesomab, sulesomab, enfortumab vedotin, racotumomab, monalizumab, brontictuzumab, tarextumab, vesencumab, oxelumab, gilvetmab, tislelizumab, dostarlimab, BCD-100, nivolumab, PDR001, pembrolizumab, pidilizumab, retifanlimab, spartalizumab, sintilimab, cemiplimab, olaratumab, tovetumab, rinucumab, atezolizumab, avelumab, durvalumab, lifastuzumab vedotin, bavituximab, acapatamab, capromab, rosopatamab, nezastomig, pasotuxizumab, pelgifatamab, voxalatamab, cofetuzumab pelidotin, denosumab, rosmantuzumab, cirmtuzumab, atinumab, indatuximab ravtansine, elotuzumab, sirtratumab vedotin, sonepcizumab, vandortuzumab vedotin, minretumomab, satumomab pendetide, maslimomab, ontuxizumab, tenatumomab, fresolimumab, metelimumab, lerdelimumab, tezepelumab, etigilimab, tiragotumab, placulumab, prezalumab, infliximab, nerelimomab, ozoralizumab, adalimumab, afelimomab, certolizumab pegol, golimumab, mapatumumab, conatumumab, lexatumumab, tigatuzumab, sacituzumab govitecan, votumumab, pogalizumab, letolizumab, pankomab, anatumomab mafenatox, enavatuzumab, flanvotumab, brolucizumab, ranibizumab, varisacumab, bevacizumab, faricimab, icrucumab, alacizumab pegol, ramucirumab, pritumumab, and onvatilimab; and/or
[7669] a VH comprising a VH of an antibody selected from the group consisting of losatuxizumab vedotin, utomilumab, urelumab, oleclumab, naptumomab estafenatox, ascrinvacumab, pintumomab, tacatuzumab tetraxetan, nesvacumab, vanucizumab, timolumab, vapaliximab, vepalimomab, enapotamab vedotin, ianalumab, belimumab, tabalumab, tibulizumab, belantamab mafodotin, teclistamab, teclistamab, detumomab, nacolomab tafenatox, eculizumab, lendalizumab, pexelizumab, pozelimab, ravulizumab, tesidolumab, vilobelimab, abagovomab, igovomab, oregovomab, sofituzumab vedotin, cantuzumab mertansine, cantuzuma bravtansine, girentuximab, altumomab pentetate, arcitumomab, besilesomab, bertilimumab, plozalizumab, mogamulizumab, leronlimab, PRO140, rovelizumab, rovelizumab, talacotuzumab, benralizumab, tavolimab, vonlerolizumab, gavilimomab, ziralimumab, fanolesomab, ipilimumab, ruplizumab, toralizumab, dapirolizumab pegol, toralizumab, dapirolizumab pegol, ruplizumab, blinatumomab, inebilizumab, loncastuximab tesirine, SGN-CD19A, tafasitamab, taplitumomab paptox, XMAB-5574, Budoprutug, Obexelimab, duvortuxizumab, englumafusp alfa, Emfizatamab, zeripatamig, siplizumab, blontuvetmab, FBTA05, ibritumomab tiuxetan, obinutuzumab, ocaratuzumab, ocrelizumab, ofatumumab, rituximab, tositumomab, ublituximab, veltuzumab, divozilimab, eramkafusp alfa, ripertamab, zuberitamab, glofitamab, nofetumomab merpentan, samalizumab, imvotamab, odronextamab, plamotamab, bectumomab, inotuzumab ozogamicin, moxetumomab pasudotox, pinatuzumab vedotin, gomiliximab, lumiliximab, inolimomab, inolimomab, daclizumab, camidanluma btesirine, basiliximab, varlilumab, omburtamab, enoblituzumab, vopratelimab, lulizumabpegol, TGN1412, muromonab-CD3, otelixizumab, teplizumab, visilizumab, epcoritamab, epcoritamab, brentuximab vedotin, iratumumab, azintuxizumab vedotin, gemtuzumab ozogamicin, lintuzumab, vadastuximab talirine, naratuximab emtansine, otlertuzumab, lilotomab satetraxetan, tetulomab, daratumumab, isatuximab, foralumab, mosunetuzumab, mosunetuzumab, cedelizumab, ibalizumab, keliximab, priliximab, tregalizumab, zanolimumab, bleselumab, iscalimab, lucatumumab, ravagalimab, selicrelumab, teneliximab, vanalimab, abciximab, bivatuzumab, iomab-B, telimomab aritox, zolimomab aritox, abituzumab, intetumumab, alemtuzumab, tamtuvetmab, lorvotuzumab mertansine, itolizumab, cusatuzumab, vorsetuzumab mafodotin, milatuzumab, iladatuzumab vedotin, polatuzumab vedotin, galiximab, cibisatamab, zolbetuximab, naxitamab, tisotumab vedotin, olendalizumab, pamrevlumab, lacnotuzumab, cabiralizumab, emactuzumab, axatilimab, gimsilumab, lenzilumab, namilumab, tremelimumab, ulocuplumab, tepoditamab, rovalpituzumab tesirine, tarlatamab, demcizumab, navicixizumab, drozitumab, parsatuzumab, depatuxizumab mafodotin, modotuximab, carotuximab, adecatumumab, adecatumumab, oportuzumab monatox, solitomab, tucotuzumab celmoleukin, edrecolomab, catumaxomab, ifabotuzumab, fibatuzumab, zalutumumab, panitumumab, cetuximab, futuximab, imgatuzumab, laprituximab emtansine, matuzumab, necitumumab, nimotuzumab, tomuzotuximab, amivantamab, amivantamab, epitumomab cituxetan, sontuzumab, duligotuzumab, elgemtumab, lumretuzumab, patritumab, seribantumab, zenocutuzumab, sibrotuzumab, burosumab, aprutumab ixadotin, radretumab, pasotuxizumab, farletuzumab, mirvetuximab soravtansine, vantictumab, TRBS07, 3F8, dinutuximab, dinutuximab beta, ecromeximab, mitumomab, andecaliximab, capromab, codrituzumab, glembatumumab vedotin, talquetamab, talquetamab, trevogrumab, indusatumab vedotin, ficlatuzumab, rilotumumab, zatuximab, pentuzimab, pentuzimab, margetuximab, timigutuzumab, trastuzumab, trastuzumab duocarmazine, trastuzumab emtansine, gancotamab, pertuzumab, ertumaxomab, emibetuzumab, telisotuzumab, telisotuzumab vedotin, derlotuximab biotin, apolizumab, onartuzumab, bersanlimab, enlimomabpegol, rontalizumab, sifalimumab, talizumab, ganitumab, istiratumab, robatumumab, teprotumumab, figitumumab, ganitumab, istiratumab, robatumumab, teprotumumab, cixutumumab, dalotuzumab, xentuzumab, dusigitumab, canakinumab, ustekinumab, ustekinumab, ustekinumab, briakinumab, briakinumab, abrezekimab, lebrikizumab, romilkimab, TNX-650, tralokinumab, anrukinzumab, brodalumab, ixekizumab, netakimab, perakizumab, secukinumab, vunakizumab, afascvikumab, afascvikumab, bimekizumab, bimekizumab, remtolumab, bermekimab, lutikizumab, lutikizumab, gevokizumab, cergutuzumab amunaleukin, fletikumab, fezakinumab, brazikumab, guselkumab, mirikizumab, tildrakizumab, risankizumab, flotetuzumab, nemolizumab, pascolizumab, dupilumab, mepolizumab, reslizumab, clazakizumab, elsilimomab, olokizumab, sarilumab, siltuximab, sirukumab, vobarilizumab, tocilizumab, SA237, satralizumab, enokizumab, prezalizumab, natalizumab, abrilumab, abrilumab, vedolizumab, volociximab, tadocizumab, etaracizumab, etrolizumab, spesolimab, vatelizumab, erlizumab, lirilumab, relatlimab, cBR96-doxorubicinimmunoconjugate, odulimomab, efalizumab, ladiratuzumab vedotin, simtuzumab, samrotamab vedotin, aselizumab, lupartumab amadotin, imalumab, carlumab, imaprelimab, amatuximab, amatuximab, anetumab ravtansine, narnatumab, clivatuzumab tetraxetan, pemtumomab, gatipotuzumab, ensituximab, lemalesomab, sulesomab, enfortumab vedotin, racotumomab, monalizumab, brontictuzumab, tarextumab, vesencumab, oxelumab, gilvetmab, tislelizumab, dostarlimab, BCD-100, nivolumab, PDR001, pembrolizumab, pidilizumab, retifanlimab, spartalizumab, sintilimab, cemiplimab, olaratumab, tovetumab, rinucumab, atezolizumab, avelumab, durvalumab, lifastuzumab vedotin, bavituximab, acapatamab, capromab, rosopatamab, nezastomig, pasotuxizumab, pelgifatamab, voxalatamab, cofetuzumab pelidotin, denosumab, rosmantuzumab, cirmtuzumab, atinumab, indatuximab ravtansine, elotuzumab, sirtratumab vedotin, sonepcizumab, vandortuzumab vedotin, minretumomab, satumomab pendetide, maslimomab, ontuxizumab, tenatumomab, fresolimumab, metelimumab, lerdelimumab, tezepelumab, etigilimab, tiragotumab, placulumab, prezalumab, infliximab, nerelimomab, ozoralizumab, adalimumab, afelimomab, certolizumab pegol, golimumab, mapatumumab, conatumumab, lexatumumab, tigatuzumab, sacituzumab govitecan, votumumab, pogalizumab, letolizumab, pankomab, anatumomab mafenatox, enavatuzumab, flanvotumab, brolucizumab, ranibizumab, varisacumab, bevacizumab, faricimab, icrucumab, alacizumab pegol, ramucirumab, pritumumab, and onvatilimab; or
[7670] (b)
[7671] (i)
[7672] a VL comprising a light chain complementarity determining region 1 (LCDR1), LCDR2, and/or LCDR3 of an antibody selected from the group consisting of libivirumab, rmab, rivabazumab pegol, setoxaximab, suvizumab, suvratoxumab, sevirumab, pritoxaximab, porgaviximab, REGN-EB3, obiltoxaximab, gedivumab, foravirumab, larcaviximab, motavizumab, palivizumab, rafivirumab, regavirumab, tuvirumab, cosfroviximab, felvizumab, atidortoxumab, edobacomab, nebacumab, pateclizumab, raxibacumab, urtoxazumab, tosatoxumab, berlimatoxumab, CR6261, diridavumab, firivumab, lesofavumab, navivumab, exbivirumab, lenvervimab, bavituximab, bezlotoxumab, efungumab, leronlimab, nirsevimab, pagibaximab, panobacumab, tefibazumab, ansuvimab, atoltivimab, maftivimab, and odesivimab; and/or
[7673] a VH comprising a heavy chain complementarity determining region 1 (HCDR1), HCDR2, and/or HCDR3 of an antibody selected from the group consisting of libivirumab, rmab, rivabazumab pegol, setoxaximab, suvizumab, suvratoxumab, sevirumab, pritoxaximab, porgaviximab, REGN-EB3, obiltoxaximab, gedivumab, foravirumab, larcaviximab, motavizumab, palivizumab, rafivirumab, regavirumab, tuvirumab, cosfroviximab, felvizumab, atidortoxumab, edobacomab, nebacumab, pateclizumab, raxibacumab, urtoxazumab, tosatoxumab, berlimatoxumab, CR6261, diridavumab, firivumab, lesofavumab, navivumab, exbivirumab, lenvervimab, bavituximab, bezlotoxumab, efungumab, leronlimab, nirsevimab, pagibaximab, panobacumab, tefibazumab, ansuvimab, atoltivimab, maftivimab, and odesivimab; or
[7674] (ii)
[7675] a VL comprising a VL of an antibody selected from the group consisting of libivirumab, rmab, rivabazumab pegol, setoxaximab, suvizumab, suvratoxumab, sevirumab, pritoxaximab, porgaviximab, REGN-EB3, obiltoxaximab, gedivumab, foravirumab, larcaviximab, motavizumab, palivizumab, rafivirumab, regavirumab, tuvirumab, cosfroviximab, felvizumab, atidortoxumab, edobacomab, nebacumab, pateclizumab, raxibacumab, urtoxazumab, tosatoxumab, berlimatoxumab, CR6261, diridavumab, firivumab, lesofavumab, navivumab, exbivirumab, lenvervimab, bavituximab, bezlotoxumab, efungumab, leronlimab, nirsevimab, pagibaximab, panobacumab, tefibazumab, ansuvimab, atoltivimab, maftivimab, and odesivimab; and/or
[7676] a VH comprising a VH of an antibody selected from the group consisting of libivirumab, rmab, rivabazumab pegol, setoxaximab, suvizumab, suvratoxumab, sevirumab, pritoxaximab, porgaviximab, REGN-EB3, obiltoxaximab, gedivumab, foravirumab, larcaviximab, motavizumab, palivizumab, rafivirumab, regavirumab, tuvirumab, cosfroviximab, felvizumab, atidortoxumab, edobacomab, nebacumab, pateclizumab, raxibacumab, urtoxazumab, tosatoxumab, berlimatoxumab, CR6261, diridavumab, firivumab, lesofavumab, navivumab, exbivirumab, lenvervimab, bavituximab, bezlotoxumab, efungumab, leronlimab, nirsevimab, pagibaximab, panobacumab, tefibazumab, ansuvimab, atoltivimab, maftivimab, and odesivimab; or
[7677] (c)
[7678] (i)
[7679] a VL comprising a light chain complementarity determining region 1 (LCDR1), LCDR2, and/or LCDR3 of an antibody selected from the group consisting of aducanumab, alirocumab, frovocimab, lodelcizumab, bococizumab, evolocumab, ralpancizumab, anifrolumab, atorolimumab, bapineuzumab, bedinvetmab, begelomab, biciromab, bimagrumab, birtamimab, blosozumab, burosumab, caplacizumab, concizumab, crenezumab, crizanlizumab, crotedumab, dezamizumab, domagrozumab, donanemab, eldelumab, elezanumab, emapalumab, emicizumab, eptinezumab, erenumab, evinacumab, faralimomab, fasinumab, fontolizumab, fremanezumab, frunevetmab, fulranumab, galcanezumab, gantenerumab, gosuranemab, idarucizumab, imciromab, inclacumab, lampalizumab, lanadelumab, landogrozumab, lecanemab, ligelizumab, marstacimab, mavrilimumab, morolimumab, NEOD001, omalizumab, oMS721, orticumab, otilimab, ozanezumab, ponezumab, prasinezumab, quilizumab, ranevetmab, refanezumab, roledumab, romosozumab, rozanolixizumab, setrusumab, SHP647, solanezumab, stamulumab, suptavumab, sutimlimab, tanezumab, crovalimab, and lokivetmab; and/or a VH comprising a heavy chain complementarity determining region 1 (HCDR1), HCDR2, and/or HCDR3 of an antibody selected from the group consisting of aducanumab, alirocumab, frovocimab, lodelcizumab, bococizumab, evolocumab, ralpancizumab, anifrolumab, atorolimumab, bapineuzumab, bedinvetmab, begelomab, biciromab, bimagrumab, birtamimab, blosozumab, burosumab, caplacizumab, concizumab, crenezumab, crizanlizumab, crotedumab, dezamizumab, domagrozumab, donanemab, eldelumab, elezanumab, emapalumab, emicizumab, eptinezumab, erenumab, evinacumab, faralimomab, fasinumab, fontolizumab, fremanezumab, frunevetmab, fulranumab, galcanezumab, gantenerumab, gosuranemab, idarucizumab, imciromab, inclacumab, lampalizumab, lanadelumab, landogrozumab, lecanemab, ligelizumab, marstacimab, mavrilimumab, morolimumab, NEOD001, omalizumab, oMS721, orticumab, otilimab, ozanezumab, ponezumab, prasinezumab, quilizumab, ranevetmab, refanezumab, roledumab, romosozumab, rozanolixizumab, setrusumab, SHP647, solanezumab, stamulumab, suptavumab, sutimlimab, tanezumab, crovalimab, and lokivetmab; or
[7680] (ii)
[7681] a VL comprising a VL of an antibody selected from the group consisting of aducanumab, alirocumab, frovocimab, lodelcizumab, bococizumab, evolocumab, ralpancizumab, anifrolumab, atorolimumab, bapineuzumab, bedinvetmab, begelomab, biciromab, bimagrumab, birtamimab, blosozumab, burosumab, caplacizumab, concizumab, crenezumab, crizanlizumab, crotedumab, dezamizumab, domagrozumab, donanemab, eldelumab, elezanumab, emapalumab, emicizumab, eptinezumab, erenumab, evinacumab, faralimomab, fasinumab, fontolizumab, fremanezumab, frunevetmab, fulranumab, galcanezumab, gantenerumab, gosuranemab, idarucizumab, imciromab, inclacumab, lampalizumab, lanadelumab, landogrozumab, lecanemab, ligelizumab, marstacimab, mavrilimumab, morolimumab, NEOD001, omalizumab, oMS721, orticumab, otilimab, ozanezumab, ponezumab, prasinezumab, quilizumab, ranevetmab, refanezumab, roledumab, romosozumab, rozanolixizumab, setrusumab, SHP647, solanezumab, stamulumab, suptavumab, sutimlimab, tanezumab, crovalimab, and lokivetmab; and/or a VH comprising a VH of an antibody selected from the group consisting of aducanumab, alirocumab, frovocimab, lodelcizumab, bococizumab, evolocumab, ralpancizumab, anifrolumab, atorolimumab, bapineuzumab, bedinvetmab, begelomab, biciromab, bimagrumab, birtamimab, blosozumab, burosumab, caplacizumab, concizumab, crenezumab, crizanlizumab, crotedumab, dezamizumab, domagrozumab, donanemab, eldelumab, elezanumab, emapalumab, emicizumab, eptinezumab, erenumab, evinacumab, faralimomab, fasinumab, fontolizumab, fremanezumab, frunevetmab, fulranumab, galcanezumab, gantenerumab, gosuranemab, idarucizumab, imciromab, inclacumab, lampalizumab, lanadelumab, landogrozumab, lecanemab, ligelizumab, marstacimab, mavrilimumab, morolimumab, NEOD001, omalizumab, oMS721, orticumab, otilimab, ozanezumab, ponezumab, prasinezumab, quilizumab, ranevetmab, refanezumab, roledumab, romosozumab, rozanolixizumab, setrusumab, SHP647, solanezumab, stamulumab, suptavumab, sutimlimab, tanezumab, crovalimab, and lokivetmab.

[7682] In some aspects, an antibody or an antigen binding fragment thereof disclosed herein comprises at least one variable light chain region (VL). In some aspects, the at least one VL comprises:
[7683] (a)
[7684] (i) a complementarity determining region (CDR) 1 having an amino acid sequence at least 65%, at least 70%, at least 75%, at least 80%, at least 85%, at least 90%, at least 95%, at least 99%, or 100% identical to any one of SEQ ID NOs: 1096, 1103, 1110, 1120, 1127, 1134, 1141, 1148, 1155, 1162, 1169, 1174, 1181, 1188, 1199, 1211, 1221, 1228, 1235, 1247, 1254, 1261, 1266, 1271, 1278, 1285, 1292, 1299, 1306, 1313, 1319, 1326, 1339, 1352, 1359, 1366, 1373, 1382, 1394, 1401, 1408, 1414, 1421, 1428, 1441, 1448, 1455, 1461, 1468, 1475, 1488, 1495, 1508, 1519, 1526, 1531, 1538, 1544, 1556, 1568, 1574, 1581, 1594, 1601, 1608, 1615, 1622, 1629, 1636, 1643, 1650, 1657, 1672, 1679, 1689, 1697, 1708, 1715, 1718, 1723, 1727, 1738, 1743, 1752, 1761, 1763, 1769, 1776, and 1786;
[7685] (ii) a CDR2 having an amino acid sequence at least 65%, at least 70%, at least 75%, at least 80%, at least 85%, at least 90%, at least 95%, at least 99%, or 100% identical to any one of amino acid sequences AAS, APS, AT, ATS, DAS, DDG, DDS, DT, DTS, DVS, EAS, FTS, GAF, GAN, GAS, GAT, GIS, GKN, GNS, HTS, KVS, LAS, LGS, LVS, NAK, NTN, QMS, RMS, RTS, SAS, TTS, WAS, YAS, YAT, YGS, YRS, and YTS or an amino acid sequence at least 65%, at least 70%, at least 75%, at least 80%, at least 85%, at least 90%, at least 95%, at least 99%, or 100% identical to any one of SEQ ID NOs: 1200, 1212, 1680, 1690, 1698, 1709, 1728, 1739, 1744, 1753, 1770, and 1777; and
[7686] (iii) a CDR3 having an amino acid sequence at least 65%, at least 70%, at least 75%, at least 80%, at least 85%, at least 90%, at least 95%, at least 99%, or 100% identical to any one of SEQ ID NOs: 1097, 1104, 1111, 1121, 1128, 1135, 1142, 1149, 1156, 1163, 1170, 1175, 1182, 1189, 1195, 1201, 1207, 1213, 1222, 1229, 1236, 2009, 1248, 1255, 1262, 1267, 1272, 1279, 1286, 1293, 1300, 1307, 1320, 1327, 1333, 1340, 1346, 1353, 1360, 1367, 1374, 1383, 1389, 1395, 1402, 1409, 1415, 1422, 1429, 1435, 1442, 1449, 1456, 1462, 1469, 1476, 1482, 1489, 1496, 1502, 1509, 1513, 1520, 1532, 1539, 1545, 1557, 1562, 1569, 1575, 1582, 1588, 1595, 1602, 1609, 1616, 1623, 1630, 1637, 1644, 1651, 1658, 1663, 1673, 1681, 1691, 1699, 1710, 1729, 1735, 1745, 1751, 1754, 1778, 1787, and 1976; or
[7687] (b)
[7688] (i) a CDR1 having an amino acid sequence at least 65%, at least 70%, at least 75%, at least 80%, at least 85%, at least 90%, at least 95%, at least 99%, or 100% identical to any one of SEQ ID NOs: 1428, 1793, 1798, 1810, 1817, 1824, 1977, 1985, 1993 and 2001;
[7689] (ii) a CDR2 having an amino acid sequence at least 65%, at least 70%, at least 75%, at least 80%, at least 85%, at least 90%, at least 95%, at least 99%, or 100% identical to any one of amino acid sequences YTS, DTS, GAS, and AAS or an amino acid sequence at least 65%, at least 70%, at least 75%, at least 80%, at least 85%, at least 90%, at least 95%, at least 99%, or 100% identical to any one of SEQ ID NOs: 1978, 1986, 1994, and 2002; and
[7690] (iii) a CDR3 having an amino acid sequence at least 65%, at least 70%, at least 75%, at least 80%, at least 85%, at least 90%, at least 95%, at least 99%, or 100% identical to any one of SEQ ID NOs: 1229, 1799, 1805, 1811, 1818, 1825, 1979, 1987, 1995, and 2003; or
[7691] (c)
[7692] (i) a CDR1 having an amino acid sequence at least 65%, at least 70%, at least 75%, at least 80%, at least 85%, at least 90%, at least 95%, at least 99%, or 100% identical to any one of SEQ ID NOs: 1120, 1228, 1359, 1519, 1831, 1838, 1845, 1852, 1859, 1866, 1872, 1878, 1885, 1891, 1898, 1905, 1911, 1917, 1924, 1931, 1938, 1945, and 1963;
[7693] (ii) a CDR2 having an amino acid sequence at least 65%, at least 70%, at least 75%, at least 80%, at least 85%, at least 90%, at least 95%, at least 99%, or 100% identical to any one of amino acid sequences AAS, AVS, DAS, DNN, EDN, EVS, GAS, GNG, KAS, KVS, LVS, NTD, STS, WAS, and YTS; and
[7694] (iii) a CDR3 having an amino acid sequence at least 65%, at least 70%, at least 75%, at least 80%, at least 85%, at least 90%, at least 95%, at least 99%, or 100% identical to any one of SEQ ID NOs: 1360, 1832, 1839, 1846, 1853, 1860, 1867, 1873, 1879, 1886, 1892, 1899, 1906, 1912, 1918, 1925, 1932, 1939, 1946, 1951, 1957, 1964, and 1970.

[7695] In some aspects, an antibody or an antigen binding fragment thereof disclosed herein comprises at least one variable heavy chain region (VH). In some aspects, the at least one VH comprises:
[7696] (a)
[7697] (i) a CDR1 having an amino acid sequence at least 65%, at least 70%, at least 75%, at least 80%, at least 85%, at least 90%, at least 95%, at least 99%, or 100% identical to any one of SEQ ID NOs: 1099, 1106, 1113, 1117, 1123, 1130, 1137, 1144, 1151, 1158, 1165, 1177, 1184, 1191, 1203, 1215, 1224, 1231, 1238, 1243, 1250, 1257, 1264, 1274, 1281, 1288, 1295, 1302, 1309, 1315, 1322, 1329, 1335, 1342, 1348, 1355, 1362, 1369, 1376, 1385, 1397, 1404, 1417, 1424, 1431, 1437, 1444, 1451, 1458, 1464, 1471, 1478, 1484, 1491, 1498, 1504, 1511, 1515, 1522, 1534, 1547, 1552, 1564, 1577, 1584, 1590, 1597, 1604, 1611, 1618, 1625, 1632, 1639, 1646, 1653, 1660, 1665, 1675, 1683, 1693, 1701, 1705, 1716, 1719, 1731, 1736, 1747, 1756, 1772, 1780, and 1789;
[7698] (ii) a CDR2 having an amino acid sequence at least 65%, at least 70%, at least 75%, at least 80%, at least 85%, at least 90%, at least 95%, at least 99%, or 100% identical to any one of SEQ ID NOs: 1100, 1107, 1114, 1118, 1124, 1131, 1138, 1145, 1152, 1159, 1166, 1178, 1185, 1192, 1204, 1216, 1225, 1232, 1239, 1244, 1251, 1258, 1275, 1282, 1289, 1296, 1303, 1310, 1316, 1323, 1330, 1336, 1343, 1349, 1356, 1363, 1370, 1377, 1386, 1391, 1398, 1405, 1411, 1418, 1425, 1432, 1438, 1445, 1452, 1465, 1472, 1479, 1485, 1492, 1499, 1505, 1516, 1523, 1528, 1535, 1541, 1548, 1553, 1559, 1565, 1571, 1578, 1585, 1591, 1598, 1605, 1612, 1619, 1626, 1633, 1640, 1647, 1654, 1666, 1676, 1684, 1687, 1694, 1702, 1706, 1712, 1717, 1720, 1725, 1732, 1737, 1741, 1748, 1757, 1767, 1773, 1781, and 1790; and
[7699] (iii) a CDR3 having an amino acid sequence at least 65%, at least 70%, at least 75%, at least 80%, at least 85%, at least 90%, at least 95%, at least 99%, or 100% identical to any one of SEQ ID NOs: 1101, 1108, 1115, 1125, 1132, 1139, 1146, 1153, 1160, 1167, 1172, 1179, 1186, 1193, 1197, 1205, 1209, 1217, 1226, 1233, 1240, 1245, 1252, 1259, 1269, 1276, 1283, 1290, 1297, 1304, 1311, 1317, 1324, 1331, 1337, 1344, 1350, 1357, 1364, 1371, 1378, 1387, 1392, 1399, 1406, 1412, 1419, 1426, 1433, 1439, 1446, 1453, 1459, 1466, 1473, 1480, 1486, 1493, 1500, 1506, 1517, 1524, 1529, 1536, 1542, 1549, 1554, 1560, 1566, 1572, 1579, 1586, 1592, 1599, 1606, 1613, 1620, 1627, 1634, 1641, 1648, 1655, 1661, 1667, 1670, 1677, 1685, 1688, 1695, 1703, 1707, 1713, 1733, 1749, 1758, 1762, 1774, 1782, 1791, and 1975; or
[7700] (b)
[7701] (i) a CDR1 having an amino acid sequence at least 65%, at least 70%, at least 75%, at least 80%, at least 85%, at least 90%, at least 95%, at least 99%, or 100% identical to any one of SEQ ID NOs: 1577, 1795, 1801, 1813, 1820, 1827, 1981, 1989, 1997, and 2005;
[7702] (ii) a CDR2 having an amino acid sequence at least 65%, at least 70%, at least 75%, at least 80%, at least 85%, at least 90%, at least 95%, at least 99%, or 100% identical to any one of SEQ ID NOs: 1159, 1802, 1807, 1814, 1821, 1828, 1982, 1990, 1998, and 2006; and
[7703] (iii) a CDR3 having an amino acid sequence at least 65%, at least 70%, at least 75%, at least 80%, at least 85%, at least 90%, at least 95%, at least 99%, or 100% identical to any one of SEQ ID NOs: 1796, 1803, 1808, 1815, 1822, 1829, 1983, 1991, 1999, and 2007; or
[7704] (c)
[7705] (i) a CDR1 having an amino acid sequence at least 65%, at least 70%, at least 75%, at least 80%, at least 85%, at least 90%, at least 95%, at least 99%, or 100% identical to any one of SEQ ID NOs: 1309, 1362, 1437, 1552, 1618, 1639, 1834, 1841, 1848, 1855, 1862, 1881, 1894, 1901, 1920, 1927, 1934, 1941, 1953, 1959, and 1966;
[7706] (ii) a CDR2 having an amino acid sequence at least 65%, at least 70%, at least 75%, at least 80%, at least 85%, at least 90%, at least 95%, at least 99%, or 100% identical to any one of SEQ ID NOs: 1363, 1835, 1842, 1849, 1856, 1863, 1869, 1875, 1882, 1888, 1895, 1902, 1908, 1914, 1921, 1928, 1935, 1942, 1948, 1954, 1960, 1967, and 1972; and
[7707] (iii) a CDR3 having an amino acid sequence at least 65%, at least 70%, at least 75%, at least 80%, at least 85%, at least 90%, at least 95%, at least 99%, or 100% identical to any one of SEQ ID NOs: 1364, 1836, 1843, 1850, 1857, 1864, 1870, 1876, 1883, 1889, 1896, 1903, 1909, 1915, 1922, 1929, 1936, 1943, 1949, 1955, 1961, 1968, and 1973.

[7708] In some aspects, an antibody or an antigen binding fragment thereof disclosed herein comprises at least one variable light chain region (VL). In some aspects, the at least one VL comprises an amino acid sequence:
[7709] (a) at least 65%, at least 70%, at least 75%, at least 80%, at least 85%, at least 90%, at least 95%, at least 99%, or 100% identical to any one of SEQ ID NOs: 1098, 1105, 1112, 1122, 1129, 1136, 1143, 1150, 1157, 1164, 1171, 1176, 1183, 1190, 1196, 1202, 1208, 1214, 1219, 1223, 1230, 1237, 1242, 1249, 1256, 1263, 1268, 1273, 1280, 1287, 1294, 1301, 1308, 1314, 1321, 1328, 1334, 1341, 1347, 1354, 1361, 1368, 1375, 1380, 1384, 1390, 1396, 1403, 1410, 1416, 1423, 1430, 1436, 1443, 1450, 1457, 1463, 1470, 1477, 1483, 1490, 1497, 1503, 1510, 1514, 1521, 1527, 1533, 1540, 1546, 1551, 1558, 1563, 1570, 1576, 1583, 1589, 1596, 1603, 1610, 1617, 1624, 1631, 1638, 1645, 1652, 1659, 1664, 1669, 1674, 1682, 1692, 1700, 1711, 1721, 1724, 1730, 1740, 1746, 1755, 1764, 1766, 1771, 1779, 1784, and 1788; or
[7710] (b) at least 65%, at least 70%, at least 75%, at least 80%, at least 85%, at least 90%, at least 95%, at least 99%, or 100% identical to any one of SEQ ID NOs: 1794, 1800, 1806, 1812, 1819, 1826, 1980, 1988, 1996, and 2004; or
[7711] (c) at least 65%, at least 70%, at least 75%, at least 80%, at least 85%, at least 90%, at least 95%, at least 99%, or 100% identical to any one of SEQ ID NOs: 1361, 1833, 1840, 1847, 1854, 1861, 1868, 1874, 1880, 1887, 1893, 1900, 1907, 1913, 1919, 1926, 1933, 1940, 1947, 1952, 1958, 1965, and 1971.

[7712] In some aspects, an antibody or an antigen binding fragment thereof disclosed herein comprises at least one variable heavy chain region (VH). In some aspects, the at least one VH comprises an amino acid sequence:
[7713] (a) at least 65%, at least 70%, at least 75%, at least 80%, at least 85%, at least 90%, at least 95%, at least 99%, or 100% identical to any one of SEQ ID NOs: 1102, 1109, 1116, 1119, 1126, 1133, 1140, 1147, 1154, 1161, 1168, 1173, 1180, 1187, 1194, 1198, 1206, 1210, 1218, 1220, 1227, 1234, 1241, 1246, 1253, 1260, 1265, 1270, 1277, 1284, 1291, 1298, 1305, 1312, 1318, 1325, 1332, 1338, 1345, 1351, 1358, 1365, 1372, 1379, 1381, 1388, 1393, 1400, 1407, 1413, 1420, 1427, 1434, 1440, 1447, 1454, 1460, 1467, 1474, 1481, 1487, 1494, 1501, 1507, 1512, 1518, 1525, 1530, 1537, 1543, 1550, 1555, 1561, 1567, 1573, 1580, 1587, 1593, 1600, 1607, 1614, 1621, 1628, 1635, 1642, 1649, 1656, 1662, 1668, 1671, 1678, 1686, 1696, 1704, 1714, 1722, 1726, 1734, 1742, 1750, 1759, 1760, 1765, 1768, 1775, 1783, 1785, and 1792; or
[7714] (b) at least 65%, at least 70%, at least 75%, at least 80%, at least 85%, at least 90%, at least 95%, at least 99%, or 100% identical to any one of SEQ ID NOs: 1797, 1804, 1809, 1816, 1823, 1830, 1984, 1992, 2000, and 2008; or
[7715] (c) at least 65%, at least 70%, at least 75%, at least 80%, at least 85%, at least 90%, at least 95%, at least 99%, or 100% identical to any one of SEQ ID NOs: 1365, 1837, 1844, 1851, 1858, 1865, 1871, 1877, 1884, 1890, 1897, 1904, 1910, 1916, 1923, 1930, 1937, 1944, 1950, 1956, 1962, 1969, and 1974.

[7716] Molecular biology and recombinant DNA methods for making, screening and engineering an antigen binding polypeptide or antigen binding polypeptide complex (e.g., an antibody or antigen binding fragment thereof) containing such sequences are well known and described, for example, in Adair et al. Human Antibodies, 5(1-2):41-47, 1994; Kostelny et al., J Immunol. 148(5):1547-1553, 1992, Shiraiwa et al., Methods, 154:10-20, 2019; and Zola, “Monoclonal Antibodies: A Manual of Techniques.” 1987, 1st Ed., CRC Press; and Steinitz, Human Antibodies. 18(1-2):1-10, 2009.

[7717] As used herein, an antigen binding polypeptide or antigen binding polypeptide complex (e.g., an antibody or antigen binding fragment thereof), or region or domain thereof that “specifically binds” refers to its association with an epitope by its antigen binding domain, and that the binding entails some complementarity between the antigen binding domain and the epitope. Specific binding to an epitope occurs where there is binding to that epitope via its antigen binding domain more readily than there would be binding to a random, unrelated epitope.

[7718] As used herein, an “epitope” refers to a localized region of an antigen to which an antigen binding polypeptide or antigen binding polypeptide complex (e.g., antibody or antigen binding fragment thereof) can specifically bind. An epitope can be, for example, contiguous amino acids of a polypeptide (linear or contiguous epitope) or an epitope can, for example, come together from two or more non-contiguous regions of a polypeptide or polypeptides (conformational, non-linear, discontinuous, or non-contiguous epitope). In some aspects, the epitope to which an antibody or antigen-binding fragment thereof binds can be determined by, e.g., NMR spectroscopy. X-ray diffraction crystallography studies, ELISA assays, hydrogen/deuterium exchange coupled with mass spectrometry (e.g., liquid chromatography electrospray mass spectrometry), array-based oligo-peptide scanning assays, and/or mutagenesis mapping (e.g., site-directed mutagenesis mapping). See, e.g., Giegé R et al., (1994) Acta Crystallogr D Biol Crystallogr 50 (Pt 4): 339-350; McPherson A (1990) Eur J Biochem 189:1-23; Chayen N E (1997) Structure 5:1269-1274; McPherson A (1976) J Biol Chem 251:6300-6303; Meth Enzymol (1985) volumes 114 & 115, eds Wyckoff H W et al., U.S. Pub. No. 2004/0014194), Bricogne G (1993) Acta Crystallogr D Biol Crystallogr 49 (Pt 1): 37-60. Bricogne G (1997) Meth Enzymol 276A: 361-423, ed Carter C W, and Roversi et al., (2000) Acta Crystallogr D Biol Crystallogr 56 (Pt 10): 1316-1323 (X-ray diffraction crystallography studies); and Champe et al., (1995) J Biol Chem 270:1388-1394 and Cunningham B C & Wells J A (1989) Science 244:1081-1085 (mutagenesis mapping).

[7719] Specific binding can be represented by a “binding affinity.” Binding affinity refers to an intrinsic binding affinity which reflects a 1:1 interaction between members of a binding pair (e.g., an antigen binding polypeptide complex and an antigen). Binding affinity can be measured and/or expressed in several ways known in the art, including, but not limited to, equilibrium dissociation constant (K_{D}), K_{D} is calculated from the quotient of k_{off}/kₒₙ, where kₒₙ refers to the association rate constant of, e.g., an antigen binding polypeptide complex to an antigen, and k_{off} refers to the dissociation of, e.g., an antigen binding polypeptide complex from an antigen. The kₒₙ and k_{off} can be determined by techniques known to one of ordinary skill in the art, such as Octet®; BLI, BIAcore® or KinExA.

[7720] Accordingly, in some aspects, an antigen binding polypeptide complex provided herein is an antibody or antigen binding fragment thereof. In some aspects, an antigen binding polypeptide provided herein is part of an antibody or antigen binding fragment thereof.

[7721] In one aspect, the antibody or antigen binding fragment thereof specifically binds to an antigen with an equilibrium dissociation constant (K_{D}) of from about 10 μM to about 1 pM. In another aspect, the antibody or antigen binding fragment thereof is IgG, IgM, IgE, IgA or IgD. In another aspect, the IgG is IgG1, IgG2, IgG3 or IgG4. In another aspect, the antigen binding fragment is a Fab, scFab, Fab′, F(ab′)₂, Fv or scFv. In yet another aspect, the antibody or antigen binding fragment thereof is human or humanized.

[7722] In another aspect, an antigen binding polypeptide complex provided herein (e.g., an antibody or antigen binding fragment thereof) is trivalent or tetravalent.

[7723] In another aspect, an antigen binding polypeptide complex provided herein (e.g., an antibody or antigen binding fragment thereof) is monospecific, bispecific, trispecific, or tetraspecific.

[7724] In another aspect, an antigen binding polypeptide or antigen binding polypeptide complex, or antibody or antigen binding fragment thereof provided herein potently inhibits one or more pathogen.

[7725] In some aspects, provided herein are antibodies or antigen binding fragment thereof (e.g., monospecific or multispecific antibodies or antigen binding fragments thereof) comprising an antigen binding polypeptide having a structure represented by:
[7726] VL1-L1-VL2-L2-VH2-L3-VH1;
[7727] VL1-L1-VH2-L2-VL2-L3-VH1;
[7728] VH1-L1-VH2-L2-VL2-L3-VL1; or
[7729] VH1-L1-VL2-L2-VH2-L3-VL1;
[7730] wherein:
[7731] VL1 is a first immunoglobulin light chain variable region that specifically binds to a (i) a tumor-associated antigen (TAA), (ii) an infectious disease antigen that is not a sarbecovirus antigen, or (iii) an other-pathology antigen;
[7732] VL2 is a second immunoglobulin light chain variable region that specifically binds to (i) a tumor-associated antigen (TAA), (ii) an infectious disease antigen that is not a sarbecovirus antigen, or (iii) an other-pathology antigen;
[7733] VH1 is a first immunoglobulin heavy chain variable region that specifically binds to (i) a tumor-associated antigen (TAA), (ii) an infectious disease antigen that is not a sarbecovirus antigen, or (iii) an other-pathology antigen;
[7734] VH2 is a second immunoglobulin heavy chain variable region that specifically binds to (i) a tumor-associated antigen (TAA), (ii) an infectious disease antigen that is not a sarbecovirus antigen, or (iii) an other-pathology antigen; and
[7735] L1-L3 are optional amino acid linkers.

[7736] In any aspect shown herein as a structure from amino terminus to carboxy terminus, and with binding pairs selected from VL and/or VH or other structural regions such as CH2, CH3, when shown without a specific linker such as L1, L2, etc., such linkers are optionally present in such structures between each designated subsequence VL, VH, etc.

[7737] In some aspects, the TAA is selected from the group consisting of 5′-nucleotidase, 5T4, A2AR, activin receptor-like kinase 1, adenocarcinoma antigen, ADRB3, AFP, AKAP-4, ALK, alpha-fetoprotein, androgenreceptor, angiopoietin 2, AOC3, APRIL, ATPDase, AXL, B7-4, B7DC, B7H1, B7H2, B7H3, B7H4, B7H5, B7H6, B7H7, B7RP1, BAFF, BAFFR, BCMA, bcr-abl, BlyS, BORIS, BST2, BTK, BTLA, C3, C5, C5a, C5a receptor, CA-125, CAIX, CanAg (a glycoform of MUC1), CCL11, CCL15, CCL17, CCL19, CCL2, CCL20, CCL21, CCL25, CCL3, CCL4, CCL5, CCL7, CCL8, CCR2, CCR3, CCR4, CCR5, CD11, CD11a, CD123, CD125, CD133, CD134, CD137, CD137L, CD147, CD15, CD154, CD160, CD16A, CD171, CD179a, CD18, CD184, CD19, CD2, CD20, CD200, CD22, CD221, CD23, CD24, CD242, CD25, CD27, CD272, CD276, CD278, CD279, CD28, CD3, CD30, CD300LF, CD319, CD33, CD37, CD38, CD39, CD38, CD4, CD40, CD40L, CD41, CD44v6, CD45, CD47, CD49B, CD5, CD51, CD52, CD54, CD56, CD6, CD62L, CD7, CD70, CD72, CD74, CD79a, CD79b, CD80, CD86, CD97, CEA, CEACAM5, claudin 18 isoform 2, CLDN6, CLEC12A, CLEC9, CLEC91, CLL-1, cMet, coagulation factor III, CRTH2, CS1, CSF-1, CSFIR, CSF-2, CSF-3, CTGF, CTLA4, CXCL1, CXCL12, CXCL13, CXCL2, CXCL4, CXCR3, CXORF61, CyclinB1, CYP1B1, dendritic cell-associated lectin 2, DLL3, DLL4, DNGR-1, DR5, E7, E-cadherin, EGFL7, EGFR, EGFRVIII, ELF2M, EMR2, endoglin, ENTPD1, EpCAM, EphA2, EPHA3, ephrin receptor A3, EphrinB2, episialin, ERBB2 (Her2/neu), ERBB3, ERG (TMPRSS2-ETS fusion gene), ETV6-AML, FAP, FCAR, FCER1, FCER1A, FCER2, FCRL5, FGF 23, FGFR, FGFR2, fibronectin extra domain-B, FLAP, FLT3, folate hydrolase, folate receptor 1, folate receptor alpha, folate receptor beta, FOLH1, Fos-relatedantigen1, Frizzled receptor, Fucosyl GM1, GD2, GD3, gelatinase B, Gi24, GITR, GITRL, GloboH, Glutamate carboxypeptidase II, glypican 3, GM3, GP100, GPC1, GPC2, GPC3, gplOO, GPNMB, GPR20, GPR5, GPRC5D, growth differentiation factor 8, GUCY2C, HAVCR1, HER1, HER2, HER3, HGF, HGFR, HHLA2, histone complex, HLA-DR, HMGB1, HMWMAA, HPVE6, hTERT, human telomerase reverse transcriptase, HVEM, ICAM-1, ICOS, ICOSL, IDO, IFNa, IgE, IGF-1, IGF1R, IGF-2, IGF-I receptor, IGLL1, IL1, IL10, IL12, IL13, IL13Ra2, IL-13Ra2, IL13Ra1, IL15, IL17, IL-17A, IL-17AF, IL-17F, IL17Rb, IL18, IL1B, IL1F10, IL-1a, IL-1B, IL2, IL-20, IL22, IL23, IL-23A, IL25, IL2Rbeta, IL-3 receptor, IL-31 receptor A, IL33, IL35, IL4, IL4Ra, IL5, ILSR, IL6, IL7, IL7Ra, IL8, IL9, IL9R, IL1A, IL-llRa, integrin α4, integrin α4 β7, integrin α5β1, integrin αIIbβ3, integrin αvβ3, integrin β7, interleukin 36 receptor IL1RAP, interleukin 36 receptor IL1RL2, intestinal carboxylesterase, ITGB4, ITK, KIR, KIR2D, KIT, LAG3, LAGE-1a, LAIR1, LAMP1, LCK, legumain, leptin. LewisY, LILRA2, LIV-1, LMP2, LOXL2, LPFS2, LRRC15, LY6K, LY75, LYPD3, MAD-CT-1, MAD-CT-2, MAGEA1, MAGE-A1, MCAM, MCP-1, MelanA/MART1, mesothelin, MHC classII, MIF, ML-IAP, MS4A1, MST1R (RON), MUC1, MUC-1, MUC16, MUC-16, MUC5AC, muthsp70-2, MYCN, NA17, NCA-90) granulocyte antigen, NCAM, NCR3LG1, nectin-4, NGNA ganglioside, NKG2A, NKG2D, NKp46, Notch 1, Notch receptor, NRP1, NTPDase-1, NY-BR-1, NY-ESO-1, o-acetyl-GD2, OR51E2, OX40, OX40L, OY-TES1, p53, p53mutant, PANX3, PAP, PAX3, PAX5, PCDC1, PCDP1, PCTA-1/Galectin8, PD-1, PDGFRA, PDGFR-beta, PD-L1, PD-L2, phosphate-sodium co-transporter, phosphatidylserine, PLAC1, polysialicacid, PROM1, prostase, prostein, PRSS21, PSCA, PSMA, PTK7, RAGE-1, RANKL, Ras mutant, rhIL1O, RhoC, root plate-specific spondin 3, ROR1, ROR2, RTN4, RU1, RU2, S152, sarcoma translocation breakpoints, SART3, scatter factor receptor kinase, SDC1, SIRPalpha, SISP1, SLAMF7, SLC, sLe, SLITRK6, spermprotein17, SPG64, sphingosine-1-phosphate, SSEA-4, SSX2, ST2, STEAP1, STEAP2, surviving and telomerase, Syk kinase, T14, TACI, TAG72, TARP, T-cell receptor, TCRβ, TDO, TEM1/CD248, TEM7R, tenascin C, TGFBETA, TGF-β1, TGF-β2, TGS5, the extracellular portion of the APRIL protein. Tie2, TIGIT, TIM3, TLR, TLR2, TLR4, TLR5, TLR9, TMEF1, TnAg, TNF, TNFa, TNFR superfamily member 4, TNFRSF7, Tp55, TRAC, TRAIL-R1, TRAIL-R2, TRAP, TREM1, TROP2, TRP-2, TSHR, TSLP, TSLPR, tumor antigen CTAA16.88, TWEAK, tyrosinase, TYRP1 glycoprotein 75, UPK2, VAP-1, VEGF, VEGFA, VEGFR-1, VEGFR2, vimentin, VISTA, Vstm3, WT1, WUCAM, and XAGE1.

[7738] In some aspects, the VL1 comprises a light chain complementarity determining region 1 (LCDR1), LCDR2, and/or LCDR3 of an antibody selected from the group consisting of losatuxizumab vedotin, utomilumab, urelumab, oleclumab, naptumomab estafenatox, ascrinvacumab, pintumomab, tacatuzumab tetraxetan, nesvacumab, vanucizumab, timolumab, vapaliximab, vepalimomab, enapotamab vedotin, ianalumab, belimumab, tabalumab, tibulizumab, belantamab mafodotin, teclistamab, teclistamab, detumomab, nacolomab tafenatox, eculizumab, lendalizumab, pexelizumab, pozelimab, ravulizumab, tesidolumab, vilobelimab, abagovomab, igovomab, oregovomab, sofituzumab vedotin, cantuzumab mertansine, cantuzuma bravtansine, girentuximab, altumomab pentetate, arcitumomab, besilesomab, bertilimumab, plozalizumab, mogamulizumab, leronlimab, PRO140, rovelizumab, rovelizumab, talacotuzumab, benralizumab, tavolimab, vonlerolizumab, gavilimomab, ziralimumab, fanolesomab, ipilimumab, ruplizumab, toralizumab, dapirolizumab pegol, toralizumab, dapirolizumab pegol, ruplizumab, blinatumomab, inebilizumab, loncastuximab tesirine, SGN-CD19A, tafasitamab, taplitumomab paptox, XMAB-5574, Budoprutug, Obexelimab, duvortuxizumab, englumafusp alfa, Emfizatamab, zeripatamig, siplizumab, blontuvetmab, FBTA05, ibritumomab tiuxetan, obinutuzumab, ocaratuzumab, ocrelizumab, ofatumumab, rituximab, tositumomab, ublituximab, veltuzumab, divozilimab, eramkafusp alfa, ripertamab, zuberitamab, glofitamab, nofetumomab merpentan, samalizumab, imvotamab, odronextamab, plamotamab, bectumomab, inotuzumab ozogamicin, moxetumomab pasudotox, pinatuzumab vedotin, gomiliximab, lumiliximab, inolimomab, inolimomab, daclizumab, camidanluma btesirine, basiliximab, varlilumab, omburtamab, enoblituzumab, vopratelimab, lulizumabpegol, TGN1412, muromonab-CD3, otelixizumab, teplizumab, visilizumab, epcoritamab, epcoritamab, brentuximab vedotin, iratumumab, azintuxizumab vedotin, gemtuzumab ozogamicin, lintuzumab, vadastuximab talirine, naratuximab emtansine, otlertuzumab, lilotomab satetraxetan, tetulomab, daratumumab, isatuximab, foralumab, mosunetuzumab, mosunetuzumab, cedelizumab, ibalizumab, keliximab, priliximab, tregalizumab, zanolimumab, bleselumab, iscalimab, lucatumumab, ravagalimab, selicrelumab, teneliximab, vanalimab, abciximab, bivatuzumab, iomab-B, telimomab aritox, zolimomab aritox, abituzumab, intetumumab, alemtuzumab, tamtuvetmab, lorvotuzumab mertansine, itolizumab, cusatuzumab, vorsetuzumab mafodotin, milatuzumab, iladatuzumab vedotin, polatuzumab vedotin, galiximab, cibisatamab, zolbetuximab, naxitamab, tisotumab vedotin, olendalizumab, pamrevlumab, lacnotuzumab, cabiralizumab, emactuzumab, axatilimab, gimsilumab, lenzilumab, namilumab, tremelimumab, ulocuplumab, tepoditamab, rovalpituzumab tesirine, tarlatamab, demcizumab, navicixizumab, drozitumab, parsatuzumab, depatuxizumab mafodotin, modotuximab, carotuximab, adecatumumab, adecatumumab, oportuzumab monatox, solitomab, tucotuzumab celmoleukin, edrecolomab, catumaxomab, ifabotuzumab, fibatuzumab, zalutumumab, panitumumab, cetuximab, futuximab, imgatuzumab, laprituximab emtansine, matuzumab, necitumumab, nimotuzumab, tomuzotuximab, amivantamab, amivantamab, epitumomab cituxetan, sontuzumab, duligotuzumab, elgemtumab, lumretuzumab, patritumab, seribantumab, zenocutuzumab, sibrotuzumab, burosumab, aprutumab ixadotin, radretumab, pasotuxizumab, farletuzumab, mirvetuximab soravtansine, vantictumab, TRBS07, 3F8, dinutuximab, dinutuximab beta, ecromeximab, mitumomab, andecaliximab, capromab, codrituzumab, glembatumumab vedotin, talquetamab, talquetamab, trevogrumab, indusatumab vedotin, ficlatuzumab, rilotumumab, zatuximab, pentuzimab, pentuzimab, margetuximab, timigutuzumab, trastuzumab, trastuzumab duocarmazine, trastuzumab emtansine, gancotamab, pertuzumab, ertumaxomab, emibetuzumab, telisotuzumab, telisotuzumab vedotin, derlotuximab biotin, apolizumab, onartuzumab, bersanlimab, enlimomabpegol, rontalizumab, sifalimumab, talizumab, ganitumab, istiratumab, robatumumab, teprotumumab, figitumumab, ganitumab, istiratumab, robatumumab, teprotumumab, cixutumumab, dalotuzumab, xentuzumab, dusigitumab, canakinumab, ustekinumab, ustekinumab, ustekinumab, briakinumab, briakinumab, abrezekimab, lebrikizumab, romilkimab, TNX-650, tralokinumab, anrukinzumab, brodalumab, ixekizumab, netakimab, perakizumab, secukinumab, vunakizumab, afasevikumab, afasevikumab, bimekizumab, bimekizumab, remtolumab, bermekimab, lutikizumab, lutikizumab, gevokizumab, cergutuzumab amunaleukin, fletikumab, fezakinumab, brazikumab, guselkumab, mirikizumab, tildrakizumab, risankizumab, flotetuzumab, nemolizumab, pascolizumab, dupilumab, mepolizumab, reslizumab, clazakizumab, elsilimomab, olokizumab, sarilumab, siltuximab, sirukumab, vobarilizumab, tocilizumab, SA237, satralizumab, enokizumab, prezalizumab, natalizumab, abrilumab, abrilumab, vedolizumab, volociximab, tadocizumab, etaracizumab, etrolizumab, spesolimab, vatelizumab, erlizumab, lirilumab, relatlimab, cBR96-doxorubicinimmunoconjugate, odulimomab, efalizumab, ladiratuzumab vedotin, simtuzumab, samrotamab vedotin, aselizumab, lupartumab amadotin, imalumab, carlumab, imaprelimab, amatuximab, amatuximab, anetumab ravtansine, narnatumab, clivatuzumab tetraxetan, pemtumomab, gatipotuzumab, ensituximab, lemalesomab, sulesomab, enfortumab vedotin, racotumomab, monalizumab, brontictuzumab, tarextumab, vesencumab, oxelumab, gilvetmab, tislelizumab, dostarlimab, BCD-100, nivolumab, PDR001, pembrolizumab, pidilizumab, retifanlimab, spartalizumab, sintilimab, cemiplimab, olaratumab, tovetumab, rinucumab, atezolizumab, avelumab, durvalumab, lifastuzumab vedotin, bavituximab, acapatamab, capromab, rosopatamab, nezastomig, pasotuxizumab, pelgifatamab, voxalatamab, cofetuzumab pelidotin, denosumab, rosmantuzumab, cirmtuzumab, atinumab, indatuximab ravtansine, elotuzumab, sirtratumab vedotin, sonepcizumab, vandortuzumab vedotin, minretumomab, satumomab pendetide, maslimomab, ontuxizumab, tenatumomab, fresolimumab, metelimumab, lerdelimumab, tezepelumab, etigilimab, tiragotumab, placulumab, prezalumab, infliximab, nerelimomab, ozoralizumab, adalimumab, afelimomab, certolizumab pegol, golimumab, mapatumumab, conatumumab, lexatumumab, tigatuzumab, sacituzumab govitecan, votumumab, pogalizumab, letolizumab, pankomab, anatumomab mafenatox, enavatuzumab, flanvotumab, brolucizumab, ranibizumab, varisacumab, bevacizumab, faricimab, icrucumab, alacizumab pegol, ramucirumab, pritumumab, and onvatilimab.

[7739] In some aspects, the VL2 comprises a light chain complementarity determining region 1 (LCDR1), LCDR2, and/or LCDR3 of an antibody selected from the group consisting of losatuxizumab vedotin, utomilumab, urelumab, oleclumab, naptumomab estafenatox, ascrinvacumab, pintumomab, tacatuzumab tetraxetan, nesvacumab, vanucizumab, timolumab, vapaliximab, vepalimomab, enapotamab vedotin, ianalumab, belimumab, tabalumab, tibulizumab, blantamab mafodotin, teclistamab, teclistamab, detumomab, nacolomab tafenatox, eculizumab, lendalizumab, pexelizumab, pozelimab, ravulizumab, tesidolumab, vilobelimab, abagovomab, igovomab, oregovomab, sofituzumab vedotin, cantuzumab mertansine, cantuzuma bravtansine, girentuximab, altumomab pentetate, arcitumomab, besilesomab, bertilimumab, plozalizumab, mogamulizumab, leronlimab, PRO140, rovelizumab, rovelizumab, talacotuzumab, benralizumab, tavolimab, vonlerolizumab, gavilimomab, ziralimumab, fanolesomab, ipilimumab, ruplizumab, toralizumab, dapirolizumab pegol, toralizumab, dapirolizumab pegol, ruplizumab, blinatumomab, inebilizumab, loncastuximab tesirine, SGN-CD19A, tafasitamab, taplitumomab paptox, XMAB-5574, Budoprutug, Obexelimab, duvortuxizumab, englumafusp alfa, Emfizatamab, zeripatamig, siplizumab, blontuvetmab, FBTA05, ibritumomab tiuxetan, obinutuzumab, ocaratuzumab, ocrelizumab, ofatumumab, rituximab, tositumomab, ublituximab, veltuzumab, divozilimab, eramkafusp alfa, ripertamab, zuberitamab, glofitamab, nofetumomab merpentan, samalizumab, imvotamab, odronextamab, plamotamab, bectumomab, inotuzumab ozogamicin, moxetumomab pasudotox, pinatuzumab vedotin, gomiliximab, lumiliximab, inolimomab, inolimomab, daclizumab, camidanluma btesirine, basiliximab, varlilumab, omburtamab, enoblituzumab, vopratelimab, lulizumabpegol, TGN1412, muromonab-CD3, otelixizumab, teplizumab, visilizumab, epcoritamab, epcoritamab, brentuximab vedotin, iratumumab, azintuxizumab vedotin, gemtuzumab ozogamicin, lintuzumab, vadastuximab talirine, naratuximab emtansine, otlertuzumab, lilotomab satetraxetan, tetulomab, daratumumab, isatuximab, foralumab, mosunetuzumab, mosunetuzumab, cedelizumab, ibalizumab, keliximab, priliximab, tregalizumab, zanolimumab, bleselumab, iscalimab, lucatumumab, ravagalimab, selicrelumab, teneliximab, vanalimab, abciximab, bivatuzumab, iomab-B, telimomab aritox, zolimomab aritox, abituzumab, intetumumab, alemtuzumab, tamtuvetmab, lorvotuzumab mertansine, itolizumab, cusatuzumab, vorsetuzumab mafodotin, milatuzumab, iladatuzumab vedotin, polatuzumab vedotin, galiximab, cibisatamab, zolbetuximab, naxitamab, tisotumab vedotin, olendalizumab, pamrevlumab, lacnotuzumab, cabiralizumab, emactuzumab, axatilimab, gimsilumab, lenzilumab, namilumab, tremelimumab, ulocuplumab, tepoditamab, rovalpituzumab tesirine, tarlatamab, demcizumab, navicixizumab, drozitumab, parsatuzumab, depatuxizumab mafodotin, modotuximab, carotuximab, adecatumumab, adecatumumab, oportuzumab monatox, solitomab, tucotuzumab celmoleukin, edrecolomab, catumaxomab, ifabotuzumab, fibatuzumab, zalutumumab, panitumumab, cetuximab, futuximab, imgatuzumab, laprituximab emtansine, matuzumab, necitumumab, nimotuzumab, tomuzotuximab, amivantamab, amivantamab, epitumomab cituxetan, sontuzumab, duligotuzumab, elgemtumab, lumretuzumab, patritumab, seribantumab, zenocutuzumab, sibrotuzumab, burosumab, aprutumab ixadotin, radretumab, pasotuxizumab, farletuzumab, mirvetuximab soravtansine, vantictumab, TRBS07, 3F8, dinutuximab, dinutuximab beta, ecromeximab, mitumomab, andecaliximab, capromab, codrituzumab, glembatumumab vedotin, talquetamab, talquetamab, trevogrumab, indusatumab vedotin, ficlatuzumab, rilotumumab, zatuximab, pentuzimab, pentuzimab, margetuximab, timigutuzumab, trastuzumab, trastuzumab duocarmazine, trastuzumab emtansine, gancotamab, pertuzumab, ertumaxomab, emibetuzumab, telisotuzumab, telisotuzumab vedotin, derlotuximab biotin, apolizumab, onartuzumab, bersanlimab, enlimomabpegol, rontalizumab, sifalimumab, talizumab, ganitumab, istiratumab, robatumumab, teprotumumab, figitumumab, ganitumab, istiratumab, robatumumab, teprotumumab, cixutumumab, dalotuzumab, xentuzumab, dusigitumab, canakinumab, ustekinumab, ustekinumab, ustekinumab, briakinumab, briakinumab, abrezekimab, lebrikizumab, romilkimab, TNX-650, tralokinumab, anrukinzumab, brodalumab, ixekizumab, netakimab, perakizumab, secukinumab, vunakizumab, afasevikumab, afasevikumab, bimekizumab, bimekizumab, remtolumab, bermekimab, lutikizumab, lutikizumab, gevokizumab, cergutuzumab amunaleukin, fletikumab, fezakinumab, brazikumab, guselkumab, mirikizumab, tildrakizumab, risankizumab, flotetuzumab, nemolizumab, pascolizumab, dupilumab, mepolizumab, reslizumab, clazakizumab, elsilimomab, olokizumab, sarilumab, siltuximab, sirukumab, vobarilizumab, tocilizumab, SA237, satralizumab, enokizumab, prezalizumab, natalizumab, abrilumab, abrilumab, vedolizumab, volociximab, tadocizumab, etaracizumab, etrolizumab, spesolimab, vatelizumab, erlizumab, lirilumab, relatlimab, cBR96-doxorubicinimmunoconjugate, odulimomab, efalizumab, ladiratuzumab vedotin, simtuzumab, samrotamab vedotin, aselizumab, lupartumab amadotin, imalumab, carlumab, imaprelimab, amatuximab, amatuximab, anetumab ravtansine, narnatumab, clivatuzumab tetraxetan, pemtumomab, gatipotuzumab, ensituximab, lemalesomab, sulesomab, enfortumab vedotin, racotumomab, monalizumab, brontictuzumab, tarextumab, vesencumab, oxelumab, gilvetmab, tislelizumab, dostarlimab, BCD-100, nivolumab, PDR001, pembrolizumab, pidilizumab, retifanlimab, spartalizumab, sintilimab, cemiplimab, olaratumab, tovetumab, rinucumab, atezolizumab, avelumab, durvalumab, lifastuzumab vedotin, bavituximab, acapatamab, capromab, rosopatamab, nezastomig, pasotuxizumab, pelgifatamab, voxalatamab, cofetuzumab pelidotin, denosumab, rosmantuzumab, cirmtuzumab, atinumab, indatuximab ravtansine, elotuzumab, sirtratumab vedotin, sonepcizumab, vandortuzumab vedotin, minretumomab, satumomab pendetide, maslimomab, ontuxizumab, tenatumomab, fresolimumab, metelimumab, lerdelimumab, tezepelumab, etigilimab, tiragotumab, placulumab, prezalumab, infliximab, nerelimomab, ozoralizumab, adalimumab, afelimomab, certolizumab pegol, golimumab, mapatumumab, conatumumab, lexatumumab, tigatuzumab, sacituzumab govitecan, votumumab, pogalizumab, letolizumab, pankomab, anatumomab mafenatox, enavatuzumab, flanvotumab, brolucizumab, ranibizumab, varisacumab, bevacizumab, faricimab, icrucumab, alacizumab pegol, ramucirumab, pritumumab, and onvatilimab.

[7740] In some aspects, the VH1 comprises a heavy chain complementarity determining region 1 (HCDR1), HCDR2, and/or HCDR3 of an antibody selected from the group consisting of losatuxizumab vedotin, utomilumab, urelumab, oleclumab, naptumomab estafenatox, ascrinvacumab, pintumomab, tacatuzumab tetraxetan, nesvacumab, vanucizumab, timolumab, vapaliximab, vepalimomab, enapotamab vedotin, ianalumab, belimumab, tabalumab, tibulizumab, belantamab mafodotin, teclistamab, teclistamab, detumomab, nacolomab tafenatox, eculizumab, lendalizumab, pexelizumab, pozelimab, ravulizumab, tesidolumab, vilobelimab, abagovomab, igovomab, oregovomab, sofituzumab vedotin, cantuzumab mertansine, cantuzuma bravtansine, girentuximab, altumomab pentetate, arcitumomab, besilesomab, bertilimumab, plozalizumab, mogamulizumab, leronlimab, PRO140, rovelizumab, rovelizumab, talacotuzumab, benralizumab, tavolimab, vonlerolizumab, gavilimomab, ziralimumab, fanolesomab, ipilimumab, ruplizumab, toralizumab, dapirolizumab pegol, toralizumab, dapirolizumab pegol, ruplizumab, blinatumomab, inebilizumab, loncastuximab tesirine, SGN-CD19A, tafasitamab, taplitumomab paptox, XMAB-5574, Budoprutug, Obexelimab, duvortuxizumab, englumafusp alfa, Emfizatamab, zeripatamig, siplizumab, blontuvetmab, FBTA05, ibritumomab tiuxetan, obinutuzumab, ocaratuzumab, ocrelizumab, ofatumumab, rituximab, tositumomab, ublituximab, veltuzumab, divozilimab, eramkafusp alfa, ripertamab, zuberitamab, glofitamab, nofetumomab merpentan, samalizumab, imvotamab, odronextamab, plamotamab, bectumomab, inotuzumab ozogamicin, moxetumomab pasudotox, pinatuzumab vedotin, gomiliximab, lumiliximab, inolimomab, inolimomab, daclizumab, camidanluma btesirine, basiliximab, varlilumab, omburtamab, enoblituzumab, vopratelimab, lulizumabpegol, TGN1412, muromonab-CD3, otelixizumab, teplizumab, visilizumab, epcoritamab, epcoritamab, brentuximab vedotin, iratumumab, azintuxizumab vedotin, gemtuzumab ozogamicin, lintuzumab, vadastuximab talirine, naratuximab emtansine, otlertuzumab, lilotomab satetraxetan, tetulomab, daratumumab, isatuximab, foralumab, mosunetuzumab, mosunetuzumab, cedelizumab, ibalizumab, keliximab, priliximab, tregalizumab, zanolimumab, bleselumab, iscalimab, lucatumumab, ravagalimab, selicrelumab, teneliximab, vanalimab, abciximab, bivatuzumab, iomab-B, telimomab aritox, zolimomab aritox, abituzumab, intetumumab, alemtuzumab, tamtuvetmab, lorvotuzumab mertansine, itolizumab, cusatuzumab, vorsetuzumab mafodotin, milatuzumab, iladatuzumab vedotin, polatuzumab vedotin, galiximab, cibisatamab, zolbetuximab, naxitamab, tisotumab vedotin, olendalizumab, pamrevlumab, lacnotuzumab, cabiralizumab, emactuzumab, axatilimab, gimsilumab, lenzilumab, namilumab, tremelimumab, ulocuplumab, tepoditamab, rovalpituzumab tesirine, tarlatamab, demcizumab, navicixizumab, drozitumab, parsatuzumab, depatuxizumab mafodotin, modotuximab, carotuximab, adecatumumab, adecatumumab, oportuzumab monatox, solitomab, tucotuzumab celmoleukin, edrecolomab, catumaxomab, ifabotuzumab, fibatuzumab, zalutumumab, panitumumab, cetuximab, futuximab, imgatuzumab, laprituximab emtansine, matuzumab, necitumumab, nimotuzumab, tomuzotuximab, amivantamab, amivantamab, epitumomab cituxetan, sontuzumab, duligotuzumab, elgemtumab, lumretuzumab, patritumab, seribantumab, zenocutuzumab, sibrotuzumab, burosumab, aprutumab ixadotin, radretumab, pasotuxizumab, farletuzumab, mirvetuximab soravtansine, vantictumab, TRBS07, 3F8, dinutuximab, dinutuximab beta, ecromeximab, mitumomab, andecaliximab, capromab, codrituzumab, glembatumumab vedotin, talquetamab, talquetamab, trevogrumab, indusatumab vedotin, ficlatuzumab, rilotumumab, zatuximab, pentuzimab, pentuzimab, margetuximab, timigutuzumab, trastuzumab, trastuzumab duocarmazine, trastuzumab emtansine, gancotamab, pertuzumab, ertumaxomab, emibetuzumab, telisotuzumab, telisotuzumab vedotin, derlotuximab biotin, apolizumab, onartuzumab, bersanlimab, enlimomabpegol, rontalizumab, sifalimumab, talizumab, ganitumab, istiratumab, robatumumab, teprotumumab, figitumumab, ganitumab, istiratumab, robatumumab, teprotumumab, cixutumumab, dalotuzumab, xentuzumab, dusigitumab, canakinumab, ustekinumab, ustekinumab, ustekinumab, briakinumab, briakinumab, abrezekimab, lebrikizumab, romilkimab, TNX-650, tralokinumab, anrukinzumab, brodalumab, ixekizumab, netakimab, perakizumab, secukinumab, vunakizumab, afasevikumab, afascvikumab, bimekizumab, bimekizumab, remtolumab, bermekimab, lutikizumab, lutikizumab, gevokizumab, cergutuzumab amunaleukin, fletikumab, fezakinumab, brazikumab, guselkumab, mirikizumab, tildrakizumab, risankizumab, flotetuzumab, nemolizumab, pascolizumab, dupilumab, mepolizumab, reslizumab, clazakizumab, elsilimomab, olokizumab, sarilumab, siltuximab, sirukumab, vobarilizumab, tocilizumab, SA237, satralizumab, enokizumab, prezalizumab, natalizumab, abrilumab, abrilumab, vedolizumab, volociximab, tadocizumab, etaracizumab, etrolizumab, spesolimab, vatelizumab, erlizumab, lirilumab, relatlimab, cBR96-doxorubicinimmunoconjugate, odulimomab, efalizumab, ladiratuzumab vedotin, simtuzumab, samrotamab vedotin, aselizumab, lupartumab amadotin, imalumab, carlumab, imaprelimab, amatuximab, amatuximab, anetumab ravtansine, narnatumab, clivatuzumab tetraxetan, pemtumomab, gatipotuzumab, ensituximab, lemalesomab, sulesomab, enfortumab vedotin, racotumomab, monalizumab, brontictuzumab, tarextumab, vesencumab, oxelumab, gilvetmab, tislelizumab, dostarlimab, BCD-100, nivolumab, PDR001, pembrolizumab, pidilizumab, retifanlimab, spartalizumab, sintilimab, cemiplimab, olaratumab, tovetumab, rinucumab, atezolizumab, avelumab, durvalumab, lifastuzumab vedotin, bavituximab, acapatamab, capromab, rosopatamab, nezastomig, pasotuxizumab, pelgifatamab, voxalatamab, cofetuzumab pelidotin, denosumab, rosmantuzumab, cirmtuzumab, atinumab, indatuximab ravtansine, elotuzumab, sirtratumab vedotin, sonepcizumab, vandortuzumab vedotin, minretumomab, satumomab pendetide, maslimomab, ontuxizumab, tenatumomab, fresolimumab, metelimumab, lerdelimumab, tezepelumab, etigilimab, tiragotumab, placulumab, prezalumab, infliximab, nerelimomab, ozoralizumab, adalimumab, afelimomab, certolizumab pegol, golimumab, mapatumumab, conatumumab, lexatumumab, tigatuzumab, sacituzumab govitecan, votumumab, pogalizumab, letolizumab, pankomab, anatumomab mafenatox, enavatuzumab, flanvotumab, brolucizumab, ranibizumab, varisacumab, bevacizumab, faricimab, icrucumab, alacizumab pegol, ramucirumab, pritumumab, and onvatilimab.

[7741] In some aspects, the VH2 comprises a heavy chain complementarity determining region 1 (HCDR1), HCDR2, and/or HCDR3 of an antibody selected from the group consisting of losatuxizumab vedotin, utomilumab, urelumab, oleclumab, naptumomab estafenatox, ascrinvacumab, pintumomab, tacatuzumab tetraxetan, nesvacumab, vanucizumab, timolumab, vapaliximab, vepalimomab, enapotamab vedotin, ianalumab, belimumab, tabalumab, tibulizumab, belantamab mafodotin, teclistamab, teclistamab, detumomab, nacolomab tafenatox, eculizumab, lendalizumab, pexelizumab, pozelimab, ravulizumab, tesidolumab, vilobelimab, abagovomab, igovomab, oregovomab, sofituzumab vedotin, cantuzumab mertansine, cantuzuma bravtansine, girentuximab, altumomab pentetate, arcitumomab, besilesomab, bertilimumab, plozalizumab, mogamulizumab, leronlimab, PRO140, rovelizumab, rovelizumab, talacotuzumab, benralizumab, tavolimab, vonlerolizumab, gavilimomab, ziralimumab, fanolesomab, ipilimumab, ruplizumab, toralizumab, dapirolizumab pegol, toralizumab, dapirolizumab pegol, ruplizumab, blinatumomab, inebilizumab, loncastuximab tesirine, SGN-CD19A, tafasitamab, taplitumomab paptox, XMAB-5574, Budoprutug, Obexelimab, duvortuxizumab, englumafusp alfa, Emfizatamab, zeripatamig, siplizumab, blontuvetmab, FBTA05, ibritumomab tiuxetan, obinutuzumab, ocaratuzumab, ocrelizumab, ofatumumab, rituximab, tositumomab, ublituximab, veltuzumab, divozilimab, eramkafusp alfa, ripertamab, zuberitamab, glofitamab, nofetumomab merpentan, samalizumab, imvotamab, odronextamab, plamotamab, bectumomab, inotuzumab ozogamicin, moxetumomab pasudotox, pinatuzumab vedotin, gomiliximab, lumiliximab, inolimomab, inolimomab, daclizumab, camidanluma btesirine, basiliximab, varlilumab, omburtamab, enoblituzumab, vopratelimab, lulizumabpegol, TGN1412, muromonab-CD3, otelixizumab, teplizumab, visilizumab, epcoritamab, epcoritamab, brentuximab vedotin, iratumumab, azintuxizumab vedotin, gemtuzumab ozogamicin, lintuzumab, vadastuximab talirine, naratuximab emtansine, otlertuzumab, lilotomab satetraxetan, tetulomab, daratumumab, isatuximab, foralumab, mosunetuzumab, mosunetuzumab, cedelizumab, ibalizumab, keliximab, priliximab, tregalizumab, zanolimumab, bleselumab, iscalimab, lucatumumab, ravagalimab, selicrelumab, teneliximab, vanalimab, abciximab, bivatuzumab, iomab-B, telimomab aritox, zolimomab aritox, abituzumab, intetumumab, alemtuzumab, tamtuvetmab, lorvotuzumab mertansine, itolizumab, cusatuzumab, vorsetuzumab mafodotin, milatuzumab, iladatuzumab vedotin, polatuzumab vedotin, galiximab, cibisatamab, zolbetuximab, naxitamab, tisotumab vedotin, olendalizumab, pamrevlumab, lacnotuzumab, cabiralizumab, emactuzumab, axatilimab, gimsilumab, lenzilumab, namilumab, tremelimumab, ulocuplumab, tepoditamab, rovalpituzumab tesirine, tarlatamab, demcizumab, navicixizumab, drozitumab, parsatuzumab, depatuxizumab mafodotin, modotuximab, carotuximab, adecatumumab, adecatumumab, oportuzumab monatox, solitomab, tucotuzumab celmoleukin, edrecolomab, catumaxomab, ifabotuzumab, fibatuzumab, zalutumumab, panitumumab, cetuximab, futuximab, imgatuzumab, laprituximab emtansine, matuzumab, necitumumab, nimotuzumab, tomuzotuximab, amivantamab, amivantamab, epitumomab cituxetan, sontuzumab, duligotuzumab, elgemtumab, lumretuzumab, patritumab, seribantumab, zenocutuzumab, sibrotuzumab, burosumab, aprutumab ixadotin, radretumab, pasotuxizumab, farletuzumab, mirvetuximab soravtansine, vantictumab, TRBS07, 3F8, dinutuximab, dinutuximab beta, ecromeximab, mitumomab, andecaliximab, capromab, codrituzumab, glembatumumab vedotin, talquetamab, talquetamab, trevogrumab, indusatumab vedotin, ficlatuzumab, rilotumumab, zatuximab, pentuzimab, pentuzimab, margetuximab, timigutuzumab, trastuzumab, trastuzumab duocarmazine, trastuzumab emtansine, gancotamab, pertuzumab, ertumaxomab, emibetuzumab, telisotuzumab, telisotuzumab vedotin, derlotuximab biotin, apolizumab, onartuzumab, bersanlimab, enlimomabpegol, rontalizumab, sifalimumab, talizumab, ganitumab, istiratumab, robatumumab, teprotumumab, figitumumab, ganitumab, istiratumab, robatumumab, teprotumumab, cixutumumab, dalotuzumab, xentuzumab, dusigitumab, canakinumab, ustekinumab, ustekinumab, ustekinumab, briakinumab, briakinumab, abrezekimab, lebrikizumab, romilkimab, TNX-650, tralokinumab, anrukinzumab, brodalumab, ixekizumab, netakimab, perakizumab, secukinumab, vunakizumab, afasevikumab, afascvikumab, bimekizumab, bimekizumab, remtolumab, bermekimab, lutikizumab, lutikizumab, gevokizumab, cergutuzumab amunaleukin, fletikumab, fezakinumab, brazikumab, guselkumab, mirikizumab, tildrakizumab, risankizumab, flotetuzumab, nemolizumab, pascolizumab, dupilumab, mepolizumab, reslizumab, clazakizumab, elsilimomab, olokizumab, sarilumab, siltuximab, sirukumab, vobarilizumab, tocilizumab, SA237, satralizumab, enokizumab, prezalizumab, natalizumab, abrilumab, abrilumab, vedolizumab, volociximab, tadocizumab, etaracizumab, etrolizumab, spesolimab, vatelizumab, erlizumab, lirilumab, relatlimab, cBR96-doxorubicinimmunoconjugate, odulimomab, efalizumab, ladiratuzumab vedotin, simtuzumab, samrotamab vedotin, aselizumab, lupartumab amadotin, imalumab, carlumab, imaprelimab, amatuximab, amatuximab, anetumab ravtansine, narnatumab, clivatuzumab tetraxetan, pemtumomab, gatipotuzumab, ensituximab, lemalesomab, sulesomab, enfortumab vedotin, racotumomab, monalizumab, brontictuzumab, tarextumab, vesencumab, oxelumab, gilvetmab, tislelizumab, dostarlimab, BCD-100, nivolumab, PDR001, pembrolizumab, pidilizumab, retifanlimab, spartalizumab, sintilimab, cemiplimab, olaratumab, tovetumab, rinucumab, atezolizumab, avelumab, durvalumab, lifastuzumab vedotin, bavituximab, acapatamab, capromab, rosopatamab, nezastomig, pasotuxizumab, pelgifatamab, voxalatamab, cofetuzumab pelidotin, denosumab, rosmantuzumab, cirmtuzumab, atinumab, indatuximab ravtansine, elotuzumab, sirtratumab vedotin, sonepcizumab, vandortuzumab vedotin, minretumomab, satumomab pendetide, maslimomab, ontuxizumab, tenatumomab, fresolimumab, metelimumab, lerdelimumab, tezepelumab, etigilimab, tiragotumab, placulumab, prezalumab, infliximab, nerelimomab, ozoralizumab, adalimumab, afelimomab, certolizumab pegol, golimumab, mapatumumab, conatumumab, lexatumumab, tigatuzumab, sacituzumab govitecan, votumumab, pogalizumab, letolizumab, pankomab, anatumomab mafenatox, enavatuzumab, flanvotumab, brolucizumab, ranibizumab, varisacumab, bevacizumab, faricimab, icrucumab, alacizumab pegol, ramucirumab, pritumumab, and onvatilimab.

[7742] In some aspects, the VL1 comprises a VL of an antibody selected from the group consisting of losatuxizumab vedotin, utomilumab, urelumab, oleclumab, naptumomab estafenatox, ascrinvacumab, pintumomab, tacatuzumab tetraxetan, nesvacumab, vanucizumab, timolumab, vapaliximab, vepalimomab, enapotamab vedotin, ianalumab, belimumab, tabalumab, tibulizumab, belantamab mafodotin, teclistamab, teclistamab, detumomab, nacolomab tafenatox, eculizumab, lendalizumab, pexelizumab, pozelimab, ravulizumab, tesidolumab, vilobelimab, abagovomab, igovomab, oregovomab, sofituzumab vedotin, cantuzumab mertansine, cantuzuma bravtansine, girentuximab, altumomab pentetate, arcitumomab, besilesomab, bertilimumab, plozalizumab, mogamulizumab, leronlimab, PRO140, rovelizumab, rovelizumab, talacotuzumab, benralizumab, tavolimab, vonlerolizumab, gavilimomab, ziralimumab, fanolesomab, ipilimumab, ruplizumab, toralizumab, dapirolizumab pegol, toralizumab, dapirolizumab pegol, ruplizumab, blinatumomab, inebilizumab, loncastuximab tesirine, SGN-CD19A, tafasitamab, taplitumomab paptox, XMAB-5574, Budoprutug, Obexelimab, duvortuxizumab, englumafusp alfa, Emfizatamab, zeripatamig, siplizumab, blontuvetmab, FBTA05, ibritumomab tiuxetan, obinutuzumab, ocaratuzumab, ocrelizumab, ofatumumab, rituximab, tositumomab, ublituximab, veltuzumab, divozilimab, eramkafusp alfa, ripertamab, zuberitamab, glofitamab, nofetumomab merpentan, samalizumab, imvotamab, odronextamab, plamotamab, bectumomab, inotuzumab ozogamicin, moxetumomab pasudotox, pinatuzumab vedotin, gomiliximab, lumiliximab, inolimomab, inolimomab, daclizumab, camidanluma btesirine, basiliximab, varlilumab, omburtamab, enoblituzumab, vopratelimab, lulizumabpegol, TGN1412, muromonab-CD3, otelixizumab, teplizumab, visilizumab, epcoritamab, epcoritamab, brentuximab vedotin, iratumumab, azintuxizumab vedotin, gemtuzumab ozogamicin, lintuzumab, vadastuximab talirine, naratuximab emtansine, otlertuzumab, lilotomab satetraxetan, tetulomab, daratumumab, isatuximab, foralumab, mosunetuzumab, mosunetuzumab, cedelizumab, ibalizumab, keliximab, priliximab, tregalizumab, zanolimumab, bleselumab, iscalimab, lucatumumab, ravagalimab, selicrelumab, teneliximab, vanalimab, abciximab, bivatuzumab, iomab-B, telimomab aritox, zolimomab aritox, abituzumab, intetumumab, alemtuzumab, tamtuvetmab, lorvotuzumab mertansine, itolizumab, cusatuzumab, vorsetuzumab mafodotin, milatuzumab, iladatuzumab vedotin, polatuzumab vedotin, galiximab, cibisatamab, zolbetuximab, naxitamab, tisotumab vedotin, olendalizumab, pamrevlumab, lacnotuzumab, cabiralizumab, emactuzumab, axatilimab, gimsilumab, lenzilumab, namilumab, tremelimumab, ulocuplumab, tepoditamab, rovalpituzumab tesirine, tarlatamab, demcizumab, navicixizumab, drozitumab, parsatuzumab, depatuxizumab mafodotin, modotuximab, carotuximab, adecatumumab, adecatumumab, oportuzumab monatox, solitomab, tucotuzumab celmoleukin, edrecolomab, catumaxomab, ifabotuzumab, fibatuzumab, zalutumumab, panitumumab, cetuximab, futuximab, imgatuzumab, laprituximab emtansine, matuzumab, necitumumab, nimotuzumab, tomuzotuximab, amivantamab, amivantamab, epitumomab cituxetan, sontuzumab, duligotuzumab, elgemtumab, lumretuzumab, patritumab, seribantumab, zenocutuzumab, sibrotuzumab, burosumab, aprutumab ixadotin, radretumab, pasotuxizumab, farletuzumab, mirvetuximab soravtansine, vantictumab, TRBS07, 3F8, dinutuximab, dinutuximab beta, ecromeximab, mitumomab, andecaliximab, capromab, codrituzumab, glembatumumab vedotin, talquetamab, talquetamab, trevogrumab, indusatumab vedotin, ficlatuzumab, rilotumumab, zatuximab, pentuzimab, pentuzimab, margetuximab, timigutuzumab, trastuzumab, trastuzumab duocarmazine, trastuzumab emtansine, gancotamab, pertuzumab, ertumaxomab, emibetuzumab, telisotuzumab, telisotuzumab vedotin, derlotuximab biotin, apolizumab, onartuzumab, bersanlimab, enlimomabpegol, rontalizumab, sifalimumab, talizumab, ganitumab, istiratumab, robatumumab, teprotumumab, figitumumab, ganitumab, istiratumab, robatumumab, teprotumumab, cixutumumab, dalotuzumab, xentuzumab, dusigitumab, canakinumab, ustekinumab, ustekinumab, ustekinumab, briakinumab, briakinumab, abrezekimab, lebrikizumab, romilkimab, TNX-650, tralokinumab, anrukinzumab, brodalumab, ixekizumab, netakimab, perakizumab, secukinumab, vunakizumab, afasevikumab, afasevikumab, bimekizumab, bimekizumab, remtolumab, bermekimab, lutikizumab, lutikizumab, gevokizumab, cergutuzumab amunaleukin, fletikumab, fezakinumab, brazikumab, guselkumab, mirikizumab, tildrakizumab, risankizumab, flotetuzumab, nemolizumab, pascolizumab, dupilumab, mepolizumab, reslizumab, clazakizumab, elsilimomab, olokizumab, sarilumab, siltuximab, sirukumab, vobarilizumab, tocilizumab, SA237, satralizumab, enokizumab, prezalizumab, natalizumab, abrilumab, abrilumab, vedolizumab, volociximab, tadocizumab, etaracizumab, etrolizumab, spesolimab, vatelizumab, erlizumab, lirilumab, relatlimab, cBR96-doxorubicinimmunoconjugate, odulimomab, efalizumab, ladiratuzumab vedotin, simtuzumab, samrotamab vedotin, aselizumab, lupartumab amadotin, imalumab, carlumab, imaprelimab, amatuximab, amatuximab, anetumab ravtansine, narnatumab, clivatuzumab tetraxetan, pemtumomab, gatipotuzumab, ensituximab, lemalesomab, sulesomab, enfortumab vedotin, racotumomab, monalizumab, brontictuzumab, tarextumab, vesencumab, oxelumab, gilvetmab, tislelizumab, dostarlimab, BCD-100, nivolumab, PDR001, pembrolizumab, pidilizumab, retifanlimab, spartalizumab, sintilimab, cemiplimab, olaratumab, tovetumab, rinucumab, atezolizumab, avelumab, durvalumab, lifastuzumab vedotin, bavituximab, acapatamab, capromab, rosopatamab, nezastomig, pasotuxizumab, pelgifatamab, voxalatamab, cofetuzumab pelidotin, denosumab, rosmantuzumab, cirmtuzumab, atinumab, indatuximab ravtansine, elotuzumab, sirtratumab vedotin, sonepcizumab, vandortuzumab vedotin, minretumomab, satumomab pendetide, maslimomab, ontuxizumab, tenatumomab, fresolimumab, metelimumab, lerdelimumab, tezepelumab, etigilimab, tiragotumab, placulumab, prezalumab, infliximab, nerelimomab, ozoralizumab, adalimumab, afelimomab, certolizumab pegol, golimumab, mapatumumab, conatumumab, lexatumumab, tigatuzumab, sacituzumab govitecan, votumumab, pogalizumab, letolizumab, pankomab, anatumomab mafenatox, enavatuzumab, flanvotumab, brolucizumab, ranibizumab, varisacumab, bevacizumab, faricimab, icrucumab, alacizumab pegol, ramucirumab, pritumumab, and onvatilimab.

[7743] In some aspects, the VL2 comprises a VL of an antibody selected from the group consisting of losatuxizumab vedotin, utomilumab, urelumab, oleclumab, naptumomab estafenatox, ascrinvacumab, pintumomab, tacatuzumab tetraxetan, nesvacumab, vanucizumab, timolumab, vapaliximab, vepalimomab, enapotamab vedotin, ianalumab, belimumab, tabalumab, tibulizumab, belantamab mafodotin, teclistamab, teclistamab, detumomab, nacolomab tafenatox, eculizumab, lendalizumab, pexelizumab, pozelimab, ravulizumab, tesidolumab, vilobelimab, abagovomab, igovomab, oregovomab, sofituzumab vedotin, cantuzumab mertansine, cantuzuma bravtansine, girentuximab, altumomab pentetate, arcitumomab, besilesomab, bertilimumab, plozalizumab, mogamulizumab, leronlimab, PRO140, rovelizumab, rovelizumab, talacotuzumab, benralizumab, tavolimab, vonlerolizumab, gavilimomab, ziralimumab, fanolesomab, ipilimumab, ruplizumab, toralizumab, dapirolizumab pegol, toralizumab, dapirolizumab pegol, ruplizumab, blinatumomab, inebilizumab, loncastuximab tesirine, SGN-CD19A, tafasitamab, taplitumomab paptox, XMAB-5574, Budoprutug, Obexelimab, duvortuxizumab, englumafusp alfa, Emfizatamab, zeripatamig, siplizumab, blontuvetmab, FBTA05, ibritumomab tiuxetan, obinutuzumab, ocaratuzumab, ocrelizumab, ofatumumab, rituximab, tositumomab, ublituximab, veltuzumab, divozilimab, eramkafusp alfa, ripertamab, zuberitamab, glofitamab, nofetumomab merpentan, samalizumab, imvotamab, odronextamab, plamotamab, bectumomab, inotuzumab ozogamicin, moxetumomab pasudotox, pinatuzumab vedotin, gomiliximab, lumiliximab, inolimomab, inolimomab, daclizumab, camidanluma btesirine, basiliximab, varlilumab, omburtamab, enoblituzumab, vopratelimab, lulizumabpegol, TGN1412, muromonab-CD3, otelixizumab, teplizumab, visilizumab, epcoritamab, epcoritamab, brentuximab vedotin, iratumumab, azintuxizumab vedotin, gemtuzumab ozogamicin, lintuzumab, vadastuximab talirine, naratuximab emtansine, otlertuzumab, lilotomab satetraxetan, tetulomab, daratumumab, isatuximab, foralumab, mosunetuzumab, mosunetuzumab, cedelizumab, ibalizumab, keliximab, priliximab, tregalizumab, zanolimumab, bleselumab, iscalimab, lucatumumab, ravagalimab, selicrelumab, teneliximab, vanalimab, abciximab, bivatuzumab, iomab-B, telimomab aritox, zolimomab aritox, abituzumab, intetumumab, alemtuzumab, tamtuvetmab, lorvotuzumab mertansine, itolizumab, cusatuzumab, vorsetuzumab mafodotin, milatuzumab, iladatuzumab vedotin, polatuzumab vedotin, galiximab, cibisatamab, zolbetuximab, naxitamab, tisotumab vedotin, olendalizumab, pamrevlumab, lacnotuzumab, cabiralizumab, emactuzumab, axatilimab, gimsilumab, lenzilumab, namilumab, tremelimumab, ulocuplumab, tepoditamab, rovalpituzumab tesirine, tarlatamab, demcizumab, navicixizumab, drozitumab, parsatuzumab, depatuxizumab mafodotin, modotuximab, carotuximab, adecatumumab, adecatumumab, oportuzumab monatox, solitomab, tucotuzumab celmoleukin, edrecolomab, catumaxomab, ifabotuzumab, fibatuzumab, zalutumumab, panitumumab, cetuximab, futuximab, imgatuzumab, laprituximab emtansine, matuzumab, necitumumab, nimotuzumab, tomuzotuximab, amivantamab, amivantamab, epitumomab cituxetan, sontuzumab, duligotuzumab, elgemtumab, lumretuzumab, patritumab, seribantumab, zenocutuzumab, sibrotuzumab, burosumab, aprutumab ixadotin, radretumab, pasotuxizumab, farletuzumab, mirvetuximab soravtansine, vantictumab, TRBS07, 3F8, dinutuximab, dinutuximab beta, ecromeximab, mitumomab, andecaliximab, capromab, codrituzumab, glembatumumab vedotin, talquetamab, talquetamab, trevogrumab, indusatumab vedotin, ficlatuzumab, rilotumumab, zatuximab, pentuzimab, pentuzimab, margetuximab, timigutuzumab, trastuzumab, trastuzumab duocarmazine, trastuzumab emtansine, gancotamab, pertuzumab, ertumaxomab, emibetuzumab, telisotuzumab, telisotuzumab vedotin, derlotuximab biotin, apolizumab, onartuzumab, bersanlimab, enlimomabpegol, rontalizumab, sifalimumab, talizumab, ganitumab, istiratumab, robatumumab, teprotumumab, figitumumab, ganitumab, istiratumab, robatumumab, teprotumumab, cixutumumab, dalotuzumab, xentuzumab, dusigitumab, canakinumab, ustekinumab, ustekinumab, ustekinumab, briakinumab, briakinumab, abrezekimab, lebrikizumab, romilkimab, TNX-650, tralokinumab, anrukinzumab, brodalumab, ixekizumab, netakimab, perakizumab, secukinumab, vunakizumab, afasevikumab, afasevikumab, bimekizumab, bimekizumab, remtolumab, bermekimab, lutikizumab, lutikizumab, gevokizumab, cergutuzumab amunaleukin, fletikumab, fezakinumab, brazikumab, guselkumab, mirikizumab, tildrakizumab, risankizumab, flotetuzumab, nemolizumab, pascolizumab, dupilumab, mepolizumab, reslizumab, clazakizumab, elsilimomab, olokizumab, sarilumab, siltuximab, sirukumab, vobarilizumab, tocilizumab, SA237, satralizumab, enokizumab, prezalizumab, natalizumab, abrilumab, abrilumab, vedolizumab, volociximab, tadocizumab, etaracizumab, etrolizumab, spesolimab, vatelizumab, erlizumab, lirilumab, relatlimab, cBR96-doxorubicinimmunoconjugate, odulimomab, efalizumab, ladiratuzumab vedotin, simtuzumab, samrotamab vedotin, aselizumab, lupartumab amadotin, imalumab, carlumab, imaprelimab, amatuximab, amatuximab, anetumab ravtansine, narnatumab, clivatuzumab tetraxetan, pemtumomab, gatipotuzumab, ensituximab, lemalesomab, sulesomab, enfortumab vedotin, racotumomab, monalizumab, brontictuzumab, tarextumab, vesencumab, oxelumab, gilvetmab, tislelizumab, dostarlimab, BCD-100, nivolumab, PDR001, pembrolizumab, pidilizumab, retifanlimab, spartalizumab, sintilimab, cemiplimab, olaratumab, tovetumab, rinucumab, atezolizumab, avelumab, durvalumab, lifastuzumab vedotin, bavituximab, acapatamab, capromab, rosopatamab, nezastomig, pasotuxizumab, pelgifatamab, voxalatamab, cofetuzumab pelidotin, denosumab, rosmantuzumab, cirmtuzumab, atinumab, indatuximab ravtansine, elotuzumab, sirtratumab vedotin, sonepcizumab, vandortuzumab vedotin, minretumomab, satumomab pendetide, maslimomab, ontuxizumab, tenatumomab, fresolimumab, metelimumab, lerdelimumab, tezepelumab, etigilimab, tiragotumab, placulumab, prezalumab, infliximab, nerelimomab, ozoralizumab, adalimumab, afelimomab, certolizumab pegol, golimumab, mapatumumab, conatumumab, lexatumumab, tigatuzumab, sacituzumab govitecan, votumumab, pogalizumab, letolizumab, pankomab, anatumomab mafenatox, enavatuzumab, flanvotumab, brolucizumab, ranibizumab, varisacumab, bevacizumab, faricimab, icrucumab, alacizumab pegol, ramucirumab, pritumumab, and onvatilimab.

[7744] In some aspects, the VH1 comprises a VH of an antibody selected from the group consisting of losatuxizumab vedotin, utomilumab, urelumab, oleclumab, naptumomab estafenatox, ascrinvacumab, pintumomab, tacatuzumab tetraxetan, nesvacumab, vanucizumab, timolumab, vapaliximab, vepalimomab, enapotamab vedotin, ianalumab, belimumab, tabalumab, tibulizumab, belantamab mafodotin, teclistamab, teclistamab, detumomab, nacolomab tafenatox, eculizumab, lendalizumab, pexelizumab, pozelimab, ravulizumab, tesidolumab, vilobelimab, abagovomab, igovomab, oregovomab, sofituzumab vedotin, cantuzumab mertansine, cantuzuma bravtansine, girentuximab, altumomab pentetate, arcitumomab, besilesomab, bertilimumab, plozalizumab, mogamulizumab, leronlimab, PRO140, rovelizumab, rovelizumab, talacotuzumab, benralizumab, tavolimab, vonlerolizumab, gavilimomab, ziralimumab, fanolesomab, ipilimumab, ruplizumab, toralizumab, dapirolizumab pegol, toralizumab, dapirolizumab pegol, ruplizumab, blinatumomab, inebilizumab, loncastuximab tesirine, SGN-CD19A, tafasitamab, taplitumomab paptox, XMAB-5574, Budoprutug, Obexelimab, duvortuxizumab, englumafusp alfa, Emfizatamab, zeripatamig, siplizumab, blontuvetmab, FBTA05, ibritumomab tiuxetan, obinutuzumab, ocaratuzumab, ocrelizumab, ofatumumab, rituximab, tositumomab, ublituximab, veltuzumab, divozilimab, eramkafusp alfa, ripertamab, zuberitamab, glofitamab, nofetumomab merpentan, samalizumab, imvotamab, odronextamab, plamotamab, bectumomab, inotuzumab ozogamicin, moxetumomab pasudotox, pinatuzumab vedotin, gomiliximab, lumiliximab, inolimomab, inolimomab, daclizumab, camidanluma btesirine, basiliximab, varlilumab, omburtamab, enoblituzumab, vopratelimab, lulizumabpegol, TGN1412, muromonab-CD3, otelixizumab, teplizumab, visilizumab, epcoritamab, epcoritamab, brentuximab vedotin, iratumumab, azintuxizumab vedotin, gemtuzumab ozogamicin, lintuzumab, vadastuximab talirine, naratuximab emtansine, otlertuzumab, lilotomab satetraxetan, tetulomab, daratumumab, isatuximab, foralumab, mosunetuzumab, mosunetuzumab, cedelizumab, ibalizumab, keliximab, priliximab, tregalizumab, zanolimumab, bleselumab, iscalimab, lucatumumab, ravagalimab, selicrelumab, teneliximab, vanalimab, abciximab, bivatuzumab, iomab-B, telimomab aritox, zolimomab aritox, abituzumab, intetumumab, alemtuzumab, tamtuvetmab, lorvotuzumab mertansine, itolizumab, cusatuzumab, vorsetuzumab mafodotin, milatuzumab, iladatuzumab vedotin, polatuzumab vedotin, galiximab, cibisatamab, zolbetuximab, naxitamab, tisotumab vedotin, olendalizumab, pamrevlumab, lacnotuzumab, cabiralizumab, emactuzumab, axatilimab, gimsilumab, lenzilumab, namilumab, tremelimumab, ulocuplumab, tepoditamab, rovalpituzumab tesirine, tarlatamab, demcizumab, navicixizumab, drozitumab, parsatuzumab, depatuxizumab mafodotin, modotuximab, carotuximab, adecatumumab, adecatumumab, oportuzumab monatox, solitomab, tucotuzumab celmoleukin, edrecolomab, catumaxomab, ifabotuzumab, fibatuzumab, zalutumumab, panitumumab, cetuximab, futuximab, imgatuzumab, laprituximab emtansine, matuzumab, necitumumab, nimotuzumab, tomuzotuximab, amivantamab, amivantamab, epitumomab cituxetan, sontuzumab, duligotuzumab, elgemtumab, lumretuzumab, patritumab, seribantumab, zenocutuzumab, sibrotuzumab, burosumab, aprutumab ixadotin, radretumab, pasotuxizumab, farletuzumab, mirvetuximab soravtansine, vantictumab, TRBS07, 3F8, dinutuximab, dinutuximab beta, ecromeximab, mitumomab, andecaliximab, capromab, codrituzumab, glembatumumab vedotin, talquetamab, talquetamab, trevogrumab, indusatumab vedotin, ficlatuzumab, rilotumumab, zatuximab, pentuzimab, pentuzimab, margetuximab, timigutuzumab, trastuzumab, trastuzumab duocarmazine, trastuzumab emtansine, gancotamab, pertuzumab, ertumaxomab, emibetuzumab, telisotuzumab, telisotuzumab vedotin, derlotuximab biotin, apolizumab, onartuzumab, bersanlimab, enlimomabpegol, rontalizumab, sifalimumab, talizumab, ganitumab, istiratumab, robatumumab, teprotumumab, figitumumab, ganitumab, istiratumab, robatumumab, teprotumumab, cixutumumab, dalotuzumab, xentuzumab, dusigitumab, canakinumab, ustekinumab, ustekinumab, ustekinumab, briakinumab, briakinumab, abrezekimab, lebrikizumab, romilkimab, TNX-650, tralokinumab, anrukinzumab, brodalumab, ixekizumab, netakimab, perakizumab, secukinumab, vunakizumab, afasevikumab, afasevikumab, bimekizumab, bimekizumab, remtolumab, bermekimab, lutikizumab, lutikizumab, gevokizumab, cergutuzumab amunaleukin, fletikumab, fezakinumab, brazikumab, guselkumab, mirikizumab, tildrakizumab, risankizumab, flotetuzumab, nemolizumab, pascolizumab, dupilumab, mepolizumab, reslizumab, clazakizumab, elsilimomab, olokizumab, sarilumab, siltuximab, sirukumab, vobarilizumab, tocilizumab, SA237, satralizumab, enokizumab, prezalizumab, natalizumab, abrilumab, abrilumab, vedolizumab, volociximab, tadocizumab, etaracizumab, etrolizumab, spesolimab, vatelizumab, erlizumab, lirilumab, relatlimab, cBR96-doxorubicinimmunoconjugate, odulimomab, efalizumab, ladiratuzumab vedotin, simtuzumab, samrotamab vedotin, aselizumab, lupartumab amadotin, imalumab, carlumab, imaprelimab, amatuximab, amatuximab, anetumab ravtansine, narnatumab, clivatuzumab tetraxetan, pemtumomab, gatipotuzumab, ensituximab, lemalesomab, sulesomab, enfortumab vedotin, racotumomab, monalizumab, brontictuzumab, tarextumab, vesencumab, oxelumab, gilvetmab, tislelizumab, dostarlimab, BCD-100, nivolumab, PDR001, pembrolizumab, pidilizumab, retifanlimab, spartalizumab, sintilimab, cemiplimab, olaratumab, tovetumab, rinucumab, atezolizumab, avelumab, durvalumab, lifastuzumab vedotin, bavituximab, acapatamab, capromab, rosopatamab, nezastomig, pasotuxizumab, pelgifatamab, voxalatamab, cofetuzumab pelidotin, denosumab, rosmantuzumab, cirmtuzumab, atinumab, indatuximab ravtansine, elotuzumab, sirtratumab vedotin, sonepcizumab, vandortuzumab vedotin, minretumomab, satumomab pendetide, maslimomab, ontuxizumab, tenatumomab, fresolimumab, metelimumab, lerdelimumab, tezepelumab, etigilimab, tiragotumab, placulumab, prezalumab, infliximab, nerelimomab, ozoralizumab, adalimumab, afelimomab, certolizumab pegol, golimumab, mapatumumab, conatumumab, lexatumumab, tigatuzumab, sacituzumab govitecan, votumumab, pogalizumab, letolizumab, pankomab, anatumomab mafenatox, enavatuzumab, flanvotumab, brolucizumab, ranibizumab, varisacumab, bevacizumab, faricimab, icrucumab, alacizumab pegol, ramucirumab, pritumumab, and onvatilimab.

[7745] In some aspects, the VH2 comprises a VH of an antibody selected from the group consisting of losatuxizumab vedotin, utomilumab, urelumab, oleclumab, naptumomab estafenatox, ascrinvacumab, pintumomab, tacatuzumab tetraxetan, nesvacumab, vanucizumab, timolumab, vapaliximab, vepalimomab, enapotamab vedotin, ianalumab, belimumab, tabalumab, tibulizumab, belantamab mafodotin, teclistamab, teclistamab, detumomab, nacolomab tafenatox, eculizumab, lendalizumab, pexelizumab, pozelimab, ravulizumab, tesidolumab, vilobelimab, abagovomab, igovomab, oregovomab, sofituzumab vedotin, cantuzumab mertansine, cantuzuma bravtansine, girentuximab, altumomab pentetate, arcitumomab, besilesomab, bertilimumab, plozalizumab, mogamulizumab, leronlimab, PRO140, rovelizumab, rovelizumab, talacotuzumab, benralizumab, tavolimab, vonlerolizumab, gavilimomab, ziralimumab, fanolesomab, ipilimumab, ruplizumab, toralizumab, dapirolizumab pegol, toralizumab, dapirolizumab pegol, ruplizumab, blinatumomab, inebilizumab, loncastuximab tesirine, SGN-CD19A, tafasitamab, taplitumomab paptox, XMAB-5574, Budoprutug, Obexelimab, duvortuxizumab, englumafusp alfa, Emfizatamab, zeripatamig, siplizumab, blontuvetmab, FBTA05, ibritumomab tiuxetan, obinutuzumab, ocaratuzumab, ocrelizumab, ofatumumab, rituximab, tositumomab, ublituximab, veltuzumab, divozilimab, eramkafusp alfa, ripertamab, zuberitamab, glofitamab, nofetumomab merpentan, samalizumab, imvotamab, odronextamab, plamotamab, bectumomab, inotuzumab ozogamicin, moxetumomab pasudotox, pinatuzumab vedotin, gomiliximab, lumiliximab, inolimomab, inolimomab, daclizumab, camidanluma btesirine, basiliximab, varlilumab, omburtamab, enoblituzumab, vopratelimab, lulizumabpegol, TGN1412, muromonab-CD3, otelixizumab, teplizumab, visilizumab, epcoritamab, epcoritamab, brentuximab vedotin, iratumumab, azintuxizumab vedotin, gemtuzumab ozogamicin, lintuzumab, vadastuximab talirine, naratuximab emtansine, otlertuzumab, lilotomab satetraxetan, tetulomab, daratumumab, isatuximab, foralumab, mosunetuzumab, mosunetuzumab, cedelizumab, ibalizumab, keliximab, priliximab, tregalizumab, zanolimumab, bleselumab, iscalimab, lucatumumab, ravagalimab, selicrelumab, teneliximab, vanalimab, abciximab, bivatuzumab, iomab-B, telimomab aritox, zolimomab aritox, abituzumab, intetumumab, alemtuzumab, tamtuvetmab, lorvotuzumab mertansine, itolizumab, cusatuzumab, vorsetuzumab mafodotin, milatuzumab, iladatuzumab vedotin, polatuzumab vedotin, galiximab, cibisatamab, zolbetuximab, naxitamab, tisotumab vedotin, olendalizumab, pamrevlumab, lacnotuzumab, cabiralizumab, emactuzumab, axatilimab, gimsilumab, lenzilumab, namilumab, tremelimumab, ulocuplumab, tepoditamab, rovalpituzumab tesirine, tarlatamab, demcizumab, navicixizumab, drozitumab, parsatuzumab, depatuxizumab mafodotin, modotuximab, carotuximab, adecatumumab, adecatumumab, oportuzumab monatox, solitomab, tucotuzumab celmoleukin, edrecolomab, catumaxomab, ifabotuzumab, fibatuzumab, zalutumumab, panitumumab, cetuximab, futuximab, imgatuzumab, laprituximab emtansine, matuzumab, necitumumab, nimotuzumab, tomuzotuximab, amivantamab, amivantamab, epitumomab cituxetan, sontuzumab, duligotuzumab, elgemtumab, lumretuzumab, patritumab, seribantumab, zenocutuzumab, sibrotuzumab, burosumab, aprutumab ixadotin, radretumab, pasotuxizumab, farletuzumab, mirvetuximab soravtansine, vantictumab, TRBS07, 3F8, dinutuximab, dinutuximab beta, ecromeximab, mitumomab, andecaliximab, capromab, codrituzumab, glembatumumab vedotin, talquetamab, talquetamab, trevogrumab, indusatumab vedotin, ficlatuzumab, rilotumumab, zatuximab, pentuzimab, pentuzimab, margetuximab, timigutuzumab, trastuzumab, trastuzumab duocarmazine, trastuzumab emtansine, gancotamab, pertuzumab, ertumaxomab, emibetuzumab, telisotuzumab, telisotuzumab vedotin, derlotuximab biotin, apolizumab, onartuzumab, bersanlimab, enlimomabpegol, rontalizumab, sifalimumab, talizumab, ganitumab, istiratumab, robatumumab, teprotumumab, figitumumab, ganitumab, istiratumab, robatumumab, teprotumumab, cixutumumab, dalotuzumab, xentuzumab, dusigitumab, canakinumab, ustekinumab, ustekinumab, ustekinumab, briakinumab, briakinumab, abrezekimab, lebrikizumab, romilkimab, TNX-650, tralokinumab, anrukinzumab, brodalumab, ixekizumab, netakimab, perakizumab, secukinumab, vunakizumab, afascvikumab, afascvikumab, bimekizumab, bimekizumab, remtolumab, bermekimab, lutikizumab, lutikizumab, gevokizumab, cergutuzumab amunaleukin, fletikumab, fezakinumab, brazikumab, guselkumab, mirikizumab, tildrakizumab, risankizumab, flotetuzumab, nemolizumab, pascolizumab, dupilumab, mepolizumab, reslizumab, clazakizumab, elsilimomab, olokizumab, sarilumab, siltuximab, sirukumab, vobarilizumab, tocilizumab, SA237, satralizumab, enokizumab, prezalizumab, natalizumab, abrilumab, abrilumab, vedolizumab, volociximab, tadocizumab, etaracizumab, etrolizumab, spesolimab, vatelizumab, erlizumab, lirilumab, relatlimab, cBR96-doxorubicinimmunoconjugate, odulimomab, efalizumab, ladiratuzumab vedotin, simtuzumab, samrotamab vedotin, aselizumab, lupartumab amadotin, imalumab, carlumab, imaprelimab, amatuximab, amatuximab, anetumab ravtansine, narnatumab, clivatuzumab tetraxetan, pemtumomab, gatipotuzumab, ensituximab, lemalesomab, sulesomab, enfortumab vedotin, racotumomab, monalizumab, brontictuzumab, tarextumab, vesencumab, oxelumab, gilvetmab, tislelizumab, dostarlimab, BCD-100, nivolumab, PDR001, pembrolizumab, pidilizumab, retifanlimab, spartalizumab, sintilimab, cemiplimab, olaratumab, tovetumab, rinucumab, atezolizumab, avelumab, durvalumab, lifastuzumab vedotin, bavituximab, acapatamab, capromab, rosopatamab, nezastomig, pasotuxizumab, pelgifatamab, voxalatamab, cofetuzumab pelidotin, denosumab, rosmantuzumab, cirmtuzumab, atinumab, indatuximab ravtansine, elotuzumab, sirtratumab vedotin, sonepcizumab, vandortuzumab vedotin, minretumomab, satumomab pendetide, maslimomab, ontuxizumab, tenatumomab, fresolimumab, metelimumab, lerdelimumab, tezepelumab, etigilimab, tiragotumab, placulumab, prezalumab, infliximab, nerelimomab, ozoralizumab, adalimumab, afelimomab, certolizumab pegol, golimumab, mapatumumab, conatumumab, lexatumumab, tigatuzumab, sacituzumab govitecan, votumumab, pogalizumab, letolizumab, pankomab, anatumomab mafenatox, enavatuzumab, flanvotumab, brolucizumab, ranibizumab, varisacumab, bevacizumab, faricimab, icrucumab, alacizumab pegol, ramucirumab, pritumumab, and onvatilimab.

[7746] In some aspects, the VL1 comprises (i) a complementarity determining region (CDR) 1 having an amino acid sequence that is at least 65%, at least 70%, at least 75%, at least 80%, at least 85%, at least 90%, at least 95%, at least 99%, or 100% identical to any one of SEQ ID NOs: 1096, 1103, 1110, 1120, 1127, 1134, 1141, 1148, 1155, 1162, 1169, 1174, 1181, 1188, 1199, 1211, 1221, 1228, 1235, 1247, 1254, 1261, 1266, 1271, 1278, 1285, 1292, 1299, 1306, 1313, 1319, 1326, 1339, 1352, 1359, 1366, 1373, 1382, 1394, 1401, 1408, 1414, 1421, 1428, 1441, 1448, 1455, 1461, 1468, 1475, 1488, 1495, 1508, 1519, 1526, 1531, 1538, 1544, 1556, 1568, 1574, 1581, 1594, 1601, 1608, 1615, 1622, 1629, 1636, 1643, 1650, 1657, 1672, 1679, 1689, 1697, 1708, 1715, 1718, 1723, 1727, 1738, 1743, 1752, 1761, 1763, 1769, 1776, and 1786; (ii) a CDR2 having an amino acid sequence that is at least 65%, at least 70%, at least 75%, at least 80%, at least 85%, at least 90%, at least 95%, at least 99%, or 100% identical to any one of SEQ ID NOs: 1200, 1212, 1680, 1690, 1698, 1709, 1728, 1739, 1744, 1753, 1770, and 1777; or at least 65%, at least 70%, at least 75%, at least 80%, at least 85%, at least 90%, at least 95%, at least 99%, or 100% identical to any one of amino acid sequences AAS, APS, AT, ATS, DAS, DDG, DDS, DT, DTS, DVS, EAS, FTS, GAF, GAN, GAS, GAT, GIS, GKN, GNS, HTS, KVS, LAS, LGS, LVS, NAK, NTN, QMS, RMS, RTS, SAS, TTS, WAS, YAS, YAT, YGS, YRS, and YTS; and (iii) a CDR3 having an amino acid sequence that is at least 65%, at least 70%, at least 75%, at least 80%, at least 85%, at least 90%, at least 95%, at least 99%, or 100% identical to any one of SEQ ID NOs: 1097, 1104, 1111, 1121, 1128, 1135, 1142, 1149, 1156, 1163, 1170, 1175, 1182, 1189, 1195, 1201, 1207, 1213, 1222, 1229, 1236, 2009, 1248, 1255, 1262, 1267, 1272, 1279, 1286, 1293, 1300, 1307, 1320, 1327, 1333, 1340, 1346, 1353, 1360, 1367, 1374, 1383, 1389, 1395, 1402, 1409, 1415, 1422, 1429, 1435, 1442, 1449, 1456, 1462, 1469, 1476, 1482, 1489, 1496, 1502, 1509, 1513, 1520, 1532, 1539, 1545, 1557, 1562, 1569, 1575, 1582, 1588, 1595, 1602, 1609, 1616, 1623, 1630, 1637, 1644, 1651, 1658, 1663, 1673, 1681, 1691, 1699, 1710, 1729, 1735, 1745, 1751, 1754, 1778, 1787, and 1976.

[7747] In some aspects, the VL2 comprises (i) a complementarity determining region (CDR) 1 having an amino acid sequence that is at least 65%, at least 70%, at least 75%, at least 80%, at least 85%, at least 90%, at least 95%, at least 99%, or 100% identical to any one of SEQ ID NOs: 1096, 1103, 1110, 1120, 1127, 1134, 1141, 1148, 1155, 1162, 1169, 1174, 1181, 1188, 1199, 1211, 1221, 1228, 1235, 1247, 1254, 1261, 1266, 1271, 1278, 1285, 1292, 1299, 1306, 1313, 1319, 1326, 1339, 1352, 1359, 1366, 1373, 1382, 1394, 1401, 1408, 1414, 1421, 1428, 1441, 1448, 1455, 1461, 1468, 1475, 1488, 1495, 1508, 1519, 1526, 1531, 1538, 1544, 1556, 1568, 1574, 1581, 1594, 1601, 1608, 1615, 1622, 1629, 1636, 1643, 1650, 1657, 1672, 1679, 1689, 1697, 1708, 1715, 1718, 1723, 1727, 1738, 1743, 1752, 1761, 1763, 1769, 1776, and 1786; (ii) a CDR2 having an amino acid sequence that is at least 65%, at least 70%, at least 75%, at least 80%, at least 85%, at least 90%, at least 95%, at least 99%, or 100% identical to any one of SEQ ID NOs: 1200, 1212, 1680, 1690, 1698, 1709, 1728, 1739, 1744, 1753, 1770, and 1777; or at least 65%, at least 70%, at least 75%, at least 80%, at least 85%, at least 90%, at least 95%, at least 99%, or 100% identical to any one of amino acid sequences AAS, APS, AT, ATS, DAS, DDG, DDS, DT, DTS, DVS, EAS, FTS, GAF, GAN, GAS, GAT, GIS, GKN, GNS, HTS, KVS, LAS, LGS, LVS, NAK, NTN, QMS, RMS, RTS, SAS, TTS, WAS, YAS, YAT, YGS, YRS, and YTS; and (iii) a CDR3 having an amino acid sequence that is at least 65%, at least 70%, at least 75%, at least 80%, at least 85%, at least 90%, at least 95%, at least 99%, or 100% identical to any one of SEQ ID NOs: 1097, 1104, 1111, 1121, 1128, 1135, 1142, 1149, 1156, 1163, 1170, 1175, 1182, 1189, 1195, 1201, 1207, 1213, 1222, 1229, 1236, 2009, 1248, 1255, 1262, 1267, 1272, 1279, 1286, 1293, 1300, 1307, 1320, 1327, 1333, 1340, 1346, 1353, 1360, 1367, 1374, 1383, 1389, 1395, 1402, 1409, 1415, 1422, 1429, 1435, 1442, 1449, 1456, 1462, 1469, 1476, 1482, 1489, 1496, 1502, 1509, 1513, 1520, 1532, 1539, 1545, 1557, 1562, 1569, 1575, 1582, 1588, 1595, 1602, 1609, 1616, 1623, 1630, 1637, 1644, 1651, 1658, 1663, 1673, 1681, 1691, 1699, 1710, 1729, 1735, 1745, 1751, 1754, 1778, 1787, and 1976.

[7748] In some aspects, the VH1 comprises (i) a complementarity determining region (CDR) 1 having an amino acid sequence that is at least 65%, at least 70%, at least 75%, at least 80%, at least 85%, at least 90%, at least 95%, at least 99%, or 100% identical to any one of SEQ ID NOs: 1099, 1106, 1113, 1117, 1123, 1130, 1137, 1144, 1151, 1158, 1165, 1177, 1184, 1191, 1203, 1215, 1224, 1231, 1238, 1243, 1250, 1257, 1264, 1274, 1281, 1288, 1295, 1302, 1309, 1315, 1322, 1329, 1335, 1342, 1348, 1355, 1362, 1369, 1376, 1385, 1397, 1404, 1417, 1424, 1431, 1437, 1444, 1451, 1458, 1464, 1471, 1478, 1484, 1491, 1498, 1504, 1511, 1515, 1522, 1534, 1547, 1552, 1564, 1577, 1584, 1590, 1597, 1604, 1611, 1618, 1625, 1632, 1639, 1646, 1653, 1660, 1665, 1675, 1683, 1693, 1701, 1705, 1716, 1719, 1731, 1736, 1747, 1756, 1772, 1780, and 1789; (ii) a CDR2 having an amino acid sequence that is at least 65%, at least 70%, at least 75%, at least 80%, at least 85%, at least 90%, at least 95%, at least 99%, or 100% identical to any one of SEQ ID NOs: 1100, 1107, 1114, 1118, 1124, 1131, 1138, 1145, 1152, 1159, 1166, 1178, 1185, 1192, 1204, 1216, 1225, 1232, 1239, 1244, 1251, 1258, 1275, 1282, 1289, 1296, 1303, 1310, 1316, 1323, 1330, 1336, 1343, 1349, 1356, 1363, 1370, 1377, 1386, 1391, 1398, 1405, 1411, 1418, 1425, 1432, 1438, 1445, 1452, 1465, 1472, 1479, 1485, 1492, 1499, 1505, 1516, 1523, 1528, 1535, 1541, 1548, 1553, 1559, 1565, 1571, 1578, 1585, 1591, 1598, 1605, 1612, 1619, 1626, 1633, 1640, 1647, 1654, 1666, 1676, 1684, 1687, 1694, 1702, 1706, 1712, 1717, 1720, 1725, 1732, 1737, 1741, 1748, 1757, 1767, 1773, 1781, and 1790; and (iii) a CDR3 having an amino acid sequence that is at least 65%, at least 70%, at least 75%, at least 80%, at least 85%, at least 90%, at least 95%, at least 99%, or 100% identical to any one of SEQ ID NOs: 1101, 1108, 1115, 1125, 1132, 1139, 1146, 1153, 1160, 1167, 1172, 1179, 1186, 1193, 1197, 1205, 1209, 1217, 1226, 1233, 1240, 1245, 1252, 1259, 1269, 1276, 1283, 1290, 1297, 1304, 1311, 1317, 1324, 1331, 1337, 1344, 1350, 1357, 1364, 1371, 1378, 1387, 1392, 1399, 1406, 1412, 1419, 1426, 1433, 1439, 1446, 1453, 1459, 1466, 1473, 1480, 1486, 1493, 1500, 1506, 1517, 1524, 1529, 1536, 1542, 1549, 1554, 1560, 1566, 1572, 1579, 1586, 1592, 1599, 1606, 1613, 1620, 1627, 1634, 1641, 1648, 1655, 1661, 1667, 1670, 1677, 1685, 1688, 1695, 1703, 1707, 1713, 1733, 1749, 1758, 1762, 1774, 1782, 1791, and 1975.

[7749] In some aspects, the VH2 comprises (i) a complementarity determining region (CDR) 1 having an amino acid sequence that is at least 65%, at least 70%, at least 75%, at least 80%, at least 85%, at least 90%, at least 95%, at least 99%, or 100% identical to any one of SEQ ID NOs: 1099, 1106, 1113, 1117, 1123, 1130, 1137, 1144, 1151, 1158, 1165, 1177, 1184, 1191, 1203, 1215, 1224, 1231, 1238, 1243, 1250, 1257, 1264, 1274, 1281, 1288, 1295, 1302, 1309, 1315, 1322, 1329, 1335, 1342, 1348, 1355, 1362, 1369, 1376, 1385, 1397, 1404, 1417, 1424, 1431, 1437, 1444, 1451, 1458, 1464, 1471, 1478, 1484, 1491, 1498, 1504, 1511, 1515, 1522, 1534, 1547, 1552, 1564, 1577, 1584, 1590, 1597, 1604, 1611, 1618, 1625, 1632, 1639, 1646, 1653, 1660, 1665, 1675, 1683, 1693, 1701, 1705, 1716, 1719, 1731, 1736, 1747, 1756, 1772, 1780, and 1789; (ii) a CDR2 having an amino acid sequence that is at least 65%, at least 70%, at least 75%, at least 80%, at least 85%, at least 90%, at least 95%, at least 99%, or 100% identical to any one of SEQ ID NOs: 1100, 1107, 1114, 1118, 1124, 1131, 1138, 1145, 1152, 1159, 1166, 1178, 1185, 1192, 1204, 1216, 1225, 1232, 1239, 1244, 1251, 1258, 1275, 1282, 1289, 1296, 1303, 1310, 1316, 1323, 1330, 1336, 1343, 1349, 1356, 1363, 1370, 1377, 1386, 1391, 1398, 1405, 1411, 1418, 1425, 1432, 1438, 1445, 1452, 1465, 1472, 1479, 1485, 1492, 1499, 1505, 1516, 1523, 1528, 1535, 1541, 1548, 1553, 1559, 1565, 1571, 1578, 1585, 1591, 1598, 1605, 1612, 1619, 1626, 1633, 1640, 1647, 1654, 1666, 1676, 1684, 1687, 1694, 1702, 1706, 1712, 1717, 1720, 1725, 1732, 1737, 1741, 1748, 1757, 1767, 1773, 1781, and 1790; and (iii) a CDR3 having an amino acid sequence that is at least 65%, at least 70%, at least 75%, at least 80%, at least 85%, at least 90%, at least 95%, at least 99%, or 100% identical to any one of SEQ ID NOs: 1101, 1108, 1115, 1125, 1132, 1139, 1146, 1153, 1160, 1167, 1172, 1179, 1186, 1193, 1197, 1205, 1209, 1217, 1226, 1233, 1240, 1245, 1252, 1259, 1269, 1276, 1283, 1290, 1297, 1304, 1311, 1317, 1324, 1331, 1337, 1344, 1350, 1357, 1364, 1371, 1378, 1387, 1392, 1399, 1406, 1412, 1419, 1426, 1433, 1439, 1446, 1453, 1459, 1466, 1473, 1480, 1486, 1493, 1500, 1506, 1517, 1524, 1529, 1536, 1542, 1549, 1554, 1560, 1566, 1572, 1579, 1586, 1592, 1599, 1606, 1613, 1620, 1627, 1634, 1641, 1648, 1655, 1661, 1667, 1670, 1677, 1685, 1688, 1695, 1703, 1707, 1713, 1733, 1749, 1758, 1762, 1774, 1782, 1791, and 1975.

[7750] In some aspects, the VL1 comprises an amino acid sequence that is at least 65%, at least 70%, at least 75%, at least 80%, at least 85%, at least 90%, at least 95%, at least 99%, or 100% identical to any one of SEQ ID NOs: 1098, 1105, 1112, 1122, 1129, 1136, 1143, 1150, 1157, 1164, 1171, 1176, 1183, 1190, 1196, 1202, 1208, 1214, 1219, 1223, 1230, 1237, 1242, 1249, 1256, 1263, 1268, 1273, 1280, 1287, 1294, 1301, 1308, 1314, 1321, 1328, 1334, 1341, 1347, 1354, 1361, 1368, 1375, 1380, 1384, 1390, 1396, 1403, 1410, 1416, 1423, 1430, 1436, 1443, 1450, 1457, 1463, 1470, 1477, 1483, 1490, 1497, 1503, 1510, 1514, 1521, 1527, 1533, 1540, 1546, 1551, 1558, 1563, 1570, 1576, 1583, 1589, 1596, 1603, 1610, 1617, 1624, 1631, 1638, 1645, 1652, 1659, 1664, 1669, 1674, 1682, 1692, 1700, 1711, 1721, 1724, 1730, 1740, 1746, 1755, 1764, 1766, 1771, 1779, 1784, and 1788.

[7751] In some aspects, the VL2 comprises an amino acid sequence that is at least 65%, at least 70%, at least 75%, at least 80%, at least 85%, at least 90%, at least 95%, at least 99%, or 100% identical to any one of SEQ ID NOs: 1098, 1105, 1112, 1122, 1129, 1136, 1143, 1150, 1157, 1164, 1171, 1176, 1183, 1190, 1196, 1202, 1208, 1214, 1219, 1223, 1230, 1237, 1242, 1249, 1256, 1263, 1268, 1273, 1280, 1287, 1294, 1301, 1308, 1314, 1321, 1328, 1334, 1341, 1347, 1354, 1361, 1368, 1375, 1380, 1384, 1390, 1396, 1403, 1410, 1416, 1423, 1430, 1436, 1443, 1450, 1457, 1463, 1470, 1477, 1483, 1490, 1497, 1503, 1510, 1514, 1521, 1527, 1533, 1540, 1546, 1551, 1558, 1563, 1570, 1576, 1583, 1589, 1596, 1603, 1610, 1617, 1624, 1631, 1638, 1645, 1652, 1659, 1664, 1669, 1674, 1682, 1692, 1700, 1711, 1721, 1724, 1730, 1740, 1746, 1755, 1764, 1766, 1771, 1779, 1784, and 1788.

[7752] In some aspects, the VH1 comprises an amino acid sequence that is at least 65%, at least 70%, at least 75%, at least 80%, at least 85%, at least 90%, at least 95%, at least 99%, or 100% identical to any one of SEQ ID NOs: 1102, 1109, 1116, 1119, 1126, 1133, 1140, 1147, 1154, 1161, 1168, 1173, 1180, 1187, 1194, 1198, 1206, 1210, 1218, 1220, 1227, 1234, 1241, 1246, 1253, 1260, 1265, 1270, 1277, 1284, 1291, 1298, 1305, 1312, 1318, 1325, 1332, 1338, 1345, 1351, 1358, 1365, 1372, 1379, 1381, 1388, 1393, 1400, 1407, 1413, 1420, 1427, 1434, 1440, 1447, 1454, 1460, 1467, 1474, 1481, 1487, 1494, 1501, 1507, 1512, 1518, 1525, 1530, 1537, 1543, 1550, 1555, 1561, 1567, 1573, 1580, 1587, 1593, 1600, 1607, 1614, 1621, 1628, 1635, 1642, 1649, 1656, 1662, 1668, 1671, 1678, 1686, 1696, 1704, 1714, 1722, 1726, 1734, 1742, 1750, 1759, 1760, 1765, 1768, 1775, 1783, 1785, and 1792.

[7753] In some aspects, the VH2 comprises an amino acid sequence that is at least 65%, at least 70%, at least 75%, at least 80%, at least 85%, at least 90%, at least 95%, at least 99%, or 100% identical to any one of SEQ ID NOs: 1102, 1109, 1116, 1119, 1126, 1133, 1140, 1147, 1154, 1161, 1168, 1173, 1180, 1187, 1194, 1198, 1206, 1210, 1218, 1220, 1227, 1234, 1241, 1246, 1253, 1260, 1265, 1270, 1277, 1284, 1291, 1298, 1305, 1312, 1318, 1325, 1332, 1338, 1345, 1351, 1358, 1365, 1372, 1379, 1381, 1388, 1393, 1400, 1407, 1413, 1420, 1427, 1434, 1440, 1447, 1454, 1460, 1467, 1474, 1481, 1487, 1494, 1501, 1507, 1512, 1518, 1525, 1530, 1537, 1543, 1550, 1555, 1561, 1567, 1573, 1580, 1587, 1593, 1600, 1607, 1614, 1621, 1628, 1635, 1642, 1649, 1656, 1662, 1668, 1671, 1678, 1686, 1696, 1704, 1714, 1722, 1726, 1734, 1742, 1750, 1759, 1760, 1765, 1768, 1775, 1783, 1785, and 1792.

[7754] In some aspects, the infectious disease antigen that is not a sarbecovirus antigen is:
[7755] (i) a viral antigen elected from the group consisting of an influenza virus (A, B, C) antigen (e.g., influenza virus envelope proteins, for example, influenza virus neuraminidase (NA, N1, N2, N3, N4, N5, N6, N7, N8, N9, N10, N11), influenza virus hemagglutinin (H1, H2, H3, H4, H5, H6, H7, H8, H9, H10, H11, H12, H13, H14, H15, H16, H17, H18) (e.g., H1N1, H3N2, H5N1, H7N9, H9N2), Yamagata virus antigen, Victoria virus antigen, influenza virus structural proteins (e.g., M1, M2, capsid protein), influenza virus functional proteins (e.g., ribonucleoprotein (NP), primary interferon antagonist (NS1), nuclear export protein (NEP)) influenza virus accessory proteins (e.g., PB2, PB1, or PA), for example, anti-HA, anti-NA, anti-H1, anti-H3, anti-H5, anti-H7, anti-H9, anti-N1, anti-N2, anti-N9, anti-H1N1, anti-H3N2, anti-H5N1, anti-H7N9, anti-H9N2, anti-A protein, anti-B protein, anti-stem, anti-M1, anti-M2, anti-capsid, anti-NP, anti-NS1, anti-NEP, anti-PB1, anti-PB2, and anti-PA); a swine influenza virus antigen (e.g., swine flu hemagglutinin, swine flu neuraminidase); a classical swine fever (CSF) (hog colera) virus antigen; an equine influenza virus antigen (e.g., equine influenza virus typeA/Miami 63 neuraminidase, equine influenza virus type A/Kentucky 81 neuraminidase, equine influenza virus type A/Alaska 91 neuraminidase); parainfluenza viruses (e.g., bovine parainfluenza virus, bovine parainfluenza virus type 3 fusion protein, bovine parainfluenza virus type 3 hemagglutinin neuraminidase); a (human) respiratory syncytial virus (RSV)-viral antigen (e.g., RSV F glycoprotein, RSV G glycoprotein. F protein of respiratory syncytial virus, RSV fusion glycoprotein); a herpes simplex virus (HSV) antigen (e.g., herpes simplex virus glycoproteins gB, gC, gD, and gE, herpes simplex virus type 2 glycoprotein gB); a Dengue virus antigen (e.g., core protein, matrix protein, glycoprotein E of Dengue virus, or other protein of Dengue virus); a measles virus antigen (e.g., hemagglutinin); a poliovirus 1 antigen (e.g., poliovirus 1 proteins (VP1)), a HIV-1 antigen and HIV-2 antigen (e.g., HIV envelope proteins (e.g., envelope glycoproteins of HIV 1, HIV envelope glycoprotein (Env), HIV envelope glycoprotein gp160, HIV envelope surface glycoprotein gp120, HIV transmembrane envelope protein gp41), HIV structural proteins (e.g., p17, p24, p7, p55), HIV functional proteins (e.g., p66, HIV-1 protease (PR), p31), HIV accessory proteins (e.g., Nef, Tat, Rev, Vif, Vpr, Vpu)); a hepatitis virus (HAV, HBV, HCV, HDV, HEV) antigen (e.g., hepatitis B virus antigen (e.g., surface antigen, core protein), hepatitis C virus antigen (e.g., glycoprotein E1E2)); a rabies virus (Rabies lyssavirus) antigen (e.g., rabies virus glycoprotein, e.g., G glycoprotein); a pseudorabies virus antigen (e.g., pseudorabies virus g50 (gpD), pseudorabies virus II (gpB), pseudorabies virus III (gpC), pseudorabies virus glycoprotein H, pseudorabies virus glycoprotein E); a papillomavirus (HPV) antigen; an Epstein-Barr virus (EBV) (Gamma herpes virus 4) antigen; a Herpes simplex virus (HSV, HSV-1, HSV-2) antigen (e.g., human herpes virus 8, equine herpes virus antigen (e.g., type 1 glycoprotein B, type 1 glycoprotein D)); a Herpes zoster antigen; a Cytomegalovirus antigen (e.g., cytomegalovirus glycoprotein B); a Zika virus antigen; a Transmissible gastroenteritis virus (TGEV) antigen (e.g., glycoprotein 195, matrix protein); a rotavirus antigen (e.g., swine rotavirus glycoprotein 38); a parvovirus antigen (e.g., swine parvovirus capsid protein); a filoviruses (e.g., Marburg and Ebola) antigen; a bovine viral diarrhea virus antigen (e.g., glycoprotein 55); a Newcastle disease virus antigen (hemagglutinin, neuraminidase); an orthopoxvirus antigen; a coxsackievirus antigen and aphthovirus (foot and mouth disease virus) antigen; a yellow fever virus antigen; a Chikunga virus antigen; a Nipah virus antigen; an African swine fever virus antigen; a rhinotracheitis virus antigen (e.g., infectious bovine rhinotracheitis virus glycoprotein E, glycoprotein G); a laryngotracheitis virus antigen (e.g., infectious laryngotracheitis virus glycoprotein G or glycoprotein I); a La Crosse virus antigen (e.g., La Crosse virus glycoprotein); a neonatal calf diarrhoea virus antigen; a Venezuelan equine encephalomyelitis virus antigen; a punta toro virus antigen; a murine leukemia virus antigen; a mouse mammary tumor virus antigen; a bovine respiratory syncytial virus antigen (e.g., bovine respiratory syncytial virus attachment protein (BRSV G), bovine respiratory syncytial virus fusion protein (BRSV F), bovine respiratory syncytial virus nucleocapsid protein (BRSVN)); a bovine E viral diarrhoea virus antigen (e.g., glycoprotein 48 and glycoprotein 53); a metapneumovirus (HMPV) antigen; and an Ebola virus antigen (e.g., ebolavirus glycoprotein, e.g., Zaire ebolavirus glycoprotein); or
[7756] (ii) a bacterial or parasite antigen selected from the group consisting of a Plasmodium (e.g., Plasmodium falciparum, Plasmodium vivax, Plasmodium malariae, Plasmodium ovale, Plasmodium knowlesi) antigen, a Streptococcus (e.g., Streptococcus pneumoniae, Streptococcus pyogenes, Streptococcus agalactiae, Streptococcus mutans, Streptococcus viridans, Streptococcus anginosus, Streptococcus intermedius, Streptococcus constellatus) antigen (e.g., 24M epitope), a Neisseria gonorrhoeae antigen (e.g., gonococcal pilin), a Corynebacterium antigen (e.g., Corynebacterium diphtheria (diptheria toxin), Corynebacterium ulcerans, Corynebacterium pseudotuberculosis), Mycobacterium tuberculosis antigens, Brachyspira hyodysenteriae (Serpulina hydodysenteriae) antigen (e.g., Serpulina hydodysenteriae protective antigen), a Chlamydia antigen (e.g., Chlamydia trachomatis) (e.g., MOMP and PorB), a Mycoplasma sp. (e.g., Mycoplasma genitalium. Mycoplasma hyopneumoniae, Mycoplasma pneumonia) antigen, a Staphylococcus (e.g., Staphylococcus aureus, coagulase-negative staphylococci (CoNS), Staphylococcus aureus alpha toxin, Staphylococcus aureus bi-component leucocidin) antigen, a Klebsiella sp. antigen, an Escherichia coli antigen (e.g., E. coli shiga toxin type-2. E. coli shiga toxin type-1), a Bacillus sp. (e.g., Bacillus anthracis, e.g., Bacillus anthracis anthrax) antigen, a Pseudomonas aeruginosa antigen (e.g., Pseudomonas aeruginosa type III secretion system), an Enterococcus sp. antigen, an Enterobacter sp. antigen, a Proteus sp. antigen, an Actinobacter sp. antigen, a Mycobacterium avium (Mycobacterium avium complex (MAC)) antigen, a Salmonella bacteria antigen, a Clostridium difficile antigen, a Toxoplasma (e.g., Toxoplasma gondii) antigen, a Histoplasma antigen, a Candida antigen, a Coccidioides antigen, a Cryptococcus antigen, a Cryptosporidium antigen, and a Cystoisospora (e.g., Cystoisospora belli) antigen, and another antigen (e.g., endotoxins, lymphotoxins (e.g., lymphotoxin alpha LTA), phosphatidylserine. Hsp90, CCR5, lipoteichoic acid, clumping factor A).

[7757] In some aspects, the VL1 comprises a light chain complementarity determining region 1 (LCDR1), LCDR2, and/or LCDR3 of an antibody selected from the group consisting of libivirumab, rmab, rivabazumab pegol, setoxaximab, suvizumab, suvratoxumab, sevirumab, pritoxaximab, porgaviximab, REGN-EB3, obiltoxaximab, gedivumab, foravirumab, larcaviximab, motavizumab, palivizumab, rafivirumab, regavirumab, tuvirumab, cosfroviximab, felvizumab, atidortoxumab, edobacomab, nebacumab, pateclizumab, raxibacumab, urtoxazumab, tosatoxumab, berlimatoxumab, CR6261, diridavumab, firivumab, lesofavumab, navivumab, exbivirumab, lenvervimab, bavituximab, bezlotoxumab, efungumab, leronlimab, nirsevimab, pagibaximab, panobacumab, tefibazumab, ansuvimab, atoltivimab, maftivimab, and odesivimab.

[7758] In some aspects, the VL2 comprises a light chain complementarity determining region 1 (LCDR1), LCDR2, and/or LCDR3 of an antibody selected from the group consisting of libivirumab, rmab, rivabazumab pegol, setoxaximab, suvizumab, suvratoxumab, sevirumab, pritoxaximab, porgaviximab, REGN-EB3, obiltoxaximab, gedivumab, foravirumab, larcaviximab, motavizumab, palivizumab, rafivirumab, regavirumab, tuvirumab, cosfroviximab, felvizumab, atidortoxumab, edobacomab, nebacumab, pateclizumab, raxibacumab, urtoxazumab, tosatoxumab, berlimatoxumab, CR6261, diridavumab, firivumab, lesofavumab, navivumab, exbivirumab, lenvervimab, bavituximab, bezlotoxumab, efungumab, leronlimab, nirsevimab, pagibaximab, panobacumab, tefibazumab, ansuvimab, atoltivimab, maftivimab, and odesivimab.

[7759] In some aspects, the VH1 comprises a heavy chain complementarity determining region 1 (HCDR1), HCDR2, and/or HCDR3 of an antibody selected from the group consisting of libivirumab, rmab, rivabazumab pegol, setoxaximab, suvizumab, suvratoxumab, sevirumab, pritoxaximab, porgaviximab, REGN-EB3, obiltoxaximab, gedivumab, foravirumab, larcaviximab, motavizumab, palivizumab, rafivirumab, regavirumab, tuvirumab, cosfroviximab, felvizumab, atidortoxumab, edobacomab, nebacumab, pateclizumab, raxibacumab, urtoxazumab, tosatoxumab, berlimatoxumab, CR6261, diridavumab, firivumab, lesofavumab, navivumab, exbivirumab, lenvervimab, bavituximab, bezlotoxumab, efungumab, leronlimab, nirsevimab, pagibaximab, panobacumab, tefibazumab, ansuvimab, atoltivimab, maftivimab, and odesivimab.

[7760] In some aspects, the VH2 comprises a heavy chain complementarity determining region 1 (HCDR1), HCDR2, and/or HCDR3 of an antibody selected from the group consisting of libivirumab, rmab, rivabazumab pegol, setoxaximab, suvizumab, suvratoxumab, sevirumab, pritoxaximab, porgaviximab, REGN-EB3, obiltoxaximab, gedivumab, foravirumab, larcaviximab, motavizumab, palivizumab, rafivirumab, regavirumab, tuvirumab, cosfroviximab, felvizumab, atidortoxumab, edobacomab, nebacumab, pateclizumab, raxibacumab, urtoxazumab, tosatoxumab, berlimatoxumab, CR6261, diridavumab, firivumab, lesofavumab, navivumab, exbivirumab, lenvervimab, bavituximab, bezlotoxumab, efungumab, leronlimab, nirsevimab, pagibaximab, panobacumab, tefibazumab, ansuvimab, atoltivimab, maftivimab, and odesivimab.

[7761] In some aspects, the VL1 comprises a VL of an antibody selected from the group consisting of libivirumab, rmab, rivabazumab pegol, setoxaximab, suvizumab, suvratoxumab, sevirumab, pritoxaximab, porgaviximab, REGN-EB3, obiltoxaximab, gedivumab, foravirumab, larcaviximab, motavizumab, palivizumab, rafivirumab, regavirumab, tuvirumab, cosfroviximab, felvizumab, atidortoxumab, edobacomab, nebacumab, pateclizumab, raxibacumab, urtoxazumab, tosatoxumab, berlimatoxumab, CR6261, diridavumab, firivumab, lesofavumab, navivumab, exbivirumab, lenvervimab, bavituximab, bezlotoxumab, efungumab, leronlimab, nirsevimab, pagibaximab, panobacumab, tefibazumab, ansuvimab, atoltivimab, maftivimab, and odesivimab.

[7762] In some aspects, the VL2 comprises a VL of an antibody selected from the group consisting of libivirumab, rmab, rivabazumab pegol, setoxaximab, suvizumab, suvratoxumab, sevirumab, pritoxaximab, porgaviximab, REGN-EB3, obiltoxaximab, gedivumab, foravirumab, larcaviximab, motavizumab, palivizumab, rafivirumab, regavirumab, tuvirumab, cosfroviximab, felvizumab, atidortoxumab, edobacomab, nebacumab, pateclizumab, raxibacumab, urtoxazumab, tosatoxumab, berlimatoxumab, CR6261, diridavumab, firivumab, lesofavumab, navivumab, exbivirumab, lenvervimab, bavituximab, bezlotoxumab, efungumab, leronlimab, nirsevimab, pagibaximab, panobacumab, tefibazumab, ansuvimab, atoltivimab, maftivimab, and odesivimab.

[7763] In some aspects, the VH1 comprises a VH of an antibody selected from the group consisting of libivirumab, rmab, rivabazumab pegol, setoxaximab, suvizumab, suvratoxumab, sevirumab, pritoxaximab, porgaviximab, REGN-EB3, obiltoxaximab, gedivumab, foravirumab, larcaviximab, motavizumab, palivizumab, rafivirumab, regavirumab, tuvirumab, cosfroviximab, felvizumab, atidortoxumab, edobacomab, nebacumab, pateclizumab, raxibacumab, urtoxazumab, tosatoxumab, berlimatoxumab, CR6261, diridavumab, firivumab, lesofavumab, navivumab, exbivirumab, lenvervimab, bavituximab, bezlotoxumab, efungumab, leronlimab, nirsevimab, pagibaximab, panobacumab, tefibazumab, ansuvimab, atoltivimab, maftivimab, and odesivimab.

[7764] In some aspects, the VH2 comprises a VH of an antibody selected from the group consisting of libivirumab, rmab, rivabazumab pegol, setoxaximab, suvizumab, suvratoxumab, sevirumab, pritoxaximab, porgaviximab, REGN-EB3, obiltoxaximab, gedivumab, foravirumab, larcaviximab, motavizumab, palivizumab, rafivirumab, regavirumab, tuvirumab, cosfroviximab, felvizumab, atidortoxumab, edobacomab, nebacumab, pateclizumab, raxibacumab, urtoxazumab, tosatoxumab, berlimatoxumab, CR6261, diridavumab, firivumab, lesofavumab, navivumab, exbivirumab, lenvervimab, bavituximab, bezlotoxumab, efungumab, leronlimab, nirsevimab, pagibaximab, panobacumab, tefibazumab, ansuvimab, atoltivimab, maftivimab, and odesivimab.

[7765] In some aspects, the VL1 comprises (i) a complementarity determining region (CDR) 1 having an amino acid sequence that is at least 65%, at least 70%, at least 75%, at least 80%, at least 85%, at least 90%, at least 95%, at least 99%, or 100% identical to any one of SEQ ID NOs: 1428, 1793, 1798, 1810, 1817, 1824, 1977, 1985, 1993 and 2001; (ii) a CDR2 having an amino acid sequence that is at least 65%, at least 70%, at least 75%, at least 80%, at least 85%, at least 90%, at least 95%, at least 99%, or 100% identical to any one of SEQ ID NOs: 1978, 1986, 1994, and 2002; or at least 65%, at least 70%, at least 75%, at least 80%, at least 85%, at least 90%, at least 95%, at least 99%, or 100% identical to any one of amino acid sequences YTS, DTS, GAS, and AAS; and (iii) a CDR3 having an amino acid sequence that is at least 65%, at least 70%, at least 75%, at least 80%, at least 85%, at least 90%, at least 95%, at least 99%, or 100% identical to any one of SEQ ID NOs: 1229, 1799, 1805, 1811, 1818, 1825, 1979, 1987, 1995, and 2003.

[7766] In some aspects, the VL2 comprises (i) a complementarity determining region (CDR) 1 having an amino acid sequence that is at least 65%, at least 70%, at least 75%, at least 80%, at least 85%, at least 90%, at least 95%, at least 99%, or 100% identical to any one of SEQ ID NOs: 1428, 1793, 1798, 1810, 1817, 1824, 1977, 1985, 1993 and 2001; (ii) a CDR2 having an amino acid sequence that is at least 65%, at least 70%, at least 75%, at least 80%, at least 85%, at least 90%, at least 95%, at least 99%, or 100% identical to any one of SEQ ID NOs: 1978, 1986, 1994, and 2002; or at least 65%, at least 70%, at least 75%, at least 80%, at least 85%, at least 90%, at least 95%, at least 99%, or 100% identical to any one of amino acid sequences YTS, DTS, GAS, and AAS; and (iii) a CDR3 having an amino acid sequence that is at least 65%, at least 70%, at least 75%, at least 80%, at least 85%, at least 90%, at least 95%, at least 99%, or 100% identical to any one of SEQ ID NOs: 1229, 1799, 1805, 1811, 1818, 1825, 1979, 1987, 1995, and 2003.

[7767] In some aspects, the VH1 comprises (i) a complementarity determining region (CDR) 1 having an amino acid sequence that is at least 65%, at least 70%, at least 75%, at least 80%, at least 85%, at least 90%, at least 95%, at least 99%, or 100% identical to any one of SEQ ID NOs: 1577, 1795, 1801, 1813, 1820, 1827, 1981, 1989, 1997, and 2005; (ii) a CDR2 having an amino acid sequence that is at least 65%, at least 70%, at least 75%, at least 80%, at least 85%, at least 90%, at least 95%, at least 99%, or 100% identical to any one of SEQ ID NOs: 1159, 1802, 1807, 1814, 1821, 1828, 1982, 1990, 1998, and 2006; and (iii) a CDR3 having an amino acid sequence that is at least 65%, at least 70%, at least 75%, at least 80%, at least 85%, at least 90%, at least 95%, at least 99%, or 100% identical to any one of SEQ ID NOs: 1796, 1803, 1808, 1815, 1822, 1829, 1983, 1991, 1999, and 2007.

[7768] In some aspects, the VH2 comprises (i) a complementarity determining region (CDR) 1 having an amino acid sequence that is at least 65%, at least 70%, at least 75%, at least 80%, at least 85%, at least 90%, at least 95%, at least 99%, or 100% identical to any one of SEQ ID NOs: 1577, 1795, 1801, 1813, 1820, 1827, 1981, 1989, 1997, and 2005; (ii) a CDR2 having an amino acid sequence that is at least 65%, at least 70%, at least 75%, at least 80%, at least 85%, at least 90%, at least 95%, at least 99%, or 100% identical to any one of SEQ ID NOs: 1159, 1802, 1807, 1814, 1821, 1828, 1982, 1990, 1998, and 2006; and (iii) a CDR3 having an amino acid sequence that is at least 65%, at least 70%, at least 75%, at least 80%, at least 85%, at least 90%, at least 95%, at least 99%, or 100% identical to any one of SEQ ID NOs: 1796, 1803, 1808, 1815, 1822, 1829, 1983, 1991, 1999, and 2007.

[7769] In some aspects, the VL1 comprises an amino acid sequence that is at least 65%, at least 70%, at least 75%, at least 80%, at least 85%, at least 90%, at least 95%, at least 99%, or 100% identical to any one of SEQ ID NOs: 1794, 1800, 1806, 1812, 1819, 1826, 1980, 1988, 1996, and 2004.

[7770] In some aspects, the VL2 comprises an amino acid sequence that is at least 65%, at least 70%, at least 75%, at least 80%, at least 85%, at least 90%, at least 95%, at least 99%, or 100% identical to any one of SEQ ID NOs: 1794, 1800, 1806, 1812, 1819, 1826, 1980, 1988, 1996, and 2004.

[7771] In some aspects, the VH1 comprises an amino acid sequence that is at least 65%, at least 70%, at least 75%, at least 80%, at least 85%, at least 90%, at least 95%, at least 99%, or 100% identical to any one of SEQ ID NOs 1797, 1804, 1809, 1816, 1823, 1830, 1984, 1992, 2000, and 2008.

[7772] In some aspects, the VH2 comprises an amino acid sequence that is at least 65%, at least 70%, at least 75%, at least 80%, at least 85%, at least 90%, at least 95%, at least 99%, or 100% identical to any one of SEQ ID NOs 1797, 1804, 1809, 1816, 1823, 1830, 1984, 1992, 2000, and 2008.

[7773] In some aspects, the other-pathology antigen is selected from the group consisting of Amyloid beta, β-amyloid, PCSK9, IFN-α/β receptor, Rhesus factor, nerve growth factor (NGF), DPP4, fibrin II beta chain, ACVR2B, serum amyloid A protein SOST, FGF 23, VWF, tissue factor pathway inhibitor (TFPI), 1-40 and 1-42, selectin P, glucagon receptor (GCGR), amyloid P component, GDF-8, CXCL10 IP-10, repulsive guidance molecule A RGMA, IFN-γ, activated F9/F10, calcitonin gene-related peptide (CGRP), angiopoietin 3, IFN receptor, IFN-γ, calcitonin, β-amyloid 1-40 and 1-42, tau protein, dabigatran, cardiac myosin, selectin P, Complement factor D (CFD), kallikrein, GDF-8, IGHE, tissue factor pathway inhibitor (TFPI), GMCSF receptor α-chain, amyloid, IgE Fc region, MASP-2, oxLDL, GMCSF, NOGO-A. Alpha-synuclein, NGF, myelin-associated glycoprotein, RHD (gene) (RHD), sclerostin, FCGRT, sclerostin SOST, mucosal addressin cell adhesion molecule, myostatin, RSVFR, complement component 1s C1s, C5, and IL31.

[7774] In some aspects, the VL1 comprises a light chain complementarity determining region 1 (LCDR1), LCDR2, and/or LCDR3 of an antibody selected from the group consisting of aducanumab, alirocumab, frovocimab, lodelcizumab, bococizumab, evolocumab, ralpancizumab, anifrolumab, atorolimumab, bapineuzumab, bedinvetmab, begelomab, biciromab, bimagrumab, birtamimab, blosozumab, burosumab, caplacizumab, concizumab, crenezumab, crizanlizumab, crotedumab, dezamizumab, domagrozumab, donanemab, eldelumab, elezanumab, emapalumab, emicizumab, eptinezumab, erenumab, evinacumab, faralimomab, fasinumab, fontolizumab, fremanezumab, frunevetmab, fulranumab, galcanezumab, gantenerumab, gosuranemab, idarucizumab, imciromab, inclacumab, lampalizumab, lanadelumab, landogrozumab, lecanemab, ligelizumab, marstacimab, mavrilimumab, morolimumab, NEOD001, omalizumab, oMS721, orticumab, otilimab, ozanezumab, ponezumab, prasinezumab, quilizumab, ranevetmab, refanezumab, roledumab, romosozumab, rozanolixizumab, setrusumab, SHP647, solanezumab, stamulumab, suptavumab, sutimlimab, tanezumab, crovalimab, and lokivetmab.

[7775] In some aspects, the VL2 comprises a light chain complementarity determining region 1 (LCDR1), LCDR2, and/or LCDR3 of an antibody selected from the group consisting of aducanumab, alirocumab, frovocimab, lodelcizumab, bococizumab, evolocumab, ralpancizumab, anifrolumab, atorolimumab, bapineuzumab, bedinvetmab, begelomab, biciromab, bimagrumab, birtamimab, blosozumab, burosumab, caplacizumab, concizumab, crenezumab, crizanlizumab, crotedumab, dezamizumab, domagrozumab, donanemab, eldelumab, elezanumab, emapalumab, emicizumab, eptinezumab, erenumab, evinacumab, faralimomab, fasinumab, fontolizumab, fremanezumab, frunevetmab, fulranumab, galcanezumab, gantenerumab, gosuranemab, idarucizumab, imciromab, inclacumab, lampalizumab, lanadelumab, landogrozumab, lecanemab, ligelizumab, marstacimab, mavrilimumab, morolimumab, NEOD001, omalizumab, oMS721, orticumab, otilimab, ozanezumab, ponezumab, prasinezumab, quilizumab, ranevetmab, refanezumab, roledumab, romosozumab, rozanolixizumab, setrusumab, SHP647, solanezumab, stamulumab, suptavumab, sutimlimab, tanezumab, crovalimab, and lokivetmab.

[7776] In some aspects, the VH1 comprises a heavy chain complementarity determining region 1 (HCDR1), HCDR2, and/or HCDR3 of an antibody selected from the group consisting of aducanumab, alirocumab, frovocimab, lodelcizumab, bococizumab, evolocumab, ralpancizumab, anifrolumab, atorolimumab, bapineuzumab, bedinvetmab, begelomab, biciromab, bimagrumab, birtamimab, blosozumab, burosumab, caplacizumab, concizumab, crenezumab, crizanlizumab, crotedumab, dezamizumab, domagrozumab, donanemab, eldelumab, elezanumab, emapalumab, emicizumab, eptinezumab, erenumab, evinacumab, faralimomab, fasinumab, fontolizumab, fremanezumab, frunevetmab, fulranumab, galcanezumab, gantenerumab, gosuranemab, idarucizumab, imciromab, inclacumab, lampalizumab, lanadelumab, landogrozumab, lecanemab, ligelizumab, marstacimab, mavrilimumab, morolimumab, NEOD001, omalizumab, oMS721, orticumab, otilimab, ozanezumab, ponezumab, prasinezumab, quilizumab, ranevetmab, refanezumab, roledumab, romosozumab, rozanolixizumab, setrusumab, SHP647, solanezumab, stamulumab, suptavumab, sutimlimab, tanezumab, crovalimab, and lokivetmab.

[7777] In some aspects, the VH2 comprises a heavy chain complementarity determining region 1 (HCDR1), HCDR2, and/or HCDR3 of an antibody selected from the group consisting of aducanumab, alirocumab, frovocimab, lodelcizumab, bococizumab, evolocumab, ralpancizumab, anifrolumab, atorolimumab, bapineuzumab, bedinvetmab, begelomab, biciromab, bimagrumab, birtamimab, blosozumab, burosumab, caplacizumab, concizumab, crenezumab, crizanlizumab, crotedumab, dezamizumab, domagrozumab, donanemab, eldelumab, elezanumab, emapalumab, emicizumab, eptinezumab, erenumab, evinacumab, faralimomab, fasinumab, fontolizumab, fremanezumab, frunevetmab, fulranumab, galcanezumab, gantenerumab, gosuranemab, idarucizumab, imciromab, inclacumab, lampalizumab, lanadelumab, landogrozumab, lecanemab, ligelizumab, marstacimab, mavrilimumab, morolimumab, NEOD001, omalizumab, oMS721, orticumab, otilimab, ozanezumab, ponezumab, prasinezumab, quilizumab, ranevetmab, refanezumab, roledumab, romosozumab, rozanolixizumab, setrusumab, SHP647, solanezumab, stamulumab, suptavumab, sutimlimab, tanezumab, crovalimab, and lokivetmab.

[7778] In some aspects, the VL1 comprises a VL of an antibody selected from the group consisting of aducanumab, alirocumab, frovocimab, lodelcizumab, bococizumab, evolocumab, ralpancizumab, anifrolumab, atorolimumab, bapineuzumab, bedinvetmab, begelomab, biciromab, bimagrumab, birtamimab, blosozumab, burosumab, caplacizumab, concizumab, crenezumab, crizanlizumab, crotedumab, dezamizumab, domagrozumab, donanemab, eldelumab, elezanumab, emapalumab, emicizumab, eptinezumab, erenumab, evinacumab, faralimomab, fasinumab, fontolizumab, fremanezumab, frunevetmab, fulranumab, galcanezumab, gantenerumab, gosuranemab, idarucizumab, imciromab, inclacumab, lampalizumab, lanadelumab, landogrozumab, lecanemab, ligelizumab, marstacimab, mavrilimumab, morolimumab, NEOD001, omalizumab, oMS721, orticumab, otilimab, ozanezumab, ponezumab, prasinezumab, quilizumab, ranevetmab, refanezumab, roledumab, romosozumab, rozanolixizumab, setrusumab, SHP647, solanezumab, stamulumab, suptavumab, sutimlimab, tanezumab, crovalimab, and lokivetmab.

[7779] In some aspects, the VL2 comprises a VL of an antibody selected from the group consisting of aducanumab, alirocumab, frovocimab, lodelcizumab, bococizumab, evolocumab, ralpancizumab, anifrolumab, atorolimumab, bapineuzumab, bedinvetmab, begelomab, biciromab, bimagrumab, birtamimab, blosozumab, burosumab, caplacizumab, concizumab, crenezumab, crizanlizumab, crotedumab, dezamizumab, domagrozumab, donanemab, eldelumab, elezanumab, emapalumab, emicizumab, eptinezumab, erenumab, evinacumab, faralimomab, fasinumab, fontolizumab, fremanezumab, frunevetmab, fulranumab, galcanezumab, gantenerumab, gosuranemab, idarucizumab, imciromab, inclacumab, lampalizumab, lanadelumab, landogrozumab, lecanemab, ligelizumab, marstacimab, mavrilimumab, morolimumab, NEOD001, omalizumab, oMS721, orticumab, otilimab, ozanezumab, ponezumab, prasinezumab, quilizumab, ranevetmab, refanezumab, roledumab, romosozumab, rozanolixizumab, setrusumab, SHP647, solanezumab, stamulumab, suptavumab, sutimlimab, tanezumab, crovalimab, and lokivetmab.

[7780] In some aspects, the VH1 comprises a VH of an antibody selected from the group consisting of aducanumab, alirocumab, frovocimab, lodelcizumab, bococizumab, evolocumab, ralpancizumab, anifrolumab, atorolimumab, bapineuzumab, bedinvetmab, begelomab, biciromab, bimagrumab, birtamimab, blosozumab, burosumab, caplacizumab, concizumab, crenezumab, crizanlizumab, crotedumab, dezamizumab, domagrozumab, donanemab, eldelumab, elezanumab, emapalumab, emicizumab, eptinezumab, erenumab, evinacumab, faralimomab, fasinumab, fontolizumab, fremanezumab, frunevetmab, fulranumab, galcanezumab, gantenerumab, gosuranemab, idarucizumab, imciromab, inclacumab, lampalizumab, lanadelumab, landogrozumab, lecanemab, ligelizumab, marstacimab, mavrilimumab, morolimumab, NEOD001, omalizumab, oMS721, orticumab, otilimab, ozanezumab, ponezumab, prasinezumab, quilizumab, ranevetmab, refanezumab, roledumab, romosozumab, rozanolixizumab, setrusumab, SHP647, solanezumab, stamulumab, suptavumab, sutimlimab, tanezumab, crovalimab, and lokivetmab.

[7781] In some aspects, the VH2 comprises a VH of an antibody selected from the group consisting of aducanumab, alirocumab, frovocimab, lodelcizumab, bococizumab, evolocumab, ralpancizumab, anifrolumab, atorolimumab, bapineuzumab, bedinvetmab, begelomab, biciromab, bimagrumab, birtamimab, blosozumab, burosumab, caplacizumab, concizumab, crenezumab, crizanlizumab, crotedumab, dezamizumab, domagrozumab, donanemab, eldelumab, elezanumab, emapalumab, emicizumab, eptinezumab, erenumab, evinacumab, faralimomab, fasinumab, fontolizumab, fremanezumab, frunevetmab, fulranumab, galcanezumab, gantenerumab, gosuranemab, idarucizumab, imciromab, inclacumab, lampalizumab, lanadelumab, landogrozumab, lecanemab, ligelizumab, marstacimab, mavrilimumab, morolimumab, NEOD001, omalizumab, oMS721, orticumab, otilimab, ozanezumab, ponezumab, prasinezumab, quilizumab, ranevetmab, refanezumab, roledumab, romosozumab, rozanolixizumab, setrusumab, SHP647, solanezumab, stamulumab, suptavumab, sutimlimab, tanezumab, crovalimab, and lokivetmab.

[7782] In some aspects, the VL1 comprises (i) a complementarity determining region (CDR) 1 having an amino acid sequence that is at least 65%, at least 70%, at least 75%, at least 80%, at least 85%, at least 90%, at least 95%, at least 99%, or 100% identical to any one of SEQ ID NOs: 1120, 1228, 1359, 1519, 1831, 1838, 1845, 1852, 1859, 1866, 1872, 1878, 1885, 1891, 1898, 1905, 1911, 1917, 1924, 1931, 1938, 1945, and 1963; (ii) a CDR2 having an amino acid sequence that is at least 65%, at least 70%, at least 75%, at least 80%, at least 85%, at least 90%, at least 95%, at least 99%, or 100% identical to any one of amino acid sequences AAS, AVS, DAS, DNN, EDN, EVS, GAS, GNG, KAS, KVS, LVS, NTD, STS, WAS, and YTS; and (iii) a CDR3 having an amino acid sequence that is at least 65%, at least 70%, at least 75%, at least 80%, at least 85%, at least 90%, at least 95%, at least 99%, or 100% identical to any one of SEQ ID NOs: 1360, 1832, 1839, 1846, 1853, 1860, 1867, 1873, 1879, 1886, 1892, 1899, 1906, 1912, 1918, 1925, 1932, 1939, 1946, 1951, 1957, 1964, and 1970.

[7783] In some aspects, the VL2 comprises (i) a complementarity determining region (CDR) 1 having an amino acid sequence that is at least 65%, at least 70%, at least 75%, at least 80%, at least 85%, at least 90%, at least 95%, at least 99%, or 100% identical to any one of SEQ ID NOs: 1120, 1228, 1359, 1519, 1831, 1838, 1845, 1852, 1859, 1866, 1872, 1878, 1885, 1891, 1898, 1905, 1911, 1917, 1924, 1931, 1938, 1945, and 1963; (ii) a CDR2 having an amino acid sequence that is at least 65%, at least 70%, at least 75%, at least 80%, at least 85%, at least 90%, at least 95%, at least 99%, or 100% identical to any one of amino acid sequences AAS, AVS, DAS, DNN, EDN, EVS, GAS, GNG, KAS, KVS, LVS, NTD, STS, WAS, and YTS; and (iii) a CDR3 having an amino acid sequence that is at least 65%, at least 70%, at least 75%, at least 80%, at least 85%, at least 90%, at least 95%, at least 99%, or 100% identical to any one of SEQ ID NOs: 1360, 1832, 1839, 1846, 1853, 1860, 1867, 1873, 1879, 1886, 1892, 1899, 1906, 1912, 1918, 1925, 1932, 1939, 1946, 1951, 1957, 1964, and 1970.

[7784] In some aspects, the VH1 comprises (i) a complementarity determining region (CDR) 1 having an amino acid sequence that is at least 65%, at least 70%, at least 75%, at least 80%, at least 85%, at least 90%, at least 95%, at least 99%, or 100% identical to any one of SEQ ID NOs: 1309, 1362, 1437, 1552, 1618, 1639, 1834, 1841, 1848, 1855, 1862, 1881, 1894, 1901, 1920, 1927, 1934, 1941, 1953, 1959, and 1966; (ii) a CDR2 having an amino acid sequence that is at least 65%, at least 70%, at least 75%, at least 80%, at least 85%, at least 90%, at least 95%, at least 99%, or 100% identical to any one of SEQ ID NOs: 1363, 1835, 1842, 1849, 1856, 1863, 1869, 1875, 1882, 1888, 1895, 1902, 1908, 1914, 1921, 1928, 1935, 1942, 1948, 1954, 1960, 1967, and 1972; and (iii) a CDR3 having an amino acid sequence that is at least 65%, at least 70%, at least 75%, at least 80%, at least 85%, at least 90%, at least 95%, at least 99%, or 100% identical to any one of SEQ ID NOs: 1364, 1836, 1843, 1850, 1857, 1864, 1870, 1876, 1883, 1889, 1896, 1903, 1909, 1915, 1922, 1929, 1936, 1943, 1949, 1955, 1961, 1968, and 1973.

[7785] In some aspects, the VH2 comprises (i) a complementarity determining region (CDR) 1 having an amino acid sequence that is at least 65%, at least 70%, at least 75%, at least 80%, at least 85%, at least 90%, at least 95%, at least 99%, or 100% identical to any one of SEQ ID NOs: 1309, 1362, 1437, 1552, 1618, 1639, 1834, 1841, 1848, 1855, 1862, 1881, 1894, 1901, 1920, 1927, 1934, 1941, 1953, 1959, and 1966; (ii) a CDR2 having an amino acid sequence that is at least 65%, at least 70%, at least 75%, at least 80%, at least 85%, at least 90%, at least 95%, at least 99%, or 100% identical to any one of SEQ ID NOs: 1363, 1835, 1842, 1849, 1856, 1863, 1869, 1875, 1882, 1888, 1895, 1902, 1908, 1914, 1921, 1928, 1935, 1942, 1948, 1954, 1960, 1967, and 1972; and (iii) a CDR3 having an amino acid sequence that is at least 65%, at least 70%, at least 75%, at least 80%, at least 85%, at least 90%, at least 95%, at least 99%, or 100% identical to any one of SEQ ID NOs: 1364, 1836, 1843, 1850, 1857, 1864, 1870, 1876, 1883, 1889, 1896, 1903, 1909, 1915, 1922, 1929, 1936, 1943, 1949, 1955, 1961, 1968, and 1973.

[7786] In some aspects, the VL1 comprises an amino acid sequence that is at least 65%, at least 70%, at least 75%, at least 80%, at least 85%, at least 90%, at least 95%, at least 99%, or 100% identical to any one of SEQ ID NOs: 1361, 1833, 1840, 1847, 1854, 1861, 1868, 1874, 1880, 1887, 1893, 1900, 1907, 1913, 1919, 1926, 1933, 1940, 1947, 1952, 1958, 1965, and 1971.

[7787] In some aspects, the VL2 comprises an amino acid sequence that is at least 65%, at least 70%, at least 75%, at least 80%, at least 85%, at least 90%, at least 95%, at least 99%, or 100% identical to any one of SEQ ID NOs: 1361, 1833, 1840, 1847, 1854, 1861, 1868, 1874, 1880, 1887, 1893, 1900, 1907, 1913, 1919, 1926, 1933, 1940, 1947, 1952, 1958, 1965, and 1971.

[7788] In some aspects, the VH1 comprises an amino acid sequence that is at least 65%, at least 70%, at least 75%, at least 80%, at least 85%, at least 90%, at least 95%, at least 99%, or 100% identical to any one of SEQ ID NOs: 1365, 1837, 1844, 1851, 1858, 1865, 1871, 1877, 1884, 1890, 1897, 1904, 1910, 1916, 1923, 1930, 1937, 1944, 1950, 1956, 1962, 1969, and 1974.

[7789] In some aspects, the VH2 comprises an amino acid sequence that is at least 65%, at least 70%, at least 75%, at least 80%, at least 85%, at least 90%, at least 95%, at least 99%, or 100% identical to any one of SEQ ID NOs: 1365, 1837, 1844, 1851, 1858, 1865, 1871, 1877, 1884, 1890, 1897, 1904, 1910, 1916, 1923, 1930, 1937, 1944, 1950, 1956, 1962, 1969, and 1974.

[7790] In some aspects, the antigen binding polypeptides comprised in the antibodies or antigen binding fragments thereof (e.g., monospecific or multispecific antibodies or antigen binding fragments thereof) provided herein further comprise an Fc region. In some aspects, the antigen binding polypeptides comprised in the antibodies or antigen binding fragments thereof (e.g., monospecific or multispecific antibodies or antigen binding fragments thereof) provided herein further comprise an Fc region at the carboxy-terminus. In some aspects, the Fc region comprises an immunoglobulin heavy chain constant region 2 (CH2) and/or an immunoglobulin heavy chain constant region 3 (CH3). In some aspects, the Fc region further comprises an immunoglobulin hinge (i.e., a hinge region). In some aspects, the hinge region is interposed between a CH1 and a CH2 (i.e., a hinge region is localized between the carboxy terminal residue of a CH1 and the N-terminal residue of a CH2). In some aspects, the hinge region comprises an amino acid sequence at least 65%, at least 70%, at least 75%, at least 80%, at least 85%, at least 90%, at least 95%, at least 99%, or 100% identical to any one of SEQ ID NOs: 635, 636, 1072, 1073, or 1074. In some aspects, the Fc region comprises a CH2 and a CH3. In some aspects, the CH2 comprises an amino acid sequence that is at least 65%, at least 70%, at least 75%, at least 80%, at least 85%, at least 90%, at least 95%, at least 99%, or 100% identical to any one of SEQ ID NOs: 1075-1078. In some aspects, the CH3 comprises an amino acid sequence that is at least 65%, at least 70%, at least 75%, at least 80%, at least 85%, at least 90%, at least 95%, at least 99%, or 100% identical to any one of SEQ ID NOs: 1079-1085. In some aspects, the Fc region comprises an amino acid sequence that is at least 65%, at least 70%, at least 75%, at least 80%, at least 85%, at least 90%, at least 95%, at least 99%, or 100% identical to any one of SEQ ID NOs: 376-380.

[7791] In some aspects, the Fc region comprises one or more amino acid substitutions. In some aspects, the one or more amino acid substitutions comprise one or more half-life extension amino acid substitutions. In some aspects, the one or more half-life extension amino acid substitutions comprise one or more of amino acid substitutions M428L, N434A, N434S, L234F, L235E, P331S, M252Y, S254T, or T256E, or equivalent thereof, based on the EU numbering scheme. In some aspects, the one or more half-life extension amino acid substitutions comprise a LA (M428L and N434A, or equivalent thereof, based on the EU numbering scheme) amino acid substitution. In some aspects, the one or more half-life extension amino acid substitutions comprise a LS (M428L and N434S, or equivalent thereof, based on the EU numbering scheme) amino acid substitution. In some aspects, the one or more half-life extension amino acid substitutions comprise L234F and L235E, or equivalent thereof (based on the EU numbering scheme) amino acid substitutions. In some aspects, the one or more half-life extension amino acid substitutions comprise a TM (L234F, L235E, and P331S, or equivalent thereof, based on the EU numbering scheme) amino acid substitution. In some aspects, the one or more half-life extension amino acid substitutions comprise a YTE (M252Y, S254T, and T256E, or equivalent thereof, based on the EU numbering scheme) amino acid substitution.

[7792] In some aspects, the Fc region comprises at least one knob-into-hole modification. In some aspects, the antigen binding polypeptides are IgG1 or IgG4 antibodies or antigen binding fragments thereof. In some aspects, the knob-into-hole modification comprises one or more of knob substitutions of S354C and T366W, or equivalent thereof, and/or one or more of hole substitutions of Y349C, T366S, L368A, Y407V, or equivalent thereof; or a combination thereof, based on the EU numbering scheme. In some aspects, the Fc region comprises a knob-into-hole modification comprising knob substitutions of S354C and T366W, or equivalent thereof, and/or hole substitutions of Y349C, T366S, L368A and Y407V, or equivalent thereof, and/or a half-life extension amino acid substitution comprising: a LA (M428L and N434A, or equivalent thereof, based on the EU numbering scheme) amino acid substitution, a LS (M428L and N434S, or equivalent thereof, based on the EU numbering scheme) amino acid substitution. L234F and L235E, or equivalent thereof (based on the EU numbering scheme) amino acid substitutions, a TM (L234F, L235E, and P331S, or equivalent thereof, based on the EU numbering scheme) amino acid substitution, a YTE (M252Y, S254T, and T256E, or equivalent thereof, based on the EU numbering scheme) amino acid substitution, or any combination thereof.

[7793] In some aspects, the Fc region comprises knob substitutions of S354C and T366W, or equivalent thereof, and a half-life extension amino acid substitution comprising: a LA (M428L and N434A, or equivalent thereof, based on the EU numbering scheme) amino acid substitution, a LS (M428L and N434S, or equivalent thereof, based on the EU numbering scheme) amino acid substitution. L234F and L235E, or equivalent thereof (based on the EU numbering scheme) amino acid substitutions, a TM (L234F, L235E, and P331S, or equivalent thereof, based on the EU numbering scheme) amino acid substitution, a YTE (M252Y, S254T, and T256E, or equivalent thereof, based on the EU numbering scheme) amino acid substitution, or any combination thereof.

[7794] In some aspects, the Fc region comprises hole substitutions of Y349C, T366S, L368A and Y407V, or equivalent thereof, and a half-life extension amino acid substitution comprising: a LA (M428L and N434A, or equivalent thereof, based on the EU numbering scheme) amino acid substitution, a LS (M428L and N434S, or equivalent thereof, based on the EU numbering scheme) amino acid substitution, L234F and L235E, or equivalent thereof (based on the EU numbering scheme) amino acid substitutions, a TM (L234F, L235E, and P331S, or equivalent thereof, based on the EU numbering scheme) amino acid substitution, a YTE (M252Y, S254T, and T256E, or equivalent thereof, based on the EU numbering scheme) amino acid substitution, or any combination thereof.

[7795] In some aspects, the antigen binding polypeptides comprised in the antibodies or antigen binding fragments thereof (e.g., monospecific or multispecific antibodies or antigen binding fragments thereof) disclosed herein comprise one or more Fc effector function knockout mutation. In some aspects, the antigen binding polypeptides comprised in the antibodies or antigen binding fragments thereof (e.g., monospecific or multispecific antibodies or antigen binding fragments thereof) disclosed herein are IgG1 or IgG4 antibodies or antigen binding fragments thereof. In some aspects, the Fc effector function knockout mutation is L234A, L235A, P239A, or equivalent thereof, or a combination thereof, based on the EU numbering scheme.

[7796] In some aspects, the antigen binding polypeptides comprised in the antibodies or antigen binding fragments thereof (e.g., monospecific or multispecific antibodies or antigen binding fragments thereof) disclosed herein comprise a mutation at a glycosylation site. In some aspects, the mutation at a glycosylation site is a mutation at an N-glycosylation site. In some aspects, the antigen binding polypeptides comprised in the antibodies or antigen binding fragments thereof (e.g., monospecific or multispecific antibodies or antigen binding fragments thereof) disclosed herein comprise a VH comprising a mutation at a glycosylation site. In some aspects, the mutation at a glycosylation site is a mutation at an N-glycosylation site. In some aspects, the mutation at an N-glycosylation site is at amino acid N62 of the VH region or equivalent thereof. In some aspects, the mutation at an N-glycosylation site at amino acid N62 is N62Q or N62S, or equivalent thereof.

[7797] In some aspects, the antigen binding polypeptides comprised in the antibodies or antigen binding fragments thereof (e.g., monospecific or multispecific antibodies or antigen binding fragments thereof) disclosed herein, comprise one or more optional linkers. The one or more optional linkers are indicated herein as Ln, wherein n is an integer, and the integer next to each L indicates each L comprised in the antigen binding polypeptides comprised in the antigen binding polypeptide complexes disclosed herein. For example, if an antigen binding polypeptide comprised in the antigen binding polypeptide complexes disclosed herein comprises two linkers, the first linker from N-terminus to C-terminus is herein indicated as L1, and the second linker from N-terminus to C-terminus is herein indicated as L2. If an antigen binding polypeptide complex disclosed herein comprises a first antigen binding polypeptide comprising two linkers, indicated herein as L1 and L2, as explained above, the linkers comprised in the second antigen binding polypeptide are indicated with the following integer, in this example, the first linker from N-terminus to C-terminus of the second antigen binding polypeptide is herein indicated as L3, the second linker from N-terminus to C-terminus of the second antigen binding polypeptide is herein indicated as L3. In some aspects, any one of the optional linkers each independently have a length of from 0 amino acids to about 50 amino acids. In some aspects, any one of the optional linkers each independently have a length of from 5 amino acids to about 40 amino acids.

[7798] In some aspects, any one of the optional linkers are non-immunogenic. In some aspects, any one of the optional linkers do not contain a consensus T cell epitope.

[7799] In some aspects, any of Ln comprises an amino acid sequence of G or A, or an amino acid sequence at least 65%, at least 70%, at least 75%, at least 80%, at least 85%, at least 90%, at least 95%, at least 99%, or 100% identical to amino acid sequence GSS or ASG, or an amino acid sequence at least 65%, at least 70%, at least 75%, at least 80%, at least 85%, at least 90%, at least 95%, at least 99%, or 100% identical to any one of SEQ ID NOs: 333-373 or 967-971. In some aspects. Ln comprises an amino acid sequence at least 65%, at least 70%, at least 75%, at least 80%, at least 85%, at least 90%, at least 95%, at least 99%, or 100% identical to any one of SEQ ID NOs: 333-345 or 967-971.

[7800] In some aspects, the antigen binding polypeptide is selected from any one of the more specific aspects provided herein for an antigen binding polypeptide in an antigen binding polypeptide complex having no more than three polypeptide chains.

[7801] In some aspects, the antigen binding polypeptide further comprises one or more immunoglobulin heavy chain constant region 1 (CH1) and/or one or more immunoglobulin light chain constant region (CL) between any one of the variable regions and/or optional amino acid linkers (e.g., between VL1 and L1, between L1 and VH1, between VH1 and L2, between L2 and VL1, between L1 and VL2, between VL2 and L2, between L2 and VH2, between VH2 and L3, between L3 and VH1, between VL1 and L1, between L1 and VH2, between VH2 and L2, between. L2 and VL2, between VL2 and L3, between L3 and VH1, between VH1 and L4, between L4 and VH2, between VH2 and L5, between L5 and VL2, between VL2 and L6, between L6 and VL1, between VH1 and L4, between L4 and VL2, between L4 and VL2, between VL2 and L5, between L5 and VH2, between VH2 and L6, or between L6 and VL1).

[7802] In some aspects, the antigen binding polypeptide is selected from any one of the more specific aspects provided herein for an antigen binding polypeptide in an antigen binding polypeptide complex having no more than three polypeptide chains, and further comprises one or more immunoglobulin heavy chain constant region 1 (CH1) and/or one or more immunoglobulin light chain constant region (CL) between any one of the variable regions and/or optional amino acid linkers (e.g., between VL1 and L1, between L1 and VH1, between VH1 and L2, between L2 and VL1, between L1 and VL2, between VL2 and L2, between L2 and VH2, between VH2 and L3, between L3 and VH1, between VL1 and L1, between L1 and VH2, between VH2 and L2, between, L2 and VL2, between VL2 and L3, between L3 and VH1, between VH1 and L4, between L4 and VH2, between VH2 and L5, between L5 and VL2, between VL2 and L6, between L6 and VL1, between VH1 and L4, between L4 and VL2, between L4 and VL2, between VL2 and L5, between L5 and VH2, between VH2 and L6, or between L6 and VL1).

[7803] In some aspects, the antigen binding polypeptides comprised in the antibodies or antigen binding fragments thereof (e.g., monospecific or multispecific antibodies or antigen binding fragments thereof) disclosed herein, comprise one or more CL, as indicated in the formulas representing the antigen binding polypeptide complexes disclosed herein. In some aspects, the CL comprises an amino acid sequence at least 65%, at least 70%, at least 75%, at least 80%, at least 85%, at least 90%, at least 95%, at least 99%, or 100% identical to any one of SEQ ID NOs: 374, 637, or 1092-1095.

[7804] In some aspects, the antigen binding polypeptides comprised in the antibodies or antigen binding fragments thereof (e.g., monospecific or multispecific antibodies or antigen binding fragments thereof) disclosed herein, comprise one or more CH1, as indicated in the formulas representing the antigen binding polypeptide complexes disclosed herein. In some aspects, the CH1 comprises an amino acid sequence at least 65%, at least 70%, at least 75%, at least 80%, at least 85%, at least 90%, at least 95%, at least 99%, or 100% identical to any one of SEQ ID NOs: 375, 634, 1070, 1071, or 1086-1091.

[7805] In some aspects, the antigen binding polypeptides comprised in the antibodies or antigen binding fragments thereof (e.g., monospecific or multispecific antibodies or antigen binding fragments thereof) provided herein further comprise an Fc region. In some aspects, the antigen binding polypeptides comprised in the antibodies or antigen binding fragments thereof (e.g., monospecific or multispecific antibodies or antigen binding fragments thereof) provided herein further comprise an Fc region at the carboxy-terminus. In some aspects, the Fc region comprises an immunoglobulin heavy chain constant region 2 (CH2) and/or an immunoglobulin heavy chain constant region 3 (CH3). In some aspects, the Fc region further comprises an immunoglobulin hinge (i.e., a hinge region). In some aspects, the hinge region is interposed between a CH1 and a CH2 (i.e., a hinge region is localized between the carboxy terminal residue of a CH1 and the N-terminal residue of a CH2). In some aspects, the hinge region comprises an amino acid sequence at least 65%, at least 70%, at least 75%, at least 80%, at least 85%, at least 90%, at least 95%, at least 99%, or 100% identical to any one of SEQ ID NOs: 635, 636, 1072, 1073, or 1074. In some aspects, the Fc region comprises a CH2 and a CH3. In some aspects, the CH2 comprises an amino acid sequence that is at least 65%, at least 70%, at least 75%, at least 80%, at least 85%, at least 90%, at least 95%, at least 99%, or 100% identical to any one of SEQ ID NOs: 1075-1078. In some aspects, the CH3 comprises an amino acid sequence that is at least 65%, at least 70%, at least 75%, at least 80%, at least 85%, at least 90%, at least 95%, at least 99%, or 100% identical to any one of SEQ ID NOs: 1079-1085. In some aspects, the Fc region comprises an amino acid sequence that is at least 65%, at least 70%, at least 75%, at least 80%, at least 85%, at least 90%, at least 95%, at least 99%, or 100% identical to any one of SEQ ID NOs: 376-380.

[7806] In some aspects, provided herein are antibodies or antigen binding fragments thereof (e.g., monospecific or multispecific antibodies or antigen binding fragments thereof) comprising an antigen binding polypeptide having a structure represented by:
[7807] VL1-L1-VH1 or VH1-L1-VL1;
[7808] wherein:
[7809] VL1 is a first immunoglobulin light chain variable region that specifically binds to (i) a tumor-associated antigen (TAA), (ii) an infectious disease antigen that is not a sarbecovirus antigen, or (iii) an other-pathology antigen;
[7810] VH1 is a first immunoglobulin heavy chain variable region that specifically binds to (i) a tumor-associated antigen (TAA), (ii) an infectious disease antigen that is not a sarbecovirus antigen, or (iii) an other-pathology antigen; and
[7811] L1 is an optional amino acid linker.

[7812] In any aspect shown herein as a structure from amino terminus to carboxy terminus, and with binding pairs selected from VL and/or VH or other structural regions such as CH2, CH3, when shown without a specific linker such as L1, L2, etc., such linkers are optionally present in such structures between each designated subsequence VL, VH, etc.

[7813] In some aspects, the TAA is selected from the group consisting of 5′-nucleotidase, 5T4, A2AR, activin receptor-like kinase 1, adenocarcinoma antigen, ADRB3, AFP, AKAP-4, ALK, alpha-fetoprotein, androgenreceptor, angiopoietin 2, AOC3, APRIL, ATPDase, AXL, B7-4, B7DC, B7H1, B7H2, B7H3, B7H4, B7H5, B7H6, B7H7, B7RP1, BAFF, BAFFR, BCMA, bcr-abl, BlyS, BORIS, BST2, BTK, BTLA, C3, C5, C5a, C5a receptor, CA-125, CAIX, CanAg (a glycoform of MUC1), CCL11, CCL15, CCL17, CCL19, CCL2, CCL20, CCL21, CCL25, CCL3, CCL4, CCL5, CCL7, CCL8, CCR2, CCR3, CCR4, CCR5, CD11, CD11a, CD123, CD125, CD133, CD134, CD137, CD137L, CD147, CD15, CD154, CD160, CD16A, CD171, CD179a, CD18, CD184, CD19, CD2, CD20, CD200, CD22, CD221, CD23, CD24, CD242, CD25, CD27, CD272, CD276, CD278, CD279, CD28, CD3, CD30, CD300LF, CD319, CD33, CD37, CD38, CD39, CD38, CD4, CD40, CD40L, CD41, CD44v6, CD45, CD47, CD49B, CD5, CD51, CD52, CD54, CD56, CD6, CD62L, CD7, CD70, CD72, CD74, CD79a, CD79b, CD80, CD86, CD97, CEA, CEACAM5, claudin 18 isoform 2, CLDN6, CLEC12A, CLEC9, CLEC91, CLL-1, cMet, coagulation factor III, CRTH2, CS1, CSF-1, CSFIR, CSF-2, CSF-3, CTGF, CTLA4, CXCL1, CXCL12, CXCL13, CXCL2, CXCL4, CXCR3, CXORF61, CyclinB1, CYP1B1, dendritic cell-associated lectin 2, DLL3, DLL4, DNGR-1, DR5, E7, E-cadherin, EGFL7, EGFR, EGFRVIII, ELF2M, EMR2, endoglin, ENTPD1, EpCAM, EphA2, EPHA3, ephrin receptor A3, EphrinB2, episialin, ERBB2 (Her2/neu), ERBB3, ERG (TMPRSS2-ETS fusion gene), ETV6-AML, FAP, FCAR, FCER1, FCER1A, FCER2, FCRL5, FGF 23, FGFR, FGFR2, fibronectin extra domain-B, FLAP, FLT3, folate hydrolase, folate receptor 1, folate receptor alpha, folate receptor beta, FOLH1, Fos-relatedantigen1, Frizzled receptor, Fucosyl GM1, GD2, GD3, gelatinase B, Gi24, GITR, GITRL, GloboH, Glutamate carboxypeptidase II, glypican 3, GM3, GP100, GPC1, GPC2, GPC3, gplOO, GPNMB, GPR20, GPR5, GPRC5D, growth differentiation factor 8, GUCY2C, HAVCR1, HER1, HER2, HER3, HGF, HGFR, HHLA2, histone complex, HLA-DR, HMGB1, HMWMAA, HPVE6, hTERT, human telomerase reverse transcriptase, HVEM, ICAM-1, ICOS, ICOSL, IDO, IFNa, IgE, IGF-1, IGF1R, IGF-2, IGF-I receptor, IGLL1, IL1, IL10, IL12, IL13, IL13Ra2, IL-13Ra2, IL13Ra1, IL15, IL17, IL-17A, IL-17AF, IL-17F, IL17Rb, IL18, IL1B, IL1F10, IL-1a, IL-1B, IL2, IL-20, IL22, IL23, IL-23A, IL25, IL2Rbeta, IL-3 receptor, IL-31 receptor A, IL33, IL35, IL4, IL4Ra, IL5, IL5R, IL6, IL7, IL7Ra, IL8, IL9, IL9R, IL1A, IL-llRa, integrin α4, integrin α4 β7, integrin α5β1, integrin αIIbβ3, integrin αvβ3, integrin β7, interleukin 36 receptor IL1RAP, interleukin 36 receptor IL1RL2, intestinal carboxy lesterase, ITGB4, ITK, KIR, KIR2D, KIT, LAG3, LAGE-1a, LAIR1, LAMP1, LCK, legumain, leptin. LewisY, LILRA2, LIV-1, LMP2, LOXL2, LPFS2, LRRC15, LY6K, LY75, LYPD3, MAD-CT-1, MAD-CT-2, MAGEA1, MAGE-A1, MCAM, MCP-1, MelanA/MART1, mesothelin, MHC classII, MIF, ML-IAP, MS4A1, MST1R (RON), MUC1, MUC-1, MUC16, MUC-16, MUC5AC, muthsp70-2, MYCN, NA17, NCA-90 granulocyte antigen, NCAM, NCR3LG1, nectin-4, NGNA ganglioside, NKG2A, NKG2D, NKp46, Notch 1, Notch receptor, NRP1, NTPDase-1, NY-BR-1, NY-ESO-1, o-acetyl-GD2, OR51E2, OX40, OX40L, OY-TES1, p53, p53mutant, PANX3, PAP, PAX3, PAX5, PCDC1, PCDP1, PCTA-1/Galectin8, PD-1, PDGFRA, PDGFR-beta, PD-L1, PD-L2, phosphate-sodium co-transporter, phosphatidylserine, PLAC1, polysialicacid, PROM1, prostase, prostein, PRSS21, PSCA, PSMA, PTK7, RAGE-1, RANKL, Ras mutant, rhIL1O, RhoC, root plate-specific spondin 3, ROR1, ROR2, RTN4, RU1, RU2, S152, sarcoma translocation breakpoints, SART3, scatter factor receptor kinase, SDC1, SIRPalpha, SISP1, SLAMF7, SLC, sLe, SLITRK6, spermprotein17, SPG64, sphingosine-1-phosphate, SSEA-4, SSX2, ST2, STEAP1, STEAP2, surviving and telomerase, Syk kinase, T14, TACI, TAG72, TARP, T-cell receptor, TCRβ, TDO, TEM1/CD248, TEM7R, tenascin C, TGFBETA, TGF-β1, TGF-β2, TGS5, the extracellular portion of the APRIL protein. Tie2, TIGIT, TIM3, TLR, TLR2, TLR4, TLR5, TLR9, TMEF1, TnAg, TNF, TNFa, TNFR superfamily member 4, TNFRSF7, Tp55, TRAC, TRAIL-R1, TRAIL-R2, TRAP, TREM1, TROP2, TRP-2, TSHR, TSLP, TSLPR, tumor antigen CTAA16.88, TWEAK, tyrosinase, TYRP1 glycoprotein 75, UPK2, VAP-1, VEGF, VEGFA, VEGFR-1, VEGFR2, vimentin, VISTA, Vstm3, WT1, WUCAM, and XAGE1.

[7814] In some aspects, the VL1 comprises a light chain complementarity determining region 1 (LCDR1), LCDR2, and/or LCDR3 of an antibody selected from the group consisting of losatuxizumab vedotin, utomilumab, urelumab, oleclumab, naptumomab estafenatox, ascrinvacumab, pintumomab, tacatuzumab tetraxetan, nesvacumab, vanucizumab, timolumab, vapaliximab, vepalimomab, enapotamab vedotin, ianalumab, belimumab, tabalumab, tibulizumab, belantamab mafodotin, teclistamab, teclistamab, detumomab, nacolomab tafenatox, eculizumab, lendalizumab, pexelizumab, pozelimab, ravulizumab, tesidolumab, vilobelimab, abagovomab, igovomab, oregovomab, sofituzumab vedotin, cantuzumab mertansine, cantuzuma bravtansine, girentuximab, altumomab pentetate, arcitumomab, besilesomab, bertilimumab, plozalizumab, mogamulizumab, leronlimab, PRO140, rovelizumab, rovelizumab, talacotuzumab, benralizumab, tavolimab, vonlerolizumab, gavilimomab, ziralimumab, fanolesomab, ipilimumab, ruplizumab, toralizumab, dapirolizumab pegol, toralizumab, dapirolizumab pegol, ruplizumab, blinatumomab, inebilizumab, loncastuximab tesirine, SGN-CD19A, tafasitamab, taplitumomab paptox, XMAB-5574, Budoprutug, Obexelimab, duvortuxizumab, englumafusp alfa, Emfizatamab, zeripatamig, siplizumab, blontuvetmab, FBTA05, ibritumomab tiuxetan, obinutuzumab, ocaratuzumab, ocrelizumab, ofatumumab, rituximab, tositumomab, ublituximab, veltuzumab, divozilimab, eramkafusp alfa, ripertamab, zuberitamab, glofitamab, nofetumomab merpentan, samalizumab, imvotamab, odronextamab, plamotamab, bectumomab, inotuzumab ozogamicin, moxetumomab pasudotox, pinatuzumab vedotin, gomiliximab, lumiliximab, inolimomab, inolimomab, daclizumab, camidanluma btesirine, basiliximab, varlilumab, omburtamab, enoblituzumab, vopratelimab, lulizumabpegol, TGN1412, muromonab-CD3, otelixizumab, teplizumab, visilizumab, epcoritamab, epcoritamab, brentuximab vedotin, iratumumab, azintuxizumab vedotin, gemtuzumab ozogamicin, lintuzumab, vadastuximab talirine, naratuximab emtansine, otlertuzumab, lilotomab satetraxetan, tetulomab, daratumumab, isatuximab, foralumab, mosunetuzumab, mosunetuzumab, cedelizumab, ibalizumab, keliximab, priliximab, tregalizumab, zanolimumab, bleselumab, iscalimab, lucatumumab, ravagalimab, selicrelumab, teneliximab, vanalimab, abciximab, bivatuzumab, iomab-B, telimomab aritox, zolimomab aritox, abituzumab, intetumumab, alemtuzumab, tamtuvetmab, lorvotuzumab mertansine, itolizumab, cusatuzumab, vorsetuzumab mafodotin, milatuzumab, iladatuzumab vedotin, polatuzumab vedotin, galiximab, cibisatamab, zolbetuximab, naxitamab, tisotumab vedotin, olendalizumab, pamrevlumab, lacnotuzumab, cabiralizumab, emactuzumab, axatilimab, gimsilumab, lenzilumab, namilumab, tremelimumab, ulocuplumab, tepoditamab, rovalpituzumab tesirine, tarlatamab, demcizumab, navicixizumab, drozitumab, parsatuzumab, depatuxizumab mafodotin, modotuximab, carotuximab, adecatumumab, adecatumumab, oportuzumab monatox, solitomab, tucotuzumab celmoleukin, edrecolomab, catumaxomab, ifabotuzumab, fibatuzumab, zalutumumab, panitumumab, cetuximab, futuximab, imgatuzumab, laprituximab emtansine, matuzumab, necitumumab, nimotuzumab, tomuzotuximab, amivantamab, amivantamab, epitumomab cituxetan, sontuzumab, duligotuzumab, elgemtumab, lumretuzumab, patritumab, seribantumab, zenocutuzumab, sibrotuzumab, burosumab, aprutumab ixadotin, radretumab, pasotuxizumab, farletuzumab, mirvetuximab soravtansine, vantictumab, TRBS07, 3F8, dinutuximab, dinutuximab beta, ecromeximab, mitumomab, andecaliximab, capromab, codrituzumab, glembatumumab vedotin, talquetamab, talquetamab, trevogrumab, indusatumab vedotin, ficlatuzumab, rilotumumab, zatuximab, pentuzimab, pentuzimab, margetuximab, timigutuzumab, trastuzumab, trastuzumab duocarmazine, trastuzumab emtansine, gancotamab, pertuzumab, ertumaxomab, emibetuzumab, telisotuzumab, telisotuzumab vedotin, derlotuximab biotin, apolizumab, onartuzumab, bersanlimab, enlimomabpegol, rontalizumab, sifalimumab, talizumab, ganitumab, istiratumab, robatumumab, teprotumumab, figitumumab, ganitumab, istiratumab, robatumumab, teprotumumab, cixutumumab, dalotuzumab, xentuzumab, dusigitumab, canakinumab, ustekinumab, ustekinumab, ustekinumab, briakinumab, briakinumab, abrezekimab, lebrikizumab, romilkimab, TNX-650, tralokinumab, anrukinzumab, brodalumab, ixekizumab, netakimab, perakizumab, secukinumab, vunakizumab, afasevikumab, afasevikumab, bimekizumab, bimekizumab, remtolumab, bermekimab, lutikizumab, lutikizumab, gevokizumab, cergutuzumab amunaleukin, fletikumab, fezakinumab, brazikumab, guselkumab, mirikizumab, tildrakizumab, risankizumab, flotetuzumab, nemolizumab, pascolizumab, dupilumab, mepolizumab, reslizumab, clazakizumab, elsilimomab, olokizumab, sarilumab, siltuximab, sirukumab, vobarilizumab, tocilizumab, SA237, satralizumab, enokizumab, prezalizumab, natalizumab, abrilumab, abrilumab, vedolizumab, volociximab, tadocizumab, etaracizumab, etrolizumab, spesolimab, vatelizumab, erlizumab, lirilumab, relatlimab, cBR96-doxorubicinimmunoconjugate, odulimomab, efalizumab, ladiratuzumab vedotin, simtuzumab, samrotamab vedotin, aselizumab, lupartumab amadotin, imalumab, carlumab, imaprelimab, amatuximab, amatuximab, anetumab ravtansine, narnatumab, clivatuzumab tetraxetan, pemtumomab, gatipotuzumab, ensituximab, lemalesomab, sulesomab, enfortumab vedotin, racotumomab, monalizumab, brontictuzumab, tarextumab, vesencumab, oxelumab, gilvetmab, tislelizumab, dostarlimab, BCD-100, nivolumab, PDR001, pembrolizumab, pidilizumab, retifanlimab, spartalizumab, sintilimab, cemiplimab, olaratumab, tovetumab, rinucumab, atezolizumab, avelumab, durvalumab, lifastuzumab vedotin, bavituximab, acapatamab, capromab, rosopatamab, nezastomig, pasotuxizumab, pelgifatamab, voxalatamab, cofetuzumab pelidotin, denosumab, rosmantuzumab, cirmtuzumab, atinumab, indatuximab ravtansine, elotuzumab, sirtratumab vedotin, sonepcizumab, vandortuzumab vedotin, minretumomab, satumomab pendetide, maslimomab, ontuxizumab, tenatumomab, fresolimumab, metelimumab, lerdelimumab, tezepelumab, etigilimab, tiragotumab, placulumab, prezalumab, infliximab, nerelimomab, ozoralizumab, adalimumab, afelimomab, certolizumab pegol, golimumab, mapatumumab, conatumumab, lexatumumab, tigatuzumab, sacituzumab govitecan, votumumab, pogalizumab, letolizumab, pankomab, anatumomab mafenatox, enavatuzumab, flanvotumab, brolucizumab, ranibizumab, varisacumab, bevacizumab, faricimab, icrucumab, alacizumab pegol, ramucirumab, pritumumab, and onvatilimab.

[7815] In some aspects, the VH1 comprises a heavy chain complementarity determining region 1 (HCDR1), HCDR2, and/or HCDR3 of an antibody selected from the group consisting of losatuxizumab vedotin, utomilumab, urelumab, oleclumab, naptumomab estafenatox, ascrinvacumab, pintumomab, tacatuzumab tetraxetan, nesvacumab, vanucizumab, timolumab, vapaliximab, vepalimomab, enapotamab vedotin, ianalumab, belimumab, tabalumab, tibulizumab, belantamab mafodotin, teclistamab, teclistamab, detumomab, nacolomab tafenatox, eculizumab, lendalizumab, pexelizumab, pozelimab, ravulizumab, tesidolumab, vilobelimab, abagovomab, igovomab, oregovomab, sofituzumab vedotin, cantuzumab mertansine, cantuzuma bravtansine, girentuximab, altumomab pentetate, arcitumomab, besilesomab, bertilimumab, plozalizumab, mogamulizumab, leronlimab, PRO140, rovelizumab, rovelizumab, talacotuzumab, benralizumab, tavolimab, vonlerolizumab, gavilimomab, ziralimumab, fanolesomab, ipilimumab, ruplizumab, toralizumab, dapirolizumab pegol, toralizumab, dapirolizumab pegol, ruplizumab, blinatumomab, inebilizumab, loncastuximab tesirine, SGN-CD19A, tafasitamab, taplitumomab paptox, XMAB-5574, Budoprutug, Obexelimab, duvortuxizumab, englumafusp alfa, Emfizatamab, zeripatamig, siplizumab, blontuvetmab, FBTA05, ibritumomab tiuxetan, obinutuzumab, ocaratuzumab, ocrelizumab, ofatumumab, rituximab, tositumomab, ublituximab, veltuzumab, divozilimab, eramkafusp alfa, ripertamab, zuberitamab, glofitamab, nofetumomab merpentan, samalizumab, imvotamab, odronextamab, plamotamab, bectumomab, inotuzumab ozogamicin, moxetumomab pasudotox, pinatuzumab vedotin, gomiliximab, lumiliximab, inolimomab, inolimomab, daclizumab, camidanluma btesirine, basiliximab, varlilumab, omburtamab, enoblituzumab, vopratelimab, lulizumabpegol, TGN1412, muromonab-CD3, otelixizumab, teplizumab, visilizumab, epcoritamab, epcoritamab, brentuximab vedotin, iratumumab, azintuxizumab vedotin, gemtuzumab ozogamicin, lintuzumab, vadastuximab talirine, naratuximab emtansine, otlertuzumab, lilotomab satetraxetan, tetulomab, daratumumab, isatuximab, foralumab, mosunetuzumab, mosunetuzumab, cedelizumab, ibalizumab, keliximab, priliximab, tregalizumab, zanolimumab, bleselumab, iscalimab, lucatumumab, ravagalimab, selicrelumab, teneliximab, vanalimab, abciximab, bivatuzumab, iomab-B, telimomab aritox, zolimomab aritox, abituzumab, intetumumab, alemtuzumab, tamtuvetmab, lorvotuzumab mertansine, itolizumab, cusatuzumab, vorsetuzumab mafodotin, milatuzumab, iladatuzumab vedotin, polatuzumab vedotin, galiximab, cibisatamab, zolbetuximab, naxitamab, tisotumab vedotin, olendalizumab, pamrevlumab, lacnotuzumab, cabiralizumab, emactuzumab, axatilimab, gimsilumab, lenzilumab, namilumab, tremelimumab, ulocuplumab, tepoditamab, rovalpituzumab tesirine, tarlatamab, demcizumab, navicixizumab, drozitumab, parsatuzumab, depatuxizumab mafodotin, modotuximab, carotuximab, adecatumumab, adecatumumab, oportuzumab monatox, solitomab, tucotuzumab celmoleukin, edrecolomab, catumaxomab, ifabotuzumab, fibatuzumab, zalutumumab, panitumumab, cetuximab, futuximab, imgatuzumab, laprituximab emtansine, matuzumab, necitumumab, nimotuzumab, tomuzotuximab, amivantamab, amivantamab, epitumomab cituxetan, sontuzumab, duligotuzumab, elgemtumab, lumretuzumab, patritumab, seribantumab, zenocutuzumab, sibrotuzumab, burosumab, aprutumab ixadotin, radretumab, pasotuxizumab, farletuzumab, mirvetuximab soravtansine, vantictumab, TRBS07, 3F8, dinutuximab, dinutuximab beta, ecromeximab, mitumomab, andecaliximab, capromab, codrituzumab, glembatumumab vedotin, talquetamab, talquetamab, trevogrumab, indusatumab vedotin, ficlatuzumab, rilotumumab, zatuximab, pentuzimab, pentuzimab, margetuximab, timigutuzumab, trastuzumab, trastuzumab duocarmazine, trastuzumab emtansine, gancotamab, pertuzumab, ertumaxomab, emibetuzumab, telisotuzumab, telisotuzumab vedotin, derlotuximab biotin, apolizumab, onartuzumab, bersanlimab, enlimomabpegol, rontalizumab, sifalimumab, talizumab, ganitumab, istiratumab, robatumumab, teprotumumab, figitumumab, ganitumab, istiratumab, robatumumab, teprotumumab, cixutumumab, dalotuzumab, xentuzumab, dusigitumab, canakinumab, ustekinumab, ustekinumab, ustekinumab, briakinumab, briakinumab, abrezekimab, lebrikizumab, romilkimab, TNX-650, tralokinumab, anrukinzumab, brodalumab, ixekizumab, netakimab, perakizumab, secukinumab, vunakizumab, afasevikumab, afasevikumab, bimekizumab, bimekizumab, remtolumab, bermekimab, lutikizumab, lutikizumab, gevokizumab, cergutuzumab amunaleukin, fletikumab, fezakinumab, brazikumab, guselkumab, mirikizumab, tildrakizumab, risankizumab, flotetuzumab, nemolizumab, pascolizumab, dupilumab, mepolizumab, reslizumab, clazakizumab, elsilimomab, olokizumab, sarilumab, siltuximab, sirukumab, vobarilizumab, tocilizumab, SA237, satralizumab, enokizumab, prezalizumab, natalizumab, abrilumab, abrilumab, vedolizumab, volociximab, tadocizumab, etaracizumab, etrolizumab, spesolimab, vatelizumab, erlizumab, lirilumab, relatlimab, cBR96-doxorubicinimmunoconjugate, odulimomab, efalizumab, ladiratuzumab vedotin, simtuzumab, samrotamab vedotin, aselizumab, lupartumab amadotin, imalumab, carlumab, imaprelimab, amatuximab, amatuximab, anetumab ravtansine, narnatumab, clivatuzumab tetraxetan, pemtumomab, gatipotuzumab, ensituximab, lemalesomab, sulesomab, enfortumab vedotin, racotumomab, monalizumab, brontictuzumab, tarextumab, vesencumab, oxelumab, gilvetmab, tislelizumab, dostarlimab, BCD-100, nivolumab, PDR001, pembrolizumab, pidilizumab, retifanlimab, spartalizumab, sintilimab, cemiplimab, olaratumab, tovetumab, rinucumab, atezolizumab, avelumab, durvalumab, lifastuzumab vedotin, bavituximab, acapatamab, capromab, rosopatamab, nezastomig, pasotuxizumab, pelgifatamab, voxalatamab, cofetuzumab pelidotin, denosumab, rosmantuzumab, cirmtuzumab, atinumab, indatuximab ravtansine, elotuzumab, sirtratumab vedotin, sonepcizumab, vandortuzumab vedotin, minretumomab, satumomab pendetide, maslimomab, ontuxizumab, tenatumomab, fresolimumab, metelimumab, lerdelimumab, tezepelumab, etigilimab, tiragotumab, placulumab, prezalumab, infliximab, nerelimomab, ozoralizumab, adalimumab, afelimomab, certolizumab pegol, golimumab, mapatumumab, conatumumab, lexatumumab, tigatuzumab, sacituzumab govitecan, votumumab, pogalizumab, letolizumab, pankomab, anatumomab mafenatox, enavatuzumab, flanvotumab, brolucizumab, ranibizumab, varisacumab, bevacizumab, faricimab, icrucumab, alacizumab pegol, ramucirumab, pritumumab, and onvatilimab.

[7816] In some aspects, the VL1 comprises a VL of an antibody selected from the group consisting of losatuxizumab vedotin, utomilumab, urelumab, oleclumab, naptumomab estafenatox, ascrinvacumab, pintumomab, tacatuzumab tetraxetan, nesvacumab, vanucizumab, timolumab, vapaliximab, vepalimomab, enapotamab vedotin, ianalumab, belimumab, tabalumab, tibulizumab, belantamab mafodotin, teclistamab, teclistamab, detumomab, nacolomab tafenatox, eculizumab, lendalizumab, pexelizumab, pozelimab, ravulizumab, tesidolumab, vilobelimab, abagovomab, igovomab, oregovomab, sofituzumab vedotin, cantuzumab mertansine, cantuzuma bravtansine, girentuximab, altumomab pentetate, arcitumomab, besilesomab, bertilimumab, plozalizumab, mogamulizumab, leronlimab, PRO140, rovelizumab, rovelizumab, talacotuzumab, benralizumab, tavolimab, vonlerolizumab, gavilimomab, ziralimumab, fanolesomab, ipilimumab, ruplizumab, toralizumab, dapirolizumab pegol, toralizumab, dapirolizumab pegol, ruplizumab, blinatumomab, inebilizumab, loncastuximab tesirine, SGN-CD19A, tafasitamab, taplitumomab paptox, XMAB-5574, Budoprutug, Obexelimab, duvortuxizumab, englumafusp alfa, Emfizatamab, zeripatamig, siplizumab, blontuvetmab, FBTA05, ibritumomab tiuxetan, obinutuzumab, ocaratuzumab, ocrelizumab, ofatumumab, rituximab, tositumomab, ublituximab, veltuzumab, divozilimab, eramkafusp alfa, ripertamab, zuberitamab, glofitamab, nofetumomab merpentan, samalizumab, imvotamab, odronextamab, plamotamab, bectumomab, inotuzumab ozogamicin, moxetumomab pasudotox, pinatuzumab vedotin, gomiliximab, lumiliximab, inolimomab, inolimomab, daclizumab, camidanluma btesirine, basiliximab, varlilumab, omburtamab, enoblituzumab, vopratelimab, lulizumabpegol, TGN1412, muromonab-CD3, otelixizumab, teplizumab, visilizumab, epcoritamab, epcoritamab, brentuximab vedotin, iratumumab, azintuxizumab vedotin, gemtuzumab ozogamicin, lintuzumab, vadastuximab talirine, naratuximab emtansine, otlertuzumab, lilotomab satetraxetan, tetulomab, daratumumab, isatuximab, foralumab, mosunetuzumab, mosunetuzumab, cedelizumab, ibalizumab, keliximab, priliximab, tregalizumab, zanolimumab, bleselumab, iscalimab, lucatumumab, ravagalimab, selicrelumab, teneliximab, vanalimab, abciximab, bivatuzumab, iomab-B, telimomab aritox, zolimomab aritox, abituzumab, intetumumab, alemtuzumab, tamtuvetmab, lorvotuzumab mertansine, itolizumab, cusatuzumab, vorsetuzumab mafodotin, milatuzumab, iladatuzumab vedotin, polatuzumab vedotin, galiximab, cibisatamab, zolbetuximab, naxitamab, tisotumab vedotin, olendalizumab, pamrevlumab, lacnotuzumab, cabiralizumab, emactuzumab, axatilimab, gimsilumab, lenzilumab, namilumab, tremelimumab, ulocuplumab, tepoditamab, rovalpituzumab tesirine, tarlatamab, demcizumab, navicixizumab, drozitumab, parsatuzumab, depatuxizumab mafodotin, modotuximab, carotuximab, adecatumumab, adecatumumab, oportuzumab monatox, solitomab, tucotuzumab celmoleukin, edrecolomab, catumaxomab, ifabotuzumab, fibatuzumab, zalutumumab, panitumumab, cetuximab, futuximab, imgatuzumab, laprituximab emtansine, matuzumab, necitumumab, nimotuzumab, tomuzotuximab, amivantamab, amivantamab, epitumomab cituxetan, sontuzumab, duligotuzumab, elgemtumab, lumretuzumab, patritumab, seribantumab, zenocutuzumab, sibrotuzumab, burosumab, aprutumab ixadotin, radretumab, pasotuxizumab, farletuzumab, mirvetuximab soravtansine, vantictumab, TRBS07, 3F8, dinutuximab, dinutuximab beta, ecromeximab, mitumomab, andecaliximab, capromab, codrituzumab, glembatumumab vedotin, talquetamab, talquetamab, trevogrumab, indusatumab vedotin, ficlatuzumab, rilotumumab, zatuximab, pentuzimab, pentuzimab, margetuximab, timigutuzumab, trastuzumab, trastuzumab duocarmazine, trastuzumab emtansine, gancotamab, pertuzumab, ertumaxomab, emibetuzumab, telisotuzumab, telisotuzumab vedotin, derlotuximab biotin, apolizumab, onartuzumab, bersanlimab, enlimomabpegol, rontalizumab, sifalimumab, talizumab, ganitumab, istiratumab, robatumumab, teprotumumab, figitumumab, ganitumab, istiratumab, robatumumab, teprotumumab, cixutumumab, dalotuzumab, xentuzumab, dusigitumab, canakinumab, ustekinumab, ustekinumab, ustekinumab, briakinumab, briakinumab, abrezekimab, lebrikizumab, romilkimab, TNX-650, tralokinumab, anrukinzumab, brodalumab, ixekizumab, netakimab, perakizumab, secukinumab, vunakizumab, afasevikumab, afascvikumab, bimekizumab, bimekizumab, remtolumab, bermekimab, lutikizumab, lutikizumab, gevokizumab, cergutuzumab amunaleukin, fletikumab, fezakinumab, brazikumab, guselkumab, mirikizumab, tildrakizumab, risankizumab, flotetuzumab, nemolizumab, pascolizumab, dupilumab, mepolizumab, reslizumab, clazakizumab, elsilimomab, olokizumab, sarilumab, siltuximab, sirukumab, vobarilizumab, tocilizumab, SA237, satralizumab, enokizumab, prezalizumab, natalizumab, abrilumab, abrilumab, vedolizumab, volociximab, tadocizumab, etaracizumab, etrolizumab, spesolimab, vatelizumab, erlizumab, lirilumab, relatlimab, cBR96-doxorubicinimmunoconjugate, odulimomab, efalizumab, ladiratuzumab vedotin, simtuzumab, samrotamab vedotin, aselizumab, lupartumab amadotin, imalumab, carlumab, imaprelimab, amatuximab, amatuximab, anetumab ravtansine, narnatumab, clivatuzumab tetraxetan, pemtumomab, gatipotuzumab, ensituximab, lemalesomab, sulesomab, enfortumab vedotin, racotumomab, monalizumab, brontictuzumab, tarextumab, vesencumab, oxelumab, gilvetmab, tislelizumab, dostarlimab, BCD-100, nivolumab, PDR001, pembrolizumab, pidilizumab, retifanlimab, spartalizumab, sintilimab, cemiplimab, olaratumab, tovetumab, rinucumab, atezolizumab, avelumab, durvalumab, lifastuzumab vedotin, bavituximab, acapatamab, capromab, rosopatamab, nezastomig, pasotuxizumab, pelgifatamab, voxalatamab, cofetuzumab pelidotin, denosumab, rosmantuzumab, cirmtuzumab, atinumab, indatuximab ravtansine, elotuzumab, sirtratumab vedotin, sonepcizumab, vandortuzumab vedotin, minretumomab, satumomab pendetide, maslimomab, ontuxizumab, tenatumomab, fresolimumab, metelimumab, lerdelimumab, tezepelumab, etigilimab, tiragotumab, placulumab, prezalumab, infliximab, nerelimomab, ozoralizumab, adalimumab, afelimomab, certolizumab pegol, golimumab, mapatumumab, conatumumab, lexatumumab, tigatuzumab, sacituzumab govitecan, votumumab, pogalizumab, letolizumab, pankomab, anatumomab mafenatox, enavatuzumab, flanvotumab, brolucizumab, ranibizumab, varisacumab, bevacizumab, faricimab, icrucumab, alacizumab pegol, ramucirumab, pritumumab, and onvatilimab.

[7817] In some aspects, the VH1 comprises a VH of an antibody selected from the group consisting of losatuxizumab vedotin, utomilumab, urelumab, oleclumab, naptumomab estafenatox, ascrinvacumab, pintumomab, tacatuzumab tetraxetan, nesvacumab, vanucizumab, timolumab, vapaliximab, vepalimomab, enapotamab vedotin, ianalumab, belimumab, tabalumab, tibulizumab, belantamab mafodotin, teclistamab, teclistamab, detumomab, nacolomab tafenatox, eculizumab, lendalizumab, pexelizumab, pozelimab, ravulizumab, tesidolumab, vilobelimab, abagovomab, igovomab, oregovomab, sofituzumab vedotin, cantuzumab mertansine, cantuzuma bravtansine, girentuximab, altumomab pentetate, arcitumomab, besilesomab, bertilimumab, plozalizumab, mogamulizumab, leronlimab, PRO140, rovelizumab, rovelizumab, talacotuzumab, benralizumab, tavolimab, vonlerolizumab, gavilimomab, ziralimumab, fanolesomab, ipilimumab, ruplizumab, toralizumab, dapirolizumab pegol, toralizumab, dapirolizumab pegol, ruplizumab, blinatumomab, inebilizumab, loncastuximab tesirine, SGN-CD19A, tafasitamab, taplitumomab paptox, XMAB-5574, Budoprutug, Obexelimab, duvortuxizumab, englumafusp alfa, Emfizatamab, zeripatamig, siplizumab, blontuvetmab, FBTA05, ibritumomab tiuxetan, obinutuzumab, ocaratuzumab, ocrelizumab, ofatumumab, rituximab, tositumomab, ublituximab, veltuzumab, divozilimab, eramkafusp alfa, ripertamab, zuberitamab, glofitamab, nofetumomab merpentan, samalizumab, imvotamab, odronextamab, plamotamab, bectumomab, inotuzumab ozogamicin, moxetumomab pasudotox, pinatuzumab vedotin, gomiliximab, lumiliximab, inolimomab, inolimomab, daclizumab, camidanluma btesirine, basiliximab, varlilumab, omburtamab, enoblituzumab, vopratelimab, lulizumabpegol, TGN1412, muromonab-CD3, otelixizumab, teplizumab, visilizumab, epcoritamab, epcoritamab, brentuximab vedotin, iratumumab, azintuxizumab vedotin, gemtuzumab ozogamicin, lintuzumab, vadastuximab talirine, naratuximab emtansine, otlertuzumab, lilotomab satetraxetan, tetulomab, daratumumab, isatuximab, foralumab, mosunetuzumab, mosunetuzumab, cedelizumab, ibalizumab, keliximab, priliximab, tregalizumab, zanolimumab, bleselumab, iscalimab, lucatumumab, ravagalimab, selicrelumab, teneliximab, vanalimab, abciximab, bivatuzumab, iomab-B, telimomab aritox, zolimomab aritox, abituzumab, intetumumab, alemtuzumab, tamtuvetmab, lorvotuzumab mertansine, itolizumab, cusatuzumab, vorsetuzumab mafodotin, milatuzumab, iladatuzumab vedotin, polatuzumab vedotin, galiximab, cibisatamab, zolbetuximab, naxitamab, tisotumab vedotin, olendalizumab, pamrevlumab, lacnotuzumab, cabiralizumab, emactuzumab, axatilimab, gimsilumab, lenzilumab, namilumab, tremelimumab, ulocuplumab, tepoditamab, rovalpituzumab tesirine, tarlatamab, demcizumab, navicixizumab, drozitumab, parsatuzumab, depatuxizumab mafodotin, modotuximab, carotuximab, adecatumumab, adecatumumab, oportuzumab monatox, solitomab, tucotuzumab celmoleukin, edrecolomab, catumaxomab, ifabotuzumab, fibatuzumab, zalutumumab, panitumumab, cetuximab, futuximab, imgatuzumab, laprituximab emtansine, matuzumab, necitumumab, nimotuzumab, tomuzotuximab, amivantamab, amivantamab, epitumomab cituxetan, sontuzumab, duligotuzumab, elgemtumab, lumretuzumab, patritumab, seribantumab, zenocutuzumab, sibrotuzumab, burosumab, aprutumab ixadotin, radretumab, pasotuxizumab, farletuzumab, mirvetuximab soravtansine, vantictumab, TRBS07, 3F8, dinutuximab, dinutuximab beta, ecromeximab, mitumomab, andecaliximab, capromab, codrituzumab, glembatumumab vedotin, talquetamab, talquetamab, trevogrumab, indusatumab vedotin, ficlatuzumab, rilotumumab, zatuximab, pentuzimab, pentuzimab, margetuximab, timigutuzumab, trastuzumab, trastuzumab duocarmazine, trastuzumab emtansine, gancotamab, pertuzumab, ertumaxomab, emibetuzumab, telisotuzumab, telisotuzumab vedotin, derlotuximab biotin, apolizumab, onartuzumab, bersanlimab, enlimomabpegol, rontalizumab, sifalimumab, talizumab, ganitumab, istiratumab, robatumumab, teprotumumab, figitumumab, ganitumab, istiratumab, robatumumab, teprotumumab, cixutumumab, dalotuzumab, xentuzumab, dusigitumab, canakinumab, ustekinumab, ustekinumab, ustekinumab, briakinumab, briakinumab, abrezekimab, lebrikizumab, romilkimab, TNX-650, tralokinumab, anrukinzumab, brodalumab, ixekizumab, netakimab, perakizumab, secukinumab, vunakizumab, afasevikumab, afasevikumab, bimekizumab, bimekizumab, remtolumab, bermekimab, lutikizumab, lutikizumab, gevokizumab, cergutuzumab amunaleukin, fletikumab, fezakinumab, brazikumab, guselkumab, mirikizumab, tildrakizumab, risankizumab, flotetuzumab, nemolizumab, pascolizumab, dupilumab, mepolizumab, reslizumab, clazakizumab, elsilimomab, olokizumab, sarilumab, siltuximab, sirukumab, vobarilizumab, tocilizumab, SA237, satralizumab, enokizumab, prezalizumab, natalizumab, abrilumab, abrilumab, vedolizumab, volociximab, tadocizumab, etaracizumab, etrolizumab, spesolimab, vatelizumab, erlizumab, lirilumab, relatlimab, cBR96-doxorubicinimmunoconjugate, odulimomab, efalizumab, ladiratuzumab vedotin, simtuzumab, samrotamab vedotin, aselizumab, lupartumab amadotin, imalumab, carlumab, imaprelimab, amatuximab, amatuximab, anetumab ravtansine, narnatumab, clivatuzumab tetraxetan, pemtumomab, gatipotuzumab, ensituximab, lemalesomab, sulesomab, enfortumab vedotin, racotumomab, monalizumab, brontictuzumab, tarextumab, vesencumab, oxelumab, gilvetmab, tislelizumab, dostarlimab, BCD-100, nivolumab, PDR001, pembrolizumab, pidilizumab, retifanlimab, spartalizumab, sintilimab, cemiplimab, olaratumab, tovetumab, rinucumab, atezolizumab, avelumab, durvalumab, lifastuzumab vedotin, bavituximab, acapatamab, capromab, rosopatamab, nezastomig, pasotuxizumab, pelgifatamab, voxalatamab, cofetuzumab pelidotin, denosumab, rosmantuzumab, cirmtuzumab, atinumab, indatuximab ravtansine, elotuzumab, sirtratumab vedotin, sonepcizumab, vandortuzumab vedotin, minretumomab, satumomab pendetide, maslimomab, ontuxizumab, tenatumomab, fresolimumab, metelimumab, lerdelimumab, tezepelumab, etigilimab, tiragotumab, placulumab, prezalumab, infliximab, nerelimomab, ozoralizumab, adalimumab, afelimomab, certolizumab pegol, golimumab, mapatumumab, conatumumab, lexatumumab, tigatuzumab, sacituzumab govitecan, votumumab, pogalizumab, letolizumab, pankomab, anatumomab mafenatox, enavatuzumab, flanvotumab, brolucizumab, ranibizumab, varisacumab, bevacizumab, faricimab, icrucumab, alacizumab pegol, ramucirumab, pritumumab, and onvatilimab.

[7818] In some aspects, the VL1 comprises (i) a complementarity determining region (CDR) 1 having an amino acid sequence that is at least 65%, at least 70%, at least 75%, at least 80%, at least 85%, at least 90%, at least 95%, at least 99%, or 100% identical to any one of SEQ ID NOs: 1096, 1103, 1110, 1120, 1127, 1134, 1141, 1148, 1155, 1162, 1169, 1174, 1181, 1188, 1199, 1211, 1221, 1228, 1235, 1247, 1254, 1261, 1266, 1271, 1278, 1285, 1292, 1299, 1306, 1313, 1319, 1326, 1339, 1352, 1359, 1366, 1373, 1382, 1394, 1401, 1408, 1414, 1421, 1428, 1441, 1448, 1455, 1461, 1468, 1475, 1488, 1495, 1508, 1519, 1526, 1531, 1538, 1544, 1556, 1568, 1574, 1581, 1594, 1601, 1608, 1615, 1622, 1629, 1636, 1643, 1650, 1657, 1672, 1679, 1689, 1697, 1708, 1715, 1718, 1723, 1727, 1738, 1743, 1752, 1761, 1763, 1769, 1776, and 1786; (ii) a CDR2 having an amino acid sequence that is at least 65%, at least 70%, at least 75%, at least 80%, at least 85%, at least 90%, at least 95%, at least 99%, or 100% identical to any one of SEQ ID NOs: 1200, 1212, 1680, 1690, 1698, 1709, 1728, 1739, 1744, 1753, 1770, and 1777; or at least 65%, at least 70%, at least 75%, at least 80%, at least 85%, at least 90%, at least 95%, at least 99%, or 100% identical to any one of amino acid sequences AAS, APS, AT, ATS, DAS, DDG, DDS, DT, DTS, DVS, EAS, FTS, GAF, GAN, GAS, GAT, GIS, GKN, GNS, HTS, KVS, LAS, LGS, LVS, NAK, NTN, QMS, RMS, RTS, SAS, TTS, WAS, YAS, YAT, YGS, YRS, and YTS; and (iii) a CDR3 having an amino acid sequence that is at least 65%, at least 70%, at least 75%, at least 80%, at least 85%, at least 90%, at least 95%, at least 99%, or 100% identical to any one of SEQ ID NOs: 1097, 1104, 1111, 1121, 1128, 1135, 1142, 1149, 1156, 1163, 1170, 1175, 1182, 1189, 1195, 1201, 1207, 1213, 1222, 1229, 1236, 2009, 1248, 1255, 1262, 1267, 1272, 1279, 1286, 1293, 1300, 1307, 1320, 1327, 1333, 1340, 1346, 1353, 1360, 1367, 1374, 1383, 1389, 1395, 1402, 1409, 1415, 1422, 1429, 1435, 1442, 1449, 1456, 1462, 1469, 1476, 1482, 1489, 1496, 1502, 1509, 1513, 1520, 1532, 1539, 1545, 1557, 1562, 1569, 1575, 1582, 1588, 1595, 1602, 1609, 1616, 1623, 1630, 1637, 1644, 1651, 1658, 1663, 1673, 1681, 1691, 1699, 1710, 1729, 1735, 1745, 1751, 1754, 1778, 1787, and 1976.

[7819] In some aspects, the VH1 comprises (i) a complementarity determining region (CDR) 1 having an amino acid sequence that is at least 65%, at least 70%, at least 75%, at least 80%, at least 85%, at least 90%, at least 95%, at least 99%, or 100% identical to any one of SEQ ID NOs: 1099, 1106, 1113, 1117, 1123, 1130, 1137, 1144, 1151, 1158, 1165, 1177, 1184, 1191, 1203, 1215, 1224, 1231, 1238, 1243, 1250, 1257, 1264, 1274, 1281, 1288, 1295, 1302, 1309, 1315, 1322, 1329, 1335, 1342, 1348, 1355, 1362, 1369, 1376, 1385, 1397, 1404, 1417, 1424, 1431, 1437, 1444, 1451, 1458, 1464, 1471, 1478, 1484, 1491, 1498, 1504, 1511, 1515, 1522, 1534, 1547, 1552, 1564, 1577, 1584, 1590, 1597, 1604, 1611, 1618, 1625, 1632, 1639, 1646, 1653, 1660, 1665, 1675, 1683, 1693, 1701, 1705, 1716, 1719, 1731, 1736, 1747, 1756, 1772, 1780, and 1789; (ii) a CDR2 having an amino acid sequence that is at least 65%, at least 70%, at least 75%, at least 80%, at least 85%, at least 90%, at least 95%, at least 99%, or 100% identical to any one of SEQ ID NOs: 1100, 1107, 1114, 1118, 1124, 1131, 1138, 1145, 1152, 1159, 1166, 1178, 1185, 1192, 1204, 1216, 1225, 1232, 1239, 1244, 1251, 1258, 1275, 1282, 1289, 1296, 1303, 1310, 1316, 1323, 1330, 1336, 1343, 1349, 1356, 1363, 1370, 1377, 1386, 1391, 1398, 1405, 1411, 1418, 1425, 1432, 1438, 1445, 1452, 1465, 1472, 1479, 1485, 1492, 1499, 1505, 1516, 1523, 1528, 1535, 1541, 1548, 1553, 1559, 1565, 1571, 1578, 1585, 1591, 1598, 1605, 1612, 1619, 1626, 1633, 1640, 1647, 1654, 1666, 1676, 1684, 1687, 1694, 1702, 1706, 1712, 1717, 1720, 1725, 1732, 1737, 1741, 1748, 1757, 1767, 1773, 1781, and 1790; and (iii) a CDR3 having an amino acid sequence that is at least 65%, at least 70%, at least 75%, at least 80%, at least 85%, at least 90%, at least 95%, at least 99%, or 100% identical to any one of SEQ ID NOs: 1101, 1108, 1115, 1125, 1132, 1139, 1146, 1153, 1160, 1167, 1172, 1179, 1186, 1193, 1197, 1205, 1209, 1217, 1226, 1233, 1240, 1245, 1252, 1259, 1269, 1276, 1283, 1290, 1297, 1304, 1311, 1317, 1324, 1331, 1337, 1344, 1350, 1357, 1364, 1371, 1378, 1387, 1392, 1399, 1406, 1412, 1419, 1426, 1433, 1439, 1446, 1453, 1459, 1466, 1473, 1480, 1486, 1493, 1500, 1506, 1517, 1524, 1529, 1536, 1542, 1549, 1554, 1560, 1566, 1572, 1579, 1586, 1592, 1599, 1606, 1613, 1620, 1627, 1634, 1641, 1648, 1655, 1661, 1667, 1670, 1677, 1685, 1688, 1695, 1703, 1707, 1713, 1733, 1749, 1758, 1762, 1774, 1782, 1791, and 1975.

[7820] In some aspects, the VL1 comprises an amino acid sequence that is at least 65%, at least 70%, at least 75%, at least 80%, at least 85%, at least 90%, at least 95%, at least 99%, or 100% identical to any one of SEQ ID NOs: 1098, 1105, 1112, 1122, 1129, 1136, 1143, 1150, 1157, 1164, 1171, 1176, 1183, 1190, 1196, 1202, 1208, 1214, 1219, 1223, 1230, 1237, 1242, 1249, 1256, 1263, 1268, 1273, 1280, 1287, 1294, 1301, 1308, 1314, 1321, 1328, 1334, 1341, 1347, 1354, 1361, 1368, 1375, 1380, 1384, 1390, 1396, 1403, 1410, 1416, 1423, 1430, 1436, 1443, 1450, 1457, 1463, 1470, 1477, 1483, 1490, 1497, 1503, 1510, 1514, 1521, 1527, 1533, 1540, 1546, 1551, 1558, 1563, 1570, 1576, 1583, 1589, 1596, 1603, 1610, 1617, 1624, 1631, 1638, 1645, 1652, 1659, 1664, 1669, 1674, 1682, 1692, 1700, 1711, 1721, 1724, 1730, 1740, 1746, 1755, 1764, 1766, 1771, 1779, 1784, and 1788.

[7821] In some aspects, the VH1 comprises an amino acid sequence that is at least 65%, at least 70%, at least 75%, at least 80%, at least 85%, at least 90%, at least 95%, at least 99%, or 100% identical to any one of SEQ ID NOs: 1102, 1109, 1116, 1119, 1126, 1133, 1140, 1147, 1154, 1161, 1168, 1173, 1180, 1187, 1194, 1198, 1206, 1210, 1218, 1220, 1227, 1234, 1241, 1246, 1253, 1260, 1265, 1270, 1277, 1284, 1291, 1298, 1305, 1312, 1318, 1325, 1332, 1338, 1345, 1351, 1358, 1365, 1372, 1379, 1381, 1388, 1393, 1400, 1407, 1413, 1420, 1427, 1434, 1440, 1447, 1454, 1460, 1467, 1474, 1481, 1487, 1494, 1501, 1507, 1512, 1518, 1525, 1530, 1537, 1543, 1550, 1555, 1561, 1567, 1573, 1580, 1587, 1593, 1600, 1607, 1614, 1621, 1628, 1635, 1642, 1649, 1656, 1662, 1668, 1671, 1678, 1686, 1696, 1704, 1714, 1722, 1726, 1734, 1742, 1750, 1759, 1760, 1765, 1768, 1775, 1783, 1785, and 1792.

[7822] In some aspects, the infectious disease antigen that is not a sarbecovirus antigen is:
[7823] (i) a viral antigen elected from the group consisting of an influenza virus (A, B, C) antigen (e.g., influenza virus envelope proteins, for example, influenza virus neuraminidase (NA, N1, N2, N3, N4, N5, N6, N7, N8, N9, N10, N11), influenza virus hemagglutinin (H1, H2, H3, H4, H5, H6, H7, H8, H9, H10, H11, H12, H13, H14, H15, H16, H17, H18) (e.g., H1N1, H3N2, H5N1, H7N9, H9N2), Yamagata virus antigen, Victoria virus antigen, influenza virus structural proteins (e.g., M1, M2, capsid protein), influenza virus functional proteins (e.g., ribonucleoprotein (NP), primary interferon antagonist (NS1), nuclear export protein (NEP)) influenza virus accessory proteins (e.g., PB2, PB1, or PA), for example, anti-HA, anti-NA, anti-H1, anti-H3, anti-H5, anti-H7, anti-H9, anti-N1, anti-N2, anti-N9, anti-H1N1, anti-H3N2, anti-H5N1, anti-H7N9, anti-H9N2, anti-A protein, anti-B protein, anti-stem, anti-M1, anti-M2, anti-capsid, anti-NP, anti-NS1, anti-NEP, anti-PB1, anti-PB2, and anti-PA); a swine influenza virus antigen (e.g., swine flu hemagglutinin, swine flu neuraminidase); a classical swine fever (CSF) (hog colera) virus antigen; an equine influenza virus antigen (e.g., equine influenza virus typeA/Miami 63 neuraminidase, equine influenza virus type A/Kentucky 81 neuraminidase, equine influenza virus type A/Alaska 91 neuraminidase); parainfluenza viruses (e.g., bovine parainfluenza virus, bovine parainfluenza virus type 3 fusion protein, bovine parainfluenza virus type 3 hemagglutinin neuraminidase); a (human) respiratory syncytial virus (RSV)-viral antigen (e.g., RSV F glycoprotein, RSV G glycoprotein. F protein of respiratory syncytial virus, RSV fusion glycoprotein); a herpes simplex virus (HSV) antigen (e.g., herpes simplex virus glycoproteins gB, gC, gD, and gE, herpes simplex virus type 2 glycoprotein gB); a Dengue virus antigen (e.g., core protein, matrix protein, glycoprotein E of Dengue virus, or other protein of Dengue virus); a measles virus antigen (e.g., hemagglutinin); a poliovirus 1 antigen (e.g., poliovirus 1 proteins (VP1)), a HIV-1 antigen and HIV-2 antigen (e.g., HIV envelope proteins (e.g., envelope glycoproteins of HIV 1, HIV envelope glycoprotein (Env), HIV envelope glycoprotein gp160, HIV envelope surface glycoprotein gp120, HIV transmembrane envelope protein gp41), HIV structural proteins (e.g., p17, p24, p7, p55), HIV functional proteins (e.g. p66, HIV-1 protease (PR), p31), HIV accessory proteins (e.g., Nef, Tat, Rev, Vif, Vpr, Vpu)); a hepatitis virus (HAV, HBV, HCV, HDV, HEV) antigen (e.g., hepatitis B virus antigen (e.g., surface antigen, core protein), hepatitis C virus antigen (e.g., glycoprotein E1E2)); a rabies virus (Rabies lyssavirus) antigen (e.g., rabies virus glycoprotein, e.g., G glycoprotein); a pseudorabies virus antigen (e.g., pseudorabies virus g50 (gpD), pseudorabies virus II (gpB), pseudorabies virus III (gpC), pseudorabies virus glycoprotein H, pseudorabies virus glycoprotein E); a papillomavirus (HPV) antigen; an Epstein-Barr virus (EBV) (Gamma herpes virus 4) antigen; a Herpes simplex virus (HSV, HSV-1, HSV-2) antigen (e.g., human herpes virus 8, equine herpes virus antigen (e.g., type 1 glycoprotein B, type 1 glycoprotein D)); a Herpes zoster antigen; a Cytomegalovirus antigen (e.g., cytomegalovirus glycoprotein B); a Zika virus antigen; a Transmissible gastroenteritis virus (TGEV) antigen (e.g., glycoprotein 195, matrix protein); a rotavirus antigen (e.g., swine rotavirus glycoprotein 38); a parvovirus antigen (e.g., swine parvovirus capsid protein); a filoviruses (e.g., Marburg and Ebola) antigen; a bovine viral diarrhea virus antigen (e.g., glycoprotein 55); a Newcastle disease virus antigen (hemagglutinin, neuraminidase); an orthopoxvirus antigen; a coxsackievirus antigen and aphthovirus (foot and mouth disease virus) antigen; a yellow fever virus antigen; a Chikunga virus antigen; a Nipah virus antigen; an African swine fever virus antigen; a rhinotracheitis virus antigen (e.g., infectious bovine rhinotracheitis virus glycoprotein E, glycoprotein G); a laryngotracheitis virus antigen (e.g., infectious laryngotracheitis virus glycoprotein G or glycoprotein I); a La Crosse virus antigen (e.g., La Crosse virus glycoprotein); a neonatal calf diarrhoea virus antigen; a Venezuelan equine encephalomyelitis virus antigen; a punta toro virus antigen; a murine leukemia virus antigen; a mouse mammary tumor virus antigen; a bovine respiratory syncytial virus antigen (e.g., bovine respiratory syncytial virus attachment protein (BRSV G), bovine respiratory syncytial virus fusion protein (BRSV F), bovine respiratory syncytial virus nucleocapsid protein (BRSVN)); a bovine E viral diarrhoea virus antigen (e.g., glycoprotein 48 and glycoprotein 53); a metapneumovirus (HMPV) antigen; and an Ebola virus antigen (e.g., ebolavirus glycoprotein, e.g., Zaire ebolavirus glycoprotein); or
[7824] (ii) a bacterial or parasite antigen selected from the group consisting of a Plasmodium (e.g., Plasmodium falciparum. Plasmodium vivax. Plasmodium malariae, Plasmodium ovale, Plasmodium knowlesi) antigen, a Streptococcus (e.g., Streptococcus pneumoniae, Streptococcus pyogenes, Streptococcus agalactiae, Streptococcus mutans. Streptococcus viridans, Streptococcus anginosus, Streptococcus intermedius, Streptococcus constellatus) antigen (e.g., 24M epitope), a Neisseria gonorrhoeae antigen (e.g., gonococcal pilin), a Corynebacterium antigen (e.g., Corynebacterium diphtheria (diptheria toxin), Corynebacterium ulcerans, Corynebacterium pseudotuberculosis), Mycobacterium tuberculosis antigens. Brachyspira hyodysenteriae (Serpulina hydodysenteriae) antigen (e.g., Serpulina hydodysenteriae protective antigen), a Chlamydia antigen (e.g., Chlamydia trachomatis) (e.g., MOMP and PorB), a Mycoplasma sp. (e.g., Mycoplasma genitalium, Mycoplasma hyopneumoniae, Mycoplasma pneumonia) antigen, a Staphylococcus (e.g., Staphylococcus aureus, coagulase-negative staphylococci (CoNS), Staphylococcus aureus alpha toxin, Staphylococcus aureus bi-component leucocidin) antigen, a Klebsiella sp. antigen, an Escherichia coli antigen (e.g., E. coli shiga toxin type-2. E. coli shiga toxin type-1), a Bacillus sp. (e.g., Bacillus anthracis, e.g., Bacillus anthracis anthrax) antigen, a Pseudomonas aeruginosa antigen (e.g., Pseudomonas aeruginosa type III secretion system), an Enterococcus sp. antigen, an Enterobacter sp. antigen, a Proteus sp. antigen, an Actinobacter sp. antigen, a Mycobacterium avium (Mycobacterium avium complex (MAC)) antigen, a Salmonella bacteria antigen, a Clostridium difficile antigen, a Toxoplasma (e.g., Toxoplasma gondii) antigen, a Histoplasma antigen, a Candida antigen, a Coccidioides antigen, a Cryptococcus antigen, a Cryptosporidium antigen, and a Custoisospora (e.g., Cystoisospora belli) antigen, and another antigen (e.g., endotoxins, lymphotoxins (e.g., lymphotoxin alpha LTA), phosphatidylserine. Hsp90, CCR5, lipoteichoic acid, clumping factor A).

[7825] In some aspects, the VL1 comprises a light chain complementarity determining region 1 (LCDR1), LCDR2, and/or LCDR3 of an antibody selected from the group consisting of libivirumab, rmab, rivabazumab pegol, setoxaximab, suvizumab, suvratoxumab, sevirumab, pritoxaximab, porgaviximab, REGN-EB3, obiltoxaximab, gedivumab, foravirumab, larcaviximab, motavizumab, palivizumab, rafivirumab, regavirumab, tuvirumab, cosfroviximab, felvizumab, atidortoxumab, edobacomab, nebacumab, pateclizumab, raxibacumab, urtoxazumab, tosatoxumab, berlimatoxumab, CR6261, diridavumab, firivumab, lesofavumab, navivumab, exbivirumab, lenvervimab, bavituximab, bezlotoxumab, efungumab, leronlimab, nirsevimab, pagibaximab, panobacumab, tefibazumab, ansuvimab, atoltivimab, maftivimab, and odesivimab.

[7826] In some aspects, the VH1 comprises a heavy chain complementarity determining region 1 (HCDR1), HCDR2, and/or HCDR3 of an antibody selected from the group consisting of libivirumab, rmab, rivabazumab pegol, setoxaximab, suvizumab, suvratoxumab, sevirumab, pritoxaximab, porgaviximab, REGN-EB3, obiltoxaximab, gedivumab, foravirumab, larcaviximab, motavizumab, palivizumab, rafivirumab, regavirumab, tuvirumab, cosfroviximab, felvizumab, atidortoxumab, edobacomab, nebacumab, pateclizumab, raxibacumab, urtoxazumab, tosatoxumab, berlimatoxumab, CR6261, diridavumab, firivumab, lesofavumab, navivumab, exbivirumab, lenvervimab, bavituximab, bezlotoxumab, efungumab, leronlimab, nirsevimab, pagibaximab, panobacumab, tefibazumab, ansuvimab, atoltivimab, maftivimab, and odesivimab.

[7827] In some aspects, the VL1 comprises a VL of an antibody selected from the group consisting of libivirumab, rmab, rivabazumab pegol, setoxaximab, suvizumab, suvratoxumab, sevirumab, pritoxaximab, porgaviximab, REGN-EB3, obiltoxaximab, gedivumab, foravirumab, larcaviximab, motavizumab, palivizumab, rafivirumab, regavirumab, tuvirumab, cosfroviximab, felvizumab, atidortoxumab, edobacomab, nebacumab, pateclizumab, raxibacumab, urtoxazumab, tosatoxumab, berlimatoxumab, CR6261, diridavumab, firivumab, lesofavumab, navivumab, exbivirumab, lenvervimab, bavituximab, bezlotoxumab, efungumab, leronlimab, nirsevimab, pagibaximab, panobacumab, tefibazumab, ansuvimab, atoltivimab, maftivimab, and odesivimab.

[7828] In some aspects, the VH1 comprises a VH of an antibody selected from the group consisting of libivirumab, rmab, rivabazumab pegol, setoxaximab, suvizumab, suvratoxumab, sevirumab, pritoxaximab, porgaviximab, REGN-EB3, obiltoxaximab, gedivumab, foravirumab, larcaviximab, motavizumab, palivizumab, rafivirumab, regavirumab, tuvirumab, cosfroviximab, felvizumab, atidortoxumab, edobacomab, nebacumab, pateclizumab, raxibacumab, urtoxazumab, tosatoxumab, berlimatoxumab, CR6261, diridavumab, firivumab, lesofavumab, navivumab, exbivirumab, lenvervimab, bavituximab, bezlotoxumab, efungumab, leronlimab, nirsevimab, pagibaximab, panobacumab, tefibazumab, ansuvimab, atoltivimab, maftivimab, and odesivimab.

[7829] In some aspects, the VL1 comprises (i) a complementarity determining region (CDR) 1 having an amino acid sequence that is at least 65%, at least 70%, at least 75%, at least 80%, at least 85%, at least 90%, at least 95%, at least 99%, or 100% identical to any one of SEQ ID NOs: 1428, 1793, 1798, 1810, 1817, 1824, 1977, 1985, 1993 and 2001; (ii) a CDR2 having an amino acid sequence that is at least 65%, at least 70%, at least 75%, at least 80%, at least 85%, at least 90%, at least 95%, at least 99%, or 100% identical to any one of SEQ ID NOs: 1978, 1986, 1994, and 2002; or at least 65%, at least 70%, at least 75%, at least 80%, at least 85%, at least 90%, at least 95%, at least 99%, or 100% identical to any one of amino acid sequences YTS, DTS, GAS, and AAS; and (iii) a CDR3 having an amino acid sequence that is at least 65%, at least 70%, at least 75%, at least 80%, at least 85%, at least 90%, at least 95%, at least 99%, or 100% identical to any one of SEQ ID NOs: 1229, 1799, 1805, 1811, 1818, 1825, 1979, 1987, 1995, and 2003.

[7830] In some aspects, the VH1 comprises (i) a complementarity determining region (CDR) 1 having an amino acid sequence that is at least 65%, at least 70%, at least 75%, at least 80%, at least 85%, at least 90%, at least 95%, at least 99%, or 100% identical to any one of SEQ ID NOs: 1577, 1795, 1801, 1813, 1820, 1827, 1981, 1989, 1997, and 2005; (ii) a CDR2 having an amino acid sequence that is at least 65%, at least 70%, at least 75%, at least 80%, at least 85%, at least 90%, at least 95%, at least 99%, or 100% identical to any one of SEQ ID NOs: 1159, 1802, 1807, 1814, 1821, 1828, 1982, 1990, 1998, and 2006; and (iii) a CDR3 having an amino acid sequence that is at least 65%, at least 70%, at least 75%, at least 80%, at least 85%, at least 90%, at least 95%, at least 99%, or 100% identical to any one of SEQ ID NOs: 1796, 1803, 1808, 1815, 1822, 1829, 1983, 1991, 1999, and 2007.

[7831] In some aspects, the VL1 comprises an amino acid sequence that is at least 65%, at least 70%, at least 75%, at least 80%, at least 85%, at least 90%, at least 95%, at least 99%, or 100% identical to any one of SEQ ID NOs: 1794, 1800, 1806, 1812, 1819, 1826, 1980, 1988, 1996, and 2004.

[7832] In some aspects, the VH1 comprises an amino acid sequence that is at least 65%, at least 70%, at least 75%, at least 80%, at least 85%, at least 90%, at least 95%, at least 99%, or 100% identical to any one of SEQ ID NOs 1797, 1804, 1809, 1816, 1823, 1830, 1984, 1992, 2000, and 2008.

[7833] In some aspects, the other-pathology antigen is selected from the group consisting of Amyloid beta, β-amyloid, PCSK9, IFN-α/β receptor, Rhesus factor, nerve growth factor (NGF), DPP4, fibrin II beta chain, ACVR2B, scrum amyloid A protein SOST, FGF 23, VWF, tissue factor pathway inhibitor (TFPI), 1-40 and 1-42, selectin P, glucagon receptor (GCGR), amyloid P component, GDF-8, CXCL10 IP-10, repulsive guidance molecule A RGMA, IFN-γ, activated F9/F10, calcitonin gene-related peptide (CGRP), angiopoietin 3, IFN receptor, IFN-γ, calcitonin, β-amyloid 1-40 and 1-42, tau protein, dabigatran, cardiac myosin, selectin P, Complement factor D (CFD), kallikrein, GDF-8, IGHE, tissue factor pathway inhibitor (TFPI), GMCSF receptor α-chain, amyloid, IgE Fc region, MASP-2, oxLDL, GMCSF, NOGO-A. Alpha-synuclein, NGF, myelin-associated glycoprotein, RHD (gene) (RHD), sclerostin, FCGRT, sclerostin SOST, mucosal addressin cell adhesion molecule, myostatin, RSVFR, complement component 1s C1s, C5, and IL31.

[7834] In some aspects, the VL1 comprises a light chain complementarity determining region 1 (LCDR1), LCDR2, and/or LCDR3 of an antibody selected from the group consisting of aducanumab, alirocumab, frovocimab, lodelcizumab, bococizumab, evolocumab, ralpancizumab, anifrolumab, atorolimumab, bapineuzumab, bedinvetmab, begelomab, biciromab, bimagrumab, birtamimab, blosozumab, burosumab, caplacizumab, concizumab, crenezumab, crizanlizumab, crotedumab, dezamizumab, domagrozumab, donanemab, eldelumab, elezanumab, emapalumab, emicizumab, eptinezumab, erenumab, evinacumab, faralimomab, fasinumab, fontolizumab, fremanezumab, frunevetmab, fulranumab, galcanezumab, gantenerumab, gosuranemab, idarucizumab, imciromab, inclacumab, lampalizumab, lanadelumab, landogrozumab, lecanemab, ligelizumab, marstacimab, mavrilimumab, morolimumab, NEOD001, omalizumab, oMS721, orticumab, otilimab, ozanezumab, ponezumab, prasinezumab, quilizumab, ranevetmab, refanezumab, roledumab, romosozumab, rozanolixizumab, setrusumab, SHP647, solanezumab, stamulumab, suptavumab, sutimlimab, tanezumab, crovalimab, and lokivetmab.

[7835] In some aspects, the VH1 comprises a heavy chain complementarity determining region 1 (HCDR1), HCDR2, and/or HCDR3 of an antibody selected from the group consisting of aducanumab, alirocumab, frovocimab, lodelcizumab, bococizumab, evolocumab, ralpancizumab, anifrolumab, atorolimumab, bapineuzumab, bedinvetmab, begelomab, biciromab, bimagrumab, birtamimab, blosozumab, burosumab, caplacizumab, concizumab, crenezumab, crizanlizumab, crotedumab, dezamizumab, domagrozumab, donanemab, eldelumab, elezanumab, emapalumab, emicizumab, eptinezumab, erenumab, evinacumab, faralimomab, fasinumab, fontolizumab, fremanezumab, frunevetmab, fulranumab, galcanezumab, gantenerumab, gosuranemab, idarucizumab, imciromab, inclacumab, lampalizumab, lanadelumab, landogrozumab, lecanemab, ligelizumab, marstacimab, mavrilimumab, morolimumab, NEOD001, omalizumab, oMS721, orticumab, otilimab, ozanezumab, ponezumab, prasinezumab, quilizumab, ranevetmab, refanezumab, roledumab, romosozumab, rozanolixizumab, setrusumab, SHP647, solanezumab, stamulumab, suptavumab, sutimlimab, tanezumab, crovalimab, and lokivetmab.

[7836] In some aspects, the VL1 comprises a VL of an antibody selected from the group consisting of aducanumab, alirocumab, frovocimab, lodelcizumab, bococizumab, evolocumab, ralpancizumab, anifrolumab, atorolimumab, bapineuzumab, bedinvetmab, begelomab, biciromab, bimagrumab, birtamimab, blosozumab, burosumab, caplacizumab, concizumab, crenezumab, crizanlizumab, crotedumab, dezamizumab, domagrozumab, donanemab, eldelumab, elezanumab, emapalumab, emicizumab, eptinezumab, erenumab, evinacumab, faralimomab, fasinumab, fontolizumab, fremanezumab, frunevetmab, fulranumab, galcanezumab, gantenerumab, gosuranemab, idarucizumab, imciromab, inclacumab, lampalizumab, lanadelumab, landogrozumab, lecanemab, ligelizumab, marstacimab, mavrilimumab, morolimumab, NEOD001, omalizumab, oMS721, orticumab, otilimab, ozanezumab, ponezumab, prasinezumab, quilizumab, ranevetmab, refanezumab, roledumab, romosozumab, rozanolixizumab, setrusumab, SHP647, solanezumab, stamulumab, suptavumab, sutimlimab, tanezumab, crovalimab, and lokivetmab.

[7837] In some aspects, the VH1 comprises a VH of an antibody selected from the group consisting of aducanumab, alirocumab, frovocimab, lodelcizumab, bococizumab, evolocumab, ralpancizumab, anifrolumab, atorolimumab, bapineuzumab, bedinvetmab, begelomab, biciromab, bimagrumab, birtamimab, blosozumab, burosumab, caplacizumab, concizumab, crenezumab, crizanlizumab, crotedumab, dezamizumab, domagrozumab, donanemab, eldelumab, elezanumab, emapalumab, emicizumab, eptinezumab, erenumab, evinacumab, faralimomab, fasinumab, fontolizumab, fremanezumab, frunevetmab, fulranumab, galcanezumab, gantenerumab, gosuranemab, idarucizumab, imciromab, inclacumab, lampalizumab, lanadelumab, landogrozumab, lecanemab, ligelizumab, marstacimab, mavrilimumab, morolimumab, NEOD001, omalizumab, oMS721, orticumab, otilimab, ozanezumab, ponezumab, prasinezumab, quilizumab, ranevetmab, refanezumab, roledumab, romosozumab, rozanolixizumab, setrusumab, SHP647, solanezumab, stamulumab, suptavumab, sutimlimab, tanezumab, crovalimab, and lokivetmab.

[7838] In some aspects, the VL1 comprises (i) a complementarity determining region (CDR) 1 having an amino acid sequence that is at least 65%, at least 70%, at least 75%, at least 80%, at least 85%, at least 90%, at least 95%, at least 99%, or 100% identical to any one of SEQ ID NOs: 1120, 1228, 1359, 1519, 1831, 1838, 1845, 1852, 1859, 1866, 1872, 1878, 1885, 1891, 1898, 1905, 1911, 1917, 1924, 1931, 1938, 1945, and 1963; (ii) a CDR2 having an amino acid sequence that is at least 65%, at least 70%, at least 75%, at least 80%, at least 85%, at least 90%, at least 95%, at least 99%, or 100% identical to any one of amino acid sequences AAS, AVS, DAS, DNN, EDN, EVS, GAS, GNG, KAS, KVS, LVS, NTD, STS, WAS, and YTS; and (iii) a CDR3 having an amino acid sequence that is at least 65%, at least 70%, at least 75%, at least 80%, at least 85%, at least 90%, at least 95%, at least 99%, or 100% identical to any one of SEQ ID NOs: 1360, 1832, 1839, 1846, 1853, 1860, 1867, 1873, 1879, 1886, 1892, 1899, 1906, 1912, 1918, 1925, 1932, 1939, 1946, 1951, 1957, 1964, and 1970.

[7839] In some aspects, the VH1 comprises (i) a complementarity determining region (CDR) 1 having an amino acid sequence that is at least 65%, at least 70%, at least 75%, at least 80%, at least 85%, at least 90%, at least 95%, at least 99%, or 100% identical to any one of SEQ ID NOs: 1309, 1362, 1437, 1552, 1618, 1639, 1834, 1841, 1848, 1855, 1862, 1881, 1894, 1901, 1920, 1927, 1934, 1941, 1953, 1959, and 1966; (ii) a CDR2 having an amino acid sequence that is at least 65%, at least 70%, at least 75%, at least 80%, at least 85%, at least 90%, at least 95%, at least 99%, or 100% identical to any one of SEQ ID NOs: 1363, 1835, 1842, 1849, 1856, 1863, 1869, 1875, 1882, 1888, 1895, 1902, 1908, 1914, 1921, 1928, 1935, 1942, 1948, 1954, 1960, 1967, and 1972; and (iii) a CDR3 having an amino acid sequence that is at least 65%, at least 70%, at least 75%, at least 80%, at least 85%, at least 90%, at least 95%, at least 99%, or 100% identical to any one of SEQ ID NOs: 1364, 1836, 1843, 1850, 1857, 1864, 1870, 1876, 1883, 1889, 1896, 1903, 1909, 1915, 1922, 1929, 1936, 1943, 1949, 1955, 1961, 1968, and 1973.

[7840] In some aspects, the VL1 comprises an amino acid sequence that is at least 65%, at least 70%, at least 75%, at least 80%, at least 85%, at least 90%, at least 95%, at least 99%, or 100% identical to any one of SEQ ID NOs: 1361, 1833, 1840, 1847, 1854, 1861, 1868, 1874, 1880, 1887, 1893, 1900, 1907, 1913, 1919, 1926, 1933, 1940, 1947, 1952, 1958, 1965, and 1971.

[7841] In some aspects, the VH1 comprises an amino acid sequence that is at least 65%, at least 70%, at least 75%, at least 80%, at least 85%, at least 90%, at least 95%, at least 99%, or 100% identical to any one of SEQ ID NOs: 1365, 1837, 1844, 1851, 1858, 1865, 1871, 1877, 1884, 1890, 1897, 1904, 1910, 1916, 1923, 1930, 1937, 1944, 1950, 1956, 1962, 1969, and 1974.

[7842] In some aspects, the antigen binding polypeptides comprised in the antibodies or antigen binding fragments thereof (e.g., monospecific or multispecific antibodies or antigen binding fragments thereof) provided herein further comprise an Fc region. In some aspects, the antigen binding polypeptides comprised in the antibodies or antigen binding fragments thereof (e.g., monospecific or multispecific antibodies or antigen binding fragments thereof) provided herein further comprise an Fc region at the carboxy-terminus. In some aspects, the Fc region comprises an immunoglobulin heavy chain constant region 2 (CH2) and/or an immunoglobulin heavy chain constant region 3 (CH3). In some aspects, the Fc region further comprises an immunoglobulin hinge (i.e., a hinge region). In some aspects, the hinge region is interposed between a CH1 and a CH2 (i.e., a hinge region is localized between the carboxy terminal residue of a CH1 and the N-terminal residue of a CH2). In some aspects, the hinge region comprises an amino acid sequence at least 65%, at least 70%, at least 75%, at least 80%, at least 85%, at least 90%, at least 95%, at least 99%, or 100% identical to any one of SEQ ID NOs: 635, 636, 1072, 1073, or 1074. In some aspects, the Fc region comprises a CH2 and a CH3. In some aspects, the CH2 comprises an amino acid sequence that is at least 65%, at least 70%, at least 75%, at least 80%, at least 85%, at least 90%, at least 95%, at least 99%, or 100% identical to any one of SEQ ID NOs: 1075-1078. In some aspects, the CH3 comprises an amino acid sequence that is at least 65%, at least 70%, at least 75%, at least 80%, at least 85%, at least 90%, at least 95%, at least 99%, or 100% identical to any one of SEQ ID NOs: 1079-1085. In some aspects, the Fc region comprises an amino acid sequence that is at least 80%, at least 65%, at least 70%, at least 75%, at least 80%, at least 85%, at least 90%, at least 95%, at least 99%, or 100% identical to any one of SEQ ID NOs: 376-380.

[7843] In some aspects, the Fc region comprises one or more amino acid substitutions. In some aspects, the one or more amino acid substitutions comprise one or more half-life extension amino acid substitutions. In some aspects, the one or more half-life extension amino acid substitutions comprise one or more of amino acid substitutions M428L, N434A, N434S, L234F, L235E, P331S, M252Y, S254T, or T256E, or equivalent thereof, based on the EU numbering scheme. In some aspects, the one or more half-life extension amino acid substitutions comprise a LA (M428L and N434A, or equivalent thereof, based on the EU numbering scheme) amino acid substitution. In some aspects, the one or more half-life extension amino acid substitutions comprise a LS (M428L and N434S, or equivalent thereof, based on the EU numbering scheme) amino acid substitution. In some aspects, the one or more half-life extension amino acid substitutions comprise L234F and L235E, or equivalent thereof (based on the EU numbering scheme) amino acid substitutions. In some aspects, the one or more half-life extension amino acid substitutions comprise a TM (L234F, L235E, and P331S, or equivalent thereof, based on the EU numbering scheme) amino acid substitution. In some aspects, the one or more half-life extension amino acid substitutions comprise a YTE (M252Y, S254T, and T256E, or equivalent thereof, based on the EU numbering scheme) amino acid substitution.

[7844] In some aspects, the Fc region comprises at least one knob-into-hole modification. In some aspects, the antigen binding polypeptides are IgG1 or IgG4 antibodies or antigen binding fragments thereof. In some aspects, the knob-into-hole modification comprises one or more of knob substitutions of S354C and T366W, or equivalent thereof, and/or one or more of hole substitutions of Y349C, T366S, L368A, Y407V, or equivalent thereof; or a combination thereof, based on the EU numbering scheme. In some aspects, the Fc region comprises a knob-into-hole modification comprising knob substitutions of S354C and T366W, or equivalent thereof, and/or hole substitutions of Y349C, T366S, L368A and Y407V, or equivalent thereof, and/or a half-life extension amino acid substitution comprising: a LA (M428L and N434A, or equivalent thereof, based on the EU numbering scheme) amino acid substitution, a LS (M428L and N434S, or equivalent thereof, based on the EU numbering scheme) amino acid substitution. L234F and L235E, or equivalent thereof (based on the EU numbering scheme) amino acid substitutions, a TM (L234F, L235E, and P331S, or equivalent thereof, based on the EU numbering scheme) amino acid substitution, a YTE (M252Y, S254T, or equivalent thereof, and T256E, based on the EU numbering scheme) amino acid substitution, or any combination thereof.

[7845] In some aspects, the Fc region comprises knob substitutions of S354C and T366W, or equivalent thereof, and a half-life extension amino acid substitution comprising: a LA (M428L and N434A, or equivalent thereof, based on the EU numbering scheme) amino acid substitution, a LS (M428L and N434S, or equivalent thereof, based on the EU numbering scheme) amino acid substitution. L234F and L235E, or equivalent thereof (based on the EU numbering scheme) amino acid substitutions, a TM (L234F, L235E, and P331S, or equivalent thereof, based on the EU numbering scheme) amino acid substitution, a YTE (M252Y, S254T, and T256E, or equivalent thereof, based on the EU numbering scheme) amino acid substitution, or any combination thereof.

[7846] In some aspects, the Fc region comprises hole substitutions of Y349C, T366S, L368A and Y407V, or equivalent thereof, and a half-life extension amino acid substitution comprising: a LA (M428L and N434A, or equivalent thereof, based on the EU numbering scheme) amino acid substitution, a LS (M428L and N434S, or equivalent thereof, based on the EU numbering scheme) amino acid substitution. L234F and L235E, or equivalent thereof (based on the EU numbering scheme) amino acid substitutions, a TM (L234F, L235E, and P331S, or equivalent thereof, based on the EU numbering scheme) amino acid substitution, a YTE (M252Y, S254T, and T256E, or equivalent thereof, based on the EU numbering scheme) amino acid substitution, or any combination thereof.

[7847] In some aspects, the antigen binding polypeptides comprised in the antibodies or antigen binding fragments thereof (e.g., monospecific or multispecific antibodies or antigen binding fragments thereof) disclosed herein comprise one or more Fc effector function knockout mutation. In some aspects, the antigen binding polypeptides comprised in the antibodies or antigen binding fragments thereof (e.g., monospecific or multispecific antibodies or antigen binding fragments thereof) disclosed herein are IgG1 or IgG4 antibodies or antigen binding fragments thereof. In some aspects, the Fc effector function knockout mutation is L234A, L235A, P239A, or equivalent thereof, or a combination thereof, based on the EU numbering scheme.

[7848] In some aspects, the antigen binding polypeptides comprised in the antibodies or antigen binding fragments thereof (e.g., monospecific or multispecific antibodies or antigen binding fragments thereof) disclosed herein comprise a mutation at a glycosylation site. In some aspects, the mutation at a glycosylation site is a mutation at an N-glycosylation site. In some aspects, the antigen binding polypeptides comprised in the antibodies or antigen binding fragments thereof (e.g., monospecific or multispecific antibodies or antigen binding fragments thereof) disclosed herein comprise a VH comprising a mutation at a glycosylation site. In some aspects, the mutation at a glycosylation site is a mutation at an N-glycosylation site. In some aspects, the mutation at an N-glycosylation site is at amino acid N62 of the VH region or equivalent thereof. In some aspects, the mutation at an N-glycosylation site at amino acid N62 is N62Q or N62S, or equivalent thereof.

[7849] In some aspects, the antigen binding polypeptides comprised in the antibodies or antigen binding fragments thereof (e.g., monospecific or multispecific antibodies or antigen binding fragments thereof) disclosed herein, comprise one or more optional linkers. The one or more optional linkers are indicated herein as Ln, wherein n is an integer, and the integer next to each L indicates each L comprised in the antigen binding polypeptides comprised in the antigen binding polypeptide complexes disclosed herein. For example, if an antigen binding polypeptide comprised in the antigen binding polypeptide complexes disclosed herein comprises two linkers, the first linker from N-terminus to C-terminus is herein indicated as L1, and the second linker from N-terminus to C-terminus is herein indicated as L2. If an antigen binding polypeptide complex disclosed herein comprises a first antigen binding polypeptide comprising two linkers, indicated herein as L1 and L2, as explained above, the linkers comprised in the second antigen binding polypeptide are indicated with the following integer, in this example, the first linker from N-terminus to C-terminus of the second antigen binding polypeptide is herein indicated as L3, the second linker from N-terminus to C-terminus of the second antigen binding polypeptide is herein indicated as L3. In some aspects, any one of the optional linkers each independently have a length of from 0 amino acids to about 50 amino acids. In some aspects, any one of the optional linkers each independently have a length of from 5 amino acids to about 40 amino acids.

[7850] In some aspects, any one of the optional linkers are non-immunogenic. In some aspects, any one of the optional linkers do not contain a consensus T cell epitope.

[7851] In some aspects, any of Ln comprises an amino acid sequence of G or A, or an amino acid sequence at least 65%, at least 70%, at least 75%, at least 80%, at least 85%, at least 90%, at least 95%, at least 99%, or 100% identical to amino acid sequence GSS or ASG, or an amino acid sequence at least 65%, at least 70%, at least 75%, at least 80%, at least 85%, at least 90%, at least 95%, at least 99%, or 100% identical to any one of SEQ ID NOs: 333-373 or 967-971. In some aspects. Ln comprises an amino acid sequence at least 65%, at least 70%, at least 75%, at least 80%, at least 85%, at least 90%, at least 95%, at least 99%, or 100% identical to any one of SEQ ID NOs: 333-345 or 967-971.

[7852] In some aspects, the antigen binding polypeptide is selected from any one of the more specific aspects provided herein for an antigen binding polypeptide in an antigen binding polypeptide complex having no more than three polypeptide chains.

[7853] In some aspects, the antigen binding polypeptide further comprises one or more immunoglobulin heavy chain constant region 1 (CH1) and/or one or more immunoglobulin light chain constant region (CL) between any one of the variable regions and/or optional amino acid linkers (e.g., between VL1 and L1, between L1 and VH1, between VH1 and L2, between L2 and VL1, between L1 and VL2, between VL2 and L2, between L2 and VH2, between VH2 and L3, between L3 and VH1, between VL1 and L1, between L1 and VH2, between VH2 and L2, between. L2 and VL2, between VL2 and L3, between L3 and VH1, between VH1 and L4, between L4 and VH2, between VH2 and L5, between L5 and VL2, between VL2 and L6, between L6 and VL1, between VH1 and L4, between L4 and VL2, between L4 and VL2, between VL2 and L5, between L5 and VH2, between VH2 and L6, or between L6 and VL1).

[7854] In some aspects, the antigen binding polypeptide is selected from any one of the more specific aspects provided herein for an antigen binding polypeptide in an antigen binding polypeptide complex having no more than three polypeptide chains, and further comprises one or more immunoglobulin heavy chain constant region 1 (CH1) and/or one or more immunoglobulin light chain constant region (CL) between any one of the variable regions and/or optional amino acid linkers (e.g., between VL1 and L1, between L1 and VH1, between VH1 and L2, between L2 and VL1, between L1 and VL2, between VL2 and L2, between L2 and VH2, between VH2 and L3, between L3 and VH1, between VL1 and L1, between L1 and VH2, between VH2 and L2, between. L2 and VL2, between VL2 and L3, between L3 and VH1, between VH1 and L4, between L4 and VH2, between VH2 and L5, between L5 and VL2, between VL2 and L6, between L6 and VL1, between VH1 and L4, between L4 and VL2, between L4 and VL2, between VL2 and L5, between L5 and VH2, between VH2 and L6, or between L6 and VL1).

[7855] In some aspects, the antigen binding polypeptides comprised in the antibodies or antigen binding fragments thereof (e.g., monospecific or multispecific antibodies or antigen binding fragments thereof) disclosed herein, comprise one or more CL, as indicated in the formulas representing the antigen binding polypeptide complexes disclosed herein. In some aspects, the CL comprises an amino acid sequence at least 65%, at least 70%, at least 75%, at least 80%, at least 85%, at least 90%, at least 95%, at least 99%, or 100% identical to any one of SEQ ID NOs: 374, 637, or 1092-1095.

[7856] In some aspects, the antigen binding polypeptides comprised in the antibodies or antigen binding fragments thereof (e.g., monospecific or multispecific antibodies or antigen binding fragments thereof) disclosed herein, comprise one or more CH1, as indicated in the formulas representing the antigen binding polypeptide complexes disclosed herein. In some aspects, the CH1 comprises an amino acid sequence at least 65%, at least 70%, at least 75%, at least 80%, at least 85%, at least 90%, at least 95%, at least 99%, or 100% identical to any one of SEQ ID NOs: 375, 634, 1070, 1071, or 1086-1091.

[7857] In some aspects, the antigen binding polypeptides comprised in the antibodies or antigen binding fragments thereof (e.g., monospecific or multispecific antibodies or antigen binding fragments thereof) provided herein further comprise an Fc region. In some aspects, the antigen binding polypeptides comprised in the antibodies or antigen binding fragments thereof (e.g., monospecific or multispecific antibodies or antigen binding fragments thereof) provided herein further comprise an Fc region at the carboxy-terminus. In some aspects, the Fc region comprises an immunoglobulin heavy chain constant region 2 (CH2) and/or an immunoglobulin heavy chain constant region 3 (CH3). In some aspects, the Fc region further comprises an immunoglobulin hinge (i.e., a hinge region). In some aspects, the hinge region is interposed between a CH1 and a CH2 (i.e., a hinge region is localized between the carboxy terminal residue of a CH1 and the N-terminal residue of a CH2). In some aspects, the hinge region comprises an amino acid sequence at least 65%, at least 70%, at least 75%, at least 80%, at least 85%, at least 90%, at least 95%, at least 99%, or 100% identical to any one of SEQ ID NOs: 635, 636, 1072, 1073, or 1074. In some aspects, the Fc region comprises a CH2 and a CH3. In some aspects, the CH2 comprises an amino acid sequence that is at least 65%, at least 70%, at least 75%, at least 80%, at least 85%, at least 90%, at least 95%, at least 99%, or 100% identical to any one of SEQ ID NOs: 1075-1078. In some aspects, the CH3 comprises an amino acid sequence that is at least 65%, at least 70%, at least 75%, at least 80%, at least 85%, at least 90%, at least 95%, at least 99%, or 100% identical to any one of SEQ ID NOs: 1079-1085. In some aspects, the Fc region comprises an amino acid sequence that is at least 65%, at least 70%, at least 75%, at least 80%, at least 85%, at least 90%, at least 95%, at least 99%, or 100% identical to any one of SEQ ID NOs: 376-380.

[7858] In some aspects, any of the antigen binding polypeptides, antigen binding polypeptide complexes, or antibodies or antigen binding fragments thereof disclosed herein comprises:
[7859] a LCDR1 at least 65%, at least 70%, at least 75%, at least 80%, at least 85%, at least 90%, at least 95%, at least 99%, or 100% identical to SEQ ID NO: 1096, a LCDR2 at least 65%, at least 70%, at least 75%, at least 80%, at least 85%, at least 90%, at least 95%, at least 99%, or 100% identical to amino acid sequence GKN, a LCDR3 at least 65%, at least 70%, at least 75%, at least 80%, at least 85%, at least 90%, at least 95%, at least 99%, or 100% identical to SEQ ID NO: 1097, a HCDR1 at least 65%, at least 70%, at least 75%, at least 80%, at least 85%, at least 90%, at least 95%, at least 99%, or 100% identical to SEQ ID NO: 1099, a HCDR2 at least 65%, at least 70%, at least 75%, at least 80%, at least 85%, at least 90%, at least 95%, at least 99%, or 100% identical to SEQ ID NO: 1100, and a HCDR3 at least 65%, at least 70%, at least 75%, at least 80%, at least 85%, at least 90%, at least 95%, at least 99%, or 100% identical to SEQ ID NO: 1101;
[7860] a LCDR1 at least 65%, at least 70%, at least 75%, at least 80%, at least 85%, at least 90%, at least 95%, at least 99%, or 100% identical to SEQ ID NO: 1103, a LCDR2 at least 65%, at least 70%, at least 75%, at least 80%, at least 85%, at least 90%, at least 95%, at least 99%, or 100% identical to amino acid sequence GAT, a LCDR3 at least 65%, at least 70%, at least 75%, at least 80%, at least 85%, at least 90%, at least 95%, at least 99%, or 100% identical to SEQ ID NO: 1104, a HCDR1 at least 65%, at least 70%, at least 75%, at least 80%, at least 85%, at least 90%, at least 95%, at least 99%, or 100% identical to SEQ ID NO: 1106, a HCDR2 at least 65%, at least 70%, at least 75%, at least 80%, at least 85%, at least 90%, at least 95%, at least 99%, or 100% identical to SEQ ID NO: 1107, and a HCDR3 at least 65%, at least 70%, at least 75%, at least 80%, at least 85%, at least 90%, at least 95%, at least 99%, or 100% identical to SEQ ID NO: 1108;
[7861] a LCDR1 at least 65%, at least 70%, at least 75%, at least 80%, at least 85%, at least 90%, at least 95%, at least 99%, or 100% identical to SEQ ID NO: 1110, a LCDR2 at least 65%, at least 70%, at least 75%, at least 80%, at least 85%, at least 90%, at least 95%, at least 99%, or 100% identical to amino acid sequence AAS, a LCDR3 at least 65%, at least 70%, at least 75%, at least 80%, at least 85%, at least 90%, at least 95%, at least 99%, or 100% identical to SEQ ID NO: 1111, a HCDR1 at least 65%, at least 70%, at least 75%, at least 80%, at least 85%, at least 90%, at least 95%, at least 99%, or 100% identical to SEQ ID NO: 1113, a HCDR2 at least 65%, at least 70%, at least 75%, at least 80%, at least 85%, at least 90%, at least 95%, at least 99%, or 100% identical to SEQ ID NO: 1114, and a HCDR3 at least 65%, at least 70%, at least 75%, at least 80%, at least 85%, at least 90%, at least 95%, at least 99%, or 100% identical to SEQ ID NO: 1115;
[7862] a LCDR1 at least 65%, at least 70%, at least 75%, at least 80%, at least 85%, at least 90%, at least 95%, at least 99%, or 100% identical to SEQ ID NO: 1103, a LCDR2 at least 65%, at least 70%, at least 75%, at least 80%, at least 85%, at least 90%, at least 95%, at least 99%, or 100% identical to amino acid sequence GAT, a LCDR3 at least 65%, at least 70%, at least 75%, at least 80%, at least 85%, at least 90%, at least 95%, at least 99%, or 100% identical to SEQ ID NO: 1104, a HCDR1 at least 65%, at least 70%, at least 75%, at least 80%, at least 85%, at least 90%, at least 95%, at least 99%, or 100% identical to SEQ ID NO: 1117, a HCDR2 at least 65%, at least 70%, at least 75%, at least 80%, at least 85%, at least 90%, at least 95%, at least 99%, or 100% identical to SEQ ID NO: 1118, and a HCDR3 at least 65%, at least 70%, at least 75%, at least 80%, at least 85%, at least 90%, at least 95%, at least 99%, or 100% identical to SEQ ID NO: 1108;
[7863] a LCDR1 at least 65%, at least 70%, at least 75%, at least 80%, at least 85%, at least 90%, at least 95%, at least 99%, or 100% identical to SEQ ID NO: 1120, a LCDR2 at least 65%, at least 70%, at least 75%, at least 80%, at least 85%, at least 90%, at least 95%, at least 99%, or 100% identical to amino acid sequence AAS, a LCDR3 at least 65%, at least 70%, at least 75%, at least 80%, at least 85%, at least 90%, at least 95%, at least 99%, or 100% identical to SEQ ID NO: 1121, a HCDR1 at least 65%, at least 70%, at least 75%, at least 80%, at least 85%, at least 90%, at least 95%, at least 99%, or 100% identical to SEQ ID NO: 1123, a HCDR2 at least 65%, at least 70%, at least 75%, at least 80%, at least 85%, at least 90%, at least 95%, at least 99%, or 100% identical to SEQ ID NO: 1124, and a HCDR3 at least 65%, at least 70%, at least 75%, at least 80%, at least 85%, at least 90%, at least 95%, at least 99%, or 100% identical to SEQ ID NO: 1125;
[7864] a LCDR1 at least 65%, at least 70%, at least 75%, at least 80%, at least 85%, at least 90%, at least 95%, at least 99%, or 100% identical to SEQ ID NO: 1127, a LCDR2 at least 65%, at least 70%, at least 75%, at least 80%, at least 85%, at least 90%, at least 95%, at least 99%, or 100% identical to amino acid sequence KVS, a LCDR3 at least 65%, at least 70%, at least 75%, at least 80%, at least 85%, at least 90%, at least 95%, at least 99%, or 100% identical to SEQ ID NO: 1128, a HCDR1 at least 65%, at least 70%, at least 75%, at least 80%, at least 85%, at least 90%, at least 95%, at least 99%, or 100% identical to SEQ ID NO: 1130, a HCDR2 at least 65%, at least 70%, at least 75%, at least 80%, at least 85%, at least 90%, at least 95%, at least 99%, or 100% identical to SEQ ID NO: 1131, and a HCDR3 at least 65%, at least 70%, at least 75%, at least 80%, at least 85%, at least 90%, at least 95%, at least 99%, or 100% identical to SEQ ID NO: 1132;
[7865] a LCDR1 at least 65%, at least 70%, at least 75%, at least 80%, at least 85%, at least 90%, at least 95%, at least 99%, or 100% identical to SEQ ID NO: 1134, a LCDR2 at least 65%, at least 70%, at least 75%, at least 80%, at least 85%, at least 90%, at least 95%, at least 99%, or 100% identical to amino acid sequence LAS, a LCDR3 at least 65%, at least 70%, at least 75%, at least 80%, at least 85%, at least 90%, at least 95%, at least 99%, or 100% identical to SEQ ID NO: 1135, a HCDR1 at least 65%, at least 70%, at least 75%, at least 80%, at least 85%, at least 90%, at least 95%, at least 99%, or 100% identical to SEQ ID NO: 1137, a HCDR2 at least 65%, at least 70%, at least 75%, at least 80%, at least 85%, at least 90%, at least 95%, at least 99%, or 100% identical to SEQ ID NO: 1138, and a HCDR3 at least 65%, at least 70%, at least 75%, at least 80%, at least 85%, at least 90%, at least 95%, at least 99%, or 100% identical to SEQ ID NO: 1139;
[7866] a LCDR1 at least 65%, at least 70%, at least 75%, at least 80%, at least 85%, at least 90%, at least 95%, at least 99%, or 100% identical to SEQ ID NO: 1141, a LCDR2 at least 65%, at least 70%, at least 75%, at least 80%, at least 85%, at least 90%, at least 95%, at least 99%, or 100% identical to amino acid sequence HTS, a LCDR3 at least 65%, at least 70%, at least 75%, at least 80%, at least 85%, at least 90%, at least 95%, at least 99%, or 100% identical to SEQ ID NO: 1142, a HCDR1 at least 65%, at least 70%, at least 75%, at least 80%, at least 85%, at least 90%, at least 95%, at least 99%, or 100% identical to SEQ ID NO: 1144, a HCDR2 at least 65%, at least 70%, at least 75%, at least 80%, at least 85%, at least 90%, at least 95%, at least 99%, or 100% identical to SEQ ID NO: 1145, and a HCDR3 at least 65%, at least 70%, at least 75%, at least 80%, at least 85%, at least 90%, at least 95%, at least 99%, or 100% identical to SEQ ID NO: 1146;
[7867] a LCDR1 at least 65%, at least 70%, at least 75%, at least 80%, at least 85%, at least 90%, at least 95%, at least 99%, or 100% identical to SEQ ID NO: 1148, a LCDR2 at least 65%, at least 70%, at least 75%, at least 80%, at least 85%, at least 90%, at least 95%, at least 99%, or 100% identical to amino acid sequence YAS, a LCDR3 at least 65%, at least 70%, at least 75%, at least 80%, at least 85%, at least 90%, at least 95%, at least 99%, or 100% identical to SEQ ID NO: 1149, a HCDR1 at least 65%, at least 70%, at least 75%, at least 80%, at least 85%, at least 90%, at least 95%, at least 99%, or 100% identical to SEQ ID NO: 1151, a HCDR2 at least 65%, at least 70%, at least 75%, at least 80%, at least 85%, at least 90%, at least 95%, at least 99%, or 100% identical to SEQ ID NO: 1152, and a HCDR3 at least 65%, at least 70%, at least 75%, at least 80%, at least 85%, at least 90%, at least 95%, at least 99%, or 100% identical to SEQ ID NO: 1153;
[7868] a LCDR1 at least 65%, at least 70%, at least 75%, at least 80%, at least 85%, at least 90%, at least 95%, at least 99%, or 100% identical to SEQ ID NO: 1155, a LCDR2 at least 65%, at least 70%, at least 75%, at least 80%, at least 85%, at least 90%, at least 95%, at least 99%, or 100% identical to amino acid sequence EAS, a LCDR3 at least 65%, at least 70%, at least 75%, at least 80%, at least 85%, at least 90%, at least 95%, at least 99%, or 100% identical to SEQ ID NO: 1156, a HCDR1 at least 65%, at least 70%, at least 75%, at least 80%, at least 85%, at least 90%, at least 95%, at least 99%, or 100% identical to SEQ ID NO: 1158, a HCDR2 at least 65%, at least 70%, at least 75%, at least 80%, at least 85%, at least 90%, at least 95%, at least 99%, or 100% identical to SEQ ID NO: 1159, and a HCDR3 at least 65%, at least 70%, at least 75%, at least 80%, at least 85%, at least 90%, at least 95%, at least 99%, or 100% identical to SEQ ID NO: 1160;
[7869] a LCDR1 at least 65%, at least 70%, at least 75%, at least 80%, at least 85%, at least 90%, at least 95%, at least 99%, or 100% identical to SEQ ID NO: 1162, a LCDR2 at least 65%, at least 70%, at least 75%, at least 80%, at least 85%, at least 90%, at least 95%, at least 99%, or 100% identical to amino acid sequence DTS, a LCDR3 at least 65%, at least 70%, at least 75%, at least 80%, at least 85%, at least 90%, at least 95%, at least 99%, or 100% identical to SEQ ID NO: 1163, a HCDR1 at least 65%, at least 70%, at least 75%, at least 80%, at least 85%, at least 90%, at least 95%, at least 99%, or 100% identical to SEQ ID NO: 1165, a HCDR2 at least 65%, at least 70%, at least 75%, at least 80%, at least 85%, at least 90%, at least 95%, at least 99%, or 100% identical to SEQ ID NO: 1166, and a HCDR3 at least 65%, at least 70%, at least 75%, at least 80%, at least 85%, at least 90%, at least 95%, at least 99%, or 100% identical to SEQ ID NO: 1167;
[7870] a LCDR1 at least 65%, at least 70%, at least 75%, at least 80%, at least 85%, at least 90%, at least 95%, at least 99%, or 100% identical to SEQ ID NO: 1169, a LCDR2 at least 65%, at least 70%, at least 75%, at least 80%, at least 85%, at least 90%, at least 95%, at least 99%, or 100% identical to amino acid sequence RMS, a LCDR3 at least 65%, at least 70%, at least 75%, at least 80%, at least 85%, at least 90%, at least 95%, at least 99%, or 100% identical to SEQ ID NO: 1170, a HCDR1 at least 65%, at least 70%, at least 75%, at least 80%, at least 85%, at least 90%, at least 95%, at least 99%, or 100% identical to SEQ ID NO: 1144, a HCDR2 at least 65%, at least 70%, at least 75%, at least 80%, at least 85%, at least 90%, at least 95%, at least 99%, or 100% identical to SEQ ID NO: 1145, and a HCDR3 at least 65%, at least 70%, at least 75%, at least 80%, at least 85%, at least 90%, at least 95%, at least 99%, or 100% identical to SEQ ID NO: 1172;
[7871] a LCDR1 at least 65%, at least 70%, at least 75%, at least 80%, at least 85%, at least 90%, at least 95%, at least 99%, or 100% identical to SEQ ID NO: 1174, a LCDR2 at least 65%, at least 70%, at least 75%, at least 80%, at least 85%, at least 90%, at least 95%, at least 99%, or 100% identical to amino acid sequence QMS, a LCDR3 at least 65%, at least 70%, at least 75%, at least 80%, at least 85%, at least 90%, at least 95%, at least 99%, or 100% identical to SEQ ID NO: 1175, a HCDR1 at least 65%, at least 70%, at least 75%, at least 80%, at least 85%, at least 90%, at least 95%, at least 99%, or 100% identical to SEQ ID NO: 1177, a HCDR2 at least 65%, at least 70%, at least 75%, at least 80%, at least 85%, at least 90%, at least 95%, at least 99%, or 100% identical to SEQ ID NO: 1178, and a HCDR3 at least 65%, at least 70%, at least 75%, at least 80%, at least 85%, at least 90%, at least 95%, at least 99%, or 100% identical to SEQ ID NO: 1179;
[7872] a LCDR1 at least 65%, at least 70%, at least 75%, at least 80%, at least 85%, at least 90%, at least 95%, at least 99%, or 100% identical to SEQ ID NO: 1181, a LCDR2 at least 65%, at least 70%, at least 75%, at least 80%, at least 85%, at least 90%, at least 95%, at least 99%, or 100% identical to amino acid sequence APS, a LCDR3 at least 65%, at least 70%, at least 75%, at least 80%, at least 85%, at least 90%, at least 95%, at least 99%, or 100% identical to SEQ ID NO: 1182, a HCDR1 at least 65%, at least 70%, at least 75%, at least 80%, at least 85%, at least 90%, at least 95%, at least 99%, or 100% identical to SEQ ID NO: 1184, a HCDR2 at least 65%, at least 70%, at least 75%, at least 80%, at least 85%, at least 90%, at least 95%, at least 99%, or 100% identical to SEQ ID NO: 1185, and a HCDR3 at least 65%, at least 70%, at least 75%, at least 80%, at least 85%, at least 90%, at least 95%, at least 99%, or 100% identical to SEQ ID NO: 1186;
[7873] a LCDR1 at least 65%, at least 70%, at least 75%, at least 80%, at least 85%, at least 90%, at least 95%, at least 99%, or 100% identical to SEQ ID NO: 1188, a LCDR2 at least 65%, at least 70%, at least 75%, at least 80%, at least 85%, at least 90%, at least 95%, at least 99%, or 100% identical to amino acid sequence DAS, a LCDR3 at least 65%, at least 70%, at least 75%, at least 80%, at least 85%, at least 90%, at least 95%, at least 99%, or 100% identical to SEQ ID NO: 1189, a HCDR1 at least 65%, at least 70%, at least 75%, at least 80%, at least 85%, at least 90%, at least 95%, at least 99%, or 100% identical to SEQ ID NO: 1191, a HCDR2 at least 65%, at least 70%, at least 75%, at least 80%, at least 85%, at least 90%, at least 95%, at least 99%, or 100% identical to SEQ ID NO: 1192, and a HCDR3 at least 65%, at least 70%, at least 75%, at least 80%, at least 85%, at least 90%, at least 95%, at least 99%, or 100% identical to SEQ ID NO: 1193;
[7874] a LCDR1 at least 65%, at least 70%, at least 75%, at least 80%, at least 85%, at least 90%, at least 95%, at least 99%, or 100% identical to SEQ ID NO: 1181, a LCDR2 at least 65%, at least 70%, at least 75%, at least 80%, at least 85%, at least 90%, at least 95%, at least 99%, or 100% identical to amino acid sequence ATS, a LCDR3 at least 65%, at least 70%, at least 75%, at least 80%, at least 85%, at least 90%, at least 95%, at least 99%, or 100% identical to SEQ ID NO: 1195, a HCDR1 at least 65%, at least 70%, at least 75%, at least 80%, at least 85%, at least 90%, at least 95%, at least 99%, or 100% identical to SEQ ID NO: 1184, a HCDR2 at least 65%, at least 70%, at least 75%, at least 80%, at least 85%, at least 90%, at least 95%, at least 99%, or 100% identical to SEQ ID NO: 1185, and a HCDR3 at least 65%, at least 70%, at least 75%, at least 80%, at least 85%, at least 90%, at least 95%, at least 99%, or 100% identical to SEQ ID NO: 1197;
[7875] a LCDR1 at least 65%, at least 70%, at least 75%, at least 80%, at least 85%, at least 90%, at least 95%, at least 99%, or 100% identical to SEQ ID NO: 1199, a LCDR2 at least 65%, at least 70%, at least 75%, at least 80%, at least 85%, at least 90%, at least 95%, at least 99%, or 100% identical to SEQ ID NO: 1200, a LCDR3 at least 65%, at least 70%, at least 75%, at least 80%, at least 85%, at least 90%, at least 95%, at least 99%, or 100% identical to SEQ ID NO: 1201, a HCDR1 at least 65%, at least 70%, at least 75%, at least 80%, at least 85%, at least 90%, at least 95%, at least 99%, or 100% identical to SEQ ID NO: 1203, a HCDR2 at least 65%, at least 70%, at least 75%, at least 80%, at least 85%, at least 90%, at least 95%, at least 99%, or 100% identical to SEQ ID NO: 1204, and a HCDR3 at least 65%, at least 70%, at least 75%, at least 80%, at least 85%, at least 90%, at least 95%, at least 99%, or 100% identical to SEQ ID NO: 1205;
[7876] a LCDR1 at least 65%, at least 70%, at least 75%, at least 80%, at least 85%, at least 90%, at least 95%, at least 99%, or 100% identical to SEQ ID NO: 1181, a LCDR2 at least 65%, at least 70%, at least 75%, at least 80%, at least 85%, at least 90%, at least 95%, at least 99%, or 100% identical to amino acid sequence ATS, a LCDR3 at least 65%, at least 70%, at least 75%, at least 80%, at least 85%, at least 90%, at least 95%, at least 99%, or 100% identical to SEQ ID NO: 1207, a HCDR1 at least 65%, at least 70%, at least 75%, at least 80%, at least 85%, at least 90%, at least 95%, at least 99%, or 100% identical to SEQ ID NO: 1184, a HCDR2 at least 65%, at least 70%, at least 75%, at least 80%, at least 85%, at least 90%, at least 95%, at least 99%, or 100% identical to SEQ ID NO: 1185, and a HCDR3 at least 65%, at least 70%, at least 75%, at least 80%, at least 85%, at least 90%, at least 95%, at least 99%, or 100% identical to SEQ ID NO: 1209;
[7877] a LCDR1 at least 65%, at least 70%, at least 75%, at least 80%, at least 85%, at least 90%, at least 95%, at least 99%, or 100% identical to SEQ ID NO: 1211, a LCDR2 at least 65%, at least 70%, at least 75%, at least 80%, at least 85%, at least 90%, at least 95%, at least 99%, or 100% identical to SEQ ID NO: 1212, a LCDR3 at least 65%, at least 70%, at least 75%, at least 80%, at least 85%, at least 90%, at least 95%, at least 99%, or 100% identical to SEQ ID NO: 1213, a HCDR1 at least 65%, at least 70%, at least 75%, at least 80%, at least 85%, at least 90%, at least 95%, at least 99%, or 100% identical to SEQ ID NO: 1215, a HCDR2 at least 65%, at least 70%, at least 75%, at least 80%, at least 85%, at least 90%, at least 95%, at least 99%, or 100% identical to SEQ ID NO: 1216, and a HCDR3 at least 65%, at least 70%, at least 75%, at least 80%, at least 85%, at least 90%, at least 95%, at least 99%, or 100% identical to SEQ ID NO: 1217;
[7878] a LCDR1 at least 65%, at least 70%, at least 75%, at least 80%, at least 85%, at least 90%, at least 95%, at least 99%, or 100% identical to SEQ ID NO: 1181, a LCDR2 at least 65%, at least 70%, at least 75%, at least 80%, at least 85%, at least 90%, at least 95%, at least 99%, or 100% identical to amino acid sequence ATS, a LCDR3 at least 65%, at least 70%, at least 75%, at least 80%, at least 85%, at least 90%, at least 95%, at least 99%, or 100% identical to SEQ ID NO: 1195, a HCDR1 at least 65%, at least 70%, at least 75%, at least 80%, at least 85%, at least 90%, at least 95%, at least 99%, or 100% identical to SEQ ID NO: 1184, a HCDR2 at least 65%, at least 70%, at least 75%, at least 80%, at least 85%, at least 90%, at least 95%, at least 99%, or 100% identical to SEQ ID NO: 1185, and a HCDR3 at least 65%, at least 70%, at least 75%, at least 80%, at least 85%, at least 90%, at least 95%, at least 99%, or 100% identical to SEQ ID NO: 1197;
[7879] a LCDR1 at least 65%, at least 70%, at least 75%, at least 80%, at least 85%, at least 90%, at least 95%, at least 99%, or 100% identical to SEQ ID NO: 1221, a LCDR2 at least 65%, at least 70%, at least 75%, at least 80%, at least 85%, at least 90%, at least 95%, at least 99%, or 100% identical to amino acid sequence GIS, a LCDR3 at least 65%, at least 70%, at least 75%, at least 80%, at least 85%, at least 90%, at least 95%, at least 99%, or 100% identical to SEQ ID NO: 1222, a HCDR1 at least 65%, at least 70%, at least 75%, at least 80%, at least 85%, at least 90%, at least 95%, at least 99%, or 100% identical to SEQ ID NO: 1224, a HCDR2 at least 65%, at least 70%, at least 75%, at least 80%, at least 85%, at least 90%, at least 95%, at least 99%, or 100% identical to SEQ ID NO: 1225, and a HCDR3 at least 65%, at least 70%, at least 75%, at least 80%, at least 85%, at least 90%, at least 95%, at least 99%, or 100% identical to SEQ ID NO: 1226;
[7880] a LCDR1 at least 65%, at least 70%, at least 75%, at least 80%, at least 85%, at least 90%, at least 95%, at least 99%, or 100% identical to SEQ ID NO: 1228, a LCDR2 at least 65%, at least 70%, at least 75%, at least 80%, at least 85%, at least 90%, at least 95%, at least 99%, or 100% identical to amino acid sequence YTS, a LCDR3 at least 65%, at least 70%, at least 75%, at least 80%, at least 85%, at least 90%, at least 95%, at least 99%, or 100% identical to SEQ ID NO: 1229, a HCDR1 at least 65%, at least 70%, at least 75%, at least 80%, at least 85%, at least 90%, at least 95%, at least 99%, or 100% identical to SEQ ID NO: 1231, a HCDR2 at least 65%, at least 70%, at least 75%, at least 80%, at least 85%, at least 90%, at least 95%, at least 99%, or 100% identical to SEQ ID NO: 1232, and a HCDR3 at least 65%, at least 70%, at least 75%, at least 80%, at least 85%, at least 90%, at least 95%, at least 99%, or 100% identical to SEQ ID NO: 1233;
[7881] a LCDR1 at least 65%, at least 70%, at least 75%, at least 80%, at least 85%, at least 90%, at least 95%, at least 99%, or 100% identical to SEQ ID NO: 1235, a LCDR2 at least 65%, at least 70%, at least 75%, at least 80%, at least 85%, at least 90%, at least 95%, at least 99%, or 100% identical to amino acid sequence TTS, a LCDR3 at least 65%, at least 70%, at least 75%, at least 80%, at least 85%, at least 90%, at least 95%, at least 99%, or 100% identical to SEQ ID NO: 1236, a HCDR1 at least 65%, at least 70%, at least 75%, at least 80%, at least 85%, at least 90%, at least 95%, at least 99%, or 100% identical to SEQ ID NO: 1238, a HCDR2 at least 65%, at least 70%, at least 75%, at least 80%, at least 85%, at least 90%, at least 95%, at least 99%, or 100% identical to SEQ ID NO: 1239, and a HCDR3 at least 65%, at least 70%, at least 75%, at least 80%, at least 85%, at least 90%, at least 95%, at least 99%, or 100% identical to SEQ ID NO: 1240;
[7882] a LCDR1 at least 65%, at least 70%, at least 75%, at least 80%, at least 85%, at least 90%, at least 95%, at least 99%, or 100% identical to SEQ ID NO: 1181, a LCDR2 at least 65%, at least 70%, at least 75%, at least 80%, at least 85%, at least 90%, at least 95%, at least 99%, or 100% identical to amino acid sequence DTS, a LCDR3 at least 65%, at least 70%, at least 75%, at least 80%, at least 85%, at least 90%, at least 95%, at least 99%, or 100% identical to SEQ ID NO: 2009, a HCDR1 at least 65%, at least 70%, at least 75%, at least 80%, at least 85%, at least 90%, at least 95%, at least 99%, or 100% identical to SEQ ID NO: 1243, a HCDR2 at least 65%, at least 70%, at least 75%, at least 80%, at least 85%, at least 90%, at least 95%, at least 99%, or 100% identical to SEQ ID NO: 1244, and a HCDR3 at least 65%, at least 70%, at least 75%, at least 80%, at least 85%, at least 90%, at least 95%, at least 99%, or 100% identical to SEQ ID NO: 1245;
[7883] a LCDR1 at least 65%, at least 70%, at least 75%, at least 80%, at least 85%, at least 90%, at least 95%, at least 99%, or 100% identical to SEQ ID NO: 1247, a LCDR2 at least 65%, at least 70%, at least 75%, at least 80%, at least 85%, at least 90%, at least 95%, at least 99%, or 100% identical to amino acid sequence AAS, a LCDR3 at least 65%, at least 70%, at least 75%, at least 80%, at least 85%, at least 90%, at least 95%, at least 99%, or 100% identical to SEQ ID NO: 1248, a HCDR1 at least 65%, at least 70%, at least 75%, at least 80%, at least 85%, at least 90%, at least 95%, at least 99%, or 100% identical to SEQ ID NO: 1250, a HCDR2 at least 65%, at least 70%, at least 75%, at least 80%, at least 85%, at least 90%, at least 95%, at least 99%, or 100% identical to SEQ ID NO: 1251, and a HCDR3 at least 65%, at least 70%, at least 75%, at least 80%, at least 85%, at least 90%, at least 95%, at least 99%, or 100% identical to SEQ ID NO: 1252;
[7884] a LCDR1 at least 65%, at least 70%, at least 75%, at least 80%, at least 85%, at least 90%, at least 95%, at least 99%, or 100% identical to SEQ ID NO: 1254, a LCDR2 at least 65%, at least 70%, at least 75%, at least 80%, at least 85%, at least 90%, at least 95%, at least 99%, or 100% identical to amino acid sequence AAS, a LCDR3 at least 65%, at least 70%, at least 75%, at least 80%, at least 85%, at least 90%, at least 95%, at least 99%, or 100% identical to SEQ ID NO: 1255, a HCDR1 at least 65%, at least 70%, at least 75%, at least 80%, at least 85%, at least 90%, at least 95%, at least 99%, or 100% identical to SEQ ID NO: 1257, a HCDR2 at least 65%, at least 70%, at least 75%, at least 80%, at least 85%, at least 90%, at least 95%, at least 99%, or 100% identical to SEQ ID NO: 1258, and a HCDR3 at least 65%, at least 70%, at least 75%, at least 80%, at least 85%, at least 90%, at least 95%, at least 99%, or 100% identical to SEQ ID NO: 1259;
[7885] a LCDR1 at least 65%, at least 70%, at least 75%, at least 80%, at least 85%, at least 90%, at least 95%, at least 99%, or 100% identical to SEQ ID NO: 1261, a LCDR2 at least 65%, at least 70%, at least 75%, at least 80%, at least 85%, at least 90%, at least 95%, at least 99%, or 100% identical to amino acid sequence SAS, a LCDR3 at least 65%, at least 70%, at least 75%, at least 80%, at least 85%, at least 90%, at least 95%, at least 99%, or 100% identical to SEQ ID NO: 1262, a HCDR1 at least 65%, at least 70%, at least 75%, at least 80%, at least 85%, at least 90%, at least 95%, at least 99%, or 100% identical to SEQ ID NO: 1264, a HCDR2 at least 65%, at least 70%, at least 75%, at least 80%, at least 85%, at least 90%, at least 95%, at least 99%, or 100% identical to SEQ ID NO: 1159, and a HCDR3 at least 65%, at least 70%, at least 75%, at least 80%, at least 85%, at least 90%, at least 95%, at least 99%, or 100% identical to SEQ ID NO: 1975;
[7886] a LCDR1 at least 65%, at least 70%, at least 75%, at least 80%, at least 85%, at least 90%, at least 95%, at least 99%, or 100% identical to SEQ ID NO: 1266, a LCDR2 at least 65%, at least 70%, at least 75%, at least 80%, at least 85%, at least 90%, at least 95%, at least 99%, or 100% identical to amino acid sequence WAS, a LCDR3 at least 65%, at least 70%, at least 75%, at least 80%, at least 85%, at least 90%, at least 95%, at least 99%, or 100% identical to SEQ ID NO: 1267, a HCDR1 at least 65%, at least 70%, at least 75%, at least 80%, at least 85%, at least 90%, at least 95%, at least 99%, or 100% identical to SEQ ID NO: 1144, a HCDR2 at least 65%, at least 70%, at least 75%, at least 80%, at least 85%, at least 90%, at least 95%, at least 99%, or 100% identical to SEQ ID NO: 1145, and a HCDR3 at least 65%, at least 70%, at least 75%, at least 80%, at least 85%, at least 90%, at least 95%, at least 99%, or 100% identical to SEQ ID NO: 1269;
[7887] a LCDR1 at least 65%, at least 70%, at least 75%, at least 80%, at least 85%, at least 90%, at least 95%, at least 99%, or 100% identical to SEQ ID NO: 1271, a LCDR2 at least 65%, at least 70%, at least 75%, at least 80%, at least 85%, at least 90%, at least 95%, at least 99%, or 100% identical to amino acid sequence NTN, a LCDR3 at least 65%, at least 70%, at least 75%, at least 80%, at least 85%, at least 90%, at least 95%, at least 99%, or 100% identical to SEQ ID NO: 1272, a HCDR1 at least 65%, at least 70%, at least 75%, at least 80%, at least 85%, at least 90%, at least 95%, at least 99%, or 100% identical to SEQ ID NO: 1274, a HCDR2 at least 65%, at least 70%, at least 75%, at least 80%, at least 85%, at least 90%, at least 95%, at least 99%, or 100% identical to SEQ ID NO: 1275, and a HCDR3 at least 65%, at least 70%, at least 75%, at least 80%, at least 85%, at least 90%, at least 95%, at least 99%, or 100% identical to SEQ ID NO: 1276;
[7888] a LCDR1 at least 65%, at least 70%, at least 75%, at least 80%, at least 85%, at least 90%, at least 95%, at least 99%, or 100% identical to SEQ ID NO: 1278, a LCDR2 at least 65%, at least 70%, at least 75%, at least 80%, at least 85%, at least 90%, at least 95%, at least 99%, or 100% identical to amino acid sequence YAT, a LCDR3 at least 65%, at least 70%, at least 75%, at least 80%, at least 85%, at least 90%, at least 95%, at least 99%, or 100% identical to SEQ ID NO: 1279, a HCDR1 at least 65%, at least 70%, at least 75%, at least 80%, at least 85%, at least 90%, at least 95%, at least 99%, or 100% identical to SEQ ID NO: 1281, a HCDR2 at least 65%, at least 70%, at least 75%, at least 80%, at least 85%, at least 90%, at least 95%, at least 99%, or 100% identical to SEQ ID NO: 1282, and a HCDR3 at least 65%, at least 70%, at least 75%, at least 80%, at least 85%, at least 90%, at least 95%, at least 99%, or 100% identical to SEQ ID NO: 1283;
[7889] a LCDR1 at least 65%, at least 70%, at least 75%, at least 80%, at least 85%, at least 90%, at least 95%, at least 99%, or 100% identical to SEQ ID NO: 1285, a LCDR2 at least 65%, at least 70%, at least 75%, at least 80%, at least 85%, at least 90%, at least 95%, at least 99%, or 100% identical to amino acid sequence AAS, a LCDR3 at least 65%, at least 70%, at least 75%, at least 80%, at least 85%, at least 90%, at least 95%, at least 99%, or 100% identical to SEQ ID NO: 1286, a HCDR1 at least 65%, at least 70%, at least 75%, at least 80%, at least 85%, at least 90%, at least 95%, at least 99%, or 100% identical to SEQ ID NO: 1288, a HCDR2 at least 65%, at least 70%, at least 75%, at least 80%, at least 85%, at least 90%, at least 95%, at least 99%, or 100% identical to SEQ ID NO: 1289, and a HCDR3 at least 65%, at least 70%, at least 75%, at least 80%, at least 85%, at least 90%, at least 95%, at least 99%, or 100% identical to SEQ ID NO: 1290;
[7890] a LCDR1 at least 65%, at least 70%, at least 75%, at least 80%, at least 85%, at least 90%, at least 95%, at least 99%, or 100% identical to SEQ ID NO: 1292, a LCDR2 at least 65%, at least 70%, at least 75%, at least 80%, at least 85%, at least 90%, at least 95%, at least 99%, or 100% identical to amino acid sequence WAS, a LCDR3 at least 65%, at least 70%, at least 75%, at least 80%, at least 85%, at least 90%, at least 95%, at least 99%, or 100% identical to SEQ ID NO: 1293, a HCDR1 at least 65%, at least 70%, at least 75%, at least 80%, at least 85%, at least 90%, at least 95%, at least 99%, or 100% identical to SEQ ID NO: 1295, a HCDR2 at least 65%, at least 70%, at least 75%, at least 80%, at least 85%, at least 90%, at least 95%, at least 99%, or 100% identical to SEQ ID NO: 1296, and a HCDR3 at least 65%, at least 70%, at least 75%, at least 80%, at least 85%, at least 90%, at least 95%, at least 99%, or 100% identical to SEQ ID NO: 1297;
[7891] a LCDR1 at least 65%, at least 70%, at least 75%, at least 80%, at least 85%, at least 90%, at least 95%, at least 99%, or 100% identical to SEQ ID NO: 1299, a LCDR2 at least 65%, at least 70%, at least 75%, at least 80%, at least 85%, at least 90%, at least 95%, at least 99%, or 100% identical to amino acid sequence SAS, a LCDR3 at least 65%, at least 70%, at least 75%, at least 80%, at least 85%, at least 90%, at least 95%, at least 99%, or 100% identical to SEQ ID NO: 1300, a HCDR1 at least 65%, at least 70%, at least 75%, at least 80%, at least 85%, at least 90%, at least 95%, at least 99%, or 100% identical to SEQ ID NO: 1302, a HCDR2 at least 65%, at least 70%, at least 75%, at least 80%, at least 85%, at least 90%, at least 95%, at least 99%, or 100% identical to SEQ ID NO: 1303, and a HCDR3 at least 65%, at least 70%, at least 75%, at least 80%, at least 85%, at least 90%, at least 95%, at least 99%, or 100% identical to SEQ ID NO: 1304;
[7892] a LCDR1 at least 65%, at least 70%, at least 75%, at least 80%, at least 85%, at least 90%, at least 95%, at least 99%, or 100% identical to SEQ ID NO: 1306, a LCDR2 at least 65%, at least 70%, at least 75%, at least 80%, at least 85%, at least 90%, at least 95%, at least 99%, or 100% identical to amino acid sequence AAS, a LCDR3 at least 65%, at least 70%, at least 75%, at least 80%, at least 85%, at least 90%, at least 95%, at least 99%, or 100% identical to SEQ ID NO: 1307, a HCDR1 at least 65%, at least 70%, at least 75%, at least 80%, at least 85%, at least 90%, at least 95%, at least 99%, or 100% identical to SEQ ID NO: 1309, a HCDR2 at least 65%, at least 70%, at least 75%, at least 80%, at least 85%, at least 90%, at least 95%, at least 99%, or 100% identical to SEQ ID NO: 1310, and a HCDR3 at least 65%, at least 70%, at least 75%, at least 80%, at least 85%, at least 90%, at least 95%, at least 99%, or 100% identical to SEQ ID NO: 1311;
[7893] a LCDR1 at least 65%, at least 70%, at least 75%, at least 80%, at least 85%, at least 90%, at least 95%, at least 99%, or 100% identical to SEQ ID NO: 1313, a LCDR2 at least 65%, at least 70%, at least 75%, at least 80%, at least 85%, at least 90%, at least 95%, at least 99%, or 100% identical to amino acid sequence YAS, a LCDR3 at least 65%, at least 70%, at least 75%, at least 80%, at least 85%, at least 90%, at least 95%, at least 99%, or 100% identical to SEQ ID NO: 1976, a HCDR1 at least 65%, at least 70%, at least 75%, at least 80%, at least 85%, at least 90%, at least 95%, at least 99%, or 100% identical to SEQ ID NO: 1315, a HCDR2 at least 65%, at least 70%, at least 75%, at least 80%, at least 85%, at least 90%, at least 95%, at least 99%, or 100% identical to SEQ ID NO: 1316, and a HCDR3 at least 65%, at least 70%, at least 75%, at least 80%, at least 85%, at least 90%, at least 95%, at least 99%, or 100% identical to SEQ ID NO: 1317;
[7894] a LCDR1 at least 65%, at least 70%, at least 75%, at least 80%, at least 85%, at least 90%, at least 95%, at least 99%, or 100% identical to SEQ ID NO: 1319, a LCDR2 at least 65%, at least 70%, at least 75%, at least 80%, at least 85%, at least 90%, at least 95%, at least 99%, or 100% identical to amino acid sequence AAS, a LCDR3 at least 65%, at least 70%, at least 75%, at least 80%, at least 85%, at least 90%, at least 95%, at least 99%, or 100% identical to SEQ ID NO: 1320, a HCDR1 at least 65%, at least 70%, at least 75%, at least 80%, at least 85%, at least 90%, at least 95%, at least 99%, or 100% identical to SEQ ID NO: 1322, a HCDR2 at least 65%, at least 70%, at least 75%, at least 80%, at least 85%, at least 90%, at least 95%, at least 99%, or 100% identical to SEQ ID NO: 1323, and a HCDR3 at least 65%, at least 70%, at least 75%, at least 80%, at least 85%, at least 90%, at least 95%, at least 99%, or 100% identical to SEQ ID NO: 1324;
[7895] a LCDR1 at least 65%, at least 70%, at least 75%, at least 80%, at least 85%, at least 90%, at least 95%, at least 99%, or 100% identical to SEQ ID NO: 1326, a LCDR2 at least 65%, at least 70%, at least 75%, at least 80%, at least 85%, at least 90%, at least 95%, at least 99%, or 100% identical to amino acid sequence GAF, a LCDR3 at least 65%, at least 70%, at least 75%, at least 80%, at least 85%, at least 90%, at least 95%, at least 99%, or 100% identical to SEQ ID NO: 1327, a HCDR1 at least 65%, at least 70%, at least 75%, at least 80%, at least 85%, at least 90%, at least 95%, at least 99%, or 100% identical to SEQ ID NO: 1329, a HCDR2 at least 65%, at least 70%, at least 75%, at least 80%, at least 85%, at least 90%, at least 95%, at least 99%, or 100% identical to SEQ ID NO: 1330, and a HCDR3 at least 65%, at least 70%, at least 75%, at least 80%, at least 85%, at least 90%, at least 95%, at least 99%, or 100% identical to SEQ ID NO: 1331;
[7896] a LCDR1 at least 65%, at least 70%, at least 75%, at least 80%, at least 85%, at least 90%, at least 95%, at least 99%, or 100% identical to SEQ ID NO: 1228, a LCDR2 at least 65%, at least 70%, at least 75%, at least 80%, at least 85%, at least 90%, at least 95%, at least 99%, or 100% identical to amino acid sequence DAS, a LCDR3 at least 65%, at least 70%, at least 75%, at least 80%, at least 85%, at least 90%, at least 95%, at least 99%, or 100% identical to SEQ ID NO: 1333, a HCDR1 at least 65%, at least 70%, at least 75%, at least 80%, at least 85%, at least 90%, at least 95%, at least 99%, or 100% identical to SEQ ID NO: 1335, a HCDR2 at least 65%, at least 70%, at least 75%, at least 80%, at least 85%, at least 90%, at least 95%, at least 99%, or 100% identical to SEQ ID NO: 1336, and a HCDR3 at least 65%, at least 70%, at least 75%, at least 80%, at least 85%, at least 90%, at least 95%, at least 99%, or 100% identical to SEQ ID NO: 1337;
[7897] a LCDR1 at least 65%, at least 70%, at least 75%, at least 80%, at least 85%, at least 90%, at least 95%, at least 99%, or 100% identical to SEQ ID NO: 1339, a LCDR2 at least 65%, at least 70%, at least 75%, at least 80%, at least 85%, at least 90%, at least 95%, at least 99%, or 100% identical to amino acid sequence YAS, a LCDR3 at least 65%, at least 70%, at least 75%, at least 80%, at least 85%, at least 90%, at least 95%, at least 99%, or 100% identical to SEQ ID NO: 1340, a HCDR1 at least 65%, at least 70%, at least 75%, at least 80%, at least 85%, at least 90%, at least 95%, at least 99%, or 100% identical to SEQ ID NO: 1342, a HCDR2 at least 65%, at least 70%, at least 75%, at least 80%, at least 85%, at least 90%, at least 95%, at least 99%, or 100% identical to SEQ ID NO: 1343, and a HCDR3 at least 65%, at least 70%, at least 75%, at least 80%, at least 85%, at least 90%, at least 95%, at least 99%, or 100% identical to SEQ ID NO: 1344;
[7898] a LCDR1 at least 65%, at least 70%, at least 75%, at least 80%, at least 85%, at least 90%, at least 95%, at least 99%, or 100% identical to SEQ ID NO: 1188, a LCDR2 at least 65%, at least 70%, at least 75%, at least 80%, at least 85%, at least 90%, at least 95%, at least 99%, or 100% identical to amino acid sequence DAS, a LCDR3 at least 65%, at least 70%, at least 75%, at least 80%, at least 85%, at least 90%, at least 95%, at least 99%, or 100% identical to SEQ ID NO: 1346, a HCDR1 at least 65%, at least 70%, at least 75%, at least 80%, at least 85%, at least 90%, at least 95%, at least 99%, or 100% identical to SEQ ID NO: 1348, a HCDR2 at least 65%, at least 70%, at least 75%, at least 80%, at least 85%, at least 90%, at least 95%, at least 99%, or 100% identical to SEQ ID NO: 1349, and a HCDR3 at least 65%, at least 70%, at least 75%, at least 80%, at least 85%, at least 90%, at least 95%, at least 99%, or 100% identical to SEQ ID NO: 1350;
[7899] a LCDR1 at least 65%, at least 70%, at least 75%, at least 80%, at least 85%, at least 90%, at least 95%, at least 99%, or 100% identical to SEQ ID NO: 1352, a LCDR2 at least 65%, at least 70%, at least 75%, at least 80%, at least 85%, at least 90%, at least 95%, at least 99%, or 100% identical to amino acid sequence KVS, a LCDR3 at least 65%, at least 70%, at least 75%, at least 80%, at least 85%, at least 90%, at least 95%, at least 99%, or 100% identical to SEQ ID NO: 1353, a HCDR1 at least 65%, at least 70%, at least 75%, at least 80%, at least 85%, at least 90%, at least 95%, at least 99%, or 100% identical to SEQ ID NO: 1355, a HCDR2 at least 65%, at least 70%, at least 75%, at least 80%, at least 85%, at least 90%, at least 95%, at least 99%, or 100% identical to SEQ ID NO: 1356, and a HCDR3 at least 65%, at least 70%, at least 75%, at least 80%, at least 85%, at least 90%, at least 95%, at least 99%, or 100% identical to SEQ ID NO: 1357;
[7900] a LCDR1 at least 65%, at least 70%, at least 75%, at least 80%, at least 85%, at least 90%, at least 95%, at least 99%, or 100% identical to SEQ ID NO: 1359, a LCDR2 at least 65%, at least 70%, at least 75%, at least 80%, at least 85%, at least 90%, at least 95%, at least 99%, or 100% identical to amino acid sequence DAS, a LCDR3 at least 65%, at least 70%, at least 75%, at least 80%, at least 85%, at least 90%, at least 95%, at least 99%, or 100% identical to SEQ ID NO: 1360, a HCDR1 at least 65%, at least 70%, at least 75%, at least 80%, at least 85%, at least 90%, at least 95%, at least 99%, or 100% identical to SEQ ID NO: 1362, a HCDR2 at least 65%, at least 70%, at least 75%, at least 80%, at least 85%, at least 90%, at least 95%, at least 99%, or 100% identical to SEQ ID NO: 1363, and a HCDR3 at least 65%, at least 70%, at least 75%, at least 80%, at least 85%, at least 90%, at least 95%, at least 99%, or 100% identical to SEQ ID NO: 1364;
[7901] a LCDR1 at least 65%, at least 70%, at least 75%, at least 80%, at least 85%, at least 90%, at least 95%, at least 99%, or 100% identical to SEQ ID NO: 1366, a LCDR2 at least 65%, at least 70%, at least 75%, at least 80%, at least 85%, at least 90%, at least 95%, at least 99%, or 100% identical to amino acid sequence KVS, a LCDR3 at least 65%, at least 70%, at least 75%, at least 80%, at least 85%, at least 90%, at least 95%, at least 99%, or 100% identical to SEQ ID NO: 1367, a HCDR1 at least 65%, at least 70%, at least 75%, at least 80%, at least 85%, at least 90%, at least 95%, at least 99%, or 100% identical to SEQ ID NO: 1369, a HCDR2 at least 65%, at least 70%, at least 75%, at least 80%, at least 85%, at least 90%, at least 95%, at least 99%, or 100% identical to SEQ ID NO: 1370, and a HCDR3 at least 65%, at least 70%, at least 75%, at least 80%, at least 85%, at least 90%, at least 95%, at least 99%, or 100% identical to SEQ ID NO: 1371;
[7902] a LCDR1 at least 65%, at least 70%, at least 75%, at least 80%, at least 85%, at least 90%, at least 95%, at least 99%, or 100% identical to SEQ ID NO: 1366, a LCDR2 at least 65%, at least 70%, at least 75%, at least 80%, at least 85%, at least 90%, at least 95%, at least 99%, or 100% identical to amino acid sequence KVS, a LCDR3 at least 65%, at least 70%, at least 75%, at least 80%, at least 85%, at least 90%, at least 95%, at least 99%, or 100% identical to SEQ ID NO: 1367, a HCDR1 at least 65%, at least 70%, at least 75%, at least 80%, at least 85%, at least 90%, at least 95%, at least 99%, or 100% identical to SEQ ID NO: 1369, a HCDR2 at least 65%, at least 70%, at least 75%, at least 80%, at least 85%, at least 90%, at least 95%, at least 99%, or 100% identical to SEQ ID NO: 1370, and a HCDR3 at least 65%, at least 70%, at least 75%, at least 80%, at least 85%, at least 90%, at least 95%, at least 99%, or 100% identical to SEQ ID NO: 1371;
[7903] a LCDR1 at least 65%, at least 70%, at least 75%, at least 80%, at least 85%, at least 90%, at least 95%, at least 99%, or 100% identical to SEQ ID NO: 1373, a LCDR2 at least 65%, at least 70%, at least 75%, at least 80%, at least 85%, at least 90%, at least 95%, at least 99%, or 100% identical to amino acid sequence SAS, a LCDR3 at least 65%, at least 70%, at least 75%, at least 80%, at least 85%, at least 90%, at least 95%, at least 99%, or 100% identical to SEQ ID NO: 1374, a HCDR1 at least 65%, at least 70%, at least 75%, at least 80%, at least 85%, at least 90%, at least 95%, at least 99%, or 100% identical to SEQ ID NO: 1376, a HCDR2 at least 65%, at least 70%, at least 75%, at least 80%, at least 85%, at least 90%, at least 95%, at least 99%, or 100% identical to SEQ ID NO: 1377, and a HCDR3 at least 65%, at least 70%, at least 75%, at least 80%, at least 85%, at least 90%, at least 95%, at least 99%, or 100% identical to SEQ ID NO: 1378;
[7904] a LCDR1 at least 65%, at least 70%, at least 75%, at least 80%, at least 85%, at least 90%, at least 95%, at least 99%, or 100% identical to SEQ ID NO: 1373, a LCDR2 at least 65%, at least 70%, at least 75%, at least 80%, at least 85%, at least 90%, at least 95%, at least 99%, or 100% identical to amino acid sequence SAS, a LCDR3 at least 65%, at least 70%, at least 75%, at least 80%, at least 85%, at least 90%, at least 95%, at least 99%, or 100% identical to SEQ ID NO: 1374, a HCDR1 at least 65%, at least 70%, at least 75%, at least 80%, at least 85%, at least 90%, at least 95%, at least 99%, or 100% identical to SEQ ID NO: 1376, a HCDR2 at least 65%, at least 70%, at least 75%, at least 80%, at least 85%, at least 90%, at least 95%, at least 99%, or 100% identical to SEQ ID NO: 1377, and a HCDR3 at least 65%, at least 70%, at least 75%, at least 80%, at least 85%, at least 90%, at least 95%, at least 99%, or 100% identical to SEQ ID NO: 1378;
[7905] a LCDR1 at least 65%, at least 70%, at least 75%, at least 80%, at least 85%, at least 90%, at least 95%, at least 99%, or 100% identical to SEQ ID NO: 1373, a LCDR2 at least 65%, at least 70%, at least 75%, at least 80%, at least 85%, at least 90%, at least 95%, at least 99%, or 100% identical to amino acid sequence SAS, a LCDR3 at least 65%, at least 70%, at least 75%, at least 80%, at least 85%, at least 90%, at least 95%, at least 99%, or 100% identical to SEQ ID NO: 1374, a HCDR1 at least 65%, at least 70%, at least 75%, at least 80%, at least 85%, at least 90%, at least 95%, at least 99%, or 100% identical to SEQ ID NO: 1376, a HCDR2 at least 65%, at least 70%, at least 75%, at least 80%, at least 85%, at least 90%, at least 95%, at least 99%, or 100% identical to SEQ ID NO: 1377, and a HCDR3 at least 65%, at least 70%, at least 75%, at least 80%, at least 85%, at least 90%, at least 95%, at least 99%, or 100% identical to SEQ ID NO: 1378;
[7906] a LCDR1 at least 65%, at least 70%, at least 75%, at least 80%, at least 85%, at least 90%, at least 95%, at least 99%, or 100% identical to SEQ ID NO: 1373, a LCDR2 at least 65%, at least 70%, at least 75%, at least 80%, at least 85%, at least 90%, at least 95%, at least 99%, or 100% identical to amino acid sequence SAS, a LCDR3 at least 65%, at least 70%, at least 75%, at least 80%, at least 85%, at least 90%, at least 95%, at least 99%, or 100% identical to SEQ ID NO: 1374, a HCDR1 at least 65%, at least 70%, at least 75%, at least 80%, at least 85%, at least 90%, at least 95%, at least 99%, or 100% identical to SEQ ID NO: 1376, a HCDR2 at least 65%, at least 70%, at least 75%, at least 80%, at least 85%, at least 90%, at least 95%, at least 99%, or 100% identical to SEQ ID NO: 1377, and a HCDR3 at least 65%, at least 70%, at least 75%, at least 80%, at least 85%, at least 90%, at least 95%, at least 99%, or 100% identical to SEQ ID NO: 1378;
[7907] a LCDR1 at least 65%, at least 70%, at least 75%, at least 80%, at least 85%, at least 90%, at least 95%, at least 99%, or 100% identical to SEQ ID NO: 1382, a LCDR2 at least 65%, at least 70%, at least 75%, at least 80%, at least 85%, at least 90%, at least 95%, at least 99%, or 100% identical to amino acid sequence SAS, a LCDR3 at least 65%, at least 70%, at least 75%, at least 80%, at least 85%, at least 90%, at least 95%, at least 99%, or 100% identical to SEQ ID NO: 1383, a HCDR1 at least 65%, at least 70%, at least 75%, at least 80%, at least 85%, at least 90%, at least 95%, at least 99%, or 100% identical to SEQ ID NO: 1385, a HCDR2 at least 65%, at least 70%, at least 75%, at least 80%, at least 85%, at least 90%, at least 95%, at least 99%, or 100% identical to SEQ ID NO: 1386, and a HCDR3 at least 65%, at least 70%, at least 75%, at least 80%, at least 85%, at least 90%, at least 95%, at least 99%, or 100% identical to SEQ ID NO: 1387;
[7908] a LCDR1 at least 65%, at least 70%, at least 75%, at least 80%, at least 85%, at least 90%, at least 95%, at least 99%, or 100% identical to SEQ ID NO: 1188, a LCDR2 at least 65%, at least 70%, at least 75%, at least 80%, at least 85%, at least 90%, at least 95%, at least 99%, or 100% identical to amino acid sequence DAS, a LCDR3 at least 65%, at least 70%, at least 75%, at least 80%, at least 85%, at least 90%, at least 95%, at least 99%, or 100% identical to SEQ ID NO: 1389, a HCDR1 at least 65%, at least 70%, at least 75%, at least 80%, at least 85%, at least 90%, at least 95%, at least 99%, or 100% identical to SEQ ID NO: 1322, a HCDR2 at least 65%, at least 70%, at least 75%, at least 80%, at least 85%, at least 90%, at least 95%, at least 99%, or 100% identical to SEQ ID NO: 1391, and a HCDR3 at least 65%, at least 70%, at least 75%, at least 80%, at least 85%, at least 90%, at least 95%, at least 99%, or 100% identical to SEQ ID NO: 1392;
[7909] a LCDR1 at least 65%, at least 70%, at least 75%, at least 80%, at least 85%, at least 90%, at least 95%, at least 99%, or 100% identical to SEQ ID NO: 1394, a LCDR2 at least 65%, at least 70%, at least 75%, at least 80%, at least 85%, at least 90%, at least 95%, at least 99%, or 100% identical to amino acid sequence YAS, a LCDR3 at least 65%, at least 70%, at least 75%, at least 80%, at least 85%, at least 90%, at least 95%, at least 99%, or 100% identical to SEQ ID NO: 1395, a HCDR1 at least 65%, at least 70%, at least 75%, at least 80%, at least 85%, at least 90%, at least 95%, at least 99%, or 100% identical to SEQ ID NO: 1397, a HCDR2 at least 65%, at least 70%, at least 75%, at least 80%, at least 85%, at least 90%, at least 95%, at least 99%, or 100% identical to SEQ ID NO: 1398, and a HCDR3 at least 65%, at least 70%, at least 75%, at least 80%, at least 85%, at least 90%, at least 95%, at least 99%, or 100% identical to SEQ ID NO: 1399;
[7910] a LCDR1 at least 65%, at least 70%, at least 75%, at least 80%, at least 85%, at least 90%, at least 95%, at least 99%, or 100% identical to SEQ ID NO: 1401, a LCDR2 at least 65%, at least 70%, at least 75%, at least 80%, at least 85%, at least 90%, at least 95%, at least 99%, or 100% identical to amino acid sequence AAS, a LCDR3 at least 65%, at least 70%, at least 75%, at least 80%, at least 85%, at least 90%, at least 95%, at least 99%, or 100% identical to SEQ ID NO: 1402, a HCDR1 at least 65%, at least 70%, at least 75%, at least 80%, at least 85%, at least 90%, at least 95%, at least 99%, or 100% identical to SEQ ID NO: 1404, a HCDR2 at least 65%, at least 70%, at least 75%, at least 80%, at least 85%, at least 90%, at least 95%, at least 99%, or 100% identical to SEQ ID NO: 1405, and a HCDR3 at least 65%, at least 70%, at least 75%, at least 80%, at least 85%, at least 90%, at least 95%, at least 99%, or 100% identical to SEQ ID NO: 1406;
[7911] a LCDR1 at least 65%, at least 70%, at least 75%, at least 80%, at least 85%, at least 90%, at least 95%, at least 99%, or 100% identical to SEQ ID NO: 1408, a LCDR2 at least 65%, at least 70%, at least 75%, at least 80%, at least 85%, at least 90%, at least 95%, at least 99%, or 100% identical to amino acid sequence DDG, a LCDR3 at least 65%, at least 70%, at least 75%, at least 80%, at least 85%, at least 90%, at least 95%, at least 99%, or 100% identical to SEQ ID NO: 1409, a HCDR1 at least 65%, at least 70%, at least 75%, at least 80%, at least 85%, at least 90%, at least 95%, at least 99%, or 100% identical to SEQ ID NO: 1203, a HCDR2 at least 65%, at least 70%, at least 75%, at least 80%, at least 85%, at least 90%, at least 95%, at least 99%, or 100% identical to SEQ ID NO: 1411, and a HCDR3 at least 65%, at least 70%, at least 75%, at least 80%, at least 85%, at least 90%, at least 95%, at least 99%, or 100% identical to SEQ ID NO: 1412;
[7912] a LCDR1 at least 65%, at least 70%, at least 75%, at least 80%, at least 85%, at least 90%, at least 95%, at least 99%, or 100% identical to SEQ ID NO: 1414, a LCDR2 at least 65%, at least 70%, at least 75%, at least 80%, at least 85%, at least 90%, at least 95%, at least 99%, or 100% identical to amino acid sequence DAS, a LCDR3 at least 65%, at least 70%, at least 75%, at least 80%, at least 85%, at least 90%, at least 95%, at least 99%, or 100% identical to SEQ ID NO: 1415, a HCDR1 at least 65%, at least 70%, at least 75%, at least 80%, at least 85%, at least 90%, at least 95%, at least 99%, or 100% identical to SEQ ID NO: 1417, a HCDR2 at least 65%, at least 70%, at least 75%, at least 80%, at least 85%, at least 90%, at least 95%, at least 99%, or 100% identical to SEQ ID NO: 1418, and a HCDR3 at least 65%, at least 70%, at least 75%, at least 80%, at least 85%, at least 90%, at least 95%, at least 99%, or 100% identical to SEQ ID NO: 1419;
[7913] a LCDR1 at least 65%, at least 70%, at least 75%, at least 80%, at least 85%, at least 90%, at least 95%, at least 99%, or 100% identical to SEQ ID NO: 1421, a LCDR2 at least 65%, at least 70%, at least 75%, at least 80%, at least 85%, at least 90%, at least 95%, at least 99%, or 100% identical to amino acid sequence KVS, a LCDR3 at least 65%, at least 70%, at least 75%, at least 80%, at least 85%, at least 90%, at least 95%, at least 99%, or 100% identical to SEQ ID NO: 1422, a HCDR1 at least 65%, at least 70%, at least 75%, at least 80%, at least 85%, at least 90%, at least 95%, at least 99%, or 100% identical to SEQ ID NO: 1424, a HCDR2 at least 65%, at least 70%, at least 75%, at least 80%, at least 85%, at least 90%, at least 95%, at least 99%, or 100% identical to SEQ ID NO: 1425, and a HCDR3 at least 65%, at least 70%, at least 75%, at least 80%, at least 85%, at least 90%, at least 95%, at least 99%, or 100% identical to SEQ ID NO: 1426;
[7914] a LCDR1 at least 65%, at least 70%, at least 75%, at least 80%, at least 85%, at least 90%, at least 95%, at least 99%, or 100% identical to SEQ ID NO: 1428, a LCDR2 at least 65%, at least 70%, at least 75%, at least 80%, at least 85%, at least 90%, at least 95%, at least 99%, or 100% identical to amino acid sequence DAS, a LCDR3 at least 65%, at least 70%, at least 75%, at least 80%, at least 85%, at least 90%, at least 95%, at least 99%, or 100% identical to SEQ ID NO: 1429, a HCDR1 at least 65%, at least 70%, at least 75%, at least 80%, at least 85%, at least 90%, at least 95%, at least 99%, or 100% identical to SEQ ID NO: 1431, a HCDR2 at least 65%, at least 70%, at least 75%, at least 80%, at least 85%, at least 90%, at least 95%, at least 99%, or 100% identical to SEQ ID NO: 1432, and a HCDR3 at least 65%, at least 70%, at least 75%, at least 80%, at least 85%, at least 90%, at least 95%, at least 99%, or 100% identical to SEQ ID NO: 1433;
[7915] a LCDR1 at least 65%, at least 70%, at least 75%, at least 80%, at least 85%, at least 90%, at least 95%, at least 99%, or 100% identical to SEQ ID NO: 1428, a LCDR2 at least 65%, at least 70%, at least 75%, at least 80%, at least 85%, at least 90%, at least 95%, at least 99%, or 100% identical to amino acid sequence GAS, a LCDR3 at least 65%, at least 70%, at least 75%, at least 80%, at least 85%, at least 90%, at least 95%, at least 99%, or 100% identical to SEQ ID NO: 1435, a HCDR1 at least 65%, at least 70%, at least 75%, at least 80%, at least 85%, at least 90%, at least 95%, at least 99%, or 100% identical to SEQ ID NO: 1437, a HCDR2 at least 65%, at least 70%, at least 75%, at least 80%, at least 85%, at least 90%, at least 95%, at least 99%, or 100% identical to SEQ ID NO: 1438, and a HCDR3 at least 65%, at least 70%, at least 75%, at least 80%, at least 85%, at least 90%, at least 95%, at least 99%, or 100% identical to SEQ ID NO: 1439;
[7916] a LCDR1 at least 65%, at least 70%, at least 75%, at least 80%, at least 85%, at least 90%, at least 95%, at least 99%, or 100% identical to SEQ ID NO: 1441, a LCDR2 at least 65%, at least 70%, at least 75%, at least 80%, at least 85%, at least 90%, at least 95%, at least 99%, or 100% identical to amino acid sequence LVS, a LCDR3 at least 65%, at least 70%, at least 75%, at least 80%, at least 85%, at least 90%, at least 95%, at least 99%, or 100% identical to SEQ ID NO: 1442, a HCDR1 at least 65%, at least 70%, at least 75%, at least 80%, at least 85%, at least 90%, at least 95%, at least 99%, or 100% identical to SEQ ID NO: 1444, a HCDR2 at least 65%, at least 70%, at least 75%, at least 80%, at least 85%, at least 90%, at least 95%, at least 99%, or 100% identical to SEQ ID NO: 1445, and a HCDR3 at least 65%, at least 70%, at least 75%, at least 80%, at least 85%, at least 90%, at least 95%, at least 99%, or 100% identical to SEQ ID NO: 1446;
[7917] a LCDR1 at least 65%, at least 70%, at least 75%, at least 80%, at least 85%, at least 90%, at least 95%, at least 99%, or 100% identical to SEQ ID NO: 1448, a LCDR2 at least 65%, at least 70%, at least 75%, at least 80%, at least 85%, at least 90%, at least 95%, at least 99%, or 100% identical to amino acid sequence GNS, a LCDR3 at least 65%, at least 70%, at least 75%, at least 80%, at least 85%, at least 90%, at least 95%, at least 99%, or 100% identical to SEQ ID NO: 1449, a HCDR1 at least 65%, at least 70%, at least 75%, at least 80%, at least 85%, at least 90%, at least 95%, at least 99%, or 100% identical to SEQ ID NO: 1451, a HCDR2 at least 65%, at least 70%, at least 75%, at least 80%, at least 85%, at least 90%, at least 95%, at least 99%, or 100% identical to SEQ ID NO: 1452, and a HCDR3 at least 65%, at least 70%, at least 75%, at least 80%, at least 85%, at least 90%, at least 95%, at least 99%, or 100% identical to SEQ ID NO: 1453;
[7918] a LCDR1 at least 65%, at least 70%, at least 75%, at least 80%, at least 85%, at least 90%, at least 95%, at least 99%, or 100% identical to SEQ ID NO: 1455, a LCDR2 at least 65%, at least 70%, at least 75%, at least 80%, at least 85%, at least 90%, at least 95%, at least 99%, or 100% identical to amino acid sequence GAT, a LCDR3 at least 65%, at least 70%, at least 75%, at least 80%, at least 85%, at least 90%, at least 95%, at least 99%, or 100% identical to SEQ ID NO: 1456, a HCDR1 at least 65%, at least 70%, at least 75%, at least 80%, at least 85%, at least 90%, at least 95%, at least 99%, or 100% identical to SEQ ID NO: 1458, a HCDR2 at least 65%, at least 70%, at least 75%, at least 80%, at least 85%, at least 90%, at least 95%, at least 99%, or 100% identical to SEQ ID NO: 1145, and a HCDR3 at least 65%, at least 70%, at least 75%, at least 80%, at least 85%, at least 90%, at least 95%, at least 99%, or 100% identical to SEQ ID NO: 1459;
[7919] a LCDR1 at least 65%, at least 70%, at least 75%, at least 80%, at least 85%, at least 90%, at least 95%, at least 99%, or 100% identical to SEQ ID NO: 1461, a LCDR2 at least 65%, at least 70%, at least 75%, at least 80%, at least 85%, at least 90%, at least 95%, at least 99%, or 100% identical to amino acid sequence NAK, a LCDR3 at least 65%, at least 70%, at least 75%, at least 80%, at least 85%, at least 90%, at least 95%, at least 99%, or 100% identical to SEQ ID NO: 1462, a HCDR1 at least 65%, at least 70%, at least 75%, at least 80%, at least 85%, at least 90%, at least 95%, at least 99%, or 100% identical to SEQ ID NO: 1464, a HCDR2 at least 65%, at least 70%, at least 75%, at least 80%, at least 85%, at least 90%, at least 95%, at least 99%, or 100% identical to SEQ ID NO: 1465, and a HCDR3 at least 65%, at least 70%, at least 75%, at least 80%, at least 85%, at least 90%, at least 95%, at least 99%, or 100% identical to SEQ ID NO: 1466;
[7920] a LCDR1 at least 65%, at least 70%, at least 75%, at least 80%, at least 85%, at least 90%, at least 95%, at least 99%, or 100% identical to SEQ ID NO: 1468, a LCDR2 at least 65%, at least 70%, at least 75%, at least 80%, at least 85%, at least 90%, at least 95%, at least 99%, or 100% identical to amino acid sequence WAS, a LCDR3 at least 65%, at least 70%, at least 75%, at least 80%, at least 85%, at least 90%, at least 95%, at least 99%, or 100% identical to SEQ ID NO: 1469, a HCDR1 at least 65%, at least 70%, at least 75%, at least 80%, at least 85%, at least 90%, at least 95%, at least 99%, or 100% identical to SEQ ID NO: 1471, a HCDR2 at least 65%, at least 70%, at least 75%, at least 80%, at least 85%, at least 90%, at least 95%, at least 99%, or 100% identical to SEQ ID NO: 1472, and a HCDR3 at least 65%, at least 70%, at least 75%, at least 80%, at least 85%, at least 90%, at least 95%, at least 99%, or 100% identical to SEQ ID NO: 1473;
[7921] a LCDR1 at least 65%, at least 70%, at least 75%, at least 80%, at least 85%, at least 90%, at least 95%, at least 99%, or 100% identical to SEQ ID NO: 1475, a LCDR2 at least 65%, at least 70%, at least 75%, at least 80%, at least 85%, at least 90%, at least 95%, at least 99%, or 100% identical to amino acid sequence LGS, a LCDR3 at least 65%, at least 70%, at least 75%, at least 80%, at least 85%, at least 90%, at least 95%, at least 99%, or 100% identical to SEQ ID NO: 1476, a HCDR1 at least 65%, at least 70%, at least 75%, at least 80%, at least 85%, at least 90%, at least 95%, at least 99%, or 100% identical to SEQ ID NO: 1478, a HCDR2 at least 65%, at least 70%, at least 75%, at least 80%, at least 85%, at least 90%, at least 95%, at least 99%, or 100% identical to SEQ ID NO: 1479, and a HCDR3 at least 65%, at least 70%, at least 75%, at least 80%, at least 85%, at least 90%, at least 95%, at least 99%, or 100% identical to SEQ ID NO: 1480;
[7922] a LCDR1 at least 65%, at least 70%, at least 75%, at least 80%, at least 85%, at least 90%, at least 95%, at least 99%, or 100% identical to SEQ ID NO: 1292, a LCDR2 at least 65%, at least 70%, at least 75%, at least 80%, at least 85%, at least 90%, at least 95%, at least 99%, or 100% identical to amino acid sequence GAS, a LCDR3 at least 65%, at least 70%, at least 75%, at least 80%, at least 85%, at least 90%, at least 95%, at least 99%, or 100% identical to SEQ ID NO: 1482, a HCDR1 at least 65%, at least 70%, at least 75%, at least 80%, at least 85%, at least 90%, at least 95%, at least 99%, or 100% identical to SEQ ID NO: 1484, a HCDR2 at least 65%, at least 70%, at least 75%, at least 80%, at least 85%, at least 90%, at least 95%, at least 99%, or 100% identical to SEQ ID NO: 1485, and a HCDR3 at least 65%, at least 70%, at least 75%, at least 80%, at least 85%, at least 90%, at least 95%, at least 99%, or 100% identical to SEQ ID NO: 1486;
[7923] a LCDR1 at least 65%, at least 70%, at least 75%, at least 80%, at least 85%, at least 90%, at least 95%, at least 99%, or 100% identical to SEQ ID NO: 1488, a LCDR2 at least 65%, at least 70%, at least 75%, at least 80%, at least 85%, at least 90%, at least 95%, at least 99%, or 100% identical to amino acid sequence GAN, a LCDR3 at least 65%, at least 70%, at least 75%, at least 80%, at least 85%, at least 90%, at least 95%, at least 99%, or 100% identical to SEQ ID NO: 1489, a HCDR1 at least 65%, at least 70%, at least 75%, at least 80%, at least 85%, at least 90%, at least 95%, at least 99%, or 100% identical to SEQ ID NO: 1491, a HCDR2 at least 65%, at least 70%, at least 75%, at least 80%, at least 85%, at least 90%, at least 95%, at least 99%, or 100% identical to SEQ ID NO: 1492, and a HCDR3 at least 65%, at least 70%, at least 75%, at least 80%, at least 85%, at least 90%, at least 95%, at least 99%, or 100% identical to SEQ ID NO: 1493;
[7924] a LCDR1 at least 65%, at least 70%, at least 75%, at least 80%, at least 85%, at least 90%, at least 95%, at least 99%, or 100% identical to SEQ ID NO: 1495, a LCDR2 at least 65%, at least 70%, at least 75%, at least 80%, at least 85%, at least 90%, at least 95%, at least 99%, or 100% identical to amino acid sequence YTS, a LCDR3 at least 65%, at least 70%, at least 75%, at least 80%, at least 85%, at least 90%, at least 95%, at least 99%, or 100% identical to SEQ ID NO: 1496, a HCDR1 at least 65%, at least 70%, at least 75%, at least 80%, at least 85%, at least 90%, at least 95%, at least 99%, or 100% identical to SEQ ID NO: 1498, a HCDR2 at least 65%, at least 70%, at least 75%, at least 80%, at least 85%, at least 90%, at least 95%, at least 99%, or 100% identical to SEQ ID NO: 1499, and a HCDR3 at least 65%, at least 70%, at least 75%, at least 80%, at least 85%, at least 90%, at least 95%, at least 99%, or 100% identical to SEQ ID NO: 1500;
[7925] a LCDR1 at least 65%, at least 70%, at least 75%, at least 80%, at least 85%, at least 90%, at least 95%, at least 99%, or 100% identical to SEQ ID NO: 1401, a LCDR2 at least 65%, at least 70%, at least 75%, at least 80%, at least 85%, at least 90%, at least 95%, at least 99%, or 100% identical to amino acid sequence GAS, a LCDR3 at least 65%, at least 70%, at least 75%, at least 80%, at least 85%, at least 90%, at least 95%, at least 99%, or 100% identical to SEQ ID NO: 1502, a HCDR1 at least 65%, at least 70%, at least 75%, at least 80%, at least 85%, at least 90%, at least 95%, at least 99%, or 100% identical to SEQ ID NO: 1504, a HCDR2 at least 65%, at least 70%, at least 75%, at least 80%, at least 85%, at least 90%, at least 95%, at least 99%, or 100% identical to SEQ ID NO: 1505, and a HCDR3 at least 65%, at least 70%, at least 75%, at least 80%, at least 85%, at least 90%, at least 95%, at least 99%, or 100% identical to SEQ ID NO: 1506;
[7926] a LCDR1 at least 65%, at least 70%, at least 75%, at least 80%, at least 85%, at least 90%, at least 95%, at least 99%, or 100% identical to SEQ ID NO: 1508, a LCDR2 at least 65%, at least 70%, at least 75%, at least 80%, at least 85%, at least 90%, at least 95%, at least 99%, or 100% identical to amino acid sequence YGS, a LCDR3 at least 65%, at least 70%, at least 75%, at least 80%, at least 85%, at least 90%, at least 95%, at least 99%, or 100% identical to SEQ ID NO: 1509, a HCDR1 at least 65%, at least 70%, at least 75%, at least 80%, at least 85%, at least 90%, at least 95%, at least 99%, or 100% identical to SEQ ID NO: 1511, a HCDR2 at least 65%, at least 70%, at least 75%, at least 80%, at least 85%, at least 90%, at least 95%, at least 99%, or 100% identical to SEQ ID NO: 1499, and a HCDR3 at least 65%, at least 70%, at least 75%, at least 80%, at least 85%, at least 90%, at least 95%, at least 99%, or 100% identical to SEQ ID NO: 1500;
[7927] a LCDR1 at least 65%, at least 70%, at least 75%, at least 80%, at least 85%, at least 90%, at least 95%, at least 99%, or 100% identical to SEQ ID NO: 1181, a LCDR2 at least 65%, at least 70%, at least 75%, at least 80%, at least 85%, at least 90%, at least 95%, at least 99%, or 100% identical to amino acid sequence DTS, a LCDR3 at least 65%, at least 70%, at least 75%, at least 80%, at least 85%, at least 90%, at least 95%, at least 99%, or 100% identical to SEQ ID NO: 1513, a HCDR1 at least 65%, at least 70%, at least 75%, at least 80%, at least 85%, at least 90%, at least 95%, at least 99%, or 100% identical to SEQ ID NO: 1515, a HCDR2 at least 65%, at least 70%, at least 75%, at least 80%, at least 85%, at least 90%, at least 95%, at least 99%, or 100% identical to SEQ ID NO: 1516, and a HCDR3 at least 65%, at least 70%, at least 75%, at least 80%, at least 85%, at least 90%, at least 95%, at least 99%, or 100% identical to SEQ ID NO: 1517;
[7928] a LCDR1 at least 65%, at least 70%, at least 75%, at least 80%, at least 85%, at least 90%, at least 95%, at least 99%, or 100% identical to SEQ ID NO: 1519, a LCDR2 at least 65%, at least 70%, at least 75%, at least 80%, at least 85%, at least 90%, at least 95%, at least 99%, or 100% identical to amino acid sequence RTS, a LCDR3 at least 65%, at least 70%, at least 75%, at least 80%, at least 85%, at least 90%, at least 95%, at least 99%, or 100% identical to SEQ ID NO: 1520, a HCDR1 at least 65%, at least 70%, at least 75%, at least 80%, at least 85%, at least 90%, at least 95%, at least 99%, or 100% identical to SEQ ID NO: 1522, a HCDR2 at least 65%, at least 70%, at least 75%, at least 80%, at least 85%, at least 90%, at least 95%, at least 99%, or 100% identical to SEQ ID NO: 1523, and a HCDR3 at least 65%, at least 70%, at least 75%, at least 80%, at least 85%, at least 90%, at least 95%, at least 99%, or 100% identical to SEQ ID NO: 1524;
[7929] a LCDR1 at least 65%, at least 70%, at least 75%, at least 80%, at least 85%, at least 90%, at least 95%, at least 99%, or 100% identical to SEQ ID NO: 1526, a LCDR2 at least 65%, at least 70%, at least 75%, at least 80%, at least 85%, at least 90%, at least 95%, at least 99%, or 100% identical to amino acid sequence GIS, a LCDR3 at least 65%, at least 70%, at least 75%, at least 80%, at least 85%, at least 90%, at least 95%, at least 99%, or 100% identical to SEQ ID NO: 1222, a HCDR1 at least 65%, at least 70%, at least 75%, at least 80%, at least 85%, at least 90%, at least 95%, at least 99%, or 100% identical to SEQ ID NO: 1295, a HCDR2 at least 65%, at least 70%, at least 75%, at least 80%, at least 85%, at least 90%, at least 95%, at least 99%, or 100% identical to SEQ ID NO: 1528, and a HCDR3 at least 65%, at least 70%, at least 75%, at least 80%, at least 85%, at least 90%, at least 95%, at least 99%, or 100% identical to SEQ ID NO: 1529;
[7930] a LCDR1 at least 65%, at least 70%, at least 75%, at least 80%, at least 85%, at least 90%, at least 95%, at least 99%, or 100% identical to SEQ ID NO: 1531, a LCDR2 at least 65%, at least 70%, at least 75%, at least 80%, at least 85%, at least 90%, at least 95%, at least 99%, or 100% identical to amino acid sequence YRS, a LCDR3 at least 65%, at least 70%, at least 75%, at least 80%, at least 85%, at least 90%, at least 95%, at least 99%, or 100% identical to SEQ ID NO: 1532, a HCDR1 at least 65%, at least 70%, at least 75%, at least 80%, at least 85%, at least 90%, at least 95%, at least 99%, or 100% identical to SEQ ID NO: 1534, a HCDR2 at least 65%, at least 70%, at least 75%, at least 80%, at least 85%, at least 90%, at least 95%, at least 99%, or 100% identical to SEQ ID NO: 1535, and a HCDR3 at least 65%, at least 70%, at least 75%, at least 80%, at least 85%, at least 90%, at least 95%, at least 99%, or 100% identical to SEQ ID NO: 1536;
[7931] a LCDR1 at least 65%, at least 70%, at least 75%, at least 80%, at least 85%, at least 90%, at least 95%, at least 99%, or 100% identical to SEQ ID NO: 1538, a LCDR2 at least 65%, at least 70%, at least 75%, at least 80%, at least 85%, at least 90%, at least 95%, at least 99%, or 100% identical to amino acid sequence YTS, a LCDR3 at least 65%, at least 70%, at least 75%, at least 80%, at least 85%, at least 90%, at least 95%, at least 99%, or 100% identical to SEQ ID NO: 1539, a HCDR1 at least 65%, at least 70%, at least 75%, at least 80%, at least 85%, at least 90%, at least 95%, at least 99%, or 100% identical to SEQ ID NO: 1376, a HCDR2 at least 65%, at least 70%, at least 75%, at least 80%, at least 85%, at least 90%, at least 95%, at least 99%, or 100% identical to SEQ ID NO: 1541, and a HCDR3 at least 65%, at least 70%, at least 75%, at least 80%, at least 85%, at least 90%, at least 95%, at least 99%, or 100% identical to SEQ ID NO: 1542;
[7932] a LCDR1 at least 65%, at least 70%, at least 75%, at least 80%, at least 85%, at least 90%, at least 95%, at least 99%, or 100% identical to SEQ ID NO: 1544, a LCDR2 at least 65%, at least 70%, at least 75%, at least 80%, at least 85%, at least 90%, at least 95%, at least 99%, or 100% identical to amino acid sequence AAS, a LCDR3 at least 65%, at least 70%, at least 75%, at least 80%, at least 85%, at least 90%, at least 95%, at least 99%, or 100% identical to SEQ ID NO: 1545, a HCDR1 at least 65%, at least 70%, at least 75%, at least 80%, at least 85%, at least 90%, at least 95%, at least 99%, or 100% identical to SEQ ID NO: 1547, a HCDR2 at least 65%, at least 70%, at least 75%, at least 80%, at least 85%, at least 90%, at least 95%, at least 99%, or 100% identical to SEQ ID NO: 1548, and a HCDR3 at least 65%, at least 70%, at least 75%, at least 80%, at least 85%, at least 90%, at least 95%, at least 99%, or 100% identical to SEQ ID NO: 1549;
[7933] a LCDR1 at least 65%, at least 70%, at least 75%, at least 80%, at least 85%, at least 90%, at least 95%, at least 99%, or 100% identical to SEQ ID NO: 1228, a LCDR2 at least 65%, at least 70%, at least 75%, at least 80%, at least 85%, at least 90%, at least 95%, at least 99%, or 100% identical to amino acid sequence YTS, a LCDR3 at least 65%, at least 70%, at least 75%, at least 80%, at least 85%, at least 90%, at least 95%, at least 99%, or 100% identical to SEQ ID NO: 1229, a HCDR1 at least 65%, at least 70%, at least 75%, at least 80%, at least 85%, at least 90%, at least 95%, at least 99%, or 100% identical to SEQ ID NO: 1552, a HCDR2 at least 65%, at least 70%, at least 75%, at least 80%, at least 85%, at least 90%, at least 95%, at least 99%, or 100% identical to SEQ ID NO: 1553, and a HCDR3 at least 65%, at least 70%, at least 75%, at least 80%, at least 85%, at least 90%, at least 95%, at least 99%, or 100% identical to SEQ ID NO: 1554;
[7934] a LCDR1 at least 65%, at least 70%, at least 75%, at least 80%, at least 85%, at least 90%, at least 95%, at least 99%, or 100% identical to SEQ ID NO: 1556, a LCDR2 at least 65%, at least 70%, at least 75%, at least 80%, at least 85%, at least 90%, at least 95%, at least 99%, or 100% identical to amino acid sequence WAS, a LCDR3 at least 65%, at least 70%, at least 75%, at least 80%, at least 85%, at least 90%, at least 95%, at least 99%, or 100% identical to SEQ ID NO: 1557, a HCDR1 at least 65%, at least 70%, at least 75%, at least 80%, at least 85%, at least 90%, at least 95%, at least 99%, or 100% identical to SEQ ID NO: 1534, a HCDR2 at least 65%, at least 70%, at least 75%, at least 80%, at least 85%, at least 90%, at least 95%, at least 99%, or 100% identical to SEQ ID NO: 1559, and a HCDR3 at least 65%, at least 70%, at least 75%, at least 80%, at least 85%, at least 90%, at least 95%, at least 99%, or 100% identical to SEQ ID NO: 1560;
[7935] a LCDR1 at least 65%, at least 70%, at least 75%, at least 80%, at least 85%, at least 90%, at least 95%, at least 99%, or 100% identical to SEQ ID NO: 1188, a LCDR2 at least 65%, at least 70%, at least 75%, at least 80%, at least 85%, at least 90%, at least 95%, at least 99%, or 100% identical to amino acid sequence DAS, a LCDR3 at least 65%, at least 70%, at least 75%, at least 80%, at least 85%, at least 90%, at least 95%, at least 99%, or 100% identical to SEQ ID NO: 1562, a HCDR1 at least 65%, at least 70%, at least 75%, at least 80%, at least 85%, at least 90%, at least 95%, at least 99%, or 100% identical to SEQ ID NO: 1564, a HCDR2 at least 65%, at least 70%, at least 75%, at least 80%, at least 85%, at least 90%, at least 95%, at least 99%, or 100% identical to SEQ ID NO: 1565, and a HCDR3 at least 65%, at least 70%, at least 75%, at least 80%, at least 85%, at least 90%, at least 95%, at least 99%, or 100% identical to SEQ ID NO: 1566;
[7936] a LCDR1 at least 65%, at least 70%, at least 75%, at least 80%, at least 85%, at least 90%, at least 95%, at least 99%, or 100% identical to SEQ ID NO: 1568, a LCDR2 at least 65%, at least 70%, at least 75%, at least 80%, at least 85%, at least 90%, at least 95%, at least 99%, or 100% identical to amino acid sequence LAS, a LCDR3 at least 65%, at least 70%, at least 75%, at least 80%, at least 85%, at least 90%, at least 95%, at least 99%, or 100% identical to SEQ ID NO: 1569, a HCDR1 at least 65%, at least 70%, at least 75%, at least 80%, at least 85%, at least 90%, at least 95%, at least 99%, or 100% identical to SEQ ID NO: 1355, a HCDR2 at least 65%, at least 70%, at least 75%, at least 80%, at least 85%, at least 90%, at least 95%, at least 99%, or 100% identical to SEQ ID NO: 1571, and a HCDR3 at least 65%, at least 70%, at least 75%, at least 80%, at least 85%, at least 90%, at least 95%, at least 99%, or 100% identical to SEQ ID NO: 1572;
[7937] a LCDR1 at least 65%, at least 70%, at least 75%, at least 80%, at least 85%, at least 90%, at least 95%, at least 99%, or 100% identical to SEQ ID NO: 1574, a LCDR2 at least 65%, at least 70%, at least 75%, at least 80%, at least 85%, at least 90%, at least 95%, at least 99%, or 100% identical to amino acid sequence AAS, a LCDR3 at least 65%, at least 70%, at least 75%, at least 80%, at least 85%, at least 90%, at least 95%, at least 99%, or 100% identical to SEQ ID NO: 1575, a HCDR1 at least 65%, at least 70%, at least 75%, at least 80%, at least 85%, at least 90%, at least 95%, at least 99%, or 100% identical to SEQ ID NO: 1577, a HCDR2 at least 65%, at least 70%, at least 75%, at least 80%, at least 85%, at least 90%, at least 95%, at least 99%, or 100% identical to SEQ ID NO: 1578, and a HCDR3 at least 65%, at least 70%, at least 75%, at least 80%, at least 85%, at least 90%, at least 95%, at least 99%, or 100% identical to SEQ ID NO: 1579;
[7938] a LCDR1 at least 65%, at least 70%, at least 75%, at least 80%, at least 85%, at least 90%, at least 95%, at least 99%, or 100% identical to SEQ ID NO: 1581, a LCDR2 at least 65%, at least 70%, at least 75%, at least 80%, at least 85%, at least 90%, at least 95%, at least 99%, or 100% identical to amino acid sequence AAS, a LCDR3 at least 65%, at least 70%, at least 75%, at least 80%, at least 85%, at least 90%, at least 95%, at least 99%, or 100% identical to SEQ ID NO: 1582, a HCDR1 at least 65%, at least 70%, at least 75%, at least 80%, at least 85%, at least 90%, at least 95%, at least 99%, or 100% identical to SEQ ID NO: 1584, a HCDR2 at least 65%, at least 70%, at least 75%, at least 80%, at least 85%, at least 90%, at least 95%, at least 99%, or 100% identical to SEQ ID NO: 1585, and a HCDR3 at least 65%, at least 70%, at least 75%, at least 80%, at least 85%, at least 90%, at least 95%, at least 99%, or 100% identical to SEQ ID NO: 1586;
[7939] a LCDR1 at least 65%, at least 70%, at least 75%, at least 80%, at least 85%, at least 90%, at least 95%, at least 99%, or 100% identical to SEQ ID NO: 1188, a LCDR2 at least 65%, at least 70%, at least 75%, at least 80%, at least 85%, at least 90%, at least 95%, at least 99%, or 100% identical to amino acid sequence DAS, a LCDR3 at least 65%, at least 70%, at least 75%, at least 80%, at least 85%, at least 90%, at least 95%, at least 99%, or 100% identical to SEQ ID NO: 1588, a HCDR1 at least 65%, at least 70%, at least 75%, at least 80%, at least 85%, at least 90%, at least 95%, at least 99%, or 100% identical to SEQ ID NO: 1590, a HCDR2 at least 65%, at least 70%, at least 75%, at least 80%, at least 85%, at least 90%, at least 95%, at least 99%, or 100% identical to SEQ ID NO: 1591, and a HCDR3 at least 65%, at least 70%, at least 75%, at least 80%, at least 85%, at least 90%, at least 95%, at least 99%, or 100% identical to SEQ ID NO: 1592;
[7940] a LCDR1 at least 65%, at least 70%, at least 75%, at least 80%, at least 85%, at least 90%, at least 95%, at least 99%, or 100% identical to SEQ ID NO: 1594, a LCDR2 at least 65%, at least 70%, at least 75%, at least 80%, at least 85%, at least 90%, at least 95%, at least 99%, or 100% identical to amino acid sequence SAS, a LCDR3 at least 65%, at least 70%, at least 75%, at least 80%, at least 85%, at least 90%, at least 95%, at least 99%, or 100% identical to SEQ ID NO: 1595, a HCDR1 at least 65%, at least 70%, at least 75%, at least 80%, at least 85%, at least 90%, at least 95%, at least 99%, or 100% identical to SEQ ID NO: 1597, a HCDR2 at least 65%, at least 70%, at least 75%, at least 80%, at least 85%, at least 90%, at least 95%, at least 99%, or 100% identical to SEQ ID NO: 1598, and a HCDR3 at least 65%, at least 70%, at least 75%, at least 80%, at least 85%, at least 90%, at least 95%, at least 99%, or 100% identical to SEQ ID NO: 1599;
[7941] a LCDR1 at least 65%, at least 70%, at least 75%, at least 80%, at least 85%, at least 90%, at least 95%, at least 99%, or 100% identical to SEQ ID NO: 1601, a LCDR2 at least 65%, at least 70%, at least 75%, at least 80%, at least 85%, at least 90%, at least 95%, at least 99%, or 100% identical to amino acid sequence DVS, a LCDR3 at least 65%, at least 70%, at least 75%, at least 80%, at least 85%, at least 90%, at least 95%, at least 99%, or 100% identical to SEQ ID NO: 1602, a HCDR1 at least 65%, at least 70%, at least 75%, at least 80%, at least 85%, at least 90%, at least 95%, at least 99%, or 100% identical to SEQ ID NO: 1604, a HCDR2 at least 65%, at least 70%, at least 75%, at least 80%, at least 85%, at least 90%, at least 95%, at least 99%, or 100% identical to SEQ ID NO: 1605, and a HCDR3 at least 65%, at least 70%, at least 75%, at least 80%, at least 85%, at least 90%, at least 95%, at least 99%, or 100% identical to SEQ ID NO: 1606;
[7942] a LCDR1 at least 65%, at least 70%, at least 75%, at least 80%, at least 85%, at least 90%, at least 95%, at least 99%, or 100% identical to SEQ ID NO: 1608, a LCDR2 at least 65%, at least 70%, at least 75%, at least 80%, at least 85%, at least 90%, at least 95%, at least 99%, or 100% identical to amino acid sequence DAS, a LCDR3 at least 65%, at least 70%, at least 75%, at least 80%, at least 85%, at least 90%, at least 95%, at least 99%, or 100% identical to SEQ ID NO: 1609, a HCDR1 at least 65%, at least 70%, at least 75%, at least 80%, at least 85%, at least 90%, at least 95%, at least 99%, or 100% identical to SEQ ID NO: 1611, a HCDR2 at least 65%, at least 70%, at least 75%, at least 80%, at least 85%, at least 90%, at least 95%, at least 99%, or 100% identical to SEQ ID NO: 1612, and a HCDR3 at least 65%, at least 70%, at least 75%, at least 80%, at least 85%, at least 90%, at least 95%, at least 99%, or 100% identical to SEQ ID NO: 1613;
[7943] a LCDR1 at least 65%, at least 70%, at least 75%, at least 80%, at least 85%, at least 90%, at least 95%, at least 99%, or 100% identical to SEQ ID NO: 1615, a LCDR2 at least 65%, at least 70%, at least 75%, at least 80%, at least 85%, at least 90%, at least 95%, at least 99%, or 100% identical to amino acid sequence GAS, a LCDR3 at least 65%, at least 70%, at least 75%, at least 80%, at least 85%, at least 90%, at least 95%, at least 99%, or 100% identical to SEQ ID NO: 1616, a HCDR1 at least 65%, at least 70%, at least 75%, at least 80%, at least 85%, at least 90%, at least 95%, at least 99%, or 100% identical to SEQ ID NO: 1618, a HCDR2 at least 65%, at least 70%, at least 75%, at least 80%, at least 85%, at least 90%, at least 95%, at least 99%, or 100% identical to SEQ ID NO: 1619, and a HCDR3 at least 65%, at least 70%, at least 75%, at least 80%, at least 85%, at least 90%, at least 95%, at least 99%, or 100% identical to SEQ ID NO: 1620;
[7944] a LCDR1 at least 65%, at least 70%, at least 75%, at least 80%, at least 85%, at least 90%, at least 95%, at least 99%, or 100% identical to SEQ ID NO: 1622, a LCDR2 at least 65%, at least 70%, at least 75%, at least 80%, at least 85%, at least 90%, at least 95%, at least 99%, or 100% identical to amino acid sequence WAS, a LCDR3 at least 65%, at least 70%, at least 75%, at least 80%, at least 85%, at least 90%, at least 95%, at least 99%, or 100% identical to SEQ ID NO: 1623, a HCDR1 at least 65%, at least 70%, at least 75%, at least 80%, at least 85%, at least 90%, at least 95%, at least 99%, or 100% identical to SEQ ID NO: 1625, a HCDR2 at least 65%, at least 70%, at least 75%, at least 80%, at least 85%, at least 90%, at least 95%, at least 99%, or 100% identical to SEQ ID NO: 1626, and a HCDR3 at least 65%, at least 70%, at least 75%, at least 80%, at least 85%, at least 90%, at least 95%, at least 99%, or 100% identical to SEQ ID NO: 1627;
[7945] a LCDR1 at least 65%, at least 70%, at least 75%, at least 80%, at least 85%, at least 90%, at least 95%, at least 99%, or 100% identical to SEQ ID NO: 1629, a LCDR2 at least 65%, at least 70%, at least 75%, at least 80%, at least 85%, at least 90%, at least 95%, at least 99%, or 100% identical to amino acid sequence YAS, a LCDR3 at least 65%, at least 70%, at least 75%, at least 80%, at least 85%, at least 90%, at least 95%, at least 99%, or 100% identical to SEQ ID NO: 1630, a HCDR1 at least 65%, at least 70%, at least 75%, at least 80%, at least 85%, at least 90%, at least 95%, at least 99%, or 100% identical to SEQ ID NO: 1632, a HCDR2 at least 65%, at least 70%, at least 75%, at least 80%, at least 85%, at least 90%, at least 95%, at least 99%, or 100% identical to SEQ ID NO: 1633, and a HCDR3 at least 65%, at least 70%, at least 75%, at least 80%, at least 85%, at least 90%, at least 95%, at least 99%, or 100% identical to SEQ ID NO: 1634;
[7946] a LCDR1 at least 65%, at least 70%, at least 75%, at least 80%, at least 85%, at least 90%, at least 95%, at least 99%, or 100% identical to SEQ ID NO: 1636, a LCDR2 at least 65%, at least 70%, at least 75%, at least 80%, at least 85%, at least 90%, at least 95%, at least 99%, or 100% identical to amino acid sequence AAS, a LCDR3 at least 65%, at least 70%, at least 75%, at least 80%, at least 85%, at least 90%, at least 95%, at least 99%, or 100% identical to SEQ ID NO: 1637, a HCDR1 at least 65%, at least 70%, at least 75%, at least 80%, at least 85%, at least 90%, at least 95%, at least 99%, or 100% identical to SEQ ID NO: 1639, a HCDR2 at least 65%, at least 70%, at least 75%, at least 80%, at least 85%, at least 90%, at least 95%, at least 99%, or 100% identical to SEQ ID NO: 1640, and a HCDR3 at least 65%, at least 70%, at least 75%, at least 80%, at least 85%, at least 90%, at least 95%, at least 99%, or 100% identical to SEQ ID NO: 1641;
[7947] a LCDR1 at least 65%, at least 70%, at least 75%, at least 80%, at least 85%, at least 90%, at least 95%, at least 99%, or 100% identical to SEQ ID NO: 1643, a LCDR2 at least 65%, at least 70%, at least 75%, at least 80%, at least 85%, at least 90%, at least 95%, at least 99%, or 100% identical to amino acid sequence SAS, a LCDR3 at least 65%, at least 70%, at least 75%, at least 80%, at least 85%, at least 90%, at least 95%, at least 99%, or 100% identical to SEQ ID NO: 1644, a HCDR1 at least 65%, at least 70%, at least 75%, at least 80%, at least 85%, at least 90%, at least 95%, at least 99%, or 100% identical to SEQ ID NO: 1646, a HCDR2 at least 65%, at least 70%, at least 75%, at least 80%, at least 85%, at least 90%, at least 95%, at least 99%, or 100% identical to SEQ ID NO: 1647, and a HCDR3 at least 65%, at least 70%, at least 75%, at least 80%, at least 85%, at least 90%, at least 95%, at least 99%, or 100% identical to SEQ ID NO: 1648;
[7948] a LCDR1 at least 65%, at least 70%, at least 75%, at least 80%, at least 85%, at least 90%, at least 95%, at least 99%, or 100% identical to SEQ ID NO: 1650, a LCDR2 at least 65%, at least 70%, at least 75%, at least 80%, at least 85%, at least 90%, at least 95%, at least 99%, or 100% identical to amino acid sequence DAS, a LCDR3 at least 65%, at least 70%, at least 75%, at least 80%, at least 85%, at least 90%, at least 95%, at least 99%, or 100% identical to SEQ ID NO: 1651, a HCDR1 at least 65%, at least 70%, at least 75%, at least 80%, at least 85%, at least 90%, at least 95%, at least 99%, or 100% identical to SEQ ID NO: 1653, a HCDR2 at least 65%, at least 70%, at least 75%, at least 80%, at least 85%, at least 90%, at least 95%, at least 99%, or 100% identical to SEQ ID NO: 1654, and a HCDR3 at least 65%, at least 70%, at least 75%, at least 80%, at least 85%, at least 90%, at least 95%, at least 99%, or 100% identical to SEQ ID NO: 1655;
[7949] a LCDR1 at least 65%, at least 70%, at least 75%, at least 80%, at least 85%, at least 90%, at least 95%, at least 99%, or 100% identical to SEQ ID NO: 1657, a LCDR2 at least 65%, at least 70%, at least 75%, at least 80%, at least 85%, at least 90%, at least 95%, at least 99%, or 100% identical to amino acid sequence DDS, a LCDR3 at least 65%, at least 70%, at least 75%, at least 80%, at least 85%, at least 90%, at least 95%, at least 99%, or 100% identical to SEQ ID NO: 1658, a HCDR1 at least 65%, at least 70%, at least 75%, at least 80%, at least 85%, at least 90%, at least 95%, at least 99%, or 100% identical to SEQ ID NO: 1660, a HCDR2 at least 65%, at least 70%, at least 75%, at least 80%, at least 85%, at least 90%, at least 95%, at least 99%, or 100% identical to SEQ ID NO: 1323, and a HCDR3 at least 65%, at least 70%, at least 75%, at least 80%, at least 85%, at least 90%, at least 95%, at least 99%, or 100% identical to SEQ ID NO: 1661;
[7950] a LCDR1 at least 65%, at least 70%, at least 75%, at least 80%, at least 85%, at least 90%, at least 95%, at least 99%, or 100% identical to SEQ ID NO: 1228, a LCDR2 at least 65%, at least 70%, at least 75%, at least 80%, at least 85%, at least 90%, at least 95%, at least 99%, or 100% identical to amino acid sequence FTS, a LCDR3 at least 65%, at least 70%, at least 75%, at least 80%, at least 85%, at least 90%, at least 95%, at least 99%, or 100% identical to SEQ ID NO: 1663, a HCDR1 at least 65%, at least 70%, at least 75%, at least 80%, at least 85%, at least 90%, at least 95%, at least 99%, or 100% identical to SEQ ID NO: 1665, a HCDR2 at least 65%, at least 70%, at least 75%, at least 80%, at least 85%, at least 90%, at least 95%, at least 99%, or 100% identical to SEQ ID NO: 1666, and a HCDR3 at least 65%, at least 70%, at least 75%, at least 80%, at least 85%, at least 90%, at least 95%, at least 99%, or 100% identical to SEQ ID NO: 1667;
[7951] a LCDR1 at least 65%, at least 70%, at least 75%, at least 80%, at least 85%, at least 90%, at least 95%, at least 99%, or 100% identical to SEQ ID NO: 1228, a LCDR2 at least 65%, at least 70%, at least 75%, at least 80%, at least 85%, at least 90%, at least 95%, at least 99%, or 100% identical to amino acid sequence FTS, a LCDR3 at least 65%, at least 70%, at least 75%, at least 80%, at least 85%, at least 90%, at least 95%, at least 99%, or 100% identical to SEQ ID NO: 1663, a HCDR1 at least 65%, at least 70%, at least 75%, at least 80%, at least 85%, at least 90%, at least 95%, at least 99%, or 100% identical to SEQ ID NO: 1203, a HCDR2 at least 65%, at least 70%, at least 75%, at least 80%, at least 85%, at least 90%, at least 95%, at least 99%, or 100% identical to SEQ ID NO: 1666, and a HCDR3 at least 65%, at least 70%, at least 75%, at least 80%, at least 85%, at least 90%, at least 95%, at least 99%, or 100% identical to SEQ ID NO: 1670;
[7952] a LCDR1 at least 65%, at least 70%, at least 75%, at least 80%, at least 85%, at least 90%, at least 95%, at least 99%, or 100% identical to SEQ ID NO: 1672, a LCDR2 at least 65%, at least 70%, at least 75%, at least 80%, at least 85%, at least 90%, at least 95%, at least 99%, or 100% identical to amino acid sequence DAS, a LCDR3 at least 65%, at least 70%, at least 75%, at least 80%, at least 85%, at least 90%, at least 95%, at least 99%, or 100% identical to SEQ ID NO: 1673, a HCDR1 at least 65%, at least 70%, at least 75%, at least 80%, at least 85%, at least 90%, at least 95%, at least 99%, or 100% identical to SEQ ID NO: 1675, a HCDR2 at least 65%, at least 70%, at least 75%, at least 80%, at least 85%, at least 90%, at least 95%, at least 99%, or 100% identical to SEQ ID NO: 1676, and a HCDR3 at least 65%, at least 70%, at least 75%, at least 80%, at least 85%, at least 90%, at least 95%, at least 99%, or 100% identical to SEQ ID NO: 1677;
[7953] a LCDR1 at least 65%, at least 70%, at least 75%, at least 80%, at least 85%, at least 90%, at least 95%, at least 99%, or 100% identical to SEQ ID NO: 1679, a LCDR2 at least 65%, at least 70%, at least 75%, at least 80%, at least 85%, at least 90%, at least 95%, at least 99%, or 100% identical to SEQ ID NO: 1680, a LCDR3 at least 65%, at least 70%, at least 75%, at least 80%, at least 85%, at least 90%, at least 95%, at least 99%, or 100% identical to SEQ ID NO: 1681, a HCDR1 at least 65%, at least 70%, at least 75%, at least 80%, at least 85%, at least 90%, at least 95%, at least 99%, or 100% identical to SEQ ID NO: 1683, a HCDR2 at least 65%, at least 70%, at least 75%, at least 80%, at least 85%, at least 90%, at least 95%, at least 99%, or 100% identical to SEQ ID NO: 1684, and a HCDR3 at least 65%, at least 70%, at least 75%, at least 80%, at least 85%, at least 90%, at least 95%, at least 99%, or 100% identical to SEQ ID NO: 1685;
[7954] a LCDR1 at least 65%, at least 70%, at least 75%, at least 80%, at least 85%, at least 90%, at least 95%, at least 99%, or 100% identical to SEQ ID NO: 1679, a LCDR2 at least 65%, at least 70%, at least 75%, at least 80%, at least 85%, at least 90%, at least 95%, at least 99%, or 100% identical to SEQ ID NO: 1680, a LCDR3 at least 65%, at least 70%, at least 75%, at least 80%, at least 85%, at least 90%, at least 95%, at least 99%, or 100% identical to SEQ ID NO: 1681, a HCDR1 at least 65%, at least 70%, at least 75%, at least 80%, at least 85%, at least 90%, at least 95%, at least 99%, or 100% identical to SEQ ID NO: 1295, a HCDR2 at least 65%, at least 70%, at least 75%, at least 80%, at least 85%, at least 90%, at least 95%, at least 99%, or 100% identical to SEQ ID NO: 1687, and a HCDR3 at least 65%, at least 70%, at least 75%, at least 80%, at least 85%, at least 90%, at least 95%, at least 99%, or 100% identical to SEQ ID NO: 1688;
[7955] a LCDR1 at least 65%, at least 70%, at least 75%, at least 80%, at least 85%, at least 90%, at least 95%, at least 99%, or 100% identical to SEQ ID NO: 1689, a LCDR2 at least 65%, at least 70%, at least 75%, at least 80%, at least 85%, at least 90%, at least 95%, at least 99%, or 100% identical to SEQ ID NO: 1690, a LCDR3 at least 65%, at least 70%, at least 75%, at least 80%, at least 85%, at least 90%, at least 95%, at least 99%, or 100% identical to SEQ ID NO: 1691, a HCDR1 at least 65%, at least 70%, at least 75%, at least 80%, at least 85%, at least 90%, at least 95%, at least 99%, or 100% identical to SEQ ID NO: 1693, a HCDR2 at least 65%, at least 70%, at least 75%, at least 80%, at least 85%, at least 90%, at least 95%, at least 99%, or 100% identical to SEQ ID NO: 1694, and a HCDR3 at least 65%, at least 70%, at least 75%, at least 80%, at least 85%, at least 90%, at least 95%, at least 99%, or 100% identical to SEQ ID NO: 1695;
[7956] a LCDR1 at least 65%, at least 70%, at least 75%, at least 80%, at least 85%, at least 90%, at least 95%, at least 99%, or 100% identical to SEQ ID NO: 1697, a LCDR2 at least 65%, at least 70%, at least 75%, at least 80%, at least 85%, at least 90%, at least 95%, at least 99%, or 100% identical to SEQ ID NO: 1698, a LCDR3 at least 65%, at least 70%, at least 75%, at least 80%, at least 85%, at least 90%, at least 95%, at least 99%, or 100% identical to SEQ ID NO: 1699, a HCDR1 at least 65%, at least 70%, at least 75%, at least 80%, at least 85%, at least 90%, at least 95%, at least 99%, or 100% identical to SEQ ID NO: 1701, a HCDR2 at least 65%, at least 70%, at least 75%, at least 80%, at least 85%, at least 90%, at least 95%, at least 99%, or 100% identical to SEQ ID NO: 1702, and a HCDR3 at least 65%, at least 70%, at least 75%, at least 80%, at least 85%, at least 90%, at least 95%, at least 99%, or 100% identical to SEQ ID NO: 1703;
[7957] a LCDR1 at least 65%, at least 70%, at least 75%, at least 80%, at least 85%, at least 90%, at least 95%, at least 99%, or 100% identical to SEQ ID NO: 1538, a LCDR2 at least 65%, at least 70%, at least 75%, at least 80%, at least 85%, at least 90%, at least 95%, at least 99%, or 100% identical to amino acid sequence YTS, a LCDR3 at least 65%, at least 70%, at least 75%, at least 80%, at least 85%, at least 90%, at least 95%, at least 99%, or 100% identical to SEQ ID NO: 1691, a HCDR1 at least 65%, at least 70%, at least 75%, at least 80%, at least 85%, at least 90%, at least 95%, at least 99%, or 100% identical to SEQ ID NO: 1705, a HCDR2 at least 65%, at least 70%, at least 75%, at least 80%, at least 85%, at least 90%, at least 95%, at least 99%, or 100% identical to SEQ ID NO: 1706, and a HCDR3 at least 65%, at least 70%, at least 75%, at least 80%, at least 85%, at least 90%, at least 95%, at least 99%, or 100% identical to SEQ ID NO: 1707;
[7958] a LCDR1 at least 65%, at least 70%, at least 75%, at least 80%, at least 85%, at least 90%, at least 95%, at least 99%, or 100% identical to SEQ ID NO: 1708, a LCDR2 at least 65%, at least 70%, at least 75%, at least 80%, at least 85%, at least 90%, at least 95%, at least 99%, or 100% identical to SEQ ID NO: 1709, a LCDR3 at least 65%, at least 70%, at least 75%, at least 80%, at least 85%, at least 90%, at least 95%, at least 99%, or 100% identical to SEQ ID NO: 1710, a HCDR1 at least 65%, at least 70%, at least 75%, at least 80%, at least 85%, at least 90%, at least 95%, at least 99%, or 100% identical to SEQ ID NO: 1683, a HCDR2 at least 65%, at least 70%, at least 75%, at least 80%, at least 85%, at least 90%, at least 95%, at least 99%, or 100% identical to SEQ ID NO: 1712, and a HCDR3 at least 65%, at least 70%, at least 75%, at least 80%, at least 85%, at least 90%, at least 95%, at least 99%, or 100% identical to SEQ ID NO: 1713;
[7959] a LCDR1 at least 65%, at least 70%, at least 75%, at least 80%, at least 85%, at least 90%, at least 95%, at least 99%, or 100% identical to SEQ ID NO: 1715, a LCDR2 at least 65%, at least 70%, at least 75%, at least 80%, at least 85%, at least 90%, at least 95%, at least 99%, or 100% identical to SEQ ID NO: 1709, a LCDR3 at least 65%, at least 70%, at least 75%, at least 80%, at least 85%, at least 90%, at least 95%, at least 99%, or 100% identical to SEQ ID NO: 1710, a HCDR1 at least 65%, at least 70%, at least 75%, at least 80%, at least 85%, at least 90%, at least 95%, at least 99%, or 100% identical to SEQ ID NO: 1716, a HCDR2 at least 65%, at least 70%, at least 75%, at least 80%, at least 85%, at least 90%, at least 95%, at least 99%, or 100% identical to SEQ ID NO: 1717, and a HCDR3 at least 65%, at least 70%, at least 75%, at least 80%, at least 85%, at least 90%, at least 95%, at least 99%, or 100% identical to SEQ ID NO: 1713;
[7960] a LCDR1 at least 65%, at least 70%, at least 75%, at least 80%, at least 85%, at least 90%, at least 95%, at least 99%, or 100% identical to SEQ ID NO: 1718, a LCDR2 at least 65%, at least 70%, at least 75%, at least 80%, at least 85%, at least 90%, at least 95%, at least 99%, or 100% identical to SEQ ID NO: 1709, a LCDR3 at least 65%, at least 70%, at least 75%, at least 80%, at least 85%, at least 90%, at least 95%, at least 99%, or 100% identical to SEQ ID NO: 1710, a HCDR1 at least 65%, at least 70%, at least 75%, at least 80%, at least 85%, at least 90%, at least 95%, at least 99%, or 100% identical to SEQ ID NO: 1719, a HCDR2 at least 65%, at least 70%, at least 75%, at least 80%, at least 85%, at least 90%, at least 95%, at least 99%, or 100% identical to SEQ ID NO: 1720, and a HCDR3 at least 65%, at least 70%, at least 75%, at least 80%, at least 85%, at least 90%, at least 95%, at least 99%, or 100% identical to SEQ ID NO: 1713;
[7961] a LCDR1 at least 65%, at least 70%, at least 75%, at least 80%, at least 85%, at least 90%, at least 95%, at least 99%, or 100% identical to SEQ ID NO: 1718, a LCDR2 at least 65%, at least 70%, at least 75%, at least 80%, at least 85%, at least 90%, at least 95%, at least 99%, or 100% identical to SEQ ID NO: 1709, a LCDR3 at least 65%, at least 70%, at least 75%, at least 80%, at least 85%, at least 90%, at least 95%, at least 99%, or 100% identical to SEQ ID NO: 1710, a HCDR1 at least 65%, at least 70%, at least 75%, at least 80%, at least 85%, at least 90%, at least 95%, at least 99%, or 100% identical to SEQ ID NO: 1719, a HCDR2 at least 65%, at least 70%, at least 75%, at least 80%, at least 85%, at least 90%, at least 95%, at least 99%, or 100% identical to SEQ ID NO: 1720, and a HCDR3 at least 65%, at least 70%, at least 75%, at least 80%, at least 85%, at least 90%, at least 95%, at least 99%, or 100% identical to SEQ ID NO: 1713;
[7962] a LCDR1 at least 65%, at least 70%, at least 75%, at least 80%, at least 85%, at least 90%, at least 95%, at least 99%, or 100% identical to SEQ ID NO: 1723, a LCDR2 at least 65%, at least 70%, at least 75%, at least 80%, at least 85%, at least 90%, at least 95%, at least 99%, or 100% identical to SEQ ID NO: 1709, a LCDR3 at least 65%, at least 70%, at least 75%, at least 80%, at least 85%, at least 90%, at least 95%, at least 99%, or 100% identical to SEQ ID NO: 1710, a HCDR1 at least 65%, at least 70%, at least 75%, at least 80%, at least 85%, at least 90%, at least 95%, at least 99%, or 100% identical to SEQ ID NO: 1716, a HCDR2 at least 65%, at least 70%, at least 75%, at least 80%, at least 85%, at least 90%, at least 95%, at least 99%, or 100% identical to SEQ ID NO: 1725, and a HCDR3 at least 65%, at least 70%, at least 75%, at least 80%, at least 85%, at least 90%, at least 95%, at least 99%, or 100% identical to SEQ ID NO: 1713;
[7963] a LCDR1 at least 65%, at least 70%, at least 75%, at least 80%, at least 85%, at least 90%, at least 95%, at least 99%, or 100% identical to SEQ ID NO: 1727, a LCDR2 at least 65%, at least 70%, at least 75%, at least 80%, at least 85%, at least 90%, at least 95%, at least 99%, or 100% identical to SEQ ID NO: 1728, a LCDR3 at least 65%, at least 70%, at least 75%, at least 80%, at least 85%, at least 90%, at least 95%, at least 99%, or 100% identical to SEQ ID NO: 1729, a HCDR1 at least 65%, at least 70%, at least 75%, at least 80%, at least 85%, at least 90%, at least 95%, at least 99%, or 100% identical to SEQ ID NO: 1731, a HCDR2 at least 65%, at least 70%, at least 75%, at least 80%, at least 85%, at least 90%, at least 95%, at least 99%, or 100% identical to SEQ ID NO: 1732, and a HCDR3 at least 65%, at least 70%, at least 75%, at least 80%, at least 85%, at least 90%, at least 95%, at least 99%, or 100% identical to SEQ ID NO: 1733;
[7964] a LCDR1 at least 65%, at least 70%, at least 75%, at least 80%, at least 85%, at least 90%, at least 95%, at least 99%, or 100% identical to SEQ ID NO: 1727, a LCDR2 at least 65%, at least 70%, at least 75%, at least 80%, at least 85%, at least 90%, at least 95%, at least 99%, or 100% identical to SEQ ID NO: 1728, a LCDR3 at least 65%, at least 70%, at least 75%, at least 80%, at least 85%, at least 90%, at least 95%, at least 99%, or 100% identical to SEQ ID NO: 1735, a HCDR1 at least 65%, at least 70%, at least 75%, at least 80%, at least 85%, at least 90%, at least 95%, at least 99%, or 100% identical to SEQ ID NO: 1736, a HCDR2 at least 65%, at least 70%, at least 75%, at least 80%, at least 85%, at least 90%, at least 95%, at least 99%, or 100% identical to SEQ ID NO: 1737, and a HCDR3 at least 65%, at least 70%, at least 75%, at least 80%, at least 85%, at least 90%, at least 95%, at least 99%, or 100% identical to SEQ ID NO: 1733;
[7965] a LCDR1 at least 65%, at least 70%, at least 75%, at least 80%, at least 85%, at least 90%, at least 95%, at least 99%, or 100% identical to SEQ ID NO: 1738, a LCDR2 at least 65%, at least 70%, at least 75%, at least 80%, at least 85%, at least 90%, at least 95%, at least 99%, or 100% identical to SEQ ID NO: 1739, a LCDR3 at least 65%, at least 70%, at least 75%, at least 80%, at least 85%, at least 90%, at least 95%, at least 99%, or 100% identical to SEQ ID NO: 1729, a HCDR1 at least 65%, at least 70%, at least 75%, at least 80%, at least 85%, at least 90%, at least 95%, at least 99%, or 100% identical to SEQ ID NO: 1736, a HCDR2 at least 65%, at least 70%, at least 75%, at least 80%, at least 85%, at least 90%, at least 95%, at least 99%, or 100% identical to SEQ ID NO: 1741, and a HCDR3 at least 65%, at least 70%, at least 75%, at least 80%, at least 85%, at least 90%, at least 95%, at least 99%, or 100% identical to SEQ ID NO: 1733;
[7966] a LCDR1 at least 65%, at least 70%, at least 75%, at least 80%, at least 85%, at least 90%, at least 95%, at least 99%, or 100% identical to SEQ ID NO: 1743, a LCDR2 at least 65%, at least 70%, at least 75%, at least 80%, at least 85%, at least 90%, at least 95%, at least 99%, or 100% identical to SEQ ID NO: 1744, a LCDR3 at least 65%, at least 70%, at least 75%, at least 80%, at least 85%, at least 90%, at least 95%, at least 99%, or 100% identical to SEQ ID NO: 1745, a HCDR1 at least 65%, at least 70%, at least 75%, at least 80%, at least 85%, at least 90%, at least 95%, at least 99%, or 100% identical to SEQ ID NO: 1747, a HCDR2 at least 65%, at least 70%, at least 75%, at least 80%, at least 85%, at least 90%, at least 95%, at least 99%, or 100% identical to SEQ ID NO: 1748, and a HCDR3 at least 65%, at least 70%, at least 75%, at least 80%, at least 85%, at least 90%, at least 95%, at least 99%, or 100% identical to SEQ ID NO: 1749;
[7967] a LCDR1 at least 65%, at least 70%, at least 75%, at least 80%, at least 85%, at least 90%, at least 95%, at least 99%, or 100% identical to SEQ ID NO: 1743, a LCDR2 at least 65%, at least 70%, at least 75%, at least 80%, at least 85%, at least 90%, at least 95%, at least 99%, or 100% identical to SEQ ID NO: 1744, a LCDR3 at least 65%, at least 70%, at least 75%, at least 80%, at least 85%, at least 90%, at least 95%, at least 99%, or 100% identical to SEQ ID NO: 1751, a HCDR1 at least 65%, at least 70%, at least 75%, at least 80%, at least 85%, at least 90%, at least 95%, at least 99%, or 100% identical to SEQ ID NO: 1747, a HCDR2 at least 65%, at least 70%, at least 75%, at least 80%, at least 85%, at least 90%, at least 95%, at least 99%, or 100% identical to SEQ ID NO: 1748, and a HCDR3 at least 65%, at least 70%, at least 75%, at least 80%, at least 85%, at least 90%, at least 95%, at least 99%, or 100% identical to SEQ ID NO: 1749;
[7968] a LCDR1 at least 65%, at least 70%, at least 75%, at least 80%, at least 85%, at least 90%, at least 95%, at least 99%, or 100% identical to SEQ ID NO: 1743, a LCDR2 at least 65%, at least 70%, at least 75%, at least 80%, at least 85%, at least 90%, at least 95%, at least 99%, or 100% identical to SEQ ID NO: 1744, a LCDR3 at least 65%, at least 70%, at least 75%, at least 80%, at least 85%, at least 90%, at least 95%, at least 99%, or 100% identical to SEQ ID NO: 1751, a HCDR1 at least 65%, at least 70%, at least 75%, at least 80%, at least 85%, at least 90%, at least 95%, at least 99%, or 100% identical to SEQ ID NO: 1747, a HCDR2 at least 65%, at least 70%, at least 75%, at least 80%, at least 85%, at least 90%, at least 95%, at least 99%, or 100% identical to SEQ ID NO: 1748, and a HCDR3 at least 65%, at least 70%, at least 75%, at least 80%, at least 85%, at least 90%, at least 95%, at least 99%, or 100% identical to SEQ ID NO: 1749;
[7969] a LCDR1 at least 65%, at least 70%, at least 75%, at least 80%, at least 85%, at least 90%, at least 95%, at least 99%, or 100% identical to SEQ ID NO: 1752, a LCDR2 at least 65%, at least 70%, at least 75%, at least 80%, at least 85%, at least 90%, at least 95%, at least 99%, or 100% identical to SEQ ID NO: 1753, a LCDR3 at least 65%, at least 70%, at least 75%, at least 80%, at least 85%, at least 90%, at least 95%, at least 99%, or 100% identical to SEQ ID NO: 1754, a HCDR1 at least 65%, at least 70%, at least 75%, at least 80%, at least 85%, at least 90%, at least 95%, at least 99%, or 100% identical to SEQ ID NO: 1756, a HCDR2 at least 65%, at least 70%, at least 75%, at least 80%, at least 85%, at least 90%, at least 95%, at least 99%, or 100% identical to SEQ ID NO: 1757, and a HCDR3 at least 65%, at least 70%, at least 75%, at least 80%, at least 85%, at least 90%, at least 95%, at least 99%, or 100% identical to SEQ ID NO: 1758;
[7970] a LCDR1 at least 65%, at least 70%, at least 75%, at least 80%, at least 85%, at least 90%, at least 95%, at least 99%, or 100% identical to SEQ ID NO: 1752, a LCDR2 at least 65%, at least 70%, at least 75%, at least 80%, at least 85%, at least 90%, at least 95%, at least 99%, or 100% identical to SEQ ID NO: 1753, a LCDR3 at least 65%, at least 70%, at least 75%, at least 80%, at least 85%, at least 90%, at least 95%, at least 99%, or 100% identical to SEQ ID NO: 1754, a HCDR1 at least 65%, at least 70%, at least 75%, at least 80%, at least 85%, at least 90%, at least 95%, at least 99%, or 100% identical to SEQ ID NO: 1756, a HCDR2 at least 65%, at least 70%, at least 75%, at least 80%, at least 85%, at least 90%, at least 95%, at least 99%, or 100% identical to SEQ ID NO: 1757, and a HCDR3 at least 65%, at least 70%, at least 75%, at least 80%, at least 85%, at least 90%, at least 95%, at least 99%, or 100% identical to SEQ ID NO: 1758;
[7971] a LCDR1 at least 65%, at least 70%, at least 75%, at least 80%, at least 85%, at least 90%, at least 95%, at least 99%, or 100% identical to SEQ ID NO: 1761, a LCDR2 at least 65%, at least 70%, at least 75%, at least 80%, at least 85%, at least 90%, at least 95%, at least 99%, or 100% identical to amino acid sequence DT, a LCDR3 at least 65%, at least 70%, at least 75%, at least 80%, at least 85%, at least 90%, at least 95%, at least 99%, or 100% identical to SEQ ID NO: 1729, a HCDR1 at least 65%, at least 70%, at least 75%, at least 80%, at least 85%, at least 90%, at least 95%, at least 99%, or 100% identical to SEQ ID NO: 1243, a HCDR2 at least 65%, at least 70%, at least 75%, at least 80%, at least 85%, at least 90%, at least 95%, at least 99%, or 100% identical to SEQ ID NO: 1244, and a HCDR3 at least 65%, at least 70%, at least 75%, at least 80%, at least 85%, at least 90%, at least 95%, at least 99%, or 100% identical to SEQ ID NO: 1762;
[7972] a LCDR1 at least 65%, at least 70%, at least 75%, at least 80%, at least 85%, at least 90%, at least 95%, at least 99%, or 100% identical to SEQ ID NO: 1763, a LCDR2 at least 65%, at least 70%, at least 75%, at least 80%, at least 85%, at least 90%, at least 95%, at least 99%, or 100% identical to amino acid sequence AT, a LCDR3 at least 65%, at least 70%, at least 75%, at least 80%, at least 85%, at least 90%, at least 95%, at least 99%, or 100% identical to SEQ ID NO: 1195, a HCDR1 at least 65%, at least 70%, at least 75%, at least 80%, at least 85%, at least 90%, at least 95%, at least 99%, or 100% identical to SEQ ID NO: 1184, a HCDR2 at least 65%, at least 70%, at least 75%, at least 80%, at least 85%, at least 90%, at least 95%, at least 99%, or 100% identical to SEQ ID NO: 1185, and a HCDR3 at least 65%, at least 70%, at least 75%, at least 80%, at least 85%, at least 90%, at least 95%, at least 99%, or 100% identical to SEQ ID NO: 1197;
[7973] a LCDR1 at least 65%, at least 70%, at least 75%, at least 80%, at least 85%, at least 90%, at least 95%, at least 99%, or 100% identical to SEQ ID NO: 1763, a LCDR2 at least 65%, at least 70%, at least 75%, at least 80%, at least 85%, at least 90%, at least 95%, at least 99%, or 100% identical to amino acid sequence AT, a LCDR3 at least 65%, at least 70%, at least 75%, at least 80%, at least 85%, at least 90%, at least 95%, at least 99%, or 100% identical to SEQ ID NO: 1195, a HCDR1 at least 65%, at least 70%, at least 75%, at least 80%, at least 85%, at least 90%, at least 95%, at least 99%, or 100% identical to SEQ ID NO: 1184, a HCDR2 at least 65%, at least 70%, at least 75%, at least 80%, at least 85%, at least 90%, at least 95%, at least 99%, or 100% identical to SEQ ID NO: 1767, and a HCDR3 at least 65%, at least 70%, at least 75%, at least 80%, at least 85%, at least 90%, at least 95%, at least 99%, or 100% identical to SEQ ID NO: 1197;
[7974] a LCDR1 at least 65%, at least 70%, at least 75%, at least 80%, at least 85%, at least 90%, at least 95%, at least 99%, or 100% identical to SEQ ID NO: 1769, a LCDR2 at least 65%, at least 70%, at least 75%, at least 80%, at least 85%, at least 90%, at least 95%, at least 99%, or 100% identical to SEQ ID NO: 1770, a LCDR3 at least 65%, at least 70%, at least 75%, at least 80%, at least 85%, at least 90%, at least 95%, at least 99%, or 100% identical to SEQ ID NO: 1182, a HCDR1 at least 65%, at least 70%, at least 75%, at least 80%, at least 85%, at least 90%, at least 95%, at least 99%, or 100% identical to SEQ ID NO: 1772, a HCDR2 at least 65%, at least 70%, at least 75%, at least 80%, at least 85%, at least 90%, at least 95%, at least 99%, or 100% identical to SEQ ID NO: 1773, and a HCDR3 at least 65%, at least 70%, at least 75%, at least 80%, at least 85%, at least 90%, at least 95%, at least 99%, or 100% identical to SEQ ID NO: 1774;
[7975] a LCDR1 at least 65%, at least 70%, at least 75%, at least 80%, at least 85%, at least 90%, at least 95%, at least 99%, or 100% identical to SEQ ID NO: 1776, a LCDR2 at least 65%, at least 70%, at least 75%, at least 80%, at least 85%, at least 90%, at least 95%, at least 99%, or 100% identical to SEQ ID NO: 1777, a LCDR3 at least 65%, at least 70%, at least 75%, at least 80%, at least 85%, at least 90%, at least 95%, at least 99%, or 100% identical to SEQ ID NO: 1778, a HCDR1 at least 65%, at least 70%, at least 75%, at least 80%, at least 85%, at least 90%, at least 95%, at least 99%, or 100% identical to SEQ ID NO: 1780, a HCDR2 at least 65%, at least 70%, at least 75%, at least 80%, at least 85%, at least 90%, at least 95%, at least 99%, or 100% identical to SEQ ID NO: 1781, and a HCDR3 at least 65%, at least 70%, at least 75%, at least 80%, at least 85%, at least 90%, at least 95%, at least 99%, or 100% identical to SEQ ID NO: 1782;
[7976] a LCDR1 at least 65%, at least 70%, at least 75%, at least 80%, at least 85%, at least 90%, at least 95%, at least 99%, or 100% identical to SEQ ID NO: 1776, a LCDR2 at least 65%, at least 70%, at least 75%, at least 80%, at least 85%, at least 90%, at least 95%, at least 99%, or 100% identical to SEQ ID NO: 1777, a LCDR3 at least 65%, at least 70%, at least 75%, at least 80%, at least 85%, at least 90%, at least 95%, at least 99%, or 100% identical to SEQ ID NO: 1778, a HCDR1 at least 65%, at least 70%, at least 75%, at least 80%, at least 85%, at least 90%, at least 95%, at least 99%, or 100% identical to SEQ ID NO: 1780, a HCDR2 at least 65%, at least 70%, at least 75%, at least 80%, at least 85%, at least 90%, at least 95%, at least 99%, or 100% identical to SEQ ID NO: 1781, and a HCDR3 at least 65%, at least 70%, at least 75%, at least 80%, at least 85%, at least 90%, at least 95%, at least 99%, or 100% identical to SEQ ID NO: 1782;
[7977] a LCDR1 at least 65%, at least 70%, at least 75%, at least 80%, at least 85%, at least 90%, at least 95%, at least 99%, or 100% identical to SEQ ID NO: 1786, a LCDR2 at least 65%, at least 70%, at least 75%, at least 80%, at least 85%, at least 90%, at least 95%, at least 99%, or 100% identical to SEQ ID NO: 1777, a LCDR3 at least 65%, at least 70%, at least 75%, at least 80%, at least 85%, at least 90%, at least 95%, at least 99%, or 100% identical to SEQ ID NO: 1787, a HCDR1 at least 65%, at least 70%, at least 75%, at least 80%, at least 85%, at least 90%, at least 95%, at least 99%, or 100% identical to SEQ ID NO: 1789, a HCDR2 at least 65%, at least 70%, at least 75%, at least 80%, at least 85%, at least 90%, at least 95%, at least 99%, or 100% identical to SEQ ID NO: 1790, and a HCDR3 at least 65%, at least 70%, at least 75%, at least 80%, at least 85%, at least 90%, at least 95%, at least 99%, or 100% identical to SEQ ID NO: 1791;
[7978] a LCDR1 at least 65%, at least 70%, at least 75%, at least 80%, at least 85%, at least 90%, at least 95%, at least 99%, or 100% identical to SEQ ID NO: 1793, a LCDR2 at least 65%, at least 70%, at least 75%, at least 80%, at least 85%, at least 90%, at least 95%, at least 99%, or 100% identical to amino acid sequence YTS, a LCDR3 at least 65%, at least 70%, at least 75%, at least 80%, at least 85%, at least 90%, at least 95%, at least 99%, or 100% identical to SEQ ID NO: 1229, a HCDR1 at least 65%, at least 70%, at least 75%, at least 80%, at least 85%, at least 90%, at least 95%, at least 99%, or 100% identical to SEQ ID NO: 1795, a HCDR2 at least 65%, at least 70%, at least 75%, at least 80%, at least 85%, at least 90%, at least 95%, at least 99%, or 100% identical to SEQ ID NO: 1159, and a HCDR3 at least 65%, at least 70%, at least 75%, at least 80%, at least 85%, at least 90%, at least 95%, at least 99%, or 100% identical to SEQ ID NO: 1796;
[7979] a LCDR1 at least 65%, at least 70%, at least 75%, at least 80%, at least 85%, at least 90%, at least 95%, at least 99%, or 100% identical to SEQ ID NO: 1798, a LCDR2 at least 65%, at least 70%, at least 75%, at least 80%, at least 85%, at least 90%, at least 95%, at least 99%, or 100% identical to amino acid sequence DTS, a LCDR3 at least 65%, at least 70%, at least 75%, at least 80%, at least 85%, at least 90%, at least 95%, at least 99%, or 100% identical to SEQ ID NO: 1799, a HCDR1 at least 65%, at least 70%, at least 75%, at least 80%, at least 85%, at least 90%, at least 95%, at least 99%, or 100% identical to SEQ ID NO: 1801, a HCDR2 at least 65%, at least 70%, at least 75%, at least 80%, at least 85%, at least 90%, at least 95%, at least 99%, or 100% identical to SEQ ID NO: 1802, and a HCDR3 at least 65%, at least 70%, at least 75%, at least 80%, at least 85%, at least 90%, at least 95%, at least 99%, or 100% identical to SEQ ID NO: 1803;
[7980] a LCDR1 at least 65%, at least 70%, at least 75%, at least 80%, at least 85%, at least 90%, at least 95%, at least 99%, or 100% identical to SEQ ID NO: 1428, a LCDR2 at least 65%, at least 70%, at least 75%, at least 80%, at least 85%, at least 90%, at least 95%, at least 99%, or 100% identical to amino acid sequence GAS, a LCDR3 at least 65%, at least 70%, at least 75%, at least 80%, at least 85%, at least 90%, at least 95%, at least 99%, or 100% identical to SEQ ID NO: 1805, a HCDR1 at least 65%, at least 70%, at least 75%, at least 80%, at least 85%, at least 90%, at least 95%, at least 99%, or 100% identical to SEQ ID NO: 1577, a HCDR2 at least 65%, at least 70%, at least 75%, at least 80%, at least 85%, at least 90%, at least 95%, at least 99%, or 100% identical to SEQ ID NO: 1807, and a HCDR3 at least 65%, at least 70%, at least 75%, at least 80%, at least 85%, at least 90%, at least 95%, at least 99%, or 100% identical to SEQ ID NO: 1808;
[7981] a LCDR1 at least 65%, at least 70%, at least 75%, at least 80%, at least 85%, at least 90%, at least 95%, at least 99%, or 100% identical to SEQ ID NO: 1810, a LCDR2 at least 65%, at least 70%, at least 75%, at least 80%, at least 85%, at least 90%, at least 95%, at least 99%, or 100% identical to amino acid sequence AAS, a LCDR3 at least 65%, at least 70%, at least 75%, at least 80%, at least 85%, at least 90%, at least 95%, at least 99%, or 100% identical to SEQ ID NO: 1811, a HCDR1 at least 65%, at least 70%, at least 75%, at least 80%, at least 85%, at least 90%, at least 95%, at least 99%, or 100% identical to SEQ ID NO: 1813, a HCDR2 at least 65%, at least 70%, at least 75%, at least 80%, at least 85%, at least 90%, at least 95%, at least 99%, or 100% identical to SEQ ID NO: 1814, and a HCDR3 at least 65%, at least 70%, at least 75%, at least 80%, at least 85%, at least 90%, at least 95%, at least 99%, or 100% identical to SEQ ID NO: 1815;
[7982] a LCDR1 at least 65%, at least 70%, at least 75%, at least 80%, at least 85%, at least 90%, at least 95%, at least 99%, or 100% identical to SEQ ID NO: 1817, a LCDR2 at least 65%, at least 70%, at least 75%, at least 80%, at least 85%, at least 90%, at least 95%, at least 99%, or 100% identical to amino acid sequence AAS, a LCDR3 at least 65%, at least 70%, at least 75%, at least 80%, at least 85%, at least 90%, at least 95%, at least 99%, or 100% identical to SEQ ID NO: 1818, a HCDR1 at least 65%, at least 70%, at least 75%, at least 80%, at least 85%, at least 90%, at least 95%, at least 99%, or 100% identical to SEQ ID NO: 1820, a HCDR2 at least 65%, at least 70%, at least 75%, at least 80%, at least 85%, at least 90%, at least 95%, at least 99%, or 100% identical to SEQ ID NO: 1821, and a HCDR3 at least 65%, at least 70%, at least 75%, at least 80%, at least 85%, at least 90%, at least 95%, at least 99%, or 100% identical to SEQ ID NO: 1822;
[7983] a LCDR1 at least 65%, at least 70%, at least 75%, at least 80%, at least 85%, at least 90%, at least 95%, at least 99%, or 100% identical to SEQ ID NO: 1824, a LCDR2 at least 65%, at least 70%, at least 75%, at least 80%, at least 85%, at least 90%, at least 95%, at least 99%, or 100% identical to amino acid sequence AAS, a LCDR3 at least 65%, at least 70%, at least 75%, at least 80%, at least 85%, at least 90%, at least 95%, at least 99%, or 100% identical to SEQ ID NO: 1825, a HCDR1 at least 65%, at least 70%, at least 75%, at least 80%, at least 85%, at least 90%, at least 95%, at least 99%, or 100% identical to SEQ ID NO: 1827, a HCDR2 at least 65%, at least 70%, at least 75%, at least 80%, at least 85%, at least 90%, at least 95%, at least 99%, or 100% identical to SEQ ID NO: 1828, and a HCDR3 at least 65%, at least 70%, at least 75%, at least 80%, at least 85%, at least 90%, at least 95%, at least 99%, or 100% identical to SEQ ID NO: 1829;
[7984] a LCDR1 at least 65%, at least 70%, at least 75%, at least 80%, at least 85%, at least 90%, at least 95%, at least 99%, or 100% identical to SEQ ID NO: 1977, a LCDR2 at least 65%, at least 70%, at least 75%, at least 80%, at least 85%, at least 90%, at least 95%, at least 99%, or 100% identical to SEQ ID NO: 1978, a LCDR3 at least 65%, at least 70%, at least 75%, at least 80%, at least 85%, at least 90%, at least 95%, at least 99%, or 100% identical to SEQ ID NO: 1979, a HCDR1 at least 65%, at least 70%, at least 75%, at least 80%, at least 85%, at least 90%, at least 95%, at least 99%, or 100% identical to SEQ ID NO: 1981, a HCDR2 at least 65%, at least 70%, at least 75%, at least 80%, at least 85%, at least 90%, at least 95%, at least 99%, or 100% identical to SEQ ID NO: 1982, and a HCDR3 at least 65%, at least 70%, at least 75%, at least 80%, at least 85%, at least 90%, at least 95%, at least 99%, or 100% identical to SEQ ID NO: 1983;
[7985] a LCDR1 at least 65%, at least 70%, at least 75%, at least 80%, at least 85%, at least 90%, at least 95%, at least 99%, or 100% identical to SEQ ID NO: 1985, a LCDR2 at least 65%, at least 70%, at least 75%, at least 80%, at least 85%, at least 90%, at least 95%, at least 99%, or 100% identical to SEQ ID NO: 1986, a LCDR3 at least 65%, at least 70%, at least 75%, at least 80%, at least 85%, at least 90%, at least 95%, at least 99%, or 100% identical to SEQ ID NO: 1987, a HCDR1 at least 65%, at least 70%, at least 75%, at least 80%, at least 85%, at least 90%, at least 95%, at least 99%, or 100% identical to SEQ ID NO: 1989, a HCDR2 at least 65%, at least 70%, at least 75%, at least 80%, at least 85%, at least 90%, at least 95%, at least 99%, or 100% identical to SEQ ID NO: 1990, and a HCDR3 at least 65%, at least 70%, at least 75%, at least 80%, at least 85%, at least 90%, at least 95%, at least 99%, or 100% identical to SEQ ID NO: 1991;
[7986] a LCDR1 at least 65%, at least 70%, at least 75%, at least 80%, at least 85%, at least 90%, at least 95%, at least 99%, or 100% identical to SEQ ID NO: 1993, a LCDR2 at least 65%, at least 70%, at least 75%, at least 80%, at least 85%, at least 90%, at least 95%, at least 99%, or 100% identical to SEQ ID NO: 1994, a LCDR3 at least 65%, at least 70%, at least 75%, at least 80%, at least 85%, at least 90%, at least 95%, at least 99%, or 100% identical to SEQ ID NO: 1995, a HCDR1 at least 65%, at least 70%, at least 75%, at least 80%, at least 85%, at least 90%, at least 95%, at least 99%, or 100% identical to SEQ ID NO: 1997, a HCDR2 at least 65%, at least 70%, at least 75%, at least 80%, at least 85%, at least 90%, at least 95%, at least 99%, or 100% identical to SEQ ID NO: 1998, and a HCDR3 at least 65%, at least 70%, at least 75%, at least 80%, at least 85%, at least 90%, at least 95%, at least 99%, or 100% identical to SEQ ID NO: 1999;
[7987] a LCDR1 at least 65%, at least 70%, at least 75%, at least 80%, at least 85%, at least 90%, at least 95%, at least 99%, or 100% identical to SEQ ID NO: 2001, a LCDR2 at least 65%, at least 70%, at least 75%, at least 80%, at least 85%, at least 90%, at least 95%, at least 99%, or 100% identical to SEQ ID NO: 2002, a LCDR3 at least 65%, at least 70%, at least 75%, at least 80%, at least 85%, at least 90%, at least 95%, at least 99%, or 100% identical to SEQ ID NO: 2003, a HCDR1 at least 65%, at least 70%, at least 75%, at least 80%, at least 85%, at least 90%, at least 95%, at least 99%, or 100% identical to SEQ ID NO: 2005, a HCDR2 at least 65%, at least 70%, at least 75%, at least 80%, at least 85%, at least 90%, at least 95%, at least 99%, or 100% identical to SEQ ID NO: 2006, and a HCDR3 at least 65%, at least 70%, at least 75%, at least 80%, at least 85%, at least 90%, at least 95%, at least 99%, or 100% identical to SEQ ID NO: 2007;
[7988] a LCDR1 at least 65%, at least 70%, at least 75%, at least 80%, at least 85%, at least 90%, at least 95%, at least 99%, or 100% identical to SEQ ID NO: 1831, a LCDR2 at least 65%, at least 70%, at least 75%, at least 80%, at least 85%, at least 90%, at least 95%, at least 99%, or 100% identical to amino acid sequence AAS, a LCDR3 at least 65%, at least 70%, at least 75%, at least 80%, at least 85%, at least 90%, at least 95%, at least 99%, or 100% identical to SEQ ID NO: 1832, a HCDR1 at least 65%, at least 70%, at least 75%, at least 80%, at least 85%, at least 90%, at least 95%, at least 99%, or 100% identical to SEQ ID NO: 1834, a HCDR2 at least 65%, at least 70%, at least 75%, at least 80%, at least 85%, at least 90%, at least 95%, at least 99%, or 100% identical to SEQ ID NO: 1835, and a HCDR3 at least 65%, at least 70%, at least 75%, at least 80%, at least 85%, at least 90%, at least 95%, at least 99%, or 100% identical to SEQ ID NO: 1836;
[7989] a LCDR1 at least 65%, at least 70%, at least 75%, at least 80%, at least 85%, at least 90%, at least 95%, at least 99%, or 100% identical to SEQ ID NO: 1838, a LCDR2 at least 65%, at least 70%, at least 75%, at least 80%, at least 85%, at least 90%, at least 95%, at least 99%, or 100% identical to amino acid sequence WAS, a LCDR3 at least 65%, at least 70%, at least 75%, at least 80%, at least 85%, at least 90%, at least 95%, at least 99%, or 100% identical to SEQ ID NO: 1839, a HCDR1 at least 65%, at least 70%, at least 75%, at least 80%, at least 85%, at least 90%, at least 95%, at least 99%, or 100% identical to SEQ ID NO: 1841, a HCDR2 at least 65%, at least 70%, at least 75%, at least 80%, at least 85%, at least 90%, at least 95%, at least 99%, or 100% identical to SEQ ID NO: 1842, and a HCDR3 at least 65%, at least 70%, at least 75%, at least 80%, at least 85%, at least 90%, at least 95%, at least 99%, or 100% identical to SEQ ID NO: 1843;
[7990] a LCDR1 at least 65%, at least 70%, at least 75%, at least 80%, at least 85%, at least 90%, at least 95%, at least 99%, or 100% identical to SEQ ID NO: 1845, a LCDR2 at least 65%, at least 70%, at least 75%, at least 80%, at least 85%, at least 90%, at least 95%, at least 99%, or 100% identical to amino acid sequence EVS, a LCDR3 at least 65%, at least 70%, at least 75%, at least 80%, at least 85%, at least 90%, at least 95%, at least 99%, or 100% identical to SEQ ID NO: 1846, a HCDR1 at least 65%, at least 70%, at least 75%, at least 80%, at least 85%, at least 90%, at least 95%, at least 99%, or 100% identical to SEQ ID NO: 1848, a HCDR2 at least 65%, at least 70%, at least 75%, at least 80%, at least 85%, at least 90%, at least 95%, at least 99%, or 100% identical to SEQ ID NO: 1849, and a HCDR3 at least 65%, at least 70%, at least 75%, at least 80%, at least 85%, at least 90%, at least 95%, at least 99%, or 100% identical to SEQ ID NO: 1850;
[7991] a LCDR1 at least 65%, at least 70%, at least 75%, at least 80%, at least 85%, at least 90%, at least 95%, at least 99%, or 100% identical to SEQ ID NO: 1852, a LCDR2 at least 65%, at least 70%, at least 75%, at least 80%, at least 85%, at least 90%, at least 95%, at least 99%, or 100% identical to amino acid sequence GAS, a LCDR3 at least 65%, at least 70%, at least 75%, at least 80%, at least 85%, at least 90%, at least 95%, at least 99%, or 100% identical to SEQ ID NO: 1853, a HCDR1 at least 65%, at least 70%, at least 75%, at least 80%, at least 85%, at least 90%, at least 95%, at least 99%, or 100% identical to SEQ ID NO: 1855, a HCDR2 at least 65%, at least 70%, at least 75%, at least 80%, at least 85%, at least 90%, at least 95%, at least 99%, or 100% identical to SEQ ID NO: 1856, and a HCDR3 at least 65%, at least 70%, at least 75%, at least 80%, at least 85%, at least 90%, at least 95%, at least 99%, or 100% identical to SEQ ID NO: 1857;
[7992] a LCDR1 at least 65%, at least 70%, at least 75%, at least 80%, at least 85%, at least 90%, at least 95%, at least 99%, or 100% identical to SEQ ID NO: 1859, a LCDR2 at least 65%, at least 70%, at least 75%, at least 80%, at least 85%, at least 90%, at least 95%, at least 99%, or 100% identical to amino acid sequence GNG, a LCDR3 at least 65%, at least 70%, at least 75%, at least 80%, at least 85%, at least 90%, at least 95%, at least 99%, or 100% identical to SEQ ID NO: 1860, a HCDR1 at least 65%, at least 70%, at least 75%, at least 80%, at least 85%, at least 90%, at least 95%, at least 99%, or 100% identical to SEQ ID NO: 1862, a HCDR2 at least 65%, at least 70%, at least 75%, at least 80%, at least 85%, at least 90%, at least 95%, at least 99%, or 100% identical to SEQ ID NO: 1863, and a HCDR3 at least 65%, at least 70%, at least 75%, at least 80%, at least 85%, at least 90%, at least 95%, at least 99%, or 100% identical to SEQ ID NO: 1864;
[7993] a LCDR1 at least 65%, at least 70%, at least 75%, at least 80%, at least 85%, at least 90%, at least 95%, at least 99%, or 100% identical to SEQ ID NO: 1359, a LCDR2 at least 65%, at least 70%, at least 75%, at least 80%, at least 85%, at least 90%, at least 95%, at least 99%, or 100% identical to amino acid sequence DAS, a LCDR3 at least 65%, at least 70%, at least 75%, at least 80%, at least 85%, at least 90%, at least 95%, at least 99%, or 100% identical to SEQ ID NO: 1360, a HCDR1 at least 65%, at least 70%, at least 75%, at least 80%, at least 85%, at least 90%, at least 95%, at least 99%, or 100% identical to SEQ ID NO: 1362, a HCDR2 at least 65%, at least 70%, at least 75%, at least 80%, at least 85%, at least 90%, at least 95%, at least 99%, or 100% identical to SEQ ID NO: 1363, and a HCDR3 at least 65%, at least 70%, at least 75%, at least 80%, at least 85%, at least 90%, at least 95%, at least 99%, or 100% identical to SEQ ID NO: 1364;
[7994] a LCDR1 at least 65%, at least 70%, at least 75%, at least 80%, at least 85%, at least 90%, at least 95%, at least 99%, or 100% identical to SEQ ID NO: 1866, a LCDR2 at least 65%, at least 70%, at least 75%, at least 80%, at least 85%, at least 90%, at least 95%, at least 99%, or 100% identical to amino acid sequence LVS, a LCDR3 at least 65%, at least 70%, at least 75%, at least 80%, at least 85%, at least 90%, at least 95%, at least 99%, or 100% identical to SEQ ID NO: 1867, a HCDR1 at least 65%, at least 70%, at least 75%, at least 80%, at least 85%, at least 90%, at least 95%, at least 99%, or 100% identical to SEQ ID NO: 1309, a HCDR2 at least 65%, at least 70%, at least 75%, at least 80%, at least 85%, at least 90%, at least 95%, at least 99%, or 100% identical to SEQ ID NO: 1869, and a HCDR3 at least 65%, at least 70%, at least 75%, at least 80%, at least 85%, at least 90%, at least 95%, at least 99%, or 100% identical to SEQ ID NO: 1870;
[7995] a LCDR1 at least 65%, at least 70%, at least 75%, at least 80%, at least 85%, at least 90%, at least 95%, at least 99%, or 100% identical to SEQ ID NO: 1872, a LCDR2 at least 65%, at least 70%, at least 75%, at least 80%, at least 85%, at least 90%, at least 95%, at least 99%, or 100% identical to amino acid sequence AAS, a LCDR3 at least 65%, at least 70%, at least 75%, at least 80%, at least 85%, at least 90%, at least 95%, at least 99%, or 100% identical to SEQ ID NO: 1873, a HCDR1 at least 65%, at least 70%, at least 75%, at least 80%, at least 85%, at least 90%, at least 95%, at least 99%, or 100% identical to SEQ ID NO: 1552, a HCDR2 at least 65%, at least 70%, at least 75%, at least 80%, at least 85%, at least 90%, at least 95%, at least 99%, or 100% identical to SEQ ID NO: 1875, and a HCDR3 at least 65%, at least 70%, at least 75%, at least 80%, at least 85%, at least 90%, at least 95%, at least 99%, or 100% identical to SEQ ID NO: 1876;
[7996] a LCDR1 at least 65%, at least 70%, at least 75%, at least 80%, at least 85%, at least 90%, at least 95%, at least 99%, or 100% identical to SEQ ID NO: 1878, a LCDR2 at least 65%, at least 70%, at least 75%, at least 80%, at least 85%, at least 90%, at least 95%, at least 99%, or 100% identical to amino acid sequence AVS, a LCDR3 at least 65%, at least 70%, at least 75%, at least 80%, at least 85%, at least 90%, at least 95%, at least 99%, or 100% identical to SEQ ID NO: 1879, a HCDR1 at least 65%, at least 70%, at least 75%, at least 80%, at least 85%, at least 90%, at least 95%, at least 99%, or 100% identical to SEQ ID NO: 1881, a HCDR2 at least 65%, at least 70%, at least 75%, at least 80%, at least 85%, at least 90%, at least 95%, at least 99%, or 100% identical to SEQ ID NO: 1882, and a HCDR3 at least 65%, at least 70%, at least 75%, at least 80%, at least 85%, at least 90%, at least 95%, at least 99%, or 100% identical to SEQ ID NO: 1883;
[7997] a LCDR1 at least 65%, at least 70%, at least 75%, at least 80%, at least 85%, at least 90%, at least 95%, at least 99%, or 100% identical to SEQ ID NO: 1885, a LCDR2 at least 65%, at least 70%, at least 75%, at least 80%, at least 85%, at least 90%, at least 95%, at least 99%, or 100% identical to amino acid sequence EDN, a LCDR3 at least 65%, at least 70%, at least 75%, at least 80%, at least 85%, at least 90%, at least 95%, at least 99%, or 100% identical to SEQ ID NO: 1886, a HCDR1 at least 65%, at least 70%, at least 75%, at least 80%, at least 85%, at least 90%, at least 95%, at least 99%, or 100% identical to SEQ ID NO: 1618, a HCDR2 at least 65%, at least 70%, at least 75%, at least 80%, at least 85%, at least 90%, at least 95%, at least 99%, or 100% identical to SEQ ID NO: 1888, and a HCDR3 at least 65%, at least 70%, at least 75%, at least 80%, at least 85%, at least 90%, at least 95%, at least 99%, or 100% identical to SEQ ID NO: 1889;
[7998] a LCDR1 at least 65%, at least 70%, at least 75%, at least 80%, at least 85%, at least 90%, at least 95%, at least 99%, or 100% identical to SEQ ID NO: 1891, a LCDR2 at least 65%, at least 70%, at least 75%, at least 80%, at least 85%, at least 90%, at least 95%, at least 99%, or 100% identical to amino acid sequence DAS, a LCDR3 at least 65%, at least 70%, at least 75%, at least 80%, at least 85%, at least 90%, at least 95%, at least 99%, or 100% identical to SEQ ID NO: 1892, a HCDR1 at least 65%, at least 70%, at least 75%, at least 80%, at least 85%, at least 90%, at least 95%, at least 99%, or 100% identical to SEQ ID NO: 1894, a HCDR2 at least 65%, at least 70%, at least 75%, at least 80%, at least 85%, at least 90%, at least 95%, at least 99%, or 100% identical to SEQ ID NO: 1895, and a HCDR3 at least 65%, at least 70%, at least 75%, at least 80%, at least 85%, at least 90%, at least 95%, at least 99%, or 100% identical to SEQ ID NO: 1896;
[7999] a LCDR1 at least 65%, at least 70%, at least 75%, at least 80%, at least 85%, at least 90%, at least 95%, at least 99%, or 100% identical to SEQ ID NO: 1898, a LCDR2 at least 65%, at least 70%, at least 75%, at least 80%, at least 85%, at least 90%, at least 95%, at least 99%, or 100% identical to amino acid sequence DNN, a LCDR3 at least 65%, at least 70%, at least 75%, at least 80%, at least 85%, at least 90%, at least 95%, at least 99%, or 100% identical to SEQ ID NO: 1899, a HCDR1 at least 65%, at least 70%, at least 75%, at least 80%, at least 85%, at least 90%, at least 95%, at least 99%, or 100% identical to SEQ ID NO: 1901, a HCDR2 at least 65%, at least 70%, at least 75%, at least 80%, at least 85%, at least 90%, at least 95%, at least 99%, or 100% identical to SEQ ID NO: 1902, and a HCDR3 at least 65%, at least 70%, at least 75%, at least 80%, at least 85%, at least 90%, at least 95%, at least 99%, or 100% identical to SEQ ID NO: 1903;
[8000] a LCDR1 at least 65%, at least 70%, at least 75%, at least 80%, at least 85%, at least 90%, at least 95%, at least 99%, or 100% identical to SEQ ID NO: 1905, a LCDR2 at least 65%, at least 70%, at least 75%, at least 80%, at least 85%, at least 90%, at least 95%, at least 99%, or 100% identical to amino acid sequence KAS, a LCDR3 at least 65%, at least 70%, at least 75%, at least 80%, at least 85%, at least 90%, at least 95%, at least 99%, or 100% identical to SEQ ID NO: 1906, a HCDR1 at least 65%, at least 70%, at least 75%, at least 80%, at least 85%, at least 90%, at least 95%, at least 99%, or 100% identical to SEQ ID NO: 1639, a HCDR2 at least 65%, at least 70%, at least 75%, at least 80%, at least 85%, at least 90%, at least 95%, at least 99%, or 100% identical to SEQ ID NO: 1908, and a HCDR3 at least 65%, at least 70%, at least 75%, at least 80%, at least 85%, at least 90%, at least 95%, at least 99%, or 100% identical to SEQ ID NO: 1909;
[8001] a LCDR1 at least 65%, at least 70%, at least 75%, at least 80%, at least 85%, at least 90%, at least 95%, at least 99%, or 100% identical to SEQ ID NO: 1911, a LCDR2 at least 65%, at least 70%, at least 75%, at least 80%, at least 85%, at least 90%, at least 95%, at least 99%, or 100% identical to amino acid sequence GAS, a LCDR3 at least 65%, at least 70%, at least 75%, at least 80%, at least 85%, at least 90%, at least 95%, at least 99%, or 100% identical to SEQ ID NO: 1912, a HCDR1 at least 65%, at least 70%, at least 75%, at least 80%, at least 85%, at least 90%, at least 95%, at least 99%, or 100% identical to SEQ ID NO: 1437, a HCDR2 at least 65%, at least 70%, at least 75%, at least 80%, at least 85%, at least 90%, at least 95%, at least 99%, or 100% identical to SEQ ID NO: 1914, and a HCDR3 at least 65%, at least 70%, at least 75%, at least 80%, at least 85%, at least 90%, at least 95%, at least 99%, or 100% identical to SEQ ID NO: 1915;
[8002] a LCDR1 at least 65%, at least 70%, at least 75%, at least 80%, at least 85%, at least 90%, at least 95%, at least 99%, or 100% identical to SEQ ID NO: 1917, a LCDR2 at least 65%, at least 70%, at least 75%, at least 80%, at least 85%, at least 90%, at least 95%, at least 99%, or 100% identical to amino acid sequence NTD, a LCDR3 at least 65%, at least 70%, at least 75%, at least 80%, at least 85%, at least 90%, at least 95%, at least 99%, or 100% identical to SEQ ID NO: 1918, a HCDR1 at least 65%, at least 70%, at least 75%, at least 80%, at least 85%, at least 90%, at least 95%, at least 99%, or 100% identical to SEQ ID NO: 1920, a HCDR2 at least 65%, at least 70%, at least 75%, at least 80%, at least 85%, at least 90%, at least 95%, at least 99%, or 100% identical to SEQ ID NO: 1921, and a HCDR3 at least 65%, at least 70%, at least 75%, at least 80%, at least 85%, at least 90%, at least 95%, at least 99%, or 100% identical to SEQ ID NO: 1922;
[8003] a LCDR1 at least 65%, at least 70%, at least 75%, at least 80%, at least 85%, at least 90%, at least 95%, at least 99%, or 100% identical to SEQ ID NO: 1924, a LCDR2 at least 65%, at least 70%, at least 75%, at least 80%, at least 85%, at least 90%, at least 95%, at least 99%, or 100% identical to amino acid sequence YTS, a LCDR3 at least 65%, at least 70%, at least 75%, at least 80%, at least 85%, at least 90%, at least 95%, at least 99%, or 100% identical to SEQ ID NO: 1925, a HCDR1 at least 65%, at least 70%, at least 75%, at least 80%, at least 85%, at least 90%, at least 95%, at least 99%, or 100% identical to SEQ ID NO: 1927, a HCDR2 at least 65%, at least 70%, at least 75%, at least 80%, at least 85%, at least 90%, at least 95%, at least 99%, or 100% identical to SEQ ID NO: 1928, and a HCDR3 at least 65%, at least 70%, at least 75%, at least 80%, at least 85%, at least 90%, at least 95%, at least 99%, or 100% identical to SEQ ID NO: 1929;
[8004] a LCDR1 at least 65%, at least 70%, at least 75%, at least 80%, at least 85%, at least 90%, at least 95%, at least 99%, or 100% identical to SEQ ID NO: 1931, a LCDR2 at least 65%, at least 70%, at least 75%, at least 80%, at least 85%, at least 90%, at least 95%, at least 99%, or 100% identical to amino acid sequence LVS, a LCDR3 at least 65%, at least 70%, at least 75%, at least 80%, at least 85%, at least 90%, at least 95%, at least 99%, or 100% identical to SEQ ID NO: 1932, a HCDR1 at least 65%, at least 70%, at least 75%, at least 80%, at least 85%, at least 90%, at least 95%, at least 99%, or 100% identical to SEQ ID NO: 1934, a HCDR2 at least 65%, at least 70%, at least 75%, at least 80%, at least 85%, at least 90%, at least 95%, at least 99%, or 100% identical to SEQ ID NO: 1935, and a HCDR3 at least 65%, at least 70%, at least 75%, at least 80%, at least 85%, at least 90%, at least 95%, at least 99%, or 100% identical to SEQ ID NO: 1936;
[8005] a LCDR1 at least 65%, at least 70%, at least 75%, at least 80%, at least 85%, at least 90%, at least 95%, at least 99%, or 100% identical to SEQ ID NO: 1938, a LCDR2 at least 65%, at least 70%, at least 75%, at least 80%, at least 85%, at least 90%, at least 95%, at least 99%, or 100% identical to amino acid sequence KAS, a LCDR3 at least 65%, at least 70%, at least 75%, at least 80%, at least 85%, at least 90%, at least 95%, at least 99%, or 100% identical to SEQ ID NO: 1939, a HCDR1 at least 65%, at least 70%, at least 75%, at least 80%, at least 85%, at least 90%, at least 95%, at least 99%, or 100% identical to SEQ ID NO: 1941, a HCDR2 at least 65%, at least 70%, at least 75%, at least 80%, at least 85%, at least 90%, at least 95%, at least 99%, or 100% identical to SEQ ID NO: 1942, and a HCDR3 at least 65%, at least 70%, at least 75%, at least 80%, at least 85%, at least 90%, at least 95%, at least 99%, or 100% identical to SEQ ID NO: 1943;
[8006] a LCDR1 at least 65%, at least 70%, at least 75%, at least 80%, at least 85%, at least 90%, at least 95%, at least 99%, or 100% identical to SEQ ID NO: 1945, a LCDR2 at least 65%, at least 70%, at least 75%, at least 80%, at least 85%, at least 90%, at least 95%, at least 99%, or 100% identical to amino acid sequence KVS, a LCDR3 at least 65%, at least 70%, at least 75%, at least 80%, at least 85%, at least 90%, at least 95%, at least 99%, or 100% identical to SEQ ID NO: 1946, a HCDR1 at least 65%, at least 70%, at least 75%, at least 80%, at least 85%, at least 90%, at least 95%, at least 99%, or 100% identical to SEQ ID NO: 1901, a HCDR2 at least 65%, at least 70%, at least 75%, at least 80%, at least 85%, at least 90%, at least 95%, at least 99%, or 100% identical to SEQ ID NO: 1948, and a HCDR3 at least 65%, at least 70%, at least 75%, at least 80%, at least 85%, at least 90%, at least 95%, at least 99%, or 100% identical to SEQ ID NO: 1949;
[8007] a LCDR1 at least 65%, at least 70%, at least 75%, at least 80%, at least 85%, at least 90%, at least 95%, at least 99%, or 100% identical to SEQ ID NO: 1120, a LCDR2 at least 65%, at least 70%, at least 75%, at least 80%, at least 85%, at least 90%, at least 95%, at least 99%, or 100% identical to amino acid sequence AAS, a LCDR3 at least 65%, at least 70%, at least 75%, at least 80%, at least 85%, at least 90%, at least 95%, at least 99%, or 100% identical to SEQ ID NO: 1951, a HCDR1 at least 65%, at least 70%, at least 75%, at least 80%, at least 85%, at least 90%, at least 95%, at least 99%, or 100% identical to SEQ ID NO: 1953, a HCDR2 at least 65%, at least 70%, at least 75%, at least 80%, at least 85%, at least 90%, at least 95%, at least 99%, or 100% identical to SEQ ID NO: 1954, and a HCDR3 at least 65%, at least 70%, at least 75%, at least 80%, at least 85%, at least 90%, at least 95%, at least 99%, or 100% identical to SEQ ID NO: 1955;
[8008] a LCDR1 at least 65%, at least 70%, at least 75%, at least 80%, at least 85%, at least 90%, at least 95%, at least 99%, or 100% identical to SEQ ID NO: 1228, a LCDR2 at least 65%, at least 70%, at least 75%, at least 80%, at least 85%, at least 90%, at least 95%, at least 99%, or 100% identical to amino acid sequence YTS, a LCDR3 at least 65%, at least 70%, at least 75%, at least 80%, at least 85%, at least 90%, at least 95%, at least 99%, or 100% identical to SEQ ID NO: 1957, a HCDR1 at least 65%, at least 70%, at least 75%, at least 80%, at least 85%, at least 90%, at least 95%, at least 99%, or 100% identical to SEQ ID NO: 1959, a HCDR2 at least 65%, at least 70%, at least 75%, at least 80%, at least 85%, at least 90%, at least 95%, at least 99%, or 100% identical to SEQ ID NO: 1960, and a HCDR3 at least 65%, at least 70%, at least 75%, at least 80%, at least 85%, at least 90%, at least 95%, at least 99%, or 100% identical to SEQ ID NO: 1961;
[8009] a LCDR1 at least 65%, at least 70%, at least 75%, at least 80%, at least 85%, at least 90%, at least 95%, at least 99%, or 100% identical to SEQ ID NO: 1963, a LCDR2 at least 65%, at least 70%, at least 75%, at least 80%, at least 85%, at least 90%, at least 95%, at least 99%, or 100% identical to amino acid sequence LVS, a LCDR3 at least 65%, at least 70%, at least 75%, at least 80%, at least 85%, at least 90%, at least 95%, at least 99%, or 100% identical to SEQ ID NO: 1964, a HCDR1 at least 65%, at least 70%, at least 75%, at least 80%, at least 85%, at least 90%, at least 95%, at least 99%, or 100% identical to SEQ ID NO: 1966, a HCDR2 at least 65%, at least 70%, at least 75%, at least 80%, at least 85%, at least 90%, at least 95%, at least 99%, or 100% identical to SEQ ID NO: 1967, and a HCDR3 at least 65%, at least 70%, at least 75%, at least 80%, at least 85%, at least 90%, at least 95%, at least 99%, or 100% identical to SEQ ID NO: 1968; or
[8010] a LCDR1 at least 65%, at least 70%, at least 75%, at least 80%, at least 85%, at least 90%, at least 95%, at least 99%, or 100% identical to SEQ ID NO: 1519, a LCDR2 at least 65%, at least 70%, at least 75%, at least 80%, at least 85%, at least 90%, at least 95%, at least 99%, or 100% identical to amino acid sequence STS, a LCDR3 at least 65%, at least 70%, at least 75%, at least 80%, at least 85%, at least 90%, at least 95%, at least 99%, or 100% identical to SEQ ID NO: 1970, a HCDR1 at least 65%, at least 70%, at least 75%, at least 80%, at least 85%, at least 90%, at least 95%, at least 99%, or 100% identical to SEQ ID NO: 1309, a HCDR2 at least 65%, at least 70%, at least 75%, at least 80%, at least 85%, at least 90%, at least 95%, at least 99%, or 100% identical to SEQ ID NO: 1972, and a HCDR3 at least 65%, at least 70%, at least 75%, at least 80%, at least 85%, at least 90%, at least 95%, at least 99%, or 100% identical to SEQ ID NO: 1973.

[8011] In some aspects, any of the antigen binding polypeptides, antigen binding polypeptide complexes, or antibodies or antigen binding fragments thereof disclosed herein comprises:
[8012] a VL at least 65%, at least 70%, at least 75%, at least 80%, at least 85%, at least 90%, at least 95%, at least 99%, or 100% identical to SEQ ID NO: 1098 and a VH at least 65%, at least 70%, at least 75%, at least 80%, at least 85%, at least 90%, at least 95%, at least 99%, or 100% identical to SEQ ID NO: 1102;
[8013] a VL at least 65%, at least 70%, at least 75%, at least 80%, at least 85%, at least 90%, at least 95%, at least 99%, or 100% identical to SEQ ID NO: 1105 and a VH at least 65%, at least 70%, at least 75%, at least 80%, at least 85%, at least 90%, at least 95%, at least 99%, or 100% identical to SEQ ID NO: 1109;
[8014] a VL at least 65%, at least 70%, at least 75%, at least 80%, at least 85%, at least 90%, at least 95%, at least 99%, or 100% identical to SEQ ID NO: 1112 and a VH at least 65%, at least 70%, at least 75%, at least 80%, at least 85%, at least 90%, at least 95%, at least 99%, or 100% identical to SEQ ID NO: 1116;
[8015] a VL at least 65%, at least 70%, at least 75%, at least 80%, at least 85%, at least 90%, at least 95%, at least 99%, or 100% identical to SEQ ID NO: 1105 and a VH at least 65%, at least 70%, at least 75%, at least 80%, at least 85%, at least 90%, at least 95%, at least 99%, or 100% identical to SEQ ID NO: 1119;
[8016] a VL at least 65%, at least 70%, at least 75%, at least 80%, at least 85%, at least 90%, at least 95%, at least 99%, or 100% identical to SEQ ID NO: 1122 and a VH at least 65%, at least 70%, at least 75%, at least 80%, at least 85%, at least 90%, at least 95%, at least 99%, or 100% identical to SEQ ID NO: 1126;
[8017] a VL at least 65%, at least 70%, at least 75%, at least 80%, at least 85%, at least 90%, at least 95%, at least 99%, or 100% identical to SEQ ID NO: 1129 and a VH at least 65%, at least 70%, at least 75%, at least 80%, at least 85%, at least 90%, at least 95%, at least 99%, or 100% identical to SEQ ID NO: 1133;
[8018] a VL at least 65%, at least 70%, at least 75%, at least 80%, at least 85%, at least 90%, at least 95%, at least 99%, or 100% identical to SEQ ID NO: 1136 and a VH at least 65%, at least 70%, at least 75%, at least 80%, at least 85%, at least 90%, at least 95%, at least 99%, or 100% identical to SEQ ID NO: 1140;
[8019] a VL at least 65%, at least 70%, at least 75%, at least 80%, at least 85%, at least 90%, at least 95%, at least 99%, or 100% identical to SEQ ID NO: 1143 and a VH at least 65%, at least 70%, at least 75%, at least 80%, at least 85%, at least 90%, at least 95%, at least 99%, or 100% identical to SEQ ID NO: 1147;
[8020] a VL at least 65%, at least 70%, at least 75%, at least 80%, at least 85%, at least 90%, at least 95%, at least 99%, or 100% identical to SEQ ID NO: 1150 and a VH at least 65%, at least 70%, at least 75%, at least 80%, at least 85%, at least 90%, at least 95%, at least 99%, or 100% identical to SEQ ID NO: 1154;
[8021] a VL at least 65%, at least 70%, at least 75%, at least 80%, at least 85%, at least 90%, at least 95%, at least 99%, or 100% identical to SEQ ID NO: 1157 and a VH at least 65%, at least 70%, at least 75%, at least 80%, at least 85%, at least 90%, at least 95%, at least 99%, or 100% identical to SEQ ID NO: 1161;
[8022] a VL at least 65%, at least 70%, at least 75%, at least 80%, at least 85%, at least 90%, at least 95%, at least 99%, or 100% identical to SEQ ID NO: 1164 and a VH at least 65%, at least 70%, at least 75%, at least 80%, at least 85%, at least 90%, at least 95%, at least 99%, or 100% identical to SEQ ID NO: 1168;
[8023] a VL at least 65%, at least 70%, at least 75%, at least 80%, at least 85%, at least 90%, at least 95%, at least 99%, or 100% identical to SEQ ID NO: 1171 and a VH at least 65%, at least 70%, at least 75%, at least 80%, at least 85%, at least 90%, at least 95%, at least 99%, or 100% identical to SEQ ID NO: 1173;
[8024] a VL at least 65%, at least 70%, at least 75%, at least 80%, at least 85%, at least 90%, at least 95%, at least 99%, or 100% identical to SEQ ID NO: 1176 and a VH at least 65%, at least 70%, at least 75%, at least 80%, at least 85%, at least 90%, at least 95%, at least 99%, or 100% identical to SEQ ID NO: 1180;
[8025] a VL at least 65%, at least 70%, at least 75%, at least 80%, at least 85%, at least 90%, at least 95%, at least 99%, or 100% identical to SEQ ID NO: 1183 and a VH at least 65%, at least 70%, at least 75%, at least 80%, at least 85%, at least 90%, at least 95%, at least 99%, or 100% identical to SEQ ID NO: 1187;
[8026] a VL at least 65%, at least 70%, at least 75%, at least 80%, at least 85%, at least 90%, at least 95%, at least 99%, or 100% identical to SEQ ID NO: 1190 and a VH at least 65%, at least 70%, at least 75%, at least 80%, at least 85%, at least 90%, at least 95%, at least 99%, or 100% identical to SEQ ID NO: 1194;
[8027] a VL at least 65%, at least 70%, at least 75%, at least 80%, at least 85%, at least 90%, at least 95%, at least 99%, or 100% identical to SEQ ID NO: 1196 and a VH at least 65%, at least 70%, at least 75%, at least 80%, at least 85%, at least 90%, at least 95%, at least 99%, or 100% identical to SEQ ID NO: 1198;
[8028] a VL at least 65%, at least 70%, at least 75%, at least 80%, at least 85%, at least 90%, at least 95%, at least 99%, or 100% identical to SEQ ID NO: 1202 and a VH at least 65%, at least 70%, at least 75%, at least 80%, at least 85%, at least 90%, at least 95%, at least 99%, or 100% identical to SEQ ID NO: 1206;
[8029] a VL at least 65%, at least 70%, at least 75%, at least 80%, at least 85%, at least 90%, at least 95%, at least 99%, or 100% identical to SEQ ID NO: 1208 and a VH at least 65%, at least 70%, at least 75%, at least 80%, at least 85%, at least 90%, at least 95%, at least 99%, or 100% identical to SEQ ID NO: 1210;
[8030] a VL at least 65%, at least 70%, at least 75%, at least 80%, at least 85%, at least 90%, at least 95%, at least 99%, or 100% identical to SEQ ID NO: 1214 and a VH at least 65%, at least 70%, at least 75%, at least 80%, at least 85%, at least 90%, at least 95%, at least 99%, or 100% identical to SEQ ID NO: 1218;
[8031] a VL at least 65%, at least 70%, at least 75%, at least 80%, at least 85%, at least 90%, at least 95%, at least 99%, or 100% identical to SEQ ID NO: 1219 and a VH at least 65%, at least 70%, at least 75%, at least 80%, at least 85%, at least 90%, at least 95%, at least 99%, or 100% identical to SEQ ID NO: 1220;
[8032] a VL at least 65%, at least 70%, at least 75%, at least 80%, at least 85%, at least 90%, at least 95%, at least 99%, or 100% identical to SEQ ID NO: 1223 and a VH at least 65%, at least 70%, at least 75%, at least 80%, at least 85%, at least 90%, at least 95%, at least 99%, or 100% identical to SEQ ID NO: 1227;
[8033] a VL at least 65%, at least 70%, at least 75%, at least 80%, at least 85%, at least 90%, at least 95%, at least 99%, or 100% identical to SEQ ID NO: 1230 and a VH at least 65%, at least 70%, at least 75%, at least 80%, at least 85%, at least 90%, at least 95%, at least 99%, or 100% identical to SEQ ID NO: 1234;
[8034] a VL at least 65%, at least 70%, at least 75%, at least 80%, at least 85%, at least 90%, at least 95%, at least 99%, or 100% identical to SEQ ID NO: 1237 and a VH at least 65%, at least 70%, at least 75%, at least 80%, at least 85%, at least 90%, at least 95%, at least 99%, or 100% identical to SEQ ID NO: 1241;
[8035] a VL at least 65%, at least 70%, at least 75%, at least 80%, at least 85%, at least 90%, at least 95%, at least 99%, or 100% identical to SEQ ID NO: 1242 and a VH at least 65%, at least 70%, at least 75%, at least 80%, at least 85%, at least 90%, at least 95%, at least 99%, or 100% identical to SEQ ID NO: 1246;
[8036] a VL at least 65%, at least 70%, at least 75%, at least 80%, at least 85%, at least 90%, at least 95%, at least 99%, or 100% identical to SEQ ID NO: 1249 and a VH at least 65%, at least 70%, at least 75%, at least 80%, at least 85%, at least 90%, at least 95%, at least 99%, or 100% identical to SEQ ID NO: 1253;
[8037] a VL at least 65%, at least 70%, at least 75%, at least 80%, at least 85%, at least 90%, at least 95%, at least 99%, or 100% identical to SEQ ID NO: 1256 and a VH at least 65%, at least 70%, at least 75%, at least 80%, at least 85%, at least 90%, at least 95%, at least 99%, or 100% identical to SEQ ID NO: 1260;
[8038] a VL at least 65%, at least 70%, at least 75%, at least 80%, at least 85%, at least 90%, at least 95%, at least 99%, or 100% identical to SEQ ID NO: 1263 and a VH at least 65%, at least 70%, at least 75%, at least 80%, at least 85%, at least 90%, at least 95%, at least 99%, or 100% identical to SEQ ID NO: 1265;
[8039] a VL at least 65%, at least 70%, at least 75%, at least 80%, at least 85%, at least 90%, at least 95%, at least 99%, or 100% identical to SEQ ID NO: 1268 and a VH at least 65%, at least 70%, at least 75%, at least 80%, at least 85%, at least 90%, at least 95%, at least 99%, or 100% identical to SEQ ID NO: 1270;
[8040] a VL at least 65%, at least 70%, at least 75%, at least 80%, at least 85%, at least 90%, at least 95%, at least 99%, or 100% identical to SEQ ID NO: 1273 and a VH at least 65%, at least 70%, at least 75%, at least 80%, at least 85%, at least 90%, at least 95%, at least 99%, or 100% identical to SEQ ID NO: 1277;
[8041] a VL at least 65%, at least 70%, at least 75%, at least 80%, at least 85%, at least 90%, at least 95%, at least 99%, or 100% identical to SEQ ID NO: 1280 and a VH at least 65%, at least 70%, at least 75%, at least 80%, at least 85%, at least 90%, at least 95%, at least 99%, or 100% identical to SEQ ID NO: 1284;
[8042] a VL at least 65%, at least 70%, at least 75%, at least 80%, at least 85%, at least 90%, at least 95%, at least 99%, or 100% identical to SEQ ID NO: 1287 and a VH at least 65%, at least 70%, at least 75%, at least 80%, at least 85%, at least 90%, at least 95%, at least 99%, or 100% identical to SEQ ID NO: 1291;
[8043] a VL at least 65%, at least 70%, at least 75%, at least 80%, at least 85%, at least 90%, at least 95%, at least 99%, or 100% identical to SEQ ID NO: 1294 and a VH at least 65%, at least 70%, at least 75%, at least 80%, at least 85%, at least 90%, at least 95%, at least 99%, or 100% identical to SEQ ID NO: 1298;
[8044] a VL at least 65%, at least 70%, at least 75%, at least 80%, at least 85%, at least 90%, at least 95%, at least 99%, or 100% identical to SEQ ID NO: 1301 and a VH at least 65%, at least 70%, at least 75%, at least 80%, at least 85%, at least 90%, at least 95%, at least 99%, or 100% identical to SEQ ID NO: 1305;
[8045] a VL at least 65%, at least 70%, at least 75%, at least 80%, at least 85%, at least 90%, at least 95%, at least 99%, or 100% identical to SEQ ID NO: 1308 and a VH at least 65%, at least 70%, at least 75%, at least 80%, at least 85%, at least 90%, at least 95%, at least 99%, or 100% identical to SEQ ID NO: 1312;
[8046] a VL at least 65%, at least 70%, at least 75%, at least 80%, at least 85%, at least 90%, at least 95%, at least 99%, or 100% identical to SEQ ID NO: 1314 and a VH at least 65%, at least 70%, at least 75%, at least 80%, at least 85%, at least 90%, at least 95%, at least 99%, or 100% identical to SEQ ID NO: 1318;
[8047] a VL at least 65%, at least 70%, at least 75%, at least 80%, at least 85%, at least 90%, at least 95%, at least 99%, or 100% identical to SEQ ID NO: 1321 and a VH at least 65%, at least 70%, at least 75%, at least 80%, at least 85%, at least 90%, at least 95%, at least 99%, or 100% identical to SEQ ID NO: 1325;
[8048] a VL at least 65%, at least 70%, at least 75%, at least 80%, at least 85%, at least 90%, at least 95%, at least 99%, or 100% identical to SEQ ID NO: 1328 and a VH at least 65%, at least 70%, at least 75%, at least 80%, at least 85%, at least 90%, at least 95%, at least 99%, or 100% identical to SEQ ID NO: 1332;
[8049] a VL at least 65%, at least 70%, at least 75%, at least 80%, at least 85%, at least 90%, at least 95%, at least 99%, or 100% identical to SEQ ID NO: 1334 and a VH at least 65%, at least 70%, at least 75%, at least 80%, at least 85%, at least 90%, at least 95%, at least 99%, or 100% identical to SEQ ID NO: 1338;
[8050] a VL at least 65%, at least 70%, at least 75%, at least 80%, at least 85%, at least 90%, at least 95%, at least 99%, or 100% identical to SEQ ID NO: 1341 and a VH at least 65%, at least 70%, at least 75%, at least 80%, at least 85%, at least 90%, at least 95%, at least 99%, or 100% identical to SEQ ID NO: 1345;
[8051] a VL at least 65%, at least 70%, at least 75%, at least 80%, at least 85%, at least 90%, at least 95%, at least 99%, or 100% identical to SEQ ID NO: 1347 and a VH at least 65%, at least 70%, at least 75%, at least 80%, at least 85%, at least 90%, at least 95%, at least 99%, or 100% identical to SEQ ID NO: 1351;
[8052] a VL at least 65%, at least 70%, at least 75%, at least 80%, at least 85%, at least 90%, at least 95%, at least 99%, or 100% identical to SEQ ID NO: 1354 and a VH at least 65%, at least 70%, at least 75%, at least 80%, at least 85%, at least 90%, at least 95%, at least 99%, or 100% identical to SEQ ID NO: 1358;
[8053] a VL at least 65%, at least 70%, at least 75%, at least 80%, at least 85%, at least 90%, at least 95%, at least 99%, or 100% identical to SEQ ID NO: 1361 and a VH at least 65%, at least 70%, at least 75%, at least 80%, at least 85%, at least 90%, at least 95%, at least 99%, or 100% identical to SEQ ID NO: 1365;
[8054] a VL at least 65%, at least 70%, at least 75%, at least 80%, at least 85%, at least 90%, at least 95%, at least 99%, or 100% identical to SEQ ID NO: 1368 and a VH at least 65%, at least 70%, at least 75%, at least 80%, at least 85%, at least 90%, at least 95%, at least 99%, or 100% identical to SEQ ID NO: 1372;
[8055] a VL at least 65%, at least 70%, at least 75%, at least 80%, at least 85%, at least 90%, at least 95%, at least 99%, or 100% identical to SEQ ID NO: 1375 and a VH at least 65%, at least 70%, at least 75%, at least 80%, at least 85%, at least 90%, at least 95%, at least 99%, or 100% identical to SEQ ID NO: 1379;
[8056] a VL at least 65%, at least 70%, at least 75%, at least 80%, at least 85%, at least 90%, at least 95%, at least 99%, or 100% identical to SEQ ID NO: 1380 and a VH at least 65%, at least 70%, at least 75%, at least 80%, at least 85%, at least 90%, at least 95%, at least 99%, or 100% identical to SEQ ID NO: 1381;
[8057] a VL at least 65%, at least 70%, at least 75%, at least 80%, at least 85%, at least 90%, at least 95%, at least 99%, or 100% identical to SEQ ID NO: 1384 and a VH at least 65%, at least 70%, at least 75%, at least 80%, at least 85%, at least 90%, at least 95%, at least 99%, or 100% identical to SEQ ID NO: 1388;
[8058] a VL at least 65%, at least 70%, at least 75%, at least 80%, at least 85%, at least 90%, at least 95%, at least 99%, or 100% identical to SEQ ID NO: 1390 and a VH at least 65%, at least 70%, at least 75%, at least 80%, at least 85%, at least 90%, at least 95%, at least 99%, or 100% identical to SEQ ID NO: 1393;
[8059] a VL at least 65%, at least 70%, at least 75%, at least 80%, at least 85%, at least 90%, at least 95%, at least 99%, or 100% identical to SEQ ID NO: 1396 and a VH at least 65%, at least 70%, at least 75%, at least 80%, at least 85%, at least 90%, at least 95%, at least 99%, or 100% identical to SEQ ID NO: 1400;
[8060] a VL at least 65%, at least 70%, at least 75%, at least 80%, at least 85%, at least 90%, at least 95%, at least 99%, or 100% identical to SEQ ID NO: 1403 and a VH at least 65%, at least 70%, at least 75%, at least 80%, at least 85%, at least 90%, at least 95%, at least 99%, or 100% identical to SEQ ID NO: 1407;
[8061] a VL at least 65%, at least 70%, at least 75%, at least 80%, at least 85%, at least 90%, at least 95%, at least 99%, or 100% identical to SEQ ID NO: 1410 and a VH at least 65%, at least 70%, at least 75%, at least 80%, at least 85%, at least 90%, at least 95%, at least 99%, or 100% identical to SEQ ID NO: 1413;
[8062] a VL at least 65%, at least 70%, at least 75%, at least 80%, at least 85%, at least 90%, at least 95%, at least 99%, or 100% identical to SEQ ID NO: 1416 and a VH at least 65%, at least 70%, at least 75%, at least 80%, at least 85%, at least 90%, at least 95%, at least 99%, or 100% identical to SEQ ID NO: 1420;
[8063] a VL at least 65%, at least 70%, at least 75%, at least 80%, at least 85%, at least 90%, at least 95%, at least 99%, or 100% identical to SEQ ID NO: 1423 and a VH at least 65%, at least 70%, at least 75%, at least 80%, at least 85%, at least 90%, at least 95%, at least 99%, or 100% identical to SEQ ID NO: 1427;
[8064] a VL at least 65%, at least 70%, at least 75%, at least 80%, at least 85%, at least 90%, at least 95%, at least 99%, or 100% identical to SEQ ID NO: 1430 and a VH at least 65%, at least 70%, at least 75%, at least 80%, at least 85%, at least 90%, at least 95%, at least 99%, or 100% identical to SEQ ID NO: 1434;
[8065] a VL at least 65%, at least 70%, at least 75%, at least 80%, at least 85%, at least 90%, at least 95%, at least 99%, or 100% identical to SEQ ID NO: 1436 and a VH at least 65%, at least 70%, at least 75%, at least 80%, at least 85%, at least 90%, at least 95%, at least 99%, or 100% identical to SEQ ID NO: 1440;
[8066] a VL at least 65%, at least 70%, at least 75%, at least 80%, at least 85%, at least 90%, at least 95%, at least 99%, or 100% identical to SEQ ID NO: 1443 and a VH at least 65%, at least 70%, at least 75%, at least 80%, at least 85%, at least 90%, at least 95%, at least 99%, or 100% identical to SEQ ID NO: 1447;
[8067] a VL at least 65%, at least 70%, at least 75%, at least 80%, at least 85%, at least 90%, at least 95%, at least 99%, or 100% identical to SEQ ID NO: 1450 and a VH at least 65%, at least 70%, at least 75%, at least 80%, at least 85%, at least 90%, at least 95%, at least 99%, or 100% identical to SEQ ID NO: 1454;
[8068] a VL at least 65%, at least 70%, at least 75%, at least 80%, at least 85%, at least 90%, at least 95%, at least 99%, or 100% identical to SEQ ID NO: 1457 and a VH at least 65%, at least 70%, at least 75%, at least 80%, at least 85%, at least 90%, at least 95%, at least 99%, or 100% identical to SEQ ID NO: 1460;
[8069] a VL at least 65%, at least 70%, at least 75%, at least 80%, at least 85%, at least 90%, at least 95%, at least 99%, or 100% identical to SEQ ID NO: 1463 and a VH at least 65%, at least 70%, at least 75%, at least 80%, at least 85%, at least 90%, at least 95%, at least 99%, or 100% identical to SEQ ID NO: 1467;
[8070] a VL at least 65%, at least 70%, at least 75%, at least 80%, at least 85%, at least 90%, at least 95%, at least 99%, or 100% identical to SEQ ID NO: 1470 and a VH at least 65%, at least 70%, at least 75%, at least 80%, at least 85%, at least 90%, at least 95%, at least 99%, or 100% identical to SEQ ID NO: 1474;
[8071] a VL at least 65%, at least 70%, at least 75%, at least 80%, at least 85%, at least 90%, at least 95%, at least 99%, or 100% identical to SEQ ID NO: 1477 and a VH at least 65%, at least 70%, at least 75%, at least 80%, at least 85%, at least 90%, at least 95%, at least 99%, or 100% identical to SEQ ID NO: 1481;
[8072] a VL at least 65%, at least 70%, at least 75%, at least 80%, at least 85%, at least 90%, at least 95%, at least 99%, or 100% identical to SEQ ID NO: 1483 and a VH at least 65%, at least 70%, at least 75%, at least 80%, at least 85%, at least 90%, at least 95%, at least 99%, or 100% identical to SEQ ID NO: 1487;
[8073] a VL at least 65%, at least 70%, at least 75%, at least 80%, at least 85%, at least 90%, at least 95%, at least 99%, or 100% identical to SEQ ID NO: 1490 and a VH at least 65%, at least 70%, at least 75%, at least 80%, at least 85%, at least 90%, at least 95%, at least 99%, or 100% identical to SEQ ID NO: 1494;
[8074] a VL at least 65%, at least 70%, at least 75%, at least 80%, at least 85%, at least 90%, at least 95%, at least 99%, or 100% identical to SEQ ID NO: 1497 and a VH at least 65%, at least 70%, at least 75%, at least 80%, at least 85%, at least 90%, at least 95%, at least 99%, or 100% identical to SEQ ID NO: 1501;
[8075] a VL at least 65%, at least 70%, at least 75%, at least 80%, at least 85%, at least 90%, at least 95%, at least 99%, or 100% identical to SEQ ID NO: 1503 and a VH at least 65%, at least 70%, at least 75%, at least 80%, at least 85%, at least 90%, at least 95%, at least 99%, or 100% identical to SEQ ID NO: 1507;
[8076] a VL at least 65%, at least 70%, at least 75%, at least 80%, at least 85%, at least 90%, at least 95%, at least 99%, or 100% identical to SEQ ID NO: 1510 and a VH at least 65%, at least 70%, at least 75%, at least 80%, at least 85%, at least 90%, at least 95%, at least 99%, or 100% identical to SEQ ID NO: 1512;
[8077] a VL at least 65%, at least 70%, at least 75%, at least 80%, at least 85%, at least 90%, at least 95%, at least 99%, or 100% identical to SEQ ID NO: 1514 and a VH at least 65%, at least 70%, at least 75%, at least 80%, at least 85%, at least 90%, at least 95%, at least 99%, or 100% identical to SEQ ID NO: 1518;
[8078] a VL at least 65%, at least 70%, at least 75%, at least 80%, at least 85%, at least 90%, at least 95%, at least 99%, or 100% identical to SEQ ID NO: 1521 and a VH at least 65%, at least 70%, at least 75%, at least 80%, at least 85%, at least 90%, at least 95%, at least 99%, or 100% identical to SEQ ID NO: 1525;
[8079] a VL at least 65%, at least 70%, at least 75%, at least 80%, at least 85%, at least 90%, at least 95%, at least 99%, or 100% identical to SEQ ID NO: 1527 and a VH at least 65%, at least 70%, at least 75%, at least 80%, at least 85%, at least 90%, at least 95%, at least 99%, or 100% identical to SEQ ID NO: 1530;
[8080] a VL at least 65%, at least 70%, at least 75%, at least 80%, at least 85%, at least 90%, at least 95%, at least 99%, or 100% identical to SEQ ID NO: 1533 and a VH at least 65%, at least 70%, at least 75%, at least 80%, at least 85%, at least 90%, at least 95%, at least 99%, or 100% identical to SEQ ID NO: 1537;
[8081] a VL at least 65%, at least 70%, at least 75%, at least 80%, at least 85%, at least 90%, at least 95%, at least 99%, or 100% identical to SEQ ID NO: 1540 and a VH at least 65%, at least 70%, at least 75%, at least 80%, at least 85%, at least 90%, at least 95%, at least 99%, or 100% identical to SEQ ID NO: 1543;
[8082] a VL at least 65%, at least 70%, at least 75%, at least 80%, at least 85%, at least 90%, at least 95%, at least 99%, or 100% identical to SEQ ID NO: 1546 and a VH at least 65%, at least 70%, at least 75%, at least 80%, at least 85%, at least 90%, at least 95%, at least 99%, or 100% identical to SEQ ID NO: 1550;
[8083] a VL at least 65%, at least 70%, at least 75%, at least 80%, at least 85%, at least 90%, at least 95%, at least 99%, or 100% identical to SEQ ID NO: 1551 and a VH at least 65%, at least 70%, at least 75%, at least 80%, at least 85%, at least 90%, at least 95%, at least 99%, or 100% identical to SEQ ID NO: 1555;
[8084] a VL at least 65%, at least 70%, at least 75%, at least 80%, at least 85%, at least 90%, at least 95%, at least 99%, or 100% identical to SEQ ID NO: 1558 and a VH at least 65%, at least 70%, at least 75%, at least 80%, at least 85%, at least 90%, at least 95%, at least 99%, or 100% identical to SEQ ID NO: 1561;
[8085] a VL at least 65%, at least 70%, at least 75%, at least 80%, at least 85%, at least 90%, at least 95%, at least 99%, or 100% identical to SEQ ID NO: 1563 and a VH at least 65%, at least 70%, at least 75%, at least 80%, at least 85%, at least 90%, at least 95%, at least 99%, or 100% identical to SEQ ID NO: 1567;
[8086] a VL at least 65%, at least 70%, at least 75%, at least 80%, at least 85%, at least 90%, at least 95%, at least 99%, or 100% identical to SEQ ID NO: 1570 and a VH at least 65%, at least 70%, at least 75%, at least 80%, at least 85%, at least 90%, at least 95%, at least 99%, or 100% identical to SEQ ID NO: 1573;
[8087] a VL at least 65%, at least 70%, at least 75%, at least 80%, at least 85%, at least 90%, at least 95%, at least 99%, or 100% identical to SEQ ID NO: 1576 and a VH at least 65%, at least 70%, at least 75%, at least 80%, at least 85%, at least 90%, at least 95%, at least 99%, or 100% identical to SEQ ID NO: 1580;
[8088] a VL at least 65%, at least 70%, at least 75%, at least 80%, at least 85%, at least 90%, at least 95%, at least 99%, or 100% identical to SEQ ID NO: 1583 and a VH at least 65%, at least 70%, at least 75%, at least 80%, at least 85%, at least 90%, at least 95%, at least 99%, or 100% identical to SEQ ID NO: 1587;
[8089] a VL at least 65%, at least 70%, at least 75%, at least 80%, at least 85%, at least 90%, at least 95%, at least 99%, or 100% identical to SEQ ID NO: 1589 and a VH at least 65%, at least 70%, at least 75%, at least 80%, at least 85%, at least 90%, at least 95%, at least 99%, or 100% identical to SEQ ID NO: 1593;
[8090] a VL at least 65%, at least 70%, at least 75%, at least 80%, at least 85%, at least 90%, at least 95%, at least 99%, or 100% identical to SEQ ID NO: 1596 and a VH at least 65%, at least 70%, at least 75%, at least 80%, at least 85%, at least 90%, at least 95%, at least 99%, or 100% identical to SEQ ID NO: 1600;
[8091] a VL at least 65%, at least 70%, at least 75%, at least 80%, at least 85%, at least 90%, at least 95%, at least 99%, or 100% identical to SEQ ID NO: 1603 and a VH at least 65%, at least 70%, at least 75%, at least 80%, at least 85%, at least 90%, at least 95%, at least 99%, or 100% identical to SEQ ID NO: 1607;
[8092] a VL at least 65%, at least 70%, at least 75%, at least 80%, at least 85%, at least 90%, at least 95%, at least 99%, or 100% identical to SEQ ID NO: 1610 and a VH at least 65%, at least 70%, at least 75%, at least 80%, at least 85%, at least 90%, at least 95%, at least 99%, or 100% identical to SEQ ID NO: 1614;
[8093] a VL at least 65%, at least 70%, at least 75%, at least 80%, at least 85%, at least 90%, at least 95%, at least 99%, or 100% identical to SEQ ID NO: 1617 and a VH at least 65%, at least 70%, at least 75%, at least 80%, at least 85%, at least 90%, at least 95%, at least 99%, or 100% identical to SEQ ID NO: 1621;
[8094] a VL at least 65%, at least 70%, at least 75%, at least 80%, at least 85%, at least 90%, at least 95%, at least 99%, or 100% identical to SEQ ID NO: 1624 and a VH at least 65%, at least 70%, at least 75%, at least 80%, at least 85%, at least 90%, at least 95%, at least 99%, or 100% identical to SEQ ID NO: 1628;
[8095] a VL at least 65%, at least 70%, at least 75%, at least 80%, at least 85%, at least 90%, at least 95%, at least 99%, or 100% identical to SEQ ID NO: 1631 and a VH at least 65%, at least 70%, at least 75%, at least 80%, at least 85%, at least 90%, at least 95%, at least 99%, or 100% identical to SEQ ID NO: 1635;
[8096] a VL at least 65%, at least 70%, at least 75%, at least 80%, at least 85%, at least 90%, at least 95%, at least 99%, or 100% identical to SEQ ID NO: 1638 and a VH at least 65%, at least 70%, at least 75%, at least 80%, at least 85%, at least 90%, at least 95%, at least 99%, or 100% identical to SEQ ID NO: 1642;
[8097] a VL at least 65%, at least 70%, at least 75%, at least 80%, at least 85%, at least 90%, at least 95%, at least 99%, or 100% identical to SEQ ID NO: 1645 and a VH at least 65%, at least 70%, at least 75%, at least 80%, at least 85%, at least 90%, at least 95%, at least 99%, or 100% identical to SEQ ID NO: 1649;
[8098] a VL at least 65%, at least 70%, at least 75%, at least 80%, at least 85%, at least 90%, at least 95%, at least 99%, or 100% identical to SEQ ID NO: 1652 and a VH at least 65%, at least 70%, at least 75%, at least 80%, at least 85%, at least 90%, at least 95%, at least 99%, or 100% identical to SEQ ID NO: 1656;
[8099] a VL at least 65%, at least 70%, at least 75%, at least 80%, at least 85%, at least 90%, at least 95%, at least 99%, or 100% identical to SEQ ID NO: 1659 and a VH at least 65%, at least 70%, at least 75%, at least 80%, at least 85%, at least 90%, at least 95%, at least 99%, or 100% identical to SEQ ID NO: 1662;
[8100] a VL at least 65%, at least 70%, at least 75%, at least 80%, at least 85%, at least 90%, at least 95%, at least 99%, or 100% identical to SEQ ID NO: 1664 and a VH at least 65%, at least 70%, at least 75%, at least 80%, at least 85%, at least 90%, at least 95%, at least 99%, or 100% identical to SEQ ID NO: 1668;
[8101] a VL at least 65%, at least 70%, at least 75%, at least 80%, at least 85%, at least 90%, at least 95%, at least 99%, or 100% identical to SEQ ID NO: 1669 and a VH at least 65%, at least 70%, at least 75%, at least 80%, at least 85%, at least 90%, at least 95%, at least 99%, or 100% identical to SEQ ID NO: 1671;
[8102] a VL at least 65%, at least 70%, at least 75%, at least 80%, at least 85%, at least 90%, at least 95%, at least 99%, or 100% identical to SEQ ID NO: 1674 and a VH at least 65%, at least 70%, at least 75%, at least 80%, at least 85%, at least 90%, at least 95%, at least 99%, or 100% identical to SEQ ID NO: 1678;
[8103] a VL at least 65%, at least 70%, at least 75%, at least 80%, at least 85%, at least 90%, at least 95%, at least 99%, or 100% identical to SEQ ID NO: 1682 and a VH at least 65%, at least 70%, at least 75%, at least 80%, at least 85%, at least 90%, at least 95%, at least 99%, or 100% identical to SEQ ID NO: 1686;
[8104] a VL at least 65%, at least 70%, at least 75%, at least 80%, at least 85%, at least 90%, at least 95%, at least 99%, or 100% identical to SEQ ID NO: 1692 and a VH at least 65%, at least 70%, at least 75%, at least 80%, at least 85%, at least 90%, at least 95%, at least 99%, or 100% identical to SEQ ID NO: 1696;
[8105] a VL at least 65%, at least 70%, at least 75%, at least 80%, at least 85%, at least 90%, at least 95%, at least 99%, or 100% identical to SEQ ID NO: 1700 and a VH at least 65%, at least 70%, at least 75%, at least 80%, at least 85%, at least 90%, at least 95%, at least 99%, or 100% identical to SEQ ID NO: 1704;
[8106] a VL at least 65%, at least 70%, at least 75%, at least 80%, at least 85%, at least 90%, at least 95%, at least 99%, or 100% identical to SEQ ID NO: 1711 and a VH at least 65%, at least 70%, at least 75%, at least 80%, at least 85%, at least 90%, at least 95%, at least 99%, or 100% identical to SEQ ID NO: 1714;
[8107] a VL at least 65%, at least 70%, at least 75%, at least 80%, at least 85%, at least 90%, at least 95%, at least 99%, or 100% identical to SEQ ID NO: 1721 and a VH at least 65%, at least 70%, at least 75%, at least 80%, at least 85%, at least 90%, at least 95%, at least 99%, or 100% identical to SEQ ID NO: 1722;
[8108] a VL at least 65%, at least 70%, at least 75%, at least 80%, at least 85%, at least 90%, at least 95%, at least 99%, or 100% identical to SEQ ID NO: 1724 and a VH at least 65%, at least 70%, at least 75%, at least 80%, at least 85%, at least 90%, at least 95%, at least 99%, or 100% identical to SEQ ID NO: 1726;
[8109] a VL at least 65%, at least 70%, at least 75%, at least 80%, at least 85%, at least 90%, at least 95%, at least 99%, or 100% identical to SEQ ID NO: 1730 and a VH at least 65%, at least 70%, at least 75%, at least 80%, at least 85%, at least 90%, at least 95%, at least 99%, or 100% identical to SEQ ID NO: 1734;
[8110] a VL at least 65%, at least 70%, at least 75%, at least 80%, at least 85%, at least 90%, at least 95%, at least 99%, or 100% identical to SEQ ID NO: 1740 and a VH at least 65%, at least 70%, at least 75%, at least 80%, at least 85%, at least 90%, at least 95%, at least 99%, or 100% identical to SEQ ID NO: 1742;
[8111] a VL at least 65%, at least 70%, at least 75%, at least 80%, at least 85%, at least 90%, at least 95%, at least 99%, or 100% identical to SEQ ID NO: 1746 and a VH at least 65%, at least 70%, at least 75%, at least 80%, at least 85%, at least 90%, at least 95%, at least 99%, or 100% identical to SEQ ID NO: 1750;
[8112] a VL at least 65%, at least 70%, at least 75%, at least 80%, at least 85%, at least 90%, at least 95%, at least 99%, or 100% identical to SEQ ID NO: 1755 and a VH at least 65%, at least 70%, at least 75%, at least 80%, at least 85%, at least 90%, at least 95%, at least 99%, or 100% identical to SEQ ID NO: 1759;
[8113] a VL at least 65%, at least 70%, at least 75%, at least 80%, at least 85%, at least 90%, at least 95%, at least 99%, or 100% identical to SEQ ID NO: 1755 and a VH at least 65%, at least 70%, at least 75%, at least 80%, at least 85%, at least 90%, at least 95%, at least 99%, or 100% identical to SEQ ID NO: 1760;
[8114] a VL at least 65%, at least 70%, at least 75%, at least 80%, at least 85%, at least 90%, at least 95%, at least 99%, or 100% identical to SEQ ID NO: 1730 and a VH at least 65%, at least 70%, at least 75%, at least 80%, at least 85%, at least 90%, at least 95%, at least 99%, or 100% identical to SEQ ID NO: 1734;
[8115] a VL at least 65%, at least 70%, at least 75%, at least 80%, at least 85%, at least 90%, at least 95%, at least 99%, or 100% identical to SEQ ID NO: 1764 and a VH at least 65%, at least 70%, at least 75%, at least 80%, at least 85%, at least 90%, at least 95%, at least 99%, or 100% identical to SEQ ID NO: 1765;
[8116] a VL at least 65%, at least 70%, at least 75%, at least 80%, at least 85%, at least 90%, at least 95%, at least 99%, or 100% identical to SEQ ID NO: 1766 and a VH at least 65%, at least 70%, at least 75%, at least 80%, at least 85%, at least 90%, at least 95%, at least 99%, or 100% identical to SEQ ID NO: 1768;
[8117] a VL at least 65%, at least 70%, at least 75%, at least 80%, at least 85%, at least 90%, at least 95%, at least 99%, or 100% identical to SEQ ID NO: 1771 and a VH at least 65%, at least 70%, at least 75%, at least 80%, at least 85%, at least 90%, at least 95%, at least 99%, or 100% identical to SEQ ID NO: 1775;
[8118] a VL at least 65%, at least 70%, at least 75%, at least 80%, at least 85%, at least 90%, at least 95%, at least 99%, or 100% identical to SEQ ID NO: 1779 and a VH at least 65%, at least 70%, at least 75%, at least 80%, at least 85%, at least 90%, at least 95%, at least 99%, or 100% identical to SEQ ID NO: 1783;
[8119] a VL at least 65%, at least 70%, at least 75%, at least 80%, at least 85%, at least 90%, at least 95%, at least 99%, or 100% identical to SEQ ID NO: 1784 and a VH at least 65%, at least 70%, at least 75%, at least 80%, at least 85%, at least 90%, at least 95%, at least 99%, or 100% identical to SEQ ID NO: 1785;
[8120] a VL at least 65%, at least 70%, at least 75%, at least 80%, at least 85%, at least 90%, at least 95%, at least 99%, or 100% identical to SEQ ID NO: 1788 and a VH at least 65%, at least 70%, at least 75%, at least 80%, at least 85%, at least 90%, at least 95%, at least 99%, or 100% identical to SEQ ID NO: 1792;
[8121] a VL at least 65%, at least 70%, at least 75%, at least 80%, at least 85%, at least 90%, at least 95%, at least 99%, or 100% identical to SEQ ID NO: 1794 and a VH at least 65%, at least 70%, at least 75%, at least 80%, at least 85%, at least 90%, at least 95%, at least 99%, or 100% identical to SEQ ID NO: 1797;
[8122] a VL at least 65%, at least 70%, at least 75%, at least 80%, at least 85%, at least 90%, at least 95%, at least 99%, or 100% identical to SEQ ID NO: 1800 and a VH at least 65%, at least 70%, at least 75%, at least 80%, at least 85%, at least 90%, at least 95%, at least 99%, or 100% identical to SEQ ID NO: 1804;
[8123] a VL at least 65%, at least 70%, at least 75%, at least 80%, at least 85%, at least 90%, at least 95%, at least 99%, or 100% identical to SEQ ID NO: 1806 and a VH at least 65%, at least 70%, at least 75%, at least 80%, at least 85%, at least 90%, at least 95%, at least 99%, or 100% identical to SEQ ID NO: 1809;
[8124] a VL at least 65%, at least 70%, at least 75%, at least 80%, at least 85%, at least 90%, at least 95%, at least 99%, or 100% identical to SEQ ID NO: 1812 and a VH at least 65%, at least 70%, at least 75%, at least 80%, at least 85%, at least 90%, at least 95%, at least 99%, or 100% identical to SEQ ID NO: 1816;
[8125] a VL at least 65%, at least 70%, at least 75%, at least 80%, at least 85%, at least 90%, at least 95%, at least 99%, or 100% identical to SEQ ID NO: 1819 and a VH at least 65%, at least 70%, at least 75%, at least 80%, at least 85%, at least 90%, at least 95%, at least 99%, or 100% identical to SEQ ID NO: 1823;
[8126] a VL at least 65%, at least 70%, at least 75%, at least 80%, at least 85%, at least 90%, at least 95%, at least 99%, or 100% identical to SEQ ID NO: 1826 and a VH at least 65%, at least 70%, at least 75%, at least 80%, at least 85%, at least 90%, at least 95%, at least 99%, or 100% identical to SEQ ID NO: 1830;
[8127] a VL at least 65%, at least 70%, at least 75%, at least 80%, at least 85%, at least 90%, at least 95%, at least 99%, or 100% identical to SEQ ID NO: 1980 and a VH at least 65%, at least 70%, at least 75%, at least 80%, at least 85%, at least 90%, at least 95%, at least 99%, or 100% identical to SEQ ID NO: 1984;
[8128] a VL at least 65%, at least 70%, at least 75%, at least 80%, at least 85%, at least 90%, at least 95%, at least 99%, or 100% identical to SEQ ID NO: 1988 and a VH at least 65%, at least 70%, at least 75%, at least 80%, at least 85%, at least 90%, at least 95%, at least 99%, or 100% identical to SEQ ID NO: 1992;
[8129] a VL at least 65%, at least 70%, at least 75%, at least 80%, at least 85%, at least 90%, at least 95%, at least 99%, or 100% identical to SEQ ID NO: 1996 and a VH at least 65%, at least 70%, at least 75%, at least 80%, at least 85%, at least 90%, at least 95%, at least 99%, or 100% identical to SEQ ID NO: 2000;
[8130] a VL at least 65%, at least 70%, at least 75%, at least 80%, at least 85%, at least 90%, at least 95%, at least 99%, or 100% identical to SEQ ID NO: 2004 and a VH at least 65%, at least 70%, at least 75%, at least 80%, at least 85%, at least 90%, at least 95%, at least 99%, or 100% identical to SEQ ID NO: 2008;
[8131] a VL at least 65%, at least 70%, at least 75%, at least 80%, at least 85%, at least 90%, at least 95%, at least 99%, or 100% identical to SEQ ID NO: 1833 and a VH at least 65%, at least 70%, at least 75%, at least 80%, at least 85%, at least 90%, at least 95%, at least 99%, or 100% identical to SEQ ID NO: 1837;
[8132] a VL at least 65%, at least 70%, at least 75%, at least 80%, at least 85%, at least 90%, at least 95%, at least 99%, or 100% identical to SEQ ID NO: 1840 and a VH at least 65%, at least 70%, at least 75%, at least 80%, at least 85%, at least 90%, at least 95%, at least 99%, or 100% identical to SEQ ID NO: 1844;
[8133] a VL at least 65%, at least 70%, at least 75%, at least 80%, at least 85%, at least 90%, at least 95%, at least 99%, or 100% identical to SEQ ID NO: 1847 and a VH at least 65%, at least 70%, at least 75%, at least 80%, at least 85%, at least 90%, at least 95%, at least 99%, or 100% identical to SEQ ID NO: 1851;
[8134] a VL at least 65%, at least 70%, at least 75%, at least 80%, at least 85%, at least 90%, at least 95%, at least 99%, or 100% identical to SEQ ID NO: 1854 and a VH at least 65%, at least 70%, at least 75%, at least 80%, at least 85%, at least 90%, at least 95%, at least 99%, or 100% identical to SEQ ID NO: 1858;
[8135] a VL at least 65%, at least 70%, at least 75%, at least 80%, at least 85%, at least 90%, at least 95%, at least 99%, or 100% identical to SEQ ID NO: 1861 and a VH at least 65%, at least 70%, at least 75%, at least 80%, at least 85%, at least 90%, at least 95%, at least 99%, or 100% identical to SEQ ID NO: 1865;
[8136] a VL at least 65%, at least 70%, at least 75%, at least 80%, at least 85%, at least 90%, at least 95%, at least 99%, or 100% identical to SEQ ID NO: 1361 and a VH at least 65%, at least 70%, at least 75%, at least 80%, at least 85%, at least 90%, at least 95%, at least 99%, or 100% identical to SEQ ID NO: 1365;
[8137] a VL at least 65%, at least 70%, at least 75%, at least 80%, at least 85%, at least 90%, at least 95%, at least 99%, or 100% identical to SEQ ID NO: 1868 and a VH at least 65%, at least 70%, at least 75%, at least 80%, at least 85%, at least 90%, at least 95%, at least 99%, or 100% identical to SEQ ID NO: 1871;
[8138] a VL at least 65%, at least 70%, at least 75%, at least 80%, at least 85%, at least 90%, at least 95%, at least 99%, or 100% identical to SEQ ID NO: 1874 and a VH at least 65%, at least 70%, at least 75%, at least 80%, at least 85%, at least 90%, at least 95%, at least 99%, or 100% identical to SEQ ID NO: 1877;
[8139] a VL at least 65%, at least 70%, at least 75%, at least 80%, at least 85%, at least 90%, at least 95%, at least 99%, or 100% identical to SEQ ID NO: 1880 and a VH at least 65%, at least 70%, at least 75%, at least 80%, at least 85%, at least 90%, at least 95%, at least 99%, or 100% identical to SEQ ID NO: 1884;
[8140] a VL at least 65%, at least 70%, at least 75%, at least 80%, at least 85%, at least 90%, at least 95%, at least 99%, or 100% identical to SEQ ID NO: 1887 and a VH at least 65%, at least 70%, at least 75%, at least 80%, at least 85%, at least 90%, at least 95%, at least 99%, or 100% identical to SEQ ID NO: 1890;
[8141] a VL at least 65%, at least 70%, at least 75%, at least 80%, at least 85%, at least 90%, at least 95%, at least 99%, or 100% identical to SEQ ID NO: 1893 and a VH at least 65%, at least 70%, at least 75%, at least 80%, at least 85%, at least 90%, at least 95%, at least 99%, or 100% identical to SEQ ID NO: 1897;
[8142] a VL at least 65%, at least 70%, at least 75%, at least 80%, at least 85%, at least 90%, at least 95%, at least 99%, or 100% identical to SEQ ID NO: 1900 and a VH at least 65%, at least 70%, at least 75%, at least 80%, at least 85%, at least 90%, at least 95%, at least 99%, or 100% identical to SEQ ID NO: 1904;
[8143] a VL at least 65%, at least 70%, at least 75%, at least 80%, at least 85%, at least 90%, at least 95%, at least 99%, or 100% identical to SEQ ID NO: 1907 and a VH at least 65%, at least 70%, at least 75%, at least 80%, at least 85%, at least 90%, at least 95%, at least 99%, or 100% identical to SEQ ID NO: 1910;
[8144] a VL at least 65%, at least 70%, at least 75%, at least 80%, at least 85%, at least 90%, at least 95%, at least 99%, or 100% identical to SEQ ID NO: 1913 and a VH at least 65%, at least 70%, at least 75%, at least 80%, at least 85%, at least 90%, at least 95%, at least 99%, or 100% identical to SEQ ID NO: 1916;
[8145] a VL at least 65%, at least 70%, at least 75%, at least 80%, at least 85%, at least 90%, at least 95%, at least 99%, or 100% identical to SEQ ID NO: 1919 and a VH at least 65%, at least 70%, at least 75%, at least 80%, at least 85%, at least 90%, at least 95%, at least 99%, or 100% identical to SEQ ID NO: 1923;
[8146] a VL at least 65%, at least 70%, at least 75%, at least 80%, at least 85%, at least 90%, at least 95%, at least 99%, or 100% identical to SEQ ID NO: 1926 and a VH at least 65%, at least 70%, at least 75%, at least 80%, at least 85%, at least 90%, at least 95%, at least 99%, or 100% identical to SEQ ID NO: 1930;
[8147] a VL at least 65%, at least 70%, at least 75%, at least 80%, at least 85%, at least 90%, at least 95%, at least 99%, or 100% identical to SEQ ID NO: 1933 and a VH at least 65%, at least 70%, at least 75%, at least 80%, at least 85%, at least 90%, at least 95%, at least 99%, or 100% identical to SEQ ID NO: 1937;
[8148] a VL at least 65%, at least 70%, at least 75%, at least 80%, at least 85%, at least 90%, at least 95%, at least 99%, or 100% identical to SEQ ID NO: 1940 and a VH at least 65%, at least 70%, at least 75%, at least 80%, at least 85%, at least 90%, at least 95%, at least 99%, or 100% identical to SEQ ID NO: 1944;
[8149] a VL at least 65%, at least 70%, at least 75%, at least 80%, at least 85%, at least 90%, at least 95%, at least 99%, or 100% identical to SEQ ID NO: 1947 and a VH at least 65%, at least 70%, at least 75%, at least 80%, at least 85%, at least 90%, at least 95%, at least 99%, or 100% identical to SEQ ID NO: 1950;
[8150] a VL at least 65%, at least 70%, at least 75%, at least 80%, at least 85%, at least 90%, at least 95%, at least 99%, or 100% identical to SEQ ID NO: 1952 and a VH at least 65%, at least 70%, at least 75%, at least 80%, at least 85%, at least 90%, at least 95%, at least 99%, or 100% identical to SEQ ID NO: 1956;
[8151] a VL at least 65%, at least 70%, at least 75%, at least 80%, at least 85%, at least 90%, at least 95%, at least 99%, or 100% identical to SEQ ID NO: 1958 and a VH at least 65%, at least 70%, at least 75%, at least 80%, at least 85%, at least 90%, at least 95%, at least 99%, or 100% identical to SEQ ID NO: 1962;
[8152] a VL at least 65%, at least 70%, at least 75%, at least 80%, at least 85%, at least 90%, at least 95%, at least 99%, or 100% identical to SEQ ID NO: 1965 and a VH at least 65%, at least 70%, at least 75%, at least 80%, at least 85%, at least 90%, at least 95%, at least 99%, or 100% identical to SEQ ID NO: 1969; or
[8153] a VL at least 65%, at least 70%, at least 75%, at least 80%, at least 85%, at least 90%, at least 95%, at least 99%, or 100% identical to SEQ ID NO: 1971 and a VH at least 65%, at least 70%, at least 75%, at least 80%, at least 85%, at least 90%, at least 95%, at least 99%, or 100% identical to SEQ ID NO: 1974.

[8154] In some aspects, any one of the antigen binding polypeptides, antigen binding polypeptide complexes, polypeptides, antibodies or antigen binding fragments thereof disclosed herein have a poly-reactivity score of from 0) to about 100, from 0 to about 90, from 0 to about 80, from 0 to about 70, from 0) to about 60, from 0) to about 50, from 0 to about 40, from 0 to about 30, from 0 to about 25, from 0) to about 20, from 0 to about 15, from 0 to about 10, or from 0 to about 5.

[8155] In some aspects, any one of the antigen binding polypeptides, antigen binding polypeptide complexes, polypeptides, antibodies or antigen binding fragments thereof disclosed herein have a poly-reactivity score of from 0 to about 50, from 0 to about 40, from 0 to about 30, from 0 to about 25, from 0 to about 20, from 0 to about 15, from 0 to about 10, or from 0 to about 5.

[8156] In some aspects, any one of the antigen binding polypeptides, antigen binding polypeptide complexes, polypeptides, antibodies or antigen binding fragments thereof disclosed herein have a poly-reactivity score of from 0 to about 10, or from 0 to about 5.

[8157] In some aspects, any one of the antigen binding polypeptides, antigen binding polypeptide complexes, polypeptides, antibodies or antigen binding fragments thereof disclosed herein have a poly-reactivity score of about 100, 95, 90, 85, 80, 75, 70, 65, 60, 55, 50, 45, 40, 35, 30, 25, 20, 19, 18, 17, 16, 15, 14, 13, 12, 10, 9, 8, 7, 6, 5, 4, 3, 2, 1, or 0.

[8158] In some aspects, any one of the antigen binding polypeptides, antigen binding polypeptide complexes, polypeptides, antibodies or antigen binding fragments thereof disclosed herein have a poly-reactivity score of about 20, 19, 18, 17, 16, 15, 14, 13, 12, 10, 9, 8, 7, 6, 5, 4, 3, 2, 1, or 0.

[8159] In some aspects, any one of the antigen binding polypeptides, antigen binding polypeptide complexes, polypeptides, antibodies or antigen binding fragments thereof disclosed herein have a poly-reactivity score of about 10, 9, 8, 7, 6, 5, 4, 3, 2, 1, or 0.

### Amino Acid Linkers

[8160] In some aspects, an antigen binding polypeptide or polypeptide complex (e.g., an antibody or antigen binding fragment thereof) provided herein comprises one or more optional amino acid linkers between two or more regions of the antigen binding polypeptide or polypeptide complex.

[8161] As used herein, an “amino acid linker” can be a single amino acid or short amino acid sequence that is capable of joining two regions of an antigen binding polypeptide or polypeptide complex provided herein in a stable manner that maintains or promotes a function associated with the regions. However, as used herein, an “amino acid linker” can also include where an amino acid linker is not present between two regions (referred to herein as an amino acid linker having 0 amino acids). In some aspects, an amino acid linker is represented herein in a structure of an antigen binding polypeptide or polypeptide complex by the abbreviation “1” or “L” and a number (e.g., L1 to denote a first linker. L2 to denote a second linker. L3 to denote a third linker. L4 to denote a fourth linker. L5 to denote a fifth linker. L6 to denote a sixth linker. L7 to denote a seventh linker, and L8 to denote an eighth linker. L9 to denote a ninth linker. L10) to denote a tenth linker). In some aspects, such enumerated amino acid linkers (e.g., L1) can have the same or different sequence as any other enumerated amino acid linker (e.g., L2, etc.).

[8162] In one aspect, an amino acid linker (e.g., one or more of L1, L2, L3, L4, L5, L6, L7, L8, L9, or L10 of a first, second, third and/or fourth polypeptide of an antigen binding polypeptide or polypeptide complex structure provided herein) has a length of from 0 amino acids (i.e., an amino acid linker is not present) to about 50 amino acids. In another aspect, the amino acid linker has a length of from 0 amino acids to about 45 amino acids. 0 amino acids to about 40 amino acids. 0 amino acids to about 35 amino acids. 0 amino acids to about 30 amino acids. 0 amino acids to about 25 amino acids. 0 amino acids to about 20 amino acids. 0 amino acids to about 15 amino acids. 0 amino acids to about 10 amino acids. 0 amino acids to about 5 amino acids, about 1 amino acid to about 45 amino acids, about 1 amino acid to about 40) amino acids, about 1 amino acid to about 35 amino acids, about 1 amino acid to about 30 amino acids, about 1 amino acid to about 25 amino acids, about 1 amino acid to about 20 amino acids. 1 amino acid to about 15 amino acids, about 1 amino acid to about 10 amino acids, about 1 amino acid to about 5 amino acids, about 5 amino acids to about 50 amino acids, about 5 amino acids to about 45 amino acids, about 5 amino acids to about 40 amino acids, about 5 amino acids to about 35 amino acids, about 5 amino acids to about 30 amino acids, about 5 amino acids to about 25 amino acids, about 5 amino acids to about 20 amino acids, about 5 amino acids to about 15 amino acids, about 5 amino acids to about 10 amino acids, about 10) amino acids to about 50 amino acids, about 10 amino acids to about 45 amino acids, about 10 amino acids to about 40 amino acids, about 10 amino acids to about 35 amino acids, about 10 amino acids to about 30 amino acids, about 10 amino acids to about 25 amino acids, about 10 amino acids to about 20 amino acids, about 10 amino acids to about 15 amino acids, about 15 amino acids to about 50 amino acids, about 15 amino acids to about 45 amino acids, about 15 amino acids to about 40 amino acids, about 15 amino acids to about 35 amino acids, about 15 amino acids to about 30 amino acids, about 15 amino acids to about 25 amino acids, about 15 amino acids to about 20 amino acids, about 20 amino acids to about 50 amino acids, about 20 amino acids to about 45 amino acids, about 20 amino acids to about 40 amino acids, about 20) amino acids to about 35 amino acids, about 20 amino acids to about 30 amino acids, about 20 amino acids to about 25 amino acids, about 25 amino acids to about 50 amino acids, about 25 amino acids to about 45 amino acids, about 25 amino acids to about 40 amino acids, about 25 amino acids to about 35 amino acids, about 25 amino acids to about 30 amino acids, about 30 amino acids to about 50 amino acids, about 30) amino acids to about 45 amino acids, about 30 amino acids to about 40 amino acids, about 30 amino acids to about 35 amino acids, about 40 amino acids to about 50 amino acids, about 40 amino acids to about 45 amino acids, or about 45 amino acids to about 50 amino acids

[8163] In another aspect, the amino acid linker (e.g., one or more of L1, L2, L3, L4, L5, L6, L7, L8, L9, or L10 of a first, second, third and/or fourth polypeptide of an antigen binding polypeptide or polypeptide complex structure provided herein) has 0 amino acids (i.e., an amino acid linker is not present) or about 1, about 2, about 3, about 4, about 5, about 6, about 7, about 8, about 9, about 10, about 11, about 12, about 13, about 14, about 15, about 16, about 17, about 18, about 19, about 20, about 25, about 30, about 35, about 40), about 45, or about 50 amino acids.

[8164] In one aspect, the amino acid linker (e.g., one or more of L1, L2, L3, L4, L5, L6, L7, L8, L9, or L10 of a first, second, third and/or fourth polypeptide of an antigen binding polypeptide or polypeptide complex structure provided herein) consists of one or more amino acid residues. In one aspect, the amino acid residues are selected from the group consisting of glycine, alanine, serine, threonine, cysteine, asparagine, glutamine, leucine, isoleucine, valine, proline, histidine, aspartic acid, glutamic acid, lysine, arginine, methionine, phenylalanine, tryptophan, and tyrosine.

[8165] In one aspect, an amino acid linker is non-immunogenic. In one aspect, a non-immunogenic linker consists of serine, glycine and/or alanine residues, or consists of serine and/or glycine residues. In another aspect, an amino acid linker does not contain a T cell epitope or consensus T cell epitope.

[8166] In one aspect, an amino acid linker consists of one or more residues of alanine, cysteine, glycine, isoleucine, leucine, methionine, phenylalanine, proline, tryptophan, tyrosine, or valine (e.g., one or more of L1, L2, L3, L4, L5, L6, L7, L8, L9, or L10 of a first, second, third and/or fourth polypeptide of an antigen binding polypeptide or polypeptide complex structure provided herein).

[8167] Amino acid linker sequences that can be used with the antigen binding polypeptides or polypeptide complexes (e.g., an antibody or antigen binding fragment thereof) provided herein are well known and can be incorporated into the antigen binding polypeptides and polypeptide complexes provided herein using routine molecular biology and recombinant DNA techniques. Sec, e.g., Chen et al., Adv Drug Deliv Rev., 65(10):1357-1369, 2013; and Chichili et al., Protein Sci., 22(2):153-167, 2013.

[8168] In one aspect, an amino acid linker (e.g., one or more of L1, L2, L3, L4, L5, L6, L7, L8, L9, or L10 of a first, second, third and/or fourth polypeptide of an antigen binding polypeptide or polypeptide complex structure provided herein) comprises an amino acid sequence of G, or A, or an amino acid sequence having at least 65%, at least 70%, at least 75%, at least 80%, at least 85%, at least 90%, at least 95%, at least 99%, or 100% identity to amino acid sequence GSS or ASG, or an amino acid sequence having at least 65%, at least 70%, at least 75%, at least 80%, at least 85%, at least 90%, at least 95%, at least 99%, or 100% identity to any one of SEQ ID NOs: 333-373 or 967-971. In one aspect, an amino acid linker (e.g., one or more of L1, L2, L3, L4, L5, L6, L7, L8, L9, or L10 of a first, second, third and/or fourth polypeptide of an antigen binding polypeptide or polypeptide complex structure provided herein) comprises an amino acid sequence having at least 65%, at least 70%, at least 75%, at least 80%, at least 85%, at least 90%, at least 95%, at least 99%, or 100% identity to any one of SEQ ID NOs: 333-345 or 967-971.

[8169] In some aspects, L1 comprises an amino acid sequence of G, or A, or an amino acid sequence having at least 65%, at least 70%, at least 75%, at least 80%, at least 85%, at least 90%, at least 95%, at least 99%, or 100% identity to amino acid sequence GSS or ASG, or an amino acid sequence having at least 65%, at least 70%, at least 75%, at least 80%, at least 85%, at least 90%, at least 95%, at least 99%, or 100% identity to any one of SEQ ID NOs: 333-373 or 967-971. In some aspects, L1 comprises an amino acid sequence having at least 65%, at least 70%, at least 75%, at least 80%, at least 85%, at least 90%, at least 95%, at least 99%, or 100% identity to any one of SEQ ID NOs: 333-345 or 967-971. In some aspects, L1 comprises 0 amino acids (i.e., L1 is not present).

[8170] In some aspects. L2 comprises an amino acid sequence of G, or A, or an amino acid sequence having at least 65%, at least 70%, at least 75%, at least 80%, at least 85%, at least 90%, at least 95%, at least 99%, or 100% identity to amino acid sequence GSS or ASG, or an amino acid sequence having at least 65%, at least 70%, at least 75%, at least 80%, at least 85%, at least 90%, at least 95%, at least 99%, or 100% identity to any one of SEQ ID NOs: 333-373 or 967-971. In some aspects. L2 comprises an amino acid sequence having at least 65%, at least 70%, at least 75%, at least 80%, at least 85%, at least 90%, at least 95%, at least 99%, or 100% identity to any one of SEQ ID NOs: 333-345 or 967-971. In some aspects. L2 comprises 0 amino acids (i.e., L2 is not present).

[8171] In some aspects. L3 comprises an amino acid sequence of G, or A, or an amino acid sequence having at least 65%, at least 70%, at least 75%, at least 80%, at least 85%, at least 90%, at least 95%, at least 99%, or 100% identity to amino acid sequence GSS or ASG, or an amino acid sequence having at least 65%, at least 70%, at least 75%, at least 80%, at least 85%, at least 90%, at least 95%, at least 99%, or 100% identity to any one of SEQ ID NOs: 333-373 or 967-971. In some aspects. L3 comprises an amino acid sequence having at least 65%, at least 70%, at least 75%, at least 80%, at least 85%, at least 90%, at least 95%, at least 99%, or 100% identity to any one of SEQ ID NOs: 333-345 or 967-971. In some aspects. L3 comprises 0 amino acids (i.e., L3 is not present).

[8172] In some aspects. L4 comprises an amino acid sequence of G, or A, or an amino acid sequence having at least 65%, at least 70%, at least 75%, at least 80%, at least 85%, at least 90%, at least 95%, at least 99%, or 100% identity to amino acid sequence GSS or ASG, or an amino acid sequence having at least 65%, at least 70%, at least 75%, at least 80%, at least 85%, at least 90%, at least 95%, at least 99%, or 100% identity to any one of SEQ ID NOs: 333-373 or 967-971. In some aspects. L4 comprises an amino acid sequence having at least 65%, at least 70%, at least 75%, at least 80%, at least 85%, at least 90%, at least 95%, at least 99%, or 100% identity to any one of SEQ ID NOs: 333-345 or 967-971. In some aspects. L4 comprises 0 amino acids (i.e., L4 is not present).

[8173] In some aspects. L5 comprises an amino acid sequence of G, or A, or an amino acid sequence having at least 65%, at least 70%, at least 75%, at least 80%, at least 85%, at least 90%, at least 95%, at least 99%, or 100% identity to amino acid sequence GSS or ASG, or an amino acid sequence having at least 65%, at least 70%, at least 75%, at least 80%, at least 85%, at least 90%, at least 95%, at least 99%, or 100% identity to any one of SEQ ID NOs: 333-373 or 967-971. In some aspects. L5 comprises an amino acid sequence having at least 65%, at least 70%, at least 75%, at least 80%, at least 85%, at least 90%, at least 95%, at least 99%, or 100% identity to any one of SEQ ID NOs: 333-345 or 967-971. In some aspects. L5 comprises 0 amino acids (i.e., L5 is not present).

[8174] In some aspects. L6 comprises an amino acid sequence of G, or A, or an amino acid sequence having at least 65%, at least 70%, at least 75%, at least 80%, at least 85%, at least 90%, at least 95%, at least 99%, or 100% identity to amino acid sequence GSS or ASG, or an amino acid sequence having at least 65%, at least 70%, at least 75%, at least 80%, at least 85%, at least 90%, at least 95%, at least 99%, or 100% identity to any one of SEQ ID NOs: 333-373 or 967-971. In some aspects. L6 comprises an amino acid sequence having at least 65%, at least 70%, at least 75%, at least 80%, at least 85%, at least 90%, at least 95%, at least 99%, or 100% identity to any one of SEQ ID NOs: 333-345 or 967-971. In some aspects. L6 comprises 0 amino acids (i.e., L6 is not present).

[8175] In some aspects. L7 comprises an amino acid sequence of G, or A, or an amino acid sequence having at least 65%, at least 70%, at least 75%, at least 80%, at least 85%, at least 90%, at least 95%, at least 99%, or 100% identity to amino acid sequence GSS or ASG, or an amino acid sequence having at least 65%, at least 70%, at least 75%, at least 80%, at least 85%, at least 90%, at least 95%, at least 99%, or 100% identity to any one of SEQ ID NOs: 333-373 or 967-971. In some aspects. L7 comprises an amino acid sequence having at least 65%, at least 70%, at least 75%, at least 80%, at least 85%, at least 90%, at least 95%, at least 99%, or 100% identity to any one of SEQ ID NOs: 333-345 or 967-971. In some aspects. L7 comprises 0 amino acids (i.e., L7 is not present).

[8176] In some aspects. L8 comprises an amino acid sequence of G, or A, or an amino acid sequence having at least 65%, at least 70%, at least 75%, at least 80%, at least 85%, at least 90%, at least 95%, at least 99%, or 100% identity to amino acid sequence GSS or ASG, or an amino acid sequence having at least 65%, at least 70%, at least 75%, at least 80%, at least 85%, at least 90%, at least 95%, at least 99%, or 100% identity to any one of SEQ ID NOs: 333-373 or 967-971. In some aspects. L8 comprises an amino acid sequence having at least 65%, at least 70%, at least 75%, at least 80%, at least 85%, at least 90%, at least 95%, at least 99%, or 100% identity to any one of SEQ ID NOs: 333-345 or 967-971. In some aspects. L8 comprises 0 amino acids (i.e., L8 is not present).

[8177] In some aspects. L9 comprises an amino acid sequence of G, or A, or an amino acid sequence having at least 65%, at least 70%, at least 75%, at least 80%, at least 85%, at least 90%, at least 95%, at least 99%, or 100% identity to amino acid sequence GSS or ASG, or an amino acid sequence having at least 65%, at least 70%, at least 75%, at least 80%, at least 85%, at least 90%, at least 95%, at least 99%, or 100% identity to any one of SEQ ID NOs: 333-373 or 967-971. In some aspects. L9 comprises an amino acid sequence having at least 65%, at least 70%, at least 75%, at least 80%, at least 85%, at least 90%, at least 95%, at least 99%, or 100% identity to any one of SEQ ID NOs: 333-345 or 967-971. In some aspects. L9 comprises 0 amino acids (i.e., L9 is not present).

[8178] In some aspects. L10 comprises an amino acid sequence of G, or A, or an amino acid sequence having at least 65%, at least 70%, at least 75%, at least 80%, at least 85%, at least 90%, at least 95%, at least 99%, or 100% identity to amino acid sequence GSS or ASG, or an amino acid sequence having at least 65%, at least 70%, at least 75%, at least 80%, at least 85%, at least 90%, at least 95%, at least 99%, or 100% identity to any one of SEQ ID NOs: 333-373 or 967-971. In some aspects. L10 comprises an amino acid sequence having at least 65%, at least 70%, at least 75%, at least 80%, at least 85%, at least 90%, at least 95%, at least 99%, or 100% identity to any one of SEQ ID NOs: 333-345 or 967-971. In some aspects. L10 comprises 0 amino acids (i.e., L10 is not present).

[8179] In some aspects. L11 comprises an amino acid sequence of G, or A, or an amino acid sequence having at least 65%, at least 70%, at least 75%, at least 80%, at least 85%, at least 90%, at least 95%, at least 99%, or 100% identity to amino acid sequence GSS or ASG, or an amino acid sequence having at least 65%, at least 70%, at least 75%, at least 80%, at least 85%, at least 90%, at least 95%, at least 99%, or 100% identity to any one of SEQ ID NOs: 333-373 or 967-971. In some aspects. L10 comprises an amino acid sequence having at least 65%, at least 70%, at least 75%, at least 80%, at least 85%, at least 90%, at least 95%, at least 99%, or 100% identity to any one of SEQ ID NOs: 333-345 or 967-971. In some aspects. L10 comprises 0 amino acids (i.e., L11 is not present).

[8180] In some aspects. L12 comprises an amino acid sequence of G, or A, or an amino acid sequence having at least 65%, at least 70%, at least 75%, at least 80%, at least 85%, at least 90%, at least 95%, at least 99%, or 100% identity to amino acid sequence GSS or ASG, or an amino acid sequence having at least 65%, at least 70%, at least 75%, at least 80%, at least 85%, at least 90%, at least 95%, at least 99%, or 100% identity to any one of SEQ ID NOs: 333-373 or 967-971. In some aspects. L10 comprises an amino acid sequence having at least 65%, at least 70%, at least 75%, at least 80%, at least 85%, at least 90%, at least 95%, at least 99%, or 100% identity to any one of SEQ ID NOs: 333-345 or 967-971. In some aspects. L10 comprises 0 amino acids (i.e., L12 is not present).

### Modifications

[8181] In some aspects, an antigen binding polypeptide or polypeptide complex (e.g., an antibody or antigen binding fragment thereof) provided herein comprises an effector function mutation or half-life extension mutation.

[8182] Effector functions are an important part of the humoral immune response and form a link between innate and adaptive immunity. Most effector functions are induced via the Fc region of an antibody, which can interact with complement proteins and specialized Fc receptors. As used herein, an “effector function mutation” or “Fc effector function mutation” refer to a change in the amino acid sequence, typically in the Fc region, which can increase or decrease effector function, for example, increase binding affinity of Fc for specific Fc receptors, or increase antibody-dependent cellular cytotoxicity (ADCC) activity.

[8183] “Half-life” of a pharmaceutically active substance is the time it takes for the amount of the substance, once administered to the body, to reduce by half. A “half-life extension mutation” of an antigen binding polypeptide or polypeptide complex provided herein refers to a change in the amino acid sequence, typically in the Fc region, which increases the half-life of the antigen binding polypeptide or polypeptide complex (e.g., by increasing Fc receptor binding affinity, slowing off-rate for Fc and Fc receptors, and/or increased sialylation).

[8184] Examples of Fc effector function mutations that decrease or knockout function include, but are not limited to, the following substitutions in the Fc region, based on the EU numbering scheme; (LA) L234A, L235A, (LS) M428L, N434S, P239A, N297A, or equivalent thereof, or a combination thereof.

[8185] Examples of Fc effector function mutations that increase function include, but are not limited to, the following substitutions in the Fc region, based on the EU numbering scheme: S298A/E333A/K334A, S239D/1332E, S239D/A330L/1332E, G236A/S239D/1332E, or equivalent thereof, or a combination thereof.

[8186] Additional examples of effector function mutations, half-life extension mutations and methods for incorporating the same into an amino acid sequence are known and described, for example, in Saunders. “Conceptual Approaches to Modulating Antibody Effector Functions and Circulation Half-Life.” Front. Immunol. Jun. 7, 2019.

[8187] In another aspect, an antigen binding polypeptide or polypeptide complex (e.g., an antibody or antigen binding fragment thereof) provided herein comprises one or more knob-into-hole modifications.

[8188] The term “knob-into-hole modification.” as used herein, refers to a genetic modification that directs the pairing of two polypeptides to promote heterodimerization. In one aspect, the modification introduces a protuberance (knob) into one polypeptide and a cavity (hole) into the other polypeptide at an interface in which the two polypeptides interact. In another aspect, a knob-into-hole modification can be created by introducing only a hole modification, for example, by replacing an amino acid residue with a smaller side chain than the original amino acid residue (e.g., a substitution of one or more serine, threonine, valine or alanine residues, or a combination thereof). In yet another aspect, a knob-into-hole modification can be created by introducing only a knob modification, for example, by replacing an amino acid residue with a larger side chain than the original amino acid residue (e.g., a substitution of one or more tryptophan or tyrosine residues, or a combination thereof).

[8189] In one aspect, the knob-into-hole modification is in the binding interface of two Fc regions, the binding interface of two CH2 regions, the binding interface of two CH3 regions, the binding interface of a CL region and a CH1 region, or the binding interface of a VH region and a VL region. Sec, e.g., U.S. Pub. No. 2007/0178552, Int'l Pub. No, WO 96/027011, Int'l Pub. No, WO 98/050431 and Zhu et al., Protein Science 6:781-788, 1987.

[8190] In one aspect, the antigen binding polypeptide or polypeptide complex comprises one, two, three, four, five, six, seven, eight, nine, ten, or more knob-into-hole modifications.

[8191] Knob-into-hole modifications are well known and can be incorporated into antigen binding polypeptides and polypeptide complexes provided herein using routine molecular biology and recombinant DNA techniques. See, e.g., U.S. Pub. No. 2003/0078385; Int'l Pub. No, WO 96/027011; Ridgway et al., Protein Eng., 9:617-621, 1996; and Merchant et al., Nat. Biotechnol., 16:677-681, 1998.

[8192] In one aspect, the knob-into-hole modification is an amino acid substitution. As used herein, such a substitution is described based on the EU numbering scheme of Kabat, which corresponds to the numbering in the Protein Data Bank (PDB).

[8193] In one aspect, the knob-into-hole modification is a knob substitution of S354C, T366W, or equivalent thereof, or a combination thereof based on the EU numbering scheme.

[8194] In one aspect, the knob-into-hole modification is a hole substitution of Y349C, T366S, L368A, Y407V, or equivalent thereof, or a combination thereof, based on the EU numbering scheme.

[8195] In another aspect, the knob-into-hole modifications are knob substitutions of S354C, T366W, or equivalent thereof, based on the EU numbering scheme.

[8196] In another aspect, the knob-into-hole modifications are hole substitutions of Y349C, T366S, L368A and Y407V, or equivalent thereof, based on the EU numbering scheme.

[8197] In another aspect, an antigen binding polypeptide complex is an IgG1 or IgG4 antibody or antigen binding fragment thereof and the knob-into-hole modifications are knob substitutions of S354C and T366W and/or hole substitutions of Y349C, T366S, L368A and Y407V, or equivalent thereof.

[8198] In one aspect, the antigen binding polypeptide complex is an IgG1 or IgG4 antibody or antigen binding fragment thereof and the knob-into-hole modifications are knob substitutions of S354C and T366W, or equivalent thereof.

[8199] In one aspect, the antigen binding polypeptide complex is an IgG1 or IgG4 antibody or antigen binding fragment thereof and the knob-into-hole modifications are hole substitutions of Y349C, T366S, L368A and Y407V, or equivalent thereof.

[8200] In one aspect, the antigen binding polypeptide complex is an IgG1 or IgG4 antibody or antigen binding fragment thereof and the knob-into-hole modifications are knob substitutions of S354C and T366W and hole substitutions of Y349C, T366S, L368A and Y407V, or equivalent thereof.

[8201] In one aspect, the antigen binding polypeptide complex is an IgG1 or IgG4 antibody or antigen binding fragment thereof and the Fc region comprises a knob-into-hole modification comprising knob substitutions of S354C and T366W, or equivalent thereof, and/or hole substitutions of Y349C, T366S, L368A and Y407V, or equivalent thereof, and/or a half-life extension amino acid substitution comprising: a LA (M428L and N434A, or equivalent thereof, based on the EU numbering scheme) amino acid substitution, a LS (M428L and N434S, or equivalent thereof, based on the EU numbering scheme) amino acid substitution, L234F and L235E, or equivalent thereof (based on the EU numbering scheme) amino acid substitutions, a TM (L234F, L235E, and P331S, or equivalent thereof, based on the EU numbering scheme) amino acid substitution, a YTE (M252Y, S254T, and T256E, or equivalent thereof, based on the EU numbering scheme) amino acid substitution, or any combination thereof.

[8202] In one aspect, the antigen binding polypeptide complex is an IgG1 or IgG4 antibody or antigen binding fragment thereof and the Fc region comprises knob substitutions of S354C and T366W, or equivalent thereof, and a half-life extension amino acid substitution comprising: a LA (M428L and N434A, or equivalent thereof, based on the EU numbering scheme) amino acid substitution, a LS (M428L and N434S, or equivalent thereof, based on the EU numbering scheme) amino acid substitution. L234F and L235E, or equivalent thereof (based on the EU numbering scheme) amino acid substitutions, a TM (L234F, L235E, and P331S, or equivalent thereof, based on the EU numbering scheme) amino acid substitution, a YTE (M252Y, S254T, and T256E, or equivalent thereof, based on the EU numbering scheme) amino acid substitution, or any combination thereof.

[8203] In one aspect, the antigen binding polypeptide complex is an IgG1 or IgG4 antibody or antigen binding fragment thereof and the Fc region comprises hole substitutions of Y349C, T366S, L368A and Y407V, or equivalent thereof, and a half-life extension amino acid substitution comprising: a LA (M428L and N434A, or equivalent thereof, based on the EU numbering scheme) amino acid substitution, a LS (M428L and N434S, or equivalent thereof, based on the EU numbering scheme) amino acid substitution. L234F and L235E, or equivalent thereof (based on the EU numbering scheme) amino acid substitutions, a TM (L234F, L235E, and P331S, or equivalent thereof, based on the EU numbering scheme) amino acid substitution, a YTE (M252Y, S254T, and T256E, or equivalent thereof, based on the EU numbering scheme) amino acid substitution, or any combination thereof.

### Detectable Labels

[8204] In some aspects, an antigen binding polypeptide or polypeptide complex (e.g., an antibody or antigen binding fragment thereof) provided herein comprises one or more detectable labels. An antigen binding polypeptide or polypeptide complex (e.g., an antibody or antigen binding fragment thereof) containing a detectable label is useful in therapeutic, diagnostic, imaging (e.g., radioimaging), or basic research applications.

[8205] In one aspect, the detectable label is a radioactive label. Examples of a radioactive label include, but are not limited to, the isotopes ³H, ¹⁴C, ³²P, ³⁵S, ³⁶Cl, ⁵¹Cr, ⁵⁷Co, ⁵⁸Co, ⁵⁹Fe, ⁹⁰Y, ¹²¹I, ¹²⁴I, ¹²⁵I, ¹³¹I, ¹¹¹In, ¹¹⁷Lu, ²¹¹At, ¹⁹⁸Au, ⁶⁷Cu, ²²⁵Ac, ²¹³Bi, ⁹⁹Tc, ¹⁸⁶Re and ⁸⁹Zr.

[8206] In another aspect, the detectable label is a chemiluminescent label, fluorescent label, enzyme, biotin, or a combination thereof.

[8207] In another aspect, the detectable label is a peptide tag. In one aspect, the peptide tag is located at or near the N-terminus of the polypeptide or polypeptide complex. In another aspect, the peptide tag is located or near at the C-terminus of the polypeptide or polypeptide complex. In another aspect, the peptide tag is an affinity tag or fusion tag.

[8208] In another aspect, the detectable label is a polyhistidine tag, polyarginine tag, glutathione-S-transferase (GST), maltose binding protein (MBP), chitin binding protein (CBP), Strep-tag, thioredoxin (TRX), poly (NANP), FLAG tag, ALFA-tag, V5-tag, Myc-tag, hemagglutinin (HA) tag, Spot tag, T7 tag, NE tag, or green fluorescence protein (GFP), or a combination thereof. In one aspect, the polyhistidine tag consists of from about 4 to about 10 histidine residues. In one aspect, the polyhistidine tag consists of about 4, about 5, about 6, about 7, about 8, about 9, or about 10 histidine residues.

[8209] Additional examples of detectable labels and methods for introducing detectable labels into a polypeptide are known and include routine chemical, molecular biology and recombinant DNA techniques. See, e.g., Hnatowich et al., Science. 220 (4597): 613-615, 1983; Yao et al., Int. J. Mol. Sci., 17 (2): 194, 2016; Kimple et al., Curr. Protoc. Protein Sci., 73; Unit 9.9, 2013; Sambrook J. Fritsch E F. Molecular Cloning: A Laboratory Manual. Cold Spring Harbor Laboratory Press: Cold Spring Harbor, N.Y.: 1989; Molecular Cell Biology. 4^{th} edition. Section 3.5. Purifying. Detecting and Characterizing Proteins; and Mahmoodi et al., Cogent Biology. 5 (1):DOI: 10/1080/23312025.2019.1665406.

### Polypeptides, Polynucleotides, Vectors, Cells, and Protein Production Methods

[8210] In some aspects, a polynucleotide encoding an antigen binding polypeptide or antigen polypeptide complex (e.g., an antibody or antigen binding fragment thereof) is provided herein.

[8211] In some aspects, the polypeptides provided herein comprise a CL and a CH1. In some aspects, a polypeptide provided herein has an improved isoelectric point compared to a same polypeptide not comprising a CL and a CH1. It is to be understood that “a same polypeptide not comprising a CL and a CH1” refers to a polypeptide having a same amino acid sequence as the reference polypeptide exception made for the CL and the CH1 being absent from the “same polypeptide not comprising a CL and a CH1.” For example, a reference polypeptide (polypeptide R) may comprise an amino acid sequence represented by the formula VL1-CL-VL2-VH2-VH1-CH1. “a same polypeptide not comprising a CL and a CH1” (polypeptide R′) it is to be understood as comprising an amino acid sequence that is represented by the formula VL1-VL2-VH2-VH1, wherein the VL1, the VL2, the VH1, and the VH1 in the polypeptide R comprise an amino acid sequence identical to the amino acid sequence comprised in the VL1, the VL2, the VH1, and the VH1 comprised in the polypeptide R′.

[8212] Without wishing to be bound to any particular theory, it is believed that the isoelectric point (pI) corresponds to the pH at which the antibody has no electrical charge. If the pH of the surrounding environment is below the antibody's pI, then the antibody molecule carries a net positive charge. If the pH of the surrounding environment is above the antibody's pI, then the antibody molecule carries a net negative charge. The pI of an antibody can influence its pharmacokinetics properties. The surface of most cells is negatively charged, thus antibodies (or antigen binding fragments thereof) having a net positive charge may possess advantageous pharmacokinetics properties. Increased net positive charge can also result in increased blood clearance and increased tissue retention with shorter half-life, whereas increased net negative charge can results in decreased tissue uptake and longer half-life. For an antibody to be positively charged the environmental pH needs to be below the pI of the antibody, and for an antibody to be negatively charged the environmental pH needs to be above the pI of the antibody. Physiological pH is of about 7-7.5 (generally between 7.35 and 7.45).

[8213] In other aspects, provided herein is a vector comprising a polynucleotide provided herein.

[8214] In yet other aspects, provided herein is a host cell comprising a polynucleotide or vector provided herein.

[8215] As used herein, the term “host cell” can be any type of cell, e.g., a primary cell, a cell in culture, a cell from a cell line, or a cell comprised in an organism. In some aspects, the term “host cell” refers to a cell containing a foreign nucleic acid molecule (e.g., a cell transformed, transfected, or transduced with a polynucleotide (e.g., DNA or mRNA)) as well as the progeny or potential progeny of such a cell. Progeny of such a cell may not be identical to the parent cell, e.g., due to mutations or environmental influences that may occur in succeeding generations or integration of the nucleic acid molecule into the host cell genome. Methods which are well known to those skilled in the art can be used to construct vectors encoding antigen binding polypeptides and polypeptide complexes (e.g., CDR, VH, VL, heavy chain and/or light chain coding sequences and appropriate transcriptional and translational control signals). These methods include, for example, in vitro recombinant DNA techniques, synthetic techniques, and in vivo genetic engineering (e.g., transgenesis).

[8216] A vector can be transformed, transferred, or transduced into a host cell by conventional techniques and the resulting cell can then be cultured by conventional techniques to produce an antigen binding polypeptide or antigen binding polypeptide complex comprising, e.g., six CDRs, VH, VL, VH and VL, heavy chain, light chain, or heavy and light chain, or a domain thereof (e.g., one or more CDRs, VH, VL, VH and VL, heavy chain, or light chain). Thus, provided herein are host cells containing a polynucleotide encoding an antigen binding polypeptide or polypeptide complex comprising, e.g., comprising six CDRs, VH, VL, VH and VL, heavy chain, light chain, or heavy and light chain, or a domain thereof (e.g., one or more CDRs, VH, VL, VH and VL, heavy chain, or light chain), operably linked to a promoter for expression of such sequences in the host cell.

[8217] In some aspects, vectors encoding both heavy and light chains, or a domain thereof, individually, can be co-expressed in the host cell for expression. In some aspects, a host cell contains a vector comprising a polynucleotide encoding both a heavy chain and light chain, or a domain thereof. In some aspects, a host cell contains two different vectors, a first vector comprising a polynucleotide encoding a heavy chain or a domain thereof, and a second vector comprising a polynucleotide encoding a light chain or a domain thereof. In some aspects, a first host cell comprises a first vector comprising a polynucleotide encoding a heavy chain or a domain thereof, and a second host cell comprises a second vector comprising a polynucleotide encoding a light chain or a domain thereof. In some aspects, provided herein is a population of host cells comprising such a first host cell and such a second host cell.

[8218] In some aspects, provided herein is a population of vectors comprising a first vector comprising a polynucleotide encoding a light chain or domain thereof, and a second vector comprising a polynucleotide encoding a heavy chain or domain thereof. Alternatively, a single vector can be used which encodes, and is capable of expressing, both heavy and light chain polypeptides or a domain thereof.

[8219] A variety of host-vector systems can be utilized to express the polypeptides and polypeptide complexes provided herein. Such host-vector systems represent vehicles by which the coding sequences of interest can be produced and subsequently purified, but also represent cells which can, when transformed or transfected with the appropriate nucleotide coding sequences, express a polypeptide or polypeptide complex provided herein in situ. These include but are not limited to microorganisms such as bacteria (e.g., E. coli and B. subtilis) transformed with recombinant bacteriophage DNA, plasmid DNA or cosmid DNA expression vectors containing antibody or antigen binding fragment thereof coding sequences; yeast (e.g., Saccharomyces pichia) transformed with recombinant yeast expression vectors containing antibody or antigen binding fragment thereof coding sequences; insect cell systems infected with recombinant virus expression vectors (e.g., baculovirus) containing antibody or antigen binding fragment thereof coding sequences; plant cell systems (e.g., green algae such as Chlamydomonas reinhardtii) infected with recombinant virus expression vectors (e.g., cauliflower mosaic virus, CaMV; tobacco mosaic virus, TMV) or transformed with recombinant plasmid expression vectors (e.g., Ti plasmid) containing antibody or antigen binding fragment thereof coding sequences; or mammalian cell systems (e.g., COS (e.g., COSI or COS), CHO, BHK, MDCK, HEK 293, NS0, PER.C6, VERO, CRL7030, HsS78Bst, HeLa, and NIH 3T3, HEK-293T, HepG2, SP210, R1.1, B-W, L-M, BSC1, BSC40), YB/20, and BMT10 cells) harboring recombinant expression constructs containing promoters derived from the genome of mammalian cells (e.g., metallothionein promoter) or from mammalian viruses (e.g., the adenovirus late promoter: the vaccinia virus 7.5K promoter). In some aspects, cells for expressing polypeptide or polypeptide complexes provided herein are CHO cells, for example CHO cells from the CHO GS System™ (Lonza). In some aspects, cells for expressing the polypeptides or polypeptide complexes provided herein are human cells, e.g., human cell lines. In some aspects, a mammalian expression vector is pOptiVEC™ or pcDNA3.3. In some aspects, bacterial cells such as Escherichia coli, or eukaryotic cells (e.g., mammalian cells) are used for the expression of recombinant polypeptides. For example, mammalian cells such as Chinese hamster ovary (CHO) cells in conjunction with a vector such as the major intermediate early gene promoter element from human cytomegalovirus is an effective expression system for polypeptides (Foecking M K & Hofstetter H (1986) Gene 45:101-105; and Cockett M I et al., (1990) Biotechnology 8:662-667). In some aspects, the polypeptides or polypeptide complexes provided herein are produced by HEK-293T cells.

[8220] In addition, a host cell strain can be chosen which modulates the expression of the inserted sequences, or modifies and processes the gene product in the specific fashion desired. Such modifications (e.g., glycosylation) and processing (e.g., cleavage) of protein products can contribute to the function of the protein. To this end, eukaryotic host cells which possess the cellular machinery for proper processing of the primary transcript, glycosylation, and phosphorylation of the gene product can be used. Such mammalian host cells include but are not limited to CHO, VERO, BHK. Hela, MDCK, HEK 293, NIH 3T3, W138, BT483, Hs578T, HTB2, BT20 and T47D, NS0 (a murine myeloma cell line that does not endogenously produce any immunoglobulin chains), CRL7030, COS (e.g., COSI or COS), PER.C6, VERO. HsS78Bst, HEK-293T, HepG2, SP210, R1.1, B-W. L-M, BSC1, BSC40), YB/20, BMT10) and HsS78Bst cells.

[8221] Once a polypeptide or polypeptide complex provided herein has been produced by recombinant expression, it can be purified by any method known in the art for purification of a protein or immunoglobulin molecule, for example, by chromatography (e.g., ion exchange, affinity, particularly by affinity for the specific antigen after Protein A, and size exclusion chromatography), centrifugation, differential solubility, or by any other standard technique for the purification of proteins. Further, the polypeptides or polypeptide complexes provided herein can be fused to heterologous polypeptide sequences provided herein (e.g., peptide tags) or otherwise known in the art to facilitate purification.

[8222] In some aspects, a polypeptide or polypeptide complex provided herein is isolated or purified. Generally, an isolated polypeptide or polypeptide complex is one that is substantially free of other polypeptides or polypeptide complexes with different antigenic specificities. For example, in some aspects, a preparation of a polypeptide or polypeptide complex provided herein is substantially free of cellular material and/or chemical precursors.

[8223] A vector can be transformed, transferred, or transduced into a host cell comprised in an organism by conventional techniques. The resulting host cell comprised in an organism can produce an antigen binding polypeptide or antigen binding polypeptide complex comprising, e.g., six CDRs, VH, VL, VH and VL, heavy chain, light chain, or heavy and light chain, or a domain thereof (e.g., one or more CDRs, VH, VL, VH and VL, heavy chain, or light chain).

[8224] Additionally, the resulting host cell comprised in an organism, as well as a host cell not comprised in an organism (e.g., a cell maintained in culture in vitro), can transmit copies of the nucleotide sequence comprised in the vector to its progeny. A nucleic acid sequence comprised in the vector can integrate in the genome of the host cell, replicate with the genome of the host cell, and thus be transmitted to the progeny of the host cell. A nucleic acid sequence comprised in the vector can also not integrate into the genome of the host cell, but instead can be maintained extrachromosomally in the host cell. In this case the vector may further comprise sequence elements that allow the nucleotide sequence comprised in the vector to self replicate. Self-replicated copies of the nucleotide sequence comprised in the vector can then be transmitted to the progeny of the host cell.

[8225] A vector disclosed herein can be a DNA vector, an RNA vector (e.g., mRNA), or a combination thereof, DNA and/or RNA vectors can be introduced into isolated host cells (e.g., cell in culture in vitro) or into host cells comprised in an organism.

[8226] In some aspects, the vectors provided herein are RNA vectors (e.g., mRNA vectors).

[8227] In some aspects, the present invention comprises a nucleic acid encoding an antigen binding polypeptide or antigen binding polypeptide complex for in vivo administration. In some aspects, the nucleic acid encoding an antigen binding polypeptide or antigen binding polypeptide complex is a stabilized nucleic acid selected from a stabilized mRNA.

[8228] In some aspects, the present disclosure relates to one or more mRNA that encodes an antigen binding polypeptide or antigen binding polypeptide complex (e.g., antibody or antigen binding fragment thereof).

[8229] In some aspects, a nucleic acid encoding an antigen binding polypeptide or antigen binding polypeptide complex comprises said nucleic acid or mRNA and a carrier to form a pharmaceutical composition.

[8230] The term “mRNA.” as used herein, refers to a single stranded RNA that encodes the amino acid sequence of one or more polypeptides (e.g., an antigen binding polypeptide or antigen binding polypeptide complex comprising, e.g., six CDRs, VH, VL, VH and VL, heavy chain, light chain, or heavy and light chain, or a domain thereof (e.g., one or more CDRs, VH, VL, VH and VL, heavy chain, or light chain)). The term “mRNA.” as used herein includes in vitro transcribed RNA (IVT RNA) or synthetic RNA. An mRNA molecule may also contain a 5′ untranslated region (5′-UTR), and/or a 3′ untranslated region (3′-UTR). In some aspects, the RNA is produced by in vitro transcription or chemical synthesis. In one aspect, the mRNA is produced by in vitro transcription using a DNA template where DNA refers to a nucleic acid that contains deoxyribonucleotides.

[8231] As used herein the term “transcription” relates to a process, wherein the genetic code in a DNA sequence is transcribed into RNA. Subsequently, the RNA may be translated into peptide or protein. According to the present invention, the term “transcription” comprises “in vitro transcription”, wherein the term “in vitro transcription” relates to a process wherein RNA, in particular mRNA, is in vitro synthesized in a cell-free system, preferably using appropriate cell extracts, and/or isolated nucleotides, enzymes, co-enzymes, and co-factors in the appropriate reaction conditions (e.g., controlled temperature, controlled pH). Preferably, cloning vectors are applied for the generation of transcripts. These cloning vectors are generally designated as transcription vectors and are according to the present invention encompassed by the term “vector”. According to the present invention, the mRNA used in the present invention preferably is in vitro transcribed mRNA (IVT-mRNA) and may be obtained by in vitro transcription of an appropriate DNA template. The promoter for controlling transcription can be any promoter for any RNA polymerase. Particular examples of RNA polymerases are the T7, T3, and SP6 RNA polymerases. Preferably, the in vitro transcription according to the invention is controlled by a T7 or SP6 promoter. A DNA template for in vitro transcription may be obtained by cloning of a nucleic acid (e.g., cDNA) and introducing it into an appropriate vector for in vitro transcription. The nucleic acid cloned and inserted into the appropriate vector may be obtained by reverse transcription of RNA, directly isolated from the source organism, amplified by PCR, synthesized in vitro, or any combination thereof, or obtained and/or manipulated by any means known in the art. In certain aspects of the present disclosure, the RNA is “replicon RNA” or simply a “replicon”, in particular “self-replicating RNA” or “self-amplifying RNA”.

[8232] In some aspects, the mRNAs provided herein contain structural elements optimized for maximal efficacy of the mRNA with respect to stability and translational efficiency (5′-cap. 5′-UTR. 3′-UTR, poly(A) sequence). In some aspects, the messenger RNA (mRNA) molecule provided herein further comprises (i) at least one 5′ untranslated region (5′-UTR), and/or (ii) at least one 3′ untranslated region (3′-UTR), operably linked to the open reading frame (ORF). As used herein, the term “5′ untranslated region”, or “5′ UTR” refers to a region of a messenger RNA (mRNA) that is directly upstream from the initiation codon, and it is important for the regulation of translation of a transcript. The 5′ UTR may comprise a 5′-cap. In some aspects, the mRNA according to the present disclosure comprises a 5′-cap. In some aspects, the mRNA of the present disclosure does not have uncapped 5′-triphosphates. In some aspects, the mRNA may be modified by a 5′-cap analog. The term “5′-cap” refers to a structure found on 5′-end of an mRNA molecule and generally consists of a guanosine nucleotide connected to the mRNA via a 5′- to 5′-triphosphate linkage. In one aspect, this guanosine is methylated at the 7-position. Providing an mRNA with a 5′-cap or 5′-cap analog may be achieved by in vitro transcription, in which 5′-cap is co-transcriptionally expressed into the mRNA strand, or may be attached to mRNA post-transcriptionally using capping enzymes. As used herein, the term “3′ untranslated region”, or “3′-UTR”, refers to a region of messenger RNA (mRNA) that immediately follows the translation termination codon. The 3′-UTR often contains regulatory regions that post-transcriptionally influence gene expression. Regulatory regions within the 3′-untranslated region can influence polyadenylation, translation efficiency, localization, and stability of the mRNA. The 3′ UTR may comprise 3′ poly(A) tail. As used herein, the term “3′ poly(A) tail”, or “poly(A) sequence”, or “poly-A tail” refers to an uninterrupted or interrupted sequence of adenylate residues which is typically located at 3′-end of an mRNA molecule. Poly(A) sequences are known to those of skill in the art and may follow 3′-UTR in the mRNAs described herein. An uninterrupted poly(A) sequence is characterized by consecutive adenylate residues. In nature, an uninterrupted poly(A) sequence is typical, mRNAs disclosed herein can have a poly(A) sequence attached to the free 3′-end of the RNA by a template-independent RNA polymerase after transcription or a poly(A) sequence encoded by DNA and transcribed by a template-dependent RNA polymerase.

[8233] In some aspects, the invention features messenger RNA (mRNA) molecule comprising an open reading frame (ORF) of (i.e., encoding) an antigen binding polypeptide or antigen binding polypeptide complex comprising, e.g., six CDRs, VH, VL, VH and VL, heavy chain, light chain, or heavy and light chain, or a domain thereof (e.g., one or more CDRs, VH, VL, VH and VL, heavy chain, or light chain).

### Pharmaceutical Compositions and Kits

[8234] In some aspects, provided herein is a pharmaceutical composition comprising an antigen binding polypeptide, antigen binding polypeptide complex (e.g., antibody or antigen binding fragment thereof), polypeptide, polynucleotide, vector, or host cell provided herein.

[8235] In one aspect, a pharmaceutical composition provided herein comprises (1) an antigen binding polypeptide, antigen binding polypeptide complex (e.g., antibody or antigen binding fragment thereof), polypeptide, polynucleotide, vector, or host cell provided herein, and (2) a pharmaceutically acceptable carrier. The term “pharmaceutically acceptable carrier” includes any and all solvents, co-solvents, complexing agents, dispersion media, coatings, antibacterial and antifungal agents, isotonic and absorption delaying agents, and the like, which are not biologically or otherwise undesirable. The use of such media and agents for pharmaceutically active substances is known in the art. Except insofar as any conventional media or agent is incompatible with the active ingredient, its use in the therapeutic formulations is contemplated. Supplementary active ingredients can also be incorporated into the pharmaceutical compositions provided herein. In addition, various excipients, such as are commonly used in the art, can be included. These and other such compounds are described in the literature, e.g., in the Merck Index. Merck & Company. Rahway, NJ. Considerations for the inclusion of various components in pharmaceutical compositions are described, e.g., in Gilman et al. (Eds.) (2010); Goodman and Gilman's: The Pharmacological Basis of Therapeutics. 12th Ed., The McGraw-Hill Companies. In some aspects, the pharmaceutical composition is for parenteral, intravenous or subcutaneous administration.

[8236] In some aspects, a pharmaceutical composition provided herein comprises a polynucleotide or a vector disclosed herein (e.g., an mRNA disclosed herein) complexed, or packaged in a liposome, a nanoliposome, a lipid nanoparticle, a lipoplex, a micell, a nanomicell, a nanoemulsion, an oil-in-water emulsions, a PEG-conjugated lipid nanoparticle, a polymeric nanoparticle, a lipid-polymer hybrid nanoparticle, a polysaccharidic nanocarrier, an RNA-peptide nanoparticle, an RNA-peptide nanocomplex, a biomimetic nanovesicle, a lipidoid-RNA complex, a virus-like particle, dendrimer nanoparticle, a nanogel, a metallic nanoparticle, a gold nanoparticle (AuPNs), a magnetic nanoparticle, a theranostic nanoparticle, or any combination thereof.

[8237] In some aspects, a pharmaceutical composition provided herein comprises a lipid nanoparticle composition. As used herein, a “lipid nanoparticle composition.” “lipid nanoparticle formulation.” “LNP composition.” or “LNP formulation” is a composition comprising one or more lipids. The lipids in a lipid nanoparticle composition are typically sized on the order of micrometers or smaller. In some aspects, the lipids in a lipid nanoparticle composition have an average size of less than 1 micrometer.

[8238] In some aspects, the pharmaceutical composition comprises (1) one or more polynucleotides encoding an antigen binding polypeptide or antigen binding polypeptide complex provided herein, and (2) a lipid nanoparticle composition. In some aspects, the lipid nanoparticle composition comprises one or more of (i) a cationic and/or ionizable lipid, (ii) a structural lipid, (iii) a PEGylated lipid, and (iv) a phospholipid.

[8239] As used herein, a “cationic and/or ionizable lipid” is a lipid that has a positive or partial positive charge at physiological pH. Examples of a cationic and/or ionizable lipid include, but are not limited to, a lipid including a cyclic amine group, 3-(didodecylamino)-N1,N1,4-tridodecyl-1-piperazineethanamine (KL10), N1-[2-(didodecylamino)ethyl]-N1,N4,N4-tridodecyl-1,4-piperazinediethanamine (KL22), 14,25-ditridecyl-15,18,21,24-tetraaza-octatriacontane (KL25), 1,2-dilinoleyloxy-N,N-dimethylaminopropane (DLin-DMA), 2,2-dilinoleyl-4-dimethylaminomethyl-[1,3]-dioxolane (DLin-K-DMA), heptatriaconta-6,9,28,31-tetraen-19-yl 4-(dimethylamino) butanoate (DLin-MC3-DMA), 2,2-dilinoleyl-4-(2-dimethylaminoethyl)-[1,3]-dioxolane (DLin-KC2-DMA), 1,2-dioleyloxy-N,N-dimethylaminopropane (DODMA), 2-({8-[(3β)-cholest-5-en-3-yloxy]octyl}oxy)-N,N-dimethyl-3-[(9Z,12Z)-octadeca-9,12-dien-1-yloxy]propan-1-amine (Octyl-CLinDMA), (2R)-2-({8-[(3B)-cholest-5-en-3-yloxy]octyl}oxy)-N,N-dimethyl-3-[(9Z,12Z)-octadeca-9,12-dien-1-yloxy]propan-1-amine (Octyl-CLinDMA (2R)), (2S)-2-({8-[(3B)-cholest-5-en-3-yloxy]octyl}oxy)-N,N-dimethyl-3-[(9Z,12Z)-octadeca-9,12-dien-1-yloxy]propan-1-amine (Octyl-CLinDMA (2S)), and mixtures thereof.

[8240] As used herein, a “structural lipid” is a fat synthesized from mixtures of long-chain and medium-chain fatty acids. A structural lipid is typically a triacylglycerol restructured or modified to change the fatty acid composition and/or positional distribution. Examples of a structural lipid include, but are not limited to, cholesterol, fecosterol, sitosterol, ergosterol, campesterol, stigmasterol, brassicasterol, tomatidine, tomatine, ursolic acid, alpha-tocopherol, and mixtures thereof.

[8241] As used herein, a “PEGylated lipid” is a lipid that has been modified to include polyethylene glycol or “PEG.” Examples of a PEGylated lipid include, but are not limited to, PEG-modified phosphatidylethanolamines, PEG-modified phosphatidic acids, PEG-modified ceramides, PEG-modified dialkylamines, PEG-modified diacylglycerols, PEG-modified dialkylglycerols, PEG-c-DOMG, PEG-DMG, PEG-DLPE, PEG-DMPE, PEG-DPPC, a PEG-DSPE lipid, and mixtures thereof.

[8242] As used herein, a “phospholipid” is a class of lipids whose molecule has a hydrophilic “head” containing a phosphate group and two hydrophobic “tails” derived from fatty acids, joined by an alcohol residue (usually a glycerol molecule). Examples of a phospholipid include, but are not limited to, 1,2-distearoyl-sn-glycero-3-phosphocholine (DSPC), 1,2-dioleoyl-sn-glycero-3-phosphoethanolamine (DOPE), 1,2-dilinoleoyl-sn-glycero-3-phosphocholine (DLPC), 1,2-dimyristoyl-sn-glycero-phosphocholine (DMPC), 1,2-dioleoyl-sn-glycero-3-phosphocholine (DOPC), 1,2-dipalmitoyl-sn-glycero-3-phosphocholine (DPPC), 1,2-diundecanoyl-sn-glycero-phosphocholine (DUPC), 1-palmitoyl-2-oleoyl-sn-glycero-3-phosphocholine (POPC), 1,2-di-O-octadecenyl-sn-glycero-3-phosphocholine (18:0 Diether PC), 1-oleoyl-2-cholestery lhemisuccinoyl-sn-glycero-3-phosphocholine (OChemsPC), 1-hexadecyl-sn-glycero-3-phosphocholine (C16 Lyso PC), 1,2-dilinolenoyl-sn-glycero-3-phosphocholine, 1,2-diarachidonoyl-sn-glycero-3-phosphocholine, 1,2-didocosahexaenoyl-sn-glycero-3-phosphocholine, 1,2-diphytanoyl-sn-glycero-3-phosphoethanolamine (ME 16.0 PE), 1,2-distearoyl-sn-glycero-3-phosphoethanolamine, 1,2-dilinoleoyl-sn-glycero-3-phosphoethanolamine, 1,2-dilinolenoyl-sn-glycero-3-phosphoethanolamine, 1,2-diarachidonoyl-sn-glycero-3-phosphoethanolamine, 1,2-didocosahexaenoyl-sn-glycero-3-phosphoethanolamine, 1,2-dioleoyl-sn-glycero-3-phospho-rac-(1-glycerol) sodium salt (DOPG), sphingomyelin, and mixtures thereof. In some aspects, the phospholipid is DSPC, In some aspects, the phospholipid is DOPE, In some aspects, the phospholipid is DSPC and DOPE.

[8243] Exemplary lipid nanoparticle compositions and methods for making them are described, for example, herein and in U.S. Pat. Nos. 11,524,023; 11,485,972; 10,898,574; 10,703,789; 10,702,600; 10,577,403; 10,442,756; 10,266,485; 10,064,959; 9,868,692; Int'l Pub. No, WO 2019/046809; Int'l Pub. No, WO 2020/160397; U.S. Pub. No. 2020/0306191; Xu et al., Adv. Nanobio. Res. 2:2, 2022; Cullis et al., Mol. Ther. 25(7):1467-1475, 2017; Fan et al., J. Pharm. Biomed. Anal. 192:113642, 2020; Paunovska et al., Nature Rev., 23:265-280, 2022; Buck et al., ACS Nano. 13:3754-3782, 2019; Pardi et al., Nature Comm. 8:14630, 2017; and Pardi et al., J. Control Release, 217:345-351, 2015, which are incorporated by reference herein. Such methods include, but are not limited to, back translating DNA coding for an antigen binding polypeptide or antigen binding polypeptide complex provided herein (e.g., an antibody or antigen binding fragment thereof) into an in vitro transcription (IVT) plasmid according to such published methods.

[8244] Exemplary compositions and methods related to mRNA preparation and delivery are described, for example, herein and in Int'l Pub. No, WO 2018/081638, Int'l Pub. No, WO 2017/182524, U.S. Pat. No. 9,012,219, Int'l Pub. No, WO 2016/176330, U.S. Pat. No. 9,371,511, U.S. Appl. Pub. No. 2018/0028645, U.S. Appl. Pub. No. 23018/0344838, U.S. Pub. No. 2018/0265848, U.S. Appl. Pub. No. 2017/0043037, U.S. Appl. Pub. No. 2017/0327842, U.S. Pat. No. 10,006,007, U.S. Appl. Pub. No. 2013/0261172, U.S. Appl. Pub. No. 2013/0197068, U.S. Appl. Pub. No. 2015/0038558, U.S. Appl. Pub. No. 2016/0032316, U.S. Appl. Pub. No. 2013/0111615, U.S. Appl. Pub. No. 2009/0286852, Cullis et al., Mol. Ther. 25(7):1467-1475, 2017; Pardi et al., Nature Comm. 8:14630, 2017; Pardi et al., J. Control Release, 217:345-351, 2015; and Grier et al., Mol. Ther. Nucleic Acids, 5:e306 (2016), which are incorporated by reference herein. Such methods include, but are not limited to, in vitro transcription (e.g., using PCR products or a linearized plasmid); IVT vectors; and synthesizing mRNA using, e.g., HiScribe T7 High Yield RNA Synthesis Kit (New England Biolabs), incorporating, e.g., Pseudouridine-5′-Triphosphate (TriLink BioTechnologies). In some aspects. 5′ capped mRNA can also be generated during this process using, e.g., CleanCap Reagent AG (TriLink BioTechnologies) to form, e.g., 100 bp or 120 bp poly(A) tails.

[8245] In some aspects, the pharmaceutical composition comprises (1) one or more polynucleotides encoding an antigen binding polypeptide or antigen binding polypeptide complex, and (2) a carrier. In some aspects, the pharmaceutical composition comprises (1) one or more polynucleotides encoding an antigen binding polypeptide or antigen binding polypeptide complex (e.g., antibody or antigen binding fragment thereof) provided herein, and (2) a carrier selected from the group consisting of a lipid or a lipid nanoparticle. In some aspects, the one or more polynucleotides encoding an antigen binding polypeptide or antigen binding polypeptide complex is a stabilized polynucleotide resistant to degradation or decomposition in vivo. In some aspects, the stabilized polynucleotide is capped at one end (5′ cap) and has a long polyadenylated (poly A) tail at the other end to form a stabilized mRNA having 5′ and 3′ UTRs. In some aspects, the poly A tail is about 50 bp, about 100 bp, about 120 bp, or about 150 bp. In some aspects, modified nucleosides may be incorporated into the mRNA to increase translation and/or to lower potential immunogenicity.

[8246] Also provided herein is a pharmaceutical composition comprising an antigen binding polypeptide, antigen binding polypeptide complex (e.g., antibody or antigen binding fragment thereof), polypeptide, polynucleotide, vector, or host cell provided herein, and an additional pharmaceutical agent.

[8247] In some aspects, the additional pharmaceutical agent is 25-hydroxyvitamin D, an agent that potentiates vitamin D action, an anti-viral agent, an anti-malarial agent, an antibiotic, or a combination thereof.

[8248] In some aspects, the additional pharmaceutical agent is 25-hydroxyvitamin D.

[8249] In some aspects, the agent that potentiates vitamin D action is a CYP24 inhibitor, 1,25-dihydroxyvitamin D compound, or a combination thereof.

[8250] In some aspects, the anti-viral agent is an anti-retroviral agent, an antibody or antigen binding fragment thereof, an inhibitor of reverse transcriptase, or a combination thereof.

[8251] In some aspects, the anti-viral agent is maraviroc, enfuvirtide, amantadine, lamivudine, nevirapine, efavirenz, dolutegravir, elvitegravir, raltegravir, acyclovir and any nucleoside analog of aciclovir, ganciclovir, cidofovir, forcarnet, ribavirin, interferon alpha, pegylated interferon alpha, boceprevir, atazanavir, darunavir, indinavir, oseltamivir, zanamivir, rimantadine, peremivir, valaciclovir, penciclovir, valganciclovir, foscarnet, tenofovir, adefovir, entecavir, lamivudine, telbivudine, ribavirin, glecaprevir, grazoprevir, paritaprevir, simeprevir, voxilaprevir, daclatasvir, elbasvir, ledipasvir, ombitasvir, pibrentasvir, velpatasvir, dasabuvir, famciclovir, remdesivir, trifluridine, sofobuvir, bebtelovimab (LY1404, LY-CoV1404, LY3853133), or a combination thereof.

[8252] In some aspects, the anti-viral agent is bebtelovimab.

[8253] In some aspects, the anti-viral agent is Retrovir® (3′-azido-3′-deoxypyrimidine, zidovudine), 3′-azido-3′-deoxythymidine (AZT), HMDR) (2′,3′-dideoxycytidine, zalcitabine), VidexEC® (2′,3′dideoxyinosine, didanosine), Epivir® (lamivudine), Zerit® (stavudine), Viread® (tenofovir DF), Ziagen® (abacavir), Emtriva® (emtricitabine, FTC), Rescriptor® (delavirdine), Sustiva® (efavirenz), Viramune® (nevirapine, 11-cyclopropyl-4-methyl-5,11-dihydro-6H-dipyrido [3,2-b:2′,3′-e][1,4]diazepin-6-one), trisodium phosphonoformate, ammonium-21-tungstenato-9-antimonate, 1-β-D-ribofuranoxyl-1,2,4-triazole-3-carboxamide, Aganerase® (amprenavir), Reyataz® (atazanavir), Lexiva® (fosamprenavir), Crixivan® (indinavir), Viracept® (nelfinavir), Norvir® (ritonavir), Fortovase® or Invirase® (saquinavir), lasinavir (5(S)-(tert-butoxycarbonylamino)-4(S)-hydroxy-6-phenyl-2(R) (2,3,4-trimethoxyphenylmethyl)-hexanoyl-(L)-valyl-N-(2-methoxy-ethyl)-amide), adriamycin, KVX-478, VX-478, 141W94, AG-1343, KNI-272, U-96988, BILA-2011 BS (palinavir), polymannoacetate, Fuzcon® (enfuvirtide, T-20), Epzicom® (abacavir and lamivudine), Trizivir® (abacavir, lamivudine and zidovudine), Truvada® (emtricitabine and tenofir DF), Combivir® (lamivudine and zidovudine), Kaletra® (lopinavir and ritonavir), bebtelovimab, or a combination thereof.

[8254] In some aspects, provided herein is a kit comprising an antigen binding polypeptide, antigen binding polypeptide complex (e.g., antibody or antigen binding fragment thereof), polypeptide, polynucleotide, vector, host cell, or pharmaceutical composition provided herein, or a combination thereof. Once a pharmaceutical composition has been formulated, it can be stored in sterile vials as a solution, suspension, gel, emulsion, solid, crystal, or as a dehydrated or lyophilized powder. Such formulations may be stored either in a ready-to-use form or in a form (e.g., lyophilized) that is reconstituted prior to administration. In some aspects, provided herein is a kit for producing a single-dose administration unit. In one aspect, the kit contains a first container having a dried antigen binding polypeptide or polypeptide complex provided herein (e.g., antibody or antigen binding fragment thereof) and a second container having an aqueous formulation. In some aspects, provided herein is a kit containing an antigen binding polypeptide or polypeptide complex provided herein (e.g., antibody or antigen binding fragment thereof) in a single and/or multi-chambered pre-filled syringe (e.g., liquid syringe and/or lyosyringe). In some aspects, the kit further contains components for intravenous or subcutaneous administration.

[8255] In some aspects, a kit provided herein comprises one or more antigen binding polypeptides or antigen binding polypeptide complexes (e.g., antibodies or antigen binding fragments thereof) provided herein (e.g., 1, 2, 3, 4, 5 or more). In some aspects, a kit provided herein comprises an antigen binding polypeptide or antigen binding polypeptide complexes (e.g., antibodies or antigen binding fragments thereof) provided herein.

[8256] In some aspects, a kit provided herein comprises one or more pharmaceutical compositions comprising an antigen binding polypeptide complex (e.g., antibody or antigen binding fragment thereof) provided herein (e.g., 1, 2, 3, 4, 5 or more). In some aspects, a kit provided herein comprises a pharmaceutical compositions comprising an antigen binding polypeptide complexes (e.g., antibody or antigen binding fragment thereof) provided herein. In some aspects, the pharmaceutical composition further comprises a pharmaceutically acceptable carrier.

[8257] In some aspects, a kit provided herein comprises (i) one or more antigen binding polypeptide complexes (e.g., antibodies or antigen binding fragments thereof) provided herein (e.g., 1, 2, 3, 4, 5 or more), and (ii) one or more additional pharmaceutical agents (e.g., 1, 2, 3, 4, 5 or more). In some aspects, a kit provided herein comprises (i) an antigen binding polypeptide complex (e.g., antibody or antigen binding fragment thereof) provided herein, and (ii) an additional pharmaceutical agent.

[8258] In some aspects, a kit provided herein comprises (i) one or more pharmaceutical compositions comprising an antigen binding polypeptide complex (e.g., antibody or antigen binding fragment thereof) provided herein (e.g., 1, 2, 3, 4, 5 or more), and (ii) one or more additional pharmaceutical agents (e.g., 1, 2, 3, 4, 5 or more). In some aspects, a kit provided herein comprises (i) a pharmaceutical composition comprising an antigen binding polypeptide complex (e.g., antibody or antigen binding fragment thereof) provided herein, and (ii) an additional pharmaceutical agent. In some aspects, the pharmaceutical composition further comprises a pharmaceutically acceptable carrier.

[8259] In some aspects, the kit further comprises instructions for use, for example, for any of the methods of use described herein (e.g., treating or preventing (i) a cancer or a tumor, (ii) an infectious disease that is not a sarbecovirus infectious disease, or (iii) a pathology other than a cancer or a tumor or an infectious disease that is not a sarbecovirus infectious disease).

### Methods of Use

[8260] In some aspects, provided herein are certain methods of use of an antigen binding polypeptide, antigen binding polypeptide complex (e.g., an antibody or antigen binding fragment thereof), polypeptide, polynucleotide, vector, host cell, or pharmaceutical composition provided herein, or a combination thereof. In some aspects, provided herein is a method of preventing or treating (i) a cancer or a tumor, (ii) an infectious disease that is not a sarbecovirus infectious disease, or (iii) a pathology other than a cancer or a tumor or an infectious disease that is not a sarbecovirus infectious disease, comprising administering an antigen binding polypeptide, antigen binding polypeptide complex (e.g., an antibody or antigen binding fragment thereof), polypeptide, polynucleotide, vector, host cell or pharmaceutical composition provided herein, or a combination thereof.

[8261] In some aspects, provided herein is a method of preventing or treating (i) a cancer or a tumor, (ii) an infectious disease that is not a sarbecovirus infectious disease, or (iii) a pathology other than a cancer or a tumor or an infectious disease that is not a sarbecovirus infectious disease in a subject in need thereof, comprising administering to the subject a therapeutically effective amount of an antigen binding polypeptide, antigen binding polypeptide complex (e.g., an antibody or antigen binding fragment thereof), polypeptide, polynucleotide, vector, host cell or pharmaceutical composition provided herein, or a combination thereof.

[8262] In some aspects, provided herein is a method of preventing or treating a viral infection (i.e., an infection caused by a virus) in a subject comprising administering to the subject an antigen binding polypeptide, antigen binding polypeptide complex (e.g., an antibody or antigen binding fragment thereof), polypeptide, polynucleotide, vector, host cell or pharmaceutical composition provided herein, or a combination thereof, wherein the virus is selected from the group consisting of influenza virus, respiratory syncytial virus (RSV), chlamydia, adenovirdiae, mastadeno virus, aviadenovirus, herpesviridae, herpes simplex virus 1, herpes simplex virus 2, herpes simplex virus 5, herpes simplex virus 6, leviviridae, levivirus, enterobacteria phase MS2, allolevirus, poxviridae, chordopoxvirinae, parapoxvirus, avipoxvirus, capripoxvirus, leporiipoxvirus, suipoxvirus, molluscipoxvirus, entomopoxvirinae, papovaviridae, polyomavirus, papillomavirus, paramyxoviridae, paramyxovirus, parainfluenza virus 1, mobillivirus, measles virus, rubulavirus, mumps virus, pneumonovirinae, pneumovirus, me tapneumo virus, avian pneumovirus, human metapneumovirus, picornaviridae, enterovirus, rhinovirus, hepatovirus, human hepatitis A virus, cardiovirus, andaptho virus, reoviridae, orthoreovirus, orbivirus, rotavirus, cypovirus, fijivirus, phytoreovirus, oryzavirus, retroviridae, mammalian type B retroviruses, mammalian type C retroviruses, avian type C retroviruses, type D retrovirus group, BLV-HTLV retroviruses, lentivirus, human immunodeficiency virus 1, human immunodeficiency virus 2, HTLV-I and -II viruses, herpes simplex E virus. Epstein Barr virus, cytomegalovirus, hepatitis virus (HCV, HAV, HBV, HDV, HEV), Toxoplasma gondii virus, Treponema pallidium virus, human T-lymphotrophic virus, encephalitis virus. West Nile virus. Dengue virus. Varicella Zoster Virus, rubeola, mumps, rubella, spumavirus, flaviviridae, hepatitis C virus, hepadnaviridae, hepatitis B virus, togaviridae, alphavirus sindbis virus, rubivirus, rubella virus, rhabdoviridae, vesiculovirus, lyssavirus, ephemerovirus, cytorhabdo virus, necleorhabdo virus, arenaviridae, arenavirus, lymphocytic choriomeningitis virus. Ippy virus, lassa virus, coronaviridae, coronavirus, and torovirus.

[8263] In these aspects, the antigen binding polypeptide or antigen binding polypeptide complex (e.g., an antibody or antigen binding fragment thereof) is to be understood to specifically bind to at least one epitope on at least one antigen of the virus causing the viral infection. Non-limiting examples of viral antigens are influenza virus neuraminidase, influenza virus hemagglutinin, human respiratory syncytial virus (RSV)-viral proteins, RSV F glycoprotein, RSV G glycoprotein, herpes simplex virus (HSV) viral proteins, herpes simplex virus glycoproteins gB, gC, gD, and gE, chlamydia MOMP and PorB antigens, core protein, matrix protein or other protein of Dengue virus, measles virus hemagglutinin, herpes simplex virus type 2 glycoprotein gB, poliovirus 1 VP1, envelope glycoproteins of HIV 1, hepatitis B surface antigen, diptheria toxin, streptococcus 24M epitope, gonococcal pilin, pseudorabies virus g50) (gpD), pseudorabies virus II (gpB), pseudorabies virus III (gpC), pseudorabies virus glycoprotein H, pseudorabies virus glycoprotein E, transmissible gastroenteritis glycoprotein 195, transmissible gastroenteritis matrix protein, swine rotavirus glycoprotein 38, swine parvovirus capsid protein. Serpulina hydodysenteriae protective antigen, bovine viral diarrhea glycoprotein 55. Newcastle disease virus hemagglutinin-neuraminidase, swine flu hemagglutinin, swine flu neuraminidase, foot and mouth disease virus, hog colera virus, swine influenza virus, African swine fever virus, Mycoplasma hyopneumoniae, infectious bovine rhinotracheitis virus, infectious bovine rhinotracheitis virus glycoprotein E, glycoprotein G, infectious laryngotracheitis virus, infectious laryngotracheitis virus glycoprotein G or glycoprotein I, a glycoprotein of La Crosse virus, neonatal calf diarrhoea virus. Venezuelan equine encephalomyelitis virus, punta toro virus, murine leukemia virus, mouse mammary tumor virus, hepatitis B virus core protein and hepatitis B virus surface antigen or a fragment or derivative thereof, antigen of equine influenza virus or equine herpes virus, including equine influenza virus type A/Alaska 91 neuraminidase, equine influenza virus typeA/Miami 63 neuraminidase, equine influenza virus type A/Kentucky 81 neuraminidase equine herpes virus type 1 glycoprotein B, and equine herpes virus type 1 glycoprotein D, antigen of bovine respiratory syncytial virus or bovine parainfluenza virus, bovine respiratory syncytial virus attachment protein (BRSV G), bovine respiratory syncytial virus fusion protein (BRSV F), bovine respiratory syncytial virus nucleocapsid protein (BRSVN), bovine parainfluenza virus type 3 fusion protein, bovine parainfluenza virus type 3 hemagglutinin neuraminidase, bovine E viral diarrhoea virus glycoprotein 48 and glycoprotein 53, glycoprotein E of Dengue virus, and glycoprotein E1E2 of human hepatitis C virus.

[8264] In some aspects, provided herein is a method of preventing or treating a viral infection (i.e., an infection caused by a virus, a viral infectious disease) that is not a sarbecovirus infectious disease in a subject comprising administering to the subject an antigen binding polypeptide, antigen binding polypeptide complex (e.g., an antibody or antigen binding fragment thereof), polypeptide, polynucleotide, vector, host cell or pharmaceutical composition provided herein, or a combination thereof. In some aspects, the antigen binding polypeptide or antigen binding polypeptide complex (e.g., an antibody or antigen binding fragment thereof) is to be understood to specifically bind to at least one epitope on at least one antigen of a virus causing a viral infection (i.e., an infection caused by a virus, a viral infectious disease). In some aspects, the viral infectious disease antigen that is not a sarbecovirus antigen is a viral antigen selected from the group consisting of an influenza virus (A, B, C) antigen (e.g., influenza virus envelope proteins, for example, influenza virus neuraminidase (NA, N1, N2, N3, N4, N5, N6, N7, N8, N9, N10, N11), influenza virus hemagglutinin (H1, H2, H3, H4, H5, H6, H7, H8, H9, H10, H11, H12, H13, H14, H15, H16, H17, H18) (e.g., H1N1, H3N2, H5N1, H7N9, H9N2), Yamagata virus antigen, Victoria virus antigen, influenza virus structural proteins (e.g., M1, M2, capsid protein), influenza virus functional proteins (e.g., ribonucleoprotein (NP), primary interferon antagonist (NS1), nuclear export protein (NEP)) influenza virus accessory proteins (e.g., PB2, PB1, or PA), for example, anti-HA, anti-NA, anti-H1, anti-H3, anti-H5, anti-H7, anti-H9, anti-N1, anti-N2, anti-N9, anti-H1N1, anti-H3N2, anti-H5N1, anti-H7N9, anti-H9N2, anti-A protein, anti-B protein, anti-stem, anti-M1, anti-M2, anti-capsid, anti-NP, anti-NS1, anti-NEP, anti-PB1, anti-PB2, and anti-PA); a swine influenza virus antigen (e.g., swine flu hemagglutinin, swine flu neuraminidase); a classical swine fever (CSF) (hog colera) virus antigen; an equine influenza virus antigen (e.g., equine influenza virus typeA/Miami 63 neuraminidase, equine influenza virus type A/Kentucky 81 neuraminidase, equine influenza virus type A/Alaska 91 neuraminidase); parainfluenza viruses (e.g., bovine parainfluenza virus, bovine parainfluenza virus type 3 fusion protein, bovine parainfluenza virus type 3 hemagglutinin neuraminidase); a (human) respiratory syncytial virus (RSV)-viral antigen (e.g., RSV F glycoprotein, RSV G glycoprotein. F protein of respiratory syncytial virus, RSV fusion glycoprotein); a herpes simplex virus (HSV) antigen (e.g., herpes simplex virus glycoproteins gB, gC, gD, and gE, herpes simplex virus type 2 glycoprotein gB); a Dengue virus antigen (e.g., core protein, matrix protein, glycoprotein E of Dengue virus, or other protein of Dengue virus); a measles virus antigen (e.g., hemagglutinin); a poliovirus 1 antigen (e.g., poliovirus 1 proteins (VP1)), a HIV-1 antigen and HIV-2 antigen (e.g., HIV envelope proteins (e.g., envelope glycoproteins of HIV 1, HIV envelope glycoprotein (Env), HIV envelope glycoprotein gp160, HIV envelope surface glycoprotein gp120, HIV transmembrane envelope protein gp41), HIV structural proteins (e.g., p17, p24, p7, p55), HIV functional proteins (e.g., p66, HIV-1 protease (PR), p31), HIV accessory proteins (e.g., Nef, Tat, Rev, Vif, Vpr, Vpu)); a hepatitis virus (HAV, HBV, HCV, HDV, HEV) antigen (e.g., hepatitis B virus antigen (e.g., surface antigen, core protein), hepatitis C virus antigen (e.g., glycoprotein E1E2)); a rabies virus (Rabies lyssavirus) antigen (e.g., rabies virus glycoprotein, e.g., G glycoprotein); a pseudorabies virus antigen (e.g., pseudorabies virus g50) (gpD), pseudorabies virus II (gpB), pseudorabies virus III (gpC), pseudorabies virus glycoprotein H, pseudorabies virus glycoprotein E); a papillomavirus (HPV) antigen; an Epstein-Barr virus (EBV) (Gamma herpes virus 4) antigen; a Herpes simplex virus (HSV, HSV-1, HSV-2) antigen (e.g., human herpes virus 8, equine herpes virus antigen (e.g., type 1 glycoprotein B, type 1 glycoprotein D)); a Herpes zoster antigen; a Cytomegalovirus antigen (e.g., cytomegalovirus glycoprotein B); a Zika virus antigen; a Transmissible gastroenteritis virus (TGEV) antigen (e.g., glycoprotein 195, matrix protein); a rotavirus antigen (e.g., swine rotavirus glycoprotein 38); a parvovirus antigen (e.g., swine parvovirus capsid protein); a filoviruses (e.g., Marburg and Ebola) antigen; a bovine viral diarrhea virus antigen (e.g., glycoprotein 55); a Newcastle disease virus antigen (hemagglutinin, neuraminidase); an orthopoxvirus antigen; a coxsackievirus antigen and aphthovirus (foot and mouth disease virus) antigen; a yellow fever virus antigen; a Chikunga virus antigen; a Nipah virus antigen; an African swine fever virus antigen; a rhinotracheitis virus antigen (e.g., infectious bovine rhinotracheitis virus glycoprotein E, glycoprotein G); a laryngotracheitis virus antigen (e.g., infectious laryngotracheitis virus glycoprotein G or glycoprotein I); a La Crosse virus antigen (e.g., La Crosse virus glycoprotein); a neonatal calf diarrhoea virus antigen; a Venezuelan equine encephalomyelitis virus antigen; a punta toro virus antigen; a murine leukemia virus antigen; a mouse mammary tumor virus antigen; a bovine respiratory syncytial virus antigen (e.g., bovine respiratory syncytial virus attachment protein (BRSV G), bovine respiratory syncytial virus fusion protein (BRSV F), bovine respiratory syncytial virus nucleocapsid protein (BRSVN)); a bovine E viral diarrhoea virus antigen (e.g., glycoprotein 48 and glycoprotein 53); a metapneumovirus (HMPV) antigen; and an Ebola virus antigen (e.g., ebolavirus glycoprotein, e.g., Zaire ebolavirus glycoprotein).

[8265] In some aspects, provided herein is a method of preventing or treating a bacterial or parasite infection (i.e., an infection caused by a bacterium or parasite, a bacterial or parasite infectious disease) in a subject comprising administering to the subject an antigen binding polypeptide, antigen binding polypeptide complex (e.g., an antibody or antigen binding fragment thereof), polypeptide, polynucleotide, vector, host cell or pharmaceutical composition provided herein, or a combination thereof. In some aspects, the antigen binding polypeptide or antigen binding polypeptide complex (e.g., an antibody or antigen binding fragment thereof) is to be understood to specifically bind to at least one epitope on at least one antigen of a bacterium or parasite causing a bacterial or parasite infection (i.e., an infection caused by a bacterium or parasite, a bacterial or parasite infectious disease). In some aspects, the bacterial or parasite infectious disease antigen is a bacterial or parasite antigen selected from the group consisting of a Plasmodium (e.g., Plasmodium falciparum. Plasmodium vivax, Plasmodium malariae, Plasmodium ovale, Plasmodium knowlesi) antigen, a Streptococcus (e.g., Streptococcus pneumoniae, Streptococcus pyogenes, Streptococcus agalactiae, Streptococcus mutans, Streptococcus viridans, Streptococcus anginosus, Streptococcus intermedius, Streptococcus constellatus) antigen (e.g., 24M epitope), a Neisseria gonorrhoeae antigen (e.g., gonococcal pilin), a Corynebacterium antigen (e.g., Corynebacterium diphtheria (diptheria toxin), Corynebacterium ulcerans, Corynebacterium pseudotuberculosis), Mycobacterium tuberculosis antigens. Brachyspira hyodysenteriae (Serpulina hydodysenteriae) antigen (e.g., Serpulina hydodysenteriae protective antigen), a Chlamydia antigen (e.g., Chlamydia trachomatis) (e.g., MOMP and PorB), a Mycoplasma sp. (e.g., Mycoplasma genitalium, Mycoplasma hyopneumoniae, Mycoplasma pneumonia) antigen, a Staphylococcus (e.g., Staphylococcus aureus, coagulase-negative staphylococci (CoNS), Staphylococcus aureus alpha toxin, Staphylococcus aureus bi-component leucocidin) antigen, a Klebsiella sp. antigen, an Escherichia coli antigen (e.g., E. coli shiga toxin type-2. E. coli shiga toxin type-1), a Bacillus sp. (e.g., Bacillus anthracis, e.g., Bacillus anthracis anthrax) antigen, a Pseudomonas aeruginosa antigen (e.g., Pseudomonas aeruginosa type III secretion system), an Enterococcus sp. antigen, an Enterobacter sp. antigen, a Proteus sp. antigen, an Actinobacter sp. antigen, a Mycobacterium avium (Mycobacterium avium complex (MAC)) antigen, a Salmonella bacteria antigen, a Clostridium difficile antigen, a Toxoplasma (e.g., Toxoplasma gondii) antigen, a Histoplasma antigen, a Candida antigen, a Coccidioides antigen, a Cryptococcus antigen, a Cryptosporidium antigen, and a Cystoisospora (e.g., Cystoisospora belli) antigen, and another antigen (e.g., endotoxins, lymphotoxins (e.g., lymphotoxin alpha LTA), phosphatidylserine. Hsp90, CCR5, lipoteichoic acid, clumping factor A).

[8266] For example, in some aspects any one or more of the VL and/or VH comprised in antigen binding polypeptides or antigen binding polypeptide complexes (e.g., an antibodies or antigen binding fragments thereof) disclosed herein comprise a light chain complementarity determining region 1 (LCDR1), LCDR2, and/or LCDR3, and a heavy chain complementarity determining region 1 (HCDR1), HCDR2, and/or HCDR3 of an antibody selected from the group consisting of libivirumab, rmab, rivabazumab pegol, setoxaximab, suvizumab, suvratoxumab, sevirumab, pritoxaximab, porgaviximab, REGN-EB3, obiltoxaximab, gedivumab, foravirumab, larcaviximab, motavizumab, palivizumab, rafivirumab, regavirumab, tuvirumab, cosfroviximab, felvizumab, atidortoxumab, edobacomab, nebacumab, pateclizumab, raxibacumab, urtoxazumab, tosatoxumab, berlimatoxumab, CR6261, diridavumab, firivumab, lesofavumab, navivumab, exbivirumab, lenvervimab, bavituximab, bezlotoxumab, efungumab, leronlimab, nirsevimab, pagibaximab, panobacumab, tefibazumab, ansuvimab, atoltivimab, maftivimab, and odesivimab.

[8267] For example, in some aspects any one or more of the VL and/or VH comprised in antigen binding polypeptides or antigen binding polypeptide complexes (e.g., an antibodies or antigen binding fragments thereof) disclosed herein comprise a VL and/or a VH of an antibody selected from the group consisting of libivirumab, rmab, rivabazumab pegol, setoxaximab, suvizumab, suvratoxumab, sevirumab, pritoxaximab, porgaviximab, REGN-EB3, obiltoxaximab, gedivumab, foravirumab, larcaviximab, motavizumab, palivizumab, rafivirumab, regavirumab, tuvirumab, cosfroviximab, felvizumab, atidortoxumab, edobacomab, nebacumab, pateclizumab, raxibacumab, urtoxazumab, tosatoxumab, berlimatoxumab, CR6261, diridavumab, firivumab, lesofavumab, navivumab, exbivirumab, lenvervimab, bavituximab, bezlotoxumab, efungumab, leronlimab, nirsevimab, pagibaximab, panobacumab, tefibazumab, ansuvimab, atoltivimab, maftivimab, and odesivimab.

[8268] In some aspects, provided herein is a method of preventing or treating a cancer (e.g., a solid tumor or a blood cancer) in a subject comprising administering to the subject an antigen binding polypeptide, antigen binding polypeptide complex (e.g., an antibody or antigen binding fragment thereof), polypeptide, polynucleotide, vector, host cell or pharmaceutical composition provided herein.

[8269] In these aspects, the antigen binding polypeptide or antigen binding polypeptide complex (e.g., an antibody or antigen binding fragment thereof) is to be understood to specifically bind to at least one epitope on at least one antigen associated with cancer (e.g., a tumor-associated antigens (TAAs), tumor-specific antigens (TSAs), or neoantigens), or to at least one epitope on at least one antigen selected from the group consisting of, e.g., A2AR, APRIL, ATPDase, BAFF, BAFFR, BCMA. BlyS, BTK, BTLA, B7DC, B7H1, B7H2, B7H3, B7H4, B7H5, B7H6, B7H7, B7RP1, B7-4, C3, C5, CCL2, CCL3, CCL4, CCL5, CCL7, CCL8, CCL11, CCL15, CCL17, CCL19, CCL20, CCL21, CCL25 CCR3, CCR4, CD3, CD16A, CD19, CD20, CD24, CD27, CD28, CD30, CD38, CD39, CD40, CD40L, CD47, CD52, CD70, CD80, CD86, CD123, CD133, CD137, CD137L, CD160, CD272, CEACAM5, CLEC9, CLEC91, CRTH2, CSF-1, CSF-2, CSF-3, CXCL1, CXCL2, CXCL4, CXCL12, CXCL13, CXCR3, cMet, CTLA4, DLL3, DLL4, DNGR-1, E-cadherin, EGFR, ENTPD1, EpCAM, FCER1, FCER1A, FCER2, FGFR, FLAP, FOLH1, Gi24, GITR, GITRL, GPR5, GP100, GPRC5D, HER2, HER3, ICOSL, ICOS, HHLA2, HMGB1, HVEM, IDO, IFNa, IgE, IGF1R, IL2Rbeta, IL1, IL1A, IL1B, IL1F10, IL2, IL4, IL4Ra, IL5, ILSR, IL6, IL7, IL7Ra, IL8, IL9, IL9R, IL10, rhIL1O, IL12, IL13, IL13Ra1, IL13Ra2, IL15, IL17, IL17Rb, IL18, IL22, IL23, IL25, IL7, IL33, IL35, ITGB4, ITK, KIR, LAG3, LAMP1, leptin, LPFS2, MHC class II, MUC-1, MUC-16, NCR3LG1, NKG2D, NKp46, NTPDase-1, OX40, OX40L, PD-1, PD-L1, PD-L2, PROM1, S152, SIRPalpha, SISP1, SLC, SPG64, ST2, STEAP1, STEAP2, Syk kinase, STEAP1, TROP2, TACI, TDO, TGFBETA, T14, TIGIT, TIM3, TLR, TLR2, TLR4, TLR5, TLR9, TMEF1, TNFa, TNFRSF7, Tp55, TREM1, TSLP, TSLPR, TWEAK, VEGF, VISTA, Vstm3, and WUCAM.

[8270] In some aspects, provided herein is a method of preventing or treating a cancer or a tumor in a subject comprising administering to the subject an antigen binding polypeptide, antigen binding polypeptide complex (e.g., an antibody or antigen binding fragment thereof), polypeptide, polynucleotide, vector, host cell or pharmaceutical composition provided herein, or a combination thereof. In some aspects, the antigen binding polypeptide or antigen binding polypeptide complex (e.g., an antibody or antigen binding fragment thereof) is to be understood to specifically bind to at least one epitope on at least one tumor-associated antigen (TAA) associated with the cancer or tumor. In some aspects, the TAA is selected from the group consisting of 5′-nucleotidase, 5T4, A2AR, activin receptor-like kinase 1, adenocarcinoma antigen, ADRB3, AFP, AKAP-4, ALK, alpha-fetoprotein, androgenreceptor, angiopoietin 2, AOC3, APRIL, ATPDase, AXL, B7-4, B7DC, B7H1, B7H2, B7H3, B7H4, B7H5, B7H6, B7H7, B7RP1, BAFF, BAFFR, BCMA, bcr-abl. BlyS, BORIS, BST2, BTK, BTLA, C3, C5, C5a, C5a receptor, CA-125, CAIX, CanAg (a glycoform of MUC1), CCL11, CCL15, CCL17, CCL19, CCL2, CCL20, CCL21, CCL25, CCL3, CCL4, CCL5, CCL7, CCL8, CCR2, CCR3, CCR4, CCR5, CD11, CD11a, CD123, CD125, CD133, CD134, CD137, CD137L, CD147, CD15, CD154, CD160, CD16A, CD171, CD179a, CD18, CD184, CD19, CD2, CD20, CD200, CD22, CD221, CD23, CD24, CD242, CD25, CD27, CD272, CD276, CD278, CD279, CD28, CD3, CD30, CD300LF, CD319, CD33, CD37, CD38, CD39, CD38, CD4, CD40, CD40L, CD41, CD44v6, CD45, CD47, CD49B, CD5, CD51, CD52, CD54, CD56, CD6, CD62L, CD7, CD70, CD72, CD74, CD79a, CD79b, CD80, CD86, CD97, CEA, CEACAM5, claudin 18 isoform 2, CLDN6, CLEC12A, CLEC9), CLEC91, CLL-1, cMet, coagulation factor III, CRTH2, CS1, CSF-1, CSFIR, CSF-2, CSF-3, CTGF, CTLA4, CXCL1, CXCL12, CXCL13, CXCL2, CXCL4, CXCR3, CXORF61, CyclinB1, CYP1B1, dendritic cell-associated lectin 2, DLL3, DLL4, DNGR-1, DR5, E7, E-cadherin, EGFL7, EGFR, EGFRVIII, ELF2M, EMR2, endoglin, ENTPD1, EpCAM, EphA2, EPHA3, ephrin receptor A3, EphrinB2, episialin, ERBB2 (Her2/neu), ERBB3, ERG (TMPRSS2-ETS fusion gene), ETV6-AML, FAP, FCAR, FCER1, FCER1A, FCER2, FCRL5, FGF 23, FGFR, FGFR2, fibronectin extra domain-B, FLAP, FLT3, folate hydrolase, folate receptor 1, folate receptor alpha, folate receptor beta, FOLH1, Fos-relatedantigen1, Frizzled receptor. Fucosyl GM1, GD2, GD3, gelatinase B. Gi24, GITR, GITRL, GloboH, Glutamate carboxypeptidase II, glypican 3, GM3, GP100, GPC1, GPC2, GPC3, gplOO, GPNMB, GPR20, GPR5, GPRC5D, growth differentiation factor 8, GUCY2C, HAVCR1, HER1, HER2, HER3, HGF, HGFR, HHLA2, histone complex, HLA-DR, HMGB1, HMWMAA, HPVE6, hTERT, human telomerase reverse transcriptase, HVEM, ICAM-1, ICOS, ICOSL, IDO, IFNa, IgE, IGF-1, IGF1R, IGF-2, IGF-I receptor, IGLL1, IL1, IL10, IL12, IL13, IL13Ra2, IL-13Ra2, IL13Ra1, IL15, IL17, IL-17A, IL-17AF, IL-17F, IL17Rb, IL18, IL1B, IL1F10, IL-1a, IL-1B, IL2, IL-20, IL22, IL23, IL-23A, IL25, IL2Rbeta, IL-3 receptor, IL-31 receptor A, IL33, IL35, IL4, IL4Ra, IL5, ILSR, IL6, IL7, IL7Ra, IL8, IL9, IL9R, IL1A, IL-llRa, integrin α4, integrin α4 β7, integrin α5β1, integrin αIIbβ3, integrin αvβ3, integrin β7, interleukin 36 receptor IL1RAP, interleukin 36 receptor IL1RL2, intestinal carboxylesterase, ITGB4, ITK, KIR, KIR2D, KIT, LAG3, LAGE-1a, LAIR1, LAMP1, LCK, legumain, leptin, LewisY, LILRA2, LIV-1, LMP2, LOXL2, LPFS2, LRRC15, LY6K, LY75, LYPD3, MAD-CT-1, MAD-CT-2, MAGEA1, MAGE-A1, MCAM, MCP-1, MelanA/MART1, mesothelin, MHC classII, MIF, ML-IAP, MS4A1, MST1R (RON), MUC1, MUC-1, MUC16, MUC-16, MUCSAC, muthsp70-2, MYCN, NA17, NCA-90) granulocyte antigen, NCAM, NCR3LG1, nectin-4, NGNA ganglioside, NKG2A, NKG2D, NKp46, Notch 1, Notch receptor, NRP1, NTPDase-1, NY-BR-1, NY-ESO-1, o-acetyl-GD2, OR51E2, OX40, OX40L, OY-TES1, p53, p53mutant, PANX3, PAP, PAX3, PAX5, PCDC1, PCDP1, PCTA-1/Galectin8, PD-1, PDGFRA, PDGFR-beta, PD-L1, PD-L2, phosphate-sodium co-transporter, phosphatidylserine, PLAC1, polysialicacid, PROM1, prostase, prostein, PRSS21, PSCA, PSMA, PTK7, RAGE-1, RANKL, Ras mutant, rhIL1O, RhoC, root plate-specific spondin 3, ROR1, ROR2, RTN4, RU1, RU2, S152, sarcoma translocation breakpoints, SART3, scatter factor receptor kinase, SDC1, SIRPalpha, SISP1, SLAMF7, SLC, sLe, SLITRK6, spermprotein17, SPG64, sphingosine-1-phosphate, SSEA-4, SSX2, ST2, STEAP1, STEAP2, surviving and telomerase, Syk kinase, T14, TACI, TAG72, TARP, T-cell receptor, TCRβ, TDO, TEM1/CD248, TEM7R, tenascin C, TGFBETA, TGF-β1, TGF-β2, TGS5, the extracellular portion of the APRIL protein. Tie2, TIGIT, TIM3, TLR, TLR2, TLR4, TLR5, TLR9, TMEF1, TnAg, TNF, TNFa, TNFR superfamily member 4, TNFRSF7, Tp55, TRAC, TRAIL-R1, TRAIL-R2, TRAP, TREM1, TROP2, TRP-2, TSHR, TSLP, TSLPR, tumor antigen CTAA16.88, TWEAK, tyrosinase, TYRP1 glycoprotein 75, UPK2, VAP-1, VEGF, VEGFA, VEGFR-1, VEGFR2, vimentin, VISTA, Vstm3, WT1, WUCAM, and XAGE1.

[8271] For example, in some aspects any one or more of the VL and/or VH comprised in antigen binding polypeptides or antigen binding polypeptide complexes (e.g., an antibodies or antigen binding fragments thereof) disclosed herein comprise a light chain complementarity determining region 1 (LCDR1), LCDR2, and/or LCDR3, and a heavy chain complementarity determining region 1 (HCDR1), HCDR2, and/or HCDR3 of an antibody selected from the group consisting of losatuxizumab vedotin, utomilumab, urelumab, oleclumab, naptumomab estafenatox, ascrinvacumab, pintumomab, tacatuzumab tetraxetan, nesvacumab, vanucizumab, timolumab, vapaliximab, vepalimomab, enapotamab vedotin, ianalumab, belimumab, tabalumab, tibulizumab, belantamab mafodotin, teclistamab, teclistamab, detumomab, nacolomab tafenatox, eculizumab, lendalizumab, pexelizumab, pozelimab, ravulizumab, tesidolumab, vilobelimab, abagovomab, igovomab, oregovomab, sofituzumab vedotin, cantuzumab mertansine, cantuzuma bravtansine, girentuximab, altumomab pentetate, arcitumomab, besilesomab, bertilimumab, plozalizumab, mogamulizumab, leronlimab, PRO140, rovelizumab, rovelizumab, talacotuzumab, benralizumab, tavolimab, vonlerolizumab, gavilimomab, ziralimumab, fanolesomab, ipilimumab, ruplizumab, toralizumab, dapirolizumab pegol, toralizumab, dapirolizumab pegol, ruplizumab, blinatumomab, inebilizumab, loncastuximab tesirine, SGN-CD19A, tafasitamab, taplitumomab paptox, XMAB-5574, Budoprutug, Obexelimab, duvortuxizumab, englumafusp alfa, Emfizatamab, zeripatamig, siplizumab, blontuvetmab, FBTA05, ibritumomab tiuxetan, obinutuzumab, ocaratuzumab, ocrelizumab, ofatumumab, rituximab, tositumomab, ublituximab, veltuzumab, divozilimab, eramkafusp alfa, ripertamab, zuberitamab, glofitamab, nofetumomab merpentan, samalizumab, imvotamab, odronextamab, plamotamab, bectumomab, inotuzumab ozogamicin, moxetumomab pasudotox, pinatuzumab vedotin, gomiliximab, lumiliximab, inolimomab, inolimomab, daclizumab, camidanluma btesirine, basiliximab, varlilumab, omburtamab, enoblituzumab, vopratelimab, lulizumabpegol, TGN1412, muromonab-CD3, otelixizumab, teplizumab, visilizumab, epcoritamab, epcoritamab, brentuximab vedotin, iratumumab, azintuxizumab vedotin, gemtuzumab ozogamicin, lintuzumab, vadastuximab talirine, naratuximab emtansine, otlertuzumab, lilotomab satetraxetan, tetulomab, daratumumab, isatuximab, foralumab, mosunetuzumab, mosunetuzumab, cedelizumab, ibalizumab, keliximab, priliximab, tregalizumab, zanolimumab, bleselumab, iscalimab, lucatumumab, ravagalimab, selicrelumab, teneliximab, vanalimab, abciximab, bivatuzumab, iomab-B, telimomab aritox, zolimomab aritox, abituzumab, intetumumab, alemtuzumab, tamtuvetmab, lorvotuzumab mertansine, itolizumab, cusatuzumab, vorsetuzumab mafodotin, milatuzumab, iladatuzumab vedotin, polatuzumab vedotin, galiximab, cibisatamab, zolbetuximab, naxitamab, tisotumab vedotin, olendalizumab, pamrevlumab, lacnotuzumab, cabiralizumab, emactuzumab, axatilimab, gimsilumab, lenzilumab, namilumab, tremelimumab, ulocuplumab, tepoditamab, rovalpituzumab tesirine, tarlatamab, demcizumab, navicixizumab, drozitumab, parsatuzumab, depatuxizumab mafodotin, modotuximab, carotuximab, adecatumumab, adecatumumab, oportuzumab monatox, solitomab, tucotuzumab celmoleukin, edrecolomab, catumaxomab, ifabotuzumab, fibatuzumab, zalutumumab, panitumumab, cetuximab, futuximab, imgatuzumab, laprituximab emtansine, matuzumab, necitumumab, nimotuzumab, tomuzotuximab, amivantamab, amivantamab, epitumomab cituxetan, sontuzumab, duligotuzumab, elgemtumab, lumretuzumab, patritumab, seribantumab, zenocutuzumab, sibrotuzumab, burosumab, aprutumab ixadotin, radretumab, pasotuxizumab, farletuzumab, mirvetuximab soravtansine, vantictumab, TRBS07, 3F8, dinutuximab, dinutuximab beta, ecromeximab, mitumomab, andecaliximab, capromab, codrituzumab, glembatumumab vedotin, talquetamab, talquetamab, trevogrumab, indusatumab vedotin, ficlatuzumab, rilotumumab, zatuximab, pentuzimab, pentuzimab, margetuximab, timigutuzumab, trastuzumab, trastuzumab duocarmazine, trastuzumab emtansine, gancotamab, pertuzumab, ertumaxomab, emibetuzumab, telisotuzumab, telisotuzumab vedotin, derlotuximab biotin, apolizumab, onartuzumab, bersanlimab, enlimomabpegol, rontalizumab, sifalimumab, talizumab, ganitumab, istiratumab, robatumumab, teprotumumab, figitumumab, ganitumab, istiratumab, robatumumab, teprotumumab, cixutumumab, dalotuzumab, xentuzumab, dusigitumab, canakinumab, ustekinumab, ustekinumab, ustekinumab, briakinumab, briakinumab, abrezekimab, lebrikizumab, romilkimab, TNX-650, tralokinumab, anrukinzumab, brodalumab, ixekizumab, netakimab, perakizumab, secukinumab, vunakizumab, afascvikumab, afascvikumab, bimekizumab, bimekizumab, remtolumab, bermekimab, lutikizumab, lutikizumab, gevokizumab, cergutuzumab amunaleukin, fletikumab, fezakinumab, brazikumab, guselkumab, mirikizumab, tildrakizumab, risankizumab, flotetuzumab, nemolizumab, pascolizumab, dupilumab, mepolizumab, reslizumab, clazakizumab, elsilimomab, olokizumab, sarilumab, siltuximab, sirukumab, vobarilizumab, tocilizumab, SA237, satralizumab, enokizumab, prezalizumab, natalizumab, abrilumab, abrilumab, vedolizumab, volociximab, tadocizumab, etaracizumab, etrolizumab, spesolimab, vatelizumab, erlizumab, lirilumab, relatlimab, cBR96-doxorubicinimmunoconjugate, odulimomab, efalizumab, ladiratuzumab vedotin, simtuzumab, samrotamab vedotin, aselizumab, lupartumab amadotin, imalumab, carlumab, imaprelimab, amatuximab, amatuximab, anetumab ravtansine, narnatumab, clivatuzumab tetraxetan, pemtumomab, gatipotuzumab, ensituximab, lemalesomab, sulesomab, enfortumab vedotin, racotumomab, monalizumab, brontictuzumab, tarextumab, vesencumab, oxelumab, gilvetmab, tislelizumab, dostarlimab, BCD-100, nivolumab, PDR001, pembrolizumab, pidilizumab, retifanlimab, spartalizumab, sintilimab, cemiplimab, olaratumab, tovetumab, rinucumab, atezolizumab, avelumab, durvalumab, lifastuzumab vedotin, bavituximab, acapatamab, capromab, rosopatamab, nezastomig, pasotuxizumab, pelgifatamab, voxalatamab, cofetuzumab pelidotin, denosumab, rosmantuzumab, cirmtuzumab, atinumab, indatuximab ravtansine, elotuzumab, sirtratumab vedotin, sonepcizumab, vandortuzumab vedotin, minretumomab, satumomab pendetide, maslimomab, ontuxizumab, tenatumomab, fresolimumab, metelimumab, lerdelimumab, tezepelumab, etigilimab, tiragotumab, placulumab, prezalumab, infliximab, nerelimomab, ozoralizumab, adalimumab, afelimomab, certolizumab pegol, golimumab, mapatumumab, conatumumab, lexatumumab, tigatuzumab, sacituzumab govitecan, votumumab, pogalizumab, letolizumab, pankomab, anatumomab mafenatox, enavatuzumab, flanvotumab, brolucizumab, ranibizumab, varisacumab, bevacizumab, faricimab, icrucumab, alacizumab pegol, ramucirumab, pritumumab, and onvatilimab.

[8272] For example, in some aspects any one or more of the VL and/or VH comprised in antigen binding polypeptides or antigen binding polypeptide complexes (e.g., an antibodies or antigen binding fragments thereof) disclosed herein comprise a VL and/or a VH of an antibody selected from the group consisting of losatuxizumab vedotin, utomilumab, urelumab, oleclumab, naptumomab estafenatox, ascrinvacumab, pintumomab, tacatuzumab tetraxetan, nesvacumab, vanucizumab, timolumab, vapaliximab, vepalimomab, enapotamab vedotin, ianalumab, belimumab, tabalumab, tibulizumab, belantamab mafodotin, teclistamab, teclistamab, detumomab, nacolomab tafenatox, eculizumab, lendalizumab, pexelizumab, pozelimab, ravulizumab, tesidolumab, vilobelimab, abagovomab, igovomab, oregovomab, sofituzumab vedotin, cantuzumab mertansine, cantuzuma bravtansine, girentuximab, altumomab pentetate, arcitumomab, besilesomab, bertilimumab, plozalizumab, mogamulizumab, leronlimab, PRO140, rovelizumab, rovelizumab, talacotuzumab, benralizumab, tavolimab, vonlerolizumab, gavilimomab, ziralimumab, fanolesomab, ipilimumab, ruplizumab, toralizumab, dapirolizumab pegol, toralizumab, dapirolizumab pegol, ruplizumab, blinatumomab, inebilizumab, loncastuximab tesirine, SGN-CD19A, tafasitamab, taplitumomab paptox, XMAB-5574, Budoprutug, Obexelimab, duvortuxizumab, englumafusp alfa, Emfizatamab, zeripatamig, siplizumab, blontuvetmab, FBTA05, ibritumomab tiuxetan, obinutuzumab, ocaratuzumab, ocrelizumab, ofatumumab, rituximab, tositumomab, ublituximab, veltuzumab, divozilimab, eramkafusp alfa, ripertamab, zuberitamab, glofitamab, nofetumomab merpentan, samalizumab, imvotamab, odronextamab, plamotamab, bectumomab, inotuzumab ozogamicin, moxetumomab pasudotox, pinatuzumab vedotin, gomiliximab, lumiliximab, inolimomab, inolimomab, daclizumab, camidanluma btesirine, basiliximab, varlilumab, omburtamab, enoblituzumab, vopratelimab, lulizumabpegol, TGN1412, muromonab-CD3, otelixizumab, teplizumab, visilizumab, epcoritamab, epcoritamab, brentuximab vedotin, iratumumab, azintuxizumab vedotin, gemtuzumab ozogamicin, lintuzumab, vadastuximab talirine, naratuximab emtansine, otlertuzumab, lilotomab satetraxetan, tetulomab, daratumumab, isatuximab, foralumab, mosunetuzumab, mosunetuzumab, cedelizumab, ibalizumab, keliximab, priliximab, tregalizumab, zanolimumab, bleselumab, iscalimab, lucatumumab, ravagalimab, selicrelumab, teneliximab, vanalimab, abciximab, bivatuzumab, iomab-B, telimomab aritox, zolimomab aritox, abituzumab, intetumumab, alemtuzumab, tamtuvetmab, lorvotuzumab mertansine, itolizumab, cusatuzumab, vorsetuzumab mafodotin, milatuzumab, iladatuzumab vedotin, polatuzumab vedotin, galiximab, cibisatamab, zolbetuximab, naxitamab, tisotumab vedotin, olendalizumab, pamrevlumab, lacnotuzumab, cabiralizumab, emactuzumab, axatilimab, gimsilumab, lenzilumab, namilumab, tremelimumab, ulocuplumab, tepoditamab, rovalpituzumab tesirine, tarlatamab, demcizumab, navicixizumab, drozitumab, parsatuzumab, depatuxizumab mafodotin, modotuximab, carotuximab, adecatumumab, adecatumumab, oportuzumab monatox, solitomab, tucotuzumab celmoleukin, edrecolomab, catumaxomab, ifabotuzumab, fibatuzumab, zalutumumab, panitumumab, cetuximab, futuximab, imgatuzumab, laprituximab emtansine, matuzumab, necitumumab, nimotuzumab, tomuzotuximab, amivantamab, amivantamab, epitumomab cituxetan, sontuzumab, duligotuzumab, elgemtumab, lumretuzumab, patritumab, seribantumab, zenocutuzumab, sibrotuzumab, burosumab, aprutumab ixadotin, radretumab, pasotuxizumab, farletuzumab, mirvetuximab soravtansine, vantictumab, TRBS07, 3F8, dinutuximab, dinutuximab beta, ecromeximab, mitumomab, andecaliximab, capromab, codrituzumab, glembatumumab vedotin, talquetamab, talquetamab, trevogrumab, indusatumab vedotin, ficlatuzumab, rilotumumab, zatuximab, pentuzimab, pentuzimab, margetuximab, timigutuzumab, trastuzumab, trastuzumab duocarmazine, trastuzumab emtansine, gancotamab, pertuzumab, ertumaxomab, emibetuzumab, telisotuzumab, telisotuzumab vedotin, derlotuximab biotin, apolizumab, onartuzumab, bersanlimab, enlimomabpegol, rontalizumab, sifalimumab, talizumab, ganitumab, istiratumab, robatumumab, teprotumumab, figitumumab, ganitumab, istiratumab, robatumumab, teprotumumab, cixutumumab, dalotuzumab, xentuzumab, dusigitumab, canakinumab, ustekinumab, ustekinumab, ustekinumab, briakinumab, briakinumab, abrezekimab, lebrikizumab, romilkimab, TNX-650, tralokinumab, anrukinzumab, brodalumab, ixekizumab, netakimab, perakizumab, secukinumab, vunakizumab, afasevikumab, afasevikumab, bimekizumab, bimekizumab, remtolumab, bermekimab, lutikizumab, lutikizumab, gevokizumab, cergutuzumab amunaleukin, fletikumab, fezakinumab, brazikumab, guselkumab, mirikizumab, tildrakizumab, risankizumab, flotetuzumab, nemolizumab, pascolizumab, dupilumab, mepolizumab, reslizumab, clazakizumab, elsilimomab, olokizumab, sarilumab, siltuximab, sirukumab, vobarilizumab, tocilizumab, SA237, satralizumab, enokizumab, prezalizumab, natalizumab, abrilumab, abrilumab, vedolizumab, volociximab, tadocizumab, etaracizumab, etrolizumab, spesolimab, vatelizumab, erlizumab, lirilumab, relatlimab, cBR96-doxorubicinimmunoconjugate, odulimomab, efalizumab, ladiratuzumab vedotin, simtuzumab, samrotamab vedotin, aselizumab, lupartumab amadotin, imalumab, carlumab, imaprelimab, amatuximab, amatuximab, anetumab ravtansine, narnatumab, clivatuzumab tetraxetan, pemtumomab, gatipotuzumab, ensituximab, lemalesomab, sulesomab, enfortumab vedotin, racotumomab, monalizumab, brontictuzumab, tarextumab, vesencumab, oxelumab, gilvetmab, tislelizumab, dostarlimab, BCD-100, nivolumab, PDR001, pembrolizumab, pidilizumab, retifanlimab, spartalizumab, sintilimab, cemiplimab, olaratumab, tovetumab, rinucumab, atezolizumab, avelumab, durvalumab, lifastuzumab vedotin, bavituximab, acapatamab, capromab, rosopatamab, nezastomig, pasotuxizumab, pelgifatamab, voxalatamab, cofetuzumab pelidotin, denosumab, rosmantuzumab, cirmtuzumab, atinumab, indatuximab ravtansine, elotuzumab, sirtratumab vedotin, sonepcizumab, vandortuzumab vedotin, minretumomab, satumomab pendetide, maslimomab, ontuxizumab, tenatumomab, fresolimumab, metelimumab, lerdelimumab, tezepelumab, etigilimab, tiragotumab, placulumab, prezalumab, infliximab, nerelimomab, ozoralizumab, adalimumab, afelimomab, certolizumab pegol, golimumab, mapatumumab, conatumumab, lexatumumab, tigatuzumab, sacituzumab govitecan, votumumab, pogalizumab, letolizumab, pankomab, anatumomab mafenatox, enavatuzumab, flanvotumab, brolucizumab, ranibizumab, varisacumab, bevacizumab, faricimab, icrucumab, alacizumab pegol, ramucirumab, pritumumab, and onvatilimab.

[8273] In some aspects, provided herein is a method of preventing or treating a pathology other than a cancer or a tumor or an infectious disease that is not a sarbecovirus infectious disease in a subject comprising administering to the subject an antigen binding polypeptide, antigen binding polypeptide complex (e.g., an antibody or antigen binding fragment thereof), polypeptide, polynucleotide, vector, host cell or pharmaceutical composition provided herein, or a combination thereof. In some aspects, the antigen binding polypeptide or antigen binding polypeptide complex (e.g., an antibody or antigen binding fragment thereof) is to be understood to specifically bind to at least one epitope on at least one other-pathology antigen associated with the pathology other than a cancer or a tumor or an infectious disease that is not a sarbecovirus infectious disease. In some aspects, the other-pathology antigenes selected from the group consisting of Amyloid beta, β-amyloid, PCSK9, IFN-α/β receptor, Rhesus factor, nerve growth factor (NGF), DPP4, fibrin II beta chain, ACVR2B, serum amyloid A protein SOST, FGF 23, VWF, tissue factor pathway inhibitor (TFPI), 1-40 and 1-42, selectin P, glucagon receptor (GCGR), amyloid P component, GDF-8, CXCL10) IP-10, repulsive guidance molecule A RGMA, IFN-γ, activated F9/F10, calcitonin gene-related peptide (CGRP), angiopoietin 3, IFN receptor, IFN-γ, calcitonin, β-amyloid 1-40 and 1-42, tau protein, dabigatran, cardiac myosin, selectin P, Complement factor D (CFD), kallikrein, GDF-8, IGHE, tissue factor pathway inhibitor (TFPI), GMCSF receptor α-chain, amyloid, IgE Fc region, MASP-2, oxLDL, GMCSF, NOGO-A. Alpha-synuclein, NGF, myelin-associated glycoprotein, RHD (gene) (RHD), sclerostin, FCGRT, sclerostin SOST, mucosal addressin cell adhesion molecule, myostatin, RSVFR, complement component 1s C1s, C5, and IL31.

[8274] For example, in some aspects any one or more of the VL and/or VH comprised in antigen binding polypeptides or antigen binding polypeptide complexes (e.g., an antibodies or antigen binding fragments thereof) disclosed herein comprise a light chain complementarity determining region 1 (LCDR1), LCDR2, and/or LCDR3, and a heavy chain complementarity determining region 1 (HCDR1), HCDR2, and/or HCDR3 of an antibody selected from the group consisting of aducanumab, alirocumab, frovocimab, lodelcizumab, bococizumab, evolocumab, ralpancizumab, anifrolumab, atorolimumab, bapineuzumab, bedinvetmab, begelomab, biciromab, bimagrumab, birtamimab, blosozumab, burosumab, caplacizumab, concizumab, crenezumab, crizanlizumab, crotedumab, dezamizumab, domagrozumab, donanemab, eldelumab, elezanumab, emapalumab, emicizumab, eptinezumab, erenumab, evinacumab, faralimomab, fasinumab, fontolizumab, fremanezumab, frunevetmab, fulranumab, galcanezumab, gantenerumab, gosuranemab, idarucizumab, imciromab, inclacumab, lampalizumab, lanadelumab, landogrozumab, lecanemab, ligelizumab, marstacimab, mavrilimumab, morolimumab, NEOD001, omalizumab, oMS721, orticumab, otilimab, ozanezumab, ponezumab, prasinezumab, quilizumab, ranevetmab, refanezumab, roledumab, romosozumab, rozanolixizumab, setrusumab, SHP647, solanezumab, stamulumab, suptavumab, sutimlimab, tanezumab, crovalimab, and lokivetmab.

[8275] For example, in some aspects any one or more of the VL and/or VH comprised in antigen binding polypeptides or antigen binding polypeptide complexes (e.g., an antibodies or antigen binding fragments thereof) disclosed herein comprise a VL and/or a VH of an antibody selected from the group consisting of aducanumab, alirocumab, frovocimab, lodelcizumab, bococizumab, evolocumab, ralpancizumab, anifrolumab, atorolimumab, bapineuzumab, bedinvetmab, begelomab, biciromab, bimagrumab, birtamimab, blosozumab, burosumab, caplacizumab, concizumab, crenezumab, crizanlizumab, crotedumab, dezamizumab, domagrozumab, donanemab, eldelumab, elezanumab, emapalumab, emicizumab, eptinezumab, erenumab, evinacumab, faralimomab, fasinumab, fontolizumab, fremanezumab, frunevetmab, fulranumab, galcanezumab, gantenerumab, gosuranemab, idarucizumab, imciromab, inclacumab, lampalizumab, lanadelumab, landogrozumab, lecanemab, ligelizumab, marstacimab, mavrilimumab, morolimumab, NEOD001, omalizumab, oMS721, orticumab, otilimab, ozanezumab, ponezumab, prasinezumab, quilizumab, ranevetmab, refanezumab, roledumab, romosozumab, rozanolixizumab, setrusumab, SHP647, solanezumab, stamulumab, suptavumab, sutimlimab, tanezumab, crovalimab, and lokivetmab.

[8276] Non-limiting examples of pathologies other than a cancer or a tumor or an infectious disease that is not a sarbecovirus infectious disease are Alzheimer's disease, cardiovascular disease, hypercholesterolemia, dyslipidemia, lupus erythematosus, hemolytic disease of the newborn, pain associated with osteoarthritis (e.g., in dogs), severe refractory idiopathic inflammatory myopathy, thromboembolism, pathological muscle loss and weakness, amyloidosis, osteoporosis, hypophosphatemia, thrombotic thrombocytopenia purpura, thrombosis, bleeding with hemophilia, sickle-cell disease, diabetes. Duchenne muscular dystrophy. Crohn's disease, ulcerative colitis, spinal cord injury, multiple sclerosis, hemophagocytic lymphohistiocytosis, haemophilia A, migraine, acute sciatic pain, pain associated with osteoarthritis (e.g., in cats), pain, progressive supranuclear palsy, reversal of anticoagulant effects of dabigatran, geographic atrophy secondary to age-related macular degeneration, angioedema), muscle wasting disorders, severe asthma, chronic spontaneous urticaria, rheumatoid arthritis, immune disease, primary systemic amyloidosis, allergic asthma, chronic spontaneous urticaria, atypical hemolytic uremic syndrome, coronary inflammation, osteoarthritis. Parkinson's disease, asthma, recovery of motor function after stroke. Rh disease, myasthenia gravis. Osteogenesis Imperfecta, muscular dystrophy, medically attended lower respiratory disease, cold agglutinin disease, paroxysmal nocturnal hemoglobinuria, and atopic dermatitis (e.g. in dogs).

[8277] Delivery of the antigen binding polypeptide, antigen binding polypeptide complex (e.g., antibody or antigen binding fragment thereof), polypeptide, or antibody or antigen binding fragment thereof provided herein can be by direct administration of the antigen binding polypeptide, antigen binding polypeptide complex (e.g., antibody or antigen binding fragment thereof), polypeptide, or antibody or antigen binding fragment thereof provided herein or by an indirect method that is inclusive of delivery of a modified mRNA composition that is administered to the patient in need of treatment thereof by an antigen binding polypeptide, an antigen binding polypeptide complex (e.g., antibody or antigen binding fragment thereof), a polypeptide, or an antibody or antigen binding fragment thereof provided herein translated from the modified mRNA that codes for the antigen binding polypeptide, antigen binding polypeptide complex (e.g., antibody or antigen binding fragment thereof), polypeptide, or antibody or antigen binding fragment thereof provided herein.

[8278] As used herein, the terms “prevent” or “preventing” refer to the prevention of the onset, recurrence or spread, in whole or in part, of a disease or condition provided herein, or a symptom thereof. As used herein, the terms “treat” or “treating” refer to therapeutic or palliative measures. Beneficial or desired clinical results include, but are not limited to, alleviation, in whole or in part, of symptoms associated with a disease or disorder or condition, diminishment of the extent of disease, stabilized (i.e., not worsening) state of disease, delay or slowing of disease progression, amelioration or palliation of the disease state (e.g., one or more symptoms of the disease), and remission (whether partial or total), whether detectable or undetectable. “Treat” can also mean prolonging survival as compared to expected survival if not receiving treatment.

[8279] As used herein. “administering” is meant a method of giving a dosage of an antigen binding polypeptide or polypeptide complex (e.g., antibody or antigen binding fragment thereof) to a subject in need thereof (e.g., a patient). Administering can be by any suitable means, including parenteral, intrapulmonary or intranasal. Parenteral infusions include, for example, intramuscular, intravenous, intraarterial, intraperitoneal or subcutaneous administration. Dosing can be by any suitable route, e.g., by injection, such as intravenous or subcutaneous injection. Various dosing schedules including, but not limited to, single or multiple administrations over various time-points, bolus administration, and pulse infusion are contemplated herein.

[8280] As used herein, a “therapeutically effective amount” is an amount of an antigen binding polypeptide or antigen binding polypeptide complex (e.g., an antibody or antigen binding fragment thereof) that is sufficient to achieve the desired effect and can vary according to the nature and severity of the condition, and the potency of the polypeptide or polypeptide complex. In one aspect, an antigen binding polypeptide or polypeptide complex can be delivered by administering a polynucleotide, vector, or host cell that encodes the antigen binding polypeptide or polypeptide complex. In another aspect, an antigen binding polypeptide or polypeptide complex thereof can be delivered by administering a pharmaceutical composition containing the polypeptide or polypeptide complex. A therapeutic effect is the relief, to at least some extent, of one or more symptoms of the disease or disorder, and can include curing a disease or disorder. “Curing” means that the symptoms of active disease are eliminated. However, certain long-term or permanent effects of a disease or disorder can exist even after a cure is obtained.

[8281] As used herein, the term “subject” means a human or a non-human mammal, e.g., a dog, cat, mouse, rat, cow, sheep, pig, goat, non-human primate or bird, e.g., chicken, as well as any other vertebrate or invertebrate. In one aspect, the subject is a human. In another aspect, the subject is a veterinary animal. In one aspect, the subject is a mammal.

[8282] In some aspects, provided herein are methods of preventing or treating (i) a cancer or a tumor, (ii) an infectious disease that is not a sarbecovirus infectious disease, or (iii) a pathology other than a cancer or a tumor or an infectious disease that is not a sarbecovirus infectious disease, comprising administering to the subject a therapeutically effective amount of the antigen binding polypeptides or antigen binding polypeptide complexes, the antibodies or antigen binding fragments thereof, the polynucleotides, the vectors, the host cells, the mRNAs, the LNPs, the CARs, the immune cells, or the pharmaceutical compositions disclosed herein, or any combination thereof.

[8283] In some aspects, provided herein are methods of diagnosing a subject as having or as being suspected of having (i) a cancer or a tumor, (ii) an infectious disease that is not a sarbecovirus infectious disease, or (iii) a pathology other than a cancer or a tumor or an infectious disease that is not a sarbecovirus infectious disease, comprising (a) contacting a sample obtained from the subject with the antigen binding polypeptides or antigen binding polypeptide complexes or the antibodies or antigen binding fragments thereof disclosed herein; (b) detecting the presence or absence of a complex which contains the polypeptide or a fragment thereof, polypeptide complex or a fragment thereof, or antibody or antigen binding fragment thereof and (i) a tumor-associated antigen (TAA) or fragment thereof, (ii) an infectious disease antigen that is not a sarbecovirus antigen or fragment thereof, or (iii) an other-pathology antigen or fragment thereof; and (c) diagnosing the subject as having or as being suspected of having (i) a cancer or a tumor, (ii) an infectious disease that is not a sarbecovirus infectious disease, or (iii) a pathology other than a cancer or a tumor or an infectious disease that is not a sarbecovirus infectious disease when the presence of the complex is detected.

[8284] In some aspects, provided herein are methods of diagnosing a subject as not having or as not being suspected of having (i) a cancer or a tumor, (ii) an infectious disease that is not a sarbecovirus infectious disease, or (iii) a pathology other than a cancer or a tumor or an infectious disease that is not a sarbecovirus infectious disease, comprising (a) contacting a sample obtained from the subject with the antigen binding polypeptides or antigen binding polypeptide complexes or the antibodies or antigen binding fragments thereof disclosed herein; (b) detecting the presence or absence of a complex which contains the polypeptide or a fragment thereof, polypeptide complex or a fragment thereof, or antibody or antigen binding a fragment thereof and (i) a tumor-associated antigen (TAA) or fragment thereof, (ii) an infectious disease antigen that is not a sarbecovirus antigen or fragment thereof, or (iii) an other-pathology antigen or fragment thereof; and (c) diagnosing the subject as not having or as not being suspected of having (i) a cancer or a tumor, (ii) an infectious disease that is not a sarbecovirus infectious disease, or (iii) a pathology other than a cancer or a tumor or an infectious disease that is not a sarbecovirus infectious disease when the presence of the complex is not detected.

[8285] The term “sample.” as used herein, refers to a composition that is obtained or derived from a subject that contains a cellular and/or other molecular entity that is to be characterized and/or identified, for example, based on physical, biochemical, chemical, and/or physiological characteristics. A sample includes, but is not limited to, nasal fluid or discharge (e.g., from a nasal swab), tissue, primary or cultured cells or cell lines, cell supernatants, cell lysates, platelets, serum, plasma, vitreous fluid, lymph fluid, synovial fluid, follicular fluid, seminal fluid, amniotic fluid, milk, whole blood, blood-derived cells, urine, cerebro-spinal fluid, saliva, sputum, tears, perspiration, mucus, tumor lysates, tissue culture medium, tissue extracts such as homogenized tissue, cellular extracts, and combinations thereof.

[8286] Methods for collecting, processing and storing a sample are known, and described, for example, in Vaught et al., IARC Sci. Pub., Unit 2. Chapter 3, pp. 23-42, 2011.

[8287] Methods for detecting the binding of an antigen binding polypeptide or polypeptide complex (e.g., antibody or antigen binding fragment thereof), or fragments thereof, provided herein and an antigen or fragment thereof are also known. Such methods include, but are not limited to, immunosorbent assay (ELISA), sodium dodecyl sulfate-polyacrylamide gel electrophoresis (SDS-PAGE), immunospot assay, lateral flow assay, flow cytometry, immunohistochemistry or western blot. See, e.g., Kumar et al., VirusDisease, 31:97-105, 2020; Gong et al., Front. Mol. Biosci. Jul. 23, 2021; and Espejo et al., Am. J. Clin. Pathol., 154 (3) 293-304, 2020.

[8288] The following sequences are included as part of the present disclosure.

[8289] In any one of the aspects disclosed herein, when reference is made to SEQ ID NO: 795, it is to be understood that “X” in SEQ ID NO: 795 is a “T” when referring to the LCDR3 of antibody E5, and “X” in SEQ ID NO: 795 is a “P” when referring to the LCDR3 of antibody H9.

Lengthy table referenced here
US20250326823A1-20251023-T00001
Please refer to the end of the specification for access instructions.

Lengthy table referenced here
US20250326823A1-20251023-T00002
Please refer to the end of the specification for access instructions.

### EXAMPLES

[8290] The following examples are provided to further illustrate aspects of the disclosure, and are not meant to constrain the disclosure to any particular application or theory of operation.

### Example 1

### Pseudovirus Neutralization Assay of Anti-SARS-CoV-2 Monoclonal Antibodies

[8291] For selecting the candidates to be used for the design and production of the antigen binding polypeptides and antigen binding polypeptide complexes described herein, the pseudotyped neutralization potency (IC50 and IC80) of several anti-SARS-CoV-2 monoclonal antibodies was determined. Specifically. S-containing lentiviral pseudovirions were produced by co-transfection of packaging plasmid pCMVdR8.2, transducing plasmid pHR′ CMV-Luc, a TMPRSS2 plasmid and S plasmids from SARS-CoV-2 variants into 293T cells using Lipofectamine 3000 transfection reagent (L3000-001. ThermoFisher Scientific, Asheville, NC), 293T-ACE2 cells (provided by Dr. Michael Farzan) were plated into 96-well white/black Isoplates (PerkinElmer, Waltham, MA) at 7.500 cells per well the day before infection with SARS-CoV-2 pseudoviruses. Serial dilutions of the anti-SARS-CoV-2 monoclonal antibodies were mixed with titrated pseudoviruses, incubated for 45 minutes at 37° C., and added to cells in triplicates. Following 2 h of incubation, wells were replenished with 150 μl of fresh media. Cells were lysed 72 h later, and luciferase activity was measured with Microbeta (Perking Elmer). Percent neutralization and neutralization IC50 and IC80 values are shown in Tables E1-E3A-3B. Eight well performing anti-SARS-CoV-2 monoclonal antibodies (B8, E12, E8, A23-58, B1, G11, B2 and A18-448) were selected to be used in the design and production of the antigen binding polypeptides and antigen binding polypeptide complexes described herein. In addition, a ninth antibody previously shown to possess neutralization activity (A19-46) was also used in the design and production of the antigen binding polypeptides and antigen binding polypeptide complexes described herein.

TABLE E1
pseudotyped neutralization potency (IC50 and IC80) for the tested anti-SARS-CoV-2
monoclonal antibodies (IC50 and IC80 are expressed in μg/ml).

| | | BA.1 | | BA.4/5 | | BA.2.12.1 | |
|---|---|---|---|---|---|---|---|
| | mAbs | IC50 | IC80 | IC50 | IC80 | IC50 | IC80 |
| Class I | SARS2.E76_B8 | 0.009 | 0.037 | 0.003 | 0.010 | not tested | |
| (New) | SARS2.F768_pt2_G10 | 0.006 | 0.019 | 0.004 | 0.010 | 0.008 | 0.022 |
| | SARS2.F768_pt1_D11 | 0.035 | 0.151 | 0.002 | 0.008 | not tested | |
| | SARS2.F769_pt1_E12 | 0.004 | 0.011 | 0.002 | 0.011 | 0.002 | 0.008 |
| | SARS2.F768_pt1_A05 | 0.012 | 0.024 | 0.004 | 0.012 | 0.014 | 0.028 |
| | SARS2.F768_pt2_D12 | 0.002 | 0.009 | 0.006 | 0.021 | 0.020 | 0.053 |
| Class I | 58.1H/58.1LC_94GLTG | 0.004 | 0.012 | 0.005 | 0.030 | 0.002 | 0.009 |
| (Comparators) | 58.1H/58.1LC_93VGLTG | 0.003 | 0.011 | 0.003 | 0.014 | 0.003 | 0.011 |
| Class III | SARS2.F770_pt1_E8 | 0.003 | 0.022 | 0.0007 | 0.003 | 0.001 | 0.0014 |
| (New) | SARS2.F770_pt1_G11 | 0.030 | 0.114 | 0.014 | 0.069 | 0.046 | 0.138 |
| | SARS2.F769_pt1_B1 | 0.0013 | 0.003 | 0.0007 | 0.002 | 0.002 | 0.004 |
| | SARS2.F770_pt1_C1 | 0.008 | 0.036 | 0.0006 | 0.002 | 0.0007 | 0.002 |
| Class III | LY-CoV-1404 | 0.002 | 0.005 | 0.0014 | 0.003 | 0.0013 | 0.004 |
| (Comparators) | | | | | | | |
| | | BA.2.75 | | BA.4.6 | | BA.2.75.2 | |
| | mAbs | IC50 | IC80 | IC50 | IC80 | IC50 | IC80 |
| Class I | SARS2.E76_B8 | 0.006 | 0.031 | 0.0007 | 0.004 | 0.004 | 0.031 |
| (New) | SARS2.F768_pt2_G10 | 0.025 | 0.058 | 0.002 | 0.008 | 0.009 | 0.024 |
| | SARS2.F768_pt1_D11 | 0.012 | 0.030 | 0.003 | 0.009 | 0.009 | 0.028 |
| | SARS2.F769_pt1_E12 | 0.007 | 0.036 | 0.002 | 0.006 | 0.003 | 0.032 |
| | SARS2.F768_pt1_A05 | 0.018 | 0.032 | 0.002 | 0.008 | 0.010 | 0.032 |
| | SARS2.F768_pt2_D12 | 0.014 | 0.046 | 0.005 | 0.015 | 0.030 | 0.085 |
| Class I | 58.1H/58.1LC_94GLTG | 0.0010 | 0.003 | 0.003 | 0.011 | >10 | >10 |
| (Comparators) | 58.1H/58.1LC_93VGLTG | 0.0009 | 0.003 | 0.003 | 0.011 | >10 | >10 |
| Class III | SARS2.F770_pt1_E8 | 0.002 | 0.009 | 0.0007 | 0.0013 | 0.0012 | 0.011 |
| (New) | SARS2.F770_pt1_G11 | 0.044 | 0.094 | 0.017 | 0.072 | 0.072 | 0.224 |
| | SARS2.F769_pt1_B1 | 0.006 | 0.040 | 0.0007 | 0.002 | 0.007 | 0.028 |
| | SARS2.F770_pt1_C1 | 0.011 | 0.073 | 0.0006 | 0.002 | 0.002 | 0.008 |
| Class III | LY-CoV-1404 | 0.003 | 0.015 | 0.0004 | 0.0014 | 0.001 | 0.005 |
| (Comparators) | | | | | | | |
| | | BQ.1.1 | | BJ.1 | | XBB | |
| | mAbs | IC50 | IC80 | IC50 | IC80 | IC50 | IC80 |
| Class I | SARS2.E76_B8 | 0.021 | 0.059 | 0.009 | 0.034 | 0.008 | 0.045 |
| (New) | SARS2.F768_pt2_G10 | 0.014 | 0.036 | 0.006 | 0.029 | 0.007 | 0.025 |
| | SARS2.F768_pt1_D11 | 0.016 | 0.040 | 0.005 | 0.020 | 0.007 | 0.040 |
| | SARS2.F769_pt1_E12 | 0.011 | 0.038 | 0.002 | 0.023 | 0.013 | 0.042 |
| | SARS2.F768_pt1_A05 | 0.033 | 0.064 | 0.002 | 0.020 | 0.011 | 0.024 |
| | SARS2.F768_pt2_D12 | 0.029 | 0.080 | 0.002 | 0.010 | 0.048 | 0.175 |
| Class I | 58.1H/58.1LC_94GLTG | 0.015 | 0.046 | 0.003 | 0.009 | >10 | >10 |
| (Comparators) | 58.1H/58.1LC_93VGLTG | 0.013 | 0.032 | 0.002 | 0.007 | >10 | >10 |
| Class III | SARS2.F770_pt1_E8 | 0.072 | 0.448 | 0.033 | 0.264 | 0.044 | 0.094 |
| (New) | SARS2.F770_pt1_G11 | 0.874 | 2.5 | 0.032 | 0.165 | 0.058 | 0.171 |
| | SARS2.F769_pt1_B1 | 0.003 | 0.013 | 1.0 | 1.9 | 1.3 | 2.8 |
| | SARS2.F770_pt1_C1 | >10 | >10 | >10 | >10 | >10 | >10 |
| Class III | LY-CoV-1404 | >10 | >10 | >10 | >10 | >10 | >10 |
| (Comparators) | | | | | | | |

TABLE E2
pseudotyped neutralization potency (IC50 and IC80) for the tested anti-SARS-CoV-2
monoclonal antibodies (IC50 and IC80 are expressed in μg/ml; n.t.: not tested).

| | SARS-CoV-2 | | | | | | |
|---|---|---|---|---|---|---|---|
| | | D614G | | BA.4/5 | | BQ.1.1 | |
| mAbs | Class | IC50 | IC80 | IC50 | IC80 | IC50 | IC80 |
| F769-E12 | I | 0.012 | 0.028 | 0.0024 | 0.011 | 0.013 | 0.028 |
| F770-G11 | II | 0.014 | 0.028 | 0.014 | 0.069 | 0.874 | 2.5 |
| A80-102_G5 | I/IV | 0.169 | 0.395 | 4.8 | 9.6 | 3.1 | 9.1 |
| A18-448.1 | I/IV | 0.014 | 0.023 | 0.0038 | 0.0093 | 0.0095 | 0.023 |
| F768-104_B2 | III | 0.0054 | 0.015 | 0.0094 | 0.044 | 0.515 | 0.982 |
| F770-E8 | III | 0.0007 | 0.0028 | 0.0007 | 0.0026 | 0.139 | 0.563 |
| F768-D11 | I | 0.011 | 0.019 | 0.0018 | 0.0085 | 0.016 | 0.040 |
| E184-105_F3 | I | 0.0028 | 0.011 | 0.0025 | 0.0085 | 0.014 | 0.056 |
| A18-452.1 | IV | 0.697 | 1.97 | 1.81 | 2.09 | 1.81 | 5 |
| SARS2.A63-652-1.4 | I/IV | 0.011 | 0.019 | 0.0050 | 0.0090 | 0.015 | 0.028 |
| | SARS-CoV-2 | | | | | | |
| | | XBB.1.5 | | XBB.1.16 | | XBC.1 | |
| mAbs | Class | IC50 | IC80 | IC50 | IC80 | IC50 | IC80 |
| F769-E12 | I | 0.0068 | 0.032 | 0.0049 | 0.028 | 0.0022 | 0.0057 |
| F770-G11 | II | 0.086 | 0.315 | 0.103 | 0.308 | 0.017 | 0.047 |
| A80-102_G5 | I/IV | 3.5 | 8.6 | 2.6 | 5.1 | 2.2 | 5.1 |
| A18-448.1 | I/IV | 0.0039 | 0.011 | 0.0022 | 0.010 | 0.0021 | 0.0063 |
| F768-104_B2 | III | 0.244 | 0.510 | 0.175 | 0.410 | 0.0088 | 0.016 |
| F770-E8 | III | 0.035 | 0.171 | 0.094 | 0.348 | 0.0014 | 0.0066 |
| F768-D11 | I | 0.0086 | 0.021 | 0.0088 | 0.023 | 0.0026 | 0.0075 |
| E184-105_F3 | I | 0.047 | 0.076 | 0.017 | 0.064 | 0.0031 | 0.0037 |
| A18-452.1 | IV | 1.79 | 2.22 | n.t. | n.t. | n.t. | n.t. |
| SARS2.A63-652-1.4 | I/IV | 0.0080 | 0.015 | n.t. | n.t. | n.t. | n.t. |

| | | SARS-CoV-2 | | | |
|---|---|---|---|---|---|
| | | XBB.2.3.2 (SAVE) | | EG.5.1 | |
| mAbs | Class | IC50 | IC80 | IC50 | IC80 |
| F769-E12 | I | 0.063 | 0.110 | 0.138 | 0.562 |
| F770-G11 | II | 0.213 | 0.582 | 0.110 | 0.286 |
| A80-102_G5 | I/IV | 2.9 | 7.9 | 2.0 | 2.9 |
| A18-448.1 | I/IV | 0.0082 | 0.030 | 0.0026 | 0.0100 |
| F768-104_B2 | III | 0.225 | 0.723 | 0.066 | 0.165 |
| F770-E8 | III | 0.298 | 5.096 | 0.084 | 1.056 |
| F768-D11 | I | 0.010 | 0.047 | 0.154 | 0.424 |
| E184-105_F3 | I | 0.075 | 0.147 | 0.030 | 0.096 |
| A18-452.1 | IV | n.t. | n.t. | n.t. | n.t. |
| SARS2.A63-652-1.4 | I/IV | n.t. | n.t. | n.t. | n.t. |

TABLE E3A
pseudotyped neutralization potency (IC50 and IC80) for the tested anti-SARS-CoV-2
monoclonal antibodies (IC50 and IC80 are expressed in ug/ml; n.t.: not tested).

| | | Sarbecovirus Clade 1a | | | | | |
|---|---|---|---|---|---|---|---|
| | | XBB.1.5 | | EG.5.1 | | RaTG13-d21aa | |
| mAbs | Class | IC50 | IC80 | IC50 | IC80 | IC50 | IC80 |
| F769-E12 | I | 0.0068 | 0.032 | 0.138 | 0.562 | 0.048 | 0.070 |
| F770-G11 | II | 0.086 | 0.315 | 0.110 | 0.286 | 0.0063 | 0.034 |
| A80-102_G5 | I/IV | 3.5 | 8.6 | 2.0 | 2.9 | 0.083 | 0.103 |
| A18-448.1 | I/IV | 0.0039 | 0.011 | 0.0026 | 0.0100 | 0.100 | 0.922 |
| F768-104_B2 | III | 0.244 | 0.510 | 0.066 | 0.165 | 0.028 | 0.125 |
| F770-E8 | III | 0.035 | 0.171 | 0.084 | 1.056 | >10 | >10 |
| F768-D11 | I | 0.0086 | 0.021 | 0.154 | 0.424 | 0.025 | 0.072 |
| E184-105_F3 | I | 0.047 | 0.076 | 0.030 | 0.096 | 0.014 | 0.039 |
| A18-452.1 | IV | 1.79 | 2.22 | n.t. | n.t. | n.t. | n.t. |
| SARS2.A63-652-1.4 | I/IV | 0.0080 | 0.015 | n.t. | n.t. | n.t. | n.t. |
| | | Sarbecovirus Clade 1a | | | | | |
| | | Pangolin-GD | | Pangolin_GX-PSL | | Pangolin_GX-P2V | |
| mAbs | Class | IC50 | IC80 | IC50 | IC80 | IC50 | IC80 |
| F769-E12 | I | 0.0061 | 0.012 | 0.013 | 0.051 | 0.0082 | 0.024 |
| F770-G11 | II | 0.0091 | 0.017 | 2.0 | 7.0 | 2.6 | 7.2 |
| A80-102_G5 | I/IV | 0.0067 | 0.019 | 0.0075 | 0.083 | 0.061 | 0.091 |
| A18-448.1 | I/IV | 0.0010 | 0.0016 | >10 | >10 | >10 | >10 |
| F768-104_B2 | III | 0.031 | 0.076 | >10 | >10 | 9.6 | >10 |
| F770-E8 | III | 0.0032 | 0.0067 | >10 | >10 | >10 | >10 |
| F768-D11 | I | 0.0090 | 0.020 | 0.0051 | 0.011 | 0.0021 | 0.0049 |
| E184-105_F3 | I | 0.0043 | 0.0078 | 0.0056 | 0.014 | 0.0065 | 0.014 |
| A18-452.1 | IV | n.t. | n.t. | 0.026 | 0.381 | 0.248 | 1.2 |
| SARS2.A63-652-1.4 | I/IV | n.t. | n.t. | 0.0080 | 0.016 | 0.0050 | 0.0090 |
| | | Sarbecovirus Clade 1b | | | | | |
| | | SARS | | WIV1 | | SHC014 | |
| mAbs | Class | IC50 | IC80 | IC50 | IC80 | IC50 | IC80 |
| F769-E12 | I | >10 | >10 | >10 | >10 | >10 | >10 |
| F770-G11 | II | >10 | >10 | >10 | >10 | >10 | >10 |
| A80-102_G5 | I/IV | 0.027 | 0.085 | 0.0073 | 0.040 | 0.0068 | 0.036 |
| A18-448.1 | I/IV | 0.0049 | 0.016 | 0.0022 | 0.012 | 0.0051 | 0.013 |
| F768-104_B2 | III | 0.125 | 0.339 | 10.952 | >10 | >10 | >10 |
| F770-E8 | III | >10 | >10 | >10 | >10 | >10 | >10 |
| F768-D11 | I | >10 | >10 | >10 | >10 | >10 | >10 |
| E184-105_F3 | I | >10 | >10 | >10 | >10 | >10 | >10 |
| A18-452.1 | IV | 0.071 | 0.308 | 0.042 | >50 | 0.064 | 0.457 |
| SARS2.A63-652-1.4 | I/IV | >50 | >50 | >50 | >50 | >50 | >50 |

TABLE E3B
pseudotyped neutralization potency (IC50 and IC80) for the tested anti-SARS-CoV-2
monoclonal antibodies (IC50 and IC80 are expressed in nM; n.t. = not tested).

| | | BA.2.86 | | EG.5.1 | | XBB.1.16.6 | | FL.1.5.1 | | HV.1 | |
|---|---|---|---|---|---|---|---|---|---|---|---|
| | | IC50 | IC80 | IC50 | IC80 | IC50 | IC80 | IC50 | IC80 | IC50 | IC80 |
| mAbs | F729-E12 | 0.0816 | 0.3672 | 1.3623 | 2.7333 | 2.3194 | 6.5314 | 1.2147 | 2.3973 | 1.7517 | 5.0378 |
| | F770-G11 | >66.7 | >66.7 | 0.5393 | 1.6607 | 0.9549 | 2.4525 | 0.4259 | 1.7817 | 0.4669 | 1.9743 |
| | F770-E8 | >66.7 | >66.7 | 0.6078 | 2.2409 | 0.5781 | 5.657 | 0.7095 | 3.4474 | 0.5431 | 2.1784 |
| | F768-104_B2 | 0.5931 | 1.4237 | 0.5074 | 1.4069 | 0.9102 | 2.4031 | 0.7179 | 1.9477 | 0.7734 | 1.8961 |
| | A18-448.1 | 0.0355 | 0.1007 | 0.0215 | 0.0527 | 0.0232 | 0.0694 | 0.0196 | 0.0587 | 0.0199 | 0.0657 |

| | | HK.3 | | JN.1 | | JD.1.1 | | SARS | |
|---|---|---|---|---|---|---|---|---|---|
| | | IC50 | IC80 | IC50 | IC80 | IC50 | IC80 | IC50 | IC80 |
| mAbs | F729-E12 | 3.1117 | 7.5053 | 2.0514 | 5.5979 | 30.67 | >66.7 | >66.7 | >66.7 |
| | F770-G11 | 1.1365 | 2.1096 | >66.7 | >66.7 | 0.5067 | 1.7131 | >66.7 | >66.7 |
| | F770-E8 | 1.3306 | 9.8044 | n.t. | n.t. | n.t. | n.t. | >66.7 | >66.7 |
| | F768-104_B2 | 1.2756 | 2.4173 | 0.4655 | 0.8315 | 0.5041 | 1.1714 | 0.8382 | 2.2718 |
| | A18-448.1 | 0.0194 | 0.0724 | 0.0367 | 0.128 | 0.0194 | 0.0779 | 0.0328 | 0.11 |

### Example 2

### Design of Antigen Binding Polypeptides and Antigen Binding Polypeptide Complexes

[8292] The antigen binding polypeptides described herein were designed to comprise different combinations of heavy chain variable regions (VH) and light chain variable regions (VL) derived from the nine different anti-SARS-CoV-2 neutralizing antibodies selected as described in Example 1. The nine anti-SARS-CoV-2 neutralizing antibodies (B8, E12, E8, A23-58, B1, G11, B2, A18-448, and A19-46)) used herein, can be described as Class I, II, III, or IV anti-SARS-CoV-2 neutralizing antibodies, and target multiple spike protein receptor binding domain (RBD) sites (see, e.g., FIG. 3). Additionally, an anti-SARS-CoV-2 neutralizing antibody disclosed herein can also display properties of more than one Classes of anti-SARS-CoV-2 antibodies. For example, an antibody (e.g., A18-448) can bind to an epitope to which antibodies belonging to one of the four anti-SARS-CoV-2 antibody Classes bind and can compete for binding with one or more antibodies belonging to one or more different Classes of anti-SARS-CoV-2 antibodies. For example, A18-448 binds to an epitope located in a region of RBD to which Class IV anti-SARS-CoV-2 antibodies bind, but can compete for binding to RBD with anti-SARS-CoV-2 antibodies belonging to Class I and Class III. Thus, A18-448 can be described, for example, as a Class I/IV anti-SARS-CoV-2 antibody.

[8293] The antigen binding polypeptides described herein can comprise one VL and one VH, or can comprise more than one VLs and more than VHs.

[8294] The antigen binding polypeptides described herein were designed to be assembled in antigen binding polypeptide complexes, wherein each antigen binding polypeptide complex comprises two antigen binding polypeptides. The two antigen binding polypeptides comprised in each antigen binding polypeptide complex can be the same or can be different. The antigen binding polypeptide complexes described herein were designed to comprise (a) VLs and VHs derived from one of the six anti-SARS-CoV-2 neutralizing antibodies (i.e., are mono-specific). (b) VLs and VHs derived from two of the six anti-SARS-CoV-2 neutralizing antibodies (i.e., are bi-specific). (c) VLs and VHs derived from three of the six anti-SARS-CoV-2 neutralizing antibodies (i.e., are tri-specific), or (d) VLs and VHs derived from four of the six anti-SARS-CoV-2 neutralizing antibodies (i.e., are tetra-specific).

[8295] Schematics of the linear structure of the antigen binding polypeptides and of the antigen binding polypeptide complexes described herein are shown in FIGS. 1A-1UU. Schematics of the tridimensional structure of the antigen binding polypeptides and of the antigen binding polypeptide complexes described herein are shown in FIGS. 2A-2N.

[8296] Various combinations including each antibody VH and VL orientation and copy number were designed, produced, and tested for neutralizing breadth/potency and good manufacturability. In addition, the antigen binding polypeptides described herein (and therefore the antigen binding polypeptide complexes described herein) were designed to comprise an Fc (CH2-CH3) region, and one or more of the following modifications (e.g., half-life extension amino acid substitutions, knob-into-hole modifications, and N-glycosylation site modifications) were engineered into selected antigen binding polypeptides described herein (and therefore into selected antigen binding polypeptide complexes described herein):
[8297] (i) “knob” (S354C/T366W);
[8298] (ii) “hole” (Y349C/T366S/L368A/Y407V);
[8299] (iii) “LA” (L234A/L235A);
[8300] (iv) “LS” (M428L/N434S);
[8301] (v) “TM” (L234F, L235E, and P331S);
[8302] (vi) “YTE” (M252Y, S254T, and T256E); and
[8303] (vii) “N62S” or “N62Q”;
[8304] based on EU numbering scheme.

[8305] The antigen binding polypeptides described herein (and therefore the antigen binding polypeptide complexes described herein) comprise, for example, an Fc region comprising a CH2 and a CH3. In some aspects, the CH2 comprises an amino acid sequence that is at least 65%, at least 70%, at least 75%, at least 80%, at least 85%, at least 90%, at least 95%, at least 99%, or 100% identical to any one of SEQ ID NOs: 1075-1078. In some aspects, the CH3 comprises an amino acid sequence that is at least 65%, at least 70%, at least 75%, at least 80%, at least 85%, at least 90%, at least 95%, at least 99%, or 100% identical to any one of SEQ ID NOs: 1079-1085.

[8306] The antigen binding polypeptides described herein (and therefore the antigen binding polypeptide complexes described herein) comprise, for example, an Fc region comprising a sequence of SEQ ID NOs: 376-380.

[8307] Additionally, the antigen binding polypeptides described herein (and therefore the antigen binding polypeptide complexes described herein) were engineered to comprise an immunoglobulin light chain constant region (CL) and/or an immunoglobulin heavy chain constant region 1 (CH1).

[8308] The antigen binding polypeptides described herein (and therefore the antigen binding polypeptide complexes described herein) comprise, for example, a CL comprising a sequence of SEQ ID NO: 374, 637, or 1092-1095, and/or a CH1 comprising a sequence of SEQ ID NO: 375, 634, 1070, 1071, or 1086-1091. The antigen binding polypeptides described herein (and therefore the antigen binding polypeptide complexes described herein) can further comprise, one or more hinge regions of SEQ ID NO: 635, 636, 1072, 1073, or 1074, wherein a hinge region is interposed, for example, between a CH1 and a CH2 (i.e., a hinge region is localized between the carboxy terminal residue of a CH1 and the N-terminal residue of a CH2).

[8309] The different portions of the antigen binding polypeptides described herein were linked with one or more linkers.

[8310] The antigen binding polypeptides described herein (and therefore the antigen binding polypeptide complexes described herein) comprise, for example, one or more linker selected from SEQ ID NOs: 333-345 or 967-971.

### Example 3

### Synthesis, Cloning and Expression of Antigen Binding Polypeptides and Antigen Binding Polypeptide Complexes

[8311] After design of the amino acid sequences for each antigen binding polypeptide, the nucleotide sequences encoding each antigen binding polypeptide were synthesized using human preferred codons (GenScript) and cloned into eukaryotic expression vectors. For expressing each antigen binding polypeptide, the eukaryotic expression vectors were transfected into Expi293 cells (Life Technology) using Expi293 transfection reagent (Life Technology) as previously reported (DOI: 10.1126/science.aan8630). The transfected cells were cultured in a shaker incubator at 120 rpm. 37° C. 9% CO2 for 4˜5 days. For the expression of antigen binding polypeptide complexes comprising two same antigen binding polypeptides the single eukaryotic expression vector was transfected into Expi293 cells. For the expression of antigen binding polypeptide complexes comprising two different antigen binding polypeptides, equal amounts of the two eukaryotic expression vectors were transfected into Expi293 cells.

[8312] Culture supernatants were harvested and filtered, the antigen binding polypeptide complexes were purified over a Protein A (GE Health Science) column. Each antigen binding polypeptide complex was eluted with IgG elution buffer (Pierce), immediately buffer exchanged with phosphate buffered saline (PBS) and concentrated using Centricon Plus-70 (Millipore Sigma) membrane filter unit. After concentration, each antigen binding polypeptide complex was applied to a Superdex 200 16/600 size exclusion column (Cytiva) to remove aggregates and different species in the preparation. The fractions were then analyzed on reduced and non-reduced SDS-PAGE to identify the fractions that contained the antigen binding polypeptide complexes. The pooled fractions were then further concentrated, aliquoted and analyzed by SDS-PAGE as well as an analytical SEC column (Superdex 200 16/600) to verify purity by using standard procedures.

### Example 4

### Pseudovirus Neutralization Assay of Antigen Binding Polypeptide Complexes

[8313] The pseudotyped neutralization potency (IC50 and IC80) of several anti-SARS-CoV-2 antigen binding polypeptide complexes was determined, and compared to the pseudotyped neutralization potency (IC50 and IC80) of several monoclonal anti-SARS-CoV-2 antibodies or combinations thereof. Specifically. S-containing lentiviral pseudovirions were produced by co-transfection of packaging plasmid pCMVdR8.2, transducing plasmid pHR′ CMV-Luc, a TMPRSS2 plasmid and S plasmids from SARS-CoV-2 variants into 293T cells using Lipofectamine 3000 transfection reagent (L3000-001, ThermoFisher Scientific, Asheville, NC), 293T-ACE2 cells (provided by Dr. Michael Farzan) were plated into 96-well white/black Isoplates (PerkinElmer, Waltham, MA) at 7.500 cells per well the day before infection of SARS-CoV-2 pseudovirus. Serial dilutions of the anti-SARS-CoV-2 antigen binding polypeptide complexes and of the anti-SARS-CoV-2 monoclonal antibodies were mixed with titrated pseudoviruses, incubated for 45 minutes at 37° C., and added to cells in triplicate. Following 2 h of incubation, wells were replenished with 150 μl of fresh media. Cells were lysed 72 h later, and luciferase activity was measured with Microbeta (Perking Elmer). Percent neutralization and neutralization IC50 and IC80 values are shown in Tables E4 and E5. Schematics of the structures of exemplary anti-SARS-CoV-2 antigen-binding polypeptide complexes tested in this experiment are shown in FIG. 4 and FIGS. 2M-2N.

TABLE E4
pseudotyped neutralization potency (IC50 and IC80) for the tested anti-SARS-CoV-2 Antigen
Binding Polypeptide Complexes (IC50 and IC80 are expressed in nM; n.t.: not tested).

| | Omicron Sublineages | | | | | | |
|---|---|---|---|---|---|---|---|
| | Class | BA.4/5 | | BQ 1 | | BQ 1.1 | |
| MX1042 | I + III | <0.01 | 0.02 | 0.07 | 0.16 | <0.01 | 0.02 |
| MX1043 | I + II | 0.02 | 0.06 | 0.02 | 0.09 | 0.01 | 0.07 |
| MX1069 | I + II + III | <0.01 | 0.01 | <0.01 | 0.02 | 0.01 | 0.04 |
| MX1055 | I + II + III | 0.01 | 0.02 | 0.09 | 0.35 | <0.01 | 0.02 |
| MX1089 | I + II + III | 0.01 | 0.02 | 0.02 | 0.04 | 0.01 | 0.05 |
| MX1206 | I + II + III | 0.08 | 0.15 | 0.13 | 0.27 | 0.07 | 0.19 |
| MX1091 (E12 mAb) | I | 0.03 | 0.06 | 0.08 | 0.27 | 0.04 | 0.12 |
| MX1090 (B8 mAb) | I | 0.05 | 0.10 | 0.10 | 0.33 | 0.03 | 0.14 |
| MX825 | I | 0.03 | 0.09 | 0.16 | 0.58 | 0.20 | 8.78 |
| (A23-58H/L93VGLTG mAb) | | | | | | | |
| MX173 (A19-46 mAb) | II | >67 | >67 | n.t. | n.t. | 2.57 | 7.41 |
| MX1092 (E8 mAb) | III | <0.01 | <0.01 | 0.83 | 34.62 | 3.31 | 12.03 |
| LY1404 | III | 0.01 | 0.02 | n.t. | n.t. | >67 | >67 |
| A46 + E12 | I + II | 0.01 | 0.03 | 0.02 | 0.04 | 0.01 | 0.03 |
| E8 + E12 | I + III | <0.01 | <0.01 | <0.01 | 0.02 | 0.01 | 0.03 |
| A46 + E12 + B8 | I + II | n.t. | n.t. | n.t. | n.t. | n.t. | n.t. |
| A46 + E12 + B8 + E8 | I + II + III | <0.01 | 0.04 | 0.01 | 0.10 | <0.01 | 0.13 |
| A46 + E8 + B8 | I + II + III | n.t. | n.t. | 0.11 | 0.35 | 0.07 | 0.11 |
| A46 + E12 + E8 | I + II + III | n.t. | n.t. | n.t. | n.t. | n.t. | n.t. |
| A46 + E12 + B8 + A58VGLTG | I + II + III | n.t. | n.t. | n.t. | n.t. | n.t. | n.t. |
| A46 + E12 + E8 + A58VGLTG | I + II + III | n.t. | n.t. | n.t. | n.t. | n.t. | n.t |
| A46 + B8 + E8 + A58VGLTG | I + II + III | n.t. | n.t. | n.t. | n.t. | n.t. | n.t |
| | Omicron Sublineages | | | | | | |
| | Class | BA.2.75.2 | | XBB | | XBB1.5 | |
| MX1042 | I + III | <0.01 | <0.01 | 0.04 | 0.10 | 0.24 | 0.47 |
| MX1043 | I + II | 0.01 | 0.02 | 0.01 | 0.04 | 0.40 | 0.90 |
| MX1069 | I + II + III | 0.01 | 0.02 | 0.01 | 0.03 | 0.20 | 0.38 |
| MX1055 | I + II + III | 0.01 | 0.04 | 0.05 | 0.19 | 0.14 | 0.39 |
| MX1089 | I + II + III | 0.04 | 0.05 | 0.06 | 0.17 | 0.30 | 0.86 |
| MX1206 | I + II + III | 0.03 | 0.06 | 0.34 | 0.53 | 0.38 | 0.45 |
| MX1091 (E12 mAb) | I | 0.05 | 0.27 | 0.08 | 0.21 | 0.41 | 1.22 |
| MX1090 (B8 mAb) | I | 0.08 | 0.18 | 0.09 | 0.31 | 0.29 | 0.95 |
| MX825 | I | >67 | >67 | >67 | >67 | >67 | >67 |
| (A23-58H/L93VGLTG mAb) | | | | | | | |
| MX173 (A19-46 mAb) | II | >67 | >67 | n.t. | n.t. | >67 | >67 |
| MX1092 (E8 mAb) | III | 0.01 | 0.04 | 0.41 | 4.70 | 1.90 | 2.13 |
| LY1404 | III | 0.04 | 0.14 | >67 | >67 | >67 | >67 |
| A46 + E12 | I + II | 0.02 | 0.03 | 0.02 | 0.06 | 0.39 | 0.85 |
| E8 + E12 | I + III | <0.01 | <0.01 | 0.02 | 0.05 | 0.12 | 0.58 |
| A46 + E12 + B8 | I + II | n.t. | n.t. | n.t. | n.t. | 0.08 | 0.22 |
| A46 + E12 + B8 + E8 | I + II + III | <0.01 | <0.01 | 0.04 | 0.11 | n.t. | n.t. |
| A46 + E8 + B8 | I + II + III | n.t. | n.t. | 0.08 | 0.12 | n.t. | n.t. |
| A46 + E12 + E8 | I + II + III | n.t. | n.t. | n.t. | n.t. | 0.25 | 0.64 |
| A46 + E12 + B8 + A58VGLTG | I + II + III | n.t. | n.t. | n.t. | n.t. | 0.10 | 0.20 |
| A46 + E12 + E8 + A58VGLTG | I + II + III | n.t. | n.t. | n.t. | n.t. | 0.14 | 0.33 |
| A46 + B8 + E8 + A58VGLTG | I + II + III | n.t. | n.t. | n.t. | n.t. | n.t. | n.t. |

| | | Omicron Sublineages | | | |
|---|---|---|---|---|---|
| | Class | BF.7 | | CH.1.1 | |
| MX1042 | I + III | 0.11 | 0.18 | 0.27 | 0.93 |
| MX1043 | I + II | 0.33 | 0.77 | 0.26 | 1.36 |
| MX1069 | I + II + III | 0.07 | 0.17 | 0.16 | 0.61 |
| MX1055 | I + II + III | 0.09 | 0.16 | 0.74 | 5.07 |
| MX1089 | I + II + III | 0.13 | 0.37 | 1.03 | 3.60 |
| MX1206 | I + II + III | 0.12 | 0.21 | 1.28 | 3.67 |
| MX1091 (E12 mAb) | I | 0.19 | 0.59 | 0.28 | 1.04 |
| MX1090 (B8 mAb) | I | 0.13 | 0.42 | 0.27 | 0.66 |
| MX825 | I | 0.65 | 3.17 | >67 | >67 |
| (A23-58H/L93VGLTG mAb) | | | | | |
| MX173 (A19-46 mAb) | II | 35.32 | >67 | >67 | >67 |
| MX1092 (E8 mAb) | III | 0.10 | 0.21 | 33.02 | 35.92 |
| LY1404 | III | 0.02 | 0.18 | >67 | >67 |
| A46 + E12 | I + II | 0.26 | 0.45 | 0.57 | 1.38 |
| E8 + E12 | I + III | 0.08 | 0.32 | 0.74 | 1.65 |
| A46 + E12 + B8 | I + II | 0.09 | 0.23 | n.t. | n.t. |
| A46 + E12 + B8 + E8 | I + II + III | n.t. | n.t. | n.t. | n.t. |
| A46 + E8 + B8 | I + II + III | n.t. | n.t. | n.t. | n.t. |
| A46 + E12 + E8 | I + II + III | 0.08 | 0.20 | 0.47 | 0.91 |
| A46 + E12 + B8 + A58VGLTG | I + II + III | 0.12 | 0.13 | n.t. | n.t. |
| A46 + E12 + E8 + A58VGLTG | I + II + III | 0.02 | 0.10 | n.t. | n.t. |
| A46 + B8 + E8 + A58VGLTG | I + II + III | n.t. | n.t. | 0.11 | 0.52 |

TABLE E5
pseudotyped neutralization potency (IC50 and IC80) for the tested anti-SARS-CoV-2 Antigen
Binding Polypeptide Complexes (IC50 and IC80 are expressed in nM; n.t.: not tested).

| MSTAR | | | | WA.1 | | BA.2 | | BA.4/5 | |
|---|---|---|---|---|---|---|---|---|---|
| version | Class 3 | Class 2 | ID | IC50 | IC80 | IC50 | IC80 | IC50 | IC80 |
| V1 | E8 NQ | A19-46 | MX1548 | 0.091 | 0.142 | 0.020 | 0.058 | 0.050 | 0.162 |
| | E8 NQ | G11 WT | MX1846 | 0.207 | 0.685 | 0.023 | 0.081 | 0.034 | 0.102 |
| | E8 NQ | G11 NQ | MX1847 | 0.083 | 0.264 | 0.021 | 0.066 | 0.047 | 0.110 |
| | E8 WT | G11 WT | MX1866 | 0.040 | 0.227 | 0.022 | 0.106 | 0.015 | 0.065 |
| | E8 WT | G11 NQ | MX1867 | 0.079 | 0.221 | 0.038 | 0.096 | 0.015 | 0.058 |
| V2 | E8 WT | A19-46 | MX1468 | 0.031 | 0.168 | 0.031 | 0.098 | 0.059 | 0.164 |
| | E8 WT | G11 WT | MX1868 | 0.038 | 0.255 | 0.022 | 0.092 | 0.076 | 0.186 |
| | E8 WT | G11 NQ | MX1869 | 0.059 | 0.198 | 0.028 | 0.082 | 0.052 | 0.133 |
| | E8 NQ | G11 WT | MX1849 | 0.088 | 0.685 | 0.023 | 0.080 | 0.051 | 0.170 |
| | E8 NQ | G11 NQ | MX1850 | 0.112 | 0.170 | 0.020 | 0.048 | 0.030 | 0.080 |
| MSTAR | | | | BQ.1.1 | | XBB.1.5 | | EG.5 | |
| version | Class 3 | Class 2 | ID | IC50 | IC80 | IC50 | IC80 | IC50 | IC80 |
| V1 | E8 NQ | A19-46 | MX1548 | 0.011 | 0.091 | 0.10 | 0.30 | 0.33 | 1.20 |
| | E8 NQ | G11 WT | MX1846 | 0.037 | 0.093 | 0.10 | 0.22 | 0.07 | 0.24 |
| | E8 NQ | G11 NQ | MX1847 | 0.038 | 0.115 | 0.12 | 0.26 | 0.13 | 0.34 |
| | E8 WT | G11 WT | MX1866 | 0.016 | 0.070 | n.t. | n.t. | 0.34 | 0.52 |
| | E8 WT | G11 NQ | MX1867 | 0.011 | 0.049 | n.t. | n.t. | 0.19 | 0.27 |
| V2 | E8 WT | A19-46 | MX1468 | 0.025 | 0.099 | n.t. | n.t. | 0.02 | 0.04 |
| | E8 WT | G11 WT | MX1868 | 0.019 | 0.076 | n.t. | n.t. | 0.16 | 0.18 |
| | E8 WT | G11 NQ | MX1869 | 0.025 | 0.106 | n.t. | n.t. | 0.10 | 0.20 |
| | E8 NQ | G11 WT | MX1849 | 0.039 | 0.131 | 0.11 | 0.21 | 0.04 | 0.18 |
| | E8 NQ | G11 NQ | MX1850 | 0.021 | 0.116 | 0.09 | 0.14 | 0.03 | 0.14 |

| MSTAR | | | | XBB.2.3.2 (VRC) | | BA.2.86 (VRC) | |
|---|---|---|---|---|---|---|---|
| version | Class 3 | Class 2 | ID | IC50 | IC80 | IC50 | IC80 |
| V1 | E8 NQ | A19-46 | MX1548 | 0.051 | 0.200 | 0.100 | 0.370 |
| | E8 NQ | G11 WT | MX1846 | 0.016 | 0.072 | 0.086 | 0.320 |
| | E8 NQ | G11 NQ | MX1847 | 0.021 | 0.070 | 0.130 | 0.390 |
| | E8 WT | G11 WT | MX1866 | n.t. | n.t. | n.t. | n.t. |
| | E8 WT | G11 NQ | MX1867 | n.t. | n.t. | n.t. | n.t. |
| V2 | E8 WT | A19-46 | MX1468 | 0.014 | 0.045 | 0.037 | 0.140 |
| | E8 WT | G11 WT | MX1868 | n.t. | n.t. | n.t. | n.t. |
| | E8 WT | G11 NQ | MX1869 | n.t. | n.t. | n.t. | n.t. |
| | E8 NQ | G11 WT | MX1849 | 0.160 | 0.460 | 0.690 | 1.800 |
| | E8 NQ | G11 NQ | MX1850 | 0.037 | 0.160 | 0.410 | 1.300 |

### Example 5

### Pharmacokinetics (PK) of Antigen Binding Polypeptide Complexes in Humanized FcRn Mice

[8314] Human FcRn transgenic mice (C57BL/6, B6.mFcRn^{-/-} hFcRn Tg32 line from The Jackson Laboratory) were used to assess the pharmacokinetics of the antigen binding polypeptide complexes showing good pseudotyped neutralization potency (IC50 and IC80). Each animal was infused intravenously with 5 mg antibody/kg of body weight. Whole blood samples were collected at day 1, 2, 5, 7, 9, 14, 21, 28, 35, 42, 49, and 56. Serum was separated by centrifugation. Serum antibody levels were measured by ELISA. All mice were bred and maintained under pathogen-free conditions at an American Association for Assessment and Accreditation of Laboratory Animal Care International-accredited animal facility at the National Institute of Allergy and Infectious Diseases and housed in accordance with the procedures outlined in the Guide for the Care and Use of Laboratory Animals. All mice were between 6 and 13 weeks of age.

[8315] The PK was determined for each of the tested antigen binding polypeptide complexes and monoclonal antibodies, and plotted as shown in FIG. 5. The assay showed that MX1042 and MX1089 did not reach the same peak level as the other tested antigen binding polypeptide complexes and had faster clearance.

### Example 6

Passive Transfer into Syrian Hamsters Assay Using Antigen Binding Polypeptide Complexes in Humanized FcRn Mice

[8316] Well performing antigen binding polypeptide complexes as determined by the experiments described in the preceding examples, were tested in Syrian Hamsters as schematized in FIG. 6. Briefly, passive transferred (day-1) Syrian Hamsters were challenged with SARS-CoV-2 virus and euthanized at different time points (2, 4, 6, and 10 days). The animals were treated with 10 mg/kg of MX1069 (trispecific) or with 10 mg/kg of MX1089 (tetraspecific). Control animals were treated with PBS or with 10 mg/kg of E12 and E8 anti-SARS-CoV-2 monoclonal antibodies. Schematics of the structures of MX1069 and MX1089 is shown in FIG. 7.

[8317] The body weight change was measured for treated and control animals, and showed that both MX1069 and MX1089 protected against weight loss (FIG. 8).

[8318] The Median Tissue Culture Infectious Dose (TCID50) was also tested in lungs and nares, MX1069 showed reduced lung viral titers (FIG. 9A-9B).

[8319] MX1042 and MX1043 (bispecific, schematics of the structures shown in FIG. 10) were also analogously tested in Syrian Hamsters. The experimental design is schematized in FIG. 11. The animals were treated with 10 mg/kg of MX1042, with 10 mg/kg of MX1043, or with 10 mg/kg of MX1042+MX1043. Control animal were treated with PBS.

[8320] The body weight change was measured for treated and control animals, and showed that both MX1042 and MX1043 protected against weight loss (FIG. 12).

[8321] The Median Tissue Culture Infectious Dose (TCID50) was also tested in lungs and nares, MX1043 and the MX1042+MX1043 combination both reduced lung viral titers (FIG. 13A-13B).

### Example 7

### Determination of the Isoelectric Point (pI) of the Antigen Binding Polypeptide Complexes

[8322] The isoelectric point of MX1042, MX1043, MX1069, MX1089, MX1206, and MX1091 (E12 mAb) was determined. The samples were first diluted with water to a concentration of 1 mg/mL. The diluted samples were then mixed with a solution containing 1% methyl cellulose, two pharmalytes (pH 3-10 and pH 6-8), and two pI markers (5.85 and 9.99). The cIEF analysis was performed using a Maurice System equipped with a Maurice cIEF separation cartridge (ProteinSimple). The proteins were focused and separated by pre-focusing for 1 min at 1500 V, followed by focusing at 3000 V for 8 min. Native protein fluorescent signals were used for peak integration and apparent pI determination. Table E6 summarizes the pI, neutralization profile, binding profile, and additional chemical-physical properties of the well performing antigen binding polypeptide complexes.

TABLE E6
pI, neutralization profile, binding profile, and additional chemical-physical properties of the well
performing antigen-binding polypeptide complexes (Risk Level : Low ✓, Medium # , High X).

| | Candidate #1 | Candidate #2 | Candidate #3 | Candidate #4 | Candidate #5 | Candidate #6 |
|---|---|---|---|---|---|---|
| ID# | MX1042 | MX1043 | MX1069 | MX1089 | MX1206 | MX1091 |
| | (bispecific) | (bispecific) | (trispecific) | (tetraspecific) | (tetraspecific) | (E12 mAb) |
| Neutralization profile | BQ1, BQ.1.1 | BQ1, BQ.1.1 | BQ1, BQ.1.1 | BQ1, BQ.1.1 | BQ1, BQ.1.1 | BQ1, BQ.1.1 |
| | XBB, XBB.1.5, | XBB, XBB.1.5, | XBB, XBB.1.5, | XBB, XBB.1.5, | XBB, XBB.1.5, | XBB, XBB.1.5, |
| | CH.1.1 ✓ | CH.1.1 ✓ | CH.1.1 ✓ | CH.1.1 # | CH.1.1 # | CH.1.1 ✓ |
| Binding profile to | positive \|BLI\| | positive BLI | positive BLI | positive BLI | positive BLI | positive BLI |
| target antigens | [PM1 ]binding | binding to | binding to | binding to | binding to | binding to |
| | to COVID RBD | COVID RBD | COVID RBD | COVID RBD | COVID RBD | COVID RBD |
| In silico liability | ✓ | ✓ | ✓ | ✓ | ✓ | ✓ |
| analysis | | | | | | |
| STAR Expression, | ✓ | ✓ | ✓ | ✓ | ✓ | ✓ |
| yield, SEC | | | | | | |
| \|HIC\|_{[PM2]} | 2 main peaks | Low peak and | homogenous | homogenous | homogenous | homogenous |
| | | high retention | and relative | and relative | and relative | and relative |
| | | | short retention | short retention | short retention | short retention |
| | | | time | time | time | time |
| cIEF/PI | 6.92 | 6.99 | 6.73 | 8.36 | 7.8 | 7.92 |
| Solubility | | >100 mg/ml, | ✓ | >100 mg/ml | >100 mg/ml | >100 mg/ml |
| | | self-interaction | | | | |
| Freeze/thaw stability | Requires PS80 | Requires PS80 | ✓ | Requires PS80 | Requires PS80 | Requires PS80 |
| (5X) | ✓ | # | | ✓ | ✓ | ✓ |
| Thermostability | Tm <60° C. | <60° C. | <60° C. | <60° C. | <60° C. | ✓ |
| pH stability (pH3.5 | ✓ | ✓ | ✓ | ✓ | ✓ | ✓ |
| and pH 8) | | | | | | |
| pH 6, 40° C. stress | 7.6% HMW 3w | ✓ | 14% HMW 3w | ~23.2% HMW | 9.6% HMW 3w | ✓ |
| | | | | 3w | | |
| Serum stability | Stable in | Stable in | Stable in | Stable in | Stable in | Stable in |
| | serum-no | serum-no | serum-no | serum-no | serum-no | serum-no |
| | change to | change to | change to | change to | change to | change to |
| | aSEC or BLI | aSEC or BLI | aSEC or BLI | aSEC or BLI | aSEC or BLI | aSEC or BLI |
| | binding | binding | binding | binding | binding | binding |
| Platelet binding | No platelet | No platelet | No platelet | No platelet | No platelet | No platelet |
| | binding | binding | binding | binding | binding | binding |
| rVSV Viral escape | | | | | | |
| PK in humanized | X | ✓ | ✓ | X | # | ✓ |
| FcRn mice (VRC) | | | | | | |
| Hamster challenge | X | ✓ | ✓ | X | | |
| (VRC) | | | | | | |
| Just Evotec- | ✓ | ✓ | ✓ | ✓ | ✓ | ✓ |
| polyreactivity | | | | | | |
| Just Evotec-thermal | # | # | # | # | # | ✓ |
| hold | | | | | | |
| Just Evotec-chemical | # | # | # | # | # | ✓ |
| unfolding | | | | | | |
| Just Evotec-SINS | ✓ | X | ✓ | ✓ | ✓ | ✓ |
| Just Evotec-colloidal | ✓ | X | ✓ | ✓ | ✓ | ✓ |
| instability | | | | | | |
| Just Evotec-solubility | ✓ | # | ✓ | ✓ | ✓ | ✓ |

[8323] Additional candidates (MX1255, MX1275, MX1413, MX1368, MX1366, and MX1418) were similarly tested. The structures of the additional candidates are shown in FIGS. 14A-14B. Further, variants of MX1255, MX1275, MX1413, MX1368, MX1366, and MX1418 comprising a LA modification were also tested.

[8324] Tables E7 and E8 summarize the pI, neutralization profile, binding profile, and additional chemical-physical properties of the additional candidate antigen binding polypeptide complexes and of their LA variants.

TABLE E7
pI, neutralization profile, binding profile, and additional chemical-physical properties of the
additional candidate antigen-binding polypeptide complexes (Risk Level : Low ✓ , Medium #, High X).

| | Candidate #1 | Candidate #2 | Candidate #3 | Candidate #4 | Candidate #5 | Candidate #6 | Candidate #7 |
|---|---|---|---|---|---|---|---|
| ID# | MX1255 | MX1275 | MX1413 | MX1368 | MX1366 | MX1418 | MX1091 (E12 |
| | | | | | | | mAb) |
| Format | ScFv- | MSTAR- | MSTAR- | ScFv- | MSTAR- | MSTAR- | Regular Ig |
| | ScFab_LS | CL/CH1_v1_LS | CL/CH1_v2 | ScFab_LS | CL/CH1_v1_LS | CL/CH1_v2 | |
| Specificity | Bispecific | Bispecific | Bispecific | Trispecific | Trispecific | Trispecific | Monoclonal |
| Titer | 60 mg/L | 55 mg/L | 22.46 mg/L | 63 mg/L | 66 mg/L | 36.07 mg/L | ✓ |
| Neutralization | More potent | Comparable | More potent | Comparable | Comparable | More potent | ✓ |
| profile | than MX1042 | to MX1042 | than MX1042 | to MX1069 | to MX1069 | than MX1069 | |
| Binding to RBD | positive BLI | positive BLI | | | | | positive BLI |
| | binding to | binding to | | | | | binding to |
| | COVID RBD | COVID RBD | | | | | COVID RBD |
| aSEC | 99.5% | 98.3% | 99.02% | 98.7% | 99.5% | 97.65% | ✓ |
| HIC | 2 peaks | 2 peaks | | | | | |
| | homogenous | homogenous | | | | | |
| | and relative | and relative | | | | | |
| | short retention | short retention | | | | | |
| | time | time | | | | | |
| clEF/pl | 8.54 | 8.54 | | 8.49 | 8.48 | | 7.93 |
| Solubility (>100 | | 65 mg/ml | | | | | ✓ |
| mg/ml) | | | | | | | |
| Freeze/ | | | | | | | ✓ |
| thaw stability | | | | | | | |
| (5X) | | | | | | | |
| Thermostability | | | | | | | ✓ |
| pH stability | | | | | | | ✓ |
| (pH3.5 and pH | | | | | | | |
| 8) | | | | | | | |
| pH 6, 40° C. | | | | | | | ✓ |
| stress | | | | | | | |
| Serum stability | | | | | | | Stable in |
| | | | | | | | serum-no |
| | | | | | | | change to |
| | | | | | | | aSEC or BLI |
| | | | | | | | binding |
| Platelet binding | | | | | | | No platelet |
| | | | | | | | binding |
| rVSV Viral | | | | | | | |
| escape | | | | | | | |
| PK in | | | | | | | ✓ |
| humanized | | | | | | | |
| FcRn mice | | | | | | | |
| Hamster | | | | | | | |
| challenge (VRC) | | | | | | | |
| LS vs LA | LA available | LA available | LA available | LA available | LA available | LA available | |
| | as MX1452 | as MX1448/ | as MX1462 | as MX1454 | as MX1450/ | as MX1468 | |
| | | MX1451 | | | MX1453 | | |

TABLE E8
pI, neutralization profile, binding profile, and additional chemical-physical properties of the
additional candidate antigen binding polypeptide complexes (Risk Level: Low ✓ , Medium #, High X)

| | Candidate #1 | Candidate #2 | Candidate #3 | Candidate #4 | Candidate #5 | Candidate #6 | Candidate #7 |
|---|---|---|---|---|---|---|---|
| ID# | MX1452 | MX1448/ | MX1462 | MX1454 | MX1450/ | MX1468 | MX1091 (E12 |
| | | MX1451 | | | MX1453 | | mAb) |
| Format | ScFv- | MSTAR- | MSTAR- | ScFv- | MSTAR- | MSTAR- | Regular Ig |
| | ScFab_LA | CL/CH1_v1_LA | CL/CH1_v2_LA | ScFab_LA | CL/CH1_v1_LA | CL/CH1_v2_LA | |
| Specificity | Bispecific | Bispecific | Bispecific | Trispecific | Trispecific | Trispecific | Monoclonal |
| Titer | | 60 mg/L | | ✓ | 85 mg/L | | ✓ |
| Neutralization | | | | | | | ✓ |
| profile | | | | | | | |
| Binding to RBD | | | | | | | positive BLI |
| | | | | | | | binding to |
| | | | | | | | COVID RBD |
| aSEC | 99.85% | 99.9%/ | | 98.69% | 99.56% | | ✓ |
| | | 99.6% | | | | | |
| HIC | | | | | | | homogenous |
| | | | | | | | and relative |
| | | | | | | | short retention |
| | | | | | | | time |
| clEF/pl | | | | | | | 7.93 |
| Solubility (>100 | | | | | | | ✓ |
| mg/ml) | | | | | | | |
| Freeze/thaw | | | | | | | ✓ |
| stability (5X) | | | | | | | |
| Thermostability | | | | | | | ✓ |
| pH stability | | | | | | | ✓ |
| (pH3.5 and pH | | | | | | | |
| 8) | | | | | | | |
| pH 6, 40° C. | | | | | | | |
| stress | | | | | | | |
| Serum stability | | | | | | | Stable in |
| | | | | | | | serum-no |
| | | | | | | | change to |
| | | | | | | | aSEC or BLI |
| | | | | | | | binding |
| Platelet binding | | | | | | | No platelet |
| | | | | | | | binding |
| rVSV Viral | | | | | | | |
| escape | | | | | | | |
| PK in | | | | | | | ✓ |
| humanized | | | | | | | |
| FcRn mice | | | | | | | |

Hamster
challenge (VRC)

### Example 8

### Determination of the Isoelectric Point (pI) of the Antigen Binding Polypeptide Complexes

[8325] Residue 62 was shown to be glycosylated with mostly high mannose and to display the worst PK among all parental monoclonal antibodies. The position of the N62 residue in the VH of the E8 monoclonal antibody is shown in FIG. 15, FIG. 16 shows the PK of the indicated monoclonal antibodies. To improve their PK, the N62Q glycosylation mutation was incorporated into the antigen binding polypeptides described herein (and therefore into the antigen binding polypeptide complexes described herein). For example, the N62Q glycosylation mutation was incorporated into MX1448 to obtain MX1545, and into MX1450 to obtain MX1548. The antigen binding complexes comprising the N62Q glycosylation mutation were further tested as shown in Example 9.

### Example 9

### PK of Additional Candidate Antigen Binding Polypeptide Complexes in Humanized FcRn Mice

[8326] Human FcRn transgenic mice (C57BL/6, B6.mFcRn^{-/-} hFcRn Tg32 line from The Jackson Laboratory) were used to assess the pharmacokinetics of the antigen binding polypeptide complexes showing a good pseudotyped neutralization potency (IC50 and IC80). Each animal was infused intravenously with 5 mg antibody/kg of body weight. Whole blood samples were collected at day 1, 2, 5, 7, 9, 14, 21, 28, 35, 42, 49, and 56. Serum was separated by centrifugation. Serum antibody levels were measured by ELISA. All mice were bred and maintained under pathogen-free conditions at an American Association for Assessment and Accreditation of Laboratory Animal Care International-accredited animal facility at the National Institute of Allergy and Infectious Diseases and housed in accordance with the procedures outlined in the Guide for the Care and Use of Laboratory Animals. All mice were between 6 and 13 weeks of age.

[8327] The PK was determined for each candidate antigen binding polypeptide complex, including antigen binding polypeptide complexes comprising the N62Q glycosylation mutation, and antigen binding polypeptide complexes comprising the LA and LS Fc modifications. Briefly: MX1042; MX1275 corresponding to MX1042, but further comprising a CL/CH1 region and a LS modification; MX1448 corresponding to MX1275, but further comprising a LA modification; MX1545 corresponding to MX1448, but further comprising a N62Q glycosylation mutation; MX1069; MX1366 corresponding to MX1069, but further comprising a CL/CH1 region and a LS modification; MX1450 corresponding to MX1366, but further comprising a LA modification; and MX1548 corresponding to MX1450, but further comprising a N62Q glycosylation mutation were tested. Schematics of the structures of the tested candidates (and controls: MX1042 and MX1069) are shown in FIG. 17. The results shown that the antigen binding polypeptide complexes comprising the CL/CH1 regions had improved PK compared to the control not comprising the CL/CH1 regions (FIG. 18A-18B).

### Example 10

In vitro Production of mRNAs Encoding the Antigen Binding Polypeptide Complexes

[8328] The in vitro production of the mRNAs encoding the antigen binding polypeptide complexes was tested. First, a representing candidate (MX828) was selected for the in vitro production of the mRNAs encoding the antigen binding polypeptide complexes. Specifically, the MD1186 plasmid encoding MX828 was digested as shown in FIG. 19 for restriction enzyme mapping. Then, the MD1186 plasmid was linearized with NotI restriction enzyme (FIG. 20), and used for mRNA in vitro transcription with standard methods. The resulting in vitro transcribed mRNA was run on an agarose gel for synthesis control (FIGS. 21A-21B). The in vitro transcribed mRNA was then transfected into Expi293 cells for in vitro production of the antibody, which resulted in a yield of 0.88-0.62 mg antibody after protein A purification (FIG. 22). A schematic of the structure of the produced test antigen binding polypeptide complex (MX828) is shown in FIG. 23.

[8329] Next, selected additional candidates (MX1545, MX1450/MX1453, MX1548, MX1468, and MX1549) were also produced in vitro following the same procedure. The tested candidates comprise LA modifications and/or N62Q glycosylation modifications as indicated in the schematics of the structures of these candidates shown in FIG. 24. Among the candidates, MX1448/MX1451 and MX1450/MX1453 were selected for in vitro production. A gel electrophoresis of the in vitro synthesized mRNA is shown in FIG. 25, FIG. 26 shows a capillary gel electrophoresis by Fragment Analyzer of the produced mRNAs, and FIG. 27 shows a Western Blot analysis of the produced antigen binding polypeptide complexes, FIG. 28 shows the structures of the produced antigen binding polypeptide complexes.

### Example 11

### Optimization of Well-Performing Antigen Binding Polypeptide Complexes-1

[8330] Well-performing antigen binding polypeptide complexes were further modified for optimization as follows. In MX1548, the VL and the VH of A19-46 were substituted with the VL and the VH of G11 to obtain MX1846. Further, MX1846 was modified to remove a glycosylation site on G11 (N116Q modification) to obtain MX1847. The above modifications to MX1548 (to obtain MX1846 and MX1847) are shown in FIG. 29. Both MX1846 and MX1847 (i.e., the de-glycosylated version of MX1846) were tested. Size exclusion chromatography (SEC) using superdex 200 increase column, and 10 mM Histidine pH 6.0 and 150 mM NaCl as running buffer, was performed for both MX1846 and MX1847. Both MX1846 and MX1847 were expressed in ExpiCHO-S culture and expression titers were measured by Octet BLI using protein A biosensor. Size exclusion chromatography profiles for both MX1846 and MX1847 are shown in FIGS. 30A-30B, and the expression titers for MX1548, MX1846 and MX1847 are shown in Table E9.

TABLE E9
MX1548, MX1846 and MX1847 expression titers.

| Name | Titer (mg/L) |
|---|---|
| MX1548 | 76.1 |
| MX1846 | 75.3 |
| MX1847 | 53.7 |

[8331] Similarly, in MX1450, the VL and the VH of A19-46 were substituted with the VL and the VH of G11 to obtain MX1866. Further, MX1866 was modified to remove a glycosylation site on G11 to obtain MX1867. The above modifications to MX1450 (to obtain MX1866 and MX1867) are shown in FIG. 31. Both MX1866 and MX1867 (i.e., the de-glycosylated version of MX1866) were tested. Size exclusion chromatography (SEC) using superdex 200 increase column, and 10 mM Histidine pH 6.0 and 150 mM NaCl as running buffer, was performed for both MX1866 and MX1867. Both MX1866 and MX1867 were expressed in ExpiCHO-S culture and expression titers were measured by Octet BLI using protein A biosensor. Size exclusion chromatography profiles for both MX1866 and MX1867 are shown in FIGS. 32A-32B, and the expression titers for MX1548, MX1866 and MX1867 are shown in Table E10.

TABLE E10
MX1548, MX1866 and MX1867 expression titers.

| Name | Titer (mg/L) |
|---|---|
| MX1548 | 76.1 |
| MX1866 | 42.3 |
| MX1867 | 53.8 |

[8332] Further, in MX1549, the VL and the VH of A19-46 were substituted with the VL and the VH of G11 to obtain MX1849. Further, MX1849 was modified to remove a glycosylation site on G11 to obtain MX1850. The above modifications to MX1549 (to obtain MX1849 and MX1850) are shown in FIG. 33.

[8333] In addition, in MX1468, the VL and the VH of A19-46 were substituted with the VL and the VH of G11 to obtain MX1868. Further, MX1868 was modified to remove a glycosylation site on G11 to obtain MX1869. The above modifications to MX1468 (to obtain MX1868 and MX1869) are shown in FIG. 34. Both MX1868 and MX1869 (i.e., the de-glycosylated version of MX1868) were tested. Size exclusion chromatography (SEC) using superdex 200 increase column, and 10 mM Histidine pH 6.0 and 150 mM NaCl as running buffer, was performed for both MX1868 and MX1869. Both MX1868 and MX1869 were expressed in ExpiCHO-S culture and expression titers were measured by Octet BLI using protein A biosensor. Size exclusion chromatography profiles for both MX1868 and MX1869 are shown in FIGS. 35A-35B, and the expression titers for MX1549, MX1849, MX1850, MX1868, and MX1869 are shown in Table E11. * Of note, MX1869's titer was 12 mg/L, while MX1868's titer was 7.9 mg/L in another controlled experiment.

TABLE E11
MX1549, MX1850, MX1851, MX1868,
and MX1869 expression titers.

| Name | Titer (mg/L) |
|---|---|
| MX1549 | 85.3 |
| MX1849 | 106.7 |
| MX1850 | 112.1 |
| MX1868 | 76 |
| MX1869* | n/a |

[8334] The neutralizing activities of G11 swap molecules against SARS-CoV-2 variants described above was tested. Specifically, S-containing lentiviral pseudovirions were produced by co-transfection of packaging plasmid pCMVdR8.2, transducing plasmid pHR′ CMV-Luc, a TMPRSS2 plasmid and S plasmids from SARS-CoV-2 variants into 293T cells using Lipofectamine 3000 transfection reagent (L3000-001, ThermoFisher Scientific, Asheville, NC), 293T-ACE2 cells (provided by Dr. Michael Farzan) were plated into 96-well white/black Isoplates (PerkinElmer, Waltham, MA) at 7,500 cells per well the day before infection of SARS-CoV-2 pseudovirus. Serial dilutions of the anti-SARS-CoV-2 antigen binding polypeptide complexes and of the anti-SARS-CoV-2 monoclonal antibodies were mixed with titrated pseudoviruses, incubated for 45 minutes at 37° C., and added to cells in triplicate. Following 2 h of incubation, wells were replenished with 150 μl of fresh media. Cells were lysed 72 h later, and luciferase activity was measured with Microbeta (Perking Elmer). Percent neutralization and neutralization IC50 and IC80 values are shown in Table E12.

TABLE E12
pseudotyped neutralization potency (IC50 and IC80) for the tested anti-SARS-CoV-2 antigen
binding polypeptide complexes (WT : Wild type. G11 NQ : G11 HC N116Q. E8 NQ : E8 HC N62Q G11
or E8 NQ mutation made to remove the glycosylation site on the corresponding binder-AZD3152 is
AstraZeneca's investigational long-acting COVID-19 antibody, used here as benchmark) (IC50 and IC80
are expressed in nM, N.T.: not tested).

| MSTAR | | | Anti- | WA.1 | | BA.2 | | BA.4/5 | | BQ.1.1 | | |
|---|---|---|---|---|---|---|---|---|---|---|---|---|
| version | Class 2 | Class 3 | body | IC50 | IC80 | IC50 | IC80 | IC50 | IC80 | IC50 | IC80 | |
| V1 | A19-46 | E8 NQ | MX1548 | 0.0908 | 0.1417 | 0.0196 | 0.0581 | 0.0496 | 0.1616 | 0.0106 | 0.0906 | |
| | G11 WT | E8 NQ | MX1846 | 0.2073 | 0.6850 | 0.0228 | 0.0808 | 0.0337 | 0.1021 | 0.0369 | 0.0925 | |
| | G11 NQ | E8 NQ | MX1847 | 0.0834 | 0.2638 | 0.0208 | 0.0662 | 0.0467 | 0.1095 | 0.0375 | 0.1151 | |
| | G11 WT | E8 WT | MX1866 | 0.0402 | 0.2272 | 0.0225 | 0.1055 | 0.0150 | 0.0653 | 0.0157 | 0.0703 | |
| | G11 NQ | E8 WT | MX1867 | 0.0791 | 0.2205 | 0.0385 | 0.0961 | 0.0153 | 0.0578 | 0.0113 | 0.0491 | |
| V2 | A19-46 | E8 WT | MX1468 | 0.0309 | 0.1676 | 0.0306 | 0.0983 | 0.0591 | 0.1640 | 0.0254 | 0.0988 | |
| | G11 WT | E8 WT | MX1868 | 0.0378 | 0.2548 | 0.0221 | 0.0918 | 0.0759 | 0.1863 | 0.0188 | 0.0758 | |
| | G11 NQ | E8 WT | MX1869 | 0.0595 | 0.1976 | 0.0281 | 0.0817 | 0.0523 | 0.1325 | 0.0254 | 0.1058 | |
| | G11 WT | E8 NQ | MX1849 | 0.0875 | 0.6850 | 0.0225 | 0.0798 | 0.0514 | 0.1701 | 0.0389 | 0.1314 | |
| | G11 NQ | E8 NQ | MX1850 | 0.1119 | 0.1699 | 0.0204 | 0.0479 | 0.0303 | 0.0796 | 0.0211 | 0.1161 | |
| MSTAR | | | Anti- | XBB.1.5 | | EG.5 | | XBB.2.3.2 | | BA.2.86 | | |
| version | Class 2 | Class 3 | body | IC50 | IC80 | IC50 | IC80 | IC50 | IC80 | IC50 | IC80 | |
| V1 | A19-46 | E8 NQ | MX1548 | 0.1028 | 0.2993 | 0.3285 | 1.2018 | 0.0510 | 0.2000 | 0.1000 | 0.3700 | |
| | G11 WT | E8 NQ | MX1846 | 0.0995 | 0.2208 | 0.0696 | 0.2371 | 0.0160 | 0.0720 | 0.0860 | 0.3200 | |
| | G11 NQ | E8 NQ | MX1847 | 0.1217 | 0.2593 | 0.1295 | 0.3380 | 0.0210 | 0.0700 | 0.1300 | 0.3900 | |
| | G11 WT | E8 WT | MX1866 | N.T. | N.T. | 0.3400 | 0.5208 | N.T. | N.T. | N.T. | N.T. | |
| | G11 NQ | E8 WT | MX1867 | N.T. | N.T. | 0.1855 | 0.2688 | N.T. | N.T. | N.T. | N.T. | |
| V2 | A19-46 | E8 WT | MX1468 | N.T. | N.T. | 0.0195 | 0.0445 | 0.0140 | 0.0450 | 0.0370 | 0.1400 | |
| | G11 WT | E8 WT | MX1868 | N.T. | N.T. | 0.1609 | 0.1799 | N.T. | N.T. | N.T. | N.T. | |
| | G11 NQ | E8 WT | MX1869 | N.T. | N.T. | 0.1032 | 0.2042 | N.T. | N.T. | N.T. | N.T. | |
| | G11 WT | E8 NQ | MX1849 | 0.1067 | 0.2137 | 0.0404 | 0.1761 | 0.1600 | 0.4600 | 0.6900 | 1.8000 | |
| | G11 NQ | E8 NQ | MX1850 | 0.0943 | 0.1373 | 0.0339 | 0.1367 | 0.0370 | 0.1600 | 0.4100 | 1.3000 | |
| Speci- | | | D614G | | B.1.351 | | B.1.617.2 | | | | | |
| ficity | Antibody | Class | IC50 | IC80 | IC50 | IC80 | IC50 | | | IC80 | | |
| Tri- | MX1548 | I + II + | 0.0100 | 0.0220 | 0.0070 | 0.0150 | 0.1130 | | | 0.1240 | | |
| specific | | III | | | | | | | | | | |
| Tri- | MX1450 | I + II + | 0.0190 | 0.0450 | 0.0270 | 0.0710 | 0.1280 | | | 0.2110 | | |
| specific | | III | | | | | | | | | | |
| Tri- | MX1846 | I + II + | 0.2073 | 0.6850 | N.T. | N.T. | N.T. | | | N.T. | | |
| specific | | III | | | | | | | | | | |
| Tri- | MX1847 | I + II + | 0.0834 | 0.2638 | N.T. | N.T. | N.T. | | | N.T. | | |
| specific | | III | | | | | | | | | | |
| Mono- | E12 | I | 0.0020 | 0.0350 | 0.0180 | 0.0330 | 0.1130 | | | 0.2060 | | |
| clonal | | | | | | | | | | | | |
| Mono- | E8 | III | 0.0060 | 0.0150 | 0.0100 | 0.0180 | 0.0110 | | | 0.0210 | | |
| clonal | | | | | | | | | | | | |
| Mono- | A19-46 | II | 0.0710 | 0.2500 | 0.2580 | 0.8060 | >66.7 | | | >66.7 | | |
| clonal | | | | | | | | | | | | |
| Mono- | G11 | II | 0.0141 | 0.0279 | N.T. | N.T. | N.T. | | | N.T. | | |
| clonal | | | | | | | | | | | | |
| Mono- | AZD3152 | I | 0.0160 | 0.0320 | 0.0230 | 0.0410 | 0.2810 | | | 0.5180 | | |
| clonal | | | | | | | | | | | | |
| Speci- | | | BA.1 | | BA.2 | | BA.4/5 | | BQ.1.1 | | | |
| ficity | Antibody | Class | IC50 | IC80 | IC50 | IC80 | IC50 | IC80 | IC50 | IC80 | | |
| Tri- | MX1548 | I + II + | 0.0210 | 0.0440 | N.T. | N.T. | 0.0310 | 0.0710 | 0.1370 | 0.4060 | | |
| specific | | III | | | | | | | | | | |
| Tri- | MX1450 | I + II + | 0.0190 | 0.0410 | N.T. | N.T. | 0.0540 | 0.1150 | 0.1510 | 0.4370 | | |
| specific | | III | | | | | | | | | | |
| Tri- | MX1846 | I + II + | N.T. | N.T. | 0.0228 | 0.0808 | 0.0337 | 0.1021 | 0.0369 | 0.0925 | | |
| specific | | III | | | | | | | | | | |
| Tri- | MX1847 | I + II + | N.T. | N.T. | 0.0208 | 0.0662 | 0.0467 | 0.1095 | 0.0375 | 0.1151 | | |
| specific | | III | | | | | | | | | | |
| Mono- | E12 | I | 0.0430 | 0.0970 | N.T. | N.T. | 0.0210 | 0.0570 | 0.0740 | 0.2540 | | |
| clonal | | | | | | | | | | | | |
| Mono- | E8 | III | 0.2340 | 0.5290 | N.T. | N.T. | 0.0090 | 0.0180 | 2.8700 | 12.0600 | | |
| clonal | | | | | | | | | | | | |
| Mono- | A19-46 | II | 0.3120 | 0.8630 | N.T. | N.T. | >66.7 | >66.7 | >66.7 | >66.7 | | |
| clonal | | | | | | | | | | | | |
| Mono- | G11 | II | 0.0301 | 0.1136 | N.T. | N.T. | 0.0140 | 0.0686 | 0.8742 | 2.4886 | | |
| clonal | | | | | | | | | | | | |
| Mono- | AZD3152 | I | 0.1230 | 0.3130 | N.T. | N.T. | 0.1020 | 0.2660 | 0.3920 | 0.9440 | | |
| clonal | | | | | | | | | | | | |
| Speci- | | | XBB.1 | | XBB.1.5 | | XBB.1.16 | | CH.1.1 | | XBC.1 | |
| ficity | Antibody | Class | IC50 | IC80 | IC50 | IC80 | IC50 | IC80 | IC50 | IC80 | IC50 | IC80 |
| Tri- | MX1548 | I + II + | 0.1070 | 0.2270 | 0.0720 | 0.1740 | 0.0850 | 0.2120 | 0.1940 | 0.8050 | 0.0100 | 0.0250 |
| specific | | III | | | | | | | | | | |
| Tri- | MX1450 | I + II + | 0.1040 | 0.3130 | 0.1190 | 0.2420 | 0.0840 | 0.3310 | 0.3550 | 0.9200 | 0.0030 | 0.0140 |
| specific | | III | | | | | | | | | | |
| Tri- | MX1846 | I + II + | N.T. | N.T. | 0.0995 | 0.2208 | N.T. | N.T. | N.T. | N.T. | N.T. | N.T. |
| specific | | III | | | | | | | | | | |
| Tri- | MX1847 | I + II + | N.T. | N.T. | 0.1217 | 0.2593 | N.T. | N.T. | N.T. | N.T. | N.T. | N.T. |
| specific | | III | | | | | | | | | | |
| Mono- | E12 | I | 0.0990 | 0.3040 | 0.1130 | 0.2350 | 0.0160 | 0.1700 | 0.0450 | 0.4420 | 0.0075 | 0.0895 |
| clonal | | | | | | | | | | | | |
| Mono- | A19-46 | II | >66.7 | >66.7 | >66.7 | >66.7 | >66.7 | >66.7 | N.T. | N.T. | 15.6200 | >66.7 |
| clonal | | | | | | | | | | | | |
| Mono- | G11 | II | 0.0584 | 0.1710 | 0.0860 | 0.3151 | 0.1027 | 0.3083 | N.T. | N.T. | 0.0168 | 0.0469 |
| clonal | E8 | III | 1.4900 | 19.5000 | 1.6900 | 13.1200 | 3.4100 | 17.3300 | N.T. | N.T. | 0.0108 | 0.0527 |
| Mono- | | | | | | | | | | | | |
| clonal | B2 | III | N.T. | N.T. | N.T. | N.T. | N.T. | N.T. | N.T. | N.T. | N.T. | N.T. |
| Mono- | | | | | | | | | | | | |
| clonal | A18- | I/IV | N.T. | N.T. | N.T. | N.T. | N.T. | N.T. | N.T. | N.T. | N.T. | N.T. |
| Mono- | 448.1 | | | | | | | | | | | |
| clonal | AZD3152 | I | 0.0960 | 0.3020 | 0.1200 | 0.3080 | 0.0920 | 0.3810 | 0.5010 | 1.4710 | 0.0322 | 0.2095 |
| Mono- | | | | | | | | | | | | |
| Speci- | | | XBB.2.3.2 | | EG.5.1 | | BA.2.86 | | XBB.1.16.6 | | FL.1.5.1 | |
| ficity | Antibody | Class | IC50 | IC80 | IC50 | IC80 | IC50 | IC80 | IC50 | IC80 | IC50 | IC80 |
| Tri- | MX1548 | I + II + | 0.1200 | 0.2130 | 0.1600 | 0.5700 | 0.1000 | 0.3700 | 0.2874 | 0.8466 | 0.6478 | 1.5586 |
| specific | | III | | | | | | | | | | |
| Tri- | MX1450 | I + II + | 0.1840 | 0.5030 | 0.1600 | 0.5200 | 0.1400 | 0.4000 | 1.1683 | 3.3616 | 0.6925 | 4.7157 |
| specific | | III | | | | | | | | | | |
| Tri- | MX1846 | I + II + | 0.0160 | 0.0720 | 0.0700 | 0.2400 | 0.0860 | 0.3200 | 0.0472 | 0.1361 | 0.0873 | 0.2480 |
| specific | | III | | | | | | | | | | |
| Tri- | MX1847 | I + II + | 0.0210 | 0.0700 | 0.1300 | 0.3400 | 0.1300 | 0.3900 | 0.0380 | 0.1681 | 0.0787 | 0.2470 |
| specific | | III | | | | | | | | | | |
| Mono- | E12 | I | 0.2380 | 0.7666 | 1.3580 | 2.8970 | 0.4200 | 0.7100 | 2.3580 | 7.0980 | 2.3190 | 6.5310 |
| clonal | | | | | | | | | | | | |
| Mono- | A19-46 | II | >66.7 | >66.7 | >66.7 | >66.7 | >66.7 | >66.7 | >66.7 | >66.7 | >66.7 | >66.7 |
| clonal | | | | | | | | | | | | |
| Mono- | G11 | II | 0.2129 | 0.5816 | 0.7351 | 1.9083 | >66.7 | >66.7 | 0.3917 | 0.7912 | 0.9549 | 2.4525 |
| clonal | | | | | | | | | | | | |
| Mono- | E8 | III | 0.3423 | >66.7 | 0.5598 | 7.0722 | >66.7 | >66.7 | 0.9680 | 10.2100 | 0.5781 | 5.6570 |
| clonal | | | | | | | | | | | | |
| Mono- | B2 | III | N.T. | N.T. | 0.4452 | 1.1031 | 0.3630 | 0.9549 | 0.7516 | 2.1506 | 0.9102 | 2.4031 |
| clonal | | | | | | | | | | | | |
| Mono- | A18- | I/IV | N.T. | N.T. | 0.0176 | 0.0670 | 0.0150 | 0.0715 | 0.0233 | 0.0652 | 0.0232 | 0.0694 |
| clonal | 448.1 | | | | | | | | | | | |
| Mono- | AZD3152 | I | 0.0806 | 0.4880 | >66.7 | >66.7 | 1.8000 | 5.4000 | >66.7 | >66.7 | >66.7 | >66.7 |
| clonal | | | | | | | | | | | | |

[8335] HPLC-analytical SEC profiles were obtained for MX1846, MX1847, MX1866, MX1867, and for MX1548 as control; and are shown in FIGS. 36A-36E. Further, HIC profiles were obtained for MX1846, MX1847, MX1866, MX1867, and for MX1548 as control; and are shown in FIGS. 37A-37E.

[8336] Table E13: shows comparative data for MX1846, MX1847, MX1866, MX1867, MX1868, and MX1849.

TABLE E13
Comparative data for MX1846, MX1847, MX1866, MX1867, MX1868, and MX1849.

| ID | MX1846 | MX1847 | MX1866 | MX1867 | MX1868 | MX1849 |
|---|---|---|---|---|---|---|
| Specificity | trispecific | trispecific | trispecific | trispecific | trispecific | trispecific |
| Format | MSTAR | MSTAR | MSTAR | MSTAR | MSTAR | MSTAR |
| | CL/CH1 v1 | CL/CH1 v1 | CL/CH1 v1 | CL/CH1 v1 | CL/CH1 | CL/CH1 |
| | | | | | v2 | v2 |
| Half-Life | LA | LA | LA | LA | LA | LA |
| Extension | | | | | | |
| Mutation (Fc) | | | | | | |
| E8 Heavy Chain | N62Q | N62Q | WT | WT | WT | N62Q |
| G11 Heavy Chain | WT | N116Q | WT | N116Q | WT | WT |
| Titer | 62 mg/L | 41 mg/L | 42 mg/L | 54 mg/L | 35 mg/L | 38 mg/L |
| Neutralization | highly | highly | highly | highly | highly | highly |
| Profile | potent (<1 | potent (<1 | potent (<1 | potent (<1 | potent (<1 | potent (<1 |
| | nM) | nM) | nM) | nM) | nM) | nM) |
| Binding to RBD | positive BLI | positive BLI | positive BLI | positive BLI | N.T | N.T |
| | binding to | binding to | binding to | binding to | | |
| | COVID | COVID | COVID | COVID | | |
| | RBD | RBD | RBD | RBD | | |
| Purity (aSEC) | 96.5% | 94.8% | 96.2% | 96.6% | 85.5% | 87.5% |
| Purity (aHIC) | homogenous | homogenous | homogenous | homogenous | N.T | N.T |
| | and relative | and relative | and relative | and relative | | |
| | short | short | short | short | | |
| | retention | retention | retention | retention | | |
| | time | time | time | time | | |
| Experimental pI | 8.642 | 8.633 | 8.643 | 8.633 | N.T | N.T |
| (cIEF) | | | | | | |
| Solubility | ~94 mg/ml | N.T | N.T | N.T | N.T | N.T |
| Freeze/Thaw | Minor | Minor | Minor | Minor | N.T | N.T |
| Stability (5 Cycles) | aggregation | aggregation | aggregation | aggregation | | |
| | after 5 | after 5 | after 5 | after 5 | | |
| | cycles, | cycles, | cycles, | cycles, | | |
| | improved | improved | improved | improved | | |
| | after adding | after adding | after adding | after adding | | |
| | PS80 | PS80 | PS80 | PS80 | | |
| Thermostability | 1 week | 1 week | 1 week | 1 week | N.T | N.T |
| | good, 2 | good, 2 | good, 2 | good, 2 | | |
| | weeks on | weeks on | weeks on | weeks on | | |
| | going | going | going | going | | |
| pH Stability (pH | good | good | good | good | N.T | N.T |
| 3.5 and pH 9.0) | | | | | | |
| Accelerated | Little to no | Little to no | Little to no | Little to no | N.T | N.T |
| Degradation (pH | degradation | degradation | degradation | degradation | | |
| 6.0, 40° C.) | seen in | seen in | seen in | seen in | | |
| | aSEC, CE- | aSEC, CE- | aSEC, CE- | aSEC, CE- | | |
| | SDS, or BLI | SDS, or BLI | SDS, or BLI | SDS, or BLI | | |
| | binding | binding | binding | binding | | |
| Serum Stability | Stable in | Stable in | Stable in | Stable in | N.T | N.T |
| | serum-no | serum-no | serum-no | serum-no | | |
| | change to | change to | change to | change to | | |
| | aSEC or | aSEC or | aSEC or | aSEC or | | |
| | BLI binding | BLI binding | BLI binding | BLI binding | | |
| Platelet Binding | No platelet | N.T | N.T | N.T | N.T | N.T |
| | binding | | | | | |

### Example 12

### Tetravalent Tetraspecific Pan-Sarbecovirus Antigen Binding Constructs

[8337] The tetravalent tetraspecific pan-sarbecovirus antibodies shown in FIG. 38 were produced. ExpiCHO cells were transfected using a standard protocol and were then harvested at day 5. The results of the production of the tetravalent tetraspecific pan-sarbecovirus antibodies shown in FIG. 38 are shown in Table E14.

TABLE E14
Production of tetravalent tetraspecific anti-SARS-CoV-2 antibodies.

| | | | | | | Yield | | Yield |
|---|---|---|---|---|---|---|---|---|
| | Molecular | | | | | after | Yield after | after |
| | Weight | Isoelectric | Extinction | | | protein A | concentration | SEC |
| ID | (kDa) | Point | Coefficient | Cells | Scale (L) | (mg/L) | (mg/L) | (mg/L) |
| MX1870 | 202 | 7.91 | 1.521 | ExpiCHO | 0.2 | 15.68 | 9.52 | 2.16 |
| MX1871 | 202 | 7.91 | 1.521 | ExpiCHO | 0.2 | 11.01 | 4.67 | 1.60 |
| MX1872 | 202 | 7.89 | 1.521 | ExpiCHO | 0.2 | 17.61 | 6.30 | 2.93 |
| MX1873 | 202 | 7.89 | 1.521 | ExpiCHO | 0.2 | 16.96 | 9.56 | 3.84 |
| MX1874 | 202 | 7.91 | 1.521 | ExpiCHO | 0.2 | 12.74 | 5.68 | 1.90 |
| MX1875 | 202 | 7.91 | 1.521 | ExpiCHO | 0.2 | 13.45 | 5.13 | 2.26 |
| MX1876 | 202 | 7.9 | 1.521 | ExpiCHO | 0.2 | 23.27 | 10.01 | 4.12 |
| MX1877 | 202 | 7.9 | 1.521 | ExpiCHO | 0.2 | 20.75 | 12.82 | 2.55 |
| MX1878 | 202 | 7.91 | 1.521 | ExpiCHO | 0.2 | 18.19 | 6.84 | 3.14 |
| MX1879 | 202 | 7.91 | 1.521 | ExpiCHO | 0.2 | 14.75 | 7.84 | 2.95 |
| MX1880 | 202 | 7.9 | 1.521 | ExpiCHO | 0.2 | 19.59 | 6.04 | 3.63 |
| MX1881 | 202 | 7.9 | 1.521 | ExpiCHO | 0.2 | 17.04 | 7.50 | 3.42 |

[8338] The SEC profiles of tetravalent tetraspecific anti-SARS-CoV-2 antibodies were obtained and are shown in FIGS. 39A-39L, SEC purification was performed with Superdex 200 Increase 10/300 GL (Cytiva). Fractions (shown in boxes in FIG. 39A-39L) were collected and pooled in 10 mM Histidine, pH 6.0/150 mM NaCl.

### Example 13

### Neutralizing Activity Against Recent SARS-CoV-2 Variants

[8339] The neutralizing activity against recent SARS-CoV-2 variants was tested for the constructs shown in FIG. 40. The results of the analysis are shown in Table E15.

TABLE E15
Neutralizing activity against recent SARS-CoV-2 variants. IC50 and IC80 are expressed in nM.

| | | | | BA.2.86 | | EG.5.1 | | XBB.1.16.6 | |
|---|---|---|---|---|---|---|---|---|---|
| Specificity | Antibody | Class | CL/CH1 | IC50 | IC80 | IC50 | IC80 | IC50 | IC80 |
| Tetraspecific | MX1870 | I & II & III & IV | v1 | 0.1251 | 0.3859 | 0.0380 | 0.0957 | 0.0358 | 0.0909 |
| | MX1871 | I & II & III & IV | v1 | 0.0905 | 0.2475 | 0.0264 | 0.0561 | 0.0347 | 0.0772 |
| | MX1872 | I & II & III & IV | v1 | 0.5077 | 1.2613 | 0.0938 | 0.1884 | 0.0560 | 0.2144 |
| | MX1873 | I & II & III & IV | v1 | 0.1313 | 0.6043 | 0.0302 | 0.0579 | 0.0179 | 0.0476 |
| | MX1874 | I & II & III & IV | v1 | 0.1115 | 0.3572 | 0.0432 | 0.0832 | 0.0260 | 0.0750 |
| | MX1875 | I & II & III & IV | v1 | 0.1274 | 0.3890 | 0.0243 | 0.0680 | 0.0282 | 0.0845 |
| | MX1876 | I & II & III & IV | v1 | 0.6422 | 1.4514 | 0.0309 | 0.0959 | 0.0497 | 0.1221 |
| | MX1877 | I & II & III & IV | v1 | 0.5473 | 1.4453 | 0.0332 | 0.1079 | 0.0484 | 0.1852 |
| | MX1878 | I & II & III & IV | v1 | 0.2196 | 0.9204 | 0.0286 | 0.0687 | 0.0431 | 0.1044 |
| | MX1879 | I & II & III & IV | v1 | 0.3869 | 0.7861 | 0.0280 | 0.0690 | 0.0451 | 0.1015 |
| | MX1880 | I & II & III & IV | v1 | 0.2034 | 0.5733 | 0.0135 | 0.0332 | 0.0087 | 0.0341 |
| | MX1881 | I & II & III & IV | v1 | 0.2279 | 0.6670 | 0.0208 | 0.0624 | 0.0179 | 0.0489 |
| Trispecific | MX1548 | I & II & III | v1 | 0.1000 | 0.2408 | 0.3508 | 0.9208 | 0.2874 | 0.8466 |
| | MX1846 | I & II & III | v1 | 0.1557 | 0.5331 | 0.0477 | 0.1497 | 0.0472 | 0.1361 |
| | MX1847 | I & II & III | v1 | 0.1742 | 0.4701 | 0.0491 | 0.1354 | 0.0380 | 0.1681 |
| | MX2005 | I & II & III | v1 | N.T. | N.T. | N.T. | N.T. | N.T. | N.T. |
| Monoclonal | E12 | I | N/A | 0.0816 | 0.3672 | 1.3623 | 2.7333 | 2.3194 | 6.5314 |
| | G11 | II | N/A | >67 | >67 | 0.5393 | 1.6607 | 0.9549 | 2.4525 |
| | E8 | III | N/A | >67 | >67 | 0.6078 | 2.2409 | 0.5781 | 5.6570 |
| | B2 | III | N/A | 0.5931 | 1.4237 | 0.5074 | 1.4069 | 0.9102 | 2.4031 |
| | A18-448 | I/IV | N/A | 0.0355 | 0.1007 | 0.0215 | 0.0527 | 0.0232 | 0.0694 |
| | | | | FL.1.5.1 | | HV.1 | | HK.3 | |
| Specificity | Antibody | Class | CL/CH1 | IC50 | IC80 | IC50 | IC80 | IC50 | IC80 |
| Tetraspecific | MX1870 | I & II & III & IV | v1 | 0.0895 | 0.1784 | 0.0174 | 0.0506 | 0.0404 | 0.1329 |
| | MX1871 | I & II & III & IV | v1 | 0.0340 | 0.1065 | 0.0208 | 0.0674 | 0.0296 | 0.0885 |
| | MX1872 | I & II & III & IV | v1 | 0.1300 | 0.3327 | 0.0287 | 0.1150 | 0.0448 | 0.2028 |
| | MX1873 | I & II & III & IV | v1 | 0.0442 | 0.1405 | 0.0158 | 0.0451 | 0.0214 | 0.0683 |
| | MX1874 | I & II & III & IV | v1 | 0.0261 | 0.0719 | 0.0089 | 0.0289 | 0.0120 | 0.0565 |
| | MX1875 | I & II & III & IV | v1 | 0.0852 | 0.1400 | 0.0256 | 0.1124 | 0.0338 | 0.1021 |
| | MX1876 | I & II & III & IV | v1 | 0.0840 | 0.1748 | 0.0297 | 0.0928 | 0.0238 | 0.0867 |
| | MX1877 | I & II & III & IV | v1 | 0.1412 | 0.2908 | 0.0272 | 0.0979 | 0.0293 | 0.0872 |
| | MX1878 | I & II & III & IV | v1 | 0.0485 | 0.1093 | 0.0115 | 0.0566 | 0.0202 | 0.0810 |
| | MX1879 | I & II & III & IV | v1 | 0.0781 | 0.1573 | 0.0029 | 0.0394 | 0.0107 | 0.0628 |
| | MX1880 | I & II & III & IV | v1 | 0.0466 | 0.0993 | 0.0160 | 0.0464 | 0.0202 | 0.0606 |
| | MX1881 | I & II & III & IV | v1 | 0.0832 | 0.1765 | 0.0203 | 0.0608 | 0.0322 | 0.1091 |
| Trispecific | MX1548 | I & II & III | v1 | 0.6478 | 1.5586 | 0.3041 | 0.8764 | 0.2699 | 1.0756 |
| | MX1846 | I & II & III | v1 | 0.0873 | 0.2480 | 0.0451 | 0.1835 | 0.0291 | 0.1756 |
| | MX1847 | I & II & III | v1 | 0.0787 | 0.2470 | 0.0435 | 0.2312 | 0.0175 | 0.2677 |
| | MX2005 | I & II & III | v1 | N.T. | N.T. | N.T. | N.T. | N.T. | N.T. |
| Monoclonal | E12 | I | N/A | 1.2147 | 2.3973 | 1.7517 | 5.0378 | 3.1117 | 7.5053 |
| | G11 | II | N/A | 0.4259 | 1.7817 | 0.4669 | 1.9743 | 1.1365 | 2.1096 |
| | E8 | III | N/A | 0.7095 | 3.4473 | 0.5431 | 2.1784 | 1.3306 | 9.8044 |
| | B2 | III | N/A | 0.7179 | 1.9477 | 0.7734 | 1.8961 | 1.2756 | 2.4173 |
| | A18-448 | I/IV | N/A | 0.0196 | 0.0587 | 0.0199 | 0.0657 | 0.0194 | 0.0724 |
| | | | | JN.1 | | JD.1.1 | | SARS-CoV-1 | |
| Specificity | Antibody | Class | CL/CH1 | IC50 | IC80 | IC50 | IC80 | IC50 | IC80 |
| Tetraspecific | MX1870 | I & II & III & IV | v1 | 0.7357 | 2.2640 | 0.0776 | 0.2437 | 16.4100 | 30.0470 |
| | MX1871 | I & II & III & IV | v1 | 0.5872 | 2.1644 | 0.0248 | 0.0835 | 3.5560 | 9.5620 |
| | MX1872 | I & II & III & IV | v1 | 2.8202 | 9.1697 | 0.0956 | 0.3757 | 13.3450\| | 54.5850 |
| | MX1873 | I & II & III & IV | v1 | 0.6117 | 2.8244 | 0.0394 | 0.1371 | 4.9790 | 13.8530 |
| | MX1874 | I & II & III & IV | v1 | 0.1991 | 2.6788 | 0.0272 | 0.0802 | 17.3610 | 59.8230 |
| | MX1875 | I & II & III & IV | v1 | 1.3718 | 3.1806 | 0.0728 | 0.1847 | 4.3500 | 10.8360 |
| | MX1876 | I & II & III & IV | v1 | 4.9894 | 12.7500 | 0.0592 | 0.1769 | 24.8330 | >67 |
| | MX1877 | I & II & III & IV | v1 | 2.7166 | 5.4960 | 0.1135 | 0.3333 | 3.9560 | 13.3460 |
| | MX1878 | I & II & III & IV | v1 | 1.2255 | 3.2095 | 0.0156 | 0.0700 | 7.6690 | 15.2140 |
| | MX1879 | I & II & III & IV | v1 | 1.3982 | 2.3307 | 0.0456 | 0.1452 | 3.9230 | 21.9940 |
| | MX1880 | I & II & III & IV | v1 | 0.6469 | 1.6624 | 0.0346 | 0.1073 | 1.4030 | 5.3720 |
| | MX1881 | I & II & III & IV | v1 | 0.9819 | 2.6126 | 0.0829 | 0.2105 | 1.4980 | 3.0540 |
| Trispecific | MX1548 | I & II & III | v1 | N.T. | N.T. | N.T. | N.T. | >67 | >67 |
| | MX1846 | I & II & III | v1 | 6.3401 | 21.8400 | 0.1641 | 0.5747 | >67 | >67 |
| | MX1847 | I & II & III | v1 | 7.3137 | 26.7700 | 0.1858 | 0.6140 | >67 | >67 |
| | MX2005 | I & II & III | v1 | 3.8090 | 12.6100 | 0.2013 | 0.6057 | N.T. | N.T. |
| Monoclonal | E12 | I | N/A | 2.0514 | 5.5979 | 30.6700 | >67 | >67 | >67 |
| | G11 | II | N/A | >67 | >67 | 0.5067 | 1.7131 | >67 | >67 |
| | E8 | III | N/A | N.T. | N.T. | N.T. | N.T. | >67 | >67 |
| | B2 | III | N/A | 0.4655 | 0.8315 | 0.5041 | 1.1714 | 0.8382 | 2.2718 |
| | A18-448 | I/IV | N/A | 0.0367 | 0.1280 | 0.0194 | 0.0779 | 0.0328 | 0.1100 |

### Example 14

### Optimization of Well-Performing Antigen Binding Polypeptide Complexes-2

[8340] MX1846 is modified to include B2, obtaining MX1846 with B2 (FIG. 41). Similarly, MX1880 is also modified to include B2 to obtain MX1880 with B2 (FIG. 41).

[8341] MX1846, comprising a LA (M428L/N434A) modification was modified to obtain MX2005 comprising a YTE (M252Y/S254T/T256E) and a TM (L234F/L235E/P331S) modification (FIG. 42 and FIG. 43). The VL and the VH of E8 in MX2005 were substituted with the VL and the VH of B2 as to obtain MX2167. Further, MX2167 was modified to introduce the N89Q modification into B2 as to obtain MX2169, MX2169 was further modified to introduce the N116Q modification into G11 as to obtain MX2241 (FIG. 43).

[8342] MX1880, comprising a LA (M428L/N434A) modification was modified to obtain MX2148 comprising a YTE (M252Y/S254T/T256E) and a TM (L234F/L235E/P331S) modification. The VL and the VH of E8 in MX2148 were substituted with the VL and the VH of B2 as to obtain MX2168. Further, MX2168 was modified to introduce the N89Q modification into B2 as to obtain MX2170, MX2170 was further modified to introduce the N116Q modification into G11 as to obtain MX2242 (FIG. 43).

[8343] MX1881, comprising a LA (M428L/N434A) modification was modified to obtain MX2183 comprising a YTE (M252Y/S254T/T256E) and a TM (L234F/L235E/P331S) modification. The VL and the VH of E8 in MX2183 were substituted with the VL and the VH of B2 as to obtain MX2179. Further, MX2179 was modified to introduce the N89Q modification into B2 as to obtain MX2180, MX2180 was further modified to introduce the N116Q modification into G11 as to obtain MX2269 (FIG. 43).

[8344] The full set of antigen polypeptide complexes tested in the experiments below are shown in FIG. 43, and comprise the shown modifications. The antigen polypeptide complexes shown in FIG. 43 were produced, and their SEC profiles are shown in FIGS. 44A-44J, SEC purification was performed with HiLoad 26/600 Superdex 200 pg (Cytiva), and fractions (shown in boxes in FIGS. 44A-44J) were collected and pooled in 10 mM Histidine, pH 6.0/150 mM NaCl.

[8345] The results of the analysis of the produced constructs is shown in Table E16.

TABLE E16
Production of tetravalent tetraspecific anti-SARS-CoV-2 antibodies.

| | | | | | | Yield | | Yield |
|---|---|---|---|---|---|---|---|---|
| | Molecular | | | | | after | Yield after | after |
| | Weight | Isoelectric | Extinction | | | protein A | concentration | SEC |
| ID | (kDa) | Point | Coefficient | Cells | Scale (L) | (mg/L) | (mg/L) | (mg/L) |
| MX2167 | 200 | 8.08 | 1.601 | CHO-K1 | 0.5 | 177.86 | 66.14 | 8.68 |
| MX2169 | 200 | 8.08 | 1.601 | CHO-K1 | 0.5 | 263.82 | 209.40 | 38.18 |
| MX2168 | 202 | 7.82 | 1.619 | CHO-K1 | 0.5 | 332.75 | 287.90 | 36.98 |
| MX2170 | 202 | 7.82 | 1.619 | CHO-K1 | 0.5 | 313.90 | 263.44 | 69.01 |
| MX2171 | 202 | 7.83 | 1.619 | CHO-K1 | 0.5 | 256.38 | 231.32 | 32.80 |
| MX2172 | 202 | 7.83 | 1.619 | CHO-K1 | 0.5 | 249.34 | 233.72 | 45.97 |
| MX2148 | 203 | 7.7 | 1.531 | CHO-K1 | 2 | 328.12 | 289.30 | 75.66 |
| MX2183 | 203 | 7.7 | 1.531 | CHO-K1 | 1 | 332.46 | 285.23 | 56.85 |
| MX2179 | 202 | 7.82 | 1.619 | CHO-K1 | 1 | 493.19 | 428.91 | 105.87 |
| MX2180 | 202 | 7.82 | 1.619 | CHO-K1 | 1 | 554.20 | 152.73 | 25.73 |

[8346] The neutralizing activities against 2 SARS-CoV-2 variants and SARS-CoV-1 were tested and are shown in Table E17. The tested antigen binding polypeptide complexes are shown in FIG. 45.

TABLE E17
Neutralizing activities against 2 SARS-CoV-2 variants and SARS-CoV-1. IC50 and IC80 are
expressed in nM.

| | | | HV.1 | | JN.1 | | SARS-CoV-1 | |
|---|---|---|---|---|---|---|---|---|
| Specificity | Antibody | RBD Class | IC50 | IC80 | IC50 | IC80 | IC50 | IC80 |
| Trispecific | MX1846 | I & II & III | 0.1306 | 0.4383 | 0.4593 | 2.5062 | N.T. | N.T. |
| | MX2005 | I & II & III | 0.134 | 0.5472 | 1.0912 | 11.9348 | >67 | >67 |
| | MX2167 | I & II & III | 0.4803 | 1.4334 | 0.6616 | 2.9355 | >67 | >67 |
| | MX2169 | I & II & III | 0.2068 | 1.2394 | 0.3848 | 4.8004 | >67 | >67 |
| Tetraspecific | MX2148 | I & II & III | 0.0291 | 0.1488 | 0.0734 | 0.3806 | 0.38 | 0.9232 |
| | | & IV | | | | | | |
| | MX2168 | I & II & III | 0.1103 | 0.3435 | 0.1032 | 0.4798 | 0.1373 | 0.6332 |
| | | & IV | | | | | | |
| | MX2170 | I & II & III | 0.1085 | 0.3416 | 0.2164 | 0.6219 | 0.1297 | 0.5432 |
| | | & IV | | | | | | |
| | MX2171 | I & II & III | 0.0833 | 0.432 | 0.079 | 0.4515 | 1.2056 | 3.9699 |
| | | & IV | | | | | | |
| | MX2172 | I & II & III | 0.0552 | 0.317 | 0.0495 | 0.4652 | 1.0844 | 2.5084 |
| | | & IV | | | | | | |
| | MX2179 | I & II & III | 0.0917 | 0.3102 | 0.0378 | 0.1773 | 0.1394 | 0.3804 |
| | | & IV | | | | | | |
| | MX2180 | I & II & III | 0.1000 | 0.3619 | 0.0352 | 0.1653 | 0.1905 | 0.4166 |
| | | & IV | | | | | | |
| | MX2183 | I & II & III | 0.1023 | 0.3522 | 0.0785 | 0.3908 | 0.3872 | 0.8191 |
| | | & IV | | | | | | |

[8347] MX2148 is a tetraspecific antigen binding complex comprising, the VL and the VH of: E12 (class I), A18-448 (class I/IV), E8 (class III), and G11 (class II), wherein E8 comprises a N62Q modification. Further, MX2148 comprises a CL/CH1 region and an Fc region (CH2-CH3) comprising a YTE (M252Y/S254T/T256E) and a TM (L234F/L235E/P331S) modification, MX2148 displayed t neutralization activity against all prior and current SARS-CoV-2 variants, including the dominant JN.1 strain as shown in the table below. The data shown herein suggest that the insertion of the VL and of the VH of A18-448 (class I/IV) into the antigen binding complex led to improved neutralization activity. Further analysis showed that A18-448 (class I/IV) is highly cross-reactive and capable of binding to both SARS-CoV-1 and SARS-CoV-2 variants.

[8348] A18-448 appears to bind to the RBD-up, to an epitope located in the same region to which Class IV antibodies can bind. Nevertheless, A18-448 appears to be capable of competing with Class I and Class III antibodies, as well as with ACE2. Based on the above, A18-448 can be considered as belonging to more than one of the anti-SARS-COV antibody classes as defined in the published literature. In some aspects, A18-448 can be considered a Class I/IV antibody as described in the paragraph above.

[8349] The epitope to which A18-448 binds (FIGS. 67A-67B) appeared to have a degree of conservation among different SARS-CoV-1 and SARS-CoV-2 variants, and amino acid variations in or near this epitope do not appear to affect the binding of A18-448 to the epitope, nor the potency of A18-448. The identified epitope comprises a contiguous loop of amino acids comprising residues 499-505 of SARS-COV and a short region of alpha helix comprising residues 404-406 of SARS-COV. These amino acid residues appeared to be quite conserved across SARS-COV variants. Additionally, A18-448 seemed to be capable of maintaining the binding capability to this epitope, despite the presence of amino acid variations, by binding to the main C-chain and not to the side chain of key residues comprised in the epitope.

[8350] The neutralizing activities of MX2148 against 28 SARS-CoV-2 variants are shown in Tables E18A and E18B.

[8351] Additionally, the tetravalent tetraspecific antigen binding complexes shown in FIGS. 38, 43, 45, 47, and 52 showed an anti-pan-sarbecovirus neutralizing activity.

TABLE E18A
Neutralizing activities of MX2148 against 28 SARS-CoV-2 variants. IC50 and IC80 are
expressed in nM.

| | | | WA1 | | D614G | | B.1.1.7 | | B.1.351 | |
|---|---|---|---|---|---|---|---|---|---|---|
| Specificity | Antibody | Class (RBD) | IC50 | IC80 | IC50 | IC80 | IC50 | IC80 | IC50 | IC80 |
| Tetraspecific | MX1880 | I & II & III | 0.3258 | 0.7995 | 0.1164 | 0.2356 | 0.1836 | 0.3956 | 0.1043 | 0.2393 |
| | (LA) | & IV | | | | | | | | |
| | MX2148 | I & II & III | 0.2601 | 0.7308 | 0.1132 | 0.2887 | 0.1299 | 0.3461 | 0.0934 | 0.2649 |
| | (TM/YTE) | & IV | | | | | | | | |
| Monoclonal | AZD3152 | I | 1.0767 | 2.2013 | 0.1022 | 0.6227 | 0.6216 | 1.5406 | 0.1633 | 0.4586 |
| | | | P.1 | | B.1.617.2 | | B.1.427 | | B.1.429 | |
| Specificity | Antibody | Class (RBD) | IC50 | IC80 | IC50 | IC80 | IC50 | IC80 | IC50 | IC80 |
| Tetraspecific | MX1880 | I & II & III | 0.0882 | 0.2721 | 0.4002 | 0.4523 | 0.3064 | 0.4772 | 0.1060 | 0.2243 |
| | (LA) | & IV | | | | | | | | |
| | MX2148 | I & II & III | 0.0559 | 0.2688 | 0.2397 | 0.6976 | 0.2329 | 0.6079 | 0.0724 | 0.2483 |
| | (TM/YTE) | & IV | | | | | | | | |
| Monoclonal | AZD3152 | I | 0.3151 | 0.5480 | 0.6015 | 2.2014 | 0.5982 | 2.0321 | 0.5494 | 1.3875 |
| | | | B.1.525 | | B.1.526 | | B.1.617.1 | | BA.1 | |
| Specificity | Antibody | Class (RBD) | IC50 | IC80 | IC50 | IC80 | IC50 | IC80 | IC50 | IC80 |
| Tetraspecific | MX1880 | I & II & III | 0.2118 | 0.3484 | 0.0900 | 0.1837 | 0.0878 | 0.1700 | 0.0373 | 0.1006 |
| | (LA) | & IV | | | | | | | | |
| | MX2148 | I & II & III | 0.2256 | 0.3635 | 0.0785 | 0.1625 | 0.0520 | 0.1398 | 0.0253 | 0.0744 |
| | (TM/YTE) | & IV | | | | | | | | |
| Monoclonal | AZD3152 | I | 0.6680 | 1.5300 | 0.3293 | 1.0399 | 0.2706 | 0.6866 | 0.0779 | 0.4457 |
| | | | BA.4/5 | | P.2 | | B.1.621 | | CH.1.1 | |
| Specificity | Antibody | Class (RBD) | IC50 | IC80 | IC50 | IC80 | IC50 | IC80 | IC50 | IC80 |
| Tetraspecific | MX1880 | I & II & III | 0.0402 | 0.1533 | 0.1576 | 0.2775 | 0.1642 | 0.3657 | 0.0946 | 0.3037 |
| | (LA) | & IV | | | | | | | | |
| | MX2148 | I & II & III | 0.0400 | 0.1613 | 0.0919 | 0.2688 | 0.0984 | 0.1746 | 0.0775 | 0.2703 |
| | (TM/YTE) | & IV | | | | | | | | |
| Monoclonal | AZD3152 | I | 0.1975 | 0.6565 | 0.1353 | 0.3592 | 0.2646 | 0.6246 | 0.3014 | 1.5935 |
| | | | XBB | | XBB.1.5 | | XBB.2.3.2 | | BA.2.86 | |
| Specificity | Antibody | Class (RBD) | IC50 | IC80 | IC50 | IC80 | IC50 | IC80 | IC50 | IC80 |
| Tetraspecific | MX1880 | I & II & III | 0.0607 | 0.1709 | 0.0831 | 0.2239 | 0.0702 | 0.2609 | 0.0742 | 0.3426 |
| | (LA) | & IV | | | | | | | | |
| | MX2148 | I & II & III | 0.0422 | 0.1539 | 0.0604 | 0.1872 | 0.0831 | 0.3555 | 0.0325 | 0.1962 |
| | (TM/YTE) | & IV | | | | | | | | |
| Monoclonal | AZD3152 | I | 0.0748 | 0.3487 | 0.1089 | 0.3554 | 0.1677 | 0.5133 | 0.3515 | 2.2279 |
| | | | EG.5.1 | | FL.1.5.1 | | XBB.1.16.6 | | HV.1 | |
| Specificity | Antibody | Class (RBD) | IC50 | IC80 | IC50 | IC80 | IC50 | IC80 | IC50 | IC80 |
| Tetraspecific | MX1880 | I & II & III | 0.0683 | 0.2227 | 0.0966 | 0.2616 | 0.0638 | 0.1954 | 0.0483 | 0.1613 |
| | (LA) | & IV | | | | | | | | |
| | MX2148 | I & II & III | 0.0405 | 0.1450 | 0.0682 | 0.2181 | 0.0443 | 0.1377 | 0.0291 | 0.1488 |
| | TM/YTE) | & IV | | | | | | | | |
| Monoclonal | AZD3152 | I | >67 | >67 | >67 | >67 | >67 | >67 | >67 | >67 |
| | | | HK.3 | | JD.1.1 | | JF.1 | | JN.1 | |
| Specificity | Antibody | Class (RBD) | IC50 | IC80 | IC50 | IC80 | IC50 | IC80 | IC50 | IC80 |
| Tetraspecific | MX1880 | I & II & III | 0.0655 | 0.2276 | 0.0829 | 0.2478 | 0.0557 | 0.8556 | 0.1437 | 0.4884 |
| | (LA) | & IV | | | | | | | | |
| | MX2148 | I & II & III | 0.0295 | 0.1776 | 0.0477 | 0.1973 | 0.0674 | 0.1497 | 0.0734 | 0.3806 |
| | (TM/YTE) | & IV | | | | | | | | |
| Monoclonal | AZD3152 | I | >67 | >67 | >67 | >67 | >67 | >67 | 5.1079 | 27.9546 |

TABLE E18B
Neutralizing activities of MX2148 against 28 SARS-CoV-2 variants. IC50 and IC80 are expressed in
ng/ml.

| Specificity | Antibody | Class (RBD) | WA1 | D614G | B.1.1.7 | B.1.351 | P.1 | B.1.617.2 | B.1.427 |
|---|---|---|---|---|---|---|---|---|---|
| Tetraspecific | MX2148 | I & II & | 52 | 23 | 26 | 19 | 11 | 48 | 47 |
| | | III & IV | | | | | | | |
| Monoclonal | AZD3152* | I | 161 | 15 | 93 | 24 | 47 | 90 | 90 |
| Specificity | Antibody | Class (RBD) | B.1.429 | B.1.525 | B.1.526 | B.1.617.1 | BA.1 | BA.4/5 | P.2 |
| Tetraspecific | MX2148 | I & II & | 14 | 45 | 16 | 10 | 5 | 8 | 18 |
| | | III & IV | | | | | | | |
| | AZD3152* | I | 82 | 100 | 49 | 41 | 12 | 30 | 20 |
| Specificity | Antibody | Class (RBD) | B.1.621 | CH.1.1 | XBB | XBB.1.5 | XBB.2.3.2 | BA.2.86 | EG.5.1 |
| Tetraspecific | MX2148 | I & II & | 20 | 16 | 8 | 12 | 17 | 6 | 8 |
| | | III & IV | | | | | | | |
| Monoclonal | AZD3152 | I | 40 | 45 | 11 | 16 | 25 | 53 | >10,000 |
| Specificity | Antibody | Class (RBD) | FL.1.5.1 | XBB.1.16.6 | HV.1 | HK.3 | JD.1.1 | JF.1 | JN.1 |
| Tetraspecific | MX2148 | I & II & | 14 | 9 | 6 | 6 | 10 | 13 | 15 |
| | | III & IV | | | | | | | |
| Monoclonal | AZD3152 | I | >10,000 | >10,000 | >10,000 | >10,000 | >10,000 | >10,000 | 766 |

### Example 15

### Challenge in Hamsters

[8352] MX2005, MX1880 and MX2148 were tested in a hamster challenge experiment, performed as described in Example 6. The virus used in this hamster challenge was a SARS-Cov-2 omicron variant/JN.1 sub variant at a titer of 2.2×10⁶ TCID50/ml. The IN challenge was 4.4×10⁴ TCID50/dose and the antigen binding polypeptide complex was administered at a dose of 10 mg/kg via intraperitoneal administration route, MX2005, MX1880 and MX2148 showed protective efficacy against JN.1 variant (FIGS. 46A-46B).

### Example 16

Tetravalent Trispecific Anti-SARS-CoV-2 Antibodies with Fc Modifications

[8353] Different Fc modifications were tested to further extend antigen binding polypeptide complex half-life, PK data in humans indicated that AZD7442 (Evusheld) with triple mutations (TM) and YTE mutations has an extended half-life of ˜90 days and confers protection for 6 months.

[8354] As described above, the VL and the VH of A19-46 in MX1548 were substituted with the VL and the VH of G11 as to obtain MX1846, which contains a LA modification. Two constructs based on MX1846 were produced to replace Fc-LA with Fc-TM/YTE (MX 2005) or Fc-LALAPA-LA (MX2059). A TM/YTE modification was inserted into MX1846 to obtain MX2005. Further, a LALAPA-LA modification was inserted into MX2055 to obtain MX2059, as shown in FIG. 47. The sequence alignments between Fc domains of TM/YTE, LALAPA-LA and LA are shown in FIG. 48 (with a hole modification as an example). The modification sites are as follows:
[8355] YTE half-life extension—Half-life extension
[8356] M252Y/S254T/T256E
[8357] Triple mutation (TM)—Attenuate Fcγ binding
[8358] L234F/L235E/P331S
[8359] Allotype (IGHG1.03)
[8360] K214R/D356E/L358M
[8361] LA—Half-life extension
[8362] M428L/N434A
[8363] LS—Half-life extension:
[8364] M428L/N433S. (can be present in both Knob-LS and Hole-LS).
[8365] LALAPA—Attenuate Fcg binding
[8366] L234A/L235A/P329A
[8367] Knob
[8368] S354C/T366W
[8369] Hole
[8370] Y349C/T366S/L368A/Y407V
[8371] With or without C-terminal Lys

[8372] Size exclusion chromatography (SEC), using superdex 200 increase column, and 10 mM Histidine pH 6.0 and 150 mM NaCl as running buffer, was performed on MX1846 and MX2005. The results are shown in FIGS. 49A-49B.

[8373] MX1846 and MX2005 were expressed in ExpiCHO-S culture and titer measured by Octet BLI using protein A biosensor. The results are shown in Table E20.

TABLE E20
MX1846 and MX2005 expression.

| | | Day3 | | | Day7 | | | Day9 | | |
|---|---|---|---|---|---|---|---|---|---|---|
| | | Cell | | Titers | Cell | | Titers | Cell | | Titers |
| Scale (ml) | Name | conc | Viability | (mg/L) | conc | Viability | (mg/L) | conc | Viability | (mg/L) |
| 500 ml × 2 | MX1846 | | | | 9M | 89% | 73.1 | 10M | 72% | 72.2 |
| 400 ml × 1 | MX1846 | | | | | | | 9.7M | 78% | 97.6 |
| 10 ml × 1 | MX1846 | 12M | 98% | 26.5 | 7M | 86% | 61.9 | | | |
| 10 ml × 1 | MX1846 | 12M | 97% | 26.7 | | | | | | |
| 200 ml × 1 | MX2005 | 9.8M | 98% | 31.1 | | | | | | |
| 2.2 L X 1 | MX2005 | | | | | | | 11M | 65% | 81 |
| 10 ml × 1 | MX2005 | 9.8M | 98% | 28.3 | 12M | 93% | 69.9 | | | |
| 10 ml × 1 | MX2005 | 9.5M | 95% | 24.3 | | | | | | |

[8374] Titers and SEC profiles were comparable between MX1846 and MX2005.

[8375] The neutralizing activity of MX1846 and MX2005 was also measured, and the results are shown in Table E21.

TABLE E21
Neutralizing activities comparison between MX1846 and MX2005. IC50 and IC80 are
expressed in nM.

| | | | WA.1 | | Delta | | BA.2 | | BA.4/5 | | | |
|---|---|---|---|---|---|---|---|---|---|---|---|---|
| Specificity | Antibody | Fc | IC50 | IC80 | IC50 | IC80 | IC50 | IC80 | IC50 | | IC80 | |
| Trispecific | MX1846 | LA | 0.2513 | 0.4876 | 0.3129 | 0.4831 | 0.0522 | 0.0876 | 0.0429 | | 0.0949 | |
| Trispecific | MX2005 | TM/YTE | 0.1779 | 0.4439 | 0.2577 | 0.3010 | 0.0585 | 0.1012 | 0.0579 | | 0.1010 | |
| | | | BQ.1.1 | | BA.2.75.2 | | CH.1.1 | | BF.7 | | EG.5 | |
| Specificity | Antibody | Fc | IC50 | IC80 | IC50 | IC80 | IC50 | IC80 | IC50 | IC80 | IC50 | IC80 |
| Trispecific | MX1846 | LA | 0.0634 | 0.1955 | 0.0155 | 0.0539 | 0.0776 | 0.2392 | 0.0255 | 0.0740 | 0.0965 | 0.2017 |
| Trispecific | MX2005 | TM/YTE | 0.0558 | 0.1204 | 0.0345 | 0.0874 | 0.1705 | 0.4366 | 0.0372 | 0.0982 | 0.0271 | 0.0956 |

[8376] The activity of MX1846 and MX2005 was tested in FcRn-Fc mice as described in Example 9. The results are shown in FIG. 50.

[8377] Size exclusion chromatography (SEC), using superdex 200 increase column, and 10 mM Histidine pH 6.0 and 150 mM NaCl as running buffer, was performed on MX1846 and MX2059. The results are shown in FIGS. 51A-51B.

[8378] The antigen binding polypeptide complexes were expressed in ExpiCHO-S culture and titer was measured by Octet BLI using protein A biosensor or yield from affinity chromatography (protein A). The results are shown in Table E22.

TABLE E22
MX1846, MX2005, and MX2059 expression.

| Name | Titer (mg/L) |
|---|---|
| MX1846 | 61.6 |
| MX2005 | 51.5 |
| MX2059 | 45 |

[8379] The neutralizing activity of MX1846 and MX2059 was also measured, and the results are shown in Table E23.

TABLE E23
Neutralizing activities comparison between MX1846 and
MX2059. IC50 and IC80 are expressed in nM.

| | XBB.1.5 | | EG.5 | | JN.1 | |
|---|---|---|---|---|---|---|
| Antibody | IC50 | IC80 | IC50 | IC80 | IC50 | IC80 |
| MX1846 | 0.0989 | 0.2262 | 0.2015 | 0.4408 | 11.5650 | 49.4500 |
| MX2059 | 0.2118 | 0.2427 | 0.0435 | 0.1416 | 9.8900 | 27.4300 |

### Example 17

### Linkers Manipulation and Optimization

[8380] The length of the linkers comprised in the antigen binding polypeptides and in the antigen binding polypeptide complexes disclosed herein was manipulated as described below.

[8381] Antigen binding polypeptide complex MX1545 comprises two identical antigen binding polypeptides of SEQ ID NO: 470. Each one of the two antigen binding polypeptides comprised in MX1545 has a structure of: VL1-CL-L1-VL2-L2-VH2-L3-VH1-CH1-CH2-CH3, wherein VL1 and VH1 comprise a VL and a VH of E12, respectively; and VL2 and VH2 comprise a VL and a VH of E8, respectively. In MX1545 a linker (L2) comprising 20 amino acid residues is interposed between the VL and the VH of E8. Specifically, the linker comprises an amino acid sequence of 20 amino acid residues comprising a sequence of GGGGSGGSGSGGGGSASGSG (SEQ ID NO: 340).

[8382] The linker interposed between the VL and the VH of E8 in MX1545 was substituted with a linker comprising 25 amino acid residues comprising a sequence of GGSGSGGGGSGGSGSGGGGSASGSG (SEQ ID NO: 967) as to obtain MX1733. Further, the linker interposed between the VL and the VH of E8 in MX1545 was substituted with a linker comprising 15 amino acid residues comprising a sequence of GGSGSGGGGSASGSG (SEQ ID NO: 337) as to obtain MX1734. Additionally, the linker interposed between the VL and the VH of E8 in MX1545 was substituted with a linker comprising 10 amino acid residues comprising a sequence of GGGGSASGSG (SEQ ID NO: 968) as to obtain MX1735, FIG. 52 shows the linear structure of the antigen binding polypeptides comprised in MX1545, MX1733, MX1734, and MX1735, FIG. 53 shows a schematic of the structures of MX1545, MX1733, MX1734, and MX1735, FIG. 54 shows a schematic of a AlphaFold2 prediction model of the 20, 25, 15, and 10 amino acid long linkers comprised in MX1545, MX1733, MX1734, and MX1735, respectively.

[8383] MX1545, MX1733, MX1734, and MX1735 were expressed in ExpiCHO-S culture and expression titers were measured. The expression titers of MX1545, MX1733, MX1734, and MX1735 are shown in Table E24.

TABLE E24
Expression titers of MX1545, MX1733, MX1734, and MX1735.

| ID | Linker | Titer (mg/L) |
|---|---|---|
| MX1735 | L10 | 3.8 |
| MX1734 | L15 | 13.9 |
| MX1545 | L20 | 9.9 |
| MX1733 | L25 | 9.0 |

[8384] Size exclusion chromatography (SEC), using superdex 200 increase column, was performed on MX1545, MX1733, MX1734, and MX1735. The results are shown in FIG. 55.

[8385] The neutralization profile of MX1545, MX1733, MX1734, and MX1735 (IC50 and IC80) against SARS-CoV-2 (XBB.1.5) is shown in Table E25.

TABLE E25
neutralization profile of MX1545, MX1733, MX1734, and
MX1735 against SARS-CoV-2 (expressed in nM).

| | | XBB.1.5 | |
|---|---|---|---|
| ID | Linker | IC50 | IC80 |
| MX1735 | L10 | 0.54 | 1.36 |
| MX1734 | L15 | 0.20 | 0.51 |
| MX1545 | L20 | 0.17 | 0.51 |
| MX1733 | L25 | 0.15 | 0.39 |

[8386] In MX1545 a linker (L3) comprising 5 amino acid residues is interposed between the VH of E8 and the VH of E12. Specifically, the linker comprises an amino acid sequence of 5 amino acid residues comprising a sequence of GGSSG (SEQ ID NO: 333).

[8387] The linker interposed between the VH of E8 and the VH of E12 in MX1545 was substituted with a linker comprising 10 amino acid residues comprising a sequence of ASGSGGGSSG (SEQ ID NO: 969) as to obtain MX1781. Further, the linker interposed between the VH of E8 and the VH of E12 in MX1545 was substituted with a linker comprising 15 amino acid residues comprising a sequence of GGGGSASGSGGGSSG (SEQ ID NO: 970) as to obtain MX1782. Additionally, the linker interposed between the VH of E8 and the VH of E12 in MX1545 was substituted with a linker comprising 20 amino acid residues comprising a sequence of GGSGSGGGGSASGSGGGSSG (SEQ ID NO: 971) as to obtain MX1783, FIG. 56 shows the linear structure of the antigen binding polypeptides comprised in MX1545, MX1781, MX1782, and MX1783, FIG. 57 shows a schematic of the structures of MX1545, MX1781, MX1782, and MX1783.

[8388] MX1545, MX1781, MX1782, and MX1783 were expressed in ExpiCHO-S culture and expression titers were measured. The expression titers of MX1545, MX1781, MX1782, and MX1783 are shown in Table E26.

TABLE E26
Expression titers of MX1545, MX1781, MX1782, and MX1783.

| ID | Linker | Titer (mg/L) |
|---|---|---|
| MX1545 | SL5 | 7.05 |
| MX1781 | SL10 | 6.37 |
| MX1782 | SL15 | 8.08 |
| MX1783 | SL20 | 7.73 |

[8389] Size exclusion chromatography (SEC), using superdex 200 increase column, was performed on MX1545, MX1781, MX1782, and MX1783. The results are shown in FIG. 58.

[8390] The neutralization profile of MX1545, MX1781, MX1782, and MX1783 (IC50 and IC80) against SARS-CoV-2 (XBB.1.5) is shown in Table E27.

TABLE E27
neutralization profile of MX1545, MX1781, MX1782, and MX1783
against SARS-CoV-2 (expressed in nM).

| | | XBB.1.5 | |
|---|---|---|---|
| ID | Linker | IC50 | IC80 |
| MX1545 | SL5 | 0.19 | 0.22 |
| MX1781 | SL10 | 0.04 | 0.12 |
| MX1782 | SL15 | 0.02 | 0.14 |
| MX1783 | SL20 | 0.25 | 0.47 |

[8391] Antigen binding polypeptide complex MX1546 comprises two identical antigen binding polypeptides of SEQ ID NO: 471. Each one of the two antigen binding polypeptides comprised in MX1546 has a structure of: VL1-L1-VL2-L2-VH2-L3-VH1-CL-L4-CH1-CH2-CH3, wherein VL1 and VH1 comprise a VL and a VH of E12, respectively; and VL2 and VH2 comprise a VL and a VH of E8, respectively. In MX1546 a linker (L4) comprising 25 amino acid residues is interposed between the CL and the CH1. Specifically, the linker comprises an amino acid sequence of 25 amino acid residues comprising a sequence of GGGGSGGSGSGGGGSGGGGSASGSG (SEQ ID NO: 341).

[8392] The linker interposed between the CL and the CH1 in MX1546 was substituted with a linker comprising 20 amino acid residues comprising a sequence of GGSGSGGGGSGGGGSASGSG (SEQ ID NO: 339) as to obtain MX1570. Further, the linker interposed between the CL and the CH1 in MX1546 was substituted with a linker comprising 15 amino acid residues comprising a sequence of GGSGSGGGGSASGSG (SEQ ID NO: 337) as to obtain MX1571. Additionally, the linker interposed between the CL and the CH1 in MX1546 was substituted with a linker comprising 10 amino acid residues comprising a sequence of GGSGSGGGGS (SEQ ID NO: 335) as to obtain MX1572, FIG. 59 shows the linear structure of the antigen binding polypeptides comprised in MX1546, MX1570, MX1571, and MX1572, FIG. 60 shows a schematic of the structures of MX1546, MX1570, MX1571, and MX1572, FIG. 61 shows a schematic of a AlphaFold2 prediction model of the 25, 20, 15, and 10 amino acid long linkers comprised in MX1546, MX1570, MX1571, and MX1572, respectively.

[8393] MX1546, MX1570, MX1571, and MX1572 were expressed in ExpiCHO-S culture and expression titers were measured. The expression titers of MX1546, MX1570, MX1571, and MX1572 are shown in Table E28.

TABLE E28
Expression titers of MX1546, MX1570, MX1571, and MX1572.

| ID | Linker | Titer (mg/L) |
|---|---|---|
| MX1546 | L25 | 52.5 |
| MX1570 | L20 | 35 |
| MX1571 | L15 | 18 |
| MX1572 | L10 | 19.1 |

[8394] Size exclusion chromatography (SEC), using superdex 200 increase column, was performed on MX1546, MX1570, MX1571, and MX1572. The results are shown in FIG. 62.

[8395] The neutralization profile of MX1546, MX1570, MX1571, and MX1572 (IC50 and IC80) against SARS-CoV-2 (XBB.1.5) is shown in Table E29.

TABLE E29
neutralization profile of MX1546, MX1570, MX1571, and
MX1572 against SARS-CoV-2 (expressed in nM; n.t.: not tested).

| | | WA.1 | | XBB.1.5 | |
|---|---|---|---|---|---|
| ID | Linker | IC50 | IC80 | IC50 | IC80 |
| MX1546 | L25 | 0.338 | 0.376 | 0.064 | 0.176 |
| MX1570 | L20 | 0.361 | 0.405 | 0.061 | 0.150 |
| MX1571 | L15 | 0.242 | 0.450 | 0.046 | 0.083 |
| MX1572 | L10 | n.t | n.t | 0.493 | 2.725 |

[8396] Antigen binding polypeptide complex MX1544 comprises two identical antigen binding polypeptides of SEQ ID NO: 469. Each one of the two antigen binding polypeptides comprised in MX1544 has a structure of: VL1-L1-VH1-L2-VL2-CL-L3-VH2-CH1-CH2-CH3, wherein VL1 and VH1 comprise a VL and a VH of E12, respectively; and VL2 and VH2 comprise a VL and a VH of E8, respectively. In MX1544 a linker (L3) comprising 40 amino acid residues is interposed between the CL and the VH of E8. Specifically, the linker comprises an amino acid sequence of 40 amino acid residues comprising a sequence of GGGGSGGGGSGGGGSGGGGSGGGGSGGGGSGGGGSGGGGS (SEQ ID NO: 345).

[8397] The linker interposed between the CL and the VH of E8 in MX1544 was substituted with a linker comprising 35 amino acid residues comprising a sequence of GGGGSGGGGSGGGGSGGGGSGGGGSGGGGSGGGGS (SEQ ID NO: 344) as to obtain MX1567. Further, the linker interposed between the CL and the VH of E8 in MX1544 was substituted with a linker comprising 30 amino acid residues comprising a sequence of GGGGSGGGGSGGGGSGGGGSGGGGSGGGGS (SEQ ID NO: 343) as to obtain MX1568. Additionally, the linker interposed between the CL and the VH of E8 in MX1544 was substituted with a linker comprising 25 amino acid residues comprising a sequence of GGGGSGGGGSGGGGSGGGGSGGGGS (SEQ ID NO: 342) as to obtain MX1569, FIG. 63 shows the linear structure of the antigen binding polypeptides comprised in MX1544, MX1567, MX1568, and MX1569, FIG. 64 shows a schematic of the structures of MX1544, MX1567, MX1568, and MX1569, FIG. 65 shows a schematic of a AlphaFold2 prediction model of the 35 and 25 amino acid long linkers comprised in MX1567 and MX1569, respectively.

[8398] MX1544, MX1567, MX1568, and MX1569 were expressed in ExpiCHO-S culture and expression titers were measured. The expression titers MX1544, MX1567, MX1568, and MX1569 are shown in Table E30.

TABLE E30
Expression titers of MX1544, MX1567, MX1568, and
MX1569 (n.t.: not tested).

| | | Titer (mg/L), | Titer (mg/L) |
|---|---|---|---|
| ID | Linker | experiment 1 | Experiment 2 |
| MX1544 | L40 | 9.3 | 13.8 |
| MX1567 | L35 | 7.5 | 10.5 |
| MX1568 | L30 | 7.7 | 10.4 |
| MX1569 | L25 | 5 | n.t |

[8399] Size exclusion chromatography (SEC), using superdex 200 increase column, was performed on MX1544, MX1567, MX1568, and MX1569. The results are shown in FIG. 66.

[8400] The neutralization profile of MX1544, MX1567, MX1568, and MX1569 (IC50 and IC80) against SARS-CoV-2 (XBB.1.5) is shown in Table E31.

TABLE E31
neutralization profile of MX1544, MX1567, MX1568, and
MX1569 against SARS-CoV-2 (expressed in nM; n.t.: not tested).

| | | WA.1 | | XBB.1.5 | |
|---|---|---|---|---|---|
| ID | Linker | IC50 | IC80 | IC50 | IC80 |
| MX1544 | L40 | 0.056 | 0.377 | 0.008 | 0.022 |
| MX1567 | L35 | 0.199 | 0.313 | 0.019 | 0.046 |
| MX1568 | L30 | 0.169 | 0.232 | 0.012 | 0.032 |
| MX1569 | L25 | n.t | n.t | 0.493 | 2.555 |

### Example 18

### Neutralization Activity, Mechanism of Action, and Characterization of MX2148

[8401] MX2148 (tetravalent tetraspecific) includes four classes of RBD targeting monoclonal antibodies, FIG. 97A-97D show cryo-EM structures of Fab binding sites of E12, E8, A18.448.1, and G11 monoclonal antibodies on the RBD. The data were generated from cryo-EM structures of spike proteins complexed with the different Fabs. Specifically, the E12 (FIG. 97A) and E8 (FIG. 97C) structures are derived from cryo-EM structures of XBB spike protein in complex with Fab E8 and Fab E12 (map at 3.4 Å resolution), the G11 structure (FIG. 97B) is derived from cryo-EM structure of XB.1.5 spike in complex with Fab G11 (map at 3.43 Å resolution), and the A18.448 structure (FIG. 97D) is derived from cryo-EM structure of EG.5 spike in complex with Fab A18.448 (Map at 3.59 Å resolution).

[8402] The mechanism of action and neutralization activity of MX2148 (tetravalent tetraspecific) were investigated. The data obtained showed that MX2148 blocks ACE2 binding on the SARS-CoV-2 spike protein to prevent viral entry (FIG. 70).

[8403] An rcVSV neutralization assay for MX2148, its constituent mAbs, and corresponding cocktail was performed (FIG. 98). The cocktail (E12+G11+E8+448.1) was made in 1:1:1:1 ratio. For a final concentration of 20 μg/ml, each individual mAb was at a concentration of 5 μg/ml.

[8404] rcVSV selection of anti-SARS-Cov-2 antibodies escape mutants is shown in FIG. 100. Neutralization potency did not seem to have an impact on prevention of variant generation in individual mAbs. The ability of E12 to prevent development of resistance could be inherent in its epitope or random, MX2148 was better at prevention of variant generation than its constituent cocktails and individual monoclonal antibodies (FIG. 101. Table E32).

TABLE E32
IC50 of indicated antibodies.

| mAb | IC50 (ng/ml) |
|---|---|
| E8 | 1.0 |
| MDX2202 | 1.2 |
| 448.1 | 1.5 |
| G11 | 2.4 |
| E12 | 2.6 |
| 46.1 | 3.8 |
| E12 + G11 + E8 + 448.1 | 7.2 |

[8405] The rate of in vitro resistance acquisition of SARS-Cov-2 virus in presence of MX2148, of E12, G11, E8, A18-448, and of a mixture of E12, G11, E8, and A18-448 was measured. The virus fully escaped monoclonal antibodies E8, G11, and A18-448 (20% CPE at ˜50 mg/ml) within 2-3 rounds. Escape to E12 monoclonal antibody was delayed, with partial escape after 6 rounds, MX2148 prevented viral escape more effectively than the single monoclonal antibodies and also more effectively than the mixture of the single monoclonal antibodies (FIG. 93).

[8406] MX1880 and MX2148 are tetravalent and tetraspecific antigen binding complexes comprising, the VL and the VH of: E12 (class I), A18-448 (class I/IV), E8 (class III), and G11 (class II), wherein E8 comprises a N62Q modification, MX1880 comprises a CL/CH1 region and an Fc region (CH2-CH3) comprising a LA (M428L/N434A) modification, MX2148 comprises a CL/CH1 region and an Fc region (CH2-CH3) comprising a YTE (M252Y/S254T/T256E) and a TM (L234F/L235E/P331S) modification. The YTE (M252Y/S254T/T256E) modification is a half-life extension modification, and the TM (L234F/L235E/P331S) modification is a Fc inactivation modification. The Fc-γ function of MX1880 and MX2148 were measured and compared (FIG. 71A-71). The data obtained showed that the Fc mutations of MX2148 eliminated its Fc-γ function. Additionally, the Antibody-Dependent Enhancement (ADE) of MX2148 was tested, ADE is a phenomenon in which binding of a virus to suboptimal antibodies enhances its entry into host cells, followed by its replication. No ADE was observed with MX2148. There was no enhanced viral entry to Raji B cells at any concentration with MX2148 (FIG. 92).

[8407] The half life of MX2148 was tested in Humanized FcRn-Fc Tg32 mice. The t½ was 12.1±1.5 days (FIG. 94). The estimated t½ in this model is comparable to standard IgG monoclonal antibodies that have been shown to have favorable pharmacokinetic profiles in humans. Other pharmacokinetic parameter estimates were as follows: Cₘₐₓ=42±22 μg/mL, AUC=544±269 day*μg/mL, and clearance=19.6±26.8 mL/day/kg.

[8408] Additionally, MX2148 was shown to protect against JN.1 variant in Syrian Hamster Challenge, FIG. 95 shows the experimental design of the Syrian Hamster Challenge, and FIGS. 96A-96B show the results obtained in lung (FIG. 96A) and nare (FIG. 96B).

### Example 19

### Tetravalent Bispecific Antigen Binding Complexes

[8409] The neutralizing activity of antigen binding complex MX2301 (FIG. 68), and of monoclonal antibodies B2 and A18-448, was measured as described above, and the results are shown in Table E33. The results showed that tetravalent bispecific MX2301 potently neutralizes all variants, including KP.3.

TABLE E33
Neutralizing activities comparison between antigen binding complexes MX2301 and MX2148,
and monoclonal antibodies B2 and A18-448. IC50 and IC80 are expressed in nM.

| | | | D614G | B.1.427 | B.1.429 | P.2 | B.1.351 | B.1.1.7 | B.1.617.1 | B.1.617.2 | P.1 |
|---|---|---|---|---|---|---|---|---|---|---|---|
| Specificity | Antibody | Class (RBD) | IC50 (nM) | | | | | | | | |
| Bispecific | MX2301 | III + IV | 0.020 | 0.090 | 0.015 | 0.026 | 0.009 | 0.182 | 0.010 | 0.091 | 0.039 |
| Monoclonal | B2 | III | 0.025 | 0.309 | 0.022 | 0.041 | 0.014 | 0.387 | 0.040 | 0.124 | 0.062 |
| | A18-448 | IV | 0.039 | 0.108 | 0.077 | 0.120 | 0.038 | 0.108 | 0.070 | 0.238 | 0.078 |
| | | | B.1.526 | B.1.525 | B.1.621 | BA.1 | BA.4/5 | CH.1.1 | XBB | XBB.1.5 | |
| Specificity | Antibody | Class (RBD) | IC50 (nM) | | | | | | | | |
| Bispecific | MX2301 | III + IV | 0.014 | 0.014 | 0.032 | 0.010 | 0.011 | 0.091 | 0.022 | 0.022 | |
| Monoclonal | B2 | III | 0.025 | 0.017 | 0.120 | 0.018 | 0.039 | 3.776 | 0.256 | 0.114 | |
| | A18-448 | IV | 0.074 | 0.093 | 0.152 | 0.035 | 0.017 | 0.051 | 0.017 | 0.021 | |
| | | | XBB.2.3.2 | XBB.1.16.6 | EG.5.1 | BA.2.86 | JD.1.1 | JN.1 | JN. 1.13.1 | KP.2 | KP.3 |
| Specificity | Antibody | Class (RBD) | IC50 (nM) | | | | | | | | |
| Bispecific | MX2301 | III + IV | 0.034 | 0.025 | 0.021 | 0.016 | 0.031 | 0.023 | 0.047 | 0.033 | 0.023 |
| Monoclonal | B2 | III | 0.457 | 0.039 | 0.048 | 0.058 | 0.197 | 0.097 | 0.502 | 0.393 | 0.083 |
| | A18-448 | IV | 0.045 | 0.016 | 0.021 | 0.033 | 0.034 | 0.039 | 0.041 | 0.023 | 0.016 |

### Example 20

### Tetravalent Bispecific Antigen Binding Complexes

[8410] The neutralizing activity of monovalent and bivalent antigen binding complexes comprising A18-448 or B2 (FIG. 72) was measured as described above, and the results are shown in Table E34. The results showed that increased valency could improve A18-448 and B2 potency.

TABLE E34
Neutralizing activities comparison between monovalent and bivalent antigen binding
complexes comprising A18-448 or B2. IC50 and IC80 are expressed in nM.

| | Class | EG.5.1 | | JD.1.1 | | JN.1 | | KP.2 | |
|---|---|---|---|---|---|---|---|---|---|
| Antibody | (RBD) | IC50 | IC80 | IC50 | IC80 | IC50 | IC80 | IC50 | IC80 |
| 448 monovalent | IV | 0.637 | 4.406 | 1.390 | 7.198 | 0.548 | 5.165 | 0.518 | 5.005 |
| 448 bivalent | IV | 0.017 | 0.081 | 0.025 | 0.088 | 0.026 | 0.093 | 0.025 | 0.085 |
| B2 monovalent | III | 1.205 | 39.533 | 37.029 | >67 | 1.455 | 21.887 | 27.375 | >67 |
| B2 bivalent | III | 0.144 | 0.771 | 0.466 | 1.413 | 0.105 | 0.524 | 0.564 | 2.490 |

### Example 21

### Tetravalent Bispecific and Trispecific Antigen Binding Complexes

[8411] MX2299 and MX2265 were developed (FIG. 69), MX2299 is tetravalent and bispecific and comprises E12 and A18-448, MX2265 is tetravalent and trispecific and comprises E12, A18-448, and B2.

[8412] The neutralizing activity of MX2301, MX2299, MX2265, MX2242, and of monoclonal antibodies (E12, G11, E8, A18-448, B2, ADG20, and AZD3152) was measured as described above, and the results are shown in Table E35. The results showed that E12 lost activity against KP.3, while B2 and A18-448 remained active, MX2301, MX2299, MX2265, MX2242 (all multispecific) remained active against KP. 3 with sub-nanomolar IC50 potency, MX2301, MX2299, MX2265, MX2242 potently neutralized KP.3.

[8413] Bispecific MX2301 potently neutralizes all variants, including KP.3. Recent SARS-CoV-2 variants display substantial variation in class 1 binding region, MX2301 has two copies of new B2 binder (class III) and two copies of A18-448 (class IV). Both are highly potent against newer variants. The conserved nature of these class III and IV binders makes the molecules less likely to be impacted by escape mutations. Further, MX2301 showed a high titer when produced in cells.

TABLE E35
Neutralizing activities comparison between MX2301,
MX2299, MX2265, MX2242, E12, G11, E8, A18-448, B2,
ADG20, and AZD3152. IC50 and IC80 are expressed in nM.

| | | | KP.2 | KP.3 |
|---|---|---|---|---|
| Specificity | Antibody | Class (RBD) | IC50 (nM) | |
| Monoclonal | E12 | I | 4.624 | >67 |
| | G11 | II | >67 | >67 |
| | E8 | III | >67 | >67 |
| | A18-448 | IV | 0.036 | 0.017 |
| | B2 | III | 0.409 | 0.083 |
| | ADG20 | I/IV | >67 | >67 |
| | AZD3152 | I | >67 | >67 |
| Bispecific | MX2299 | I + IV | 0.048 | 0.054 |
| | MX2301 | III + IV | 0.033 | 0.023 |
| Trispecific | MX2265 | I + III + IV | 0.032 | 0.016 |
| Tetraspecific | MX2242 | I + II + III + | 0.047 | 0.041 |
| | | IV | | |

### Example 22

### Expression of MX2301 and MX2299

[8414] MX2301 (FIG. 68) and MX2299 (FIG. 69) were expressed in Expi293 cells (Life Technology). The eukaryotic expression vectors were transfected into Expi293 cells using Expi293 transfection reagent (Life Technology) as previously reported (DOI: 10.1126/science.aan8630). The transfected cells were cultured in a shaker incubator at 120 rpm. 37° C. 8% CO2 for 6 days.

[8415] Culture supernatants were harvested and filtered, the antigen binding polypeptide complexes were purified over a Protein A (GE Health Science) column. Each antigen binding polypeptide complex was eluted with IgG elution buffer (Pierce), immediately buffer exchanged with phosphate buffered saline (PBS) and concentrated using Centricon Plus-70 (Millipore Sigma) membrane filter unit. After concentration, each antigen binding polypeptide complex was applied to a Superdex 200 16/600 size exclusion chromatography column (SEC) (Cytiva) to remove aggregates and different species in the preparation, SEC was performed using 10 mM Histidine pH 6.0 and 150 mM NaCl as running buffer, and fractions were collected and pooled in 10 mM Histidine, pH 6.0/150 mM NaCl. Expression titers were measured by Octet BLI using protein A biosensor. Size exclusion chromatography profiles for both MX2301 and MX2299 are shown in FIGS. 73A-73B, and expression titers for both MX2301 and MX2299 are shown in Table E36.

[8416] CHOK1 cell lines for stable expression of MX2301 and MX2299 were made.

TABLE E36
Production of MX2301 and MX2299 in Expi293 cells.

| | | | Yield after | Yield after |
|---|---|---|---|---|
| | Isoelectric | | protein A | SEC |
| ID | Point | Cells | (mg/L) | (mg/L) |
| MX2299 | 6.68 | Expi293 | 34.35 | 11.01 |
| MX2301 | 7.30 | Expi293 | 41.90 | 18.55 |

### Example 23

### Neutralization Activity of MX2301 and MX2299

[8417] The neutralizing activity of antigen binding complexes MX2301 (FIG. 68) and MX2299 (FIG. 69) was measured as described above, and the results are shown in Table E37.

TABLE E37
Neutralizing activities of MX2301 and MX2299. IC50 and IC80 are expressed in nM.

| nM | | | D614G | B.1.427 | B.1.429 | B.1.351 | B.1.1.7 | B.1.617.1 | B.1.617.2 | P.1 |
|---|---|---|---|---|---|---|---|---|---|---|
| Specificity | Antibody | Class (RBD) | IC50 | IC50 | IC50 | IC50 | IC50 | IC50 | IC50 | IC50 |
| Bispecific | MX2299 | I + IV | 0.027 | 0.137 | 0.023 | 0.009 | 0.215 | 0.021 | 0.128 | 0.03 |
| | MX2301 | III + IV | 0.02 | 0.09 | 0.015 | 0.009 | 0.182 | 0.01 | 0.091 | 0.039 |
| nM | | | B.1.526 | B.1.525 | B.1.621 | BA.1 | BA.4/5 | CH.1.1 | XBB | XBB.1.5 |
| Specificity | Antibody | Class (RBD) | IC50 | IC50 | IC50 | IC50 | IC50 | IC50 | IC50 | IC50 |
| Bispecific | MX2299 | I + IV | 0.022 | 0.033 | 0.062 | 0.006 | 0.007 | 0.025 | 0.009 | 0.008 |
| | MX2301 | III + IV | 0.014 | 0.014 | 0.032 | 0.01 | 0.011 | 0.091 | 0.022 | 0.022 |
| nM | | | XBB.2.3.2 | XBB.1.16.6 | EG.5.1 | BA.2.86 | JD.1.1 | JN.1 | JN.1.13.1 | KP.2 |
| Specificity | Antibody | Class (RBD) | IC50 | IC50 | IC50 | IC50 | IC50 | IC50 | IC50 | IC50 |
| Bispecific | MX2299 | I + IV | 0.014 | 0.021 | 0.016 | 0.009 | 0.035 | 0.025 | 0.027 | 0.048 |
| | MX2301 | III + IV | 0.034 | 0.025 | 0.021 | 0.016 | 0.031 | 0.023 | 0.047 | 0.033 |

### Example 24

### Expression of MX2265

[8418] MX2265 (FIG. 69) was expressed in CHOK1 cells (stable cell line). Protein A (GE Health Science) column and Superdex 200 16/600 size exclusion chromatography column (SEC) (Cytiva), were performed as described in Example 22. Expression titers were measured by Octet BLI using protein A biosensor. Size exclusion chromatography profile for MX2265 is shown in FIG. 74, and expression titer for MX2265 is shown in Table E38.

TABLE E38
Production of MX2265 in CHOK1 cells.

| | PI | | mg/L | mg/L | |
|---|---|---|---|---|---|
| MX | Isoelectric | | Protein A | After SEC | % |
| number | point | Cell line | yield | yield | aSEC |
| MX2265 | 6.96 | CHOK1 | 181 | 72 | 93 |

### Example 25

### Neutralization Activity of MX2265

[8419] The neutralizing activity of antigen binding complex MX2265 (FIG. 69) was measured as described above, and the results are shown in Table E39.

TABLE E39
Neutralizing activities of MX2265. IC50 and IC80 are expressed in nM.

| | | nM | WA1 | | D614G | | B.1.427 | | B.1.429 | |
|---|---|---|---|---|---|---|---|---|---|---|
| Specificity | Antibody | Class (RBD) | IC50 | IC80 | IC50 | IC80 | IC50 | IC80 | IC50 | IC80 |
| Trispecific | MX2265 | I + III + IV | 0.099 | 0.304 | 0.038 | 0.102 | 0.096 | 0.244 | 0.057 | 0.105 |
| | | nM | P.2 | | B.1.351 | | B.1.1.7 | | B.1.617.1 | |
| Specificity | Antibody | Class (RBD) | IC50 | IC80 | IC50 | IC80 | IC50 | IC80 | IC50 | IC80 |
| Trispecific | MX2265 | I + III + IV | 0.059 | 0.116 | 0.02 | 0.06 | 0.075 | 0.132 | 0.071 | 0.174 |
| | | nM | B.1.617.2 | | P.1 | | B.1.526 | | B.1.525 | |
| Specificity | Antibody | Class (RBD) | IC50 | IC80 | IC50 | IC80 | IC50 | IC80 | IC50 | IC80 |
| Trispecific | MX2265 | I + III + IV | 0.244 | 0.454 | 0.066 | 0.112 | 0.055 | 0.102 | 0.07 | 0.117 |
| | | nM | B.1.621 | | BA.1 | | BA.4/5 | | CH.1.1 | |
| Specificity | Antibody | Class (RBD) | IC50 | IC80 | IC50 | IC80 | IC50 | IC80 | IC50 | IC80 |
| Trispecific | MX2265 | I + III + IV | 0.092 | 0.176 | 0.006 | 0.023 | 0.004 | 0.017 | 0.022 | 0.059 |
| | | nM | XBB | | XBB.1.5 | | XBB.2.3.2 | | XBB.1.16.6 | |
| Specificity | Antibody | Class (RBD) | IC50 | IC80 | IC50 | IC80 | IC50 | IC80 | IC50 | IC80 |
| Trispecific | MX2265 | I + III + IV | 0.018 | 0.055 | 0.008 | 0.031 | 0.037 | 0.079 | 0.031 | 0.078 |
| | | nM | EG.5.1 | | BA.2.86 | | JD.1.1 | | JN.1 | |
| Specificity | Antibody | Class (RBD) | IC50 | IC80 | IC50 | IC80 | IC50 | IC80 | IC50 | IC80 |
| Trispecific | MX2265 | I + III + IV | 0.007 | 0.04 | 0.011 | 0.045 | 0.017 | 0.08 | 0.014 | 0.051 |

| | | nM | JN.1.13.1 | | KP.2 | | KP.3 | |
|---|---|---|---|---|---|---|---|---|
| Specificity | Antibody | Class (RBD) | IC50 | IC80 | IC50 | IC80 | IC50 | IC80 |
| Trispecific | MX2265 | I + III + IV | 0.05 | 0.107 | 0.032 | 0.112 | 0.016 | 0.06 |

### Example 26

### Expression of MX2242

[8420] MX2242 (FIG. 43 and FIG. 75) was expressed in CHOK1 cells (stable cell line). Protein A (GE Health Science) column and Superdex 200 16/600 size exclusion chromatography column (SEC) (Cytiva), were performed as described in Example 22. Expression titers were measured by Octet BLI using protein A biosensor. Size exclusion chromatography profile for MX2242 is shown in FIG. 76, and expression titer for MX2242 is shown in Table E40.

TABLE E40
Production of MX2242 in CHOK1 cells.

| | | | mg/L | mg/L | % |
|---|---|---|---|---|---|
| MX | Isoelectric | | Protein A | After SEC | aSEC |
| number | Point | Cell line | yield | yield | results |
| MX2242 | 7.82 | CHOK1 | 252 | 106 | 98% |

### Example 27

### Neutralization Activity of MX2242

[8421] The neutralizing activity of antigen binding complex MX2242 (FIG. 43 and FIG. 75) was measured as described above, and the results are shown in Table E41.

TABLE E41
Neutralizing activities of MX2242. IC50 and IC80 are expressed in nM.

| | | nM | WA1 | | D614G | | B.1.427 | | B.1.429 | |
|---|---|---|---|---|---|---|---|---|---|---|
| Specificity | Antibody | Class (RBD) | IC50 | IC80 | IC50 | IC80 | IC50 | IC80 | IC50 | IC80 |
| Tetraspecific | MX2242 | I + II + | 0.172 | 0.614 | 0.078 | 0.13 | 0.098 | 0.423 | 0.079 | 0.129 |
| | | III + IV | | | | | | | | |
| | | nM | P.2 | | B.1.351 | | B.1.1.7 | | B.1.617.1 | |
| Specificity | Antibody | Class (RBD) | IC50 | IC80 | IC50 | IC80 | IC50 | IC80 | IC50 | IC80 |
| Tetraspecific | MX2242 | I + II + | 0.105 | 0.221 | 0.057 | 0.108 | 0.082 | 0.264 | 0.114 | 0.269 |
| | | III + IV | | | | | | | | |
| | | nM | B.1.617.2 | | P.1 | | B.1.526 | | B.1.525 | |
| Specificity | Antibody | Class (RBD) | IC50 | IC80 | IC50 | IC80 | IC50 | IC80 | IC50 | IC80 |
| Tetraspecific | MX2242 | I + II + | 0.331 | 0.509 | 0.11 | 0.208 | 0.075 | 0.126 | 0.09 | 0.141 |
| | | III + IV | | | | | | | | |
| | | nM | B.1.621 | | BA.1 | | BA.4/5 | | CH.1.1 | |
| Specificity | Antibody | Class (RBD) | IC50 | IC80 | IC50 | IC80 | IC50 | IC80 | IC50 | IC80 |
| Tetraspecific | MX2242 | I + II + | 0.159 | 0.241 | 0.009 | 0.043 | 0.003 | 0.022 | 0.048 | 0.1 |
| | | III + IV | | | | | | | | |
| | | nM | XBB | | XBB.1.5 | | XBB.2.3.2 | | XBB.1.16.6 | |
| Specificity | Antibody | Class (RBD) | IC50 | IC80 | IC50 | IC80 | IC50 | IC80 | IC50 | IC80 |
| Tetraspecific | MX2242 | I + II + | 0.024 | 0.052 | 0.02 | 0.058 | 0.051 | 0.088 | 0.059 | 0.146 |
| | | III + IV | | | | | | | | |
| | | nM | EG.5.1 | | BA.2.86 | | JD.1.1 | | JN.1 | |
| Specificity | Antibody | Class (RBD) | IC50 | IC80 | IC50 | IC80 | IC50 | IC80 | IC50 | IC80 |
| Tetraspecific | MX2242 | I + II + | 0.011 | 0.045 | 0.039 | 0.159 | 0.027 | 0.062 | 0.1 | 0.226 |
| | | III + IV | | | | | | | | |

| | | nM | JN.1.13.1 | | KP.2 | | KP.3 | |
|---|---|---|---|---|---|---|---|---|
| Specificity | Antibody | Class (RBD) | IC50 | IC80 | IC50 | IC80 | IC50 | IC80 |
| Tetraspecific | MX2242 | I + II + | 0.082 | 0.192 | 0.047 | 0.181 | 0.041 | 0.126 |
| | | III + IV | | | | | | |

### Example 28

### Expression of MX2242 and MX2241

[8422] MX2242 and MX2241 (FIG. 43 and FIG. 75) were expressed in CHOK1 cells (stable cell line). Protein A (GE Health Science) column and Superdex 200 16/600 size exclusion chromatography column (SEC) (Cytiva), were performed as described in Example 22. Further MES buffer (pH6) was added after elution buffer to neutralize the pH before SEC and after Protein A purification. Expression titers were measured by Octet BLI using protein A biosensor. Size exclusion chromatography profiles for MX2242 and MX2241 are shown in FIGS. 77A-77B, and expression titers for MX2242 and MX2241 are shown in Table E42.

TABLE E42
Production of MX2242 and MX2241 in CHOK1 cells.

| | | Protein A | After MES | After SEC | Total |
|---|---|---|---|---|---|
| MX number | Cell line | yield | yield | yield | purified |
| MX2241 | CHOK1 | 252 mg/L | 255 mg/L | 84 mg/L | 21 mg |
| MX2242 | CHOK1 | 256 mg/L | 231 mg/L | 106 mg/L | 26.6 mg |

[8423] The fractions were then analyzed on reduced and non-reduced SDS-PAGE to identify the fractions that contained the antigen binding polypeptide complexes by using standard procedures, FIG. 78 shows a Western Blot analysis of the produced antigen binding polypeptide complexes.

### Example 29

### Expression of MX2263, MX2264, MX2265, MX2266, and MX2269

[8424] MX2263, MX2264, MX2265, MX2266, and MX2269 (FIG. 43, FIG. 69, and FIG. 79) were expressed in CHOK1 cells (stable cell line). Protein A (GE Health Science) column and Superdex 200 16/600 size exclusion chromatography column (SEC) (Cytiva), were performed as described in Example 22. Further MES buffer (pH6) was added after elution buffer to neutralize the pH before SEC and after Protein A purification. Expression titers were measured by Octet BLI using protein A biosensor. Size exclusion chromatography profiles for MX2263, MX2264, MX2265, MX2266, and MX2269 are shown in FIGS. 80A-80E, and expression titers for MX2263, MX2264, MX2265, MX2266, and MX2269 are shown in Table E43.

TABLE E43
Production of MX2263, MX2264, MX2265, MX2266, and
MX2269 in CHOK1 cells.

| | | mg/L | mg/L | mg/L | mg |
|---|---|---|---|---|---|
| | | Protein A | After MES | After SEC | Total |
| MX number | Cell line | yield | yield | yield | purified |
| MX2263 | CHOK1 | 222 | 219 | 112 | 28 |
| MX2264 | CHOK1 | 160 | 161 | 52 | 13 |
| MX2265 | CHOK1 | 181 | 184 | 72 | 18 |
| MX2266 | CHOK1 | 198 | 205 | 112 | 28 |
| MX2269 | CHOK1 | 178 | 167 | 80 | 20 |

[8425] The fractions were then analyzed on reduced and non-reduced SDS-PAGE to identify the fractions that contained the antigen binding polypeptide complexes by using standard procedures, FIG. 81 shows a Western Blot analysis of the produced antigen binding polypeptide complexes.

### Example 30

### Neutralization Activity of MX2148, MX2168, MX2170, MX2242, MX2183, MX2179, MX2180, and MX2269

[8426] The neutralizing activity of antigen binding complexes MX2148, MX2168, MX2170, MX2242, MX2183, MX2179, MX2180, and MX2269 (FIG. 43) was measured as described above, and compared to the neutralizing activity of five monoclonal antigen binding proteins: MX2382 (A18-448), MX1852 (G11), MX1091 (E12), MX2270 (B2) and MX2271 (B2_N89Q). The results are shown in Table E44.

TABLE E44
Neutralizing activities of MX2148, MX2168, MX2170, MX2242, MX2183, MX2179,
MX2180, and MX2269, compared to neutralizing activity of MX2382 (A18-448), MX1852 (G11),
MX1091 (E12), MX2270 (B2) and MX2271 (B2_N89Q). IC50 and IC80 are expressed in nM.

| | | | JN.1 | | HV.1 | | Sars-Cov1 | |
|---|---|---|---|---|---|---|---|---|
| Specificity | RBD Class | Antibody | IC50 | IC80 | IC50 | IC80 | IC50 | IC80 |
| Tetraspecific | I + II + III + | MX2148 | 0.0957 | 0.3431 | 0.0341 | 0.0763 | 0.3206 | 0.865 |
| | IV | | | | | | | |
| | I + II + III + | MX2168 | 0.1756 | 0.3907 | 0.0777 | 0.1681 | 0.237 | 0.7252 |
| | IV | | | | | | | |
| | I + II + III + | MX2170 | 0.1375 | 0.3305 | 0.0458 | 0.1187 | 0.1864 | 0.525 |
| | IV | | | | | | | |
| | I + II + III + | MX2242 | 0.0997 | 0.226 | 0.0482 | 0.0895 | 0.1582 | 0.5055 |
| | IV | | | | | | | |
| | I + II + III + | MX2183 | 0.22 | 0.4965 | 0.0761 | 0.1807 | 0.5756 | 1.1888 |
| | IV | | | | | | | |
| | I + II + III + | MX2179 | 0.106 | 0.2344 | 0.1054 | 0.1901 | 0.5293 | 1.589 |
| | IV | | | | | | | |
| | I + II + III + | MX2180 | 0.1134 | 0.2478 | 0.1199 | 0.2317 | 0.4588 | 1.8313 |
| | IV | | | | | | | |
| | I + II + III + | MX2269 | 0.1079 | 0.2283 | 0.0913 | 0.1785 | 0.3419 | 1.1822 |
| | IV | | | | | | | |
| Monoclonal | IV | A18-448 | 0.0461 | 0.1162 | 0.0321 | 0.0941 | 0.0607 | 0.157 |
| | | MX2382 | | | | | | |
| | II | G11 | >67 | >67 | 4.4424 | 12.5837 | >67 | >67 |
| | | MX1852 | | | | | | |
| | I | E12 | 8.311 | 32.0835 | 5.5419 | 20.5626 | >67 | >67 |
| | | MX1091 | | | | | | |
| | III | B2 | 0.1268 | 0.7354 | 0.2674 | 1.7245 | 4.3119 | 26.086 |
| | | MX2270 | | | | | | |
| | III | B2_N89Q | 0.7621 | 2.2904 | 1.4345 | 4.703 | 12.9188 | 75.5519 |
| | | MX2271 | | | | | | |

[8427] These results showed that B2 swap for E8 does not change the neutralization profile of the antigen binding complexes; glycosylation mutations do not affect the neutralization profile of the antigen binding complexes; and no synergy was observed with tetraspecific antigen binding complexes compared to A18-448 monoclonal antigen binding protein.

### Example 31

### Neutralization Activity of MX2263, MX2264, MX2265, MX2266, and MX2148

[8428] The pan-sarbecovirus neutralizing activity of antigen binding complexes MX2263, MX2264, MX2265, MX2266, and MX2148 (FIG. 43, FIG. 69, and FIG. 79) was measured as described above. The results are shown in Tables E45 and E46.

TABLE E45
Pan-sarbecovirus neutralizing activities of MX2263, MX2264, MX2265, MX2266, and
MX2148. IC50 and IC80 are expressed in nM.

| | | | clade 1a | | | | | | | | | |
|---|---|---|---|---|---|---|---|---|---|---|---|---|
| | | | | | Bat CoV | | Bat CoV | | Bat CoV | | Bat CoV | |
| MX | | | SARS-CoV-1 | | WIV1 | | LYRall | | Rs4231 | | RsSHC014 | |
| Specificity | Antibody | Class (RBD) | IC50 | IC80 | IC50 | IC80 | IC50 | IC80 | IC50 | IC80 | IC50 | IC80 |
| Tetraspecific | MX2148 | I + II + | 0.38 | 0.923 | 0.231 | 1.347 | 0.17 | 0.889 | 0.159 | 1.424 | 0.169 | 0.843 |
| | | III + IV | | | | | | | | | | |
| Trispecific | MX2263 | I + III + | 0.047 | 0.198 | 0.088 | 0.601 | 0.07 | 0.266 | 0.078 | 0.786 | 0.204 | 0.472 |
| | | IV | | | | | | | | | | |
| | MX2264 | I + III + | 0.019 | 0.075 | 0.088 | 0.568 | 0.045 | 0.122 | 0.067 | 0.444 | 0.087 | 0.481 |
| | | IV | | | | | | | | | | |
| | MX2265 | I + III + | 0.024 | 0.146 | 0.161 | 0.444 | 0.063 | 0.25 | 0.066 | 0.429 | 0.147 | 0.853 |
| | | IV | | | | | | | | | | |
| | MX2266 | I + III + | 0.025 | 0.104 | 0.048 | 0.423 | 0.034 | 0.228 | 0.07 | 0.558 | 0.244 | 0.675 |
| | | IV | | | | | | | | | | |
| Bispecific | MX2299 | I + IV | 0.18 | 0.598 | 0.089 | 0.445 | 0.081 | 0.246 | 0.07 | 0.675 | 0.065 | 0.476 |
| | MX2300 | I + IV | 0.045 | 0.192 | 0.036 | 0.165 | 0.034 | 0.112 | 0.025 | 0.425 | 0.022 | 0.118 |
| | MX2301 | III + IV | 0.031 | 0.113 | 0.044 | 0.237 | 0.045 | 0.333 | 0.058 | 0.689 | 0.055 | 0.378 |
| | MX2302 | III + IV | 0.057 | 0.152 | 0.047 | 0.273 | 0.039 | 0.083 | 0.026 | 0.352 | 0.052 | 0.17 |
| Monospecific | A18-448 | IV | 0.033 | 0.11 | 0.08 | 0.469 | 0.039 | 0.124 | 0.055 | 0.354 | 0.036 | 0.145 |
| | G11 | II | >67 | >67 | >67 | >67 | N.T. | N.T. | N.T. | N.T. | >67 | >67 |
| | E12 | I | >67 | >67 | >67 | >67 | >67 | >67 | >67 | >67 | >67 | >67 |
| | B2 | III | 0.838 | 2.272 | >67 | >67 | >67 | >67 | >67 | >67 | >67 | >67 |
| | E8 | III | >67 | >67 | >67 | >67 | N.T. | N.T. | N.T. | N.T. | >67 | >67 |

| | | | clade 1b | | | | | |
|---|---|---|---|---|---|---|---|---|
| | | | Pangolin | | Pangolin CoV | | Pangolin CoV | |
| MX | | | CoV GD | | GX-P2V | | GX-P5L | |
| Specificity | Antibody | Class (RBD) | IC50 | IC80 | IC50 | IC80 | IC50 | IC80 |
| Tetraspecific | MX2148 | I + II + | 0.106 | 0.263 | 0.192 | 3.01 | 0.535 | 2.878 |
| | | III + IV | | | | | | |
| Trispecific | MX2263 | I + III + IV | 0.047 | 0.233 | 0.452 | 2.811 | 0.462 | 4.15 |
| | MX2264 | I + III + IV | 0.046 | 0.208 | 3.195 | 39.676 | 1.373 | 27.572 |
| | MX2265 | I + III + IV | 0.064 | 0.216 | 0.284 | 1.783 | 0.132 | 1.658 |
| | MX2266 | I + III + IV | 0.08 | 0.188 | 3.592 | 56.288 | 5.765 | 53.601 |
| Bispecific | MX2299 | I + IV | 0.04 | 0.189 | 0.253 | 1.135 | 0.069 | 0.557 |
| | MX2300 | I + IV | 0.032 | 0.157 | >67 | >67 | >67 | >67 |
| | MX2301 | III + IV | 0.007 | 0.079 | >67 | >67 | >67 | >67 |
| | MX2302 | III + IV | 0.016 | 0.191 | >67 | >67 | >67 | >67 |
| Monospecific | A18-448 | IV | 0.047 | 0.236 | >67 | >67 | >67 | >67 |
| | G11 | II | 0.062 | 0.116 | 13.6 | 47.6 | 17.7 | 49 |
| | E12 | I | 0.134 | 0.763 | 0.05 | 0.354 | 0.036 | 0.353 |
| | B2 | III | 0.079 | 0.466 | >67 | >67 | >67 | >67 |
| | E8 | III | 0.022 | 0.046 | >67 | >67 | >67 | >67 |

TABLE E46
Pan-sarbecovirus neutralizing activities of MX2263, MX2264, MX2265, MX2266, and
MX2148. IC50 and IC80 are expressed in nM.

| | | | SARS-Cov2 | | | | Sars Cov1 clade 1a | | | | | |
|---|---|---|---|---|---|---|---|---|---|---|---|---|
| | | | JN.1 | | HV.1 | | Sars-Cov1 | | Bat CoV WIV1 | | Bat CoV LYR all | |
| Specificity | RBD Class | Antibody | IC50 | IC80 | IC50 | IC80 | IC50 | IC80 | IC50 | IC80 | IC50 | IC80 |
| Trispecific | I + III + IV | MX2263 | 0.013 | 0.057 | 0.024 | 0.082 | 0.047 | 0.198 | 0.088 | 0.601 | 0.070 | 0.266 |
| | I + III + IV | MX2264 | 0.016 | 0.055 | 0.025 | 0.075 | 0.019 | 0.075 | 0.088 | 0.568 | 0.045 | 0.122 |
| | I + III + IV | MX2265 | 0.014 | 0.051 | 0.021 | 0.067 | 0.024 | 0.146 | 0.161 | 0.444 | 0.063 | 0.250 |
| | I + III + IV | MX2266 | 0.014 | 0.055 | 0.011 | 0.055 | 0.025 | 0.104 | 0.048 | 0.423 | 0.034 | 0.228 |
| | I + II + III + | MX2148 | 0.066 | 0.313 | 0.012 | 0.183 | 0.732 | NT | NT | NT | NT | NT |
| | IV | | | | | | | | | | | |

| | Sars Cov1 clade 1a | | | | Sars Cov1 clade 1b | | | | | |
|---|---|---|---|---|---|---|---|---|---|---|
| | Bat CoV | | Bat CoV | | Pangolin CoV | | Pangolin CoV | | Pangolin CoV | |
| | Rs-4231 | | RsSHC014 | | GD | | GX-P2V | | GX-P5L | |
| Specificity | IC50 | IC80 | IC50 | IC80 | IC50 | IC80 | IC50 | IC80 | IC50 | IC80 |
| Trispecific | 0.078 | 0.786 | 0.204 | 0.472 | 0.047 | 0.233 | 0.452 | 2.811 | 0.462 | 4.150 |
| | 0.067 | 0.444 | 0.087 | 0.481 | 0.046 | 0.208 | 3.195 | 39.676 | 1.373 | 27.572 |
| | 0.066 | 0.429 | 0.147 | 0.853 | 0.064 | 0.216 | 0.284 | 1.783 | 0.132 | 1.658 |
| | 0.070 | 0.558 | 0.244 | 0.675 | 0.080 | 0.188 | 3.592 | 56.288 | 5.765 | 53.601 |
| Tetraspecific | NT | NT | NT | NT | 0.106 | 0.263 | 0.192 | 3.010 | 0.535 | 2.878 |

[8429] These results showed strong neutralization with tri-specifics antigen binding complexes across all clade 1a and 1b Cov1 strains. Further, these results showed that position of E12 affects neutralization in clade 1b strains.

### Example 32

### Full Panel Neutralization Activity of MX2299, MX2301, MX2265, MX2242 and MX2148

[8430] The full panel neutralizing activity of monoclonal antigen binding proteins comprising E12, G11, E8, A18-448, B2, and ADG20; bispecific antigen binding complexes MX2299 and MX2301; trispecific antigen binding complex MX2265; and tetraspecific antigen binding complex MX2242 was measured as described above. The results are shown in Table E47.

TABLE E47
Full panel neutralizing activities of E12, G11, E8, A18-448, B2, ADG20, MX2299, MX2301,
MX2265, and MX2242. IC50 and IC80 are expressed in nM.

| nM | | | WA1 | | D614G | | B.1.427 | | B.1.429 | |
|---|---|---|---|---|---|---|---|---|---|---|
| Specificity | Antibody | Class (RBD) | IC50 | IC80 | IC50 | IC80 | IC50 | IC80 | IC50 | IC80 |
| Monoclonal | E12 | I | 0.218 | 0.387 | 0.048 | 0.220 | 0.129 | 0.463 | 0.104 | 0.329 |
| | G11 | II | 0.823 | 2.048 | 0.189 | 0.442 | 0.406 | 0.819 | 0.136 | 0.285 |
| | E8 | III | 0.037 | 0.102 | 0.009 | 0.022 | 0.022 | 0.091 | 0.011 | 0.029 |
| | A18-448 | IV | 0.277 | 0.482 | 0.039 | 0.141 | 0.108 | 0.334 | 0.077 | 0.172 |
| | B2 | III | 0.124 | 0.291 | 0.025 | 0.068 | 0.309 | 0.461 | 0.022 | 0.079 |
| | ADG20 | I/IV | 0.047 | 0.197 | 0.019 | 0.065 | 0.072 | 0.162 | 0.014 | 0.061 |
| Bispecific | MX2299 | I + IV | 0.079 | 0.266 | 0.027 | 0.056 | 0.137 | 0.252 | 0.023 | 0.070 |
| | MX2301 | III + IV | 0.075 | 0.234 | 0.020 | 0.040 | 0.090 | 0.250 | 0.015 | 0.030 |
| Trispecific | MX2265 | I + III + IV | 0.0992 | 0.3042 | 0.038 | 0.102 | 0.096 | 0.244 | 0.057 | 0.105 |
| Tetraspecific | MX2242 | I + II + III + | 0.1720 | 0.6139 | 0.078 | 0.130 | 0.098 | 0.423 | 0.079 | 0.129 |
| | | IV | | | | | | | | |
| nM | | | P.2 | | B.1.351 | | B.1.1.7 | | B.1.617.1 | |
| Specificity | Antibody | Class (RBD) | IC50 | IC80 | IC50 | IC80 | IC50 | IC80 | IC50 | IC80 |
| Monoclonal | E12 | I | 0.124 | 0.392 | 0.021 | 0.102 | 0.071 | 0.285 | 0.093 | 0.347 |
| | G11 | II | 0.658 | 1.998 | 0.160 | 0.711 | 0.252 | 0.644 | 0.092 | 0.423 |
| | E8 | III | 0.009 | 0.036 | 0.009 | 0.024 | 0.016 | 0.055 | 0.009 | 0.044 |
| | A18-448 | IV | 0.120 | 0.346 | 0.038 | 0.145 | 0.108 | 0.351 | 0.070 | 0.302 |
| | B2 | III | 0.041 | 0.113 | 0.014 | 0.037 | 0.387 | 1.188 | 0.040 | 0.111 |
| | ADG20 | I/IV | 0.034 | 0.121 | 0.011 | 0.050 | 0.106 | 0.424 | 0.015 | 0.071 |
| Bispecific | MX2299 | I + IV | 0.028 | 0.134 | 0.009 | 0.019 | 0.215 | 0.895 | 0.021 | 0.122 |
| | MX2301 | III + IV | 0.026 | 0.064 | 0.009 | 0.020 | 0.182 | 0.699 | 0.010 | 0.044 |
| Trispecific | MX2265 | I + III + IV | 0.059 | 0.116 | 0.020 | 0.060 | 0.075 | 0.132 | 0.071 | 0.174 |
| Tetraspecific | MX2242 | I + II + III + | 0.105 | 0.221 | 0.057 | 0.108 | 0.082 | 0.264 | 0.114 | 0.269 |
| | | IV | | | | | | | | |
| nM | | | B.1.617.2 | | P.1 | | B.1.526 | | B.1.525 | |
| Specificity | Antibody | Class (RBD) | IC50 | IC80 | IC50 | IC80 | IC50 | IC80 | IC50 | IC80 |
| Monoclonal | E12 | I | 0.169 | 0.874 | 0.096 | 0.329 | 0.101 | 0.317 | 0.122 | 0.360 |
| | G11 | II | 0.160 | 1.027 | 0.475 | 1.222 | 0.612 | 2.082 | 0.443 | 1.320 |
| | E8 | III | 0.113 | 0.245 | 0.018 | 0.055 | 0.009 | 0.023 | 0.015 | 0.034 |
| | A18-448 | IV | 0.238 | 0.888 | 0.078 | 0.296 | 0.074 | 0.237 | 0.093 | 0.323 |
| | B2 | III | 0.124 | 0.316 | 0.062 | 0.304 | 0.025 | 0.067 | 0.017 | 0.079 |
| | ADG20 | I/IV | 0.110 | 0.118 | 0.021 | 0.117 | 0.019 | 0.081 | 0.019 | 0.101 |
| Bispecific | MX2299 | I + IV | 0.128 | 0.308 | 0.030 | 0.141 | 0.022 | 0.058 | 0.033 | 0.088 |
| | MX2301 | III + IV | 0.091 | 0.274 | 0.039 | 0.115 | 0.014 | 0.030 | 0.014 | 0.043 |
| Trispecific | MX2265 | I + III + IV | 0.244 | 0.454 | 0.066 | 0.112 | 0.055 | 0.102 | 0.070 | 0.117 |
| Tetraspecific | MX2242 | I + II + III + | 0.331 | 0.509 | 0.110 | 0.208 | 0.075 | 0.126 | 0.090 | 0.141 |
| | | IV | | | | | | | | |
| nM | | | B.1.621 | | BA.1 | | BA.4/5 | | CH.1.1 | |
| Specificity | Antibody | Class (RBD) | IC50 | IC80 | IC50 | IC80 | IC50 | IC80 | IC50 | IC80 |
| Monoclonal | E12 | I | 0.106 | 0.348 | 0.013 | 0.046 | 0.022 | 0.059 | 0.064 | 0.276 |
| | G11 | II | 0.578 | 2.113 | 0.372 | 2.269 | 0.197 | 0.758 | 43.132 | >67 |
| | E8 | III | 0.016 | 0.055 | 0.074 | 0.836 | 0.005 | 0.014 | 40.527 | >67 |
| | A18-448 | IV | 0.152 | 0.390 | 0.035 | 0.128 | 0.017 | 0.050 | 0.051 | 0.185 |
| | B2 | III | 0.120 | 0.363 | 0.018 | 0.087 | 0.039 | 0.115 | 3.776 | 10.493 |
| | ADG20 | I/IV | 0.026 | 0.131 | 13.904 | >67 | >67 | >67 | 13.726 | >67 |
| Bispecific | MX2299 | I + IV | 0.062 | 0.238 | 0.006 | 0.018 | 0.007 | 0.019 | 0.025 | 0.082 |
| | MX2301 | III + IV | 0.032 | 0.119 | 0.010 | 0.024 | 0.011 | 0.026 | 0.091 | 0.320 |
| Trispecific | MX2265 | I + III + IV | 0.092 | 0.176 | 0.006 | 0.023 | 0.004 | 0.017 | 0.022 | 0.059 |
| Tetraspecific | MX2242 | I + II + III + | 0.159 | 0.241 | 0.009 | 0.043 | 0.003 | 0.022 | 0.048 | 0.100 |
| | | IV | | | | | | | | |
| nM | | | XBB | | XBB.1.5 | | XBB.2.3.2 | | XBB.1.16.6 | |
| Specificity | Antibody | Class (RBD) | IC50 | IC80 | IC50 | IC80 | IC50 | IC80 | IC50 | IC80 |
| Monoclonal | E12 | I | 0.048 | 0.196 | 0.037 | 0.126 | 0.062 | 0.431 | 0.972 | 7.134 |
| | G11 | II | 0.273 | 1.826 | 0.282 | 2.266 | 0.853 | 5.064 | 0.808 | 4.174 |
| | E8 | III | 4.775 | 65.598 | 23.740 | >67 | 25.637 | >67 | >67 | >67 |
| | A18-448 | IV | 0.017 | 0.065 | 0.021 | 0.084 | 0.045 | 0.138 | 0.016 | 0.082 |
| | B2 | III | 0.256 | 0.787 | 0.114 | 0.823 | 0.457 | 2.898 | 0.039 | 0.682 |
| | ADG20 | I/IV | 10.623 | >67 | >67 | >67 | >67 | >67 | >67 | >67 |
| Bispecific | MX2299 | I + IV | 0.009 | 0.034 | 0.008 | 0.030 | 0.014 | 0.051 | 0.021 | 0.077 |
| | MX2301 | III + IV | 0.022 | 0.092 | 0.022 | 0.093 | 0.034 | 0.179 | 0.025 | 0.107 |
| Trispecific | MX2265 | I + III + IV | 0.018 | 0.055 | 0.008 | 0.031 | 0.037 | 0.079 | 0.031 | 0.078 |
| Tetraspecific | MX2242 | I + II + III + | 0.024 | 0.052 | 0.020 | 0.058 | 0.051 | 0.088 | 0.059 | 0.146 |
| | | IV | | | | | | | | |
| nM | | | EG.5.1 | | BA.2.86 | | JD.1.1 | | JN.1 | |
| Specificity | Antibody | Class (RBD) | IC50 | IC80 | IC50 | IC80 | IC50 | IC80 | IC50 | IC80 |
| Monoclonal | E12 | I | 0.859 | 5.554 | 0.028 | 0.107 | 20.268 | >67 | 2.640 | 14.089 |
| | G11 | II | 0.394 | 2.259 | >67 | >67 | 1.040 | 5.364 | >67 | >67 |
| | E8 | III | 35.215 | >67 | >67 | >67 | 23.098 | >67 | >67 | >67 |
| | A18-448 | IV | 0.021 | 0.074 | 0.033 | 0.109 | 0.034 | 0.093 | 0.039 | 0.117 |
| | B2 | III | 0.048 | 0.769 | 0.058 | 0.389 | 0.197 | 0.984 | 0.097 | 0.451 |
| | ADG20 | I/IV | >67 | >67 | >67 | >67 | >67 | >67 | >67 | >67 |
| Bispecific | MX2299 | I + IV | 0.016 | 0.060 | 0.009 | 0.028 | 0.035 | 0.140 | 0.025 | 0.112 |
| | MX2301 | III + IV | 0.021 | 0.088 | 0.016 | 0.059 | 0.031 | 0.113 | 0.023 | 0.086 |
| Trispecific | MX2265 | I + III + IV | 0.007 | 0.040 | 0.011 | 0.045 | 0.017 | 0.080 | 0.014 | 0.051 |
| TetraspecifiC | MX2242 | I + II + III + | 0.011 | 0.045 | 0.039 | 0.159 | 0.027 | 0.062 | 0.100 | 0.226 |
| | | IV | | | | | | | | |
| nM | | | JN.1.13.1 | | KP.2 | | KP.2.3 | | LB.1 | |
| Specificity | Antibody | Class (RBD) | IC50 | IC80 | IC50 | IC80 | IC50 | IC80 | IC50 | IC80 |
| Monoclonal | E12 | I | 4.990 | 39.815 | 31.271 | >67 | >67 | >67 | 59.314 | >67 |
| | G11 | II | >67 | >67 | >67 | >67 | >67 | >67 | >67 | >67 |
| | E8 | III | >67 | >67 | >67 | >67 | >67 | >67 | >67 | >67 |
| | A18-448 | IV | 0.041 | 0.114 | 0.023 | 0.084 | 0.076 | 0.167 | 0.038 | 0.116 |
| | B2 | III | 0.502 | 2.798 | 0.393 | 1.516 | 1.517 | 5.755 | 0.684 | 4.515 |
| | ADG20 | I/IV | >67 | >67 | >67 | >67 | >67 | >67 | >67 | >67 |
| Bispecific | MX2299 | I + IV | 0.027 | 0.116 | 0.048 | 0.187 | | | | |
| | MX2301 | III + IV | 0.047 | 0.185 | 0.033 | 0.106 | 0.072 | 0.205 | 0.064 | 0.196 |
| Trispecific | MX2265 | I + III + IV | 0.050 | 0.107 | 0.032 | 0.112 | 0.043 | 0.119 | 0.049 | 0.113 |
| Tetraspecific | MX2242 | I + II + III + | 0.082 | 0.192 | 0.047 | 0.181 | 0.136 | 0.410 | 0.059 | 0.255 |
| | | IV | | | | | | | | |

| nM | | | KP.3 | | KP.3.1.1 | |
|---|---|---|---|---|---|---|
| Specificity | Antibody | Class (RBD) | IC50 | IC80 | IC50 | IC80 |
| Monoclonal | E12 | I | >67 | >67 | >67 | >67 |
| | G11 | II | >67 | >67 | >67 | >67 |
| | E8 | III | >67 | >67 | >67 | >67 |
| | A18-448 | IV | 0.016 | 0.055 | 0.046 | 0.140 |
| | B2 | III | 0.083 | 0.399 | 0.207 | 0.820 |
| | ADG20 | I/IV | >67 | >67 | >67 | >67 |
| Bispecific | MX2299 | I + IV | 0.054 | 0.177 | | |
| | MX2301 | III + IV | 0.023 | 0.070 | 0.045 | 0.118 |
| Trispecific | MX2265 | I + III + IV | 0.016 | 0.060 | 0.049 | 0.115 |
| Tetraspecific | MX2242 | I + II + III + | 0.041 | 0.126 | 0.086 | 0.254 |
| | | IV | | | | |

[8431] Further, as shown in Table E48, the multispecific antibodies remain potent against current variants. The spike amino acid differences in KP.2, KP.2.3, LB.1, KP.3, and KP.3.1.1, with respect to WA1, are shown in FIG. 82.

TABLE E48
Neutralizing activities of E12, G11, E8, A18-448, B2, ADG20, MX2301, MX2265, and
MX2242. IC50 and IC80 are expressed in nM.

| nM | | | KP.2 | | KP.2.3 | | LB.1 | | KP.3 | | KP.3.1.1 | |
|---|---|---|---|---|---|---|---|---|---|---|---|---|
| Specificity | Antibody | Class (RBD) | IC50 | IC80 | IC50 | IC80 | IC50 | IC80 | IC50 | IC80 | IC50 | IC80 |
| Monoclonal | E12 | I | 31.271 | >67 | >67 | >67 | 59.314 | >67 | >67 | >67 | >67 | >67 |
| | G11 | II | >67 | >67 | >67 | >67 | >67 | >67 | >67 | >67 | >67 | >67 |
| | E8 | III | >67 | >67 | >67 | >67 | >67 | >67 | >67 | >67 | >67 | >67 |
| | A18-448 | IV | 0.023 | 0.084 | 0.076 | 0.167 | 0.038 | 0.116 | 0.016 | 0.055 | 0.046 | 0.140 |
| | B2 | III | 0.393 | 1.516 | 1.517 | 5.755 | 0.684 | 4.515 | 0.083 | 0.399 | 0.207 | 0.820 |
| | ADG20 | I/IV | >67 | >67 | >67 | >67 | >67 | >67 | >67 | >67 | >67 | >67 |
| Bispecific | MX2301 | III + IV | 0.033 | 0.106 | 0.072 | 0.205 | 0.064 | 0.196 | 0.023 | 0.070 | 0.045 | 0.118 |
| Trispecific | MX2265 | I + III + IV | 0.032 | 0.112 | 0.043 | 0.119 | 0.049 | 0.113 | 0.016 | 0.060 | 0.049 | 0.115 |
| Tetraspecific | MX2242 | I + II + III + | 0.047 | 0.181 | 0.136 | 0.410 | 0.059 | 0.255 | 0.041 | 0.126 | 0.086 | 0.254 |
| | | IV | | | | | | | | | | |

### Example 33

### Live Virus Neutralization of MX2148

[8432] A Plaque Reduction Neutralization Test (PRNT) was perform to assay the live virus neutralization activity of MX2148, VERO E6 cells were used to test the live virus neutralization activity of MX2148 against WA-1, and Vero-TMPRSS2-ACE2 cells were used to test the live virus neutralization activity of MX2128 against B.1.1.7, B.1.351, B.1.617.2, BA.1.1.529, BA.2.86, BA.5, and JN.1. The live virus neutralization activity of MX2148 was compared with the live virus neutralization activity of E12, G11, E8, and A18-448 (Table E49). Antibody dilution series and viruses were added to target cells, and the IC50 was calculated from the PFU/ml and reported at PRNT/ml (μg/ml), MX2148_showed a PRNT50 of <0.206 against WA-1, B.1.1.7, B.1.351, B.1.617.2, BA.1.1.529, BA.2.86, and BA.5; and of 0.281 against JN.1. Each of the comparative monoclonals E12, G11, E8 and 448 had the results shown in Table E49 against the respective variants.

TABLE E49
Live virus neutralization activity of MX2148. (PRNT50 is
expressed in mg/ml; MX2148: 1 mg/ml = 5 nM).

| | | PRNT50 (mg/ml) | | | | |
|---|---|---|---|---|---|---|
| WHO | Variant | MX2148 | E12 | G11 | E8 | 448 |
| | WA-1 | <0.206 | <0.206 | <0.206 | <0.206 | <0.206 |
| Alpha | B.1.1.7 | <0.206 | <0.206 | <0.206 | <0.206 | <0.206 |
| Beta | B.1.351 | <0.206 | <0.206 | 0.480 | <0.206 | <0.206 |
| Delta | B.1.617.2 | <0.206 | <0.206 | <0.206 | <0.206 | <0.206 |
| Omicron | BA.1.1.529 | <0.206 | <0.206 | 1.944 | <0.206 | <0.206 |
| Omicron | BA.2.86 | <0.206 | <0.206 | >50 | >50 | <0.206 |
| Omicron | BA.5 | <0.206 | <0.206 | 0.446 | <0.206 | <0.206 |
| Omicron | JN.1 | 0.281 | 3.854 | >50 | >50 | <0.206 |

### Example 34

### Pharmacokinetics (PK) of MX2567, MX2301, MX2242, and MX2265 in Humanized FcRn Mice

[8433] Human FcRn transgenic mice (C57BL/6, B6.mFcRn^{-/-} hFcRn Tg32 line from The Jackson Laboratory) were used to assess the pharmacokinetics of MX2567, MX2301, MX2242, and MX2265. Each animal was infused intravenously with 5 mg antibody/kg of body weight. Whole blood samples were collected at day 1, 2, 5, 7, 9, 14, 21. Serum was separated by centrifugation. Serum antibody levels were measured by ELISA. The antigen binding polypeptide complexes used in this experiment were produced in CHOK1 cells. All the tested antigen binding polypeptide complexes comprise a TM/YTE Fc modification, except MX2567, which comprises an LS modification.

[8434] All mice were bred and maintained under pathogen-free conditions at an American Association for Assessment and Accreditation of Laboratory Animal Care International-accredited animal facility at the National Institute of Allergy and Infectious Diseases and housed in accordance with the procedures outlined in the Guide for the Care and Use of Laboratory Animals. All mice were between 6 and 13 weeks of age.

[8435] The PK (day 0-20) was determined for each of the tested antigen binding polypeptide complexes, and plotted as shown in FIG. 83A-83D.

### Example 35

### Generation of MX2676, MX2675, MX2674, MX2673, MX2672, MX2671, and MX2670

[8436] MX2674 (bispecific), MX2673 (trispecific), MX2672, MX2671, and MX2670 (tetraspecific) (FIGS. 84A-84C), antigen binding complexes and MX2676 and MX2675 (monoclonal antibodies of A63-1.4 and G5) were produced and analyzed on reduced (FIG. 85A) and non-reduced (FIG. 85B) SDS-PAGE, SEC purification was performed and the results are shown in FIGS. 86A-86G.

### Example 36

### Comparison of Monospecific Monovalent, Bivalent and Tetravalent Antigen Binding Peptides/Complexes

[8437] MX2464, MX2463, and MX2462 (tetravalent monospecific) (FIG. 87A); and MX2477, MX2476, MX2478, MX2479, and MX2475 (monovalent monospecific) (FIG. 87B) antigen binding complexes were produced. Protein A, and SEC purification (MES (2-(N-morpholino) ethanesulfonic acid) buffering agent) of MX2464, MX2463, MX2462, MX2475, MX2477 and MX2478 was performed and the results are shown in FIGS. 88A-88F, and in Table 50, MX2464, MX2463, MX2462, MX2475, MX2477 and MX2478 were analyzed on reduced and non-reduced SDS-PAGE (FIG. 89).

TABLE E50
Production of MX2464, MX2463, MX2462, MX2475, MX2477
and MX2478 in ExpiCHO cells.

| | | | mg/L | mg/L | mg/L | mg |
|---|---|---|---|---|---|---|
| MX | | | Protein A | After MES | After SEC | Total |
| number | Note | Cell line | yield | yield | yield | purified |
| MX2462 | 448 tetravalent | ExpiCHO | 1.9 | 1.9 | 0.71 | 0.32 |
| | monospecific | | | | | |
| MX2463 | B2 tetravalent | ExpiCHO | 6.6 | 6.6 | 2.89 | 1.3 |
| | monospecific | | | | | |
| MX2464 | E12 tetravalent | ExpiCHO | 11.4 | 11.4 | 6 | 2.7 |
| | monospecific | | | | | |
| MX2475 | G11 monovalent | ExpiCHO | 42.4 | 26.0 | 19.0 | 4.752 |
| MX2477 | 448 monovalent | ExpiCHO | 28.3 | 22.4 | 20.2 | 10.08 |
| MX2478 | E12 monovalent | ExpiCHO | 2.6 | N.D | 0.51 | 0.255 |

[8438] MX2384, MX2270, and MX1091 (FIG. 90) were also produced, to analyze the neutralization power of monospecific monovalent, bivalent and tetravalent. The neutralization power of monospecific monovalent, bivalent and tetravalent antigen binding peptides/complexes (FIG. 91) was measured and compared to the neutralization power of tetravalent and tetraspecific MX2148. The results are shown in Table 51.

TABLE E51
Neutralizing activities monospecific monovalent, bivalent and tetravalent antigen binding
peptides/complexes and of MX2148. IC50 and IC80 are expressed in nM.

| | | EG.5.1 | | JD.1.1 | | JN.1 | | KP.2 | | |
|---|---|---|---|---|---|---|---|---|---|---|
| Antibody | Class (RBD) | IC50 | IC80 | IC50 | IC80 | IC50 | IC80 | IC50 | IC80 | |
| 448 monovalent | IV | 0.637 | 4.406 | 1.390 | 7.198 | 0.548 | 5.165 | 0.518 | 5.005 | |
| 448 bivalent | IV | 0.017 | 0.081 | 0.025 | 0.088 | 0.026 | 0.093 | 0.025 | 0.085 | |
| 448 tetravalent | IV | 0.006 | 0.023 | 0.007 | 0.022 | 0.008 | 0.026 | 0.007 | 0.032 | |
| | | EG.5.1 | | JD.1.1 | | JN.1 | | KP.2 | | |
| Antibody | Class (RBD) | IC50 | IC80 | IC50 | IC80 | IC50 | IC80 | IC50 | IC80 | |
| B2 monovalent | III | 1.205 | 39.533 | 37.029 | >67 | 1.455 | 21.887 | 27.375 | >67 | |
| B2 bivalent | III | 0.144 | 0.771 | 0.466 | 1.413 | 0.105 | 0.524 | 0.564 | 2.490 | |
| B2 tetravalent | III | 0.043 | 0.273 | 0.083 | 0.380 | 0.030 | 0.178 | 0.103 | 0.697 | |
| | | EG.5.1 | | JD.1.1 | | JN.1 | | KP.2 | | |
| Antibody | Class (RBD) | IC50 | IC80 | IC50 | IC80 | IC50 | IC80 | IC50 | IC80 | |
| E12 monovalent | I | 2.677 | 37.186 | >67 | >67 | 2.338 | >67 | 55.792 | >67 | |
| E12 bivalent | I | 1.264 | 5.042 | 31.091 | >67 | 1.195 | 13.160 | 25.817 | >67 | |
| E12 tetravalent | I | 0.070 | 0.561 | 6.501 | 24.202 | 0.083 | 0.914 | 4.797 | 12.504 | |
| | | | EG.5.1 | | JD.1.1 | | JN.1 | | KP.2 | |
| Specificity | Antibody | Class (RBD) | IC50 | IC80 | IC50 | IC80 | IC50 | IC80 | IC50 | IC80 |
| Tetraspecific | MX2148 | I + II + III + | 0.018 | 0.064 | 0.035 | 0.092 | 0.045 | 0.258 | 0.103 | 0.377 |
| | | IV | | | | | | | | |

### Example 37

### Comparison of Antigen Binding Peptides/Complexes

[8439] Neutralizing activities of MX2148, MX2301, and MX2673 were measured and compared to the neutralizing activity of AZD3152; (AstraZeneca) Phase III efficacy, ADG20; (Adagio) Phase III efficacy, and VYD222; (Invivyd); U.S. EUA. The neutralization activity IC50 (μg/ml) is shown in Table E52.

TABLE E52
Neutralizing activities of MX2148, MX2301, MX2673, AZD3152, ADG20, and VYD222 (IC50 (μg/ml)).

| Virus | AZD3152 | ADG20 | VYD222 | MX2148 | MX2301 | MX2673 |
|---|---|---|---|---|---|---|
| D614G | 0.015 | 0.003 | 0.010 | 0.013 | 0.004 | 0.007 |
| CH.1.1 | 0.045 | 2.058 | 1.489 | 0.014 | 0.018 | 0.005 |
| EG.5.1 | >10 | >10 | 0.899 | 0.011 | 0.004 | 0.001 |
| BA.2.86 | 0.053 | >10 | 2.127 | 0.024 | 0.003 | 0.002 |
| JN.1 | 0.766 | >10 | 0.706 | 0.102 | 0.005 | 0.001 |
| KP.2 | >10 | >10 | 0.684 | 0.215 | 0.007 | 0.003 |
| KP.2.3 | >10 | >10 | 4.250 | 1.074 | 0.014 | 0.006 |
| LB.1 | >10 | >10 | 4.615 | 0.765 | 0.013 | 0.005 |
| KP3 | >10 | >10 | 1.324 | 0.609 | 0.005 | 0.001 |
| KP.3.1.1 | >10 | >10 | 4.054 | 0.741 | 0.009 | 0.003 |
| XEC | >10 | >10 | >10 | 0.695 | 0.006 | 0.002 |

[8440] The neutralizing activities of MX2301 (bispecific), MX2148 (tetraspecific), MX2673 (trispecific), and MX2674 (bispecific) were further evaluated and compared to the neutralizing activity of A63-1.4, E12, E8, G11, A18-448, B2, AZD3152, ADG20, BD55-1205, and VYD222 (monoclonal antibodies). The neutralization activity IC50 and IC80 (μg/ml) is shown in Table E53.

TABLE E53
Neutralizing activities of MX230, MX2148, MX2673, and MX2674, A63-1.4, E12, E8, G11,
A18-448, B2, AZD3152, ADG20, BD55-1205, and VYD2222. (IC50 and IC80 (μg/ml)).

| | Anti- | Speci- | Class | D614G | | CH.1.1 | | EG.5.1 | | BA.2.86 | | JN.1 | | KP.2 | |
|---|---|---|---|---|---|---|---|---|---|---|---|---|---|---|---|
| | body | ficity | (RBD) | IC50 | IC80 | IC50 | IC80 | IC50 | IC80 | IC50 | IC80 | IC50 | IC80 | IC50 | IC80 |
| Our | A63-1.4 | Mono- | I | | | | | | | | | | | | |
| bind- | | clonal | | | | | | | | | | | | | |
| ers | E12 | Mono- | I | | | | | | 5.554 | | | 2.640 | 14.089 | 31.271 | >67 |
| | | clonal | | | | | | | | | | | | | |
| | E8 | Mono- | II | | | 40.527 | >67 | 35.215 | >67 | >67 | >67 | >67 | >67 | >67 | >67 |
| | | clonal | | | | | | | | | | | | | |
| | G1 | Mono- | III | | | 43.132 | >67 | | 2.259 | >67 | >67 | >67 | >67 | >67 | >67 |
| | | clonal | | | | | | | | | | | | | |
| | A18-448 | Mono- | IV | | | | | | | | | | | | |
| | | clonal | | | | | | | | | | | | | |
| | B2 | Mono- | III | | | 3.776 | 10.493 | | | | | | | | 1.516 |
| | | clonal | | | | | | | | | | | | | |
| Com- | AZD3 | Mono- | I | | | | 1.594 | >67 | >67 | | 2.228 | 5.108 | 27.955 | >67 | >67 |
| peti- | 152 | clonal | | | | | | | | | | | | | |
| tion | ADG20 | Mono- | I/IV | | | 13.726 | >67 | >67 | >67 | >67 | >67 | >67 | >67 | >67 | >67 |
| | | clonal | | | | | | | | | | | | | |
| | BD55- | Mono- | I | | | | | | | | | | | | |
| | 1205 | clonal | | | | | | | | | | | | | |
| | VYD222 | Mono- | I/IV | | | 9.932 | 30.414 | 5.999 | 20.875 | 14.185 | 36.733 | 4.709 | 15.557 | 4.564 | 16.546 |
| | | clonal | | | | | | | | | | | | | |
| Our | MX2301 | Bi- | III + | | | | | | | | | | | | |
| mole- | | speci- | IV | | | | | | | | | | | | |
| cules | | fic | | | | | | | | | | | | | |
| | MX2148- | Tetra- | I + | | | | | | | | | | 1.525 | 1.076 | 3.723 |
| | 006 | speci- | II + | | | | | | | | | | | | |
| | | fic | III + | | | | | | | | | | | | |
| | | | IV | | | | | | | | | | | | |
| | MX2673 | Tri- | I + | | | | | | | | | | | | |
| | | speci- | III + | | | | | | | | | | | | |
| | | fic | IV | | | | | | | | | | | | |
| | MX2674 | Bi- | I + | | | | | | | | | | | | |
| | | speci- | IV | | | | | | | | | | | | |
| | | fic | | | | | | | | | | | | | |

Neutralizing activities of MX230, MX2148, MX2673, and MX2674, A63-1.4, E12, E8, G11,
A18-448, B2, AZD3152, ADG20, BD55-1205, and VYD2222. (IC50 and IC80 (μg/ml)).

| | Anti- | Speci- | Class | KP.2.3 | | LB.1 | | KP.3 | | KP.3.1.1 | | XEC | |
|---|---|---|---|---|---|---|---|---|---|---|---|---|---|
| | body | ficity | (RBD) | IC50 | IC80 | IC50 | IC80 | IC50 | IC80 | IC50 | IC80 | IC50 | IC80 |
| Our | A63-1.4 | Mono- | I | 1.380 | 7.280 | | 4.580 | 1.057 | 11.373 | 3.455 | 31.564 | 3.912 | 20.459 |
| bind- | | clonal | | | | | | | | | | | |
| ers | E12 | Mono- | I | >67 | >67 | 59.314 | >67 | >67 | >67 | >67 | >67 | >67 | >67 |
| | | clonal | | | | | | | | | | | |
| | E8 | Mono- | II | >67 | >67 | >67 | >67 | >67 | >67 | >67 | >67 | >67 | >67 |
| | | clonal | | | | | | | | | | | |
| | G1 | Mono- | III | >67 | >67 | >67 | >67 | >67 | >67 | >67 | >67 | >67 | >67 |
| | | clonal | | | | | | | | | | | |
| | A18-448 | Mono- | IV | | | | | | | | | | |
| | | clonal | | | | | | | | | | | |
| | B2 | Mono- | III | 1.517 | 5.755 | | 4.515 | | | | | | |
| | | clonal | | | | | | | | | | | |
| Com- | AZD31 | Mono- | I | >67 | >67 | >67 | >67 | >67 | >67 | >67 | >67 | >67 | >67 |
| peti- | 52 | clonal | | | | | | | | | | | |
| tion | ADG20 | Mono- | I/IV | >67 | >67 | >67 | >67 | >67 | >67 | >67 | >67 | >67 | >67 |
| | | clonal | | | | | | | | | | | |
| | BD55- | Mono- | I | | | | | | | | | | |
| | 1205 | clonal | | | | | | | | | | | |
| | VYD222 | Mono- | I/IV | 28.350 | 66.284 | 30.783 | >67 | 8.832 | 39.460 | 27.242 | >67 | >67 | >67 |
| | | clonal | | | | | | | | | | | |
| Our | MX2301 | Bi- | III + | | | | | | | | | | |
| mole- | | speci- | IV | | | | | | | | | | |
| cules | | fic | | | | | | | | | | | |
| | MX2148- | Tetra- | I + | 5.371 | 10.980 | 3.827 | 8.588 | 3.045 | 10.675 | 3.704 | 13.972 | 3.477 | 11.246 |
| | 006 | speci- | II + | | | | | | | | | | |
| | | fic | III + | | | | | | | | | | |
| | | | IV | | | | | | | | | | |
| | MX2673 | Tri- | I + | | | | | | | | | | |
| | | speci- | III + | | | | | | | | | | |
| | | fic | IV | | | | | | | | | | |
| | MX2674 | Bi- | I + | | | | | | | | | | |
| | | speci- | IV | | | | | | | | | | |
| | | fic | | | | | | | | | | | |

### Example 38

### Developability Assessment for MX2242, MX2265, and MX2301

[8441] The following biochemical and biophysical properties of the recited multispecific antibodies were assessed with the analytical assay and sample number or conditions indicated in parentheses:
[8442] overall purity (aSEC, DLS, DSC: initial samples without stress);
[8443] binding characterization (BLI (Octet) initial samples without stress);
[8444] LC MS and glycan profiling (LC-MS (intact and deglycosylated); unstressed samples);
[8445] surface hydrophobicity (aHIC (purity and hydrophobicity); initial samples without stress);
[8446] surface charge (pI profile) (iCIEF (charge heterogeneity and pI); initial samples without stress);
[8447] solubility at high concentration (target to approximately 100 mg/mL) (DLS, sSEC; high concentration samples);
[8448] thermal stability (Tₘ, Tₒₙₛₑₜ) (DSC: initial samples heated from 25° C., to 95° C.);
[8449] Thermal stress at 40° C. (aSEC, CD-SDS, binding potency; T0 time points (including T0 as control+T1 and T2 weeks));
[8450] Freeze thaw 5× (DLS, aSEC, CE-SDS; freeze and thaw 5 cycles);
[8451] pH 3.5 stress (RT for 4 hours) (aSEC, CE-SDS, binding potency; T0 as control plus 4 hours stress);
[8452] pH 9.0 stress (RT for 24 hours) (aSEC, CE-SDS, binding potency; T0 as control plus 24 hours stress;
[8453] serum/PBS 37° C., stability (aSEC and relative potency analysis (Octeta); T0, d1, d2, d5 and d7;
[8454] polyreactivity (ELISA based polyreactivity, compared to benchmark mAbs); and
[8455] Self association (AC-SINS to evaluate Ab self-interaction: characterizing antibody self-association).

[8456] The data generated for any particular multispecific was utilized to assess developability for clinical development purposes.

[8457] Buffer Exchange Recovery: MX2242, MX2265, and MX2301 (FIG. 103) were formulated in formulation buffer, 20 mM Histidine (pH 6.0), 8% Sucrose, MX2242, MX2265, and MX2301 were measured pre- and post-dialysis. Recovery and aSEC purity were assessed and are shown in Table E54. White precipitate was observed pre- and post-dialysis for MX2242.

TABLE E54
Buffer Exchange Recovery of MX2242, MX2265, and MX2301.

| | (mg) pre- | (mg) post- | % | aSEC |
|---|---|---|---|---|
| Molecule | dialysis | dialysis | Recovery | purity % |
| MX2242* | 12.35 | 9 | 72.8 | 99.1 |
| MX2265 | 11.8 | 11.6 | 98.5 | 92.8 |
| MX2301 | 14.5 | 12.6 | 86.9 | 98 |

[8458] Purity Assessment by HPLC aSEC: All MX2242, MX2265, and MX2301 samples were formulated at 1 mg/ml in 20 mM Histidine pH 6.0, 8% sucrose, HPLC aSEC profiles are shown in FIGS. 104A-104C. Purity % is shown in Table E55. All tested molecules showed good aSEC purity, MX2265 showed a lower aSEC purity (about 93%).

TABLE E55
Purity Assessment by HPLC aSEC
of MX2242, MX2265, and MX2301.

| ID | Purity % |
|---|---|
| MX2242 | 99.2% |
| MX2265 | 92.9% |
| MX2301 | 98% |

[8459] Purity Assessment by DLS: Sizing and polydispersity of MX2242, MX2265, and MX2301 were analyzed by DLS (UNCLE, Acute BioScience). Each molecule was tested in 3 experimental replicates (all shown in FIGS. 105A-105C). Sizing was adjusted by buffer viscosity. All molecules showed the expected hydrodynamic diameter, PDI values were relatively high (expected≤0.10), indicating the presence of sample heterogeneity (Table E56).

TABLE E56
Purity Assessment by DLS of MX2242, MX2265, and MX2301.

| | Z-Ave. | | Pk 1 Peak | Pk 1 Mass |
|---|---|---|---|---|
| Sample | Dia. (nm) | PDI | Dia. (nm) | (%) |
| 1 mg/ml ref MX2242 | 8.28 ± 0.14 | 0.28 ± 0.00 | 9.54 ± 0.00 | 99.99 ± 0.01 |
| 1 mg/ml ref MX2265 | 8.70 ± 0.65 | 0.29 ± 0.01 | 10.34 ± 0.00 | 100.00 ± 0.00 |
| 1 mg/ml ref MX2301 | 8.96 ± 0.17 | 0.29 ± 0.00 | 9.81 ± 0.38 | 99.97 ± 0.01 |

[8460] Surface Hydrophobicity Analysis by aHIC: Surface Hydrophobicity of MX2242, MX2265, and MX2301 was analyzed by HPLC aHIC, HPLC aHIC analysis of MX2242 (tetra-specific) and MX2265 (tri-specific) showed a major peak (71-81%) that eluted at about 21 minutes towards the end of salt gradient, indicating relatively high surface hydrophobicity (FIGS. 106A-106B and Table E57), HPLC aHIC analysis of MX2301 (bi-specific) showed a polydispersed aHIC profile, suggesting the presence of surface hydrophobicity heterogeneity (FIG. 106C and Table E58).

TABLE E57
Surface Hydrophobicity Analysis
by aHIC of MX2242 and MX2265.

HPLC_HIC

| ID | Retention time | Purity (major peak) |
|---|---|---|
| MX2242 | 21.18 min | 81.2% |
| MX2265 | 21.09 min | 71.2% |

TABLE E58
Surface Hydrophobicity Analysis by aHIC of MX2301.

| RT (min) | Area % |
|---|---|
| 15.789 | 6.852 |
| 18.110 | 11.022 |
| 18.572 | 29.242 |
| 20.734 | 36.251 |
| 21.847 | 10.720 |
| 23.290 | 5.912 |

[8461] Binding Characterization by BLI: Binding properties of MX2242, MX2265, and MX2301 were analyzed by BLI (Octet R8, Sartorius). Specifically, binding to COVID wild-type RBD was analyzed. The apparent binding affinity was in the sub-nanomolar range (FIGS. 107A-107C, and Table E59).

TABLE E59
Binding Characterization by BLI
of MX2242, MX2265, and MX2301.

| Solution Analyte | Loaded Ligand | KD (nM) |
|---|---|---|
| MX2242 | COVID RBD WT | ≤0.01 |
| MX2265 | COVID RBD WT | ≤0.01 |
| MX2301 | COVID RBD WT | ≤0.01 |

[8462] Thermostability Analysis by DSC: Thermostability of MX2242, MX2265, and MX2301 was analyzed by DSC, MX2242, MX2265, and MX2301 were prepared at 0.5 mg/ml in 20 mM Histidine pH 6.0, 8% sucrose. Results indicated a non-two-state unfolding process. Each molecule was analyzed in two experimental replicates (both shown in FIGS. 108A-108C). Thermostability is shown in Table E60. The tested molecules showed lower thermal stability.

TABLE E60
Thermostability Analysis by DSC of MX2242, MX2265, and MX2301.

| | T_{Onset} (° C.) | Tₘ_{¹} (° C.) | Tₘ_{²} (° C.) | Tₘ_{³} (° C.) | Tₘ_{⁴} (° C.) |
|---|---|---|---|---|---|
| MX2242 | 39.79 ± 0.65 | 56.28 ± 0.10 | 63.72 ± 0.04 | 70.62 ± 0.40 | 80.22 ± 0.1 |
| MX2265 | 46.23 ± 0.54 | 57.14 ± 0.01 | 72.74 ± 0.00 | 81.20 ± 0.28 | |
| MX2301 | 44.78 ± 0.10 | 55.31 ± 0.02 | 74.13 ± 0.05 | 83.76 ± 0.09 | |

[8463] Surface Charge (pI profile) cIEF Analysis: The isoelectric point (pI) of MX2242, MX2265, and MX2301 was measured by cIEF (FIGS. 109A-109C). The measured pI of MX2242 was is in the desired range of 8.23-8.56 (Table E61), and MX2242 exhibited an appreciable amount of surface charge heterogeneity. The measured pI of MX2265 was in a range of from 7.52 to 7.67 (Table E62), and showed surface charge heterogeneity. The measured pI of MX2301 was in a range of from 7.1 to 7.85 (Table E63), and showed the surface charge heterogeneity.

TABLE E61
cIEF Analysis (pI) of MX2242.

| Peak # | Calculated pI | Abundance (%) |
|---|---|---|
| 1 | 8.229 | 14.53 |
| 2 | 8.303 | 31.16 |
| 3 | 8.400 | 49.17 |
| 4 | 8.559 | 5.13 |

TABLE E62
cIEF Analysis (pI) of MX2265.

| Peak # | Calculated pI | Abundance (%) |
|---|---|---|
| 1 | 7.524 | 18.27 |
| 2 | 7.606 | 47.33 |
| 3 | 7.666 | 34.40 |

TABLE E63
cIEF Analysis (pI) of MX2301.

| Peak # | Calculated pI | Abundance (%) |
|---|---|---|
| 1 | 7.109 | 3.06 |
| 2 | 7.201 | 5.04 |
| 3 | 7.408 | 19.88 |
| 4 | 7.519 | 27.23 |
| 5 | 7.696 | 23.91 |
| 6 | 7.839 | 20.89 |

[8464] Solubility at High Concentration (aSEC): Solubility at high concentration of MX2242, MX2265, and MX2301 was measured by aSEC. For all molecules tested, good recovery was obtained during the process of concentration adjustment, MX2242 and MX2301 showed good overall aSEC purity, MX2265 increased high molecular weight species (HMW) by 11.5% after concentration (FIGS. 110A-110C and Table E64).

TABLE E64
Solubility at high concentration (aSEC)
of MX2242, MX2265, and MX2301.

| ID | Concentration mg/ml | Recovery % | Purity % |
|---|---|---|---|
| MX2242 | 74.6 | 86% | 99.2% |
| MX2265 | 119 | 91% | 81.2% |
| MX2301 | 99 | 96% | 96.2% |

[8465] Solubility at High Concentration (DLS): Solubility at high concentration of MX2242, MX2265, and MX2301 was also measured by DLS. All samples tested showed significantly increased hydrodynamic diameter at high concentrations (FIGS. 111A-111C and Table E65), MX2301 demonstrated a slightly better DLS profile at high concentration than MX2242 and MX2265.

TABLE E65
Solubility at high concentration (DLS) of MX2242, MX2265, and MX2301.

| | Z-Ave. | | Pk 1 Peak | Pk 1 Mass |
|---|---|---|---|---|
| Sample | Dia. (nm) | PDI | Dia. (nm) | (%) |
| 1 mg/ml ref MX2242 | 8.28 ± 0.14 | 0.28 ± 0.00 | 9.54 ± 0.00 | 99.99 ± 0.01 |
| 75 mg/ml MX2242 | 67.70 ± 0.70 | 0.36 ± 0.00 | 21.71 ± 2.34 | 99.47 ± 0.16 |
| 1 mg/ml ref MX2265 | 8.70 ± 0.65 | 0.29 ± 0.01 | 10.34 ± 0.00 | 100.00 ± 0.00 |
| 119 mg/ml MX2265 | 75.34 ± 6.23 | 0.28 ± 0.02 | 24.40 ± 1.89 | 99.96 ± 0.25 |
| 1 mg/ml ref MX2301 | 8.96 ± 0.17 | 0.29 ± 0.00 | 9.81 ± 0.38 | 99.97 ± 0.01 |
| 99 mg/ml MX2301 | 41.71 ± 5.16 | 0.26 ± 0.03 | 20.84 ± 2.75 | 99.55 ± 0.37 |

[8466] Analysis under Freeze and Thaw (HPLC-aSEC): HPLC-aSEC analysis under 5 freeze and thaw cycles was performed for MX2242, MX2265, and MX2301. The tested samples showed an increase in the LMW (low molecular weight) species by 4-8% (FIGS. 112A-112C, Table E66). Similar aSEC profiles were observed with additional 0.02% PS80.

TABLE E66
HPLC-aSEC analysis under 5 freeze and thaw
cycles of MX2242, MX2265, and MX2301.

| ID | LMW % | Purity % |
|---|---|---|
| MX2242 | 4.1% | 95.4% |
| MX2265 | 9.4% | 86.3% |
| MX2301 | 6.9% | 90% |

[8467] Analysis under Freeze and Thaw (DLS): Sizing and polydispersity under freeze and thaw cycles were analyzed for MX2242, MX2265, and MX2301 by DLS (UNCLE, Acute BioScience) (FIGS. 113A-113C). Five freeze/thaw cycles were performed with addition of 0.02% PS80, MX2301 showed a slight increase in hydrodynamic diameter after the freeze/thaw stress, while MX2242 and MX2265 showed essentially no change (FIGS. 113A-113C, Table E67).

TABLE E67
DLS analysis under 5 freeze and thaw
cycles of MX2242, MX2265, and MX2301.

| | Z-Ave. | | Pk 1 Peak | Pk 1 Mass |
|---|---|---|---|---|
| Sample | Dia. (nm) | PDI | Dia. (nm) | (%) |
| 1 mg/ml ref MX2242 | 8.28 ± 0.14 | 0.28 ± 0.00 | 9.54 ± 0.00 | 99.99 ± 0.01 |
| Freeze/thaw MX2242 | 8.45 ± 0.24 | 0.28 ± 0.00 | 9.29 ± 0.35 | 100.00 ± 0.00 |
| 1 mg/ml ref MX2265 | 8.70 ± 0.65 | 0.29 ± 0.01 | 10.34 ± 0.00 | 100.00 ± 0.00 |
| Freeze/thaw MX2265 | 8.96 ± 0.23 | 0.28 ± 0.00 | 9.29 ± 0.35 | 99.96 ± 0.03 |
| 1 mg/ml ref MX2301 | 8.96 ± 0.17 | 0.29 ± 0.00 | 9.81 ± 0.38 | 99.97 ± 0.01 |
| Freeze/thaw MX2301 | 12.31 ± 0.86 | 0.25 ± 0.01 | 9.66 ± 0.17 | 99.86 ± 0.09 |

[8468] Analysis under pH stress (aSEC): MX2242, MX2265, and MX2301 were analyzed under pH stress by aSEC at pH 3.5 and pH 9. All tested molecules showed increased peak tailing under pH stress by aSEC (FIGS. 114A-114C, Tables E68-E70).

TABLE E68
aSEC analysis under pH stress of MX2242.

| pH stress | Increased LMW % |
|---|---|
| pH 3.5 | 14% |
| pH 9 | 7.1% |

TABLE E69
aSEC analysis under pH stress of MX2301.

| pH stress | Increased LMW % |
|---|---|
| pH3.5 | 9.7% |
| pH9 | 9.3% |

TABLE E70
aSEC analysis under pH stress of MX2265.

| pH stress | Increased LMW % |
|---|---|
| pH3.5 | 15% |
| pH9 | 12.4% |

[8469] Potency Analysis after pH Stress: Potency after pH stress at pH 3.5 and pH 9.0 was analyzed for MX2242, MX2265, and MX2301 by BLI, pH 9.0 stress was for 24 hours and pH 3.5 stress was for 4 hours. Relative potency was determined by binding response by BLI to COVID WT (wild type) RBD. No changes in kinetics were observed. All molecules preserve their activities after pH 3.5 or pH 9.0 stress (FIGS. 115A-115C).

[8470] Thermal Stress Analysis (40° C.): Thermostability of MX2242, MX2265, and MX2301 was tested by aSEC after incubation at 40° C., for up to 2 weeks. Incubation at 40° C., for up to 2 weeks resulted in significantly increased HMW % (high molecular weight %) in all 3 tested molecules (FIGS. 116A-116C, Tables E71-E73).

TABLE E71
aSEC analysis under thermal stress of MX2242.

| 40° C. stress | Increased HMW % |
|---|---|
| 1 week | 12.8% |
| 2 weeks | 21.5% |

TABLE E72
aSEC analysis under thermal stress of MX2301.

| 40° C. stress | Increased HMW % |
|---|---|
| 1 week | 13.3% |
| 2 weeks | 22.7% |

TABLE E73
aSEC analysis under thermal stress of MX2265.

| 40° C. stress | Increased HMW % |
|---|---|
| 1 week | 25.2% |
| 2 weeks | 36.6% |

[8471] Analysis of Potency after Thermal Stress: Potency of MX2242, MX2265, and MX2301 after thermal stress was analyzed after incubation at 40° C., in formulation buffer for 2 weeks. Relative potency was determined from binding response by BLI to COVID WT (wild type) RBD. No changes in kinetics were observed. All tested molecules preserve their binding activities throughout the 2 weeks at 40° C., stress (FIGS. 117A-117C).

[8472] Thermal Stress Analysis (37° C.): Thermostability of MX2242, MX2265, and MX2301 was tested by aSEC after incubation at 37° C. All samples were diluted in PBS to 0.2 mg/ml and incubated at 37° C., for up to 1 week. All tested samples showed stable aSEC profiles under PBS incubation at 37° C., for up to 7 days (FIGS. 118A-118C).

[8473] Potency Analysis after Serum Incubation: Potency after serum incubation was analyzed for MX2242, MX2265, and MX2301. All samples were incubated in PBS or final human serum 0.8× at 37° C., for 0-7 days. Relative potency was determined by BLI from binding to COVID RBD WT. All molecules maintained anti-RBD WT binding activity throughout the 7-day serum or PBS incubation (FIGS. 119A-119C).

[8474] CE-SDS Analysis Under Stress Conditions: CE-SDS Analysis of MX2242, MX2265, and MX2301 was performed under different stress conditions: 40° C., for 1 week, 40° C., for 2 weeks, pH 3.5, pH 9.0, freeze and thaw, and high concentration. Half antibody contaminants were detected in all control and stressed samples of MX2242 and MX2265 (FIG. 120A). Migration of MX2301 was irregular, likely due to the presence of glycans (FIG. 120B).

[8475] Poly-reactivity Analysis (ELISA panel): Poly-reactivity by ELISA panel was analyzed for MX2242, MX2265, and MX2301, and compared to control molecules. The tested anti-COVID molecules demonstrated low non-specific poly-reactivity, similar to MX2148 (FIG. 121. Table E74).

TABLE E74
Poly-reactivity by ELISA panel of MX2242, MX2265, and MX2301.

| | | Poly-reactivity score |
|---|---|---|
| | | (out of 100) |
| Adalimumab | MX971 | 2 |
| MEDI-1912 | MX1350 | 14 |
| Bococizumab | MX1346 | 75 |
| Briakinumab | MX1351 | 100 |
| Anti-COVID | MX2242 | 11 |
| molecules | MX2265 | 10 |
| | MX2301 | 3 |

[8476] Self-interaction Assessment: Self-interaction was assessed for MX2242, MX2265, and MX2301 by AC-SINS (Affinity-Capture Self-Interacting Nanoparticle Spectroscopy), AC-SINS was performed in histidine with salt. Gold particles were coated with antibodies as indicated in FIG. 122, MX2265 and MX2301 did not display self-association tendency (FIG. 122). The de-glycosylation mutant MX2242 displayed moderate association tendency (FIG. 122).

[8477] Mass Analysis: Mass analysis of MX2242, MX2265, and MX2301 was performed. A C-terminal lysine residue was not observed in any of three tested molecules: MX2242, MX2265, and MX2301, although a lysine residue was included in their respective expression constructs. Upon PNGase F treatment, the intact mass of MX2242 matched to its theoretical mass (16 ppm). As for MX2265, both subunits of Knob_chain and Hole_chain matched to their calculated masses (less than 20 ppm). The B2 WT clone within MX2301 carried fully matured complex type N-glycans with two of them having terminal sialic acid residue (Neu5Ac), as desired.

[8478] MX2242 (FIGS. 123A-123F. Table E75): By LC/MS analysis of MX2242 the desired Knob-Hole dimer was observed without a c-terminal Lys. Samples were treated with PNGase F. A major peak showed an intact mass matching to the correct MX2242 dimer (K-H). The intact mass didn't indicate the presence of a c-terminal Lysine residue. Fc N-glycans were not completely removed, mass at 204283 Da corresponded to K-H with G0Fx2. Some level of half-bodies were observed.

TABLE E75
LC/MS Analysis of MX2242.

| | | Calc. Ave. | Deglyco | Obs. | Diff. |
|---|---|---|---|---|---|
| MX2242 | | Mass (Da) | Mass | Mass | (ppm) |
| Without c-Terminal | K | 99934.77 | 99935.75 | | |
| Lys | H | 101465.14 | 101466.12 | | |
| | K-H | 201397.89 | 201399.85 | 201403 | 16 |
| | K-K | 199867.52 | 199869.48 | | |
| | H-H | 202928.26 | 202930.22 | | |
| With c-Terminal Lys | K | 100062.94 | 100063.92 | | |
| | H | 101593.31 | 101594.29 | | |
| | K-H | 201654.24 | 201656.2 | | |
| | K-K | 200123.87 | 200125.83 | | |
| | H-H | 203184.61 | 203186.57 | | |

[8479] MX2265 (FIGS. 124A-124D. Table E76): LC/MS analysis of MX2265 showed that both Knob and Hole chains were matched. Samples were treated with PNGase F, and then with TCEP to yield Knob and Hole chains separately. Major peaks showed intact mass matching to the correct MX2265 Knob and Hole chains without any c-terminal lysine.

TABLE E76
LC/MS Analysis of MX2265.

| | | Calc. Ave. | Deglyco | Obs. | Diff. |
|---|---|---|---|---|---|
| MX2265 | | Mass (Da) | Mass | Mass | (ppm) |
| Without c-Terminal | K | 99938.81 | 99939.79 | 99938.0 | −18 |
| Lys | H | 100851.77 | 100852.75 | 100852.0 | −7 |
| | K-H | 200780.48 | 200782.44 | | |
| | K-K | 199867.52 | 199869.48 | | |
| | H-H | 201693.44 | 201695.4 | | |

[8480] MX2265 (FIGS. 125A-125F. Table E77): LC/MS analysis of MX2265 showed that both Knob_Fab and Hole_Fab were matched, and that the C-terminal Lysine seemed to cause an unknown modification. Samples were treated with Fabdello enzyme, then with TCEP to yield Knob_Fab, hole_Fab. Fc_Knob, and Fc_Hole fragments, separately. Peaks #2 and #3, shown in FIG. 125B, corresponded to Hole_Fab and Knob_Fab, respectively. The small peak #4, shown in FIG. 125B, matched to un-reduced (pair) Fc_knob_hole_dimer without c-terminal lysine. Peak #1, shown in FIG. 125B, was related to Fc fragment, but didn't match to Knob-Fc and Hole_Fc. These data suggested not to include the c-terminal lysine, because it appeared to cause unknown modification(s), clipping, etc.

TABLE E77
LC/MS Analysis of MX2265.

| | | Calc. Ave. | Reduced | | | |
|---|---|---|---|---|---|---|
| MX2265 | | Mass (Da) | Mass | (GOF) | Obs. Mass | Diff. (ppm) |
| Without c- | Knob_Fab | 74535.29 | 74537.31 | | 74536.0 | −18 |
| Terminal Lys | Hole_Fab | 75729.6 | 75731.62 | | 75731 | −8 |
| | Knob_Fc | 25417.5 | 25420.53 | 26865.86 | 26723 | NOT Match |
| | Hole_Fc | 25136.14 | 25139.17 | 26584.5 | 26723 | NOT Match |
| | Fc_dimer | 50551.62 | 50551.62 | 53442.28 | 53445 | 51 |

[8481] MX2265 (FIGS. 126A-126D. Table E78): By LC/MS analysis of non-treated MX2265 intact mass of Knob_Hole dimer was observed. In the absence of treatment for MX2265, a raw spectrum showed raised noise background due to Fc N-glycosylations. Upon one of deconvolution, masses were matching to the calculated Knob-Hole dimer. Some other masses were also observed. Improvements were observed without c-terminal lysine residue.

TABLE E78
LC/MS Analysis of MX2265.

| | | Calc. Ave. | | Obs. | Diff. |
|---|---|---|---|---|---|
| MX2265 | | Mass (Da) | G0F + G0F | Mass | (ppm) |
| Without c-Terminal | K | 99938.81 | | | |
| Lys | H | 100851.77 | | | |
| | K-H | 200780.48 | 203671.146 | 203679 | 39 |
| | K-K | 199867.52 | 202758.186 | | |
| | H-H | 201693.44 | 204584.106 | | |

[8482] MX2301 (FIGS. 127A-127D): LC/MS Analysis of non-treated MX2301 showed heterogeneous mass profiles due to four N-glycosylation sites. In the absence of treatment for MX2301, raw spectrum showed raised noise background due to N-glycosylation (Fab “NDT” of B2 clone and Fc N-297). Upon deconvolution, a series of masses was observed due to glycosylation pattern (160 Da, 204 Da differences).

[8483] MX2301 (FIGS. 128A-128D, Table E79): Upon LC/MS analysis of Fc Subunit of MX2301 no c-terminal lysine was observed. Upon treatment with Fabdello, the subunit of Fcx2 dimer were matching to the masses without c-terminal lysine residues. The N-glycans observed are common to Fc N-glycosylation, e.g. G0F/G0F, G1F/G0F, G1F/G1F, etc.

TABLE E79
LC/MS Analysis of MX2301 (Without c-terminal Lys).

| | Calc. Ave. | Obs. | Diff. |
|---|---|---|---|
| MX2301 | Mass (Da) | Mass | (ppm) |
| Fc_dimer | 50632.65 | | |
| Fc_dimer + G0F/ G0F | 53523.31 | 53522 | −24 |
| Fc_dimer + G0F/GIF | 53685.45 | 53684 | −27 |
| Fc_dimer + G1F/GIF | 53847.59 | 53847 | −11 |
| Fc_dimer + G2F/GIF | 54009.73 | 54009 | −14 |

[8484] MX2301 (FIGS. 129A-129E, Table E80): LC/MS analysis of Fab Subunit of MX2301 showed that the B2 WT clone carries complex-type N-glycans with abundant sialic acid residues. Three most abundant N-glycans that were observed within Fab subunit (B2 clone) were complex type with two of them having terminal sialic acid residues (Neu5Ac), showing no concern from glycosylation perspective.

TABLE E80
LC/MS Analysis of MX2301.

| | Calc. | Obs. | Diff. |
|---|---|---|---|
| MX2301 | Mass (Da) | Mass | (ppm) |
| Fab | 75715.58 | | |
| Fab-Hex5HexNAc4Fuc1 | 77485.19 | 77484 | −15 |
| Fab-Hex5HexNAc4SA1Fuc1 | 77776.45 | 77775 | −19 |
| Fab-Hex5HexNAc4SA2Fuc1 | 78067.7 | 78067 | −9 |

[8485] Additional pH stress recovery data are shown in Tables E81 and E82.

TABLE E81
pH (3.5) stress recovery of MX2242, MX2265, and MX2301.

| pH 3.5 Stressed Sample | Recovery (%) |
|---|---|
| MX2242 | 99 |
| MX2265 | 100 |
| MX2301 | 100 |

TABLE E82
pH (9.0) stress recovery of MX2242, MX2265, and MX2301.

| pH 9.0 Stressed Sample | Recovery (%) |
|---|---|
| MX2242 | 92 |
| MX2265 | 100 |
| MX2301 | 100 |

[8486] Additional data (DLS (intensity) about solubility at high concentration of MX2242, MX2265, and MX2301, are shown in FIGS. 130A-130C and in Table E83. Samples were formulated in 20 mM histidine, PH 6.0, 8% sucrose. All samples tested formed significant higher molecular weight assemblies at high concentration.

TABLE E83
Solubility at high concentration of MX2242, MX2265,
and MX2301 (DLS (intensity)).

| | Z-Ave. | | Pk 1 Peak | Pk 1 |
|---|---|---|---|---|
| Sample | Dia. (nm) | PDI | Dia. (nm) | Mass (%) |
| 1 mg/ml ref | 8.28 ± 0.14 | 0.28 ± 0.00 | 9.54 ± 0.00 | 99.99 ± 0.01 |
| MX2242 | | | | |
| 75 mg/ml | 67.70 ± 0.70 | 0.36 ± 0.00 | 21.71 ± 2.34 | 99.47 ± 0.16 |
| MX2242 | | | | |
| 1 mg/ml ref | 8.70 ± 0.65 | 0.29 ± 0.01 | 10.34 ± 0.00 | 100.00 ± 0.00 |
| MX2265 | | | | |
| 119 mg/ml | 75.34 ± 6.23 | 0.28 ± 0.02 | 24.40 ± 1.89 | 99.96 ± 0.25 |
| MX2265 | | | | |
| 1 mg/ml ref | 8.96 ± 0.17 | 0.29 ± 0.00 | 9.81 ± 0.38 | 99.97 ± 0.01 |
| MX2301 | | | | |
| 99 mg/ml | 41.71 ± 5.16 | 0.26 ± 0.03 | 20.84 ± 2.75 | 99.55 ± 0.37 |
| MX2301 | | | | |

[8487] Table E84 shows a summary of the developability analysis of MX2242, MX2265, and MX2301.

TABLE E84
Developability analysis of MX2242, MX2265, and MX2301
MX2242, MX2265, and MX2301 (Risk Level: Low ✓).

| | Biochemical and biophysical | | | |
|---|---|---|---|---|
| | properties | MX2242 | MX2265 | MX2301 |
| 1 | Overall purity assessment | ✓ | Below 95% by | ✓ |
| | | | aSEC ✓ | |
| 2 | Binding characterization* | ✓ | ✓ | ✓ |
| 4 | Surface hydrophobicity | ✓ | ✓ | Heterogeneous aHIC profile |
| | | | | ✓ |
| 5 | Surface charge (pI profile) | ✓ | pI 7.52-7.67 | pI 7.1-7.85 |
| 6 | Solubility at high concentration | Increasing hydrodynamic diameter | | |
| | (target to 100 mg/ml) | | | |
| 7 | Thermal stability (Tm, Tonset) | ✓ | ✓ | ✓ |
| 8 | Thermal Stress at 40° C. | Increasing HMW % | | |
| 9 | Freeze Thaw 5X | ✓ | ✓ | Increasing hydrodynamic |
| | | | | diameter ✓ |
| 10 | pH 3.5 Stress (RT for 4 hrs)* | increasing the peak tailing by aSEC | | |
| 11 | pH 9.0 Stress (RT for 24 hrs)* | increasing the peak tailing by aSEC | | |
| 12 | Serum/PBS 37° C. Stability* | Stable in | Stable in | Stable in serum/PBS-no |
| | | serum/PBS- | serum/PBS-no | change to aSEC or BLI |
| | | no change to | change to aSEC | binding |
| | | aSEC or BLI | or BLI binding | |
| | | binding | | |
| 13 | Poly-reactivity | ✓ | ✓ | ✓ |
| 14 | Self-association | ✓ | ✓ | ✓ |
| | LC/MS | ✓ | ✓ | Complex glycan on B2 FV ✓ |

LENGTHY TABLES
The patent application contains a lengthy table section. A copy of the table is available in electronic form from the USPTO web site (https://seqdata.uspto.gov/docdetail?docId=US20250326823A1). An electronic copy of the table will also be available from the USPTO upon request and payment of the fee set forth in 37 CFR 1.19(b)(3).

The application's sequence listing, which the Patent Office published only in electronic form, follows.

SEQUENCE LISTING (2009 sequences)

SEQ ID NO: 1 - protein, 11 aa, synthetic construct
RASQSVAINLA

SEQ ID NO: 2 - protein, 7 aa, synthetic construct
AASSRAT

SEQ ID NO: 3 - protein, 11 aa, synthetic construct
QQYITWPPSYT

SEQ ID NO: 4 - protein, 109 aa, synthetic construct
EIVMTQSPAILSVSPGERATLSCRASQSVAINLAWYQQKPGQAPRLLIYAASSRATGIPGRFSGSGSETNFTLTISSLQSGDFAVYYCQQYITWPPSYTFGQGTKLEIK

SEQ ID NO: 5 - protein, 8 aa, synthetic construct
GIIVSANY

SEQ ID NO: 6 - protein, 7 aa, synthetic construct
IYSGGST

SEQ ID NO: 7 - protein, 11 aa, synthetic construct
ARDAPILGVSD

SEQ ID NO: 8 - protein, 117 aa, synthetic construct
EVQLVESGGALIQPGGSLRLSCAASGIIVSANYMSWVRQAPGKGLEWVSVIYSGGSTFYADSVKGRFTISRDNSKNTLYLEMNSLRAEDTAVYYCARDAPILGVSDWGQGTLVTVSS

SEQ ID NO: 9 - protein, 6 aa, synthetic construct
QSFSSD

SEQ ID NO: 10 - protein, 10 aa, synthetic construct
QQYGSSPPVT

SEQ ID NO: 11 - protein, 108 aa, synthetic construct
EIVLTQSPGTLSLSPGETATLSCRASQSFSSDLAWYQQKPGQAPRLLIYGASSRATGIPDRFSGSGSGTDFTLTISRLEPADFAVYYCQQYGSSPPVTFGGGTKVEIK

SEQ ID NO: 12 - protein, 8 aa, synthetic construct
GVIVSYNY

SEQ ID NO: 13 - protein, 12 aa, synthetic construct
ARDLGPAGAFDI

SEQ ID NO: 14 - protein, 118 aa, synthetic construct
EVQLVESGGGLIQPGGSLRLSCAASGVIVSYNYMNWVRQAPGKGLEWVSVIYSGGSTFYADSVRGRFTISRDNSKNTLYLQMNSLRAEDTAVYYCARDLGPAGAFDIWGLGTMVTVSS

SEQ ID NO: 15 - protein, 11 aa, synthetic construct
QSLLNSNGYNY

SEQ ID NO: 16 - protein, 10 aa, synthetic construct
MQPLQTPLFT

SEQ ID NO: 17 - protein, 113 aa, synthetic construct
DTVMTQSPLSLPVTPGEPASISCRSSQSLLNSNGYNYLDWYVQKPGQSPQLLIYLGSNRASGVPDRFSGSGSGTDFTLKISRVEAEDVGVYYCMQPLQTPLFTFGPGTKVEIK

SEQ ID NO: 18 - protein, 10 aa, synthetic construct
GFSLSTRGVC

SEQ ID NO: 19 - protein, 7 aa, synthetic construct
IDWDDDK

SEQ ID NO: 20 - protein, 17 aa, synthetic construct
ARISSHHGSSWCTTFDY

SEQ ID NO: 21 - protein, 125 aa, synthetic construct
QVTLRESGPALVKPTQTLTLTCTFSGFSLSTRGVCVSWIRQPPGKALEWLAFIDWDDDKYYNTSLKTRLTISKDTSKNQVVLTMTNVHPVDTATYYCARISSHHGSSWCTTFDYWGQGALVTVSA

SEQ ID NO: 22 - protein, 125 aa, synthetic construct
QVTLRESGPALVKPTQTLTLTCTFSGFSLSTRGVCVSWIRQPPGKALEWLAFIDWDDDKYYQTSLKTRLTISKDTSKNQVVLTMTNVHPVDTATYYCARISSHHGSSWCTTFDYWGQGALVTVSA

SEQ ID NO: 23 - protein, 9 aa, synthetic construct
SGSVSTAYF

SEQ ID NO: 24 - protein, 10 aa, synthetic construct
VLYMGRGIVV

SEQ ID NO: 25 - protein, 110 aa, synthetic construct
QTVVTQEPSFSVSPGGTVTLTCGLSSGSVSTAYFPSWYQQTPGQAPRTLIYGTNTRSSGVPDRFSGSILGNKAALTITGAQADDESDYYCVLYMGRGIVVFGGGTKLTVL

SEQ ID NO: 26 - protein, 8 aa, synthetic construct
GFTLSSYG

SEQ ID NO: 27 - protein, 8 aa, synthetic construct
ISYDGSNK

SEQ ID NO: 28 - protein, 19 aa, synthetic construct
ARGWAYWELLPDYYYGMDV

SEQ ID NO: 29 - protein, 126 aa, synthetic construct
QVQLVESGGGVVQPGRSLRLSCAASGFTLSSYGMHWVRQAPGKGLEWVAVISYDGSNKYYVDSVKGRFTISRDNSKNTLYLQMNSLRAEDTAVYYCARGWAYWELLPDYYYGMDVWGQGTTVTVSS

SEQ ID NO: 30 - protein, 7 aa, synthetic construct
QSVSSSY

SEQ ID NO: 31 - protein, 4 aa, synthetic construct
SASS

SEQ ID NO: 32 - protein, 10 aa, synthetic construct
QQYVGLTGWT

SEQ ID NO: 33 - protein, 109 aa, synthetic construct
EIVLTQSPGTLSLSPGERATLSCRASQSVSSSYLAWYQQKPGQAPRLLIYSASSRATGIPDRFSGSGSGTDFTLTISRLEPEDFAVYFCQQYVGLTGWTFGQGTKVEIK

SEQ ID NO: 34 - protein, 8 aa, synthetic construct
GFTFTSSA

SEQ ID NO: 35 - protein, 8 aa, synthetic construct
IVVGSGNT

SEQ ID NO: 36 - protein, 16 aa, synthetic construct
AAPNCSNVVCYDGFDI

SEQ ID NO: 37 - protein, 123 aa, synthetic construct
QMQLVQSGPEVKKPGTSVKVSCKASGFTFTSSAVQWVRQARGQRLEWIGWIVVGSGNTNYAQKFQERVTITRDMSTSTAYMELSSLRSEDTAVYYCAAPNCSNVVCYDGFDIWGQGTMVTVSS

SEQ ID NO: 38 - protein, 10 aa, synthetic construct
QQYGTSPWTF

SEQ ID NO: 39 - protein, 108 aa, synthetic construct
EIVLTQSPGTLSLSPGERATLSCRASQSVSSSYLAWYQQKPGQAPRLLIYSASSRATGIPDRFSGSGSGTDFTLTISRLEPEDFAVYFCQQYGTSPWTFGQGTKVEIK

SEQ ID NO: 40 - protein, 17 aa, synthetic construct
AAPNCSNVVCYDGFDIW

SEQ ID NO: 41 - protein, 6 aa, synthetic construct
QDIPNY

SEQ ID NO: 42 - protein, 7 aa, synthetic construct
QQSDTRT

SEQ ID NO: 43 - protein, 105 aa, synthetic construct
DVQLTQFPSSLSASVGDRVTITCRASQDIPNYINWYQQKPGKAPRLLIYAASTLQSGVPSRFSGSGSGTDFTLTISSLQPEDFGTYYCQQSDTRTFGPGTKLEIK

SEQ ID NO: 44 - protein, 8 aa, synthetic construct
GVIVSRNY

SEQ ID NO: 45 - protein, 7 aa, synthetic construct
MFAGGSA

SEQ ID NO: 46 - protein, 12 aa, synthetic construct
ARDLDVRGGLDV

SEQ ID NO: 47 - protein, 118 aa, synthetic construct
EVQLVETGGGLIQPGGSLRLSCAASGVIVSRNYMSWVRQAPGKGLEWVSLMFAGGSAFYSDSVKGRFTISRDDSRNTLYLQMNSLRAEDTAVYYCARDLDVRGGLDVWGQGTTVTVSS

SEQ ID NO: 48 - protein, 6 aa, synthetic construct
QDINNY

SEQ ID NO: 49 - protein, 9 aa, synthetic construct
HQSSTTPWT

SEQ ID NO: 50 - protein, 107 aa, synthetic construct
DIQMTQSPSSLSASVGDRVSITCRASQDINNYLNWYQQKPGKAPRLLIFAASSLQSGVPSRFSGSGSGTDFTLTITSLQPEDFATYYCHQSSTTPWTFGQGTKVEIK

SEQ ID NO: 51 - protein, 8 aa, synthetic construct
EIIVTRNY

SEQ ID NO: 52 - protein, 6 aa, synthetic construct
YPGGTT

SEQ ID NO: 53 - protein, 12 aa, synthetic construct
ARDLDIRGGVDI

SEQ ID NO: 54 - protein, 118 aa, synthetic construct
EVQLVESGGGLVQPGGSLRLSCAASEIIVTRNYMTWVRQAPGKGLEWVSLIYPGGTTYYADSVKGRFTISRDNSKNTLYLQMNSLTTEDTAVYFCARDLDIRGGVDIWGQGTLVTVSS

SEQ ID NO: 55 - protein, 6 aa, synthetic construct
QGIPNY

SEQ ID NO: 56 - protein, 7 aa, synthetic construct
LFAGGSA

SEQ ID NO: 57 - protein, 118 aa, synthetic construct
EVQLVETGGGLIQPGGSLRLSCAASGVIVSRNYMSWVRQAPGKGLEWVSLLFAGGSAFYSDSVKGRFTISRDDSRNTLYLQMNSLRAEDTAVYYCARDLDVRGGLDVWGQGTTVTVSS

SEQ ID NO: 58 - protein, 6 aa, synthetic construct
QGISTY

SEQ ID NO: 59 - protein, 10 aa, synthetic construct
QQVNSSPPVT

SEQ ID NO: 60 - protein, 108 aa, synthetic construct
DIQLTQSPSFLSASVGDRVTMTCRASQGISTYLAWYQQKPGKAPKLLIYAASTLQSGVPSRFSGSGSGTEFTLTISSLQPEDFATYYCQQVNSSPPVTFGQGTRLEIK

SEQ ID NO: 61 - protein, 8 aa, synthetic construct
EIIVNRNY

SEQ ID NO: 62 - protein, 7 aa, synthetic construct
LYAGGST

SEQ ID NO: 63 - protein, 11 aa, synthetic construct
ARDLIDYGMDV

SEQ ID NO: 64 - protein, 117 aa, synthetic construct
EVQLVESGGGLVQPGGSLRLSCAASEIIVNRNYMSWVRQAPGQGLEWVSLLYAGGSTFYADSVKGRFAISRDDSKNTLYLQMNNLRGDDTAVYYCARDLIDYGMDVWGQGTTVTVSS

SEQ ID NO: 65 - protein, 6 aa, synthetic construct
NIGTKS

SEQ ID NO: 66 - protein, 11 aa, synthetic construct
HVWDSSSDHWV

SEQ ID NO: 67 - protein, 108 aa, synthetic construct
SYVLTQPPSVSVAPGQTARITCGGNNIGTKSVHWYQQKPGQAPVLVISSDSDRPSGVPDRFSGSNSGNTATLTISRVEAGDEADYYCHVWDSSSDHWVFGGGTKLTVL

SEQ ID NO: 68 - protein, 8 aa, synthetic construct
GFTFSSYR

SEQ ID NO: 69 - protein, 8 aa, synthetic construct
ISSGSSYI

SEQ ID NO: 70 - protein, 25 aa, synthetic construct
ARAPTLRHSSGWYDPPGTENSSFDL

SEQ ID NO: 71 - protein, 132 aa, synthetic construct
EVQLVESGGGRVKPGGSLRLSCAASGFTFSSYRMNWVRQAPGKGLEWVSSISSGSSYIYFADSVKGRFTISRDNAKNSLFLRMNNLRVEDTAVYYCARAPTLRHSSGWYDPPGTENSSFDLWGRGTLVTVSS

SEQ ID NO: 72 - protein, 9 aa, synthetic construct
SSNIGAGYD

SEQ ID NO: 73 - protein, 13 aa, synthetic construct
QAYVTGLISSGYV

SEQ ID NO: 74 - protein, 113 aa, synthetic construct
QSVLTQPPSVSGAPGQRVTISCTGISSNIGAGYDVHWYQQHPGTAPRLLIYDNTNRPSGVPDRFSGSKSGTSASLAITGLQAEDEADYFCQAYVTGLISSGYVFGTGTKVSVL

SEQ ID NO: 75 - protein, 8 aa, synthetic construct
GYTFTTYL

SEQ ID NO: 76 - protein, 8 aa, synthetic construct
TNPNGDGS

SEQ ID NO: 77 - protein, 13 aa, synthetic construct
ARVDDFWSGYWDY

SEQ ID NO: 78 - protein, 120 aa, synthetic construct
QVQLVQSGAEVKEPGASVKVSCKTSGYTFTTYLIHWVRQAPGQGLEWMGVTNPNGDGSSYALNFQGRVTMTSDTSTSTVYMELSSLRSEDTAIYYCARVDDFWSGYWDYWGQGTLVTVST

SEQ ID NO: 79 - protein, 9 aa, synthetic construct
SSDVGDHNY

SEQ ID NO: 80 - protein, 11 aa, synthetic construct
SSYSTSSTPVV

SEQ ID NO: 81 - protein, 111 aa, synthetic construct
QSALTQPASVSGSPGQSITISCTGTSSDVGDHNYVSWYQRHPGKAPKLMIYEVTNRPSGVSNRFSGSKSGNTASLTISGLQAEDEADYFCSSYSTSSTPVVFGGGTKLTVL

SEQ ID NO: 82 - protein, 10 aa, synthetic construct
GRAFSASGVG

SEQ ID NO: 83 - protein, 7 aa, synthetic construct
IYWDDDK

SEQ ID NO: 84 - protein, 11 aa, synthetic construct
AHHTVPTIFDF

SEQ ID NO: 85 - protein, 119 aa, synthetic construct
QITLKESGPTLVKRKQTLTLTCTFSGFAFSASGVGVGWVRQPPGKGLEWLALIYWDDDKKYSPSLKSRLSITKDTSKNQVVLTLTNVDALDTGTYYCAHHTVPTIFDFWGQGTLVAVSS

SEQ ID NO: 86 - protein, 6 aa, synthetic construct
RGISNQ

SEQ ID NO: 87 - protein, 10 aa, synthetic construct
QQYDIPPTVT

SEQ ID NO: 88 - protein, 108 aa, synthetic construct
DIQMTQSPSSLSASVGDRVTITCQASRGISNQLNWYQQKPGKAPKLLIFDASNLETGVPSRFSGGGSGTHFTFTINSLQPEDIATYYCQQYDIPPTVTFGGGTKVEIK

SEQ ID NO: 89 - protein, 10 aa, synthetic construct
GFSLSTPGVG

SEQ ID NO: 90 - protein, 7 aa, synthetic construct
IYWNDDK

SEQ ID NO: 91 - protein, 14 aa, synthetic construct
AHMLGGVWLVGFDY

SEQ ID NO: 92 - protein, 122 aa, synthetic construct
QITLKESGPTLVKPTQTLTLTCSFSGFSLSTPGVGVGWIRQPPGKALEWLALIYWNDDKNYSPSLRSRLTITKDTSKDQVVLTMTNMDPVDTGTYYCAHMLGGVWLVGFDYWGQGTLVTVSS

SEQ ID NO: 93 - protein, 9 aa, synthetic construct
SSAVGAYIY

SEQ ID NO: 94 - protein, 9 aa, synthetic construct
SSYTTTSVV

SEQ ID NO: 95 - protein, 109 aa, synthetic construct
QSALTQPASVSGSPGQSITISCTATSSAVGAYIYVSWYQQHPGKAPKLMISDVTNRPSGVSNRFSGSKSGNTASLTISGLQAEDEAYYYCSSYTTTSVVFGGGTKLTVL

SEQ ID NO: 96 - protein, 10 aa, synthetic construct
GFSLSTGGVN

SEQ ID NO: 97 - protein, 11 aa, synthetic construct
AHGTTVTIFDY

SEQ ID NO: 98 - protein, 119 aa, synthetic construct
QITLKESGPTLVRPAQTLTLTCSFSGFSLSTGGVNVGWIRQPPGKALEWLALIYWDDDKRYNPSLNSRLTITTDTSKKQVVLTMTNMDPVDTATYYCAHGTTVTIFDYWGQGTLVTVSS

SEQ ID NO: 99 - protein, 7 aa, synthetic construct
QSVRSSY

SEQ ID NO: 100 - protein, 9 aa, synthetic construct
QQYGRSPWT

SEQ ID NO: 101 - protein, 108 aa, synthetic construct
EIVLTQSPGTLSLSPGERGTLSCRASQSVRSSYFAWYQQKPGQAPRLLIYGASNRATGIPDRFSGSGSGTDFTLTISRLEVEDFAIYYCQQYGRSPWTFGQGTKVEIK

SEQ ID NO: 102 - protein, 8 aa, synthetic construct
GFNFYTSA

SEQ ID NO: 103 - protein, 16 aa, synthetic construct
AAPYCNSTICRDGFDL

SEQ ID NO: 104 - protein, 123 aa, synthetic construct
QMQLVQSGPEAKKPGTSVKVSCKASGFNFYTSAVQWVRQARGQRLEWIGWIVVGSGNTDYAQKFQERVTMTRDLSTSTAFLEVSSLRSDDTAFYYCAAPYCNSTICRDGFDLWGQGTVVTVSS

SEQ ID NO: 105 - protein, 6 aa, synthetic construct
QDINKY

SEQ ID NO: 106 - protein, 9 aa, synthetic construct
LHYENLPLS

SEQ ID NO: 107 - protein, 107 aa, synthetic construct
DIQMTQSPSSLSASVGDRVTITCQASQDINKYLNWYQQKPGKAPKLLIYDASNLETGVPSRFSGSGSGTDFTFTISSLQPEDIATYYCLHYENLPLSFGGGTKVEIK

SEQ ID NO: 108 - protein, 8 aa, synthetic construct
GITVSSNY

SEQ ID NO: 109 - protein, 7 aa, synthetic construct
IFSGGST

SEQ ID NO: 110 - protein, 14 aa, synthetic construct
ARVGVAVAGTDYDI

SEQ ID NO: 111 - protein, 120 aa, synthetic construct
EVQLVESGGGLVQPGGSLRLSCAASGITVSSNYMSWVRQPPGKGLDWVSLIFSGGSTYYADSVKGRFTISRDNSKNTLYLQMNSLRAEDTAVYYCARVGVAVAGTDYDIWGQGTMVTVSS

SEQ ID NO: 112 - protein, 6 aa, synthetic construct
QSVGSN

SEQ ID NO: 113 - protein, 12 aa, synthetic construct
QHYNNWPWGLAF

SEQ ID NO: 114 - protein, 109 aa, synthetic construct
EIVLTQSPATLSVSPGERAPLSCRASQSVGSNLAWYQQKPGQAPRLLIYGASTRATGIPARFSGSGSGTEFTLTINSLQPEDFAVYYCQHYNNWPWGLAFGGGTKVEIK

SEQ ID NO: 115 - protein, 8 aa, synthetic construct
GGSFSDYY

SEQ ID NO: 116 - protein, 7 aa, synthetic construct
MYYDGGT

SEQ ID NO: 117 - protein, 15 aa, synthetic construct
ARVGDQLLHNRYFDL

SEQ ID NO: 118 - protein, 121 aa, synthetic construct
QVQLQESGPGLVKPSETLSLTCTVSGGSFSDYYWSWIRQPPGKGLEWIGYMYYDGGTNYNPSLKRRGTLSLDRSKNQFSLKLTSVTAADTAVYYCARVGDQLLHNRYFDLWGRGTLVIVSS

SEQ ID NO: 119 - protein, 9 aa, synthetic construct
NSNIGAGYD

SEQ ID NO: 120 - protein, 11 aa, synthetic construct
QSYDSGLSASV

SEQ ID NO: 121 - protein, 111 aa, synthetic construct
QSVLTQPPSVSGAPGQRVTISCTGTNSNIGAGYDVHWYQQLPGTAPKLLMFRNSNRPSGVPDRFSGSKSGTSASLAITGLRAEDEADYYCQSYDSGLSASVFGGGTKLTVL

SEQ ID NO: 122 - protein, 8 aa, synthetic construct
GGTFSSHS

SEQ ID NO: 123 - protein, 8 aa, synthetic construct
IMPILGIA

SEQ ID NO: 124 - protein, 17 aa, synthetic construct
AREIGYSDYGSSTYFDL

SEQ ID NO: 125 - protein, 124 aa, synthetic construct
QVQLVQSGAEVKKPGSSVKVSCKASGGTFSSHSITWVRQAPGQGLEWMGGIMPILGIATYAQKFQGRVAITADKSTSTAYMELSSLGSEDTAVYYCAREIGYSDYGSSTYFDLWGRGTLVTVSS

SEQ ID NO: 126 - protein, 10 aa, synthetic construct
QQYGNSPWTF

SEQ ID NO: 127 - protein, 108 aa, synthetic construct
EIVLTQSPGTLSLSPGERATLSCRASQSVSSSYLAWYQQKPGQAPRLLIYGASSRATGFPDRFSGSGSGTDFTLTISRLEPEDFAVYYCQQYGNSPWTFGQGTKVEIR

SEQ ID NO: 128 - protein, 17 aa, synthetic construct
AAPYCSGGSCFDGFDIW

SEQ ID NO: 129 - protein, 123 aa, synthetic construct
QMQLVQSGPEVKKPGTSVKVSCKASGFTFTSSAVQWVRQARGQRLEWIGWIVVGSGNTNYAQKFQERVTITRDMSTSTAYMELSSLRSEDTAVYYCAAPYCSGGSCFDGFDIWGQGTMVTVSS

SEQ ID NO: 130 - protein, 6 aa, synthetic construct
QGISSW

SEQ ID NO: 131 - protein, 10 aa, synthetic construct
QQAKSFPITF

SEQ ID NO: 132 - protein, 107 aa, synthetic construct
DIQMTQSPSSVSASVGDRVIITCRASQGISSWLAWYQQKPGKAPKVLIYDASSLQSGVPSRFSGSGYGTDFTLTISSLQPEDSATYYCQQAKSFPITFGQGTRLEIK

SEQ ID NO: 133 - protein, 8 aa, synthetic construct
GFTFSSYA

SEQ ID NO: 134 - protein, 8 aa, synthetic construct
ISYDGSNQ

SEQ ID NO: 135 - protein, 22 aa, synthetic construct
CARDLAIAVAGTWHYYNGMDVW

SEQ ID NO: 136 - protein, 127 aa, synthetic construct
QVQLVESGGGVVQPGRSLRLSCAASGFTFSSYAFHWVRQAPGKGLEWVAVISYDGSNQYYADSVKGRFTISRDNSKNTLYLQMNSLRADDTAVYYCARDLAIAVAGTWHYYNGMDVWGQGTTVTVSS

SEQ ID NO: 137 - protein, 129 aa, synthetic construct
SASGSGQMQLVQSGPEVKKPGTSVKVSCKASGFTFTSSAVQWVRQARGQRLEWIGWIVVGSGNTNYAQKFQERVTITRDMSTSTAYMELSSLRSEDTAVYYCAAPNCSNVVCYDGFDIWGQGTMVTVSS

SEQ ID NO: 138 - protein, 6 aa, synthetic construct
QDISNY

SEQ ID NO: 139 - protein, 11 aa, synthetic construct
CQQHDNVPLTF

SEQ ID NO: 140 - protein, 107 aa, synthetic construct
DIQMTQSPSSLSASVGDRVTITCQASQDISNYLNWYQQKPGKAPKVLISDASNLETGVPSRFSGSGSGTDFIFTISSLQLEDVATYYCQQHDNVPLTFGGGTKVEIK

SEQ ID NO: 141 - protein, 9 aa, synthetic construct
GYSFTTNYA

SEQ ID NO: 142 - protein, 8 aa, synthetic construct
INVGNDNT

SEQ ID NO: 143 - protein, 21 aa, synthetic construct
ARSTPFYDRRGFYFLGYFQHW

SEQ ID NO: 144 - protein, 128 aa, synthetic construct
QVQLVQSGAEVKKPGASVKVSCKASGYSFTTNYAMHWVRQAPGQRLEWMGWINVGNDNTKYSQKFQGRVTITRDTSASTVNMELSSLRSEDTAVYYCARSTPFYDRRGFYFLGYFQHWGQGTLVTVSS

SEQ ID NO: 145 - protein, 6 aa, synthetic construct
QTIVGY

SEQ ID NO: 146 - protein, 12 aa, synthetic construct
CQQSYLTPPNTF

SEQ ID NO: 147 - protein, 108 aa, synthetic construct
DVQMTQSPSSLSASVGDRVTITCRASQTIVGYLNWYQQQPGRAPKLLIYAASNLQSGVPPRFSGSGSGTDFTLTISDLQPEDFATYYCQQSYLTPPNTFGQGTKLEIK

SEQ ID NO: 148 - protein, 8 aa, synthetic construct
GGTFSDSA

SEQ ID NO: 149 - protein, 8 aa, synthetic construct
IIPIFSTI

SEQ ID NO: 150 - protein, 19 aa, synthetic construct
CARDRPIAVEYTGNWFDPW

SEQ ID NO: 151 - protein, 124 aa, synthetic construct
QVQLVQSGAEVKKPGSSVKVSCKVSGGTFSDSAVSWVRQAPGQGLEWMGRIIPIFSTIEYAQNFQGRVTITADESTTTVYMELSYLGLEDTAVYYCARDRPIAVEYTGNWFDPWGQGTLVTVSS

SEQ ID NO: 152 - protein, 6 aa, synthetic construct
QSVSSL

SEQ ID NO: 153 - protein, 10 aa, synthetic construct [sequence omitted]

SEQ ID NO: 154 - protein, 106 aa, synthetic construct
EIVLTQSPATLSVSPGERATLSCRASQSVSSLLAWYQRKPGQPPRLLIYGASTRATGIPARFSGSGSGTEFTLTISSLQSEDFAVYYCQQYNDWWTFGQGTKVEIK

SEQ ID NO: 155 - protein, 8 aa, synthetic construct
GYTFTDYF

SEQ ID NO: 156 - protein, 8 aa, synthetic construct
INPDDGDT

SEQ ID NO: 157 - protein, 17 aa, synthetic construct
CARGTFSLRGFDWFDPW

SEQ ID NO: 158 - protein, 122 aa, synthetic construct
QVHLVQSGAEVKKPGASVKVSCKASGYTFTDYFIHWVRQAPGQGLEWMGWINPDDGDTNYAQKFHGWVAMTRDTSINTAYMELSRLKSNDTAVYYCARGTFSLRGFDWFDPWGQGTLVTVSS

SEQ ID NO: 159 - protein, 6 aa, synthetic construct
QGINRY

SEQ ID NO: 160 - protein, 10 aa, synthetic construct
CQHLNDYPVF

SEQ ID NO: 161 - protein, 106 aa, synthetic construct
DIQLTQSPSFLSASVGDRVTITCRASQGINRYLAWYQQKPGKAPKLLIYGASTLQSGVPSRFSGSGSGTEFTLTISSLQAEDFATYFCQHLNDYPVFGPGTKVNIK

SEQ ID NO: 162 - protein, 8 aa, synthetic construct
EIIVSRNY

SEQ ID NO: 163 - protein, 7 aa, synthetic construct
LYAGGSK

SEQ ID NO: 164 - protein, 13 aa, synthetic construct
CARGWDYYGMDVW

SEQ ID NO: 165 - protein, 117 aa, synthetic construct
EVQLVESGGGLIQPGGSLRLSCAASEIIVSRNYMNWVRQAPGKGLEWVSVLYAGGSKFYADSVKGRFTISRDDSNNTLYLQMSSLRVEDTAIYYCARGWDYYGMDVWGQGTTVTVAS

SEQ ID NO: 166 - protein, 6 aa, synthetic construct
QTIGIY

SEQ ID NO: 167 - protein, 12 aa, synthetic construct
CQQSYITPQGTF

SEQ ID NO: 168 - protein, 108 aa, synthetic construct
DIQMTQSPSSLSASVGDKITITCRASQTIGIYLNWYQQKPGKGPKLLVYAASNLHTGVPSRFSGSGSGTDFTLTISSLQPEDFALYYCQQSYITPQGTFGQGTKVEIK

SEQ ID NO: 169 - protein, 8 aa, synthetic construct
ISDDGRMK

SEQ ID NO: 170 - protein, 16 aa, synthetic construct
CTREDSRGLYWYFDLW

SEQ ID NO: 171 - protein, 121 aa, synthetic construct
QGQLVESGGGVVQPGRSLRLSCAASGFTFSSYAMHWVRQTPGKGPEWVALISDDGRMKMYEDSVKGRFIISRDNPKNTLHLQLNTLRAEDTAVYYCTREDSRGLYWYFDLWGRGTLVTVSS

SEQ ID NO: 172 - protein, 6 aa, synthetic construct
QDINNF

SEQ ID NO: 173 - protein, 11 aa, synthetic construct
CQHYDNPPYTF

SEQ ID NO: 174 - protein, 107 aa, synthetic construct
DIQMTQSPSSLSASVGDRVTITCQASQDINNFLNWYQQKPGKAPKLLIYDASNLETGVPSRFSGSGSGTDFTFTIISLQPEDIATYYCQHYDNPPYTFGQGTKLEIK

SEQ ID NO: 175 - protein, 8 aa, synthetic construct
EITVIRNY

SEQ ID NO: 176 - protein, 7 aa, synthetic construct
IYPGGST

SEQ ID NO: 177 - protein, 15 aa, synthetic construct
CSRPIVGGRRGMDVW

SEQ ID NO: 178 - protein, 119 aa, synthetic construct
EEQLVVSGGGLVQPGGSLRLSCTASEITVIRNYMNWVRQAPGKGLEWVSVIYPGGSTFYADSVQGRFTISRDNSKNTLYLQMNSLRAEDTAVYYCSRPIVGGRRGMDVWGQGTTVTVSS

SEQ ID NO: 179 - protein, 9 aa, synthetic construct
SSDVGDYNY

SEQ ID NO: 180 - protein, 12 aa, synthetic construct
CSSYAGNNNAVF

SEQ ID NO: 181 - protein, 110 aa, synthetic construct
QSALTQPPSASGSPGQSVTISCTGTSSDVGDYNYVSWYQHHPGKAPKLIIYDVSKRPSGVPDRFSGSKSGDTASLTVSGLQAEDEADYYCSSYAGNNNAVFGTGTKVTVL

SEQ ID NO: 182 - protein, 8 aa, synthetic construct
GFTFTNYA

SEQ ID NO: 183 - protein, 8 aa, synthetic construct
ISNDGSDK

SEQ ID NO: 184 - protein, 15 aa, synthetic construct
CARDPPQVHWSLDYW

SEQ ID NO: 185 - protein, 120 aa, synthetic construct
QVQLVESGGGVVQPGRSLRLSCAASGFTFTNYAMHWVRQAPGKGLEWVAVISNDGSDKYYADSVKGRFTISRDNSKSTVYLQMSSLRPEDTAVYFCARDPPQVHWSLDYWGQGTLVTVSS

SEQ ID NO: 186 - protein, 6 aa, synthetic construct
ALPRKY

SEQ ID NO: 187 - protein, 13 aa, synthetic construct [sequence omitted]

SEQ ID NO: 188 - protein, 108 aa, synthetic construct
SYELTQPPSVSVSPGQTARITCSGDALPRKYAFWYQQKSGQAPVLVISEDSKRPSGIPERFSGSSSGTMATLTISGAQVEDEADYYCYSTDSSGNHRVFGGGTKLTVL

SEQ ID NO: 189 - protein, 8 aa, synthetic construct
GFTFSNYG

SEQ ID NO: 190 - protein, 17 aa, synthetic construct
CAKESQFGELFEALDYW

SEQ ID NO: 191 - protein, 122 aa, synthetic construct
QVQLVESGGGVVQPGRSLRLSCAASGFTFSNYGMHWVRQAPGKGLEWLAVISYDGSNKYYADSVKGRFTISRDNSKNTLFLQMNSLRAEDTAVYYCAKESQFGELFEALDYWGQGTLVTVSS

SEQ ID NO: 192 - protein, 6 aa, synthetic construct
NIGSKS

SEQ ID NO: 193 - protein, 13 aa, synthetic construct
CQVWDGSGDPWVF

SEQ ID NO: 194 - protein, 108 aa, synthetic construct
SYVLTQPPSVSVAPGQTARITCGGNNIGSKSVHWYQQKPGQAPVLVVYDDSDRPSGIPERFSGSNSGNTATLTISRVEAGDEADYYCQVWDGSGDPWVFGGGTKLTVL

SEQ ID NO: 195 - protein, 8 aa, synthetic construct
GLIFSTYD

SEQ ID NO: 196 - protein, 8 aa, synthetic construct
ISYDGSYK

SEQ ID NO: 197 - protein, 17 aa, synthetic construct
CAKGEGVVAGTGKFDYW

SEQ ID NO: 198 - protein, 122 aa, synthetic construct
QVQLVESGGGVVQPGRSLRLSCVVSGLIFSTYDMHWVRQAPGKGLEWVAVISYDGSYKHYADSVKGRFTISRDSSKNTLYLQMNSLRPEDTAVYYCAKGEGVVAGTGKFDYWGQGTLVTVSS

SEQ ID NO: 199 - protein, 6 aa, synthetic construct
ALPKQY

SEQ ID NO: 200 - protein, 12 aa, synthetic construct [sequence omitted]

SEQ ID NO: 201 - protein, 107 aa, synthetic construct
SYELTQPPSVSVSPGQTARITCSGDALPKQYAYWYQQKPGQAPVVVIYKDSERPSGIPERFSGSSSGTTVTLTISGVQAEDEADYYCQSADSSGTWVFGGGTKLTVL

SEQ ID NO: 202 - protein, 8 aa, synthetic construct
GFTFSSYG

SEQ ID NO: 203 - protein, 18 aa, synthetic construct
CAKDYWSVAAGTSWFDPW

SEQ ID NO: 204 - protein, 123 aa, synthetic construct
QVQLVESGGGVVQPGRSLRLSCAASGFTFSSYGMHWVRQAPGKGLEWVAFISYDGSNKYYADSVKGRFTISRDNSKNTLYLQMNSLRAEDTAVYYCAKDYWSVAAGTSWFDPWGQGTLVSVSS

SEQ ID NO: 205 - protein, 6 aa, synthetic construct
QSVSNN

SEQ ID NO: 206 - protein, 10 aa, synthetic construct [sequence omitted]

SEQ ID NO: 207 - protein, 106 aa, synthetic construct
EIVMTQSPATLSVSPGERATLSCRASQSVSNNLAWYQQKPGQAPRLLIYGASTRATGIPARFSGSGSGTEFTLTISSLQSEDFAVYYCQQYNNWPLFGQGTKVEIK

SEQ ID NO: 208 - protein, 8 aa, synthetic construct
GFTFDDYA

SEQ ID NO: 209 - protein, 8 aa, synthetic construct
ISWNSGDI

SEQ ID NO: 210 - protein, 19 aa, synthetic construct
CTKGWFGEFFGAGSICDYW

SEQ ID NO: 211 - protein, 124 aa, synthetic construct
EVQLVESGGGLVQPGRSLRLSCAASGFTFDDYAMHWVRQTPGKGLEWVSGISWNSGDIDYADSVKGRFTISRDNAKNSLYLQMNSLRTEDTALYYCTKGWFGEFFGAGSICDYWGQGTLVTVSS

SEQ ID NO: 212 - protein, 6 aa, synthetic construct
QSVSTN

SEQ ID NO: 213 - protein, 13 aa, synthetic construct
CQQYDNWPPEFTF

SEQ ID NO: 214 - protein, 109 aa, synthetic construct
EIVMTQSPATLSVSPGERATLSCRASQSVSTNLAWYQQKPGQAPRLLIYGASTRATGIPARFSGSGSGTEFTLTISSLQSEDFALYYCQQYDNWPPEFTFGPGTKVDIK

SEQ ID NO: 215 - protein, 8 aa, synthetic construct
GYTFTSNG

SEQ ID NO: 216 - protein, 8 aa, synthetic construct
ISTYNGDT

SEQ ID NO: 217 - protein, 20 aa, synthetic construct
CARVGDAYCSGGSCYHFDYW

SEQ ID NO: 218 - protein, 125 aa, synthetic construct
QVQLVQSGAEVKKPGASVKVSCKASGYTFTSNGVTWVRQAPGQGLEWMGWISTYNGDTNYAQKLQGRVSMTTDTSTRTVYMELRSLRSDDTAVYYCARVGDAYCSGGSCYHFDYWGQGTLVTVSS

SEQ ID NO: 219 - protein, 6 aa, synthetic construct
QSITSW

SEQ ID NO: 220 - protein, 11 aa, synthetic construct
CQQYNSYPWTF

SEQ ID NO: 221 - protein, 107 aa, synthetic construct
DIQMTQSPSTLSASVGDRVTITCRASQSITSWLAWYQQKPGKAPKLLIYDASSLESGVPSRFSGSGSGTEFTLTISSLQPDDFATYYCQQYNSYPWTFGQGTKVEIK

SEQ ID NO: 222 - protein, 8 aa, synthetic construct
GFTFSSFG

SEQ ID NO: 223 - protein, 8 aa, synthetic construct
IRYDGSNK

SEQ ID NO: 224 - protein, 17 aa, synthetic construct
CAKTELYYYDSSGPLGW

SEQ ID NO: 225 - protein, 122 aa, synthetic construct
QVQLVESGGGVVQPGGSLRLSCAASGFTFSSFGMHWVRQAPGKGLEWVAFIRYDGSNKYYADSVKGRFTISRDNSKNTLYLQMNSLRAEDTAVYYCAKTELYYYDSSGPLGWGQGTLVTVSS

SEQ ID NO: 226 - protein, 6 aa, synthetic construct
QSISSW

SEQ ID NO: 227 - protein, 11 aa, synthetic construct [sequence omitted]

SEQ ID NO: 228 - protein, 107 aa, synthetic construct
DIQMTQSPSTLSASVGDRVTITCRASQSISSWLAWYQQKPGQAPKLLIYDASSLESGVPSRFSGSGSGTEFTLTISSLQPDDFATYYCQQYNSYSRTFGQGTKVEIK

SEQ ID NO: 229 - protein, 8 aa, synthetic construct
GFTFSNYA

SEQ ID NO: 230 - protein, 18 aa, synthetic construct
CARVGPYQYDSSAAFDIW

SEQ ID NO: 231 - protein, 123 aa, synthetic construct
QVQLVESGGGVVQPGRSLRLSCAASGFTFSNYAIHWVRQAPGKGLEWVAVISYDGSNKYYADSVKGRFTISRDNSKNTLYLEMNSLRAEDMAVYYCARVGPYQYDSSAAFDIWGQGTMVTVSS

SEQ ID NO: 232 - protein, 6 aa, synthetic construct
QDISNY

SEQ ID NO: 233 - protein, 11 aa, synthetic construct
CQKYNSPWHTF

SEQ ID NO: 234 - protein, 107 aa, synthetic construct
DIQMTQSPSSLSASVGDRVTITCRASQDISNYLAWYQQKPGKVPKLLIYAASTLQSGVPSRFSGSGSGTDFTLTISSLQPEDVATYYCQKYNSPWHTFGGGTKVEIK

SEQ ID NO: 235 - protein, 8 aa, synthetic construct
GFTFSSYG

SEQ ID NO: 236 - protein, 8 aa, synthetic construct
ISHDGSYK

SEQ ID NO: 237 - protein, 15 aa, synthetic construct
CAKSYGYWMAYFDYW

SEQ ID NO: 238 - protein, 120 aa, synthetic construct
QVHLEESGGAVVQPGRSLRLSCAASGFTFSSYGMHWVRQAPGKGLEWVAVISHDGSYKYYADSVKGRFTISRDNSKDTLYLQTNSLRAEDTAMYYCAKSYGYWMAYFDYWGQGTLVTVSS

SEQ ID NO: 239 - protein, 11 aa, synthetic construct [sequence omitted]

SEQ ID NO: 240 - protein, 108 aa, synthetic construct; identical to SEQ ID NO: 127

SEQ ID NO: 241 - protein, 18 aa, synthetic construct
CAAPNCSNVVCYDGFDIW

SEQ ID NO: 242 - protein, 11 aa, synthetic construct [sequence omitted]

SEQ ID NO: 243 - protein, 108 aa, synthetic construct; identical to SEQ ID NO: 39

SEQ ID NO: 244 - protein, 18 aa, synthetic construct
CAAPYCSGGSCFDGFDIW

SEQ ID NO: 245 - protein, 123 aa, synthetic construct; identical to SEQ ID NO: 129

SEQ ID NO: 246 - protein, 12 aa, synthetic construct
CQQYGGLTGWTF

SEQ ID NO: 247 - protein, 109 aa, synthetic construct
EIVLTQSPGTLSLSPGERATLSCRASQSVSSSYLAWYQQKPGQAPRLLIYGASSRATGFPDRFSGSGSGTDFTLTISRLEPEDFAVYYCQQYGGLTGWTFGQGTKVEIR

SEQ ID NO: 248 - protein, 18 aa, synthetic construct
CAAPYCSGGSCFDGFDIW

SEQ ID NO: 249 - protein, 12 aa, synthetic construct
CQQYVGLTGWTF

SEQ ID NO: 250 - protein, 109 aa, synthetic construct
EIVLTQSPGTLSLSPGERATLSCRASQSVSSSYLAWYQQKPGQAPRLLIYGASSRATGFPDRFSGSGSGTDFTLTISRLEPEDFAVYYCQQYVGLTGWTFGQGTKVEIR

SEQ ID NO: 251 - protein, 109 aa, synthetic construct
EIVLTQSPGTLSLSPGERATLSCRASQSVSSSYLAWYQQKPGQAPRLLIYSASSRATGIPDRFSGSGSGTDFTLTISRLEPEDFAVYFCQQYGGLTGWTFGQGTKVEIK

SEQ ID NO: 252 - protein, 109 aa, synthetic construct
EIVLTQSPGTLSLSPGERATLSCRASQSVSSSYLAWYQQKPGQAPRLLIYSASSRATGIPDRFSGSGSGTDFTLTISRLEPEDFAVYYCQQYVGLTGWTFGQGTKVEIK

SEQ ID NO: 253 - protein, 18 aa, synthetic construct
CAAPNCSNVVCADGFDIW

SEQ ID NO: 254 - protein, 123 aa, synthetic construct
QMQLVQSGPEVKKPGTSVKVSCKASGFTFTSSAVQWVRQARGQRLEWIGWIVVGSGNTNYAQKFQERVTITRDMSTSTAYMELSSLRSEDTAVYYCAAPNCSNVVCADGFDIWGQGTMVTVSS

SEQ ID NO: 255 - protein, 109 aa, synthetic construct
DIVLTQTPGTLSLSPGERATLSCRASQSVSSSYLAWYQQKPGQAPRLLIYGASSRATGIPDRFSGSGSGTDFTLTISRLEPEDFAVYYCQQYVGLTGWTFGQGTKVEIK

SEQ ID NO: 256 - protein, 11 aa, synthetic construct [sequence omitted]

SEQ ID NO: 257 - protein, 18 aa, synthetic construct
CAAPYCSNVVCFDGFDIW

SEQ ID NO: 258 - protein, 123 aa, synthetic construct
QMQLVQSGPEVKKPGTSVKVSCKASGFTFTSSAVQWVRQARGQRLEWIGWIVVGSGNTNYAQKFQERVTITRDMSTSTAYMELSSLRSEDTAVYYCAAPYCSNVVCFDGFDIWGQGTMVTVSS

SEQ ID NO: 259 - protein, 18 aa, synthetic construct
CAAPYCSGVVCFDGFDIW

SEQ ID NO: 260 - protein, 123 aa, synthetic construct
QMQLVQSGPEVKKPGTSVKVSCKASGFTFTSSAVQWVRQARGQRLEWIGWIVVGSGNTNYAQKFQERVTITRDMSTSTAYMELSSLRSEDTAVYYCAAPYCSGVVCFDGFDIWGQGTMVTVSS

SEQ ID NO: 261 - protein, 18 aa, synthetic construct
CAAPYCSGGVCFDGFDIW

SEQ ID NO: 262 - protein, 123 aa, synthetic construct
QMQLVQSGPEVKKPGTSVKVSCKASGFTFTSSAVQWVRQARGQRLEWIGWIVVGSGNTNYAQKFQERVTITRDMSTSTAYMELSSLRSEDTAVYYCAAPYCSGGVCFDGFDIWGQGTMVTVSS

SEQ ID NO: 263 - protein, 18 aa, synthetic construct
CAAPYCSGGSCYDGFDIW

SEQ ID NO: 264 - protein, 123 aa, synthetic construct
QMQLVQSGPEVKKPGTSVKVSCKASGFTFTSSAVQWVRQARGQRLEWIGWIVVGSGNTNYAQKFQERVTITRDMSTSTAYMELSSLRSEDTAVYYCAAPYCSGGSCYDGFDIWGQGTMVTVSS

SEQ ID NO: 265 - protein, 18 aa, synthetic construct
CAAPNCSGGSCFDGFDIW

SEQ ID NO: 266 - protein, 123 aa, synthetic construct
QMQLVQSGPEVKKPGTSVKVSCKASGFTFTSSAVQWVRQARGQRLEWIGWIVVGSGNTNYAQKFQERVTITRDMSTSTAYMELSSLRSEDTAVYYCAAPNCSGGSCFDGFDIWGQGTMVTVSS

SEQ ID NO: 267 - protein, 18 aa, synthetic construct
CAAPYCSNGVCFDGFDIW

SEQ ID NO: 268 - protein, 123 aa, synthetic construct
QMQLVQSGPEVKKPGTSVKVSCKASGFTFTSSAVQWVRQARGQRLEWIGWIVVGSGNTNYAQKFQERVTITRDMSTSTAYMELSSLRSEDTAVYYCAAPYCSNGVCFDGFDIWGQGTMVTVSS

SEQ ID NO: 269 - protein, 18 aa, synthetic construct
CAAPNCSGGVCYDGFDIW

SEQ ID NO: 270 - protein, 123 aa, synthetic construct
QMQLVQSGPEVKKPGTSVKVSCKASGFTFTSSAVQWVRQARGQRLEWIGWIVVGSGNTNYAQKFQERVTITRDMSTSTAYMELSSLRSEDTAVYYCAAPNCSGGVCYDGFDIWGQGTMVTVSS

SEQ ID NO: 271 - protein, 17 aa, synthetic construct
AAPYCSNVSCFDGFDIW

SEQ ID NO: 272 - protein, 123 aa, synthetic construct
QMQLVQSGPEVKKPGTSVKVSCKASGFTFTSSAVQWVRQARGQRLEWIGWIVVGSGNTNYAQKFQERVTITRDMSTSTAYMELSSLRSEDTAVYYCAAPYCSNVSCFDGFDIWGQGTMVTVSS

SEQ ID NO: 273 - protein, 7 aa, synthetic construct
IVVGSGN

SEQ ID NO: 274 - protein, 18 aa, synthetic construct
CAAPNCSNVSCFDGFDIW

SEQ ID NO: 275 - protein, 123 aa, synthetic construct
QMQLVQSGPEVKKPGTSVKVSCKASGFTFTSSAVQWVRQARGQRLEWIGWIVVGSGNTNYAQKFQERVTITRDMSTSTAYMELSSLRSEDTAVYYCAAPNCSNVSCFDGFDIWGQGTMVTVSS

SEQ ID NO: 276 - protein, 18 aa, synthetic construct
CAAPYCSGVVCYDGFDIW

SEQ ID NO: 277 - protein, 123 aa, synthetic construct
QMQLVQSGPEVKKPGTSVKVSCKASGFTFTSSAVQWVRQARGQRLEWIGWIVVGSGNTNYAQKFQERVTITRDMSTSTAYMELSSLRSEDTAVYYCAAPYCSGVVCYDGFDIWGQGTMVTVSS

SEQ ID NO: 278 - protein, 18 aa, synthetic construct
CAAPYCSGVSCFDGFDIW

SEQ ID NO: 279 - protein, 123 aa, synthetic construct
QMQLVQSGPEVKKPGTSVKVSCKASGFTFTSSAVQWVRQARGQRLEWIGWIVVGSGNTNYAQKFQERVTITRDMSTSTAYMELSSLRSEDTAVYYCAAPYCSGVSCFDGFDIWGQGTMVTVSS

SEQ ID NO: 280 - protein, 123 aa, synthetic construct
QMQLVQSGPEVKKPGTSVKVSCKASGFTFTSSAVQWVRQARGQRLEWIGWIVVGSGNTNYAQKFQERVTITRDMSTSTAYMELSSLRSEDTAVYYCAAPYCSNGSCFDGFDIWGQGTMVTVSS

SEQ ID NO: 281 - protein, 18 aa, synthetic construct
CAAPYCSGGSCSDGFDIW

SEQ ID NO: 282 - protein, 123 aa, synthetic construct
QMQLVQSGPEVKKPGTSVKVSCKASGFTFTSSAVQWVRQARGQRLEWIGWIVVGSGNTNYAQKFQERVTITRDMSTSTAYMELSSLRSEDTAVYYCAAPYCSGGSCSDGFDIWGQGTMVTVSS

SEQ ID NO: 283 - protein, 11 aa, synthetic construct [sequence omitted]

SEQ ID NO: 284 - protein, 108 aa, synthetic construct
EIVLTQSPGTLSLSPGERATLSCRASQSVSSSYLAWYQQKPGQAPRLLIYGASSRATGFPDRFSGSGSGTDFTLTISRLEPEDFAVYYCQQYVNSPWTFGQGTKVEIR

SEQ ID NO: 285 - protein, 11 aa, synthetic construct [sequence omitted]

SEQ ID NO: 286 - protein, 108 aa, synthetic construct
EIVLTQSPGTLSLSPGERATLSCRASQSVSSSYLAWYQQKPGQAPRLLIYGASSRATGFPDRFSGSGSGTDFTLTISRLEPEDFAVYYCQQYGNLPWTFGQGTKVEIR

SEQ ID NO: 287 - protein, 11 aa, synthetic construct [sequence omitted]

SEQ ID NO: 288 - protein, 11 aa, synthetic construct
CQQYGGLTWTF

SEQ ID NO: 289 - protein, 108 aa, synthetic construct
EIVLTQSPGTLSLSPGERATLSCRASQSVSSSYLAWYQQKPGQAPRLLIYGASSRATGFPDRFSGSGSGTDFTLTISRLEPEDFAVYYCQQYGGLTWTFGQGTKVEIR

SEQ ID NO: 290 - protein, 12 aa, synthetic construct
CQQYGNLTGWTF

SEQ ID NO: 291 - protein, 109 aa, synthetic construct
EIVLTQSPGTLSLSPGERATLSCRASQSVSSSYLAWYQQKPGQAPRLLIYGASSRATGFPDRFSGSGSGTDFTLTISRLEPEDFAVYYCQQYGNLTGWTFGQGTKVEIR

SEQ ID NO: 292 - protein, 12 aa, synthetic construct
CQQYGNSTGWTF

SEQ ID NO: 293 - protein, 109 aa, synthetic construct
EIVLTQSPGTLSLSPGERATLSCRASQSVSSSYLAWYQQKPGQAPRLLIYGASSRATGFPDRFSGSGSGTDFTLTISRLEPEDFAVYYCQQYGNSTGWTFGQGTKVEIR

SEQ ID NO: 294 - protein, 12 aa, synthetic construct
CQQYGNSPGWTF

SEQ ID NO: 295 - protein, 109 aa, synthetic construct
EIVLTQSPGTLSLSPGERATLSCRASQSVSSSYLAWYQQKPGQAPRLLIYGASSRATGFPDRFSGSGSGTDFTLTISRLEPEDFAVYYCQQYGNSPGWTFGQGTKVEIR

SEQ ID NO: 296 - protein, 11 aa, synthetic construct [sequence omitted]

SEQ ID NO: 297 - protein, 18 aa, synthetic construct
CAAPNCSNVVCSDGFDIW

SEQ ID NO: 298 - protein, 123 aa, synthetic construct
QMQLVQSGPEVKKPGTSVKVSCKASGFTFTSSAVQWVRQARGQRLEWIGWIVVGSGNTNYAQKFQERVTITRDMSTSTAYMELSSLRSEDTAVYYCAAPNCSNVVCSDGFDIWGQGTMVTVSS

SEQ ID NO: 299 - protein, 108 aa, synthetic construct
EIVLTQSPGTLSLSPGERATLSCRASQSVSSSYLAWYQQKPGQAPRLLIYGASSRATGIPDRFSGSGSGTDFTLTISRLEPEDFAVYFCQQYGTSPWTFGQGTKVEIK

SEQ ID NO: 300 - protein, 108 aa, synthetic construct
EIVLTQSPGTLSLSPGERATLSCRASQSVSSSYLAWYQQKPGQAPRLLIYSASSRATGIPDRFSGSGSGTDFTLTISRLEPEDFAVYYCQQYGTSPWTFGQGTKVEIK

SEQ ID NO: 301 - protein, 11 aa, synthetic construct [sequence omitted]

SEQ ID NO: 302 - protein, 108 aa, synthetic construct
EIVLTQSPGTLSLSPGERATLSCRASQSVSSSYLAWYQQKPGQAPRLLIYSASSRATGIPDRFSGSGSGTDFTLTISRLEPEDFAVYFCQQYVTSPWTFGQGTKVEIK

SEQ ID NO: 303 - protein, 108 aa, synthetic construct
EIVLTQSPGTLSLSPGERATLSCRASQSVSSSYLAWYQQKPGQAPRLLIYSASSRATGIPDRFSGSGSGTDFTLTISRLEPEDFAVYFCQQYGGSPWTFGQGTKVEIK

SEQ ID NO: 304 - protein, 11 aa, synthetic construct [sequence omitted]

SEQ ID NO: 305 - protein, 108 aa, synthetic construct
EIVLTQSPGTLSLSPGERATLSCRASQSVSSSYLAWYQQKPGQAPRLLIYSASSRATGIPDRFSGSGSGTDFTLTISRLEPEDFAVYFCQQYGTLPWTFGQGTKVEIK

SEQ ID NO: 306 - protein, 11 aa, synthetic construct [sequence omitted]

SEQ ID NO: 307 - protein, 108 aa, synthetic construct
EIVLTQSPGTLSLSPGERATLSCRASQSVSSSYLAWYQQKPGQAPRLLIYSASSRATGIPDRFSGSGSGTDFTLTISRLEPEDFAVYFCQQYGTSTWTFGQGTKVEIK

SEQ ID NO: 308 - protein, 108 aa, synthetic construct
EIVLTQSPGTLSLSPGERATLSCRASQSVSSSYLAWYQQKPGQAPRLLIYSASSRATGIPDRFSGSGSGTDFTLTISRLEPEDFAVYFCQQYGGLTWTFGQGTKVEIK

SEQ ID NO: 309 - protein, 11 aa, synthetic construct
CQQYVGLTWTF

SEQ ID NO: 310 - protein, 108 aa, synthetic construct
EIVLTQSPGTLSLSPGERATLSCRASQSVSSSYLAWYQQKPGQAPRLLIYSASSRATGIPDRFSGSGSGTDFTLTISRLEPEDFAVYFCQQYVGLTWTFGQGTKVEIK

SEQ ID NO: 311 - protein, 12 aa, synthetic construct
CQQYGTLTGWTF

SEQ ID NO: 312 - protein, 109 aa, synthetic construct
EIVLTQSPGTLSLSPGERATLSCRASQSVSSSYLAWYQQKPGQAPRLLIYSASSRATGIPDRFSGSGSGTDFTLTISRLEPEDFAVYFCQQYGTLTGWTFGQGTKVEIK

SEQ ID NO: 313 - protein, 12 aa, synthetic construct
CQQYGTSTGWTF

SEQ ID NO: 314 - protein, 109 aa, synthetic construct
EIVLTQSPGTLSLSPGERATLSCRASQSVSSSYLAWYQQKPGQAPRLLIYSASSRATGIPDRFSGSGSGTDFTLTISRLEPEDFAVYFCQQYGTSTGWTFGQGTKVEIK

SEQ ID NO: 315 - protein, 109 aa, synthetic construct
EIVLTQSPGTLSLSPGERATLSCRASQSVSSSYLAWYQQKPGQAPRLLIYSASSRATGIPDRFSGSGSGTDFTLTISRLEPEDFAVYYCQQYGGLTGWTFGQGTKVEIK

SEQ ID NO: 316 - protein, 12 aa, synthetic construct [sequence omitted]

SEQ ID NO: 317 - protein, 107 aa, synthetic construct; identical to SEQ ID NO: 201

SEQ ID NO: 318 - protein, 8 aa, synthetic construct
GFIFSSYG

SEQ ID NO: 319 - protein, 8 aa, synthetic construct
IWHDESNK

SEQ ID NO: 320 - protein, 18 aa, synthetic construct
CARDGYDFLTGAYELDYW

SEQ ID NO: 321 - protein, 123 aa, synthetic construct
QVQLVESGGGVVQPGRSLRLSCAASGFIFSSYGVHWVRQAPGKGLEWVAVIWHDESNKDYADSVKGRFTISRDNSKNTVYLQMNSLRAEDTAMYYCARDGYDFLTGAYELDYWGQGTLVTVSS

SEQ ID NO: 322 - protein, 18 aa, synthetic construct
CAAPYCSNGSCFDGFDIW

SEQ ID NO: 323 - protein, 109 aa, synthetic construct
EEIVLTQSPGTLSLSPGERATLSCRASQSVSSSYLAWYQQKPGQAPRLLIYGASSRATGFPDRFSGSGSGTDFTLTISRLEPEDFAVYYCQQYGGSPWTFGQGTKVEIR

SEQ ID NO: 324 - protein, 6 aa, synthetic construct
QSVAIN

SEQ ID NO: 325 - protein, 12 aa, synthetic construct
CVLYMGRGIVVF

SEQ ID NO: 326 - protein, 11 aa, synthetic construct [sequence omitted]

SEQ ID NO: 327 - protein, 18 aa, synthetic construct
CAAPNCSNVVCYDGFDIW

SEQ ID NO: 328 - protein, 7 aa, synthetic construct
IYPGGTT

SEQ ID NO: 329 - protein, 11 aa, synthetic construct [sequence omitted]

SEQ ID NO: 330 - protein, 18 aa, synthetic construct
CAAPNCSGGVCFDGFDIW

SEQ ID NO: 331 - protein, 123 aa, synthetic construct
QMQLVQSGPEVKKPGTSVKVSCKASGFTFTSSAVQWVRQARGQRLEWIGWIVVGSGNTNYAQKFQERVTITRDMSTSTAYMELSSLRSEDTAVYYCAAPNCSGGVCFDGFDIWGQGTMVTVSS

SEQ ID NO: 332 - protein, 21 aa, synthetic construct
CARGWAYWELLPDYYYGMDVW

SEQ ID NO: 333 - protein, 5 aa, synthetic construct
GGSSG

SEQ ID NO: 334 - protein, 6 aa, synthetic construct
GGGGSG

SEQ ID NO: 335 - protein, 10 aa, synthetic construct
GGSGSGGGGS

SEQ ID NO: 336 - protein, 14 aa, synthetic construct
GGGGSGGGGSGGGS

SEQ ID NO: 337 - protein, 15 aa, synthetic construct
GGSGSGGGGSASGSG

SEQ ID NO: 338 - protein, 15 aa, synthetic construct
GGGGSGGGGSGGGGS

SEQ ID NO: 339 - protein, 20 aa, synthetic construct
GGSGSGGGGSGGGGSASGSG

SEQ ID NO: 340 - protein, 20 aa, synthetic construct
GGGGSGGSGSGGGGSASGSG

SEQ ID NO: 341 - protein, 25 aa, synthetic construct
GGGGSGGSGSGGGGSGGGGSASGSG

SEQ ID NO: 342 - protein, 25 aa, synthetic construct
GGGGSGGGGSGGGGSGGGGSGGGGS

SEQ ID NO: 343 - protein, 30 aa, synthetic construct
GGGGSGGGGSGGGGSGGGGSGGGGSGGGGS

SEQ ID NO: 344 - protein, 35 aa, synthetic construct
GGGGSGGGGSGGGGSGGGGSGGGGSGGGGSGGGGS

SEQ ID NO: 345 - protein, 40 aa, synthetic construct
GGGGSGGGGSGGGGSGGGGSGGGGSGGGGSGGGGSGGGGS

SEQ ID NO: 346 - protein, 4 aa, synthetic construct
SGSG

SEQ ID NO: 347 - protein, 5 aa, synthetic construct
GGSGS

SEQ ID NO: 348 - protein, 5 aa, synthetic construct
GSSGS

SEQ ID NO: 349 - protein, 5 aa, synthetic construct
GTVAA

SEQ ID NO: 350 - protein, 5 aa, synthetic construct
ASGGS

SEQ ID NO: 351 - protein, 5 aa, synthetic construct
ASTGG

SEQ ID NO: 352 - protein, 6 aa, synthetic construct
ASGGSG

SEQ ID NO: 353 - protein, 7 aa, synthetic construct
GGSGSSG

SEQ ID NO: 354 - protein, 7 aa, synthetic construct
SGSGGSG

SEQ ID NO: 355 - protein, 9 aa, synthetic construct
SGSGGSSGG

SEQ ID NO: 356 - protein, 10 aa, synthetic construct
SGGSGSSGSS

SEQ ID NO: 357 - protein, 10 aa, synthetic construct
GGSGGSSGSS

SEQ ID NO: 358 - protein, 10 aa, synthetic construct
GGSGSGGGSG

SEQ ID NO: 359 - protein, 11 aa, synthetic construct
SGSGGSSGGSG

SEQ ID NO: 360 - protein, 11 aa, synthetic construct
GGSGSGGGSGG

SEQ ID NO: 361 - protein, 13 aa, synthetic construct
GSGSGGSSGGSSG

SEQ ID NO: 362 - protein, 14 aa, synthetic construct
GGSGGSGGGSSGSG

SEQ ID NO: 363 - protein, 15 aa, synthetic construct
GGSSGSGSGGSGSSG

SEQ ID NO: 364 - protein, 17 aa, synthetic construct
GGSGGSGSGGGSASGSG

SEQ ID NO: 365 - protein, 18 aa, synthetic construct
GGSGGSGSGGGGSASGSG

SEQ ID NO: 366 - protein, 20 aa, synthetic construct
GGGSSGGGGSGGSGSGGSGS

SEQ ID NO: 367 - protein, 20 aa, synthetic construct
GGGGSGGSGSGGGGSASGSG

SEQ ID NO: 368 - protein, 20 aa, synthetic construct
GGGSSGGSGSGGSGSGGSGS

SEQ ID NO: 369 - protein, 22 aa, synthetic construct
SGGSSGGSGSGGSGSGGSGSSG

SEQ ID NO: 370 - protein, 22 aa, synthetic construct
GSGSSGGGGSGGSGSGGSGSSG

SEQ ID NO: 371 - protein, 40 aa, synthetic construct
GGGGSGSGGSGGGSSGGGGSGGGGSGGGGSGGGGSGGGGS

SEQ ID NO: 372 - protein, 43 aa, synthetic construct
GGGGSGSGGSGGGSSGGGGSGGGGSGGGGSGGGGSGGGGSSSS

SEQ ID NO: 373 - protein, 45 aa, synthetic construct
GGGGSGSGGSGGGSSGGGGSGGGGSGGGGSGGGGSGGGGSSSSGS

SEQ ID NO: 374 - protein, 107 aa, synthetic construct [sequence omitted]

SEQ ID NO: 375 - protein, 98 aa, synthetic construct
ASTKGPSVFPLAPSSKSTSGGTAALGCLVKDYFPEPVTVSWNSGALTSGVHTFPAVLQSSGLYSLSSVVTVPSSSLGTQTYICNVNHKPSNTKVDKKV

SEQ ID NO: 376 - protein, 226 aa, synthetic construct
DKTHTCPPCPAPELLGGPSVFLFPPKPKDTLMISRTPEVTCVVVDVSHEDPEVKFNWYVDGVEVHNAKTKPREEQYNSTYRVVSVLTVLHQDWLNGKEYKCKVSNKALPAPIEKTISKAKGQPREPQVYTLPPSRDELTKNQVSLTCLVKGFYPSDIAVEWESNGQPENNYKTTPPVLDSDGSFFLYSKLTVDKSRWQQGNVFSCSVLHEALHSHYTQKSLSLSPG

SEQ ID NO: 377 - protein, 226 aa, synthetic construct
DKTHTCPPCPAPELLGGPSVFLFPPKPKDTLMISRTPEVTCVVVDVSHEDPEVKFNWYVDGVEVHNAKTKPREEQYNSTYRVVSVLTVLHQDWLNGKEYKCKVSNKALPAPIEKTISKAKGQPREPQVYTLPPCRDELTKNQVSLWCLVKGFYPSDIAVEWESNGQPENNYKTTPPVLDSDGSFFLYSKLTVDKSRWQQGNVFSCSVLHEALHSHYTQKSLSLSPG

SEQ ID NO: 378 - protein, 226 aa, synthetic construct
DKTHTCPPCPAPELLGGPSVFLFPPKPKDTLMISRTPEVTCVVVDVSHEDPEVKFNWYVDGVEVHNAKTKPREEQYNSTYRVVSVLTVLHQDWLNGKEYKCKVSNKALPAPIEKTISKAKGQPREPQVYTLPPSRDELTKNQVSLTCLVKGFYPSDIAVEWESNGQPENNYKTTPPVLDSDGSFFLYSKLTVDKSRWQQGNVFSCSVLHEALHAHYTQKSLSLSPG

SEQ ID NO: 379 - protein, 226 aa, synthetic construct
DKTHTCPPCPAPELLGGPSVFLFPPKPKDTLMISRTPEVTCVVVDVSHEDPEVKFNWYVDGVEVHNAKTKPREEQYNSTYRVVSVLTVLHQDWLNGKEYKCKVSNKALPAPIEKTISKAKGQPREPQVCTLPPSRDELTKNQVSLSCAVKGFYPSDIAVEWESNGQPENNYKTTPPVLDSDGSFFLVSKLTVDKSRWQQGNVFSCSVLHEALHSHYTQKSLSLSPG

SEQ ID NO: 380 - protein, 227 aa, synthetic construct
DKTHTCPPCPAPEFEGGPSVFLFPPKPKDTLYITREPEVTCVVVDVSHEDPEVKFNWYVDGVEVHNAKTKPREEQYNSTYRVVSVLTVLHQDWLNGKEYKCKVSNKALPASIEKTISKAKGQPREPQVYTLPPSREEMTKNQVSLTCLVKGFYPSDIAVEWESNGQPENNYKTTPPVLDSDGSFFLYSKLTVDKSRWQQGNVFSCSVMHEALHNHYTQKSLSLSPGK

SEQ ID NO: 381 - protein, 940 aa, synthetic construct
DTVMTQSPLSLPVTPGEPASISCRSSQSLLNSNGYNYLDWYVQKPGQSPQLLIYLGSNRASGVPDRFSGSGSGTDFTLKISRVEAEDVGVYYCMQPLQTPLFTFGPGTKVEIKRTVAAPSVFIFPPSDEQLKSGTASVVCLLNNFYPREAKVQWKVDNALQSGNSQESVTEQDSKDSTYSLSSTLTLSKADYEKHKVYACEVTHQGLSSPVTKSFNRGECGGGGSGGGGSGGGGSEIVLTQSPGTLSLSPGETATLSCRASQSFSSDLAWYQQKPGQAPRLLIYGASSRATGIPDRFSGSGSGTDFTLTISRLEPADFAVYYCQQYGSSPPVTFGGGTKVEIKGGGGSGGSGSGGGGSASGSGEVQLVESGGGLIQPGGSLRLSCAASGVIVSYNYMNWVRQAPGKGLEWVSVIYSGGSTFYADSVRGRFTISRDNSKNTLYLQMNSLRAEDTAVYYCARDLGPAGAFDIWGLGTMVTVSSGGSSGQVTLRESGPALVKPTQTLTLTCTFSGFSLSTRGVCVSWIRQPPGKALEWLAFIDWDDDKYYNTSLKTRLTISKDTSKNQVVLTMTNVHPVDTATYYCARISSHHGSSWCTTFDYWGQGALVTVSAASTKGPSVFPLAPSSKSTSGGTAALGCLVKDYFPEPVTVSWNSGALTSGVHTFPAVLQSSGLYSLSSVVTVPSSSLGTQTYICNVNHKPSNTKVDKKVEPKSCDKTHTCPPCPAPELLGGPSVFLFPPKPKDTLMISRTPEVTCVVVDVSHEDPEVKFNWYVDGVEVHNAKTKPREEQYNSTYRVVSVLTVLHQDWLNGKEYKCKVSNKALPAPIEKTISKAKGQPREPQVYTLPPSRDELTKNQVSLTCLVKGFYPSDIAVEWESNGQPENNYKTTPPVLDSDGSFFLYSKLTVDKSRWQQGNVFSCSVLHEALHSHYTQKSLSLSPG

SEQ ID NO: 382 - protein, 940 aa, synthetic construct
EIVLTQSPGTLSLSPGETATLSCRASQSFSSDLAWYQQKPGQAPRLLIYGASSRATGIPDRFSGSGSGTDFTLTISRLEPADFAVYYCQQYGSSPPVTFGGGTKVEIKRTVAAPSVFIFPPSDEQLKSGTASVVCLLNNFYPREAKVQWKVDNALQSGNSQESVTEQDSKDSTYSLSSTLTLSKADYEKHKVYACEVTHQGLSSPVTKSFNRGECGGGGSGGGGSGGGGSDTVMTQSPLSLPVTPGEPASISCRSSQSLLNSNGYNYLDWYVQKPGQSPQLLIYLGSNRASGVPDRFSGSGSGTDFTLKISRVEAEDVGVYYCMQPLQTPLFTFGPGTKVEIKGGGGSGGSGSGGGGSASGSGQVTLRESGPALVKPTQTLTLTCTFSGFSLSTRGVCVSWIRQPPGKALEWLAFIDWDDDKYYNTSLKTRLTISKDTSKNQVVLTMTNVHPVDTATYYCARISSHHGSSWCTTFDYWGQGALVTVSAGGSSGEVQLVESGGGLIQPGGSLRLSCAASGVIVSYNYMNWVRQAPGKGLEWVSVIYSGGSTFYADSVRGRFTISRDNSKNTLYLQMNSLRAEDTAVYYCARDLGPAGAFDIWGLGTMVTVSSASTKGPSVFPLAPSSKSTSGGTAALGCLVKDYFPEPVTVSWNSGALTSGVHTFPAVLQSSGLYSLSSVVTVPSSSLGTQTYICNVNHKPSNTKVDKKVEPKSCDKTHTCPPCPAPELLGGPSVFLFPPKPKDTLMISRTPEVTCVVVDVSHEDPEVKFNWYVDGVEVHNAKTKPREEQYNSTYRVVSVLTVLHQDWLNGKEYKCKVSNKALPAPIEKTISKAKGQPREPQVYTLPPSRDELTKNQVSLTCLVKGFYPSDIAVEWESNGQPENNYKTTPPVLDSDGSFFLYSKLTVDKSRWQQGNVFSCSVLHEALHSHYTQKSLSLSPG

SEQ ID NO: 383 - protein, 940 aa, synthetic construct
EIVLTQSPGTLSLSPGETATLSCRASQSFSSDLAWYQQKPGQAPRLLIYGASSRATGIPDRFSGSGSGTDFTLTISRLEPADFAVYYCQQYGSSPPVTFGGGTKVEIKRTVAAPSVFIFPPSDEQLKSGTASVVCLLNNFYPREAKVQWKVDNALQSGNSQESVTEQDSKDSTYSLSSTLTLSKADYEKHKVYACEVTHQGLSSPVTKSFNRGECGGGGSGGGGSGGGGSDTVMTQSPLSLPVTPGEPASISCRSSQSLLNSNGYNYLDWYVQKPGQSPQLLIYLGSNRASGVPDRFSGSGSGTDFTLKISRVEAEDVGVYYCMQPLQTPLFTFGPGTKVEIKGGGGSGGSGSGGGGSASGSGQVTLRESGPALVKPTQTLTLTCTFSGFSLSTRGVCVSWIRQPPGKALEWLAFIDWDDDKYYNTSLKTRLTISKDTSKNQVVLTMTNVHPVDTATYYCARISSHHGSSWCTTFDYWGQGALVTVSAGGSSGEVQLVESGGGLIQPGGSLRLSCAASGVIVSYNYMNWVRQAPGKGLEWVSVIYSGGSTFYADSVRGRFTISRDNSKNTLYLQMNSLRAEDTAVYYCARDLGPAGAFDIWGLGTMVTVSSASTKGPSVFPLAPSSKSTSGGTAALGCLVKDYFPEPVTVSWNSGALTSGVHTFPAVLQSSGLYSLSSVVTVPSSSLGTQTYICNVNHKPSNTKVDKKVEPKSCDKTHTCPPCPAPELLGGPSVFLFPPKPKDTLMISRTPEVTCVVVDVSHEDPEVKFNWYVDGVEVHNAKTKPREEQYNSTYRVVSVLTVLHQDWLNGKEYKCKVSNKALPAPIEKTISKAKGQPREPQVYTLPPSRDELTKNQVSLTCLVKGFYPSDIAVEWESNGQPENNYKTTPPVLDSDGSFFLYSKLTVDKSRWQQGNVFSCSVLHEALHAHYTQKSLSLSPG

SEQ ID NO: 384 - protein, 940 aa, synthetic construct
DTVMTQSPLSLPVTPGEPASISCRSSQSLLNSNGYNYLDWYVQKPGQSPQLLIYLGSNRASGVPDRFSGSGSGTDFTLKISRVEAEDVGVYYCMQPLQTPLFTFGPGTKVEIKRTVAAPSVFIFPPSDEQLKSGTASVVCLLNNFYPREAKVQWKVDNALQSGNSQESVTEQDSKDSTYSLSSTLTLSKADYEKHKVYACEVTHQGLSSPVTKSFNRGECGGGGSGGGGSGGGGSEIVLTQSPGTLSLSPGETATLSCRASQSFSSDLAWYQQKPGQAPRLLIYGASSRATGIPDRFSGSGSGTDFTLTISRLEPADFAVYYCQQYGSSPPVTFGGGTKVEIKGGGGSGGSGSGGGGSASGSGEVQLVESGGGLIQPGGSLRLSCAASGVIVSYNYMNWVRQAPGKGLEWVSVIYSGGSTFYADSVRGRFTISRDNSKNTLYLQMNSLRAEDTAVYYCARDLGPAGAFDIWGLGTMVTVSSGGSSGQVTLRESGPALVKPTQTLTLTCTFSGFSLSTRGVCVSWIRQPPGKALEWLAFIDWDDDKYYNTSLKTRLTISKDTSKNQVVLTMTNVHPVDTATYYCARISSHHGSSWCTTFDYWGQGALVTVSAASTKGPSVFPLAPSSKSTSGGTAALGCLVKDYFPEPVTVSWNSGALTSGVHTFPAVLQSSGLYSLSSVVTVPSSSLGTQTYICNVNHKPSNTKVDKKVEPKSCDKTHTCPPCPAPELLGGPSVFLFPPKPKDTLMISRTPEVTCVVVDVSHEDPEVKFNWYVDGVEVHNAKTKPREEQYNSTYRVVSVLTVLHQDWLNGKEYKCKVSNKALPAPIEKTISKAKGQPREPQVYTLPPCRDELTKNQVSLWCLVKGFYPSDIAVEWESNGQPENNYKTTPPVLDSDGSFFLYSKLTVDKSRWQQGNVFSCSVLHEALHSHYTQKSLSLSPG

SEQ ID NO: 385 - protein, 940 aa, synthetic construct
EIVLTQSPGTLSLSPGETATLSCRASQSFSSDLAWYQQKPGQAPRLLIYGASSRATGIPDRFSGSGSGTDFTLTISRLEPADFAVYYCQQYGSSPPVTFGGGTKVEIKRTVAAPSVFIFPPSDEQLKSGTASVVCLLNNFYPREAKVQWKVDNALQSGNSQESVTEQDSKDSTYSLSSTLTLSKADYEKHKVYACEVTHQGLSSPVTKSFNRGECGGGGSGGGGSGGGGSDTVMTQSPLSLPVTPGEPASISCRSSQSLLNSNGYNYLDWYVQKPGQSPQLLIYLGSNRASGVPDRFSGSGSGTDFTLKISRVEAEDVGVYYCMQPLQTPLFTFGPGTKVEIKGGGGSGGSGSGGGGSASGSGQVTLRESGPALVKPTQTLTLTCTFSGFSLSTRGVCVSWIRQPPGKALEWLAFIDWDDDKYYNTSLKTRLTISKDTSKNQVVLTMTNVHPVDTATYYCARISSHHGSSWCTTFDYWGQGALVTVSAGGSSGEVQLVESGGGLIQPGGSLRLSCAASGVIVSYNYMNWVRQAPGKGLEWVSVIYSGGSTFYADSVRGRFTISRDNSKNTLYLQMNSLRAEDTAVYYCARDLGPAGAFDIWGLGTMVTVSSASTKGPSVFPLAPSSKSTSGGTAALGCLVKDYFPEPVTVSWNSGALTSGVHTFPAVLQSSGLYSLSSVVTVPSSSLGTQTYICNVNHKPSNTKVDKKVEPKSCDKTHTCPPCPAPELLGGPSVFLFPPKPKDTLMISRTPEVTCVVVDVSHEDPEVKFNWYVDGVEVHNAKTKPREEQYNSTYRVVSVLTVLHQDWLNGKEYKCKVSNKALPAPIEKTISKAKGQPREPQVCTLPPSRDELTKNQVSLSCAVKGFYPSDIAVEWESNGQPENNYKTTPPVLDSDGSFFLVSKLTVDKSRWQQGNVFSCSVLHEALHSHYTQKSLSLSPG

SEQ ID NO: 386 - protein, 940 aa, synthetic construct
EIVLTQSPGTLSLSPGETATLSCRASQSFSSDLAWYQQKPGQAPRLLIYGASSRATGIPDRFSGSGSGTDFTLTISRLEPADFAVYYCQQYGSSPPVTFGGGTKVEIKRTVAAPSVFIFPPSDEQLKSGTASVVCLLNNFYPREAKVQWKVDNALQSGNSQESVTEQDSKDSTYSLSSTLTLSKADYEKHKVYACEVTHQGLSSPVTKSFNRGECGGGGSGGGGSGGGGSDTVMTQSPLSLPVTPGEPASISCRSSQSLLNSNGYNYLDWYVQKPGQSPQLLIYLGSNRASGVPDRFSGSGSGTDFTLKISRVEAEDVGVYYCMQPLQTPLFTFGPGTKVEIKGGGGSGGSGSGGGGSASGSGQVTLRESGPALVKPTQTLTLTCTFSGFSLSTRGVCVSWIRQPPGKALEWLAFIDWDDDKYYNTSLKTRLTISKDTSKNQVVLTMTNVHPVDTATYYCARISSHHGSSWCTTFDYWGQGALVTVSAGGSSGEVQLVESGGGLIQPGGSLRLSCAASGVIVSYNYMNWVRQAPGKGLEWVSVIYSGGSTFYADSVRGRFTISRDNSKNTLYLQMNSLRAEDTAVYYCARDLGPAGAFDIWGLGTMVTVSSASTKGPSVFPLAPSSKSTSGGTAALGCLVKDYFPEPVTVSWNSGALTSGVHTFPAVLQSSGLYSLSSVVTVPSSSLGTQTYICNVNHKPSNTKVDKKVEPKSCDKTHTCPPCPAPELLGGPSVFLFPPKPKDTLMISRTPEVTCVVVDVSHEDPEVKFNWYVDGVEVHNAKTKPREEQYNSTYRVVSVLTVLHQDWLNGKEYKCKVSNKALPAPIEKTISKAKGQPREPQVYTLPPCRDELTKNQVSLWCLVKGFYPSDIAVEWESNGQPENNYKTTPPVLDSDGSFFLYSKLTVDKSRWQQGNVFSCSVLHEALHSHYTQKSLSLSPG

SEQ ID NO: 387 - protein, 940 aa, synthetic construct
DTVMTQSPLSLPVTPGEPASISCRSSQSLLNSNGYNYLDWYVQKPGQSPQLLIYLGSNRASGVPDRFSGSGSGTDFTLKISRVEAEDVGVYYCMQPLQTPLFTFGPGTKVEIKRTVAAPSVFIFPPSDEQLKSGTASVVCLLNNFYPREAKVQWKVDNALQSGNSQESVTEQDSKDSTYSLSSTLTLSKADYEKHKVYACEVTHQGLSSPVTKSFNRGECGGGGSGGGGSGGGGSEIVLTQSPGTLSLSPGETATLSCRASQSFSSDLAWYQQKPGQAPRLLIYGASSRATGIPDRFSGSGSGTDFTLTISRLEPADFAVYYCQQYGSSPPVTFGGGTKVEIKGGGGSGGSGSGGGGSASGSGEVQLVESGGGLIQPGGSLRLSCAASGVIVSYNYMNWVRQAPGKGLEWVSVIYSGGSTFYADSVRGRFTISRDNSKNTLYLQMNSLRAEDTAVYYCARDLGPAGAFDIWGLGTMVTVSSGGSSGQVTLRESGPALVKPTQTLTLTCTFSGFSLSTRGVCVSWIRQPPGKALEWLAFIDWDDDKYYNTSLKTRLTISKDTSKNQVVLTMTNVHPVDTATYYCARISSHHGSSWCTTFDYWGQGALVTVSAASTKGPSVFPLAPSSKSTSGGTAALGCLVKDYFPEPVTVSWNSGALTSGVHTFPAVLQSSGLYSLSSVVTVPSSSLGTQTYICNVNHKPSNTKVDKKVEPKSCDKTHTCPPCPAPELLGGPSVFLFPPKPKDTLMISRTPEVTCVVVDVSHEDPEVKFNWYVDGVEVHNAKTKPREEQYNSTYRVVSVLTVLHQDWLNGKEYKCKVSNKALPAPIEKTISKAKGQPREPQVCTLPPSRDELTKNQVSLSCAVKGFYPSDIAVEWESNGQPENNYKTTPPVLDSDGSFFLVSKLTVDKSRWQQGNVFSCSVLHEALHSHYTQKSLSLSPG

SEQ ID NO: 388 - protein, 955 aa, synthetic construct
DTVMTQSPLSLPVTPGEPASISCRSSQSLLNSNGYNYLDWYVQKPGQSPQLLIYLGSNRASGVPDRFSGSGSGTDFTLKISRVEAEDVGVYYCMQPLQTPLFTFGPGTKVEIKGGSSGEIVLTQSPGTLSLSPGETATLSCRASQSFSSDLAWYQQKPGQAPRLLIYGASSRATGIPDRFSGSGSGTDFTLTISRLEPADFAVYYCQQYGSSPPVTFGGGTKVEIKGGGGSGGSGSGGGGSASGSGEVQLVESGGGLIQPGGSLRLSCAASGVIVSYNYMNWVRQAPGKGLEWVSVIYSGGSTFYADSVRGRFTISRDNSKNTLYLQMNSLRAEDTAVYYCARDLGPAGAFDIWGLGTMVTVSSGGSSGQVTLRESGPALVKPTQTLTLTCTFSGFSLSTRGVCVSWIRQPPGKALEWLAFIDWDDDKYYNTSLKTRLTISKDTSKNQVVLTMTNVHPVDTATYYCARISSHHGSSWCTTFDYWGQGALVTVSARTVAAPSVFIFPPSDEQLKSGTASVVCLLNNFYPREAKVQWKVDNALQSGNSQESVTEQDSKDSTYSLSSTLTLSKADYEKHKVYACEVTHQGLSSPVTKSFNRGECGGGGSGGSGSGGGGSGGGGSASGSGASTKGPSVFPLAPSSKSTSGGTAALGCLVKDYFPEPVTVSWNSGALTSGVHTFPAVLQSSGLYSLSSVVTVPSSSLGTQTYICNVNHKPSNTKVDKKVEPKSCDKTHTCPPCPAPELLGGPSVFLFPPKPKDTLMISRTPEVTCVVVDVSHEDPEVKFNWYVDGVEVHNAKTKPREEQYNSTYRVVSVLTVLHQDWLNGKEYKCKVSNKALPAPIEKTISKAKGQPREPQVYTLPPSRDELTKNQVSLTCLVKGFYPSDIAVEWESNGQPENNYKTTPPVLDSDGSFFLYSKLTVDKSRWQQGNVFSCSVLHEALHSHYTQKSLSLSPG

SEQ ID NO: 389 - protein, 955 aa, synthetic construct
DTVMTQSPLSLPVTPGEPASISCRSSQSLLNSNGYNYLDWYVQKPGQSPQLLIYLGSNRASGVPDRFSGSGSGTDFTLKISRVEAEDVGVYYCMQPLQTPLFTFGPGTKVEIKGGSSGEIVLTQSPGTLSLSPGETATLSCRASQSFSSDLAWYQQKPGQAPRLLIYGASSRATGIPDRFSGSGSGTDFTLTISRLEPADFAVYYCQQYGSSPPVTFGGGTKVEIKGGGGSGGSGSGGGGSASGSGEVQLVESGGGLIQPGGSLRLSCAASGVIVSYNYMNWVRQAPGKGLEWVSVIYSGGSTFYADSVRGRFTISRDNSKNTLYLQMNSLRAEDTAVYYCARDLGPAGAFDIWGLGTMVTVSSGGSSGQVTLRESGPALVKPTQTLTLTCTFSGFSLSTRGVCVSWIRQPPGKALEWLAFIDWDDDKYYNTSLKTRLTISKDTSKNQVVLTMTNVHPVDTATYYCARISSHHGSSWCTTFDYWGQGALVTVSARTVAAPSVFIFPPSDEQLKSGTASVVCLLNNFYPREAKVQWKVDNALQSGNSQESVTEQDSKDSTYSLSSTLTLSKADYEKHKVYACEVTHQGLSSPVTKSFNRGECGGGGSGGSGSGGGGSGGGGSASGSGASTKGPSVFPLAPSSKSTSGGTAALGCLVKDYFPEPVTVSWNSGALTSGVHTFPAVLQSSGLYSLSSVVTVPSSSLGTQTYICNVNHKPSNTKVDKKVEPKSCDKTHTCPPCPAPELLGGPSVFLFPPKPKDTLMISRTPEVTCVVVDVSHEDPEVKFNWYVDGVEVHNAKTKPREEQYNSTYRVVSVLTVLHQDWLNGKEYKCKVSNKALPAPIEKTISKAKGQPREPQVYTLPPSRDELTKNQVSLTCLVKGFYPSDIAVEWESNGQPENNYKTTPPVLDSDGSFFLYSKLTVDKSRWQQGNVFSCSVLHEALHAHYTQKSLSLSPG

SEQ ID NO: 390 - protein, 955 aa, synthetic construct
EIVLTQSPGTLSLSPGETATLSCRASQSFSSDLAWYQQKPGQAPRLLIYGASSRATGIPDRFSGSGSGTDFTLTISRLEPADFAVYYCQQYGSSPPVTFGGGTKVEIKGGSSGDTVMTQSPLSLPVTPGEPASISCRSSQSLLNSNGYNYLDWYVQKPGQSPQLLIYLGSNRASGVPDRFSGSGSGTDFTLKISRVEAEDVGVYYCMQPLQTPLFTFGPGTKVEIKGGGGSGGSGSGGGGSASGSGQVTLRESGPALVKPTQTLTLTCTFSGFSLSTRGVCVSWIRQPPGKALEWLAFIDWDDDKYYNTSLKTRLTISKDTSKNQVVLTMTNVHPVDTATYYCARISSHHGSSWCTTFDYWGQGALVTVSAGGSSGEVQLVESGGGLIQPGGSLRLSCAASGVIVSYNYMNWVRQAPGKGLEWVSVIYSGGSTFYADSVRGRFTISRDNSKNTLYLQMNSLRAEDTAVYYCARDLGPAGAFDIWGLGTMVTVSSRTVAAPSVFIFPPSDEQLKSGTASVVCLLNNFYPREAKVQWKVDNALQSGNSQESVTEQDSKDSTYSLSSTLTLSKADYEKHKVYACEVTHQGLSSPVTKSFNRGECGGGGSGGSGSGGGGSGGGGSASGSGASTKGPSVFPLAPSSKSTSGGTAALGCLVKDYFPEPVTVSWNSGALTSGVHTFPAVLQSSGLYSLSSVVTVPSSSLGTQTYICNVNHKPSNTKVDKKVEPKSCDKTHTCPPCPAPELLGGPSVFLFPPKPKDTLMISRTPEVTCVVVDVSHEDPEVKFNWYVDGVEVHNAKTKPREEQYNSTYRVVSVLTVLHQDWLNGKEYKCKVSNKALPAPIEKTISKAKGQPREPQVYTLPPSRDELTKNQVSLTCLVKGFYPSDIAVEWESNGQPENNYKTTPPVLDSDGSFFLYSKLTVDKSRWQQGNVFSCSVLHEALHSHYTQKSLSLSPG

SEQ ID NO: 391 - protein, 955 aa, synthetic construct
EIVLTQSPGTLSLSPGETATLSCRASQSFSSDLAWYQQKPGQAPRLLIYGASSRATGIPDRFSGSGSGTDFTLTISRLEPADFAVYYCQQYGSSPPVTFGGGTKVEIKGGSSGDTVMTQSPLSLPVTPGEPASISCRSSQSLLNSNGYNYLDWYVQKPGQSPQLLIYLGSNRASGVPDRFSGSGSGTDFTLKISRVEAEDVGVYYCMQPLQTPLFTFGPGTKVEIKGGGGSGGSGSGGGGSASGSGQVTLRESGPALVKPTQTLTLTCTFSGFSLSTRGVCVSWIRQPPGKALEWLAFIDWDDDKYYNTSLKTRLTISKDTSKNQVVLTMTNVHPVDTATYYCARISSHHGSSWCTTFDYWGQGALVTVSAGGSSGEVQLVESGGGLIQPGGSLRLSCAASGVIVSYNYMNWVRQAPGKGLEWVSVIYSGGSTFYADSVRGRFTISRDNSKNTLYLQMNSLRAEDTAVYYCARDLGPAGAFDIWGLGTMVTVSSRTVAAPSVFIFPPSDEQLKSGTASVVCLLNNFYPREAKVQWKVDNALQSGNSQESVTEQDSKDSTYSLSSTLTLSKADYEKHKVYACEVTHQGLSSPVTKSFNRGECGGGGSGGSGSGGGGSGGGGSASGSGASTKGPSVFPLAPSSKSTSGGTAALGCLVKDYFPEPVTVSWNSGALTSGVHTFPAVLQSSGLYSLSSVVTVPSSSLGTQTYICNVNHKPSNTKVDKKVEPKSCDKTHTCPPCPAPELLGGPSVFLFPPKPKDTLMISRTPEVTCVVVDVSHEDPEVKFNWYVDGVEVHNAKTKPREEQYNSTYRVVSVLTVLHQDWLNGKEYKCKVSNKALPAPIEKTISKAKGQPREPQVYTLPPSRDELTKNQVSLTCLVKGFYPSDIAVEWESNGQPENNYKTTPPVLDSDGSFFLYSKLTVDKSRWQQGNVFSCSVLHEALHAHYTQKSLSLSPG

SEQ ID NO: 392 - protein, 955 aa, synthetic construct
DTVMTQSPLSLPVTPGEPASISCRSSQSLLNSNGYNYLDWYVQKPGQSPQLLIYLGSNRASGVPDRFSGSGSGTDFTLKISRVEAEDVGVYYCMQPLQTPLFTFGPGTKVEIKGGSSGEIVLTQSPGTLSLSPGETATLSCRASQSFSSDLAWYQQKPGQAPRLLIYGASSRATGIPDRFSGSGSGTDFTLTISRLEPADFAVYYCQQYGSSPPVTFGGGTKVEIKGGGGSGGSGSGGGGSASGSGEVQLVESGGGLIQPGGSLRLSCAASGVIVSYNYMNWVRQAPGKGLEWVSVIYSGGSTFYADSVRGRFTISRDNSKNTLYLQMNSLRAEDTAVYYCARDLGPAGAFDIWGLGTMVTVSSGGSSGQVTLRESGPALVKPTQTLTLTCTFSGFSLSTRGVCVSWIRQPPGKALEWLAFIDWDDDKYYNTSLKTRLTISKDTSKNQVVLTMTNVHPVDTATYYCARISSHHGSSWCTTFDYWGQGALVTVSARTVAAPSVFIFPPSDEQLKSGTASVVCLLNNFYPREAKVQWKVDNALQSGNSQESVTEQDSKDSTYSLSSTLTLSKADYEKHKVYACEVTHQGLSSPVTKSFNRGECGGGGSGGSGSGGGGSGGGGSASGSGASTKGPSVFPLAPSSKSTSGGTAALGCLVKDYFPEPVTVSWNSGALTSGVHTFPAVLQSSGLYSLSSVVTVPSSSLGTQTYICNVNHKPSNTKVDKKVEPKSCDKTHTCPPCPAPELLGGPSVFLFPPKPKDTLMISRTPEVTCVVVDVSHEDPEVKFNWYVDGVEVHNAKTKPREEQYNSTYRVVSVLTVLHQDWLNGKEYKCKVSNKALPAPIEKTISKAKGQPREPQVYTLPPCRDELTKNQVSLWCLVKGFYPSDIAVEWESNGQPENNYKTTPPVLDSDGSFFLYSKLTVDKSRWQQGNVFSCSVLHEALHSHYTQKSLSLSPG

SEQ ID NO: 393 - protein, 955 aa, synthetic construct
EIVLTQSPGTLSLSPGETATLSCRASQSFSSDLAWYQQKPGQAPRLLIYGASSRATGIPDRFSGSGSGTDFTLTISRLEPADFAVYYCQQYGSSPPVTFGGGTKVEIKGGSSGDTVMTQSPLSLPVTPGEPASISCRSSQSLLNSNGYNYLDWYVQKPGQSPQLLIYLGSNRASGVPDRFSGSGSGTDFTLKISRVEAEDVGVYYCMQPLQTPLFTFGPGTKVEIKGGGGSGGSGSGGGGSASGSGQVTLRESGPALVKPTQTLTLTCTFSGFSLSTRGVCVSWIRQPPGKALEWLAFIDWDDDKYYNTSLKTRLTISKDTSKNQVVLTMTNVHPVDTATYYCARISSHHGSSWCTTFDYWGQGALVTVSAGGSSGEVQLVESGGGLIQPGGSLRLSCAASGVIVSYNYMNWVRQAPGKGLEWVSVIYSGGSTFYADSVRGRFTISRDNSKNTLYLQMNSLRAEDTAVYYCARDLGPAGAFDIWGLGTMVTVSSRTVAAPSVFIFPPSDEQLKSGTASVVCLLNNFYPREAKVQWKVDNALQSGNSQESVTEQDSKDSTYSLSSTLTLSKADYEKHKVYACEVTHQGLSSPVTKSFNRGECGGGGSGGSGSGGGGSGGGGSASGSGASTKGPSVFPLAPSSKSTSGGTAALGCLVKDYFPEPVTVSWNSGALTSGVHTFPAVLQSSGLYSLSSVVTVPSSSLGTQTYICNVNHKPSNTKVDKKVEPKSCDKTHTCPPCPAPELLGGPSVFLFPPKPKDTLMISRTPEVTCVVVDVSHEDPEVKFNWYVDGVEVHNAKTKPREEQYNSTYRVVSVLTVLHQDWLNGKEYKCKVSNKALPAPIEKTISKAKGQPREPQVCTLPPSRDELTKNQVSLSCAVKGFYPSDIAVEWESNGQPENNYKTTPPVLDSDGSFFLVSKLTVDKSRWQQGNVFSCSVLHEALHSHYTQKSLSLSPG

SEQ ID NO: 394 - protein, 955 aa, synthetic construct
DTVMTQSPLSLPVTPGEPASISCRSSQSLLNSNGYNYLDWYVQKPGQSPQLLIYLGSNRASGVPDRFSGSGSGTDFTLKISRVEAEDVGVYYCMQPLQTPLFTFGPGTKVEIKGGSSGEIVLTQSPGTLSLSPGETATLSCRASQSFSSDLAWYQQKPGQAPRLLIYGASSRATGIPDRFSGSGSGTDFTLTISRLEPADFAVYYCQQYGSSPPVTFGGGTKVEIKGGGGSGGSGSGGGGSASGSGEVQLVESGGGLIQPGGSLRLSCAASGVIVSYNYMNWVRQAPGKGLEWVSVIYSGGSTFYADSVRGRFTISRDNSKNTLYLQMNSLRAEDTAVYYCARDLGPAGAFDIWGLGTMVTVSSGGSSGQVTLRESGPALVKPTQTLTLTCTFSGFSLSTRGVCVSWIRQPPGKALEWLAFIDWDDDKYYNTSLKTRLTISKDTSKNQVVLTMTNVHPVDTATYYCARISSHHGSSWCTTFDYWGQGALVTVSARTVAAPSVFIFPPSDEQLKSGTASVVCLLNNFYPREAKVQWKVDNALQSGNSQESVTEQDSKDSTYSLSSTLTLSKADYEKHKVYACEVTHQGLSSPVTKSFNRGECGGGGSGGSGSGGGGSGGGGSASGSGASTKGPSVFPLAPSSKSTSGGTAALGCLVKDYFPEPVTVSWNSGALTSGVHTFPAVLQSSGLYSLSSVVTVPSSSLGTQTYICNVNHKPSNTKVDKKVEPKSCDKTHTCPPCPAPELLGGPSVFLFPPKPKDTLMISRTPEVTCVVVDVSHEDPEVKFNWYVDGVEVHNAKTKPREEQYNSTYRVVSVLTVLHQDWLNGKEYKCKVSNKALPAPIEKTISKAKGQPREPQVYTLPPCRDELTKNQVSLWCLVKGFYPSDIAVEWESNGQPENNYKTTPPVLDSDGSFFLYSKLTVDKSRWQQGNVFSCSVLHEALHAHYTQKSLSLSPG

SEQ ID NO: 395 - protein, 955 aa, synthetic construct
EIVLTQSPGTLSLSPGETATLSCRASQSFSSDLAWYQQKPGQAPRLLIYGASSRATGIPDRFSGSGSGTDFTLTISRLEPADFAVYYCQQYGSSPPVTFGGGTKVEIKGGSSGDTVMTQSPLSLPVTPGEPASISCRSSQSLLNSNGYNYLDWYVQKPGQSPQLLIYLGSNRASGVPDRFSGSGSGTDFTLKISRVEAEDVGVYYCMQPLQTPLFTFGPGTKVEIKGGGGSGGSGSGGGGSASGSGQVTLRESGPALVKPTQTLTLTCTFSGFSLSTRGVCVSWIRQPPGKALEWLAFIDWDDDKYYNTSLKTRLTISKDTSKNQVVLTMTNVHPVDTATYYCARISSHHGSSWCTTFDYWGQGALVTVSAGGSSGEVQLVESGGGLIQPGGSLRLSCAASGVIVSYNYMNWVRQAPGKGLEWVSVIYSGGSTFYADSVRGRFTISRDNSKNTLYLQMNSLRAEDTAVYYCARDLGPAGAFDIWGLGTMVTVSSRTVAAPSVFIFPPSDEQLKSGTASVVCLLNNFYPREAKVQWKVDNALQSGNSQESVTEQDSKDSTYSLSSTLTLSKADYEKHKVYACEVTHQGLSSPVTKSFNRGECGGGGSGGSGSGGGGSGGGGSASGSGASTKGPSVFPLAPSSKSTSGGTAALGCLVKDYFPEPVTVSWNSGALTSGVHTFPAVLQSSGLYSLSSVVTVPSSSLGTQTYICNVNHKPSNTKVDKKVEPKSCDKTHTCPPCPAPELLGGPSVFLFPPKPKDTLMISRTPEVTCVVVDVSHEDPEVKFNWYVDGVEVHNAKTKPREEQYNSTYRVVSVLTVLHQDWLNGKEYKCKVSNKALPAPIEKTISKAKGQPREPQVCTLPPSRDELTKNQVSLSCAVKGFYPSDIAVEWESNGQPENNYKTTPPVLDSDGSFFLVSKLTVDKSRWQQGNVFSCSVLHEALHAHYTQKSLSLSPG

SEQ ID NO: 396 - protein, 955 aa, synthetic construct
EIVLTQSPGTLSLSPGETATLSCRASQSFSSDLAWYQQKPGQAPRLLIYGASSRATGIPDRFSGSGSGTDFTLTISRLEPADFAVYYCQQYGSSPPVTFGGGTKVEIKGGSSGDTVMTQSPLSLPVTPGEPASISCRSSQSLLNSNGYNYLDWYVQKPGQSPQLLIYLGSNRASGVPDRFSGSGSGTDFTLKISRVEAEDVGVYYCMQPLQTPLFTFGPGTKVEIKGGGGSGGSGSGGGGSASGSGQVTLRESGPALVKPTQTLTLTCTFSGFSLSTRGVCVSWIRQPPGKALEWLAFIDWDDDKYYNTSLKTRLTISKDTSKNQVVLTMTNVHPVDTATYYCARISSHHGSSWCTTFDYWGQGALVTVSAGGSSGEVQLVESGGGLIQPGGSLRLSCAASGVIVSYNYMNWVRQAPGKGLEWVSVIYSGGSTFYADSVRGRFTISRDNSKNTLYLQMNSLRAEDTAVYYCARDLGPAGAFDIWGLGTMVTVSSRTVAAPSVFIFPPSDEQLKSGTASVVCLLNNFYPREAKVQWKVDNALQSGNSQESVTEQDSKDSTYSLSSTLTLSKADYEKHKVYACEVTHQGLSSPVTKSFNRGECGGGGSGGSGSGGGGSGGGGSASGSGASTKGPSVFPLAPSSKSTSGGTAALGCLVKDYFPEPVTVSWNSGALTSGVHTFPAVLQSSGLYSLSSVVTVPSSSLGTQTYICNVNHKPSNTKVDKKVEPKSCDKTHTCPPCPAPELLGGPSVFLFPPKPKDTLMISRTPEVTCVVVDVSHEDPEVKFNWYVDGVEVHNAKTKPREEQYNSTYRVVSVLTVLHQDWLNGKEYKCKVSNKALPAPIEKTISKAKGQPREPQVYTLPPCRDELTKNQVSLWCLVKGFYPSDIAVEWESNGQPENNYKTTPPVLDSDGSFFLYSKLTVDKSRWQQGNVFSCSVLHEALHSHYTQKSLSLSPG

SEQ ID NO: 397 - protein, 955 aa, synthetic construct
DTVMTQSPLSLPVTPGEPASISCRSSQSLLNSNGYNYLDWYVQKPGQSPQLLIYLGSNRASGVPDRFSGSGSGTDFTLKISRVEAEDVGVYYCMQPLQTPLFTFGPGTKVEIKGGSSGEIVLTQSPGTLSLSPGETATLSCRASQSFSSDLAWYQQKPGQAPRLLIYGASSRATGIPDRFSGSGSGTDFTLTISRLEPADFAVYYCQQYGSSPPVTFGGGTKVEIKGGGGSGGSGSGGGGSASGSGEVQLVESGGGLIQPGGSLRLSCAASGVIVSYNYMNWVRQAPGKGLEWVSVIYSGGSTFYADSVRGRFTISRDNSKNTLYLQMNSLRAEDTAVYYCARDLGPAGAFDIWGLGTMVTVSSGGSSGQVTLRESGPALVKPTQTLTLTCTFSGFSLSTRGVCVSWIRQPPGKALEWLAFIDWDDDKYYNTSLKTRLTISKDTSKNQVVLTMTNVHPVDTATYYCARISSHHGSSWCTTFDYWGQGALVTVSARTVAAPSVFIFPPSDEQLKSGTASVVCLLNNFYPREAKVQWKVDNALQSGNSQESVTEQDSKDSTYSLSSTLTLSKADYEKHKVYACEVTHQGLSSPVTKSFNRGECGGGGSGGSGSGGGGSGGGGSASGSGASTKGPSVFPLAPSSKSTSGGTAALGCLVKDYFPEPVTVSWNSGALTSGVHTFPAVLQSSGLYSLSSVVTVPSSSLGTQTYICNVNHKPSNTKVDKKVEPKSCDKTHTCPPCPAPELLGGPSVFLFPPKPKDTLMISRTPEVTCVVVDVSHEDPEVKFNWYVDGVEVHNAKTKPREEQYNSTYRVVSVLTVLHQDWLNGKEYKCKVSNKALPAPIEKTISKAKGQPREPQVCTLPPSRDELTKNQVSLSCAVKGFYPSDIAVEWESNGQPENNYKTTPPVLDSDGSFFLVSKLTVDKSRWQQGNVFSCSVLHEALHSHYTQKSLSLSPG

SEQ ID NO: 398 - protein, 955 aa, synthetic construct
EIVLTQSPGTLSLSPGETATLSCRASQSFSSDLAWYQQKPGQAPRLLIYGASSRATGIPDRFSGSGSGTDFTLTISRLEPADFAVYYCQQYGSSPPVTFGGGTKVEIKGGSSGDTVMTQSPLSLPVTPGEPASISCRSSQSLLNSNGYNYLDWYVQKPGQSPQLLIYLGSNRASGVPDRFSGSGSGTDFTLKISRVEAEDVGVYYCMQPLQTPLFTFGPGTKVEIKGGGGSGGSGSGGGGSASGSGQVTLRESGPALVKPTQTLTLTCTFSGFSLSTRGVCVSWIRQPPGKALEWLAFIDWDDDKYYNTSLKTRLTISKDTSKNQVVLTMTNVHPVDTATYYCARISSHHGSSWCTTFDYWGQGALVTVSAGGSSGEVQLVESGGGLIQPGGSLRLSCAASGVIVSYNYMNWVRQAPGKGLEWVSVIYSGGSTFYADSVRGRFTISRDNSKNTLYLQMNSLRAEDTAVYYCARDLGPAGAFDIWGLGTMVTVSSRTVAAPSVFIFPPSDEQLKSGTASVVCLLNNFYPREAKVQWKVDNALQSGNSQESVTEQDSKDSTYSLSSTLTLSKADYEKHKVYACEVTHQGLSSPVTKSFNRGECGGGGSGGSGSGGGGSGGGGSASGSGASTKGPSVFPLAPSSKSTSGGTAALGCLVKDYFPEPVTVSWNSGALTSGVHTFPAVLQSSGLYSLSSVVTVPSSSLGTQTYICNVNHKPSNTKVDKKVEPKSCDKTHTCPPCPAPELLGGPSVFLFPPKPKDTLMISRTPEVTCVVVDVSHEDPEVKFNWYVDGVEVHNAKTKPREEQYNSTYRVVSVLTVLHQDWLNGKEYKCKVSNKALPAPIEKTISKAKGQPREPQVYTLPPCRDELTKNQVSLWCLVKGFYPSDIAVEWESNGQPENNYKTTPPVLDSDGSFFLYSKLTVDKSRWQQGNVFSCSVLHEALHAHYTQKSLSLSPG

SEQ ID NO: 399 - protein, 955 aa, synthetic construct
DTVMTQSPLSLPVTPGEPASISCRSSQSLLNSNGYNYLDWYVQKPGQSPQLLIYLGSNRASGVPDRFSGSGSGTDFTLKISRVEAEDVGVYYCMQPLQTPLFTFGPGTKVEIKGGSSGEIVLTQSPGTLSLSPGETATLSCRASQSFSSDLAWYQQKPGQAPRLLIYGASSRATGIPDRFSGSGSGTDFTLTISRLEPADFAVYYCQQYGSSPPVTFGGGTKVEIKGGGGSGGSGSGGGGSASGSGEVQLVESGGGLIQPGGSLRLSCAASGVIVSYNYMNWVRQAPGKGLEWVSVIYSGGSTFYADSVRGRFTISRDNSKNTLYLQMNSLRAEDTAVYYCARDLGPAGAFDIWGLGTMVTVSSGGSSGQVTLRESGPALVKPTQTLTLTCTFSGFSLSTRGVCVSWIRQPPGKALEWLAFIDWDDDKYYNTSLKTRLTISKDTSKNQVVLTMTNVHPVDTATYYCARISSHHGSSWCTTFDYWGQGALVTVSARTVAAPSVFIFPPSDEQLKSGTASVVCLLNNFYPREAKVQWKVDNALQSGNSQESVTEQDSKDSTYSLSSTLTLSKADYEKHKVYACEVTHQGLSSPVTKSFNRGECGGGGSGGSGSGGGGSGGGGSASGSGASTKGPSVFPLAPSSKSTSGGTAALGCLVKDYFPEPVTVSWNSGALTSGVHTFPAVLQSSGLYSLSSVVTVPSSSLGTQTYICNVNHKPSNTKVDKKVEPKSCDKTHTCPPCPAPELLGGPSVFLFPPKPKDTLMISRTPEVTCVVVDVSHEDPEVKFNWYVDGVEVHNAKTKPREEQYNSTYRVVSVLTVLHQDWLNGKEYKCKVSNKALPAPIEKTISKAKGQPREPQVCTLPPSRDELTKNQVSLSCAVKGFYPSDIAVEWESNGQPENNYKTTPPVLDSDGSFFLVSKLTVDKSRWQQGNVFSCSVLHEALHAHYTQKSLSLSPG

SEQ ID NO: 400 - protein, 966 aa, synthetic construct
EIVLTQSPGTLSLSPGETATLSCRASQSFSSDLAWYQQKPGQAPRLLIYGASSRATGIPDRFSGSGSGTDFTLTISRLEPADFAVYYCQQYGSSPPVTFGGGTKVEIKGGGGSGGSGSGGGGSASGSGEVQLVESGGGLIQPGGSLRLSCAASGVIVSYNYMNWVRQAPGKGLEWVSVIYSGGSTFYADSVRGRFTISRDNSKNTLYLQMNSLRAEDTAVYYCARDLGPAGAFDIWGLGTMVTVSSGGGGSGDTVMTQSPLSLPVTPGEPASISCRSSQSLLNSNGYNYLDWYVQKPGQSPQLLIYLGSNRASGVPDRFSGSGSGTDFTLKISRVEAEDVGVYYCMQPLQTPLFTFGPGTKVEIKRTVAAPSVFIFPPSDEQLKSGTASVVCLLNNFYPREAKVQWKVDNALQSGNSQESVTEQDSKDSTYSLSSTLTLSKADYEKHKVYACEVTHQGLSSPVTKSFNRGECGGGGSGGGGSGGGGSGGGGSGGGGSGGGGSGGGGSGGGGSQVTLRESGPALVKPTQTLTLTCTFSGFSLSTRGVCVSWIRQPPGKALEWLAFIDWDDDKYYNTSLKTRLTISKDTSKNQVVLTMTNVHPVDTATYYCARISSHHGSSWCTTFDYWGQGALVTVSAASTKGPSVFPLAPSSKSTSGGTAALGCLVKDYFPEPVTVSWNSGALTSGVHTFPAVLQSSGLYSLSSVVTVPSSSLGTQTYICNVNHKPSNTKVDKKVEPKSCDKTHTCPPCPAPELLGGPSVFLFPPKPKDTLMISRTPEVTCVVVDVSHEDPEVKFNWYVDGVEVHNAKTKPREEQYNSTYRVVSVLTVLHQDWLNGKEYKCKVSNKALPAPIEKTISKAKGQPREPQVYTLPPSRDELTKNQVSLTCLVKGFYPSDIAVEWESNGQPENNYKTTPPVLDSDGSFFLYSKLTVDKSRWQQGNVFSCSVLHEALHSHYTQKSLSLSPG

SEQ ID NO: 401 - protein, 966 aa, synthetic construct
EIVLTQSPGTLSLSPGETATLSCRASQSFSSDLAWYQQKPGQAPRLLIYGASSRATGIPDRFSGSGSGTDFTLTISRLEPADFAVYYCQQYGSSPPVTFGGGTKVEIKGGGGSGGSGSGGGGSASGSGEVQLVESGGGLIQPGGSLRLSCAASGVIVSYNYMNWVRQAPGKGLEWVSVIYSGGSTFYADSVRGRFTISRDNSKNTLYLQMNSLRAEDTAVYYCARDLGPAGAFDIWGLGTMVTVSSGGGGSGDTVMTQSPLSLPVTPGEPASISCRSSQSLLNSNGYNYLDWYVQKPGQSPQLLIYLGSNRASGVPDRFSGSGSGTDFTLKISRVEAEDVGVYYCMQPLQTPLFTFGPGTKVEIKRTVAAPSVFIFPPSDEQLKSGTASVVCLLNNFYPREAKVQWKVDNALQSGNSQESVTEQDSKDSTYSLSSTLTLSKADYEKHKVYACEVTHQGLSSPVTKSFNRGECGGGGSGGGGSGGGGSGGGGSGGGGSGGGGSGGGGSGGGGSQVTLRESGPALVKPTQTLTLTCTFSGFSLSTRGVCVSWIRQPPGKALEWLAFIDWDDDKYYNTSLKTRLTISKDTSKNQVVLTMTNVHPVDTATYYCARISSHHGSSWCTTFDYWGQGALVTVSAASTKGPSVFPLAPSSKSTSGGTAALGCLVKDYFPEPVTVSWNSGALTSGVHTFPAVLQSSGLYSLSSVVTVPSSSLGTQTYICNVNHKPSNTKVDKKVEPKSCDKTHTCPPCPAPELLGGPSVFLFPPKPKDTLMISRTPEVTCVVVDVSHEDPEVKFNWYVDGVEVHNAKTKPREEQYNSTYRVVSVLTVLHQDWLNGKEYKCKVSNKALPAPIEKTISKAKGQPREPQVYTLPPSRDELTKNQVSLTCLVKGFYPSDIAVEWESNGQPENNYKTTPPVLDSDGSFFLYSKLTVDKSRWQQGNVFSCSVLHEALHAHYTQKSLSLSPG

SEQ ID NO: 402 - protein, 966 aa, synthetic construct
DTVMTQSPLSLPVTPGEPASISCRSSQSLLNSNGYNYLDWYVQKPGQSPQLLIYLGSNRASGVPDRFSGSGSGTDFTLKISRVEAEDVGVYYCMQPLQTPLFTFGPGTKVEIKGGGGSGGSGSGGGGSASGSGQVTLRESGPALVKPTQTLTLTCTFSGFSLSTRGVCVSWIRQPPGKALEWLAFIDWDDDKYYNTSLKTRLTISKDTSKNQVVLTMTNVHPVDTATYYCARISSHHGSSWCTTFDYWGQGALVTVSAGGGGSGEIVLTQSPGTLSLSPGETATLSCRASQSFSSDLAWYQQKPGQAPRLLIYGASSRATGIPDRFSGSGSGTDFTLTISRLEPADFAVYYCQQYGSSPPVTFGGGTKVEIKRTVAAPSVFIFPPSDEQLKSGTASVVCLLNNFYPREAKVQWKVDNALQSGNSQESVTEQDSKDSTYSLSSTLTLSKADYEKHKVYACEVTHQGLSSPVTKSFNRGECGGGGSGGGGSGGGGSGGGGSGGGGSGGGGSGGGGSGGGGSEVQLVESGGGLIQPGGSLRLSCAASGVIVSYNYMNWVRQAPGKGLEWVSVIYSGGSTFYADSVRGRFTISRDNSKNTLYLQMNSLRAEDTAVYYCARDLGPAGAFDIWGLGTMVTVSSASTKGPSVFPLAPSSKSTSGGTAALGCLVKDYFPEPVTVSWNSGALTSGVHTFPAVLQSSGLYSLSSVVTVPSSSLGTQTYICNVNHKPSNTKVDKKVEPKSCDKTHTCPPCPAPELLGGPSVFLFPPKPKDTLMISRTPEVTCVVVDVSHEDPEVKFNWYVDGVEVHNAKTKPREEQYNSTYRVVSVLTVLHQDWLNGKEYKCKVSNKALPAPIEKTISKAKGQPREPQVYTLPPSRDELTKNQVSLTCLVKGFYPSDIAVEWESNGQPENNYKTTPPVLDSDGSFFLYSKLTVDKSRWQQGNVFSCSVLHEALHSHYTQKSLSLSPG

SEQ ID NO: 403 - protein, 966 aa, synthetic construct
DTVMTQSPLSLPVTPGEPASISCRSSQSLLNSNGYNYLDWYVQKPGQSPQLLIYLGSNRASGVPDRFSGSGSGTDFTLKISRVEAEDVGVYYCMQPLQTPLFTFGPGTKVEIKGGGGSGGSGSGGGGSASGSGQVTLRESGPALVKPTQTLTLTCTFSGFSLSTRGVCVSWIRQPPGKALEWLAFIDWDDDKYYNTSLKTRLTISKDTSKNQVVLTMTNVHPVDTATYYCARISSHHGSSWCTTFDYWGQGALVTVSAGGGGSGEIVLTQSPGTLSLSPGETATLSCRASQSFSSDLAWYQQKPGQAPRLLIYGASSRATGIPDRFSGSGSGTDFTLTISRLEPADFAVYYCQQYGSSPPVTFGGGTKVEIKRTVAAPSVFIFPPSDEQLKSGTASVVCLLNNFYPREAKVQWKVDNALQSGNSQESVTEQDSKDSTYSLSSTLTLSKADYEKHKVYACEVTHQGLSSPVTKSFNRGECGGGGSGGGGSGGGGSGGGGSGGGGSGGGGSGGGGSGGGGSEVQLVESGGGLIQPGGSLRLSCAASGVIVSYNYMNWVRQAPGKGLEWVSVIYSGGSTFYADSVRGRFTISRDNSKNTLYLQMNSLRAEDTAVYYCARDLGPAGAFDIWGLGTMVTVSSASTKGPSVFPLAPSSKSTSGGTAALGCLVKDYFPEPVTVSWNSGALTSGVHTFPAVLQSSGLYSLSSVVTVPSSSLGTQTYICNVNHKPSNTKVDKKVEPKSCDKTHTCPPCPAPELLGGPSVFLFPPKPKDTLMISRTPEVTCVVVDVSHEDPEVKFNWYVDGVEVHNAKTKPREEQYNSTYRVVSVLTVLHQDWLNGKEYKCKVSNKALPAPIEKTISKAKGQPREPQVYTLPPSRDELTKNQVSLTCLVKGFYPSDIAVEWESNGQPENNYKTTPPVLDSDGSFFLYSKLTVDKSRWQQGNVFSCSVLHEALHAHYTQKSLSLSPG

SEQ ID NO: 404 - protein, 972 aa, synthetic construct
EIVLTQSPGTLSLSPGETATLSCRASQSFSSDLAWYQQKPGQAPRLLIYGASSRATGIPDRFSGSGSGTDFTLTISRLEPADFAVYYCQQYGSSPPVTFGGGTKVEIKRTVAAPSVFIFPPSDEQLKSGTASVVCLLNNFYPREAKVQWKVDNALQSGNSQESVTEQDSKDSTYSLSSTLTLSKADYEKHKVYACEVTHQGLSSPVTKSFNRGECGGGGSGGGGSGGGGSGGGGSGGGGSGGGGSGGGGSGGGGSEVQLVESGGGLIQPGGSLRLSCAASGVIVSYNYMNWVRQAPGKGLEWVSVIYSGGSTFYADSVRGRFTISRDNSKNTLYLQMNSLRAEDTAVYYCARDLGPAGAFDIWGLGTMVTVSSASTKGPSVFPLAPSSKSTSGGTAALGCLVKDYFPEPVTVSWNSGALTSGVHTFPAVLQSSGLYSLSSVVTVPSSSLGTQTYICNVNHKPSNTKVDKKVEPKSCGGGGSGDTVMTQSPLSLPVTPGEPASISCRSSQSLLNSNGYNYLDWYVQKPGQSPQLLIYLGSNRASGVPDRFSGSGSGTDFTLKISRVEAEDVGVYYCMQPLQTPLFTFGPGTKVEIKGGGGSGGSGSGGGGSASGSGQVTLRESGPALVKPTQTLTLTCTFSGFSLSTRGVCVSWIRQPPGKALEWLAFIDWDDDKYYNTSLKTRLTISKDTSKNQVVLTMTNVHPVDTATYYCARISSHHGSSWCTTFDYWGQGALVTVSAASGGSGDKTHTCPPCPAPELLGGPSVFLFPPKPKDTLMISRTPEVTCVVVDVSHEDPEVKFNWYVDGVEVHNAKTKPREEQYNSTYRVVSVLTVLHQDWLNGKEYKCKVSNKALPAPIEKTISKAKGQPREPQVYTLPPSRDELTKNQVSLTCLVKGFYPSDIAVEWESNGQPENNYKTTPPVLDSDGSFFLYSKLTVDKSRWQQGNVFSCSVLHEALHSHYTQKSLSLSPG

SEQ ID NO: 405 - protein, 966 aa, synthetic construct
EIVLTQSPGTLSLSPGETATLSCRASQSFSSDLAWYQQKPGQAPRLLIYGASSRATGIPDRFSGSGSGTDFTLTISRLEPADFAVYYCQQYGSSPPVTFGGGTKVEIKGGGGSGGSGSGGGGSASGSGEVQLVESGGGLIQPGGSLRLSCAASGVIVSYNYMNWVRQAPGKGLEWVSVIYSGGSTFYADSVRGRFTISRDNSKNTLYLQMNSLRAEDTAVYYCARDLGPAGAFDIWGLGTMVTVSSGGGGSGDTVMTQSPLSLPVTPGEPASISCRSSQSLLNSNGYNYLDWYVQKPGQSPQLLIYLGSNRASGVPDRFSGSGSGTDFTLKISRVEAEDVGVYYCMQPLQTPLFTFGPGTKVEIKRTVAAPSVFIFPPSDEQLKSGTASVVCLLNNFYPREAKVQWKVDNALQSGNSQESVTEQDSKDSTYSLSSTLTLSKADYEKHKVYACEVTHQGLSSPVTKSFNRGECGGGGSGGGGSGGGGSGGGGSGGGGSGGGGSGGGGSGGGGSQVTLRESGPALVKPTQTLTLTCTFSGFSLSTRGVCVSWIRQPPGKALEWLAFIDWDDDKYYNTSLKTRLTISKDTSKNQVVLTMTNVHPVDTATYYCARISSHHGSSWCTTFDYWGQGALVTVSAASTKGPSVFPLAPSSKSTSGGTAALGCLVKDYFPEPVTVSWNSGALTSGVHTFPAVLQSSGLYSLSSVVTVPSSSLGTQTYICNVNHKPSNTKVDKKVEPKSCDKTHTCPPCPAPELLGGPSVFLFPPKPKDTLMISRTPEVTCVVVDVSHEDPEVKFNWYVDGVEVHNAKTKPREEQYNSTYRVVSVLTVLHQDWLNGKEYKCKVSNKALPAPIEKTISKAKGQPREPQVYTLPPCRDELTKNQVSLWCLVKGFYPSDIAVEWESNGQPENNYKTTPPVLDSDGSFFLYSKLTVDKSRWQQGNVFSCSVLHEALHSHYTQKSLSLSPG

SEQ ID NO: 406 - protein, 972 aa, synthetic construct
EIVLTQSPGTLSLSPGETATLSCRASQSFSSDLAWYQQKPGQAPRLLIYGASSRATGIPDRFSGSGSGTDFTLTISRLEPADFAVYYCQQYGSSPPVTFGGGTKVEIKRTVAAPSVFIFPPSDEQLKSGTASVVCLLNNFYPREAKVQWKVDNALQSGNSQESVTEQDSKDSTYSLSSTLTLSKADYEKHKVYACEVTHQGLSSPVTKSFNRGECGGGGSGGGGSGGGGSGGGGSGGGGSGGGGSGGGGSGGGGSEVQLVESGGGLIQPGGSLRLSCAASGVIVSYNYMNWVRQAPGKGLEWVSVIYSGGSTFYADSVRGRFTISRDNSKNTLYLQMNSLRAEDTAVYYCARDLGPAGAFDIWGLGTMVTVSSASTKGPSVFPLAPSSKSTSGGTAALGCLVKDYFPEPVTVSWNSGALTSGVHTFPAVLQSSGLYSLSSVVTVPSSSLGTQTYICNVNHKPSNTKVDKKVEPKSCGGGGSGDTVMTQSPLSLPVTPGEPASISCRSSQSLLNSNGYNYLDWYVQKPGQSPQLLIYLGSNRASGVPDRFSGSGSGTDFTLKISRVEAEDVGVYYCMQPLQTPLFTFGPGTKVEIKGGGGSGGSGSGGGGSASGSGQVTLRESGPALVKPTQTLTLTCTFSGFSLSTRGVCVSWIRQPPGKALEWLAFIDWDDDKYYNTSLKTRLTISKDTSKNQVVLTMTNVHPVDTATYYCARISSHHGSSWCTTFDYWGQGALVTVSAASGGSGDKTHTCPPCPAPELLGGPSVFLFPPKPKDTLMISRTPEVTCVVVDVSHEDPEVKFNWYVDGVEVHNAKTKPREEQYNSTYRVVSVLTVLHQDWLNGKEYKCKVSNKALPAPIEKTISKAKGQPREPQVCTLPPSRDELTKNQVSLSCAVKGFYPSDIAVEWESNGQPENNYKTTPPVLDSDGSFFLVSKLTVDKSRWQQGNVFSCSVLHEALHSHYTQKSLSLSPG

SEQ ID NO: 407 - protein, 972 aa, synthetic construct
EIVLTQSPGTLSLSPGETATLSCRASQSFSSDLAWYQQKPGQAPRLLIYGASSRATGIPDRFSGSGSGTDFTLTISRLEPADFAVYYCQQYGSSPPVTFGGGTKVEIKRTVAAPSVFIFPPSDEQLKSGTASVVCLLNNFYPREAKVQWKVDNALQSGNSQESVTEQDSKDSTYSLSSTLTLSKADYEKHKVYACEVTHQGLSSPVTKSFNRGECGGGGSGGGGSGGGGSGGGGSGGGGSGGGGSGGGGSGGGGSEVQLVESGGGLIQPGGSLRLSCAASGVIVSYNYMNWVRQAPGKGLEWVSVIYSGGSTFYADSVRGRFTISRDNSKNTLYLQMNSLRAEDTAVYYCARDLGPAGAFDIWGLGTMVTVSSASTKGPSVFPLAPSSKSTSGGTAALGCLVKDYFPEPVTVSWNSGALTSGVHTFPAVLQSSGLYSLSSVVTVPSSSLGTQTYICNVNHKPSNTKVDKKVEPKSCGGGGSGDTVMTQSPLSLPVTPGEPASISCRSSQSLLNSNGYNYLDWYVQKPGQSPQLLIYLGSNRASGVPDRFSGSGSGTDFTLKISRVEAEDVGVYYCMQPLQTPLFTFGPGTKVEIKGGGGSGGSGSGGGGSASGSGQVTLRESGPALVKPTQTLTLTCTFSGFSLSTRGVCVSWIRQPPGKALEWLAFIDWDDDKYYNTSLKTRLTISKDTSKNQVVLTMTNVHPVDTATYYCARISSHHGSSWCTTFDYWGQGALVTVSAASGGSGDKTHTCPPCPAPELLGGPSVFLFPPKPKDTLMISRTPEVTCVVVDVSHEDPEVKFNWYVDGVEVHNAKTKPREEQYNSTYRVVSVLTVLHQDWLNGKEYKCKVSNKALPAPIEKTISKAKGQPREPQVYTLPPCRDELTKNQVSLWCLVKGFYPSDIAVEWESNGQPENNYKTTPPVLDSDGSFFLYSKLTVDKSRWQQGNVFSCSVLHEALHSHYTQKSLSLSPG

SEQ ID NO: 408 - protein, 966 aa, synthetic construct
EIVLTQSPGTLSLSPGETATLSCRASQSFSSDLAWYQQKPGQAPRLLIYGASSRATGIPDRFSGSGSGTDFTLTISRLEPADFAVYYCQQYGSSPPVTFGGGTKVEIKGGGGSGGSGSGGGGSASGSGEVQLVESGGGLIQPGGSLRLSCAASGVIVSYNYMNWVRQAPGKGLEWVSVIYSGGSTFYADSVRGRFTISRDNSKNTLYLQMNSLRAEDTAVYYCARDLGPAGAFDIWGLGTMVTVSSGGGGSGDTVMTQSPLSLPVTPGEPASISCRSSQSLLNSNGYNYLDWYVQKPGQSPQLLIYLGSNRASGVPDRFSGSGSGTDFTLKISRVEAEDVGVYYCMQPLQTPLFTFGPGTKVEIKRTVAAPSVFIFPPSDEQLKSGTASVVCLLNNFYPREAKVQWKVDNALQSGNSQESVTEQDSKDSTYSLSSTLTLSKADYEKHKVYACEVTHQGLSSPVTKSFNRGECGGGGSGGGGSGGGGSGGGGSGGGGSGGGGSGGGGSGGGGSQVTLRESGPALVKPTQTLTLTCTFSGFSLSTRGVCVSWIRQPPGKALEWLAFIDWDDDKYYNTSLKTRLTISKDTSKNQVVLTMTNVHPVDTATYYCARISSHHGSSWCTTFDYWGQGALVTVSAASTKGPSVFPLAPSSKSTSGGTAALGCLVKDYFPEPVTVSWNSGALTSGVHTFPAVLQSSGLYSLSSVVTVPSSSLGTQTYICNVNHKPSNTKVDKKVEPKSCDKTHTCPPCPAPELLGGPSVFLFPPKPKDTLMISRTPEVTCVVVDVSHEDPEVKFNWYVDGVEVHNAKTKPREEQYNSTYRVVSVLTVLHQDWLNGKEYKCKVSNKALPAPIEKTISKAKGQPREPQVCTLPPSRDELTKNQVSLSCAVKGFYPSDIAVEWESNGQPENNYKTTPPVLDSDGSFFLVSKLTVDKSRWQQGNVFSCSVLHEALHSHYTQKSLSLSPG

SEQ ID NO: 409 - protein, 938 aa, synthetic construct
QTVVTQEPSFSVSPGGTVTLTCGLSSGSVSTAYFPSWYQQTPGQAPRTLIYGTNTRSSGVPDRFSGSILGNKAALTITGAQADDESDYYCVLYMGRGIVVFGGGTKLTVLRTVAAPSVFIFPPSDEQLKSGTASVVCLLNNFYPREAKVQWKVDNALQSGNSQESVTEQDSKDSTYSLSSTLTLSKADYEKHKVYACEVTHQGLSSPVTKSFNRGECGGGGSGGGGSGGGGSEIVLTQSPGTLSLSPGETATLSCRASQSFSSDLAWYQQKPGQAPRLLIYGASSRATGIPDRFSGSGSGTDFTLTISRLEPADFAVYYCQQYGSSPPVTFGGGTKVEIKGGGGSGGSGSGGGGSASGSGEVQLVESGGGLIQPGGSLRLSCAASGVIVSYNYMNWVRQAPGKGLEWVSVIYSGGSTFYADSVRGRFTISRDNSKNTLYLQMNSLRAEDTAVYYCARDLGPAGAFDIWGLGTMVTVSSGGSSGQVQLVESGGGVVQPGRSLRLSCAASGFTLSSYGMHWVRQAPGKGLEWVAVISYDGSNKYYVDSVKGRFTISRDNSKNTLYLQMNSLRAEDTAVYYCARGWAYWELLPDYYYGMDVWGQGTTVTVSSASTKGPSVFPLAPSSKSTSGGTAALGCLVKDYFPEPVTVSWNSGALTSGVHTFPAVLQSSGLYSLSSVVTVPSSSLGTQTYICNVNHKPSNTKVDKKVEPKSCDKTHTCPPCPAPELLGGPSVFLFPPKPKDTLMISRTPEVTCVVVDVSHEDPEVKFNWYVDGVEVHNAKTKPREEQYNSTYRVVSVLTVLHQDWLNGKEYKCKVSNKALPAPIEKTISKAKGQPREPQVYTLPPCRDELTKNQVSLWCLVKGFYPSDIAVEWESNGQPENNYKTTPPVLDSDGSFFLYSKLTVDKSRWQQGNVFSCSVLHEALHSHYTQKSLSLSPG

SEQ ID NO: 410 - protein, 940 aa, synthetic construct; identical to SEQ ID NO: 385

SEQ ID NO: 411 - protein, 938 aa, synthetic construct; identical to SEQ ID NO: 409

SEQ ID NO: 412 - protein, 940 aa, synthetic construct; identical to SEQ ID NO: 387

SEQ ID NO: 413 - protein, 938 aa, synthetic construct
EIVLTQSPGTLSLSPGETATLSCRASQSFSSDLAWYQQKPGQAPRLLIYGASSRATGIPDRFSGSGSGTDFTLTISRLEPADFAVYYCQQYGSSPPVTFGGGTKVEIKRTVAAPSVFIFPPSDEQLKSGTASVVCLLNNFYPREAKVQWKVDNALQSGNSQESVTEQDSKDSTYSLSSTLTLSKADYEKHKVYACEVTHQGLSSPVTKSFNRGECGGGGSGGGGSGGGGSQTVVTQEPSFSVSPGGTVTLTCGLSSGSVSTAYFPSWYQQTPGQAPRTLIYGTNTRSSGVPDRFSGSILGNKAALTITGAQADDESDYYCVLYMGRGIVVFGGGTKLTVLGGGGSGGSGSGGGGSASGSGQVQLVESGGGVVQPGRSLRLSCAASGFTLSSYGMHWVRQAPGKGLEWVAVISYDGSNKYYVDSVKGRFTISRDNSKNTLYLQMNSLRAEDTAVYYCARGWAYWELLPDYYYGMDVWGQGTTVTVSSGGSSGEVQLVESGGGLIQPGGSLRLSCAASGVIVSYNYMNWVRQAPGKGLEWVSVIYSGGSTFYADSVRGRFTISRDNSKNTLYLQMNSLRAEDTAVYYCARDLGPAGAFDIWGLGTMVTVSSASTKGPSVFPLAPSSKSTSGGTAALGCLVKDYFPEPVTVSWNSGALTSGVHTFPAVLQSSGLYSLSSVVTVPSSSLGTQTYICNVNHKPSNTKVDKKVEPKSCDKTHTCPPCPAPELLGGPSVFLFPPKPKDTLMISRTPEVTCVVVDVSHEDPEVKFNWYVDGVEVHNAKTKPREEQYNSTYRVVSVLTVLHQDWLNGKEYKCKVSNKALPAPIEKTISKAKGQPREPQVYTLPPCRDELTKNQVSLWCLVKGFYPSDIAVEWESNGQPENNYKTTPPVLDSDGSFFLYSKLTVDKSRWQQGNVFSCSVLHEALHSHYTQKSLSLSPG

SEQ ID NO: 414 - protein, 940 aa, synthetic construct; identical to SEQ ID NO: 385

SEQ ID NO: 415 - protein, 938 aa, synthetic construct
EIVLTQSPGTLSLSPGETATLSCRASQSFSSDLAWYQQKPGQAPRLLIYGASSRATGIPDRFSGSGSGTDFTLTISRLEPADFAVYYCQQYGSSPPVTFGGGTKVEIKRTVAAPSVFIFPPSDEQLKSGTASVVCLLNNFYPREAKVQWKVDNALQSGNSQESVTEQDSKDSTYSLSSTLTLSKADYEKHKVYACEVTHQGLSSPVTKSFNRGECGGGGSGGGGSGGGGSQTVVTQEPSFSVSPGGTVTLTCGLSSGSVSTAYFPSWYQQTPGQAPRTLIYGTNTRSSGVPDRFSGSILGNKAALTITGAQADDESDYYCVLYMGRGIVVFGGGTKLTVLGGGGSGGSGSGGGGSASGSGQVQLVESGGGVVQPGRSLRLSCAASGFTLSSYGMHWVRQAPGKGLEWVAVISYDGSNKYYVDSVKGRFTISRDNSKNTLYLQMNSLRAEDTAVYYCARGWAYWELLPDYYYGMDVWGQGTTVTVSSGGSSGEVQLVESGGGLIQPGGSLRLSCAASGVIVSYNYMNWVRQAPGKGLEWVSVIYSGGSTFYADSVRGRFTISRDNSKNTLYLQMNSLRAEDTAVYYCARDLGPAGAFDIWGLGTMVTVSSASTKGPSVFPLAPSSKSTSGGTAALGCLVKDYFPEPVTVSWNSGALTSGVHTFPAVLQSSGLYSLSSVVTVPSSSLGTQTYICNVNHKPSNTKVDKKVEPKSCDKTHTCPPCPAPELLGGPSVFLFPPKPKDTLMISRTPEVTCVVVDVSHEDPEVKFNWYVDGVEVHNAKTKPREEQYNSTYRVVSVLTVLHQDWLNGKEYKCKVSNKALPAPIEKTISKAKGQPREPQVYTLPPCRDELTKNQVSLWCLVKGFYPSDIAVEWESNGQPENNYKTTPPVLDSDGSFFLYSKLTVDKSRWQQGNVFSCSVLHEALHAHYTQKSLSLSPG

SEQ ID NO: 416 - protein, 940 aa, synthetic construct
EIVLTQSPGTLSLSPGETATLSCRASQSFSSDLAWYQQKPGQAPRLLIYGASSRATGIPDRFSGSGSGTDFTLTISRLEPADFAVYYCQQYGSSPPVTFGGGTKVEIKRTVAAPSVFIFPPSDEQLKSGTASVVCLLNNFYPREAKVQWKVDNALQSGNSQESVTEQDSKDSTYSLSSTLTLSKADYEKHKVYACEVTHQGLSSPVTKSFNRGECGGGGSGGGGSGGGGSDTVMTQSPLSLPVTPGEPASISCRSSQSLLNSNGYNYLDWYVQKPGQSPQLLIYLGSNRASGVPDRFSGSGSGTDFTLKISRVEAEDVGVYYCMQPLQTPLFTFGPGTKVEIKGGGGSGGSGSGGGGSASGSGQVTLRESGPALVKPTQTLTLTCTFSGFSLSTRGVCVSWIRQPPGKALEWLAFIDWDDDKYYNTSLKTRLTISKDTSKNQVVLTMTNVHPVDTATYYCARISSHHGSSWCTTFDYWGQGALVTVSAGGSSGEVQLVESGGGLIQPGGSLRLSCAASGVIVSYNYMNWVRQAPGKGLEWVSVIYSGGSTFYADSVRGRFTISRDNSKNTLYLQMNSLRAEDTAVYYCARDLGPAGAFDIWGLGTMVTVSSASTKGPSVFPLAPSSKSTSGGTAALGCLVKDYFPEPVTVSWNSGALTSGVHTFPAVLQSSGLYSLSSVVTVPSSSLGTQTYICNVNHKPSNTKVDKKVEPKSCDKTHTCPPCPAPELLGGPSVFLFPPKPKDTLMISRTPEVTCVVVDVSHEDPEVKFNWYVDGVEVHNAKTKPREEQYNSTYRVVSVLTVLHQDWLNGKEYKCKVSNKALPAPIEKTISKAKGQPREPQVCTLPPSRDELTKNQVSLSCAVKGFYPSDIAVEWESNGQPENNYKTTPPVLDSDGSFFLVSKLTVDKSRWQQGNVFSCSVLHEALHAHYTQKSLSLSPG

SEQ ID NO: 417 - protein, 938 aa, synthetic construct; identical to SEQ ID NO: 413

SEQ ID NO: 418 - protein, 940 aa, synthetic construct; identical to SEQ ID NO: 387

SEQ ID NO: 419 - protein, 953 aa, synthetic construct
QTVVTQEPSFSVSPGGTVTLTCGLSSGSVSTAYFPSWYQQTPGQAPRTLIYGTNTRSSGVPDRFSGSILGNKAALTITGAQADDESDYYCVLYMGRGIVVFGGGTKLTVLGGSSGEIVLTQSPGTLSLSPGETATLSCRASQSFSSDLAWYQQKPGQAPRLLIYGASSRATGIPDRFSGSGSGTDFTLTISRLEPADFAVYYCQQYGSSPPVTFGGGTKVEIKGGGGSGGSGSGGGGSASGSGEVQLVESGGGLIQPGGSLRLSCAASGVIVSYNYMNWVRQAPGKGLEWVSVIYSGGSTFYADSVRGRFTISRDNSKNTLYLQMNSLRAEDTAVYYCARDLGPAGAFDIWGLGTMVTVSSGGSSGQVQLVESGGGVVQPGRSLRLSCAASGFTLSSYGMHWVRQAPGKGLEWVAVISYDGSNKYYVDSVKGRFTISRDNSKNTLYLQMNSLRAEDTAVYYCARGWAYWELLPDYYYGMDVWGQGTTVTVSSRTVAAPSVFIFPPSDEQLKSGTASVVCLLNNFYPREAKVQWKVDNALQSGNSQESVTEQDSKDSTYSLSSTLTLSKADYEKHKVYACEVTHQGLSSPVTKSFNRGECGGGGSGGSGSGGGGSGGGGSASGSGASTKGPSVFPLAPSSKSTSGGTAALGCLVKDYFPEPVTVSWNSGALTSGVHTFPAVLQSSGLYSLSSVVTVPSSSLGTQTYICNVNHKPSNTKVDKKVEPKSCDKTHTCPPCPAPELLGGPSVFLFPPKPKDTLMISRTPEVTCVVVDVSHEDPEVKFNWYVDGVEVHNAKTKPREEQYNSTYRVVSVLTVLHQDWLNGKEYKCKVSNKALPAPIEKTISKAKGQPREPQVYTLPPCRDELTKNQVSLWCLVKGFYPSDIAVEWESNGQPENNYKTTPPVLDSDGSFFLYSKLTVDKSRWQQGNVFSCSVLHEALHSHYTQKSLSLSPG

SEQ ID NO: 420 - protein, 955 aa, synthetic construct; identical to SEQ ID NO: 393

SEQ ID NO: 421 - protein, 953 aa, synthetic construct
QTVVTQEPSFSVSPGGTVTLTCGLSSGSVSTAYFPSWYQQTPGQAPRTLIYGTNTRSSGVPDRFSGSILGNKAALTITGAQADDESDYYCVLYMGRGIVVFGGGTKLTVLGGSSGEIVLTQSPGTLSLSPGETATLSCRASQSFSSDLAWYQQKPGQAPRLLIYGASSRATGIPDRFSGSGSGTDFTLTISRLEPADFAVYYCQQYGSSPPVTFGGGTKVEIKGGGGSGGSGSGGGGSASGSGEVQLVESGGGLIQPGGSLRLSCAASGVIVSYNYMNWVRQAPGKGLEWVSVIYSGGSTFYADSVRGRFTISRDNSKNTLYLQMNSLRAEDTAVYYCARDLGPAGAFDIWGLGTMVTVSSGGSSGQVQLVESGGGVVQPGRSLRLSCAASGFTLSSYGMHWVRQAPGKGLEWVAVISYDGSNKYYVDSVKGRFTISRDNSKNTLYLQMNSLRAEDTAVYYCARGWAYWELLPDYYYGMDVWGQGTTVTVSSRTVAAPSVFIFPPSDEQLKSGTASVVCLLNNFYPREAKVQWKVDNALQSGNSQESVTEQDSKDSTYSLSSTLTLSKADYEKHKVYACEVTHQGLSSPVTKSFNRGECGGGGSGGSGSGGGGSGGGGSASGSGASTKGPSVFPLAPSSKSTSGGTAALGCLVKDYFPEPVTVSWNSGALTSGVHTFPAVLQSSGLYSLSSVVTVPSSSLGTQTYICNVNHKPSNTKVDKKVEPKSCDKTHTCPPCPAPELLGGPSVFLFPPKPKDTLMISRTPEVTCVVVDVSHEDPEVKFNWYVDGVEVHNAKTKPREEQYNSTYRVVSVLTVLHQDWLNGKEYKCKVSNKALPAPIEKTISKAKGQPREPQVYTLPPCRDELTKNQVSLWCLVKGFYPSDIAVEWESNGQPENNYKTTPPVLDSDGSFFLYSKLTVDKSRWQQGNVFSCSVLHEALHAHYTQKSLSLSPG

SEQ ID NO: 422 - protein, 955 aa, synthetic construct; identical to SEQ ID NO: 395

SEQ ID NO: 423 - protein, 953 aa, synthetic construct; identical to SEQ ID NO: 419

SEQ ID NO: 424 - protein, 955 aa, synthetic construct; identical to SEQ ID NO: 397

SEQ ID NO: 425 - protein, 953 aa, synthetic construct; identical to SEQ ID NO: 421

SEQ ID NO: 426 - protein, 955 aa, synthetic construct; identical to SEQ ID NO: 399

SEQ ID NO: 427 - protein, 953 aa, synthetic construct
EIVLTQSPGTLSLSPGETATLSCRASQSFSSDLAWYQQKPGQAPRLLIYGASSRATGIPDRFSGSGSGTDFTLTISRLEPADFAVYYCQQYGSSPPVTFGGGTKVEIKGGSSGQTVVTQEPSFSVSPGGTVTLTCGLSSGSVSTAYFPSWYQQTPGQAPRTLIYGTNTRSSGVPDRFSGSILGNKAALTITGAQADDESDYYCVLYMGRGIVVFGGGTKLTVLGGGGSGGSGSGGGGSASGSGQVQLVESGGGVVQPGRSLRLSCAASGFTLSSYGMHWVRQAPGKGLEWVAVISYDGSNKYYVDSVKGRFTISRDNSKNTLYLQMNSLRAEDTAVYYCARGWAYWELLPDYYYGMDVWGQGTTVTVSSGGSSGEVQLVESGGGLIQPGGSLRLSCAASGVIVSYNYMNWVRQAPGKGLEWVSVIYSGGSTFYADSVRGRFTISRDNSKNTLYLQMNSLRAEDTAVYYCARDLGPAGAFDIWGLGTMVTVSSRTVAAPSVFIFPPSDEQLKSGTASVVCLLNNFYPREAKVQWKVDNALQSGNSQESVTEQDSKDSTYSLSSTLTLSKADYEKHKVYACEVTHQGLSSPVTKSFNRGECGGGGSGGSGSGGGGSGGGGSASGSGASTKGPSVFPLAPSSKSTSGGTAALGCLVKDYFPEPVTVSWNSGALTSGVHTFPAVLQSSGLYSLSSVVTVPSSSLGTQTYICNVNHKPSNTKVDKKVEPKSCDKTHTCPPCPAPELLGGPSVFLFPPKPKDTLMISRTPEVTCVVVDVSHEDPEVKFNWYVDGVEVHNAKTKPREEQYNSTYRVVSVLTVLHQDWLNGKEYKCKVSNKALPAPIEKTISKAKGQPREPQVYTLPPCRDELTKNQVSLWCLVKGFYPSDIAVEWESNGQPENNYKTTPPVLDSDGSFFLYSKLTVDKSRWQQGNVFSCSVLHEALHSHYTQKSLSLSPG

SEQ ID NO: 428 - protein, 955 aa, synthetic construct; identical to SEQ ID NO: 393

SEQ ID NO: 429 - protein, 953 aa, synthetic construct
EIVLTQSPGTLSLSPGETATLSCRASQSFSSDLAWYQQKPGQAPRLLIYGASSRATGIPDRFSGSGSGTDFTLTISRLEPADFAVYYCQQYGSSPPVTFGGGTKVEIKGGSSGQTVVTQEPSFSVSPGGTVTLTCGLSSGSVSTAYFPSWYQQTPGQAPRTLIYGTNTRSSGVPDRFSGSILGNKAALTITGAQADDESDYYCVLYMGRGIVVFGGGTKLTVLGGGGSGGSGSGGGGSASGSGQVQLVESGGGVVQPGRSLRLSCAASGFTLSSYGMHWVRQAPGKGLEWVAVISYDGSNKYYVDSVKGRFTISRDNSKNTLYLQMNSLRAEDTAVYYCARGWAYWELLPDYYYGMDVWGQGTTVTVSSGGSSGEVQLVESGGGLIQPGGSLRLSCAASGVIVSYNYMNWVRQAPGKGLEWVSVIYSGGSTFYADSVRGRFTISRDNSKNTLYLQMNSLRAEDTAVYYCARDLGPAGAFDIWGLGTMVTVSSRTVAAPSVFIFPPSDEQLKSGTASVVCLLNNFYPREAKVQWKVDNALQSGNSQESVTEQDSKDSTYSLSSTLTLSKADYEKHKVYACEVTHQGLSSPVTKSFNRGECGGGGSGGSGSGGGGSGGGGSASGSGASTKGPSVFPLAPSSKSTSGGTAALGCLVKDYFPEPVTVSWNSGALTSGVHTFPAVLQSSGLYSLSSVVTVPSSSLGTQTYICNVNHKPSNTKVDKKVEPKSCDKTHTCPPCPAPELLGGPSVFLFPPKPKDTLMISRTPEVTCVVVDVSHEDPEVKFNWYVDGVEVHNAKTKPREEQYNSTYRVVSVLTVLHQDWLNGKEYKCKVSNKALPAPIEKTISKAKGQPREPQVYTLPPCRDELTKNQVSLWCLVKGFYPSDIAVEWESNGQPENNYKTTPPVLDSDGSFFLYSKLTVDKSRWQQGNVFSCSVLHEALHAHYTQKSLSLSPG

SEQ ID NO: 430 - protein, 955 aa, synthetic construct; identical to SEQ ID NO: 395

SEQ ID NO: 431 - protein, 953 aa, synthetic construct; identical to SEQ ID NO: 427

SEQ ID NO: 432 - protein, 955 aa, synthetic construct; identical to SEQ ID NO: 397

SEQ ID NO: 433 - protein, 953 aa, synthetic construct; identical to SEQ ID NO: 429

SEQ ID NO: 434 - protein, 955 aa, synthetic construct; identical to SEQ ID NO: 399

SEQ ID NO: 435 - protein, 964 aa, synthetic construct
EIVLTQSPGTLSLSPGETATLSCRASQSFSSDLAWYQQKPGQAPRLLIYGASSRATGIPDRFSGSGSGTDFTLTISRLEPADFAVYYCQQYGSSPPVTFGGGTKVEIKGGGGSGGSGSGGGGSASGSGEVQLVESGGGLIQPGGSLRLSCAASGVIVSYNYMNWVRQAPGKGLEWVSVIYSGGSTFYADSVRGRFTISRDNSKNTLYLQMNSLRAEDTAVYYCARDLGPAGAFDIWGLGTMVTVSSGGGGSGQTVVTQEPSFSVSPGGTVTLTCGLSSGSVSTAYFPSWYQQTPGQAPRTLIYGTNTRSSGVPDRFSGSILGNKAALTITGAQADDESDYYCVLYMGRGIVVFGGGTKLTVLRTVAAPSVFIFPPSDEQLKSGTASVVCLLNNFYPREAKVQWKVDNALQSGNSQESVTEQDSKDSTYSLSSTLTLSKADYEKHKVYACEVTHQGLSSPVTKSFNRGECGGGGSGGGGSGGGGSGGGGSGGGGSGGGGSGGGGSGGGGSQVQLVESGGGVVQPGRSLRLSCAASGFTLSSYGMHWVRQAPGKGLEWVAVISYDGSNKYYVDSVKGRFTISRDNSKNTLYLQMNSLRAEDTAVYYCARGWAYWELLPDYYYGMDVWGQGTTVTVSSASTKGPSVFPLAPSSKSTSGGTAALGCLVKDYFPEPVTVSWNSGALTSGVHTFPAVLQSSGLYSLSSVVTVPSSSLGTQTYICNVNHKPSNTKVDKKVEPKSCDKTHTCPPCPAPELLGGPSVFLFPPKPKDTLMISRTPEVTCVVVDVSHEDPEVKFNWYVDGVEVHNAKTKPREEQYNSTYRVVSVLTVLHQDWLNGKEYKCKVSNKALPAPIEKTISKAKGQPREPQVYTLPPCRDELTKNQVSLWCLVKGFYPSDIAVEWESNGQPENNYKTTPPVLDSDGSFFLYSKLTVDKSRWQQGNVFSCSVLHEALHSHYTQKSLSLSPG

SEQ ID NO: 436 - protein, 966 aa, synthetic construct
DTVMTQSPLSLPVTPGEPASISCRSSQSLLNSNGYNYLDWYVQKPGQSPQLLIYLGSNRASGVPDRFSGSGSGTDFTLKISRVEAEDVGVYYCMQPLQTPLFTFGPGTKVEIKGGGGSGGSGSGGGGSASGSGQVTLRESGPALVKPTQTLTLTCTFSGFSLSTRGVCVSWIRQPPGKALEWLAFIDWDDDKYYNTSLKTRLTISKDTSKNQVVLTMTNVHPVDTATYYCARISSHHGSSWCTTFDYWGQGALVTVSAGGGGSGEIVLTQSPGTLSLSPGETATLSCRASQSFSSDLAWYQQKPGQAPRLLIYGASSRATGIPDRFSGSGSGTDFTLTISRLEPADFAVYYCQQYGSSPPVTFGGGTKVEIKRTVAAPSVFIFPPSDEQLKSGTASVVCLLNNFYPREAKVQWKVDNALQSGNSQESVTEQDSKDSTYSLSSTLTLSKADYEKHKVYACEVTHQGLSSPVTKSFNRGECGGGGSGGGGSGGGGSGGGGSGGGGSGGGGSGGGGSGGGGSEVQLVESGGGLIQPGGSLRLSCAASGVIVSYNYMNWVRQAPGKGLEWVSVIYSGGSTFYADSVRGRFTISRDNSKNTLYLQMNSLRAEDTAVYYCARDLGPAGAFDIWGLGTMVTVSSASTKGPSVFPLAPSSKSTSGGTAALGCLVKDYFPEPVTVSWNSGALTSGVHTFPAVLQSSGLYSLSSVVTVPSSSLGTQTYICNVNHKPSNTKVDKKVEPKSCDKTHTCPPCPAPELLGGPSVFLFPPKPKDTLMISRTPEVTCVVVDVSHEDPEVKFNWYVDGVEVHNAKTKPREEQYNSTYRVVSVLTVLHQDWLNGKEYKCKVSNKALPAPIEKTISKAKGQPREPQVCTLPPSRDELTKNQVSLSCAVKGFYPSDIAVEWESNGQPENNYKTTPPVLDSDGSFFLVSKLTVDKSRWQQGNVFSCSVLHEALHSHYTQKSLSLSPG

SEQ ID NO: 437 - protein, 964 aa, synthetic construct
EIVLTQSPGTLSLSPGETATLSCRASQSFSSDLAWYQQKPGQAPRLLIYGASSRATGIPDRFSGSGSGTDFTLTISRLEPADFAVYYCQQYGSSPPVTFGGGTKVEIKGGGGSGGSGSGGGGSASGSGEVQLVESGGGLIQPGGSLRLSCAASGVIVSYNYMNWVRQAPGKGLEWVSVIYSGGSTFYADSVRGRFTISRDNSKNTLYLQMNSLRAEDTAVYYCARDLGPAGAFDIWGLGTMVTVSSGGGGSGQTVVTQEPSFSVSPGGTVTLTCGLSSGSVSTAYFPSWYQQTPGQAPRTLIYGTNTRSSGVPDRFSGSILGNKAALTITGAQADDESDYYCVLYMGRGIVVFGGGTKLTVLRTVAAPSVFIFPPSDEQLKSGTASVVCLLNNFYPREAKVQWKVDNALQSGNSQESVTEQDSKDSTYSLSSTLTLSKADYEKHKVYACEVTHQGLSSPVTKSFNRGECGGGGSGGGGSGGGGSGGGGSGGGGSGGGGSGGGGSGGGGSQVQLVESGGGVVQPGRSLRLSCAASGFTLSSYGMHWVRQAPGKGLEWVAVISYDGSNKYYVDSVKGRFTISRDNSKNTLYLQMNSLRAEDTAVYYCARGWAYWELLPDYYYGMDVWGQGTTVTVSSASTKGPSVFPLAPSSKSTSGGTAALGCLVKDYFPEPVTVSWNSGALTSGVHTFPAVLQSSGLYSLSSVVTVPSSSLGTQTYICNVNHKPSNTKVDKKVEPKSCDKTHTCPPCPAPELLGGPSVFLFPPKPKDTLMISRTPEVTCVVVDVSHEDPEVKFNWYVDGVEVHNAKTKPREEQYNSTYRVVSVLTVLHQDWLNGKEYKCKVSNKALPAPIEKTISKAKGQPREPQVYTLPPCRDELTKNQVSLWCLVKGFYPSDIAVEWESNGQPENNYKTTPPVLDSDGSFFLYSKLTVDKSRWQQGNVFSCSVLHEALHAHYTQKSLSLSPG

SEQ ID NO: 438 - protein, 966 aa, synthetic construct
DTVMTQSPLSLPVTPGEPASISCRSSQSLLNSNGYNYLDWYVQKPGQSPQLLIYLGSNRASGVPDRFSGSGSGTDFTLKISRVEAEDVGVYYCMQPLQTPLFTFGPGTKVEIKGGGGSGGSGSGGGGSASGSGQVTLRESGPALVKPTQTLTLTCTFSGFSLSTRGVCVSWIRQPPGKALEWLAFIDWDDDKYYNTSLKTRLTISKDTSKNQVVLTMTNVHPVDTATYYCARISSHHGSSWCTTFDYWGQGALVTVSAGGGGSGEIVLTQSPGTLSLSPGETATLSCRASQSFSSDLAWYQQKPGQAPRLLIYGASSRATGIPDRFSGSGSGTDFTLTISRLEPADFAVYYCQQYGSSPPVTFGGGTKVEIKRTVAAPSVFIFPPSDEQLKSGTASVVCLLNNFYPREAKVQWKVDNALQSGNSQESVTEQDSKDSTYSLSSTLTLSKADYEKHKVYACEVTHQGLSSPVTKSFNRGECGGGGSGGGGSGGGGSGGGGSGGGGSGGGGSGGGGSGGGGSEVQLVESGGGLIQPGGSLRLSCAASGVIVSYNYMNWVRQAPGKGLEWVSVIYSGGSTFYADSVRGRFTISRDNSKNTLYLQMNSLRAEDTAVYYCARDLGPAGAFDIWGLGTMVTVSSASTKGPSVFPLAPSSKSTSGGTAALGCLVKDYFPEPVTVSWNSGALTSGVHTFPAVLQSSGLYSLSSVVTVPSSSLGTQTYICNVNHKPSNTKVDKKVEPKSCDKTHTCPPCPAPELLGGPSVFLFPPKPKDTLMISRTPEVTCVVVDVSHEDPEVKFNWYVDGVEVHNAKTKPREEQYNSTYRVVSVLTVLHQDWLNGKEYKCKVSNKALPAPIEKTISKAKGQPREPQVCTLPPSRDELTKNQVSLSCAVKGFYPSDIAVEWESNGQPENNYKTTPPVLDSDGSFFLVSKLTVDKSRWQQGNVFSCSVLHEALHAHYTQKSLSLSPG

SEQ ID NO: 439 - protein, 970 aa, synthetic construct
EIVLTQSPGTLSLSPGETATLSCRASQSFSSDLAWYQQKPGQAPRLLIYGASSRATGIPDRFSGSGSGTDFTLTISRLEPADFAVYYCQQYGSSPPVTFGGGTKVEIKRTVAAPSVFIFPPSDEQLKSGTASVVCLLNNFYPREAKVQWKVDNALQSGNSQESVTEQDSKDSTYSLSSTLTLSKADYEKHKVYACEVTHQGLSSPVTKSFNRGECGGGGSGGGGSGGGGSGGGGSGGGGSGGGGSGGGGSGGGGSEVQLVESGGGLIQPGGSLRLSCAASGVIVSYNYMNWVRQAPGKGLEWVSVIYSGGSTFYADSVRGRFTISRDNSKNTLYLQMNSLRAEDTAVYYCARDLGPAGAFDIWGLGTMVTVSSASTKGPSVFPLAPSSKSTSGGTAALGCLVKDYFPEPVTVSWNSGALTSGVHTFPAVLQSSGLYSLSSVVTVPSSSLGTQTYICNVNHKPSNTKVDKKVEPKSCGGGGSGQTVVTQEPSFSVSPGGTVTLTCGLSSGSVSTAYFPSWYQQTPGQAPRTLIYGTNTRSSGVPDRFSGSILGNKAALTITGAQADDESDYYCVLYMGRGIVVFGGGTKLTVLGGGGSGGSGSGGGGSASGSGQVQLVESGGGVVQPGRSLRLSCAASGFTLSSYGMHWVRQAPGKGLEWVAVISYDGSNKYYVDSVKGRFTISRDNSKNTLYLQMNSLRAEDTAVYYCARGWAYWELLPDYYYGMDVWGQGTTVTVSSASGGSGDKTHTCPPCPAPELLGGPSVFLFPPKPKDTLMISRTPEVTCVVVDVSHEDPEVKFNWYVDGVEVHNAKTKPREEQYNSTYRVVSVLTVLHQDWLNGKEYKCKVSNKALPAPIEKTISKAKGQPREPQVYTLPPCRDELTKNQVSLWCLVKGFYPSDIAVEWESNGQPENNYKTTPPVLDSDGSFFLYSKLTVDKSRWQQGNVFSCSVLHEALHSHYTQKSLSLSPG

SEQ ID NO: 440 - protein, 972 aa, synthetic construct
DTVMTQSPLSLPVTPGEPASISCRSSQSLLNSNGYNYLDWYVQKPGQSPQLLIYLGSNRASGVPDRFSGSGSGTDFTLKISRVEAEDVGVYYCMQPLQTPLFTFGPGTKVEIKRTVAAPSVFIFPPSDEQLKSGTASVVCLLNNFYPREAKVQWKVDNALQSGNSQESVTEQDSKDSTYSLSSTLTLSKADYEKHKVYACEVTHQGLSSPVTKSFNRGECGGGGSGGGGSGGGGSGGGGSGGGGSGGGGSGGGGSGGGGSQVTLRESGPALVKPTQTLTLTCTFSGFSLSTRGVCVSWIRQPPGKALEWLAFIDWDDDKYYNTSLKTRLTISKDTSKNQVVLTMTNVHPVDTATYYCARISSHHGSSWCTTFDYWGQGALVTVSAASTKGPSVFPLAPSSKSTSGGTAALGCLVKDYFPEPVTVSWNSGALTSGVHTFPAVLQSSGLYSLSSVVTVPSSSLGTQTYICNVNHKPSNTKVDKKVEPKSCGGGGSGEIVLTQSPGTLSLSPGETATLSCRASQSFSSDLAWYQQKPGQAPRLLIYGASSRATGIPDRFSGSGSGTDFTLTISRLEPADFAVYYCQQYGSSPPVTFGGGTKVEIKGGGGSGGSGSGGGGSASGSGEVQLVESGGGLIQPGGSLRLSCAASGVIVSYNYMNWVRQAPGKGLEWVSVIYSGGSTFYADSVRGRFTISRDNSKNTLYLQMNSLRAEDTAVYYCARDLGPAGAFDIWGLGTMVTVSSASGGSGDKTHTCPPCPAPELLGGPSVFLFPPKPKDTLMISRTPEVTCVVVDVSHEDPEVKFNWYVDGVEVHNAKTKPREEQYNSTYRVVSVLTVLHQDWLNGKEYKCKVSNKALPAPIEKTISKAKGQPREPQVCTLPPSRDELTKNQVSLSCAVKGFYPSDIAVEWESNGQPENNYKTTPPVLDSDGSFFLVSKLTVDKSRWQQGNVFSCSVLHEALHSHYTQKSLSLSPG

SEQ ID NO: 441 - protein, 964 aa, synthetic construct; identical to SEQ ID NO: 435

SEQ ID NO: 442 - protein, 972 aa, synthetic construct; identical to SEQ ID NO: 440

SEQ ID NO: 443 - protein, 970 aa, synthetic construct; identical to SEQ ID NO: 439

SEQ ID NO: 444 - protein, 966 aa, synthetic construct; identical to SEQ ID NO: 436

SEQ ID NO: 445 - protein, 702 aa, synthetic construct
EIVLTQSPGTLSLSPGETATLSCRASQSFSSDLAWYQQKPGQAPRLLIYGASSRATGIPDRFSGSGSGTDFTLTISRLEPADFAVYYCQQYGSSPPVTFGGGTKVEIKRTVAAPSVFIFPPSDEQLKSGTASVVCLLNNFYPREAKVQWKVDNALQSGNSQESVTEQDSKDSTYSLSSTLTLSKADYEKHKVYACEVTHQGLSSPVTKSFNRGECGGGGSGGGGSGGGGSGGGGSGGGGSGGGGSGGGGSGGGGSEVQLVESGGGLIQPGGSLRLSCAASGVIVSYNYMNWVRQAPGKGLEWVSVIYSGGSTFYADSVRGRFTISRDNSKNTLYLQMNSLRAEDTAVYYCARDLGPAGAFDIWGLGTMVTVSSASTKGPSVFPLAPSSKSTSGGTAALGCLVKDYFPEPVTVSWNSGALTSGVHTFPAVLQSSGLYSLSSVVTVPSSSLGTQTYICNVNHKPSNTKVDKKVEPKSCDKTHTCPPCPAPELLGGPSVFLFPPKPKDTLMISRTPEVTCVVVDVSHEDPEVKFNWYVDGVEVHNAKTKPREEQYNSTYRVVSVLTVLHQDWLNGKEYKCKVSNKALPAPIEKTISKAKGQPREPQVYTLPPCRDELTKNQVSLWCLVKGFYPSDIAVEWESNGQPENNYKTTPPVLDSDGSFFLYSKLTVDKSRWQQGNVFSCSVLHEALHSHYTQKSLSLSPG

SEQ ID NO: 446 - protein, 950 aa, synthetic construct
DTVMTQSPLSLPVTPGEPASISCRSSQSLLNSNGYNYLDWYVQKPGQSPQLLIYLGSNRASGVPDRFSGSGSGTDFTLKISRVEAEDVGVYYCMQPLQTPLFTFGPGTKVEIKRTVAAPSVFIFPPSDEQLKSGTASVVCLLNNFYPREAKVQWKVDNALQSGNSQESVTEQDSKDSTYSLSSTLTLSKADYEKHKVYACEVTHQGLSSPVTKSFNRGECGGGGSGGGGSGGGGSQTVVTQEPSFSVSPGGTVTLTCGLSSGSVSTAYFPSWYQQTPGQAPRTLIYGTNTRSSGVPDRFSGSILGNKAALTITGAQADDESDYYCVLYMGRGIVVFGGGTKLTVLGGGGSGGSGSGGGGSASGSGQVQLVESGGGVVQPGRSLRLSCAASGFTLSSYGMHWVRQAPGKGLEWVAVISYDGSNKYYVDSVKGRFTISRDNSKNTLYLQMNSLRAEDTAVYYCARGWAYWELLPDYYYGMDVWGQGTTVTVSSGGSSGQVTLRESGPALVKPTQTLTLTCTFSGFSLSTRGVCVSWIRQPPGKALEWLAFIDWDDDKYYNTSLKTRLTISKDTSKNQVVLTMTNVHPVDTATYYCARISSHHGSSWCTTFDYWGQGALVTVSAASTKGPSVFPLAPSSKSTSGGTAALGCLVKDYFPEPVTVSWNSGALTSGVHTFPAVLQSSGLYSLSSVVTVPSSSLGTQTYICNVNHKPSNTKVDKKVEPKSCDKTHTCPPCPAPELLGGPSVFLFPPKPKDTLMISRTPEVTCVVVDVSHEDPEVKFNWYVDGVEVHNAKTKPREEQYNSTYRVVSVLTVLHQDWLNGKEYKCKVSNKALPAPIEKTISKAKGQPREPQVCTLPPSRDELTKNQVSLSCAVKGFYPSDIAVEWESNGQPENNYKTTPPVLDSDGSFFLVSKLTVDKSRWQQGNVFSCSVLHEALHSHYTQKSLSLSPG

SEQ ID NO: 447 - protein, 702 aa, synthetic construct; identical to SEQ ID NO: 445

SEQ ID NO: 448 - protein, 950 aa, synthetic construct
QTVVTQEPSFSVSPGGTVTLTCGLSSGSVSTAYFPSWYQQTPGQAPRTLIYGTNTRSSGVPDRFSGSILGNKAALTITGAQADDESDYYCVLYMGRGIVVFGGGTKLTVLRTVAAPSVFIFPPSDEQLKSGTASVVCLLNNFYPREAKVQWKVDNALQSGNSQESVTEQDSKDSTYSLSSTLTLSKADYEKHKVYACEVTHQGLSSPVTKSFNRGECGGGGSGGGGSGGGGSDTVMTQSPLSLPVTPGEPASISCRSSQSLLNSNGYNYLDWYVQKPGQSPQLLIYLGSNRASGVPDRFSGSGSGTDFTLKISRVEAEDVGVYYCMQPLQTPLFTFGPGTKVEIKGGGGSGGSGSGGGGSASGSGQVTLRESGPALVKPTQTLTLTCTFSGFSLSTRGVCVSWIRQPPGKALEWLAFIDWDDDKYYNTSLKTRLTISKDTSKNQVVLTMTNVHPVDTATYYCARISSHHGSSWCTTFDYWGQGALVTVSAGGSSGQVQLVESGGGVVQPGRSLRLSCAASGFTLSSYGMHWVRQAPGKGLEWVAVISYDGSNKYYVDSVKGRFTISRDNSKNTLYLQMNSLRAEDTAVYYCARGWAYWELLPDYYYGMDVWGQGTTVTVSSASTKGPSVFPLAPSSKSTSGGTAALGCLVKDYFPEPVTVSWNSGALTSGVHTFPAVLQSSGLYSLSSVVTVPSSSLGTQTYICNVNHKPSNTKVDKKVEPKSCDKTHTCPPCPAPELLGGPSVFLFPPKPKDTLMISRTPEVTCVVVDVSHEDPEVKFNWYVDGVEVHNAKTKPREEQYNSTYRVVSVLTVLHQDWLNGKEYKCKVSNKALPAPIEKTISKAKGQPREPQVCTLPPSRDELTKNQVSLSCAVKGFYPSDIAVEWESNGQPENNYKTTPPVLDSDGSFFLVSKLTVDKSRWQQGNVFSCSVLHEALHSHYTQKSLSLSPG

SEQ ID NO: 449 - protein, 702 aa, synthetic construct; identical to SEQ ID NO: 445

SEQ ID NO: 450 - protein, 976 aa, synthetic construct
QTVVTQEPSFSVSPGGTVTLTCGLSSGSVSTAYFPSWYQQTPGQAPRTLIYGTNTRSSGVPDRFSGSILGNKAALTITGAQADDESDYYCVLYMGRGIVVFGGGTKLTVLGGGGSGGSGSGGGGSASGSGQVQLVESGGGVVQPGRSLRLSCAASGFTLSSYGMHWVRQAPGKGLEWVAVISYDGSNKYYVDSVKGRFTISRDNSKNTLYLQMNSLRAEDTAVYYCARGWAYWELLPDYYYGMDVWGQGTTVTVSSGGGGSGDTVMTQSPLSLPVTPGEPASISCRSSQSLLNSNGYNYLDWYVQKPGQSPQLLIYLGSNRASGVPDRFSGSGSGTDFTLKISRVEAEDVGVYYCMQPLQTPLFTFGPGTKVEIKRTVAAPSVFIFPPSDEQLKSGTASVVCLLNNFYPREAKVQWKVDNALQSGNSQESVTEQDSKDSTYSLSSTLTLSKADYEKHKVYACEVTHQGLSSPVTKSFNRGECGGGGSGGGGSGGGGSGGGGSGGGGSGGGGSGGGGSGGGGSQVTLRESGPALVKPTQTLTLTCTFSGFSLSTRGVCVSWIRQPPGKALEWLAFIDWDDDKYYNTSLKTRLTISKDTSKNQVVLTMTNVHPVDTATYYCARISSHHGSSWCTTFDYWGQGALVTVSAASTKGPSVFPLAPSSKSTSGGTAALGCLVKDYFPEPVTVSWNSGALTSGVHTFPAVLQSSGLYSLSSVVTVPSSSLGTQTYICNVNHKPSNTKVDKKVEPKSCDKTHTCPPCPAPELLGGPSVFLFPPKPKDTLMISRTPEVTCVVVDVSHEDPEVKFNWYVDGVEVHNAKTKPREEQYNSTYRVVSVLTVLHQDWLNGKEYKCKVSNKALPAPIEKTISKAKGQPREPQVCTLPPSRDELTKNQVSLSCAVKGFYPSDIAVEWESNGQPENNYKTTPPVLDSDGSFFLVSKLTVDKSRWQQGNVFSCSVLHEALHSHYTQKSLSLSPG

SEQ ID NO: 451 - protein, 702 aa, synthetic construct; identical to SEQ ID NO: 445

SEQ ID NO: 452 - protein, 982 aa, synthetic construct
QTVVTQEPSFSVSPGGTVTLTCGLSSGSVSTAYFPSWYQQTPGQAPRTLIYGTNTRSSGVPDRFSGSILGNKAALTITGAQADDESDYYCVLYMGRGIVVFGGGTKLTVLRTVAAPSVFIFPPSDEQLKSGTASVVCLLNNFYPREAKVQWKVDNALQSGNSQESVTEQDSKDSTYSLSSTLTLSKADYEKHKVYACEVTHQGLSSPVTKSFNRGECGGGGSGGGGSGGGGSGGGGSGGGGSGGGGSGGGGSGGGGSQVQLVESGGGVVQPGRSLRLSCAASGFTLSSYGMHWVRQAPGKGLEWVAVISYDGSNKYYVDSVKGRFTISRDNSKNTLYLQMNSLRAEDTAVYYCARGWAYWELLPDYYYGMDVWGQGTTVTVSSASTKGPSVFPLAPSSKSTSGGTAALGCLVKDYFPEPVTVSWNSGALTSGVHTFPAVLQSSGLYSLSSVVTVPSSSLGTQTYICNVNHKPSNTKVDKKVEPKSCGGGGSGDTVMTQSPLSLPVTPGEPASISCRSSQSLLNSNGYNYLDWYVQKPGQSPQLLIYLGSNRASGVPDRFSGSGSGTDFTLKISRVEAEDVGVYYCMQPLQTPLFTFGPGTKVEIKGGGGSGGSGSGGGGSASGSGQVTLRESGPALVKPTQTLTLTCTFSGFSLSTRGVCVSWIRQPPGKALEWLAFIDWDDDKYYNTSLKTRLTISKDTSKNQVVLTMTNVHPVDTATYYCARISSHHGSSWCTTFDYWGQGALVTVSAASGGSGDKTHTCPPCPAPELLGGPSVFLFPPKPKDTLMISRTPEVTCVVVDVSHEDPEVKFNWYVDGVEVHNAKTKPREEQYNSTYRVVSVLTVLHQDWLNGKEYKCKVSNKALPAPIEKTISKAKGQPREPQVCTLPPSRDELTKNQVSLSCAVKGFYPSDIAVEWESNGQPENNYKTTPPVLDSDGSFFLVSKLTVDKSRWQQGNVFSCSVLHEALHSHYTQKSLSLSPG

SEQ ID NO: 453 - protein, 938 aa, synthetic construct
QTVVTQEPSFSVSPGGTVTLTCGLSSGSVSTAYFPSWYQQTPGQAPRTLIYGTNTRSSGVPDRFSGSILGNKAALTITGAQADDESDYYCVLYMGRGIVVFGGGTKLTVLRTVAAPSVFIFPPSDEQLKSGTASVVCLLNNFYPREAKVQWKVDNALQSGNSQESVTEQDSKDSTYSLSSTLTLSKADYEKHKVYACEVTHQGLSSPVTKSFNRGECGGGGSGGGGSGGGGSEIVMTQSPAILSVSPGERATLSCRASQSVAINLAWYQQKPGQAPRLLIYAASSRATGIPGRFSGSGSETNFTLTISSLQSGDFAVYYCQQYITWPPSYTFGQGTKLEIKGGGGSGGSGSGGGGSASGSGEVQLVESGGALIQPGGSLRLSCAASGIIVSANYMSWVRQAPGKGLEWVSVIYSGGSTFYADSVKGRFTISRDNSKNTLYLEMNSLRAEDTAVYYCARDAPILGVSDWGQGTLVTVSSGGSSGQVQLVESGGGVVQPGRSLRLSCAASGFTLSSYGMHWVRQAPGKGLEWVAVISYDGSNKYYVDSVKGRFTISRDNSKNTLYLQMNSLRAEDTAVYYCARGWAYWELLPDYYYGMDVWGQGTTVTVSSASTKGPSVFPLAPSSKSTSGGTAALGCLVKDYFPEPVTVSWNSGALTSGVHTFPAVLQSSGLYSLSSVVTVPSSSLGTQTYICNVNHKPSNTKVDKKVEPKSCDKTHTCPPCPAPELLGGPSVFLFPPKPKDTLMISRTPEVTCVVVDVSHEDPEVKFNWYVDGVEVHNAKTKPREEQYNSTYRVVSVLTVLHQDWLNGKEYKCKVSNKALPAPIEKTISKAKGQPREPQVYTLPPCRDELTKNQVSLWCLVKGFYPSDIAVEWESNGQPENNYKTTPPVLDSDGSFFLYSKLTVDKSRWQQGNVFSCSVLHEALHSHYTQKSLSLSPG

SEQ ID NO: 454 - protein, 946 aa, synthetic construct
DTVMTQSPLSLPVTPGEPASISCRSSQSLLNSNGYNYLDWYVQKPGQSPQLLIYLGSNRASGVPDRFSGSGSGTDFTLKISRVEAEDVGVYYCMQPLQTPLFTFGPGTKVEIKRTVAAPSVFIFPPSDEQLKSGTASVVCLLNNFYPREAKVQWKVDNALQSGNSQESVTEQDSKDSTYSLSSTLTLSKADYEKHKVYACEVTHQGLSSPVTKSFNRGECGGGGSGGGGSGGGGSEIVLTQSPGTLSLSPGERATLSCRASQSVSSSYLAWYQQKPGQAPRLLIYSASSRATGIPDRFSGSGSGTDFTLTISRLEPEDFAVYFCQQYVGLTGWTFGQGTKVEIKGGGGSGGSGSGGGGSASGSGQMQLVQSGPEVKKPGTSVKVSCKASGFTFTSSAVQWVRQARGQRLEWIGWIVVGSGNTNYAQKFQERVTITRDMSTSTAYMELSSLRSEDTAVYYCAAPNCSNVVCYDGFDIWGQGTMVTVSSGGSSGQVTLRESGPALVKPTQTLTLTCTFSGFSLSTRGVCVSWIRQPPGKALEWLAFIDWDDDKYYNTSLKTRLTISKDTSKNQVVLTMTNVHPVDTATYYCARISSHHGSSWCTTFDYWGQGALVTVSAASTKGPSVFPLAPSSKSTSGGTAALGCLVKDYFPEPVTVSWNSGALTSGVHTFPAVLQSSGLYSLSSVVTVPSSSLGTQTYICNVNHKPSNTKVDKKVEPKSCDKTHTCPPCPAPELLGGPSVFLFPPKPKDTLMISRTPEVTCVVVDVSHEDPEVKFNWYVDGVEVHNAKTKPREEQYNSTYRVVSVLTVLHQDWLNGKEYKCKVSNKALPAPIEKTISKAKGQPREPQVCTLPPSRDELTKNQVSLSCAVKGFYPSDIAVEWESNGQPENNYKTTPPVLDSDGSFFLVSKLTVDKSRWQQGNVFSCSVLHEALHSHYTQKSLSLSPG

SEQ ID NO: 455 - protein, 938 aa, synthetic construct; identical to SEQ ID NO: 453

SEQ ID NO: 456 - protein, 946 aa, synthetic construct
EIVLTQSPGTLSLSPGERATLSCRASQSVSSSYLAWYQQKPGQAPRLLIYSASSRATGIPDRFSGSGSGTDFTLTISRLEPEDFAVYFCQQYVGLTGWTFGQGTKVEIKRTVAAPSVFIFPPSDEQLKSGTASVVCLLNNFYPREAKVQWKVDNALQSGNSQESVTEQDSKDSTYSLSSTLTLSKADYEKHKVYACEVTHQGLSSPVTKSFNRGECGGGGSGGGGSGGGGSDTVMTQSPLSLPVTPGEPASISCRSSQSLLNSNGYNYLDWYVQKPGQSPQLLIYLGSNRASGVPDRFSGSGSGTDFTLKISRVEAEDVGVYYCMQPLQTPLFTFGPGTKVEIKGGGGSGGSGSGGGGSASGSGQVTLRESGPALVKPTQTLTLTCTFSGFSLSTRGVCVSWIRQPPGKALEWLAFIDWDDDKYYNTSLKTRLTISKDTSKNQVVLTMTNVHPVDTATYYCARISSHHGSSWCTTFDYWGQGALVTVSAGGSSGQMQLVQSGPEVKKPGTSVKVSCKASGFTFTSSAVQWVRQARGQRLEWIGWIVVGSGNTNYAQKFQERVTITRDMSTSTAYMELSSLRSEDTAVYYCAAPNCSNVVCYDGFDIWGQGTMVTVSSASTKGPSVFPLAPSSKSTSGGTAALGCLVKDYFPEPVTVSWNSGALTSGVHTFPAVLQSSGLYSLSSVVTVPSSSLGTQTYICNVNHKPSNTKVDKKVEPKSCDKTHTCPPCPAPELLGGPSVFLFPPKPKDTLMISRTPEVTCVVVDVSHEDPEVKFNWYVDGVEVHNAKTKPREEQYNSTYRVVSVLTVLHQDWLNGKEYKCKVSNKALPAPIEKTISKAKGQPREPQVCTLPPSRDELTKNQVSLSCAVKGFYPSDIAVEWESNGQPENNYKTTPPVLDSDGSFFLVSKLTVDKSRWQQGNVFSCSVLHEALHSHYTQKSLSLSPG

SEQ ID NO: 457 - protein, 938 aa, synthetic construct
EIVMTQSPAILSVSPGERATLSCRASQSVAINLAWYQQKPGQAPRLLIYAASSRATGIPGRFSGSGSETNFTLTISSLQSGDFAVYYCQQYITWPPSYTFGQGTKLEIKRTVAAPSVFIFPPSDEQLKSGTASVVCLLNNFYPREAKVQWKVDNALQSGNSQESVTEQDSKDSTYSLSSTLTLSKADYEKHKVYACEVTHQGLSSPVTKSFNRGECGGGGSGGGGSGGGGSQTVVTQEPSFSVSPGGTVTLTCGLSSGSVSTAYFPSWYQQTPGQAPRTLIYGTNTRSSGVPDRFSGSILGNKAALTITGAQADDESDYYCVLYMGRGIVVFGGGTKLTVLGGGGSGGSGSGGGGSASGSGQVQLVESGGGVVQPGRSLRLSCAASGFTLSSYGMHWVRQAPGKGLEWVAVISYDGSNKYYVDSVKGRFTISRDNSKNTLYLQMNSLRAEDTAVYYCARGWAYWELLPDYYYGMDVWGQGTTVTVSSGGSSGEVQLVESGGALIQPGGSLRLSCAASGIIVSANYMSWVRQAPGKGLEWVSVIYSGGSTFYADSVKGRFTISRDNSKNTLYLEMNSLRAEDTAVYYCARDAPILGVSDWGQGTLVTVSSASTKGPSVFPLAPSSKSTSGGTAALGCLVKDYFPEPVTVSWNSGALTSGVHTFPAVLQSSGLYSLSSVVTVPSSSLGTQTYICNVNHKPSNTKVDKKVEPKSCDKTHTCPPCPAPELLGGPSVFLFPPKPKDTLMISRTPEVTCVVVDVSHEDPEVKFNWYVDGVEVHNAKTKPREEQYNSTYRVVSVLTVLHQDWLNGKEYKCKVSNKALPAPIEKTISKAKGQPREPQVYTLPPCRDELTKNQVSLWCLVKGFYPSDIAVEWESNGQPENNYKTTPPVLDSDGSFFLYSKLTVDKSRWQQGNVFSCSVLHEALHSHYTQKSLSLSPG

SEQ ID NO: 458 - protein, 946 aa, synthetic construct; identical to SEQ ID NO: 454

SEQ ID NO: 459 - protein, 938 aa, synthetic construct; identical to SEQ ID NO: 457

SEQ ID NO: 460 - protein, 946 aa, synthetic construct; identical to SEQ ID NO: 456

SEQ ID NO: 461 - protein, 964 aa, synthetic construct
EIVMTQSPAILSVSPGERATLSCRASQSVAINLAWYQQKPGQAPRLLIYAASSRATGIPGRFSGSGSETNFTLTISSLQSGDFAVYYCQQYITWPPSYTFGQGTKLEIKGGGGSGGSGSGGGGSASGSGEVQLVESGGALIQPGGSLRLSCAASGIIVSANYMSWVRQAPGKGLEWVSVIYSGGSTFYADSVKGRFTISRDNSKNTLYLEMNSLRAEDTAVYYCARDAPILGVSDWGQGTLVTVSSGGGGSGQTVVTQEPSFSVSPGGTVTLTCGLSSGSVSTAYFPSWYQQTPGQAPRTLIYGTNTRSSGVPDRFSGSILGNKAALTITGAQADDESDYYCVLYMGRGIVVFGGGTKLTVLRTVAAPSVFIFPPSDEQLKSGTASVVCLLNNFYPREAKVQWKVDNALQSGNSQESVTEQDSKDSTYSLSSTLTLSKADYEKHKVYACEVTHQGLSSPVTKSFNRGECGGGGSGGGGSGGGGSGGGGSGGGGSGGGGSGGGGSGGGGSQVQLVESGGGVVQPGRSLRLSCAASGFTLSSYGMHWVRQAPGKGLEWVAVISYDGSNKYYVDSVKGRFTISRDNSKNTLYLQMNSLRAEDTAVYYCARGWAYWELLPDYYYGMDVWGQGTTVTVSSASTKGPSVFPLAPSSKSTSGGTAALGCLVKDYFPEPVTVSWNSGALTSGVHTFPAVLQSSGLYSLSSVVTVPSSSLGTQTYICNVNHKPSNTKVDKKVEPKSCDKTHTCPPCPAPELLGGPSVFLFPPKPKDTLMISRTPEVTCVVVDVSHEDPEVKFNWYVDGVEVHNAKTKPREEQYNSTYRVVSVLTVLHQDWLNGKEYKCKVSNKALPAPIEKTISKAKGQPREPQVYTLPPCRDELTKNQVSLWCLVKGFYPSDIAVEWESNGQPENNYKTTPPVLDSDGSFFLYSKLTVDKSRWQQGNVFSCSVLHEALHSHYTQKSLSLSPG

SEQ ID NO: 462 - protein, 972 aa, synthetic construct
EIVLTQSPGTLSLSPGERATLSCRASQSVSSSYLAWYQQKPGQAPRLLIYSASSRATGIPDRFSGSGSGTDFTLTISRLEPEDFAVYFCQQYVGLTGWTFGQGTKVEIKGGGGSGGSGSGGGGSASGSGQMQLVQSGPEVKKPGTSVKVSCKASGFTFTSSAVQWVRQARGQRLEWIGWIVVGSGNTNYAQKFQERVTITRDMSTSTAYMELSSLRSEDTAVYYCAAPNCSNVVCYDGFDIWGQGTMVTVSSGGGGSGDTVMTQSPLSLPVTPGEPASISCRSSQSLLNSNGYNYLDWYVQKPGQSPQLLIYLGSNRASGVPDRFSGSGSGTDFTLKISRVEAEDVGVYYCMQPLQTPLFTFGPGTKVEIKRTVAAPSVFIFPPSDEQLKSGTASVVCLLNNFYPREAKVQWKVDNALQSGNSQESVTEQDSKDSTYSLSSTLTLSKADYEKHKVYACEVTHQGLSSPVTKSFNRGECGGGGSGGGGSGGGGSGGGGSGGGGSGGGGSGGGGSGGGGSQVTLRESGPALVKPTQTLTLTCTFSGFSLSTRGVCVSWIRQPPGKALEWLAFIDWDDDKYYNTSLKTRLTISKDTSKNQVVLTMTNVHPVDTATYYCARISSHHGSSWCTTFDYWGQGALVTVSAASTKGPSVFPLAPSSKSTSGGTAALGCLVKDYFPEPVTVSWNSGALTSGVHTFPAVLQSSGLYSLSSVVTVPSSSLGTQTYICNVNHKPSNTKVDKKVEPKSCDKTHTCPPCPAPELLGGPSVFLFPPKPKDTLMISRTPEVTCVVVDVSHEDPEVKFNWYVDGVEVHNAKTKPREEQYNSTYRVVSVLTVLHQDWLNGKEYKCKVSNKALPAPIEKTISKAKGQPREPQVCTLPPSRDELTKNQVSLSCAVKGFYPSDIAVEWESNGQPENNYKTTPPVLDSDGSFFLVSKLTVDKSRWQQGNVFSCSVLHEALHSHYTQKSLSLSPG

SEQ ID NO: 463 - protein, 970 aa, synthetic construct
EIVMTQSPAILSVSPGERATLSCRASQSVAINLAWYQQKPGQAPRLLIYAASSRATGIPGRFSGSGSETNFTLTISSLQSGDFAVYYCQQYITWPPSYTFGQGTKLEIKRTVAAPSVFIFPPSDEQLKSGTASVVCLLNNFYPREAKVQWKVDNALQSGNSQESVTEQDSKDSTYSLSSTLTLSKADYEKHKVYACEVTHQGLSSPVTKSFNRGECGGGGSGGGGSGGGGSGGGGSGGGGSGGGGSGGGGSGGGGSEVQLVESGGALIQPGGSLRLSCAASGIIVSANYMSWVRQAPGKGLEWVSVIYSGGSTFYADSVKGRFTISRDNSKNTLYLEMNSLRAEDTAVYYCARDAPILGVSDWGQGTLVTVSSASTKGPSVFPLAPSSKSTSGGTAALGCLVKDYFPEPVTVSWNSGALTSGVHTFPAVLQSSGLYSLSSVVTVPSSSLGTQTYICNVNHKPSNTKVDKKVEPKSCGGGGSGQTVVTQEPSFSVSPGGTVTLTCGLSSGSVSTAYFPSWYQQTPGQAPRTLIYGTNTRSSGVPDRFSGSILGNKAALTITGAQADDESDYYCVLYMGRGIVVFGGGTKLTVLGGGGSGGSGSGGGGSASGSGQVQLVESGGGVVQPGRSLRLSCAASGFTLSSYGMHWVRQAPGKGLEWVAVISYDGSNKYYVDSVKGRFTISRDNSKNTLYLQMNSLRAEDTAVYYCARGWAYWELLPDYYYGMDVWGQGTTVTVSSASGGSGDKTHTCPPCPAPELLGGPSVFLFPPKPKDTLMISRTPEVTCVVVDVSHEDPEVKFNWYVDGVEVHNAKTKPREEQYNSTYRVVSVLTVLHQDWLNGKEYKCKVSNKALPAPIEKTISKAKGQPREPQVYTLPPCRDELTKNQVSLWCLVKGFYPSDIAVEWESNGQPENNYKTTPPVLDSDGSFFLYSKLTVDKSRWQQGNVFSCSVLHEALHSHYTQKSLSLSPG

SEQ ID NO: 464 - protein, 978 aa, synthetic construct
EIVLTQSPGTLSLSPGERATLSCRASQSVSSSYLAWYQQKPGQAPRLLIYSASSRATGIPDRFSGSGSGTDFTLTISRLEPEDFAVYFCQQYVGLTGWTFGQGTKVEIKRTVAAPSVFIFPPSDEQLKSGTASVVCLLNNFYPREAKVQWKVDNALQSGNSQESVTEQDSKDSTYSLSSTLTLSKADYEKHKVYACEVTHQGLSSPVTKSFNRGECGGGGSGGGGSGGGGSGGGGSGGGGSGGGGSGGGGSGGGGSQMQLVQSGPEVKKPGTSVKVSCKASGFTFTSSAVQWVRQARGQRLEWIGWIVVGSGNTNYAQKFQERVTITRDMSTSTAYMELSSLRSEDTAVYYCAAPNCSNVVCYDGFDIWGQGTMVTVSSASTKGPSVFPLAPSSKSTSGGTAALGCLVKDYFPEPVTVSWNSGALTSGVHTFPAVLQSSGLYSLSSVVTVPSSSLGTQTYICNVNHKPSNTKVDKKVEPKSCGGGGSGDTVMTQSPLSLPVTPGEPASISCRSSQSLLNSNGYNYLDWYVQKPGQSPQLLIYLGSNRASGVPDRFSGSGSGTDFTLKISRVEAEDVGVYYCMQPLQTPLFTFGPGTKVEIKGGGGSGGSGSGGGGSASGSGQVTLRESGPALVKPTQTLTLTCTFSGFSLSTRGVCVSWIRQPPGKALEWLAFIDWDDDKYYNTSLKTRLTISKDTSKNQVVLTMTNVHPVDTATYYCARISSHHGSSWCTTFDYWGQGALVTVSAASGGSGDKTHTCPPCPAPELLGGPSVFLFPPKPKDTLMISRTPEVTCVVVDVSHEDPEVKFNWYVDGVEVHNAKTKPREEQYNSTYRVVSVLTVLHQDWLNGKEYKCKVSNKALPAPIEKTISKAKGQPREPQVCTLPPSRDELTKNQVSLSCAVKGFYPSDIAVEWESNGQPENNYKTTPPVLDSDGSFFLVSKLTVDKSRWQQGNVFSCSVLHEALHSHYTQKSLSLSPG

SEQ ID NO: 465 - protein, 964 aa, synthetic construct; identical to SEQ ID NO: 461

SEQ ID NO: 466 - protein, 978 aa, synthetic construct; identical to SEQ ID NO: 464

SEQ ID NO: 467 - protein, 970 aa, synthetic construct; identical to SEQ ID NO: 463

SEQ ID NO: 468 - protein, 972 aa, synthetic construct; identical to SEQ ID NO: 462

SEQ ID NO: 469 - protein, 966 aa, synthetic construct
EIVLTQSPGTLSLSPGETATLSCRASQSFSSDLAWYQQKPGQAPRLLIYGASSRATGIPDRFSGSGSGTDFTLTISRLEPADFAVYYCQQYGSSPPVTFGGGTKVEIKGGGGSGGSGSGGGGSASGSGEVQLVESGGGLIQPGGSLRLSCAASGVIVSYNYMNWVRQAPGKGLEWVSVIYSGGSTFYADSVRGRFTISRDNSKNTLYLQMNSLRAEDTAVYYCARDLGPAGAFDIWGLGTMVTVSSGGGGSGDTVMTQSPLSLPVTPGEPASISCRSSQSLLNSNGYNYLDWYVQKPGQSPQLLIYLGSNRASGVPDRFSGSGSGTDFTLKISRVEAEDVGVYYCMQPLQTPLFTFGPGTKVEIKRTVAAPSVFIFPPSDEQLKSGTASVVCLLNNFYPREAKVQWKVDNALQSGNSQESVTEQDSKDSTYSLSSTLTLSKADYEKHKVYACEVTHQGLSSPVTKSFNRGECGGGGSGGGGSGGGGSGGGGSGGGGSGGGGSGGGGSGGGGSQVTLRESGPALVKPTQTLTLTCTFSGFSLSTRGVCVSWIRQPPGKALEWLAFIDWDDDKYYQTSLKTRLTISKDTSKNQVVLTMTNVHPVDTATYYCARISSHHGSSWCTTFDYWGQGALVTVSAASTKGPSVFPLAPSSKSTSGGTAALGCLVKDYFPEPVTVSWNSGALTSGVHTFPAVLQSSGLYSLSSVVTVPSSSLGTQTYICNVNHKPSNTKVDKKVEPKSCDKTHTCPPCPAPELLGGPSVFLFPPKPKDTLMISRTPEVTCVVVDVSHEDPEVKFNWYVDGVEVHNAKTKPREEQYNSTYRVVSVLTVLHQDWLNGKEYKCKVSNKALPAPIEKTISKAKGQPREPQVYTLPPSRDELTKNQVSLTCLVKGFYPSDIAVEWESNGQPENNYKTTPPVLDSDGSFFLYSKLTVDKSRWQQGNVFSCSVLHEALHAHYTQKSLSLSPG

SEQ ID NO: 470 - protein, 940 aa, synthetic construct
EIVLTQSPGTLSLSPGETATLSCRASQSFSSDLAWYQQKPGQAPRLLIYGASSRATGIPDRFSGSGSGTDFTLTISRLEPADFAVYYCQQYGSSPPVTFGGGTKVEIKRTVAAPSVFIFPPSDEQLKSGTASVVCLLNNFYPREAKVQWKVDNALQSGNSQESVTEQDSKDSTYSLSSTLTLSKADYEKHKVYACEVTHQGLSSPVTKSFNRGECGGGGSGGGGSGGGGSDTVMTQSPLSLPVTPGEPASISCRSSQSLLNSNGYNYLDWYVQKPGQSPQLLIYLGSNRASGVPDRFSGSGSGTDFTLKISRVEAEDVGVYYCMQPLQTPLFTFGPGTKVEIKGGGGSGGSGSGGGGSASGSGQVTLRESGPALVKPTQTLTLTCTFSGFSLSTRGVCVSWIRQPPGKALEWLAFIDWDDDKYYQTSLKTRLTISKDTSKNQVVLTMTNVHPVDTATYYCARISSHHGSSWCTTFDYWGQGALVTVSAGGSSGEVQLVESGGGLIQPGGSLRLSCAASGVIVSYNYMNWVRQAPGKGLEWVSVIYSGGSTFYADSVRGRFTISRDNSKNTLYLQMNSLRAEDTAVYYCARDLGPAGAFDIWGLGTMVTVSSASTKGPSVFPLAPSSKSTSGGTAALGCLVKDYFPEPVTVSWNSGALTSGVHTFPAVLQSSGLYSLSSVVTVPSSSLGTQTYICNVNHKPSNTKVDKKVEPKSCDKTHTCPPCPAPELLGGPSVFLFPPKPKDTLMISRTPEVTCVVVDVSHEDPEVKFNWYVDGVEVHNAKTKPREEQYNSTYRVVSVLTVLHQDWLNGKEYKCKVSNKALPAPIEKTISKAKGQPREPQVYTLPPSRDELTKNQVSLTCLVKGFYPSDIAVEWESNGQPENNYKTTPPVLDSDGSFFLYSKLTVDKSRWQQGNVFSCSVLHEALHAHYTQKSLSLSPG

SEQ ID NO: 471 - protein, 955 aa, synthetic construct
EIVLTQSPGTLSLSPGETATLSCRASQSFSSDLAWYQQKPGQAPRLLIYGASSRATGIPDRFSGSGSGTDFTLTISRLEPADFAVYYCQQYGSSPPVTFGGGTKVEIKGGSSGDTVMTQSPLSLPVTPGEPASISCRSSQSLLNSNGYNYLDWYVQKPGQSPQLLIYLGSNRASGVPDRFSGSGSGTDFTLKISRVEAEDVGVYYCMQPLQTPLFTFGPGTKVEIKGGGGSGGSGSGGGGSASGSGQVTLRESGPALVKPTQTLTLTCTFSGFSLSTRGVCVSWIRQPPGKALEWLAFIDWDDDKYYQTSLKTRLTISKDTSKNQVVLTMTNVHPVDTATYYCARISSHHGSSWCTTFDYWGQGALVTVSAGGSSGEVQLVESGGGLIQPGGSLRLSCAASGVIVSYNYMNWVRQAPGKGLEWVSVIYSGGSTFYADSVRGRFTISRDNSKNTLYLQMNSLRAEDTAVYYCARDLGPAGAFDIWGLGTMVTVSSRTVAAPSVFIFPPSDEQLKSGTASVVCLLNNFYPREAKVQWKVDNALQSGNSQESVTEQDSKDSTYSLSSTLTLSKADYEKHKVYACEVTHQGLSSPVTKSFNRGECGGGGSGGSGSGGGGSGGGGSASGSGASTKGPSVFPLAPSSKSTSGGTAALGCLVKDYFPEPVTVSWNSGALTSGVHTFPAVLQSSGLYSLSSVVTVPSSSLGTQTYICNVNHKPSNTKVDKKVEPKSCDKTHTCPPCPAPELLGGPSVFLFPPKPKDTLMISRTPEVTCVVVDVSHEDPEVKFNWYVDGVEVHNAKTKPREEQYNSTYRVVSVLTVLHQDWLNGKEYKCKVSNKALPAPIEKTISKAKGQPREPQVYTLPPSRDELTKNQVSLTCLVKGFYPSDIAVEWESNGQPENNYKTTPPVLDSDGSFFLYSKLTVDKSRWQQGNVFSCSVLHEALHAHYTQKSLSLSPG

SEQ ID NO: 472 - protein, 964 aa, synthetic construct; identical to SEQ ID NO: 437

SEQ ID NO: 473 - protein, 966 aa, synthetic construct
DTVMTQSPLSLPVTPGEPASISCRSSQSLLNSNGYNYLDWYVQKPGQSPQLLIYLGSNRASGVPDRFSGSGSGTDFTLKISRVEAEDVGVYYCMQPLQTPLFTFGPGTKVEIKGGGGSGGSGSGGGGSASGSGQVTLRESGPALVKPTQTLTLTCTFSGFSLSTRGVCVSWIRQPPGKALEWLAFIDWDDDKYYQTSLKTRLTISKDTSKNQVVLTMTNVHPVDTATYYCARISSHHGSSWCTTFDYWGQGALVTVSAGGGGSGEIVLTQSPGTLSLSPGETATLSCRASQSFSSDLAWYQQKPGQAPRLLIYGASSRATGIPDRFSGSGSGTDFTLTISRLEPADFAVYYCQQYGSSPPVTFGGGTKVEIKRTVAAPSVFIFPPSDEQLKSGTASVVCLLNNFYPREAKVQWKVDNALQSGNSQESVTEQDSKDSTYSLSSTLTLSKADYEKHKVYACEVTHQGLSSPVTKSFNRGECGGGGSGGGGSGGGGSGGGGSGGGGSGGGGSGGGGSGGGGSEVQLVESGGGLIQPGGSLRLSCAASGVIVSYNYMNWVRQAPGKGLEWVSVIYSGGSTFYADSVRGRFTISRDNSKNTLYLQMNSLRAEDTAVYYCARDLGPAGAFDIWGLGTMVTVSSASTKGPSVFPLAPSSKSTSGGTAALGCLVKDYFPEPVTVSWNSGALTSGVHTFPAVLQSSGLYSLSSVVTVPSSSLGTQTYICNVNHKPSNTKVDKKVEPKSCDKTHTCPPCPAPELLGGPSVFLFPPKPKDTLMISRTPEVTCVVVDVSHEDPEVKFNWYVDGVEVHNAKTKPREEQYNSTYRVVSVLTVLHQDWLNGKEYKCKVSNKALPAPIEKTISKAKGQPREPQVCTLPPSRDELTKNQVSLSCAVKGFYPSDIAVEWESNGQPENNYKTTPPVLDSDGSFFLVSKLTVDKSRWQQGNVFSCSVLHEALHAHYTQKSLSLSPG

SEQ ID NO: 474 - protein, 938 aa, synthetic construct; identical to SEQ ID NO: 415

SEQ ID NO: 475 - protein, 940 aa, synthetic construct
EIVLTQSPGTLSLSPGETATLSCRASQSFSSDLAWYQQKPGQAPRLLIYGASSRATGIPDRFSGSGSGTDFTLTISRLEPADFAVYYCQQYGSSPPVTFGGGTKVEIKRTVAAPSVFIFPPSDEQLKSGTASVVCLLNNFYPREAKVQWKVDNALQSGNSQESVTEQDSKDSTYSLSSTLTLSKADYEKHKVYACEVTHQGLSSPVTKSFNRGECGGGGSGGGGSGGGGSDTVMTQSPLSLPVTPGEPASISCRSSQSLLNSNGYNYLDWYVQKPGQSPQLLIYLGSNRASGVPDRFSGSGSGTDFTLKISRVEAEDVGVYYCMQPLQTPLFTFGPGTKVEIKGGGGSGGSGSGGGGSASGSGQVTLRESGPALVKPTQTLTLTCTFSGFSLSTRGVCVSWIRQPPGKALEWLAFIDWDDDKYYQTSLKTRLTISKDTSKNQVVLTMTNVHPVDTATYYCARISSHHGSSWCTTFDYWGQGALVTVSAGGSSGEVQLVESGGGLIQPGGSLRLSCAASGVIVSYNYMNWVRQAPGKGLEWVSVIYSGGSTFYADSVRGRFTISRDNSKNTLYLQMNSLRAEDTAVYYCARDLGPAGAFDIWGLGTMVTVSSASTKGPSVFPLAPSSKSTSGGTAALGCLVKDYFPEPVTVSWNSGALTSGVHTFPAVLQSSGLYSLSSVVTVPSSSLGTQTYICNVNHKPSNTKVDKKVEPKSCDKTHTCPPCPAPELLGGPSVFLFPPKPKDTLMISRTPEVTCVVVDVSHEDPEVKFNWYVDGVEVHNAKTKPREEQYNSTYRVVSVLTVLHQDWLNGKEYKCKVSNKALPAPIEKTISKAKGQPREPQVCTLPPSRDELTKNQVSLSCAVKGFYPSDIAVEWESNGQPENNYKTTPPVLDSDGSFFLVSKLTVDKSRWQQGNVFSCSVLHEALHAHYTQKSLSLSPG

SEQ ID NO: 476 - protein, 953 aa, synthetic construct; identical to SEQ ID NO: 429

SEQ ID NO: 477 - protein, 955 aa, synthetic construct
EIVLTQSPGTLSLSPGETATLSCRASQSFSSDLAWYQQKPGQAPRLLIYGASSRATGIPDRFSGSGSGTDFTLTISRLEPADFAVYYCQQYGSSPPVTFGGGTKVEIKGGSSGDTVMTQSPLSLPVTPGEPASISCRSSQSLLNSNGYNYLDWYVQKPGQSPQLLIYLGSNRASGVPDRFSGSGSGTDFTLKISRVEAEDVGVYYCMQPLQTPLFTFGPGTKVEIKGGGGSGGSGSGGGGSASGSGQVTLRESGPALVKPTQTLTLTCTFSGFSLSTRGVCVSWIRQPPGKALEWLAFIDWDDDKYYQTSLKTRLTISKDTSKNQVVLTMTNVHPVDTATYYCARISSHHGSSWCTTFDYWGQGALVTVSAGGSSGEVQLVESGGGLIQPGGSLRLSCAASGVIVSYNYMNWVRQAPGKGLEWVSVIYSGGSTFYADSVRGRFTISRDNSKNTLYLQMNSLRAEDTAVYYCARDLGPAGAFDIWGLGTMVTVSSRTVAAPSVFIFPPSDEQLKSGTASVVCLLNNFYPREAKVQWKVDNALQSGNSQESVTEQDSKDSTYSLSSTLTLSKADYEKHKVYACEVTHQGLSSPVTKSFNRGECGGGGSGGSGSGGGGSGGGGSASGSGASTKGPSVFPLAPSSKSTSGGTAALGCLVKDYFPEPVTVSWNSGALTSGVHTFPAVLQSSGLYSLSSVVTVPSSSLGTQTYICNVNHKPSNTKVDKKVEPKSCDKTHTCPPCPAPELLGGPSVFLFPPKPKDTLMISRTPEVTCVVVDVSHEDPEVKFNWYVDGVEVHNAKTKPREEQYNSTYRVVSVLTVLHQDWLNGKEYKCKVSNKALPAPIEKTISKAKGQPREPQVCTLPPSRDELTKNQVSLSCAVKGFYPSDIAVEWESNGQPENNYKTTPPVLDSDGSFFLVSKLTVDKSRWQQGNVFSCSVLHEALHAHYTQKSLSLSPG

SEQ ID NO: 478 - protein, 961 aa, synthetic construct
EIVLTQSPGTLSLSPGETATLSCRASQSFSSDLAWYQQKPGQAPRLLIYGASSRATGIPDRFSGSGSGTDFTLTISRLEPADFAVYYCQQYGSSPPVTFGGGTKVEIKGGGGSGGSGSGGGGSASGSGEVQLVESGGGLIQPGGSLRLSCAASGVIVSYNYMNWVRQAPGKGLEWVSVIYSGGSTFYADSVRGRFTISRDNSKNTLYLQMNSLRAEDTAVYYCARDLGPAGAFDIWGLGTMVTVSSGGGGSGDTVMTQSPLSLPVTPGEPASISCRSSQSLLNSNGYNYLDWYVQKPGQSPQLLIYLGSNRASGVPDRFSGSGSGTDFTLKISRVEAEDVGVYYCMQPLQTPLFTFGPGTKVEIKRTVAAPSVFIFPPSDEQLKSGTASVVCLLNNFYPREAKVQWKVDNALQSGNSQESVTEQDSKDSTYSLSSTLTLSKADYEKHKVYACEVTHQGLSSPVTKSFNRGECGGGGSGGGGSGGGGSGGGGSGGGGSGGGGSGGGGSQVTLRESGPALVKPTQTLTLTCTFSGFSLSTRGVCVSWIRQPPGKALEWLAFIDWDDDKYYQTSLKTRLTISKDTSKNQVVLTMTNVHPVDTATYYCARISSHHGSSWCTTFDYWGQGALVTVSAASTKGPSVFPLAPSSKSTSGGTAALGCLVKDYFPEPVTVSWNSGALTSGVHTFPAVLQSSGLYSLSSVVTVPSSSLGTQTYICNVNHKPSNTKVDKKVEPKSCDKTHTCPPCPAPELLGGPSVFLFPPKPKDTLMISRTPEVTCVVVDVSHEDPEVKFNWYVDGVEVHNAKTKPREEQYNSTYRVVSVLTVLHQDWLNGKEYKCKVSNKALPAPIEKTISKAKGQPREPQVYTLPPSRDELTKNQVSLTCLVKGFYPSDIAVEWESNGQPENNYKTTPPVLDSDGSFFLYSKLTVDKSRWQQGNVFSCSVLHEALHAHYTQKSLSLSPG

SEQ ID NO: 479 - protein, 956 aa, synthetic construct
EIVLTQSPGTLSLSPGETATLSCRASQSFSSDLAWYQQKPGQAPRLLIYGASSRATGIPDRFSGSGSGTDFTLTISRLEPADFAVYYCQQYGSSPPVTFGGGTKVEIKGGGGSGGSGSGGGGSASGSGEVQLVESGGGLIQPGGSLRLSCAASGVIVSYNYMNWVRQAPGKGLEWVSVIYSGGSTFYADSVRGRFTISRDNSKNTLYLQMNSLRAEDTAVYYCARDLGPAGAFDIWGLGTMVTVSSGGGGSGDTVMTQSPLSLPVTPGEPASISCRSSQSLLNSNGYNYLDWYVQKPGQSPQLLIYLGSNRASGVPDRFSGSGSGTDFTLKISRVEAEDVGVYYCMQPLQTPLFTFGPGTKVEIKRTVAAPSVFIFPPSDEQLKSGTASVVCLLNNFYPREAKVQWKVDNALQSGNSQESVTEQDSKDSTYSLSSTLTLSKADYEKHKVYACEVTHQGLSSPVTKSFNRGECGGGGSGGGGSGGGGSGGGGSGGGGSGGGGSQVTLRESGPALVKPTQTLTLTCTFSGFSLSTRGVCVSWIRQPPGKALEWLAFIDWDDDKYYQTSLKTRLTISKDTSKNQVVLTMTNVHPVDTATYYCARISSHHGSSWCTTFDYWGQGALVTVSAASTKGPSVFPLAPSSKSTSGGTAALGCLVKDYFPEPVTVSWNSGALTSGVHTFPAVLQSSGLYSLSSVVTVPSSSLGTQTYICNVNHKPSNTKVDKKVEPKSCDKTHTCPPCPAPELLGGPSVFLFPPKPKDTLMISRTPEVTCVVVDVSHEDPEVKFNWYVDGVEVHNAKTKPREEQYNSTYRVVSVLTVLHQDWLNGKEYKCKVSNKALPAPIEKTISKAKGQPREPQVYTLPPSRDELTKNQVSLTCLVKGFYPSDIAVEWESNGQPENNYKTTPPVLDSDGSFFLYSKLTVDKSRWQQGNVFSCSVLHEALHAHYTQKSLSLSPG

SEQ ID NO: 480 - protein, 951 aa, synthetic construct
EIVLTQSPGTLSLSPGETATLSCRASQSFSSDLAWYQQKPGQAPRLLIYGASSRATGIPDRFSGSGSGTDFTLTISRLEPADFAVYYCQQYGSSPPVTFGGGTKVEIKGGGGSGGSGSGGGGSASGSGEVQLVESGGGLIQPGGSLRLSCAASGVIVSYNYMNWVRQAPGKGLEWVSVIYSGGSTFYADSVRGRFTISRDNSKNTLYLQMNSLRAEDTAVYYCARDLGPAGAFDIWGLGTMVTVSSGGGGSGDTVMTQSPLSLPVTPGEPASISCRSSQSLLNSNGYNYLDWYVQKPGQSPQLLIYLGSNRASGVPDRFSGSGSGTDFTLKISRVEAEDVGVYYCMQPLQTPLFTFGPGTKVEIKRTVAAPSVFIFPPSDEQLKSGTASVVCLLNNFYPREAKVQWKVDNALQSGNSQESVTEQDSKDSTYSLSSTLTLSKADYEKHKVYACEVTHQGLSSPVTKSFNRGECGGGGSGGGGSGGGGSGGGGSGGGGSQVTLRESGPALVKPTQTLTLTCTFSGFSLSTRGVCVSWIRQPPGKALEWLAFIDWDDDKYYQTSLKTRLTISKDTSKNQVVLTMTNVHPVDTATYYCARISSHHGSSWCTTFDYWGQGALVTVSAASTKGPSVFPLAPSSKSTSGGTAALGCLVKDYFPEPVTVSWNSGALTSGVHTFPAVLQSSGLYSLSSVVTVPSSSLGTQTYICNVNHKPSNTKVDKKVEPKSCDKTHTCPPCPAPELLGGPSVFLFPPKPKDTLMISRTPEVTCVVVDVSHEDPEVKFNWYVDGVEVHNAKTKPREEQYNSTYRVVSVLTVLHQDWLNGKEYKCKVSNKALPAPIEKTISKAKGQPREPQVYTLPPSRDELTKNQVSLTCLVKGFYPSDIAVEWESNGQPENNYKTTPPVLDSDGSFFLYSKLTVDKSRWQQGNVFSCSVLHEALHAHYTQKSLSLSPG

SEQ ID NO: 481 - protein, 950 aa, synthetic construct
EIVLTQSPGTLSLSPGETATLSCRASQSFSSDLAWYQQKPGQAPRLLIYGASSRATGIPDRFSGSGSGTDFTLTISRLEPADFAVYYCQQYGSSPPVTFGGGTKVEIKGGSSGDTVMTQSPLSLPVTPGEPASISCRSSQSLLNSNGYNYLDWYVQKPGQSPQLLIYLGSNRASGVPDRFSGSGSGTDFTLKISRVEAEDVGVYYCMQPLQTPLFTFGPGTKVEIKGGGGSGGSGSGGGGSASGSGQVTLRESGPALVKPTQTLTLTCTFSGFSLSTRGVCVSWIRQPPGKALEWLAFIDWDDDKYYQTSLKTRLTISKDTSKNQVVLTMTNVHPVDTATYYCARISSHHGSSWCTTFDYWGQGALVTVSAGGSSGEVQLVESGGGLIQPGGSLRLSCAASGVIVSYNYMNWVRQAPGKGLEWVSVIYSGGSTFYADSVRGRFTISRDNSKNTLYLQMNSLRAEDTAVYYCARDLGPAGAFDIWGLGTMVTVSSRTVAAPSVFIFPPSDEQLKSGTASVVCLLNNFYPREAKVQWKVDNALQSGNSQESVTEQDSKDSTYSLSSTLTLSKADYEKHKVYACEVTHQGLSSPVTKSFNRGECGGSGSGGGGSGGGGSASGSGASTKGPSVFPLAPSSKSTSGGTAALGCLVKDYFPEPVTVSWNSGALTSGVHTFPAVLQSSGLYSLSSVVTVPSSSLGTQTYICNVNHKPSNTKVDKKVEPKSCDKTHTCPPCPAPELLGGPSVFLFPPKPKDTLMISRTPEVTCVVVDVSHEDPEVKFNWYVDGVEVHNAKTKPREEQYNSTYRVVSVLTVLHQDWLNGKEYKCKVSNKALPAPIEKTISKAKGQPREPQVYTLPPSRDELTKNQVSLTCLVKGFYPSDIAVEWESNGQPENNYKTTPPVLDSDGSFFLYSKLTVDKSRWQQGNVFSCSVLHEALHAHYTQKSLSLSPG

SEQ ID NO: 482 - protein, 945 aa, synthetic construct
EIVLTQSPGTLSLSPGETATLSCRASQSFSSDLAWYQQKPGQAPRLLIYGASSRATGIPDRFSGSGSGTDFTLTISRLEPADFAVYYCQQYGSSPPVTFGGGTKVEIKGGSSGDTVMTQSPLSLPVTPGEPASISCRSSQSLLNSNGYNYLDWYVQKPGQSPQLLIYLGSNRASGVPDRFSGSGSGTDFTLKISRVEAEDVGVYYCMQPLQTPLFTFGPGTKVEIKGGGGSGGSGSGGGGSASGSGQVTLRESGPALVKPTQTLTLTCTFSGFSLSTRGVCVSWIRQPPGKALEWLAFIDWDDDKYYQTSLKTRLTISKDTSKNQVVLTMTNVHPVDTATYYCARISSHHGSSWCTTFDYWGQGALVTVSAGGSSGEVQLVESGGGLIQPGGSLRLSCAASGVIVSYNYMNWVRQAPGKGLEWVSVIYSGGSTFYADSVRGRFTISRDNSKNTLYLQMNSLRAEDTAVYYCARDLGPAGAFDIWGLGTMVTVSSRTVAAPSVFIFPPSDEQLKSGTASVVCLLNNFYPREAKVQWKVDNALQSGNSQESVTEQDSKDSTYSLSSTLTLSKADYEKHKVYACEVTHQGLSSPVTKSFNRGECGGSGSGGGGSASGSGASTKGPSVFPLAPSSKSTSGGTAALGCLVKDYFPEPVTVSWNSGALTSGVHTFPAVLQSSGLYSLSSVVTVPSSSLGTQTYICNVNHKPSNTKVDKKVEPKSCDKTHTCPPCPAPELLGGPSVFLFPPKPKDTLMISRTPEVTCVVVDVSHEDPEVKFNWYVDGVEVHNAKTKPREEQYNSTYRVVSVLTVLHQDWLNGKEYKCKVSNKALPAPIEKTISKAKGQPREPQVYTLPPSRDELTKNQVSLTCLVKGFYPSDIAVEWESNGQPENNYKTTPPVLDSDGSFFLYSKLTVDKSRWQQGNVFSCSVLHEALHAHYTQKSLSLSPG

SEQ ID NO: 483 - protein, 940 aa, synthetic construct
EIVLTQSPGTLSLSPGETATLSCRASQSFSSDLAWYQQKPGQAPRLLIYGASSRATGIPDRFSGSGSGTDFTLTISRLEPADFAVYYCQQYGSSPPVTFGGGTKVEIKGGSSGDTVMTQSPLSLPVTPGEPASISCRSSQSLLNSNGYNYLDWYVQKPGQSPQLLIYLGSNRASGVPDRFSGSGSGTDFTLKISRVEAEDVGVYYCMQPLQTPLFTFGPGTKVEIKGGGGSGGSGSGGGGSASGSGQVTLRESGPALVKPTQTLTLTCTFSGFSLSTRGVCVSWIRQPPGKALEWLAFIDWDDDKYYQTSLKTRLTISKDTSKNQVVLTMTNVHPVDTATYYCARISSHHGSSWCTTFDYWGQGALVTVSAGGSSGEVQLVESGGGLIQPGGSLRLSCAASGVIVSYNYMNWVRQAPGKGLEWVSVIYSGGSTFYADSVRGRFTISRDNSKNTLYLQMNSLRAEDTAVYYCARDLGPAGAFDIWGLGTMVTVSSRTVAAPSVFIFPPSDEQLKSGTASVVCLLNNFYPREAKVQWKVDNALQSGNSQESVTEQDSKDSTYSLSSTLTLSKADYEKHKVYACEVTHQGLSSPVTKSFNRGECGGSGSGGGGSASTKGPSVFPLAPSSKSTSGGTAALGCLVKDYFPEPVTVSWNSGALTSGVHTFPAVLQSSGLYSLSSVVTVPSSSLGTQTYICNVNHKPSNTKVDKKVEPKSCDKTHTCPPCPAPELLGGPSVFLFPPKPKDTLMISRTPEVTCVVVDVSHEDPEVKFNWYVDGVEVHNAKTKPREEQYNSTYRVVSVLTVLHQDWLNGKEYKCKVSNKALPAPIEKTISKAKGQPREPQVYTLPPSRDELTKNQVSLTCLVKGFYPSDIAVEWESNGQPENNYKTTPPVLDSDGSFFLYSKLTVDKSRWQQGNVFSCSVLHEALHAHYTQKSLSLSPG

SEQ ID NO: 484 - protein, 940 aa, synthetic construct; identical to SEQ ID NO: 383

SEQ ID NO: 485 - protein, 938 aa, synthetic construct; identical to SEQ ID NO: 415

SEQ ID NO: 486 - protein, 940 aa, synthetic construct; identical to SEQ ID NO: 416

SEQ ID NO: 487 - protein, 942 aa, synthetic construct
EIVLTQSPGTLSLSPGETATLSCRASQSFSSDLAWYQQKPGQAPRLLIYGASSRATGIPDRFSGSGSGTDFTLTISRLEPADFAVYYCQQYGSSPPVTFGGGTKVEIKRTVAAPSVFIFPPSDEQLKSGTASVVCLLNNFYPREAKVQWKVDNALQSGNSQESVTEQDSKDSTYSLSSTLTLSKADYEKHKVYACEVTHQGLSSPVTKSFNRGECGGGGSGGGGSGGGGSSYVLTQPPSVSVAPGQTARITCGGNNIGTKSVHWYQQKPGQAPVLVISSDSDRPSGVPDRFSGSNSGNTATLTISRVEAGDEADYYCHVWDSSSDHWVFGGGTKLTVLGGGGSGGSGSGGGGSASGSGEVQLVESGGGRVKPGGSLRLSCAASGFTFSSYRMNWVRQAPGKGLEWVSSISSGSSYIYFADSVKGRFTISRDNAKNSLFLRMNNLRVEDTAVYYCARAPTLRHSSGWYDPPGTENSSFDLWGRGTLVTVSSGGSSGEVQLVESGGGLIQPGGSLRLSCAASGVIVSYNYMNWVRQAPGKGLEWVSVIYSGGSTFYADSVRGRFTISRDNSKNTLYLQMNSLRAEDTAVYYCARDLGPAGAFDIWGLGTMVTVSSASTKGPSVFPLAPSSKSTSGGTAALGCLVKDYFPEPVTVSWNSGALTSGVHTFPAVLQSSGLYSLSSVVTVPSSSLGTQTYICNVNHKPSNTKVDKKVEPKSCDKTHTCPPCPAPELLGGPSVFLFPPKPKDTLMISRTPEVTCVVVDVSHEDPEVKFNWYVDGVEVHNAKTKPREEQYNSTYRVVSVLTVLHQDWLNGKEYKCKVSNKALPAPIEKTISKAKGQPREPQVYTLPPCRDELTKNQVSLWCLVKGFYPSDIAVEWESNGQPENNYKTTPPVLDSDGSFFLYSKLTVDKSRWQQGNVFSCSVLHEALHAHYTQKSLSLSPG

SEQ ID NO: 488 - protein, 940 aa, synthetic construct; identical to SEQ ID NO: 416

SEQ ID NO: 489 - protein, 942 aa, synthetic construct
EIVLTQSPGTLSLSPGETATLSCRASQSFSSDLAWYQQKPGQAPRLLIYGASSRATGIPDRFSGSGSGTDFTLTISRLEPADFAVYYCQQYGSSPPVTFGGGTKVEIKRTVAAPSVFIFPPSDEQLKSGTASVVCLLNNFYPREAKVQWKVDNALQSGNSQESVTEQDSKDSTYSLSSTLTLSKADYEKHKVYACEVTHQGLSSPVTKSFNRGECGGGGSGGGGSGGGGSSYVLTQPPSVSVAPGQTARITCGGNNIGTKSVHWYQQKPGQAPVLVISSDSDRPSGVPDRFSGSNSGNTATLTISRVEAGDEADYYCHVWDSSSDHWVFGGGTKLTVLGGGGSGGSGSGGGGSASGSGEVQLVESGGGRVKPGGSLRLSCAASGFTFSSYRMNWVRQAPGKGLEWVSSISSGSSYIYFADSVKGRFTISRDNAKNSLFLRMNNLRVEDTAVYYCARAPTLRHSSGWYDPPGTEQSSFDLWGRGTLVTVSSGGSSGEVQLVESGGGLIQPGGSLRLSCAASGVIVSYNYMNWVRQAPGKGLEWVSVIYSGGSTFYADSVRGRFTISRDNSKNTLYLQMNSLRAEDTAVYYCARDLGPAGAFDIWGLGTMVTVSSASTKGPSVFPLAPSSKSTSGGTAALGCLVKDYFPEPVTVSWNSGALTSGVHTFPAVLQSSGLYSLSSVVTVPSSSLGTQTYICNVNHKPSNTKVDKKVEPKSCDKTHTCPPCPAPELLGGPSVFLFPPKPKDTLMISRTPEVTCVVVDVSHEDPEVKFNWYVDGVEVHNAKTKPREEQYNSTYRVVSVLTVLHQDWLNGKEYKCKVSNKALPAPIEKTISKAKGQPREPQVYTLPPCRDELTKNQVSLWCLVKGFYPSDIAVEWESNGQPENNYKTTPPVLDSDGSFFLYSKLTVDKSRWQQGNVFSCSVLHEALHAHYTQKSLSLSPG

SEQ ID NO: 490 - protein, 940 aa, synthetic construct; identical to SEQ ID NO: 416

SEQ ID NO: 491 - protein, 942 aa, synthetic construct; identical to SEQ ID NO: 487

SEQ ID NO: 492 - protein, 940 aa, synthetic construct; identical to SEQ ID NO: 475

SEQ ID NO: 493 - protein, 942 aa, synthetic construct; identical to SEQ ID NO: 489

SEQ ID NO: 494 - protein, 940 aa, synthetic construct; identical to SEQ ID NO: 475

SEQ ID NO: 495 - protein, 957 aa, synthetic construct
EIVLTQSPGTLSLSPGETATLSCRASQSFSSDLAWYQQKPGQAPRLLIYGASSRATGIPDRFSGSGSGTDFTLTISRLEPADFAVYYCQQYGSSPPVTFGGGTKVEIKGGSSGSYVLTQPPSVSVAPGQTARITCGGNNIGTKSVHWYQQKPGQAPVLVISSDSDRPSGVPDRFSGSNSGNTATLTISRVEAGDEADYYCHVWDSSSDHWVFGGGTKLTVLGGGGSGGSGSGGGGSASGSGEVQLVESGGGRVKPGGSLRLSCAASGFTFSSYRMNWVRQAPGKGLEWVSSISSGSSYIYFADSVKGRFTISRDNAKNSLFLRMNNLRVEDTAVYYCARAPTLRHSSGWYDPPGTENSSFDLWGRGTLVTVSSGGSSGEVQLVESGGGLIQPGGSLRLSCAASGVIVSYNYMNWVRQAPGKGLEWVSVIYSGGSTFYADSVRGRFTISRDNSKNTLYLQMNSLRAEDTAVYYCARDLGPAGAFDIWGLGTMVTVSSRTVAAPSVFIFPPSDEQLKSGTASVVCLLNNFYPREAKVQWKVDNALQSGNSQESVTEQDSKDSTYSLSSTLTLSKADYEKHKVYACEVTHQGLSSPVTKSFNRGECGGGGSGGSGSGGGGSGGGGSASGSGASTKGPSVFPLAPSSKSTSGGTAALGCLVKDYFPEPVTVSWNSGALTSGVHTFPAVLQSSGLYSLSSVVTVPSSSLGTQTYICNVNHKPSNTKVDKKVEPKSCDKTHTCPPCPAPELLGGPSVFLFPPKPKDTLMISRTPEVTCVVVDVSHEDPEVKFNWYVDGVEVHNAKTKPREEQYNSTYRVVSVLTVLHQDWLNGKEYKCKVSNKALPAPIEKTISKAKGQPREPQVYTLPPCRDELTKNQVSLWCLVKGFYPSDIAVEWESNGQPENNYKTTPPVLDSDGSFFLYSKLTVDKSRWQQGNVFSCSVLHEALHAHYTQKSLSLSPG

SEQ ID NO: 496 - protein, 955 aa, synthetic construct; identical to SEQ ID NO: 477

SEQ ID NO: 497 - protein, 957 aa, synthetic construct
EIVLTQSPGTLSLSPGETATLSCRASQSFSSDLAWYQQKPGQAPRLLIYGASSRATGIPDRFSGSGSGTDFTLTISRLEPADFAVYYCQQYGSSPPVTFGGGTKVEIKGGSSGSYVLTQPPSVSVAPGQTARITCGGNNIGTKSVHWYQQKPGQAPVLVISSDSDRPSGVPDRFSGSNSGNTATLTISRVEAGDEADYYCHVWDSSSDHWVFGGGTKLTVLGGGGSGGSGSGGGGSASGSGEVQLVESGGGRVKPGGSLRLSCAASGFTFSSYRMNWVRQAPGKGLEWVSSISSGSSYIYFADSVKGRFTISRDNAKNSLFLRMNNLRVEDTAVYYCARAPTLRHSSGWYDPPGTEQSSFDLWGRGTLVTVSSGGSSGEVQLVESGGGLIQPGGSLRLSCAASGVIVSYNYMNWVRQAPGKGLEWVSVIYSGGSTFYADSVRGRFTISRDNSKNTLYLQMNSLRAEDTAVYYCARDLGPAGAFDIWGLGTMVTVSSRTVAAPSVFIFPPSDEQLKSGTASVVCLLNNFYPREAKVQWKVDNALQSGNSQESVTEQDSKDSTYSLSSTLTLSKADYEKHKVYACEVTHQGLSSPVTKSFNRGECGGGGSGGSGSGGGGSGGGGSASGSGASTKGPSVFPLAPSSKSTSGGTAALGCLVKDYFPEPVTVSWNSGALTSGVHTFPAVLQSSGLYSLSSVVTVPSSSLGTQTYICNVNHKPSNTKVDKKVEPKSCDKTHTCPPCPAPELLGGPSVFLFPPKPKDTLMISRTPEVTCVVVDVSHEDPEVKFNWYVDGVEVHNAKTKPREEQYNSTYRVVSVLTVLHQDWLNGKEYKCKVSNKALPAPIEKTISKAKGQPREPQVYTLPPCRDELTKNQVSLWCLVKGFYPSDIAVEWESNGQPENNYKTTPPVLDSDGSFFLYSKLTVDKSRWQQGNVFSCSVLHEALHAHYTQKSLSLSPG

SEQ ID NO: 498 - protein, 955 aa, synthetic construct; identical to SEQ ID NO: 477

SEQ ID NO: 499 - protein, 957 aa, synthetic construct; identical to SEQ ID NO: 495

SEQ ID NO: 500 - protein, 955 aa, synthetic construct; identical to SEQ ID NO: 395

SEQ ID NO: 501 - protein, 957 aa, synthetic construct; identical to SEQ ID NO: 497

SEQ ID NO: 502 - protein, 955 aa, synthetic construct; identical to SEQ ID NO: 395

SEQ ID NO: 503 - DNA, 2826 bp, synthetic construct
  source 1..2826: mol_type = other DNA
gacaccgtgatgacacagagccctctgagcctgcctgtgacacctggcgaacctgccagcatcagctgtagaagcagccagagcctgctgaacagcaacggctacaactacctggattggtacgtgcagaagcccggccagtctcctcagctgctgatctacctgggcagcaatagagccagcggcgtgcccgatagattttctggctctggcagcggcaccgacttcaccctgaagatctctagagtggaagccgaggacgtgggcgtgtactactgtatgcagcctctgcagacccctctgttcacatttggccctggcaccaaggtggaaatcaaacgtacggtggccgctcccagcgtgttcatcttcccacctagcgacgagcagctgaagtccggcacagcctctgtcgtgtgcctgctgaacaacttctacccccgcgaggccaaagtgcagtggaaggtggacaacgccctgcagagcggcaacagccaggaaagcgtgaccgagcaggacagcaaggactccacctacagcctgagcagcaccctgacactgagcaaggccgactacgagaagcacaaggtgtacgcctgcgaagtgacccaccagggcctgtctagccccgtgaccaagagcttcaaccggggcgagtgtggcggcggaggatctggcggaggtggaagcggaggcggtggaagcgagatcgtgctgacacagagccctggcacactgtcactgtctccaggcgaaacagccacactgagctgtagagccagccagagcttcagcagcgacctggcttggtatcagcagaagcctggacaggcccctcggctgttgatctatggcgcctcttctagagccacaggcatccccgatagattcagcggctctggcagcggcaccgatttcaccctgacaatcagcagactggaacccgccgacttcgccgtgtactactgtcagcagtacggcagcagccctcctgtgacatttggcggcggaacaaaggtggaaatcaaaggaggtggtggctctggcggatctgggagtggtggcggaggctctgcttctggatctggagaagtgcagctggtggaatcaggcggcggactgattcaacctggcggctctctgagactgtcttgtgctgcttctggcgtgatcgtgtcctacaactacatgaactgggtccgacaggctcccggcaaaggccttgaatgggtgtccgtgatctacagcggcggcagcaccttttacgccgattctgtgcggggcagattcaccatcagccgggacaacagcaagaacaccctgtacctgcagatgaacagcctgagagccgaggacaccgctgtgtactattgcgccagagatctgggacctgccggcgcttttgatatctggggcctgggcacaatggtcaccgtgtctagcggaggcagctccgggcaagtgacactgagagagtctggccccgctctggtcaagcctacacagaccctgacactgacctgcaccttcagcggcttcagcctgtctactagaggcgtgtgcgtgtcctggatcagacagcctcctggaaaggccctggaatggctggccttcatcgactgggacgacgacaagtactacaacaccagcctgaaaacccggctgaccatcagcaaggacaccagcaagaaccaggtggtgctgaccatgaccaacgtgcaccctgtggataccgccacctactactgcgccagaatcagctctcaccacggctccagctggtgtaccaccttcgattattggggccagggcgctctcgtgacagtttctgctgcttcgaccaagggcccatccgtgtttcctctggctcccagcagcaagtctacaagcggaggaacagccgctctgggctgcctggtcaaggattactttcccgagcctgtgaccgtgtcctggaattctggcgctctgacaagcggcgtgcacacctttccagctgtgctgcaaagcagcggcctgtactctctgagcagcgtggtcacagtgcctagctctagcctgggcacccagacctacatctgcaatgtgaaccacaagcctagcaacaccaaggtggacaagaaggtggaacccaagagctgcgataagacccacacatgtcctccatgtcctgctccagaactgctcggcggcccttctgtgttcctgtttcctccaaagcctaaggacaccctgatgatcagcagaacccctgaagtgacctgcgtggtggtggatgtgtctcacgaggaccccgaagtgaagttcaattggtacgtggacggcgtggaagtgcacaacgccaagaccaagcctagagaggaacagtacaacagcacctacagagtggtgtccgtgctgaccgtgctgcaccaggattggctgaacggcaaagagtacaagtgcaaggtgtccaacaaggccctgcctgctcctatcgagaaaaccatcagcaaggccaagggccagcctagggaaccccaggtttacacccttcctccaagccgggatgagctgaccaagaaccaggtgtccctgacatgtctcgtgaagggcttctaccccagcgacattgccgtggaatgggagagcaatggccagcctgagaacaactacaagacaacccctcctgtgctggacagcgacggctcattcttcctgtacagcaagctgacagtcgacaagtccagatggcagcagggcaacgtgttcagttgcagcgtgctgcacgaggccctgcacagtcactacacccagaagtccctgagcctgtctcctggatagtga

SEQ ID NO: 504 - DNA, 2826 bp, synthetic construct
  source 1..2826: mol_type = other DNA
gagatcgtgctgacacagagccctggcacactgtcactgtctccaggcgaaacagccacactgagctgtagagccagccagagcttcagcagcgacctggcttggtatcagcagaagcctggacaggcccctcggctgttgatctatggcgcctcttctagagccacaggcatccccgatagattcagcggctctggcagcggcaccgatttcaccctgacaatcagcagactggaacccgccgacttcgccgtgtactactgtcagcagtacggcagcagccctcctgtgacatttggcggcggaacaaaggtggaaatcaaacgtacggtggccgctcccagcgtgttcatcttcccacctagcgacgagcagctgaagtccggcacagcctctgtcgtgtgcctgctgaacaacttctacccccgcgaggccaaagtgcagtggaaggtggacaacgccctgcagagcggcaacagccaggaaagcgtgaccgagcaggacagcaaggactccacctacagcctgagcagcaccctgacactgagcaaggccgactacgagaagcacaaggtgtacgcctgcgaagtgacccaccagggcctgtctagccccgtgaccaagagcttcaaccggggcgagtgtggcggcggaggatctggcggaggtggaagcggaggcggtggaagcgacaccgtgatgacacagagccctctgagcctgcctgtgacacctggcgaacctgccagcatcagctgtagaagcagccagagcctgctgaacagcaacggctacaactacctggattggtacgtgcagaagcccggccagtctcctcagctgctgatctacctgggcagcaatagagccagcggcgtgcccgatagattttctggctctggcagcggcaccgacttcaccctgaagatctctagagtggaagccgaggacgtgggcgtgtactactgtatgcagcctctgcagacccctctgttcacatttggccctggcaccaaggtggaaatcaaaggaggtggtggctctggcggatctgggagtggtggcggaggctctgcttctggatctggacaagtgacactgagagagtctggccccgctctggtcaagcctacacagaccctgacactgacctgcaccttcagcggcttcagcctgtctactagaggcgtgtgcgtgtcctggatcagacagcctcctggaaaggccctggaatggctggccttcatcgactgggacgacgacaagtactacaacaccagcctgaaaacccggctgaccatcagcaaggacaccagcaagaaccaggtggtgctgaccatgaccaacgtgcaccctgtggataccgccacctactactgcgccagaatcagctctcaccacggctccagctggtgtaccaccttcgattattggggccagggcgctctcgtgacagtttctgctggaggcagctccggggaagtgcagctggtggaatcaggcggcggactgattcaacctggcggctctctgagactgtcttgtgctgcttctggcgtgatcgtgtcctacaactacatgaactgggtccgacaggctcccggcaaaggccttgaatgggtgtccgtgatctacagcggcggcagcaccttttacgccgattctgtgcggggcagattcaccatcagccgggacaacagcaagaacaccctgtacctgcagatgaacagcctgagagccgaggacaccgctgtgtactattgcgccagagatctgggacctgccggcgcttttgatatctggggcctgggcacaatggtcaccgtgtctagcgcttcgaccaagggcccatccgtgtttcctctggctcccagcagcaagtctacaagcggaggaacagccgctctgggctgcctggtcaaggattactttcccgagcctgtgaccgtgtcctggaattctggcgctctgacaagcggcgtgcacacctttccagctgtgctgcaaagcagcggcctgtactctctgagcagcgtggtcacagtgcctagctctagcctgggcacccagacctacatctgcaatgtgaaccacaagcctagcaacaccaaggtggacaagaaggtggaacccaagagctgcgataagacccacacatgtcctccatgtcctgctccagaactgctcggcggcccttctgtgttcctgtttcctccaaagcctaaggacaccctgatgatcagcagaacccctgaagtgacctgcgtggtggtggatgtgtctcacgaggaccccgaagtgaagttcaattggtacgtggacggcgtggaagtgcacaacgccaagaccaagcctagagaggaacagtacaacagcacctacagagtggtgtccgtgctgaccgtgctgcaccaggattggctgaacggcaaagagtacaagtgcaaggtgtccaacaaggccctgcctgctcctatcgagaaaaccatcagcaaggccaagggccagcctagggaaccccaggtttacacccttcctccaagccgggatgagctgaccaagaaccaggtgtccctgacatgtctcgtgaagggcttctaccccagcgacattgccgtggaatgggagagcaatggccagcctgagaacaactacaagacaacccctcctgtgctggacagcgacggctcattcttcctgtacagcaagctgacagtcgacaagtccagatggcagcagggcaacgtgttcagttgcagcgtgctgcacgaggccctgcacagtcactacacccagaagtccctgagcctgtctcctggatagtga

SEQ ID NO: 505 - DNA, 2826 bp, synthetic construct
  source 1..2826: mol_type = other DNA
gagatcgtgctgacacagagccctggcacactgtcactgtctccaggcgaaacagccacactgagctgtagagccagccagagcttcagcagcgacctggcttggtatcagcagaagcctggacaggcccctcggctgttgatctatggcgcctcttctagagccacaggcatccccgatagattcagcggctctggcagcggcaccgatttcaccctgacaatcagcagactggaacccgccgacttcgccgtgtactactgtcagcagtacggcagcagccctcctgtgacatttggcggcggaacaaaggtggaaatcaaacgtacggtggccgctcccagcgtgttcatcttcccacctagcgacgagcagctgaagtccggcacagcctctgtcgtgtgcctgctgaacaacttctacccccgcgaggccaaagtgcagtggaaggtggacaacgccctgcagagcggcaacagccaggaaagcgtgaccgagcaggacagcaaggactccacctacagcctgagcagcaccctgacactgagcaaggccgactacgagaagcacaaggtgtacgcctgcgaagtgacccaccagggcctgtctagccccgtgaccaagagcttcaaccggggcgagtgtggcggcggaggatctggcggaggtggaagcggaggcggtggaagcgacaccgtgatgacacagagccctctgagcctgcctgtgacacctggcgaacctgccagcatcagctgtagaagcagccagagcctgctgaacagcaacggctacaactacctggattggtacgtgcagaagcccggccagtctcctcagctgctgatctacctgggcagcaatagagccagcggcgtgcccgatagattttctggctctggcagcggcaccgacttcaccctgaagatctctagagtggaagccgaggacgtgggcgtgtactactgtatgcagcctctgcagacccctctgttcacatttggccctggcaccaaggtggaaatcaaaggaggtggtggctctggcggatctgggagtggtggcggaggctctgcttctggatctggacaagtgacactgagagagtctggccccgctctggtcaagcctacacagaccctgacactgacctgcaccttcagcggcttcagcctgtctactagaggcgtgtgcgtgtcctggatcagacagcctcctggaaaggccctggaatggctggccttcatcgactgggacgacgacaagtactacaacaccagcctgaaaacccggctgaccatcagcaaggacaccagcaagaaccaggtggtgctgaccatgaccaacgtgcaccctgtggataccgccacctactactgcgccagaatcagctctcaccacggctccagctggtgtaccaccttcgattattggggccagggcgctctcgtgacagtttctgctggaggcagctccggggaagtgcagctggtggaatcaggcggcggactgattcaacctggcggctctctgagactgtcttgtgctgcttctggcgtgatcgtgtcctacaactacatgaactgggtccgacaggctcccggcaaaggccttgaatgggtgtccgtgatctacagcggcggcagcaccttttacgccgattctgtgcggggcagattcaccatcagccgggacaacagcaagaacaccctgtacctgcagatgaacagcctgagagccgaggacaccgctgtgtactattgcgccagagatctgggacctgccggcgcttttgatatctggggcctgggcacaatggtcaccgtgtctagcgcttcgaccaagggcccatccgtgtttcctctggctcccagcagcaagtctacaagcggaggaacagccgctctgggctgcctggtcaaggattactttcccgagcctgtgaccgtgtcctggaattctggcgctctgacaagcggcgtgcacacctttccagctgtgctgcaaagcagcggcctgtactctctgagcagcgtggtcacagtgcctagctctagcctgggcacccagacctacatctgcaatgtgaaccacaagcctagcaacaccaaggtggacaagaaggtggaacccaagagctgcgataagacccacacatgtcctccatgtcctgctccagaactgctcggcggcccttctgtgttcctgtttcctccaaagcctaaggacaccctgatgatcagcagaacccctgaagtgacctgcgtggtggtggatgtgtctcacgaggaccccgaagtgaagttcaattggtacgtggacggcgtggaagtgcacaacgccaagaccaagcctagagaggaacagtacaacagcacctacagagtggtgtccgtgctgaccgtgctgcaccaggattggctgaacggcaaagagtacaagtgcaaggtgtccaacaaggccctgcctgctcctatcgagaaaaccatcagcaaggccaagggccagcctagggaaccccaggtttacacccttcctccaagccgggatgagctgaccaagaaccaggtgtccctgacatgtctcgtgaagggcttctaccccagcgacattgccgtggaatgggagagcaatggccagcctgagaacaactacaagacaacccctcctgtgctggacagcgacggctcattcttcctgtacagcaagctgacagtcgacaagtccagatggcagcagggcaacgtgttcagttgcagcgtgctgcacgaggccctgcacgctcactacacccagaagtccctgagcctgtctcctggatagtga

SEQ ID NO: 506 - DNA, 2826 bp, synthetic construct
  source 1..2826: mol_type = other DNA
gacaccgtgatgacacagagccctctgagcctgcctgtgacacctggcgaacctgccagcatcagctgtagaagcagccagagcctgctgaacagcaacggctacaactacctggattggtacgtgcagaagcccggccagtctcctcagctgctgatctacctgggcagcaatagagccagcggcgtgcccgatagattttctggctctggcagcggcaccgacttcaccctgaagatctctagagtggaagccgaggacgtgggcgtgtactactgtatgcagcctctgcagacccctctgttcacatttggccctggcaccaaggtggaaatcaaacgtacggtggccgctcccagcgtgttcatcttcccacctagcgacgagcagctgaagtccggcacagcctctgtcgtgtgcctgctgaacaacttctacccccgcgaggccaaagtgcagtggaaggtggacaacgccctgcagagcggcaacagccaggaaagcgtgaccgagcaggacagcaaggactccacctacagcctgagcagcaccctgacactgagcaaggccgactacgagaagcacaaggtgtacgcctgcgaagtgacccaccagggcctgtctagccccgtgaccaagagcttcaaccggggcgagtgtggcggcggaggatctggcggaggtggaagcggaggcggtggaagcgagatcgtgctgacacagagccctggcacactgtcactgtctccaggcgaaacagccacactgagctgtagagccagccagagcttcagcagcgacctggcttggtatcagcagaagcctggacaggcccctcggctgttgatctatggcgcctcttctagagccacaggcatccccgatagattcagcggctctggcagcggcaccgatttcaccctgacaatcagcagactggaacccgccgacttcgccgtgtactactgtcagcagtacggcagcagccctcctgtgacatttggcggcggaacaaaggtggaaatcaaaggaggtggtggctctggcggatctgggagtggtggcggaggctctgcttctggatctggagaagtgcagctggtggaatcaggcggcggactgattcaacctggcggctctctgagactgtcttgtgctgcttctggcgtgatcgtgtcctacaactacatgaactgggtccgacaggctcccggcaaaggccttgaatgggtgtccgtgatctacagcggcggcagcaccttttacgccgattctgtgcggggcagattcaccatcagccgggacaacagcaagaacaccctgtacctgcagatgaacagcctgagagccgaggacaccgctgtgtactattgcgccagagatctgggacctgccggcgcttttgatatctggggcctgggcacaatggtcaccgtgtctagcggaggcagctccgggcaagtgacactgagagagtctggccccgctctggtcaagcctacacagaccctgacactgacctgcaccttcagcggcttcagcctgtctactagaggcgtgtgcgtgtcctggatcagacagcctcctggaaaggccctggaatggctggccttcatcgactgggacgacgacaagtactacaacaccagcctgaaaacccggctgaccatcagcaaggacaccagcaagaaccaggtggtgctgaccatgaccaacgtgcaccctgtggataccgccacctactactgcgccagaatcagctctcaccacggctccagctggtgtaccaccttcgattattggggccagggcgctctcgtgacagtttctgctgcttcgaccaagggcccatccgtgtttcctctggctcccagcagcaagtctacaagcggaggaacagccgctctgggctgcctggtcaaggattactttcccgagcctgtgaccgtgtcctggaattctggcgctctgacaagcggcgtgcacacctttccagctgtgctgcaaagcagcggcctgtactctctgagcagcgtggtcacagtgcctagctctagcctgggcacccagacctacatctgcaatgtgaaccacaagcctagcaacaccaaggtggacaagaaggtggaacccaagagctgcgataagacccacacatgtcctccatgtcctgctccagaactgctcggcggcccttctgtgttcctgtttcctccaaagcctaaggacaccctgatgatcagcagaacccctgaagtgacctgcgtggtggtggatgtgtctcacgaggaccccgaagtgaagttcaattggtacgtggacggcgtggaagtgcacaacgccaagaccaagcctagagaggaacagtacaacagcacctacagagtggtgtccgtgctgaccgtgctgcaccaggattggctgaacggcaaagagtacaagtgcaaggtgtccaacaaggccctgcctgctcctatcgagaaaaccatcagcaaggccaagggccagcctagggaaccccaggtttacacccttcctccatgccgggatgagctgaccaagaaccaggtgtccctgtggtgtctcgtgaagggcttctaccccagcgacattgccgtggaatgggagagcaatggccagcctgagaacaactacaagacaacccctcctgtgctggacagcgacggctcattcttcctgtacagcaagctgacagtcgacaagtccagatggcagcagggcaacgtgttcagttgcagcgtgctgcacgaggccctgcacagtcactacacccagaagtccctgagcctgtctcctggatagtga

SEQ ID NO: 507 - DNA, 2826 bp, synthetic construct
  source 1..2826: mol_type = other DNA
gagatcgtgctgacacagagccctggcacactgtcactgtctccaggcgaaacagccacactgagctgtagagccagccagagcttcagcagcgacctggcttggtatcagcagaagcctggacaggcccctcggctgttgatctatggcgcctcttctagagccacaggcatccccgatagattcagcggctctggcagcggcaccgatttcaccctgacaatcagcagactggaacccgccgacttcgccgtgtactactgtcagcagtacggcagcagccctcctgtgacatttggcggcggaacaaaggtggaaatcaaacgtacggtggccgctcccagcgtgttcatcttcccacctagcgacgagcagctgaagtccggcacagcctctgtcgtgtgcctgctgaacaacttctacccccgcgaggccaaagtgcagtggaaggtggacaacgccctgcagagcggcaacagccaggaaagcgtgaccgagcaggacagcaaggactccacctacagcctgagcagcaccctgacactgagcaaggccgactacgagaagcacaaggtgtacgcctgcgaagtgacccaccagggcctgtctagccccgtgaccaagagcttcaaccggggcgagtgtggcggcggaggatctggcggaggtggaagcggaggcggtggaagcgacaccgtgatgacacagagccctctgagcctgcctgtgacacctggcgaacctgccagcatcagctgtagaagcagccagagcctgctgaacagcaacggctacaactacctggattggtacgtgcagaagcccggccagtctcctcagctgctgatctacctgggcagcaatagagccagcggcgtgcccgatagattttctggctctggcagcggcaccgacttcaccctgaagatctctagagtggaagccgaggacgtgggcgtgtactactgtatgcagcctctgcagacccctctgttcacatttggccctggcaccaaggtggaaatcaaaggaggtggtggctctggcggatctgggagtggtggcggaggctctgcttctggatctggacaagtgacactgagagagtctggccccgctctggtcaagcctacacagaccctgacactgacctgcaccttcagcggcttcagcctgtctactagaggcgtgtgcgtgtcctggatcagacagcctcctggaaaggccctggaatggctggccttcatcgactgggacgacgacaagtactacaacaccagcctgaaaacccggctgaccatcagcaaggacaccagcaagaaccaggtggtgctgaccatgaccaacgtgcaccctgtggataccgccacctactactgcgccagaatcagctctcaccacggctccagctggtgtaccaccttcgattattggggccagggcgctctcgtgacagtttctgctggaggcagctccggggaagtgcagctggtggaatcaggcggcggactgattcaacctggcggctctctgagactgtcttgtgctgcttctggcgtgatcgtgtcctacaactacatgaactgggtccgacaggctcccggcaaaggccttgaatgggtgtccgtgatctacagcggcggcagcaccttttacgccgattctgtgcggggcagattcaccatcagccgggacaacagcaagaacaccctgtacctgcagatgaacagcctgagagccgaggacaccgctgtgtactattgcgccagagatctgggacctgccggcgcttttgatatctggggcctgggcacaatggtcaccgtgtctagcgcttcgaccaagggcccatccgtgtttcctctggctcccagcagcaagtctacaagcggaggaacagccgctctgggctgcctggtcaaggattactttcccgagcctgtgaccgtgtcctggaattctggcgctctgacaagcggcgtgcacacctttccagctgtgctgcaaagcagcggcctgtactctctgagcagcgtggtcacagtgcctagctctagcctgggcacccagacctacatctgcaatgtgaaccacaagcctagcaacaccaaggtggacaagaaggtggaacccaagagctgcgataagacccacacatgtcctccatgtcctgctccagaactgctcggcggcccttctgtgttcctgtttcctccaaagcctaaggacaccctgatgatcagcagaacccctgaagtgacctgcgtggtggtggatgtgtctcacgaggaccccgaagtgaagttcaattggtacgtggacggcgtggaagtgcacaacgccaagaccaagcctagagaggaacagtacaacagcacctacagagtggtgtccgtgctgaccgtgctgcaccaggattggctgaacggcaaagagtacaagtgcaaggtgtccaacaaggccctgcctgctcctatcgagaaaaccatcagcaaggccaagggccagcctagggaaccccaggtttgtacccttcctccaagccgggatgagctgaccaagaaccaggtgtccctgagctgtgccgtgaagggcttctaccccagcgacattgccgtggaatgggagagcaatggccagcctgagaacaactacaagacaacccctcctgtgctggacagcgacggctcattcttcctggtgagcaagctgacagtcgacaagtccagatggcagcagggcaacgtgttcagttgcagcgtgctgcacgaggccctgcacagtcactacacccagaagtccctgagcctgtctcctggatagtga

SEQ ID NO: 508 - DNA, 2826 bp, synthetic construct
  source 1..2826: mol_type = other DNA
gagatcgtgctgacacagagccctggcacactgtcactgtctccaggcgaaacagccacactgagctgtagagccagccagagcttcagcagcgacctggcttggtatcagcagaagcctggacaggcccctcggctgttgatctatggcgcctcttctagagccacaggcatccccgatagattcagcggctctggcagcggcaccgatttcaccctgacaatcagcagactggaacccgccgacttcgccgtgtactactgtcagcagtacggcagcagccctcctgtgacatttggcggcggaacaaaggtggaaatcaaacgtacggtggccgctcccagcgtgttcatcttcccacctagcgacgagcagctgaagtccggcacagcctctgtcgtgtgcctgctgaacaacttctacccccgcgaggccaaagtgcagtggaaggtggacaacgccctgcagagcggcaacagccaggaaagcgtgaccgagcaggacagcaaggactccacctacagcctgagcagcaccctgacactgagcaaggccgactacgagaagcacaaggtgtacgcctgcgaagtgacccaccagggcctgtctagccccgtgaccaagagcttcaaccggggcgagtgtggcggcggaggatctggcggaggtggaagcggaggcggtggaagcgacaccgtgatgacacagagccctctgagcctgcctgtgacacctggcgaacctgccagcatcagctgtagaagcagccagagcctgctgaacagcaacggctacaactacctggattggtacgtgcagaagcccggccagtctcctcagctgctgatctacctgggcagcaatagagccagcggcgtgcccgatagattttctggctctggcagcggcaccgacttcaccctgaagatctctagagtggaagccgaggacgtgggcgtgtactactgtatgcagcctctgcagacccctctgttcacatttggccctggcaccaaggtggaaatcaaaggaggtggtggctctggcggatctgggagtggtggcggaggctctgcttctggatctggacaagtgacactgagagagtctggccccgctctggtcaagcctacacagaccctgacactgacctgcaccttcagcggcttcagcctgtctactagaggcgtgtgcgtgtcctggatcagacagcctcctggaaaggccctggaatggctggccttcatcgactgggacgacgacaagtactacaacaccagcctgaaaacccggctgaccatcagcaaggacaccagcaagaaccaggtggtgctgaccatgaccaacgtgcaccctgtggataccgccacctactactgcgccagaatcagctctcaccacggctccagctggtgtaccaccttcgattattggggccagggcgctctcgtgacagtttctgctggaggcagctccggggaagtgcagctggtggaatcaggcggcggactgattcaacctggcggctctctgagactgtcttgtgctgcttctggcgtgatcgtgtcctacaactacatgaactgggtccgacaggctcccggcaaaggccttgaatgggtgtccgtgatctacagcggcggcagcaccttttacgccgattctgtgcggggcagattcaccatcagccgggacaacagcaagaacaccctgtacctgcagatgaacagcctgagagccgaggacaccgctgtgtactattgcgccagagatctgggacctgccggcgcttttgatatctggggcctgggcacaatggtcaccgtgtctagcgcttcgaccaagggcccatccgtgtttcctctggctcccagcagcaagtctacaagcggaggaacagccgctctgggctgcctggtcaaggattactttcccgagcctgtgaccgtgtcctggaattctggcgctctgacaagcggcgtgcacacctttccagctgtgctgcaaagcagcggcctgtactctctgagcagcgtggtcacagtgcctagctctagcctgggcacccagacctacatctgcaatgtgaaccacaagcctagcaacaccaaggtggacaagaaggtggaacccaagagctgcgataagacccacacatgtcctccatgtcctgctccagaactgctcggcggcccttctgtgttcctgtttcctccaaagcctaaggacaccctgatgatcagcagaacccctgaagtgacctgcgtggtggtggatgtgtctcacgaggaccccgaagtgaagttcaattggtacgtggacggcgtggaagtgcacaacgccaagaccaagcctagagaggaacagtacaacagcacctacagagtggtgtccgtgctgaccgtgctgcaccaggattggctgaacggcaaagagtacaagtgcaaggtgtccaacaaggccctgcctgctcctatcgagaaaaccatcagcaaggccaagggccagcctagggaaccccaggtttacacccttcctccatgccgggatgagctgaccaagaaccaggtgtccctgtggtgtctcgtgaagggcttctaccccagcgacattgccgtggaatgggagagcaatggccagcctgagaacaactacaagacaacccctcctgtgctggacagcgacggctcattcttcctgtacagcaagctgacagtcgacaagtccagatggcagcagggcaacgtgttcagttgcagcgtgctgcacgaggccctgcacagtcactacacccagaagtccctgagcctgtctcctggatagtga

SEQ ID NO: 509 - DNA, 2826 bp, synthetic construct
  source 1..2826: mol_type = other DNA
gacaccgtgatgacacagagccctctgagcctgcctgtgacacctggcgaacctgccagcatcagctgtagaagcagccagagcctgctgaacagcaacggctacaactacctggattggtacgtgcagaagcccggccagtctcctcagctgctgatctacctgggcagcaatagagccagcggcgtgcccgatagattttctggctctggcagcggcaccgacttcaccctgaagatctctagagtggaagccgaggacgtgggcgtgtactactgtatgcagcctctgcagacccctctgttcacatttggccctggcaccaaggtggaaatcaaacgtacggtggccgctcccagcgtgttcatcttcccacctagcgacgagcagctgaagtccggcacagcctctgtcgtgtgcctgctgaacaacttctacccccgcgaggccaaagtgcagtggaaggtggacaacgccctgcagagcggcaacagccaggaaagcgtgaccgagcaggacagcaaggactccacctacagcctgagcagcaccctgacactgagcaaggccgactacgagaagcacaaggtgtacgcctgcgaagtgacccaccagggcctgtctagccccgtgaccaagagcttcaaccggggcgagtgtggcggcggaggatctggcggaggtggaagcggaggcggtggaagcgagatcgtgctgacacagagccctggcacactgtcactgtctccaggcgaaacagccacactgagctgtagagccagccagagcttcagcagcgacctggcttggtatcagcagaagcctggacaggcccctcggctgttgatctatggcgcctcttctagagccacaggcatccccgatagattcagcggctctggcagcggcaccgatttcaccctgacaatcagcagactggaacccgccgacttcgccgtgtactactgtcagcagtacggcagcagccctcctgtgacatttggcggcggaacaaaggtggaaatcaaaggaggtggtggctctggcggatctgggagtggtggcggaggctctgcttctggatctggagaagtgcagctggtggaatcaggcggcggactgattcaacctggcggctctctgagactgtcttgtgctgcttctggcgtgatcgtgtcctacaactacatgaactgggtccgacaggctcccggcaaaggccttgaatgggtgtccgtgatctacagcggcggcagcaccttttacgccgattctgtgcggggcagattcaccatcagccgggacaacagcaagaacaccctgtacctgcagatgaacagcctgagagccgaggacaccgctgtgtactattgcgccagagatctgggacctgccggcgcttttgatatctggggcctgggcacaatggtcaccgtgtctagcggaggcagctccgggcaagtgacactgagagagtctggccccgctctggtcaagcctacacagaccctgacactgacctgcaccttcagcggcttcagcctgtctactagaggcgtgtgcgtgtcctggatcagacagcctcctggaaaggccctggaatggctggccttcatcgactgggacgacgacaagtactacaacaccagcctgaaaacccggctgaccatcagcaaggacaccagcaagaaccaggtggtgctgaccatgaccaacgtgcaccctgtggataccgccacctactactgcgccagaatcagctctcaccacggctccagctggtgtaccaccttcgattattggggccagggcgctctcgtgacagtttctgctgcttcgaccaagggcccatccgtgtttcctctggctcccagcagcaagtctacaagcggaggaacagccgctctgggctgcctggtcaaggattactttcccgagcctgtgaccgtgtcctggaattctggcgctctgacaagcggcgtgcacacctttccagctgtgctgcaaagcagcggcctgtactctctgagcagcgtggtcacagtgcctagctctagcctgggcacccagacctacatctgcaatgtgaaccacaagcctagcaacaccaaggtggacaagaaggtggaacccaagagctgcgataagacccacacatgtcctccatgtcctgctccagaactgctcggcggcccttctgtgttcctgtttcctccaaagcctaaggacaccctgatgatcagcagaacccctgaagtgacctgcgtggtggtggatgtgtctcacgaggaccccgaagtgaagttcaattggtacgtggacggcgtggaagtgcacaacgccaagaccaagcctagagaggaacagtacaacagcacctacagagtggtgtccgtgctgaccgtgctgcaccaggattggctgaacggcaaagagtacaagtgcaaggtgtccaacaaggccctgcctgctcctatcgagaaaaccatcagcaaggccaagggccagcctagggaaccccaggtttgtacccttcctccaagccgggatgagctgaccaagaaccaggtgtccctgagctgtgccgtgaagggcttctaccccagcgacattgccgtggaatgggagagcaatggccagcctgagaacaactacaagacaacccctcctgtgctggacagcgacggctcattcttcctggtgagcaagctgacagtcgacaagtccagatggcagcagggcaacgtgttcagttgcagcgtgctgcacgaggccctgcacagtcactacacccagaagtccctgagcctgtctcctggatagtga

SEQ ID NO: 510 - DNA, 2871 bp, synthetic construct
  source 1..2871: mol_type = other DNA
gacaccgtgatgacacagagccctctgagcctgcctgtgacacctggcgaacctgccagcatcagctgtagaagcagccagagcctgctgaacagcaacggctacaactacctggattggtacgtgcagaagcccggccagtctcctcagctgctgatctacctgggcagcaatagagccagcggcgtgcccgatagattttctggctctggcagcggcaccgacttcaccctgaagatctctagagtggaagccgaggacgtgggcgtgtactactgtatgcagcctctgcagacccctctgttcacatttggccctggcaccaaggtggaaatcaaaggcggatcctctggagagatcgtgctgacacagagccctggcacactgtcactgtctccaggcgaaacagccacactgagctgtagagccagccagagcttcagcagcgacctggcttggtatcagcagaagcctggacaggcccctcggctgttgatctatggcgcctcttctagagccacaggcatccccgatagattcagcggctctggcagcggcaccgatttcaccctgacaatcagcagactggaacccgccgacttcgccgtgtactactgtcagcagtacggcagcagccctcctgtgacatttggcggcggaacaaaggtggaaatcaaaggaggtggtggctctggcggatctgggagtggtggcggaggctctgcttctggatctggagaagtgcagctggtggaatcaggcggcggactgattcaacctggcggctctctgagactgtcttgtgctgcttctggcgtgatcgtgtcctacaactacatgaactgggtccgacaggctcccggcaaaggccttgaatgggtgtccgtgatctacagcggcggcagcaccttttacgccgattctgtgcggggcagattcaccatcagccgggacaacagcaagaacaccctgtacctgcagatgaacagcctgagagccgaggacaccgctgtgtactattgcgccagagatctgggacctgccggcgcttttgatatctggggcctgggcacaatggtcaccgtgtctagcggaggcagctccgggcaagtgacactgagagagtctggccccgctctggtcaagcctacacagaccctgacactgacctgcaccttcagcggcttcagcctgtctactagaggcgtgtgcgtgtcctggatcagacagcctcctggaaaggccctggaatggctggccttcatcgactgggacgacgacaagtactacaacaccagcctgaaaacccggctgaccatcagcaaggacaccagcaagaaccaggtggtgctgaccatgaccaacgtgcaccctgtggataccgccacctactactgcgccagaatcagctctcaccacggctccagctggtgtaccaccttcgattattggggccagggcgctctcgtgacagtttctgctcgtacggtggccgctcccagcgtgttcatcttcccacctagcgacgagcagctgaagtccggcacagcctctgtcgtgtgcctgctgaacaacttctacccccgcgaggccaaagtgcagtggaaggtggacaacgccctgcagagcggcaacagccaggaaagcgtgaccgagcaggacagcaaggactccacctacagcctgagcagcaccctgacactgagcaaggccgactacgagaagcacaaggtgtacgcctgcgaagtgacccaccagggcctgtctagccccgtgaccaagagcttcaaccggggcgagtgtggaggcggaggatctggcggatctggaagtggcggaggtggtagtggcggcggtggatctgcttctggctctggcgcttcgaccaagggcccatccgtgtttcctctggctcccagcagcaagtctacaagcggaggaacagccgctctgggctgcctggtcaaggattactttcccgagcctgtgaccgtgtcctggaattctggcgctctgacaagcggcgtgcacacctttccagctgtgctgcaaagcagcggcctgtactctctgagcagcgtggtcacagtgcctagctctagcctgggcacccagacctacatctgcaatgtgaaccacaagcctagcaacaccaaggtggacaagaaggtggaacccaagagctgcgataagacccacacatgtcctccatgtcctgctccagaactgctcggcggcccttctgtgttcctgtttcctccaaagcctaaggacaccctgatgatcagcagaacccctgaagtgacctgcgtggtggtggatgtgtctcacgaggaccccgaagtgaagttcaattggtacgtggacggcgtggaagtgcacaacgccaagaccaagcctagagaggaacagtacaacagcacctacagagtggtgtccgtgctgaccgtgctgcaccaggattggctgaacggcaaagagtacaagtgcaaggtgtccaacaaggccctgcctgctcctatcgagaaaaccatcagcaaggccaagggccagcctagggaaccccaggtttacacccttcctccaagccgggatgagctgaccaagaaccaggtgtccctgacatgtctcgtgaagggcttctaccccagcgacattgccgtggaatgggagagcaatggccagcctgagaacaactacaagacaacccctcctgtgctggacagcgacggctcattcttcctgtacagcaagctgacagtcgacaagtccagatggcagcagggcaacgtgttcagttgcagcgtgctgcacgaggccctgcacagtcactacacccagaagtccctgagcctgtctcctggatagtga

SEQ ID NO: 511 - DNA, 2871 bp, synthetic construct
  source 1..2871: mol_type = other DNA
gacaccgtgatgacacagagccctctgagcctgcctgtgacacctggcgaacctgccagcatcagctgtagaagcagccagagcctgctgaacagcaacggctacaactacctggattggtacgtgcagaagcccggccagtctcctcagctgctgatctacctgggcagcaatagagccagcggcgtgcccgatagattttctggctctggcagcggcaccgacttcaccctgaagatctctagagtggaagccgaggacgtgggcgtgtactactgtatgcagcctctgcagacccctctgttcacatttggccctggcaccaaggtggaaatcaaaggcggatcctctggagagatcgtgctgacacagagccctggcacactgtcactgtctccaggcgaaacagccacactgagctgtagagccagccagagcttcagcagcgacctggcttggtatcagcagaagcctggacaggcccctcggctgttgatctatggcgcctcttctagagccacaggcatccccgatagattcagcggctctggcagcggcaccgatttcaccctgacaatcagcagactggaacccgccgacttcgccgtgtactactgtcagcagtacggcagcagccctcctgtgacatttggcggcggaacaaaggtggaaatcaaaggaggtggtggctctggcggatctgggagtggtggcggaggctctgcttctggatctggagaagtgcagctggtggaatcaggcggcggactgattcaacctggcggctctctgagactgtcttgtgctgcttctggcgtgatcgtgtcctacaactacatgaactgggtccgacaggctcccggcaaaggccttgaatgggtgtccgtgatctacagcggcggcagcaccttttacgccgattctgtgcggggcagattcaccatcagccgggacaacagcaagaacaccctgtacctgcagatgaacagcctgagagccgaggacaccgctgtgtactattgcgccagagatctgggacctgccggcgcttttgatatctggggcctgggcacaatggtcaccgtgtctagcggaggcagctccgggcaagtgacactgagagagtctggccccgctctggtcaagcctacacagaccctgacactgacctgcaccttcagcggcttcagcctgtctactagaggcgtgtgcgtgtcctggatcagacagcctcctggaaaggccctggaatggctggccttcatcgactgggacgacgacaagtactacaacaccagcctgaaaacccggctgaccatcagcaaggacaccagcaagaaccaggtggtgctgaccatgaccaacgtgcaccctgtggataccgccacctactactgcgccagaatcagctctcaccacggctccagctggtgtaccaccttcgattattggggccagggcgctctcgtgacagtttctgctcgtacggtggccgctcccagcgtgttcatcttcccacctagcgacgagcagctgaagtccggcacagcctctgtcgtgtgcctgctgaacaacttctacccccgcgaggccaaagtgcagtggaaggtggacaacgccctgcagagcggcaacagccaggaaagcgtgaccgagcaggacagcaaggactccacctacagcctgagcagcaccctgacactgagcaaggccgactacgagaagcacaaggtgtacgcctgcgaagtgacccaccagggcctgtctagccccgtgaccaagagcttcaaccggggcgagtgtggaggcggaggatctggcggatctggaagtggcggaggtggtagtggcggcggtggatctgcttctggctctggcgcttcgaccaagggcccatccgtgtttcctctggctcccagcagcaagtctacaagcggaggaacagccgctctgggctgcctggtcaaggattactttcccgagcctgtgaccgtgtcctggaattctggcgctctgacaagcggcgtgcacacctttccagctgtgctgcaaagcagcggcctgtactctctgagcagcgtggtcacagtgcctagctctagcctgggcacccagacctacatctgcaatgtgaaccacaagcctagcaacaccaaggtggacaagaaggtggaacccaagagctgcgataagacccacacatgtcctccatgtcctgctccagaactgctcggcggcccttctgtgttcctgtttcctccaaagcctaaggacaccctgatgatcagcagaacccctgaagtgacctgcgtggtggtggatgtgtctcacgaggaccccgaagtgaagttcaattggtacgtggacggcgtggaagtgcacaacgccaagaccaagcctagagaggaacagtacaacagcacctacagagtggtgtccgtgctgaccgtgctgcaccaggattggctgaacggcaaagagtacaagtgcaaggtgtccaacaaggccctgcctgctcctatcgagaaaaccatcagcaaggccaagggccagcctagggaaccccaggtttacacccttcctccaagccgggatgagctgaccaagaaccaggtgtccctgacatgtctcgtgaagggcttctaccccagcgacattgccgtggaatgggagagcaatggccagcctgagaacaactacaagacaacccctcctgtgctggacagcgacggctcattcttcctgtacagcaagctgacagtcgacaagtccagatggcagcagggcaacgtgttcagttgcagcgtgctgcacgaggccctgcacgctcactacacccagaagtccctgagcctgtctcctggatagtga

SEQ ID NO: 512 - DNA, 2871 bp, synthetic construct
  source 1..2871: mol_type = other DNA
gagatcgtgctgacacagagccctggcacactgtcactgtctccaggcgaaacagccacactgagctgtagagccagccagagcttcagcagcgacctggcttggtatcagcagaagcctggacaggcccctcggctgttgatctatggcgcctcttctagagccacaggcatccccgatagattcagcggctctggcagcggcaccgatttcaccctgacaatcagcagactggaacccgccgacttcgccgtgtactactgtcagcagtacggcagcagccctcctgtgacatttggcggcggaacaaaggtggaaatcaaaggcggatcctctggagacaccgtgatgacacagagccctctgagcctgcctgtgacacctggcgaacctgccagcatcagctgtagaagcagccagagcctgctgaacagcaacggctacaactacctggattggtacgtgcagaagcccggccagtctcctcagctgctgatctacctgggcagcaatagagccagcggcgtgcccgatagattttctggctctggcagcggcaccgacttcaccctgaagatctctagagtggaagccgaggacgtgggcgtgtactactgtatgcagcctctgcagacccctctgttcacatttggccctggcaccaaggtggaaatcaaaggaggtggtggctctggcggatctgggagtggtggcggaggctctgcttctggatctggacaagtgacactgagagagtctggccccgctctggtcaagcctacacagaccctgacactgacctgcaccttcagcggcttcagcctgtctactagaggcgtgtgcgtgtcctggatcagacagcctcctggaaaggccctggaatggctggccttcatcgactgggacgacgacaagtactacaacaccagcctgaaaacccggctgaccatcagcaaggacaccagcaagaaccaggtggtgctgaccatgaccaacgtgcaccctgtggataccgccacctactactgcgccagaatcagctctcaccacggctccagctggtgtaccaccttcgattattggggccagggcgctctcgtgacagtttctgctggaggcagctccggggaagtgcagctggtggaatcaggcggcggactgattcaacctggcggctctctgagactgtcttgtgctgcttctggcgtgatcgtgtcctacaactacatgaactgggtccgacaggctcccggcaaaggccttgaatgggtgtccgtgatctacagcggcggcagcaccttttacgccgattctgtgcggggcagattcaccatcagccgggacaacagcaagaacaccctgtacctgcagatgaacagcctgagagccgaggacaccgctgtgtactattgcgccagagatctgggacctgccggcgcttttgatatctggggcctgggcacaatggtcaccgtgtctagccgtacggtggccgctcccagcgtgttcatcttcccacctagcgacgagcagctgaagtccggcacagcctctgtcgtgtgcctgctgaacaacttctacccccgcgaggccaaagtgcagtggaaggtggacaacgccctgcagagcggcaacagccaggaaagcgtgaccgagcaggacagcaaggactccacctacagcctgagcagcaccctgacactgagcaaggccgactacgagaagcacaaggtgtacgcctgcgaagtgacccaccagggcctgtctagccccgtgaccaagagcttcaaccggggcgagtgtggaggcggaggatctggcggatctggaagtggcggaggtggtagtggcggcggtggatctgcttctggctctggcgcttcgaccaagggcccatccgtgtttcctctggctcccagcagcaagtctacaagcggaggaacagccgctctgggctgcctggtcaaggattactttcccgagcctgtgaccgtgtcctggaattctggcgctctgacaagcggcgtgcacacctttccagctgtgctgcaaagcagcggcctgtactctctgagcagcgtggtcacagtgcctagctctagcctgggcacccagacctacatctgcaatgtgaaccacaagcctagcaacaccaaggtggacaagaaggtggaacccaagagctgcgataagacccacacatgtcctccatgtcctgctccagaactgctcggcggcccttctgtgttcctgtttcctccaaagcctaaggacaccctgatgatcagcagaacccctgaagtgacctgcgtggtggtggatgtgtctcacgaggaccccgaagtgaagttcaattggtacgtggacggcgtggaagtgcacaacgccaagaccaagcctagagaggaacagtacaacagcacctacagagtggtgtccgtgctgaccgtgctgcaccaggattggctgaacggcaaagagtacaagtgcaaggtgtccaacaaggccctgcctgctcctatcgagaaaaccatcagcaaggccaagggccagcctagggaaccccaggtttacacccttcctccaagccgggatgagctgaccaagaaccaggtgtccctgacatgtctcgtgaagggcttctaccccagcgacattgccgtggaatgggagagcaatggccagcctgagaacaactacaagacaacccctcctgtgctggacagcgacggctcattcttcctgtacagcaagctgacagtcgacaagtccagatggcagcagggcaacgtgttcagttgcagcgtgctgcacgaggccctgcacagtcactacacccagaagtccctgagcctgtctcctggatagtga

SEQ ID NO: 513 - DNA, 2871 bp, synthetic construct
  source 1..2871: mol_type = other DNA
gagatcgtgctgacacagagccctggcacactgtcactgtctccaggcgaaacagccacactgagctgtagagccagccagagcttcagcagcgacctggcttggtatcagcagaagcctggacaggcccctcggctgttgatctatggcgcctcttctagagccacaggcatccccgatagattcagcggctctggcagcggcaccgatttcaccctgacaatcagcagactggaacccgccgacttcgccgtgtactactgtcagcagtacggcagcagccctcctgtgacatttggcggcggaacaaaggtggaaatcaaaggcggatcctctggagacaccgtgatgacacagagccctctgagcctgcctgtgacacctggcgaacctgccagcatcagctgtagaagcagccagagcctgctgaacagcaacggctacaactacctggattggtacgtgcagaagcccggccagtctcctcagctgctgatctacctgggcagcaatagagccagcggcgtgcccgatagattttctggctctggcagcggcaccgacttcaccctgaagatctctagagtggaagccgaggacgtgggcgtgtactactgtatgcagcctctgcagacccctctgttcacatttggccctggcaccaaggtggaaatcaaaggaggtggtggctctggcggatctgggagtggtggcggaggctctgcttctggatctggacaagtgacactgagagagtctggccccgctctggtcaagcctacacagaccctgacactgacctgcaccttcagcggcttcagcctgtctactagaggcgtgtgcgtgtcctggatcagacagcctcctggaaaggccctggaatggctggccttcatcgactgggacgacgacaagtactacaacaccagcctgaaaacccggctgaccatcagcaaggacaccagcaagaaccaggtggtgctgaccatgaccaacgtgcaccctgtggataccgccacctactactgcgccagaatcagctctcaccacggctccagctggtgtaccaccttcgattattggggccagggcgctctcgtgacagtttctgctggaggcagctccggggaagtgcagctggtggaatcaggcggcggactgattcaacctggcggctctctgagactgtcttgtgctgcttctggcgtgatcgtgtcctacaactacatgaactgggtccgacaggctcccggcaaaggccttgaatgggtgtccgtgatctacagcggcggcagcaccttttacgccgattctgtgcggggcagattcaccatcagccgggacaacagcaagaacaccctgtacctgcagatgaacagcctgagagccgaggacaccgctgtgtactattgcgccagagatctgggacctgccggcgcttttgatatctggggcctgggcacaatggtcaccgtgtctagccgtacggtggccgctcccagcgtgttcatcttcccacctagcgacgagcagctgaagtccggcacagcctctgtcgtgtgcctgctgaacaacttctacccccgcgaggccaaagtgcagtggaaggtggacaacgccctgcagagcggcaacagccaggaaagcgtgaccgagcaggacagcaaggactccacctacagcctgagcagcaccctgacactgagcaaggccgactacgagaagcacaaggtgtacgcctgcgaagtgacccaccagggcctgtctagccccgtgaccaagagcttcaaccggggcgagtgtggaggcggaggatctggcggatctggaagtggcggaggtggtagtggcggcggtggatctgcttctggctctggcgcttcgaccaagggcccatccgtgtttcctctggctcccagcagcaagtctacaagcggaggaacagccgctctgggctgcctggtcaaggattactttcccgagcctgtgaccgtgtcctggaattctggcgctctgacaagcggcgtgcacacctttccagctgtgctgcaaagcagcggcctgtactctctgagcagcgtggtcacagtgcctagctctagcctgggcacccagacctacatctgcaatgtgaaccacaagcctagcaacaccaaggtggacaagaaggtggaacccaagagctgcgataagacccacacatgtcctccatgtcctgctccagaactgctcggcggcccttctgtgttcctgtttcctccaaagcctaaggacaccctgatgatcagcagaacccctgaagtgacctgcgtggtggtggatgtgtctcacgaggaccccgaagtgaagttcaattggtacgtggacggcgtggaagtgcacaacgccaagaccaagcctagagaggaacagtacaacagcacctacagagtggtgtccgtgctgaccgtgctgcaccaggattggctgaacggcaaagagtacaagtgcaaggtgtccaacaaggccctgcctgctcctatcgagaaaaccatcagcaaggccaagggccagcctagggaaccccaggtttacacccttcctccaagccgggatgagctgaccaagaaccaggtgtccctgacatgtctcgtgaagggcttctaccccagcgacattgccgtggaatgggagagcaatggccagcctgagaacaactacaagacaacccctcctgtgctggacagcgacggctcattcttcctgtacagcaagctgacagtcgacaagtccagatggcagcagggcaacgtgttcagttgcagcgtgctgcacgaggccctgcacgctcactacacccagaagtccctgagcctgtctcctggatagtga

SEQ ID NO: 514 - DNA, 2871 bp, synthetic construct
  source 1..2871: mol_type = other DNA
gacaccgtgatgacacagagccctctgagcctgcctgtgacacctggcgaacctgccagcatcagctgtagaagcagccagagcctgctgaacagcaacggctacaactacctggattggtacgtgcagaagcccggccagtctcctcagctgctgatctacctgggcagcaatagagccagcggcgtgcccgatagattttctggctctggcagcggcaccgacttcaccctgaagatctctagagtggaagccgaggacgtgggcgtgtactactgtatgcagcctctgcagacccctctgttcacatttggccctggcaccaaggtggaaatcaaaggcggatcctctggagagatcgtgctgacacagagccctggcacactgtcactgtctccaggcgaaacagccacactgagctgtagagccagccagagcttcagcagcgacctggcttggtatcagcagaagcctggacaggcccctcggctgttgatctatggcgcctcttctagagccacaggcatccccgatagattcagcggctctggcagcggcaccgatttcaccctgacaatcagcagactggaacccgccgacttcgccgtgtactactgtcagcagtacggcagcagccctcctgtgacatttggcggcggaacaaaggtggaaatcaaaggaggtggtggctctggcggatctgggagtggtggcggaggctctgcttctggatctggagaagtgcagctggtggaatcaggcggcggactgattcaacctggcggctctctgagactgtcttgtgctgcttctggcgtgatcgtgtcctacaactacatgaactgggtccgacaggctcccggcaaaggccttgaatgggtgtccgtgatctacagcggcggcagcaccttttacgccgattctgtgcggggcagattcaccatcagccgggacaacagcaagaacaccctgtacctgcagatgaacagcctgagagccgaggacaccgctgtgtactattgcgccagagatctgggacctgccggcgcttttgatatctggggcctgggcacaatggtcaccgtgtctagcggaggcagctccgggcaagtgacactgagagagtctggccccgctctggtcaagcctacacagaccctgacactgacctgcaccttcagcggcttcagcctgtctactagaggcgtgtgcgtgtcctggatcagacagcctcctggaaaggccctggaatggctggccttcatcgactgggacgacgacaagtactacaacaccagcctgaaaacccggctgaccatcagcaaggacaccagcaagaaccaggtggtgctgaccatgaccaacgtgcaccctgtggataccgccacctactactgcgccagaatcagctctcaccacggctccagctggtgtaccaccttcgattattggggccagggcgctctcgtgacagtttctgctcgtacggtggccgctcccagcgtgttcatcttcccacctagcgacgagcagctgaagtccggcacagcctctgtcgtgtgcctgctgaacaacttctacccccgcgaggccaaagtgcagtggaaggtggacaacgccctgcagagcggcaacagccaggaaagcgtgaccgagcaggacagcaaggactccacctacagcctgagcagcaccctgacactgagcaaggccgactacgagaagcacaaggtgtacgcctgcgaagtgacccaccagggcctgtctagccccgtgaccaagagcttcaaccggggcgagtgtggaggcggaggatctggcggatctggaagtggcggaggtggtagtggcggcggtggatctgcttctggctctggcgcttcgaccaagggcccatccgtgtttcctctggctcccagcagcaagtctacaagcggaggaacagccgctctgggctgcctggtcaaggattactttcccgagcctgtgaccgtgtcctggaattctggcgctctgacaagcggcgtgcacacctttccagctgtgctgcaaagcagcggcctgtactctctgagcagcgtggtcacagtgcctagctctagcctgggcacccagacctacatctgcaatgtgaaccacaagcctagcaacaccaaggtggacaagaaggtggaacccaagagctgcgataagacccacacatgtcctccatgtcctgctccagaactgctcggcggcccttctgtgttcctgtttcctccaaagcctaaggacaccctgatgatcagcagaacccctgaagtgacctgcgtggtggtggatgtgtctcacgaggaccccgaagtgaagttcaattggtacgtggacggcgtggaagtgcacaacgccaagaccaagcctagagaggaacagtacaacagcacctacagagtggtgtccgtgctgaccgtgctgcaccaggattggctgaacggcaaagagtacaagtgcaaggtgtccaacaaggccctgcctgctcctatcgagaaaaccatcagcaaggccaagggccagcctagggaaccccaggtttacacccttcctccatgccgggatgagctgaccaagaaccaggtgtccctgtggtgtctcgtgaagggcttctaccccagcgacattgccgtggaatgggagagcaatggccagcctgagaacaactacaagacaacccctcctgtgctggacagcgacggctcattcttcctgtacagcaagctgacagtcgacaagtccagatggcagcagggcaacgtgttcagttgcagcgtgctgcacgaggccctgcacagtcactacacccagaagtccctgagcctgtctcctggatagtga

SEQ ID NO: 515 - DNA, 2871 bp, synthetic construct
  source 1..2871: mol_type = other DNA
gagatcgtgctgacacagagccctggcacactgtcactgtctccaggcgaaacagccacactgagctgtagagccagccagagcttcagcagcgacctggcttggtatcagcagaagcctggacaggcccctcggctgttgatctatggcgcctcttctagagccacaggcatccccgatagattcagcggctctggcagcggcaccgatttcaccctgacaatcagcagactggaacccgccgacttcgccgtgtactactgtcagcagtacggcagcagccctcctgtgacatttggcggcggaacaaaggtggaaatcaaaggcggatcctctggagacaccgtgatgacacagagccctctgagcctgcctgtgacacctggcgaacctgccagcatcagctgtagaagcagccagagcctgctgaacagcaacggctacaactacctggattggtacgtgcagaagcccggccagtctcctcagctgctgatctacctgggcagcaatagagccagcggcgtgcccgatagattttctggctctggcagcggcaccgacttcaccctgaagatctctagagtggaagccgaggacgtgggcgtgtactactgtatgcagcctctgcagacccctctgttcacatttggccctggcaccaaggtggaaatcaaaggaggtggtggctctggcggatctgggagtggtggcggaggctctgcttctggatctggacaagtgacactgagagagtctggccccgctctggtcaagcctacacagaccctgacactgacctgcaccttcagcggcttcagcctgtctactagaggcgtgtgcgtgtcctggatcagacagcctcctggaaaggccctggaatggctggccttcatcgactgggacgacgacaagtactacaacaccagcctgaaaacccggctgaccatcagcaaggacaccagcaagaaccaggtggtgctgaccatgaccaacgtgcaccctgtggataccgccacctactactgcgccagaatcagctctcaccacggctccagctggtgtaccaccttcgattattggggccagggcgctctcgtgacagtttctgctggaggcagctccggggaagtgcagctggtggaatcaggcggcggactgattcaacctggcggctctctgagactgtcttgtgctgcttctggcgtgatcgtgtcctacaactacatgaactgggtccgacaggctcccggcaaaggccttgaatgggtgtccgtgatctacagcggcggcagcaccttttacgccgattctgtgcggggcagattcaccatcagccgggacaacagcaagaacaccctgtacctgcagatgaacagcctgagagccgaggacaccgctgtgtactattgcgccagagatctgggacctgccggcgcttttgatatctggggcctgggcacaatggtcaccgtgtctagccgtacggtggccgctcccagcgtgttcatcttcccacctagcgacgagcagctgaagtccggcacagcctctgtcgtgtgcctgctgaacaacttctacccccgcgaggccaaagtgcagtggaaggtggacaacgccctgcagagcggcaacagccaggaaagcgtgaccgagcaggacagcaaggactccacctacagcctgagcagcaccctgacactgagcaaggccgactacgagaagcacaaggtgtacgcctgcgaagtgacccaccagggcctgtctagccccgtgaccaagagcttcaaccggggcgagtgtggaggcggaggatctggcggatctggaagtggcggaggtggtagtggcggcggtggatctgcttctggctctggcgcttcgaccaagggcccatccgtgtttcctctggctcccagcagcaagtctacaagcggaggaacagccgctctgggctgcctggtcaaggattactttcccgagcctgtgaccgtgtcctggaattctggcgctctgacaagcggcgtgcacacctttccagctgtgctgcaaagcagcggcctgtactctctgagcagcgtggtcacagtgcctagctctagcctgggcacccagacctacatctgcaatgtgaaccacaagcctagcaacaccaaggtggacaagaaggtggaacccaagagctgcgataagacccacacatgtcctccatgtcctgctccagaactgctcggcggcccttctgtgttcctgtttcctccaaagcctaaggacaccctgatgatcagcagaacccctgaagtgacctgcgtggtggtggatgtgtctcacgaggaccccgaagtgaagttcaattggtacgtggacggcgtggaagtgcacaacgccaagaccaagcctagagaggaacagtacaacagcacctacagagtggtgtccgtgctgaccgtgctgcaccaggattggctgaacggcaaagagtacaagtgcaaggtgtccaacaaggccctgcctgctcctatcgagaaaaccatcagcaaggccaagggccagcctagggaaccccaggtttgtacccttcctccaagccgggatgagctgaccaagaaccaggtgtccctgagctgtgccgtgaagggcttctaccccagcgacattgccgtggaatgggagagcaatggccagcctgagaacaactacaagacaacccctcctgtgctggacagcgacggctcattcttcctggtgagcaagctgacagtcgacaagtccagatggcagcagggcaacgtgttcagttgcagcgtgctgcacgaggccctgcacagtcactacacccagaagtccctgagcctgtctcctggatagtga

SEQ ID NO: 516 - DNA, 2871 bp, synthetic construct
  source 1..2871: mol_type = other DNA
gacaccgtgatgacacagagccctctgagcctgcctgtgacacctggcgaacctgccagcatcagctgtagaagcagccagagcctgctgaacagcaacggctacaactacctggattggtacgtgcagaagcccggccagtctcctcagctgctgatctacctgggcagcaatagagccagcggcgtgcccgatagattttctggctctggcagcggcaccgacttcaccctgaagatctctagagtggaagccgaggacgtgggcgtgtactactgtatgcagcctctgcagacccctctgttcacatttggccctggcaccaaggtggaaatcaaaggcggatcctctggagagatcgtgctgacacagagccctggcacactgtcactgtctccaggcgaaacagccacactgagctgtagagccagccagagcttcagcagcgacctggcttggtatcagcagaagcctggacaggcccctcggctgttgatctatggcgcctcttctagagccacaggcatccccgatagattcagcggctctggcagcggcaccgatttcaccctgacaatcagcagactggaacccgccgacttcgccgtgtactactgtcagcagtacggcagcagccctcctgtgacatttggcggcggaacaaaggtggaaatcaaaggaggtggtggctctggcggatctgggagtggtggcggaggctctgcttctggatctggagaagtgcagctggtggaatcaggcggcggactgattcaacctggcggctctctgagactgtcttgtgctgcttctggcgtgatcgtgtcctacaactacatgaactgggtccgacaggctcccggcaaaggccttgaatgggtgtccgtgatctacagcggcggcagcaccttttacgccgattctgtgcggggcagattcaccatcagccgggacaacagcaagaacaccctgtacctgcagatgaacagcctgagagccgaggacaccgctgtgtactattgcgccagagatctgggacctgccggcgcttttgatatctggggcctgggcacaatggtcaccgtgtctagcggaggcagctccgggcaagtgacactgagagagtctggccccgctctggtcaagcctacacagaccctgacactgacctgcaccttcagcggcttcagcctgtctactagaggcgtgtgcgtgtcctggatcagacagcctcctggaaaggccctggaatggctggccttcatcgactgggacgacgacaagtactacaacaccagcctgaaaacccggctgaccatcagcaaggacaccagcaagaaccaggtggtgctgaccatgaccaacgtgcaccctgtggataccgccacctactactgcgccagaatcagctctcaccacggctccagctggtgtaccaccttcgattattggggccagggcgctctcgtgacagtttctgctcgtacggtggccgctcccagcgtgttcatcttcccacctagcgacgagcagctgaagtccggcacagcctctgtcgtgtgcctgctgaacaacttctacccccgcgaggccaaagtgcagtggaaggtggacaacgccctgcagagcggcaacagccaggaaagcgtgaccgagcaggacagcaaggactccacctacagcctgagcagcaccctgacactgagcaaggccgactacgagaagcacaaggtgtacgcctgcgaagtgacccaccagggcctgtctagccccgtgaccaagagcttcaaccggggcgagtgtggaggcggaggatctggcggatctggaagtggcggaggtggtagtggcggcggtggatctgcttctggctctggcgcttcgaccaagggcccatccgtgtttcctctggctcccagcagcaagtctacaagcggaggaacagccgctctgggctgcctggtcaaggattactttcccgagcctgtgaccgtgtcctggaattctggcgctctgacaagcggcgtgcacacctttccagctgtgctgcaaagcagcggcctgtactctctgagcagcgtggtcacagtgcctagctctagcctgggcacccagacctacatctgcaatgtgaaccacaagcctagcaacaccaaggtggacaagaaggtggaacccaagagctgcgataagacccacacatgtcctccatgtcctgctccagaactgctcggcggcccttctgtgttcctgtttcctccaaagcctaaggacaccctgatgatcagcagaacccctgaagtgacctgcgtggtggtggatgtgtctcacgaggaccccgaagtgaagttcaattggtacgtggacggcgtggaagtgcacaacgccaagaccaagcctagagaggaacagtacaacagcacctacagagtggtgtccgtgctgaccgtgctgcaccaggattggctgaacggcaaagagtacaagtgcaaggtgtccaacaaggccctgcctgctcctatcgagaaaaccatcagcaaggccaagggccagcctagggaaccccaggtttacacccttcctccatgccgggatgagctgaccaagaaccaggtgtccctgtggtgtctcgtgaagggcttctaccccagcgacattgccgtggaatgggagagcaatggccagcctgagaacaactacaagacaacccctcctgtgctggacagcgacggctcattcttcctgtacagcaagctgacagtcgacaagtccagatggcagcagggcaacgtgttcagttgcagcgtgctgcacgaggccctgcacgctcactacacccagaagtccctgagcctgtctcctggatagtga

SEQ ID NO: 517 - DNA, 2871 bp, synthetic construct
  source 1..2871: mol_type = other DNA
gagatcgtgctgacacagagccctggcacactgtcactgtctccaggcgaaacagccacactgagctgtagagccagccagagcttcagcagcgacctggcttggtatcagcagaagcctggacaggcccctcggctgttgatctatggcgcctcttctagagccacaggcatccccgatagattcagcggctctggcagcggcaccgatttcaccctgacaatcagcagactggaacccgccgacttcgccgtgtactactgtcagcagtacggcagcagccctcctgtgacatttggcggcggaacaaaggtggaaatcaaaggcggatcctctggagacaccgtgatgacacagagccctctgagcctgcctgtgacacctggcgaacctgccagcatcagctgtagaagcagccagagcctgctgaacagcaacggctacaactacctggattggtacgtgcagaagcccggccagtctcctcagctgctgatctacctgggcagcaatagagccagcggcgtgcccgatagattttctggctctggcagcggcaccgacttcaccctgaagatctctagagtggaagccgaggacgtgggcgtgtactactgtatgcagcctctgcagacccctctgttcacatttggccctggcaccaaggtggaaatcaaaggaggtggtggctctggcggatctgggagtggtggcggaggctctgcttctggatctggacaagtgacactgagagagtctggccccgctctggtcaagcctacacagaccctgacactgacctgcaccttcagcggcttcagcctgtctactagaggcgtgtgcgtgtcctggatcagacagcctcctggaaaggccctggaatggctggccttcatcgactgggacgacgacaagtactacaacaccagcctgaaaacccggctgaccatcagcaaggacaccagcaagaaccaggtggtgctgaccatgaccaacgtgcaccctgtggataccgccacctactactgcgccagaatcagctctcaccacggctccagctggtgtaccaccttcgattattggggccagggcgctctcgtgacagtttctgctggaggcagctccggggaagtgcagctggtggaatcaggcggcggactgattcaacctggcggctctctgagactgtcttgtgctgcttctggcgtgatcgtgtcctacaactacatgaactgggtccgacaggctcccggcaaaggccttgaatgggtgtccgtgatctacagcggcggcagcaccttttacgccgattctgtgcggggcagattcaccatcagccgggacaacagcaagaacaccctgtacctgcagatgaacagcctgagagccgaggacaccgctgtgtactattgcgccagagatctgggacctgccggcgcttttgatatctggggcctgggcacaatggtcaccgtgtctagccgtacggtggccgctcccagcgtgttcatcttcccacctagcgacgagcagctgaagtccggcacagcctctgtcgtgtgcctgctgaacaacttctacccccgcgaggccaaagtgcagtggaaggtggacaacgccctgcagagcggcaacagccaggaaagcgtgaccgagcaggacagcaaggactccacctacagcctgagcagcaccctgacactgagcaaggccgactacgagaagcacaaggtgtacgcctgcgaagtgacccaccagggcctgtctagccccgtgaccaagagcttcaaccggggcgagtgtggaggcggaggatctggcggatctggaagtggcggaggtggtagtggcggcggtggatctgcttctggctctggcgcttcgaccaagggcccatccgtgtttcctctggctcccagcagcaagtctacaagcggaggaacagccgctctgggctgcctggtcaaggattactttcccgagcctgtgaccgtgtcctggaattctggcgctctgacaagcggcgtgcacacctttccagctgtgctgcaaagcagcggcctgtactctctgagcagcgtggtcacagtgcctagctctagcctgggcacccagacctacatctgcaatgtgaaccacaagcctagcaacaccaaggtggacaagaaggtggaacccaagagctgcgataagacccacacatgtcctccatgtcctgctccagaactgctcggcggcccttctgtgttcctgtttcctccaaagcctaaggacaccctgatgatcagcagaacccctgaagtgacctgcgtggtggtggatgtgtctcacgaggaccccgaagtgaagttcaattggtacgtggacggcgtggaagtgcacaacgccaagaccaagcctagagaggaacagtacaacagcacctacagagtggtgtccgtgctgaccgtgctgcaccaggattggctgaacggcaaagagtacaagtgcaaggtgtccaacaaggccctgcctgctcctatcgagaaaaccatcagcaaggccaagggccagcctagggaaccccaggtttgtacccttcctccaagccgggatgagctgaccaagaaccaggtgtccctgagctgtgccgtgaagggcttctaccccagcgacattgccgtggaatgggagagcaatggccagcctgagaacaactacaagacaacccctcctgtgctggacagcgacggctcattcttcctggtgagcaagctgacagtcgacaagtccagatggcagcagggcaacgtgttcagttgcagcgtgctgcacgaggccctgcacgctcactacacccagaagtccctgagcctgtctcctggatagtga

SEQ ID NO: 518 - DNA, 2871 bp, synthetic construct
  source 1..2871: mol_type = other DNA
gagatcgtgctgacacagagccctggcacactgtcactgtctccaggcgaaacagccacactgagctgtagagccagccagagcttcagcagcgacctggcttggtatcagcagaagcctggacaggcccctcggctgttgatctatggcgcctcttctagagccacaggcatccccgatagattcagcggctctggcagcggcaccgatttcaccctgacaatcagcagactggaacccgccgacttcgccgtgtactactgtcagcagtacggcagcagccctcctgtgacatttggcggcggaacaaaggtggaaatcaaaggcggatcctctggagacaccgtgatgacacagagccctctgagcctgcctgtgacacctggcgaacctgccagcatcagctgtagaagcagccagagcctgctgaacagcaacggctacaactacctggattggtacgtgcagaagcccggccagtctcctcagctgctgatctacctgggcagcaatagagccagcggcgtgcccgatagattttctggctctggcagcggcaccgacttcaccctgaagatctctagagtggaagccgaggacgtgggcgtgtactactgtatgcagcctctgcagacccctctgttcacatttggccctggcaccaaggtggaaatcaaaggaggtggtggctctggcggatctgggagtggtggcggaggctctgcttctggatctggacaagtgacactgagagagtctggccccgctctggtcaagcctacacagaccctgacactgacctgcaccttcagcggcttcagcctgtctactagaggcgtgtgcgtgtcctggatcagacagcctcctggaaaggccctggaatggctggccttcatcgactgggacgacgacaagtactacaacaccagcctgaaaacccggctgaccatcagcaaggacaccagcaagaaccaggtggtgctgaccatgaccaacgtgcaccctgtggataccgccacctactactgcgccagaatcagctctcaccacggctccagctggtgtaccaccttcgattattggggccagggcgctctcgtgacagtttctgctggaggcagctccggggaagtgcagctggtggaatcaggcggcggactgattcaacctggcggctctctgagactgtcttgtgctgcttctggcgtgatcgtgtcctacaactacatgaactgggtccgacaggctcccggcaaaggccttgaatgggtgtccgtgatctacagcggcggcagcaccttttacgccgattctgtgcggggcagattcaccatcagccgggacaacagcaagaacaccctgtacctgcagatgaacagcctgagagccgaggacaccgctgtgtactattgcgccagagatctgggacctgccggcgcttttgatatctggggcctgggcacaatggtcaccgtgtctagccgtacggtggccgctcccagcgtgttcatcttcccacctagcgacgagcagctgaagtccggcacagcctctgtcgtgtgcctgctgaacaacttctacccccgcgaggccaaagtgcagtggaaggtggacaacgccctgcagagcggcaacagccaggaaagcgtgaccgagcaggacagcaaggactccacctacagcctgagcagcaccctgacactgagcaaggccgactacgagaagcacaaggtgtacgcctgcgaagtgacccaccagggcctgtctagccccgtgaccaagagcttcaaccggggcgagtgtggaggcggaggatctggcggatctggaagtggcggaggtggtagtggcggcggtggatctgcttctggctctggcgcttcgaccaagggcccatccgtgtttcctctggctcccagcagcaagtctacaagcggaggaacagccgctctgggctgcctggtcaaggattactttcccgagcctgtgaccgtgtcctggaattctggcgctctgacaagcggcgtgcacacctttccagctgtgctgcaaagcagcggcctgtactctctgagcagcgtggtcacagtgcctagctctagcctgggcacccagacctacatctgcaatgtgaaccacaagcctagcaacaccaaggtggacaagaaggtggaacccaagagctgcgataagacccacacatgtcctccatgtcctgctccagaactgctcggcggcccttctgtgttcctgtttcctccaaagcctaaggacaccctgatgatcagcagaacccctgaagtgacctgcgtggtggtggatgtgtctcacgaggaccccgaagtgaagttcaattggtacgtggacggcgtggaagtgcacaacgccaagaccaagcctagagaggaacagtacaacagcacctacagagtggtgtccgtgctgaccgtgctgcaccaggattggctgaacggcaaagagtacaagtgcaaggtgtccaacaaggccctgcctgctcctatcgagaaaaccatcagcaaggccaagggccagcctagggaaccccaggtttacacccttcctccatgccgggatgagctgaccaagaaccaggtgtccctgtggtgtctcgtgaagggcttctaccccagcgacattgccgtggaatgggagagcaatggccagcctgagaacaactacaagacaacccctcctgtgctggacagcgacggctcattcttcctgtacagcaagctgacagtcgacaagtccagatggcagcagggcaacgtgttcagttgcagcgtgctgcacgaggccctgcacagtcactacacccagaagtccctgagcctgtctcctggatagtga

SEQ ID NO: 519 - DNA, 2871 bp, synthetic construct
  source 1..2871: mol_type = other DNA
gacaccgtgatgacacagagccctctgagcctgcctgtgacacctggcgaacctgccagcatcagctgtagaagcagccagagcctgctgaacagcaacggctacaactacctggattggtacgtgcagaagcccggccagtctcctcagctgctgatctacctgggcagcaatagagccagcggcgtgcccgatagattttctggctctggcagcggcaccgacttcaccctgaagatctctagagtggaagccgaggacgtgggcgtgtactactgtatgcagcctctgcagacccctctgttcacatttggccctggcaccaaggtggaaatcaaaggcggatcctctggagagatcgtgctgacacagagccctggcacactgtcactgtctccaggcgaaacagccacactgagctgtagagccagccagagcttcagcagcgacctggcttggtatcagcagaagcctggacaggcccctcggctgttgatctatggcgcctcttctagagccacaggcatccccgatagattcagcggctctggcagcggcaccgatttcaccctgacaatcagcagactggaacccgccgacttcgccgtgtactactgtcagcagtacggcagcagccctcctgtgacatttggcggcggaacaaaggtggaaatcaaaggaggtggtggctctggcggatctgggagtggtggcggaggctctgcttctggatctggagaagtgcagctggtggaatcaggcggcggactgattcaacctggcggctctctgagactgtcttgtgctgcttctggcgtgatcgtgtcctacaactacatgaactgggtccgacaggctcccggcaaaggccttgaatgggtgtccgtgatctacagcggcggcagcaccttttacgccgattctgtgcggggcagattcaccatcagccgggacaacagcaagaacaccctgtacctgcagatgaacagcctgagagccgaggacaccgctgtgtactattgcgccagagatctgggacctgccggcgcttttgatatctggggcctgggcacaatggtcaccgtgtctagcggaggcagctccgggcaagtgacactgagagagtctggccccgctctggtcaagcctacacagaccctgacactgacctgcaccttcagcggcttcagcctgtctactagaggcgtgtgcgtgtcctggatcagacagcctcctggaaaggccctggaatggctggccttcatcgactgggacgacgacaagtactacaacaccagcctgaaaacccggctgaccatcagcaaggacaccagcaagaaccaggtggtgctgaccatgaccaacgtgcaccctgtggataccgccacctactactgcgccagaatcagctctcaccacggctccagctggtgtaccaccttcgattattggggccagggcgctctcgtgacagtttctgctcgtacggtggccgctcccagcgtgttcatcttcccacctagcgacgagcagctgaagtccggcacagcctctgtcgtgtgcctgctgaacaacttctacccccgcgaggccaaagtgcagtggaaggtggacaacgccctgcagagcggcaacagccaggaaagcgtgaccgagcaggacagcaaggactccacctacagcctgagcagcaccctgacactgagcaaggccgactacgagaagcacaaggtgtacgcctgcgaagtgacccaccagggcctgtctagccccgtgaccaagagcttcaaccggggcgagtgtggaggcggaggatctggcggatctggaagtggcggaggtggtagtggcggcggtggatctgcttctggctctggcgcttcgaccaagggcccatccgtgtttcctctggctcccagcagcaagtctacaagcggaggaacagccgctctgggctgcctggtcaaggattactttcccgagcctgtgaccgtgtcctggaattctggcgctctgacaagcggcgtgcacacctttccagctgtgctgcaaagcagcggcctgtactctctgagcagcgtggtcacagtgcctagctctagcctgggcacccagacctacatctgcaatgtgaaccacaagcctagcaacaccaaggtggacaagaaggtggaacccaagagctgcgataagacccacacatgtcctccatgtcctgctccagaactgctcggcggcccttctgtgttcctgtttcctccaaagcctaaggacaccctgatgatcagcagaacccctgaagtgacctgcgtggtggtggatgtgtctcacgaggaccccgaagtgaagttcaattggtacgtggacggcgtggaagtgcacaacgccaagaccaagcctagagaggaacagtacaacagcacctacagagtggtgtccgtgctgaccgtgctgcaccaggattggctgaacggcaaagagtacaagtgcaaggtgtccaacaaggccctgcctgctcctatcgagaaaaccatcagcaaggccaagggccagcctagggaaccccaggtttgtacccttcctccaagccgggatgagctgaccaagaaccaggtgtccctgagctgtgccgtgaagggcttctaccccagcgacattgccgtggaatgggagagcaatggccagcctgagaacaactacaagacaacccctcctgtgctggacagcgacggctcattcttcctggtgagcaagctgacagtcgacaagtccagatggcagcagggcaacgtgttcagttgcagcgtgctgcacgaggccctgcacagtcactacacccagaagtccctgagcctgtctcctggatagtga

SEQ ID NO: 520 - DNA, 2871 bp, synthetic construct
  source 1..2871: mol_type = other DNA
gagatcgtgctgacacagagccctggcacactgtcactgtctccaggcgaaacagccacactgagctgtagagccagccagagcttcagcagcgacctggcttggtatcagcagaagcctggacaggcccctcggctgttgatctatggcgcctcttctagagccacaggcatccccgatagattcagcggctctggcagcggcaccgatttcaccctgacaatcagcagactggaacccgccgacttcgccgtgtactactgtcagcagtacggcagcagccctcctgtgacatttggcggcggaacaaaggtggaaatcaaaggcggatcctctggagacaccgtgatgacacagagccctctgagcctgcctgtgacacctggcgaacctgccagcatcagctgtagaagcagccagagcctgctgaacagcaacggctacaactacctggattggtacgtgcagaagcccggccagtctcctcagctgctgatctacctgggcagcaatagagccagcggcgtgcccgatagattttctggctctggcagcggcaccgacttcaccctgaagatctctagagtggaagccgaggacgtgggcgtgtactactgtatgcagcctctgcagacccctctgttcacatttggccctggcaccaaggtggaaatcaaaggaggtggtggctctggcggatctgggagtggtggcggaggctctgcttctggatctggacaagtgacactgagagagtctggccccgctctggtcaagcctacacagaccctgacactgacctgcaccttcagcggcttcagcctgtctactagaggcgtgtgcgtgtcctggatcagacagcctcctggaaaggccctggaatggctggccttcatcgactgggacgacgacaagtactacaacaccagcctgaaaacccggctgaccatcagcaaggacaccagcaagaaccaggtggtgctgaccatgaccaacgtgcaccctgtggataccgccacctactactgcgccagaatcagctctcaccacggctccagctggtgtaccaccttcgattattggggccagggcgctctcgtgacagtttctgctggaggcagctccggggaagtgcagctggtggaatcaggcggcggactgattcaacctggcggctctctgagactgtcttgtgctgcttctggcgtgatcgtgtcctacaactacatgaactgggtccgacaggctcccggcaaaggccttgaatgggtgtccgtgatctacagcggcggcagcaccttttacgccgattctgtgcggggcagattcaccatcagccgggacaacagcaagaacaccctgtacctgcagatgaacagcctgagagccgaggacaccgctgtgtactattgcgccagagatctgggacctgccggcgcttttgatatctggggcctgggcacaatggtcaccgtgtctagccgtacggtggccgctcccagcgtgttcatcttcccacctagcgacgagcagctgaagtccggcacagcctctgtcgtgtgcctgctgaacaacttctacccccgcgaggccaaagtgcagtggaaggtggacaacgccctgcagagcggcaacagccaggaaagcgtgaccgagcaggacagcaaggactccacctacagcctgagcagcaccctgacactgagcaaggccgactacgagaagcacaaggtgtacgcctgcgaagtgacccaccagggcctgtctagccccgtgaccaagagcttcaaccggggcgagtgtggaggcggaggatctggcggatctggaagtggcggaggtggtagtggcggcggtggatctgcttctggctctggcgcttcgaccaagggcccatccgtgtttcctctggctcccagcagcaagtctacaagcggaggaacagccgctctgggctgcctggtcaaggattactttcccgagcctgtgaccgtgtcctggaattctggcgctctgacaagcggcgtgcacacctttccagctgtgctgcaaagcagcggcctgtactctctgagcagcgtggtcacagtgcctagctctagcctgggcacccagacctacatctgcaatgtgaaccacaagcctagcaacaccaaggtggacaagaaggtggaacccaagagctgcgataagacccacacatgtcctccatgtcctgctccagaactgctcggcggcccttctgtgttcctgtttcctccaaagcctaaggacaccctgatgatcagcagaacccctgaagtgacctgcgtggtggtggatgtgtctcacgaggaccccgaagtgaagttcaattggtacgtggacggcgtggaagtgcacaacgccaagaccaagcctagagaggaacagtacaacagcacctacagagtggtgtccgtgctgaccgtgctgcaccaggattggctgaacggcaaagagtacaagtgcaaggtgtccaacaaggccctgcctgctcctatcgagaaaaccatcagcaaggccaagggccagcctagggaaccccaggtttacacccttcctccatgccgggatgagctgaccaagaaccaggtgtccctgtggtgtctcgtgaagggcttctaccccagcgacattgccgtggaatgggagagcaatggccagcctgagaacaactacaagacaacccctcctgtgctggacagcgacggctcattcttcctgtacagcaagctgacagtcgacaagtccagatggcagcagggcaacgtgttcagttgcagcgtgctgcacgaggccctgcacgctcactacacccagaagtccctgagcctgtctcctggatagtga

SEQ ID NO: 521 - DNA, 2871 bp, synthetic construct
  source 1..2871: mol_type = other DNA
gacaccgtgatgacacagagccctctgagcctgcctgtgacacctggcgaacctgccagcatcagctgtagaagcagccagagcctgctgaacagcaacggctacaactacctggattggtacgtgcagaagcccggccagtctcctcagctgctgatctacctgggcagcaatagagccagcggcgtgcccgatagattttctggctctggcagcggcaccgacttcaccctgaagatctctagagtggaagccgaggacgtgggcgtgtactactgtatgcagcctctgcagacccctctgttcacatttggccctggcaccaaggtggaaatcaaaggcggatcctctggagagatcgtgctgacacagagccctggcacactgtcactgtctccaggcgaaacagccacactgagctgtagagccagccagagcttcagcagcgacctggcttggtatcagcagaagcctggacaggcccctcggctgttgatctatggcgcctcttctagagccacaggcatccccgatagattcagcggctctggcagcggcaccgatttcaccctgacaatcagcagactggaacccgccgacttcgccgtgtactactgtcagcagtacggcagcagccctcctgtgacatttggcggcggaacaaaggtggaaatcaaaggaggtggtggctctggcggatctgggagtggtggcggaggctctgcttctggatctggagaagtgcagctggtggaatcaggcggcggactgattcaacctggcggctctctgagactgtcttgtgctgcttctggcgtgatcgtgtcctacaactacatgaactgggtccgacaggctcccggcaaaggccttgaatgggtgtccgtgatctacagcggcggcagcaccttttacgccgattctgtgcggggcagattcaccatcagccgggacaacagcaagaacaccctgtacctgcagatgaacagcctgagagccgaggacaccgctgtgtactattgcgccagagatctgggacctgccggcgcttttgatatctggggcctgggcacaatggtcaccgtgtctagcggaggcagctccgggcaagtgacactgagagagtctggccccgctctggtcaagcctacacagaccctgacactgacctgcaccttcagcggcttcagcctgtctactagaggcgtgtgcgtgtcctggatcagacagcctcctggaaaggccctggaatggctggccttcatcgactgggacgacgacaagtactacaacaccagcctgaaaacccggctgaccatcagcaaggacaccagcaagaaccaggtggtgctgaccatgaccaacgtgcaccctgtggataccgccacctactactgcgccagaatcagctctcaccacggctccagctggtgtaccaccttcgattattggggccagggcgctctcgtgacagtttctgctcgtacggtggccgctcccagcgtgttcatcttcccacctagcgacgagcagctgaagtccggcacagcctctgtcgtgtgcctgctgaacaacttctacccccgcgaggccaaagtgcagtggaaggtggacaacgccctgcagagcggcaacagccaggaaagcgtgaccgagcaggacagcaaggactccacctacagcctgagcagcaccctgacactgagcaaggccgactacgagaagcacaaggtgtacgcctgcgaagtgacccaccagggcctgtctagccccgtgaccaagagcttcaaccggggcgagtgtggaggcggaggatctggcggatctggaagtggcggaggtggtagtggcggcggtggatctgcttctggctctggcgcttcgaccaagggcccatccgtgtttcctctggctcccagcagcaagtctacaagcggaggaacagccgctctgggctgcctggtcaaggattactttcccgagcctgtgaccgtgtcctggaattctggcgctctgacaagcggcgtgcacacctttccagctgtgctgcaaagcagcggcctgtactctctgagcagcgtggtcacagtgcctagctctagcctgggcacccagacctacatctgcaatgtgaaccacaagcctagcaacaccaaggtggacaagaaggtggaacccaagagctgcgataagacccacacatgtcctccatgtcctgctccagaactgctcggcggcccttctgtgttcctgtttcctccaaagcctaaggacaccctgatgatcagcagaacccctgaagtgacctgcgtggtggtggatgtgtctcacgaggaccccgaagtgaagttcaattggtacgtggacggcgtggaagtgcacaacgccaagaccaagcctagagaggaacagtacaacagcacctacagagtggtgtccgtgctgaccgtgctgcaccaggattggctgaacggcaaagagtacaagtgcaaggtgtccaacaaggccctgcctgctcctatcgagaaaaccatcagcaaggccaagggccagcctagggaaccccaggtttgtacccttcctccaagccgggatgagctgaccaagaaccaggtgtccctgagctgtgccgtgaagggcttctaccccagcgacattgccgtggaatgggagagcaatggccagcctgagaacaactacaagacaacccctcctgtgctggacagcgacggctcattcttcctggtgagcaagctgacagtcgacaagtccagatggcagcagggcaacgtgttcagttgcagcgtgctgcacgaggccctgcacgctcactacacccagaagtccctgagcctgtctcctggatagtga

SEQ ID NO: 522 - DNA, 2904 bp, synthetic construct
  source 1..2904: mol_type = other DNA
gagatcgtgctgacacagagccctggcacactgtcactgtctccaggcgaaacagccacactgagctgtagagccagccagagcttcagcagcgacctggcttggtatcagcagaagcctggacaggcccctcggctgttgatctatggcgcctcttctagagccacaggcatccccgatagattcagcggctctggcagcggcaccgatttcaccctgacaatcagcagactggaacccgccgacttcgccgtgtactactgtcagcagtacggcagcagccctcctgtgacatttggcggcggaacaaaggtggaaatcaaaggaggtggtggctctggcggatctgggagtggtggcggaggctctgcttctggatctggagaagtgcagctggtggaatcaggcggcggactgattcaacctggcggctctctgagactgtcttgtgctgcttctggcgtgatcgtgtcctacaactacatgaactgggtccgacaggctcccggcaaaggccttgaatgggtgtccgtgatctacagcggcggcagcaccttttacgccgattctgtgcggggcagattcaccatcagccgggacaacagcaagaacaccctgtacctgcagatgaacagcctgagagccgaggacaccgctgtgtactattgcgccagagatctgggacctgccggcgcttttgatatctggggcctgggcacaatggtcaccgtgtctagcggcggaggtggatccggggacaccgtgatgacacagagccctctgagcctgcctgtgacacctggcgaacctgccagcatcagctgtagaagcagccagagcctgctgaacagcaacggctacaactacctggattggtacgtgcagaagcccggccagtctcctcagctgctgatctacctgggcagcaatagagccagcggcgtgcccgatagattttctggctctggcagcggcaccgacttcaccctgaagatctctagagtggaagccgaggacgtgggcgtgtactactgtatgcagcctctgcagacccctctgttcacatttggccctggcaccaaggtggaaatcaaacgtacggtggccgctcccagcgtgttcatcttcccacctagcgacgagcagctgaagtccggcacagcctctgtcgtgtgcctgctgaacaacttctacccccgcgaggccaaagtgcagtggaaggtggacaacgccctgcagagcggcaacagccaggaaagcgtgaccgagcaggacagcaaggactccacctacagcctgagcagcaccctgacactgagcaaggccgactacgagaagcacaaggtgtacgcctgcgaagtgacccaccagggcctgtctagccccgtgaccaagagcttcaaccggggcgagtgtggaggcggaggatctggcggaggtggaagtggcggaggcggttctggtggtggtggctctggtggcggcggttcaggcggcggaggaagcggaggcggcggaagtggtggcggtggatctcaagtgacactgagagagtctggccccgctctggtcaagcctacacagaccctgacactgacctgcaccttcagcggcttcagcctgtctactagaggcgtgtgcgtgtcctggatcagacagcctcctggaaaggccctggaatggctggccttcatcgactgggacgacgacaagtactacaacaccagcctgaaaacccggctgaccatcagcaaggacaccagcaagaaccaggtggtgctgaccatgaccaacgtgcaccctgtggataccgccacctactactgcgccagaatcagctctcaccacggctccagctggtgtaccaccttcgattattggggccagggcgctctcgtgacagtttctgctgcttcgaccaagggcccatccgtgtttcctctggctcccagcagcaagtctacaagcggaggaacagccgctctgggctgcctggtcaaggattactttcccgagcctgtgaccgtgtcctggaattctggcgctctgacaagcggcgtgcacacctttccagctgtgctgcaaagcagcggcctgtactctctgagcagcgtggtcacagtgcctagctctagcctgggcacccagacctacatctgcaatgtgaaccacaagcctagcaacaccaaggtggacaagaaggtggaacccaagagctgcgataagacccacacatgtcctccatgtcctgctccagaactgctcggcggcccttctgtgttcctgtttcctccaaagcctaaggacaccctgatgatcagcagaacccctgaagtgacctgcgtggtggtggatgtgtctcacgaggaccccgaagtgaagttcaattggtacgtggacggcgtggaagtgcacaacgccaagaccaagcctagagaggaacagtacaacagcacctacagagtggtgtccgtgctgaccgtgctgcaccaggattggctgaacggcaaagagtacaagtgcaaggtgtccaacaaggccctgcctgctcctatcgagaaaaccatcagcaaggccaagggccagcctagggaaccccaggtttacacccttcctccaagccgggatgagctgaccaagaaccaggtgtccctgacatgtctcgtgaagggcttctaccccagcgacattgccgtggaatgggagagcaatggccagcctgagaacaactacaagacaacccctcctgtgctggacagcgacggctcattcttcctgtacagcaagctgacagtcgacaagtccagatggcagcagggcaacgtgttcagttgcagcgtgctgcacgaggccctgcacagtcactacacccagaagtccctgagcctgtctcctggatagtga

SEQ ID NO: 523 - DNA, 2904 bp, synthetic construct
  source 1..2904: mol_type = other DNA
gagatcgtgctgacacagagccctggcacactgtcactgtctccaggcgaaacagccacactgagctgtagagccagccagagcttcagcagcgacctggcttggtatcagcagaagcctggacaggcccctcggctgttgatctatggcgcctcttctagagccacaggcatccccgatagattcagcggctctggcagcggcaccgatttcaccctgacaatcagcagactggaacccgccgacttcgccgtgtactactgtcagcagtacggcagcagccctcctgtgacatttggcggcggaacaaaggtggaaatcaaaggaggtggtggctctggcggatctgggagtggtggcggaggctctgcttctggatctggagaagtgcagctggtggaatcaggcggcggactgattcaacctggcggctctctgagactgtcttgtgctgcttctggcgtgatcgtgtcctacaactacatgaactgggtccgacaggctcccggcaaaggccttgaatgggtgtccgtgatctacagcggcggcagcaccttttacgccgattctgtgcggggcagattcaccatcagccgggacaacagcaagaacaccctgtacctgcagatgaacagcctgagagccgaggacaccgctgtgtactattgcgccagagatctgggacctgccggcgcttttgatatctggggcctgggcacaatggtcaccgtgtctagcggcggaggtggatccggggacaccgtgatgacacagagccctctgagcctgcctgtgacacctggcgaacctgccagcatcagctgtagaagcagccagagcctgctgaacagcaacggctacaactacctggattggtacgtgcagaagcccggccagtctcctcagctgctgatctacctgggcagcaatagagccagcggcgtgcccgatagattttctggctctggcagcggcaccgacttcaccctgaagatctctagagtggaagccgaggacgtgggcgtgtactactgtatgcagcctctgcagacccctctgttcacatttggccctggcaccaaggtggaaatcaaacgtacggtggccgctcccagcgtgttcatcttcccacctagcgacgagcagctgaagtccggcacagcctctgtcgtgtgcctgctgaacaacttctacccccgcgaggccaaagtgcagtggaaggtggacaacgccctgcagagcggcaacagccaggaaagcgtgaccgagcaggacagcaaggactccacctacagcctgagcagcaccctgacactgagcaaggccgactacgagaagcacaaggtgtacgcctgcgaagtgacccaccagggcctgtctagccccgtgaccaagagcttcaaccggggcgagtgtggaggcggaggatctggcggaggtggaagtggcggaggcggttctggtggtggtggctctggtggcggcggttcaggcggcggaggaagcggaggcggcggaagtggtggcggtggatctcaagtgacactgagagagtctggccccgctctggtcaagcctacacagaccctgacactgacctgcaccttcagcggcttcagcctgtctactagaggcgtgtgcgtgtcctggatcagacagcctcctggaaaggccctggaatggctggccttcatcgactgggacgacgacaagtactacaacaccagcctgaaaacccggctgaccatcagcaaggacaccagcaagaaccaggtggtgctgaccatgaccaacgtgcaccctgtggataccgccacctactactgcgccagaatcagctctcaccacggctccagctggtgtaccaccttcgattattggggccagggcgctctcgtgacagtttctgctgcttcgaccaagggcccatccgtgtttcctctggctcccagcagcaagtctacaagcggaggaacagccgctctgggctgcctggtcaaggattactttcccgagcctgtgaccgtgtcctggaattctggcgctctgacaagcggcgtgcacacctttccagctgtgctgcaaagcagcggcctgtactctctgagcagcgtggtcacagtgcctagctctagcctgggcacccagacctacatctgcaatgtgaaccacaagcctagcaacaccaaggtggacaagaaggtggaacccaagagctgcgataagacccacacatgtcctccatgtcctgctccagaactgctcggcggcccttctgtgttcctgtttcctccaaagcctaaggacaccctgatgatcagcagaacccctgaagtgacctgcgtggtggtggatgtgtctcacgaggaccccgaagtgaagttcaattggtacgtggacggcgtggaagtgcacaacgccaagaccaagcctagagaggaacagtacaacagcacctacagagtggtgtccgtgctgaccgtgctgcaccaggattggctgaacggcaaagagtacaagtgcaaggtgtccaacaaggccctgcctgctcctatcgagaaaaccatcagcaaggccaagggccagcctagggaaccccaggtttacacccttcctccaagccgggatgagctgaccaagaaccaggtgtccctgacatgtctcgtgaagggcttctaccccagcgacattgccgtggaatgggagagcaatggccagcctgagaacaactacaagacaacccctcctgtgctggacagcgacggctcattcttcctgtacagcaagctgacagtcgacaagtccagatggcagcagggcaacgtgttcagttgcagcgtgctgcacgaggccctgcacgctcactacacccagaagtccctgagcctgtctcctggatagtga

SEQ ID NO: 524 - DNA, 2904 bp, synthetic construct
  source 1..2904: mol_type = other DNA
gacaccgtgatgacacagagccctctgagcctgcctgtgacacctggcgaacctgccagcatcagctgtagaagcagccagagcctgctgaacagcaacggctacaactacctggattggtacgtgcagaagcccggccagtctcctcagctgctgatctacctgggcagcaatagagccagcggcgtgcccgatagattttctggctctggcagcggcaccgacttcaccctgaagatctctagagtggaagccgaggacgtgggcgtgtactactgtatgcagcctctgcagacccctctgttcacatttggccctggcaccaaggtggaaatcaaaggaggtggtggctctggcggatctgggagtggtggcggaggctctgcttctggatctggacaagtgacactgagagagtctggccccgctctggtcaagcctacacagaccctgacactgacctgcaccttcagcggcttcagcctgtctactagaggcgtgtgcgtgtcctggatcagacagcctcctggaaaggccctggaatggctggccttcatcgactgggacgacgacaagtactacaacaccagcctgaaaacccggctgaccatcagcaaggacaccagcaagaaccaggtggtgctgaccatgaccaacgtgcaccctgtggataccgccacctactactgcgccagaatcagctctcaccacggctccagctggtgtaccaccttcgattattggggccagggcgctctcgtgacagtttctgctggcggaggtggatccggggagatcgtgctgacacagagccctggcacactgtcactgtctccaggcgaaacagccacactgagctgtagagccagccagagcttcagcagcgacctggcttggtatcagcagaagcctggacaggcccctcggctgttgatctatggcgcctcttctagagccacaggcatccccgatagattcagcggctctggcagcggcaccgatttcaccctgacaatcagcagactggaacccgccgacttcgccgtgtactactgtcagcagtacggcagcagccctcctgtgacatttggcggcggaacaaaggtggaaatcaaacgtacggtggccgctcccagcgtgttcatcttcccacctagcgacgagcagctgaagtccggcacagcctctgtcgtgtgcctgctgaacaacttctacccccgcgaggccaaagtgcagtggaaggtggacaacgccctgcagagcggcaacagccaggaaagcgtgaccgagcaggacagcaaggactccacctacagcctgagcagcaccctgacactgagcaaggccgactacgagaagcacaaggtgtacgcctgcgaagtgacccaccagggcctgtctagccccgtgaccaagagcttcaaccggggcgagtgtggaggcggaggatctggcggaggtggaagtggcggaggcggttctggtggtggtggctctggtggcggcggttcaggcggcggaggaagcggaggcggcggaagtggtggcggtggatctgaagtgcagctggtggaatcaggcggcggactgattcaacctggcggctctctgagactgtcttgtgctgcttctggcgtgatcgtgtcctacaactacatgaactgggtccgacaggctcccggcaaaggccttgaatgggtgtccgtgatctacagcggcggcagcaccttttacgccgattctgtgcggggcagattcaccatcagccgggacaacagcaagaacaccctgtacctgcagatgaacagcctgagagccgaggacaccgctgtgtactattgcgccagagatctgggacctgccggcgcttttgatatctggggcctgggcacaatggtcaccgtgtctagcgcttcgaccaagggcccatccgtgtttcctctggctcccagcagcaagtctacaagcggaggaacagccgctctgggctgcctggtcaaggattactttcccgagcctgtgaccgtgtcctggaattctggcgctctgacaagcggcgtgcacacctttccagctgtgctgcaaagcagcggcctgtactctctgagcagcgtggtcacagtgcctagctctagcctgggcacccagacctacatctgcaatgtgaaccacaagcctagcaacaccaaggtggacaagaaggtggaacccaagagctgcgataagacccacacatgtcctccatgtcctgctccagaactgctcggcggcccttctgtgttcctgtttcctccaaagcctaaggacaccctgatgatcagcagaacccctgaagtgacctgcgtggtggtggatgtgtctcacgaggaccccgaagtgaagttcaattggtacgtggacggcgtggaagtgcacaacgccaagaccaagcctagagaggaacagtacaacagcacctacagagtggtgtccgtgctgaccgtgctgcaccaggattggctgaacggcaaagagtacaagtgcaaggtgtccaacaaggccctgcctgctcctatcgagaaaaccatcagcaaggccaagggccagcctagggaaccccaggtttacacccttcctccaagccgggatgagctgaccaagaaccaggtgtccctgacatgtctcgtgaagggcttctaccccagcgacattgccgtggaatgggagagcaatggccagcctgagaacaactacaagacaacccctcctgtgctggacagcgacggctcattcttcctgtacagcaagctgacagtcgacaagtccagatggcagcagggcaacgtgttcagttgcagcgtgctgcacgaggccctgcacagtcactacacccagaagtccctgagcctgtctcctggatagtga

SEQ ID NO: 525 - DNA, 2904 bp, synthetic construct
  source 1..2904: mol_type = other DNA
gacaccgtgatgacacagagccctctgagcctgcctgtgacacctggcgaacctgccagcatcagctgtagaagcagccagagcctgctgaacagcaacggctacaactacctggattggtacgtgcagaagcccggccagtctcctcagctgctgatctacctgggcagcaatagagccagcggcgtgcccgatagattttctggctctggcagcggcaccgacttcaccctgaagatctctagagtggaagccgaggacgtgggcgtgtactactgtatgcagcctctgcagacccctctgttcacatttggccctggcaccaaggtggaaatcaaaggaggtggtggctctggcggatctgggagtggtggcggaggctctgcttctggatctggacaagtgacactgagagagtctggccccgctctggtcaagcctacacagaccctgacactgacctgcaccttcagcggcttcagcctgtctactagaggcgtgtgcgtgtcctggatcagacagcctcctggaaaggccctggaatggctggccttcatcgactgggacgacgacaagtactacaacaccagcctgaaaacccggctgaccatcagcaaggacaccagcaagaaccaggtggtgctgaccatgaccaacgtgcaccctgtggataccgccacctactactgcgccagaatcagctctcaccacggctccagctggtgtaccaccttcgattattggggccagggcgctctcgtgacagtttctgctggcggaggtggatccggggagatcgtgctgacacagagccctggcacactgtcactgtctccaggcgaaacagccacactgagctgtagagccagccagagcttcagcagcgacctggcttggtatcagcagaagcctggacaggcccctcggctgttgatctatggcgcctcttctagagccacaggcatccccgatagattcagcggctctggcagcggcaccgatttcaccctgacaatcagcagactggaacccgccgacttcgccgtgtactactgtcagcagtacggcagcagccctcctgtgacatttggcggcggaacaaaggtggaaatcaaacgtacggtggccgctcccagcgtgttcatcttcccacctagcgacgagcagctgaagtccggcacagcctctgtcgtgtgcctgctgaacaacttctacccccgcgaggccaaagtgcagtggaaggtggacaacgccctgcagagcggcaacagccaggaaagcgtgaccgagcaggacagcaaggactccacctacagcctgagcagcaccctgacactgagcaaggccgactacgagaagcacaaggtgtacgcctgcgaagtgacccaccagggcctgtctagccccgtgaccaagagcttcaaccggggcgagtgtggaggcggaggatctggcggaggtggaagtggcggaggcggttctggtggtggtggctctggtggcggcggttcaggcggcggaggaagcggaggcggcggaagtggtggcggtggatctgaagtgcagctggtggaatcaggcggcggactgattcaacctggcggctctctgagactgtcttgtgctgcttctggcgtgatcgtgtcctacaactacatgaactgggtccgacaggctcccggcaaaggccttgaatgggtgtccgtgatctacagcggcggcagcaccttttacgccgattctgtgcggggcagattcaccatcagccgggacaacagcaagaacaccctgtacctgcagatgaacagcctgagagccgaggacaccgctgtgtactattgcgccagagatctgggacctgccggcgcttttgatatctggggcctgggcacaatggtcaccgtgtctagcgcttcgaccaagggcccatccgtgtttcctctggctcccagcagcaagtctacaagcggaggaacagccgctctgggctgcctggtcaaggattactttcccgagcctgtgaccgtgtcctggaattctggcgctctgacaagcggcgtgcacacctttccagctgtgctgcaaagcagcggcctgtactctctgagcagcgtggtcacagtgcctagctctagcctgggcacccagacctacatctgcaatgtgaaccacaagcctagcaacaccaaggtggacaagaaggtggaacccaagagctgcgataagacccacacatgtcctccatgtcctgctccagaactgctcggcggcccttctgtgttcctgtttcctccaaagcctaaggacaccctgatgatcagcagaacccctgaagtgacctgcgtggtggtggatgtgtctcacgaggaccccgaagtgaagttcaattggtacgtggacggcgtggaagtgcacaacgccaagaccaagcctagagaggaacagtacaacagcacctacagagtggtgtccgtgctgaccgtgctgcaccaggattggctgaacggcaaagagtacaagtgcaaggtgtccaacaaggccctgcctgctcctatcgagaaaaccatcagcaaggccaagggccagcctagggaaccccaggtttacacccttcctccaagccgggatgagctgaccaagaaccaggtgtccctgacatgtctcgtgaagggcttctaccccagcgacattgccgtggaatgggagagcaatggccagcctgagaacaactacaagacaacccctcctgtgctggacagcgacggctcattcttcctgtacagcaagctgacagtcgacaagtccagatggcagcagggcaacgtgttcagttgcagcgtgctgcacgaggccctgcacgctcactacacccagaagtccctgagcctgtctcctggatagtga

SEQ ID NO: 526 - DNA, 2922 bp, synthetic construct
  source 1..2922: mol_type = other DNA
gagatcgtgctgacacagagccctggcacactgtcactgtctccaggcgaaacagccacactgagctgtagagccagccagagcttcagcagcgacctggcttggtatcagcagaagcctggacaggcccctcggctgttgatctatggcgcctcttctagagccacaggcatccccgatagattcagcggctctggcagcggcaccgatttcaccctgacaatcagcagactggaacccgccgacttcgccgtgtactactgtcagcagtacggcagcagccctcctgtgacatttggcggcggaacaaaggtggaaatcaaacgtacggtggccgctcccagcgtgttcatcttcccacctagcgacgagcagctgaagtccggcacagcctctgtcgtgtgcctgctgaacaacttctacccccgcgaggccaaagtgcagtggaaggtggacaacgccctgcagagcggcaacagccaggaaagcgtgaccgagcaggacagcaaggactccacctacagcctgagcagcaccctgacactgagcaaggccgactacgagaagcacaaggtgtacgcctgcgaagtgacccaccagggcctgtctagccccgtgaccaagagcttcaaccggggcgagtgtggaggcggaggatctggcggaggtggaagtggcggaggcggttctggtggtggtggctctggtggcggcggttcaggcggcggaggaagcggaggcggcggaagtggtggcggtggatctgaagtgcagctggtggaatcaggcggcggactgattcaacctggcggctctctgagactgtcttgtgctgcttctggcgtgatcgtgtcctacaactacatgaactgggtccgacaggctcccggcaaaggccttgaatgggtgtccgtgatctacagcggcggcagcaccttttacgccgattctgtgcggggcagattcaccatcagccgggacaacagcaagaacaccctgtacctgcagatgaacagcctgagagccgaggacaccgctgtgtactattgcgccagagatctgggacctgccggcgcttttgatatctggggcctgggcacaatggtcaccgtgtctagcgcttcgaccaagggcccatccgtgtttcctctggctcccagcagcaagtctacaagcggaggaacagccgctctgggctgcctggtcaaggattactttcccgagcctgtgaccgtgtcctggaattctggcgctctgacaagcggcgtgcacacctttccagctgtgctgcaaagcagcggcctgtactctctgagcagcgtggtcacagtgcctagctctagcctgggcacccagacctacatctgcaatgtgaaccacaagcctagcaacaccaaggtggacaagaaggtggaacccaagagctgcggcggaggtggatccggggacaccgtgatgacacagagccctctgagcctgcctgtgacacctggcgaacctgccagcatcagctgtagaagcagccagagcctgctgaacagcaacggctacaactacctggattggtacgtgcagaagcccggccagtctcctcagctgctgatctacctgggcagcaatagagccagcggcgtgcccgatagattttctggctctggcagcggcaccgacttcaccctgaagatctctagagtggaagccgaggacgtgggcgtgtactactgtatgcagcctctgcagacccctctgttcacatttggccctggcaccaaggtggaaatcaaaggaggtggtggctctggcggatctgggagtggtggcggaggctctgcttctggatctggacaagtgacactgagagagtctggccccgctctggtcaagcctacacagaccctgacactgacctgcaccttcagcggcttcagcctgtctactagaggcgtgtgcgtgtcctggatcagacagcctcctggaaaggccctggaatggctggccttcatcgactgggacgacgacaagtactacaacaccagcctgaaaacccggctgaccatcagcaaggacaccagcaagaaccaggtggtgctgaccatgaccaacgtgcaccctgtggataccgccacctactactgcgccagaatcagctctcaccacggctccagctggtgtaccaccttcgattattggggccagggcgctctcgtgacagtttctgctgcttctggcggctccggagataagacccacacatgtcctccatgtcctgctccagaactgctcggcggcccttctgtgttcctgtttcctccaaagcctaaggacaccctgatgatcagcagaacccctgaagtgacctgcgtggtggtggatgtgtctcacgaggaccccgaagtgaagttcaattggtacgtggacggcgtggaagtgcacaacgccaagaccaagcctagagaggaacagtacaacagcacctacagagtggtgtccgtgctgaccgtgctgcaccaggattggctgaacggcaaagagtacaagtgcaaggtgtccaacaaggccctgcctgctcctatcgagaaaaccatcagcaaggccaagggccagcctagggaaccccaggtttacacccttcctccaagccgggatgagctgaccaagaaccaggtgtccctgacatgtctcgtgaagggcttctaccccagcgacattgccgtggaatgggagagcaatggccagcctgagaacaactacaagacaacccctcctgtgctggacagcgacggctcattcttcctgtacagcaagctgacagtcgacaagtccagatggcagcagggcaacgtgttcagttgcagcgtgctgcacgaggccctgcacagtcactacacccagaagtccctgagcctgtctcctggatagtga

SEQ ID NO: 527 - DNA, 2904 bp, synthetic construct
  source 1..2904: mol_type = other DNA
gagatcgtgctgacacagagccctggcacactgtcactgtctccaggcgaaacagccacactgagctgtagagccagccagagcttcagcagcgacctggcttggtatcagcagaagcctggacaggcccctcggctgttgatctatggcgcctcttctagagccacaggcatccccgatagattcagcggctctggcagcggcaccgatttcaccctgacaatcagcagactggaacccgccgacttcgccgtgtactactgtcagcagtacggcagcagccctcctgtgacatttggcggcggaacaaaggtggaaatcaaaggaggtggtggctctggcggatctgggagtggtggcggaggctctgcttctggatctggagaagtgcagctggtggaatcaggcggcggactgattcaacctggcggctctctgagactgtcttgtgctgcttctggcgtgatcgtgtcctacaactacatgaactgggtccgacaggctcccggcaaaggccttgaatgggtgtccgtgatctacagcggcggcagcaccttttacgccgattctgtgcggggcagattcaccatcagccgggacaacagcaagaacaccctgtacctgcagatgaacagcctgagagccgaggacaccgctgtgtactattgcgccagagatctgggacctgccggcgcttttgatatctggggcctgggcacaatggtcaccgtgtctagcggcggaggtggatccggggacaccgtgatgacacagagccctctgagcctgcctgtgacacctggcgaacctgccagcatcagctgtagaagcagccagagcctgctgaacagcaacggctacaactacctggattggtacgtgcagaagcccggccagtctcctcagctgctgatctacctgggcagcaatagagccagcggcgtgcccgatagattttctggctctggcagcggcaccgacttcaccctgaagatctctagagtggaagccgaggacgtgggcgtgtactactgtatgcagcctctgcagacccctctgttcacatttggccctggcaccaaggtggaaatcaaacgtacggtggccgctcccagcgtgttcatcttcccacctagcgacgagcagctgaagtccggcacagcctctgtcgtgtgcctgctgaacaacttctacccccgcgaggccaaagtgcagtggaaggtggacaacgccctgcagagcggcaacagccaggaaagcgtgaccgagcaggacagcaaggactccacctacagcctgagcagcaccctgacactgagcaaggccgactacgagaagcacaaggtgtacgcctgcgaagtgacccaccagggcctgtctagccccgtgaccaagagcttcaaccggggcgagtgtggaggcggaggatctggcggaggtggaagtggcggaggcggttctggtggtggtggctctggtggcggcggttcaggcggcggaggaagcggaggcggcggaagtggtggcggtggatctcaagtgacactgagagagtctggccccgctctggtcaagcctacacagaccctgacactgacctgcaccttcagcggcttcagcctgtctactagaggcgtgtgcgtgtcctggatcagacagcctcctggaaaggccctggaatggctggccttcatcgactgggacgacgacaagtactacaacaccagcctgaaaacccggctgaccatcagcaaggacaccagcaagaaccaggtggtgctgaccatgaccaacgtgcaccctgtggataccgccacctactactgcgccagaatcagctctcaccacggctccagctggtgtaccaccttcgattattggggccagggcgctctcgtgacagtttctgctgcttcgaccaagggcccatccgtgtttcctctggctcccagcagcaagtctacaagcggaggaacagccgctctgggctgcctggtcaaggattactttcccgagcctgtgaccgtgtcctggaattctggcgctctgacaagcggcgtgcacacctttccagctgtgctgcaaagcagcggcctgtactctctgagcagcgtggtcacagtgcctagctctagcctgggcacccagacctacatctgcaatgtgaaccacaagcctagcaacaccaaggtggacaagaaggtggaacccaagagctgcgataagacccacacatgtcctccatgtcctgctccagaactgctcggcggcccttctgtgttcctgtttcctccaaagcctaaggacaccctgatgatcagcagaacccctgaagtgacctgcgtggtggtggatgtgtctcacgaggaccccgaagtgaagttcaattggtacgtggacggcgtggaagtgcacaacgccaagaccaagcctagagaggaacagtacaacagcacctacagagtggtgtccgtgctgaccgtgctgcaccaggattggctgaacggcaaagagtacaagtgcaaggtgtccaacaaggccctgcctgctcctatcgagaaaaccatcagcaaggccaagggccagcctagggaaccccaggtttacacccttcctccatgccgggatgagctgaccaagaaccaggtgtccctgtggtgtctcgtgaagggcttctaccccagcgacattgccgtggaatgggagagcaatggccagcctgagaacaactacaagacaacccctcctgtgctggacagcgacggctcattcttcctgtacagcaagctgacagtcgacaagtccagatggcagcagggcaacgtgttcagttgcagcgtgctgcacgaggccctgcacagtcactacacccagaagtccctgagcctgtctcctggatagtga

SEQ ID NO: 528 - DNA, 2922 bp, synthetic construct
  source 1..2922: mol_type = other DNA
gagatcgtgctgacacagagccctggcacactgtcactgtctccaggcgaaacagccacactgagctgtagagccagccagagcttcagcagcgacctggcttggtatcagcagaagcctggacaggcccctcggctgttgatctatggcgcctcttctagagccacaggcatccccgatagattcagcggctctggcagcggcaccgatttcaccctgacaatcagcagactggaacccgccgacttcgccgtgtactactgtcagcagtacggcagcagccctcctgtgacatttggcggcggaacaaaggtggaaatcaaacgtacggtggccgctcccagcgtgttcatcttcccacctagcgacgagcagctgaagtccggcacagcctctgtcgtgtgcctgctgaacaacttctacccccgcgaggccaaagtgcagtggaaggtggacaacgccctgcagagcggcaacagccaggaaagcgtgaccgagcaggacagcaaggactccacctacagcctgagcagcaccctgacactgagcaaggccgactacgagaagcacaaggtgtacgcctgcgaagtgacccaccagggcctgtctagccccgtgaccaagagcttcaaccggggcgagtgtggaggcggaggatctggcggaggtggaagtggcggaggcggttctggtggtggtggctctggtggcggcggttcaggcggcggaggaagcggaggcggcggaagtggtggcggtggatctgaagtgcagctggtggaatcaggcggcggactgattcaacctggcggctctctgagactgtcttgtgctgcttctggcgtgatcgtgtcctacaactacatgaactgggtccgacaggctcccggcaaaggccttgaatgggtgtccgtgatctacagcggcggcagcaccttttacgccgattctgtgcggggcagattcaccatcagccgggacaacagcaagaacaccctgtacctgcagatgaacagcctgagagccgaggacaccgctgtgtactattgcgccagagatctgggacctgccggcgcttttgatatctggggcctgggcacaatggtcaccgtgtctagcgcttcgaccaagggcccatccgtgtttcctctggctcccagcagcaagtctacaagcggaggaacagccgctctgggctgcctggtcaaggattactttcccgagcctgtgaccgtgtcctggaattctggcgctctgacaagcggcgtgcacacctttccagctgtgctgcaaagcagcggcctgtactctctgagcagcgtggtcacagtgcctagctctagcctgggcacccagacctacatctgcaatgtgaaccacaagcctagcaacaccaaggtggacaagaaggtggaacccaagagctgcggcggaggtggatccggggacaccgtgatgacacagagccctctgagcctgcctgtgacacctggcgaacctgccagcatcagctgtagaagcagccagagcctgctgaacagcaacggctacaactacctggattggtacgtgcagaagcccggccagtctcctcagctgctgatctacctgggcagcaatagagccagcggcgtgcccgatagattttctggctctggcagcggcaccgacttcaccctgaagatctctagagtggaagccgaggacgtgggcgtgtactactgtatgcagcctctgcagacccctctgttcacatttggccctggcaccaaggtggaaatcaaaggaggtggtggctctggcggatctgggagtggtggcggaggctctgcttctggatctggacaagtgacactgagagagtctggccccgctctggtcaagcctacacagaccctgacactgacctgcaccttcagcggcttcagcctgtctactagaggcgtgtgcgtgtcctggatcagacagcctcctggaaaggccctggaatggctggccttcatcgactgggacgacgacaagtactacaacaccagcctgaaaacccggctgaccatcagcaaggacaccagcaagaaccaggtggtgctgaccatgaccaacgtgcaccctgtggataccgccacctactactgcgccagaatcagctctcaccacggctccagctggtgtaccaccttcgattattggggccagggcgctctcgtgacagtttctgctgcttctggcggctccggagataagacccacacatgtcctccatgtcctgctccagaactgctcggcggcccttctgtgttcctgtttcctccaaagcctaaggacaccctgatgatcagcagaacccctgaagtgacctgcgtggtggtggatgtgtctcacgaggaccccgaagtgaagttcaattggtacgtggacggcgtggaagtgcacaacgccaagaccaagcctagagaggaacagtacaacagcacctacagagtggtgtccgtgctgaccgtgctgcaccaggattggctgaacggcaaagagtacaagtgcaaggtgtccaacaaggccctgcctgctcctatcgagaaaaccatcagcaaggccaagggccagcctagggaaccccaggtttgtacccttcctccaagccgggatgagctgaccaagaaccaggtgtccctgagctgtgccgtgaagggcttctaccccagcgacattgccgtggaatgggagagcaatggccagcctgagaacaactacaagacaacccctcctgtgctggacagcgacggctcattcttcctggtgagcaagctgacagtcgacaagtccagatggcagcagggcaacgtgttcagttgcagcgtgctgcacgaggccctgcacagtcactacacccagaagtccctgagcctgtctcctggatagtga

SEQ ID NO: 529 - DNA, 2922 bp, synthetic construct
  source 1..2922: mol_type = other DNA
gagatcgtgctgacacagagccctggcacactgtcactgtctccaggcgaaacagccacactgagctgtagagccagccagagcttcagcagcgacctggcttggtatcagcagaagcctggacaggcccctcggctgttgatctatggcgcctcttctagagccacaggcatccccgatagattcagcggctctggcagcggcaccgatttcaccctgacaatcagcagactggaacccgccgacttcgccgtgtactactgtcagcagtacggcagcagccctcctgtgacatttggcggcggaacaaaggtggaaatcaaacgtacggtggccgctcccagcgtgttcatcttcccacctagcgacgagcagctgaagtccggcacagcctctgtcgtgtgcctgctgaacaacttctacccccgcgaggccaaagtgcagtggaaggtggacaacgccctgcagagcggcaacagccaggaaagcgtgaccgagcaggacagcaaggactccacctacagcctgagcagcaccctgacactgagcaaggccgactacgagaagcacaaggtgtacgcctgcgaagtgacccaccagggcctgtctagccccgtgaccaagagcttcaaccggggcgagtgtggaggcggaggatctggcggaggtggaagtggcggaggcggttctggtggtggtggctctggtggcggcggttcaggcggcggaggaagcggaggcggcggaagtggtggcggtggatctgaagtgcagctggtggaatcaggcggcggactgattcaacctggcggctctctgagactgtcttgtgctgcttctggcgtgatcgtgtcctacaactacatgaactgggtccgacaggctcccggcaaaggccttgaatgggtgtccgtgatctacagcggcggcagcaccttttacgccgattctgtgcggggcagattcaccatcagccgggacaacagcaagaacaccctgtacctgcagatgaacagcctgagagccgaggacaccgctgtgtactattgcgccagagatctgggacctgccggcgcttttgatatctggggcctgggcacaatggtcaccgtgtctagcgcttcgaccaagggcccatccgtgtttcctctggctcccagcagcaagtctacaagcggaggaacagccgctctgggctgcctggtcaaggattactttcccgagcctgtgaccgtgtcctggaattctggcgctctgacaagcggcgtgcacacctttccagctgtgctgcaaagcagcggcctgtactctctgagcagcgtggtcacagtgcctagctctagcctgggcacccagacctacatctgcaatgtgaaccacaagcctagcaacaccaaggtggacaagaaggtggaacccaagagctgcggcggaggtggatccggggacaccgtgatgacacagagccctctgagcctgcctgtgacacctggcgaacctgccagcatcagctgtagaagcagccagagcctgctgaacagcaacggctacaactacctggattggtacgtgcagaagcccggccagtctcctcagctgctgatctacctgggcagcaatagagccagcggcgtgcccgatagattttctggctctggcagcggcaccgacttcaccctgaagatctctagagtggaagccgaggacgtgggcgtgtactactgtatgcagcctctgcagacccctctgttcacatttggccctggcaccaaggtggaaatcaaaggaggtggtggctctggcggatctgggagtggtggcggaggctctgcttctggatctggacaagtgacactgagagagtctggccccgctctggtcaagcctacacagaccctgacactgacctgcaccttcagcggcttcagcctgtctactagaggcgtgtgcgtgtcctggatcagacagcctcctggaaaggccctggaatggctggccttcatcgactgggacgacgacaagtactacaacaccagcctgaaaacccggctgaccatcagcaaggacaccagcaagaaccaggtggtgctgaccatgaccaacgtgcaccctgtggataccgccacctactactgcgccagaatcagctctcaccacggctccagctggtgtaccaccttcgattattggggccagggcgctctcgtgacagtttctgctgcttctggcggctccggagataagacccacacatgtcctccatgtcctgctccagaactgctcggcggcccttctgtgttcctgtttcctccaaagcctaaggacaccctgatgatcagcagaacccctgaagtgacctgcgtggtggtggatgtgtctcacgaggaccccgaagtgaagttcaattggtacgtggacggcgtggaagtgcacaacgccaagaccaagcctagagaggaacagtacaacagcacctacagagtggtgtccgtgctgaccgtgctgcaccaggattggctgaacggcaaagagtacaagtgcaaggtgtccaacaaggccctgcctgctcctatcgagaaaaccatcagcaaggccaagggccagcctagggaaccccaggtttacacccttcctccatgccgggatgagctgaccaagaaccaggtgtccctgtggtgtctcgtgaagggcttctaccccagcgacattgccgtggaatgggagagcaatggccagcctgagaacaactacaagacaacccctcctgtgctggacagcgacggctcattcttcctgtacagcaagctgacagtcgacaagtccagatggcagcagggcaacgtgttcagttgcagcgtgctgcacgaggccctgcacagtcactacacccagaagtccctgagcctgtctcctggatagtga

SEQ ID NO: 530 - DNA, 2904 bp, synthetic construct
  source 1..2904: mol_type = other DNA
gagatcgtgctgacacagagccctggcacactgtcactgtctccaggcgaaacagccacactgagctgtagagccagccagagcttcagcagcgacctggcttggtatcagcagaagcctggacaggcccctcggctgttgatctatggcgcctcttctagagccacaggcatccccgatagattcagcggctctggcagcggcaccgatttcaccctgacaatcagcagactggaacccgccgacttcgccgtgtactactgtcagcagtacggcagcagccctcctgtgacatttggcggcggaacaaaggtggaaatcaaaggaggtggtggctctggcggatctgggagtggtggcggaggctctgcttctggatctggagaagtgcagctggtggaatcaggcggcggactgattcaacctggcggctctctgagactgtcttgtgctgcttctggcgtgatcgtgtcctacaactacatgaactgggtccgacaggctcccggcaaaggccttgaatgggtgtccgtgatctacagcggcggcagcaccttttacgccgattctgtgcggggcagattcaccatcagccgggacaacagcaagaacaccctgtacctgcagatgaacagcctgagagccgaggacaccgctgtgtactattgcgccagagatctgggacctgccggcgcttttgatatctggggcctgggcacaatggtcaccgtgtctagcggcggaggtggatccggggacaccgtgatgacacagagccctctgagcctgcctgtgacacctggcgaacctgccagcatcagctgtagaagcagccagagcctgctgaacagcaacggctacaactacctggattggtacgtgcagaagcccggccagtctcctcagctgctgatctacctgggcagcaatagagccagcggcgtgcccgatagattttctggctctggcagcggcaccgacttcaccctgaagatctctagagtggaagccgaggacgtgggcgtgtactactgtatgcagcctctgcagacccctctgttcacatttggccctggcaccaaggtggaaatcaaacgtacggtggccgctcccagcgtgttcatcttcccacctagcgacgagcagctgaagtccggcacagcctctgtcgtgtgcctgctgaacaacttctacccccgcgaggccaaagtgcagtggaaggtggacaacgccctgcagagcggcaacagccaggaaagcgtgaccgagcaggacagcaaggactccacctacagcctgagcagcaccctgacactgagcaaggccgactacgagaagcacaaggtgtacgcctgcgaagtgacccaccagggcctgtctagccccgtgaccaagagcttcaaccggggcgagtgtggaggcggaggatctggcggaggtggaagtggcggaggcggttctggtggtggtggctctggtggcggcggttcaggcggcggaggaagcggaggcggcggaagtggtggcggtggatctcaagtgacactgagagagtctggccccgctctggtcaagcctacacagaccctgacactgacctgcaccttcagcggcttcagcctgtctactagaggcgtgtgcgtgtcctggatcagacagcctcctggaaaggccctggaatggctggccttcatcgactgggacgacgacaagtactacaacaccagcctgaaaacccggctgaccatcagcaaggacaccagcaagaaccaggtggtgctgaccatgaccaacgtgcaccctgtggataccgccacctactactgcgccagaatcagctctcaccacggctccagctggtgtaccaccttcgattattggggccagggcgctctcgtgacagtttctgctgcttcgaccaagggcccatccgtgtttcctctggctcccagcagcaagtctacaagcggaggaacagccgctctgggctgcctggtcaaggattactttcccgagcctgtgaccgtgtcctggaattctggcgctctgacaagcggcgtgcacacctttccagctgtgctgcaaagcagcggcctgtactctctgagcagcgtggtcacagtgcctagctctagcctgggcacccagacctacatctgcaatgtgaaccacaagcctagcaacaccaaggtggacaagaaggtggaacccaagagctgcgataagacccacacatgtcctccatgtcctgctccagaactgctcggcggcccttctgtgttcctgtttcctccaaagcctaaggacaccctgatgatcagcagaacccctgaagtgacctgcgtggtggtggatgtgtctcacgaggaccccgaagtgaagttcaattggtacgtggacggcgtggaagtgcacaacgccaagaccaagcctagagaggaacagtacaacagcacctacagagtggtgtccgtgctgaccgtgctgcaccaggattggctgaacggcaaagagtacaagtgcaaggtgtccaacaaggccctgcctgctcctatcgagaaaaccatcagcaaggccaagggccagcctagggaaccccaggtttgtacccttcctccaagccgggatgagctgaccaagaaccaggtgtccctgagctgtgccgtgaagggcttctaccccagcgacattgccgtggaatgggagagcaatggccagcctgagaacaactacaagacaacccctcctgtgctggacagcgacggctcattcttcctggtgagcaagctgacagtcgacaagtccagatggcagcagggcaacgtgttcagttgcagcgtgctgcacgaggccctgcacagtcactacacccagaagtccctgagcctgtctcctggatagtga

SEQ ID NO: 531 - DNA, 2820 bp, synthetic construct
  source 1..2820: mol_type = other DNA
cagaccgtggtcacacaagagcctagctttagcgtgtcccctggcggcacagtgacactgacatgtggactttctagcggatctgtgtccaccgcctactttcccagctggtatcaacagaccccaggccaggcacctcggacactgatctacggcaccaacacaagatccagcggcgtgcccgataggttcagcggatctatcctgggcaacaaggccgcactgactatcacaggcgcccaggccgatgacgagagcgattactactgcgtgctgtacatgggcagaggcatcgtggtttttggcggaggcaccaagctgacagtgcttcgtacggtggccgctcccagcgtgttcatcttcccacctagcgacgagcagctgaagtccggcacagcctctgtcgtgtgcctgctgaacaacttctacccccgcgaggccaaagtgcagtggaaggtggacaacgccctgcagagcggcaacagccaggaaagcgtgaccgagcaggacagcaaggactccacctacagcctgagcagcaccctgacactgagcaaggccgactacgagaagcacaaggtgtacgcctgcgaagtgacccaccagggcctgtctagccccgtgaccaagagcttcaaccggggcgagtgtggcggcggaggatctggcggaggtggaagcggaggcggtggaagcgagatcgtgctgacacagagccctggcacactgtcactgtctccaggcgaaacagccacactgagctgtagagccagccagagcttcagcagcgacctggcttggtatcagcagaagcctggacaggcccctcggctgttgatctatggcgcctcttctagagccacaggcatccccgatagattcagcggctctggcagcggcaccgatttcaccctgacaatcagcagactggaacccgccgacttcgccgtgtactactgtcagcagtacggcagcagccctcctgtgacatttggcggcggaacaaaggtggaaatcaaaggaggtggtggctctggcggatctgggagtggtggcggaggctctgcttctggatctggagaagtgcagctggtggaatcaggcggcggactgattcaacctggcggctctctgagactgtcttgtgctgcttctggcgtgatcgtgtcctacaactacatgaactgggtccgacaggctcccggcaaaggccttgaatgggtgtccgtgatctacagcggcggcagcaccttttacgccgattctgtgcggggcagattcaccatcagccgggacaacagcaagaacaccctgtacctgcagatgaacagcctgagagccgaggacaccgctgtgtactattgcgccagagatctgggacctgccggcgcttttgatatctggggcctgggcacaatggtcaccgtgtctagcggaggcagctccgggcaggtccagcttgttgaaagtggcggaggggttgtgcaacccggaagatctctgagactgtcttgcgccgccagcggctttacactgtcctcttatggaatgcattgggttcgacaagctcccggcaagggactcgaatgggttgcagtgatttcctacgatggctccaacaagtattatgtcgactccgtgaaaggccggttcacaatctccagagacaactccaagaatacgctctatctccagatgaacagcctgcgggccgaagatacagccgtgtattactgcgctcgcggatgggcttactgggaactgctccctgattactattacggaatggacgtctggggacagggaacaaccgtgaccgttagctctgcttcgaccaagggcccatccgtgtttcctctggctcccagcagcaagtctacaagcggaggaacagccgctctgggctgcctggtcaaggattactttcccgagcctgtgaccgtgtcctggaattctggcgctctgacaagcggcgtgcacacctttccagctgtgctgcaaagcagcggcctgtactctctgagcagcgtggtcacagtgcctagctctagcctgggcacccagacctacatctgcaatgtgaaccacaagcctagcaacaccaaggtggacaagaaggtggaacccaagagctgcgataagacccacacatgtcctccatgtcctgctccagaactgctcggcggcccttctgtgttcctgtttcctccaaagcctaaggacaccctgatgatcagcagaacccctgaagtgacctgcgtggtggtggatgtgtctcacgaggaccccgaagtgaagttcaattggtacgtggacggcgtggaagtgcacaacgccaagaccaagcctagagaggaacagtacaacagcacctacagagtggtgtccgtgctgaccgtgctgcaccaggattggctgaacggcaaagagtacaagtgcaaggtgtccaacaaggccctgcctgctcctatcgagaaaaccatcagcaaggccaagggccagcctagggaaccccaggtttacacccttcctccatgccgggatgagctgaccaagaaccaggtgtccctgtggtgtctcgtgaagggcttctaccccagcgacattgccgtggaatgggagagcaatggccagcctgagaacaactacaagacaacccctcctgtgctggacagcgacggctcattcttcctgtacagcaagctgacagtcgacaagtccagatggcagcagggcaacgtgttcagttgcagcgtgctgcacgaggccctgcacagtcactacacccagaagtccctgagcctgtctcctggatagtga

SEQ ID NO: 532 - DNA, 2826 bp, synthetic construct; identical to SEQ ID NO: 507
  source 1..2826: mol_type = other DNA

SEQ ID NO: 533 - DNA, 2820 bp, synthetic construct; identical to SEQ ID NO: 531
  source 1..2820: mol_type = other DNA

SEQ ID NO: 534 - DNA, 2826 bp, synthetic construct; identical to SEQ ID NO: 509
  source 1..2826: mol_type = other DNA

SEQ ID NO: 535 - DNA, 2820 bp, synthetic construct
  source 1..2820: mol_type = other DNA
gagatcgtgctgacacagagccctggcacactgtcactgtctccaggcgaaacagccacactgagctgtagagccagccagagcttcagcagcgacctggcttggtatcagcagaagcctggacaggcccctcggctgttgatctatggcgcctcttctagagccacaggcatccccgatagattcagcggctctggcagcggcaccgatttcaccctgacaatcagcagactggaacccgccgacttcgccgtgtactactgtcagcagtacggcagcagccctcctgtgacatttggcggcggaacaaaggtggaaatcaaacgtacggtggccgctcccagcgtgttcatcttcccacctagcgacgagcagctgaagtccggcacagcctctgtcgtgtgcctgctgaacaacttctacccccgcgaggccaaagtgcagtggaaggtggacaacgccctgcagagcggcaacagccaggaaagcgtgaccgagcaggacagcaaggactccacctacagcctgagcagcaccctgacactgagcaaggccgactacgagaagcacaaggtgtacgcctgcgaagtgacccaccagggcctgtctagccccgtgaccaagagcttcaaccggggcgagtgtggcggcggaggatctggcggaggtggaagcggaggcggtggaagccagaccgtggtcacacaagagcctagctttagcgtgtcccctggcggcacagtgacactgacatgtggactttctagcggatctgtgtccaccgcctactttcccagctggtatcaacagaccccaggccaggcacctcggacactgatctacggcaccaacacaagatccagcggcgtgcccgataggttcagcggatctatcctgggcaacaaggccgcactgactatcacaggcgcccaggccgatgacgagagcgattactactgcgtgctgtacatgggcagaggcatcgtggtttttggcggaggcaccaagctgacagtgcttggaggtggtggctctggcggatctgggagtggtggcggaggctctgcttctggatctggacaggtccagcttgttgaaagtggcggaggggttgtgcaacccggaagatctctgagactgtcttgcgccgccagcggctttacactgtcctcttatggaatgcattgggttcgacaagctcccggcaagggactcgaatgggttgcagtgatttcctacgatggctccaacaagtattatgtcgactccgtgaaaggccggttcacaatctccagagacaactccaagaatacgctctatctccagatgaacagcctgcgggccgaagatacagccgtgtattactgcgctcgcggatgggcttactgggaactgctccctgattactattacggaatggacgtctggggacagggaacaaccgtgaccgttagctctggaggcagctccggggaagtgcagctggtggaatcaggcggcggactgattcaacctggcggctctctgagactgtcttgtgctgcttctggcgtgatcgtgtcctacaactacatgaactgggtccgacaggctcccggcaaaggccttgaatgggtgtccgtgatctacagcggcggcagcaccttttacgccgattctgtgcggggcagattcaccatcagccgggacaacagcaagaacaccctgtacctgcagatgaacagcctgagagccgaggacaccgctgtgtactattgcgccagagatctgggacctgccggcgcttttgatatctggggcctgggcacaatggtcaccgtgtctagcgcttcgaccaagggcccatccgtgtttcctctggctcccagcagcaagtctacaagcggaggaacagccgctctgggctgcctggtcaaggattactttcccgagcctgtgaccgtgtcctggaattctggcgctctgacaagcggcgtgcacacctttccagctgtgctgcaaagcagcggcctgtactctctgagcagcgtggtcacagtgcctagctctagcctgggcacccagacctacatctgcaatgtgaaccacaagcctagcaacaccaaggtggacaagaaggtggaacccaagagctgcgataagacccacacatgtcctccatgtcctgctccagaactgctcggcggcccttctgtgttcctgtttcctccaaagcctaaggacaccctgatgatcagcagaacccctgaagtgacctgcgtggtggtggatgtgtctcacgaggaccccgaagtgaagttcaattggtacgtggacggcgtggaagtgcacaacgccaagaccaagcctagagaggaacagtacaacagcacctacagagtggtgtccgtgctgaccgtgctgcaccaggattggctgaacggcaaagagtacaagtgcaaggtgtccaacaaggccctgcctgctcctatcgagaaaaccatcagcaaggccaagggccagcctagggaaccccaggtttacacccttcctccatgccgggatgagctgaccaagaaccaggtgtccctgtggtgtctcgtgaagggcttctaccccagcgacattgccgtggaatgggagagcaatggccagcctgagaacaactacaagacaacccctcctgtgctggacagcgacggctcattcttcctgtacagcaagctgacagtcgacaagtccagatggcagcagggcaacgtgttcagttgcagcgtgctgcacgaggccctgcacagtcactacacccagaagtccctgagcctgtctcctggatagtga

SEQ ID NO: 536 - DNA, 2826 bp, synthetic construct; identical to SEQ ID NO: 507
  source 1..2826: mol_type = other DNA

SEQ ID NO: 537 - DNA, 2820 bp, synthetic construct
  source 1..2820: mol_type = other DNA
gagatcgtgctgacacagagccctggcacactgtcactgtctccaggcgaaacagccacactgagctgtagagccagccagagcttcagcagcgacctggcttggtatcagcagaagcctggacaggcccctcggctgttgatctatggcgcctcttctagagccacaggcatccccgatagattcagcggctctggcagcggcaccgatttcaccctgacaatcagcagactggaacccgccgacttcgccgtgtactactgtcagcagtacggcagcagccctcctgtgacatttggcggcggaacaaaggtggaaatcaaacgtacggtggccgctcccagcgtgttcatcttcccacctagcgacgagcagctgaagtccggcacagcctctgtcgtgtgcctgctgaacaacttctacccccgcgaggccaaagtgcagtggaaggtggacaacgccctgcagagcggcaacagccaggaaagcgtgaccgagcaggacagcaaggactccacctacagcctgagcagcaccctgacactgagcaaggccgactacgagaagcacaaggtgtacgcctgcgaagtgacccaccagggcctgtctagccccgtgaccaagagcttcaaccggggcgagtgtggcggcggaggatctggcggaggtggaagcggaggcggtggaagccagaccgtggtcacacaagagcctagctttagcgtgtcccctggcggcacagtgacactgacatgtggactttctagcggatctgtgtccaccgcctactttcccagctggtatcaacagaccccaggccaggcacctcggacactgatctacggcaccaacacaagatccagcggcgtgcccgataggttcagcggatctatcctgggcaacaaggccgcactgactatcacaggcgcccaggccgatgacgagagcgattactactgcgtgctgtacatgggcagaggcatcgtggtttttggcggaggcaccaagctgacagtgcttggaggtggtggctctggcggatctgggagtggtggcggaggctctgcttctggatctggacaggtccagcttgttgaaagtggcggaggggttgtgcaacccggaagatctctgagactgtcttgcgccgccagcggctttacactgtcctcttatggaatgcattgggttcgacaagctcccggcaagggactcgaatgggttgcagtgatttcctacgatggctccaacaagtattatgtcgactccgtgaaaggccggttcacaatctccagagacaactccaagaatacgctctatctccagatgaacagcctgcgggccgaagatacagccgtgtattactgcgctcgcggatgggcttactgggaactgctccctgattactattacggaatggacgtctggggacagggaacaaccgtgaccgttagctctggaggcagctccggggaagtgcagctggtggaatcaggcggcggactgattcaacctggcggctctctgagactgtcttgtgctgcttctggcgtgatcgtgtcctacaactacatgaactgggtccgacaggctcccggcaaaggccttgaatgggtgtccgtgatctacagcggcggcagcaccttttacgccgattctgtgcggggcagattcaccatcagccgggacaacagcaagaacaccctgtacctgcagatgaacagcctgagagccgaggacaccgctgtgtactattgcgccagagatctgggacctgccggcgcttttgatatctggggcctgggcacaatggtcaccgtgtctagcgcttcgaccaagggcccatccgtgtttcctctggctcccagcagcaagtctacaagcggaggaacagccgctctgggctgcctggtcaaggattactttcccgagcctgtgaccgtgtcctggaattctggcgctctgacaagcggcgtgcacacctttccagctgtgctgcaaagcagcggcctgtactctctgagcagcgtggtcacagtgcctagctctagcctgggcacccagacctacatctgcaatgtgaaccacaagcctagcaacaccaaggtggacaagaaggtggaacccaagagctgcgataagacccacacatgtcctccatgtcctgctccagaactgctcggcggcccttctgtgttcctgtttcctccaaagcctaaggacaccctgatgatcagcagaacccctgaagtgacctgcgtggtggtggatgtgtctcacgaggaccccgaagtgaagttcaattggtacgtggacggcgtggaagtgcacaacgccaagaccaagcctagagaggaacagtacaacagcacctacagagtggtgtccgtgctgaccgtgctgcaccaggattggctgaacggcaaagagtacaagtgcaaggtgtccaacaaggccctgcctgctcctatcgagaaaaccatcagcaaggccaagggccagcctagggaaccccaggtttacacccttcctccatgccgggatgagctgaccaagaaccaggtgtccctgtggtgtctcgtgaagggcttctaccccagcgacattgccgtggaatgggagagcaatggccagcctgagaacaactacaagacaacccctcctgtgctggacagcgacggctcattcttcctgtacagcaagctgacagtcgacaagtccagatggcagcagggcaacgtgttcagttgcagcgtgctgcacgaggccctgcacgctcactacacccagaagtccctgagcctgtctcctggatagtga

SEQ ID NO: 538 - DNA, 2826 bp, synthetic construct
  source 1..2826: mol_type = other DNA
gagatcgtgctgacacagagccctggcacactgtcactgtctccaggcgaaacagccacactgagctgtagagccagccagagcttcagcagcgacctggcttggtatcagcagaagcctggacaggcccctcggctgttgatctatggcgcctcttctagagccacaggcatccccgatagattcagcggctctggcagcggcaccgatttcaccctgacaatcagcagactggaacccgccgacttcgccgtgtactactgtcagcagtacggcagcagccctcctgtgacatttggcggcggaacaaaggtggaaatcaaacgtacggtggccgctcccagcgtgttcatcttcccacctagcgacgagcagctgaagtccggcacagcctctgtcgtgtgcctgctgaacaacttctacccccgcgaggccaaagtgcagtggaaggtggacaacgccctgcagagcggcaacagccaggaaagcgtgaccgagcaggacagcaaggactccacctacagcctgagcagcaccctgacactgagcaaggccgactacgagaagcacaaggtgtacgcctgcgaagtgacccaccagggcctgtctagccccgtgaccaagagcttcaaccggggcgagtgtggcggcggaggatctggcggaggtggaagcggaggcggtggaagcgacaccgtgatgacacagagccctctgagcctgcctgtgacacctggcgaacctgccagcatcagctgtagaagcagccagagcctgctgaacagcaacggctacaactacctggattggtacgtgcagaagcccggccagtctcctcagctgctgatctacctgggcagcaatagagccagcggcgtgcccgatagattttctggctctggcagcggcaccgacttcaccctgaagatctctagagtggaagccgaggacgtgggcgtgtactactgtatgcagcctctgcagacccctctgttcacatttggccctggcaccaaggtggaaatcaaaggaggtggtggctctggcggatctgggagtggtggcggaggctctgcttctggatctggacaagtgacactgagagagtctggccccgctctggtcaagcctacacagaccctgacactgacctgcaccttcagcggcttcagcctgtctactagaggcgtgtgcgtgtcctggatcagacagcctcctggaaaggccctggaatggctggccttcatcgactgggacgacgacaagtactacaacaccagcctgaaaacccggctgaccatcagcaaggacaccagcaagaaccaggtggtgctgaccatgaccaacgtgcaccctgtggataccgccacctactactgcgccagaatcagctctcaccacggctccagctggtgtaccaccttcgattattggggccagggcgctctcgtgacagtttctgctggaggcagctccggggaagtgcagctggtggaatcaggcggcggactgattcaacctggcggctctctgagactgtcttgtgctgcttctggcgtgatcgtgtcctacaactacatgaactgggtccgacaggctcccggcaaaggccttgaatgggtgtccgtgatctacagcggcggcagcaccttttacgccgattctgtgcggggcagattcaccatcagccgggacaacagcaagaacaccctgtacctgcagatgaacagcctgagagccgaggacaccgctgtgtactattgcgccagagatctgggacctgccggcgcttttgatatctggggcctgggcacaatggtcaccgtgtctagcgcttcgaccaagggcccatccgtgtttcctctggctcccagcagcaagtctacaagcggaggaacagccgctctgggctgcctggtcaaggattactttcccgagcctgtgaccgtgtcctggaattctggcgctctgacaagcggcgtgcacacctttccagctgtgctgcaaagcagcggcctgtactctctgagcagcgtggtcacagtgcctagctctagcctgggcacccagacctacatctgcaatgtgaaccacaagcctagcaacaccaaggtggacaagaaggtggaacccaagagctgcgataagacccacacatgtcctccatgtcctgctccagaactgctcggcggcccttctgtgttcctgtttcctccaaagcctaaggacaccctgatgatcagcagaacccctgaagtgacctgcgtggtggtggatgtgtctcacgaggaccccgaagtgaagttcaattggtacgtggacggcgtggaagtgcacaacgccaagaccaagcctagagaggaacagtacaacagcacctacagagtggtgtccgtgctgaccgtgctgcaccaggattggctgaacggcaaagagtacaagtgcaaggtgtccaacaaggccctgcctgctcctatcgagaaaaccatcagcaaggccaagggccagcctagggaaccccaggtttgtacccttcctccaagccgggatgagctgaccaagaaccaggtgtccctgagctgtgccgtgaagggcttctaccccagcgacattgccgtggaatgggagagcaatggccagcctgagaacaactacaagacaacccctcctgtgctggacagcgacggctcattcttcctggtgagcaagctgacagtcgacaagtccagatggcagcagggcaacgtgttcagttgcagcgtgctgcacgaggccctgcacgctcactacacccagaagtccctgagcctgtctcctggatagtga

SEQ ID NO: 539 - DNA, 2820 bp, synthetic construct; identical to SEQ ID NO: 535
  source 1..2820: mol_type = other DNA

SEQ ID NO: 540 - DNA, 2826 bp, synthetic construct; identical to SEQ ID NO: 509
  source 1..2826: mol_type = other DNA

SEQ ID NO: 541 - DNA, 2865 bp, synthetic construct
  source 1..2865: mol_type = other DNA
cagaccgtggtcacacaagagcctagctttagcgtgtcccctggcggcacagtgacactgacatgtggactttctagcggatctgtgtccaccgcctactttcccagctggtatcaacagaccccaggccaggcacctcggacactgatctacggcaccaacacaagatccagcggcgtgcccgataggttcagcggatctatcctgggcaacaaggccgcactgactatcacaggcgcccaggccgatgacgagagcgattactactgcgtgctgtacatgggcagaggcatcgtggtttttggcggaggcaccaagctgacagtgcttggcggatcctctggagagatcgtgctgacacagagccctggcacactgtcactgtctccaggcgaaacagccacactgagctgtagagccagccagagcttcagcagcgacctggcttggtatcagcagaagcctggacaggcccctcggctgttgatctatggcgcctcttctagagccacaggcatccccgatagattcagcggctctggcagcggcaccgatttcaccctgacaatcagcagactggaacccgccgacttcgccgtgtactactgtcagcagtacggcagcagccctcctgtgacatttggcggcggaacaaaggtggaaatcaaaggaggtggtggctctggcggatctgggagtggtggcggaggctctgcttctggatctggagaagtgcagctggtggaatcaggcggcggactgattcaacctggcggctctctgagactgtcttgtgctgcttctggcgtgatcgtgtcctacaactacatgaactgggtccgacaggctcccggcaaaggccttgaatgggtgtccgtgatctacagcggcggcagcaccttttacgccgattctgtgcggggcagattcaccatcagccgggacaacagcaagaacaccctgtacctgcagatgaacagcctgagagccgaggacaccgctgtgtactattgcgccagagatctgggacctgccggcgcttttgatatctggggcctgggcacaatggtcaccgtgtctagcggaggcagctccgggcaggtccagcttgttgaaagtggcggaggggttgtgcaacccggaagatctctgagactgtcttgcgccgccagcggctttacactgtcctcttatggaatgcattgggttcgacaagctcccggcaagggactcgaatgggttgcagtgatttcctacgatggctccaacaagtattatgtcgactccgtgaaaggccggttcacaatctccagagacaactccaagaatacgctctatctccagatgaacagcctgcgggccgaagatacagccgtgtattactgcgctcgcggatgggcttactgggaactgctccctgattactattacggaatggacgtctggggacagggaacaaccgtgaccgttagctctcgtacggtggccgctcccagcgtgttcatcttcccacctagcgacgagcagctgaagtccggcacagcctctgtcgtgtgcctgctgaacaacttctacccccgcgaggccaaagtgcagtggaaggtggacaacgccctgcagagcggcaacagccaggaaagcgtgaccgagcaggacagcaaggactccacctacagcctgagcagcaccctgacactgagcaaggccgactacgagaagcacaaggtgtacgcctgcgaagtgacccaccagggcctgtctagccccgtgaccaagagcttcaaccggggcgagtgtggaggcggaggatctggcggatctggaagtggcggaggtggtagtggcggcggtggatctgcttctggctctggcgcttcgaccaagggcccatccgtgtttcctctggctcccagcagcaagtctacaagcggaggaacagccgctctgggctgcctggtcaaggattactttcccgagcctgtgaccgtgtcctggaattctggcgctctgacaagcggcgtgcacacctttccagctgtgctgcaaagcagcggcctgtactctctgagcagcgtggtcacagtgcctagctctagcctgggcacccagacctacatctgcaatgtgaaccacaagcctagcaacaccaaggtggacaagaaggtggaacccaagagctgcgataagacccacacatgtcctccatgtcctgctccagaactgctcggcggcccttctgtgttcctgtttcctccaaagcctaaggacaccctgatgatcagcagaacccctgaagtgacctgcgtggtggtggatgtgtctcacgaggaccccgaagtgaagttcaattggtacgtggacggcgtggaagtgcacaacgccaagaccaagcctagagaggaacagtacaacagcacctacagagtggtgtccgtgctgaccgtgctgcaccaggattggctgaacggcaaagagtacaagtgcaaggtgtccaacaaggccctgcctgctcctatcgagaaaaccatcagcaaggccaagggccagcctagggaaccccaggtttacacccttcctccatgccgggatgagctgaccaagaaccaggtgtccctgtggtgtctcgtgaagggcttctaccccagcgacattgccgtggaatgggagagcaatggccagcctgagaacaactacaagacaacccctcctgtgctggacagcgacggctcattcttcctgtacagcaagctgacagtcgacaagtccagatggcagcagggcaacgtgttcagttgcagcgtgctgcacgaggccctgcacagtcactacacccagaagtccctgagcctgtctcctggatagtga

SEQ ID NO: 542 - DNA, 2871 bp, synthetic construct; identical to SEQ ID NO: 515
  source 1..2871: mol_type = other DNA

SEQ ID NO: 543 - DNA, 2865 bp, synthetic construct
  source 1..2865: mol_type = other DNA
cagaccgtggtcacacaagagcctagctttagcgtgtcccctggcggcacagtgacactgacatgtggactttctagcggatctgtgtccaccgcctactttcccagctggtatcaacagaccccaggccaggcacctcggacactgatctacggcaccaacacaagatccagcggcgtgcccgataggttcagcggatctatcctgggcaacaaggccgcactgactatcacaggcgcccaggccgatgacgagagcgattactactgcgtgctgtacatgggcagaggcatcgtggtttttggcggaggcaccaagctgacagtgcttggcggatcctctggagagatcgtgctgacacagagccctggcacactgtcactgtctccaggcgaaacagccacactgagctgtagagccagccagagcttcagcagcgacctggcttggtatcagcagaagcctggacaggcccctcggctgttgatctatggcgcctcttctagagccacaggcatccccgatagattcagcggctctggcagcggcaccgatttcaccctgacaatcagcagactggaacccgccgacttcgccgtgtactactgtcagcagtacggcagcagccctcctgtgacatttggcggcggaacaaaggtggaaatcaaaggaggtggtggctctggcggatctgggagtggtggcggaggctctgcttctggatctggagaagtgcagctggtggaatcaggcggcggactgattcaacctggcggctctctgagactgtcttgtgctgcttctggcgtgatcgtgtcctacaactacatgaactgggtccgacaggctcccggcaaaggccttgaatgggtgtccgtgatctacagcggcggcagcaccttttacgccgattctgtgcggggcagattcaccatcagccgggacaacagcaagaacaccctgtacctgcagatgaacagcctgagagccgaggacaccgctgtgtactattgcgccagagatctgggacctgccggcgcttttgatatctggggcctgggcacaatggtcaccgtgtctagcggaggcagctccgggcaggtccagcttgttgaaagtggcggaggggttgtgcaacccggaagatctctgagactgtcttgcgccgccagcggctttacactgtcctcttatggaatgcattgggttcgacaagctcccggcaagggactcgaatgggttgcagtgatttcctacgatggctccaacaagtattatgtcgactccgtgaaaggccggttcacaatctccagagacaactccaagaatacgctctatctccagatgaacagcctgcgggccgaagatacagccgtgtattactgcgctcgcggatgggcttactgggaactgctccctgattactattacggaatggacgtctggggacagggaacaaccgtgaccgttagctctcgtacggtggccgctcccagcgtgttcatcttcccacctagcgacgagcagctgaagtccggcacagcctctgtcgtgtgcctgctgaacaacttctacccccgcgaggccaaagtgcagtggaaggtggacaacgccctgcagagcggcaacagccaggaaagcgtgaccgagcaggacagcaaggactccacctacagcctgagcagcaccctgacactgagcaaggccgactacgagaagcacaaggtgtacgcctgcgaagtgacccaccagggcctgtctagccccgtgaccaagagcttcaaccggggcgagtgtggaggcggaggatctggcggatctggaagtggcggaggtggtagtggcggcggtggatctgcttctggctctggcgcttcgaccaagggcccatccgtgtttcctctggctcccagcagcaagtctacaagcggaggaacagccgctctgggctgcctggtcaaggattactttcccgagcctgtgaccgtgtcctggaattctggcgctctgacaagcggcgtgcacacctttccagctgtgctgcaaagcagcggcctgtactctctgagcagcgtggtcacagtgcctagctctagcctgggcacccagacctacatctgcaatgtgaaccacaagcctagcaacaccaaggtggacaagaaggtggaacccaagagctgcgataagacccacacatgtcctccatgtcctgctccagaactgctcggcggcccttctgtgttcctgtttcctccaaagcctaaggacaccctgatgatcagcagaacccctgaagtgacctgcgtggtggtggatgtgtctcacgaggaccccgaagtgaagttcaattggtacgtggacggcgtggaagtgcacaacgccaagaccaagcctagagaggaacagtacaacagcacctacagagtggtgtccgtgctgaccgtgctgcaccaggattggctgaacggcaaagagtacaagtgcaaggtgtccaacaaggccctgcctgctcctatcgagaaaaccatcagcaaggccaagggccagcctagggaaccccaggtttacacccttcctccatgccgggatgagctgaccaagaaccaggtgtccctgtggtgtctcgtgaagggcttctaccccagcgacattgccgtggaatgggagagcaatggccagcctgagaacaactacaagacaacccctcctgtgctggacagcgacggctcattcttcctgtacagcaagctgacagtcgacaagtccagatggcagcagggcaacgtgttcagttgcagcgtgctgcacgaggccctgcacgctcactacacccagaagtccctgagcctgtctcctggatagtga

SEQ ID NO: 544 - DNA, 2871 bp, synthetic construct; identical to SEQ ID NO: 517
  source 1..2871: mol_type = other DNA

SEQ ID NO: 545 - DNA, 2865 bp, synthetic construct; identical to SEQ ID NO: 541
  source 1..2865: mol_type = other DNA

SEQ ID NO: 546 - DNA, 2871 bp, synthetic construct; identical to SEQ ID NO: 519
  source 1..2871: mol_type = other DNA

SEQ ID NO: 547 - DNA, 2865 bp, synthetic construct; identical to SEQ ID NO: 543
  source 1..2865: mol_type = other DNA

SEQ ID NO: 548 - DNA, 2871 bp, synthetic construct; identical to SEQ ID NO: 521
  source 1..2871: mol_type = other DNA

SEQ ID NO: 549 - DNA, 2865 bp, synthetic construct
  source 1..2865: mol_type = other DNA
gagatcgtgctgacacagagccctggcacactgtcactgtctccaggcgaaacagccacactgagctgtagagccagccagagcttcagcagcgacctggcttggtatcagcagaagcctggacaggcccctcggctgttgatctatggcgcctcttctagagccacaggcatccccgatagattcagcggctctggcagcggcaccgatttcaccctgacaatcagcagactggaacccgccgacttcgccgtgtactactgtcagcagtacggcagcagccctcctgtgacatttggcggcggaacaaaggtggaaatcaaaggcggatcctctggacagaccgtggtcacacaagagcctagctttagcgtgtcccctggcggcacagtgacactgacatgtggactttctagcggatctgtgtccaccgcctactttcccagctggtatcaacagaccccaggccaggcacctcggacactgatctacggcaccaacacaagatccagcggcgtgcccgataggttcagcggatctatcctgggcaacaaggccgcactgactatcacaggcgcccaggccgatgacgagagcgattactactgcgtgctgtacatgggcagaggcatcgtggtttttggcggaggcaccaagctgacagtgcttggaggtggtggctctggcggatctgggagtggtggcggaggctctgcttctggatctggacaggtccagcttgttgaaagtggcggaggggttgtgcaacccggaagatctctgagactgtcttgcgccgccagcggctttacactgtcctcttatggaatgcattgggttcgacaagctcccggcaagggactcgaatgggttgcagtgatttcctacgatggctccaacaagtattatgtcgactccgtgaaaggccggttcacaatctccagagacaactccaagaatacgctctatctccagatgaacagcctgcgggccgaagatacagccgtgtattactgcgctcgcggatgggcttactgggaactgctccctgattactattacggaatggacgtctggggacagggaacaaccgtgaccgttagctctggaggcagctccggggaagtgcagctggtggaatcaggcggcggactgattcaacctggcggctctctgagactgtcttgtgctgcttctggcgtgatcgtgtcctacaactacatgaactgggtccgacaggctcccggcaaaggccttgaatgggtgtccgtgatctacagcggcggcagcaccttttacgccgattctgtgcggggcagattcaccatcagccgggacaacagcaagaacaccctgtacctgcagatgaacagcctgagagccgaggacaccgctgtgtactattgcgccagagatctgggacctgccggcgcttttgatatctggggcctgggcacaatggtcaccgtgtctagccgtacggtggccgctcccagcgtgttcatcttcccacctagcgacgagcagctgaagtccggcacagcctctgtcgtgtgcctgctgaacaacttctacccccgcgaggccaaagtgcagtggaaggtggacaacgccctgcagagcggcaacagccaggaaagcgtgaccgagcaggacagcaaggactccacctacagcctgagcagcaccctgacactgagcaaggccgactacgagaagcacaaggtgtacgcctgcgaagtgacccaccagggcctgtctagccccgtgaccaagagcttcaaccggggcgagtgtggaggcggaggatctggcggatctggaagtggcggaggtggtagtggcggcggtggatctgcttctggctctggcgcttcgaccaagggcccatccgtgtttcctctggctcccagcagcaagtctacaagcggaggaacagccgctctgggctgcctggtcaaggattactttcccgagcctgtgaccgtgtcctggaattctggcgctctgacaagcggcgtgcacacctttccagctgtgctgcaaagcagcggcctgtactctctgagcagcgtggtcacagtgcctagctctagcctgggcacccagacctacatctgcaatgtgaaccacaagcctagcaacaccaaggtggacaagaaggtggaacccaagagctgcgataagacccacacatgtcctccatgtcctgctccagaactgctcggcggcccttctgtgttcctgtttcctccaaagcctaaggacaccctgatgatcagcagaacccctgaagtgacctgcgtggtggtggatgtgtctcacgaggaccccgaagtgaagttcaattggtacgtggacggcgtggaagtgcacaacgccaagaccaagcctagagaggaacagtacaacagcacctacagagtggtgtccgtgctgaccgtgctgcaccaggattggctgaacggcaaagagtacaagtgcaaggtgtccaacaaggccctgcctgctcctatcgagaaaaccatcagcaaggccaagggccagcctagggaaccccaggtttacacccttcctccatgccgggatgagctgaccaagaaccaggtgtccctgtggtgtctcgtgaagggcttctaccccagcgacattgccgtggaatgggagagcaatggccagcctgagaacaactacaagacaacccctcctgtgctggacagcgacggctcattcttcctgtacagcaagctgacagtcgacaagtccagatggcagcagggcaacgtgttcagttgcagcgtgctgcacgaggccctgcacagtcactacacccagaagtccctgagcctgtctcctggatagtga

SEQ ID NO: 550 - DNA, 2871 bp, synthetic construct; identical to SEQ ID NO: 515
  source 1..2871: mol_type = other DNA

SEQ ID NO: 551 - DNA, 2865 bp, synthetic construct
  source 1..2865: mol_type = other DNA
gagatcgtgctgacacagagccctggcacactgtcactgtctccaggcgaaacagccacactgagctgtagagccagccagagcttcagcagcgacctggcttggtatcagcagaagcctggacaggcccctcggctgttgatctatggcgcctcttctagagccacaggcatccccgatagattcagcggctctggcagcggcaccgatttcaccctgacaatcagcagactggaacccgccgacttcgccgtgtactactgtcagcagtacggcagcagccctcctgtgacatttggcggcggaacaaaggtggaaatcaaaggcggatcctctggacagaccgtggtcacacaagagcctagctttagcgtgtcccctggcggcacagtgacactgacatgtggactttctagcggatctgtgtccaccgcctactttcccagctggtatcaacagaccccaggccaggcacctcggacactgatctacggcaccaacacaagatccagcggcgtgcccgataggttcagcggatctatcctgggcaacaaggccgcactgactatcacaggcgcccaggccgatgacgagagcgattactactgcgtgctgtacatgggcagaggcatcgtggtttttggcggaggcaccaagctgacagtgcttggaggtggtggctctggcggatctgggagtggtggcggaggctctgcttctggatctggacaggtccagcttgttgaaagtggcggaggggttgtgcaacccggaagatctctgagactgtcttgcgccgccagcggctttacactgtcctcttatggaatgcattgggttcgacaagctcccggcaagggactcgaatgggttgcagtgatttcctacgatggctccaacaagtattatgtcgactccgtgaaaggccggttcacaatctccagagacaactccaagaatacgctctatctccagatgaacagcctgcgggccgaagatacagccgtgtattactgcgctcgcggatgggcttactgggaactgctccctgattactattacggaatggacgtctggggacagggaacaaccgtgaccgttagctctggaggcagctccggggaagtgcagctggtggaatcaggcggcggactgattcaacctggcggctctctgagactgtcttgtgctgcttctggcgtgatcgtgtcctacaactacatgaactgggtccgacaggctcccggcaaaggccttgaatgggtgtccgtgatctacagcggcggcagcaccttttacgccgattctgtgcggggcagattcaccatcagccgggacaacagcaagaacaccctgtacctgcagatgaacagcctgagagccgaggacaccgctgtgtactattgcgccagagatctgggacctgccggcgcttttgatatctggggcctgggcacaatggtcaccgtgtctagccgtacggtggccgctcccagcgtgttcatcttcccacctagcgacgagcagctgaagtccggcacagcctctgtcgtgtgcctgctgaacaacttctacccccgcgaggccaaagtgcagtggaaggtggacaacgccctgcagagcggcaacagccaggaaagcgtgaccgagcaggacagcaaggactccacctacagcctgagcagcaccctgacactgagcaaggccgactacgagaagcacaaggtgtacgcctgcgaagtgacccaccagggcctgtctagccccgtgaccaagagcttcaaccggggcgagtgtggaggcggaggatctggcggatctggaagtggcggaggtggtagtggcggcggtggatctgcttctggctctggcgcttcgaccaagggcccatccgtgtttcctctggctcccagcagcaagtctacaagcggaggaacagccgctctgggctgcctggtcaaggattactttcccgagcctgtgaccgtgtcctggaattctggcgctctgacaagcggcgtgcacacctttccagctgtgctgcaaagcagcggcctgtactctctgagcagcgtggtcacagtgcctagctctagcctgggcacccagacctacatctgcaatgtgaaccacaagcctagcaacaccaaggtggacaagaaggtggaacccaagagctgcgataagacccacacatgtcctccatgtcctgctccagaactgctcggcggcccttctgtgttcctgtttcctccaaagcctaaggacaccctgatgatcagcagaacccctgaagtgacctgcgtggtggtggatgtgtctcacgaggaccccgaagtgaagttcaattggtacgtggacggcgtggaagtgcacaacgccaagaccaagcctagagaggaacagtacaacagcacctacagagtggtgtccgtgctgaccgtgctgcaccaggattggctgaacggcaaagagtacaagtgcaaggtgtccaacaaggccctgcctgctcctatcgagaaaaccatcagcaaggccaagggccagcctagggaaccccaggtttacacccttcctccatgccgggatgagctgaccaagaaccaggtgtccctgtggtgtctcgtgaagggcttctaccccagcgacattgccgtggaatgggagagcaatggccagcctgagaacaactacaagacaacccctcctgtgctggacagcgacggctcattcttcctgtacagcaagctgacagtcgacaagtccagatggcagcagggcaacgtgttcagttgcagcgtgctgcacgaggccctgcacgctcactacacccagaagtccctgagcctgtctcctggatagtga

SEQ ID NO: 552 - DNA, 2871 bp, synthetic construct; identical to SEQ ID NO: 517
  source 1..2871: mol_type = other DNA

SEQ ID NO: 553 - DNA, 2865 bp, synthetic construct; identical to SEQ ID NO: 549
  source 1..2865: mol_type = other DNA

SEQ ID NO: 554 - DNA, 2871 bp, synthetic construct; identical to SEQ ID NO: 519
  source 1..2871: mol_type = other DNA

SEQ ID NO: 555 - DNA, 2865 bp, synthetic construct; identical to SEQ ID NO: 551
  source 1..2865: mol_type = other DNA

SEQ ID NO: 556 - DNA, 2871 bp, synthetic construct; identical to SEQ ID NO: 521
  source 1..2871: mol_type = other DNA

SEQ ID NO: 557 - DNA, 2898 bp, synthetic construct
  source 1..2898: mol_type = other DNA
gagatcgtgctgacacagagccctggcacactgtcactgtctccaggcgaaacagccacactgagctgtagagccagccagagcttcagcagcgacctggcttggtatcagcagaagcctggacaggcccctcggctgttgatctatggcgcctcttctagagccacaggcatccccgatagattcagcggctctggcagcggcaccgatttcaccctgacaatcagcagactggaacccgccgacttcgccgtgtactactgtcagcagtacggcagcagccctcctgtgacatttggcggcggaacaaaggtggaaatcaaaggaggtggtggctctggcggatctgggagtggtggcggaggctctgcttctggatctggagaagtgcagctggtggaatcaggcggcggactgattcaacctggcggctctctgagactgtcttgtgctgcttctggcgtgatcgtgtcctacaactacatgaactgggtccgacaggctcccggcaaaggccttgaatgggtgtccgtgatctacagcggcggcagcaccttttacgccgattctgtgcggggcagattcaccatcagccgggacaacagcaagaacaccctgtacctgcagatgaacagcctgagagccgaggacaccgctgtgtactattgcgccagagatctgggacctgccggcgcttttgatatctggggcctgggcacaatggtcaccgtgtctagcggcggaggtggatccgggcagaccgtggtcacacaagagcctagctttagcgtgtcccctggcggcacagtgacactgacatgtggactttctagcggatctgtgtccaccgcctactttcccagctggtatcaacagaccccaggccaggcacctcggacactgatctacggcaccaacacaagatccagcggcgtgcccgataggttcagcggatctatcctgggcaacaaggccgcactgactatcacaggcgcccaggccgatgacgagagcgattactactgcgtgctgtacatgggcagaggcatcgtggtttttggcggaggcaccaagctgacagtgcttcgtacggtggccgctcccagcgtgttcatcttcccacctagcgacgagcagctgaagtccggcacagcctctgtcgtgtgcctgctgaacaacttctacccccgcgaggccaaagtgcagtggaaggtggacaacgccctgcagagcggcaacagccaggaaagcgtgaccgagcaggacagcaaggactccacctacagcctgagcagcaccctgacactgagcaaggccgactacgagaagcacaaggtgtacgcctgcgaagtgacccaccagggcctgtctagccccgtgaccaagagcttcaaccggggcgagtgtggaggcggaggatctggcggaggtggaagtggcggaggcggttctggtggtggtggctctggtggcggcggttcaggcggcggaggaagcggaggcggcggaagtggtggcggtggatctcaggtccagcttgttgaaagtggcggaggggttgtgcaacccggaagatctctgagactgtcttgcgccgccagcggctttacactgtcctcttatggaatgcattgggttcgacaagctcccggcaagggactcgaatgggttgcagtgatttcctacgatggctccaacaagtattatgtcgactccgtgaaaggccggttcacaatctccagagacaactccaagaatacgctctatctccagatgaacagcctgcgggccgaagatacagccgtgtattactgcgctcgcggatgggcttactgggaactgctccctgattactattacggaatggacgtctggggacagggaacaaccgtgaccgttagctctgcttcgaccaagggcccatccgtgtttcctctggctcccagcagcaagtctacaagcggaggaacagccgctctgggctgcctggtcaaggattactttcccgagcctgtgaccgtgtcctggaattctggcgctctgacaagcggcgtgcacacctttccagctgtgctgcaaagcagcggcctgtactctctgagcagcgtggtcacagtgcctagctctagcctgggcacccagacctacatctgcaatgtgaaccacaagcctagcaacaccaaggtggacaagaaggtggaacccaagagctgcgataagacccacacatgtcctccatgtcctgctccagaactgctcggcggcccttctgtgttcctgtttcctccaaagcctaaggacaccctgatgatcagcagaacccctgaagtgacctgcgtggtggtggatgtgtctcacgaggaccccgaagtgaagttcaattggtacgtggacggcgtggaagtgcacaacgccaagaccaagcctagagaggaacagtacaacagcacctacagagtggtgtccgtgctgaccgtgctgcaccaggattggctgaacggcaaagagtacaagtgcaaggtgtccaacaaggccctgcctgctcctatcgagaaaaccatcagcaaggccaagggccagcctagggaaccccaggtttacacccttcctccatgccgggatgagctgaccaagaaccaggtgtccctgtggtgtctcgtgaagggcttctaccccagcgacattgccgtggaatgggagagcaatggccagcctgagaacaactacaagacaacccctcctgtgctggacagcgacggctcattcttcctgtacagcaagctgacagtcgacaagtccagatggcagcagggcaacgtgttcagttgcagcgtgctgcacgaggccctgcacagtcactacacccagaagtccctgagcctgtctcctggatagtga

SEQ ID NO: 558 - DNA, 2904 bp, synthetic construct
  source 1..2904: mol_type = other DNA
gacaccgtgatgacacagagccctctgagcctgcctgtgacacctggcgaacctgccagcatcagctgtagaagcagccagagcctgctgaacagcaacggctacaactacctggattggtacgtgcagaagcccggccagtctcctcagctgctgatctacctgggcagcaatagagccagcggcgtgcccgatagattttctggctctggcagcggcaccgacttcaccctgaagatctctagagtggaagccgaggacgtgggcgtgtactactgtatgcagcctctgcagacccctctgttcacatttggccctggcaccaaggtggaaatcaaaggaggtggtggctctggcggatctgggagtggtggcggaggctctgcttctggatctggacaagtgacactgagagagtctggccccgctctggtcaagcctacacagaccctgacactgacctgcaccttcagcggcttcagcctgtctactagaggcgtgtgcgtgtcctggatcagacagcctcctggaaaggccctggaatggctggccttcatcgactgggacgacgacaagtactacaacaccagcctgaaaacccggctgaccatcagcaaggacaccagcaagaaccaggtggtgctgaccatgaccaacgtgcaccctgtggataccgccacctactactgcgccagaatcagctctcaccacggctccagctggtgtaccaccttcgattattggggccagggcgctctcgtgacagtttctgctggcggaggtggatccggggagatcgtgctgacacagagccctggcacactgtcactgtctccaggcgaaacagccacactgagctgtagagccagccagagcttcagcagcgacctggcttggtatcagcagaagcctggacaggcccctcggctgttgatctatggcgcctcttctagagccacaggcatccccgatagattcagcggctctggcagcggcaccgatttcaccctgacaatcagcagactggaacccgccgacttcgccgtgtactactgtcagcagtacggcagcagccctcctgtgacatttggcggcggaacaaaggtggaaatcaaacgtacggtggccgctcccagcgtgttcatcttcccacctagcgacgagcagctgaagtccggcacagcctctgtcgtgtgcctgctgaacaacttctacccccgcgaggccaaagtgcagtggaaggtggacaacgccctgcagagcggcaacagccaggaaagcgtgaccgagcaggacagcaaggactccacctacagcctgagcagcaccctgacactgagcaaggccgactacgagaagcacaaggtgtacgcctgcgaagtgacccaccagggcctgtctagccccgtgaccaagagcttcaaccggggcgagtgtggaggcggaggatctggcggaggtggaagtggcggaggcggttctggtggtggtggctctggtggcggcggttcaggcggcggaggaagcggaggcggcggaagtggtggcggtggatctgaagtgcagctggtggaatcaggcggcggactgattcaacctggcggctctctgagactgtcttgtgctgcttctggcgtgatcgtgtcctacaactacatgaactgggtccgacaggctcccggcaaaggccttgaatgggtgtccgtgatctacagcggcggcagcaccttttacgccgattctgtgcggggcagattcaccatcagccgggacaacagcaagaacaccctgtacctgcagatgaacagcctgagagccgaggacaccgctgtgtactattgcgccagagatctgggacctgccggcgcttttgatatctggggcctgggcacaatggtcaccgtgtctagcgcttcgaccaagggcccatccgtgtttcctctggctcccagcagcaagtctacaagcggaggaacagccgctctgggctgcctggtcaaggattactttcccgagcctgtgaccgtgtcctggaattctggcgctctgacaagcggcgtgcacacctttccagctgtgctgcaaagcagcggcctgtactctctgagcagcgtggtcacagtgcctagctctagcctgggcacccagacctacatctgcaatgtgaaccacaagcctagcaacaccaaggtggacaagaaggtggaacccaagagctgcgataagacccacacatgtcctccatgtcctgctccagaactgctcggcggcccttctgtgttcctgtttcctccaaagcctaaggacaccctgatgatcagcagaacccctgaagtgacctgcgtggtggtggatgtgtctcacgaggaccccgaagtgaagttcaattggtacgtggacggcgtggaagtgcacaacgccaagaccaagcctagagaggaacagtacaacagcacctacagagtggtgtccgtgctgaccgtgctgcaccaggattggctgaacggcaaagagtacaagtgcaaggtgtccaacaaggccctgcctgctcctatcgagaaaaccatcagcaaggccaagggccagcctagggaaccccaggtttgtacccttcctccaagccgggatgagctgaccaagaaccaggtgtccctgagctgtgccgtgaagggcttctaccccagcgacattgccgtggaatgggagagcaatggccagcctgagaacaactacaagacaacccctcctgtgctggacagcgacggctcattcttcctggtgagcaagctgacagtcgacaagtccagatggcagcagggcaacgtgttcagttgcagcgtgctgcacgaggccctgcacagtcactacacccagaagtccctgagcctgtctcctggatagtga

SEQ ID NO: 559 - DNA, 2898 bp, synthetic construct
  source 1..2898: mol_type = other DNA
gagatcgtgctgacacagagccctggcacactgtcactgtctccaggcgaaacagccacactgagctgtagagccagccagagcttcagcagcgacctggcttggtatcagcagaagcctggacaggcccctcggctgttgatctatggcgcctcttctagagccacaggcatccccgatagattcagcggctctggcagcggcaccgatttcaccctgacaatcagcagactggaacccgccgacttcgccgtgtactactgtcagcagtacggcagcagccctcctgtgacatttggcggcggaacaaaggtggaaatcaaaggaggtggtggctctggcggatctgggagtggtggcggaggctctgcttctggatctggagaagtgcagctggtggaatcaggcggcggactgattcaacctggcggctctctgagactgtcttgtgctgcttctggcgtgatcgtgtcctacaactacatgaactgggtccgacaggctcccggcaaaggccttgaatgggtgtccgtgatctacagcggcggcagcaccttttacgccgattctgtgcggggcagattcaccatcagccgggacaacagcaagaacaccctgtacctgcagatgaacagcctgagagccgaggacaccgctgtgtactattgcgccagagatctgggacctgccggcgcttttgatatctggggcctgggcacaatggtcaccgtgtctagcggcggaggtggatccgggcagaccgtggtcacacaagagcctagctttagcgtgtcccctggcggcacagtgacactgacatgtggactttctagcggatctgtgtccaccgcctactttcccagctggtatcaacagaccccaggccaggcacctcggacactgatctacggcaccaacacaagatccagcggcgtgcccgataggttcagcggatctatcctgggcaacaaggccgcactgactatcacaggcgcccaggccgatgacgagagcgattactactgcgtgctgtacatgggcagaggcatcgtggtttttggcggaggcaccaagctgacagtgcttcgtacggtggccgctcccagcgtgttcatcttcccacctagcgacgagcagctgaagtccggcacagcctctgtcgtgtgcctgctgaacaacttctacccccgcgaggccaaagtgcagtggaaggtggacaacgccctgcagagcggcaacagccaggaaagcgtgaccgagcaggacagcaaggactccacctacagcctgagcagcaccctgacactgagcaaggccgactacgagaagcacaaggtgtacgcctgcgaagtgacccaccagggcctgtctagccccgtgaccaagagcttcaaccggggcgagtgtggaggcggaggatctggcggaggtggaagtggcggaggcggttctggtggtggtggctctggtggcggcggttcaggcggcggaggaagcggaggcggcggaagtggtggcggtggatctcaggtccagcttgttgaaagtggcggaggggttgtgcaacccggaagatctctgagactgtcttgcgccgccagcggctttacactgtcctcttatggaatgcattgggttcgacaagctcccggcaagggactcgaatgggttgcagtgatttcctacgatggctccaacaagtattatgtcgactccgtgaaaggccggttcacaatctccagagacaactccaagaatacgctctatctccagatgaacagcctgcgggccgaagatacagccgtgtattactgcgctcgcggatgggcttactgggaactgctccctgattactattacggaatggacgtctggggacagggaacaaccgtgaccgttagctctgcttcgaccaagggcccatccgtgtttcctctggctcccagcagcaagtctacaagcggaggaacagccgctctgggctgcctggtcaaggattactttcccgagcctgtgaccgtgtcctggaattctggcgctctgacaagcggcgtgcacacctttccagctgtgctgcaaagcagcggcctgtactctctgagcagcgtggtcacagtgcctagctctagcctgggcacccagacctacatctgcaatgtgaaccacaagcctagcaacaccaaggtggacaagaaggtggaacccaagagctgcgataagacccacacatgtcctccatgtcctgctccagaactgctcggcggcccttctgtgttcctgtttcctccaaagcctaaggacaccctgatgatcagcagaacccctgaagtgacctgcgtggtggtggatgtgtctcacgaggaccccgaagtgaagttcaattggtacgtggacggcgtggaagtgcacaacgccaagaccaagcctagagaggaacagtacaacagcacctacagagtggtgtccgtgctgaccgtgctgcaccaggattggctgaacggcaaagagtacaagtgcaaggtgtccaacaaggccctgcctgctcctatcgagaaaaccatcagcaaggccaagggccagcctagggaaccccaggtttacacccttcctccatgccgggatgagctgaccaagaaccaggtgtccctgtggtgtctcgtgaagggcttctaccccagcgacattgccgtggaatgggagagcaatggccagcctgagaacaactacaagacaacccctcctgtgctggacagcgacggctcattcttcctgtacagcaagctgacagtcgacaagtccagatggcagcagggcaacgtgttcagttgcagcgtgctgcacgaggccctgcacgctcactacacccagaagtccctgagcctgtctcctggatagtga

SEQ ID NO: 560 - DNA, 2904 bp, synthetic construct
  source 1..2904: mol_type = other DNA
gacaccgtgatgacacagagccctctgagcctgcctgtgacacctggcgaacctgccagcatcagctgtagaagcagccagagcctgctgaacagcaacggctacaactacctggattggtacgtgcagaagcccggccagtctcctcagctgctgatctacctgggcagcaatagagccagcggcgtgcccgatagattttctggctctggcagcggcaccgacttcaccctgaagatctctagagtggaagccgaggacgtgggcgtgtactactgtatgcagcctctgcagacccctctgttcacatttggccctggcaccaaggtggaaatcaaaggaggtggtggctctggcggatctgggagtggtggcggaggctctgcttctggatctggacaagtgacactgagagagtctggccccgctctggtcaagcctacacagaccctgacactgacctgcaccttcagcggcttcagcctgtctactagaggcgtgtgcgtgtcctggatcagacagcctcctggaaaggccctggaatggctggccttcatcgactgggacgacgacaagtactacaacaccagcctgaaaacccggctgaccatcagcaaggacaccagcaagaaccaggtggtgctgaccatgaccaacgtgcaccctgtggataccgccacctactactgcgccagaatcagctctcaccacggctccagctggtgtaccaccttcgattattggggccagggcgctctcgtgacagtttctgctggcggaggtggatccggggagatcgtgctgacacagagccctggcacactgtcactgtctccaggcgaaacagccacactgagctgtagagccagccagagcttcagcagcgacctggcttggtatcagcagaagcctggacaggcccctcggctgttgatctatggcgcctcttctagagccacaggcatccccgatagattcagcggctctggcagcggcaccgatttcaccctgacaatcagcagactggaacccgccgacttcgccgtgtactactgtcagcagtacggcagcagccctcctgtgacatttggcggcggaacaaaggtggaaatcaaacgtacggtggccgctcccagcgtgttcatcttcccacctagcgacgagcagctgaagtccggcacagcctctgtcgtgtgcctgctgaacaacttctacccccgcgaggccaaagtgcagtggaaggtggacaacgccctgcagagcggcaacagccaggaaagcgtgaccgagcaggacagcaaggactccacctacagcctgagcagcaccctgacactgagcaaggccgactacgagaagcacaaggtgtacgcctgcgaagtgacccaccagggcctgtctagccccgtgaccaagagcttcaaccggggcgagtgtggaggcggaggatctggcggaggtggaagtggcggaggcggttctggtggtggtggctctggtggcggcggttcaggcggcggaggaagcggaggcggcggaagtggtggcggtggatctgaagtgcagctggtggaatcaggcggcggactgattcaacctggcggctctctgagactgtcttgtgctgcttctggcgtgatcgtgtcctacaactacatgaactgggtccgacaggctcccggcaaaggccttgaatgggtgtccgtgatctacagcggcggcagcaccttttacgccgattctgtgcggggcagattcaccatcagccgggacaacagcaagaacaccctgtacctgcagatgaacagcctgagagccgaggacaccgctgtgtactattgcgccagagatctgggacctgccggcgcttttgatatctggggcctgggcacaatggtcaccgtgtctagcgcttcgaccaagggcccatccgtgtttcctctggctcccagcagcaagtctacaagcggaggaacagccgctctgggctgcctggtcaaggattactttcccgagcctgtgaccgtgtcctggaattctggcgctctgacaagcggcgtgcacacctttccagctgtgctgcaaagcagcggcctgtactctctgagcagcgtggtcacagtgcctagctctagcctgggcacccagacctacatctgcaatgtgaaccacaagcctagcaacaccaaggtggacaagaaggtggaacccaagagctgcgataagacccacacatgtcctccatgtcctgctccagaactgctcggcggcccttctgtgttcctgtttcctccaaagcctaaggacaccctgatgatcagcagaacccctgaagtgacctgcgtggtggtggatgtgtctcacgaggaccccgaagtgaagttcaattggtacgtggacggcgtggaagtgcacaacgccaagaccaagcctagagaggaacagtacaacagcacctacagagtggtgtccgtgctgaccgtgctgcaccaggattggctgaacggcaaagagtacaagtgcaaggtgtccaacaaggccctgcctgctcctatcgagaaaaccatcagcaaggccaagggccagcctagggaaccccaggtttgtacccttcctccaagccgggatgagctgaccaagaaccaggtgtccctgagctgtgccgtgaagggcttctaccccagcgacattgccgtggaatgggagagcaatggccagcctgagaacaactacaagacaacccctcctgtgctggacagcgacggctcattcttcctggtgagcaagctgacagtcgacaagtccagatggcagcagggcaacgtgttcagttgcagcgtgctgcacgaggccctgcacgctcactacacccagaagtccctgagcctgtctcctggatagtga

SEQ ID NO: 561 - DNA, 2916 bp, synthetic construct
  source 1..2916: mol_type = other DNA
gagatcgtgctgacacagagccctggcacactgtcactgtctccaggcgaaacagccacactgagctgtagagccagccagagcttcagcagcgacctggcttggtatcagcagaagcctggacaggcccctcggctgttgatctatggcgcctcttctagagccacaggcatccccgatagattcagcggctctggcagcggcaccgatttcaccctgacaatcagcagactggaacccgccgacttcgccgtgtactactgtcagcagtacggcagcagccctcctgtgacatttggcggcggaacaaaggtggaaatcaaacgtacggtggccgctcccagcgtgttcatcttcccacctagcgacgagcagctgaagtccggcacagcctctgtcgtgtgcctgctgaacaacttctacccccgcgaggccaaagtgcagtggaaggtggacaacgccctgcagagcggcaacagccaggaaagcgtgaccgagcaggacagcaaggactccacctacagcctgagcagcaccctgacactgagcaaggccgactacgagaagcacaaggtgtacgcctgcgaagtgacccaccagggcctgtctagccccgtgaccaagagcttcaaccggggcgagtgtggaggcggaggatctggcggaggtggaagtggcggaggcggttctggtggtggtggctctggtggcggcggttcaggcggcggaggaagcggaggcggcggaagtggtggcggtggatctgaagtgcagctggtggaatcaggcggcggactgattcaacctggcggctctctgagactgtcttgtgctgcttctggcgtgatcgtgtcctacaactacatgaactgggtccgacaggctcccggcaaaggccttgaatgggtgtccgtgatctacagcggcggcagcaccttttacgccgattctgtgcggggcagattcaccatcagccgggacaacagcaagaacaccctgtacctgcagatgaacagcctgagagccgaggacaccgctgtgtactattgcgccagagatctgggacctgccggcgcttttgatatctggggcctgggcacaatggtcaccgtgtctagcgcttcgaccaagggcccatccgtgtttcctctggctcccagcagcaagtctacaagcggaggaacagccgctctgggctgcctggtcaaggattactttcccgagcctgtgaccgtgtcctggaattctggcgctctgacaagcggcgtgcacacctttccagctgtgctgcaaagcagcggcctgtactctctgagcagcgtggtcacagtgcctagctctagcctgggcacccagacctacatctgcaatgtgaaccacaagcctagcaacaccaaggtggacaagaaggtggaacccaagagctgcggcggaggtggatccgggcagaccgtggtcacacaagagcctagctttagcgtgtcccctggcggcacagtgacactgacatgtggactttctagcggatctgtgtccaccgcctactttcccagctggtatcaacagaccccaggccaggcacctcggacactgatctacggcaccaacacaagatccagcggcgtgcccgataggttcagcggatctatcctgggcaacaaggccgcactgactatcacaggcgcccaggccgatgacgagagcgattactactgcgtgctgtacatgggcagaggcatcgtggtttttggcggaggcaccaagctgacagtgcttggaggtggtggctctggcggatctgggagtggtggcggaggctctgcttctggatctggacaggtccagcttgttgaaagtggcggaggggttgtgcaacccggaagatctctgagactgtcttgcgccgccagcggctttacactgtcctcttatggaatgcattgggttcgacaagctcccggcaagggactcgaatgggttgcagtgatttcctacgatggctccaacaagtattatgtcgactccgtgaaaggccggttcacaatctccagagacaactccaagaatacgctctatctccagatgaacagcctgcgggccgaagatacagccgtgtattactgcgctcgcggatgggcttactgggaactgctccctgattactattacggaatggacgtctggggacagggaacaaccgtgaccgttagctctgcttctggcggctccggagataagacccacacatgtcctccatgtcctgctccagaactgctcggcggcccttctgtgttcctgtttcctccaaagcctaaggacaccctgatgatcagcagaacccctgaagtgacctgcgtggtggtggatgtgtctcacgaggaccccgaagtgaagttcaattggtacgtggacggcgtggaagtgcacaacgccaagaccaagcctagagaggaacagtacaacagcacctacagagtggtgtccgtgctgaccgtgctgcaccaggattggctgaacggcaaagagtacaagtgcaaggtgtccaacaaggccctgcctgctcctatcgagaaaaccatcagcaaggccaagggccagcctagggaaccccaggtttacacccttcctccatgccgggatgagctgaccaagaaccaggtgtccctgtggtgtctcgtgaagggcttctaccccagcgacattgccgtggaatgggagagcaatggccagcctgagaacaactacaagacaacccctcctgtgctggacagcgacggctcattcttcctgtacagcaagctgacagtcgacaagtccagatggcagcagggcaacgtgttcagttgcagcgtgctgcacgaggccctgcacagtcactacacccagaagtccctgagcctgtctcctggatagtga

SEQ ID NO: 562 - DNA, 2922 bp, synthetic construct
  source 1..2922: mol_type = other DNA
gacaccgtgatgacacagagccctctgagcctgcctgtgacacctggcgaacctgccagcatcagctgtagaagcagccagagcctgctgaacagcaacggctacaactacctggattggtacgtgcagaagcccggccagtctcctcagctgctgatctacctgggcagcaatagagccagcggcgtgcccgatagattttctggctctggcagcggcaccgacttcaccctgaagatctctagagtggaagccgaggacgtgggcgtgtactactgtatgcagcctctgcagacccctctgttcacatttggccctggcaccaaggtggaaatcaaacgtacggtggccgctcccagcgtgttcatcttcccacctagcgacgagcagctgaagtccggcacagcctctgtcgtgtgcctgctgaacaacttctacccccgcgaggccaaagtgcagtggaaggtggacaacgccctgcagagcggcaacagccaggaaagcgtgaccgagcaggacagcaaggactccacctacagcctgagcagcaccctgacactgagcaaggccgactacgagaagcacaaggtgtacgcctgcgaagtgacccaccagggcctgtctagccccgtgaccaagagcttcaaccggggcgagtgtggaggcggaggatctggcggaggtggaagtggcggaggcggttctggtggtggtggctctggtggcggcggttcaggcggcggaggaagcggaggcggcggaagtggtggcggtggatctcaagtgacactgagagagtctggccccgctctggtcaagcctacacagaccctgacactgacctgcaccttcagcggcttcagcctgtctactagaggcgtgtgcgtgtcctggatcagacagcctcctggaaaggccctggaatggctggccttcatcgactgggacgacgacaagtactacaacaccagcctgaaaacccggctgaccatcagcaaggacaccagcaagaaccaggtggtgctgaccatgaccaacgtgcaccctgtggataccgccacctactactgcgccagaatcagctctcaccacggctccagctggtgtaccaccttcgattattggggccagggcgctctcgtgacagtttctgctgcttcgaccaagggcccatccgtgtttcctctggctcccagcagcaagtctacaagcggaggaacagccgctctgggctgcctggtcaaggattactttcccgagcctgtgaccgtgtcctggaattctggcgctctgacaagcggcgtgcacacctttccagctgtgctgcaaagcagcggcctgtactctctgagcagcgtggtcacagtgcctagctctagcctgggcacccagacctacatctgcaatgtgaaccacaagcctagcaacaccaaggtggacaagaaggtggaacccaagagctgcggcggaggtggatccggggagatcgtgctgacacagagccctggcacactgtcactgtctccaggcgaaacagccacactgagctgtagagccagccagagcttcagcagcgacctggcttggtatcagcagaagcctggacaggcccctcggctgttgatctatggcgcctcttctagagccacaggcatccccgatagattcagcggctctggcagcggcaccgatttcaccctgacaatcagcagactggaacccgccgacttcgccgtgtactactgtcagcagtacggcagcagccctcctgtgacatttggcggcggaacaaaggtggaaatcaaaggaggtggtggctctggcggatctgggagtggtggcggaggctctgcttctggatctggagaagtgcagctggtggaatcaggcggcggactgattcaacctggcggctctctgagactgtcttgtgctgcttctggcgtgatcgtgtcctacaactacatgaactgggtccgacaggctcccggcaaaggccttgaatgggtgtccgtgatctacagcggcggcagcaccttttacgccgattctgtgcggggcagattcaccatcagccgggacaacagcaagaacaccctgtacctgcagatgaacagcctgagagccgaggacaccgctgtgtactattgcgccagagatctgggacctgccggcgcttttgatatctggggcctgggcacaatggtcaccgtgtctagcgcttctggcggctccggagataagacccacacatgtcctccatgtcctgctccagaactgctcggcggcccttctgtgttcctgtttcctccaaagcctaaggacaccctgatgatcagcagaacccctgaagtgacctgcgtggtggtggatgtgtctcacgaggaccccgaagtgaagttcaattggtacgtggacggcgtggaagtgcacaacgccaagaccaagcctagagaggaacagtacaacagcacctacagagtggtgtccgtgctgaccgtgctgcaccaggattggctgaacggcaaagagtacaagtgcaaggtgtccaacaaggccctgcctgctcctatcgagaaaaccatcagcaaggccaagggccagcctagggaaccccaggtttgtacccttcctccaagccgggatgagctgaccaagaaccaggtgtccctgagctgtgccgtgaagggcttctaccccagcgacattgccgtggaatgggagagcaatggccagcctgagaacaactacaagacaacccctcctgtgctggacagcgacggctcattcttcctggtgagcaagctgacagtcgacaagtccagatggcagcagggcaacgtgttcagttgcagcgtgctgcacgaggccctgcacagtcactacacccagaagtccctgagcctgtctcctggatagtga

SEQ ID NO: 563 - DNA, 2898 bp, synthetic construct; identical to SEQ ID NO: 557
  source 1..2898: mol_type = other DNA

SEQ ID NO: 564 - DNA, 2922 bp, synthetic construct; identical to SEQ ID NO: 562
  source 1..2922: mol_type = other DNA

SEQ ID NO: 565 - DNA, 2916 bp, synthetic construct; identical to SEQ ID NO: 561
  source 1..2916: mol_type = other DNA

SEQ ID NO: 566 - DNA, 2904 bp, synthetic construct; identical to SEQ ID NO: 558
  source 1..2904: mol_type = other DNA

SEQ ID NO: 567 - DNA, 2112 bp, synthetic construct
  source 1..2112: mol_type = other DNA
gagatcgtgctgacacagagccctggcacactgtcactgtctccaggcgaaacagccacactgagctgtagagccagccagagcttcagcagcgacctggcttggtatcagcagaagcctggacaggcccctcggctgttgatctatggcgcctcttctagagccacaggcatccccgatagattcagcggctctggcagcggcaccgatttcaccctgacaatcagcagactggaacccgccgacttcgccgtgtactactgtcagcagtacggcagcagccctcctgtgacatttggcggcggaacaaaggtggaaatcaaacgtacggtggccgctcccagcgtgttcatcttcccacctagcgacgagcagctgaagtccggcacagcctctgtcgtgtgcctgctgaacaacttctacccccgcgaggccaaagtgcagtggaaggtggacaacgccctgcagagcggcaacagccaggaaagcgtgaccgagcaggacagcaaggactccacctacagcctgagcagcaccctgacactgagcaaggccgactacgagaagcacaaggtgtacgcctgcgaagtgacccaccagggcctgtctagccccgtgaccaagagcttcaaccggggcgagtgtggaggcggaggatctggcggaggtggaagtggcggaggcggttctggtggtggtggctctggtggcggcggttcaggcggcggaggaagcggaggcggcggaagtggtggcggtggatctgaagtgcagctggtggaatcaggcggcggactgattcaacctggcggctctctgagactgtcttgtgctgcttctggcgtgatcgtgtcctacaactacatgaactgggtccgacaggctcccggcaaaggccttgaatgggtgtccgtgatctacagcggcggcagcaccttttacgccgattctgtgcggggcagattcaccatcagccgggacaacagcaagaacaccctgtacctgcagatgaacagcctgagagccgaggacaccgctgtgtactattgcgccagagatctgggacctgccggcgcttttgatatctggggcctgggcacaatggtcaccgtgtctagcgcttcgaccaagggcccatccgtgtttcctctggctcccagcagcaagtctacaagcggaggaacagccgctctgggctgcctggtcaaggattactttcccgagcctgtgaccgtgtcctggaattctggcgctctgacaagcggcgtgcacacctttccagctgtgctgcaaagcagcggcctgtactctctgagcagcgtggtcacagtgcctagctctagcctgggcacccagacctacatctgcaatgtgaaccacaagcctagcaacaccaaggtggacaagaaggtggaacccaagagctgcgataagacccacacatgtcctccatgtcctgctccagaactgctcggcggcccttctgtgttcctgtttcctccaaagcctaaggacaccctgatgatcagcagaacccctgaagtgacctgcgtggtggtggatgtgtctcacgaggaccccgaagtgaagttcaattggtacgtggacggcgtggaagtgcacaacgccaagaccaagcctagagaggaacagtacaacagcacctacagagtggtgtccgtgctgaccgtgctgcaccaggattggctgaacggcaaagagtacaagtgcaaggtgtccaacaaggccctgcctgctcctatcgagaaaaccatcagcaaggccaagggccagcctagggaaccccaggtttacacccttcctccatgccgggatgagctgaccaagaaccaggtgtccctgtggtgtctcgtgaagggcttctaccccagcgacattgccgtggaatgggagagcaatggccagcctgagaacaactacaagacaacccctcctgtgctggacagcgacggctcattcttcctgtacagcaagctgacagtcgacaagtccagatggcagcagggcaacgtgttcagttgcagcgtgctgcacgaggccctgcacagtcactacacccagaagtccctgagcctgtctcctggatagtga

SEQ ID NO: 568 - DNA, 2856 bp, synthetic construct
  source 1..2856: mol_type = other DNA
gacaccgtgatgacacagagccctctgagcctgcctgtgacacctggcgaacctgccagcatcagctgtagaagcagccagagcctgctgaacagcaacggctacaactacctggattggtacgtgcagaagcccggccagtctcctcagctgctgatctacctgggcagcaatagagccagcggcgtgcccgatagattttctggctctggcagcggcaccgacttcaccctgaagatctctagagtggaagccgaggacgtgggcgtgtactactgtatgcagcctctgcagacccctctgttcacatttggccctggcaccaaggtggaaatcaaacgtacggtggccgctcccagcgtgttcatcttcccacctagcgacgagcagctgaagtccggcacagcctctgtcgtgtgcctgctgaacaacttctacccccgcgaggccaaagtgcagtggaaggtggacaacgccctgcagagcggcaacagccaggaaagcgtgaccgagcaggacagcaaggactccacctacagcctgagcagcaccctgacactgagcaaggccgactacgagaagcacaaggtgtacgcctgcgaagtgacccaccagggcctgtctagccccgtgaccaagagcttcaaccggggcgagtgtggcggcggaggatctggcggaggtggaagcggaggcggtggaagccagaccgtggtcacacaagagcctagctttagcgtgtcccctggcggcacagtgacactgacatgtggactttctagcggatctgtgtccaccgcctactttcccagctggtatcaacagaccccaggccaggcacctcggacactgatctacggcaccaacacaagatccagcggcgtgcccgataggttcagcggatctatcctgggcaacaaggccgcactgactatcacaggcgcccaggccgatgacgagagcgattactactgcgtgctgtacatgggcagaggcatcgtggtttttggcggaggcaccaagctgacagtgcttggaggtggtggctctggcggatctgggagtggtggcggaggctctgcttctggatctggacaggtccagcttgttgaaagtggcggaggggttgtgcaacccggaagatctctgagactgtcttgcgccgccagcggctttacactgtcctcttatggaatgcattgggttcgacaagctcccggcaagggactcgaatgggttgcagtgatttcctacgatggctccaacaagtattatgtcgactccgtgaaaggccggttcacaatctccagagacaactccaagaatacgctctatctccagatgaacagcctgcgggccgaagatacagccgtgtattactgcgctcgcggatgggcttactgggaactgctccctgattactattacggaatggacgtctggggacagggaacaaccgtgaccgttagctctggaggcagctccgggcaagtgacactgagagagtctggccccgctctggtcaagcctacacagaccctgacactgacctgcaccttcagcggcttcagcctgtctactagaggcgtgtgcgtgtcctggatcagacagcctcctggaaaggccctggaatggctggccttcatcgactgggacgacgacaagtactacaacaccagcctgaaaacccggctgaccatcagcaaggacaccagcaagaaccaggtggtgctgaccatgaccaacgtgcaccctgtggataccgccacctactactgcgccagaatcagctctcaccacggctccagctggtgtaccaccttcgattattggggccagggcgctctcgtgacagtttctgctgcttcgaccaagggcccatccgtgtttcctctggctcccagcagcaagtctacaagcggaggaacagccgctctgggctgcctggtcaaggattactttcccgagcctgtgaccgtgtcctggaattctggcgctctgacaagcggcgtgcacacctttccagctgtgctgcaaagcagcggcctgtactctctgagcagcgtggtcacagtgcctagctctagcctgggcacccagacctacatctgcaatgtgaaccacaagcctagcaacaccaaggtggacaagaaggtggaacccaagagctgcgataagacccacacatgtcctccatgtcctgctccagaactgctcggcggcccttctgtgttcctgtttcctccaaagcctaaggacaccctgatgatcagcagaacccctgaagtgacctgcgtggtggtggatgtgtctcacgaggaccccgaagtgaagttcaattggtacgtggacggcgtggaagtgcacaacgccaagaccaagcctagagaggaacagtacaacagcacctacagagtggtgtccgtgctgaccgtgctgcaccaggattggctgaacggcaaagagtacaagtgcaaggtgtccaacaaggccctgcctgctcctatcgagaaaaccatcagcaaggccaagggccagcctagggaaccccaggtttgtacccttcctccaagccgggatgagctgaccaagaaccaggtgtccctgagctgtgccgtgaagggcttctaccccagcgacattgccgtggaatgggagagcaatggccagcctgagaacaactacaagacaacccctcctgtgctggacagcgacggctcattcttcctggtgagcaagctgacagtcgacaagtccagatggcagcagggcaacgtgttcagttgcagcgtgctgcacgaggccctgcacagtcactacacccagaagtccctgagcctgtctcctggatagtga

SEQ ID NO: 569 - DNA, 2112 bp, synthetic construct; identical to SEQ ID NO: 567
  source 1..2112: mol_type = other DNA

SEQ ID NO: 570 - DNA, 2856 bp, synthetic construct
  source 1..2856: mol_type = other DNA
cagaccgtggtcacacaagagcctagctttagcgtgtcccctggcggcacagtgacactgacatgtggactttctagcggatctgtgtccaccgcctactttcccagctggtatcaacagaccccaggccaggcacctcggacactgatctacggcaccaacacaagatccagcggcgtgcccgataggttcagcggatctatcctgggcaacaaggccgcactgactatcacaggcgcccaggccgatgacgagagcgattactactgcgtgctgtacatgggcagaggcatcgtggtttttggcggaggcaccaagctgacagtgcttcgtacggtggccgctcccagcgtgttcatcttcccacctagcgacgagcagctgaagtccggcacagcctctgtcgtgtgcctgctgaacaacttctacccccgcgaggccaaagtgcagtggaaggtggacaacgccctgcagagcggcaacagccaggaaagcgtgaccgagcaggacagcaaggactccacctacagcctgagcagcaccctgacactgagcaaggccgactacgagaagcacaaggtgtacgcctgcgaagtgacccaccagggcctgtctagccccgtgaccaagagcttcaaccggggcgagtgtggcggcggaggatctggcggaggtggaagcggaggcggtggaagcgacaccgtgatgacacagagccctctgagcctgcctgtgacacctggcgaacctgccagcatcagctgtagaagcagccagagcctgctgaacagcaacggctacaactacctggattggtacgtgcagaagcccggccagtctcctcagctgctgatctacctgggcagcaatagagccagcggcgtgcccgatagattttctggctctggcagcggcaccgacttcaccctgaagatctctagagtggaagccgaggacgtgggcgtgtactactgtatgcagcctctgcagacccctctgttcacatttggccctggcaccaaggtggaaatcaaaggaggtggtggctctggcggatctgggagtggtggcggaggctctgcttctggatctggacaagtgacactgagagagtctggccccgctctggtcaagcctacacagaccctgacactgacctgcaccttcagcggcttcagcctgtctactagaggcgtgtgcgtgtcctggatcagacagcctcctggaaaggccctggaatggctggccttcatcgactgggacgacgacaagtactacaacaccagcctgaaaacccggctgaccatcagcaaggacaccagcaagaaccaggtggtgctgaccatgaccaacgtgcaccctgtggataccgccacctactactgcgccagaatcagctctcaccacggctccagctggtgtaccaccttcgattattggggccagggcgctctcgtgacagtttctgctggaggcagctccgggcaggtccagcttgttgaaagtggcggaggggttgtgcaacccggaagatctctgagactgtcttgcgccgccagcggctttacactgtcctcttatggaatgcattgggttcgacaagctcccggcaagggactcgaatgggttgcagtgatttcctacgatggctccaacaagtattatgtcgactccgtgaaaggccggttcacaatctccagagacaactccaagaatacgctctatctccagatgaacagcctgcgggccgaagatacagccgtgtattactgcgctcgcggatgggcttactgggaactgctccctgattactattacggaatggacgtctggggacagggaacaaccgtgaccgttagctctgcttcgaccaagggcccatccgtgtttcctctggctcccagcagcaagtctacaagcggaggaacagccgctctgggctgcctggtcaaggattactttcccgagcctgtgaccgtgtcctggaattctggcgctctgacaagcggcgtgcacacctttccagctgtgctgcaaagcagcggcctgtactctctgagcagcgtggtcacagtgcctagctctagcctgggcacccagacctacatctgcaatgtgaaccacaagcctagcaacaccaaggtggacaagaaggtggaacccaagagctgcgataagacccacacatgtcctccatgtcctgctccagaactgctcggcggcccttctgtgttcctgtttcctccaaagcctaaggacaccctgatgatcagcagaacccctgaagtgacctgcgtggtggtggatgtgtctcacgaggaccccgaagtgaagttcaattggtacgtggacggcgtggaagtgcacaacgccaagaccaagcctagagaggaacagtacaacagcacctacagagtggtgtccgtgctgaccgtgctgcaccaggattggctgaacggcaaagagtacaagtgcaaggtgtccaacaaggccctgcctgctcctatcgagaaaaccatcagcaaggccaagggccagcctagggaaccccaggtttgtacccttcctccaagccgggatgagctgaccaagaaccaggtgtccctgagctgtgccgtgaagggcttctaccccagcgacattgccgtggaatgggagagcaatggccagcctgagaacaactacaagacaacccctcctgtgctggacagcgacggctcattcttcctggtgagcaagctgacagtcgacaagtccagatggcagcagggcaacgtgttcagttgcagcgtgctgcacgaggccctgcacagtcactacacccagaagtccctgagcctgtctcctggatagtga

SEQ ID NO: 571 - DNA, 2112 bp, synthetic construct; identical to SEQ ID NO: 567
  source 1..2112: mol_type = other DNA

SEQ ID NO: 572 - DNA, 2934 bp, synthetic construct
  source 1..2934: mol_type = other DNA
cagaccgtggtcacacaagagcctagctttagcgtgtcccctggcggcacagtgacactgacatgtggactttctagcggatctgtgtccaccgcctactttcccagctggtatcaacagaccccaggccaggcacctcggacactgatctacggcaccaacacaagatccagcggcgtgcccgataggttcagcggatctatcctgggcaacaaggccgcactgactatcacaggcgcccaggccgatgacgagagcgattactactgcgtgctgtacatgggcagaggcatcgtggtttttggcggaggcaccaagctgacagtgcttggaggtggtggctctggcggatctgggagtggtggcggaggctctgcttctggatctggacaggtccagcttgttgaaagtggcggaggggttgtgcaacccggaagatctctgagactgtcttgcgccgccagcggctttacactgtcctcttatggaatgcattgggttcgacaagctcccggcaagggactcgaatgggttgcagtgatttcctacgatggctccaacaagtattatgtcgactccgtgaaaggccggttcacaatctccagagacaactccaagaatacgctctatctccagatgaacagcctgcgggccgaagatacagccgtgtattactgcgctcgcggatgggcttactgggaactgctccctgattactattacggaatggacgtctggggacagggaacaaccgtgaccgttagctctggcggaggtggatccggggacaccgtgatgacacagagccctctgagcctgcctgtgacacctggcgaacctgccagcatcagctgtagaagcagccagagcctgctgaacagcaacggctacaactacctggattggtacgtgcagaagcccggccagtctcctcagctgctgatctacctgggcagcaatagagccagcggcgtgcccgatagattttctggctctggcagcggcaccgacttcaccctgaagatctctagagtggaagccgaggacgtgggcgtgtactactgtatgcagcctctgcagacccctctgttcacatttggccctggcaccaaggtggaaatcaaacgtacggtggccgctcccagcgtgttcatcttcccacctagcgacgagcagctgaagtccggcacagcctctgtcgtgtgcctgctgaacaacttctacccccgcgaggccaaagtgcagtggaaggtggacaacgccctgcagagcggcaacagccaggaaagcgtgaccgagcaggacagcaaggactccacctacagcctgagcagcaccctgacactgagcaaggccgactacgagaagcacaaggtgtacgcctgcgaagtgacccaccagggcctgtctagccccgtgaccaagagcttcaaccggggcgagtgtggaggcggaggatctggcggaggtggaagtggcggaggcggttctggtggtggtggctctggtggcggcggttcaggcggcggaggaagcggaggcggcggaagtggtggcggtggatctcaagtgacactgagagagtctggccccgctctggtcaagcctacacagaccctgacactgacctgcaccttcagcggcttcagcctgtctactagaggcgtgtgcgtgtcctggatcagacagcctcctggaaaggccctggaatggctggccttcatcgactgggacgacgacaagtactacaacaccagcctgaaaacccggctgaccatcagcaaggacaccagcaagaaccaggtggtgctgaccatgaccaacgtgcaccctgtggataccgccacctactactgcgccagaatcagctctcaccacggctccagctggtgtaccaccttcgattattggggccagggcgctctcgtgacagtttctgctgcttcgaccaagggcccatccgtgtttcctctggctcccagcagcaagtctacaagcggaggaacagccgctctgggctgcctggtcaaggattactttcccgagcctgtgaccgtgtcctggaattctggcgctctgacaagcggcgtgcacacctttccagctgtgctgcaaagcagcggcctgtactctctgagcagcgtggtcacagtgcctagctctagcctgggcacccagacctacatctgcaatgtgaaccacaagcctagcaacaccaaggtggacaagaaggtggaacccaagagctgcgataagacccacacatgtcctccatgtcctgctccagaactgctcggcggcccttctgtgttcctgtttcctccaaagcctaaggacaccctgatgatcagcagaacccctgaagtgacctgcgtggtggtggatgtgtctcacgaggaccccgaagtgaagttcaattggtacgtggacggcgtggaagtgcacaacgccaagaccaagcctagagaggaacagtacaacagcacctacagagtggtgtccgtgctgaccgtgctgcaccaggattggctgaacggcaaagagtacaagtgcaaggtgtccaacaaggccctgcctgctcctatcgagaaaaccatcagcaaggccaagggccagcctagggaaccccaggtttgtacccttcctccaagccgggatgagctgaccaagaaccaggtgtccctgagctgtgccgtgaagggcttctaccccagcgacattgccgtggaatgggagagcaatggccagcctgagaacaactacaagacaacccctcctgtgctggacagcgacggctcattcttcctggtgagcaagctgacagtcgacaagtccagatggcagcagggcaacgtgttcagttgcagcgtgctgcacgaggccctgcacagtcactacacccagaagtccctgagcctgtctcctggatagtga

SEQ ID NO: 573 - DNA, 2112 bp, synthetic construct; identical to SEQ ID NO: 567
  source 1..2112: mol_type = other DNA

SEQ ID NO: 574 - DNA, 2952 bp, synthetic construct
  source 1..2952: mol_type = other DNA
cagaccgtggtcacacaagagcctagctttagcgtgtcccctggcggcacagtgacactgacatgtggactttctagcggatctgtgtccaccgcctactttcccagctggtatcaacagaccccaggccaggcacctcggacactgatctacggcaccaacacaagatccagcggcgtgcccgataggttcagcggatctatcctgggcaacaaggccgcactgactatcacaggcgcccaggccgatgacgagagcgattactactgcgtgctgtacatgggcagaggcatcgtggtttttggcggaggcaccaagctgacagtgcttcgtacggtggccgctcccagcgtgttcatcttcccacctagcgacgagcagctgaagtccggcacagcctctgtcgtgtgcctgctgaacaacttctacccccgcgaggccaaagtgcagtggaaggtggacaacgccctgcagagcggcaacagccaggaaagcgtgaccgagcaggacagcaaggactccacctacagcctgagcagcaccctgacactgagcaaggccgactacgagaagcacaaggtgtacgcctgcgaagtgacccaccagggcctgtctagccccgtgaccaagagcttcaaccggggcgagtgtggaggcggaggatctggcggaggtggaagtggcggaggcggttctggtggtggtggctctggtggcggcggttcaggcggcggaggaagcggaggcggcggaagtggtggcggtggatctcaggtccagcttgttgaaagtggcggaggggttgtgcaacccggaagatctctgagactgtcttgcgccgccagcggctttacactgtcctcttatggaatgcattgggttcgacaagctcccggcaagggactcgaatgggttgcagtgatttcctacgatggctccaacaagtattatgtcgactccgtgaaaggccggttcacaatctccagagacaactccaagaatacgctctatctccagatgaacagcctgcgggccgaagatacagccgtgtattactgcgctcgcggatgggcttactgggaactgctccctgattactattacggaatggacgtctggggacagggaacaaccgtgaccgttagctctgcttcgaccaagggcccatccgtgtttcctctggctcccagcagcaagtctacaagcggaggaacagccgctctgggctgcctggtcaaggattactttcccgagcctgtgaccgtgtcctggaattctggcgctctgacaagcggcgtgcacacctttccagctgtgctgcaaagcagcggcctgtactctctgagcagcgtggtcacagtgcctagctctagcctgggcacccagacctacatctgcaatgtgaaccacaagcctagcaacaccaaggtggacaagaaggtggaacccaagagctgcggcggaggtggatccggggacaccgtgatgacacagagccctctgagcctgcctgtgacacctggcgaacctgccagcatcagctgtagaagcagccagagcctgctgaacagcaacggctacaactacctggattggtacgtgcagaagcccggccagtctcctcagctgctgatctacctgggcagcaatagagccagcggcgtgcccgatagattttctggctctggcagcggcaccgacttcaccctgaagatctctagagtggaagccgaggacgtgggcgtgtactactgtatgcagcctctgcagacccctctgttcacatttggccctggcaccaaggtggaaatcaaaggaggtggtggctctggcggatctgggagtggtggcggaggctctgcttctggatctggacaagtgacactgagagagtctggccccgctctggtcaagcctacacagaccctgacactgacctgcaccttcagcggcttcagcctgtctactagaggcgtgtgcgtgtcctggatcagacagcctcctggaaaggccctggaatggctggccttcatcgactgggacgacgacaagtactacaacaccagcctgaaaacccggctgaccatcagcaaggacaccagcaagaaccaggtggtgctgaccatgaccaacgtgcaccctgtggataccgccacctactactgcgccagaatcagctctcaccacggctccagctggtgtaccaccttcgattattggggccagggcgctctcgtgacagtttctgctgcttctggcggctccggagataagacccacacatgtcctccatgtcctgctccagaactgctcggcggcccttctgtgttcctgtttcctccaaagcctaaggacaccctgatgatcagcagaacccctgaagtgacctgcgtggtggtggatgtgtctcacgaggaccccgaagtgaagttcaattggtacgtggacggcgtggaagtgcacaacgccaagaccaagcctagagaggaacagtacaacagcacctacagagtggtgtccgtgctgaccgtgctgcaccaggattggctgaacggcaaagagtacaagtgcaaggtgtccaacaaggccctgcctgctcctatcgagaaaaccatcagcaaggccaagggccagcctagggaaccccaggtttgtacccttcctccaagccgggatgagctgaccaagaaccaggtgtccctgagctgtgccgtgaagggcttctaccccagcgacattgccgtggaatgggagagcaatggccagcctgagaacaactacaagacaacccctcctgtgctggacagcgacggctcattcttcctggtgagcaagctgacagtcgacaagtccagatggcagcagggcaacgtgttcagttgcagcgtgctgcacgaggccctgcacagtcactacacccagaagtccctgagcctgtctcctggatagtga

SEQ ID NO: 575 - DNA, 2820 bp, synthetic construct
  source 1..2820: mol_type = other DNA
cagaccgtggtcacacaagagcctagctttagcgtgtcccctggcggcacagtgacactgacatgtggactttctagcggatctgtgtccaccgcctactttcccagctggtatcaacagaccccaggccaggcacctcggacactgatctacggcaccaacacaagatccagcggcgtgcccgataggttcagcggatctatcctgggcaacaaggccgcactgactatcacaggcgcccaggccgatgacgagagcgattactactgcgtgctgtacatgggcagaggcatcgtggtttttggcggaggcaccaagctgacagtgcttcgtacggtggccgctcccagcgtgttcatcttcccacctagcgacgagcagctgaagtccggcacagcctctgtcgtgtgcctgctgaacaacttctacccccgcgaggccaaagtgcagtggaaggtggacaacgccctgcagagcggcaacagccaggaaagcgtgaccgagcaggacagcaaggactccacctacagcctgagcagcaccctgacactgagcaaggccgactacgagaagcacaaggtgtacgcctgcgaagtgacccaccagggcctgtctagccccgtgaccaagagcttcaaccggggcgagtgtggcggcggaggatctggcggaggtggaagcggaggcggtggaagcgagatcgtgatgacacagagccccgccatcctgagtgtgtctccaggcgaaagagccacactgagctgtagagcctctcagagcgtggccatcaacctggcctggtatcagcagaagcctggacaggctccccggctgctgatctatgccgcttcttctagagccacaggcatccctggcagattttctggcagcggcagcgagacaaacttcaccctgaccatcagctccctgcagagcggcgatttcgccgtgtactactgccagcagtacatcacctggccacctagctacacctttggccagggcaccaagctggaaatcaaaggaggtggtggctctggcggatctgggagtggtggcggaggctctgcttctggatctggagaagtgcagctggtggaaagtggcggagcactgattcagcctggcggctctctgagactgtcttgtgccgcctctggcatcatcgtgtccgccaactacatgagctgggtccgacaggcccctggcaaaggacttgaatgggtgtccgtgatctacagcggcggcagcaccttttacgccgactctgtgaagggcagattcaccatcagccgggacaacagcaagaacaccctgtacctggaaatgaacagcctgagagccgaggacaccgctgtgtactattgcgccagagatgcccctatcctgggcgtgtcagattggggccagggaacactggtcacagtgtctagcggaggcagctccgggcaggtccagcttgttgaaagtggcggaggggttgtgcaacccggaagatctctgagactgtcttgcgccgccagcggctttacactgtcctcttatggaatgcattgggttcgacaagctcccggcaagggactcgaatgggttgcagtgatttcctacgatggctccaacaagtattatgtcgactccgtgaaaggccggttcacaatctccagagacaactccaagaatacgctctatctccagatgaacagcctgcgggccgaagatacagccgtgtattactgcgctcgcggatgggcttactgggaactgctccctgattactattacggaatggacgtctggggacagggaacaaccgtgaccgttagctctgcttcgaccaagggcccatccgtgtttcctctggctcccagcagcaagtctacaagcggaggaacagccgctctgggctgcctggtcaaggattactttcccgagcctgtgaccgtgtcctggaattctggcgctctgacaagcggcgtgcacacctttccagctgtgctgcaaagcagcggcctgtactctctgagcagcgtggtcacagtgcctagctctagcctgggcacccagacctacatctgcaatgtgaaccacaagcctagcaacaccaaggtggacaagaaggtggaacccaagagctgcgataagacccacacatgtcctccatgtcctgctccagaactgctcggcggcccttctgtgttcctgtttcctccaaagcctaaggacaccctgatgatcagcagaacccctgaagtgacctgcgtggtggtggatgtgtctcacgaggaccccgaagtgaagttcaattggtacgtggacggcgtggaagtgcacaacgccaagaccaagcctagagaggaacagtacaacagcacctacagagtggtgtccgtgctgaccgtgctgcaccaggattggctgaacggcaaagagtacaagtgcaaggtgtccaacaaggccctgcctgctcctatcgagaaaaccatcagcaaggccaagggccagcctagggaaccccaggtttacacccttcctccatgccgggatgagctgaccaagaaccaggtgtccctgtggtgtctcgtgaagggcttctaccccagcgacattgccgtggaatgggagagcaatggccagcctgagaacaactacaagacaacccctcctgtgctggacagcgacggctcattcttcctgtacagcaagctgacagtcgacaagtccagatggcagcagggcaacgtgttcagttgcagcgtgctgcacgaggccctgcacagtcactacacccagaagtccctgagcctgtctcctggatagtga

SEQ ID NO: 576 - DNA, 2844 bp, synthetic construct
  source 1..2844: mol_type = other DNA
gacaccgtgatgacacagagccctctgagcctgcctgtgacacctggcgaacctgccagcatcagctgtagaagcagccagagcctgctgaacagcaacggctacaactacctggattggtacgtgcagaagcccggccagtctcctcagctgctgatctacctgggcagcaatagagccagcggcgtgcccgatagattttctggctctggcagcggcaccgacttcaccctgaagatctctagagtggaagccgaggacgtgggcgtgtactactgtatgcagcctctgcagacccctctgttcacatttggccctggcaccaaggtggaaatcaaacgtacggtggccgctcccagcgtgttcatcttcccacctagcgacgagcagctgaagtccggcacagcctctgtcgtgtgcctgctgaacaacttctacccccgcgaggccaaagtgcagtggaaggtggacaacgccctgcagagcggcaacagccaggaaagcgtgaccgagcaggacagcaaggactccacctacagcctgagcagcaccctgacactgagcaaggccgactacgagaagcacaaggtgtacgcctgcgaagtgacccaccagggcctgtctagccccgtgaccaagagcttcaaccggggcgagtgtggcggcggaggatctggcggaggtggaagcggaggcggtggaagcgaaattgtgctgacccaatctccaggcactctgtctctgagccctggggagagagctaccctgtcttgtagagcctctcagtccgtgtcctccagctatctcgcctggtatcaacaaaagcctgggcaagcccctcggctgctcatctactctgctagctcaagagccaccggaattcccgacaggtttagcggaagcggctccggcacagacttcacactgaccatctctcggctggaacctgaagattttgccgtctatttttgtcagcagtatgtcgggctcacaggatggacctttggacagggcaccaaagtcgagatcaaaggaggtggtggctctggcggatctgggagtggtggcggaggctctgcttctggatctggacaaatgcagctcgttcagagcggccctgaagtgaagaaacctggcacctccgtgaaggtgtcctgcaaggccagcggcttcacctttacaagctctgccgtgcagtgggttcgacaagctagaggccagagactggaatggatcggctggatcgttgtcggcagcggcaacaccaattacgcccagaaattccaagagcgcgtgaccatcaccagagacatgagcaccagcacagcctacatggaactgagcagtctgcgcagcgaagataccgctgtgtactattgtgccgctcctaactgcagcaacgtcgtgtgctacgatggcttcgacatctggggacagggcacaatggtcaccgtgtcctctggaggcagctccgggcaagtgacactgagagagtctggccccgctctggtcaagcctacacagaccctgacactgacctgcaccttcagcggcttcagcctgtctactagaggcgtgtgcgtgtcctggatcagacagcctcctggaaaggccctggaatggctggccttcatcgactgggacgacgacaagtactacaacaccagcctgaaaacccggctgaccatcagcaaggacaccagcaagaaccaggtggtgctgaccatgaccaacgtgcaccctgtggataccgccacctactactgcgccagaatcagctctcaccacggctccagctggtgtaccaccttcgattattggggccagggcgctctcgtgacagtttctgctgcttcgaccaagggcccatccgtgtttcctctggctcccagcagcaagtctacaagcggaggaacagccgctctgggctgcctggtcaaggattactttcccgagcctgtgaccgtgtcctggaattctggcgctctgacaagcggcgtgcacacctttccagctgtgctgcaaagcagcggcctgtactctctgagcagcgtggtcacagtgcctagctctagcctgggcacccagacctacatctgcaatgtgaaccacaagcctagcaacaccaaggtggacaagaaggtggaacccaagagctgcgataagacccacacatgtcctccatgtcctgctccagaactgctcggcggcccttctgtgttcctgtttcctccaaagcctaaggacaccctgatgatcagcagaacccctgaagtgacctgcgtggtggtggatgtgtctcacgaggaccccgaagtgaagttcaattggtacgtggacggcgtggaagtgcacaacgccaagaccaagcctagagaggaacagtacaacagcacctacagagtggtgtccgtgctgaccgtgctgcaccaggattggctgaacggcaaagagtacaagtgcaaggtgtccaacaaggccctgcctgctcctatcgagaaaaccatcagcaaggccaagggccagcctagggaaccccaggtttgtacccttcctccaagccgggatgagctgaccaagaaccaggtgtccctgagctgtgccgtgaagggcttctaccccagcgacattgccgtggaatgggagagcaatggccagcctgagaacaactacaagacaacccctcctgtgctggacagcgacggctcattcttcctggtgagcaagctgacagtcgacaagtccagatggcagcagggcaacgtgttcagttgcagcgtgctgcacgaggccctgcacagtcactacacccagaagtccctgagcctgtctcctggatagtga

SEQ ID NO: 577 - DNA, 2820 bp, synthetic construct; identical to SEQ ID NO: 575
  source 1..2820: mol_type = other DNA

SEQ ID NO: 578 - DNA, 2844 bp, synthetic construct
  source 1..2844: mol_type = other DNA
gaaattgtgctgacccaatctccaggcactctgtctctgagccctggggagagagctaccctgtcttgtagagcctctcagtccgtgtcctccagctatctcgcctggtatcaacaaaagcctgggcaagcccctcggctgctcatctactctgctagctcaagagccaccggaattcccgacaggtttagcggaagcggctccggcacagacttcacactgaccatctctcggctggaacctgaagattttgccgtctatttttgtcagcagtatgtcgggctcacaggatggacctttggacagggcaccaaagtcgagatcaaacgtacggtggccgctcccagcgtgttcatcttcccacctagcgacgagcagctgaagtccggcacagcctctgtcgtgtgcctgctgaacaacttctacccccgcgaggccaaagtgcagtggaaggtggacaacgccctgcagagcggcaacagccaggaaagcgtgaccgagcaggacagcaaggactccacctacagcctgagcagcaccctgacactgagcaaggccgactacgagaagcacaaggtgtacgcctgcgaagtgacccaccagggcctgtctagccccgtgaccaagagcttcaaccggggcgagtgtggcggcggaggatctggcggaggtggaagcggaggcggtggaagcgacaccgtgatgacacagagccctctgagcctgcctgtgacacctggcgaacctgccagcatcagctgtagaagcagccagagcctgctgaacagcaacggctacaactacctggattggtacgtgcagaagcccggccagtctcctcagctgctgatctacctgggcagcaatagagccagcggcgtgcccgatagattttctggctctggcagcggcaccgacttcaccctgaagatctctagagtggaagccgaggacgtgggcgtgtactactgtatgcagcctctgcagacccctctgttcacatttggccctggcaccaaggtggaaatcaaaggaggtggtggctctggcggatctgggagtggtggcggaggctctgcttctggatctggacaagtgacactgagagagtctggccccgctctggtcaagcctacacagaccctgacactgacctgcaccttcagcggcttcagcctgtctactagaggcgtgtgcgtgtcctggatcagacagcctcctggaaaggccctggaatggctggccttcatcgactgggacgacgacaagtactacaacaccagcctgaaaacccggctgaccatcagcaaggacaccagcaagaaccaggtggtgctgaccatgaccaacgtgcaccctgtggataccgccacctactactgcgccagaatcagctctcaccacggctccagctggtgtaccaccttcgattattggggccagggcgctctcgtgacagtttctgctggaggcagctccgggcaaatgcagctcgttcagagcggccctgaagtgaagaaacctggcacctccgtgaaggtgtcctgcaaggccagcggcttcacctttacaagctctgccgtgcagtgggttcgacaagctagaggccagagactggaatggatcggctggatcgttgtcggcagcggcaacaccaattacgcccagaaattccaagagcgcgtgaccatcaccagagacatgagcaccagcacagcctacatggaactgagcagtctgcgcagcgaagataccgctgtgtactattgtgccgctcctaactgcagcaacgtcgtgtgctacgatggcttcgacatctggggacagggcacaatggtcaccgtgtcctctgcttcgaccaagggcccatccgtgtttcctctggctcccagcagcaagtctacaagcggaggaacagccgctctgggctgcctggtcaaggattactttcccgagcctgtgaccgtgtcctggaattctggcgctctgacaagcggcgtgcacacctttccagctgtgctgcaaagcagcggcctgtactctctgagcagcgtggtcacagtgcctagctctagcctgggcacccagacctacatctgcaatgtgaaccacaagcctagcaacaccaaggtggacaagaaggtggaacccaagagctgcgataagacccacacatgtcctccatgtcctgctccagaactgctcggcggcccttctgtgttcctgtttcctccaaagcctaaggacaccctgatgatcagcagaacccctgaagtgacctgcgtggtggtggatgtgtctcacgaggaccccgaagtgaagttcaattggtacgtggacggcgtggaagtgcacaacgccaagaccaagcctagagaggaacagtacaacagcacctacagagtggtgtccgtgctgaccgtgctgcaccaggattggctgaacggcaaagagtacaagtgcaaggtgtccaacaaggccctgcctgctcctatcgagaaaaccatcagcaaggccaagggccagcctagggaaccccaggtttgtacccttcctccaagccgggatgagctgaccaagaaccaggtgtccctgagctgtgccgtgaagggcttctaccccagcgacattgccgtggaatgggagagcaatggccagcctgagaacaactacaagacaacccctcctgtgctggacagcgacggctcattcttcctggtgagcaagctgacagtcgacaagtccagatggcagcagggcaacgtgttcagttgcagcgtgctgcacgaggccctgcacagtcactacacccagaagtccctgagcctgtctcctggatagtga

SEQ ID NO: 579 - DNA, 2820 bp, synthetic construct
  source 1..2820: mol_type = other DNA
gagatcgtgatgacacagagccccgccatcctgagtgtgtctccaggcgaaagagccacactgagctgtagagcctctcagagcgtggccatcaacctggcctggtatcagcagaagcctggacaggctccccggctgctgatctatgccgcttcttctagagccacaggcatccctggcagattttctggcagcggcagcgagacaaacttcaccctgaccatcagctccctgcagagcggcgatttcgccgtgtactactgccagcagtacatcacctggccacctagctacacctttggccagggcaccaagctggaaatcaaacgtacggtggccgctcccagcgtgttcatcttcccacctagcgacgagcagctgaagtccggcacagcctctgtcgtgtgcctgctgaacaacttctacccccgcgaggccaaagtgcagtggaaggtggacaacgccctgcagagcggcaacagccaggaaagcgtgaccgagcaggacagcaaggactccacctacagcctgagcagcaccctgacactgagcaaggccgactacgagaagcacaaggtgtacgcctgcgaagtgacccaccagggcctgtctagccccgtgaccaagagcttcaaccggggcgagtgtggcggcggaggatctggcggaggtggaagcggaggcggtggaagccagaccgtggtcacacaagagcctagctttagcgtgtcccctggcggcacagtgacactgacatgtggactttctagcggatctgtgtccaccgcctactttcccagctggtatcaacagaccccaggccaggcacctcggacactgatctacggcaccaacacaagatccagcggcgtgcccgataggttcagcggatctatcctgggcaacaaggccgcactgactatcacaggcgcccaggccgatgacgagagcgattactactgcgtgctgtacatgggcagaggcatcgtggtttttggcggaggcaccaagctgacagtgcttggaggtggtggctctggcggatctgggagtggtggcggaggctctgcttctggatctggacaggtccagcttgttgaaagtggcggaggggttgtgcaacccggaagatctctgagactgtcttgcgccgccagcggctttacactgtcctcttatggaatgcattgggttcgacaagctcccggcaagggactcgaatgggttgcagtgatttcctacgatggctccaacaagtattatgtcgactccgtgaaaggccggttcacaatctccagagacaactccaagaatacgctctatctccagatgaacagcctgcgggccgaagatacagccgtgtattactgcgctcgcggatgggcttactgggaactgctccctgattactattacggaatggacgtctggggacagggaacaaccgtgaccgttagctctggaggcagctccggggaagtgcagctggtggaaagtggcggagcactgattcagcctggcggctctctgagactgtcttgtgccgcctctggcatcatcgtgtccgccaactacatgagctgggtccgacaggcccctggcaaaggacttgaatgggtgtccgtgatctacagcggcggcagcaccttttacgccgactctgtgaagggcagattcaccatcagccgggacaacagcaagaacaccctgtacctggaaatgaacagcctgagagccgaggacaccgctgtgtactattgcgccagagatgcccctatcctgggcgtgtcagattggggccagggaacactggtcacagtgtctagcgcttcgaccaagggcccatccgtgtttcctctggctcccagcagcaagtctacaagcggaggaacagccgctctgggctgcctggtcaaggattactttcccgagcctgtgaccgtgtcctggaattctggcgctctgacaagcggcgtgcacacctttccagctgtgctgcaaagcagcggcctgtactctctgagcagcgtggtcacagtgcctagctctagcctgggcacccagacctacatctgcaatgtgaaccacaagcctagcaacaccaaggtggacaagaaggtggaacccaagagctgcgataagacccacacatgtcctccatgtcctgctccagaactgctcggcggcccttctgtgttcctgtttcctccaaagcctaaggacaccctgatgatcagcagaacccctgaagtgacctgcgtggtggtggatgtgtctcacgaggaccccgaagtgaagttcaattggtacgtggacggcgtggaagtgcacaacgccaagaccaagcctagagaggaacagtacaacagcacctacagagtggtgtccgtgctgaccgtgctgcaccaggattggctgaacggcaaagagtacaagtgcaaggtgtccaacaaggccctgcctgctcctatcgagaaaaccatcagcaaggccaagggccagcctagggaaccccaggtttacacccttcctccatgccgggatgagctgaccaagaaccaggtgtccctgtggtgtctcgtgaagggcttctaccccagcgacattgccgtggaatgggagagcaatggccagcctgagaacaactacaagacaacccctcctgtgctggacagcgacggctcattcttcctgtacagcaagctgacagtcgacaagtccagatggcagcagggcaacgtgttcagttgcagcgtgctgcacgaggccctgcacagtcactacacccagaagtccctgagcctgtctcctggatagtga

SEQ ID NO: 580 - DNA, 2844 bp, synthetic construct; identical to SEQ ID NO: 576
  source 1..2844: mol_type = other DNA

SEQ ID NO: 581 - DNA, 2820 bp, synthetic construct; identical to SEQ ID NO: 579
  source 1..2820: mol_type = other DNA

SEQ ID NO: 582 - DNA, 2844 bp, synthetic construct; identical to SEQ ID NO: 578
  source 1..2844: mol_type = other DNA

SEQ ID NO: 583 - DNA, 2898 bp, synthetic construct
  source 1..2898: mol_type = other DNA
gagatcgtgatgacacagagccccgccatcctgagtgtgtctccaggcgaaagagccacactgagctgtagagcctctcagagcgtggccatcaacctggcctggtatcagcagaagcctggacaggctccccggctgctgatctatgccgcttcttctagagccacaggcatccctggcagattttctggcagcggcagcgagacaaacttcaccctgaccatcagctccctgcagagcggcgatttcgccgtgtactactgccagcagtacatcacctggccacctagctacacctttggccagggcaccaagctggaaatcaaaggaggtggtggctctggcggatctgggagtggtggcggaggctctgcttctggatctggagaagtgcagctggtggaaagtggcggagcactgattcagcctggcggctctctgagactgtcttgtgccgcctctggcatcatcgtgtccgccaactacatgagctgggtccgacaggcccctggcaaaggacttgaatgggtgtccgtgatctacagcggcggcagcaccttttacgccgactctgtgaagggcagattcaccatcagccgggacaacagcaagaacaccctgtacctggaaatgaacagcctgagagccgaggacaccgctgtgtactattgcgccagagatgcccctatcctgggcgtgtcagattggggccagggaacactggtcacagtgtctagcggcggaggtggatccgggcagaccgtggtcacacaagagcctagctttagcgtgtcccctggcggcacagtgacactgacatgtggactttctagcggatctgtgtccaccgcctactttcccagctggtatcaacagaccccaggccaggcacctcggacactgatctacggcaccaacacaagatccagcggcgtgcccgataggttcagcggatctatcctgggcaacaaggccgcactgactatcacaggcgcccaggccgatgacgagagcgattactactgcgtgctgtacatgggcagaggcatcgtggtttttggcggaggcaccaagctgacagtgcttcgtacggtggccgctcccagcgtgttcatcttcccacctagcgacgagcagctgaagtccggcacagcctctgtcgtgtgcctgctgaacaacttctacccccgcgaggccaaagtgcagtggaaggtggacaacgccctgcagagcggcaacagccaggaaagcgtgaccgagcaggacagcaaggactccacctacagcctgagcagcaccctgacactgagcaaggccgactacgagaagcacaaggtgtacgcctgcgaagtgacccaccagggcctgtctagccccgtgaccaagagcttcaaccggggcgagtgtggaggcggaggatctggcggaggtggaagtggcggaggcggttctggtggtggtggctctggtggcggcggttcaggcggcggaggaagcggaggcggcggaagtggtggcggtggatctcaggtccagcttgttgaaagtggcggaggggttgtgcaacccggaagatctctgagactgtcttgcgccgccagcggctttacactgtcctcttatggaatgcattgggttcgacaagctcccggcaagggactcgaatgggttgcagtgatttcctacgatggctccaacaagtattatgtcgactccgtgaaaggccggttcacaatctccagagacaactccaagaatacgctctatctccagatgaacagcctgcgggccgaagatacagccgtgtattactgcgctcgcggatgggcttactgggaactgctccctgattactattacggaatggacgtctggggacagggaacaaccgtgaccgttagctctgcttcgaccaagggcccatccgtgtttcctctggctcccagcagcaagtctacaagcggaggaacagccgctctgggctgcctggtcaaggattactttcccgagcctgtgaccgtgtcctggaattctggcgctctgacaagcggcgtgcacacctttccagctgtgctgcaaagcagcggcctgtactctctgagcagcgtggtcacagtgcctagctctagcctgggcacccagacctacatctgcaatgtgaaccacaagcctagcaacaccaaggtggacaagaaggtggaacccaagagctgcgataagacccacacatgtcctccatgtcctgctccagaactgctcggcggcccttctgtgttcctgtttcctccaaagcctaaggacaccctgatgatcagcagaacccctgaagtgacctgcgtggtggtggatgtgtctcacgaggaccccgaagtgaagttcaattggtacgtggacggcgtggaagtgcacaacgccaagaccaagcctagagaggaacagtacaacagcacctacagagtggtgtccgtgctgaccgtgctgcaccaggattggctgaacggcaaagagtacaagtgcaaggtgtccaacaaggccctgcctgctcctatcgagaaaaccatcagcaaggccaagggccagcctagggaaccccaggtttacacccttcctccatgccgggatgagctgaccaagaaccaggtgtccctgtggtgtctcgtgaagggcttctaccccagcgacattgccgtggaatgggagagcaatggccagcctgagaacaactacaagacaacccctcctgtgctggacagcgacggctcattcttcctgtacagcaagctgacagtcgacaagtccagatggcagcagggcaacgtgttcagttgcagcgtgctgcacgaggccctgcacagtcactacacccagaagtccctgagcctgtctcctggatagtga

SEQ ID NO: 584 - DNA, 2922 bp, synthetic construct
  source 1..2922: mol_type = other DNA
gaaattgtgctgacccaatctccaggcactctgtctctgagccctggggagagagctaccctgtcttgtagagcctctcagtccgtgtcctccagctatctcgcctggtatcaacaaaagcctgggcaagcccctcggctgctcatctactctgctagctcaagagccaccggaattcccgacaggtttagcggaagcggctccggcacagacttcacactgaccatctctcggctggaacctgaagattttgccgtctatttttgtcagcagtatgtcgggctcacaggatggacctttggacagggcaccaaagtcgagatcaaaggaggtggtggctctggcggatctgggagtggtggcggaggctctgcttctggatctggacaaatgcagctcgttcagagcggccctgaagtgaagaaacctggcacctccgtgaaggtgtcctgcaaggccagcggcttcacctttacaagctctgccgtgcagtgggttcgacaagctagaggccagagactggaatggatcggctggatcgttgtcggcagcggcaacaccaattacgcccagaaattccaagagcgcgtgaccatcaccagagacatgagcaccagcacagcctacatggaactgagcagtctgcgcagcgaagataccgctgtgtactattgtgccgctcctaactgcagcaacgtcgtgtgctacgatggcttcgacatctggggacagggcacaatggtcaccgtgtcctctggcggaggtggatccggggacaccgtgatgacacagagccctctgagcctgcctgtgacacctggcgaacctgccagcatcagctgtagaagcagccagagcctgctgaacagcaacggctacaactacctggattggtacgtgcagaagcccggccagtctcctcagctgctgatctacctgggcagcaatagagccagcggcgtgcccgatagattttctggctctggcagcggcaccgacttcaccctgaagatctctagagtggaagccgaggacgtgggcgtgtactactgtatgcagcctctgcagacccctctgttcacatttggccctggcaccaaggtggaaatcaaacgtacggtggccgctcccagcgtgttcatcttcccacctagcgacgagcagctgaagtccggcacagcctctgtcgtgtgcctgctgaacaacttctacccccgcgaggccaaagtgcagtggaaggtggacaacgccctgcagagcggcaacagccaggaaagcgtgaccgagcaggacagcaaggactccacctacagcctgagcagcaccctgacactgagcaaggccgactacgagaagcacaaggtgtacgcctgcgaagtgacccaccagggcctgtctagccccgtgaccaagagcttcaaccggggcgagtgtggaggcggaggatctggcggaggtggaagtggcggaggcggttctggtggtggtggctctggtggcggcggttcaggcggcggaggaagcggaggcggcggaagtggtggcggtggatctcaagtgacactgagagagtctggccccgctctggtcaagcctacacagaccctgacactgacctgcaccttcagcggcttcagcctgtctactagaggcgtgtgcgtgtcctggatcagacagcctcctggaaaggccctggaatggctggccttcatcgactgggacgacgacaagtactacaacaccagcctgaaaacccggctgaccatcagcaaggacaccagcaagaaccaggtggtgctgaccatgaccaacgtgcaccctgtggataccgccacctactactgcgccagaatcagctctcaccacggctccagctggtgtaccaccttcgattattggggccagggcgctctcgtgacagtttctgctgcttcgaccaagggcccatccgtgtttcctctggctcccagcagcaagtctacaagcggaggaacagccgctctgggctgcctggtcaaggattactttcccgagcctgtgaccgtgtcctggaattctggcgctctgacaagcggcgtgcacacctttccagctgtgctgcaaagcagcggcctgtactctctgagcagcgtggtcacagtgcctagctctagcctgggcacccagacctacatctgcaatgtgaaccacaagcctagcaacaccaaggtggacaagaaggtggaacccaagagctgcgataagacccacacatgtcctccatgtcctgctccagaactgctcggcggcccttctgtgttcctgtttcctccaaagcctaaggacaccctgatgatcagcagaacccctgaagtgacctgcgtggtggtggatgtgtctcacgaggaccccgaagtgaagttcaattggtacgtggacggcgtggaagtgcacaacgccaagaccaagcctagagaggaacagtacaacagcacctacagagtggtgtccgtgctgaccgtgctgcaccaggattggctgaacggcaaagagtacaagtgcaaggtgtccaacaaggccctgcctgctcctatcgagaaaaccatcagcaaggccaagggccagcctagggaaccccaggtttgtacccttcctccaagccgggatgagctgaccaagaaccaggtgtccctgagctgtgccgtgaagggcttctaccccagcgacattgccgtggaatgggagagcaatggccagcctgagaacaactacaagacaacccctcctgtgctggacagcgacggctcattcttcctggtgagcaagctgacagtcgacaagtccagatggcagcagggcaacgtgttcagttgcagcgtgctgcacgaggccctgcacagtcactacacccagaagtccctgagcctgtctcctggatagtga

SEQ ID NO: 585 - DNA, 2916 bp, synthetic construct
  source 1..2916: mol_type = other DNA
gagatcgtgatgacacagagccccgccatcctgagtgtgtctccaggcgaaagagccacactgagctgtagagcctctcagagcgtggccatcaacctggcctggtatcagcagaagcctggacaggctccccggctgctgatctatgccgcttcttctagagccacaggcatccctggcagattttctggcagcggcagcgagacaaacttcaccctgaccatcagctccctgcagagcggcgatttcgccgtgtactactgccagcagtacatcacctggccacctagctacacctttggccagggcaccaagctggaaatcaaacgtacggtggccgctcccagcgtgttcatcttcccacctagcgacgagcagctgaagtccggcacagcctctgtcgtgtgcctgctgaacaacttctacccccgcgaggccaaagtgcagtggaaggtggacaacgccctgcagagcggcaacagccaggaaagcgtgaccgagcaggacagcaaggactccacctacagcctgagcagcaccctgacactgagcaaggccgactacgagaagcacaaggtgtacgcctgcgaagtgacccaccagggcctgtctagccccgtgaccaagagcttcaaccggggcgagtgtggaggcggaggatctggcggaggtggaagtggcggaggcggttctggtggtggtggctctggtggcggcggttcaggcggcggaggaagcggaggcggcggaagtggtggcggtggatctgaagtgcagctggtggaaagtggcggagcactgattcagcctggcggctctctgagactgtcttgtgccgcctctggcatcatcgtgtccgccaactacatgagctgggtccgacaggcccctggcaaaggacttgaatgggtgtccgtgatctacagcggcggcagcaccttttacgccgactctgtgaagggcagattcaccatcagccgggacaacagcaagaacaccctgtacctggaaatgaacagcctgagagccgaggacaccgctgtgtactattgcgccagagatgcccctatcctgggcgtgtcagattggggccagggaacactggtcacagtgtctagcgcttcgaccaagggcccatccgtgtttcctctggctcccagcagcaagtctacaagcggaggaacagccgctctgggctgcctggtcaaggattactttcccgagcctgtgaccgtgtcctggaattctggcgctctgacaagcggcgtgcacacctttccagctgtgctgcaaagcagcggcctgtactctctgagcagcgtggtcacagtgcctagctctagcctgggcacccagacctacatctgcaatgtgaaccacaagcctagcaacaccaaggtggacaagaaggtggaacccaagagctgcggcggaggtggatccgggcagaccgtggtcacacaagagcctagctttagcgtgtcccctggcggcacagtgacactgacatgtggactttctagcggatctgtgtccaccgcctactttcccagctggtatcaacagaccccaggccaggcacctcggacactgatctacggcaccaacacaagatccagcggcgtgcccgataggttcagcggatctatcctgggcaacaaggccgcactgactatcacaggcgcccaggccgatgacgagagcgattactactgcgtgctgtacatgggcagaggcatcgtggtttttggcggaggcaccaagctgacagtgcttggaggtggtggctctggcggatctgggagtggtggcggaggctctgcttctggatctggacaggtccagcttgttgaaagtggcggaggggttgtgcaacccggaagatctctgagactgtcttgcgccgccagcggctttacactgtcctcttatggaatgcattgggttcgacaagctcccggcaagggactcgaatgggttgcagtgatttcctacgatggctccaacaagtattatgtcgactccgtgaaaggccggttcacaatctccagagacaactccaagaatacgctctatctccagatgaacagcctgcgggccgaagatacagccgtgtattactgcgctcgcggatgggcttactgggaactgctccctgattactattacggaatggacgtctggggacagggaacaaccgtgaccgttagctctgcttctggcggctccggagataagacccacacatgtcctccatgtcctgctccagaactgctcggcggcccttctgtgttcctgtttcctccaaagcctaaggacaccctgatgatcagcagaacccctgaagtgacctgcgtggtggtggatgtgtctcacgaggaccccgaagtgaagttcaattggtacgtggacggcgtggaagtgcacaacgccaagaccaagcctagagaggaacagtacaacagcacctacagagtggtgtccgtgctgaccgtgctgcaccaggattggctgaacggcaaagagtacaagtgcaaggtgtccaacaaggccctgcctgctcctatcgagaaaaccatcagcaaggccaagggccagcctagggaaccccaggtttacacccttcctccatgccgggatgagctgaccaagaaccaggtgtccctgtggtgtctcgtgaagggcttctaccccagcgacattgccgtggaatgggagagcaatggccagcctgagaacaactacaagacaacccctcctgtgctggacagcgacggctcattcttcctgtacagcaagctgacagtcgacaagtccagatggcagcagggcaacgtgttcagttgcagcgtgctgcacgaggccctgcacagtcactacacccagaagtccctgagcctgtctcctggatagtga

SEQ ID NO: 586 - DNA, 2940 bp, synthetic construct
  source 1..2940: mol_type = other DNA
gaaattgtgctgacccaatctccaggcactctgtctctgagccctggggagagagctaccctgtcttgtagagcctctcagtccgtgtcctccagctatctcgcctggtatcaacaaaagcctgggcaagcccctcggctgctcatctactctgctagctcaagagccaccggaattcccgacaggtttagcggaagcggctccggcacagacttcacactgaccatctctcggctggaacctgaagattttgccgtctatttttgtcagcagtatgtcgggctcacaggatggacctttggacagggcaccaaagtcgagatcaaacgtacggtggccgctcccagcgtgttcatcttcccacctagcgacgagcagctgaagtccggcacagcctctgtcgtgtgcctgctgaacaacttctacccccgcgaggccaaagtgcagtggaaggtggacaacgccctgcagagcggcaacagccaggaaagcgtgaccgagcaggacagcaaggactccacctacagcctgagcagcaccctgacactgagcaaggccgactacgagaagcacaaggtgtacgcctgcgaagtgacccaccagggcctgtctagccccgtgaccaagagcttcaaccggggcgagtgtggaggcggaggatctggcggaggtggaagtggcggaggcggttctggtggtggtggctctggtggcggcggttcaggcggcggaggaagcggaggcggcggaagtggtggcggtggatctcaaatgcagctcgttcagagcggccctgaagtgaagaaacctggcacctccgtgaaggtgtcctgcaaggccagcggcttcacctttacaagctctgccgtgcagtgggttcgacaagctagaggccagagactggaatggatcggctggatcgttgtcggcagcggcaacaccaattacgcccagaaattccaagagcgcgtgaccatcaccagagacatgagcaccagcacagcctacatggaactgagcagtctgcgcagcgaagataccgctgtgtactattgtgccgctcctaactgcagcaacgtcgtgtgctacgatggcttcgacatctggggacagggcacaatggtcaccgtgtcctctgcttcgaccaagggcccatccgtgtttcctctggctcccagcagcaagtctacaagcggaggaacagccgctctgggctgcctggtcaaggattactttcccgagcctgtgaccgtgtcctggaattctggcgctctgacaagcggcgtgcacacctttccagctgtgctgcaaagcagcggcctgtactctctgagcagcgtggtcacagtgcctagctctagcctgggcacccagacctacatctgcaatgtgaaccacaagcctagcaacaccaaggtggacaagaaggtggaacccaagagctgcggcggaggtggatccggggacaccgtgatgacacagagccctctgagcctgcctgtgacacctggcgaacctgccagcatcagctgtagaagcagccagagcctgctgaacagcaacggctacaactacctggattggtacgtgcagaagcccggccagtctcctcagctgctgatctacctgggcagcaatagagccagcggcgtgcccgatagattttctggctctggcagcggcaccgacttcaccctgaagatctctagagtggaagccgaggacgtgggcgtgtactactgtatgcagcctctgcagacccctctgttcacatttggccctggcaccaaggtggaaatcaaaggaggtggtggctctggcggatctgggagtggtggcggaggctctgcttctggatctggacaagtgacactgagagagtctggccccgctctggtcaagcctacacagaccctgacactgacctgcaccttcagcggcttcagcctgtctactagaggcgtgtgcgtgtcctggatcagacagcctcctggaaaggccctggaatggctggccttcatcgactgggacgacgacaagtactacaacaccagcctgaaaacccggctgaccatcagcaaggacaccagcaagaaccaggtggtgctgaccatgaccaacgtgcaccctgtggataccgccacctactactgcgccagaatcagctctcaccacggctccagctggtgtaccaccttcgattattggggccagggcgctctcgtgacagtttctgctgcttctggcggctccggagataagacccacacatgtcctccatgtcctgctccagaactgctcggcggcccttctgtgttcctgtttcctccaaagcctaaggacaccctgatgatcagcagaacccctgaagtgacctgcgtggtggtggatgtgtctcacgaggaccccgaagtgaagttcaattggtacgtggacggcgtggaagtgcacaacgccaagaccaagcctagagaggaacagtacaacagcacctacagagtggtgtccgtgctgaccgtgctgcaccaggattggctgaacggcaaagagtacaagtgcaaggtgtccaacaaggccctgcctgctcctatcgagaaaaccatcagcaaggccaagggccagcctagggaaccccaggtttgtacccttcctccaagccgggatgagctgaccaagaaccaggtgtccctgagctgtgccgtgaagggcttctaccccagcgacattgccgtggaatgggagagcaatggccagcctgagaacaactacaagacaacccctcctgtgctggacagcgacggctcattcttcctggtgagcaagctgacagtcgacaagtccagatggcagcagggcaacgtgttcagttgcagcgtgctgcacgaggccctgcacagtcactacacccagaagtccctgagcctgtctcctggatagtga

SEQ ID NO: 587 - DNA, 2898 bp, synthetic construct; identical to SEQ ID NO: 583
  source 1..2898: mol_type = other DNA

SEQ ID NO: 588 - DNA, 2940 bp, synthetic construct; identical to SEQ ID NO: 586
  source 1..2940: mol_type = other DNA

SEQ ID NO: 589 - DNA, 2916 bp, synthetic construct; identical to SEQ ID NO: 585
  source 1..2916: mol_type = other DNA

SEQ ID NO: 590 - DNA, 2922 bp, synthetic construct; identical to SEQ ID NO: 584
  source 1..2922: mol_type = other DNA

SEQ ID NO: 591 - DNA, 2898 bp, synthetic construct
  source 1..2898: mol_type = other DNA
gagatcgtgctgacacagagccctggcacactgtcactgtctccaggcgaaacagccacactgagctgtagagccagccagagcttcagcagcgacctggcttggtatcagcagaagcctggacaggcccctcggctgttgatctatggcgcctcttctagagccacaggcatccccgatagattcagcggctctggcagcggcaccgatttcaccctgacaatcagcagactggaacccgccgacttcgccgtgtactactgtcagcagtacggcagcagccctcctgtgacatttggcggcggaacaaaggtggaaatcaaaggaggtggtggctctggcggatctgggagtggtggcggaggctctgcttctggatctggagaagtgcagctggtggaatcaggcggcggactgattcaacctggcggctctctgagactgtcttgtgctgcttctggcgtgatcgtgtcctacaactacatgaactgggtccgacaggctcccggcaaaggccttgaatgggtgtccgtgatctacagcggcggcagcaccttttacgccgattctgtgcggggcagattcaccatcagccgggacaacagcaagaacaccctgtacctgcagatgaacagcctgagagccgaggacaccgctgtgtactattgcgccagagatctgggacctgccggcgcttttgatatctggggcctgggcacaatggtcaccgtgtctagcggcggaggtggatccggggacaccgtgatgacacagagccctctgagcctgcctgtgacacctggcgaacctgccagcatcagctgtagaagcagccagagcctgctgaacagcaacggctacaactacctggattggtacgtgcagaagcccggccagtctcctcagctgctgatctacctgggcagcaatagagccagcggcgtgcccgatagattttctggctctggcagcggcaccgacttcaccctgaagatctctagagtggaagccgaggacgtgggcgtgtactactgtatgcagcctctgcagacccctctgttcacatttggccctggcaccaaggtggaaatcaaacgtacggtggccgctcccagcgtgttcatcttcccacctagcgacgagcagctgaagtccggcacagcctctgtcgtgtgcctgctgaacaacttctacccccgcgaggccaaagtgcagtggaaggtggacaacgccctgcagagcggcaacagccaggaaagcgtgaccgagcaggacagcaaggactccacctacagcctgagcagcaccctgacactgagcaaggccgactacgagaagcacaaggtgtacgcctgcgaagtgacccaccagggcctgtctagccccgtgaccaagagcttcaaccggggcgagtgtggaggcggaggatctggcggaggtggaagtggcggaggcggttctggtggtggtggctctggtggcggcggttcaggcggcggaggaagcggaggcggcggaagtggtggcggtggatctcaagtgacactgagagagtctggccccgctctggtcaagcctacacagaccctgacactgacctgcaccttcagcggcttcagcctgtctactagaggcgtgtgcgtgtcctggatcagacagcctcctggaaaggccctggaatggctggccttcatcgactgggacgacgacaagtactaccagaccagcctgaaaacccggctgaccatcagcaaggacaccagcaagaaccaggtggtgctgaccatgaccaacgtgcaccctgtggataccgccacctactactgcgccagaatcagctctcaccacggctccagctggtgtaccaccttcgattattggggccagggcgctctcgtgacagtttctgctgcttcgaccaagggcccatccgtgtttcctctggctcccagcagcaagtctacaagcggaggaacagccgctctgggctgcctggtcaaggattactttcccgagcctgtgaccgtgtcctggaattctggcgctctgacaagcggcgtgcacacctttccagctgtgctgcaaagcagcggcctgtactctctgagcagcgtggtcacagtgcctagctctagcctgggcacccagacctacatctgcaatgtgaaccacaagcctagcaacaccaaggtggacaagaaggtggaacccaagagctgcgataagacccacacatgtcctccatgtcctgctccagaactgctcggcggcccttctgtgttcctgtttcctccaaagcctaaggacaccctgatgatcagcagaacccctgaagtgacctgcgtggtggtggatgtgtctcacgaggaccccgaagtgaagttcaattggtacgtggacggcgtggaagtgcacaacgccaagaccaagcctagagaggaacagtacaacagcacctacagagtggtgtccgtgctgaccgtgctgcaccaggattggctgaacggcaaagagtacaagtgcaaggtgtccaacaaggccctgcctgctcctatcgagaaaaccatcagcaaggccaagggccagcctagggaaccccaggtttacacccttcctccaagccgggatgagctgaccaagaaccaggtgtccctgacatgtctcgtgaagggcttctaccccagcgacattgccgtggaatgggagagcaatggccagcctgagaacaactacaagacaacccctcctgtgctggacagcgacggctcattcttcctgtacagcaagctgacagtcgacaagtccagatggcagcagggcaacgtgttcagttgcagcgtgctgcacgaggccctgcacgctcactacacccagaagtccctgagcctgtctcctgga

SEQ ID NO: 592 - DNA, 2820 bp, synthetic construct
  source 1..2820: mol_type = other DNA
gagatcgtgctgacacagagccctggcacactgtcactgtctccaggcgaaacagccacactgagctgtagagccagccagagcttcagcagcgacctggcttggtatcagcagaagcctggacaggcccctcggctgttgatctatggcgcctcttctagagccacaggcatccccgatagattcagcggctctggcagcggcaccgatttcaccctgacaatcagcagactggaacccgccgacttcgccgtgtactactgtcagcagtacggcagcagccctcctgtgacatttggcggcggaacaaaggtggaaatcaaacgtacggtggccgctcccagcgtgttcatcttcccacctagcgacgagcagctgaagtccggcacagcctctgtcgtgtgcctgctgaacaacttctacccccgcgaggccaaagtgcagtggaaggtggacaacgccctgcagagcggcaacagccaggaaagcgtgaccgagcaggacagcaaggactccacctacagcctgagcagcaccctgacactgagcaaggccgactacgagaagcacaaggtgtacgcctgcgaagtgacccaccagggcctgtctagccccgtgaccaagagcttcaaccggggcgagtgtggcggcggaggatctggcggaggtggaagcggaggcggtggaagcgacaccgtgatgacacagagccctctgagcctgcctgtgacacctggcgaacctgccagcatcagctgtagaagcagccagagcctgctgaacagcaacggctacaactacctggattggtacgtgcagaagcccggccagtctcctcagctgctgatctacctgggcagcaatagagccagcggcgtgcccgatagattttctggctctggcagcggcaccgacttcaccctgaagatctctagagtggaagccgaggacgtgggcgtgtactactgtatgcagcctctgcagacccctctgttcacatttggccctggcaccaaggtggaaatcaaaggaggtggtggctctggcggatctgggagtggtggcggaggctctgcttctggatctggacaagtgacactgagagagtctggccccgctctggtcaagcctacacagaccctgacactgacctgcaccttcagcggcttcagcctgtctactagaggcgtgtgcgtgtcctggatcagacagcctcctggaaaggccctggaatggctggccttcatcgactgggacgacgacaagtactaccagaccagcctgaaaacccggctgaccatcagcaaggacaccagcaagaaccaggtggtgctgaccatgaccaacgtgcaccctgtggataccgccacctactactgcgccagaatcagctctcaccacggctccagctggtgtaccaccttcgattattggggccagggcgctctcgtgacagtttctgctggaggcagctccggggaagtgcagctggtggaatcaggcggcggactgattcaacctggcggctctctgagactgtcttgtgctgcttctggcgtgatcgtgtcctacaactacatgaactgggtccgacaggctcccggcaaaggccttgaatgggtgtccgtgatctacagcggcggcagcaccttttacgccgattctgtgcggggcagattcaccatcagccgggacaacagcaagaacaccctgtacctgcagatgaacagcctgagagccgaggacaccgctgtgtactattgcgccagagatctgggacctgccggcgcttttgatatctggggcctgggcacaatggtcaccgtgtctagcgcttcgaccaagggcccatccgtgtttcctctggctcccagcagcaagtctacaagcggaggaacagccgctctgggctgcctggtcaaggattactttcccgagcctgtgaccgtgtcctggaattctggcgctctgacaagcggcgtgcacacctttccagctgtgctgcaaagcagcggcctgtactctctgagcagcgtggtcacagtgcctagctctagcctgggcacccagacctacatctgcaatgtgaaccacaagcctagcaacaccaaggtggacaagaaggtggaacccaagagctgcgataagacccacacatgtcctccatgtcctgctccagaactgctcggcggcccttctgtgttcctgtttcctccaaagcctaaggacaccctgatgatcagcagaacccctgaagtgacctgcgtggtggtggatgtgtctcacgaggaccccgaagtgaagttcaattggtacgtggacggcgtggaagtgcacaacgccaagaccaagcctagagaggaacagtacaacagcacctacagagtggtgtccgtgctgaccgtgctgcaccaggattggctgaacggcaaagagtacaagtgcaaggtgtccaacaaggccctgcctgctcctatcgagaaaaccatcagcaaggccaagggccagcctagggaaccccaggtttacacccttcctccaagccgggatgagctgaccaagaaccaggtgtccctgacatgtctcgtgaagggcttctaccccagcgacattgccgtggaatgggagagcaatggccagcctgagaacaactacaagacaacccctcctgtgctggacagcgacggctcattcttcctgtacagcaagctgacagtcgacaagtccagatggcagcagggcaacgtgttcagttgcagcgtgctgcacgaggccctgcacgctcactacacccagaagtccctgagcctgtctcctgga

SEQ ID NO: 593 - DNA, 2865 bp, synthetic construct
  source 1..2865: mol_type = other DNA
gagatcgtgctgacacagagccctggcacactgtcactgtctccaggcgaaacagccacactgagctgtagagccagccagagcttcagcagcgacctggcttggtatcagcagaagcctggacaggcccctcggctgttgatctatggcgcctcttctagagccacaggcatccccgatagattcagcggctctggcagcggcaccgatttcaccctgacaatcagcagactggaacccgccgacttcgccgtgtactactgtcagcagtacggcagcagccctcctgtgacatttggcggcggaacaaaggtggaaatcaaaggcggatcctctggagacaccgtgatgacacagagccctctgagcctgcctgtgacacctggcgaacctgccagcatcagctgtagaagcagccagagcctgctgaacagcaacggctacaactacctggattggtacgtgcagaagcccggccagtctcctcagctgctgatctacctgggcagcaatagagccagcggcgtgcccgatagattttctggctctggcagcggcaccgacttcaccctgaagatctctagagtggaagccgaggacgtgggcgtgtactactgtatgcagcctctgcagacccctctgttcacatttggccctggcaccaaggtggaaatcaaaggaggtggtggctctggcggatctgggagtggtggcggaggctctgcttctggatctggacaagtgacactgagagagtctggccccgctctggtcaagcctacacagaccctgacactgacctgcaccttcagcggcttcagcctgtctactagaggcgtgtgcgtgtcctggatcagacagcctcctggaaaggccctggaatggctggccttcatcgactgggacgacgacaagtactaccagaccagcctgaaaacccggctgaccatcagcaaggacaccagcaagaaccaggtggtgctgaccatgaccaacgtgcaccctgtggataccgccacctactactgcgccagaatcagctctcaccacggctccagctggtgtaccaccttcgattattggggccagggcgctctcgtgacagtttctgctggaggcagctccggggaagtgcagctggtggaatcaggcggcggactgattcaacctggcggctctctgagactgtcttgtgctgcttctggcgtgatcgtgtcctacaactacatgaactgggtccgacaggctcccggcaaaggccttgaatgggtgtccgtgatctacagcggcggcagcaccttttacgccgattctgtgcggggcagattcaccatcagccgggacaacagcaagaacaccctgtacctgcagatgaacagcctgagagccgaggacaccgctgtgtactattgcgccagagatctgggacctgccggcgcttttgatatctggggcctgggcacaatggtcaccgtgtctagccgtacggtggccgctcccagcgtgttcatcttcccacctagcgacgagcagctgaagtccggcacagcctctgtcgtgtgcctgctgaacaacttctacccccgcgaggccaaagtgcagtggaaggtggacaacgccctgcagagcggcaacagccaggaaagcgtgaccgagcaggacagcaaggactccacctacagcctgagcagcaccctgacactgagcaaggccgactacgagaagcacaaggtgtacgcctgcgaagtgacccaccagggcctgtctagccccgtgaccaagagcttcaaccggggcgagtgtggaggcggaggatctggcggatctggaagtggcggaggtggtagtggcggcggtggatctgcttctggctctggcgcttcgaccaagggcccatccgtgtttcctctggctcccagcagcaagtctacaagcggaggaacagccgctctgggctgcctggtcaaggattactttcccgagcctgtgaccgtgtcctggaattctggcgctctgacaagcggcgtgcacacctttccagctgtgctgcaaagcagcggcctgtactctctgagcagcgtggtcacagtgcctagctctagcctgggcacccagacctacatctgcaatgtgaaccacaagcctagcaacaccaaggtggacaagaaggtggaacccaagagctgcgataagacccacacatgtcctccatgtcctgctccagaactgctcggcggcccttctgtgttcctgtttcctccaaagcctaaggacaccctgatgatcagcagaacccctgaagtgacctgcgtggtggtggatgtgtctcacgaggaccccgaagtgaagttcaattggtacgtggacggcgtggaagtgcacaacgccaagaccaagcctagagaggaacagtacaacagcacctacagagtggtgtccgtgctgaccgtgctgcaccaggattggctgaacggcaaagagtacaagtgcaaggtgtccaacaaggccctgcctgctcctatcgagaaaaccatcagcaaggccaagggccagcctagggaaccccaggtttacacccttcctccaagccgggatgagctgaccaagaaccaggtgtccctgacatgtctcgtgaagggcttctaccccagcgacattgccgtggaatgggagagcaatggccagcctgagaacaactacaagacaacccctcctgtgctggacagcgacggctcattcttcctgtacagcaagctgacagtcgacaagtccagatggcagcagggcaacgtgttcagttgcagcgtgctgcacgaggccctgcacgctcactacacccagaagtccctgagcctgtctcctgga

SEQ ID NO: 594 - DNA, 2892 bp, synthetic construct
  source 1..2892: mol_type = other DNA
gagatcgtgctgacacagagccctggcacactgtcactgtctccaggcgaaacagccacactgagctgtagagccagccagagcttcagcagcgacctggcttggtatcagcagaagcctggacaggcccctcggctgttgatctatggcgcctcttctagagccacaggcatccccgatagattcagcggctctggcagcggcaccgatttcaccctgacaatcagcagactggaacccgccgacttcgccgtgtactactgtcagcagtacggcagcagccctcctgtgacatttggcggcggaacaaaggtggaaatcaaaggaggtggtggctctggcggatctgggagtggtggcggaggctctgcttctggatctggagaagtgcagctggtggaatcaggcggcggactgattcaacctggcggctctctgagactgtcttgtgctgcttctggcgtgatcgtgtcctacaactacatgaactgggtccgacaggctcccggcaaaggccttgaatgggtgtccgtgatctacagcggcggcagcaccttttacgccgattctgtgcggggcagattcaccatcagccgggacaacagcaagaacaccctgtacctgcagatgaacagcctgagagccgaggacaccgctgtgtactattgcgccagagatctgggacctgccggcgcttttgatatctggggcctgggcacaatggtcaccgtgtctagcggcggaggtggatccgggcagaccgtggtcacacaagagcctagctttagcgtgtcccctggcggcacagtgacactgacatgtggactttctagcggatctgtgtccaccgcctactttcccagctggtatcaacagaccccaggccaggcacctcggacactgatctacggcaccaacacaagatccagcggcgtgcccgataggttcagcggatctatcctgggcaacaaggccgcactgactatcacaggcgcccaggccgatgacgagagcgattactactgcgtgctgtacatgggcagaggcatcgtggtttttggcggaggcaccaagctgacagtgcttcgtacggtggccgctcccagcgtgttcatcttcccacctagcgacgagcagctgaagtccggcacagcctctgtcgtgtgcctgctgaacaacttctacccccgcgaggccaaagtgcagtggaaggtggacaacgccctgcagagcggcaacagccaggaaagcgtgaccgagcaggacagcaaggactccacctacagcctgagcagcaccctgacactgagcaaggccgactacgagaagcacaaggtgtacgcctgcgaagtgacccaccagggcctgtctagccccgtgaccaagagcttcaaccggggcgagtgtggaggcggaggatctggcggaggtggaagtggcggaggcggttctggtggtggtggctctggtggcggcggttcaggcggcggaggaagcggaggcggcggaagtggtggcggtggatctcaggtccagcttgttgaaagtggcggaggggttgtgcaacccggaagatctctgagactgtcttgcgccgccagcggctttacactgtcctcttatggaatgcattgggttcgacaagctcccggcaagggactcgaatgggttgcagtgatttcctacgatggctccaacaagtattatgtcgactccgtgaaaggccggttcacaatctccagagacaactccaagaatacgctctatctccagatgaacagcctgcgggccgaagatacagccgtgtattactgcgctcgcggatgggcttactgggaactgctccctgattactattacggaatggacgtctggggacagggaacaaccgtgaccgttagctctgcttcgaccaagggcccatccgtgtttcctctggctcccagcagcaagtctacaagcggaggaacagccgctctgggctgcctggtcaaggattactttcccgagcctgtgaccgtgtcctggaattctggcgctctgacaagcggcgtgcacacctttccagctgtgctgcaaagcagcggcctgtactctctgagcagcgtggtcacagtgcctagctctagcctgggcacccagacctacatctgcaatgtgaaccacaagcctagcaacaccaaggtggacaagaaggtggaacccaagagctgcgataagacccacacatgtcctccatgtcctgctccagaactgctcggcggcccttctgtgttcctgtttcctccaaagcctaaggacaccctgatgatcagcagaacccctgaagtgacctgcgtggtggtggatgtgtctcacgaggaccccgaagtgaagttcaattggtacgtggacggcgtggaagtgcacaacgccaagaccaagcctagagaggaacagtacaacagcacctacagagtggtgtccgtgctgaccgtgctgcaccaggattggctgaacggcaaagagtacaagtgcaaggtgtccaacaaggccctgcctgctcctatcgagaaaaccatcagcaaggccaagggccagcctagggaaccccaggtttacacccttcctccatgccgggatgagctgaccaagaaccaggtgtccctgtggtgtctcgtgaagggcttctaccccagcgacattgccgtggaatgggagagcaatggccagcctgagaacaactacaagacaacccctcctgtgctggacagcgacggctcattcttcctgtacagcaagctgacagtcgacaagtccagatggcagcagggcaacgtgttcagttgcagcgtgctgcacgaggccctgcacgctcactacacccagaagtccctgagcctgtctcctgga

SEQ ID NO: 595 - DNA, 2898 bp, synthetic construct
  source 1..2898: mol_type = other DNA
gacaccgtgatgacacagagccctctgagcctgcctgtgacacctggcgaacctgccagcatcagctgtagaagcagccagagcctgctgaacagcaacggctacaactacctggattggtacgtgcagaagcccggccagtctcctcagctgctgatctacctgggcagcaatagagccagcggcgtgcccgatagattttctggctctggcagcggcaccgacttcaccctgaagatctctagagtggaagccgaggacgtgggcgtgtactactgtatgcagcctctgcagacccctctgttcacatttggccctggcaccaaggtggaaatcaaaggaggtggtggctctggcggatctgggagtggtggcggaggctctgcttctggatctggacaagtgacactgagagagtctggccccgctctggtcaagcctacacagaccctgacactgacctgcaccttcagcggcttcagcctgtctactagaggcgtgtgcgtgtcctggatcagacagcctcctggaaaggccctggaatggctggccttcatcgactgggacgacgacaagtactaccagaccagcctgaaaacccggctgaccatcagcaaggacaccagcaagaaccaggtggtgctgaccatgaccaacgtgcaccctgtggataccgccacctactactgcgccagaatcagctctcaccacggctccagctggtgtaccaccttcgattattggggccagggcgctctcgtgacagtttctgctggcggaggtggatccggggagatcgtgctgacacagagccctggcacactgtcactgtctccaggcgaaacagccacactgagctgtagagccagccagagcttcagcagcgacctggcttggtatcagcagaagcctggacaggcccctcggctgttgatctatggcgcctcttctagagccacaggcatccccgatagattcagcggctctggcagcggcaccgatttcaccctgacaatcagcagactggaacccgccgacttcgccgtgtactactgtcagcagtacggcagcagccctcctgtgacatttggcggcggaacaaaggtggaaatcaaacgtacggtggccgctcccagcgtgttcatcttcccacctagcgacgagcagctgaagtccggcacagcctctgtcgtgtgcctgctgaacaacttctacccccgcgaggccaaagtgcagtggaaggtggacaacgccctgcagagcggcaacagccaggaaagcgtgaccgagcaggacagcaaggactccacctacagcctgagcagcaccctgacactgagcaaggccgactacgagaagcacaaggtgtacgcctgcgaagtgacccaccagggcctgtctagccccgtgaccaagagcttcaaccggggcgagtgtggaggcggaggatctggcggaggtggaagtggcggaggcggttctggtggtggtggctctggtggcggcggttcaggcggcggaggaagcggaggcggcggaagtggtggcggtggatctgaagtgcagctggtggaatcaggcggcggactgattcaacctggcggctctctgagactgtcttgtgctgcttctggcgtgatcgtgtcctacaactacatgaactgggtccgacaggctcccggcaaaggccttgaatgggtgtccgtgatctacagcggcggcagcaccttttacgccgattctgtgcggggcagattcaccatcagccgggacaacagcaagaacaccctgtacctgcagatgaacagcctgagagccgaggacaccgctgtgtactattgcgccagagatctgggacctgccggcgcttttgatatctggggcctgggcacaatggtcaccgtgtctagcgcttcgaccaagggcccatccgtgtttcctctggctcccagcagcaagtctacaagcggaggaacagccgctctgggctgcctggtcaaggattactttcccgagcctgtgaccgtgtcctggaattctggcgctctgacaagcggcgtgcacacctttccagctgtgctgcaaagcagcggcctgtactctctgagcagcgtggtcacagtgcctagctctagcctgggcacccagacctacatctgcaatgtgaaccacaagcctagcaacaccaaggtggacaagaaggtggaacccaagagctgcgataagacccacacatgtcctccatgtcctgctccagaactgctcggcggcccttctgtgttcctgtttcctccaaagcctaaggacaccctgatgatcagcagaacccctgaagtgacctgcgtggtggtggatgtgtctcacgaggaccccgaagtgaagttcaattggtacgtggacggcgtggaagtgcacaacgccaagaccaagcctagagaggaacagtacaacagcacctacagagtggtgtccgtgctgaccgtgctgcaccaggattggctgaacggcaaagagtacaagtgcaaggtgtccaacaaggccctgcctgctcctatcgagaaaaccatcagcaaggccaagggccagcctagggaaccccaggtttgtacccttcctccaagccgggatgagctgaccaagaaccaggtgtccctgagctgtgccgtgaagggcttctaccccagcgacattgccgtggaatgggagagcaatggccagcctgagaacaactacaagacaacccctcctgtgctggacagcgacggctcattcttcctggtgagcaagctgacagtcgacaagtccagatggcagcagggcaacgtgttcagttgcagcgtgctgcacgaggccctgcacgctcactacacccagaagtccctgagcctgtctcctgga

SEQ ID NO: 596 - DNA, 2814 bp, synthetic construct
  source 1..2814: mol_type = other DNA
gagatcgtgctgacacagagccctggcacactgtcactgtctccaggcgaaacagccacactgagctgtagagccagccagagcttcagcagcgacctggcttggtatcagcagaagcctggacaggcccctcggctgttgatctatggcgcctcttctagagccacaggcatccccgatagattcagcggctctggcagcggcaccgatttcaccctgacaatcagcagactggaacccgccgacttcgccgtgtactactgtcagcagtacggcagcagccctcctgtgacatttggcggcggaacaaaggtggaaatcaaacgtacggtggccgctcccagcgtgttcatcttcccacctagcgacgagcagctgaagtccggcacagcctctgtcgtgtgcctgctgaacaacttctacccccgcgaggccaaagtgcagtggaaggtggacaacgccctgcagagcggcaacagccaggaaagcgtgaccgagcaggacagcaaggactccacctacagcctgagcagcaccctgacactgagcaaggccgactacgagaagcacaaggtgtacgcctgcgaagtgacccaccagggcctgtctagccccgtgaccaagagcttcaaccggggcgagtgtggcggcggaggatctggcggaggtggaagcggaggcggtggaagccagaccgtggtcacacaagagcctagctttagcgtgtcccctggcggcacagtgacactgacatgtggactttctagcggatctgtgtccaccgcctactttcccagctggtatcaacagaccccaggccaggcacctcggacactgatctacggcaccaacacaagatccagcggcgtgcccgataggttcagcggatctatcctgggcaacaaggccgcactgactatcacaggcgcccaggccgatgacgagagcgattactactgcgtgctgtacatgggcagaggcatcgtggtttttggcggaggcaccaagctgacagtgcttggaggtggtggctctggcggatctgggagtggtggcggaggctctgcttctggatctggacaggtccagcttgttgaaagtggcggaggggttgtgcaacccggaagatctctgagactgtcttgcgccgccagcggctttacactgtcctcttatggaatgcattgggttcgacaagctcccggcaagggactcgaatgggttgcagtgatttcctacgatggctccaacaagtattatgtcgactccgtgaaaggccggttcacaatctccagagacaactccaagaatacgctctatctccagatgaacagcctgcgggccgaagatacagccgtgtattactgcgctcgcggatgggcttactgggaactgctccctgattactattacggaatggacgtctggggacagggaacaaccgtgaccgttagctctggaggcagctccggggaagtgcagctggtggaatcaggcggcggactgattcaacctggcggctctctgagactgtcttgtgctgcttctggcgtgatcgtgtcctacaactacatgaactgggtccgacaggctcccggcaaaggccttgaatgggtgtccgtgatctacagcggcggcagcaccttttacgccgattctgtgcggggcagattcaccatcagccgggacaacagcaagaacaccctgtacctgcagatgaacagcctgagagccgaggacaccgctgtgtactattgcgccagagatctgggacctgccggcgcttttgatatctggggcctgggcacaatggtcaccgtgtctagcgcttcgaccaagggcccatccgtgtttcctctggctcccagcagcaagtctacaagcggaggaacagccgctctgggctgcctggtcaaggattactttcccgagcctgtgaccgtgtcctggaattctggcgctctgacaagcggcgtgcacacctttccagctgtgctgcaaagcagcggcctgtactctctgagcagcgtggtcacagtgcctagctctagcctgggcacccagacctacatctgcaatgtgaaccacaagcctagcaacaccaaggtggacaagaaggtggaacccaagagctgcgataagacccacacatgtcctccatgtcctgctccagaactgctcggcggcccttctgtgttcctgtttcctccaaagcctaaggacaccctgatgatcagcagaacccctgaagtgacctgcgtggtggtggatgtgtctcacgaggaccccgaagtgaagttcaattggtacgtggacggcgtggaagtgcacaacgccaagaccaagcctagagaggaacagtacaacagcacctacagagtggtgtccgtgctgaccgtgctgcaccaggattggctgaacggcaaagagtacaagtgcaaggtgtccaacaaggccctgcctgctcctatcgagaaaaccatcagcaaggccaagggccagcctagggaaccccaggtttacacccttcctccatgccgggatgagctgaccaagaaccaggtgtccctgtggtgtctcgtgaagggcttctaccccagcgacattgccgtggaatgggagagcaatggccagcctgagaacaactacaagacaacccctcctgtgctggacagcgacggctcattcttcctgtacagcaagctgacagtcgacaagtccagatggcagcagggcaacgtgttcagttgcagcgtgctgcacgaggccctgcacgctcactacacccagaagtccctgagcctgtctcctgga

SEQ ID NO: 597 - DNA, 2820 bp, synthetic construct
  source 1..2820: mol_type = other DNA
gagatcgtgctgacacagagccctggcacactgtcactgtctccaggcgaaacagccacactgagctgtagagccagccagagcttcagcagcgacctggcttggtatcagcagaagcctggacaggcccctcggctgttgatctatggcgcctcttctagagccacaggcatccccgatagattcagcggctctggcagcggcaccgatttcaccctgacaatcagcagactggaacccgccgacttcgccgtgtactactgtcagcagtacggcagcagccctcctgtgacatttggcggcggaacaaaggtggaaatcaaacgtacggtggccgctcccagcgtgttcatcttcccacctagcgacgagcagctgaagtccggcacagcctctgtcgtgtgcctgctgaacaacttctacccccgcgaggccaaagtgcagtggaaggtggacaacgccctgcagagcggcaacagccaggaaagcgtgaccgagcaggacagcaaggactccacctacagcctgagcagcaccctgacactgagcaaggccgactacgagaagcacaaggtgtacgcctgcgaagtgacccaccagggcctgtctagccccgtgaccaagagcttcaaccggggcgagtgtggcggcggaggatctggcggaggtggaagcggaggcggtggaagcgacaccgtgatgacacagagccctctgagcctgcctgtgacacctggcgaacctgccagcatcagctgtagaagcagccagagcctgctgaacagcaacggctacaactacctggattggtacgtgcagaagcccggccagtctcctcagctgctgatctacctgggcagcaatagagccagcggcgtgcccgatagattttctggctctggcagcggcaccgacttcaccctgaagatctctagagtggaagccgaggacgtgggcgtgtactactgtatgcagcctctgcagacccctctgttcacatttggccctggcaccaaggtggaaatcaaaggaggtggtggctctggcggatctgggagtggtggcggaggctctgcttctggatctggacaagtgacactgagagagtctggccccgctctggtcaagcctacacagaccctgacactgacctgcaccttcagcggcttcagcctgtctactagaggcgtgtgcgtgtcctggatcagacagcctcctggaaaggccctggaatggctggccttcatcgactgggacgacgacaagtactaccagaccagcctgaaaacccggctgaccatcagcaaggacaccagcaagaaccaggtggtgctgaccatgaccaacgtgcaccctgtggataccgccacctactactgcgccagaatcagctctcaccacggctccagctggtgtaccaccttcgattattggggccagggcgctctcgtgacagtttctgctggaggcagctccggggaagtgcagctggtggaatcaggcggcggactgattcaacctggcggctctctgagactgtcttgtgctgcttctggcgtgatcgtgtcctacaactacatgaactgggtccgacaggctcccggcaaaggccttgaatgggtgtccgtgatctacagcggcggcagcaccttttacgccgattctgtgcggggcagattcaccatcagccgggacaacagcaagaacaccctgtacctgcagatgaacagcctgagagccgaggacaccgctgtgtactattgcgccagagatctgggacctgccggcgcttttgatatctggggcctgggcacaatggtcaccgtgtctagcgcttcgaccaagggcccatccgtgtttcctctggctcccagcagcaagtctacaagcggaggaacagccgctctgggctgcctggtcaaggattactttcccgagcctgtgaccgtgtcctggaattctggcgctctgacaagcggcgtgcacacctttccagctgtgctgcaaagcagcggcctgtactctctgagcagcgtggtcacagtgcctagctctagcctgggcacccagacctacatctgcaatgtgaaccacaagcctagcaacaccaaggtggacaagaaggtggaacccaagagctgcgataagacccacacatgtcctccatgtcctgctccagaactgctcggcggcccttctgtgttcctgtttcctccaaagcctaaggacaccctgatgatcagcagaacccctgaagtgacctgcgtggtggtggatgtgtctcacgaggaccccgaagtgaagttcaattggtacgtggacggcgtggaagtgcacaacgccaagaccaagcctagagaggaacagtacaacagcacctacagagtggtgtccgtgctgaccgtgctgcaccaggattggctgaacggcaaagagtacaagtgcaaggtgtccaacaaggccctgcctgctcctatcgagaaaaccatcagcaaggccaagggccagcctagggaaccccaggtttgtacccttcctccaagccgggatgagctgaccaagaaccaggtgtccctgagctgtgccgtgaagggcttctaccccagcgacattgccgtggaatgggagagcaatggccagcctgagaacaactacaagacaacccctcctgtgctggacagcgacggctcattcttcctggtgagcaagctgacagtcgacaagtccagatggcagcagggcaacgtgttcagttgcagcgtgctgcacgaggccctgcacgctcactacacccagaagtccctgagcctgtctcctgga

SEQ ID NO: 598 - DNA, 2859 bp, synthetic construct
  source 1..2859: mol_type = other DNA
gagatcgtgctgacacagagccctggcacactgtcactgtctccaggcgaaacagccacactgagctgtagagccagccagagcttcagcagcgacctggcttggtatcagcagaagcctggacaggcccctcggctgttgatctatggcgcctcttctagagccacaggcatccccgatagattcagcggctctggcagcggcaccgatttcaccctgacaatcagcagactggaacccgccgacttcgccgtgtactactgtcagcagtacggcagcagccctcctgtgacatttggcggcggaacaaaggtggaaatcaaaggcggatcctctggacagaccgtggtcacacaagagcctagctttagcgtgtcccctggcggcacagtgacactgacatgtggactttctagcggatctgtgtccaccgcctactttcccagctggtatcaacagaccccaggccaggcacctcggacactgatctacggcaccaacacaagatccagcggcgtgcccgataggttcagcggatctatcctgggcaacaaggccgcactgactatcacaggcgcccaggccgatgacgagagcgattactactgcgtgctgtacatgggcagaggcatcgtggtttttggcggaggcaccaagctgacagtgcttggaggtggtggctctggcggatctgggagtggtggcggaggctctgcttctggatctggacaggtccagcttgttgaaagtggcggaggggttgtgcaacccggaagatctctgagactgtcttgcgccgccagcggctttacactgtcctcttatggaatgcattgggttcgacaagctcccggcaagggactcgaatgggttgcagtgatttcctacgatggctccaacaagtattatgtcgactccgtgaaaggccggttcacaatctccagagacaactccaagaatacgctctatctccagatgaacagcctgcgggccgaagatacagccgtgtattactgcgctcgcggatgggcttactgggaactgctccctgattactattacggaatggacgtctggggacagggaacaaccgtgaccgttagctctggaggcagctccggggaagtgcagctggtggaatcaggcggcggactgattcaacctggcggctctctgagactgtcttgtgctgcttctggcgtgatcgtgtcctacaactacatgaactgggtccgacaggctcccggcaaaggccttgaatgggtgtccgtgatctacagcggcggcagcaccttttacgccgattctgtgcggggcagattcaccatcagccgggacaacagcaagaacaccctgtacctgcagatgaacagcctgagagccgaggacaccgctgtgtactattgcgccagagatctgggacctgccggcgcttttgatatctggggcctgggcacaatggtcaccgtgtctagccgtacggtggccgctcccagcgtgttcatcttcccacctagcgacgagcagctgaagtccggcacagcctctgtcgtgtgcctgctgaacaacttctacccccgcgaggccaaagtgcagtggaaggtggacaacgccctgcagagcggcaacagccaggaaagcgtgaccgagcaggacagcaaggactccacctacagcctgagcagcaccctgacactgagcaaggccgactacgagaagcacaaggtgtacgcctgcgaagtgacccaccagggcctgtctagccccgtgaccaagagcttcaaccggggcgagtgtggaggcggaggatctggcggatctggaagtggcggaggtggtagtggcggcggtggatctgcttctggctctggcgcttcgaccaagggcccatccgtgtttcctctggctcccagcagcaagtctacaagcggaggaacagccgctctgggctgcctggtcaaggattactttcccgagcctgtgaccgtgtcctggaattctggcgctctgacaagcggcgtgcacacctttccagctgtgctgcaaagcagcggcctgtactctctgagcagcgtggtcacagtgcctagctctagcctgggcacccagacctacatctgcaatgtgaaccacaagcctagcaacaccaaggtggacaagaaggtggaacccaagagctgcgataagacccacacatgtcctccatgtcctgctccagaactgctcggcggcccttctgtgttcctgtttcctccaaagcctaaggacaccctgatgatcagcagaacccctgaagtgacctgcgtggtggtggatgtgtctcacgaggaccccgaagtgaagttcaattggtacgtggacggcgtggaagtgcacaacgccaagaccaagcctagagaggaacagtacaacagcacctacagagtggtgtccgtgctgaccgtgctgcaccaggattggctgaacggcaaagagtacaagtgcaaggtgtccaacaaggccctgcctgctcctatcgagaaaaccatcagcaaggccaagggccagcctagggaaccccaggtttacacccttcctccatgccgggatgagctgaccaagaaccaggtgtccctgtggtgtctcgtgaagggcttctaccccagcgacattgccgtggaatgggagagcaatggccagcctgagaacaactacaagacaacccctcctgtgctggacagcgacggctcattcttcctgtacagcaagctgacagtcgacaagtccagatggcagcagggcaacgtgttcagttgcagcgtgctgcacgaggccctgcacgctcactacacccagaagtccctgagcctgtctcctgga

SEQ ID NO: 599 - DNA, 2865 bp, synthetic construct
  source 1..2865: mol_type = other DNA
gagatcgtgctgacacagagccctggcacactgtcactgtctccaggcgaaacagccacactgagctgtagagccagccagagcttcagcagcgacctggcttggtatcagcagaagcctggacaggcccctcggctgttgatctatggcgcctcttctagagccacaggcatccccgatagattcagcggctctggcagcggcaccgatttcaccctgacaatcagcagactggaacccgccgacttcgccgtgtactactgtcagcagtacggcagcagccctcctgtgacatttggcggcggaacaaaggtggaaatcaaaggcggatcctctggagacaccgtgatgacacagagccctctgagcctgcctgtgacacctggcgaacctgccagcatcagctgtagaagcagccagagcctgctgaacagcaacggctacaactacctggattggtacgtgcagaagcccggccagtctcctcagctgctgatctacctgggcagcaatagagccagcggcgtgcccgatagattttctggctctggcagcggcaccgacttcaccctgaagatctctagagtggaagccgaggacgtgggcgtgtactactgtatgcagcctctgcagacccctctgttcacatttggccctggcaccaaggtggaaatcaaaggaggtggtggctctggcggatctgggagtggtggcggaggctctgcttctggatctggacaagtgacactgagagagtctggccccgctctggtcaagcctacacagaccctgacactgacctgcaccttcagcggcttcagcctgtctactagaggcgtgtgcgtgtcctggatcagacaacctcctggaaaggccctggaatggctggccttcatcgactgggacgacgacaagtactaccagaccagcctgaaaacccggctgaccatcagcaaggacaccagcaagaaccaggtggtgctgaccatgaccaacgtgcaccctgtggataccgccacctactactgcgccagaatcagctctcaccacggctccagctggtgtaccaccttcgattattggggccagggcgctctcgtgacagtttctgctggaggcagctccggggaagtgcagctggtggaatcaggcggcggactgattcaacctggcggctctctgagactgtcttgtgctgcttctggcgtgatcgtgtcctacaactacatgaactgggtccgacaggctcccggcaaaggccttgaatgggtgtccgtgatctacagcggcggcagcaccttttacgccgattctgtgcggggcagattcaccatcagccgggacaacagcaagaacaccctgtacctgcagatgaacagcctgagagccgaggacaccgctgtgtactattgcgccagagatctgggacctgccggcgcttttgatatctggggcctgggcacaatggtcaccgtgtctagccgtacggtggccgctcccagcgtgttcatcttcccacctagcgacgagcagctgaagtccggcacagcctctgtcgtgtgcctgctgaacaacttctacccccgcgaggccaaagtgcagtggaaggtggacaacgccctgcagagcggcaacagccaggaaagcgtgaccgagcaggacagcaaggactccacctacagcctgagcagcaccctgacactgagcaaggccgactacgagaagcacaaggtgtacgcctgcgaagtgacccaccagggcctgtctagccccgtgaccaagagcttcaaccggggcgagtgtggaggcggaggatctggcggatctggaagtggcggaggtggtagtggcggcggtggatctgcttctggctctggcgcttcgaccaagggcccatccgtgtttcctctggctcccagcagcaagtctacaagcggaggaacagccgctctgggctgcctggtcaaggattactttcccgagcctgtgaccgtgtcctggaattctggcgctctgacaagcggcgtgcacacctttccagctgtgctgcaaagcagcggcctgtactctctgagcagcgtggtcacagtgcctagctctagcctgggcacccagacctacatctgcaatgtgaaccacaagcctagcaacaccaaggtggacaagaaggtggaacccaagagctgcgataagacccacacatgtcctccatgtcctgctccagaactgctcggcggcccttctgtgttcctgtttcctccaaagcctaaggacaccctgatgatcagcagaacccctgaagtgacctgcgtggtggtggatgtgtctcacgaggaccccgaagtgaagttcaattggtacgtggacggcgtggaagtgcacaacgccaagaccaagcctagagaggaacagtacaacagcacctacagagtggtgtccgtgctgaccgtgctgcaccaggattggctgaacggcaaagagtacaagtgcaaggtgtccaacaaggccctgcctgctcctatcgagaaaaccatcagcaaggccaagggccagcctagggaaccccaggtttgtacccttcctccaagccgggatgagctgaccaagaaccaggtgtccctgagctgtgccgtgaagggcttctaccccagcgacattgccgtggaatgggagagcaatggccagcctgagaacaactacaagacaacccctcctgtgctggacagcgacggctcattcttcctggtgagcaagctgacagtcgacaagtccagatggcagcagggcaacgtgttcagttgcagcgtgctgcacgaggccctgcacgctcactacacccagaagtccctgagcctgtctcctgga

SEQ ID NO: 600 - DNA, 2883 bp, synthetic construct
  source 1..2883: mol_type = other DNA
gagatcgtgctgacacagagccctggcacactgtcactgtctccaggcgaaacagccacactgagctgtagagccagccagagcttcagcagcgacctggcttggtatcagcagaagcctggacaggcccctcggctgttgatctatggcgcctcttctagagccacaggcatccccgatagattcagcggctctggcagcggcaccgatttcaccctgacaatcagcagactggaacccgccgacttcgccgtgtactactgtcagcagtacggcagcagccctcctgtgacatttggcggcggaacaaaggtggaaatcaaaggaggtggtggctctggcggatctgggagtggtggcggaggctctgcttctggatctggagaagtgcagctggtggaatcaggcggcggactgattcaacctggcggctctctgagactgtcttgtgctgcttctggcgtgatcgtgtcctacaactacatgaactgggtccgacaggctcccggcaaaggccttgaatgggtgtccgtgatctacagcggcggcagcaccttttacgccgattctgtgcggggcagattcaccatcagccgggacaacagcaagaacaccctgtacctgcagatgaacagcctgagagccgaggacaccgctgtgtactattgcgccagagatctgggacctgccggcgcttttgatatctggggcctgggcacaatggtcaccgtgtctagcggcggaggtggatccggggacaccgtgatgacacagagccctctgagcctgcctgtgacacctggcgaacctgccagcatcagctgtagaagcagccagagcctgctgaacagcaacggctacaactacctggattggtacgtgcagaagcccggccagtctcctcagctgctgatctacctgggcagcaatagagccagcggcgtgcccgatagattttctggctctggcagcggcaccgacttcaccctgaagatctctagagtggaagccgaggacgtgggcgtgtactactgtatgcagcctctgcagacccctctgttcacatttggccctggcaccaaggtggaaatcaaacgtacggtggccgctcccagcgtgttcatcttcccacctagcgacgagcagctgaagtccggcacagcctctgtcgtgtgcctgctgaacaacttctacccccgcgaggccaaagtgcagtggaaggtggacaacgccctgcagagcggcaacagccaggaaagcgtgaccgagcaggacagcaaggactccacctacagcctgagcagcaccctgacactgagcaaggccgactacgagaagcacaaggtgtacgcctgcgaagtgacccaccagggcctgtctagccccgtgaccaagagcttcaaccggggcgagtgtggaggcggaggatctggcggaggtggaagtggcggaggcggttctggtggtggtggctctggtggcggaggaagcggaggcggcggaagtggtggcggtggatctcaagtgacactgagagagtctggccccgctctggtcaagcctacacagaccctgacactgacctgcaccttcagcggcttcagcctgtctactagaggcgtgtgcgtgtcctggatcagacagcctcctggaaaggccctggaatggctggccttcatcgactgggacgacgacaagtactaccagaccagcctgaaaacccggctgaccatcagcaaggacaccagcaagaaccaggtggtgctgaccatgaccaacgtgcaccctgtggataccgccacctactactgcgccagaatcagctctcaccacggctccagctggtgtaccaccttcgattattggggccagggcgctctcgtgacagtttctgctgcttcgaccaagggcccatccgtgtttcctctggctcccagcagcaagtctacaagcggaggaacagccgctctgggctgcctggtcaaggattactttcccgagcctgtgaccgtgtcctggaattctggcgctctgacaagcggcgtgcacacctttccagctgtgctgcaaagcagcggcctgtactctctgagcagcgtggtcacagtgcctagctctagcctgggcacccagacctacatctgcaatgtgaaccacaagcctagcaacaccaaggtggacaagaaggtggaacccaagagctgcgataagacccacacatgtcctccatgtcctgctccagaactgctcggcggcccttctgtgttcctgtttcctccaaagcctaaggacaccctgatgatcagcagaacccctgaagtgacctgcgtggtggtggatgtgtctcacgaggaccccgaagtgaagttcaattggtacgtggacggcgtggaagtgcacaacgccaagaccaagcctagagaggaacagtacaacagcacctacagagtggtgtccgtgctgaccgtgctgcaccaggattggctgaacggcaaagagtacaagtgcaaggtgtccaacaaggccctgcctgctcctatcgagaaaaccatcagcaaggccaagggccagcctagggaaccccaggtttacacccttcctccaagccgggatgagctgaccaagaaccaggtgtccctgacatgtctcgtgaagggcttctaccccagcgacattgccgtggaatgggagagcaatggccagcctgagaacaactacaagacaacccctcctgtgctggacagcgacggctcattcttcctgtacagcaagctgacagtcgacaagtccagatggcagcagggcaacgtgttcagttgcagcgtgctgcacgaggccctgcacgctcactacacccagaagtccctgagcctgtctcctgga

SEQ ID NO: 601 - DNA, 2868 bp, synthetic construct
  source 1..2868: mol_type = other DNA
gagatcgtgctgacacagagccctggcacactgtcactgtctccaggcgaaacagccacactgagctgtagagccagccagagcttcagcagcgacctggcttggtatcagcagaagcctggacaggcccctcggctgttgatctatggcgcctcttctagagccacaggcatccccgatagattcagcggctctggcagcggcaccgatttcaccctgacaatcagcagactggaacccgccgacttcgccgtgtactactgtcagcagtacggcagcagccctcctgtgacatttggcggcggaacaaaggtggaaatcaaaggaggtggtggctctggcggatctgggagtggtggcggaggctctgcttctggatctggagaagtgcagctggtggaatcaggcggcggactgattcaacctggcggctctctgagactgtcttgtgctgcttctggcgtgatcgtgtcctacaactacatgaactgggtccgacaggctcccggcaaaggccttgaatgggtgtccgtgatctacagcggcggcagcaccttttacgccgattctgtgcggggcagattcaccatcagccgggacaacagcaagaacaccctgtacctgcagatgaacagcctgagagccgaggacaccgctgtgtactattgcgccagagatctgggacctgccggcgcttttgatatctggggcctgggcacaatggtcaccgtgtctagcggcggaggtggatccggggacaccgtgatgacacagagccctctgagcctgcctgtgacacctggcgaacctgccagcatcagctgtagaagcagccagagcctgctgaacagcaacggctacaactacctggattggtacgtgcagaagcccggccagtctcctcagctgctgatctacctgggcagcaatagagccagcggcgtgcccgatagattttctggctctggcagcggcaccgacttcaccctgaagatctctagagtggaagccgaggacgtgggcgtgtactactgtatgcagcctctgcagacccctctgttcacatttggccctggcaccaaggtggaaatcaaacgtacggtggccgctcccagcgtgttcatcttcccacctagcgacgagcagctgaagtccggcacagcctctgtcgtgtgcctgctgaacaacttctacccccgcgaggccaaagtgcagtggaaggtggacaacgccctgcagagcggcaacagccaggaaagcgtgaccgagcaggacagcaaggactccacctacagcctgagcagcaccctgacactgagcaaggccgactacgagaagcacaaggtgtacgcctgcgaagtgacccaccagggcctgtctagccccgtgaccaagagcttcaaccggggcgagtgtggaggcggaggatctggcggaggtggaagtggcggaggcggttctggtggtggtggctctggtggcggcggaagtggtggcggtggatctcaagtgacactgagagagtctggccccgctctggtcaagcctacacagaccctgacactgacctgcaccttcagcggcttcagcctgtctactagaggcgtgtgcgtgtcctggatcagacagcctcctggaaaggccctggaatggctggccttcatcgactgggacgacgacaagtactaccagaccagcctgaaaacccggctgaccatcagcaaggacaccagcaagaaccaggtggtgctgaccatgaccaacgtgcaccctgtggataccgccacctactactgcgccagaatcagctctcaccacggctccagctggtgtaccaccttcgattattggggccagggcgctctcgtgacagtttctgctgcttcgaccaagggcccatccgtgtttcctctggctcccagcagcaagtctacaagcggaggaacagccgctctgggctgcctggtcaaggattactttcccgagcctgtgaccgtgtcctggaattctggcgctctgacaagcggcgtgcacacctttccagctgtgctgcaaagcagcggcctgtactctctgagcagcgtggtcacagtgcctagctctagcctgggcacccagacctacatctgcaatgtgaaccacaagcctagcaacaccaaggtggacaagaaggtggaacccaagagctgcgataagacccacacatgtcctccatgtcctgctccagaactgctcggcggcccttctgtgttcctgtttcctccaaagcctaaggacaccctgatgatcagcagaacccctgaagtgacctgcgtggtggtggatgtgtctcacgaggaccccgaagtgaagttcaattggtacgtggacggcgtggaagtgcacaacgccaagaccaagcctagagaggaacagtacaacagcacctacagagtggtgtccgtgctgaccgtgctgcaccaggattggctgaacggcaaagagtacaagtgcaaggtgtccaacaaggccctgcctgctcctatcgagaaaaccatcagcaaggccaagggccagcctagggaaccccaggtttacacccttcctccaagccgggatgagctgaccaagaaccaggtgtccctgacatgtctcgtgaagggcttctaccccagcgacattgccgtggaatgggagagcaatggccagcctgagaacaactacaagacaacccctcctgtgctggacagcgacggctcattcttcctgtacagcaagctgacagtcgacaagtccagatggcagcagggcaacgtgttcagttgcagcgtgctgcacgaggccctgcacgctcactacacccagaagtccctgagcctgtctcctgga

SEQ ID NO: 602 - DNA, 2853 bp, synthetic construct
  source 1..2853: mol_type = other DNA
gagatcgtgctgacacagagccctggcacactgtcactgtctccaggcgaaacagccacactgagctgtagagccagccagagcttcagcagcgacctggcttggtatcagcagaagcctggacaggcccctcggctgttgatctatggcgcctcttctagagccacaggcatccccgatagattcagcggctctggcagcggcaccgatttcaccctgacaatcagcagactggaacccgccgacttcgccgtgtactactgtcagcagtacggcagcagccctcctgtgacatttggcggcggaacaaaggtggaaatcaaaggaggtggtggctctggcggatctgggagtggtggcggaggctctgcttctggatctggagaagtgcagctggtggaatcaggcggcggactgattcaacctggcggctctctgagactgtcttgtgctgcttctggcgtgatcgtgtcctacaactacatgaactgggtccgacaggctcccggcaaaggccttgaatgggtgtccgtgatctacagcggcggcagcaccttttacgccgattctgtgcggggcagattcaccatcagccgggacaacagcaagaacaccctgtacctgcagatgaacagcctgagagccgaggacaccgctgtgtactattgcgccagagatctgggacctgccggcgcttttgatatctggggcctgggcacaatggtcaccgtgtctagcggcggaggtggatccggggacaccgtgatgacacagagccctctgagcctgcctgtgacacctggcgaacctgccagcatcagctgtagaagcagccagagcctgctgaacagcaacggctacaactacctggattggtacgtgcagaagcccggccagtctcctcagctgctgatctacctgggcagcaatagagccagcggcgtgcccgatagattttctggctctggcagcggcaccgacttcaccctgaagatctctagagtggaagccgaggacgtgggcgtgtactactgtatgcagcctctgcagacccctctgttcacatttggccctggcaccaaggtggaaatcaaacgtacggtggccgctcccagcgtgttcatcttcccacctagcgacgagcagctgaagtccggcacagcctctgtcgtgtgcctgctgaacaacttctacccccgcgaggccaaagtgcagtggaaggtggacaacgccctgcagagcggcaacagccaggaaagcgtgaccgagcaggacagcaaggactccacctacagcctgagcagcaccctgacactgagcaaggccgactacgagaagcacaaggtgtacgcctgcgaagtgacccaccagggcctgtctagccccgtgaccaagagcttcaaccggggcgagtgtggaggcggaggatctggcggaggtggaagtggcggaggcggttctggtggtggtggctctggtggcggtggatctcaagtgacactgagagagtctggccccgctctggtcaagcctacacagaccctgacactgacctgcaccttcagcggcttcagcctgtctactagaggcgtgtgcgtgtcctggatcagacagcctcctggaaaggccctggaatggctggccttcatcgactgggacgacgacaagtactaccagaccagcctgaaaacccggctgaccatcagcaaggacaccagcaagaaccaggtggtgctgaccatgaccaacgtgcaccctgtggataccgccacctactactgcgccagaatcagctctcaccacggctccagctggtgtaccaccttcgattattggggccagggcgctctcgtgacagtttctgctgcttcgaccaagggcccatccgtgtttcctctggctcccagcagcaagtctacaagcggaggaacagccgctctgggctgcctggtcaaggattactttcccgagcctgtgaccgtgtcctggaattctggcgctctgacaagcggcgtgcacacctttccagctgtgctgcaaagcagcggcctgtactctctgagcagcgtggtcacagtgcctagctctagcctgggcacccagacctacatctgcaatgtgaaccacaagcctagcaacaccaaggtggacaagaaggtggaacccaagagctgcgataagacccacacatgtcctccatgtcctgctccagaactgctcggcggcccttctgtgttcctgtttcctccaaagcctaaggacaccctgatgatcagcagaacccctgaagtgacctgcgtggtggtggatgtgtctcacgaggaccccgaagtgaagttcaattggtacgtggacggcgtggaagtgcacaacgccaagaccaagcctagagaggaacagtacaacagcacctacagagtggtgtccgtgctgaccgtgctgcaccaggattggctgaacggcaaagagtacaagtgcaaggtgtccaacaaggccctgcctgctcctatcgagaaaaccatcagcaaggccaagggccagcctagggaaccccaggtttacacccttcctccaagccgggatgagctgaccaagaaccaggtgtccctgacatgtctcgtgaagggcttctaccccagcgacattgccgtggaatgggagagcaatggccagcctgagaacaactacaagacaacccctcctgtgctggacagcgacggctcattcttcctgtacagcaagctgacagtcgacaagtccagatggcagcagggcaacgtgttcagttgcagcgtgctgcacgaggccctgcacgctcactacacccagaagtccctgagcctgtctcctgga

SEQ ID NO: 603 - DNA, 2850 bp, synthetic construct
  source 1..2850: mol_type = other DNA
gagatcgtgctgacacagagccctggcacactgtcactgtctccaggcgaaacagccacactgagctgtagagccagccagagcttcagcagcgacctggcttggtatcagcagaagcctggacaggcccctcggctgttgatctatggcgcctcttctagagccacaggcatccccgatagattcagcggctctggcagcggcaccgatttcaccctgacaatcagcagactggaacccgccgacttcgccgtgtactactgtcagcagtacggcagcagccctcctgtgacatttggcggcggaacaaaggtggaaatcaaaggcggatcctctggagacaccgtgatgacacagagccctctgagcctgcctgtgacacctggcgaacctgccagcatcagctgtagaagcagccagagcctgctgaacagcaacggctacaactacctggattggtacgtgcagaagcccggccagtctcctcagctgctgatctacctgggcagcaatagagccagcggcgtgcccgatagattttctggctctggcagcggcaccgacttcaccctgaagatctctagagtggaagccgaggacgtgggcgtgtactactgtatgcagcctctgcagacccctctgttcacatttggccctggcaccaaggtggaaatcaaaggaggtggtggctctggcggatctgggagtggtggcggaggctctgcttctggatctggacaagtgacactgagagagtctggccccgctctggtcaagcctacacagaccctgacactgacctgcaccttcagcggcttcagcctgtctactagaggcgtgtgcgtgtcctggatcagacagcctcctggaaaggccctggaatggctggccttcatcgactgggacgacgacaagtactaccagaccagcctgaaaacccggctgaccatcagcaaggacaccagcaagaaccaggtggtgctgaccatgaccaacgtgcaccctgtggataccgccacctactactgcgccagaatcagctctcaccacggctccagctggtgtaccaccttcgattattggggccagggcgctctcgtgacagtttctgctggaggcagctccggggaagtgcagctggtggaatcaggcggcggactgattcaacctggcggctctctgagactgtcttgtgctgcttctggcgtgatcgtgtcctacaactacatgaactgggtccgacaggctcccggcaaaggccttgaatgggtgtccgtgatctacagcggcggcagcaccttttacgccgattctgtgcggggcagattcaccatcagccgggacaacagcaagaacaccctgtacctgcagatgaacagcctgagagccgaggacaccgctgtgtactattgcgccagagatctgggacctgccggcgcttttgatatctggggcctgggcacaatggtcaccgtgtctagccgtacggtggccgctcccagcgtgttcatcttcccacctagcgacgagcagctgaagtccggcacagcctctgtcgtgtgcctgctgaacaacttctacccccgcgaggccaaagtgcagtggaaggtggacaacgccctgcagagcggcaacagccaggaaagcgtgaccgagcaggacagcaaggactccacctacagcctgagcagcaccctgacactgagcaaggccgactacgagaagcacaaggtgtacgcctgcgaagtgacccaccagggcctgtctagccccgtgaccaagagcttcaaccggggcgagtgtggcggatctggaagtggcggaggtggtagtggcggcggtggatctgcttctggctctggcgcttcgaccaagggcccatccgtgtttcctctggctcccagcagcaagtctacaagcggaggaacagccgctctgggctgcctggtcaaggattactttcccgagcctgtgaccgtgtcctggaattctggcgctctgacaagcggcgtgcacacctttccagctgtgctgcaaagcagcggcctgtactctctgagcagcgtggtcacagtgcctagctctagcctgggcacccagacctacatctgcaatgtgaaccacaagcctagcaacaccaaggtggacaagaaggtggaacccaagagctgcgataagacccacacatgtcctccatgtcctgctccagaactgctcggcggcccttctgtgttcctgtttcctccaaagcctaaggacaccctgatgatcagcagaacccctgaagtgacctgcgtggtggtggatgtgtctcacgaggaccccgaagtgaagttcaattggtacgtggacggcgtggaagtgcacaacgccaagaccaagcctagagaggaacagtacaacagcacctacagagtggtgtccgtgctgaccgtgctgcaccaggattggctgaacggcaaagagtacaagtgcaaggtgtccaacaaggccctgcctgctcctatcgagaaaaccatcagcaaggccaagggccagcctagggaaccccaggtttacacccttcctccaagccgggatgagctgaccaagaaccaggtgtccctgacatgtctcgtgaagggcttctaccccagcgacattgccgtggaatgggagagcaatggccagcctgagaacaactacaagacaacccctcctgtgctggacagcgacggctcattcttcctgtacagcaagctgacagtcgacaagtccagatggcagcagggcaacgtgttcagttgcagcgtgctgcacgaggccctgcacgctcactacacccagaagtccctgagcctgtctcctgga

SEQ ID NO: 604 - DNA, 2835 bp, synthetic construct
  source 1..2835: mol_type = other DNA
gagatcgtgctgacacagagccctggcacactgtcactgtctccaggcgaaacagccacactgagctgtagagccagccagagcttcagcagcgacctggcttggtatcagcagaagcctggacaggcccctcggctgttgatctatggcgcctcttctagagccacaggcatccccgatagattcagcggctctggcagcggcaccgatttcaccctgacaatcagcagactggaacccgccgacttcgccgtgtactactgtcagcagtacggcagcagccctcctgtgacatttggcggcggaacaaaggtggaaatcaaaggcggatcctctggagacaccgtgatgacacagagccctctgagcctgcctgtgacacctggcgaacctgccagcatcagctgtagaagcagccagagcctgctgaacagcaacggctacaactacctggattggtacgtgcagaagcccggccagtctcctcagctgctgatctacctgggcagcaatagagccagcggcgtgcccgatagattttctggctctggcagcggcaccgacttcaccctgaagatctctagagtggaagccgaggacgtgggcgtgtactactgtatgcagcctctgcagacccctctgttcacatttggccctggcaccaaggtggaaatcaaaggaggtggtggctctggcggatctgggagtggtggcggaggctctgcttctggatctggacaagtgacactgagagagtctggccccgctctggtcaagcctacacagaccctgacactgacctgcaccttcagcggcttcagcctgtctactagaggcgtgtgcgtgtcctggatcagacagcctcctggaaaggccctggaatggctggccttcatcgactgggacgacgacaagtactaccagaccagcctgaaaacccggctgaccatcagcaaggacaccagcaagaaccaggtggtgctgaccatgaccaacgtgcaccctgtggataccgccacctactactgcgccagaatcagctctcaccacggctccagctggtgtaccaccttcgattattggggccagggcgctctcgtgacagtttctgctggaggcagctccggggaagtgcagctggtggaatcaggcggcggactgattcaacctggcggctctctgagactgtcttgtgctgcttctggcgtgatcgtgtcctacaactacatgaactgggtccgacaggctcccggcaaaggccttgaatgggtgtccgtgatctacagcggcggcagcaccttttacgccgattctgtgcggggcagattcaccatcagccgggacaacagcaagaacaccctgtacctgcagatgaacagcctgagagccgaggacaccgctgtgtactattgcgccagagatctgggacctgccggcgcttttgatatctggggcctgggcacaatggtcaccgtgtctagccgtacggtggccgctcccagcgtgttcatcttcccacctagcgacgagcagctgaagtccggcacagcctctgtcgtgtgcctgctgaacaacttctacccccgcgaggccaaagtgcagtggaaggtggacaacgccctgcagagcggcaacagccaggaaagcgtgaccgagcaggacagcaaggactccacctacagcctgagcagcaccctgacactgagcaaggccgactacgagaagcacaaggtgtacgcctgcgaagtgacccaccagggcctgtctagccccgtgaccaagagcttcaaccggggcgagtgtggcggatctggaagtggcggcggtggatctgcttctggctctggcgcttcgaccaagggcccatccgtgtttcctctggctcccagcagcaagtctacaagcggaggaacagccgctctgggctgcctggtcaaggattactttcccgagcctgtgaccgtgtcctggaattctggcgctctgacaagcggcgtgcacacctttccagctgtgctgcaaagcagcggcctgtactctctgagcagcgtggtcacagtgcctagctctagcctgggcacccagacctacatctgcaatgtgaaccacaagcctagcaacaccaaggtggacaagaaggtggaacccaagagctgcgataagacccacacatgtcctccatgtcctgctccagaactgctcggcggcccttctgtgttcctgtttcctccaaagcctaaggacaccctgatgatcagcagaacccctgaagtgacctgcgtggtggtggatgtgtctcacgaggaccccgaagtgaagttcaattggtacgtggacggcgtggaagtgcacaacgccaagaccaagcctagagaggaacagtacaacagcacctacagagtggtgtccgtgctgaccgtgctgcaccaggattggctgaacggcaaagagtacaagtgcaaggtgtccaacaaggccctgcctgctcctatcgagaaaaccatcagcaaggccaagggccagcctagggaaccccaggtttacacccttcctccaagccgggatgagctgaccaagaaccaggtgtccctgacatgtctcgtgaagggcttctaccccagcgacattgccgtggaatgggagagcaatggccagcctgagaacaactacaagacaacccctcctgtgctggacagcgacggctcattcttcctgtacagcaagctgacagtcgacaagtccagatggcagcagggcaacgtgttcagttgcagcgtgctgcacgaggccctgcacgctcactacacccagaagtccctgagcctgtctcctgga

SEQ ID NO: 605 - DNA, 2820 bp, synthetic construct
  source 1..2820: mol_type = other DNA
gagatcgtgctgacacagagccctggcacactgtcactgtctccaggcgaaacagccacactgagctgtagagccagccagagcttcagcagcgacctggcttggtatcagcagaagcctggacaggcccctcggctgttgatctatggcgcctcttctagagccacaggcatccccgatagattcagcggctctggcagcggcaccgatttcaccctgacaatcagcagactggaacccgccgacttcgccgtgtactactgtcagcagtacggcagcagccctcctgtgacatttggcggcggaacaaaggtggaaatcaaaggcggatcctctggagacaccgtgatgacacagagccctctgagcctgcctgtgacacctggcgaacctgccagcatcagctgtagaagcagccagagcctgctgaacagcaacggctacaactacctggattggtacgtgcagaagcccggccagtctcctcagctgctgatctacctgggcagcaatagagccagcggcgtgcccgatagattttctggctctggcagcggcaccgacttcaccctgaagatctctagagtggaagccgaggacgtgggcgtgtactactgtatgcagcctctgcagacccctctgttcacatttggccctggcaccaaggtggaaatcaaaggaggtggtggctctggcggatctgggagtggtggcggaggctctgcttctggatctggacaagtgacactgagagagtctggccccgctctggtcaagcctacacagaccctgacactgacctgcaccttcagcggcttcagcctgtctactagaggcgtgtgcgtgtcctggatcagacagcctcctggaaaggccctggaatggctggccttcatcgactgggacgacgacaagtactaccagaccagcctgaaaacccggctgaccatcagcaaggacaccagcaagaaccaggtggtgctgaccatgaccaacgtgcaccctgtggataccgccacctactactgcgccagaatcagctctcaccacggctccagctggtgtaccaccttcgattattggggccagggcgctctcgtgacagtttctgctggaggcagctccggggaagtgcagctggtggaatcaggcggcggactgattcaacctggcggctctctgagactgtcttgtgctgcttctggcgtgatcgtgtcctacaactacatgaactgggtccgacaggctcccggcaaaggccttgaatgggtgtccgtgatctacagcggcggcagcaccttttacgccgattctgtgcggggcagattcaccatcagccgggacaacagcaagaacaccctgtacctgcagatgaacagcctgagagccgaggacaccgctgtgtactattgcgccagagatctgggacctgccggcgcttttgatatctggggcctgggcacaatggtcaccgtgtctagccgtacggtggccgctcccagcgtgttcatcttcccacctagcgacgagcagctgaagtccggcacagcctctgtcgtgtgcctgctgaacaacttctacccccgcgaggccaaagtgcagtggaaggtggacaacgccctgcagagcggcaacagccaggaaagcgtgaccgagcaggacagcaaggactccacctacagcctgagcagcaccctgacactgagcaaggccgactacgagaagcacaaggtgtacgcctgcgaagtgacccaccagggcctgtctagccccgtgaccaagagcttcaaccggggcgagtgtggcggatctggaagtggcggcggtggatctgcttcgaccaagggcccatccgtgtttcctctggctcccagcagcaagtctacaagcggaggaacagccgctctgggctgcctggtcaaggattactttcccgagcctgtgaccgtgtcctggaattctggcgctctgacaagcggcgtgcacacctttccagctgtgctgcaaagcagcggcctgtactctctgagcagcgtggtcacagtgcctagctctagcctgggcacccagacctacatctgcaatgtgaaccacaagcctagcaacaccaaggtggacaagaaggtggaacccaagagctgcgataagacccacacatgtcctccatgtcctgctccagaactgctcggcggcccttctgtgttcctgtttcctccaaagcctaaggacaccctgatgatcagcagaacccctgaagtgacctgcgtggtggtggatgtgtctcacgaggaccccgaagtgaagttcaattggtacgtggacggcgtggaagtgcacaacgccaagaccaagcctagagaggaacagtacaacagcacctacagagtggtgtccgtgctgaccgtgctgcaccaggattggctgaacggcaaagagtacaagtgcaaggtgtccaacaaggccctgcctgctcctatcgagaaaaccatcagcaaggccaagggccagcctagggaaccccaggtttacacccttcctccaagccgggatgagctgaccaagaaccaggtgtccctgacatgtctcgtgaagggcttctaccccagcgacattgccgtggaatgggagagcaatggccagcctgagaacaactacaagacaacccctcctgtgctggacagcgacggctcattcttcctgtacagcaagctgacagtcgacaagtccagatggcagcagggcaacgtgttcagttgcagcgtgctgcacgaggccctgcacgctcactacacccagaagtccctgagcctgtctcctgga

SEQ ID NO: 606 - DNA, 2820 bp, synthetic construct
  source 1..2820: mol_type = other DNA
gagatcgtgctgacacagagccctggcacactgtcactgtctccaggcgaaacagccacactgagctgtagagccagccagagcttcagcagcgacctggcttggtatcagcagaagcctggacaggcccctcggctgttgatctatggcgcctcttctagagccacaggcatccccgatagattcagcggctctggcagcggcaccgatttcaccctgacaatcagcagactggaacccgccgacttcgccgtgtactactgtcagcagtacggcagcagccctcctgtgacatttggcggcggaacaaaggtggaaatcaaacgtacggtggccgctcccagcgtgttcatcttcccacctagcgacgagcagctgaagtccggcacagcctctgtcgtgtgcctgctgaacaacttctacccccgcgaggccaaagtgcagtggaaggtggacaacgccctgcagagcggcaacagccaggaaagcgtgaccgagcaggacagcaaggactccacctacagcctgagcagcaccctgacactgagcaaggccgactacgagaagcacaaggtgtacgcctgcgaagtgacccaccagggcctgtctagccccgtgaccaagagcttcaaccggggcgagtgtggcggcggaggatctggcggaggtggaagcggaggcggtggaagcgacaccgtgatgacacagagccctctgagcctgcctgtgacacctggcgaacctgccagcatcagctgtagaagcagccagagcctgctgaacagcaacggctacaactacctggattggtacgtgcagaagcccggccagtctcctcagctgctgatctacctgggcagcaatagagccagcggcgtgcccgatagattttctggctctggcagcggcaccgacttcaccctgaagatctctagagtggaagccgaggacgtgggcgtgtactactgtatgcagcctctgcagacccctctgttcacatttggccctggcaccaaggtggaaatcaaaggaggtggtggctctggcggatctgggagtggtggcggaggctctgcttctggatctggacaagtgacactgagagagtctggccccgctctggtcaagcctacacagaccctgacactgacctgcaccttcagcggcttcagcctgtctactagaggcgtgtgcgtgtcctggatcagacagcctcctggaaaggccctggaatggctggccttcatcgactgggacgacgacaagtactacaacaccagcctgaaaacccggctgaccatcagcaaggacaccagcaagaaccaggtggtgctgaccatgaccaacgtgcaccctgtggataccgccacctactactgcgccagaatcagctctcaccacggctccagctggtgtaccaccttcgattattggggccagggcgctctcgtgacagtttctgctggaggcagctccggggaagtgcagctggtggaatcaggcggcggactgattcaacctggcggctctctgagactgtcttgtgctgcttctggcgtgatcgtgtcctacaactacatgaactgggtccgacaggctcccggcaaaggccttgaatgggtgtccgtgatctacagcggcggcagcaccttttacgccgattctgtgcggggcagattcaccatcagccgggacaacagcaagaacaccctgtacctgcagatgaacagcctgagagccgaggacaccgctgtgtactattgcgccagagatctgggacctgccggcgcttttgatatctggggcctgggcacaatggtcaccgtgtctagcgcttcgaccaagggcccatccgtgtttcctctggctcccagcagcaagtctacaagcggaggaacagccgctctgggctgcctggtcaaggattactttcccgagcctgtgaccgtgtcctggaattctggcgctctgacaagcggcgtgcacacctttccagctgtgctgcaaagcagcggcctgtactctctgagcagcgtggtcacagtgcctagctctagcctgggcacccagacctacatctgcaatgtgaaccacaagcctagcaacaccaaggtggacaagaaggtggaacccaagagctgcgataagacccacacatgtcctccatgtcctgctccagaactgctcggcggcccttctgtgttcctgtttcctccaaagcctaaggacaccctgatgatcagcagaacccctgaagtgacctgcgtggtggtggatgtgtctcacgaggaccccgaagtgaagttcaattggtacgtggacggcgtggaagtgcacaacgccaagaccaagcctagagaggaacagtacaacagcacctacagagtggtgtccgtgctgaccgtgctgcaccaggattggctgaacggcaaagagtacaagtgcaaggtgtccaacaaggccctgcctgctcctatcgagaaaaccatcagcaaggccaagggccagcctagggaaccccaggtttacacccttcctccaagccgggatgagctgaccaagaaccaggtgtccctgacatgtctcgtgaagggcttctaccccagcgacattgccgtggaatgggagagcaatggccagcctgagaacaactacaagacaacccctcctgtgctggacagcgacggctcattcttcctgtacagcaagctgacagtcgacaagtccagatggcagcagggcaacgtgttcagttgcagcgtgctgcacgaggccctgcacgctcactacacccagaagtccctgagcctgtctcctgga

SEQ ID NO: 607 - DNA, 2814 bp, synthetic construct; identical to SEQ ID NO: 596
  source 1..2814: mol_type = other DNA

SEQ ID NO: 608 - DNA, 2820 bp, synthetic construct
  source 1..2820: mol_type = other DNA
gagatcgtgctgacacagagccctggcacactgtcactgtctccaggcgaaacagccacactgagctgtagagccagccagagcttcagcagcgacctggcttggtatcagcagaagcctggacaggcccctcggctgttgatctatggcgcctcttctagagccacaggcatccccgatagattcagcggctctggcagcggcaccgatttcaccctgacaatcagcagactggaacccgccgacttcgccgtgtactactgtcagcagtacggcagcagccctcctgtgacatttggcggcggaacaaaggtggaaatcaaacgtacggtggccgctcccagcgtgttcatcttcccacctagcgacgagcagctgaagtccggcacagcctctgtcgtgtgcctgctgaacaacttctacccccgcgaggccaaagtgcagtggaaggtggacaacgccctgcagagcggcaacagccaggaaagcgtgaccgagcaggacagcaaggactccacctacagcctgagcagcaccctgacactgagcaaggccgactacgagaagcacaaggtgtacgcctgcgaagtgacccaccagggcctgtctagccccgtgaccaagagcttcaaccggggcgagtgtggcggcggaggatctggcggaggtggaagcggaggcggtggaagcgacaccgtgatgacacagagccctctgagcctgcctgtgacacctggcgaacctgccagcatcagctgtagaagcagccagagcctgctgaacagcaacggctacaactacctggattggtacgtgcagaagcccggccagtctcctcagctgctgatctacctgggcagcaatagagccagcggcgtgcccgatagattttctggctctggcagcggcaccgacttcaccctgaagatctctagagtggaagccgaggacgtgggcgtgtactactgtatgcagcctctgcagacccctctgttcacatttggccctggcaccaaggtggaaatcaaaggaggtggtggctctggcggatctgggagtggtggcggaggctctgcttctggatctggacaagtgacactgagagagtctggccccgctctggtcaagcctacacagaccctgacactgacctgcaccttcagcggcttcagcctgtctactagaggcgtgtgcgtgtcctggatcagacagcctcctggaaaggccctggaatggctggccttcatcgactgggacgacgacaagtactacaacaccagcctgaaaacccggctgaccatcagcaaggacaccagcaagaaccaggtggtgctgaccatgaccaacgtgcaccctgtggataccgccacctactactgcgccagaatcagctctcaccacggctccagctggtgtaccaccttcgattattggggccagggcgctctcgtgacagtttctgctggaggcagctccggggaagtgcagctggtggaatcaggcggcggactgattcaacctggcggctctctgagactgtcttgtgctgcttctggcgtgatcgtgtcctacaactacatgaactgggtccgacaggctcccggcaaaggccttgaatgggtgtccgtgatctacagcggcggcagcaccttttacgccgattctgtgcggggcagattcaccatcagccgggacaacagcaagaacaccctgtacctgcagatgaacagcctgagagccgaggacaccgctgtgtactattgcgccagagatctgggacctgccggcgcttttgatatctggggcctgggcacaatggtcaccgtgtctagcgcttcgaccaagggcccatccgtgtttcctctggctcccagcagcaagtctacaagcggaggaacagccgctctgggctgcctggtcaaggattactttcccgagcctgtgaccgtgtcctggaattctggcgctctgacaagcggcgtgcacacctttccagctgtgctgcaaagcagcggcctgtactctctgagcagcgtggtcacagtgcctagctctagcctgggcacccagacctacatctgcaatgtgaaccacaagcctagcaacaccaaggtggacaagaaggtggaacccaagagctgcgataagacccacacatgtcctccatgtcctgctccagaactgctcggcggcccttctgtgttcctgtttcctccaaagcctaaggacaccctgatgatcagcagaacccctgaagtgacctgcgtggtggtggatgtgtctcacgaggaccccgaagtgaagttcaattggtacgtggacggcgtggaagtgcacaacgccaagaccaagcctagagaggaacagtacaacagcacctacagagtggtgtccgtgctgaccgtgctgcaccaggattggctgaacggcaaagagtacaagtgcaaggtgtccaacaaggccctgcctgctcctatcgagaaaaccatcagcaaggccaagggccagcctagggaaccccaggtttgtacccttcctccaagccgggatgagctgaccaagaaccaggtgtccctgagctgtgccgtgaagggcttctaccccagcgacattgccgtggaatgggagagcaatggccagcctgagaacaactacaagacaacccctcctgtgctggacagcgacggctcattcttcctggtgagcaagctgacagtcgacaagtccagatggcagcagggcaacgtgttcagttgcagcgtgctgcacgaggccctgcacgctcactacacccagaagtccctgagcctgtctcctgga

SEQ ID NO: 609 - DNA, 2832 bp, synthetic construct
  source 1..2832: mol_type = other DNA
gagatcgtgctgacacagagccctggcacactgtcactgtctccaggcgaaacagccacactgagctgtagagccagccagagcttcagcagcgacctggcttggtatcagcagaagcctggacaggcccctcggctgttgatctatggcgcctcttctagagccacaggcatccccgatagattcagcggctctggcagcggcaccgatttcaccctgacaatcagcagactggaacccgccgacttcgccgtgtactactgtcagcagtacggcagcagccctcctgtgacatttggcggcggaacaaaggtggaaatcaaacgtacggtggccgctcccagcgtgttcatcttcccacctagcgacgagcagctgaagtccggcacagcctctgtcgtgtgcctgctgaacaacttctacccccgcgaggccaaagtgcagtggaaggtggacaacgccctgcagagcggcaacagccaggaaagcgtgaccgagcaggacagcaaggactccacctacagcctgagcagcaccctgacactgagcaaggccgactacgagaagcacaaggtgtacgcctgcgaagtgacccaccagggcctgtctagccccgtgaccaagagcttcaaccggggcgagtgtggcggcggaggatctggcggaggtggaagcggaggcggtggaagcagctacgtgctgacacagcctccatccgtgtctgtggctccaggacagaccgccagaatcacatgcggcggcaacaacatcggcaccaagagcgtgcactggtatcagcagaagcctggacaggcccctgtgctcgtgatcagcagcgatagcgatagacctagcggcgtgcccgatagattcagcggcagcaatagcggcaacaccgccacactgaccatcagcagagttgaggctggcgacgaggccgactactactgtcacgtgtgggatagcagcagcgaccactgggttttcggcggaggcacaaagctgacagtgctgggaggtggtggctctggcggatctgggagtggtggcggaggctctgcttctggatctggagaggtgcagctggttgaatctggcggcggaagagtgaagcctggcggatctctgagactgagctgtgccgccagcggcttcaccttcagcagctacagaatgaactgggtccgacaggcccctggcaaaggccttgaatgggtgtccagcatcagcagcggcagctcctacatctacttcgccgacagcgtgaagggcagattcaccatctccagagacaacgccaagaacagcctgttcctgcggatgaacaacctgagagtggaagataccgccgtgtactactgcgccagagcacccacactgagacacagcagcggatggtacgatcctcctggcaccgagaacagcagcttcgatctgtggggcagaggcaccctggtcacagtctcttctggaggcagctccggggaagtgcagctggtggaatcaggcggcggactgattcaacctggcggctctctgagactgtcttgtgctgcttctggcgtgatcgtgtcctacaactacatgaactgggtccgacaggctcccggcaaaggccttgaatgggtgtccgtgatctacagcggcggcagcaccttttacgccgattctgtgcggggcagattcaccatcagccgggacaacagcaagaacaccctgtacctgcagatgaacagcctgagagccgaggacaccgctgtgtactattgcgccagagatctgggacctgccggcgcttttgatatctggggcctgggcacaatggtcaccgtgtctagcgcttcgaccaagggcccatccgtgtttcctctggctcccagcagcaagtctacaagcggaggaacagccgctctgggctgcctggtcaaggattactttcccgagcctgtgaccgtgtcctggaattctggcgctctgacaagcggcgtgcacacctttccagctgtgctgcaaagcagcggcctgtactctctgagcagcgtggtcacagtgcctagctctagcctgggcacccagacctacatctgcaatgtgaaccacaagcctagcaacaccaaggtggacaagaaggtggaacccaagagctgcgataagacccacacatgtcctccatgtcctgctccagaactgctcggcggcccttctgtgttcctgtttcctccaaagcctaaggacaccctgatgatcagcagaacccctgaagtgacctgcgtggtggtggatgtgtctcacgaggaccccgaagtgaagttcaattggtacgtggacggcgtggaagtgcacaacgccaagaccaagcctagagaggaacagtacaacagcacctacagagtggtgtccgtgctgaccgtgctgcaccaggattggctgaacggcaaagagtacaagtgcaaggtgtccaacaaggccctgcctgctcctatcgagaaaaccatcagcaaggccaagggccagcctagggaaccccaggtttacacccttcctccatgccgggatgagctgaccaagaaccaggtgtccctgtggtgtctcgtgaagggcttctaccccagcgacattgccgtggaatgggagagcaatggccagcctgagaacaactacaagacaacccctcctgtgctggacagcgacggctcattcttcctgtacagcaagctgacagtcgacaagtccagatggcagcagggcaacgtgttcagttgcagcgtgctgcacgaggccctgcacgctcactacacccagaagtccctgagcctgtctcctggatagtga

SEQ ID NO: 610 - DNA, 2826 bp, synthetic construct; identical to SEQ ID NO: 538
  source 1..2826: mol_type = other DNA

SEQ ID NO: 611 - DNA, 2832 bp, synthetic construct
  source 1..2832: mol_type = other DNA
gagatcgtgctgacacagagccctggcacactgtcactgtctccaggcgaaacagccacactgagctgtagagccagccagagcttcagcagcgacctggcttggtatcagcagaagcctggacaggcccctcggctgttgatctatggcgcctcttctagagccacaggcatccccgatagattcagcggctctggcagcggcaccgatttcaccctgacaatcagcagactggaacccgccgacttcgccgtgtactactgtcagcagtacggcagcagccctcctgtgacatttggcggcggaacaaaggtggaaatcaaacgtacggtggccgctcccagcgtgttcatcttcccacctagcgacgagcagctgaagtccggcacagcctctgtcgtgtgcctgctgaacaacttctacccccgcgaggccaaagtgcagtggaaggtggacaacgccctgcagagcggcaacagccaggaaagcgtgaccgagcaggacagcaaggactccacctacagcctgagcagcaccctgacactgagcaaggccgactacgagaagcacaaggtgtacgcctgcgaagtgacccaccagggcctgtctagccccgtgaccaagagcttcaaccggggcgagtgtggcggcggaggatcaggcggaggtggaagcggaggcggtggaagcagctacgtgctgacacagcctccatccgtgtctgtggctccaggacagaccgccagaatcacatgcggcggcaacaacatcggcaccaagagcgtgcactggtatcagcagaagcctggacaggcccctgtgctcgtgatcagcagcgatagcgatagacctagcggcgtgcccgatagattcagcggcagcaatagcggcaacaccgccacactgaccatcagcagagttgaggctggcgacgaggccgactactactgtcacgtgtgggatagcagcagcgaccactgggttttcggcggaggcacaaagctgacagtgctgggaggtggtggctctggcggatctgggagtggtggcggaggctctgcttctggatctggagaggtgcagctggttgaatctggcggcggaagagtgaagcctggcggatctctgagactgagctgtgccgccagcggcttcaccttcagcagctacagaatgaactgggtccgacaggcccctggcaaaggccttgaatgggtgtccagcatcagcagcggcagctcctacatctacttcgccgacagcgtgaagggcagattcaccatctccagagacaacgccaagaacagcctgttcctgcggatgaacaacctgagagtggaagataccgccgtgtactactgcgccagagcacccacactgagacacagcagcggatggtacgatcctcctggcaccgagcaaagcagcttcgatctgtggggcagaggcaccctggtcacagtctcttctggaggcagctccggggaagtgcagctggtggaatcaggcggcggactgattcaacctggcggctctctgagactgtcttgtgctgcttctggcgtgatcgtgtcctacaactacatgaactgggtccgacaggctcccggcaaaggccttgaatgggtgtccgtgatctacagcggcggcagcaccttttacgccgattctgtgcggggcagattcaccatcagccgggacaacagcaagaacaccctgtacctgcagatgaacagcctgagagccgaggacaccgctgtgtactattgcgccagagatctgggacctgccggcgcttttgatatctggggcctgggcacaatggtcaccgtgtctagcgcttcgaccaagggcccatccgtgtttcctctggctcccagcagcaagtctacaagcggaggaacagccgctctgggctgcctggtcaaggattactttcccgagcctgtgaccgtgtcctggaattctggcgctctgacaagcggcgtgcacacctttccagctgtgctgcaaagcagcggcctgtactctctgagcagcgtggtcacagtgcctagctctagcctgggcacccagacctacatctgcaatgtgaaccacaagcctagcaacaccaaggtggacaagaaggtggaacccaagagctgcgataagacccacacatgtcctccatgtcctgctccagaactgctcggcggcccttctgtgttcctgtttcctccaaagcctaaggacaccctgatgatcagcagaacccctgaagtgacctgcgtggtggtggatgtgtctcacgaggaccccgaagtgaagttcaattggtacgtggacggcgtggaagtgcacaacgccaagaccaagcctagagaggaacagtacaacagcacctacagagtggtgtccgtgctgaccgtgctgcaccaggattggctgaacggcaaagagtacaagtgcaaggtgtccaacaaggccctgcctgctcctatcgagaaaaccatcagcaaggccaagggccagcctagggaaccccaggtttacacccttcctccatgccgggatgagctgaccaagaaccaggtgtccctgtggtgtctcgtgaagggcttctaccccagcgacattgccgtggaatgggagagcaatggccagcctgagaacaactacaagacaacccctcctgtgctggacagcgacggctcattcttcctgtacagcaagctgacagtcgacaagtccagatggcagcagggcaacgtgttcagttgcagcgtgctgcacgaggccctgcacgctcactacacccagaagtccctgagcctgtctcctggatagtga

SEQ ID NO: 612 - DNA, 2826 bp, synthetic construct; identical to SEQ ID NO: 538
  source 1..2826: mol_type = other DNA

SEQ ID NO: 613 - DNA, 2832 bp, synthetic construct; identical to SEQ ID NO: 609
  source 1..2832: mol_type = other DNA

SEQ ID NO: 614 - DNA, 2826 bp, synthetic construct
  source 1..2826: mol_type = other DNA
gagatcgtgctgacacagagccctggcacactgtcactgtctccaggcgaaacagccacactgagctgtagagccagccagagcttcagcagcgacctggcttggtatcagcagaagcctggacaggcccctcggctgttgatctatggcgcctcttctagagccacaggcatccccgatagattcagcggctctggcagcggcaccgatttcaccctgacaatcagcagactggaacccgccgacttcgccgtgtactactgtcagcagtacggcagcagccctcctgtgacatttggcggcggaacaaaggtggaaatcaaacgtacggtggccgctcccagcgtgttcatcttcccacctagcgacgagcagctgaagtccggcacagcctctgtcgtgtgcctgctgaacaacttctacccccgcgaggccaaagtgcagtggaaggtggacaacgccctgcagagcggcaacagccaggaaagcgtgaccgagcaggacagcaaggactccacctacagcctgagcagcaccctgacactgagcaaggccgactacgagaagcacaaggtgtacgcctgcgaagtgacccaccagggcctgtctagccccgtgaccaagagcttcaaccggggcgagtgtggcggcggaggatctggcggaggtggaagcggaggcggtggaagcgacaccgtgatgacacagagccctctgagcctgcctgtgacacctggcgaacctgccagcatcagctgtagaagcagccagagcctgctgaacagcaacggctacaactacctggattggtacgtgcagaagcccggccagtctcctcagctgctgatctacctgggcagcaatagagccagcggcgtgcccgatagattttctggctctggcagcggcaccgacttcaccctgaagatctctagagtggaagccgaggacgtgggcgtgtactactgtatgcagcctctgcagacccctctgttcacatttggccctggcaccaaggtggaaatcaaaggaggtggtggctctggcggatctgggagtggtggcggaggctctgcttctggatctggacaagtgacactgagagagtctggccccgctctggtcaagcctacacagaccctgacactgacctgcaccttcagcggcttcagcctgtctactagaggcgtgtgcgtgtcctggatcagacagcctcctggaaaggccctggaatggctggccttcatcgactgggacgacgacaagtactaccagaccagcctgaaaacccggctgaccatcagcaaggacaccagcaagaaccaggtggtgctgaccatgaccaacgtgcaccctgtggataccgccacctactactgcgccagaatcagctctcaccacggctccagctggtgtaccaccttcgattattggggccagggcgctctcgtgacagtttctgctggaggcagctccggggaagtgcagctggtggaatcaggcggcggactgattcaacctggcggctctctgagactgtcttgtgctgcttctggcgtgatcgtgtcctacaactacatgaactgggtccgacaggctcccggcaaaggccttgaatgggtgtccgtgatctacagcggcggcagcaccttttacgccgattctgtgcggggcagattcaccatcagccgggacaacagcaagaacaccctgtacctgcagatgaacagcctgagagccgaggacaccgctgtgtactattgcgccagagatctgggacctgccggcgcttttgatatctggggcctgggcacaatggtcaccgtgtctagcgcttcgaccaagggcccatccgtgtttcctctggctcccagcagcaagtctacaagcggaggaacagccgctctgggctgcctggtcaaggattactttcccgagcctgtgaccgtgtcctggaattctggcgctctgacaagcggcgtgcacacctttccagctgtgctgcaaagcagcggcctgtactctctgagcagcgtggtcacagtgcctagctctagcctgggcacccagacctacatctgcaatgtgaaccacaagcctagcaacaccaaggtggacaagaaggtggaacccaagagctgcgataagacccacacatgtcctccatgtcctgctccagaactgctcggcggcccttctgtgttcctgtttcctccaaagcctaaggacaccctgatgatcagcagaacccctgaagtgacctgcgtggtggtggatgtgtctcacgaggaccccgaagtgaagttcaattggtacgtggacggcgtggaagtgcacaacgccaagaccaagcctagagaggaacagtacaacagcacctacagagtggtgtccgtgctgaccgtgctgcaccaggattggctgaacggcaaagagtacaagtgcaaggtgtccaacaaggccctgcctgctcctatcgagaaaaccatcagcaaggccaagggccagcctagggaaccccaggtttgtacccttcctccaagccgggatgagctgaccaagaaccaggtgtccctgagctgtgccgtgaagggcttctaccccagcgacattgccgtggaatgggagagcaatggccagcctgagaacaactacaagacaacccctcctgtgctggacagcgacggctcattcttcctggtgagcaagctgacagtcgacaagtccagatggcagcagggcaacgtgttcagttgcagcgtgctgcacgaggccctgcacgctcactacacccagaagtccctgagcctgtctcctggatagtga

SEQ ID NO: 615 - DNA, 2832 bp, synthetic construct; identical to SEQ ID NO: 611
  source 1..2832: mol_type = other DNA

SEQ ID NO: 616 - DNA, 2826 bp, synthetic construct; identical to SEQ ID NO: 614
  source 1..2826: mol_type = other DNA

SEQ ID NO: 617 - DNA, 2877 bp, synthetic construct
  source 1..2877: mol_type = other DNA
gagatcgtgctgacacagagccctggcacactgtcactgtctccaggcgaaacagccacactgagctgtagagccagccagagcttcagcagcgacctggcttggtatcagcagaagcctggacaggcccctcggctgttgatctatggcgcctcttctagagccacaggcatccccgatagattcagcggctctggcagcggcaccgatttcaccctgacaatcagcagactggaacccgccgacttcgccgtgtactactgtcagcagtacggcagcagccctcctgtgacatttggcggcggaacaaaggtggaaatcaaaggcggatcctctggaagctacgtgctgacacagcctccatccgtgtctgtggctccaggacagaccgccagaatcacatgcggcggcaacaacatcggcaccaagagcgtgcactggtatcagcagaagcctggacaggcccctgtgctcgtgatcagcagcgatagcgatagacctagcggcgtgcccgatagattcagcggcagcaatagcggcaacaccgccacactgaccatcagcagagttgaggctggcgacgaggccgactactactgtcacgtgtgggatagcagcagcgaccactgggttttcggcggaggcacaaagctgacagtgctgggaggtggtggctctggcggatctgggagtggtggcggaggctctgcttctggatctggagaggtgcagctggttgaatctggcggcggaagagtgaagcctggcggatctctgagactgagctgtgccgccagcggcttcaccttcagcagctacagaatgaactgggtccgacaggcccctggcaaaggccttgaatgggtgtccagcatcagcagcggcagctcctacatctacttcgccgacagcgtgaagggcagattcaccatctccagagacaacgccaagaacagcctgttcctgcggatgaacaacctgagagtggaagataccgccgtgtactactgcgccagagcacccacactgagacacagcagcggatggtacgatcctcctggcaccgagaacagcagcttcgatctgtggggcagaggcaccctggtcacagtctcttctggaggcagctccggggaagtgcagctggtggaatcaggcggcggactgattcaacctggcggctctctgagactgtcttgtgctgcttctggcgtgatcgtgtcctacaactacatgaactgggtccgacaggctcccggcaaaggccttgaatgggtgtccgtgatctacagcggcggcagcaccttttacgccgattctgtgcggggcagattcaccatcagccgggacaacagcaagaacaccctgtacctgcagatgaacagcctgagagccgaggacaccgctgtgtactattgcgccagagatctgggacctgccggcgcttttgatatctggggcctgggcacaatggtcaccgtgtctagccgtacggtggccgctcccagcgtgttcatcttcccacctagcgacgagcagctgaagtccggcacagcctctgtcgtgtgcctgctgaacaacttctacccccgcgaggccaaagtgcagtggaaggtggacaacgccctgcagagcggcaacagccaggaaagcgtgaccgagcaggacagcaaggactccacctacagcctgagcagcaccctgacactgagcaaggccgactacgagaagcacaaggtgtacgcctgcgaagtgacccaccagggcctgtctagccccgtgaccaagagcttcaaccggggcgagtgtggaggcggaggatctggcggatctggaagtggcggaggtggtagtggcggcggtggatctgcttctggctctggcgcttcgaccaagggcccatccgtgtttcctctggctcccagcagcaagtctacaagcggaggaacagccgctctgggctgcctggtcaaggattactttcccgagcctgtgaccgtgtcctggaattctggcgctctgacaagcggcgtgcacacctttccagctgtgctgcaaagcagcggcctgtactctctgagcagcgtggtcacagtgcctagctctagcctgggcacccagacctacatctgcaatgtgaaccacaagcctagcaacaccaaggtggacaagaaggtggaacccaagagctgcgataagacccacacatgtcctccatgtcctgctccagaactgctcggcggcccttctgtgttcctgtttcctccaaagcctaaggacaccctgatgatcagcagaacccctgaagtgacctgcgtggtggtggatgtgtctcacgaggaccccgaagtgaagttcaattggtacgtggacggcgtggaagtgcacaacgccaagaccaagcctagagaggaacagtacaacagcacctacagagtggtgtccgtgctgaccgtgctgcaccaggattggctgaacggcaaagagtacaagtgcaaggtgtccaacaaggccctgcctgctcctatcgagaaaaccatcagcaaggccaagggccagcctagggaaccccaggtttacacccttcctccatgccgggatgagctgaccaagaaccaggtgtccctgtggtgtctcgtgaagggcttctaccccagcgacattgccgtggaatgggagagcaatggccagcctgagaacaactacaagacaacccctcctgtgctggacagcgacggctcattcttcctgtacagcaagctgacagtcgacaagtccagatggcagcagggcaacgtgttcagttgcagcgtgctgcacgaggccctgcacgctcactacacccagaagtccctgagcctgtctcctggatagtga

SEQ ID NO: 618 - DNA, 2871 bp, synthetic construct
  source 1..2871: mol_type = other DNA
gagatcgtgctgacacagagccctggcacactgtcactgtctccaggcgaaacagccacactgagctgtagagccagccagagcttcagcagcgacctggcttggtatcagcagaagcctggacaggcccctcggctgttgatctatggcgcctcttctagagccacaggcatccccgatagattcagcggctctggcagcggcaccgatttcaccctgacaatcagcagactggaacccgccgacttcgccgtgtactactgtcagcagtacggcagcagccctcctgtgacatttggcggcggaacaaaggtggaaatcaaaggcggatcctctggagacaccgtgatgacacagagccctctgagcctgcctgtgacacctggcgaacctgccagcatcagctgtagaagcagccagagcctgctgaacagcaacggctacaactacctggattggtacgtgcagaagcccggccagtctcctcagctgctgatctacctgggcagcaatagagccagcggcgtgcccgatagattttctggctctggcagcggcaccgacttcaccctgaagatctctagagtggaagccgaggacgtgggcgtgtactactgtatgcagcctctgcagacccctctgttcacatttggccctggcaccaaggtggaaatcaaaggaggtggtggctctggcggatctgggagtggtggcggaggctctgcttctggatctggacaagtgacactgagagagtctggccccgctctggtcaagcctacacagaccctgacactgacctgcaccttcagcggcttcagcctgtctactagaggcgtgtgcgtgtcctggatcagacaacctcctggaaaggccctggaatggctggccttcatcgactgggacgacgacaagtactaccagaccagcctgaaaacccggctgaccatcagcaaggacaccagcaagaaccaggtggtgctgaccatgaccaacgtgcaccctgtggataccgccacctactactgcgccagaatcagctctcaccacggctccagctggtgtaccaccttcgattattggggccagggcgctctcgtgacagtttctgctggaggcagctccggggaagtgcagctggtggaatcaggcggcggactgattcaacctggcggctctctgagactgtcttgtgctgcttctggcgtgatcgtgtcctacaactacatgaactgggtccgacaggctcccggcaaaggccttgaatgggtgtccgtgatctacagcggcggcagcaccttttacgccgattctgtgcggggcagattcaccatcagccgggacaacagcaagaacaccctgtacctgcagatgaacagcctgagagccgaggacaccgctgtgtactattgcgccagagatctgggacctgccggcgcttttgatatctggggcctgggcacaatggtcaccgtgtctagccgtacggtggccgctcccagcgtgttcatcttcccacctagcgacgagcagctgaagtccggcacagcctctgtcgtgtgcctgctgaacaacttctacccccgcgaggccaaagtgcagtggaaggtggacaacgccctgcagagcggcaacagccaggaaagcgtgaccgagcaggacagcaaggactccacctacagcctgagcagcaccctgacactgagcaaggccgactacgagaagcacaaggtgtacgcctgcgaagtgacccaccagggcctgtctagccccgtgaccaagagcttcaaccggggcgagtgtggaggcggaggatctggcggatctggaagtggcggaggtggtagtggcggcggtggatctgcttctggctctggcgcttcgaccaagggcccatccgtgtttcctctggctcccagcagcaagtctacaagcggaggaacagccgctctgggctgcctggtcaaggattactttcccgagcctgtgaccgtgtcctggaattctggcgctctgacaagcggcgtgcacacctttccagctgtgctgcaaagcagcggcctgtactctctgagcagcgtggtcacagtgcctagctctagcctgggcacccagacctacatctgcaatgtgaaccacaagcctagcaacaccaaggtggacaagaaggtggaacccaagagctgcgataagacccacacatgtcctccatgtcctgctccagaactgctcggcggcccttctgtgttcctgtttcctccaaagcctaaggacaccctgatgatcagcagaacccctgaagtgacctgcgtggtggtggatgtgtctcacgaggaccccgaagtgaagttcaattggtacgtggacggcgtggaagtgcacaacgccaagaccaagcctagagaggaacagtacaacagcacctacagagtggtgtccgtgctgaccgtgctgcaccaggattggctgaacggcaaagagtacaagtgcaaggtgtccaacaaggccctgcctgctcctatcgagaaaaccatcagcaaggccaagggccagcctagggaaccccaggtttgtacccttcctccaagccgggatgagctgaccaagaaccaggtgtccctgagctgtgccgtgaagggcttctaccccagcgacattgccgtggaatgggagagcaatggccagcctgagaacaactacaagacaacccctcctgtgctggacagcgacggctcattcttcctggtgagcaagctgacagtcgacaagtccagatggcagcagggcaacgtgttcagttgcagcgtgctgcacgaggccctgcacgctcactacacccagaagtccctgagcctgtctcctggatagtga

SEQ ID NO: 619 - DNA, 2877 bp, synthetic construct
  source 1..2877: mol_type = other DNA
gagatcgtgctgacacagagccctggcacactgtcactgtctccaggcgaaacagccacactgagctgtagagccagccagagcttcagcagcgacctggcttggtatcagcagaagcctggacaggcccctcggctgttgatctatggcgcctcttctagagccacaggcatccccgatagattcagcggctctggcagcggcaccgatttcaccctgacaatcagcagactggaacccgccgacttcgccgtgtactactgtcagcagtacggcagcagccctcctgtgacatttggcggcggaacaaaggtggaaatcaaaggcggatcctctggaagctacgtgctgacacagcctccatccgtgtctgtggctccaggacagaccgccagaatcacatgcggcggcaacaacatcggcaccaagagcgtgcactggtatcagcagaagcctggacaggcccctgtgctcgtgatcagcagcgatagcgatagacctagcggcgtgcccgatagattcagcggcagcaatagcggcaacaccgccacactgaccatcagcagagttgaggctggcgacgaggccgactactactgtcacgtgtgggatagcagcagcgaccactgggttttcggcggaggcacaaagctgacagtgctgggaggtggtggctctggcggatctgggagtggtggcggaggctctgcttctggatctggagaggtgcagctggttgaatctggcggcggaagagtgaagcctggcggatctctgagactgagctgtgccgccagcggcttcaccttcagcagctacagaatgaactgggtccgacaggcccctggcaaaggccttgaatgggtgtccagcatcagcagcggcagctcctacatctacttcgccgacagcgtgaagggcagattcaccatctccagagacaacgccaagaacagcctgttcctgcggatgaacaacctgagagtggaagataccgccgtgtactactgcgccagagcacccacactgagacacagcagcggatggtacgatcctcctggcaccgagcaaagcagcttcgatctgtggggcagaggcaccctggtcacagtctcttctggaggcagctccggggaagtgcagctggtggaatcaggcggcggactgattcaacctggcggctctctgagactgtcttgtgctgcttctggcgtgatcgtgtcctacaactacatgaactgggtccgacaggctcccggcaaaggccttgaatgggtgtccgtgatctacagcggcggcagcaccttttacgccgattctgtgcggggcagattcaccatcagccgggacaacagcaagaacaccctgtacctgcagatgaacagcctgagagccgaggacaccgctgtgtactattgcgccagagatctgggacctgccggcgcttttgatatctggggcctgggcacaatggtcaccgtgtctagccgtacggtggccgctcccagcgtgttcatcttcccacctagcgacgagcagctgaagtccggcacagcctctgtcgtgtgcctgctgaacaacttctacccccgcgaggccaaagtgcagtggaaggtggacaacgccctgcagagcggcaacagccaggaaagcgtgaccgagcaggacagcaaggactccacctacagcctgagcagcaccctgacactgagcaaggccgactacgagaagcacaaggtgtacgcctgcgaagtgacccaccagggcctgtctagccccgtgaccaagagcttcaaccggggcgagtgtggaggcggaggatctggcggatctggaagtggcggaggtggtagtggcggcggtggatctgcttctggctctggcgcttcgaccaagggcccatccgtgtttcctctggctcccagcagcaagtctacaagcggaggaacagccgctctgggctgcctggtcaaggattactttcccgagcctgtgaccgtgtcctggaattctggcgctctgacaagcggcgtgcacacctttccagctgtgctgcaaagcagcggcctgtactctctgagcagcgtggtcacagtgcctagctctagcctgggcacccagacctacatctgcaatgtgaaccacaagcctagcaacaccaaggtggacaagaaggtggaacccaagagctgcgataagacccacacatgtcctccatgtcctgctccagaactgctcggcggcccttctgtgttcctgtttcctccaaagcctaaggacaccctgatgatcagcagaacccctgaagtgacctgcgtggtggtggatgtgtctcacgaggaccccgaagtgaagttcaattggtacgtggacggcgtggaagtgcacaacgccaagaccaagcctagagaggaacagtacaacagcacctacagagtggtgtccgtgctgaccgtgctgcaccaggattggctgaacggcaaagagtacaagtgcaaggtgtccaacaaggccctgcctgctcctatcgagaaaaccatcagcaaggccaagggccagcctagggaaccccaggtttacacccttcctccatgccgggatgagctgaccaagaaccaggtgtccctgtggtgtctcgtgaagggcttctaccccagcgacattgccgtggaatgggagagcaatggccagcctgagaacaactacaagacaacccctcctgtgctggacagcgacggctcattcttcctgtacagcaagctgacagtcgacaagtccagatggcagcagggcaacgtgttcagttgcagcgtgctgcacgaggccctgcacgctcactacacccagaagtccctgagcctgtctcctggatagtga

SEQ ID NO: 620 - DNA, 2871 bp, synthetic construct; identical to SEQ ID NO: 618
  source 1..2871: mol_type = other DNA

SEQ ID NO: 621 - DNA, 2877 bp, synthetic construct; identical to SEQ ID NO: 617
  source 1..2877: mol_type = other DNA

SEQ ID NO: 622 - DNA, 2871 bp, synthetic construct; identical to SEQ ID NO: 517
  source 1..2871: mol_type = other DNA

SEQ ID NO: 623 - DNA, 2877 bp, synthetic construct; identical to SEQ ID NO: 619
  source 1..2877: mol_type = other DNA

SEQ ID NO: 624 - DNA, 2871 bp, synthetic construct; identical to SEQ ID NO: 517
  source 1..2871: mol_type = other DNA

SEQ ID NO: 625 - DNA, 2883 bp, synthetic construct
  source 1..2883: mol_type = other DNA
atgggctggtcctgcatcatcctgtttctggtggccacagccaccggtgtgcactctgagatcgtgctgacacagagccctggcacactgtcactgtctccaggcgaaacagccacactgagctgtagagccagccagagcttcagcagcgacctggcttggtatcagcagaagcctggacaggcccctcggctgttgatctatggcgcctcttctagagccacaggcatccccgatagattcagcggctctggcagcggcaccgatttcaccctgacaatcagcagactggaacccgccgacttcgccgtgtactactgtcagcagtacggcagcagccctcctgtgacatttggcggcggaacaaaggtggaaatcaaacgtacggtggccgctcccagcgtgttcatcttcccacctagcgacgagcagctgaagtccggcacagcctctgtcgtgtgcctgctgaacaacttctacccccgcgaggccaaagtgcagtggaaggtggacaacgccctgcagagcggcaacagccaggaaagcgtgaccgagcaggacagcaaggactccacctacagcctgagcagcaccctgacactgagcaaggccgactacgagaagcacaaggtgtacgcctgcgaagtgacccaccagggcctgtctagccccgtgaccaagagcttcaaccggggcgagtgtggcggcggaggatctggcggaggtggaagcggaggcggtggaagcgacaccgtgatgacacagagccctctgagcctgcctgtgacacctggcgaacctgccagcatcagctgtagaagcagccagagcctgctgaacagcaacggctacaactacctggattggtacgtgcagaagcccggccagtctcctcagctgctgatctacctgggcagcaatagagccagcggcgtgcccgatagattttctggctctggcagcggcaccgacttcaccctgaagatctctagagtggaagccgaggacgtgggcgtgtactactgtatgcagcctctgcagacccctctgttcacatttggccctggcaccaaggtggaaatcaaaggaggtggtggctctggcggatctgggagtggtggcggaggctctgcttctggatctggacaagtgacactgagagagtctggccccgctctggtcaagcctacacagaccctgacactgacctgcaccttcagcggcttcagcctgtctactagaggcgtgtgcgtgtcctggatcagacagcctcctggaaaggccctggaatggctggccttcatcgactgggacgacgacaagtactacaacaccagcctgaaaacccggctgaccatcagcaaggacaccagcaagaaccaggtggtgctgaccatgaccaacgtgcaccctgtggataccgccacctactactgcgccagaatcagctctcaccacggctccagctggtgtaccaccttcgattattggggccagggcgctctcgtgacagtttctgctggaggcagctccggggaagtgcagctggtggaatcaggcggcggactgattcaacctggcggctctctgagactgtcttgtgctgcttctggcgtgatcgtgtcctacaactacatgaactgggtccgacaggctcccggcaaaggccttgaatgggtgtccgtgatctacagcggcggcagcaccttttacgccgattctgtgcggggcagattcaccatcagccgggacaacagcaagaacaccctgtacctgcagatgaacagcctgagagccgaggacaccgctgtgtactattgcgccagagatctgggacctgccggcgcttttgatatctggggcctgggcacaatggtcaccgtgtctagcgcttcgaccaagggcccatccgtgtttcctctggctcccagcagcaagtctacaagcggaggaacagccgctctgggctgcctggtcaaggattactttcccgagcctgtgaccgtgtcctggaattctggcgctctgacaagcggcgtgcacacctttccagctgtgctgcaaagcagcggcctgtactctctgagcagcgtggtcacagtgcctagctctagcctgggcacccagacctacatctgcaatgtgaaccacaagcctagcaacaccaaggtggacaagaaggtggaacccaagagctgcgataagacccacacatgtcctccatgtcctgctccagaactgctcggcggcccttctgtgttcctgtttcctccaaagcctaaggacaccctgatgatcagcagaacccctgaagtgacctgcgtggtggtggatgtgtctcacgaggaccccgaagtgaagttcaattggtacgtggacggcgtggaagtgcacaacgccaagaccaagcctagagaggaacagtacaacagcacctacagagtggtgtccgtgctgaccgtgctgcaccaggattggctgaacggcaaagagtacaagtgcaaggtgtccaacaaggccctgcctgctcctatcgagaaaaccatcagcaaggccaagggccagcctagggaaccccaggtttacacccttcctccaagccgggatgagctgaccaagaaccaggtgtccctgacatgtctcgtgaagggcttctaccccagcgacattgccgtggaatgggagagcaatggccagcctgagaacaactacaagacaacccctcctgtgctggacagcgacggctcattcttcctgtacagcaagctgacagtcgacaagtccagatggcagcagggcaacgtgttcagttgcagcgtgctgcacgaggccctgcacgctcactacacccagaagtccctgagcctgtctcctggataatag

SEQ ID NO: 626 - protein, 132 aa, synthetic construct
EVQLVESGGGRVKPGGSLRLSCAASGFTFSSYRMNWVRQAPGKGLEWVSSISSGSSYIYFADSVKGRFTISRDNAKNSLFLRMNNLRVEDTAVYYCARAPTLRHSSGWYDPPGTEQSSFDLWGRGTLVTVSS

SEQ ID NO: 627 - protein, 11 aa, synthetic construct
GGNNIGTKSVH

SEQ ID NO: 628 - protein, 7 aa, synthetic construct
SDSDRPS

SEQ ID NO: 629 - protein, 5 aa, synthetic construct
SYRMN

SEQ ID NO: 630 - protein, 17 aa, synthetic construct
SISSGSSYIYFADSVKG

SEQ ID NO: 631 - protein, 23 aa, synthetic construct
APTLRHSSGWYDPPGTENSSFDL

SEQ ID NO: 632 - protein, 943 aa, synthetic construct
EIVLTQSPGTLSLSPGETATLSCRASQSFSSDLAWYQQKPGQAPRLLIYGASSRATGIPDRFSGSGSGTDFTLTISRLEPADFAVYYCQQYGSSPPVTFGGGTKVEIKRTVAAPSVFIFPPSDEQLKSGTASVVCLLNNFYPREAKVQWKVDNALQSGNSQESVTEQDSKDSTYSLSSTLTLSKADYEKHKVYACEVTHQGLSSPVTKSFNRGECGGGGSGGGGSGGGGSSYVLTQPPSVSVAPGQTARITCGGNNIGTKSVHWYQQKPGQAPVLVISSDSDRPSGVPDRFSGSNSGNTATLTISRVEAGDEADYYCHVWDSSSDHWVFGGGTKLTVLGGGGSGGSGSGGGGSASGSGEVQLVESGGGRVKPGGSLRLSCAASGFTFSSYRMNWVRQAPGKGLEWVSSISSGSSYIYFADSVKGRFTISRDNAKNSLFLRMNNLRVEDTAVYYCARAPTLRHSSGWYDPPGTENSSFDLWGRGTLVTVSSGGSSGEVQLVESGGGLIQPGGSLRLSCAASGVIVSYNYMNWVRQAPGKGLEWVSVIYSGGSTFYADSVRGRFTISRDNSKNTLYLQMNSLRAEDTAVYYCARDLGPAGAFDIWGLGTMVTVSSASTKGPSVFPLAPSSKSTSGGTAALGCLVKDYFPEPVTVSWNSGALTSGVHTFPAVLQSSGLYSLSSVVTVPSSSLGTQTYICNVNHKPSNTKVDKRVEPKSCDKTHTCPPCPAPEFEGGPSVFLFPPKPKDTLYITREPEVTCVVVDVSHEDPEVKFNWYVDGVEVHNAKTKPREEQYNSTYRVVSVLTVLHQDWLNGKEYKCKVSNKALPASIEKTISKAKGQPREPQVYTLPPCREEMTKNQVSLWCLVKGFYPSDIAVEWESNGQPENNYKTTPPVLDSDGSFFLYSKLTVDKSRWQQGNVFSCSVMHEALHNHYTQKSLSLSPGK

SEQ ID NO: 633 - protein, 941 aa, synthetic construct
EIVLTQSPGTLSLSPGETATLSCRASQSFSSDLAWYQQKPGQAPRLLIYGASSRATGIPDRFSGSGSGTDFTLTISRLEPADFAVYYCQQYGSSPPVTFGGGTKVEIKRTVAAPSVFIFPPSDEQLKSGTASVVCLLNNFYPREAKVQWKVDNALQSGNSQESVTEQDSKDSTYSLSSTLTLSKADYEKHKVYACEVTHQGLSSPVTKSFNRGECGGGGSGGGGSGGGGSDTVMTQSPLSLPVTPGEPASISCRSSQSLLNSNGYNYLDWYVQKPGQSPQLLIYLGSNRASGVPDRFSGSGSGTDFTLKISRVEAEDVGVYYCMQPLQTPLFTFGPGTKVEIKGGGGSGGSGSGGGGSASGSGQVTLRESGPALVKPTQTLTLTCTFSGFSLSTRGVCVSWIRQPPGKALEWLAFIDWDDDKYYQTSLKTRLTISKDTSKNQVVLTMTNVHPVDTATYYCARISSHHGSSWCTTFDYWGQGALVTVSAGGSSGEVQLVESGGGLIQPGGSLRLSCAASGVIVSYNYMNWVRQAPGKGLEWVSVIYSGGSTFYADSVRGRFTISRDNSKNTLYLQMNSLRAEDTAVYYCARDLGPAGAFDIWGLGTMVTVSSASTKGPSVFPLAPSSKSTSGGTAALGCLVKDYFPEPVTVSWNSGALTSGVHTFPAVLQSSGLYSLSSVVTVPSSSLGTQTYICNVNHKPSNTKVDKRVEPKSCDKTHTCPPCPAPEFEGGPSVFLFPPKPKDTLYITREPEVTCVVVDVSHEDPEVKFNWYVDGVEVHNAKTKPREEQYNSTYRVVSVLTVLHQDWLNGKEYKCKVSNKALPASIEKTISKAKGQPREPQVCTLPPSREEMTKNQVSLSCAVKGFYPSDIAVEWESNGQPENNYKTTPPVLDSDGSFFLVSKLTVDKSRWQQGNVFSCSVMHEALHNHYTQKSLSLSPGK

SEQ ID NO: 634 - protein, 98 aa, synthetic construct
ASTKGPSVFPLAPSSKSTSGGTAALGCLVKDYFPEPVTVSWNSGALTSGVHTFPAVLQSSGLYSLSSVVTVPSSSLGTQTYICNVNHKPSNTKVDKRV

SEQ ID NO: 635 - protein, 22 aa, synthetic construct
EPKSCDKTHTCPPCPAPELLGG

SEQ ID NO: 636 - protein, 22 aa, synthetic construct
EPKSCDKTHTCPPCPAPEFEGG

SEQ ID NO: 637 - protein, 106 aa, synthetic construct
GQPKAAPSVTLFPPSSEELQANKATLVCLISDFYPGAVTVAWKADSSPVKAGVETTTPSKQSNNKYAASSYLSLTPEQWKSHRSYSCQVTHEGSTVEKTVAPTECS

SEQ ID NO: 638 - protein, 215 aa, synthetic construct
QSVVTQPPSASGSLGQSVTISCTGTSSDVGGYNYVSWYQQHPGKAPKLMIFEVSKRPSGVPDRFSGSKSGNTASLTVSGLQAEDEADYYCSSYAGNKGVFGGGTKLTVLGQPKAAPSVTLFPPSSEELQANKATLVCLISDFYPGAVTVAWKADSSPVKAGVETTTPSKQSNNKYAASSYLSLTPEQWKSHRSYSCQVTHEGSTVEKTVAPTECS

SEQ ID NO: 639 - protein, 109 aa, synthetic construct
QSVVTQPPSASGSLGQSVTISCTGTSSDVGGYNYVSWYQQHPGKAPKLMIFEVSKRPSGVPDRFSGSKSGNTASLTVSGLQAEDEADYYCSSYAGNKGVFGGGTKLTVL

SEQ ID NO: 640 - protein, 14 aa, synthetic construct
TGTSSDVGGYNYVS

SEQ ID NO: 641 - protein, 7 aa, synthetic construct
EVSKRPS

SEQ ID NO: 642 - protein, 9 aa, synthetic construct
SSYAGNKGV

SEQ ID NO: 643 - protein, 455 aa, synthetic construct
EVQLVESGGGLVQPGRSLRLSCAASGFPFDDYAIHWVRLAPGKGLEWVSSISWDSGSIGYADSVKGRFTISRDNAKNSLYLQMNSLRAEDTALYYCAKGAFPGYSSGWYYGLEVWGQGTTVTVSSASTKGPSVFPLAPSSKSTSGGTAALGCLVKDYFPEPVTVSWNSGALTSGVHTFPAVLQSSGLYSLSSVVTVPSSSLGTQTYICNVNHKPSNTKVDKRVEPKSCDKTHTCPPCPAPEFEGGPSVFLFPPKPKDTLYITREPEVTCVVVDVSHEDPEVKFNWYVDGVEVHNAKTKPREEQYNSTYRVVSVLTVLHQDWLNGKEYKCKVSNKALPASIEKTISKAKGQPREPQVYTLPPSREEMTKNQVSLTCLVKGFYPSDIAVEWESNGQPENNYKTTPPVLDSDGSFFLYSKLTVDKSRWQQGNVFSCSVMHEALHNHYTQKSLSLSPGK

SEQ ID NO: 644 - protein, 125 aa, synthetic construct
EVQLVESGGGLVQPGRSLRLSCAASGFPFDDYAIHWVRLAPGKGLEWVSSISWDSGSIGYADSVKGRFTISRDNAKNSLYLQMNSLRAEDTALYYCAKGAFPGYSSGWYYGLEVWGQGTTVTVSS

SEQ ID NO: 645 - protein, 5 aa, synthetic construct
DYAIH

SEQ ID NO: 646 - protein, 17 aa, synthetic construct
SISWDSGSIGYADSVKG

SEQ ID NO: 647 - protein, 16 aa, synthetic construct
GAFPGYSSGWYYGLEV

SEQ ID NO: 648 - protein, 214 aa, synthetic construct
DIQMTQSPSSLSAAVGDRVTITCQASQDIVNYLNWYQQKPGKAPKLLIYVASNLETGVPSRFSGSGSGTDFSLTISSLQPEDVATYYCQQYDNLPLTFGGGTKVEIKRTVAAPSVFIFPPSDEQLKSGTASVVCLLNNFYPREAKVQWKVDNALQSGNSQESVTEQDSKDSTYSLSSTLTLSKADYEKHKVYACEVTHQGLSSPVTKSFNRGEC

SEQ ID NO: 649 - protein, 107 aa, synthetic construct [sequence omitted]

SEQ ID NO: 650 - protein, 6 aa, synthetic construct
QDIVNY

SEQ ID NO: 651 - protein, 9 aa, synthetic construct
QQYDNLPLT

SEQ ID NO: 652 - protein, 456 aa, synthetic construct
QVQLVQSGAEVKKPGSSVMVSCQASGGLLEDYIINWVRQAPGQGPEWMGGIIPVLGTVHYGPKFQGRVTITADESTDTAYMELSSLRSEDTAMYYCATETALVVSETYLPHYFDNWGQGTLVTVSSASTKGPSVFPLAPSSKSTSGGTAALGCLVKDYFPEPVTVSWNSGALTSGVHTFPAVLQSSGLYSLSSVVTVPSSSLGTQTYICNVNHKPSNTKVDKRVEPKSCDKTHTCPPCPAPELLGGPSVFLFPPKPKDTLYITREPEVTCVVVDVSHEDPEVKFNWYVDGVEVHNAKTKPREEQYNSTYRVVSVLTVLHQDWLNGKEYKCKVSNKALPAPIEKTISKAKGQPREPQVYTLPPSREEMTKNQVSLTCLVKGFYPSDIAVEWESNGQPENNYKTTPPVLDSDGSFFLYSKLTVDKSRWQQGNVFSCSVMHEALHNHYTQKSLSLSPGK

SEQ ID NO: 653 - protein, 126 aa, synthetic construct [sequence omitted]

SEQ ID NO: 654 - protein, 8 aa, synthetic construct
GGLLEDYI

SEQ ID NO: 655 - protein, 8 aa, synthetic construct
IIPVLGTV

SEQ ID NO: 656 - protein, 19 aa, synthetic construct
ATETALVVSETYLPHYFDN

SEQ ID NO: 657 - protein, 219 aa, synthetic construct
DIVMTQSPDSLAVSLGERATINCKSSQSVLYSSNNKNYLAWYQQKPGQPPKLLMYWASTRESGVPDRFSGSGSGAEFTLTISSLQAEDVAIYYCQQYYSTLTFGGGTKVEIKRTVAAPSVFIFPPSDEQLKSGTASVVCLLNNFYPREAKVQWKVDNALQSGNSQESVTEQDSKDSTYSLSSTLTLSKADYEKHKVYACEVTHQGLSSPVTKSFNRGEC

SEQ ID NO: 658 - protein, 112 aa, synthetic construct
DIVMTQSPDSLAVSLGERATINCKSSQSVLYSSNNKNYLAWYQQKPGQPPKLLMYWASTRESGVPDRFSGSGSGAEFTLTISSLQAEDVAIYYCQQYYSTLTFGGGTKVEIK

SEQ ID NO: 659 - protein, 12 aa, synthetic construct
QSVLYSSNNKNY

SEQ ID NO: 660 - protein, 8 aa, synthetic construct
QQYYSTLT

SEQ ID NO: 661 - protein, 461 aa, synthetic construct
EVQLVESGGGLVKPGGSLRLSCAASGFTFRDVWMSWVRQAPGKGLEWVGRIKSKIDGGTTDYAAPVKGRFTISRDDSKNTLYLQMNSLKTEDTAVYYCTTAGSYYYDTVGPGLPEGKFDYWGQGTLVTVSSASTKGPSVFPLAPSSKSTSGGTAALGCLVKDYFPEPVTVSWNSGALTSGVHTFPAVLQSSGLYSLSSVVTVPSSSLGTQTYICNVNHKPSNTKVDKRVEPKSCDKTHTCPPCPAPEFEGGPSVFLFPPKPKDTLYITREPEVTCVVVDVSHEDPEVKFNWYVDGVEVHNAKTKPREEQYNSTYRVVSVLTVLHQDWLNGKEYKCKVSNKALPASIEKTISKAKGQPREPQVYTLPPSREEMTKNQVSLTCLVKGFYPSDIAVEWESNGQPENNYKTTPPVLDSDGSFFLYSKLTVDKSRWQQGNVFSCSVMHEALHNHYTQKSLSLSPGK

SEQ ID NO: 662 - protein, 131 aa, synthetic construct
EVQLVESGGGLVKPGGSLRLSCAASGFTFRDVWMSWVRQAPGKGLEWVGRIKSKIDGGTTDYAAPVKGRFTISRDDSKNTLYLQMNSLKTEDTAVYYCTTAGSYYYDTVGPGLPEGKFDYWGQGTLVTVSS

SEQ ID NO: 663 - protein, 8 aa, synthetic construct
GFTFRDVW

SEQ ID NO: 664 - protein, 10 aa, synthetic construct
IKSKIDGGTT

SEQ ID NO: 665 - protein, 22 aa, synthetic construct
TTAGSYYYDTVGPGLPEGKFDY

SEQ ID NO: 666 - protein, 216 aa, synthetic construct
EIVLTQSPGTLSLSPGERATLSCRASQSVSSSYLAWYQQKPGQAPRLLIYGASSRATGIPDRFSGSGSGTDFTLTISRLEPEDFAVYYCQHYGSSRGWTFGQGTKVEIKRTVAAPSVFIFPPSDEQLKSGTASVVCLLNNFYPREAKVQWKVDNALQSGNSQESVTEQDSKDSTYSLSSTLTLSKADYEKHKVYACEVTHQGLSSPVTKSFNRGEC

SEQ ID NO: 667 - protein, 108 aa, synthetic construct
EIVLTQSPGTLSLSPGERATLSCRASQSVSSSYLAWYQQKPGQAPRLLIYGASSRATGIPDRFSGSGSGTDFTLTISRLEPEDFAVYYCQHYGSSRGWTFGQGTKVEI

SEQ ID NO: 668 - protein, 10 aa, synthetic construct
QHYGSSRGWT

SEQ ID NO: 669 - protein, 453 aa, synthetic construct
QMQLVQSGPEVKKPGTSVKVSCKASGFTFMSSAVQWVRQARGQRLEWIGWIVIGSGNTNYAQKFQERVTITRDMSTSTAYMELSSLRSEDTAVYYCAAPYCSSISCNDGFDIWGQGTMVTVSSASTKGPSVFPLAPSSKSTSGGTAALGCLVKDYFPEPVTVSWNSGALTSGVHTFPAVLQSSGLYSLSSVVTVPSSSLGTQTYICNVNHKPSNTKVDKRVEPKSCDKTHTCPPCPAPEFEGGPSVFLFPPKPKDTLYITREPEVTCVVVDVSHEDPEVKFNWYVDGVEVHNAKTKPREEQYNSTYRVVSVLTVLHQDWLNGKEYKCKVSNKALPASIEKTISKAKGQPREPQVYTLPPSREEMTKNQVSLTCLVKGFYPSDIAVEWESNGQPENNYKTTPPVLDSDGSFFLYSKLTVDKSRWQQGNVFSCSVMHEALHNHYTQKSLSLSPGK

SEQ ID NO: 670 - protein, 123 aa, synthetic construct
QMQLVQSGPEVKKPGTSVKVSCKASGFTFMSSAVQWVRQARGQRLEWIGWIVIGSGNTNYAQKFQERVTITRDMSTSTAYMELSSLRSEDTAVYYCAAPYCSSISCNDGFDIWGQGTMVTVSS

SEQ ID NO: 671 - protein, 8 aa, synthetic construct
GFTFMSSA

SEQ ID NO: 672 - protein, 8 aa, synthetic construct
IVIGSGNT

SEQ ID NO: 673 - protein, 16 aa, synthetic construct
AAPYCSSISCNDGFDI

SEQ ID NO: 674 - protein, 210 aa, synthetic construct
DIQMTQSPSSLSASVGDRVTITCRTSQSLSSYTHWYQQKPGKAPKLLIYAASSRGSGVPSRFSGSGSGTDFTLTISSLQPEDFATYYCQQSRTFGQGTKVEIKRTVAAPSVFIFPPSDEQLKSGTASVVCLLNNFYPREAKVQWKVDNALQSGNSQESVTEQDSKDSTYSLSSTLTLSKADYEKHKVYACEVTHQGLSSPVTKSFNRGEC

SEQ ID NO: 675 - protein, 103 aa, synthetic construct
DIQMTQSPSSLSASVGDRVTITCRTSQSLSSYTHWYQQKPGKAPKLLIYAASSRGSGVPSRFSGSGSGTDFTLTISSLQPEDFATYYCQQSRTFGQGTKVEIK

SEQ ID NO: 676 - protein, 11 aa, synthetic construct
RTSQSLSSYTH

SEQ ID NO: 677 - protein, 7 aa, synthetic construct
AASSRGS

SEQ ID NO: 678 - protein, 5 aa, synthetic construct
QQSRT

SEQ ID NO: 679 - protein, 458 aa, synthetic construct
QVQLQQSGPGLVKPSQTLSLTCAISGDSVSSYNAVWNWIRQSPSRGLEWLGRTYYRSGWYNDYAESVKSRITINPDTSKNQFSLQLNSVTPEDTAVYYCARSGHITVFGVNVDAFDMWGQGTMVTVSSASTKGPSVFPLAPSSKSTSGGTAALGCLVKDYFPEPVTVSWNSGALTSGVHTFPAVLQSSGLYSLSSVVTVPSSSLGTQTYICNVNHKPSNTKVDKRVEPKSCDKTHTCPPCPAPELLGGPSVFLFPPKPKDTLMISRTPEVTCVVVDVSHEDPEVKFNWYVDGVEVHNAKTKPREEQYNSTYRVVSVLTVLHQDWLNGKEYKCKVSNKALPAPIEKTISKAKGQPREPQVYTLPPSREEMTKNQVSLTCLVKGFYPSDIAVEWESNGQPENNYKTTPPVLDSDGSFFLYSKLTVDKSRWQQGNVFSCSVMHEALHNHYTQKSLSLSPGK

SEQ ID NO: 680 - protein, 458 aa, synthetic construct
QVQLQQSGPGLVKPSQTLSLTCAISGDSVSSYNAVWNWIRQSPSRGLEWLGRTYYRSGWYNDYAESVKSRITINPDTSKNQFSLQLNSVTPEDTAVYYCARSGHITVFGVNVDAFDMWGQGTMVTVSSASTKGPSVFPLAPSSKSTSGGTAALGCLVKDYFPEPVTVSWNSGALTSGVHTFPAVLQSSGLYSLSSVVTVPSSSLGTQTYICNVNHKPSNTKVDKRVEPKSCDKTHTCPPCPAPELLGGPSVFLFPPKPKDTLMISRTPEVTCVVVDVSHEDPEVKFNWYVDGVEVHNAKTKPREEQYNSTYRVVSVLTVLHQDWLNGKEYKCKVSNKALPAPIEKTISKAKGQPREPQVYTLPPSREEMTKNQVSLTCLVKGFYPSDIAVEWESNGQPENNYKTTPPVLDSDGSFFLYSKLTVDKSRWQQGNVFSCSVLHEALHSHYTQKSLSLSPGK

SEQ ID NO: 681 - protein, 128 aa, synthetic construct
QVQLQQSGPGLVKPSQTLSLTCAISGDSVSSYNAVWNWIRQSPSRGLEWLGRTYYRSGWYNDYAESVKSRITINPDTSKNQFSLQLNSVTPEDTAVYYCARSGHITVFGVNVDAFDMWGQGTMVTVSS

SEQ ID NO: 682 - protein, 7 aa, synthetic construct
SYNAVWN

SEQ ID NO: 683 - protein, 18 aa, synthetic construct
RTYYRSGWYNDYAESVKS

SEQ ID NO: 684 - protein, 16 aa, synthetic construct
SGHITVFGVNVDAFDM

SEQ ID NO: 685 - protein, 214 aa, synthetic construct
DIQMTQSPSSLSASVGDRVTITCQASQDITNYLNWYQQKPGKAPKLLIYAASNLETGVPSRFSGSGSGTDFTFTISGLQPEDIATYYCQQYDNLPLTFGGGTKVEIKRTVAAPSVFIFPPSDEQLKSGTASVVCLLNNFYPREAKVQWKVDNALQSGNSQESVTEQDSKDSTYSLSSTLTLSKADYEKHKVYACEVTHQGLSSPVTKSFNRGEC

SEQ ID NO: 686 - protein, 106 aa, synthetic construct
DIQMTQSPSSLSASVGDRVTITCQASQDITNYLNWYQQKPGKAPKLLIYAASNLETGVPSRFSGSGSGTDFTFTISGLQPEDIATYYCQQYDNLPLTFGGGTKVEI

SEQ ID NO: 687 - protein, 6 aa, synthetic construct
QDITNY

SEQ ID NO: 688 - protein, 450 aa, synthetic construct
QVQLVESGGGLVKPGGSLRLSCAASGFTFSDYYMSWIRQAPGKGLEWVSYITYSGSTIYYADSVKGRFTISRDNAKSSLYLQMNSLRAEDTAVYYCARDRGTTMVPFDYWGQGTLVTVSSASTKGPSVFPLAPSSKSTSGGTAALGCLVKDYFPEPVTVSWNSGALTSGVHTFPAVLQSSGLYSLSSVVTVPSSSLGTQTYICNVNHKPSNTKVDKKVEPKSCDKTHTCPPCPAPELLGGPSVFLFPPKPKDTLMISRTPEVTCVVVDVSHEDPEVKFNWYVDGVEVHNAKTKPREEQYNSTYRVVSVLTVLHQDWLNGKEYKCKVSNKALPAPIEKTISKAKGQPREPQVYTLPPSRDELTKNQVSLTCLVKGFYPSDIAVEWESNGQPENNYKTTPPVLDSDGSFFLYSKLTVDKSRWQQGNVFSCSVMHEALHNHYTQKSLSLSPGK

SEQ ID NO: 689 - protein, 120 aa, synthetic construct
QVQLVESGGGLVKPGGSLRLSCAASGFTFSDYYMSWIRQAPGKGLEWVSYITYSGSTIYYADSVKGRFTISRDNAKSSLYLQMNSLRAEDTAVYYCARDRGTTMVPFDYWGQGTLVTVSS

SEQ ID NO: 690 - protein, 8 aa, synthetic construct
GFTFSDYY

SEQ ID NO: 691 - protein, 8 aa, synthetic construct
ITYSGSTI

SEQ ID NO: 692 - protein, 13 aa, synthetic construct
ARDRGTTMVPFDY

SEQ ID NO: 693 - protein, 216 aa, synthetic construct
QSALTQPASVSGSPGQSITISCTGTSSDVGGYNYVSWYQQHPGKAPKLMIYDVSKRPSGVSNRFSGSKSGNTASLTISGLQSEDEADYYCNSLTSISTWVFGGGTKLTVLGQPKAAPSVTLFPPSSEELQANKATLVCLISDFYPGAVTVAWKADSSPVKAGVETTTPSKQSNNKYAASSYLSLTPEQWKSHRSYSCQVTHEGSTVEKTVAPTECS

SEQ ID NO: 694 - protein, 110 aa, synthetic construct
QSALTQPASVSGSPGQSITISCTGTSSDVGGYNYVSWYQQHPGKAPKLMIYDVSKRPSGVSNRFSGSKSGNTASLTISGLQSEDEADYYCNSLTSISTWVFGGGTKLTVL

SEQ ID NO: 695 - protein, 9 aa, synthetic construct
SSDVGGYNY

SEQ ID NO: 696 - protein, 10 aa, synthetic construct
NSLTSISTWV

SEQ ID NO: 697 - protein, 450 aa, synthetic construct
QVQLVESGGGVVQPGRSLRLSCAASGFTFSNYAMYWVRQAPGKGLEWVAVISYDGSNKYYADSVKGRFTISRDNSKNTLYLQMNSLRTEDTAVYYCASGSDYGDYLLVYWGQGTLVTVSSASTKGPSVFPLAPSSKSTSGGTAALGCLVKDYFPEPVTVSWNSGALTSGVHTFPAVLQSSGLYSLSSVVTVPSSSLGTQTYICNVNHKPSNTKVDKKVEPKSCDKTHTCPPCPAPELLGGPSVFLFPPKPKDTLMISRTPEVTCVVVDVSHEDPEVKFNWYVDGVEVHNAKTKPREEQYNSTYRVVSVLTVLHQDWLNGKEYKCKVSNKALPAPIEKTISKAKGQPREPQVYTLPPSRDELTKNQVSLTCLVKGFYPSDIAVEWESNGQPENNYKTTPPVLDSDGSFFLYSKLTVDKSRWQQGNVFSCSVMHEALHNHYTQKSLSLSPGK

SEQ ID NO: 698 - protein, 120 aa, synthetic construct
QVQLVESGGGVVQPGRSLRLSCAASGFTFSNYAMYWVRQAPGKGLEWVAVISYDGSNKYYADSVKGRFTISRDNSKNTLYLQMNSLRTEDTAVYYCASGSDYGDYLLVYWGQGTLVTVSS

SEQ ID NO: 699 - protein, 8 aa, synthetic construct
GFTFSNYA

SEQ ID NO: 700 - protein, 13 aa, synthetic construct
ASGSDYGDYLLVY

SEQ ID NO: 701 - protein, 214 aa, synthetic construct [sequence omitted]

SEQ ID NO: 702 - protein, 107 aa, synthetic construct [sequence omitted]

SEQ ID NO: 703 - protein, 6 aa, synthetic construct
QDISSY

SEQ ID NO: 704 - protein, 9 aa, synthetic construct
QQGNTLPYT

SEQ ID NO: 705 - protein, 448 aa, synthetic construct
QVQLQESGPGLVRPSQTLSLTCTVSGYSITSDHAWSWVRQPPGRGLEWIGYISYSGITTYNPSLKSRVTMLRDTSKNQFSLRLSSVTAADTAVYYCARSLARTTAMDYWGQGSLVTVSSASTKGPSVFPLAPSSKSTSGGTAALGCLVKDYFPEPVTVSWNSGALTSGVHTFPAVLQSSGLYSLSSVVTVPSSSLGTQTYICNVNHKPSNTKVDKKVEPKSCDKTHTCPPCPAPELLGGPSVFLFPPKPKDTLMISRTPEVTCVVVDVSHEDPEVKFNWYVDGVEVHNAKTKPREEQYNSTYRVVSVLTVLHQDWLNGKEYKCKVSNKALPAPIEKTISKAKGQPREPQVYTLPPSREEMTKNQVSLTCLVKGFYPSDIAVEWESNGQPENNYKTTPPVLDSDGSFFLYSKLTVDKSRWQQGNVFSCSVMHEALHNHYTQKSLSLSPG

SEQ ID NO: 706 - protein, 119 aa, synthetic construct [sequence omitted]

SEQ ID NO: 707 - protein, 9 aa, synthetic construct
GYSITSDHA

SEQ ID NO: 708 - protein, 7 aa, synthetic construct
ISYSGIT

SEQ ID NO: 709 - protein, 12 aa, synthetic construct
ARSLARTTAMDY

SEQ ID NO: 710 - protein, 215 aa, synthetic construct
QSALTQPASVSGSPGQSITISCTATSSDVGDYNYVSWYQQHPGKAPKLMIFEVSDRPSGISNRFSGSKSGNTASLTISGLQAEDEADYYCSSYTTSSAVFGGGTKLTVLGQPKAAPSVTLFPPSSEELQANKATLVCLISDFYPGAVTVAWKADSSPVKAGVETTTPSKQSNNKYAASSYLSLTPEQWKSHRSYSCQVTHEGSTVEKTVAPTECS

SEQ ID NO: 711 - protein, 109 aa, synthetic construct
QSALTQPASVSGSPGQSITISCTATSSDVGDYNYVSWYQQHPGKAPKLMIFEVSDRPSGISNRFSGSKSGNTASLTISGLQAEDEADYYCSSYTTSSAVFGGGTKLTVL

SEQ ID NO: 712 - protein, 9 aa, synthetic construct
SSDVGDYNY

SEQ ID NO: 713 - protein, 9 aa, synthetic construct
SSYTTSSAV

SEQ ID NO: 714 - protein, 449 aa, synthetic construct
QITLKESGPTLVKPTQTLTLTCTFSGFSLSISGVGVGWLRQPPGKALEWLALIYWDDDKRYSPSLKSRLTISKDTSKNQVVLKMTNIDPVDTATYYCAHHSISTIFDHWGQGTLVTVSSASTKGPSVFPLAPSSKSTSGGTAALGCLVKDYFPEPVTVSWNSGALTSGVHTFPAVLQSSGLYSLSSVVTVPSSSLGTQTYICNVNHKPSNTKVDKRVEPKSCDKTHTCPPCPAPELLGGPSVFLFPPKPKDTLMISRTPEVTCVVVDVSHEDPEVKFNWYVDGVEVHNAKTKPREEQYNSTYRVVSVLTVLHQDWLNGKEYKCKVSNKALPAPIEKTISKAKGQPREPQVYTLPPSREEMTKNQVSLTCLVKGFYPSDIAVEWESNGQPENNYKTTPPVLDSDGSFFLYSKLTVDKSRWQQGNVFSCSVMHEALHNHYTQKSLSLSPGK

SEQ ID NO: 715 - protein, 119 aa, synthetic construct
QITLKESGPTLVKPTQTLTLTCTFSGFSLSISGVGVGWLRQPPGKALEWLALIYWDDDKRYSPSLKSRLTISKDTSKNQVVLKMTNIDPVDTATYYCAHHSISTIFDHWGQGTLVTVSS

SEQ ID NO: 716 - protein, 10 aa, synthetic construct
GFSLSISGVG

SEQ ID NO: 717 - protein, 11 aa, synthetic construct
AHHSISTIFDH

(The sequence listing continues in the following parts.)

1-572. (canceled)

573. An antigen binding polypeptide complex comprising a first polypeptide and a second polypeptide,
wherein the first polypeptide has a structure, from amino-terminus to carboxy-terminus, represented by:
VL1-L1-CL-L2-VL2-L3-VH2-L4-VH1-L5-CH1-CH2-CH3;
VL1-L1-CL-L2-VH2-L3-VL2-L4-VH1-L5-CH1-CH2-CH3;
VL1-L1-CH1-L2-VL2-L3-VH2-L4-VH1-L5-CL-CH2-CH3;
VL1-L1-CH1-L2-VH2-L3-VL2-L4-VH1-L5-CL-CH2-CH3;
VH1-L1-CL-L2-VL2-L3-VH2-L4-VL1-L5-CH1-CH2-CH3;
VH1-L1-CL-L2-VH2-L3-VL2-L4-VL1-L5-CH1-CH2-CH3;
VH1-L1-CH1-L2-VL2-L3-VH2-L4-VL1-L5-CL-CH2-CH3;
VH1-L1-CH1-L2-VH2-L3-VL2-L4-VL1-L5-CL-CH2-CH3;
VL2-L1-CL-L2-VL1-L3-VH1-L4-VH2-L5-CH1-CH2-CH3;
VL2-L1-CL-L2-VH1-L3-VL1-L4-VH2-L5-CH1-CH2-CH3;
VL2-L1-CH1-L2-VL1-L3-VH1-L4-VH2-L5-CL-CH2-CH3;
VL2-L1-CH1-L2-VH1-L3-VL1-L4-VH2-L5-CL-CH2-CH3;
VH2-L1-CL-L2-VL1-L3-VH1-L4-VL2-L5-CH1-CH2-CH3;
VH2-L1-CL-L2-VH1-L3-VL1-L4-VL2-L5-CH1-CH2-CH3;
VH2-L1-CH1-L2-VL1-L3-VH1-L4-VL2-L5-CL-CH2-CH3; or
VH2-L1-CH1-L2-VH1-L3-VL1-L4-VL2-L5-CL-CH2-CH3;
wherein the second polypeptide has a structure, from amino-terminus to carboxy-terminus, represented by:
VL3-L6-CL-L7-VL4-L8-VH4-L9-VH3-L10-CH1-CH2-CH3;
VL3-L6-CL-L7-VH4-L8-VL4-L9-VH3-L10-CH1-CH2-CH3;
VL3-L6-CH1-L7-VL4-L8-VH4-L9-VH3-L10-CL-CH2-CH3;
VL3-L6-CH1-L7-VH4-L8-VL4-L9-VH3-L10-CL-CH2-CH3;
VH3-L6-CL-L7-VL4-L8-VH4-L9-VL3-L10-CH1-CH2-CH3;
VH3-L6-CL-L7-VH4-L8-VL4-L9-VL3-L10-CH1-CH2-CH3;
VH3-L6-CH1-L7-VL4-L8-VH4-L9-VL3-L10-CL-CH2-CH3;
VH3-L6-CH1-L7-VH4-L8-VL4-L9-VL3-L10-CL-CH2-CH3;
VL4-L6-CL-L7-VL3-L8-VH3-L9-VH4-L10-CH1-CH2-CH3;
VL4-L6-CL-L7-VH3-L8-VL3-L9-VH4-L10-CH1-CH2-CH3;
VL4-L6-CH1-L7-VL3-L8-VH3-L9-VH4-L10-CL-CH2-CH3;
VL4-L6-CH1-L7-VH3-L8-VL3-L9-VH4-L10-CL-CH2-CH3;
VH4-L6-CL-L7-VL3-L8-VH3-L9-VL4-L10-CH1-CH2-CH3;
VH4-L6-CL-L7-VH3-L8-VL3-L9-VL4-L10-CH1-CH2-CH3;
VH4-L6-CH1-L7-VL3-L8-VH3-L9-VL4-L10-CL-CH2-CH3; or
VH4-L6-CH1-L7-VH3-L8-VL3-L9-VL4-L10-CL-CH2-CH3; and
wherein:
VL1 is a first immunoglobulin light chain variable region that specifically binds to a severe acute respiratory syndrome coronavirus 2 (SARS-CoV-2) protein;
VL2 is a second immunoglobulin light chain variable region that specifically binds to a SARS-CoV-2 protein;
VL3 is a third immunoglobulin light chain variable region that specifically binds to a SARS-CoV-2 protein;
VL4 is a fourth immunoglobulin light chain variable region that specifically binds to a SARS-CoV-2 protein;
VH1 is a first immunoglobulin heavy chain variable region that specifically binds to a SARS-CoV-2 protein;
VH2 is a second immunoglobulin heavy chain variable region that specifically binds to a SARS-CoV-2 protein;
VH3 is a third immunoglobulin heavy chain variable region that specifically binds to a SARS-CoV-2 protein;
VH4 is a fourth immunoglobulin heavy chain variable region that specifically binds to a SARS-CoV-2 protein;
CL is an immunoglobulin light chain constant region;
CH1 is an immunoglobulin heavy chain constant region 1;
CH2 is an immunoglobulin heavy chain constant region 2;
CH3 is an immunoglobulin heavy chain constant region 3;
L1-L10 are optional amino acid linkers; and
wherein the CH2 and the CH3 are comprised in an Fc region and wherein the Fc region further comprises an immunoglobulin hinge region.

574. The antigen binding polypeptide complex of claim 573, wherein:
VL1 comprises a CDR1 having an amino acid sequence at least 65%, at least 70%, at least 75%, at least 80%, at least 85%, at least 90%, at least 95%, at least 99%, or 100% identical to SEQ ID NO: 152 or 1045, a CDR2 having an amino acid sequence at least 65%, at least 70%, at least 75%, at least 80%, at least 85%, at least 90%, at least 95%, at least 99%, or 100% identical to SEQ ID NO: 1046 or an amino acid sequence at least 65%, at least 70%, at least 75%, at least 80%, at least 85%, at least 90%, at least 95%, at least 99%, or 100% identical to amino acid sequence GAS, and a CDR3 having an amino acid sequence at least 65%, at least 70%, at least 75%, at least 80%, at least 85%, at least 90%, at least 95%, at least 99%, or 100% identical to SEQ ID NO: 153 or 766;
VL2 comprises a CDR1 having an amino acid sequence at least 65%, at least 70%, at least 75%, at least 80%, at least 85%, at least 90%, at least 95%, at least 99%, or 100% identical to SEQ ID NO: 145 or 1050, a CDR2 having an amino acid sequence at least 65%, at least 70%, at least 75%, at least 80%, at least 85%, at least 90%, at least 95%, at least 99%, or 100% identical to SEQ ID NO: 1051 or an amino acid sequence at least 65%, at least 70%, at least 75%, at least 80%, at least 85%, at least 90%, at least 95%, at least 99%, or 100% identical to amino acid sequence AAS, and a CDR3 having an amino acid sequence at least 65%, at least 70%, at least 75%, at least 80%, at least 85%, at least 90%, at least 95%, at least 99%, or 100% identical to SEQ ID NO: 146 or 764;
VL3 comprises a CDR1 having an amino acid sequence at least 65%, at least 70%, at least 75%, at least 80%, at least 85%, at least 90%, at least 95%, at least 99%, or 100% identical to SEQ ID NO: 152 or 1045, a CDR2 having an amino acid sequence at least 65%, at least 70%, at least 75%, at least 80%, at least 85%, at least 90%, at least 95%, at least 99%, or 100% identical to SEQ ID NO: 1046 or an amino acid sequence at least 65%, at least 70%, at least 75%, at least 80%, at least 85%, at least 90%, at least 95%, at least 99%, or 100% identical to amino acid sequence GAS, and a CDR3 having an amino acid sequence at least 65%, at least 70%, at least 75%, at least 80%, at least 85%, at least 90%, at least 95%, at least 99%, or 100% identical to SEQ ID NO: 153 or 766;
VL4 comprises a CDR1 having an amino acid sequence at least 65%, at least 70%, at least 75%, at least 80%, at least 85%, at least 90%, at least 95%, at least 99%, or 100% identical to SEQ ID NO: 145 or 1050, a CDR2 having an amino acid sequence at least 65%, at least 70%, at least 75%, at least 80%, at least 85%, at least 90%, at least 95%, at least 99%, or 100% identical to SEQ ID NO: 1051 or an amino acid sequence at least 65%, at least 70%, at least 75%, at least 80%, at least 85%, at least 90%, at least 95%, at least 99%, or 100% identical to amino acid sequence AAS, and a CDR3 having an amino acid sequence at least 65%, at least 70%, at least 75%, at least 80%, at least 85%, at least 90%, at least 95%, at least 99%, or 100% identical to SEQ ID NO: 146 or 764;
VH1 comprises a CDR1 having an amino acid sequence at least 65%, at least 70%, at least 75%, at least 80%, at least 85%, at least 90%, at least 95%, at least 99%, or 100% identical to SEQ ID NO: 155 or 1047, a CDR2 having an amino acid sequence at least 65%, at least 70%, at least 75%, at least 80%, at least 85%, at least 90%, at least 95%, at least 99%, or 100% identical to SEQ ID NO: 156 or 1048, and a CDR3 having an amino acid sequence at least 65%, at least 70%, at least 75%, at least 80%, at least 85%, at least 90%, at least 95%, at least 99%, or 100% identical to SEQ ID NO: 157, 767, or 1049;
VH2 comprises a CDR1 having an amino acid sequence at least 65%, at least 70%, at least 75%, at least 80%, at least 85%, at least 90%, at least 95%, at least 99%, or 100% identical to SEQ ID NO: 148 or 1052, a CDR2 having an amino acid sequence at least 65%, at least 70%, at least 75%, at least 80%, at least 85%, at least 90%, at least 95%, at least 99%, or 100% identical to SEQ ID NO: 149 or 1053, and a CDR3 having an amino acid sequence at least 65%, at least 70%, at least 75%, at least 80%, at least 85%, at least 90%, at least 95%, at least 99%, or 100% identical to SEQ ID NO: 150, 765, or 1054;
VH3 comprises a CDR1 having an amino acid sequence at least 65%, at least 70%, at least 75%, at least 80%, at least 85%, at least 90%, at least 95%, at least 99%, or 100% identical to SEQ ID NO: 155 or 1047, a CDR2 having an amino acid sequence at least 65%, at least 70%, at least 75%, at least 80%, at least 85%, at least 90%, at least 95%, at least 99%, or 100% identical to SEQ ID NO: 156 or 1048, and a CDR3 having an amino acid sequence at least 65%, at least 70%, at least 75%, at least 80%, at least 85%, at least 90%, at least 95%, at least 99%, or 100% identical to SEQ ID NO: 157, 767, or 1049; and
VH4 comprises a CDR1 having an amino acid sequence at least 65%, at least 70%, at least 75%, at least 80%, at least 85%, at least 90%, at least 95%, at least 99%, or 100% identical to SEQ ID NO: 148 or 1052, a CDR2 having an amino acid sequence at least 65%, at least 70%, at least 75%, at least 80%, at least 85%, at least 90%, at least 95%, at least 99%, or 100% identical to SEQ ID NO: 149 or 1053, and a CDR3 having an amino acid sequence at least 65%, at least 70%, at least 75%, at least 80%, at least 85%, at least 90%, at least 95%, at least 99%, or 100% identical to SEQ ID NO: 150, 765, or 1054.

575. The antigen binding polypeptide complex of claim 574, wherein:
VL1 comprises an amino acid sequence that is at least 65%, at least 70%, at least 75%, at least 80%, at least 85%, at least 90%, at least 95%, at least 99%, or 100% identical to SEQ ID NO: 154;
VL2 comprises an amino acid sequence that is at least 65%, at least 70%, at least 75%, at least 80%, at least 85%, at least 90%, at least 95%, at least 99%, or 100% identical to SEQ ID NO: 147;
VL3 comprises an amino acid sequence that is at least 65%, at least 70%, at least 75%, at least 80%, at least 85%, at least 90%, at least 95%, at least 99%, or 100% identical to SEQ ID NO: 154;
VL4 comprises an amino acid sequence that is at least 65%, at least 70%, at least 75%, at least 80%, at least 85%, at least 90%, at least 95%, at least 99%, or 100% identical to SEQ ID NO: 147;
VH1 comprises an amino acid sequence that is at least 65%, at least 70%, at least 75%, at least 80%, at least 85%, at least 90%, at least 95%, at least 99%, or 100% identical to SEQ ID NO: 158;
VH2 comprises an amino acid sequence that is at least 65%, at least 70%, at least 75%, at least 80%, at least 85%, at least 90%, at least 95%, at least 99%, or 100% identical to SEQ ID NO: 151;
VH3 comprises an amino acid sequence that is at least 65%, at least 70%, at least 75%, at least 80%, at least 85%, at least 90%, at least 95%, at least 99%, or 100% identical to SEQ ID NO: 158; and
VH4 comprises an amino acid sequence that is at least 65%, at least 70%, at least 75%, at least 80%, at least 85%, at least 90%, at least 95%, at least 99%, or 100% identical to SEQ ID NO: 151.

576. The antigen binding polypeptide complex of claim 575, wherein the first polypeptide comprises an amino acid sequence at least 65%, at least 70%, at least 75%, at least 80%, at least 85%, at least 90%, at least 95%, at least 99%, or 100% identical to SEQ ID NO: 989 and the second polypeptide comprises an amino acid sequence at least 65%, at least 70%, at least 75%, at least 80%, at least 85%, at least 90%, at least 95%, at least 99%, or 100% identical to SEQ ID NO: 990.

577. The antigen binding polypeptide complex of claim 573, wherein the antigen binding polypeptide complex is an antibody or antigen binding fragment thereof.

578. A chimeric antigen receptor (CAR) comprising the antigen binding polypeptide complex of claim 573.

579. An immune cell comprising the CAR of claim 578.

580. A polypeptide having at least 65%, at least 70%, at least 75%, at least 80%, at least 85%, at least 90%, at least 95%, at least 99%, or 100% identity to any one of SEQ ID NOs: 381-502, 632-633, 720-721, 724-725, 728-729, 732-733, 736-737, 740-741, 744-745, 748-749, 752-753, 760-761, 887-926, 972-977, 984-985, 989-990, 993-994, 997-998, 1001-1002, 1005-1006, 1009-1010, 1013-1014, 1017-1018, 1021-1022, 1025-1026, 1029-1030, 1033-1034, 1037-1038, and 1041-1042.

581. A polynucleotide having at least 65%, at least 70%, at least 75%, at least 80%, at least 85%, at least 90%, at least 95%, at least 99%, or 100% identity to any one of SEQ ID NOs: 503-625, 718-719, 722-723, 726-727, 730-731, 734-735, 738-739, 742-743, 746-747, 750-751, 754-755, 762-763, 927-966, 978-983, 986-987, 991-992, 995-996, 999-1000, 1003-1004, 1007-1008, 1011-1012, 1015-1016, 1019-1020, 1023-1024, 1027-1028, 1031-1032, 1035-1036, 1039-1040, and 1043-1044.

582. A vector comprising the polynucleotide of claim 581.

583. A host cell comprising the vector of claim 582.

584. An mRNA encoding the polypeptide of claim 580.

585. A lipid nanoparticle (LNP) comprising the mRNA of claim 584.

586. A pharmaceutical composition comprising the antigen binding polypeptide complex of claim 573 and a pharmaceutically acceptable carrier.

587. A method of preventing or treating a SARS-CoV-2 viral infection in a subject in need thereof, comprising administering to the subject a therapeutically effective amount of the antigen binding polypeptide complex of claim 573.

588. A method of preventing or treating coronavirus disease 2019 (COVID-19) in a subject in need thereof, comprising administering to the subject a therapeutically effective amount of the antigen binding polypeptide complex of claim 573.

589. A method of diagnosing a subject as being infected with a SARS-CoV-2 virus or suspected of being infected with a SARS-CoV-2 virus, comprising (i) contacting a sample obtained from the subject with the antigen binding polypeptide complex of claim 573; (ii) detecting the presence or absence of a virus complex which contains the antigen binding polypeptide complex or a fragment thereof and a SARS-CoV-2 virus, virion, or fragment thereof; and (iii) diagnosing the subject as being infected with a SARS-CoV-2 virus or suspected of being infected with a SARS-CoV-2 virus when the presence of the virus complex is detected.

590. A method of diagnosing a subject as not being infected with a SARS-CoV-2 virus or not suspected of being infected with a SARS-CoV-2 virus, comprising (i) contacting a sample obtained from the subject with antigen binding polypeptide complex of claim 573; (ii) detecting the presence or absence of a virus complex which contains the antigen binding polypeptide complex or a fragment thereof and a SARS-CoV-2 virus, virion, or fragment thereof; and (iii) diagnosing the subject as not being infected with a SARS-CoV-2 virus or not suspected of being infected with a SARS-CoV-2 virus when the presence of the virus complex is not detected.

591. A method of diagnosing a subject as having COVID-19 or suspected of having COVID-19, comprising (i) contacting a sample obtained from the subject with the antigen binding polypeptide complex of claim 573; (ii) detecting the presence or absence of a virus complex which contains the antigen binding polypeptide complex or a fragment thereof and a SARS-CoV-2 virus, virion, or fragment thereof; and (iii) diagnosing the subject as having COVID-19 or suspected of having COVID-19 when the presence of the virus complex is detected.

592. A method of diagnosing a subject as not having COVID-19 or not suspected of having COVID-19, comprising (i) contacting a sample obtained from the subject with the antigen binding polypeptide complex of claim 573; (ii) detecting the presence or absence of a virus complex which contains the antigen binding polypeptide complex or a fragment thereof and a SARS-CoV-2 virus, virion, or fragment thereof; and (iii) diagnosing the subject as not having COVID-19 or not suspected of having COVID-19 when the presence of the virus complex is not detected.

593. An antigen binding polypeptide complex comprising a first polypeptide and a second polypeptide,
wherein the first polypeptide has a structure, from amino-terminus to carboxy-terminus, represented by:
VL1-L1-CL-L2-VL2-L3-VH2-L4-VH1-L5-CH1-CH2-CH3;
VL1-L1-CL-L2-VH2-L3-VL2-L4-VH1-L5-CH1-CH2-CH3;
VL1-L1-CH1-L2-VL2-L3-VH2-L4-VH1-L5-CL-CH2-CH3;
VL1-L1-CH1-L2-VH2-L3-VL2-L4-VH1-L5-CL-CH2-CH3;
VH1-L1-CL-L2-VL2-L3-VH2-L4-VL1-L5-CH1-CH2-CH3;
VH1-L1-CL-L2-VH2-L3-VL2-L4-VL1-L5-CH1-CH2-CH3;
VH1-L1-CH1-L2-VL2-L3-VH2-L4-VL1-L5-CL-CH2-CH3;
VH1-L1-CH1-L2-VH2-L3-VL2-L4-VL1-L5-CL-CH2-CH3;
VL2-L1-CL-L2-VL1-L3-VH1-L4-VH2-L5-CH1-CH2-CH3;
VL2-L1-CL-L2-VH1-L3-VL1-L4-VH2-L5-CH1-CH2-CH3;
VL2-L1-CH1-L2-VL1-L3-VH1-L4-VH2-L5-CL-CH2-CH3;
VL2-L1-CH1-L2-VH1-L3-VL1-L4-VH2-L5-CL-CH2-CH3;
VH2-L1-CL-L2-VL1-L3-VH1-L4-VL2-L5-CH1-CH2-CH3;
VH2-L1-CL-L2-VH1-L3-VL1-L4-VL2-L5-CH1-CH2-CH3;
VH2-L1-CH1-L2-VL1-L3-VH1-L4-VL2-L5-CL-CH2-CH3; or
VH2-L1-CH1-L2-VH1-L3-VL1-L4-VL2-L5-CL-CH2-CH3;
wherein the second polypeptide has a structure, from amino-terminus to carboxy-terminus, represented by:
VL3-L6-CL-L7-VL4-L8-VH4-L9-VH3-L10-CH1-CH2-CH3;
VL3-L6-CL-L7-VH4-L8-VL4-L9-VH3-L10-CH1-CH2-CH3;
VL3-L6-CH1-L7-VL4-L8-VH4-L9-VH3-L10-CL-CH2-CH3;
VL3-L6-CH1-L7-VH4-L8-VL4-L9-VH3-L10-CL-CH2-CH3;
VH3-L6-CL-L7-VL4-L8-VH4-L9-VL3-L10-CH1-CH2-CH3;
VH3-L6-CL-L7-VH4-L8-VL4-L9-VL3-L10-CH1-CH2-CH3;
VH3-L6-CH1-L7-VL4-L8-VH4-L9-VL3-L10-CL-CH2-CH3;
VH3-L6-CH1-L7-VH4-L8-VL4-L9-VL3-L10-CL-CH2-CH3;
VL4-L6-CL-L7-VL3-L8-VH3-L9-VH4-L10-CH1-CH2-CH3;
VL4-L6-CL-L7-VH3-L8-VL3-L9-VH4-L10-CH1-CH2-CH3;
VL4-L6-CH1-L7-VL3-L8-VH3-L9-VH4-L10-CL-CH2-CH3;
VL4-L6-CH1-L7-VH3-L8-VL3-L9-VH4-L10-CL-CH2-CH3;
VH4-L6-CL-L7-VL3-L8-VH3-L9-VL4-L10-CH1-CH2-CH3;
VH4-L6-CL-L7-VH3-L8-VL3-L9-VL4-L10-CH1-CH2-CH3;
VH4-L6-CH1-L7-VL3-L8-VH3-L9-VL4-L10-CL-CH2-CH3; or
VH4-L6-CH1-L7-VH3-L8-VL3-L9-VL4-L10-CL-CH2-CH3; and
wherein:
VL1 is a first immunoglobulin light chain variable region that specifically binds to (i) a tumor-associated antigen (TAA), (ii) an infectious disease antigen that is not a sarbecovirus antigen, or (iii) an other-pathology antigen;
VL2 is a second immunoglobulin light chain variable region that specifically binds to (i) a tumor-associated antigen (TAA), (ii) an infectious disease antigen that is not a sarbecovirus antigen, or (iii) an other-pathology antigen;
VL3 is a third immunoglobulin light chain variable region that specifically binds to (i) a tumor-associated antigen (TAA), (ii) an infectious disease antigen that is not a sarbecovirus antigen, or (iii) an other-pathology antigen;
VL4 is a fourth immunoglobulin light chain variable region that specifically binds to (i) a tumor-associated antigen (TAA), (ii) an infectious disease antigen that is not a sarbecovirus antigen, or (iii) an other-pathology antigen;
VH1 is a first immunoglobulin heavy chain variable region that specifically binds to (i) a tumor-associated antigen (TAA), (ii) an infectious disease antigen that is not a sarbecovirus antigen, or (iii) an other-pathology antigen;
VH2 is a second immunoglobulin heavy chain variable region that specifically binds to (i) a tumor-associated antigen (TAA), (ii) an infectious disease antigen that is not a sarbecovirus antigen, or (iii) an other-pathology antigen;
VH3 is a third immunoglobulin heavy chain variable region that specifically binds to (i) a tumor-associated antigen (TAA), (ii) an infectious disease antigen that is not a sarbecovirus antigen, or (iii) an other-pathology antigen;
VH4 is a fourth immunoglobulin heavy chain variable region that specifically binds to (i) a tumor-associated antigen (TAA), (ii) an infectious disease antigen that is not a sarbecovirus antigen, or (iii) an other-pathology antigen;
CL is an immunoglobulin light chain constant region;
CH1 is an immunoglobulin heavy chain constant region 1;
CH2 is an immunoglobulin heavy chain constant region 2;
CH3 is an immunoglobulin heavy chain constant region 3;
L1-L10 are optional amino acid linkers; and
wherein the CH2 and the CH3 are comprised in an Fc region and wherein the Fc region further comprises an immunoglobulin hinge region.

594. A method of preventing or treating (i) a cancer or a tumor, (ii) an infectious disease that is not a sarbecovirus infectious disease, or (iii) a pathology other than a cancer or a tumor or an infectious disease that is not a sarbecovirus infectious disease, comprising administering to the subject a therapeutically effective amount of the antigen binding polypeptide complex of claim 593.

595. A method of diagnosing a subject as having or as being suspected of having (i) a cancer or a tumor, (ii) an infectious disease that is not a sarbecovirus infectious disease, or (iii) a pathology other than a cancer or a tumor or an infectious disease that is not a sarbecovirus infectious disease, comprising (a) contacting a sample obtained from the subject with the antigen binding polypeptide complex of claim 593; (b) detecting the presence or absence of a complex which contains the antigen binding polypeptide complex or a fragment thereof and (i) a tumor-associated antigen (TAA) or fragment thereof, (ii) an infectious disease antigen that is not a sarbecovirus antigen or fragment thereof, or (iii) an other-pathology antigen or fragment thereof; and (c) diagnosing the subject as having or as being suspected of having (i) a cancer or a tumor, (ii) an infectious disease that is not a sarbecovirus infectious disease, or (iii) a pathology other than a cancer or a tumor or an infectious disease that is not a sarbecovirus infectious disease when the presence of the complex is detected.

596. A method of diagnosing a subject as not having or as not being suspected of having (i) a cancer or a tumor, (ii) an infectious disease that is not a sarbecovirus infectious disease, or (iii) a pathology other than a cancer or a tumor or an infectious disease that is not a sarbecovirus infectious disease, comprising (a) contacting a sample obtained from the subject with the antigen binding polypeptide complex of claim 593; (b) detecting the presence or absence of a complex which contains the antigen binding polypeptide complex or a fragment thereof and (i) a tumor-associated antigen (TAA) or fragment thereof, (ii) an infectious disease antigen that is not a sarbecovirus antigen or fragment thereof, or (iii) an other-pathology antigen or fragment thereof; and (c) diagnosing the subject as not having or as not being suspected of having (i) a cancer or a tumor, (ii) an infectious disease that is not a sarbecovirus infectious disease, or (iii) a pathology other than a cancer or a tumor or an infectious disease that is not a sarbecovirus infectious disease when the presence of the complex is not detected.
